(19) United States
(12) Patent Application Publication
(10) Pub. No.: US 2007/0105122 A1
(43) Pub. Date: May 10, 2007

(54) Primers for synthesizing full-length cDNA and their use

(75) Inventors: Toshio Ota, Fujisawa-shi (JP); Takao Isogai, Inashiki-gun (JP); Tetsuo Nishikawa, Tokyo (JP); Koji Hayashi, Ichihara-shi (JP); Kaoru Saito, Kisarazu-shi (JP); Junichi Yamamoto, Kisarazu-shi (JP); Shizuko Ishii, Kisarazu-shi (JP); Tomoyasu Sugiyama, Kisarazu-shi (JP); Ai Wakamatsu, Kisarazu-shi (JP); Keiichi Nagai, Tokyo (JP); Tetsuji Otsuki, Kisarazu-shi (JP)

Correspondence Address: FOLEY AND LARDNER LLP;SUITE 500, 3000 K STREET NW, WASHINGTON, DC, 20007, US

(73) Assignee: RESEARCH ASSOCIATION FOR BIOTECHNOLOGY

(21) Appl. No.: 10/917,503

(22) Filed: Aug. 13, 2004

Related U.S. Application Data
(62) Division of application No. 09/629,469, filed on Jul. 28, 2000, now abandoned.
(60) Provisional application No. 60/159,590, filed on Oct. 18, 1999.
(60) Provisional application No. 60/183,322, filed on Feb. 17, 2000.

(30) Foreign Application Priority Data
Sep. 29, 1999 (JP) 11-248036
Aug. 27, 1999 (JP) 11-300253
Jan. 11, 2000 (JP) 2000-118776
May 2, 2000 (JP) 2000-183767
Jun. 9, 2000 (JP) 2000-241899

(51) Int. Cl. C12Q 1/68; C07H 21/04; C12P 21/06; C07K 14/705

(52) U.S. Cl. 435/6; 536/23.2; 530/350; 435/69.1; 435/320.1; 435/325

(57) ABSTRACT

Primers for synthesizing full-length cDNAs and their use are provided. 5602 cDNA encoding a human protein has been isolated and nucleotide sequences of 5′-, and 3′-ends of the cDNA have been determined. Furthermore, primers for synthesizing the full-length cDNA have been provided to clarify the function of the protein encoded by the cDNA. The full-length cDNA of the present invention containing the translation start site provides information useful for analyzing the functions of the protein.

### FIELD OF THE INVENTION

[0001] The present invention relates to a polynucleotide encoding a novel protein, a protein encoded by the polynucleotide, and new uses of these.

### BACKGROUND OF THE INVENTION

[0002] Currently, the sequencing projects, the determination and analysis of the genomic DNA of various living organisms have been in progress all over the world. The whole genomic sequences of more than 10 species of prokaryotes, a lower eukaryote, yeast, and a multicellular eukaryote, C. elegans are already determined. As to human genome, which is supposed to be composed of three thousand million base pairs, the world wide cooperative projects have been under way to analyze it, and the whole structure is predicted to be determined by the years 2002-2003. The aim of the determination of genomic sequence is to reveal the functions of all genes and their regulation and to understand living organisms as a network of interactions between genes, proteins, cells or individuals through deducing the information in a genome, which is a blueprint of the highly complicated living organisms. To understand living organisms by utilizing the genomic information from various species is not only important as an academic subject, but also socially significant from the viewpoint of industrial application.

[0003] However, determination of genomic sequences itself cannot identify the functions of all genes. For example, as for yeast, only the function of approximately half of the 6000 genes, which is predicted based on the genomic sequence, was able to be deduced. As for human, the number of the genes is predicted to be approximately one hundred thousand. Therefore, it is desirable to establish “a high throughput analysis system of the gene functions” which allows us to identify rapidly and efficiently the functions of vast amounts of the genes obtained by the genomic sequencing.

[0004] Many genes in the eukaryotic genome are split by introns into multiple exons. Thus, it is difficult to predict correctly the structure of encoded protein solely based on genomic information. In contrast, cDNA, which is produced from mRNA that lacks introns, encodes a protein as a single continuous amino acid sequence and allows us to identify the primary structure of the protein easily. In human cDNA research, to date, more than one million ESTs (Expression Sequence Tags) are publicly available, and the ESTs presumably cover not less than 80% of all human genes.

[0005] The information of ESTs is utilized for analyzing the structure of human genome, or for predicting the exon-regions of genomic sequences or their expression profile. However, many human ESTs have been derived from proximal regions to the 3′-end of cDNA, and information around the 5′-end of mRNA is extremely little. Among these human cDNAs, the number of the corresponding mRNAs whose encoding protein sequences are deduced is approximately 7000, and further, the number of full-length therein is only 5500. Thus, even including cDNA registered as EST, the percentage of human cDNA obtained so far is estimated to be 10-15% of all the genes.

[0006] It is possible to identify the transcription start site of mRNA on the genomic sequence based on the 5′-end sequence of a full-length cDNA, and to analyze factors involved in the stability of mRNA that is contained in the cDNA, or in its regulation of expression at the translation stage. Also, since a full-length cDNA contains ATG, the translation start site, in the 5′-region, it can be translated into a protein in a correct frame. Therefore, it is possible to produce a large amount of the protein encoded by the cDNA or to analyze biological activity of the expressed protein by utilizing an appropriate expression system. Thus, analysis of a full-length cDNA provides valuable information which complements the information from genome sequencing. Also, full-length cDNA clones that can be expressed are extremely valuable in empirical analysis of gene function and in industrial application.

[0007] Therefore, if a novel human full-length cDNA is isolated, it can be used for developing medicines for diseases in which the gene is involved. The protein encoded by the gene can be used as a drug by itself. Thus, it has great significance to obtain a full-length cDNA encoding a novel human protein.

[0008] In particular, human secretory proteins or membrane proteins would be useful by itself as a medicine like tissue plasminogen activator (TPA), or as a target of medicines like membrane receptors. In addition, genes for signal transduction-associated proteins (protein kinases, etc.), glycoprotein-associated proteins, transcription-associated proteins, etc. are genes whose relationships to human diseases have been elucidated. Moreover, genes for disease-associated proteins form a gene group rich in genes whose relationships to human diseases have been elucidated.

[0009] Therefore, it has great significance to isolate novel full-length cDNA clones of human, only few of which has been isolated. Especially, isolation of a novel cDNA clone encoding a secretory protein or membrane protein is desired since the protein itself would be useful as a medicine, and also the clones potentially include a gene associated with diseases. In addition, genes encoding proteins that are associated with signal transduction, glycoprotein, transcription, or diseases are expected to be useful as target molecules for therapy, or as medicines themselves. These genes form a gene group predicted to be strongly associated with diseases. Thus, identification of the full-length cDNA clones encoding those proteins has great significance.

### SUMMARY OF THE INVENTION

[0010] An objective of the present invention is to provide a polynucleotide encoding a novel protein, a protein encoded by said polynucleotide, and novel usages of these.

[0011] The inventors have developed a method for efficiently cloning a human full-length cDNA that is predicted by the ATGpr etc. to be a full-length cDNA clone, from a full-length-enriched cDNA library that is synthesized by the oligo-capping method. Then, the inventors determined the nucleotide sequence of the obtained cDNA clones from both 5′- and 3′- ends.

[0012] Furthermore, the inventors analyzed the obtained clones by the BLAST search of the databases, SwissProt (http://www.ebi.ac.uk/ebi_docsSwissProt_db/swisshome.html), GenBank (http://www.ncbi.nlm.nih.gov/web/GenBank), and UniGene (Human) (http://www.ncbi.nlm.nih.gov/UniGene).

[0013] The full-length cDNA clones of the present invention have high fullness ratio since these were obtained by the combination of (1) construction of a full-length-enriched cDNA library that is synthesized by the oligo-capping method, and (2) a system in which the full-length ratio is evaluated from the nucleotide sequence of the 5′-end (selection based on the ATGpr, previously removed complete sequences to ESTs). However, the primer of the present invention enables to obtain full-length cDNA easily without any specialized methods as in the described method.

[0014] Homology analysis in which the analysis is carried out against a not-full-length cDNA fragment to postulate the function of a protein encoded by said fragment, is being commonly performed. However, since such analysis is based on the information of the fragment, it is not clear as to whether this fragment corresponds to a part that is functionally important in the protein. In other words, the reliability of the homology analysis based on the information of a fragment is doubtful, as information related to the structure of the whole protein is not available. However, the homology analysis of the present invention is conducted based on the information of a full-length cDNA comprising the whole coding region of the cDNA, and therefore, the homology of various portions of the protein can be analyzed. Hence, the reliability of the homology analysis has been dramatically improved in the present invention.

[0015] The inventors completed the invention by finding that it is possible to synthesize a novel full-length cDNA by using the combination of a primer that is designed based on the nucleotide sequence of the 5′-ends of the selected full-length cDNA clones and any of an oligo-dT primer or a 3′-primer that is designed based on the nucleotide sequence of the 3′-ends of the selected clones.

[0016] Thus, the present invention relates to primers described below, a method for synthesizing a polynucleotide using the primers, and polynucleotides obtained by the method.

[0017] First, the present invention relates to

[0018] (1) use of an oligonucleotide as a primer for synthesizing the polynucleotide comprising the nucleotide sequence set forth in any one of SEQ ID NOs: 1-5547 and SEQ ID NOs: 16111-16164, or the complementary strand thereof, wherein said oligonucleotide is complementary to said polynucleotide or the complementary strand thereof and comprises at least 15 nucleotides;

[0019] (2) a primer set for synthesizing polynucleotides, the primer set comprising an oligo-dT primer and an oligonucleotide complementary to the complementary strand of the polynucleotide comprising the nucleotide sequence set forth in any one of SEQ ID NOs: 1-5547 and SEQ ID NOs: 16111-16164, wherein said oligonucleotide comprises at least 15 nucleotides; and

[0020] (3) a primer set for synthesizing polynucleotides, the primer set comprising a combination of an oligonucleotide comprising a nucleotide sequence complementary to the complementary strand of the polynucleotide comprising a 5′-end nucleotide sequence and an oligonucleotide comprising a nucleotide sequence complementary to the polynucleotide comprising a 3′-end nucleotide sequence, wherein said oligonucleotides comprise at least 15 nucleotides and wherein said combination of 5′-end nucleotide sequence/3′-end nucleotide sequence is selected from the combinations of 5′-end nucleotide sequence/3′-end nucleotide sequence set forth in the SEQ ID NOs in Tables 1 and 2.

[0021] Tables 1 and 2 shows names of clones obtained in the examples described later, comprising the polynucleotide of the present invention (Table 1; 5547 clones, Table 2; 54 clones), names of nucleotide sequences at the 5′-end and 3′-end of the full-length cDNA, and their corresponding SEQ ID NOs. A blank indicates that the 3′-end sequence corresponding to the 5′-end sequence has not been determined for the same clone.

[0022] The SEQ ID NO of a 5′-end sequence is shown on the right side of the name of the 5′-end sequence, and the SEQ ID NO of a 3′-end sequence is shown on the right side of the name of the 3′-end sequence.

TABLE 1

| | name of | SEQ ID | name of | SEQ ID |
|---|---|---|---|---|
| name of | 5′-end | of 5′-end | 3′-end | of 3′-end |
| clone | sequence | sequence | sequence | sequence |
| HEMBA1000005 | F-HEMBA1000005 | 1 | R-HEMBA1000005 | 5548 |
| HEMBA1000012 | F-HEMBA1000012 | 2 | | |
| HEMBA1000020 | F-HEMBA1000020 | 3 | | |
| HEMBA1000030 | F-HEMBA1000030 | 4 | R-HEMBA1000030 | 5549 |
| HEMBA1000042 | F-HEMBA1000042 | 5 | R-HEMBA1000042 | 5550 |
| HEMBA1000046 | F-HEMBA1000046 | 6 | R-HEMBA1000046 | 5551 |
| HEMBA1000050 | F-HEMBA1000050 | 7 | R-HEMBA1000050 | 5552 |
| HEMBA1000076 | F-HEMBA1000076 | 8 | R-HEMBA1000076 | 5553 |
| HEMBA1000111 | F-HEMBA1000111 | 9 | R-HEMBA1000111 | 5554 |
| HEMBA1000129 | F-HEMBA1000129 | 10 | R-HEMBA1000129 | 5555 |
| HEMBA1000141 | F-HEMBA1000141 | 11 | R-HEMBA1000141 | 5556 |
| HEMBA1000150 | F-HEMBA1000150 | 12 | R-HEMBA1000150 | 5557 |
| HEMBA1000156 | F-HEMBA1000156 | 13 | R-nnnnnnnnnnnn | 5558 |
| HEMBA1000158 | F-HEMBA1000158 | 14 | R-HEMBA1000158 | 5559 |
| HEMBA1000168 | F-HEMBA1000168 | 15 | R-nnnnnnnnnnnn | 5560 |
| HEMBA1000180 | F-HEMBA1000180 | 16 | R-HEMBA1000180 | 5561 |
| HEMBA1000185 | F-HEMBA1000185 | 17 | R-HEMBA1000185 | 5562 |
| HEMBA1000193 | F-HEMBA1000193 | 18 | R-HEMBA1000193 | 5563 |
| HEMBA1000201 | F-HEMBA1000201 | 19 | R-HEMBA1000201 | 5564 |
| HEMBA1000213 | F-HEMBA1000213 | 20 | R-HEMBA1000213 | 5565 |
| HEMBA1000216 | F-HEMBA1000216 | 21 | R-HEMBA1000216 | 5566 |
| HEMBA1000227 | F-HEMBA1000227 | 22 | R-nnnnnnnnnnnn | 5567 |
| HEMBA1000231 | F-HEMBA1000231 | 23 | R-HEMBA1000231 | 5568 |
| HEMBA1000243 | F-HEMBA1000243 | 24 | R-HEMBA1000243 | 5569 |
| HEMBA1000244 | F-HEMBA1000244 | 25 | R-HEMBA1000244 | 5570 |
| HEMBA1000251 | F-HEMBA1000251 | 26 | R-HEMBA1000251 | 5571 |
| HEMBA1000264 | F-HEMBA1000264 | 27 | R-HEMBA1000264 | 5572 |
| HEMBA1000280 | F-HEMBA1000280 | 28 | R-nnnnnnnnnnnn | 5573 |
| HEMBA1000282 | F-HEMBA1000282 | 29 | R-HEMBA1000282 | 5574 |
| HEMBA1000288 | F-HEMBA1000288 | 30 | R-HEMBA1000288 | 5575 |
| HEMBA1000290 | F-HEMBA1000290 | 31 | R-HEMBA1000290 | 5576 |
| HEMBA1000302 | F-HEMBA1000302 | 32 | R-HEMBA1000302 | 5577 |
| HEMBA1000303 | F-HEMBA1000303 | 33 | R-nnnnnnnnnnnn | 5578 |
| HEMBA1000304 | F-HEMBA1000304 | 34 | R-nnnnnnnnnnnn | 5579 |
| HEMBA1000307 | F-HEMBA1000307 | 35 | R-HEMBA1000307 | 5580 |
| HEMBA1000327 | F-HEMBA1000327 | 36 | | |
| HEMBA1000333 | F-HEMBA1000333 | 37 | R-nnnnnnnnnnnn | 5581 |
| HEMBA1000338 | F-HEMBA1000338 | 38 | R-HEMBA1000338 | 5582 |
| HEMBA1000351 | F-HEMBA1000351 | 39 | R-HEMBA1000351 | 5583 |
| HEMBA1000355 | F-HEMBA1000355 | 40 | R-HEMBA1000355 | 5584 |
| HEMBA1000356 | F-HEMBA1000356 | 41 | | |
| HEMBA1000357 | F-HEMBA1000357 | 42 | R-HEMBA1000357 | 5585 |
| HEMBA1000366 | F-HEMBA1000366 | 43 | R-HEMBA1000366 | 5586 |
| HEMBA1000369 | F-HEMBA1000369 | 44 | R-HEMBA1000369 | 5587 |
| HEMBA1000376 | F-HEMBA1000376 | 45 | R-HEMBA1000376 | 5588 |
| HEMBA1000387 | F-HEMBA1000387 | 46 | R-HEMBA1000387 | 5589 |
| HEMBA1000390 | F-HEMBA1000390 | 47 | R-HEMBA1000390 | 5590 |
| HEMBA1000392 | F-HEMBA1000392 | 48 | R-HEMBA1000392 | 5591 |
| HEMBA1000396 | F-HEMBA1000396 | 49 | R-HEMBA1000396 | 5592 |
| HEMBA1000411 | F-HEMBA1000411 | 50 | R-HEMBA1000411 | 5593 |
| HEMBA1000418 | F-HEMBA1000418 | 51 | R-HEMBA1000418 | 5594 |
| HEMBA1000422 | F-HEMBA1000422 | 52 | R-HEMBA1000422 | 5595 |
| HEMBA1000428 | F-HEMBA1000428 | 53 | R-HEMBA1000428 | 5596 |
| HEMBA1000434 | F-HEMBA1000434 | 54 | R-HEMBA1000434 | 5597 |
| HEMBA1000442 | F-HEMBA1000442 | 55 | R-HEMBA1000442 | 5598 |
| HEMBA1000456 | F-HEMBA1000456 | 56 | R-HEMBA1000456 | 5599 |
| HEMBA1000459 | F-HEMBA1000459 | 57 | R-HEMBA1000459 | 5600 |
| HEMBA1000460 | F-HEMBA1000460 | 58 | R-HEMBA1000460 | 5601 |
| HEMBA1000464 | F-HEMBA1000464 | 59 | R-HEMBA1000464 | 5602 |
| HEMBA1000469 | F-HEMBA1000469 | 60 | R-HEMBA1000469 | 5603 |
| HEMBA1000488 | F-HEMBA1000488 | 61 | R-HEMBA1000488 | 5604 |
| HEMBA1000490 | F-HEMBA1000490 | 62 | R-HEMBA1000490 | 5605 |
| HEMBA1000491 | F-HEMBA1000491 | 63 | R-HEMBA1000491 | 5606 |
| HEMBA1000501 | F-HEMBA1000501 | 64 | | |
| HEMBA1000504 | F-HEMBA1000504 | 65 | R-HEMBA1000504 | 5607 |
| HEMBA1000505 | F-HEMBA1000505 | 66 | R-HEMBA1000505 | 5608 |
| HEMBA1000508 | F-HEMBA1000508 | 67 | R-HEMBA1000508 | 5609 |
| HEMBA1000518 | F-HEMBA1000518 | 68 | R-HEMBA1000518 | 5610 |
| HEMBA1000519 | F-HEMBA1000519 | 69 | R-HEMBA1000519 | 5611 |
| HEMBA1000520 | F-HEMBA1000520 | 70 | R-HEMBA1000520 | 5612 |
| HEMBA1000523 | F-HEMBA1000523 | 71 | R-HEMBA1000523 | 5613 |
| HEMBA1000531 | F-HEMBA1000531 | 72 | R-HEMBA1000531 | 5614 |
| HEMBA1000534 | F-HEMBA1000534 | 73 | | |
| HEMBA1000540 | F-HEMBA1000540 | 74 | R-HEMBA1000540 | 5615 |
| HEMBA1000542 | F-HEMBA1000542 | 75 | | |
| HEMBA1000545 | F-HEMBA1000545 | 76 | R-HEMBA1000545 | 5616 |
| HEMBA1000555 | F-HEMBA1000555 | 77 | R-nnnnnnnnnnnn | 5617 |
| HEMBA1000557 | F-HEMBA1000557 | 78 | R-HEMBA1000557 | 5618 |
| HEMBA1000561 | F-HEMBA1000561 | 79 | R-HEMBA1000561 | 5619 |
| HEMBA1000563 | F-HEMBA1000563 | 80 | R-HEMBA1000563 | 5620 |
| HEMBA1000568 | F-HEMBA1000568 | 81 | R-HEMBA1000568 | 5621 |
| HEMBA1000569 | F-HEMBA1000569 | 82 | R-nnnnnnnnnnnn | 5622 |
| HEMBA1000575 | F-HEMBA1000575 | 83 | R-HEMBA1000575 | 5623 |
| HEMBA1000588 | F-HEMBA1000588 | 84 | R-HEMBA1000588 | 5624 |
| HEMBA1000591 | F-HEMBA1000591 | 85 | R-HEMBA1000591 | 5625 |
| HEMBA1000592 | F-HEMBA1000592 | 86 | R-HEMBA1000592 | 5626 |
| HEMBA1000594 | F-HEMBA1000594 | 87 | R-HEMBA1000594 | 5627 |
| HEMBA1000604 | F-HEMBA1000604 | 88 | R-HEMBA1000604 | 5628 |
| HEMBA1000608 | F-HEMBA1000608 | 89 | R-HEMBA1000608 | 5629 |
| HEMBA1000622 | F-HEMBA1000622 | 90 | R-HEMBA1000622 | 5630 |
| HEMBA1000636 | F-HEMBA1000636 | 91 | R-HEMBA1000636 | 5631 |
| HEMBA1000637 | F-HEMBA1000637 | 92 | R-HEMBA1000637 | 5632 |
| HEMBA1000655 | F-HEMBA1000655 | 93 | R-HEMBA1000655 | 5633 |
| HEMBA1000657 | F-HEMBA1000657 | 94 | R-HEMBA1000657 | 5634 |
| HEMBA1000662 | F-HEMBA1000662 | 95 | R-HEMBA1000662 | 5635 |
| HEMBA1000673 | F-HEMBA1000673 | 96 | R-HEMBA1000673 | 5636 |
| HEMBA1000682 | F-HEMBA1000682 | 97 | R-HEMBA1000682 | 5637 |
| HEMBA1000686 | F-HEMBA1000686 | 98 | R-HEMBA1000686 | 5638 |
| HEMBA1000702 | F-HEMBA1000702 | 99 | R-HEMBA1000702 | 5639 |
| HEMBA1000705 | F-HEMBA1000705 | 100 | R-HEMBA1000705 | 5640 |
| HEMBA1000719 | F-HEMBA1000719 | 101 | R-HEMBA1000719 | 5641 |
| HEMBA1000722 | F-HEMBA1000722 | 102 | R-HEMBA1000722 | 5642 |
| HEMBA1000726 | F-HEMBA1000726 | 103 | R-HEMBA1000726 | 5643 |
| HEMBA1000727 | F-HEMBA1000727 | 104 | R-HEMBA1000727 | 5644 |
| HEMBA1000747 | F-HEMBA1000747 | 105 | R-HEMBA1000747 | 5645 |
| HEMBA1000749 | F-HEMBA1000749 | 106 | R-HEMBA1000749 | 5646 |
| HEMBA1000752 | F-HEMBA1000752 | 107 | R-HEMBA1000752 | 5647 |
| HEMBA1000769 | F-HEMBA1000769 | 108 | R-HEMBA1000769 | 5648 |
| HEMBA1000773 | F-HEMBA1000773 | 109 | R-HEMBA1000773 | 5649 |
| HEMBA1000774 | F-HEMBA1000774 | 110 | R-HEMBA1000774 | 5650 |
| HEMBA1000791 | F-HEMBA1000791 | 111 | R-HEMBA1000791 | 5651 |
| HEMBA1000817 | F-HEMBA1000817 | 112 | R-HEMBA1000817 | 5652 |
| HEMBA1000822 | F-HEMBA1000822 | 113 | R-HEMBA1000822 | 5653 |
| HEMBA1000827 | F-HEMBA1000827 | 114 | R-HEMBA1000827 | 5654 |
| HEMBA1000843 | F-HEMBA1000843 | 115 | R-HEMBA1000843 | 5655 |
| HEMBA1000851 | F-HEMBA1000851 | 116 | R-HEMBA1000851 | 5656 |
| HEMBA1000852 | F-HEMBA1000852 | 117 | R-HEMBA1000852 | 5657 |
| HEMBA1000867 | F-HEMBA1000867 | 118 | R-HEMBA1000867 | 5658 |
| HEMBA1000869 | F-HEMBA1000869 | 119 | R-HEMBA1000869 | 5659 |
| HEMBA1000870 | F-HEMBA1000870 | 120 | R-HEMBA1000870 | 5660 |
| HEMBA1000872 | F-HEMBA1000872 | 121 | R-HEMBA1000872 | 5661 |
| HEMBA1000876 | F-HEMBA1000876 | 122 | R-HEMBA1000876 | 5662 |
| HEMBA1000908 | F-HEMBA1000908 | 123 | R-HEMBA1000908 | 5663 |
| HEMBA1000910 | F-HEMBA1000910 | 124 | R-HEMBA1000910 | 5664 |
| HEMBA1000918 | F-HEMBA1000918 | 125 | R-HEMBA1000918 | 5665 |
| HEMBA1000919 | F-HEMBA1000919 | 126 | R-HEMBA1000919 | 5666 |
| HEMBA1000934 | F-HEMBA1000934 | 127 | R-HEMBA1000934 | 5667 |
| HEMBA1000942 | F-HEMBA1000942 | 128 | R-HEMBA1000942 | 5668 |
| HEMBA1000943 | F-HEMBA1000943 | 129 | R-HEMBA1000943 | 5669 |
| HEMBA1000946 | F-HEMBA1000946 | 130 | R-HEMBA1000946 | 5670 |
| HEMBA1000960 | F-HEMBA1000960 | 131 | R-HEMBA1000960 | 5671 |
| HEMBA1000968 | F-HEMBA1000968 | 132 | R-HEMBA1000968 | 5672 |
| HEMBA1000971 | F-HEMBA1000971 | 133 | R-HEMBA1000971 | 5673 |
| HEMBA1000972 | F-HEMBA1000972 | 134 | R-HEMBA1000972 | 5674 |
| HEMBA1000974 | F-HEMBA1000974 | 135 | R-HEMBA1000974 | 5675 |
| HEMBA1000975 | F-HEMBA1000975 | 136 | R-HEMBA1000975 | 5676 |
| HEMBA1000985 | F-HEMBA1000985 | 137 | R-HEMBA1000985 | 5677 |
| HEMBA1000986 | F-HEMBA1000986 | 138 | R-HEMBA1000986 | 5678 |
| HEMBA1000991 | F-HEMBA1000991 | 139 | R-HEMBA1000991 | 5679 |
| HEMBA1001007 | F-HEMBA1001007 | 140 | R-HEMBA1001007 | 5680 |
| HEMBA1001008 | F-HEMBA1001008 | 141 | R-HEMBA1001008 | 5681 |
| HEMBA1001009 | F-HEMBA1001009 | 142 | R-HEMBA1001009 | 5682 |
| HEMBA1001017 | F-HEMBA1001017 | 143 | R-HEMBA1001017 | 5683 |
| HEMBA1001019 | F-HEMBA1001019 | 144 | R-HEMBA1001019 | 5684 |
| HEMBA1001020 | F-HEMBA1001020 | 145 | R-HEMBA1001020 | 5685 |
| HEMBA1001022 | F-HEMBA1001022 | 146 | R-HEMBA1001022 | 5686 |
| HEMBA1001024 | F-HEMBA1001024 | 147 | R-HEMBA1001024 | 5687 |
| HEMBA1001026 | F-HEMBA1001026 | 148 | R-HEMBA1001026 | 5688 |
| HEMBA1001043 | F-HEMBA1001043 | 149 | R-nnnnnnnnnnnn | 5689 |
| HEMBA1001051 | F-HEMBA1001051 | 150 | R-HEMBA1001051 | 5690 |
| HEMBA1001052 | F-HEMBA1001052 | 151 | R-HEMBA1001052 | 5691 |
| HEMBA1001059 | F-HEMBA1001059 | 152 | | |
| HEMBA1001060 | F-HEMBA1001060 | 153 | R-HEMBA1001060 | 5692 |
| HEMBA1001071 | F-HEMBA1001071 | 154 | R-HEMBA1001071 | 5693 |
| HEMBA1001077 | F-HEMBA1001077 | 155 | R-HEMBA1001077 | 5694 |
| HEMBA1001080 | F-HEMBA1001080 | 156 | R-HEMBA1001080 | 5695 |
| HEMBA1001085 | F-HEMBA1001085 | 157 | R-HEMBA1001085 | 5696 |
| HEMBA1001088 | F-HEMBA1001088 | 158 | R-HEMBA1001088 | 5697 |
| HEMBA1001094 | F-HEMBA1001094 | 159 | R-HEMBA1001094 | 5698 |
| HEMBA1001099 | F-HEMBA1001099 | 160 | R-HEMBA1001099 | 5699 |
| HEMBA1001109 | F-HEMBA1001109 | 161 | R-HEMBA1001109 | 5700 |
| HEMBA1001121 | F-HEMBA1001121 | 162 | R-HEMBA1001121 | 5701 |
| HEMBA1001122 | F-HEMBA1001122 | 163 | R-HEMBA1001122 | 5702 |
| HEMBA1001123 | F-HEMBA1001123 | 164 | R-HEMBA1001123 | 5703 |
| HEMBA1001133 | F-HEMBA1001133 | 165 | R-HEMBA1001133 | 5704 |
| HEMBA1001137 | F-HEMBA1001137 | 166 | R-HEMBA1001137 | 5705 |
| HEMBA1001140 | F-HEMBA1001140 | 167 | R-HEMBA1001140 | 5706 |
| HEMBA1001172 | F-HEMBA1001172 | 168 | R-HEMBA1001172 | 5707 |
| HEMBA1001174 | F-HEMBA1001174 | 169 | R-HEMBA1001174 | 5708 |
| HEMBA1001197 | F-HEMBA1001197 | 170 | R-HEMBA1001197 | 5709 |
| HEMBA1001208 | F-HEMBA1001208 | 171 | R-HEMBA1001208 | 5710 |
| HEMBA1001213 | F-HEMBA1001213 | 172 | | |
| HEMBA1001226 | F-HEMBA1001226 | 173 | R-HEMBA1001226 | 5711 |
| HEMBA1001235 | F-HEMBA1001235 | 174 | R-HEMBA1001235 | 5712 |
| HEMBA1001247 | F-HEMBA1001247 | 175 | R-HEMBA1001247 | 5713 |
| HEMBA1001257 | F-HEMBA1001257 | 176 | R-HEMBA1001257 | 5714 |
| HEMBA1001265 | F-HEMBA1001265 | 177 | R-HEMBA1001265 | 5715 |
| HEMBA1001281 | F-HEMBA1001281 | 178 | R-nnnnnnnnnnnn | 5716 |
| HEMBA1001286 | F-HEMBA1001286 | 179 | R-HEMBA1001286 | 5717 |
| HEMBA1001289 | F-HEMBA1001289 | 180 | R-HEMBA1001289 | 5718 |
| HEMBA1001294 | F-HEMBA1001294 | 181 | R-HEMBA1001294 | 5719 |
| HEMBA1001299 | F-HEMBA1001299 | 182 | R-HEMBA1001299 | 5720 |
| HEMBA1001302 | F-HEMBA1001302 | 183 | R-HEMBA1001302 | 5721 |
| HEMBA1001303 | F-HEMBA1001303 | 184 | R-HEMBA1001303 | 5722 |
| HEMBA1001310 | F-HEMBA1001310 | 185 | R-HEMBA1001310 | 5723 |
| HEMBA1001319 | F-HEMBA1001319 | 186 | R-HEMBA1001319 | 5724 |
| HEMBA1001323 | F-HEMBA1001323 | 187 | R-HEMBA1001323 | 5725 |
| HEMBA1001326 | F-HEMBA1001326 | 188 | R-HEMBA1001326 | 5726 |
| HEMBA1001327 | F-HEMBA1001327 | 189 | R-HEMBA1001327 | 5727 |
| HEMBA1001330 | F-HEMBA1001330 | 190 | R-HEMBA1001330 | 5728 |
| HEMBA1001351 | F-HEMBA1001351 | 191 | R-HEMBA1001351 | 5729 |
| HEMBA1001361 | F-HEMBA1001361 | 192 | R-HEMBA1001361 | 5730 |
| HEMBA1001375 | F-HEMBA1001375 | 193 | R-HEMBA1001375 | 5731 |
| HEMBA1001377 | F-HEMBA1001377 | 194 | R-HEMBA1001377 | 5732 |
| HEMBA1001383 | F-HEMBA1001383 | 195 | R-HEMBA1001383 | 5733 |
| HEMBA1001387 | F-HEMBA1001387 | 196 | R-HEMBA1001387 | 5734 |
| HEMBA1001388 | F-HEMBA1001388 | 197 | R-HEMBA1001388 | 5735 |
| HEMBA1001391 | F-HEMBA1001391 | 198 | R-HEMBA1001391 | 5736 |
| HEMBA1001398 | F-HEMBA1001398 | 199 | R-HEMBA1001398 | 5737 |
| HEMBA1001405 | F-HEMBA1001405 | 200 | R-HEMBA1001405 | 5738 |
| HEMBA1001407 | F-HEMBA1001407 | 201 | R-HEMBA1001407 | 5739 |
| HEMBA1001411 | F-HEMBA1001411 | 202 | R-HEMBA1001411 | 5740 |
| HEMBA1001413 | F-HEMBA1001413 | 203 | R-HEMBA1001413 | 5741 |
| HEMBA1001415 | F-HEMBA1001415 | 204 | R-HEMBA1001415 | 5742 |
| HEMBA1001432 | F-HEMBA1001432 | 205 | R-HEMBA1001432 | 5743 |
| HEMBA1001433 | F-HEMBA1001433 | 206 | R-HEMBA1001433 | 5744 |
| HEMBA1001435 | F-HEMBA1001435 | 207 | R-HEMBA1001435 | 5745 |
| HEMBA1001442 | F-HEMBA1001442 | 208 | R-HEMBA1001442 | 5746 |
| HEMBA1001446 | F-HEMBA1001446 | 209 | R-HEMBA1001446 | 5747 |
| HEMBA1001450 | F-HEMBA1001450 | 210 | R-HEMBA1001450 | 5748 |
| HEMBA1001454 | F-HEMBA1001454 | 211 | R-HEMBA1001454 | 5749 |
| HEMBA1001455 | F-HEMBA1001455 | 212 | R-HEMBA1001455 | 5750 |
| HEMBA1001463 | F-HEMBA1001463 | 213 | R-HEMBA1001463 | 5751 |
| HEMBA1001476 | F-HEMBA1001476 | 214 | R-HEMBA1001476 | 5752 |
| HEMBA1001478 | F-HEMBA1001478 | 215 | R-HEMBA1001478 | 5753 |
| HEMBA1001497 | F-HEMBA1001497 | 216 | R-HEMBA1001497 | 5754 |
| HEMBA1001510 | F-HEMBA1001510 | 217 | R-HEMBA1001510 | 5755 |
| HEMBA1001515 | F-HEMBA1001515 | 218 | R-HEMBA1001515 | 5756 |
| HEMBA1001517 | F-HEMBA1001517 | 219 | R-HEMBA1001517 | 5757 |
| HEMBA1001522 | F-HEMBA1001522 | 220 | R-HEMBA1001522 | 5758 |
| HEMBA1001526 | F-HEMBA1001526 | 221 | R-HEMBA1001526 | 5759 |
| HEMBA1001533 | F-HEMBA1001533 | 222 | R-HEMBA1001533 | 5760 |
| HEMBA1001557 | F-HEMBA1001557 | 223 | R-HEMBA1001557 | 5761 |
| HEMBA1001566 | F-HEMBA1001566 | 224 | R-HEMBA1001566 | 5762 |
| HEMBA1001569 | F-HEMBA1001569 | 225 | R-HEMBA1001569 | 5763 |
| HEMBA1001570 | F-HEMBA1001570 | 226 | R-HEMBA1001570 | 5764 |
| HEMBA1001579 | F-HEMBA1001579 | 227 | R-HEMBA1001579 | 5765 |
| HEMBA1001581 | F-HEMBA1001581 | 228 | R-HEMBA1001581 | 5766 |
| HEMBA1001585 | F-HEMBA1001585 | 229 | R-HEMBA1001585 | 5767 |
| HEMBA1001589 | F-HEMBA1001589 | 230 | R-HEMBA1001589 | 5768 |
| HEMBA1001595 | F-HEMBA1001595 | 231 | R-HEMBA1001595 | 5769 |
| HEMBA1001608 | F-HEMBA1001608 | 232 | R-HEMBA1001608 | 5770 |
| HEMBA1001620 | F-HEMBA1001620 | 233 | R-HEMBA1001620 | 5771 |
| HEMBA1001635 | F-HEMBA1001635 | 234 | R-nnnnnnnnnnnn | 5772 |
| HEMBA1001636 | F-HEMBA1001636 | 235 | R-HEMBA1001636 | 5773 |
| HEMBA1001640 | F-HEMBA1001640 | 236 | R-HEMBA1001640 | 5774 |
| HEMBA1001647 | F-HEMBA1001647 | 237 | | |
| HEMBA1001651 | F-HEMBA1001651 | 238 | R-nnnnnnnnnnnn | 5775 |
| HEMBA1001655 | F-HEMBA1001655 | 239 | R-HEMBA1001655 | 5776 |
| HEMBA1001658 | F-HEMBA1001658 | 240 | R-HEMBA1001658 | 5777 |
| HEMBA1001661 | F-HEMBA1001661 | 241 | R-HEMBA1001661 | 5778 |
| HEMBA1001672 | F-HEMBA1001672 | 242 | R-HEMBA1001672 | 5779 |
| HEMBA1001675 | F-HEMBA1001675 | 243 | R-HEMBA1001675 | 5780 |
| HEMBA1001678 | F-HEMBA1001678 | 244 | R-HEMBA1001678 | 5781 |
| HEMBA1001681 | F-HEMBA1001681 | 245 | R-HEMBA1001681 | 5782 |
| HEMBA1001702 | F-HEMBA1001702 | 246 | R-HEMBA1001702 | 5783 |
| HEMBA1001709 | F-HEMBA1001709 | 247 | R-HEMBA1001709 | 5784 |
| HEMBA1001711 | F-HEMBA1001711 | 248 | R-HEMBA1001711 | 5785 |
| HEMBA1001712 | F-HEMBA1001712 | 249 | R-HEMBA1001712 | 5786 |
| HEMBA1001714 | F-HEMBA1001714 | 250 | R-HEMBA1001714 | 5787 |
| HEMBA1001718 | F-HEMBA1001718 | 251 | R-HEMBA1001718 | 5788 |
| HEMBA1001723 | F-HEMBA1001723 | 252 | R-HEMBA1001723 | 5789 |
| HEMBA1001731 | F-HEMBA1001731 | 253 | R-HEMBA1001731 | 5790 |
| HEMBA1001734 | F-HEMBA1001734 | 254 | R-HEMBA1001734 | 5791 |
| HEMBA1001744 | F-HEMBA1001744 | 255 | R-HEMBA1001744 | 5792 |
| HEMBA1001745 | F-HEMBA1001745 | 256 | R-HEMBA1001745 | 5793 |
| HEMBA1001746 | F-HEMBA1001746 | 257 | R-HEMBA1001746 | 5794 |
| HEMBA1001761 | F-HEMBA1001761 | 258 | R-HEMBA1001761 | 5795 |
| HEMBA1001781 | F-HEMBA1001781 | 259 | R-HEMBA1001781 | 5796 |
| HEMBA1001784 | F-HEMBA1001784 | 260 | R-HEMBA1001784 | 5797 |
| HEMBA1001791 | F-HEMBA1001791 | 261 | R-HEMBA1001791 | 5798 |
| HEMBA1001800 | F-HEMBA1001800 | 262 | R-HEMBA1001800 | 5799 |
| HEMBA1001803 | F-HEMBA1001803 | 263 | R-HEMBA1001803 | 5800 |
| HEMBA1001804 | F-HEMBA1001804 | 264 | R-nnnnnnnnnnnn | 5801 |
| HEMBA1001808 | F-HEMBA1001808 | 265 | R-HEMBA1001808 | 5802 |
| HEMBA1001809 | F-HEMBA1001809 | 266 | R-HEMBA1001809 | 5803 |
| HEMBA1001815 | F-HEMBA1001815 | 267 | R-HEMBA1001815 | 5804 |
| HEMBA1001819 | F-HEMBA1001819 | 268 | R-HEMBA1001819 | 5805 |
| HEMBA1001820 | F-HEMBA1001820 | 269 | R-HEMBA1001820 | 5806 |
| HEMBA1001822 | F-HEMBA1001822 | 270 | R-nnnnnnnnnnnn | 5807 |
| HEMBA1001824 | F-HEMBA1001824 | 271 | R-HEMBA1001824 | 5808 |
| HEMBA1001835 | F-HEMBA1001835 | 272 | R-HEMBA1001835 | 5809 |
| HEMBA1001844 | F-HEMBA1001844 | 273 | R-HEMBA1001844 | 5810 |
| HEMBA1001847 | F-HEMBA1001847 | 274 | R-HEMBA1001847 | 5811 |
| HEMBA1001861 | F-HEMBA1001861 | 275 | R-HEMBA1001861 | 5812 |
| HEMBA1001864 | F-HEMBA1001864 | 276 | R-HEMBA1001864 | 5813 |
| HEMBA1001866 | F-HEMBA1001866 | 277 | R-HEMBA1001866 | 5814 |
| HEMBA1001869 | F-HEMBA1001869 | 278 | R-nnnnnnnnnnnn | 5815 |
| HEMBA1001888 | F-HEMBA1001888 | 279 | R-HEMBA1001888 | 5816 |
| HEMBA1001896 | F-HEMBA1001896 | 280 | R-HEMBA1001896 | 5817 |
| HEMBA1001910 | F-HEMBA1001910 | 281 | R-HEMBA1001910 | 5818 |
| HEMBA1001912 | F-HEMBA1001912 | 282 | R-HEMBA1001912 | 5819 |
| HEMBA1001913 | F-HEMBA1001913 | 283 | R-HEMBA1001913 | 5820 |
| HEMBA1001915 | F-HEMBA1001915 | 284 | R-HEMBA1001915 | 5821 |
| HEMBA1001918 | F-HEMBA1001918 | 285 | R-HEMBA1001918 | 5822 |
| HEMBA1001921 | F-HEMBA1001921 | 286 | R-HEMBA1001921 | 5823 |
| HEMBA1001939 | F-HEMBA1001939 | 287 | R-HEMBA1001939 | 5824 |
| HEMBA1001940 | F-HEMBA1001940 | 288 | R-HEMBA1001940 | 5825 |
| HEMBA1001942 | F-HEMBA1001942 | 289 | R-HEMBA1001942 | 5826 |
| HEMBA1001945 | F-HEMBA1001945 | 290 | R-HEMBA1001945 | 5827 |
| HEMBA1001950 | F-HEMBA1001950 | 291 | R-HEMBA1001950 | 5828 |
| HEMBA1001960 | F-HEMBA1001960 | 292 | R-HEMBA1001960 | 5829 |
| HEMBA1001962 | F-HEMBA1001962 | 293 | R-HEMBA1001962 | 5830 |
| HEMBA1001964 | F-HEMBA1001964 | 294 | R-HEMBA1001964 | 5831 |
| HEMBA1001967 | F-HEMBA1001967 | 295 | R-HEMBA1001967 | 5832 |
| HEMBA1001979 | F-HEMBA1001979 | 296 | R-HEMBA1001979 | 5833 |
| HEMBA1001987 | F-HEMBA1001987 | 297 | R-HEMBA1001987 | 5834 |
| HEMBA1001991 | F-HEMBA1001991 | 298 | R-HEMBA1001991 | 5835 |
| HEMBA1002003 | F-HEMBA1002003 | 299 | R-HEMBA1002003 | 5836 |
| HEMBA1002008 | F-HEMBA1002008 | 300 | R-HEMBA1002008 | 5837 |
| HEMBA1002018 | F-HEMBA1002018 | 301 | R-HEMBA1002018 | 5838 |
| HEMBA1002022 | F-HEMBA1002022 | 302 | R-HEMBA1002022 | 5839 |
| HEMBA1002035 | F-HEMBA1002035 | 303 | R-HEMBA1002035 | 5840 |
| HEMBA1002039 | F-HEMBA1002039 | 304 | R-HEMBA1002039 | 5841 |
| HEMBA1002049 | F-HEMBA1002049 | 305 | R-HEMBA1002049 | 5842 |
| HEMBA1002084 | F-HEMBA1002084 | 306 | R-HEMBA1002084 | 5843 |
| HEMBA1002092 | F-HEMBA1002092 | 307 | R-HEMBA1002092 | 5844 |
| HEMBA1002100 | F-HEMBA1002100 | 308 | R-HEMBA1002100 | 5845 |
| HEMBA1002102 | F-HEMBA1002102 | 309 | R-HEMBA1002102 | 5846 |
| HEMBA1002113 | F-HEMBA1002113 | 310 | R-HEMBA1002113 | 5847 |
| HEMBA1002119 | F-HEMBA1002119 | 311 | R-HEMBA1002119 | 5848 |
| HEMBA1002125 | F-HEMBA1002125 | 312 | R-HEMBA1002125 | 5849 |
| HEMBA1002139 | F-HEMBA1002139 | 313 | R-HEMBA1002139 | 5850 |
| HEMBA1002144 | F-HEMBA1002144 | 314 | R-HEMBA1002144 | 5851 |
| HEMBA1002150 | F-HEMBA1002150 | 315 | R-HEMBA1002150 | 5852 |
| HEMBA1002151 | F-HEMBA1002151 | 316 | R-HEMBA1002151 | 5853 |
| HEMBA1002153 | F-HEMBA1002153 | 317 | R-HEMBA1002153 | 5854 |
| HEMBA1002160 | F-HEMBA1002160 | 318 | R-HEMBA1002160 | 5855 |
| HEMBA1002161 | F-HEMBA1002161 | 319 | R-HEMBA1002161 | 5856 |
| HEMBA1002162 | F-HEMBA1002162 | 320 | R-HEMBA1002162 | 5857 |
| HEMBA1002166 | F-HEMBA1002166 | 321 | R-HEMBA1002166 | 5858 |
| HEMBA1002177 | F-HEMBA1002177 | 322 | R-HEMBA1002177 | 5859 |
| HEMBA1002185 | F-HEMBA1002185 | 323 | R-HEMBA1002185 | 5860 |
| HEMBA1002189 | F-HEMBA1002189 | 324 | R-HEMBA1002189 | 5861 |
| HEMBA1002191 | F-HEMBA1002191 | 325 | R-HEMBA1002191 | 5862 |
| HEMBA1002199 | F-HEMBA1002199 | 326 | R-HEMBA1002199 | 5863 |
| HEMBA1002204 | F-HEMBA1002204 | 327 | R-HEMBA1002204 | 5864 |
| HEMBA1002212 | F-HEMBA1002212 | 328 | R-HEMBA1002212 | 5865 |
| HEMBA1002215 | F-HEMBA1002215 | 329 | R-HEMBA1002215 | 5866 |
| HEMBA1002226 | F-HEMBA1002226 | 330 | R-HEMBA1002226 | 5867 |
| HEMBA1002229 | F-HEMBA1002229 | 331 | R-HEMBA1002229 | 5868 |
| HEMBA1002237 | F-HEMBA1002237 | 332 | R-HEMBA1002237 | 5869 |
| HEMBA1002241 | F-HEMBA1002241 | 333 | | |
| HEMBA1002253 | F-HEMBA1002253 | 334 | R-HEMBA1002253 | 5870 |
| HEMBA1002257 | F-HEMBA1002257 | 335 | R-HEMBA1002257 | 5871 |
| HEMBA1002265 | F-HEMBA1002265 | 336 | | |
| HEMBA1002267 | F-HEMBA1002267 | 337 | R-HEMBA1002267 | 5872 |
| HEMBA1002270 | F-HEMBA1002270 | 338 | R-HEMBA1002270 | 5873 |
| HEMBA1002321 | F-HEMBA1002321 | 339 | R-HEMBA1002321 | 5874 |
| HEMBA1002328 | F-HEMBA1002328 | 340 | R-HEMBA1002328 | 5875 |
| HEMBA1002337 | F-HEMBA1002337 | 341 | R-HEMBA1002337 | 5876 |
| HEMBA1002341 | F-HEMBA1002341 | 342 | R-HEMBA1002341 | 5877 |
| HEMBA1002348 | F-HEMBA1002348 | 343 | R-HEMBA1002348 | 5878 |
| HEMBA1002349 | F-HEMBA1002349 | 344 | R-HEMBA1002349 | 5879 |
| HEMBA1002363 | F-HEMBA1002363 | 345 | R-nnnnnnnnnnnn | 5880 |
| HEMBA1002381 | F-HEMBA1002381 | 346 | R-HEMBA1002381 | 5881 |
| HEMBA1002389 | F-HEMBA1002389 | 347 | R-HEMBA1002389 | 5882 |
| HEMBA1002417 | F-HEMBA1002417 | 348 | R-HEMBA1002417 | 5883 |
| HEMBA1002419 | F-HEMBA1002419 | 349 | R-HEMBA1002419 | 5884 |
| HEMBA1002430 | F-HEMBA1002430 | 350 | R-HEMBA1002430 | 5885 |
| HEMBA1002439 | F-HEMBA1002439 | 351 | R-HEMBA1002439 | 5886 |
| HEMBA1002458 | F-HEMBA1002458 | 352 | R-HEMBA1002458 | 5887 |
| HEMBA1002460 | F-HEMBA1002460 | 353 | R-HEMBA1002460 | 5888 |
| HEMBA1002462 | F-HEMBA1002462 | 354 | R-HEMBA1002462 | 5889 |
| HEMBA1002469 | F-HEMBA1002469 | 355 | | |
| HEMBA1002475 | F-HEMBA1002475 | 356 | R-nnnnnnnnnnnn | 5890 |
| HEMBA1002477 | F-HEMBA1002477 | 357 | R-HEMBA1002477 | 5891 |
| HEMBA1002486 | F-HEMBA1002486 | 358 | R-HEMBA1002486 | 5892 |
| HEMBA1002495 | F-HEMBA1002495 | 359 | R-HEMBA1002495 | 5893 |
| HEMBA1002498 | F-HEMBA1002498 | 360 | R-HEMBA1002498 | 5894 |
| HEMBA1002503 | F-HEMBA1002503 | 361 | R-HEMBA1002503 | 5895 |
| HEMBA1002508 | F-HEMBA1002508 | 362 | R-HEMBA1002508 | 5896 |
| HEMBA1002513 | F-HEMBA1002513 | 363 | R-nnnnnnnnnnnn | 5897 |
| HEMBA1002515 | F-HEMBA1002515 | 364 | R-HEMBA1002515 | 5898 |
| HEMBA1002538 | F-HEMBA1002538 | 365 | R-HEMBA1002538 | 5899 |
| HEMBA1002542 | F-HEMBA1002542 | 366 | R-HEMBA1002542 | 5900 |
| HEMBA1002547 | F-HEMBA1002547 | 367 | R-HEMBA1002547 | 5901 |
| HEMBA1002552 | F-HEMBA1002552 | 368 | R-HEMBA1002552 | 5902 |
| HEMBA1002555 | F-HEMBA1002555 | 369 | R-HEMBA1002555 | 5903 |
| HEMBA1002558 | F-HEMBA1002558 | 370 | R-HEMBA1002558 | 5904 |
| HEMBA1002561 | F-HEMBA1002561 | 371 | R-HEMBA1002561 | 5905 |
| HEMBA1002569 | F-HEMBA1002569 | 372 | R-nnnnnnnnnnnn | 5906 |
| HEMBA1002583 | F-HEMBA1002583 | 373 | R-HEMBA1002583 | 5907 |
| HEMBA1002590 | F-HEMBA1002590 | 374 | R-HEMBA1002590 | 5908 |
| HEMBA1002592 | F-HEMBA1002592 | 375 | R-HEMBA1002592 | 5909 |
| HEMBA1002609 | F-HEMBA1002609 | 376 | | |
| HEMBA1002621 | F-HEMBA1002621 | 377 | R-HEMBA1002621 | 5910 |
| HEMBA1002624 | F-HEMBA1002624 | 378 | R-HEMBA1002624 | 5911 |
| HEMBA1002628 | F-HEMBA1002628 | 379 | R-HEMBA1002628 | 5912 |
| HEMBA1002629 | F-HEMBA1002629 | 380 | R-HEMBA1002629 | 5913 |
| HEMBA1002645 | F-HEMBA1002645 | 381 | R-HEMBA1002645 | 5914 |
| HEMBA1002651 | F-HEMBA1002651 | 382 | R-HEMBA1002651 | 5915 |
| HEMBA1002659 | F-HEMBA1002659 | 383 | R-HEMBA1002659 | 5916 |
| HEMBA1002661 | F-HEMBA1002661 | 384 | R-HEMBA1002661 | 5917 |
| HEMBA1002666 | F-HEMBA1002666 | 385 | R-HEMBA1002666 | 5918 |
| HEMBA1002678 | F-HEMBA1002678 | 386 | R-HEMBA1002678 | 5919 |
| HEMBA1002679 | F-HEMBA1002679 | 387 | R-nnnnnnnnnnnn | 5920 |
| HEMBA1002688 | F-HEMBA1002688 | 388 | R-HEMBA1002688 | 5921 |
| HEMBA1002696 | F-HEMBA1002696 | 389 | R-HEMBA1002696 | 5922 |
| HEMBA1002703 | F-HEMBA1002703 | 390 | | |
| HEMBA1002712 | F-HEMBA1002712 | 391 | R-HEMBA1002712 | 5923 |
| HEMBA1002716 | F-HEMBA1002716 | 392 | R-HEMBA1002716 | 5924 |
| HEMBA1002728 | F-HEMBA1002728 | 393 | R-HEMBA1002728 | 5925 |
| HEMBA1002730 | F-HEMBA1002730 | 394 | R-HEMBA1002730 | 5926 |
| HEMBA1002742 | F-HEMBA1002742 | 395 | R-HEMBA1002742 | 5927 |
| HEMBA1002746 | F-HEMBA1002746 | 396 | R-HEMBA1002746 | 5928 |
| HEMBA1002748 | F-HEMBA1002748 | 397 | R-HEMBA1002748 | 5929 |
| HEMBA1002750 | F-HEMBA1002750 | 398 | R-HEMBA1002750 | 5930 |
| HEMBA1002768 | F-HEMBA1002768 | 399 | R-HEMBA1002768 | 5931 |
| HEMBA1002770 | F-HEMBA1002770 | 400 | R-HEMBA1002770 | 5932 |
| HEMBA1002777 | F-HEMBA1002777 | 401 | R-HEMBA1002777 | 5933 |
| HEMBA1002779 | F-HEMBA1002779 | 402 | R-HEMBA1002779 | 5934 |
| HEMBA1002780 | F-HEMBA1002780 | 403 | R-HEMBA1002780 | 5935 |
| HEMBA1002794 | F-HEMBA1002794 | 404 | R-HEMBA1002794 | 5936 |
| HEMBA1002801 | F-HEMBA1002801 | 405 | R-HEMBA1002801 | 5937 |
| HEMBA1002810 | F-HEMBA1002810 | 406 | R-HEMBA1002810 | 5938 |
| HEMBA1002816 | F-HEMBA1002816 | 407 | R-HEMBA1002816 | 5939 |
| HEMBA1002818 | F-HEMBA1002818 | 408 | | |
| HEMBA1002826 | F-HEMBA1002826 | 409 | R-HEMBA1002826 | 5940 |
| HEMBA1002833 | F-HEMBA1002833 | 410 | R-HEMBA1002833 | 5941 |
| HEMBA1002850 | F-HEMBA1002850 | 411 | R-HEMBA1002850 | 5942 |
| HEMBA1002863 | F-HEMBA1002863 | 412 | R-HEMBA1002863 | 5943 |
| HEMBA1002876 | F-HEMBA1002876 | 413 | R-HEMBA1002876 | 5944 |
| HEMBA1002886 | F-HEMBA1002886 | 414 | R-HEMBA1002886 | 5945 |
| HEMBA1002896 | F-HEMBA1002896 | 415 | R-HEMBA1002896 | 5946 |
| HEMBA1002921 | F-HEMBA1002921 | 416 | R-HEMBA1002921 | 5947 |
| HEMBA1002924 | F-HEMBA1002924 | 417 | R-HEMBA1002924 | 5948 |
| HEMBA1002934 | F-HEMBA1002934 | 418 | R-HEMBA1002934 | 5949 |
| HEMBA1002935 | F-HEMBA1002935 | 419 | R-HEMBA1002935 | 5950 |
| HEMBA1002937 | F-HEMBA1002937 | 420 | R-HEMBA1002937 | 5951 |
| HEMBA1002939 | F-HEMBA1002939 | 421 | R-HEMBA1002939 | 5952 |
| HEMBA1002944 | F-HEMBA1002944 | 422 | R-HEMBA1002944 | 5953 |
| HEMBA1002951 | F-HEMBA1002951 | 423 | R-HEMBA1002951 | 5954 |
| HEMBA1002954 | F-HEMBA1002954 | 424 | R-HEMBA1002954 | 5955 |
| HEMBA1002968 | F-HEMBA1002968 | 425 | R-HEMBA1002968 | 5956 |
| HEMBA1002970 | F-HEMBA1002970 | 426 | R-HEMBA1002970 | 5957 |
| HEMBA1002971 | F-HEMBA1002971 | 427 | R-HEMBA1002971 | 5958 |
| HEMBA1002973 | F-HEMBA1002973 | 428 | R-HEMBA1002973 | 5959 |
| HEMBA1002997 | F-HEMBA1002997 | 429 | R-nnnnnnnnnnnn | 5960 |
| HEMBA1002999 | F-HEMBA1002999 | 430 | R-HEMBA1002999 | 5961 |
| HEMBA1003021 | F-HEMBA1003021 | 431 | R-HEMBA1003021 | 5962 |
| HEMBA1003033 | F-HEMBA1003033 | 432 | R-HEMBA1003033 | 5963 |
| HEMBA1003034 | F-HEMBA1003034 | 433 | R-HEMBA1003034 | 5964 |
| HEMBA1003035 | F-HEMBA1003035 | 434 | R-HEMBA1003035 | 5965 |
| HEMBA1003037 | F-HEMBA1003037 | 435 | R-HEMBA1003037 | 5966 |
| HEMBA1003041 | F-HEMBA1003041 | 436 | R-HEMBA1003041 | 5967 |
| HEMBA1003046 | F-HEMBA1003046 | 437 | R-HEMBA1003046 | 5968 |
| HEMBA1003064 | F-HEMBA1003064 | 438 | R-HEMBA1003064 | 5969 |
| HEMBA1003067 | F-HEMBA1003067 | 439 | R-HEMBA1003067 | 5970 |
| HEMBA1003071 | F-HEMBA1003071 | 440 | R-HEMBA1003071 | 5971 |
| HEMBA1003077 | F-HEMBA1003077 | 441 | R-HEMBA1003077 | 5972 |
| HEMBA1003078 | F-HEMBA1003078 | 442 | R-HEMBA1003078 | 5973 |
| HEMBA1003079 | F-HEMBA1003079 | 443 | R-HEMBA1003079 | 5974 |
| HEMBA1003083 | F-HEMBA1003083 | 444 | R-HEMBA1003083 | 5975 |
| HEMBA1003086 | F-HEMBA1003086 | 445 | R-HEMBA1003086 | 5976 |
| HEMBA1003096 | F-HEMBA1003096 | 446 | R-HEMBA1003096 | 5977 |
| HEMBA1003098 | F-HEMBA1003098 | 447 | R-HEMBA1003098 | 5978 |
| HEMBA1003117 | F-HEMBA1003117 | 448 | R-HEMBA1003117 | 5979 |
| HEMBA1003129 | F-HEMBA1003129 | 449 | R-HEMBA1003129 | 5980 |
| HEMBA1003133 | F-HEMBA1003133 | 450 | R-HEMBA1003133 | 5981 |
| HEMBA1003136 | F-HEMBA1003136 | 451 | R-HEMBA1003136 | 5982 |
| HEMBA1003142 | F-HEMBA1003142 | 452 | R-HEMBA1003142 | 5983 |
| HEMBA1003148 | F-HEMBA1003148 | 453 | R-HEMBA1003148 | 5984 |
| HEMBA1003166 | F-HEMBA1003166 | 454 | R-HEMBA1003166 | 5985 |
| HEMBA1003175 | F-HEMBA1003175 | 455 | R-HEMBA1003175 | 5986 |
| HEMBA1003179 | F-HEMBA1003179 | 456 | | |
| HEMBA1003197 | F-HEMBA1003197 | 457 | R-HEMBA1003197 | 5987 |
| HEMBA1003199 | F-HEMBA1003199 | 458 | R-HEMBA1003199 | 5988 |
| HEMBA1003202 | F-HEMBA1003202 | 459 | R-HEMBA1003202 | 5989 |
| HEMBA1003204 | F-HEMBA1003204 | 460 | R-HEMBA1003204 | 5990 |
| HEMBA1003212 | F-HEMBA1003212 | 461 | R-HEMBA1003212 | 5991 |
| HEMBA1003220 | F-HEMBA1003220 | 462 | R-HEMBA1003220 | 5992 |
| HEMBA1003222 | F-HEMBA1003222 | 463 | R-HEMBA1003222 | 5993 |
| HEMBA1003229 | F-HEMBA1003229 | 464 | R-HEMBA1003229 | 5994 |
| HEMBA1003235 | F-HEMBA1003235 | 465 | R-HEMBA1003235 | 5995 |
| HEMBA1003250 | F-HEMBA1003250 | 466 | R-HEMBA1003250 | 5996 |
| HEMBA1003257 | F-HEMBA1003257 | 467 | R-HEMBA1003257 | 5997 |
| HEMBA1003273 | F-HEMBA1003273 | 468 | R-HEMBA1003273 | 5998 |
| HEMBA1003276 | F-HEMBA1003276 | 469 | R-HEMBA1003276 | 5999 |
| HEMBA1003278 | F-HEMBA1003278 | 470 | R-HEMBA1003278 | 6000 |
| HEMBA1003281 | F-HEMBA1003281 | 471 | R-HEMBA1003281 | 6001 |
| HEMBA1003286 | F-HEMBA1003286 | 472 | | |
| HEMBA1003291 | F-HEMBA1003291 | 473 | R-HEMBA1003291 | 6002 |
| HEMBA1003296 | F-HEMBA1003296 | 474 | R-HEMBA1003296 | 6003 |
| HEMBA1003304 | F-HEMBA1003304 | 475 | R-HEMBA1003304 | 6004 |
| HEMBA1003309 | F-HEMBA1003309 | 476 | R-HEMBA1003309 | 6005 |
| HEMBA1003314 | F-HEMBA1003314 | 477 | R-HEMBA1003314 | 6006 |
| HEMBA1003322 | F-HEMBA1003322 | 478 | R-HEMBA1003322 | 6007 |
| HEMBA1003327 | F-HEMBA1003327 | 479 | R-HEMBA1003327 | 6008 |
| HEMBA1003328 | F-HEMBA1003328 | 480 | R-HEMBA1003328 | 6009 |
| HEMBA1003330 | F-HEMBA1003330 | 481 | R-HEMBA1003330 | 6010 |
| HEMBA1003348 | F-HEMBA1003348 | 482 | R-HEMBA1003348 | 6011 |
| HEMBA1003369 | F-HEMBA1003369 | 483 | R-HEMBA1003369 | 6012 |
| HEMBA1003370 | F-HEMBA1003370 | 484 | R-HEMBA1003370 | 6013 |
| HEMBA1003373 | F-HEMBA1003373 | 485 | R-HEMBA1003373 | 6014 |
| HEMBA1003376 | F-HEMBA1003376 | 486 | R-HEMBA1003376 | 6015 |
| HEMBA1003380 | F-HEMBA1003380 | 487 | R-HEMBA1003380 | 6016 |
| HEMBA1003384 | F-HEMBA1003384 | 488 | R-HEMBA1003384 | 6017 |
| HEMBA1003395 | F-HEMBA1003395 | 489 | R-HEMBA1003395 | 6018 |
| HEMBA1003402 | F-HEMBA1003402 | 490 | R-HEMBA1003402 | 6019 |
| HEMBA1003403 | F-HEMBA1003403 | 491 | | |
| HEMBA1003408 | F-HEMBA1003408 | 492 | R-nnnnnnnnnnnn | 6020 |
| HEMBA1003417 | F-HEMBA1003417 | 493 | R-HEMBA1003417 | 6021 |
| HEMBA1003418 | F-HEMBA1003418 | 494 | R-HEMBA1003418 | 6022 |
| HEMBA1003433 | F-HEMBA1003433 | 495 | R-HEMBA1003433 | 6023 |
| HEMBA1003447 | F-HEMBA1003447 | 496 | | |
| HEMBA1003461 | F-HEMBA1003461 | 497 | R-HEMBA1003461 | 6024 |
| HEMBA1003463 | F-HEMBA1003463 | 498 | R-HEMBA1003463 | 6025 |
| HEMBA1003480 | F-HEMBA1003480 | 499 | R-HEMBA1003480 | 6026 |
| HEMBA1003528 | F-HEMBA1003528 | 500 | R-HEMBA1003528 | 6027 |
| HEMBA1003531 | F-HEMBA1003531 | 501 | R-HEMBA1003531 | 6028 |
| HEMBA1003538 | F-HEMBA1003538 | 502 | R-HEMBA1003538 | 6029 |
| HEMBA1003545 | F-HEMBA1003545 | 503 | R-HEMBA1003545 | 6030 |
| HEMBA1003548 | F-HEMBA1003548 | 504 | R-HEMBA1003548 | 6031 |
| HEMBA1003555 | F-HEMBA1003555 | 505 | R-HEMBA1003555 | 6032 |
| HEMBA1003556 | F-HEMBA1003556 | 506 | R-HEMBA1003556 | 6033 |
| HEMBA1003560 | F-HEMBA1003560 | 507 | R-HEMBA1003560 | 6034 |
| HEMBA1003568 | F-HEMBA1003568 | 508 | R-HEMBA1003568 | 6035 |
| HEMBA1003569 | F-HEMBA1003569 | 509 | R-HEMBA1003569 | 6036 |
| HEMBA1003571 | F-HEMBA1003571 | 510 | R-HEMBA1003571 | 6037 |
| HEMBA1003579 | F-HEMBA1003579 | 511 | R-HEMBA1003579 | 6038 |
| HEMBA1003581 | F-HEMBA1003581 | 512 | R-HEMBA1003581 | 6039 |
| HEMBA1003591 | F-HEMBA1003591 | 513 | R-HEMBA1003591 | 6040 |
| HEMBA1003595 | F-HEMBA1003595 | 514 | R-HEMBA1003595 | 6041 |
| HEMBA1003597 | F-HEMBA1003597 | 515 | R-HEMBA1003597 | 6042 |
| HEMBA1003598 | F-HEMBA1003598 | 516 | R-HEMBA1003598 | 6043 |
| HEMBA1003615 | F-HEMBA1003615 | 517 | R-HEMBA1003615 | 6044 |
| HEMBA1003617 | F-HEMBA1003617 | 518 | R-HEMBA1003617 | 6045 |
| HEMBA1003621 | F-HEMBA1003621 | 519 | R-HEMBA1003621 | 6046 |
| HEMBA1003622 | F-HEMBA1003622 | 520 | R-HEMBA1003622 | 6047 |
| HEMBA1003630 | F-HEMBA1003630 | 521 | R-HEMBA1003630 | 6048 |
| HEMBA1003637 | F-HEMBA1003637 | 522 | R-HEMBA1003637 | 6049 |
| HEMBA1003640 | F-HEMBA1003640 | 523 | R-HEMBA1003640 | 6050 |
| HEMBA1003645 | F-HEMBA1003645 | 524 | R-HEMBA1003645 | 6051 |
| HEMBA1003646 | F-HEMBA1003646 | 525 | R-HEMBA1003646 | 6052 |
| HEMBA1003656 | F-HEMBA1003656 | 526 | R-HEMBA1003656 | 6053 |
| HEMBA1003662 | F-HEMBA1003662 | 527 | R-HEMBA1003662 | 6054 |
| HEMBA1003667 | F-HEMBA1003667 | 528 | R-HEMBA1003667 | 6055 |
| HEMBA1003679 | F-HEMBA1003679 | 529 | R-HEMBA1003679 | 6056 |
| HEMBA1003680 | F-HEMBA1003680 | 530 | R-HEMBA1003680 | 6057 |
| HEMBA1003684 | F-HEMBA1003684 | 531 | R-HEMBA1003684 | 6058 |
| HEMBA1003690 | F-HEMBA1003690 | 532 | R-HEMBA1003690 | 6059 |
| HEMBA1003692 | F-HEMBA1003692 | 533 | R-HEMBA1003692 | 6060 |
| HEMBA1003711 | F-HEMBA1003711 | 534 | R-HEMBA1003711 | 6061 |
| HEMBA1003714 | F-HEMBA1003714 | 535 | R-HEMBA1003714 | 6062 |
| HEMBA1003715 | F-HEMBA1003715 | 536 | R-HEMBA1003715 | 6063 |
| HEMBA1003720 | F-HEMBA1003720 | 537 | R-HEMBA1003720 | 6064 |
| HEMBA1003725 | F-HEMBA1003725 | 538 | R-HEMBA1003725 | 6065 |
| HEMBA1003729 | F-HEMBA1003729 | 539 | R-HEMBA1003729 | 6066 |
| HEMBA1003733 | F-HEMBA1003733 | 540 | R-HEMBA1003733 | 6067 |
| HEMBA1003742 | F-HEMBA1003742 | 541 | R-HEMBA1003742 | 6068 |
| HEMBA1003758 | F-HEMBA1003758 | 542 | R-HEMBA1003758 | 6069 |
| HEMBA1003760 | F-HEMBA1003760 | 543 | R-HEMBA1003760 | 6070 |
| HEMBA1003773 | F-HEMBA1003773 | 544 | R-HEMBA1003773 | 6071 |
| HEMBA1003783 | F-HEMBA1003783 | 545 | R-HEMBA1003783 | 6072 |
| HEMBA1003784 | F-HEMBA1003784 | 546 | R-HEMBA1003784 | 6073 |
| HEMBA1003799 | F-HEMBA1003799 | 547 | R-HEMBA1003799 | 6074 |
| HEMBA1003803 | F-HEMBA1003803 | 548 | R-HEMBA1003803 | 6075 |
| HEMBA1003804 | F-HEMBA1003804 | 549 | R-HEMBA1003804 | 6076 |
| HEMBA1003805 | F-HEMBA1003805 | 550 | R-HEMBA1003805 | 6077 |
| HEMBA1003807 | F-HEMBA1003807 | 551 | R-HEMBA1003807 | 6078 |
| HEMBA1003827 | F-HEMBA1003827 | 552 | | |
| HEMBA1003836 | F-HEMBA1003836 | 553 | R-HEMBA1003836 | 6079 |
| HEMBA1003838 | F-HEMBA1003838 | 554 | R-HEMBA1003838 | 6080 |
| HEMBA1003856 | F-HEMBA1003856 | 555 | R-HEMBA1003856 | 6081 |
| HEMBA1003864 | F-HEMBA1003864 | 556 | R-HEMBA1003864 | 6082 |
| HEMBA1003866 | F-HEMBA1003866 | 557 | R-HEMBA1003866 | 6083 |
| HEMBA1003879 | F-HEMBA1003879 | 558 | R-HEMBA1003879 | 6084 |
| HEMBA1003880 | F-HEMBA1003880 | 559 | R-HEMBA1003880 | 6085 |
| HEMBA1003885 | F-HEMBA1003885 | 560 | R-HEMBA1003885 | 6086 |
| HEMBA1003893 | F-HEMBA1003893 | 561 | R-HEMBA1003893 | 6087 |
| HEMBA1003902 | F-HEMBA1003902 | 562 | R-HEMBA1003902 | 6088 |
| HEMBA1003908 | F-HEMBA1003908 | 563 | R-HEMBA1003908 | 6089 |
| HEMBA1003926 | F-HEMBA1003926 | 564 | R-HEMBA1003926 | 6090 |
| HEMBA1003937 | F-HEMBA1003937 | 565 | R-HEMBA1003937 | 6091 |
| HEMBA1003939 | F-HEMBA1003939 | 566 | R-HEMBA1003939 | 6092 |
| HEMBA1003942 | F-HEMBA1003942 | 567 | R-HEMBA1003942 | 6093 |
| HEMBA1003950 | F-HEMBA1003950 | 568 | R-HEMBA1003950 | 6094 |
| HEMBA1003953 | F-HEMBA1003953 | 569 | R-HEMBA1003953 | 6095 |
| HEMBA1003958 | F-HEMBA1003958 | 570 | R-HEMBA1003958 | 6096 |
| HEMBA1003959 | F-HEMBA1003959 | 571 | R-HEMBA1003959 | 6097 |
| HEMBA1003976 | F-HEMBA1003976 | 572 | R-HEMBA1003976 | 6098 |
| HEMBA1003978 | F-HEMBA1003978 | 573 | R-HEMBA1003978 | 6099 |
| HEMBA1003985 | F-HEMBA1003985 | 574 | R-HEMBA1003985 | 6100 |
| HEMBA1003987 | F-HEMBA1003987 | 575 | R-HEMBA1003987 | 6101 |
| HEMBA1003989 | F-HEMBA1003989 | 576 | R-HEMBA1003989 | 6102 |
| HEMBA1004000 | F-HEMBA1004000 | 577 | R-HEMBA1004000 | 6103 |
| HEMBA1004011 | F-HEMBA1004011 | 578 | R-HEMBA1004011 | 6104 |
| HEMBA1004012 | F-HEMBA1004012 | 579 | R-HEMBA1004012 | 6105 |
| HEMBA1004015 | F-HEMBA1004015 | 580 | R-HEMBA1004015 | 6106 |
| HEMBA1004024 | F-HEMBA1004024 | 581 | R-HEMBA1004024 | 6107 |
| HEMBA1004038 | F-HEMBA1004038 | 582 | R-HEMBA1004038 | 6108 |
| HEMBA1004042 | F-HEMBA1004042 | 583 | R-HEMBA1004042 | 6109 |
| HEMBA1004045 | F-HEMBA1004045 | 584 | R-HEMBA1004045 | 6110 |
| HEMBA1004048 | F-HEMBA1004048 | 585 | R-HEMBA1004048 | 6111 |
| HEMBA1004049 | F-HEMBA1004049 | 586 | R-HEMBA1004049 | 6112 |
| HEMBA1004055 | F-HEMBA1004055 | 587 | R-HEMBA1004055 | 6113 |
| HEMBA1004056 | F-HEMBA1004056 | 588 | R-HEMBA1004056 | 6114 |
| HEMBA1004074 | F-HEMBA1004074 | 589 | R-HEMBA1004074 | 6115 |
| HEMBA1004086 | F-HEMBA1004086 | 590 | R-HEMBA1004086 | 6116 |
| HEMBA1004097 | F-HEMBA1004097 | 591 | R-HEMBA1004097 | 6117 |
| HEMBA1004111 | F-HEMBA1004111 | 592 | | |
| HEMBA1004131 | F-HEMBA1004131 | 593 | R-HEMBA1004131 | 6118 |
| HEMBA1004132 | F-HEMBA1004132 | 594 | R-HEMBA1004132 | 6119 |
| HEMBA1004133 | F-HEMBA1004133 | 595 | R-HEMBA1004133 | 6120 |
| HEMBA1004138 | F-HEMBA1004138 | 596 | R-HEMBA1004138 | 6121 |
| HEMBA1004143 | F-HEMBA1004143 | 597 | R-HEMBA1004143 | 6122 |
| HEMBA1004146 | F-HEMBA1004146 | 598 | R-HEMBA1004146 | 6123 |
| HEMBA1004150 | F-HEMBA1004150 | 599 | R-HEMBA1004150 | 6124 |
| HEMBA1004164 | F-HEMBA1004164 | 600 | R-HEMBA1004164 | 6125 |
| HEMBA1004168 | F-HEMBA1004168 | 601 | R-HEMBA1004168 | 6126 |
| HEMBA1004199 | F-HEMBA1004199 | 602 | R-HEMBA1004199 | 6127 |
| HEMBA1004200 | F-HEMBA1004200 | 603 | R-HEMBA1004200 | 6128 |
| HEMBA1004202 | F-HEMBA1004202 | 604 | R-HEMBA1004202 | 6129 |
| HEMBA1004203 | F-HEMBA1004203 | 605 | R-HEMBA1004203 | 6130 |
| HEMBA1004207 | F-HEMBA1004207 | 606 | R-HEMBA1004207 | 6131 |
| HEMBA1004225 | F-HEMBA1004225 | 607 | R-HEMBA1004225 | 6132 |
| HEMBA1004227 | F-HEMBA1004227 | 608 | R-HEMBA1004227 | 6133 |
| HEMBA1004238 | F-HEMBA1004238 | 609 | R-HEMBA1004238 | 6134 |
| HEMBA1004241 | F-HEMBA1004241 | 610 | R-HEMBA1004241 | 6135 |
| HEMBA1004246 | F-HEMBA1004246 | 611 | R-HEMBA1004246 | 6136 |
| HEMBA1004248 | F-HEMBA1004248 | 612 | R-HEMBA1004248 | 6137 |
| HEMBA1004264 | F-HEMBA1004264 | 613 | R-HEMBA1004264 | 6138 |
| HEMBA1004267 | F-HEMBA1004267 | 614 | R-HEMBA1004267 | 6139 |
| HEMBA1004272 | F-HEMBA1004272 | 615 | R-HEMBA1004272 | 6140 |
| HEMBA1004274 | F-HEMBA1004274 | 616 | | |
| HEMBA1004275 | F-HEMBA1004275 | 617 | R-nnnnnnnnnnnn | 6141 |
| HEMBA1004276 | F-HEMBA1004276 | 618 | R-HEMBA1004276 | 6142 |
| HEMBA1004286 | F-HEMBA1004286 | 619 | R-HEMBA1004286 | 6143 |
| HEMBA1004289 | F-HEMBA1004289 | 620 | R-HEMBA1004289 | 6144 |
| HEMBA1004295 | F-HEMBA1004295 | 621 | R-HEMBA1004295 | 6145 |
| HEMBA1004306 | F-HEMBA1004306 | 622 | R-HEMBA1004306 | 6146 |
| HEMBA1004312 | F-HEMBA1004312 | 623 | R-HEMBA1004312 | 6147 |
| HEMBA1004321 | F-HEMBA1004321 | 624 | R-HEMBA1004321 | 6148 |
| HEMBA1004323 | F-HEMBA1004323 | 625 | R-HEMBA1004323 | 6149 |
| HEMBA1004327 | F-HEMBA1004327 | 626 | R-HEMBA1004327 | 6150 |
| HEMBA1004330 | F-HEMBA1004330 | 627 | R-HEMBA1004330 | 6151 |
| HEMBA1004334 | F-HEMBA1004334 | 628 | R-HEMBA1004334 | 6152 |
| HEMBA1004335 | F-HEMBA1004335 | 629 | R-HEMBA1004335 | 6153 |
| HEMBA1004341 | F-HEMBA1004341 | 630 | R-HEMBA1004341 | 6154 |
| HEMBA1004353 | F-HEMBA1004353 | 631 | R-HEMBA1004353 | 6155 |
| HEMBA1004354 | F-HEMBA1004354 | 632 | R-HEMBA1004354 | 6156 |
| HEMBA1004356 | F-HEMBA1004356 | 633 | R-HEMBA1004356 | 6157 |
| HEMBA1004366 | F-HEMBA1004366 | 634 | R-HEMBA1004366 | 6158 |
| HEMBA1004372 | F-HEMBA1004372 | 635 | R-HEMBA1004372 | 6159 |
| HEMBA1004389 | F-HEMBA1004389 | 636 | R-HEMBA1004389 | 6160 |
| HEMBA1004394 | F-HEMBA1004394 | 637 | R-HEMBA1004394 | 6161 |
| HEMBA1004396 | F-HEMBA1004396 | 638 | R-HEMBA1004396 | 6162 |
| HEMBA1004405 | F-HEMBA1004405 | 639 | R-HEMBA1004405 | 6163 |
| HEMBA1004408 | F-HEMBA1004408 | 640 | R-HEMBA1004408 | 6164 |
| HEMBA1004429 | F-HEMBA1004429 | 641 | R-HEMBA1004429 | 6165 |
| HEMBA1004433 | F-HEMBA1004433 | 642 | R-HEMBA1004433 | 6166 |
| HEMBA1004460 | F-HEMBA1004460 | 643 | R-HEMBA1004460 | 6167 |
| HEMBA1004461 | F-HEMBA1004461 | 644 | R-HEMBA1004461 | 6168 |
| HEMBA1004479 | F-HEMBA1004479 | 645 | R-HEMBA1004479 | 6169 |
| HEMBA1004482 | F-HEMBA1004482 | 646 | R-HEMBA1004482 | 6170 |
| HEMBA1004499 | F-HEMBA1004499 | 647 | | |
| HEMBA1004502 | F-HEMBA1004502 | 648 | R-HEMBA1004502 | 6171 |
| HEMBA1004506 | F-HEMBA1004506 | 649 | R-HEMBA1004506 | 6172 |
| HEMBA1004507 | F-HEMBA1004507 | 650 | R-HEMBA1004507 | 6173 |
| HEMBA1004509 | F-HEMBA1004509 | 651 | R-HEMBA1004509 | 6174 |
| HEMBA1004534 | F-HEMBA1004534 | 652 | R-HEMBA1004534 | 6175 |
| HEMBA1004538 | F-HEMBA1004538 | 653 | R-HEMBA1004538 | 6176 |
| HEMBA1004542 | F-HEMBA1004542 | 654 | | |
| HEMBA1004554 | F-HEMBA1004554 | 655 | R-HEMBA1004554 | 6177 |
| HEMBA1004560 | F-HEMBA1004560 | 656 | R-HEMBA1004560 | 6178 |
| HEMBA1004573 | F-HEMBA1004573 | 657 | R-HEMBA1004573 | 6179 |
| HEMBA1004577 | F-HEMBA1004577 | 658 | R-HEMBA1004577 | 6180 |
| HEMBA1004586 | F-HEMBA1004586 | 659 | R-HEMBA1004586 | 6181 |
| HEMBA1004596 | F-HEMBA1004596 | 660 | R-nnnnnnnnnnnn | 6182 |
| HEMBA1004604 | F-HEMBA1004604 | 661 | | |
| HEMBA1004610 | F-HEMBA1004610 | 662 | R-HEMBA1004610 | 6183 |
| HEMBA1004617 | F-HEMBA1004617 | 663 | R-HEMBA1004617 | 6184 |
| HEMBA1004629 | F-HEMBA1004629 | 664 | R-HEMBA1004629 | 6185 |
| HEMBA1004631 | F-HEMBA1004631 | 665 | R-HEMBA1004631 | 6186 |
| HEMBA1004632 | F-HEMBA1004632 | 666 | R-HEMBA1004632 | 6187 |
| HEMBA1004637 | F-HEMBA1004637 | 667 | R-HEMBA1004637 | 6188 |
| HEMBA1004638 | F-HEMBA1004638 | 668 | R-HEMBA1004638 | 6189 |
| HEMBA1004666 | F-HEMBA1004666 | 669 | R-HEMBA1004666 | 6190 |
| HEMBA1004669 | F-HEMBA1004669 | 670 | R-HEMBA1004669 | 6191 |
| HEMBA1004670 | F-HEMBA1004670 | 671 | R-HEMBA1004670 | 6192 |
| HEMBA1004672 | F-HEMBA1004672 | 672 | R-HEMBA1004672 | 6193 |
| HEMBA1004693 | F-HEMBA1004693 | 673 | R-HEMBA1004693 | 6194 |
| HEMBA1004697 | F-HEMBA1004697 | 674 | R-HEMBA1004697 | 6195 |
| HEMBA1004705 | F-HEMBA1004705 | 675 | R-HEMBA1004705 | 6196 |
| HEMBA1004709 | F-HEMBA1004709 | 676 | R-HEMBA1004709 | 6197 |
| HEMBA1004711 | F-HEMBA1004711 | 677 | R-HEMBA1004711 | 6198 |
| HEMBA1004725 | F-HEMBA1004725 | 678 | R-HEMBA1004725 | 6199 |
| HEMBA1004730 | F-HEMBA1004730 | 679 | R-HEMBA1004730 | 6200 |
| HEMBA1004733 | F-HEMBA1004733 | 680 | R-HEMBA1004733 | 6201 |
| HEMBA1004734 | F-HEMBA1004734 | 681 | R-HEMBA1004734 | 6202 |
| HEMBA1004736 | F-HEMBA1004736 | 682 | R-HEMBA1004736 | 6203 |
| HEMBA1004748 | F-HEMBA1004748 | 683 | R-HEMBA1004748 | 6204 |
| HEMBA1004751 | F-HEMBA1004751 | 684 | R-HEMBA1004751 | 6205 |
| HEMBA1004752 | F-HEMBA1004752 | 685 | R-HEMBA1004752 | 6206 |
| HEMBA1004753 | F-HEMBA1004753 | 686 | R-HEMBA1004753 | 6207 |
| HEMBA1004756 | F-HEMBA1004756 | 687 | R-HEMBA1004756 | 6208 |
| HEMBA1004758 | F-HEMBA1004758 | 688 | R-HEMBA1004758 | 6209 |
| HEMBA1004763 | F-HEMBA1004763 | 689 | R-HEMBA1004763 | 6210 |
| HEMBA1004768 | F-HEMBA1004768 | 690 | R-HEMBA1004768 | 6211 |
| HEMBA1004770 | F-HEMBA1004770 | 691 | R-HEMBA1004770 | 6212 |
| HEMBA1004771 | F-HEMBA1004771 | 692 | R-HEMBA1004771 | 6213 |
| HEMBA1004776 | F-HEMBA1004776 | 693 | R-HEMBA1004776 | 6214 |
| HEMBA1004778 | F-HEMBA1004778 | 694 | R-HEMBA1004778 | 6215 |
| HEMBA1004795 | F-HEMBA1004795 | 695 | R-nnnnnnnnnnnn | 6216 |
| HEMBA1004803 | F-HEMBA1004803 | 696 | R-HEMBA1004803 | 6217 |
| HEMBA1004806 | F-HEMBA1004806 | 697 | R-HEMBA1004806 | 6218 |
| HEMBA1004807 | F-HEMBA1004807 | 698 | R-HEMBA1004807 | 6219 |
| HEMBA1004816 | F-HEMBA1004816 | 699 | R-HEMBA1004816 | 6220 |
| HEMBA1004820 | F-HEMBA1004820 | 700 | R-HEMBA1004820 | 6221 |
| HEMBA1004847 | F-HEMBA1004847 | 701 | R-HEMBA1004847 | 6222 |
| HEMBA1004850 | F-HEMBA1004850 | 702 | R-HEMBA1004850 | 6223 |
| HEMBA1004863 | F-HEMBA1004863 | 703 | R-HEMBA1004863 | 6224 |
| HEMBA1004864 | F-HEMBA1004864 | 704 | R-HEMBA1004864 | 6225 |
| HEMBA1004865 | F-HEMBA1004865 | 705 | R-HEMBA1004865 | 6226 |
| HEMBA1004880 | F-HEMBA1004880 | 706 | R-HEMBA1004880 | 6227 |
| HEMBA1004889 | F-HEMBA1004889 | 707 | R-HEMBA1004889 | 6228 |
| HEMBA1004900 | F-HEMBA1004900 | 708 | R-HEMBA1004900 | 6229 |
| HEMBA1004909 | F-HEMBA1004909 | 709 | R-HEMBA1004909 | 6230 |
| HEMBA1004918 | F-HEMBA1004918 | 710 | R-HEMBA1004918 | 6231 |
| HEMBA1004923 | F-HEMBA1004923 | 711 | R-HEMBA1004923 | 6232 |
| HEMBA1004929 | F-HEMBA1004929 | 712 | R-HEMBA1004929 | 6233 |
| HEMBA1004930 | F-HEMBA1004930 | 713 | R-HEMBA1004930 | 6234 |
| HEMBA1004933 | F-HEMBA1004933 | 714 | R-HEMBA1004933 | 6235 |
| HEMBA1004934 | F-HEMBA1004934 | 715 | R-HEMBA1004934 | 6236 |
| HEMBA1004944 | F-HEMBA1004944 | 716 | R-HEMBA1004944 | 6237 |
| HEMBA1004954 | F-HEMBA1004954 | 717 | R-HEMBA1004954 | 6238 |
| HEMBA1004956 | F-HEMBA1004956 | 718 | R-HEMBA1004956 | 6239 |
| HEMBA1004960 | F-HEMBA1004960 | 719 | R-HEMBA1004960 | 6240 |
| HEMBA1004972 | F-HEMBA1004972 | 720 | R-HEMBA1004972 | 6241 |
| HEMBA1004973 | F-HEMBA1004973 | 721 | R-HEMBA1004973 | 6242 |
| HEMBA1004977 | F-HEMBA1004977 | 722 | R-HEMBA1004977 | 6243 |
| HEMBA1004978 | F-HEMBA1004978 | 723 | R-HEMBA1004978 | 6244 |
| HEMBA1004980 | F-HEMBA1004980 | 724 | R-HEMBA1004980 | 6245 |
| HEMBA1004983 | F-HEMBA1004983 | 725 | R-HEMBA1004983 | 6246 |
| HEMBA1004995 | F-HEMBA1004995 | 726 | R-HEMBA1004995 | 6247 |
| HEMBA1005008 | F-HEMBA1005008 | 727 | R-HEMBA1005008 | 6248 |
| HEMBA1005009 | F-HEMBA1005009 | 728 | R-HEMBA1005009 | 6249 |
| HEMBA1005019 | F-HEMBA1005019 | 729 | R-HEMBA1005019 | 6250 |
| HEMBA1005029 | F-HEMBA1005029 | 730 | R-HEMBA1005029 | 6251 |
| HEMBA1005035 | F-HEMBA1005035 | 731 | R-HEMBA1005035 | 6252 |
| HEMBA1005039 | F-HEMBA1005039 | 732 | R-HEMBA1005039 | 6253 |
| HEMBA1005047 | F-HEMBA1005047 | 733 | R-HEMBA1005047 | 6254 |
| HEMBA1005050 | F-HEMBA1005050 | 734 | R-HEMBA1005050 | 6255 |
| HEMBA1005062 | F-HEMBA1005062 | 735 | R-HEMBA1005062 | 6256 |
| HEMBA1005066 | F-HEMBA1005066 | 736 | R-HEMBA1005066 | 6257 |
| HEMBA1005075 | F-HEMBA1005075 | 737 | R-HEMBA1005075 | 6258 |
| HEMBA1005079 | F-HEMBA1005079 | 738 | R-HEMBA1005079 | 6259 |
| HEMBA1005083 | F-HEMBA1005083 | 739 | R-HEMBA1005083 | 6260 |
| HEMBA1005101 | F-HEMBA1005101 | 740 | R-HEMBA1005101 | 6261 |
| HEMBA1005113 | F-HEMBA1005113 | 741 | R-HEMBA1005113 | 6262 |
| HEMBA1005123 | F-HEMBA1005123 | 742 | R-HEMBA1005123 | 6263 |
| HEMBA1005133 | F-HEMBA1005133 | 743 | R-HEMBA1005133 | 6264 |
| HEMBA1005149 | F-HEMBA1005149 | 744 | R-HEMBA1005149 | 6265 |
| HEMBA1005152 | F-HEMBA1005152 | 745 | R-HEMBA1005152 | 6266 |
| HEMBA1005159 | F-HEMBA1005159 | 746 | R-HEMBA1005159 | 6267 |
| HEMBA1005185 | F-HEMBA1005185 | 747 | R-HEMBA1005185 | 6268 |
| HEMBA1005201 | F-HEMBA1005201 | 748 | R-HEMBA1005201 | 6269 |
| HEMBA1005202 | F-HEMBA1005202 | 749 | R-HEMBA1005202 | 6270 |
| HEMBA1005206 | F-HEMBA1005206 | 750 | | |
| HEMBA1005219 | F-HEMBA1005219 | 751 | R-HEMBA1005219 | 6271 |
| HEMBA1005223 | F-HEMBA1005223 | 752 | R-HEMBA1005223 | 6272 |
| HEMBA1005232 | F-HEMBA1005232 | 753 | R-HEMBA1005232 | 6273 |
| HEMBA1005241 | F-HEMBA1005241 | 754 | R-HEMBA1005241 | 6274 |
| HEMBA1005244 | F-HEMBA1005244 | 755 | R-HEMBA1005244 | 6275 |
| HEMBA1005251 | F-HEMBA1005251 | 756 | R-HEMBA1005251 | 6276 |
| HEMBA1005252 | F-HEMBA1005252 | 757 | R-HEMBA1005252 | 6277 |
| HEMBA1005274 | F-HEMBA1005274 | 758 | R-HEMBA1005274 | 6278 |
| HEMBA1005275 | F-HEMBA1005275 | 759 | R-HEMBA1005275 | 6279 |
| HEMBA1005293 | F-HEMBA1005293 | 760 | R-HEMBA1005293 | 6280 |
| HEMBA1005296 | F-HEMBA1005296 | 761 | R-HEMBA1005296 | 6281 |
| HEMBA1005304 | F-HEMBA1005304 | 762 | R-HEMBA1005304 | 6282 |
| HEMBA1005311 | F-HEMBA1005311 | 763 | R-HEMBA1005311 | 6283 |
| HEMBA1005314 | F-HEMBA1005314 | 764 | R-HEMBA1005314 | 6284 |
| HEMBA1005315 | F-HEMBA1005315 | 765 | R-HEMBA1005315 | 6285 |
| HEMBA1005318 | F-HEMBA1005318 | 766 | R-HEMBA1005318 | 6286 |
| HEMBA1005331 | F-HEMBA1005331 | 767 | R-HEMBA1005331 | 6287 |
| HEMBA1005338 | F-HEMBA1005338 | 768 | | |
| HEMBA1005353 | F-HEMBA1005353 | 769 | R-HEMBA1005353 | 6288 |
| HEMBA1005359 | F-HEMBA1005359 | 770 | R-HEMBA1005359 | 6289 |
| HEMBA1005367 | F-HEMBA1005367 | 771 | R-HEMBA1005367 | 6290 |
| HEMBA1005372 | F-HEMBA1005372 | 772 | R-HEMBA1005372 | 6291 |
| HEMBA1005374 | F-HEMBA1005374 | 773 | R-HEMBA1005374 | 6292 |
| HEMBA1005382 | F-HEMBA1005382 | 774 | | |
| HEMBA1005389 | F-HEMBA1005389 | 775 | R-HEMBA1005389 | 6293 |
| HEMBA1005394 | F-HEMBA1005394 | 776 | R-HEMBA1005394 | 6294 |
| HEMBA1005403 | F-HEMBA1005403 | 777 | R-HEMBA1005403 | 6295 |
| HEMBA1005408 | F-HEMBA1005408 | 778 | R-HEMBA1005408 | 6296 |
| HEMBA1005410 | F-HEMBA1005410 | 779 | R-HEMBA1005410 | 6297 |
| HEMBA1005411 | F-HEMBA1005411 | 780 | R-HEMBA1005411 | 6298 |
| HEMBA1005423 | F-HEMBA1005423 | 781 | R-HEMBA1005423 | 6299 |
| HEMBA1005426 | F-HEMBA1005426 | 782 | R-HEMBA1005426 | 6300 |
| HEMBA1005443 | F-HEMBA1005443 | 783 | R-HEMBA1005443 | 6301 |
| HEMBA1005447 | F-HEMBA1005447 | 784 | R-HEMBA1005447 | 6302 |
| HEMBA1005468 | F-HEMBA1005468 | 785 | R-HEMBA1005468 | 6303 |
| HEMBA1005469 | F-HEMBA1005469 | 786 | R-HEMBA1005469 | 6304 |
| HEMBA1005472 | F-HEMBA1005472 | 787 | R-HEMBA1005472 | 6305 |
| HEMBA1005474 | F-HEMBA1005474 | 788 | | |
| HEMBA1005475 | F-HEMBA1005475 | 789 | R-HEMBA1005475 | 6306 |
| HEMBA1005497 | F-HEMBA1005497 | 790 | R-HEMBA1005497 | 6307 |
| HEMBA1005500 | F-HEMBA1005500 | 791 | R-HEMBA1005500 | 6308 |
| HEMBA1005506 | F-HEMBA1005506 | 792 | R-HEMBA1005506 | 6309 |
| HEMBA1005508 | F-HEMBA1005508 | 793 | R-HEMBA1005508 | 6310 |
| HEMBA1005511 | F-HEMBA1005511 | 794 | R-HEMBA1005511 | 6311 |
| HEMBA1005513 | F-HEMBA1005513 | 795 | | |
| HEMBA1005517 | F-HEMBA1005517 | 796 | R-HEMBA1005517 | 6312 |
| HEMBA1005518 | F-HEMBA1005518 | 797 | R-HEMBA1005518 | 6313 |
| HEMBA1005520 | F-HEMBA1005520 | 798 | R-HEMBA1005520 | 6314 |
| HEMBA1005526 | F-HEMBA1005526 | 799 | R-HEMBA1005526 | 6315 |
| HEMBA1005528 | F-HEMBA1005528 | 800 | R-HEMBA1005528 | 6316 |
| HEMBA1005530 | F-HEMBA1005530 | 801 | R-HEMBA1005530 | 6317 |
| HEMBA1005548 | F-HEMBA1005548 | 802 | R-HEMBA1005548 | 6318 |
| HEMBA1005552 | F-HEMBA1005552 | 803 | R-HEMBA1005552 | 6319 |
| HEMBA1005558 | F-HEMBA1005558 | 804 | R-HEMBA1005558 | 6320 |
| HEMBA1005568 | F-HEMBA1005568 | 805 | R-HEMBA1005568 | 6321 |
| HEMBA1005570 | F-HEMBA1005570 | 806 | R-HEMBA1005570 | 6322 |
| HEMBA1005576 | F-HEMBA1005576 | 807 | R-HEMBA1005576 | 6323 |
| HEMBA1005577 | F-HEMBA1005577 | 808 | R-HEMBA1005577 | 6324 |
| HEMBA1005581 | F-HEMBA1005581 | 809 | R-HEMBA1005581 | 6325 |
| HEMBA1005582 | F-HEMBA1005582 | 810 | R-HEMBA1005582 | 6326 |
| HEMBA1005583 | F-HEMBA1005583 | 811 | R-HEMBA1005583 | 6327 |
| HEMBA1005588 | F-HEMBA1005588 | 812 | R-HEMBA1005588 | 6328 |
| HEMBA1005593 | F-HEMBA1005593 | 813 | R-HEMBA1005593 | 6329 |
| HEMBA1005595 | F-HEMBA1005595 | 814 | R-HEMBA1005595 | 6330 |
| HEMBA1005606 | F-HEMBA1005606 | 815 | R-HEMBA1005606 | 6331 |
| HEMBA1005609 | F-HEMBA1005609 | 816 | R-HEMBA1005609 | 6332 |
| HEMBA1005616 | F-HEMBA1005616 | 817 | R-HEMBA1005616 | 6333 |
| HEMBA1005621 | F-HEMBA1005621 | 818 | R-HEMBA1005621 | 6334 |
| HEMBA1005627 | F-HEMBA1005627 | 819 | R-HEMBA1005627 | 6335 |
| HEMBA1005631 | F-HEMBA1005631 | 820 | R-HEMBA1005631 | 6336 |
| HEMBA1005632 | F-HEMBA1005632 | 821 | R-HEMBA1005632 | 6337 |
| HEMBA1005634 | F-HEMBA1005634 | 822 | R-HEMBA1005634 | 6338 |
| HEMBA1005666 | F-HEMBA1005666 | 823 | R-HEMBA1005666 | 6339 |
| HEMBA1005670 | F-HEMBA1005670 | 824 | R-HEMBA1005670 | 6340 |
| HEMBA1005679 | F-HEMBA1005679 | 825 | R-HEMBA1005679 | 6341 |
| HEMBA1005680 | F-HEMBA1005680 | 826 | R-HEMBA1005680 | 6342 |
| HEMBA1005685 | F-HEMBA1005685 | 827 | R-HEMBA1005685 | 6343 |
| HEMBA1005699 | F-HEMBA1005699 | 828 | R-HEMBA1005699 | 6344 |
| HEMBA1005705 | F-HEMBA1005705 | 829 | R-HEMBA1005705 | 6345 |
| HEMBA1005717 | F-HEMBA1005717 | 830 | R-HEMBA1005717 | 6346 |
| HEMBA1005732 | F-HEMBA1005732 | 831 | R-HEMBA1005732 | 6347 |
| HEMBA1005737 | F-HEMBA1005737 | 832 | R-HEMBA1005737 | 6348 |
| HEMBA1005746 | F-HEMBA1005746 | 833 | R-nnnnnnnnnnnn | 6349 |
| HEMBA1005755 | F-HEMBA1005755 | 834 | R-HEMBA1005755 | 6350 |
| HEMBA1005765 | F-HEMBA1005765 | 835 | R-HEMBA1005765 | 6351 |
| HEMBA1005780 | F-HEMBA1005780 | 836 | R-HEMBA1005780 | 6352 |
| HEMBA1005813 | F-HEMBA1005813 | 837 | R-HEMBA1005813 | 6353 |
| HEMBA1005815 | F-HEMBA1005815 | 838 | R-HEMBA1005815 | 6354 |
| HEMBA1005822 | F-HEMBA1005822 | 839 | R-HEMBA1005822 | 6355 |
| HEMBA1005829 | F-HEMBA1005829 | 840 | R-HEMBA1005829 | 6356 |
| HEMBA1005834 | F-HEMBA1005834 | 841 | R-HEMBA1005834 | 6357 |
| HEMBA1005852 | F-HEMBA1005852 | 842 | R-HEMBA1005852 | 6358 |
| HEMBA1005853 | F-HEMBA1005853 | 843 | R-HEMBA1005853 | 6359 |
| HEMBA1005884 | F-HEMBA1005884 | 844 | R-HEMBA1005884 | 6360 |
| HEMBA1005891 | F-HEMBA1005891 | 845 | R-HEMBA1005891 | 6361 |
| HEMBA1005894 | F-HEMBA1005894 | 846 | R-HEMBA1005894 | 6362 |
| HEMBA1005909 | F-HEMBA1005909 | 847 | R-HEMBA1005909 | 6363 |
| HEMBA1005911 | F-HEMBA1005911 | 848 | R-HEMBA1005911 | 6364 |
| HEMBA1005921 | F-HEMBA1005921 | 849 | R-HEMBA1005921 | 6365 |
| HEMBA1005931 | F-HEMBA1005931 | 850 | R-HEMBA1005931 | 6366 |
| HEMBA1005934 | F-HEMBA1005934 | 851 | R-HEMBA1005934 | 6367 |
| HEMBA1005962 | F-HEMBA1005962 | 852 | R-HEMBA1005962 | 6368 |
| HEMBA1005963 | F-HEMBA1005963 | 853 | R-HEMBA1005963 | 6369 |
| HEMBA1005990 | F-HEMBA1005990 | 854 | R-HEMBA1005990 | 6370 |
| HEMBA1005991 | F-HEMBA1005991 | 855 | R-HEMBA1005991 | 6371 |
| HEMBA1005999 | F-HEMBA1005999 | 856 | R-HEMBA1005999 | 6372 |
| HEMBA1006002 | F-HEMBA1006002 | 857 | R-HEMBA1006002 | 6373 |
| HEMBA1006005 | F-HEMBA1006005 | 858 | R-HEMBA1006005 | 6374 |
| HEMBA1006031 | F-HEMBA1006031 | 859 | R-nnnnnnnnnnnn | 6375 |
| HEMBA1006035 | F-HEMBA1006035 | 860 | R-HEMBA1006035 | 6376 |
| HEMBA1006036 | F-HEMBA1006036 | 861 | R-HEMBA1006036 | 6377 |
| HEMBA1006042 | F-HEMBA1006042 | 862 | R-HEMBA1006042 | 6378 |
| HEMBA1006067 | F-HEMBA1006067 | 863 | R-nnnnnnnnnnnn | 6379 |
| HEMBA1006081 | F-HEMBA1006081 | 864 | R-HEMBA1006081 | 6380 |
| HEMBA1006090 | F-HEMBA1006090 | 865 | R-HEMBA1006090 | 6381 |
| HEMBA1006091 | F-HEMBA1006091 | 866 | R-HEMBA1006091 | 6382 |
| HEMBA1006100 | F-HEMBA1006100 | 867 | R-HEMBA1006100 | 6383 |
| HEMBA1006108 | F-HEMBA1006108 | 868 | R-HEMBA1006108 | 6384 |
| HEMBA1006121 | F-HEMBA1006121 | 869 | R-HEMBA1006121 | 6385 |
| HEMBA1006124 | F-HEMBA1006124 | 870 | R-HEMBA1006124 | 6386 |
| HEMBA1006130 | F-HEMBA1006130 | 871 | R-HEMBA1006130 | 6387 |
| HEMBA1006138 | F-HEMBA1006138 | 872 | R-nnnnnnnnnnnn | 6388 |
| HEMBA1006142 | F-HEMBA1006142 | 873 | R-HEMBA1006142 | 6389 |
| HEMBA1006155 | F-HEMBA1006155 | 874 | R-HEMBA1006155 | 6390 |
| HEMBA1006158 | F-HEMBA1006158 | 875 | R-HEMBA1006158 | 6391 |
| HEMBA1006173 | F-HEMBA1006173 | 876 | R-HEMBA1006173 | 6392 |
| HEMBA1006182 | F-HEMBA1006182 | 877 | R-HEMBA1006182 | 6393 |
| HEMBA1006198 | F-HEMBA1006198 | 878 | R-HEMBA1006198 | 6394 |
| HEMBA1006235 | F-HEMBA1006235 | 879 | R-HEMBA1006235 | 6395 |
| HEMBA1006248 | F-HEMBA1006248 | 880 | R-HEMBA1006248 | 6396 |
| HEMBA1006252 | F-HEMBA1006252 | 881 | R-HEMBA1006252 | 6397 |
| HEMBA1006253 | F-HEMBA1006253 | 882 | R-HEMBA1006253 | 6398 |
| HEMBA1006259 | F-HEMBA1006259 | 883 | R-HEMBA1006259 | 6399 |
| HEMBA1006268 | F-HEMBA1006268 | 884 | R-HEMBA1006268 | 6400 |
| HEMBA1006272 | F-HEMBA1006272 | 885 | R-HEMBA1006272 | 6401 |
| HEMBA1006278 | F-HEMBA1006278 | 886 | R-nnnnnnnnnnnn | 6402 |
| HEMBA1006283 | F-HEMBA1006283 | 887 | R-HEMBA1006283 | 6403 |
| HEMBA1006284 | F-HEMBA1006284 | 888 | R-HEMBA1006284 | 6404 |
| HEMBA1006291 | F-HEMBA1006291 | 889 | R-HEMBA1006291 | 6405 |
| HEMBA1006293 | F-HEMBA1006293 | 890 | R-HEMBA1006293 | 6406 |
| HEMBA1006309 | F-HEMBA1006309 | 891 | R-HEMBA1006309 | 6407 |
| HEMBA1006310 | F-HEMBA1006310 | 892 | R-HEMBA1006310 | 6408 |
| HEMBA1006328 | F-HEMBA1006328 | 893 | R-HEMBA1006328 | 6409 |
| HEMBA1006334 | F-HEMBA1006334 | 894 | R-HEMBA1006334 | 6410 |
| HEMBA1006344 | F-HEMBA1006344 | 895 | R-HEMBA1006344 | 6411 |
| HEMBA1006347 | F-HEMBA1006347 | 896 | R-HEMBA1006347 | 6412 |
| HEMBA1006349 | F-HEMBA1006349 | 897 | R-HEMBA1006349 | 6413 |
| HEMBA1006359 | F-HEMBA1006359 | 898 | R-HEMBA1006359 | 6414 |
| HEMBA1006364 | F-HEMBA1006364 | 899 | R-HEMBA1006364 | 6415 |
| HEMBA1006377 | F-HEMBA1006377 | 900 | R-HEMBA1006377 | 6416 |
| HEMBA1006380 | F-HEMBA1006380 | 901 | R-HEMBA1006380 | 6417 |
| HEMBA1006381 | F-HEMBA1006381 | 902 | R-HEMBA1006381 | 6418 |
| HEMBA1006398 | F-HEMBA1006398 | 903 | R-HEMBA1006398 | 6419 |
| HEMBA1006416 | F-HEMBA1006416 | 904 | R-HEMBA1006416 | 6420 |
| HEMBA1006419 | F-HEMBA1006419 | 905 | R-HEMBA1006419 | 6421 |
| HEMBA1006421 | F-HEMBA1006421 | 906 | R-HEMBA1006421 | 6422 |
| HEMBA1006424 | F-HEMBA1006424 | 907 | R-HEMBA1006424 | 6423 |
| HEMBA1006426 | F-HEMBA1006426 | 908 | R-HEMBA1006426 | 6424 |
| HEMBA1006438 | F-HEMBA1006438 | 909 | R-HEMBA1006438 | 6425 |
| HEMBA1006445 | F-HEMBA1006445 | 910 | R-HEMBA1006445 | 6426 |
| HEMBA1006446 | F-HEMBA1006446 | 911 | R-HEMBA1006446 | 6427 |
| HEMBA1006461 | F-HEMBA1006461 | 912 | R-HEMBA1006461 | 6428 |
| HEMBA1006467 | F-HEMBA1006467 | 913 | R-HEMBA1006467 | 6429 |
| HEMBA1006471 | F-HEMBA1006471 | 914 | R-HEMBA1006471 | 6430 |
| HEMBA1006474 | F-HEMBA1006474 | 915 | R-HEMBA1006474 | 6431 |
| HEMBA1006483 | F-HEMBA1006483 | 916 | R-HEMBA1006483 | 6432 |
| HEMBA1006485 | F-HEMBA1006485 | 917 | R-HEMBA1006485 | 6433 |
| HEMBA1006486 | F-HEMBA1006486 | 918 | R-HEMBA1006486 | 6434 |
| HEMBA1006489 | F-HEMBA1006489 | 919 | R-HEMBA1006489 | 6435 |
| HEMBA1006492 | F-HEMBA1006492 | 920 | R-HEMBA1006492 | 6436 |
| HEMBA1006494 | F-HEMBA1006494 | 921 | R-HEMBA1006494 | 6437 |
| HEMBA1006497 | F-HEMBA1006497 | 922 | R-HEMBA1006497 | 6438 |
| HEMBA1006502 | F-HEMBA1006502 | 923 | R-HEMBA1006502 | 6439 |
| HEMBA1006507 | F-HEMBA1006507 | 924 | R-HEMBA1006507 | 6440 |
| HEMBA1006521 | F-HEMBA1006521 | 925 | R-HEMBA1006521 | 6441 |
| HEMBA1006530 | F-HEMBA1006530 | 926 | R-HEMBA1006530 | 6442 |
| HEMBA1006535 | F-HEMBA1006535 | 927 | R-HEMBA1006535 | 6443 |
| HEMBA1006540 | F-HEMBA1006540 | 928 | R-HEMBA1006540 | 6444 |
| HEMBA1006546 | F-HEMBA1006546 | 929 | R-HEMBA1006546 | 6445 |
| HEMBA1006559 | F-HEMBA1006559 | 930 | R-HEMBA1006559 | 6446 |
| HEMBA1006562 | F-HEMBA1006562 | 931 | R-HEMBA1006562 | 6447 |
| HEMBA1006566 | F-HEMBA1006566 | 932 | R-HEMBA1006566 | 6448 |
| HEMBA1006569 | F-HEMBA1006569 | 933 | R-HEMBA1006569 | 6449 |
| HEMBA1006579 | F-HEMBA1006579 | 934 | R-HEMBA1006579 | 6450 |
| HEMBA1006583 | F-HEMBA1006583 | 935 | R-HEMBA1006583 | 6451 |
| HEMBA1006595 | F-HEMBA1006595 | 936 | R-HEMBA1006595 | 6452 |
| HEMBA1006597 | F-HEMBA1006597 | 937 | R-HEMBA1006597 | 6453 |
| HEMBA1006612 | F-HEMBA1006612 | 938 | R-HEMBA1006612 | 6454 |
| HEMBA1006617 | F-HEMBA1006617 | 939 | R-nnnnnnnnnnnn | 6455 |
| HEMBA1006624 | F-HEMBA1006624 | 940 | R-HEMBA1006624 | 6456 |
| HEMBA1006631 | F-HEMBA1006631 | 941 | R-HEMBA1006631 | 6457 |
| HEMBA1006635 | F-HEMBA1006635 | 942 | R-HEMBA1006635 | 6458 |
| HEMBA1006639 | F-HEMBA1006639 | 943 | R-HEMBA1006639 | 6459 |
| HEMBA1006643 | F-HEMBA1006643 | 944 | R-HEMBA1006643 | 6460 |
| HEMBA1006648 | F-HEMBA1006648 | 945 | R-HEMBA1006648 | 6461 |
| HEMBA1006652 | F-HEMBA1006652 | 946 | R-HEMBA1006652 | 6462 |
| HEMBA1006653 | F-HEMBA1006653 | 947 | R-HEMBA1006653 | 6463 |
| HEMBA1006659 | F-HEMBA1006659 | 948 | | |
| HEMBA1006665 | F-HEMBA1006665 | 949 | R-HEMBA1006665 | 6464 |
| HEMBA1006674 | F-HEMBA1006674 | 950 | R-HEMBA1006674 | 6465 |
| HEMBA1006676 | F-HEMBA1006676 | 951 | R-HEMBA1006676 | 6466 |
| HEMBA1006682 | F-HEMBA1006682 | 952 | R-HEMBA1006682 | 6467 |
| HEMBA1006695 | F-HEMBA1006695 | 953 | R-HEMBA1006695 | 6468 |
| HEMBA1006696 | F-HEMBA1006696 | 954 | R-HEMBA1006696 | 6469 |
| HEMBA1006708 | F-HEMBA1006708 | 955 | R-HEMBA1006708 | 6470 |
| HEMBA1006709 | F-HEMBA1006709 | 956 | R-HEMBA1006709 | 6471 |
| HEMBA1006717 | F-HEMBA1006717 | 957 | R-HEMBA1006717 | 6472 |
| HEMBA1006737 | F-HEMBA1006737 | 958 | R-HEMBA1006737 | 6473 |
| HEMBA1006744 | F-HEMBA1006744 | 959 | R-HEMBA1006744 | 6474 |
| HEMBA1006754 | F-HEMBA1006754 | 960 | R-HEMBA1006754 | 6475 |
| HEMBA1006758 | F-HEMBA1006758 | 961 | R-HEMBA1006758 | 6476 |
| HEMBA1006767 | F-HEMBA1006767 | 962 | R-HEMBA1006767 | 6477 |
| HEMBA1006779 | F-HEMBA1006779 | 963 | R-HEMBA1006779 | 6478 |
| HEMBA1006780 | F-HEMBA1006780 | 964 | R-HEMBA1006780 | 6479 |
| HEMBA1006789 | F-HEMBA1006789 | 965 | R-HEMBA1006789 | 6480 |
| HEMBA1006795 | F-HEMBA1006795 | 966 | R-HEMBA1006795 | 6481 |
| HEMBA1006796 | F-HEMBA1006796 | 967 | R-HEMBA1006796 | 6482 |
| HEMBA1006807 | F-HEMBA1006807 | 968 | R-HEMBA1006807 | 6483 |
| HEMBA1006821 | F-HEMBA1006821 | 969 | R-HEMBA1006821 | 6484 |
| HEMBA1006824 | F-HEMBA1006824 | 970 | R-HEMBA1006824 | 6485 |
| HEMBA1006832 | F-HEMBA1006832 | 971 | R-HEMBA1006832 | 6486 |
| HEMBA1006849 | F-HEMBA1006849 | 972 | R-HEMBA1006849 | 6487 |
| HEMBA1006865 | F-HEMBA1006865 | 973 | R-HEMBA1006865 | 6488 |
| HEMBA1006877 | F-HEMBA1006877 | 974 | R-nnnnnnnnnnnn | 6489 |
| HEMBA1006885 | F-HEMBA1006885 | 975 | R-HEMBA1006885 | 6490 |
| HEMBA1006900 | F-HEMBA1006900 | 976 | R-HEMBA1006900 | 6491 |
| HEMBA1006914 | F-HEMBA1006914 | 977 | | |
| HEMBA1006921 | F-HEMBA1006921 | 978 | R-HEMBA1006921 | 6492 |
| HEMBA1006926 | F-HEMBA1006926 | 979 | R-HEMBA1006926 | 6493 |
| HEMBA1006929 | F-HEMBA1006929 | 980 | R-HEMBA1006929 | 6494 |
| HEMBA1006936 | F-HEMBA1006936 | 981 | R-HEMBA1006936 | 6495 |
| HEMBA1006938 | F-HEMBA1006938 | 982 | R-HEMBA1006938 | 6496 |
| HEMBA1006941 | F-HEMBA1006941 | 983 | R-HEMBA1006941 | 6497 |
| HEMBA1006949 | F-HEMBA1006949 | 984 | R-HEMBA1006949 | 6498 |
| HEMBA1006973 | F-HEMBA1006973 | 985 | R-HEMBA1006973 | 6499 |
| HEMBA1006976 | F-HEMBA1006976 | 986 | R-HEMBA1006976 | 6500 |
| HEMBA1006993 | F-HEMBA1006993 | 987 | R-HEMBA1006993 | 6501 |
| HEMBA1006996 | F-HEMBA1006996 | 988 | R-HEMBA1006996 | 6502 |
| HEMBA1007002 | F-HEMBA1007002 | 989 | R-HEMBA1007002 | 6503 |
| HEMBA1007017 | F-HEMBA1007017 | 990 | R-HEMBA1007017 | 6504 |
| HEMBA1007018 | F-HEMBA1007018 | 991 | R-HEMBA1007018 | 6505 |
| HEMBA1007045 | F-HEMBA1007045 | 992 | R-HEMBA1007045 | 6506 |
| HEMBA1007051 | F-HEMBA1007051 | 993 | R-HEMBA1007051 | 6507 |
| HEMBA1007052 | F-HEMBA1007052 | 994 | R-HEMBA1007052 | 6508 |
| HEMBA1007062 | F-HEMBA1007062 | 995 | R-HEMBA1007062 | 6509 |
| HEMBA1007066 | F-HEMBA1007066 | 996 | R-HEMBA1007066 | 6510 |
| HEMBA1007073 | F-HEMBA1007073 | 997 | R-HEMBA1007073 | 6511 |
| HEMBA1007078 | F-HEMBA1007078 | 998 | R-HEMBA1007078 | 6512 |
| HEMBA1007080 | F-HEMBA1007080 | 999 | | |
| HEMBA1007085 | F-HEMBA1007085 | 1000 | R-HEMBA1007085 | 6513 |
| HEMBA1007087 | F-HEMBA1007087 | 1001 | R-HEMBA1007087 | 6514 |
| HEMBA1007112 | F-HEMBA1007112 | 1002 | R-HEMBA1007112 | 6515 |
| HEMBA1007113 | F-HEMBA1007113 | 1003 | R-HEMBA1007113 | 6516 |
| HEMBA1007121 | F-HEMBA1007121 | 1004 | | |
| HEMBA1007129 | F-HEMBA1007129 | 1005 | R-HEMBA1007129 | 6517 |
| HEMBA1007147 | F-HEMBA1007147 | 1006 | R-HEMBA1007147 | 6518 |
| HEMBA1007149 | F-HEMBA1007149 | 1007 | R-HEMBA1007149 | 6519 |
| HEMBA1007151 | F-HEMBA1007151 | 1008 | R-HEMBA1007151 | 6520 |
| HEMBA1007174 | F-HEMBA1007174 | 1009 | R-nnnnnnnnnnnn | 6521 |
| HEMBA1007178 | F-HEMBA1007178 | 1010 | R-HEMBA1007178 | 6522 |
| HEMBA1007194 | F-HEMBA1007194 | 1011 | R-HEMBA1007194 | 6523 |
| HEMBA1007203 | F-HEMBA1007203 | 1012 | R-HEMBA1007203 | 6524 |
| HEMBA1007206 | F-HEMBA1007206 | 1013 | R-HEMBA1007206 | 6525 |
| HEMBA1007224 | F-HEMBA1007224 | 1014 | R-HEMBA1007224 | 6526 |
| HEMBA1007243 | F-HEMBA1007243 | 1015 | | |
| HEMBA1007251 | F-HEMBA1007251 | 1016 | R-HEMBA1007251 | 6527 |
| HEMBA1007256 | F-HEMBA1007256 | 1017 | R-HEMBA1007256 | 6528 |
| HEMBA1007267 | F-HEMBA1007267 | 1018 | R-HEMBA1007267 | 6529 |
| HEMBA1007273 | F-HEMBA1007273 | 1019 | R-HEMBA1007273 | 6530 |
| HEMBA1007279 | F-HEMBA1007279 | 1020 | R-HEMBA1007279 | 6531 |
| HEMBA1007281 | F-HEMBA1007281 | 1021 | R-HEMBA1007281 | 6532 |
| HEMBA1007288 | F-HEMBA1007288 | 1022 | R-HEMBA1007288 | 6533 |
| HEMBA1007300 | F-HEMBA1007300 | 1023 | R-HEMBA1007300 | 6534 |
| HEMBA1007301 | F-HEMBA1007301 | 1024 | R-HEMBA1007301 | 6535 |
| HEMBA1007319 | F-HEMBA1007319 | 1025 | R-HEMBA1007319 | 6536 |
| HEMBA1007320 | F-HEMBA1007320 | 1026 | R-HEMBA1007320 | 6537 |
| HEMBA1007322 | F-HEMBA1007322 | 1027 | R-HEMBA1007322 | 6538 |
| HEMBA1007327 | F-HEMBA1007327 | 1028 | R-HEMBA1007327 | 6539 |
| HEMBA1007341 | F-HEMBA1007341 | 1029 | R-HEMBA1007341 | 6540 |
| HEMBA1007342 | F-HEMBA1007342 | 1030 | R-HEMBA1007342 | 6541 |
| HEMBA1007347 | F-HEMBA1007347 | 1031 | R-HEMBA1007347 | 6542 |
| HEMBB1000005 | F-HEMBB1000005 | 1032 | R-HEMBB1000005 | 6543 |
| HEMBB1000008 | F-HEMBB1000008 | 1033 | R-HEMBB1000008 | 6544 |
| HEMBB1000018 | F-HEMBB1000018 | 1034 | R-HEMBB1000018 | 6545 |
| HEMBB1000024 | F-HEMBB1000024 | 1035 | R-HEMBB1000024 | 6546 |
| HEMBB1000025 | F-HEMBB1000025 | 1036 | R-HEMBB1000025 | 6547 |
| HEMBB1000030 | F-HEMBB1000030 | 1037 | R-HEMBB1000030 | 6548 |
| HEMBB1000036 | F-HEMBB1000036 | 1038 | R-HEMBB1000036 | 6549 |
| HEMBB1000037 | F-HEMBB1000037 | 1039 | R-HEMBB1000037 | 6550 |
| HEMBB1000039 | F-HEMBB1000039 | 1040 | R-HEMBB1000039 | 6551 |
| HEMBB1000044 | F-HEMBB1000044 | 1041 | R-HEMBB1000044 | 6552 |
| HEMBB1000048 | F-HEMBB1000048 | 1042 | R-HEMBB1000048 | 6553 |
| HEMBB1000050 | F-HEMBB1000050 | 1043 | R-HEMBB1000050 | 6554 |
| HEMBB1000054 | F-HEMBB1000054 | 1044 | R-HEMBB1000054 | 6555 |
| HEMBB1000055 | F-HEMBB1000055 | 1045 | R-HEMBB1000055 | 6556 |
| HEMBB1000059 | F-HEMBB1000059 | 1046 | R-HEMBB1000059 | 6557 |
| HEMBB1000083 | F-HEMBB1000083 | 1047 | R-HEMBB1000083 | 6558 |
| HEMBB1000089 | F-HEMBB1000089 | 1048 | R-HEMBB1000089 | 6559 |
| HEMBB1000099 | F-HEMBB1000099 | 1049 | R-HEMBB1000099 | 6560 |
| HEMBB1000103 | F-HEMBB1000103 | 1050 | R-HEMBB1000103 | 6561 |
| HEMBB1000113 | F-HEMBB1000113 | 1051 | R-HEMBB1000113 | 6562 |
| HEMBB1000119 | F-HEMBB1000119 | 1052 | R-HEMBB1000119 | 6563 |
| HEMBB1000136 | F-HEMBB1000136 | 1053 | R-HEMBB1000136 | 6564 |
| HEMBB1000141 | F-HEMBB1000141 | 1054 | R-HEMBB1000141 | 6565 |
| HEMBB1000144 | F-HEMBB1000144 | 1055 | R-HEMBB1000144 | 6566 |
| HEMBB1000173 | F-HEMBB1000173 | 1056 | R-HEMBB1000173 | 6567 |
| HEMBB1000175 | F-HEMBB1000175 | 1057 | R-HEMBB1000175 | 6568 |
| HEMBB1000198 | F-HEMBB1000198 | 1058 | R-HEMBB1000198 | 6569 |
| HEMBB1000215 | F-HEMBB1000215 | 1059 | R-HEMBB1000215 | 6570 |
| HEMBB1000217 | F-HEMBB1000217 | 1060 | R-HEMBB1000217 | 6571 |
| HEMBB1000218 | F-HEMBB1000218 | 1061 | R-HEMBB1000218 | 6572 |
| HEMBB1000226 | F-HEMBB1000226 | 1062 | R-HEMBB1000226 | 6573 |
| HEMBB1000240 | F-HEMBB1000240 | 1063 | R-HEMBB1000240 | 6574 |
| HEMBB1000244 | F-HEMBB1000244 | 1064 | R-HEMBB1000244 | 6575 |
| HEMBB1000250 | F-HEMBB1000250 | 1065 | R-HEMBB1000250 | 6576 |
| HEMBB1000258 | F-HEMBB1000258 | 1066 | R-HEMBB1000258 | 6577 |
| HEMBB1000264 | F-HEMBB1000264 | 1067 | R-HEMBB1000264 | 6578 |
| HEMBB1000266 | F-HEMBB1000266 | 1068 | R-HEMBB1000266 | 6579 |
| HEMBB1000272 | F-HEMBB1000272 | 1069 | R-HEMBB1000272 | 6580 |
| HEMBB1000274 | F-HEMBB1000274 | 1070 | R-HEMBB1000274 | 6581 |
| HEMBB1000284 | F-HEMBB1000284 | 1071 | R-HEMBB1000284 | 6582 |
| HEMBB1000307 | F-HEMBB1000307 | 1072 | R-HEMBB1000307 | 6583 |
| HEMBB1000312 | F-HEMBB1000312 | 1073 | R-HEMBB1000312 | 6584 |
| HEMBB1000317 | F-HEMBB1000317 | 1074 | R-HEMBB1000317 | 6585 |
| HEMBB1000318 | F-HEMBB1000318 | 1075 | R-HEMBB1000318 | 6586 |
| HEMBB1000335 | F-HEMBB1000335 | 1076 | R-HEMBB1000335 | 6587 |
| HEMBB1000336 | F-HEMBB1000336 | 1077 | R-HEMBB1000336 | 6588 |
| HEMBB1000337 | F-HEMBB1000337 | 1078 | R-HEMBB1000337 | 6589 |
| HEMBB1000338 | F-HEMBB1000338 | 1079 | R-HEMBB1000338 | 6590 |
| HEMBB1000339 | F-HEMBB1000339 | 1080 | R-HEMBB1000339 | 6591 |
| HEMBB1000341 | F-HEMBB1000341 | 1081 | R-HEMBB1000341 | 6592 |
| HEMBB1000343 | F-HEMBB1000343 | 1082 | R-HEMBB1000343 | 6593 |
| HEMBB1000354 | F-HEMBB1000354 | 1083 | R-HEMBB1000354 | 6594 |
| HEMBB1000369 | F-HEMBB1000369 | 1084 | R-HEMBB1000369 | 6595 |
| HEMBB1000374 | F-HEMBB1000374 | 1085 | R-HEMBB1000374 | 6596 |
| HEMBB1000376 | F-HEMBB1000376 | 1086 | R-HEMBB1000376 | 6597 |
| HEMBB1000391 | F-HEMBB1000391 | 1087 | R-HEMBB1000391 | 6598 |
| HEMBB1000399 | F-HEMBB1000399 | 1088 | R-HEMBB1000399 | 6599 |
| HEMBB1000402 | F-HEMBB1000402 | 1089 | R-HEMBB1000402 | 6600 |
| HEMBB1000404 | F-HEMBB1000404 | 1090 | R-HEMBB1000404 | 6601 |
| HEMBB1000420 | F-HEMBB1000420 | 1091 | R-HEMBB1000420 | 6602 |
| HEMBB1000434 | F-HEMBB1000434 | 1092 | R-HEMBB1000434 | 6603 |
| HEMBB1000438 | F-HEMBB1000438 | 1093 | R-HEMBB1000438 | 6604 |
| HEMBB1000441 | F-HEMBB1000441 | 1094 | R-HEMBB1000441 | 6605 |
| HEMBB1000449 | F-HEMBB1000449 | 1095 | R-HEMBB1000449 | 6606 |
| HEMBB1000455 | F-HEMBB1000455 | 1096 | R-HEMBB1000455 | 6607 |
| HEMBB1000472 | F-HEMBB1000472 | 1097 | R-HEMBB1000472 | 6608 |
| HEMBB1000480 | F-HEMBB1000480 | 1098 | R-HEMBB1000480 | 6609 |
| HEMBB1000487 | F-HEMBB1000487 | 1099 | R-HEMBB1000487 | 6610 |
| HEMBB1000490 | F-HEMBB1000490 | 1100 | R-HEMBB1000490 | 6611 |
| HEMBB1000491 | F-HEMBB1000491 | 1101 | R-HEMBB1000491 | 6612 |
| HEMBB1000493 | F-HEMBB1000493 | 1102 | R-HEMBB1000493 | 6613 |
| HEMBB1000510 | F-HEMBB1000510 | 1103 | R-HEMBB1000510 | 6614 |
| HEMBB1000518 | F-HEMBB1000518 | 1104 | R-HEMBB1000518 | 6615 |
| HEMBB1000523 | F-HEMBB1000523 | 1105 | R-HEMBB1000523 | 6616 |
| HEMBB1000530 | F-HEMBB1000530 | 1106 | R-HEMBB1000530 | 6617 |
| HEMBB1000550 | F-HEMBB1000550 | 1107 | R-HEMBB1000550 | 6618 |
| HEMBB1000554 | F-HEMBB1000554 | 1108 | R-HEMBB1000554 | 6619 |
| HEMBB1000556 | F-HEMBB1000556 | 1109 | R-HEMBB1000556 | 6620 |
| HEMBB1000564 | F-HEMBB1000564 | 1110 | R-HEMBB1000564 | 6621 |
| HEMBB1000573 | F-HEMBB1000573 | 1111 | R-HEMBB1000573 | 6622 |
| HEMBB1000575 | F-HEMBB1000575 | 1112 | R-HEMBB1000575 | 6623 |
| HEMBB1000586 | F-HEMBB1000586 | 1113 | R-HEMBB1000586 | 6624 |
| HEMBB1000589 | F-HEMBB1000589 | 1114 | R-HEMBB1000589 | 6625 |
| HEMBB1000591 | F-HEMBB1000591 | 1115 | R-HEMBB1000591 | 6626 |
| HEMBB1000592 | F-HEMBB1000592 | 1116 | R-HEMBB1000592 | 6627 |
| HEMBB1000593 | F-HEMBB1000593 | 1117 | | |
| HEMBB1000598 | F-HEMBB1000598 | 1118 | R-HEMBB1000598 | 6628 |
| HEMBB1000623 | F-HEMBB1000623 | 1119 | R-HEMBB1000623 | 6629 |
| HEMBB1000630 | F-HEMBB1000630 | 1120 | R-HEMBB1000630 | 6630 |
| HEMBB1000631 | F-HEMBB1000631 | 1121 | R-HEMBB1000631 | 6631 |
| HEMBB1000632 | F-HEMBB1000632 | 1122 | R-HEMBB1000632 | 6632 |
| HEMBB1000637 | F-HEMBB1000637 | 1123 | R-HEMBB1000637 | 6633 |
| HEMBB1000638 | F-HEMBB1000638 | 1124 | R-HEMBB1000638 | 6634 |
| HEMBB1000643 | F-HEMBB1000643 | 1125 | R-HEMBB1000643 | 6635 |
| HEMBB1000649 | F-HEMBB1000649 | 1126 | R-HEMBB1000649 | 6636 |
| HEMBB1000652 | F-HEMBB1000652 | 1127 | R-HEMBB1000652 | 6637 |
| HEMBB1000665 | F-HEMBB1000665 | 1128 | R-HEMBB1000665 | 6638 |
| HEMBB1000671 | F-HEMBB1000671 | 1129 | R-HEMBB1000671 | 6639 |
| HEMBB1000673 | F-HEMBB1000673 | 1130 | R-HEMBB1000673 | 6640 |
| HEMBB1000684 | F-HEMBB1000684 | 1131 | R-HEMBB1000684 | 6641 |
| HEMBB1000693 | F-HEMBB1000693 | 1132 | R-nnnnnnnnnnnn | 6642 |
| HEMBB1000705 | F-HEMBB1000705 | 1133 | R-HEMBB1000705 | 6643 |
| HEMBB1000706 | F-HEMBB1000706 | 1134 | R-HEMBB1000706 | 6644 |
| HEMBB1000709 | F-HEMBB1000709 | 1135 | R-HEMBB1000709 | 6645 |
| HEMBB1000725 | F-HEMBB1000725 | 1136 | R-HEMBB1000725 | 6646 |
| HEMBB1000726 | F-HEMBB1000726 | 1137 | R-HEMBB1000726 | 6647 |
| HEMBB1000738 | F-HEMBB1000738 | 1138 | R-HEMBB1000738 | 6648 |
| HEMBB1000749 | F-HEMBB1000749 | 1139 | R-HEMBB1000749 | 6649 |
| HEMBB1000763 | F-HEMBB1000763 | 1140 | R-HEMBB1000763 | 6650 |
| HEMBB1000770 | F-HEMBB1000770 | 1141 | R-HEMBB1000770 | 6651 |
| HEMBB1000774 | F-HEMBB1000774 | 1142 | | |
| HEMBB1000781 | F-HEMBB1000781 | 1143 | R-HEMBB1000781 | 6652 |
| HEMBB1000789 | F-HEMBB1000789 | 1144 | R-HEMBB1000789 | 6653 |
| HEMBB1000790 | F-HEMBB1000790 | 1145 | R-HEMBB1000790 | 6654 |
| HEMBB1000794 | F-HEMBB1000794 | 1146 | R-HEMBB1000794 | 6655 |
| HEMBB1000807 | F-HEMBB1000807 | 1147 | R-HEMBB1000807 | 6656 |
| HEMBB1000810 | F-HEMBB1000810 | 1148 | R-HEMBB1000810 | 6657 |
| HEMBB1000821 | F-HEMBB1000821 | 1149 | R-HEMBB1000821 | 6658 |
| HEMBB1000822 | F-HEMBB1000822 | 1150 | R-HEMBB1000822 | 6659 |
| HEMBB1000826 | F-HEMBB1000826 | 1151 | R-HEMBB1000826 | 6660 |
| HEMBB1000827 | F-HEMBB1000827 | 1152 | R-HEMBB1000827 | 6661 |
| HEMBB1000831 | F-HEMBB1000831 | 1153 | R-HEMBB1000831 | 6662 |
| HEMBB1000835 | F-HEMBB1000835 | 1154 | R-HEMBB1000835 | 6663 |
| HEMBB1000840 | F-HEMBB1000840 | 1155 | R-HEMBB1000840 | 6664 |
| HEMBB1000848 | F-HEMBB1000848 | 1156 | R-HEMBB1000848 | 6665 |
| HEMBB1000852 | F-HEMBB1000852 | 1157 | R-HEMBB1000852 | 6666 |
| HEMBB1000870 | F-HEMBB1000870 | 1158 | R-HEMBB1000870 | 6667 |
| HEMBB1000876 | F-HEMBB1000876 | 1159 | R-HEMBB1000876 | 6668 |
| HEMBB1000883 | F-HEMBB1000883 | 1160 | R-HEMBB1000883 | 6669 |
| HEMBB1000887 | F-HEMBB1000887 | 1161 | R-HEMBB1000887 | 6670 |
| HEMBB1000888 | F-HEMBB1000888 | 1162 | R-HEMBB1000888 | 6671 |
| HEMBB1000890 | F-HEMBB1000890 | 1163 | R-HEMBB1000890 | 6672 |
| HEMBB1000893 | F-HEMBB1000893 | 1164 | R-HEMBB1000893 | 6673 |
| HEMBB1000908 | F-HEMBB1000908 | 1165 | R-HEMBB1000908 | 6674 |
| HEMBB1000910 | F-HEMBB1000910 | 1166 | R-HEMBB1000910 | 6675 |
| HEMBB1000913 | F-HEMBB1000913 | 1167 | R-HEMBB1000913 | 6676 |
| HEMBB1000915 | F-HEMBB1000915 | 1168 | R-HEMBB1000915 | 6677 |
| HEMBB1000917 | F-HEMBB1000917 | 1169 | R-HEMBB1000917 | 6678 |
| HEMBB1000927 | F-HEMBB1000927 | 1170 | R-HEMBB1000927 | 6679 |
| HEMBB1000947 | F-HEMBB1000947 | 1171 | R-HEMBB1000947 | 6680 |
| HEMBB1000959 | F-HEMBB1000959 | 1172 | R-HEMBB1000959 | 6681 |
| HEMBB1000973 | F-HEMBB1000973 | 1173 | R-HEMBB1000973 | 6682 |
| HEMBB1000975 | F-HEMBB1000975 | 1174 | R-HEMBB1000975 | 6683 |
| HEMBB1000981 | F-HEMBB1000981 | 1175 | R-HEMBB1000981 | 6684 |
| HEMBB1000985 | F-HEMBB1000985 | 1176 | R-HEMBB1000985 | 6685 |
| HEMBB1000991 | F-HEMBB1000991 | 1177 | R-HEMBB1000991 | 6686 |
| HEMBB1000996 | F-HEMBB1000996 | 1178 | R-HEMBB1000996 | 6687 |
| HEMBB1001004 | F-HEMBB1001004 | 1179 | R-HEMBB1001004 | 6688 |
| HEMBB1001008 | F-HEMBB1001008 | 1180 | R-HEMBB1001008 | 6689 |
| HEMBB1001011 | F-HEMBB1001011 | 1181 | R-HEMBB1001011 | 6690 |
| HEMBB1001014 | F-HEMBB1001014 | 1182 | R-HEMBB1001014 | 6691 |
| HEMBB1001020 | F-HEMBB1001020 | 1183 | R-HEMBB1001020 | 6692 |
| HEMBB1001024 | F-HEMBB1001024 | 1184 | R-HEMBB1001024 | 6693 |
| HEMBB1001037 | F-HEMBB1001037 | 1185 | R-HEMBB1001037 | 6694 |
| HEMBB1001047 | F-HEMBB1001047 | 1186 | R-HEMBB1001047 | 6695 |
| HEMBB1001051 | F-HEMBB1001051 | 1187 | R-HEMBB1001051 | 6696 |
| HEMBB1001056 | F-HEMBB1001056 | 1188 | R-HEMBB1001056 | 6697 |
| HEMBB1001058 | F-HEMBB1001058 | 1189 | R-HEMBB1001058 | 6698 |
| HEMBB1001060 | F-HEMBB1001060 | 1190 | R-HEMBB1001060 | 6699 |
| HEMBB1001063 | F-HEMBB1001063 | 1191 | R-HEMBB1001063 | 6700 |
| HEMBB1001068 | F-HEMBB1001068 | 1192 | R-HEMBB1001068 | 6701 |
| HEMBB1001096 | F-HEMBB1001096 | 1193 | R-HEMBB1001096 | 6702 |
| HEMBB1001102 | F-HEMBB1001102 | 1194 | R-HEMBB1001102 | 6703 |
| HEMBB1001105 | F-HEMBB1001105 | 1195 | R-HEMBB1001105 | 6704 |
| HEMBB1001112 | F-HEMBB1001112 | 1196 | | |
| HEMBB1001114 | F-HEMBB1001114 | 1197 | R-HEMBB1001114 | 6705 |
| HEMBB1001117 | F-HEMBB1001117 | 1198 | R-HEMBB1001117 | 6706 |
| HEMBB1001119 | F-HEMBB1001119 | 1199 | R-HEMBB1001119 | 6707 |
| HEMBB1001126 | F-HEMBB1001126 | 1200 | R-HEMBB1001126 | 6708 |
| HEMBB1001133 | F-HEMBB1001133 | 1201 | R-HEMBB1001133 | 6709 |
| HEMBB1001137 | F-HEMBB1001137 | 1202 | R-HEMBB1001137 | 6710 |
| HEMBB1001142 | F-HEMBB1001142 | 1203 | R-HEMBB1001142 | 6711 |
| HEMBB1001151 | F-HEMBB1001151 | 1204 | R-HEMBB1001151 | 6712 |
| HEMBB1001153 | F-HEMBB1001153 | 1205 | R-HEMBB1001153 | 6713 |
| HEMBB1001169 | F-HEMBB1001169 | 1206 | R-HEMBB1001169 | 6714 |
| HEMBB1001175 | F-HEMBB1001175 | 1207 | R-nnnnnnnnnnnn | 6715 |
| HEMBB1001177 | F-HEMBB1001177 | 1208 | R-HEMBB1001177 | 6716 |
| HEMBB1001182 | F-HEMBB1001182 | 1209 | R-HEMBB1001182 | 6717 |
| HEMBB1001199 | F-HEMBB1001199 | 1210 | R-HEMBB1001199 | 6718 |
| HEMBB1001208 | F-HEMBB1001208 | 1211 | R-HEMBB1001208 | 6719 |
| HEMBB1001209 | F-HEMBB1001209 | 1212 | R-HEMBB1001209 | 6720 |
| HEMBB1001210 | F-HEMBB1001210 | 1213 | R-HEMBB1001210 | 6721 |
| HEMBB1001218 | F-HEMBB1001218 | 1214 | R-HEMBB1001218 | 6722 |
| HEMBB1001221 | F-HEMBB1001221 | 1215 | R-HEMBB1001221 | 6723 |
| HEMBB1001234 | F-HEMBB1001234 | 1216 | R-HEMBB1001234 | 6724 |
| HEMBB1001242 | F-HEMBB1001242 | 1217 | R-HEMBB1001242 | 6725 |
| HEMBB1001249 | F-HEMBB1001249 | 1218 | R-HEMBB1001249 | 6726 |
| HEMBB1001253 | F-HEMBB1001253 | 1219 | R-HEMBB1001253 | 6727 |
| HEMBB1001254 | F-HEMBB1001254 | 1220 | R-HEMBB1001254 | 6728 |
| HEMBB1001267 | F-HEMBB1001267 | 1221 | R-HEMBB1001267 | 6729 |
| HEMBB1001271 | F-HEMBB1001271 | 1222 | R-HEMBB1001271 | 6730 |
| HEMBB1001282 | F-HEMBB1001282 | 1223 | R-HEMBB1001282 | 6731 |
| HEMBB1001288 | F-HEMBB1001288 | 1224 | R-HEMBB1001288 | 6732 |
| HEMBB1001289 | F-HEMBB1001289 | 1225 | R-HEMBB1001289 | 6733 |
| HEMBB1001294 | F-HEMBB1001294 | 1226 | R-HEMBB1001294 | 6734 |
| HEMBB1001302 | F-HEMBB1001302 | 1227 | R-HEMBB1001302 | 6735 |
| HEMBB1001304 | F-HEMBB1001304 | 1228 | R-HEMBB1001304 | 6736 |
| HEMBB1001314 | F-HEMBB1001314 | 1229 | R-HEMBB1001314 | 6737 |
| HEMBB1001315 | F-HEMBB1001315 | 1230 | R-HEMBB1001315 | 6738 |
| HEMBB1001317 | F-HEMBB1001317 | 1231 | R-HEMBB1001317 | 6739 |
| HEMBB1001326 | F-HEMBB1001326 | 1232 | R-HEMBB1001326 | 6740 |
| HEMBB1001331 | F-HEMBB1001331 | 1233 | R-HEMBB1001331 | 6741 |
| HEMBB1001335 | F-HEMBB1001335 | 1234 | R-HEMBB1001335 | 6742 |
| HEMBB1001337 | F-HEMBB1001337 | 1235 | R-HEMBB1001337 | 6743 |
| HEMBB1001339 | F-HEMBB1001339 | 1236 | R-HEMBB1001339 | 6744 |
| HEMBB1001346 | F-HEMBB1001346 | 1237 | R-HEMBB1001346 | 6745 |
| HEMBB1001348 | F-HEMBB1001348 | 1238 | R-HEMBB1001348 | 6746 |
| HEMBB1001356 | F-HEMBB1001356 | 1239 | R-HEMBB1001356 | 6747 |
| HEMBB1001364 | F-HEMBB1001364 | 1240 | R-HEMBB1001364 | 6748 |
| HEMBB1001366 | F-HEMBB1001366 | 1241 | R-HEMBB1001366 | 6749 |
| HEMBB1001367 | F-HEMBB1001367 | 1242 | R-HEMBB1001367 | 6750 |
| HEMBB1001369 | F-HEMBB1001369 | 1243 | R-HEMBB1001369 | 6751 |
| HEMBB1001380 | F-HEMBB1001380 | 1244 | R-HEMBB1001380 | 6752 |
| HEMBB1001384 | F-HEMBB1001384 | 1245 | R-HEMBB1001384 | 6753 |
| HEMBB1001387 | F-HEMBB1001387 | 1246 | R-HEMBB1001387 | 6754 |
| HEMBB1001394 | F-HEMBB1001394 | 1247 | R-HEMBB1001394 | 6755 |
| HEMBB1001410 | F-HEMBB1001410 | 1248 | R-HEMBB1001410 | 6756 |
| HEMBB1001424 | F-HEMBB1001424 | 1249 | R-HEMBB1001424 | 6757 |
| HEMBB1001426 | F-HEMBB1001426 | 1250 | R-HEMBB1001426 | 6758 |
| HEMBB1001429 | F-HEMBB1001429 | 1251 | R-HEMBB1001429 | 6759 |
| HEMBB1001436 | F-HEMBB1001436 | 1252 | R-HEMBB1001436 | 6760 |
| HEMBB1001443 | F-HEMBB1001443 | 1253 | R-HEMBB1001443 | 6761 |
| HEMBB1001449 | F-HEMBB1001449 | 1254 | R-HEMBB1001449 | 6762 |
| HEMBB1001454 | F-HEMBB1001454 | 1255 | R-HEMBB1001454 | 6763 |
| HEMBB1001458 | F-HEMBB1001458 | 1256 | R-HEMBB1001458 | 6764 |
| HEMBB1001463 | F-HEMBB1001463 | 1257 | R-HEMBB1001463 | 6765 |
| HEMBB1001464 | F-HEMBB1001464 | 1258 | R-HEMBB1001464 | 6766 |
| HEMBB1001482 | F-HEMBB1001482 | 1259 | R-HEMBB1001482 | 6767 |
| HEMBB1001500 | F-HEMBB1001500 | 1260 | R-HEMBB1001500 | 6768 |
| HEMBB1001521 | F-HEMBB1001521 | 1261 | R-HEMBB1001521 | 6769 |
| HEMBB1001527 | F-HEMBB1001527 | 1262 | R-HEMBB1001527 | 6770 |
| HEMBB1001531 | F-HEMBB1001531 | 1263 | R-HEMBB1001531 | 6771 |
| HEMBB1001535 | F-HEMBB1001535 | 1264 | R-HEMBB1001535 | 6772 |
| HEMBB1001536 | F-HEMBB1001536 | 1265 | R-HEMBB1001536 | 6773 |
| HEMBB1001537 | F-HEMBB1001537 | 1266 | R-HEMBB1001537 | 6774 |
| HEMBB1001555 | F-HEMBB1001555 | 1267 | R-HEMBB1001555 | 6775 |
| HEMBB1001562 | F-HEMBB1001562 | 1268 | R-HEMBB1001562 | 6776 |
| HEMBB1001564 | F-HEMBB1001564 | 1269 | R-HEMBB1001564 | 6777 |
| HEMBB1001565 | F-HEMBB1001565 | 1270 | R-HEMBB1001565 | 6778 |
| HEMBB1001585 | F-HEMBB1001585 | 1271 | R-HEMBB1001585 | 6779 |
| HEMBB1001586 | F-HEMBB1001586 | 1272 | R-HEMBB1001586 | 6780 |
| HEMBB1001588 | F-HEMBB1001588 | 1273 | R-HEMBB1001588 | 6781 |
| HEMBB1001603 | F-HEMBB1001603 | 1274 | R-HEMBB1001603 | 6782 |
| HEMBB1001618 | F-HEMBB1001618 | 1275 | R-HEMBB1001618 | 6783 |
| HEMBB1001619 | F-HEMBB1001619 | 1276 | R-HEMBB1001619 | 6784 |
| HEMBB1001630 | F-HEMBB1001630 | 1277 | R-HEMBB1001630 | 6785 |
| HEMBB1001635 | F-HEMBB1001635 | 1278 | R-HEMBB1001635 | 6786 |
| HEMBB1001637 | F-HEMBB1001637 | 1279 | R-HEMBB1001637 | 6787 |
| HEMBB1001641 | F-HEMBB1001641 | 1280 | R-HEMBB1001641 | 6788 |
| HEMBB1001653 | F-HEMBB1001653 | 1281 | R-HEMBB1001653 | 6789 |
| HEMBB1001665 | F-HEMBB1001665 | 1282 | R-HEMBB1001665 | 6790 |
| HEMBB1001668 | F-HEMBB1001668 | 1283 | R-HEMBB1001668 | 6791 |
| HEMBB1001673 | F-HEMBB1001673 | 1284 | R-HEMBB1001673 | 6792 |
| HEMBB1001684 | F-HEMBB1001684 | 1285 | R-HEMBB1001684 | 6793 |
| HEMBB1001685 | F-HEMBB1001685 | 1286 | R-HEMBB1001685 | 6794 |
| HEMBB1001695 | F-HEMBB1001695 | 1287 | R-HEMBB1001695 | 6795 |
| HEMBB1001704 | F-HEMBB1001704 | 1288 | R-HEMBB1001704 | 6796 |
| HEMBB1001706 | F-HEMBB1001706 | 1289 | R-HEMBB1001706 | 6797 |
| HEMBB1001707 | F-HEMBB1001707 | 1290 | R-HEMBB1001707 | 6798 |
| HEMBB1001717 | F-HEMBB1001717 | 1291 | R-HEMBB1001717 | 6799 |
| HEMBB1001735 | F-HEMBB1001735 | 1292 | R-HEMBB1001735 | 6800 |
| HEMBB1001736 | F-HEMBB1001736 | 1293 | R-HEMBB1001736 | 6801 |
| HEMBB1001747 | F-HEMBB1001747 | 1294 | R-HEMBB1001747 | 6802 |
| HEMBB1001749 | F-HEMBB1001749 | 1295 | R-HEMBB1001749 | 6803 |
| HEMBB1001753 | F-HEMBB1001753 | 1296 | R-HEMBB1001753 | 6804 |
| HEMBB1001756 | F-HEMBB1001756 | 1297 | R-HEMBB1001756 | 6805 |
| HEMBB1001760 | F-HEMBB1001760 | 1298 | R-HEMBB1001760 | 6806 |
| HEMBB1001762 | F-HEMBB1001762 | 1299 | R-HEMBB1001762 | 6807 |
| HEMBB1001785 | F-HEMBB1001785 | 1300 | R-HEMBB1001785 | 6808 |
| HEMBB1001797 | F-HEMBB1001797 | 1301 | R-HEMBB1001797 | 6809 |
| HEMBB1001802 | F-HEMBB1001802 | 1302 | R-HEMBB1001802 | 6810 |
| HEMBB1001812 | F-HEMBB1001812 | 1303 | R-HEMBB1001812 | 6811 |
| HEMBB1001816 | F-HEMBB1001816 | 1304 | R-HEMBB1001816 | 6812 |
| HEMBB1001831 | F-HEMBB1001831 | 1305 | R-HEMBB1001831 | 6813 |
| HEMBB1001834 | F-HEMBB1001834 | 1306 | | |
| HEMBB1001836 | F-HEMBB1001836 | 1307 | R-HEMBB1001836 | 6814 |
| HEMBB1001839 | F-HEMBB1001839 | 1308 | R-HEMBB1001839 | 6815 |
| HEMBB1001850 | F-HEMBB1001850 | 1309 | R-HEMBB1001850 | 6816 |
| HEMBB1001863 | F-HEMBB1001863 | 1310 | R-HEMBB1001863 | 6817 |
| HEMBB1001867 | F-HEMBB1001867 | 1311 | R-HEMBB1001867 | 6818 |
| HEMBB1001868 | F-HEMBB1001868 | 1312 | R-HEMBB1001868 | 6819 |
| HEMBB1001869 | F-HEMBB1001869 | 1313 | R-HEMBB1001869 | 6820 |
| HEMBB1001872 | F-HEMBB1001872 | 1314 | R-HEMBB1001872 | 6821 |
| HEMBB1001874 | F-HEMBB1001874 | 1315 | R-HEMBB1001874 | 6822 |
| HEMBB1001875 | F-HEMBB1001875 | 1316 | R-HEMBB1001875 | 6823 |
| HEMBB1001880 | F-HEMBB1001880 | 1317 | R-HEMBB1001880 | 6824 |
| HEMBB1001899 | F-HEMBB1001899 | 1318 | R-HEMBB1001899 | 6825 |
| HEMBB1001905 | F-HEMBB1001905 | 1319 | R-HEMBB1001905 | 6826 |
| HEMBB1001906 | F-HEMBB1001906 | 1320 | R-HEMBB1001906 | 6827 |
| HEMBB1001908 | F-HEMBB1001908 | 1321 | R-HEMBB1001908 | 6828 |
| HEMBB1001910 | F-HEMBB1001910 | 1322 | R-HEMBB1001910 | 6829 |
| HEMBB1001911 | F-HEMBB1001911 | 1323 | R-HEMBB1001911 | 6830 |
| HEMBB1001915 | F-HEMBB1001915 | 1324 | R-HEMBB1001915 | 6831 |
| HEMBB1001921 | F-HEMBB1001921 | 1325 | R-HEMBB1001921 | 6832 |
| HEMBB1001922 | F-HEMBB1001922 | 1326 | R-HEMBB1001922 | 6833 |
| HEMBB1001925 | F-HEMBB1001925 | 1327 | R-HEMBB1001925 | 6834 |
| HEMBB1001930 | F-HEMBB1001930 | 1328 | R-HEMBB1001930 | 6835 |
| HEMBB1001944 | F-HEMBB1001944 | 1329 | R-HEMBB1001944 | 6836 |
| HEMBB1001945 | F-HEMBB1001945 | 1330 | R-HEMBB1001945 | 6837 |
| HEMBB1001947 | F-HEMBB1001947 | 1331 | R-HEMBB1001947 | 6838 |
| HEMBB1001950 | F-HEMBB1001950 | 1332 | R-HEMBB1001950 | 6839 |
| HEMBB1001952 | F-HEMBB1001952 | 1333 | R-HEMBB1001952 | 6840 |
| HEMBB1001953 | F-HEMBB1001953 | 1334 | R-HEMBB1001953 | 6841 |
| HEMBB1001957 | F-HEMBB1001957 | 1335 | R-HEMBB1001957 | 6842 |
| HEMBB1001962 | F-HEMBB1001962 | 1336 | R-HEMBB1001962 | 6843 |
| HEMBB1001967 | F-HEMBB1001967 | 1337 | R-HEMBB1001967 | 6844 |
| HEMBB1001973 | F-HEMBB1001973 | 1338 | R-HEMBB1001973 | 6845 |
| HEMBB1001983 | F-HEMBB1001983 | 1339 | R-HEMBB1001983 | 6846 |
| HEMBB1001988 | F-HEMBB1001988 | 1340 | R-HEMBB1001988 | 6847 |
| HEMBB1001990 | F-HEMBB1001990 | 1341 | R-HEMBB1001990 | 6848 |
| HEMBB1001996 | F-HEMBB1001996 | 1342 | R-HEMBB1001996 | 6849 |
| HEMBB1001997 | F-HEMBB1001997 | 1343 | R-HEMBB1001997 | 6850 |
| HEMBB1002002 | F-HEMBB1002002 | 1344 | R-HEMBB1002002 | 6851 |
| HEMBB1002005 | F-HEMBB1002005 | 1345 | R-HEMBB1002005 | 6852 |
| HEMBB1002009 | F-HEMBB1002009 | 1346 | R-HEMBB1002009 | 6853 |
| HEMBB1002015 | F-HEMBB1002015 | 1347 | R-HEMBB1002015 | 6854 |
| HEMBB1002042 | F-HEMBB1002042 | 1348 | R-HEMBB1002042 | 6855 |
| HEMBB1002043 | F-HEMBB1002043 | 1349 | R-HEMBB1002043 | 6856 |
| HEMBB1002044 | F-HEMBB1002044 | 1350 | R-HEMBB1002044 | 6857 |
| HEMBB1002045 | F-HEMBB1002045 | 1351 | R-HEMBB1002045 | 6858 |
| HEMBB1002049 | F-HEMBB1002049 | 1352 | R-HEMBB1002049 | 6859 |
| HEMBB1002050 | F-HEMBB1002050 | 1353 | R-HEMBB1002050 | 6860 |
| HEMBB1002068 | F-HEMBB1002068 | 1354 | R-HEMBB1002068 | 6861 |
| HEMBB1002069 | F-HEMBB1002069 | 1355 | R-HEMBB1002069 | 6862 |
| HEMBB1002092 | F-HEMBB1002092 | 1356 | R-HEMBB1002092 | 6863 |
| HEMBB1002094 | F-HEMBB1002094 | 1357 | R-HEMBB1002094 | 6864 |
| HEMBB1002115 | F-HEMBB1002115 | 1358 | R-HEMBB1002115 | 6865 |
| HEMBB1002134 | F-HEMBB1002134 | 1359 | | |
| HEMBB1002139 | F-HEMBB1002139 | 1360 | R-HEMBB1002139 | 6866 |
| HEMBB1002142 | F-HEMBB1002142 | 1361 | R-HEMBB1002142 | 6867 |
| HEMBB1002152 | F-HEMBB1002152 | 1362 | R-HEMBB1002152 | 6868 |
| HEMBB1002189 | F-HEMBB1002189 | 1363 | R-HEMBB1002189 | 6869 |
| HEMBB1002190 | F-HEMBB1002190 | 1364 | R-HEMBB1002190 | 6870 |
| HEMBB1002193 | F-HEMBB1002193 | 1365 | R-HEMBB1002193 | 6871 |
| HEMBB1002217 | F-HEMBB1002217 | 1366 | R-HEMBB1002217 | 6872 |
| HEMBB1002218 | F-HEMBB1002218 | 1367 | R-HEMBB1002218 | 6873 |
| HEMBB1002232 | F-HEMBB1002232 | 1368 | R-HEMBB1002232 | 6874 |
| HEMBB1002247 | F-HEMBB1002247 | 1369 | R-HEMBB1002247 | 6875 |
| HEMBB1002249 | F-HEMBB1002249 | 1370 | R-HEMBB1002249 | 6876 |
| HEMBB1002254 | F-HEMBB1002254 | 1371 | R-HEMBB1002254 | 6877 |
| HEMBB1002255 | F-HEMBB1002255 | 1372 | R-HEMBB1002255 | 6878 |
| HEMBB1002266 | F-HEMBB1002266 | 1373 | R-HEMBB1002266 | 6879 |
| HEMBB1002280 | F-HEMBB1002280 | 1374 | R-HEMBB1002280 | 6880 |
| HEMBB1002300 | F-HEMBB1002300 | 1375 | R-HEMBB1002300 | 6881 |
| HEMBB1002306 | F-HEMBB1002306 | 1376 | R-HEMBB1002306 | 6882 |
| HEMBB1002327 | F-HEMBB1002327 | 1377 | R-HEMBB1002327 | 6883 |
| HEMBB1002329 | F-HEMBB1002329 | 1378 | R-HEMBB1002329 | 6884 |
| HEMBB1002340 | F-HEMBB1002340 | 1379 | R-HEMBB1002340 | 6885 |
| HEMBB1002342 | F-HEMBB1002342 | 1380 | R-HEMBB1002342 | 6886 |
| HEMBB1002358 | F-HEMBB1002358 | 1381 | R-HEMBB1002358 | 6887 |
| HEMBB1002359 | F-HEMBB1002359 | 1382 | R-HEMBB1002359 | 6888 |
| HEMBB1002364 | F-HEMBB1002364 | 1383 | R-HEMBB1002364 | 6889 |
| HEMBB1002371 | F-HEMBB1002371 | 1384 | R-HEMBB1002371 | 6890 |
| HEMBB1002381 | F-HEMBB1002381 | 1385 | R-HEMBB1002381 | 6891 |
| HEMBB1002383 | F-HEMBB1002383 | 1386 | R-HEMBB1002383 | 6892 |
| HEMBB1002387 | F-HEMBB1002387 | 1387 | R-HEMBB1002387 | 6893 |
| HEMBB1002409 | F-HEMBB1002409 | 1388 | | |
| HEMBB1002415 | F-HEMBB1002415 | 1389 | R-HEMBB1002415 | 6894 |
| HEMBB1002425 | F-HEMBB1002425 | 1390 | R-HEMBB1002425 | 6895 |
| HEMBB1002442 | F-HEMBB1002442 | 1391 | R-HEMBB1002442 | 6896 |
| HEMBB1002453 | F-HEMBB1002453 | 1392 | R-HEMBB1002453 | 6897 |
| HEMBB1002457 | F-HEMBB1002457 | 1393 | R-HEMBB1002457 | 6898 |
| HEMBB1002458 | F-HEMBB1002458 | 1394 | R-HEMBB1002458 | 6899 |
| HEMBB1002477 | F-HEMBB1002477 | 1395 | R-HEMBB1002477 | 6900 |
| HEMBB1002489 | F-HEMBB1002489 | 1396 | R-HEMBB1002489 | 6901 |
| HEMBB1002492 | F-HEMBB1002492 | 1397 | R-HEMBB1002492 | 6902 |
| HEMBB1002495 | F-HEMBB1002495 | 1398 | R-HEMBB1002495 | 6903 |
| HEMBB1002502 | F-HEMBB1002502 | 1399 | R-HEMBB1002502 | 6904 |
| HEMBB1002509 | F-HEMBB1002509 | 1400 | R-HEMBB1002509 | 6905 |
| HEMBB1002510 | F-HEMBB1002510 | 1401 | R-HEMBB1002510 | 6906 |
| HEMBB1002520 | F-HEMBB1002520 | 1402 | R-HEMBB1002520 | 6907 |
| HEMBB1002522 | F-HEMBB1002522 | 1403 | R-HEMBB1002522 | 6908 |
| HEMBB1002531 | F-HEMBB1002531 | 1404 | R-HEMBB1002531 | 6909 |
| HEMBB1002534 | F-HEMBB1002534 | 1405 | R-HEMBB1002534 | 6910 |
| HEMBB1002545 | F-HEMBB1002545 | 1406 | R-HEMBB1002545 | 6911 |
| HEMBB1002550 | F-HEMBB1002550 | 1407 | R-HEMBB1002550 | 6912 |
| HEMBB1002556 | F-HEMBB1002556 | 1408 | R-HEMBB1002556 | 6913 |
| HEMBB1002579 | F-HEMBB1002579 | 1409 | R-HEMBB1002579 | 6914 |
| HEMBB1002582 | F-HEMBB1002582 | 1410 | R-HEMBB1002582 | 6915 |
| HEMBB1002590 | F-HEMBB1002590 | 1411 | R-HEMBB1002590 | 6916 |
| HEMBB1002596 | F-HEMBB1002596 | 1412 | R-HEMBB1002596 | 6917 |
| HEMBB1002600 | F-HEMBB1002600 | 1413 | R-HEMBB1002600 | 6918 |
| HEMBB1002601 | F-HEMBB1002601 | 1414 | R-HEMBB1002601 | 6919 |
| HEMBB1002603 | F-HEMBB1002603 | 1415 | R-HEMBB1002603 | 6920 |
| HEMBB1002607 | F-HEMBB1002607 | 1416 | R-HEMBB1002607 | 6921 |
| HEMBB1002610 | F-HEMBB1002610 | 1417 | R-HEMBB1002610 | 6922 |
| HEMBB1002613 | F-HEMBB1002613 | 1418 | R-HEMBB1002613 | 6923 |
| HEMBB1002614 | F-HEMBB1002614 | 1419 | R-HEMBB1002614 | 6924 |
| HEMBB1002617 | F-HEMBB1002617 | 1420 | R-HEMBB1002617 | 6925 |
| HEMBB1002623 | F-HEMBB1002623 | 1421 | R-HEMBB1002623 | 6926 |
| HEMBB1002635 | F-HEMBB1002635 | 1422 | R-HEMBB1002635 | 6927 |
| HEMBB1002664 | F-HEMBB1002664 | 1423 | R-HEMBB1002664 | 6928 |
| HEMBB1002677 | F-HEMBB1002677 | 1424 | R-HEMBB1002677 | 6929 |
| HEMBB1002683 | F-HEMBB1002683 | 1425 | R-HEMBB1002683 | 6930 |
| HEMBB1002684 | F-HEMBB1002684 | 1426 | R-HEMBB1002684 | 6931 |
| HEMBB1002686 | F-HEMBB1002686 | 1427 | R-HEMBB1002686 | 6932 |
| HEMBB1002692 | F-HEMBB1002692 | 1428 | R-HEMBB1002692 | 6933 |
| HEMBB1002697 | F-HEMBB1002697 | 1429 | R-HEMBB1002697 | 6934 |
| HEMBB1002699 | F-HEMBB1002699 | 1430 | R-HEMBB1002699 | 6935 |
| HEMBB1002702 | F-HEMBB1002702 | 1431 | R-HEMBB1002702 | 6936 |
| HEMBB1002705 | F-HEMBB1002705 | 1432 | R-HEMBB1002705 | 6937 |
| HEMBB1002712 | F-HEMBB1002712 | 1433 | R-HEMBB1002712 | 6938 |
| MAMMA1000009 | F-MAMMA1000009 | 1434 | R-MAMMA1000009 | 6939 |
| MAMMA1000019 | F-MAMMA1000019 | 1435 | R-MAMMA1000019 | 6940 |
| MAMMA1000020 | F-MAMMA1000020 | 1436 | R-MAMMA1000020 | 6941 |
| MAMMA1000025 | F-MAMMA1000025 | 1437 | R-MAMMA1000025 | 6942 |
| MAMMA1000043 | F-MAMMA1000043 | 1438 | R-MAMMA1000043 | 6943 |
| MAMMA1000045 | F-MAMMA1000045 | 1439 | R-MAMMA1000045 | 6944 |
| MAMMA1000055 | F-MAMMA1000055 | 1440 | R-MAMMA1000055 | 6945 |
| MAMMA1000057 | F-MAMMA1000057 | 1441 | R-MAMMA1000057 | 6946 |
| MAMMA1000069 | F-MAMMA1000069 | 1442 | R-MAMMA1000069 | 6947 |
| MAMMA1000084 | F-MAMMA1000084 | 1443 | R-MAMMA1000084 | 6948 |
| MAMMA1000085 | F-MAMMA1000085 | 1444 | R-MAMMA1000085 | 6949 |
| MAMMA1000092 | F-MAMMA1000092 | 1445 | R-MAMMA1000092 | 6950 |
| MAMMA1000103 | F-MAMMA1000103 | 1446 | R-MAMMA1000103 | 6951 |
| MAMMA1000117 | F-MAMMA1000117 | 1447 | R-MAMMA1000117 | 6952 |
| MAMMA1000129 | F-MAMMA1000129 | 1448 | R-MAMMA1000129 | 6953 |
| MAMMA1000133 | F-MAMMA1000133 | 1449 | R-MAMMA1000133 | 6954 |
| MAMMA1000134 | F-MAMMA1000134 | 1450 | R-MAMMA1000134 | 6955 |
| MAMMA1000139 | F-MAMMA1000139 | 1451 | R-MAMMA1000139 | 6956 |
| MAMMA1000143 | F-MAMMA1000143 | 1452 | R-MAMMA1000143 | 6957 |
| MAMMA1000155 | F-MAMMA1000155 | 1453 | R-MAMMA1000155 | 6958 |
| MAMMA1000163 | F-MAMMA1000163 | 1454 | R-MAMMA1000163 | 6959 |
| MAMMA1000171 | F-MAMMA1000171 | 1455 | R-MAMMA1000171 | 6960 |
| MAMMA1000173 | F-MAMMA1000173 | 1456 | R-MAMMA1000173 | 6961 |
| MAMMA1000175 | F-MAMMA1000175 | 1457 | R-MAMMA1000175 | 6962 |
| MAMMA1000183 | F-MAMMA1000183 | 1458 | R-MAMMA1000183 | 6963 |
| MAMMA1000198 | F-MAMMA1000198 | 1459 | R-MAMMA1000198 | 6964 |
| MAMMA1000221 | F-MAMMA1000221 | 1460 | R-MAMMA1000221 | 6965 |
| MAMMA1000227 | F-MAMMA1000227 | 1461 | R-MAMMA1000227 | 6966 |
| MAMMA1000241 | F-MAMMA1000241 | 1462 | R-MAMMA1000241 | 6967 |
| MAMMA1000251 | F-MAMMA1000251 | 1463 | R-MAMMA1000251 | 6968 |
| MAMMA1000254 | F-MAMMA1000254 | 1464 | R-MAMMA1000254 | 6969 |
| MAMMA1000257 | F-MAMMA1000257 | 1465 | R-MAMMA1000257 | 6970 |
| MAMMA1000264 | F-MAMMA1000264 | 1466 | R-MAMMA1000264 | 6971 |
| MAMMA1000266 | F-MAMMA1000266 | 1467 | R-MAMMA1000266 | 6972 |
| MAMMA1000270 | F-MAMMA1000270 | 1468 | R-MAMMA1000270 | 6973 |
| MAMMA1000277 | F-MAMMA1000277 | 1469 | R-MAMMA1000277 | 6974 |
| MAMMA1000278 | F-MAMMA1000278 | 1470 | R-MAMMA1000278 | 6975 |
| MAMMA1000279 | F-MAMMA1000279 | 1471 | R-MAMMA1000279 | 6976 |
| MAMMA1000284 | F-MAMMA1000284 | 1472 | R-MAMMA1000284 | 6977 |
| MAMMA1000287 | F-MAMMA1000287 | 1473 | R-MAMMA1000287 | 6978 |
| MAMMA1000302 | F-MAMMA1000302 | 1474 | R-MAMMA1000302 | 6979 |
| MAMMA1000307 | F-MAMMA1000307 | 1475 | R-MAMMA1000307 | 6980 |
| MAMMA1000309 | F-MAMMA1000309 | 1476 | R-MAMMA1000309 | 6981 |
| MAMMA1000312 | F-MAMMA1000312 | 1477 | R-MAMMA1000312 | 6982 |
| MAMMA1000313 | F-MAMMA1000313 | 1478 | R-MAMMA1000313 | 6983 |
| MAMMA1000331 | F-MAMMA1000331 | 1479 | R-MAMMA1000331 | 6984 |
| MAMMA1000339 | F-MAMMA1000339 | 1480 | R-MAMMA1000339 | 6985 |
| MAMMA1000340 | F-MAMMA1000340 | 1481 | R-MAMMA1000340 | 6986 |
| MAMMA1000348 | F-MAMMA1000348 | 1482 | R-MAMMA1000348 | 6987 |
| MAMMA1000356 | F-MAMMA1000356 | 1483 | R-MAMMA1000356 | 6988 |
| MAMMA1000360 | F-MAMMA1000360 | 1484 | R-MAMMA1000360 | 6989 |
| MAMMA1000361 | F-MAMMA1000361 | 1485 | R-MAMMA1000361 | 6990 |
| MAMMA1000372 | F-MAMMA1000372 | 1486 | R-MAMMA1000372 | 6991 |
| MAMMA1000385 | F-MAMMA1000385 | 1487 | R-MAMMA1000385 | 6992 |
| MAMMA1000388 | F-MAMMA1000388 | 1488 | R-MAMMA1000388 | 6993 |
| MAMMA1000395 | F-MAMMA1000395 | 1489 | R-MAMMA1000395 | 6994 |
| MAMMA1000402 | F-MAMMA1000402 | 1490 | R-MAMMA1000402 | 6995 |
| MAMMA1000410 | F-MAMMA1000410 | 1491 | R-MAMMA1000410 | 6996 |
| MAMMA1000413 | F-MAMMA1000413 | 1492 | R-MAMMA1000413 | 6997 |
| MAMMA1000414 | F-MAMMA1000414 | 1493 | R-MAMMA1000414 | 6998 |
| MAMMA1000416 | F-MAMMA1000416 | 1494 | R-MAMMA1000416 | 6999 |
| MAMMA1000421 | F-MAMMA1000421 | 1495 | R-MAMMA1000421 | 7000 |
| MAMMA1000422 | F-MAMMA1000422 | 1496 | R-MAMMA1000422 | 7001 |
| MAMMA1000423 | F-MAMMA1000423 | 1497 | R-MAMMA1000423 | 7002 |
| MAMMA1000424 | F-MAMMA1000424 | 1498 | R-MAMMA1000424 | 7003 |
| MAMMA1000429 | F-MAMMA1000429 | 1499 | R-MAMMA1000429 | 7004 |
| MAMMA1000431 | F-MAMMA1000431 | 1500 | R-MAMMA1000431 | 7005 |
| MAMMA1000444 | F-MAMMA1000444 | 1501 | R-MAMMA1000444 | 7006 |
| MAMMA1000446 | F-MAMMA1000446 | 1502 | R-MAMMA1000446 | 7007 |
| MAMMA1000458 | F-MAMMA1000458 | 1503 | R-MAMMA1000458 | 7008 |
| MAMMA1000468 | F-MAMMA1000468 | 1504 | R-MAMMA1000468 | 7009 |
| MAMMA1000472 | F-MAMMA1000472 | 1505 | R-MAMMA1000472 | 7010 |
| MAMMA1000478 | F-MAMMA1000478 | 1506 | R-MAMMA1000478 | 7011 |
| MAMMA1000483 | F-MAMMA1000483 | 1507 | R-MAMMA1000483 | 7012 |
| MAMMA1000490 | F-MAMMA1000490 | 1508 | R-MAMMA1000490 | 7013 |
| MAMMA1000500 | F-MAMMA1000500 | 1509 | R-MAMMA1000500 | 7014 |
| MAMMA1000501 | F-MAMMA1000501 | 1510 | R-MAMMA1000501 | 7015 |
| MAMMA1000516 | F-MAMMA1000516 | 1511 | R-MAMMA1000516 | 7016 |
| MAMMA1000522 | F-MAMMA1000522 | 1512 | R-MAMMA1000522 | 7017 |
| MAMMA1000524 | F-MAMMA1000524 | 1513 | | |
| MAMMA1000559 | F-MAMMA1000559 | 1514 | R-MAMMA1000559 | 7018 |
| MAMMA1000565 | F-MAMMA1000565 | 1515 | R-MAMMA1000565 | 7019 |
| MAMMA1000567 | F-MAMMA1000567 | 1516 | R-MAMMA1000567 | 7020 |
| MAMMA1000576 | F-MAMMA1000576 | 1517 | R-MAMMA1000576 | 7021 |
| MAMMA1000583 | F-MAMMA1000583 | 1518 | R-MAMMA1000583 | 7022 |
| MAMMA1000585 | F-MAMMA1000585 | 1519 | R-MAMMA1000585 | 7023 |
| MAMMA1000594 | F-MAMMA1000594 | 1520 | R-MAMMA1000594 | 7024 |
| MAMMA1000597 | F-MAMMA1000597 | 1521 | R-MAMMA1000597 | 7025 |
| MAMMA1000605 | F-MAMMA1000605 | 1522 | R-MAMMA1000605 | 7026 |
| MAMMA1000612 | F-MAMMA1000612 | 1523 | R-MAMMA1000612 | 7027 |
| MAMMA1000616 | F-MAMMA1000616 | 1524 | R-MAMMA1000616 | 7028 |
| MAMMA1000621 | F-MAMMA1000621 | 1525 | R-MAMMA1000621 | 7029 |
| MAMMA1000623 | F-MAMMA1000623 | 1526 | R-MAMMA1000623 | 7030 |
| MAMMA1000625 | F-MAMMA1000625 | 1527 | R-MAMMA1000625 | 7031 |
| MAMMA1000643 | F-MAMMA1000643 | 1528 | R-MAMMA1000643 | 7032 |
| MAMMA1000664 | F-MAMMA1000664 | 1529 | R-MAMMA1000664 | 7033 |
| MAMMA1000669 | F-MAMMA1000669 | 1530 | R-MAMMA1000669 | 7034 |
| MAMMA1000670 | F-MAMMA1000670 | 1531 | R-MAMMA1000670 | 7035 |
| MAMMA1000672 | F-MAMMA1000672 | 1532 | R-MAMMA1000672 | 7036 |
| MAMMA1000684 | F-MAMMA1000684 | 1533 | R-MAMMA1000684 | 7037 |
| MAMMA1000696 | F-MAMMA1000696 | 1534 | R-MAMMA1000696 | 7038 |
| MAMMA1000707 | F-MAMMA1000707 | 1535 | R-MAMMA1000707 | 7039 |
| MAMMA1000713 | F-MAMMA1000713 | 1536 | R-MAMMA1000713 | 7040 |
| MAMMA1000714 | F-MAMMA1000714 | 1537 | R-MAMMA1000714 | 7041 |
| MAMMA1000718 | F-MAMMA1000718 | 1538 | R-MAMMA1000718 | 7042 |
| MAMMA1000720 | F-MAMMA1000720 | 1539 | R-MAMMA1000720 | 7043 |
| MAMMA1000723 | F-MAMMA1000723 | 1540 | R-MAMMA1000723 | 7044 |
| MAMMA1000731 | F-MAMMA1000731 | 1541 | R-MAMMA1000731 | 7045 |
| MAMMA1000732 | F-MAMMA1000732 | 1542 | R-MAMMA1000732 | 7046 |
| MAMMA1000733 | F-MAMMA1000733 | 1543 | R-MAMMA1000733 | 7047 |
| MAMMA1000734 | F-MAMMA1000734 | 1544 | R-MAMMA1000734 | 7048 |
| MAMMA1000738 | F-MAMMA1000738 | 1545 | R-MAMMA1000738 | 7049 |
| MAMMA1000744 | F-MAMMA1000744 | 1546 | R-MAMMA1000744 | 7050 |
| MAMMA1000746 | F-MAMMA1000746 | 1547 | R-MAMMA1000746 | 7051 |
| MAMMA1000752 | F-MAMMA1000752 | 1548 | R-MAMMA1000752 | 7052 |
| MAMMA1000760 | F-MAMMA1000760 | 1549 | R-MAMMA1000760 | 7053 |
| MAMMA1000761 | F-MAMMA1000761 | 1550 | R-MAMMA1000761 | 7054 |
| MAMMA1000775 | F-MAMMA1000775 | 1551 | R-MAMMA1000775 | 7055 |
| MAMMA1000776 | F-MAMMA1000776 | 1552 | R-MAMMA1000776 | 7056 |
| MAMMA1000778 | F-MAMMA1000778 | 1553 | R-MAMMA1000778 | 7057 |
| MAMMA1000782 | F-MAMMA1000782 | 1554 | R-MAMMA1000782 | 7058 |
| MAMMA1000798 | F-MAMMA1000798 | 1555 | R-MAMMA1000798 | 7059 |
| MAMMA1000802 | F-MAMMA1000802 | 1556 | R-MAMMA1000802 | 7060 |
| MAMMA1000824 | F-MAMMA1000824 | 1557 | | |
| MAMMA1000831 | F-MAMMA1000831 | 1558 | R-MAMMA1000831 | 7061 |
| MAMMA1000839 | F-MAMMA1000839 | 1559 | R-MAMMA1000839 | 7062 |
| MAMMA1000841 | F-MAMMA1000841 | 1560 | R-MAMMA1000841 | 7063 |
| MAMMA1000842 | F-MAMMA1000842 | 1561 | R-MAMMA1000842 | 7064 |
| MAMMA1000843 | F-MAMMA1000843 | 1562 | R-MAMMA1000843 | 7065 |
| MAMMA1000845 | F-MAMMA1000845 | 1563 | R-MAMMA1000845 | 7066 |
| MAMMA1000851 | F-MAMMA1000851 | 1564 | R-MAMMA1000851 | 7067 |
| MAMMA1000855 | F-MAMMA1000855 | 1565 | R-MAMMA1000855 | 7068 |
| MAMMA1000856 | F-MAMMA1000856 | 1566 | R-MAMMA1000856 | 7069 |
| MAMMA1000859 | F-MAMMA1000859 | 1567 | | |
| MAMMA1000862 | F-MAMMA1000862 | 1568 | R-MAMMA1000862 | 7070 |
| MAMMA1000863 | F-MAMMA1000863 | 1569 | R-MAMMA1000863 | 7071 |
| MAMMA1000865 | F-MAMMA1000865 | 1570 | R-MAMMA1000865 | 7072 |
| MAMMA1000867 | F-MAMMA1000867 | 1571 | R-MAMMA1000867 | 7073 |
| MAMMA1000875 | F-MAMMA1000875 | 1572 | R-MAMMA1000875 | 7074 |
| MAMMA1000876 | F-MAMMA1000876 | 1573 | R-MAMMA1000876 | 7075 |
| MAMMA1000877 | F-MAMMA1000877 | 1574 | R-MAMMA1000877 | 7076 |
| MAMMA1000880 | F-MAMMA1000880 | 1575 | R-MAMMA1000880 | 7077 |
| MAMMA1000883 | F-MAMMA1000883 | 1576 | R-MAMMA1000883 | 7078 |
| MAMMA1000897 | F-MAMMA1000897 | 1577 | R-MAMMA1000897 | 7079 |
| MAMMA1000905 | F-MAMMA1000905 | 1578 | R-MAMMA1000905 | 7080 |
| MAMMA1000906 | F-MAMMA1000906 | 1579 | R-MAMMA1000906 | 7081 |
| MAMMA1000908 | F-MAMMA1000908 | 1580 | R-MAMMA1000908 | 7082 |
| MAMMA1000914 | F-MAMMA1000914 | 1581 | R-MAMMA1000914 | 7083 |
| MAMMA1000921 | F-MAMMA1000921 | 1582 | R-MAMMA1000921 | 7084 |
| MAMMA1000931 | F-MAMMA1000931 | 1583 | R-MAMMA1000931 | 7085 |
| MAMMA1000940 | F-MAMMA1000940 | 1584 | R-MAMMA1000940 | 7086 |
| MAMMA1000941 | F-MAMMA1000941 | 1585 | R-MAMMA1000941 | 7087 |
| MAMMA1000942 | F-MAMMA1000942 | 1586 | R-MAMMA1000942 | 7088 |
| MAMMA1000943 | F-MAMMA1000943 | 1587 | R-MAMMA1000943 | 7089 |
| MAMMA1000956 | F-MAMMA1000956 | 1588 | R-MAMMA1000956 | 7090 |
| MAMMA1000957 | F-MAMMA1000957 | 1589 | R-MAMMA1000957 | 7091 |
| MAMMA1000962 | F-MAMMA1000962 | 1590 | R-MAMMA1000962 | 7092 |
| MAMMA1000968 | F-MAMMA1000968 | 1591 | R-MAMMA1000968 | 7093 |
| MAMMA1000975 | F-MAMMA1000975 | 1592 | R-MAMMA1000975 | 7094 |
| MAMMA1000979 | F-MAMMA1000979 | 1593 | R-MAMMA1000979 | 7095 |
| MAMMA1000987 | F-MAMMA1000987 | 1594 | R-MAMMA1000987 | 7096 |
| MAMMA1000998 | F-MAMMA1000998 | 1595 | R-MAMMA1000998 | 7097 |
| MAMMA1001003 | F-MAMMA1001003 | 1596 | R-MAMMA1001003 | 7098 |
| MAMMA1001008 | F-MAMMA1001008 | 1597 | R-MAMMA1001008 | 7099 |
| MAMMA1001021 | F-MAMMA1001021 | 1598 | R-MAMMA1001021 | 7100 |
| MAMMA1001024 | F-MAMMA1001024 | 1599 | R-MAMMA1001024 | 7101 |
| MAMMA1001030 | F-MAMMA1001030 | 1600 | R-MAMMA1001030 | 7102 |
| MAMMA1001035 | F-MAMMA1001035 | 1601 | R-MAMMA1001035 | 7103 |
| MAMMA1001038 | F-MAMMA1001038 | 1602 | R-MAMMA1001038 | 7104 |
| MAMMA1001041 | F-MAMMA1001041 | 1603 | R-nnnnnnnnnnnn | 7105 |
| MAMMA1001050 | F-MAMMA1001050 | 1604 | R-MAMMA1001050 | 7106 |
| MAMMA1001059 | F-MAMMA1001059 | 1605 | R-MAMMA1001059 | 7107 |
| MAMMA1001067 | F-MAMMA1001067 | 1606 | R-MAMMA1001067 | 7108 |
| MAMMA1001073 | F-MAMMA1001073 | 1607 | R-MAMMA1001073 | 7109 |
| MAMMA1001074 | F-MAMMA1001074 | 1608 | R-MAMMA1001074 | 7110 |
| MAMMA1001075 | F-MAMMA1001075 | 1609 | R-MAMMA1001075 | 7111 |
| MAMMA1001078 | F-MAMMA1001078 | 1610 | R-MAMMA1001078 | 7112 |
| MAMMA1001080 | F-MAMMA1001080 | 1611 | | |
| MAMMA1001082 | F-MAMMA1001082 | 1612 | R-MAMMA1001082 | 7113 |
| MAMMA1001091 | F-MAMMA1001091 | 1613 | R-MAMMA1001091 | 7114 |
| MAMMA1001092 | F-MAMMA1001092 | 1614 | R-MAMMA1001092 | 7115 |
| MAMMA1001105 | F-MAMMA1001105 | 1615 | R-MAMMA1001105 | 7116 |
| MAMMA1001110 | F-MAMMA1001110 | 1616 | R-MAMMA1001110 | 7117 |
| MAMMA1001126 | F-MAMMA1001126 | 1617 | R-MAMMA1001126 | 7118 |
| MAMMA1001133 | F-MAMMA1001133 | 1618 | R-MAMMA1001133 | 7119 |
| MAMMA1001139 | F-MAMMA1001139 | 1619 | R-MAMMA1001139 | 7120 |
| MAMMA1001143 | F-MAMMA1001143 | 1620 | R-MAMMA1001143 | 7121 |
| MAMMA1001145 | F-MAMMA1001145 | 1621 | R-MAMMA1001145 | 7122 |
| MAMMA1001154 | F-MAMMA1001154 | 1622 | R-MAMMA1001154 | 7123 |
| MAMMA1001161 | F-MAMMA1001161 | 1623 | R-MAMMA1001161 | 7124 |
| MAMMA1001162 | F-MAMMA1001162 | 1624 | R-MAMMA1001162 | 7125 |
| MAMMA1001181 | F-MAMMA1001181 | 1625 | R-MAMMA1001181 | 7126 |
| MAMMA1001186 | F-MAMMA1001186 | 1626 | R-MAMMA1001186 | 7127 |
| MAMMA1001191 | F-MAMMA1001191 | 1627 | R-MAMMA1001191 | 7128 |
| MAMMA1001198 | F-MAMMA1001198 | 1628 | R-MAMMA1001198 | 7129 |
| MAMMA1001202 | F-MAMMA1001202 | 1629 | R-MAMMA1001202 | 7130 |
| MAMMA1001203 | F-MAMMA1001203 | 1630 | R-MAMMA1001203 | 7131 |
| MAMMA1001206 | F-MAMMA1001206 | 1631 | R-MAMMA1001206 | 7132 |
| MAMMA1001215 | F-MAMMA1001215 | 1632 | R-MAMMA1001215 | 7133 |
| MAMMA1001220 | F-MAMMA1001220 | 1633 | R-MAMMA1001220 | 7134 |
| MAMMA1001222 | F-MAMMA1001222 | 1634 | R-MAMMA1001222 | 7135 |
| MAMMA1001243 | F-MAMMA1001243 | 1635 | R-MAMMA1001243 | 7136 |
| MAMMA1001244 | F-MAMMA1001244 | 1636 | R-MAMMA1001244 | 7137 |
| MAMMA1001249 | F-MAMMA1001249 | 1637 | R-MAMMA1001249 | 7138 |
| MAMMA1001256 | F-MAMMA1001256 | 1638 | R-MAMMA1001256 | 7139 |
| MAMMA1001259 | F-MAMMA1001259 | 1639 | R-MAMMA1001259 | 7140 |
| MAMMA1001260 | F-MAMMA1001260 | 1640 | R-MAMMA1001260 | 7141 |
| MAMMA1001268 | F-MAMMA1001268 | 1641 | R-MAMMA1001268 | 7142 |
| MAMMA1001271 | F-MAMMA1001271 | 1642 | R-MAMMA1001271 | 7143 |
| MAMMA1001274 | F-MAMMA1001274 | 1643 | R-MAMMA1001274 | 7144 |
| MAMMA1001280 | F-MAMMA1001280 | 1644 | R-MAMMA1001280 | 7145 |
| MAMMA1001292 | F-MAMMA1001292 | 1645 | R-MAMMA1001292 | 7146 |
| MAMMA1001296 | F-MAMMA1001296 | 1646 | R-MAMMA1001296 | 7147 |
| MAMMA1001298 | F-MAMMA1001298 | 1647 | R-MAMMA1001298 | 7148 |
| MAMMA1001305 | F-MAMMA1001305 | 1648 | R-MAMMA1001305 | 7149 |
| MAMMA1001322 | F-MAMMA1001322 | 1649 | R-MAMMA1001322 | 7150 |
| MAMMA1001324 | F-MAMMA1001324 | 1650 | R-MAMMA1001324 | 7151 |
| MAMMA1001330 | F-MAMMA1001330 | 1651 | R-MAMMA1001330 | 7152 |
| MAMMA1001341 | F-MAMMA1001341 | 1652 | R-MAMMA1001341 | 7153 |
| MAMMA1001343 | F-MAMMA1001343 | 1653 | R-MAMMA1001343 | 7154 |
| MAMMA1001346 | F-MAMMA1001346 | 1654 | R-MAMMA1001346 | 7155 |
| MAMMA1001383 | F-MAMMA1001383 | 1655 | R-MAMMA1001383 | 7156 |
| MAMMA1001388 | F-MAMMA1001388 | 1656 | R-MAMMA1001388 | 7157 |
| MAMMA1001397 | F-MAMMA1001397 | 1657 | R-MAMMA1001397 | 7158 |
| MAMMA1001408 | F-MAMMA1001408 | 1658 | R-MAMMA1001408 | 7159 |
| MAMMA1001411 | F-MAMMA1001411 | 1659 | R-MAMMA1001411 | 7160 |
| MAMMA1001419 | F-MAMMA1001419 | 1660 | R-MAMMA1001419 | 7161 |
| MAMMA1001420 | F-MAMMA1001420 | 1661 | R-MAMMA1001420 | 7162 |
| MAMMA1001435 | F-MAMMA1001435 | 1662 | R-MAMMA1001435 | 7163 |
| MAMMA1001442 | F-MAMMA1001442 | 1663 | R-MAMMA1001442 | 7164 |
| MAMMA1001446 | F-MAMMA1001446 | 1664 | R-MAMMA1001446 | 7165 |
| MAMMA1001452 | F-MAMMA1001452 | 1665 | R-MAMMA1001452 | 7166 |
| MAMMA1001465 | F-MAMMA1001465 | 1666 | R-MAMMA1001465 | 7167 |
| MAMMA1001476 | F-MAMMA1001476 | 1667 | R-MAMMA1001476 | 7168 |
| MAMMA1001487 | F-MAMMA1001487 | 1668 | R-MAMMA1001487 | 7169 |
| MAMMA1001501 | F-MAMMA1001501 | 1669 | R-MAMMA1001501 | 7170 |
| MAMMA1001502 | F-MAMMA1001502 | 1670 | R-MAMMA1001502 | 7171 |
| MAMMA1001510 | F-MAMMA1001510 | 1671 | R-MAMMA1001510 | 7172 |
| MAMMA1001522 | F-MAMMA1001522 | 1672 | R-MAMMA1001522 | 7173 |
| MAMMA1001547 | F-MAMMA1001547 | 1673 | R-MAMMA1001547 | 7174 |
| MAMMA1001551 | F-MAMMA1001551 | 1674 | R-MAMMA1001551 | 7175 |
| MAMMA1001575 | F-MAMMA1001575 | 1675 | R-MAMMA1001575 | 7176 |
| MAMMA1001576 | F-MAMMA1001576 | 1676 | R-MAMMA1001576 | 7177 |
| MAMMA1001590 | F-MAMMA1001590 | 1677 | R-MAMMA1001590 | 7178 |
| MAMMA1001600 | F-MAMMA1001600 | 1678 | R-MAMMA1001600 | 7179 |
| MAMMA1001604 | F-MAMMA1001604 | 1679 | R-MAMMA1001604 | 7180 |
| MAMMA1001606 | F-MAMMA1001606 | 1680 | R-MAMMA1001606 | 7181 |
| MAMMA1001620 | F-MAMMA1001620 | 1681 | R-MAMMA1001620 | 7182 |
| MAMMA1001627 | F-MAMMA1001627 | 1682 | R-MAMMA1001627 | 7183 |
| MAMMA1001630 | F-MAMMA1001630 | 1683 | R-MAMMA1001630 | 7184 |
| MAMMA1001633 | F-MAMMA1001633 | 1684 | R-MAMMA1001633 | 7185 |
| MAMMA1001635 | F-MAMMA1001635 | 1685 | R-MAMMA1001635 | 7186 |
| MAMMA1001649 | F-MAMMA1001649 | 1686 | R-MAMMA1001649 | 7187 |
| MAMMA1001654 | F-MAMMA1001654 | 1687 | | |
| MAMMA1001663 | F-MAMMA1001663 | 1688 | R-MAMMA1001663 | 7188 |
| MAMMA1001670 | F-MAMMA1001670 | 1689 | R-MAMMA1001670 | 7189 |
| MAMMA1001671 | F-MAMMA1001671 | 1690 | R-MAMMA1001671 | 7190 |
| MAMMA1001679 | F-MAMMA1001679 | 1691 | R-MAMMA1001679 | 7191 |
| MAMMA1001683 | F-MAMMA1001683 | 1692 | R-MAMMA1001683 | 7192 |
| MAMMA1001686 | F-MAMMA1001686 | 1693 | R-MAMMA1001686 | 7193 |
| MAMMA1001692 | F-MAMMA1001692 | 1694 | R-MAMMA1001692 | 7194 |
| MAMMA1001711 | F-MAMMA1001711 | 1695 | R-MAMMA1001711 | 7195 |
| MAMMA1001715 | F-MAMMA1001715 | 1696 | R-MAMMA1001715 | 7196 |
| MAMMA1001730 | F-MAMMA1001730 | 1697 | R-MAMMA1001730 | 7197 |
| MAMMA1001735 | F-MAMMA1001735 | 1698 | R-MAMMA1001735 | 7198 |
| MAMMA1001740 | F-MAMMA1001740 | 1699 | R-MAMMA1001740 | 7199 |
| MAMMA1001743 | F-MAMMA1001743 | 1700 | R-MAMMA1001743 | 7200 |
| MAMMA1001744 | F-MAMMA1001744 | 1701 | R-MAMMA1001744 | 7201 |
| MAMMA1001745 | F-MAMMA1001745 | 1702 | R-MAMMA1001745 | 7202 |
| MAMMA1001751 | F-MAMMA1001751 | 1703 | R-MAMMA1001751 | 7203 |
| MAMMA1001754 | F-MAMMA1001754 | 1704 | R-MAMMA1001754 | 7204 |
| MAMMA1001757 | F-MAMMA1001757 | 1705 | R-MAMMA1001757 | 7205 |
| MAMMA1001760 | F-MAMMA1001760 | 1706 | R-MAMMA1001760 | 7206 |
| MAMMA1001764 | F-MAMMA1001764 | 1707 | R-MAMMA1001764 | 7207 |
| MAMMA1001768 | F-MAMMA1001768 | 1708 | R-MAMMA1001768 | 7208 |
| MAMMA1001769 | F-MAMMA1001769 | 1709 | R-MAMMA1001769 | 7209 |
| MAMMA1001771 | F-MAMMA1001771 | 1710 | R-MAMMA1001771 | 7210 |
| MAMMA1001783 | F-MAMMA1001783 | 1711 | R-MAMMA1001783 | 7211 |
| MAMMA1001785 | F-MAMMA1001785 | 1712 | R-MAMMA1001785 | 7212 |
| MAMMA1001788 | F-MAMMA1001788 | 1713 | R-MAMMA1001788 | 7213 |
| MAMMA1001790 | F-MAMMA1001790 | 1714 | R-MAMMA1001790 | 7214 |
| MAMMA1001806 | F-MAMMA1001806 | 1715 | R-MAMMA1001806 | 7215 |
| MAMMA1001812 | F-MAMMA1001812 | 1716 | R-MAMMA1001812 | 7216 |
| MAMMA1001815 | F-MAMMA1001815 | 1717 | R-MAMMA1001815 | 7217 |
| MAMMA1001817 | F-MAMMA1001817 | 1718 | R-MAMMA1001817 | 7218 |
| MAMMA1001818 | F-MAMMA1001818 | 1719 | R-MAMMA1001818 | 7219 |
| MAMMA1001820 | F-MAMMA1001820 | 1720 | R-MAMMA1001820 | 7220 |
| MAMMA1001824 | F-MAMMA1001824 | 1721 | R-MAMMA1001824 | 7221 |
| MAMMA1001836 | F-MAMMA1001836 | 1722 | R-MAMMA1001836 | 7222 |
| MAMMA1001837 | F-MAMMA1001837 | 1723 | R-MAMMA1001837 | 7223 |
| MAMMA1001848 | F-MAMMA1001848 | 1724 | R-MAMMA1001848 | 7224 |
| MAMMA1001851 | F-MAMMA1001851 | 1725 | R-MAMMA1001851 | 7225 |
| MAMMA1001854 | F-MAMMA1001854 | 1726 | R-MAMMA1001854 | 7226 |
| MAMMA1001858 | F-MAMMA1001858 | 1727 | R-MAMMA1001858 | 7227 |
| MAMMA1001864 | F-MAMMA1001864 | 1728 | R-MAMMA1001864 | 7228 |
| MAMMA1001868 | F-MAMMA1001868 | 1729 | R-nnnnnnnnnnnn | 7229 |
| MAMMA1001874 | F-MAMMA1001874 | 1730 | R-MAMMA1001874 | 7230 |
| MAMMA1001878 | F-MAMMA1001878 | 1731 | R-MAMMA1001878 | 7231 |
| MAMMA1001880 | F-MAMMA1001880 | 1732 | R-MAMMA1001880 | 7232 |
| MAMMA1001890 | F-MAMMA1001890 | 1733 | R-MAMMA1001890 | 7233 |
| MAMMA1001907 | F-MAMMA1001907 | 1734 | R-MAMMA1001907 | 7234 |
| MAMMA1001908 | F-MAMMA1001908 | 1735 | R-nnnnnnnnnnnn | 7235 |
| MAMMA1001931 | F-MAMMA1001931 | 1736 | R-MAMMA1001931 | 7236 |
| MAMMA1001956 | F-MAMMA1001956 | 1737 | R-MAMMA1001956 | 7237 |
| MAMMA1001963 | F-MAMMA1001963 | 1738 | R-MAMMA1001963 | 7238 |
| MAMMA1001969 | F-MAMMA1001969 | 1739 | R-MAMMA1001969 | 7239 |
| MAMMA1001970 | F-MAMMA1001970 | 1740 | R-MAMMA1001970 | 7240 |
| MAMMA1001992 | F-MAMMA1001992 | 1741 | R-MAMMA1001992 | 7241 |
| MAMMA1002009 | F-MAMMA1002009 | 1742 | R-MAMMA1002009 | 7242 |
| MAMMA1002011 | F-MAMMA1002011 | 1743 | R-MAMMA1002011 | 7243 |
| MAMMA1002032 | F-MAMMA1002032 | 1744 | R-MAMMA1002032 | 7244 |
| MAMMA1002033 | F-MAMMA1002033 | 1745 | R-MAMMA1002033 | 7245 |
| MAMMA1002041 | F-MAMMA1002041 | 1746 | R-MAMMA1002041 | 7246 |
| MAMMA1002042 | F-MAMMA1002042 | 1747 | R-MAMMA1002042 | 7247 |
| MAMMA1002047 | F-MAMMA1002047 | 1748 | R-MAMMA1002047 | 7248 |
| MAMMA1002056 | F-MAMMA1002056 | 1749 | R-MAMMA1002056 | 7249 |
| MAMMA1002058 | F-MAMMA1002058 | 1750 | R-MAMMA1002058 | 7250 |
| MAMMA1002068 | F-MAMMA1002068 | 1751 | R-MAMMA1002068 | 7251 |
| MAMMA1002078 | F-MAMMA1002078 | 1752 | R-MAMMA1002078 | 7252 |
| MAMMA1002082 | F-MAMMA1002082 | 1753 | R-MAMMA1002082 | 7253 |
| MAMMA1002084 | F-MAMMA1002084 | 1754 | R-MAMMA1002084 | 7254 |
| MAMMA1002093 | F-MAMMA1002093 | 1755 | R-MAMMA1002093 | 7255 |
| MAMMA1002108 | F-MAMMA1002108 | 1756 | R-MAMMA1002108 | 7256 |
| MAMMA1002118 | F-MAMMA1002118 | 1757 | R-MAMMA1002118 | 7257 |
| MAMMA1002125 | F-MAMMA1002125 | 1758 | R-MAMMA1002125 | 7258 |
| MAMMA1002132 | F-MAMMA1002132 | 1759 | R-MAMMA1002132 | 7259 |
| MAMMA1002140 | F-MAMMA1002140 | 1760 | R-MAMMA1002140 | 7260 |
| MAMMA1002143 | F-MAMMA1002143 | 1761 | R-MAMMA1002143 | 7261 |
| MAMMA1002145 | F-MAMMA1002145 | 1762 | R-MAMMA1002145 | 7262 |
| MAMMA1002153 | F-MAMMA1002153 | 1763 | R-MAMMA1002153 | 7263 |
| MAMMA1002155 | F-MAMMA1002155 | 1764 | R-MAMMA1002155 | 7264 |
| MAMMA1002156 | F-MAMMA1002156 | 1765 | R-MAMMA1002156 | 7265 |
| MAMMA1002158 | F-MAMMA1002158 | 1766 | R-MAMMA1002158 | 7266 |
| MAMMA1002170 | F-MAMMA1002170 | 1767 | R-MAMMA1002170 | 7267 |
| MAMMA1002174 | F-MAMMA1002174 | 1768 | R-MAMMA1002174 | 7268 |
| MAMMA1002198 | F-MAMMA1002198 | 1769 | R-MAMMA1002198 | 7269 |
| MAMMA1002209 | F-MAMMA1002209 | 1770 | R-MAMMA1002209 | 7270 |
| MAMMA1002215 | F-MAMMA1002215 | 1771 | R-MAMMA1002215 | 7271 |
| MAMMA1002219 | F-MAMMA1002219 | 1772 | R-MAMMA1002219 | 7272 |
| MAMMA1002230 | F-MAMMA1002230 | 1773 | R-MAMMA1002230 | 7273 |
| MAMMA1002236 | F-MAMMA1002236 | 1774 | R-MAMMA1002236 | 7274 |
| MAMMA1002243 | F-MAMMA1002243 | 1775 | R-MAMMA1002243 | 7275 |
| MAMMA1002250 | F-MAMMA1002250 | 1776 | R-MAMMA1002250 | 7276 |
| MAMMA1002267 | F-MAMMA1002267 | 1777 | R-MAMMA1002267 | 7277 |
| MAMMA1002268 | F-MAMMA1002268 | 1778 | R-MAMMA1002268 | 7278 |
| MAMMA1002269 | F-MAMMA1002269 | 1779 | R-MAMMA1002269 | 7279 |
| MAMMA1002282 | F-MAMMA1002282 | 1780 | R-MAMMA1002282 | 7280 |
| MAMMA1002292 | F-MAMMA1002292 | 1781 | R-MAMMA1002292 | 7281 |
| MAMMA1002293 | F-MAMMA1002293 | 1782 | R-MAMMA1002293 | 7282 |
| MAMMA1002294 | F-MAMMA1002294 | 1783 | R-MAMMA1002294 | 7283 |
| MAMMA1002297 | F-MAMMA1002297 | 1784 | R-MAMMA1002297 | 7284 |
| MAMMA1002298 | F-MAMMA1002298 | 1785 | R-MAMMA1002298 | 7285 |
| MAMMA1002299 | F-MAMMA1002299 | 1786 | R-MAMMA1002299 | 7286 |
| MAMMA1002308 | F-MAMMA1002308 | 1787 | R-MAMMA1002308 | 7287 |
| MAMMA1002310 | F-MAMMA1002310 | 1788 | R-MAMMA1002310 | 7288 |
| MAMMA1002311 | F-MAMMA1002311 | 1789 | R-MAMMA1002311 | 7289 |
| MAMMA1002312 | F-MAMMA1002312 | 1790 | R-MAMMA1002312 | 7290 |
| MAMMA1002317 | F-MAMMA1002317 | 1791 | R-MAMMA1002317 | 7291 |
| MAMMA1002319 | F-MAMMA1002319 | 1792 | R-MAMMA1002319 | 7292 |
| MAMMA1002322 | F-MAMMA1002322 | 1793 | R-MAMMA1002322 | 7293 |
| MAMMA1002329 | F-MAMMA1002329 | 1794 | R-MAMMA1002329 | 7294 |
| MAMMA1002332 | F-MAMMA1002332 | 1795 | R-MAMMA1002332 | 7295 |
| MAMMA1002333 | F-MAMMA1002333 | 1796 | R-MAMMA1002333 | 7296 |
| MAMMA1002339 | F-MAMMA1002339 | 1797 | R-MAMMA1002339 | 7297 |
| MAMMA1002347 | F-MAMMA1002347 | 1798 | R-MAMMA1002347 | 7298 |
| MAMMA1002351 | F-MAMMA1002351 | 1799 | R-MAMMA1002351 | 7299 |
| MAMMA1002352 | F-MAMMA1002352 | 1800 | R-MAMMA1002352 | 7300 |
| MAMMA1002353 | F-MAMMA1002353 | 1801 | R-MAMMA1002353 | 7301 |
| MAMMA1002355 | F-MAMMA1002355 | 1802 | R-MAMMA1002355 | 7302 |
| MAMMA1002356 | F-MAMMA1002356 | 1803 | R-MAMMA1002356 | 7303 |
| MAMMA1002359 | F-MAMMA1002359 | 1804 | R-MAMMA1002359 | 7304 |
| MAMMA1002360 | F-MAMMA1002360 | 1805 | R-MAMMA1002360 | 7305 |
| MAMMA1002361 | F-MAMMA1002361 | 1806 | R-MAMMA1002361 | 7306 |
| MAMMA1002362 | F-MAMMA1002362 | 1807 | R-MAMMA1002362 | 7307 |
| MAMMA1002380 | F-MAMMA1002380 | 1808 | R-MAMMA1002380 | 7308 |
| MAMMA1002384 | F-MAMMA1002384 | 1809 | R-MAMMA1002384 | 7309 |
| MAMMA1002385 | F-MAMMA1002385 | 1810 | R-MAMMA1002385 | 7310 |
| MAMMA1002392 | F-MAMMA1002392 | 1811 | R-MAMMA1002392 | 7311 |
| MAMMA1002411 | F-MAMMA1002411 | 1812 | R-MAMMA1002411 | 7312 |
| MAMMA1002413 | F-MAMMA1002413 | 1813 | R-MAMMA1002413 | 7313 |
| MAMMA1002417 | F-MAMMA1002417 | 1814 | R-MAMMA1002417 | 7314 |
| MAMMA1002427 | F-MAMMA1002427 | 1815 | R-MAMMA1002427 | 7315 |
| MAMMA1002428 | F-MAMMA1002428 | 1816 | R-MAMMA1002428 | 7316 |
| MAMMA1002434 | F-MAMMA1002434 | 1817 | R-MAMMA1002434 | 7317 |
| MAMMA1002446 | F-MAMMA1002446 | 1818 | R-MAMMA1002446 | 7318 |
| MAMMA1002454 | F-MAMMA1002454 | 1819 | R-MAMMA1002454 | 7319 |
| MAMMA1002461 | F-MAMMA1002461 | 1820 | R-MAMMA1002461 | 7320 |
| MAMMA1002470 | F-MAMMA1002470 | 1821 | R-MAMMA1002470 | 7321 |
| MAMMA1002475 | F-MAMMA1002475 | 1822 | R-MAMMA1002475 | 7322 |
| MAMMA1002480 | F-MAMMA1002480 | 1823 | R-MAMMA1002480 | 7323 |
| MAMMA1002485 | F-MAMMA1002485 | 1824 | R-MAMMA1002485 | 7324 |
| MAMMA1002494 | F-MAMMA1002494 | 1825 | R-MAMMA1002494 | 7325 |
| MAMMA1002498 | F-MAMMA1002498 | 1826 | R-MAMMA1002498 | 7326 |
| MAMMA1002524 | F-MAMMA1002524 | 1827 | R-MAMMA1002524 | 7327 |
| MAMMA1002530 | F-MAMMA1002530 | 1828 | R-MAMMA1002530 | 7328 |
| MAMMA1002545 | F-MAMMA1002545 | 1829 | R-MAMMA1002545 | 7329 |
| MAMMA1002554 | F-MAMMA1002554 | 1830 | R-MAMMA1002554 | 7330 |
| MAMMA1002556 | F-MAMMA1002556 | 1831 | R-MAMMA1002556 | 7331 |
| MAMMA1002566 | F-MAMMA1002566 | 1832 | R-MAMMA1002566 | 7332 |
| MAMMA1002571 | F-MAMMA1002571 | 1833 | R-MAMMA1002571 | 7333 |
| MAMMA1002573 | F-MAMMA1002573 | 1834 | R-MAMMA1002573 | 7334 |
| MAMMA1002585 | F-MAMMA1002585 | 1835 | R-MAMMA1002585 | 7335 |
| MAMMA1002590 | F-MAMMA1002590 | 1836 | R-MAMMA1002590 | 7336 |
| MAMMA1002597 | F-MAMMA1002597 | 1837 | R-MAMMA1002597 | 7337 |
| MAMMA1002598 | F-MAMMA1002598 | 1838 | R-MAMMA1002598 | 7338 |
| MAMMA1002603 | F-MAMMA1002603 | 1839 | R-MAMMA1002603 | 7339 |
| MAMMA1002612 | F-MAMMA1002612 | 1840 | R-MAMMA1002612 | 7340 |
| MAMMA1002617 | F-MAMMA1002617 | 1841 | R-MAMMA1002617 | 7341 |
| MAMMA1002618 | F-MAMMA1002618 | 1842 | R-MAMMA1002618 | 7342 |
| MAMMA1002619 | F-MAMMA1002619 | 1843 | R-MAMMA1002619 | 7343 |
| MAMMA1002622 | F-MAMMA1002622 | 1844 | R-MAMMA1002622 | 7344 |
| MAMMA1002623 | F-MAMMA1002623 | 1845 | R-MAMMA1002623 | 7345 |
| MAMMA1002625 | F-MAMMA1002625 | 1846 | R-MAMMA1002625 | 7346 |
| MAMMA1002629 | F-MAMMA1002629 | 1847 | R-MAMMA1002629 | 7347 |
| MAMMA1002636 | F-MAMMA1002636 | 1848 | R-MAMMA1002636 | 7348 |
| MAMMA1002637 | F-MAMMA1002637 | 1849 | R-MAMMA1002637 | 7349 |
| MAMMA1002646 | F-MAMMA1002646 | 1850 | R-MAMMA1002646 | 7350 |
| MAMMA1002650 | F-MAMMA1002650 | 1851 | R-MAMMA1002650 | 7351 |
| MAMMA1002655 | F-MAMMA1002655 | 1852 | R-MAMMA1002655 | 7352 |
| MAMMA1002662 | F-MAMMA1002662 | 1853 | R-MAMMA1002662 | 7353 |
| MAMMA1002665 | F-MAMMA1002665 | 1854 | R-MAMMA1002665 | 7354 |
| MAMMA1002671 | F-MAMMA1002671 | 1855 | R-MAMMA1002671 | 7355 |
| MAMMA1002673 | F-MAMMA1002673 | 1856 | R-MAMMA1002673 | 7356 |
| MAMMA1002684 | F-MAMMA1002684 | 1857 | R-MAMMA1002684 | 7357 |
| MAMMA1002685 | F-MAMMA1002685 | 1858 | R-MAMMA1002685 | 7358 |
| MAMMA1002698 | F-MAMMA1002698 | 1859 | R-MAMMA1002698 | 7359 |
| MAMMA1002699 | F-MAMMA1002699 | 1860 | R-MAMMA1002699 | 7360 |
| MAMMA1002701 | F-MAMMA1002701 | 1861 | R-MAMMA1002701 | 7361 |
| MAMMA1002708 | F-MAMMA1002708 | 1862 | R-MAMMA1002708 | 7362 |
| MAMMA1002711 | F-MAMMA1002711 | 1863 | R-MAMMA1002711 | 7363 |
| MAMMA1002721 | F-MAMMA1002721 | 1864 | R-MAMMA1002721 | 7364 |
| MAMMA1002727 | F-MAMMA1002727 | 1865 | R-MAMMA1002727 | 7365 |
| MAMMA1002728 | F-MAMMA1002728 | 1866 | R-MAMMA1002728 | 7366 |
| MAMMA1002744 | F-MAMMA1002744 | 1867 | R-MAMMA1002744 | 7367 |
| MAMMA1002746 | F-MAMMA1002746 | 1868 | R-MAMMA1002746 | 7368 |
| MAMMA1002748 | F-MAMMA1002748 | 1869 | R-MAMMA1002748 | 7369 |
| MAMMA1002754 | F-MAMMA1002754 | 1870 | R-MAMMA1002754 | 7370 |
| MAMMA1002758 | F-MAMMA1002758 | 1871 | R-MAMMA1002758 | 7371 |
| MAMMA1002764 | F-MAMMA1002764 | 1872 | R-MAMMA1002764 | 7372 |
| MAMMA1002765 | F-MAMMA1002765 | 1873 | R-MAMMA1002765 | 7373 |
| MAMMA1002769 | F-MAMMA1002769 | 1874 | R-MAMMA1002769 | 7374 |
| MAMMA1002775 | F-MAMMA1002775 | 1875 | | |
| MAMMA1002780 | F-MAMMA1002780 | 1876 | R-MAMMA1002780 | 7375 |
| MAMMA1002782 | F-MAMMA1002782 | 1877 | R-MAMMA1002782 | 7376 |
| MAMMA1002796 | F-MAMMA1002796 | 1878 | R-MAMMA1002796 | 7377 |
| MAMMA1002807 | F-MAMMA1002807 | 1879 | R-MAMMA1002807 | 7378 |
| MAMMA1002820 | F-MAMMA1002820 | 1880 | R-MAMMA1002820 | 7379 |
| MAMMA1002830 | F-MAMMA1002830 | 1881 | R-MAMMA1002830 | 7380 |
| MAMMA1002833 | F-MAMMA1002833 | 1882 | R-MAMMA1002833 | 7381 |
| MAMMA1002835 | F-MAMMA1002835 | 1883 | R-MAMMA1002835 | 7382 |
| MAMMA1002838 | F-MAMMA1002838 | 1884 | R-MAMMA1002838 | 7383 |
| MAMMA1002842 | F-MAMMA1002842 | 1885 | R-MAMMA1002842 | 7384 |
| MAMMA1002843 | F-MAMMA1002843 | 1886 | R-MAMMA1002843 | 7385 |
| MAMMA1002844 | F-MAMMA1002844 | 1887 | R-MAMMA1002844 | 7386 |
| MAMMA1002858 | F-MAMMA1002858 | 1888 | R-MAMMA1002858 | 7387 |
| MAMMA1002868 | F-MAMMA1002868 | 1889 | R-MAMMA1002868 | 7388 |
| MAMMA1002869 | F-MAMMA1002869 | 1890 | | |
| MAMMA1002871 | F-MAMMA1002871 | 1891 | R-MAMMA1002871 | 7389 |
| MAMMA1002880 | F-MAMMA1002880 | 1892 | R-MAMMA1002880 | 7390 |
| MAMMA1002881 | F-MAMMA1002881 | 1893 | R-MAMMA1002881 | 7391 |
| MAMMA1002886 | F-MAMMA1002886 | 1894 | R-MAMMA1002886 | 7392 |
| MAMMA1002887 | F-MAMMA1002887 | 1895 | R-MAMMA1002887 | 7393 |
| MAMMA1002890 | F-MAMMA1002890 | 1896 | R-MAMMA1002890 | 7394 |
| MAMMA1002892 | F-MAMMA1002892 | 1897 | R-MAMMA1002892 | 7395 |
| MAMMA1002895 | F-MAMMA1002895 | 1898 | R-MAMMA1002895 | 7396 |
| MAMMA1002908 | F-MAMMA1002908 | 1899 | R-MAMMA1002908 | 7397 |
| MAMMA1002909 | F-MAMMA1002909 | 1900 | R-MAMMA1002909 | 7398 |
| MAMMA1002930 | F-MAMMA1002930 | 1901 | R-MAMMA1002930 | 7399 |
| MAMMA1002937 | F-MAMMA1002937 | 1902 | | |
| MAMMA1002938 | F-MAMMA1002938 | 1903 | R-MAMMA1002938 | 7400 |
| MAMMA1002941 | F-MAMMA1002941 | 1904 | R-MAMMA1002941 | 7401 |
| MAMMA1002947 | F-MAMMA1002947 | 1905 | R-MAMMA1002947 | 7402 |
| MAMMA1002964 | F-MAMMA1002964 | 1906 | R-MAMMA1002964 | 7403 |
| MAMMA1002970 | F-MAMMA1002970 | 1907 | R-MAMMA1002970 | 7404 |
| MAMMA1002972 | F-MAMMA1002972 | 1908 | R-MAMMA1002972 | 7405 |
| MAMMA1002973 | F-MAMMA1002973 | 1909 | R-MAMMA1002973 | 7406 |
| MAMMA1002982 | F-MAMMA1002982 | 1910 | R-MAMMA1002982 | 7407 |
| MAMMA1002987 | F-MAMMA1002987 | 1911 | R-MAMMA1002987 | 7408 |
| MAMMA1003003 | F-MAMMA1003003 | 1912 | R-MAMMA1003003 | 7409 |
| MAMMA1003004 | F-MAMMA1003004 | 1913 | R-MAMMA1003004 | 7410 |
| MAMMA1003007 | F-MAMMA1003007 | 1914 | R-MAMMA1003007 | 7411 |
| MAMMA1003011 | F-MAMMA1003011 | 1915 | R-MAMMA1003011 | 7412 |
| MAMMA1003013 | F-MAMMA1003013 | 1916 | | |
| MAMMA1003015 | F-MAMMA1003015 | 1917 | R-MAMMA1003015 | 7413 |
| MAMMA1003019 | F-MAMMA1003019 | 1918 | R-MAMMA1003019 | 7414 |
| MAMMA1003026 | F-MAMMA1003026 | 1919 | R-MAMMA1003026 | 7415 |
| MAMMA1003031 | F-MAMMA1003031 | 1920 | R-MAMMA1003031 | 7416 |
| MAMMA1003035 | F-MAMMA1003035 | 1921 | R-MAMMA1003035 | 7417 |
| MAMMA1003039 | F-MAMMA1003039 | 1922 | R-MAMMA1003039 | 7418 |
| MAMMA1003040 | F-MAMMA1003040 | 1923 | R-MAMMA1003040 | 7419 |
| MAMMA1003044 | F-MAMMA1003044 | 1924 | R-MAMMA1003044 | 7420 |
| MAMMA1003047 | F-MAMMA1003047 | 1925 | R-MAMMA1003047 | 7421 |
| MAMMA1003049 | F-MAMMA1003049 | 1926 | R-MAMMA1003049 | 7422 |
| MAMMA1003055 | F-MAMMA1003055 | 1927 | R-MAMMA1003055 | 7423 |
| MAMMA1003056 | F-MAMMA1003056 | 1928 | R-MAMMA1003056 | 7424 |
| MAMMA1003057 | F-MAMMA1003057 | 1929 | R-MAMMA1003057 | 7425 |
| MAMMA1003066 | F-MAMMA1003066 | 1930 | R-MAMMA1003066 | 7426 |
| MAMMA1003089 | F-MAMMA1003089 | 1931 | R-MAMMA1003089 | 7427 |
| MAMMA1003099 | F-MAMMA1003099 | 1932 | R-MAMMA1003099 | 7428 |
| MAMMA1003104 | F-MAMMA1003104 | 1933 | R-MAMMA1003104 | 7429 |
| MAMMA1003113 | F-MAMMA1003113 | 1934 | R-MAMMA1003113 | 7430 |
| MAMMA1003127 | F-MAMMA1003127 | 1935 | R-MAMMA1003127 | 7431 |
| MAMMA1003135 | F-MAMMA1003135 | 1936 | R-MAMMA1003135 | 7432 |
| MAMMA1003140 | F-MAMMA1003140 | 1937 | R-MAMMA1003140 | 7433 |
| MAMMA1003146 | F-MAMMA1003146 | 1938 | R-MAMMA1003146 | 7434 |
| MAMMA1003150 | F-MAMMA1003150 | 1939 | R-nnnnnnnnnnnn | 7435 |
| MAMMA1003166 | F-MAMMA1003166 | 1940 | R-MAMMA1003166 | 7436 |
| NT2RM1000001 | F-NT2RM1000001 | 1941 | | |
| NT2RM1000018 | F-NT2RM1000018 | 1942 | | |
| NT2RM1000032 | F-NT2RM1000032 | 1943 | | |
| NT2RM1000035 | F-NT2RM1000035 | 1944 | | |
| NT2RM1000037 | F-NT2RM1000037 | 1945 | | |
| NT2RM1000039 | F-NT2RM1000039 | 1946 | | |
| NT2RM1000055 | F-NT2RM1000055 | 1947 | | |
| NT2RM1000059 | F-NT2RM1000059 | 1948 | | |
| NT2RM1000062 | F-NT2RM1000062 | 1949 | | |
| NT2RM1000080 | F-NT2RM1000080 | 1950 | | |
| NT2RM1000086 | F-NT2RM1000086 | 1951 | | |
| NT2RM1000092 | F-NT2RM1000092 | 1952 | | |
| NT2RM1000118 | F-NT2RM1000118 | 1953 | | |
| NT2RM1000119 | F-NT2RM1000119 | 1954 | | |
| NT2RM1000127 | F-NT2RM1000127 | 1955 | | |
| NT2RM1000131 | F-NT2RM1000131 | 1956 | | |
| NT2RM1000132 | F-NT2RM1000132 | 1957 | | |
| NT2RM1000153 | F-NT2RM1000153 | 1958 | | |
| NT2RM1000186 | F-NT2RM1000186 | 1959 | | |
| NT2RM1000187 | F-NT2RM1000187 | 1960 | | |
| NT2RM1000199 | F-NT2RM1000199 | 1961 | | |
| NT2RM1000242 | F-NT2RM1000242 | 1962 | | |
| NT2RM1000244 | F-NT2RM1000244 | 1963 | | |
| NT2RM1000252 | F-NT2RM1000252 | 1964 | | |
| NT2RM1000256 | F-NT2RM1000256 | 1965 | | |
| NT2RM1000257 | F-NT2RM1000257 | 1966 | | |
| NT2RM1000260 | F-NT2RM1000260 | 1967 | | |
| NT2RM1000271 | F-NT2RM1000271 | 1968 | | |
| NT2RM1000272 | F-NT2RM1000272 | 1969 | | |
| NT2RM1000280 | F-NT2RM1000280 | 1970 | | |
| NT2RM1000300 | F-NT2RM1000300 | 1971 | | |
| NT2RM1000314 | F-NT2RM1000314 | 1972 | | |
| NT2RM1000318 | F-NT2RM1000318 | 1973 | | |
| NT2RM1000341 | F-NT2RM1000341 | 1974 | | |
| NT2RM1000354 | F-NT2RM1000354 | 1975 | | |
| NT2RM1000355 | F-NT2RM1000355 | 1976 | | |
| NT2RM1000365 | F-NT2RM1000365 | 1977 | | |
| NT2RM1000377 | F-NT2RM1000377 | 1978 | | |
| NT2RM1000388 | F-NT2RM1000388 | 1979 | | |
| NT2RM1000394 | F-NT2RM1000394 | 1980 | | |
| NT2RM1000399 | F-NT2RM1000399 | 1981 | | |
| NT2RM1000421 | F-NT2RM1000421 | 1982 | | |
| NT2RM1000430 | F-NT2RM1000430 | 1983 | | |
| NT2RM1000499 | F-NT2RM1000499 | 1984 | | |
| NT2RM1000539 | F-NT2RM1000539 | 1985 | | |
| NT2RM1000553 | F-NT2RM1000553 | 1986 | | |
| NT2RM1000555 | F-NT2RM1000555 | 1987 | | |
| NT2RM1000563 | F-NT2RM1000563 | 1988 | | |
| NT2RM1000623 | F-NT2RM1000623 | 1989 | | |
| NT2RM1000648 | F-NT2RM1000648 | 1990 | | |
| NT2RM1000661 | F-NT2RM1000661 | 1991 | | |
| NT2RM1000666 | F-NT2RM1000666 | 1992 | | |
| NT2RM1000669 | F-NT2RM1000669 | 1993 | | |
| NT2RM1000672 | F-NT2RM1000672 | 1994 | | |
| NT2RM1000691 | F-NT2RM1000691 | 1995 | | |
| NT2RM1000699 | F-NT2RM1000699 | 1996 | | |
| NT2RM1000702 | F-NT2RM1000702 | 1997 | | |
| NT2RM1000725 | F-NT2RM1000725 | 1998 | | |
| NT2RM1000741 | F-NT2RM1000741 | 1999 | | |
| NT2RM1000742 | F-NT2RM1000742 | 2000 | | |
| NT2RM1000746 | F-NT2RM1000746 | 2001 | | |
| NT2RM1000770 | F-NT2RM1000770 | 2002 | | |
| NT2RM1000772 | F-NT2RM1000772 | 2003 | | |
| NT2RM1000780 | F-NT2RM1000780 | 2004 | | |
| NT2RM1000781 | F-NT2RM1000781 | 2005 | | |
| NT2RM1000800 | F-NT2RM1000800 | 2006 | | |
| NT2RM1000802 | F-NT2RM1000802 | 2007 | | |
| NT2RM1000811 | F-NT2RM1000811 | 2008 | | |
| NT2RM1000826 | F-NT2RM1000826 | 2009 | | |
| NT2RM1000829 | F-NT2RM1000829 | 2010 | | |
| NT2RM1000833 | F-NT2RM1000833 | 2011 | | |
| NT2RM1000850 | F-NT2RM1000850 | 2012 | | |
| NT2RM1000852 | F-NT2RM1000852 | 2013 | | |
| NT2RM1000857 | F-NT2RM1000857 | 2014 | | |
| NT2RM1000867 | F-NT2RM1000867 | 2015 | | |
| NT2RM1000874 | F-NT2RM1000874 | 2016 | | |
| NT2RM1000882 | F-NT2RM1000882 | 2017 | | |
| NT2RM1000883 | F-NT2RM1000883 | 2018 | | |
| NT2RM1000885 | F-NT2RM1000885 | 2019 | | |
| NT2RM1000894 | F-NT2RM1000894 | 2020 | | |
| NT2RM1000898 | F-NT2RM1000898 | 2021 | | |
| NT2RM1000905 | F-NT2RM1000905 | 2022 | | |
| NT2RM1000924 | F-NT2RM1000924 | 2023 | | |
| NT2RM1000927 | F-NT2RM1000927 | 2024 | | |
| NT2RM1000962 | F-NT2RM1000962 | 2025 | | |
| NT2RM1000978 | F-NT2RM1000978 | 2026 | | |
| NT2RM1001003 | F-NT2RM1001003 | 2027 | | |
| NT2RM1001008 | F-NT2RM1001008 | 2028 | | |
| NT2RM1001043 | F-NT2RM1001043 | 2029 | | |
| NT2RM1001044 | F-NT2RM1001044 | 2030 | | |
| NT2RM1001059 | F-NT2RM1001059 | 2031 | | |
| NT2RM1001066 | F-NT2RM1001066 | 2032 | | |
| NT2RM1001072 | F-NT2RM1001072 | 2033 | | |
| NT2RM1001074 | F-NT2RM1001074 | 2034 | | |
| NT2RM1001082 | F-NT2RM1001082 | 2035 | | |
| NT2RM1001085 | F-NT2RM1001085 | 2036 | | |
| NT2RM1001092 | F-NT2RM1001092 | 2037 | | |
| NT2RM1001102 | F-NT2RM1001102 | 2038 | | |
| NT2RM1001105 | F-NT2RM1001105 | 2039 | | |
| NT2RM1001112 | F-NT2RM1001112 | 2040 | | |
| NT2RM1001115 | F-NT2RM1001115 | 2041 | | |
| NT2RM1001139 | F-NT2RM1001139 | 2042 | | |
| NT2RM2000006 | F-NT2RM2000006 | 2043 | | |
| NT2RM2000013 | F-NT2RM2000013 | 2044 | | |
| NT2RM2000030 | F-NT2RM2000030 | 2045 | | |
| NT2RM2000032 | F-NT2RM2000032 | 2046 | | |
| NT2RM2000042 | F-NT2RM2000042 | 2047 | | |
| NT2RM2000092 | F-NT2RM2000092 | 2048 | | |
| NT2RM2000093 | F-NT2RM2000093 | 2049 | | |
| NT2RM2000101 | F-NT2RM2000101 | 2050 | | |
| NT2RM2000124 | F-NT2RM2000124 | 2051 | | |
| NT2RM2000191 | F-NT2RM2000191 | 2052 | | |
| NT2RM2000192 | F-NT2RM2000192 | 2053 | | |
| NT2RM2000239 | F-NT2RM2000239 | 2054 | | |
| nnnnnnnnnnnn | F-nnnnnnnnnnnn | 2055 | | |
| NT2RM2000250 | F-NT2RM2000250 | 2056 | | |
| NT2RM2000259 | F-NT2RM2000259 | 2057 | | |
| NT2RM2000260 | F-NT2RM2000260 | 2058 | | |
| NT2RM2000287 | F-NT2RM2000287 | 2059 | | |
| NT2RM2000322 | F-NT2RM2000322 | 2060 | | |
| NT2RM2000359 | F-NT2RM2000359 | 2061 | | |
| NT2RM2000363 | F-NT2RM2000363 | 2062 | | |
| NT2RM2000368 | F-NT2RM2000368 | 2063 | | |
| NT2RM2000371 | F-NT2RM2000371 | 2064 | | |
| NT2RM2000374 | F-NT2RM2000374 | 2065 | | |
| NT2RM2000395 | F-NT2RM2000395 | 2066 | | |
| NT2RM2000402 | F-NT2RM2000402 | 2067 | | |
| NT2RM2000407 | F-NT2RM2000407 | 2068 | | |
| NT2RM2000420 | F-NT2RM2000420 | 2069 | | |
| NT2RM2000422 | F-NT2RM2000422 | 2070 | | |
| NT2RM2000452 | F-NT2RM2000452 | 2071 | | |
| NT2RM2000469 | F-NT2RM2000469 | 2072 | | |
| NT2RM2000490 | F-NT2RM2000490 | 2073 | | |
| NT2RM2000502 | F-NT2RM2000502 | 2074 | | |
| NT2RM2000504 | F-NT2RM2000504 | 2075 | | |
| NT2RM2000522 | F-NT2RM2000522 | 2076 | | |
| NT2RM2000540 | F-NT2RM2000540 | 2077 | | |
| NT2RM2000556 | F-NT2RM2000556 | 2078 | | |
| NT2RM2000566 | F-NT2RM2000566 | 2079 | | |
| NT2RM2000567 | F-NT2RM2000567 | 2080 | | |
| NT2RM2000569 | F-NT2RM2000569 | 2081 | | |
| NT2RM2000577 | F-NT2RM2000577 | 2082 | | |
| NT2RM2000581 | F-NT2RM2000581 | 2083 | | |
| NT2RM2000588 | F-NT2RM2000588 | 2084 | | |
| NT2RM2000594 | F-NT2RM2000594 | 2085 | | |
| NT2RM2000599 | F-NT2RM2000599 | 2086 | | |
| NT2RM2000609 | F-NT2RM2000609 | 2087 | | |
| NT2RM2000612 | F-NT2RM2000612 | 2088 | | |
| NT2RM2000623 | F-NT2RM2000623 | 2089 | | |
| NT2RM2000624 | F-NT2RM2000624 | 2090 | | |
| NT2RM2000635 | F-NT2RM2000635 | 2091 | | |
| NT2RM2000636 | F-NT2RM2000636 | 2092 | | |
| NT2RM2000639 | F-NT2RM2000639 | 2093 | | |
| NT2RM2000649 | F-NT2RM2000649 | 2094 | | |
| NT2RM2000669 | F-NT2RM2000669 | 2095 | | |
| NT2RM2000691 | F-NT2RM2000691 | 2096 | | |
| NT2RM2000714 | F-NT2RM2000714 | 2097 | | |
| NT2RM2000718 | F-NT2RM2000718 | 2098 | | |
| NT2RM2000735 | F-NT2RM2000735 | 2099 | | |
| NT2RM2000740 | F-NT2RM2000740 | 2100 | | |
| NT2RM2000795 | F-NT2RM2000795 | 2101 | | |
| NT2RM2000821 | F-NT2RM2000821 | 2102 | | |
| NT2RM2000837 | F-NT2RM2000837 | 2103 | | |
| NT2RM2000951 | F-NT2RM2000951 | 2104 | | |
| NT2RM2000952 | F-NT2RM2000952 | 2105 | | |
| NT2RM2000984 | F-NT2RM2000984 | 2106 | | |
| NT2RM2001004 | F-NT2RM2001004 | 2107 | | |
| NT2RM2001035 | F-NT2RM2001035 | 2108 | | |
| NT2RM2001065 | F-NT2RM2001065 | 2109 | | |
| NT2RM2001100 | F-NT2RM2001100 | 2110 | | |
| NT2RM2001105 | F-NT2RM2001105 | 2111 | | |
| NT2RM2001131 | F-NT2RM2001131 | 2112 | | |
| NT2RM2001141 | F-NT2RM2001141 | 2113 | | |
| NT2RM2001152 | F-NT2RM2001152 | 2114 | | |
| NT2RM2001177 | F-NT2RM2001177 | 2115 | | |
| NT2RM2001194 | F-NT2RM2001194 | 2116 | | |
| NT2RM2001196 | F-NT2RM2001196 | 2117 | | |
| NT2RM2001201 | F-NT2RM2001201 | 2118 | | |
| NT2RM2001221 | F-NT2RM2001221 | 2119 | | |
| NT2RM2001238 | F-NT2RM2001238 | 2120 | | |
| NT2RM2001243 | F-NT2RM2001243 | 2121 | | |
| NT2RM2001247 | F-NT2RM2001247 | 2122 | | |
| NT2RM2001256 | F-NT2RM2001256 | 2123 | | |
| NT2RM2001291 | F-NT2RM2001291 | 2124 | | |
| NT2RM2001306 | F-NT2RM2001306 | 2125 | | |
| NT2RM2001312 | F-NT2RM2001312 | 2126 | | |
| NT2RM2001319 | F-NT2RM2001319 | 2127 | | |
| NT2RM2001324 | F-NT2RM2001324 | 2128 | | |
| NT2RM2001345 | F-NT2RM2001345 | 2129 | | |
| NT2RM2001360 | F-NT2RM2001360 | 2130 | | |
| NT2RM2001370 | F-NT2RM2001370 | 2131 | | |
| NT2RM2001393 | F-NT2RM2001393 | 2132 | | |
| NT2RM2001420 | F-NT2RM2001420 | 2133 | | |
| NT2RM2001424 | F-NT2RM2001424 | 2134 | | |
| NT2RM2001499 | F-NT2RM2001499 | 2135 | | |
| NT2RM2001504 | F-NT2RM2001504 | 2136 | | |
| NT2RM2001524 | F-NT2RM2001524 | 2137 | | |
| NT2RM2001544 | F-NT2RM2001544 | 2138 | | |
| NT2RM2001547 | F-NT2RM2001547 | 2139 | | |
| NT2RM2001575 | F-NT2RM2001575 | 2140 | | |
| NT2RM2001582 | F-NT2RM2001582 | 2141 | | |
| NT2RM2001588 | F-NT2RM2001588 | 2142 | | |
| NT2RM2001592 | F-NT2RM2001592 | 2143 | | |
| NT2RM2001605 | F-NT2RM2001605 | 2144 | | |
| NT2RM2001613 | F-NT2RM2001613 | 2145 | | |
| NT2RM2001632 | F-NT2RM2001632 | 2146 | | |
| NT2RM2001635 | F-NT2RM2001635 | 2147 | | |
| NT2RM2001637 | F-NT2RM2001637 | 2148 | | |
| NT2RM2001641 | F-NT2RM2001641 | 2149 | | |
| NT2RM2001648 | F-NT2RM2001648 | 2150 | | |
| NT2RM2001652 | F-NT2RM2001652 | 2151 | | |
| NT2RM2001659 | F-NT2RM2001659 | 2152 | | |
| NT2RM2001664 | F-NT2RM2001664 | 2153 | | |
| NT2RM2001668 | F-NT2RM2001668 | 2154 | | |
| NT2RM2001670 | F-NT2RM2001670 | 2155 | | |
| NT2RM2001671 | F-NT2RM2001671 | 2156 | | |
| NT2RM2001675 | F-NT2RM2001675 | 2157 | | |
| NT2RM2001681 | F-NT2RM2001681 | 2158 | | |
| NT2RM2001688 | F-NT2RM2001688 | 2159 | | |
| NT2RM2001695 | F-NT2RM2001695 | 2160 | | |
| NT2RM2001696 | F-NT2RM2001696 | 2161 | | |
| NT2RM2001698 | F-NT2RM2001698 | 2162 | | |
| NT2RM2001699 | F-NT2RM2001699 | 2163 | | |
| NT2RM2001700 | F-NT2RM2001700 | 2164 | | |
| NT2RM2001706 | F-NT2RM2001706 | 2165 | | |
| NT2RM2001716 | F-NT2RM2001716 | 2166 | | |
| NT2RM2001718 | F-NT2RM2001718 | 2167 | | |
| NT2RM2001723 | F-NT2RM2001723 | 2168 | | |
| NT2RM2001727 | F-NT2RM2001727 | 2169 | | |
| NT2RM2001730 | F-NT2RM2001730 | 2170 | | |
| NT2RM2001743 | F-NT2RM2001743 | 2171 | | |
| NT2RM2001753 | F-NT2RM2001753 | 2172 | | |
| NT2RM2001760 | F-NT2RM2001760 | 2173 | | |
| NT2RM2001768 | F-NT2RM2001768 | 2174 | | |
| NT2RM2001771 | F-NT2RM2001771 | 2175 | | |
| NT2RM2001782 | F-NT2RM2001782 | 2176 | | |
| NT2RM2001784 | F-NT2RM2001784 | 2177 | | |
| NT2RM2001785 | F-NT2RM2001785 | 2178 | | |
| NT2RM2001797 | F-NT2RM2001797 | 2179 | | |
| NT2RM2001800 | F-NT2RM2001800 | 2180 | | |
| NT2RM2001803 | F-NT2RM2001803 | 2181 | | |
| NT2RM2001805 | F-NT2RM2001805 | 2182 | | |
| NT2RM2001813 | F-NT2RM2001813 | 2183 | | |
| NT2RM2001823 | F-NT2RM2001823 | 2184 | | |
| NT2RM2001839 | F-NT2RM2001839 | 2185 | | |
| NT2RM2001840 | F-NT2RM2001840 | 2186 | | |
| NT2RM2001855 | F-NT2RM2001855 | 2187 | | |
| NT2RM2001867 | F-NT2RM2001867 | 2188 | | |
| NT2RM2001879 | F-NT2RM2001879 | 2189 | | |
| NT2RM2001886 | F-NT2RM2001886 | 2190 | | |
| NT2RM2001896 | F-NT2RM2001896 | 2191 | | |
| NT2RM2001903 | F-NT2RM2001903 | 2192 | | |
| NT2RM2001930 | F-NT2RM2001930 | 2193 | | |
| NT2RM2001935 | F-NT2RM2001935 | 2194 | | |
| NT2RM2001936 | F-NT2RM2001936 | 2195 | | |
| NT2RM2001950 | F-NT2RM2001950 | 2196 | | |
| NT2RM2001982 | F-NT2RM2001982 | 2197 | | |
| NT2RM2001983 | F-NT2RM2001983 | 2198 | | |
| NT2RM2001989 | F-NT2RM2001989 | 2199 | | |
| NT2RM2001997 | F-NT2RM2001997 | 2200 | | |
| NT2RM2001998 | F-NT2RM2001998 | 2201 | | |
| NT2RM2002004 | F-NT2RM2002004 | 2202 | | |
| NT2RM2002014 | F-NT2RM2002014 | 2203 | | |
| NT2RM2002030 | F-NT2RM2002030 | 2204 | | |
| NT2RM2002049 | F-NT2RM2002049 | 2205 | | |
| NT2RM2002055 | F-NT2RM2002055 | 2206 | | |
| NT2RM2002088 | F-NT2RM2002088 | 2207 | | |
| NT2RM2002091 | F-NT2RM2002091 | 2208 | | |
| NT2RM2002100 | F-NT2RM2002100 | 2209 | | |
| NT2RM2002109 | F-NT2RM2002109 | 2210 | | |
| NT2RM2002128 | F-NT2RM2002128 | 2211 | | |
| NT2RM2002142 | F-NT2RM2002142 | 2212 | | |
| NT2RM2002145 | F-NT2RM2002145 | 2213 | | |
| NT2RM2002178 | F-NT2RM2002178 | 2214 | | |
| NT2RM2002580 | F-NT2RM2002580 | 2215 | R-NT2RM2002580 | 7437 |
| NT2RM4000024 | F-NT2RM4000024 | 2216 | R-NT2RM4000024 | 7438 |
| NT2RM4000027 | F-NT2RM4000027 | 2217 | R-NT2RM4000027 | 7439 |
| NT2RM4000030 | F-NT2RM4000030 | 2218 | R-NT2RM4000030 | 7440 |
| NT2RM4000046 | F-NT2RM4000046 | 2219 | R-NT2RM4000046 | 7441 |
| NT2RM4000061 | F-NT2RM4000061 | 2220 | R-NT2RM4000061 | 7442 |
| NT2RM4000085 | F-NT2RM4000085 | 2221 | R-NT2RM4000085 | 7443 |
| NT2RM4000086 | F-NT2RM4000086 | 2222 | R-NT2RM4000086 | 7444 |
| NT2RM4000104 | F-NT2RM4000104 | 2223 | R-NT2RM4000104 | 7445 |
| NT2RM4000139 | F-NT2RM4000139 | 2224 | R-NT2RM4000139 | 7446 |
| NT2RM4000155 | F-NT2RM4000155 | 2225 | R-NT2RM4000155 | 7447 |
| NT2RM4000156 | F-NT2RM4000156 | 2226 | R-NT2RM4000156 | 7448 |
| NT2RM4000167 | F-NT2RM4000167 | 2227 | R-nnnnnnnnnnnn | 7449 |
| NT2RM4000169 | F-NT2RM4000169 | 2228 | R-NT2RM4000169 | 7450 |
| NT2RM4000191 | F-NT2RM4000191 | 2229 | R-NT2RM4000191 | 7451 |
| NT2RM4000197 | F-NT2RM4000197 | 2230 | R-NT2RM4000197 | 7452 |
| NT2RM4000199 | F-NT2RM4000199 | 2231 | R-NT2RM4000199 | 7453 |
| NT2RM4000200 | F-NT2RM4000200 | 2232 | R-NT2RM4000200 | 7454 |
| NT2RM4000202 | F-NT2RM4000202 | 2233 | R-NT2RM4000202 | 7455 |
| NT2RM4000210 | F-NT2RM4000210 | 2234 | R-NT2RM4000210 | 7456 |
| NT2RM4000215 | F-NT2RM4000215 | 2235 | R-NT2RM4000215 | 7457 |
| NT2RM4000229 | F-NT2RM4000229 | 2236 | R-nnnnnnnnnnnn | 7458 |
| NT2RM4000233 | F-NT2RM4000233 | 2237 | R-NT2RM4000233 | 7459 |
| NT2RM4000244 | F-NT2RM4000244 | 2238 | R-NT2RM4000244 | 7460 |
| NT2RM4000251 | F-NT2RM4000251 | 2239 | R-NT2RM4000251 | 7461 |
| NT2RM4000265 | F-NT2RM4000265 | 2240 | R-NT2RM4000265 | 7462 |
| NT2RM4000290 | F-NT2RM4000290 | 2241 | R-NT2RM4000290 | 7463 |
| NT2RM4000324 | F-NT2RM4000324 | 2242 | R-NT2RM4000324 | 7464 |
| NT2RM4000327 | F-NT2RM4000327 | 2243 | R-NT2RM4000327 | 7465 |
| NT2RM4000344 | F-NT2RM4000344 | 2244 | R-NT2RM4000344 | 7466 |
| NT2RM4000349 | F-NT2RM4000349 | 2245 | R-NT2RM4000349 | 7467 |
| NT2RM4000354 | F-NT2RM4000354 | 2246 | R-NT2RM4000354 | 7468 |
| NT2RM4000356 | F-NT2RM4000356 | 2247 | R-NT2RM4000356 | 7469 |
| NT2RM4000366 | F-NT2RM4000366 | 2248 | R-NT2RM4000366 | 7470 |
| NT2RM4000368 | F-NT2RM4000368 | 2249 | R-NT2RM4000368 | 7471 |
| NT2RM4000386 | F-NT2RM4000386 | 2250 | R-NT2RM4000386 | 7472 |
| NT2RM4000395 | F-NT2RM4000395 | 2251 | R-NT2RM4000395 | 7473 |
| NT2RM4000414 | F-NT2RM4000414 | 2252 | R-NT2RM4000414 | 7474 |
| NT2RM4000421 | F-NT2RM4000421 | 2253 | R-NT2RM4000421 | 7475 |
| NT2RM4000425 | F-NT2RM4000425 | 2254 | R-NT2RM4000425 | 7476 |
| NT2RM4000433 | F-NT2RM4000433 | 2255 | R-NT2RM4000433 | 7477 |
| NT2RM4000457 | F-NT2RM4000457 | 2256 | R-NT2RM4000457 | 7478 |
| NT2RM4000471 | F-NT2RM4000471 | 2257 | R-NT2RM4000471 | 7479 |
| NT2RM4000486 | F-NT2RM4000486 | 2258 | R-NT2RM4000486 | 7480 |
| NT2RM4000496 | F-NT2RM4000496 | 2259 | R-NT2RM4000496 | 7481 |
| NT2RM4000511 | F-NT2RM4000511 | 2260 | R-NT2RM4000511 | 7482 |
| NT2RM4000514 | F-NT2RM4000514 | 2261 | R-NT2RM4000514 | 7483 |
| NT2RM4000515 | F-NT2RM4000515 | 2262 | R-nnnnnnnnnnnn | 7484 |
| NT2RM4000520 | F-NT2RM4000520 | 2263 | R-NT2RM4000520 | 7485 |
| NT2RM4000531 | F-NT2RM4000531 | 2264 | R-NT2RM4000531 | 7486 |
| NT2RM4000532 | F-NT2RM4000532 | 2265 | R-NT2RM4000532 | 7487 |
| NT2RM4000534 | F-NT2RM4000534 | 2266 | R-NT2RM4000534 | 7488 |
| NT2RM4000585 | F-NT2RM4000585 | 2267 | R-NT2RM4000585 | 7489 |
| NT2RM4000590 | F-NT2RM4000590 | 2268 | R-NT2RM4000590 | 7490 |
| NT2RM4000595 | F-NT2RM4000595 | 2269 | R-NT2RM4000595 | 7491 |
| NT2RM4000603 | F-NT2RM4000603 | 2270 | R-NT2RM4000603 | 7492 |
| NT2RM4000611 | F-NT2RM4000611 | 2271 | R-nnnnnnnnnnnn | 7493 |
| NT2RM4000616 | F-NT2RM4000616 | 2272 | R-NT2RM4000616 | 7494 |
| NT2RM4000674 | F-NT2RM4000674 | 2273 | R-NT2RM4000674 | 7495 |
| NT2RM4000689 | F-NT2RM4000689 | 2274 | R-NT2RM4000689 | 7496 |
| NT2RM4000698 | F-NT2RM4000698 | 2275 | R-NT2RM4000698 | 7497 |
| NT2RM4000700 | F-NT2RM4000700 | 2276 | R-nnnnnnnnnnnn | 7498 |
| NT2RM4000712 | F-NT2RM4000712 | 2277 | R-NT2RM4000712 | 7499 |
| NT2RM4000717 | F-NT2RM4000717 | 2278 | R-NT2RM4000717 | 7500 |
| NT2RM4000733 | F-NT2RM4000733 | 2279 | R-NT2RM4000733 | 7501 |
| NT2RM4000734 | F-NT2RM4000734 | 2280 | R-NT2RM4000734 | 7502 |
| NT2RM4000741 | F-NT2RM4000741 | 2281 | R-NT2RM4000741 | 7503 |
| NT2RM4000751 | F-NT2RM4000751 | 2282 | R-NT2RM4000751 | 7504 |
| NT2RM4000764 | F-NT2RM4000764 | 2283 | R-NT2RM4000764 | 7505 |
| NT2RM4000778 | F-NT2RM4000778 | 2284 | R-NT2RM4000778 | 7506 |
| NT2RM4000779 | F-NT2RM4000779 | 2285 | R-NT2RM4000779 | 7507 |
| NT2RM4000787 | F-NT2RM4000787 | 2286 | R-NT2RM4000787 | 7508 |
| NT2RM4000790 | F-NT2RM4000790 | 2287 | R-NT2RM4000790 | 7509 |
| NT2RM4000795 | F-NT2RM4000795 | 2288 | R-NT2RM4000795 | 7510 |
| NT2RM4000796 | F-NT2RM4000796 | 2289 | R-NT2RM4000796 | 7511 |
| NT2RM4000798 | F-NT2RM4000798 | 2290 | R-NT2RM4000798 | 7512 |
| NT2RM4000813 | F-NT2RM4000813 | 2291 | R-NT2RM4000813 | 7513 |
| NT2RM4000820 | F-NT2RM4000820 | 2292 | R-NT2RM4000820 | 7514 |
| NT2RM4000833 | F-NT2RM4000833 | 2293 | R-NT2RM4000833 | 7515 |
| NT2RM4000848 | F-NT2RM4000848 | 2294 | R-NT2RM4000848 | 7516 |
| NT2RM4000852 | F-NT2RM4000852 | 2295 | R-NT2RM4000852 | 7517 |
| NT2RM4000855 | F-NT2RM4000855 | 2296 | R-NT2RM4000855 | 7518 |
| NT2RM4000887 | F-NT2RM4000887 | 2297 | R-nnnnnnnnnnnn | 7519 |
| NT2RM4000895 | F-NT2RM4000895 | 2298 | R-NT2RM4000895 | 7520 |
| NT2RM4000950 | F-NT2RM4000950 | 2299 | R-NT2RM4000950 | 7521 |
| NT2RM4000971 | F-NT2RM4000971 | 2300 | R-NT2RM4000971 | 7522 |
| NT2RM4000979 | F-NT2RM4000979 | 2301 | R-NT2RM4000979 | 7523 |
| NT2RM4000996 | F-NT2RM4000996 | 2302 | R-NT2RM4000996 | 7524 |
| NT2RM4001002 | F-NT2RM4001002 | 2303 | R-NT2RM4001002 | 7525 |
| NT2RM4001016 | F-NT2RM4001016 | 2304 | R-NT2RM4001016 | 7526 |
| NT2RM4001032 | F-NT2RM4001032 | 2305 | R-NT2RM4001032 | 7527 |
| NT2RM4001047 | F-NT2RM4001047 | 2306 | R-NT2RM4001047 | 7528 |
| NT2RM4001054 | F-NT2RM4001054 | 2307 | R-NT2RM4001054 | 7529 |
| NT2RM4001084 | F-NT2RM4001084 | 2308 | R-nnnnnnnnnnnn | 7530 |
| NT2RM4001092 | F-NT2RM4001092 | 2309 | R-NT2RM4001092 | 7531 |
| NT2RM4001116 | F-NT2RM4001116 | 2310 | R-NT2RM4001116 | 7532 |
| NT2RM4001140 | F-NT2RM4001140 | 2311 | R-NT2RM4001140 | 7533 |
| NT2RM4001151 | F-NT2RM4001151 | 2312 | R-NT2RM4001151 | 7534 |
| NT2RM4001155 | F-NT2RM4001155 | 2313 | R-NT2RM4001155 | 7535 |
| NT2RM4001160 | F-NT2RM4001160 | 2314 | R-NT2RM4001160 | 7536 |
| NT2RM4001187 | F-NT2RM4001187 | 2315 | R-NT2RM4001187 | 7537 |
| NT2RM4001191 | F-NT2RM4001191 | 2316 | R-NT2RM4001191 | 7538 |
| NT2RM4001200 | F-NT2RM4001200 | 2317 | R-NT2RM4001200 | 7539 |
| NT2RM4001203 | F-NT2RM4001203 | 2318 | R-NT2RM4001203 | 7540 |
| NT2RM4001204 | F-NT2RM4001204 | 2319 | R-NT2RM4001204 | 7541 |
| NT2RM4001217 | F-NT2RM4001217 | 2320 | R-NT2RM4001217 | 7542 |
| NT2RM4001256 | F-NT2RM4001256 | 2321 | R-NT2RM4001256 | 7543 |
| NT2RM4001258 | F-NT2RM4001258 | 2322 | R-NT2RM4001258 | 7544 |
| NT2RM4001309 | F-NT2RM4001309 | 2323 | R-NT2RM4001309 | 7545 |
| NT2RM4001313 | F-NT2RM4001313 | 2324 | R-NT2RM4001313 | 7546 |
| NT2RM4001316 | F-NT2RM4001316 | 2325 | R-NT2RM4001316 | 7547 |
| NT2RM4001320 | F-NT2RM4001320 | 2326 | R-NT2RM4001320 | 7548 |
| NT2RM4001340 | F-NT2RM4001340 | 2327 | R-NT2RM4001340 | 7549 |
| NT2RM4001344 | F-NT2RM4001344 | 2328 | R-NT2RM4001344 | 7550 |
| NT2RM4001347 | F-NT2RM4001347 | 2329 | R-NT2RM4001347 | 7551 |
| NT2RM4001371 | F-NT2RM4001371 | 2330 | R-NT2RM4001371 | 7552 |
| NT2RM4001382 | F-NT2RM4001382 | 2331 | R-NT2RM4001382 | 7553 |
| NT2RM4001384 | F-NT2RM4001384 | 2332 | R-NT2RM4001384 | 7554 |
| NT2RM4001410 | F-NT2RM4001410 | 2333 | R-NT2RM4001410 | 7555 |
| NT2RM4001411 | F-NT2RM4001411 | 2334 | R-NT2RM4001411 | 7556 |
| NT2RM4001412 | F-NT2RM4001412 | 2335 | R-NT2RM4001412 | 7557 |
| NT2RM4001414 | F-NT2RM4001414 | 2336 | R-NT2RM4001414 | 7558 |
| NT2RM4001437 | F-NT2RM4001437 | 2337 | R-NT2RM4001437 | 7559 |
| NT2RM4001444 | F-NT2RM4001444 | 2338 | R-NT2RM4001444 | 7560 |
| NT2RM4001454 | F-NT2RM4001454 | 2339 | R-NT2RM4001454 | 7561 |
| NT2RM4001455 | F-NT2RM4001455 | 2340 | R-NT2RM4001455 | 7562 |
| NT2RM4001483 | F-NT2RM4001483 | 2341 | R-NT2RM4001483 | 7563 |
| NT2RM4001489 | F-NT2RM4001489 | 2342 | R-NT2RM4001489 | 7564 |
| NT2RM4001519 | F-NT2RM4001519 | 2343 | R-NT2RM4001519 | 7565 |
| NT2RM4001522 | F-NT2RM4001522 | 2344 | R-NT2RM4001522 | 7566 |
| NT2RM4001557 | F-NT2RM4001557 | 2345 | R-NT2RM4001557 | 7567 |
| NT2RM4001565 | F-NT2RM4001565 | 2346 | R-NT2RM4001565 | 7568 |
| NT2RM4001566 | F-NT2RM4001566 | 2347 | R-NT2RM4001566 | 7569 |
| NT2RM4001569 | F-NT2RM4001569 | 2348 | R-NT2RM4001569 | 7570 |
| NT2RM4001582 | F-NT2RM4001582 | 2349 | R-NT2RM4001582 | 7571 |
| NT2RM4001592 | F-NT2RM4001592 | 2350 | R-nnnnnnnnnnnn | 7572 |
| NT2RM4001594 | F-NT2RM4001594 | 2351 | R-NT2RM4001594 | 7573 |
| NT2RM4001597 | F-NT2RM4001597 | 2352 | R-NT2RM4001597 | 7574 |
| NT2RM4001605 | F-NT2RM4001605 | 2353 | R-NT2RM4001605 | 7575 |
| NT2RM4001611 | F-NT2RM4001611 | 2354 | R-NT2RM4001611 | 7576 |
| NT2RM4001629 | F-NT2RM4001629 | 2355 | R-NT2RM4001629 | 7577 |
| NT2RM4001650 | F-NT2RM4001650 | 2356 | R-NT2RM4001650 | 7578 |
| NT2RM4001662 | F-NT2RM4001662 | 2357 | R-NT2RM4001662 | 7579 |
| NT2RM4001666 | F-NT2RM4001666 | 2358 | R-NT2RM4001666 | 7580 |
| NT2RM4001682 | F-NT2RM4001682 | 2359 | R-NT2RM4001682 | 7581 |
| NT2RM4001710 | F-NT2RM4001710 | 2360 | R-NT2RM4001710 | 7582 |
| NT2RM4001714 | F-NT2RM4001714 | 2361 | R-NT2RM4001714 | 7583 |
| NT2RM4001715 | F-NT2RM4001715 | 2362 | R-nnnnnnnnnnnn | 7584 |
| NT2RM4001731 | F-NT2RM4001731 | 2363 | R-NT2RM4001731 | 7585 |
| NT2RM4001741 | F-NT2RM4001741 | 2364 | R-NT2RM4001741 | 7586 |
| NT2RM4001746 | F-NT2RM4001746 | 2365 | R-NT2RM4001746 | 7587 |
| NT2RM4001754 | F-NT2RM4001754 | 2366 | R-NT2RM4001754 | 7588 |
| NT2RM4001758 | F-NT2RM4001758 | 2367 | R-NT2RM4001758 | 7589 |
| NT2RM4001776 | F-NT2RM4001776 | 2368 | R-NT2RM4001776 | 7590 |
| NT2RM4001783 | F-NT2RM4001783 | 2369 | R-NT2RM4001783 | 7591 |
| NT2RM4001810 | F-NT2RM4001810 | 2370 | R-NT2RM4001810 | 7592 |
| NT2RM4001813 | F-NT2RM4001813 | 2371 | R-NT2RM4001813 | 7593 |
| NT2RM4001819 | F-NT2RM4001819 | 2372 | | |
| NT2RM4001823 | F-NT2RM4001823 | 2373 | R-NT2RM4001823 | 7594 |
| NT2RM4001828 | F-NT2RM4001828 | 2374 | R-NT2RM4001828 | 7595 |
| NT2RM4001836 | F-NT2RM4001836 | 2375 | R-NT2RM4001836 | 7596 |
| NT2RM4001841 | F-NT2RM4001841 | 2376 | R-NT2RM4001841 | 7597 |
| NT2RM4001842 | F-NT2RM4001842 | 2377 | R-NT2RM4001842 | 7598 |
| NT2RM4001856 | F-NT2RM4001856 | 2378 | R-NT2RM4001856 | 7599 |
| NT2RM4001858 | F-NT2RM4001858 | 2379 | R-nnnnnnnnnnnn | 7600 |
| NT2RM4001865 | F-NT2RM4001865 | 2380 | R-NT2RM4001865 | 7601 |
| NT2RM4001876 | F-NT2RM4001876 | 2381 | R-NT2RM4001876 | 7602 |
| NT2RM4001880 | F-NT2RM4001880 | 2382 | R-NT2RM4001880 | 7603 |
| NT2RM4001905 | F-NT2RM4001905 | 2383 | R-NT2RM4001905 | 7604 |
| NT2RM4001922 | F-NT2RM4001922 | 2384 | R-NT2RM4001922 | 7605 |
| NT2RM4001930 | F-NT2RM4001930 | 2385 | R-NT2RM4001930 | 7606 |
| NT2RM4001938 | F-NT2RM4001938 | 2386 | R-NT2RM4001938 | 7607 |
| NT2RM4001940 | F-NT2RM4001940 | 2387 | R-NT2RM4001940 | 7608 |
| NT2RM4001953 | F-NT2RM4001953 | 2388 | R-NT2RM4001953 | 7609 |
| NT2RM4001965 | F-NT2RM4001965 | 2389 | R-NT2RM4001965 | 7610 |
| NT2RM4001969 | F-NT2RM4001969 | 2390 | R-nnnnnnnnnnnn | 7611 |
| NT2RM4001979 | F-NT2RM4001979 | 2391 | R-NT2RM4001979 | 7612 |
| NT2RM4001984 | F-NT2RM4001984 | 2392 | R-NT2RM4001984 | 7613 |
| NT2RM4001987 | F-NT2RM4001987 | 2393 | R-NT2RM4001987 | 7614 |
| NT2RM4002013 | F-NT2RM4002013 | 2394 | R-NT2RM4002013 | 7615 |
| NT2RM4002018 | F-NT2RM4002018 | 2395 | R-NT2RM4002018 | 7616 |
| NT2RM4002034 | F-NT2RM4002034 | 2396 | R-NT2RM4002034 | 7617 |
| NT2RM4002044 | F-NT2RM4002044 | 2397 | R-NT2RM4002044 | 7618 |
| NT2RM4002054 | F-NT2RM4002054 | 2398 | R-NT2RM4002054 | 7619 |
| NT2RM4002055 | F-NT2RM4002055 | 2399 | | |
| NT2RM4002062 | F-NT2RM4002062 | 2400 | R-NT2RM4002062 | 7620 |
| NT2RM4002063 | F-NT2RM4002063 | 2401 | R-NT2RM4002063 | 7621 |
| NT2RM4002066 | F-NT2RM4002066 | 2402 | R-nnnnnnnnnnnn | 7622 |
| NT2RM4002067 | F-NT2RM4002067 | 2403 | R-NT2RM4002067 | 7623 |
| NT2RM4002073 | F-NT2RM4002073 | 2404 | R-NT2RM4002073 | 7624 |
| NT2RM4002075 | F-NT2RM4002075 | 2405 | R-NT2RM4002075 | 7625 |
| NT2RM4002093 | F-NT2RM4002093 | 2406 | R-NT2RM4002093 | 7626 |
| NT2RM4002109 | F-NT2RM4002109 | 2407 | R-nnnnnnnnnnnn | 7627 |
| NT2RM4002128 | F-NT2RM4002128 | 2408 | R-NT2RM4002128 | 7628 |
| NT2RM4002140 | F-NT2RM4002140 | 2409 | R-NT2RM4002140 | 7629 |
| NT2RM4002145 | F-NT2RM4002145 | 2410 | R-NT2RM4002145 | 7630 |
| NT2RM4002146 | F-NT2RM4002146 | 2411 | R-NT2RM4002146 | 7631 |
| NT2RM4002161 | F-NT2RM4002161 | 2412 | R-NT2RM4002161 | 7632 |
| NT2RM4002174 | F-NT2RM4002174 | 2413 | R-NT2RM4002174 | 7633 |
| NT2RM4002189 | F-NT2RM4002189 | 2414 | R-NT2RM4002189 | 7634 |
| NT2RM4002194 | F-NT2RM4002194 | 2415 | R-NT2RM4002194 | 7635 |
| NT2RM4002205 | F-NT2RM4002205 | 2416 | R-NT2RM4002205 | 7636 |
| NT2RM4002213 | F-NT2RM4002213 | 2417 | R-NT2RM4002213 | 7637 |
| NT2RM4002226 | F-NT2RM4002226 | 2418 | R-NT2RM4002226 | 7638 |
| NT2RM4002251 | F-NT2RM4002251 | 2419 | R-NT2RM4002251 | 7639 |
| NT2RM4002256 | F-NT2RM4002256 | 2420 | R-NT2RM4002256 | 7640 |
| NT2RM4002266 | F-NT2RM4002266 | 2421 | R-NT2RM4002266 | 7641 |
| NT2RM4002278 | F-NT2RM4002278 | 2422 | R-NT2RM4002278 | 7642 |
| NT2RM4002281 | F-NT2RM4002281 | 2423 | R-NT2RM4002281 | 7643 |
| NT2RM4002287 | F-NT2RM4002287 | 2424 | R-NT2RM4002287 | 7644 |
| NT2RM4002294 | F-NT2RM4002294 | 2425 | R-NT2RM4002294 | 7645 |
| NT2RM4002301 | F-NT2RM4002301 | 2426 | R-NT2RM4002301 | 7646 |
| NT2RM4002323 | F-NT2RM4002323 | 2427 | R-NT2RM4002323 | 7647 |
| NT2RM4002339 | F-NT2RM4002339 | 2428 | R-nnnnnnnnnnnn | 7648 |
| NT2RM4002344 | F-NT2RM4002344 | 2429 | R-NT2RM4002344 | 7649 |
| NT2RM4002373 | F-NT2RM4002373 | 2430 | R-NT2RM4002373 | 7650 |
| NT2RM4002374 | F-NT2RM4002374 | 2431 | R-NT2RM4002374 | 7651 |
| NT2RM4002383 | F-NT2RM4002383 | 2432 | R-NT2RM4002383 | 7652 |
| NT2RM4002390 | F-NT2RM4002390 | 2433 | R-NT2RM4002390 | 7653 |
| NT2RM4002398 | F-NT2RM4002398 | 2434 | | |
| NT2RM4002409 | F-NT2RM4002409 | 2435 | R-NT2RM4002409 | 7654 |
| NT2RM4002438 | F-NT2RM4002438 | 2436 | R-NT2RM4002438 | 7655 |
| NT2RM4002446 | F-NT2RM4002446 | 2437 | R-NT2RM4002446 | 7656 |
| NT2RM4002452 | F-NT2RM4002452 | 2438 | R-NT2RM4002452 | 7657 |
| NT2RM4002457 | F-NT2RM4002457 | 2439 | R-NT2RM4002457 | 7658 |
| NT2RM4002460 | F-NT2RM4002460 | 2440 | R-NT2RM4002460 | 7659 |
| NT2RM4002479 | F-NT2RM4002479 | 2441 | R-NT2RM4002479 | 7660 |
| NT2RM4002482 | F-NT2RM4002482 | 2442 | R-NT2RM4002482 | 7661 |
| NT2RM4002493 | F-NT2RM4002493 | 2443 | R-NT2RM4002493 | 7662 |
| NT2RM4002499 | F-NT2RM4002499 | 2444 | R-NT2RM4002499 | 7663 |
| NT2RM4002504 | F-NT2RM4002504 | 2445 | R-NT2RM4002504 | 7664 |
| NT2RM4002527 | F-NT2RM4002527 | 2446 | R-nnnnnnnnnnnn | 7665 |
| NT2RM4002532 | F-NT2RM4002532 | 2447 | R-NT2RM4002532 | 7666 |
| NT2RM4002534 | F-NT2RM4002534 | 2448 | R-NT2RM4002534 | 7667 |
| NT2RM4002558 | F-NT2RM4002558 | 2449 | | |
| NT2RM4002565 | F-NT2RM4002565 | 2450 | | |
| NT2RM4002567 | F-NT2RM4002567 | 2451 | R-NT2RM4002567 | 7668 |
| NT2RM4002571 | F-NT2RM4002571 | 2452 | R-NT2RM4002571 | 7669 |
| NT2RM4002593 | F-NT2RM4002593 | 2453 | R-NT2RM4002593 | 7670 |
| NT2RM4002594 | F-NT2RM4002594 | 2454 | | |
| NT2RM4002623 | F-NT2RM4002623 | 2455 | R-NT2RM4002623 | 7671 |
| NT2RP1000018 | F-NT2RP1000018 | 2456 | | |
| NT2RP1000035 | F-NT2RP1000035 | 2457 | | |
| NT2RP1000040 | F-NT2RP1000040 | 2458 | | |
| NT2RP1000063 | F-NT2RP1000063 | 2459 | | |
| NT2RP1000086 | F-NT2RP1000086 | 2460 | | |
| NT2RP1000101 | F-NT2RP1000101 | 2461 | | |
| NT2RP1000111 | F-NT2RP1000111 | 2462 | | |
| NT2RP1000112 | F-NT2RP1000112 | 2463 | | |
| NT2RP1000124 | F-NT2RP1000124 | 2464 | | |
| NT2RP1000130 | F-NT2RP1000130 | 2465 | | |
| NT2RP1000163 | F-NT2RP1000163 | 2466 | | |
| NT2RP1000170 | F-NT2RP1000170 | 2467 | | |
| NT2RP1000174 | F-NT2RP1000174 | 2468 | | |
| NT2RP1000191 | F-NT2RP1000191 | 2469 | | |
| NT2RP1000202 | F-NT2RP1000202 | 2470 | | |
| NT2RP1000243 | F-NT2RP1000243 | 2471 | | |
| NT2RP1000259 | F-NT2RP1000259 | 2472 | | |
| NT2RP1000272 | F-NT2RP1000272 | 2473 | | |
| NT2RP1000324 | F-NT2RP1000324 | 2474 | | |
| NT2RP1000326 | F-NT2RP1000326 | 2475 | | |
| NT2RP1000333 | F-NT2RP1000333 | 2476 | | |
| NT2RP1000348 | F-NT2RP1000348 | 2477 | | |
| NT2RP1000357 | F-NT2RP1000357 | 2478 | | |
| NT2RP1000358 | F-NT2RP1000358 | 2479 | | |
| NT2RP1000363 | F-NT2RP1000363 | 2480 | | |
| NT2RP1000376 | F-NT2RP1000376 | 2481 | | |
| NT2RP1000409 | F-NT2RP1000409 | 2482 | | |
| NT2RP1000413 | F-NT2RP1000413 | 2483 | | |
| NT2RP1000416 | F-NT2RP1000416 | 2484 | | |
| NT2RP1000418 | F-NT2RP1000418 | 2485 | | |
| NT2RP1000439 | F-NT2RP1000439 | 2486 | | |
| NT2RP1000443 | F-NT2RP1000443 | 2487 | | |
| NT2RP1000460 | F-NT2RP1000460 | 2488 | | |
| NT2RP1000470 | F-NT2RP1000470 | 2489 | | |
| NT2RP1000478 | F-NT2RP1000478 | 2490 | | |
| NT2RP1000481 | F-NT2RP1000481 | 2491 | | |
| NT2RP1000493 | F-NT2RP1000493 | 2492 | | |
| NT2RP1000513 | F-NT2RP1000513 | 2493 | | |
| NT2RP1000522 | F-NT2RP1000522 | 2494 | | |
| NT2RP1000547 | F-NT2RP1000547 | 2495 | | |
| NT2RP1000574 | F-NT2RP1000574 | 2496 | | |
| NT2RP1000577 | F-NT2RP1000577 | 2497 | | |
| NT2RP1000581 | F-NT2RP1000581 | 2498 | | |
| NT2RP1000609 | F-NT2RP1000609 | 2499 | | |
| NT2RP1000629 | F-NT2RP1000629 | 2500 | | |
| NT2RP1000630 | F-NT2RP1000630 | 2501 | | |
| NT2RP1000677 | F-NT2RP1000677 | 2502 | | |
| NT2RP1000688 | F-NT2RP1000688 | 2503 | | |
| NT2RP1000695 | F-NT2RP1000695 | 2504 | | |
| NT2RP1000701 | F-NT2RP1000701 | 2505 | | |
| NT2RP1000721 | F-NT2RP1000721 | 2506 | | |
| NT2RP1000730 | F-NT2RP1000730 | 2507 | | |
| NT2RP1000733 | F-NT2RP1000733 | 2508 | | |
| NT2RP1000738 | F-NT2RP1000738 | 2509 | | |
| NT2RP1000746 | F-NT2RP1000746 | 2510 | | |
| NT2RP1000767 | F-NT2RP1000767 | 2511 | | |
| NT2RP1000782 | F-NT2RP1000782 | 2512 | | |
| NT2RP1000796 | F-NT2RP1000796 | 2513 | | |
| NT2RP1000825 | F-NT2RP1000825 | 2514 | | |
| NT2RP1000833 | F-NT2RP1000833 | 2515 | | |
| NT2RP1000834 | F-NT2RP1000834 | 2516 | | |
| NT2RP1000836 | F-NT2RP1000836 | 2517 | | |
| NT2RP1000846 | F-NT2RP1000846 | 2518 | | |
| NT2RP1000851 | F-NT2RP1000851 | 2519 | | |
| NT2RP1000856 | F-NT2RP1000856 | 2520 | | |
| NT2RP1000860 | F-NT2RP1000860 | 2521 | | |
| NT2RP1000902 | F-NT2RP1000902 | 2522 | | |
| NT2RP1000915 | F-NT2RP1000915 | 2523 | | |
| NT2RP1000916 | F-NT2RP1000916 | 2524 | | |
| NT2RP1000943 | F-NT2RP1000943 | 2525 | | |
| NT2RP1000944 | F-NT2RP1000944 | 2526 | | |
| NT2RP1000947 | F-NT2RP1000947 | 2527 | | |
| NT2RP1000954 | F-NT2RP1000954 | 2528 | | |
| NT2RP1000958 | F-NT2RP1000958 | 2529 | | |
| NT2RP1000959 | F-NT2RP1000959 | 2530 | | |
| NT2RP1000966 | F-NT2RP1000966 | 2531 | | |
| NT2RP1000980 | F-NT2RP1000980 | 2532 | | |
| NT2RP1000988 | F-NT2RP1000988 | 2533 | | |
| NT2RP1001011 | F-NT2RP1001011 | 2534 | | |
| NT2RP1001013 | F-NT2RP1001013 | 2535 | | |
| NT2RP1001014 | F-NT2RP1001014 | 2536 | | |
| NT2RP1001033 | F-NT2RP1001033 | 2537 | | |
| NT2RP1001073 | F-NT2RP1001073 | 2538 | | |
| NT2RP1001079 | F-NT2RP1001079 | 2539 | | |
| NT2RP1001080 | F-NT2RP1001080 | 2540 | | |
| NT2RP1001113 | F-NT2RP1001113 | 2541 | | |
| NT2RP1001173 | F-NT2RP1001173 | 2542 | | |
| NT2RP1001177 | F-NT2RP1001177 | 2543 | | |
| NT2RP1001185 | F-NT2RP1001185 | 2544 | | |
| NT2RP1001199 | F-NT2RP1001199 | 2545 | | |
| NT2RP1001247 | F-NT2RP1001247 | 2546 | | |
| NT2RP1001248 | F-NT2RP1001248 | 2547 | | |
| NT2RP1001253 | F-NT2RP1001253 | 2548 | | |
| NT2RP1001286 | F-NT2RP1001286 | 2549 | | |
| NT2RP1001294 | F-NT2RP1001294 | 2550 | | |
| NT2RP1001302 | F-NT2RP1001302 | 2551 | | |
| NT2RP1001310 | F-NT2RP1001310 | 2552 | | |
| NT2RP1001311 | F-NT2RP1001311 | 2553 | | |
| NT2RP1001313 | F-NT2RP1001313 | 2554 | | |
| NT2RP1001361 | F-NT2RP1001361 | 2555 | | |
| NT2RP1001385 | F-NT2RP1001385 | 2556 | | |
| NT2RP1001395 | F-NT2RP1001395 | 2557 | | |
| NT2RP1001410 | F-NT2RP1001410 | 2558 | | |
| NT2RP1001424 | F-NT2RP1001424 | 2559 | | |
| NT2RP1001432 | F-NT2RP1001432 | 2560 | | |
| NT2RP1001449 | F-NT2RP1001449 | 2561 | | |
| NT2RP1001457 | F-NT2RP1001457 | 2562 | | |
| NT2RP1001466 | F-NT2RP1001466 | 2563 | | |
| NT2RP1001475 | F-NT2RP1001475 | 2564 | | |
| NT2RP1001482 | F-NT2RP1001482 | 2565 | | |
| NT2RP1001494 | F-NT2RP1001494 | 2566 | | |
| NT2RP1001543 | F-NT2RP1001543 | 2567 | | |
| NT2RP1001546 | F-NT2RP1001546 | 2568 | | |
| NT2RP1001569 | F-NT2RP1001569 | 2569 | | |
| NT2RP1001616 | F-NT2RP1001616 | 2570 | | |
| NT2RP1001665 | F-NT2RP1001665 | 2571 | | |
| NT2RP2000001 | F-NT2RP2000001 | 2572 | R-NT2RP2000001 | 7672 |
| NT2RP2000006 | F-NT2RP2000006 | 2573 | R-NT2RP2000006 | 7673 |
| NT2RP2000007 | F-NT2RP2000007 | 2574 | | |
| NT2RP2000008 | F-NT2RP2000008 | 2575 | R-NT2RP2000008 | 7674 |
| NT2RP2000027 | F-NT2RP2000027 | 2576 | R-NT2RP2000027 | 7675 |
| NT2RP2000032 | F-NT2RP2000032 | 2577 | | |
| NT2RP2000040 | F-NT2RP2000040 | 2578 | R-NT2RP2000040 | 7676 |
| NT2RP2000045 | F-NT2RP2000045 | 2579 | R-NT2RP2000045 | 7677 |
| NT2RP2000054 | F-NT2RP2000054 | 2580 | R-NT2RP2000054 | 7678 |
| NT2RP2000056 | F-NT2RP2000056 | 2581 | R-NT2RP2000056 | 7679 |
| NT2RP2000067 | F-NT2RP2000067 | 2582 | R-NT2RP2000067 | 7680 |
| NT2RP2000070 | F-NT2RP2000070 | 2583 | R-NT2RP2000070 | 7681 |
| NT2RP2000076 | F-NT2RP2000076 | 2584 | R-NT2RP2000076 | 7682 |
| NT2RP2000077 | F-NT2RP2000077 | 2585 | R-NT2RP2000077 | 7683 |
| NT2RP2000079 | F-NT2RP2000079 | 2586 | R-NT2RP2000079 | 7684 |
| NT2RP2000088 | F-NT2RP2000088 | 2587 | R-NT2RP2000088 | 7685 |
| NT2RP2000091 | F-NT2RP2000091 | 2588 | R-NT2RP2000091 | 7686 |
| NT2RP2000097 | F-NT2RP2000097 | 2589 | R-NT2RP2000097 | 7687 |
| NT2RP2000098 | F-NT2RP2000098 | 2590 | R-NT2RP2000098 | 7688 |
| NT2RP2000108 | F-NT2RP2000108 | 2591 | R-NT2RP2000108 | 7689 |
| NT2RP2000114 | F-NT2RP2000114 | 2592 | R-NT2RP2000114 | 7690 |
| NT2RP2000120 | F-NT2RP2000120 | 2593 | R-NT2RP2000120 | 7691 |
| NT2RP2000126 | F-NT2RP2000126 | 2594 | R-nnnnnnnnnnnn | 7692 |
| NT2RP2000133 | F-NT2RP2000133 | 2595 | R-nnnnnnnnnnnn | 7693 |
| NT2RP2000147 | F-NT2RP2000147 | 2596 | R-NT2RP2000147 | 7694 |
| NT2RP2000153 | F-NT2RP2000153 | 2597 | R-NT2RP2000153 | 7695 |
| NT2RP2000157 | F-NT2RP2000157 | 2598 | R-NT2RP2000157 | 7696 |
| NT2RP2000161 | F-NT2RP2000161 | 2599 | R-NT2RP2000161 | 7697 |
| NT2RP2000173 | F-NT2RP2000173 | 2600 | | |
| NT2RP2000175 | F-NT2RP2000175 | 2601 | R-NT2RP2000175 | 7698 |
| NT2RP2000183 | F-NT2RP2000183 | 2602 | R-NT2RP2000183 | 7699 |
| NT2RP2000195 | F-NT2RP2000195 | 2603 | R-NT2RP2000195 | 7700 |
| NT2RP2000205 | F-NT2RP2000205 | 2604 | R-NT2RP2000205 | 7701 |
| NT2RP2000208 | F-NT2RP2000208 | 2605 | | |
| NT2RP2000224 | F-NT2RP2000224 | 2606 | R-NT2RP2000224 | 7702 |
| NT2RP2000232 | F-NT2RP2000232 | 2607 | R-NT2RP2000232 | 7703 |
| NT2RP2000233 | F-NT2RP2000233 | 2608 | R-NT2RP2000233 | 7704 |
| NT2RP2000239 | F-NT2RP2000239 | 2609 | R-NT2RP2000239 | 7705 |
| NT2RP2000248 | F-NT2RP2000248 | 2610 | R-NT2RP2000248 | 7706 |
| NT2RP2000257 | F-NT2RP2000257 | 2611 | R-NT2RP2000257 | 7707 |
| NT2RP2000258 | F-NT2RP2000258 | 2612 | R-NT2RP2000258 | 7708 |
| NT2RP2000270 | F-NT2RP2000270 | 2613 | R-NT2RP2000270 | 7709 |
| NT2RP2000274 | F-NT2RP2000274 | 2614 | R-NT2RP2000274 | 7710 |
| NT2RP2000283 | F-NT2RP2000283 | 2615 | | |
| NT2RP2000288 | F-NT2RP2000288 | 2616 | R-NT2RP2000288 | 7711 |
| NT2RP2000289 | F-NT2RP2000289 | 2617 | R-NT2RP2000289 | 7712 |
| NT2RP2000297 | F-NT2RP2000297 | 2618 | R-NT2RP2000297 | 7713 |
| NT2RP2000298 | F-NT2RP2000298 | 2619 | R-NT2RP2000298 | 7714 |
| NT2RP2000310 | F-NT2RP2000310 | 2620 | R-NT2RP2000310 | 7715 |
| NT2RP2000327 | F-NT2RP2000327 | 2621 | R-NT2RP2000327 | 7716 |
| NT2RP2000328 | F-NT2RP2000328 | 2622 | | |
| NT2RP2000329 | F-NT2RP2000329 | 2623 | R-NT2RP2000329 | 7717 |
| NT2RP2000337 | F-NT2RP2000337 | 2624 | R-NT2RP2000337 | 7718 |
| NT2RP2000346 | F-NT2RP2000346 | 2625 | R-NT2RP2000346 | 7719 |
| NT2RP2000369 | F-NT2RP2000369 | 2626 | R-NT2RP2000369 | 7720 |
| NT2RP2000412 | F-NT2RP2000412 | 2627 | | |
| NT2RP2000414 | F-NT2RP2000414 | 2628 | R-NT2RP2000414 | 7721 |
| NT2RP2000420 | F-NT2RP2000420 | 2629 | R-NT2RP2000420 | 7722 |
| NT2RP2000422 | F-NT2RP2000422 | 2630 | R-NT2RP2000422 | 7723 |
| NT2RP2000438 | F-NT2RP2000438 | 2631 | R-NT2RP2000438 | 7724 |
| NT2RP2000448 | F-NT2RP2000448 | 2632 | R-NT2RP2000448 | 7725 |
| NT2RP2000459 | F-NT2RP2000459 | 2633 | R-NT2RP2000459 | 7726 |
| NT2RP2000498 | F-NT2RP2000498 | 2634 | R-NT2RP2000498 | 7727 |
| NT2RP2000503 | F-NT2RP2000503 | 2635 | R-NT2RP2000503 | 7728 |
| NT2RP2000510 | F-NT2RP2000510 | 2636 | R-NT2RP2000510 | 7729 |
| NT2RP2000516 | F-NT2RP2000516 | 2637 | R-nnnnnnnnnnnn | 7730 |
| NT2RP2000523 | F-NT2RP2000523 | 2638 | R-NT2RP2000523 | 7731 |
| NT2RP2000603 | F-NT2RP2000603 | 2639 | R-NT2RP2000603 | 7732 |
| NT2RP2000617 | F-NT2RP2000617 | 2640 | R-NT2RP2000617 | 7733 |
| NT2RP2000634 | F-NT2RP2000634 | 2641 | R-NT2RP2000634 | 7734 |
| NT2RP2000644 | F-NT2RP2000644 | 2642 | R-NT2RP2000644 | 7735 |
| NT2RP2000656 | F-NT2RP2000656 | 2643 | R-NT2RP2000656 | 7736 |
| NT2RP2000658 | F-NT2RP2000658 | 2644 | R-NT2RP2000658 | 7737 |
| NT2RP2000668 | F-NT2RP2000668 | 2645 | R-NT2RP2000668 | 7738 |
| NT2RP2000678 | F-NT2RP2000678 | 2646 | R-NT2RP2000678 | 7739 |
| NT2RP2000704 | F-NT2RP2000704 | 2647 | | |
| NT2RP2000710 | F-NT2RP2000710 | 2648 | R-NT2RP2000710 | 7740 |
| NT2RP2000715 | F-NT2RP2000715 | 2649 | R-NT2RP2000715 | 7741 |
| NT2RP2000731 | F-NT2RP2000731 | 2650 | R-NT2RP2000731 | 7742 |
| NT2RP2000758 | F-NT2RP2000758 | 2651 | R-NT2RP2000758 | 7743 |
| NT2RP2000764 | F-NT2RP2000764 | 2652 | R-NT2RP2000764 | 7744 |
| NT2RP2000809 | F-NT2RP2000809 | 2653 | R-NT2RP2000809 | 7745 |
| NT2RP2000812 | F-NT2RP2000812 | 2654 | R-NT2RP2000812 | 7746 |
| NT2RP2000814 | F-NT2RP2000814 | 2655 | R-nnnnnnnnnnnn | 7747 |
| NT2RP2000816 | F-NT2RP2000816 | 2656 | R-NT2RP2000816 | 7748 |
| NT2RP2000819 | F-NT2RP2000819 | 2657 | R-NT2RP2000819 | 7749 |
| NT2RP2000841 | F-NT2RP2000841 | 2658 | R-NT2RP2000841 | 7750 |
| NT2RP2000842 | F-NT2RP2000842 | 2659 | R-NT2RP2000842 | 7751 |
| NT2RP2000845 | F-NT2RP2000845 | 2660 | R-NT2RP2000845 | 7752 |
| NT2RP2000863 | F-NT2RP2000863 | 2661 | R-NT2RP2000863 | 7753 |
| NT2RP2000880 | F-NT2RP2000880 | 2662 | R-NT2RP2000880 | 7754 |
| NT2RP2000892 | F-NT2RP2000892 | 2663 | R-NT2RP2000892 | 7755 |
| NT2RP2000931 | F-NT2RP2000931 | 2664 | R-NT2RP2000931 | 7756 |
| NT2RP2000932 | F-NT2RP2000932 | 2665 | | |
| NT2RP2000938 | F-NT2RP2000938 | 2666 | R-NT2RP2000938 | 7757 |
| NT2RP2000943 | F-NT2RP2000943 | 2667 | R-NT2RP2000943 | 7758 |
| NT2RP2000965 | F-NT2RP2000965 | 2668 | R-NT2RP2000965 | 7759 |
| NT2RP2000970 | F-NT2RP2000970 | 2669 | R-NT2RP2000970 | 7760 |
| NT2RP2000985 | F-NT2RP2000985 | 2670 | R-NT2RP2000985 | 7761 |
| NT2RP2000987 | F-NT2RP2000987 | 2671 | R-NT2RP2000987 | 7762 |
| NT2RP2001036 | F-NT2RP2001036 | 2672 | R-NT2RP2001036 | 7763 |
| NT2RP2001044 | F-NT2RP2001044 | 2673 | R-NT2RP2001044 | 7764 |
| NT2RP2001056 | F-NT2RP2001056 | 2674 | | |
| NT2RP2001065 | F-NT2RP2001065 | 2675 | R-NT2RP2001065 | 7765 |
| NT2RP2001070 | F-NT2RP2001070 | 2676 | R-NT2RP2001070 | 7766 |
| NT2RP2001081 | F-NT2RP2001081 | 2677 | | |
| NT2RP2001094 | F-NT2RP2001094 | 2678 | R-NT2RP2001094 | 7767 |
| NT2RP2001119 | F-NT2RP2001119 | 2679 | R-NT2RP2001119 | 7768 |
| NT2RP2001127 | F-NT2RP2001127 | 2680 | R-NT2RP2001127 | 7769 |
| NT2RP2001137 | F-NT2RP2001137 | 2681 | R-NT2RP2001137 | 7770 |
| NT2RP2001149 | F-NT2RP2001149 | 2682 | R-NT2RP2001149 | 7771 |
| NT2RP2001168 | F-NT2RP2001168 | 2683 | R-NT2RP2001168 | 7772 |
| NT2RP2001173 | F-NT2RP2001173 | 2684 | R-NT2RP2001173 | 7773 |
| NT2RP2001174 | F-NT2RP2001174 | 2685 | R-NT2RP2001174 | 7774 |
| NT2RP2001196 | F-NT2RP2001196 | 2686 | R-NT2RP2001196 | 7775 |
| NT2RP2001218 | F-NT2RP2001218 | 2687 | R-NT2RP2001218 | 7776 |
| NT2RP2001226 | F-NT2RP2001226 | 2688 | R-NT2RP2001226 | 7777 |
| NT2RP2001233 | F-NT2RP2001233 | 2689 | R-NT2RP2001233 | 7778 |
| NT2RP2001245 | F-NT2RP2001245 | 2690 | R-NT2RP2001245 | 7779 |
| NT2RP2001268 | F-NT2RP2001268 | 2691 | R-NT2RP2001268 | 7780 |
| NT2RP2001277 | F-NT2RP2001277 | 2692 | R-NT2RP2001277 | 7781 |
| NT2RP2001290 | F-NT2RP2001290 | 2693 | R-NT2RP2001290 | 7782 |
| NT2RP2001295 | F-NT2RP2001295 | 2694 | R-NT2RP2001295 | 7783 |
| NT2RP2001312 | F-NT2RP2001312 | 2695 | R-NT2RP2001312 | 7784 |
| NT2RP2001327 | F-NT2RP2001327 | 2696 | R-NT2RP2001327 | 7785 |
| NT2RP2001328 | F-NT2RP2001328 | 2697 | R-NT2RP2001328 | 7786 |
| NT2RP2001347 | F-NT2RP2001347 | 2698 | R-NT2RP2001347 | 7787 |
| NT2RP2001366 | F-NT2RP2001366 | 2699 | | |
| NT2RP2001378 | F-NT2RP2001378 | 2700 | R-NT2RP2001378 | 7788 |
| NT2RP2001381 | F-NT2RP2001381 | 2701 | R-NT2RP2001381 | 7789 |
| NT2RP2001392 | F-NT2RP2001392 | 2702 | R-NT2RP2001392 | 7790 |
| NT2RP2001394 | F-NT2RP2001394 | 2703 | R-NT2RP2001394 | 7791 |
| NT2RP2001397 | F-NT2RP2001397 | 2704 | R-NT2RP2001397 | 7792 |
| NT2RP2001420 | F-NT2RP2001420 | 2705 | R-NT2RP2001420 | 7793 |
| NT2RP2001423 | F-NT2RP2001423 | 2706 | R-NT2RP2001423 | 7794 |
| NT2RP2001427 | F-NT2RP2001427 | 2707 | R-NT2RP2001427 | 7795 |
| NT2RP2001436 | F-NT2RP2001436 | 2708 | R-NT2RP2001436 | 7796 |
| NT2RP2001440 | F-NT2RP2001440 | 2709 | R-NT2RP2001440 | 7797 |
| NT2RP2001445 | F-NT2RP2001445 | 2710 | R-NT2RP2001445 | 7798 |
| NT2RP2001449 | F-NT2RP2001449 | 2711 | R-NT2RP2001449 | 7799 |
| NT2RP2001450 | F-NT2RP2001450 | 2712 | R-NT2RP2001450 | 7800 |
| NT2RP2001467 | F-NT2RP2001467 | 2713 | R-NT2RP2001467 | 7801 |
| NT2RP2001506 | F-NT2RP2001506 | 2714 | R-NT2RP2001506 | 7802 |
| NT2RP2001511 | F-NT2RP2001511 | 2715 | R-NT2RP2001511 | 7803 |
| NT2RP2001520 | F-NT2RP2001520 | 2716 | R-NT2RP2001520 | 7804 |
| NT2RP2001526 | F-NT2RP2001526 | 2717 | R-NT2RP2001526 | 7805 |
| NT2RP2001536 | F-NT2RP2001536 | 2718 | R-NT2RP2001536 | 7806 |
| NT2RP2001560 | F-NT2RP2001560 | 2719 | R-NT2RP2001560 | 7807 |
| NT2RP2001569 | F-NT2RP2001569 | 2720 | R-NT2RP2001569 | 7808 |
| NT2RP2001576 | F-NT2RP2001576 | 2721 | R-NT2RP2001576 | 7809 |
| NT2RP2001581 | F-NT2RP2001581 | 2722 | R-NT2RP2001581 | 7810 |
| NT2RP2001597 | F-NT2RP2001597 | 2723 | R-NT2RP2001597 | 7811 |
| NT2RP2001601 | F-NT2RP2001601 | 2724 | R-NT2RP2001601 | 7812 |
| NT2RP2001613 | F-NT2RP2001613 | 2725 | R-NT2RP2001613 | 7813 |
| NT2RP2001628 | F-NT2RP2001628 | 2726 | R-NT2RP2001628 | 7814 |
| NT2RP2001634 | F-NT2RP2001634 | 2727 | | |
| NT2RP2001660 | F-NT2RP2001660 | 2728 | | |
| NT2RP2001663 | F-NT2RP2001663 | 2729 | R-NT2RP2001663 | 7815 |
| NT2RP2001675 | F-NT2RP2001675 | 2730 | | |
| NT2RP2001677 | F-NT2RP2001677 | 2731 | R-NT2RP2001677 | 7816 |
| NT2RP2001678 | F-NT2RP2001678 | 2732 | R-NT2RP2001678 | 7817 |
| NT2RP2001699 | F-NT2RP2001699 | 2733 | R-NT2RP2001699 | 7818 |
| NT2RP2001720 | F-NT2RP2001720 | 2734 | R-NT2RP2001720 | 7819 |
| NT2RP2001721 | F-NT2RP2001721 | 2735 | R-NT2RP2001721 | 7820 |
| NT2RP2001740 | F-NT2RP2001740 | 2736 | R-NT2RP2001740 | 7821 |
| NT2RP2001748 | F-NT2RP2001748 | 2737 | R-NT2RP2001748 | 7822 |
| NT2RP2001762 | F-NT2RP2001762 | 2738 | R-NT2RP2001762 | 7823 |
| NT2RP2001813 | F-NT2RP2001813 | 2739 | R-NT2RP2001813 | 7824 |
| NT2RP2001839 | F-NT2RP2001839 | 2740 | | |
| NT2RP2001861 | F-NT2RP2001861 | 2741 | R-NT2RP2001861 | 7825 |
| NT2RP2001869 | F-NT2RP2001869 | 2742 | R-NT2RP2001869 | 7826 |
| NT2RP2001876 | F-NT2RP2001876 | 2743 | R-NT2RP2001876 | 7827 |
| NT2RP2001883 | F-NT2RP2001883 | 2744 | R-NT2RP2001883 | 7828 |
| NT2RP2001898 | F-NT2RP2001898 | 2745 | | |
| NT2RP2001900 | F-NT2RP2001900 | 2746 | R-NT2RP2001900 | 7829 |
| NT2RP2001907 | F-NT2RP2001907 | 2747 | R-NT2RP2001907 | 7830 |
| NT2RP2001926 | F-NT2RP2001926 | 2748 | R-NT2RP2001926 | 7831 |
| NT2RP2001936 | F-NT2RP2001936 | 2749 | R-NT2RP2001936 | 7832 |
| NT2RP2001943 | F-NT2RP2001943 | 2750 | R-NT2RP2001943 | 7833 |
| NT2RP2001946 | F-NT2RP2001946 | 2751 | R-NT2RP2001946 | 7834 |
| NT2RP2001947 | F-NT2RP2001947 | 2752 | R-NT2RP2001947 | 7835 |
| NT2RP2001969 | F-NT2RP2001969 | 2753 | R-NT2RP2001969 | 7836 |
| NT2RP2001976 | F-NT2RP2001976 | 2754 | R-NT2RP2001976 | 7837 |
| NT2RP2001985 | F-NT2RP2001985 | 2755 | R-NT2RP2001985 | 7838 |
| NT2RP2001991 | F-NT2RP2001991 | 2756 | | |
| NT2RP2002025 | F-NT2RP2002025 | 2757 | R-NT2RP2002025 | 7839 |
| NT2RP2002032 | F-NT2RP2002032 | 2758 | R-NT2RP2002032 | 7840 |
| NT2RP2002033 | F-NT2RP2002033 | 2759 | R-NT2RP2002033 | 7841 |
| NT2RP2002041 | F-NT2RP2002041 | 2760 | R-NT2RP2002041 | 7842 |
| NT2RP2002046 | F-NT2RP2002046 | 2761 | R-NT2RP2002046 | 7843 |
| NT2RP2002047 | F-NT2RP2002047 | 2762 | R-NT2RP2002047 | 7844 |
| NT2RP2002058 | F-NT2RP2002058 | 2763 | R-NT2RP2002058 | 7845 |
| NT2RP2002066 | F-NT2RP2002066 | 2764 | R-NT2RP2002066 | 7846 |
| NT2RP2002070 | F-NT2RP2002070 | 2765 | R-NT2RP2002070 | 7847 |
| NT2RP2002076 | F-NT2RP2002076 | 2766 | R-NT2RP2002076 | 7848 |
| NT2RP2002078 | F-NT2RP2002078 | 2767 | | |
| NT2RP2002079 | F-NT2RP2002079 | 2768 | R-NT2RP2002079 | 7849 |
| NT2RP2002099 | F-NT2RP2002099 | 2769 | R-NT2RP2002099 | 7850 |
| NT2RP2002105 | F-NT2RP2002105 | 2770 | R-NT2RP2002105 | 7851 |
| NT2RP2002124 | F-NT2RP2002124 | 2771 | R-NT2RP2002124 | 7852 |
| NT2RP2002137 | F-NT2RP2002137 | 2772 | R-NT2RP2002137 | 7853 |
| NT2RP2002154 | F-NT2RP2002154 | 2773 | R-NT2RP2002154 | 7854 |
| NT2RP2002172 | F-NT2RP2002172 | 2774 | R-NT2RP2002172 | 7855 |
| NT2RP2002185 | F-NT2RP2002185 | 2775 | R-NT2RP2002185 | 7856 |
| NT2RP2002192 | F-NT2RP2002192 | 2776 | R-NT2RP2002192 | 7857 |
| NT2RP2002193 | F-NT2RP2002193 | 2777 | R-NT2RP2002193 | 7858 |
| NT2RP2002208 | F-NT2RP2002208 | 2778 | R-NT2RP2002208 | 7859 |
| NT2RP2002219 | F-NT2RP2002219 | 2779 | R-NT2RP2002219 | 7860 |
| NT2RP2002231 | F-NT2RP2002231 | 2780 | R-NT2RP2002231 | 7861 |
| NT2RP2002235 | F-NT2RP2002235 | 2781 | | |
| NT2RP2002252 | F-NT2RP2002252 | 2782 | R-nnnnnnnnnnnn | 7862 |
| NT2RP2002256 | F-NT2RP2002256 | 2783 | R-NT2RP2002256 | 7863 |
| NT2RP2002259 | F-NT2RP2002259 | 2784 | R-NT2RP2002259 | 7864 |
| NT2RP2002270 | F-NT2RP2002270 | 2785 | R-NT2RP2002270 | 7865 |
| NT2RP2002292 | F-NT2RP2002292 | 2786 | R-NT2RP2002292 | 7866 |
| NT2RP2002312 | F-NT2RP2002312 | 2787 | R-NT2RP2002312 | 7867 |
| NT2RP2002316 | F-NT2RP2002316 | 2788 | R-NT2RP2002316 | 7868 |
| NT2RP2002325 | F-NT2RP2002325 | 2789 | R-NT2RP2002325 | 7869 |
| NT2RP2002333 | F-NT2RP2002333 | 2790 | R-NT2RP2002333 | 7870 |
| NT2RP2002373 | F-NT2RP2002373 | 2791 | | |
| NT2RP2002385 | F-NT2RP2002385 | 2792 | R-NT2RP2002385 | 7871 |
| NT2RP2002394 | F-NT2RP2002394 | 2793 | R-NT2RP2002394 | 7872 |
| NT2RP2002408 | F-NT2RP2002408 | 2794 | R-NT2RP2002408 | 7873 |
| NT2RP2002426 | F-NT2RP2002426 | 2795 | R-NT2RP2002426 | 7874 |
| NT2RP2002439 | F-NT2RP2002439 | 2796 | R-NT2RP2002439 | 7875 |
| NT2RP2002442 | F-NT2RP2002442 | 2797 | | |
| NT2RP2002457 | F-NT2RP2002457 | 2798 | R-NT2RP2002457 | 7876 |
| NT2RP2002464 | F-NT2RP2002464 | 2799 | R-NT2RP2002464 | 7877 |
| NT2RP2002475 | F-NT2RP2002475 | 2800 | R-NT2RP2002475 | 7878 |
| NT2RP2002479 | F-NT2RP2002479 | 2801 | R-nnnnnnnnnnnn | 7879 |
| NT2RP2002498 | F-NT2RP2002498 | 2802 | R-NT2RP2002498 | 7880 |
| NT2RP2002503 | F-NT2RP2002503 | 2803 | R-NT2RP2002503 | 7881 |
| NT2RP2002504 | F-NT2RP2002504 | 2804 | R-NT2RP2002504 | 7882 |
| NT2RP2002520 | F-NT2RP2002520 | 2805 | R-NT2RP2002520 | 7883 |
| NT2RP2002537 | F-NT2RP2002537 | 2806 | R-NT2RP2002537 | 7884 |
| NT2RP2002546 | F-NT2RP2002546 | 2807 | R-NT2RP2002546 | 7885 |
| NT2RP2002549 | F-NT2RP2002549 | 2808 | R-NT2RP2002549 | 7886 |
| NT2RP2002591 | F-NT2RP2002591 | 2809 | R-NT2RP2002591 | 7887 |
| NT2RP2002595 | F-NT2RP2002595 | 2810 | R-NT2RP2002595 | 7888 |
| NT2RP2002606 | F-NT2RP2002606 | 2811 | R-NT2RP2002606 | 7889 |
| NT2RP2002609 | F-NT2RP2002609 | 2812 | R-NT2RP2002609 | 7890 |
| NT2RP2002618 | F-NT2RP2002618 | 2813 | R-NT2RP2002618 | 7891 |
| NT2RP2002621 | F-NT2RP2002621 | 2814 | R-NT2RP2002621 | 7892 |
| NT2RP2002643 | F-NT2RP2002643 | 2815 | R-NT2RP2002643 | 7893 |
| NT2RP2002672 | F-NT2RP2002672 | 2816 | R-NT2RP2002672 | 7894 |
| NT2RP2002701 | F-NT2RP2002701 | 2817 | R-NT2RP2002701 | 7895 |
| NT2RP2002706 | F-NT2RP2002706 | 2818 | R-NT2RP2002706 | 7896 |
| NT2RP2002710 | F-NT2RP2002710 | 2819 | R-NT2RP2002710 | 7897 |
| NT2RP2002727 | F-NT2RP2002727 | 2820 | R-NT2RP2002727 | 7898 |
| NT2RP2002736 | F-NT2RP2002736 | 2821 | R-NT2RP2002736 | 7899 |
| NT2RP2002740 | F-NT2RP2002740 | 2822 | R-NT2RP2002740 | 7900 |
| NT2RP2002741 | F-NT2RP2002741 | 2823 | R-NT2RP2002741 | 7901 |
| NT2RP2002750 | F-NT2RP2002750 | 2824 | R-NT2RP2002750 | 7902 |
| NT2RP2002752 | F-NT2RP2002752 | 2825 | R-NT2RP2002752 | 7903 |
| NT2RP2002753 | F-NT2RP2002753 | 2826 | R-NT2RP2002753 | 7904 |
| NT2RP2002769 | F-NT2RP2002769 | 2827 | R-NT2RP2002769 | 7905 |
| NT2RP2002778 | F-NT2RP2002778 | 2828 | R-NT2RP2002778 | 7906 |
| NT2RP2002800 | F-NT2RP2002800 | 2829 | R-NT2RP2002800 | 7907 |
| NT2RP2002839 | F-NT2RP2002839 | 2830 | R-NT2RP2002839 | 7908 |
| NT2RP2002857 | F-NT2RP2002857 | 2831 | R-NT2RP2002857 | 7909 |
| NT2RP2002862 | F-NT2RP2002862 | 2832 | R-NT2RP2002862 | 7910 |
| NT2RP2002880 | F-NT2RP2002880 | 2833 | R-NT2RP2002880 | 7911 |
| NT2RP2002891 | F-NT2RP2002891 | 2834 | R-NT2RP2002891 | 7912 |
| NT2RP2002925 | F-NT2RP2002925 | 2835 | R-NT2RP2002925 | 7913 |
| NT2RP2002928 | F-NT2RP2002928 | 2836 | R-NT2RP2002928 | 7914 |
| NT2RP2002929 | F-NT2RP2002929 | 2837 | R-NT2RP2002929 | 7915 |
| NT2RP2002939 | F-NT2RP2002939 | 2838 | | |
| NT2RP2002954 | F-NT2RP2002954 | 2839 | R-NT2RP2002954 | 7916 |
| NT2RP2002959 | F-NT2RP2002959 | 2840 | R-NT2RP2002959 | 7917 |
| NT2RP2002979 | F-NT2RP2002979 | 2841 | R-NT2RP2002979 | 7918 |
| NT2RP2002980 | F-NT2RP2002980 | 2842 | R-NT2RP2002980 | 7919 |
| NT2RP2002986 | F-NT2RP2002986 | 2843 | R-NT2RP2002986 | 7920 |
| NT2RP2002987 | F-NT2RP2002987 | 2844 | R-NT2RP2002987 | 7921 |
| NT2RP2002993 | F-NT2RP2002993 | 2845 | R-NT2RP2002993 | 7922 |
| NT2RP2003000 | F-NT2RP2003000 | 2846 | R-NT2RP2003000 | 7923 |
| NT2RP2003034 | F-NT2RP2003034 | 2847 | R-NT2RP2003034 | 7924 |
| NT2RP2003073 | F-NT2RP2003073 | 2848 | R-NT2RP2003073 | 7925 |
| NT2RP2003099 | F-NT2RP2003099 | 2849 | R-NT2RP2003099 | 7926 |
| NT2RP2003108 | F-NT2RP2003108 | 2850 | R-NT2RP2003108 | 7927 |
| NT2RP2003117 | F-NT2RP2003117 | 2851 | R-NT2RP2003117 | 7928 |
| NT2RP2003121 | F-NT2RP2003121 | 2852 | R-NT2RP2003121 | 7929 |
| NT2RP2003125 | F-NT2RP2003125 | 2853 | R-NT2RP2003125 | 7930 |
| NT2RP2003129 | F-NT2RP2003129 | 2854 | R-NT2RP2003129 | 7931 |
| NT2RP2003137 | F-NT2RP2003137 | 2855 | R-NT2RP2003137 | 7932 |
| NT2RP2003157 | F-NT2RP2003157 | 2856 | | |
| NT2RP2003158 | F-NT2RP2003158 | 2857 | | |
| NT2RP2003161 | F-NT2RP2003161 | 2858 | R-NT2RP2003161 | 7933 |
| NT2RP2003164 | F-NT2RP2003164 | 2859 | R-NT2RP2003164 | 7934 |
| NT2RP2003165 | F-NT2RP2003165 | 2860 | R-NT2RP2003165 | 7935 |
| NT2RP2003177 | F-NT2RP2003177 | 2861 | R-NT2RP2003177 | 7936 |
| NT2RP2003194 | F-NT2RP2003194 | 2862 | R-NT2RP2003194 | 7937 |
| NT2RP2003206 | F-NT2RP2003206 | 2863 | R-NT2RP2003206 | 7938 |
| NT2RP2003228 | F-NT2RP2003228 | 2864 | | |
| NT2RP2003230 | F-NT2RP2003230 | 2865 | R-NT2RP2003230 | 7939 |
| NT2RP2003237 | F-NT2RP2003237 | 2866 | R-NT2RP2003237 | 7940 |
| NT2RP2003243 | F-NT2RP2003243 | 2867 | R-NT2RP2003243 | 7941 |
| NT2RP2003265 | F-NT2RP2003265 | 2868 | R-NT2RP2003265 | 7942 |
| NT2RP2003272 | F-NT2RP2003272 | 2869 | R-NT2RP2003272 | 7943 |
| NT2RP2003277 | F-NT2RP2003277 | 2870 | R-NT2RP2003277 | 7944 |
| NT2RP2003280 | F-NT2RP2003280 | 2871 | R-NT2RP2003280 | 7945 |
| NT2RP2003286 | F-NT2RP2003286 | 2872 | R-NT2RP2003286 | 7946 |
| NT2RP2003293 | F-NT2RP2003293 | 2873 | R-NT2RP2003293 | 7947 |
| NT2RP2003295 | F-NT2RP2003295 | 2874 | R-NT2RP2003295 | 7948 |
| NT2RP2003297 | F-NT2RP2003297 | 2875 | R-NT2RP2003297 | 7949 |
| NT2RP2003307 | F-NT2RP2003307 | 2876 | | |
| NT2RP2003308 | F-NT2RP2003308 | 2877 | R-NT2RP2003308 | 7950 |
| NT2RP2003329 | F-NT2RP2003329 | 2878 | R-NT2RP2003329 | 7951 |
| NT2RP2003339 | F-NT2RP2003339 | 2879 | R-NT2RP2003339 | 7952 |
| NT2RP2003347 | F-NT2RP2003347 | 2880 | R-NT2RP2003347 | 7953 |
| NT2RP2003367 | F-NT2RP2003367 | 2881 | R-NT2RP2003367 | 7954 |
| NT2RP2003391 | F-NT2RP2003391 | 2882 | R-NT2RP2003391 | 7955 |
| NT2RP2003393 | F-NT2RP2003393 | 2883 | R-NT2RP2003393 | 7956 |
| NT2RP2003394 | F-NT2RP2003394 | 2884 | R-NT2RP2003394 | 7957 |
| NT2RP2003401 | F-NT2RP2003401 | 2885 | R-NT2RP2003401 | 7958 |
| NT2RP2003433 | F-NT2RP2003433 | 2886 | R-NT2RP2003433 | 7959 |
| NT2RP2003445 | F-NT2RP2003445 | 2887 | R-NT2RP2003445 | 7960 |
| NT2RP2003446 | F-NT2RP2003446 | 2888 | R-NT2RP2003446 | 7961 |
| NT2RP2003456 | F-NT2RP2003456 | 2889 | R-NT2RP2003456 | 7962 |
| NT2RP2003466 | F-NT2RP2003466 | 2890 | | |
| NT2RP2003480 | F-NT2RP2003480 | 2891 | R-NT2RP2003480 | 7963 |
| NT2RP2003499 | F-NT2RP2003499 | 2892 | R-NT2RP2003499 | 7964 |
| NT2RP2003506 | F-NT2RP2003506 | 2893 | R-NT2RP2003506 | 7965 |
| NT2RP2003511 | F-NT2RP2003511 | 2894 | R-NT2RP2003511 | 7966 |
| NT2RP2003513 | F-NT2RP2003513 | 2895 | R-NT2RP2003513 | 7967 |
| NT2RP2003517 | F-NT2RP2003517 | 2896 | R-NT2RP2003517 | 7968 |
| NT2RP2003522 | F-NT2RP2003522 | 2897 | R-NT2RP2003522 | 7969 |
| NT2RP2003533 | F-NT2RP2003533 | 2898 | R-NT2RP2003533 | 7970 |
| NT2RP2003543 | F-NT2RP2003543 | 2899 | R-NT2RP2003543 | 7971 |
| NT2RP2003559 | F-NT2RP2003559 | 2900 | R-NT2RP2003559 | 7972 |
| NT2RP2003564 | F-NT2RP2003564 | 2901 | R-NT2RP2003564 | 7973 |
| NT2RP2003567 | F-NT2RP2003567 | 2902 | | |
| NT2RP2003581 | F-NT2RP2003581 | 2903 | R-NT2RP2003581 | 7974 |
| NT2RP2003596 | F-NT2RP2003596 | 2904 | R-NT2RP2003596 | 7975 |
| NT2RP2003604 | F-NT2RP2003604 | 2905 | R-NT2RP2003604 | 7976 |
| NT2RP2003629 | F-NT2RP2003629 | 2906 | R-NT2RP2003629 | 7977 |
| NT2RP2003643 | F-NT2RP2003643 | 2907 | R-NT2RP2003643 | 7978 |
| NT2RP2003668 | F-NT2RP2003668 | 2908 | R-NT2RP2003668 | 7979 |
| NT2RP2003687 | F-NT2RP2003687 | 2909 | R-NT2RP2003687 | 7980 |
| NT2RP2003691 | F-NT2RP2003691 | 2910 | R-NT2RP2003691 | 7981 |
| NT2RP2003702 | F-NT2RP2003702 | 2911 | R-NT2RP2003702 | 7982 |
| NT2RP2003704 | F-NT2RP2003704 | 2912 | R-NT2RP2003704 | 7983 |
| NT2RP2003706 | F-NT2RP2003706 | 2913 | R-NT2RP2003706 | 7984 |
| NT2RP2003713 | F-NT2RP2003713 | 2914 | R-NT2RP2003713 | 7985 |
| NT2RP2003714 | F-NT2RP2003714 | 2915 | R-NT2RP2003714 | 7986 |
| NT2RP2003727 | F-NT2RP2003727 | 2916 | R-nnnnnnnnnnnn | 7987 |
| NT2RP2003737 | F-NT2RP2003737 | 2917 | R-NT2RP2003737 | 7988 |
| NT2RP2003751 | F-NT2RP2003751 | 2918 | R-NT2RP2003751 | 7989 |
| NT2RP2003760 | F-NT2RP2003760 | 2919 | R-NT2RP2003760 | 7990 |
| NT2RP2003764 | F-NT2RP2003764 | 2920 | R-NT2RP2003764 | 7991 |
| NT2RP2003769 | F-NT2RP2003769 | 2921 | R-NT2RP2003769 | 7992 |
| NT2RP2003770 | F-NT2RP2003770 | 2922 | R-NT2RP2003770 | 7993 |
| NT2RP2003777 | F-NT2RP2003777 | 2923 | R-NT2RP2003777 | 7994 |
| NT2RP2003781 | F-NT2RP2003781 | 2924 | R-NT2RP2003781 | 7995 |
| NT2RP2003793 | F-NT2RP2003793 | 2925 | R-NT2RP2003793 | 7996 |
| NT2RP2003825 | F-NT2RP2003825 | 2926 | | |
| NT2RP2003840 | F-NT2RP2003840 | 2927 | R-NT2RP2003840 | 7997 |
| NT2RP2003857 | F-NT2RP2003857 | 2928 | R-NT2RP2003857 | 7998 |
| NT2RP2003859 | F-NT2RP2003859 | 2929 | R-NT2RP2003859 | 7999 |
| NT2RP2003871 | F-NT2RP2003871 | 2930 | R-NT2RP2003871 | 8000 |
| NT2RP2003885 | F-NT2RP2003885 | 2931 | R-NT2RP2003885 | 8001 |
| NT2RP2003912 | F-NT2RP2003912 | 2932 | R-NT2RP2003912 | 8002 |
| NT2RP2003952 | F-NT2RP2003952 | 2933 | R-NT2RP2003952 | 8003 |
| NT2RP2003968 | F-NT2RP2003968 | 2934 | R-NT2RP2003968 | 8004 |
| NT2RP2003976 | F-NT2RP2003976 | 2935 | R-NT2RP2003976 | 8005 |
| NT2RP2003981 | F-NT2RP2003981 | 2936 | R-NT2RP2003981 | 8006 |
| NT2RP2003984 | F-NT2RP2003984 | 2937 | R-NT2RP2003984 | 8007 |
| NT2RP2003986 | F-NT2RP2003986 | 2938 | R-NT2RP2003986 | 8008 |
| NT2RP2003988 | F-NT2RP2003988 | 2939 | R-NT2RP2003988 | 8009 |
| NT2RP2004013 | F-NT2RP2004013 | 2940 | | |
| NT2RP2004014 | F-NT2RP2004014 | 2941 | R-NT2RP2004014 | 8010 |
| NT2RP2004041 | F-NT2RP2004041 | 2942 | R-NT2RP2004041 | 8011 |
| NT2RP2004042 | F-NT2RP2004042 | 2943 | R-NT2RP2004042 | 8012 |
| NT2RP2004066 | F-NT2RP2004066 | 2944 | R-nnnnnnnnnnnn | 8013 |
| NT2RP2004081 | F-NT2RP2004081 | 2945 | R-NT2RP2004081 | 8014 |
| NT2RP2004098 | F-NT2RP2004098 | 2946 | R-NT2RP2004098 | 8015 |
| NT2RP2004124 | F-NT2RP2004124 | 2947 | R-NT2RP2004124 | 8016 |
| NT2RP2004142 | F-NT2RP2004142 | 2948 | R-NT2RP2004142 | 8017 |
| NT2RP2004152 | F-NT2RP2004152 | 2949 | R-NT2RP2004152 | 8018 |
| NT2RP2004165 | F-NT2RP2004165 | 2950 | R-NT2RP2004165 | 8019 |
| NT2RP2004170 | F-NT2RP2004170 | 2951 | R-NT2RP2004170 | 8020 |
| NT2RP2004172 | F-NT2RP2004172 | 2952 | R-NT2RP2004172 | 8021 |
| NT2RP2004187 | F-NT2RP2004187 | 2953 | R-NT2RP2004187 | 8022 |
| NT2RP2004194 | F-NT2RP2004194 | 2954 | R-NT2RP2004194 | 8023 |
| NT2RP2004196 | F-NT2RP2004196 | 2955 | R-NT2RP2004196 | 8024 |
| NT2RP2004207 | F-NT2RP2004207 | 2956 | R-NT2RP2004207 | 8025 |
| NT2RP2004226 | F-NT2RP2004226 | 2957 | R-NT2RP2004226 | 8026 |
| NT2RP2004232 | F-NT2RP2004232 | 2958 | R-NT2RP2004232 | 8027 |
| NT2RP2004239 | F-NT2RP2004239 | 2959 | R-NT2RP2004239 | 8028 |
| NT2RP2004240 | F-NT2RP2004240 | 2960 | R-NT2RP2004240 | 8029 |
| NT2RP2004242 | F-NT2RP2004242 | 2961 | R-NT2RP2004242 | 8030 |
| NT2RP2004245 | F-NT2RP2004245 | 2962 | R-NT2RP2004245 | 8031 |
| NT2RP2004270 | F-NT2RP2004270 | 2963 | R-NT2RP2004270 | 8032 |
| NT2RP2004300 | F-NT2RP2004300 | 2964 | R-NT2RP2004300 | 8033 |
| NT2RP2004316 | F-NT2RP2004316 | 2965 | R-NT2RP2004316 | 8034 |
| NT2RP2004321 | F-NT2RP2004321 | 2966 | R-NT2RP2004321 | 8035 |
| NT2RP2004339 | F-NT2RP2004339 | 2967 | R-NT2RP2004339 | 8036 |
| NT2RP2004347 | F-NT2RP2004347 | 2968 | R-NT2RP2004347 | 8037 |
| NT2RP2004364 | F-NT2RP2004364 | 2969 | R-NT2RP2004364 | 8038 |
| NT2RP2004365 | F-NT2RP2004365 | 2970 | R-NT2RP2004365 | 8039 |
| NT2RP2004366 | F-NT2RP2004366 | 2971 | R-NT2RP2004366 | 8040 |
| NT2RP2004373 | F-NT2RP2004373 | 2972 | R-NT2RP2004373 | 8041 |
| NT2RP2004389 | F-NT2RP2004389 | 2973 | R-NT2RP2004389 | 8042 |
| NT2RP2004392 | F-NT2RP2004392 | 2974 | R-NT2RP2004392 | 8043 |
| NT2RP2004396 | F-NT2RP2004396 | 2975 | R-NT2RP2004396 | 8044 |
| NT2RP2004399 | F-NT2RP2004399 | 2976 | R-NT2RP2004399 | 8045 |
| NT2RP2004400 | F-NT2RP2004400 | 2977 | R-NT2RP2004400 | 8046 |
| NT2RP2004412 | F-NT2RP2004412 | 2978 | R-NT2RP2004412 | 8047 |
| NT2RP2004425 | F-NT2RP2004425 | 2979 | R-NT2RP2004425 | 8048 |
| NT2RP2004463 | F-NT2RP2004463 | 2980 | | |
| NT2RP2004476 | F-NT2RP2004476 | 2981 | R-NT2RP2004476 | 8049 |
| NT2RP2004490 | F-NT2RP2004490 | 2982 | R-NT2RP2004490 | 8050 |
| NT2RP2004512 | F-NT2RP2004512 | 2983 | R-NT2RP2004512 | 8051 |
| NT2RP2004523 | F-NT2RP2004523 | 2984 | R-NT2RP2004523 | 8052 |
| NT2RP2004538 | F-NT2RP2004538 | 2985 | R-NT2RP2004538 | 8053 |
| NT2RP2004551 | F-NT2RP2004551 | 2986 | R-NT2RP2004551 | 8054 |
| NT2RP2004568 | F-NT2RP2004568 | 2987 | R-NT2RP2004568 | 8055 |
| NT2RP2004580 | F-NT2RP2004580 | 2988 | R-NT2RP2004580 | 8056 |
| NT2RP2004587 | F-NT2RP2004587 | 2989 | R-NT2RP2004587 | 8057 |
| NT2RP2004594 | F-NT2RP2004594 | 2990 | R-NT2RP2004594 | 8058 |
| NT2RP2004600 | F-NT2RP2004600 | 2991 | R-NT2RP2004600 | 8059 |
| NT2RP2004602 | F-NT2RP2004602 | 2992 | R-NT2RP2004602 | 8060 |
| NT2RP2004614 | F-NT2RP2004614 | 2993 | R-NT2RP2004614 | 8061 |
| NT2RP2004655 | F-NT2RP2004655 | 2994 | R-NT2RP2004655 | 8062 |
| NT2RP2004664 | F-NT2RP2004664 | 2995 | R-NT2RP2004664 | 8063 |
| NT2RP2004675 | F-NT2RP2004675 | 2996 | R-NT2RP2004675 | 8064 |
| NT2RP2004681 | F-NT2RP2004681 | 2997 | R-NT2RP2004681 | 8065 |
| NT2RP2004689 | F-NT2RP2004689 | 2998 | R-NT2RP2004689 | 8066 |
| NT2RP2004709 | F-NT2RP2004709 | 2999 | R-NT2RP2004709 | 8067 |
| NT2RP2004710 | F-NT2RP2004710 | 3000 | R-NT2RP2004710 | 8068 |
| NT2RP2004736 | F-NT2RP2004736 | 3001 | R-NT2RP2004736 | 8069 |
| NT2RP2004743 | F-NT2RP2004743 | 3002 | R-NT2RP2004743 | 8070 |
| NT2RP2004767 | F-NT2RP2004767 | 3003 | R-NT2RP2004767 | 8071 |
| NT2RP2004768 | F-NT2RP2004768 | 3004 | | |
| NT2RP2004775 | F-NT2RP2004775 | 3005 | R-NT2RP2004775 | 8072 |
| NT2RP2004791 | F-NT2RP2004791 | 3006 | R-NT2RP2004791 | 8073 |
| NT2RP2004799 | F-NT2RP2004799 | 3007 | R-NT2RP2004799 | 8074 |
| NT2RP2004802 | F-NT2RP2004802 | 3008 | R-NT2RP2004802 | 8075 |
| NT2RP2004816 | F-NT2RP2004816 | 3009 | R-NT2RP2004816 | 8076 |
| NT2RP2004841 | F-NT2RP2004841 | 3010 | R-NT2RP2004841 | 8077 |
| NT2RP2004861 | F-NT2RP2004861 | 3011 | R-NT2RP2004861 | 8078 |
| NT2RP2004897 | F-NT2RP2004897 | 3012 | R-NT2RP2004897 | 8079 |
| NT2RP2004933 | F-NT2RP2004933 | 3013 | | |
| NT2RP2004936 | F-NT2RP2004936 | 3014 | R-NT2RP2004936 | 8080 |
| NT2RP2004959 | F-NT2RP2004959 | 3015 | R-nnnnnnnnnnnn | 8081 |
| NT2RP2004961 | F-NT2RP2004961 | 3016 | R-NT2RP2004961 | 8082 |
| NT2RP2004962 | F-NT2RP2004962 | 3017 | R-NT2RP2004962 | 8083 |
| NT2RP2004967 | F-NT2RP2004967 | 3018 | R-NT2RP2004967 | 8084 |
| NT2RP2004978 | F-NT2RP2004978 | 3019 | R-NT2RP2004978 | 8085 |
| NT2RP2004982 | F-NT2RP2004982 | 3020 | R-NT2RP2004982 | 8086 |
| NT2RP2004985 | F-NT2RP2004985 | 3021 | R-NT2RP2004985 | 8087 |
| NT2RP2004999 | F-NT2RP2004999 | 3022 | R-NT2RP2004999 | 8088 |
| NT2RP2005000 | F-NT2RP2005000 | 3023 | R-NT2RP2005000 | 8089 |
| NT2RP2005001 | F-NT2RP2005001 | 3024 | R-NT2RP2005001 | 8090 |
| NT2RP2005003 | F-NT2RP2005003 | 3025 | R-NT2RP2005003 | 8091 |
| NT2RP2005012 | F-NT2RP2005012 | 3026 | R-nnnnnnnnnnnn | 8092 |
| NT2RP2005018 | F-NT2RP2005018 | 3027 | R-NT2RP2005018 | 8093 |
| NT2RP2005020 | F-NT2RP2005020 | 3028 | R-NT2RP2005020 | 8094 |
| NT2RP2005022 | F-NT2RP2005022 | 3029 | | |
| NT2RP2005031 | F-NT2RP2005031 | 3030 | R-NT2RP2005031 | 8095 |
| NT2RP2005037 | F-NT2RP2005037 | 3031 | R-NT2RP2005037 | 8096 |
| NT2RP2005038 | F-NT2RP2005038 | 3032 | R-NT2RP2005038 | 8097 |
| NT2RP2005108 | F-NT2RP2005108 | 3033 | R-NT2RP2005108 | 8098 |
| NT2RP2005116 | F-NT2RP2005116 | 3034 | R-NT2RP2005116 | 8099 |
| NT2RP2005126 | F-NT2RP2005126 | 3035 | R-NT2RP2005126 | 8100 |
| NT2RP2005139 | F-NT2RP2005139 | 3036 | R-NT2RP2005139 | 8101 |
| NT2RP2005140 | F-NT2RP2005140 | 3037 | R-NT2RP2005140 | 8102 |
| NT2RP2005144 | F-NT2RP2005144 | 3038 | R-NT2RP2005144 | 8103 |
| NT2RP2005147 | F-NT2RP2005147 | 3039 | R-NT2RP2005147 | 8104 |
| NT2RP2005159 | F-NT2RP2005159 | 3040 | R-NT2RP2005159 | 8105 |
| NT2RP2005162 | F-NT2RP2005162 | 3041 | R-NT2RP2005162 | 8106 |
| NT2RP2005168 | F-NT2RP2005168 | 3042 | R-NT2RP2005168 | 8107 |
| NT2RP2005204 | F-NT2RP2005204 | 3043 | R-NT2RP2005204 | 8108 |
| NT2RP2005227 | F-NT2RP2005227 | 3044 | R-NT2RP2005227 | 8109 |
| NT2RP2005239 | F-NT2RP2005239 | 3045 | R-NT2RP2005239 | 8110 |
| NT2RP2005254 | F-NT2RP2005254 | 3046 | R-NT2RP2005254 | 8111 |
| NT2RP2005270 | F-NT2RP2005270 | 3047 | R-NT2RP2005270 | 8112 |
| NT2RP2005276 | F-NT2RP2005276 | 3048 | R-NT2RP2005276 | 8113 |
| NT2RP2005287 | F-NT2RP2005287 | 3049 | R-NT2RP2005287 | 8114 |
| NT2RP2005288 | F-NT2RP2005288 | 3050 | R-NT2RP2005288 | 8115 |
| NT2RP2005289 | F-NT2RP2005289 | 3051 | R-NT2RP2005289 | 8116 |
| NT2RP2005293 | F-NT2RP2005293 | 3052 | R-NT2RP2005293 | 8117 |
| NT2RP2005315 | F-NT2RP2005315 | 3053 | R-NT2RP2005315 | 8118 |
| NT2RP2005325 | F-NT2RP2005325 | 3054 | R-NT2RP2005325 | 8119 |
| NT2RP2005336 | F-NT2RP2005336 | 3055 | R-NT2RP2005336 | 8120 |
| NT2RP2005344 | F-NT2RP2005344 | 3056 | R-NT2RP2005344 | 8121 |
| NT2RP2005354 | F-NT2RP2005354 | 3057 | R-NT2RP2005354 | 8122 |
| NT2RP2005358 | F-NT2RP2005358 | 3058 | | |
| NT2RP2005360 | F-NT2RP2005360 | 3059 | R-NT2RP2005360 | 8123 |
| NT2RP2005393 | F-NT2RP2005393 | 3060 | R-NT2RP2005393 | 8124 |
| NT2RP2005407 | F-NT2RP2005407 | 3061 | R-NT2RP2005407 | 8125 |
| NT2RP2005436 | F-NT2RP2005436 | 3062 | R-NT2RP2005436 | 8126 |
| NT2RP2005441 | F-NT2RP2005441 | 3063 | R-NT2RP2005441 | 8127 |
| NT2RP2005453 | F-NT2RP2005453 | 3064 | R-NT2RP2005453 | 8128 |
| NT2RP2005457 | F-NT2RP2005457 | 3065 | R-NT2RP2005457 | 8129 |
| NT2RP2005464 | F-NT2RP2005464 | 3066 | R-NT2RP2005464 | 8130 |
| NT2RP2005465 | F-NT2RP2005465 | 3067 | R-NT2RP2005465 | 8131 |
| NT2RP2005472 | F-NT2RP2005472 | 3068 | R-NT2RP2005472 | 8132 |
| NT2RP2005476 | F-NT2RP2005476 | 3069 | R-NT2RP2005476 | 8133 |
| NT2RP2005490 | F-NT2RP2005490 | 3070 | R-NT2RP2005490 | 8134 |
| NT2RP2005491 | F-NT2RP2005491 | 3071 | R-NT2RP2005491 | 8135 |
| NT2RP2005495 | F-NT2RP2005495 | 3072 | R-NT2RP2005495 | 8136 |
| NT2RP2005496 | F-NT2RP2005496 | 3073 | R-NT2RP2005496 | 8137 |
| NT2RP2005498 | F-NT2RP2005498 | 3074 | R-NT2RP2005498 | 8138 |
| NT2RP2005501 | F-NT2RP2005501 | 3075 | R-NT2RP2005501 | 8139 |
| NT2RP2005509 | F-NT2RP2005509 | 3076 | R-NT2RP2005509 | 8140 |
| NT2RP2005520 | F-NT2RP2005520 | 3077 | R-NT2RP2005520 | 8141 |
| NT2RP2005525 | F-NT2RP2005525 | 3078 | R-NT2RP2005525 | 8142 |
| NT2RP2005531 | F-NT2RP2005531 | 3079 | R-NT2RP2005531 | 8143 |
| NT2RP2005539 | F-NT2RP2005539 | 3080 | R-NT2RP2005539 | 8144 |
| NT2RP2005540 | F-NT2RP2005540 | 3081 | R-NT2RP2005540 | 8145 |
| NT2RP2005549 | F-NT2RP2005549 | 3082 | R-NT2RP2005549 | 8146 |
| NT2RP2005555 | F-NT2RP2005555 | 3083 | R-NT2RP2005555 | 8147 |
| NT2RP2005557 | F-NT2RP2005557 | 3084 | R-NT2RP2005557 | 8148 |
| NT2RP2005581 | F-NT2RP2005581 | 3085 | R-NT2RP2005581 | 8149 |
| NT2RP2005600 | F-NT2RP2005600 | 3086 | R-NT2RP2005600 | 8150 |
| NT2RP2005605 | F-NT2RP2005605 | 3087 | R-NT2RP2005605 | 8151 |
| NT2RP2005620 | F-NT2RP2005620 | 3088 | R-NT2RP2005620 | 8152 |
| NT2RP2005622 | F-NT2RP2005622 | 3089 | R-NT2RP2005622 | 8153 |
| NT2RP2005635 | F-NT2RP2005635 | 3090 | | |
| NT2RP2005637 | F-NT2RP2005637 | 3091 | R-NT2RP2005637 | 8154 |
| NT2RP2005640 | F-NT2RP2005640 | 3092 | R-NT2RP2005640 | 8155 |
| NT2RP2005645 | F-NT2RP2005645 | 3093 | R-NT2RP2005645 | 8156 |
| NT2RP2005651 | F-NT2RP2005651 | 3094 | R-NT2RP2005651 | 8157 |
| NT2RP2005654 | F-NT2RP2005654 | 3095 | R-NT2RP2005654 | 8158 |
| NT2RP2005669 | F-NT2RP2005669 | 3096 | R-NT2RP2005669 | 8159 |
| NT2RP2005675 | F-NT2RP2005675 | 3097 | R-NT2RP2005675 | 8160 |
| NT2RP2005683 | F-NT2RP2005683 | 3098 | R-NT2RP2005683 | 8161 |
| NT2RP2005690 | F-NT2RP2005690 | 3099 | R-NT2RP2005690 | 8162 |
| NT2RP2005694 | F-NT2RP2005694 | 3100 | R-NT2RP2005694 | 8163 |
| NT2RP2005701 | F-NT2RP2005701 | 3101 | R-NT2RP2005701 | 8164 |
| NT2RP2005712 | F-NT2RP2005712 | 3102 | R-NT2RP2005712 | 8165 |
| NT2RP2005719 | F-NT2RP2005719 | 3103 | R-NT2RP2005719 | 8166 |
| NT2RP2005722 | F-NT2RP2005722 | 3104 | R-NT2RP2005722 | 8167 |
| NT2RP2005723 | F-NT2RP2005723 | 3105 | R-NT2RP2005723 | 8168 |
| NT2RP2005726 | F-NT2RP2005726 | 3106 | R-NT2RP2005726 | 8169 |
| NT2RP2005732 | F-NT2RP2005732 | 3107 | | |
| NT2RP2005741 | F-NT2RP2005741 | 3108 | R-NT2RP2005741 | 8170 |
| NT2RP2005748 | F-NT2RP2005748 | 3109 | R-NT2RP2005748 | 8171 |
| NT2RP2005752 | F-NT2RP2005752 | 3110 | R-NT2RP2005752 | 8172 |
| NT2RP2005753 | F-NT2RP2005753 | 3111 | R-NT2RP2005753 | 8173 |
| NT2RP2005763 | F-NT2RP2005763 | 3112 | R-NT2RP2005763 | 8174 |
| NT2RP2005767 | F-NT2RP2005767 | 3113 | R-NT2RP2005767 | 8175 |
| NT2RP2005773 | F-NT2RP2005773 | 3114 | R-NT2RP2005773 | 8176 |
| NT2RP2005775 | F-NT2RP2005775 | 3115 | R-NT2RP2005775 | 8177 |
| NT2RP2005781 | F-NT2RP2005781 | 3116 | R-NT2RP2005781 | 8178 |
| NT2RP2005784 | F-NT2RP2005784 | 3117 | R-NT2RP2005784 | 8179 |
| NT2RP2005804 | F-NT2RP2005804 | 3118 | R-NT2RP2005804 | 8180 |
| NT2RP2005812 | F-NT2RP2005812 | 3119 | R-NT2RP2005812 | 8181 |
| NT2RP2005815 | F-NT2RP2005815 | 3120 | R-NT2RP2005815 | 8182 |
| NT2RP2005835 | F-NT2RP2005835 | 3121 | R-NT2RP2005835 | 8183 |
| NT2RP2005841 | F-NT2RP2005841 | 3122 | R-NT2RP2005841 | 8184 |
| NT2RP2005853 | F-NT2RP2005853 | 3123 | R-NT2RP2005853 | 8185 |
| NT2RP2005857 | F-NT2RP2005857 | 3124 | R-NT2RP2005857 | 8186 |
| NT2RP2005859 | F-NT2RP2005859 | 3125 | R-NT2RP2005859 | 8187 |
| NT2RP2005868 | F-NT2RP2005868 | 3126 | R-NT2RP2005868 | 8188 |
| NT2RP2005886 | F-NT2RP2005886 | 3127 | | |
| NT2RP2005890 | F-NT2RP2005890 | 3128 | R-NT2RP2005890 | 8189 |
| NT2RP2005901 | F-NT2RP2005901 | 3129 | R-NT2RP2005901 | 8190 |
| NT2RP2005908 | F-NT2RP2005908 | 3130 | R-NT2RP2005908 | 8191 |
| NT2RP2005933 | F-NT2RP2005933 | 3131 | R-NT2RP2005933 | 8192 |
| NT2RP2005942 | F-NT2RP2005942 | 3132 | R-NT2RP2005942 | 8193 |
| NT2RP2005980 | F-NT2RP2005980 | 3133 | R-NT2RP2005980 | 8194 |
| NT2RP2006023 | F-NT2RP2006023 | 3134 | R-NT2RP2006023 | 8195 |
| NT2RP2006038 | F-NT2RP2006038 | 3135 | R-NT2RP2006038 | 8196 |
| NT2RP2006043 | F-NT2RP2006043 | 3136 | R-NT2RP2006043 | 8197 |
| NT2RP2006052 | F-NT2RP2006052 | 3137 | R-NT2RP2006052 | 8198 |
| NT2RP2006069 | F-NT2RP2006069 | 3138 | R-NT2RP2006069 | 8199 |
| NT2RP2006071 | F-NT2RP2006071 | 3139 | R-NT2RP2006071 | 8200 |
| NT2RP2006098 | F-NT2RP2006098 | 3140 | R-NT2RP2006098 | 8201 |
| NT2RP2006100 | F-NT2RP2006100 | 3141 | R-NT2RP2006100 | 8202 |
| NT2RP2006103 | F-NT2RP2006103 | 3142 | R-NT2RP2006103 | 8203 |
| NT2RP2006106 | F-NT2RP2006106 | 3143 | | |
| NT2RP2006141 | F-NT2RP2006141 | 3144 | R-NT2RP2006141 | 8204 |
| NT2RP2006166 | F-NT2RP2006166 | 3145 | R-NT2RP2006166 | 8205 |
| NT2RP2006184 | F-NT2RP2006184 | 3146 | R-NT2RP2006184 | 8206 |
| NT2RP2006186 | F-NT2RP2006186 | 3147 | R-NT2RP2006186 | 8207 |
| NT2RP2006196 | F-NT2RP2006196 | 3148 | R-NT2RP2006196 | 8208 |
| NT2RP2006200 | F-NT2RP2006200 | 3149 | R-NT2RP2006200 | 8209 |
| NT2RP2006219 | F-NT2RP2006219 | 3150 | R-NT2RP2006219 | 8210 |
| NT2RP2006237 | F-NT2RP2006237 | 3151 | R-NT2RP2006237 | 8211 |
| NT2RP2006238 | F-NT2RP2006238 | 3152 | R-NT2RP2006238 | 8212 |
| NT2RP2006258 | F-NT2RP2006258 | 3153 | R-NT2RP2006258 | 8213 |
| NT2RP2006261 | F-NT2RP2006261 | 3154 | R-NT2RP2006261 | 8214 |
| NT2RP2006275 | F-NT2RP2006275 | 3155 | | |
| NT2RP2006312 | F-NT2RP2006312 | 3156 | R-NT2RP2006312 | 8215 |
| NT2RP2006320 | F-NT2RP2006320 | 3157 | R-NT2RP2006320 | 8216 |
| NT2RP2006321 | F-NT2RP2006321 | 3158 | R-NT2RP2006321 | 8217 |
| NT2RP2006323 | F-NT2RP2006323 | 3159 | R-NT2RP2006323 | 8218 |
| NT2RP2006333 | F-NT2RP2006333 | 3160 | R-NT2RP2006333 | 8219 |
| NT2RP2006334 | F-NT2RP2006334 | 3161 | R-NT2RP2006334 | 8220 |
| NT2RP2006365 | F-NT2RP2006365 | 3162 | R-NT2RP2006365 | 8221 |
| NT2RP2006393 | F-NT2RP2006393 | 3163 | R-NT2RP2006393 | 8222 |
| NT2RP2006436 | F-NT2RP2006436 | 3164 | R-NT2RP2006436 | 8223 |
| NT2RP2006441 | F-NT2RP2006441 | 3165 | R-NT2RP2006441 | 8224 |
| NT2RP2006454 | F-NT2RP2006454 | 3166 | R-NT2RP2006454 | 8225 |
| NT2RP2006456 | F-NT2RP2006456 | 3167 | R-NT2RP2006456 | 8226 |
| NT2RP2006464 | F-NT2RP2006464 | 3168 | R-NT2RP2006464 | 8227 |
| NT2RP2006467 | F-NT2RP2006467 | 3169 | R-NT2RP2006467 | 8228 |
| NT2RP2006472 | F-NT2RP2006472 | 3170 | R-NT2RP2006472 | 8229 |
| NT2RP2006534 | F-NT2RP2006534 | 3171 | R-NT2RP2006534 | 8230 |
| NT2RP2006554 | F-NT2RP2006554 | 3172 | R-NT2RP2006554 | 8231 |
| NT2RP2006565 | F-NT2RP2006565 | 3173 | R-NT2RP2006565 | 8232 |
| NT2RP2006571 | F-NT2RP2006571 | 3174 | R-NT2RP2006571 | 8233 |
| NT2RP2006573 | F-NT2RP2006573 | 3175 | R-nnnnnnnnnnnn | 8234 |
| NT2RP2006598 | F-NT2RP2006598 | 3176 | R-NT2RP2006598 | 8235 |
| NT2RP3000002 | F-NT2RP3000002 | 3177 | R-NT2RP3000002 | 8236 |
| NT2RP3000031 | F-NT2RP3000031 | 3178 | R-NT2RP3000031 | 8237 |
| NT2RP3000046 | F-NT2RP3000046 | 3179 | R-NT2RP3000046 | 8238 |
| NT2RP3000047 | F-NT2RP3000047 | 3180 | R-NT2RP3000047 | 8239 |
| NT2RP3000050 | F-NT2RP3000050 | 3181 | R-NT2RP3000050 | 8240 |
| NT2RP3000055 | F-NT2RP3000055 | 3182 | R-NT2RP3000055 | 8241 |
| NT2RP3000068 | F-NT2RP3000068 | 3183 | | |
| NT2RP3000072 | F-NT2RP3000072 | 3184 | R-NT2RP3000072 | 8242 |
| NT2RP3000080 | F-NT2RP3000080 | 3185 | R-NT2RP3000080 | 8243 |
| NT2RP3000085 | F-NT2RP3000085 | 3186 | R-NT2RP3000085 | 8244 |
| NT2RP3000092 | F-NT2RP3000092 | 3187 | | |
| NT2RP3000109 | F-NT2RP3000109 | 3188 | R-NT2RP3000109 | 8245 |
| NT2RP3000134 | F-NT2RP3000134 | 3189 | R-NT2RP3000134 | 8246 |
| NT2RP3000142 | F-NT2RP3000142 | 3190 | R-NT2RP3000142 | 8247 |
| NT2RP3000149 | F-NT2RP3000149 | 3191 | R-NT2RP3000149 | 8248 |
| NT2RP3000186 | F-NT2RP3000186 | 3192 | R-NT2RP3000186 | 8249 |
| NT2RP3000197 | F-NT2RP3000197 | 3193 | R-NT2RP3000197 | 8250 |
| NT2RP3000207 | F-NT2RP3000207 | 3194 | R-NT2RP3000207 | 8251 |
| NT2RP3000220 | F-NT2RP3000220 | 3195 | R-NT2RP3000220 | 8252 |
| NT2RP3000233 | F-NT2RP3000233 | 3196 | R-NT2RP3000233 | 8253 |
| NT2RP3000235 | F-NT2RP3000235 | 3197 | R-NT2RP3000235 | 8254 |
| NT2RP3000247 | F-NT2RP3000247 | 3198 | R-NT2RP3000247 | 8255 |
| NT2RP3000251 | F-NT2RP3000251 | 3199 | R-NT2RP3000251 | 8256 |
| NT2RP3000252 | F-NT2RP3000252 | 3200 | R-NT2RP3000252 | 8257 |
| NT2RP3000255 | F-NT2RP3000255 | 3201 | R-NT2RP3000255 | 8258 |
| NT2RP3000267 | F-NT2RP3000267 | 3202 | R-NT2RP3000267 | 8259 |
| NT2RP3000299 | F-NT2RP3000299 | 3203 | R-NT2RP3000299 | 8260 |
| NT2RP3000312 | F-NT2RP3000312 | 3204 | R-NT2RP3000312 | 8261 |
| NT2RP3000320 | F-NT2RP3000320 | 3205 | R-NT2RP3000320 | 8262 |
| NT2RP3000324 | F-NT2RP3000324 | 3206 | R-NT2RP3000324 | 8263 |
| NT2RP3000333 | F-NT2RP3000333 | 3207 | R-NT2RP3000333 | 8264 |
| NT2RP3000341 | F-NT2RP3000341 | 3208 | R-NT2RP3000341 | 8265 |
| NT2RP3000348 | F-NT2RP3000348 | 3209 | R-NT2RP3000348 | 8266 |
| NT2RP3000350 | F-NT2RP3000350 | 3210 | R-NT2RP3000350 | 8267 |
| NT2RP3000359 | F-NT2RP3000359 | 3211 | R-NT2RP3000359 | 8268 |
| NT2RP3000361 | F-NT2RP3000361 | 3212 | R-NT2RP3000361 | 8269 |
| NT2RP3000366 | F-NT2RP3000366 | 3213 | R-NT2RP3000366 | 8270 |
| NT2RP3000393 | F-NT2RP3000393 | 3214 | | |
| NT2RP3000397 | F-NT2RP3000397 | 3215 | R-NT2RP3000397 | 8271 |
| NT2RP3000403 | F-NT2RP3000403 | 3216 | R-NT2RP3000403 | 8272 |
| NT2RP3000418 | F-NT2RP3000418 | 3217 | R-NT2RP3000418 | 8273 |
| NT2RP3000433 | F-NT2RP3000433 | 3218 | R-NT2RP3000433 | 8274 |
| NT2RP3000439 | F-NT2RP3000439 | 3219 | R-NT2RP3000439 | 8275 |
| NT2RP3000441 | F-NT2RP3000441 | 3220 | R-NT2RP3000441 | 8276 |
| NT2RP3000449 | F-NT2RP3000449 | 3221 | R-NT2RP3000449 | 8277 |
| NT2RP3000451 | F-NT2RP3000451 | 3222 | R-NT2RP3000451 | 8278 |
| NT2RP3000456 | F-NT2RP3000456 | 3223 | R-NT2RP3000456 | 8279 |
| NT2RP3000484 | F-NT2RP3000484 | 3224 | R-NT2RP3000484 | 8280 |
| NT2RP3000487 | F-NT2RP3000487 | 3225 | R-NT2RP3000487 | 8281 |
| NT2RP3000512 | F-NT2RP3000512 | 3226 | R-NT2RP3000512 | 8282 |
| NT2RP3000526 | F-NT2RP3000526 | 3227 | R-NT2RP3000526 | 8283 |
| NT2RP3000527 | F-NT2RP3000527 | 3228 | R-NT2RP3000527 | 8284 |
| NT2RP3000531 | F-NT2RP3000531 | 3229 | R-NT2RP3000531 | 8285 |
| NT2RP3000542 | F-NT2RP3000542 | 3230 | R-NT2RP3000542 | 8286 |
| NT2RP3000561 | F-NT2RP3000561 | 3231 | R-NT2RP3000561 | 8287 |
| NT2RP3000562 | F-NT2RP3000562 | 3232 | R-NT2RP3000562 | 8288 |
| NT2RP3000578 | F-NT2RP3000578 | 3233 | R-NT2RP3000578 | 8289 |
| NT2RP3000582 | F-NT2RP3000582 | 3234 | R-NT2RP3000582 | 8290 |
| NT2RP3000584 | F-NT2RP3000584 | 3235 | R-NT2RP3000584 | 8291 |
| NT2RP3000590 | F-NT2RP3000590 | 3236 | R-NT2RP3000590 | 8292 |
| NT2RP3000592 | F-NT2RP3000592 | 3237 | R-NT2RP3000592 | 8293 |
| NT2RP3000596 | F-NT2RP3000596 | 3238 | R-nnnnnnnnnnnn | 8294 |
| NT2RP3000599 | F-NT2RP3000599 | 3239 | R-NT2RP3000599 | 8295 |
| NT2RP3000603 | F-NT2RP3000603 | 3240 | | |
| NT2RP3000605 | F-NT2RP3000605 | 3241 | R-NT2RP3000605 | 8296 |
| NT2RP3000622 | F-NT2RP3000622 | 3242 | R-NT2RP3000622 | 8297 |
| NT2RP3000624 | F-NT2RP3000624 | 3243 | R-NT2RP3000624 | 8298 |
| NT2RP3000628 | F-NT2RP3000628 | 3244 | R-NT2RP3000628 | 8299 |
| NT2RP3000632 | F-NT2RP3000632 | 3245 | R-NT2RP3000632 | 8300 |
| NT2RP3000644 | F-NT2RP3000644 | 3246 | R-NT2RP3000644 | 8301 |
| NT2RP3000661 | F-NT2RP3000661 | 3247 | R-NT2RP3000661 | 8302 |
| NT2RP3000665 | F-NT2RP3000665 | 3248 | R-NT2RP3000665 | 8303 |
| NT2RP3000685 | F-NT2RP3000685 | 3249 | R-NT2RP3000685 | 8304 |
| NT2RP3000690 | F-NT2RP3000690 | 3250 | R-NT2RP3000690 | 8305 |
| NT2RP3000736 | F-NT2RP3000736 | 3251 | R-NT2RP3000736 | 8306 |
| NT2RP3000739 | F-NT2RP3000739 | 3252 | | |
| NT2RP3000742 | F-NT2RP3000742 | 3253 | R-NT2RP3000742 | 8307 |
| NT2RP3000753 | F-NT2RP3000753 | 3254 | R-NT2RP3000753 | 8308 |
| NT2RP3000759 | F-NT2RP3000759 | 3255 | R-NT2RP3000759 | 8309 |
| NT2RP3000815 | F-NT2RP3000815 | 3256 | R-NT2RP3000815 | 8310 |
| NT2RP3000825 | F-NT2RP3000825 | 3257 | R-NT2RP3000825 | 8311 |
| NT2RP3000826 | F-NT2RP3000826 | 3258 | R-NT2RP3000826 | 8312 |
| NT2RP3000836 | F-NT2RP3000836 | 3259 | R-NT2RP3000836 | 8313 |
| NT2RP3000841 | F-NT2RP3000841 | 3260 | R-NT2RP3000841 | 8314 |
| NT2RP3000845 | F-NT2RP3000845 | 3261 | R-NT2RP3000845 | 8315 |
| NT2RP3000847 | F-NT2RP3000847 | 3262 | R-NT2RP3000847 | 8316 |
| NT2RP3000850 | F-NT2RP3000850 | 3263 | R-NT2RP3000850 | 8317 |
| NT2RP3000852 | F-NT2RP3000852 | 3264 | R-NT2RP3000852 | 8318 |
| NT2RP3000859 | F-NT2RP3000859 | 3265 | R-NT2RP3000859 | 8319 |
| NT2RP3000865 | F-NT2RP3000865 | 3266 | R-NT2RP3000865 | 8320 |
| NT2RP3000868 | F-NT2RP3000868 | 3267 | R-NT2RP3000868 | 8321 |
| NT2RP3000869 | F-NT2RP3000869 | 3268 | R-NT2RP3000869 | 8322 |
| NT2RP3000875 | F-NT2RP3000875 | 3269 | R-NT2RP3000875 | 8323 |
| NT2RP3000901 | F-NT2RP3000901 | 3270 | R-NT2RP3000901 | 8324 |
| NT2RP3000904 | F-NT2RP3000904 | 3271 | R-NT2RP3000904 | 8325 |
| NT2RP3000917 | F-NT2RP3000917 | 3272 | R-NT2RP3000917 | 8326 |
| NT2RP3000919 | F-NT2RP3000919 | 3273 | R-NT2RP3000919 | 8327 |
| NT2RP3000968 | F-NT2RP3000968 | 3274 | R-NT2RP3000968 | 8328 |
| NT2RP3000980 | F-NT2RP3000980 | 3275 | R-NT2RP3000980 | 8329 |
| NT2RP3000994 | F-NT2RP3000994 | 3276 | R-NT2RP3000994 | 8330 |
| NT2RP3001004 | F-NT2RP3001004 | 3277 | R-NT2RP3001004 | 8331 |
| NT2RP3001007 | F-NT2RP3001007 | 3278 | R-NT2RP3001007 | 8332 |
| NT2RP3001055 | F-NT2RP3001055 | 3279 | R-NT2RP3001055 | 8333 |
| NT2RP3001057 | F-NT2RP3001057 | 3280 | R-NT2RP3001057 | 8334 |
| NT2RP3001081 | F-NT2RP3001081 | 3281 | R-NT2RP3001081 | 8335 |
| NT2RP3001084 | F-NT2RP3001084 | 3282 | R-NT2RP3001084 | 8336 |
| NT2RP3001096 | F-NT2RP3001096 | 3283 | R-NT2RP3001096 | 8337 |
| NT2RP3001107 | F-NT2RP3001107 | 3284 | R-NT2RP3001107 | 8338 |
| NT2RP3001109 | F-NT2RP3001109 | 3285 | R-nnnnnnnnnnnn | 8339 |
| NT2RP3001111 | F-NT2RP3001111 | 3286 | R-NT2RP3001111 | 8340 |
| NT2RP3001113 | F-NT2RP3001113 | 3287 | R-NT2RP3001113 | 8341 |
| NT2RP3001115 | F-NT2RP3001115 | 3288 | R-NT2RP3001115 | 8342 |
| NT2RP3001116 | F-NT2RP3001116 | 3289 | R-NT2RP3001116 | 8343 |
| NT2RP3001119 | F-NT2RP3001119 | 3290 | R-NT2RP3001119 | 8344 |
| NT2RP3001120 | F-NT2RP3001120 | 3291 | R-NT2RP3001120 | 8345 |
| NT2RP3001126 | F-NT2RP3001126 | 3292 | R-NT2RP3001126 | 8346 |
| NT2RP3001133 | F-NT2RP3001133 | 3293 | R-NT2RP3001133 | 8347 |
| NT2RP3001140 | F-NT2RP3001140 | 3294 | R-NT2RP3001140 | 8348 |
| NT2RP3001147 | F-NT2RP3001147 | 3295 | R-NT2RP3001147 | 8349 |
| NT2RP3001150 | F-NT2RP3001150 | 3296 | R-NT2RP3001150 | 8350 |
| NT2RP3001155 | F-NT2RP3001155 | 3297 | R-NT2RP3001155 | 8351 |
| NT2RP3001176 | F-NT2RP3001176 | 3298 | R-NT2RP3001176 | 8352 |
| NT2RP3001214 | F-NT2RP3001214 | 3299 | R-NT2RP3001214 | 8353 |
| NT2RP3001216 | F-NT2RP3001216 | 3300 | R-NT2RP3001216 | 8354 |
| NT2RP3001221 | F-NT2RP3001221 | 3301 | R-NT2RP3001221 | 8355 |
| NT2RP3001232 | F-NT2RP3001232 | 3302 | R-NT2RP3001232 | 8356 |
| NT2RP3001236 | F-NT2RP3001236 | 3303 | R-NT2RP3001236 | 8357 |
| NT2RP3001239 | F-NT2RP3001239 | 3304 | R-NT2RP3001239 | 8358 |
| NT2RP3001245 | F-NT2RP3001245 | 3305 | R-NT2RP3001245 | 8359 |
| NT2RP3001253 | F-NT2RP3001253 | 3306 | R-NT2RP3001253 | 8360 |
| NT2RP3001260 | F-NT2RP3001260 | 3307 | R-NT2RP3001260 | 8361 |
| NT2RP3001268 | F-NT2RP3001268 | 3308 | R-NT2RP3001268 | 8362 |
| NT2RP3001272 | F-NT2RP3001272 | 3309 | R-NT2RP3001272 | 8363 |
| NT2RP3001274 | F-NT2RP3001274 | 3310 | R-NT2RP3001274 | 8364 |
| NT2RP3001281 | F-NT2RP3001281 | 3311 | R-NT2RP3001281 | 8365 |
| NT2RP3001297 | F-NT2RP3001297 | 3312 | | |
| NT2RP3001307 | F-NT2RP3001307 | 3313 | R-NT2RP3001307 | 8366 |
| NT2RP3001318 | F-NT2RP3001318 | 3314 | R-NT2RP3001318 | 8367 |
| NT2RP3001325 | F-NT2RP3001325 | 3315 | R-NT2RP3001325 | 8368 |
| NT2RP3001338 | F-NT2RP3001338 | 3316 | R-NT2RP3001338 | 8369 |
| NT2RP3001339 | F-NT2RP3001339 | 3317 | R-NT2RP3001339 | 8370 |
| NT2RP3001340 | F-NT2RP3001340 | 3318 | R-NT2RP3001340 | 8371 |
| NT2RP3001355 | F-NT2RP3001355 | 3319 | R-NT2RP3001355 | 8372 |
| NT2RP3001356 | F-NT2RP3001356 | 3320 | | |
| NT2RP3001374 | F-NT2RP3001374 | 3321 | R-NT2RP3001374 | 8373 |
| NT2RP3001383 | F-NT2RP3001383 | 3322 | R-NT2RP3001383 | 8374 |
| NT2RP3001384 | F-NT2RP3001384 | 3323 | R-NT2RP3001384 | 8375 |
| NT2RP3001392 | F-NT2RP3001392 | 3324 | R-NT2RP3001392 | 8376 |
| NT2RP3001396 | F-NT2RP3001396 | 3325 | R-NT2RP3001396 | 8377 |
| NT2RP3001398 | F-NT2RP3001398 | 3326 | R-NT2RP3001398 | 8378 |
| NT2RP3001399 | F-NT2RP3001399 | 3327 | R-NT2RP3001399 | 8379 |
| NT2RP3001407 | F-NT2RP3001407 | 3328 | R-NT2RP3001407 | 8380 |
| NT2RP3001420 | F-NT2RP3001420 | 3329 | R-NT2RP3001420 | 8381 |
| NT2RP3001426 | F-NT2RP3001426 | 3330 | R-NT2RP3001426 | 8382 |
| NT2RP3001427 | F-NT2RP3001427 | 3331 | R-NT2RP3001427 | 8383 |
| NT2RP3001428 | F-NT2RP3001428 | 3332 | R-nnnnnnnnnnnn | 8384 |
| NT2RP3001432 | F-NT2RP3001432 | 3333 | R-NT2RP3001432 | 8385 |
| NT2RP3001447 | F-NT2RP3001447 | 3334 | R-NT2RP3001447 | 8386 |
| NT2RP3001449 | F-NT2RP3001449 | 3335 | R-NT2RP3001449 | 8387 |
| NT2RP3001453 | F-NT2RP3001453 | 3336 | R-NT2RP3001453 | 8388 |
| NT2RP3001457 | F-NT2RP3001457 | 3337 | R-NT2RP3001457 | 8389 |
| NT2RP3001459 | F-NT2RP3001459 | 3338 | R-NT2RP3001459 | 8390 |
| NT2RP3001472 | F-NT2RP3001472 | 3339 | R-NT2RP3001472 | 8391 |
| NT2RP3001490 | F-NT2RP3001490 | 3340 | R-NT2RP3001490 | 8392 |
| NT2RP3001495 | F-NT2RP3001495 | 3341 | R-NT2RP3001495 | 8393 |
| NT2RP3001497 | F-NT2RP3001497 | 3342 | R-NT2RP3001497 | 8394 |
| NT2RP3001527 | F-NT2RP3001527 | 3343 | R-NT2RP3001527 | 8395 |
| NT2RP3001529 | F-NT2RP3001529 | 3344 | R-NT2RP3001529 | 8396 |
| NT2RP3001538 | F-NT2RP3001538 | 3345 | R-NT2RP3001538 | 8397 |
| NT2RP3001554 | F-NT2RP3001554 | 3346 | R-NT2RP3001554 | 8398 |
| NT2RP3001580 | F-NT2RP3001580 | 3347 | R-NT2RP3001580 | 8399 |
| NT2RP3001587 | F-NT2RP3001587 | 3348 | R-NT2RP3001587 | 8400 |
| NT2RP3001589 | F-NT2RP3001589 | 3349 | R-NT2RP3001589 | 8401 |
| NT2RP3001607 | F-NT2RP3001607 | 3350 | R-NT2RP3001607 | 8402 |
| NT2RP3001608 | F-NT2RP3001608 | 3351 | R-NT2RP3001608 | 8403 |
| NT2RP3001621 | F-NT2RP3001621 | 3352 | R-NT2RP3001621 | 8404 |
| NT2RP3001629 | F-NT2RP3001629 | 3353 | R-NT2RP3001629 | 8405 |
| NT2RP3001634 | F-NT2RP3001634 | 3354 | R-NT2RP3001634 | 8406 |
| NT2RP3001642 | F-NT2RP3001642 | 3355 | R-NT2RP3001642 | 8407 |
| NT2RP3001646 | F-NT2RP3001646 | 3356 | R-NT2RP3001646 | 8408 |
| NT2RP3001671 | F-NT2RP3001671 | 3357 | R-NT2RP3001671 | 8409 |
| NT2RP3001672 | F-NT2RP3001672 | 3358 | R-NT2RP3001672 | 8410 |
| NT2RP3001676 | F-NT2RP3001676 | 3359 | R-NT2RP3001676 | 8411 |
| NT2RP3001678 | F-NT2RP3001678 | 3360 | R-NT2RP3001678 | 8412 |
| NT2RP3001679 | F-NT2RP3001679 | 3361 | R-NT2RP3001679 | 8413 |
| NT2RP3001688 | F-NT2RP3001688 | 3362 | R-NT2RP3001688 | 8414 |
| NT2RP3001690 | F-NT2RP3001690 | 3363 | R-NT2RP3001690 | 8415 |
| NT2RP3001698 | F-NT2RP3001698 | 3364 | | |
| NT2RP3001708 | F-NT2RP3001708 | 3365 | R-NT2RP3001708 | 8416 |
| NT2RP3001712 | F-NT2RP3001712 | 3366 | R-NT2RP3001712 | 8417 |
| NT2RP3001716 | F-NT2RP3001716 | 3367 | R-NT2RP3001716 | 8418 |
| NT2RP3001724 | F-NT2RP3001724 | 3368 | R-NT2RP3001724 | 8419 |
| NT2RP3001727 | F-NT2RP3001727 | 3369 | | |
| NT2RP3001730 | F-NT2RP3001730 | 3370 | R-NT2RP3001730 | 8420 |
| NT2RP3001739 | F-NT2RP3001739 | 3371 | R-NT2RP3001739 | 8421 |
| NT2RP3001752 | F-NT2RP3001752 | 3372 | R-NT2RP3001752 | 8422 |
| NT2RP3001753 | F-NT2RP3001753 | 3373 | R-NT2RP3001753 | 8423 |
| NT2RP3001764 | F-NT2RP3001764 | 3374 | R-NT2RP3001764 | 8424 |
| NT2RP3001777 | F-NT2RP3001777 | 3375 | R-NT2RP3001777 | 8425 |
| NT2RP3001782 | F-NT2RP3001782 | 3376 | R-NT2RP3001782 | 8426 |
| NT2RP3001792 | F-NT2RP3001792 | 3377 | R-NT2RP3001792 | 8427 |
| NT2RP3001799 | F-NT2RP3001799 | 3378 | R-NT2RP3001799 | 8428 |
| NT2RP3001819 | F-NT2RP3001819 | 3379 | R-NT2RP3001819 | 8429 |
| NT2RP3001844 | F-NT2RP3001844 | 3380 | R-NT2RP3001844 | 8430 |
| NT2RP3001854 | F-NT2RP3001854 | 3381 | R-NT2RP3001854 | 8431 |
| NT2RP3001855 | F-NT2RP3001855 | 3382 | R-NT2RP3001855 | 8432 |
| NT2RP3001857 | F-NT2RP3001857 | 3383 | | |
| NT2RP3001896 | F-NT2RP3001896 | 3384 | R-NT2RP3001896 | 8433 |
| NT2RP3001898 | F-NT2RP3001898 | 3385 | R-NT2RP3001898 | 8434 |
| NT2RP3001915 | F-NT2RP3001915 | 3386 | R-NT2RP3001915 | 8435 |
| NT2RP3001926 | F-NT2RP3001926 | 3387 | R-NT2RP3001926 | 8436 |
| NT2RP3001929 | F-NT2RP3001929 | 3388 | R-NT2RP3001929 | 8437 |
| NT2RP3001931 | F-NT2RP3001931 | 3389 | R-NT2RP3001931 | 8438 |
| NT2RP3001938 | F-NT2RP3001938 | 3390 | R-NT2RP3001938 | 8439 |
| NT2RP3001943 | F-NT2RP3001943 | 3391 | R-NT2RP3001943 | 8440 |
| NT2RP3001944 | F-NT2RP3001944 | 3392 | R-NT2RP3001944 | 8441 |
| NT2RP3001969 | F-NT2RP3001969 | 3393 | R-NT2RP3001969 | 8442 |
| NT2RP3001989 | F-NT2RP3001989 | 3394 | R-NT2RP3001989 | 8443 |
| NT2RP3002002 | F-NT2RP3002002 | 3395 | R-NT2RP3002002 | 8444 |
| NT2RP3002004 | F-NT2RP3002004 | 3396 | R-NT2RP3002004 | 8445 |
| NT2RP3002007 | F-NT2RP3002007 | 3397 | R-NT2RP3002007 | 8446 |
| NT2RP3002014 | F-NT2RP3002014 | 3398 | R-NT2RP3002014 | 8447 |
| NT2RP3002033 | F-NT2RP3002033 | 3399 | R-NT2RP3002033 | 8448 |
| NT2RP3002045 | F-NT2RP3002045 | 3400 | R-NT2RP3002045 | 8449 |
| NT2RP3002054 | F-NT2RP3002054 | 3401 | R-NT2RP3002054 | 8450 |
| NT2RP3002056 | F-NT2RP3002056 | 3402 | R-NT2RP3002056 | 8451 |
| NT2RP3002057 | F-NT2RP3002057 | 3403 | R-NT2RP3002057 | 8452 |
| NT2RP3002062 | F-NT2RP3002062 | 3404 | R-NT2RP3002062 | 8453 |
| NT2RP3002063 | F-NT2RP3002063 | 3405 | R-nnnnnnnnnnnn | 8454 |
| NT2RP3002081 | F-NT2RP3002081 | 3406 | R-NT2RP3002081 | 8455 |
| NT2RP3002097 | F-NT2RP3002097 | 3407 | R-NT2RP3002097 | 8456 |
| NT2RP3002102 | F-NT2RP3002102 | 3408 | R-NT2RP3002102 | 8457 |
| NT2RP3002108 | F-NT2RP3002108 | 3409 | R-NT2RP3002108 | 8458 |
| NT2RP3002142 | F-NT2RP3002142 | 3410 | | |
| NT2RP3002146 | F-NT2RP3002146 | 3411 | R-NT2RP3002146 | 8459 |
| NT2RP3002147 | F-NT2RP3002147 | 3412 | R-NT2RP3002147 | 8460 |
| NT2RP3002151 | F-NT2RP3002151 | 3413 | R-NT2RP3002151 | 8461 |
| NT2RP3002163 | F-NT2RP3002163 | 3414 | R-NT2RP3002163 | 8462 |
| NT2RP3002165 | F-NT2RP3002165 | 3415 | R-NT2RP3002165 | 8463 |
| NT2RP3002166 | F-NT2RP3002166 | 3416 | R-NT2RP3002166 | 8464 |
| NT2RP3002173 | F-NT2RP3002173 | 3417 | R-NT2RP3002173 | 8465 |
| NT2RP3002181 | F-NT2RP3002181 | 3418 | R-NT2RP3002181 | 8466 |
| NT2RP3002244 | F-NT2RP3002244 | 3419 | R-NT2RP3002244 | 8467 |
| NT2RP3002248 | F-NT2RP3002248 | 3420 | R-NT2RP3002248 | 8468 |
| NT2RP3002255 | F-NT2RP3002255 | 3421 | R-NT2RP3002255 | 8469 |
| NT2RP3002273 | F-NT2RP3002273 | 3422 | R-NT2RP3002273 | 8470 |
| NT2RP3002276 | F-NT2RP3002276 | 3423 | R-NT2RP3002276 | 8471 |
| NT2RP3002303 | F-NT2RP3002303 | 3424 | R-NT2RP3002303 | 8472 |
| NT2RP3002304 | F-NT2RP3002304 | 3425 | R-NT2RP3002304 | 8473 |
| NT2RP3002330 | F-NT2RP3002330 | 3426 | R-NT2RP3002330 | 8474 |
| NT2RP3002343 | F-NT2RP3002343 | 3427 | R-NT2RP3002343 | 8475 |
| NT2RP3002351 | F-NT2RP3002351 | 3428 | R-NT2RP3002351 | 8476 |
| NT2RP3002352 | F-NT2RP3002352 | 3429 | R-NT2RP3002352 | 8477 |
| NT2RP3002377 | F-NT2RP3002377 | 3430 | | |
| NT2RP3002399 | F-NT2RP3002399 | 3431 | | |
| NT2RP3002402 | F-NT2RP3002402 | 3432 | | |
| NT2RP3002455 | F-NT2RP3002455 | 3433 | R-NT2RP3002455 | 8478 |
| NT2RP3002484 | F-NT2RP3002484 | 3434 | R-NT2RP3002484 | 8479 |
| NT2RP3002501 | F-NT2RP3002501 | 3435 | R-NT2RP3002501 | 8480 |
| NT2RP3002512 | F-NT2RP3002512 | 3436 | R-NT2RP3002512 | 8481 |
| NT2RP3002529 | F-NT2RP3002529 | 3437 | R-NT2RP3002529 | 8482 |
| NT2RP3002545 | F-NT2RP3002545 | 3438 | R-NT2RP3002545 | 8483 |
| NT2RP3002549 | F-NT2RP3002549 | 3439 | R-NT2RP3002549 | 8484 |
| NT2RP3002566 | F-NT2RP3002566 | 3440 | R-NT2RP3002566 | 8485 |
| NT2RP3002587 | F-NT2RP3002587 | 3441 | R-NT2RP3002587 | 8486 |
| NT2RP3002590 | F-NT2RP3002590 | 3442 | R-NT2RP3002590 | 8487 |
| NT2RP3002602 | F-NT2RP3002602 | 3443 | R-NT2RP3002602 | 8488 |
| NT2RP3002603 | F-NT2RP3002603 | 3444 | R-NT2RP3002603 | 8489 |
| NT2RP3002628 | F-NT2RP3002628 | 3445 | | |
| NT2RP3002631 | F-NT2RP3002631 | 3446 | R-NT2RP3002631 | 8490 |
| NT2RP3002650 | F-NT2RP3002650 | 3447 | | |
| NT2RP3002659 | F-NT2RP3002659 | 3448 | R-NT2RP3002659 | 8491 |
| NT2RP3002660 | F-NT2RP3002660 | 3449 | R-NT2RP3002660 | 8492 |
| NT2RP3002663 | F-NT2RP3002663 | 3450 | R-NT2RP3002663 | 8493 |
| NT2RP3002671 | F-NT2RP3002671 | 3451 | R-NT2RP3002671 | 8494 |
| NT2RP3002682 | F-NT2RP3002682 | 3452 | R-NT2RP3002682 | 8495 |
| NT2RP3002687 | F-NT2RP3002687 | 3453 | R-NT2RP3002687 | 8496 |
| NT2RP3002688 | F-NT2RP3002688 | 3454 | R-NT2RP3002688 | 8497 |
| NT2RP3002701 | F-NT2RP3002701 | 3455 | R-NT2RP3002701 | 8498 |
| NT2RP3002713 | F-NT2RP3002713 | 3456 | R-NT2RP3002713 | 8499 |
| NT2RP3002763 | F-NT2RP3002763 | 3457 | R-NT2RP3002763 | 8500 |
| NT2RP3002770 | F-NT2RP3002770 | 3458 | R-NT2RP3002770 | 8501 |
| NT2RP3002785 | F-NT2RP3002785 | 3459 | R-NT2RP3002785 | 8502 |
| NT2RP3002799 | F-NT2RP3002799 | 3460 | R-NT2RP3002799 | 8503 |
| NT2RP3002810 | F-NT2RP3002810 | 3461 | R-NT2RP3002810 | 8504 |
| NT2RP3002818 | F-NT2RP3002818 | 3462 | R-NT2RP3002818 | 8505 |
| NT2RP3002861 | F-NT2RP3002861 | 3463 | R-NT2RP3002861 | 8506 |
| NT2RP3002869 | F-NT2RP3002869 | 3464 | R-NT2RP3002869 | 8507 |
| NT2RP3002876 | F-NT2RP3002876 | 3465 | R-NT2RP3002876 | 8508 |
| NT2RP3002877 | F-NT2RP3002877 | 3466 | R-NT2RP3002877 | 8509 |
| NT2RP3002909 | F-NT2RP3002909 | 3467 | R-NT2RP3002909 | 8510 |
| NT2RP3002911 | F-NT2RP3002911 | 3468 | R-NT2RP3002911 | 8511 |
| NT2RP3002948 | F-NT2RP3002948 | 3469 | R-NT2RP3002948 | 8512 |
| NT2RP3002953 | F-NT2RP3002953 | 3470 | R-NT2RP3002953 | 8513 |
| NT2RP3002955 | F-NT2RP3002955 | 3471 | R-NT2RP3002955 | 8514 |
| NT2RP3002969 | F-NT2RP3002969 | 3472 | R-NT2RP3002969 | 8515 |
| NT2RP3002972 | F-NT2RP3002972 | 3473 | R-NT2RP3002972 | 8516 |
| NT2RP3002978 | F-NT2RP3002978 | 3474 | R-NT2RP3002978 | 8517 |
| NT2RP3002985 | F-NT2RP3002985 | 3475 | | |
| NT2RP3002988 | F-NT2RP3002988 | 3476 | R-NT2RP3002988 | 8518 |
| NT2RP3003008 | F-NT2RP3003008 | 3477 | R-NT2RP3003008 | 8519 |
| NT2RP3003032 | F-NT2RP3003032 | 3478 | R-NT2RP3003032 | 8520 |
| NT2RP3003059 | F-NT2RP3003059 | 3479 | R-NT2RP3003059 | 8521 |
| NT2RP3003061 | F-NT2RP3003061 | 3480 | R-NT2RP3003061 | 8522 |
| NT2RP3003068 | F-NT2RP3003068 | 3481 | R-NT2RP3003068 | 8523 |
| NT2RP3003071 | F-NT2RP3003071 | 3482 | R-NT2RP3003071 | 8524 |
| NT2RP3003078 | F-NT2RP3003078 | 3483 | R-NT2RP3003078 | 8525 |
| NT2RP3003101 | F-NT2RP3003101 | 3484 | R-NT2RP3003101 | 8526 |
| NT2RP3003121 | F-NT2RP3003121 | 3485 | R-NT2RP3003121 | 8527 |
| NT2RP3003133 | F-NT2RP3003133 | 3486 | R-NT2RP3003133 | 8528 |
| NT2RP3003138 | F-NT2RP3003138 | 3487 | R-NT2RP3003138 | 8529 |
| NT2RP3003139 | F-NT2RP3003139 | 3488 | R-NT2RP3003139 | 8530 |
| NT2RP3003145 | F-NT2RP3003145 | 3489 | | |
| NT2RP3003150 | F-NT2RP3003150 | 3490 | R-NT2RP3003150 | 8531 |
| NT2RP3003157 | F-NT2RP3003157 | 3491 | R-NT2RP3003157 | 8532 |
| NT2RP3003185 | F-NT2RP3003185 | 3492 | R-NT2RP3003185 | 8533 |
| NT2RP3003193 | F-NT2RP3003193 | 3493 | R-NT2RP3003193 | 8534 |
| NT2RP3003197 | F-NT2RP3003197 | 3494 | R-NT2RP3003197 | 8535 |
| NT2RP3003203 | F-NT2RP3003203 | 3495 | R-NT2RP3003203 | 8536 |
| NT2RP3003204 | F-NT2RP3003204 | 3496 | R-NT2RP3003204 | 8537 |
| NT2RP3003210 | F-NT2RP3003210 | 3497 | | |
| NT2RP3003212 | F-NT2RP3003212 | 3498 | R-NT2RP3003212 | 8538 |
| NT2RP3003230 | F-NT2RP3003230 | 3499 | R-NT2RP3003230 | 8539 |
| NT2RP3003242 | F-NT2RP3003242 | 3500 | R-NT2RP3003242 | 8540 |
| NT2RP3003251 | F-NT2RP3003251 | 3501 | R-NT2RP3003251 | 8541 |
| NT2RP3003264 | F-NT2RP3003264 | 3502 | R-NT2RP3003264 | 8542 |
| NT2RP3003278 | F-NT2RP3003278 | 3503 | R-NT2RP3003278 | 8543 |
| NT2RP3003282 | F-NT2RP3003282 | 3504 | R-NT2RP3003282 | 8544 |
| NT2RP3003290 | F-NT2RP3003290 | 3505 | R-NT2RP3003290 | 8545 |
| NT2RP3003301 | F-NT2RP3003301 | 3506 | R-NT2RP3003301 | 8546 |
| NT2RP3003302 | F-NT2RP3003302 | 3507 | R-NT2RP3003302 | 8547 |
| NT2RP3003311 | F-NT2RP3003311 | 3508 | R-NT2RP3003311 | 8548 |
| NT2RP3003313 | F-NT2RP3003313 | 3509 | R-NT2RP3003313 | 8549 |
| NT2RP3003327 | F-NT2RP3003327 | 3510 | R-NT2RP3003327 | 8550 |
| NT2RP3003330 | F-NT2RP3003330 | 3511 | R-NT2RP3003330 | 8551 |
| NT2RP3003344 | F-NT2RP3003344 | 3512 | R-NT2RP3003344 | 8552 |
| NT2RP3003346 | F-NT2RP3003346 | 3513 | R-NT2RP3003346 | 8553 |
| NT2RP3003353 | F-NT2RP3003353 | 3514 | R-NT2RP3003353 | 8554 |
| NT2RP3003377 | F-NT2RP3003377 | 3515 | R-NT2RP3003377 | 8555 |
| NT2RP3003384 | F-NT2RP3003384 | 3516 | R-NT2RP3003384 | 8556 |
| NT2RP3003385 | F-NT2RP3003385 | 3517 | R-NT2RP3003385 | 8557 |
| NT2RP3003403 | F-NT2RP3003403 | 3518 | R-NT2RP3003403 | 8558 |
| NT2RP3003409 | F-NT2RP3003409 | 3519 | R-NT2RP3003409 | 8559 |
| NT2RP3003411 | F-NT2RP3003411 | 3520 | R-NT2RP3003411 | 8560 |
| NT2RP3003427 | F-NT2RP3003427 | 3521 | R-NT2RP3003427 | 8561 |
| NT2RP3003433 | F-NT2RP3003433 | 3522 | R-NT2RP3003433 | 8562 |
| NT2RP3003464 | F-NT2RP3003464 | 3523 | R-NT2RP3003464 | 8563 |
| NT2RP3003490 | F-NT2RP3003490 | 3524 | R-NT2RP3003490 | 8564 |
| NT2RP3003491 | F-NT2RP3003491 | 3525 | R-NT2RP3003491 | 8565 |
| NT2RP3003500 | F-NT2RP3003500 | 3526 | R-NT2RP3003500 | 8566 |
| NT2RP3003543 | F-NT2RP3003543 | 3527 | R-NT2RP3003543 | 8567 |
| NT2RP3003552 | F-NT2RP3003552 | 3528 | R-NT2RP3003552 | 8568 |
| NT2RP3003555 | F-NT2RP3003555 | 3529 | R-NT2RP3003555 | 8569 |
| NT2RP3003564 | F-NT2RP3003564 | 3530 | R-NT2RP3003564 | 8570 |
| NT2RP3003572 | F-NT2RP3003572 | 3531 | R-NT2RP3003572 | 8571 |
| NT2RP3003576 | F-NT2RP3003576 | 3532 | R-NT2RP3003576 | 8572 |
| NT2RP3003589 | F-NT2RP3003589 | 3533 | R-NT2RP3003589 | 8573 |
| NT2RP3003621 | F-NT2RP3003621 | 3534 | | |
| NT2RP3003625 | F-NT2RP3003625 | 3535 | R-NT2RP3003625 | 8574 |
| NT2RP3003656 | F-NT2RP3003656 | 3536 | R-NT2RP3003656 | 8575 |
| NT2RP3003659 | F-NT2RP3003659 | 3537 | R-NT2RP3003659 | 8576 |
| NT2RP3003665 | F-NT2RP3003665 | 3538 | R-NT2RP3003665 | 8577 |
| NT2RP3003672 | F-NT2RP3003672 | 3539 | R-NT2RP3003672 | 8578 |
| NT2RP3003680 | F-NT2RP3003680 | 3540 | | |
| NT2RP3003686 | F-NT2RP3003686 | 3541 | R-NT2RP3003686 | 8579 |
| NT2RP3003701 | F-NT2RP3003701 | 3542 | R-NT2RP3003701 | 8580 |
| NT2RP3003716 | F-NT2RP3003716 | 3543 | R-NT2RP3003716 | 8581 |
| NT2RP3003726 | F-NT2RP3003726 | 3544 | R-NT2RP3003726 | 8582 |
| NT2RP3003746 | F-NT2RP3003746 | 3545 | R-NT2RP3003746 | 8583 |
| NT2RP3003795 | F-NT2RP3003795 | 3546 | R-NT2RP3003795 | 8584 |
| NT2RP3003799 | F-NT2RP3003799 | 3547 | R-NT2RP3003799 | 8585 |
| NT2RP3003800 | F-NT2RP3003800 | 3548 | R-NT2RP3003800 | 8586 |
| NT2RP3003805 | F-NT2RP3003805 | 3549 | R-NT2RP3003805 | 8587 |
| NT2RP3003809 | F-NT2RP3003809 | 3550 | R-NT2RP3003809 | 8588 |
| NT2RP3003819 | F-NT2RP3003819 | 3551 | R-NT2RP3003819 | 8589 |
| NT2RP3003825 | F-NT2RP3003825 | 3552 | R-NT2RP3003825 | 8590 |
| NT2RP3003828 | F-NT2RP3003828 | 3553 | R-NT2RP3003828 | 8591 |
| NT2RP3003831 | F-NT2RP3003831 | 3554 | R-NT2RP3003831 | 8592 |
| NT2RP3003833 | F-NT2RP3003833 | 3555 | R-NT2RP3003833 | 8593 |
| NT2RP3003842 | F-NT2RP3003842 | 3556 | R-NT2RP3003842 | 8594 |
| NT2RP3003846 | F-NT2RP3003846 | 3557 | R-NT2RP3003846 | 8595 |
| NT2RP3003870 | F-NT2RP3003870 | 3558 | R-NT2RP3003870 | 8596 |
| NT2RP3003876 | F-NT2RP3003876 | 3559 | R-NT2RP3003876 | 8597 |
| NT2RP3003914 | F-NT2RP3003914 | 3560 | R-NT2RP3003914 | 8598 |
| NT2RP3003918 | F-NT2RP3003918 | 3561 | R-NT2RP3003918 | 8599 |
| NT2RP3003932 | F-NT2RP3003932 | 3562 | R-NT2RP3003932 | 8600 |
| NT2RP3003989 | F-NT2RP3003989 | 3563 | R-NT2RP3003989 | 8601 |
| NT2RP3003992 | F-NT2RP3003992 | 3564 | R-NT2RP3003992 | 8602 |
| NT2RP3004013 | F-NT2RP3004013 | 3565 | R-NT2RP3004013 | 8603 |
| NT2RP3004016 | F-NT2RP3004016 | 3566 | R-NT2RP3004016 | 8604 |
| NT2RP3004041 | F-NT2RP3004041 | 3567 | R-NT2RP3004041 | 8605 |
| NT2RP3004051 | F-NT2RP3004051 | 3568 | R-NT2RP3004051 | 8606 |
| NT2RP3004070 | F-NT2RP3004070 | 3569 | R-NT2RP3004070 | 8607 |
| NT2RP3004078 | F-NT2RP3004078 | 3570 | R-NT2RP3004078 | 8608 |
| NT2RP3004093 | F-NT2RP3004093 | 3571 | R-NT2RP3004093 | 8609 |
| NT2RP3004095 | F-NT2RP3004095 | 3572 | R-NT2RP3004095 | 8610 |
| NT2RP3004110 | F-NT2RP3004110 | 3573 | R-NT2RP3004110 | 8611 |
| NT2RP3004125 | F-NT2RP3004125 | 3574 | R-NT2RP3004125 | 8612 |
| NT2RP3004145 | F-NT2RP3004145 | 3575 | R-NT2RP3004145 | 8613 |
| NT2RP3004148 | F-NT2RP3004148 | 3576 | R-NT2RP3004148 | 8614 |
| NT2RP3004155 | F-NT2RP3004155 | 3577 | R-NT2RP3004155 | 8615 |
| NT2RP3004189 | F-NT2RP3004189 | 3578 | | |
| NT2RP3004206 | F-NT2RP3004206 | 3579 | R-NT2RP3004206 | 8616 |
| NT2RP3004207 | F-NT2RP3004207 | 3580 | R-NT2RP3004207 | 8617 |
| NT2RP3004209 | F-NT2RP3004209 | 3581 | R-NT2RP3004209 | 8618 |
| NT2RP3004215 | F-NT2RP3004215 | 3582 | R-NT2RP3004215 | 8619 |
| NT2RP3004242 | F-NT2RP3004242 | 3583 | R-NT2RP3004242 | 8620 |
| NT2RP3004246 | F-NT2RP3004246 | 3584 | R-NT2RP3004246 | 8621 |
| NT2RP3004253 | F-NT2RP3004253 | 3585 | R-NT2RP3004253 | 8622 |
| NT2RP3004258 | F-NT2RP3004258 | 3586 | R-NT2RP3004258 | 8623 |
| NT2RP3004262 | F-NT2RP3004262 | 3587 | R-NT2RP3004262 | 8624 |
| NT2RP3004282 | F-NT2RP3004282 | 3588 | | |
| NT2RP3004332 | F-NT2RP3004332 | 3589 | | |
| NT2RP3004334 | F-NT2RP3004334 | 3590 | R-NT2RP3004334 | 8625 |
| NT2RP3004341 | F-NT2RP3004341 | 3591 | R-NT2RP3004341 | 8626 |
| NT2RP3004348 | F-NT2RP3004348 | 3592 | R-NT2RP3004348 | 8627 |
| NT2RP3004349 | F-NT2RP3004349 | 3593 | R-NT2RP3004349 | 8628 |
| NT2RP3004378 | F-NT2RP3004378 | 3594 | R-NT2RP3004378 | 8629 |
| NT2RP3004399 | F-NT2RP3004399 | 3595 | R-NT2RP3004399 | 8630 |
| NT2RP3004424 | F-NT2RP3004424 | 3596 | R-NT2RP3004424 | 8631 |
| NT2RP3004428 | F-NT2RP3004428 | 3597 | R-NT2RP3004428 | 8632 |
| NT2RP3004451 | F-NT2RP3004451 | 3598 | R-NT2RP3004451 | 8633 |
| NT2RP3004454 | F-NT2RP3004454 | 3599 | R-NT2RP3004454 | 8634 |
| NT2RP3004466 | F-NT2RP3004466 | 3600 | R-NT2RP3004466 | 8635 |
| NT2RP3004470 | F-NT2RP3004470 | 3601 | R-NT2RP3004470 | 8636 |
| NT2RP3004472 | F-NT2RP3004472 | 3602 | R-NT2RP3004472 | 8637 |
| NT2RP3004475 | F-NT2RP3004475 | 3603 | R-NT2RP3004475 | 8638 |
| NT2RP3004480 | F-NT2RP3004480 | 3604 | R-NT2RP3004480 | 8639 |
| NT2RP3004490 | F-NT2RP3004490 | 3605 | R-NT2RP3004490 | 8640 |
| NT2RP3004498 | F-NT2RP3004498 | 3606 | R-NT2RP3004498 | 8641 |
| NT2RP3004503 | F-NT2RP3004503 | 3607 | R-NT2RP3004503 | 8642 |
| NT2RP3004504 | F-NT2RP3004504 | 3608 | R-NT2RP3004504 | 8643 |
| NT2RP3004507 | F-NT2RP3004507 | 3609 | R-NT2RP3004507 | 8644 |
| NT2RP3004527 | F-NT2RP3004527 | 3610 | R-NT2RP3004527 | 8645 |
| NT2RP3004534 | F-NT2RP3004534 | 3611 | R-nnnnnnnnnnnn | 8646 |
| NT2RP3004539 | F-NT2RP3004539 | 3612 | | |
| NT2RP3004544 | F-NT2RP3004544 | 3613 | R-NT2RP3004544 | 8647 |
| NT2RP3004566 | F-NT2RP3004566 | 3614 | R-NT2RP3004566 | 8648 |
| NT2RP3004569 | F-NT2RP3004569 | 3615 | R-NT2RP3004569 | 8649 |
| NT2RP3004572 | F-NT2RP3004572 | 3616 | R-NT2RP3004572 | 8650 |
| NT2RP3004578 | F-NT2RP3004578 | 3617 | R-NT2RP3004578 | 8651 |
| NT2RP3004594 | F-NT2RP3004594 | 3618 | R-NT2RP3004594 | 8652 |
| NT2RP3004617 | F-NT2RP3004617 | 3619 | R-NT2RP3004617 | 8653 |
| NT2RP3004618 | F-NT2RP3004618 | 3620 | R-NT2RP3004618 | 8654 |
| NT2RP3004669 | F-NT2RP3004669 | 3621 | | |
| NT2RP3004670 | F-NT2RP3004670 | 3622 | R-NT2RP3004670 | 8655 |
| NT2RP4000008 | F-NT2RP4000008 | 3623 | R-NT2RP4000008 | 8656 |
| NT2RP4000023 | F-NT2RP4000023 | 3624 | R-NT2RP4000023 | 8657 |
| NT2RP4000035 | F-NT2RP4000035 | 3625 | R-NT2RP4000035 | 8658 |
| NT2RP4000049 | F-NT2RP4000049 | 3626 | R-NT2RP4000049 | 8659 |
| NT2RP4000051 | F-NT2RP4000051 | 3627 | R-NT2RP4000051 | 8660 |
| NT2RP4000078 | F-NT2RP4000078 | 3628 | R-NT2RP4000078 | 8661 |
| NT2RP4000102 | F-NT2RP4000102 | 3629 | R-NT2RP4000102 | 8662 |
| NT2RP4000109 | F-NT2RP4000109 | 3630 | R-NT2RP4000109 | 8663 |
| NT2RP4000111 | F-NT2RP4000111 | 3631 | | |
| NT2RP4000129 | F-NT2RP4000129 | 3632 | R-NT2RP4000129 | 8664 |
| NT2RP4000147 | F-NT2RP4000147 | 3633 | R-NT2RP4000147 | 8665 |
| NT2RP4000150 | F-NT2RP4000150 | 3634 | R-NT2RP4000150 | 8666 |
| NT2RP4000151 | F-NT2RP4000151 | 3635 | R-NT2RP4000151 | 8667 |
| NT2RP4000159 | F-NT2RP4000159 | 3636 | R-NT2RP4000159 | 8668 |
| NT2RP4000167 | F-NT2RP4000167 | 3637 | R-NT2RP4000167 | 8669 |
| NT2RP4000185 | F-NT2RP4000185 | 3638 | R-NT2RP4000185 | 8670 |
| NT2RP4000210 | F-NT2RP4000210 | 3639 | R-NT2RP4000210 | 8671 |
| NT2RP4000212 | F-NT2RP4000212 | 3640 | R-NT2RP4000212 | 8672 |
| NT2RP4000214 | F-NT2RP4000214 | 3641 | R-NT2RP4000214 | 8673 |
| NT2RP4000218 | F-NT2RP4000218 | 3642 | R-NT2RP4000218 | 8674 |
| NT2RP4000243 | F-NT2RP4000243 | 3643 | R-NT2RP4000243 | 8675 |
| NT2RP4000246 | F-NT2RP4000246 | 3644 | R-NT2RP4000246 | 8676 |
| NT2RP4000259 | F-NT2RP4000259 | 3645 | R-NT2RP4000259 | 8677 |
| NT2RP4000263 | F-NT2RP4000263 | 3646 | R-NT2RP4000263 | 8678 |
| NT2RP4000290 | F-NT2RP4000290 | 3647 | R-nnnnnnnnnnnn | 8679 |
| NT2RP4000312 | F-NT2RP4000312 | 3648 | R-NT2RP4000312 | 8680 |
| NT2RP4000321 | F-NT2RP4000321 | 3649 | R-NT2RP4000321 | 8681 |
| NT2RP4000323 | F-NT2RP4000323 | 3650 | R-NT2RP4000323 | 8682 |
| NT2RP4000355 | F-NT2RP4000355 | 3651 | R-NT2RP4000355 | 8683 |
| NT2RP4000360 | F-NT2RP4000360 | 3652 | R-NT2RP4000360 | 8684 |
| NT2RP4000367 | F-NT2RP4000367 | 3653 | R-NT2RP4000367 | 8685 |
| NT2RP4000370 | F-NT2RP4000370 | 3654 | R-NT2RP4000370 | 8686 |
| NT2RP4000376 | F-NT2RP4000376 | 3655 | R-NT2RP4000376 | 8687 |
| NT2RP4000381 | F-NT2RP4000381 | 3656 | R-NT2RP4000381 | 8688 |
| NT2RP4000398 | F-NT2RP4000398 | 3657 | | |
| NT2RP4000415 | F-NT2RP4000415 | 3658 | R-NT2RP4000415 | 8689 |
| NT2RP4000417 | F-NT2RP4000417 | 3659 | R-NT2RP4000417 | 8690 |
| NT2RP4000424 | F-NT2RP4000424 | 3660 | R-NT2RP4000424 | 8691 |
| NT2RP4000448 | F-NT2RP4000448 | 3661 | R-NT2RP4000448 | 8692 |
| NT2RP4000449 | F-NT2RP4000449 | 3662 | R-NT2RP4000449 | 8693 |
| NT2RP4000455 | F-NT2RP4000455 | 3663 | R-NT2RP4000455 | 8694 |
| NT2RP4000457 | F-NT2RP4000457 | 3664 | R-nnnnnnnnnnnn | 8695 |
| NT2RP4000480 | F-NT2RP4000480 | 3665 | R-NT2RP4000480 | 8696 |
| NT2RP4000481 | F-NT2RP4000481 | 3666 | R-nnnnnnnnnnnn | 8697 |
| NT2RP4000498 | F-NT2RP4000498 | 3667 | | |
| NT2RP4000500 | F-NT2RP4000500 | 3668 | R-NT2RP4000500 | 8698 |
| NT2RP4000515 | F-NT2RP4000515 | 3669 | R-NT2RP4000515 | 8699 |
| NT2RP4000517 | F-NT2RP4000517 | 3670 | R-NT2RP4000517 | 8700 |
| NT2RP4000518 | F-NT2RP4000518 | 3671 | R-NT2RP4000518 | 8701 |
| NT2RP4000519 | F-NT2RP4000519 | 3672 | R-NT2RP4000519 | 8702 |
| NT2RP4000524 | F-NT2RP4000524 | 3673 | R-NT2RP4000524 | 8703 |
| NT2RP4000528 | F-NT2RP4000528 | 3674 | R-NT2RP4000528 | 8704 |
| NT2RP4000541 | F-NT2RP4000541 | 3675 | R-NT2RP4000541 | 8705 |
| NT2RP4000556 | F-NT2RP4000556 | 3676 | R-NT2RP4000556 | 8706 |
| NT2RP4000560 | F-NT2RP4000560 | 3677 | | |
| NT2RP4000588 | F-NT2RP4000588 | 3678 | R-NT2RP4000588 | 8707 |
| NT2RP4000614 | F-NT2RP4000614 | 3679 | R-NT2RP4000614 | 8708 |
| NT2RP4000638 | F-NT2RP4000638 | 3680 | R-NT2RP4000638 | 8709 |
| NT2RP4000648 | F-NT2RP4000648 | 3681 | R-NT2RP4000648 | 8710 |
| NT2RP4000657 | F-NT2RP4000657 | 3682 | R-NT2RP4000657 | 8711 |
| NT2RP4000704 | F-NT2RP4000704 | 3683 | R-NT2RP4000704 | 8712 |
| NT2RP4000713 | F-NT2RP4000713 | 3684 | | |
| NT2RP4000724 | F-NT2RP4000724 | 3685 | R-NT2RP4000724 | 8713 |
| NT2RP4000728 | F-NT2RP4000728 | 3686 | R-NT2RP4000728 | 8714 |
| NT2RP4000737 | F-NT2RP4000737 | 3687 | | |
| NT2RP4000739 | F-NT2RP4000739 | 3688 | R-NT2RP4000739 | 8715 |
| NT2RP4000781 | F-NT2RP4000781 | 3689 | R-NT2RP4000781 | 8716 |
| NT2RP4000787 | F-NT2RP4000787 | 3690 | | |
| NT2RP4000817 | F-NT2RP4000817 | 3691 | R-NT2RP4000817 | 8717 |
| NT2RP4000833 | F-NT2RP4000833 | 3692 | R-NT2RP4000833 | 8718 |
| NT2RP4000837 | F-NT2RP4000837 | 3693 | R-NT2RP4000837 | 8719 |
| NT2RP4000839 | F-NT2RP4000839 | 3694 | | |
| NT2RP4000855 | F-NT2RP4000855 | 3695 | R-NT2RP4000855 | 8720 |
| NT2RP4000865 | F-NT2RP4000865 | 3696 | R-NT2RP4000865 | 8721 |
| NT2RP4000878 | F-NT2RP4000878 | 3697 | R-NT2RP4000878 | 8722 |
| NT2RP4000879 | F-NT2RP4000879 | 3698 | R-NT2RP4000879 | 8723 |
| NT2RP4000907 | F-NT2RP4000907 | 3699 | R-nnnnnnnnnnnn | 8724 |
| NT2RP4000915 | F-NT2RP4000915 | 3700 | R-nnnnnnnnnnnn | 8725 |
| NT2RP4000918 | F-NT2RP4000918 | 3701 | | |
| NT2RP4000925 | F-NT2RP4000925 | 3702 | R-NT2RP4000925 | 8726 |
| NT2RP4000927 | F-NT2RP4000927 | 3703 | R-nnnnnnnnnnnn | 8727 |
| NT2RP4000928 | F-NT2RP4000928 | 3704 | R-NT2RP4000928 | 8728 |
| NT2RP4000929 | F-NT2RP4000929 | 3705 | R-NT2RP4000929 | 8729 |
| NT2RP4000955 | F-NT2RP4000955 | 3706 | R-NT2RP4000955 | 8730 |
| NT2RP4000973 | F-NT2RP4000973 | 3707 | R-NT2RP4000973 | 8731 |
| NT2RP4000975 | F-NT2RP4000975 | 3708 | R-NT2RP4000975 | 8732 |
| NT2RP4000979 | F-NT2RP4000979 | 3709 | R-NT2RP4000979 | 8733 |
| NT2RP4000984 | F-NT2RP4000984 | 3710 | R-NT2RP4000984 | 8734 |
| NT2RP4000989 | F-NT2RP4000989 | 3711 | R-NT2RP4000989 | 8735 |
| NT2RP4000996 | F-NT2RP4000996 | 3712 | R-NT2RP4000996 | 8736 |
| NT2RP4000997 | F-NT2RP4000997 | 3713 | R-NT2RP4000997 | 8737 |
| NT2RP4001004 | F-NT2RP4001004 | 3714 | R-NT2RP4001004 | 8738 |
| NT2RP4001006 | F-NT2RP4001006 | 3715 | R-NT2RP4001006 | 8739 |
| NT2RP4001010 | F-NT2RP4001010 | 3716 | R-NT2RP4001010 | 8740 |
| NT2RP4001029 | F-NT2RP4001029 | 3717 | R-NT2RP4001029 | 8741 |
| NT2RP4001041 | F-NT2RP4001041 | 3718 | R-NT2RP4001041 | 8742 |
| NT2RP4001057 | F-NT2RP4001057 | 3719 | R-NT2RP4001057 | 8743 |
| NT2RP4001064 | F-NT2RP4001064 | 3720 | R-NT2RP4001064 | 8744 |
| NT2RP4001078 | F-NT2RP4001078 | 3721 | R-NT2RP4001078 | 8745 |
| NT2RP4001079 | F-NT2RP4001079 | 3722 | R-NT2RP4001079 | 8746 |
| NT2RP4001080 | F-NT2RP4001080 | 3723 | R-NT2RP4001080 | 8747 |
| NT2RP4001086 | F-NT2RP4001086 | 3724 | R-nnnnnnnnnnnn | 8748 |
| NT2RP4001095 | F-NT2RP4001095 | 3725 | R-NT2RP4001095 | 8749 |
| NT2RP4001100 | F-NT2RP4001100 | 3726 | R-NT2RP4001100 | 8750 |
| NT2RP4001117 | F-NT2RP4001117 | 3727 | R-NT2RP4001117 | 8751 |
| NT2RP4001122 | F-NT2RP4001122 | 3728 | R-NT2RP4001122 | 8752 |
| NT2RP4001126 | F-NT2RP4001126 | 3729 | R-NT2RP4001126 | 8753 |
| NT2RP4001138 | F-NT2RP4001138 | 3730 | R-NT2RP4001138 | 8754 |
| NT2RP4001143 | F-NT2RP4001143 | 3731 | R-NT2RP4001143 | 8755 |
| NT2RP4001148 | F-NT2RP4001148 | 3732 | R-NT2RP4001148 | 8756 |
| NT2RP4001149 | F-NT2RP4001149 | 3733 | R-NT2RP4001149 | 8757 |
| NT2RP4001150 | F-NT2RP4001150 | 3734 | R-NT2RP4001150 | 8758 |
| NT2RP4001159 | F-NT2RP4001159 | 3735 | R-NT2RP4001159 | 8759 |
| NT2RP4001174 | F-NT2RP4001174 | 3736 | R-NT2RP4001174 | 8760 |
| NT2RP4001206 | F-NT2RP4001206 | 3737 | R-nnnnnnnnnnnn | 8761 |
| NT2RP4001207 | F-NT2RP4001207 | 3738 | R-NT2RP4001207 | 8762 |
| NT2RP4001210 | F-NT2RP4001210 | 3739 | R-NT2RP4001210 | 8763 |
| NT2RP4001213 | F-NT2RP4001213 | 3740 | R-NT2RP4001213 | 8764 |
| NT2RP4001219 | F-NT2RP4001219 | 3741 | R-NT2RP4001219 | 8765 |
| NT2RP4001228 | F-NT2RP4001228 | 3742 | R-NT2RP4001228 | 8766 |
| NT2RP4001235 | F-NT2RP4001235 | 3743 | R-NT2RP4001235 | 8767 |
| NT2RP4001256 | F-NT2RP4001256 | 3744 | R-NT2RP4001256 | 8768 |
| NT2RP4001260 | F-NT2RP4001260 | 3745 | R-NT2RP4001260 | 8769 |
| NT2RP4001274 | F-NT2RP4001274 | 3746 | R-NT2RP4001274 | 8770 |
| NT2RP4001276 | F-NT2RP4001276 | 3747 | R-nnnnnnnnnnnn | 8771 |
| NT2RP4001313 | F-NT2RP4001313 | 3748 | R-NT2RP4001313 | 8772 |
| NT2RP4001315 | F-NT2RP4001315 | 3749 | R-NT2RP4001315 | 8773 |
| NT2RP4001336 | F-NT2RP4001336 | 3750 | | |
| NT2RP4001339 | F-NT2RP4001339 | 3751 | R-NT2RP4001339 | 8774 |
| NT2RP4001343 | F-NT2RP4001343 | 3752 | | |
| NT2RP4001345 | F-NT2RP4001345 | 3753 | R-NT2RP4001345 | 8775 |
| NT2RP4001351 | F-NT2RP4001351 | 3754 | R-NT2RP4001351 | 8776 |
| NT2RP4001353 | F-NT2RP4001353 | 3755 | R-NT2RP4001353 | 8777 |
| NT2RP4001372 | F-NT2RP4001372 | 3756 | R-NT2RP4001372 | 8778 |
| NT2RP4001373 | F-NT2RP4001373 | 3757 | R-NT2RP4001373 | 8779 |
| NT2RP4001375 | F-NT2RP4001375 | 3758 | R-NT2RP4001375 | 8780 |
| NT2RP4001379 | F-NT2RP4001379 | 3759 | R-NT2RP4001379 | 8781 |
| NT2RP4001389 | F-NT2RP4001389 | 3760 | R-NT2RP4001389 | 8782 |
| NT2RP4001407 | F-NT2RP4001407 | 3761 | R-NT2RP4001407 | 8783 |
| NT2RP4001414 | F-NT2RP4001414 | 3762 | R-NT2RP4001414 | 8784 |
| NT2RP4001433 | F-NT2RP4001433 | 3763 | R-NT2RP4001433 | 8785 |
| NT2RP4001442 | F-NT2RP4001442 | 3764 | R-NT2RP4001442 | 8786 |
| NT2RP4001447 | F-NT2RP4001447 | 3765 | R-NT2RP4001447 | 8787 |
| NT2RP4001474 | F-NT2RP4001474 | 3766 | R-NT2RP4001474 | 8788 |
| NT2RP4001483 | F-NT2RP4001483 | 3767 | R-NT2RP4001483 | 8789 |
| NT2RP4001498 | F-NT2RP4001498 | 3768 | R-NT2RP4001498 | 8790 |
| NT2RP4001502 | F-NT2RP4001502 | 3769 | R-NT2RP4001502 | 8791 |
| NT2RP4001507 | F-NT2RP4001507 | 3770 | R-NT2RP4001507 | 8792 |
| NT2RP4001524 | F-NT2RP4001524 | 3771 | R-NT2RP4001524 | 8793 |
| NT2RP4001529 | F-NT2RP4001529 | 3772 | R-NT2RP4001529 | 8794 |
| NT2RP4001547 | F-NT2RP4001547 | 3773 | R-NT2RP4001547 | 8795 |
| NT2RP4001551 | F-NT2RP4001551 | 3774 | R-nnnnnnnnnnnn | 8796 |
| NT2RP4001555 | F-NT2RP4001555 | 3775 | R-NT2RP4001555 | 8797 |
| NT2RP4001567 | F-NT2RP4001567 | 3776 | R-NT2RP4001567 | 8798 |
| NT2RP4001568 | F-NT2RP4001568 | 3777 | R-NT2RP4001568 | 8799 |
| NT2RP4001571 | F-NT2RP4001571 | 3778 | R-NT2RP4001571 | 8800 |
| NT2RP4001574 | F-NT2RP4001574 | 3779 | R-NT2RP4001574 | 8801 |
| NT2RP4001575 | F-NT2RP4001575 | 3780 | R-NT2RP4001575 | 8802 |
| NT2RP4001592 | F-NT2RP4001592 | 3781 | R-NT2RP4001592 | 8803 |
| NT2RP4001610 | F-NT2RP4001610 | 3782 | R-NT2RP4001610 | 8804 |
| NT2RP4001614 | F-NT2RP4001614 | 3783 | R-NT2RP4001614 | 8805 |
| NT2RP4001634 | F-NT2RP4001634 | 3784 | R-NT2RP4001634 | 8806 |
| NT2RP4001638 | F-NT2RP4001638 | 3785 | R-NT2RP4001638 | 8807 |
| NT2RP4001644 | F-NT2RP4001644 | 3786 | R-NT2RP4001644 | 8808 |
| NT2RP4001656 | F-NT2RP4001656 | 3787 | R-NT2RP4001656 | 8809 |
| NT2RP4001677 | F-NT2RP4001677 | 3788 | R-NT2RP4001677 | 8810 |
| NT2RP4001679 | F-NT2RP4001679 | 3789 | | |
| NT2RP4001696 | F-NT2RP4001696 | 3790 | R-NT2RP4001696 | 8811 |
| NT2RP4001725 | F-NT2RP4001725 | 3791 | R-NT2RP4001725 | 8812 |
| NT2RP4001730 | F-NT2RP4001730 | 3792 | R-nnnnnnnnnnnn | 8813 |
| NT2RP4001739 | F-NT2RP4001739 | 3793 | R-NT2RP4001739 | 8814 |
| NT2RP4001753 | F-NT2RP4001753 | 3794 | R-NT2RP4001753 | 8815 |
| NT2RP4001760 | F-NT2RP4001760 | 3795 | R-NT2RP4001760 | 8816 |
| NT2RP4001790 | F-NT2RP4001790 | 3796 | R-NT2RP4001790 | 8817 |
| NT2RP4001803 | F-NT2RP4001803 | 3797 | R-NT2RP4001803 | 8818 |
| NT2RP4001822 | F-NT2RP4001822 | 3798 | R-NT2RP4001822 | 8819 |
| NT2RP4001823 | F-NT2RP4001823 | 3799 | R-NT2RP4001823 | 8820 |
| NT2RP4001828 | F-NT2RP4001828 | 3800 | R-NT2RP4001828 | 8821 |
| NT2RP4001838 | F-NT2RP4001838 | 3801 | R-NT2RP4001838 | 8822 |
| NT2RP4001841 | F-NT2RP4001841 | 3802 | | |
| NT2RP4001849 | F-NT2RP4001849 | 3803 | R-NT2RP4001849 | 8823 |
| NT2RP4001861 | F-NT2RP4001861 | 3804 | | |
| NT2RP4001889 | F-NT2RP4001889 | 3805 | R-NT2RP4001889 | 8824 |
| NT2RP4001893 | F-NT2RP4001893 | 3806 | R-NT2RP4001893 | 8825 |
| NT2RP4001896 | F-NT2RP4001896 | 3807 | R-NT2RP4001896 | 8826 |
| NT2RP4001901 | F-NT2RP4001901 | 3808 | R-NT2RP4001901 | 8827 |
| NT2RP4001927 | F-NT2RP4001927 | 3809 | R-NT2RP4001927 | 8828 |
| NT2RP4001938 | F-NT2RP4001938 | 3810 | R-NT2RP4001938 | 8829 |
| NT2RP4001946 | F-NT2RP4001946 | 3811 | R-NT2RP4001946 | 8830 |
| NT2RP4001950 | F-NT2RP4001950 | 3812 | R-NT2RP4001950 | 8831 |
| NT2RP4001953 | F-NT2RP4001953 | 3813 | R-NT2RP4001953 | 8832 |
| NT2RP4001966 | F-NT2RP4001966 | 3814 | R-NT2RP4001966 | 8833 |
| NT2RP4001975 | F-NT2RP4001975 | 3815 | R-NT2RP4001975 | 8834 |
| NT2RP4002018 | F-NT2RP4002018 | 3816 | R-NT2RP4002018 | 8835 |
| NT2RP4002047 | F-NT2RP4002047 | 3817 | R-NT2RP4002047 | 8836 |
| NT2RP4002052 | F-NT2RP4002052 | 3818 | R-NT2RP4002052 | 8837 |
| NT2RP4002058 | F-NT2RP4002058 | 3819 | R-NT2RP4002058 | 8838 |
| NT2RP4002071 | F-NT2RP4002071 | 3820 | R-NT2RP4002071 | 8839 |
| NT2RP4002075 | F-NT2RP4002075 | 3821 | R-NT2RP4002075 | 8840 |
| NT2RP4002078 | F-NT2RP4002078 | 3822 | R-NT2RP4002078 | 8841 |
| NT2RP4002081 | F-NT2RP4002081 | 3823 | R-nnnnnnnnnnnn | 8842 |
| NT2RP4002083 | F-NT2RP4002083 | 3824 | R-NT2RP4002083 | 8843 |
| NT2RP4002408 | F-NT2RP4002408 | 3825 | R-NT2RP4002408 | 8844 |
| NT2RP4002791 | F-NT2RP4002791 | 3826 | R-NT2RP4002791 | 8845 |
| NT2RP4002888 | F-NT2RP4002888 | 3827 | R-NT2RP4002888 | 8846 |
| NT2RP4002905 | F-NT2RP4002905 | 3828 | R-NT2RP4002905 | 8847 |
| NT2RP5003459 | F-NT2RP5003459 | 3829 | | |
| NT2RP5003461 | F-NT2RP5003461 | 3830 | | |
| NT2RP5003477 | F-NT2RP5003477 | 3831 | | |
| NT2RP5003492 | F-NT2RP5003492 | 3832 | | |
| NT2RP5003500 | F-NT2RP5003500 | 3833 | | |
| NT2RP5003506 | F-NT2RP5003506 | 3834 | | |
| NT2RP5003512 | F-NT2RP5003512 | 3835 | | |
| NT2RP5003522 | F-NT2RP5003522 | 3836 | | |
| NT2RP5003524 | F-NT2RP5003524 | 3837 | | |
| NT2RP5003534 | F-NT2RP5003534 | 3838 | | |
| OVARC1000001 | F-OVARC1000001 | 3839 | R-OVARC1000001 | 8848 |
| OVARC1000004 | F-OVARC1000004 | 3840 | R-OVARC1000004 | 8849 |
| OVARC1000006 | F-OVARC1000006 | 3841 | R-OVARC1000006 | 8850 |
| OVARC1000013 | F-OVARC1000013 | 3842 | R-OVARC1000013 | 8851 |
| OVARC1000014 | F-OVARC1000014 | 3843 | R-OVARC1000014 | 8852 |
| OVARC1000017 | F-OVARC1000017 | 3844 | R-OVARC1000017 | 8853 |
| OVARC1000035 | F-OVARC1000035 | 3845 | R-OVARC1000035 | 8854 |
| OVARC1000058 | F-OVARC1000058 | 3846 | R-OVARC1000058 | 8855 |
| OVARC1000060 | F-OVARC1000060 | 3847 | R-OVARC1000060 | 8856 |
| OVARC1000068 | F-OVARC1000068 | 3848 | R-OVARC1000068 | 8857 |
| OVARC1000071 | F-OVARC1000071 | 3849 | R-OVARC1000071 | 8858 |
| OVARC1000085 | F-OVARC1000085 | 3850 | R-OVARC1000085 | 8859 |
| OVARC1000087 | F-OVARC1000087 | 3851 | R-nnnnnnnnnnnn | 8860 |
| OVARC1000091 | F-OVARC1000091 | 3852 | R-OVARC1000091 | 8861 |
| OVARC1000092 | F-OVARC1000092 | 3853 | R-OVARC1000092 | 8862 |
| OVARC1000106 | F-OVARC1000106 | 3854 | R-OVARC1000106 | 8863 |
| OVARC1000109 | F-OVARC1000109 | 3855 | | |
| OVARC1000113 | F-OVARC1000113 | 3856 | R-OVARC1000113 | 8864 |
| OVARC1000114 | F-OVARC1000114 | 3857 | R-OVARC1000114 | 8865 |
| OVARC1000133 | F-OVARC1000133 | 3858 | R-OVARC1000133 | 8866 |
| OVARC1000139 | F-OVARC1000139 | 3859 | | |
| OVARC1000145 | F-OVARC1000145 | 3860 | R-OVARC1000145 | 8867 |
| OVARC1000148 | F-OVARC1000148 | 3861 | R-OVARC1000148 | 8868 |
| OVARC1000151 | F-OVARC1000151 | 3862 | R-OVARC1000151 | 8869 |
| OVARC1000168 | F-OVARC1000168 | 3863 | R-OVARC1000168 | 8870 |
| OVARC1000191 | F-OVARC1000191 | 3864 | R-OVARC1000191 | 8871 |
| OVARC1000198 | F-OVARC1000198 | 3865 | R-OVARC1000198 | 8872 |
| OVARC1000209 | F-OVARC1000209 | 3866 | R-OVARC1000209 | 8873 |
| OVARC1000212 | F-OVARC1000212 | 3867 | R-OVARC1000212 | 8874 |
| OVARC1000240 | F-OVARC1000240 | 3868 | R-OVARC1000240 | 8875 |
| OVARC1000241 | F-OVARC1000241 | 3869 | R-OVARC1000241 | 8876 |
| OVARC1000288 | F-OVARC1000288 | 3870 | R-OVARC1000288 | 8877 |
| OVARC1000302 | F-OVARC1000302 | 3871 | R-OVARC1000302 | 8878 |
| OVARC1000304 | F-OVARC1000304 | 3872 | R-OVARC1000304 | 8879 |
| OVARC1000309 | F-OVARC1000309 | 3873 | R-OVARC1000309 | 8880 |
| OVARC1000321 | F-OVARC1000321 | 3874 | R-OVARC1000321 | 8881 |
| OVARC1000326 | F-OVARC1000326 | 3875 | R-OVARC1000326 | 8882 |
| OVARC1000335 | F-OVARC1000335 | 3876 | R-OVARC1000335 | 8883 |
| OVARC1000347 | F-OVARC1000347 | 3877 | R-OVARC1000347 | 8884 |
| OVARC1000384 | F-OVARC1000384 | 3878 | R-OVARC1000384 | 8885 |
| OVARC1000408 | F-OVARC1000408 | 3879 | R-OVARC1000408 | 8886 |
| OVARC1000411 | F-OVARC1000411 | 3880 | R-OVARC1000411 | 8887 |
| OVARC1000414 | F-OVARC1000414 | 3881 | R-OVARC1000414 | 8888 |
| OVARC1000420 | F-OVARC1000420 | 3882 | R-OVARC1000420 | 8889 |
| OVARC1000427 | F-OVARC1000427 | 3883 | R-OVARC1000427 | 8890 |
| OVARC1000431 | F-OVARC1000431 | 3884 | R-OVARC1000431 | 8891 |
| OVARC1000437 | F-OVARC1000437 | 3885 | R-OVARC1000437 | 8892 |
| OVARC1000440 | F-OVARC1000440 | 3886 | R-OVARC1000440 | 8893 |
| OVARC1000442 | F-OVARC1000442 | 3887 | R-OVARC1000442 | 8894 |
| OVARC1000443 | F-OVARC1000443 | 3888 | R-OVARC1000443 | 8895 |
| OVARC1000461 | F-OVARC1000461 | 3889 | R-OVARC1000461 | 8896 |
| OVARC1000465 | F-OVARC1000465 | 3890 | R-OVARC1000465 | 8897 |
| OVARC1000466 | F-OVARC1000466 | 3891 | R-OVARC1000466 | 8898 |
| OVARC1000473 | F-OVARC1000473 | 3892 | R-OVARC1000473 | 8899 |
| OVARC1000479 | F-OVARC1000479 | 3893 | R-OVARC1000479 | 8900 |
| OVARC1000486 | F-OVARC1000486 | 3894 | R-OVARC1000486 | 8901 |
| OVARC1000496 | F-OVARC1000496 | 3895 | R-OVARC1000496 | 8902 |
| OVARC1000520 | F-OVARC1000520 | 3896 | R-OVARC1000520 | 8903 |
| OVARC1000526 | F-OVARC1000526 | 3897 | R-OVARC1000526 | 8904 |
| OVARC1000533 | F-OVARC1000533 | 3898 | R-OVARC1000533 | 8905 |
| OVARC1000543 | F-OVARC1000543 | 3899 | R-OVARC1000543 | 8906 |
| OVARC1000556 | F-OVARC1000556 | 3900 | R-OVARC1000556 | 8907 |
| OVARC1000557 | F-OVARC1000557 | 3901 | R-OVARC1000557 | 8908 |
| OVARC1000564 | F-OVARC1000564 | 3902 | R-OVARC1000564 | 8909 |
| OVARC1000573 | F-OVARC1000573 | 3903 | R-OVARC1000573 | 8910 |
| OVARC1000576 | F-OVARC1000576 | 3904 | | |
| OVARC1000578 | F-OVARC1000578 | 3905 | R-OVARC1000578 | 8911 |
| OVARC1000588 | F-OVARC1000588 | 3906 | R-OVARC1000588 | 8912 |
| OVARC1000605 | F-OVARC1000605 | 3907 | R-OVARC1000605 | 8913 |
| OVARC1000622 | F-OVARC1000622 | 3908 | R-OVARC1000622 | 8914 |
| OVARC1000640 | F-OVARC1000640 | 3909 | R-OVARC1000640 | 8915 |
| OVARC1000649 | F-OVARC1000649 | 3910 | | |
| OVARC1000661 | F-OVARC1000661 | 3911 | R-OVARC1000661 | 8916 |
| OVARC1000678 | F-OVARC1000678 | 3912 | R-OVARC1000678 | 8917 |
| OVARC1000679 | F-OVARC1000679 | 3913 | R-nnnnnnnnnnnn | 8918 |
| OVARC1000681 | F-OVARC1000681 | 3914 | R-OVARC1000681 | 8919 |
| OVARC1000682 | F-OVARC1000682 | 3915 | | |
| OVARC1000689 | F-OVARC1000689 | 3916 | R-OVARC1000689 | 8920 |
| OVARC1000700 | F-OVARC1000700 | 3917 | R-OVARC1000700 | 8921 |
| OVARC1000703 | F-OVARC1000703 | 3918 | R-OVARC1000703 | 8922 |
| OVARC1000722 | F-OVARC1000722 | 3919 | | |
| OVARC1000730 | F-OVARC1000730 | 3920 | R-OVARC1000730 | 8923 |
| OVARC1000746 | F-OVARC1000746 | 3921 | R-OVARC1000746 | 8924 |
| OVARC1000769 | F-OVARC1000769 | 3922 | R-OVARC1000769 | 8925 |
| OVARC1000771 | F-OVARC1000771 | 3923 | R-OVARC1000771 | 8926 |
| OVARC1000781 | F-OVARC1000781 | 3924 | R-OVARC1000781 | 8927 |
| OVARC1000787 | F-OVARC1000787 | 3925 | R-OVARC1000787 | 8928 |
| OVARC1000800 | F-OVARC1000800 | 3926 | R-OVARC1000800 | 8929 |
| OVARC1000802 | F-OVARC1000802 | 3927 | R-OVARC1000802 | 8930 |
| OVARC1000834 | F-OVARC1000834 | 3928 | R-OVARC1000834 | 8931 |
| OVARC1000846 | F-OVARC1000846 | 3929 | R-OVARC1000846 | 8932 |
| OVARC1000850 | F-OVARC1000850 | 3930 | R-OVARC1000850 | 8933 |
| OVARC1000862 | F-OVARC1000862 | 3931 | R-OVARC1000862 | 8934 |
| OVARC1000876 | F-OVARC1000876 | 3932 | R-OVARC1000876 | 8935 |
| OVARC1000883 | F-OVARC1000883 | 3933 | R-OVARC1000883 | 8936 |
| OVARC1000885 | F-OVARC1000885 | 3934 | R-OVARC1000885 | 8937 |
| OVARC1000886 | F-OVARC1000886 | 3935 | R-OVARC1000886 | 8938 |
| OVARC1000890 | F-OVARC1000890 | 3936 | | |
| OVARC1000891 | F-OVARC1000891 | 3937 | R-OVARC1000891 | 8939 |
| OVARC1000897 | F-OVARC1000897 | 3938 | R-OVARC1000897 | 8940 |
| OVARC1000912 | F-OVARC1000912 | 3939 | R-OVARC1000912 | 8941 |
| OVARC1000915 | F-OVARC1000915 | 3940 | R-OVARC1000915 | 8942 |
| OVARC1000924 | F-OVARC1000924 | 3941 | R-OVARC1000924 | 8943 |
| OVARC1000936 | F-OVARC1000936 | 3942 | R-OVARC1000936 | 8944 |
| OVARC1000937 | F-OVARC1000937 | 3943 | R-OVARC1000937 | 8945 |
| OVARC1000945 | F-OVARC1000945 | 3944 | R-OVARC1000945 | 8946 |
| OVARC1000948 | F-OVARC1000948 | 3945 | R-OVARC1000948 | 8947 |
| OVARC1000959 | F-OVARC1000959 | 3946 | R-OVARC1000959 | 8948 |
| OVARC1000960 | F-OVARC1000960 | 3947 | R-OVARC1000960 | 8949 |
| OVARC1000964 | F-OVARC1000964 | 3948 | | |
| OVARC1000971 | F-OVARC1000971 | 3949 | R-OVARC1000971 | 8950 |
| OVARC1000984 | F-OVARC1000984 | 3950 | R-OVARC1000984 | 8951 |
| OVARC1000996 | F-OVARC1000996 | 3951 | R-OVARC1000996 | 8952 |
| OVARC1000999 | F-OVARC1000999 | 3952 | R-OVARC1000999 | 8953 |
| OVARC1001000 | F-OVARC1001000 | 3953 | R-OVARC1001000 | 8954 |
| OVARC1001004 | F-OVARC1001004 | 3954 | R-OVARC1001004 | 8955 |
| OVARC1001010 | F-OVARC1001010 | 3955 | R-OVARC1001010 | 8956 |
| OVARC1001011 | F-OVARC1001011 | 3956 | R-OVARC1001011 | 8957 |
| OVARC1001032 | F-OVARC1001032 | 3957 | R-OVARC1001032 | 8958 |
| OVARC1001034 | F-OVARC1001034 | 3958 | R-OVARC1001034 | 8959 |
| OVARC1001038 | F-OVARC1001038 | 3959 | R-OVARC1001038 | 8960 |
| OVARC1001040 | F-OVARC1001040 | 3960 | R-OVARC1001040 | 8961 |
| OVARC1001044 | F-OVARC1001044 | 3961 | R-OVARC1001044 | 8962 |
| OVARC1001051 | F-OVARC1001051 | 3962 | R-OVARC1001051 | 8963 |
| OVARC1001055 | F-OVARC1001055 | 3963 | R-OVARC1001055 | 8964 |
| OVARC1001062 | F-OVARC1001062 | 3964 | R-OVARC1001062 | 8965 |
| OVARC1001065 | F-OVARC1001065 | 3965 | | |
| OVARC1001068 | F-OVARC1001068 | 3966 | R-OVARC1001068 | 8966 |
| OVARC1001072 | F-OVARC1001072 | 3967 | R-OVARC1001072 | 8967 |
| OVARC1001074 | F-OVARC1001074 | 3968 | R-OVARC1001074 | 8968 |
| OVARC1001085 | F-OVARC1001085 | 3969 | R-OVARC1001085 | 8969 |
| OVARC1001092 | F-OVARC1001092 | 3970 | R-OVARC1001092 | 8970 |
| OVARC1001107 | F-OVARC1001107 | 3971 | | |
| OVARC1001113 | F-OVARC1001113 | 3972 | R-OVARC1001113 | 8971 |
| OVARC1001117 | F-OVARC1001117 | 3973 | R-OVARC1001117 | 8972 |
| OVARC1001118 | F-OVARC1001118 | 3974 | R-OVARC1001118 | 8973 |
| OVARC1001129 | F-OVARC1001129 | 3975 | R-OVARC1001129 | 8974 |
| OVARC1001154 | F-OVARC1001154 | 3976 | | |
| OVARC1001161 | F-OVARC1001161 | 3977 | R-OVARC1001161 | 8975 |
| OVARC1001162 | F-OVARC1001162 | 3978 | R-OVARC1001162 | 8976 |
| OVARC1001167 | F-OVARC1001167 | 3979 | R-OVARC1001167 | 8977 |
| OVARC1001169 | F-OVARC1001169 | 3980 | R-OVARC1001169 | 8978 |
| OVARC1001170 | F-OVARC1001170 | 3981 | R-OVARC1001170 | 8979 |
| OVARC1001171 | F-OVARC1001171 | 3982 | | |
| OVARC1001173 | F-OVARC1001173 | 3983 | R-OVARC1001173 | 8980 |
| OVARC1001176 | F-OVARC1001176 | 3984 | | |
| OVARC1001180 | F-OVARC1001180 | 3985 | R-OVARC1001180 | 8981 |
| OVARC1001188 | F-OVARC1001188 | 3986 | R-OVARC1001188 | 8982 |
| OVARC1001200 | F-OVARC1001200 | 3987 | R-OVARC1001200 | 8983 |
| OVARC1001232 | F-OVARC1001232 | 3988 | R-OVARC1001232 | 8984 |
| OVARC1001240 | F-OVARC1001240 | 3989 | R-OVARC1001240 | 8985 |
| OVARC1001243 | F-OVARC1001243 | 3990 | R-OVARC1001243 | 8986 |
| OVARC1001244 | F-OVARC1001244 | 3991 | | |
| OVARC1001261 | F-OVARC1001261 | 3992 | R-OVARC1001261 | 8987 |
| OVARC1001268 | F-OVARC1001268 | 3993 | R-OVARC1001268 | 8988 |
| OVARC1001270 | F-OVARC1001270 | 3994 | R-OVARC1001270 | 8989 |
| OVARC1001271 | F-OVARC1001271 | 3995 | R-OVARC1001271 | 8990 |
| OVARC1001282 | F-OVARC1001282 | 3996 | R-OVARC1001282 | 8991 |
| OVARC1001296 | F-OVARC1001296 | 3997 | R-OVARC1001296 | 8992 |
| OVARC1001306 | F-OVARC1001306 | 3998 | R-nnnnnnnnnnnn | 8993 |
| OVARC1001329 | F-OVARC1001329 | 3999 | R-OVARC1001329 | 8994 |
| OVARC1001330 | F-OVARC1001330 | 4000 | R-OVARC1001330 | 8995 |
| OVARC1001339 | F-OVARC1001339 | 4001 | R-OVARC1001339 | 8996 |
| OVARC1001341 | F-OVARC1001341 | 4002 | R-OVARC1001341 | 8997 |
| OVARC1001342 | F-OVARC1001342 | 4003 | R-OVARC1001342 | 8998 |
| OVARC1001344 | F-OVARC1001344 | 4004 | R-OVARC1001344 | 8999 |
| OVARC1001357 | F-OVARC1001357 | 4005 | R-OVARC1001357 | 9000 |
| OVARC1001360 | F-OVARC1001360 | 4006 | R-OVARC1001360 | 9001 |
| OVARC1001369 | F-OVARC1001369 | 4007 | R-OVARC1001369 | 9002 |
| OVARC1001372 | F-OVARC1001372 | 4008 | R-OVARC1001372 | 9003 |
| OVARC1001376 | F-OVARC1001376 | 4009 | R-OVARC1001376 | 9004 |
| OVARC1001381 | F-OVARC1001381 | 4010 | R-OVARC1001381 | 9005 |
| OVARC1001391 | F-OVARC1001391 | 4011 | R-OVARC1001391 | 9006 |
| OVARC1001399 | F-OVARC1001399 | 4012 | R-nnnnnnnnnnnn | 9007 |
| OVARC1001417 | F-OVARC1001417 | 4013 | R-OVARC1001417 | 9008 |
| OVARC1001419 | F-OVARC1001419 | 4014 | R-OVARC1001419 | 9009 |
| OVARC1001425 | F-OVARC1001425 | 4015 | R-OVARC1001425 | 9010 |
| OVARC1001436 | F-OVARC1001436 | 4016 | R-OVARC1001436 | 9011 |
| OVARC1001442 | F-OVARC1001442 | 4017 | R-OVARC1001442 | 9012 |
| OVARC1001453 | F-OVARC1001453 | 4018 | R-OVARC1001453 | 9013 |
| OVARC1001476 | F-OVARC1001476 | 4019 | R-OVARC1001476 | 9014 |
| OVARC1001480 | F-OVARC1001480 | 4020 | R-OVARC1001480 | 9015 |
| OVARC1001489 | F-OVARC1001489 | 4021 | R-OVARC1001489 | 9016 |
| OVARC1001496 | F-OVARC1001496 | 4022 | R-OVARC1001496 | 9017 |
| OVARC1001506 | F-OVARC1001506 | 4023 | R-OVARC1001506 | 9018 |
| OVARC1001525 | F-OVARC1001525 | 4024 | R-OVARC1001525 | 9019 |
| OVARC1001542 | F-OVARC1001542 | 4025 | R-OVARC1001542 | 9020 |
| OVARC1001547 | F-OVARC1001547 | 4026 | R-OVARC1001547 | 9021 |
| OVARC1001555 | F-OVARC1001555 | 4027 | | |
| OVARC1001577 | F-OVARC1001577 | 4028 | R-OVARC1001577 | 9022 |
| OVARC1001600 | F-OVARC1001600 | 4029 | R-OVARC1001600 | 9023 |
| OVARC1001610 | F-OVARC1001610 | 4030 | R-OVARC1001610 | 9024 |
| OVARC1001611 | F-OVARC1001611 | 4031 | R-OVARC1001611 | 9025 |
| OVARC1001615 | F-OVARC1001615 | 4032 | R-OVARC1001615 | 9026 |
| OVARC1001668 | F-OVARC1001668 | 4033 | R-OVARC1001668 | 9027 |
| OVARC1001702 | F-OVARC1001702 | 4034 | R-OVARC1001702 | 9028 |
| OVARC1001703 | F-OVARC1001703 | 4035 | R-OVARC1001703 | 9029 |
| OVARC1001711 | F-OVARC1001711 | 4036 | R-OVARC1001711 | 9030 |
| OVARC1001713 | F-OVARC1001713 | 4037 | | |
| OVARC1001726 | F-OVARC1001726 | 4038 | R-OVARC1001726 | 9031 |
| OVARC1001731 | F-OVARC1001731 | 4039 | R-OVARC1001731 | 9032 |
| OVARC1001745 | F-OVARC1001745 | 4040 | R-OVARC1001745 | 9033 |
| OVARC1001762 | F-OVARC1001762 | 4041 | R-nnnnnnnnnnnn | 9034 |
| OVARC1001766 | F-OVARC1001766 | 4042 | R-OVARC1001766 | 9035 |
| OVARC1001767 | F-OVARC1001767 | 4043 | R-nnnnnnnnnnnn | 9036 |
| OVARC1001768 | F-OVARC1001768 | 4044 | R-OVARC1001768 | 9037 |
| OVARC1001791 | F-OVARC1001791 | 4045 | R-OVARC1001791 | 9038 |
| OVARC1001795 | F-OVARC1001795 | 4046 | R-OVARC1001795 | 9039 |
| OVARC1001802 | F-OVARC1001802 | 4047 | R-OVARC1001802 | 9040 |
| OVARC1001805 | F-OVARC1001805 | 4048 | R-OVARC1001805 | 9041 |
| OVARC1001809 | F-OVARC1001809 | 4049 | | |
| OVARC1001812 | F-OVARC1001812 | 4050 | R-OVARC1001812 | 9042 |
| OVARC1001813 | F-OVARC1001813 | 4051 | R-OVARC1001813 | 9043 |
| OVARC1001820 | F-OVARC1001820 | 4052 | R-OVARC1001820 | 9044 |
| OVARC1001828 | F-OVARC1001828 | 4053 | R-OVARC1001828 | 9045 |
| OVARC1001846 | F-OVARC1001846 | 4054 | R-OVARC1001846 | 9046 |
| OVARC1001861 | F-OVARC1001861 | 4055 | R-OVARC1001861 | 9047 |
| OVARC1001873 | F-OVARC1001873 | 4056 | R-OVARC1001873 | 9048 |
| OVARC1001879 | F-OVARC1001879 | 4057 | R-OVARC1001879 | 9049 |
| OVARC1001880 | F-OVARC1001880 | 4058 | R-OVARC1001880 | 9050 |
| OVARC1001883 | F-OVARC1001883 | 4059 | R-OVARC1001883 | 9051 |
| OVARC1001900 | F-OVARC1001900 | 4060 | R-OVARC1001900 | 9052 |
| OVARC1001901 | F-OVARC1001901 | 4061 | R-OVARC1001901 | 9053 |
| OVARC1001911 | F-OVARC1001911 | 4062 | R-OVARC1001911 | 9054 |
| OVARC1001916 | F-OVARC1001916 | 4063 | R-OVARC1001916 | 9055 |
| OVARC1001928 | F-OVARC1001928 | 4064 | R-OVARC1001928 | 9056 |
| OVARC1001942 | F-OVARC1001942 | 4065 | R-OVARC1001942 | 9057 |
| OVARC1001943 | F-OVARC1001943 | 4066 | R-OVARC1001943 | 9058 |
| OVARC1001949 | F-OVARC1001949 | 4067 | R-OVARC1001949 | 9059 |
| OVARC1001950 | F-OVARC1001950 | 4068 | R-OVARC1001950 | 9060 |
| OVARC1001987 | F-OVARC1001987 | 4069 | R-OVARC1001987 | 9061 |
| OVARC1001989 | F-OVARC1001989 | 4070 | R-OVARC1001989 | 9062 |
| OVARC1002044 | F-OVARC1002044 | 4071 | R-OVARC1002044 | 9063 |
| OVARC1002050 | F-OVARC1002050 | 4072 | R-OVARC1002050 | 9064 |
| OVARC1002066 | F-OVARC1002066 | 4073 | R-OVARC1002066 | 9065 |
| OVARC1002082 | F-OVARC1002082 | 4074 | R-OVARC1002082 | 9066 |
| OVARC1002107 | F-OVARC1002107 | 4075 | R-OVARC1002107 | 9067 |
| OVARC1002112 | F-OVARC1002112 | 4076 | | |
| OVARC1002127 | F-OVARC1002127 | 4077 | R-OVARC1002127 | 9068 |
| OVARC1002138 | F-OVARC1002138 | 4078 | R-OVARC1002138 | 9069 |
| OVARC1002143 | F-OVARC1002143 | 4079 | R-OVARC1002143 | 9070 |
| OVARC1002156 | F-OVARC1002156 | 4080 | R-OVARC1002156 | 9071 |
| OVARC1002158 | F-OVARC1002158 | 4081 | R-OVARC1002158 | 9072 |
| OVARC1002165 | F-OVARC1002165 | 4082 | R-OVARC1002165 | 9073 |
| OVARC1002182 | F-OVARC1002182 | 4083 | R-OVARC1002182 | 9074 |
| PLACE1000004 | F-PLACE1000004 | 4084 | R-PLACE1000004 | 9075 |
| PLACE1000005 | F-PLACE1000005 | 4085 | R-PLACE1000005 | 9076 |
| PLACE1000007 | F-PLACE1000007 | 4086 | R-PLACE1000007 | 9077 |
| PLACE1000014 | F-PLACE1000014 | 4087 | R-PLACE1000014 | 9078 |
| PLACE1000031 | F-PLACE1000031 | 4088 | R-PLACE1000031 | 9079 |
| PLACE1000040 | F-PLACE1000040 | 4089 | R-PLACE1000040 | 9080 |
| PLACE1000048 | F-PLACE1000048 | 4090 | R-PLACE1000048 | 9081 |
| PLACE1000050 | F-PLACE1000050 | 4091 | R-PLACE1000050 | 9082 |
| PLACE1000061 | F-PLACE1000061 | 4092 | R-PLACE1000061 | 9083 |
| PLACE1000066 | F-PLACE1000066 | 4093 | R-PLACE1000066 | 9084 |
| PLACE1000078 | F-PLACE1000078 | 4094 | R-PLACE1000078 | 9085 |
| PLACE1000081 | F-PLACE1000081 | 4095 | R-PLACE1000081 | 9086 |
| PLACE1000094 | F-PLACE1000094 | 4096 | R-PLACE1000094 | 9087 |
| PLACE1000133 | F-PLACE1000133 | 4097 | R-PLACE1000133 | 9088 |
| PLACE1000142 | F-PLACE1000142 | 4098 | R-PLACE1000142 | 9089 |
| PLACE1000184 | F-PLACE1000184 | 4099 | R-PLACE1000184 | 9090 |
| PLACE1000185 | F-PLACE1000185 | 4100 | R-PLACE1000185 | 9091 |
| PLACE1000213 | F-PLACE1000213 | 4101 | R-PLACE1000213 | 9092 |
| PLACE1000214 | F-PLACE1000214 | 4102 | R-PLACE1000214 | 9093 |
| PLACE1000236 | F-PLACE1000236 | 4103 | R-PLACE1000236 | 9094 |
| PLACE1000246 | F-PLACE1000246 | 4104 | R-PLACE1000246 | 9095 |
| PLACE1000292 | F-PLACE1000292 | 4105 | R-PLACE1000292 | 9096 |
| PLACE1000308 | F-PLACE1000308 | 4106 | | |
| PLACE1000332 | F-PLACE1000332 | 4107 | R-PLACE1000332 | 9097 |
| PLACE1000347 | F-PLACE1000347 | 4108 | R-PLACE1000347 | 9098 |
| PLACE1000374 | F-PLACE1000374 | 4109 | R-PLACE1000374 | 9099 |
| PLACE1000380 | F-PLACE1000380 | 4110 | R-PLACE1000380 | 9100 |
| PLACE1000383 | F-PLACE1000383 | 4111 | R-PLACE1000383 | 9101 |
| PLACE1000401 | F-PLACE1000401 | 4112 | R-PLACE1000401 | 9102 |
| PLACE1000406 | F-PLACE1000406 | 4113 | R-PLACE1000406 | 9103 |
| PLACE1000420 | F-PLACE1000420 | 4114 | R-PLACE1000420 | 9104 |
| PLACE1000421 | F-PLACE1000421 | 4115 | R-PLACE1000421 | 9105 |
| PLACE1000424 | F-PLACE1000424 | 4116 | R-PLACE1000424 | 9106 |
| PLACE1000435 | F-PLACE1000435 | 4117 | R-PLACE1000435 | 9107 |
| PLACE1000444 | F-PLACE1000444 | 4118 | R-PLACE1000444 | 9108 |
| PLACE1000453 | F-PLACE1000453 | 4119 | R-PLACE1000453 | 9109 |
| PLACE1000481 | F-PLACE1000481 | 4120 | R-PLACE1000481 | 9110 |
| PLACE1000492 | F-PLACE1000492 | 4121 | R-PLACE1000492 | 9111 |
| PLACE1000540 | F-PLACE1000540 | 4122 | R-PLACE1000540 | 9112 |
| PLACE1000547 | F-PLACE1000547 | 4123 | R-PLACE1000547 | 9113 |
| PLACE1000562 | F-PLACE1000562 | 4124 | R-PLACE1000562 | 9114 |
| PLACE1000564 | F-PLACE1000564 | 4125 | R-PLACE1000564 | 9115 |
| PLACE1000583 | F-PLACE1000583 | 4126 | R-PLACE1000583 | 9116 |
| PLACE1000588 | F-PLACE1000588 | 4127 | R-nnnnnnnnnnnn | 9117 |
| PLACE1000596 | F-PLACE1000596 | 4128 | R-PLACE1000596 | 9118 |
| PLACE1000599 | F-PLACE1000599 | 4129 | R-PLACE1000599 | 9119 |
| PLACE1000610 | F-PLACE1000610 | 4130 | R-PLACE1000610 | 9120 |
| PLACE1000611 | F-PLACE1000611 | 4131 | | |
| PLACE1000636 | F-PLACE1000636 | 4132 | R-PLACE1000636 | 9121 |
| PLACE1000653 | F-PLACE1000653 | 4133 | R-PLACE1000653 | 9122 |
| PLACE1000656 | F-PLACE1000656 | 4134 | R-PLACE1000656 | 9123 |
| PLACE1000706 | F-PLACE1000706 | 4135 | R-PLACE1000706 | 9124 |
| PLACE1000712 | F-PLACE1000712 | 4136 | R-PLACE1000712 | 9125 |
| PLACE1000716 | F-PLACE1000716 | 4137 | R-PLACE1000716 | 9126 |
| PLACE1000748 | F-PLACE1000748 | 4138 | R-PLACE1000748 | 9127 |
| PLACE1000749 | F-PLACE1000749 | 4139 | R-PLACE1000749 | 9128 |
| PLACE1000755 | F-PLACE1000755 | 4140 | R-PLACE1000755 | 9129 |
| PLACE1000769 | F-PLACE1000769 | 4141 | R-PLACE1000769 | 9130 |
| PLACE1000785 | F-PLACE1000785 | 4142 | R-PLACE1000785 | 9131 |
| PLACE1000786 | F-PLACE1000786 | 4143 | R-PLACE1000786 | 9132 |
| PLACE1000793 | F-PLACE1000793 | 4144 | R-nnnnnnnnnnnn | 9133 |
| PLACE1000798 | F-PLACE1000798 | 4145 | R-PLACE1000798 | 9134 |
| PLACE1000841 | F-PLACE1000841 | 4146 | R-PLACE1000841 | 9135 |
| PLACE1000849 | F-PLACE1000849 | 4147 | R-nnnnnnnnnnnn | 9136 |
| PLACE1000856 | F-PLACE1000856 | 4148 | R-PLACE1000856 | 9137 |
| PLACE1000863 | F-PLACE1000863 | 4149 | R-PLACE1000863 | 9138 |
| PLACE1000909 | F-PLACE1000909 | 4150 | R-PLACE1000909 | 9139 |
| PLACE1000931 | F-PLACE1000931 | 4151 | R-PLACE1000931 | 9140 |
| PLACE1000948 | F-PLACE1000948 | 4152 | R-PLACE1000948 | 9141 |
| PLACE1000972 | F-PLACE1000972 | 4153 | R-PLACE1000972 | 9142 |
| PLACE1000977 | F-PLACE1000977 | 4154 | R-PLACE1000977 | 9143 |
| PLACE1000979 | F-PLACE1000979 | 4155 | R-PLACE1000979 | 9144 |
| PLACE1000987 | F-PLACE1000987 | 4156 | | |
| PLACE1001000 | F-PLACE1001000 | 4157 | R-PLACE1001000 | 9145 |
| PLACE1001007 | F-PLACE1001007 | 4158 | R-PLACE1001007 | 9146 |
| PLACE1001010 | F-PLACE1001010 | 4159 | R-PLACE1001010 | 9147 |
| PLACE1001015 | F-PLACE1001015 | 4160 | R-PLACE1001015 | 9148 |
| PLACE1001024 | F-PLACE1001024 | 4161 | R-PLACE1001024 | 9149 |
| PLACE1001036 | F-PLACE1001036 | 4162 | R-PLACE1001036 | 9150 |
| PLACE1001054 | F-PLACE1001054 | 4163 | | |
| PLACE1001062 | F-PLACE1001062 | 4164 | R-PLACE1001062 | 9151 |
| PLACE1001076 | F-PLACE1001076 | 4165 | R-PLACE1001076 | 9152 |
| PLACE1001088 | F-PLACE1001088 | 4166 | R-PLACE1001088 | 9153 |
| PLACE1001092 | F-PLACE1001092 | 4167 | R-PLACE1001092 | 9154 |
| PLACE1001104 | F-PLACE1001104 | 4168 | R-PLACE1001104 | 9155 |
| PLACE1001118 | F-PLACE1001118 | 4169 | R-PLACE1001118 | 9156 |
| PLACE1001136 | F-PLACE1001136 | 4170 | R-PLACE1001136 | 9157 |
| PLACE1001168 | F-PLACE1001168 | 4171 | R-PLACE1001168 | 9158 |
| PLACE1001171 | F-PLACE1001171 | 4172 | R-PLACE1001171 | 9159 |
| PLACE1001185 | F-PLACE1001185 | 4173 | R-PLACE1001185 | 9160 |
| PLACE1001238 | F-PLACE1001238 | 4174 | R-PLACE1001238 | 9161 |
| PLACE1001241 | F-PLACE1001241 | 4175 | R-PLACE1001241 | 9162 |
| PLACE1001257 | F-PLACE1001257 | 4176 | R-PLACE1001257 | 9163 |
| PLACE1001272 | F-PLACE1001272 | 4177 | R-PLACE1001272 | 9164 |
| PLACE1001279 | F-PLACE1001279 | 4178 | R-PLACE1001279 | 9165 |
| PLACE1001280 | F-PLACE1001280 | 4179 | R-PLACE1001280 | 9166 |
| PLACE1001294 | F-PLACE1001294 | 4180 | R-PLACE1001294 | 9167 |
| PLACE1001304 | F-PLACE1001304 | 4181 | R-PLACE1001304 | 9168 |
| PLACE1001311 | F-PLACE1001311 | 4182 | R-PLACE1001311 | 9169 |
| PLACE1001323 | F-PLACE1001323 | 4183 | R-PLACE1001323 | 9170 |
| PLACE1001351 | F-PLACE1001351 | 4184 | R-PLACE1001351 | 9171 |
| PLACE1001366 | F-PLACE1001366 | 4185 | R-PLACE1001366 | 9172 |
| PLACE1001377 | F-PLACE1001377 | 4186 | R-PLACE1001377 | 9173 |
| PLACE1001383 | F-PLACE1001383 | 4187 | R-PLACE1001383 | 9174 |
| PLACE1001384 | F-PLACE1001384 | 4188 | R-PLACE1001384 | 9175 |
| PLACE1001387 | F-PLACE1001387 | 4189 | R-PLACE1001387 | 9176 |
| PLACE1001395 | F-PLACE1001395 | 4190 | R-PLACE1001395 | 9177 |
| PLACE1001399 | F-PLACE1001399 | 4191 | R-PLACE1001399 | 9178 |
| PLACE1001412 | F-PLACE1001412 | 4192 | R-PLACE1001412 | 9179 |
| PLACE1001414 | F-PLACE1001414 | 4193 | R-PLACE1001414 | 9180 |
| PLACE1001440 | F-PLACE1001440 | 4194 | R-PLACE1001440 | 9181 |
| PLACE1001456 | F-PLACE1001456 | 4195 | R-PLACE1001456 | 9182 |
| PLACE1001468 | F-PLACE1001468 | 4196 | R-PLACE1001468 | 9183 |
| PLACE1001484 | F-PLACE1001484 | 4197 | R-PLACE1001484 | 9184 |
| PLACE1001502 | F-PLACE1001502 | 4198 | R-PLACE1001502 | 9185 |
| PLACE1001503 | F-PLACE1001503 | 4199 | R-PLACE1001503 | 9186 |
| PLACE1001517 | F-PLACE1001517 | 4200 | R-PLACE1001517 | 9187 |
| PLACE1001534 | F-PLACE1001534 | 4201 | R-PLACE1001534 | 9188 |
| PLACE1001545 | F-PLACE1001545 | 4202 | R-PLACE1001545 | 9189 |
| PLACE1001551 | F-PLACE1001551 | 4203 | R-PLACE1001551 | 9190 |
| PLACE1001570 | F-PLACE1001570 | 4204 | R-PLACE1001570 | 9191 |
| PLACE1001602 | F-PLACE1001602 | 4205 | R-PLACE1001602 | 9192 |
| PLACE1001603 | F-PLACE1001603 | 4206 | R-PLACE1001603 | 9193 |
| PLACE1001608 | F-PLACE1001608 | 4207 | | |
| PLACE1001610 | F-PLACE1001610 | 4208 | R-PLACE1001610 | 9194 |
| PLACE1001611 | F-PLACE1001611 | 4209 | R-PLACE1001611 | 9195 |
| PLACE1001632 | F-PLACE1001632 | 4210 | R-PLACE1001632 | 9196 |
| PLACE1001634 | F-PLACE1001634 | 4211 | R-PLACE1001634 | 9197 |
| PLACE1001640 | F-PLACE1001640 | 4212 | R-PLACE1001640 | 9198 |
| PLACE1001672 | F-PLACE1001672 | 4213 | R-PLACE1001672 | 9199 |
| PLACE1001691 | F-PLACE1001691 | 4214 | R-PLACE1001691 | 9200 |
| PLACE1001692 | F-PLACE1001692 | 4215 | R-PLACE1001692 | 9201 |
| PLACE1001705 | F-PLACE1001705 | 4216 | R-PLACE1001705 | 9202 |
| PLACE1001716 | F-PLACE1001716 | 4217 | R-PLACE1001716 | 9203 |
| PLACE1001720 | F-PLACE1001720 | 4218 | R-PLACE1001720 | 9204 |
| PLACE1001729 | F-PLACE1001729 | 4219 | R-PLACE1001729 | 9205 |
| PLACE1001739 | F-PLACE1001739 | 4220 | R-PLACE1001739 | 9206 |
| PLACE1001740 | F-PLACE1001740 | 4221 | R-PLACE1001740 | 9207 |
| PLACE1001745 | F-PLACE1001745 | 4222 | R-PLACE1001745 | 9208 |
| PLACE1001746 | F-PLACE1001746 | 4223 | R-PLACE1001746 | 9209 |
| PLACE1001748 | F-PLACE1001748 | 4224 | R-PLACE1001748 | 9210 |
| PLACE1001756 | F-PLACE1001756 | 4225 | R-PLACE1001756 | 9211 |
| PLACE1001761 | F-PLACE1001761 | 4226 | R-PLACE1001761 | 9212 |
| PLACE1001771 | F-PLACE1001771 | 4227 | R-PLACE1001771 | 9213 |
| PLACE1001781 | F-PLACE1001781 | 4228 | R-PLACE1001781 | 9214 |
| PLACE1001799 | F-PLACE1001799 | 4229 | R-PLACE1001799 | 9215 |
| PLACE1001810 | F-PLACE1001810 | 4230 | | |
| PLACE1001817 | F-PLACE1001817 | 4231 | R-PLACE1001817 | 9216 |
| PLACE1001821 | F-PLACE1001821 | 4232 | R-PLACE1001821 | 9217 |
| PLACE1001844 | F-PLACE1001844 | 4233 | | |
| PLACE1001845 | F-PLACE1001845 | 4234 | R-PLACE1001845 | 9218 |
| PLACE1001869 | F-PLACE1001869 | 4235 | R-PLACE1001869 | 9219 |
| PLACE1001897 | F-PLACE1001897 | 4236 | R-PLACE1001897 | 9220 |
| PLACE1001912 | F-PLACE1001912 | 4237 | R-PLACE1001912 | 9221 |
| PLACE1001920 | F-PLACE1001920 | 4238 | R-PLACE1001920 | 9222 |
| PLACE1001928 | F-PLACE1001928 | 4239 | R-PLACE1001928 | 9223 |
| PLACE1001983 | F-PLACE1001983 | 4240 | R-PLACE1001983 | 9224 |
| PLACE1001989 | F-PLACE1001989 | 4241 | R-PLACE1001989 | 9225 |
| PLACE1002004 | F-PLACE1002004 | 4242 | | |
| PLACE1002046 | F-PLACE1002046 | 4243 | R-PLACE1002046 | 9226 |
| PLACE1002052 | F-PLACE1002052 | 4244 | R-PLACE1002052 | 9227 |
| PLACE1002066 | F-PLACE1002066 | 4245 | R-PLACE1002066 | 9228 |
| PLACE1002072 | F-PLACE1002072 | 4246 | R-PLACE1002072 | 9229 |
| PLACE1002073 | F-PLACE1002073 | 4247 | R-PLACE1002073 | 9230 |
| PLACE1002090 | F-PLACE1002090 | 4248 | R-PLACE1002090 | 9231 |
| PLACE1002115 | F-PLACE1002115 | 4249 | R-PLACE1002115 | 9232 |
| PLACE1002119 | F-PLACE1002119 | 4250 | R-PLACE1002119 | 9233 |
| PLACE1002140 | F-PLACE1002140 | 4251 | R-PLACE1002140 | 9234 |
| PLACE1002150 | F-PLACE1002150 | 4252 | R-PLACE1002150 | 9235 |
| PLACE1002157 | F-PLACE1002157 | 4253 | R-PLACE1002157 | 9236 |
| PLACE1002163 | F-PLACE1002163 | 4254 | R-PLACE1002163 | 9237 |
| PLACE1002170 | F-PLACE1002170 | 4255 | | |
| PLACE1002171 | F-PLACE1002171 | 4256 | R-PLACE1002171 | 9238 |
| PLACE1002205 | F-PLACE1002205 | 4257 | R-PLACE1002205 | 9239 |
| PLACE1002213 | F-PLACE1002213 | 4258 | R-PLACE1002213 | 9240 |
| PLACE1002227 | F-PLACE1002227 | 4259 | R-PLACE1002227 | 9241 |
| PLACE1002256 | F-PLACE1002256 | 4260 | R-PLACE1002256 | 9242 |
| PLACE1002259 | F-PLACE1002259 | 4261 | R-PLACE1002259 | 9243 |
| PLACE1002319 | F-PLACE1002319 | 4262 | R-PLACE1002319 | 9244 |
| PLACE1002342 | F-PLACE1002342 | 4263 | R-PLACE1002342 | 9245 |
| PLACE1002395 | F-PLACE1002395 | 4264 | R-PLACE1002395 | 9246 |
| PLACE1002399 | F-PLACE1002399 | 4265 | R-PLACE1002399 | 9247 |
| PLACE1002433 | F-PLACE1002433 | 4266 | R-PLACE1002433 | 9248 |
| PLACE1002437 | F-PLACE1002437 | 4267 | R-PLACE1002437 | 9249 |
| PLACE1002438 | F-PLACE1002438 | 4268 | R-PLACE1002438 | 9250 |
| PLACE1002450 | F-PLACE1002450 | 4269 | R-PLACE1002450 | 9251 |
| PLACE1002465 | F-PLACE1002465 | 4270 | R-PLACE1002465 | 9252 |
| PLACE1002474 | F-PLACE1002474 | 4271 | R-PLACE1002474 | 9253 |
| PLACE1002477 | F-PLACE1002477 | 4272 | R-PLACE1002477 | 9254 |
| PLACE1002493 | F-PLACE1002493 | 4273 | R-PLACE1002493 | 9255 |
| PLACE1002499 | F-PLACE1002499 | 4274 | R-PLACE1002499 | 9256 |
| PLACE1002500 | F-PLACE1002500 | 4275 | R-PLACE1002500 | 9257 |
| PLACE1002514 | F-PLACE1002514 | 4276 | R-PLACE1002514 | 9258 |
| PLACE1002529 | F-PLACE1002529 | 4277 | R-PLACE1002529 | 9259 |
| PLACE1002532 | F-PLACE1002532 | 4278 | R-PLACE1002532 | 9260 |
| PLACE1002537 | F-PLACE1002537 | 4279 | R-PLACE1002537 | 9261 |
| PLACE1002571 | F-PLACE1002571 | 4280 | R-PLACE1002571 | 9262 |
| PLACE1002578 | F-PLACE1002578 | 4281 | R-PLACE1002578 | 9263 |
| PLACE1002583 | F-PLACE1002583 | 4282 | R-PLACE1002583 | 9264 |
| PLACE1002591 | F-PLACE1002591 | 4283 | R-PLACE1002591 | 9265 |
| PLACE1002598 | F-PLACE1002598 | 4284 | R-PLACE1002598 | 9266 |
| PLACE1002604 | F-PLACE1002604 | 4285 | R-PLACE1002604 | 9267 |
| PLACE1002625 | F-PLACE1002625 | 4286 | R-PLACE1002625 | 9268 |
| PLACE1002655 | F-PLACE1002655 | 4287 | | |
| PLACE1002665 | F-PLACE1002665 | 4288 | R-PLACE1002665 | 9269 |
| PLACE1002685 | F-PLACE1002685 | 4289 | R-PLACE1002685 | 9270 |
| PLACE1002714 | F-PLACE1002714 | 4290 | R-PLACE1002714 | 9271 |
| PLACE1002722 | F-PLACE1002722 | 4291 | R-PLACE1002722 | 9272 |
| PLACE1002768 | F-PLACE1002768 | 4292 | R-PLACE1002768 | 9273 |
| PLACE1002772 | F-PLACE1002772 | 4293 | R-PLACE1002772 | 9274 |
| PLACE1002775 | F-PLACE1002775 | 4294 | | |
| PLACE1002782 | F-PLACE1002782 | 4295 | R-PLACE1002782 | 9275 |
| PLACE1002794 | F-PLACE1002794 | 4296 | R-PLACE1002794 | 9276 |
| PLACE1002811 | F-PLACE1002811 | 4297 | R-PLACE1002811 | 9277 |
| PLACE1002815 | F-PLACE1002815 | 4298 | R-PLACE1002815 | 9278 |
| PLACE1002816 | F-PLACE1002816 | 4299 | R-PLACE1002816 | 9279 |
| PLACE1002834 | F-PLACE1002834 | 4300 | R-PLACE1002834 | 9280 |
| PLACE1002839 | F-PLACE1002839 | 4301 | R-PLACE1002839 | 9281 |
| PLACE1002851 | F-PLACE1002851 | 4302 | R-PLACE1002851 | 9282 |
| PLACE1002853 | F-PLACE1002853 | 4303 | R-PLACE1002853 | 9283 |
| PLACE1002881 | F-PLACE1002881 | 4304 | R-PLACE1002881 | 9284 |
| PLACE1002908 | F-PLACE1002908 | 4305 | R-PLACE1002908 | 9285 |
| PLACE1002941 | F-PLACE1002941 | 4306 | R-PLACE1002941 | 9286 |
| PLACE1002962 | F-PLACE1002962 | 4307 | R-PLACE1002962 | 9287 |
| PLACE1002968 | F-PLACE1002968 | 4308 | R-PLACE1002968 | 9288 |
| PLACE1002991 | F-PLACE1002991 | 4309 | R-PLACE1002991 | 9289 |
| PLACE1002993 | F-PLACE1002993 | 4310 | R-PLACE1002993 | 9290 |
| PLACE1002996 | F-PLACE1002996 | 4311 | R-PLACE1002996 | 9291 |
| PLACE1003025 | F-PLACE1003025 | 4312 | R-PLACE1003025 | 9292 |
| PLACE1003027 | F-PLACE1003027 | 4313 | R-PLACE1003027 | 9293 |
| PLACE1003044 | F-PLACE1003044 | 4314 | R-PLACE1003044 | 9294 |
| PLACE1003045 | F-PLACE1003045 | 4315 | | |
| PLACE1003092 | F-PLACE1003092 | 4316 | R-PLACE1003092 | 9295 |
| PLACE1003100 | F-PLACE1003100 | 4317 | R-PLACE1003100 | 9296 |
| PLACE1003108 | F-PLACE1003108 | 4318 | R-PLACE1003108 | 9297 |
| PLACE1003136 | F-PLACE1003136 | 4319 | R-PLACE1003136 | 9298 |
| PLACE1003145 | F-PLACE1003145 | 4320 | R-PLACE1003145 | 9299 |
| PLACE1003153 | F-PLACE1003153 | 4321 | R-PLACE1003153 | 9300 |
| PLACE1003174 | F-PLACE1003174 | 4322 | R-PLACE1003174 | 9301 |
| PLACE1003176 | F-PLACE1003176 | 4323 | R-PLACE1003176 | 9302 |
| PLACE1003190 | F-PLACE1003190 | 4324 | R-PLACE1003190 | 9303 |
| PLACE1003200 | F-PLACE1003200 | 4325 | R-PLACE1003200 | 9304 |
| PLACE1003205 | F-PLACE1003205 | 4326 | R-PLACE1003205 | 9305 |
| PLACE1003238 | F-PLACE1003238 | 4327 | R-PLACE1003238 | 9306 |
| PLACE1003249 | F-PLACE1003249 | 4328 | R-PLACE1003249 | 9307 |
| PLACE1003256 | F-PLACE1003256 | 4329 | R-PLACE1003256 | 9308 |
| PLACE1003258 | F-PLACE1003258 | 4330 | R-PLACE1003258 | 9309 |
| PLACE1003296 | F-PLACE1003296 | 4331 | R-PLACE1003296 | 9310 |
| PLACE1003302 | F-PLACE1003302 | 4332 | R-PLACE1003302 | 9311 |
| PLACE1003334 | F-PLACE1003334 | 4333 | R-PLACE1003334 | 9312 |
| PLACE1003342 | F-PLACE1003342 | 4334 | R-PLACE1003342 | 9313 |
| PLACE1003343 | F-PLACE1003343 | 4335 | R-PLACE1003343 | 9314 |
| PLACE1003353 | F-PLACE1003353 | 4336 | R-PLACE1003353 | 9315 |
| PLACE1003361 | F-PLACE1003361 | 4337 | R-PLACE1003361 | 9316 |
| PLACE1003366 | F-PLACE1003366 | 4338 | R-PLACE1003366 | 9317 |
| PLACE1003369 | F-PLACE1003369 | 4339 | R-PLACE1003369 | 9318 |
| PLACE1003373 | F-PLACE1003373 | 4340 | R-PLACE1003373 | 9319 |
| PLACE1003375 | F-PLACE1003375 | 4341 | R-PLACE1003375 | 9320 |
| PLACE1003383 | F-PLACE1003383 | 4342 | R-PLACE1003383 | 9321 |
| PLACE1003394 | F-PLACE1003394 | 4343 | | |
| PLACE1003401 | F-PLACE1003401 | 4344 | R-PLACE1003401 | 9322 |
| PLACE1003420 | F-PLACE1003420 | 4345 | R-PLACE1003420 | 9323 |
| PLACE1003454 | F-PLACE1003454 | 4346 | R-PLACE1003454 | 9324 |
| PLACE1003478 | F-PLACE1003478 | 4347 | R-PLACE1003478 | 9325 |
| PLACE1003493 | F-PLACE1003493 | 4348 | R-PLACE1003493 | 9326 |
| PLACE1003516 | F-PLACE1003516 | 4349 | R-PLACE1003516 | 9327 |
| PLACE1003519 | F-PLACE1003519 | 4350 | R-PLACE1003519 | 9328 |
| PLACE1003521 | F-PLACE1003521 | 4351 | R-PLACE1003521 | 9329 |
| PLACE1003528 | F-PLACE1003528 | 4352 | R-PLACE1003528 | 9330 |
| PLACE1003537 | F-PLACE1003537 | 4353 | R-PLACE1003537 | 9331 |
| PLACE1003553 | F-PLACE1003553 | 4354 | R-PLACE1003553 | 9332 |
| PLACE1003566 | F-PLACE1003566 | 4355 | R-PLACE1003566 | 9333 |
| PLACE1003575 | F-PLACE1003575 | 4356 | R-PLACE1003575 | 9334 |
| PLACE1003583 | F-PLACE1003583 | 4357 | R-PLACE1003583 | 9335 |
| PLACE1003584 | F-PLACE1003584 | 4358 | R-PLACE1003584 | 9336 |
| PLACE1003592 | F-PLACE1003592 | 4359 | R-PLACE1003592 | 9337 |
| PLACE1003593 | F-PLACE1003593 | 4360 | R-PLACE1003593 | 9338 |
| PLACE1003596 | F-PLACE1003596 | 4361 | R-PLACE1003596 | 9339 |
| PLACE1003602 | F-PLACE1003602 | 4362 | R-PLACE1003602 | 9340 |
| PLACE1003605 | F-PLACE1003605 | 4363 | R-PLACE1003605 | 9341 |
| PLACE1003611 | F-PLACE1003611 | 4364 | R-nnnnnnnnnnnn | 9342 |
| PLACE1003618 | F-PLACE1003618 | 4365 | R-PLACE1003618 | 9343 |
| PLACE1003625 | F-PLACE1003625 | 4366 | R-PLACE1003625 | 9344 |
| PLACE1003638 | F-PLACE1003638 | 4367 | R-PLACE1003638 | 9345 |
| PLACE1003669 | F-PLACE1003669 | 4368 | R-PLACE1003669 | 9346 |
| PLACE1003704 | F-PLACE1003704 | 4369 | R-PLACE1003704 | 9347 |
| PLACE1003709 | F-PLACE1003709 | 4370 | R-PLACE1003709 | 9348 |
| PLACE1003711 | F-PLACE1003711 | 4371 | R-PLACE1003711 | 9349 |
| PLACE1003723 | F-PLACE1003723 | 4372 | R-PLACE1003723 | 9350 |
| PLACE1003738 | F-PLACE1003738 | 4373 | R-PLACE1003738 | 9351 |
| PLACE1003760 | F-PLACE1003760 | 4374 | R-PLACE1003760 | 9352 |
| PLACE1003762 | F-PLACE1003762 | 4375 | R-PLACE1003762 | 9353 |
| PLACE1003768 | F-PLACE1003768 | 4376 | R-PLACE1003768 | 9354 |
| PLACE1003771 | F-PLACE1003771 | 4377 | R-PLACE1003771 | 9355 |
| PLACE1003783 | F-PLACE1003783 | 4378 | R-PLACE1003783 | 9356 |
| PLACE1003784 | F-PLACE1003784 | 4379 | R-PLACE1003784 | 9357 |
| PLACE1003795 | F-PLACE1003795 | 4380 | R-PLACE1003795 | 9358 |
| PLACE1003833 | F-PLACE1003833 | 4381 | R-PLACE1003833 | 9359 |
| PLACE1003850 | F-PLACE1003850 | 4382 | R-PLACE1003850 | 9360 |
| PLACE1003858 | F-PLACE1003858 | 4383 | R-PLACE1003858 | 9361 |
| PLACE1003864 | F-PLACE1003864 | 4384 | R-nnnnnnnnnnnn | 9362 |
| PLACE1003870 | F-PLACE1003870 | 4385 | R-PLACE1003870 | 9363 |
| PLACE1003885 | F-PLACE1003885 | 4386 | R-nnnnnnnnnnnn | 9364 |
| PLACE1003886 | F-PLACE1003886 | 4387 | R-PLACE1003886 | 9365 |
| PLACE1003888 | F-PLACE1003888 | 4388 | R-PLACE1003888 | 9366 |
| PLACE1003892 | F-PLACE1003892 | 4389 | | |
| PLACE1003900 | F-PLACE1003900 | 4390 | R-PLACE1003900 | 9367 |
| PLACE1003903 | F-PLACE1003903 | 4391 | R-PLACE1003903 | 9368 |
| PLACE1003915 | F-PLACE1003915 | 4392 | R-PLACE1003915 | 9369 |
| PLACE1003923 | F-PLACE1003923 | 4393 | R-PLACE1003923 | 9370 |
| PLACE1003932 | F-PLACE1003932 | 4394 | R-PLACE1003932 | 9371 |
| PLACE1003936 | F-PLACE1003936 | 4395 | R-PLACE1003936 | 9372 |
| PLACE1003968 | F-PLACE1003968 | 4396 | R-PLACE1003968 | 9373 |
| PLACE1004103 | F-PLACE1004103 | 4397 | | |
| PLACE1004104 | F-PLACE1004104 | 4398 | R-PLACE1004104 | 9374 |
| PLACE1004114 | F-PLACE1004114 | 4399 | R-PLACE1004114 | 9375 |
| PLACE1004118 | F-PLACE1004118 | 4400 | R-PLACE1004118 | 9376 |
| PLACE1004128 | F-PLACE1004128 | 4401 | R-PLACE1004128 | 9377 |
| PLACE1004149 | F-PLACE1004149 | 4402 | R-PLACE1004149 | 9378 |
| PLACE1004156 | F-PLACE1004156 | 4403 | R-PLACE1004156 | 9379 |
| PLACE1004161 | F-PLACE1004161 | 4404 | R-PLACE1004161 | 9380 |
| PLACE1004183 | F-PLACE1004183 | 4405 | R-PLACE1004183 | 9381 |
| PLACE1004197 | F-PLACE1004197 | 4406 | R-PLACE1004197 | 9382 |
| PLACE1004203 | F-PLACE1004203 | 4407 | R-PLACE1004203 | 9383 |
| PLACE1004242 | F-PLACE1004242 | 4408 | R-PLACE1004242 | 9384 |
| PLACE1004256 | F-PLACE1004256 | 4409 | R-PLACE1004256 | 9385 |
| PLACE1004257 | F-PLACE1004257 | 4410 | R-PLACE1004257 | 9386 |
| PLACE1004258 | F-PLACE1004258 | 4411 | R-PLACE1004258 | 9387 |
| PLACE1004270 | F-PLACE1004270 | 4412 | R-PLACE1004270 | 9388 |
| PLACE1004274 | F-PLACE1004274 | 4413 | R-PLACE1004274 | 9389 |
| PLACE1004277 | F-PLACE1004277 | 4414 | R-PLACE1004277 | 9390 |
| PLACE1004284 | F-PLACE1004284 | 4415 | R-PLACE1004284 | 9391 |
| PLACE1004289 | F-PLACE1004289 | 4416 | R-PLACE1004289 | 9392 |
| PLACE1004302 | F-PLACE1004302 | 4417 | R-PLACE1004302 | 9393 |
| PLACE1004316 | F-PLACE1004316 | 4418 | R-PLACE1004316 | 9394 |
| PLACE1004336 | F-PLACE1004336 | 4419 | R-PLACE1004336 | 9395 |
| PLACE1004358 | F-PLACE1004358 | 4420 | R-PLACE1004358 | 9396 |
| PLACE1004376 | F-PLACE1004376 | 4421 | R-PLACE1004376 | 9397 |
| PLACE1004384 | F-PLACE1004384 | 4422 | R-PLACE1004384 | 9398 |
| PLACE1004388 | F-PLACE1004388 | 4423 | R-PLACE1004388 | 9399 |
| PLACE1004405 | F-PLACE1004405 | 4424 | R-PLACE1004405 | 9400 |
| PLACE1004425 | F-PLACE1004425 | 4425 | R-PLACE1004425 | 9401 |
| PLACE1004428 | F-PLACE1004428 | 4426 | R-PLACE1004428 | 9402 |
| PLACE1004437 | F-PLACE1004437 | 4427 | R-PLACE1004437 | 9403 |
| PLACE1004451 | F-PLACE1004451 | 4428 | R-PLACE1004451 | 9404 |
| PLACE1004460 | F-PLACE1004460 | 4429 | R-PLACE1004460 | 9405 |
| PLACE1004467 | F-PLACE1004467 | 4430 | R-PLACE1004467 | 9406 |
| PLACE1004471 | F-PLACE1004471 | 4431 | R-PLACE1004471 | 9407 |
| PLACE1004473 | F-PLACE1004473 | 4432 | R-PLACE1004473 | 9408 |
| PLACE1004491 | F-PLACE1004491 | 4433 | R-PLACE1004491 | 9409 |
| PLACE1004506 | F-PLACE1004506 | 4434 | R-PLACE1004506 | 9410 |
| PLACE1004510 | F-PLACE1004510 | 4435 | R-PLACE1004510 | 9411 |
| PLACE1004516 | F-PLACE1004516 | 4436 | R-PLACE1004516 | 9412 |
| PLACE1004518 | F-PLACE1004518 | 4437 | R-PLACE1004518 | 9413 |
| PLACE1004548 | F-PLACE1004548 | 4438 | R-PLACE1004548 | 9414 |
| PLACE1004550 | F-PLACE1004550 | 4439 | R-PLACE1004550 | 9415 |
| PLACE1004564 | F-PLACE1004564 | 4440 | R-PLACE1004564 | 9416 |
| PLACE1004629 | F-PLACE1004629 | 4441 | R-PLACE1004629 | 9417 |
| PLACE1004645 | F-PLACE1004645 | 4442 | R-PLACE1004645 | 9418 |
| PLACE1004646 | F-PLACE1004646 | 4443 | R-PLACE1004646 | 9419 |
| PLACE1004658 | F-PLACE1004658 | 4444 | R-PLACE1004658 | 9420 |
| PLACE1004664 | F-PLACE1004664 | 4445 | R-nnnnnnnnnnnn | 9421 |
| PLACE1004672 | F-PLACE1004672 | 4446 | R-PLACE1004672 | 9422 |
| PLACE1004674 | F-PLACE1004674 | 4447 | R-PLACE1004674 | 9423 |
| PLACE1004681 | F-PLACE1004681 | 4448 | R-PLACE1004681 | 9424 |
| PLACE1004686 | F-PLACE1004686 | 4449 | R-PLACE1004686 | 9425 |
| PLACE1004691 | F-PLACE1004691 | 4450 | R-PLACE1004691 | 9426 |
| PLACE1004693 | F-PLACE1004693 | 4451 | R-PLACE1004693 | 9427 |
| PLACE1004716 | F-PLACE1004716 | 4452 | R-PLACE1004716 | 9428 |
| PLACE1004722 | F-PLACE1004722 | 4453 | R-PLACE1004722 | 9429 |
| PLACE1004736 | F-PLACE1004736 | 4454 | R-PLACE1004736 | 9430 |
| PLACE1004740 | F-PLACE1004740 | 4455 | R-PLACE1004740 | 9431 |
| PLACE1004743 | F-PLACE1004743 | 4456 | R-nnnnnnnnnnnn | 9432 |
| PLACE1004751 | F-PLACE1004751 | 4457 | R-PLACE1004751 | 9433 |
| PLACE1004773 | F-PLACE1004773 | 4458 | R-PLACE1004773 | 9434 |
| PLACE1004777 | F-PLACE1004777 | 4459 | R-PLACE1004777 | 9435 |
| PLACE1004793 | F-PLACE1004793 | 4460 | R-PLACE1004793 | 9436 |
| PLACE1004804 | F-PLACE1004804 | 4461 | R-nnnnnnnnnnnn | 9437 |
| PLACE1004813 | F-PLACE1004813 | 4462 | R-PLACE1004813 | 9438 |
| PLACE1004814 | F-PLACE1004814 | 4463 | R-PLACE1004814 | 9439 |
| PLACE1004815 | F-PLACE1004815 | 4464 | R-PLACE1004815 | 9440 |
| PLACE1004824 | F-PLACE1004824 | 4465 | R-PLACE1004824 | 9441 |
| PLACE1004827 | F-PLACE1004827 | 4466 | R-PLACE1004827 | 9442 |
| PLACE1004836 | F-PLACE1004836 | 4467 | R-PLACE1004836 | 9443 |
| PLACE1004838 | F-PLACE1004838 | 4468 | R-PLACE1004838 | 9444 |
| PLACE1004840 | F-PLACE1004840 | 4469 | R-PLACE1004840 | 9445 |
| PLACE1004868 | F-PLACE1004868 | 4470 | R-PLACE1004868 | 9446 |
| PLACE1004885 | F-PLACE1004885 | 4471 | R-PLACE1004885 | 9447 |
| PLACE1004900 | F-PLACE1004900 | 4472 | R-PLACE1004900 | 9448 |
| PLACE1004902 | F-PLACE1004902 | 4473 | R-PLACE1004902 | 9449 |
| PLACE1004913 | F-PLACE1004913 | 4474 | R-nnnnnnnnnnnn | 9450 |
| PLACE1004918 | F-PLACE1004918 | 4475 | R-PLACE1004918 | 9451 |
| PLACE1004930 | F-PLACE1004930 | 4476 | R-PLACE1004930 | 9452 |
| PLACE1004934 | F-PLACE1004934 | 4477 | R-PLACE1004934 | 9453 |
| PLACE1004937 | F-PLACE1004937 | 4478 | R-PLACE1004937 | 9454 |
| PLACE1004969 | F-PLACE1004969 | 4479 | R-PLACE1004969 | 9455 |
| PLACE1004972 | F-PLACE1004972 | 4480 | R-PLACE1004972 | 9456 |
| PLACE1004979 | F-PLACE1004979 | 4481 | R-PLACE1004979 | 9457 |
| PLACE1004982 | F-PLACE1004982 | 4482 | R-PLACE1004982 | 9458 |
| PLACE1004985 | F-PLACE1004985 | 4483 | R-PLACE1004985 | 9459 |
| PLACE1005026 | F-PLACE1005026 | 4484 | R-PLACE1005026 | 9460 |
| PLACE1005027 | F-PLACE1005027 | 4485 | R-PLACE1005027 | 9461 |
| PLACE1005046 | F-PLACE1005046 | 4486 | R-PLACE1005046 | 9462 |
| PLACE1005052 | F-PLACE1005052 | 4487 | R-PLACE1005052 | 9463 |
| PLACE1005055 | F-PLACE1005055 | 4488 | | |
| PLACE1005066 | F-PLACE1005066 | 4489 | R-PLACE1005066 | 9464 |
| PLACE1005077 | F-PLACE1005077 | 4490 | R-PLACE1005077 | 9465 |
| PLACE1005085 | F-PLACE1005085 | 4491 | R-PLACE1005085 | 9466 |
| PLACE1005086 | F-PLACE1005086 | 4492 | R-PLACE1005086 | 9467 |
| PLACE1005101 | F-PLACE1005101 | 4493 | R-PLACE1005101 | 9468 |
| PLACE1005102 | F-PLACE1005102 | 4494 | R-PLACE1005102 | 9469 |
| PLACE1005108 | F-PLACE1005108 | 4495 | R-PLACE1005108 | 9470 |
| PLACE1005111 | F-PLACE1005111 | 4496 | R-PLACE1005111 | 9471 |
| PLACE1005128 | F-PLACE1005128 | 4497 | R-PLACE1005128 | 9472 |
| PLACE1005146 | F-PLACE1005146 | 4498 | R-PLACE1005146 | 9473 |
| PLACE1005162 | F-PLACE1005162 | 4499 | R-PLACE1005162 | 9474 |
| PLACE1005176 | F-PLACE1005176 | 4500 | R-nnnnnnnnnnnn | 9475 |
| PLACE1005181 | F-PLACE1005181 | 4501 | R-PLACE1005181 | 9476 |
| PLACE1005187 | F-PLACE1005187 | 4502 | R-PLACE1005187 | 9477 |
| PLACE1005206 | F-PLACE1005206 | 4503 | R-PLACE1005206 | 9478 |
| PLACE1005232 | F-PLACE1005232 | 4504 | R-PLACE1005232 | 9479 |
| PLACE1005243 | F-PLACE1005243 | 4505 | R-PLACE1005243 | 9480 |
| PLACE1005261 | F-PLACE1005261 | 4506 | R-PLACE1005261 | 9481 |
| PLACE1005266 | F-PLACE1005266 | 4507 | R-PLACE1005266 | 9482 |
| PLACE1005277 | F-PLACE1005277 | 4508 | R-PLACE1005277 | 9483 |
| PLACE1005287 | F-PLACE1005287 | 4509 | R-PLACE1005287 | 9484 |
| PLACE1005305 | F-PLACE1005305 | 4510 | R-PLACE1005305 | 9485 |
| PLACE1005308 | F-PLACE1005308 | 4511 | R-PLACE1005308 | 9486 |
| PLACE1005313 | F-PLACE1005313 | 4512 | R-PLACE1005313 | 9487 |
| PLACE1005327 | F-PLACE1005327 | 4513 | R-PLACE1005327 | 9488 |
| PLACE1005331 | F-PLACE1005331 | 4514 | R-PLACE1005331 | 9489 |
| PLACE1005335 | F-PLACE1005335 | 4515 | R-PLACE1005335 | 9490 |
| PLACE1005373 | F-PLACE1005373 | 4516 | R-PLACE1005373 | 9491 |
| PLACE1005374 | F-PLACE1005374 | 4517 | R-PLACE1005374 | 9492 |
| PLACE1005409 | F-PLACE1005409 | 4518 | R-PLACE1005409 | 9493 |
| PLACE1005453 | F-PLACE1005453 | 4519 | R-PLACE1005453 | 9494 |
| PLACE1005467 | F-PLACE1005467 | 4520 | R-PLACE1005467 | 9495 |
| PLACE1005471 | F-PLACE1005471 | 4521 | R-PLACE1005471 | 9496 |
| PLACE1005477 | F-PLACE1005477 | 4522 | R-PLACE1005477 | 9497 |
| PLACE1005480 | F-PLACE1005480 | 4523 | R-PLACE1005480 | 9498 |
| PLACE1005481 | F-PLACE1005481 | 4524 | R-PLACE1005481 | 9499 |
| PLACE1005494 | F-PLACE1005494 | 4525 | R-PLACE1005494 | 9500 |
| PLACE1005502 | F-PLACE1005502 | 4526 | R-PLACE1005502 | 9501 |
| PLACE1005526 | F-PLACE1005526 | 4527 | R-PLACE1005526 | 9502 |
| PLACE1005528 | F-PLACE1005528 | 4528 | R-PLACE1005528 | 9503 |
| PLACE1005530 | F-PLACE1005530 | 4529 | R-PLACE1005530 | 9504 |
| PLACE1005550 | F-PLACE1005550 | 4530 | R-PLACE1005550 | 9505 |
| PLACE1005554 | F-PLACE1005554 | 4531 | R-PLACE1005554 | 9506 |
| PLACE1005557 | F-PLACE1005557 | 4532 | R-PLACE1005557 | 9507 |
| PLACE1005574 | F-PLACE1005574 | 4533 | R-PLACE1005574 | 9508 |
| PLACE1005584 | F-PLACE1005584 | 4534 | R-PLACE1005584 | 9509 |
| PLACE1005595 | F-PLACE1005595 | 4535 | R-PLACE1005595 | 9510 |
| PLACE1005603 | F-PLACE1005603 | 4536 | R-PLACE1005603 | 9511 |
| PLACE1005611 | F-PLACE1005611 | 4537 | R-PLACE1005611 | 9512 |
| PLACE1005623 | F-PLACE1005623 | 4538 | R-PLACE1005623 | 9513 |
| PLACE1005630 | F-PLACE1005630 | 4539 | R-PLACE1005630 | 9514 |
| PLACE1005639 | F-PLACE1005639 | 4540 | R-PLACE1005639 | 9515 |
| PLACE1005646 | F-PLACE1005646 | 4541 | R-PLACE1005646 | 9516 |
| PLACE1005656 | F-PLACE1005656 | 4542 | R-PLACE1005656 | 9517 |
| PLACE1005666 | F-PLACE1005666 | 4543 | R-PLACE1005666 | 9518 |
| PLACE1005698 | F-PLACE1005698 | 4544 | R-PLACE1005698 | 9519 |
| PLACE1005727 | F-PLACE1005727 | 4545 | R-PLACE1005727 | 9520 |
| PLACE1005730 | F-PLACE1005730 | 4546 | R-PLACE1005730 | 9521 |
| PLACE1005739 | F-PLACE1005739 | 4547 | R-PLACE1005739 | 9522 |
| PLACE1005755 | F-PLACE1005755 | 4548 | R-PLACE1005755 | 9523 |
| PLACE1005763 | F-PLACE1005763 | 4549 | R-PLACE1005763 | 9524 |
| PLACE1005799 | F-PLACE1005799 | 4550 | R-PLACE1005799 | 9525 |
| PLACE1005802 | F-PLACE1005802 | 4551 | R-PLACE1005802 | 9526 |
| PLACE1005803 | F-PLACE1005803 | 4552 | R-PLACE1005803 | 9527 |
| PLACE1005804 | F-PLACE1005804 | 4553 | R-PLACE1005804 | 9528 |
| PLACE1005813 | F-PLACE1005813 | 4554 | | |
| PLACE1005828 | F-PLACE1005828 | 4555 | R-PLACE1005828 | 9529 |
| PLACE1005834 | F-PLACE1005834 | 4556 | R-PLACE1005834 | 9530 |
| PLACE1005845 | F-PLACE1005845 | 4557 | R-PLACE1005845 | 9531 |
| PLACE1005850 | F-PLACE1005850 | 4558 | R-PLACE1005850 | 9532 |
| PLACE1005851 | F-PLACE1005851 | 4559 | R-PLACE1005851 | 9533 |
| PLACE1005876 | F-PLACE1005876 | 4560 | R-PLACE1005876 | 9534 |
| PLACE1005884 | F-PLACE1005884 | 4561 | R-PLACE1005884 | 9535 |
| PLACE1005890 | F-PLACE1005890 | 4562 | | |
| PLACE1005898 | F-PLACE1005898 | 4563 | R-PLACE1005898 | 9536 |
| PLACE1005921 | F-PLACE1005921 | 4564 | R-PLACE1005921 | 9537 |
| PLACE1005923 | F-PLACE1005923 | 4565 | R-PLACE1005923 | 9538 |
| PLACE1005925 | F-PLACE1005925 | 4566 | R-PLACE1005925 | 9539 |
| PLACE1005932 | F-PLACE1005932 | 4567 | R-PLACE1005932 | 9540 |
| PLACE1005934 | F-PLACE1005934 | 4568 | R-PLACE1005934 | 9541 |
| PLACE1005936 | F-PLACE1005936 | 4569 | R-PLACE1005936 | 9542 |
| PLACE1005951 | F-PLACE1005951 | 4570 | R-PLACE1005951 | 9543 |
| PLACE1005953 | F-PLACE1005953 | 4571 | R-PLACE1005953 | 9544 |
| PLACE1005955 | F-PLACE1005955 | 4572 | R-PLACE1005955 | 9545 |
| PLACE1005966 | F-PLACE1005966 | 4573 | R-PLACE1005966 | 9546 |
| PLACE1005968 | F-PLACE1005968 | 4574 | R-PLACE1005968 | 9547 |
| PLACE1005990 | F-PLACE1005990 | 4575 | R-PLACE1005990 | 9548 |
| PLACE1006002 | F-PLACE1006002 | 4576 | R-PLACE1006002 | 9549 |
| PLACE1006003 | F-PLACE1006003 | 4577 | R-PLACE1006003 | 9550 |
| PLACE1006011 | F-PLACE1006011 | 4578 | R-PLACE1006011 | 9551 |
| PLACE1006017 | F-PLACE1006017 | 4579 | R-PLACE1006017 | 9552 |
| PLACE1006037 | F-PLACE1006037 | 4580 | R-PLACE1006037 | 9553 |
| PLACE1006040 | F-PLACE1006040 | 4581 | R-PLACE1006040 | 9554 |
| PLACE1006076 | F-PLACE1006076 | 4582 | R-PLACE1006076 | 9555 |
| PLACE1006119 | F-PLACE1006119 | 4583 | R-PLACE1006119 | 9556 |
| PLACE1006129 | F-PLACE1006129 | 4584 | R-PLACE1006129 | 9557 |
| PLACE1006139 | F-PLACE1006139 | 4585 | R-PLACE1006139 | 9558 |
| PLACE1006143 | F-PLACE1006143 | 4586 | R-PLACE1006143 | 9559 |
| PLACE1006157 | F-PLACE1006157 | 4587 | R-PLACE1006157 | 9560 |
| PLACE1006159 | F-PLACE1006159 | 4588 | R-PLACE1006159 | 9561 |
| PLACE1006164 | F-PLACE1006164 | 4589 | R-PLACE1006164 | 9562 |
| PLACE1006167 | F-PLACE1006167 | 4590 | R-PLACE1006167 | 9563 |
| PLACE1006170 | F-PLACE1006170 | 4591 | R-nnnnnnnnnnnn | 9564 |
| PLACE1006187 | F-PLACE1006187 | 4592 | R-PLACE1006187 | 9565 |
| PLACE1006195 | F-PLACE1006195 | 4593 | R-PLACE1006195 | 9566 |
| PLACE1006196 | F-PLACE1006196 | 4594 | R-PLACE1006196 | 9567 |
| PLACE1006205 | F-PLACE1006205 | 4595 | R-PLACE1006205 | 9568 |
| PLACE1006223 | F-PLACE1006223 | 4596 | R-PLACE1006223 | 9569 |
| PLACE1006225 | F-PLACE1006225 | 4597 | R-PLACE1006225 | 9570 |
| PLACE1006236 | F-PLACE1006236 | 4598 | R-PLACE1006236 | 9571 |
| PLACE1006239 | F-PLACE1006239 | 4599 | R-nnnnnnnnnnnn | 9572 |
| PLACE1006246 | F-PLACE1006246 | 4600 | R-PLACE1006246 | 9573 |
| PLACE1006248 | F-PLACE1006248 | 4601 | R-PLACE1006248 | 9574 |
| PLACE1006262 | F-PLACE1006262 | 4602 | R-PLACE1006262 | 9575 |
| PLACE1006288 | F-PLACE1006288 | 4603 | R-PLACE1006288 | 9576 |
| PLACE1006318 | F-PLACE1006318 | 4604 | R-PLACE1006318 | 9577 |
| PLACE1006325 | F-PLACE1006325 | 4605 | R-PLACE1006325 | 9578 |
| PLACE1006335 | F-PLACE1006335 | 4606 | R-PLACE1006335 | 9579 |
| PLACE1006357 | F-PLACE1006357 | 4607 | R-PLACE1006357 | 9580 |
| PLACE1006360 | F-PLACE1006360 | 4608 | R-PLACE1006360 | 9581 |
| PLACE1006368 | F-PLACE1006368 | 4609 | R-PLACE1006368 | 9582 |
| PLACE1006371 | F-PLACE1006371 | 4610 | R-PLACE1006371 | 9583 |
| PLACE1006382 | F-PLACE1006382 | 4611 | R-PLACE1006382 | 9584 |
| PLACE1006385 | F-PLACE1006385 | 4612 | R-PLACE1006385 | 9585 |
| PLACE1006412 | F-PLACE1006412 | 4613 | R-PLACE1006412 | 9586 |
| PLACE1006414 | F-PLACE1006414 | 4614 | R-PLACE1006414 | 9587 |
| PLACE1006438 | F-PLACE1006438 | 4615 | R-PLACE1006438 | 9588 |
| PLACE1006445 | F-PLACE1006445 | 4616 | R-PLACE1006445 | 9589 |
| PLACE1006469 | F-PLACE1006469 | 4617 | R-PLACE1006469 | 9590 |
| PLACE1006470 | F-PLACE1006470 | 4618 | R-PLACE1006470 | 9591 |
| PLACE1006482 | F-PLACE1006482 | 4619 | R-PLACE1006482 | 9592 |
| PLACE1006488 | F-PLACE1006488 | 4620 | | |
| PLACE1006492 | F-PLACE1006492 | 4621 | R-PLACE1006492 | 9593 |
| PLACE1006506 | F-PLACE1006506 | 4622 | R-PLACE1006506 | 9594 |
| PLACE1006521 | F-PLACE1006521 | 4623 | R-PLACE1006521 | 9595 |
| PLACE1006531 | F-PLACE1006531 | 4624 | R-PLACE1006531 | 9596 |
| PLACE1006534 | F-PLACE1006534 | 4625 | R-PLACE1006534 | 9597 |
| PLACE1006540 | F-PLACE1006540 | 4626 | R-PLACE1006540 | 9598 |
| PLACE1006552 | F-PLACE1006552 | 4627 | R-PLACE1006552 | 9599 |
| PLACE1006598 | F-PLACE1006598 | 4628 | R-PLACE1006598 | 9600 |
| PLACE1006615 | F-PLACE1006615 | 4629 | R-PLACE1006615 | 9601 |
| PLACE1006617 | F-PLACE1006617 | 4630 | R-PLACE1006617 | 9602 |
| PLACE1006626 | F-PLACE1006626 | 4631 | R-PLACE1006626 | 9603 |
| PLACE1006629 | F-PLACE1006629 | 4632 | R-PLACE1006629 | 9604 |
| PLACE1006640 | F-PLACE1006640 | 4633 | R-PLACE1006640 | 9605 |
| PLACE1006673 | F-PLACE1006673 | 4634 | R-PLACE1006673 | 9606 |
| PLACE1006678 | F-PLACE1006678 | 4635 | R-PLACE1006678 | 9607 |
| PLACE1006704 | F-PLACE1006704 | 4636 | R-PLACE1006704 | 9608 |
| PLACE1006731 | F-PLACE1006731 | 4637 | R-PLACE1006731 | 9609 |
| PLACE1006754 | F-PLACE1006754 | 4638 | R-PLACE1006754 | 9610 |
| PLACE1006760 | F-PLACE1006760 | 4639 | R-PLACE1006760 | 9611 |
| PLACE1006779 | F-PLACE1006779 | 4640 | R-PLACE1006779 | 9612 |
| PLACE1006782 | F-PLACE1006782 | 4641 | R-PLACE1006782 | 9613 |
| PLACE1006792 | F-PLACE1006792 | 4642 | R-PLACE1006792 | 9614 |
| PLACE1006795 | F-PLACE1006795 | 4643 | R-PLACE1006795 | 9615 |
| PLACE1006800 | F-PLACE1006800 | 4644 | R-PLACE1006800 | 9616 |
| PLACE1006805 | F-PLACE1006805 | 4645 | R-PLACE1006805 | 9617 |
| PLACE1006815 | F-PLACE1006815 | 4646 | R-PLACE1006815 | 9618 |
| PLACE1006819 | F-PLACE1006819 | 4647 | R-PLACE1006819 | 9619 |
| PLACE1006829 | F-PLACE1006829 | 4648 | R-PLACE1006829 | 9620 |
| PLACE1006860 | F-PLACE1006860 | 4649 | R-PLACE1006860 | 9621 |
| PLACE1006867 | F-PLACE1006867 | 4650 | R-PLACE1006867 | 9622 |
| PLACE1006878 | F-PLACE1006878 | 4651 | R-PLACE1006878 | 9623 |
| PLACE1006883 | F-PLACE1006883 | 4652 | R-PLACE1006883 | 9624 |
| PLACE1006901 | F-PLACE1006901 | 4653 | R-nnnnnnnnnnnn | 9625 |
| PLACE1006904 | F-PLACE1006904 | 4654 | R-PLACE1006904 | 9626 |
| PLACE1006917 | F-PLACE1006917 | 4655 | R-PLACE1006917 | 9627 |
| PLACE1006932 | F-PLACE1006932 | 4656 | R-PLACE1006932 | 9628 |
| PLACE1006935 | F-PLACE1006935 | 4657 | R-PLACE1006935 | 9629 |
| PLACE1006956 | F-PLACE1006956 | 4658 | | |
| PLACE1006958 | F-PLACE1006958 | 4659 | R-nnnnnnnnnnnn | 9630 |
| PLACE1006961 | F-PLACE1006961 | 4660 | R-PLACE1006961 | 9631 |
| PLACE1006962 | F-PLACE1006962 | 4661 | R-PLACE1006962 | 9632 |
| PLACE1006966 | F-PLACE1006966 | 4662 | R-PLACE1006966 | 9633 |
| PLACE1006989 | F-PLACE1006989 | 4663 | R-PLACE1006989 | 9634 |
| PLACE1007014 | F-PLACE1007014 | 4664 | R-PLACE1007014 | 9635 |
| PLACE1007021 | F-PLACE1007021 | 4665 | R-PLACE1007021 | 9636 |
| PLACE1007045 | F-PLACE1007045 | 4666 | R-PLACE1007045 | 9637 |
| PLACE1007053 | F-PLACE1007053 | 4667 | R-PLACE1007053 | 9638 |
| PLACE1007068 | F-PLACE1007068 | 4668 | | |
| PLACE1007097 | F-PLACE1007097 | 4669 | R-PLACE1007097 | 9639 |
| PLACE1007105 | F-PLACE1007105 | 4670 | R-PLACE1007105 | 9640 |
| PLACE1007111 | F-PLACE1007111 | 4671 | R-PLACE1007111 | 9641 |
| PLACE1007112 | F-PLACE1007112 | 4672 | R-PLACE1007112 | 9642 |
| PLACE1007132 | F-PLACE1007132 | 4673 | R-PLACE1007132 | 9643 |
| PLACE1007140 | F-PLACE1007140 | 4674 | R-PLACE1007140 | 9644 |
| PLACE1007178 | F-PLACE1007178 | 4675 | R-PLACE1007178 | 9645 |
| PLACE1007226 | F-PLACE1007226 | 4676 | R-PLACE1007226 | 9646 |
| PLACE1007238 | F-PLACE1007238 | 4677 | R-PLACE1007238 | 9647 |
| PLACE1007239 | F-PLACE1007239 | 4678 | R-PLACE1007239 | 9648 |
| PLACE1007242 | F-PLACE1007242 | 4679 | R-PLACE1007242 | 9649 |
| PLACE1007243 | F-PLACE1007243 | 4680 | R-PLACE1007243 | 9650 |
| PLACE1007257 | F-PLACE1007257 | 4681 | R-PLACE1007257 | 9651 |
| PLACE1007274 | F-PLACE1007274 | 4682 | R-PLACE1007274 | 9652 |
| PLACE1007276 | F-PLACE1007276 | 4683 | R-PLACE1007276 | 9653 |
| PLACE1007282 | F-PLACE1007282 | 4684 | R-PLACE1007282 | 9654 |
| PLACE1007286 | F-PLACE1007286 | 4685 | R-PLACE1007286 | 9655 |
| PLACE1007301 | F-PLACE1007301 | 4686 | R-PLACE1007301 | 9656 |
| PLACE1007317 | F-PLACE1007317 | 4687 | R-PLACE1007317 | 9657 |
| PLACE1007342 | F-PLACE1007342 | 4688 | R-PLACE1007342 | 9658 |
| PLACE1007346 | F-PLACE1007346 | 4689 | R-PLACE1007346 | 9659 |
| PLACE1007367 | F-PLACE1007367 | 4690 | R-PLACE1007367 | 9660 |
| PLACE1007375 | F-PLACE1007375 | 4691 | R-PLACE1007375 | 9661 |
| PLACE1007386 | F-PLACE1007386 | 4692 | R-PLACE1007386 | 9662 |
| PLACE1007402 | F-PLACE1007402 | 4693 | R-PLACE1007402 | 9663 |
| PLACE1007409 | F-PLACE1007409 | 4694 | R-PLACE1007409 | 9664 |
| PLACE1007416 | F-PLACE1007416 | 4695 | R-PLACE1007416 | 9665 |
| PLACE1007450 | F-PLACE1007450 | 4696 | R-PLACE1007450 | 9666 |
| PLACE1007452 | F-PLACE1007452 | 4697 | R-PLACE1007452 | 9667 |
| PLACE1007454 | F-PLACE1007454 | 4698 | | |
| PLACE1007460 | F-PLACE1007460 | 4699 | R-PLACE1007460 | 9668 |
| PLACE1007478 | F-PLACE1007478 | 4700 | R-PLACE1007478 | 9669 |
| PLACE1007484 | F-PLACE1007484 | 4701 | R-PLACE1007484 | 9670 |
| PLACE1007488 | F-PLACE1007488 | 4702 | R-PLACE1007488 | 9671 |
| PLACE1007507 | F-PLACE1007507 | 4703 | R-PLACE1007507 | 9672 |
| PLACE1007511 | F-PLACE1007511 | 4704 | R-PLACE1007511 | 9673 |
| PLACE1007524 | F-PLACE1007524 | 4705 | R-PLACE1007524 | 9674 |
| PLACE1007525 | F-PLACE1007525 | 4706 | R-PLACE1007525 | 9675 |
| PLACE1007537 | F-PLACE1007537 | 4707 | | |
| PLACE1007544 | F-PLACE1007544 | 4708 | R-PLACE1007544 | 9676 |
| PLACE1007547 | F-PLACE1007547 | 4709 | R-PLACE1007547 | 9677 |
| PLACE1007557 | F-PLACE1007557 | 4710 | R-PLACE1007557 | 9678 |
| PLACE1007583 | F-PLACE1007583 | 4711 | R-PLACE1007583 | 9679 |
| PLACE1007598 | F-PLACE1007598 | 4712 | R-PLACE1007598 | 9680 |
| PLACE1007618 | F-PLACE1007618 | 4713 | R-PLACE1007618 | 9681 |
| PLACE1007621 | F-PLACE1007621 | 4714 | R-PLACE1007621 | 9682 |
| PLACE1007632 | F-PLACE1007632 | 4715 | R-PLACE1007632 | 9683 |
| PLACE1007645 | F-PLACE1007645 | 4716 | R-PLACE1007645 | 9684 |
| PLACE1007649 | F-PLACE1007649 | 4717 | R-PLACE1007649 | 9685 |
| PLACE1007677 | F-PLACE1007677 | 4718 | R-PLACE1007677 | 9686 |
| PLACE1007688 | F-PLACE1007688 | 4719 | R-PLACE1007688 | 9687 |
| PLACE1007690 | F-PLACE1007690 | 4720 | R-PLACE1007690 | 9688 |
| PLACE1007697 | F-PLACE1007697 | 4721 | R-PLACE1007697 | 9689 |
| PLACE1007705 | F-PLACE1007705 | 4722 | R-PLACE1007705 | 9690 |
| PLACE1007706 | F-PLACE1007706 | 4723 | R-PLACE1007706 | 9691 |
| PLACE1007725 | F-PLACE1007725 | 4724 | R-PLACE1007725 | 9692 |
| PLACE1007729 | F-PLACE1007729 | 4725 | R-PLACE1007729 | 9693 |
| PLACE1007730 | F-PLACE1007730 | 4726 | R-PLACE1007730 | 9694 |
| PLACE1007737 | F-PLACE1007737 | 4727 | R-PLACE1007737 | 9695 |
| PLACE1007743 | F-PLACE1007743 | 4728 | R-PLACE1007743 | 9696 |
| PLACE1007746 | F-PLACE1007746 | 4729 | R-PLACE1007746 | 9697 |
| PLACE1007791 | F-PLACE1007791 | 4730 | R-PLACE1007791 | 9698 |
| PLACE1007807 | F-PLACE1007807 | 4731 | R-PLACE1007807 | 9699 |
| PLACE1007810 | F-PLACE1007810 | 4732 | R-PLACE1007810 | 9700 |
| PLACE1007829 | F-PLACE1007829 | 4733 | R-PLACE1007829 | 9701 |
| PLACE1007843 | F-PLACE1007843 | 4734 | R-PLACE1007843 | 9702 |
| PLACE1007846 | F-PLACE1007846 | 4735 | R-PLACE1007846 | 9703 |
| PLACE1007852 | F-PLACE1007852 | 4736 | R-PLACE1007852 | 9704 |
| PLACE1007858 | F-PLACE1007858 | 4737 | R-PLACE1007858 | 9705 |
| PLACE1007866 | F-PLACE1007866 | 4738 | R-PLACE1007866 | 9706 |
| PLACE1007877 | F-PLACE1007877 | 4739 | R-PLACE1007877 | 9707 |
| PLACE1007897 | F-PLACE1007897 | 4740 | R-PLACE1007897 | 9708 |
| PLACE1007908 | F-PLACE1007908 | 4741 | R-PLACE1007908 | 9709 |
| PLACE1007946 | F-PLACE1007946 | 4742 | R-PLACE1007946 | 9710 |
| PLACE1007954 | F-PLACE1007954 | 4743 | R-PLACE1007954 | 9711 |
| PLACE1007955 | F-PLACE1007955 | 4744 | R-PLACE1007955 | 9712 |
| PLACE1007958 | F-PLACE1007958 | 4745 | R-PLACE1007958 | 9713 |
| PLACE1007969 | F-PLACE1007969 | 4746 | R-PLACE1007969 | 9714 |
| PLACE1007990 | F-PLACE1007990 | 4747 | R-PLACE1007990 | 9715 |
| PLACE1008000 | F-PLACE1008000 | 4748 | R-PLACE1008000 | 9716 |
| PLACE1008002 | F-PLACE1008002 | 4749 | R-PLACE1008002 | 9717 |
| PLACE1008044 | F-PLACE1008044 | 4750 | R-PLACE1008044 | 9718 |
| PLACE1008045 | F-PLACE1008045 | 4751 | R-PLACE1008045 | 9719 |
| PLACE1008080 | F-PLACE1008080 | 4752 | R-PLACE1008080 | 9720 |
| PLACE1008095 | F-PLACE1008095 | 4753 | R-PLACE1008095 | 9721 |
| PLACE1008111 | F-PLACE1008111 | 4754 | R-PLACE1008111 | 9722 |
| PLACE1008122 | F-PLACE1008122 | 4755 | R-PLACE1008122 | 9723 |
| PLACE1008129 | F-PLACE1008129 | 4756 | R-PLACE1008129 | 9724 |
| PLACE1008132 | F-PLACE1008132 | 4757 | R-PLACE1008132 | 9725 |
| PLACE1008177 | F-PLACE1008177 | 4758 | R-PLACE1008177 | 9726 |
| PLACE1008181 | F-PLACE1008181 | 4759 | R-PLACE1008181 | 9727 |
| PLACE1008198 | F-PLACE1008198 | 4760 | R-PLACE1008198 | 9728 |
| PLACE1008201 | F-PLACE1008201 | 4761 | R-nnnnnnnnnnnn | 9729 |
| PLACE1008209 | F-PLACE1008209 | 4762 | R-PLACE1008209 | 9730 |
| PLACE1008231 | F-PLACE1008231 | 4763 | R-PLACE1008231 | 9731 |
| PLACE1008244 | F-PLACE1008244 | 4764 | R-PLACE1008244 | 9732 |
| PLACE1008273 | F-PLACE1008273 | 4765 | R-PLACE1008273 | 9733 |
| PLACE1008275 | F-PLACE1008275 | 4766 | R-nnnnnnnnnnnn | 9734 |
| PLACE1008280 | F-PLACE1008280 | 4767 | R-PLACE1008280 | 9735 |
| PLACE1008309 | F-PLACE1008309 | 4768 | R-PLACE1008309 | 9736 |
| PLACE1008329 | F-PLACE1008329 | 4769 | R-PLACE1008329 | 9737 |
| PLACE1008330 | F-PLACE1008330 | 4770 | R-PLACE1008330 | 9738 |
| PLACE1008331 | F-PLACE1008331 | 4771 | R-PLACE1008331 | 9739 |
| PLACE1008356 | F-PLACE1008356 | 4772 | R-PLACE1008356 | 9740 |
| PLACE1008368 | F-PLACE1008368 | 4773 | R-PLACE1008368 | 9741 |
| PLACE1008369 | F-PLACE1008369 | 4774 | R-PLACE1008369 | 9742 |
| PLACE1008392 | F-PLACE1008392 | 4775 | R-PLACE1008392 | 9743 |
| PLACE1008398 | F-PLACE1008398 | 4776 | R-PLACE1008398 | 9744 |
| PLACE1008401 | F-PLACE1008401 | 4777 | R-PLACE1008401 | 9745 |
| PLACE1008402 | F-PLACE1008402 | 4778 | R-nnnnnnnnnnnn | 9746 |
| PLACE1008405 | F-PLACE1008405 | 4779 | R-PLACE1008405 | 9747 |
| PLACE1008424 | F-PLACE1008424 | 4780 | R-PLACE1008424 | 9748 |
| PLACE1008426 | F-PLACE1008426 | 4781 | R-PLACE1008426 | 9749 |
| PLACE1008429 | F-PLACE1008429 | 4782 | R-PLACE1008429 | 9750 |
| PLACE1008437 | F-PLACE1008437 | 4783 | R-PLACE1008437 | 9751 |
| PLACE1008455 | F-PLACE1008455 | 4784 | R-PLACE1008455 | 9752 |
| PLACE1008457 | F-PLACE1008457 | 4785 | R-PLACE1008457 | 9753 |
| PLACE1008465 | F-PLACE1008465 | 4786 | R-PLACE1008465 | 9754 |
| PLACE1008488 | F-PLACE1008488 | 4787 | R-PLACE1008488 | 9755 |
| PLACE1008524 | F-PLACE1008524 | 4788 | R-PLACE1008524 | 9756 |
| PLACE1008531 | F-PLACE1008531 | 4789 | R-PLACE1008531 | 9757 |
| PLACE1008532 | F-PLACE1008532 | 4790 | R-PLACE1008532 | 9758 |
| PLACE1008533 | F-PLACE1008533 | 4791 | R-PLACE1008533 | 9759 |
| PLACE1008568 | F-PLACE1008568 | 4792 | R-PLACE1008568 | 9760 |
| PLACE1008584 | F-PLACE1008584 | 4793 | R-PLACE1008584 | 9761 |
| PLACE1008603 | F-PLACE1008603 | 4794 | | |
| PLACE1008621 | F-PLACE1008621 | 4795 | R-PLACE1008621 | 9762 |
| PLACE1008625 | F-PLACE1008625 | 4796 | R-nnnnnnnnnnnn | 9763 |
| PLACE1008626 | F-PLACE1008626 | 4797 | R-PLACE1008626 | 9764 |
| PLACE1008627 | F-PLACE1008627 | 4798 | R-PLACE1008627 | 9765 |
| PLACE1008629 | F-PLACE1008629 | 4799 | R-PLACE1008629 | 9766 |
| PLACE1008630 | F-PLACE1008630 | 4800 | R-PLACE1008630 | 9767 |
| PLACE1008643 | F-PLACE1008643 | 4801 | R-PLACE1008643 | 9768 |
| PLACE1008650 | F-PLACE1008650 | 4802 | R-PLACE1008650 | 9769 |
| PLACE1008693 | F-PLACE1008693 | 4803 | R-PLACE1008693 | 9770 |
| PLACE1008696 | F-PLACE1008696 | 4804 | R-PLACE1008696 | 9771 |
| PLACE1008715 | F-PLACE1008715 | 4805 | R-PLACE1008715 | 9772 |
| PLACE1008748 | F-PLACE1008748 | 4806 | R-PLACE1008748 | 9773 |
| PLACE1008757 | F-PLACE1008757 | 4807 | R-PLACE1008757 | 9774 |
| PLACE1008790 | F-PLACE1008790 | 4808 | R-PLACE1008790 | 9775 |
| PLACE1008798 | F-PLACE1008798 | 4809 | R-PLACE1008798 | 9776 |
| PLACE1008807 | F-PLACE1008807 | 4810 | R-PLACE1008807 | 9777 |
| PLACE1008808 | F-PLACE1008808 | 4811 | R-PLACE1008808 | 9778 |
| PLACE1008813 | F-PLACE1008813 | 4812 | R-PLACE1008813 | 9779 |
| PLACE1008851 | F-PLACE1008851 | 4813 | R-PLACE1008851 | 9780 |
| PLACE1008854 | F-PLACE1008854 | 4814 | R-nnnnnnnnnnnn | 9781 |
| PLACE1008867 | F-PLACE1008867 | 4815 | R-PLACE1008867 | 9782 |
| PLACE1008887 | F-PLACE1008887 | 4816 | R-PLACE1008887 | 9783 |
| PLACE1008902 | F-PLACE1008902 | 4817 | R-PLACE1008902 | 9784 |
| PLACE1008920 | F-PLACE1008920 | 4818 | R-PLACE1008920 | 9785 |
| PLACE1008925 | F-PLACE1008925 | 4819 | R-PLACE1008925 | 9786 |
| PLACE1008934 | F-PLACE1008934 | 4820 | R-PLACE1008934 | 9787 |
| PLACE1008941 | F-PLACE1008941 | 4821 | R-PLACE1008941 | 9788 |
| PLACE1008947 | F-PLACE1008947 | 4822 | R-PLACE1008947 | 9789 |
| PLACE1009020 | F-PLACE1009020 | 4823 | R-PLACE1009020 | 9790 |
| PLACE1009027 | F-PLACE1009027 | 4824 | R-PLACE1009027 | 9791 |
| PLACE1009039 | F-PLACE1009039 | 4825 | R-PLACE1009039 | 9792 |
| PLACE1009045 | F-PLACE1009045 | 4826 | R-PLACE1009045 | 9793 |
| PLACE1009048 | F-PLACE1009048 | 4827 | R-PLACE1009048 | 9794 |
| PLACE1009050 | F-PLACE1009050 | 4828 | R-PLACE1009050 | 9795 |
| PLACE1009060 | F-PLACE1009060 | 4829 | R-PLACE1009060 | 9796 |
| PLACE1009090 | F-PLACE1009090 | 4830 | R-PLACE1009090 | 9797 |
| PLACE1009091 | F-PLACE1009091 | 4831 | | |
| PLACE1009094 | F-PLACE1009094 | 4832 | R-PLACE1009094 | 9798 |
| PLACE1009099 | F-PLACE1009099 | 4833 | R-PLACE1009099 | 9799 |
| PLACE1009110 | F-PLACE1009110 | 4834 | R-PLACE1009110 | 9800 |
| PLACE1009111 | F-PLACE1009111 | 4835 | R-PLACE1009111 | 9801 |
| PLACE1009113 | F-PLACE1009113 | 4836 | | |
| PLACE1009130 | F-PLACE1009130 | 4837 | R-PLACE1009130 | 9802 |
| PLACE1009150 | F-PLACE1009150 | 4838 | R-PLACE1009150 | 9803 |
| PLACE1009155 | F-PLACE1009155 | 4839 | R-PLACE1009155 | 9804 |
| PLACE1009158 | F-PLACE1009158 | 4840 | R-PLACE1009158 | 9805 |
| PLACE1009166 | F-PLACE1009166 | 4841 | R-PLACE1009166 | 9806 |
| PLACE1009172 | F-PLACE1009172 | 4842 | R-PLACE1009172 | 9807 |
| PLACE1009174 | F-PLACE1009174 | 4843 | R-PLACE1009174 | 9808 |
| PLACE1009183 | F-PLACE1009183 | 4844 | R-PLACE1009183 | 9809 |
| PLACE1009186 | F-PLACE1009186 | 4845 | R-PLACE1009186 | 9810 |
| PLACE1009190 | F-PLACE1009190 | 4846 | R-PLACE1009190 | 9811 |
| PLACE1009200 | F-PLACE1009200 | 4847 | R-PLACE1009200 | 9812 |
| PLACE1009230 | F-PLACE1009230 | 4848 | R-PLACE1009230 | 9813 |
| PLACE1009246 | F-PLACE1009246 | 4849 | R-PLACE1009246 | 9814 |
| PLACE1009298 | F-PLACE1009298 | 4850 | | |
| PLACE1009308 | F-PLACE1009308 | 4851 | R-PLACE1009308 | 9815 |
| PLACE1009319 | F-PLACE1009319 | 4852 | R-PLACE1009319 | 9816 |
| PLACE1009328 | F-PLACE1009328 | 4853 | R-PLACE1009328 | 9817 |
| PLACE1009335 | F-PLACE1009335 | 4854 | R-PLACE1009335 | 9818 |
| PLACE1009338 | F-PLACE1009338 | 4855 | R-PLACE1009338 | 9819 |
| PLACE1009368 | F-PLACE1009368 | 4856 | R-PLACE1009368 | 9820 |
| PLACE1009375 | F-PLACE1009375 | 4857 | R-PLACE1009375 | 9821 |
| PLACE1009388 | F-PLACE1009388 | 4858 | R-PLACE1009388 | 9822 |
| PLACE1009398 | F-PLACE1009398 | 4859 | R-PLACE1009398 | 9823 |
| PLACE1009404 | F-PLACE1009404 | 4860 | R-nnnnnnnnnnnn | 9824 |
| PLACE1009410 | F-PLACE1009410 | 4861 | R-PLACE1009410 | 9825 |
| PLACE1009434 | F-PLACE1009434 | 4862 | R-PLACE1009434 | 9826 |
| PLACE1009443 | F-PLACE1009443 | 4863 | R-PLACE1009443 | 9827 |
| PLACE1009444 | F-PLACE1009444 | 4864 | R-PLACE1009444 | 9828 |
| PLACE1009459 | F-PLACE1009459 | 4865 | R-PLACE1009459 | 9829 |
| PLACE1009468 | F-PLACE1009468 | 4866 | | |
| PLACE1009476 | F-PLACE1009476 | 4867 | R-PLACE1009476 | 9830 |
| PLACE1009477 | F-PLACE1009477 | 4868 | R-PLACE1009477 | 9831 |
| PLACE1009493 | F-PLACE1009493 | 4869 | R-PLACE1009493 | 9832 |
| PLACE1009524 | F-PLACE1009524 | 4870 | R-PLACE1009524 | 9833 |
| PLACE1009539 | F-PLACE1009539 | 4871 | R-PLACE1009539 | 9834 |
| PLACE1009542 | F-PLACE1009542 | 4872 | R-PLACE1009542 | 9835 |
| PLACE1009571 | F-PLACE1009571 | 4873 | R-PLACE1009571 | 9836 |
| PLACE1009581 | F-PLACE1009581 | 4874 | R-PLACE1009581 | 9837 |
| PLACE1009595 | F-PLACE1009595 | 4875 | R-PLACE1009595 | 9838 |
| PLACE1009596 | F-PLACE1009596 | 4876 | R-PLACE1009596 | 9839 |
| PLACE1009607 | F-PLACE1009607 | 4877 | R-PLACE1009607 | 9840 |
| PLACE1009613 | F-PLACE1009613 | 4878 | R-PLACE1009613 | 9841 |
| PLACE1009621 | F-PLACE1009621 | 4879 | R-PLACE1009621 | 9842 |
| PLACE1009622 | F-PLACE1009622 | 4880 | R-PLACE1009622 | 9843 |
| PLACE1009637 | F-PLACE1009637 | 4881 | R-PLACE1009637 | 9844 |
| PLACE1009639 | F-PLACE1009639 | 4882 | R-PLACE1009639 | 9845 |
| PLACE1009659 | F-PLACE1009659 | 4883 | R-PLACE1009659 | 9846 |
| PLACE1009665 | F-PLACE1009665 | 4884 | R-PLACE1009665 | 9847 |
| PLACE1009670 | F-PLACE1009670 | 4885 | R-PLACE1009670 | 9848 |
| PLACE1009708 | F-PLACE1009708 | 4886 | R-PLACE1009708 | 9849 |
| PLACE1009721 | F-PLACE1009721 | 4887 | R-PLACE1009721 | 9850 |
| PLACE1009731 | F-PLACE1009731 | 4888 | R-PLACE1009731 | 9851 |
| PLACE1009763 | F-PLACE1009763 | 4889 | R-PLACE1009763 | 9852 |
| PLACE1009794 | F-PLACE1009794 | 4890 | R-PLACE1009794 | 9853 |
| PLACE1009798 | F-PLACE1009798 | 4891 | R-nnnnnnnnnnnn | 9854 |
| PLACE1009845 | F-PLACE1009845 | 4892 | R-PLACE1009845 | 9855 |
| PLACE1009861 | F-PLACE1009861 | 4893 | | |
| PLACE1009879 | F-PLACE1009879 | 4894 | R-PLACE1009879 | 9856 |
| PLACE1009886 | F-PLACE1009886 | 4895 | R-PLACE1009886 | 9857 |
| PLACE1009888 | F-PLACE1009888 | 4896 | R-PLACE1009888 | 9858 |
| PLACE1009908 | F-PLACE1009908 | 4897 | R-nnnnnnnnnnnn | 9859 |
| PLACE1009921 | F-PLACE1009921 | 4898 | R-PLACE1009921 | 9860 |
| PLACE1009924 | F-PLACE1009924 | 4899 | R-PLACE1009924 | 9861 |
| PLACE1009925 | F-PLACE1009925 | 4900 | R-PLACE1009925 | 9862 |
| PLACE1009935 | F-PLACE1009935 | 4901 | R-PLACE1009935 | 9863 |
| PLACE1009947 | F-PLACE1009947 | 4902 | R-PLACE1009947 | 9864 |
| PLACE1009971 | F-PLACE1009971 | 4903 | R-PLACE1009971 | 9865 |
| PLACE1009992 | F-PLACE1009992 | 4904 | R-PLACE1009992 | 9866 |
| PLACE1009995 | F-PLACE1009995 | 4905 | R-PLACE1009995 | 9867 |
| PLACE1009997 | F-PLACE1009997 | 4906 | R-PLACE1009997 | 9868 |
| PLACE1010023 | F-PLACE1010023 | 4907 | R-PLACE1010023 | 9869 |
| PLACE1010031 | F-PLACE1010031 | 4908 | R-PLACE1010031 | 9870 |
| PLACE1010053 | F-PLACE1010053 | 4909 | R-PLACE1010053 | 9871 |
| PLACE1010069 | F-PLACE1010069 | 4910 | R-PLACE1010069 | 9872 |
| PLACE1010074 | F-PLACE1010074 | 4911 | R-PLACE1010074 | 9873 |
| PLACE1010076 | F-PLACE1010076 | 4912 | R-PLACE1010076 | 9874 |
| PLACE1010083 | F-PLACE1010083 | 4913 | R-PLACE1010083 | 9875 |
| PLACE1010089 | F-PLACE1010089 | 4914 | R-PLACE1010089 | 9876 |
| PLACE1010096 | F-PLACE1010096 | 4915 | R-PLACE1010096 | 9877 |
| PLACE1010102 | F-PLACE1010102 | 4916 | R-PLACE1010102 | 9878 |
| PLACE1010105 | F-PLACE1010105 | 4917 | R-PLACE1010105 | 9879 |
| PLACE1010106 | F-PLACE1010106 | 4918 | R-PLACE1010106 | 9880 |
| PLACE1010134 | F-PLACE1010134 | 4919 | R-PLACE1010134 | 9881 |
| PLACE1010148 | F-PLACE1010148 | 4920 | R-PLACE1010148 | 9882 |
| PLACE1010152 | F-PLACE1010152 | 4921 | R-PLACE1010152 | 9883 |
| PLACE1010181 | F-PLACE1010181 | 4922 | R-PLACE1010181 | 9884 |
| PLACE1010194 | F-PLACE1010194 | 4923 | R-PLACE1010194 | 9885 |
| PLACE1010202 | F-PLACE1010202 | 4924 | R-PLACE1010202 | 9886 |
| PLACE1010231 | F-PLACE1010231 | 4925 | R-PLACE1010231 | 9887 |
| PLACE1010261 | F-PLACE1010261 | 4926 | R-PLACE1010261 | 9888 |
| PLACE1010270 | F-PLACE1010270 | 4927 | R-PLACE1010270 | 9889 |
| PLACE1010274 | F-PLACE1010274 | 4928 | R-PLACE1010274 | 9890 |
| PLACE1010293 | F-PLACE1010293 | 4929 | R-PLACE1010293 | 9891 |
| PLACE1010310 | F-PLACE1010310 | 4930 | | |
| PLACE1010321 | F-PLACE1010321 | 4931 | R-PLACE1010321 | 9892 |
| PLACE1010324 | F-PLACE1010324 | 4932 | R-PLACE1010324 | 9893 |
| PLACE1010329 | F-PLACE1010329 | 4933 | R-PLACE1010329 | 9894 |
| PLACE1010341 | F-PLACE1010341 | 4934 | R-PLACE1010341 | 9895 |
| PLACE1010362 | F-PLACE1010362 | 4935 | R-PLACE1010362 | 9896 |
| PLACE1010364 | F-PLACE1010364 | 4936 | R-PLACE1010364 | 9897 |
| PLACE1010383 | F-PLACE1010383 | 4937 | R-PLACE1010383 | 9898 |
| PLACE1010401 | F-PLACE1010401 | 4938 | R-PLACE1010401 | 9899 |
| PLACE1010481 | F-PLACE1010481 | 4939 | R-PLACE1010481 | 9900 |
| PLACE1010491 | F-PLACE1010491 | 4940 | R-PLACE1010491 | 9901 |
| PLACE1010492 | F-PLACE1010492 | 4941 | R-PLACE1010492 | 9902 |
| PLACE1010522 | F-PLACE1010522 | 4942 | R-PLACE1010522 | 9903 |
| PLACE1010529 | F-PLACE1010529 | 4943 | | |
| PLACE1010547 | F-PLACE1010547 | 4944 | R-nnnnnnnnnnnn | 9904 |
| PLACE1010562 | F-PLACE1010562 | 4945 | R-PLACE1010562 | 9905 |
| PLACE1010579 | F-PLACE1010579 | 4946 | R-PLACE1010579 | 9906 |
| PLACE1010580 | F-PLACE1010580 | 4947 | R-PLACE1010580 | 9907 |
| PLACE1010599 | F-PLACE1010599 | 4948 | R-PLACE1010599 | 9908 |
| PLACE1010616 | F-PLACE1010616 | 4949 | R-PLACE1010616 | 9909 |
| PLACE1010622 | F-PLACE1010622 | 4950 | R-PLACE1010622 | 9910 |
| PLACE1010624 | F-PLACE1010624 | 4951 | R-PLACE1010624 | 9911 |
| PLACE1010628 | F-PLACE1010628 | 4952 | R-PLACE1010628 | 9912 |
| PLACE1010629 | F-PLACE1010629 | 4953 | R-PLACE1010629 | 9913 |
| PLACE1010630 | F-PLACE1010630 | 4954 | R-PLACE1010630 | 9914 |
| PLACE1010631 | F-PLACE1010631 | 4955 | R-PLACE1010631 | 9915 |
| PLACE1010661 | F-PLACE1010661 | 4956 | R-PLACE1010661 | 9916 |
| PLACE1010662 | F-PLACE1010662 | 4957 | R-PLACE1010662 | 9917 |
| PLACE1010702 | F-PLACE1010702 | 4958 | R-PLACE1010702 | 9918 |
| PLACE1010714 | F-PLACE1010714 | 4959 | R-PLACE1010714 | 9919 |
| PLACE1010720 | F-PLACE1010720 | 4960 | R-PLACE1010720 | 9920 |
| PLACE1010739 | F-PLACE1010739 | 4961 | R-PLACE1010739 | 9921 |
| PLACE1010743 | F-PLACE1010743 | 4962 | R-PLACE1010743 | 9922 |
| PLACE1010761 | F-PLACE1010761 | 4963 | R-PLACE1010761 | 9923 |
| PLACE1010771 | F-PLACE1010771 | 4964 | R-PLACE1010771 | 9924 |
| PLACE1010786 | F-PLACE1010786 | 4965 | R-PLACE1010786 | 9925 |
| PLACE1010800 | F-PLACE1010800 | 4966 | R-PLACE1010800 | 9926 |
| PLACE1010802 | F-PLACE1010802 | 4967 | R-PLACE1010802 | 9927 |
| PLACE1010811 | F-PLACE1010811 | 4968 | R-PLACE1010811 | 9928 |
| PLACE1010833 | F-PLACE1010833 | 4969 | R-PLACE1010833 | 9929 |
| PLACE1010856 | F-PLACE1010856 | 4970 | R-PLACE1010856 | 9930 |
| PLACE1010857 | F-PLACE1010857 | 4971 | R-PLACE1010857 | 9931 |
| PLACE1010870 | F-PLACE1010870 | 4972 | R-PLACE1010870 | 9932 |
| PLACE1010877 | F-PLACE1010877 | 4973 | R-PLACE1010877 | 9933 |
| PLACE1010891 | F-PLACE1010891 | 4974 | R-PLACE1010891 | 9934 |
| PLACE1010896 | F-PLACE1010896 | 4975 | R-PLACE1010896 | 9935 |
| PLACE1010900 | F-PLACE1010900 | 4976 | R-PLACE1010900 | 9936 |
| PLACE1010916 | F-PLACE1010916 | 4977 | R-PLACE1010916 | 9937 |
| PLACE1010917 | F-PLACE1010917 | 4978 | R-PLACE1010917 | 9938 |
| PLACE1010925 | F-PLACE1010925 | 4979 | R-PLACE1010925 | 9939 |
| PLACE1010926 | F-PLACE1010926 | 4980 | R-PLACE1010926 | 9940 |
| PLACE1010942 | F-PLACE1010942 | 4981 | R-nnnnnnnnnnnn | 9941 |
| PLACE1010944 | F-PLACE1010944 | 4982 | R-PLACE1010944 | 9942 |
| PLACE1010947 | F-PLACE1010947 | 4983 | R-PLACE1010947 | 9943 |
| PLACE1010954 | F-PLACE1010954 | 4984 | R-PLACE1010954 | 9944 |
| PLACE1010960 | F-PLACE1010960 | 4985 | R-PLACE1010960 | 9945 |
| PLACE1010965 | F-PLACE1010965 | 4986 | R-PLACE1010965 | 9946 |
| PLACE1011026 | F-PLACE1011026 | 4987 | R-PLACE1011026 | 9947 |
| PLACE1011032 | F-PLACE1011032 | 4988 | R-PLACE1011032 | 9948 |
| PLACE1011041 | F-PLACE1011041 | 4989 | R-PLACE1011041 | 9949 |
| PLACE1011046 | F-PLACE1011046 | 4990 | R-nnnnnnnnnnnn | 9950 |
| PLACE1011054 | F-PLACE1011054 | 4991 | R-PLACE1011054 | 9951 |
| PLACE1011056 | F-PLACE1011056 | 4992 | R-PLACE1011056 | 9952 |
| PLACE1011057 | F-PLACE1011057 | 4993 | R-PLACE1011057 | 9953 |
| PLACE1011090 | F-PLACE1011090 | 4994 | R-PLACE1011090 | 9954 |
| PLACE1011109 | F-PLACE1011109 | 4995 | R-PLACE1011109 | 9955 |
| PLACE1011114 | F-PLACE1011114 | 4996 | R-PLACE1011114 | 9956 |
| PLACE1011133 | F-PLACE1011133 | 4997 | R-PLACE1011133 | 9957 |
| PLACE1011143 | F-PLACE1011143 | 4998 | R-PLACE1011143 | 9958 |
| PLACE1011160 | F-PLACE1011160 | 4999 | R-PLACE1011160 | 9959 |
| PLACE1011165 | F-PLACE1011165 | 5000 | R-PLACE1011165 | 9960 |
| PLACE1011185 | F-PLACE1011185 | 5001 | R-PLACE1011185 | 9961 |
| PLACE1011203 | F-PLACE1011203 | 5002 | R-PLACE1011203 | 9962 |
| PLACE1011214 | F-PLACE1011214 | 5003 | | |
| PLACE1011219 | F-PLACE1011219 | 5004 | R-PLACE1011219 | 9963 |
| PLACE1011221 | F-PLACE1011221 | 5005 | R-PLACE1011221 | 9964 |
| PLACE1011229 | F-PLACE1011229 | 5006 | R-PLACE1011229 | 9965 |
| PLACE1011263 | F-PLACE1011263 | 5007 | R-PLACE1011263 | 9966 |
| PLACE1011273 | F-PLACE1011273 | 5008 | R-PLACE1011273 | 9967 |
| PLACE1011291 | F-PLACE1011291 | 5009 | R-PLACE1011291 | 9968 |
| PLACE1011296 | F-PLACE1011296 | 5010 | R-PLACE1011296 | 9969 |
| PLACE1011310 | F-PLACE1011310 | 5011 | R-PLACE1011310 | 9970 |
| PLACE1011325 | F-PLACE1011325 | 5012 | R-PLACE1011325 | 9971 |
| PLACE1011332 | F-PLACE1011332 | 5013 | R-PLACE1011332 | 9972 |
| PLACE1011340 | F-PLACE1011340 | 5014 | R-PLACE1011340 | 9973 |
| PLACE1011371 | F-PLACE1011371 | 5015 | | |
| PLACE1011375 | F-PLACE1011375 | 5016 | R-PLACE1011375 | 9974 |
| PLACE1011399 | F-PLACE1011399 | 5017 | R-PLACE1011399 | 9975 |
| PLACE1011419 | F-PLACE1011419 | 5018 | R-PLACE1011419 | 9976 |
| PLACE1011433 | F-PLACE1011433 | 5019 | R-nnnnnnnnnnnn | 9977 |
| PLACE1011452 | F-PLACE1011452 | 5020 | R-PLACE1011452 | 9978 |
| PLACE1011465 | F-PLACE1011465 | 5021 | R-PLACE1011465 | 9979 |
| PLACE1011472 | F-PLACE1011472 | 5022 | R-PLACE1011472 | 9980 |
| PLACE1011477 | F-PLACE1011477 | 5023 | | |
| PLACE1011492 | F-PLACE1011492 | 5024 | R-PLACE1011492 | 9981 |
| PLACE1011503 | F-PLACE1011503 | 5025 | R-PLACE1011503 | 9982 |
| PLACE1011520 | F-PLACE1011520 | 5026 | R-PLACE1011520 | 9983 |
| PLACE1011563 | F-PLACE1011563 | 5027 | R-PLACE1011563 | 9984 |
| PLACE1011567 | F-PLACE1011567 | 5028 | R-PLACE1011567 | 9985 |
| PLACE1011576 | F-PLACE1011576 | 5029 | R-PLACE1011576 | 9986 |
| PLACE1011586 | F-PLACE1011586 | 5030 | R-PLACE1011586 | 9987 |
| PLACE1011635 | F-PLACE1011635 | 5031 | R-PLACE1011635 | 9988 |
| PLACE1011641 | F-PLACE1011641 | 5032 | R-PLACE1011641 | 9989 |
| PLACE1011643 | F-PLACE1011643 | 5033 | R-PLACE1011643 | 9990 |
| PLACE1011646 | F-PLACE1011646 | 5034 | | |
| PLACE1011649 | F-PLACE1011649 | 5035 | R-PLACE1011649 | 9991 |
| PLACE1011650 | F-PLACE1011650 | 5036 | R-PLACE1011650 | 9992 |
| PLACE1011664 | F-PLACE1011664 | 5037 | R-PLACE1011664 | 9993 |
| PLACE1011675 | F-PLACE1011675 | 5038 | R-PLACE1011675 | 9994 |
| PLACE1011682 | F-PLACE1011682 | 5039 | R-PLACE1011682 | 9995 |
| PLACE1011719 | F-PLACE1011719 | 5040 | R-PLACE1011719 | 9996 |
| PLACE1011725 | F-PLACE1011725 | 5041 | R-PLACE1011725 | 9997 |
| PLACE1011729 | F-PLACE1011729 | 5042 | R-PLACE1011729 | 9998 |
| PLACE1011749 | F-PLACE1011749 | 5043 | R-PLACE1011749 | 9999 |
| PLACE1011762 | F-PLACE1011762 | 5044 | R-PLACE1011762 | 10000 |
| PLACE1011778 | F-PLACE1011778 | 5045 | R-PLACE1011778 | 10001 |
| PLACE1011783 | F-PLACE1011783 | 5046 | R-PLACE1011783 | 10002 |
| PLACE1011858 | F-PLACE1011858 | 5047 | R-PLACE1011858 | 10003 |
| PLACE1011874 | F-PLACE1011874 | 5048 | R-PLACE1011874 | 10004 |
| PLACE1011875 | F-PLACE1011875 | 5049 | R-PLACE1011875 | 10005 |
| PLACE1011891 | F-PLACE1011891 | 5050 | R-PLACE1011891 | 10006 |
| PLACE1011896 | F-PLACE1011896 | 5051 | R-PLACE1011896 | 10007 |
| PLACE1011922 | F-PLACE1011922 | 5052 | R-PLACE1011922 | 10008 |
| PLACE1011923 | F-PLACE1011923 | 5053 | R-PLACE1011923 | 10009 |
| PLACE1011962 | F-PLACE1011962 | 5054 | R-PLACE1011962 | 10010 |
| PLACE1011964 | F-PLACE1011964 | 5055 | R-PLACE1011964 | 10011 |
| PLACE1011982 | F-PLACE1011982 | 5056 | R-PLACE1011982 | 10012 |
| PLACE1011995 | F-PLACE1011995 | 5057 | R-PLACE1011995 | 10013 |
| PLACE1012031 | F-PLACE1012031 | 5058 | R-PLACE1012031 | 10014 |
| PLACE2000003 | F-PLACE2000003 | 5059 | R-PLACE2000003 | 10015 |
| PLACE2000006 | F-PLACE2000006 | 5060 | | |
| PLACE2000007 | F-PLACE2000007 | 5061 | R-PLACE2000007 | 10016 |
| PLACE2000011 | F-PLACE2000011 | 5062 | R-PLACE2000011 | 10017 |
| PLACE2000014 | F-PLACE2000014 | 5063 | | |
| PLACE2000015 | F-PLACE2000015 | 5064 | R-PLACE2000015 | 10018 |
| PLACE2000017 | F-PLACE2000017 | 5065 | R-PLACE2000017 | 10019 |
| PLACE2000021 | F-PLACE2000021 | 5066 | R-PLACE2000021 | 10020 |
| PLACE2000030 | F-PLACE2000030 | 5067 | | |
| PLACE2000033 | F-PLACE2000033 | 5068 | R-PLACE2000033 | 10021 |
| PLACE2000034 | F-PLACE2000034 | 5069 | R-PLACE2000034 | 10022 |
| PLACE2000039 | F-PLACE2000039 | 5070 | R-PLACE2000039 | 10023 |
| PLACE2000047 | F-PLACE2000047 | 5071 | R-PLACE2000047 | 10024 |
| PLACE2000050 | F-PLACE2000050 | 5072 | R-PLACE2000050 | 10025 |
| PLACE2000061 | F-PLACE2000061 | 5073 | R-PLACE2000061 | 10026 |
| PLACE2000062 | F-PLACE2000062 | 5074 | R-PLACE2000062 | 10027 |
| PLACE2000072 | F-PLACE2000072 | 5075 | R-PLACE2000072 | 10028 |
| PLACE2000097 | F-PLACE2000097 | 5076 | R-PLACE2000097 | 10029 |
| PLACE2000100 | F-PLACE2000100 | 5077 | R-PLACE2000100 | 10030 |
| PLACE2000103 | F-PLACE2000103 | 5078 | R-PLACE2000103 | 10031 |
| PLACE2000111 | F-PLACE2000111 | 5079 | R-PLACE2000111 | 10032 |
| PLACE2000115 | F-PLACE2000115 | 5080 | R-PLACE2000115 | 10033 |
| PLACE2000124 | F-PLACE2000124 | 5081 | | |
| PLACE2000132 | F-PLACE2000132 | 5082 | R-PLACE2000132 | 10034 |
| PLACE2000136 | F-PLACE2000136 | 5083 | R-PLACE2000136 | 10035 |
| PLACE2000140 | F-PLACE2000140 | 5084 | R-PLACE2000140 | 10036 |
| PLACE2000164 | F-PLACE2000164 | 5085 | R-PLACE2000164 | 10037 |
| PLACE2000170 | F-PLACE2000170 | 5086 | R-PLACE2000170 | 10038 |
| PLACE2000172 | F-PLACE2000172 | 5087 | R-PLACE2000172 | 10039 |
| PLACE2000176 | F-PLACE2000176 | 5088 | R-PLACE2000176 | 10040 |
| PLACE2000187 | F-PLACE2000187 | 5089 | R-PLACE2000187 | 10041 |
| PLACE2000216 | F-PLACE2000216 | 5090 | R-PLACE2000216 | 10042 |
| PLACE2000223 | F-PLACE2000223 | 5091 | R-PLACE2000223 | 10043 |
| PLACE2000235 | F-PLACE2000235 | 5092 | R-PLACE2000235 | 10044 |
| PLACE2000246 | F-PLACE2000246 | 5093 | R-PLACE2000246 | 10045 |
| PLACE2000264 | F-PLACE2000264 | 5094 | R-PLACE2000264 | 10046 |
| PLACE2000274 | F-PLACE2000274 | 5095 | R-PLACE2000274 | 10047 |
| PLACE2000302 | F-PLACE2000302 | 5096 | R-PLACE2000302 | 10048 |
| PLACE2000305 | F-PLACE2000305 | 5097 | R-PLACE2000305 | 10049 |
| PLACE2000317 | F-PLACE2000317 | 5098 | R-PLACE2000317 | 10050 |
| PLACE2000335 | F-PLACE2000335 | 5099 | R-PLACE2000335 | 10051 |
| PLACE2000341 | F-PLACE2000341 | 5100 | | |
| PLACE2000342 | F-PLACE2000342 | 5101 | R-PLACE2000342 | 10052 |
| PLACE2000347 | F-PLACE2000347 | 5102 | R-PLACE2000347 | 10053 |
| PLACE2000359 | F-PLACE2000359 | 5103 | R-PLACE2000359 | 10054 |
| PLACE2000366 | F-PLACE2000366 | 5104 | R-PLACE2000366 | 10055 |
| PLACE2000371 | F-PLACE2000371 | 5105 | R-PLACE2000371 | 10056 |
| PLACE2000373 | F-PLACE2000373 | 5106 | R-PLACE2000373 | 10057 |
| PLACE2000379 | F-PLACE2000379 | 5107 | R-PLACE2000379 | 10058 |
| PLACE2000394 | F-PLACE2000394 | 5108 | R-PLACE2000394 | 10059 |
| PLACE2000398 | F-PLACE2000398 | 5109 | R-PLACE2000398 | 10060 |
| PLACE2000399 | F-PLACE2000399 | 5110 | R-PLACE2000399 | 10061 |
| PLACE2000404 | F-PLACE2000404 | 5111 | R-PLACE2000404 | 10062 |
| PLACE2000411 | F-PLACE2000411 | 5112 | R-PLACE2000411 | 10063 |
| PLACE2000419 | F-PLACE2000419 | 5113 | R-PLACE2000419 | 10064 |
| PLACE2000425 | F-PLACE2000425 | 5114 | R-PLACE2000425 | 10065 |
| PLACE2000427 | F-PLACE2000427 | 5115 | R-PLACE2000427 | 10066 |
| PLACE2000433 | F-PLACE2000433 | 5116 | R-PLACE2000433 | 10067 |
| PLACE2000435 | F-PLACE2000435 | 5117 | R-PLACE2000435 | 10068 |
| PLACE2000438 | F-PLACE2000438 | 5118 | R-PLACE2000438 | 10069 |
| PLACE2000450 | F-PLACE2000450 | 5119 | R-PLACE2000450 | 10070 |
| PLACE2000455 | F-PLACE2000455 | 5120 | R-PLACE2000455 | 10071 |
| PLACE2000458 | F-PLACE2000458 | 5121 | R-PLACE2000458 | 10072 |
| PLACE2000465 | F-PLACE2000465 | 5122 | R-PLACE2000465 | 10073 |
| PLACE2000477 | F-PLACE2000477 | 5123 | R-PLACE2000477 | 10074 |
| PLACE3000004 | F-PLACE3000004 | 5124 | R-PLACE3000004 | 10075 |
| PLACE3000009 | F-PLACE3000009 | 5125 | | |
| PLACE3000020 | F-PLACE3000020 | 5126 | | |
| PLACE3000029 | F-PLACE3000029 | 5127 | R-PLACE3000029 | 10076 |
| PLACE3000059 | F-PLACE3000059 | 5128 | R-PLACE3000059 | 10077 |
| PLACE3000070 | F-PLACE3000070 | 5129 | R-PLACE3000070 | 10078 |
| PLACE3000103 | F-PLACE3000103 | 5130 | R-PLACE3000103 | 10079 |
| PLACE3000119 | F-PLACE3000119 | 5131 | R-PLACE3000119 | 10080 |
| PLACE3000121 | F-PLACE3000121 | 5132 | | |
| PLACE3000124 | F-PLACE3000124 | 5133 | R-PLACE3000124 | 10081 |
| PLACE3000136 | F-PLACE3000136 | 5134 | R-PLACE3000136 | 10082 |
| PLACE3000142 | F-PLACE3000142 | 5135 | R-PLACE3000142 | 10083 |
| PLACE3000145 | F-PLACE3000145 | 5136 | | |
| PLACE3000147 | F-PLACE3000147 | 5137 | R-PLACE3000147 | 10084 |
| PLACE3000148 | F-PLACE3000148 | 5138 | R-PLACE3000148 | 10085 |
| PLACE3000155 | F-PLACE3000155 | 5139 | R-PLACE3000155 | 10086 |
| PLACE3000156 | F-PLACE3000156 | 5140 | R-PLACE3000156 | 10087 |
| PLACE3000157 | F-PLACE3000157 | 5141 | R-PLACE3000157 | 10088 |
| PLACE3000158 | F-PLACE3000158 | 5142 | R-PLACE3000158 | 10089 |
| PLACE3000160 | F-PLACE3000160 | 5143 | R-PLACE3000160 | 10090 |
| PLACE3000169 | F-PLACE3000169 | 5144 | R-PLACE3000169 | 10091 |
| PLACE3000194 | F-PLACE3000194 | 5145 | R-PLACE3000194 | 10092 |
| PLACE3000197 | F-PLACE3000197 | 5146 | R-PLACE3000197 | 10093 |
| PLACE3000199 | F-PLACE3000199 | 5147 | R-PLACE3000199 | 10094 |
| PLACE3000207 | F-PLACE3000207 | 5148 | R-PLACE3000207 | 10095 |
| PLACE3000208 | F-PLACE3000208 | 5149 | R-PLACE3000208 | 10096 |
| PLACE3000218 | F-PLACE3000218 | 5150 | R-PLACE3000218 | 10097 |
| PLACE3000220 | F-PLACE3000220 | 5151 | R-PLACE3000220 | 10098 |
| PLACE3000221 | F-PLACE3000221 | 5152 | | |
| PLACE3000226 | F-PLACE3000226 | 5153 | R-PLACE3000226 | 10099 |
| PLACE3000230 | F-PLACE3000230 | 5154 | R-PLACE3000230 | 10100 |
| PLACE3000242 | F-PLACE3000242 | 5155 | R-PLACE3000242 | 10101 |
| PLACE3000244 | F-PLACE3000244 | 5156 | R-PLACE3000244 | 10102 |
| PLACE3000254 | F-PLACE3000254 | 5157 | R-PLACE3000254 | 10103 |
| PLACE3000271 | F-PLACE3000271 | 5158 | R-PLACE3000271 | 10104 |
| PLACE3000276 | F-PLACE3000276 | 5159 | R-PLACE3000276 | 10105 |
| PLACE3000304 | F-PLACE3000304 | 5160 | R-PLACE3000304 | 10106 |
| PLACE3000310 | F-PLACE3000310 | 5161 | R-PLACE3000310 | 10107 |
| PLACE3000320 | F-PLACE3000320 | 5162 | R-PLACE3000320 | 10108 |
| PLACE3000322 | F-PLACE3000322 | 5163 | R-PLACE3000322 | 10109 |
| PLACE3000331 | F-PLACE3000331 | 5164 | R-PLACE3000331 | 10110 |
| PLACE3000339 | F-PLACE3000339 | 5165 | R-PLACE3000339 | 10111 |
| PLACE3000341 | F-PLACE3000341 | 5166 | R-PLACE3000341 | 10112 |
| PLACE3000350 | F-PLACE3000350 | 5167 | R-PLACE3000350 | 10113 |
| PLACE3000352 | F-PLACE3000352 | 5168 | R-PLACE3000352 | 10114 |
| PLACE3000353 | F-PLACE3000353 | 5169 | R-PLACE3000353 | 10115 |
| PLACE3000362 | F-PLACE3000362 | 5170 | R-PLACE3000362 | 10116 |
| PLACE3000363 | F-PLACE3000363 | 5171 | R-PLACE3000363 | 10117 |
| PLACE3000365 | F-PLACE3000365 | 5172 | R-PLACE3000365 | 10118 |
| PLACE3000373 | F-PLACE3000373 | 5173 | R-PLACE3000373 | 10119 |
| PLACE3000388 | F-PLACE3000388 | 5174 | R-PLACE3000388 | 10120 |
| PLACE3000399 | F-PLACE3000399 | 5175 | R-PLACE3000399 | 10121 |
| PLACE3000400 | F-PLACE3000400 | 5176 | R-PLACE3000400 | 10122 |
| PLACE3000401 | F-PLACE3000401 | 5177 | R-PLACE3000401 | 10123 |
| PLACE3000402 | F-PLACE3000402 | 5178 | R-PLACE3000402 | 10124 |
| PLACE3000405 | F-PLACE3000405 | 5179 | R-PLACE3000405 | 10125 |
| PLACE3000406 | F-PLACE3000406 | 5180 | R-PLACE3000406 | 10126 |
| PLACE3000413 | F-PLACE3000413 | 5181 | R-PLACE3000413 | 10127 |
| PLACE3000416 | F-PLACE3000416 | 5182 | R-PLACE3000416 | 10128 |
| PLACE3000425 | F-PLACE3000425 | 5183 | R-PLACE3000425 | 10129 |
| PLACE3000455 | F-PLACE3000455 | 5184 | R-PLACE3000455 | 10130 |
| PLACE3000475 | F-PLACE3000475 | 5185 | R-PLACE3000475 | 10131 |
| PLACE3000477 | F-PLACE3000477 | 5186 | R-PLACE3000477 | 10132 |
| PLACE4000009 | F-PLACE4000009 | 5187 | R-PLACE4000009 | 10133 |
| PLACE4000014 | F-PLACE4000014 | 5188 | R-PLACE4000014 | 10134 |
| PLACE4000034 | F-PLACE4000034 | 5189 | R-PLACE4000034 | 10135 |
| PLACE4000049 | F-PLACE4000049 | 5190 | R-PLACE4000049 | 10136 |
| PLACE4000052 | F-PLACE4000052 | 5191 | R-PLACE4000052 | 10137 |
| PLACE4000063 | F-PLACE4000063 | 5192 | R-PLACE4000063 | 10138 |
| PLACE4000089 | F-PLACE4000089 | 5193 | R-PLACE4000089 | 10139 |
| PLACE4000093 | F-PLACE4000093 | 5194 | R-PLACE4000093 | 10140 |
| PLACE4000100 | F-PLACE4000100 | 5195 | R-PLACE4000100 | 10141 |
| PLACE4000106 | F-PLACE4000106 | 5196 | R-PLACE4000106 | 10142 |
| PLACE4000128 | F-PLACE4000128 | 5197 | R-PLACE4000128 | 10143 |
| PLACE4000129 | F-PLACE4000129 | 5198 | R-PLACE4000129 | 10144 |
| PLACE4000131 | F-PLACE4000131 | 5199 | | |
| PLACE4000147 | F-PLACE4000147 | 5200 | R-PLACE4000147 | 10145 |
| PLACE4000156 | F-PLACE4000156 | 5201 | R-PLACE4000156 | 10146 |
| PLACE4000192 | F-PLACE4000192 | 5202 | R-PLACE4000192 | 10147 |
| PLACE4000211 | F-PLACE4000211 | 5203 | | |
| PLACE4000222 | F-PLACE4000222 | 5204 | R-PLACE4000222 | 10148 |
| PLACE4000230 | F-PLACE4000230 | 5205 | | |
| PLACE4000233 | F-PLACE4000233 | 5206 | R-PLACE4000233 | 10149 |
| PLACE4000247 | F-PLACE4000247 | 5207 | R-PLACE4000247 | 10150 |
| PLACE4000250 | F-PLACE4000250 | 5208 | R-PLACE4000250 | 10151 |
| PLACE4000252 | F-PLACE4000252 | 5209 | R-PLACE4000252 | 10152 |
| PLACE4000259 | F-PLACE4000259 | 5210 | | |
| PLACE4000261 | F-PLACE4000261 | 5211 | R-PLACE4000261 | 10153 |
| PLACE4000269 | F-PLACE4000269 | 5212 | R-PLACE4000269 | 10154 |
| PLACE4000270 | F-PLACE4000270 | 5213 | R-PLACE4000270 | 10155 |
| PLACE4000300 | F-PLACE4000300 | 5214 | R-PLACE4000300 | 10156 |
| PLACE4000320 | F-PLACE4000320 | 5215 | R-PLACE4000320 | 10157 |
| PLACE4000323 | F-PLACE4000323 | 5216 | R-PLACE4000323 | 10158 |
| PLACE4000326 | F-PLACE4000326 | 5217 | R-PLACE4000326 | 10159 |
| PLACE4000344 | F-PLACE4000344 | 5218 | R-PLACE4000344 | 10160 |
| PLACE4000367 | F-PLACE4000367 | 5219 | R-PLACE4000367 | 10161 |
| PLACE4000369 | F-PLACE4000369 | 5220 | R-PLACE4000369 | 10162 |
| PLACE4000379 | F-PLACE4000379 | 5221 | R-PLACE4000379 | 10163 |
| PLACE4000387 | F-PLACE4000387 | 5222 | R-PLACE4000387 | 10164 |
| PLACE4000392 | F-PLACE4000392 | 5223 | R-PLACE4000392 | 10165 |
| PLACE4000401 | F-PLACE4000401 | 5224 | R-PLACE4000401 | 10166 |
| PLACE4000411 | F-PLACE4000411 | 5225 | R-PLACE4000411 | 10167 |
| PLACE4000431 | F-PLACE4000431 | 5226 | | |
| PLACE4000445 | F-PLACE4000445 | 5227 | R-PLACE4000445 | 10168 |
| PLACE4000450 | F-PLACE4000450 | 5228 | | |
| PLACE4000465 | F-PLACE4000465 | 5229 | R-PLACE4000465 | 10169 |
| PLACE4000487 | F-PLACE4000487 | 5230 | | |
| PLACE4000489 | F-PLACE4000489 | 5231 | R-PLACE4000489 | 10170 |
| PLACE4000494 | F-PLACE4000494 | 5232 | R-PLACE4000494 | 10171 |
| PLACE4000521 | F-PLACE4000521 | 5233 | | |
| PLACE4000522 | F-PLACE4000522 | 5234 | R-PLACE4000522 | 10172 |
| PLACE4000548 | F-PLACE4000548 | 5235 | R-PLACE4000548 | 10173 |
| PLACE4000558 | F-PLACE4000558 | 5236 | R-PLACE4000558 | 10174 |
| PLACE4000581 | F-PLACE4000581 | 5237 | | |
| PLACE4000590 | F-PLACE4000590 | 5238 | | |
| PLACE4000593 | F-PLACE4000593 | 5239 | | |
| PLACE4000612 | F-PLACE4000612 | 5240 | | |
| PLACE4000638 | F-PLACE4000638 | 5241 | | |
| PLACE4000650 | F-PLACE4000650 | 5242 | | |
| PLACE4000654 | F-PLACE4000654 | 5243 | | |
| PLACE4000670 | F-PLACE4000670 | 5244 | | |
| SKNMC1000011 | F-SKNMC1000011 | 5245 | | |
| SKNMC1000013 | F-SKNMC1000013 | 5246 | | |
| SKNMC1000046 | F-SKNMC1000046 | 5247 | | |
| SKNMC1000050 | F-SKNMC1000050 | 5248 | | |
| SKNMC1000091 | F-SKNMC1000091 | 5249 | | |
| THYRO1000017 | F-THYRO1000017 | 5250 | | |
| THYRO1000026 | F-THYRO1000026 | 5251 | R-THYRO1000026 | 10175 |
| THYRO1000034 | F-THYRO1000034 | 5252 | R-THYRO1000034 | 10176 |
| THYRO1000035 | F-THYRO1000035 | 5253 | R-THYRO1000035 | 10177 |
| THYRO1000040 | F-THYRO1000040 | 5254 | R-THYRO1000040 | 10178 |
| THYRO1000070 | F-THYRO1000070 | 5255 | R-THYRO1000070 | 10179 |
| THYRO1000072 | F-THYRO1000072 | 5256 | R-THYRO1000072 | 10180 |
| THYRO1000085 | F-THYRO1000085 | 5257 | R-THYRO1000085 | 10181 |
| THYRO1000092 | F-THYRO1000092 | 5258 | R-THYRO1000092 | 10182 |
| THYRO1000107 | F-THYRO1000107 | 5259 | R-THYRO1000107 | 10183 |
| THYRO1000111 | F-THYRO1000111 | 5260 | R-THYRO1000111 | 10184 |
| THYRO1000121 | F-THYRO1000121 | 5261 | R-THYRO1000121 | 10185 |
| THYRO1000124 | F-THYRO1000124 | 5262 | R-THYRO1000124 | 10186 |
| THYRO1000129 | F-THYRO1000129 | 5263 | R-THYRO1000129 | 10187 |
| THYRO1000132 | F-THYRO1000132 | 5264 | R-THYRO1000132 | 10188 |
| THYRO1000156 | F-THYRO1000156 | 5265 | R-THYRO1000156 | 10189 |
| THYRO1000163 | F-THYRO1000163 | 5266 | R-THYRO1000163 | 10190 |
| THYRO1000173 | F-THYRO1000173 | 5267 | R-THYRO1000173 | 10191 |
| THYRO1000186 | F-THYRO1000186 | 5268 | R-THYRO1000186 | 10192 |
| THYRO1000187 | F-THYRO1000187 | 5269 | R-THYRO1000187 | 10193 |
| THYRO1000190 | F-THYRO1000190 | 5270 | R-THYRO1000190 | 10194 |
| THYRO1000197 | F-THYRO1000197 | 5271 | R-THYRO1000197 | 10195 |
| THYRO1000199 | F-THYRO1000199 | 5272 | R-THYRO1000199 | 10196 |
| THYRO1000206 | F-THYRO1000206 | 5273 | R-THYRO1000206 | 10197 |
| THYRO1000221 | F-THYRO1000221 | 5274 | R-THYRO1000221 | 10198 |
| THYRO1000241 | F-THYRO1000241 | 5275 | R-THYRO1000241 | 10199 |
| THYRO1000242 | F-THYRO1000242 | 5276 | R-THYRO1000242 | 10200 |
| THYRO1000253 | F-THYRO1000253 | 5277 | R-THYRO1000253 | 10201 |
| THYRO1000270 | F-THYRO1000270 | 5278 | R-THYRO1000270 | 10202 |
| THYRO1000279 | F-THYRO1000279 | 5279 | R-THYRO1000279 | 10203 |
| THYRO1000288 | F-THYRO1000288 | 5280 | R-THYRO1000288 | 10204 |
| THYRO1000320 | F-THYRO1000320 | 5281 | R-THYRO1000320 | 10205 |
| THYRO1000327 | F-THYRO1000327 | 5282 | R-THYRO1000327 | 10206 |
| THYRO1000343 | F-THYRO1000343 | 5283 | R-THYRO1000343 | 10207 |
| THYRO1000358 | F-THYRO1000358 | 5284 | R-THYRO1000358 | 10208 |
| THYRO1000368 | F-THYRO1000368 | 5285 | R-THYRO1000368 | 10209 |
| THYRO1000381 | F-THYRO1000381 | 5286 | R-nnnnnnnnnnnn | 10210 |
| THYRO1000387 | F-THYRO1000387 | 5287 | R-THYRO1000387 | 10211 |
| THYRO1000394 | F-THYRO1000394 | 5288 | R-THYRO1000394 | 10212 |
| THYRO1000395 | F-THYRO1000395 | 5289 | R-THYRO1000395 | 10213 |
| THYRO1000401 | F-THYRO1000401 | 5290 | R-THYRO1000401 | 10214 |
| THYRO1000438 | F-THYRO1000438 | 5291 | R-THYRO1000438 | 10215 |
| THYRO1000452 | F-THYRO1000452 | 5292 | R-THYRO1000452 | 10216 |
| THYRO1000471 | F-THYRO1000471 | 5293 | R-THYRO1000471 | 10217 |
| THYRO1000484 | F-THYRO1000484 | 5294 | R-THYRO1000484 | 10218 |
| THYRO1000488 | F-THYRO1000488 | 5295 | R-THYRO1000488 | 10219 |
| THYRO1000501 | F-THYRO1000501 | 5296 | R-THYRO1000501 | 10220 |
| THYRO1000502 | F-THYRO1000502 | 5297 | R-THYRO1000502 | 10221 |
| THYRO1000505 | F-THYRO1000505 | 5298 | R-THYRO1000505 | 10222 |
| THYRO1000558 | F-THYRO1000558 | 5299 | R-THYRO1000558 | 10223 |
| THYRO1000569 | F-THYRO1000569 | 5300 | R-THYRO1000569 | 10224 |
| THYRO1000570 | F-THYRO1000570 | 5301 | R-THYRO1000570 | 10225 |
| THYRO1000585 | F-THYRO1000585 | 5302 | R-nnnnnnnnnnnn | 10226 |
| THYRO1000596 | F-THYRO1000596 | 5303 | R-THYRO1000596 | 10227 |
| THYRO1000602 | F-THYRO1000602 | 5304 | R-THYRO1000602 | 10228 |
| THYRO1000605 | F-THYRO1000605 | 5305 | R-THYRO1000605 | 10229 |
| THYRO1000625 | F-THYRO1000625 | 5306 | R-THYRO1000625 | 10230 |
| THYRO1000637 | F-THYRO1000637 | 5307 | R-THYRO1000637 | 10231 |
| THYRO1000641 | F-THYRO1000641 | 5308 | R-THYRO1000641 | 10232 |
| THYRO1000658 | F-THYRO1000658 | 5309 | R-THYRO1000658 | 10233 |
| THYRO1000662 | F-THYRO1000662 | 5310 | R-nnnnnnnnnnnn | 10234 |
| THYRO1000666 | F-THYRO1000666 | 5311 | R-THYRO1000666 | 10235 |
| THYRO1000676 | F-THYRO1000676 | 5312 | R-THYRO1000676 | 10236 |
| THYRO1000684 | F-THYRO1000684 | 5313 | R-THYRO1000684 | 10237 |
| THYRO1000699 | F-THYRO1000699 | 5314 | R-THYRO1000699 | 10238 |
| THYRO1000712 | F-THYRO1000712 | 5315 | R-THYRO1000712 | 10239 |
| THYRO1000715 | F-THYRO1000715 | 5316 | | |
| THYRO1000734 | F-THYRO1000734 | 5317 | R-THYRO1000734 | 10240 |
| THYRO1000748 | F-THYRO1000748 | 5318 | R-THYRO1000748 | 10241 |
| THYRO1000756 | F-THYRO1000756 | 5319 | R-THYRO1000756 | 10242 |
| THYRO1000777 | F-THYRO1000777 | 5320 | R-THYRO1000777 | 10243 |
| THYRO1000783 | F-THYRO1000783 | 5321 | R-THYRO1000783 | 10244 |
| THYRO1000787 | F-THYRO1000787 | 5322 | R-THYRO1000787 | 10245 |
| THYRO1000793 | F-THYRO1000793 | 5323 | R-THYRO1000793 | 10246 |
| THYRO1000796 | F-THYRO1000796 | 5324 | R-THYRO1000796 | 10247 |
| THYRO1000805 | F-THYRO1000805 | 5325 | R-THYRO1000805 | 10248 |
| THYRO1000815 | F-THYRO1000815 | 5326 | R-THYRO1000815 | 10249 |
| THYRO1000829 | F-THYRO1000829 | 5327 | R-THYRO1000829 | 10250 |
| THYRO1000843 | F-THYRO1000843 | 5328 | R-THYRO1000843 | 10251 |
| THYRO1000852 | F-THYRO1000852 | 5329 | R-THYRO1000852 | 10252 |
| THYRO1000855 | F-THYRO1000855 | 5330 | R-THYRO1000855 | 10253 |
| THYRO1000865 | F-THYRO1000865 | 5331 | R-THYRO1000865 | 10254 |
| THYRO1000895 | F-THYRO1000895 | 5332 | R-THYRO1000895 | 10255 |
| THYRO1000916 | F-THYRO1000916 | 5333 | R-THYRO1000916 | 10256 |
| THYRO1000926 | F-THYRO1000926 | 5334 | R-THYRO1000926 | 10257 |
| THYRO1000934 | F-THYRO1000934 | 5335 | R-THYRO1000934 | 10258 |
| THYRO1000951 | F-THYRO1000951 | 5336 | R-THYRO1000951 | 10259 |
| THYRO1000952 | F-THYRO1000952 | 5337 | R-THYRO1000952 | 10260 |
| THYRO1000974 | F-THYRO1000974 | 5338 | R-THYRO1000974 | 10261 |
| THYRO1000975 | F-THYRO1000975 | 5339 | R-THYRO1000975 | 10262 |
| THYRO1000983 | F-THYRO1000983 | 5340 | R-THYRO1000983 | 10263 |
| THYRO1000984 | F-THYRO1000984 | 5341 | R-THYRO1000984 | 10264 |
| THYRO1000988 | F-THYRO1000988 | 5342 | R-THYRO1000988 | 10265 |
| THYRO1001003 | F-THYRO1001003 | 5343 | R-THYRO1001003 | 10266 |
| THYRO1001031 | F-THYRO1001031 | 5344 | R-THYRO1001031 | 10267 |
| THYRO1001033 | F-THYRO1001033 | 5345 | R-THYRO1001033 | 10268 |
| THYRO1001062 | F-THYRO1001062 | 5346 | R-THYRO1001062 | 10269 |
| THYRO1001093 | F-THYRO1001093 | 5347 | R-THYRO1001093 | 10270 |
| THYRO1001100 | F-THYRO1001100 | 5348 | R-THYRO1001100 | 10271 |
| THYRO1001120 | F-THYRO1001120 | 5349 | R-THYRO1001120 | 10272 |
| THYRO1001121 | F-THYRO1001121 | 5350 | R-THYRO1001121 | 10273 |
| THYRO1001133 | F-THYRO1001133 | 5351 | R-THYRO1001133 | 10274 |
| THYRO1001134 | F-THYRO1001134 | 5352 | R-THYRO1001134 | 10275 |
| THYRO1001142 | F-THYRO1001142 | 5353 | R-THYRO1001142 | 10276 |
| THYRO1001173 | F-THYRO1001173 | 5354 | R-THYRO1001173 | 10277 |
| THYRO1001177 | F-THYRO1001177 | 5355 | R-THYRO1001177 | 10278 |
| THYRO1001189 | F-THYRO1001189 | 5356 | R-THYRO1001189 | 10279 |
| THYRO1001204 | F-THYRO1001204 | 5357 | R-THYRO1001204 | 10280 |
| THYRO1001213 | F-THYRO1001213 | 5358 | R-THYRO1001213 | 10281 |
| THYRO1001262 | F-THYRO1001262 | 5359 | R-THYRO1001262 | 10282 |
| THYRO1001271 | F-THYRO1001271 | 5360 | R-THYRO1001271 | 10283 |
| THYRO1001287 | F-THYRO1001287 | 5361 | | |
| THYRO1001290 | F-THYRO1001290 | 5362 | R-THYRO1001290 | 10284 |
| THYRO1001313 | F-THYRO1001313 | 5363 | R-THYRO1001313 | 10285 |
| THYRO1001320 | F-THYRO1001320 | 5364 | R-THYRO1001320 | 10286 |
| THYRO1001321 | F-THYRO1001321 | 5365 | R-THYRO1001321 | 10287 |
| THYRO1001322 | F-THYRO1001322 | 5366 | R-nnnnnnnnnnnn | 10288 |
| THYRO1001347 | F-THYRO1001347 | 5367 | R-THYRO1001347 | 10289 |
| THYRO1001363 | F-THYRO1001363 | 5368 | R-THYRO1001363 | 10290 |
| THYRO1001365 | F-THYRO1001365 | 5369 | R-THYRO1001365 | 10291 |
| THYRO1001374 | F-THYRO1001374 | 5370 | R-THYRO1001374 | 10292 |
| THYRO1001401 | F-THYRO1001401 | 5371 | R-THYRO1001401 | 10293 |
| THYRO1001403 | F-THYRO1001403 | 5372 | R-THYRO1001403 | 10294 |
| THYRO1001405 | F-THYRO1001405 | 5373 | R-THYRO1001405 | 10295 |
| THYRO1001406 | F-THYRO1001406 | 5374 | R-THYRO1001406 | 10296 |
| THYRO1001411 | F-THYRO1001411 | 5375 | R-THYRO1001411 | 10297 |
| THYRO1001426 | F-THYRO1001426 | 5376 | R-THYRO1001426 | 10298 |
| THYRO1001434 | F-THYRO1001434 | 5377 | R-THYRO1001434 | 10299 |
| THYRO1001458 | F-THYRO1001458 | 5378 | R-THYRO1001458 | 10300 |
| THYRO1001480 | F-THYRO1001480 | 5379 | R-THYRO1001480 | 10301 |
| THYRO1001487 | F-THYRO1001487 | 5380 | R-THYRO1001487 | 10302 |
| THYRO1001534 | F-THYRO1001534 | 5381 | R-THYRO1001534 | 10303 |
| THYRO1001537 | F-THYRO1001537 | 5382 | R-THYRO1001537 | 10304 |
| THYRO1001541 | F-THYRO1001541 | 5383 | R-THYRO1001541 | 10305 |
| THYRO1001559 | F-THYRO1001559 | 5384 | R-THYRO1001559 | 10306 |
| THYRO1001570 | F-THYRO1001570 | 5385 | R-THYRO1001570 | 10307 |
| THYRO1001573 | F-THYRO1001573 | 5386 | R-THYRO1001573 | 10308 |
| THYRO1001584 | F-THYRO1001584 | 5387 | R-THYRO1001584 | 10309 |
| THYRO1001595 | F-THYRO1001595 | 5388 | R-THYRO1001595 | 10310 |
| THYRO1001602 | F-THYRO1001602 | 5389 | R-THYRO1001602 | 10311 |
| THYRO1001605 | F-THYRO1001605 | 5390 | R-THYRO1001605 | 10312 |
| THYRO1001617 | F-THYRO1001617 | 5391 | R-THYRO1001617 | 10313 |
| THYRO1001637 | F-THYRO1001637 | 5392 | R-THYRO1001637 | 10314 |
| THYRO1001656 | F-THYRO1001656 | 5393 | R-THYRO1001656 | 10315 |
| THYRO1001661 | F-THYRO1001661 | 5394 | R-THYRO1001661 | 10316 |
| THYRO1001671 | F-THYRO1001671 | 5395 | R-THYRO1001671 | 10317 |
| THYRO1001673 | F-THYRO1001673 | 5396 | R-THYRO1001673 | 10318 |
| THYRO1001703 | F-THYRO1001703 | 5397 | R-THYRO1001703 | 10319 |
| THYRO1001706 | F-THYRO1001706 | 5398 | R-THYRO1001706 | 10320 |
| THYRO1001721 | F-THYRO1001721 | 5399 | R-THYRO1001721 | 10321 |
| THYRO1001738 | F-THYRO1001738 | 5400 | R-nnnnnnnnnnnn | 10322 |
| THYRO1001745 | F-THYRO1001745 | 5401 | R-THYRO1001745 | 10323 |
| THYRO1001746 | F-THYRO1001746 | 5402 | R-THYRO1001746 | 10324 |
| THYRO1001772 | F-THYRO1001772 | 5403 | R-THYRO1001772 | 10325 |
| THYRO1001793 | F-THYRO1001793 | 5404 | R-THYRO1001793 | 10326 |
| THYRO1001809 | F-THYRO1001809 | 5405 | R-THYRO1001809 | 10327 |
| THYRO1001828 | F-THYRO1001828 | 5406 | | |
| THYRO1001854 | F-THYRO1001854 | 5407 | R-THYRO1001854 | 10328 |
| THYRO1001895 | F-THYRO1001895 | 5408 | R-THYRO1001895 | 10329 |
| THYRO1001907 | F-THYRO1001907 | 5409 | R-THYRO1001907 | 10330 |
| VESEN1000122 | F-VESEN1000122 | 5410 | R-VESEN1000122 | 10331 |
| Y79AA1000013 | F-Y79AA1000013 | 5411 | R-Y79AA1000013 | 10332 |
| Y79AA1000033 | F-Y79AA1000033 | 5412 | R-Y79AA1000033 | 10333 |
| Y79AA1000037 | F-Y79AA1000037 | 5413 | R-Y79AA1000037 | 10334 |
| Y79AA1000059 | F-Y79AA1000059 | 5414 | R-Y79AA1000059 | 10335 |
| Y79AA1000065 | F-Y79AA1000065 | 5415 | R-Y79AA1000065 | 10336 |
| Y79AA1000131 | F-Y79AA1000131 | 5416 | R-Y79AA1000131 | 10337 |
| Y79AA1000181 | F-Y79AA1000181 | 5417 | R-Y79AA1000181 | 10338 |
| Y79AA1000202 | F-Y79AA1000202 | 5418 | R-Y79AA1000202 | 10339 |
| Y79AA1000214 | F-Y79AA1000214 | 5419 | R-Y79AA1000214 | 10340 |
| Y79AA1000230 | F-Y79AA1000230 | 5420 | R-Y79AA1000230 | 10341 |
| Y79AA1000231 | F-Y79AA1000231 | 5421 | R-Y79AA1000231 | 10342 |
| Y79AA1000258 | F-Y79AA1000258 | 5422 | R-Y79AA1000258 | 10343 |
| Y79AA1000268 | F-Y79AA1000268 | 5423 | R-Y79AA1000268 | 10344 |
| Y79AA1000313 | F-Y79AA1000313 | 5424 | R-Y79AA1000313 | 10345 |
| Y79AA1000328 | F-Y79AA1000328 | 5425 | R-Y79AA1000328 | 10346 |
| Y79AA1000342 | F-Y79AA1000342 | 5426 | R-Y79AA1000342 | 10347 |
| Y79AA1000346 | F-Y79AA1000346 | 5427 | R-Y79AA1000346 | 10348 |
| Y79AA1000349 | F-Y79AA1000349 | 5428 | R-Y79AA1000349 | 10349 |
| Y79AA1000355 | F-Y79AA1000355 | 5429 | R-Y79AA1000355 | 10350 |
| Y79AA1000368 | F-Y79AA1000368 | 5430 | R-Y79AA1000368 | 10351 |
| Y79AA1000405 | F-Y79AA1000405 | 5431 | R-Y79AA1000405 | 10352 |
| Y79AA1000410 | F-Y79AA1000410 | 5432 | R-Y79AA1000410 | 10353 |
| Y79AA1000420 | F-Y79AA1000420 | 5433 | R-Y79AA1000420 | 10354 |
| Y79AA1000469 | F-Y79AA1000469 | 5434 | R-Y79AA1000469 | 10355 |
| Y79AA1000480 | F-Y79AA1000480 | 5435 | R-Y79AA1000480 | 10356 |
| Y79AA1000538 | F-Y79AA1000538 | 5436 | R-Y79AA1000538 | 10357 |
| Y79AA1000539 | F-Y79AA1000539 | 5437 | R-Y79AA1000539 | 10358 |
| Y79AA1000540 | F-Y79AA1000540 | 5438 | R-Y79AA1000540 | 10359 |
| Y79AA1000560 | F-Y79AA1000560 | 5439 | R-Y79AA1000560 | 10360 |
| Y79AA1000574 | F-Y79AA1000574 | 5440 | R-Y79AA1000574 | 10361 |
| Y79AA1000589 | F-Y79AA1000589 | 5441 | | |
| Y79AA1000627 | F-Y79AA1000627 | 5442 | R-Y79AA1000627 | 10362 |
| Y79AA1000705 | F-Y79AA1000705 | 5443 | R-Y79AA1000705 | 10363 |
| Y79AA1000734 | F-Y79AA1000734 | 5444 | R-Y79AA1000734 | 10364 |
| Y79AA1000748 | F-Y79AA1000748 | 5445 | R-Y79AA1000748 | 10365 |
| Y79AA1000752 | F-Y79AA1000752 | 5446 | R-Y79AA1000752 | 10366 |
| Y79AA1000774 | F-Y79AA1000774 | 5447 | R-Y79AA1000774 | 10367 |
| Y79AA1000782 | F-Y79AA1000782 | 5448 | R-Y79AA1000782 | 10368 |
| Y79AA1000784 | F-Y79AA1000784 | 5449 | R-Y79AA1000784 | 10369 |
| Y79AA1000794 | F-Y79AA1000794 | 5450 | R-Y79AA1000794 | 10370 |
| Y79AA1000800 | F-Y79AA1000800 | 5451 | R-Y79AA1000800 | 10371 |
| Y79AA1000802 | F-Y79AA1000802 | 5452 | R-nnnnnnnnnnnn | 10372 |
| Y79AA1000805 | F-Y79AA1000805 | 5453 | R-Y79AA1000805 | 10373 |
| Y79AA1000824 | F-Y79AA1000824 | 5454 | R-Y79AA1000824 | 10374 |
| Y79AA1000827 | F-Y79AA1000827 | 5455 | R-Y79AA1000827 | 10375 |
| Y79AA1000833 | F-Y79AA1000833 | 5456 | | |
| Y79AA1000850 | F-Y79AA1000850 | 5457 | R-Y79AA1000850 | 10376 |
| Y79AA1000962 | F-Y79AA1000962 | 5458 | R-Y79AA1000962 | 10377 |
| Y79AA1000966 | F-Y79AA1000966 | 5459 | | |
| Y79AA1000968 | F-Y79AA1000968 | 5460 | R-Y79AA1000968 | 10378 |
| Y79AA1000969 | F-Y79AA1000969 | 5461 | R-Y79AA1000969 | 10379 |
| Y79AA1000976 | F-Y79AA1000976 | 5462 | R-Y79AA1000976 | 10380 |
| Y79AA1000985 | F-Y79AA1000985 | 5463 | R-Y79AA1000985 | 10381 |
| Y79AA1001023 | F-Y79AA1001023 | 5464 | R-Y79AA1001023 | 10382 |
| Y79AA1001041 | F-Y79AA1001041 | 5465 | R-Y79AA1001041 | 10383 |
| Y79AA1001048 | F-Y79AA1001048 | 5466 | R-Y79AA1001048 | 10384 |
| Y79AA1001061 | F-Y79AA1001061 | 5467 | R-Y79AA1001061 | 10385 |
| Y79AA1001068 | F-Y79AA1001068 | 5468 | R-Y79AA1001068 | 10386 |
| Y79AA1001077 | F-Y79AA1001077 | 5469 | R-Y79AA1001077 | 10387 |
| Y79AA1001078 | F-Y79AA1001078 | 5470 | R-Y79AA1001078 | 10388 |
| Y79AA1001105 | F-Y79AA1001105 | 5471 | R-Y79AA1001105 | 10389 |
| Y79AA1001145 | F-Y79AA1001145 | 5472 | R-Y79AA1001145 | 10390 |
| Y79AA1001167 | F-Y79AA1001167 | 5473 | R-Y79AA1001167 | 10391 |
| Y79AA1001177 | F-Y79AA1001177 | 5474 | R-Y79AA1001177 | 10392 |
| Y79AA1001185 | F-Y79AA1001185 | 5475 | R-Y79AA1001185 | 10393 |
| Y79AA1001211 | F-Y79AA1001211 | 5476 | R-Y79AA1001211 | 10394 |
| Y79AA1001216 | F-Y79AA1001216 | 5477 | R-Y79AA1001216 | 10395 |
| Y79AA1001228 | F-Y79AA1001228 | 5478 | R-Y79AA1001228 | 10396 |
| Y79AA1001233 | F-Y79AA1001233 | 5479 | R-Y79AA1001233 | 10397 |
| Y79AA1001236 | F-Y79AA1001236 | 5480 | R-Y79AA1001236 | 10398 |
| Y79AA1001281 | F-Y79AA1001281 | 5481 | R-Y79AA1001281 | 10399 |
| Y79AA1001299 | F-Y79AA1001299 | 5482 | R-Y79AA1001299 | 10400 |
| Y79AA1001312 | F-Y79AA1001312 | 5483 | R-Y79AA1001312 | 10401 |
| Y79AA1001323 | F-Y79AA1001323 | 5484 | R-Y79AA1001323 | 10402 |
| Y79AA1001384 | F-Y79AA1001384 | 5485 | R-Y79AA1001384 | 10403 |
| Y79AA1001391 | F-Y79AA1001391 | 5486 | R-Y79AA1001391 | 10404 |
| Y79AA1001394 | F-Y79AA1001394 | 5487 | R-Y79AA1001394 | 10405 |
| Y79AA1001402 | F-Y79AA1001402 | 5488 | R-Y79AA1001402 | 10406 |
| Y79AA1001493 | F-Y79AA1001493 | 5489 | R-Y79AA1001493 | 10407 |
| Y79AA1001511 | F-Y79AA1001511 | 5490 | R-Y79AA1001511 | 10408 |
| Y79AA1001533 | F-Y79AA1001533 | 5491 | R-Y79AA1001533 | 10409 |
| Y79AA1001541 | F-Y79AA1001541 | 5492 | R-nnnnnnnnnnnn | 10410 |
| Y79AA1001548 | F-Y79AA1001548 | 5493 | R-Y79AA1001548 | 10411 |
| Y79AA1001555 | F-Y79AA1001555 | 5494 | R-Y79AA1001555 | 10412 |
| Y79AA1001581 | F-Y79AA1001581 | 5495 | | |
| Y79AA1001585 | F-Y79AA1001585 | 5496 | R-Y79AA1001585 | 10413 |
| Y79AA1001594 | F-Y79AA1001594 | 5497 | R-Y79AA1001594 | 10414 |
| Y79AA1001603 | F-Y79AA1001603 | 5498 | R-Y79AA1001603 | 10415 |
| Y79AA1001613 | F-Y79AA1001613 | 5499 | R-Y79AA1001613 | 10416 |
| Y79AA1001647 | F-Y79AA1001647 | 5500 | R-Y79AA1001647 | 10417 |
| Y79AA1001665 | F-Y79AA1001665 | 5501 | R-Y79AA1001665 | 10418 |
| Y79AA1001679 | F-Y79AA1001679 | 5502 | R-Y79AA1001679 | 10419 |
| Y79AA1001692 | F-Y79AA1001692 | 5503 | R-nnnnnnnnnnnn | 10420 |
| Y79AA1001696 | F-Y79AA1001696 | 5504 | R-Y79AA1001696 | 10421 |
| Y79AA1001705 | F-Y79AA1001705 | 5505 | R-Y79AA1001705 | 10422 |
| Y79AA1001711 | F-Y79AA1001711 | 5506 | R-Y79AA1001711 | 10423 |
| Y79AA1001781 | F-Y79AA1001781 | 5507 | R-Y79AA1001781 | 10424 |
| Y79AA1001805 | F-Y79AA1001805 | 5508 | R-nnnnnnnnnnnn | 10425 |
| Y79AA1001827 | F-Y79AA1001827 | 5509 | R-Y79AA1001827 | 10426 |
| Y79AA1001846 | F-Y79AA1001846 | 5510 | R-Y79AA1001846 | 10427 |
| Y79AA1001848 | F-Y79AA1001848 | 5511 | R-Y79AA1001848 | 10428 |
| Y79AA1001866 | F-Y79AA1001866 | 5512 | R-Y79AA1001866 | 10429 |
| Y79AA1001874 | F-Y79AA1001874 | 5513 | R-Y79AA1001874 | 10430 |
| Y79AA1001875 | F-Y79AA1001875 | 5514 | R-Y79AA1001875 | 10431 |
| Y79AA1001923 | F-Y79AA1001923 | 5515 | R-Y79AA1001923 | 10432 |
| Y79AA1001963 | F-Y79AA1001963 | 5516 | | |
| Y79AA1002027 | F-Y79AA1002027 | 5517 | R-Y79AA1002027 | 10433 |
| Y79AA1002083 | F-Y79AA1002083 | 5518 | R-Y79AA1002083 | 10434 |
| Y79AA1002089 | F-Y79AA1002089 | 5519 | R-Y79AA1002089 | 10435 |
| Y79AA1002093 | F-Y79AA1002093 | 5520 | R-Y79AA1002093 | 10436 |
| Y79AA1002103 | F-Y79AA1002103 | 5521 | R-Y79AA1002103 | 10437 |
| Y79AA1002115 | F-Y79AA1002115 | 5522 | R-Y79AA1002115 | 10438 |
| Y79AA1002125 | F-Y79AA1002125 | 5523 | R-Y79AA1002125 | 10439 |
| Y79AA1002139 | F-Y79AA1002139 | 5524 | R-Y79AA1002139 | 10440 |
| Y79AA1002204 | F-Y79AA1002204 | 5525 | R-Y79AA1002204 | 10441 |
| Y79AA1002208 | F-Y79AA1002208 | 5526 | R-nnnnnnnnnnnn | 10442 |
| Y79AA1002209 | F-Y79AA1002209 | 5527 | R-Y79AA1002209 | 10443 |
| Y79AA1002210 | F-Y79AA1002210 | 5528 | R-Y79AA1002210 | 10444 |
| Y79AA1002211 | F-Y79AA1002211 | 5529 | R-Y79AA1002211 | 10445 |
| Y79AA1002220 | F-Y79AA1002220 | 5530 | R-Y79AA1002220 | 10446 |
| Y79AA1002229 | F-Y79AA1002229 | 5531 | R-Y79AA1002229 | 10447 |
| Y79AA1002234 | F-Y79AA1002234 | 5532 | R-Y79AA1002234 | 10448 |
| Y79AA1002246 | F-Y79AA1002246 | 5533 | R-Y79AA1002246 | 10449 |
| Y79AA1002258 | F-Y79AA1002258 | 5534 | R-Y79AA1002258 | 10450 |
| Y79AA1002298 | F-Y79AA1002298 | 5535 | R-Y79AA1002298 | 10451 |
| Y79AA1002307 | F-Y79AA1002307 | 5536 | R-Y79AA1002307 | 10452 |
| Y79AA1002311 | F-Y79AA1002311 | 5537 | R-Y79AA1002311 | 10453 |
| Y79AA1002351 | F-Y79AA1002351 | 5538 | R-Y79AA1002351 | 10454 |
| Y79AA1002361 | F-Y79AA1002361 | 5539 | R-Y79AA1002361 | 10455 |
| Y79AA1002399 | F-Y79AA1002399 | 5540 | R-Y79AA1002399 | 10456 |
| Y79AA1002407 | F-Y79AA1002407 | 5541 | R-Y79AA1002407 | 10457 |
| Y79AA1002416 | F-Y79AA1002416 | 5542 | R-Y79AA1002416 | 10458 |
| Y79AA1002431 | F-Y79AA1002431 | 5543 | R-Y79AA1002431 | 10459 |
| Y79AA1002433 | F-Y79AA1002433 | 5544 | R-nnnnnnnnnnnn | 10460 |
| Y79AA1002472 | F-Y79AA1002472 | 5545 | R-Y79AA1002472 | 10461 |
| Y79AA1002482 | F-Y79AA1002482 | 5546 | R-Y79AA1002482 | 10462 |
| Y79AA1002487 | F-Y79AA1002487 | 5547 | R-Y79AA1002487 | 10463 |

[0023] TABLE 2

| | name of | SEQ ID | name of | SEQ ID |
|---|---|---|---|---|
| name of | 5′-end | of 5′-end | 3′-end | of 3′-end |
| clone | sequence | sequence | sequence | sequence |
| HEMBA1000497 | F-HEMBA1000497 | 16111 | R-HEMBA1000497 | 16165 |
| HEMBA1001750 | F-HEMBA1001750 | 16112 | R-HEMBA1001750 | 16166 |
| HEMBA1003854 | F-HEMBA1003854 | 16113 | R-HEMBA1003854 | 16167 |
| HEMBA1004193 | F-HEMBA1004193 | 16114 | R-HEMBA1004193 | 16168 |
| HEMBA1004860 | F-HEMBA1004860 | 16115 | R-HEMBA1004860 | 16169 |
| HEMBA1005572 | F-HEMBA1005572 | 16116 | R-HEMBA1005572 | 16170 |
| HEMBA1006038 | F-HEMBA1006038 | 16117 | R-HEMBA1006038 | 16171 |
| HEMBA1006092 | F-HEMBA1006092 | 16118 | R-HEMBA1006092 | 16172 |
| HEMBA1006406 | F-HEMBA1006406 | 16119 | R-HEMBA1006406 | 16173 |
| HEMBA1006650 | F-HEMBA1006650 | 16120 | R-HEMBA1006650 | 16174 |
| HEMBA1006812 | F-HEMBA1006812 | 16121 | R-HEMBA1006812 | 16175 |
| HEMBB1000672 | F-HEMBB1000672 | 16122 | R-HEMBB1000672 | 16176 |
| HEMBB1001197 | F-HEMBB1001197 | 16123 | R-HEMBB1001197 | 16177 |
| HEMBB1001871 | F-HEMBB1001871 | 16124 | R-HEMBB1001871 | 16178 |
| MAMMA1001252 | F-MAMMA1001252 | 16125 | R-MAMMA1001252 | 16179 |
| MAMMA1002094 | F-MAMMA1002094 | 16126 | R-MAMMA1002094 | 16180 |
| NT2RM4000634 | F-NT2RM4000634 | 16127 | R-NT2RM4000634 | 16181 |
| NT2RM4000657 | F-NT2RM4000657 | 16128 | R-NT2RM4000657 | 16182 |
| NT2RM4000783 | F-NT2RM4000783 | 16129 | R-NT2RM4000783 | 16183 |
| NT2RM4000857 | F-NT2RM4000857 | 16130 | R-NT2RM4000857 | 16184 |
| NT2RM4001178 | F-NT2RM4001178 | 16131 | R-NT2RM4001178 | 16185 |
| NT2RM4002420 | F-NT2RM4002420 | 16132 | R-NT2RM4002420 | 16186 |
| NT2RP2000198 | F-NT2RP2000198 | 16133 | R-NT2RP2000198 | 16187 |
| NT2RP2000551 | F-NT2RP2000551 | 16134 | R-NT2RP2000551 | 16188 |
| NT2RP2000660 | F-NT2RP2000660 | 16135 | R-NT2RP2000660 | 16189 |
| NT2RP2001214 | F-NT2RP2001214 | 16136 | R-NT2RP2001214 | 16190 |
| NT2RP2001460 | F-NT2RP2001460 | 16137 | R-NT2RP2001460 | 16191 |
| NT2RP2001756 | F-NT2RP2001756 | 16138 | R-NT2RP2001756 | 16192 |
| NT2RP2002056 | F-NT2RP2002056 | 16139 | R-NT2RP2002056 | 16193 |
| NT2RP2002677 | F-NT2RP2002677 | 16140 | R-NT2RP2002677 | 16194 |
| NT2RP2002755 | F-NT2RP2002755 | 16141 | R-NT2RP2002755 | 16195 |
| NT2RP2002843 | F-NT2RP2002843 | 16142 | R-NT2RP2002843 | 16196 |
| NT2RP2003101 | F-NT2RP2003101 | 16143 | R-NT2RP2003101 | 16197 |
| NT2RP2003799 | F-NT2RP2003799 | 16144 | R-NT2RP2003799 | 16198 |
| NT2RP2004095 | F-NT2RP2004095 | 16145 | R-NT2RP2004095 | 16199 |
| NT2RP2004732 | F-NT2RP2004732 | 16146 | R-NT2RP2004732 | 16200 |
| NT2RP2004920 | F-NT2RP2004920 | 16147 | R-NT2RP2004920 | 16201 |
| NT2RP2005454 | F-NT2RP2005454 | 16148 | R-NT2RP2005454 | 16202 |
| NT2RP2005776 | F-NT2RP2005776 | 16149 | R-NT2RP2005776 | 16203 |
| NT2RP2005806 | F-NT2RP2005806 | 16150 | R-NT2RP2005806 | 16204 |
| NT2RP2005882 | F-NT2RP2005882 | 16151 | R-NT2RP2005882 | 16205 |
| NT2RP3001282 | F-NT2RP3001282 | 16152 | R-NT2RP3001282 | 16206 |
| NT2RP3001723 | F-NT2RP3001723 | 16153 | R-NT2RP3001723 | 16207 |
| NT2RP3002099 | F-NT2RP3002099 | 16154 | R-NT2RP3002099 | 16208 |
| NT2RP3003155 | F-NT2RP3003155 | 16155 | R-NT2RP3003155 | 16209 |
| NT2RP3004028 | F-NT2RP3004028 | 16156 | R-NT2RP3004028 | 16210 |
| OVARC1000008 | F-OVARC1000008 | 16157 | R-OVARC1000008 | 16211 |
| OVARC1000724 | F-OVARC1000724 | 16158 | R-OVARC1000724 | 16212 |
| OVARC1000751 | F-OVARC1000751 | 16159 | R-OVARC1000751 | 16213 |
| OVARC1001029 | F-OVARC1001029 | 16160 | R-OVARC1001029 | 16214 |
| PLACE1000814 | F-PLACE1000814 | 16161 | R-PLACE1000814 | 16215 |
| PLACE1003030 | F-PLACE1003030 | 16162 | R-PLACE1003030 | 16216 |
| PLACE1005549 | F-PLACE1005549 | 16163 | R-PLACE1005549 | 16217 |
| PLACE1007218 | F-PLACE1007218 | 16164 | R-PLACE1007218 | 16218 |

[0024] Furthermore, the present invention relates to the use of the above primers, as described below.

[0025] (4) A polynucleotide which can be synthesized with the primer set of (2) or (3).

[0026] (5) A polynucleotide comprising a coding region in the polynucleotide of (4).

[0027] (6) A substantially pure protein encoded by polynucleotide of (4).

[0028] (7) A partial peptide of the protein of (6).

[0029] In addition, the present invention comprises a polynucleotide described below and a protein encoded by the polynucleotide.

[0030] (8) An isolated polynucleotide selected from the group consisting of

[0031] (a) a polynucleotide comprising a coding region of the nucleotide sequence set forth in any one of the SEQ ID NOs in Tables 350 and 351;

[0032] (b) a polynucleotide comprising a nucleotide sequence encoding a protein comprising the amino acid sequence set forth in any one of the SEQ ID NOs in Tables 350 and 351;

[0033] (c) a polynucleotide comprising a nucleotide sequence encoding a protein comprising an amino acid sequence selected from the amino acid sequences set forth in the SEQ ID NOs in Tables 350 and 351, in which one or more amino acids are substituted, deleted, inserted, and/or added, wherein said protein is functionally equivalent to the protein comprising said amino acid sequence selected from the amino acid sequences set forth in the SEQ ID NOs in Tables 350 and 351;

[0034] (d) a polynucleotide that hybridizes with a polynucleotide comprising a nucleotide sequence selected from the nucleotide sequences set forth in the SEQ ID NOs in Tables 350 and 351, and that comprises a nucleotide sequence encoding a protein functionally equivalent to the protein encoded by the nucleotide sequence selected from the nucleotide sequences set forth in the SEQ ID NOs in Tables 350 and 351;

[0035] (e) a polynucleotide comprising a nucleotide sequence encoding a partial amino acid sequence of a protein encoded by the polynucleotide of (a) to (d);

[0036] (f) a polynucleotide comprising a nucleotide sequence with at least 70% identity to the nucleotide sequence set forth in any one of the SEQ ID NOs in Tables 350 and 351.

[0037] (9). A substantially pure protein encoded by the polynucleotide of (8).

[0038] (10) An antibody against the protein or peptide of any one of (6), (7), and (9).

[0039] (11) A vector comprising the polynucleotide of (5) or (8).

[0040] (12) A transformant carrying the polynucleotide of (5) or (8), or the vector of (11).

[0041] (13) A transformant expressively carrying the polynucleotide of (5) or (8), or the vector of(11).

[0042] (14) A method for producing the protein or peptide of any one of (6), (7), and (9), comprising culturing the transformant of (13) and recovering the expression product.

[0043] (15) An oligonucleotide comprising the nucleotide sequence set forth in any one of the SEQ ID NOs in Tables 350 and 351 or the nucleotide sequence complementary to the complementary strand thereof, wherein said oligonucleotide comprises 15 nucleotides or more.

[0044] (16) Use of the oligonucleotide of(15) as a primer for synthesizing a polynucleotide.

[0045] (17) Use of the oligonucleotide of (15) as a probe for detecting a gene.

[0046] (18) An antisense polynucleotide against the polynucleotide of (8), or the portion thereof.

[0047] (19) A method for synthesizing a polynucleotide, the method comprising:

[0048] a) synthesizing a complementary strand using a cDNA library as a template, and using the primer set of (2) or (3), or the primer of (16); and

[0049] b) recovering the synthesized product.

[0050] (20) The method of (19), wherein the cDNA library is obtainable by oligo-capping method.

[0051] (21) The method of (19), wherein the complementary strand is obtainable by PCR.

[0052] (22) A method for detecting the polynucleotide of (8), the method comprising:

a) incubating a target polynucleotide with the oligonucleotide of (15) under the conditions where hybridization occurs, and

[0053] b) detecting the hybridization of the target polynucleotide with the oligonucleotide of (15).

[0054] (23) A database of polynucleotides and/or proteins, the database comprising information on at least one sequence selected from the nucleotide sequences set forth in the SEQ ID NOs in Tables 350 and 351 and/or the amino acid sequences set forth in the SEQ ID NOs in Tables 350 and 351, or a medium on which the database is stored.

[0055] Any patents, patent applications, and publications cited herein are incorporated by reference.

### BRIEF DESCRIPTION OF THE DRAWINGS

[0056] FIG. 1 shows the restriction maps of vectors pME18SFL3 and pUC19FL3.

[0057] FIG. 2 shows the reproducibility of gene expression analysis. The respective intensities of gene expression observed in independent set of experiments are plotted in the vertical axis as well as in the horizontal axis.

[0058] FIG. 3 shows the detection limit in gene expression analysis. The intensity of expression is shown in the vertical axis and the concentration (μg/ml) of probe used is shown in the horizontal axis.

### DETAILED DESCRIPTION OF THE INVENTION

[0059] Herein, “polynucleotide” is defined as a molecule in which multiple nucleotides are polymerized. There are no limitations in the number of the polymerized nucleotides. In case that the polymer contains relatively low number of nucleotides, it is also described as an “oligonucleotide”. The polynucleotide or the oligonucleotide of the present invention can be a natural or chemically synthesized product. Alternatively, it can be synthesized using a template DNA by an enzymatic reaction such as PCR.

[0060] All the cDNA provided by the invention are full-length cDNA. Herein, a “full-length cDNA” is defined as a cDNA which contains both ATG codon (the translation start site) and the stop codon. Accordingly, the untranslated regions, which are originally found in the upstream or downstream of the protein coding region in natural mRNA, may or may not be contained.

[0061] An “isolated polynucleotide” is a polynucleotide the structure of which is not identical to that of any naturally occurring nucleic acid or to that of any fragment of a naturally occurring genomic nucleic acid spanning more than three separate genes. The term therefore covers, for example,

[0062] (a) a DNA which has the sequence of part of a naturally occurring genomic DNA molecule but is not flanked by both of the coding sequences that flank that part of the molecule in the genome of the organism in which it naturally occurs;

[0063] (b) a nucleic acid incorporated into a vector or into the genomic DNA of a prokaryote or eukaryote in a manner such that the resulting molecule is not identical to any naturally occurring vector or genomic DNA;

[0064] (c) a separate molecule such as a cDNA, a genomic fragment, a fragment produced by polymerase chain reaction (PCR), or a restriction fragment; and

[0065] (d) a recombinant nucleotide sequence that is part of a hybrid gene, i.e., a gene encoding a fusion protein. Specifically excluded from this definition are nucleic acids present in mixtures of different (i) DNA molecules, (ii) transfected cells, or (iii) cell clones: e.g., as these occur in a DNA library such as a cDNA or genomic DNA library.

[0066] The term “substantially pure” as used herein in reference to a given polypeptide means that the protein or polypeptide is substantially free from other biological macromolecules. The substantially pure protein or polypeptide is at least 75% (e.g., at least 80, 85, 95, or 99%) pure by dry weight. Purity can be measured by any appropriate standard method, for example, by column chromatography, polyacrylamide gel electrophoresis, or HPLC analysis.

[0067] All the clones (5602 clones) of the present invention are novel and encode the full-length proteins. All the clones were prepared by oligo capping method, which can achieve cDNA cloning with high fullness ratio. The cDNA clones were selected by using ATGpr1 score as an index of the fullness ratio at the 5′-end, based on the sequence features of the 5′-end sequences. Selection was further carried out by searching GenBank database for EST sequences homologous to 5′-end sequence of each clone by BLAST [S. F. Altschul, W. Gish, W. Miller, E. W. Myers & D. L. Lipman J. Mol. Biol., 215:403-410 (1990); W. Gish, & D. J. States, Nature Genet., 3:266-272 (1993)] and by considering the number of matching (identical) EST sequences or the number of continuous amino acids in the 5′-end sequence initiated from the initiation codon.

[0068] Moreover, the clones were turn out to be not identical to any of the known human mRNA (namely novel) by homology search using the 5′-end sequence.

[0069] The primers of the present invention, which are used for synthesizing full-length cDNA, are selected from the group comprising SEQ ID NO: 1-5547 (5′-primer), or SEQ ID NO: 5548-10463 (3′-primer). Further, the primers of the present invention, which are used for synthesizing full-length cDNA, are selected from SEQ ID NO: 16111-16164 (5′-primer), or SEQ ID NO: 16165-16218 (3′-primer). Some of the nucleotides include a known EST as its part. However, the primers of the present invention are novel in terms that the primers enable to synthesize full-length cDNA. Because the known ESTs lack important information on what part of cDNA the ESTs correspond to, it is impossible to design primers on the basis of the ESTs.

[0070] All the full-length cDNA of the present invention can be synthesized using a primer set comprising the nucleotide sequences selected from both the 5′- and 3′-end sequences, or a set comprising a primer based on the 5′-end sequence and an oligo-dT primer, by a method such as PCR (Current protocols in Molecular Biology (1987) Ausubel et al. edit, John Wiley & Sons, Section 6.1-6.4).

[0071] Specifically, PCR can be performed using an oligonucleotide that has 15 nucleotides longer, and specifically hybridizes with the complementary strand of the polynucleotide that contains the nucleotide sequence selected from the 5′-end sequences shown in Table 1 and 2 (SEQ ID NO: 1-5547, or SEQ ID NO: 16111-16164), and an oligo-dT primer as a 5′-, and 3′-primer, respectively. The length of the primers is usually 15-100 bp, and favorably between 15-35 bp. In case of LA PCR, which is described below, the primer length of 25-35 bp may provide a good result.

[0072] A method to design a primer that enables a specific amplification based on the given nucleotide sequence is known to those skilled in the art (Current Protocols in Molecular Biology, Ausubel et al. edit, (1987) John Wiley & Sons, Section 6.1-6.4). In designing a primer based on the 5′-end sequence, the primer is designed so as that, in principle, the amplification products will include the translation start site. Accordingly, in case that a given 5′-end nucleotide sequence is the 5′- untranslated region (5′UTR), any part of the sequence can be used as a 5′-primer as far as the specificity toward the target cDNA is insured. The translation start site can be predicted using a known method such as the ATGpr as described below.

[0073] When synthesizing a polynucleotide, the target nucleotide sequence to be amplified can extend to several thousand bp in some cDNA. However, it is possible to amplify such a long nucleotides by using such as LA PCR (Long and Accurate PCR). It is advantageous to use LA PCR when synthesizing long DNA. In LA PCR, in which a special DNA polymerase having 3′→5′ exonuclease activity is used, misincorporated nucleotides can be removed. Accordingly, accurate synthesis of the complementary strand can be achieved even with a long nucleotide sequence. By using LA PCR, it is reported that amplification of a nucleotide with 20 kb longer can be achieved under desirable condition (Takeshi Hayashi (1996) Jikken-Igaku Bessatsu, “Advanced Technologies in PCR” Youdo-sha).

[0074] A template DNA for synthesizing the cDNA of the present invention can be obtained by using cDNA libraries that are prepared by various methods. The full-length cDNA clones obtained here are those with high fullness ratio, which were obtained using a combination of (1) a method to prepare a full-length-enriched cDNA library using the oligo-capping method, and (2) an estimation system for fullness using the 5′-end sequence (selection based on the estimation by the ATGpr after removing clones that are not-full-length compared to the ESTs). However, it is possible to easily obtain a full-length cDNA by using the primers that are provided by the present invention, not by the above described specialized method.

[0075] The problem with the cDNA libraries prepared by the known methods or commercially available is that mRNA contained in the libraries has very low fullness ratio. Thus, it is difficult to screen full-length cDNA clone directly from the library using ordinary cloning methods. The present invention has revealed a primer that is capable of synthesizing a full-length cDNA. If provided with primers, it is possible to synthesize a target full-length cDNA by using enzymatic reactions such as PCR. In particular, a full-length-enriched cDNA library, synthesized by methods such as oligo-capping, is desirable to synthesize a full-length cDNA with more reliability.

[0076] The 5′-end sequence of the full-length cDNA clones of the invention can be used to isolate the regulatory element of transcription including the promoter on the genome. By the spring of the year 2000, a rough draft of the human genome (analysis of human genomic sequence with lower accuracy), which covers 90% of the genome, is planned to be accomplished, and by the year 2003, analysis of the entire human genomic sequence is going to be finished. However, it is hard to analyze with software the transcription start sites on the human genome, in which long introns exist. By contrast, it is easy to specify the transcription start site on the genomic sequence using the 5′-end sequence of the full-length cDNA clone, thus it is easy to obtain the genomic region involved in transcription regulation, which includes the promoter that is contained in the upstream of the transcription start site.

[0077] The full-length cDNAs cloned in the present invention are classified into 13 groups, based on the data such as ATGpr1 score, by which the fullness ratio can be evaluated. Specifically, the 13 groups consist of; the below-mentioned groups (1)-(3), containing 3690 clones (Table 9), and the group (12), containing 3 clones, wherein ATGpr1 (score defined in the ATGpr program) is higher than 0.3; and the below-mentioned groups (4)-(11), containing 1857 clones (Table 10), and the group (13), containing 52 clones, wherein, although ATGpr1 is 0.3 or less, the clones are judged to be full-length from various viewpoints. Names of the clones belonging to the groups (1)-(13) are as indicated in Examples or below.

(1) 1516 Clones

[0078] Among the 3690 clones that have the maximal ATGpr1 score higher than 0.3, 1516 clones are novel full-length clones, in which at least either of the sequences of the 5′- and 3′-ends, or both are not identical to those of any human EST.

(2) 377 Clones

[0079] Among the 3690, 377 clones are novel full-length clones, in which the number of human EST having identical sequence at both 5′- and 3′-ends is 1 to 5.

(3) 1797 Clones

[0080] Among the 3690, 1797 clones are novel full-length clones, in which the number of human EST having identical sequence at the 5′-end is not more than 20 (except the clones described above).

(4) 453 Clones

[0081] Among the 1857 clones in which the maximal ATGpr1 score is 0.3 or less, the following 453 clones are estimated to be novel full-length clones since the clones have the maximal score 0.3 or more in the ATGpr2, and at least either of the sequences of their 5′- and 3′-ends, or both are not identical to those of any human EST. The ATGpr2 score is determined by using the ATGpr program with neglecting the information of the frequency of the six nucleotides contained within the sequence between the ATG codon and the stop codon (the maximal length is 300 nucleotides from the ATG codon) (Salamo A. A., Nishikawa T., and Swindells M. B. (1998) Bioinformatics, 14:384-390; http://www.hri.co.jp/atgpr/). The ATGpr program for calculating the ATGpr2 score is described as the ATGpr2 program in the followings.

(5) 24 Clones

[0082] Among the 1857 clones, 24 clones are estimated to be full-length since their maximal ATGpr2 scores are higher than 0.3, and also novel, though they have low scores in ATGpr1 program, in which the number of the human EST having identical sequence at both 5′- and 3′-ends is 1 to 5.

(6) 65 Clones

[0083] Among the 1857 clones, 65 clones are estimated to be full-length since, though they have low scores in both programs, ATGpr1 and ATGpr2, the scores are the maximum in comparison to those of the other clones in the same cluster (at least two clones). The clones are also novel, if at least either of the sequences of the 5′- and 3′-ends, or both are not identical to those of any human EST.

(7) 32 Clones

[0084] Among the 1857 clones, 32 clones are estimated to be full-length since, though they have low scores in both programs, ATGpr1 and ATGpr2, the scores are the maximum in comparison to those of the other clones in the same cluster (at least two clones). The clones are also novel, if the number of the human EST having identical sequence at both 5′- and 3′-ends is 1 to 5.

(8) 36 Clones

[0085] Among the 1857 clones, 36 clones are full-length, which were selected by assembling the sequences of the other clones or human EST, although they have low scores in both programs, ATGpr1 and ATGpr2. The clones are also novel, if at least either of the sequences of the 5′- and 3′-ends, or both are not identical to those of any human EST.

(9) 81 Clones

[0086] Among the 1857 clones, 81 clones are full-length, which were selected by assembling the sequences of the other clones or human EST, although they have low scores in both programs, ATGpr1 and ATGpr2. The clones are also novel, if the number of the human EST having identical sequence at the 5′-end is not more than 20 (other than the clones in which at least either of the sequences of the 5′- and 3′-ends, or both are not identical to those of any human EST).

(10) 938 Clones

[0087] Among the 1857 clones, 938 clones are estimated to be full-length according to the fullness ratio shown in Table 4, although they have low scores in both programs, ATGpr1 and ATGpr2. The clones are also novel, if at least the sequence of the 5′-end is not identical to those of any human EST.

(11) 228 Clones

[0088] Among the 1857 clones, 228 clones are estimated to be full-length according to the fullness ratio shown in Table 7, although they have low scores in both programs, ATGpr1 and ATGpr2. The clones are also novel, if at least the sequence of the 3′-end is not identical to those of any human EST.

(12) 3 Clones

[0089] Three clones, HEMBA1006812, HEMBB1001871, and NT2RP3001282, whose maximal ATGpr1 values are higher than 0.3, are full-length and novel clones whose 5′-end sequences presumably contain a coding region which is initiated with ATG codon and which encodes 100 amino acids or more.

(13) 52 Clones

[0090] The following 52 clones, which have maximal ATGpr1 values of 0.3 or less, are full-length with the fullness ratios shown in Table 4 although the fullness ratios are low:

[0091] HEMBA1000497, HEMBA1001750, HEMBA1003854, HEMBA1004193, HEMBA1004860, HEMBA1005572, HEMBA1006038, HEMBA1006092, HEMBA1006406, HEMBA1006650, HEMBB1000672, HEMBB1001197, MAMMA1001252, MAMMA1002094, NT2RM4000634, NT2RM4000657, NT2RM4000783, NT2RM4000857, NT2RM4001178, NT2RM4002420, NT2RP2000198, NT2RP2000551, NT2RP2000660, NT2RP2001214, NT2RP2001460, NT2RP2001756, NT2RP2002056, NT2RP2002677, NT2RP2002755, NT2RP2002843, NT2RP2003101, NT2RP2003799, NT2RP2004095, NT2RP2004732, NT2RP2004920, NT2RP2005454, NT2RP2005776, NT2RP2005806, NT2RP2005882, NT2RP3001723, NT2RP3002099, NT2RP3003155, NT2RP3004028, OVARC1000008, OVARC1000724, OVARC1000751, OVARC1001029, PLACE1000814, PLACE1003030, PLACE1005549, PLACE1007218, NT2RP4002298.

[0092] Moreover, the clones are novel clones whose 5′-end sequences presumably contain a coding region which is initiated with ATG codon and which encodes 50 amino acids or more. Among them, the following 20 clones is predicted to contain a coding region with 100 amino acids or more and should encode proteins:

[0093] HEMBA1000497, HEMBA1003854, HEMBA1004193, NT2RM4000657, NT2RM4001178, NT2RP2001756, NT2RP2002677, NT2RP2002755, NT2RP2002843, NT2RP2004095, NT2RP2004920, NT2RP2005806, NT2RP3002099, NT2RP3003155, OVARC1000724, OVARC1001029, PLACE1000814, PLACE1003030, PLACE1005549, PLACE1007218.

[0094] The protein encoded by the polynucleotide of the invention can be prepared as a recombinant protein or as a natural protein. For example, the recombinant protein can be prepared by inserting the polynucleotide encoding the protein of the invention into a vector, introducing the vector into an appropriate host cell and purifying the protein expressed within the transformed host cell, as described below. In contrast, the natural protein can be prepared, for example, by utilizing an affinity column to which an antibody against the protein of the invention (Current Protocols in Molecular Biology (1987) Ausubel et al. edit, John Wily & Sons, Section 16.1-16.19) is attached. The antibody used for affinity purification may be either a polyclonal antibody, or a monoclonal antibody. Alternatively, in vitro translation (See, for example, “On the fidelity of mRNA translation in the nuclease-treated rabbit reticulocyte lysate system.” Dasso M. C., and Jackson R. J. (1989) Nucleic Acids Res. 17:3129-3144) may be used for preparing the protein of the invention.

[0095] Proteins functionally equivalent to the proteins of the present invention can be prepared based on the activities, which were clarified in the above-mentioned manner, of the proteins of the present invention. Using the biological activity possessed by the protein of the invention as an index, it is possible to verify whether or not a particular protein is functionally equivalent to the protein of the invention by examining whether or not the protein has said activity.

[0096] Proteins functionally equivalent to the proteins of the present invention can be prepared by those skilled in the art, for example, by using a method for introducing mutations into an amino acid sequence of a protein (for example, site-directed mutagenesis (Current Protocols in Molecular Biology, edit, Ausubel et al., (1987) John Wiley & Sons, Section 8.1-8.5). Besides, such proteins can be generated by spontaneous mutations. The present invention comprises the proteins having one or more amino acids substitutions, deletions, insertions and/or additions in the amino acid sequences of the proteins of the present invention (Tables 350 and 351), as far as the proteins have the equivalent functions to those of the proteins identified in the present Examples described later.

[0097] There are no limitations in the number and sites of amino acid mutations, as far as the proteins maintain the functions thereof. The number of mutations is typically 30% or less, or 20% or less, or 10% or less, preferably within 5% or less, or 3% or less of the total amino acids, more preferably within 2% or less or 1% or less of the total amino acids. From the viewpoint of maintaining the protein function, it is preferable that a substituted amino has a similar property to that of the original amino acid. For example, Ala, Val, Leu, Ile, Pro, Met, Phe and Trp are assumed to have similar properties to one another because they are all classified into a group of non-polar amino acids. Similarly, substitution can be performed among non-charged amino acid such as Gly, Ser, Thr, Cys, Tyr, Asn, and Gln, acidic amino acids such as Asp and Glu, and basic amino acids such as Lys, Arg, and His.

[0098] In addition, proteins functionally equivalent to the proteins of the present invention can be isolated by using techniques of hybridization or gene amplification known to those skilled in the art. Specifically, using the hybridization technique (Current Protocols in Molecular Biology, edit, Ausubel et al., (1987) John Wiley & Sons, Section 6.3-6.4)), those skilled in the art can usually isolate a DNA highly homologous to the DNA encoding the protein identified in the present Example based on the identified nucleotide sequence (Tables 350 and 351) or a portion thereof and obtain the functionally equivalent protein from the isolated DNA. The present invention include proteins encoded by the DNAs hybridizing with the DNAs encoding the proteins identified in the present Example, as far as the proteins are functionally equivalent to the proteins identified in the present Example. Organisms from which the functionally equivalent proteins are isolated are illustrated by vertebrates such as human, mouse, rat, rabbit, pig and bovine, but are not limited to these animals.

[0099] Washing conditions of hybridization for the isolation of DNAs encoding the functionally equivalent proteins are usually “1×SSC, 0.1% SDS, 37° C.”; more stringent conditions are “0.5×SSC, 0.1% SDS, 42° C.”; and still more stringent conditions are “0.1×SSC, 0.1% SDS, 65° C.”. Alternatively, the following conditions can be given as hybridization conditions of the present invention. Namely, conditions in which the hybridization is done at 16×SSC, 40% Formamide, 25° C.”, and the washing at “1×SSC, 55° C.” can be given. More preferable conditions are those in which the hybridization is done at “6×SSC, 40% Formamide, 37° C.”, and the washing at “0.2×SSC, 55° C.”. Even more preferable are those in which the hybridization is done at “6×SSC, 50% Formamide, 37° C.”, and the washing at “0.1×SSC, 62° C.”. The more stringent the conditions of hybridization are, the more frequently the DNAs highly homologous to the probe sequence are isolated. Therefore, it is preferable to conduct hybridization under stringent conditions. Examples of stringent conditions in the present invention are, washing conditions of “0.5×SSC, 0.1% SDS, 42 ° C.”, or alternatively, hybridization conditions of” 6×SSC, 40% Formamide, 37° C.”, and the washing at “0.2×SSC, 55° C.”. However, the above-mentioned combinations of SSC, SDS and temperature conditions are indicated just as examples. Those skilled in the art can select the hybridization conditions with similar stringency to those mentioned above by properly combining the above-mentioned or other factors (for example, probe concentration, probe length and duration of hybridization reaction) that determines the stringency of hybridization.

[0100] The amino acid sequences of proteins isolated by using the hybridization techniques usually exhibit high homology to those of the proteins of the present invention, which are shown in Tables 350 and 351. The present invention encompasses a polynucleotide comprising a nucleotide sequence that has a high identity to the nucleotide sequence of claim 8 (a). Furthermore, the present invention encompasses a peptide, or protein comprising an amino acid sequence that has a high identity to the amino acid sequence encoded by the polynucleotide of claim 8 (b). The term “high identity” indicates sequence identity of at least 40% or more; preferably 60% or more; and more preferably 70% or more. Alternatively, more preferable is identity of 90% or more, or 93% or more, or 95% or more, furthermore, 97% or more, or 99% or more. The identity can be determined by using the BLAST search algorithm.

[0101] With the gene amplification technique (PCR) (Current Protocols in Molecular Biology, edit, Ausubel et al., (1987) John Wiley & Sons, Section 6.3-6.4)) using primers designed based on the nucleotide sequence (Tables 350 and 351) or a portion thereof identified in the present Example, it is possible to isolate a DNA fragment highly homologous to the polynucleotide sequence or a portion thereof and to obtain functionally equivalent protein to a particular protein identified in the present Example based on the isolated DNA fragment.

[0102] The “percent identity” of two amino acid sequences or of two nucleic acids is determined using the algorithm of Karlin and Altschul (Proc. Natl. Acad. Sei. USA 87:2264-2268, 1990), modified as in Karlin and Altschul (Proc. Natl. Acad. Sei. USA 90:5873-5877, 1993). Such an algorithm is incorporated into the BLASTN and BLASTX programs of Altschul et al. (J. Mol. Biol. 215:403-410, 1990). BLAST nucleotide searches are performed with the BLASTN program, score=100, wordlength=12. BLAST protein searches are performed with the BLASTX program, score=50, wordlength=3. When gaps exist between two sequences, Gapped BLAST is utilized as described in Altschul et al. (Nucleic Acids Res. 25:3389-3402,1997). When utilizing BLAST and Gapped BLAST programs, the default parameters of the respective programs (e.g., BLASTX and BLASTN) are used. See http://www.ncbi.nlm.nih.gov.

[0103] The present invention also includes a partial peptide of the proteins of the invention. The partial peptide comprises a protein generated as a result that a signal peptide has been removed from a secretory protein. If the protein of the present invention has an activity as a receptor or a ligand, the partial peptide may function as a competitive inhibitor of the protein and may bind to the receptor (or ligand). In addition, the present invention comprises an antigen peptide for raising antibodies. For the peptides to be specific for the protein of the invention, the peptides comprise at least 7 amino acids, preferably 8 amino acids or more, more preferably 9 amino acids or more, and even more preferably 10 amino acids or more. The peptide can be used for preparing antibodies against the protein of the invention, or competitive inhibitors of them, and also screening for a receptor that binds to the protein of the invention. The partial peptides of the invention can be produced, for example, by genetic engineering methods, known methods for synthesizing peptides, or digesting the protein of the invention with an appropriate peptidase.

[0104] The present invention also relates to a vector into which the DNA of the invention is inserted. The vector of the invention is not limited as long as it contains the inserted DNA stably. For example, if E. coli is used as a host, vectors such as pBluescript vector (Stratagene) are preferable as a cloning vector. To produce the protein of the invention, expression vectors are especially useful. Any expression vector can be used as far as it is capable of expressing the protein in vitro, in E. coli, in cultured cells, or in vivo. For example, pBEST vector (Promega) is preferable for in vitro expression, pET vector (Invitrogen) for E. coli, pME18S-FL3 vector (GenBank Accession No. AB009864) for cultured cells, and pME18S vector (Mol. Cell. Biol. (1988) 8:466-472) for in vivo expression. To insert the DNA of the invention, ligation utilizing restriction sites can be performed according to the standard method (Current Protocols in Molecular Biology (1987) Ausubel et al. edit, John Wily & Sons, Section 11.4-11.11).

[0105] The present invention also relates to a transformant carrying the vector of the invention. Any cell can be used as a host into which the vector of the invention is inserted, and various kinds of host cells can be used depending on the purposes. For strong expression of the protein in eukaryotic cells, COS cells or CHO cells can be used, for example.

[0106] Introduction of the vector into host cells can be performed, for example, by calcium phosphate precipitation method, electroporation method (Current Protocols in Molecular Biology (1987) Ausubel et al. edit, John Wily & Sons, Section 9.1-9.9), lipofectamine method (GIBCO-BRL), or microinjection method, etc.

[0107] The primer of the present invention can be used for synthesizing full-length cDNA, and also for the detection and/or diagnosis of the abnormality of the protein of the invention encoded by the full-length cDNA. For example, by utilizing polymerase chain reaction (genomic DNA-PCR, or RT-PCR) using the primer of the invention, DNA encoding the protein of the invention can be amplified. It is also possible to obtain the regulatory region of expression in the 5′-upstream by using PCR or hybridization since the transcription start site within the genomic sequence can be easily specified based on the 5′-end sequence of the full-length cDNA. The obtained genomic region can be used for detection and/or diagnosis of the abnormality of the sequence by RFLP analysis, SSCP, or direct sequencing.

[0108] Furthermore, the “polynucleotide having a length of at least 15 nucleotides, comprising a nucleotide sequence that is complementary to a polynucleotide comprising the nucleotide sequence set forth in any one of SEQ ID NOs in Tables 350 and 351, or its complementary strand” includes an antisense polynucleotide for suppressing the expression of the protein of the invention. To exert the antisense effect, the antisense polynucleotide has a length of at least 15 bp or more, for example, 50 bp or more, preferably 100 bp or more, and more preferably 500 bp or more, and has a length of usually 3000 bp or less and preferably 2000 bp or less. The antisense DNA can be used in the gene therapy of the diseases that are caused by the abnormality of the protein of the invention (abnormal function or abnormal expression). Said antisense DNA can be prepared, for example, by the phosphorothioate method (“Physicochemical properties of phosphorothioate oligodeoxynucleotides.” Stein (1988) Nucleic Acids Res. 16:3209-3221) based on the nucleotide sequence of the DNA encoding the protein (for example, the DNA set forth in any one of SEQ ID NOs in Tables 350 and 351).

[0109] The polynucleotide or antisense DNA of the present invention can be used in gene therapy, for example, by administrating it into a patient by the in vivo or ex vivo method with virus vectors such as retrovirus vectors, adenovirus vectors, and adeno-associated virus vectors, or non-virus vectors such as liposome.

[0110] The present invention also relates to antibodies that bind to the protein of the invention. There are no limitations in the form of the antibodies of the invention. They include polyclonal antibodies, monoclonal antibodies, or their portions that can bind to the protein of the invention. They also include antibodies of all classes. Furthermore, special antibodies such as humanized antibodies are also included.

[0111] The polyclonal antibody of the invention can be obtained according to the standard method by synthesizing an oligopeptide corresponding to the amino acid sequence and immunizing rabbits with the peptide (Current Protocols in Molecular Biology (1987) Ausubel et al. edit, John Wily & Sons, Section 11.12-11.13). The monoclonal antibody of the invention can be obtained according to the standard method by purifying the protein expressed in E. coli, immunizing mice with the protein, and producing a hybridoma cell by fusing the spleen cells and myeloma cells (Current Protocols in Molecular Biology (1987) Ausubel et al. edit, John Wily & Sons, Section 11.4-11.11).

[0112] The antibody binding to the protein of the present invention can be used for purification of the protein of the invention, and also for detection and/or diagnosis of the abnormalities of the expression and structure of the protein. Specifically, proteins can be extracted, for example, from tissues, blood, or cells, and the protein of the invention is detected by Western blotting, immunoprecipitation, or ELISA, etc. for the above purpose.

[0113] Furthermore, the antibody binding to the protein of the present invention can be utilized for treating the diseases that associates with the protein of the invention. If the antibodies are used for treating patients, human antibodies or humanized antibodies are preferable in terms of their low antigenicity. The human antibodies can be prepared by immunizing a mouse whose immune system is replaced with that of human (“Functional transplant of megabase human immunoglobulin loci recapitulates human antibody response in mice” Mendez M. J. et al. (1997) Nat. Genet. 15:146-156). The humanized antibodies can be prepared by recombination of the hypervariable region of a monoclonal antibody (Methods in Enzymology (1991) 203:99-121).

[0114] The cDNA of the present invention encodes the amino acid sequence of a protein which is predicted to have the function(s) described below based on the homology search of the GenBank and SwissProt. Specifically, for instance, as shown in EXAMPLES, searching a known gene or protein that is homologous to the partial sequence of the full-length cDNA of the invention (5602 clone) and referring the function of the gene and of the protein encoded by the gene make it possible to predict the function of the protein encoded by the cDNA of the invention. In this way, each of 1437 clones out of the 5602 full-length cDNA clones of the invention was predicted to encode a protein that was classified into one or more of the following categories.

[0115] Secretory or membrane protein (261 clones)

[0116] Glycoprotein-associated protein (113 clones)

[0117] Signal transduction-associated protein (148 clones)

[0118] Transcription-associated protein (233 clones)

[0119] Disease-associated protein (437 clones)

[0120] Enzyme or metabolism-associated protein (301 clones)

[0121] Cell division- or cell proliferation-associated protein (74 clones)

[0122] Cytoskeleton-associated protein (92 clones)

[0123] RNA synthesis-associated protein (280 clones)

[0124] Nuclear protein (352 clones)

[0125] Protein synthesis- or transport-associated protein (112 clones)

[0126] Cellular defense-associated protein (23 clones)

[0127] Development- or growth-associated protein (23 clones)

[0128] It is also possible to predict the protein function by looking into the amino acid sequence for the motifs such as the signal sequence, transmembrane region, nuclear translocation signal, glycosylation signal, phosphorylation site, Zinc finger motif, and SH3 domain. The programs, PSORT (Nakai K., and Kanehisa M. (1992) Genomics 14:897-911), SOSUI (Hirokawa T. et al. (1998) Bioinformatics 14:378-379) (Mitsui Information Developing Inc.), and MEMSAT (Jones D. T., Taylor W. R., and Thornton J. M. (1994) Biochemistry 33:3038-3049) can be used to predict the existence of the signal sequence or transmembrane region. Alternatively, a partial amino acid sequence of the protein is fused with another protein such as GFP, the fusion protein is transfected into cultured cells, and the localization is analyzed to predict the function of the original protein.

[0129] Based on the determined nucleotide sequences of the full-length cDNAs obtained in the present invention, it is possible to predict more detailed functions of the proteins encoded by the cDNA clones, for example, by searching the databases such as GenBank, Swiss-Prot and UniGene for homologies of the cDNAs; or by searching the amino acid sequences deduced from the full-length cDNAs for signal sequences by using software programs such as PSORT, for transmembrane regions by using software programs such as SOSUI or for motifs by using software programs such as Pfam (http://www.sanger.ac.uk/Software/Pfam/index.shtml) and PROSITE (http://www.expasy.ch/prosite/). As a matter of course, the functions are often predictable by using partial sequence information (preferably 300 nucleotides or more) instead of the full-length nucleotide sequences. However, the result of the prediction by using partial nucleotide sequence does not always agree with the result obtained by using full-length nucleotide sequence, and thus, it is needless to say that the prediction of function is preferably performed based on the full-length nucleotide sequences.

[0130] GenBank, Swiss-Prot and UniGene databases were searched for homologies of the full-length nucleotide sequences of the 4997 clones (see Example 18). The amino acid sequences deduced from the full-length nucleotide sequences were searched for functional domains by PSORT, SOSUI and Pfam. Prediction of functions of proteins encoded by the clones and the categorization thereof were performed based on these results obtained.

[0131] The following 798 clones were categorized into secretory and/or membrane proteins.

[0132] HEMBA1000356, HEMBA1000518, HEMBA1000531, HEMBA1000637, HEMBA1000719, HEMBA1000817, HEMBA1000822, HEMBA1000852, HEMBA1000870, HEMBA1000991, HEMBA1001052, HEMBA1001071, HEMBA1001085, HEMBA1001286, HEMBA1001351, HEMBA1001407, HEMBA1001446, HEMBA1001515, HEMBA1001557, HEMBA1001569, HEMBA1001661, HEMBA1001734, HEMBA1001746, HEMBA1001866, HEMBA1002125, HEMBA1002150, HEMBA1002166, HEMBA1002417, HEMBA1002462, HEMBA1002475, HEMBA1002477, HEMBA1002486, HEMBA1002609, HEMBA1002659, HEMBA1002661, HEMBA1002780, HEMBA1002818, HEMBA1002876, HEMBA1002921, HEMBA1003071, HEMBA1003077, HEMBA1003079, HEMBA1003086, HEMBA1003096, HEMBA1003281, HEMBA1003286, HEMBA1003538, HEMBA1003711, HEMBA1003742, HEMBA1003803, HEMBA1004055, HEMBA1004143, HEMBA1004146, HEMBA1004207, HEMBA1004341, HEMBA1004461, HEMBA1004577, HEMBA1004637, HEMBA1004752, HEMBA1004756, HEMBA1004850, HEMBA1004889, HEMBA1004923, HEMBA1004930, HEMBA1005029, HEMBA1005035, HEMBA1005050, HEMBA1005552, HEMBA1005576, HEMBA1005581, HEMBA1005588, HEMBA1005616, HEMBA1005699, HEMBA1005991, HEMBA1006036, HEMBA1006038, HEMBA1006067, HEMBA1006173, HEMBA1006198, HEMBA1006293, HEMBA1006310, HEMBA1006492, HEMBA1006502, HEMBA1006583, HEMBA1006659, HEMBA1006758, HEMBA1006789, HEMBA1006921, HEMBA1006926, HEMBA1006976, HEMBA1007203, HEMBA1007301, HEMBB1000037, HEMBB1000050, HEMBB1000054, HEMBB1000175, HEMBB1000317, HEMBB1000556, HEMBB1000593, HEMBB1000631, HEMBB1000763, HEMBB1000827, HEMBB1000915, HEMBB1000975, HEMBB1001112, HEMBB1001151, HEMBB1001177, HEMBB1001302, HEMBB1001348, HEMBB1001564, HEMBB1001630, HEMBB1001871, HEMBB1001872, HEMBB1001925, HEMBB1001962, HEMBB1002042, HEMBB1002044, HEMBB1002142, HEMBB1002190, HEMBB1002193, HEMBB1002247, HEMBB1002383, HEMBB1002387, HEMBB1002550, HEMBB1002600, HEMBB1002692, MAMMA1000045, MAMMA1000129, MAMMA1000133, MAMMA1000277, MAMMA1000278, MAMMA1000410, MAMMA1000416, MAMMA1000472, MAMMA1000672, MAMMA1000684, MAMMA1000714, MAMMA1000734, MAMMA1000778, MAMMA1000798, MAMMA1000842, MAMMA1000859, MAMMA1000897, MAMMA1000956, MAMMA1001008, MAMMA1001030, MAMMA1001041, MAMMA1001073, MAMMA1001080, MAMMA1001139, MAMMA1001154, MAMMA1001322, MAMMA1001388, MAMMA1001411, MAMMA1001487, MAMMA1001751, MAMMA1001754, MAMMA1001771, MAMMA1002009, MAMMA1002427, MAMMA1002428, MAMMA1002461, MAMMA1002524, MAMMA1002573, MAMMA1002598, MAMMA1002655, MAMMA1002684, MAMMA1002769, MAMMA1002844, MAMMA1002881, MAMMA1002890, MAMMA1002938, MAMMA1002947, MAMMA1003035, MAMMA1003089, MAMMA1003146, MAMMA1003150, NT2RM1000035, NT2RM1000037, NT2RM1000062, NT2RM1000080, NT2RM1000092, NT2RM1000131, NT2RM1000199, NT2RM1000257, NT2RM1000260, NT2RM1000355, NT2RM1000430, NT2RM1000563, NT2RM1000648, NT2RM1000742, NT2RM1000770, NT2RM1000800, NT2RM1000811, NT2RM1000833, NT2RM1000857, NT2RM1000867, NT2RM1000882, NT2RM1000905, NT2RM1001008, NT2RM1001115, NT2RM1001139, NT2RM2000259, NT2RM2000260, NT2RM2000287, NT2RM2000395, NT2RM2000402, NT2RM2000407, NT2RM2000422, NT2RM2000490, NT2RM2000522, NT2RM2000566, NT2RM2000581, NT2RM2000609, NT2RM2000821, NT2RM2001370, NT2RM2001393, NT2RM2001499, NT2RM2001547, NT2RM2001613, NT2RM2001648, NT2RM2001659, NT2RM2001671, NT2RM2001688, NT2RM2001698, NT2RM2001718, NT2RM2001753, NT2RM2001760, NT2RM2001785, NT2RM2001930, NT2RM2001950, NT2RM2001997, NT2RM2001998, NT2RM2002049, NT2RM2002145, NT2RM4000233, NT2RM4000433, NT2RM4000457, NT2RM4000486, NT2RM4000496, NT2RM4000520, NT2RM4000634, NT2RM4000674, NT2RM4000700, NT2RM4000764, NT2RM4000778, NT2RM4000795, NT2RM4000820, NT2RM4000857, NT2RM4001032, NT2RM4001054, NT2RM4001116, NT2RM4001455, NT2RM4001666, NT2RM4001810, NT2RM4001813, NT2RM4001930, NT2RM4001987, NT2RM4002054, NT2RM4002073, NT2RM4002145, NT2RM4002146, NT2RM4002189, NT2RM4002194, NT2RM4002251, NT2RM4002339, NT2RM4002438, NT2RM4002446, NT2RM4002452, NT2RM4002460, NT2RM4002493, NT2RM4002558, NT2RM4002565, NT2RM4002571, NT2RM4002594, NT2RP1000130, NT2RP1000191, NT2RP1000326, NT2RP1000358, NT2RP1000413, NT2RP1000418, NT2RP1000547, NT2RP1000609, NT2RP1000677, NT2RP1000767, NT2RP1000782, NT2RP1000856, NT2RP1100113, NT2RP1001247, NT2RP1001286, NT2RP1001310, NT2RP1001311, NT2RP1001313, NT2RP1001385, NT2RP1001449, NT2RP1001546, NT2RP1001569, NT2RP2000032, NT2RP2000040, NT2RP2000056, NT2RP2000070, NT2RP2000091, NT2RP2000114, NT2RP2000120, NT2RP2000173, NT2RP2000175, NT2RP2000195, NT2RP2000257, NT2RP2000270, NT2RP2000283, NT2RP2000288, NT2RP2000289, NT2RP2000459, NT2RP2000516, NT2RP2000660, NT2RP2000842, NT2RP2000892, NT2RP2001081, NT2RP2001268, NT2RP2001295, NT2RP2001366, NT2RP2001378, NT2RP2001576, NT2RP2001581, NT2RP2001597, NT2RP2001613, NT2RP2001947, NT2RP2001991, NT2RP2002025, NT2RP2002066, NT2RP2002078, NT2RP2002105, NT2RP2002312, NT2RP2002325, NT2RP2002385, NT2RP2002479, NT2RP2002537, NT2RP2002643, NT2RP2002701, NT2RP2002740, NT2RP2002857, NT2RP2003125, NT2RP2003297, NT2RP2003433, NT2RP2003446, NT2RP2003466, NT2RP2003506, NT2RP2003513, NT2RP2003629, NT2RP2003668, NT2RP2003760, NT2RP2003777, NT2RP2003781, NT2RP2004041, NT2RP2004142, NT2RP2004194, NT2RP2004270, NT2RP2004300, NT2RP2004392, NT2RP2004655, NT2RP2004681, NT2RP2004775, NT2RP2004799, NT2RP2004936, NT2RP2004959, NT2RP2005012, NT2RP2005159, NT2RP2005227, NT2RP2005270, NT2RP2005344, NT2RP2005465, NT2RP2005509, NT2RP2005752, NT2RP2005781, NT2RP2005784, NT2RP2005812, NT2RP2006069, NT2RP2006100, NT2RP2006141, NT2RP2006184, NT2RP2006261, NT2RP2006565, NT2RP2006571, NT2RP2006573, NT2RP3000092, NT2RP3000109, NT2RP3000134, NT2RP3000207, NT2RP3000333, NT2RP3000341, NT2RP3000393, NT2RP3000439, NT2RP3000441, NT2RP3000531, NT2RP3000685, NT2RP3000825, NT2RP3000826, NT2RP3000852, NT2RP3000919, NT2RP3001084, NT2RP3001096, NT2RP3001126, NT2RP3001140, NT2RP3001176, NT2RP3001260, NT2RP3001282, NT2RP3001355, NT2RP3001383, NT2RP3001426, NT2RP3001453, NT2RP3001497, NT2RP3001538, NT2RP3001589, NT2RP3001642, NT2RP3001708, NT2RP3001716, NT2RP3001727, NT2RP3001739, NT2RP3001799, NT2RP3001943, NT2RP3001944, NT2RP3002002, NT2RP3002007, NT2RP3002014, NT2RP3002054, NT2RP3002108, NT2RP3002163, NT2RP3002351, NT2RP3002455, NT2RP3002549, NT2RP3002602, NT2RP3002628, NT2RP3002650, NT2RP3002687, NT2RP3002701, NT2RP3002810, NT2RP3002869, NT2RP3002969, NT2RP3002985, NT2RP3003008, NT2RP3003059, NT2RP3003071, NT2RP3003101, NT2RP3003145, NT2RP3003197, NT2RP3003203, NT2RP3003242, NT2RP3003302, NT2RP3003353, NT2RP3003409, NT2RP3003576, NT2RP3003621, NT2RP3003665, NT2RP3003672, NT2RP3003701, NT2RP3003716, NT2RP3003799, NT2RP3003828, NT2RP3003914, NT2RP3003918, NT2RP3003992, NT2RP3004051, NT2RP3004148, NT2RP3004155, NT2RP3004207, NT2RP3004282, NT2RP3004454, NT2RP3004480, NT2RP3004503, NT2RP4000008, NT2RP4000051, NT2RP4000151, NT2RP4000212, NT2RP4000243, NT2RP4000259, NT2RP4000323, NT2RP4000417, NT2RP4000500, NT2RP4000524, NT2RP4000556, NT2RP4000560, NT2RP4000588, NT2RP4000713, NT2RP4000724, NT2RP4000817, NT2RP4000833, NT2RP4000878, NT2RP4000907, NT2RP4000925, NT2RP4000928, NT2RP4000973, NT2RP4000989, NT2RP4001057, NT2RP4001064, NT2RP4001079, NT2RP4001117, NT2RP4001138, NT2RP4001149, NT2RP4001150, NT2RP4001174, NT2RP4001219, NT2RP4001274, NT2RP4001313, NT2RP4001345, NT2RP4001372, NT2RP4001373, NT2RP4001379, NT2RP4001498, NT2RP4001547, NT2RP4001571, NT2RP4001574, NT2RP4001644, NT2RP4001656, NT2RP4001677, NT2RP4001730, NT2RP4001739, NT2RP4001803, NT2RP4001822, NT2RP4001823, NT2RP4001950, NT2RP4001975, NT2RP4002052, NT2RP4002075, NT2RP5003500, NT2RP5003506, NT2RP5003522, NT2RP5003534, OVARC1000060, OVARC1000335, OVARC1000682, OVARC1000689, OVARC1000700, OVARC1000722, OVARC1000751, OVARC1000850, OVARC1000890, OVARC1000924, OVARC1000936, OVARC1000959, OVARC1000984, OVARC1000999, OVARC1001034, OVARC1001055, OVARC1001117, OVARC1001129, OVARC1001154, OVARC1001329, OVARC1001381, OVARC1001391, OVARC1001453, OVARC1001476, OVARC1001506, OVARC1001610, OVARC1001702, OVARC1001703, OVARC1001713, OVARC1001745, OVARC1001767, OVARC1002127, OVARC1002138, OVARC1002158, OVARC1002165, PLACE1000014, PLACE1000213, PLACE1000401, PLACE1000562, PLACE1000611, PLACE1000656, PLACE1000712, PLACE1000793, PLACE1000909, PLACE1000948, PLACE1000977, PLACE1001241, PLACE1001257, PLACE1001377, PLACE1001517, PLACE1001610, PLACE1001761, PLACE1001771, PLACE1001817, PLACE1001983, PLACE1002046, PLACE1002140, PLACE1002213, PLACE1002395, PLACE1002437, PLACE1002500, PLACE1002583, PLACE1002714, PLACE1002722, PLACE1002782, PLACE1002794, PLACE1002851, PLACE1002908, PLACE1003030, PLACE1003044, PLACE1003045, PLACE1003238, PLACE1003296, PLACE1003369, PLACE1003420, PLACE1003493, PLACE1003537, PLACE1003553, PLACE1003596, PLACE1003760, PLACE1003768, PLACE1003771, PLACE1003903, PLACE1004149, PLACE1004197, PLACE1004203, PLACE1004258, PLACE1004270, PLACE1004277, PLACE1004289, PLACE1004473, PLACE1004629, PLACE1004646, PLACE1004743, PLACE1004751, PLACE1004793, PLACE1004840, PLACE1004969, PLACE1005086, PLACE1005162, PLACE1005206, PLACE1005313, PLACE1005467, PLACE1005530, PLACE1005595, PLACE1005611, PLACE1005623, PLACE1005763, PLACE1005884, PLACE1005890, PLACE1005898, PLACE1005934, PLACE1005953, PLACE1006157, PLACE1006225, PLACE1006239, PLACE1006288, PLACE1006492, PLACE1006534, PLACE1006678, PLACE1006754, PLACE1006901, PLACE1006935, PLACE1006956, PLACE1007111, PLACE1007243, PLACE1007274, PLACE1007282, PLACE1007317, PLACE1007375, PLACE1007386, PLACE1007409, PLACE1007416, PLACE1007484, PLACE1007583, PLACE1007632, PLACE1007645, PLACE1007649, PLACE1007852, PLACE1007877, PLACE1007954, PLACE1008273, PLACE1008309, PLACE1008331, PLACE1008402, PLACE1008424, PLACE1008429, PLACE1008531, PLACE1008532, PLACE1008533, PLACE1008568, PLACE1008643, PLACE1008693, PLACE1008715, PLACE1009045, PLACE1009094, PLACE1009298, PLACE1009319, PLACE1009338, PLACE1009368, PLACE1009493, PLACE1009639, PLACE1009659, PLACE1009708, PLACE1009731, PLACE1009845, PLACE1009861, PLACE1009935, PLACE1009992, PLACE1010089, PLACE1010231, PLACE1010321, PLACE1010362, PLACE1010599, PLACE1010622, PLACE1010662, PLACE1010811, PLACE1010917, PLACE1010942, PLACE1010954, PLACE1011090, PLACE1011214, PLACE1011221, PLACE1011371, PLACE1011399, PLACE1011492, PLACE1011646, PLACE1011749, PLACE1011896, PLACE2000034, PLACE2000062, PLACE2000111, PLACE2000132, PLACE2000176, PLACE2000187, PLACE2000216, PLACE2000335, PLACE2000341, PLACE2000373, PLACE2000379, PLACE2000398, PLACE2000399, PLACE2000425, PLACE2000438, PLACE2000458, PLACE2000477, PLACE3000020, PLACE3000218, PLACE3000226, PLACE3000242, PLACE3000244, PLACE3000339, PLACE3000373, PLACE3000399, PLACE3000406, PLACE3000413, PLACE3000455, PLACE4000052, PLACE4000063, PLACE4000129, PLACE4000247, PLACE4000250, PLACE4000259, PLACE4000300, PLACE4000387, PLACE4000431, PLACE4000487, PLACE4000494, PLACE4000522, PLACE4000548, PLACE4000581, PLACE4000593, PLACE4000650, THYRO1000156, THYRO1000327, THYRO1000394, THYRO1000395, THYRO1000570, THYRO1000748, THYRO1000756, THYRO1000783, THYRO1001134, THYRO1001271, THYRO1001287, THYRO1001320, THYRO1001401, THYRO1001534, THYRO1001537, THYRO1001541, THYRO1001828, Y79AA1000258, Y79AA1000420, Y79AA1000469, Y79AA1000734, Y79AA1000800, Y79AA1000976, Y79AA1001023, Y79AA1001177, Y79AA1001384, Y79AA1001394, Y79AA1001603, Y79AA1001647, Y79AA1001846, Y79AA1001874, Y79AA1002139, Y79AA1002246, Y79AA1002351, Y79AA1002399, Y79AA1002416, MAMMA1002498, NT2RM4002287

[0133] The following 142 clones were categorized into glycoprotein-associated proteins.

[0134] HEMBA1000156, HEMBA1000518, HEMBA1000852, HEMBA1001071, HEMBA1001286, HEMBA1001661, HEMBA1001734, HEMBA1001866, HEMBA1003071, HEMBA1003077, HEMBA1003281, HEMBA1003538, HEMBA1003679, HEMBA1003866, HEMBA1005576, HEMBA1005581, HEMBA1005699, HEMBA1006038, HEMBA1006976, HEMBA1007301, HEMBB1000317, HEMBB1000915, HEMBB1001871, HEMBB1001872, HEMBB1002193, MAMMA1000672, MAMMA1000897, MAMMA1001030, MAMMA1001388, MAMMA1002329, MAMMA1002428, MAMMA1002573, MAMMA1003150, NT2RM1000648, NT2RM1001115, NT2RM2000260, NT2RM2000407, NT2RM2000422, NT2RM2000490, NT2RM2001499, NT2RM2001659, NT2RM2001930, NT2RM4000820, NT2RM4000857, NT2RM4001810, NT2RM4001813, NT2RM4001987, NT2RM4002145, NT2RM4002189, NT2RM4002251, NT2RM4002460, NT2RM4002558, NT2RP1000677, NT2RP1000782, NT2RP1000856, NT2RP1001546, NT2RP2000056, NT2RP2000070, NT2RP2001295, NT2RP2001378, NT2RP2001597, NT2RP2001991, NT2RP2002025, NT2RP2002078, NT2RP2002385, NT2RP2004587, NT2RP2004732, NT2RP2005531, NT2RP3000207, NT2RP3000531, NT2RP3000825, NT2RP3001140, NT2RP3002810, NT2RP3003672, NT2RP3003701, NT2RP3003716, NT2RP3003914, NT2RP3004148, NT2RP4000212, NT2RP4000417, NT2RP4000724, NT2RP4000817, NT2RP4000925, NT2RP4001150, NT2RP4001372, NT2RP4001730, NT2RP4001822, NT2RP4001823, NT2RP5003522, OVARC1000091, OVARC1000288, OVARC1000682, OVARC1001055, OVARC1001506, OVARC1001713, OVARC1002127, PLACE1000213, PLACE1000401, PLACE1002437, PLACE1002583, PLACE1002722, PLACE1003045, PLACE1003238, PLACE1003258, PLACE1003493, PLACE1004197, PLACE1004793, PLACE1005953, PLACE1005955, PLACE1006157, PLACE1006239, PLACE1006368, PLACE1006534, PLACE1006754, PLACE1006956, PLACE1007416, PLACE1007632, PLACE1007649, PLACE1008643, PLACE1009094, PLACE1009992, PLACE1010231, PLACE1010662, PLACE1011371, PLACE2000034, PLACE2000373, PLACE2000398, PLACE2000399, PLACE2000438, PLACE2000458, PLACE3000339, PLACE4000063, PLACE4000230, PLACE4000522, PLACE4000548, PLACE4000581, THYRO1000327, THYRO1000756, THYRO1001287, Y79AA1001603, Y79AA1001874, MAMMA1002498

[0135] The following 140 clones were categorized into signal transduction-associated proteins.

[0136] HEMBA1000303, HEMBA1000369, HEMBA1000608, HEMBA1000657, HEMBA1000919, HEMBA1001019, HEMBA1001174, HEMBA1001822, HEMBA1001921, HEMBA1002139, HEMBA1002212, HEMBA1002341, HEMBA1002417, HEMBA1002768, HEMBA1003250, HEMBA1003291, HEMBA1003645, HEMBA1004286, HEMBA1005737, HEMBA1006130, HEMBA1006708, HEMBB1000083, HEMBB1000266, HEMBB1000632, HEMBB1000781, HEMBB1000831, HEMBB1002193, MAMMA1000173, MAMMA1001038, MAMMA1001198, MAMMA1002842, MAMMA1003057, NT2RM1000702, NT2RM1000772, NT2RM1001072, NT2RM2000030, NT2RM2000469, NT2RM2000612, NT2RM2001221, NT2RM2001345, NT2RM2002128, NT2RM4000229, NT2RM4000354, NT2RM4000611, NT2RM4000798, NT2RM4001411, NT2RM4001412, NT2RM4001629, NT2RM4001758, NT2RM4002013, NT2RM4002527, NT2RP1000018, NT2RP1000701, NT2RP1001294, NT2RP1001302, NT2RP2000668, NT2RP2001440, NT2RP2001560, NT2RP2002058, NT2RP2002193, NT2RP2002408, NT2RP2002710, NT2RP2002929, NT2RP2003164, NT2RP2003912, NT2RP2004232, NT2RP2004768, NT2RP2006071, NT2RP2006534, NT2RP3000759, NT2RP3000845, NT2RP3001646, NT2RP3001857, NT2RP3001938, NT2RP3002004, NT2RP3002785, NT2RP3002909, NT2RP3002988, NT2RP3003800, NT2RP3004189, NT2RP3004544, NT2RP4000147, NT2RP4000839, NT2RP4001122, NT2RP4001148, NT2RP4001336, NT2RP4001375, NT2RP4001644, NT2RP4001725, NT2RP4001849, NT2RP4001896, NT2RP4001927, NT2RP4002408, NT2RP5003477, OVARC1000013, OVARC1000437, OVARC1000556, OVARC1000649, OVARC1000945, OVARC1001200, OVARC1002182, PLACE1000977, PLACE1001387, PLACE1002493, PLACE1002591, PLACE1003190, PLACE1003353, PLACE1004128, PLACE1004302, PLACE1004937, PLACE1005243, PLACE1008000, PLACE1008244, PLACE1008650, PLACE1009468, PLACE1009596, PLACE1009708, PLACE1009845, PLACE1010926, PLACE1011041, PLACE2000164, PLACE2000371, PLACE3000145, PLACE3000350, THYRO1000072, THYRO1000748, THYRO1001120, Y79AA1000328, Y79AA1002431, HEMBA1001247, NT2RM2001813, NT2RM4001454, NT2RP2005140, NT2RP2005293, NT2RP3000487, NT2RP3003311, PLACE1000972, PLACE1003723, PLACE1005327, PLACE3000124,

[0137] The following 321 clones were categorized into transcription-associated proteins.

[0138] HEMBA1000158, HEMBA1000201, HEMBA1000216, HEMBA1000555, HEMBA1000561, HEMBA1000851, HEMBA1001077, HEMBA1001137, HEMBA1001405, HEMBA1001510, HEMBA1001635, HEMBA1001804, HEMBA1001809, HEMBA1001819, HEMBA1001847, HEMBA1001869, HEMBA1002035, HEMBA1002092, HEMBA1002177, HEMBA1002770, HEMBA1002935, HEMBA1003408, HEMBA1003545, HEMBA1003568, HEMBA1003662, HEMBA1003684, HEMBA1003760, HEMBA1003953, HEMBA1004097, HEMBA1004321, HEMBA1004353, HEMBA1004389, HEMBA1004479, HEMBA1004758, HEMBA1004973, HEMBA1005219, HEMBA1005359, HEMBA1005513, HEMBA1005528, HEMBA1005548, HEMBA1005558, HEMBA1005931, HEMBA1006158, HEMBA1006248, HEMBA1006278, HEMBA1006283, HEMBA1006347, HEMBA1006359, HEMBA1006559, HEMBA1006941, HEMBB1000789, HEMBB1001011, HEMBB1001314, HEMBB1001482, HEMBB1001673, HEMBB1001749, HEMBB1001839, HEMBB1001908, HEMBB1002134, HEMBB1002217, HEMBB1002342, HEMBB1002607, MAMMA1000183, MAMMA1000388, MAMMA1001105, MAMMA1001222, MAMMA1001260, MAMMA1001627, MAMMA1001633, MAMMA1001743, MAMMA1001820, MAMMA1001837, MAMMA1002617, MAMMA1002650, MAMMA1002937, NT2RM1000055, NT2RM1000086, NT2RM1000746, NT2RM1000885, NT2RM1000894, NT2RM1001092, NT2RM2000013, NT2RM2000452, NT2RM2000735, NT2RM2000740, NT2RM2001035, NT2RM2001105, NT2RM2001575, NT2RM2001670, NT2RM2001716, NT2RM2001771, NT2RM2002091, NT2RM4000024, NT2RM4000046, NT2RM4000104, NT2RM4000202, NT2RM4000531, NT2RM4000595, NT2RM4000733, NT2RM4000734, NT2RM4000741, NT2RM4000751, NT2RM4000996, NT2RM4001092, NT2RM4001140, NT2RM4001200, NT2RM4001483, NT2RM4001592, NT2RM4001783, NT2RM4001823, NT2RM4001828, NT2RM4001858, NT2RM4001979, NT2RM4002066, NT2RP1000086, NT2RP1000111, NT2RP1000574, NT2RP1000902, NT2RP1001013, NT2RP2000008, NT2RP2000126, NT2RP2000297, NT2RP2000420, NT2RP2001174, NT2RP2001233, NT2RP2001756, NT2RP2001869, NT2RP2002046, NT2RP2002252, NT2RP2002270, NT2RP2002464, NT2RP2002503, NT2RP2002520, NT2RP2002591, NT2RP2002880, NT2RP2002939, NT2RP2002993, NT2RP2003243, NT2RP2003329, NT2RP2003347, NT2RP2003480, NT2RP2003522, NT2RP2003564, NT2RP2003714, NT2RP2004013, NT2RP2004066, NT2RP2004187, NT2RP2004920, NT2RP2004961, NT2RP2005003, NT2RP2005139, NT2RP2005325, NT2RP2005496, NT2RP2005701, NT2RP2005722, NT2RP2005776, NT2RP2005942, NT2RP2006238, NT2RP2006436, NT2RP3000050, NT2RP3000320, NT2RP3000512, NT2RP3000527, NT2RP3000590, NT2RP3000603, NT2RP3000605, NT2RP3000632, NT2RP3001057, NT2RP3001107, NT2RP3001111, NT2RP3001120, NT2RP3001150, NT2RP3001268, NT2RP3001338, NT2RP3001398, NT2RP3001527, NT2RP3001688, NT2RP3001855, NT2RP3002165, NT2RP3002399, NT2RP3002876, NT2RP3003133, NT2RP3003193, NT2RP3003251, NT2RP3003313, NT2RP3003327, NT2RP3003555, NT2RP3004016, NT2RP3004125, NT2RP3004242, NT2RP3004428, NT2RP3004498, NT2RP3004566, NT2RP3004617, NT2RP4000210, NT2RP4000398, NT2RP4000455, NT2RP4000648, NT2RP4000837, NT2RP4000865, NT2RP4000997, NT2RP4001029, NT2RP4001080, NT2RP4001213, NT2RP4001433, NT2RP4001529, NT2RP4001551, NT2RP4001568, NT2RP4001638, NT2RP4001753, NT2RP4001760, NT2RP4001790, NT2RP4001838, NT2RP4001938, NT2RP4002078, NT2RP4002081, NT2RP5003461, OVARC1000151, OVARC1000241, OVARC1000479, OVARC1001271, OVARC1001417, OVARC1001436, PLACE1000133, PLACE1000583, PLACE1000706, PLACE1000786, PLACE1000979, PLACE1001118, PLACE1001238, PLACE1001294, PLACE1001304, PLACE1001383, PLACE1001602, PLACE1001632, PLACE1002171, PLACE1002438, PLACE1002450, PLACE1002532, PLACE1002775, PLACE1002834, PLACE1003302, PLACE1003605, PLACE1003738, PLACE1003885, PLACE1004471, PLACE1005584, PLACE1005803, PLACE1005966, PLACE1006167, PLACE1006318, PLACE1006438, PLACE1006482, PLACE1007239, PLACE1007346, PLACE1007488, PLACE1007547, PLACE1007598, PLACE1007955, PLACE1008132, PLACE1008201, PLACE1009099, PLACE1009246, PLACE1009308, PLACE1009398, PLACE1009798, PLACE1010134, PLACE1010702, PLACE1010771, PLACE1010870, PLACE1011160, PLACE1011433, PLACE1011576, PLACE3000009, PLACE3000169, PLACE3000254, PLACE4000128, PLACE4000156, PLACE4000192, PLACE4000211, PLACE4000261, PLACE4000450, PLACE4000489, THYRO1000085, THYRO1000121, THYRO1000242, THYRO1000488, THYRO1000501, THYRO1000569, THYRO1001100, THYRO1001189, THYRO1001809, Y79AA1000013, Y79AA1000033, Y79AA1000037, Y79AA1000342, Y79AA1000627, Y79AA1000705, Y79AA1001299, Y79AA1001312, Y79AA1001391, Y79AA1001533, Y79AA1001613, Y79AA1001866, Y79AA1002103, Y79AA1002229, Y79AA1002433, Y79AA1002472, Y79AA1002482, HEMBA1003257, NT2RM2000101, NT2RM2001797, NT2RP1000101, NT2RP2002208, NT2RP3001214, NT2RP3003278, NT2RP4001235, PLACE1000050, PLACE1001716, PLACE1002499, PLACE1007544,

[0139] The following 392 clones were categorized into disease-associated proteins.

[0140] HEMBA1000020, HEMBA1000216, HEMBA1000304, HEMBA1000561, HEMBA1000569, HEMBA1000910, HEMBA1001043, HEMBA1001059, HEMBA1001071, HEMBA1001088, HEMBA1001569, HEMBA1001661, HEMBA1001672, HEMBA1001819, HEMBA1001921, HEMBA1002267, HEMBA1002419, HEMBA1002469, HEMBA1002547, HEMBA1002555, HEMBA1002810, HEMBA1002939, HEMBA1002997, HEMBA1003148, HEMBA1003369, HEMBA1003417, HEMBA1003418, HEMBA1003433, HEMBA1003538, HEMBA1003555, HEMBA1003568, HEMBA1003569, HEMBA1003581, HEMBA1004168, HEMBA1004202, HEMBA1004248, HEMBA1004275, HEMBA1004321, HEMBA1004353, HEMBA1004356, HEMBA1004479, HEMBA1004509, HEMBA1004669, HEMBA1005009, HEMBA1005338, HEMBA1005367, HEMBA1005423, HEMBA1005528, HEMBA1005581, HEMBA1005621, HEMBA1005699, HEMBA1006507, HEMBA1006650, HEMBA1006652, HEMBA1006737, HEMBA1006807, HEMBA1006877, HEMBA1007121, HEMBA1007243, HEMBB1000119, HEMBB1000693, HEMBB1000927, HEMBB1000985, HEMBB1001068, HEMBB1001282, HEMBB1001339, HEMBB1001482, HEMBB1001564, HEMBB1001802, HEMBB1001905, HEMBB1001908, HEMBB1002217, HEMBB1002477, MAMMA1000388, MAMMA1000731, MAMMA1001305, MAMMA1001633, MAMMA1001868, MAMMA1002170, MAMMA1002198, MAMMA1002268, MAMMA1002485, MAMMA1002530, MAMMA1002858, MAMMA1002869, MAMMA1002881, MAMMA1003047, MAMMA1003146, MAMMA1003166, NT2RM1000001, NT2RM1000153, NT2RM1000252, NT2RM1000555, NT2RM1000770, NT2RM1000826, NT2RM1000850, NT2RM1001003, NT2RM1001092, NT2RM1001102, NT2RM2000191, NT2RM2000363, NT2RM2000594, NT2RM2000624, NT2RM2000714, NT2RM2000821, NT2RM2001035, NT2RM2001575, NT2RM2001652, NT2RM2001664, NT2RM2001668, NT2RM2001698, NT2RM2001803, NT2RM2001839, NT2RM4000155, NT2RM4000471, NT2RM4000486, NT2RM4000657, NT2RM4000751, NT2RM4000996, NT2RM4001629, NT2RM4001810, NT2RM4001819, NT2RM4001865, NT2RM4001876, NT2RM4001940, NT2RM4002066, NT2RM4002093, NT2RM4002146, NT2RM4002161, NT2RM4002323, NT2RM4002558, NT2RM4002571, NT2RP1000086, NT2RP1000574, NT2RP1000738, NT2RP1000825, NT2RP1000833, NT2RP1000959, NT2RP1000966, NT2RP1001013, NT2RP1001185, NT2RP1001482, NT2RP1001665, NT2RP2000070, NT2RP2000147, NT2RP2000224, NT2RP2000248, NT2RP2000297, NT2RP2000310, NT2RP2000414, NT2RP2000420, NT2RP2000523, NT2RP2000809, NT2RP2000812, NT2RP2001233, NT2RP2001327, NT2RP2001378, NT2RP2001394, NT2RP2001397, NT2RP2001460, NT2RP2001520, NT2RP2001536, NT2RP2001876, NT2RP2001898, NT2RP2002025, NT2RP2002058, NT2RP2002124, NT2RP2002325, NT2RP2002503, NT2RP2002959, NT2RP2003000, NT2RP2003157, NT2RP2003164, NT2RP2003228, NT2RP2003295, NT2RP2003517, NT2RP2003564, NT2RP2003604, NT2RP2003714, NT2RP2003737, NT2RP2003952, NT2RP2004013, NT2RP2004170, NT2RP2004587, NT2RP2004732, NT2RP2004933, NT2RP2005003, NT2RP2005144, NT2RP2005239, NT2RP2005276, NT2RP2005288, NT2RP2005315, NT2RP2005325, NT2RP2005336, NT2RP2005358, NT2RP2005407, NT2RP2005436, NT2RP2005476, NT2RP2005525, NT2RP2005694, NT2RP2005719, NT2RP2006043, NT2RP2006071, NT2RP2006219, NT2RP2006312, NT2RP2006456, NT2RP3000050, NT2RP3000068, NT2RP3000085, NT2RP3000299, NT2RP3000403, NT2RP3000596, NT2RP3000739, NT2RP3000753, NT2RP3000875, NT2RP3001057, NT2RP3001081, NT2RP3001216, NT2RP3001307, NT2RP3001338, NT2RP3001427, NT2RP3001428, NT2RP3001679, NT2RP3001723, NT2RP3001855, NT2RP3001898, NT2RP3001969, NT2RP3002056, NT2RP3002062, NT2RP3002151, NT2RP3002351, NT2RP3002399, NT2RP3002953, NT2RP3002988, NT2RP3003078, NT2RP3003251, NT2RP3003282, NT2RP3003313, NT2RP3003327, NT2RP3003409, NT2RP3003672, NT2RP3003831, NT2RP3004016, NT2RP3004078, NT2RP3004209, NT2RP3004258, NT2RP3004490, NT2RP3004534, NT2RP3004569, NT2RP3004572, NT2RP4000109, NT2RP4000367, NT2RP4000376, NT2RP4000449, NT2RP4000855, NT2RP4000879, NT2RP4000925, NT2RP4001086, NT2RP4001126, NT2RP4001150, NT2RP4001213, NT2RP4001276, NT2RP4001407, NT2RP4001433, NT2RP4001483, NT2RP4001575, NT2RP4001760, NT2RP4001861, NT2RP4002078, NT2RP4002791, OVARC1000014, OVARC1000139, OVARC1000520, OVARC1000722, OVARC1000771, OVARC1000834, OVARC1001051, OVARC1001113, OVARC1001244, OVARC1001372, OVARC1001417, OVARC1001496, OVARC1001506, OVARC1001577, OVARC1001726, OVARC1001766, OVARC1001809, OVARC1002165, PLACE1000133, PLACE1000383, PLACE1000420, PLACE1000583, PLACE1000588, PLACE1001171, PLACE1001387, PLACE1001602, PLACE1002046, PLACE1002140, PLACE1002437, PLACE1002474, PLACE1002685, PLACE1002782, PLACE1002834, PLACE1002908, PLACE1003045, PLACE1003302, PLACE1003353, PLACE1003366, PLACE1003493, PLACE1003669, PLACE1003704, PLACE1003903, PLACE1003968, PLACE1004183, PLACE1004197, PLACE1004277, PLACE1004316, PLACE1004358, PLACE1004471, PLACE1004506, PLACE1004510, PLACE1004674, PLACE1004777, PLACE1004814, PLACE1005494, PLACE1006040, PLACE1006170, PLACE1006438, PLACE1006615, PLACE1007140, PLACE1007239, PLACE1007257, PLACE1007511, PLACE1007598, PLACE1008177, PLACE1008356, PLACE1008402, PLACE1008696, PLACE1009027, PLACE1009113, PLACE1009158, PLACE1009444, PLACE1009524, PLACE1010529, PLACE1010870, PLACE1010896, PLACE1011635, PLACE1011858, PLACE1011922, PLACE2000015, PLACE2000072, PLACE2000216, PLACE2000399, PLACE2000438, PLACE2000458, PLACE3000242, PLACE4000009, PLACE4000014, PLACE4000156, PLACE4000369, SKNMC1000046, SKNMC1000050, THYRO1000034, THYRO1000327, THYRO1000343, THYRO1000358, THYRO1000501, THYRO1000662, THYRO1000684, THYRO1000748, THYRO1000934, THYRO1001120, THYRO1001189, THYRO1001204, THYRO1001458, THYRO1001617, THYRO1001671, Y79AA1000346, Y79AA1000469, Y79AA1000560, Y79AA1000734, Y79AA1000782, Y79AA1001391, Y79AA1001548, Y79AA1001594, Y79AA1001711, Y79AA1001874, Y79AA1002204, Y79AA1002210, Y79AA1002258, Y79AA1002472, Y79AA1002482,

[0141] The following 427 clones presumably belong to enzymes and/or metabolism-associated proteins.

[0142] HEMBA1000012, HEMBA1000129, HEMBA1000141, HEMBA1000150, HEMBA1000542, HEMBA1000852, HEMBA1001019, HEMBA1001257, HEMBA1001526, HEMBA1001620, HEMBA1001866, HEMBA1001896, HEMBA1002212, HEMBA1002513, HEMBA1002746, HEMBA1002973, HEMBA1003046, HEMBA1003136, HEMBA1003179, HEMBA1003250, HEMBA1003291, HEMBA1003408, HEMBA1003538, HEMBA1003679, HEMBA1003680, HEMBA1004199, HEMBA1004227, HEMBA1004408, HEMBA1004509, HEMBA1004734, HEMBA1004768, HEMBA1005394, HEMBA1005513, HEMBA1005737, HEMBA1005815, HEMBA1006031, HEMBA1006272, HEMBA1006278, HEMBA1006291, HEMBA1006309, HEMBA1006347, HEMBA1006485, HEMBA1006521, HEMBA1006624, HEMBA1006885, HEMBA1006976, HEMBA1007121, HEMBA1007224, HEMBA1007243, HEMBA1007300, HEMBB1000083, HEMBB1000217, HEMBB1000915, HEMBB1000947, HEMBB1001137, HEMBB1001346, HEMBB1001429, HEMBB1001443, HEMBB1001915, HEMBB1001950, HEMBB1002042, MAMMA1000020, MAMMA1000085, MAMMA1000672, MAMMA1000713, MAMMA1000841, MAMMA1000897, MAMMA1001008, MAMMA1001038, MAMMA1001059, MAMMA11001476, MAMMA1001501, MAMMA1002268, MAMMA1002470, MAMMA1002530, MAMMA1002573, MAMMA1002619, MAMMA1002655, MAMMA1002671, MAMMA1003013, MAMMA1003035, NT2RM1000039, NT2RM1000132, NT2RM1000153, NT2RM1000256, NT2RM1000280, NT2RM1000377, NT2RM1000553, NT2RM1000648, NT2RM1000702, NT2RM1000894, NT2RM1001072, NT2RM1100115, NT2RM2000013, NT2RM2000092, NT2RM2000322, NT2RM2000368, NT2RM2000371, NT2RM2000469, NT2RM2000504, NT2RM2000577, NT2RM2000594, NT2RM2000951, NT2RM2001238, NT2RM2001547, NT2RM2001632, NT2RM2001664, NT2RM2001698, NT2RM2001700, NT2RM2001730, NT2RM2001782, NT2RM2001803, NT2RM2001886, NT2RM2001935, NT2RM2001997, NT2RM2002030, NT2RM2002128, NT2RM4000024, NT2RM4000155, NT2RM4000344, NT2RM4000471, NT2RM4000616, NT2RM4000657, NT2RM4000712, NT2RM4000820, NT2RM4001313, NT2RM4001316, NT2RM4001444, NT2RM4001592, NT2RM4001758, NT2RM4001819, NT2RM4001880, NT2RM4002062, NT2RM4002063, NT2RM4002189, NT2RM4002213, NT2RM4002251, NT2RM4002409, NT2RM4002532, NT2RM4002623, NT2RP1000376, NT2RP1000443, NT2RP1000522, NT2RP1000834, NT2RP1000947, NT2RP1001079, NT2RP1001185, NT2RP1001253, NT2RP1001361, NT2RP1001543, NT2RP2000056, NT2RP2000114, NT2RP2000183, NT2RP2000248, NT2RP2000329, NT2RP2000422, NT2RP2000448, NT2RP2000668, NT2RP2000710, NT2RP2000816, NT2RP2001070, NT2RP2001392, NT2RP2001601, NT2RP2001663, NT2RP2001740, NT2RP2001748, NT2RP2001898, NT2RP2002124, NT2RP2002256, NT2RP2002609, NT2RP2002618, NT2RP2002959, NT2RP2002993, NT2RP2003230, NT2RP2003286, NT2RP2003401, NT2RP2003506, NT2RP2003543, NT2RP2003643, NT2RP2003702, NT2RP2003704, NT2RP2003713, NT2RP2003737, NT2RP2003840, NT2RP2003912, NT2RP2003952, NT2RP2004098, NT2RP2004239, NT2RP2004245, NT2RP2004768, NT2RP2004791, NT2RP2004799, NT2RP2004933, NT2RP2005038, NT2RP2005139, NT2RP2005162, NT2RP2005204, NT2RP2005239, NT2RP2005276, NT2RP2005344, NT2RP2005360, NT2RP2005457, NT2RP2005498, NT2RP2005549, NT2RP2005557, NT2RP2005605, NT2RP2005635, NT2RP2005723, NT2RP2005773, NT2RP2005775, NT2RP2005776, NT2RP2005784, NT2RP2005835, NT2RP2005942, NT2RP2006534, NT2RP2006571, NT2RP2006573, NT2RP3000031, NT2RP3000085, NT2RP3000207, NT2RP3000359, NT2RP3000578, NT2RP3000742, NT2RP3000845, NT2RP3000875, NT2RP3000917, NT2RP3001055, NT2RP3001221, NT2RP3001495, NT2RP3001898, NT2RP3001938, NT2RP3002303, NT2RP3002351, NT2RP3002501, NT2RP3002602, NT2RP3002628, NT2RP3002663, NT2RP3003301, NT2RP3003385, NT2RP3003490, NT2RP3003659, NT2RP3003825, NT2RP3003831, NT2RP3003846, NT2RP3003914, NT2RP3004148, NT2RP3004209, NT2RP3004378, NT2RP3004669, NT2RP3004670, NT2RP4000259, NT2RP4000312, NT2RP4000367, NT2RP4000417, NT2RP4000457, NT2RP4000657, NT2RP4000817, NT2RP4000855, NT2RP4000879, NT2RP4000927, NT2RP4000973, NT2RP4000997, NT2RP4001041, NT2RP4001079, NT2RP4001095, NT2RP4001143, NT2RP4001219, NT2RP4001375, NT2RP4001389, NT2RP4001483, NT2RP4001555, NT2RP4001592, NT2RP4001644, NT2RP4001730, NT2RP4001946, NT2RP4002408, NT2RP5003500, NT2RP5003522, OVARC1000013, OVARC1000060, OVARC1000139, OVARC1000288, OVARC1000309, OVARC1000473, OVARC1000556, OVARC1000682, OVARC1000722, OVARC1000751, OVARC1000885, OVARC1000915, OVARC1001107, OVARC1001713, OVARC1001762, OVARC1001809, OVARC1001942, OVARC1002156, OVARC1002165, PLACE1000007, PLACE1000142, PLACE1000185, PLACE1000213, PLACE1000383, PLACE1000420, PLACE1000547, PLACE1000653, PLACE1000755, PLACE1001054, PLACE1001062, PLACE1001672, PLACE1001692, PLACE1001748, PLACE1001781, PLACE1001817, PLACE1001869, PLACE1001989, PLACE1002073, PLACE1002598, PLACE1002908, PLACE1002991, PLACE1003174, PLACE1003176, PLACE1003709, PLACE1003885, PLACE1003888, PLACE1003903, PLACE1003915, PLACE1004270, PLACE1004428, PLACE1004437, PLACE1004751, PLACE1004804, PLACE1004918, PLACE1005243, PLACE1005305, PLACE1005373, PLACE1005656, PLACE1005763, PLACE1005804, PLACE1005953, PLACE1005955, PLACE1006011, PLACE1006469, PLACE1006534, PLACE1006626, PLACE1006731, PLACE1006819, PLACE1006829, PLACE1006878, PLACE1007226, PLACE1007416, PLACE1007649, PLACE1007706, PLACE1007729, PLACE1007954, PLACE1007958, PLACE1008111, PLACE1008275, PLACE1008330, PLACE1008643, PLACE1009094, PLACE1009130, PLACE1009444, PLACE1009763, PLACE1009861, PLACE1009992, PLACE1009997, PLACE1010096, PLACE1010362, PLACE1010481, PLACE1010662, PLACE1011046, PLACE1011219, PLACE1011229, PLACE1011332, PLACE1011635, PLACE1011923, PLACE2000021, PLACE2000034, PLACE2000398, PLACE2000404, PLACE2000438, PLACE3000009, PLACE3000020, PLACE3000059, PLACE3000147, PLACE3000339, PLACE3000350, PLACE4000063, PLACE4000100, PLACE4000401, PLACE4000548, PLACE4000654, SKNMC1000050, THYRO1000072, THYRO1000197, THYRO1000288, THYRO1000605, THYRO1000662, THYRO1000756, THYRO1000852, THYRO1000926, THYRO1000934, THYRO1000951, THYRO1000983, THYRO1001003, THYRO1001287, THYRO1001374, THYRO1001406, THYRO1001617, THYRO1001671, THYRO1001738, Y79AA1000782, Y79AA1001048, Y79AA1001233, Y79AA1001394, Y79AA1001493, Y79AA1001548, Y79AA1001581, Y79AA1001603, Y79AA1001827, Y79AA1002027, Y79AA1002209, Y79AA1002211, Y79AA1002361, Y79AA1002416, HEMBA1005732, MAMMA1000402,

[0143] The following 217 clones presumably belong to ATP- and/or GTP-binding proteins.

[0144] HEMBA1000012, HEMBA1000129, HEMBA1000185, HEMBA1000491, HEMBA1000531, HEMBA1100119, HEMBA1001174, HEMBA1001387, HEMBA1001595, HEMBA1001723, HEMBA1001913, HEMBA1002161, HEMBA1002212, HEMBA1002876, HEMBA1002997, HEMBA1003250, HEMBA1003291, HEMBA1003369, HEMBA1003555, HEMBA1003560, HEMBA1004131, HEMBA1004199, HEMBA1004202, HEMBA1004354, HEMBA1004697, HEMBA1005047, HEMBA1005595, HEMBA1007018, HEMBA1007151, HEMBB1000083, HEMBB1000226, HEMBB1000264, HEMBB1000632, HEMBB1000725, HEMBB1001294, HEMBB1002193, MAMMA1000085, MAMMA1000612, MAMMA1000731, MAMMA1000738, MAMMA1001038, MAMMA1001735, MAMMA1001768, MAMMA1003127, NT2RM1000187, NT2RM1000388, NT2RM1000702, NT2RM1000772, NT2RM1000924, NT2RM2000469, NT2RM2000577, NT2RM2000740, NT2RM2001100, NT2RM2001201, NT2RM2001345, NT2RM2001823, NT2RM2002128, NT2RM4000155, NT2RM4000191, NT2RM4000356, NT2RM4000496, NT2RM4000611, NT2RM4000733, NT2RM4000820, NT2RM4001084, NT2RM4001178, NT2RM4001344, NT2RM4001444, NT2RM4001592, NT2RM4001714, NT2RM4001758, NT2RM4001880, NT2RM4002062, NT2RM4002174, NT2RM4002205, NT2RM4002527, NT2RM4002594, NT2RM4002623, NT2RP1000470, NT2RP1000478, NT2RP1000915, NT2RP1000958, NT2RP1001080, NT2RP1001410, NT2RP1001569, NT2RP2000126, NT2RP2000258, NT2RP2000329, NT2RP2000660, NT2RP2000668, NT2RP2000710, NT2RP2000812, NT2RP2000880, NT2RP2001245, NT2RP2001392, NT2RP2002606, NT2RP2003277, NT2RP2003912, NT2RP2004538, NT2RP2004568, NT2RP2004689, NT2RP2004768, NT2RP2004791, NT2RP2004920, NT2RP2005344, NT2RP2005393, NT2RP2005763, NT2RP2006534, NT2RP3000046, NT2RP3000252, NT2RP3000350, NT2RP3000359, NT2RP3000366, NT2RP3000397, NT2RP3000759, NT2RP3000845, NT2RP3000875, NT2RP3001150, NT2RP3001427, NT2RP3001453, NT2RP3001529, NT2RP3001730, NT2RP3001799, NT2RP3001857, NT2RP3001938, NT2RP3002007, NT2RP3002151, NT2RP3002330, NT2RP3002399, NT2RP3002671, NT2RP3003301, NT2RP3003353, NT2RP3003589, NT2RP3003809, NT2RP3003876, NT2RP3004189, NT2RP3004428, NT2RP3004578, NT2RP4000290, NT2RP4000481, NT2RP4000518, NT2RP4000781, NT2RP4000839, NT2RP4000929, NT2RP4001041, NT2RP4001079, NT2RP4001375, NT2RP4001414, NT2RP4001592, NT2RP4001634, NT2RP4001644, NT2RP4001656, NT2RP4001896, NT2RP4002047, NT2RP4002058, NT2RP4002408, NT2RP5003477, OVARC1000013, OVARC1000304, OVARC1000556, OVARC1000771, OVARC1000800, OVARC1001068, OVARC1002138, PLACE1000040, PLACE1000588, PLACE1001104, PLACE1001739, PLACE1002433, PLACE1002437, PLACE1002714, PLACE1003394, PLACE1003521, PLACE1003915, PLACE1004902, PLACE1005243, PLACE1005305, PLACE1005549, PLACE1005739, PLACE1005921, PLACE1006119, PLACE1006196, PLACE1006552, PLACE1006956, PLACE1007409, PLACE1007697, PLACE1007946, PLACE1008244, PLACE1009404, PLACE1009476, PLACE1009596, PLACE1009908, PLACE1010134, PLACE1010720, PLACE1010896, PLACE1011109, PLACE1011114, PLACE1011310, PLACE1011922, PLACE2000014, PLACE2000039, PLACE2000274, PLACE2000404, PLACE2000427, PLACE3000350, PLACE4000009, PLACE4000014, PLACE4000326, SKNMC1000013, THYRO1000072, THYRO1001458, Y79AA1000833, Y79AA1000962, Y79AA1001394, Y79AA1001875, Y79AA1001963, Y79AA1002209,

[0145] The following 320 clones presumably belong to nuclear proteins.

[0146] HEMBA1000005, HEMBA1000158, HEMBA1000216, HEMBA1000561, HEMBA1000591, HEMBA1001088, HEMBA1001137, HEMBA1001405, HEMBA1001510, HEMBA1001579, HEMBA1001809, HEMBA1001819, HEMBA1001824, HEMBA1001847, HEMBA1001869, HEMBA1002177, HEMBA1002241, HEMBA1002495, HEMBA1002569, HEMBA1002935, HEMBA1002951, HEMBA1002999, HEMBA1003408, HEMBA1003545, HEMBA1003662, HEMBA1003684, HEMBA1003690, HEMBA1003760, HEMBA1004203, HEMBA1004321, HEMBA1004353, HEMBA1004479, HEMBA1004973, HEMBA1005219, HEMBA1005359, HEMBA1005558, HEMBA1005931, HEMBA1006278, HEMBA1006283, HEMBA1006359, HEMBA1006485, HEMBA1007087, HEMBB1000226, HEMBB1000789, HEMBB1001011, HEMBB1001056, HEMBB1001242, HEMBB1001482, HEMBB1001915, HEMBB1002134, HEMBB1002217, MAMMA1000183, MAMMA1000731, MAMMA1001105, MAMMA1001222, MAMMA1001260, MAMMA1001633, MAMMA1001743, MAMMA1001837, MAMMA1002617, MAMMA1002869, MAMMA1002937, MAMMA1003011, NT2RM1000086, NT2RM1000187, NT2RM1000666, NT2RM1000885, NT2RM1000894, NT2RM1001059, NT2RM1001092, NT2RM2000013, NT2RM2000588, NT2RM2000624, NT2RM2000735, NT2RM2000740, NT2RM2001105, NT2RM2001635, NT2RM2001670, NT2RM2001771, NT2RM2001823, NT2RM2001936, NT2RM2001989, NT2RM2002004, NT2RM2002088, NT2RM2002091, NT2RM4000024, NT2RM4000046, NT2RM4000104, NT2RM4000202, NT2RM4000215, NT2RM4000290, NT2RM4000531, NT2RM4000751, NT2RM4000996, NT2RM4001092, NT2RM4001140, NT2RM4001200, NT2RM4001483, NT2RM4001566, NT2RM4001592, NT2RM4001597, NT2RM4001783, NT2RM4001823, NT2RM4001828, NT2RM4001858, NT2RM4001979, NT2RP1000035, NT2RP1000111, NT2RP1000493, NT2RP1000574, NT2RP1000630, NT2RP1000902, NT2RP1000915, NT2RP1000958, NT2RP1000966, NT2RP1001013, NT2RP1001177, NT2RP2000008, NT2RP2000076, NT2RP2000126, NT2RP2000153, NT2RP2000161, NT2RP2000248, NT2RP2000258, NT2RP2000297, NT2RP2000420, NT2RP2000931, NT2RP2001233, NT2RP2001420, NT2RP2001756, NT2RP2001869, NT2RP2002079, NT2RP2002270, NT2RP2002503, NT2RP2002591, NT2RP2002880, NT2RP2002939, NT2RP2002993, NT2RP2003137, NT2RP2003157, NT2RP2003277, NT2RP2003286, NT2RP2003308, NT2RP2003347, NT2RP2003714, NT2RP2003912, NT2RP2004013, NT2RP2004187, NT2RP2004689, NT2RP2004920, NT2RP2005393, NT2RP2005436, NT2RP2005496, NT2RP2005539, NT2RP2005701, NT2RP2005767, NT2RP2005776, NT2RP2005933, NT2RP2005942, NT2RP2006043, NT2RP2006436, NT2RP3000031, NT2RP3000050, NT2RP3000397, NT2RP3000512, NT2RP3000527, NT2RP3000590, NT2RP3000603, NT2RP3000632, NT2RP3000917, NT2RP3001057, NT2RP3001107, NT2RP3001120, NT2RP3001253, NT2RP3001338, NT2RP3001384, NT2RP3001398, NT2RP3001427, NT2RP3001428, NT2RP3001472, NT2RP3001646, NT2RP3001671, NT2RP3001792, NT2RP3001855, NT2RP3002056, NT2RP3002165, NT2RP3002399, NT2RP3002876, NT2RP3003193, NT2RP3003212, NT2RP3003555, NT2RP3004016, NT2RP3004206, NT2RP3004424, NT2RP3004428, NT2RP3004566, NT2RP3004617, NT2RP4000078, NT2RP4000111, NT2RP4000210, NT2RP4000398, NT2RP4000481, NT2RP4000518, NT2RP4000997, NT2RP4001148, NT2RP4001206, NT2RP4001213, NT2RP4001433, NT2RP4001568, NT2RP4001638, NT2RP4001696, NT2RP4001753, NT2RP4001938, NT2RP4002058, NT2RP4002078, NT2RP4002081, NT2RP4002791, OVARC1000006, OVARC1000087, OVARC1000091, OVARC1000241, OVARC1000326, OVARC1000556, OVARC1000846, OVARC1001038, OVARC1001180, OVARC1001232, OVARC1001271, OVARC1001306, OVARC1001436, OVARC1002112, PLACE1000133, PLACE1000184, PLACE1000406, PLACE1000583, PLACE1000596, PLACE1000979, PLACE1011118, PLACE1001383, PLACE1001632, PLACE1002171, PLACE1002433, PLACE1002438, PLACE1002532, PLACE1002775, PLACE1002816, PLACE1002834, PLACE1003100, PLACE1003190, PLACE1003302, PLACE1003519, PLACE1003521, PLACE1003605, PLACE1003704, PLACE1003738, PLACE1003885, PLACE1003923, PLACE1004302, PLACE1004471, PLACE1004564, PLACE1004814, PLACE1004902, PLACE1005287, PLACE1005876, PLACE1005966, PLACE1006167, PLACE1006438, PLACE1006482, PLACE1006829, PLACE1006878, PLACE1006917, PLACE1007014, PLACE1007547, PLACE1007598, PLACE1007688, PLACE1007969, PLACE1008044, PLACE1008132, PLACE1008603, PLACE1009099, PLACE1009130, PLACE1009308, PLACE1009398, PLACE1010134, PLACE1010194, PLACE1010702, PLACE1010720, PLACE1010870, PLACE1011056, PLACE1011433, PLACE1011664, PLACE2000014, PLACE2000427, PLACE3000009, PLACE3000169, PLACE4000014, PLACE4000156, PLACE4000192, PLACE4000261, PLACE4000326, PLACE4000489, SKNMC1000011, THYRO1000085, THYRO1000242, THYRO1000585, THYRO1001100, THYRO1001189, THYRO1001809, Y79AA1000037, Y79AA1000214, Y79AA1000231, Y79AA1000589, Y79AA1000752, Y79AA1001391, Y79AA1001613, Y79AA1001705, Y79AA1001963, Y79AA1002431, Y79AA1002472, Y79AA1002482,

[0147] The following 296 clones presumably belong to DNA- and/or RNA-binding proteins.

[0148] HEMBA1000158, HEMBA1000216, HEMBA1000561, HEMBA1000591, HEMBA1000851, HEMBA1001088, HEMBA1001137, HEMBA1001405, HEMBA1001510, HEMBA1001804, HEMBA1001809, HEMBA1001819, HEMBA1001847, HEMBA1001869, HEMBA1002177, HEMBA1002935, HEMBA1003408, HEMBA1003545, HEMBA1003568, HEMBA1003591, HEMBA1003662, HEMBA1003684, HEMBA1003760, HEMBA1003783, HEMBA1003805, HEMBA1003953, HEMBA1004321, HEMBA1004354, HEMBA1004389, HEMBA1004479, HEMBA1004669, HEMBA1004847, HEMBA1004973, HEMBA1005202, HEMBA1005359, HEMBA1005931, HEMBA1006248, HEMBA1006278, HEMBA1006283, HEMBA1006359, HEMBA1006652, HEMBA1007087, HEMBA1007194, HEMBB1000264, HEMBB1000789, HEMBB1100111, HEMBB1001482, HEMBB1001736, HEMBB1001749, HEMBB1001839, HEMBB1002217, MAMMA1000183, MAMMA1000284, MAMMA1000731, MAMMA1001105, MAMMA1001222, MAMMA1001260, MAMMA1001743, MAMMA1001837, MAMMA1002385, MAMMA1002617, MAMMA1002869, MAMMA1002937, MAMMA1003011, NT2RM1000086, NT2RM1000539, NT2RM1000555, NT2RM1000666, NT2RM1000691, NT2RM1000826, NT2RM1000885, NT2RM1001059, NT2RM1001092, NT2RM2000371, NT2RM2000624, NT2RM2000735, NT2RM2001105, NT2RM2001424, NT2RM2001575, NT2RM2001605, NT2RM2001670, NT2RM2001771, NT2RM2001823, NT2RM2001989, NT2RM2002004, NT2RM2002014, NT2RM2002088, NT2RM2002091, NT2RM4000046, NT2RM4000104, NT2RM4000167, NT2RM4000191, NT2RM4000202, NT2RM4000531, NT2RM4000595, NT2RM4000733, NT2RM4000751, NT2RM4000996, NT2RM4001092, NT2RM4001140, NT2RM4001178, NT2RM4001200, NT2RM4001483, NT2RM4001592, NT2RM4001783, NT2RM4001823, NT2RM4001828, NT2RM4001858, NT2RM4001880, NT2RM4001979, NT2RM4002093, NT2RM4002109, NT2RP1000470, NT2RP1000493, NT2RP1000574, NT2RP1000902, NT2RP1000966, NT2RP1001013, NT2RP11001073, NT2RP1001080, NT2RP2000008, NT2RP2000153, NT2RP2000258, NT2RP2000297, NT2RP2001127, NT2RP2001174, NT2RP2001233, NT2RP2001511, NT2RP2001756, NT2RP2001869, NT2RP2002079, NT2RP2002099, NT2RP2002503, NT2RP2002591, NT2RP2002939, NT2RP2003157, NT2RP2003329, NT2RP2003347, NT2RP2003480, NT2RP2003522, NT2RP2003564, NT2RP2003714, NT2RP2004187, NT2RP2004568, NT2RP2004920, NT2RP2005003, NT2RP2005139, NT2RP2005168, NT2RP2005436, NT2RP2005496, NT2RP2005701, NT2RP2005763, NT2RP2005776, NT2RP2005942, NT2RP2006043, NT2RP2006436, NT2RP2006464, NT2RP3000050, NT2RP3000512, NT2RP3000527, NT2RP3000562, NT2RP3000590, NT2RP3000603, NT2RP3000624, NT2RP3000632, NT2RP3000994, NT2RP3001057, NT2RP3001107, NT2RP3001120, NT2RP3001150, NT2RP3001155, NT2RP3001338, NT2RP3001398, NT2RP3001472, NT2RP3001672, NT2RP3001688, NT2RP3001724, NT2RP3001792, NT2RP3001855, NT2RP3002165, NT2RP3002399, NT2RP3002876, NT2RP3003138, NT2RP3003193, NT2RP3003251, NT2RP3003327, NT2RP3003555, NT2RP3004013, NT2RP3004078, NT2RP3004428, NT2RP3004490, NT2RP3004566, NT2RP3004594, NT2RP3004617, NT2RP3004618, NT2RP4000111, NT2RP4000398, NT2RP4000455, NT2RP4000518, NT2RP4000648, NT2RP4000865, NT2RP4000929, NT2RP4001080, NT2RP4001095, NT2RP4001213, NT2RP4001433, NT2RP4001568, NT2RP4001696, NT2RP4001753, NT2RP4001838, NT2RP4001938, NT2RP4002078, OVARC1000006, OVARC1000087, OVARC1000241, OVARC1000746, OVARC1000846, OVARC1001232, OVARC1001271, OVARC1001306, OVARC1001987, OVARC1002112, PLACE1000406, PLACE1000583, PLACE1000979, PLACE1001118, PLACE1001632, PLACE1001739, PLACE1002438, PLACE1002532, PLACE1002775, PLACE1002834, PLACE1003302, PLACE1003519, PLACE1003605, PLACE1003704, PLACE1003738, PLACE1003885, PLACE1004471, PLACE1004564, PLACE1004814, PLACE1005584, PLACE1005876, PLACE1005951, PLACE1006196, PLACE1006482, PLACE1006488, PLACE1006531, PLACE1006917, PLACE1007346, PLACE1007547, PLACE1007598, PLACE1007688, PLACE1007969, PLACE1008132, PLACE1009099, PLACE1009246, PLACE1009398, PLACE1009476, PLACE1009622, PLACE1010053, PLACE1010194, PLACE1010702, PLACE1010870, PLACE1011056, PLACE1011114, PLACE1011433, PLACE2000427, PLACE3000009, PLACE3000169, PLACE4000014, PLACE4000156, PLACE4000192, PLACE4000261, PLACE4000489, SKNMC1000091, THYRO1000085, THYRO1000242, THYRO1000501, THYRO1001100, THYRO1001189, THYRO1001809, Y79AA1000037, Y79AA1000349, Y79AA1000752, Y79AA1001211, Y79AA1001312, Y79AA1001391, Y79AA1001613, Y79AA1002103, Y79AA1002472, Y79AA1002482, HEMBA1004596, OVARC1000148, PLACE1003334, THYRO1001661,

[0149] The following 66 clones presumably belong to the category of RNA synthesis-associated proteins.

[0150] HEMBA1000591, HEMBA1001579, HEMBA1003179, HEMBA1003591, HEMBA1006278, HEMBB1000226, NT2RM1000187, NT2RM1000852, NT2RM2000624, NT2RM2001989, NT2RM2002100, NT2RM4000191, NT2RM4001178, NT2RM4002093, NT2RP1000035, NT2RP1000272, NT2RP1000470, NT2RP1001080, NT2RP2000153, NT2RP2002928, NT2RP2003157, NT2RP2004568, NT2RP2005126, NT2RP2005436, NT2RP2005539, NT2RP2005605, NT2RP2005776, NT2RP2005942, NT2RP2006043, NT2RP2006238, NT2RP3000361, NT2RP3000397, NT2RP3001671, NT2RP3004504, NT2RP4000078, NT2RP4000111, NT2RP4000481, NT2RP4000518, NT2RP4000614, NT2RP4000929, NT2RP4001696, NT2RP4002058, OVARC1001232, OVARC1001577, PLACE1000406, PLACE1000596, PLACE1000755, PLACE1001739, PLACE1003704, PLACE1003885, PLACE1004564, PLACE1004814, PLACE1004902, PLACE1005373, PLACE1005646, PLACE1005876, PLACE1006196, PLACE1006626, PLACE1006878, PLACE1006917, PLACE1009476, PLACE1009925, PLACE1010194, PLACE1011114, THYRO1000121, Y79AA1001963,

[0151] The following 184 clones presumably belong to protein synthesis- and/or protein transport-associated proteins.

[0152] HEMBA1000012, HEMBA1000141, HEMBA1000592, HEMBA1003617, HEMBA1003773, HEMBA1004202, HEMBA1004276, HEMBA1004734, HEMBA1004847, HEMBA1004929, HEMBA1004930, HEMBA1005047, HEMBA1005202, HEMBA1006031, HEMBA1006272, HEMBA1006474, HEMBA1006652, HEMBA1006914, HEMBA1006973, HEMBA1007224, HEMBB1000915, HEMBB1001112, HEMBB1001137, HEMBB1001736, HEMBB1001831, HEMBB1001915, MAMMA1000085, MAMMA1000734, MAMMA1001008, MAMMA1002170, MAMMA1002219, MAMMA1002236, MAMMA1002619, NT2RM1000661, NT2RM1000833, NT2RM2000092, NT2RM2000504, NT2RM2000577, NT2RM2000821, NT2RM2001201, NT2RM2001592, NT2RM2001613, NT2RM2001648, NT2RM2001730, NT2RM2001760, NT2RM2002055, NT2RM4000155, NT2RM4000169, NT2RM4000344, NT2RM4000356, NT2RM4000421, NT2RM4000712, NT2RM4001054, NT2RM4001203, NT2RM4001382, NT2RM4001444, NT2RM4002062, NT2RM4002205, NT2RM4002623, NT2RP1000326, NT2RP1000522, NT2RP1000547, NT2RP1000746, NT2RP1000947, NT2RP1001569, NT2RP2000147, NT2RP2000710, NT2RP2000880, NT2RP2000943, NT2RP2001290, NT2RP2001392, NT2RP2001601, NT2RP2001613, NT2RP2001660, NT2RP2001740, NT2RP2002124, NT2RP2002606, NT2RP2002862, NT2RP2002959, NT2RP2002980, NT2RP2003137, NT2RP2003158, NT2RP2003391, NT2RP2003394, NT2RP2003401, NT2RP2003433, NT2RP2003704, NT2RP2003713, NT2RP2003737, NT2RP2003760, NT2RP2003981, NT2RP2004366, NT2RP2004389, NT2RP2004791, NT2RP2005012, NT2RP2005116, NT2RP2005360, NT2RP2005763, NT2RP2005784, NT2RP3000366, NT2RP3000759, NT2RP3000968, NT2RP3001113, NT2RP3001690, NT2RP3002045, NT2RP3002151, NT2RP3002529, NT2RP3002671, NT2RP3003301, NT2RP3003846, NT2RP3003876, NT2RP3004209, NT2RP4000370, NT2RP4000457, NT2RP4000879, NT2RP4000927, NT2RP4001041, NT2RP4001117, NT2RP4001313, NT2RP4001315, NT2RP4001574, NT2RP4001592, OVARC1000013, OVARC1000071, OVARC1000085, OVARC1000465, OVARC1000564, OVARC1000771, OVARC1000862, OVARC1001171, OVARC1001180, OVARC1001342, PLACE1000007, PLACE1000061, PLACE1000081, PLACE1000492, PLACE1000863, PLACE1001092, PLACE1001748, PLACE1002090, PLACE1003174, PLACE1003915, PLACE1004104, PLACE1004270, PLACE1004743, PLACE1005557, PLACE1005813, PLACE1006170, PLACE1006488, PLACE1006829, PLACE1007706, PLACE1007729, PLACE1008273, PLACE1008402, PLACE1008790, PLACE1008813, PLACE1009094, PLACE1009130, PLACE1009477, PLACE1009721, PLACE1009845, PLACE1010074, PLACE1010547, PLACE1011109, PLACE1011229, PLACE1011477, PLACE1012031, PLACE2000404, PLACE3000059, PLACE3000121, PLACE4000269, PLACE4000654, SKNMC1000011, THYRO1000983, THYRO11001003, THYRO1001313, Y79AA1000560, Y79AA1000784, Y79AA1000968, Y79AA1001493, Y79AA1001875, Y79AA1002027, Y79AA1002209, HEMBA1006284,

[0153] The following 130 clones presumably belong to cytoskeleton-associated proteins.

[0154] HEMBA1000156, HEMBA1000168, HEMBA1000411, HEMBA1000588, HEMBA1001043, HEMBA1001651, HEMBA1001661, HEMBA1002102, HEMBA1002161, HEMBA1002939, HEMBA1003235, HEMBA1003581, HEMBA1004499, HEMBA1004534, HEMBA1004697, HEMBA1004929, HEMBA1004972, HEMBA1005582, HEMBA1005595, HEMBA1006344, HEMBA1006737, HEMBB1001175, HEMBB1001282, HEMBB1001562, HEMBB1001802, MAMMA1000824, MAMMA1001041, MAMMA1001576, MAMMA1001679, MAMMA1001735, MAMMA1002297, MAMMA1002351, MAMMA1002622, MAMMA1002637, MAMMA1003127, NT2RM1000850, NT2RM1000898, NT2RM2000030, NT2RM2000260, NT2RM2000691, NT2RM2001324, NT2RM4000169, NT2RM4000229, NT2RM4000515, NT2RM4001217, NT2RP1000202, NT2RP1000348, NT2RP1000460, NT2RP1000478, NT2RP1001033, NT2RP1001294, NT2RP1001302, NT2RP2000070, NT2RP2000812, NT2RP2000814, NT2RP2001168, NT2RP2001245, NT2RP2001634, NT2RP2001900, NT2RP2003307, NT2RP2003394, NT2RP2004041, NT2RP2004242, NT2RP2004538, NT2RP2004587, NT2RP2004681, NT2RP2004732, NT2RP2004978, NT2RP2005491, NT2RP2005531, NT2RP2005712, NT2RP2006275, NT2RP3000753, NT2RP3001113, NT2RP3001216, NT2RP3001239, NT2RP3001272, NT2RP3001554, NT2RP3001690, NT2RP3001799, NT2RP3002688, NT2RP3003061, NT2RP3003185, NT2RP3003230, NT2RP3004569, NT2RP3004578, NT2RP4001004, NT2RP4001086, NT2RP4001256, NT2RP4001567, NT2RP4001927, OVARC1000001, OVARC1000106, OVARC1000437, OVARC1000520, OVARC1000679, OVARC1001731, OVARC1002050, PLACE1001104, PLACE1002571, PLACE1002591, PLACE1002655, PLACE1002714, PLACE1003625, PLACE1005287, PLACE1006552, PLACE1007946, PLACE1008426, PLACE1010148, PLACE1010547, PLACE1010743, PLACE1010896, PLACE1010960, PLACE1011310, PLACE1011922, PLACE2000216, PLACE2000274, PLACE2000371, PLACE2000458, PLACE3000145, PLACE3000416, PLACE4000009, THYRO1000132, THYRO1001405, THYRO1001458, Y79AA1000368, Y79AA1000794, Y79AA1000833, Y79AA1000962, Y79AA1002208,

[0155] The following 54 clones presumably belong to cell division-associated and/or cell proliferation-associated proteins.

[0156] HEMBA1001019, HEMBA1001595, HEMBA1002363, HEMBA1002997, HEMBA1003136, HEMBA1003369, HEMBA1004131, HEMBA1004354, HEMBA1005621, HEMBB1000037, HEMBB1000264, MAMMA1001768, MAMMA1002769, NT2RM1000354, NT2RM1000430, NT2RM1000874, NT2RM2001256, NT2RM2001743, NT2RM2001896, NT2RM2002145, NT2RM4000215, NT2RM4001714, NT2RP1000163, NT2RP1000333, NT2RP1000439, NT2RP2000346, NT2RP2001397, NT2RP2002595, NT2RP2003177, NT2RP2003596, NT2RP2003912, NT2RP2004396, NT2RP2005037, NT2RP2005520, NT2RP2005669, NT2RP2005835, NT2RP3001730, NT2RP3002081, NT2RP4000210, NT2RP4000415, NT2RP4001414, NT2RP4001634, OVARC1000013, OVARC1000937, PLACE1001383, PLACE1002433, PLACE1004316, PLACE1005287, PLACE1008808, PLACE1010720, PLACE1010833, Y79AA1000748, Y79AA1001236, Y79AA1001394

[0157] The following 36 clones presumably belong to the category of embryogenesis- and/or development-associated proteins.

[0158] HEMBA1000518, HEMBA1001847, HEMBA1001869, HEMBA1003545, HEMBA1004973, HEMBB1002442, MAMMA1001837, NT2RM2001670, NT2RM4000046, NT2RM4000531, NT2RM4001140, NT2RM4001858, NT2RP2002078, NT2RP2004187, NT2RP2006436, NT2RP3000603, NT2RP3000994, NT2RP3001580, NT2RP3001708, NT2RP3003071, NT2RP3004472, NT2RP3004617, NT2RP4000246, NT2RP4001567, OVARC1000304, OVARC1000746, PLACE1000793, PLACE1002532, PLACE1003258, PLACE1003625, PLACE1004460, PLACE1009622, PLACE4000558, THYRO1000085, Y79AA1001391, Y79AA1001692

[0159] The following 30 clones presumably belong to cellular defense-associated proteins.

[0160] HEMBA1000005, HEMBA1000531, HEMBA1003417, HEMBA1006253, NT2RM4000354, NT2RM4001880, NT2RP1000333, NT2RP1000493, NT2RP2000006, NT2RP2000045, NT2RP2000809, NT2RP2001536, NT2RP2002464, NT2RP2004920, NT2RP2005037, NT2RP3000590, NT2RP3001426, NT2RP3002062, NT2RP3002785, NT2RP3004262, NT2RP4001555, NT2RP4001638, PLACE1006958, PLACE1008275, PLACE1009113, PLACE1011858, PLACE4000014, THYRO1000684, Y79AA1002139, Y79AA1002229

[0161] Although it is unclear whether or not 261 clones out of clones other than the above-mentioned clones belong to any of the above-described categories, these clones are predicted to have some functions, based on the homology search using their full-length sequences.

[0162] HEMBA1000030, HEMBA1000307, HEMBA1000333, HEMBA1000488, HEMBA1000523, HEMBA1001197, HEMBA1001302, HEMBA1001455, HEMBA1001675, HEMBA1001714, HEMBA1001744, HEMBA1001967, HEMBA1002151, HEMBA1002215, HEMBA1002458, HEMBA1002777, HEMBA1003098, HEMBA1003199, HEMBA1003615, HEMBA1003836, HEMBA1004295, HEMBA1004573, HEMBA1004604, HEMBA1004795, HEMBA1005101, HEMBA1005201, HEMBA1005206, HEMBA1005530, HEMBA1005666, HEMBA1005990, HEMBA1006268, HEMBA1006398, HEMBA1006445, HEMBA1007174, HEMBA1007251, HEMBB1000036, HEMBB1000144, HEMBB1000973, HEMBB1001058, HEMBB1001234, HEMBB1001288, HEMBB1001331, HEMBB1001384, HEMBB1002266, HEMBB1002510, HEMBB1002705, MAMMA1000055, MAMMA1000625, MAMMA1001075, MAMMA1001181, MAMMA1001259, MAMMA1001730, MAMMA1002143, MAMMA1002699, MAMMA1002972, MAMMA1003113, NT2RM1000118, NT2RM1000186, NT2RM1000244, NT2RM1000421, NT2RM1000499, NT2RM1000623, NT2RM1000883, NT2RM2000502, NT2RM2000599, NT2RM2000718, NT2RM2001065, NT2RM2001196, NT2RM2001983, NT2RM2002109, NT2RM2002142, NT2RM4000030, NT2RM4000139, NT2RM4000156, NT2RM4000386, NT2RM4000590, NT2RM4001047, NT2RM4001155, NT2RM4001256, NT2RM4001320, NT2RM4001340, NT2RM4001347, NT2RM4001371, NT2RM4001582, NT2RM4001611, NT2RM4001731, NT2RM4001969, NT2RM4002034, NT2RM4002075, NT2RM4002226, NT2RP1000040, NT2RP1000363, NT2RP1000481, NT2RP1000513, NT2RP1000733, NT2RP1000860, NT2RP1000954, NT2RP1001011, NT2RP1001395, NT2RP1001457, NT2RP1001494, NT2RP2000054, NT2RP2000067, NT2RP2000133, NT2RP2000157, NT2RP2000764, NT2RP2000965, NT2RP2001839, NT2RP2001883, NT2RP2001976, NT2RP2001985, NT2RP2002185, NT2RP2002442, NT2RP2002727, NT2RP2002741, NT2RP2002986, NT2RP2003121, NT2RP2003265, NT2RP2003272, NT2RP2003857, NT2RP2003871, NT2RP2004425, NT2RP2004476, NT2RP2004710, NT2RP2004816, NT2RP2005441, NT2RP2005490, NT2RP2005620, NT2RP2005654, NT2RP2005675, NT2RP2005753, NT2RP2005841, NT2RP2006598, NT2RP3000047, NT2RP3000233, NT2RP3000868, NT2RP3000869, NT2RP3001399, NT2RP3001407, NT2RP3001457, NT2RP3001587, NT2RP3001712, NT2RP3001819, NT2RP3001854, NT2RP3001931, NT2RP3002273, NT2RP3002631, NT2RP3002682, NT2RP3002770, NT2RP3002818, NT2RP3002948, NT2RP3002972, NT2RP3003032, NT2RP3003290, NT2RP3003411, NT2RP3003491, NT2RP3003500, NT2RP3003726, NT2RP3004348, NT2RP3004507, NT2RP4000129, NT2RP4000498, NT2RP4000528, NT2RP4000737, NT2RP4000979, NT2RP4001010, NT2RP4001207, NT2RP4001228, NT2RP4001260, NT2RP4001339, NT2RP4001351, NT2RP4001474, NT2RP4001966, NT2RP4002018, OVARC1000209, OVARC1000876, OVARC1001065, OVARC1001092, OVARC1001419, OVARC1001555, OVARC1001711, OVARC1001943, PLACE1000004, PLACE1000066, PLACE1000610, PLACE1000636, PLACE1000769, PLACE1000987, PLACE1001036, PLACE1001845, PLACE1001920, PLACE1002665, PLACE1003602, PLACE1003611, PLACE1004256, PLACE1004550, PLACE1004868, PLACE1004930, PLACE1005052, PLACE1005102, PLACE1005176, PLACE1005187, PLACE1005331, PLACE1005727, PLACE1006003, PLACE1006335, PLACE1006385, PLACE1006506, PLACE1007105, PLACE1007537, PLACE1007705, PLACE1007791, PLACE1007897, PLACE1008080, PLACE1008368, PLACE1008398, PLACE1008465, PLACE1008627, PLACE1009020, PLACE1009060, PLACE1009186, PLACE1009443, PLACE1009571, PLACE1009670, PLACE1010105, PLACE1010261, PLACE1010310, PLACE1010522, PLACE1010579, PLACE1010628, PLACE1010661, PLACE1010761, PLACE1011185, PLACE1011340, PLACE1011586, PLACE2000246, PLACE2000411, PLACE3000477, THYRO1000173, THYRO1000401, THYRO1000666, THYRO1001033, THYRO1001347, THYRO1001656, THYRO1001703, THYRO1001721, Y79AA1000059, Y79AA1000181, Y79AA1000268, Y79AA1000313, Y79AA1000540, Y79AA1000966, Y79AA1000985, Y79AA1001323, Y79AA1001402, Y79AA1001679, Y79AA1001923, Y79AA1002083, Y79AA1002307, Y79AA1002311, Y79AA1002487,

[0163] In some cases, the predicted functions based on the partial sequences are different from those based on the full-length sequences. The reason is that a protein does not always belong solely to a single category of the above-described functional categories, and therefore, a protein may belong to two or more of the predicted functional categories. Besides, additional functions can be found for the clones classified into these functional categories by further analyses.

[0164] Since the protein encoded by clones of the invention contains full-length amino acid sequence, it is possible to analyze its biological activity, and its effect on cellular conditions such as cell proliferation and differentiation by expressing the protein as a recombinant protein using an appropriate expression system, injecting the recombinant into the cell, or raising a specific antibody against the protein.

[0165] If the protein is a secretory protein, membrane protein, or protein associated with glycoprotein, signal transduction, or transcription, its biological activity can be analyzed by the methods in “Gene Transcription” (Hames B. D., and Higgins S. J. edit, (1993)), “Glycobiology” (Fukuda M., and Kobata A. edit, (1993)), “Growth Factors” (McKay I., and Leigh I. edit, (1993)), “Extracellular Matrix” (Haralson M. A., and Hassell J. R. edit, (1995), “Transcription Factors” (Latchman D.S. edit, (1993)), “Signal Transduction” (Milligans G. edit, (1992)), “Protein Phosphorylation” (Hardies G. D. edit, (1993), and “Ion Channels” (Ashley R. H. edit, (1995) featured in “The Practical Approach Series” (IRL PRESS), or “Signal Transduction Protocols” (Kendall D. A., and Hill S. J. edit, (1995), “Glycoprotein Analysis in Biomedicine” (Hounsell E. F. edit, (1993)), featured in “Method in Molecular Biology” (Humana Press).

[0166] As to a protein associated with a disease, it is possible to perform a functional analysis as described above, but also possible to analyze correlation between the expression or the activity of the protein and a certain disease by using a specific antibody that is obtained by using expressed protein. Alternatively, it is possible to utilize the database Online Mendelian Inheritance in Man (OMIM) (http://www.ncbi.nlm.nih.gov/Omim/), which is a database of human genes and diseases, to analyze the protein.

[0167] New information is constantly being deposited in the OMIM database. Therefore, it is possible for one skilled in the art to find a new relationship between a particular disease and a gene of the present invention in the most up-to-date database.

[0168] Also, as for a secretory protein, membrane protein, signal transduction-associated protein, glycoprotein-associated protein, or transcription-associated protein, etc., search of the OMIM with the following keywords resulted in the finding that the proteins are associated with many diseases (the result of the OMIM search for secrete and membrane proteins is shown below). Also, association between proteins associated to signal transduction or transcription and diseases is reported in “Transcription Factor Research-1999” (Fujii, Tamura, Kageyama, and Satake edit, (1999) Jikken-Igaku Zoukan, Vol. 17, No. 3), and “Gene Medicine” ((1999) Vol. 3, No. 2). For example, in tumors, many proteins have been shown to play a role, including secretory proteins, membrane proteins, and proteins associated with signal transduction, glycoprotein, and transcription, and also proteins associated with metabolism, cytoskeleton, and cell cycle, as described in “Tumor Biology” (Matsubara S. (1992) Syoukabou Life Science series). Thus, besides the proteins associated with diseases, many proteins described above are also potentially associated with diseases, and thus useful as a target in the medicinal industry.

[0169] The result of the OMIM search for secretory and membrane proteins is shown below, in which the keywords,

[0170] (1) secretion protein,

[0171] (2) membrane protein,

[0172] (3) channel, and

[0173] (4) extracellular matrix were used.

[0174] Shown in the search result are only the accession numbers in the OMIM. Using the number, data showing the relationship between a disease and a gene or protein can be seen. The OMIM data has been renewed everyday.

1) Secretion Protein

268 entries found, searching for “secretion protein”

[0175] 104760, 176860, 160900, 107400, 118910, 139320, 603850, 147572, 176880, 600946, 603215, 157147, 600174, 151675, 170280, 179512, 179513, 138120, 179509, 246700, 179510, 600626, 179511, 600998, 109270, 601489, 154545, 179490, 185860, 603216, 122559, 601746, 147290, 602672, 146770, 603062, 179508, 131230, 601591, 602421, 139250, 167805, 167770, 600041, 600564, 118825, 601146, 300090, 600753, 601652, 600759, 600768, 602434, 182590, 603166, 308230, 602534, 603489, 107470, 150390, 104610, 173120, 158106, 143890, 306900, 308700, 134797, 137350, 227500, 176300, 107730, 600760, 138079, 120180, 120160, 120150, 124092, 138160, 101000, 227600, 600509, 601199, 142410, 104311, 193400, 201910, 107300, 122560, 272800, 217000, 590050, 147670, 133170, 176730, 300300, 134370, 274600, 120140, 162151, 158070, 152790, 120120, 106100, 300200, 192340, 190160, 138040, 147470, 147620, 173350, 147380, 152200, 152760, 157145, 153450, 264080, 113811, 600937, 600840, 188545, 202110, 600514, 186590, 603372, 136435, 137241, 252800, 214500, 207750, 138850, 139191, 142640, 138130, 189907, 603692, 600633, 603355, 107270, 600377, 147892, 232200, 600281, 232800, 602358, 137035, 601771, 601769, 253200, 601933, 118444, 600270, 120700, 600945, 603732, 147660, 600761, 172400, 600823, 600877, 130080, 171060, 107740, 307800, 602843, 130660, 152780, 124020, 601124, 601340, 601604, 601610, 171050, 312060, 232700, 300159, 142703, 600734, 125255, 168450, 123812, 188540, 147940, 188450, 600839, 182452, 188400, 182280, 176760, 263200, 600264, 188826, 252650, 601185, 162641, 137216, 601398, 601538, 118888, 118445, 601745, 190180, 601922, 182098, 602008, 147440, 602384, 600031, 109160, 602663, 151670, 602682, 602730, 602779, 146880, 603061, 142704, 603140, 106150, 600732, 153620, 603318, 139392, 600042, 102200, 603493, 182100, 264300, 603795, 184600

2) Membrane Protein

1017 entries found, searching for “membrane protein”

[0176] 130500, 305360, 153330, 173610, 170995, 109270, 170993, 309060, 120920, 602333, 133740, 133710, 602690, 133730, 159430, 600897, 133090, 601178, 602413, 602003, 109280, 603237, 602173, 107776, 602334, 125305, 602335, 182879, 154045, 309845, 600594, 603718, 603241, 603214, 603657, 603177, 600182, 601476, 602879, 136950, 600723, 601114, 185880, 185881, 300096, 602257, 160900, 177070, 603062, 603344, 602977, 310200, 600959, 300100, 186945, 600039, 600267, 128240, 182900, 601097, 136430, 600946, 602534, 601047, 143450, 603141, 603700, 600579, 256540, 159440, 602414, 600403, 602048, 188860, 137290, 158343, 184756, 602910, 603179, 600279, 108733, 107770, 173335, 602625, 154050, 219800, 603850, 601028, 600447, 104225, 186946, 601767, 603143, 121015, 603215, 227400, 603735, 600179, 602421, 180721,

[0177] 176801, 176860, 600753, 603142, 176790, 600266, 601239, 115501, 143890, 121014, 121011, 125950, 603534, 304040, 601134, 600754, 601510, 601595, 190315, 300172, 602216, 602261, 602262, 602461, 131560, 179514, 179512, 176981, 142461, 139310, 312080, 176640, 128239, 185470, 310300, 601403, 601757, 273800, 151460, 176943, 104311, 168468, 120130, 602887, 600164, 601531, 601832, 104775, 600040, 603583, 176894, 602631, 166945, 182180, 120620, 141180, 601014, 139150, 182860, 177061, 600174, 180069, 191275, 104760, 601693, 300017, 603518, 601009, 134651, 601107, 603868, 600168, 136425, 603531, 603291, 600917, 603216, 102720, 300118, 179590, 135630, 602285, 107450, 602296, 303630, 176878, 120090, 600322, 138160, 601212, 603293, 131230, 112205, 600763, 600718, 300187, 170715, 601966, 300051, 602474,

[0178] 120070, 600691, 600855, 182309, 602101, 602857, 194355, 162230, 600874, 113730, 155550, 602701, 306400, 601789, 231200, 107271, 175100, 182870, 305100, 301000, 601313, 157147, 147670, 139200, 603593, 157655, 600934, 155970, 602049, 155960, 155760, 118990, 135620, 308230, 602694, 162060, 300023, 160993, 153619, 153432, 120131, 603823, 603167, 601023, 600816, 165040, 601681, 166490, 300112, 120190, 300145, 163970, 600772, 602926, 602933, 602202, 400015, 151510, 600759, 602672, 602654, 603821, 116952, 151430, 602632, 155975, 602217, 150370, 600752, 601179, 600932, 603048, 603234, 601805, 603822, 603869, 601717, 601181, 313440, 139130, 107777, 109190, 603452, 191163, 191164, 602370, 176877, 103195, 600523, 191328, 601275, 204200, 602426, 603820, 600551, 600695, 600552, 600553, 602306, 601523,

[0179] 602507, 602299, 600583, 114070, 600632, 603498, 185430, 600587, 235200, 173470, 603199, 601633, 602500, 208900, 180297, 156225, 516020, 190195, 141900, 102680, 193300, 101000, 193400, 300011, 107400, 257220, 107741, 180380, 203200, 111700, 600024, 304800, 600065, 110750, 179605, 113705, 601638, 222900, 120120, 602509, 602469, 600930, 601383, 176261, 602574, 602997, 311770, 131550, 603616, 308700, 603372, 256100, 224100, 276903, 305900, 516000, 131195, 314555, 601567, 603866, 306900, 103390, 186720, 173850, 601050, 602505, 186590, 246530, 602689, 194380, 300041, 162643, 152790, 120150, 600682, 600106, 272750, 188040, 602382, 601497, 113811, 182138, 212138, 601309, 109690, 114760, 176805, 601253, 123900, 602581, 189980, 191190, 110700, 600163, 137167, 600580, 601610, 190000, 123825, 603491,

[0180] 600135, 186591, 173910, 138140, 107266, 120950, 601081, 603690, 244400, 312700, 171060, 601199, 601758, 170500, 277900, 601997, 314850, 601880, 603009, 120220, 603126, 164920, 602934, 164730, 163890, 603434, 107269, 602909, 600877, 256550, 164761, 602872, 120110, 126150, 158070, 266200, 223360, 250800, 269920, 252650, 603355, 154582, 138190, 300035, 602640, 227650, 158120, 153700, 182380, 155740, 204500, 603401, 601975, 300135, 136350, 602924, 300167, 185050, 176100, 300189, 151525, 300200, 165180, 230800, 602158, 602676, 603411, 193245, 120325, 601848, 192500, 603102, 147795, 245900, 137060, 147557, 120650, 602377, 307800, 120930, 308100, 142800, 191092, 232300, 173510, 602225, 180470, 190930, 186357, 134638, 600544, 601373, 600509, 600359, 603784, 600395, 600653, 603754, 601597, 601066,

[0181] 600185, 601295, 600978, 205400, 603274, 600418, 600839, 516050, 601691, 601007, 600650, 600308, 603261, 601193, 600004, 600017, 516040, 253800, 276901, 600019, 257200, 108780, 300037, 300104, 300126, 255125, 203300, 300191, 426000, 302060, 304700, 201475, 252010, 193210, 311030, 306250, 248600, 191740, 108360, 131244, 600423, 232200, 191305, 231680, 103320, 190180, 600493, 111200, 226200, 312600, 600170, 111680, 186910, 203100, 600536, 600238, 186830, 186760, 186745, 186711, 106180, 112203, 103180, 182530, 182160, 600644, 307030, 192321, 600667, 125647, 179080, 114207, 114860, 176000, 116930, 600748, 173515, 173325, 600377, 171760, 171050, 118425, 170260, 191315, 600798, 600821, 600823, 600444, 600840, 159465, 600857, 158380, 600867, 154360, 152427, 150330, 110900, 147840, 147360, 147280,

[0182] 146880, 312610, 120940, 142871, 142790, 600937, 142600, 134390, 111250, 600979, 600997, 142460, 186845, 134635, 601017, 139191, 139090, 138850, 601040, 138720, 122561, 131100, 123610, 217070, 100500, 603377, 602354, 603302, 603207, 603086, 602188, 602095, 603867, 603842, 603798, 602602, 601194, 602607, 603713, 603681, 601252, 603648, 603646, 603644, 601282, 601284, 603667, 603712, 603594, 601872, 603425, 601843, 603263, 603208, 601411, 603201, 603189, 601463, 603164, 603152, 603087, 602874, 601492, 602893, 602057, 602859, 602746, 603879, 603510, 602458, 603380, 601581, 603765, 603283, 601599, 601733, 601852, 602316, 601615, 601617, 602184, 602894, 603005, 603030, 603861, 602835, 602136, 600153, 600074, 600046, 600023, 601625, 516006, 600018, 600016, 516002, 601590, 313475, 313470, 600244,

[0183] 600528, 601611, 600282, 600327, 601568, 600368, 601730, 601535, 601745, 601929, 300169, 300150, 300132, 601533, 600385, 600464, 600424, 600429, 601756, 601488, 516005, 251100, 516004, 600918, 516003, 602192, 516001, 240500, 600465, 602241, 602243, 230200, 601485, 601478, 601416, 602297, 601459, 601839, 602314, 193065, 193001, 191306, 600504, 601020, 191191, 602372, 190181, 600534, 188380, 186854, 186360, 600530, 185250, 182331, 600535, 182305, 601296, 600582, 600732, 600734, 600742, 600782, 176802, 176266, 600769, 601883, 600864, 601901, 176260, 173490, 600910, 601905, 171890, 600916, 601987, 602679, 162651, 161555, 160994, 602714, 602715, 602724, 602736, 300007, 602783, 275630, 602836, 270200, 602871, 159460, 602876, 154540, 153900, 602890, 601153, 602190, 602905, 153634, 153337, 602914,

[0184] 152310, 151690, 151625, 602935, 602974, 150325, 602992, 150320, 250790, 603006, 603007, 603008, 150292, 233690, 603046, 150210, 603061, 147940, 603063, 221770, 223100, 603097, 147880, 603118, 147730, 146928, 146630, 142622, 603149, 603150, 603151, 600923, 138981, 138590, 138330, 216950, 603192, 138297, 603202, 601002, 602343, 138230, 136131, 603217, 603220, 134660, 131390, 131235, 603242, 603243, 130130, 602345, 126455, 601123, 126064, 125240, 602359, 603312, 602380, 603318, 123890, 123836, 603356, 603361, 603366, 123830, 179610, 188060, 123620, 120980, 186355, 118510, 114835, 114217, 113810, 603499, 182310, 111740, 109610, 603548, 603564, 108740, 603598, 603613, 107273, 603626, 602518, 179410, 603647, 602515, 603652, 106195, 602573, 178990, 105210, 104615, 167055, 603717, 104614, 603728,

104210, 603749, 603750, 103850, 602608, 603787, 603788, 603796, 173445, 103220, 102910, 102681, 102670, 102642, 603833, 173391, 102576, 102575, 171833, 102573, 101800, 603875, 601108

3) Channel (Member of Membrane Protein)

272 entries found, searching for “channel”

[0185] 176266, 600724, 170500, 182390, 123825, 114208, 114205, 601784, 114206, 600937, 114204, 603415, 600053, 114209, 114207, 600760, 118425, 601011, 192500, 176261, 600761, 176260, 600359, 600228, 600877, 602235, 300008, 182389, 182391, 601328, 601534, 600504, 602323, 601958, 602780, 602781, 601327,601012, 600734, 603208, 182392, 603220, 603219, 603888, 600054, 602232, 601745, 603537, 602604, 603796, 302910, 602866, 601013, 602905, 602906, 600163, 152427, 180901, 600702, 600308, 602754, 107776, 602024, 314555, 601949, 600235, 602023, 176263, 600681, 176265, 193245, 603305, 176258, 602983, 601219, 601141, 176267, 602343, 602726, 138253, 176262, 600003, 600397, 602872, 138249, 600843, 600935, 600580, 600845, 602158, 602106, 176264, 300110, 176257, 602717, 603493, 176268, 600932, 602727, 138254,

[0186] 603652, 300138, 602420, 600570, 600150, 603583, 602345, 603749, 601142, 176256, 600846, 138252, 602982, 603787, 602836, 603788, 602566, 603651, 602421, 100690, 107777, 100725, 100710, 600509, 603061, 154275, 304040, 154276, 180902, 121014, 602368, 139311, 601383, 108745, 601313, 601042, 600131, 186360, 600109, 600229, 600170, 603319, 601485, 118503, 180903, 602076, 124030, 601059, 601212, 601218, 147450, 600855, 600919, 601154, 601157, 171060, 600968, 182139, 131230, 121015, 600421, 113730, 249210, 310500, 600637, 125950, 118800, 156490, 602974, 104610, 121011, 602522, 118504, 300041, 160900, 601382, 602103, 600465, 602014, 600442, 601109, 602481, 277900, 254210, 138247, 164920, 170280, 171050, 128100, 173910, 600884, 123885, 602887, 600232, 180297, 137192, 600304, 138251, 603053, 300103,

603152, 603199, 118511, 118508, 138079, 600983, 182307, 603324, 305990, 603418, 114080, 232200, 600046, 600040, 602403, 603750, 603785, 104210, 600019, 600300, 182860, 603852, 603853, 603855, 516060

4) Extercellular Matrix

167 entries found, searching for “extracellular matrix”

[0187] 603479, 602201, 601418, 601548, 154870, 115437, 602285, 602262, 602261, 134797, 600754, 120361, 116935, 602263, 603320, 601807, 603321, 185250, 185261, 253700, 128239, 120324, 193300, 276901, 308700, 600514, 600261, 602109, 120140, 120150, 147557, 193400, 600536, 188826, 120180, 118661, 120320, 152200, 135821, 112260, 230740, 602090, 155760, 192975, 190182, 602108, 601463, 186745, 600900, 600985, 600758, 602369, 179590, 601211, 600065, 602178, 600262, 182888, 182889, 151510, 182120, 150325, 190181, 150370, 186355, 193065, 165070, 154705, 147559, 146650, 146640, 153619, 175100, 187380, 231050, 188060, 135820, 156790, 130660, 301870, 128240, 600076, 600119, 193210, 600215, 600245, 121010, 150240, 600309, 600491, 222600, 120328, 600564, 600596, 600616, 600700, 600742, 120325, 138297, 600930,

[0188] 156225, 601028, 601050, 601105, 253800, 601284, 601313, 120280, 310200, 601492, 120250, 601587, 601636, 601652, 601692, 601728, 120220, 601915, 602048, 155120, 310300, 120210, 120165, 120120, 118940, 116930, 602264, 116806, 602366, 120470, 602415, 602428, 602453, 602505, 602574, 603005, 603196, 603221, 603319, 107269, 216550, 103320, 603489, 603551, 603767, 603799, 603842

[0189] There are several methods for analyzing the expression levels of genes associated with diseases. Differences in gene expression levels between diseased and normal tissues are studied by the analytical methods, for example, Northern hybridization and differential display. Other examples include a method with high-density cDNA filter, a method with DNA microarray and methods with PCR amplification (Experimental Medicine, Vol. 17, No. 8, 980-1056 (1999); Cell Engineering (additional volume) DNA Microarray and Advanced PCR Methods, Muramatsu & Naba (eds.), Shujunsya). The varying levels of gene expression between diseased tissues and normal tissues can be studied by any of these analytical methods. When explicit difference in the expression level is observed for a gene, it can be conclude that the gene is closely associated with a disease or disorder. Instead of diseased tissues, cultured cells can be used for the assessment. Similarly, when gene expression is explicitly different between normal cells and cells reproducing disease-associated specific features, it can be concluded that the gene is closely associated with a disease or disorder. When the expression levels of genes are evidently varied during major cellular events (such as differentiation and apoptosis), the genes are involved in the cellular events and accordingly are candidates for disease- and/or disorder-associated genes. Further, genes exhibiting tissue-specific expression are genes playing important parts in the tissue functions and, therefore, can be candidates for genes associated with diseases and/or disorders affecting the tissues.

[0190] For example, non-enzymic protein glycation reaction is believed to be a cause for a variety of chronic diabetic complications. Accordingly, genes of which expression levels are elevated or decreased in a glycated protein-dependent manner in the endothelial cells, are associated with diabetic complications caused by glycated proteins (Diabetes 1996, 45 (Suppl. 3), S67-S72; Diabetes, 1997, 46 (Suppl. 2), S19-S25).

[0191] The onset of rheumatoid arthritis is thought to be involved in the proliferation of synovial cells covering inner surfaces of joint cavity and in inflammatory reaction resulted from the action of cytokines produced by leukocytes infiltrating into the joint synovial tissues (Rheumatism Information Center, http://www.rheuma-net.or.jp/). Recent studies have also revealed that tissue necrosis factor (TNF)-α participates in the onset (Current opinion in immunology 1999, 11, 657-662). When the expression of a gene exhibits responsiveness to the action of TNF on synovial cells, the gene is considered to be involved in rheumatoid arthritis. Many genes acting at the downstream of TNF-α and IL-1β among inflammation-associated cytokines have been previously identified. The respective stimulations are transduced through independent pathways of signaling cascade. There exists another signaling cascade for both stimulations, wherein NF-κ B is a common transducing molecule shared by the two stimulations (J. Leukoc. Biol., 1994, 56(5): 542-547). It has also been revealed that many inflammation-associated genes, including IL-2, IL-6 and G-CSF, are varied in the expression levels thereof in response to the signal through the common pathway (Trend Genet. 1999, 15(6): 229-235). It is assumed that genes of which expression levels are varied in response to the stimulation of TNF-α or IL-1β also participate in inflammation.

[0192] Ultraviolet radiation damage has been recognized as a risk factor for skin cancers, etc. (United States Environmental Protection Agency: Ozone Depletion Home Page, http://www.epa.gov/ozone/). Genes of which expression levels are varied in skin epidermal cells exposed to ultraviolet rays are considered to be associated with ultraviolet radiation damage of skin. In addition, genes associated with neural differentiation can be candidates for genes responsible for neurological diseases as well as candidates for genes usable for treating the diseases.

[0193] Clones exhibiting differences in the expression levels thereof can be selected by using gene expression analysis. The selection comprises, for example; analyzing cDNA clones by using high-density cDNA filter; and statistically treating the multiple signal values (signal values of radioisotope in the labeled probes or values obtained by measuring fluorescence intensities emitted from the fluorescent labels) for the respective clones by two-sample t-test, where the signal values are determined by multiple experiments of hybridization. The clones of interest are selectable based on the statistically significant differences in the signal distribution at p<0.05. However, selectable clones with significant difference in the expression levels thereof may be changed depending on the partial modification of statistical treatment. For example, the clones may be selected by conducting statistical treatment with two-sample t-test at p<0.01; or genes exhibiting more explicit differences in the expression levels thereof can be selected by performing statistical treatment with a pre-determined cut-off value for the significant signal difference. An alternative method is that the expression levels are simply compared with each other, and then, the clones of interest are selected based on the ratio of the expression levels thereof.

[0194] Clones that vary in their expression levels can also be selected by comparing the expression levels by PCR analysis, for example, by using the method of determining the band intensities representing the amounts of PCR products with ethidium bromide staining; the method of determining the values of radioisotope signals or fluorescence intensities of the PCR products when radiolabeled or fluorescent dye-labeled primers, respectively, are used in PCR amplification; or the method of determining the values of radioisotope signals or fluorescence intensities of the probes hybridized to the PCR products when radiolabeled or fluorescent dye-labeled probes, respectively, are used in the hybridization. If the expression level ratios obtained in multiple PCR experiments are constantly at least 2-fold, such a clone can be judged to vary in its expression level. When the ratios are several-fold or not less than 10-fold, the clone can be selected as a gene exhibiting the explicit difference in its expression level.

[0195] A survey of genes of which expression levels are varied specifically to the glycated protein in the endothelial cells has revealed genes with elevated expression levels, HEMBA1003958, HEMBA1004850, MAMMA1001256, MAMMA1002132, PLACE2000411 and PLACE3000119. On the other hand, a gene of which expression level is decreased specifically to the glycated protein is MAMMA1001783. These clones are genes associated with diabetes.

[0196] A survey of genes of which expression levels are varied in response to TNF-α (Tumor Necrosis Factor-alpha) in the primary cell culture of synovial tissue has revealed the following clones with elevated expression levels in the presence of TNF-α:

[0197] HEMBA1000005, HEMBA1000012, HEMBA1000020, HEMBA1000046, HEMBA1000076, HEMBA1000111, HEMBA1000168, HEMBA1000185, HEMBA1000201, HEMBA1000231, HEMBA1000243, HEMBA1000280, HEMBA1000282, HEMBA1000304, HEMBA1000307, HEMBA1000327, HEMBA1000356, HEMBA1000376, HEMBA1000387, HEMBA1000390, HEMBA1000418, HEMBA1000460, HEMBA1000491, HEMBA1000501, HEMBA1000518, HEMBA1000519, HEMBA1000520, HEMBA1000531, HEMBA1000534, HEMBA1000542, HEMBA1000545, HEMBA1000591, HEMBA1000592, HEMBA1000594, HEMBA1000636, HEMBA1000655, HEMBA1000657, HEMBA1000673, HEMBA1000682, HEMBA1000686, HEMBA1000722, HEMBA1000726, HEMBA1000827, HEMBA1000870, HEMBA1000918, HEMBA1000971, HEMBA1000974, HEMBA1000986, HEMBA1000019, HEMBA1001043, HEMBA1001051, HEMBA1001059, HEMBA1001060, HEMBA1001071, HEMBA1001080, HEMBA1001109, HEMBA1001140, HEMBA1001172, HEMBA1001196, HEMBA1001213, HEMBA1001226, HEMBA1001281, HEMBA1001299, HEMBA1001302, HEMBA1001303, HEMBA1001323, HEMBA1001326, HEMBA1001327, HEMBA1001330, HEMBA1001351, HEMBA1001407, HEMBA1001411, HEMBA1001446, HEMBA1001454, HEMBA1001569, HEMBA1001647, HEMBA1001714, HEMBA1001800, HEMBA1001804, HEMBA1001809, HEMBA1001888, HEMBA1001912, HEMBA1001921, HEMBA1001967, HEMBA1002084, HEMBA1002161, HEMBA1002166, HEMBA1002241, HEMBA1002337, HEMBA1002363, HEMBA1002389, HEMBA1002458, HEMBA1002460, HEMBA1002469, HEMBA1002538, HEMBA1002542, HEMBA1002547, HEMBA1002609, HEMBA1002624, HEMBA1002659, HEMBA1002750, HEMBA1002770, HEMBA1002779, HEMBA1002810, HEMBA1002816, HEMBA1002818, HEMBA1002850, HEMBA1002863, HEMBA1003021, HEMBA1003033, HEMBA1003078, HEMBA1003166, HEMBA1003202, HEMBA1003204, HEMBA1003229, HEMBA1003235, HEMBA1003276, HEMBA1003286, HEMBA1003296, HEMBA1003370, HEMBA1003376, HEMBA1003403, HEMBA1003418, HEMBA1003433, HEMBA1003447, HEMBA1003560, HEMBA1003569, HEMBA1003571, HEMBA1003591, HEMBA1003597, HEMBA1003598, HEMBA1003621, HEMBA1003656, HEMBA1003662, HEMBA1003680, HEMBA1003715, HEMBA1003725, HEMBA1003729, HEMBA1003733, HEMBA1003742, HEMBA1003773, HEMBA1003783, HEMBA1003950, HEMBA1004012, HEMBA1004015, HEMBA1004048, HEMBA1004074, HEMBA1004086, HEMBA1004111, HEMBA1004131, HEMBA1004202, HEMBA1004203, HEMBA1004207, HEMBA1004248, HEMBA1004274, HEMBA1004321, HEMBA1004330, HEMBA1004356, HEMBA1004366, HEMBA1004405, HEMBA1004408, HEMBA1004429, HEMBA1004499, HEMBA1004507, HEMBA1004509, HEMBA1004542, HEMBA1004596, HEMBA1004604, HEMBA1004776, HEMBA1004889, HEMBA1004934, HEMBA1004978, HEMBA1005019, HEMBA1005047, HEMBA1005206, HEMBA1005219, HEMBA1005274, HEMBA1005331, HEMBA1005338, HEMBA1005394, HEMBA1005423, HEMBA1005576, HEMBA1005732, HEMBA1005746, HEMBA1006091, HEMBA1006142, HEMBA1006173, HEMBA1006198, HEMBA1006253, HEMBA1006268, HEMBA1006309, HEMBA1006377, HEMBA1006474, HEMBA1006486, HEMBA1006492, HEMBA1006502, HEMBA1006535, HEMBA1006579, HEMBA1006648, HEMBA1006659, HEMBA1006885, HEMBA1006929, HEMBA1006941, HEMBA1007078, HEMBA1007080, HEMBA1007121, HEMBA1007194, HEMBA1007300, HEMBA1007301, HEMBA1007322, HEMBB1000036, HEMBB1000044, HEMBB1000089, HEMBB1000215, HEMBB1000217, HEMBB1000272, HEMBB1000420, HEMBB1000591, HEMBB1000593, HEMBB1000631, HEMBB1000835, HEMBB1000887, HEMBB1000908, HEMBB1000975, HEMBB1000985, HEMBB1001011, HEMBB1001014, HEMBB1001112, HEMBB1001133, HEMBB1001331, HEMBB1001337, HEMBB1001366, HEMBB1001367, HEMBB1001384, HEMBB1001394, HEMBB1001429, HEMBB1001463, HEMBB1001619, HEMBB1001684, HEMBB1001706, HEMBB1001753, HEMBB1001797, HEMBB1001802, HEMBB1001812, HEMBB1001874, HEMBB1001910, HEMBB1001915, HEMBB1001973, HEMBB1001983, HEMBB1001990, HEMBB1002190, HEMBB1002193, HEMBB1002249, HEMBB1002329, HEMBB1002342, HEMBB1002371, HEMBB1002409, HEMBB1002442, HEMBB1002489, HEMBB1002492, HEMBB1002520, HEMBB1002534, HEMBB1002596, HEMBB1002664, HEMBB1002692, HEMBB1002697, HEMBB1002705, MAMMA1000092, MAMMA1000155, MAMMA1000163, MAMMA1000173, MAMMA1000175, MAMMA1000227, MAMMA1000241, MAMMA1000257, MAMMA1000264, MAMMA1000266, MAMMA1000270, MAMMA1000307, MAMMA1000410, MAMMA1000413, MAMMA1000416, MAMMA1000421, MAMMA1000472, MAMMA1000501, MAMMA1000605, MAMMA1000643, MAMMA1000670, MAMMA1000684, MAMMA1000696, MAMMA1000732, MAMMA1000752, MAMMA1000802, MAMMA1000824, MAMMA1000905, MAMMA1000921, MAMMA1000931, MAMMA1000957, MAMMA1000962, MAMMA1000998, MAMMA1001008, MAMMA1001050, MAMMA1001074, MAMMA1001078, MAMMA11001292, MAMMA1001397, MAMMA1001476, MAMMA1001743, MAMMA1001744, MAMMA1001754, MAMMA1001760, MAMMA1001785, MAMMA1001858, MAMMA1001908, MAMMA1002236, MAMMA1002267, MAMMA1002292, MAMMA1002311, MAMMA1002322, MAMMA1002359, MAMMA1002362, MAMMA1002485, MAMMA1002494, MAMMA1002597, MAMMA1002598, MAMMA1002665, MAMMA1002671, MAMMA1002684, MAMMA1002748, MAMMA1002775, MAMMA1002830, MAMMA1002858, MAMMA1002868, MAMMA1002886, MAMMA1002887, MAMMA1002892, MAMMA1002909, MAMMA1002937, MAMMA1002947, MAMMA1002964, MAMMA1002970, MAMMA1003013, MAMMA1003150, NT2RM1000039, NT2RM1000062, NT2RM1000080, NT2RM1000086, NT2RM1000127, NT2RM1000132, NT2RM1000187, NT2RM1000199, NT2RM1000244, NT2RM1000256, NT2RM1000272, NT2RM1000318, NT2RM1000354, NT2RM1000377, NT2RM1000430, NT2RM1000499, NT2RM1000539, NT2RM1000553, NT2RM1000563, NT2RM1000699, NT2RM1000742, NT2RM1000826, NT2RM1000829, NT2RM1000833, NT2RM1000882, NT2RM1000898, NT2RM1000905, NT2RM1001092, NT2RM2000013, NT2RM2000032, NT2RM2000042, NT2RM2000101, NT2RM2000124, NT2RM2000192, NT2RM2000259, NT2RM2000260, NT2RM2000363, NT2RM2000368, NT2RM2000402, NT2RM2000452, NT2RM2000952, NT2RM2001221, NT2RM2002014, NT2RM2002030, NT2RM4000156, NT2RM4000349, NT2RM4000395, NT2RM4000457, NT2RM4000511, NT2RM4000514, NT2RM4000698, NT2RM4000764, NT2RM4001016, NT2RM4001084, NT2RM4001594, NT2RM4001629,

[0198] NT2RM4001662, NT2RM4001841, NT2RM4002093, NT2RM4002109, NT2RM4002145, NT2RM4002189, NT2RM4002194, NT2RM4002226, NT2RP1000170, NT2RP1000439, NT2RP1000478, NT2RP1000513, NT2RP1000701, NT2RP1000856, NT2RP1001361, NT2RP2000097, NT2RP2000239, NT2RP2000288, NT2RP2000328, NT2RP2000329, NT2RP2000369, NT2RP2000422, NT2RP2000842, NT2RP2000965, NT2RP2001245, NT2RP2001440, NT2RP2001560, NT2RP2001634, NT2RP2001663, NT2RP2001677, NT2RP2001762, NT2RP2002270, NT2RP2002312, NT2RP2002316, NT2RP2002333, NT2RP2002706, NT2RP2002925, NT2RP2002959, NT2RP2002987, NT2RP2003125, NT2RP2003137, NT2RP2003237, NT2RP2003272, NT2RP2003596, NT2RP2003604, NT2RP2003643, NT2RP2003968, NT2RP2003976, NT2RP2004194, NT2RP2004321, NT2RP2005037, NT2RP2005140, NT2RP2005204, NT2RP2005293, NT2RP2005457, NT2RP2005555, NT2RP2005600, NT2RP2005701, NT2RP2005719, NT2RP2005722, NT2RP2005773, NT2RP2005890, NT2RP2006023, NT2RP2006071, NT2RP3000186, NT2RP3000341, NT2RP3000599, NT2RP3000632, NT2RP3000644, NT2RP3000852, NT2RP3000968, NT2RP3001096, NT2RP3001109, NT2RP3001126, NT2RP3001147, NT2RP3001449, NT2RP3001529, NT2RP3001753, NT2RP3001854, NT2RP3001915, NT2RP3001969, NT2RP3002081, NT2RP3002142, NT2RP3002399, NT2RP3002590, NT2RP3002603, NT2RP3002810, NT2RP3002876, NT2RP3003311, NT2RP3003330, NT2RP3003672, NT2RP3004209, NT2RP3004378, NT2RP4000078, NT2RP4000541, NT2RP4000588, NT2RP4001219, NT2RP4001228, NT2RP4001276, NT2RP4001507, NT2RP4002047, NT2RP5003459, NT2RP5003492, OVARC1000085, OVARC1000087, OVARC1000106, OVARC1000151, OVARC1000198, OVARC1000431, OVARC1000440, OVARC1000564, OVARC1000605, OVARC1000679, OVARC1000883, OVARC1000912, OVARC1000960, OVARC1000971, OVARC1001038, OVARC1001055, OVARC1001085, OVARC1001129, OVARC1001167, OVARC1001339, OVARC1001425, OVARC1001745, OVARC1001762, OVARC1001766, OVARC1001942, OVARC1002044, OVARC1002138, PLACE1000004, PLACE1000005, PLACE1000420, PLACE1000547, PLACE1000562, PLACE1000653, PLACE1001168, PLACE1001311, PLACE1001377, PLACE1001920, PLACE1001983, PLACE1002066, PLACE1002072, PLACE1002140, PLACE1002171, PLACE1002319, PLACE1002474, PLACE1002499, PLACE1002532, PLACE1002665, PLACE1003025, PLACE1003145, PLACE1003361, PLACE1003605, PLACE1003704, PLACE1003783, PLACE1003885, PLACE1004405, PLACE1004629, PLACE1004686, PLACE1004930, PLACE1005066, PLACE1005077, PLACE1005630, PLACE1005876, PLACE1006143, PLACE1006325, PLACE1006488, PLACE1006805, PLACE1006829, PLACE1007286, PLACE1007858, PLACE1008201, PLACE1009045, PLACE1009113, PLACE1009621, PLACE1010106, PLACE1010310, PLACE1010622, PLACE1010944, PLACE1010965, PLACE1011185, PLACE1011332, PLACE1010635, PLACE1011646, PLACE1011725, PLACE2000014, PLACE2000264, PLACE2000394, PLACE2000419, PLACE3000160, PLACE3000220, PLACE3000254, PLACE3000271, PLACE3000339, PLACE3000341, PLACE3000350, PLACE3000353, PLACE3000401, PLACE4000300, SKNMC1000091, THYRO1000855, THYRO1001559, Y79AA1000065, Y79AA1000202, Y79AA1000214, Y79AA1000346, Y79AA1000784, Y79AA1000833, Y79AA1000968, Y79AA1001555, Y79AA1002220

[0199] On the other hand, clones with decreased expression levels in the presence of TNFα are:

[0200] HEMBA1002150, HEMBB1000240, NT2RM2000469, NT2RM2000984, NT2RM2001688, NT2RM4000290, NT2RM4000496, NT2RM4000590, NT2RM4001047, NT2RM4001582, NT2RM4001611, NT2RM4001650, NT2RM4002075, NT2RM4002128, NT2RP1000174, NT2RP1000243, NT2RP1000581, NT2RP1000688, NT2RP1000767, NT2RP1000825, NT2RP1001185, NT2RP1001286, NT2RP1001432, NT2RP1001457, NT2RP2000001, NT2RP2000248, NT2RP2000841, NT2RP2001813, NT2RP2002137, NT2RP2002928, NT2RP2003517, NT2RP2003559, NT2RP2003564, NT2RP2004933, NT2RP2005038, NT2RP2006365, NT2RP3000072, NT2RP3000320, NT2RP3000484, NT2RP3000980, NT2RP3001111, NT2RP3001420, NT2RP3001495, NT2RP3002056, NT2RP3002057, NT2RP3002545, NT2RP3002713, NT2RP3002799, NT2RP3002869, NT2RP3002953, NT2RP3002955, NT2RP3003282, NT2RP3003290, NT2RP3003384, NT2RP3003385, NT2RP3003870, NT2RP3004207, NT2RP3004262, NT2RP3004527, NT2RP4000500, NT2RP4000524, NT2RP4000787, NT2RP4000927, NT2RP4000955, NT2RP4000989, NT2RP4001442, NT2RP4001638, NT2RP4001950, NT2RP4002888, NT2RP5003524, OVARC1001270, PLACE1000246, PLACE1002816.

[0201] These are rheumatoid arthritis-associated clones.

[0202] A survey of genes of which expression levels are varied in primary cultured skin fibroblast cells exposed to ultraviolet light has revealed the following clones with elevated expression levels by ultraviolet radiation: HEMBA1000542, HEMBA1001808, HEMBA1002177, HEMBA1003314, MAMMA1001874, NT2RM2001100, NT2RP2005732, NT2RP3000592, NT2RP4000657, OVARC1000004, OVARC1001092, OVARC1001342, PLACE1002816, NT2RM4001002, NT2RM4001813, NT2RM4002266, NT2RP2001174, NT2RP2001196, NT2RP2005358, NT2RP3000690, NT2RP3001216, NT2RP3003464, PLACE1006382, THYRO1000070, THYRO1001100, Y79AA1000342

[0203] On the other hand, the expression levels of the following clones were decreased by ultraviolet radiation:

[0204] HEMBA1000005, HEMBA1000150, HEMBA1000156, HEMBA1000158, HEMBA1000168, HEMBA1000231, HEMBA1000304, HEMBA1000307, HEMBA1000333, HEMBA1000366, HEMBA1000369, HEMBA1000390, HEMBA1000396, HEMBA1000418, HEMBA1000434, HEMBA1000464, HEMBA1000469, HEMBA1000490, HEMBA1000504, HEMBA1000505, HEMBA1000557, HEMBA1000657, HEMBA1000673, HEMBA1000682, HEMBA1000686, HEMBA1000727, HEMBA1000752, HEMBA1000851, HEMBA1000852, HEMBA1000870, HEMBA1000872, HEMBA1001085, HEMBA1001121, HEMBA1001133, HEMBA1001235, HEMBA1001265, HEMBA1001281, HEMBA1001289, HEMBA1001299, HEMBA1001303, HEMBA1001310, HEMBA1001323, HEMBA1001595, HEMBA1001620, HEMBA1001640, HEMBA1001678, HEMBA1001712, HEMBA1001835, HEMBA1001950, HEMBA1001987, HEMBA1002253, HEMBA1002321, HEMBA1002341, HEMBA1002419, HEMBA1002679, HEMBA1002728, HEMBA1002818, HEMBA1002935, HEMBA1002999, HEMBA1003034, HEMBA1003071, HEMBA1003098, HEMBA1003142, HEMBA1003175, HEMBA1003202, HEMBA1003212, HEMBA1003220, HEMBA1003276, HEMBA1003373, HEMBA1003417, HEMBA1003447, HEMBA1003528, HEMBA1003684, HEMBA1003799, HEMBA1003885, HEMBA1003989, HEMBA1004011, HEMBA1004055, HEMBA1004133, HEMBA1004225, HEMBA1004272, HEMBA1004353, HEMBA1004631, HEMBA1004669, HEMBA1004705, HEMBA1004753, HEMBA1004776, HEMBA1004803, HEMBA1004816, HEMBA1004900, HEMBA1005047, HEMBA1005079, HEMBA1005101, HEMBA1005149, HEMBA1005152, HEMBA1005202, HEMBA1005314, HEMBA1005372, HEMBA1005511, HEMBA1005513, HEMBA1005518, HEMBA1005570, HEMBA1005577, HEMBA1005581, HEMBA1005588, HEMBA1005609, HEMBA1005632, HEMBA1005853, HEMBA1006031, HEMBA1006035, HEMBA1006485, HEMBA1006486, HEMBA1006502, HEMBA1006696, HEMBA1006789, HEMBA1006796, HEMBA1007085, HEMBA1007224, HEMBA1007301, HEMBA1007319, HEMBA1007341, HEMBA1007342, HEMBB1000036, HEMBB1000037, HEMBB1000217, HEMBB1000266, HEMBB1000317, HEMBB1000336, HEMBB1000354, HEMBB1000369, HEMBB1000399, HEMBB1000434, HEMBB1000438, HEMBB1000592, HEMBB1000673, HEMBB1000789, HEMBB1000810, HEMBB1000883, HEMBB1000887, HEMBB1001105, HEMBB1001182, HEMBB1001242, HEMBB1001267, HEMBB1001424, HEMBB1001464, HEMBB1001531, HEMBB1001618, HEMBB1001996, HEMBB1002092, HEMBB1002139, HEMBB1002142, HEMBB1002190, HEMBB1002453, HEMBB1002520, HEMBB1002550, HEMBB1002556, HEMBB1002600, HEMBB1002664, MAMMA1000009, MAMMA1000055, MAMMA1000069, MAMMA1000133, MAMMA1000171, MAMMA1000173, MAMMA1000287, MAMMA1000416, MAMMA1000585, MAMMA1000713, MAMMA1000760, MAMMA1000798, MAMMA1000831, MAMMA1000875, MAMMA1000876, MAMMA1000877, MAMMA1000906, MAMMA1000931, MAMMA1000962, MAMMA1001133, MAMMA1001139, MAMMA1001243, MAMMA1001271, MAMMA1001274, MAMMA1001298, MAMMA1001606, MAMMA1001630, MAMMA1001670, MAMMA1001743, MAMMA1001751, MAMMA1002140, MAMMA1002145, MAMMA1002158, MAMMA1002170, MAMMA1002236, MAMMA1002311, MAMMA1002498, MAMMA1002754, MAMMA1002780, MAMMA1002820, MAMMA1002843, MAMMA1002844, MAMMA1002871, MAMMA1003047, NT2RM1000037, NT2RM1000039, NT2RM1000080, NT2RM1000086, NT2RM1000341, NT2RM1000499, NT2RM1000669, NT2RM1000746, NT2RM1000781, NT2RM1000885, NT2RM1000905, NT2RM1000962, NT2RM2000239, NT2RM2000260, NT2RM2000371, NT2RM2000639, NT2RM2000649, NT2RM2000735, NT2RM2000821, NT2RM2000984, NT2RM2001035, NT2RM2001065, NT2RM2001105, NT2RM2001177, NT2RM2001194, NT2RM2001196, NT2RM2001243, NT2RM2001256, NT2RM2001424, NT2RM2001588, NT2RM2001635, NT2RM2001648, NT2RM2001652, NT2RM2001668, NT2RM2001706, NT2RM2001727, NT2RM2001730, NT2RM2001743, NT2RM2001753, NT2RM2001760, NT2RM2001771, NT2RM2001785, NT2RM2001800, NT2RM2001855, NT2RM2001896, NT2RM2001997, NT2RM2002030, NT2RM2002049, NT2RM2002091, NT2RM2002142, NT2RM2002145, NT2RM2002178, NT2RM2002580, NT2RM4000215, NT2RM4000344, NT2RM4000368, NT2RM4000421, NT2RM4000425, NT2RM4000457, NT2RM4000496, NT2RM4000515, NT2RM4000712, NT2RM4000787, NT2RM4000813, NT2RM4000820, NT2RM4000852, NT2RM4000950, NT2RM4000996, NT2RM4001016, NT2RM4001047, NT2RM4001054, NT2RM4001140, NT2RM4001151, NT2RM4001187, NT2RM4001204, NT2RM4001258, NT2RM4001437, NT2RM4001454, NT2RM4001489, NT2RM4001605, NT2RM4001611, NT2RM4001666, NT2RM4001710, NT2RM4001714, NT2RM4001715, NT2RM4001731, NT2RM4001741, NT2RM4001746, NT2RM4001856, NT2RM4001938, NT2RM4001940, NT2RM4001984, NT2RM4001987, NT2RM4002013, NT2RM4002054, NT2RM4002055, NT2RM4002073, NT2RM4002145, NT2RM4002146, NT2RM4002161, NT2RM4002174, NT2RM4002194, NT2RM4002205, NT2RM4002213, NT2RM4002266, NT2RM4002278, NT2RM4002558, NT2RM4002565, NT2RM4002593, NT2RM4002594, NT2RP1000063, NT2RP1000111, NT2RP1000124, NT2RP1000174, NT2RP1000348, NT2RP1000443, NT2RP1000522, NT2RP1000677, NT2RP1000695, NT2RP1000730, NT2RP1000767, NT2RP1000834, NT2RP1000856, NT2RP1000944, NT2RP1001014, NT2RP1001073, NT2RP1001079, NT2RP1001177, NT2RP1001185, NT2RP11001199, NT2RP1001253, NT2RP1001310, NT2RP1001313, NT2RP1001385, NT2RP1001410, NT2RP1001449, NT2RP1001546, NT2RP2000120, NT2RP2000126, NT2RP2000205, NT2RP2000224, NT2RP2000274, NT2RP2000298, NT2RP2000310, NT2RP2000327, NT2RP2000328, NT2RP2000329, NT2RP2000337, NT2RP2000369, NT2RP2000414, NT2RP2000498, NT2RP2000510, NT2RP2000715, NT2RP2000819, NT2RP2000931, NT2RP2000938, NT2RP2001044, NT2RP2001065, NT2RP2001081, NT2RP2001137, NT2RP2001312, NT2RP2001327, NT2RP2001366, NT2RP2001381, NT2RP2001420, NT2RP2001427, NT2RP2001449, NT2RP2001511, NT2RP2001526, NT2RP2001560, NT2RP2001576, NT2RP2001581, NT2RP2001601, NT2RP2001613, NT2RP2001628, NT2RP2001663, NT2RP2001675, NT2RP2001677, NT2RP2001678, NT2RP2001699, NT2RP2001721, NT2RP2001740, NT2RP2001813, NT2RP2001861, NT2RP2001876, NT2RP2001907, NT2RP2001926, NT2RP2001946, NT2RP2001985, NT2RP2002032, NT2RP2002046, NT2RP2002076, NT2RP2002099, NT2RP2002105, NT2RP2002137, NT2RP2002172, NT2RP2002208, NT2RP2002219, NT2RP2002231, NT2RP2002256, NT2RP2002270, NT2RP2002292, NT2RP2002316, NT2RP2002333, NT2RP2002520, NT2RP2002549, NT2RP2002621, NT2RP2002706, NT2RP2002710, NT2RP2002750, NT2RP2002800, NT2RP2002862, NT2RP2002880, NT2RP2002925, NT2RP2002929, NT2RP2002939, NT2RP2002959, NT2RP2002993, NT2RP2003000, NT2RP2003158, NT2RP2003243, NT2RP2003265, NT2RP2003277, NT2RP2003280, NT2RP2003295, NT2RP2003297, NT2RP2003433, NT2RP2003445, NT2RP2003456, NT2RP2003506, NT2RP2003543, NT2RP2003559, NT2RP2003567, NT2RP2003604, NT2RP2003706, NT2RP2003777, NT2RP2003781, NT2RP2003871, NT2RP2003952, NT2RP2003976, NT2RP2004013, NT2RP2004014, NT2RP2004081, NT2RP2004142, NT2RP2004165, NT2RP2004170, NT2RP2004194, NT2RP2004196, NT2RP2004239, NT2RP2004240, NT2RP2004321, NT2RP2004364, NT2RP2004365, NT2RP2004373, NT2RP2004389, NT2RP2004392, NT2RP2004399, NT2RP2004538, NT2RP2004587, NT2RP2004600, NT2RP2004602, NT2RP2004614, NT2RP2004664, NT2RP2004675, NT2RP2004681, NT2RP2004710, NT2RP2004743, NT2RP2004767, NT2RP2004799, NT2RP2004816, NT2RP2004959, NT2RP2004962, NT2RP2005000, NT2RP2005003, NT2RP2005012, NT2RP2005031, NT2RP2005037, NT2RP2005108, NT2RP2005126, NT2RP2005144, NT2RP2005147, NT2RP2005289, NT2RP2005293, NT2RP2005325, NT2RP2005354, NT2RP2005441, NT2RP2005464, NT2RP2005491, NT2RP2005495, NT2RP2005498, NT2RP2005501, NT2RP2005555, NT2RP2005557, NT2RP2005605, NT2RP2005622, NT2RP2005645, NT2RP2005651, NT2RP2005654, NT2RP2005669, NT2RP2005694, NT2RP2005701, NT2RP2005752, NT2RP2005773, NT2RP2005804, NT2RP2005835, NT2RP2005841, NT2RP2005857, NT2RP2005890, NT2RP2005901, NT2RP2005942, NT2RP2006023, NT2RP2006052, NT2RP2006069, NT2RP2006166, NT2RP2006184, NT2RP2006186, NT2RP2006196, NT2RP2006238, NT2RP2006258, NT2RP2006312, NT2RP2006320, NT2RP2006565, NT2RP2006571, NT2RP3000050, NT2RP3000055, NT2RP3000072, NT2RP3000080, NT2RP3000109, NT2RP3000134, NT2RP3000142, NT2RP3000149, NT2RP3000186, NT2RP3000197, NT2RP3000207, NT2RP3000220, NT2RP3000247, NT2RP3000251, NT2RP3000361, NT2RP3000366, NT2RP3000418, NT2RP3000449, NT2RP3000451, NT2RP3000484, NT2RP3000487, NT2RP3000512, NT2RP3000527, NT2RP3000542, NT2RP3000561, NT2RP3000562, NT2RP3000578, NT2RP3000596, NT2RP3000605, NT2RP3000624, NT2RP3000644, NT2RP3000661, NT2RP3000665, NT2RP3000739, NT2RP3000850, NT2RP3000868, NT2RP3000980, NT2RP3001084, NT2RP3001096, NT2RP3001109, NT2RP3001111, NT2RP3001115, NT2RP3001119, NT2RP3001120, NT2RP3001126, NT2RP3001140, NT2RP3001155, NT2RP3001176, NT2RP3001272, NT2RP3001297, NT2RP3001325, NT2RP3001339, NT2RP3001398, NT2RP3001447, NT2RP3001457, NT2RP3001459, NT2RP3001495, NT2RP3001554, NT2RP3001580, NT2RP3001587, NT2RP3001608, NT2RP3001672, NT2RP3001676, NT2RP3001712, NT2RP3001730, NT2RP3001782, NT2RP3001799, NT2RP3001929, NT2RP3001943, NT2RP3002002, NT2RP3002004, NT2RP3002045, NT2RP3002054, NT2RP3002057, NT2RP3002142, NT2RP3002163, NT2RP3002165, NT2RP3002173, NT2RP3002273, NT2RP3002351, NT2RP3002631, NT2RP3002659, NT2RP3002671, NT2RP3002713, NT2RP3002955, NT2RP3003071, NT2RP3003078, NT2RP3003139, NT2RP3003242, NT2RP3003301, NT2RP3003302, NT2RP3003313, NT2RP3003330, NT2RP3003377, NT2RP3003384, NT2RP3003411, NT2RP3003701, NT2RP3003831, NT2RP3003870, NT2RP3003992, NT2RP3004013, NT2RP3004070, NT2RP3004148, NT2RP3004206, NT2RP3004207, NT2RP3004215, NT2RP3004332, NT2RP3004341, NT2RP3004349, NT2RP3004399, NT2RP4000023, NT2RP4000051, NT2RP4000129, NT2RP4000147, NT2RP4000212, NT2RP4000214, NT2RP4000323, NT2RP4000449, NT2RP4000515, NT2RP4000519, NT2RP4000528, NT2RP4000556, NT2RP4000588, NT2RP4000638, NT2RP4000648, NT2RP4000973, NT2RP4000996, NT2RP4001006, NT2RP4001029, NT2RP4001041, NT2RP4001100, NT2RP4001117, NT2RP4001174, NT2RP4001235, NT2RP4001274, NT2RP4001276, NT2RP4001315, NT2RP4001373, NT2RP4001389, NT2RP4001433, NT2RP4001502, NT2RP4001524, NT2RP4001567, NT2RP4001574, NT2RP4001677, NT2RP4001753, NT2RP4001927, NT2RP4002052, NT2RP4002058, NT2RP4002071, NT2RP4002078, NT2RP4002083, NT2RP5003461, NT2RP5003512, NT2RP5003522, OVARC1000085, OVARC1000091, OVARC1000106, OVARC1000109, OVARC1000114, OVARC1000148, OVARC1000168, OVARC1000198, OVARC1000240, OVARC1000241, OVARC1000288, OVARC1000302, OVARC1000309, OVARC1000326, OVARC1000335, OVARC1000347, OVARC1000384, OVARC1000411, OVARC1000414, OVARC1000420, OVARC1000431, OVARC1000437, OVARC1000440, OVARC1000442, OVARC1000465, OVARC1000473, OVARC1000479, OVARC1000486, OVARC1000526, OVARC1000556, OVARC1000557, OVARC1000564, OVARC1000573, OVARC1000578, OVARC1000588, OVARC1000605, OVARC1000622, OVARC1000678, OVARC1000679, OVARC1000681, OVARC1000703, OVARC1000730, OVARC1000746, OVARC1000769, OVARC1000781, OVARC1000787, OVARC1000800, OVARC1000834, OVARC1000846, OVARC1000850, OVARC1000862, OVARC1000876, OVARC1000883, OVARC1000891, OVARC1000897, OVARC1000912, OVARC1000915, OVARC1000924, OVARC1000937, OVARC1000945, OVARC1000948, OVARC1000959, OVARC1000960, OVARC1000984, OVARC1000996, OVARC1000999, OVARC1001000, OVARC1001010, OVARC1010101, OVARC1001032, OVARC1001034, OVARC1001038, OVARC1001040, OVARC1001044, OVARC1001055, OVARC1001062, OVARC1001085, OVARC1001117, OVARC1001118, OVARC1001162, OVARC1001167, OVARC1001170, OVARC1001173, OVARC1001180, OVARC1001232, OVARC1001240, OVARC1001261, OVARC1001268, OVARC1001270, OVARC1001271, OVARC1001282, OVARC1001296, OVARC1001306, OVARC1001329, OVARC1001330, OVARC1001339, OVARC1001341, OVARC1001344, OVARC1001360, OVARC1001369, OVARC1001376, OVARC1001381, OVARC1001399, OVARC1001417, OVARC1001419, OVARC1001436, OVARC1001496, OVARC1001506, OVARC1001525, OVARC1001542, OVARC1001600, OVARC1001668, OVARC1001702, OVARC1001731, OVARC1001745, OVARC1001762, OVARC11001791, OVARC1001802, OVARC1001812, OVARC1001813, OVARC1001820, OVARC1001861, OVARC1001873, OVARC1001879, OVARC1001880, OVARC1001883, OVARC1001900, OVARC1001911, OVARC1001916, OVARC1001928, OVARC1001942, OVARC1001949, OVARC1001950, OVARC1001987, OVARC1001989, OVARC1002044, OVARC1002050, OVARC1002066, OVARC1002107, OVARC1002112, OVARC1002127, OVARC1002165, PLACE1000004, PLACE1000078, PLACE1000081, PLACE1000142, PLACE1000184, PLACE1000185, PLACE1000246, PLACE1000292, PLACE1000332, PLACE1000383, PLACE1000401, PLACE1000406, PLACE1000420, PLACE1000421, PLACE1000435, PLACE1000453, PLACE1000481, PLACE1000562, PLACE1000583, PLACE1000610, PLACE1000656, PLACE1000785, PLACE1000798, PLACE1000909, PLACE1000948, PLACE1001010, PLACE1001076, PLACE1001092, PLACE1001104, PLACE1001171, PLACE1001185, PLACE1001279, PLACE1001304, PLACE1001311, PLACE1001323, PLACE1001351, PLACE1001366, PLACE1001502, PLACE1001534, PLACE1001602, PLACE1001603, PLACE1001608, PLACE1001610, PLACE1001632, PLACE1001634, PLACE1001720, PLACE1001729, PLACE1001739, PLACE1001745, PLACE1001746, PLACE1001748, PLACE1001781, PLACE1001799, PLACE1001821, PLACE1001912, PLACE1001928, PLACE1001989, PLACE1002072, PLACE1002090, PLACE1002115, PLACE1002150, PLACE1002170, PLACE1002319, PLACE1002342, PLACE1002395, PLACE1002399, PLACE1002433, PLACE1002437, PLACE1002438, PLACE1002450, PLACE1002499, PLACE1002514, PLACE1002583, PLACE1002685, PLACE1002768, PLACE1002772, PLACE1002782, PLACE1002794, PLACE1002811, PLACE1002815, PLACE1002834, PLACE1002839, PLACE1002853, PLACE1002941, PLACE1002968, PLACE1003044, PLACE1003092, PLACE1003100, PLACE1003145, PLACE1003153, PLACE1003176, PLACE1003190, PLACE1003200, PLACE1003205, PLACE1003238, PLACE1003249, PLACE1003302, PLACE1003353, PLACE1003373, PLACE1003383, PLACE1003516, PLACE1003521, PLACE1003592, PLACE1003611, PLACE1003618, PLACE1003704, PLACE1003709, PLACE1003768, PLACE1003784, PLACE1003833, PLACE1003870, PLACE1003886, PLACE1003888, PLACE1003903, PLACE1003936, PLACE1003968, PLACE1004103, PLACE1004114, PLACE1004118, PLACE1004242, PLACE1004256, PLACE1004284, PLACE1004289, PLACE1004316, PLACE1004336, PLACE1004384, PLACE1004388, PLACE1004405, PLACE1004425, PLACE1004428, PLACE1004451, PLACE1004467, PLACE1004491, PLACE1004510, PLACE1004548, PLACE1004658, PLACE1004672, PLACE1004693, PLACE1004716, PLACE1004777, PLACE1004813, PLACE1004824, PLACE1004827, PLACE1004836, PLACE1004840, PLACE1004885, PLACE1004913, PLACE1004918, PLACE1004930, PLACE1004934, PLACE1004972, PLACE1004982, PLACE1004985, PLACE1005026, PLACE1005101, PLACE1005102, PLACE1005128, PLACE1005176, PLACE1005181, PLACE1005187, PLACE1005232, PLACE1005261, PLACE1005277, PLACE1005287, PLACE1005305, PLACE1005327, PLACE1005331, PLACE1005373, PLACE1005374, PLACE1005409, PLACE1005477, PLACE1005480, PLACE1005481, PLACE1005494, PLACE1005502, PLACE1005526, PLACE1005528, PLACE1005530, PLACE1005550, PLACE1005554, PLACE1005557, PLACE1005595, PLACE1005603, PLACE1005611, PLACE1005630, PLACE1005639, PLACE1005646, PLACE1005656, PLACE1005666, PLACE1005730, PLACE1005755, PLACE1005763, PLACE1005799, PLACE1005803, PLACE1005804, PLACE1005834, PLACE1005845, PLACE1005850, PLACE1005876, PLACE1005884, PLACE1005890, PLACE1005898, PLACE1005921, PLACE1005923, PLACE1005932, PLACE1005934, PLACE1005936, PLACE1005951, PLACE1005966, PLACE1005968, PLACE1005990, PLACE1006002, PLACE1006003, PLACE1006011, PLACE1006017, PLACE1006037, PLACE1006040, PLACE1006119, PLACE1006129, PLACE1006139, PLACE1006143, PLACE1006157, PLACE1006159, PLACE1006164, PLACE1006167, PLACE1006170, PLACE1006187, PLACE1006195, PLACE1006205, PLACE1006223, PLACE1006225, PLACE1006236, PLACE1006239, PLACE1006288, PLACE1006318, PLACE1006357, PLACE1006368, PLACE1006371, PLACE1006438, PLACE1006469, PLACE1006482, PLACE1006488, PLACE1006492, PLACE1006506, PLACE1006531, PLACE1006540, PLACE1006552, PLACE1006617, PLACE1006626, PLACE1006673, PLACE1006704, PLACE1006731, PLACE1006754, PLACE1006779, PLACE1006795, PLACE1006800, PLACE1006805, PLACE1006819, PLACE1006829, PLACE1006860, PLACE1006867, PLACE1006878, PLACE1006883, PLACE1006956, PLACE1006958, PLACE1007014, PLACE1007111, PLACE1007140, PLACE1007178, PLACE1007238, PLACE1007239, PLACE1007242, PLACE1007257, PLACE1007274, PLACE1007276, PLACE1007282, PLACE1007286, PLACE1007301, PLACE1007317, PLACE1007346, PLACE1007367, PLACE1007375, PLACE1007386, PLACE1007402, PLACE1007409, PLACE1007416, PLACE1007460, PLACE1007478, PLACE1007484, PLACE1007488, PLACE1007507, PLACE1007511, PLACE1007524, PLACE1007537, PLACE1007544, PLACE1007557, PLACE1007677, PLACE1007688, PLACE1007690, PLACE1007737, PLACE1007743, PLACE1007829, PLACE1007846, PLACE1007852, PLACE1007858, PLACE1007897, PLACE1007908, PLACE1007946, PLACE1007955, PLACE1007958, PLACE1008122, PLACE1008177, PLACE1008181, PLACE1008198, PLACE1008209, PLACE1008244, PLACE1008330, PLACE1008392, PLACE1008405, PLACE1008424, PLACE1008437, PLACE1008455, PLACE1008457, PLACE1008524, PLACE1008531, PLACE1008532, PLACE1008533, PLACE1008568, PLACE1008625, PLACE1008626, PLACE1008627, PLACE1008630, PLACE1008693, PLACE1008715, PLACE1008748, PLACE1008808, PLACE1008813, PLACE1008887, PLACE1008947, PLACE1009045, PLACE1009060, PLACE1009091, PLACE1009099, PLACE1009150, PLACE1009155, PLACE1009183, PLACE1009186, PLACE1009200, PLACE1009308, PLACE1009328, PLACE1009368, PLACE1009398, PLACE1009410, PLACE1009443, PLACE1009444, PLACE1009459, PLACE1009468, PLACE1009476, PLACE1009493, PLACE1009524, PLACE1009581, PLACE1009607, PLACE1009621, PLACE1009721, PLACE1009798, PLACE1009861, PLACE1009879, PLACE1009886, PLACE1009888, PLACE1009947, PLACE1009995, PLACE1010076, PLACE1010083, PLACE1010089, PLACE1010102, PLACE1010105, PLACE1010106, PLACE1010134, PLACE1010194, PLACE1010261, PLACE1010293, PLACE1010310, PLACE1010324, PLACE1010341, PLACE1010364, PLACE1010481, PLACE1010491, PLACE1010547, PLACE1010579, PLACE1010580, PLACE1010599, PLACE1010628, PLACE1010629, PLACE1010662, PLACE1010714, PLACE1010720, PLACE1010739, PLACE1010743, PLACE1010800, PLACE1010811, PLACE1010833, PLACE1010856, PLACE1010870, PLACE1010877, PLACE1010891, PLACE1010896, PLACE1010900, PLACE1010916, PLACE1010917, PLACE1010925, PLACE1010926, PLACE1010942, PLACE1010947, PLACE1010954, PLACE1010960, PLACE1010965, PLACE1011026, PLACE1011041, PLACE1011046, PLACE1011054, PLACE1011090, PLACE1011165, PLACE1011214, PLACE1011229, PLACE1011273, PLACE1011296, PLACE1011310, PLACE1011371, PLACE1011375, PLACE1011399, PLACE1011419, PLACE1011452, PLACE1011465, PLACE1011472, PLACE1011503, PLACE1011563, PLACE1011567, PLACE1111586, PLACE1011641, PLACE1011643, PLACE1011646, PLACE1011650, PLACE1011664, PLACE1011675, PLACE1011725, PLACE1011729, PLACE1011749, PLACE1011762, PLACE1011778, PLACE1011783, PLACE1011858, PLACE1011891, PLACE1011923, PLACE1011962, PLACE1011982, PLACE1011995, PLACE2000006, PLACE2000007, PLACE2000014, PLACE2000017, PLACE2000030, PLACE2000033, PLACE2000039, PLACE2000050, PLACE2000061, PLACE2000100, PLACE2000111, PLACE2000124, PLACE2000132, PLACE2000140, PLACE2000164, PLACE2000170, PLACE2000172, PLACE2000176, PLACE2000187, PLACE2000216, PLACE2000223, PLACE2000264, PLACE2000274, PLACE2000335, PLACE2000341, PLACE2000342, PLACE2000347, PLACE2000366, PLACE2000373, PLACE2000398, PLACE2000419, PLACE2000433, PLACE2000435, PLACE2000455, PLACE2000458, PLACE2000465, PLACE3000020, PLACE3000029, PLACE3000059, PLACE3000103, PLACE3000119, PLACE3000136, PLACE3000156, PLACE3000157, PLACE3000158, PLACE3000160, PLACE3000197, PLACE3000199, PLACE3000207, PLACE3000218, PLACE3000220, PLACE3000221, PLACE3000226, PLACE3000242, PLACE3000244, PLACE3000254, PLACE3000271, PLACE3000276, PLACE3000304, PLACE3000310, PLACE3000320, PLACE3000350, PLACE3000353, PLACE3000363, PLACE3000365, PLACE3000373, PLACE3000388, PLACE3000399, PLACE3000400, PLACE3000455, PLACE4000052, PLACE4000093, PLACE4000128, PLACE4000129, PLACE4000131, PLACE4000147, PLACE4000156, PLACE4000211, PLACE4000222, PLACE4000230, PLACE4000233, PLACE4000261, PLACE4000269, PLACE4000270, PLACE4000320, PLACE4000323, PLACE4000326, PLACE4000369, PLACE4000379, PLACE4000387, PLACE4000392, PLACE4000411, PLACE4000431, PLACE4000487, PLACE4000494, PLACE4000521, PLACE4000522, PLACE4000548, PLACE4000558, PLACE4000581, PLACE4000590, PLACE4000612, SKNMC1000050, SKNMC1000091, THYRO1000040, THYRO1000085, THYRO1000092, THYRO1000111, THYRO1000121, THYRO1000156, THYRO1000163, THYRO1000186, THYRO1000187, THYRO1000206, THYRO1000241, THYRO1000320, THYRO1000343, THYRO1000358, THYRO1000368, THYRO1000381, THYRO1000387, THYRO1000395, THYRO1000401, THYRO1000452, THYRO1000484, THYRO1000501, THYRO1000502, THYRO1000505, THYRO1000662, THYRO1000666, THYRO1000684, THYRO1000748, THYRO1000787, THYRO1000793, THYRO1000815, THYRO1000829, THYRO1000852, THYRO1000855, THYRO1000895, THYRO1000926, THYRO1000951, THYRO1000952, THYRO1000984, THYRO1000988, THYRO1001031, THYRO1001062, THYRO1001093, THYRO1001120, THYRO1001121, THYRO1001133, THYRO1001134, THYRO1001142, THYRO1001173, THYRO1001177, THYRO1001204, THYRO1001213, THYRO1001290, THYRO11001313, THYRO1001321, THYRO1001322, THYRO1001363, THYRO1001374, THYRO1001401, THYRO1001406, THYRO1001458, THYRO1001617, THYRO1001671, THYRO1001673, THYRO1001703, THYRO1001706, THYRO1001721, THYRO1001738, THYRO1001745, THYRO1001746, THYRO1001809, Y79AA1000013, Y79AA1000033, Y79AA1000059, Y79AA1000202, Y79AA1000230, Y79AA1000268, Y79AA1000346, Y79AA1000420, Y79AA1000480, Y79AA1000539, Y79AA1000540, Y79AA1000574, Y79AA1000627, Y79AA1000705, Y79AA1000734, Y79AA1000748, Y79AA1000752, Y79AA1000774, Y79AA1000784, Y79AA1000794, Y79AA1000800, Y79AA1000802, Y79AA1000805, Y79AA1000833, Y79AA1000850, Y79AA1000962, Y79AA1000966, Y79AA1001041, Y79AA1001048, Y79AA1001061, Y79AA1001078, Y79AA1001105, Y79AA1001177, Y79AA1001185, Y79AA1001211, Y79AA1001216, Y79AA1001281, Y79AA1001299, Y79AA1001312, Y79AA1001323, Y79AA1001384, Y79AA1001402, Y79AA1001533, Y79AA1001548, Y79AA1001581, Y79AA1001594, Y79AA1001665, Y79AA1001679, Y79AA1001692, Y79AA1001696, Y79AA1001711, Y79AA1001805, Y79AA1001827, Y79AA1001846, Y79AA1001848, Y79AA1001866, Y79AA1001875, Y79AA1002027, Y79AA1002083, Y79AA1002089, Y79AA1002093, Y79AA1002103, Y79AA1002115, Y79AA1002139, Y79AA1002208, Y79AA1002209, Y79AA1002220, Y79AA1002234, Y79AA1002246, Y79AA1002307, Y79AA1002311, Y79AA1002351, Y79AA1002361, Y79AA1002399, Y79AA1002433, Y79AA1002472, Y79AA1002482, HEMBA1000542, NT2RM2001100, HEMBA1000012, HEMBA1000201, HEMBA1000216, HEMBA1000244, HEMBA1000251, HEMBA1000303, HEMBA1000355, HEMBA1000356, HEMBA1000456, HEMBA1000488, HEMBA1000519, HEMBA1000591, HEMBA1000592, HEMBA1000636, HEMBA1000637, HEMBA1000722, HEMBA1000817, HEMBA1000934, HEMBA1000971, HEMBA1001052, HEMBA1001059, HEMBA1001122, HEMBA100123, HEMBA1001213, HEMBA1001226, HEMBA1001257, HEMBA1001302, HEMBA1001326, HEMBA1001327, HEMBA1001570, HEMBA1001651, HEMBA1001745, HEMBA1001847, HEMBA1001912, HEMBA1001921, HEMBA1001942, HEMBA1001979, HEMBA1002039, HEMBA1002185, HEMBA1002199, HEMBA1002229, HEMBA1002257, HEMBA1002265, HEMBA1002337, HEMBA1002475, HEMBA1002513, HEMBA1002515, HEMBA1002624, HEMBA1002628, HEMBA1002712, HEMBA1002794, HEMBA1002816, HEMBA1002876, HEMBA1002939, HEMBA1002968, HEMBA1002971, HEMBA1003064, HEMBA1003077, HEMBA1003086, HEMBA1003304, HEMBA1003328, HEMBA1003376, HEMBA1003402, HEMBA1003556, HEMBA1003560, HEMBA1003568, HEMBA1003597, HEMBA1003598, HEMBA1003656, HEMBA1003715, HEMBA1003733, HEMBA1003760, HEMBA1003773, HEMBA1003784, HEMBA1003803, HEMBA1003838, HEMBA1003864, HEMBA1003950, HEMBA1004012, HEMBA1004138, HEMBA1004143, HEMBA1004241, HEMBA1004246, HEMBA1004264, HEMBA1004276, HEMBA1004354, HEMBA1004502, HEMBA1004538, HEMBA1004670, HEMBA1004752, HEMBA1004771, HEMBA1004880, HEMBA1004923, HEMBA1004972, HEMBA1004995, HEMBA1005029, HEMBA1005039, HEMBA1005159, HEMBA1005315, HEMBA1005338, HEMBA1005410, HEMBA1005447, HEMBA1005500, HEMBA1005506, HEMBA1005583, HEMBA1005606, HEMBA1005755, HEMBA1005813, HEMBA1005909, HEMBA1005931, HEMBA1005934, HEMBA1005991, HEMBA1006002, HEMBA1006036, HEMBA1006067, HEMBA1006091, HEMBA1006142, HEMBA1006235, HEMBA1006283, HEMBA1006291, HEMBA1006293, HEMBA1006344, HEMBA1006492, HEMBA1006535, HEMBA1006569, HEMBA1006612, HEMBA1006676, HEMBA1006767, HEMBA1006877, HEMBA1006885, HEMBA1006926, HEMBA1006996, HEMBA1007018, HEMBA1007066, HEMBA1007080, HEMBA1007112, HEMBA1007178, HEMBA1007203, HEMBA1007243, HEMBB1000226, HEMBB1000240, HEMBB1000272, HEMBB1000638, HEMBB1000706, HEMBB1000826, HEMBB1001014, HEMBB1001112, HEMBB1001119, HEMBB1001317, HEMBB1002342, HEMBB1002371, HEMBB1002381, HEMBB1002387, HEMBB1002409, HEMBB1002457, HEMBB1002477, HEMBB1002489, HEMBB1002502, HEMBB1002510, HEMBB1002582, HEMBB1002596, MAMMA1000103, MAMMA1000155, MAMMA1000183, MAMMA1000198, MAMMA1000221, MAMMA1000241, MAMMA1000270,

[0205] MAMMA1000284, MAMMA1000309, MAMMA1000339, MAMMA1000348, MAMMA1000410, MAMMA1000421, MAMMA1000422, MAMMA1000429, MAMMA1000444, MAMMA1000478, MAMMA1000524, MAMMA1000605, MAMMA1000738, MAMMA1000761, MAMMA1000776, MAMMA1000778, MAMMA1000782, MAMMA1000802, MAMMA1000839, MAMMA1000843, MAMMA1000908, MAMMA1000943, MAMMA1000998, MAMMA1001080, MAMMA1001105, MAMMA1001260, MAMMA1001324, MAMMA1001446, MAMMA1001627, MAMMA1001908, MAMMA1002084, MAMMA1002174, MAMMA1002360, MAMMA1002384, MAMMA1002650, MAMMA1002685, MAMMA1002796, MAMMA1002973, MAMMA1003004, MAMMA1003166, NT2RM1000018, NT2RM1000187, NT2RM1000244, NT2RM1000256, NT2RM1000260, NT2RM1000377, NT2RM1000388, NT2RM1000555, NT2RM1000661, NT2RM1000699, NT2RM1000770, NT2RM1000780, NT2RM1000800, NT2RM1000802, NT2RM1000894, NT2RM1000898, NT2RM1001003, NT2RM1001043, NT2RM1001044, NT2RM1001074, NT2RM1001139, NT2RM2000101, NT2RM2000368, NT2RM2000402, NT2RM2000407, NT2RM2000422, NT2RM2000577, NT2RM2000581, NT2RM2000612, NT2RM2000691, NT2RM2000714, NT2RM2000718, NT2RM2000837, NT2RM2001131, NT2RM2001152, NT2RM2001221, NT2RM2001238, NT2RM2001306, NT2RM2001420, NT2RM2001524, NT2RM2001582, NT2RM2001592, NT2RM2001632, NT2RM2001659, NT2RM2001671, NT2RM2001675, NT2RM2001696, NT2RM2001716, NT2RM2001803, NT2RM2001805, NT2RM2001903, NT2RM2001983, NT2RM4000085, NT2RM4000155, NT2RM4000229, NT2RM4000290, NT2RM4000324, NT2RM4000395, NT2RM4000433, NT2RM4000471, NT2RM4000531, NT2RM4000532, NT2RM4000616, NT2RM4000700, NT2RM4000741, NT2RM4000751, NT2RM4000778, NT2RM4000779, NT2RM4000848, NT2RM4000855, NT2RM4000887, NT2RM4000895, NT2RM4001032, NT2RM4001203, NT2RM4001316, NT2RM4001414, NT2RM4001483, NT2RM4001519, NT2RM4001522, NT2RM4001557, NT2RM4001565, NT2RM4001582, NT2RM4001629, NT2RM4001682, NT2RM4001776, NT2RM4001783, NT2RM4002075, NT2RM4002093, NT2RM4002109, NT2RM4002189, NT2RM4002256, NT2RM4002294, NT2RM4002373, NT2RM4002504, NT2RP1000035, NT2RP1000040, NT2RP1000086, NT2RP1000112, NT2RP1000163, NT2RP1000358, NT2RP1000409, NT2RP1000478, NT2RP1000481, NT2RP1000574, NT2RP1000577, NT2RP1000629, NT2RP1000630, NT2RP1000688, NT2RP1000733, NT2RP1000796, NT2RP1000916, NT2RP1000959, NT2RP1000966, NT2RP1100111, NT2RP1001033, NT2RP1001286, NT2RP1001302, NT2RP1001361, NT2RP1001457, NT2RP1001482, NT2RP2000054, NT2RP2000079, NT2RP2000091, NT2RP2000097, NT2RP2000161, NT2RP2000195, NT2RP2000232, NT2RP2000233, NT2RP2000248, NT2RP2000283, NT2RP2000422, NT2RP2000438, NT2RP2000448, NT2RP2000459, NT2RP2000731, NT2RP2000758, NT2RP2000764, NT2RP2000892, NT2RP2000943, NT2RP2001036, NT2RP2001070, NT2RP2001218, NT2RP2001467, NT2RP2001506, NT2RP2001520, NT2RP2001597, NT2RP2001634, NT2RP2001660, NT2RP2001762, NT2RP2001947, NT2RP2001991, NT2RP2002033, NT2RP2002041, NT2RP2002047, NT2RP2002066, NT2RP2002070, NT2RP2002193, NT2RP2002235, NT2RP2002252, NT2RP2002394, NT2RP2002537, NT2RP2002727, NT2RP2002736, NT2RP2002752, NT2RP2002753, NT2RP2002769, NT2RP2002778, NT2RP2002857, NT2RP2002928, NT2RP2002954, NT2RP2002980, NT2RP2002986, NT2RP2003121, NT2RP2003161, NT2RP2003272, NT2RP2003329, NT2RP2003339, NT2RP2003391, NT2RP2003393, NT2RP2003394, NT2RP2003401, NT2RP2003466, NT2RP2003513, NT2RP2003564, NT2RP2003581, NT2RP2003629, NT2RP2003727, NT2RP2003764, NT2RP2003793, NT2RP2003840, NT2RP2003885, NT2RP2004066, NT2RP2004187, NT2RP2004226, NT2RP2004242, NT2RP2004245, NT2RP2004316, NT2RP2004366, NT2RP2004396, NT2RP2004463, NT2RP2004512, NT2RP2004655, NT2RP2004736, NT2RP2004775, NT2RP2004791, NT2RP2004802, NT2RP2004841, NT2RP2004897, NT2RP2004933, NT2RP2004936, NT2RP2004961, NT2RP2004967, NT2RP2004982, NT2RP2005018, NT2RP2005038, NT2RP2005116, NT2RP2005140, NT2RP2005159, NT2RP2005162, NT2RP2005276, NT2RP2005288, NT2RP2005315, NT2RP2005344, NT2RP2005407, NT2RP2005453, NT2RP2005457, NT2RP2005476, NT2RP2005490, NT2RP2005525, NT2RP2005540, NT2RP2005549, NT2RP2005600, NT2RP2005675, NT2RP2005690, NT2RP2005712, NT2RP2005722, NT2RP2005723, NT2RP2005763, NT2RP2005812, NT2RP2005853, NT2RP2005859, NT2RP2005933, NT2RP2005980, NT2RP2006038, NT2RP2006043, NT2RP2006071, NT2RP2006098, NT2RP2006100, NT2RP2006103, NT2RP2006106, NT2RP2006261, NT2RP2006334, NT2RP2006464, NT2RP2006573, NT2RP3000255, NT2RP3000267, NT2RP3000341, NT2RP3000403, NT2RP3000526, NT2RP3000531, NT2RP3000584, NT2RP3000590, NT2RP3000685, NT2RP3000759, NT2RP3000847, NT2RP3000865, NT2RP3000875, NT2RP3000968, NT2RP3000994, NT2RP3001107, NT2RP3001116, NT2RP3001147, NT2RP3001150, NT2RP3001236, NT2RP3001307, NT2RP3001318, NT2RP3001399, NT2RP3001420, NT2RP3001426, NT2RP3001472, NT2RP3001497, NT2RP3001527, NT2RP3001607, NT2RP3001671, NT2RP3001690, NT2RP3001727, NT2RP3001915, NT2RP3001931, NT2RP3001944, NT2RP3001989, NT2RP3002147, NT2RP3002244, NT2RP3002330, NT2RP3002343, NT2RP3002501, NT2RP3002587, NT2RP3002602, NT2RP3002682, NT2RP3002687, NT2RP3002770, NT2RP3002785, NT2RP3002869, NT2RP3002877, NT2RP3002969, NT2RP3003145, NT2RP3003157, NT2RP3003212, NT2RP3003264, NT2RP3003278, NT2RP3003282, NT2RP3003290, NT2RP3003327, NT2RP3003344, NT2RP3003353, NT2RP3003491, NT2RP3003543, NT2RP3003665, NT2RP3003918, NT2RP3003932, NT2RP3004110, NT2RP3004155, NT2RP3004262, NT2RP3004334, NT2RP3004428, NT2RP3004466, NT2RP3004475, NT2RP3004504, NT2RP3004507, NT2RP3004527, NT2RP3004544, NT2RP3004572, NT2RP3004578, NT2RP4000109, NT2RP4000246, NT2RP4000360, NT2RP4000376, NT2RP4000398, NT2RP4000455, NT2RP4000518, NT2RP4000524, NT2RP4000878, NT2RP4000879, NT2RP4000955, NT2RP4000989, NT2RP4000997, NT2RP4001004, NT2RP4001010, NT2RP4001078, NT2RP4001122, NT2RP4001126, NT2RP4001149, NT2RP4001206, NT2RP4001219, NT2RP4001260, NT2RP4001339, NT2RP4001353, NT2RP4001414, NT2RP4001442, NT2RP4001447, NT2RP4001474, NT2RP4001551, NT2RP4001803, NT2RP4001893, NT2RP4001896, NT2RP4001946, NT2RP4001950, NT2RP4001966, NT2RP4002081, NT2RP4002408, NT2RP4002791, NT2RP4002888, NT2RP5003524, NT2RP5003534, OVARC1000013, OVARC1000035, OVARC1000087, OVARC1000113, OVARC1000139, OVARC1000145, OVARC1000209, OVARC1000212, OVARC1000408, OVARC1000427, OVARC1000466, OVARC1000496, OVARC1000533, OVARC1000576, OVARC1000640, OVARC1000649, OVARC1000682, OVARC1000689, OVARC1000771, OVARC1000885, OVARC1000890, OVARC1000936, OVARC1000964, OVARC1001065, OVARC1001068, OVARC1001072, OVARC1001107, OVARC1001113, OVARC1001154, OVARC1001169, OVARC1001176, OVARC1001372, OVARC1001391, OVARC1001453, OVARC1001476, OVARC1001480, OVARC1001547, OVARC1001555, OVARC11001610, OVARC1001711, OVARC1001713, OVARC1001726, OVARC1001766, OVARC1001767, OVARC1001768, OVARC1001805, OVARC1001809, OVARC1001828, OVARC1001846, OVARC1001901, OVARC1001943, OVARC1002138, OVARC1002156, PLACE1000005, PLACE1000007, PLACE1000040, PLACE1000048, PLACE1000133, PLACE1000214, PLACE1000347, PLACE1000374, PLACE1000424, PLACE1000492, PLACE1000547, PLACE1000564, PLACE1000599, PLACE1000653, PLACE1000706, PLACE1000748, PLACE1000749, PLACE1000755, PLACE1000841, PLACE1000849, PLACE1000856, PLACE1000931, PLACE1000987, PLACE1001015, PLACE1001024, PLACE1001054, PLACE1001062, PLACE1001118, PLACE1001168, PLACE1001238, PLACE1001377, PLACE1001383, PLACE1001384, PLACE1001399, PLACE1001440, PLACE1001503, PLACE1001545, PLACE1001611, PLACE1001640, PLACE1001691, PLACE1001705, PLACE1001740, PLACE1001817, PLACE1001844, PLACE1001845, PLACE1001869, PLACE1001897, PLACE1002004, PLACE1002073, PLACE1002140, PLACE1002157, PLACE1002171, PLACE1002205, PLACE1002213, PLACE1002474, PLACE1002500, PLACE1002529, PLACE1002537, PLACE1002598, PLACE1002655, PLACE1002908, PLACE1003045, PLACE1003136, PLACE1003174, PLACE1003258, PLACE1003296, PLACE1003334, PLACE1003342, PLACE1003361, PLACE1003366, PLACE1003369, PLACE1003420, PLACE1003454, PLACE1003553, PLACE1003566, PLACE1003583, PLACE1003669, PLACE1003711, PLACE1003723, PLACE1003738, PLACE1003760, PLACE1003762, PLACE1003771, PLACE1003783, PLACE1003850, PLACE1003858, PLACE1003915, PLACE1004128, PLACE1004161, PLACE1004183, PLACE1004197, PLACE1004302, PLACE1004358, PLACE1004437, PLACE1004460, PLACE1004471, PLACE1004506, PLACE1004518, PLACE1004646, PLACE1004722, PLACE1004793, PLACE1004804, PLACE1004838, PLACE1004868, PLACE1004900, PLACE1004902, PLACE1004969, PLACE1004979, PLACE1005086, PLACE1005162, PLACE1005243, PLACE1005266, PLACE1005313, PLACE1005584, PLACE1005698, PLACE1005727, PLACE1005739, PLACE1005851, PLACE1005925, PLACE1006196, PLACE1006248, PLACE1006262, PLACE1006335, PLACE1006360, PLACE1006385, PLACE1006412, PLACE1006414, PLACE1006445, PLACE1006598, PLACE1006629, PLACE1006640, PLACE1006792, PLACE1006815, PLACE1006901, PLACE1006917, PLACE1006962, PLACE1007021, PLACE1007045, PLACE1007112, PLACE1007226, PLACE1007243, PLACE1007454, PLACE1007547, PLACE1007598, PLACE1007618, PLACE1007645, PLACE1007649, PLACE1007706, PLACE1007725, PLACE1007746, PLACE1007843, PLACE1007877, PLACE1007954, PLACE1007969, PLACE1008002, PLACE1008095, PLACE1008111, PLACE1008132, PLACE1008273, PLACE1008275, PLACE1008331, PLACE1008356, PLACE1008368, PLACE1008402, PLACE1008603, PLACE1008650, PLACE1008696, PLACE1008757, PLACE1008807, PLACE1008867, PLACE1008941, PLACE1009020, PLACE1009039, PLACE1009158, PLACE1009172, PLACE1009190, PLACE1009230, PLACE1009319, PLACE1009338, PLACE1009375, PLACE1009434, PLACE1009613, PLACE1009637, PLACE1009659, PLACE1009763, PLACE1009845, PLACE1009921, PLACE1009971, PLACE1009992, PLACE1010023, PLACE1010053, PLACE1010069, PLACE1010074, PLACE1010181, PLACE1010202, PLACE1010231, PLACE1010270, PLACE1010274, PLACE1010321, PLACE1010329, PLACE1010492, PLACE1010522, PLACE1010616, PLACE1010624, PLACE1010631, PLACE1010786, PLACE1011032, PLACE1011114, PLACE1011221, PLACE1011325, PLACE1011520, PLACE1011635, PLACE1011649, PLACE1011682, PLACE1011875, PLACE1011896, PLACE1011964, PLACE1012031, PLACE2000015, PLACE2000021, PLACE2000047, PLACE2000072, PLACE2000097, PLACE2000136, PLACE2000246, PLACE2000302, PLACE2000379, PLACE2000394, PLACE2000425, PLACE2000427, PLACE2000477, PLACE3000009, PLACE3000070, PLACE3000142, PLACE3000145, PLACE3000148, PLACE3000155, PLACE3000169, PLACE3000208, PLACE3000230, PLACE3000322, PLACE3000331, PLACE3000352, PLACE3000401, PLACE3000413, PLACE3000425, PLACE3000477, PLACE4000009, PLACE4000049, PLACE4000089, PLACE4000100, PLACE4000247, PLACE4000250, PLACE4000252, PLACE4000300, PLACE4000344, PLACE4000367, PLACE4000465, PLACE4000489, PLACE4000638, SKNMC1000013, THYRO1000017, THYRO1000026, THYRO1000034, THYRO1000072, THYRO1000132, THYRO1000173, THYRO1000190, THYRO1000197, THYRO1000221, THYRO1000253, THYRO1000270, THYRO1000279, THYRO1000327, THYRO1000394, THYRO1000438, THYRO1000558, THYRO1000569, THYRO1000585, THYRO1000596, THYRO1000625, THYRO1000637, THYRO1000676, THYRO1000734, THYRO1000777, THYRO1000783, THYRO1000805, THYRO1000843, THYRO1000934, THYRO1001033, THYRO1001347, THYRO1001405, THYRO1001411, THYRO1001534, THYRO1001573, THYRO1001584, THYRO1001602, THYRO1001605, THYRO1001772, THYRO1001854, VESEN1000122, Y79AA1000037, Y79AA1000065, Y79AA1000181, Y79AA1000231, Y79AA1000349, Y79AA1000355, Y79AA1000368, Y79AA1000538, Y79AA1000782, Y79AA1001023, Y79AA1001145, Y79AA1001391, Y79AA1001541, Y79AA1001585, Y79AA1001705, Y79AA1001781, Y79AA1001923, Y79AA1001963, Y79AA1002125, Y79AA1002229, Y79AA1002407, Y79AA1002487

[0206] These clones are associated with ultraviolet radiation damage.

[0207] A survey of genes of which expression levels are varied in response to the stimulation for inducing cell differentiation (stimulation using retinoic acid (RA) or using RA/inhibitor (inhibitor for cell division)) in culture cells of neural strain, NT2, revealed the following clones with elevated expression levels in the presence of RA:

[0208] HEMBA1000005, HEMBA1000042, HEMBA1000046, HEMBA1000076, HEMBA1000111, HEMBA1000141, HEMBA1000150, HEMBA1000185, HEMBA1000282, HEMBA1000304, HEMBA1000307, HEMBA1000338, HEMBA1000357, HEMBA1000376, HEMBA1000387, HEMBA1000392, HEMBA1000428, HEMBA1000456, HEMBA1000459, HEMBA1000469, HEMBA1000504, HEMBA1000508, HEMBA1000519, HEMBA1000540, HEMBA1000545, HEMBA1000557, HEMBA1000563, HEMBA1000568, HEMBA1000575, HEMBA1000588, HEMBA1000592, HEMBA1000604, HEMBA1000622, HEMBA1000655, HEMBA1000673, HEMBA1000682, HEMBA1000726, HEMBA1000727, HEMBA1000749, HEMBA1000769, HEMBA1000774, HEMBA1000791, HEMBA1000822, HEMBA1000872, HEMBA1000876, HEMBA1000910, HEMBA1000942, HEMBA1000943, HEMBA1000960, HEMBA1000972, HEMBA1000974, HEMBA1000991, HEMBA1001008, HEMBA1001020, HEMBA1001043, HEMBA1001051, HEMBA1001060, HEMBA1001071, HEMBA1001077, HEMBA1001085, HEMBA1001094, HEMBA1001109, HEMBA1001121, HEMBA1001122, HEMBA1001140, HEMBA1001172, HEMBA1001226, HEMBA1001235, HEMBA1001265, HEMBA1001281, HEMBA1001294, HEMBA1001299, HEMBA1001319, HEMBA1001323, HEMBA1001330, HEMBA1001351, HEMBA1001361, HEMBA1001377, HEMBA1001388, HEMBA1001391, HEMBA1001398, HEMBA1001432, HEMBA1001435, HEMBA1001442, HEMBA1001454, HEMBA1001455, HEMBA1001497, HEMBA1001517, HEMBA1001569, HEMBA1001570, HEMBA1001581, HEMBA1001585, HEMBA1001620, HEMBA1001711, HEMBA1001718, HEMBA1001723, HEMBA1001761, HEMBA1001815, HEMBA1001819, HEMBA1001861, HEMBA1001864, HEMBA1001869, HEMBA1001888, HEMBA1001915, HEMBA1001918, HEMBA1001940, HEMBA1001964, HEMBA1001967, HEMBA1001979, HEMBA1001987, HEMBA1001991, HEMBA1002008, HEMBA1002022, HEMBA1002039, HEMBA1002049, HEMBA1002084, HEMBA1002102, HEMBA1002113, HEMBA1002144, HEMBA1002160, HEMBA1002162, HEMBA1002185, HEMBA1002212, HEMBA1002226, HEMBA1002229, HEMBA1002267, HEMBA1002270, HEMBA1002337, HEMBA1002381, HEMBA1002458, HEMBA1002477, HEMBA1002508, HEMBA1002558, HEMBA1002561, HEMBA1002583, HEMBA1002590, HEMBA1002628, HEMBA1002645, HEMBA1002661, HEMBA1002678, HEMBA1002712, HEMBA1002728, HEMBA1002780, HEMBA1002850, HEMBA1002886, HEMBA1002934, HEMBA1002935, HEMBA1002939, HEMBA1002951, HEMBA1002968, HEMBA1002970, HEMBA1002973, HEMBA1002999, HEMBA1003021, HEMBA1003033, HEMBA1003034, HEMBA1003064, HEMBA1003067, HEMBA1003078, HEMBA1003086, HEMBA1003096, HEMBA1003129, HEMBA1003142, HEMBA1003148, HEMBA1003166, HEMBA1003175, HEMBA1003197, HEMBA1003199, HEMBA1003202, HEMBA1003204, HEMBA1003212, HEMBA1003235, HEMBA1003250, HEMBA1003273, HEMBA1003276, HEMBA1003278, HEMBA1003291, HEMBA1003309, HEMBA1003322, HEMBA1003328, HEMBA1003348, HEMBA1003369, HEMBA1003376, HEMBA1003384, HEMBA1003395, HEMBA1003463, HEMBA1003480, HEMBA1003531, HEMBA1003548, HEMBA1003591, HEMBA1003595, HEMBA1003597, HEMBA1003617, HEMBA1003621, HEMBA1003622, HEMBA1003637, HEMBA1003640, HEMBA1003645, HEMBA1003646, HEMBA1003656, HEMBA1003679, HEMBA1003692, HEMBA1003715, HEMBA1003720, HEMBA1003725, HEMBA1003729, HEMBA1003758, HEMBA1003803, HEMBA1003805, HEMBA1003836, HEMBA1003838, HEMBA1003879, HEMBA1003885, HEMBA1003893, HEMBA1003908, HEMBA1003937, HEMBA1003942, HEMBA1003953, HEMBA1003958, HEMBA1003959, HEMBA1003978, HEMBA1003987, HEMBA1003989, HEMBA1004000, HEMBA1004011, HEMBA1004012, HEMBA1004015, HEMBA1004024, HEMBA1004049, HEMBA1004056, HEMBA1004111, HEMBA1004132, HEMBA1004143, HEMBA1004164, HEMBA1004199, HEMBA1004200, HEMBA1004207, HEMBA1004225, HEMBA1004246, HEMBA1004248, HEMBA1004267, HEMBA1004289, HEMBA1004312, HEMBA1004323, HEMBA1004335, HEMBA1004353, HEMBA1004354, HEMBA1004356, HEMBA1004366, HEMBA1004396, HEMBA1004405, HEMBA1004429, HEMBA1004433, HEMBA1004460, HEMBA1004499, HEMBA1004502, HEMBA1004506, HEMBA1004534, HEMBA1004538, HEMBA1004573, HEMBA1004577, HEMBA1004586, HEMBA1004610, HEMBA1004629, HEMBA1004666, HEMBA1004669, HEMBA1004672, HEMBA1004709, HEMBA1004733, HEMBA1004736, HEMBA1004748, HEMBA1004751, HEMBA1004758, HEMBA1004763, HEMBA1004768, HEMBA1004770, HEMBA1004778, HEMBA1004803, HEMBA1004820, HEMBA1004847, HEMBA1004863, HEMBA1004880, HEMBA1004909, HEMBA1004918, HEMBA1004923, HEMBA1004930, HEMBA1004934, HEMBA1004944, HEMBA1004954, HEMBA1004980, HEMBA1005035, HEMBA1005039, HEMBA1005075, HEMBA1005079, HEMBA1005113, HEMBA1005123, HEMBA0051330, HEMBA1005149, HEMBA1005152, HEMBA1005219, HEMBA1005223, HEMBA1005232, HEMBA1005251, HEMBA1005274, HEMBA1005275, HEMBA1005304, HEMBA1005311, HEMBA1005314, HEMBA1005359, HEMBA1005367, HEMBA1005374, HEMBA1005410, HEMBA1005411, HEMBA1005423, HEMBA1005426, HEMBA1005443, HEMBA1005447, HEMBA1005474, HEMBA1005508, HEMBA1005511, HEMBA1005520, HEMBA1005526, HEMBA1005548, HEMBA1005552, HEMBA1005576, HEMBA1005581, HEMBA1005582, HEMBA1005583, HEMBA1005588, HEMBA1005595, HEMBA1005609, HEMBA1005616, HEMBA1005627, HEMBA1005631, HEMBA1005666, HEMBA1005670, HEMBA1005679, HEMBA1005699, HEMBA1005705, HEMBA1005765, HEMBA1005780, HEMBA1005822, HEMBA1005829, HEMBA1005834, HEMBA1005853, HEMBA1005891, HEMBA1005894, HEMBA1005911, HEMBA1005921, HEMBA1005991, HEMBA1005999, HEMBA1006036, HEMBA1006042, HEMBA1006100, HEMBA1006138, HEMBA1006142, HEMBA1006268, HEMBA1006278, HEMBA1006328, HEMBA1006344, HEMBA1006359, HEMBA1006398, HEMBA1006416, HEMBA1006419, HEMBA1006421, HEMBA1006426, HEMBA1006438, HEMBA1006483, HEMBA1006485, HEMBA1006502, HEMBA1006507, HEMBA1006546, HEMBA1006559, HEMBA1006562, HEMBA1006579, HEMBA1006597, HEMBA1006612, HEMBA1006617, HEMBA1006631, HEMBA1006635, HEMBA1006652, HEMBA1006695, HEMBA1006744, HEMBA1006754, HEMBA1006779, HEMBA1006780, HEMBA1006795, HEMBA1006821, HEMBA1006865, HEMBA1006926, HEMBA1006973, HEMBA1007017, HEMBA1007052, HEMBA1007080, HEMBA1007085, HEMBA1007113, HEMBA1007121, HEMBA1007147, HEMBA1007149, HEMBA1007206, HEMBA1007224, HEMBA1007256, HEMBA1007267, HEMBA1007288, HEMBA1007327, HEMBA1007341, HEMBA1007347,

[0209] HEMBB1000005, HEMBB1000008, HEMBB1000018, HEMBB1000024, HEMBB1000030, HEMBB1000039, HEMBB1000048, HEMBB1000054, HEMBB1000059, HEMBB1000083, HEMBB1000089, HEMBB1000099, HEMBB1000113, HEMBB1000141, HEMBB1000144, HEMBB1000173, HEMBB1000175, HEMBB1000215, HEMBB1000218, HEMBB1000258, HEMBB1000264, HEMBB1000272, HEMBB1000307, HEMBB1000338, HEMBB1000339, HEMBB1000343, HEMBB1000354, HEMBB1000374, HEMBB1000376, HEMBB1000420, HEMBB1000434, HEMBB1000441, HEMBB1000449, HEMBB1000490, HEMBB1000491, HEMBB1000523, HEMBB1000530, HEMBB1000550, HEMBB1000554, HEMBB1000573, HEMBB1000575, HEMBB1000593, HEMBB1000598, HEMBB1000638, HEMBB1000643, HEMBB1000649, HEMBB1000671, HEMBB1000684, HEMBB1000709, HEMBB1000726, HEMBB1000770, HEMBB1000774, HEMBB1000790, HEMBB1000835, HEMBB1000840, HEMBB1000848, HEMBB1000870, HEMBB1000883, HEMBB1000887, HEMBB1000890, HEMBB1000910, HEMBB1000917, HEMBB1000959, HEMBB1000985, HEMBB1000996, HEMBB1001004, HEMBB1001020, HEMBB1001024, HEMBB1001037, HEMBB1001060, HEMBB1001096, HEMBB1001104, HEMBB1001117, HEMBB1001142, HEMBB1001153, HEMBB1001177, HEMBB1001210, HEMBB1001218, HEMBB1001242, HEMBB1001267, HEMBB1001289, HEMBB1001346, HEMBB1001348, HEMBB1001364, HEMBB1001366, HEMBB1001369, HEMBB1001380, HEMBB1001387, HEMBB1001394, HEMBB1001426, HEMBB1001436, HEMBB1001454, HEMBB1001463, HEMBB1001521, HEMBB1001535, HEMBB1001537, HEMBB1001555, HEMBB1001585, HEMBB1001603, HEMBB1001619, HEMBB1001668, HEMBB1001685, HEMBB1001695, HEMBB1001704, HEMBB1001706, HEMBB1001707, HEMBB1001735, HEMBB1001747, HEMBB1001749, HEMBB1001760, HEMBB1001812, HEMBB1001816, HEMBB1001831, HEMBB1001836, HEMBB1001850, HEMBB1001863, HEMBB1001867, HEMBB1001908, HEMBB1001910, HEMBB1001911, HEMBB1001915, HEMBB1001921, HEMBB1001930, HEMBB1001944, HEMBB1001952, HEMBB1001957, HEMBB1001967, HEMBB1001988, HEMBB1001997, HEMBB1002005, HEMBB1002042, HEMBB1002043, HEMBB1002045, HEMBB1002049, HEMBB1002069, HEMBB1002094, HEMBB1002139, HEMBB1002152, HEMBB1002189, HEMBB1002217, HEMBB1002232, HEMBB1002249, HEMBB1002254, HEMBB1002266, HEMBB1002280, HEMBB1002306, HEMBB1002364, HEMBB1002371, HEMBB1002409, HEMBB1002425, HEMBB1002453, HEMBB1002492, HEMBB1002520, HEMBB1002556, HEMBB1002582, HEMBB1002590, HEMBB1002607, HEMBB1002614, HEMBB1002617, HEMBB1002623, HEMBB1002635, HEMBB1002677, HEMBB1002683, HEMBB1002684, HEMBB1002697, HEMBB1002699, HEMBB1002705,

[0210] MAMMA1000009, MAMMA1000043, MAMMA1000045, MAMMA1000084, MAMMA1000103, MAMMA1000134, MAMMA1000139, MAMMA1000143, MAMMA1000171, MAMMA1000241, MAMMA1000251, MAMMA1000254, MAMMA1000257, MAMMA1000264, MAMMA1000266, MAMMA1000270, MAMMA1000279, MAMMA1000287, MAMMA1000340, MAMMA1000348, MAMMA1000360, MAMMA1000361, MAMMA1000372, MAMMA1000385, MAMMA1000402, MAMMA1000424, MAMMA1000478, MAMMA1000500, MAMMA1000522, MAMMA1000524, MAMMA1000565, MAMMA1000567, MAMMA1000576, MAMMA1000585, MAMMA1000594, MAMMA1000597, MAMMA1000605, MAMMA1000616, MAMMA1000643, MAMMA1000664, MAMMA1000669, MAMMA1000696, MAMMA1000718, MAMMA1000723, MAMMA1000731, MAMMA1000744, MAMMA1000746, MAMMA1000752, MAMMA1000760, MAMMA1000761, MAMMA1000776, MAMMA1000802, MAMMA1000824, MAMMA1000839, MAMMA1000880, MAMMA1000905, MAMMA1000931, MAMMA1000940, MAMMA1000941, MAMMA1000943, MAMMA1000957, MAMMA1000962, MAMMA1000968, MAMMA1000987, MAMMA1000998, MAMMA1001003, MAMMA1001035, MAMMA1001038, MAMMA1001067, MAMMA1001078, MAMMA1001092, MAMMA1001126, MAMMA1001133, MAMMA1001139, MAMMA1001161, MAMMA1001186, MAMMA1001202, MAMMA1001206, MAMMA1001220, MAMMA1001243, MAMMA1001268, MAMMA1001274, MAMMA1001296, MAMMA1001298, MAMMA1001305, MAMMA1001343, MAMMA1001383, MAMMA1001397, MAMMA1001419, MAMMA1001420, MAMMA1001435, MAMMA1001442, MAMMA1001663, MAMMA1001670, MAMMA1001683, MAMMA1001692, MAMMA1001740, MAMMA1001745, MAMMA1001754, MAMMA1001768, MAMMA1001769, MAMMA1001783, MAMMA1001785, MAMMA1001806, MAMMA1001890, MAMMA1001907, MAMMA1001969, MAMMA1002009, MAMMA1002032, MAMMA1002056, MAMMA1002058, MAMMA1002125, MAMMA1002132, MAMMA1002140, MAMMA1002155, MAMMA1002158, MAMMA1002174, MAMMA1002198, MAMMA1002230, MAMMA1002293, MAMMA1002310, MAMMA1002311, MAMMA1002322, MAMMA1002339, MAMMA1002359, MAMMA1002384, MAMMA1002428, MAMMA1002434, MAMMA1002475, MAMMA1002494, MAMMA1002545, MAMMA1002573, MAMMA1002603, MAMMA1002619, MAMMA1002622, MAMMA1002623, MAMMA1002625, MAMMA1002662, MAMMA1002698, MAMMA1002701, MAMMA1002708, MAMMA1002721, MAMMA1002744, MAMMA1002764, MAMMA1002769, MAMMA1002820, MAMMA1002830, MAMMA1002833, MAMMA1002868, MAMMA1002871, MAMMA1002892, MAMMA1002895, MAMMA1002908, MAMMA1002909, MAMMA1002930, MAMMA1002941, MAMMA1002964, MAMMA1002970, MAMMA1002973, MAMMA1002987, MAMMA1003004, MAMMA1003040, MAMMA1003066, MAMMA1003089, NT2RM1000039, NT2RM1000672, NT2RM1000691, NT2RM1000725, NT2RM1000781, NT2RM1000829, NT2RM1000882, NT2RM1001105, NT2RM2000013, NT2RM2000374, NT2RM2000420, NT2RM2000452, NT2RM2000504, NT2RM2000609, NT2RM2000635, NT2RM2000735, NT2RM2000795, NT2RM2000821, NT2RM2001035, NT2RM2001105, NT2RM2001141, NT2RM2001177, NT2RM2001196, NT2RM2001306, NT2RM2001524, NT2RM2001582, NT2RM2001588, NT2RM2001592, NT2RM2001605, NT2RM2001632, NT2RM2001637, NT2RM2001648, NT2RM2001668, NT2RM2001671, NT2RM2001675, NT2RM2001681, NT2RM2001695, NT2RM2001699, NT2RM2001706, NT2RM2001723, NT2RM2001753, NT2RM2001771, NT2RM2001797, NT2RM2001840, NT2RM2001879, NT2RM2002049, NT2RM2002091, NT2RM4000265, NT2RM4000290, NT2RM4000324, NT2RM4000327, NT2RM4000368, NT2RM4000421, NT2RM4000425, NT2RM4000471, NT2RM4000486, NT2RM4000531, NT2RM4000532, NT2RM4000712, NT2RM4000751, NT2RM4000787, NT2RM4000790, NT2RM4000820, NT2RM4000852, NT2RM4000855, NT2RM4000895, NT2RM4000996, NT2RM4001002, NT2RM4001032, NT2RM4001047, NT2RM4001116, NT2RM4001151, NT2RM4001200, NT2RM4001313, NT2RM4001371, NT2RM4001410, NT2RM4001411, NT2RM4001437, NT2RM4001454, NT2RM4001483, NT2RM4001489, NT2RM4001522, NT2RM4001557, NT2RM4001566, NT2RM4001582, NT2RM4001650, NT2RM4001682, NT2RM4001746, NT2RM4001828, NT2RM4001842, NT2RM4001865, NT2RM4001922, NT2RM4001953, NT2RM4001979, NT2RM4002013, NT2RM4002067, NT2RM4002075, NT2RM4002093, NT2RM4002128, NT2RM4002140, NT2RM4002174, NT2RM4002205, NT2RM4002301, NT2RM4002323, NT2RM4002383, NT2RM4002409, NT2RM4002457, NT2RM4002499, NT2RM4002504, NT2RM4002558, NT2RM4002565, NT2RM4002594,

[0211] NT2RP1000018, NT2RP1000112, NT2RP1000124, NT2RP1000130, NT2RP1000170, NT2RP1000202, NT2RP1000259, NT2RP1000418, NT2RP1000493, NT2RP1000547, NT2RP1000574, NT2RP1000577, NT2RP1000630, NT2RP1000730, NT2RP1000782, NT2RP1000846, NT2RP1000856, NT2RP1000902, NT2RP1000943, NT2RP1000944, NT2RP1000988, NT2RP1100111, NT2RP1100113, NT2RP1001033, NT2RP1001173, NT2RP1001177, NT2RP1001185, NT2RP1001199, NT2RP1001286, NT2RP1001449, NT2RP1001475, NT2RP1001546, NT2RP2000032, NT2RP2000079, NT2RP2000091, NT2RP2000097, NT2RP2000120, NT2RP2000157, NT2RP2000195, NT2RP2000208, NT2RP2000224, NT2RP2000248, NT2RP2000257, NT2RP2000270, NT2RP2000274, NT2RP2000283, NT2RP2000288, NT2RP2000297, NT2RP2000298, NT2RP2000329, NT2RP2000369, NT2RP2000498, NT2RP2000634, NT2RP2000644, NT2RP2000656, NT2RP2000678, NT2RP2000715, NT2RP2000809, NT2RP2000932, NT2RP2000970, NT2RP2000987, NT2RP2001036, NT2RP2001081, NT2RP2001119, NT2RP2001127, NT2RP2001173, NT2RP2001268, NT2RP2001277, NT2RP2001290, NT2RP2001328, NT2RP2001366, NT2RP2001394, NT2RP2001420, NT2RP2001423, NT2RP2001427, NT2RP2001436, NT2RP2001440, NT2RP2001467, NT2RP2001506, NT2RP2001526, NT2RP2001601, NT2RP2001660, NT2RP2001678, NT2RP2001720, NT2RP2001861, NT2RP2001869, NT2RP2001876, NT2RP2001907, NT2RP2001926, NT2RP2001985, NT2RP2001991, NT2RP2002033, NT2RP2002041, NT2RP2002046, NT2RP2002078, NT2RP2002124, NT2RP2002193, NT2RP2002208, NT2RP2002256, NT2RP2002312, NT2RP2002316, NT2RP2002325, NT2RP2002333, NT2RP2002426, NT2RP2002457, NT2RP2002475, NT2RP2002520, NT2RP2002537, NT2RP2002595, NT2RP2002621, NT2RP2002672, NT2RP2002701, NT2RP2002706, NT2RP2002741, NT2RP2002750, NT2RP2002752, NT2RP2002769, NT2RP2002800, NT2RP2002925, NT2RP2002928, NT2RP2002959, NT2RP2002980, NT2RP2002987, NT2RP2003000, NT2RP2003034, NT2RP2003073, NT2RP2003099, NT2RP2003117, NT2RP2003129, NT2RP2003137, NT2RP2003157, NT2RP2003161, NT2RP2003165, NT2RP2003206, NT2RP2003230, NT2RP2003237, NT2RP2003243, NT2RP2003265, NT2RP2003272, NT2RP2003280, NT2RP2003293, NT2RP2003297, NT2RP2003339, NT2RP2003393, NT2RP2003394, NT2RP2003445, NT2RP2003456, NT2RP2003533, NT2RP2003559, NT2RP2003564, NT2RP2003596, NT2RP2003629, NT2RP2003691, NT2RP2003702, NT2RP2003760, NT2RP2003825, NT2RP2003859, NT2RP2003871, NT2RP2003976, NT2RP2003986, NT2RP2003988, NT2RP2004014, NT2RP2004081, NT2RP2004152, NT2RP2004187, NT2RP2004232, NT2RP2004239, NT2RP2004240, NT2RP2004321, NT2RP2004339, NT2RP2004400, NT2RP2004476, NT2RP2004538, NT2RP2004551, NT2RP2004580, NT2RP2004602, NT2RP2004675, NT2RP2004681, NT2RP2004689, NT2RP2004709, NT2RP2004710, NT2RP2004736, NT2RP2004743, NT2RP2004767, NT2RP2004775, NT2RP2004802, NT2RP2004861, NT2RP2004933, NT2RP2004961, NT2RP2004962, NT2RP2004967, NT2RP2004982, NT2RP2004985, NT2RP2005003, NT2RP2005038, NT2RP2005227, NT2RP2005276, NT2RP2005287, NT2RP2005289, NT2RP2005315, NT2RP2005436, NT2RP2005441, NT2RP2005453, NT2RP2005465, NT2RP2005476, NT2RP2005496, NT2RP2005509, NT2RP2005525, NT2RP2005540, NT2RP2005555, NT2RP2005581, NT2RP2005669, NT2RP2005719, NT2RP2005722, NT2RP2005767, NT2RP2005773, NT2RP2005853, NT2RP2005886, NT2RP2005901, NT2RP2005942, NT2RP2005980, NT2RP2006023, NT2RP2006043, NT2RP2006071, NT2RP2006166, NT2RP2006196, NT2RP2006237, NT2RP2006312, NT2RP2006320, NT2RP2006365, NT2RP2006393, NT2RP2006436, NT2RP2006441, NT2RP2006467, NT2RP2006554, NT2RP2006565, NT2RP2006598,

[0212] NT2RP3000002, NT2RP3000050, NT2RP3000072, NT2RP3000109, NT2RP3000134, NT2RP3000197, NT2RP3000341, NT2RP3000359, NT2RP3000366, NT2RP3000403, NT2RP3000418, NT2RP3000433, NT2RP3000441, NT2RP3000526, NT2RP3000531, NT2RP3000542, NT2RP3000561, NT2RP3000562, NT2RP3000603, NT2RP3000605, NT2RP3000644, NT2RP3000759, NT2RP3000815, NT2RP3000825, NT2RP3000836, NT2RP3000847, NT2RP3000850, NT2RP3000865, NT2RP3000901, NT2RP3000968, NT2RP3001007, NT2RP3001057, NT2RP3001120, NT2RP3001126, NT2RP3001140, NT2RP3001214, NT2RP3001216, NT2RP3001236, NT2RP3001245, NT2RP3001253, NT2RP3001260, NT2RP3001268, NT2RP3001274, NT2RP3001281, NT2RP3001297, NT2RP3001355, NT2RP3001356, NT2RP3001383, NT2RP3001396, NT2RP3001407, NT2RP3001420, NT2RP3001428, NT2RP3001449, NT2RP3001453, NT2RP3001472, NT2RP3001490, NT2RP3001495, NT2RP3001497, NT2RP3001527, NT2RP3001554, NT2RP3001589, NT2RP3001642, NT2RP3001679, NT2RP3001688, NT2RP3001712, NT2RP3001752, NT2RP3001782, NT2RP3001799, NT2RP3001844, NT2RP3001926, NT2RP3001989, NT2RP3002002, NT2RP3002004, NT2RP3002033, NT2RP3002056, NT2RP3002062, NT2RP3002102, NT2RP3002142, NT2RP3002173, NT2RP3002248, NT2RP3002304, NT2RP3002343, NT2RP3002484, NT2RP3002529, NT2RP3002545, NT2RP3002549, NT2RP3002682, NT2RP3002687, NT2RP3002713, NT2RP3002876, NT2RP3002877, NT2RP3002972, NT2RP3003032, NT2RP3003133, NT2RP3003139, NT2RP3003145, NT2RP3003157, NT2RP3003193, NT2RP3003204, NT2RP3003210, NT2RP3003212, NT2RP3003251, NT2RP3003264, NT2RP3003282, NT2RP3003290, NT2RP3003301, NT2RP3003313, NT2RP3003346, NT2RP3003403, NT2RP3003500, NT2RP3003543, NT2RP3003576, NT2RP3003672, NT2RP3003828, NT2RP3003831, NT2RP3003992, NT2RP3004041, NT2RP3004093, NT2RP3004155, NT2RP3004209, NT2RP3004215, NT2RP3004246, NT2RP3004332, NT2RP3004348, NT2RP3004349, NT2RP3004470, NT2RP3004472, NT2RP3004480, NT2RP3004490, NT2RP3004503, NT2RP3004566, NT2RP3004569, NT2RP3004572, NT2RP4000035, NT2RP4000147, NT2RP4000167, NT2RP4000212, NT2RP4000214, NT2RP4000259, NT2RP4000360, NT2RP4000381, NT2RP4000398, NT2RP4000424, NT2RP4000448, NT2RP4000455, NT2RP4000517, NT2RP4000519, NT2RP4000524, NT2RP4000614, NT2RP4000728, NT2RP4000737, NT2RP4000817, NT2RP4000865, NT2RP4001079, NT2RP4001122, NT2RP4001150, NT2RP4001174, NT2RP4001274, NT2RP4001353, NT2RP4001447, NT2RP4001507, NT2RP4001547, NT2RP4001677, NT2RP4001679, NT2RP4001730, NT2RP4001803, NT2RP4001889, NT2RP4001946, NT2RP4001953, NT2RP4002018, NT2RP4002071, NT2RP4002791, NT2RP5003461,

[0213] OVARC1000058, OVARC1000091, OVARC1000092, OVARC1000113, OVARC1000114, OVARC1000145, OVARC1000168, OVARC1000198, OVARC1000321, OVARC1000335, OVARC1000384, OVARC1000408, OVARC1000414, OVARC1000442, OVARC1000443, OVARC1000486, OVARC1000520, OVARC1000526, OVARC1000556, OVARC1000557, OVARC1000573, OVARC1000578, OVARC1000588, OVARC1000622, OVARC1000679, OVARC1000682, OVARC1000700, OVARC1000703, OVARC1000746, OVARC1000769, OVARC1000800, OVARC1000846, OVARC1000862, OVARC1000885, OVARC1000924, OVARC1000936, OVARC1000959, OVARC1000960, OVARC1000971, OVARC1000984, OVARC1000996, OVARC1000999, OVARC1001000, OVARC1001004, OVARC1001032, OVARC1001034, OVARC1001040, OVARC1001044, OVARC1001092, OVARC1001117, OVARC1001118, OVARC1001154, OVARC1001161, OVARC1001170, OVARC1001173, OVARC1001200, OVARC1001240, OVARC1001268, OVARC1001271, OVARC1001329, OVARC1001341, OVARC1001344, OVARC1001376, OVARC1001381, OVARC1001436, OVARC1001476, OVARC1001489, OVARC11001525, OVARC11001542, OVARC1001547, OVARC1001668, OVARC1001745, OVARC1001767, OVARC1001802, OVARC1001812, OVARC1001820, OVARC1001873, OVARC1001883, OVARC1001949, OVARC1001987, OVARC1001989, OVARC1002044, OVARC1002082, OVARC1002107, OVARC1002138, OVARC1002165,

[0214] PLACE1000014, PLACE1000031, PLACE1000040, PLACE1000048, PLACE1000078, PLACE1000184, PLACE1000246, PLACE1000292, PLACE1000332, PLACE1000347, PLACE1000424, PLACE1000435, PLACE1000444, PLACE1000540, PLACE1000547, PLACE1000562, PLACE1000583, PLACE1000599, PLACE1000706, PLACE1000712, PLACE1000755, PLACE1000793, PLACE1000798, PLACE1000979, PLACE1001000, PLACE1001010, PLACE1001062, PLACE1001088, PLACE1001118, PLACE1001136, PLACE1001238, PLACE1001257, PLACE1001280, PLACE1001294, PLACE1001304, PLACE1001311, PLACE1001323, PLACE1001366, PLACE1001384, PLACE1001395, PLACE1001399, PLACE1001456, PLACE1001484, PLACE1001503, PLACE1001570, PLACE1001603, PLACE1001608, PLACE1001610, PLACE1001632, PLACE1001634, PLACE1001691, PLACE1001720, PLACE1001746, PLACE1001760, PLACE1001821, PLACE1001844, PLACE1001845, PLACE1001897, PLACE1001912, PLACE1001989, PLACE1002004, PLACE1002066, PLACE1002072, PLACE1002119, PLACE1002150, PLACE1002157, PLACE1002205, PLACE1002256, PLACE1002259, PLACE1002342, PLACE1002438, PLACE1002450, PLACE1002474, PLACE1002477, PLACE1002499, PLACE1002500, PLACE1002537, PLACE1002578, PLACE1002655, PLACE1002665, PLACE1002722, PLACE1002815, PLACE1002834, PLACE1002851, PLACE1002881, PLACE1002968, PLACE1002993, PLACE1003027, PLACE1003108, PLACE1003174, PLACE1003200, PLACE1003205, PLACE1003249, PLACE1003256, PLACE1003302, PLACE1003334, PLACE1003343, PLACE1003361, PLACE1003373, PLACE1003394, PLACE1003420, PLACE1003516, PLACE1003519, PLACE1003575, PLACE1003584, PLACE1003592, PLACE1003593, PLACE1003638, PLACE1003669, PLACE1003704, PLACE1003723, PLACE1003760, PLACE1003762, PLACE1003768, PLACE1003771, PLACE1003795, PLACE1003833, PLACE1003870, PLACE1003892, PLACE1003915, PLACE1003968, PLACE1004103, PLACE1004149, PLACE1004156, PLACE1004256, PLACE1004277, PLACE1004284, PLACE1004384, PLACE1004425, PLACE1004467, PLACE1004471, PLACE1004473, PLACE1004510, PLACE1004629, PLACE1004658, PLACE1004672, PLACE1004686, PLACE1004751, PLACE1004777, PLACE1004814, PLACE1004815, PLACE1004824, PLACE1004827, PLACE1004836, PLACE1004840, PLACE1004885, PLACE1004972, PLACE1004979,

[0215] PLACE1005027, PLACE1005046, PLACE1005055, PLACE1005085, PLACE1005102, PLACE1005108, PLACE1005128, PLACE1005146, PLACE1005266, PLACE1005305, PLACE1005374, PLACE1005409, PLACE1005453, PLACE1005477, PLACE1005481, PLACE1005528, PLACE1005574, PLACE1005666, PLACE1005763, PLACE1005804, PLACE1005828, PLACE1005834, PLACE1005850, PLACE1005851, PLACE1005934, PLACE1006002, PLACE1006076, PLACE1006119, PLACE1006143, PLACE1006159, PLACE1006164, PLACE1006170, PLACE1006187, PLACE1006223, PLACE1006239, PLACE1006248, PLACE1006412, PLACE1006445, PLACE1006482, PLACE1006492, PLACE1006521, PLACE1006540, PLACE1006617, PLACE1006629, PLACE1006673, PLACE1006704, PLACE1006760, PLACE1006792, PLACE1006795, PLACE1006800, PLACE1006860, PLACE1006904, PLACE1006961, PLACE1006962, PLACE1007045, PLACE1007274, PLACE1007346, PLACE1007367, PLACE1007375, PLACE1007386, PLACE1007416, PLACE1007450, PLACE1007454, PLACE1007478, PLACE1007484, PLACE1007544, PLACE1007547, PLACE1007557, PLACE1007598, PLACE1007645, PLACE1007677, PLACE1007743, PLACE1007807, PLACE1007829, PLACE1007858, PLACE1008002, PLACE1008129, PLACE1008132, PLACE1008201, PLACE1008209, PLACE1008273, PLACE1008368, PLACE1008532, PLACE1008568, PLACE1008696, PLACE1008867, PLACE1008887, PLACE1008941, PLACE1009027, PLACE1009039, PLACE1009050, PLACE1009099, PLACE1009155, PLACE1009172, PLACE1009174, PLACE1009298, PLACE1009328, PLACE1009335, PLACE1009338, PLACE1009388, PLACE1009444, PLACE1009595, PLACE1009596, PLACE1009607, PLACE1009621, PLACE1009637, PLACE1009665, PLACE1009708, PLACE1009798, PLACE1009861, PLACE1009886, PLACE1009971, PLACE1009995, PLACE1010089, PLACE1010102, PLACE1010106, PLACE1010152, PLACE1010383, PLACE1010491, PLACE1010616, PLACE1010630, PLACE1010631, PLACE1010702, PLACE1010739, PLACE1010761, PLACE1010833, PLACE1010870, PLACE1010896, PLACE1010916, PLACE1010925, PLACE1010942, PLACE1010954, PLACE1010965, PLACE1011041, PLACE1011046, PLACE1011054, PLACE1011057, PLACE1011090, PLACE1001109, PLACE1011203, PLACE1011214, PLACE1011296, PLACE1011340, PLACE1011433, PLACE1011452, PLACE1011567, PLACE1011576, PLACE1011643, PLACE1011675, PLACE1011719, PLACE1011729, PLACE1011749, PLACE1011762, PLACE1011783, PLACE1011874, PLACE1011995,

[0216] PLACE2000017, PLACE2000021, PLACE2000033, PLACE2000039, PLACE2000047, PLACE2000062, PLACE2000103, PLACE2000124, PLACE2000170, PLACE2000216, PLACE2000235, PLACE2000264, PLACE2000302, PLACE2000305, PLACE2000335, PLACE2000342, PLACE2000347, PLACE2000379, PLACE2000394, PLACE2000433, PLACE2000450, PLACE2000465, PLACE3000103, PLACE3000119, PLACE3000121, PLACE3000124, PLACE3000155, PLACE3000158, PLACE3000207, PLACE3000220, PLACE3000242, PLACE3000271, PLACE3000304, PLACE3000322, PLACE3000331, PLACE3000341, PLACE3000362, PLACE3000365, PLACE3000388, PLACE3000399, PLACE3000400, PLACE3000401, PLACE3000402, PLACE3000425, PLACE3000455, PLACE4000034, PLACE4000049, PLACE4000089, PLACE4000128, PLACE4000156, PLACE4000222, PLACE4000250, PLACE4000320, PLACE4000379, PLACE4000431, PLACE4000445, PLACE4000465, PLACE4000487, PLACE4000494, PLACE4000522, PLACE4000558, PLACE4000581, PLACE4000650, PLACE4000654,

[0217] THYRO1000034, THYRO1000085, THYRO1000092, THYRO1000011, THYRO1000156, THYRO1000163, THYRO1000173, THYRO1000190, THYRO1000197, THYRO1000221, THYRO1000241, THYRO1000327, THYRO1000381, THYRO1000387, THYRO1000394, THYRO1000488, THYRO1000585, THYRO1000625, THYRO1000637, THYRO1000658, THYRO1000666, THYRO1000676, THYRO1000684, THYRO1000712, THYRO1000734, THYRO1000793, THYRO1000796, THYRO1000805, THYRO1000815, THYRO1000865, THYRO1000916, THYRO1000934, THYRO1000974, THYRO1000975, THYRO1001031, THYRO1001062, THYRO1001093, THYRO1001133, THYRO1001173, THYRO1001177, THYRO1001189, THYRO1001204, THYRO1001213, THYRO1001262, THYRO1001290, THYRO1001320, THYRO1001322, THYRO1001401, THYRO1001406, THYRO1001426, THYRO1001480, THYRO1001487, THYRO1001537, THYRO1001595, THYRO1001617, THYRO1001637, THYRO1001706, THYRO1001772, THYRO1001828, THYRO1001854, Y79AA1000059, Y79AA1000214, Y79AA1000355, Y79AA1000410, Y79AA1000538, Y79AA1000539, Y79AA1000705, Y79AA1000800, Y79AA1000850, Y79AA1000962, Y79AA1000976, Y79AA1001061, Y79AA1001068, Y79AA1001493, Y79AA1001548, Y79AA1001585, Y7-9AA1001594, Y79AA1001696, Y79AA1001711, Y79AA1002103, Y79AA1002115, Y79AA1002258, Y79AA1002361, Y79AA1002407, Y79AA1002472, Y79AA1002482

[0218] On the other hand, clones of which expression levels decreased by RA are as follows:

[0219] HEMBA1000946, HEMBA1003569, HEMBA1005570, HEMBB1000915, NT2RM1000666, NT2RM2000092, NT2RM2000594, NT2RM2001256, NT2RM4001754, NT2RM4001905, NT2RP2001675, NT2RP2002047, NT2RP2005491, NT2RP3000980, NT2RP3002081, NT2RP3004594, NT2RP4001950, NT2RP4002408, OVARC1000431, OVARC1001942, OVARC1001943, PLACE1003190, PLACE1004868, PLACE1005923, PLACE1007257, PLACE1010624, Y79AA1000346

[0220] Clones of which expression levels increase by RA/inhibitor are as follows:

[0221] HEMBA1000046, HEMBA1000307, HEMBA1000434, HEMBA1000504, HEMBA1000588, HEMBA1000682, HEMBA1000726, HEMBA1000943, HEMBA1001071, HEMBA1001094, HEMBA1001122, HEMBA1001323, HEMBA1001361, HEMBA1001455, HEMBA1001709, HEMBA1001746, HEMBA1001869, HEMBA1002084, HEMBA1002583, HEMBA1002628, HEMBA1002801, HEMBA1002937, HEMBA1003096, HEMBA1003142, HEMBA1003229, HEMBA1003276, HEMBA1003309, HEMBA1003463, HEMBA1003597, HEMBA1003617, HEMBA1003725, HEMBA1003803, HEMBA1003879, HEMBA1003989, HEMBA1004000, HEMBA1004015, HEMBA1004024, HEMBA1004049, HEMBA1004056, HEMBA1004199, HEMBA1004248, HEMBA1004356, HEMBA1004554, HEMBA1004666, HEMBA1004725, HEMBA1004770, HEMBA1004803, HEMBA1004923, HEMBA1004934, HEMBA1004954, HEMBA1005039, HEMBA1005075, HEMBA1005113, HEMBA1005219, HEMBA1005232, HEMBA1005251, HEMBA1005304, HEMBA1005367, HEMBA1005372, HEMBA1005403, HEMBA1005410, HEMBA1005411, HEMBA1005548, HEMBA1005581, HEMBA1005631, HEMBA1005666, HEMBA1005755, HEMBA1005780, HEMBA1006067, HEMBA1006130, HEMBA1006364, HEMBA1006485, HEMBA1006559, HEMBA1006579, HEMBA1006754, HEMBB1000059, HEMBB1600575, HEMBB1000709, HEMBB1000822, HEMBB1000848, HEMBB1000852, HEMBB1000913, HEMBB1000985, HEMBB1001117, HEMBB1001210, HEMBB1001317, HEMBB1001394, HEMBB1001443, HEMBB1001668, HEMBB1001695, HEMBB1002049, HEMBB1002254, HEMBB1002266, HEMBB1002371, HEMBB1002502, HEMBB1002614, HEMBB1002617, HEMBB1002692, HEMBB1002697, MAMMA1000241, MAMMA1000424, MAMMA1000616, MAMMA1000731, MAMMA1000824, MAMMA1000908, MAMMA1000956, MAMMA1001038, MAMMA1001091, MAMMA1001243, MAMMA1001815, MAMMA1001820, MAMMA1002267, MAMMA1002769, MAMMA1002871, MAMMA1002941,

[0222] NT2RM1000355, NT2RM1000725, NT2RM1000829, NT2RM1000850, NT2RM1000898, NT2RM2000504, NT2RM2000635, NT2RM2000718, NT2RM2000821, NT2RM2001370, NT2RM2001582, NT2RM2001592, NT2RM2001613, NT2RM2001632, NT2RM2001635, NT2RM2001648, NT2RM2001659, NT2RM2001671, NT2RM2001695, NT2RM2001760, NT2RM2001782, NT2RM2001839, NT2RM2001879, NT2RM2001983, NT2RM4000104, NT2RM4000290, NT2RM4000425, NT2RM4000433, NT2RM4000471, NT2RM4000531, NT2RM4000852, NT2RM4001047, NT2RM4001347, NT2RM4001454, NT2RM4001557, NT2RM4001566, NT2RM4001582, NT2RM4001938, NT2RM4001953, NT2RM4002018, NT2RM4002409, NT2RM4002558, NT2RM4002594, NT2RP1000259, NT2RP1000418, NT2RP1000574, NT2RP1000629, NT2RP1000782, NT2RP1000856, NT2RP1000943, NT2RP1000988, NT2RP1100113, NT2RP1001173, NT2RP1001546, NT2RP2000091, NT2RP2000208, NT2RP2000274, NT2RP2000329, NT2RP2000369, NT2RP2000634, NT2RP2000842, NT2RP2000943, NT2RP2000987, NT2RP2001094, NT2RP2001277, NT2RP2001290, NT2RP2001366, NT2RP2001423, NT2RP2001436, NT2RP2001467, NT2RP2001506, NT2RP2001601, NT2RP2001663, NT2RP2001926, NT2RP2001985, NT2RP2002032, NT2RP2002041, NT2RP2002046, NT2RP2002078, NT2RP2002124, NT2RP2002185, NT2RP2002193, NT2RP2002312, NT2RP2002316, NT2RP2002426, NT2RP2002457, NT2RP2002475, NT2RP2002520, NT2RP2002595, NT2RP2002643, NT2RP2002672, NT2RP2002701, NT2RP2002710, NT2RP2002727, NT2RP2003099, NT2RP2003121, NT2RP2003137, NT2RP2003158, NT2RP2003206, NT2RP2003230, NT2RP2003272, NT2RP2003280, NT2RP2003347, NT2RP2003393, NT2RP2003401, NT2RP2003445, NT2RP2003456, NT2RP2003511, NT2RP2003517, NT2RP2003543, NT2RP2003596, NT2RP2003706, NT2RP2003871, NT2RP2004681, NT2RP2004743, NT2RP2004775, NT2RP2004933, NT2RP2004967, NT2RP2005003, NT2RP2005270, NT2RP2005289, NT2RP2005344, NT2RP2005453, NT2RP2005555, NT2RP2005767, NT2RP2005853, NT2RP2006043, NT2RP2006393, NT2RP2006436, NT2RP2006441, NT2RP2006467, NT2RP2006534, NT2RP2006565, NT2RP3000348, NT2RP3000359, NT2RP3000366, NT2RP3000403, NT2RP3000418, NT2RP3000441, NT2RP3000561, NT2RP3000759, NT2RP3000826, NT2RP3001007, NT2RP3001096, NT2RP3001126, NT2RP3001355, NT2RP3001396, NT2RP3001449, NT2RP3001490, NT2RP3001679, NT2RP3001727, NT2RP3001752, NT2RP3001777, NT2RP3001782, NT2RP3001799, NT2RP3001854, NT2RP3001989, NT2RP3002142, NT2RP3002248, NT2RP3002343, NT2RP3002484, NT2RP3002529, NT2RP3002549, NT2RP3002628, NT2RP3002687, NT2RP3002688, NT2RP3002810, NT2RP3003032, NT2RP3003139, NT2RP3003193, NT2RP3003203, NT2RP3003204, NT2RP3003210, NT2RP3003212, NT2RP3003264, NT2RP3003282, NT2RP3003500, NT2RP3004041, NT2RP3004215, NT2RP4000147, NT2RP4000259, NT2RP4000360, NT2RP4000448, NT2RP4000524, NT2RP4000588, NT2RP4000879, NT2RP4000907, NT2RP4000989, NT2RP4001079, NT2RP4001150, NT2RP4001219, NT2RP4001260, NT2RP4001274, NT2RP4001353, NT2RP4001547, NT2RP4001677, NT2RP4002052, OVARC1000006, OVARC1000092, OVARC1000321, OVARC1000384, OVARC1000408, OVARC1000414, OVARC1000520, OVARC1000526, OVARC1000588, OVARC1000679, OVARC1000682, OVARC1000769, OVARC1000850, OVARC1000862, OVARC1000886, OVARC1000984, OVARC1001000, OVARC1001004, OVARC1001154, OVARC1001170, OVARC1001173, OVARC1001200, OVARC1001268, OVARC1001376, OVARC1001419, OVARC1001425, OVARC1001476, OVARC1001480, OVARC1001542, OVARC1001873, OVARC1001928, OVARC1001987, OVARC1002066, OVARC1002082, OVARC1002112, OVARC1002127,

[0223] PLACE1000014, PLACE1000048, PLACE1000184, PLACE1000185, PLACE1000246, PLACE1000292, PLACE1000332, PLACE1000347, PLACE1000564, PLACE1000656, PLACE1000712, PLACE1001000, PLACE1001168, PLACE1001185, PLACE1001241, PLACE1001294, PLACE1001311, PLACE1001395, PLACE1001570, PLACE1001608, PLACE1001610, PLACE1001716, PLACE1001746, PLACE1001817, PLACE1001821, PLACE1001844, PLACE1001897, PLACE1002066, PLACE1002119, PLACE1002157, PLACE1002205, PLACE1002256, PLACE1002259, PLACE1002399, PLACE1002438, PLACE1002474, PLACE1002477, PLACE1002500, PLACE1002514, PLACE1002578, PLACE1002815, PLACE1002851, PLACE1002968, PLACE1003108, PLACE1003174, PLACE1003200, PLACE1003238, PLACE1003256, PLACE1003334, PLACE1003342, PLACE1003516, PLACE1003521, PLACE1003537, PLACE1003592, PLACE1003596, PLACE1003723, PLACE1003760, PLACE1003771, PLACE1003783, PLACE1003795, PLACE1003892, PLACE1003968, PLACE1004103, PLACE1004256, PLACE1004405, PLACE1004460, PLACE1004506, PLACE1004629, PLACE1004674, PLACE1004813, PLACE1004979, PLACE1005066, PLACE1005101, PLACE1005102, PLACE1005128, PLACE1005181, PLACE1005287, PLACE1005305, PLACE1005327, PLACE1005477, PLACE1005595, PLACE1005603, PLACE1005666, PLACE1005804, PLACE1005884, PLACE1005934, PLACE1006076, PLACE1006119, PLACE1006159, PLACE1006164, PLACE1006170, PLACE1006382, PLACE1006492, PLACE1006629, PLACE1006704, PLACE1006731, PLACE1006760, PLACE1006779, PLACE1006795, PLACE1006805, PLACE1006962, PLACE1007045, PLACE1007111, PLACE1007282, PLACE1007386, PLACE1007416, PLACE1007484, PLACE1007544, PLACE1007645, PLACE1007743, PLACE1007746, PLACE1007807, PLACE1007858, PLACE1008002, PLACE1008181, PLACE1008273, PLACE1008368, PLACE1008405, PLACE1008532, PLACE1008568, PLACE1008625, PLACE1008696, PLACE1008867, PLACE1009027, PLACE1009039, PLACE1009045, PLACE1009110, PLACE1009298, PLACE1009328, PLACE1009581, PLACE1009621, PLACE1009622, PLACE1009637, PLACE1009925, PLACE1009935, PLACE1010089, PLACE1010106, PLACE1010152, PLACE1010274, PLACE1010491, PLACE1010629, PLACE1010630, PLACE1010714, PLACE1010739, PLACE1010891, PLACE1010896, PLACE1010925, PLACE1010965, PLACE1011026, PLACE1011046, PLACE1011214, PLACE1011399, PLACE1011433, PLACE1011492, PLACE1011641, PLACE1011649, PLACE1011719, PLACE1011762, PLACE1011858, PLACE1011923, PLACE2000014, PLACE2000039, PLACE2000216, PLACE2000302, PLACE2000317, PLACE2000342, PLACE2000347, PLACE2000379, PLACE3000121, PLACE3000124, PLACE3000160, PLACE3000242, PLACE3000271, PLACE3000353, PLACE3000362, PLACE3000365, PLACE3000400, PLACE3000401, PLACE4000034, PLACE4000089, PLACE4000522, PLACE4000558,

[0224] SKNMC1000050, THYRO1000040, THYRO1000197, THYRO1000241, THYRO1000327, THYRO1000394, THYRO1000488, THYRO1000501, THYRO1000585, THYRO1000596, THYRO1000625, THYRO1000805, THYRO1000934, THYRO1001133, THYRO1001134, THYRO1001173, THYRO1001213, THYRO1001262, THYRO1001290, THYRO1001721, Y79AA1000037, Y79AA1000800, Y79AA1000976, Y79AA1001078, Y79AA1001228, Y79AA1001299, Y79AA1001402, Y79AA1001585, Y79AA1001696, Y79AA1001711, Y79AA1001827, Y79AA1001875, Y79AA1002027, Y79AA1002211, Y79AA1002234, Y79AA1002258

[0225] On the other hand, clones of which expression levels decrease by RA/inhibitor are as follows:

[0226] HEMBA1000012, HEMBA1000501, HEMBA1000946, HEMBA1003220, HEMBA1003403, HEMBA1003569, HEMBA1003591, HEMBA1003926, HEMBA1004168, HEMBA1004507, HEMBA1005009, HEMBA1005296, HEMBA1005528, HEMBA1005570, HEMBA1006467, HEMBA1006486, HEMBA1006492, HEMBA1007322, HEMBB1000055, HEMBB1000244, HEMBB1001665, MAMMA1000684, MAMMA1001139, MAMMA1001743, NT2RM1000257, NT2RM1000318, NT2RM1000539, NT2RM1000666, NT2RM2000092, NT2RM2000192, NT2RM2000371, NT2RM2000594, NT2RM4000511, NT2RM4001140, NT2RM4001754, NT2RM4001905, NT2RM4001940, NT2RM4002593, NT2RP1000086, NT2RP1000439, NT2RP1001073, NT2RP2000098, NT2RP2000965, NT2RP2001397, NT2RP2002047, NT2RP2004226, NT2RP2004396, NT2RP2004655, NT2RP2005126, NT2RP2005464, NT2RP2005712, NT2RP2005859, NT2RP2005890, NT2RP3000980, NT2RP3001383, NT2RP3001621, NT2RP3002081, NT2RP3002181, NT2RP3002244, NT2RP3002590, NT2RP3003059, NT2RP3004258, NT2RP3004378, NT2RP3004527, NT2RP3004594, NT2RP4001760, NT2RP4001950, NT2RP4002047, NT2RP4002408, NT2RP5003459, OVARC1000004, OVARC1000035, OVARC1000431, OVARC1001051, OVARC1001129, OVARC1001176, OVARC1001261, OVARC1001342, OVARC1001942, OVARC11001943, PLACE1002171, PLACE1002465, PLACE1003190, PLACE1003375, PLACE1004128, PLACE1005026, PLACE1005876, PLACE1005923, PLACE1007257, PLACE1007375, PLACE1007507, PLACE1008941, PLACE1010624, PLACE1011090, PLACE1011219, THYRO1000270, Y79AA1000346, Y79AA1001541

[0227] These clones are also associated with neural differentiation and, therefore, are candidates for genes associated with neurological diseases.

[0228] For example, if the protein encoded by the cDNA of the present invention is a regulatory factor of cellular conditions such as growth and differentiation, it can be used for developing medicines as follows. The protein or antibody provided by the invention is injected into a certain kind of cells by microinjection. Then, using the cells, it is possible to screen low molecular weight compounds by measuring the change in the cellular conditions, or the activation or inhibition of a particular gene. The screening can be performed as follows. First, the protein is expressed and purified as recombinant. The purified protein is microinjected into cells such as various cell lines, or primary culture cells, and the cellular change such as growth and differentiation can be examined. Alternatively, the induction of genes whose expression is known to be associated with a particular change of cellular conditions may be detected by the amount of mRNA or protein. Or, the amount of intracellular molecules (low molecular weight compounds, etc.) that is changed by the function of the gene product (protein) which is known to be associated with a particular change of cellular conditions may be detected. The compounds to be screened (both low and high molecular compounds are acceptable) can be added to the culture media and assessed for their activity by measuring the change of the cellular conditions. Instead of microinjection, cell lines introduced with the gene obtained in the invention can be used for the screening. If the gene product is turn out to be associated with a particular change in the cellular conditions, the change of the product can be used as a measurement for screening. Once a compound is screened out which can activate or inhibit the function of the protein of the invention, it can be applied for developing medicines.

[0229] If the protein encoded by the cDNA of the present invention is a secretory protein, membrane protein, or protein associated with signal transduction, glycoprotein, transcription, or diseases, it can be used in functional assays for developing medicines.

[0230] In case of a membrane protein, it is most likely to be a protein that functions as a receptor or ligand on the cell surface. Therefore, it is possible to reveal a new relationship between a ligand and receptor by screening the membrane protein of the invention based on the binding activity with the known ligand or receptor. Screening can be performed according to the known methods.

[0231] For example, a ligand against the protein of the invention can be screened in the following manner. Namely, a ligand that binds to a specific protein can be screened by a method comprising the steps of: (a) contacting a test sample with the protein of the invention or a partial peptide thereof, or cells expressing these, and (b) selecting a test sample that binds to said protein, said partial peptide, or said cells.

[0232] On the other hand, for example, screening using cells expressing the protein of the present invention that is a receptor protein can also be performed as follows. It is possible to screen receptors that is capable of binding to a specific protein by using procedures (a) attaching the sample cells to the protein of the invention or its partial peptide, and (b) selecting cells that can bind to the said protein or its partial peptide.

[0233] In a following screening as an example, first the protein of the invention is expressed, and the recombinant protein is purified. Next, the purified protein is labeled, binding assay is performed using a various cell lines or primary cultured cells, and cells that are expressing a receptor are selected (Growth and differentiation factors and their receptors, Shin-Seikagaku Jikken Kouza Vol. 7 (1991) Honjyo, Arai, Taniguchi, and Muramatsu edit, p 203-236, Tokyo-Kagaku-Doujin). A protein of the invention can be labeled with RI such as ¹²⁵I, and enzyme (alkaline phosphatase etc.). Alternatively, a protein of the invention may be used without labeling and then detected by using a labeled antibody against the protein. The cells that are selected by the above screening methods, which express a receptor of the protein of the invention, can be used for the further screening of an agonists or antagonists of the said receptor.

[0234] Once the ligand binding to the protein of the invention, the receptor of the protein of the invention or the cells expressing the receptor are obtained by screening, it is possible to screen a compound that binds to the ligand and receptor. Also it is possible to screen a compound that can inhibit both bindings (agonists or antagonists of the receptor, for example) by utilizing the binding activities.

[0235] When the protein of the invention is a receptor, the screening method comprises the steps of (a) contacting the protein of the invention or cells expressing the protein of the invention with the ligand, in the presence of a test sample, (b) detecting the binding activity between said protein or cells expressing said protein and the ligand, and (c) selecting a compound that reduces said binding activity when compared to the activity in the absence of the test sample. Furthermore, when the protein of the invention is a ligand, the screening method comprises the steps of (a) contacting the protein of the invention with its receptor or cells expressing the receptor in the presence of samples, (b) detecting the binding activity between the protein and its receptor or the cells expressing the receptor, and (c) selecting a compound that can potentially reduce the binding activity compared to the activity in the absence of the sample.

[0236] Samples to screen include cell extracts, expressed products from a gene library, synthesized low molecular compound, synthesized peptide, and natural compounds, for example, but are not construed to be listed here. A compound that is isolated by the above screening using a binding activity of the protein of the invention can also be used as a sample.

[0237] A compound isolated by the screening may be a candidate to be an agonist or an antagonist of the receptor of the protein. By utilizing an assay that monitors a change in the intracellular signaling such as phosphorylation which results from reduction of the binding between the protein and its receptor, it is possible to identify whether the obtained compound is an agonist or antagonist of the receptor. Also, the compound may be a candidate of a molecule that can inhibit the interaction between the protein and its associated proteins (including a receptor) in vivo. Such compounds can be used for developing drugs for precaution or cures of a disease with which the protein is associated.

[0238] Secretory proteins may regulate cellular conditions such as growth and differentiation. It is possible to find out a novel factor that regulates cellular conditions by adding the secretory protein of the invention to a certain kind of cell, and performing a screening by utilizing the cellular changes in growth or differentiation, or activation of a particular gene.

[0239] The screening can be performed, for example, as follows. First, the protein of the invention is expressed and purified in a recombinant form. Then, the purified protein is added to a various kind of cell lines or primary cultured cells, and the change in the cell growth and differentiation is monitored. The induction of a particular gene that is known to be involved in a certain cellular change is detected by the amounts of mRNA and protein. Alternatively, the amount of an intracellular molecule (low-molecular-weight compounds, etc.) that is changed by the function of a gene product (protein) that is known to function in a certain cellular change is used for the detection.

[0240] Once the screening reveals that the protein of the invention can regulate cellular conditions or the functions, it is possible to apply the protein as a pharmaceutical and diagnostic medicine for associated diseases by itself or by altering a part of it into an appropriate composition.

[0241] As is above described for membrane proteins, the secretory protein provided by the invention may be used to explore a novel ligand-receptor interaction using a screening based on the binding activity to a known ligand or receptor. A similar method can be used to identify an agonist or antagonist. The resulting compounds obtained by the methods can be a candidate of a compound that can inhibit the interaction between the protein of the invention and an interacting molecule (including a receptor). The compounds may be able to use as a preventive, therapeutic, and diagnostic medicine for the diseases, in which the protein may play a certain role.

[0242] Proteins associated with signal transduction or transcription may be a factor that affects a certain protein or gene in response to intracellular/extracellular stimuli. It is possible to find out a novel factor that can affect a protein or gene by expressing the protein provided by the invention in a certain types of cells, and performing a screening utilizing the activation of a certain intracellular protein or gene.

[0243] The screening may be performed as follows. First, a transformed cell line expressing the protein is obtained. Then, the transformed cell line and the untransformed original cell line are compared for the changes in the expression of a certain gene by detecting the amount of its mRNA or protein. Alternatively, the amount of an intracellular molecule (low molecular weight compounds) that is changed by the function of a certain gene product (protein) may be used for the detection. Furthermore, the change of the expression of a certain gene can be detected by introducing a fusion gene that comprises a regulatory region of the gene and a marker gene (luciferase, beta-galactosidase, etc.) into a cell, expressing the protein provided by the invention into the cell, and estimating the activity of a marker gene product (protein).

[0244] If the protein or gene of the invention is associated with diseases, it is possible to screen a gene or compound that can regulate its expression and/or activity either directly or indirectly by utilizing the protein of the present invention.

[0245] For example, the protein of the invention is expressed and purified as a recombinant protein. Then, the protein or gene that interacts with the protein of the invention is purified, and screened based on the binding. Alternatively, the screening can be performed by adding with a compound of a candidate of the inhibitor added in advance and monitoring the change of binding activity. In another method, a transcription regulatory region locating in the 5′-upstream of the gene encoding the protein of the invention that is capable of regulating the expression of other genes is obtained, and fused with a marker gene. The fusion is introduced into a cell, and the cell is added with compounds to explore a regulatory factor of the expression of the said gene.

[0246] The compound obtained by the screening can be used for developing pharmaceutical and diagnostic medicines for the diseases with which the protein of the present invention is associated. Similarly, if the regulatory factor obtained in the screening is turn out to be a protein, compounds that can newly affect the expression or activity of the protein may be used as a medicine for the diseases with which the protein of the invention is associated.

[0247] If the protein of the invention has an enzymatic activity, regardless as to whether it is a secretory protein, membrane protein, or proteins associated with signal transduction, glycoprotein, transcription, or diseases, a screening may be performed by adding a compound to the protein of the invention and monitoring the change of the compound. The enzymatic activity may also be utilized to screen a compound that can inhibit the activity of the protein.

[0248] In a screening given as an example, the protein of the invention is expressed and the recombinant protein is purified. Then, compounds are contacted with the purified protein, and the amount of the compound and the reaction products is examined. Alternatively, compounds that are candidates of an inhibitor are pretreated, then a compound (substrate) that can react with the purified protein is added, and the amount of the substrate and the reaction products is examined.

[0249] The compounds obtained in the screening may be used as a medicine for diseases with which the protein of the invention is associated. Also they can be applied for tests that examine whether the protein of the invention functions normally in vivo.

[0250] Whether the secretory protein, membrane protein, signal transduction-associated protein, glycoprotein-associated protein, or transcription-associated protein of the present invention is a novel protein associated with diseases or not is determined in another method than described above, by obtaining a specific antibody against the protein of the invention, and examining the relationship between the expression or activity of the protein and a certain disease. In an alternative way, it may be analyzed referred to the methods in “Molecular Diagnosis of Genetic Diseases” (Elles R. edit, (1996) in the series of “Method in Molecular Biology” (Humana Press).

[0251] Proteins associated with diseases are targets of screening as mentioned, and thus are very useful in developing drugs which regulate their expression and activity. Also, the proteins are useful in the medicinal industry as a diagnostic marker of the associated disease or a target of gene therapy.

[0252] Compounds isolated as mentioned above can be administered patients as it is, or after formulated into a pharmaceutical composition according to the known methods. For example, a pharmaceutically acceptable carrier or vehicle, specifically sterilized water, saline, plant oil, emulsifier, or suspending agent can be mixed with the compounds appropriately. The pharmaceutical compositions can be administered to patients by a method known to those skilled in the art, such as intraarterial, intravenous, or subcutaneous injections. The dosage may vary depending on the weight or age of a patient, or the method of administration, but those skilled in the art can choose an appropriate dosage properly. If the compound is encoded by DNA, the DNA can be cloned into a vector for gene therapy, and used for gene therapy. The dosage of the DNA and the method of its administration may vary depending on the weight or age of a patient, or the symptoms, but those skilled in the art can choose properly.

[0253] The present invention further relates to databases comprising at least a sequence of polynucleotide and/or protein, or a medium recorded in such databases, selected from the sequence data of the nucleotide and/or the amino acids indicated in Table 350 and Table 351. The term “database” means a set of accumulated information as machine-searchable and readable information of nucleotide sequence. The databases of the present invention comprise at least one of the novel nucleotide sequences of polynucleotides provided by the present invention. The databases of the present invention can consist of only the sequence data of the novel polynucleotides provided by the present invention or can comprise other information on nucleotide sequences of known full-length cDNAs or ESTs. The databases of the present invention can be comprised of not only the information on the nucleotide sequences but also the information on the gene functions revealed by the present invention. Additional information such as names of DNA clones carrying the full-length cDNAs can be recorded or linked together with the sequence data in the databases.

[0254] The database of the present invention is useful for gaining complete gene sequence information from partial sequence information of a gene of interest. The database of the present invention comprises nucleotide sequence information of full-length cDNAs. Consequently, by comparing the information in this database with the nucleotide sequence of a partial gene fragment yielded by differential display method or subtraction method, the information on the full-length nucleotide sequence of interest can be gained from the sequence of the partial fragment as a starting clue.

[0255] The sequence information of the full-length cDNAs constituting the database of the present invention contains not only the information on the complete sequences but also extra information on expression frequency of the genes as well as homology of the genes to known genes and known proteins. Thus the extra information facilitates rapid functional analyses of partial gene fragments. Further, the information on human genes is accumulated in the database of the present invention, and therefore, the database is useful for isolating a human homologue of a gene originating from other species. The human homologue can be isolated based on the nucleotide sequence of the gene from the original species.

[0256] At present, information on a wide variety of gene fragments can be obtained by differential display method and subtraction method. In general, these gene fragments are utilized as tools for isolating the full-length sequences thereof. When the gene fragment corresponds to an already-known gene, the full-length sequence is easily obtained by comparing the partial sequence with the information in known databases. However, when there exists no information corresponding to the partial sequence of interest in the known databases, cDNA cloning should be carried out for the full-length cDNA. It is often difficult to obtain the full-length nucleotide sequence using the partial sequence information as an initial clue. If the full-length of the gene is not available, the amino acid sequence of the protein encoded by the gene remains unidentified. Thus the database of the present invention can contribute to the identification of full-length cDNAs corresponding to gene fragments, which cannot be revealed by using databases of known genes.

[0257] The present invention has provided 5602 novel full-length cDNA clones, and primers for synthesizing the cDNA. As has not yet proceeded the isolation of full-length cDNA within the human, the invention has great significance. The full-length cDNA clones contain the translation initiation site, and thus provide a useful information for analysis of protein functions.

[0258] The cDNA clones are assumed to encode proteins such as secretory proteins, membrane proteins, signal transduction-associated protein, glycoprotein-associated protein, or transcription-associated protein, etc., which have important functions in vivo, and also predicted to be associated with many diseases. The genes and proteins associated with diseases are useful for developing a diagnostic marker or medicines for regulation of their expression and activity, or as a target of gene therapy.

[0259] The invention is illustrated more specifically with reference to the following examples, but is not to be construed as being limited thereto.

### EXAMPLE 1

### Construction of a cDNA Library by the Oligo-Capping Method

[0260] The NT-2 neuron progenitor cells (Stratagene), a teratocarcinoma cell line from human embryo testis, which can differentiate into neurons by the treatment with retinoic acid were used. The NT-2 cells were cultured according to the manufacturer's instructions as follows.
[0261] (1) NT-2 cells were cultured without induction by retinoic acid treatment (NT2RM1, NT2RM2, NT2RM4).
[0262] (2) After cultured, NT-2 cells were induced by adding retinoic acid, and then were cultured for 48 hours (NT2RP1).
[0263] (3) After cultured, NT-2 cells were induced by adding retinoic acid, and then were cultured for 2 weeks (NT2RP2, NT2RP3, NT2RP4, NT2RP5).

[0264] Also, the human neuroblastoma cell line SK-N-MC (ATCC HTB-10) (SKNMC1), and human retinoblastoma cell line Y79 (ATCC HTB-18) (Y79AA I) were cultured according to the culture conditions described in the ATCC catalogue (http://www.atcc.org/). The cells were harvested separately, and mRNA was extracted from each cell by the method described in the literature (Molecular Cloning 2nd edition. (1989) Sambrook J., Fritsch, E. F., and Maniatis T., Cold Spring Harbor Laboratory Press). Furthermore, poly(A)⁺RNA was purified from the mRNA using oligo-dT cellulose.

[0265] Similarly, human placenta (PLACE1, PLACE2, PLACE3, PLACE4), human ovary cancer tissue (OVARC1), tissues from human embryo at 10 weeks, which is enriched with head (HEMBA1), or body (HEMBB1), human mammary gland (MAMMA1), human thyroid gland (THYRO1), and primary cultured cells of human blood vessel endothelium (VESEN1) were used to extract mRNA by the method described in the literature (Molecular Cloning 2nd edition. (1989) Sambrook J., Fritsch, E. F., and Maniatis T., Cold Spring Harbor Laboratory Press). Furthermore, poly(A)⁺RNA was purified from the mRNA using oligo-dT cellulose.

[0266] Each poly(A)⁺RNA was used to construct a cDNA library by the oligo-capping method (Maruyama M. and Sugano S. (1994) Gene, 138:171-174). Using the Oligo-cap linker (SEQ ID NO: 10464) and the Oligo-dT primer (SEQ ID NO: 10465), bacterial alkaline phosphatase (BAP) treatment, tobacco acid phosphatase (TAP) treatment, RNA ligation, the first strand cDNA synthesis, and removal of RNA were performed as described in the reference (Suzuki and Kanno (1996) Protein Nucleic acid and Enzyme, 41:197-201; Suzuki Y. et al. (1997) Gene, 200: 149-156). Next, 5′- and 3′-PCR primers (SEQ ID NO: 10466, and 10467, respectively) were used for performing PCR to convert the cDNA into double stranded cDNA, which was then digested with SfiI. Then, the DraIII-cleaved pUC19FL3 vector (FIG. 1; for NT2RM1, and NT2RP1), or the DraIII-cleaved pME18SFL3 (FIG. 1) (GenBank AB009864, expression vector; for NT2RM2, NT2RM4, NT2RP2, NT2RP3, NT2RP4, NT2RP5, SKNMC1, Y79AA1, PLACE1, PLACE2, PLACE3, PLACE4, OVARC1, HEMBA1, HEMBB1, MAMMA1, THYRO1, and VESEN1) was used for cloning the cDNA in a unidirectional manner, and cDNA libraries were obtained. The nucleotide sequence of the 5′- and 3′-ends of the cDNA clones was analyzed with a DNA sequencer (ABI PRISM 377, PE Biosystems) after sequencing reactions were performed with the DNA sequencing reagents (Dye Terminator Cycle Sequencing FS Ready Reaction Kit, dRhodamine Terminator Cycle Sequencing FS Ready Reaction Kit, or BigDye Terminator Cycle Sequencing FS Ready Reaction Kit, PE Biosystems), according to the instructions. The data were compiled into a database.

[0267] The full-length-enriched cDNA libraries except those for NT2RM1 and NT2RP1 were constructed using eukaryotic expression vector pME18SFL3. The vector contains SRα promoter and SV40 small t intron in the upstream of the cloning site, and SV40 polyA added signal sequence site in the downstream. As the cloning site of pME18SFL3 has asymmetrical DraIII sites, and the ends of cDNA fragments contain SfiI sites complementary to the DraIII sites, the cloned cDNA fragments can be inserted into the downstream of the SRα promoter unidirectionally. Therefore, clones containing full-length cDNA can be expressed transiently by introducing the obtained plasmid directly into COS cells. Thus, the clones can be analyzed very easily in terms of the proteins that are the gene products of the clones, or in terms of the biological activities of the proteins.

[0268] Herein, the cDNA libraries and the name of each clone are related as shown in Table 3. Therein, “xxxxxx” represents the clone number of six digits. Thus, the sequences are named by the library name, the clone number plus F- for the 5′-end, or R- for the 3′-end.

TABLE 3

| library: | | |
|---|---|---|
| clone | 5′-end sequence | 3′-end sequence |
| NT2RM1: | F-NT2RM1xxxxxx | |
| NT2RM1xxxxxx | | |
| NT2RP1: | F-NT2RP1xxxxxx | |
| NT2RP1xxxxxx | | |
| NT2RM2: | F-NT2RM2xxxxxx | R-NT2RM2xxxxxx |
| NT2RM2xxxxxx | | |
| NT2RM4: | F-NT2RM4xxxxxx | R-NT2RM4xxxxxx |
| NT2RM4xxxxxx | | |
| NT2RP2: | F-NT2RP2xxxxxx | R-NT2RP2xxxxxx |
| NT2RP2xxxxxx | | |
| NT2RP3: | F-NT2RP3xxxxxx | R-NT2RP3xxxxxx |
| NT2RP3xxxxxx | | |
| NT2RP4: | F-NT2RP4xxxxxx | R-NT2RP4xxxxxx |
| NT2RP4xxxxxx | | |
| NT2RP5: | F-NT2RP5xxxxxx | R-NT2RP5xxxxxx |
| NT2RP5xxxxxx | | |
| SKNMC1: | F-SKNMC1xxxxxx | R-SKNMC1xxxxxx |
| SKNMC1xxxxxx | | |
| Y79AA1: | F-Y79AA1xxxxxx | R-Y79AA1xxxxxx |
| Y79AA1xxxxxx | | |
| PLACE1: | F-PLACE1xxxxxx | R-PLACE1xxxxxx |
| PLACE1xxxxxx | | |
| PLACE2: | F-PLACE2xxxxxx | R-PLACE2xxxxxx |
| PLACE2xxxxxx | | |
| PLACE3: | F-PLACE3xxxxxx | R-PLACE3xxxxxx |
| PLACE3xxxxxx | | |
| PLACE4: | F-PLACE4xxxxxx | R-PLACE4xxxxxx |
| PLACE4xxxxxx | | |
| OVARC1: | F-OVARC1xxxxxx | R-OVARC1xxxxxx |
| OVARC1xxxxxx | | |
| HEMBA1: | F-HEMBA1xxxxxx | R-HEMBA1xxxxxx |
| HEMBA1xxxxxx | | |
| HEMBB1: | F-HEMBB1xxxxxx | R-HEMBB1xxxxxx |
| HEMBB1xxxxxx | | |
| MAMMA1: | F-MAMMA1xxxxxx | R-MAMMA1xxxxxx |
| MAMMA1xxxxxx | | |
| THYRO1: | F-THYRO1xxxxxx | R-THYRO1xxxxxx |
| THYRO1xxxxxx | | |
| VESEN1: | F-VESEN1xxxxxx | R-VESEN1xxxxxx |
| VESEN1xxxxxx | | |

### EXAMPLE 2

### Estimation of the Fullness Ratio at the 5′-Ends of the Clones Contained in the cDNA Libraries Constructed by the Oligo-Capping Method

[0269] The fullness ratio at the 5′-end sequence of the 59,823 clones in the human cDNA libraries constructed by the oligo-capping method was determined as follows. Of all the clones whose 5′-end sequences were found in those of known human mRNA in the public database, a clone was judged to be “full-length”, if it had a longer 5′-end sequence than that of the known human mRNA, or, even though the 5′-end sequence was shorter, if it contained the translation initiation codon. A clone which did not contain the translation initiation codon was judged to be “not-full-length”. The fullness ratio ((the number of full-length clones)/(the number of full-length and not-full-length clones)) at the 5′-end of the cDNA clones from each library was determined by comparing with the known human mRNA. As a result, the fullness ratio of the 5′-ends was 63.5%. The result indicates that the fullness ratio at the 5′-end sequence was extremely high.

### EXAMPLE 3

### Assessment of the Fullness Ratio of the 5′-End of the cDNA by the ATGpr and the ESTiMateFL

[0270] The ATGpr, developed by Salamov A. A., Nishikawa T., and Swindells M. B. in the Helix Research Institute, is a program for prediction of the translation initiation codon based on the characteristics of the sequences in the vicinity of the ATG codon. The results are shown with expectations (also described as ATGpr1 below) that an ATG is a true initiation codon (0.05-0.94) (can be described as ATGpr1). When the program was applied to the 5′-end sequences of the clones from the cDNA library that was obtained by the oligo-capping method and that had 65% fullness ratio, the sensitivity and specificity of estimation of a full-length clone (clone containing the N-terminal end of ORF) were improved to 82-83% by selecting only clones having the ATGpr1 score 0.6 or higher.

[0271] Furthermore, the program was used to assess the fullness of 18,959 clones in the human libraries obtained here, which have 5′-ends matched to a known human mRNA.

[0272] Briefly, the maximal ATGpr1 score of the clones was determined, and then their 5′-end sequence was compared with the known human mRNA to estimate whether the clone is full-length or not. The result is shown in Table 4.

[0273] Based on the knowledge that known mRNAs, in general, are highly expressed in the cell, similar estimation was performed with genes having a low number in the EST hit, which represent relatively low abundant mRNAs, and the result is shown in Table 5.

[0274] In the table, the number of full-length clones indicate that of clones containing the N-terminal end of ORF, and so does the number of not-full-length clones that of clones without the N-terminal end of ORF. The fullness ratio represents (the number of full-length clones)/(the number of full-length clones plus the number of not-full-length clones).

TABLE 4
The maximal ATGpr1 score and the fullness ratio of the 5′-end
sequences of clones obtained from human cDNA libraries
constructed by the oligo-capping method; clones having a
matched 5′-end with that of a known mRNA.

| maximal | number of | number of | |
|---|---|---|---|
| ATGpr1 | (full-length clones plus | full-length | |
| score | not-full-length clones) | clones | fullness ratio |
| >=0.70 | 11,193 | 9,346 | 83.5% |
| >=0.50 | 13,369 | 10,549 | 78.9% |
| >=0.30 | 15,489 | 11,340 | 73.2% |
| >=0.15 | 17,394 | 11,811 | 67.9% |
| >=0.00 | 18,959 | 12,046 | 63.5% |

[0275] TABLE 5
The maximal ATGpr1 score and the fullness ratio of the 5′-end
sequences of the clones obtained from human cDNA libraries
constructed by the oligo-capping method; clones having 5
EST hits or less among the clones having a matched 5′-end
with that of a known mRNA.

| maximal | number of | number of | |
|---|---|---|---|
| ATGpr1 | (full-length clones plus | full-length | |
| score | not-full-length clones) | clones | fullness ratio |
| >=0.70 | 2,801 | 1,934 | 69.0% |
| >=0.50 | 3,683 | 2,393 | 65.0% |
| >=0.30 | 4,683 | 2,707 | 57.8% |
| >=0.15 | 5,559 | 2,890 | 52.0% |
| >=0.00 | 6,113 | 3,013 | 49.8% |

[0276] Next, the ESTiMateFL was used for the estimation. The ESTiMateFL, developed by Nishikawa and Ota in the Helix Research Institute, is a method for the selection of a clone with high fullness ratio by comparing with the 5′-end or 3′-end sequences of ESTs in the public database.

[0277] By the method, a cDNA clone is judged to be most likely not to be full-length if there exist any ESTs which have longer 5′-end or 3′-end sequences than the clone. The method is systematized for high throughput analysis. A clone is judged to be full-length if the clone has a longer 5′-end sequence than ESTs in the public database. Even if a clone has a shorter 5′-end, the clone is judged to be full-length if the difference in length is within 50 bases, and otherwise judged not to be full-length, for convenience.

[0278] In case of the clones whose 5′-end sequence is matching with the known mRNA, 80% of the clones judged to be full-length by comparing with ESTs was also judged to be full-length by comparing with the known mRNA. Also, 80% of the clones judged to be not full-length by comparing with ESTs was also judged to be not full-length by comparing with the known mRNA.

[0279] The precision of the estimation by comparing with ESTs is improved with increasing number of ESTs to be compared. However, in case that a limited number of ESTs are available, the reliability becomes low. Thus, the method is effective in excluding clones with high probability of being not-full-length, from the cDNA clones that is synthesized by the oligo-capping method and that have the 5′-end sequences with about 60% fullness ratio. In particular, the ESTiMateFL is efficiently used to estimate the fullness ratio at the 3′-end sequence of cDNA of a human unknown mRNA which has a significant number of EST deposits in the public database.

[0280] The 18,959 clones isolated from human cDNA libraries constructed by the oligo-capping method, which have the 5′-end sequence matched with a known human mRNA, were estimated by using the ATGpr and ESTiMateFL. Briefly, the 5′-end sequence of the respective clone was analyzed to obtain the maximal ATGpr1 score, and compared with the ORF of the known human mRNA that matches with it to determine whether the clone is full-length or not. Then, the 5′-end sequence of the respective clone was analyzed by the ESTiMateFL to judge whether the clone is full-length or not. Specifically, the 5′-end sequences of the 18,959 clones were compared with those of ESTs by the ESTiMateFL and the clones other than those that are not full-length were selected. Then, the selected clones were used to analyze the relationship between the ATGpr and the fullness ratio. The result was summarized in Table 6. Also, among the selected, the clones in which the number of the EST hit is not more than 5 were selected and analyzed. The result was summarized in Table 7, which represents the result of the analysis of mRNA with relatively low abundance.

[0281] Therein, the number of being full-length, the number of being not full-length, and the fullness ratio indicate the number of the clones that contain the N-terminus of the ORF, the number of the clones that do not contain the N-terminus of the ORF, and (the number of being full-length)/(the number of being full-length) plus (the number of being not full-length), respectively.

TABLE 6
The maximal ATGpr1 score and the fullness ratio of the 5′-end
sequence in the clones isolated from human cDNA libraries
constructed by the oligo-capping method, which have the
5′-end sequence matched with a known human mRNA, and
also other than those being not full-length according to the
comparison with ESTs.

| maximal | number of | number of | |
|---|---|---|---|
| ATGpr1 | (full-length clones plus | full-length | |
| score | not-full-length clones) | clones | fullness ratio |
| >=0.70 | 9,068 | 8,349 | 92.1% |
| >=0.50 | 10,345 | 9,318 | 90.1% |
| >=0.30 | 11,425 | 9,964 | 87.2% |
| >=0.15 | 12,254 | 10,335 | 84.3% |
| >=0.00 | 12,785 | 10,484 | 82.0% |

[0282] TABLE 7
Maximal ATGpr1 score and fullness ratio of the 5′-end sequence
of the clones, which were isolated from the human cDNA libraries
constructed by the oligo-capping method, whose 5′-end
sequence is identical to a known human mRNA, in which the
number of the EST hit is not more than 5.

| maximal | number of | number of | |
|---|---|---|---|
| ATGpr1 | (full-length clones plus | full-length | |
| score | not-full-length clones) | clones | fullness ratio |
| >=0.70 | 1,959 | 1,510 | 77.1% |
| >=0.50 | 2,469 | 1,821 | 73.8% |
| >=0.30 | 2,975 | 2,046 | 68.8% |
| >=0.15 | 3,368 | 2,164 | 64.3% |
| >=0.00 | 3,661 | 2,226 | 60.8% |

[0283] The 19,226 clones, isolated from the human cDNA libraries constructed by the oligo-capping method, whose 5′-end sequence is identical to that of a known human mRNA were estimated by the ATGpr2, and the correlation between the score and the fullness ratio was estimated. Specifically, the maximal ATGpr2 score of the clones identical to a known human mRNA was determined, and then their fullness ratio was estimated by comparing the 5′-ends with ORF of known human mRNA. The result was shown in Table 8.

TABLE 8
Maximal ATGpr2 score and fullness ratio of the 5′-end sequence
of the clones, which are isolated from the human cDNA libraries
constructed by the oligo-capping method, whose 5′-end
sequence is identical to a known human mRNA.

| maximal | number of | number of | |
|---|---|---|---|
| ATGpr2 | (full-length clones plus | full-length | |
| score | not-full-length clones) | clones | fullness ratio |
| >=0.30 | 10,748 | 8,031 | 74.7% |
| >=0.15 | 16,383 | 11,226 | 68.5% |
| >=0.00 | 19,226 | 12,285 | 63.9% |

[0284] According to the above results, it was found that, in case of using clones isolated from human cDNA libraries constructed by the oligo-capping method, the fullness ratio of the clones that have low score in the ATGpr can be improved by estimating their 5′-end sequence using the combination of the ATGpr and the ESTiMateFL. Therefore, the method was applied to select a cDNA clone with high fullness ratio.

### EXAMPLE 4

### Clustering of the 5′-End and 3′-End Sequences of cDNA Clones

[0285] The 5′-end and 3′-end sequences of cDNA clones were obtained, and clustered separately. The single pass data of the nucleotide sequence of the 5′-end and 3′-end was subject to the BLAST search between the sequence data of all the clones synthesized in example 1, and the clones considered to be originating from the same gene were put together into a group. If the 5′-end of a clone contains the consensus sequence of 300 bases or more with identity 95% or more, or the 3′-end contains the consensus sequence of 200 bases or more and having identity 90% or more, the clones were put in the same group.

[0286] The groups of the 5′-end sequence and the 3′-end sequence were further clustered so as that the groups from the same clone can be in the same group (cluster).

### EXAMPLE 5

### Characterization of the Cloned Sequence

[0287] The data of the 5′-end sequence of the cloned sequence was characterized by the following way:
[0288] (1) examining whether it is identical to those of mRNA from human and other species (including authorized sequences) and human EST by the BLAST homology search of the GenBank,
[0289] (2) examining whether it has longer 5′-end than those of human mRNA and human EST,
[0290] (3) determining the scores in the ATGpr1 and ATGpr2 programs of all the initiation codons in the 5′-end sequence, and
[0291] (4) determining the number of the human EST clone(s) that is judged to be identical by the BLAST homology search of the GenBank.

[0292] The data of the 3′-end sequence of the cloned sequence was characterized by the above (1) and (4).

[0293] These characterized data were used for the final selection of the clones.

### EXAMPLE 6

### Identity to the Human mRNA and Human EST, and Comparison of the Length of the 5′-End

[0294] The 5′-end and 3′-end sequences of the cloned sequence was judged to be identical to those of mRNA from human or other species when the sequence to compare has the length of 200 bases or longer, and the obtained homology is 94% or more. The 5′-end and 3′-end sequences of the cloned sequence was judged to be identical to those of human EST when the sequence to compare has the length of 200 bases or longer, and the obtained homology is 90% or more.

[0295] The sequence of the clone was judged to be full-length in comparison with human mRNA when the sequence has longer 5′-end, or it contains the translation initiation site. The sequence of the clone was judged to be full-length in comparison with human EST in the database when the sequence has longer 5′-end, or while it has shorter end, the difference in length between the two sequences is 50 bases or less. The other clones were judged to be not full-length.

### EXAMPLE 7

### Prediction of the Fullness Ratio by the ATGpr

[0296] The score in the ATGpr1 is the expectation to be full-length based on calculations, and the higher score reflects the higher probability to be full-length as shown in Example 3. The maximal ATGpr1 score and the maximal ATGpr2 score represent the score obtained with all the initiation codons contained in the 5′-end sequence of the cloned sequence, and were used for the characterization.

### EXAMPLE 8

### Prediction of the Novelty Using the Number of the Identical ESTs by the Homology Search

[0297] For both the 5′-end and 3′-end sequences of the clones, the number of the identical ESTs was determined by the homology search on the GenBank. Human ESTs were judged to be identical when the EST has a sequence of 200 nucleotides or more with 90% or more matching with the 5′-end sequence. The number of the identical ESTs were used for characterization and as an index of novelty. The clone having not identical sequence at the 5′-end and 3′-end sequences to those of mRNA as well as those of ESTs is a gene encoding a novel protein. Similarly, a clone having either the 5′-end or the 3′-end sequences, which has low number of the identical ESTs, is judged to be a gene encoding a novel protein.

### EXAMPLE 9

### Characterization of Clusters

[0298] The clusters of the groups of the 5′-end and 3′-end sequences were characterized according to the following criteria.
[0299] (1) Whether it is identical to the mRNA sequences from human or other species (including authorized sequences), or human ESTs by the BLAST search of the GenBank.
[0300] A cluster containing at least one sequence of all the 5′-end and 3′-end sequences, which is identical to one of the mRNA sequences, was regarded to be the same cluster of the mRNA sequence.
[0301] (2) Whether it has longer 5′-end than human mRNA sequence and human ESTs.
[0302] When all the 5′-end sequences contained in a cluster are judged to be not full-length compared with the mRNA sequences and human ESTs, the cluster was regarded as being not full-length.
[0303] (3) The scores in the ATGpr1 and ATGpr2 using all the initiation codons contained in the 5′-end sequences.
[0304] The maximal ATGpr1 score among those of all the 5′-end sequences in a cluster was determined as the ATGpr1 score of the cluster. The ATGpr2 score of the cluster was also determined in the same way.
[0305] (4) The number of the identical human ESTs determined by the BLAST search of the GenBank.

[0306] The maximum number was determined in the numbers of ESTs identical to each of 5′-end sequences contained in a cluster. The number of the ESTs identical to the 5′-end sequences in the cluster was defined as the maximum number. The number of the ESTs identical to the 3′-end sequences in a cluster was determined in the same way.

### EXAMPLE 10

### Methods for Selection of the Clusters by the Characteristics

[0307] Data obtained by the characterization described above was used to discard the clusters that are identical to any mRNA sequence from human and other species (including authorized sequences), or those clusters that are not full-length. From the rest of the clusters, the clusters that fulfill any of the following conditions were selected.
[0308] (a) A cluster in which the number of the identical ESTs for the 5′-end sequence is 20 or less, and the ATGpr1 score exceeds 0.3.
[0309] (b) A cluster having the ATGpr1 score not more than 0.3, in which the number of the identical ESTs for both the 5′-end sequence and the 3′-end sequence is 5 or less, and multiple clones are contained.
[0310] (c) A cluster having the ATGpr1 score not more than 0.3, in which the number of the identical ESTs for the 5′-end sequence is 0, and the number of the identical ESTs for the 3′-end sequence is not less than 1.
[0311] (d) A cluster having the ATGpr1 score not more than 0.3, in which the number of the identical ESTs for the 5′-end sequence is not less than 1 and not more than 5, and the number of the identical ESTs for the 3′-end sequence is 0.

[0312] The clusters selected by (a) contain at least one clone that is novel and having high fullness ratio. The clusters selected by (b), (c), and (d) contain at least one clone that is novel and having low fullness ratio, but is still full-length.

### EXAMPLE 11

### Methods for Selection of Clones from Clusters

[0313] In the clusters comprising a single clone, the clone was selected.

[0314] In the clusters comprising multiple clones, in which multiple clones have the ATGpr1 score higher than 0.3, a clone with the highest score was selected.

[0315] In the clusters comprising multiple clones, in which multiple clones have the ATGpr1 score not more than 0.3, a clone with the highest ATGpr2 score was selected, if the score was higher than 0.3.

[0316] In the clusters comprising multiple clones, in which the clones have the scores not more than 0.3 in both the ATGpr1 and the ATGpr2, a clone with the highest scores in both the ATGpr1 and ATGpr2 was selected.

[0317] In the clusters comprising multiple clones, in which the above selection by the ATGpr score was not applicable, selected was a clone having longer 5′-end by assembling the 5′-end sequence, 3′-end sequence, and human ESTs. For assembling, the Sequencher™ (Hitachi Soft Engineering ) was used. When even the selection by assembling failed, all the clones were judged to be full-length.

[0318] As a result, 3690 clones were the clones that have the maximal ATGpr1 score higher than 0.3. On the other hand, 477 clones were the clones that have the maximal ATGpr1 score not more than 0.3, and the maximal ATGpr2 score higher than 0.3. The number of the clones having the highest scores in both the ATGpr1 and ATGpr2, while the scores were not more than 0.3, were 97. The number of the clones which were not selected by the ATGpr scores, but were selected by assembling the 5′-end sequence, 3′-end sequence, and human ESTs, were 117. The clones that have the score in both the ATGpr1 and ATGpr2 not more than 0.3, but were selected because the cluster comprises a single clone, were 1166. In the clones, at least either of the 5′-end or 3′-end sequence was not identical to any of human ESTs. Some clones were selected because the cluster comprises a single clone, or by assembling, in which there is no ATG codon (9 clones: HEMBA1001960, HEMBA1006569, HEMBB1001454, NT2PR2002839, NT2RP2005325, NT2RP2006323, PLACE1004506, PLACE1005526, and THYRO1001177). The sequences that do not contain the ATG codon were considered to be corresponding to the 5′-UTR. Although the clones do not have the scores in the ATGpr1 and ATGpr2, the clones were yet judged to be full-length according to the fullness ratio, as shown in Table 4, 5, 6, 7, and 8. The above clones that were finally judged to be full-length were classified into 11 groups according to the following criteria.

Group (1): 1516 Clones

[0319] Among the 3690 clones having the maximal ATGpr1 score higher than 0.3, the following 1516 clones were having high fullness ratio and a novel clone, in which at least either of the 5′-end or 3′-end sequence, or both of them were not identical to any of human ESTs.

[0320] HEMBA1000046, HEMBA1000050, HEMBA1000129, HEMBA1000150, HEMBA1000158, HEMBA1000193, HEMBA1000201, HEMBA1000216, HEMBA1000227, HEMBA1000288, HEMBA1000290, HEMBA1000303, HEMBA1000304, HEMBA1000369, HEMBA1000392, HEMBA1000396, HEMBA1000488, HEMBA1000505, HEMBA1000508, HEMBA1000534, HEMBA1000542, HEMBA1000594, HEMBA1000637, HEMBA1000657, HEMBA1000752, HEMBA1000867, HEMBA1000869, HEMBA1000872, HEMBA1000910, HEMBA1000918, HEMBA1000919, HEMBA1000942, HEMBA1000968, HEMBA1000975, HEMBA1000986, HEMBA1001022, HEMBA1001043, HEMBA1001052, HEMBA1001080, HEMBA1001085, HEMBA1001109,HEMBA1001140, HEMBA1001174, HEMBA1001235, HEMBA1001286, HEMBA1001302, HEMBA1001398,HEMBA1001407, HEMBA1001415, HEMBA1001446, HEMBA1001476, HEMBA1001497, HEMBA1001510,HEMBA1001533, HEMBA1001570, HEMBA1001581, HEMBA1001635, HEMBA1001640, HEMBA1001647,HEMBA1001661, HEMBA1001731, HEMBA1001744, HEMBA1001746, HEMBA1001800, HEMBA1001815,HEMBA1001822, HEMBA1001866, HEMBA1001896, HEMBA1001910, HEMBA1001987,

[0321] HEMBA1002018, HEMBA1002035, HEMBA1002049, HEMBA1002092, HEMBA1002119, HEMBA1002125, HEMBA1002161, HEMBA1002177, HEMBA1002189, HEMBA1002191, HEMBA1002199, HEMBA1002229, HEMBA1002237, HEMBA1002265, HEMBA1002363, HEMBA1002417, HEMBA1002419, HEMBA1002430, HEMBA1002439, HEMBA1002477, HEMBA1002503, HEMBA1002508, HEMBA1002515, HEMBA1002547, HEMBA1002688, HEMBA1002703, HEMBA1002746, HEMBA1002750, HEMBA1002850, HEMBA1002973, HEMBA1003021, HEMBA1003067, HEMBA1003077, HEMBA1003078, HEMBA1003079, HEMBA1003117, HEMBA1003129, HEMBA1003175, HEMBA1003199, HEMBA1003235, HEMBA1003250,HEMBA1003257, HEMBA1003291, HEMBA1003322, HEMBA1003327, HEMBA1003370, HEMBA1003380,HEMBA1003395, HEMBA1003402, HEMBA1003461, HEMBA1003480, HEMBA1003538, HEMBA1003545, HEMBA1003556, HEMBA1003581, HEMBA1003621, HEMBA1003645, HEMBA1003667, HEMBA1003720, HEMBA1003760, HEMBA1003799, HEMBA1003807, HEMBA1003827, HEMBA1003836, HEMBA1003866, HEMBA1003879, HEMBA1003880, HEMBA1003985, HEMBA1003989,

[0322] HEMBA1004011, HEMBA1004048, HEMBA1004056, HEMBA1004074, HEMBA1004133, HEMBA1004146, HEMBA1004150, HEMBA1004199, HEMBA1004200, HEMBA1004238, HEMBA1004246, HEMBA1004275, HEMBA1004286, HEMBA1004289, HEMBA1004321, HEMBA1004327, HEMBA1004335, HEMBA1004341, HEMBA1004372, HEMBA1004389, HEMBA1004479, HEMBA1004499, HEMBA1004507, HEMBA1004542, HEMBA1004554, HEMBA1004573, HEMBA1004596, HEMBA1004632, HEMBA1004697, HEMBA1004705, HEMBA1004709, HEMBA1004711, HEMBA1004736, HEMBA1004751, HEMBA1004752,HEMBA1004753, HEMBA1004756, HEMBA1004758, HEMBA1004768, HEMBA1004771, HEMBA1004795,HEMBA1004806, HEMBA1004850, HEMBA1004863, HEMBA1004889, HEMBA1004923, HEMBA1004929,HEMBA1004930, HEMBA1004944, HEMBA1004972, HEMBA1004980, HEMBA1005019, HEMBA1005035,HEMBA1005050, HEMBA1005066, HEMBA1005075, HEMBA1005079, HEMBA1005083, HEMBA1005113,HEMBA1005133, HEMBA1005149, HEMBA1005219, HEMBA1005331, HEMBA1005338, HEMBA1005367, HEMBA1005411, HEMBA1005468, HEMBA1005469, HEMBA1005517, HEMBA1005518, HEMBA1005526, HEMBA1005548, HEMBA1005576, HEMBA1005583, HEMBA1005595, HEMBA1005609, HEMBA1005685, HEMBA1005732, HEMBA1005755, HEMBA1005813, HEMBA1005815, HEMBA1005834, HEMBA1005884, HEMBA1005963, HEMBA1005991,

[0323] HEMBA1006031, HEMBA1006100, HEMBA1006121, HEMBA1006138, HEMBA1006173, HEMBA1006182, HEMBA1006198, HEMBA1006252, HEMBA1006272, HEMBA1006278, HEMBA1006291, HEMBA1006293, HEMBA1006344, HEMBA1006349, HEMBA1006377, HEMBA1006381, HEMBA1006398, HEMBA1006424, HEMBA1006467, HEMBA1006474, HEMBA1006483, HEMBA1006492, HEMBA1006494, HEMBA1006497, HEMBA1006502, HEMBA1006530, HEMBA1006579, HEMBA1006583, HEMBA1006643, HEMBA1006674, HEMBA1006682, HEMBA1006709, HEMBA1006717, HEMBA1006737, HEMBA1006754, HEMBA1006758, HEMBA1006767, HEMBA1006795, HEMBA1006796, HEMBA1006807, HEMBA1006832, HEMBA1006900, HEMBA1006973, HEMBA1006976, HEMBA1006993, HEMBA1006996, HEMBA1007002, HEMBA1007052, HEMBA1007062, HEMBA1007066, HEMBA1007151, HEMBA1007203, HEMBA1007281, HEMBA1007300, HEMBA1007320, HEMBA1007342,

[0324] HEMBB1000008, HEMBB1000024, HEMBB1000025, HEMBB1000083, HEMBB1000013, HEMBB1000173, HEMBB1000175, HEMBB1000198, HEMBB1000240, HEMBB1000244, HEMBB1000338, HEMBB1000339, HEMBB1000391, HEMBB1000438, HEMBB1000510, HEMBB1000550, HEMBB1000556, HEMBB1000589, HEMBB1000591, HEMBB1000593, HEMBB1000632, HEMBB1000671, HEMBB1000673, HEMBB1000693, HEMBB1000706, HEMBB1000725, HEMBB1000781, HEMBB1000810, HEMBB1000826, HEMBB1000835, HEMBB1000848, HEMBB1000852, HEMBB1000870, HEMBB1000887, HEMBB1000908, HEMBB1000927, HEMBB1000947, HEMBB1000973, HEMBB1000991, HEMBB1001011, HEMBB1001014, HEMBB1001020, HEMBB1001024, HEMBB1001058, HEMBB1001096, HEMBB1001105, HEMBB1001126,HEMBB1001169, HEMBB1001199, HEMBB1001314, HEMBB1001339, HEMBB1001346, HEMBB1001364,HEMBB1001369, HEMBB1001394, HEMBB1001410, HEMBB1001426, HEMBB1001449, HEMBB1001482,HEMBB1001531, HEMBB1001562, HEMBB1001564, HEMBB1001585, HEMBB1001635, HEMBB1001653,HEMBB1001665, HEMBB1001668, HEMBB1001685, HEMBB1001707, HEMBB1001760, HEMBB1001785,HEMBB1001812, HEMBB1001816, HEMBB1001831, HEMBB1001834, HEMBB1001839, HEMBB1001872, HEMBB1001874, HEMBB1001908, HEMBB1001910, HEMBB1001915, HEMBB1001950, HEMBB1001957, HEMBB1001962,

[0325] HEMBB1002044, HEMBB1002050, HEMBB1002068, HEMBB1002142, HEMBB1002152, HEMBB1002193, HEMBB1002217, HEMBB1002218, HEMBB1002249, HEMBB1002327, HEMBB1002340, HEMBB1002358, HEMBB1002359, HEMBB1002415, HEMBB1002442, HEMBB1002457, HEMBB1002492, HEMBB1002495, HEMBB1002502, HEMBB1002545, HEMBB1002614, HEMBB1002684, HEMBB1002692, MAMMA1000019, MAMMA1000020, MAMMA1000025, MAMMA1000057, MAMMA1000069, MAMMA1000084, MAMMA1000139, MAMMA1000143, MAMMA1000171, MAMMA1000183, MAMMA1000251, MAMMA1000277, MAMMA1000279, MAMMA1000309, MAMMA1000312, MAMMA1000313, MAMMA1000339, MAMMA1000361, MAMMA1000372, MAMMA1000388, MAMMA1000410, MAMMA1000421, MAMMA1000458, MAMMA1000472, MAMMA1000524, MAMMA1000567, MAMMA1000583, MAMMA1000623, MAMMA1000664,MAMMA1000672, MAMMA1000684, MAMMA1000713, MAMMA1000731, MAMMA1000746, MAMMA1000760, MAMMA1000776, MAMMA1000842, MAMMA1000843, MAMMA1000856, MAMMA1000865, MAMMA1000875,MAMMA1000897, MAMMA1000906, MAMMA1000908, MAMMA1000914, MAMMA1000921, MAMMA1000956,MAMMA1000968, MAMMA1000979, MAMMA1001078, MAMMA1001080, MAMMA1001091, MAMMA1001110, MAMMA1001126, MAMMA1001143, MAMMA1001154, MAMMA1001181, MAMMA1001215, MAMMA1001222,MAMMA1001244, MAMMA1001260, MAMMA1001296, MAMMA1001305, MAMMA1001343, MAMMA1001346,MAMMA1001388, MAMMA1001411, MAMMA1001419, MAMMA1001465, MAMMA1001487, MAMMA1001510,MAMMA1001522, MAMMA1001551, MAMMA1001600, MAMMA1001604, MAMMA1001620, MAMMA1001627, MAMMA1001630, MAMMA1001633, MAMMA1001635, MAMMA1001692, MAMMA1001743, MAMMA1001751, MAMMA1001757, MAMMA1001764, MAMMA1001768, MAMMA1001783, MAMMA1001790, MAMMA1001817, MAMMA1001824, MAMMA1001848, MAMMA1001851, MAMMA1001858, MAMMA1001864, MAMMA1001868, MAMMA1001874, MAMMA1001956, MAMMA1001969, MAMMA1001970,

[0326] MAMMA1002009, MAMMA1002033, MAMMA1002042, MAMMA1002047, MAMMA1002068, MAMMA1002153, MAMMA1002156, MAMMA1002170, MAMMA1002174, MAMMA1002243, MAMMA1002268, MAMMA1002269, MAMMA1002294, MAMMA1002308, MAMMA1002312, MAMMA1002317, MAMMA1002319, MAMMA1002329, MAMMA1002333, MAMMA1002353, MAMMA1002355, MAMMA1002356, MAMMA1002362, MAMMA1002380, MAMMA1002384, MAMMA1002413, MAMMA1002427, MAMMA1002454, MAMMA1002524, MAMMA1002554, MAMMA1002590, MAMMA1002617, MAMMA1002655, MAMMA1002665, MAMMA1002671, MAMMA1002673, MAMMA1002685, MAMMA1002699, MAMMA1002711, MAMMA1002782, MAMMA1002807MAMMA1002842, MAMMA1002843, MAMMA1002868, MAMMA1002881, MAMMA1002886, MAMMA1002895,MAMMA1002938, MAMMA1002964, MAMMA1003013, MAMMA1003015, MAMMA1003044, MAMMA1003049,MAMMA1003056, MAMMA1003066, MAMMA1003099, MAMMA1003104, MAMMA1003127,

[0327] NT2RM1000018, NT2RM1000059, NT2RM1000118, NT2RM1000131, NT2RM1000186, NT2RM1000242, NT2RM1000252, NT2RM1000260, NT2RM1000271, NT2RM1000314, NT2RM1000318, NT2RM1000354, NT2RM1000399, NT2RM1000421, NT2RM1000563, NT2RM1000623, NT2RM1000666, NT2RM1000725, NT2RM1000742, NT2RM1000772, NT2RM1000802, NT2RM1000811, NT2RM1000850, NT2RM100885, NT2RM1000894, NT2RM1000978, NT2RM1001059, NT2RM1001066, NT2RM1001072, NT2RM1001082, NT2RM1001085, NT2RM1001092, NT2RM1001115,

[0328] NT2RM2000042, NT2RM2000124, NT2RM2000250, NT2RM2000259, NT2RM2000363, NT2RM2000374, NT2RM2000469, NT2RM2000556, NT2RM2000566, NT2RM2000567, NT2RM2000588, NT2RM2000594, NT2RM2000599, NT2RM2000623, NT2RM2000635, NT2RM2000636, NT2RM2000718, NT2RM2000795, NT2RM2000951, NT2RM2001004, NT2RM2001105, NT2RM2001141, NT2RM2001247, NT2RM2001312, NT2RM2001324, NT2RM2001499, NT2RM2001544, NT2RM2001547, NT2RM2001575, NT2RM2001588, NT2RM2001641, NT2RM2001652, NT2RM2001659, NT2RM2001670, NT2RM2001698, NT2RM2001699, NT2RM2001727, NT2RM2001753, NT2RM2001771, NT2RM2001797, NT2RM2001805, NT2RM2001930, NT2RM2001982, NT2RM2001983, NT2RM2001989, NT2RM2002014,

[0329] NT2RM4000167, NT2RM4000199, NT2RM4000202, NT2RM4000215, NT2RM4000251, NT2RM4000386, NT2RM4000433, NT2RM4000486, NT2RM4000496, NT2RM4000534, NT2RM4000585, NT2RM4000590, NT2RM4000595, NT2RM4000616, NT2RM4000700, NT2RM4000712, NT2RM4000733, NT2RM4000734, NT2RM4000787, NT2RM4000795, NT2RM4000796, NT2RM4000798, NT2RM4000820, NT2RM4000848, NT2RM4000887, NT2RM4000971, NT2RM4000996, NT2RM4001054, NT2RM4001191, NT2RM4001203, NT2RM4001217, NT2RM4001320, NT2RM4001344, NT2RM4001454, NT2RM4001455, NT2RM4001522, NT2RM4001592, NT2RM4001594, NT2RM4001629, NT2RM4001650, NT2RM4001662, NT2RM4001666, NT2RM4001710, NT2RM4001746, NT2RM4001813, NT2RM4001842, NT2RM4001969, NT2RM4001987, NT2RM4002054, NT2RM4002063, NT2RM4002066, NT2RM4002073, NT2RM4002075, NT2RM4002093, NT2RM4002109, NT2RM4002174, NT2RM4002194, NT2RM4002205, NT2RM4002266, NT2RM4002301, NT2RM4002339, NT2RM4002373, NT2RM4002374, NT2RM4002409, NT2RM4002446,NT2RM4002457, NT2RM4002460, NT2RM4002482, NT2RM4002493, NT2RM4002527, NT2RM4002558, NT2RP1000357, NT2RP1000376, NT2RP1000409, NT2RP1000460, NT2RP1000581, NT2RP1000677, NT2RP1000721, NT2RP1000733, NT2RP1000796, NT2RP1000836, NT2RP1000846, NT2RP1000916, NT2RP1001079, NT2RP1001185, NT2RP1001247, NT2RP1001494, NT2RP2000067, NT2RP2000070, NT2RP2000133, NT2RP2000173, NT2RP2000175, NT2RP2000195, NT2RP2000208, NT2RP2000232, NT2RP2000233, NT2RP2000283, NT2RP2000297, NT2RP2000310, NT2RP2000412, NT2RP2000422, NT2RP2000503, NT2RP2000516, NT2RP2000656, NT2RP2000658, NT2RP2000704, NT2RP2000814, NT2RP2000816, NT2RP2000841, NT2RP2000938, NT2RP2001036, NT2RP2001081, NT2RP2001094, NT2RP2001119, NT2RP2001137, NT2RP2001173, NT2RP2001174, NT2RP2001392, NT2RP2001427, NT2RP2001440, NT2RP2001450, NT2RP2001511, NT2RP2001536, NT2RP2001560, NT2RP2001581, NT2RP2001601, NT2RP2001613, NT2RP2001748, NT2RP2001861, NT2RP2001900, NT2RP2001946, NT2RP2001976, NT2RP2001985, NT2RP2001991,

[0330] NT2RP2002025, NT2RP2002079, NT2RP2002154, NT2RP2002231, NT2RP2002252, NT2RP2002333, NT2RP2002373, NT2RP2002464, NT2RP2002609, NT2RP2002621, NT2RP2002672, NT2RP2002706, NT2RP2002769, NT2RP2002800, NT2RP2002891, NT2RP2002959, NT2RP2003099, NT2RP2003117, NT2RP2003121, NT2RP2003165, NT2RP2003307, NT2RP2003308, NT2RP2003367, NT2RP2003401, NT2RP2003446, NT2RP2003513, NT2RP2003533, NT2RP2003564, NT2RP2003581, NT2RP2003687, NT2RP2003691, NT2RP2003751, NT2RP2003760, NT2RP2003764, NT2RP2003769, NT2RP2003857, NT2RP2003952, NT2RP2003986,

[0331] NT2RP2004041, NT2RP2004239, NT2RP2004240, NT2RP2004366, NT2RP2004373, NT2RP2004538, NT2RP2004551, NT2RP2004568, NT2RP2004600, NT2RP2004743, NT2RP2004841, NT2RP2004861, NT2RP2004959, NT2RP2004978, NT2RP2005000, NT2RP2005018, NT2RP2005022, NT2RP2005038, NT2RP2005116, NT2RP2005144, NT2RP2005147, NT2RP2005239, NT2RP2005472, NT2RP2005496, NT2RP2005555, NT2RP2005557, NT2RP2005600, NT2RP2005605, NT2RP2005622, NT2RP2005635, NT2RP2005637, NT2RP2005654, NT2RP2005683, NT2RP2005690, NT2RP2005723, NT2RP2005767, NT2RP2005775, NT2RP2005781, NT2RP2005804, NT2RP2005812, NT2RP2005853, NT2RP2005868, NT2RP2006038, NT2RP2006052, NT2RP2006069, NT2RP2006200, NT2RP2006275, NT2RP2006333, NT2RP2006334, NT2RP2006436, NT2RP2006464, NT2RP2006571, NT2RP2006573, NT2RP3000002, NT2RP3000046, NT2RP3000050, NT2RP3000068, NT2RP3000072, NT2RP3000080, NT2RP3000092, NT2RP3000134, NT2RP3000207, NT2RP3000220, NT2RP3000251, NT2RP3000255, NT2RP3000299, NT2RP3000324, NT2RP3000348, NT2RP3000397, NT2RP3000439, NT2RP3000484, NT2RP3000531, NT2RP3000592, NT2RP3000603, NT2RP3000632, NT2RP3000644, NT2RP3000661, NT2RP3000665, NT2RP3000690, NT2RP3000753, NT2RP3000825, NT2RP3000841, NT2RP3000845, NT2RP3000852, NT2RP3000868, NT2RP3000869, NT2RP3001096, NT2RP3001107, NT2RP3001109, NT2RP3001113, NT2RP3001116, NT2RP3001120, NT2RP3001133, NT2RP3001155, NT2RP3001176, NT2RP3001236, NT2RP3001239, NT2RP3001272, NT2RP3001307, NT2RP3001338, NT2RP3001398, NT2RP3001420, NT2RP3001428, NT2RP3001447, NT2RP3001453, NT2RP3001495, NT2RP3001554, NT2RP3001608, NT2RP3001629, NT2RP3001678, NT2RP3001688, NT2RP3001708, NT2RP3001739, NT2RP3001764, NT2RP3001799, NT2RP3001819, NT2RP3001844, NT2RP3001855,NT2RP3001915, NT2RP3001931, NT2RP3001944,

[0332] NT2RP3002007, NT2RP3002063, NT2RP3002081, NT2RP3002108, NT2RP3002163, NT2RP3002304, NT2RP3002351, NT2RP3002587, NT2RP3002603, NT2RP3002650, NT2RP3002659, NT2RP3002663, NT2RP3002671, NT2RP3002701, NT2RP3002785, NT2RP3002818, NT2RP3002869, NT2RP3002876, NT2RP3002877, NT2RP3002911, NT2RP3002953, NT2RP3002985, NT2RP3002988, NT2RP3003139, NT2RP3003157, NT2RP3003193, NT2RP3003282, NT2RP3003302, NT2RP3003344, NT2RP3003353, NT2RP3003377, NT2RP3003385, NT2RP3003409, NT2RP3003621, NT2RP3003656, NT2RP3003701, NT2RP3003726, NT2RP3003795, NT2RP3003846, NT2RP3004078, NT2RP3004155, NT2RP3004206, NT2RP3004242, NT2RP3004341, NT2RP3004428, NT2RP3004451, NT2RP3004454, NT2RP3004490, NT2RP3004534, NT2RP3004544, NT2RP3004569, NT2RP3004572, NT2RP3004594, NT2RP3004617, NT2RP3004618, NT2RP3004669, NT2RP3004670,

[0333] NT2RP4000051, NT2RP4000111, NT2RP4000159, NT2RP4000210, NT2RP4000290, NT2RP4000323, NT2RP4000355, NT2RP4000360, NT2RP4000398, NT2RP4000448, NT2RP4000457, NT2RP4000480, NT2RP4000481, NT2RP4000541, NT2RP4000560, NT2RP4000638, NT2RP4000728, NT2RP4000737, NT2RP4000739, NT2RP4000817, NT2RP4000837, NT2RP4000865, NT2RP4000925, NT2RP4000927, NT2RP4000929, NT2RP4000955, NT2RP4000973, NT2RP4001004, NT2RP4001029, NT2RP4001057, NT2RP4001064, NT2RP4001078, NT2RP4001080, NT2RP4001086, NT2RP4001138, NT2RP4001150, NT2RP4001313, NT2RP4001345, NT2RP4001351, NT2RP4001353, NT2RP4001372, NT2RP4001373, NT2RP4001379, NT2RP4001433, NT2RP4001483, NT2RP4001551, NT2RP4001614, NT2RP4001634, NT2RP4001656, NT2RP4001725, NT2RP4001790, NT2RP4001896, NT2RP4001938, NT2RP4001966, NT2RP4002047, NT2RP4002052, NT2RP4002058, NT2RP4002081, NT2RP5003459, NT2RP5003500, NT2RP5003506, NT2RP5003524,

[0334] OVARC1000014, OVARC1000035, OVARC1000087, OVARC1000109, OVARC1000114, OVARC1000148, OVARC1000151, OVARC1000241, OVARC1000326, OVARC1000347, OVARC1000408, OVARC1000420, OVARC1000437, OVARC1000442, OVARC1000473, OVARC1000520, OVARC1000556, OVARC1000557, OVARC1000588, OVARC1000605, OVARC1000622, OVARC1000640, OVARC1000649, OVARC1000661, OVARC1000681, OVARC1000689, OVARC1000787, OVARC1000800, OVARC1000850, OVARC1000890, OVARC1000912, OVARC1000945, OVARC1000959, OVARC1000996, OVARC1000999, OVARC1001004, OVARC1001010, OVARC1001032, OVARC1001044, OVARC1001074, OVARC1001162, OVARC1001173, OVARC1001180, OVARC1001200, OVARC1001243, OVARC1001306, OVARC1001344,OVARC1001369, OVARC1001372, OVARC1001376, OVARC1001391, OVARC1001399, OVARC1001417,OVARC1001425, OVARC1001436, OVARC1001453, OVARC1001489, OVARC1001506, OVARC1001525,OVARC1001611, OVARC1001703, OVARC1001731, OVARC1001762, OVARC1001802, OVARC1001828, OVARC1001861, OVARC1001942, OVARC1001949, OVARC1001950, OVARC1002082, OVARC1002107, OVARC1002158, OVARC1002165,

[0335] PLACE1000004, PLACE1000005, PLACE1000061, PLACE1000081, PLACE1000236, PLACE1000401, PLACE1000435, PLACE1000444, PLACE1000547, PLACE1000564, PLACE1000716, PLACE1000948, PLACE1000972, PLACE1001010, PLACE1001024, PLACE1001036, PLACE1001062, PLACE1001104, PLACE1001171, PLACE1001257, PLACE1001280, PLACE1001311, PLACE1001366, PLACE1001456, PLACE1001484, PLACE1001545, PLACE1001634, PLACE1001729, PLACE1001739, PLACE1001740, PLACE1001771, PLACE1001810, PLACE1001912, PLACE1001928, PLACE1001983, PLACE1002004, PLACE1002073, PLACE1002119, PLACE1002163, PLACE1002170, PLACE1002213, PLACE1002433, PLACE1002437, PLACE1002438, PLACE1002450, PLACE1002474, PLACE1002529, PLACE1002625, PLACE1002655, PLACE1002665, PLACE1002685, PLACE1002714, PLACE1002775, PLACE1002839, PLACE1002941, PLACE1003044, PLACE1003045, PLACE1003108, PLACE1003145, PLACE1003174, PLACE1003190, PLACE1003249, PLACE1003256, PLACE1003334, PLACE1003366, PLACE1003369, PLACE1003383, PLACE1003493, PLACE1003611, PLACE1003709, PLACE1003711, PLACE1003771, PLACE1003784, PLACE1003795, PLACE1003870, PLACE1003885,PLACE1003888, PLACE1003936,

[0336] PLACE1004128, PLACE1004156, PLACE1004161, PLACE1004203, PLACE1004270, PLACE1004277, PLACE1004289, PLACE1004302, PLACE1004388, PLACE1004428, PLACE1004451, PLACE1004460, PLACE1004516, PLACE1004548, PLACE1004564, PLACE1004646, PLACE1004664, PLACE1004686, PLACE1004691, PLACE1004722, PLACE1004740, PLACE1004743, PLACE1004751, PLACE1004804, PLACE1004824, PLACE1004885, PLACE1004918, PLACE1004937, PLACE1005026, PLACE1005046, PLACE1005206, PLACE1005232, PLACE1005243, PLACE1005266, PLACE1005277, PLACE1005331, PLACE1005480, PLACE1005481, PLACE1005494, PLACE1005530, PLACE1005554, PLACE1005646, PLACE1005656, PLACE1005755, PLACE1005763, PLACE1005799, PLACE1005804,PLACE1005828, PLACE1005876, PLACE1005890, PLACE1005923, PLACE1005925, PLACE1005934,PLACE1005951, PLACE1005953, PLACE1005990,

[0337] PLACE1006011, PLACE1006037, PLACE1006170, PLACE1006195, PLACE1006357, PLACE1006385, PLACE1006412, PLACE1006414, PLACE1006438, PLACE1006482, PLACE1006552, PLACE1006598, PLACE1006673, PLACE1006704, PLACE1006782, PLACE1006829, PLACE1006932, PLACE1006935, PLACE1006956, PLACE1006958, PLACE1006962, PLACE1007014, PLACE1007068, PLACE1007112, PLACE1007226, PLACE1007242, PLACE1007257, PLACE1007274, PLACE1007301, PLACE1007342, PLACE1007346, PLACE1007450, PLACE1007452, PLACE1007484, PLACE1007488, PLACE1007524, PLACE1007537, PLACE1007618, PLACE1007729, PLACE1007810, PLACE1007946,

[0338] PLACE1008000, PLACE1008002, PLACE1008095, PLACE1008177, PLACE1008273, PLACE1008275, PLACE1008280, PLACE1008329, PLACE1008457, PLACE1008465, PLACE1008488, PLACE1008533, PLACE1008626, PLACE1008693, PLACE1008696, PLACE1008790, PLACE1008813, PLACE1008854, PLACE1008867, PLACE1008887, PLACE1008925, PLACE1009090, PLACE1009094, PLACE1009110, PLACE1009111, PLACE1009113, PLACE1009158, PLACE1009174, PLACE1009190,PLACE1009230, PLACE1009328, PLACE1009335, PLACE1009368, PLACE1009375, PLACE1009388, PLACE1009404, PLACE1009434, PLACE1009443, PLACE1009459, PLACE1009524, PLACE1009542,PLACE1009607, PLACE1009798, PLACE1009861, PLACE1009971, PLACE1009992, PLACE1009997,PLACE1010148, PLACE1010261, PLACE1010293, PLACE1010310, PLACE1010321, PLACE1010324,PLACE1010329, PLACE1010401, PLACE1010481, PLACE1010547, PLACE1010616, PLACE1010629,PLACE1010714, PLACE1010743, PLACE1010900, PLACE1010926, PLACE1010954, PLACE1011046,PLACE1011054, PLACE1011056, PLACE1011114, PLACE1011229, PLACE1011273, PLACE1011399,PLACE1011635, PLACE1011725, PLACE1011783, PLACE1011875, PLACE1011891, PLACE1011896, PLACE1011922, PLACE1012031,

[0339] PLACE2000006, PLACE2000014, PLACE2000015, PLACE2000033, PLACE2000034, PLACE2000039, PLACE2000047, PLACE2000050, PLACE2000062, PLACE2000072, PLACE2000097, PLACE2000100, PLACE2000111, PLACE2000124, PLACE2000170, PLACE2000223, PLACE2000235, PLACE2000246, PLACE2000274, PLACE2000359, PLACE2000371, PLACE2000373, PLACE2000411, PLACE2000433, PLACE2000438, PLACE2000458,

[0340] PLACE3000020, PLACE3000029, PLACE3000059, PLACE3000070, PLACE3000103, PLACE3000142, PLACE3000145, PLACE3000147, PLACE3000155, PLACE3000157, PLACE3000194, PLACE3000221, PLACE3000244, PLACE3000254, PLACE3000304, PLACE3000310, PLACE3000320, PLACE3000322, PLACE3000331, PLACE3000350, PLACE3000352, PLACE3000363, PLACE3000405, PLACE3000416, PLACE3000425, PLACE3000455,

[0341] PLACE4000014, PLACE4000052, PLACE4000063, PLACE4000128, PLACE4000129, PLACE4000131, PLACE4000147, PLACE4000156, PLACE4000192, PLACE4000211, PLACE4000222, PLACE4000230, PLACE4000261, PLACE4000270, PLACE4000323, PLACE4000387, PLACE4000392, PLACE4000450, PLACE4000465, PLACE4000487, PLACE4000489, PLACE4000521, PLACE4000522, PLACE4000590, PLACE4000612, PLACE4000638, PLACE4000654,

[0342] SKNMC1000011,SKNMC1000013, THYRO1000034, THYRO1000070, THYRO1000072, THYRO1000107, THYRO1000124, THYRO1000163, THYRO1000253, THYRO1000343, THYRO1000381, THYRO1000387, THYRO1000395, THYRO1000501, THYRO1000505, THYRO1000637, THYRO1000666, THYRO1000676, THYRO1000684, THYRO1000734, THYRO1000787, THYRO1000916, THYRO1000934, THYRO1000951, THYRO1001033, THYRO1001100, THYRO1001142, THYRO1001189, THYRO1001213, THYRO1001320, THYRO1001374, THYRO1001403, THYRO1001458, THYRO1001487, THYRO1001602, THYRO1001605, THYRO1001637, THYRO1001656, THYRO1001738, THYRO1001809, THYRO1001828, Y79AA1000131, Y79AA1000268, Y79AA1000349, Y79AA1000355, Y79AA1000627, Y79AA1000824, Y79AA1000827, Y79AA1000850, Y79AA1000962, Y79AA1000976, Y79AA1001068, Y79AA1001145, Y79AA1001185, Y79AA1001233, Y79AA1001299, Y79AA1001391, Y79AA1001541, Y79AA1001555, Y79AA1001581, Y79AA1001613, Y79AA1001846, Y79AA1001866, Y79AA1001874, Y79AA1002115, Y79AA1002139, Y79AA1002229, Y79AA1002246, Y79AA1002298, Y79AA1002361, Y79AA1002399,Y79AA1002431, Y79AA1002433, Y79AA1002472, Y79AA1002482,

Group (2): 377 Clones

[0343] Among the 3690 clones, the following 377 clones were full-length, and a novel clone, in which the number of the identical human ESTs for both the 5′-end and 3′-end sequences is 1 or higher and not more than 5.

[0344] HEMBA1000156, HEMBA1000231, HEMBA1000244, HEMBA1000302, HEMBA1000523, HEMBA1000531, HEMBA1000555, HEMBA1000568, HEMBA1000971, HEMBA1001009, HEMBA1001133, HEMBA1001137, HEMBA1001257, HEMBA1001281, HEMBA1001289, HEMBA1001310, HEMBA1001377, HEMBA1001388, HEMBA1001413, HEMBA1001455, HEMBA1001579, HEMBA1001702, HEMBA1001781, HEMBA1001804, HEMBA1001819, HEMBA1001864, HEMBA1001869, HEMBA1001912, HEMBA1001915, HEMBA1002084, HEMBA1002102, HEMBA1002212, HEMBA1002495, HEMBA1002513, HEMBA1002863, HEMBA1002935, HEMBA1002970, HEMBA1002971, HEMBA1002997, HEMBA1002999, HEMBA1003035,HEMBA1003041, HEMBA1003433, HEMBA1003568, HEMBA1003680, HEMBA1003692, HEMBA1003804,HEMBA1003893, HEMBA1003953, HEMBA1004097, HEMBA1004207, HEMBA1004502, HEMBA1004560, HEMBA1004638, HEMBA1004693, HEMBA1004973, HEMBA1004977, HEMBA1005223, HEMBA1005244, HEMBA1005314, HEMBA1005680, HEMBA1005737, HEMBA1005746, HEMBA1005822, HEMBA1005891, HEMBA1006445, HEMBA1006535, HEMBA1006566, HEMBA1006877, HEMBA1006936, HEMBA1007178, HEMBA1007251, HEMBA1007267,

HEMBB1000030, HEMBB1000215, HEMBB1000226, HEMBB1000449, HEMBB1000789, HEMBB1000975, HEMBB1001153, HEMBB1001175, HEMBB1001234, HEMBB1001387, HEMBB1001905, HEMBB1001906, HEMBB1002300, HEMBB1002383, HEMBB1002489, HEMBB1002607, HEMBB1002705,

[0345] MAMMA1000257, MAMMA1000416, MAMMA1000831, MAMMA1000841, MAMMA1001021, MAMMA1001041, MAMMA1001105, MAMMA1001139, MAMMA1001198, MAMMA1001730, MAMMA1001837, MAMMA1002198, MAMMA1002209, MAMMA1002219, MAMMA1002292, MAMMA1002297, MAMMA1002637, MAMMA1002650, MAMMA1002796, MAMMA1002987, MAMMA1003135, MAMMA1003150,

[0346] NT2RM1001008, NT2RM2001896, NT2RM4000024, NT2RM4000061, NT2RM4000155, NT2RM4000169, NT2RM4000229, NT2RM4000290, NT2RM4000354, NT2RM4000895, NT2RM4001032, NT2RM4001047, NT2RM4001116, NT2RM4001140, NT2RM4001200, NT2RM4001384, NT2RM4001412, NT2RM4001483, NT2RM4001715, NT2RM4001783, NT2RM4001979, NT2RM4002034, NT2RM4002044, NT2RM4002145, NT2RM4002344, NT2RM4002452,

[0347] NT2RP2000006, NT2RP2000008, NT2RP2000054, NT2RP2000079, NT2RP2000097, NT2RP2000126, NT2RP2000224, NT2RP2000274, NT2RP2000764, NT2RP2000812, NT2RP2000819, NT2RP2000845, NT2RP2000863, NT2RP2000880, NT2RP2001127, NT2RP2001218, NT2RP2001233, NT2RP2001394, NT2RP2001420, NT2RP2001576, NT2RP2001597, NT2RP2001721, NT2RP2001907, NT2RP2002046, NT2RP2002312, NT2RP2002325, NT2RP2002503, NT2RP2002537, NT2RP2002862, NT2RP2002925, NT2RP2002939, NT2RP2002954, NT2RP2002986, NT2RP2003034, NT2RP2003125, NT2RP2003286, NT2RP2003293, NT2RP2003347, NT2RP2003433, NT2RP2003445, NT2RP2003543, NT2RP2003781, NT2RP2004066, NT2RP2004316, NT2RP2004392, NT2RP2004897, NT2RP2004999, NT2RP2005003, NT2RP2005393, NT2RP2005520, NT2RP2005722, NT2RP2005752, NT2RP2005763, NT2RP2006023, NT2RP2006186, NT2RP2006565,

[0348] NT2RP3000527, NT2RP3000562, NT2RP3000590, NT2RP3000596, NT2RP3000599, NT2RP3001004, NT2RP3001126, NT2RP3001150, NT2RP3001392, NT2RP3001407, NT2RP3001457, NT2RP3001753, NT2RP3001929, NT2RP3001969, NT2RP3002151, NT2RP3002303, NT2RP3002484, NT2RP3002590, NT2RP3002660, NT2RP3003078, NT2RP3003204, NT2RP3003251, NT2RP3003411, NT2RP3003831, NT2RP3003870, NT2RP3003876, NT2RP3004093, NT2RP3004246, NT2RP3004253, NT2RP3004348, NT2RP3004504, NT2RP3004507, NT2RP4000312, NT2RP4000518, NT2RP4000781, NT2RP4000975, NT2RP4000997, NT2RP4002408, NT2RP5003512,

[0349] OVARC1000060, OVARC1000411, OVARC1000440, OVARC1000461, OVARC1000703, OVARC1000846, OVARC1000876, OVARC1000915, OVARC1001040, OVARC1001113, OVARC1001167, OVARC1001170, OVARC1001188, OVARC1001271, OVARC1001329, OVARC1001610, OVARC1001767, OVARC1001820, OVARC1001879, OVARC1002138,

[0350] PLACE1000014, PLACE1000048, PLACE1000420, PLACE1000588, PLACE1000596, PLACE1000636, PLACE1000755, PLACE1000786, PLACE1000849, PLACE1000909, PLACE1001000, PLACE1001241, PLACE1001387, PLACE1001503, PLACE1001551, PLACE1001570, PLACE1001602, PLACE1001610, PLACE1001632, PLACE1001989, PLACE1002115, PLACE1002465, PLACE1002532, PLACE1002851, PLACE1002991, PLACE1002993, PLACE1003025, PLACE1003342, PLACE1003553, PLACE1003605, PLACE1003669, PLACE1003723, PLACE1003738, PLACE1003762, PLACE1003783, PLACE1004104, PLACE1004114, PLACE1004149, PLACE1004197, PLACE1004473, PLACE1004510, PLACE1004645, PLACE1004672, PLACE1004868,

[0351] PLACE1005313, PLACE1005374, PLACE1005834, PLACE1005921, PLACE1005936, PLACE1005966, PLACE1006157, PLACE1006225, PLACE1006239, PLACE1006248, PLACE1006445, PLACE1006531, PLACE1006626, PLACE1006731, PLACE1006901, PLACE1006961, PLACE1006966, PLACE1007317, PLACE1007375, PLACE1007460, PLACE1007544, PLACE1007583, PLACE1007791, PLACE1007843, PLACE1007897, PLACE1008129, PLACE1008309, PLACE1008401, PLACE1008402, PLACE1008532, PLACE1008627, PLACE1008808, PLACE1008902, PLACE1008934, PLACE1009099,PLACE1009130, PLACE1009166, PLACE1009659, PLACE1009665, PLACE1009708, PLACE1009794, PLACE1009886, PLACE1009908, PLACE1010202, PLACE1010580, PLACE1010661, PLACE1010811,PLACE1010917, PLACE1010942, PLACE1010965, PLACE1011026, PLACE1011325, PLACE1011472,PLACE1011563, PLACE1011664, PLACE1011682, PLACE1011982, PLACE4000049, PLACE4000300,PLACE4000558,

[0352] THYRO1000368, THYRO1000662, THYRO1000712, THYRO1000783, THYRO1000952, THYRO1000988, THYRO1001661, THYRO1001854, Y79AA1000037, Y79AA1000059, Y79AA1000985, Y79AA1001105, Y79AA1001177, Y79AA1001211, Y79AA1001281, Y79AA1001533, Y79AA1001923, Y79AA1002083, Y79AA1002204, Y79AA1002407,

Group (3): 1797 Clones

[0353] Among the 3690 clones, the following 1797 clones were full-length, and novel clones, in which the number of the identical human ESTs for the 5′-end sequence is not more than 20 (except clones in which at least either of the 5′-end or 3′-end sequence, or both of them are not identical to any of human ESTs, and clones in which the number of the identical human ESTs for both the 5′-end and 3′-end sequences is 1 or higher and not more than 5).

[0354] HEMBA1000005, HEMBA1000012, HEMBA1000020, HEMBA1000030, HEMBA1000076, HEMBA1000141, HEMBA1000168, HEMBA1000185, HEMBA1000307, HEMBA1000327, HEMBA1000356, HEMBA1000387, HEMBA1000456, HEMBA1000460, HEMBA1000490, HEMBA1000491, HEMBA1000501, HEMBA1000520, HEMBA1000561, HEMBA1000588, HEMBA1000591, HEMBA1000592, HEMBA1000608, HEMBA1000636, HEMBA1000682, HEMBA1000686, HEMBA1000719, HEMBA1000727, HEMBA1000817, HEMBA1000851, HEMBA1000946, HEMBA1001008, HEMBA1001059, HEMBA1001088, HEMBA1001122, HEMBA1001197, HEMBA1001213, HEMBA1001247, HEMBA1001303, HEMBA1001326, HEMBA1001351,HEMBA1001361, HEMBA1001387, HEMBA1001405, HEMBA1001450, HEMBA1001526, HEMBA1001569,HEMBA1001595, HEMBA1001620, HEMBA1001655, HEMBA1001672, HEMBA1001711, HEMBA1001714,HEMBA1001723, HEMBA1001809, HEMBA1001824, HEMBA1001847, HEMBA1001913, HEMBA1001921,HEMBA1001939, HEMBA1001950, HEMBA1001967,

[0355] HEMBA1002150, HEMBA1002151, HEMBA1002215, HEMBA1002241, HEMBA1002267, HEMBA1002341, HEMBA1002458, HEMBA1002460, HEMBA1002462, HEMBA1002469, HEMBA1002475, HEMBA1002542, HEMBA1002569, HEMBA1002583, HEMBA1002609, HEMBA1002624, HEMBA1002696, HEMBA1002768, HEMBA1002770, HEMBA1002777, HEMBA1002779, HEMBA1002794, HEMBA1002810, HEMBA1002816, HEMBA1002818, HEMBA1002876, HEMBA1002937, HEMBA1002939, HEMBA1002951, HEMBA1002954, HEMBA1003033, HEMBA1003046, HEMBA1003096, HEMBA1003136, HEMBA1003148, HEMBA1003179, HEMBA1003222, HEMBA1003281, HEMBA1003286, HEMBA1003369, HEMBA1003403,HEMBA1003408, HEMBA1003417, HEMBA1003418, HEMBA1003447, HEMBA1003463, HEMBA1003528,HEMBA1003555, HEMBA1003560, HEMBA1003569, HEMBA1003591, HEMBA1003615, HEMBA1003617,HEMBA1003646, HEMBA1003662, HEMBA1003679, HEMBA1003684, HEMBA1003690, HEMBA1003711,HEMBA1003729, HEMBA1003742, HEMBA1003783, HEMBA1003803, HEMBA1003805, HEMBA1003838,HEMBA1003864, HEMBA1003959, HEMBA1003978,

[0356] HEMBA1004055, HEMBA1004086, HEMBA1004111, HEMBA1004131, HEMBA1004143, HEMBA1004168, HEMBA1004202, HEMBA1004203, HEMBA1004227, HEMBA1004248, HEMBA1004264, HEMBA1004274, HEMBA1004276, HEMBA1004330, HEMBA1004353, HEMBA1004408, HEMBA1004509, HEMBA1004534, HEMBA1004604, HEMBA1004610, HEMBA1004637, HEMBA1004669, HEMBA1004725, HEMBA1004734, HEMBA1004763, HEMBA1004776, HEMBA1004847, HEMBA1004864, HEMBA1004933, HEMBA1004934, HEMBA1004954, HEMBA1005009, HEMBA1005029, HEMBA1005047, HEMBA1005101, HEMBA1005185, HEMBA1005201, HEMBA1005202, HEMBA1005206, HEMBA1005252, HEMBA1005296,HEMBA1005382, HEMBA1005394, HEMBA1005403, HEMBA1005423, HEMBA1005472, HEMBA1005474,HEMBA1005475, HEMBA1005513, HEMBA1005528, HEMBA1005530, HEMBA1005558, HEMBA1005581,HEMBA1005582, HEMBA1005621, HEMBA1005666, HEMBA1005852, HEMBA1005990,

[0357] HEMBA1006035, HEMBA1006081, HEMBA1006091, HEMBA1006108, HEMBA1006130, HEMBA1006155, HEMBA1006235, HEMBA1006248, HEMBA1006283, HEMBA1006284, HEMBA1006309, HEMBA1006310, HEMBA1006347, HEMBA1006485, HEMBA1006507, HEMBA1006521, HEMBA1006559, HEMBA1006612, HEMBA1006624, HEMBA1006631, HEMBA1006652, HEMBA1006659, HEMBA1006708, HEMBA1006789, HEMBA1006885, HEMBA1006914, HEMBA1006926, HEMBA1006941, HEMBA1007018, HEMBA1007080, HEMBA1007085, HEMBA1007087, HEMBA1007112, HEMBA1007121, HEMBA1007149, HEMBA1007174, HEMBA1007194, HEMBA1007224, HEMBA1007243, HEMBA1007301, HEMBA1007319,

[0358] HEMBB1000018, HEMBB1000036, HEMBB1000037, HEMBB1000048, HEMBB1000119, HEMBB1000136, HEMBB1000217, HEMBB1000266, HEMBB1000592, HEMBB1000623, HEMBB1000630, HEMBB1000631, HEMBB1000705, HEMBB1000763, HEMBB1000774, HEMBB1000807, HEMBB1000985, HEMBB1001056, HEMBB1001068, HEMBB1001112, HEMBB1001117, HEMBB1001137, HEMBB1001151, HEMBB1001182, HEMBB1001210, HEMBB1001242, HEMBB1001288, HEMBB1001289, HEMBB1001294, HEMBB1001331, HEMBB1001384, HEMBB1001429, HEMBB1001603, HEMBB1001673, HEMBB1001684, HEMBB1001695, HEMBB1001736, HEMBB1001869, HEMBB1001945, HEMBB1001947, HEMBB1001990, HEMBB1002134, HEMBB1002329, HEMBB1002342, HEMBB1002409, HEMBB1002510, HEMBB1002550,HEMBB1002600, HEMBB1002697,

[0359] MAMMA1000055, MAMMA1000085, MAMMA1000163, MAMMA1000173, MAMMA1000278, MAMMA1000284, MAMMA1000395, MAMMA1000422, MAMMA1000429, MAMMA1000468, MAMMA1000490, MAMMA1000612, MAMMA1000625, MAMMA1000670, MAMMA1000734, MAMMA1000738, MAMMA1000824, MAMMA1000859, MAMMA1001008, MAMMA1001059, MAMMA1001073, MAMMA1001075, MAMMA1001202, MAMMA1001259, MAMMA1001271, MAMMA1001292, MAMMA1001476, MAMMA1001576, MAMMA1001649, MAMMA1001654, MAMMA1001735, MAMMA1001744, MAMMA1001754, MAMMA1001771, MAMMA1001785, MAMMA1001812, MAMMA1002011, MAMMA1002041, MAMMA1002143, MAMMA1002236, MAMMA1002351,MAMMA1002385, MAMMA1002434, MAMMA1002461, MAMMA1002470, MAMMA1002485, MAMMA1002530,MAMMA1002585, MAMMA1002598, MAMMA1002619, MAMMA1002684, MAMMA1002769, MAMMA1002775,MAMMA1002869, MAMMA1002890, MAMMA1002937, MAMMA1002947, MAMMA1003011, MAMMA1003035,MAMMA1003047, MAMMA1003057, MAMMA1003113, MAMMA1003146, MAMMA1003166,

[0360] NT2RM1000001, NT2RM1000032, NT2RM1000035, NT2RM1000037, NT2RM1000039, NT2RM1000055, NT2RM1000062, NT2RM1000080, NT2RM1000086, NT2RM1000092, NT2RM1000119, NT2RM1000127, NT2RM1000132, NT2RM1000153, NT2RM1000187, NT2RM1000199, NT2RM1000244, NT2RM1000256, NT2RM1000257, NT2RM1000272, NT2RM1000280, NT2RM1000300, NT2RM1000341, NT2RM1000355, NT2RM1000365, NT2RM1000377, NT2RM1000388, NT2RM1000394, NT2RM1000430, NT2RM1000499, NT2RM1000539, NT2RM1000553, NT2RM1000555, NT2RM1000648, NT2RM1000661, NT2RM1000669, NT2RM1000672, NT2RM1000691, NT2RM1000699, NT2RM1000702, NT2RM1000741, NT2RM1000746, NT2RM1000770, NT2RM1000780, NT2RM1000781, NT2RM1000800, NT2RM1000826, NT2RM1000829, NT2RM1000833, NT2RM1000852, NT2RM1000857, NT2RM1000867, NT2RM1000874, NT2RM1000882, NT2RM1000883, NT2RM1000898, NT2RM1000905, NT2RM1000924, NT2RM1000927, NT2RM1000962, NT2RM1001003, NT2RM1001043, NT2RM1001044, NT2RM1001074, NT2RM1001102,NT2RM1001105, NT2RM1001112, NT2RM1001139,

[0361] NT2RM2000006, NT2RM2000013, NT2RM2000030, NT2RM2000032, NT2RM2000092, NT2RM2000093, NT2RM2000101, NT2RM2000191, NT2RM2000192, NT2RM2000239, NNNNNNNNNNNN, NT2RM2000260, NT2RM2000287, NT2RM2000322, NT2RM2000359, NT2RM2000368, NT2RM2000371, NT2RM2000395, NT2RM2000402, NT2RM2000407, NT2RM2000420, NT2RM2000422, NT2RM2000452, NT2RM2000490, NT2RM2000502, NT2RM2000504, NT2RM2000522, NT2RM2000540, NT2RM2000569, NT2RM2000577, NT2RM2000581, NT2RM2000612, NT2RM2000624, NT2RM2000639, NT2RM2000649, NT2RM2000669, NT2RM2000691, NT2RM2000714, NT2RM2000735, NT2RM2000740, NT2RM2000821, NT2RM2000837, NT2RM2000952, NT2RM2000984, NT2RM2001035, NT2RM2001065, NT2RM2001100, NT2RM2001131, NT2RM2001152, NT2RM2001177, NT2RM2001194, NT2RM2001196, NT2RM2001201, NT2RM2001221, NT2RM2001238, NT2RM2001243, NT2RM2001256, NT2RM2001291, NT2RM2001306, NT2RM2001319, NT2RM2001345, NT2RM2001360, NT2RM2001370, NT2RM2001393, NT2RM2001420,NT2RM2001424,

[0362] NT2RM2001504, NT2RM2001524, NT2RM2001582, NT2RM2001592, NT2RM2001605, NT2RM2001613, NT2RM2001632, NT2RM2001635, NT2RM2001637, NT2RM2001648, NT2RM2001664, NT2RM2001668, NT2RM2001671, NT2RM2001675, NT2RM2001681, NT2RM2001688, NT2RM2001695, NT2RM2001696, NT2RM2001700, NT2RM2001706, NT2RM2001716, NT2RM2001718, NT2RM2001723, NT2RM2001730, NT2RM2001743, NT2RM2001760, NT2RM2001768, NT2RM2001782, NT2RM2001784, NT2RM2001785, NT2RM2001800, NT2RM2001803, NT2RM2001813, NT2RM2001823, NT2RM2001839, NT2RM2001840, NT2RM2001855, NT2RM2001867, NT2RM2001879, NT2RM2001886, NT2RM2001903, NT2RM2001935, NT2RM2001936, NT2RM2001950, NT2RM2001997, NT2RM2001998, NT2RM2002004, NT2RM2002030, NT2RM2002049, NT2RM2002055, NT2RM2002088, NT2RM2002091, NT2RM2002100, NT2RM2002109, NT2RM2002128, NT2RM2002142, NT2RM2002145, NT2RM2002178, NT2RM2002580,

[0363] NT2RM4000027, NT2RM4000030, NT2RM4000104, NT2RM4000139, NT2RM4000156, NT2RM4000191, NT2RM4000197, NT2RM4000210, NT2RM4000233, NT2RM4000324, NT2RM4000344, NT2RM4000349, NT2RM4000356, NT2RM4000395, NT2RM4000421, NT2RM4000457, NT2RM4000471, NT2RM4000511, NT2RM4000514, NT2RM4000515, NT2RM4000520, NT2RM4000531, NT2RM4000603, NT2RM4000611, NT2RM4000674, NT2RM4000689, NT2RM4000698, NT2RM4000717, NT2RM4000741, NT2RM4000751, NT2RM4000764, NT2RM4000778, NT2RM4000790, NT2RM4000813, NT2RM4000833, NT2RM4000852, NT2RM4000950, NT2RM4001002, NT2RM4001084, NT2RM4001092, NT2RM4001151, NT2RM4001155, NT2RM4001187, NT2RM4001204, NT2RM4001256, NT2RM4001258, NT2RM4001309, NT2RM4001316, NT2RM4001340, NT2RM4001347, NT2RM4001371, NT2RM4001382, NT2RM4001410, NT2RM4001411, NT2RM4001444, NT2RM4001489,

[0364] NT2RM4001565, NT2RM4001566, NT2RM4001569, NT2RM4001582, NT2RM4001597, NT2RM4001611, NT2RM4001682, NT2RM4001714, NT2RM4001731, NT2RM4001741, NT2RM4001758, NT2RM4001819, NT2RM4001823, NT2RM4001828, NT2RM4001836, NT2RM4001841, NT2RM4001865, NT2RM4001876, NT2RM4001880, NT2RM4001905, NT2RM4001922, NT2RM4001938, NT2RM4001940, NT2RM4001965, NT2RM4002013, NT2RM4002018, NT2RM4002055, NT2RM4002062, NT2RM4002128, NT2RM4002140, NT2RM4002146, NT2RM4002161, NT2RM4002189, NT2RM4002213, NT2RM4002226, NT2RM4002251, NT2RM4002256, NT2RM4002294, NT2RM4002323, NT2RM4002398, NT2RM4002534, NT2RM4002565, NT2RM4002571, NT2RM4002593, NT2RM4002594, NT2RM4002623,

[0365] NT2RP1000018, NT2RP1000035, NT2RP1000040, NT2RP1000063, NT2RP1000086, NT2RP1000101, NT2RP1000111, NT2RP1000112, NT2RP1000124, NT2RP1000130, NT2RP1000163, NT2RP1000170, NT2RP1000174, NT2RP1000191, NT2RP1000202, NT2RP1000243, NT2RP1000259, NT2RP1000272, NT2RP1000324, NT2RP1000326, NT2RP1000333, NT2RP1000348, NT2RP1000358, NT2RP1000363, NT2RP1000413, NT2RP1000416, NT2RP1000418, NT2RP1000439, NT2RP1000443, NT2RP1000470, NT2RP1000478, NT2RP1000481, NT2RP1000493, NT2RP1000513, NT2RP1000522, NT2RP1000547, NT2RP1000574, NT2RP1000577, NT2RP1000609, NT2RP1000629, NT2RP1000630, NT2RP1000688, NT2RP1000695, NT2RP1000701, NT2RP1000730, NT2RP1000738, NT2RP1000746, NT2RP1000767, NT2RP1000782, NT2RP1000825, NT2RP1000833, NT2RP1000834, NT2RP1000851, NT2RP1000856, NT2RP1000860, NT2RP1000902, NT2RP1000915, NT2RP1000943, NT2RP1000944, NT2RP1000947, NT2RP1000954, NT2RP1000958, NT2RP1000959, NT2RP1000966, NT2RP1000980,NT2RP1000988, NT2RP1001011, NT2RP1001013, NT2RP1001014, NT2RP1001033, NT2RP1001073,NT2RP1001080, NT2RP1001113, NT2RP1001173, NT2RP1001177, NT2RP1001199, NT2RP1001248, NT2RP1001253, NT2RP1001286, NT2RP1001294, NT2RP1001302, NT2RP1001310, NT2RP1001311, NT2RP1001313, NT2RP1001361, NT2RP1001385, NT2RP1001395, NT2RP1001410, NT2RP1001424, NT2RP1001432, NT2RP1001449, NT2RP1001457, NT2RP1001466, NT2RP1001475, NT2RP1001482, NT2RP1001543, NT2RP1001546, NT2RP1001569, NT2RP1001616, NT2RP1001665,

[0366] NT2RP2000001, NT2RP2000007, NT2RP2000032, NT2RP2000040, NT2RP2000045, NT2RP2000056, NT2RP2000088, NT2RP2000091, NT2RP2000114, NT2RP2000120, NT2RP2000147, NT2RP2000153, NT2RP2000157, NT2RP2000161, NT2RP2000205, NT2RP2000239, NT2RP2000248, NT2RP2000288, NT2RP2000298, NT2RP2000328, NT2RP2000329, NT2RP2000346, NT2RP2000369, NT2RP2000414, NT2RP2000438, NT2RP2000448, NT2RP2000510, NT2RP2000617, NT2RP2000634, NT2RP2000668, NT2RP2000710, NT2RP2000809, NT2RP2000892, NT2RP2000931, NT2RP2000932, NT2RP2000943, NT2RP2000965, NT2RP2000985, NT2RP2001044, NT2RP2001056, NT2RP2001065, NT2RP2001070, NT2RP2001168, NT2RP2001245, NT2RP2001268, NT2RP2001327, NT2RP2001328, NT2RP2001366, NT2RP2001378, NT2RP2001381, NT2RP2001397, NT2RP2001436, NT2RP2001520, NT2RP2001628, NT2RP2001634, NT2RP2001660, NT2RP2001675, NT2RP2001839, NT2RP2001876, NT2RP2001883, NT2RP2001898, NT2RP2001947, NT2RP2001969,

[0367] NT2RP2002033, NT2RP2002058, NT2RP2002076, NT2RP2002078, NT2RP2002099, NT2RP2002185, NT2RP2002193, NT2RP2002208, NT2RP2002235, NT2RP2002270, NT2RP2002292, NT2RP2002385, NT2RP2002408, NT2RP2002426, NT2RP2002442, NT2RP2002479, NT2RP2002498, NT2RP2002520, NT2RP2002549, NT2RP2002595, NT2RP2002618, NT2RP2002701, NT2RP2002710, NT2RP2002880, NT2RP2002928, NT2RP2002929, NT2RP2002979, NT2RP2002980, NT2RP2002993, NT2RP2003108, NT2RP2003137, NT2RP2003157, NT2RP2003158, NT2RP2003177, NT2RP2003194, NT2RP2003228, NT2RP2003243, NT2RP2003265, NT2RP2003272, NT2RP2003277, NT2RP2003280, NT2RP2003295, NT2RP2003297, NT2RP2003329, NT2RP2003391, NT2RP2003393, NT2RP2003466, NT2RP2003480, NT2RP2003506, NT2RP2003511, NT2RP2003567, NT2RP2003596, NT2RP2003604, NT2RP2003629, NT2RP2003643, NT2RP2003702, NT2RP2003713, NT2RP2003714, NT2RP2003737, NT2RP2003777, NT2RP2003793, NT2RP2003825, NT2RP2003840, NT2RP2003976, NT2RP2003981,NT2RP2003984,

[0368] NT2RP2004013, NT2RP2004042, NT2RP2004081, NT2RP2004098, NT2RP2004124, NT2RP2004152, NT2RP2004165, NT2RP2004187, NT2RP2004194, NT2RP2004196, NT2RP2004226, NT2RP2004242, NT2RP2004245, NT2RP2004364, NT2RP2004365, NT2RP2004389, NT2RP2004399, NT2RP2004463, NT2RP2004476, NT2RP2004594, NT2RP2004602, NT2RP2004614, NT2RP2004655, NT2RP2004664, NT2RP2004689, NT2RP2004710, NT2RP2004768, NT2RP2004791, NT2RP2004799, NT2RP2004802, NT2RP2004816, NT2RP2004933, NT2RP2004936, NT2RP2004985, NT2RP2005001, NT2RP2005012, NT2RP2005037, NT2RP2005126, NT2RP2005139, NT2RP2005140, NT2RP2005159, NT2RP2005162, NT2RP2005168, NT2RP2005204, NT2RP2005227, NT2RP2005270, NT2RP2005276, NT2RP2005287, NT2RP2005288, NT2RP2005315, NT2RP2005358, NT2RP2005436, NT2RP2005441, NT2RP2005453, NT2RP2005457, NT2RP2005464, NT2RP2005465, NT2RP2005490, NT2RP2005495, NT2RP2005498, NT2RP2005509, NT2RP2005525, NT2RP2005539, NT2RP2005540, NT2RP2005549,NT2RP2005620, NT2RP2005640, NT2RP2005669, NT2RP2005675, NT2RP2005712, NT2RP2005732, NT2RP2005748, NT2RP2005773, NT2RP2005784, NT2RP2005835, NT2RP2005859, NT2RP2005886, NT2RP2005890, NT2RP2005901, NT2RP2005933, NT2RP2006043, NT2RP2006071, NT2RP2006100, NT2RP2006106, NT2RP2006141, NT2RP2006196, NT2RP2006219, NT2RP2006237, NT2RP2006238, NT2RP2006312, NT2RP2006365, NT2RP2006441, NT2RP2006456, NT2RP2006472,

[0369] NT2RP3000031, NT2RP3000047, NT2RP3000085, NT2RP3000142, NT2RP3000149, NT2RP3000197, NT2RP3000252, NT2RP3000267, NT2RP3000312, NT2RP3000320, NT2RP3000333, NT2RP3000350, NT2RP3000359, NT2RP3000361, NT2RP3000366, NT2RP3000393, NT2RP3000403, NT2RP3000456, NT2RP3000487, NT2RP3000526, NT2RP3000605, NT2RP3000624, NT2RP3000739, NT2RP3000759, NT2RP3000826, NT2RP3000836, NT2RP3000847, NT2RP3000850, NT2RP3000859, NT2RP3000901, NT2RP3000917, NT2RP3000919, NT2RP3000968, NT2RP3000980, NT2RP3000994, NT2RP3001055, NT2RP3001057, NT2RP3001081, NT2RP3001084, NT2RP3001111, NT2RP3001119, NT2RP3001140, NT2RP3001147, NT2RP3001214, NT2RP3001216, NT2RP3001221, NT2RP3001253, NT2RP3001260, NT2RP3001268, NT2RP3001274, NT2RP3001297, NT2RP3001325, NT2RP3001355, NT2RP3001356, NT2RP3001384, NT2RP3001396, NT2RP3001399, NT2RP3001426, NT2RP3001427, NT2RP3001449, NT2RP3001472, NT2RP3001490, NT2RP3001497, NT2RP3001529, NT2RP3001538,NT2RP3001587, NT2RP3001621, NT2RP3001642, NT2RP3001646, NT2RP3001671, NT2RP3001672,NT2RP3001676, NT2RP3001679, NT2RP3001690, NT2RP3001698, NT2RP3001712, NT2RP3001716, NT2RP3001724, NT2RP3001727, NT2RP3001730, NT2RP3001777, NT2RP3001792, NT2RP3001854, NT2RP3001857, NT2RP3001896, NT2RP3001938, NT2RP3001943,

[0370] NT2RP3002014, NT2RP3002033, NT2RP3002045, NT2RP3002054, NT2RP3002062, NT2RP3002097, NT2RP3002102, NT2RP3002142, NT2RP3002146, NT2RP3002147, NT2RP3002165, NT2RP3002181, NT2RP3002244, NT2RP3002248, NT2RP3002255, NT2RP3002273, NT2RP3002276, NT2RP3002330, NT2RP3002343, NT2RP3002377, NT2RP3002399, NT2RP3002402, NT2RP3002455, NT2RP3002501, NT2RP3002512, NT2RP3002529, NT2RP3002545, NT2RP3002549, NT2RP3002566, NT2RP3002602, NT2RP3002628, NT2RP3002631, NT2RP3002682, NT2RP3002688, NT2RP3002763, NT2RP3002861, NT2RP3002909, NT2RP3002948, NT2RP3002969, NT2RP3002972, NT2RP3003008, NT2RP3003061, NT2RP3003068, NT2RP3003071, NT2RP3003101, NT2RP3003145, NT2RP3003150, NT2RP3003185, NT2RP3003197, NT2RP3003203, NT2RP3003210, NT2RP3003212, NT2RP3003230, NT2RP3003242, NT2RP3003278, NT2RP3003290, NT2RP3003301, NT2RP3003311, NT2RP3003313, NT2RP3003327, NT2RP3003330, NT2RP3003427, NT2RP3003490, NT2RP3003491, NT2RP3003543, NT2RP3003552, NT2RP3003555, NT2RP3003564, NT2RP3003589, NT2RP3003659, NT2RP3003672,NT2RP3003680, NT2RP3003686, NT2RP3003716, NT2RP3003805, NT2RP3003809, NT2RP3003825, NT2RP3003833, NT2RP3003914, NT2RP3003918, NT2RP3003932, NT2RP3003992, NT2RP3004013, NT2RP3004041, NT2RP3004051, NT2RP3004125, NT2RP3004189, NT2RP3004207, NT2RP3004209, NT2RP3004258, NT2RP3004262, NT2RP3004282, NT2RP3004332, NT2RP3004378, NT2RP3004424, NT2RP3004466, NT2RP3004472, NT2RP3004480, NT2RP3004498, NT2RP3004539, NT2RP3004566, NT2RP3004578,

[0371] NT2RP4000008, NT2RP4000109, NT2RP4000129, NT2RP4000147, NT2RP4000150, NT2RP4000151, NT2RP4000185, NT2RP4000212, NT2RP4000243, NT2RP4000246, NT2RP4000259, NT2RP4000263, NT2RP4000367, NT2RP4000370, NT2RP4000376, NT2RP4000381, NT2RP4000415, NT2RP4000417, NT2RP4000449, NT2RP4000455, NT2RP4000498, NT2RP4000500, NT2RP4000524, NT2RP4000528, NT2RP4000556, NT2RP4000588, NT2RP4000614, NT2RP4000648, NT2RP4000657, NT2RP4000704, NT2RP4000713, NT2RP4000724, NT2RP4000787, NT2RP4000833, NT2RP4000839, NT2RP4000855, NT2RP4000878, NT2RP4000879, NT2RP4000907, NT2RP4000918, NT2RP4000928, NT2RP4000979, NT2RP4000984, NT2RP4000989, NT2RP4001006, NT2RP4001010, NT2RP4001041, NT2RP4001079, NT2RP4001095, NT2RP4001100, NT2RP4001117, NT2RP4001122, NT2RP4001126, NT2RP4001143, NT2RP4001148, NT2RP4001149, NT2RP4001159, NT2RP4001174, NT2RP4001206, NT2RP4001207, NT2RP4001210, NT2RP4001213, NT2RP4001219, NT2RP4001228, NT2RP4001235,NT2RP4001256, NT2RP4001260, NT2RP4001274, NT2RP4001276, NT2RP4001315, NT2RP4001336,NT2RP4001339, NT2RP4001343, NT2RP4001375, NT2RP4001389, NT2RP4001414, NT2RP4001442, NT2RP4001447, NT2RP4001474, NT2RP4001498,

[0372] NT2RP4001502, NT2RP4001507, NT2RP4001524, NT2RP4001529, NT2RP4001547, NT2RP4001555, NT2RP4001567, NT2RP4001568, NT2RP4001571, NT2RP4001574, NT2RP4001575, NT2RP4001592, NT2RP4001610, NT2RP4001638, NT2RP4001644, NT2RP4001677, NT2RP4001679, NT2RP4001696, NT2RP4001730, NT2RP4001739, NT2RP4001753, NT2RP4001760, NT2RP4001803, NT2RP4001822, NT2RP4001823, NT2RP4001828, NT2RP4001838, NT2RP4001841, NT2RP4001849, NT2RP4001861, NT2RP4001893, NT2RP4001901, NT2RP4001927, NT2RP4001946, NT2RP4001950, NT2RP4001953, NT2RP4001975, NT2RP4002018, NT2RP4002071, NT2RP4002078, NT2RP4002083, NT2RP4002791, NT2RP4002888, NT2RP5003461, NT2RP5003477, NT2RP5003492, NT2RP5003522, NT2RP5003534,

[0373] OVARC1000001, OVARC1000004, OVARC1000006, OVARC1000013, OVARC1000091, OVARC1000106, OVARC1000113, OVARC1000139, OVARC1000168, OVARC1000209, OVARC1000212, OVARC1000288, OVARC1000304, OVARC1000309, OVARC1000321, OVARC1000335, OVARC1000384, OVARC1000443, OVARC1000465, OVARC1000466, OVARC1000479, OVARC1000564, OVARC1000576, OVARC1000682, OVARC1000722, OVARC1000730, OVARC1000746, OVARC1000771, OVARC1000781, OVARC1000834, OVARC1000862, OVARC1000883, OVARC1000885, OVARC1000886, OVARC1000924, OVARC1000964, OVARC1000984, OVARC1001034, OVARC1001038, OVARC1001055, OVARC1001065, OVARC1001068, OVARC1001092, OVARC1001107, OVARC1001154, OVARC1001161, OVARC1001171, OVARC1001176, OVARC1001232, OVARC1001244, OVARC1001270, OVARC1001296, OVARC1001341, OVARC1001360, OVARC1001381, OVARC1001419, OVARC1001476, OVARC1001496, OVARC1001555, OVARC1001577, OVARC1001702, OVARC1001711, OVARC1001713, OVARC1001766, OVARC1001768, OVARC1001791, OVARC1001809, OVARC1001873, OVARC1001880, OVARC1001916, OVARC1001943, OVARC1001987, OVARC1002050, OVARC1002112, OVARC1002127, OVARC1002156, OVARC1002182, PLACE1000007, PLACE1000050, PLACE1000066, PLACE1000133, PLACE1000142, PLACE1000184, PLACE1000185, PLACE1000213, PLACE1000246, PLACE1000308, PLACE1000347, PLACE1000374, PLACE1000380, PLACE1000383, PLACE1000406, PLACE1000453, PLACE1000492, PLACE1000562, PLACE1000610, PLACE1000611, PLACE1000653, PLACE1000656, PLACE1000706,PLACE1000712, PLACE1000748, PLACE1000769, PLACE1000785, PLACE1000793, PLACE1000798, PLACE1000856, PLACE1000863, PLACE1000977, PLACE1000987, PLACE1001054, PLACE1001092, PLACE1001168, PLACE1001185, PLACE1001238, PLACE1001294, PLACE1001304, PLACE1001351,PLACE1001383, PLACE1001399, PLACE1001412, PLACE1001608, PLACE1001692, PLACE1001761, PLACE1001781, PLACE1001817, PLACE1001844, PLACE1001869, PLACE1001920,

[0374] PLACE1002046, PLACE1002072, PLACE1002090, PLACE1002140, PLACE1002171, PLACE1002342, PLACE1002395, PLACE1002499, PLACE1002571, PLACE1002722, PLACE1002794, PLACE1002811, PLACE1002815, PLACE1002816, PLACE1002834, PLACE1002908, PLACE1002996, PLACE1003027, PLACE1003092, PLACE1003100, PLACE1003136, PLACE1003176, PLACE1003200, PLACE1003296, PLACE1003302, PLACE1003353, PLACE1003394, PLACE1003454, PLACE1003537, PLACE1003592, PLACE1003596, PLACE1003602, PLACE1003625, PLACE1003704, PLACE1003886, PLACE1003892, PLACE1003903, PLACE1003915, PLACE1003923, PLACE1003968,

[0375] PLACE1004103, PLACE1004183, PLACE1004258, PLACE1004316, PLACE1004358, PLACE1004376, PLACE1004405, PLACE1004437, PLACE1004550, PLACE1004629, PLACE1004674, PLACE1004736, PLACE1004777, PLACE1004814, PLACE1004902, PLACE1004930, PLACE1004969, PLACE1004982, PLACE1005027, PLACE1005055, PLACE1005066, PLACE1005101, PLACE1005102, PLACE1005181, PLACE1005187, PLACE1005261, PLACE1005287, PLACE1005305, PLACE1005308, PLACE1005327, PLACE1005335, PLACE1005373, PLACE1005550, PLACE1005557, PLACE1005595, PLACE1005603, PLACE1005623, PLACE1005630, PLACE1005698, PLACE1005727, PLACE1005739,PLACE1005803, PLACE1005813, PLACE1005851, PLACE1005955,

[0376] PLACE1006040, PLACE1006119, PLACE1006139, PLACE1006159, PLACE1006167, PLACE1006196, PLACE1006236, PLACE1006246, PLACE1006325, PLACE1006335, PLACE1006469, PLACE1006488, PLACE1006492, PLACE1006615, PLACE1006678, PLACE1006819, PLACE1006883, PLACE1006917, PLACE1006989, PLACE1007021, PLACE1007053, PLACE1007105, PLACE1007178, PLACE1007238, PLACE1007239, PLACE1007243, PLACE1007282, PLACE1007367, PLACE1007386, PLACE1007402, PLACE1007409, PLACE1007416, PLACE1007454, PLACE1007507, PLACE1007511, PLACE1007547, PLACE1007598, PLACE1007621, PLACE1007632, PLACE1007645, PLACE1007649, PLACE1007688, PLACE1007690, PLACE1007697, PLACE1007705, PLACE1007706, PLACE1007725,PLACE1007730, PLACE1007746, PLACE1007846, PLACE1007858, PLACE1007908, PLACE1007954,PLACE1007955, PLACE1007958, PLACE1007969, PLACE1007990,

[0377] PLACE1008044, PLACE1008122, PLACE1008132, PLACE1008198, PLACE1008209, PLACE1008356, PLACE1008368, PLACE1008398, PLACE1008429, PLACE1008524, PLACE1008531, PLACE1008568, PLACE1008603, PLACE1008629, PLACE1008650, PLACE1009027, PLACE1009045, PLACE1009060, PLACE1009091, PLACE1009186, PLACE1009298, PLACE1009319, PLACE1009338, PLACE1009444, PLACE1009468, PLACE1009476, PLACE1009571, PLACE1009581, PLACE1009596, PLACE1009622, PLACE1009670, PLACE1009721, PLACE1009731, PLACE1009763, PLACE1009845, PLACE1009921, PLACE1009995,

[0378] PLACE1010023, PLACE1010031, PLACE1010053, PLACE1010074, PLACE1010076, PLACE1010096, PLACE1010102, PLACE1010105, PLACE1010106, PLACE1010134, PLACE1010152, PLACE1010194, PLACE1010274, PLACE1010362, PLACE1010364, PLACE1010383, PLACE1010491, PLACE1010492, PLACE1010522, PLACE1010529, PLACE1010599, PLACE1010622, PLACE1010630, PLACE1010720, PLACE1010761, PLACE1010771, PLACE1010786, PLACE1010800, PLACE1010833, PLACE1010856, PLACE1010857, PLACE1010870, PLACE1010877, PLACE1010925, PLACE1010944, PLACE1010960, PLACE1011041, PLACE1011090, PLACE1011160, PLACE1011214, PLACE1011219, PLACE1011221, PLACE1011263, PLACE1011291, PLACE1011310, PLACE1011332, PLACE1011371, PLACE1011433, PLACE1011477, PLACE1011586, PLACE1011646, PLACE1011675, PLACE1011858, PLACE1011923,

[0379] PLACE2000007, PLACE2000021, PLACE2000030, PLACE2000164, PLACE2000172, PLACE2000302, PLACE2000341, PLACE2000399, PLACE2000404, PLACE2000427, PLACE3000009, PLACE3000121, PLACE3000148, PLACE3000156, PLACE3000160, PLACE3000197, PLACE3000226, PLACE3000242, PLACE3000339, PLACE3000353, PLACE3000413, PLACE3000477, PLACE4000009, PLACE4000034, PLACE4000089, PLACE4000106, PLACE4000259, PLACE4000269, PLACE4000326, PLACE4000369, PLACE4000431, PLACE4000445, PLACE4000581, PLACE4000593, PLACE4000650, PLACE4000670,

[0380] SKNMC1000046,SKNMC1000050,SKNMC1000091, THYRO1000017, THYRO1000040, THYRO1000121, THYRO1000173, THYRO1000197, THYRO1000199, THYRO1000206, THYRO1000242, THYRO1000270, THYRO1000288, THYRO1000320, THYRO1000327, THYRO1000358, THYRO1000394, THYRO1000401, THYRO1000488, THYRO1000502, THYRO1000569, THYRO1000570, THYRO1000585, THYRO1000605, THYRO1000715, THYRO1000756, THYRO1000777, THYRO1000829, THYRO1000855, THYRO1000926, THYRO1000983, THYRO1000984, THYRO1001120, THYRO1001134, THYRO1001173, THYRO1001204, THYRO1001271, THYRO1001287, THYRO1001313, THYRO1001347, THYRO1001363, THYRO1001405, THYRO1001406, THYRO1001537, THYRO1001584, THYRO1001671, THYRO1001703, THYRO1001721, THYRO1001793,

[0381] VESEN1000122, Y79AA1000013, Y79AA1000181, Y79AA1000202, Y79AA1000214, Y79AA1000230, Y79AA1000231, Y79AA1000258, Y79AA1000313, Y79AA1000328, Y79AA1000342, Y79AA1000368, Y79AA1000420, Y79AA1000469, Y79AA1000480, Y79AA1000539, Y79AA1000540, Y79AA1000560, Y79AA1000574, Y79AA1000589, Y79AA1000705, Y79AA1000734, Y79AA1000748, Y79AA1000752, Y79AA1000774, Y79AA1000782, Y79AA1000784, Y79AA1000794, Y79AA1000800, Y79AA1000833, Y79AA1000966, Y79AA1000968, Y79AA1001023, Y79AA1001041, Y79AA1001048, Y79AA1001077, Y79AA1001078, Y79AA1001216, Y79AA1001228, Y79AA1001236, Y79AA1001312, Y79AA1001323, Y79AA1001394, Y79AA1001402, Y79AA1001493, Y79AA1001511, Y79AA1001548, Y79AA1001585, Y79AA1001603, Y79AA1001647, Y79AA1001665, Y79AA1001679, Y79AA1001696, Y79AA1001705, Y79AA1001711, Y79AA1001781, Y79AA1001805, Y79AA1001827, Y79AA1001963, Y79AA1002027, Y79AA1002089, Y79AA1002093, Y79AA1002125, Y79AA1002208, Y79AA1002209, Y79AA1002210, Y79AA1002234, Y79AA1002258, Y79AA1002307, Y79AA1002311, Y79AA1002351,Y79AA1002416, Y79AA1002487,

Group (4): 453 Clones

[0382] Among the 1857 clones having the maximal ATGpr1 score not more than 0.3 (including the 9 clones whose 5′-end sequence does not contain the ATG codon), the following 453 clones were judged to be full-length since their ATGpr2 score was 0.3 or higher (Table 11). The clones were novel clones, in which at least either of the 5′-end or 3′-end sequence is not identical to any of human ESTs.

[0383] HEMBA1000180, HEMBA1000280, HEMBA1000282, HEMBA1000333, HEMBA1000351, HEMBA1000357, HEMBA1000376, HEMBA1000469, HEMBA1000504, HEMBA1000519, HEMBA1000545, HEMBA1000557, HEMBA1000575, HEMBA1000726, HEMBA1000822, HEMBA1000934, HEMBA1000943, HEMBA1000960, HEMBA1000972, HEMBA1001020, HEMBA1001051, HEMBA1001060, HEMBA1001071, HEMBA1001208, HEMBA1001319, HEMBA1001383, HEMBA1001411, HEMBA1001433, HEMBA1001435, HEMBA1001478, HEMBA1001522, HEMBA1001636, HEMBA1001651, HEMBA1001658, HEMBA1001709, HEMBA1001745, HEMBA1001791, HEMBA1001835, HEMBA1001844, HEMBA1001888, HEMBA1001940,HEMBA1001962, HEMBA1002022, HEMBA1002185, HEMBA1002348, HEMBA1002621, HEMBA1002645,HEMBA1002661, HEMBA1002728, HEMBA1002921, HEMBA1002924, HEMBA1002934, HEMBA1002968,

[0384] HEMBA1003037, HEMBA1003071, HEMBA1003166, HEMBA1003202, HEMBA1003204, HEMBA1003220, HEMBA1003229, HEMBA1003276, HEMBA1003296, HEMBA1003373, HEMBA1003531, HEMBA1003640, HEMBA1003856, HEMBA1003926, HEMBA1003942, HEMBA1003987, HEMBA1004024, HEMBA1004267, HEMBA1004323, HEMBA1004433, HEMBA1004577, HEMBA1004730, HEMBA1004778, HEMBA1004803, HEMBA1004807, HEMBA1004880, HEMBA1004900, HEMBA1004983, HEMBA1005123, HEMBA1005241, HEMBA1005311, HEMBA1005318, HEMBA1005353, HEMBA1005374, HEMBA1005447, HEMBA1005588, HEMBA1005593, HEMBA1005606, HEMBA1005679, HEMBA1005894, HEMBA1005911,HEMBA1006036, HEMBA1006124, HEMBA1006253, HEMBA1006259, HEMBA1006364, HEMBA1006380,HEMBA1006426, HEMBA1006562, HEMBA1006597, HEMBA1006639, HEMBA1006653, HEMBA1006696,HEMBA1006744, HEMBA1006824, HEMBA1006949, HEMBA1007078, HEMBA1007129, HEMBA1007147,HEMBA1007206, HEMBA1007279, HEMBA1007327,

[0385] HEMBB1000005, HEMBB1000055, HEMBB1000144, HEMBB1000258, HEMBB1000318, HEMBB1000335, HEMBB1000354, HEMBB1000374, HEMBB1000402, HEMBB1000404, HEMBB1000480, HEMBB1000493, HEMBB1000554, HEMBB1000573, HEMBB1000649, HEMBB1000652, HEMBB1000709, HEMBB1000749, HEMBB1000790, HEMBB1000827, HEMBB1000831, HEMBB1000893, HEMBB1001004, HEMBB1001008, HEMBB1001047, HEMBB1001315, HEMBB1001317, HEMBB1001326, HEMBB1001367, HEMBB1001424, HEMBB1001436, HEMBB1001458, HEMBB1001535, HEMBB1001565, HEMBB1001747, HEMBB1001749, HEMBB1001797, HEMBB1001836, HEMBB1001863, HEMBB1001875, HEMBB1001911, HEMBB1001922, HEMBB1001925, HEMBB1001944, HEMBB1001983, HEMBB1001996, HEMBB1001997,HEMBB1002092, HEMBB1002247, HEMBB1002266, HEMBB1002387, HEMBB1002425, HEMBB1002458, HEMBB1002522, HEMBB1002534, HEMBB1002582, HEMBB1002596, HEMBB1002617, HEMBB1002702,

[0386] MAMMA1000043, MAMMA1000092, MAMMA1000129, MAMMA1000198, MAMMA1000221, MAMMA1000307, MAMMA1000331, MAMMA1000360, MAMMA1000402, MAMMA1000414, MAMMA1000500, MAMMA1000522, MAMMA1000576, MAMMA1000594, MAMMA1000597, MAMMA1000720, MAMMA1000775, MAMMA1000778, MAMMA1000798, MAMMA1000862, MAMMA1000876, MAMMA1000931, MAMMA1000940, MAMMA1000941, MAMMA1000975, MAMMA1001038, MAMMA1001186, MAMMA1001220, MAMMA1001256, MAMMA1001274, MAMMA1001341, MAMMA1001397, MAMMA1001420, MAMMA1001547, MAMMA1001670, MAMMA1001679, MAMMA1001711, MAMMA1001745, MAMMA1001760, MAMMA1001769, MAMMA1001815,MAMMA1001907, MAMMA1002056, MAMMA1002078, MAMMA1002093, MAMMA1002125, MAMMA1002132,MAMMA1002145, MAMMA1002250, MAMMA1002311, MAMMA1002411, MAMMA1002498, MAMMA1002571,MAMMA1002701, MAMMA1002727, MAMMA1002728, MAMMA1002746, MAMMA1002764, MAMMA1002765,MAMMA1002820, MAMMA1002830, MAMMA1002909, MAMMA1002941, MAMMA1002973, MAMMA1003004,MAMMA1003007, MAMMA1003039, MAMMA1003089,

[0387] NT2RM4000086, NT2RM4000265, NT2RM4000414, NT2RM4000779, NT2RM4000855, NT2RM4001160, NT2RM4001313, NT2RM4001437, NT2RM4001754, NT2RM4001953, NT2RM4001984, NT2RP2000077, NT2RP2000183, NT2RP2000420, NT2RP2000678, NT2RP2000715, NT2RP2000842, NT2RP2000970, NT2RP2001149, NT2RP2001226, NT2RP2001295, NT2RP2001347, NT2RP2001569, NT2RP2001663, NT2RP2001936, NT2RP2002041, NT2RP2002172, NT2RP2002219, NT2RP2002316, NT2RP2002546, NT2RP2002591, NT2RP2002643, NT2RP2002741, NT2RP2002750, NT2RP2002778, NT2RP2002857, NT2RP2003000, NT2RP2003073, NT2RP2003237, NT2RP2003394, NT2RP2003517, NT2RP2003668, NT2RP2003988, NT2RP2004232, NT2RP2004523, NT2RP2004736, NT2RP2004767, NT2RP2004775, NT2RP2004961, NT2RP2004962, NT2RP2004982, NT2RP2005407, NT2RP2005726, NT2RP2006258, NT2RP2006261, NT2RP2006454, NT2RP3000055, NT2RP3000233, NT2RP3000341, NT2RP3000418, NT2RP3000451, NT2RP3000561, NT2RP3000582, NT2RP3001281, NT2RP3001339,NT2RP3001340, NT2RP3001383, NT2RP3001432, NT2RP3001580, NT2RP3001589, NT2RP3002004,NT2RP3002173, NT2RP3003133, NT2RP3003346, NT2RP3003403, NT2RP3003576, NT2RP3003625, NT2RP3003665, NT2RP3003800, NT2RP3003828, NT2RP3004070, NT2RP3004470, NT2RP4000023, NT2RP4000035, NT2RP4000102, NT2RP4000167, NT2RP4000214, NT2RP4000218, NT2RP4000424, NT2RP4000915, NT2RP4002075,

OVARC1000085, OVARC1000092, OVARC1000145, OVARC1000414, OVARC1000496, OVARC1000526, OVARC1000948, OVARC1001011, OVARC1001600, OVARC1001805, OVARC1001813, OVARC1001846,

[0388] PLACE1000540, PLACE1000599, PLACE1001088, PLACE1001377, PLACE1001440, PLACE1001517, PLACE1001672, PLACE1001756, PLACE1002157, PLACE1002205, PLACE1002259, PLACE1002399, PLACE1002477, PLACE1002583, PLACE1002968, PLACE1003238, PLACE1003566, PLACE1003593, PLACE1003618, PLACE1004274, PLACE1004716, PLACE1004773, PLACE1004815, PLACE1004979, PLACE1005052, PLACE1005086, PLACE1005128, PLACE1005176, PLACE1005467, PLACE1005639, PLACE1005850, PLACE1006003, PLACE1006017, PLACE1006288, PLACE1006371, PLACE1006629, PLACE1007478, PLACE1008330, PLACE1008584, PLACE1008851, PLACE1008941, PLACE1009039, PLACE1009493, PLACE1009539, PLACE1009637, PLACE1009947, PLACE1010231, PLACE1010562, PLACE1010579, PLACE1010739, PLACE1010802, PLACE1010896, PLACE1011032, PLACE1011185, PLACE1011452, PLACE1011465, PLACE1011520, PLACE1011567, PLACE1011719, PLACE2000011, PLACE2000017, PLACE2000061, PLACE2000187, PLACE2000216, PLACE2000335, PLACE2000347, PLACE2000366, PLACE2000394, PLACE2000398, PLACE2000425, PLACE2000450, PLACE2000477, PLACE3000119, PLACE3000207, PLACE3000230, PLACE3000271, PLACE3000373, PLACE3000399, PLACE3000401, PLACE3000406, PLACE4000247, PLACE4000320, PLACE4000367, PLACE4000401,

[0389] THYRO1000111, THYRO1000187, THYRO1000484, THYRO1000596, THYRO1000625, THYRO1000815, THYRO1000865, THYRO1001003, THYRO1001031, THYRO1001133, THYRO1001401, THYRO1001426, THYRO1001434, THYRO1001559, THYRO1001570, THYRO1001706, THYRO1001746, THYRO1001772, THYRO1001907, Y79AA1000033, Y79AA1000346, Y79AA1000805, Y79AA1001692, Y79AA1002220,

Group (5): 24 Clones

[0390] The following 24 clones having low score in the ATGpr1 were judged to be full-length since their ATGpr2 score was 0.3 or higher (Table 11). The clones were novel clones, in which the number of the identical human ESTs for both the 5′-end and 3′-end sequences is I or higher and not more than 5.

[0391] HEMBA1000622, HEMBA1000749, HEMBA1000876, HEMBA1001226, HEMBA1001391, HEMBA1002742, HEMBA1003908, HEMBA1004000, HEMBB1000336, MAMMA1000356, MAMMA1000883, MAMMA1001590, NT2RP2000289, NT2RP2001467, PLACE1002853, PLACE1003420, PLACE1004836, PLACE1004913, PLACE1006795, PLACE1008181, PLACE1008715, PLACE4000344, THYRO1000129, THYRO1001321,

Group (6): 65 Clones

[0392] The following 65 clones having low scores in both the ATGpr1 and ATGpr2 (Table 11) were judged to be full-length, since both scores were still the maximum in a cluster compared with those of the other clones (at least 2 clones or more) in the same cluster. The clones were novel clones, in which at least either of the 5′-end or 3′-end sequence is not identical to any of human ESTs.

[0393] HEMBA1000604, HEMBA1000673, HEMBA1001024, HEMBA1001026, HEMBA1001734, HEMBA1001784, HEMBA1001808, HEMBA1003902, HEMBA1004164, HEMBA1004909, HEMBA1005232, HEMBA1005577, HEMBA1006461, HEMBA1006695, HEMBB1001119, HEMBB1001337, HEMBB1001536, HEMBB1001868, HEMBB1002045, HEMBB1002579, MAMMA1000444, MAMMA1000761, MAMMA1000943, MAMMA1001820, MAMMA1002360,

[0394] NT2RM4000366, NT2RM4001856, NT2RM4002390, NT2RP2000108, NT2RP2000257, NT2RP2001506, NT2RP2002047, NT2RP2002066, NT2RP2002475, NT2RP2004400, NT2RP2004587, NT2RP2005289, NT2RP2005694, NT2RP3001898, NT2RP3003264, NT2RP3003433, NT2RP3003842, OVARC1001240, PLACE1001323, PLACE1002227, PLACE1002500, PLACE1002604, PLACE1002772, PLACE1003478, PLACE1004681, PLACE1005108, PLACE1005932, PLACE1006318, PLACE1006368, PLACE1006506, PLACE1006904, PLACE1007557, PLACE1007877, PLACE1009048, PLACE1011109, PLACE1011643, PLACE4000548, THYRO1000279, Y79AA1000410, Y79AA1002103,

Group (7): 32 Clones

[0395] The following 32 clones having low scores in both the ATGpr1 and ATGpr2 (Table 11) were judged to be full-length, since both scores were still the maximum in a cluster compared with those of the other clones (at least 2 clones or more) in the same cluster. The clones were novel clones, in which the number of the identical human ESTs for both the 5′-end and 3′-end sequences is 1 or higher and not more than 5.

[0396] HEMBA1000251, HEMBA1001803, HEMBA1001918, HEMBA1002257, HEMBA1003064, HEMBA1003714, HEMBA1004405, HEMBA1005508, HEMBB1000054, HEMBB1001142, MAMMA1000175, MAMMA1001162, MAMMA1002972, NT2RM4000425, NT2RP2004512, NT2RP2005531, NT2RP2005942, NT2RP2006554, NT2RP3001007, NT2RP3001318, OVARC1000017, OVARC1000068, OVARC1000486, PLACE1001705, PLACE1002319, PLACE1007743, PLACE1007829, PLACE1008630, PLACE1009925, PLACE1011492, PLACE1011749, THYRO1000793,

[0397] The following 117 clones, selected by assembling the sequence of the other clones in the same cluster and human ESTs, have high fullness ratio. The clones were classified into the following group (8) and (9).

[0398] HEMBA1001323, HEMBA1001330, HEMBA1001712, HEMBA1001820, HEMBA1002204, HEMBA1002349, HEMBA1002538, HEMBA1003309, HEMBA1003939, HEMBA1004015, HEMBA1004295, HEMBA1004672, HEMBA1004865, HEMBA1005251, HEMBA1006158, HEMBA1006676, HEMBA1006779, HEMBA1007288, HEMBB1000218, HEMBB1000272, HEMBB1000399, HEMBB1000491, HEMBB1000996, HEMBB1001114, HEMBB1001850, HEMBB1002015, MAMMA1000287, MAMMA1001683, MAMMA1001686, MAMMA1002612,

[0399] NT2RM2000609, NT2RM4002438, NT2RM4002567, NT2RP2000270, NT2RP2000758, NT2RP2001290, NT2RP2001526, NT2RP2002124, NT2RP2002736, NT2RP2002753, NT2RP2003456, NT2RP2003727, NT2RP2003871, NT2RP2003968, NT2RP2004321, NT2RP2004412, NT2RP2004580, NT2RP2005293, NT2RP2005476, NT2RP2005753, NT2RP2005815, NT2RP2005841, NT2RP2005857, NT2RP2006393, NT2RP2006467, NT2RP3000109, NT2RP3000449, NT2RP3001245, NT2RP3001634, NT2RP3002056, NT2RP3002810, NT2RP3002955, NT2RP3003032, NT2RP3003138, NT2RP3003500, NT2RP3003819, NT2RP4000078, NT2RP4000515, NT2RP4000517, NT2RP4001407, NT2RP4001889, NT2RP4002905,

[0400] OVARC1000071, OVARC1001883, PLACE1000292, PLACE1001007, PLACE1001395, PLACE1001691, PLACE1001746, PLACE1001748, PLACE1001845, PLACE1002066, PLACE1003373, PLACE1003900, PLACE1004118, PLACE1004256, PLACE1004284, PLACE1004336, PLACE1004506, PLACE1004934, PLACE1005077, PLACE1005111, PLACE1005409, PLACE1005730, PLACE1006076, PLACE1006360, PLACE1006470, PLACE1006760, PLACE1006867, PLACE1007045, PLACE1007111, PLACE1007807, PLACE1008080, PLACE1008244, PLACE1008369, PLACE1008405, PLACE1008426, PLACE1008621, PLACE1009020, PLACE1009621, PLACE1010089, PLACE1100270, PLACE3000276,THYRO1000805, THYRO1001365, THYRO1001673, Y79AA1001848,

Group (8): 36 Clones

[0401] Among the 117 clones described above, the following 36 clones were novel clones, in which at least either of the 5′-end or 3′-end sequence, or both of them were not identical to any of human ESTs.

[0402] HEMBA1001330, HEMBA1001712, HEMBA1001820, HEMBA1002204, HEMBA1002349, HEMBA1003939, HEMBA1004295, HEMBA1004865, HEMBA1006779, HEMBB1000218, HEMBB1000491, HEMBB1000996, HEMBB1001114, MAMMA1000287, MAMMA1001686, MAMMA1002612, NT2RP2002736, NT2RP2003727, NT2RP2004580, NT2RP2005841, NT2RP2006393, PLACE1002066, PLACE1003373, PLACE1003900, PLACE1004118, PLACE1004336, PLACE1004506, PLACE1004934, PLACE1005409, PLACE1005730, PLACE1006470, PLACE1008080, PLACE3000276, THYRO1000805, THYRO1001365, THYRO1001673,

Group (9): 81 Clones

[0403] Among the 117 clones described above, the following 81 clones were the clones in which the number of the identical human ESTs for the 5′-end sequence is not more than 20 (except clones in which at least either of the 5′-end or 3′-end sequence, or both of them are not identical to any of human ESTs, and clones in which the number of the identical human ESTs for both the 5′-end and 3′-end sequences is 1 or higher and not more than 5).

[0404] HEMBA1001323, HEMBA1002538, HEMBA1003309, HEMBA1004015, HEMBA1004672, HEMBA1005251, HEMBA1006158, HEMBA1006676, HEMBA1007288, HEMBB1000272, HEMBB1000399, HEMBB1001850, HEMBB1002015, MAMMA1001683, NT2RM2000609, NT2RM4002438, NT2RM4002567, NT2RP2000270, NT2RP2000758, NT2RP2001290, NT2RP2001526, NT2RP2002124, NT2RP2002753, NT2RP2003456, NT2RP2003871, NT2RP2003968, NT2RP2004321, NT2RP2004412, NT2RP2005293, NT2RP2005476, NT2RP2005753, NT2RP2005815, NT2RP2005857, NT2RP2006467, NT2RP3000109, NT2RP3000449, NT2RP3001245, NT2RP3001634, NT2RP3002056, NT2RP3002810, NT2RP3002955, NT2RP3003032, NT2RP3003138, NT2RP3003500, NT2RP3003819, NT2RP4000078, NT2RP4000515, NT2RP4000517, NT2RP4001407, NT2RP4001889, NT2RP4002905,

[0405] OVARC1000071, OVARC1001883, PLACE1000292, PLACE1001007, PLACE1001395, PLACE1001691, PLACE1001746, PLACE1001748, PLACE1001845, PLACE1004256, PLACE1004284, PLACE1005077, PLACE1005111, PLACE1006076, PLACE1006360, PLACE1006760, PLACE1006867, PLACE1007045, PLACE1007111, PLACE1007807, PLACE1008244, PLACE1008369, PLACE1008405, PLACE1008426, PLACE1008621, PLACE1009020, PLACE1009621, PLACE1010089, PLACE1010270, Y79AA1001848,

Group (10): 938 Clones

[0406] The following 938 clones having low scores in both the ATGpr1 and ATGpr2 were judged to be full-length according to the fullness ratio shown in Table 4. The clones were novel clones, in which at least the 5′-end sequence was not identical to any of human ESTs.

[0407] HEMBA1000042, HEMBA1000213, HEMBA1000264, HEMBA1000355, HEMBA1000366, HEMBA1000411, HEMBA1000422, HEMBA1000428, HEMBA1000434, HEMBA1000442, HEMBA1000464, HEMBA1000540, HEMBA1000563, HEMBA1000569, HEMBA1000655, HEMBA1000662, HEMBA1000702, HEMBA1000705, HEMBA1000722, HEMBA1000747, HEMBA1000769, HEMBA1000773, HEMBA1000774, HEMBA1000827, HEMBA1000843, HEMBA1000852, HEMBA1000870, HEMBA1000908, HEMBA1000985, HEMBA1000991, HEMBA1001017, HEMBA1001019, HEMBA1001094, HEMBA1001121, HEMBA1001172, HEMBA1001265, HEMBA1001327, HEMBA1001375, HEMBA1001432, HEMBA1001454, HEMBA1001463,HEMBA1001515, HEMBA1001517, HEMBA1001557, HEMBA1001566, HEMBA1001585, HEMBA1001589, HEMBA1001608, HEMBA1001675, HEMBA1001678, HEMBA1001681, HEMBA1001718, HEMBA1001761, HEMBA1001945, HEMBA1001960, HEMBA1001964, HEMBA1001991,

[0408] HEMBA1002003, HEMBA1002008, HEMBA1002039, HEMBA1002100, HEMBA1002113, HEMBA1002139, HEMBA1002144, HEMBA1002153, HEMBA1002226, HEMBA1002253, HEMBA1002270, HEMBA1002321, HEMBA1002328, HEMBA1002337, HEMBA1002381, HEMBA1002486, HEMBA1002552, HEMBA1002555, HEMBA1002558, HEMBA1002561, HEMBA1002590, HEMBA1002628, HEMBA1002629, HEMBA1002651, HEMBA1002659, HEMBA1002666, HEMBA1002678, HEMBA1002712, HEMBA1002716, HEMBA1002730, HEMBA1002748, HEMBA1002780, HEMBA1002801, HEMBA1002826, HEMBA1002833, HEMBA1002886, HEMBA1002896, HEMBA1003083, HEMBA1003086, HEMBA1003098, HEMBA1003133, HEMBA1003197, HEMBA1003212, HEMBA1003273, HEMBA1003278, HEMBA1003304, HEMBA1003314, HEMBA1003328, HEMBA1003330, HEMBA1003348, HEMBA1003376, HEMBA1003384, HEMBA1003595, HEMBA1003597, HEMBA1003622, HEMBA1003637, HEMBA1003656, HEMBA1003715, HEMBA1003725, HEMBA1003733, HEMBA1003758, HEMBA1003773, HEMBA1003784, HEMBA1003885, HEMBA1003937, HEMBA1003950, HEMBA1003976,

[0409] HEMBA1004012, HEMBA1004045, HEMBA1004138, HEMBA1004241, HEMBA1004272, HEMBA1004306, HEMBA1004312, HEMBA1004334, HEMBA1004354, HEMBA1004356, HEMBA1004366, HEMBA1004394, HEMBA1004396, HEMBA1004429, HEMBA1004460, HEMBA1004461, HEMBA1004482, HEMBA1004506, HEMBA1004538, HEMBA1004586, HEMBA1004617, HEMBA1004629, HEMBA1004631, HEMBA1004666, HEMBA1004670, HEMBA1004733, HEMBA1004816, HEMBA1004820, HEMBA1004918, HEMBA1004956, HEMBA1004960, HEMBA1004978, HEMBA1004995, HEMBA1005008, HEMBA1005062, HEMBA1005274, HEMBA1005275, HEMBA1005293, HEMBA1005304, HEMBA1005315, HEMBA1005372, HEMBA1005389, HEMBA1005426, HEMBA1005500, HEMBA1005506, HEMBA1005511, HEMBA1005520, HEMBA1005568, HEMBA1005570, HEMBA1005616, HEMBA1005627, HEMBA1005631, HEMBA1005632, HEMBA1005670, HEMBA1005699, HEMBA1005705, HEMBA1005765, HEMBA1005780, HEMBA1005853, HEMBA1005909, HEMBA1005931, HEMBA1005934, HEMBA1005962, HEMBA1005999,

[0410] HEMBA1006002, HEMBA1006005, HEMBA1006042, HEMBA1006067, HEMBA1006090, HEMBA1006142, HEMBA1006268, HEMBA1006334, HEMBA1006359, HEMBA1006416, HEMBA1006419, HEMBA1006421, HEMBA1006446, HEMBA1006471, HEMBA1006486, HEMBA1006489, HEMBA1006546, HEMBA1006569, HEMBA1006595, HEMBA1006617, HEMBA1006635, HEMBA1006648, HEMBA1006665, HEMBA1006821, HEMBA1006849, HEMBA1006865, HEMBA1006929, HEMBA1007045, HEMBA1007051, HEMBA1007073, HEMBA1007113, HEMBA1007256, HEMBA1007273, HEMBA1007322, HEMBA1007347,

[0411] HEMBB1000039, HEMBB1000044, HEMBB1000059, HEMBB1000089, HEMBB1000099, HEMBB1000113, HEMBB1000141, HEMBB1000250, HEMBB1000264, HEMBB1000274, HEMBB1000284, HEMBB1000307, HEMBB1000312, HEMBB1000317, HEMBB1000337, HEMBB1000341, HEMBB1000343, HEMBB1000369, HEMBB1000376, HEMBB1000434, HEMBB1000441, HEMBB1000455, HEMBB1000472, HEMBB1000518, HEMBB1000530, HEMBB1000564, HEMBB1000575, HEMBB1000586, HEMBB1000598, HEMBB1000637, HEMBB1000638, HEMBB1000643, HEMBB1000665, HEMBB1000726, HEMBB1000738, HEMBB1000770, HEMBB1000794, HEMBB1000821, HEMBB1000822, HEMBB1000883, HEMBB1000888, HEMBB1000890, HEMBB1000910, HEMBB1000959, HEMBB1000981, HEMBB1001037, HEMBB1001051, HEMBB1001060, HEMBB1001133, HEMBB1001208, HEMBB1001209, HEMBB1001218, HEMBB1001221, HEMBB1001249, HEMBB1001254, HEMBB1001267, HEMBB1001282, HEMBB1001302, HEMBB1001304, HEMBB1001335, HEMBB1001348, HEMBB1001356, HEMBB1001366, HEMBB1001380, HEMBB1001443, HEMBB1001463, HEMBB1001464,

[0412] HEMBB1001521, HEMBB1001527, HEMBB1001537, HEMBB1001555, HEMBB1001586, HEMBB1001619, HEMBB1001630, HEMBB1001637, HEMBB1001641, HEMBB1001706, HEMBB1001735, HEMBB1001753, HEMBB1001762, HEMBB1001802, HEMBB1001880, HEMBB1001899, HEMBB1001921, HEMBB1001930, HEMBB1001952, HEMBB1001953, HEMBB1001973, HEMBB1001988, HEMBB1002002, HEMBB1002005, HEMBB1002009, HEMBB1002042, HEMBB1002049, HEMBB1002069, HEMBB1002115, HEMBB1002139, HEMBB1002189, HEMBB1002232, HEMBB1002254, HEMBB1002255, HEMBB1002280, HEMBB1002306, HEMBB1002364, HEMBB1002371, HEMBB1002381, HEMBB1002453, HEMBB1002477, HEMBB1002509, HEMBB1002531, HEMBB1002601, HEMBB1002603, HEMBB1002610, HEMBB1002613, HEMBB1002623, HEMBB1002635, HEMBB1002664, HEMBB1002677, HEMBB1002683, HEMBB1002686, HEMBB1002699, HEMBB1002712,

[0413] MAMMA1000009, MAMMA1000045, MAMMA1000103, MAMMA1000133, MAMMA1000134, MAMMA1000155, MAMMA1000241, MAMMA1000254, MAMMA1000264, MAMMA1000266, MAMMA1000340, MAMMA1000385, MAMMA1000423, MAMMA1000424, MAMMA1000446, MAMMA1000478, MAMMA1000501, MAMMA1000516, MAMMA1000565, MAMMA1000585, MAMMA1000605, MAMMA1000616, MAMMA1000621, MAMMA1000643, MAMMA1000669, MAMMA1000696, MAMMA1000707, MAMMA1000714, MAMMA1000718, MAMMA1000732, MAMMA1000733, MAMMA1000839, MAMMA1000845, MAMMA1000855, MAMMA1000863, MAMMA1000867, MAMMA1000880, MAMMA1000905, MAMMA1000942, MAMMA1000957, MAMMA1000987, MAMMA1000998, MAMMA1001003, MAMMA1001024, MAMMA1001030, MAMMA1001035, MAMMA1001050, MAMMA1001067, MAMMA1001082, MAMMA1001092, MAMMA1001145, MAMMA1001161, MAMMA1001203, MAMMA1001243, MAMMA1001268, MAMMA1001280, MAMMA1001298, MAMMA1001322, MAMMA1001324, MAMMA1001383, MAMMA1001408, MAMMA1001435, MAMMA1001442, MAMMA1001446,

[0414] MAMMA1001501, MAMMA1001575, MAMMA1001606, MAMMA1001671, MAMMA1001715, MAMMA1001740, MAMMA1001788, MAMMA1001818, MAMMA1001854, MAMMA1001878, MAMMA1001931, MAMMA1001992, MAMMA1002032, MAMMA1002082, MAMMA1002084, MAMMA1002108, MAMMA1002118, MAMMA1002140, MAMMA1002215, MAMMA1002267, MAMMA1002298, MAMMA1002299, MAMMA1002310, MAMMA1002322, MAMMA1002339, MAMMA1002347, MAMMA1002352, MAMMA1002361, MAMMA1002392, MAMMA1002417, MAMMA1002428, MAMMA1002446, MAMMA1002475, MAMMA1002480, MAMMA1002545, MAMMA1002556, MAMMA1002566, MAMMA1002597, MAMMA1002603, MAMMA1002623, MAMMA1002625, MAMMA1002629, MAMMA1002636, MAMMA1002662, MAMMA1002698, MAMMA1002708, MAMMA1002721, MAMMA1002744, MAMMA1002754, MAMMA1002758, MAMMA1002780, MAMMA1002833, MAMMA1002835, MAMMA1002838, MAMMA1002844, MAMMA1002858, MAMMA1002880, MAMMA1002887, MAMMA1002908, MAMMA1002930, MAMMA1002970, MAMMA1002982, MAMMA1003003, MAMMA1003019, MAMMA1003026, MAMMA1003031, MAMMA1003040, MAMMA1003055,

[0415] NT2RM4000046, NT2RM4000085, NT2RM4000200, NT2RM4000244, NT2RM4000368, NT2RM4000979, NT2RM4001016, NT2RM4001519, NT2RM4001557, NT2RM4001605, NT2RM4001810, NT2RM4001858, NT2RM4001930, NT2RM4002067, NT2RM4002278, NT2RM4002281, NT2RM4002287, NT2RM4002383, NT2RM4002479, NT2RM4002504, NT2RM4002532, NT2RP2000027, NT2RP2000098, NT2RP2000258, NT2RP2000327, NT2RP2000337, NT2RP2000459, NT2RP2000498, NT2RP2000987, NT2RP2001277, NT2RP2001312, NT2RP2001423, NT2RP2001445, NT2RP2001449, NT2RP2001677, NT2RP2001699, NT2RP2001720, NT2RP2001740, NT2RP2001762, NT2RP2001813, NT2RP2001869, NT2RP2001943, NT2RP2002032, NT2RP2002070, NT2RP2002105, NT2RP2002137, NT2RP2002192, NT2RP2002256, NT2RP2002259, NT2RP2002394, NT2RP2002439, NT2RP2002457, NT2RP2002504, NT2RP2002606, NT2RP2002727, NT2RP2002740, NT2RP2002752, NT2RP2002839, NT2RP2002987,

[0416] NT2RP2003129, NT2RP2003161, NT2RP2003164, NT2RP2003230, NT2RP2003339, NT2RP2003499, NT2RP2003522, NT2RP2003559, NT2RP2003706, NT2RP2003770, NT2RP2003859, NT2RP2003885, NT2RP2004014, NT2RP2004142, NT2RP2004170, NT2RP2004172, NT2RP2004207, NT2RP2004270, NT2RP2004300, NT2RP2004339, NT2RP2004347, NT2RP2004425, NT2RP2004490, NT2RP2004675, NT2RP2004709, NT2RP2004967, NT2RP2005020, NT2RP2005031, NT2RP2005108, NT2RP2005254, NT2RP2005325, NT2RP2005336, NT2RP2005344, NT2RP2005354, NT2RP2005360, NT2RP2005491, NT2RP2005501, NT2RP2005581, NT2RP2005645, NT2RP2005651, NT2RP2005701, NT2RP2005719, NT2RP2005741, NT2RP2005908, NT2RP2005980, NT2RP2006098, NT2RP2006103, NT2RP2006166, NT2RP2006184, NT2RP2006320, NT2RP2006321, NT2RP2006323, NT2RP2006534, NT2RP2006598,

[0417] NT2RP3000186, NT2RP3000235, NT2RP3000247, NT2RP3000433, NT2RP3000441, NT2RP3000578, NT2RP3000584, NT2RP3000622, NT2RP3000628, NT2RP3000685, NT2RP3000742, NT2RP3000815, NT2RP3000875, NT2RP3000904, NT2RP3001115, NT2RP3001232, NT2RP3001374, NT2RP3001459, NT2RP3001527, NT2RP3001607, NT2RP3001752, NT2RP3001782, NT2RP3001926, NT2RP3001989, NT2RP3002002, NT2RP3002166, NT2RP3002352, NT2RP3002687, NT2RP3002713, NT2RP3002770, NT2RP3002799, NT2RP3002978, NT2RP3003059, NT2RP3003121, NT2RP3003464, NT2RP3003572, NT2RP3003746, NT2RP3003799, NT2RP3003989, NT2RP3004016, NT2RP3004095, NT2RP3004110, NT2RP3004145, NT2RP3004148, NT2RP3004215, NT2RP3004399, NT2RP3004475, NT2RP3004503, NT2RP4000321, NT2RP4000519, NT2RP4000996,

[0418] OVARC1000133, OVARC1000198, OVARC1000240, OVARC1000427, OVARC1000431, OVARC1000533, OVARC1000543, OVARC1000573, OVARC1000578, OVARC1000678, OVARC1000679, OVARC1000700, OVARC1000769, OVARC1000802, OVARC1000891, OVARC1000897, OVARC1000936, OVARC1000937, OVARC1000960, OVARC1000971, OVARC1001000, OVARC1001062, OVARC1001072, OVARC1001085, OVARC1001118, OVARC1001129, OVARC1001169, OVARC1001261, OVARC1001268, OVARC1001282, OVARC1001330, OVARC1001339, OVARC1001342, OVARC1001357, OVARC1001442, OVARC1001480, OVARC1001542, OVARC1001547, OVARC1001615, OVARC1001726, OVARC1001795, OVARC1001900, OVARC1001901, OVARC1001911, OVARC1001989, OVARC1002044, OVARC1002066, OVARC1002143,

[0419] PLACE1000031, PLACE1000040, PLACE1000078, PLACE1000094, PLACE1000214, PLACE1000332, PLACE1000421, PLACE1000424, PLACE1000481, PLACE1000749, PLACE1000841, PLACE1000931, PLACE1000979, PLACE1001015, PLACE1001076, PLACE1001118, PLACE1001136, PLACE1001279, PLACE1001384, PLACE1001468, PLACE1001502, PLACE1001534, PLACE1001603, PLACE1001611, PLACE1001640, PLACE1001716, PLACE1001720, PLACE1001745, PLACE1001799, PLACE1001821, PLACE1001897, PLACE1002052, PLACE1002150, PLACE1002256, PLACE1002493, PLACE1002514, PLACE1002578, PLACE1002591, PLACE1002598, PLACE1002768, PLACE1002782, PLACE1002881, PLACE1002962, PLACE1003153, PLACE1003258, PLACE1003343, PLACE1003375,PLACE 1003401, PLACE1003519, PLACE1003521, PLACE1003528, PLACE1003575, PLACE1003583, PLACE1003584, PLACE1003638, PLACE1003760, PLACE1003768, PLACE1003833, PLACE1003850, PLACE1003858, PLACE1003932,

[0420] PLACE1004242, PLACE1004257, PLACE1004425, PLACE1004467, PLACE1004471, PLACE1004518, PLACE1004658, PLACE1004693, PLACE1004813, PLACE1004827, PLACE1004838, PLACE1004840, PLACE1004900, PLACE1004972, PLACE1005146, PLACE1005162, PLACE1005453, PLACE1005471, PLACE1005477, PLACE1005502, PLACE1005526, PLACE1005528, PLACE1005574, PLACE1005584, PLACE1005611, PLACE1005802, PLACE1005884, PLACE1005898, PLACE1005968, PLACE1006002, PLACE1006129, PLACE1006143, PLACE1006187, PLACE1006205, PLACE1006223, PLACE1006382, PLACE1006521, PLACE1006534, PLACE1006540, PLACE1006617, PLACE1006640, PLACE1006779, PLACE1006792, PLACE1006800, PLACE1006805, PLACE1006815, PLACE1006860,PLACE1006878, PLACE1007097, PLACE1007132, PLACE1007140, PLACE1007276, PLACE1007286, PLACE1007525, PLACE1007677, PLACE1007737, PLACE1007866,

[0421] PLACE1008045, PLACE1008111, PLACE1008201, PLACE1008231, PLACE1008392, PLACE1008424, PLACE1008437, PLACE1008455, PLACE1008625, PLACE1008748, PLACE1008757, PLACE1008798, PLACE1008807, PLACE1008920, PLACE1008947, PLACE1009150, PLACE1009246, PLACE1009308, PLACE1009410, PLACE1009477, PLACE1009613, PLACE1009639, PLACE1009879, PLACE1009888,PLACE1009924, PLACE1009935, PLACE1010069, PLACE1010083, PLACE1010181, PLACE1010341, PLACE1010624, PLACE1010628, PLACE1010631, PLACE1010662, PLACE1010916, PLACE1010947, PLACE1011057, PLACE1011133, PLACE1011143, PLACE1011296, PLACE1011340, PLACE1011419, PLACE1011503, PLACE1011641, PLACE1011649, PLACE1011650, PLACE1011729, PLACE1011778, PLACE1011874, PLACE1011962, PLACE1011995,

[0422] PLACE2000003, PLACE2000103, PLACE2000115, PLACE2000132, PLACE2000140, PLACE2000176, PLACE2000317, PLACE2000342, PLACE2000419, PLACE2000435, PLACE2000455, PLACE2000465, PLACE3000004, PLACE3000124, PLACE3000136, PLACE3000158, PLACE3000169, PLACE3000199, PLACE3000208, PLACE3000218, PLACE3000341, PLACE3000362, PLACE3000365, PLACE3000388, PLACE3000400, PLACE3000402, PLACE3000475, PLACE4000093, PLACE4000100, PLACE4000233, PLACE4000252, PLACE4000379, PLACE4000411, PLACE4000494,

[0423] THYRO1000026, THYRO1000035, THYRO1000085, THYRO1000132, THYRO1000156, THYRO1000186, THYRO1000190, THYRO1000221, THYRO1000241, THYRO1000438,THYRO1000452, THYRO1000558, THYRO1000602, THYRO1000641, THYRO1000658, THYRO1000699, THYRO1000748, THYRO1000796, THYRO1000843, THYRO1000895, THYRO1000974, THYRO1000975, THYRO1001062, THYRO1001093, THYRO1001121, THYRO1001177, THYRO1001262, THYRO1001290, THYRO1001322, THYRO1001411, THYRO1001480, THYRO1001541, THYRO1001573, THYRO1001617, THYRO1001895, Y79AA1000065, Y79AA1000405, Y79AA1000538, Y79AA1000802, Y79AA1000969, Y79AA1001061, Y79AA1001167, Y79AA1001384, Y79AA1001594, Y79AA1001875, Y79AA1002211,

Group (11): 228 Clones

[0424] The following 228 clones having low scores in both the ATGpr1 and ATGpr2 were judged to be full-length according to the fullness ratio shown in Table 7. The clones were a novel clone, in which at least the 3′-end sequence was not identical to any of human ESTs.

[0425] HEMBA1000111, HEMBA1000243, HEMBA1000338, HEMBA1000390, HEMBA1000418, HEMBA1000459, HEMBA1000518, HEMBA1000791, HEMBA1000974, HEMBA1001007, HEMBA1001077, HEMBA1001099, HEMBA1001123, HEMBA1001294, HEMBA1001299, HEMBA1001442, HEMBA1001861, HEMBA1001942, HEMBA1001979, HEMBA1002160, HEMBA1002162, HEMBA1002166, HEMBA1002389, HEMBA1002498, HEMBA1002592, HEMBA1002679, HEMBA1002944, HEMBA1003034, HEMBA1003142, HEMBA1003548, HEMBA1003571, HEMBA1003579, HEMBA1003598, HEMBA1003630, HEMBA1003958, HEMBA1004038, HEMBA1004042, HEMBA1004049, HEMBA1004132, HEMBA1004225, HEMBA1004748, HEMBA1004770, HEMBA1005039, HEMBA1005152, HEMBA1005159, HEMBA1005359, HEMBA1005408, HEMBA1005410, HEMBA1005443, HEMBA1005497, HEMBA1005552, HEMBA1005634, HEMBA1005717, HEMBA1005829, HEMBA1005921, HEMBA1006328, HEMBA1006438, HEMBA1006540, HEMBA1006780, HEMBA1006921, HEMBA1006938, HEMBA1007017, HEMBA1007341,

[0426] HEMBB1000050, HEMBB1000420, HEMBB1000487, HEMBB1000490, HEMBB1000523, HEMBB1000684, HEMBB1000840, HEMBB1000876, HEMBB1000913, HEMBB1000915, HEMBB1000917, HEMBB1001063, HEMBB1001102, HEMBB1001177, HEMBB1001253, HEMBB1001271, HEMBB1001454, HEMBB1001500, HEMBB1001588, HEMBB1001618, HEMBB1001704, HEMBB1001717, HEMBB1001756, HEMBB1001867, HEMBB1001967, HEMBB1002043, HEMBB1002094, HEMBB1002190, HEMBB1002520, HEMBB1002556, HEMBB1002590,

[0427] MAMMA1000117, MAMMA1000227, MAMMA1000270, MAMMA1000302, MAMMA1000348, MAMMA1000413, MAMMA1000431, MAMMA1000483, MAMMA1000559, MAMMA1000723, MAMMA1000744, MAMMA1000752, MAMMA1000782, MAMMA1000802, MAMMA1000851, MAMMA1000877, MAMMA1000962, MAMMA1001074, MAMMA1001133,MAMMA1001191, MAMMA1001206, MAMMA1001249, MAMMA1001330, MAMMA1001452, MAMMA1001502, MAMMA1001663, MAMMA1001806, MAMMA1001836, MAMMA1001880, MAMMA1001890, MAMMA1001908, MAMMA1001963, MAMMA1002058, MAMMA1002155, MAMMA1002158, MAMMA1002230, MAMMA1002282, MAMMA1002293, MAMMA1002332, MAMMA1002359, MAMMA1002494, MAMMA1002573, MAMMA1002618, MAMMA1002622, MAMMA1002646, MAMMA1002748, MAMMA1002871, MAMMA1002892, MAMMA1003140,

[0428] NT2RM4000327, NT2RM4000532, NT2RM4001414, NT2RM4001776, NT2RM4002499, NT2RP2000076, NT2RP2000523, NT2RP2000603, NT2RP2000644, NT2RP2000731, NT2RP2001196, NT2RP2001678, NT2RP2001926, NT2RP2003206, NT2RP2003704, NT2RP2003912, NT2RP2004396, NT2RP2004681, NT2RP3000512, NT2RP3000542, NT2RP3000736, NT2RP3000865, NT2RP3002057, NT2RP3003384, NT2RP3004334, NT2RP3004349, NT2RP3004527, NT2RP4000049, OVARC1000058, OVARC1000191, OVARC1000302, OVARC1001051, OVARC1001117, OVARC1001668, OVARC1001745, OVARC1001812, OVARC1001928,

[0429] PLACE1000583, PLACE1001272, PLACE1001414, PLACE1002537, PLACE1003205, PLACE1003361, PLACE1003516, PLACE1003864, PLACE1004384, PLACE1004491, PLACE1004793, PLACE1004985, PLACE1005085, PLACE1005666, PLACE1005845, PLACE1006164, PLACE1006262, PLACE1006754, PLACE1007852, PLACE1008331, PLACE1008643, PLACE1009050, PLACE1009155, PLACE1009172, PLACE1009183, PLACE1009200, PLACE1009398, PLACE1009595, PLACE1010702, PLACE1010891, PLACE1011165, PLACE1011203, PLACE1011375, PLACE1011576, PLACE1011762, PLACE1011964, PLACE2000136, PLACE2000264, PLACE2000305, PLACE2000379, PLACE3000220, PLACE4000250, THYRO1000092, THYRO1000471, THYRO1000852, THYRO1001534, THYRO1001595, THYRO1001745.

### EXAMPLE 12

### Homology Search Using the 5′-End and 3′-End Sequences of the Selected Clones

[0430] The 5′-end sequences of the selected 5547 clones were used for the homology search of the SwissProt, and both the 5′-end 3′-end sequences were used for the search of the GenBank and UniGene (ref. the result of the search of the SwissProt, GenBank (except ESTs and STSs), and UniGene (Human) was attached).

[0431] Each search result is shown in the last part of this SPECIFICATION by arranging each item in the following format.

| | 5′-end sequence | 3′-end sequence |
|---|---|---|
| Swiss-Prot | Homology search result 1 | — |
| GenBank | Homology search result 2 | Homology search result 3 |
| UniGene | Homology search result 4 | Homology search result 5 |

[0432] According to the top hit data, at least 1430 clones were predicted to encode a protein belonging to any of the categories, secretory or membrane protein, glycoprotein, protein associated with signal transduction, protein associated with transcription, protein associated with diseases, enzyme or protein associated with metabolism, protein associated with cell division or cell proliferation, protein associated with cytoskeleton, protein associated with RNA synthesis, nuclear protein, protein associated with protein synthesis or transport, protein associated with cellular defense, or protein associated with development or growth. Among the clones predicted belonging to any of the categories, 1001 clones were estimated to have a relatively high homology with the known proteins or genes in the same category. In addition, 429 clones were estimated to have a relatively low homology with the known proteins in the same category.

[0433] Herein, the term “relatively high homology” is defined as having 60% or more identity and the P-value 10⁻¹⁰ or less in comparison with known sequences in the SwissProt database, or 64% or more identity and the P-value 10⁻¹⁵ or less in comparison with those in the GenBank and UniGene databases (see the attached list). Also, the term “relatively low homology” is defined as not fulfilling the requirements to be “relatively high homology”, but still having the scores, 25% or more identity and the P-value 10⁻⁶ or less, using the sequence having 55 nucleotides or more, in comparison with known sequences in the SwissProt database (see the attached list). The P-value is a score obtained statistically by taking into account the probability of occurrence of the similarity between two sequences. In general, the smaller P-value reflects the higher similarity (Altschul S. F., Gish W., Miller W., Myers E. W., and Lipman D. J. (1990) “Basic local alignment search tool” J. Mol. Biol., 215:403-410; Gish W., and States D. J. (1993) “Identification of protein coding regions by database similarity search” Nature Genet. 3:266-272).

[0434] The clones predicted to encode a protein in the category of secretory protein or membrane protein have the keywords, “signal”, “transmembrane”, “membrane”, “extracellular matrix”, “receptor”, “G-protein coupled receptor”, “ionic channel”, “voltage-gated channel”, “calcium channel”, “cell adhesion”, “collagen”, or “connective tissue”, or descriptions from which the clone can be predicted to be a secretory or membrane protein, in the top hit data of the SwissProt using the 5′-end sequence, or in the top hit data of the GenBank or UniGene using the 5′-end sequence and 3′-end sequence.

[0435] The clones predicted to encode a protein in the category of glycoprotein have the keywords, “glycoprotein”, or descriptions from which the clone can be predicted to be a glycoprotein, in the top hit data of the SwissProt using the 5′-end sequence, or in the top hit data of the GenBank or UniGene using the 5′-end sequence and 3′-end sequence.

[0436] The clones predicted to encode a protein in the category of proteins associated with signal transduction have the keywords, “serine/threonine-protein kinase”, “tyrosine-protein kinase”, “SH3 domain”, or “WD repeat”, or descriptions from which the clone can be predicted to be a protein associated with signal transduction (such as “ADP-ribosylation factor”), in the top hit data of the SwissProt using the 5′-end sequence, or in the top hit data of the GenBank or UniGene using the 5′-end sequence and 3′-end sequence.

[0437] The clones predicted to encode a protein in the category of proteins associated with transcription have the keywords, “transcription regulation”, “zinc finger”, or “homeobox”, or descriptions from which the clone can be predicted to be a protein associated with transcription, in the top hit data of the SwissProt using the 5′-end sequence, or in the top hit data of the GenBank or UniGene using the 5′-end sequence and 3′-end sequence.

[0438] The clones predicted to encode a protein in the category of proteins associated with diseases are the clones in which the top hit data of the SwissProt using the 5′-end sequence, or the top hit data of the GenBank or UniGene using the 5′-end sequence and 3′-end sequence is a gene or protein that is deposited in the Online Mendelian Inheritance in Man (OMIM) database, which is a database of human genes and diseases, or the top hit data has descriptions from which the clone can be predicted to be a protein associated with diseases.

[0439] The clones predicted to encode a protein in the category of enzyme or proteins associated with metabolism are the clones in which the top hit data of the SwissProt using the 5′-end sequence, or the top hit data of the GenBank or UniGene using the 5′-end sequence and 3′-end sequence is a gene or protein with E.C. No. (Enzyme commission number), or the top hit data has descriptions from which the clone can be predicted to be an enzyme or protein associated with metabolism (such as “metabolism”, “oxidoreductase”, or “lipid”).

[0440] The clones predicted to encode a protein in the category of proteins associated with cell division or cell proliferation have the keywords, “cell division”, “cell cycle”, “mitosis”, or “chromosomal protein”, or descriptions from which the clone can be predicted to be a protein associated with cell division or cell proliferation (such as “histone”, “cell growth”, or “apoptosis”), in the top hit data of the SwissProt using the 5′-end sequence, or in the top hit data of the GenBank or UniGene using the 5′-end sequence and 3′-end sequence.

[0441] The clones predicted to encode a protein in the category of proteins associated with cytoskeleton have the keywords, “structural protein”, “cytoskeleton”, “actin-binding”, or “microtubules”, or descriptions from which the clone can be predicted to be a protein associated with cytoskeleton, in the top hit data of the SwissProt using the 5′-end sequence, or in the top hit data of the GenBank or UniGene using the 5′-end sequence and 3′-end sequence.

[0442] The clones predicted to encode a protein in the category of proteins associated with RNA synthesis include the above clones predicted to be a protein associated with transcription, and also the clones which have the keywords, “RNA splicing”, or “RNA processing”, or descriptions from which the clone can be predicted to be a protein associated with RNA synthesis (such as “RNA helicase”, “polyadenylation”, or “RNA transport”), in the top hit data of the SwissProt using the 5′-end sequence, or in the top hit data of the GenBank or UniGene using the 5′-end sequence and 3′-end sequence.

[0443] The clones predicted to encode a protein in the category of nuclear protein include the above clones predicted to be a protein associated with transcription, and also the clones which have the keyword, “nuclear protein”, or descriptions from which the clone can be predicted to be a nuclear protein, in the top hit data of the SwissProt using the 5′-end sequence, or in the top hit data of the GenBank or UniGene using the 5′-end sequence and 3′-end sequence.

[0444] The clones predicted to encode a protein in the category of proteins associated with protein synthesis or transport have the keywords, “translation regulation”, “protein biosynthesis”, “amino-acid biosynthesis”, “ribosomal protein”, or “protein transport”, or descriptions from which the clone can be predicted to be a protein associated with protein synthesis or transport (such as “signal recognition particle”, “ubiquitin”, “proteosome”, or “protease”), in the top hit data of the SwissProt using the 5′-end sequence, or in the top hit data of the GenBank or UniGene using the 5′-end sequence and 3′-end sequence.

[0445] The clones predicted to encode a protein in the category of proteins associated with cellular defense have the keywords, “heat shock”, “chaperone”, “DNA repair”, or “DNA damage”, or descriptions from which the clone can be predicted to be a protein associated with cellular defense, in the top hit data of the SwissProt using the 5′-end sequence, or in the top hit data of the GenBank or UniGene using the 5′-end sequence and 3′-end sequence.

[0446] The clones predicted to encode a protein in the category of proteins associated with development or growth have the keyword, “developmental protein”, or descriptions from which the clone can be predicted to be a protein associated with development or growth, in the top hit data of the SwissProt using the 5′-end sequence, or in the top hit data of the GenBank or UniGene using the 5′-end sequence and 3′-end sequence.

[0447] The following 1430 clones were predicted to encode a protein belonging to any of the categories, secretory or membrane protein, glycoprotein, protein associated with signal transduction, protein associated with transcription, protein associated with diseases, enzyme or protein associated with metabolism, protein associated with cell division or cell proliferation, protein associated with cytoskeleton, protein associated with RNA synthesis, nuclear protein, protein associated with protein synthesis or transport, protein associated with cellular defense, or protein associated with development or growth.

[0448] HEMBA1000005, HEMBA1000012, HEMBA1000020, HEMBA1000030, HEMBA1000158, HEMBA1000185, HEMBA1000201, HEMBA1000216, HEMBA1000303, HEMBA1000459, HEMBA1000488, HEMBA1000491, HEMBA1000523, HEMBA1000531, HEMBA1000542, HEMBA1000561, HEMBA1000569, HEMBA1000588, HEMBA1000591, HEMBA1000657, HEMBA1000673, HEMBA1000752, HEMBA1000827, HEMBA1000851, HEMBA1000852, HEMBA1000972, HEMBA1000991, HEMBA1001017, HEMBA1001019, HEMBA1001059, HEMBA1001071, HEMBA1001088, HEMBA1001123, HEMBA1001137, HEMBA1001174, HEMBA1001257, HEMBA1001302, HEMBA1001351, HEMBA1001387, HEMBA1001407, HEMBA1001476,HEMBA1001510, HEMBA1001569, HEMBA1001570, HEMBA1001579, HEMBA1001595, HEMBA1001620,HEMBA1001672, HEMBA1001678, HEMBA1001714, HEMBA1001744, HEMBA1001800, HEMBA1001804,HEMBA1001809, HEMBA1001819, HEMBA1001822, HEMBA1001847, HEMBA1001896, HEMBA1001913,HEMBA1001921, HEMBA1002003, HEMBA1002035, HEMBA1002092, HEMBA1002102, HEMBA1002150,HEMBA1002160, HEMBA1002161, HEMBA1002162, HEMBA1002212, HEMBA1002229, HEMBA1002257,HEMBA1002341, HEMBA1002363, HEMBA1002417, HEMBA1002495, HEMBA1002513, HEMBA1002547, HEMBA1002555, HEMBA1002569, HEMBA1002609, HEMBA1002688, HEMBA1002716, HEMBA1002810, HEMBA1002896, HEMBA1002939, HEMBA1002973, HEMBA1002999, HEMBA1003046, HEMBA1003071, HEMBA1003077, HEMBA1003136, HEMBA1003148, HEMBA1003179, HEMBA1003235, HEMBA1003286, HEMBA1003291, HEMBA1003314, HEMBA1003418, HEMBA1003433, HEMBA1003538,

[0449] HEMBA1003545, HEMBA1003555, HEMBA1003560, HEMBA1003568, HEMBA1003569, HEMBA1003581, HEMBA1003598, HEMBA1003615, HEMBA1003621, HEMBA1003680, HEMBA1003684, HEMBA1003690, HEMBA1003720, HEMBA1003760, HEMBA1003773, HEMBA1003783, HEMBA1003805, HEMBA1003836, HEMBA1003866, HEMBA1003953, HEMBA1004097, HEMBA1004131, HEMBA1004168, HEMBA1004202, HEMBA1004207, HEMBA1004227, HEMBA1004248, HEMBA1004276, HEMBA1004286, HEMBA1004321, HEMBA1004353, HEMBA1004354, HEMBA1004356, HEMBA1004389, HEMBA1004408, HEMBA1004479, HEMBA1004534, HEMBA1004604, HEMBA1004669, HEMBA1004734, HEMBA1004752,HEMBA1004753, HEMBA1004756, HEMBA1004758, HEMBA1004795, HEMBA1004807, HEMBA1004847,HEMBA1005009, HEMBA1005047, HEMBA1005202, HEMBA1005241, HEMBA1005293, HEMBA1005331,HEMBA1005338, HEMBA1005359, HEMBA1005367, HEMBA1005423, HEMBA1005443, HEMBA1005475,HEMBA1005513, HEMBA1005528, HEMBA1005548, HEMBA1005576, HEMBA1005581, HEMBA1005595,HEMBA1005679, HEMBA1005699, HEMBA1005732, HEMBA1005737, HEMBA1005815, HEMBA1005931,HEMBA1005963, HEMBA1005990, HEMBA1006173, HEMBA1006253, HEMBA1006272, HEMBA1006278, HEMBA1006310, HEMBA1006344, HEMBA1006347, HEMBA1006359, HEMBA1006474, HEMBA1006521, HEMBA1006540, HEMBA1006559, HEMBA1006562, HEMBA1006639, HEMBA1006648, HEMBA1006652, HEMBA1006737, HEMBA1006807, HEMBA1006877, HEMBA1006914, HEMBA1006941, HEMBA1006973, HEMBA1006976, HEMBA1007018, HEMBA1007045, HEMBA1007078, HEMBA1007121,

[0450] HEMBA1007174, HEMBA1007243, HEMBA1007300, HEMBA1007301, HEMBB1000037, HEMBB1000119, HEMBB1000217, HEMBB1000250, HEMBB1000264, HEMBB1000317, HEMBB1000399, HEMBB1000404, HEMBB1000530, HEMBB1000632, HEMBB1000637, HEMBB1000684, HEMBB1000693, HEMBB1000725, HEMBB1000781, HEMBB1000789, HEMBB1000915, HEMBB1000927, HEMBB1001011, HEMBB1001051, HEMBB1001068, HEMBB1001102, HEMBB1001112, HEMBB1001119, HEMBB1001133, HEMBB1001151, HEMBB1001175, HEMBB1001177, HEMBB1001234, HEMBB1001242, HEMBB1001282, HEMBB1001288, HEMBB1001294, HEMBB1001314, HEMBB1001331, HEMBB1001346, HEMBB1001384, HEMBB1001429, HEMBB1001443, HEMBB1001482, HEMBB1001802, HEMBB1001831, HEMBB1001908,HEMBB1001915, HEMBB1001922, HEMBB1001967, HEMBB1002042, HEMBB1002050, HEMBB1002092,HEMBB1002134, HEMBB1002193, HEMBB1002217, HEMBB1002342, HEMBB1002358, HEMBB1002442,HEMBB1002477, HEMBB1002600, HEMBB1002635, HEMBB1002683, MAMMA1000009, MAMMA1000020,MAMMA1000085, MAMMA1000092, MAMMA1000103, MAMMA1000155, MAMMA1000173, MAMMA1000183,MAMMA1000388, MAMMA1000424, MAMMA1000429, MAMMA1000672, MAMMA1000731, MAMMA1000734, MAMMA1000841, MAMMA1000897, MAMMA1000956, MAMMA1001008, MAMMA1001021, MAMMA1001030, MAMMA1001041, MAMMA1001059, MAMMA1001075, MAMMA1001080, MAMMA1001105, MAMMA1001139, MAMMA1001198, MAMMA1001305, MAMMA1001388, MAMMA1001476, MAMMA1001501, MAMMA1001576, MAMMA1001633, MAMMA1001735, MAMMA1001751, MAMMA1001754, MAMMA1001771,

[0451] MAMMA1001820, MAMMA1001837, MAMMA1002140, MAMMA1002143, MAMMA1002170, MAMMA1002198, MAMMA1002219, MAMMA1002236, MAMMA1002268, MAMMA1002352, MAMMA1002392, MAMMA1002485, MAMMA1002530, MAMMA1002573, MAMMA1002598, MAMMA1002619, MAMMA1002622, MAMMA1002636, MAMMA1002637, MAMMA1002650, MAMMA1002671, MAMMA1002699, MAMMA1002842, MAMMA1002858, MAMMA1002869, MAMMA1002881, MAMMA1002937, MAMMA1002938, MAMMA1003011, MAMMA1003047, MAMMA1003057, MAMMA1003099, MAMMA1003104, MAMMA1003113, MAMMA1003127, MAMMA1003146, MAMMA1003166, NT2RM1000035, NT2RM1000055, NT2RM1000118, NT2RM1000132, NT2RM1000153, NT2RM1000186, NT2RM1000187, NT2RM1000199, NT2RM1000256, NT2RM1000257, NT2RM1000280, NT2RM1000318, NT2RM1000355, NT2RM1000377, NT2RM1000394, NT2RM1000430, NT2RM1000555, NT2RM1000648, NT2RM1000661, NT2RM1000666, NT2RM1000691, NT2RM1000725, NT2RM1000742, NT2RM1000770, NT2RM1000772, NT2RM1000811, NT2RM1000826, NT2RM1000833,NT2RM1000850, NT2RM1000852, NT2RM1000867, NT2RM1000882, NT2RM1000883, NT2RM1000894,NT2RM1000898, NT2RM1001003, NT2RM1001059, NT2RM1001072, NT2RM1001082, NT2RM1001092, NT2RM1001139, NT2RM2000013, NT2RM2000124, NT2RM2000191, NT2RM2000363, NT2RM2000368, NT2RM2000371, NT2RM2000374, NT2RM2000402, NT2RM2000407, NT2RM2000422, NT2RM2000504, NT2RM2000566, NT2RM2000577, NT2RM2000594, NT2RM2000599, NT2RM2000612, NT2RM2000623, NT2RM2000691, NT2RM2000714, NT2RM2000735, NT2RM2000740, NT2RM2000821,

[0452] NT2RM2000951, NT2RM2001035, NT2RM2001065, NT2RM2001131, NT2RM2001221, NT2RM2001238, NT2RM2001256, NT2RM2001324, NT2RM2001345, NT2RM2001424, NT2RM2001499, NT2RM2001575, NT2RM2001588, NT2RM2001592, NT2RM2001605, NT2RM2001613, NT2RM2001635, NT2RM2001648, NT2RM2001652, NT2RM2001664, NT2RM2001670, NT2RM2001700, NT2RM2001730, NT2RM2001760, NT2RM2001771, NT2RM2001785, NT2RM2001797, NT2RM2001803, NT2RM2001823, NT2RM2001839, NT2RM2001930, NT2RM2001936, NT2RM2001983, NT2RM2001989, NT2RM2002030, NT2RM2002100, NT2RM2002109, NT2RM2002128, NT2RM2002142, NT2RM2002145, NT2RM2002580, NT2RM4000024, NT2RM4000030, NT2RM4000085, NT2RM4000104, NT2RM4000139, NT2RM4000155, NT2RM4000156, NT2RM4000167, NT2RM4000169, NT2RM4000191, NT2RM4000215, NT2RM4000233, NT2RM4000290, NT2RM4000327, NT2RM4000344, NT2RM4000354, NT2RM4000386, NT2RM4000421, NT2RM4000433, NT2RM4000471, NT2RM4000496, NT2RM4000531, NT2RM4000616, NT2RM4000689,NT2RM4000712, NT2RM4000734, NT2RM4000751, NT2RM4000795, NT2RM4000798, NT2RM4000895,NT2RM4000996, NT2RM4001032, NT2RM4001047, NT2RM4001054, NT2RM4001140, NT2RM4001200, NT2RM4001203, NT2RM4001217, NT2RM4001313, NT2RM4001316, NT2RM4001320, NT2RM4001340, NT2RM4001382, NT2RM4001410, NT2RM4001411, NT2RM4001412, NT2RM4001444, NT2RM4001483, NT2RM4001566, NT2RM4001582, NT2RM4001592, NT2RM4001605, NT2RM4001611, NT2RM4001629, NT2RM4001714, NT2RM4001741, NT2RM4001746, NT2RM4001758, NT2RM4001776,

[0453] NT2RM4001783, NT2RM4001819, NT2RM4001823, NT2RM4001828, NT2RM4001858, NT2RM4001865, NT2RM4001930, NT2RM4001940, NT2RM4001979, NT2RM4001987, NT2RM4002062, NT2RM4002063, NT2RM4002073, NT2RM4002093, NT2RM4002109, NT2RM4002145, NT2RM4002146, NT2RM4002161, NT2RM4002189, NT2RM4002194, NT2RM4002205, NT2RM4002226, NT2RM4002409, NT2RM4002457, NT2RM4002479, NT2RM4002527, NT2RM4002558, NT2RM4002565, NT2RM4002571, NT2RM4002594, NT2RM4002623, NT2RP1000018, NT2RP1000035, NT2RP1000086, NT2RP1000111, NT2RP1000112, NT2RP1000130, NT2RP1000272, NT2RP1000326, NT2RP1000333, NT2RP1000348, NT2RP1000363, NT2RP1000376, NT2RP1000413, NT2RP1000460, NT2RP1000470, NT2RP1000478, NT2RP1000493, NT2RP1000547, NT2RP1000574, NT2RP1000581, NT2RP1000609, NT2RP1000629, NT2RP1000701, NT2RP1000721, NT2RP1000733, NT2RP1000738, NT2RP1000782, NT2RP1000825, NT2RP1000833, NT2RP1000834, NT2RP1000856, NT2RP1000860, NT2RP1000947, NT2RP1000966,NT2RP1001033, NT2RP1001079, NT2RP1001080, NT2RP1001177, NT2RP1001247, NT2RP1001253, NT2RP1001313, NT2RP1001361, NT2RP1001395, NT2RP1001410, NT2RP1001457, NT2RP1001482, NT2RP1001543, NT2RP1001546, NT2RP1001569, NT2RP2000006, NT2RP2000008, NT2RP2000045, NT2RP2000056, NT2RP2000077, NT2RP2000114, NT2RP2000126, NT2RP2000133, NT2RP2000147, NT2RP2000161, NT2RP2000183, NT2RP2000233, NT2RP2000257, NT2RP2000297, NT2RP2000310, NT2RP2000329, NT2RP2000346, NT2RP2000414, NT2RP2000422, NT2RP2000448,

[0454] NT2RP2000459, NT2RP2000603, NT2RP2000710, NT2RP2000764, NT2RP2000812, NT2RP2000842, NT2RP2000880, NT2RP2000931, NT2RP2000932, NT2RP2001070, NT2RP2001081, NT2RP2001127, NT2RP2001174, NT2RP2001233, NT2RP2001290, NT2RP2001327, NT2RP2001397, NT2RP2001420, NT2RP2001440, NT2RP2001449, NT2RP2001511, NT2RP2001520, NT2RP2001536, NT2RP2001634, NT2RP2001660, NT2RP2001663, NT2RP2001748, NT2RP2001762, NT2RP2001839, NT2RP2001876, NT2RP2001898, NT2RP2001900, NT2RP2001991, NT2RP2002025, NT2RP2002058, NT2RP2002066, NT2RP2002099, NT2RP2002185, NT2RP2002193, NT2RP2002252, NT2RP2002256, NT2RP2002259, NT2RP2002312, NT2RP2002325, NT2RP2002385, NT2RP2002442, NT2RP2002479, NT2RP2002503, NT2RP2002504, NT2RP2002591, NT2RP2002595, NT2RP2002606, NT2RP2002618, NT2RP2002710, NT2RP2002727, NT2RP2002928, NT2RP2002959, NT2RP2002980, NT2RP2002993, NT2RP2003125, NT2RP2003158, NT2RP2003228, NT2RP2003230, NT2RP2003277, NT2RP2003286, NT2RP2003293, NT2RP2003295, NT2RP2003307, NT2RP2003308, NT2RP2003433, NT2RP2003506,NT2RP2003517, NT2RP2003564, NT2RP2003604, NT2RP2003643, NT2RP2003702, NT2RP2003706, NT2RP2003714, NT2RP2003737, NT2RP2003760, NT2RP2003781, NT2RP2003912, NT2RP2003968, NT2RP2004013, NT2RP2004098, NT2RP2004187, NT2RP2004194, NT2RP2004232, NT2RP2004239, NT2RP2004316, NT2RP2004523, NT2RP2004538, NT2RP2004568, NT2RP2004655, NT2RP2004768, NT2RP2004791, NT2RP2004799, NT2RP2004816, NT2RP2004933, NT2RP2004961,

[0455] NT2RP2005003, NT2RP2005012, NT2RP2005020, NT2RP2005022, NT2RP2005037, NT2RP2005038, NT2RP2005116, NT2RP2005126, NT2RP2005144, NT2RP2005168, NT2RP2005204, NT2RP2005239, NT2RP2005276, NT2RP2005287, NT2RP2005288, NT2RP2005289, NT2RP2005325, NT2RP2005344, NT2RP2005358, NT2RP2005457, NT2RP2005465, NT2RP2005496, NT2RP2005498, NT2RP2005520, NT2RP2005531, NT2RP2005539, NT2RP2005557, NT2RP2005620, NT2RP2005675, NT2RP2005690, NT2RP2005722, NT2RP2005752, NT2RP2005753, NT2RP2005763, NT2RP2005767, NT2RP2005773, NT2RP2005775, NT2RP2005835, NT2RP2005857, NT2RP2005890, NT2RP2005933, NT2RP2005942, NT2RP2006219, NT2RP2006238, NT2RP2006275, NT2RP2006464, NT2RP2006565, NT2RP2006571, NT2RP2006598, NT2RP3000031, NT2RP3000046, NT2RP3000047, NT2RP3000050, NT2RP3000080, NT2RP3000085, NT2RP3000299, NT2RP3000324, NT2RP3000359, NT2RP3000361, NT2RP3000366, NT2RP3000397, NT2RP3000403, NT2RP3000418, NT2RP3000512, NT2RP3000527, NT2RP3000590, NT2RP3000603, NT2RP3000632, NT2RP3000739, NT2RP3000742, NT2RP3000759, NT2RP3000845, NT2RP3000868, NT2RP3000875, NT2RP3000917, NT2RP3000919, NT2RP3000968, NT2RP3000994, NT2RP3001057, NT2RP3001081, NT2RP3001120, NT2RP3001140, NT2RP3001155, NT2RP3001216, NT2RP3001268, NT2RP3001272, NT2RP3001274, NT2RP3001340, NT2RP3001355, NT2RP3001398, NT2RP3001399, NT2RP3001407, NT2RP3001426, NT2RP3001427, NT2RP3001428, NT2RP3001495, NT2RP3001497, NT2RP3001554, NT2RP3001587, NT2RP3001671,

[0456] NT2RP3001672, NT2RP3001676, NT2RP3001688, NT2RP3001708, NT2RP3001712, NT2RP3001724, NT2RP3001727, NT2RP3001730, NT2RP3001764, NT2RP3001792, NT2RP3001799, NT2RP3001855, NT2RP3002004, NT2RP3002045, NT2RP3002056, NT2RP3002151, NT2RP3002165, NT2RP3002273, NT2RP3002351, NT2RP3002352, NT2RP3002377, NT2RP3002399, NT2RP3002402, NT2RP3002529, NT2RP3002659, NT2RP3002663, NT2RP3002688, NT2RP3002785, NT2RP3002818, NT2RP3002876, NT2RP3002909, NT2RP3002969, NT2RP3002972, NT2RP3003059, NT2RP3003061, NT2RP3003101, NT2RP3003138, NT2RP3003157, NT2RP3003193, NT2RP3003203, NT2RP3003212, NT2RP3003230, NT2RP3003242, NT2RP3003251, NT2RP3003282, NT2RP3003301, NT2RP3003327, NT2RP3003346, NT2RP3003385, NT2RP3003411, NT2RP3003464, NT2RP3003500, NT2RP3003589, NT2RP3003672, NT2RP3003701, NT2RP3003716, NT2RP3003800, NT2RP3003825, NT2RP3003831, NT2RP3003876, NT2RP3003914, NT2RP3003918, NT2RP3004013, NT2RP3004078, NT2RP3004155, NT2RP3004206, NT2RP3004207, NT2RP3004209, NT2RP3004253, NT2RP3004258, NT2RP3004262, NT2RP3004399, NT2RP3004424, NT2RP3004454, NT2RP3004472, NT2RP3004475, NT2RP3004480, NT2RP3004490, NT2RP3004504, NT2RP3004507, NT2RP3004527, NT2RP3004534, NT2RP3004566, NT2RP3004569, NT2RP3004572, NT2RP3004578, NT2RP3004594, NT2RP3004617, NT2RP3004618, NT2RP3004669, NT2RP3004670, NT2RP4000008, NT2RP4000049, NT2RP4000078, NT2RP4000109, NT2RP4000111, NT2RP4000147, NT2RP4000150, NT2RP4000185, NT2RP4000210,

[0457] NT2RP4000212, NT2RP4000243, NT2RP4000246, NT2RP4000259, NT2RP4000312, NT2RP4000367, NT2RP4000370, NT2RP4000376, NT2RP4000398, NT2RP4000417, NT2RP4000449, NT2RP4000457, NT2RP4000498, NT2RP4000518, NT2RP4000524, NT2RP4000528, NT2RP4000614, NT2RP4000724, NT2RP4000787, NT2RP4000855, NT2RP4000865, NT2RP4000878, NT2RP4000879, NT2RP4000907, NT2RP4000915, NT2RP4000925, NT2RP4000928, NT2RP4000997, NT2RP4001006, NT2RP4001029, NT2RP4001041, NT2RP4001079, NT2RP4001080, NT2RP4001095, NT2RP4001117, NT2RP4001122, NT2RP4001126, NT2RP4001148, NT2RP4001149, NT2RP4001150, NT2RP4001174, NT2RP4001207, NT2RP4001213, NT2RP4001219, NT2RP4001313, NT2RP4001315, NT2RP4001345, NT2RP4001372, NT2RP4001375, NT2RP4001414, NT2RP4001433, NT2RP4001483, NT2RP4001498, NT2RP4001529, NT2RP4001551, NT2RP4001574, NT2RP4001592, NT2RP4001638, NT2RP4001644, NT2RP4001725, NT2RP4001753, NT2RP4001760, NT2RP4001790, NT2RP4001823, NT2RP4001838, NT2RP4001849, NT2RP4001893, NT2RP4001927, NT2RP4001938, NT2RP4001946, NT2RP4001966, NT2RP4002047, NT2RP4002078, NT2RP4002408, NT2RP5003477, NT2RP5003500, NT2RP5003522, NT2RP5003524, OVARC1000004, OVARC1000006, OVARC1000014, OVARC1000060, OVARC1000087, OVARC1000113, OVARC1000114, OVARC1000139, OVARC1000241, OVARC1000304, OVARC1000309, OVARC1000326, OVARC1000437, OVARC1000440, OVARC1000465, OVARC1000479, OVARC1000520, OVARC1000543, OVARC1000649, OVARC1000679, OVARC1000682, OVARC1000722,

[0458] OVARC1000746, OVARC1000771, OVARC1000834, OVARC1000846, OVARC1000850, OVARC1000862, OVARC1000876, OVARC1000883, OVARC1000885, OVARC1000912, OVARC1000945, OVARC1000996, OVARC1001055, OVARC1001068, OVARC1001107, OVARC1001113, OVARC1001154, OVARC1001180, OVARC1001244, OVARC1001261, OVARC1001296, OVARC1001329, OVARC1001342, OVARC1001357, OVARC1001372, OVARC1001381, OVARC1001417, OVARC1001419, OVARC1001476, OVARC1001496, OVARC1001506, OVARC1001542, OVARC1001555, OVARC1001577, OVARC1001610, OVARC1001668, OVARC1001702, OVARC1001713, OVARC1001731, OVARC1001762, OVARC1001766, OVARC1001802, OVARC1001809, OVARC1001861, OVARC1001880, OVARC1001900, OVARC1001901, OVARC1001942, OVARC1001943, OVARC1001949, OVARC1002050, OVARC1002112, OVARC1002138, PLACE1000007, PLACE1000061, PLACE1000066, PLACE1000133, PLACE1000142, PLACE1000184, PLACE1000383, PLACE1000406, PLACE1000420, PLACE1000492, PLACE1000547, PLACE1000583, PLACE1000588, PLACE1000596, PLACE1000611, PLACE1000653, PLACE1000706, PLACE1000863, PLACE1001062, PLACE1001092, PLACE1001118, PLACE1001136, PLACE1001238, PLACE1001294, PLACE1001304, PLACE1001377, PLACE1001384, PLACE1001387, PLACE1001517, PLACE1001602, PLACE1001603, PLACE1001611, PLACE1001632, PLACE1001634, PLACE1001691, PLACE1001692, PLACE1001748, PLACE1001771, PLACE1001817, PLACE1001989, PLACE1002046, PLACE1002090, PLACE1002437, PLACE1002450, PLACE1002474, PLACE1002493, PLACE1002500,

[0459] PLACE1002532, PLACE1002571, PLACE1002591, PLACE1002655, PLACE1002665, PLACE1002685, PLACE1002722, PLACE1002775, PLACE1002782, PLACE1002811, PLACE1002816, PLACE1002834, PLACE1002991, PLACE1003100, PLACE1003190, PLACE1003258, PLACE1003302, PLACE1003353, PLACE1003394, PLACE1003420, PLACE1003493, PLACE1003596, PLACE1003605, PLACE1003669, PLACE1003704, PLACE1003709, PLACE1003738, PLACE1003885, PLACE1003888, PLACE1003903, PLACE1003915, PLACE1003968, PLACE1004104, PLACE1004128, PLACE1004149, PLACE1004197, PLACE1004203, PLACE1004277, PLACE1004316, PLACE1004358, PLACE1004428, PLACE1004437, PLACE1004471, PLACE1004510, PLACE1004564, PLACE1004629, PLACE1004674, PLACE1004681, PLACE1004743, PLACE1004751, PLACE1004773, PLACE1004777, PLACE1004814, PLACE1004902, PLACE1004918, PLACE1005101, PLACE1005287, PLACE1005305, PLACE1005477, PLACE1005494, PLACE1005502, PLACE1005557, PLACE1005611, PLACE1005646, PLACE1005656, PLACE1005698, PLACE1005739, PLACE1005763, PLACE1005804, PLACE1005813, PLACE1005876, PLACE1005890, PLACE1005968, PLACE1006011, PLACE1006037, PLACE1006040, PLACE1006119, PLACE1006157, PLACE1006170, PLACE1006187, PLACE1006196, PLACE1006288, PLACE1006368, PLACE1006385, PLACE1006414, PLACE1006438, PLACE1006469, PLACE1006482, PLACE1006488, PLACE1006531, PLACE1006615, PLACE1006731, PLACE1006754, PLACE1006958, PLACE1006962, PLACE1007105, PLACE1007238, PLACE1007239, PLACE1007257, PLACE1007346,

[0460] PLACE1007375, PLACE1007409, PLACE1007488, PLACE1007511, PLACE1007544, PLACE1007598, PLACE1007706, PLACE1007729, PLACE1007737, PLACE1007852, PLACE1007955, PLACE1007958, PLACE1007969, PLACE1008000, PLACE1008044, PLACE1008177, PLACE1008244, PLACE1008273, PLACE1008275, PLACE1008309, PLACE1008356, PLACE1008402, PLACE1008603, PLACE1008627, PLACE1008643, PLACE1008650, PLACE1008696, PLACE1008790, PLACE1008808, PLACE1008813, PLACE1008941, PLACE1008947, PLACE1009027, PLACE1009060, PLACE1009094, PLACE1009099, PLACE1009113, PLACE1009200, PLACE1009230, PLACE1009246, PLACE1009298, PLACE1009319, PLACE1009398, PLACE1009444, PLACE1009468, PLACE1009524, PLACE1009622, PLACE1009659, PLACE1009670, PLACE1009721, PLACE1009763, PLACE1009845, PLACE1009861, PLACE1009997, PLACE1010053, PLACE1010074, PLACE1010083, PLACE1010089, PLACE1010096, PLACE1010106, PLACE1010152, PLACE1010194, PLACE1010261, PLACE1010310, PLACE1010481, PLACE1010491, PLACE1010580, PLACE1010599, PLACE1010702, PLACE1010720, PLACE1010743, PLACE1010761, PLACE1010771, PLACE1010833, PLACE1010856, PLACE1010870, PLACE1010942, PLACE1010960, PLACE1011041, PLACE1011046, PLACE1011054, PLACE1011056, PLACE1011057, PLACE1011109, PLACE1011165, PLACE1011203, PLACE1011219, PLACE1011229, PLACE1011263, PLACE1011332, PLACE1011371, PLACE1011477, PLACE1011492, PLACE1011576, PLACE1011664, PLACE1011896, PLACE1011923, PLACE2000021, PLACE2000034, PLACE2000039,

[0461] PLACE2000062, PLACE2000072, PLACE2000140, PLACE2000164, PLACE2000216, PLACE2000274, PLACE2000341, PLACE2000359, PLACE2000399, PLACE2000404, PLACE2000411, PLACE2000438, PLACE2000458, PLACE3000004, PLACE3000009, PLACE3000020, PLACE3000059, PLACE3000121, PLACE3000145, PLACE3000148, PLACE3000156, PLACE3000242, PLACE3000244, PLACE3000322, PLACE3000350, PLACE3000352, PLACE3000353, PLACE3000373, PLACE3000455, PLACE3000475, PLACE4000009, PLACE4000014, PLACE4000052, PLACE4000128, PLACE4000156, PLACE4000230, PLACE4000259, PLACE4000261, PLACE4000269, PLACE4000320, PLACE4000431, PLACE4000522, PLACE4000558, PLACE4000581, PLACE4000590, PLACE4000612, PLACE4000654, SKNMC1000011,SKNMC1000050, THYRO1000017, THYRO1000026, THYRO1000072, THYRO1000121, THYRO1000173, THYRO1000186, THYRO1000197, THYRO1000242, THYRO1000288, THYRO1000320, THYRO1000327, THYRO1000358, THYRO1000387, THYRO1000471, THYRO1000501, THYRO1000585, THYRO1000666, THYRO1000783, THYRO1000852, THYRO1000926, THYRO1000934, THYRO1000951, THYRO1000974, THYRO1001100, THYRO1001121, THYRO1001189, THYRO1001406, THYRO1001458, THYRO1001595, THYRO1001605, THYRO1001617, THYRO1001671, Y79AA1000037, Y79AA1000059, Y79AA1000214, Y79AA1000258, Y79AA1000346, Y79AA1000349, Y79AA1000368, Y79AA1000469, Y79AA1000539, Y79AA1000560, Y79AA1000589, Y79AA1000627, Y79AA1000705, Y79AA1000734, Y79AA1000752, Y79AA1000784, Y79AA1000833, Y79AA1000962, Y79AA1000966,

[0462] Y79AA1000968, Y79AA1000985, Y79AA1001048, Y79AA1001105, Y79AA1001233, Y79AA1001236, Y79AA1001299, Y79AA1001391, Y79AA1001394, Y79AA1001533, Y79AA1001548, Y79AA1001581, Y79AA1001613, Y79AA1001679, Y79AA1001692, Y79AA1001827, Y79AA1001848, Y79AA1001866, Y79AA1001874, Y79AA1001963, Y79AA1002027, Y79AA1002093, Y79AA1002139, Y79AA1002208, Y79AA1002209, Y79AA1002258, Y79AA1002361, Y79AA1002416, Y79AA1002472, Y79AA1002482,

[0463] Among the clones, 1001 clones were estimated to have a relatively high homology with the known proteins or genes in the same category.

[0464] HEMBA1000005, HEMBA1000020, HEMBA1000030, HEMBA1000158, HEMBA1000201, HEMBA1000216, HEMBA1000303, HEMBA1000459, HEMBA1000523, HEMBA1000531, HEMBA1000542, HEMBA1000561, HEMBA1000588, HEMBA1000591, HEMBA1000657, HEMBA1000673, HEMBA1000827, HEMBA1000851, HEMBA1000852, HEMBA1000972, HEMBA1000991, HEMBA1001017, HEMBA1001019, HEMBA1001059, HEMBA1001071, HEMBA1001088, HEMBA1001123, HEMBA1001174, HEMBA1001257, HEMBA1001302, HEMBA1001351, HEMBA1001387, HEMBA1001510, HEMBA1001569, HEMBA1001570, HEMBA1001579, HEMBA1001595, HEMBA1001620, HEMBA1001672, HEMBA1001678, HEMBA1001714, HEMBA1001819, HEMBA1001822, HEMBA1001896, HEMBA1001913, HEMBA1001921, HEMBA1002003, HEMBA1002092, HEMBA1002160, HEMBA1002161, HEMBA1002162, HEMBA1002229, HEMBA1002257, HEMBA1002341, HEMBA1002363, HEMBA1002417, HEMBA1002513, HEMBA1002547, HEMBA1002569, HEMBA1002716, HEMBA1002810, HEMBA1002896, HEMBA1002973, HEMBA1002999, HEMBA1003046, HEMBA1003148, HEMBA1003286, HEMBA1003314, HEMBA1003433, HEMBA1003538, HEMBA1003545, HEMBA1003555, HEMBA1003560, HEMBA1003569, HEMBA1003581, HEMBA1003615, HEMBA1003621, HEMBA1003690, HEMBA1003720, HEMBA1003760, HEMBA1003773, HEMBA1003783, HEMBA1003805, HEMBA1003866, HEMBA1004097, HEMBA1004131, HEMBA1004168, HEMBA1004202, HEMBA1004207, HEMBA1004227, HEMBA1004248, HEMBA1004286, HEMBA1004321, HEMBA1004353, HEMBA1004354, HEMBA1004356, HEMBA1004389, HEMBA1004479, HEMBA1004534, HEMBA1004604,

[0465] HEMBA1004752, HEMBA1004753, HEMBA1004756, HEMBA1004758, HEMBA1004795, HEMBA1004807, HEMBA1004847, HEMBA1005009, HEMBA1005047, HEMBA1005202, HEMBA1005241, HEMBA1005293, HEMBA1005331, HEMBA1005338, HEMBA1005359, HEMBA1005367, HEMBA1005423, HEMBA1005443, HEMBA1005513, HEMBA1005528, HEMBA1005548, HEMBA1005576, HEMBA1005581, HEMBA1005679, HEMBA1005699, HEMBA1005732, HEMBA1005963, HEMBA1005990, HEMBA1006173, HEMBA1006253, HEMBA1006272, HEMBA1006278, HEMBA1006310, HEMBA1006344, HEMBA1006359, HEMBA1006540, HEMBA1006559, HEMBA1006639, HEMBA1006648, HEMBA1006807, HEMBA1006877, HEMBA1006941, HEMBA1006973, HEMBA1006976, HEMBA1007018, HEMBA1007078, HEMBA1007174, HEMBA1007243, HEMBB1000037, HEMBB1000250, HEMBB1000264, HEMBB1000399, HEMBB1000404, HEMBB1000530, HEMBB1000637, HEMBB1000684, HEMBB1000693, HEMBB1000725, HEMBB1000781, HEMBB1000915, HEMBB1000927, HEMBB1001051, HEMBB1001068, HEMBB1001102, HEMBB1001112, HEMBB1001119, HEMBB1001133, HEMBB1001151, HEMBB1001175, HEMBB1001242, HEMBB1001294, HEMBB1001314, HEMBB1001331, HEMBB1001346, HEMBB1001384, HEMBB1001429, HEMBB1001443, HEMBB1001482, HEMBB1001802, HEMBB1001831, HEMBB1001908, HEMBB1001915, HEMBB1001922, HEMBB1001967, HEMBB1002042, HEMBB1002134, HEMBB1002193, HEMBB1002217, HEMBB1002342, HEMBB1002358, HEMBB1002442, HEMBB1002477, HEMBB1002600, HEMBB1002635, HEMBB1002683, MAMMA1000009, MAMMA1000020, MAMMA1000092, MAMMA1000103, MAMMA1000155,

[0466] MAMMA1000173, MAMMA1000183, MAMMA1000388, MAMMA1000424, MAMMA1000429, MAMMA1000731, MAMMA1000734, MAMMA1000956, MAMMA1001021, MAMMA1001059, MAMMA1001075, MAMMA1001080, MAMMA1001105, MAMMA1001139, MAMMA1001198, MAMMA1001305, MAMMA1001388, MAMMA1001476, MAMMA1001501, MAMMA1001576, MAMMA1001633, MAMMA1001735, MAMMA1001751, MAMMA1001754, MAMMA1001771, MAMMA1001820, MAMMA1001837, MAMMA1002140, MAMMA1002170, MAMMA1002198, MAMMA1002219, MAMMA1002236, MAMMA1002268, MAMMA1002352, MAMMA1002392, MAMMA1002485, MAMMA1002530, MAMMA1002598, MAMMA1002622, MAMMA1002637, MAMMA1002699, MAMMA1002842, MAMMA1002858, MAMMA1002869, MAMMA1002938, MAMMA1003011, MAMMA1003047, MAMMA1003057, MAMMA1003099, MAMMA1003104, MAMMA1003113, MAMMA1003127, MAMMA1003146, MAMMA1003166, NT2RM1000035, NT2RM1000055, NT2RM1000132, NT2RM1000199, NT2RM1000256, NT2RM1000257, NT2RM1000280, NT2RM1000318, NT2RM1000355, NT2RM1000394, NT2RM1000430, NT2RM1000555, NT2RM1000661, NT2RM1000725, NT2RM1000742, NT2RM1000811, NT2RM1000826, NT2RM1000833, NT2RM1000852, NT2RM1000867, NT2RM1000883, NT2RM1000894, NT2RM1001003, NT2RM1001082, NT2RM1001092, NT2RM2000013, NT2RM2000124, NT2RM2000191, NT2RM2000368, NT2RM2000374, NT2RM2000407, NT2RM2000422, NT2RM2000504, NT2RM2000566, NT2RM2000594, NT2RM2000612, NT2RM2000691, NT2RM2000735, NT2RM2000740, NT2RM2000821, NT2RM2000951, NT2RM2001035, NT2RM2001065, NT2RM2001238, NT2RM2001256, NT2RM2001424,

[0467] NT2RM2001499, NT2RM2001575, NT2RM2001592, NT2RM2001605, NT2RM2001613, NT2RM2001648, NT2RM2001652, NT2RM2001664, NT2RM2001760, NT2RM2001771, NT2RM2001803, NT2RM2001839, NT2RM2001930, NT2RM2001983, NT2RM2002030, NT2RM2002100, NT2RM2002109, NT2RM2002128, NT2RM2002142, NT2RM2002145, NT2RM4000024, NT2RM4000104, NT2RM4000139, NT2RM4000167, NT2RM4000233, NT2RM4000290, NT2RM4000327, NT2RM4000344, NT2RM4000386, NT2RM4000433, NT2RM4000471, NT2RM4000531, NT2RM4000616, NT2RM4000689, NT2RM4000712, NT2RM4000795, NT2RM4000798, NT2RM4000895, NT2RM4000996, NT2RM4001047, NT2RM4001054, NT2RM4001200, NT2RM4001203, NT2RM4001217, NT2RM4001313, NT2RM4001320, NT2RM4001382, NT2RM4001411, NT2RM4001412, NT2RM4001483, NT2RM4001566, NT2RM4001582, NT2RM4001592, NT2RM4001605, NT2RM4001714, NT2RM4001741, NT2RM4001758, NT2RM4001819, NT2RM4001823, NT2RM4001828, NT2RM4001858, NT2RM4001865, NT2RM4001940, NT2RM4002063, NT2RM4002073, NT2RM4002093, NT2RM4002109, NT2RM4002146, NT2RM4002161, NT2RM4002194, NT2RM4002205, NT2RM4002457, NT2RM4002479, NT2RM4002558, NT2RM4002565, NT2RM4002594, NT2RP1000018, NT2RP1000035, NT2RP1000086, NT2RP1000112, NT2RP1000272, NT2RP1000326, NT2RP1000376, NT2RP1000413, NT2RP1000478, NT2RP1000574, NT2RP1000581, NT2RP1000629, NT2RP1000701, NT2RP1000721, NT2RP1000733, NT2RP1000738, NT2RP1000782, NT2RP1000825, NT2RP1000833, NT2RP1000834, NT2RP1000856, NT2RP1000860, NT2RP1000947, NT2RP1000966,

[0468] NT2RP1001079, NT2RP1001177, NT2RP1001247, NT2RP1001253, NT2RP1001361, NT2RP1001395, NT2RP1001410, NT2RP1001457, NT2RP1001482, NT2RP1001546, NT2RP1001569, NT2RP2000008, NT2RP2000045, NT2RP2000056, NT2RP2000077, NT2RP2000114, NT2RP2000126, NT2RP2000147, NT2RP2000233, NT2RP2000297, NT2RP2000310, NT2RP2000329, NT2RP2000346, NT2RP2000414, NT2RP2000422, NT2RP2000459, NT2RP2000603, NT2RP2000842, NT2RP2000880, NT2RP2000931, NT2RP2001070, NT2RP2001081, NT2RP2001233, NT2RP2001290, NT2RP2001327, NT2RP2001397, NT2RP2001420, NT2RP2001440, NT2RP2001449, NT2RP2001511, NT2RP2001520, NT2RP2001536, NT2RP2001634, NT2RP2001660, NT2RP2001663, NT2RP2001748, NT2RP2001762, NT2RP2001876, NT2RP2001898, NT2RP2001991, NT2RP2002066, NT2RP2002099, NT2RP2002193, NT2RP2002252, NT2RP2002256, NT2RP2002259, NT2RP2002312, NT2RP2002325, NT2RP2002385, NT2RP2002479, NT2RP2002503, NT2RP2002504, NT2RP2002591, NT2RP2002606, NT2RP2002727, NT2RP2002928, NT2RP2002959, NT2RP2002993, NT2RP2003158, NT2RP2003228, NT2RP2003230, NT2RP2003295, NT2RP2003307, NT2RP2003308, NT2RP2003433, NT2RP2003517, NT2RP2003604, NT2RP2003643, NT2RP2003702, NT2RP2003714, NT2RP2003737, NT2RP2003760, NT2RP2003781, NT2RP2003912, NT2RP2003968, NT2RP2004013, NT2RP2004194, NT2RP2004232, NT2RP2004239, NT2RP2004316, NT2RP2004523, NT2RP2004538, NT2RP2004655, NT2RP2004768, NT2RP2004799, NT2RP2004816, NT2RP2004933, NT2RP2004961, NT2RP2005003, NT2RP2005012,

[0469] NT2RP2005020, NT2RP2005116, NT2RP2005126, NT2RP2005144, NT2RP2005168, NT2RP2005239, NT2RP2005276, NT2RP2005287, NT2RP2005288, NT2RP2005289, NT2RP2005325, NT2RP2005358, NT2RP2005457, NT2RP2005498, NT2RP2005520, NT2RP2005539, NT2RP2005557, NT2RP2005620, NT2RP2005675, NT2RP2005722, NT2RP2005752, NT2RP2005753, NT2RP2005773, NT2RP2005775, NT2RP2005835, NT2RP2005857, NT2RP2005890, NT2RP2005933, NT2RP2005942, NT2RP2006219, NT2RP2006238, NT2RP2006464, NT2RP2006565, NT2RP2006571, NT2RP2006598, NT2RP3000031, NT2RP3000050, NT2RP3000080, NT2RP3000085, NT2RP3000299, NT2RP3000324, NT2RP3000359, NT2RP3000366, NT2RP3000403, NT2RP3000512, NT2RP3000632, NT2RP3000739, NT2RP3000742, NT2RP3000845, NT2RP3000875, NT2RP3000917, NT2RP3000919, NT2RP3000968, NT2RP3001057, NT2RP3001081, NT2RP3001120, NT2RP3001140, NT2RP3001155, NT2RP3001268, NT2RP3001272, NT2RP3001340, NT2RP3001398, NT2RP3001428, NT2RP3001495, NT2RP3001497, NT2RP3001554, NT2RP3001671, NT2RP3001672, NT2RP3001676, NT2RP3001688, NT2RP3001712, NT2RP3001724, NT2RP3001727, NT2RP3001730, NT2RP3001764, NT2RP3001792, NT2RP3001799, NT2RP3001855, NT2RP3002004, NT2RP3002045, NT2RP3002151, NT2RP3002165, NT2RP3002351, NT2RP3002352, NT2RP3002402, NT2RP3002529, NT2RP3002659, NT2RP3002688, NT2RP3002818, NT2RP3002876, NT2RP3002969, NT2RP3002972, NT2RP3003059, NT2RP3003101, NT2RP3003138, NT2RP3003157, NT2RP3003193, NT2RP3003203, NT2RP3003212, NT2RP3003230,

[0470] NT2RP3003242, NT2RP3003251, NT2RP3003282, NT2RP3003301, NT2RP3003327, NT2RP3003346, NT2RP3003385, NT2RP3003411, NT2RP3003464, NT2RP3003589, NT2RP3003800, NT2RP3003876, NT2RP3003914, NT2RP3003918, NT2RP3004013, NT2RP3004078, NT2RP3004155, NT2RP3004206, NT2RP3004207, NT2RP3004258, NT2RP3004262, NT2RP3004399, NT2RP3004424, NT2RP3004480, NT2RP3004490, NT2RP3004504, NT2RP3004527, NT2RP3004534, NT2RP3004566, NT2RP3004572, NT2RP3004594, NT2RP3004618, NT2RP3004670, NT2RP4000008, NT2RP4000049, NT2RP4000078, NT2RP4000109, NT2RP4000111, NT2RP4000147, NT2RP4000150, NT2RP4000185, NT2RP4000243, NT2RP4000246, NT2RP4000367, NT2RP4000376, NT2RP4000398, NT2RP4000518, NT2RP4000524, NT2RP4000614, NT2RP4000724, NT2RP4000787, NT2RP4000855, NT2RP4000865, NT2RP4000878, NT2RP4000907, NT2RP4000915, NT2RP4000928, NT2RP4000997, NT2RP4001006, NT2RP4001029, NT2RP4001079, NT2RP4001080, NT2RP4001117, NT2RP4001213, NT2RP4001313, NT2RP4001315, NT2RP4001345, NT2RP4001414, NT2RP4001433, NT2RP4001483, NT2RP4001498, NT2RP4001529, NT2RP4001574, NT2RP4001644, NT2RP4001753, NT2RP4001760, NT2RP4001938, NT2RP4001966, NT2RP4002047, NT2RP4002078, NT2RP5003500, OVARC1000006, OVARC1000014, OVARC1000060, OVARC1000113, OVARC1000114, OVARC1000241, OVARC1000304, OVARC1000326, OVARC1000437, OVARC1000440, OVARC1000465, OVARC1000479, OVARC1000520, OVARC1000649, OVARC1000679, OVARC1000682, OVARC1000722, OVARC1000771, OVARC1000834,

[0471] OVARC1000850, OVARC1000862, OVARC1000883, OVARC1000945, OVARC1000996, OVARC1001055, OVARC1001068, OVARC1001107, OVARC1001113, OVARC1001154, OVARC1001244, OVARC1001261, OVARC1001296, OVARC1001342, OVARC1001357, OVARC1001372, OVARC1001381, OVARC1001417, OVARC1001419, OVARC1001496, OVARC1001506, OVARC1001542, OVARC1001577, OVARC1001668, OVARC1001702, OVARC1001713, OVARC1001731, OVARC1001766, OVARC1001802, OVARC1001809, OVARC1001861, OVARC1001900, OVARC1001901, OVARC1001943, OVARC1001949, OVARC1002112, PLACE1000007, PLACE1000061, PLACE1000133, PLACE1000184, PLACE1000383, PLACE1000406, PLACE1000492, PLACE1000588, PLACE1000596, PLACE1000611, PLACE1000653, PLACE1000706, PLACE1001062, PLACE1001092, PLACE1001118, PLACE1001136, PLACE1001238, PLACE1001294, PLACE1001304, PLACE1001377, PLACE1001384, PLACE1001517, PLACE1001602, PLACE1001603, PLACE1001611, PLACE1001634, PLACE1001691, PLACE1001748, PLACE1001771, PLACE1001817, PLACE1002046, PLACE1002090, PLACE1002437, PLACE1002474, PLACE1002493, PLACE1002500, PLACE1002532, PLACE1002591, PLACE1002655, PLACE1002665, PLACE1002685, PLACE1002782, PLACE1002816, PLACE1002834, PLACE1003100, PLACE1003302, PLACE1003353, PLACE1003394, PLACE1003596, PLACE1003709, PLACE1003738, PLACE1003885, PLACE1003888, PLACE1003903, PLACE1003968, PLACE1004104, PLACE1004128, PLACE1004149, PLACE1004203, PLACE1004277, PLACE1004316, PLACE1004358, PLACE1004437, PLACE1004510,

[0472] PLACE1004564, PLACE1004674, PLACE1004681, PLACE1004743, PLACE1004773, PLACE1004777, PLACE1004814, PLACE1004918, PLACE1005101, PLACE1005305, PLACE1005477, PLACE1005494, PLACE1005502, PLACE1005646, PLACE1005656, PLACE1005698, PLACE1005739, PLACE1005804, PLACE1005813, PLACE1005876, PLACE1005968, PLACE1006011, PLACE1006037, PLACE1006040, PLACE1006119, PLACE1006170, PLACE1006187, PLACE1006196, PLACE1006288, PLACE1006368, PLACE1006385, PLACE1006414, PLACE1006438, PLACE1006482, PLACE1006488, PLACE1006531, PLACE1006615, PLACE1006754, PLACE1006958, PLACE1006962, PLACE1007105, PLACE1007239, PLACE1007257, PLACE1007346, PLACE1007409, PLACE1007511, PLACE1007706, PLACE1007737, PLACE1007852, PLACE1007955, PLACE1007958, PLACE1007969, PLACE1008000, PLACE1008044, PLACE1008177, PLACE1008273, PLACE1008309, PLACE1008356, PLACE1008402, PLACE1008603, PLACE1008627, PLACE1008643, PLACE1008650, PLACE1008696, PLACE1008790, PLACE1008808, PLACE1008813, PLACE1008941, PLACE1009027, PLACE1009060, PLACE1009099, PLACE1009113, PLACE1009200, PLACE1009230, PLACE1009246, PLACE1009298, PLACE1009398, PLACE1009444, PLACE1009468, PLACE1009524, PLACE1009659, PLACE1009670, PLACE1009763, PLACE1009997, PLACE1010053, PLACE1010074, PLACE1010096, PLACE1010261, PLACE1010481, PLACE1010491, PLACE1010580, PLACE1010599, PLACE1010702, PLACE1010720, PLACE1010743, PLACE1010761, PLACE1010771, PLACE1010856, PLACE1010870, PLACE1010942,

[0473] PLACE1011041, PLACE1011046, PLACE1011054, PLACE1011057, PLACE1011109, PLACE1011165, PLACE1011203, PLACE1011229, PLACE1011332, PLACE1011477, PLACE1011576, PLACE1011664, PLACE1011896, PLACE1011923, PLACE2000021, PLACE2000039, PLACE2000062, PLACE2000072, PLACE2000140, PLACE2000216, PLACE2000341, PLACE2000359, PLACE2000404, PLACE2000438, PLACE3000004, PLACE3000009, PLACE3000020, PLACE3000059, PLACE3000121, PLACE3000145, PLACE3000244, PLACE3000350, PLACE3000352, PLACE3000455, PLACE3000475, PLACE4000052, PLACE4000128, PLACE4000156, PLACE4000230, PLACE4000261, PLACE4000269, PLACE4000320, PLACE4000654,SKNMC1000050, THYRO1000017, THYRO1000026, THYRO1000121, THYRO1000173, THYRO1000186, THYRO1000197, THYRO1000242, THYRO1000288, THYRO1000320, THYRO1000327, THYRO1000358, THYRO1000387, THYRO1000471, THYRO1000501, THYRO1000585, THYRO1000666, THYRO1000783, THYRO1000926, THYRO1000974, THYRO1001100, THYRO1001121, THYRO1001189, THYRO1001406, THYRO1001458, THYRO1001595, THYRO1001605, THYRO1001617, THYRO1001671, Y79AA1000037, Y79AA1000059, Y79AA1000214, Y79AA1000346, Y79AA1000349, Y79AA1000469, Y79AA1000560, Y79AA1000627, Y79AA1000705, Y79AA1000734, Y79AA1000752, Y79AA1000784, Y79AA1000833, Y79AA1000966, Y79AA1000968, Y79AA1000985, Y79AA1001105, Y79AA1001236, Y79AA1001299, Y79AA1001391, Y79AA1001533, Y79AA1001548, Y79AA1001679, Y79AA1001827, Y79AA1001866, Y79AA1002093, Y79AA1002258, Y79AA1002361, Y79AA1002416,

[0474] The following 429 clones were estimated to have a relatively low homology with the known proteins in the same category.

HEMBA1000012, HEMBA1000185, HEMBA1000488, HEMBA1000491, HEMBA1000569, HEMBA1000752,

HEMBA1001137, HEMBA1001407, HEMBA1001476, HEMBA1001744, HEMBA1001800, HEMBA1001804, HEMBA1001809, HEMBA1001847,

HEMBA1002035, HEMBA1002102, HEMBA1002150, HEMBA1002212, HEMBA1002495, HEMBA1002555, HEMBA1002609, HEMBA1002688, HEMBA1002939,

HEMBA1003071, HEMBA1003077, HEMBA1003136, HEMBA1003179, HEMBA1003235, HEMBA1003291, HEMBA1003418,

HEMBA1003568, HEMBA1003598, HEMBA1003680, HEMBA1003684, HEMBA1003836, HEMBA1003953,

HEMBA1004276, HEMBA1004408, HEMBA1004669, HEMBA1004734,

HEMBA1005475, HEMBA1005595, HEMBA1005737, HEMBA1005815, HEMBA1005931,

HEMBA1006347, HEMBA1006474, HEMBA1006521, HEMBA1006562, HEMBA1006652, HEMBA1006737, HEMBA1006914,

HEMBA1007045, HEMBA1007121, HEMBA1007300, HEMBA1007301,

HEMBB1000119, HEMBB1000217, HEMBB1000317, HEMBB1000632, HEMBB1000789,

HEMBB1001011, HEMBB1001177, HEMBB1001234, HEMBB1001282, HEMBB1001288,

HEMBB1002050, HEMBB1002092,

MAMMA1000085, MAMMA1000672, MAMMA1000841, MAMMA1000897, MAMMA1001008, MAMMA1001030, MAMMA1001041,

MAMMA1002143, MAMMA1002573, MAMMA1002619, MAMMA1002636, MAMMA1002650, MAMMA1002671, MAMMA1002881, MAMMA1002937,

NT2RM1000118, NT2RM1000153, NT2RM1000186, NT2RM1000187, NT2RM1000377,

NT2RM1000648, NT2RM1000666, NT2RM1000691, NT2RM1000770, NT2RM1000772, NT2RM1000850, NT2RM1000882, NT2RM1000898,

NT2RM1001059, NT2RM1001072, NT2RM1001139,

NT2RM2000363, NT2RM2000371, NT2RM2000402, NT2RM2000577, NT2RM2000599, NT2RM2000623, NT2RM2000714,

NT2RM2001131, NT2RM2001221, NT2RM2001324, NT2RM2001345,

NT2RM2001588, NT2RM2001635, NT2RM2001670, NT2RM2001700, NT2RM2001730, NT2RM2001785, NT2RM2001797, NT2RM2001823, NT2RM2001936, NT2RM2001989, NT2RM2002580,

NT2RM4000030, NT2RM4000085, NT2RM4000155, NT2RM4000156, NT2RM4000169, NT2RM4000191, NT2RM4000215, NT2RM4000354, NT2RM4000421, NT2RM4000496, NT2RM4000734, NT2RM4000751,

NT2RM4001032, NT2RM4001140, NT2RM4001316, NT2RM4001340, NT2RM4001410, NT2RM4001444,

NT2RM4001611, NT2RM4001629, NT2RM4001746, NT2RM4001776, NT2RM4001783, NT2RM4001930, NT2RM4001979, NT2RM4001987,

NT2RM4002062, NT2RM4002145, NT2RM4002189, NT2RM4002226, NT2RM4002409,

NT2RM4002527, NT2RM4002571, NT2RM4002623,

NT2RP1000111, NT2RP1000130, NT2RP1000333, NT2RP1000348, NT2RP1000363, NT2RP1000460, NT2RP1000470, NT2RP1000493,

NT2RP1000547, NT2RP1000609, NT2RP1001033, NT2RP1001080, NT2RP1001313, NT2RP1001543,

NT2RP2000006, NT2RP2000133, NT2RP2000161, NT2RP2000183, NT2RP2000257, NT2RP2000448,

NT2RP2000710, NT2RP2000764, NT2RP2000812, NT2RP2000932, NT2RP2001127, NT2RP2001174, NT2RP2001839, NT2RP2001900,

NT2RP2002025, NT2RP2002058, NT2RP2002185, NT2RP2002442, NT2RP2002595, NT2RP2002618, NT2RP2002710, NT2RP2002980,

NT2RP2003125, NT2RP2003277, NT2RP2003286, NT2RP2003293, NT2RP2003506, NT2RP2003564, NT2RP2003706,

NT2RP2004098, NT2RP2004187, NT2RP2004568, NT2RP2004791, NT2RP2005022, NT2RP2005037, NT2RP2005038, NT2RP2005204, NT2RP2005344, NT2RP2005465, NT2RP2005496, NT2RP2005531, NT2RP2005690, NT2RP2005763, NT2RP2005767, NT2RP2006275,

NT2RP3000046, NT2RP3000047, NT2RP3000361, NT2RP3000397, NT2RP3000418, NT2RP3000527, NT2RP3000590, NT2RP3000603, NT2RP3000759, NT2RP3000868, NT2RP3000994,

NT2RP3001216, NT2RP3001274, NT2RP3001355, NT2RP3001399, NT2RP3001407, NT2RP3001426, NT2RP3001427,

NT2RP3001587, NT2RP3001708, NT2RP3002056, NT2RP3002273, NT2RP3002377, NT2RP3002399, NT2RP3002663, NT2RP3002785, NT2RP3002909,

NT2RP3003061, NT2RP3003500, NT2RP3003672, NT2RP3003701, NT2RP3003716, NT2RP3003825, NT2RP3003831,

NT2RP3004209, NT2RP3004253, NT2RP3004454, NT2RP3004472, NT2RP3004475, NT2RP3004507, NT2RP3004569, NT2RP3004578, NT2RP3004617, NT2RP3004669,

NT2RP4000210, NT2RP4000212, NT2RP4000259, NT2RP4000312, NT2RP4000370, NT2RP4000417, NT2RP4000449, NT2RP4000457, NT2RP4000498, NT2RP4000528, NT2RP4000879, NT2RP4000925,

NT2RP4001041, NT2RP4001095, NT2RP4001122, NT2RP4001126, NT2RP4001148, NT2RP4001149, NT2RP4001150, NT2RP4001174, NT2RP4001207, NT2RP4001219, NT2RP4001372, NT2RP4001375,

NT2RP4001551, NT2RP4001592, NT2RP4001638, NT2RP4001725, NT2RP4001790, NT2RP4001823, NT2RP4001838, NT2RP4001849, NT2RP4001893, NT2RP4001927, NT2RP4001946, NT2RP4002408,

NT2RP5003477, NT2RP5003522, NT2RP5003524,

OVARC1000004, OVARC1000087, OVARC1000139, OVARC1000309, OVARC1000543, OVARC1000746, OVARC1000846, OVARC1000876, OVARC1000885, OVARC1000912,

OVARC1001180, OVARC1001329, OVARC1001476, OVARC1001555, OVARC1001610, OVARC1001762, OVARC1001880, OVARC1001942, OVARC1002050, OVARC1002138,

PLACE1000066, PLACE1000142, PLACE1000420, PLACE1000547, PLACE1000583, PLACE1000863,

PLACE1001387, PLACE1001632, PLACE1001692, PLACE1001989,

PLACE1002450, PLACE1002571, PLACE1002722, PLACE1002775, PLACE1002811, PLACE1002991,

PLACE1003190, PLACE1003258, PLACE1003420, PLACE1003493, PLACE1003605, PLACE1003669, PLACE1003704, PLACE1003915,

PLACE1004197, PLACE1004428, PLACE1004471, PLACE1004629, PLACE1004751, PLACE1004902,

PLACE1005287, PLACE1005557, PLACE1005611, PLACE1005763, PLACE1005890,

PLACE1006157, PLACE1006469, PLACE1006731,

PLACE1007238, PLACE1007375, PLACE1007488, PLACE1007544, PLACE1007598, PLACE1007729, PLACE1008244, PLACE1008275, PLACE1008947,

PLACE1009094, PLACE1009319, PLACE1009622, PLACE1009721, PLACE1009845, PLACE1009861,

PLACE1010083, PLACE1010089, PLACE1010106, PLACE1010152, PLACE1010194, PLACE1010310, PLACE1010833, PLACE1010960, PLACE1011056, PLACE1011219, PLACE1011263, PLACE1011371, PLACE1011492,

PLACE2000034, PLACE2000164, PLACE2000274, PLACE2000399, PLACE2000411, PLACE2000458,

PLACE3000148, PLACE3000156, PLACE3000242, PLACE3000322, PLACE3000353, PLACE3000373,

PLACE4000009, PLACE4000014, PLACE4000259, PLACE4000431, PLACE4000522, PLACE4000558, PLACE4000581, PLACE4000590, PLACE4000612,

SKNMC1000011,

THYRO1000072, THYRO1000852, THYRO1000934, THYRO1000951,

Y79AA1000258, Y79AA1000368, Y79AA1000539, Y79AA1000589, Y79AA1000962, Y79AA1001048, Y79AA1001233, Y79AA1001394, Y79AA1001581, Y79AA1001613, Y79AA1001692, Y79AA1001848, Y79AA1001874, Y79AA1001963,

Y79AA1002027, Y79AA1002139, Y79AA1002208, Y79AA1002209, Y79AA1002472, Y79AA1002482,

[0475] (1) Among the 1430 clones, the following 259 clones were predicted to encode a protein in the category of secretory protein or membrane protein (including the clones belonging to plural categories).

[0476] HEMBA1000005, HEMBA1001017, HEMBA1001059, HEMBA1001071, HEMBA1001351, HEMBA1001407, HEMBA1001476, HEMBA1001569, HEMBA1001678, HEMBA1001804, HEMBA1002150, HEMBA1002547, HEMBA1002555, HEMBA1002688, HEMBA1002716, HEMBA1002999, HEMBA1003071, HEMBA1003077, HEMBA1003538, HEMBA1003598, HEMBA1003690, HEMBA1004207, HEMBA1004356, HEMBA1004389, HEMBA1004756, HEMBA1005338, HEMBA1005367, HEMBA1005576, HEMBA1005699, HEMBA1005963, HEMBA1005990, HEMBA1006310, HEMBA1006344, HEMBA1006562, HEMBA1006976, HEMBA1007045, HEMBA1007301, HEMBB1000037, HEMBB1000119, HEMBB1000317, HEMBB1000530, HEMBB1000915, HEMBB1001112, HEMBB1001119, HEMBB1001151, HEMBB1001282, HEMBB1001331, HEMBB1002042, HEMBB1002092, HEMBB1002193, HEMBB1002600, MAMMA1000103, MAMMA1000424, MAMMA1000672, MAMMA1000734, MAMMA1000897, MAMMA1001008, MAMMA1001030, MAMMA1001041, MAMMA1001075, MAMMA1001080, MAMMA1001751, MAMMA1001754, MAMMA1002143, MAMMA1002219, MAMMA1002485, MAMMA1002636, MAMMA1002938, MAMMA1003104, NT2RM1000199, NT2RM1000355, NT2RM1000430, NT2RM1000648, NT2RM1000742, NT2RM1000770, NT2RM1000811, NT2RM1000833, NT2RM1000867, NT2RM1000882, NT2RM1000883, NT2RM1001139, NT2RM2000374, NT2RM2000402, NT2RM2000422, NT2RM2000566, NT2RM2000623, NT2RM2001324, NT2RM2001499, NT2RM2001588, NT2RM2001592, NT2RM2001613, NT2RM2001635, NT2RM2001648, NT2RM2001760, NT2RM2002109, NT2RM2002145, NT2RM4000156, NT2RM4000169, NT2RM4000386, NT2RM4000433,

[0477] NT2RM4000795, NT2RM4001032, NT2RM4001054, NT2RM4001410, NT2RM4001605, NT2RM4001930, NT2RM4001987, NT2RM4002073, NT2RM4002145, NT2RM4002189, NT2RM4002558, NT2RM4002565, NT2RM4002571, NT2RM4002594, NT2RP1000130, NT2RP1000326, NT2RP1000363, NT2RP1000413, NT2RP1000547, NT2RP1000782, NT2RP1000856, NT2RP1001247, NT2RP1001313, NT2RP1001546, NT2RP1001569, NT2RP2000056, NT2RP2000257, NT2RP2000842, NT2RP2001081, NT2RP2001991, NT2RP2002025, NT2RP2002193, NT2RP2002256, NT2RP2002312, NT2RP2002479, NT2RP2002504, NT2RP2003433, NT2RP2003706, NT2RP2003760, NT2RP2004194, NT2RP2004655, NT2RP2005020, NT2RP2005344, NT2RP2005465, NT2RP2005752, NT2RP2005753, NT2RP2005835, NT2RP2005933, NT2RP2006275, NT2RP2006565, NT2RP2006571, NT2RP3000324, NT2RP3000739, NT2RP3000919, NT2RP3001140, NT2RP3001355, NT2RP3001676, NT2RP3001708, NT2RP3001727, NT2RP3002659, NT2RP3003059, NT2RP3003101, NT2RP3003203, NT2RP3003212, NT2RP3003242, NT2RP3003672, NT2RP3003701, NT2RP3003716, NT2RP3003918, NT2RP3004207, NT2RP3004253, NT2RP4000008, NT2RP4000212, NT2RP4000243, NT2RP4000417, NT2RP4000878, NT2RP4000907, NT2RP4000925, NT2RP4000928, NT2RP4001079, NT2RP4001117, NT2RP4001150, NT2RP4001174, NT2RP4001313, NT2RP4001315, NT2RP4001345, NT2RP4001372, NT2RP4001574, NT2RP4001823, NT2RP4001966, NT2RP5003524, OVARC1000060, OVARC1000326, OVARC1000543, OVARC1000682, OVARC1000722, OVARC1000912, OVARC1001055, OVARC1001154, OVARC1001261,

[0478] OVARC1001329, OVARC1001419, OVARC1001506, OVARC1001542, OVARC1001610, OVARC1001713, OVARC1001802, OVARC1001943, PLACE1000611, PLACE1001092, PLACE1001136, PLACE1001294, PLACE1002437, PLACE1002500, PLACE1002722, PLACE1002782, PLACE1002816, PLACE1003420, PLACE1003493, PLACE1003596, PLACE1004104, PLACE1004197, PLACE1004203, PLACE1004277, PLACE1004629, PLACE1004751, PLACE1005494, PLACE1005804, PLACE1005890, PLACE1006157, PLACE1007409, PLACE1007852, PLACE1008044, PLACE1008273, PLACE1008309, PLACE1008603, PLACE1008643, PLACE1009659, PLACE1009670, PLACE1009845, PLACE1009861, PLACE1011371, PLACE1011492, PLACE1011896, PLACE2000034, PLACE2000341, PLACE2000399,PLACE2000458, PLACE3000020, PLACE3000322, PLACE3000353, PLACE4000052, PLACE4000269,PLACE4000522, PLACE4000581, THYRO1000783, Y79AA1000258, Y79AA1000346, Y79AA1001874,

[0479] (2) The following 111 clones were predicted to encode a protein in the category of glycoprotein (including the clones belonging to plural categories).

[0480] HEMBA1000752, HEMBA1001017, HEMBA1001059, HEMBA1001071, HEMBA1001302, HEMBA1002150, HEMBA1002547, HEMBA1002555, HEMBA1003077, HEMBA1003538, HEMBA1003598, HEMBA1003866, HEMBA1004356, HEMBA1005338, HEMBA1005576, HEMBA1005699, HEMBA1006562, HEMBA1006976, HEMBA1007301, HEMBB1000317, HEMBB1000530, HEMBB1001119, HEMBB1002092, HEMBB1002193, MAMMA1000672, MAMMA1000897, MAMMA1001030, MAMMA1001388, MAMMA1001771, MAMMA1002485, MAMMA1002636, MAMMA1002938, NT2RM1000648, NT2RM2000374, NT2RM2000407, NT2RM2000422, NT2RM2000623, NT2RM2001499, NT2RM2001588, NT2RM2001839, NT2RM2001930, NT2RM4000156, NT2RM4000233, NT2RM4001410, NT2RM4001987, NT2RM4002145, NT2RM4002189, NT2RM4002194, NT2RM4002558, NT2RM4002571, NT2RP1000856, NT2RP1001247, NT2RP2000056, NT2RP2001991, NT2RP2002025, NT2RP2002325, NT2RP2002385, NT2RP2003706, NT2RP2005933, NT2RP3001140, NT2RP3003242, NT2RP3003672, NT2RP3003701, NT2RP3003716, NT2RP3003914, NT2RP3004253, NT2RP4000212, NT2RP4000417, NT2RP4000925, NT2RP4001149, NT2RP4001150, NT2RP4001219, NT2RP4001345, NT2RP4001372, NT2RP5003522, NT2RP5003524, OVARC1000543, OVARC1000682, OVARC1000722, OVARC1001055, OVARC1001154, OVARC1001506, OVARC1001713, PLACE1002437, PLACE1002722, PLACE1003258, PLACE1003493, PLACE1004197, PLACE1004751, PLACE1005698, PLACE1005804, PLACE1006157, PLACE1006754, PLACE1008643, PLACE1009094, PLACE1009861, PLACE1011371, PLACE2000034, PLACE2000062, PLACE2000399,

PLACE2000458, PLACE3000009, PLACE3000020, PLACE3000353, PLACE3000373, PLACE4000052, PLACE4000230, PLACE4000522, PLACE4000581, THYRO1000852, Y79AA1001874,

[0481] (3) The following 147 clones were predicted to encode a protein in the category of proteins associated with signal transduction (including the clones belonging to plural categories).

[0482] HEMBA1000030, HEMBA1000185, HEMBA1000303, HEMBA1000459, HEMBA1000491, HEMBA1000657, HEMBA1000991, HEMBA1001174, HEMBA1001387, HEMBA1001822, HEMBA1001921, HEMBA1002212, HEMBA1002341, HEMBA1002417, HEMBA1002810, HEMBA1002896, HEMBA1003291, HEMBA1003314, HEMBA1003560, HEMBA1003615, HEMBA1003621, HEMBA1003805, HEMBA1004286, HEMBA1004604, HEMBA1006173, HEMBA1006540, HEMBA1006973, HEMBA1007174, HEMBB1000632, HEMBB1000781, HEMBB1001051, HEMBB1001177, HEMBB1001234, HEMBB1001294, HEMBB1001384, HEMBB1002193, HEMBB1002477, HEMBB1002635, MAMMA1001305, MAMMA1002699, MAMMA1002842, MAMMA1003057, MAMMA1003113, NT2RM1000118, NT2RM1000186, NT2RM1000772, NT2RM1000850, NT2RM1001072, NT2RM2000124, NT2RM2000612, NT2RM2001065, NT2RM2001221, NT2RM2001345, NT2RM2001652, NT2RM2001983, NT2RM2002109, NT2RM2002128, NT2RM4000327, NT2RM4000354, NT2RM4000798, NT2RM4001203, NT2RM4001411, NT2RM4001412, NT2RM4001582, NT2RM4001629, NT2RM4001758, NT2RM4002226, NT2RP1000018, NT2RP1000112, NT2RP1000701, NT2RP1000825, NT2RP1001395, NT2RP1001410, NT2RP1001457, NT2RP1001482, NT2RP2002058, NT2RP2002710, NT2RP2003702, NT2RP2003912, NT2RP2004232, NT2RP2004768, NT2RP2005022, NT2RP2005620, NT2RP2005890, NT2RP3000299, NT2RP3000403, NT2RP3000742, NT2RP3000845, NT2RP3001764, NT2RP3002004, NT2RP3002785, NT2RP3002909, NT2RP3003230, NT2RP3003411, NT2RP3003464, NT2RP3003800, NT2RP3004475, NT2RP3004534, NT2RP4000147, NT2RP4000376,

[0483] NT2RP4001122, NT2RP4001375, NT2RP4001644, NT2RP4001725, NT2RP4001760, NT2RP4001849, NT2RP4001927, NT2RP4002408, NT2RP5003477, OVARC1000437, OVARC1000465, OVARC1000649, OVARC1000945, OVARC1001476, OVARC1001861, PLACE1001377, PLACE1001384, PLACE1001387, PLACE1002493, PLACE1002591, PLACE1002685, PLACE1003353, PLACE1004128, PLACE1004918, PLACE1005502, PLACE1005739, PLACE1005968, PLACE1006385, PLACE1007238, PLACE1007375, PLACE1007488, PLACE1008244, PLACE1008650, PLACE1009319, PLACE1009468, PLACE1010083, PLACE1010942, PLACE1011041, PLACE1011046, PLACE1011923, PLACE2000164, PLACE3000145, PLACE3000350, PLACE3000475, THYRO1001595, Y79AA1000059, Y79AA1000966,

[0484] (4) The following 230 clones were predicted to encode a protein in the category of proteins associated with transcription (including the clones belonging to plural categories).

[0485] HEMBA1000201, HEMBA1000216, HEMBA1000488, HEMBA1000561, HEMBA1000851, HEMBA1001137, HEMBA1001510, HEMBA1001579, HEMBA1001800, HEMBA1001809, HEMBA1001819, HEMBA1001847, HEMBA1002035, HEMBA1002092, HEMBA1002569, HEMBA1002609, HEMBA1003545, HEMBA1003568, HEMBA1003684, HEMBA1003760, HEMBA1003953, HEMBA1004097, HEMBA1004321, HEMBA1004353, HEMBA1004479, HEMBA1004758, HEMBA1005359, HEMBA1005528, HEMBA1005548, HEMBA1005931, HEMBA1006253, HEMBA1006278, HEMBA1006359, HEMBA1006559, HEMBB1000250, HEMBB1000789, HEMBB1001011, HEMBB1001314, HEMBB1001482, HEMBB1001908, HEMBB1002134, HEMBB1002217, MAMMA1000155, MAMMA1000183, MAMMA1000388, MAMMA1001633, MAMMA1001820, MAMMA1001837, MAMMA1002650, MAMMA1002937, NT2RM1000055, NT2RM1000666, NT2RM1000691, NT2RM1000894, NT2RM1001092, NT2RM2000013, NT2RM2000735, NT2RM2001035, NT2RM2001575, NT2RM2001605, NT2RM2001670, NT2RM2001771, NT2RM2001797, NT2RM2002580, NT2RM4000024, NT2RM4000104, NT2RM4000191, NT2RM4000496, NT2RM4000531, NT2RM4000734, NT2RM4000751, NT2RM4000996, NT2RM4001140, NT2RM4001200, NT2RM4001483, NT2RM4001592, NT2RM4001746, NT2RM4001783, NT2RM4001823, NT2RM4001828, NT2RM4001858, NT2RM4001979, NT2RP1000111, NT2RP1000333, NT2RP1000574, NT2RP1000721, NT2RP1000860, NT2RP2000008, NT2RP2000133, NT2RP2000297, NT2RP2000931, NT2RP2001174, NT2RP2001233, NT2RP2002252, NT2RP2002503, NT2RP2002591, NT2RP2003125, NT2RP2003228, NT2RP2003293, NT2RP2003564,

[0486] NT2RP2003714, NT2RP2004013, NT2RP2004187, NT2RP2004961, NT2RP2005003, NT2RP2005037, NT2RP2005287, NT2RP2005496, NT2RP2005539, NT2RP2005722, NT2RP2006238, NT2RP2006464, NT2RP3000050, NT2RP3000397, NT2RP3000512, NT2RP3000527, NT2RP3000590, NT2RP3000632, NT2RP3001057, NT2RP3001120, NT2RP3001155, NT2RP3001268, NT2RP3001398, NT2RP3001399, NT2RP3001671, NT2RP3001672, NT2RP3001688, NT2RP3001712, NT2RP3001792, NT2RP3001855, NT2RP3002165, NT2RP3002377, NT2RP3002399, NT2RP3003157, NT2RP3003193, NT2RP3003251, NT2RP3003327, NT2RP3004258, NT2RP3004566, NT2RP3004572, NT2RP3004594, NT2RP3004617, NT2RP4000078, NT2RP4000210, NT2RP4000398, NT2RP4000449, NT2RP4000787, NT2RP4000865, NT2RP4000997, NT2RP4001029, NT2RP4001213, NT2RP4001433, NT2RP4001529, NT2RP4001551, NT2RP4001638, NT2RP4001753, NT2RP4001790, NT2RP4001938, NT2RP4002078, OVARC1000479, OVARC1000846, OVARC1001381, OVARC1001555, OVARC1001577, OVARC1001949, PLACE1000066, PLACE1000133, PLACE1000583, PLACE1000596, PLACE1000706, PLACE1001118, PLACE1001238, PLACE1001304, PLACE1001602, PLACE1001632, PLACE1002450, PLACE1002532, PLACE1002834, PLACE1003302, PLACE1003605, PLACE1003738, PLACE1003885, PLACE1004471, PLACE1004510, PLACE1004681, PLACE1006414, PLACE1006438, PLACE1006482, PLACE1007239, PLACE1007346, PLACE1007544, PLACE1007598, PLACE1007955, PLACE1007969, PLACE1008627, PLACE1008941, PLACE1009099, PLACE1009246, PLACE1009398, PLACE1010261,

[0487] PLACE1010491, PLACE1010702, PLACE1010771, PLACE1010870, PLACE1011576, PLACE2000072, PLACE2000359, PLACE4000128, PLACE4000156, PLACE4000259, PLACE4000431, THYRO1000121, THYRO1000242, THYRO1000501, THYRO1000585, THYRO1001100, THYRO1001189, Y79AA1000037, Y79AA1000627, Y79AA1000705, Y79AA1001105, Y79AA1001299, Y79AA1001391, Y79AA1001533, Y79AA1001613, Y79AA1001848, Y79AA1001866, Y79AA1002093, Y79AA1002472, Y79AA1002482,

[0488] (5) The following 436 clones were predicted to encode a protein in the category of proteins associated with diseases (including the clones belonging to plural categories).

[0489] HEMBA1000158, HEMBA1000216, HEMBA1000523, HEMBA1000561, HEMBA1000569, HEMBA1000673, HEMBA1000972, HEMBA1001017, HEMBA1001019, HEMBA1001059, HEMBA1001071, HEMBA1001088, HEMBA1001123, HEMBA1001407, HEMBA1001569, HEMBA1001570, HEMBA1001672, HEMBA1002035, HEMBA1002160, HEMBA1002162, HEMBA1002547, HEMBA1002939, HEMBA1003077, HEMBA1003418, HEMBA1003433, HEMBA1003538, HEMBA1003555, HEMBA1003568, HEMBA1003569, HEMBA1003581, HEMBA1003720, HEMBA1003760, HEMBA1004168, HEMBA1004248, HEMBA1004276, HEMBA1004354, HEMBA1004356, HEMBA1004479, HEMBA1004534, HEMBA1004669, HEMBA1004752, HEMBA1004753, HEMBA1004807, HEMBA1005293, HEMBA1005331, HEMBA1005359, HEMBA1005367, HEMBA1005423, HEMBA1005443, HEMBA1005475, HEMBA1005528, HEMBA1005576, HEMBA1005581, HEMBA1005679, HEMBA1005699, HEMBA1005732, HEMBA1005931, HEMBA1006173, HEMBA1006474, HEMBA1006562, HEMBA1006648, HEMBA1006652, HEMBA1006737, HEMBA1006807, HEMBA1006976, HEMBA1007078, HEMBA1007121, HEMBA1007243, HEMBA1007301, HEMBB1000264, HEMBB1000637, HEMBB1000684, HEMBB1000693, HEMBB1000915, HEMBB1000927, HEMBB1001011, HEMBB1001051, HEMBB1001068, HEMBB1001102, HEMBB1001119, HEMBB1001133, HEMBB1001177, HEMBB1001802, HEMBB1001908, HEMBB1001922, HEMBB1001967, HEMBB1002050, HEMBB1002193, HEMBB1002217, HEMBB1002358, HEMBB1002635, HEMBB1002683, MAMMA1000009, MAMMA1000092, MAMMA1000103, MAMMA1000173, MAMMA1000731, MAMMA1000897, MAMMA1000956, MAMMA1001021,

[0490] MAMMA1001041, MAMMA1001105, MAMMA1001198, MAMMA1001305, MAMMA1001576, MAMMA1001633, MAMMA1002140, MAMMA1002170, MAMMA1002198, MAMMA1002268, MAMMA1002352, MAMMA1002392, MAMMA1002485, MAMMA1002530, MAMMA1002573, MAMMA1002636, MAMMA1002858, MAMMA1002869, MAMMA1002881, MAMMA1002937, MAMMA1003047, MAMMA1003099, MAMMA1003146, MAMMA1003166, NT2RM1000035, NT2RM1000153, NT2RM1000257, NT2RM1000318, NT2RM1000377, NT2RM1000394, NT2RM1000555, NT2RM1000691, NT2RM1000725, NT2RM1000770, NT2RM1000826, NT2RM1000850, NT2RM1001059, NT2RM1001072, NT2RM1001082, NT2RM1001092, NT2RM2000363, NT2RM2000374, NT2RM2000594, NT2RM2000599, NT2RM2000714, NT2RM2000740, NT2RM2000821, NT2RM2001035, NT2RM2001499, NT2RM2001575, NT2RM2001605, NT2RM2001664, NT2RM2001670, NT2RM2001803, NT2RM2001823, NT2RM2001839, NT2RM4000085, NT2RM4000139, NT2RM4000155, NT2RM4000290, NT2RM4000689, NT2RM4000895, NT2RM4001320, NT2RM4001566, NT2RM4001629, NT2RM4001741, NT2RM4001819, NT2RM4001823, NT2RM4001865, NT2RM4001940, NT2RM4002093, NT2RM4002146, NT2RM4002161, NT2RM4002189, NT2RM4002457, NT2RM4002558, NT2RM4002571, NT2RP1000086, NT2RP1000376, NT2RP1000574, NT2RP1000581, NT2RP1000629, NT2RP1000721, NT2RP1000733, NT2RP1000738, NT2RP1000825, NT2RP1000833, NT2RP1000860, NT2RP1000966, NT2RP1001033, NT2RP1001247, NT2RP2000126, NT2RP2000147, NT2RP2000233, NT2RP2000297, NT2RP2000310, NT2RP2000414, NT2RP2000448, NT2RP2000459, NT2RP2000603,

[0491] NT2RP2000812, NT2RP2001127, NT2RP2001327, NT2RP2001440, NT2RP2001520, NT2RP2001663, NT2RP2001748, NT2RP2001876, NT2RP2001898, NT2RP2002025, NT2RP2002066, NT2RP2002259, NT2RP2002312, NT2RP2002503, NT2RP2002618, NT2RP2003228, NT2RP2003293, NT2RP2003295, NT2RP2003517, NT2RP2003564, NT2RP2003706, NT2RP2003737, NT2RP2003968, NT2RP2004013, NT2RP2004098, NT2RP2004187, NT2RP2004316, NT2RP2004523, NT2RP2004538, NT2RP2004933, NT2RP2005144, NT2RP2005288, NT2RP2005289, NT2RP2005325, NT2RP2005358, NT2RP2005531, NT2RP2005773, NT2RP2006219, NT2RP3000050, NT2RP3000080, NT2RP3000299, NT2RP3000397, NT2RP3000512, NT2RP3000527, NT2RP3001081, NT2RP3001216, NT2RP3001268, NT2RP3001355, NT2RP3001427, NT2RP3001428, NT2RP3001497, NT2RP3001554, NT2RP3001724, NT2RP3001764, NT2RP3001799, NT2RP3001855, NT2RP3002045, NT2RP3002151, NT2RP3002351, NT2RP3002352, NT2RP3002663, NT2RP3002818, NT2RP3002876, NT2RP3002909, NT2RP3002972, NT2RP3003061, NT2RP3003157, NT2RP3003242, NT2RP3003282, NT2RP3003672, NT2RP3004078, NT2RP3004209, NT2RP3004399, NT2RP3004424, NT2RP3004475, NT2RP3004480, NT2RP3004490, NT2RP3004527, NT2RP3004578, NT2RP4000049, NT2RP4000109, NT2RP4000185, NT2RP4000312, NT2RP4000367, NT2RP4000398, NT2RP4000457, NT2RP4000855, NT2RP4000879, NT2RP4000915, NT2RP4000928, NT2RP4001095, NT2RP4001150, NT2RP4001213, NT2RP4001483, NT2RP4001498, NT2RP4001753, NT2RP4001838, OVARC1000014, OVARC1000114, OVARC1000139,

[0492] OVARC1000241, OVARC1000440, OVARC1000543, OVARC1000722, OVARC1000771, OVARC1000834, OVARC1000850, OVARC1001113, OVARC1001244, OVARC1001296, OVARC1001357, OVARC1001372, OVARC1001417, OVARC1001496, OVARC1001506, OVARC1001577, OVARC1001668, OVARC1001713, OVARC1001809, OVARC1001880, OVARC1001901, OVARC1001949, OVARC1002050, PLACE1000133, PLACE1000142, PLACE1000184, PLACE1000383, PLACE1000406, PLACE1000420, PLACE1000583, PLACE1000588, PLACE1000706, PLACE1001384, PLACE1001387, PLACE1001517, PLACE1001602, PLACE1001634, PLACE1001771, PLACE1002046, PLACE1002437, PLACE1002474, PLACE1002665, PLACE1002834, PLACE1003302, PLACE1003493, PLACE1003704, PLACE1003888, PLACE1003903, PLACE1003968, PLACE1004197, PLACE1004358, PLACE1004471, PLACE1004681, PLACE1004751, PLACE1004773, PLACE1005101, PLACE1006040, PLACE1006119, PLACE1006170, PLACE1006187, PLACE1006288, PLACE1006414, PLACE1006438, PLACE1006962, PLACE1007239, PLACE1007257, PLACE1007488, PLACE1007511, PLACE1007737, PLACE1008000, PLACE1008402, PLACE1008643, PLACE1008696, PLACE1008941, PLACE1009027, PLACE1009200, PLACE1009230, PLACE1009298, PLACE1009319, PLACE1009444, PLACE1009524, PLACE1010083, PLACE1010089, PLACE1010599, PLACE1010833, PLACE1010856, PLACE1011054, PLACE1011057, PLACE1011165, PLACE1011229, PLACE1011263, PLACE1011371, PLACE2000072, PLACE2000399, PLACE2000438, PLACE2000458, PLACE3000004, PLACE3000242, PLACE3000352, PLACE3000353,

[0493] PLACE3000455, PLACE3000475, PLACE4000009, PLACE4000014, PLACE4000052, PLACE4000320, PLACE4000581,SKNMC1000050, THYRO1000026, THYRO1000173, THYRO1000186, THYRO1000320, THYRO1000327, THYRO1000387, THYRO1000471, THYRO1000934, THYRO1001458, THYRO1001595, THYRO1001605, THYRO1001617, THYRO1001671, Y79AA1000037, Y79AA1000469, Y79AA1000539, Y79AA1000560, Y79AA1000734, Y79AA1000985, Y79AA1001105, Y79AA1001391, Y79AA1001394, Y79AA1001548, Y79AA1001613, Y79AA1001874, Y79AA1002258, Y79AA1002416, Y79AA1002482,

[0494] (6) The following 301 clones were predicted to encode a protein in the category of enzyme or proteins associated with metabolism (including the clones belonging to plural categories).

[0495] HEMBA1000012, HEMBA1000459, HEMBA1000852, HEMBA1001059, HEMBA1001257, HEMBA1001620, HEMBA1001714, HEMBA1001744, HEMBA1001896, HEMBA1002003, HEMBA1002212, HEMBA1002257, HEMBA1002513, HEMBA1002973, HEMBA1003046, HEMBA1003136, HEMBA1003179, HEMBA1003286, HEMBA1003291, HEMBA1003538, HEMBA1003680, HEMBA1004227, HEMBA1004408, HEMBA1004734, HEMBA1004795, HEMBA1005513, HEMBA1005737, HEMBA1005815, HEMBA1006278, HEMBA1006347, HEMBA1006521, HEMBA1006648, HEMBA1006877, HEMBA1006941, HEMBA1006976, HEMBA1007121, HEMBA1007243, HEMBA1007300, HEMBB1000781, HEMBB1000915, HEMBB1001288, HEMBB1001429, HEMBB1001443, HEMBB1001915, HEMBB1002042, HEMBB1002342, HEMBB1002358, HEMBB1002635, HEMBB1002683, MAMMA1000020, MAMMA1000085, MAMMA1000672, MAMMA1000841, MAMMA1001008, MAMMA1001139, MAMMA1001476, MAMMA1001501, MAMMA1002268, MAMMA1002530, MAMMA1002619, MAMMA1002671, MAMMA1002938, NT2RM1000132, NT2RM1000153, NT2RM1000256, NT2RM1000280, NT2RM1000377, NT2RM1000648, NT2RM1000850, NT2RM1000867, NT2RM1000894, NT2RM1001072, NT2RM2000013, NT2RM2000124, NT2RM2000191, NT2RM2000368, NT2RM2000371, NT2RM2000577, NT2RM2000594, NT2RM2000599, NT2RM2000951, NT2RM2001238, NT2RM2001664, NT2RM2001700, NT2RM2001730, NT2RM2001785, NT2RM2001803, NT2RM2002030, NT2RM4000024, NT2RM4000155, NT2RM4000344, NT2RM4000496, NT2RM4000616, NT2RM4000712, NT2RM4000895, NT2RM4001313, NT2RM4001316, NT2RM4001340, NT2RM4001444, NT2RM4001758,

[0496] NT2RM4001819, NT2RM4001930, NT2RM4002062, NT2RM4002063, NT2RM4002409, NT2RM4002558, NT2RM4002571, NT2RM4002623, NT2RP1000018, NT2RP1000112, NT2RP1000376, NT2RP1000609, NT2RP1000833, NT2RP1000834, NT2RP1001079, NT2RP1001253, NT2RP1001361, NT2RP1001543, NT2RP2000056, NT2RP2000114, NT2RP2000183, NT2RP2000329, NT2RP2000422, NT2RP2000710, NT2RP2000764, NT2RP2000932, NT2RP2001070, NT2RP2001663, NT2RP2001839, NT2RP2001898, NT2RP2002256, NT2RP2002312, NT2RP2002442, NT2RP2002595, NT2RP2002618, NT2RP2002993, NT2RP2003230, NT2RP2003286, NT2RP2003506, NT2RP2003643, NT2RP2003706, NT2RP2003737, NT2RP2003781, NT2RP2003912, NT2RP2004232, NT2RP2004239, NT2RP2004768, NT2RP2004791, NT2RP2004799, NT2RP2005038, NT2RP2005276, NT2RP2005344, NT2RP2005457, NT2RP2005498, NT2RP2005531, NT2RP2005557, NT2RP2005690, NT2RP2005773, NT2RP2005775, NT2RP2005942, NT2RP2006571, NT2RP3000046, NT2RP3000085, NT2RP3000359, NT2RP3000418, NT2RP3000742, NT2RP3000845, NT2RP3000875, NT2RP3001274, NT2RP3001407, NT2RP3001495, NT2RP3002351, NT2RP3002402, NT2RP3002969, NT2RP3003301, NT2RP3003346, NT2RP3003500, NT2RP3003800, NT2RP3003825, NT2RP3003831, NT2RP3003914, NT2RP3004155, NT2RP3004209, NT2RP3004669, NT2RP3004670, NT2RP4000259, NT2RP4000417, NT2RP4000457, NT2RP4000724, NT2RP4000855, NT2RP4000928, NT2RP4000997, NT2RP4001041, NT2RP4001079, NT2RP4001095, NT2RP4001219, NT2RP4001345, NT2RP4001375, NT2RP4001483, NT2RP4001592,

[0497] NT2RP4001644, NT2RP4001893, NT2RP4001946, NT2RP4002408, NT2RP5003500, NT2RP5003522, OVARC1000060, OVARC1000139, OVARC1000309, OVARC1000543, OVARC1000682, OVARC1000722, OVARC1000885, OVARC1001261, OVARC1001610, OVARC1001713, OVARC1001762, OVARC1001809, OVARC1001942, PLACE1000007, PLACE1000142, PLACE1000420, PLACE1000547, PLACE1000653, PLACE1001062, PLACE1001603, PLACE1001692, PLACE1001817, PLACE1001989, PLACE1002991, PLACE1003100, PLACE1003709, PLACE1003885, PLACE1003888, PLACE1003903, PLACE1003915, PLACE1003968, PLACE1004428, PLACE1004437, PLACE1004751, PLACE1005305, PLACE1005477, PLACE1005656, PLACE1005763, PLACE1005804, PLACE1006011, PLACE1006469, PLACE1006731, PLACE1007729, PLACE1007958, PLACE1008275, PLACE1008356, PLACE1008696, PLACE1009444, PLACE1009861, PLACE1009997, PLACE1010089, PLACE1010096, PLACE1010106, PLACE1010152, PLACE1010481, PLACE1011046, PLACE1011203, PLACE1011219, PLACE1011229, PLACE1011332, PLACE1011923, PLACE2000021, PLACE2000140, PLACE2000404, PLACE2000411, PLACE3000020, PLACE3000148, PLACE3000156, PLACE3000350, PLACE3000353, PLACE4000259, PLACE4000431, PLACE4000558, PLACE4000590,SKNMC1000050, THYRO1000017, THYRO1000197, THYRO1000320, THYRO1000358, THYRO1000471, THYRO1000926, THYRO1000934, THYRO1000951, THYRO1001406, THYRO1001617, THYRO1001671, Y79AA1001048, Y79AA1001233, Y79AA1001581, Y79AA1001679, Y79AA1001827, Y79AA1002027, Y79AA1002209, Y79AA1002361, Y79AA1002416,

[0498] (7) The following 74 clones were predicted to encode a protein in the category of proteins associated with cell division or cell proliferation (including the clones belonging to plural categories).

[0499] HEMBA1001019, HEMBA1001595, HEMBA1002229, HEMBA1002363, HEMBA1003136, HEMBA1003836, HEMBA1004131, HEMBA1005241, HEMBB1000399, HEMBB1001175, HEMBB1001242, MAMMA1001820, MAMMA1003011, NT2RM1000394, NT2RM2001256, NT2RM4000215, NT2RM4001611, NT2RM4001714, NT2RP1000733, NT2RP1001177, NT2RP2000077, NT2RP2000346, NT2RP2001397, NT2RP2003912, NT2RP2005520, NT2RP2005675, NT2RP2005767, NT2RP2005857, NT2RP2006464, NT2RP3000031, NT2RP3001155, NT2RP3001730, NT2RP3002151, NT2RP3002273, NT2RP3002399, NT2RP3004507, NT2RP3004578, NT2RP3004594, NT2RP4000210, NT2RP4000498, NT2RP4001207, NT2RP4001414, NT2RP4001551, OVARC1000006, OVARC1000087, OVARC1000113, OVARC1000846, OVARC1000876, OVARC1001068, OVARC1001107, OVARC1001113, OVARC1002112, PLACE1000547, PLACE1001611, PLACE1001691, PLACE1002775, PLACE1002811, PLACE1003709, PLACE1004316, PLACE1004674, PLACE1004814, PLACE1005287, PLACE1006187, PLACE1006368, PLACE1008808, PLACE1008947, PLACE1009060, PLACE1010720, PLACE1010761, PLACE1010833, PLACE1011056, PLACE3000244, Y79AA1000214, Y79AA1001236,

[0500] (8) The following 92 clones were predicted to encode a protein in the category of proteins associated with cytoskeleton (including the clones belonging to plural categories).

[0501] HEMBA1000020, HEMBA1000588, HEMBA1001804, HEMBA1002102, HEMBA1002161, HEMBA1002939, HEMBA1003235, HEMBA1003581, HEMBA1004534, HEMBA1005009, HEMBA1005595, HEMBA1006272, HEMBA1006737, HEMBA1007018, HEMBB1000404, HEMBB1001282, MAMMA1000173, MAMMA1000429, MAMMA1001041, MAMMA1001576, MAMMA1001735, MAMMA1002622, MAMMA1002637, MAMMA1003099, MAMMA1003127, NT2RM1000898, NT2RM1001003, NT2RM1001139, NT2RM2000691, NT2RM4000030, NT2RM4000167, NT2RM4000689, NT2RM4001741, NT2RM4001776, NT2RM4002109, NT2RP1000348, NT2RP1000460, NT2RP1000478, NT2RP1001033, NT2RP2000812, NT2RP2001634, NT2RP2001900, NT2RP2002727, NT2RP2003307, NT2RP2003604, NT2RP2004538, NT2RP2005531, NT2RP3000868, NT2RP3001216, NT2RP3001272, NT2RP3002688, NT2RP3003061, NT2RP3003138, NT2RP3003230, NT2RP3003282, NT2RP3004454, NT2RP3004569, NT2RP4001126, NT2RP4001927, OVARC1000437, OVARC1000520, OVARC1000679, OVARC1001731, OVARC1002050, PLACE1002571, PLACE1002591, PLACE1002655, PLACE1003669, PLACE1004777, PLACE1005287, PLACE1006368, PLACE1007105, PLACE1010310, PLACE1010743, PLACE1010960, PLACE1011263, PLACE2000039, PLACE2000216, PLACE2000274, PLACE3000145, PLACE3000322, PLACE4000009, PLACE4000612, THYRO1000072, THYRO1000666, THYRO1001121, THYRO1001458, Y79AA1000368, Y79AA1000833, Y79AA1000962, Y79AA1000985, Y79AA1002208,

[0502] (9) The following 280 clones were predicted to encode a protein in the category of proteins associated with RNA synthesis (including the clones belonging to plural categories).

[0503] HEMBA1000201, HEMBA1000216, HEMBA1000488, HEMBA1000561, HEMBA1000591, HEMBA1000851, HEMBA1001137, HEMBA1001510, HEMBA1001579, HEMBA1001800, HEMBA1001809, HEMBA1001819, HEMBA1001847, HEMBA1002035, HEMBA1002092, HEMBA1002569, HEMBA1002609, HEMBA1003418, HEMBA1003545, HEMBA1003568, HEMBA1003684, HEMBA1003760, HEMBA1003953, HEMBA1004097, HEMBA1004321, HEMBA1004353, HEMBA1004479, HEMBA1004669, HEMBA1004758, HEMBA1005359, HEMBA1005528, HEMBA1005548, HEMBA1005931, HEMBA1006253, HEMBA1006278, HEMBA1006359, HEMBA1006559, HEMBA1006639, HEMBB1000250, HEMBB1000789, HEMBB1001011, HEMBB1001314, HEMBB1001482, HEMBB1001908, HEMBB1002134, HEMBB1002217, MAMMA1000155, MAMMA1000183, MAMMA1000388, MAMMA1001059, MAMMA1001633, MAMMA1001820, MAMMA1001837, MAMMA1002650, MAMMA1002937, NT2RM1000055, NT2RM1000187, NT2RM1000666, NT2RM1000691, NT2RM1000852, NT2RM1000894, NT2RM1001092, NT2RM2000013, NT2RM2000735, NT2RM2001035, NT2RM2001424, NT2RM2001575, NT2RM2001605, NT2RM2001670, NT2RM2001771, NT2RM2001797, NT2RM2001989, NT2RM2002100, NT2RM2002580, NT2RM4000024, NT2RM4000104, NT2RM4000191, NT2RM4000421, NT2RM4000471, NT2RM4000496, NT2RM4000531, NT2RM4000734, NT2RM4000751, NT2RM4000996, NT2RM4001140, NT2RM4001200, NT2RM4001483, NT2RM4001592, NT2RM4001746, NT2RM4001783, NT2RM4001823, NT2RM4001828, NT2RM4001858, NT2RM4001979, NT2RM4002093, NT2RM4002479, NT2RP1000111, NT2RP1000272, NT2RP1000333, NT2RP1000470,

[0504] NT2RP1000574, NT2RP1000721, NT2RP1000860, NT2RP1001080, NT2RP2000008, NT2RP2000133, NT2RP2000161, NT2RP2000297, NT2RP2000931, NT2RP2001174, NT2RP2001233, NT2RP2001449, NT2RP2002099, NT2RP2002252, NT2RP2002503, NT2RP2002591, NT2RP2002928, NT2RP2003125, NT2RP2003228, NT2RP2003293, NT2RP2003564, NT2RP2003714, NT2RP2004013, NT2RP2004187, NT2RP2004568, NT2RP2004961, NT2RP2005003, NT2RP2005037, NT2RP2005126, NT2RP2005168, NT2RP2005239, NT2RP2005287, NT2RP2005496, NT2RP2005539, NT2RP2005722, NT2RP2005763, NT2RP2005942, NT2RP2006238, NT2RP2006464, NT2RP3000050, NT2RP3000361, NT2RP3000397, NT2RP3000512, NT2RP3000527, NT2RP3000590, NT2RP3000632, NT2RP3000917, NT2RP3001057, NT2RP3001120, NT2RP3001155, NT2RP3001268, NT2RP3001398, NT2RP3001399, NT2RP3001671, NT2RP3001672, NT2RP3001688, NT2RP3001712, NT2RP3001792, NT2RP3001855, NT2RP3002165, NT2RP3002377, NT2RP3002399, NT2RP3003157, NT2RP3003193, NT2RP3003251, NT2RP3003327, NT2RP3004013, NT2RP3004258, NT2RP3004504, NT2RP3004566, NT2RP3004572, NT2RP3004594, NT2RP3004617, NT2RP4000078, NT2RP4000111, NT2RP4000210, NT2RP4000398, NT2RP4000449, NT2RP4000518, NT2RP4000614, NT2RP4000787, NT2RP4000865, NT2RP4000997, NT2RP4001029, NT2RP4001080, NT2RP4001148, NT2RP4001213, NT2RP4001433, NT2RP4001529, NT2RP4001551, NT2RP4001638, NT2RP4001753, NT2RP4001790, NT2RP4001938, NT2RP4002078, OVARC1000479, OVARC1000846, OVARC1001381, OVARC1001555, OVARC1001577,

[0505] OVARC1001949, PLACE1000066, PLACE1000133, PLACE1000583, PLACE1000596, PLACE1000706, PLACE1001118, PLACE1001238, PLACE1001304, PLACE1001602, PLACE1001632, PLACE1002450, PLACE1002532, PLACE1002834, PLACE1003190, PLACE1003302, PLACE1003605, PLACE1003704, PLACE1003738, PLACE1003885, PLACE1004471, PLACE1004510, PLACE1004564, PLACE1004681, PLACE1004902, PLACE1005646, PLACE1005876, PLACE1006196, PLACE1006414, PLACE1006438, PLACE1006482, PLACE1007239, PLACE1007346, PLACE1007544, PLACE1007598, PLACE1007955, PLACE1007969, PLACE1008627, PLACE1008941, PLACE1009099, PLACE1009246, PLACE1009398, PLACE1010053, PLACE1010194, PLACE1010261, PLACE1010491, PLACE1010580, PLACE1010702, PLACE1010771, PLACE1010870, PLACE1011576, PLACE2000072, PLACE2000359, PLACE4000128, PLACE4000156, PLACE4000259, PLACE4000431, THYRO1000121, THYRO1000242, THYRO1000501, THYRO1000585, THYRO1001100, THYRO1001189, Y79AA1000037, Y79AA1000349, Y79AA1000539, Y79AA1000627, Y79AA1000705, Y79AA1000752, Y79AA1001105, Y79AA1001299,Y79AA1001391, Y79AA1001533, Y79AA1001613, Y79AA1001848, Y79AA1001866, Y79AA1001963, Y79AA1002093, Y79AA1002472, Y79AA1002482,

[0506] (10) The following 352 clones were predicted to encode a protein in the category of nuclear protein (including the clones belonging to plural categories).

[0507] HEMBA1000005, HEMBA1000201, HEMBA1000216, HEMBA1000488, HEMBA1000561, HEMBA1000827, HEMBA1000851, HEMBA1001088, HEMBA1001137, HEMBA1001476, HEMBA1001510, HEMBA1001579, HEMBA1001800, HEMBA1001809, HEMBA1001819, HEMBA1001847, HEMBA1002035, HEMBA1002092, HEMBA1002363, HEMBA1002495, HEMBA1002569, HEMBA1002609, HEMBA1002999, HEMBA1003148, HEMBA1003418, HEMBA1003545, HEMBA1003568, HEMBA1003684, HEMBA1003760, HEMBA1003783, HEMBA1003953, HEMBA1004097, HEMBA1004321, HEMBA1004353, HEMBA1004479, HEMBA1004669, HEMBA1004758, HEMBA1005359, HEMBA1005475, HEMBA1005528, HEMBA1005548, HEMBA1005931, HEMBA1006253, HEMBA1006278, HEMBA1006359, HEMBA1006474, HEMBA1006559, HEMBA1006914, HEMBB1000250, HEMBB1000399, HEMBB1000789, HEMBB1001011, HEMBB1001314, HEMBB1001482, HEMBB1001908, HEMBB1001915, HEMBB1002134, HEMBB1002217, MAMMA1000155, MAMMA1000183, MAMMA1000388, MAMMA1000731, MAMMA1001633, MAMMA1001820, MAMMA1001837, MAMMA1002650, MAMMA1002869, MAMMA1002937, MAMMA1003011, NT2RM1000055, NT2RM1000187, NT2RM1000257, NT2RM1000394, NT2RM1000666, NT2RM1000691, NT2RM1000852, NT2RM1000894, NT2RM1001092, NT2RM2000013, NT2RM2000735, NT2RM2001035, NT2RM2001575, NT2RM2001605, NT2RM2001635, NT2RM2001670, NT2RM2001771, NT2RM2001797, NT2RM2001823, NT2RM2001936, NT2RM2001989, NT2RM2002100, NT2RM2002580, NT2RM4000024, NT2RM4000085, NT2RM4000104, NT2RM4000191, NT2RM4000215, NT2RM4000290, NT2RM4000421, NT2RM4000496,

[0508] NT2RM4000531, NT2RM4000734, NT2RM4000751, NT2RM4000996, NT2RM4001140, NT2RM4001200, NT2RM4001217, NT2RM4001382, NT2RM4001483, NT2RM4001592, NT2RM4001605, NT2RM4001611, NT2RM4001746, NT2RM4001783, NT2RM4001823, NT2RM4001828, NT2RM4001858, NT2RM4001979, NT2RM4002093, NT2RM4002146, NT2RM4002527, NT2RP1000035, NT2RP1000111, NT2RP1000333, NT2RP1000493, NT2RP1000574, NT2RP1000721, NT2RP1000860, NT2RP1000966, NT2RP1001177, NT2RP2000008, NT2RP2000126, NT2RP2000133, NT2RP2000161, NT2RP2000297, NT2RP2000414, NT2RP2000931, NT2RP2001174, NT2RP2001233, NT2RP2001420, NT2RP2001449, NT2RP2001536, NT2RP2001762, NT2RP2002185, NT2RP2002252, NT2RP2002259, NT2RP2002503, NT2RP2002504, NT2RP2002591, NT2RP2002993, NT2RP2003125, NT2RP2003228, NT2RP2003277, NT2RP2003286, NT2RP2003293, NT2RP2003308, NT2RP2003564, NT2RP2003714, NT2RP2004013, NT2RP2004187, NT2RP2004961, NT2RP2005003, NT2RP2005037, NT2RP2005287, NT2RP2005496, NT2RP2005520, NT2RP2005539, NT2RP2005722, NT2RP2005767, NT2RP2005857, NT2RP2005942, NT2RP2006238, NT2RP2006464, NT2RP3000031, NT2RP3000050, NT2RP3000361, NT2RP3000397, NT2RP3000512, NT2RP3000527, NT2RP3000590, NT2RP3000603, NT2RP3000632, NT2RP3000917, NT2RP3001057, NT2RP3001120, NT2RP3001155, NT2RP3001268, NT2RP3001274, NT2RP3001398, NT2RP3001399, NT2RP3001427, NT2RP3001428, NT2RP3001587, NT2RP3001671, NT2RP3001672, NT2RP3001688, NT2RP3001712, NT2RP3001724, NT2RP3001792, NT2RP3001855,

[0509] NT2RP3002056, NT2RP3002165, NT2RP3002377, NT2RP3002399, NT2RP3003157, NT2RP3003193, NT2RP3003212, NT2RP3003251, NT2RP3003327, NT2RP3004206, NT2RP3004209, NT2RP3004258, NT2RP3004566, NT2RP3004572, NT2RP3004594, NT2RP3004617, NT2RP4000078, NT2RP4000111, NT2RP4000150, NT2RP4000210, NT2RP4000398, NT2RP4000449, NT2RP4000457, NT2RP4000518, NT2RP4000787, NT2RP4000865, NT2RP4000997, NT2RP4001029, NT2RP4001080, NT2RP4001148, NT2RP4001207, NT2RP4001213, NT2RP4001433, NT2RP4001529, NT2RP4001551, NT2RP4001638, NT2RP4001753, NT2RP4001790, NT2RP4001938, NT2RP4002078, OVARC1000006, OVARC1000087, OVARC1000139, OVARC1000326, OVARC1000440, OVARC1000479, OVARC1000846, OVARC1000883, OVARC1001180, OVARC1001244, OVARC1001381, OVARC1001555, OVARC1001577, OVARC1001702, OVARC1001949, OVARC1002112, PLACE1000066, PLACE1000133, PLACE1000406, PLACE1000583, PLACE1000596, PLACE1000706, PLACE1001118, PLACE1001238, PLACE1001304, PLACE1001602, PLACE1001611, PLACE1001632, PLACE1002450, PLACE1002532, PLACE1002834, PLACE1003100, PLACE1003190, PLACE1003302, PLACE1003605, PLACE1003704, PLACE1003738, PLACE1003885, PLACE1004471, PLACE1004510, PLACE1004564, PLACE1004681, PLACE1004902, PLACE1005287, PLACE1005876, PLACE1006011, PLACE1006119, PLACE1006414, PLACE1006438, PLACE1006482, PLACE1007239, PLACE1007346, PLACE1007544, PLACE1007598, PLACE1007955, PLACE1007969, PLACE1008044, PLACE1008177, PLACE1008603, PLACE1008627,

[0510] PLACE1008941, PLACE1008947, PLACE1009099, PLACE1009113, PLACE1009246, PLACE1009398, PLACE1010152, PLACE1010194, PLACE1010261, PLACE1010491, PLACE1010702, PLACE1010720, PLACE1010771, PLACE1010870, PLACE1011056, PLACE1011229, PLACE1011576, PLACE1011664, PLACE2000072, PLACE2000359, PLACE2000411, PLACE4000014, PLACE4000128, PLACE4000156, PLACE4000259, PLACE4000261, PLACE4000431, THYRO1000121, THYRO1000242, THYRO1000501, THYRO1000585, THYRO1001100, THYRO1001189, Y79AA1000037, Y79AA1000214, Y79AA1000539, Y79AA1000589, Y79AA1000627, Y79AA1000705, Y79AA1000752, Y79AA1000784, Y79AA1001105, Y79AA1001299, Y79AA1001391, Y79AA1001533, Y79AA1001613, Y79AA1001848, Y79AA1001866, Y79AA1001963, Y79AA1002093, Y79AA1002472, Y79AA1002482,

[0511] (11) The following 111 clones were predicted to encode a protein in the category of proteins associated with protein synthesis or transport (including the clones belonging to plural categories).

[0512] HEMBA1000012, HEMBA1000542, HEMBA1001913, HEMBA1003773, HEMBA1004202, HEMBA1004356, HEMBA1004847, HEMBA1005047, HEMBA1005202, HEMBA1005963, HEMBA1006310, HEMBA1006652, HEMBA1006914, HEMBB1000217, HEMBB1000725, HEMBB1001346, HEMBB1001831, MAMMA1000085, MAMMA1000734, MAMMA1002170, MAMMA1002236, MAMMA1002598, NT2RM1000661, NT2RM2000504, NT2RM2000577, NT2RM2001131, NT2RM4000155, NT2RM4001444, NT2RM4002062, NT2RM4002205, NT2RM4002623, NT2RP1000326, NT2RP1000947, NT2RP1001569, NT2RP2000710, NT2RP2000880, NT2RP2001290, NT2RP2001511, NT2RP2001660, NT2RP2002185, NT2RP2002606, NT2RP2002959, NT2RP2002980, NT2RP2003158, NT2RP2003760, NT2RP2004194, NT2RP2004791, NT2RP2005012, NT2RP2005116, NT2RP2005204, NT2RP2006565, NT2RP2006598, NT2RP3000047, NT2RP3000366, NT2RP3000759, NT2RP3000968, NT2RP3001587, NT2RP3002529, NT2RP3003385, NT2RP3003589, NT2RP3003876, NT2RP3004618, NT2RP4000370, NT2RP4000524, NT2RP4000528, NT2RP4001041, NT2RP4001574, NT2RP4001592, NT2RP4002047, OVARC1000004, OVARC1000771, OVARC1000862, OVARC1001180, OVARC1001342, OVARC1001766, OVARC1002138, PLACE1000061, PLACE1000492, PLACE1000863, PLACE1001748, PLACE1002090, PLACE1003394, PLACE1003915, PLACE1004149, PLACE1004743, PLACE1005557, PLACE1005813, PLACE1006488, PLACE1006531, PLACE1006615, PLACE1007706, PLACE1008273, PLACE1008790, PLACE1008813, PLACE1009721, PLACE1009763, PLACE1009845, PLACE1010074, PLACE1011109, PLACE1011477,

PLACE2000404, PLACE3000059, PLACE3000121, PLACE4000558, PLACE4000654,SKNMC1000011, THYRO1000288, THYRO1000974, Y79AA1000346, Y79AA1000968, Y79AA1002209,

[0513] (12) The following 23 clones were predicted to encode a protein in the category of proteins associated with cellular defense (including the clones belonging to plural categories).

[0514] HEMBA1000005, HEMBA1000531, HEMBB1000217, HEMBB1000399, MAMMA1000734, NT2RP1000493, NT2RP1000493, NT2RP2000006, NT2RP2000045, NT2RP2001536, NT2RP2005204, NT2RP3000590, NT2RP3001426, NT2RP3002056, NT2RP3004262, NT2RP4001638, OVARC1001900, PLACE1005611, PLACE1006958, PLACE1008275, PLACE1009113, PLACE4000014, Y79AA1002139,

[0515] (13) The following 23 clones were predicted to encode a protein in the category of proteins associated with development or growth (including the clones belonging to plural categories).

[0516] HEMBB1001802, HEMBB1002442, NT2RM2002142, NT2RM4001047, NT2RP2003308, NT2RP2004816, NT2RP3000994, NT2RP3001340, NT2RP3004206, NT2RP3004472, NT2RP4000246, NT2RP4001006, OVARC1000304, OVARC1000746, OVARC1000996, PLACE1006037, PLACE1009622, PLACE1011664, Y79AA1001692,

TABLE 9
Selected clones having the maximal ATGpr1 score of 0.3 or
higher (3690 clones).

| | | maximal |
|---|---|---|
| clone | name of | ATGpr1 |
| name | sequence | score |
| HEMBA1000005 | F-HEMBA1000005 | 0.84 |
| HEMBA1000012 | F-HEMBA1000012 | 0.56 |
| HEMBA1000020 | F-HEMBA1000020 | 0.94 |
| HEMBA1000030 | F-HEMBA1000030 | 0.44 |
| HEMBA1000046 | F-HEMBA1000046 | 0.50 |
| HEMBA1000050 | F-HEMBA1000050 | 0.94 |
| HEMBA1000076 | F-HEMBA1000076 | 0.48 |
| HEMBA1000129 | F-HEMBA1000129 | 0.74 |
| HEMBA1000141 | F-HEMBA1000141 | 0.55 |
| HEMBA1000150 | F-HEMBA1000150 | 0.72 |
| HEMBA1000156 | F-HEMBA1000156 | 0.94 |
| HEMBA1000158 | F-HEMBA1000158 | 0.62 |
| HEMBA1000168 | F-HEMBA1000168 | 0.94 |
| HEMBA1000185 | F-HEMBA1000185 | 0.86 |
| HEMBA1000193 | F-HEMBA1000193 | 0.94 |
| HEMBA1000201 | F-HEMBA1000201 | 0.83 |
| HEMBA1000216 | F-HEMBA1000216 | 0.32 |
| HEMBA1000227 | F-HEMBA1000227 | 0.72 |
| HEMBA1000231 | F-HEMBA1000231 | 0.34 |
| HEMBA1000244 | F-HEMBA1000244 | 0.51 |
| HEMBA1000288 | F-HEMBA1000288 | 0.36 |
| HEMBA1000290 | F-HEMBA1000290 | 0.45 |
| HEMBA1000302 | F-HEMBA1000302 | 0.71 |
| HEMBA1000303 | F-HEMBA1000303 | 0.42 |
| HEMBA1000304 | F-HEMBA1000304 | 0.45 |
| HEMBA1000307 | F-HEMBA1000307 | 0.48 |
| HEMBA1000327 | F-HEMBA1000327 | 0.94 |
| HEMBA1000356 | F-HEMBA1000356 | 0.90 |
| HEMBA1000369 | F-HEMBA1000369 | 0.94 |
| HEMBA1000387 | F-HEMBA1000387 | 0.66 |
| HEMBA1000392 | F-HEMBA1000392 | 0.60 |
| HEMBA1000396 | F-HEMBA1000396 | 0.81 |
| HEMBA1000456 | F-HEMBA1000456 | 0.90 |
| HEMBA1000460 | F-HEMBA1000460 | 0.31 |
| HEMBA1000488 | F-HEMBA1000488 | 0.47 |
| HEMBA1000490 | F-HEMBA1000490 | 0.89 |
| HEMBA1000491 | F-HEMBA1000491 | 0.94 |
| HEMBA1000501 | F-HEMBA1000501 | 0.67 |
| HEMBA1000505 | F-HEMBA1000505 | 0.65 |
| HEMBA1000508 | F-HEMBA1000508 | 0.39 |
| HEMBA1000520 | F-HEMBA1000520 | 0.94 |
| HEMBA1000523 | F-HEMBA1000523 | 0.86 |
| HEMBA1000531 | F-HEMBA1000531 | 0.49 |
| HEMBA1000534 | F-HEMBA1000534 | 0.52 |
| HEMBA1000542 | F-HEMBA1000542 | 0.81 |
| HEMBA1000555 | F-HEMBA1000555 | 0.67 |
| HEMBA1000561 | F-HEMBA1000561 | 0.34 |
| HEMBA1000568 | F-HEMBA1000568 | 0.66 |
| HEMBA1000588 | F-HEMBA1000588 | 0.79 |
| HEMBA1000591 | F-HEMBA1000591 | 0.92 |
| HEMBA1000592 | F-HEMBA1000592 | 0.73 |
| HEMBA1000594 | F-HEMBA1000594 | 0.89 |
| HEMBA1000608 | F-HEMBA1000608 | 0.94 |
| HEMBA1000636 | F-HEMBA1000636 | 0.94 |
| HEMBA1000637 | F-HEMBA1000637 | 0.92 |
| HEMBA1000657 | F-HEMBA1000657 | 0.85 |
| HEMBA1000682 | F-HEMBA1000682 | 0.94 |
| HEMBA1000686 | F-HEMBA1000686 | 0.90 |
| HEMBA1000719 | F-HEMBA1000719 | 0.94 |
| HEMBA1000727 | F-HEMBA1000727 | 0.40 |
| HEMBA1000752 | F-HEMBA1000752 | 0.31 |
| HEMBA1000817 | F-HEMBA1000817 | 0.94 |
| HEMBA1000851 | F-HEMBA1000851 | 0.63 |
| HEMBA1000867 | F-HEMBA1000867 | 0.68 |
| HEMBA1000869 | F-HEMBA1000869 | 0.82 |
| HEMBA1000872 | F-HEMBA1000872 | 0.54 |
| HEMBA1000910 | F-HEMBA1000910 | 0.91 |
| HEMBA1000918 | F-HEMBA1000918 | 0.38 |
| HEMBA1000919 | F-HEMBA1000919 | 0.83 |
| HEMBA1000942 | F-HEMBA1000942 | 0.31 |
| HEMBA1000946 | F-HEMBA1000946 | 0.75 |
| HEMBA1000968 | F-HEMBA1000968 | 0.39 |
| HEMBA1000971 | F-HEMBA1000971 | 0.74 |
| HEMBA1000975 | F-HEMBA1000975 | 0.46 |
| HEMBA1000986 | F-HEMBA1000986 | 0.89 |
| HEMBA1001008 | F-HEMBA1001008 | 0.47 |
| HEMBA1001009 | F-HEMBA1001009 | 0.86 |
| HEMBA1001022 | F-HEMBA1001022 | 0.57 |
| HEMBA1001043 | F-HEMBA1001043 | 0.79 |
| HEMBA1001052 | F-HEMBA1001052 | 0.83 |
| HEMBA1001059 | F-HEMBA1001059 | 0.78 |
| HEMBA1001080 | F-HEMBA1001080 | 0.77 |
| HEMBA1001085 | F-HEMBA1001085 | 0.92 |
| HEMBA1001088 | F-HEMBA1001088 | 0.94 |
| HEMBA1001109 | F-HEMBA1001109 | 0.50 |
| HEMBA1001122 | F-HEMBA1001122 | 0.74 |
| HEMBA1001133 | F-HEMBA1001133 | 0.45 |
| HEMBA1001137 | F-HEMBA1001137 | 0.37 |
| HEMBA1001140 | F-HEMBA1001140 | 0.43 |
| HEMBA1001174 | F-HEMBA1001174 | 0.44 |
| HEMBA1001197 | F-HEMBA1001197 | 0.65 |
| HEMBA1001213 | F-HEMBA1001213 | 0.61 |
| HEMBA1001235 | F-HEMBA1001235 | 0.94 |
| HEMBA1001247 | F-HEMBA1001247 | 0.31 |
| HEMBA1001257 | F-HEMBA1001257 | 0.92 |
| HEMBA1001281 | F-HEMBA1001281 | 0.94 |
| HEMBA1001286 | F-HEMBA1001286 | 0.49 |
| HEMBA1001289 | F-HEMBA1001289 | 0.94 |
| HEMBA1001302 | F-HEMBA1001302 | 0.62 |
| HEMBA1001303 | F-HEMBA1001303 | 0.79 |
| HEMBA1001310 | F-HEMBA1001310 | 0.66 |
| HEMBA1001326 | F-HEMBA1001326 | 0.59 |
| HEMBA1001351 | F-HEMBA1001351 | 0.65 |
| HEMBA1001361 | F-HEMBA1001361 | 0.94 |
| HEMBA1001377 | F-HEMBA1001377 | 0.87 |
| HEMBA1001387 | F-HEMBA1001387 | 0.94 |
| HEMBA1001388 | F-HEMBA1001388 | 0.57 |
| HEMBA1001398 | F-HEMBA1001398 | 0.74 |
| HEMBA1001405 | F-HEMBA1001405 | 0.61 |
| HEMBA1001407 | F-HEMBA1001407 | 0.43 |
| HEMBA1001413 | F-HEMBA1001413 | 0.40 |
| HEMBA1001415 | F-HEMBA1001415 | 0.94 |
| HEMBA1001446 | F-HEMBA1001446 | 0.90 |
| HEMBA1001450 | F-HEMBA1001450 | 0.40 |
| HEMBA1001455 | F-HEMBA1001455 | 0.73 |
| HEMBA1001476 | F-HEMBA1001476 | 0.65 |
| HEMBA1001497 | F-HEMBA1001497 | 0.48 |
| HEMBA1001510 | F-HEMBA1001510 | 0.36 |
| HEMBA1001526 | F-HEMBA1001526 | 0.66 |
| HEMBA1001533 | F-HEMBA1001533 | 0.46 |
| HEMBA1001569 | F-HEMBA1001569 | 0.73 |
| HEMBA1001570 | F-HEMBA1001570 | 0.53 |
| HEMBA1001579 | F-HEMBA1001579 | 0.82 |
| HEMBA1001581 | F-HEMBA1001581 | 0.80 |
| HEMBA1001595 | F-HEMBA1001595 | 0.72 |
| HEMBA1001620 | F-HEMBA1001620 | 0.94 |
| HEMBA1001635 | F-HEMBA1001635 | 0.87 |
| HEMBA1001640 | F-HEMBA1001640 | 0.82 |
| HEMBA1001647 | F-HEMBA1001647 | 0.91 |
| HEMBA1001655 | F-HEMBA1001655 | 0.39 |
| HEMBA1001661 | F-HEMBA1001661 | 0.86 |
| HEMBA1001672 | F-HEMBA1001672 | 0.94 |
| HEMBA1001702 | F-HEMBA1001702 | 0.72 |
| HEMBA1001711 | F-HEMBA1001711 | 0.74 |
| HEMBA1001714 | F-HEMBA1001714 | 0.89 |
| HEMBA1001723 | F-HEMBA1001723 | 0.94 |
| HEMBA1001731 | F-HEMBA1001731 | 0.37 |
| HEMBA1001744 | F-HEMBA1001744 | 0.31 |
| HEMBA1001746 | F-HEMBA1001746 | 0.39 |
| HEMBA1001781 | F-HEMBA1001781 | 0.67 |
| HEMBA1001800 | F-HEMBA1001800 | 0.69 |
| HEMBA1001804 | F-HEMBA1001804 | 0.85 |
| HEMBA1001809 | F-HEMBA1001809 | 0.78 |
| HEMBA1001815 | F-HEMBA1001815 | 0.49 |
| HEMBA1001819 | F-HEMBA1001819 | 0.90 |
| HEMBA1001822 | F-HEMBA1001822 | 0.80 |
| HEMBA1001824 | F-HEMBA1001824 | 0.68 |
| HEMBA1001847 | F-HEMBA1001847 | 0.46 |
| HEMBA1001864 | F-HEMBA1001864 | 0.34 |
| HEMBA1001866 | F-HEMBA1001866 | 0.53 |
| HEMBA1001869 | F-HEMBA1001869 | 0.69 |
| HEMBA1001896 | F-HEMBA1001896 | 0.48 |
| HEMBA1001910 | F-HEMBA1001910 | 0.84 |
| HEMBA1001912 | F-HEMBA1001912 | 0.48 |
| HEMBA1001913 | F-HEMBA1001913 | 0.94 |
| HEMBA1001915 | F-HEMBA1001915 | 0.41 |
| HEMBA1001921 | F-HEMBA1001921 | 0.94 |
| HEMBA1001939 | F-HEMBA1001939 | 0.87 |
| HEMBA1001950 | F-HEMBA1001950 | 0.36 |
| HEMBA1001967 | F-HEMBA1001967 | 0.94 |
| HEMBA1001987 | F-HEMBA1001987 | 0.41 |
| HEMBA1002018 | F-HEMBA1002018 | 0.41 |
| HEMBA1002035 | F-HEMBA1002035 | 0.36 |
| HEMBA1002049 | F-HEMBA1002049 | 0.39 |
| HEMBA1002084 | F-HEMBA1002084 | 0.45 |
| HEMBA1002092 | F-HEMBA1002092 | 0.94 |
| HEMBA1002102 | F-HEMBA1002102 | 0.94 |
| HEMBA1002119 | F-HEMBA1002119 | 0.60 |
| HEMBA1002125 | F-HEMBA1002125 | 0.88 |
| HEMBA1002150 | F-HEMBA1002150 | 0.31 |
| HEMBA1002151 | F-HEMBA1002151 | 0.82 |
| HEMBA1002161 | F-HEMBA1002161 | 0.94 |
| HEMBA1002177 | F-HEMBA1002177 | 0.38 |
| HEMBA1002189 | F-HEMBA1002189 | 0.43 |
| HEMBA1002191 | F-HEMBA1002191 | 0.94 |
| HEMBA1002199 | F-HEMBA1002199 | 0.85 |
| HEMBA1002212 | F-HEMBA1002212 | 0.39 |
| HEMBA1002215 | F-HEMBA1002215 | 0.94 |
| HEMBA1002229 | F-HEMBA1002229 | 0.83 |
| HEMBA1002237 | F-HEMBA1002237 | 0.86 |
| HEMBA1002241 | F-HEMBA1002241 | 0.66 |
| HEMBA1002265 | F-HEMBA1002265 | 0.38 |
| HEMBA1002267 | F-HEMBA1002267 | 0.33 |
| HEMBA1002341 | F-HEMBA1002341 | 0.53 |
| HEMBA1002363 | F-HEMBA1002363 | 0.88 |
| HEMBA1002417 | F-HEMBA1002417 | 0.83 |
| HEMBA1002419 | F-HEMBA1002419 | 0.92 |
| HEMBA1002430 | F-HEMBA1002430 | 0.45 |
| HEMBA1002439 | F-HEMBA1002439 | 0.83 |
| HEMBA1002458 | F-HEMBA1002458 | 0.47 |
| HEMBA1002460 | F-HEMBA1002460 | 0.48 |
| HEMBA1002462 | F-HEMBA1002462 | 0.55 |
| HEMBA1002469 | F-HEMBA1002469 | 0.79 |
| HEMBA1002475 | F-HEMBA1002475 | 0.88 |
| HEMBA1002477 | F-HEMBA1002477 | 0.45 |
| HEMBA1002495 | F-HEMBA1002495 | 0.78 |
| HEMBA1002503 | F-HEMBA1002503 | 0.94 |
| HEMBA1002508 | F-HEMBA1002508 | 0.33 |
| HEMBA1002513 | F-HEMBA1002513 | 0.41 |
| HEMBA1002515 | F-HEMBA1002515 | 0.94 |
| HEMBA1002542 | F-HEMBA1002542 | 0.46 |
| HEMBA1002547 | F-HEMBA1002547 | 0.45 |
| HEMBA1002569 | F-HEMBA1002569 | 0.86 |
| HEMBA1002583 | F-HEMBA1002583 | 0.86 |
| HEMBA1002609 | F-HEMBA1002609 | 0.75 |
| HEMBA1002624 | F-HEMBA1002624 | 0.59 |
| HEMBA1002688 | F-HEMBA1002688 | 0.88 |
| HEMBA1002696 | F-HEMBA1002696 | 0.82 |
| HEMBA1002703 | F-HEMBA1002703 | 0.94 |
| HEMBA1002746 | F-HEMBA1002746 | 0.33 |
| HEMBA1002750 | F-HEMBA1002750 | 0.53 |
| HEMBA1002768 | F-HEMBA1002768 | 0.94 |
| HEMBA1002770 | F-HEMBA1002770 | 0.61 |
| HEMBA1002777 | F-HEMBA1002777 | 0.90 |
| HEMBA1002779 | F-HEMBA1002779 | 0.92 |
| HEMBA1002794 | F-HEMBA1002794 | 0.86 |
| HEMBA1002810 | F-HEMBA1002810 | 0.87 |
| HEMBA1002816 | F-HEMBA1002816 | 0.91 |
| HEMBA1002818 | F-HEMBA1002818 | 0.94 |
| HEMBA1002850 | F-HEMBA1002850 | 0.57 |
| HEMBA1002863 | F-HEMBA1002863 | 0.48 |
| HEMBA1002876 | F-HEMBA1002876 | 0.86 |
| HEMBA1002935 | F-HEMBA1002935 | 0.91 |
| HEMBA1002937 | F-HEMBA1002937 | 0.61 |
| HEMBA1002939 | F-HEMBA1002939 | 0.32 |
| HEMBA1002951 | F-HEMBA1002951 | 0.83 |
| HEMBA1002954 | F-HEMBA1002954 | 0.67 |
| HEMBA1002970 | F-HEMBA1002970 | 0.33 |
| HEMBA1002971 | F-HEMBA1002971 | 0.57 |
| HEMBA1002973 | F-HEMBA1002973 | 0.33 |
| HEMBA1002997 | F-HEMBA1002997 | 0.46 |
| HEMBA1002999 | F-HEMBA1002999 | 0.49 |
| HEMBA1003021 | F-HEMBA1003021 | 0.74 |
| HEMBA1003033 | F-HEMBA1003033 | 0.94 |
| HEMBA1003035 | F-HEMBA1003035 | 0.61 |
| HEMBA1003041 | F-HEMBA1003041 | 0.40 |
| HEMBA1003046 | F-HEMBA1003046 | 0.94 |
| HEMBA1003067 | F-HEMBA1003067 | 0.34 |
| HEMBA1003077 | F-HEMBA1003077 | 0.83 |
| HEMBA1003078 | F-HEMBA1003078 | 0.89 |
| HEMBA1003079 | F-HEMBA1003079 | 0.49 |
| HEMBA1003096 | F-HEMBA1003096 | 0.34 |
| HEMBA1003117 | F-HEMBA1003117 | 0.94 |
| HEMBA1003129 | F-HEMBA1003129 | 0.81 |
| HEMBA1003136 | F-HEMBA1003136 | 0.77 |
| HEMBA1003148 | F-HEMBA1003148 | 0.91 |
| HEMBA1003175 | F-HEMBA1003175 | 0.41 |
| HEMBA1003179 | F-HEMBA1003179 | 0.42 |
| HEMBA1003199 | F-HEMBA1003199 | 0.84 |
| HEMBA1003222 | F-HEMBA1003222 | 0.47 |
| HEMBA1003235 | F-HEMBA1003235 | 0.94 |
| HEMBA1003250 | F-HEMBA1003250 | 0.39 |
| HEMBA1003257 | F-HEMBA1003257 | 0.88 |
| HEMBA1003281 | F-HEMBA1003281 | 0.67 |
| HEMBA1003286 | F-HEMBA1003286 | 0.57 |
| HEMBA1003291 | F-HEMBA1003291 | 0.89 |
| HEMBA1003322 | F-HEMBA1003322 | 0.60 |
| HEMBA1003327 | F-HEMBA1003327 | 0.88 |
| HEMBA1003369 | F-HEMBA1003369 | 0.89 |
| HEMBA1003370 | F-HEMBA1003370 | 0.75 |
| HEMBA1003380 | F-HEMBA1003380 | 0.68 |
| HEMBA1003395 | F-HEMBA1003395 | 0.88 |
| HEMBA1003402 | F-HEMBA1003402 | 0.45 |
| HEMBA1003403 | F-HEMBA1003403 | 0.44 |
| HEMBA1003408 | F-HEMBA1003408 | 0.34 |
| HEMBA1003417 | F-HEMBA1003417 | 0.78 |
| HEMBA1003418 | F-HEMBA1003418 | 0.94 |
| HEMBA1003433 | F-HEMBA1003433 | 0.70 |
| HEMBA1003447 | F-HEMBA1003447 | 0.49 |
| HEMBA1003461 | F-HEMBA1003461 | 0.85 |
| HEMBA1003463 | F-HEMBA1003463 | 0.59 |
| HEMBA1003480 | F-HEMBA1003480 | 0.94 |
| HEMBA1003528 | F-HEMBA1003528 | 0.90 |
| HEMBA1003538 | F-HEMBA1003538 | 0.47 |
| HEMBA1003545 | F-HEMBA1003545 | 0.74 |
| HEMBA1003555 | F-HEMBA1003555 | 0.94 |
| HEMBA1003556 | F-HEMBA1003556 | 0.44 |
| HEMBA1003560 | F-HEMBA1003560 | 0.40 |
| HEMBA1003568 | F-HEMBA1003568 | 0.94 |
| HEMBA1003569 | F-HEMBA1003569 | 0.82 |
| HEMBA1003581 | F-HEMBA1003581 | 0.83 |
| HEMBA1003591 | F-HEMBA1003591 | 0.68 |
| HEMBA1003615 | F-HEMBA1003615 | 0.94 |
| HEMBA1003617 | F-HEMBA1003617 | 0.88 |
| HEMBA1003621 | F-HEMBA1003621 | 0.47 |
| HEMBA1003645 | F-HEMBA1003645 | 0.75 |
| HEMBA1003646 | F-HEMBA1003646 | 0.51 |
| HEMBA1003662 | F-HEMBA1003662 | 0.61 |
| HEMBA1003667 | F-HEMBA1003667 | 0.54 |
| HEMBA1003679 | F-HEMBA1003679 | 0.72 |
| HEMBA1003680 | F-HEMBA1003680 | 0.52 |
| HEMBA1003684 | F-HEMBA1003684 | 0.94 |
| HEMBA1003690 | F-HEMBA1003690 | 0.93 |
| HEMBA1003692 | F-HEMBA1003692 | 0.46 |
| HEMBA1003711 | F-HEMBA1003711 | 0.94 |
| HEMBA1003720 | F-HEMBA1003720 | 0.94 |
| HEMBA1003729 | F-HEMBA1003729 | 0.73 |
| HEMBA1003742 | F-HEMBA1003742 | 0.94 |
| HEMBA1003760 | F-HEMBA1003760 | 0.75 |
| HEMBA1003783 | F-HEMBA1003783 | 0.31 |
| HEMBA1003799 | F-HEMBA1003799 | 0.70 |
| HEMBA1003803 | F-HEMBA1003803 | 0.87 |
| HEMBA1003804 | F-HEMBA1003804 | 0.94 |
| HEMBA1003805 | F-HEMBA1003805 | 0.94 |
| HEMBA1003807 | F-HEMBA1003807 | 0.91 |
| HEMBA1003827 | F-HEMBA1003827 | 0.62 |
| HEMBA1003836 | F-HEMBA1003836 | 0.69 |
| HEMBA1003838 | F-HEMBA1003838 | 0.80 |
| HEMBA1003864 | F-HEMBA1003864 | 0.94 |
| HEMBA1003866 | F-HEMBA1003866 | 0.32 |
| HEMBA1003879 | F-HEMBA1003879 | 0.82 |
| HEMBA1003880 | F-HEMBA1003880 | 0.59 |
| HEMBA1003893 | F-HEMBA1003893 | 0.47 |
| HEMBA1003953 | F-HEMBA1003953 | 0.77 |
| HEMBA1003959 | F-HEMBA1003959 | 0.32 |
| HEMBA1003978 | F-HEMBA1003978 | 0.37 |
| HEMBA1003985 | F-HEMBA1003985 | 0.31 |
| HEMBA1003989 | F-HEMBA1003989 | 0.75 |
| HEMBA1004011 | F-HEMBA1004011 | 0.34 |
| HEMBA1004048 | F-HEMBA1004048 | 0.32 |
| HEMBA1004055 | F-HEMBA1004055 | 0.74 |
| HEMBA1004056 | F-HEMBA1004056 | 0.49 |
| HEMBA1004074 | F-HEMBA1004074 | 0.39 |
| HEMBA1004086 | F-HEMBA1004086 | 0.45 |
| HEMBA1004097 | F-HEMBA1004097 | 0.82 |
| HEMBA1004111 | F-HEMBA1004111 | 0.94 |
| HEMBA1004131 | F-HEMBA1004131 | 0.84 |
| HEMBA1004133 | F-HEMBA1004133 | 0.40 |
| HEMBA1004143 | F-HEMBA1004143 | 0.33 |
| HEMBA1004146 | F-HEMBA1004146 | 0.31 |
| HEMBA1004150 | F-HEMBA1004150 | 0.70 |
| HEMBA1004168 | F-HEMBA1004168 | 0.34 |
| HEMBA1004199 | F-HEMBA1004199 | 0.34 |
| HEMBA1004200 | F-HEMBA1004200 | 0.40 |
| HEMBA1004202 | F-HEMBA1004202 | 0.88 |
| HEMBA1004203 | F-HEMBA1004203 | 0.94 |
| HEMBA1004207 | F-HEMBA1004207 | 0.53 |
| HEMBA1004227 | F-HEMBA1004227 | 0.94 |
| HEMBA1004238 | F-HEMBA1004238 | 0.44 |
| HEMBA1004246 | F-HEMBA1004246 | 0.71 |
| HEMBA1004248 | F-HEMBA1004248 | 0.40 |
| HEMBA1004264 | F-HEMBA1004264 | 0.94 |
| HEMBA1004274 | F-HEMBA1004274 | 0.88 |
| HEMBA1004275 | F-HEMBA1004275 | 0.85 |
| HEMBA1004276 | F-HEMBA1004276 | 0.32 |
| HEMBA1004286 | F-HEMBA1004286 | 0.37 |
| HEMBA1004289 | F-HEMBA1004289 | 0.76 |
| HEMBA1004321 | F-HEMBA1004321 | 0.82 |
| HEMBA1004327 | F-HEMBA1004327 | 0.40 |
| HEMBA1004330 | F-HEMBA1004330 | 0.84 |
| HEMBA1004335 | F-HEMBA1004335 | 0.79 |
| HEMBA1004341 | F-HEMBA1004341 | 0.38 |
| HEMBA1004353 | F-HEMBA1004353 | 0.79 |
| HEMBA1004372 | F-HEMBA1004372 | 0.94 |
| HEMBA1004389 | F-HEMBA1004389 | 0.32 |
| HEMBA1004408 | F-HEMBA1004408 | 0.70 |
| HEMBA1004479 | F-HEMBA1004479 | 0.55 |
| HEMBA1004499 | F-HEMBA1004499 | 0.62 |
| HEMBA1004502 | F-HEMBA1004502 | 0.31 |
| HEMBA1004507 | F-HEMBA1004507 | 0.71 |
| HEMBA1004509 | F-HEMBA1004509 | 0.68 |
| HEMBA1004534 | F-HEMBA1004534 | 0.56 |
| HEMBA1004542 | F-HEMBA1004542 | 0.36 |
| HEMBA1004554 | F-HEMBA1004554 | 0.90 |
| HEMBA1004560 | F-HEMBA1004560 | 0.57 |
| HEMBA1004573 | F-HEMBA1004573 | 0.93 |
| HEMBA1004596 | F-HEMBA1004596 | 0.45 |
| HEMBA1004604 | F-HEMBA1004604 | 0.91 |
| HEMBA1004610 | F-HEMBA1004610 | 0.59 |
| HEMBA1004632 | F-HEMBA1004632 | 0.59 |
| HEMBA1004637 | F-HEMBA1004637 | 0.38 |
| HEMBA1004638 | F-HEMBA1004638 | 0.40 |
| HEMBA1004669 | F-HEMBA1004669 | 0.94 |
| HEMBA1004693 | F-HEMBA1004693 | 0.52 |
| HEMBA1004697 | F-HEMBA1004697 | 0.94 |
| HEMBA1004705 | F-HEMBA1004705 | 0.94 |
| HEMBA1004709 | F-HEMBA1004709 | 0.77 |
| HEMBA1004711 | F-HEMBA1004711 | 0.73 |
| HEMBA1004725 | F-HEMBA1004725 | 0.94 |
| HEMBA1004734 | F-HEMBA1004734 | 0.94 |
| HEMBA1004736 | F-HEMBA1004736 | 0.94 |
| HEMBA1004751 | F-HEMBA1004751 | 0.64 |
| HEMBA1004752 | F-HEMBA1004752 | 0.87 |
| HEMBA1004753 | F-HEMBA1004753 | 0.54 |
| HEMBA1004756 | F-HEMBA1004756 | 0.54 |
| HEMBA1004758 | F-HEMBA1004758 | 0.69 |
| HEMBA1004763 | F-HEMBA1004763 | 0.94 |
| HEMBA1004768 | F-HEMBA1004768 | 0.66 |
| HEMBA1004771 | F-HEMBA1004771 | 0.72 |
| HEMBA1004776 | F-HEMBA1004776 | 0.49 |
| HEMBA1004795 | F-HEMBA1004795 | 0.46 |
| HEMBA1004806 | F-HEMBA1004806 | 0.32 |
| HEMBA1004847 | F-HEMBA1004847 | 0.79 |
| HEMBA1004850 | F-HEMBA1004850 | 0.94 |
| HEMBA1004863 | F-HEMBA1004863 | 0.32 |
| HEMBA1004864 | F-HEMBA1004864 | 0.94 |
| HEMBA1004889 | F-HEMBA1004889 | 0.94 |
| HEMBA1004923 | F-HEMBA1004923 | 0.70 |
| HEMBA1004929 | F-HEMBA1004929 | 0.31 |
| HEMBA1004930 | F-HEMBA1004930 | 0.90 |
| HEMBA1004933 | F-HEMBA1004933 | 0.84 |
| HEMBA1004934 | F-HEMBA1004934 | 0.34 |
| HEMBA1004944 | F-HEMBA1004944 | 0.40 |
| HEMBA1004954 | F-HEMBA1004954 | 0.62 |
| HEMBA1004972 | F-HEMBA1004972 | 0.90 |
| HEMBA1004973 | F-HEMBA1004973 | 0.94 |
| HEMBA1004977 | F-HEMBA1004977 | 0.77 |
| HEMBA1004980 | F-HEMBA1004980 | 0.33 |
| HEMBA1005009 | F-HEMBA1005009 | 0.94 |
| HEMBA1005019 | F-HEMBA1005019 | 0.32 |
| HEMBA1005029 | F-HEMBA1005029 | 0.84 |
| HEMBA1005035 | F-HEMBA1005035 | 0.91 |
| HEMBA1005047 | F-HEMBA1005047 | 0.94 |
| HEMBA1005050 | F-HEMBA1005050 | 0.88 |
| HEMBA1005066 | F-HEMBA1005066 | 0.79 |
| HEMBA1005075 | F-HEMBA1005075 | 0.31 |
| HEMBA1005079 | F-HEMBA1005079 | 0.35 |
| HEMBA1005083 | F-HEMBA1005083 | 0.43 |
| HEMBA1005101 | F-HEMBA1005101 | 0.94 |
| HEMBA1005113 | F-HEMBA1005113 | 0.38 |
| HEMBA1005133 | F-HEMBA1005133 | 0.34 |
| HEMBA1005149 | F-HEMBA1005149 | 0.36 |
| HEMBA1005185 | F-HEMBA1005185 | 0.64 |
| HEMBA1005201 | F-HEMBA1005201 | 0.83 |
| HEMBA1005202 | F-HEMBA1005202 | 0.94 |
| HEMBA1005206 | F-HEMBA1005206 | 0.94 |
| HEMBA1005219 | F-HEMBA1005219 | 0.57 |
| HEMBA1005223 | F-HEMBA1005223 | 0.33 |
| HEMBA1005244 | F-HEMBA1005244 | 0.35 |
| HEMBA1005252 | F-HEMBA1005252 | 0.80 |
| HEMBA1005296 | F-HEMBA1005296 | 0.94 |
| HEMBA1005314 | F-HEMBA1005314 | 0.94 |
| HEMBA1005331 | F-HEMBA1005331 | 0.69 |
| HEMBA1005338 | F-HEMBA1005338 | 0.94 |
| HEMBA1005367 | F-HEMBA1005367 | 0.50 |
| HEMBA1005382 | F-HEMBA1005382 | 0.91 |
| HEMBA1005394 | F-HEMBA1005394 | 0.45 |
| HEMBA1005403 | F-HEMBA1005403 | 0.94 |
| HEMBA1005411 | F-HEMBA1005411 | 0.33 |
| HEMBA1005423 | F-HEMBA1005423 | 0.64 |
| HEMBA1005468 | F-HEMBA1005468 | 0.33 |
| HEMBA1005469 | F-HEMBA1005469 | 0.59 |
| HEMBA1005472 | F-HEMBA1005472 | 0.32 |
| HEMBA1005474 | F-HEMBA1005474 | 0.51 |
| HEMBA1005475 | F-HEMBA1005475 | 0.36 |
| HEMBA1005513 | F-HEMBA1005513 | 0.94 |
| HEMBA1005517 | F-HEMBA1005517 | 0.94 |
| HEMBA1005518 | F-HEMBA1005518 | 0.39 |
| HEMBA1005526 | F-HEMBA1005526 | 0.62 |
| HEMBA1005528 | F-HEMBA1005528 | 0.81 |
| HEMBA1005530 | F-HEMBA1005530 | 0.62 |
| HEMBA1005548 | F-HEMBA1005548 | 0.94 |
| HEMBA1005558 | F-HEMBA1005558 | 0.94 |
| HEMBA1005576 | F-HEMBA1005576 | 0.49 |
| HEMBA1005581 | F-HEMBA1005581 | 0.53 |
| HEMBA1005582 | F-HEMBA1005582 | 0.34 |
| HEMBA1005583 | F-HEMBA1005583 | 0.94 |
| HEMBA1005595 | F-HEMBA1005595 | 0.93 |
| HEMBA1005609 | F-HEMBA1005609 | 0.34 |
| HEMBA1005621 | F-HEMBA1005621 | 0.94 |
| HEMBA1005666 | F-HEMBA1005666 | 0.57 |
| HEMBA1005680 | F-HEMBA1005680 | 0.38 |
| HEMBA1005685 | F-HEMBA1005685 | 0.32 |
| HEMBA1005732 | F-HEMBA1005732 | 0.33 |
| HEMBA1005737 | F-HEMBA1005737 | 0.92 |
| HEMBA1005746 | F-HEMBA1005746 | 0.37 |
| HEMBA1005755 | F-HEMBA1005755 | 0.94 |
| HEMBA1005813 | F-HEMBA1005813 | 0.33 |
| HEMBA1005815 | F-HEMBA1005815 | 0.82 |
| HEMBA1005822 | F-HEMBA1005822 | 0.83 |
| HEMBA1005834 | F-HEMBA1005834 | 0.70 |
| HEMBA1005852 | F-HEMBA1005852 | 0.76 |
| HEMBA1005884 | F-HEMBA1005884 | 0.79 |
| HEMBA1005891 | F-HEMBA1005891 | 0.94 |
| HEMBA1005963 | F-HEMBA1005963 | 0.40 |
| HEMBA1005990 | F-HEMBA1005990 | 0.82 |
| HEMBA1005991 | F-HEMBA1005991 | 0.43 |
| HEMBA1006031 | F-HEMBA1006031 | 0.55 |
| HEMBA1006035 | F-HEMBA1006035 | 0.43 |
| HEMBA1006081 | F-HEMBA1006081 | 0.36 |
| HEMBA1006091 | F-HEMBA1006091 | 0.81 |
| HEMBA1006100 | F-HEMBA1006100 | 0.31 |
| HEMBA1006108 | F-HEMBA1006108 | 0.80 |
| HEMBA1006121 | F-HEMBA1006121 | 0.45 |
| HEMBA1006130 | F-HEMBA1006130 | 0.46 |
| HEMBA1006138 | F-HEMBA1006138 | 0.48 |
| HEMBA1006155 | F-HEMBA1006155 | 0.72 |
| HEMBA1006173 | F-HEMBA1006173 | 0.42 |
| HEMBA1006182 | F-HEMBA1006182 | 0.73 |
| HEMBA1006198 | F-HEMBA1006198 | 0.94 |
| HEMBA1006235 | F-HEMBA1006235 | 0.58 |
| HEMBA1006248 | F-HEMBA1006248 | 0.57 |
| HEMBA1006252 | F-HEMBA1006252 | 0.31 |
| HEMBA1006272 | F-HEMBA1006272 | 0.54 |
| HEMBA1006278 | F-HEMBA1006278 | 0.92 |
| HEMBA1006283 | F-HEMBA1006283 | 0.90 |
| HEMBA1006284 | F-HEMBA1006284 | 0.93 |
| HEMBA1006291 | F-HEMBA1006291 | 0.38 |
| HEMBA1006293 | F-HEMBA1006293 | 0.89 |
| HEMBA1006309 | F-HEMBA1006309 | 0.94 |
| HEMBA1006310 | F-HEMBA1006310 | 0.67 |
| HEMBA1006344 | F-HEMBA1006344 | 0.94 |
| HEMBA1006347 | F-HEMBA1006347 | 0.94 |
| HEMBA1006349 | F-HEMBA1006349 | 0.56 |
| HEMBA1006377 | F-HEMBA1006377 | 0.94 |
| HEMBA1006381 | F-HEMBA1006381 | 0.33 |
| HEMBA1006398 | F-HEMBA1006398 | 0.71 |
| HEMBA1006424 | F-HEMBA1006424 | 0.40 |
| HEMBA1006445 | F-HEMBA1006445 | 0.86 |
| HEMBA1006467 | F-HEMBA1006467 | 0.55 |
| HEMBA1006474 | F-HEMBA1006474 | 0.66 |
| HEMBA1006483 | F-HEMBA1006483 | 0.71 |
| HEMBA1006485 | F-HEMBA1006485 | 0.87 |
| HEMBA1006492 | F-HEMBA1006492 | 0.73 |
| HEMBA1006494 | F-HEMBA1006494 | 0.90 |
| HEMBA1006497 | F-HEMBA1006497 | 0.77 |
| HEMBA1006502 | F-HEMBA1006502 | 0.80 |
| HEMBA1006507 | F-HEMBA1006507 | 0.56 |
| HEMBA1006521 | F-HEMBA1006521 | 0.91 |
| HEMBA1006530 | F-HEMBA1006530 | 0.37 |
| HEMBA1006535 | F-HEMBA1006535 | 0.56 |
| HEMBA1006559 | F-HEMBA1006559 | 0.39 |
| HEMBA1006566 | F-HEMBA1006566 | 0.41 |
| HEMBA1006579 | F-HEMBA1006579 | 0.83 |
| HEMBA1006583 | F-HEMBA1006583 | 0.31 |
| HEMBA1006612 | F-HEMBA1006612 | 0.55 |
| HEMBA1006624 | F-HEMBA1006624 | 0.94 |
| HEMBA1006631 | F-HEMBA1006631 | 0.74 |
| HEMBA1006643 | F-HEMBA1006643 | 0.38 |
| HEMBA1006652 | F-HEMBA1006652 | 0.93 |
| HEMBA1006659 | F-HEMBA1006659 | 0.63 |
| HEMBA1006674 | F-HEMBA1006674 | 0.54 |
| HEMBA1006682 | F-HEMBA1006682 | 0.34 |
| HEMBA1006708 | F-HEMBA1006708 | 0.40 |
| HEMBA1006709 | F-HEMBA1006709 | 0.41 |
| HEMBA1006717 | F-HEMBA1006717 | 0.43 |
| HEMBA1006737 | F-HEMBA1006737 | 0.72 |
| HEMBA1006754 | F-HEMBA1006754 | 0.45 |
| HEMBA1006758 | F-HEMBA1006758 | 0.60 |
| HEMBA1006767 | F-HEMBA1006767 | 0.61 |
| HEMBA1006789 | F-HEMBA1006789 | 0.34 |
| HEMBA1006795 | F-HEMBA1006795 | 0.48 |
| HEMBA1006796 | F-HEMBA1006796 | 0.41 |
| HEMBA1006807 | F-HEMBA1006807 | 0.34 |
| HEMBA1006832 | F-HEMBA1006832 | 0.59 |
| HEMBA1006877 | F-HEMBA1006877 | 0.90 |
| HEMBA1006885 | F-HEMBA1006885 | 0.80 |
| HEMBA1006900 | F-HEMBA1006900 | 0.34 |
| HEMBA1006914 | F-HEMBA1006914 | 0.78 |
| HEMBA1006926 | F-HEMBA1006926 | 0.67 |
| HEMBA1006936 | F-HEMBA1006936 | 0.65 |
| HEMBA1006941 | F-HEMBA1006941 | 0.94 |
| HEMBA1006973 | F-HEMBA1006973 | 0.64 |
| HEMBA1006976 | F-HEMBA1006976 | 0.40 |
| HEMBA1006993 | F-HEMBA1006993 | 0.81 |
| HEMBA1006996 | F-HEMBA1006996 | 0.77 |
| HEMBA1007002 | F-HEMBA1007002 | 0.72 |
| HEMBA1007018 | F-HEMBA1007018 | 0.31 |
| HEMBA1007052 | F-HEMBA1007052 | 0.41 |
| HEMBA1007062 | F-HEMBA1007062 | 0.39 |
| HEMBA1007066 | F-HEMBA1007066 | 0.35 |
| HEMBA1007080 | F-HEMBA1007080 | 0.43 |
| HEMBA1007085 | F-HEMBA1007085 | 0.73 |
| HEMBA1007087 | F-HEMBA1007087 | 0.94 |
| HEMBA1007112 | F-HEMBA1007112 | 0.49 |
| HEMBA1007121 | F-HEMBA1007121 | 0.70 |
| HEMBA1007149 | F-HEMBA1007149 | 0.94 |
| HEMBA1007151 | F-HEMBA1007151 | 0.80 |
| HEMBA1007174 | F-HEMBA1007174 | 0.63 |
| HEMBA1007178 | F-HEMBA1007178 | 0.47 |
| HEMBA1007194 | F-HEMBA1007194 | 0.94 |
| HEMBA1007203 | F-HEMBA1007203 | 0.48 |
| HEMBA1007224 | F-HEMBA1007224 | 0.74 |
| HEMBA1007243 | F-HEMBA1007243 | 0.94 |
| HEMBA1007251 | F-HEMBA1007251 | 0.79 |
| HEMBA1007267 | F-HEMBA1007267 | 0.86 |
| HEMBA1007281 | F-HEMBA1007281 | 0.61 |
| HEMBA1007300 | F-HEMBA1007300 | 0.87 |
| HEMBA1007301 | F-HEMBA1007301 | 0.38 |
| HEMBA1007319 | F-HEMBA1007319 | 0.47 |
| HEMBA1007320 | F-HEMBA1007320 | 0.69 |
| HEMBA1007342 | F-HEMBA1007342 | 0.80 |
| HEMBB1000008 | F-HEMBB1000008 | 0.39 |
| HEMBB1000018 | F-HEMBB1000018 | 0.79 |
| HEMBB1000024 | F-HEMBB1000024 | 0.62 |
| HEMBB1000025 | F-HEMBB1000025 | 0.66 |
| HEMBB1000030 | F-HEMBB1000030 | 0.33 |
| HEMBB1000036 | F-HEMBB1000036 | 0.75 |
| HEMBB1000037 | F-HEMBB1000037 | 0.94 |
| HEMBB1000048 | F-HEMBB1000048 | 0.87 |
| HEMBB1000083 | F-HEMBB1000083 | 0.48 |
| HEMBB1000103 | F-HEMBB1000103 | 0.63 |
| HEMBB1000119 | F-HEMBB1000119 | 0.94 |
| HEMBB1000136 | F-HEMBB1000136 | 0.92 |
| HEMBB1000173 | F-HEMBB1000173 | 0.46 |
| HEMBB1000175 | F-HEMBB1000175 | 0.48 |
| HEMBB1000198 | F-HEMBB1000198 | 0.74 |
| HEMBB1000215 | F-HEMBB1000215 | 0.61 |
| HEMBB1000217 | F-HEMBB1000217 | 0.94 |
| HEMBB1000226 | F-HEMBB1000226 | 0.94 |
| HEMBB1000240 | F-HEMBB1000240 | 0.40 |
| HEMBB1000244 | F-HEMBB1000244 | 0.81 |
| HEMBB1000266 | F-HEMBB1000266 | 0.92 |
| HEMBB1000338 | F-HEMBB1000338 | 0.33 |
| HEMBB1000339 | F-HEMBB1000339 | 0.40 |
| HEMBB1000391 | F-HEMBB1000391 | 0.43 |
| HEMBB1000438 | F-HEMBB1000438 | 0.79 |
| HEMBB1000449 | F-HEMBB1000449 | 0.48 |
| HEMBB1000510 | F-HEMBB1000510 | 0.35 |
| HEMBB1000550 | F-HEMBB1000550 | 0.94 |
| HEMBB1000556 | F-HEMBB1000556 | 0.89 |
| HEMBB1000589 | F-HEMBB1000589 | 0.77 |
| HEMBB1000591 | F-HEMBB1000591 | 0.33 |
| HEMBB1000592 | F-HEMBB1000592 | 0.77 |
| HEMBB1000593 | F-HEMBB1000593 | 0.68 |
| HEMBB1000623 | F-HEMBB1000623 | 0.94 |
| HEMBB1000630 | F-HEMBB1000630 | 0.59 |
| HEMBB1000631 | F-HEMBB1000631 | 0.71 |
| HEMBB1000632 | F-HEMBB1000632 | 0.38 |
| HEMBB1000671 | F-HEMBB1000671 | 0.36 |
| HEMBB1000673 | F-HEMBB1000673 | 0.54 |
| HEMBB1000693 | F-HEMBB1000693 | 0.68 |
| HEMBB1000705 | F-HEMBB1000705 | 0.44 |
| HEMBB1000706 | F-HEMBB1000706 | 0.45 |
| HEMBB1000725 | F-HEMBB1000725 | 0.91 |
| HEMBB1000763 | F-HEMBB1000763 | 0.87 |
| HEMBB1000774 | F-HEMBB1000774 | 0.80 |
| HEMBB1000781 | F-HEMBB1000781 | 0.94 |
| HEMBB1000789 | F-HEMBB1000789 | 0.34 |
| HEMBB1000807 | F-HEMBB1000807 | 0.94 |
| HEMBB1000810 | F-HEMBB1000810 | 0.33 |
| HEMBB1000826 | F-HEMBB1000826 | 0.36 |
| HEMBB1000835 | F-HEMBB1000835 | 0.81 |
| HEMBB1000848 | F-HEMBB1000848 | 0.66 |
| HEMBB1000852 | F-HEMBB1000852 | 0.85 |
| HEMBB1000870 | F-HEMBB1000870 | 0.34 |
| HEMBB1000887 | F-HEMBB1000887 | 0.58 |
| HEMBB1000908 | F-HEMBB1000908 | 0.31 |
| HEMBB1000927 | F-HEMBB1000927 | 0.94 |
| HEMBB1000947 | F-HEMBB1000947 | 0.33 |
| HEMBB1000973 | F-HEMBB1000973 | 0.72 |
| HEMBB1000975 | F-HEMBB1000975 | 0.68 |
| HEMBB1000985 | F-HEMBB1000985 | 0.62 |
| HEMBB1000991 | F-HEMBB1000991 | 0.45 |
| HEMBB1001011 | F-HEMBB1001011 | 0.58 |
| HEMBB1001014 | F-HEMBB1001014 | 0.86 |
| HEMBB1001020 | F-HEMBB1001020 | 0.87 |
| HEMBB1001024 | F-HEMBB1001024 | 0.64 |
| HEMBB1001056 | F-HEMBB1001056 | 0.94 |
| HEMBB1001058 | F-HEMBB1001058 | 0.39 |
| HEMBB1001068 | F-HEMBB1001068 | 0.57 |
| HEMBB1001096 | F-HEMBB1001096 | 0.48 |
| HEMBB1001105 | F-HEMBB1001105 | 0.45 |
| HEMBB1001112 | F-HEMBB1001112 | 0.47 |
| HEMBB1001117 | F-HEMBB1001117 | 0.83 |
| HEMBB1001126 | F-HEMBB1001126 | 0.76 |
| HEMBB1001137 | F-HEMBB1001137 | 0.53 |
| HEMBB1001151 | F-HEMBB1001151 | 0.94 |
| HEMBB1001153 | F-HEMBB1001153 | 0.77 |
| HEMBB1001169 | F-HEMBB1001169 | 0.39 |
| HEMBB1001175 | F-HEMBB1001175 | 0.91 |
| HEMBB1001182 | F-HEMBB1001182 | 0.94 |
| HEMBB1001199 | F-HEMBB1001199 | 0.54 |
| HEMBB1001210 | F-HEMBB1001210 | 0.88 |
| HEMBB1001234 | F-HEMBB1001234 | 0.67 |
| HEMBB1001242 | F-HEMBB1001242 | 0.33 |
| HEMBB1001288 | F-HEMBB1001288 | 0.33 |
| HEMBB1001289 | F-HEMBB1001289 | 0.58 |
| HEMBB1001294 | F-HEMBB1001294 | 0.86 |
| HEMBB1001314 | F-HEMBB1001314 | 0.76 |
| HEMBB1001331 | F-HEMBB1001331 | 0.44 |
| HEMBB1001339 | F-HEMBB1001339 | 0.40 |
| HEMBB1001346 | F-HEMBB1001346 | 0.83 |
| HEMBB1001364 | F-HEMBB1001364 | 0.69 |
| HEMBB1001369 | F-HEMBB1001369 | 0.47 |
| HEMBB1001384 | F-HEMBB1001384 | 0.80 |
| HEMBB1001387 | F-HEMBB1001387 | 0.36 |
| HEMBB1001394 | F-HEMBB1001394 | 0.94 |
| HEMBB1001410 | F-HEMBB1001410 | 0.51 |
| HEMBB1001426 | F-HEMBB1001426 | 0.80 |
| HEMBB1001429 | F-HEMBB1001429 | 0.91 |
| HEMBB1001449 | F-HEMBB1001449 | 0.31 |
| HEMBB1001482 | F-HEMBB1001482 | 0.44 |
| HEMBB1001531 | F-HEMBB1001531 | 0.58 |
| HEMBB1001562 | F-HEMBB1001562 | 0.65 |
| HEMBB1001564 | F-HEMBB1001564 | 0.46 |
| HEMBB1001585 | F-HEMBB1001585 | 0.74 |
| HEMBB1001603 | F-HEMBB1001603 | 0.81 |
| HEMBB1001635 | F-HEMBB1001635 | 0.46 |
| HEMBB1001653 | F-HEMBB1001653 | 0.33 |
| HEMBB1001665 | F-HEMBB1001665 | 0.39 |
| HEMBB1001668 | F-HEMBB1001668 | 0.38 |
| HEMBB1001673 | F-HEMBB1001673 | 0.83 |
| HEMBB1001684 | F-HEMBB1001684 | 0.44 |
| HEMBB1001685 | F-HEMBB1001685 | 0.90 |
| HEMBB1001695 | F-HEMBB1001695 | 0.92 |
| HEMBB1001707 | F-HEMBB1001707 | 0.51 |
| HEMBB1001736 | F-HEMBB1001736 | 0.94 |
| HEMBB1001760 | F-HEMBB1001760 | 0.88 |
| HEMBB1001785 | F-HEMBB1001785 | 0.74 |
| HEMBB1001812 | F-HEMBB1001812 | 0.33 |
| HEMBB1001816 | F-HEMBB1001816 | 0.41 |
| HEMBB1001831 | F-HEMBB1001831 | 0.93 |
| HEMBB1001834 | F-HEMBB1001834 | 0.78 |
| HEMBB1001839 | F-HEMBB1001839 | 0.32 |
| HEMBB1001869 | F-HEMBB1001869 | 0.48 |
| HEMBB1001872 | F-HEMBB1001872 | 0.93 |
| HEMBB1001874 | F-HEMBB1001874 | 0.31 |
| HEMBB1001905 | F-HEMBB1001905 | 0.87 |
| HEMBB1001906 | F-HEMBB1001906 | 0.88 |
| HEMBB1001908 | F-HEMBB1001908 | 0.69 |
| HEMBB1001910 | F-HEMBB1001910 | 0.77 |
| HEMBB1001915 | F-HEMBB1001915 | 0.76 |
| HEMBB1001945 | F-HEMBB1001945 | 0.64 |
| HEMBB1001947 | F-HEMBB1001947 | 0.94 |
| HEMBB1001950 | F-HEMBB1001950 | 0.73 |
| HEMBB1001957 | F-HEMBB1001957 | 0.64 |
| HEMBB1001962 | F-HEMBB1001962 | 0.90 |
| HEMBB1001990 | F-HEMBB1001990 | 0.83 |
| HEMBB1002044 | F-HEMBB1002044 | 0.82 |
| HEMBB1002050 | F-HEMBB1002050 | 0.91 |
| HEMBB1002068 | F-HEMBB1002068 | 0.48 |
| HEMBB1002134 | F-HEMBB1002134 | 0.80 |
| HEMBB1002142 | F-HEMBB1002142 | 0.39 |
| HEMBB1002152 | F-HEMBB1002152 | 0.31 |
| HEMBB1002193 | F-HEMBB1002193 | 0.35 |
| HEMBB1002217 | F-HEMBB1002217 | 0.49 |
| HEMBB1002218 | F-HEMBB1002218 | 0.32 |
| HEMBB1002249 | F-HEMBB1002249 | 0.72 |
| HEMBB1002300 | F-HEMBB1002300 | 0.75 |
| HEMBB1002327 | F-HEMBB1002327 | 0.86 |
| HEMBB1002329 | F-HEMBB1002329 | 0.31 |
| HEMBB1002340 | F-HEMBB1002340 | 0.42 |
| HEMBB1002342 | F-HEMBB1002342 | 0.76 |
| HEMBB1002358 | F-HEMBB1002358 | 0.70 |
| HEMBB1002359 | F-HEMBB1002359 | 0.75 |
| HEMBB1002383 | F-HEMBB1002383 | 0.78 |
| HEMBB1002409 | F-HEMBB1002409 | 0.52 |
| HEMBB1002415 | F-HEMBB1002415 | 0.82 |
| HEMBB1002442 | F-HEMBB1002442 | 0.31 |
| HEMBB1002457 | F-HEMBB1002457 | 0.46 |
| HEMBB1002489 | F-HEMBB1002489 | 0.69 |
| HEMBB1002492 | F-HEMBB1002492 | 0.68 |
| HEMBB1002495 | F-HEMBB1002495 | 0.94 |
| HEMBB1002502 | F-HEMBB1002502 | 0.39 |
| HEMBB1002510 | F-HEMBB1002510 | 0.94 |
| HEMBB1002545 | F-HEMBB1002545 | 0.44 |
| HEMBB1002550 | F-HEMBB1002550 | 0.57 |
| HEMBB1002600 | F-HEMBB1002600 | 0.91 |
| HEMBB1002607 | F-HEMBB1002607 | 0.83 |
| HEMBB1002614 | F-HEMBB1002614 | 0.75 |
| HEMBB1002684 | F-HEMBB1002684 | 0.84 |
| HEMBB1002692 | F-HEMBB1002692 | 0.52 |
| HEMBB1002697 | F-HEMBB1002697 | 0.86 |
| HEMBB1002705 | F-HEMBB1002705 | 0.32 |
| MAMMA1000019 | F-MAMMA1000019 | 0.48 |
| MAMMA1000020 | F-MAMMA1000020 | 0.36 |
| MAMMA1000025 | F-MAMMA1000025 | 0.31 |
| MAMMA1000055 | F-MAMMA1000055 | 0.39 |
| MAMMA1000057 | F-MAMMA1000057 | 0.35 |
| MAMMA1000069 | F-MAMMA1000069 | 0.78 |
| MAMMA1000084 | F-MAMMA1000084 | 0.61 |
| MAMMA1000085 | F-MAMMA1000085 | 0.72 |
| MAMMA1000139 | F-MAMMA1000139 | 0.33 |
| MAMMA1000143 | F-MAMMA1000143 | 0.40 |
| MAMMA1000163 | F-MAMMA1000163 | 0.94 |
| MAMMA1000171 | F-MAMMA1000171 | 0.78 |
| MAMMA1000173 | F-MAMMA1000173 | 0.94 |
| MAMMA1000183 | F-MAMMA1000183 | 0.77 |
| MAMMA1000251 | F-MAMMA1000251 | 0.94 |
| MAMMA1000257 | F-MAMMA1000257 | 0.75 |
| MAMMA1000277 | F-MAMMA1000277 | 0.94 |
| MAMMA1000278 | F-MAMMA1000278 | 0.35 |
| MAMMA1000279 | F-MAMMA1000279 | 0.62 |
| MAMMA1000284 | F-MAMMA1000284 | 0.35 |
| MAMMA1000309 | F-MAMMA1000309 | 0.53 |
| MAMMA1000312 | F-MAMMA1000312 | 0.68 |
| MAMMA1000313 | F-MAMMA1000313 | 0.32 |
| MAMMA1000339 | F-MAMMA1000339 | 0.35 |
| MAMMA1000361 | F-MAMMA1000361 | 0.61 |
| MAMMA1000372 | F-MAMMA1000372 | 0.60 |
| MAMMA1000388 | F-MAMMA1000388 | 0.93 |
| MAMMA1000395 | F-MAMMA1000395 | 0.94 |
| MAMMA1000410 | F-MAMMA1000410 | 0.94 |
| MAMMA1000416 | F-MAMMA1000416 | 0.89 |
| MAMMA1000421 | F-MAMMA1000421 | 0.50 |
| MAMMA1000422 | F-MAMMA1000422 | 0.92 |
| MAMMA1000429 | F-MAMMA1000429 | 0.92 |
| MAMMA1000458 | F-MAMMA1000458 | 0.88 |
| MAMMA1000468 | F-MAMMA1000468 | 0.60 |
| MAMMA1000472 | F-MAMMA1000472 | 0.33 |
| MAMMA1000490 | F-MAMMA1000490 | 0.34 |
| MAMMA1000524 | F-MAMMA1000524 | 0.39 |
| MAMMA1000567 | F-MAMMA1000567 | 0.40 |
| MAMMA1000583 | F-MAMMA1000583 | 0.45 |
| MAMMA1000612 | F-MAMMA1000612 | 0.89 |
| MAMMA1000623 | F-MAMMA1000623 | 0.44 |
| MAMMA1000625 | F-MAMMA1000625 | 0.52 |
| MAMMA1000664 | F-MAMMA1000664 | 0.42 |
| MAMMA1000670 | F-MAMMA1000670 | 0.94 |
| MAMMA1000672 | F-MAMMA1000672 | 0.44 |
| MAMMA1000684 | F-MAMMA1000684 | 0.94 |
| MAMMA1000713 | F-MAMMA1000713 | 0.88 |
| MAMMA1000731 | F-MAMMA1000731 | 0.67 |
| MAMMA1000734 | F-MAMMA1000734 | 0.40 |
| MAMMA1000738 | F-MAMMA1000738 | 0.93 |
| MAMMA1000746 | F-MAMMA1000746 | 0.48 |
| MAMMA1000760 | F-MAMMA1000760 | 0.94 |
| MAMMA1000776 | F-MAMMA1000776 | 0.94 |
| MAMMA1000824 | F-MAMMA1000824 | 0.81 |
| MAMMA1000831 | F-MAMMA1000831 | 0.39 |
| MAMMA1000841 | F-MAMMA1000841 | 0.41 |
| MAMMA1000842 | F-MAMMA1000842 | 0.61 |
| MAMMA1000843 | F-MAMMA1000843 | 0.48 |
| MAMMA1000856 | F-MAMMA1000856 | 0.31 |
| MAMMA1000859 | F-MAMMA1000859 | 0.44 |
| MAMMA1000865 | F-MAMMA1000865 | 0.94 |
| MAMMA1000875 | F-MAMMA1000875 | 0.49 |
| MAMMA1000897 | F-MAMMA1000897 | 0.94 |
| MAMMA1000906 | F-MAMMA1000906 | 0.45 |
| MAMMA1000908 | F-MAMMA1000908 | 0.39 |
| MAMMA1000914 | F-MAMMA1000914 | 0.94 |
| MAMMA1000921 | F-MAMMA1000921 | 0.34 |
| MAMMA1000956 | F-MAMMA1000956 | 0.39 |
| MAMMA1000968 | F-MAMMA1000968 | 0.35 |
| MAMMA1000979 | F-MAMMA1000979 | 0.68 |
| MAMMA1001008 | F-MAMMA1001008 | 0.36 |
| MAMMA1001021 | F-MAMMA1001021 | 0.48 |
| MAMMA1001041 | F-MAMMA1001041 | 0.34 |
| MAMMA1001059 | F-MAMMA1001059 | 0.94 |
| MAMMA1001073 | F-MAMMA1001073 | 0.94 |
| MAMMA1001075 | F-MAMMA1001075 | 0.94 |
| MAMMA1001078 | F-MAMMA1001078 | 0.52 |
| MAMMA1001080 | F-MAMMA1001080 | 0.87 |
| MAMMA1001091 | F-MAMMA1001091 | 0.53 |
| MAMMA1001105 | F-MAMMA1001105 | 0.94 |
| MAMMA1001110 | F-MAMMA1001110 | 0.78 |
| MAMMA1001126 | F-MAMMA1001126 | 0.85 |
| MAMMA1001139 | F-MAMMA1001139 | 0.38 |
| MAMMA1001143 | F-MAMMA1001143 | 0.79 |
| MAMMA1001154 | F-MAMMA1001154 | 0.31 |
| MAMMA1001181 | F-MAMMA1001181 | 0.69 |
| MAMMA1001198 | F-MAMMA1001198 | 0.88 |
| MAMMA1001202 | F-MAMMA1001202 | 0.38 |
| MAMMA1001215 | F-MAMMA1001215 | 0.94 |
| MAMMA1001222 | F-MAMMA1001222 | 0.89 |
| MAMMA1001244 | F-MAMMA1001244 | 0.87 |
| MAMMA1001259 | F-MAMMA1001259 | 0.91 |
| MAMMA1001260 | F-MAMMA1001260 | 0.75 |
| MAMMA1001271 | F-MAMMA1001271 | 0.77 |
| MAMMA1001292 | F-MAMMA1001292 | 0.94 |
| MAMMA1001296 | F-MAMMA1001296 | 0.75 |
| MAMMA1001305 | F-MAMMA1001305 | 0.66 |
| MAMMA1001343 | F-MAMMA1001343 | 0.38 |
| MAMMA1001346 | F-MAMMA1001346 | 0.81 |
| MAMMA1001388 | F-MAMMA1001388 | 0.94 |
| MAMMA1001411 | F-MAMMA1001411 | 0.42 |
| MAMMA1001419 | F-MAMMA1001419 | 0.45 |
| MAMMA1001465 | F-MAMMA1001465 | 0.94 |
| MAMMA1001476 | F-MAMMA1001476 | 0.90 |
| MAMMA1001487 | F-MAMMA1001487 | 0.78 |
| MAMMA1001510 | F-MAMMA1001510 | 0.82 |
| MAMMA1001522 | F-MAMMA1001522 | 0.63 |
| MAMMA1001551 | F-MAMMA1001551 | 0.81 |
| MAMMA1001576 | F-MAMMA1001576 | 0.94 |
| MAMMA1001600 | F-MAMMA1001600 | 0.72 |
| MAMMA1001604 | F-MAMMA1001604 | 0.87 |
| MAMMA1001620 | F-MAMMA1001620 | 0.43 |
| MAMMA1001627 | F-MAMMA1001627 | 0.39 |
| MAMMA1001630 | F-MAMMA1001630 | 0.46 |
| MAMMA1001633 | F-MAMMA1001633 | 0.58 |
| MAMMA1001635 | F-MAMMA1001635 | 0.89 |
| MAMMA1001649 | F-MAMMA1001649 | 0.62 |
| MAMMA1001654 | F-MAMMA1001654 | 0.94 |
| MAMMA1001692 | F-MAMMA1001692 | 0.83 |
| MAMMA1001730 | F-MAMMA1001730 | 0.48 |
| MAMMA1001735 | F-MAMMA1001735 | 0.94 |
| MAMMA1001743 | F-MAMMA1001743 | 0.94 |
| MAMMA1001744 | F-MAMMA1001744 | 0.33 |
| MAMMA1001751 | F-MAMMA1001751 | 0.94 |
| MAMMA1001754 | F-MAMMA1001754 | 0.47 |
| MAMMA1001757 | F-MAMMA1001757 | 0.38 |
| MAMMA1001764 | F-MAMMA1001764 | 0.57 |
| MAMMA1001768 | F-MAMMA1001768 | 0.85 |
| MAMMA1001771 | F-MAMMA1001771 | 0.39 |
| MAMMA1001783 | F-MAMMA1001783 | 0.61 |
| MAMMA1001785 | F-MAMMA1001785 | 0.41 |
| MAMMA1001790 | F-MAMMA1001790 | 0.69 |
| MAMMA1001812 | F-MAMMA1001812 | 0.32 |
| MAMMA1001817 | F-MAMMA1001817 | 0.55 |
| MAMMA1001824 | F-MAMMA1001824 | 0.57 |
| MAMMA1001837 | F-MAMMA1001837 | 0.35 |
| MAMMA1001848 | F-MAMMA1001848 | 0.38 |
| MAMMA1001851 | F-MAMMA1001851 | 0.46 |
| MAMMA1001858 | F-MAMMA1001858 | 0.53 |
| MAMMA1001864 | F-MAMMA1001864 | 0.32 |
| MAMMA1001868 | F-MAMMA1001868 | 0.48 |
| MAMMA1001874 | F-MAMMA1001874 | 0.94 |
| MAMMA1001956 | F-MAMMA1001956 | 0.47 |
| MAMMA1001969 | F-MAMMA1001969 | 0.31 |
| MAMMA1001970 | F-MAMMA1001970 | 0.34 |
| MAMMA1002009 | F-MAMMA1002009 | 0.45 |
| MAMMA1002011 | F-MAMMA1002011 | 0.94 |
| MAMMA1002033 | F-MAMMA1002033 | 0.33 |
| MAMMA1002041 | F-MAMMA1002041 | 0.86 |
| MAMMA1002042 | F-MAMMA1002042 | 0.88 |
| MAMMA1002047 | F-MAMMA1002047 | 0.41 |
| MAMMA1002068 | F-MAMMA1002068 | 0.38 |
| MAMMA1002143 | F-MAMMA1002143 | 0.91 |
| MAMMA1002153 | F-MAMMA1002153 | 0.94 |
| MAMMA1002156 | F-MAMMA1002156 | 0.73 |
| MAMMA1002170 | F-MAMMA1002170 | 0.43 |
| MAMMA1002174 | F-MAMMA1002174 | 0.69 |
| MAMMA1002198 | F-MAMMA1002198 | 0.65 |
| MAMMA1002209 | F-MAMMA1002209 | 0.80 |
| MAMMA1002219 | F-MAMMA1002219 | 0.85 |
| MAMMA1002236 | F-MAMMA1002236 | 0.55 |
| MAMMA1002243 | F-MAMMA1002243 | 0.50 |
| MAMMA1002268 | F-MAMMA1002268 | 0.43 |
| MAMMA1002269 | F-MAMMA1002269 | 0.33 |
| MAMMA1002292 | F-MAMMA1002292 | 0.76 |
| MAMMA1002294 | F-MAMMA1002294 | 0.94 |
| MAMMA1002297 | F-MAMMA1002297 | 0.91 |
| MAMMA1002308 | F-MAMMA1002308 | 0.68 |
| MAMMA1002312 | F-MAMMA1002312 | 0.77 |
| MAMMA1002317 | F-MAMMA1002317 | 0.46 |
| MAMMA1002319 | F-MAMMA1002319 | 0.31 |
| MAMMA1002329 | F-MAMMA1002329 | 0.34 |
| MAMMA1002333 | F-MAMMA1002333 | 0.65 |
| MAMMA1002351 | F-MAMMA1002351 | 0.89 |
| MAMMA1002353 | F-MAMMA1002353 | 0.94 |
| MAMMA1002355 | F-MAMMA1002355 | 0.55 |
| MAMMA1002356 | F-MAMMA1002356 | 0.32 |
| MAMMA1002362 | F-MAMMA1002362 | 0.83 |
| MAMMA1002380 | F-MAMMA1002380 | 0.94 |
| MAMMA1002384 | F-MAMMA1002384 | 0.42 |
| MAMMA1002385 | F-MAMMA1002385 | 0.82 |
| MAMMA1002413 | F-MAMMA1002413 | 0.94 |
| MAMMA1002427 | F-MAMMA1002427 | 0.40 |
| MAMMA1002434 | F-MAMMA1002434 | 0.74 |
| MAMMA1002454 | F-MAMMA1002454 | 0.82 |
| MAMMA1002461 | F-MAMMA1002461 | 0.49 |
| MAMMA1002470 | F-MAMMA1002470 | 0.89 |
| MAMMA1002485 | F-MAMMA1002485 | 0.55 |
| MAMMA1002524 | F-MAMMA1002524 | 0.33 |
| MAMMA1002530 | F-MAMMA1002530 | 0.75 |
| MAMMA1002554 | F-MAMMA1002554 | 0.41 |
| MAMMA1002585 | F-MAMMA1002585 | 0.31 |
| MAMMA1002590 | F-MAMMA1002590 | 0.72 |
| MAMMA1002598 | F-MAMMA1002598 | 0.76 |
| MAMMA1002617 | F-MAMMA1002617 | 0.49 |
| MAMMA1002619 | F-MAMMA1002619 | 0.88 |
| MAMMA1002637 | F-MAMMA1002637 | 0.94 |
| MAMMA1002650 | F-MAMMA1002650 | 0.54 |
| MAMMA1002655 | F-MAMMA1002655 | 0.39 |
| MAMMA1002665 | F-MAMMA1002665 | 0.33 |
| MAMMA1002671 | F-MAMMA1002671 | 0.94 |
| MAMMA1002673 | F-MAMMA1002673 | 0.70 |
| MAMMA1002684 | F-MAMMA1002684 | 0.94 |
| MAMMA1002685 | F-MAMMA1002685 | 0.88 |
| MAMMA1002699 | F-MAMMA1002699 | 0.94 |
| MAMMA1002711 | F-MAMMA1002711 | 0.39 |
| MAMMA1002769 | F-MAMMA1002769 | 0.88 |
| MAMMA1002775 | F-MAMMA1002775 | 0.81 |
| MAMMA1002782 | F-MAMMA1002782 | 0.87 |
| MAMMA1002796 | F-MAMMA1002796 | 0.40 |
| MAMMA1002807 | F-MAMMA1002807 | 0.64 |
| MAMMA1002842 | F-MAMMA1002842 | 0.94 |
| MAMMA1002843 | F-MAMMA1002843 | 0.32 |
| MAMMA1002868 | F-MAMMA1002868 | 0.54 |
| MAMMA1002869 | F-MAMMA1002869 | 0.94 |
| MAMMA1002881 | F-MAMMA1002881 | 0.94 |
| MAMMA1002886 | F-MAMMA1002886 | 0.61 |
| MAMMA1002890 | F-MAMMA1002890 | 0.94 |
| MAMMA1002895 | F-MAMMA1002895 | 0.94 |
| MAMMA1002937 | F-MAMMA1002937 | 0.91 |
| MAMMA1002938 | F-MAMMA1002938 | 0.78 |
| MAMMA1002947 | F-MAMMA1002947 | 0.94 |
| MAMMA1002964 | F-MAMMA1002964 | 0.34 |
| MAMMA1002987 | F-MAMMA1002987 | 0.74 |
| MAMMA1003011 | F-MAMMA1003011 | 0.90 |
| MAMMA1003013 | F-MAMMA1003013 | 0.36 |
| MAMMA1003015 | F-MAMMA1003015 | 0.92 |
| MAMMA1003035 | F-MAMMA1003035 | 0.94 |
| MAMMA1003044 | F-MAMMA1003044 | 0.61 |
| MAMMA1003047 | F-MAMMA1003047 | 0.94 |
| MAMMA1003049 | F-MAMMA1003049 | 0.31 |
| MAMMA1003056 | F-MAMMA1003056 | 0.75 |
| MAMMA1003057 | F-MAMMA1003057 | 0.33 |
| MAMMA1003066 | F-MAMMA1003066 | 0.38 |
| MAMMA1003099 | F-MAMMA1003099 | 0.79 |
| MAMMA1003104 | F-MAMMA1003104 | 0.44 |
| MAMMA1003113 | F-MAMMA1003113 | 0.90 |
| MAMMA1003127 | F-MAMMA1003127 | 0.53 |
| MAMMA1003135 | F-MAMMA1003135 | 0.94 |
| MAMMA1003146 | F-MAMMA1003146 | 0.88 |
| MAMMA1003150 | F-MAMMA1003150 | 0.73 |
| MAMMA1003166 | F-MAMMA1003166 | 0.94 |
| NT2RM1000001 | F-NT2RM1000001 | 0.66 |
| NT2RM1000018 | F-NT2RM1000018 | 0.55 |
| NT2RM1000032 | F-NT2RM1000032 | 0.74 |
| NT2RM1000035 | F-NT2RM1000035 | 0.52 |
| NT2RM1000037 | F-NT2RM1000037 | 0.94 |
| NT2RM1000039 | F-NT2RM1000039 | 0.77 |
| NT2RM1000055 | F-NT2RM1000055 | 0.89 |
| NT2RM1000059 | F-NT2RM1000059 | 0.41 |
| NT2RM1000062 | F-NT2RM1000062 | 0.65 |
| NT2RM1000080 | F-NT2RM1000080 | 0.61 |
| NT2RM1000086 | F-NT2RM1000086 | 0.94 |
| NT2RM1000092 | F-NT2RM1000092 | 0.94 |
| NT2RM1000118 | F-NT2RM1000118 | 0.76 |
| NT2RM1000119 | F-NT2RM1000119 | 0.41 |
| NT2RM1000127 | F-NT2RM1000127 | 0.94 |
| NT2RM1000131 | F-NT2RM1000131 | 0.90 |
| NT2RM1000132 | F-NT2RM1000132 | 0.94 |
| NT2RM1000153 | F-NT2RM1000153 | 0.90 |
| NT2RM1000186 | F-NT2RM1000186 | 0.78 |
| NT2RM1000187 | F-NT2RM1000187 | 0.54 |
| NT2RM1000199 | F-NT2RM1000199 | 0.33 |
| NT2RM1000242 | F-NT2RM1000242 | 0.78 |
| NT2RM1000244 | F-NT2RM1000244 | 0.31 |
| NT2RM1000252 | F-NT2RM1000252 | 0.76 |
| NT2RM1000256 | F-NT2RM1000256 | 0.94 |
| NT2RM1000257 | F-NT2RM1000257 | 0.89 |
| NT2RM1000260 | F-NT2RM1000260 | 0.42 |
| NT2RM1000271 | F-NT2RM1000271 | 0.74 |
| NT2RM1000272 | F-NT2RM1000272 | 0.78 |
| NT2RM1000280 | F-NT2RM1000280 | 0.94 |
| NT2RM1000300 | F-NT2RM1000300 | 0.47 |
| NT2RM1000314 | F-NT2RM1000314 | 0.61 |
| NT2RM1000318 | F-NT2RM1000318 | 0.94 |
| NT2RM1000341 | F-NT2RM1000341 | 0.70 |
| NT2RM1000354 | F-NT2RM1000354 | 0.82 |
| NT2RM1000355 | F-NT2RM1000355 | 0.94 |
| NT2RM1000365 | F-NT2RM1000365 | 0.31 |
| NT2RM1000377 | F-NT2RM1000377 | 0.87 |
| NT2RM1000388 | F-NT2RM1000388 | 0.94 |
| NT2RM1000394 | F-NT2RM1000394 | 0.58 |
| NT2RM1000399 | F-NT2RM1000399 | 0.86 |
| NT2RM1000421 | F-NT2RM1000421 | 0.39 |
| NT2RM1000430 | F-NT2RM1000430 | 0.94 |
| NT2RM1000499 | F-NT2RM1000499 | 0.44 |
| NT2RM1000539 | F-NT2RM1000539 | 0.87 |
| NT2RM1000553 | F-NT2RM1000553 | 0.88 |
| NT2RM1000555 | F-NT2RM1000555 | 0.37 |
| NT2RM1000563 | F-NT2RM1000563 | 0.63 |
| NT2RM1000623 | F-NT2RM1000623 | 0.34 |
| NT2RM1000648 | F-NT2RM1000648 | 0.94 |
| NT2RM1000661 | F-NT2RM1000661 | 0.61 |
| NT2RM1000666 | F-NT2RM1000666 | 0.94 |
| NT2RM1000669 | F-NT2RM1000669 | 0.94 |
| NT2RM1000672 | F-NT2RM1000672 | 0.53 |
| NT2RM1000691 | F-NT2RM1000691 | 0.38 |
| NT2RM1000699 | F-NT2RM1000699 | 0.32 |
| NT2RM1000702 | F-NT2RM1000702 | 0.74 |
| NT2RM1000725 | F-NT2RM1000725 | 0.75 |
| NT2RM1000741 | F-NT2RM1000741 | 0.94 |
| NT2RM1000742 | F-NT2RM1000742 | 0.54 |
| NT2RM1000746 | F-NT2RM1000746 | 0.94 |
| NT2RM1000770 | F-NT2RM1000770 | 0.48 |
| NT2RM1000772 | F-NT2RM1000772 | 0.39 |
| NT2RM1000780 | F-NT2RM1000780 | 0.66 |
| NT2RM1000781 | F-NT2RM1000781 | 0.49 |
| NT2RM1000800 | F-NT2RM1000800 | 0.72 |
| NT2RM1000802 | F-NT2RM1000802 | 0.89 |
| NT2RM1000811 | F-NT2RM1000811 | 0.53 |
| NT2RM1000826 | F-NT2RM1000826 | 0.39 |
| NT2RM1000829 | F-NT2RM1000829 | 0.63 |
| NT2RM1000833 | F-NT2RM1000833 | 0.94 |
| NT2RM1000850 | F-NT2RM1000850 | 0.89 |
| NT2RM1000852 | F-NT2RM1000852 | 0.88 |
| NT2RM1000857 | F-NT2RM1000857 | 0.58 |
| NT2RM1000867 | F-NT2RM1000867 | 0.90 |
| NT2RM1000874 | F-NT2RM1000874 | 0.89 |
| NT2RM1000882 | F-NT2RM1000882 | 0.63 |
| NT2RM1000883 | F-NT2RM1000883 | 0.71 |
| NT2RM1000885 | F-NT2RM1000885 | 0.89 |
| NT2RM1000894 | F-NT2RM1000894 | 0.57 |
| NT2RM1000898 | F-NT2RM1000898 | 0.87 |
| NT2RM1000905 | F-NT2RM1000905 | 0.94 |
| NT2RM1000924 | F-NT2RM1000924 | 0.88 |
| NT2RM1000927 | F-NT2RM1000927 | 0.70 |
| NT2RM1000962 | F-NT2RM1000962 | 0.84 |
| NT2RM1000978 | F-NT2RM1000978 | 0.39 |
| NT2RM1001003 | F-NT2RM1001003 | 0.81 |
| NT2RM1001008 | F-NT2RM1001008 | 0.94 |
| NT2RM1001043 | F-NT2RM1001043 | 0.94 |
| NT2RM1001044 | F-NT2RM1001044 | 0.94 |
| NT2RM1001059 | F-NT2RM1001059 | 0.94 |
| NT2RM1001066 | F-NT2RM1001066 | 0.94 |
| NT2RM1001072 | F-NT2RM1001072 | 0.77 |
| NT2RM1001074 | F-NT2RM1001074 | 0.94 |
| NT2RM1001082 | F-NT2RM1001082 | 0.94 |
| NT2RM1001085 | F-NT2RM1001085 | 0.83 |
| NT2RM1001092 | F-NT2RM1001092 | 0.77 |
| NT2RM1001102 | F-NT2RM1001102 | 0.59 |
| NT2RM1001105 | F-NT2RM1001105 | 0.94 |
| NT2RM1001112 | F-NT2RM1001112 | 0.50 |
| NT2RM1001115 | F-NT2RM1001115 | 0.32 |
| NT2RM1001139 | F-NT2RM1001139 | 0.77 |
| NT2RM2000006 | F-NT2RM2000006 | 0.34 |
| NT2RM2000013 | F-NT2RM2000013 | 0.70 |
| NT2RM2000030 | F-NT2RM2000030 | 0.89 |
| NT2RM2000032 | F-NT2RM2000032 | 0.36 |
| NT2RM2000042 | F-NT2RM2000042 | 0.32 |
| NT2RM2000092 | F-NT2RM2000092 | 0.55 |
| NT2RM2000093 | F-NT2RM2000093 | 0.33 |
| NT2RM2000101 | F-NT2RM2000101 | 0.77 |
| NT2RM2000124 | F-NT2RM2000124 | 0.94 |
| NT2RM2000191 | F-NT2RM2000191 | 0.80 |
| NT2RM2000192 | F-NT2RM2000192 | 0.93 |
| NT2RM2000239 | F-NT2RM2000239 | 0.68 |
| NNNNNNNNNNNN | F-NNNNNNNNNNNN | 0.94 |
| NT2RM2000250 | F-NT2RM2000250 | 0.94 |
| NT2RM2000259 | F-NT2RM2000259 | 0.68 |
| NT2RM2000260 | F-NT2RM2000260 | 0.37 |
| NT2RM2000287 | F-NT2RM2000287 | 0.46 |
| NT2RM2000322 | F-NT2RM2000322 | 0.83 |
| NT2RM2000359 | F-NT2RM2000359 | 0.94 |
| NT2RM2000363 | F-NT2RM2000363 | 0.91 |
| NT2RM2000368 | F-NT2RM2000368 | 0.34 |
| NT2RM2000371 | F-NT2RM2000371 | 0.94 |
| NT2RM2000374 | F-NT2RM2000374 | 0.65 |
| NT2RM2000395 | F-NT2RM2000395 | 0.33 |
| NT2RM2000402 | F-NT2RM2000402 | 0.80 |
| NT2RM2000407 | F-NT2RM2000407 | 0.88 |
| NT2RM2000420 | F-NT2RM2000420 | 0.92 |
| NT2RM2000422 | F-NT2RM2000422 | 0.49 |
| NT2RM2000452 | F-NT2RM2000452 | 0.93 |
| NT2RM2000469 | F-NT2RM2000469 | 0.39 |
| NT2RM2000490 | F-NT2RM2000490 | 0.90 |
| NT2RM2000502 | F-NT2RM2000502 | 0.64 |
| NT2RM2000504 | F-NT2RM2000504 | 0.71 |
| NT2RM2000522 | F-NT2RM2000522 | 0.91 |
| NT2RM2000540 | F-NT2RM2000540 | 0.87 |
| NT2RM2000556 | F-NT2RM2000556 | 0.91 |
| NT2RM2000566 | F-NT2RM2000566 | 0.39 |
| NT2RM2000567 | F-NT2RM2000567 | 0.44 |
| NT2RM2000569 | F-NT2RM2000569 | 0.49 |
| NT2RM2000577 | F-NT2RM2000577 | 0.45 |
| NT2RM2000581 | F-NT2RM2000581 | 0.72 |
| NT2RM2000588 | F-NT2RM2000588 | 0.31 |
| NT2RM2000594 | F-NT2RM2000594 | 0.79 |
| NT2RM2000599 | F-NT2RM2000599 | 0.80 |
| NT2RM2000612 | F-NT2RM2000612 | 0.75 |
| NT2RM2000623 | F-NT2RM2000623 | 0.72 |
| NT2RM2000624 | F-NT2RM2000624 | 0.94 |
| NT2RM2000635 | F-NT2RM2000635 | 0.73 |
| NT2RM2000636 | F-NT2RM2000636 | 0.45 |
| NT2RM2000639 | F-NT2RM2000639 | 0.43 |
| NT2RM2000649 | F-NT2RM2000649 | 0.74 |
| NT2RM2000669 | F-NT2RM2000669 | 0.94 |
| NT2RM2000691 | F-NT2RM2000691 | 0.84 |
| NT2RM2000714 | F-NT2RM2000714 | 0.92 |
| NT2RM2000718 | F-NT2RM2000718 | 0.52 |
| NT2RM2000735 | F-NT2RM2000735 | 0.33 |
| NT2RM2000740 | F-NT2RM2000740 | 0.94 |
| NT2RM2000795 | F-NT2RM2000795 | 0.44 |
| NT2RM2000821 | F-NT2RM2000821 | 0.33 |
| NT2RM2000837 | F-NT2RM2000837 | 0.57 |
| NT2RM2000951 | F-NT2RM2000951 | 0.32 |
| NT2RM2000952 | F-NT2RM2000952 | 0.50 |
| NT2RM2000984 | F-NT2RM2000984 | 0.76 |
| NT2RM2001004 | F-NT2RM2001004 | 0.55 |
| NT2RM2001035 | F-NT2RM2001035 | 0.82 |
| NT2RM2001065 | F-NT2RM2001065 | 0.65 |
| NT2RM2001100 | F-NT2RM2001100 | 0.89 |
| NT2RM2001105 | F-NT2RM2001105 | 0.94 |
| NT2RM2001131 | F-NT2RM2001131 | 0.94 |
| NT2RM2001141 | F-NT2RM2001141 | 0.74 |
| NT2RM2001152 | F-NT2RM2001152 | 0.33 |
| NT2RM2001177 | F-NT2RM2001177 | 0.32 |
| NT2RM2001194 | F-NT2RM2001194 | 0.83 |
| NT2RM2001196 | F-NT2RM2001196 | 0.42 |
| NT2RM2001201 | F-NT2RM2001201 | 0.90 |
| NT2RM2001221 | F-NT2RM2001221 | 0.39 |
| NT2RM2001238 | F-NT2RM2001238 | 0.94 |
| NT2RM2001243 | F-NT2RM2001243 | 0.44 |
| NT2RM2001247 | F-NT2RM2001247 | 0.42 |
| NT2RM2001256 | F-NT2RM2001256 | 0.60 |
| NT2RM2001291 | F-NT2RM2001291 | 0.39 |
| NT2RM2001306 | F-NT2RM2001306 | 0.81 |
| NT2RM2001312 | F-NT2RM2001312 | 0.64 |
| NT2RM2001319 | F-NT2RM2001319 | 0.53 |
| NT2RM2001324 | F-NT2RM2001324 | 0.94 |
| NT2RM2001345 | F-NT2RM2001345 | 0.94 |
| NT2RM2001360 | F-NT2RM2001360 | 0.69 |
| NT2RM2001370 | F-NT2RM2001370 | 0.44 |
| NT2RM2001393 | F-NT2RM2001393 | 0.94 |
| NT2RM2001420 | F-NT2RM2001420 | 0.46 |
| NT2RM2001424 | F-NT2RM2001424 | 0.94 |
| NT2RM2001499 | F-NT2RM2001499 | 0.63 |
| NT2RM2001504 | F-NT2RM2001504 | 0.94 |
| NT2RM2001524 | F-NT2RM2001524 | 0.76 |
| NT2RM2001544 | F-NT2RM2001544 | 0.59 |
| NT2RM2001547 | F-NT2RM2001547 | 0.48 |
| NT2RM2001575 | F-NT2RM2001575 | 0.91 |
| NT2RM2001582 | F-NT2RM2001582 | 0.34 |
| NT2RM2001588 | F-NT2RM2001588 | 0.48 |
| NT2RM2001592 | F-NT2RM2001592 | 0.64 |
| NT2RM2001605 | F-NT2RM2001605 | 0.47 |
| NT2RM2001613 | F-NT2RM2001613 | 0.61 |
| NT2RM2001632 | F-NT2RM2001632 | 0.31 |
| NT2RM2001635 | F-NT2RM2001635 | 0.39 |
| NT2RM2001637 | F-NT2RM2001637 | 0.71 |
| NT2RM2001641 | F-NT2RM2001641 | 0.73 |
| NT2RM2001648 | F-NT2RM2001648 | 0.44 |
| NT2RM2001652 | F-NT2RM2001652 | 0.40 |
| NT2RM2001659 | F-NT2RM2001659 | 0.35 |
| NT2RM2001664 | F-NT2RM2001664 | 0.53 |
| NT2RM2001668 | F-NT2RM2001668 | 0.64 |
| NT2RM2001670 | F-NT2RM2001670 | 0.59 |
| NT2RM2001671 | F-NT2RM2001671 | 0.41 |
| NT2RM2001675 | F-NT2RM2001675 | 0.51 |
| NT2RM2001681 | F-NT2RM2001681 | 0.33 |
| NT2RM2001688 | F-NT2RM2001688 | 0.74 |
| NT2RM2001695 | F-NT2RM2001695 | 0.31 |
| NT2RM2001696 | F-NT2RM2001696 | 0.94 |
| NT2RM2001698 | F-NT2RM2001698 | 0.69 |
| NT2RM2001699 | F-NT2RM2001699 | 0.85 |
| NT2RM2001700 | F-NT2RM2001700 | 0.71 |
| NT2RM2001706 | F-NT2RM2001706 | 0.38 |
| NT2RM2001716 | F-NT2RM2001716 | 0.78 |
| NT2RM2001718 | F-NT2RM2001718 | 0.81 |
| NT2RM2001723 | F-NT2RM2001723 | 0.83 |
| NT2RM2001727 | F-NT2RM2001727 | 0.87 |
| NT2RM2001730 | F-NT2RM2001730 | 0.94 |
| NT2RM2001743 | F-NT2RM2001743 | 0.94 |
| NT2RM2001753 | F-NT2RM2001753 | 0.75 |
| NT2RM2001760 | F-NT2RM2001760 | 0.75 |
| NT2RM2001768 | F-NT2RM2001768 | 0.71 |
| NT2RM2001771 | F-NT2RM2001771 | 0.33 |
| NT2RM2001782 | F-NT2RM2001782 | 0.34 |
| NT2RM2001784 | F-NT2RM2001784 | 0.45 |
| NT2RM2001785 | F-NT2RM2001785 | 0.94 |
| NT2RM2001797 | F-NT2RM2001797 | 0.74 |
| NT2RM2001800 | F-NT2RM2001800 | 0.90 |
| NT2RM2001803 | F-NT2RM2001803 | 0.36 |
| NT2RM2001805 | F-NT2RM2001805 | 0.81 |
| NT2RM2001813 | F-NT2RM2001813 | 0.94 |
| NT2RM2001823 | F-NT2RM2001823 | 0.94 |
| NT2RM2001839 | F-NT2RM2001839 | 0.39 |
| NT2RM2001840 | F-NT2RM2001840 | 0.94 |
| NT2RM2001855 | F-NT2RM2001855 | 0.92 |
| NT2RM2001867 | F-NT2RM2001867 | 0.82 |
| NT2RM2001879 | F-NT2RM2001879 | 0.86 |
| NT2RM2001886 | F-NT2RM2001886 | 0.91 |
| NT2RM2001896 | F-NT2RM2001896 | 0.94 |
| NT2RM2001903 | F-NT2RM2001903 | 0.61 |
| NT2RM2001930 | F-NT2RM2001930 | 0.94 |
| NT2RM2001935 | F-NT2RM2001935 | 0.77 |
| NT2RM2001936 | F-NT2RM2001936 | 0.94 |
| NT2RM2001950 | F-NT2RM2001950 | 0.34 |
| NT2RM2001982 | F-NT2RM2001982 | 0.48 |
| NT2RM2001983 | F-NT2RM2001983 | 0.59 |
| NT2RM2001989 | F-NT2RM2001989 | 0.94 |
| NT2RM2001997 | F-NT2RM2001997 | 0.90 |
| NT2RM2001998 | F-NT2RM2001998 | 0.72 |
| NT2RM2002004 | F-NT2RM2002004 | 0.46 |
| NT2RM2002014 | F-NT2RM2002014 | 0.32 |
| NT2RM2002030 | F-NT2RM2002030 | 0.54 |
| NT2RM2002049 | F-NT2RM2002049 | 0.59 |
| NT2RM2002055 | F-NT2RM2002055 | 0.94 |
| NT2RM2002088 | F-NT2RM2002088 | 0.47 |
| NT2RM2002091 | F-NT2RM2002091 | 0.78 |
| NT2RM2002100 | F-NT2RM2002100 | 0.87 |
| NT2RM2002109 | F-NT2RM2002109 | 0.86 |
| NT2RM2002128 | F-NT2RM2002128 | 0.42 |
| NT2RM2002142 | F-NT2RM2002142 | 0.94 |
| NT2RM2002145 | F-NT2RM2002145 | 0.94 |
| NT2RM2002178 | F-NT2RM2002178 | 0.44 |
| NT2RM2002580 | F-NT2RM2002580 | 0.94 |
| NT2RM4000024 | F-NT2RM4000024 | 0.76 |
| NT2RM4000027 | F-NT2RM4000027 | 0.40 |
| NT2RM4000030 | F-NT2RM4000030 | 0.66 |
| NT2RM4000061 | F-NT2RM4000061 | 0.33 |
| NT2RM4000104 | F-NT2RM4000104 | 0.93 |
| NT2RM4000139 | F-NT2RM4000139 | 0.87 |
| NT2RM4000155 | F-NT2RM4000155 | 0.51 |
| NT2RM4000156 | F-NT2RM4000156 | 0.39 |
| NT2RM4000167 | F-NT2RM4000167 | 0.50 |
| NT2RM4000169 | F-NT2RM4000169 | 0.44 |
| NT2RM4000191 | F-NT2RM4000191 | 0.94 |
| NT2RM4000197 | F-NT2RM4000197 | 0.41 |
| NT2RM4000199 | F-NT2RM4000199 | 0.76 |
| NT2RM4000202 | F-NT2RM4000202 | 0.47 |
| NT2RM4000210 | F-NT2RM4000210 | 0.44 |
| NT2RM4000215 | F-NT2RM4000215 | 0.94 |
| NT2RM4000229 | F-NT2RM4000229 | 0.93 |
| NT2RM4000233 | F-NT2RM4000233 | 0.74 |
| NT2RM4000251 | F-NT2RM4000251 | 0.48 |
| NT2RM4000290 | F-NT2RM4000290 | 0.94 |
| NT2RM4000324 | F-NT2RM4000324 | 0.32 |
| NT2RM4000344 | F-NT2RM4000344 | 0.94 |
| NT2RM4000349 | F-NT2RM4000349 | 0.78 |
| NT2RM4000354 | F-NT2RM4000354 | 0.36 |
| NT2RM4000356 | F-NT2RM4000356 | 0.58 |
| NT2RM4000386 | F-NT2RM4000386 | 0.90 |
| NT2RM4000395 | F-NT2RM4000395 | 0.47 |
| NT2RM4000421 | F-NT2RM4000421 | 0.46 |
| NT2RM4000433 | F-NT2RM4000433 | 0.48 |
| NT2RM4000457 | F-NT2RM4000457 | 0.75 |
| NT2RM4000471 | F-NT2RM4000471 | 0.92 |
| NT2RM4000486 | F-NT2RM4000486 | 0.55 |
| NT2RM4000496 | F-NT2RM4000496 | 0.62 |
| NT2RM4000511 | F-NT2RM4000511 | 0.74 |
| NT2RM4000514 | F-NT2RM4000514 | 0.72 |
| NT2RM4000515 | F-NT2RM4000515 | 0.66 |
| NT2RM4000520 | F-NT2RM4000520 | 0.69 |
| NT2RM4000531 | F-NT2RM4000531 | 0.62 |
| NT2RM4000534 | F-NT2RM4000534 | 0.94 |
| NT2RM4000585 | F-NT2RM4000585 | 0.52 |
| NT2RM4000590 | F-NT2RM4000590 | 0.94 |
| NT2RM4000595 | F-NT2RM4000595 | 0.44 |
| NT2RM4000603 | F-NT2RM4000603 | 0.94 |
| NT2RM4000611 | F-NT2RM4000611 | 0.46 |
| NT2RM4000616 | F-NT2RM4000616 | 0.94 |
| NT2RM4000674 | F-NT2RM4000674 | 0.80 |
| NT2RM4000689 | F-NT2RM4000689 | 0.58 |
| NT2RM4000698 | F-NT2RM4000698 | 0.71 |
| NT2RM4000700 | F-NT2RM4000700 | 0.59 |
| NT2RM4000712 | F-NT2RM4000712 | 0.94 |
| NT2RM4000717 | F-NT2RM4000717 | 0.69 |
| NT2RM4000733 | F-NT2RM4000733 | 0.94 |
| NT2RM4000734 | F-NT2RM4000734 | 0.42 |
| NT2RM4000741 | F-NT2RM4000741 | 0.83 |
| NT2RM4000751 | F-NT2RM4000751 | 0.91 |
| NT2RM4000764 | F-NT2RM4000764 | 0.35 |
| NT2RM4000778 | F-NT2RM4000778 | 0.90 |
| NT2RM4000787 | F-NT2RM4000787 | 0.40 |
| NT2RM4000790 | F-NT2RM4000790 | 0.62 |
| NT2RM4000795 | F-NT2RM4000795 | 0.94 |
| NT2RM4000796 | F-NT2RM4000796 | 0.93 |
| NT2RM4000798 | F-NT2RM4000798 | 0.61 |
| NT2RM4000813 | F-NT2RM4000813 | 0.58 |
| NT2RM4000820 | F-NT2RM4000820 | 0.39 |
| NT2RM4000833 | F-NT2RM4000833 | 0.80 |
| NT2RM4000848 | F-NT2RM4000848 | 0.73 |
| NT2RM4000852 | F-NT2RM4000852 | 0.74 |
| NT2RM4000887 | F-NT2RM4000887 | 0.42 |
| NT2RM4000895 | F-NT2RM4000895 | 0.47 |
| NT2RM4000950 | F-NT2RM4000950 | 0.53 |
| NT2RM4000971 | F-NT2RM4000971 | 0.73 |
| NT2RM4000996 | F-NT2RM4000996 | 0.42 |
| NT2RM4001002 | F-NT2RM4001002 | 0.57 |
| NT2RM4001032 | F-NT2RM4001032 | 0.94 |
| NT2RM4001047 | F-NT2RM4001047 | 0.76 |
| NT2RM4001054 | F-NT2RM4001054 | 0.91 |
| NT2RM4001084 | F-NT2RM4001084 | 0.94 |
| NT2RM4001092 | F-NT2RM4001092 | 0.94 |
| NT2RM4001116 | F-NT2RM4001116 | 0.36 |
| NT2RM4001140 | F-NT2RM4001140 | 0.82 |
| NT2RM4001151 | F-NT2RM4001151 | 0.94 |
| NT2RM4001155 | F-NT2RM4001155 | 0.94 |
| NT2RM4001187 | F-NT2RM4001187 | 0.61 |
| NT2RM4001191 | F-NT2RM4001191 | 0.77 |
| NT2RM4001200 | F-NT2RM4001200 | 0.72 |
| NT2RM4001203 | F-NT2RM4001203 | 0.60 |
| NT2RM4001204 | F-NT2RM4001204 | 0.89 |
| NT2RM4001217 | F-NT2RM4001217 | 0.93 |
| NT2RM4001256 | F-NT2RM4001256 | 0.89 |
| NT2RM4001258 | F-NT2RM4001258 | 0.94 |
| NT2RM4001309 | F-NT2RM4001309 | 0.88 |
| NT2RM4001316 | F-NT2RM4001316 | 0.38 |
| NT2RM4001320 | F-NT2RM4001320 | 0.33 |
| NT2RM4001340 | F-NT2RM4001340 | 0.83 |
| NT2RM4001344 | F-NT2RM4001344 | 0.94 |
| NT2RM4001347 | F-NT2RM4001347 | 0.88 |
| NT2RM4001371 | F-NT2RM4001371 | 0.61 |
| NT2RM4001382 | F-NT2RM4001382 | 0.93 |
| NT2RM4001384 | F-NT2RM4001384 | 0.32 |
| NT2RM4001410 | F-NT2RM4001410 | 0.94 |
| NT2RM4001411 | F-NT2RM4001411 | 0.47 |
| NT2RM4001412 | F-NT2RM4001412 | 0.85 |
| NT2RM4001444 | F-NT2RM4001444 | 0.94 |
| NT2RM4001454 | F-NT2RM4001454 | 0.72 |
| NT2RM4001455 | F-NT2RM4001455 | 0.39 |
| NT2RM4001483 | F-NT2RM4001483 | 0.76 |
| NT2RM4001489 | F-NT2RM4001489 | 0.94 |
| NT2RM4001522 | F-NT2RM4001522 | 0.88 |
| NT2RM4001565 | F-NT2RM4001565 | 0.78 |
| NT2RM4001566 | F-NT2RM4001566 | 0.87 |
| NT2RM4001569 | F-NT2RM4001569 | 0.70 |
| NT2RM4001582 | F-NT2RM4001582 | 0.76 |
| NT2RM4001592 | F-NT2RM4001592 | 0.31 |
| NT2RM4001594 | F-NT2RM4001594 | 0.86 |
| NT2RM4001597 | F-NT2RM4001597 | 0.91 |
| NT2RM4001611 | F-NT2RM4001611 | 0.91 |
| NT2RM4001629 | F-NT2RM4001629 | 0.72 |
| NT2RM4001650 | F-NT2RM4001650 | 0.37 |
| NT2RM4001662 | F-NT2RM4001662 | 0.70 |
| NT2RM4001666 | F-NT2RM4001666 | 0.37 |
| NT2RM4001682 | F-NT2RM4001682 | 0.91 |
| NT2RM4001710 | F-NT2RM4001710 | 0.45 |
| NT2RM4001714 | F-NT2RM4001714 | 0.94 |
| NT2RM4001715 | F-NT2RM4001715 | 0.33 |
| NT2RM4001731 | F-NT2RM4001731 | 0.94 |
| NT2RM4001741 | F-NT2RM4001741 | 0.87 |
| NT2RM4001746 | F-NT2RM4001746 | 0.81 |
| NT2RM4001758 | F-NT2RM4001758 | 0.59 |
| NT2RM4001783 | F-NT2RM4001783 | 0.68 |
| NT2RM4001813 | F-NT2RM4001813 | 0.39 |
| NT2RM4001819 | F-NT2RM4001819 | 0.43 |
| NT2RM4001823 | F-NT2RM4001823 | 0.94 |
| NT2RM4001828 | F-NT2RM4001828 | 0.83 |
| NT2RM4001836 | F-NT2RM4001836 | 0.61 |
| NT2RM4001841 | F-NT2RM4001841 | 0.37 |
| NT2RM4001842 | F-NT2RM4001842 | 0.68 |
| NT2RM4001865 | F-NT2RM4001865 | 0.91 |
| NT2RM4001876 | F-NT2RM4001876 | 0.88 |
| NT2RM4001880 | F-NT2RM4001880 | 0.43 |
| NT2RM4001905 | F-NT2RM4001905 | 0.94 |
| NT2RM4001922 | F-NT2RM4001922 | 0.48 |
| NT2RM4001938 | F-NT2RM4001938 | 0.67 |
| NT2RM4001940 | F-NT2RM4001940 | 0.92 |
| NT2RM4001965 | F-NT2RM4001965 | 0.94 |
| NT2RM4001969 | F-NT2RM4001969 | 0.88 |
| NT2RM4001979 | F-NT2RM4001979 | 0.42 |
| NT2RM4001987 | F-NT2RM4001987 | 0.86 |
| NT2RM4002013 | F-NT2RM4002013 | 0.94 |
| NT2RM4002018 | F-NT2RM4002018 | 0.92 |
| NT2RM4002034 | F-NT2RM4002034 | 0.43 |
| NT2RM4002044 | F-NT2RM4002044 | 0.42 |
| NT2RM4002054 | F-NT2RM4002054 | 0.88 |
| NT2RM4002055 | F-NT2RM4002055 | 0.32 |
| NT2RM4002062 | F-NT2RM4002062 | 0.87 |
| NT2RM4002063 | F-NT2RM4002063 | 0.49 |
| NT2RM4002066 | F-NT2RM4002066 | 0.39 |
| NT2RM4002073 | F-NT2RM4002073 | 0.78 |
| NT2RM4002075 | F-NT2RM4002075 | 0.87 |
| NT2RM4002093 | F-NT2RM4002093 | 0.82 |
| NT2RM4002109 | F-NT2RM4002109 | 0.52 |
| NT2RM4002128 | F-NT2RM4002128 | 0.68 |
| NT2RM4002140 | F-NT2RM4002140 | 0.94 |
| NT2RM4002145 | F-NT2RM4002145 | 0.94 |
| NT2RM4002146 | F-NT2RM4002146 | 0.89 |
| NT2RM4002161 | F-NT2RM4002161 | 0.49 |
| NT2RM4002174 | F-NT2RM4002174 | 0.36 |
| NT2RM4002189 | F-NT2RM4002189 | 0.34 |
| NT2RM4002194 | F-NT2RM4002194 | 0.73 |
| NT2RM4002205 | F-NT2RM4002205 | 0.94 |
| NT2RM4002213 | F-NT2RM4002213 | 0.52 |
| NT2RM4002226 | F-NT2RM4002226 | 0.48 |
| NT2RM4002251 | F-NT2RM4002251 | 0.94 |
| NT2RM4002256 | F-NT2RM4002256 | 0.93 |
| NT2RM4002266 | F-NT2RM4002266 | 0.73 |
| NT2RM4002294 | F-NT2RM4002294 | 0.86 |
| NT2RM4002301 | F-NT2RM4002301 | 0.40 |
| NT2RM4002323 | F-NT2RM4002323 | 0.81 |
| NT2RM4002339 | F-NT2RM4002339 | 0.32 |
| NT2RM4002344 | F-NT2RM4002344 | 0.87 |
| NT2RM4002373 | F-NT2RM4002373 | 0.41 |
| NT2RM4002374 | F-NT2RM4002374 | 0.33 |
| NT2RM4002398 | F-NT2RM4002398 | 0.94 |
| NT2RM4002409 | F-NT2RM4002409 | 0.82 |
| NT2RM4002446 | F-NT2RM4002446 | 0.61 |
| NT2RM4002452 | F-NT2RM4002452 | 0.47 |
| NT2RM4002457 | F-NT2RM4002457 | 0.92 |
| NT2RM4002460 | F-NT2RM4002460 | 0.61 |
| NT2RM4002482 | F-NT2RM4002482 | 0.94 |
| NT2RM4002493 | F-NT2RM4002493 | 0.39 |
| NT2RM4002527 | F-NT2RM4002527 | 0.64 |
| NT2RM4002534 | F-NT2RM4002534 | 0.76 |
| NT2RM4002558 | F-NT2RM4002558 | 0.62 |
| NT2RM4002565 | F-NT2RM4002565 | 0.54 |
| NT2RM4002571 | F-NT2RM4002571 | 0.90 |
| NT2RM4002593 | F-NT2RM4002593 | 0.91 |
| NT2RM4002594 | F-NT2RM4002594 | 0.70 |
| NT2RM4002623 | F-NT2RM4002623 | 0.81 |
| NT2RP1000018 | F-NT2RP1000018 | 0.31 |
| NT2RP1000035 | F-NT2RP1000035 | 0.49 |
| NT2RP1000040 | F-NT2RP1000040 | 0.45 |
| NT2RP1000063 | F-NT2RP1000063 | 0.90 |
| NT2RP1000086 | F-NT2RP1000086 | 0.89 |
| NT2RP1000101 | F-NT2RP1000101 | 0.76 |
| NT2RP1000111 | F-NT2RP1000111 | 0.94 |
| NT2RP1000112 | F-NT2RP1000112 | 0.45 |
| NT2RP1000124 | F-NT2RP1000124 | 0.94 |
| NT2RP1000130 | F-NT2RP1000130 | 0.69 |
| NT2RP1000163 | F-NT2RP1000163 | 0.90 |
| NT2RP1000170 | F-NT2RP1000170 | 0.94 |
| NT2RP1000174 | F-NT2RP1000174 | 0.74 |
| NT2RP1000191 | F-NT2RP1000191 | 0.76 |
| NT2RP1000202 | F-NT2RP1000202 | 0.60 |
| NT2RP1000243 | F-NT2RP1000243 | 0.81 |
| NT2RP1000259 | F-NT2RP1000259 | 0.79 |
| NT2RP1000272 | F-NT2RP1000272 | 0.94 |
| NT2RP1000324 | F-NT2RP1000324 | 0.32 |
| NT2RP1000326 | F-NT2RP1000326 | 0.94 |
| NT2RP1000333 | F-NT2RP1000333 | 0.94 |
| NT2RP1000348 | F-NT2RP1000348 | 0.94 |
| NT2RP1000357 | F-NT2RP1000357 | 0.87 |
| NT2RP1000358 | F-NT2RP1000358 | 0.79 |
| NT2RP1000363 | F-NT2RP1000363 | 0.40 |
| NT2RP1000376 | F-NT2RP1000376 | 0.61 |
| NT2RP1000409 | F-NT2RP1000409 | 0.85 |
| NT2RP1000413 | F-NT2RP1000413 | 0.42 |
| NT2RP1000416 | F-NT2RP1000416 | 0.68 |
| NT2RP1000418 | F-NT2RP1000418 | 0.88 |
| NT2RP1000439 | F-NT2RP1000439 | 0.69 |
| NT2RP1000443 | F-NT2RP1000443 | 0.59 |
| NT2RP1000460 | F-NT2RP1000460 | 0.86 |
| NT2RP1000470 | F-NT2RP1000470 | 0.56 |
| NT2RP1000478 | F-NT2RP1000478 | 0.87 |
| NT2RP1000481 | F-NT2RP1000481 | 0.58 |
| NT2RP1000493 | F-NT2RP1000493 | 0.34 |
| NT2RP1000513 | F-NT2RP1000513 | 0.89 |
| NT2RP1000522 | F-NT2RP1000522 | 0.34 |
| NT2RP1000547 | F-NT2RP1000547 | 0.89 |
| NT2RP1000574 | F-NT2RP1000574 | 0.74 |
| NT2RP1000577 | F-NT2RP1000577 | 0.53 |
| NT2RP1000581 | F-NT2RP1000581 | 0.66 |
| NT2RP1000609 | F-NT2RP1000609 | 0.90 |
| NT2RP1000629 | F-NT2RP1000629 | 0.94 |
| NT2RP1000630 | F-NT2RP1000630 | 0.93 |
| NT2RP1000677 | F-NT2RP1000677 | 0.94 |
| NT2RP1000688 | F-NT2RP1000688 | 0.94 |
| NT2RP1000695 | F-NT2RP1000695 | 0.89 |
| NT2RP1000701 | F-NT2RP1000701 | 0.89 |
| NT2RP1000721 | F-NT2RP1000721 | 0.91 |
| NT2RP1000730 | F-NT2RP1000730 | 0.94 |
| NT2RP1000733 | F-NT2RP1000733 | 0.90 |
| NT2RP1000738 | F-NT2RP1000738 | 0.64 |
| NT2RP1000746 | F-NT2RP1000746 | 0.92 |
| NT2RP1000767 | F-NT2RP1000767 | 0.82 |
| NT2RP1000782 | F-NT2RP1000782 | 0.94 |
| NT2RP1000796 | F-NT2RP1000796 | 0.33 |
| NT2RP1000825 | F-NT2RP1000825 | 0.74 |
| NT2RP1000833 | F-NT2RP1000833 | 0.94 |
| NT2RP1000834 | F-NT2RP1000834 | 0.88 |
| NT2RP1000836 | F-NT2RP1000836 | 0.59 |
| NT2RP1000846 | F-NT2RP1000846 | 0.46 |
| NT2RP1000851 | F-NT2RP1000851 | 0.82 |
| NT2RP1000856 | F-NT2RP1000856 | 0.94 |
| NT2RP1000860 | F-NT2RP1000860 | 0.60 |
| NT2RP1000902 | F-NT2RP1000902 | 0.42 |
| NT2RP1000915 | F-NT2RP1000915 | 0.90 |
| NT2RP1000916 | F-NT2RP1000916 | 0.67 |
| NT2RP1000943 | F-NT2RP1000943 | 0.77 |
| NT2RP1000944 | F-NT2RP1000944 | 0.94 |
| NT2RP1000947 | F-NT2RP1000947 | 0.38 |
| NT2RP1000954 | F-NT2RP1000954 | 0.59 |
| NT2RP1000958 | F-NT2RP1000958 | 0.59 |
| NT2RP1000959 | F-NT2RP1000959 | 0.74 |
| NT2RP1000966 | F-NT2RP1000966 | 0.93 |
| NT2RP1000980 | F-NT2RP1000980 | 0.31 |
| NT2RP1000988 | F-NT2RP1000988 | 0.53 |
| NT2RP1001011 | F-NT2RP1001011 | 0.65 |
| NT2RP1001013 | F-NT2RP1001013 | 0.34 |
| NT2RP1001014 | F-NT2RP1001014 | 0.94 |
| NT2RP1001033 | F-NT2RP1001033 | 0.40 |
| NT2RP1001073 | F-NT2RP1001073 | 0.74 |
| NT2RP1001079 | F-NT2RP1001079 | 0.48 |
| NT2RP1001080 | F-NT2RP1001080 | 0.91 |
| NT2RP1001113 | F-NT2RP1001113 | 0.94 |
| NT2RP1001173 | F-NT2RP1001173 | 0.57 |
| NT2RP1001177 | F-NT2RP1001177 | 0.75 |
| NT2RP1001185 | F-NT2RP1001185 | 0.94 |
| NT2RP1001199 | F-NT2RP1001199 | 0.42 |
| NT2RP1001247 | F-NT2RP1001247 | 0.67 |
| NT2RP1001248 | F-NT2RP1001248 | 0.89 |
| NT2RP1001253 | F-NT2RP1001253 | 0.94 |
| NT2RP1001286 | F-NT2RP1001286 | 0.59 |
| NT2RP1001294 | F-NT2RP1001294 | 0.81 |
| NT2RP1001302 | F-NT2RP1001302 | 0.86 |
| NT2RP1001310 | F-NT2RP1001310 | 0.91 |
| NT2RP1001311 | F-NT2RP1001311 | 0.87 |
| NT2RP1001313 | F-NT2RP1001313 | 0.91 |
| NT2RP1001361 | F-NT2RP1001361 | 0.83 |
| NT2RP1001385 | F-NT2RP1001385 | 0.36 |
| NT2RP1001395 | F-NT2RP1001395 | 0.84 |
| NT2RP1001410 | F-NT2RP1001410 | 0.72 |
| NT2RP1001424 | F-NT2RP1001424 | 0.81 |
| NT2RP1001432 | F-NT2RP1001432 | 0.81 |
| NT2RP1001449 | F-NT2RP1001449 | 0.77 |
| NT2RP1001457 | F-NT2RP1001457 | 0.92 |
| NT2RP1001466 | F-NT2RP1001466 | 0.44 |
| NT2RP1001475 | F-NT2RP1001475 | 0.53 |
| NT2RP1001482 | F-NT2RP1001482 | 0.34 |
| NT2RP1001494 | F-NT2RP1001494 | 0.93 |
| NT2RP1001543 | F-NT2RP1001543 | 0.94 |
| NT2RP1001546 | F-NT2RP1001546 | 0.94 |
| NT2RP1001569 | F-NT2RP1001569 | 0.93 |
| NT2RP1001616 | F-NT2RP1001616 | 0.46 |
| NT2RP1001665 | F-NT2RP1001665 | 0.94 |
| NT2RP2000001 | F-NT2RP2000001 | 0.94 |
| NT2RP2000006 | F-NT2RP2000006 | 0.74 |
| NT2RP2000007 | F-NT2RP2000007 | 0.94 |
| NT2RP2000008 | F-NT2RP2000008 | 0.83 |
| NT2RP2000032 | F-NT2RP2000032 | 0.94 |
| NT2RP2000040 | F-NT2RP2000040 | 0.92 |
| NT2RP2000045 | F-NT2RP2000045 | 0.94 |
| NT2RP2000054 | F-NT2RP2000054 | 0.53 |
| NT2RP2000056 | F-NT2RP2000056 | 0.42 |
| NT2RP2000067 | F-NT2RP2000067 | 0.88 |
| NT2RP2000070 | F-NT2RP2000070 | 0.48 |
| NT2RP2000079 | F-NT2RP2000079 | 0.85 |
| NT2RP2000088 | F-NT2RP2000088 | 0.94 |
| NT2RP2000091 | F-NT2RP2000091 | 0.79 |
| NT2RP2000097 | F-NT2RP2000097 | 0.66 |
| NT2RP2000114 | F-NT2RP2000114 | 0.86 |
| NT2RP2000120 | F-NT2RP2000120 | 0.48 |
| NT2RP2000126 | F-NT2RP2000126 | 0.77 |
| NT2RP2000133 | F-NT2RP2000133 | 0.64 |
| NT2RP2000147 | F-NT2RP2000147 | 0.94 |
| NT2RP2000153 | F-NT2RP2000153 | 0.87 |
| NT2RP2000157 | F-NT2RP2000157 | 0.48 |
| NT2RP2000161 | F-NT2RP2000161 | 0.79 |
| NT2RP2000173 | F-NT2RP2000173 | 0.75 |
| NT2RP2000175 | F-NT2RP2000175 | 0.79 |
| NT2RP2000195 | F-NT2RP2000195 | 0.91 |
| NT2RP2000205 | F-NT2RP2000205 | 0.94 |
| NT2RP2000208 | F-NT2RP2000208 | 0.84 |
| NT2RP2000224 | F-NT2RP2000224 | 0.52 |
| NT2RP2000232 | F-NT2RP2000232 | 0.33 |
| NT2RP2000233 | F-NT2RP2000233 | 0.57 |
| NT2RP2000239 | F-NT2RP2000239 | 0.52 |
| NT2RP2000248 | F-NT2RP2000248 | 0.36 |
| NT2RP2000274 | F-NT2RP2000274 | 0.55 |
| NT2RP2000283 | F-NT2RP2000283 | 0.61 |
| NT2RP2000288 | F-NT2RP2000288 | 0.31 |
| NT2RP2000297 | F-NT2RP2000297 | 0.78 |
| NT2RP2000298 | F-NT2RP2000298 | 0.94 |
| NT2RP2000310 | F-NT2RP2000310 | 0.52 |
| NT2RP2000328 | F-NT2RP2000328 | 0.75 |
| NT2RP2000329 | F-NT2RP2000329 | 0.94 |
| NT2RP2000346 | F-NT2RP2000346 | 0.62 |
| NT2RP2000369 | F-NT2RP2000369 | 0.87 |
| NT2RP2000412 | F-NT2RP2000412 | 0.75 |
| NT2RP2000414 | F-NT2RP2000414 | 0.79 |
| NT2RP2000422 | F-NT2RP2000422 | 0.46 |
| NT2RP2000438 | F-NT2RP2000438 | 0.94 |
| NT2RP2000448 | F-NT2RP2000448 | 0.94 |
| NT2RP2000503 | F-NT2RP2000503 | 0.94 |
| NT2RP2000510 | F-NT2RP2000510 | 0.87 |
| NT2RP2000516 | F-NT2RP2000516 | 0.42 |
| NT2RP2000617 | F-NT2RP2000617 | 0.94 |
| NT2RP2000634 | F-NT2RP2000634 | 0.74 |
| NT2RP2000656 | F-NT2RP2000656 | 0.68 |
| NT2RP2000658 | F-NT2RP2000658 | 0.55 |
| NT2RP2000668 | F-NT2RP2000668 | 0.81 |
| NT2RP2000704 | F-NT2RP2000704 | 0.88 |
| NT2RP2000710 | F-NT2RP2000710 | 0.58 |
| NT2RP2000764 | F-NT2RP2000764 | 0.59 |
| NT2RP2000809 | F-NT2RP2000809 | 0.51 |
| NT2RP2000812 | F-NT2RP2000812 | 0.37 |
| NT2RP2000814 | F-NT2RP2000814 | 0.66 |
| NT2RP2000816 | F-NT2RP2000816 | 0.50 |
| NT2RP2000819 | F-NT2RP2000819 | 0.35 |
| NT2RP2000841 | F-NT2RP2000841 | 0.93 |
| NT2RP2000845 | F-NT2RP2000845 | 0.78 |
| NT2RP2000863 | F-NT2RP2000863 | 0.41 |
| NT2RP2000880 | F-NT2RP2000880 | 0.79 |
| NT2RP2000892 | F-NT2RP2000892 | 0.94 |
| NT2RP2000931 | F-NT2RP2000931 | 0.89 |
| NT2RP2000932 | F-NT2RP2000932 | 0.94 |
| NT2RP2000938 | F-NT2RP2000938 | 0.90 |
| NT2RP2000943 | F-NT2RP2000943 | 0.61 |
| NT2RP2000965 | F-NT2RP2000965 | 0.80 |
| NT2RP2000985 | F-NT2RP2000985 | 0.94 |
| NT2RP2001036 | F-NT2RP2001036 | 0.86 |
| NT2RP2001044 | F-NT2RP2001044 | 0.93 |
| NT2RP2001056 | F-NT2RP2001056 | 0.77 |
| NT2RP2001065 | F-NT2RP2001065 | 0.73 |
| NT2RP2001070 | F-NT2RP2001070 | 0.91 |
| NT2RP2001081 | F-NT2RP2001081 | 0.94 |
| NT2RP2001094 | F-NT2RP2001094 | 0.93 |
| NT2RP2001119 | F-NT2RP2001119 | 0.31 |
| NT2RP2001127 | F-NT2RP2001127 | 0.41 |
| NT2RP2001137 | F-NT2RP2001137 | 0.93 |
| NT2RP2001168 | F-NT2RP2001168 | 0.71 |
| NT2RP2001173 | F-NT2RP2001173 | 0.94 |
| NT2RP2001174 | F-NT2RP2001174 | 0.71 |
| NT2RP2001218 | F-NT2RP2001218 | 0.76 |
| NT2RP2001233 | F-NT2RP2001233 | 0.31 |
| NT2RP2001245 | F-NT2RP2001245 | 0.33 |
| NT2RP2001268 | F-NT2RP2001268 | 0.61 |
| NT2RP2001327 | F-NT2RP2001327 | 0.86 |
| NT2RP2001328 | F-NT2RP2001328 | 0.94 |
| NT2RP2001366 | F-NT2RP2001366 | 0.52 |
| NT2RP2001378 | F-NT2RP2001378 | 0.64 |
| NT2RP2001381 | F-NT2RP2001381 | 0.80 |
| NT2RP2001392 | F-NT2RP2001392 | 0.69 |
| NT2RP2001394 | F-NT2RP2001394 | 0.38 |
| NT2RP2001397 | F-NT2RP2001397 | 0.79 |
| NT2RP2001420 | F-NT2RP2001420 | 0.88 |
| NT2RP2001427 | F-NT2RP2001427 | 0.73 |
| NT2RP2001436 | F-NT2RP2001436 | 0.32 |
| NT2RP2001440 | F-NT2RP2001440 | 0.94 |
| NT2RP2001450 | F-NT2RP2001450 | 0.38 |
| NT2RP2001511 | F-NT2RP2001511 | 0.53 |
| NT2RP2001520 | F-NT2RP2001520 | 0.88 |
| NT2RP2001536 | F-NT2RP2001536 | 0.64 |
| NT2RP2001560 | F-NT2RP2001560 | 0.79 |
| NT2RP2001576 | F-NT2RP2001576 | 0.62 |
| NT2RP2001581 | F-NT2RP2001581 | 0.48 |
| NT2RP2001597 | F-NT2RP2001597 | 0.94 |
| NT2RP2001601 | F-NT2RP2001601 | 0.33 |
| NT2RP2001613 | F-NT2RP2001613 | 0.41 |
| NT2RP2001628 | F-NT2RP2001628 | 0.79 |
| NT2RP2001634 | F-NT2RP2001634 | 0.87 |
| NT2RP2001660 | F-NT2RP2001660 | 0.86 |
| NT2RP2001675 | F-NT2RP2001675 | 0.90 |
| NT2RP2001721 | F-NT2RP2001721 | 0.32 |
| NT2RP2001748 | F-NT2RP2001748 | 0.32 |
| NT2RP2001839 | F-NT2RP2001839 | 0.83 |
| NT2RP2001861 | F-NT2RP2001861 | 0.33 |
| NT2RP2001876 | F-NT2RP2001876 | 0.94 |
| NT2RP2001883 | F-NT2RP2001883 | 0.90 |
| NT2RP2001898 | F-NT2RP2001898 | 0.94 |
| NT2RP2001900 | F-NT2RP2001900 | 0.93 |
| NT2RP2001907 | F-NT2RP2001907 | 0.94 |
| NT2RP2001946 | F-NT2RP2001946 | 0.63 |
| NT2RP2001947 | F-NT2RP2001947 | 0.75 |
| NT2RP2001969 | F-NT2RP2001969 | 0.94 |
| NT2RP2001976 | F-NT2RP2001976 | 0.48 |
| NT2RP2001985 | F-NT2RP2001985 | 0.44 |
| NT2RP2001991 | F-NT2RP2001991 | 0.39 |
| NT2RP2002025 | F-NT2RP2002025 | 0.94 |
| NT2RP2002033 | F-NT2RP2002033 | 0.40 |
| NT2RP2002046 | F-NT2RP2002046 | 0.56 |
| NT2RP2002058 | F-NT2RP2002058 | 0.64 |
| NT2RP2002076 | F-NT2RP2002076 | 0.40 |
| NT2RP2002078 | F-NT2RP2002078 | 0.81 |
| NT2RP2002079 | F-NT2RP2002079 | 0.82 |
| NT2RP2002099 | F-NT2RP2002099 | 0.92 |
| NT2RP2002154 | F-NT2RP2002154 | 0.44 |
| NT2RP2002185 | F-NT2RP2002185 | 0.94 |
| NT2RP2002193 | F-NT2RP2002193 | 0.48 |
| NT2RP2002208 | F-NT2RP2002208 | 0.49 |
| NT2RP2002231 | F-NT2RP2002231 | 0.61 |
| NT2RP2002235 | F-NT2RP2002235 | 0.87 |
| NT2RP2002252 | F-NT2RP2002252 | 0.51 |
| NT2RP2002270 | F-NT2RP2002270 | 0.78 |
| NT2RP2002292 | F-NT2RP2002292 | 0.94 |
| NT2RP2002312 | F-NT2RP2002312 | 0.33 |
| NT2RP2002325 | F-NT2RP2002325 | 0.53 |
| NT2RP2002333 | F-NT2RP2002333 | 0.60 |
| NT2RP2002373 | F-NT2RP2002373 | 0.91 |
| NT2RP2002385 | F-NT2RP2002385 | 0.94 |
| NT2RP2002408 | F-NT2RP2002408 | 0.44 |
| NT2RP2002426 | F-NT2RP2002426 | 0.54 |
| NT2RP2002442 | F-NT2RP2002442 | 0.37 |
| NT2RP2002464 | F-NT2RP2002464 | 0.79 |
| NT2RP2002479 | F-NT2RP2002479 | 0.92 |
| NT2RP2002498 | F-NT2RP2002498 | 0.94 |
| NT2RP2002503 | F-NT2RP2002503 | 0.90 |
| NT2RP2002520 | F-NT2RP2002520 | 0.37 |
| NT2RP2002537 | F-NT2RP2002537 | 0.42 |
| NT2RP2002549 | F-NT2RP2002549 | 0.75 |
| NT2RP2002595 | F-NT2RP2002595 | 0.90 |
| NT2RP2002609 | F-NT2RP2002609 | 0.33 |
| NT2RP2002618 | F-NT2RP2002618 | 0.52 |
| NT2RP2002621 | F-NT2RP2002621 | 0.67 |
| NT2RP2002672 | F-NT2RP2002672 | 0.43 |
| NT2RP2002701 | F-NT2RP2002701 | 0.69 |
| NT2RP2002706 | F-NT2RP2002706 | 0.51 |
| NT2RP2002710 | F-NT2RP2002710 | 0.94 |
| NT2RP2002769 | F-NT2RP2002769 | 0.42 |
| NT2RP2002800 | F-NT2RP2002800 | 0.47 |
| NT2RP2002862 | F-NT2RP2002862 | 0.88 |
| NT2RP2002880 | F-NT2RP2002880 | 0.78 |
| NT2RP2002891 | F-NT2RP2002891 | 0.69 |
| NT2RP2002925 | F-NT2RP2002925 | 0.65 |
| NT2RP2002928 | F-NT2RP2002928 | 0.47 |
| NT2RP2002929 | F-NT2RP2002929 | 0.94 |
| NT2RP2002939 | F-NT2RP2002939 | 0.94 |
| NT2RP2002954 | F-NT2RP2002954 | 0.94 |
| NT2RP2002959 | F-NT2RP2002959 | 0.45 |
| NT2RP2002979 | F-NT2RP2002979 | 0.51 |
| NT2RP2002980 | F-NT2RP2002980 | 0.38 |
| NT2RP2002986 | F-NT2RP2002986 | 0.34 |
| NT2RP2002993 | F-NT2RP2002993 | 0.94 |
| NT2RP2003034 | F-NT2RP2003034 | 0.34 |
| NT2RP2003099 | F-NT2RP2003099 | 0.46 |
| NT2RP2003108 | F-NT2RP2003108 | 0.67 |
| NT2RP2003117 | F-NT2RP2003117 | 0.57 |
| NT2RP2003121 | F-NT2RP2003121 | 0.94 |
| NT2RP2003125 | F-NT2RP2003125 | 0.94 |
| NT2RP2003137 | F-NT2RP2003137 | 0.60 |
| NT2RP2003157 | F-NT2RP2003157 | 0.94 |
| NT2RP2003158 | F-NT2RP2003158 | 0.75 |
| NT2RP2003165 | F-NT2RP2003165 | 0.90 |
| NT2RP2003177 | F-NT2RP2003177 | 0.85 |
| NT2RP2003194 | F-NT2RP2003194 | 0.94 |
| NT2RP2003228 | F-NT2RP2003228 | 0.57 |
| NT2RP2003243 | F-NT2RP2003243 | 0.94 |
| NT2RP2003265 | F-NT2RP2003265 | 0.68 |
| NT2RP2003272 | F-NT2RP2003272 | 0.94 |
| NT2RP2003277 | F-NT2RP2003277 | 0.73 |
| NT2RP2003280 | F-NT2RP2003280 | 0.94 |
| NT2RP2003286 | F-NT2RP2003286 | 0.44 |
| NT2RP2003293 | F-NT2RP2003293 | 0.42 |
| NT2RP2003295 | F-NT2RP2003295 | 0.89 |
| NT2RP2003297 | F-NT2RP2003297 | 0.94 |
| NT2RP2003307 | F-NT2RP2003307 | 0.79 |
| NT2RP2003308 | F-NT2RP2003308 | 0.49 |
| NT2RP2003329 | F-NT2RP2003329 | 0.33 |
| NT2RP2003347 | F-NT2RP2003347 | 0.79 |
| NT2RP2003367 | F-NT2RP2003367 | 0.94 |
| NT2RP2003391 | F-NT2RP2003391 | 0.90 |
| NT2RP2003393 | F-NT2RP2003393 | 0.94 |
| NT2RP2003401 | F-NT2RP2003401 | 0.80 |
| NT2RP2003433 | F-NT2RP2003433 | 0.40 |
| NT2RP2003445 | F-NT2RP2003445 | 0.94 |
| NT2RP2003446 | F-NT2RP2003446 | 0.40 |
| NT2RP2003466 | F-NT2RP2003466 | 0.58 |
| NT2RP2003480 | F-NT2RP2003480 | 0.59 |
| NT2RP2003506 | F-NT2RP2003506 | 0.94 |
| NT2RP2003511 | F-NT2RP2003511 | 0.31 |
| NT2RP2003513 | F-NT2RP2003513 | 0.67 |
| NT2RP2003533 | F-NT2RP2003533 | 0.57 |
| NT2RP2003543 | F-NT2RP2003543 | 0.94 |
| NT2RP2003564 | F-NT2RP2003564 | 0.88 |
| NT2RP2003567 | F-NT2RP2003567 | 0.69 |
| NT2RP2003581 | F-NT2RP2003581 | 0.40 |
| NT2RP2003596 | F-NT2RP2003596 | 0.83 |
| NT2RP2003604 | F-NT2RP2003604 | 0.87 |
| NT2RP2003629 | F-NT2RP2003629 | 0.87 |
| NT2RP2003643 | F-NT2RP2003643 | 0.94 |
| NT2RP2003687 | F-NT2RP2003687 | 0.31 |
| NT2RP2003691 | F-NT2RP2003691 | 0.34 |
| NT2RP2003702 | F-NT2RP2003702 | 0.80 |
| NT2RP2003713 | F-NT2RP2003713 | 0.53 |
| NT2RP2003714 | F-NT2RP2003714 | 0.61 |
| NT2RP2003737 | F-NT2RP2003737 | 0.88 |
| NT2RP2003751 | F-NT2RP2003751 | 0.36 |
| NT2RP2003760 | F-NT2RP2003760 | 0.62 |
| NT2RP2003764 | F-NT2RP2003764 | 0.94 |
| NT2RP2003769 | F-NT2RP2003769 | 0.69 |
| NT2RP2003777 | F-NT2RP2003777 | 0.93 |
| NT2RP2003781 | F-NT2RP2003781 | 0.37 |
| NT2RP2003793 | F-NT2RP2003793 | 0.92 |
| NT2RP2003825 | F-NT2RP2003825 | 0.49 |
| NT2RP2003840 | F-NT2RP2003840 | 0.88 |
| NT2RP2003857 | F-NT2RP2003857 | 0.34 |
| NT2RP2003952 | F-NT2RP2003952 | 0.89 |
| NT2RP2003976 | F-NT2RP2003976 | 0.33 |
| NT2RP2003981 | F-NT2RP2003981 | 0.64 |
| NT2RP2003984 | F-NT2RP2003984 | 0.41 |
| NT2RP2003986 | F-NT2RP2003986 | 0.32 |
| NT2RP2004013 | F-NT2RP2004013 | 0.48 |
| NT2RP2004041 | F-NT2RP2004041 | 0.78 |
| NT2RP2004042 | F-NT2RP2004042 | 0.66 |
| NT2RP2004066 | F-NT2RP2004066 | 0.56 |
| NT2RP2004081 | F-NT2RP2004081 | 0.94 |
| NT2RP2004098 | F-NT2RP2004098 | 0.39 |
| NT2RP2004124 | F-NT2RP2004124 | 0.75 |
| NT2RP2004152 | F-NT2RP2004152 | 0.54 |
| NT2RP2004165 | F-NT2RP2004165 | 0.68 |
| NT2RP2004187 | F-NT2RP2004187 | 0.92 |
| NT2RP2004194 | F-NT2RP2004194 | 0.90 |
| NT2RP2004196 | F-NT2RP2004196 | 0.94 |
| NT2RP2004226 | F-NT2RP2004226 | 0.80 |
| NT2RP2004239 | F-NT2RP2004239 | 0.63 |
| NT2RP2004240 | F-NT2RP2004240 | 0.86 |
| NT2RP2004242 | F-NT2RP2004242 | 0.94 |
| NT2RP2004245 | F-NT2RP2004245 | 0.92 |
| NT2RP2004316 | F-NT2RP2004316 | 0.33 |
| NT2RP2004364 | F-NT2RP2004364 | 0.75 |
| NT2RP2004365 | F-NT2RP2004365 | 0.43 |
| NT2RP2004366 | F-NT2RP2004366 | 0.32 |
| NT2RP2004373 | F-NT2RP2004373 | 0.60 |
| NT2RP2004389 | F-NT2RP2004389 | 0.94 |
| NT2RP2004392 | F-NT2RP2004392 | 0.93 |
| NT2RP2004399 | F-NT2RP2004399 | 0.36 |
| NT2RP2004463 | F-NT2RP2004463 | 0.43 |
| NT2RP2004476 | F-NT2RP2004476 | 0.80 |
| NT2RP2004538 | F-NT2RP2004538 | 0.94 |
| NT2RP2004551 | F-NT2RP2004551 | 0.47 |
| NT2RP2004568 | F-NT2RP2004568 | 0.73 |
| NT2RP2004594 | F-NT2RP2004594 | 0.64 |
| NT2RP2004600 | F-NT2RP2004600 | 0.53 |
| NT2RP2004602 | F-NT2RP2004602 | 0.33 |
| NT2RP2004614 | F-NT2RP2004614 | 0.34 |
| NT2RP2004655 | F-NT2RP2004655 | 0.77 |
| NT2RP2004664 | F-NT2RP2004664 | 0.94 |
| NT2RP2004689 | F-NT2RP2004689 | 0.83 |
| NT2RP2004710 | F-NT2RP2004710 | 0.94 |
| NT2RP2004743 | F-NT2RP2004743 | 0.32 |
| NT2RP2004768 | F-NT2RP2004768 | 0.53 |
| NT2RP2004791 | F-NT2RP2004791 | 0.64 |
| NT2RP2004799 | F-NT2RP2004799 | 0.42 |
| NT2RP2004802 | F-NT2RP2004802 | 0.88 |
| NT2RP2004816 | F-NT2RP2004816 | 0.78 |
| NT2RP2004841 | F-NT2RP2004841 | 0.61 |
| NT2RP2004861 | F-NT2RP2004861 | 0.32 |
| NT2RP2004897 | F-NT2RP2004897 | 0.67 |
| NT2RP2004933 | F-NT2RP2004933 | 0.94 |
| NT2RP2004936 | F-NT2RP2004936 | 0.53 |
| NT2RP2004959 | F-NT2RP2004959 | 0.78 |
| NT2RP2004978 | F-NT2RP2004978 | 0.86 |
| NT2RP2004985 | F-NT2RP2004985 | 0.42 |
| NT2RP2004999 | F-NT2RP2004999 | 0.55 |
| NT2RP2005000 | F-NT2RP2005000 | 0.40 |
| NT2RP2005001 | F-NT2RP2005001 | 0.94 |
| NT2RP2005003 | F-NT2RP2005003 | 0.44 |
| NT2RP2005012 | F-NT2RP2005012 | 0.73 |
| NT2RP2005018 | F-NT2RP2005018 | 0.43 |
| NT2RP2005022 | F-NT2RP2005022 | 0.34 |
| NT2RP2005037 | F-NT2RP2005037 | 0.94 |
| NT2RP2005038 | F-NT2RP2005038 | 0.56 |
| NT2RP2005116 | F-NT2RP2005116 | 0.94 |
| NT2RP2005126 | F-NT2RP2005126 | 0.69 |
| NT2RP2005139 | F-NT2RP2005139 | 0.94 |
| NT2RP2005140 | F-NT2RP2005140 | 0.32 |
| NT2RP2005144 | F-NT2RP2005144 | 0.39 |
| NT2RP2005147 | F-NT2RP2005147 | 0.32 |
| NT2RP2005159 | F-NT2RP2005159 | 0.52 |
| NT2RP2005162 | F-NT2RP2005162 | 0.86 |
| NT2RP2005168 | F-NT2RP2005168 | 0.53 |
| NT2RP2005204 | F-NT2RP2005204 | 0.94 |
| NT2RP2005227 | F-NT2RP2005227 | 0.53 |
| NT2RP2005239 | F-NT2RP2005239 | 0.91 |
| NT2RP2005270 | F-NT2RP2005270 | 0.72 |
| NT2RP2005276 | F-NT2RP2005276 | 0.41 |
| NT2RP2005287 | F-NT2RP2005287 | 0.44 |
| NT2RP2005288 | F-NT2RP2005288 | 0.82 |
| NT2RP2005315 | F-NT2RP2005315 | 0.79 |
| NT2RP2005358 | F-NT2RP2005358 | 0.94 |
| NT2RP2005393 | F-NT2RP2005393 | 0.41 |
| NT2RP2005436 | F-NT2RP2005436 | 0.45 |
| NT2RP2005441 | F-NT2RP2005441 | 0.88 |
| NT2RP2005453 | F-NT2RP2005453 | 0.59 |
| NT2RP2005457 | F-NT2RP2005457 | 0.56 |
| NT2RP2005464 | F-NT2RP2005464 | 0.72 |
| NT2RP2005465 | F-NT2RP2005465 | 0.40 |
| NT2RP2005472 | F-NT2RP2005472 | 0.42 |
| NT2RP2005490 | F-NT2RP2005490 | 0.52 |
| NT2RP2005495 | F-NT2RP2005495 | 0.94 |
| NT2RP2005496 | F-NT2RP2005496 | 0.52 |
| NT2RP2005498 | F-NT2RP2005498 | 0.74 |
| NT2RP2005509 | F-NT2RP2005509 | 0.55 |
| NT2RP2005520 | F-NT2RP2005520 | 0.54 |
| NT2RP2005525 | F-NT2RP2005525 | 0.41 |
| NT2RP2005539 | F-NT2RP2005539 | 0.94 |
| NT2RP2005540 | F-NT2RP2005540 | 0.32 |
| NT2RP2005549 | F-NT2RP2005549 | 0.79 |
| NT2RP2005555 | F-NT2RP2005555 | 0.63 |
| NT2RP2005557 | F-NT2RP2005557 | 0.79 |
| NT2RP2005600 | F-NT2RP2005600 | 0.76 |
| NT2RP2005605 | F-NT2RP2005605 | 0.56 |
| NT2RP2005620 | F-NT2RP2005620 | 0.66 |
| NT2RP2005622 | F-NT2RP2005622 | 0.37 |
| NT2RP2005635 | F-NT2RP2005635 | 0.87 |
| NT2RP2005637 | F-NT2RP2005637 | 0.94 |
| NT2RP2005640 | F-NT2RP2005640 | 0.87 |
| NT2RP2005654 | F-NT2RP2005654 | 0.94 |
| NT2RP2005669 | F-NT2RP2005669 | 0.94 |
| NT2RP2005675 | F-NT2RP2005675 | 0.72 |
| NT2RP2005683 | F-NT2RP2005683 | 0.34 |
| NT2RP2005690 | F-NT2RP2005690 | 0.54 |
| NT2RP2005712 | F-NT2RP2005712 | 0.93 |
| NT2RP2005722 | F-NT2RP2005722 | 0.50 |
| NT2RP2005723 | F-NT2RP2005723 | 0.45 |
| NT2RP2005732 | F-NT2RP2005732 | 0.54 |
| NT2RP2005748 | F-NT2RP2005748 | 0.76 |
| NT2RP2005752 | F-NT2RP2005752 | 0.47 |
| NT2RP2005763 | F-NT2RP2005763 | 0.87 |
| NT2RP2005767 | F-NT2RP2005767 | 0.58 |
| NT2RP2005773 | F-NT2RP2005773 | 0.49 |
| NT2RP2005775 | F-NT2RP2005775 | 0.34 |
| NT2RP2005781 | F-NT2RP2005781 | 0.81 |
| NT2RP2005784 | F-NT2RP2005784 | 0.94 |
| NT2RP2005804 | F-NT2RP2005804 | 0.94 |
| NT2RP2005812 | F-NT2RP2005812 | 0.90 |
| NT2RP2005835 | F-NT2RP2005835 | 0.94 |
| NT2RP2005853 | F-NT2RP2005853 | 0.77 |
| NT2RP2005859 | F-NT2RP2005859 | 0.68 |
| NT2RP2005868 | F-NT2RP2005868 | 0.76 |
| NT2RP2005886 | F-NT2RP2005886 | 0.62 |
| NT2RP2005890 | F-NT2RP2005890 | 0.79 |
| NT2RP2005901 | F-NT2RP2005901 | 0.94 |
| NT2RP2005933 | F-NT2RP2005933 | 0.55 |
| NT2RP2006023 | F-NT2RP2006023 | 0.47 |
| NT2RP2006038 | F-NT2RP2006038 | 0.73 |
| NT2RP2006043 | F-NT2RP2006043 | 0.50 |
| NT2RP2006052 | F-NT2RP2006052 | 0.74 |
| NT2RP2006069 | F-NT2RP2006069 | 0.85 |
| NT2RP2006071 | F-NT2RP2006071 | 0.94 |
| NT2RP2006100 | F-NT2RP2006100 | 0.42 |
| NT2RP2006106 | F-NT2RP2006106 | 0.94 |
| NT2RP2006141 | F-NT2RP2006141 | 0.92 |
| NT2RP2006186 | F-NT2RP2006186 | 0.94 |
| NT2RP2006196 | F-NT2RP2006196 | 0.32 |
| NT2RP2006200 | F-NT2RP2006200 | 0.70 |
| NT2RP2006219 | F-NT2RP2006219 | 0.94 |
| NT2RP2006237 | F-NT2RP2006237 | 0.59 |
| NT2RP2006238 | F-NT2RP2006238 | 0.47 |
| NT2RP2006275 | F-NT2RP2006275 | 0.89 |
| NT2RP2006312 | F-NT2RP2006312 | 0.75 |
| NT2RP2006333 | F-NT2RP2006333 | 0.73 |
| NT2RP2006334 | F-NT2RP2006334 | 0.72 |
| NT2RP2006365 | F-NT2RP2006365 | 0.48 |
| NT2RP2006436 | F-NT2RP2006436 | 0.75 |
| NT2RP2006441 | F-NT2RP2006441 | 0.61 |
| NT2RP2006456 | F-NT2RP2006456 | 0.60 |
| NT2RP2006464 | F-NT2RP2006464 | 0.51 |
| NT2RP2006472 | F-NT2RP2006472 | 0.76 |
| NT2RP2006565 | F-NT2RP2006565 | 0.34 |
| NT2RP2006571 | F-NT2RP2006571 | 0.94 |
| NT2RP2006573 | F-NT2RP2006573 | 0.35 |
| NT2RP3000002 | F-NT2RP3000002 | 0.40 |
| NT2RP3000031 | F-NT2RP3000031 | 0.49 |
| NT2RP3000046 | F-NT2RP3000046 | 0.90 |
| NT2RP3000047 | F-NT2RP3000047 | 0.69 |
| NT2RP3000050 | F-NT2RP3000050 | 0.78 |
| NT2RP3000068 | F-NT2RP3000068 | 0.94 |
| NT2RP3000072 | F-NT2RP3000072 | 0.34 |
| NT2RP3000080 | F-NT2RP3000080 | 0.32 |
| NT2RP3000085 | F-NT2RP3000085 | 0.92 |
| NT2RP3000092 | F-NT2RP3000092 | 0.40 |
| NT2RP3000134 | F-NT2RP3000134 | 0.42 |
| NT2RP3000142 | F-NT2RP3000142 | 0.58 |
| NT2RP3000149 | F-NT2RP3000149 | 0.83 |
| NT2RP3000197 | F-NT2RP3000197 | 0.59 |
| NT2RP3000207 | F-NT2RP3000207 | 0.48 |
| NT2RP3000220 | F-NT2RP3000220 | 0.75 |
| NT2RP3000251 | F-NT2RP3000251 | 0.82 |
| NT2RP3000252 | F-NT2RP3000252 | 0.88 |
| NT2RP3000255 | F-NT2RP3000255 | 0.94 |
| NT2RP3000267 | F-NT2RP3000267 | 0.92 |
| NT2RP3000299 | F-NT2RP3000299 | 0.94 |
| NT2RP3000312 | F-NT2RP3000312 | 0.57 |
| NT2RP3000320 | F-NT2RP3000320 | 0.94 |
| NT2RP3000324 | F-NT2RP3000324 | 0.32 |
| NT2RP3000333 | F-NT2RP3000333 | 0.94 |
| NT2RP3000348 | F-NT2RP3000348 | 0.32 |
| NT2RP3000350 | F-NT2RP3000350 | 0.67 |
| NT2RP3000359 | F-NT2RP3000359 | 0.94 |
| NT2RP3000361 | F-NT2RP3000361 | 0.94 |
| NT2RP3000366 | F-NT2RP3000366 | 0.94 |
| NT2RP3000393 | F-NT2RP3000393 | 0.53 |
| NT2RP3000397 | F-NT2RP3000397 | 0.89 |
| NT2RP3000403 | F-NT2RP3000403 | 0.87 |
| NT2RP3000439 | F-NT2RP3000439 | 0.77 |
| NT2RP3000456 | F-NT2RP3000456 | 0.88 |
| NT2RP3000484 | F-NT2RP3000484 | 0.59 |
| NT2RP3000487 | F-NT2RP3000487 | 0.32 |
| NT2RP3000526 | F-NT2RP3000526 | 0.32 |
| NT2RP3000527 | F-NT2RP3000527 | 0.69 |
| NT2RP3000531 | F-NT2RP3000531 | 0.56 |
| NT2RP3000562 | F-NT2RP3000562 | 0.44 |
| NT2RP3000590 | F-NT2RP3000590 | 0.88 |
| NT2RP3000592 | F-NT2RP3000592 | 0.92 |
| NT2RP3000596 | F-NT2RP3000596 | 0.50 |
| NT2RP3000599 | F-NT2RP3000599 | 0.69 |
| NT2RP3000603 | F-NT2RP3000603 | 0.94 |
| NT2RP3000605 | F-NT2RP3000605 | 0.92 |
| NT2RP3000624 | F-NT2RP3000624 | 0.71 |
| NT2RP3000632 | F-NT2RP3000632 | 0.43 |
| NT2RP3000644 | F-NT2RP3000644 | 0.94 |
| NT2RP3000661 | F-NT2RP3000661 | 0.60 |
| NT2RP3000665 | F-NT2RP3000665 | 0.46 |
| NT2RP3000690 | F-NT2RP3000690 | 0.79 |
| NT2RP3000739 | F-NT2RP3000739 | 0.94 |
| NT2RP3000753 | F-NT2RP3000753 | 0.42 |
| NT2RP3000759 | F-NT2RP3000759 | 0.94 |
| NT2RP3000825 | F-NT2RP3000825 | 0.73 |
| NT2RP3000826 | F-NT2RP3000826 | 0.94 |
| NT2RP3000836 | F-NT2RP3000836 | 0.39 |
| NT2RP3000841 | F-NT2RP3000841 | 0.55 |
| NT2RP3000845 | F-NT2RP3000845 | 0.38 |
| NT2RP3000847 | F-NT2RP3000847 | 0.67 |
| NT2RP3000850 | F-NT2RP3000850 | 0.59 |
| NT2RP3000852 | F-NT2RP3000852 | 0.39 |
| NT2RP3000859 | F-NT2RP3000859 | 0.83 |
| NT2RP3000868 | F-NT2RP3000868 | 0.49 |
| NT2RP3000869 | F-NT2RP3000869 | 0.94 |
| NT2RP3000901 | F-NT2RP3000901 | 0.34 |
| NT2RP3000917 | F-NT2RP3000917 | 0.73 |
| NT2RP3000919 | F-NT2RP3000919 | 0.94 |
| NT2RP3000968 | F-NT2RP3000968 | 0.94 |
| NT2RP3000980 | F-NT2RP3000980 | 0.61 |
| NT2RP3000994 | F-NT2RP3000994 | 0.45 |
| NT2RP3001004 | F-NT2RP3001004 | 0.86 |
| NT2RP3001055 | F-NT2RP3001055 | 0.38 |
| NT2RP3001057 | F-NT2RP3001057 | 0.84 |
| NT2RP3001081 | F-NT2RP3001081 | 0.57 |
| NT2RP3001084 | F-NT2RP3001084 | 0.94 |
| NT2RP3001096 | F-NT2RP3001096 | 0.94 |
| NT2RP3001107 | F-NT2RP3001107 | 0.88 |
| NT2RP3001109 | F-NT2RP3001109 | 0.67 |
| NT2RP3001111 | F-NT2RP3001111 | 0.87 |
| NT2RP3001113 | F-NT2RP3001113 | 0.40 |
| NT2RP3001116 | F-NT2RP3001116 | 0.73 |
| NT2RP3001119 | F-NT2RP3001119 | 0.62 |
| NT2RP3001120 | F-NT2RP3001120 | 0.59 |
| NT2RP3001126 | F-NT2RP3001126 | 0.94 |
| NT2RP3001133 | F-NT2RP3001133 | 0.89 |
| NT2RP3001140 | F-NT2RP3001140 | 0.59 |
| NT2RP3001147 | F-NT2RP3001147 | 0.94 |
| NT2RP3001150 | F-NT2RP3001150 | 0.92 |
| NT2RP3001155 | F-NT2RP3001155 | 0.94 |
| NT2RP3001176 | F-NT2RP3001176 | 0.82 |
| NT2RP3001214 | F-NT2RP3001214 | 0.41 |
| NT2RP3001216 | F-NT2RP3001216 | 0.32 |
| NT2RP3001221 | F-NT2RP3001221 | 0.46 |
| NT2RP3001236 | F-NT2RP3001236 | 0.79 |
| NT2RP3001239 | F-NT2RP3001239 | 0.94 |
| NT2RP3001253 | F-NT2RP3001253 | 0.59 |
| NT2RP3001260 | F-NT2RP3001260 | 0.94 |
| NT2RP3001268 | F-NT2RP3001268 | 0.75 |
| NT2RP3001272 | F-NT2RP3001272 | 0.94 |
| NT2RP3001274 | F-NT2RP3001274 | 0.94 |
| NT2RP3001297 | F-NT2RP3001297 | 0.94 |
| NT2RP3001307 | F-NT2RP3001307 | 0.87 |
| NT2RP3001325 | F-NT2RP3001325 | 0.71 |
| NT2RP3001338 | F-NT2RP3001338 | 0.90 |
| NT2RP3001355 | F-NT2RP3001355 | 0.40 |
| NT2RP3001356 | F-NT2RP3001356 | 0.88 |
| NT2RP3001384 | F-NT2RP3001384 | 0.91 |
| NT2RP3001392 | F-NT2RP3001392 | 0.42 |
| NT2RP3001396 | F-NT2RP3001396 | 0.56 |
| NT2RP3001398 | F-NT2RP3001398 | 0.94 |
| NT2RP3001399 | F-NT2RP3001399 | 0.94 |
| NT2RP3001407 | F-NT2RP3001407 | 0.54 |
| NT2RP3001420 | F-NT2RP3001420 | 0.74 |
| NT2RP3001426 | F-NT2RP3001426 | 0.92 |
| NT2RP3001427 | F-NT2RP3001427 | 0.40 |
| NT2RP3001428 | F-NT2RP3001428 | 0.94 |
| NT2RP3001447 | F-NT2RP3001447 | 0.57 |
| NT2RP3001449 | F-NT2RP3001449 | 0.62 |
| NT2RP3001453 | F-NT2RP3001453 | 0.94 |
| NT2RP3001457 | F-NT2RP3001457 | 0.89 |
| NT2RP3001472 | F-NT2RP3001472 | 0.82 |
| NT2RP3001490 | F-NT2RP3001490 | 0.53 |
| NT2RP3001495 | F-NT2RP3001495 | 0.94 |
| NT2RP3001497 | F-NT2RP3001497 | 0.40 |
| NT2RP3001529 | F-NT2RP3001529 | 0.94 |
| NT2RP3001538 | F-NT2RP3001538 | 0.93 |
| NT2RP3001554 | F-NT2RP3001554 | 0.91 |
| NT2RP3001587 | F-NT2RP3001587 | 0.94 |
| NT2RP3001608 | F-NT2RP3001608 | 0.94 |
| NT2RP3001621 | F-NT2RP3001621 | 0.78 |
| NT2RP3001629 | F-NT2RP3001629 | 0.42 |
| NT2RP3001642 | F-NT2RP3001642 | 0.94 |
| NT2RP3001646 | F-NT2RP3001646 | 0.94 |
| NT2RP3001671 | F-NT2RP3001671 | 0.77 |
| NT2RP3001672 | F-NT2RP3001672 | 0.88 |
| NT2RP3001676 | F-NT2RP3001676 | 0.88 |
| NT2RP3001678 | F-NT2RP3001678 | 0.44 |
| NT2RP3001679 | F-NT2RP3001679 | 0.44 |
| NT2RP3001688 | F-NT2RP3001688 | 0.67 |
| NT2RP3001690 | F-NT2RP3001690 | 0.58 |
| NT2RP3001698 | F-NT2RP3001698 | 0.86 |
| NT2RP3001708 | F-NT2RP3001708 | 0.38 |
| NT2RP3001712 | F-NT2RP3001712 | 0.75 |
| NT2RP3001716 | F-NT2RP3001716 | 0.77 |
| NT2RP3001724 | F-NT2RP3001724 | 0.65 |
| NT2RP3001727 | F-NT2RP3001727 | 0.84 |
| NT2RP3001730 | F-NT2RP3001730 | 0.77 |
| NT2RP3001739 | F-NT2RP3001739 | 0.78 |
| NT2RP3001753 | F-NT2RP3001753 | 0.79 |
| NT2RP3001764 | F-NT2RP3001764 | 0.33 |
| NT2RP3001777 | F-NT2RP3001777 | 0.87 |
| NT2RP3001792 | F-NT2RP3001792 | 0.86 |
| NT2RP3001799 | F-NT2RP3001799 | 0.79 |
| NT2RP3001819 | F-NT2RP3001819 | 0.31 |
| NT2RP3001844 | F-NT2RP3001844 | 0.34 |
| NT2RP3001854 | F-NT2RP3001854 | 0.94 |
| NT2RP3001855 | F-NT2RP3001855 | 0.88 |
| NT2RP3001857 | F-NT2RP3001857 | 0.41 |
| NT2RP3001896 | F-NT2RP3001896 | 0.94 |
| NT2RP3001915 | F-NT2RP3001915 | 0.42 |
| NT2RP3001929 | F-NT2RP3001929 | 0.49 |
| NT2RP3001931 | F-NT2RP3001931 | 0.94 |
| NT2RP3001938 | F-NT2RP3001938 | 0.32 |
| NT2RP3001943 | F-NT2RP3001943 | 0.70 |
| NT2RP3001944 | F-NT2RP3001944 | 0.94 |
| NT2RP3001969 | F-NT2RP3001969 | 0.54 |
| NT2RP3002007 | F-NT2RP3002007 | 0.56 |
| NT2RP3002014 | F-NT2RP3002014 | 0.94 |
| NT2RP3002033 | F-NT2RP3002033 | 0.94 |
| NT2RP3002045 | F-NT2RP3002045 | 0.91 |
| NT2RP3002054 | F-NT2RP3002054 | 0.94 |
| NT2RP3002062 | F-NT2RP3002062 | 0.62 |
| NT2RP3002063 | F-NT2RP3002063 | 0.34 |
| NT2RP3002081 | F-NT2RP3002081 | 0.57 |
| NT2RP3002097 | F-NT2RP3002097 | 0.72 |
| NT2RP3002102 | F-NT2RP3002102 | 0.90 |
| NT2RP3002108 | F-NT2RP3002108 | 0.74 |
| NT2RP3002142 | F-NT2RP3002142 | 0.61 |
| NT2RP3002146 | F-NT2RP3002146 | 0.91 |
| NT2RP3002147 | F-NT2RP3002147 | 0.37 |
| NT2RP3002151 | F-NT2RP3002151 | 0.90 |
| NT2RP3002163 | F-NT2RP3002163 | 0.76 |
| NT2RP3002165 | F-NT2RP3002165 | 0.89 |
| NT2RP3002181 | F-NT2RP3002181 | 0.78 |
| NT2RP3002244 | F-NT2RP3002244 | 0.81 |
| NT2RP3002248 | F-NT2RP3002248 | 0.36 |
| NT2RP3002255 | F-NT2RP3002255 | 0.53 |
| NT2RP3002273 | F-NT2RP3002273 | 0.90 |
| NT2RP3002276 | F-NT2RP3002276 | 0.39 |
| NT2RP3002303 | F-NT2RP3002303 | 0.40 |
| NT2RP3002304 | F-NT2RP3002304 | 0.44 |
| NT2RP3002330 | F-NT2RP3002330 | 0.94 |
| NT2RP3002343 | F-NT2RP3002343 | 0.94 |
| NT2RP3002351 | F-NT2RP3002351 | 0.94 |
| NT2RP3002377 | F-NT2RP3002377 | 0.52 |
| NT2RP3002399 | F-NT2RP3002399 | 0.91 |
| NT2RP3002402 | F-NT2RP3002402 | 0.33 |
| NT2RP3002455 | F-NT2RP3002455 | 0.42 |
| NT2RP3002484 | F-NT2RP3002484 | 0.52 |
| NT2RP3002501 | F-NT2RP3002501 | 0.57 |
| NT2RP3002512 | F-NT2RP3002512 | 0.63 |
| NT2RP3002529 | F-NT2RP3002529 | 0.74 |
| NT2RP3002545 | F-NT2RP3002545 | 0.94 |
| NT2RP3002549 | F-NT2RP3002549 | 0.94 |
| NT2RP3002566 | F-NT2RP3002566 | 0.74 |
| NT2RP3002587 | F-NT2RP3002587 | 0.94 |
| NT2RP3002590 | F-NT2RP3002590 | 0.37 |
| NT2RP3002602 | F-NT2RP3002602 | 0.39 |
| NT2RP3002603 | F-NT2RP3002603 | 0.46 |
| NT2RP3002628 | F-NT2RP3002628 | 0.31 |
| NT2RP3002631 | F-NT2RP3002631 | 0.79 |
| NT2RP3002650 | F-NT2RP3002650 | 0.94 |
| NT2RP3002659 | F-NT2RP3002659 | 0.93 |
| NT2RP3002660 | F-NT2RP3002660 | 0.46 |
| NT2RP3002663 | F-NT2RP3002663 | 0.79 |
| NT2RP3002671 | F-NT2RP3002671 | 0.34 |
| NT2RP3002682 | F-NT2RP3002682 | 0.52 |
| NT2RP3002688 | F-NT2RP3002688 | 0.82 |
| NT2RP3002701 | F-NT2RP3002701 | 0.62 |
| NT2RP3002763 | F-NT2RP3002763 | 0.83 |
| NT2RP3002785 | F-NT2RP3002785 | 0.33 |
| NT2RP3002818 | F-NT2RP3002818 | 0.91 |
| NT2RP3002861 | F-NT2RP3002861 | 0.31 |
| NT2RP3002869 | F-NT2RP3002869 | 0.47 |
| NT2RP3002876 | F-NT2RP3002876 | 0.58 |
| NT2RP3002877 | F-NT2RP3002877 | 0.41 |
| NT2RP3002909 | F-NT2RP3002909 | 0.52 |
| NT2RP3002911 | F-NT2RP3002911 | 0.73 |
| NT2RP3002948 | F-NT2RP3002948 | 0.60 |
| NT2RP3002953 | F-NT2RP3002953 | 0.37 |
| NT2RP3002969 | F-NT2RP3002969 | 0.47 |
| NT2RP3002972 | F-NT2RP3002972 | 0.87 |
| NT2RP3002985 | F-NT2RP3002985 | 0.55 |
| NT2RP3002988 | F-NT2RP3002988 | 0.82 |
| NT2RP3003008 | F-NT2RP3003008 | 0.94 |
| NT2RP3003061 | F-NT2RP3003061 | 0.93 |
| NT2RP3003068 | F-NT2RP3003068 | 0.45 |
| NT2RP3003071 | F-NT2RP3003071 | 0.76 |
| NT2RP3003078 | F-NT2RP3003078 | 0.40 |
| NT2RP3003101 | F-NT2RP3003101 | 0.41 |
| NT2RP3003139 | F-NT2RP3003139 | 0.43 |
| NT2RP3003145 | F-NT2RP3003145 | 0.94 |
| NT2RP3003150 | F-NT2RP3003150 | 0.94 |
| NT2RP3003157 | F-NT2RP3003157 | 0.81 |
| NT2RP3003185 | F-NT2RP3003185 | 0.87 |
| NT2RP3003193 | F-NT2RP3003193 | 0.94 |
| NT2RP3003197 | F-NT2RP3003197 | 0.74 |
| NT2RP3003203 | F-NT2RP3003203 | 0.94 |
| NT2RP3003204 | F-NT2RP3003204 | 0.74 |
| NT2RP3003210 | F-NT2RP3003210 | 0.45 |
| NT2RP3003212 | F-NT2RP3003212 | 0.51 |
| NT2RP3003230 | F-NT2RP3003230 | 0.94 |
| NT2RP3003242 | F-NT2RP3003242 | 0.92 |
| NT2RP3003251 | F-NT2RP3003251 | 0.93 |
| NT2RP3003278 | F-NT2RP3003278 | 0.83 |
| NT2RP3003282 | F-NT2RP3003282 | 0.67 |
| NT2RP3003290 | F-NT2RP3003290 | 0.62 |
| NT2RP3003301 | F-NT2RP3003301 | 0.49 |
| NT2RP3003302 | F-NT2RP3003302 | 0.32 |
| NT2RP3003311 | F-NT2RP3003311 | 0.34 |
| NT2RP3003313 | F-NT2RP3003313 | 0.88 |
| NT2RP3003327 | F-NT2RP3003327 | 0.88 |
| NT2RP3003330 | F-NT2RP3003330 | 0.94 |
| NT2RP3003344 | F-NT2RP3003344 | 0.67 |
| NT2RP3003353 | F-NT2RP3003353 | 0.65 |
| NT2RP3003377 | F-NT2RP3003377 | 0.87 |
| NT2RP3003385 | F-NT2RP3003385 | 0.94 |
| NT2RP3003409 | F-NT2RP3003409 | 0.41 |
| NT2RP3003411 | F-NT2RP3003411 | 0.47 |
| NT2RP3003427 | F-NT2RP3003427 | 0.33 |
| NT2RP3003490 | F-NT2RP3003490 | 0.56 |
| NT2RP3003491 | F-NT2RP3003491 | 0.37 |
| NT2RP3003543 | F-NT2RP3003543 | 0.92 |
| NT2RP3003552 | F-NT2RP3003552 | 0.64 |
| NT2RP3003555 | F-NT2RP3003555 | 0.94 |
| NT2RP3003564 | F-NT2RP3003564 | 0.86 |
| NT2RP3003589 | F-NT2RP3003589 | 0.88 |
| NT2RP3003621 | F-NT2RP3003621 | 0.49 |
| NT2RP3003656 | F-NT2RP3003656 | 0.77 |
| NT2RP3003659 | F-NT2RP3003659 | 0.32 |
| NT2RP3003672 | F-NT2RP3003672 | 0.49 |
| NT2RP3003680 | F-NT2RP3003680 | 0.94 |
| NT2RP3003686 | F-NT2RP3003686 | 0.78 |
| NT2RP3003701 | F-NT2RP3003701 | 0.36 |
| NT2RP3003716 | F-NT2RP3003716 | 0.34 |
| NT2RP3003726 | F-NT2RP3003726 | 0.72 |
| NT2RP3003795 | F-NT2RP3003795 | 0.34 |
| NT2RP3003805 | F-NT2RP3003805 | 0.74 |
| NT2RP3003809 | F-NT2RP3003809 | 0.73 |
| NT2RP3003825 | F-NT2RP3003825 | 0.94 |
| NT2RP3003831 | F-NT2RP3003831 | 0.52 |
| NT2RP3003833 | F-NT2RP3003833 | 0.31 |
| NT2RP3003846 | F-NT2RP3003846 | 0.54 |
| NT2RP3003870 | F-NT2RP3003870 | 0.91 |
| NT2RP3003876 | F-NT2RP3003876 | 0.42 |
| NT2RP3003914 | F-NT2RP3003914 | 0.94 |
| NT2RP3003918 | F-NT2RP3003918 | 0.90 |
| NT2RP3003932 | F-NT2RP3003932 | 0.64 |
| NT2RP3003992 | F-NT2RP3003992 | 0.94 |
| NT2RP3004013 | F-NT2RP3004013 | 0.60 |
| NT2RP3004041 | F-NT2RP3004041 | 0.52 |
| NT2RP3004051 | F-NT2RP3004051 | 0.75 |
| NT2RP3004078 | F-NT2RP3004078 | 0.73 |
| NT2RP3004093 | F-NT2RP3004093 | 0.64 |
| NT2RP3004125 | F-NT2RP3004125 | 0.94 |
| NT2RP3004155 | F-NT2RP3004155 | 0.89 |
| NT2RP3004189 | F-NT2RP3004189 | 0.46 |
| NT2RP3004206 | F-NT2RP3004206 | 0.59 |
| NT2RP3004207 | F-NT2RP3004207 | 0.39 |
| NT2RP3004209 | F-NT2RP3004209 | 0.54 |
| NT2RP3004242 | F-NT2RP3004242 | 0.61 |
| NT2RP3004246 | F-NT2RP3004246 | 0.91 |
| NT2RP3004253 | F-NT2RP3004253 | 0.41 |
| NT2RP3004258 | F-NT2RP3004258 | 0.41 |
| NT2RP3004262 | F-NT2RP3004262 | 0.56 |
| NT2RP3004282 | F-NT2RP3004282 | 0.90 |
| NT2RP3004332 | F-NT2RP3004332 | 0.53 |
| NT2RP3004341 | F-NT2RP3004341 | 0.40 |
| NT2RP3004348 | F-NT2RP3004348 | 0.94 |
| NT2RP3004378 | F-NT2RP3004378 | 0.40 |
| NT2RP3004424 | F-NT2RP3004424 | 0.75 |
| NT2RP3004428 | F-NT2RP3004428 | 0.85 |
| NT2RP3004451 | F-NT2RP3004451 | 0.85 |
| NT2RP3004454 | F-NT2RP3004454 | 0.93 |
| NT2RP3004466 | F-NT2RP3004466 | 0.80 |
| NT2RP3004472 | F-NT2RP3004472 | 0.46 |
| NT2RP3004480 | F-NT2RP3004480 | 0.77 |
| NT2RP3004490 | F-NT2RP3004490 | 0.65 |
| NT2RP3004498 | F-NT2RP3004498 | 0.91 |
| NT2RP3004504 | F-NT2RP3004504 | 0.88 |
| NT2RP3004507 | F-NT2RP3004507 | 0.86 |
| NT2RP3004534 | F-NT2RP3004534 | 0.32 |
| NT2RP3004539 | F-NT2RP3004539 | 0.76 |
| NT2RP3004544 | F-NT2RP3004544 | 0.94 |
| NT2RP3004566 | F-NT2RP3004566 | 0.94 |
| NT2RP3004569 | F-NT2RP3004569 | 0.69 |
| NT2RP3004572 | F-NT2RP3004572 | 0.65 |
| NT2RP3004578 | F-NT2RP3004578 | 0.52 |
| NT2RP3004594 | F-NT2RP3004594 | 0.39 |
| NT2RP3004617 | F-NT2RP3004617 | 0.94 |
| NT2RP3004618 | F-NT2RP3004618 | 0.41 |
| NT2RP3004669 | F-NT2RP3004669 | 0.82 |
| NT2RP3004670 | F-NT2RP3004670 | 0.32 |
| NT2RP4000008 | F-NT2RP4000008 | 0.94 |
| NT2RP4000051 | F-NT2RP4000051 | 0.94 |
| NT2RP4000109 | F-NT2RP4000109 | 0.84 |
| NT2RP4000111 | F-NT2RP4000111 | 0.49 |
| NT2RP4000129 | F-NT2RP4000129 | 0.94 |
| NT2RP4000147 | F-NT2RP4000147 | 0.92 |
| NT2RP4000150 | F-NT2RP4000150 | 0.41 |
| NT2RP4000151 | F-NT2RP4000151 | 0.33 |
| NT2RP4000159 | F-NT2RP4000159 | 0.75 |
| NT2RP4000185 | F-NT2RP4000185 | 0.94 |
| NT2RP4000210 | F-NT2RP4000210 | 0.83 |
| NT2RP4000212 | F-NT2RP4000212 | 0.94 |
| NT2RP4000243 | F-NT2RP4000243 | 0.94 |
| NT2RP4000246 | F-NT2RP4000246 | 0.59 |
| NT2RP4000259 | F-NT2RP4000259 | 0.94 |
| NT2RP4000263 | F-NT2RP4000263 | 0.62 |
| NT2RP4000290 | F-NT2RP4000290 | 0.92 |
| NT2RP4000312 | F-NT2RP4000312 | 0.39 |
| NT2RP4000323 | F-NT2RP4000323 | 0.73 |
| NT2RP4000355 | F-NT2RP4000355 | 0.94 |
| NT2RP4000360 | F-NT2RP4000360 | 0.55 |
| NT2RP4000367 | F-NT2RP4000367 | 0.60 |
| NT2RP4000370 | F-NT2RP4000370 | 0.93 |
| NT2RP4000376 | F-NT2RP4000376 | 0.88 |
| NT2RP4000381 | F-NT2RP4000381 | 0.39 |
| NT2RP4000398 | F-NT2RP4000398 | 0.64 |
| NT2RP4000415 | F-NT2RP4000415 | 0.94 |
| NT2RP4000417 | F-NT2RP4000417 | 0.33 |
| NT2RP4000448 | F-NT2RP4000448 | 0.33 |
| NT2RP4000449 | F-NT2RP4000449 | 0.33 |
| NT2RP4000455 | F-NT2RP4000455 | 0.37 |
| NT2RP4000457 | F-NT2RP4000457 | 0.36 |
| NT2RP4000480 | F-NT2RP4000480 | 0.88 |
| NT2RP4000481 | F-NT2RP4000481 | 0.51 |
| NT2RP4000498 | F-NT2RP4000498 | 0.64 |
| NT2RP4000500 | F-NT2RP4000500 | 0.67 |
| NT2RP4000518 | F-NT2RP4000518 | 0.34 |
| NT2RP4000524 | F-NT2RP4000524 | 0.94 |
| NT2RP4000528 | F-NT2RP4000528 | 0.65 |
| NT2RP4000541 | F-NT2RP4000541 | 0.44 |
| NT2RP4000556 | F-NT2RP4000556 | 0.69 |
| NT2RP4000560 | F-NT2RP4000560 | 0.67 |
| NT2RP4000588 | F-NT2RP4000588 | 0.94 |
| NT2RP4000614 | F-NT2RP4000614 | 0.94 |
| NT2RP4000638 | F-NT2RP4000638 | 0.74 |
| NT2RP4000648 | F-NT2RP4000648 | 0.40 |
| NT2RP4000657 | F-NT2RP4000657 | 0.94 |
| NT2RP4000704 | F-NT2RP4000704 | 0.69 |
| NT2RP4000713 | F-NT2RP4000713 | 0.93 |
| NT2RP4000724 | F-NT2RP4000724 | 0.32 |
| NT2RP4000728 | F-NT2RP4000728 | 0.34 |
| NT2RP4000737 | F-NT2RP4000737 | 0.48 |
| NT2RP4000739 | F-NT2RP4000739 | 0.40 |
| NT2RP4000781 | F-NT2RP4000781 | 0.94 |
| NT2RP4000787 | F-NT2RP4000787 | 0.94 |
| NT2RP4000817 | F-NT2RP4000817 | 0.60 |
| NT2RP4000833 | F-NT2RP4000833 | 0.35 |
| NT2RP4000837 | F-NT2RP4000837 | 0.80 |
| NT2RP4000839 | F-NT2RP4000839 | 0.33 |
| NT2RP4000855 | F-NT2RP4000855 | 0.74 |
| NT2RP4000865 | F-NT2RP4000865 | 0.77 |
| NT2RP4000878 | F-NT2RP4000878 | 0.79 |
| NT2RP4000879 | F-NT2RP4000879 | 0.41 |
| NT2RP4000907 | F-NT2RP4000907 | 0.44 |
| NT2RP4000918 | F-NT2RP4000918 | 0.88 |
| NT2RP4000925 | F-NT2RP4000925 | 0.89 |
| NT2RP4000927 | F-NT2RP4000927 | 0.81 |
| NT2RP4000928 | F-NT2RP4000928 | 0.39 |
| NT2RP4000929 | F-NT2RP4000929 | 0.34 |
| NT2RP4000955 | F-NT2RP4000955 | 0.77 |
| NT2RP4000973 | F-NT2RP4000973 | 0.36 |
| NT2RP4000975 | F-NT2RP4000975 | 0.87 |
| NT2RP4000979 | F-NT2RP4000979 | 0.50 |
| NT2RP4000984 | F-NT2RP4000984 | 0.66 |
| NT2RP4000989 | F-NT2RP4000989 | 0.94 |
| NT2RP4000997 | F-NT2RP4000997 | 0.68 |
| NT2RP4001004 | F-NT2RP4001004 | 0.40 |
| NT2RP4001006 | F-NT2RP4001006 | 0.91 |
| NT2RP4001010 | F-NT2RP4001010 | 0.64 |
| NT2RP4001029 | F-NT2RP4001029 | 0.77 |
| NT2RP4001041 | F-NT2RP4001041 | 0.79 |
| NT2RP4001057 | F-NT2RP4001057 | 0.65 |
| NT2RP4001064 | F-NT2RP4001064 | 0.94 |
| NT2RP4001078 | F-NT2RP4001078 | 0.39 |
| NT2RP4001079 | F-NT2RP4001079 | 0.94 |
| NT2RP4001080 | F-NT2RP4001080 | 0.58 |
| NT2RP4001086 | F-NT2RP4001086 | 0.78 |
| NT2RP4001095 | F-NT2RP4001095 | 0.80 |
| NT2RP4001100 | F-NT2RP4001100 | 0.79 |
| NT2RP4001117 | F-NT2RP4001117 | 0.60 |
| NT2RP4001122 | F-NT2RP4001122 | 0.82 |
| NT2RP4001126 | F-NT2RP4001126 | 0.55 |
| NT2RP4001138 | F-NT2RP4001138 | 0.94 |
| NT2RP4001143 | F-NT2RP4001143 | 0.41 |
| NT2RP4001148 | F-NT2RP4001148 | 0.37 |
| NT2RP4001149 | F-NT2RP4001149 | 0.50 |
| NT2RP4001150 | F-NT2RP4001150 | 0.94 |
| NT2RP4001159 | F-NT2RP4001159 | 0.78 |
| NT2RP4001174 | F-NT2RP4001174 | 0.94 |
| NT2RP4001206 | F-NT2RP4001206 | 0.80 |
| NT2RP4001207 | F-NT2RP4001207 | 0.38 |
| NT2RP4001210 | F-NT2RP4001210 | 0.94 |
| NT2RP4001213 | F-NT2RP4001213 | 0.46 |
| NT2RP4001219 | F-NT2RP4001219 | 0.38 |
| NT2RP4001228 | F-NT2RP4001228 | 0.61 |
| NT2RP4001235 | F-NT2RP4001235 | 0.88 |
| NT2RP4001256 | F-NT2RP4001256 | 0.60 |
| NT2RP4001260 | F-NT2RP4001260 | 0.94 |
| NT2RP4001274 | F-NT2RP4001274 | 0.82 |
| NT2RP4001276 | F-NT2RP4001276 | 0.68 |
| NT2RP4001313 | F-NT2RP4001313 | 0.77 |
| NT2RP4001315 | F-NT2RP4001315 | 0.87 |
| NT2RP4001336 | F-NT2RP4001336 | 0.48 |
| NT2RP4001339 | F-NT2RP4001339 | 0.41 |
| NT2RP4001343 | F-NT2RP4001343 | 0.63 |
| NT2RP4001345 | F-NT2RP4001345 | 0.89 |
| NT2RP4001351 | F-NT2RP4001351 | 0.87 |
| NT2RP4001353 | F-NT2RP4001353 | 0.72 |
| NT2RP4001372 | F-NT2RP4001372 | 0.78 |
| NT2RP4001373 | F-NT2RP4001373 | 0.60 |
| NT2RP4001375 | F-NT2RP4001375 | 0.43 |
| NT2RP4001379 | F-NT2RP4001379 | 0.77 |
| NT2RP4001389 | F-NT2RP4001389 | 0.41 |
| NT2RP4001414 | F-NT2RP4001414 | 0.90 |
| NT2RP4001433 | F-NT2RP4001433 | 0.39 |
| NT2RP4001442 | F-NT2RP4001442 | 0.59 |
| NT2RP4001447 | F-NT2RP4001447 | 0.33 |
| NT2RP4001474 | F-NT2RP4001474 | 0.89 |
| NT2RP4001483 | F-NT2RP4001483 | 0.94 |
| NT2RP4001498 | F-NT2RP4001498 | 0.59 |
| NT2RP4001502 | F-NT2RP4001502 | 0.61 |
| NT2RP4001507 | F-NT2RP4001507 | 0.91 |
| NT2RP4001524 | F-NT2RP4001524 | 0.61 |
| NT2RP4001529 | F-NT2RP4001529 | 0.75 |
| NT2RP4001547 | F-NT2RP4001547 | 0.77 |
| NT2RP4001551 | F-NT2RP4001551 | 0.79 |
| NT2RP4001555 | F-NT2RP4001555 | 0.79 |
| NT2RP4001567 | F-NT2RP4001567 | 0.39 |
| NT2RP4001568 | F-NT2RP4001568 | 0.45 |
| NT2RP4001571 | F-NT2RP4001571 | 0.76 |
| NT2RP4001574 | F-NT2RP4001574 | 0.91 |
| NT2RP4001575 | F-NT2RP4001575 | 0.57 |
| NT2RP4001592 | F-NT2RP4001592 | 0.71 |
| NT2RP4001610 | F-NT2RP4001610 | 0.94 |
| NT2RP4001614 | F-NT2RP4001614 | 0.73 |
| NT2RP4001634 | F-NT2RP4001634 | 0.40 |
| NT2RP4001638 | F-NT2RP4001638 | 0.37 |
| NT2RP4001644 | F-NT2RP4001644 | 0.94 |
| NT2RP4001656 | F-NT2RP4001656 | 0.92 |
| NT2RP4001677 | F-NT2RP4001677 | 0.47 |
| NT2RP4001679 | F-NT2RP4001679 | 0.54 |
| NT2RP4001696 | F-NT2RP4001696 | 0.62 |
| NT2RP4001725 | F-NT2RP4001725 | 0.94 |
| NT2RP4001730 | F-NT2RP4001730 | 0.94 |
| NT2RP4001739 | F-NT2RP4001739 | 0.82 |
| NT2RP4001753 | F-NT2RP4001753 | 0.66 |
| NT2RP4001760 | F-NT2RP4001760 | 0.39 |
| NT2RP4001790 | F-NT2RP4001790 | 0.64 |
| NT2RP4001803 | F-NT2RP4001803 | 0.87 |
| NT2RP4001822 | F-NT2RP4001822 | 0.84 |
| NT2RP4001823 | F-NT2RP4001823 | 0.56 |
| NT2RP4001828 | F-NT2RP4001828 | 0.45 |
| NT2RP4001838 | F-NT2RP4001838 | 0.87 |
| NT2RP4001841 | F-NT2RP4001841 | 0.58 |
| NT2RP4001849 | F-NT2RP4001849 | 0.88 |
| NT2RP4001861 | F-NT2RP4001861 | 0.80 |
| NT2RP4001893 | F-NT2RP4001893 | 0.94 |
| NT2RP4001896 | F-NT2RP4001896 | 0.93 |
| NT2RP4001901 | F-NT2RP4001901 | 0.89 |
| NT2RP4001927 | F-NT2RP4001927 | 0.77 |
| NT2RP4001938 | F-NT2RP4001938 | 0.94 |
| NT2RP4001946 | F-NT2RP4001946 | 0.74 |
| NT2RP4001950 | F-NT2RP4001950 | 0.45 |
| NT2RP4001953 | F-NT2RP4001953 | 0.49 |
| NT2RP4001966 | F-NT2RP4001966 | 0.86 |
| NT2RP4001975 | F-NT2RP4001975 | 0.94 |
| NT2RP4002018 | F-NT2RP4002018 | 0.67 |
| NT2RP4002047 | F-NT2RP4002047 | 0.67 |
| NT2RP4002052 | F-NT2RP4002052 | 0.42 |
| NT2RP4002058 | F-NT2RP4002058 | 0.78 |
| NT2RP4002071 | F-NT2RP4002071 | 0.94 |
| NT2RP4002078 | F-NT2RP4002078 | 0.38 |
| NT2RP4002081 | F-NT2RP4002081 | 0.55 |
| NT2RP4002083 | F-NT2RP4002083 | 0.86 |
| NT2RP4002408 | F-NT2RP4002408 | 0.64 |
| NT2RP4002791 | F-NT2RP4002791 | 0.84 |
| NT2RP4002888 | F-NT2RP4002888 | 0.31 |
| NT2RP5003459 | F-NT2RP5003459 | 0.94 |
| NT2RP5003461 | F-NT2RP5003461 | 0.94 |
| NT2RP5003477 | F-NT2RP5003477 | 0.44 |
| NT2RP5003492 | F-NT2RP5003492 | 0.57 |
| NT2RP5003500 | F-NT2RP5003500 | 0.94 |
| NT2RP5003506 | F-NT2RP5003506 | 0.94 |
| NT2RP5003512 | F-NT2RP5003512 | 0.42 |
| NT2RP5003522 | F-NT2RP5003522 | 0.94 |
| NT2RP5003524 | F-NT2RP5003524 | 0.58 |
| NT2RP5003534 | F-NT2RP5003534 | 0.32 |
| OVARC1000001 | F-OVARC1000001 | 0.74 |
| OVARC1000004 | F-OVARC1000004 | 0.90 |
| OVARC1000006 | F-OVARC1000006 | 0.94 |
| OVARC1000013 | F-OVARC1000013 | 0.48 |
| OVARC1000014 | F-OVARC1000014 | 0.69 |
| OVARC1000035 | F-OVARC1000035 | 0.59 |
| OVARC1000060 | F-OVARC1000060 | 0.76 |
| OVARC1000087 | F-OVARC1000087 | 0.31 |
| OVARC1000091 | F-OVARC1000091 | 0.88 |
| OVARC1000106 | F-OVARC1000106 | 0.88 |
| OVARC1000109 | F-OVARC1000109 | 0.94 |
| OVARC1000113 | F-OVARC1000113 | 0.40 |
| OVARC1000114 | F-OVARC1000114 | 0.53 |
| OVARC1000139 | F-OVARC1000139 | 0.88 |
| OVARC1000148 | F-OVARC1000148 | 0.94 |
| OVARC1000151 | F-OVARC1000151 | 0.34 |
| OVARC1000168 | F-OVARC1000168 | 0.56 |
| OVARC1000209 | F-OVARC1000209 | 0.94 |
| OVARC1000212 | F-OVARC1000212 | 0.87 |
| OVARC1000241 | F-OVARC1000241 | 0.59 |
| OVARC1000288 | F-OVARC1000288 | 0.87 |
| OVARC1000304 | F-OVARC1000304 | 0.94 |
| OVARC1000309 | F-OVARC1000309 | 0.76 |
| OVARC1000321 | F-OVARC1000321 | 0.90 |
| OVARC1000326 | F-OVARC1000326 | 0.46 |
| OVARC1000335 | F-OVARC1000335 | 0.55 |
| OVARC1000347 | F-OVARC1000347 | 0.43 |
| OVARC1000384 | F-OVARC1000384 | 0.90 |
| OVARC1000408 | F-OVARC1000408 | 0.42 |
| OVARC1000411 | F-OVARC1000411 | 0.65 |
| OVARC1000420 | F-OVARC1000420 | 0.84 |
| OVARC1000437 | F-OVARC1000437 | 0.94 |
| OVARC1000440 | F-OVARC1000440 | 0.94 |
| OVARC1000442 | F-OVARC1000442 | 0.94 |
| OVARC1000443 | F-OVARC1000443 | 0.74 |
| OVARC1000461 | F-OVARC1000461 | 0.89 |
| OVARC1000465 | F-OVARC1000465 | 0.75 |
| OVARC1000466 | F-OVARC1000466 | 0.94 |
| OVARC1000473 | F-OVARC1000473 | 0.31 |
| OVARC1000479 | F-OVARC1000479 | 0.42 |
| OVARC1000520 | F-OVARC1000520 | 0.94 |
| OVARC1000556 | F-OVARC1000556 | 0.94 |
| OVARC1000557 | F-OVARC1000557 | 0.72 |
| OVARC1000564 | F-OVARC1000564 | 0.94 |
| OVARC1000576 | F-OVARC1000576 | 0.40 |
| OVARC1000588 | F-OVARC1000588 | 0.45 |
| OVARC1000605 | F-OVARC1000605 | 0.58 |
| OVARC1000622 | F-OVARC1000622 | 0.80 |
| OVARC1000640 | F-OVARC1000640 | 0.35 |
| OVARC1000649 | F-OVARC1000649 | 0.94 |
| OVARC1000661 | F-OVARC1000661 | 0.87 |
| OVARC1000681 | F-OVARC1000681 | 0.84 |
| OVARC1000682 | F-OVARC1000682 | 0.38 |
| OVARC1000689 | F-OVARC1000689 | 0.36 |
| OVARC1000703 | F-OVARC1000703 | 0.92 |
| OVARC1000722 | F-OVARC1000722 | 0.94 |
| OVARC1000730 | F-OVARC1000730 | 0.90 |
| OVARC1000746 | F-OVARC1000746 | 0.42 |
| OVARC1000771 | F-OVARC1000771 | 0.94 |
| OVARC1000781 | F-OVARC1000781 | 0.80 |
| OVARC1000787 | F-OVARC1000787 | 0.41 |
| OVARC1000800 | F-OVARC1000800 | 0.85 |
| OVARC1000834 | F-OVARC1000834 | 0.62 |
| OVARC1000846 | F-OVARC1000846 | 0.49 |
| OVARC1000850 | F-OVARC1000850 | 0.94 |
| OVARC1000862 | F-OVARC1000862 | 0.54 |
| OVARC1000876 | F-OVARC1000876 | 0.74 |
| OVARC1000883 | F-OVARC1000883 | 0.55 |
| OVARC1000885 | F-OVARC1000885 | 0.94 |
| OVARC1000886 | F-OVARC1000886 | 0.61 |
| OVARC1000890 | F-OVARC1000890 | 0.45 |
| OVARC1000912 | F-OVARC1000912 | 0.63 |
| OVARC1000915 | F-OVARC1000915 | 0.31 |
| OVARC1000924 | F-OVARC1000924 | 0.82 |
| OVARC1000945 | F-OVARC1000945 | 0.74 |
| OVARC1000959 | F-OVARC1000959 | 0.33 |
| OVARC1000964 | F-OVARC1000964 | 0.60 |
| OVARC1000984 | F-OVARC1000984 | 0.59 |
| OVARC1000996 | F-OVARC1000996 | 0.83 |
| OVARC1000999 | F-OVARC1000999 | 0.94 |
| OVARC1001004 | F-OVARC1001004 | 0.69 |
| OVARC1001010 | F-OVARC1001010 | 0.51 |
| OVARC1001032 | F-OVARC1001032 | 0.32 |
| OVARC1001034 | F-OVARC1001034 | 0.78 |
| OVARC1001038 | F-OVARC1001038 | 0.93 |
| OVARC1001040 | F-OVARC1001040 | 0.68 |
| OVARC1001044 | F-OVARC1001044 | 0.66 |
| OVARC1001055 | F-OVARC1001055 | 0.76 |
| OVARC1001065 | F-OVARC1001065 | 0.31 |
| OVARC1001068 | F-OVARC1001068 | 0.63 |
| OVARC1001074 | F-OVARC1001074 | 0.82 |
| OVARC1001092 | F-OVARC1001092 | 0.50 |
| OVARC1001107 | F-OVARC1001107 | 0.65 |
| OVARC1001113 | F-OVARC1001113 | 0.86 |
| OVARC1001154 | F-OVARC1001154 | 0.43 |
| OVARC1001161 | F-OVARC1001161 | 0.75 |
| OVARC1001162 | F-OVARC1001162 | 0.61 |
| OVARC1001167 | F-OVARC1001167 | 0.31 |
| OVARC1001170 | F-OVARC1001170 | 0.46 |
| OVARC1001171 | F-OVARC1001171 | 0.78 |
| OVARC1001173 | F-OVARC1001173 | 0.71 |
| OVARC1001176 | F-OVARC1001176 | 0.83 |
| OVARC1001180 | F-OVARC1001180 | 0.53 |
| OVARC1001188 | F-OVARC1001188 | 0.42 |
| OVARC1001200 | F-OVARC1001200 | 0.94 |
| OVARC1001232 | F-OVARC1001232 | 0.90 |
| OVARC1001243 | F-OVARC1001243 | 0.59 |
| OVARC1001244 | F-OVARC1001244 | 0.79 |
| OVARC1001270 | F-OVARC1001270 | 0.48 |
| OVARC1001271 | F-OVARC1001271 | 0.67 |
| OVARC1001296 | F-OVARC1001296 | 0.60 |
| OVARC1001306 | F-OVARC1001306 | 0.44 |
| OVARC1001329 | F-OVARC1001329 | 0.91 |
| OVARC1001341 | F-OVARC1001341 | 0.82 |
| OVARC1001344 | F-OVARC1001344 | 0.94 |
| OVARC1001360 | F-OVARC1001360 | 0.94 |
| OVARC1001369 | F-OVARC1001369 | 0.36 |
| OVARC1001372 | F-OVARC1001372 | 0.63 |
| OVARC1001376 | F-OVARC1001376 | 0.81 |
| OVARC1001381 | F-OVARC1001381 | 0.78 |
| OVARC1001391 | F-OVARC1001391 | 0.33 |
| OVARC1001399 | F-OVARC1001399 | 0.67 |
| OVARC1001417 | F-OVARC1001417 | 0.94 |
| OVARC1001419 | F-OVARC1001419 | 0.34 |
| OVARC1001425 | F-OVARC1001425 | 0.73 |
| OVARC1001436 | F-OVARC1001436 | 0.59 |
| OVARC1001453 | F-OVARC1001453 | 0.45 |
| OVARC1001476 | F-OVARC1001476 | 0.85 |
| OVARC1001489 | F-OVARC1001489 | 0.35 |
| OVARC1001496 | F-OVARC1001496 | 0.90 |
| OVARC1001506 | F-OVARC1001506 | 0.59 |
| OVARC1001525 | F-OVARC1001525 | 0.87 |
| OVARC1001555 | F-OVARC1001555 | 0.67 |
| OVARC1001577 | F-OVARC1001577 | 0.94 |
| OVARC1001610 | F-OVARC1001610 | 0.38 |
| OVARC1001611 | F-OVARC1001611 | 0.34 |
| OVARC1001702 | F-OVARC1001702 | 0.88 |
| OVARC1001703 | F-OVARC1001703 | 0.76 |
| OVARC1001711 | F-OVARC1001711 | 0.82 |
| OVARC1001713 | F-OVARC1001713 | 0.82 |
| OVARC1001731 | F-OVARC1001731 | 0.94 |
| OVARC1001762 | F-OVARC1001762 | 0.59 |
| OVARC1001766 | F-OVARC1001766 | 0.94 |
| OVARC1001767 | F-OVARC1001767 | 0.70 |
| OVARC1001768 | F-OVARC1001768 | 0.32 |
| OVARC1001791 | F-OVARC1001791 | 0.74 |
| OVARC1001802 | F-OVARC1001802 | 0.76 |
| OVARC1001809 | F-OVARC1001809 | 0.63 |
| OVARC1001820 | F-OVARC1001820 | 0.94 |
| OVARC1001828 | F-OVARC1001828 | 0.78 |
| OVARC1001861 | F-OVARC1001861 | 0.94 |
| OVARC1001873 | F-OVARC1001873 | 0.31 |
| OVARC1001879 | F-OVARC1001879 | 0.94 |
| OVARC1001880 | F-OVARC1001880 | 0.46 |
| OVARC1001916 | F-OVARC1001916 | 0.82 |
| OVARC1001942 | F-OVARC1001942 | 0.72 |
| OVARC1001943 | F-OVARC1001943 | 0.49 |
| OVARC1001949 | F-OVARC1001949 | 0.46 |
| OVARC1001950 | F-OVARC1001950 | 0.94 |
| OVARC1001987 | F-OVARC1001987 | 0.91 |
| OVARC1002050 | F-OVARC1002050 | 0.85 |
| OVARC1002082 | F-OVARC1002082 | 0.94 |
| OVARC1002107 | F-OVARC1002107 | 0.33 |
| OVARC1002112 | F-OVARC1002112 | 0.94 |
| OVARC1002127 | F-OVARC1002127 | 0.80 |
| OVARC1002138 | F-OVARC1002138 | 0.46 |
| OVARC1002156 | F-OVARC1002156 | 0.43 |
| OVARC1002158 | F-OVARC1002158 | 0.94 |
| OVARC1002165 | F-OVARC1002165 | 0.88 |
| OVARC1002182 | F-OVARC1002182 | 0.94 |
| PLACE1000004 | F-PLACE1000004 | 0.43 |
| PLACE1000005 | F-PLACE1000005 | 0.37 |
| PLACE1000007 | F-PLACE1000007 | 0.72 |
| PLACE1000014 | F-PLACE1000014 | 0.38 |
| PLACE1000048 | F-PLACE1000048 | 0.36 |
| PLACE1000050 | F-PLACE1000050 | 0.94 |
| PLACE1000061 | F-PLACE1000061 | 0.56 |
| PLACE1000066 | F-PLACE1000066 | 0.94 |
| PLACE1000081 | F-PLACE1000081 | 0.37 |
| PLACE1000133 | F-PLACE1000133 | 0.53 |
| PLACE1000142 | F-PLACE1000142 | 0.94 |
| PLACE1000184 | F-PLACE1000184 | 0.73 |
| PLACE1000185 | F-PLACE1000185 | 0.86 |
| PLACE1000213 | F-PLACE1000213 | 0.34 |
| PLACE1000236 | F-PLACE1000236 | 0.76 |
| PLACE1000246 | F-PLACE1000246 | 0.91 |
| PLACE1000308 | F-PLACE1000308 | 0.40 |
| PLACE1000347 | F-PLACE1000347 | 0.48 |
| PLACE1000374 | F-PLACE1000374 | 0.58 |
| PLACE1000380 | F-PLACE1000380 | 0.94 |
| PLACE1000383 | F-PLACE1000383 | 0.39 |
| PLACE1000401 | F-PLACE1000401 | 0.94 |
| PLACE1000406 | F-PLACE1000406 | 0.94 |
| PLACE1000420 | F-PLACE1000420 | 0.82 |
| PLACE1000435 | F-PLACE1000435 | 0.32 |
| PLACE1000444 | F-PLACE1000444 | 0.41 |
| PLACE1000453 | F-PLACE1000453 | 0.76 |
| PLACE1000492 | F-PLACE1000492 | 0.65 |
| PLACE1000547 | F-PLACE1000547 | 0.94 |
| PLACE1000562 | F-PLACE1000562 | 0.94 |
| PLACE1000564 | F-PLACE1000564 | 0.45 |
| PLACE1000588 | F-PLACE1000588 | 0.67 |
| PLACE1000596 | F-PLACE1000596 | 0.60 |
| PLACE1000610 | F-PLACE1000610 | 0.94 |
| PLACE1000611 | F-PLACE1000611 | 0.48 |
| PLACE1000636 | F-PLACE1000636 | 0.92 |
| PLACE1000653 | F-PLACE1000653 | 0.57 |
| PLACE1000656 | F-PLACE1000656 | 0.94 |
| PLACE1000706 | F-PLACE1000706 | 0.94 |
| PLACE1000712 | F-PLACE1000712 | 0.78 |
| PLACE1000716 | F-PLACE1000716 | 0.94 |
| PLACE1000748 | F-PLACE1000748 | 0.52 |
| PLACE1000755 | F-PLACE1000755 | 0.87 |
| PLACE1000769 | F-PLACE1000769 | 0.94 |
| PLACE1000785 | F-PLACE1000785 | 0.33 |
| PLACE1000786 | F-PLACE1000786 | 0.88 |
| PLACE1000793 | F-PLACE1000793 | 0.79 |
| PLACE1000798 | F-PLACE1000798 | 0.59 |
| PLACE1000849 | F-PLACE1000849 | 0.64 |
| PLACE1000856 | F-PLACE1000856 | 0.40 |
| PLACE1000863 | F-PLACE1000863 | 0.94 |
| PLACE1000909 | F-PLACE1000909 | 0.94 |
| PLACE1000948 | F-PLACE1000948 | 0.92 |
| PLACE1000972 | F-PLACE1000972 | 0.73 |
| PLACE1000977 | F-PLACE1000977 | 0.72 |
| PLACE1000987 | F-PLACE1000987 | 0.93 |
| PLACE1001000 | F-PLACE1001000 | 0.37 |
| PLACE1001010 | F-PLACE1001010 | 0.50 |
| PLACE1001024 | F-PLACE1001024 | 0.94 |
| PLACE1001036 | F-PLACE1001036 | 0.51 |
| PLACE1001054 | F-PLACE1001054 | 0.88 |
| PLACE1001062 | F-PLACE1001062 | 0.57 |
| PLACE1001092 | F-PLACE1001092 | 0.94 |
| PLACE1001104 | F-PLACE1001104 | 0.38 |
| PLACE1001168 | F-PLACE1001168 | 0.41 |
| PLACE1001171 | F-PLACE1001171 | 0.36 |
| PLACE1001185 | F-PLACE1001185 | 0.93 |
| PLACE1001238 | F-PLACE1001238 | 0.87 |
| PLACE1001241 | F-PLACE1001241 | 0.67 |
| PLACE1001257 | F-PLACE1001257 | 0.40 |
| PLACE1001280 | F-PLACE1001280 | 0.70 |
| PLACE1001294 | F-PLACE1001294 | 0.49 |
| PLACE1001304 | F-PLACE1001304 | 0.94 |
| PLACE1001311 | F-PLACE1001311 | 0.53 |
| PLACE1001351 | F-PLACE1001351 | 0.86 |
| PLACE1001366 | F-PLACE1001366 | 0.39 |
| PLACE1001383 | F-PLACE1001383 | 0.94 |
| PLACE1001387 | F-PLACE1001387 | 0.34 |
| PLACE1001399 | F-PLACE1001399 | 0.38 |
| PLACE1001412 | F-PLACE1001412 | 0.94 |
| PLACE1001456 | F-PLACE1001456 | 0.42 |
| PLACE1001484 | F-PLACE1001484 | 0.88 |
| PLACE1001503 | F-PLACE1001503 | 0.85 |
| PLACE1001545 | F-PLACE1001545 | 0.92 |
| PLACE1001551 | F-PLACE1001551 | 0.39 |
| PLACE1001570 | F-PLACE1001570 | 0.40 |
| PLACE1001602 | F-PLACE1001602 | 0.60 |
| PLACE1001608 | F-PLACE1001608 | 0.40 |
| PLACE1001610 | F-PLACE1001610 | 0.43 |
| PLACE1001632 | F-PLACE1001632 | 0.48 |
| PLACE1001634 | F-PLACE1001634 | 0.60 |
| PLACE1001692 | F-PLACE1001692 | 0.74 |
| PLACE1001729 | F-PLACE1001729 | 0.69 |
| PLACE1001739 | F-PLACE1001739 | 0.49 |
| PLACE1001740 | F-PLACE1001740 | 0.50 |
| PLACE1001761 | F-PLACE1001761 | 0.71 |
| PLACE1001771 | F-PLACE1001771 | 0.39 |
| PLACE1001781 | F-PLACE1001781 | 0.57 |
| PLACE1001810 | F-PLACE1001810 | 0.57 |
| PLACE1001817 | F-PLACE1001817 | 0.91 |
| PLACE1001844 | F-PLACE1001844 | 0.34 |
| PLACE1001869 | F-PLACE1001869 | 0.34 |
| PLACE1001912 | F-PLACE1001912 | 0.82 |
| PLACE1001920 | F-PLACE1001920 | 0.85 |
| PLACE1001928 | F-PLACE1001928 | 0.60 |
| PLACE1001983 | F-PLACE1001983 | 0.39 |
| PLACE1001989 | F-PLACE1001989 | 0.74 |
| PLACE1002004 | F-PLACE1002004 | 0.70 |
| PLACE1002046 | F-PLACE1002046 | 0.81 |
| PLACE1002072 | F-PLACE1002072 | 0.94 |
| PLACE1002073 | F-PLACE1002073 | 0.70 |
| PLACE1002090 | F-PLACE1002090 | 0.64 |
| PLACE1002115 | F-PLACE1002115 | 0.60 |
| PLACE1002119 | F-PLACE1002119 | 0.71 |
| PLACE1002140 | F-PLACE1002140 | 0.94 |
| PLACE1002163 | F-PLACE1002163 | 0.56 |
| PLACE1002170 | F-PLACE1002170 | 0.60 |
| PLACE1002171 | F-PLACE1002171 | 0.72 |
| PLACE1002213 | F-PLACE1002213 | 0.35 |
| PLACE1002342 | F-PLACE1002342 | 0.40 |
| PLACE1002395 | F-PLACE1002395 | 0.87 |
| PLACE1002433 | F-PLACE1002433 | 0.73 |
| PLACE1002437 | F-PLACE1002437 | 0.46 |
| PLACE1002438 | F-PLACE1002438 | 0.41 |
| PLACE1002450 | F-PLACE1002450 | 0.48 |
| PLACE1002465 | F-PLACE1002465 | 0.34 |
| PLACE1002474 | F-PLACE1002474 | 0.89 |
| PLACE1002499 | F-PLACE1002499 | 0.94 |
| PLACE1002529 | F-PLACE1002529 | 0.45 |
| PLACE1002532 | F-PLACE1002532 | 0.76 |
| PLACE1002571 | F-PLACE1002571 | 0.40 |
| PLACE1002625 | F-PLACE1002625 | 0.36 |
| PLACE1002655 | F-PLACE1002655 | 0.41 |
| PLACE1002665 | F-PLACE1002665 | 0.80 |
| PLACE1002685 | F-PLACE1002685 | 0.31 |
| PLACE1002714 | F-PLACE1002714 | 0.90 |
| PLACE1002722 | F-PLACE1002722 | 0.43 |
| PLACE1002775 | F-PLACE1002775 | 0.94 |
| PLACE1002794 | F-PLACE1002794 | 0.90 |
| PLACE1002811 | F-PLACE1002811 | 0.88 |
| PLACE1002815 | F-PLACE1002815 | 0.40 |
| PLACE1002816 | F-PLACE1002816 | 0.73 |
| PLACE1002834 | F-PLACE1002834 | 0.41 |
| PLACE1002839 | F-PLACE1002839 | 0.73 |
| PLACE1002851 | F-PLACE1002851 | 0.90 |
| PLACE1002908 | F-PLACE1002908 | 0.94 |
| PLACE1002941 | F-PLACE1002941 | 0.33 |
| PLACE1002991 | F-PLACE1002991 | 0.39 |
| PLACE1002993 | F-PLACE1002993 | 0.94 |
| PLACE1002996 | F-PLACE1002996 | 0.40 |
| PLACE1003025 | F-PLACE1003025 | 0.77 |
| PLACE1003027 | F-PLACE1003027 | 0.54 |
| PLACE1003044 | F-PLACE1003044 | 0.71 |
| PLACE1003045 | F-PLACE1003045 | 0.89 |
| PLACE1003092 | F-PLACE1003092 | 0.59 |
| PLACE1003100 | F-PLACE1003100 | 0.38 |
| PLACE1003108 | F-PLACE1003108 | 0.94 |
| PLACE1003136 | F-PLACE1003136 | 0.87 |
| PLACE1003145 | F-PLACE1003145 | 0.94 |
| PLACE1003174 | F-PLACE1003174 | 0.46 |
| PLACE1003176 | F-PLACE1003176 | 0.48 |
| PLACE1003190 | F-PLACE1003190 | 0.57 |
| PLACE1003200 | F-PLACE1003200 | 0.47 |
| PLACE1003249 | F-PLACE1003249 | 0.33 |
| PLACE1003256 | F-PLACE1003256 | 0.57 |
| PLACE1003296 | F-PLACE1003296 | 0.41 |
| PLACE1003302 | F-PLACE1003302 | 0.94 |
| PLACE1003334 | F-PLACE1003334 | 0.78 |
| PLACE1003342 | F-PLACE1003342 | 0.34 |
| PLACE1003353 | F-PLACE1003353 | 0.71 |
| PLACE1003366 | F-PLACE1003366 | 0.66 |
| PLACE1003369 | F-PLACE1003369 | 0.91 |
| PLACE1003383 | F-PLACE1003383 | 0.70 |
| PLACE1003394 | F-PLACE1003394 | 0.94 |
| PLACE1003454 | F-PLACE1003454 | 0.94 |
| PLACE1003493 | F-PLACE1003493 | 0.93 |
| PLACE1003537 | F-PLACE1003537 | 0.94 |
| PLACE1003553 | F-PLACE1003553 | 0.34 |
| PLACE1003592 | F-PLACE1003592 | 0.33 |
| PLACE1003596 | F-PLACE1003596 | 0.89 |
| PLACE1003602 | F-PLACE1003602 | 0.94 |
| PLACE1003605 | F-PLACE1003605 | 0.94 |
| PLACE1003611 | F-PLACE1003611 | 0.80 |
| PLACE1003625 | F-PLACE1003625 | 0.39 |
| PLACE1003669 | F-PLACE1003669 | 0.79 |
| PLACE1003704 | F-PLACE1003704 | 0.43 |
| PLACE1003709 | F-PLACE1003709 | 0.90 |
| PLACE1003711 | F-PLACE1003711 | 0.74 |
| PLACE1003723 | F-PLACE1003723 | 0.63 |
| PLACE1003738 | F-PLACE1003738 | 0.91 |
| PLACE1003762 | F-PLACE1003762 | 0.94 |
| PLACE1003771 | F-PLACE1003771 | 0.56 |
| PLACE1003783 | F-PLACE1003783 | 0.39 |
| PLACE1003784 | F-PLACE1003784 | 0.61 |
| PLACE1003795 | F-PLACE1003795 | 0.32 |
| PLACE1003870 | F-PLACE1003870 | 0.94 |
| PLACE1003885 | F-PLACE1003885 | 0.94 |
| PLACE1003886 | F-PLACE1003886 | 0.94 |
| PLACE1003888 | F-PLACE1003888 | 0.36 |
| PLACE1003892 | F-PLACE1003892 | 0.92 |
| PLACE1003903 | F-PLACE1003903 | 0.68 |
| PLACE1003915 | F-PLACE1003915 | 0.54 |
| PLACE1003923 | F-PLACE1003923 | 0.52 |
| PLACE1003936 | F-PLACE1003936 | 0.67 |
| PLACE1003968 | F-PLACE1003968 | 0.59 |
| PLACE1004103 | F-PLACE1004103 | 0.94 |
| PLACE1004104 | F-PLACE1004104 | 0.44 |
| PLACE1004114 | F-PLACE1004114 | 0.91 |
| PLACE1004128 | F-PLACE1004128 | 0.72 |
| PLACE1004149 | F-PLACE1004149 | 0.41 |
| PLACE1004156 | F-PLACE1004156 | 0.50 |
| PLACE1004161 | F-PLACE1004161 | 0.77 |
| PLACE1004183 | F-PLACE1004183 | 0.62 |
| PLACE1004197 | F-PLACE1004197 | 0.39 |
| PLACE1004203 | F-PLACE1004203 | 0.94 |
| PLACE1004258 | F-PLACE1004258 | 0.46 |
| PLACE1004270 | F-PLACE1004270 | 0.65 |
| PLACE1004277 | F-PLACE1004277 | 0.86 |
| PLACE1004289 | F-PLACE1004289 | 0.79 |
| PLACE1004302 | F-PLACE1004302 | 0.57 |
| PLACE1004316 | F-PLACE1004316 | 0.64 |
| PLACE1004358 | F-PLACE1004358 | 0.85 |
| PLACE1004376 | F-PLACE1004376 | 0.64 |
| PLACE1004388 | F-PLACE1004388 | 0.94 |
| PLACE1004405 | F-PLACE1004405 | 0.82 |
| PLACE1004428 | F-PLACE1004428 | 0.68 |
| PLACE1004437 | F-PLACE1004437 | 0.94 |
| PLACE1004451 | F-PLACE1004451 | 0.39 |
| PLACE1004460 | F-PLACE1004460 | 0.92 |
| PLACE1004473 | F-PLACE1004473 | 0.94 |
| PLACE1004510 | F-PLACE1004510 | 0.94 |
| PLACE1004516 | F-PLACE1004516 | 0.58 |
| PLACE1004548 | F-PLACE1004548 | 0.59 |
| PLACE1004550 | F-PLACE1004550 | 0.94 |
| PLACE1004564 | F-PLACE1004564 | 0.53 |
| PLACE1004629 | F-PLACE1004629 | 0.34 |
| PLACE1004645 | F-PLACE1004645 | 0.59 |
| PLACE1004646 | F-PLACE1004646 | 0.35 |
| PLACE1004664 | F-PLACE1004664 | 0.31 |
| PLACE1004672 | F-PLACE1004672 | 0.83 |
| PLACE1004674 | F-PLACE1004674 | 0.90 |
| PLACE1004686 | F-PLACE1004686 | 0.31 |
| PLACE1004691 | F-PLACE1004691 | 0.89 |
| PLACE1004722 | F-PLACE1004722 | 0.48 |
| PLACE1004736 | F-PLACE1004736 | 0.80 |
| PLACE1004740 | F-PLACE1004740 | 0.34 |
| PLACE1004743 | F-PLACE1004743 | 0.70 |
| PLACE1004751 | F-PLACE1004751 | 0.49 |
| PLACE1004777 | F-PLACE1004777 | 0.72 |
| PLACE1004804 | F-PLACE1004804 | 0.46 |
| PLACE1004814 | F-PLACE1004814 | 0.70 |
| PLACE1004824 | F-PLACE1004824 | 0.63 |
| PLACE1004868 | F-PLACE1004868 | 0.94 |
| PLACE1004885 | F-PLACE1004885 | 0.63 |
| PLACE1004902 | F-PLACE1004902 | 0.56 |
| PLACE1004918 | F-PLACE1004918 | 0.85 |
| PLACE1004930 | F-PLACE1004930 | 0.83 |
| PLACE1004937 | F-PLACE1004937 | 0.46 |
| PLACE1004969 | F-PLACE1004969 | 0.62 |
| PLACE1004982 | F-PLACE1004982 | 0.61 |
| PLACE1005026 | F-PLACE1005026 | 0.81 |
| PLACE1005027 | F-PLACE1005027 | 0.91 |
| PLACE1005046 | F-PLACE1005046 | 0.31 |
| PLACE1005055 | F-PLACE1005055 | 0.57 |
| PLACE1005066 | F-PLACE1005066 | 0.68 |
| PLACE1005101 | F-PLACE1005101 | 0.94 |
| PLACE1005102 | F-PLACE1005102 | 0.94 |
| PLACE1005181 | F-PLACE1005181 | 0.94 |
| PLACE1005187 | F-PLACE1005187 | 0.94 |
| PLACE1005206 | F-PLACE1005206 | 0.67 |
| PLACE1005232 | F-PLACE1005232 | 0.72 |
| PLACE1005243 | F-PLACE1005243 | 0.81 |
| PLACE1005261 | F-PLACE1005261 | 0.75 |
| PLACE1005266 | F-PLACE1005266 | 0.55 |
| PLACE1005277 | F-PLACE1005277 | 0.43 |
| PLACE1005287 | F-PLACE1005287 | 0.77 |
| PLACE1005305 | F-PLACE1005305 | 0.94 |
| PLACE1005308 | F-PLACE1005308 | 0.46 |
| PLACE1005313 | F-PLACE1005313 | 0.94 |
| PLACE1005327 | F-PLACE1005327 | 0.82 |
| PLACE1005331 | F-PLACE1005331 | 0.94 |
| PLACE1005335 | F-PLACE1005335 | 0.94 |
| PLACE1005373 | F-PLACE1005373 | 0.71 |
| PLACE1005374 | F-PLACE1005374 | 0.82 |
| PLACE1005480 | F-PLACE1005480 | 0.43 |
| PLACE1005481 | F-PLACE1005481 | 0.42 |
| PLACE1005494 | F-PLACE1005494 | 0.34 |
| PLACE1005530 | F-PLACE1005530 | 0.94 |
| PLACE1005550 | F-PLACE1005550 | 0.86 |
| PLACE1005554 | F-PLACE1005554 | 0.34 |
| PLACE1005557 | F-PLACE1005557 | 0.80 |
| PLACE1005595 | F-PLACE1005595 | 0.69 |
| PLACE1005603 | F-PLACE1005603 | 0.92 |
| PLACE1005623 | F-PLACE1005623 | 0.68 |
| PLACE1005630 | F-PLACE1005630 | 0.58 |
| PLACE1005646 | F-PLACE1005646 | 0.31 |
| PLACE1005656 | F-PLACE1005656 | 0.85 |
| PLACE1005698 | F-PLACE1005698 | 0.91 |
| PLACE1005727 | F-PLACE1005727 | 0.94 |
| PLACE1005739 | F-PLACE1005739 | 0.87 |
| PLACE1005755 | F-PLACE1005755 | 0.32 |
| PLACE1005763 | F-PLACE1005763 | 0.74 |
| PLACE1005799 | F-PLACE1005799 | 0.47 |
| PLACE1005803 | F-PLACE1005803 | 0.88 |
| PLACE1005804 | F-PLACE1005804 | 0.36 |
| PLACE1005813 | F-PLACE1005813 | 0.76 |
| PLACE1005828 | F-PLACE1005828 | 0.43 |
| PLACE1005834 | F-PLACE1005834 | 0.89 |
| PLACE1005851 | F-PLACE1005851 | 0.39 |
| PLACE1005876 | F-PLACE1005876 | 0.51 |
| PLACE1005890 | F-PLACE1005890 | 0.81 |
| PLACE1005921 | F-PLACE1005921 | 0.90 |
| PLACE1005923 | F-PLACE1005923 | 0.70 |
| PLACE1005925 | F-PLACE1005925 | 0.55 |
| PLACE1005934 | F-PLACE1005934 | 0.94 |
| PLACE1005936 | F-PLACE1005936 | 0.41 |
| PLACE1005951 | F-PLACE1005951 | 0.34 |
| PLACE1005953 | F-PLACE1005953 | 0.31 |
| PLACE1005955 | F-PLACE1005955 | 0.89 |
| PLACE1005966 | F-PLACE1005966 | 0.73 |
| PLACE1005990 | F-PLACE1005990 | 0.37 |
| PLACE1006011 | F-PLACE1006011 | 0.94 |
| PLACE1006037 | F-PLACE1006037 | 0.65 |
| PLACE1006040 | F-PLACE1006040 | 0.94 |
| PLACE1006119 | F-PLACE1006119 | 0.52 |
| PLACE1006139 | F-PLACE1006139 | 0.94 |
| PLACE1006157 | F-PLACE1006157 | 0.34 |
| PLACE1006159 | F-PLACE1006159 | 0.50 |
| PLACE1006167 | F-PLACE1006167 | 0.94 |
| PLACE1006170 | F-PLACE1006170 | 0.94 |
| PLACE1006195 | F-PLACE1006195 | 0.31 |
| PLACE1006196 | F-PLACE1006196 | 0.84 |
| PLACE1006225 | F-PLACE1006225 | 0.87 |
| PLACE1006236 | F-PLACE1006236 | 0.92 |
| PLACE1006239 | F-PLACE1006239 | 0.53 |
| PLACE1006246 | F-PLACE1006246 | 0.44 |
| PLACE1006248 | F-PLACE1006248 | 0.49 |
| PLACE1006325 | F-PLACE1006325 | 0.74 |
| PLACE1006335 | F-PLACE1006335 | 0.82 |
| PLACE1006357 | F-PLACE1006357 | 0.33 |
| PLACE1006385 | F-PLACE1006385 | 0.54 |
| PLACE1006412 | F-PLACE1006412 | 0.79 |
| PLACE1006414 | F-PLACE1006414 | 0.52 |
| PLACE1006438 | F-PLACE1006438 | 0.94 |
| PLACE1006445 | F-PLACE1006445 | 0.37 |
| PLACE1006469 | F-PLACE1006469 | 0.85 |
| PLACE1006482 | F-PLACE1006482 | 0.94 |
| PLACE1006488 | F-PLACE1006488 | 0.94 |
| PLACE1006492 | F-PLACE1006492 | 0.32 |
| PLACE1006531 | F-PLACE1006531 | 0.45 |
| PLACE1006552 | F-PLACE1006552 | 0.42 |
| PLACE1006598 | F-PLACE1006598 | 0.33 |
| PLACE1006615 | F-PLACE1006615 | 0.89 |
| PLACE1006626 | F-PLACE1006626 | 0.69 |
| PLACE1006673 | F-PLACE1006673 | 0.61 |
| PLACE1006678 | F-PLACE1006678 | 0.53 |
| PLACE1006704 | F-PLACE1006704 | 0.47 |
| PLACE1006731 | F-PLACE1006731 | 0.72 |
| PLACE1006782 | F-PLACE1006782 | 0.68 |
| PLACE1006819 | F-PLACE1006819 | 0.57 |
| PLACE1006829 | F-PLACE1006829 | 0.47 |
| PLACE1006883 | F-PLACE1006883 | 0.88 |
| PLACE1006901 | F-PLACE1006901 | 0.43 |
| PLACE1006917 | F-PLACE1006917 | 0.56 |
| PLACE1006932 | F-PLACE1006932 | 0.45 |
| PLACE1006935 | F-PLACE1006935 | 0.58 |
| PLACE1006956 | F-PLACE1006956 | 0.77 |
| PLACE1006958 | F-PLACE1006958 | 0.75 |
| PLACE1006961 | F-PLACE1006961 | 0.34 |
| PLACE1006962 | F-PLACE1006962 | 0.94 |
| PLACE1006966 | F-PLACE1006966 | 0.56 |
| PLACE1006989 | F-PLACE1006989 | 0.47 |
| PLACE1007014 | F-PLACE1007014 | 0.94 |
| PLACE1007021 | F-PLACE1007021 | 0.74 |
| PLACE1007053 | F-PLACE1007053 | 0.73 |
| PLACE1007068 | F-PLACE1007068 | 0.43 |
| PLACE1007105 | F-PLACE1007105 | 0.88 |
| PLACE1007112 | F-PLACE1007112 | 0.82 |
| PLACE1007178 | F-PLACE1007178 | 0.91 |
| PLACE1007226 | F-PLACE1007226 | 0.79 |
| PLACE1007238 | F-PLACE1007238 | 0.94 |
| PLACE1007239 | F-PLACE1007239 | 0.94 |
| PLACE1007242 | F-PLACE1007242 | 0.48 |
| PLACE1007243 | F-PLACE1007243 | 0.77 |
| PLACE1007257 | F-PLACE1007257 | 0.54 |
| PLACE1007274 | F-PLACE1007274 | 0.94 |
| PLACE1007282 | F-PLACE1007282 | 0.94 |
| PLACE1007301 | F-PLACE1007301 | 0.34 |
| PLACE1007317 | F-PLACE1007317 | 0.43 |
| PLACE1007342 | F-PLACE1007342 | 0.72 |
| PLACE1007346 | F-PLACE1007346 | 0.92 |
| PLACE1007367 | F-PLACE1007367 | 0.43 |
| PLACE1007375 | F-PLACE1007375 | 0.85 |
| PLACE1007386 | F-PLACE1007386 | 0.58 |
| PLACE1007402 | F-PLACE1007402 | 0.74 |
| PLACE1007409 | F-PLACE1007409 | 0.39 |
| PLACE1007416 | F-PLACE1007416 | 0.80 |
| PLACE1007450 | F-PLACE1007450 | 0.41 |
| PLACE1007452 | F-PLACE1007452 | 0.68 |
| PLACE1007454 | F-PLACE1007454 | 0.39 |
| PLACE1007460 | F-PLACE1007460 | 0.58 |
| PLACE1007484 | F-PLACE1007484 | 0.94 |
| PLACE1007488 | F-PLACE1007488 | 0.50 |
| PLACE1007507 | F-PLACE1007507 | 0.44 |
| PLACE1007511 | F-PLACE1007511 | 0.86 |
| PLACE1007524 | F-PLACE1007524 | 0.66 |
| PLACE1007537 | F-PLACE1007537 | 0.93 |
| PLACE1007544 | F-PLACE1007544 | 0.94 |
| PLACE1007547 | F-PLACE1007547 | 0.65 |
| PLACE1007583 | F-PLACE1007583 | 0.87 |
| PLACE1007598 | F-PLACE1007598 | 0.39 |
| PLACE1007618 | F-PLACE1007618 | 0.62 |
| PLACE1007621 | F-PLACE1007621 | 0.63 |
| PLACE1007632 | F-PLACE1007632 | 0.75 |
| PLACE1007645 | F-PLACE1007645 | 0.94 |
| PLACE1007649 | F-PLACE1007649 | 0.56 |
| PLACE1007688 | F-PLACE1007688 | 0.94 |
| PLACE1007690 | F-PLACE1007690 | 0.44 |
| PLACE1007697 | F-PLACE1007697 | 0.93 |
| PLACE1007705 | F-PLACE1007705 | 0.61 |
| PLACE1007706 | F-PLACE1007706 | 0.47 |
| PLACE1007725 | F-PLACE1007725 | 0.61 |
| PLACE1007729 | F-PLACE1007729 | 0.53 |
| PLACE1007730 | F-PLACE1007730 | 0.31 |
| PLACE1007746 | F-PLACE1007746 | 0.81 |
| PLACE1007791 | F-PLACE1007791 | 0.46 |
| PLACE1007810 | F-PLACE1007810 | 0.73 |
| PLACE1007843 | F-PLACE1007843 | 0.31 |
| PLACE1007846 | F-PLACE1007846 | 0.38 |
| PLACE1007858 | F-PLACE1007858 | 0.79 |
| PLACE1007897 | F-PLACE1007897 | 0.94 |
| PLACE1007908 | F-PLACE1007908 | 0.94 |
| PLACE1007946 | F-PLACE1007946 | 0.52 |
| PLACE1007954 | F-PLACE1007954 | 0.43 |
| PLACE1007955 | F-PLACE1007955 | 0.41 |
| PLACE1007958 | F-PLACE1007958 | 0.37 |
| PLACE1007969 | F-PLACE1007969 | 0.87 |
| PLACE1007990 | F-PLACE1007990 | 0.94 |
| PLACE1008000 | F-PLACE1008000 | 0.94 |
| PLACE1008002 | F-PLACE1008002 | 0.93 |
| PLACE1008044 | F-PLACE1008044 | 0.72 |
| PLACE1008095 | F-PLACE1008095 | 0.94 |
| PLACE1008122 | F-PLACE1008122 | 0.94 |
| PLACE1008129 | F-PLACE1008129 | 0.80 |
| PLACE1008132 | F-PLACE1008132 | 0.37 |
| PLACE1008177 | F-PLACE1008177 | 0.74 |
| PLACE1008198 | F-PLACE1008198 | 0.94 |
| PLACE1008209 | F-PLACE1008209 | 0.54 |
| PLACE1008273 | F-PLACE1008273 | 0.94 |
| PLACE1008275 | F-PLACE1008275 | 0.82 |
| PLACE1008280 | F-PLACE1008280 | 0.34 |
| PLACE1008309 | F-PLACE1008309 | 0.90 |
| PLACE1008329 | F-PLACE1008329 | 0.38 |
| PLACE1008356 | F-PLACE1008356 | 0.93 |
| PLACE1008368 | F-PLACE1008368 | 0.43 |
| PLACE1008398 | F-PLACE1008398 | 0.78 |
| PLACE1008401 | F-PLACE1008401 | 0.81 |
| PLACE1008402 | F-PLACE1008402 | 0.88 |
| PLACE1008429 | F-PLACE1008429 | 0.39 |
| PLACE1008457 | F-PLACE1008457 | 0.77 |
| PLACE1008465 | F-PLACE1008465 | 0.94 |
| PLACE1008488 | F-PLACE1008488 | 0.42 |
| PLACE1008524 | F-PLACE1008524 | 0.41 |
| PLACE1008531 | F-PLACE1008531 | 0.94 |
| PLACE1008532 | F-PLACE1008532 | 0.61 |
| PLACE1008533 | F-PLACE1008533 | 0.45 |
| PLACE1008568 | F-PLACE1008568 | 0.65 |
| PLACE1008603 | F-PLACE1008603 | 0.42 |
| PLACE1008626 | F-PLACE1008626 | 0.94 |
| PLACE1008627 | F-PLACE1008627 | 0.72 |
| PLACE1008629 | F-PLACE1008629 | 0.33 |
| PLACE1008650 | F-PLACE1008650 | 0.79 |
| PLACE1008693 | F-PLACE1008693 | 0.32 |
| PLACE1008696 | F-PLACE1008696 | 0.39 |
| PLACE1008790 | F-PLACE1008790 | 0.81 |
| PLACE1008808 | F-PLACE1008808 | 0.51 |
| PLACE1008813 | F-PLACE1008813 | 0.36 |
| PLACE1008854 | F-PLACE1008854 | 0.81 |
| PLACE1008867 | F-PLACE1008867 | 0.34 |
| PLACE1008887 | F-PLACE1008887 | 0.49 |
| PLACE1008902 | F-PLACE1008902 | 0.91 |
| PLACE1008925 | F-PLACE1008925 | 0.94 |
| PLACE1008934 | F-PLACE1008934 | 0.70 |
| PLACE1009027 | F-PLACE1009027 | 0.32 |
| PLACE1009045 | F-PLACE1009045 | 0.42 |
| PLACE1009060 | F-PLACE1009060 | 0.69 |
| PLACE1009090 | F-PLACE1009090 | 0.46 |
| PLACE1009091 | F-PLACE1009091 | 0.90 |
| PLACE1009094 | F-PLACE1009094 | 0.44 |
| PLACE1009099 | F-PLACE1009099 | 0.56 |
| PLACE1009110 | F-PLACE1009110 | 0.84 |
| PLACE1009111 | F-PLACE1009111 | 0.80 |
| PLACE1009113 | F-PLACE1009113 | 0.88 |
| PLACE1009130 | F-PLACE1009130 | 0.60 |
| PLACE1009158 | F-PLACE1009158 | 0.41 |
| PLACE1009166 | F-PLACE1009166 | 0.94 |
| PLACE1009174 | F-PLACE1009174 | 0.38 |
| PLACE1009186 | F-PLACE1009186 | 0.59 |
| PLACE1009190 | F-PLACE1009190 | 0.66 |
| PLACE1009230 | F-PLACE1009230 | 0.87 |
| PLACE1009298 | F-PLACE1009298 | 0.41 |
| PLACE1009319 | F-PLACE1009319 | 0.53 |
| PLACE1009328 | F-PLACE1009328 | 0.66 |
| PLACE1009335 | F-PLACE1009335 | 0.47 |
| PLACE1009338 | F-PLACE1009338 | 0.70 |
| PLACE1009368 | F-PLACE1009368 | 0.94 |
| PLACE1009375 | F-PLACE1009375 | 0.76 |
| PLACE1009388 | F-PLACE1009388 | 0.46 |
| PLACE1009404 | F-PLACE1009404 | 0.72 |
| PLACE1009434 | F-PLACE1009434 | 0.50 |
| PLACE1009443 | F-PLACE1009443 | 0.90 |
| PLACE1009444 | F-PLACE1009444 | 0.33 |
| PLACE1009459 | F-PLACE1009459 | 0.94 |
| PLACE1009468 | F-PLACE1009468 | 0.88 |
| PLACE1009476 | F-PLACE1009476 | 0.84 |
| PLACE1009524 | F-PLACE1009524 | 0.88 |
| PLACE1009542 | F-PLACE1009542 | 0.55 |
| PLACE1009571 | F-PLACE1009571 | 0.61 |
| PLACE1009581 | F-PLACE1009581 | 0.94 |
| PLACE1009596 | F-PLACE1009596 | 0.44 |
| PLACE1009607 | F-PLACE1009607 | 0.47 |
| PLACE1009622 | F-PLACE1009622 | 0.65 |
| PLACE1009659 | F-PLACE1009659 | 0.36 |
| PLACE1009665 | F-PLACE1009665 | 0.43 |
| PLACE1009670 | F-PLACE1009670 | 0.33 |
| PLACE1009708 | F-PLACE1009708 | 0.80 |
| PLACE1009721 | F-PLACE1009721 | 0.81 |
| PLACE1009731 | F-PLACE1009731 | 0.47 |
| PLACE1009763 | F-PLACE1009763 | 0.94 |
| PLACE1009794 | F-PLACE1009794 | 0.33 |
| PLACE1009798 | F-PLACE1009798 | 0.34 |
| PLACE1009845 | F-PLACE1009845 | 0.66 |
| PLACE1009861 | F-PLACE1009861 | 0.72 |
| PLACE1009886 | F-PLACE1009886 | 0.63 |
| PLACE1009908 | F-PLACE1009908 | 0.92 |
| PLACE1009921 | F-PLACE1009921 | 0.70 |
| PLACE1009971 | F-PLACE1009971 | 0.40 |
| PLACE1009992 | F-PLACE1009992 | 0.89 |
| PLACE1009995 | F-PLACE1009995 | 0.88 |
| PLACE1009997 | F-PLACE1009997 | 0.41 |
| PLACE1010023 | F-PLACE1010023 | 0.90 |
| PLACE1010031 | F-PLACE1010031 | 0.71 |
| PLACE1010053 | F-PLACE1010053 | 0.51 |
| PLACE1010074 | F-PLACE1010074 | 0.75 |
| PLACE1010076 | F-PLACE1010076 | 0.53 |
| PLACE1010096 | F-PLACE1010096 | 0.44 |
| PLACE1010102 | F-PLACE1010102 | 0.77 |
| PLACE1010105 | F-PLACE1010105 | 0.58 |
| PLACE1010106 | F-PLACE1010106 | 0.39 |
| PLACE1010134 | F-PLACE1010134 | 0.85 |
| PLACE1010148 | F-PLACE1010148 | 0.32 |
| PLACE1010152 | F-PLACE1010152 | 0.94 |
| PLACE1010194 | F-PLACE1010194 | 0.94 |
| PLACE1010202 | F-PLACE1010202 | 0.33 |
| PLACE1010261 | F-PLACE1010261 | 0.36 |
| PLACE1010274 | F-PLACE1010274 | 0.94 |
| PLACE1010293 | F-PLACE1010293 | 0.55 |
| PLACE1010310 | F-PLACE1010310 | 0.41 |
| PLACE1010321 | F-PLACE1010321 | 0.40 |
| PLACE1010324 | F-PLACE1010324 | 0.40 |
| PLACE1010329 | F-PLACE1010329 | 0.36 |
| PLACE1010362 | F-PLACE1010362 | 0.34 |
| PLACE1010364 | F-PLACE1010364 | 0.37 |
| PLACE1010383 | F-PLACE1010383 | 0.94 |
| PLACE1010401 | F-PLACE1010401 | 0.53 |
| PLACE1010481 | F-PLACE1010481 | 0.74 |
| PLACE1010491 | F-PLACE1010491 | 0.31 |
| PLACE1010492 | F-PLACE1010492 | 0.39 |
| PLACE1010522 | F-PLACE1010522 | 0.92 |
| PLACE1010529 | F-PLACE1010529 | 0.65 |
| PLACE1010547 | F-PLACE1010547 | 0.82 |
| PLACE1010580 | F-PLACE1010580 | 0.72 |
| PLACE1010599 | F-PLACE1010599 | 0.83 |
| PLACE1010616 | F-PLACE1010616 | 0.54 |
| PLACE1010622 | F-PLACE1010622 | 0.92 |
| PLACE1010629 | F-PLACE1010629 | 0.94 |
| PLACE1010630 | F-PLACE1010630 | 0.37 |
| PLACE1010661 | F-PLACE1010661 | 0.56 |
| PLACE1010714 | F-PLACE1010714 | 0.68 |
| PLACE1010720 | F-PLACE1010720 | 0.90 |
| PLACE1010743 | F-PLACE1010743 | 0.75 |
| PLACE1010761 | F-PLACE1010761 | 0.69 |
| PLACE1010771 | F-PLACE1010771 | 0.94 |
| PLACE1010786 | F-PLACE1010786 | 0.80 |
| PLACE1010800 | F-PLACE1010800 | 0.41 |
| PLACE1010811 | F-PLACE1010811 | 0.94 |
| PLACE1010833 | F-PLACE1010833 | 0.94 |
| PLACE1010856 | F-PLACE1010856 | 0.37 |
| PLACE1010857 | F-PLACE1010857 | 0.54 |
| PLACE1010870 | F-PLACE1010870 | 0.50 |
| PLACE1010877 | F-PLACE1010877 | 0.77 |
| PLACE1010900 | F-PLACE1010900 | 0.70 |
| PLACE1010917 | F-PLACE1010917 | 0.94 |
| PLACE1010925 | F-PLACE1010925 | 0.79 |
| PLACE1010926 | F-PLACE1010926 | 0.94 |
| PLACE1010942 | F-PLACE1010942 | 0.36 |
| PLACE1010944 | F-PLACE1010944 | 0.61 |
| PLACE1010954 | F-PLACE1010954 | 0.83 |
| PLACE1010960 | F-PLACE1010960 | 0.38 |
| PLACE1010965 | F-PLACE1010965 | 0.68 |
| PLACE1011026 | F-PLACE1011026 | 0.38 |
| PLACE1011041 | F-PLACE1011041 | 0.94 |
| PLACE1011046 | F-PLACE1011046 | 0.85 |
| PLACE1011054 | F-PLACE1011054 | 0.65 |
| PLACE1011056 | F-PLACE1011056 | 0.82 |
| PLACE1011090 | F-PLACE1011090 | 0.94 |
| PLACE1011114 | F-PLACE1011114 | 0.94 |
| PLACE1011160 | F-PLACE1011160 | 0.62 |
| PLACE1011214 | F-PLACE1011214 | 0.40 |
| PLACE1011219 | F-PLACE1011219 | 0.48 |
| PLACE1011221 | F-PLACE1011221 | 0.94 |
| PLACE1011229 | F-PLACE1011229 | 0.46 |
| PLACE1011263 | F-PLACE1011263 | 0.94 |
| PLACE1011273 | F-PLACE1011273 | 0.32 |
| PLACE1011291 | F-PLACE1011291 | 0.55 |
| PLACE1011310 | F-PLACE1011310 | 0.74 |
| PLACE1011325 | F-PLACE1011325 | 0.39 |
| PLACE1011332 | F-PLACE1011332 | 0.74 |
| PLACE1011371 | F-PLACE1011371 | 0.32 |
| PLACE1011399 | F-PLACE1011399 | 0.89 |
| PLACE1011433 | F-PLACE1011433 | 0.33 |
| PLACE1011472 | F-PLACE1011472 | 0.59 |
| PLACE1011477 | F-PLACE1011477 | 0.80 |
| PLACE1011563 | F-PLACE1011563 | 0.83 |
| PLACE1011586 | F-PLACE1011586 | 0.82 |
| PLACE1011635 | F-PLACE1011635 | 0.62 |
| PLACE1011646 | F-PLACE1011646 | 0.37 |
| PLACE1011664 | F-PLACE1011664 | 0.65 |
| PLACE1011675 | F-PLACE1011675 | 0.89 |
| PLACE1011682 | F-PLACE1011682 | 0.81 |
| PLACE1011725 | F-PLACE1011725 | 0.86 |
| PLACE1011783 | F-PLACE1011783 | 0.78 |
| PLACE1011858 | F-PLACE1011858 | 0.76 |
| PLACE1011875 | F-PLACE1011875 | 0.49 |
| PLACE1011891 | F-PLACE1011891 | 0.34 |
| PLACE1011896 | F-PLACE1011896 | 0.34 |
| PLACE1011922 | F-PLACE1011922 | 0.46 |
| PLACE1011923 | F-PLACE1011923 | 0.74 |
| PLACE1011982 | F-PLACE1011982 | 0.71 |
| PLACE1012031 | F-PLACE1012031 | 0.80 |
| PLACE2000006 | F-PLACE2000006 | 0.61 |
| PLACE2000007 | F-PLACE2000007 | 0.37 |
| PLACE2000014 | F-PLACE2000014 | 0.67 |
| PLACE2000015 | F-PLACE2000015 | 0.53 |
| PLACE2000021 | F-PLACE2000021 | 0.36 |
| PLACE2000030 | F-PLACE2000030 | 0.83 |
| PLACE2000033 | F-PLACE2000033 | 0.44 |
| PLACE2000034 | F-PLACE2000034 | 0.88 |
| PLACE2000039 | F-PLACE2000039 | 0.67 |
| PLACE2000047 | F-PLACE2000047 | 0.84 |
| PLACE2000050 | F-PLACE2000050 | 0.41 |
| PLACE2000062 | F-PLACE2000062 | 0.94 |
| PLACE2000072 | F-PLACE2000072 | 0.86 |
| PLACE2000097 | F-PLACE2000097 | 0.94 |
| PLACE2000100 | F-PLACE2000100 | 0.75 |
| PLACE2000111 | F-PLACE2000111 | 0.62 |
| PLACE2000124 | F-PLACE2000124 | 0.77 |
| PLACE2000164 | F-PLACE2000164 | 0.57 |
| PLACE2000170 | F-PLACE2000170 | 0.60 |
| PLACE2000172 | F-PLACE2000172 | 0.55 |
| PLACE2000223 | F-PLACE2000223 | 0.54 |
| PLACE2000235 | F-PLACE2000235 | 0.94 |
| PLACE2000246 | F-PLACE2000246 | 0.94 |
| PLACE2000274 | F-PLACE2000274 | 0.82 |
| PLACE2000302 | F-PLACE2000302 | 0.92 |
| PLACE2000341 | F-PLACE2000341 | 0.58 |
| PLACE2000359 | F-PLACE2000359 | 0.33 |
| PLACE2000371 | F-PLACE2000371 | 0.71 |
| PLACE2000373 | F-PLACE2000373 | 0.65 |
| PLACE2000399 | F-PLACE2000399 | 0.41 |
| PLACE2000404 | F-PLACE2000404 | 0.94 |
| PLACE2000411 | F-PLACE2000411 | 0.90 |
| PLACE2000427 | F-PLACE2000427 | 0.60 |
| PLACE2000433 | F-PLACE2000433 | 0.61 |
| PLACE2000438 | F-PLACE2000438 | 0.56 |
| PLACE2000458 | F-PLACE2000458 | 0.82 |
| PLACE3000009 | F-PLACE3000009 | 0.56 |
| PLACE3000020 | F-PLACE3000020 | 0.94 |
| PLACE3000029 | F-PLACE3000029 | 0.94 |
| PLACE3000059 | F-PLACE3000059 | 0.51 |
| PLACE3000070 | F-PLACE3000070 | 0.67 |
| PLACE3000103 | F-PLACE3000103 | 0.34 |
| PLACE3000121 | F-PLACE3000121 | 0.32 |
| PLACE3000142 | F-PLACE3000142 | 0.67 |
| PLACE3000145 | F-PLACE3000145 | 0.84 |
| PLACE3000147 | F-PLACE3000147 | 0.57 |
| PLACE3000148 | F-PLACE3000148 | 0.94 |
| PLACE3000155 | F-PLACE3000155 | 0.42 |
| PLACE3000156 | F-PLACE3000156 | 0.40 |
| PLACE3000157 | F-PLACE3000157 | 0.75 |
| PLACE3000160 | F-PLACE3000160 | 0.44 |
| PLACE3000194 | F-PLACE3000194 | 0.37 |
| PLACE3000197 | F-PLACE3000197 | 0.37 |
| PLACE3000221 | F-PLACE3000221 | 0.49 |
| PLACE3000226 | F-PLACE3000226 | 0.39 |
| PLACE3000242 | F-PLACE3000242 | 0.94 |
| PLACE3000244 | F-PLACE3000244 | 0.56 |
| PLACE3000254 | F-PLACE3000254 | 0.60 |
| PLACE3000304 | F-PLACE3000304 | 0.42 |
| PLACE3000310 | F-PLACE3000310 | 0.71 |
| PLACE3000320 | F-PLACE3000320 | 0.37 |
| PLACE3000322 | F-PLACE3000322 | 0.46 |
| PLACE3000331 | F-PLACE3000331 | 0.31 |
| PLACE3000339 | F-PLACE3000339 | 0.45 |
| PLACE3000350 | F-PLACE3000350 | 0.52 |
| PLACE3000352 | F-PLACE3000352 | 0.65 |
| PLACE3000353 | F-PLACE3000353 | 0.71 |
| PLACE3000363 | F-PLACE3000363 | 0.45 |
| PLACE3000405 | F-PLACE3000405 | 0.52 |
| PLACE3000413 | F-PLACE3000413 | 0.85 |
| PLACE3000416 | F-PLACE3000416 | 0.94 |
| PLACE3000425 | F-PLACE3000425 | 0.40 |
| PLACE3000455 | F-PLACE3000455 | 0.45 |
| PLACE3000477 | F-PLACE3000477 | 0.79 |
| PLACE4000009 | F-PLACE4000009 | 0.74 |
| PLACE4000014 | F-PLACE4000014 | 0.46 |
| PLACE4000034 | F-PLACE4000034 | 0.89 |
| PLACE4000049 | F-PLACE4000049 | 0.68 |
| PLACE4000052 | F-PLACE4000052 | 0.80 |
| PLACE4000063 | F-PLACE4000063 | 0.69 |
| PLACE4000089 | F-PLACE4000089 | 0.44 |
| PLACE4000106 | F-PLACE4000106 | 0.34 |
| PLACE4000128 | F-PLACE4000128 | 0.89 |
| PLACE4000129 | F-PLACE4000129 | 0.61 |
| PLACE4000131 | F-PLACE4000131 | 0.55 |
| PLACE4000147 | F-PLACE4000147 | 0.94 |
| PLACE4000156 | F-PLACE4000156 | 0.37 |
| PLACE4000192 | F-PLACE4000192 | 0.88 |
| PLACE4000211 | F-PLACE4000211 | 0.64 |
| PLACE4000222 | F-PLACE4000222 | 0.40 |
| PLACE4000230 | F-PLACE4000230 | 0.49 |
| PLACE4000259 | F-PLACE4000259 | 0.84 |
| PLACE4000261 | F-PLACE4000261 | 0.42 |
| PLACE4000269 | F-PLACE4000269 | 0.60 |
| PLACE4000270 | F-PLACE4000270 | 0.61 |
| PLACE4000300 | F-PLACE4000300 | 0.85 |
| PLACE4000323 | F-PLACE4000323 | 0.76 |
| PLACE4000326 | F-PLACE4000326 | 0.86 |
| PLACE4000369 | F-PLACE4000369 | 0.87 |
| PLACE4000387 | F-PLACE4000387 | 0.41 |
| PLACE4000392 | F-PLACE4000392 | 0.39 |
| PLACE4000431 | F-PLACE4000431 | 0.88 |
| PLACE4000445 | F-PLACE4000445 | 0.40 |
| PLACE4000450 | F-PLACE4000450 | 0.89 |
| PLACE4000465 | F-PLACE4000465 | 0.38 |
| PLACE4000487 | F-PLACE4000487 | 0.44 |
| PLACE4000489 | F-PLACE4000489 | 0.51 |
| PLACE4000521 | F-PLACE4000521 | 0.38 |
| PLACE4000522 | F-PLACE4000522 | 0.33 |
| PLACE4000558 | F-PLACE4000558 | 0.44 |
| PLACE4000581 | F-PLACE4000581 | 0.59 |
| PLACE4000590 | F-PLACE4000590 | 0.38 |
| PLACE4000593 | F-PLACE4000593 | 0.33 |
| PLACE4000612 | F-PLACE4000612 | 0.37 |
| PLACE4000638 | F-PLACE4000638 | 0.38 |
| PLACE4000650 | F-PLACE4000650 | 0.59 |
| PLACE4000654 | F-PLACE4000654 | 0.57 |
| PLACE4000670 | F-PLACE4000670 | 0.71 |
| SKNMC1000011 | F-SKNMC1000011 | 0.94 |
| SKNMC1000013 | F-SKNMC1000013 | 0.66 |
| SKNMC1000046 | F-SKNMC1000046 | 0.72 |
| SKNMC1000050 | F-SKNMC1000050 | 0.47 |
| SKNMC1000091 | F-SKNMC1000091 | 0.68 |
| THYRO1000017 | F-THYRO1000017 | 0.93 |
| THYRO1000034 | F-THYRO1000034 | 0.48 |
| THYRO1000040 | F-THYRO1000040 | 0.32 |
| THYRO1000070 | F-THYRO1000070 | 0.75 |
| THYRO1000072 | F-THYRO1000072 | 0.94 |
| THYRO1000107 | F-THYRO1000107 | 0.94 |
| THYRO1000121 | F-THYRO1000121 | 0.46 |
| THYRO1000124 | F-THYRO1000124 | 0.37 |
| THYRO1000163 | F-THYRO1000163 | 0.45 |
| THYRO1000173 | F-THYRO1000173 | 0.94 |
| THYRO1000197 | F-THYRO1000197 | 0.78 |
| THYRO1000199 | F-THYRO1000199 | 0.55 |
| THYRO1000206 | F-THYRO1000206 | 0.59 |
| THYRO1000242 | F-THYRO1000242 | 0.69 |
| THYRO1000253 | F-THYRO1000253 | 0.48 |
| THYRO1000270 | F-THYRO1000270 | 0.85 |
| THYRO1000288 | F-THYRO1000288 | 0.31 |
| THYRO1000320 | F-THYRO1000320 | 0.94 |
| THYRO1000327 | F-THYRO1000327 | 0.44 |
| THYRO1000343 | F-THYRO1000343 | 0.82 |
| THYRO1000358 | F-THYRO1000358 | 0.89 |
| THYRO1000368 | F-THYRO1000368 | 0.94 |
| THYRO1000381 | F-THYRO1000381 | 0.64 |
| THYRO1000387 | F-THYRO1000387 | 0.57 |
| THYRO1000394 | F-THYRO1000394 | 0.94 |
| THYRO1000395 | F-THYRO1000395 | 0.91 |
| THYRO1000401 | F-THYRO1000401 | 0.73 |
| THYRO1000488 | F-THYRO1000488 | 0.94 |
| THYRO1000501 | F-THYRO1000501 | 0.74 |
| THYRO1000502 | F-THYRO1000502 | 0.64 |
| THYRO1000505 | F-THYRO1000505 | 0.47 |
| THYRO1000569 | F-THYRO1000569 | 0.76 |
| THYRO1000570 | F-THYRO1000570 | 0.79 |
| THYRO1000585 | F-THYRO1000585 | 0.60 |
| THYRO1000605 | F-THYRO1000605 | 0.79 |
| THYRO1000637 | F-THYRO1000637 | 0.80 |
| THYRO1000662 | F-THYRO1000662 | 0.77 |
| THYRO1000666 | F-THYRO1000666 | 0.47 |
| THYRO1000676 | F-THYRO1000676 | 0.94 |
| THYRO1000684 | F-THYRO1000684 | 0.72 |
| THYRO1000712 | F-THYRO1000712 | 0.94 |
| THYRO1000715 | F-THYRO1000715 | 0.94 |
| THYRO1000734 | F-THYRO1000734 | 0.44 |
| THYRO1000756 | F-THYRO1000756 | 0.94 |
| THYRO1000777 | F-THYRO1000777 | 0.73 |
| THYRO1000783 | F-THYRO1000783 | 0.74 |
| THYRO1000787 | F-THYRO1000787 | 0.67 |
| THYRO1000829 | F-THYRO1000829 | 0.43 |
| THYRO1000855 | F-THYRO1000855 | 0.91 |
| THYRO1000916 | F-THYRO1000916 | 0.64 |
| THYRO1000926 | F-THYRO1000926 | 0.39 |
| THYRO1000934 | F-THYRO1000934 | 0.94 |
| THYRO1000951 | F-THYRO1000951 | 0.94 |
| THYRO1000952 | F-THYRO1000952 | 0.67 |
| THYRO1000983 | F-THYRO1000983 | 0.87 |
| THYRO1000984 | F-THYRO1000984 | 0.94 |
| THYRO1000988 | F-THYRO1000988 | 0.37 |
| THYRO1001033 | F-THYRO1001033 | 0.74 |
| THYRO1001100 | F-THYRO1001100 | 0.74 |
| THYRO1001120 | F-THYRO1001120 | 0.87 |
| THYRO1001134 | F-THYRO1001134 | 0.93 |
| THYRO1001142 | F-THYRO1001142 | 0.61 |
| THYRO1001173 | F-THYRO1001173 | 0.50 |
| THYRO1001189 | F-THYRO1001189 | 0.40 |
| THYRO1001204 | F-THYRO1001204 | 0.94 |
| THYRO1001213 | F-THYRO1001213 | 0.94 |
| THYRO1001271 | F-THYRO1001271 | 0.93 |
| THYRO1001287 | F-THYRO1001287 | 0.32 |
| THYRO1001313 | F-THYRO1001313 | 0.53 |
| THYRO1001320 | F-THYRO1001320 | 0.68 |
| THYRO1001347 | F-THYRO1001347 | 0.68 |
| THYRO1001363 | F-THYRO1001363 | 0.39 |
| THYRO1001374 | F-THYRO1001374 | 0.94 |
| THYRO1001403 | F-THYRO1001403 | 0.49 |
| THYRO1001405 | F-THYRO1001405 | 0.90 |
| THYRO1001406 | F-THYRO1001406 | 0.67 |
| THYRO1001458 | F-THYRO1001458 | 0.94 |
| THYRO1001487 | F-THYRO1001487 | 0.63 |
| THYRO1001537 | F-THYRO1001537 | 0.94 |
| THYRO1001584 | F-THYRO1001584 | 0.77 |
| THYRO1001602 | F-THYRO1001602 | 0.64 |
| THYRO1001605 | F-THYRO1001605 | 0.52 |
| THYRO1001637 | F-THYRO1001637 | 0.68 |
| THYRO1001656 | F-THYRO1001656 | 0.82 |
| THYRO1001661 | F-THYRO1001661 | 0.94 |
| THYRO1001671 | F-THYRO1001671 | 0.94 |
| THYRO1001703 | F-THYRO1001703 | 0.87 |
| THYRO1001721 | F-THYRO1001721 | 0.38 |
| THYRO1001738 | F-THYRO1001738 | 0.51 |
| THYRO1001793 | F-THYRO1001793 | 0.84 |
| THYRO1001809 | F-THYRO1001809 | 0.73 |
| THYRO1001828 | F-THYRO1001828 | 0.88 |
| THYRO1001854 | F-THYRO1001854 | 0.47 |
| VESEN1000122 | F-VESEN1000122 | 0.36 |
| Y79AA1000013 | F-Y79AA1000013 | 0.94 |
| Y79AA1000037 | F-Y79AA1000037 | 0.94 |
| Y79AA1000059 | F-Y79AA1000059 | 0.94 |
| Y79AA1000131 | F-Y79AA1000131 | 0.56 |
| Y79AA1000181 | F-Y79AA1000181 | 0.59 |
| Y79AA1000202 | F-Y79AA1000202 | 0.45 |
| Y79AA1000214 | F-Y79AA1000214 | 0.93 |
| Y79AA1000230 | F-Y79AA1000230 | 0.94 |
| Y79AA1000231 | F-Y79AA1000231 | 0.36 |
| Y79AA1000258 | F-Y79AA1000258 | 0.36 |
| Y79AA1000268 | F-Y79AA1000268 | 0.92 |
| Y79AA1000313 | F-Y79AA1000313 | 0.91 |
| Y79AA1000328 | F-Y79AA1000328 | 0.94 |
| Y79AA1000342 | F-Y79AA1000342 | 0.83 |
| Y79AA1000349 | F-Y79AA1000349 | 0.50 |
| Y79AA1000355 | F-Y79AA1000355 | 0.94 |
| Y79AA1000368 | F-Y79AA1000368 | 0.91 |
| Y79AA1000420 | F-Y79AA1000420 | 0.94 |
| Y79AA1000469 | F-Y79AA1000469 | 0.51 |
| Y79AA1000480 | F-Y79AA1000480 | 0.94 |
| Y79AA1000539 | F-Y79AA1000539 | 0.74 |
| Y79AA1000540 | F-Y79AA1000540 | 0.94 |
| Y79AA1000560 | F-Y79AA1000560 | 0.93 |
| Y79AA1000574 | F-Y79AA1000574 | 0.87 |
| Y79AA1000589 | F-Y79AA1000589 | 0.94 |
| Y79AA1000627 | F-Y79AA1000627 | 0.55 |
| Y79AA1000705 | F-Y79AA1000705 | 0.76 |
| Y79AA1000734 | F-Y79AA1000734 | 0.60 |
| Y79AA1000748 | F-Y79AA1000748 | 0.45 |
| Y79AA1000752 | F-Y79AA1000752 | 0.94 |
| Y79AA1000774 | F-Y79AA1000774 | 0.38 |
| Y79AA1000782 | F-Y79AA1000782 | 0.47 |
| Y79AA1000784 | F-Y79AA1000784 | 0.93 |
| Y79AA1000794 | F-Y79AA1000794 | 0.67 |
| Y79AA1000800 | F-Y79AA1000800 | 0.94 |
| Y79AA1000824 | F-Y79AA1000824 | 0.90 |
| Y79AA1000827 | F-Y79AA1000827 | 0.94 |
| Y79AA1000833 | F-Y79AA1000833 | 0.34 |
| Y79AA1000850 | F-Y79AA1000850 | 0.92 |
| Y79AA1000962 | F-Y79AA1000962 | 0.69 |
| Y79AA1000966 | F-Y79AA1000966 | 0.64 |
| Y79AA1000968 | F-Y79AA1000968 | 0.64 |
| Y79AA1000976 | F-Y79AA1000976 | 0.66 |
| Y79AA1000985 | F-Y79AA1000985 | 0.66 |
| Y79AA1001023 | F-Y79AA1001023 | 0.33 |
| Y79AA1001041 | F-Y79AA1001041 | 0.90 |
| Y79AA1001048 | F-Y79AA1001048 | 0.81 |
| Y79AA1001068 | F-Y79AA1001068 | 0.64 |
| Y79AA1001077 | F-Y79AA1001077 | 0.78 |
| Y79AA1001078 | F-Y79AA1001078 | 0.92 |
| Y79AA1001105 | F-Y79AA1001105 | 0.70 |
| Y79AA1001145 | F-Y79AA1001145 | 0.46 |
| Y79AA1001177 | F-Y79AA1001177 | 0.74 |
| Y79AA1001185 | F-Y79AA1001185 | 0.74 |
| Y79AA1001211 | F-Y79AA1001211 | 0.94 |
| Y79AA1001216 | F-Y79AA1001216 | 0.61 |
| Y79AA1001228 | F-Y79AA1001228 | 0.56 |
| Y79AA1001233 | F-Y79AA1001233 | 0.83 |
| Y79AA1001236 | F-Y79AA1001236 | 0.32 |
| Y79AA1001281 | F-Y79AA1001281 | 0.51 |
| Y79AA1001299 | F-Y79AA1001299 | 0.94 |
| Y79AA1001312 | F-Y79AA1001312 | 0.53 |
| Y79AA1001323 | F-Y79AA1001323 | 0.76 |
| Y79AA1001391 | F-Y79AA1001391 | 0.83 |
| Y79AA1001394 | F-Y79AA1001394 | 0.94 |
| Y79AA1001402 | F-Y79AA1001402 | 0.90 |
| Y79AA1001493 | F-Y79AA1001493 | 0.94 |
| Y79AA1001511 | F-Y79AA1001511 | 0.47 |
| Y79AA1001533 | F-Y79AA1001533 | 0.92 |
| Y79AA1001541 | F-Y79AA1001541 | 0.32 |
| Y79AA1001548 | F-Y79AA1001548 | 0.50 |
| Y79AA1001555 | F-Y79AA1001555 | 0.92 |
| Y79AA1001581 | F-Y79AA1001581 | 0.94 |
| Y79AA1001585 | F-Y79AA1001585 | 0.80 |
| Y79AA1001603 | F-Y79AA1001603 | 0.94 |
| Y79AA1001613 | F-Y79AA1001613 | 0.94 |
| Y79AA1001647 | F-Y79AA1001647 | 0.49 |
| Y79AA1001665 | F-Y79AA1001665 | 0.78 |
| Y79AA1001679 | F-Y79AA1001679 | 0.94 |
| Y79AA1001696 | F-Y79AA1001696 | 0.60 |
| Y79AA1001705 | F-Y79AA1001705 | 0.67 |
| Y79AA1001711 | F-Y79AA1001711 | 0.59 |
| Y79AA1001781 | F-Y79AA1001781 | 0.74 |
| Y79AA1001805 | F-Y79AA1001805 | 0.79 |
| Y79AA1001827 | F-Y79AA1001827 | 0.84 |
| Y79AA1001846 | F-Y79AA1001846 | 0.34 |
| Y79AA1001866 | F-Y79AA1001866 | 0.75 |
| Y79AA1001874 | F-Y79AA1001874 | 0.59 |
| Y79AA1001923 | F-Y79AA1001923 | 0.32 |
| Y79AA1001963 | F-Y79AA1001963 | 0.51 |
| Y79AA1002027 | F-Y79AA1002027 | 0.39 |
| Y79AA1002083 | F-Y79AA1002083 | 0.65 |
| Y79AA1002089 | F-Y79AA1002089 | 0.94 |
| Y79AA1002093 | F-Y79AA1002093 | 0.89 |
| Y79AA1002115 | F-Y79AA1002115 | 0.31 |
| Y79AA1002125 | F-Y79AA1002125 | 0.76 |
| Y79AA1002139 | F-Y79AA1002139 | 0.32 |
| Y79AA1002204 | F-Y79AA1002204 | 0.94 |
| Y79AA1002208 | F-Y79AA1002208 | 0.76 |
| Y79AA1002209 | F-Y79AA1002209 | 0.91 |
| Y79AA1002210 | F-Y79AA1002210 | 0.60 |
| Y79AA1002229 | F-Y79AA1002229 | 0.76 |
| Y79AA1002234 | F-Y79AA1002234 | 0.94 |
| Y79AA1002246 | F-Y79AA1002246 | 0.65 |
| Y79AA1002258 | F-Y79AA1002258 | 0.79 |
| Y79AA1002298 | F-Y79AA1002298 | 0.83 |
| Y79AA1002307 | F-Y79AA1002307 | 0.52 |
| Y79AA1002311 | F-Y79AA1002311 | 0.92 |
| Y79AA1002351 | F-Y79AA1002351 | 0.85 |
| Y79AA1002361 | F-Y79AA1002361 | 0.90 |
| Y79AA1002399 | F-Y79AA1002399 | 0.94 |
| Y79AA1002407 | F-Y79AA1002407 | 0.83 |
| Y79AA1002416 | F-Y79AA1002416 | 0.77 |
| Y79AA1002431 | F-Y79AA1002431 | 0.61 |
| Y79AA1002433 | F-Y79AA1002433 | 0.81 |
| Y79AA1002472 | F-Y79AA1002472 | 0.39 |
| Y79AA1002482 | F-Y79AA1002482 | 0.88 |
| Y79AA1002487 | F-Y79AA1002487 | 0.87 |

[0517] TABLE 10
Selected clones having the maximal ATGpr1 score of not more than 0.3
(1857 clones including the 9 clones whose 5′-end sequence does not
contain the ATG codon. Blank of the maximal ATGpr1 score indicates
that clones whose 5′-end sequence does not contain the ATG codon).

| | | maximal |
|---|---|---|
| clone | name of | ATGpr1 |
| name | sequence | score |
| HEMBA1000042 | F-HEMBA1000042 | 0.08 |
| HEMBA1000111 | F-HEMBA1000111 | 0.1 |
| HEMBA1000180 | F-HEMBA1000180 | 0.09 |
| HEMBA1000213 | F-HEMBA1000213 | 0.21 |
| HEMBA1000243 | F-HEMBA1000243 | 0.1 |
| HEMBA1000251 | F-HEMBA1000251 | 0.08 |
| HEMBA1000264 | F-HEMBA1000264 | 0.08 |
| HEMBA1000280 | F-HEMBA1000280 | 0.13 |
| HEMBA1000282 | F-HEMBA1000282 | 0.1 |
| HEMBA1000333 | F-HEMBA1000333 | 0.17 |
| HEMBA1000338 | F-HEMBA1000338 | 0.16 |
| HEMBA1000351 | F-HEMBA1000351 | 0.17 |
| HEMBA1000355 | F-HEMBA1000355 | 0.11 |
| HEMBA1000357 | F-HEMBA1000357 | 0.08 |
| HEMBA1000366 | F-HEMBA1000366 | 0.11 |
| HEMBA1000376 | F-HEMBA1000376 | 0.1 |
| HEMBA1000390 | F-HEMBA1000390 | 0.11 |
| HEMBA1000411 | F-HEMBA1000411 | 0.07 |
| HEMBA1000418 | F-HEMBA1000418 | 0.06 |
| HEMBA1000422 | F-HEMBA1000422 | 0.07 |
| HEMBA1000428 | F-HEMBA1000428 | 0.08 |
| HEMBA1000434 | F-HEMBA1000434 | 0.11 |
| HEMBA1000442 | F-HEMBA1000442 | 0.1 |
| HEMBA1000459 | F-HEMBA1000459 | 0.08 |
| HEMBA1000464 | F-HEMBA1000464 | 0.12 |
| HEMBA1000469 | F-HEMBA1000469 | 0.07 |
| HEMBA1000504 | F-HEMBA1000504 | 0.1 |
| HEMBA1000518 | F-HEMBA1000518 | 0.23 |
| HEMBA1000519 | F-HEMBA1000519 | 0.3 |
| HEMBA1000540 | F-HEMBA1000540 | 0.06 |
| HEMBA1000545 | F-HEMBA1000545 | 0.18 |
| HEMBA1000557 | F-HEMBA1000557 | 0.19 |
| HEMBA1000563 | F-HEMBA1000563 | 0.17 |
| HEMBA1000569 | F-HEMBA1000569 | 0.12 |
| HEMBA1000575 | F-HEMBA1000575 | 0.14 |
| HEMBA1000604 | F-HEMBA1000604 | 0.1 |
| HEMBA1000622 | F-HEMBA1000622 | 0.08 |
| HEMBA1000655 | F-HEMBA1000655 | 0.19 |
| HEMBA1000662 | F-HEMBA1000662 | 0.15 |
| HEMBA1000673 | F-HEMBA1000673 | 0.08 |
| HEMBA1000702 | F-HEMBA1000702 | 0.12 |
| HEMBA1000705 | F-HEMBA1000705 | 0.06 |
| HEMBA1000722 | F-HEMBA1000722 | 0.17 |
| HEMBA1000726 | F-HEMBA1000726 | 0.08 |
| HEMBA1000747 | F-HEMBA1000747 | 0.06 |
| HEMBA1000749 | F-HEMBA1000749 | 0.09 |
| HEMBA1000769 | F-HEMBA1000769 | 0.19 |
| HEMBA1000773 | F-HEMBA1000773 | 0.08 |
| HEMBA1000774 | F-HEMBA1000774 | 0.17 |
| HEMBA1000791 | F-HEMBA1000791 | 0.08 |
| HEMBA1000822 | F-HEMBA1000822 | 0.19 |
| HEMBA1000827 | F-HEMBA1000827 | 0.09 |
| HEMBA1000843 | F-HEMBA1000843 | 0.12 |
| HEMBA1000852 | F-HEMBA1000852 | 0.16 |
| HEMBA1000870 | F-HEMBA1000870 | 0.14 |
| HEMBA1000876 | F-HEMBA1000876 | 0.15 |
| HEMBA1000908 | F-HEMBA1000908 | 0.17 |
| HEMBA1000934 | F-HEMBA1000934 | 0.2 |
| HEMBA1000943 | F-HEMBA1000943 | 0.08 |
| HEMBA1000960 | F-HEMBA1000960 | 0.09 |
| HEMBA1000972 | F-HEMBA1000972 | 0.12 |
| HEMBA1000974 | F-HEMBA1000974 | 0.08 |
| HEMBA1000985 | F-HEMBA1000985 | 0.06 |
| HEMBA1000991 | F-HEMBA1000991 | 0.23 |
| HEMBA1001007 | F-HEMBA1001007 | 0.06 |
| HEMBA1001017 | F-HEMBA1001017 | 0.06 |
| HEMBA1001019 | F-HEMBA1001019 | 0.08 |
| HEMBA1001020 | F-HEMBA1001020 | 0.15 |
| HEMBA1001024 | F-HEMBA1001024 | 0.1 |
| HEMBA1001026 | F-HEMBA1001026 | 0.13 |
| HEMBA1001051 | F-HEMBA1001051 | 0.27 |
| HEMBA1001060 | F-HEMBA1001060 | 0.11 |
| HEMBA1001071 | F-HEMBA1001071 | 0.1 |
| HEMBA1001077 | F-HEMBA1001077 | 0.07 |
| HEMBA1001094 | F-HEMBA1001094 | 0.07 |
| HEMBA1001099 | F-HEMBA1001099 | 0.08 |
| HEMBA1001121 | F-HEMBA1001121 | 0.25 |
| HEMBA1001123 | F-HEMBA1001123 | 0.05 |
| HEMBA1001172 | F-HEMBA1001172 | 0.08 |
| HEMBA1001208 | F-HEMBA1001208 | 0.11 |
| HEMBA1001226 | F-HEMBA1001226 | 0.27 |
| HEMBA1001265 | F-HEMBA1001265 | 0.06 |
| HEMBA1001294 | F-HEMBA1001294 | 0.12 |
| HEMBA1001299 | F-HEMBA1001299 | 0.2 |
| HEMBA1001319 | F-HEMBA1001319 | 0.3 |
| HEMBA1001323 | F-HEMBA1001323 | 0.07 |
| HEMBA1001327 | F-HEMBA1001327 | 0.08 |
| HEMBA1001330 | F-HEMBA1001330 | 0.11 |
| HEMBA1001375 | F-HEMBA1001375 | 0.15 |
| HEMBA1001383 | F-HEMBA1001383 | 0.11 |
| HEMBA1001391 | F-HEMBA1001391 | 0.21 |
| HEMBA1001411 | F-HEMBA1001411 | 0.06 |
| HEMBA1001432 | F-HEMBA1001432 | 0.07 |
| HEMBA1001433 | F-HEMBA1001433 | 0.24 |
| HEMBA1001435 | F-HEMBA1001435 | 0.16 |
| HEMBA1001442 | F-HEMBA1001442 | 0.22 |
| HEMBA1001454 | F-HEMBA1001454 | 0.11 |
| HEMBA1001463 | F-HEMBA1001463 | 0.08 |
| HEMBA1001478 | F-HEMBA1001478 | 0.13 |
| HEMBA1001515 | F-HEMBA1001515 | 0.3 |
| HEMBA1001517 | F-HEMBA1001517 | 0.07 |
| HEMBA1001522 | F-HEMBA1001522 | 0.3 |
| HEMBA1001557 | F-HEMBA1001557 | 0.06 |
| HEMBA1001566 | F-HEMBA1001566 | 0.1 |
| HEMBA1001585 | F-HEMBA1001585 | 0.09 |
| HEMBA1001589 | F-HEMBA1001589 | 0.06 |
| HEMBA1001608 | F-HEMBA1001608 | 0.17 |
| HEMBA1001636 | F-HEMBA1001636 | 0.15 |
| HEMBA1001651 | F-HEMBA1001651 | 0.23 |
| HEMBA1001658 | F-HEMBA1001658 | 0.17 |
| HEMBA1001675 | F-HEMBA1001675 | 0.11 |
| HEMBA1001678 | F-HEMBA1001678 | 0.06 |
| HEMBA1001681 | F-HEMBA1001681 | 0.1 |
| HEMBA1001709 | F-HEMBA1001709 | 0.29 |
| HEMBA1001712 | F-HEMBA1001712 | 0.08 |
| HEMBA1001718 | F-HEMBA1001718 | 0.07 |
| HEMBA1001734 | F-HEMBA1001734 | 0.07 |
| HEMBA1001745 | F-HEMBA1001745 | 0.09 |
| HEMBA1001761 | F-HEMBA1001761 | 0.09 |
| HEMBA1001784 | F-HEMBA1001784 | 0.11 |
| HEMBA1001791 | F-HEMBA1001791 | 0.15 |
| HEMBA1001803 | F-HEMBA1001803 | 0.21 |
| HEMBA1001808 | F-HEMBA1001808 | 0.18 |
| HEMBA1001820 | F-HEMBA1001820 | 0.08 |
| HEMBA1001835 | F-HEMBA1001835 | 0.29 |
| HEMBA1001844 | F-HEMBA1001844 | 0.11 |
| HEMBA1001861 | F-HEMBA1001861 | 0.2 |
| HEMBA1001888 | F-HEMBA1001888 | 0.18 |
| HEMBA1001918 | F-HEMBA1001918 | 0.09 |
| HEMBA1001940 | F-HEMBA1001940 | 0.21 |
| HEMBA1001942 | F-HEMBA1001942 | 0.17 |
| HEMBA1001945 | F-HEMBA1001945 | 0.06 |
| HEMBA1001960 | F-HEMBA1001960 | |
| HEMBA1001962 | F-HEMBA1001962 | 0.08 |
| HEMBA1001964 | F-HEMBA1001964 | 0.15 |
| HEMBA1001979 | F-HEMBA1001979 | 0.07 |
| HEMBA1001991 | F-HEMBA1001991 | 0.08 |
| HEMBA1002003 | F-HEMBA1002003 | 0.11 |
| HEMBA1002008 | F-HEMBA1002008 | 0.08 |
| HEMBA1002022 | F-HEMBA1002022 | 0.08 |
| HEMBA1002039 | F-HEMBA1002039 | 0.2 |
| HEMBA1002100 | F-HEMBA1002100 | 0.07 |
| HEMBA1002113 | F-HEMBA1002113 | 0.09 |
| HEMBA1002139 | F-HEMBA1002139 | 0.2 |
| HEMBA1002144 | F-HEMBA1002144 | 0.11 |
| HEMBA1002153 | F-HEMBA1002153 | 0.09 |
| HEMBA1002160 | F-HEMBA1002160 | 0.15 |
| HEMBA1002162 | F-HEMBA1002162 | 0.19 |
| HEMBA1002166 | F-HEMBA1002166 | 0.06 |
| HEMBA1002185 | F-HEMBA1002185 | 0.11 |
| HEMBA1002204 | F-HEMBA1002204 | 0.09 |
| HEMBA1002226 | F-HEMBA1002226 | 0.13 |
| HEMBA1002253 | F-HEMBA1002253 | 0.05 |
| HEMBA1002257 | F-HEMBA1002257 | 0.09 |
| HEMBA1002270 | F-HEMBA1002270 | 0.06 |
| HEMBA1002321 | F-HEMBA1002321 | 0.07 |
| HEMBA1002328 | F-HEMBA1002328 | 0.06 |
| HEMBA1002337 | F-HEMBA1002337 | 0.11 |
| HEMBA1002348 | F-HEMBA1002348 | 0.12 |
| HEMBA1002349 | F-HEMBA1002349 | 0.05 |
| HEMBA1002381 | F-HEMBA1002381 | 0.09 |
| HEMBA1002389 | F-HEMBA1002389 | 0.14 |
| HEMBA1002486 | F-HEMBA1002486 | 0.1 |
| HEMBA1002498 | F-HEMBA1002498 | 0.17 |
| HEMBA1002538 | F-HEMBA1002538 | 0.27 |
| HEMBA1002552 | F-HEMBA1002552 | 0.23 |
| HEMBA1002555 | F-HEMBA1002555 | 0.11 |
| HEMBA1002558 | F-HEMBA1002558 | 0.11 |
| HEMBA1002561 | F-HEMBA1002561 | 0.11 |
| HEMBA1002590 | F-HEMBA1002590 | 0.06 |
| HEMBA1002592 | F-HEMBA1002592 | 0.17 |
| HEMBA1002621 | F-HEMBA1002621 | 0.12 |
| HEMBA1002628 | F-HEMBA1002628 | 0.06 |
| HEMBA1002629 | F-HEMBA1002629 | 0.23 |
| HEMBA1002645 | F-HEMBA1002645 | 0.12 |
| HEMBA1002651 | F-HEMBA1002651 | 0.08 |
| HEMBA1002659 | F-HEMBA1002659 | 0.28 |
| HEMBA1002661 | F-HEMBA1002661 | 0.28 |
| HEMBA1002666 | F-HEMBA1002666 | 0.16 |
| HEMBA1002678 | F-HEMBA1002678 | 0.07 |
| HEMBA1002679 | F-HEMBA1002679 | 0.14 |
| HEMBA1002712 | F-HEMBA1002712 | 0.26 |
| HEMBA1002716 | F-HEMBA1002716 | 0.14 |
| HEMBA1002728 | F-HEMBA1002728 | 0.09 |
| HEMBA1002730 | F-HEMBA1002730 | 0.07 |
| HEMBA1002742 | F-HEMBA1002742 | 0.09 |
| HEMBA1002748 | F-HEMBA1002748 | 0.17 |
| HEMBA1002780 | F-HEMBA1002780 | 0.1 |
| HEMBA1002801 | F-HEMBA1002801 | 0.1 |
| HEMBA1002826 | F-HEMBA1002826 | 0.1 |
| HEMBA1002833 | F-HEMBA1002833 | 0.14 |
| HEMBA1002886 | F-HEMBA1002886 | 0.09 |
| HEMBA1002896 | F-HEMBA1002896 | 0.05 |
| HEMBA1002921 | F-HEMBA1002921 | 0.25 |
| HEMBA1002924 | F-HEMBA1002924 | 0.12 |
| HEMBA1002934 | F-HEMBA1002934 | 0.2 |
| HEMBA1002944 | F-HEMBA1002944 | 0.12 |
| HEMBA1002968 | F-HEMBA1002968 | 0.12 |
| HEMBA1003034 | F-HEMBA1003034 | 0.06 |
| HEMBA1003037 | F-HEMBA1003037 | 0.11 |
| HEMBA1003064 | F-HEMBA1003064 | 0.09 |
| HEMBA1003071 | F-HEMBA1003071 | 0.27 |
| HEMBA1003083 | F-HEMBA1003083 | 0.18 |
| HEMBA1003086 | F-HEMBA1003086 | 0.06 |
| HEMBA1003098 | F-HEMBA1003098 | 0.09 |
| HEMBA1003133 | F-HEMBA1003133 | 0.12 |
| HEMBA1003142 | F-HEMBA1003142 | 0.29 |
| HEMBA1003166 | F-HEMBA1003166 | 0.1 |
| HEMBA1003197 | F-HEMBA1003197 | 0.1 |
| HEMBA1003202 | F-HEMBA1003202 | 0.17 |
| HEMBA1003204 | F-HEMBA1003204 | 0.13 |
| HEMBA1003212 | F-HEMBA1003212 | 0.13 |
| HEMBA1003220 | F-HEMBA1003220 | 0.14 |
| HEMBA1003229 | F-HEMBA1003229 | 0.19 |
| HEMBA1003273 | F-HEMBA1003273 | 0.1 |
| HEMBA1003276 | F-HEMBA1003276 | 0.12 |
| HEMBA1003278 | F-HEMBA1003278 | 0.09 |
| HEMBA1003296 | F-HEMBA1003296 | 0.07 |
| HEMBA1003304 | F-HEMBA1003304 | 0.09 |
| HEMBA1003309 | F-HEMBA1003309 | 0.07 |
| HEMBA1003314 | F-HEMBA1003314 | 0.21 |
| HEMBA1003328 | F-HEMBA1003328 | 0.13 |
| HEMBA1003330 | F-HEMBA1003330 | 0.08 |
| HEMBA1003348 | F-HEMBA1003348 | 0.17 |
| HEMBA1003373 | F-HEMBA1003373 | 0.21 |
| HEMBA1003376 | F-HEMBA1003376 | 0.14 |
| HEMBA1003384 | F-HEMBA1003384 | 0.07 |
| HEMBA1003531 | F-HEMBA1003531 | 0.2 |
| HEMBA1003548 | F-HEMBA1003548 | 0.08 |
| HEMBA1003571 | F-HEMBA1003571 | 0.13 |
| HEMBA1003579 | F-HEMBA1003579 | 0.13 |
| HEMBA1003595 | F-HEMBA1003595 | 0.08 |
| HEMBA1003597 | F-HEMBA1003597 | 0.1 |
| HEMBA1003598 | F-HEMBA1003598 | 0.12 |
| HEMBA1003622 | F-HEMBA1003622 | 0.08 |
| HEMBA1003630 | F-HEMBA1003630 | 0.08 |
| HEMBA1003637 | F-HEMBA1003637 | 0.07 |
| HEMBA1003640 | F-HEMBA1003640 | 0.16 |
| HEMBA1003656 | F-HEMBA1003656 | 0.13 |
| HEMBA1003714 | F-HEMBA1003714 | 0.12 |
| HEMBA1003715 | F-HEMBA1003715 | 0.1 |
| HEMBA1003725 | F-HEMBA1003725 | 0.08 |
| HEMBA1003733 | F-HEMBA1003733 | 0.2 |
| HEMBA1003758 | F-HEMBA1003758 | 0.06 |
| HEMBA1003773 | F-HEMBA1003773 | 0.11 |
| HEMBA1003784 | F-HEMBA1003784 | 0.09 |
| HEMBA1003856 | F-HEMBA1003856 | 0.25 |
| HEMBA1003885 | F-HEMBA1003885 | 0.09 |
| HEMBA1003902 | F-HEMBA1003902 | 0.08 |
| HEMBA1003908 | F-HEMBA1003908 | 0.08 |
| HEMBA1003926 | F-HEMBA1003926 | 0.09 |
| HEMBA1003937 | F-HEMBA1003937 | 0.2 |
| HEMBA1003939 | F-HEMBA1003939 | 0.12 |
| HEMBA1003942 | F-HEMBA1003942 | 0.1 |
| HEMBA1003950 | F-HEMBA1003950 | 0.09 |
| HEMBA1003958 | F-HEMBA1003958 | 0.07 |
| HEMBA1003976 | F-HEMBA1003976 | 0.28 |
| HEMBA1003987 | F-HEMBA1003987 | 0.24 |
| HEMBA1004000 | F-HEMBA1004000 | 0.16 |
| HEMBA1004012 | F-HEMBA1004012 | 0.12 |
| HEMBA1004015 | F-HEMBA1004015 | 0.23 |
| HEMBA1004024 | F-HEMBA1004024 | 0.13 |
| HEMBA1004038 | F-HEMBA1004038 | 0.09 |
| HEMBA1004042 | F-HEMBA1004042 | 0.09 |
| HEMBA1004045 | F-HEMBA1004045 | 0.09 |
| HEMBA1004049 | F-HEMBA1004049 | 0.09 |
| HEMBA1004132 | F-HEMBA1004132 | 0.08 |
| HEMBA1004138 | F-HEMBA1004138 | 0.07 |
| HEMBA1004164 | F-HEMBA1004164 | 0.08 |
| HEMBA1004225 | F-HEMBA1004225 | 0.1 |
| HEMBA1004241 | F-HEMBA1004241 | 0.08 |
| HEMBA1004267 | F-HEMBA1004267 | 0.09 |
| HEMBA1004272 | F-HEMBA1004272 | 0.09 |
| HEMBA1004295 | F-HEMBA1004295 | 0.19 |
| HEMBA1004306 | F-HEMBA1004306 | 0.07 |
| HEMBA1004312 | F-HEMBA1004312 | 0.26 |
| HEMBA1004323 | F-HEMBA1004323 | 0.13 |
| HEMBA1004334 | F-HEMBA1004334 | 0.06 |
| HEMBA1004354 | F-HEMBA1004354 | 0.1 |
| HEMBA1004356 | F-HEMBA1004356 | 0.07 |
| HEMBA1004366 | F-HEMBA1004366 | 0.14 |
| HEMBA1004394 | F-HEMBA1004394 | 0.08 |
| HEMBA1004396 | F-HEMBA1004396 | 0.05 |
| HEMBA1004405 | F-HEMBA1004405 | 0.17 |
| HEMBA1004429 | F-HEMBA1004429 | 0.22 |
| HEMBA1004433 | F-HEMBA1004433 | 0.29 |
| HEMBA1004460 | F-HEMBA1004460 | 0.11 |
| HEMBA1004461 | F-HEMBA1004461 | 0.11 |
| HEMBA1004482 | F-HEMBA1004482 | 0.15 |
| HEMBA1004506 | F-HEMBA1004506 | 0.05 |
| HEMBA1004538 | F-HEMBA1004538 | 0.15 |
| HEMBA1004577 | F-HEMBA1004577 | 0.17 |
| HEMBA1004586 | F-HEMBA1004586 | 0.06 |
| HEMBA1004617 | F-HEMBA1004617 | 0.11 |
| HEMBA1004629 | F-HEMBA1004629 | 0.11 |
| HEMBA1004631 | F-HEMBA1004631 | 0.1 |
| HEMBA1004666 | F-HEMBA1004666 | 0.08 |
| HEMBA1004670 | F-HEMBA1004670 | 0.15 |
| HEMBA1004672 | F-HEMBA1004672 | 0.14 |
| HEMBA1004730 | F-HEMBA1004730 | 0.15 |
| HEMBA1004733 | F-HEMBA1004733 | 0.12 |
| HEMBA1004748 | F-HEMBA1004748 | 0.1 |
| HEMBA1004770 | F-HEMBA1004770 | 0.15 |
| HEMBA1004778 | F-HEMBA1004778 | 0.14 |
| HEMBA1004803 | F-HEMBA1004803 | 0.13 |
| HEMBA1004807 | F-HEMBA1004807 | 0.18 |
| HEMBA1004816 | F-HEMBA1004816 | 0.06 |
| HEMBA1004820 | F-HEMBA1004820 | 0.11 |
| HEMBA1004865 | F-HEMBA1004865 | 0.17 |
| HEMBA1004880 | F-HEMBA1004880 | 0.28 |
| HEMBA1004900 | F-HEMBA1004900 | 0.11 |
| HEMBA1004909 | F-HEMBA1004909 | 0.11 |
| HEMBA1004918 | F-HEMBA1004918 | 0.09 |
| HEMBA1004956 | F-HEMBA1004956 | 0.05 |
| HEMBA1004960 | F-HEMBA1004960 | 0.21 |
| HEMBA1004978 | F-HEMBA1004978 | 0.1 |
| HEMBA1004983 | F-HEMBA1004983 | 0.28 |
| HEMBA1004995 | F-HEMBA1004995 | 0.24 |
| HEMBA1005008 | F-HEMBA1005008 | 0.07 |
| HEMBA1005039 | F-HEMBA1005039 | 0.08 |
| HEMBA1005062 | F-HEMBA1005062 | 0.11 |
| HEMBA1005123 | F-HEMBA1005123 | 0.07 |
| HEMBA1005152 | F-HEMBA1005152 | 0.11 |
| HEMBA1005159 | F-HEMBA1005159 | 0.1 |
| HEMBA1005232 | F-HEMBA1005232 | 0.1 |
| HEMBA1005241 | F-HEMBA1005241 | 0.14 |
| HEMBA1005251 | F-HEMBA1005251 | 0.29 |
| HEMBA1005274 | F-HEMBA1005274 | 0.06 |
| HEMBA1005275 | F-HEMBA1005275 | 0.12 |
| HEMBA1005293 | F-HEMBA1005293 | 0.06 |
| HEMBA1005304 | F-HEMBA1005304 | 0.09 |
| HEMBA1005311 | F-HEMBA1005311 | 0.2 |
| HEMBA1005315 | F-HEMBA1005315 | 0.07 |
| HEMBA1005318 | F-HEMBA1005318 | 0.08 |
| HEMBA1005353 | F-HEMBA1005353 | 0.12 |
| HEMBA1005359 | F-HEMBA1005359 | 0.15 |
| HEMBA1005372 | F-HEMBA1005372 | 0.07 |
| HEMBA1005374 | F-HEMBA1005374 | 0.09 |
| HEMBA1005389 | F-HEMBA1005389 | 0.1 |
| HEMBA1005408 | F-HEMBA1005408 | 0.09 |
| HEMBA1005410 | F-HEMBA1005410 | 0.07 |
| HEMBA1005426 | F-HEMBA1005426 | 0.16 |
| HEMBA1005443 | F-HEMBA1005443 | 0.17 |
| HEMBA1005447 | F-HEMBA1005447 | 0.25 |
| HEMBA1005497 | F-HEMBA1005497 | 0.09 |
| HEMBA1005500 | F-HEMBA1005500 | 0.08 |
| HEMBA1005506 | F-HEMBA1005506 | 0.17 |
| HEMBA1005508 | F-HEMBA1005508 | 0.12 |
| HEMBA1005511 | F-HEMBA1005511 | 0.1 |
| HEMBA1005520 | F-HEMBA1005520 | 0.07 |
| HEMBA1005552 | F-HEMBA1005552 | 0.05 |
| HEMBA1005568 | F-HEMBA1005568 | 0.06 |
| HEMBA1005570 | F-HEMBA1005570 | 0.1 |
| HEMBA1005577 | F-HEMBA1005577 | 0.13 |
| HEMBA1005588 | F-HEMBA1005588 | 0.25 |
| HEMBA1005593 | F-HEMBA1005593 | 0.13 |
| HEMBA1005606 | F-HEMBA1005606 | 0.16 |
| HEMBA1005616 | F-HEMBA1005616 | 0.15 |
| HEMBA1005627 | F-HEMBA1005627 | 0.11 |
| HEMBA1005631 | F-HEMBA1005631 | 0.07 |
| HEMBA1005632 | F-HEMBA1005632 | 0.07 |
| HEMBA1005634 | F-HEMBA1005634 | 0.07 |
| HEMBA1005670 | F-HEMBA1005670 | 0.11 |
| HEMBA1005679 | F-HEMBA1005679 | 0.22 |
| HEMBA1005699 | F-HEMBA1005699 | 0.08 |
| HEMBA1005705 | F-HEMBA1005705 | 0.08 |
| HEMBA1005717 | F-HEMBA1005717 | 0.17 |
| HEMBA1005765 | F-HEMBA1005765 | 0.08 |
| HEMBA1005780 | F-HEMBA1005780 | 0.16 |
| HEMBA1005829 | F-HEMBA1005829 | 0.09 |
| HEMBA1005853 | F-HEMBA1005853 | 0.06 |
| HEMBA1005894 | F-HEMBA1005894 | 0.16 |
| HEMBA1005909 | F-HEMBA1005909 | 0.13 |
| HEMBA1005911 | F-HEMBA1005911 | 0.22 |
| HEMBA1005921 | F-HEMBA1005921 | 0.1 |
| HEMBA1005931 | F-HEMBA1005931 | 0.16 |
| HEMBA1005934 | F-HEMBA1005934 | 0.1 |
| HEMBA1005962 | F-HEMBA1005962 | 0.07 |
| HEMBA1005999 | F-HEMBA1005999 | 0.14 |
| HEMBA1006002 | F-HEMBA1006002 | 0.09 |
| HEMBA1006005 | F-HEMBA1006005 | 0.2 |
| HEMBA1006036 | F-HEMBA1006036 | 0.24 |
| HEMBA1006042 | F-HEMBA1006042 | 0.11 |
| HEMBA1006067 | F-HEMBA1006067 | 0.09 |
| HEMBA1006090 | F-HEMBA1006090 | 0.09 |
| HEMBA1006124 | F-HEMBA1006124 | 0.05 |
| HEMBA1006142 | F-HEMBA1006142 | 0.13 |
| HEMBA1006158 | F-HEMBA1006158 | 0.27 |
| HEMBA1006253 | F-HEMBA1006253 | 0.29 |
| HEMBA1006259 | F-HEMBA1006259 | 0.11 |
| HEMBA1006268 | F-HEMBA1006268 | 0.11 |
| HEMBA1006328 | F-HEMBA1006328 | 0.06 |
| HEMBA1006334 | F-HEMBA1006334 | 0.08 |
| HEMBA1006359 | F-HEMBA1006359 | 0.22 |
| HEMBA1006364 | F-HEMBA1006364 | 0.23 |
| HEMBA1006380 | F-HEMBA1006380 | 0.09 |
| HEMBA1006416 | F-HEMBA1006416 | 0.25 |
| HEMBA1006419 | F-HEMBA1006419 | 0.08 |
| HEMBA1006421 | F-HEMBA1006421 | 0.26 |
| HEMBA1006426 | F-HEMBA1006426 | 0.17 |
| HEMBA1006438 | F-HEMBA1006438 | 0.08 |
| HEMBA1006446 | F-HEMBA1006446 | 0.11 |
| HEMBA1006461 | F-HEMBA1006461 | 0.15 |
| HEMBA1006471 | F-HEMBA1006471 | 0.06 |
| HEMBA1006486 | F-HEMBA1006486 | 0.11 |
| HEMBA1006489 | F-HEMBA1006489 | 0.09 |
| HEMBA1006540 | F-HEMBA1006540 | 0.23 |
| HEMBA1006546 | F-HEMBA1006546 | 0.07 |
| HEMBA1006562 | F-HEMBA1006562 | 0.12 |
| HEMBA1006569 | F-HEMBA1006569 | |
| HEMBA1006595 | F-HEMBA1006595 | 0.08 |
| HEMBA1006597 | F-HEMBA1006597 | 0.17 |
| HEMBA1006617 | F-HEMBA1006617 | 0.07 |
| HEMBA1006635 | F-HEMBA1006635 | 0.07 |
| HEMBA1006639 | F-HEMBA1006639 | 0.25 |
| HEMBA1006648 | F-HEMBA1006648 | 0.24 |
| HEMBA1006653 | F-HEMBA1006653 | 0.09 |
| HEMBA1006665 | F-HEMBA1006665 | 0.17 |
| HEMBA1006676 | F-HEMBA1006676 | 0.17 |
| HEMBA1006695 | F-HEMBA1006695 | 0.1 |
| HEMBA1006696 | F-HEMBA1006696 | 0.05 |
| HEMBA1006744 | F-HEMBA1006744 | 0.12 |
| HEMBA1006779 | F-HEMBA1006779 | 0.07 |
| HEMBA1006780 | F-HEMBA1006780 | 0.23 |
| HEMBA1006821 | F-HEMBA1006821 | 0.08 |
| HEMBA1006824 | F-HEMBA1006824 | 0.09 |
| HEMBA1006849 | F-HEMBA1006849 | 0.05 |
| HEMBA1006865 | F-HEMBA1006865 | 0.1 |
| HEMBA1006921 | F-HEMBA1006921 | 0.22 |
| HEMBA1006929 | F-HEMBA1006929 | 0.15 |
| HEMBA1006938 | F-HEMBA1006938 | 0.07 |
| HEMBA1006949 | F-HEMBA1006949 | 0.27 |
| HEMBA1007017 | F-HEMBA1007017 | 0.07 |
| HEMBA1007045 | F-HEMBA1007045 | 0.14 |
| HEMBA1007051 | F-HEMBA1007051 | 0.19 |
| HEMBA1007073 | F-HEMBA1007073 | 0.22 |
| HEMBA1007078 | F-HEMBA1007078 | 0.12 |
| HEMBA1007113 | F-HEMBA1007113 | 0.12 |
| HEMBA1007129 | F-HEMBA1007129 | 0.18 |
| HEMBA1007147 | F-HEMBA1007147 | 0.08 |
| HEMBA1007206 | F-HEMBA1007206 | 0.11 |
| HEMBA1007256 | F-HEMBA1007256 | 0.13 |
| HEMBA1007273 | F-HEMBA1007273 | 0.05 |
| HEMBA1007279 | F-HEMBA1007279 | 0.09 |
| HEMBA1007288 | F-HEMBA1007288 | 0.06 |
| HEMBA1007322 | F-HEMBA1007322 | 0.12 |
| HEMBA1007327 | F-HEMBA1007327 | 0.12 |
| HEMBA1007341 | F-HEMBA1007341 | 0.1 |
| HEMBA1007347 | F-HEMBA1007347 | 0.14 |
| HEMBB1000005 | F-HEMBB1000005 | 0.13 |
| HEMBB1000039 | F-HEMBB1000039 | 0.07 |
| HEMBB1000044 | F-HEMBB1000044 | 0.08 |
| HEMBB1000050 | F-HEMBB1000050 | 0.07 |
| HEMBB1000054 | F-HEMBB1000054 | 0.12 |
| HEMBB1000055 | F-HEMBB1000055 | 0.2 |
| HEMBB1000059 | F-HEMBB1000059 | 0.08 |
| HEMBB1000089 | F-HEMBB1000089 | 0.09 |
| HEMBB1000099 | F-HEMBB1000099 | 0.17 |
| HEMBB1000113 | F-HEMBB1000113 | 0.12 |
| HEMBB1000141 | F-HEMBB1000141 | 0.13 |
| HEMBB1000144 | F-HEMBB1000144 | 0.2 |
| HEMBB1000218 | F-HEMBB1000218 | 0.07 |
| HEMBB1000250 | F-HEMBB1000250 | 0.26 |
| HEMBB1000258 | F-HEMBB1000258 | 0.15 |
| HEMBB1000264 | F-HEMBB1000264 | 0.08 |
| HEMBB1000272 | F-HEMBB1000272 | 0.11 |
| HEMBB1000274 | F-HEMBB1000274 | 0.12 |
| HEMBB1000284 | F-HEMBB1000284 | 0.1 |
| HEMBB1000307 | F-HEMBB1000307 | 0.11 |
| HEMBB1000312 | F-HEMBB1000312 | 0.07 |
| HEMBB1000317 | F-HEMBB1000317 | 0.27 |
| HEMBB1000318 | F-HEMBB1000318 | 0.11 |
| HEMBB1000335 | F-HEMBB1000335 | 0.15 |
| HEMBB1000336 | F-HEMBB1000336 | 0.28 |
| HEMBB1000337 | F-HEMBB1000337 | 0.25 |
| HEMBB1000341 | F-HEMBB1000341 | 0.24 |
| HEMBB1000343 | F-HEMBB1000343 | 0.07 |
| HEMBB1000354 | F-HEMBB1000354 | 0.15 |
| HEMBB1000369 | F-HEMBB1000369 | 0.08 |
| HEMBB1000374 | F-HEMBB1000374 | 0.3 |
| HEMBB1000376 | F-HEMBB1000376 | 0.12 |
| HEMBB1000399 | F-HEMBB1000399 | 0.08 |
| HEMBB1000402 | F-HEMBB1000402 | 0.29 |
| HEMBB1000404 | F-HEMBB1000404 | 0.29 |
| HEMBB1000420 | F-HEMBB1000420 | 0.11 |
| HEMBB1000434 | F-HEMBB1000434 | 0.05 |
| HEMBB1000441 | F-HEMBB1000441 | 0.12 |
| HEMBB1000455 | F-HEMBB1000455 | 0.05 |
| HEMBB1000472 | F-HEMBB1000472 | 0.05 |
| HEMBB1000480 | F-HEMBB1000480 | 0.13 |
| HEMBB1000487 | F-HEMBB1000487 | 0.09 |
| HEMBB1000490 | F-HEMBB1000490 | 0.06 |
| HEMBB1000491 | F-HEMBB1000491 | 0.16 |
| HEMBB1000493 | F-HEMBB1000493 | 0.15 |
| HEMBB1000518 | F-HEMBB1000518 | 0.05 |
| HEMBB1000523 | F-HEMBB1000523 | 0.07 |
| HEMBB1000530 | F-HEMBB1000530 | 0.14 |
| HEMBB1000554 | F-HEMBB1000554 | 0.23 |
| HEMBB1000564 | F-HEMBB1000564 | 0.09 |
| HEMBB1000573 | F-HEMBB1000573 | 0.1 |
| HEMBB1000575 | F-HEMBB1000575 | 0.08 |
| HEMBB1000586 | F-HEMBB1000586 | 0.12 |
| HEMBB1000598 | F-HEMBB1000598 | 0.12 |
| HEMBB1000637 | F-HEMBB1000637 | 0.19 |
| HEMBB1000638 | F-HEMBB1000638 | 0.07 |
| HEMBB1000643 | F-HEMBB1000643 | 0.07 |
| HEMBB1000649 | F-HEMBB1000649 | 0.13 |
| HEMBB1000652 | F-HEMBB1000652 | 0.2 |
| HEMBB1000665 | F-HEMBB100066S | 0.07 |
| HEMBB1000684 | F-HEMBB1000684 | 0.06 |
| HEMBB1000709 | F-HEMBB1000709 | 0.09 |
| HEMBB1000726 | F-HEMBB1000726 | 0.07 |
| HEMBB1000738 | F-HEMBB1000738 | 0.19 |
| HEMBB1000749 | F-HEMBB1000749 | 0.14 |
| HEMBB1000770 | F-HEMBB1000770 | 0.09 |
| HEMBB1000790 | F-HEMBB1000790 | 0.23 |
| HEMBB1000794 | F-HEMBB1000794 | 0.09 |
| HEMBB1000821 | F-HEMBB1000821 | 0.1 |
| HEMBB1000822 | F-HEMBB1000822 | 0.18 |
| HEMBB1000827 | F-HEMBB1000827 | 0.1 |
| HEMBB1000831 | F-HEMBB1000831 | 0.2 |
| HEMBB1000840 | F-HEMBB1000840 | 0.09 |
| HEMBB1000876 | F-HEMBB1000876 | 0.12 |
| HEMBB1000883 | F-HEMBB1000883 | 0.13 |
| HEMBB1000888 | F-HEMBB1000888 | 0.1 |
| HEMBB1000890 | F-HEMBB1000890 | 0.09 |
| HEMBB1000893 | F-HEMBB1000893 | 0.1 |
| HEMBB1000910 | F-HEMBB1000910 | 0.06 |
| HEMBB1000913 | F-HEMBB1000913 | 0.09 |
| HEMBB1000915 | F-HEMBB1000915 | 0.12 |
| HEMBB1000917 | F-HEMBB1000917 | 0.15 |
| HEMBB1000959 | F-HEMBB1000959 | 0.08 |
| HEMBB1000981 | F-HEMBB1000981 | 0.09 |
| HEMBB1000996 | F-HEMBB1000996 | 0.1 |
| HEMBB1001004 | F-HEMBB1001004 | 0.08 |
| HEMBB1001008 | F-HEMBB1001008 | 0.25 |
| HEMBB1001037 | F-HEMBB1001037 | 0.14 |
| HEMBB1001047 | F-HEMBB1001047 | 0.14 |
| HEMBB1001051 | F-HEMBB1001051 | 0.13 |
| HEMBB1001060 | F-HEMBB1001060 | 0.16 |
| HEMBB1001063 | F-HEMBB1001063 | 0.1 |
| HEMBB1001102 | F-HEMBB1001102 | 0.19 |
| HEMBB1001114 | F-HEMBB1001114 | 0.08 |
| HEMBB1001119 | F-HEMBB1001119 | 0.13 |
| HEMBB1001133 | F-HEMBB1001133 | 0.06 |
| HEMBB1001142 | F-HEMBB1001142 | 0.17 |
| HEMBB1001177 | F-HEMBB1001177 | 0.2 |
| HEMBB1001208 | F-HEMBB1001208 | 0.12 |
| HEMBB1001209 | F-HEMBB1001209 | 0.11 |
| HEMBB1001218 | F-HEMBB1001218 | 0.1 |
| HEMBB1001221 | F-HEMBB1001221 | 0.1 |
| HEMBB1001249 | F-HEMBB1001249 | 0.12 |
| HEMBB1001253 | F-HEMBB1001253 | 0.13 |
| HEMBB1001254 | F-HEMBB1001254 | 0.13 |
| HEMBB1001267 | F-HEMBB1001267 | 0.09 |
| HEMBB1001271 | F-HEMBB1001271 | 0.16 |
| HEMBB1001282 | F-HEMBB1001282 | 0.14 |
| HEMBB1001302 | F-HEMBB1001302 | 0.18 |
| HEMBB1001304 | F-HEMBB1001304 | 0.17 |
| HEMBB1001315 | F-HEMBB1001315 | 0.18 |
| HEMBB1001317 | F-HEMBB1001317 | 0.12 |
| HEMBB1001326 | F-HEMBB1001326 | 0.09 |
| HEMBB1001335 | F-HEMBB1001335 | 0.08 |
| HEMBB1001337 | F-HEMBB1001337 | 0.12 |
| HEMBB1001348 | F-HEMBB1001348 | 0.11 |
| HEMBB1001356 | F-HEMBB1001356 | 0.1 |
| HEMBB1001366 | F-HEMBB1001366 | 0.16 |
| HEMBB1001367 | F-HEMBB1001367 | 0.11 |
| HEMBB1001380 | F-HEMBB1001380 | 0.07 |
| HEMBB1001424 | F-HEMBB1001424 | 0.05 |
| HEMBB1001436 | F-HEMBB1001436 | 0.14 |
| HEMBB1001443 | F-HEMBB1001443 | 0.28 |
| HEMBB1001454 | F-HEMBB1001454 | |
| HEMBB1001458 | F-HEMBB1001458 | 0.11 |
| HEMBB1001463 | F-HEMBB1001463 | 0.1 |
| HEMBB1001464 | F-HEMBB1001464 | 0.06 |
| HEMBB1001500 | F-HEMBB1001500 | 0.11 |
| HEMBB1001521 | F-HEMBB1001521 | 0.13 |
| HEMBB1001527 | F-HEMBB1001527 | 0.13 |
| HEMBB1001535 | F-HEMBB1001535 | 0.11 |
| HEMBB1001536 | F-HEMBB1001536 | 0.08 |
| HEMBB1001537 | F-HEMBB1001537 | 0.11 |
| HEMBB1001555 | F-HEMBB1001555 | 0.08 |
| HEMBB1001565 | F-HEMBB1001565 | 0.1 |
| HEMBB1001586 | F-HEMBB1001586 | 0.06 |
| HEMBB1001588 | F-HEMBB1001588 | 0.06 |
| HEMBB1001618 | F-HEMBB1001618 | 0.09 |
| HEMBB1001619 | F-HEMBB1001619 | 0.12 |
| HEMBB1001630 | F-HEMBB1001630 | 0.12 |
| HEMBB1001637 | F-HEMBB1001637 | 0.08 |
| HEMBB1001641 | F-HEMBB1001641 | 0.09 |
| HEMBB1001704 | F-HEMBB1001704 | 0.09 |
| HEMBB1001706 | F-HEMBB1001706 | 0.11 |
| HEMBB1001717 | F-HEMBB1001717 | 0.09 |
| HEMBB1001735 | F-HEMBB1001735 | 0.21 |
| HEMBB1001747 | F-HEMBB1001747 | 0.07 |
| HEMBB1001749 | F-HEMBB1001749 | 0.13 |
| HEMBB1001753 | F-HEMBB1001753 | 0.08 |
| HEMBB1001756 | F-HEMBB1001756 | 0.11 |
| HEMBB1001762 | F-HEMBB1001762 | 0.11 |
| HEMBB1001797 | F-HEMBB1001797 | 0.13 |
| HEMBB1001802 | F-HEMBB1001802 | 0.06 |
| HEMBB1001836 | F-HEMBB1001836 | 0.15 |
| HEMBB1001850 | F-HEMBB1001850 | 0.06 |
| HEMBB1001863 | F-HEMBB1001863 | 0.09 |
| HEMBB1001867 | F-HEMBB1001867 | 0.11 |
| HEMBB1001868 | F-HEMBB1001868 | 0.24 |
| HEMBB1001875 | F-HEMBB1001875 | 0.05 |
| HEMBB1001880 | F-HEMBB1001880 | 0.08 |
| HEMBB1001899 | F-HEMBB1001899 | 0.16 |
| HEMBB1001911 | F-HEMBB1001911 | 0.22 |
| HEMBB1001921 | F-HEMBB1001921 | 0.07 |
| HEMBB1001922 | F-HEMBB1001922 | 0.11 |
| HEMBB1001925 | F-HEMBB1001925 | 0.19 |
| HEMBB1001930 | F-HEMBB1001930 | 0.1 |
| HEMBB1001944 | F-HEMBB1001944 | 0.14 |
| HEMBB1001952 | F-HEMBB1001952 | 0.08 |
| HEMBB1001953 | F-HEMBB1001953 | 0.15 |
| HEMBB1001967 | F-HEMBB1001967 | 0.08 |
| HEMBB1001973 | F-HEMBB1001973 | 0.09 |
| HEMBB1001983 | F-HEMBB1001983 | 0.1 |
| HEMBB1001988 | F-HEMBB1001988 | 0.15 |
| HEMBB1001996 | F-HEMBB1001996 | 0.19 |
| HEMBB1001997 | F-HEMBB1001997 | 0.08 |
| HEMBB1002002 | F-HEMBB1002002 | 0.21 |
| HEMBB1002005 | F-HEMBB1002005 | 0.18 |
| HEMBB1002009 | F-HEMBB1002009 | 0.09 |
| HEMBB1002015 | F-HEMBB1002015 | 0.26 |
| HEMBB1002042 | F-HEMBB1002042 | 0.11 |
| HEMBB1002043 | F-HEMBB1002043 | 0.09 |
| HEMBB1002045 | F-HEMBB1002045 | 0.26 |
| HEMBB1002049 | F-HEMBB1002049 | 0.12 |
| HEMBB1002069 | F-HEMBB1002069 | 0.12 |
| HEMBB1002092 | F-HEMBB1002092 | 0.16 |
| HEMBB1002094 | F-HEMBB1002094 | 0.11 |
| HEMBB1002115 | F-HEMBB1002115 | 0.09 |
| HEMBB1002139 | F-HEMBB1002139 | 0.13 |
| HEMBB1002189 | F-HEMBB1002189 | 0.06 |
| HEMBB1002190 | F-HEMBB1002190 | 0.18 |
| HEMBB1002232 | F-HEMBB1002232 | 0.09 |
| HEMBB1002247 | F-HEMBB1002247 | 0.17 |
| HEMBB1002254 | F-HEMBB1002254 | 0.05 |
| HEMBB1002255 | F-HEMBB1002255 | 0.11 |
| HEMBB1002266 | F-HEMBB1002266 | 0.28 |
| HEMBB1002280 | F-HEMBB1002280 | 0.07 |
| HEMBB1002306 | F-HEMBB1002306 | 0.06 |
| HEMBB1002364 | F-HEMBB1002364 | 0.05 |
| HEMBB1002371 | F-HEMBB1002371 | 0.12 |
| HEMBB1002381 | F-HEMBB1002381 | 0.09 |
| HEMBB1002387 | F-HEMBB1002387 | 0.17 |
| HEMBB1002425 | F-HEMBB1002425 | 0.08 |
| HEMBB1002453 | F-HEMBB1002453 | 0.12 |
| HEMBB1002458 | F-HEMBB1002458 | 0.09 |
| HEMBB1002477 | F-HEMBB1002477 | 0.17 |
| HEMBB1002509 | F-HEMBB1002509 | 0.06 |
| HEMBB1002520 | F-HEMBB1002520 | 0.08 |
| HEMBB1002522 | F-HEMBB1002522 | 0.21 |
| HEMBB1002531 | F-HEMBB1002531 | 0.1 |
| HEMBB1002534 | F-HEMBB1002534 | 0.09 |
| HEMBB1002556 | F-HEMBB1002556 | 0.1 |
| HEMBB1002579 | F-HEMBB1002579 | 0.13 |
| HEMBB1002582 | F-HEMBB1002582 | 0.17 |
| HEMBB1002590 | F-HEMBB1002590 | 0.08 |
| HEMBB1002596 | F-HEMBB1002596 | 0.15 |
| HEMBB1002601 | F-HEMBB1002601 | 0.1 |
| HEMBB1002603 | F-HEMBB1002603 | 0.12 |
| HEMBB1002610 | F-HEMBB1002610 | 0.1 |
| HEMBB1002613 | F-HEMBB1002613 | 0.09 |
| HEMBB1002617 | F-HEMBB1002617 | 0.12 |
| HEMBB1002623 | F-HEMBB1002623 | 0.14 |
| HEMBB1002635 | F-HEMBB1002635 | 0.08 |
| HEMBB1002664 | F-HEMBB1002664 | 0.06 |
| HEMBB1002677 | F-HEMBB1002677 | 0.07 |
| HEMBB1002683 | F-HEMBB1002683 | 0.06 |
| HEMBB1002686 | F-HEMBB1002686 | 0.12 |
| HEMBB1002699 | F-HEMBB1002699 | 0.15 |
| HEMBB1002702 | F-HEMBB1002702 | 0.16 |
| HEMBB1002712 | F-HEMBB1002712 | 0.07 |
| MAMMA1000009 | F-MAMMA1000009 | 0.11 |
| MAMMA1000043 | F-MAMMA1000043 | 0.19 |
| MAMMA1000045 | F-MAMMA1000045 | 0.08 |
| MAMMA1000092 | F-MAMMA1000092 | 0.11 |
| MAMMA1000103 | F-MAMMA1000103 | 0.09 |
| MAMMA1000117 | F-MAMMA1000117 | 0.2 |
| MAMMA1000129 | F-MAMMA1000129 | 0.17 |
| MAMMA1000133 | F-MAMMA1000133 | 0.1 |
| MAMMA1000134 | F-MAMMA1000134 | 0.05 |
| MAMMA1000155 | F-MAMMA1000155 | 0.12 |
| MAMMA1000175 | F-MAMMA1000175 | 0.07 |
| MAMMA1000198 | F-MAMMA1000198 | 0.2 |
| MAMMA1000221 | F-MAMMA1000221 | 0.1 |
| MAMMA1000227 | F-MAMMA1000227 | 0.08 |
| MAMMA1000241 | F-MAMMA1000241 | 0.16 |
| MAMMA1000254 | F-MAMMA1000254 | 0.08 |
| MAMMA1000264 | F-MAMMA1000264 | 0.1 |
| MAMMA1000266 | F-MAMMA1000266 | 0.18 |
| MAMMA1000270 | F-MAMMA1000270 | 0.1 |
| MAMMA1000287 | F-MAMMA1000287 | 0.1 |
| MAMMA1000302 | F-MAMMA1000302 | 0.07 |
| MAMMA1000307 | F-MAMMA1000307 | 0.26 |
| MAMMA1000331 | F-MAMMA1000331 | 0.18 |
| MAMMA1000340 | F-MAMMA1000340 | 0.2 |
| MAMMA1000348 | F-MAMMA1000348 | 0.09 |
| MAMMA1000356 | F-MAMMA1000356 | 0.15 |
| MAMMA1000360 | F-MAMMA1000360 | 0.09 |
| MAMMA1000385 | F-MAMMA1000385 | 0.08 |
| MAMMA1000402 | F-MAMMA1000402 | 0.11 |
| MAMMA1000413 | F-MAMMA1000413 | 0.1 |
| MAMMA1000414 | F-MAMMA1000414 | 0.1 |
| MAMMA1000423 | F-MAMMA1000423 | 0.06 |
| MAMMA1000424 | F-MAMMA1000424 | 0.1 |
| MAMMA1000431 | F-MAMMA1000431 | 0.28 |
| MAMMA1000444 | F-MAMMA1000444 | 0.07 |
| MAMMA1000446 | F-MAMMA1000446 | 0.08 |
| MAMMA1000478 | F-MAMMA1000478 | 0.1 |
| MAMMA1000483 | F-MAMMA1000483 | 0.07 |
| MAMMA1000500 | F-MAMMA1000500 | 0.16 |
| MAMMA1000501 | F-MAMMA1000501 | 0.05 |
| MAMMA1000516 | F-MAMMA1000516 | 0.06 |
| MAMMA1000522 | F-MAMMA1000522 | 0.21 |
| MAMMA1000559 | F-MAMMA1000559 | 0.12 |
| MAMMA1000565 | F-MAMMA1000565 | 0.09 |
| MAMMA1000576 | F-MAMMA1000576 | 0.14 |
| MAMMA1000585 | F-MAMMA1000585 | 0.07 |
| MAMMA1000594 | F-MAMMA1000594 | 0.17 |
| MAMMA1000597 | F-MAMMA1000597 | 0.1 |
| MAMMA1000605 | F-MAMMA1000605 | 0.09 |
| MAMMA1000616 | F-MAMMA1000616 | 0.08 |
| MAMMA1000621 | F-MAMMA1000621 | 0.07 |
| MAMMA1000643 | F-MAMMA1000643 | 0.1 |
| MAMMA1000669 | F-MAMMA1000669 | 0.11 |
| MAMMA1000696 | F-MAMMA1000696 | 0.08 |
| MAMMA1000707 | F-MAMMA1000707 | 0.07 |
| MAMMA1000714 | F-MAMMA1000714 | 0.18 |
| MAMMA1000718 | F-MAMMA1000718 | 0.06 |
| MAMMA1000720 | F-MAMMA1000720 | 0.15 |
| MAMMA1000723 | F-MAMMA1000723 | 0.14 |
| MAMMA1000732 | F-MAMMA1000732 | 0.06 |
| MAMMA1000733 | F-MAMMA1000733 | 0.1 |
| MAMMA1000744 | F-MAMMA1000744 | 0.15 |
| MAMMA1000752 | F-MAMMA1000752 | 0.12 |
| MAMMA1000761 | F-MAMMA1000761 | 0.24 |
| MAMMA1000775 | F-MAMMA1000775 | 0.24 |
| MAMMA1000778 | F-MAMMA1000778 | 0.09 |
| MAMMA1000782 | F-MAMMA1000782 | 0.1 |
| MAMMA1000798 | F-MAMMA1000798 | 0.16 |
| MAMMA1000802 | F-MAMMA1000802 | 0.11 |
| MAMMA1000839 | F-MAMMA1000839 | 0.09 |
| MAMMA1000845 | F-MAMMA1000845 | 0.1 |
| MAMMA1000851 | F-MAMMA1000851 | 0.08 |
| MAMMA1000855 | F-MAMMA1000855 | 0.23 |
| MAMMA1000862 | F-MAMMA1000862 | 0.12 |
| MAMMA1000863 | F-MAMMA1000863 | 0.16 |
| MAMMA1000867 | F-MAMMA1000867 | 0.25 |
| MAMMA1000876 | F-MAMMA1000876 | 0.14 |
| MAMMA1000877 | F-MAMMA1000877 | 0.07 |
| MAMMA1000880 | F-MAMMA1000880 | 0.13 |
| MAMMA1000883 | F-MAMMA1000883 | 0.3 |
| MAMMA1000905 | F-MAMMA1000905 | 0.08 |
| MAMMA1000931 | F-MAMMA1000931 | 0.18 |
| MAMMA1000940 | F-MAMMA1000940 | 0.21 |
| MAMMA1000941 | F-MAMMA1000941 | 0.13 |
| MAMMA1000942 | F-MAMMA1000942 | 0.08 |
| MAMMA1000943 | F-MAMMA1000943 | 0.09 |
| MAMMA1000957 | F-MAMMA1000957 | 0.13 |
| MAMMA1000962 | F-MAMMA1000962 | 0.06 |
| MAMMA1000975 | F-MAMMA1000975 | 0.26 |
| MAMMA1000987 | F-MAMMA1000987 | 0.08 |
| MAMMA1000998 | F-MAMMA1000998 | 0.08 |
| MAMMA1001003 | F-MAMMA1001003 | 0.15 |
| MAMMA1001024 | F-MAMMA1001024 | 0.08 |
| MAMMA1001030 | F-MAMMA1001030 | 0.2 |
| MAMMA1001035 | F-MAMMA1001035 | 0.08 |
| MAMMA1001038 | F-MAMMA1001038 | 0.15 |
| MAMMA1001050 | F-MAMMA1001050 | 0.06 |
| MAMMA1001067 | F-MAMMA1001067 | 0.08 |
| MAMMA1001074 | F-MAMMA1001074 | 0.09 |
| MAMMA1001082 | F-MAMMA1001082 | 0.1 |
| MAMMA1001092 | F-MAMMA1001092 | 0.05 |
| MAMMA1001133 | F-MAMMA1001133 | 0.11 |
| MAMMA1001145 | F-MAMMA1001145 | 0.05 |
| MAMMA1001161 | F-MAMMA1001161 | 0.11 |
| MAMMA1001162 | F-MAMMA1001162 | 0.11 |
| MAMMA1001186 | F-MAMMA1001186 | 0.09 |
| MAMMA1001191 | F-MAMMA1001191 | 0.08 |
| MAMMA1001203 | F-MAMMA1001203 | 0.08 |
| MAMMA1001206 | F-MAMMA1001206 | 0.09 |
| MAMMA1001220 | F-MAMMA1001220 | 0.1 |
| MAMMA1001243 | F-MAMMA1001243 | 0.14 |
| MAMMA1001249 | F-MAMMA1001249 | 0.13 |
| MAMMA1001256 | F-MAMMA1001256 | 0.1 |
| MAMMA1001268 | F-MAMMA1001268 | 0.26 |
| MAMMA1001274 | F-MAMMA1001274 | 0.13 |
| MAMMA1001280 | F-MAMMA1001280 | 0.1 |
| MAMMA1001298 | F-MAMMA1001298 | 0.07 |
| MAMMA1001322 | F-MAMMA1001322 | 0.18 |
| MAMMA1001324 | F-MAMMA1001324 | 0.25 |
| MAMMA1001330 | F-MAMMA1001330 | 0.13 |
| MAMMA1001341 | F-MAMMA1001341 | 0.16 |
| MAMMA1001383 | F-MAMMA1001383 | 0.05 |
| MAMMA1001397 | F-MAMMA1001397 | 0.22 |
| MAMMA1001408 | F-MAMMA1001408 | 0.06 |
| MAMMA1001420 | F-MAMMA1001420 | 0.1 |
| MAMMA1001435 | F-MAMMA1001435 | 0.07 |
| MAMMA1001442 | F-MAMMA1001442 | 0.13 |
| MAMMA1001446 | F-MAMMA1001446 | 0.08 |
| MAMMA1001452 | F-MAMMA1001452 | 0.1 |
| MAMMA1001501 | F-MAMMA1001501 | 0.12 |
| MAMMA1001502 | F-MAMMA1001502 | 0.09 |
| MAMMA1001547 | F-MAMMA1001547 | 0.22 |
| MAMMA1001575 | F-MAMMA1001575 | 0.08 |
| MAMMA1001590 | F-MAMMA1001590 | 0.14 |
| MAMMA1001606 | F-MAMMA1001606 | 0.13 |
| MAMMA1001663 | F-MAMMA1001663 | 0.11 |
| MAMMA1001670 | F-MAMMA1001670 | 0.2 |
| MAMMA1001671 | F-MAMMA1001671 | 0.13 |
| MAMMA1001679 | F-MAMMA1001679 | 0.13 |
| MAMMA1001683 | F-MAMMA1001683 | 0.16 |
| MAMMA1001686 | F-MAMMA1001686 | 0.09 |
| MAMMA1001711 | F-MAMMA1001711 | 0.11 |
| MAMMA1001715 | F-MAMMA1001715 | 0.11 |
| MAMMA1001740 | F-MAMMA1001740 | 0.1 |
| MAMMA1001745 | F-MAMMA1001745 | 0.09 |
| MAMMA1001760 | F-MAMMA1001760 | 0.16 |
| MAMMA1001769 | F-MAMMA1001769 | 0.09 |
| MAMMA1001788 | F-MAMMA1001788 | 0.1 |
| MAMMA1001806 | F-MAMMA1001806 | 0.06 |
| MAMMA1001815 | F-MAMMA1001815 | 0.1 |
| MAMMA1001818 | F-MAMMA1001818 | 0.1 |
| MAMMA1001820 | F-MAMMA1001820 | 0.27 |
| MAMMA1001836 | F-MAMMA1001836 | 0.05 |
| MAMMA1001854 | F-MAMMA1001854 | 0.17 |
| MAMMA1001878 | F-MAMMA1001878 | 0.13 |
| MAMMA1001880 | F-MAMMA1001880 | 0.15 |
| MAMMA1001890 | F-MAMMA1001890 | 0.05 |
| MAMMA1001907 | F-MAMMA1001907 | 0.1 |
| MAMMA1001908 | F-MAMMA1001908 | 0.3 |
| MAMMA1001931 | F-MAMMA1001931 | 0.14 |
| MAMMA1001963 | F-MAMMA1001963 | 0.08 |
| MAMMA1001992 | F-MAMMA1001992 | 0.12 |
| MAMMA1002032 | F-MAMMA1002032 | 0.08 |
| MAMMA1002056 | F-MAMMA1002056 | 0.09 |
| MAMMA1002058 | F-MAMMA1002058 | 0.16 |
| MAMMA1002078 | F-MAMMA1002078 | 0.28 |
| MAMMA1002082 | F-MAMMA1002082 | 0.08 |
| MAMMA1002084 | F-MAMMA1002084 | 0.24 |
| MAMMA1002093 | F-MAMMA1002093 | 0.12 |
| MAMMA1002108 | F-MAMMA1002108 | 0.05 |
| MAMMA1002118 | F-MAMMA1002118 | 0.1 |
| MAMMA1002125 | F-MAMMA1002125 | 0.09 |
| MAMMA1002132 | F-MAMMA1002132 | 0.11 |
| MAMMA1002140 | F-MAMMA1002140 | 0.11 |
| MAMMA1002145 | F-MAMMA1002145 | 0.11 |
| MAMMA1002155 | F-MAMMA1002155 | 0.1 |
| MAMMA1002158 | F-MAMMA1002158 | 0.11 |
| MAMMA1002215 | F-MAMMA1002215 | 0.05 |
| MAMMA1002230 | F-MAMMA1002230 | 0.07 |
| MAMMA1002250 | F-MAMMA1002250 | 0.2 |
| MAMMA1002267 | F-MAMMA1002267 | 0.08 |
| MAMMA1002282 | F-MAMMA1002282 | 0.05 |
| MAMMA1002293 | F-MAMMA1002293 | 0.09 |
| MAMMA1002298 | F-MAMMA1002298 | 0.09 |
| MAMMA1002299 | F-MAMMA1002299 | 0.16 |
| MAMMA1002310 | F-MAMMA1002310 | 0.16 |
| MAMMA1002311 | F-MAMMA1002311 | 0.13 |
| MAMMA1002322 | F-MAMMA1002322 | 0.07 |
| MAMMA1002332 | F-MAMMA1002332 | 0.08 |
| MAMMA1002339 | F-MAMMA1002339 | 0.09 |
| MAMMA1002347 | F-MAMMA1002347 | 0.06 |
| MAMMA1002352 | F-MAMMA1002352 | 0.08 |
| MAMMA1002359 | F-MAMMA1002359 | 0.13 |
| MAMMA1002360 | F-MAMMA1002360 | 0.17 |
| MAMMA1002361 | F-MAMMA1002361 | 0.13 |
| MAMMA1002392 | F-MAMMA1002392 | 0.16 |
| MAMMA1002411 | F-MAMMA1002411 | 0.28 |
| MAMMA1002417 | F-MAMMA1002417 | 0.19 |
| MAMMA1002428 | F-MAMMA1002428 | 0.07 |
| MAMMA1002446 | F-MAMMA1002446 | 0.17 |
| MAMMA1002475 | F-MAMMA1002475 | 0.17 |
| MAMMA1002480 | F-MAMMA1002480 | 0.07 |
| MAMMA1002494 | F-MAMMA1002494 | 0.17 |
| MAMMA1002498 | F-MAMMA1002498 | 0.28 |
| MAMMA1002545 | F-MAMMA1002545 | 0.12 |
| MAMMA1002556 | F-MAMMA1002556 | 0.06 |
| MAMMA1002566 | F-MAMMA1002566 | 0.13 |
| MAMMA1002571 | F-MAMMA1002571 | 0.29 |
| MAMMA1002573 | F-MAMMA1002573 | 0.29 |
| MAMMA1002597 | F-MAMMA1002597 | 0.1 |
| MAMMA1002603 | F-MAMMA1002603 | 0.1 |
| MAMMA1002612 | F-MAMMA1002612 | 0.14 |
| MAMMA1002618 | F-MAMMA1002618 | 0.11 |
| MAMMA1002622 | F-MAMMA1002622 | 0.24 |
| MAMMA1002623 | F-MAMMA1002623 | 0.1 |
| MAMMA1002625 | F-MAMMA1002625 | 0.11 |
| MAMMA1002629 | F-MAMMA1002629 | 0.05 |
| MAMMA1002636 | F-MAMMA1002636 | 0.12 |
| MAMMA1002646 | F-MAMMA1002646 | 0.05 |
| MAMMA1002662 | F-MAMMA1002662 | 0.09 |
| MAMMA1002698 | F-MAMMA1002698 | 0.08 |
| MAMMA1002701 | F-MAMMA1002701 | 0.11 |
| MAMMA1002708 | F-MAMMA1002708 | 0.09 |
| MAMMA1002721 | F-MAMMA1002721 | 0.06 |
| MAMMA1002727 | F-MAMMA1002727 | 0.15 |
| MAMMA1002728 | F-MAMMA1002728 | 0.12 |
| MAMMA1002744 | F-MAMMA1002744 | 0.08 |
| MAMMA1002746 | F-MAMMA1002746 | 0.09 |
| MAMMA1002748 | F-MAMMA1002748 | 0.1 |
| MAMMA1002754 | F-MAMMA1002754 | 0.07 |
| MAMMA1002758 | F-MAMMA1002758 | 0.29 |
| MAMMA1002764 | F-MAMMA1002764 | 0.2 |
| MAMMA1002765 | F-MAMMA1002765 | 0.29 |
| MAMMA1002780 | F-MAMMA1002780 | 0.12 |
| MAMMA1002820 | F-MAMMA1002820 | 0.3 |
| MAMMA1002830 | F-MAMMA1002830 | 0.16 |
| MAMMA1002833 | F-MAMMA1002833 | 0.14 |
| MAMMA1002835 | F-MAMMA1002835 | 0.13 |
| MAMMA1002838 | F-MAMMA1002838 | 0.09 |
| MAMMA1002844 | F-MAMMA1002844 | 0.27 |
| MAMMA1002858 | F-MAMMA1002858 | 0.29 |
| MAMMA1002871 | F-MAMMA1002871 | 0.11 |
| MAMMA1002880 | F-MAMMA1002880 | 0.11 |
| MAMMA1002887 | F-MAMMA1002887 | 0.09 |
| MAMMA1002892 | F-MAMMA1002892 | 0.17 |
| MAMMA1002908 | F-MAMMA1002908 | 0.11 |
| MAMMA1002909 | F-MAMMA1002909 | 0.22 |
| MAMMA1002930 | F-MAMMA1002930 | 0.2 |
| MAMMA1002941 | F-MAMMA1002941 | 0.23 |
| MAMMA1002970 | F-MAMMA1002970 | 0.06 |
| MAMMA1002972 | F-MAMMA1002972 | 0.08 |
| MAMMA1002973 | F-MAMMA1002973 | 0.1 |
| MAMMA1002982 | F-MAMMA1002982 | 0.1 |
| MAMMA1003003 | F-MAMMA1003003 | 0.2 |
| MAMMA1003004 | F-MAMMA1003004 | 0.14 |
| MAMMA1003007 | F-MAMMA1003007 | 0.09 |
| MAMMA1003019 | F-MAMMA1003019 | 0.12 |
| MAMMA1003026 | F-MAMMA1003026 | 0.26 |
| MAMMA1003031 | F-MAMMA1003031 | 0.18 |
| MAMMA1003039 | F-MAMMA1003039 | 0.09 |
| MAMMA1003040 | F-MAMMA1003040 | 0.07 |
| MAMMA1003055 | F-MAMMA1003055 | 0.08 |
| MAMMA1003089 | F-MAMMA1003089 | 0.14 |
| MAMMA1003140 | F-MAMMA1003140 | 0.19 |
| NT2RM2000609 | F-NT2RM2000609 | 0.26 |
| NT2RM4000046 | F-NT2RM4000046 | 0.1 |
| NT2RM4000085 | F-NT2RM4000085 | 0.23 |
| NT2RM4000086 | F-NT2RM4000086 | 0.28 |
| NT2RM4000200 | F-NT2RM4000200 | 0.16 |
| NT2RM4000244 | F-NT2RM4000244 | 0.07 |
| NT2RM4000265 | F-NT2RM4000265 | 0.18 |
| NT2RM4000327 | F-NT2RM4000327 | 0.06 |
| NT2RM4000366 | F-NT2RM4000366 | 0.28 |
| NT2RM4000368 | F-NT2RM4000368 | 0.11 |
| NT2RM4000414 | F-NT2RM4000414 | 0.19 |
| NT2RM4000425 | F-NT2RM4000425 | 0.22 |
| NT2RM4000532 | F-NT2RM4000532 | 0.14 |
| NT2RM4000779 | F-NT2RM4000779 | 0.13 |
| NT2RM4000855 | F-NT2RM4000855 | 0.13 |
| NT2RM4000979 | F-NT2RM4000979 | 0.22 |
| NT2RM4001016 | F-NT2RM4001016 | 0.2 |
| NT2RM4001160 | F-NT2RM4001160 | 0.1 |
| NT2RM4001313 | F-NT2RM4001313 | 0.26 |
| NT2RM4001414 | F-NT2RM4001414 | 0.23 |
| NT2RM4001437 | F-NT2RM4001437 | 0.12 |
| NT2RM4001519 | F-NT2RM4001519 | 0.07 |
| NT2RM4001557 | F-NT2RM4001557 | 0.3 |
| NT2RM4001605 | F-NT2RM4001605 | 0.22 |
| NT2RM4001754 | F-NT2RM4001754 | 0.26 |
| NT2RM4001776 | F-NT2RM4001776 | 0.18 |
| NT2RM4001810 | F-NT2RM4001810 | 0.22 |
| NT2RM4001856 | F-NT2RM4001856 | 0.11 |
| NT2RM4001858 | F-NT2RM4001858 | 0.14 |
| NT2RM4001930 | F-NT2RM4001930 | 0.3 |
| NT2RM4001953 | F-NT2RM4001953 | 0.09 |
| NT2RM4001984 | F-NT2RM4001984 | 0.09 |
| NT2RM4002067 | F-NT2RM4002067 | 0.08 |
| NT2RM4002278 | F-NT2RM4002278 | 0.07 |
| NT2RM4002281 | F-NT2RM4002281 | 0.07 |
| NT2RM4002287 | F-NT2RM4002287 | 0.27 |
| NT2RM4002383 | F-NT2RM4002383 | 0.08 |
| NT2RM4002390 | F-NT2RM4002390 | 0.18 |
| NT2RM4002438 | F-NT2RM4002438 | 0.23 |
| NT2RM4002479 | F-NT2RM4002479 | 0.27 |
| NT2RM4002499 | F-NT2RM4002499 | 0.08 |
| NT2RM4002504 | F-NT2RM4002504 | 0.08 |
| NT2RM4002532 | F-NT2RM4002532 | 0.15 |
| NT2RM4002567 | F-NT2RM4002567 | 0.28 |
| NT2RP2000027 | F-NT2RP2000027 | 0.07 |
| NT2RP2000076 | F-NT2RP2000076 | 0.16 |
| NT2RP2000077 | F-NT2RP2000077 | 0.2 |
| NT2RP2000098 | F-NT2RP2000098 | 0.23 |
| NT2RP2000108 | F-NT2RP2000108 | 0.07 |
| NT2RP2000183 | F-NT2RP2000183 | 0.12 |
| NT2RP2000257 | F-NT2RP2000257 | 0.27 |
| NT2RP2000258 | F-NT2RP2000258 | 0.19 |
| NT2RP2000270 | F-NT2RP2000270 | 0.06 |
| NT2RP2000289 | F-NT2RP2000289 | 0.06 |
| NT2RP2000327 | F-NT2RP2000327 | 0.08 |
| NT2RP2000337 | F-NT2RP2000337 | 0.14 |
| NT2RP2000420 | F-NT2RP2000420 | 0.2 |
| NT2RP2000459 | F-NT2RP2000459 | 0.12 |
| NT2RP2000498 | F-NT2RP2000498 | 0.05 |
| NT2RP2000523 | F-NT2RP2000523 | 0.14 |
| NT2RP2000603 | F-NT2RP2000603 | 0.22 |
| NT2RP2000644 | F-NT2RP2000644 | 0.05 |
| NT2RP2000678 | F-NT2RP2000678 | 0.11 |
| NT2RP2000715 | F-NT2RP2000715 | 0.21 |
| NT2RP2000731 | F-NT2RP2000731 | 0.09 |
| NT2RP2000758 | F-NT2RP2000758 | 0.2 |
| NT2RP2000842 | F-NT2RP2000842 | 0.14 |
| NT2RP2000970 | F-NT2RP2000970 | 0.12 |
| NT2RP2000987 | F-NT2RP2000987 | 0.07 |
| NT2RP2001149 | F-NT2RP2001149 | 0.08 |
| NT2RP2001196 | F-NT2RP2001196 | 0.27 |
| NT2RP2001226 | F-NT2RP2001226 | 0.18 |
| NT2RP2001277 | F-NT2RP2001277 | 0.09 |
| NT2RP2001290 | F-NT2RP2001290 | 0.1 |
| NT2RP2001295 | F-NT2RP2001295 | 0.13 |
| NT2RP2001312 | F-NT2RP2001312 | 0.15 |
| NT2RP2001347 | F-NT2RP2001347 | 0.11 |
| NT2RP2001423 | F-NT2RP2001423 | 0.06 |
| NT2RP2001445 | F-NT2RP2001445 | 0.11 |
| NT2RP2001449 | F-NT2RP2001449 | 0.15 |
| NT2RP2001467 | F-NT2RP2001467 | 0.21 |
| NT2RP2001506 | F-NT2RP2001506 | 0.06 |
| NT2RP2001526 | F-NT2RP2001526 | 0.1 |
| NT2RP2001569 | F-NT2RP2001569 | 0.09 |
| NT2RP2001663 | F-NT2RP2001663. | 0.08 |
| NT2RP2001677 | F-NT2RP2001677 | 0.14 |
| NT2RP2001678 | F-NT2RP2001678 | 0.17 |
| NT2RP2001699 | F-NT2RP2001699 | 0.05 |
| NT2RP2001720 | F-NT2RP2001720 | 0.08 |
| NT2RP2001740 | F-NT2RP2001740 | 0.23 |
| NT2RP2001762 | F-NT2RP2001762 | 0.11 |
| NT2RP2001813 | F-NT2RP2001813 | 0.19 |
| NT2RP2001869 | F-NT2RP2001869 | 0.22 |
| NT2RP2001926 | F-NT2RP2001926 | 0.07 |
| NT2RP2001936 | F-NT2RP2001936 | 0.08 |
| NT2RP2001943 | F-NT2RP2001943 | 0.27 |
| NT2RP2002032 | F-NT2RP2002032 | 0.23 |
| NT2RP2002041 | F-NT2RP2002041 | 0.1 |
| NT2RP2002047 | F-NT2RP2002047 | 0.12 |
| NT2RP2002066 | F-NT2RP2002066 | 0.25 |
| NT2RP2002070 | F-NT2RP2002070 | 0.07 |
| NT2RP2002105 | F-NT2RP2002105 | 0.13 |
| NT2RP2002124 | F-NT2RP2002124 | 0.13 |
| NT2RP2002137 | F-NT2RP2002137 | 0.07 |
| NT2RP2002172 | F-NT2RP2002172 | 0.21 |
| NT2RP2002192 | F-NT2RP2002192 | 0.05 |
| NT2RP2002219 | F-NT2RP2002219 | 0.13 |
| NT2RP2002256 | F-NT2RP2002256 | 0.17 |
| NT2RP2002259 | F-NT2RP2002259 | 0.28 |
| NT2RP2002316 | F-NT2RP2002316 | 0.15 |
| NT2RP2002394 | F-NT2RP2002394 | 0.16 |
| NT2RP2002439 | F-NT2RP2002439 | 0.07 |
| NT2RP2002457 | F-NT2RP2002457 | 0.11 |
| NT2RP2002475 | F-NT2RP2002475 | 0.14 |
| NT2RP2002504 | F-NT2RP2002504 | 0.21 |
| NT2RP2002546 | F-NT2RP2002546 | 0.17 |
| NT2RP2002591 | F-NT2RP2002591 | 0.15 |
| NT2RP2002606 | F-NT2RP2002606 | 0.11 |
| NT2RP2002643 | F-NT2RP2002643 | 0.26 |
| NT2RP2002727 | F-NT2RP2002727 | 0.26 |
| NT2RP2002736 | F-NT2RP2002736 | 0.12 |
| NT2RP2002740 | F-NT2RP2002740 | 0.16 |
| NT2RP2002741 | F-NT2RP2002741 | 0.11 |
| NT2RP2002750 | F-NT2RP2002750 | 0.14 |
| NT2RP2002752 | F-NT2RP2002752 | 0.1 |
| NT2RP2002753 | F-NT2RP2002753 | 0.09 |
| NT2RP2002778 | F-NT2RP2002778 | 0.13 |
| NT2RP2002839 | F-NT2RP2002839 | |
| NT2RP2002857 | F-NT2RP2002857 | 0.21 |
| NT2RP2002987 | F-NT2RP2002987 | 0.08 |
| NT2RP2003000 | F-NT2RP2003000 | 0.24 |
| NT2RP2003073 | F-NT2RP2003073 | 0.08 |
| NT2RP2003129 | F-NT2RP2003129 | 0.07 |
| NT2RP2003161 | F-NT2RP2003161 | 0.05 |
| NT2RP2003164 | F-NT2RP2003164 | 0.09 |
| NT2RP2003206 | F-NT2RP2003206 | 0.22 |
| NT2RP2003230 | F-NT2RP2003230 | 0.08 |
| NT2RP2003237 | F-NT2RP2003237 | 0.24 |
| NT2RP2003339 | F-NT2RP2003339 | 0.1 |
| NT2RP2003394 | F-NT2RP2003394 | 0.07 |
| NT2RP2003456 | F-NT2RP2003456 | 0.08 |
| NT2RP2003499 | F-NT2RP2003499 | 0.08 |
| NT2RP2003517 | F-NT2RP2003517 | 0.29 |
| NT2RP2003522 | F-NT2RP2003522 | 0.22 |
| NT2RP2003559 | F-NT2RP2003559 | 0.12 |
| NT2RP2003668 | F-NT2RP2003668 | 0.08 |
| NT2RP2003704 | F-NT2RP2003704 | 0.09 |
| NT2RP2003706 | F-NT2RP2003706 | 0.28 |
| NT2RP2003727 | F-NT2RP2003727 | 0.17 |
| NT2RP2003770 | F-NT2RP2003770 | 0.09 |
| NT2RP2003859 | F-NT2RP2003859 | 0.18 |
| NT2RP2003871 | F-NT2RP2003871 | 0.23 |
| NT2RP2003885 | F-NT2RP2003885 | 0.24 |
| NT2RP2003912 | F-NT2RP2003912 | 0.26 |
| NT2RP2003968 | F-NT2RP2003968 | 0.2 |
| NT2RP2003988 | F-NT2RP2003988 | 0.09 |
| NT2RP2004014 | F-NT2RP2004014 | 0.07 |
| NT2RP2004142 | F-NT2RP2004142 | 0.14 |
| NT2RP2004170 | F-NT2RP2004170 | 0.09 |
| NT2RP2004172 | F-NT2RP2004172 | 0.15 |
| NT2RP2004207 | F-NT2RP2004207 | 0.11 |
| NT2RP2004232 | F-NT2RP2004232 | 0.17 |
| NT2RP2004270 | F-NT2RP2004270 | 0.29 |
| NT2RP2004300 | F-NT2RP2004300 | 0.11 |
| NT2RP2004321 | F-NT2RP2004321 | 0.13 |
| NT2RP2004339 | F-NT2RP2004339 | 0.14 |
| NT2RP2004347 | F-NT2RP2004347 | 0.14 |
| NT2RP2004396 | F-NT2RP2004396 | 0.29 |
| NT2RP2004400 | F-NT2RP2004400 | 0.06 |
| NT2RP2004412 | F-NT2RP2004412 | 0.24 |
| NT2RP2004425 | F-NT2RP2004425 | 0.13 |
| NT2RP2004490 | F-NT2RP2004490 | 0.13 |
| NT2RP2004512 | F-NT2RP2004512 | 0.1 |
| NT2RP2004523 | F-NT2RP2004523 | 0.15 |
| NT2RP2004580 | F-NT2RP2004580 | 0.12 |
| NT2RP2004587 | F-NT2RP2004587 | 0.08 |
| NT2RP2004675 | F-NT2RP2004675 | 0.14 |
| NT2RP2004681 | F-NT2RP2004681 | 0.17 |
| NT2RP2004709 | F-NT2RP2004709 | 0.08 |
| NT2RP2004736 | F-NT2RP2004736 | 0.13 |
| NT2RP2004767 | F-NT2RP2004767 | 0.21 |
| NT2RP2004775 | F-NT2RP2004775 | 0.17 |
| NT2RP2004961 | F-NT2RP2004961 | 0.21 |
| NT2RP2004962 | F-NT2RP2004962 | 0.24 |
| NT2RP2004967 | F-NT2RP2004967 | 0.05 |
| NT2RP2004982 | F-NT2RP2004982 | 0.11 |
| NT2RP2005020 | F-NT2RP2005020 | 0.16 |
| NT2RP2005031 | F-NT2RP2005031 | 0.07 |
| NT2RP2005108 | F-NT2RP2005108 | 0.11 |
| NT2RP2005254 | F-NT2RP2005254 | 0.16 |
| NT2RP2005289 | F-NT2RP2005289 | 0.22 |
| NT2RP2005293 | F-NT2RP2005293 | 0.08 |
| NT2RP2005325 | F-NT2RP2005325 | |
| NT2RP2005336 | F-NT2RP2005336 | 0.27 |
| NT2RP2005344 | F-NT2RP2005344 | 0.24 |
| NT2RP2005354 | F-NT2RP2005354 | 0.08 |
| NT2RP2005360 | F-NT2RP2005360 | 0.12 |
| NT2RP2005407 | F-NT2RP2005407 | 0.28 |
| NT2RP2005476 | F-NT2RP2005476 | 0.14 |
| NT2RP2005491 | F-NT2RP2005491 | 0.18 |
| NT2RP2005501 | F-NT2RP2005501 | 0.1 |
| NT2RP2005531 | F-NT2RP2005531 | 0.29 |
| NT2RP2005581 | F-NT2RP2005581 | 0.07 |
| NT2RP2005645 | F-NT2RP2005645 | 0.13 |
| NT2RP2005651 | F-NT2RP2005651 | 0.06 |
| NT2RP2005694 | F-NT2RP2005694 | 0.3 |
| NT2RP2005701 | F-NT2RP2005701 | 0.11 |
| NT2RP2005719 | F-NT2RP2005719 | 0.06 |
| NT2RP2005726 | F-NT2RP2005726 | 0.29 |
| NT2RP2005741 | F-NT2RP2005741 | 0.22 |
| NT2RP2005753 | F-NT2RP2005753 | 0.16 |
| NT2RP2005815 | F-NT2RP2005815 | 0.18 |
| NT2RP2005841 | F-NT2RP2005841 | 0.05 |
| NT2RP2005857 | F-NT2RP2005857 | 0.28 |
| NT2RP2005908 | F-NT2RP2005908 | 0.05 |
| NT2RP2005942 | F-NT2RP2005942 | 0.26 |
| NT2RP2005980 | F-NT2RP2005980 | 0.1 |
| NT2RP2006098 | F-NT2RP2006098 | 0.06 |
| NT2RP2006103 | F-NT2RP2006103 | 0.07 |
| NT2RP2006166 | F-NT2RP2006166 | 0.27 |
| NT2RP2006184 | F-NT2RP2006184 | 0.23 |
| NT2RP2006258 | F-NT2RP2006258 | 0.12 |
| NT2RP2006261 | F-NT2RP2006261 | 0.16 |
| NT2RP2006320 | F-NT2RP2006320 | 0.16 |
| NT2RP2006321 | F-NT2RP2006321 | 0.15 |
| NT2RP2006323 | F-NT2RP2006323 | |
| NT2RP2006393 | F-NT2RP2006393 | 0.07 |
| NT2RP2006454 | F-NT2RP2006454 | 0.11 |
| NT2RP2006467 | F-NT2RP2006467 | 0.24 |
| NT2RP2006534 | F-NT2RP2006534 | 0.14 |
| NT2RP2006554 | F-NT2RP2006554 | 0.16 |
| NT2RP2006598 | F-NT2RP2006598 | 0.08 |
| NT2RP3000055 | F-NT2RP3000055 | 0.14 |
| NT2RP3000109 | F-NT2RP3000109 | 0.18 |
| NT2RP3000186 | F-NT2RP3000186 | 0.06 |
| NT2RP3000233 | F-NT2RP3000233 | 0.29 |
| NT2RP3000235 | F-NT2RP3000235 | 0.09 |
| NT2RP3000247 | F-NT2RP3000247 | 0.19 |
| NT2RP3000341 | F-NT2RP3000341 | 0.16 |
| NT2RP3000418 | F-NT2RP3000418 | 0.15 |
| NT2RP3000433 | F-NT2RP3000433 | 0.11 |
| NT2RP3000441 | F-NT2RP3000441 | 0.2 |
| NT2RP3000449 | F-NT2RP3000449 | 0.16 |
| NT2RP3000451 | F-NT2RP3000451 | 0.14 |
| NT2RP3000512 | F-NT2RP3000512 | 0.08 |
| NT2RP3000542 | F-NT2RP3000542 | 0.1 |
| NT2RP3000561 | F-NT2RP3000561 | 0.1 |
| NT2RP3000578 | F-NT2RP3000578 | 0.3 |
| NT2RP3000582 | F-NT2RP3000582 | 0.08 |
| NT2RP3000584 | F-NT2RP3000584 | 0.07 |
| NT2RP3000622 | F-NT2RP3000622 | 0.17 |
| NT2RP3000628 | F-NT2RP3000628 | 0.08 |
| NT2RP3000685 | F-NT2RP3000685 | 0.17 |
| NT2RP3000736 | F-NT2RP3000736 | 0.26 |
| NT2RP3000742 | F-NT2RP3000742 | 0.22 |
| NT2RP3000815 | F-NT2RP3000815 | 0.06 |
| NT2RP3000865 | F-NT2RP3000865 | 0.13 |
| NT2RP3000875 | F-NT2RP3000875 | 0.16 |
| NT2RP3000904 | F-NT2RP3000904 | 0.13 |
| NT2RP3001007 | F-NT2RP3001007 | 0.1 |
| NT2RP3001115 | F-NT2RP3001115 | 0.1 |
| NT2RP3001232 | F-NT2RP3001232 | 0.09 |
| NT2RP3001245 | F-NT2RP3001245 | 0.09 |
| NT2RP3001281 | F-NT2RP3001281 | 0.29 |
| NT2RP3001318 | F-NT2RP3001318 | 0.12 |
| NT2RP3001339 | F-NT2RP3001339 | 0.27 |
| NT2RP3001340 | F-NT2RP3001340 | 0.11 |
| NT2RP3001374 | F-NT2RP3001374 | 0.21 |
| NT2RP3001383 | F-NT2RP3001383 | 0.09 |
| NT2RP3001432 | F-NT2RP3001432 | 0.29 |
| NT2RP3001459 | F-NT2RP3001459 | 0.16 |
| NT2RP3001527 | F-NT2RP3001527 | 0.3 |
| NT2RP3001580 | F-NT2RP3001580 | 0.23 |
| NT2RP3001589 | F-NT2RP3001589 | 0.12 |
| NT2RP3001607 | F-NT2RP3001607 | 0.12 |
| NT2RP3001634 | F-NT2RP3001634 | 0.15 |
| NT2RP3001752 | F-NT2RP3001752 | 0.09 |
| NT2RP3001782 | F-NT2RP3001782 | 0.21 |
| NT2RP3001898 | F-NT2RP3001898 | 0.07 |
| NT2RP3001926 | F-NT2RP3001926 | 0.05 |
| NT2RP3001989 | F-NT2RP3001989 | 0.14 |
| NT2RP3002002 | F-NT2RP3002002 | 0.18 |
| NT2RP3002004 | F-NT2RP3002004 | 0.11 |
| NT2RP3002056 | F-NT2RP3002056 | 0.16 |
| NT2RP3002057 | F-NT2RP3002057 | 0.08 |
| NT2RP3002166 | F-NT2RP3002166 | 0.15 |
| NT2RP3002173 | F-NT2RP3002173 | 0.28 |
| NT2RP3002352 | F-NT2RP3002352 | 0.19 |
| NT2RP3002687 | F-NT2RP3002687 | 0.12 |
| NT2RP3002713 | F-NT2RP3002713 | 0.1 |
| NT2RP3002770 | F-NT2RP3002770 | 0.23 |
| NT2RP3002799 | F-NT2RP3002799 | 0.17 |
| NT2RP3002810 | F-NT2RP3002810 | 0.2 |
| NT2RP3002955 | F-NT2RP3002955 | 0.17 |
| NT2RP3002978 | F-NT2RP3002978 | 0.06 |
| NT2RP3003032 | F-NT2RP3003032 | 0.1 |
| NT2RP3003059 | F-NT2RP3003059 | 0.11 |
| NT2RP3003121 | F-NT2RP3003121 | 0.23 |
| NT2RP3003133 | F-NT2RP3003133 | 0.21 |
| NT2RP3003138 | F-NT2RP3003138 | 0.29 |
| NT2RP3003264 | F-NT2RP3003264 | 0.15 |
| NT2RP3003346 | F-NT2RP3003346 | 0.16 |
| NT2RP3003384 | F-NT2RP3003384 | 0.12 |
| NT2RP3003403 | F-NT2RP3003403 | 0.26 |
| NT2RP3003433 | F-NT2RP3003433 | 0.22 |
| NT2RP3003464 | F-NT2RP3003464 | 0.28 |
| NT2RP3003500 | F-NT2RP3003500 | 0.2 |
| NT2RP3003572 | F-NT2RP3003572 | 0.29 |
| NT2RP3003576 | F-NT2RP3003576 | 0.16 |
| NT2RP3003625 | F-NT2RP3003625 | 0.29 |
| NT2RP3003665 | F-NT2RP3003665 | 0.15 |
| NT2RP3003746 | F-NT2RP3003746 | 0.07 |
| NT2RP3003799 | F-NT2RP3003799 | 0.13 |
| NT2RP3003800 | F-NT2RP3003800 | 0.28 |
| NT2RP3003819 | F-NT2RP3003819 | 0.19 |
| NT2RP3003828 | F-NT2RP3003828 | 0.12 |
| NT2RP3003842 | F-NT2RP3003842 | 0.11 |
| NT2RP3003989 | F-NT2RP3003989 | 0.1 |
| NT2RP3004016 | F-NT2RP3004016 | 0.09 |
| NT2RP3004070 | F-NT2RP3004070 | 0.11 |
| NT2RP3004095 | F-NT2RP3004095 | 0.1 |
| NT2RP3004110 | F-NT2RP3004110 | 0.07 |
| NT2RP3004145 | F-NT2RP3004145 | 0.15 |
| NT2RP3004148 | F-NT2RP3004148 | 0.14 |
| NT2RP3004215 | F-NT2RP3004215 | 0.16 |
| NT2RP3004334 | F-NT2RP3004334 | 0.1 |
| NT2RP3004349 | F-NT2RP3004349 | 0.09 |
| NT2RP3004399 | F-NT2RP3004399 | 0.16 |
| NT2RP3004470 | F-NT2RP3004470 | 0.23 |
| NT2RP3004475 | F-NT2RP3004475 | 0.26 |
| NT2RP3004503 | F-NT2RP3004503 | 0.12 |
| NT2RP3004527 | F-NT2RP3004527 | 0.06 |
| NT2RP4000023 | F-NT2RP4000023 | 0.13 |
| NT2RP4000035 | F-NT2RP4000035 | 0.17 |
| NT2RP4000049 | F-NT2RP4000049 | 0.1 |
| NT2RP4000078 | F-NT2RP4000078 | 0.28 |
| NT2RP4000102 | F-NT2RP4000102 | 0.15 |
| NT2RP4000167 | F-NT2RP4000167 | 0.19 |
| NT2RP4000214 | F-NT2RP4000214 | 0.12 |
| NT2RP4000218 | F-NT2RP4000218 | 0.17 |
| NT2RP4000321 | F-NT2RP4000321 | 0.18 |
| NT2RP4000424 | F-NT2RP4000424 | 0.22 |
| NT2RP4000515 | F-NT2RP4000515 | 0.13 |
| NT2RP4000517 | F-NT2RP4000517 | 0.1 |
| NT2RP4000519 | F-NT2RP4000519 | 0.26 |
| NT2RP4000915 | F-NT2RP4000915 | 0.19 |
| NT2RP4000996 | F-NT2RP4000996 | 0.05 |
| NT2RP4001407 | F-NT2RP4001407 | 0.2 |
| NT2RP4001889 | F-NT2RP4001889 | 0.09 |
| NT2RP4002075 | F-NT2RP4002075 | 0.19 |
| NT2RP4002905 | F-NT2RP4002905 | 0.15 |
| OVARC1000017 | F-OVARC1000017 | 0.12 |
| OVARC1000058 | F-OVARC1000058 | 0.2 |
| OVARC1000068 | F-OVARC1000068 | 0.14 |
| OVARC1000071 | F-OVARC1000071 | 0.15 |
| OVARC1000085 | F-OVARC1000085 | 0.16 |
| OVARC1000092 | F-OVARC1000092 | 0.26 |
| OVARC1000133 | F-OVARC1000133 | 0.14 |
| OVARC1000145 | F-OVARC1000145 | 0.15 |
| OVARC1000191 | F-OVARC1000191 | 0.07 |
| OVARC1000198 | F-OVARC1000198 | 0.23 |
| OVARC1000240 | F-OVARC1000240 | 0.11 |
| OVARC1000302 | F-OVARC1000302 | 0.08 |
| OVARC1000414 | F-OVARC1000414 | 0.12 |
| OVARC1000427 | F-OVARC1000427 | 0.1 |
| OVARC1000431 | F-OVARC1000431 | 0.06 |
| OVARC1000486 | F-OVARC1000486 | 0.08 |
| OVARC1000496 | F-OVARC1000496 | 0.13 |
| OVARC1000526 | F-OVARC1000526 | 0.09 |
| OVARC1000533 | F-OVARC1000533 | 0.11 |
| OVARC1000543 | F-OVARC1000543 | 0.2 |
| OVARC1000573 | F-OVARC1000573 | 0.09 |
| OVARC1000578 | F-OVARC1000578 | 0.13 |
| OVARC1000678 | F-OVARC1000678 | 0.17 |
| OVARC1000679 | F-OVARC1000679 | 0.23 |
| OVARC1000700 | F-OVARC1000700 | 0.28 |
| OVARC1000769 | F-OVARC1000769 | 0.05 |
| OVARC1000802 | F-OVARC1000802 | 0.06 |
| OVARC1000891 | F-OVARC1000891 | 0.08 |
| OVARC1000897 | F-OVARC1000897 | 0.11 |
| OVARC1000936 | F-OVARC1000936 | 0.14 |
| OVARC1000937 | F-OVARC1000937 | 0.29 |
| OVARC1000948 | F-OVARC1000948 | 0.14 |
| OVARC1000960 | F-OVARC1000960 | 0.07 |
| OVARC1000971 | F-OVARC1000971 | 0.11 |
| OVARC1001000 | F-OVARC1001000 | 0.06 |
| OVARC1001011 | F-OVARC1001011 | 0.15 |
| OVARC1001051 | F-OVARC1001051 | 0.16 |
| OVARC1001062 | F-OVARC1001062 | 0.09 |
| OVARC1001072 | F-OVARC1001072 | 0.11 |
| OVARC1001085 | F-OVARC1001085 | 0.12 |
| OVARC1001117 | F-OVARC1001117 | 0.21 |
| OVARC1001118 | F-OVARC1001118 | 0.08 |
| OVARC1001129 | F-OVARC1001129 | 0.28 |
| OVARC1001169 | F-OVARC1001169 | 0.12 |
| OVARC1001240 | F-OVARC1001240 | 0.09 |
| OVARC1001261 | F-OVARC1001261 | 0.1 |
| OVARC1001268 | F-OVARC1001268 | 0.05 |
| OVARC1001282 | F-OVARC1001282 | 0.09 |
| OVARC1001330 | F-OVARC1001330 | 0.08 |
| OVARC1001339 | F-OVARC1001339 | 0.15 |
| OVARC1001342 | F-OVARC1001342 | 0.16 |
| OVARC1001357 | F-OVARC1001357 | 0.06 |
| OVARC1001442 | F-OVARC1001442 | 0.15 |
| OVARC1001480 | F-OVARC1001480 | 0.23 |
| OVARC1001542 | F-OVARC1001542 | 0.13 |
| OVARC1001547 | F-OVARC1001547 | 0.12 |
| OVARC1001600 | F-OVARC1001600 | 0.13 |
| OVARC1001615 | F-OVARC1001615 | 0.11 |
| OVARC1001668 | F-OVARC1001668 | 0.05 |
| OVARC1001726 | F-OVARC1001726 | 0.18 |
| OVARC1001745 | F-OVARC1001745 | 0.22 |
| OVARC1001795 | F-OVARC1001795 | 0.28 |
| OVARC1001805 | F-OVARC1001805 | 0.16 |
| OVARC1001812 | F-OVARC1001812 | 0.05 |
| OVARC1001813 | F-OVARC1001813 | 0.11 |
| OVARC1001846 | F-OVARC1001846 | 0.13 |
| OVARC1001883 | F-OVARC1001883 | 0.05 |
| OVARC1001900 | F-OVARC1001900 | 0.28 |
| OVARC1001901 | F-OVARC1001901 | 0.09 |
| OVARC1001911 | F-OVARC1001911 | 0.06 |
| OVARC1001928 | F-OVARC1001928 | 0.1 |
| OVARC1001989 | F-OVARC1001989 | 0.07 |
| OVARC1002044 | F-OVARC1002044 | 0.06 |
| OVARC1002066 | F-OVARC1002066 | 0.08 |
| OVARC1002143 | F-OVARC1002143 | 0.27 |
| PLACE1000031 | F-PLACE1000031 | 0.09 |
| PLACE1000040 | F-PLACE1000040 | 0.15 |
| PLACE1000078 | F-PLACE1000078 | 0.12 |
| PLACE1000094 | F-PLACE1000094 | 0.16 |
| PLACE1000214 | F-PLACE1000214 | 0.15 |
| PLACE1000292 | F-PLACE1000292 | 0.05 |
| PLACE1000332 | F-PLACE1000332 | 0.1 |
| PLACE1000421 | F-PLACE1000421 | 0.14 |
| PLACE1000424 | F-PLACE1000424 | 0.08 |
| PLACE1000481 | F-PLACE1000481 | 0.12 |
| PLACE1000540 | F-PLACE1000540 | 0.11 |
| PLACE1000583 | F-PLACE1000583 | 0.1 |
| PLACE1000599 | F-PLACE1000599 | 0.22 |
| PLACE1000749 | F-PLACE1000749 | 0.2 |
| PLACE1000841 | F-PLACE1000841 | 0.09 |
| PLACE1000931 | F-PLACE1000931 | 0.22 |
| PLACE1000979 | F-PLACE1000979 | 0.16 |
| PLACE1001007 | F-PLACE1001007 | 0.19 |
| PLACE1001015 | F-PLACE1001015 | 0.25 |
| PLACE1001076 | F-PLACE1001076 | 0.08 |
| PLACE1001088 | F-PLACE1001088 | 0.18 |
| PLACE1001118 | F-PLACE1001118 | 0.24 |
| PLACE1001136 | F-PLACE1001136 | 0.12 |
| PLACE1001272 | F-PLACE1001272 | 0.07 |
| PLACE1001279 | F-PLACE1001279 | 0.08 |
| PLACE1001323 | F-PLACE1001323 | 0.18 |
| PLACE1001377 | F-PLACE1001377 | 0.16 |
| PLACE1001384 | F-PLACE1001384 | 0.06 |
| PLACE1001395 | F-PLACE1001395 | 0.08 |
| PLACE1001414 | F-PLACE1001414 | 0.11 |
| PLACE1001440 | F-PLACE1001440 | 0.14 |
| PLACE1001468 | F-PLACE1001468 | 0.05 |
| PLACE1001502 | F-PLACE1001502 | 0.06 |
| PLACE1001517 | F-PLACE1001517 | 0.09 |
| PLACE1001534 | F-PLACE1001534 | 0.08 |
| PLACE1001603 | F-PLACE1001603 | 0.08 |
| PLACE1001611 | F-PLACE1001611 | 0.25 |
| PLACE1001640 | F-PLACE1001640 | 0.09 |
| PLACE1001672 | F-PLACE1001672 | 0.11 |
| PLACE1001691 | F-PLACE1001691 | 0.11 |
| PLACE1001705 | F-PLACE1001705 | 0.1 |
| PLACE1001716 | F-PLACE1001716 | 0.15 |
| PLACE1001720 | F-PLACE1001720 | 0.18 |
| PLACE1001745 | F-PLACE1001745 | 0.09 |
| PLACE1001746 | F-PLACE1001746 | 0.12 |
| PLACE1001748 | F-PLACE1001748 | 0.08 |
| PLACE1001756 | F-PLACE1001756 | 0.17 |
| PLACE1001799 | F-PLACE1001799 | 0.14 |
| PLACE1001821 | F-PLACE1001821 | 0.09 |
| PLACE1001845 | F-PLACE1001845 | 0.08 |
| PLACE1001897 | F-PLACE1001897 | 0.15 |
| PLACE1002052 | F-PLACE1002052 | 0.13 |
| PLACE1002066 | F-PLACE1002066 | 0.07 |
| PLACE1002150 | F-PLACE1002150 | 0.08 |
| PLACE1002157 | F-PLACE1002157 | 0.15 |
| PLACE1002205 | F-PLACE1002205 | 0.13 |
| PLACE1002227 | F-PLACE1002227 | 0.12 |
| PLACE1002256 | F-PLACE1002256 | 0.11 |
| PLACE1002259 | F-PLACE1002259 | 0.09 |
| PLACE1002319 | F-PLACE1002319 | 0.27 |
| PLACE1002399 | F-PLACE1002399 | 0.08 |
| PLACE1002477 | F-PLACE1002477 | 0.17 |
| PLACE1002493 | F-PLACE1002493 | 0.09 |
| PLACE1002500 | F-PLACE1002500 | 0.25 |
| PLACE1002514 | F-PLACE1002514 | 0.06 |
| PLACE1002537 | F-PLACE1002537 | 0.17 |
| PLACE1002578 | F-PLACE1002578 | 0.11 |
| PLACE1002583 | F-PLACE1002583 | 0.25 |
| PLACE1002591 | F-PLACE1002591 | 0.28 |
| PLACE1002598 | F-PLACE1002598 | 0.29 |
| PLACE1002604 | F-PLACE1002604 | 0.15 |
| PLACE1002768 | F-PLACE1002768 | 0.11 |
| PLACE1002772 | F-PLACE1002772 | 0.15 |
| PLACE1002782 | F-PLACE1002782 | 0.16 |
| PLACE1002853 | F-PLACE1002853 | 0.16 |
| PLACE1002881 | F-PLACE1002881 | 0.09 |
| PLACE1002962 | F-PLACE1002962 | 0.13 |
| PLACE1002968 | F-PLACE1002968 | 0.23 |
| PLACE1003153 | F-PLACE1003153 | 0.07 |
| PLACE1003205 | F-PLACE1003205 | 0.2 |
| PLACE1003238 | F-PLACE1003238 | 0.22 |
| PLACE1003258 | F-PLACE1003258 | 0.17 |
| PLACE1003343 | F-PLACE1003343 | 0.07 |
| PLACE1003361 | F-PLACE1003361 | 0.19 |
| PLACE1003373 | F-PLACE1003373 | 0.08 |
| PLACE1003375 | F-PLACE1003375 | 0.26 |
| PLACE1003401 | F-PLACE1003401 | 0.11 |
| PLACE1003420 | F-PLACE1003420 | 0.22 |
| PLACE1003478 | F-PLACE1003478 | 0.14 |
| PLACE1003516 | F-PLACE1003516 | 0.17 |
| PLACE1003519 | F-PLACE1003519 | 0.14 |
| PLACE1003521 | F-PLACE1003521 | 0.17 |
| PLACE1003528 | F-PLACE1003528 | 0.16 |
| PLACE1003566 | F-PLACE1003566 | 0.16 |
| PLACE1003575 | F-PLACE1003575 | 0.06 |
| PLACE1003583 | F-PLACE1003583 | 0.08 |
| PLACE1003584 | F-PLACE1003584 | 0.1 |
| PLACE1003593 | F-PLACE1003593 | 0.15 |
| PLACE1003618 | F-PLACE1003618 | 0.25 |
| PLACE1003638 | F-PLACE1003638 | 0.06 |
| PLACE1003760 | F-PLACE1003760 | 0.12 |
| PLACE1003768 | F-PLACE1003768 | 0.13 |
| PLACE1003833 | F-PLACE1003833 | 0.06 |
| PLACE1003850 | F-PLACE1003850 | 0.07 |
| PLACE1003858 | F-PLACE1003858 | 0.07 |
| PLACE1003864 | F-PLACE1003864 | 0.12 |
| PLACE1003900 | F-PLACE1003900 | 0.11 |
| PLACE1003932 | F-PLACE1003932 | 0.05 |
| PLACE1004118 | F-PLACE1004118 | 0.3 |
| PLACE1004242 | F-PLACE1004242 | 0.05 |
| PLACE1004256 | F-PLACE1004256 | 0.24 |
| PLACE1004257 | F-PLACE1004257 | 0.06 |
| PLACE1004274 | F-PLACE1004274 | 0.25 |
| PLACE1004284 | F-PLACE1004284 | 0.13 |
| PLACE1004336 | F-PLACE1004336 | 0.27 |
| PLACE1004384 | F-PLACE1004384 | 0.17 |
| PLACE1004425 | F-PLACE1004425 | 0.12 |
| PLACE1004467 | F-PLACE1004467 | 0.2 |
| PLACE1004471 | F-PLACE1004471 | 0.12 |
| PLACE1004491 | F-PLACE1004491 | 0.08 |
| PLACE1004506 | F-PLACE1004506 | |
| PLACE1004518 | F-PLACE1004518 | 0.14 |
| PLACE1004658 | F-PLACE1004658 | 0.05 |
| PLACE1004681 | F-PLACE1004681 | 0.13 |
| PLACE1004693 | F-PLACE1004693 | 0.11 |
| PLACE1004716 | F-PLACE1004716 | 0.12 |
| PLACE1004773 | F-PLACE1004773 | 0.17 |
| PLACE1004793 | F-PLACE1004793 | 0.21 |
| PLACE1004813 | F-PLACE1004813 | 0.11 |
| PLACE1004815 | F-PLACE1004815 | 0.14 |
| PLACE1004827 | F-PLACE1004827 | 0.15 |
| PLACE1004836 | F-PLACE1004836 | 0.25 |
| PLACE1004838 | F-PLACE1004838 | 0.16 |
| PLACE1004840 | F-PLACE1004840 | 0.06 |
| PLACE1004900 | F-PLACE1004900 | 0.08 |
| PLACE1004913 | F-PLACE1004913 | 0.12 |
| PLACE1004934 | F-PLACE1004934 | 0.17 |
| PLACE1004972 | F-PLACE1004972 | 0.07 |
| PLACE1004979 | F-PLACE1004979 | 0.24 |
| PLACE1004985 | F-PLACE1004985 | 0.05 |
| PLACE1005052 | F-PLACE1005052 | 0.17 |
| PLACE1005077 | F-PLACE1005077 | 0.1 |
| PLACE1005085 | F-PLACE1005085 | 0.13 |
| PLACE1005086 | F-PLACE1005086 | 0.13 |
| PLACE1005108 | F-PLACE1005108 | 0.28 |
| PLACE1005111 | F-PLACE1005111 | 0.15 |
| PLACE1005128 | F-PLACE1005128 | 0.12 |
| PLACE1005146 | F-PLACE1005146 | 0.07 |
| PLACE1005162 | F-PLACE1005162 | 0.13 |
| PLACE1005176 | F-PLACE1005176 | 0.16 |
| PLACE1005409 | F-PLACE1005409 | 0.09 |
| PLACE1005453 | F-PLACE1005453 | 0.1 |
| PLACE1005467 | F-PLACE1005467 | 0.28 |
| PLACE1005471 | F-PLACE1005471 | 0.06 |
| PLACE1005477 | F-PLACE1005477 | 0.12 |
| PLACE1005502 | F-PLACE1005502 | 0.1 |
| PLACE1005526 | F-PLACE1005526 | |
| PLACE1005528 | F-PLACE1005528 | 0.07 |
| PLACE1005574 | F-PLACE1005574 | 0.06 |
| PLACE1005584 | F-PLACE1005584 | 0.24 |
| PLACE1005611 | F-PLACE1005611 | 0.18 |
| PLACE1005639 | F-PLACE1005639 | 0.09 |
| PLACE1005666 | F-PLACE1005666 | 0.07 |
| PLACE1005730 | F-PLACE1005730 | 0.2 |
| PLACE1005802 | F-PLACE1005802 | 0.1 |
| PLACE1005845 | F-PLACE1005845 | 0.09 |
| PLACE1005850 | F-PLACE1005850 | 0.22 |
| PLACE1005884 | F-PLACE1005884 | 0.08 |
| PLACE1005898 | F-PLACE1005898 | 0.12 |
| PLACE1005932 | F-PLACE1005932 | 0.13 |
| PLACE1005968 | F-PLACE1005968 | 0.07 |
| PLACE1006002 | F-PLACE1006002 | 0.08 |
| PLACE1006003 | F-PLACE1006003 | 0.16 |
| PLACE1006017 | F-PLACE1006017 | 0.13 |
| PLACE1006076 | F-PLACE1006076 | 0.11 |
| PLACE1006129 | F-PLACE1006129 | 0.25 |
| PLACE1006143 | F-PLACE1006143 | 0.08 |
| PLACE1006164 | F-PLACE1006164 | 0.05 |
| PLACE1006187 | F-PLACE1006187 | 0.2 |
| PLACE1006205 | F-PLACE1006205 | 0.08 |
| PLACE1006223 | F-PLACE1006223 | 0.05 |
| PLACE1006262 | F-PLACE1006262 | 0.08 |
| PLACE1006288 | F-PLACE1006288 | 0.06 |
| PLACE1006318 | F-PLACE1006318 | 0.12 |
| PLACE1006360 | F-PLACE1006360 | 0.07 |
| PLACE1006368 | F-PLACE1006368 | 0.27 |
| PLACE1006371 | F-PLACE1006371 | 0.14 |
| PLACE1006382 | F-PLACE1006382 | 0.09 |
| PLACE1006470 | F-PLACE1006470 | 0.14 |
| PLACE1006506 | F-PLACE1006506 | 0.24 |
| PLACE1006521 | F-PLACE1006521 | 0.08 |
| PLACE1006534 | F-PLACE1006534 | 0.06 |
| PLACE1006540 | F-PLACE1006540 | 0.05 |
| PLACE1006617 | F-PLACE1006617 | 0.05 |
| PLACE1006629 | F-PLACE1006629 | 0.2 |
| PLACE1006640 | F-PLACE1006640 | 0.05 |
| PLACE1006754 | F-PLACE1006754 | 0.08 |
| PLACE1006760 | F-PLACE1006760 | 0.05 |
| PLACE1006779 | F-PLACE1006779 | 0.17 |
| PLACE1006792 | F-PLACE1006792 | 0.15 |
| PLACE1006795 | F-PLACE1006795 | 0.1 |
| PLACE1006800 | F-PLACE1006800 | 0.11 |
| PLACE1006805 | F-PLACE1006805 | 0.12 |
| PLACE1006815 | F-PLACE1006815 | 0.14 |
| PLACE1006860 | F-PLACE1006860 | 0.06 |
| PLACE1006867 | F-PLACE1006867 | 0.11 |
| PLACE1006878 | F-PLACE1006878 | 0.23 |
| PLACE1006904 | F-PLACE1006904 | 0.13 |
| PLACE1007045 | F-PLACE1007045 | 0.08 |
| PLACE1007097 | F-PLACE1007097 | 0.13 |
| PLACE1007111 | F-PLACE1007111 | 0.08 |
| PLACE1007132 | F-PLACE1007132 | 0.07 |
| PLACE1007140 | F-PLACE1007140 | 0.16 |
| PLACE1007276 | F-PLACE1007276 | 0.09 |
| PLACE1007286 | F-PLACE1007286 | 0.05 |
| PLACE1007478 | F-PLACE1007478 | 0.19 |
| PLACE1007525 | F-PLACE1007525 | 0.11 |
| PLACE1007557 | F-PLACE1007557 | 0.13 |
| PLACE1007677 | F-PLACE1007677 | 0.08 |
| PLACE1007737 | F-PLACE1007737 | 0.07 |
| PLACE1007743 | F-PLACE1007743 | 0.09 |
| PLACE1007807 | F-PLACE1007807 | 0.09 |
| PLACE1007829 | F-PLACE1007829 | 0.09 |
| PLACE1007852 | F-PLACE1007852 | 0.14 |
| PLACE1007866 | F-PLACE1007866 | 0.07 |
| PLACE1007877 | F-PLACE1007877 | 0.29 |
| PLACE1008045 | F-PLACE1008045 | 0.17 |
| PLACE1008080 | F-PLACE1008080 | 0.05 |
| PLACE1008111 | F-PLACE1008111 | 0.11 |
| PLACE1008181 | F-PLACE1008181 | 0.08 |
| PLACE1008201 | F-PLACE1008201 | 0.12 |
| PLACE1008231 | F-PLACE1008231 | 0.08 |
| PLACE1008244 | F-PLACE1008244 | 0.06 |
| PLACE1008330 | F-PLACE1008330 | 0.13 |
| PLACE1008331 | F-PLACE1008331 | 0.15 |
| PLACE1008369 | F-PLACE1008369 | 0.06 |
| PLACE1008392 | F-PLACE1008392 | 0.09 |
| PLACE1008405 | F-PLACE1008405 | 0.07 |
| PLACE1008424 | F-PLACE1008424 | 0.06 |
| PLACE1008426 | F-PLACE1008426 | 0.17 |
| PLACE1008437 | F-PLACE1008437 | 0.2 |
| PLACE1008455 | F-PLACE1008455 | 0.07 |
| PLACE1008584 | F-PLACE1008584 | 0.29 |
| PLACE1008621 | F-PLACE1008621 | 0.07 |
| PLACE1008625 | F-PLACE1008625 | 0.12 |
| PLACE1008630 | F-PLACE1008630 | 0.12 |
| PLACE1008643 | F-PLACE1008643 | 0.11 |
| PLACE1008715 | F-PLACE1008715 | 0.2 |
| PLACE1008748 | F-PLACE1008748 | 0.15 |
| PLACE1008757 | F-PLACE1008757 | 0.13 |
| PLACE1008798 | F-PLACE1008798 | 0.14 |
| PLACE1008807 | F-PLACE1008807 | 0.12 |
| PLACE1008851 | F-PLACE1008851 | 0.22 |
| PLACE1008920 | F-PLACE1008920 | 0.1 |
| PLACE1008941 | F-PLACE1008941 | 0.14 |
| PLACE1008947 | F-PLACE1008947 | 0.05 |
| PLACE1009020 | F-PLACE1009020 | 0.14 |
| PLACE1009039 | F-PLACE1009039 | 0.16 |
| PLACE1009048 | F-PLACE1009048 | 0.09 |
| PLACE1009050 | F-PLACE1009050 | 0.09 |
| PLACE1009150 | F-PLACE1009150 | 0.12 |
| PLACE1009155 | F-PLACE1009155 | 0.08 |
| PLACE1009172 | F-PLACE1009172 | 0.07 |
| PLACE1009183 | F-PLACE1009183 | 0.07 |
| PLACE1009200 | F-PLACE1009200 | 0.08 |
| PLACE1009246 | F-PLACE1009246 | 0.08 |
| PLACE1009308 | F-PLACE1009308 | 0.23 |
| PLACE1009398 | F-PLACE1009398 | 0.26 |
| PLACE1009410 | F-PLACE1009410 | 0.15 |
| PLACE1009477 | F-PLACE1009477 | 0.18 |
| PLACE1009493 | F-PLACE1009493 | 0.23 |
| PLACE1009539 | F-PLACE1009539 | 0.11 |
| PLACE1009595 | F-PLACE1009595 | 0.11 |
| PLACE1009613 | F-PLACE1009613 | 0.08 |
| PLACE1009621 | F-PLACE1009621 | 0.19 |
| PLACE1009637 | F-PLACE1009637 | 0.27 |
| PLACE1009639 | F-PLACE1009639 | 0.27 |
| PLACE1009879 | F-PLACE1009879 | 0.07 |
| PLACE1009888 | F-PLACE1009888 | 0.06 |
| PLACE1009924 | F-PLACE1009924 | 0.09 |
| PLACE1009925 | F-PLACE1009925 | 0.21 |
| PLACE1009935 | F-PLACE1009935 | 0.22 |
| PLACE1009947 | F-PLACE1009947 | 0.19 |
| PLACE1010069 | F-PLACE1010069 | 0.22 |
| PLACE1010083 | F-PLACE1010083 | 0.26 |
| PLACE1010089 | F-PLACE1010089 | 0.13 |
| PLACE1010181 | F-PLACE1010181 | 0.07 |
| PLACE1010231 | F-PLACE1010231 | 0.17 |
| PLACE1010270 | F-PLACE1010270 | 0.08 |
| PLACE1010341 | F-PLACE1010341 | 0.1 |
| PLACE1010562 | F-PLACE1010562 | 0.14 |
| PLACE1010579 | F-PLACE1010579 | 0.15 |
| PLACE1010624 | F-PLACE1010624 | 0.13 |
| PLACE1010628 | F-PLACE1010628 | 0.16 |
| PLACE1010631 | F-PLACE1010631 | 0.23 |
| PLACE1010662 | F-PLACE1010662 | 0.24 |
| PLACE1010702 | F-PLACE1010702 | 0.21 |
| PLACE1010739 | F-PLACE1010739 | 0.13 |
| PLACE1010802 | F-PLACE1010802 | 0.17 |
| PLACE1010891 | F-PLACE1010591 | 0.09 |
| PLACE1010896 | F-PLACE1010896 | 0.22 |
| PLACE1010916 | F-PLACE1010916 | 0.15 |
| PLACE1010947 | F-PLACE1010947 | 0.08 |
| PLACE1011032 | F-PLACE1011032 | 0.17 |
| PLACE1011057 | F-PLACE1011057 | 0.1 |
| PLACE1011109 | F-PLACE1011109 | 0.08 |
| PLACE1011133 | F-PLACE1011133 | 0.08 |
| PLACE1011143 | F-PLACE1011143 | 0.23 |
| PLACE1011165 | F-PLACE1011165 | 0.05 |
| PLACE1011185 | F-PLACE1011185 | 0.17 |
| PLACE1011203 | F-PLACE1011203 | 0.08 |
| PLACE1011296 | F-PLACE1011296 | 0.13 |
| PLACE1011340 | F-PLACE1011340 | 0.05 |
| PLACE1011375 | F-PLACE1011375 | 0.07 |
| PLACE1011419 | F-PLACE1011419 | 0.15 |
| PLACE1011452 | F-PLACE1011452 | 0.13 |
| PLACE1011465 | F-PLACE1011465 | 0.14 |
| PLACE1011492 | F-PLACE1011492 | 0.26 |
| PLACE1011503 | F-PLACE1011503 | 0.14 |
| PLACE1011520 | F-PLACE1011520 | 0.12 |
| PLACE1011567 | F-PLACE1011567 | 0.13 |
| PLACE1011576 | F-PLACE1011576 | 0.29 |
| PLACE1011641 | F-PLACE1011641 | 0.07 |
| PLACE1011643 | F-PLACE1011643 | 0.27 |
| PLACE1011649 | F-PLACE1011649 | 0.17 |
| PLACE1011650 | F-PLACE1011650 | 0.13 |
| PLACE1011719 | F-PLACE1011719 | 0.15 |
| PLACE1011729 | F-PLACE1011729 | 0.23 |
| PLACE1011749 | F-PLACEL011749 | 0.12 |
| PLACE1011762 | F-PLACE1011762 | 0.06 |
| PLACE1011778 | F-PLACE1011778 | 0.07 |
| PLACE1011874 | F-PLACE1011874 | 0.07 |
| PLACE1011962 | F-PLACEL011962 | 0.06 |
| PLACE1011964 | F-PLACE1011964 | 0.13 |
| PLACE1011995 | F-PLACE1011995 | 0.08 |
| PLACE2000003 | F-PLACE2000003 | 0.09 |
| PLACE2000011 | F-PLACE2000011 | 0.12 |
| PLACE2000017 | F-PLACE2000017 | 0.22 |
| PLACE2000061 | F-PLACE2000061 | 0.19 |
| PLACE2000103 | F-PLACE2000103 | 0.16 |
| PLACE2000115 | F-PLACE2000115 | 0.11 |
| PLACE2000132 | F-PLACE2000132 | 0.24 |
| PLACE2000136 | F-PLACE2000136 | 0.09 |
| PLACE2000140 | F-PLACE2000140 | 0.24 |
| PLACE2000176 | F-PLACE2000176 | 0.25 |
| PLACE2000187 | F-PLACE2000187 | 0.16 |
| PLACE2000216 | F-PLACE2000216 | 0.15 |
| PLACE2000264 | F-PLACE2000264 | 0.06 |
| PLACE2000305 | F-PLACE2000305 | 0.05 |
| PLACE2000317 | F-PLACE2000317 | 0.25 |
| PLACE2000335 | F-PLACE2000335 | 0.09 |
| PLACE2000342 | F-PLACE2000342 | 0.07 |
| PLACE2000347 | F-PLACE2000347 | 0.12 |
| PLACE2000366 | F-PLACE2000366 | 0.08 |
| PLACE2000379 | F-PLACE2000379 | 0.24 |
| PLACE2000394 | F-PLACE2000394 | 0.2 |
| PLACE2000398 | F-PLACE2000398 | 0.21 |
| PLACE2000419 | F-PLACE2000419 | 0.05 |
| PLACE2000425 | F-PLACE2000425 | 0.16 |
| PLACE2000435 | F-PLACE2000435 | 0.05 |
| PLACE2000450 | F-PLACE2000450 | 0.12 |
| PLACE2000455 | F-PLACE2000455 | 0.15 |
| PLACE2000465 | F-PLACE2000465 | 0.12 |
| PLACE2000477 | F-PLACE2000477 | 0.3 |
| PLACE3000004 | F-PLACE3000004 | 0.3 |
| PLACE3000119 | F-PLACE3000119 | 0.1 |
| PLACE3000124 | F-PLACE3000124 | 0.11 |
| PLACE3000136 | F-PLACE3000136 | 0.13 |
| PLACE3000158 | F-PLACE3000158 | 0.06 |
| PLACE3000169 | F-PLACE3000169 | 0.13 |
| PLACE3000199 | F-PLACE3000199 | 0.06 |
| PLACE3000207 | F-PLACE3000207 | 0.11 |
| PLACE3000208 | F-PLACE3000208 | 0.07 |
| PLACE3000218 | F-PLACE3000218 | 0.15 |
| PLACE3000220 | F-PLACE3000220 | 0.05 |
| PLACE3000230 | F-PLACE3000230 | 0.23 |
| PLACE3000271 | F-PLACE3000271 | 0.17 |
| PLACE3000276 | F-PLACE3000276 | 0.2 |
| PLACE3000341 | F-PLACE3000341 | 0.08 |
| PLACE3000362 | F-PLACE3000362 | 0.19 |
| PLACE3000365 | F-PLACE3000365 | 0.09 |
| PLACE3000373 | F-PLACE3000373 | 0.22 |
| PLACE3000388 | F-PLACE3000388 | 0.12 |
| PLACE3000399 | F-PLACE3000399 | 0.14 |
| PLACE3000400 | F-PLACE3000400 | 0.08 |
| PLACE3000401 | F-PLACE3000401 | 0.1 |
| PLACE3000402 | F-PLACE3000402 | 0.1 |
| PLACE3000406 | F-PLACE3000406 | 0.17 |
| PLACE3000475 | F-PLACE3000475 | 0.07 |
| PLACE4000093 | F-PLACE4000093 | 0.21 |
| PLACE4000100 | F-PLACE4000100 | 0.19 |
| PLACE4000233 | F-PLACE4000233 | 0.07 |
| PLACE4000247 | F-PLACE4000247 | 0.14 |
| PLACE4000250 | F-PLACE4000250 | 0.17 |
| PLACE4000252 | F-PLACE4000252 | 0.09 |
| PLACE4000320 | F-PLACE4000320 | 0.23 |
| PLACE4000344 | F-PLACE4000344 | 0.21 |
| PLACE4000367 | F-PLACE4000367 | 0.18 |
| PLACE4000379 | F-PLACE4000379 | 0.14 |
| PLACE4000401 | F-PLACE4000401 | 0.13 |
| PLACE4000411 | F-PLACE4000411 | 0.11 |
| PLACE4000494 | F-PLACE4000494 | 0.19 |
| PLACE4000548 | F-PLACE4000548 | 0.27 |
| THYRO1000026 | F-THYRO1000026 | 0.09 |
| THYRO1000035 | F-THYRO1000035 | 0.09 |
| THYRO1000085 | F-THYRO1000085 | 0.13 |
| THYRO1000092 | F-THYRO1000092 | 0.21 |
| THYRO1000111 | F-THYRO1000111 | 0.13 |
| THYRO1000129 | F-THYRO1000129 | 0.11 |
| THYRO1000132 | F-THYRO1000132 | 0.1 |
| THYRO1000156 | F-THYRO1000156 | 0.13 |
| THYRO1000186 | F-THYRO1000186 | 0.12 |
| THYRO1000187 | F-THYRO1000187 | 0.11 |
| THYRO1000190 | F-THYRO1000190 | 0.16 |
| THYRO1000221 | F-THYRO1000221 | 0.08 |
| THYRO1000241 | F-THYRO1000241 | 0.08 |
| THYRO1000279 | F-THYRO1000279 | 0.13 |
| THYRO1000438 | F-THYRO1000438 | 0.06 |
| THYRO1000452 | F-THYRO1000452 | 0.12 |
| THYRO1000471 | F-THYRO1000471 | 0.11 |
| THYRO1000484 | F-THYRO1000484 | 0.24 |
| THYRO1000558 | F-THYRO1000558 | 0.09 |
| THYRO1000596 | F-THYRO1000596 | 0.14 |
| THYRO1000602 | F-THYRO1000602 | 0.13 |
| THYRO1000625 | F-THYRO1000625 | 0.2 |
| THYRO1000641 | F-THYRO1000641 | 0.06 |
| THYRO1000658 | F-THYRO1000658 | 0.12 |
| THYRO1000699 | F-THYRO1000699 | 0.09 |
| THYRO1000748 | F-THYRO1000748 | 0.3 |
| THYRO1000793 | F-THYRO1000793 | 0.25 |
| THYRO1000796 | F-THYRO1000796 | 0.11 |
| THYRO1000805 | F-THYRO1000805 | 0.28 |
| THYRO1000815 | F-THYRO1000815 | 0.14 |
| THYRO1000843 | F-THYRO1000843 | 0.13 |
| THYRO1000852 | F-THYRO1000852 | 0.05 |
| THYRO1000865 | F-THYRO1000865 | 0.14 |
| THYRO1000895 | F-THYRO1000895 | 0.12 |
| THYRO1000974 | F-THYRO1000974 | 0.07 |
| THYRO1000975 | F-THYRO1000975 | 0.08 |
| THYRO1001003 | F-THYRO1001003 | 0.11 |
| THYRO1001031 | F-THYRO1001031 | 0.1 |
| THYRO1001062 | F-THYRO1001062 | 0.14 |
| THYRO1001093 | F-THYRO1001093 | 0.13 |
| THYRO1001121 | F-THYRO1001121 | 0.14 |
| THYRO1001133 | F-THYRO1001133 | 0.24 |
| THYRO1001177 | F-THYRO1001177 | |
| THYRO1001262 | F-THYRO1001262 | 0.2 |
| THYRO1001290 | F-THYRO1001290 | 0.06 |
| THYRO1001321 | F-THYRO1001321 | 0.09 |
| THYRO1001322 | F-THYRO1001322 | 0.13 |
| THYRO1001365 | F-THYRO1001365 | 0.08 |
| THYRO1001401 | F-THYRO1001401 | 0.21 |
| THYRO1001411 | F-THYRO1001411 | 0.06 |
| THYRO1001426 | F-THYRO1001426 | 0.1 |
| THYRO1001434 | F-THYRO1001434 | 0.15 |
| THYRO1001480 | F-THYRO1001480 | 0.1 |
| THYRO1001534 | F-THYRO1001534 | 0.26 |
| THYRO1001541 | F-THYRO1001541 | 0.22 |
| THYRO1001559 | F-THYRO1001559 | 0.15 |
| THYRO1001570 | F-THYRO1001570 | 0.28 |
| THYRO1001573 | F-THYRO1001573 | 0.05 |
| THYRO1001595 | F-THYRO1001595 | 0.05 |
| THYRO1001617 | F-THYRO1001617 | 0.1 |
| THYRO1001673 | F-THYRO1001673 | 0.07 |
| THYRO1001706 | F-THYRO1001706 | 0.15 |
| THYRO1001745 | F-THYRO1001745 | 0.12 |
| THYRO1001746 | F-THYRO1001746 | 0.1 |
| THYRO1001772 | F-THYRO1001772 | 0.08 |
| THYRO1001895 | F-THYRO1001895 | 0.19 |
| THYRO1001907 | F-THYRO1001907 | 0.17 |
| Y79AA1000033 | F-Y79AA1000033 | 0.18 |
| Y79AA1000065 | F-Y79AA1000065 | 0.22 |
| Y79AA1000346 | F-Y79AA1000346 | 0.2 |
| Y79AA1000405 | F-Y79AA1000405 | 0.07 |
| Y79AA1000410 | F-Y79AA1000410 | 0.08 |
| Y79AA1000538 | F-Y79AA1000538 | 0.06 |
| Y79AA1000802 | F-Y79AA1000802 | 0.28 |
| Y79AA1000805 | F-Y79AA1000805 | 0.2 |
| Y79AA1000969 | F-Y79AA1000969 | 0.07 |
| Y79AA1001061 | F-Y79AA1001061 | 0.22 |
| Y79AA1001167 | F-Y79AA1001167 | 0.22 |
| Y79AA1001384 | F-Y79AA1001384 | 0.18 |
| Y79AA1001594 | F-Y79AA1001594 | 0.22 |
| Y79AA1001692 | F-Y79AA1001692 | 0.2 |
| Y79AA1001848 | F-Y79AA1001848 | 0.21 |
| Y79AA1001875 | F-Y79AA1001875 | 0.09 |
| Y79AA1002103 | F-Y79AA1002103 | 0.11 |
| Y79AA1002211 | F-Y79AA1002211 | 0.19 |
| Y79AA1002220 | F-Y79AA1002220 | 0.25 |

[0518] TABLE 11
574 clones belonging to groups (4), (5), (6), and (7), each having
the maximal ATGpr1 score of not more than 0.3 and selected
based on the maximal ATGpr2 score, and their maximal
ATGpr2 scores

| | | maximal |
|---|---|---|
| clone | name of | ATGpr2 |
| name | sequence | score |
| HEMBA1000180 | F-HEMBA1000180 | 0.37 |
| HEMBA1000251 | F-HEMBA1000251 | 0.14 |
| HEMBA1000280 | F-HEMBA1000280 | 0.33 |
| HEMBA1000282 | F-HEMBA1000282 | 0.36 |
| HEMBA1000333 | F-HEMBA1000333 | 0.59 |
| HEMBA1000351 | F-HEMBA1000351 | 0.36 |
| HEMBA1000357 | F-HEMBA1000357 | 0.39 |
| HEMBA1000376 | F-HEMBA1000376 | 0.53 |
| HEMBA1000469 | F-HEMBA1000469 | 0.32 |
| HEMBA1000504 | F-HEMBA1000504 | 0.34 |
| HEMBA1000519 | F-HEMBA1000519 | 0.72 |
| HEMBA1000545 | F-HEMBA1000545 | 0.32 |
| HEMBA1000557 | F-HEMBA1000557 | 0.35 |
| HEMBA1000575 | F-HEMBA1000575 | 0.34 |
| HEMBA1000604 | F-HEMBA1000604 | 0.28 |
| HEMBA1000622 | F-HEMBA1000622 | 0.32 |
| HEMBA1000673 | F-HEMBA1000673 | 0.14 |
| HEMBA1000726 | F-HEMBA1000726 | 0.32 |
| HEMBA1000749 | F-HEMBA1000749 | 0.35 |
| HEMBA1000822 | F-HEMBA1000822 | 0.42 |
| HEMBA1000876 | F-HEMBA1000876 | 0.44 |
| HEMBA1000934 | F-HEMBA1000934 | 0.41 |
| HEMBA1000943 | F-HEMBA1000943 | 0.34 |
| HEMBA1000960 | F-HEMBA1000960 | 0.34 |
| HEMBA1000972 | F-HEMBA1000972 | 0.44 |
| HEMBA1001020 | F-HEMBA1001020 | 0.31 |
| HEMBA1001024 | F-HEMBA1001024 | 0.22 |
| HEMBA1001026 | F-HEMBA1001026 | 0.28 |
| HEMBA1001051 | F-HEMBA1001051 | 0.36 |
| HEMBA1001060 | F-HEMBA1001060 | 0.34 |
| HEMBA1001071 | F-HEMBA1001071 | 0.57 |
| HEMBA1001208 | F-HEMBA1001208 | 0.57 |
| HEMBA1001226 | F-HEMBA1001226 | 0.44 |
| HEMBA1001319 | F-HEMBA1001319 | 0.58 |
| HEMBA1001383 | F-HEMBA1001383 | 0.35 |
| HEMBA1001391 | F-HEMBA1001391 | 0.42 |
| HEMBA1001411 | F-HEMBA1001411 | 0.55 |
| HEMBA1001433 | F-HEMBA1001433 | 0.66 |
| HEMBA1001435 | F-HEMBA1001435 | 0.72 |
| HEMBA1001478 | F-HEMBA1001478 | 0.36 |
| HEMBA1001522 | F-HEMBA1001522 | 0.31 |
| HEMBA1001636 | F-HEMBA1001636 | 0.32 |
| HEMBA1001651 | F-HEMBA1001651 | 0.54 |
| HEMBA1001658 | F-HEMBA1001658 | 0.38 |
| HEMBA1001709 | F-HEMBA1001709 | 0.55 |
| HEMBA1001734 | F-HEMBA1001734 | 0.13 |
| HEMBA1001745 | F-HEMBA1001745 | 0.33 |
| HEMBA1001784 | F-HEMBA1001784 | 0.08 |
| HEMBA1001791 | F-HEMBA1001791 | 0.48 |
| HEMBA1001803 | F-HEMBA1001803 | 0.21 |
| HEMBA1001808 | F-HEMBA1001808 | 0.23 |
| HEMBA1001835 | F-HEMBA1001835 | 0.67 |
| HEMBA1001844 | F-HEMBA1001844 | 0.46 |
| HEMBA1001888 | F-HEMBA1001888 | 0.72 |
| HEMBA1001918 | F-HEMBA1001918 | 0.25 |
| HEMBA1001940 | F-HEMBA1001940 | 0.40 |
| HEMBA1001962 | F-HEMBA1001962 | 0.63 |
| HEMBA1002022 | F-HEMBA1002022 | 0.32 |
| HEMBA1002185 | F-HEMBA1002185 | 0.33 |
| HEMBA1002257 | F-HEMBA1002257 | 0.13 |
| HEMBA1002348 | F-HEMBA1002348 | 0.39 |
| HEMBA1002621 | F-HEMBA1002621 | 0.47 |
| HEMBA1002645 | F-HEMBA1002645 | 0.34 |
| HEMBA1002661 | F-HEMBA1002661 | 0.43 |
| HEMBA1002728 | F-HEMBA1002728 | 0.45 |
| HEMBA1002742 | F-HEMBA1002742 | 0.49 |
| HEMBA1002921 | F-HEMBA1002921 | 0.79 |
| HEMBA1002924 | F-HEMBA1002924 | 0.45 |
| HEMBA1002934 | F-HEMBA1002934 | 0.34 |
| HEMBA1002968 | F-HEMBA1002968 | 0.39 |
| HEMBA1003037 | F-HEMBA1003037 | 0.43 |
| HEMBA1003064 | F-HEMBA1003064 | 0.19 |
| HEMBA1003071 | F-HEMBA1003071 | 0.48 |
| HEMBA1003166 | F-HEMBA1003166 | 0.32 |
| HEMBA1003202 | F-HEMBA1003202 | 0.38 |
| HEMBA1003204 | F-HEMBA1003204 | 0.34 |
| HEMBA1003220 | F-HEMBA1003220 | 0.39 |
| HEMBA1003229 | F-HEMBA1003229 | 0.43 |
| HEMBA1003276 | F-HEMBA1003276 | 0.48 |
| HEMBA1003296 | F-HEMBA1003296 | 0.36 |
| HEMBA1003373 | F-HEMBA1003373 | 0.48 |
| HEMBA1003531 | F-HEMBA1003531 | 0.46 |
| HEMBA1003640 | F-HEMBA1003640 | 0.32 |
| HEMBA1003714 | F-HEMBA1003714 | 0.16 |
| HEMBA1003856 | F-HEMBA1003856 | 0.47 |
| HEMBA1003902 | F-HEMBA1003902 | 0.17 |
| HEMBA1003908 | F-HEMBA1003908 | 0.44 |
| HEMBA1003926 | F-HEMBA1003926 | 0.36 |
| HEMBA1003942 | F-HEMBA1003942 | 0.47 |
| HEMBA1003987 | F-HEMBA1003987 | 0.39 |
| HEMBA1004000 | F-HEMBA1004000 | 0.87 |
| HEMBA1004024 | F-HEMBA1004024 | 0.82 |
| HEMBA1004164 | F-HEMBA1004164 | 0.21 |
| HEMBA1004267 | F-HEMBA1004267 | 0.46 |
| HEMBA1004323 | F-HEMBA1004323 | 0.37 |
| HEMBA1004405 | F-HEMBA1004405 | 0.23 |
| HEMBA1004433 | F-HEMBA1004433 | 0.51 |
| HEMBA1004577 | F-HEMBA1004577 | 0.51 |
| HEMBA1004730 | F-HEMBA1004730 | 0.55 |
| HEMBA1004778 | F-HEMBA1004778 | 0.47 |
| HEMBA1004803 | F-HEMBA1004803 | 0.36 |
| HEMBA1004807 | F-HEMBA1004807 | 0.48 |
| HEMBA1004880 | F-HEMBA1004880 | 0.43 |
| HEMBA1004900 | F-HEMBA1004900 | 0.40 |
| HEMBA1004909 | F-HEMBA1004909 | 0.24 |
| HEMBA1004983 | F-HEMBA1004983 | 0.35 |
| HEMBA1005123 | F-HEMBA1005123 | 0.35 |
| HEMBA1005232 | F-HEMBA1005232 | 0.09 |
| HEMBA1005241 | F-HEMBA1005241 | 0.34 |
| HEMBA1005311 | F-HEMBA1005311 | 0.37 |
| HEMBA1005318 | F-HEMBA1005318 | 0.59 |
| HEMBA1005353 | F-HEMBA1005353 | 0.34 |
| HEMBA1005374 | F-HEMBA1005374 | 0.38 |
| HEMBA1005447 | F-HEMBA1005447 | 0.34 |
| HEMBA1005508 | F-HEMBA1005508 | 0.14 |
| HEMBA1005577 | F-HEMBA1005577 | 0.22 |
| HEMBA1005588 | F-HEMBA1005588 | 0.54 |
| HEMBA1005593 | F-HEMBA1005593 | 0.44 |
| HEMBA1005606 | F-HEMBA1005606 | 0.38 |
| HEMBA1005679 | F-HEMBA1005679 | 0.87 |
| HEMBA1005894 | F-HEMBA1005894 | 0.46 |
| HEMBA1005911 | F-HEMBA1005911 | 0.56 |
| HEMBA1006036 | F-HEMBA1006036 | 0.87 |
| HEMBA1006124 | F-HEMBA1006124 | 0.35 |
| HEMBA1006253 | F-HEMBA1006253 | 0.35 |
| HEMBA1006259 | F-HEMBA1006259 | 0.54 |
| HEMBA1006364 | F-HEMBA1006364 | 0.55 |
| HEMBA1006380 | F-HEMBA1006380 | 0.48 |
| HEMBA1006426 | F-HEMBA1006426 | 0.54 |
| HEMBA1006461 | F-HEMBA1006461 | 0.20 |
| HEMBA1006562 | F-HEMBA1006562 | 0.72 |
| HEMBA1006597 | F-HEMBA1006597 | 0.64 |
| HEMBA1006639 | F-HEMBA1006639 | 0.55 |
| HEMBA1006653 | F-HEMBA1006653 | 0.34 |
| HEMBA1006695 | F-HEMBA1006695 | 0.16 |
| HEMBA1006696 | F-HEMBA1006696 | 0.37 |
| HEMBA1006744 | F-HEMBA1006744 | 0.33 |
| HEMBA1006824 | F-HEMBA1006824 | 0.37 |
| HEMBA1006949 | F-HEMBA1006949 | 0.78 |
| HEMBA1007078 | F-HEMBA1007078 | 0.44 |
| HEMBA1007129 | F-HEMBA1007129 | 0.55 |
| HEMBA1007147 | F-HEMBA1007147 | 0.41 |
| HEMBA1007206 | F-HEMBA1007206 | 0.46 |
| HEMBA1007279 | F-HEMBA1007279 | 0.45 |
| HEMBA1007327 | F-HEMBA1007327 | 0.71 |
| HEMBB1000005 | F-HEMBB1000005 | 0.35 |
| HEMBB1000054 | F-HEMBB1000054 | 0.18 |
| HEMBB1000055 | F-HEMBB1000055 | 0.87 |
| HEMBB1000144 | F-HEMBB1000144 | 0.47 |
| HEMBB1000258 | F-HEMBB1000258 | 0.87 |
| HEMBB1000318 | F-HEMBB1000318 | 0.34 |
| HEMBB1000335 | F-HEMBB1000335 | 0.48 |
| HEMBB1000336 | F-HEMBB1000336 | 0.35 |
| HEMBB1000354 | F-HEMBB1000354 | 0.47 |
| HEMBB1000374 | F-HEMBB1000374 | 0.69 |
| HEMBB1000402 | F-HEMBB1000402 | 0.54 |
| HEMBB1000404 | F-HEMBB1000404 | 0.47 |
| HEMBB1000480 | F-HEMBB1000480 | 0.35 |
| HEMBB1000493 | F-HEMBB1000493 | 0.33 |
| HEMBB1000554 | F-HEMBB1000554 | 0.46 |
| HEMBB1000573 | F-HEMBB1000573 | 0.34 |
| HEMBB1000649 | F-HEMBB1000649 | 0.41 |
| HEMBB1000652 | F-HEMBB1000652 | 0.46 |
| HEMBB1000709 | F-HEMBB1000709 | 0.56 |
| HEMBB1000749 | F-HEMBB1000749 | 0.36 |
| HEMBB1000790 | F-HEMBB1000790 | 0.58 |
| HEMBB1000827 | F-HEMBB1000827 | 0.31 |
| HEMBB1000831 | F-HEMBB1000831 | 0.42 |
| HEMBB1000893 | F-HEMBB1000893 | 0.36 |
| HEMBB1001004 | F-HEMBB1001004 | 0.43 |
| HEMBB1001008 | F-HEMBB1001008 | 0.44 |
| HEMBB1001047 | F-HEMBB1001047 | 0.47 |
| HEMBB1001119 | F-HEMBB1001119 | 0.25 |
| HEMBB1001142 | F-HEMBB1001142 | 0.15 |
| HEMBB1001315 | F-HEMBB1001315 | 0.72 |
| HEMBB1001317 | F-HEMBB1001317 | 0.49 |
| HEMBB1001326 | F-HEMBB1001326 | 0.44 |
| HEMBB1001337 | F-HEMBB1001337 | 0.18 |
| HEMBB1001367 | F-HEMBB1001367 | 0.35 |
| HEMBB1001424 | F-HEMBB1001424 | 0.34 |
| HEMBB1001436 | F-HEMBB1001436 | 0.34 |
| HEMBB1001458 | F-HEMBB1001458 | 0.47 |
| HEMBB1001535 | F-HEMBB1001535 | 0.34 |
| HEMBB1001536 | F-HEMBB1001536 | 0.22 |
| HEMBB1001565 | F-HEMBB1001565 | 0.35 |
| HEMBB1001747 | F-HEMBB1001747 | 0.40 |
| HEMBB1001749 | F-HEMBB1001749 | 0.39 |
| HEMBB1001797 | F-HEMBB1001797 | 0.79 |
| HEMBB1001836 | F-HEMBB1001836 | 0.52 |
| HEMBB1001863 | F-HEMBB1001863 | 0.38 |
| HEMBB1001868 | F-HEMBB1001868 | 0.27 |
| HEMBB1001875 | F-HEMBB1001875 | 0.46 |
| HEMBB1001911 | F-HEMBB1001911 | 0.87 |
| HEMBB1001922 | F-HEMBB1001922 | 0.38 |
| HEMBB1001925 | F-HEMBB1001925 | 0.33 |
| HEMBB1001944 | F-HEMBB1001944 | 0.35 |
| HEMBB1001983 | F-HEMBB1001983 | 0.32 |
| HEMBB1001996 | F-HEMBB1001996 | 0.39 |
| HEMBB1001997 | F-HEMBB1001997 | 0.36 |
| HEMBB1002045 | F-HEMBB1002045 | 0.20 |
| HEMBB1002092 | F-HEMBB1002092 | 0.31 |
| HEMBB1002247 | F-HEMBB1002247 | 0.53 |
| HEMBB1002266 | F-HEMBB1002266 | 0.34 |
| HEMBB1002387 | F-HEMBB1002387 | 0.32 |
| HEMBB1002425 | F-HEMBB1002425 | 0.31 |
| HEMBB1002458 | F-HEMBB1002458 | 0.44 |
| HEMBB1002522 | F-HEMBB1002522 | 0.56 |
| HEMBB1002534 | F-HEMBB1002534 | 0.43 |
| HEMBB1002579 | F-HEMBB1002579 | 0.21 |
| HEMBB1002582 | F-HEMBB1002582 | 0.48 |
| HEMBB1002596 | F-HEMBB1002596 | 0.42 |
| HEMBB1002617 | F-HEMBB1002617 | 0.47 |
| HEMBB1002702 | F-HEMBB1002702 | 0.31 |
| MAMMA1000043 | F-MAMMA1000043 | 0.45 |
| MAMMA1000092 | F-MAMMA1000092 | 0.39 |
| MAMMA1000129 | F-MAMMA1000129 | 0.47 |
| MAMMA1000175 | F-MAMMA1000175 | 0.18 |
| MAMMA1000198 | F-MAMMA1000198 | 0.46 |
| MAMMA1000221 | F-MAMMA1000221 | 0.43 |
| MAMMA1000307 | F-MAMMA1000307 | 0.35 |
| MAMMA1000331 | F-MAMMA1000331 | 0.41 |
| MAMMA1000356 | F-MAMMA1000356 | 0.41 |
| MAMMA1000360 | F-MAMMA1000360 | 0.33 |
| MAMMA1000402 | F-MAMMA1000402 | 0.35 |
| MAMMA1000414 | F-MAMMA1000414 | 0.32 |
| MAMMA1000444 | F-MAMMA1000444 | 0.13 |
| MAMMA1000500 | F-MAMMA1000500 | 0.36 |
| MAMMA1000522 | F-MAMMA1000522 | 0.46 |
| MAMMA1000576 | F-MAMMA1000576 | 0.58 |
| MAMMA1000594 | F-MAMMA1000594 | 0.69 |
| MAMMA1000597 | F-MAMMA1000597 | 0.35 |
| MAMMA1000720 | F-MAMMA1000720 | 0.43 |
| MAMMA1000761 | F-MAMMA1000761 | 0.13 |
| MAMMA1000775 | F-MAMMA1000775 | 0.35 |
| MAMMA1000778 | F-MAMMA1000778 | 0.54 |
| MAMMA1000798 | F-MAMMA1000798 | 0.40 |
| MAMMA1000862 | F-MAMMA1000862 | 0.87 |
| MAMMA1000876 | F-MAMMA1000876 | 0.47 |
| MAMMA1000883 | F-MAMMA1000883 | 0.41 |
| MAMMA1000931 | F-MAMMA1000931 | 0.45 |
| MAMMA1000940 | F-MAMMA1000940 | 0.35 |
| MAMMA1000941 | F-MAMMA1000941 | 0.35 |
| MAMMA1000943 | F-MAMMA1000943 | 0.23 |
| MAMMA1000975 | F-MAMMA1000975 | 0.32 |
| MAMMA1001038 | F-MAMMA1001038 | 0.41 |
| MAMMA1001162 | F-MAMMA1001162 | 0.18 |
| MAMMA1001186 | F-MAMMA1001186 | 0.49 |
| MAMMA1001220 | F-MAMMA1001220 | 0.43 |
| MAMMA1001256 | F-MAMMA1001256 | 0.35 |
| MAMMA1001274 | F-MAMMA1001274 | 0.57 |
| MAMMA1001341 | F-MAMMA1001341 | 0.45 |
| MAMMA1001397 | F-MAMMA1001397 | 0.64 |
| MAMMA1001420 | F-MAMMA1001420 | 0.41 |
| MAMMA1001547 | F-MAMMA1001547 | 0.39 |
| MAMMA1001590 | F-MAMMA1001590 | 0.46 |
| MAMMA1001670 | F-MAMMA1001670 | 0.36 |
| MAMMA1001679 | F-MAMMA1001679 | 0.46 |
| MAMMA1001711 | F-MAMMA1001711 | 0.68 |
| MAMMA1001745 | F-MAMMA1001745 | 0.53 |
| MAMMA1001760 | F-MAMMA1001760 | 0.58 |
| MAMMA1001769 | F-MAMMA1001769 | 0.33 |
| MAMMA1001815 | F-MAMMA1001815 | 0.43 |
| MAMMA1001820 | F-MAMMA1001820 | 0.19 |
| MAMMA1001907 | F-MAMMA1001907 | 0.38 |
| MAMMA1002056 | F-MAMMA1002056 | 0.35 |
| MAMMA1002078 | F-MAMMA1002078 | 0.34 |
| MAMMA1002093 | F-MAMMA1002093 | 0.55 |
| MAMMA1002125 | F-MAMMA1002125 | 0.39 |
| MAMMA1002132 | F-MAMMA1002132 | 0.57 |
| MAMMA1002145 | F-MAMMA1002145 | 0.78 |
| MAMMA1002250 | F-MAMMA1002250 | 0.72 |
| MAMMA1002311 | F-MAMMA1002311 | 0.58 |
| MAMMA1002360 | F-MAMMA1002360 | 0.19 |
| MAMMA1002411 | F-MAMMA1002411 | 0.40 |
| MAMMA1002498 | F-MAMMA1002498 | 0.37 |
| MAMMA1002571 | F-MAMMA1002571 | 0.32 |
| MAMMA1002701 | F-MAMMA1002701 | 0.55 |
| MAMMA1002727 | F-MAMMA1002727 | 0.34 |
| MAMMA1002728 | F-MAMMA1002728 | 0.55 |
| MAMMA1002746 | F-MAMMA1002746 | 0.45 |
| MAMMA1002764 | F-MAMMA1002764 | 0.44 |
| MAMMA1002765 | F-MAMMA1002765 | 0.40 |
| MAMMA1002820 | F-MAMMA1002820 | 0.32 |
| MAMMA1002830 | F-MAMMA1002830 | 0.36 |
| MAMMA1002909 | F-MAMMA1002909 | 0.64 |
| MAMMA1002941 | F-MAMMA1002941 | 0.42 |
| MAMMA1002972 | F-MAMMA1002972 | 0.08 |
| MAMMA1002973 | F-MAMMA1002973 | 0.35 |
| MAMMA1003004 | F-MAMMA1003004 | 0.42 |
| MAMMA1003007 | F-MAMMA1003007 | 0.41 |
| MAMMA1003039 | F-MAMMA1003039 | 0.46 |
| MAMMA1003089 | F-MAMMA1003089 | 0.58 |
| NT2RM4000086 | F-NT2RM4000086 | 0.36 |
| NT2RM4000265 | F-NT2RM4000265 | 0.39 |
| NT2RM4000366 | F-NT2RM4000366 | 0.21 |
| NT2RM4000414 | F-NT2RM4000414 | 0.35 |
| NT2RM4000425 | F-NT2RM4000425 | 0.22 |
| NT2RM4000779 | F-NT2RM4000779 | 0.43 |
| NT2RM4000855 | F-NT2RM4000855 | 0.52 |
| NT2RM4001160 | F-NT2RM4001160 | 0.36 |
| NT2RM4001313 | F-NT2RM4001313 | 0.38 |
| NT2RM4001437 | F-NT2RM4001437 | 0.53 |
| NT2RM4001754 | F-NT2RM4001754 | 0.35 |
| NT2RM4001856 | F-NT2RM4001856 | 0.27 |
| NT2RM4001953 | F-NT2RM4001953 | 0.59 |
| NT2RM4001984 | F-NT2RM4001984 | 0.35 |
| NT2RM4002390 | F-NT2RM4002390 | 0.24 |
| NT2RP2000077 | F-NT2RP2000077 | 0.35 |
| NT2RP2000108 | F-NT2RP2000108 | 0.08 |
| NT2RP2000183 | F-NT2RP2000183 | 0.43 |
| NT2RP2000257 | F-NT2RP2000257 | 0.07 |
| NT2RP2000289 | F-NT2RP2000289 | 0.35 |
| NT2RP2000420 | F-NT2RP2000420 | 0.48 |
| NT2RP2000678 | F-NT2RP2000678 | 0.55 |
| NT2RP2000715 | F-NT2RP2000715 | 0.37 |
| NT2RP2000842 | F-NT2RP2000842 | 0.40 |
| NT2RP2000970 | F-NT2RP2000970 | 0.46 |
| NT2RP2001149 | F-NT2RP2001149 | 0.31 |
| NT2RP2001226 | F-NT2RP2001226 | 0.44 |
| NT2RP2001295 | F-NT2RP2001295 | 0.40 |
| NT2RP2001347 | F-NT2RP2001347 | 0.41 |
| NT2RP2001467 | F-NT2RP2001467 | 0.44 |
| NT2RP2001506 | F-NT2RP2001506 | 0.17 |
| NT2RP2001569 | F-NT2RP2001569 | 0.31 |
| NT2RP2001663 | F-NT2RP2001663 | 0.37 |
| NT2RP2001936 | F-NT2RP2001936 | 0.33 |
| NT2RP2002041 | F-NT2RP2002041 | 0.31 |
| NT2RP2002047 | F-NT2RP2002047 | 0.15 |
| NT2RP2002066 | F-NT2RP2002066 | 0.11 |
| NT2RP2002172 | F-NT2RP2002172 | 0.32 |
| NT2RP2002219 | F-NT2RP2002219 | 0.54 |
| NT2RP2002316 | F-NT2RP2002316 | 0.39 |
| NT2RP2002475 | F-NT2RP2002475 | 0.09 |
| NT2RP2002546 | F-NT2RP2002546 | 0.33 |
| NT2RP2002591 | F-NT2RP2002591 | 0.38 |
| NT2RP2002643 | F-NT2RP2002643 | 0.55 |
| NT2RP2002741 | F-NT2RP2002741 | 0.73 |
| NT2RP2002750 | F-NT2RP2002750 | 0.48 |
| NT2RP2002778 | F-NT2RP2002778 | 0.41 |
| NT2RP2002857 | F-NT2RP2002857 | 0.34 |
| NT2RP2003000 | F-NT2RP2003000 | 0.56 |
| NT2RP2003073 | F-NT2RP2003073 | 0.36 |
| NT2RP2003237 | F-NT2RP2003237 | 0.69 |
| NT2RP2003394 | F-NT2RP2003394 | 0.34 |
| NT2RP2003517 | F-NT2RP2003517 | 0.44 |
| NT2RP2003668 | F-NT2RP2003668 | 0.46 |
| NT2RP2003988 | F-NT2RP2003988 | 0.55 |
| NT2RP2004232 | F-NT2RP2004232 | 0.34 |
| NT2RP2004400 | F-NT2RP2004400 | 0.18 |
| NT2RP2004512 | F-NT2RP2004512 | 0.11 |
| NT2RP2004523 | F-NT2RP2004523 | 0.72 |
| NT2RP2004587 | F-NT2RP2004587 | 0.09 |
| NT2RP2004736 | F-NT2RP2004736 | 0.70 |
| NT2RP2004767 | F-NT2RP2004767 | 0.54 |
| NT2RP2004775 | F-NT2RP2004775 | 0.53 |
| NT2RP2004961 | F-NT2RP2004961 | 0.49 |
| NT2RP2004962 | F-NT2RP2004962 | 0.87 |
| NT2RP2004982 | F-NT2RP2004982 | 0.32 |
| NT2RP2005289 | F-NT2RP2005289 | 0.24 |
| NT2RP2005407 | F-NT2RP2005407 | 0.33 |
| NT2RP2005531 | F-NT2RP2005531 | 0.20 |
| NT2RP2005694 | F-NT2RP2005694 | 0.21 |
| NT2RP2005726 | F-NT2RP2005726 | 0.42 |
| NT2RP2005942 | F-NT2RP2005942 | 0.10 |
| NT2RP2006258 | F-NT2RP2006258 | 0.37 |
| NT2RP2006261 | F-NT2RP2006261 | 0.42 |
| NT2RP2006454 | F-NT2RP2006454 | 0.46 |
| NT2RP2006554 | F-NT2RP2006554 | 0.14 |
| NT2RP3000055 | F-NT2RP3000055 | 0.31 |
| NT2RP3000233 | F-NT2RP3000233 | 0.54 |
| NT2RP3000341 | F-NT2RP3000341 | 0.43 |
| NT2RP3000418 | F-NT2RP3000418 | 0.53 |
| NT2RP3000451 | F-NT2RP3000451 | 0.46 |
| NT2RP3000561 | F-NT2RP3000561 | 0.47 |
| NT2RP3000582 | F-NT2RP3000582 | 0.44 |
| NT2RP3001007 | F-NT2RP3001007 | 0.26 |
| NT2RP3001281 | F-NT2RP3001281 | 0.36 |
| NT2RP3001318 | F-NT2RP3001318 | 0.21 |
| NT2RP3001339 | F-NT2RP3001339 | 0.58 |
| NT2RP3001340 | F-NT2RP3001340 | 0.41 |
| NT2RP3001383 | F-NT2RP3001383 | 0.36 |
| NT2RP3001432 | F-NT2RP3001432 | 0.34 |
| NT2RP3001580 | F-NT2RP3001580 | 0.45 |
| NT2RP3001589 | F-NT2RP3001589 | 0.48 |
| NT2RP3001898 | F-NT2RP3001898 | 0.19 |
| NT2RP3002004 | F-NT2RP3002004 | 0.36 |
| NT2RP3002173 | F-NT2RP3002173 | 0.39 |
| NT2RP3003133 | F-NT2RP3003133 | 0.35 |
| NT2RP3003264 | F-NT2RP3003264 | 0.13 |
| NT2RP3003346 | F-NT2RP3003346 | 0.72 |
| NT2RP3003403 | F-NT2RP3003403 | 0.45 |
| NT2RP3003433 | F-NT2RP3003433 | 0.24 |
| NT2RP3003576 | F-NT2RP3003576 | 0.35 |
| NT2RP3003625 | F-NT2RP3003625 | 0.43 |
| NT2RP3003665 | F-NT2RP3003665 | 0.32 |
| NT2RP3003800 | F-NT2RP3003800 | 0.34 |
| NT2RP3003828 | F-NT2RP3003828 | 0.52 |
| NT2RP3003842 | F-NT2RP3003842 | 0.23 |
| NT2RP3004070 | F-NT2RP3004070 | 0.32 |
| NT2RP3004470 | F-NT2RP3004470 | 0.46 |
| NT2RP4000023 | F-NT2RP4000023 | 0.33 |
| NT2RP4000035 | F-NT2RP4000035 | 0.56 |
| NT2RP4000102 | F-NT2RP4000102 | 0.38 |
| NT2RP4000167 | F-NT2RP4000167 | 0.42 |
| NT2RP4000214 | F-NT2RP4000214 | 0.33 |
| NT2RP4000218 | F-NT2RP4000218 | 0.37 |
| NT2RP4000424 | F-NT2RP4000424 | 0.48 |
| NT2RP4000915 | F-NT2RP4000915 | 0.37 |
| NT2RP4002075 | F-NT2RP4002075 | 0.43 |
| OVARC1000017 | F-OVARC1000017 | 0.14 |
| OVARC1000068 | F-OVARC1000068 | 0.17 |
| OVARC1000085 | F-OVARC1000085 | 0.46 |
| OVARC1000092 | F-OVARC1000092 | 0.58 |
| OVARC1000145 | F-OVARC1000145 | 0.53 |
| OVARC1000414 | F-OVARC1000414 | 0.40 |
| OVARC1000486 | F-OVARC1000486 | 0.15 |
| OVARC1000496 | F-OVARC1000496 | 0.36 |
| OVARC1000526 | F-OVARC1000526 | 0.33 |
| OVARC1000948 | F-OVARC1000948 | 0.71 |
| OVARC1001011 | F-OVARC1001011 | 0.42 |
| OVARC1001240 | F-OVARC1001240 | 0.14 |
| OVARC1001600 | F-OVARC1001600 | 0.37 |
| OVARC1001805 | F-OVARC1001805 | 0.51 |
| OVARC1001813 | F-OVARC1001813 | 0.58 |
| OVARC1001846 | F-OVARC1001846 | 0.59 |
| PLACE1000540 | F-PLACE1000540 | 0.35 |
| PLACE1000599 | F-PLACE1000599 | 0.37 |
| PLACE1001088 | F-PLACE1001088 | 0.36 |
| PLACE1001323 | F-PLACE1001323 | 0.21 |
| PLACE1001377 | F-PLACE1001377 | 0.41 |
| PLACE1001440 | F-PLACE1001440 | 0.45 |
| PLACE1001517 | F-PLACE1001517 | 0.41 |
| PLACE1001672 | F-PLACE1001672 | 0.35 |
| PLACE1001705 | F-PLACE1001705 | 0.11 |
| PLACE1001756 | F-PLACE1001756 | 0.67 |
| PLACE1002157 | F-PLACE1002157 | 0.68 |
| PLACE1002205 | F-PLACE1002205 | 0.55 |
| PLACE1002227 | F-PLACE1002227 | 0.14 |
| PLACE1002259 | F-PLACE1002259 | 0.47 |
| PLACE1002319 | F-PLACE1002319 | 0.29 |
| PLACE1002399 | F-PLACE1002399 | 0.31 |
| PLACE1002477 | F-PLACE1002477 | 0.35 |
| PLACE1002500 | F-PLACE1002500 | 0.26 |
| PLACE1002553 | F-PLACE1002583 | 0.49 |
| PLACE1002604 | F-PLACE1002604 | 0.25 |
| PLACE1002772 | F-PLACE1002772 | 0.13 |
| PLACE1002853 | F-PLACE1002853 | 0.46 |
| PLACE1002968 | F-PLACE1002968 | 0.33 |
| PLACE1003238 | F-PLACE1003238 | 0.46 |
| PLACE1003420 | F-PLACE1003420 | 0.42 |
| PLACE1003478 | F-PLACE1003478 | 0.20 |
| PLACE1003566 | F-PLACE1003566 | 0.35 |
| PLACE1003593 | F-PLACE1003593 | 0.42 |
| PLACE1003618 | F-PLACE1003618 | 0.36 |
| PLACE1004274 | F-PLACE1004274 | 0.41 |
| PLACE1004681 | F-PLACE1004681 | 0.25 |
| PLACE1004716 | F-PLACE1004716 | 0.49 |
| PLACE1004773 | F-PLACE1004773 | 0.31 |
| PLACE1004815 | F-PLACE1004815 | 0.72 |
| PLACE1004836 | F-PLACE1004836 | 0.39 |
| PLACE1004913 | F-PLACE1004913 | 0.44 |
| PLACE1004979 | F-PLACE1004979 | 0.44 |
| PLACE1005052 | F-PLACE1005052 | 0.63 |
| PLACE1005086 | F-PLACE1005086 | 0.57 |
| PLACE1005108 | F-PLACE1005108 | 0.17 |
| PLACE1005128 | F-PLACE1005128 | 0.40 |
| PLACE1005176 | F-PLACE1005176 | 0.48 |
| PLACE1005467 | F-PLACE1005467 | 0.37 |
| PLACE1005639 | F-PLACE1005639 | 0.33 |
| PLACE1005850 | F-PLACE1005850 | 0.54 |
| PLACE1005932 | F-PLACE1005932 | 0.20 |
| PLACE1006003 | F-PLACE1006003 | 0.71 |
| PLACE1006017 | F-PLACE1006017 | 0.42 |
| PLACE1006288 | F-PLACE1006288 | 0.34 |
| PLACE1006318 | F-PLACE1006318 | 0.22 |
| PLACE1006368 | F-PLACE1006368 | 0.10 |
| PLACE1006371 | F-PLACE1006371 | 0.43 |
| PLACE1006506 | F-PLACE1006506 | 0.28 |
| PLACE1006629 | F-PLACE1006629 | 0.44 |
| PLACE1006795 | F-PLACE1006795 | 0.35 |
| PLACE1006904 | F-PLACE1006904 | 0.20 |
| PLACE1007478 | F-PLACE1007478 | 0.70 |
| PLACE1007557 | F-PLACE1007557 | 0.17 |
| PLACE1007743 | F-PLACE1007743 | 0.28 |
| PLACE1007829 | F-PLACE1007829 | 0.16 |
| PLACE1007877 | F-PLACE1007877 | 0.16 |
| PLACE1008181 | F-PLACE1008181 | 0.39 |
| PLACE1008330 | F-PLACE1008330 | 0.86 |
| PLACE1008584 | F-PLACE1008584 | 0.61 |
| PLACE1008630 | F-PLACE1008630 | 0.09 |
| PLACE1008715 | F-PLACE1008715 | 0.36 |
| PLACE1008851 | F-PLACE1008851 | 0.39 |
| PLACE1008941 | F-PLACE1008941 | 0.42 |
| PLACE1009039 | F-PLACE1009039 | 0.43 |
| PLACE1009048 | F-PLACE1009048 | 0.24 |
| PLACE1009493 | F-PLACE1009493 | 0.35 |
| PLACE1009539 | F-PLACE1009539 | 0.31 |
| PLACE1009637 | F-PLACE1009637 | 0.58 |
| PLACE1009925 | F-PLACE1009925 | 0.17 |
| PLACE1009947 | F-PLACE1009947 | 0.42 |
| PLACE1010231 | F-PLACE1010231 | 0.36 |
| PLACE1010562 | F-PLACE1010562 | 0.63 |
| PLACE1010579 | F-PLACE1010579 | 0.42 |
| PLACE1010739 | F-PLACE1010739 | 0.49 |
| PLACE1010802 | F-PLACE1010802 | 0.41 |
| PLACE1010896 | F-PLACE1010896 | 0.47 |
| PLACE1011032 | F-PLACE1011032 | 0.46 |
| PLACE1011109 | F-PLACE1011109 | 0.19 |
| PLACE1011185 | F-PLACE1011185 | 0.66 |
| PLACE1011452 | F-PLACE1011452 | 0.72 |
| PLACE1011465 | F-PLACE1011465 | 0.51 |
| PLACE1011492 | F-PLACE1011492 | 0.19 |
| PLACE1011520 | F-PLACE1011520 | 0.54 |
| PLACE1011567 | F-PLACE1011567 | 0.51 |
| PLACE1011643 | F-PLACE1011643 | 0.21 |
| PLACE1011719 | F-PLACE1011719 | 0.55 |
| PLACE1011749 | F-PLACE1011749 | 0.24 |
| PLACE2000011 | F-PLACE2000011 | 0.48 |
| PLACE2000017 | F-PLACE2000017 | 0.34 |
| PLACE2000061 | F-PLACE2000061 | 0.34 |
| PLACE2000187 | F-PLACE2000187 | 0.40 |
| PLACE2000216 | F-PLACE2000216 | 0.32 |
| PLACE2000335 | F-PLACE2000335 | 0.78 |
| PLACE2000347 | F-PLACE2000347 | 0.36 |
| PLACE2000366 | F-PLACE2000366 | 0.33 |
| PLACE2000394 | F-PLACE2000394 | 0.54 |
| PLACE2000398 | F-PLACE2000398 | 0.44 |
| PLACE2000425 | F-PLACE2000425 | 0.47 |
| PLACE2000450 | F-PLACE2000450 | 0.53 |
| PLACE2000477 | F-PLACE2000477 | 0.36 |
| PLACE3000119 | F-PLACE3000119 | 0.40 |
| PLACE3000207 | F-PLACE3000207 | 0.32 |
| PLACE3000230 | F-PLACE3000230 | 0.51 |
| PLACE3000271 | F-PLACE3000271 | 0.41 |
| PLACE3000373 | F-PLACE3000373 | 0.37 |
| PLACE3000399 | F-PLACE3000399 | 0.42 |
| PLACE3000401 | F-PLACE3000401 | 0.37 |
| PLACE3000406 | F-PLACE3000406 | 0.46 |
| PLACE4000247 | F-PLACE4000247 | 0.64 |
| PLACE4000320 | F-PLACE4000320 | 0.36 |
| PLACE4000344 | F-PLACE4000344 | 0.31 |
| PLACE4000367 | F-PLACE4000367 | 0.32 |
| PLACE4000401 | F-PLACE4000401 | 0.54 |
| PLACE4000548 | F-PLACE4000548 | 0.26 |
| THYRO1000111 | F-THYRO1000111 | 0.53 |
| THYRO1000129 | F-THYRO1000129 | 0.45 |
| THYRO1000187 | F-THYRO1000187 | 0.46 |
| THYRO1000279 | F-THYRO1000279 | 0.09 |
| THYRO1000484 | F-THYRO1000484 | 0.36 |
| THYRO1000596 | F-THYRO1000596 | 0.47 |
| THYRO1000625 | F-THYRO1000625 | 0.59 |
| THYRO1000793 | F-THYRO1000793 | 0.17 |
| THYRO1000815 | F-THYRO1000815 | 0.58 |
| THYRO1000865 | F-THYRO1000865 | 0.55 |
| THYRO1001003 | F-THYRO1001003 | 0.34 |
| THYRO1001031 | F-THYRO1001031 | 0.43 |
| THYRO1001133 | F-THYRO1001133 | 0.52 |
| THYRO1001321 | F-THYRO1001321 | 0.37 |
| THYRO1001401 | F-THYRO1001401 | 0.36 |
| THYRO1001426 | F-THYRO1001426 | 0.32 |
| THYRO1001434 | F-THYRO1001434 | 0.39 |
| THYRO1001559 | F-THYRO1001559 | 0.45 |
| THYRO1001570 | F-THYRO1001570 | 0.35 |
| THYRO1001706 | F-THYRO1001706 | 0.45 |
| THYRO1001746 | F-THYRO1001746 | 0.43 |
| THYRO1001772 | F-THYRO1001772 | 0.37 |
| THYRO1001907 | F-THYRO1001907 | 0.33 |
| Y79AA1000033 | F-Y79AA1000033 | 0.53 |
| Y79AA1000346 | F-Y79AA1000346 | 0.53 |
| Y79AA1000410 | F-Y79AA1000410 | 0.13 |
| Y79AA1000805 | F-Y79AA1000805 | 0.32 |
| Y79AA1001692 | F-Y79AA1001692 | 0.45 |
| Y79AA1002103 | F-Y79AA1002103 | 0.15 |
| Y79AA1002220 | F-Y79AA1002220 | 0.49 |

### EXAMPLE 13

### Full-Length Sequence Analysis and Homology Search

[0519] Full-length sequence was determined for each selected cDNA clones. The nucleotide sequence determination was performed mainly by the dye-terminator method using custom synthesized DNA primers according to the primer walking procedure (custom synthesized DNA primers were used for sequencing; sequencing reaction was performed with DNA sequencing reagent supplied by PE Biosystems according to the supplier's manual; and the samples were analyzed in an automatic sequencer made by the same supplier). Sequence determination of some clones was carried out in the same manner but using a Licor DNA sequencer. Overlapping partial nucleotide sequences, which were obtained by the above-described method, were assembled together to determine a full-length nucleotide sequence. Amino acid sequences were then deduced from the determined full-length nucleotide sequences. However, amino acid sequence is not shown for a clone of which coding region was hard to be deduced or of which amino acid sequence has less than 100 amino acid residues. SEQ ID NOs corresponding to the respective clones are indicated in Table 350 and Table 351.

[0520] GenBank, Swiss-Prot and UniGene were searched for the determined nucleotide sequences by BLAST analysis. Matching data of cDNA clone which exhibits higher homology and of which functions are easily predicted based on the nucleotide sequences and the deduced amino acid sequences are selected from the BLAST analysis matching data with P value of 10⁻⁴ or less. The matching data selected are listed herein. The results of homology search 6, 12, 13, and 14 are indicated in the last part of this specification. However, there are some clones that did not match the criteria for judgment and such matching data of BLAST analysis are not shown herein.

### EXAMPLE 14

### Novel Full-Length cDNA Clone Obtained from a cDNA Library Prepared by Oligo-Capping Method

[0521] A cDNA clone, NT2RP4002298, was obtained from a cDNA library, NT2RP4 (see Example 1), prepared by oligo-capping method. Analysis of the entire nucleotide sequence of the clone has revealed that the clone encodes a novel protein consisting of 775 amino acids. The ATGpr1 score at the initiation codon of the amino acid sequence is 0.16, and therefore, the fullness ratio is low. However, the sequence can be full-length.

[0522] The full-length nucleotide sequence of NT2RP4002298 is shown in SEQ ID NO: 12370, and the deduced amino acid sequence encoded by the clone NT2RP4002298 is shown in SEQ ID NO: 12371.

### EXAMPLE 15

### Gene Expression Analysis with Hybridization Using High Density DNA Filter

[0523] Nylon membrane for DNA spotting was prepared according to the following procedure. E. coli was cultured in each well of a 96-well plate (in a LB medium at 37° C. for 16 hours). A small aliquot of each culture was suspended in 10 μl of sterile water in a well of a 96-well plate. The plate was heated at 100° C. for 10 minutes. Then the boiled samples were analyzed by PCR reaction. PCR was performed in a 20 μl solution by using TaKaRa PCR Amplification Kit (Takara) according to the supplier's protocol. Primers used for the amplification of an insert cDNA in a plasmid were a pair of sequencing primers, ME761FW (5′ tacggaagtgttacttctgc 3′/SEQ ID NO: 13290) and ME1250RV (5′ tgtgggaggttttttctcta 3′/ SEQ ID NO: 13291), or a pair of primers, M13M4 (5′ gttttcccagtcacgac 3′/SEQ ID NO: 13292) and M13RV (5′ caggaaacagctatgac 3′/SEQ ID NO: 13293). PCR reaction was performed in a thermal cycler, GeneAmp System 9600 (PE Biosystems). The cycling profile consisted of pre-heat at 95° C. for 5 minutes; 10 cycles of denaturation at 95° C. for 10 seconds, and annealing/extension at 68° C. for 1 minute; 20 cycles of denaturation at 98° C. for 20 seconds and annealing/extension at 60° C. for 3 minutes; and final extension at 72° C. for 10 minutes. After the PCR reaction, the 20 μl reaction solution was loaded onto a 1% agarose gel and fractionated by electrophoresis. DNA on the gel was stained with ethidium bromide to confirm the amplification of cDNA. When cDNAs were barely amplified by PCR, plasmids containing the corresponding insert cDNAs were prepared by the alkali-extraction method (J. Sambrook, E. F., Fritsh, & T. Maniatis, “Molecular Cloning, A laboratory manual/2nd edition, Cold Spring Harbor Laboratory Press, 1989).

[0524] Preparation of DNA array was carried out by the following procedure. An Aliquot of a DNA solution was added in each well of a 384-well plate. DNA was spotted onto a nylon membrane (Boehringer) by using a 384-pin tool of Biomek 2000 Laboratory Automation Sysytem (Beckman-Coulter). Specifically, the 384-well plate containing the DNA was placed under the 384-pin tool. The independent 384 needles were simultaneously dipped into the DNA solution for DNA deposition. The needles were gently pressed onto a nylon membrane and the DNA deposited at the tips of needles was spotted onto the membrane. Denaturation of the spotted DNA and immobilization of the DNA on the nylon membrane were carried out according to usual manners (J. Sambrook, E. F., Fritsh, & T. Maniatis, “Molecular Cloning, A laboratory manual/2nd edition, Cold Spring Harbor Laboratory Press, 1989).

[0525] Hybridization probe used was radioisotope-labeled 1st strand cDNA. The 1st strand cDNA synthesis was performed by using Thermoscript™ RT-PCR System (GIBCO). Specifically, the 1st strand cDNA was synthesized by using 1.5 μg mRNAs from various human tissues (Clontech), 1 μl aliquots of 50 μM Oligo(dT)20 and 50 μCi [α³³P]dATP according to an attached protocol. Probe purification was carried out by using ProbeQuant™ G-50 micro column (Amersham-Pharmacia Biotech) according to an attached protocol. In the next step, 2 units of E. coli RNasH were added to the reaction mixture. The mixture was incubated at room temperature for 10 minutes and then 100 μg of human COT-1 DNA (GIBCO) was added thereto. The mixture was incubated at 97° C. for 10 minutes and then was allowed to stand on ice to give hybridization probe.

[0526] Hybridization of the radioisotope-labeled probe to the DNA array was performed in a usual manner (J. Sambrook, E. F., Fritsh, & T. Maniatis, Molecular Cloning, A laboratory manual/2nd edition, Cold Spring Harbor Laboratory Press, 1989). The membrane was washed as follows: the nylon membrane was incubated in Washing solution 1 (2×SSC, 1% SDS) at room temperature (about 26° C.) for 20 minutes and this washing was repeated 3 times; then the membrane was washed 3 times by incubating it in Washing solution 2 (0.1×SSC, 1% SDS) at 65° C. for 20 minutes. Autoradiography was performed by using an image plate for BAS2000 (Fuji Photo Film Co., Ltd.). Specifically, the nylon membrane with probe hybridized thereon was wrapped with a piece of Saran Wrap and brought into tight contact with the image plate on the light-sensitive surface. The membrane with the image plate was placed in an imaging cassette for radioisotope and allowed to stand in dark place for 4 hours. The radioactivity recorded on the image plate was analyzed by using BAS2000 (Fuji Photo Film Co., Ltd.). The activity was subjected to electronic conversion and recorded as an image file of autoradiogram. The signal intensity of each DNA spot was analyzed by using Visage High Density Grid Analysis Systems (Genomic Solutions Inc.). The signal intensity was converted into numerical data. The data were taken by duplicated measurements. The reproducibility was assessed by comparing the signal intensities of the corresponding spots on the duplicated DNA filters that were hybridized to a single DNA probe (FIG. 2). The ratio between the corresponding spots falls within a range of 2 or less in 95% of entire spots and the correlation coefficient is r=0.97. Thus the reproducibility is assumed to be satisfactory.

[0527] The detection sensitivity in gene expression analysis was estimated by examining increases in the signal intensity of probe concentration-dependent spot in hybridization using a probe complementary to the DNA spotted on the nylon membrane. DNA used was PLACE1008092 (same as DNA deposited in GenBank under an Accession No. AF107253). The DNA array with DNA of PLACE1008092 was prepared according to the above-mentioned method. The probe used was prepared as follows: mRNA was synthesized in vitro from the clone, PLACE1008092. By using this mRNA as a template, radioisotope-labeled 1st strand cDNA was synthesized in the same manner as described above, and the cDNA was used as the probe. The cDNA PLACE1008092 was inserted into pBluescript SK(−), of which T7 promoter was ligated to the 5′ end of the cDNA, to give a plasmid for in vitro synthesis of the mRNA from PLACE1008092. Specifically, the PLACE1008092 insert was cut out from pME18SFL3 carrying the cDNA at a DraIII site thereof by XhoI digestion. The resulting PLACE1008092 fragment was ligated to XhoI-predigested pBluescript SK(−) by using DNA ligation kit ver. 2 (Takara). The in-vitro mRNA synthesis from PLACE1008092 inserted in pBluescript SK(−) was carried out by using Ampliscribe™ T7 high yield transcription kit (Epicentre technologies). Hybridization and the analysis of signal intensity of each DNA spot were conducted by the same methods as described above. When the probe concentration is 1×10⁷ μg/ml or less, there was no increase of signal intensity proportional to the probe concentration. Therefore it was assumed to be difficult to compare the signals with one another in the concentration range. Thus the spots with the intensity of 40 or less were indiscriminately taken as low-level signals (FIG. 3). Within a concentration of the probe ranging from 1×10⁷ μg/ml to 0.1 μg/ml, the signal was found to increase in a probe concentration-dependent manner. The detection limit was then assumed to be 1:100,000 in a ratio of mRNA expression level in a sample.

[0528] Tables 12-168 (also containing clones with no description in Examples) show the expression of each cDNA in human normal tissues (heart, lung, pituitary gland, thymus, brain, kidney, liver and spleen). The expression levels are indicated by numerical values of 0-10,000. Genes that were expressed in at least a single tissue are indicated below by the corresponding clone names:

[0529] HEMBA1000012, HEMBA1000020, HEMBA1000030, HEMBA1000042, HEMBA1000046, HEMBA1000076, HEMBA1000111, HEMBA1000129, HEMBA1000150, HEMBA1000156, HEMBA1000158, HEMBA1000168, HEMBA1000185, HEMBA1000216, HEMBA1000227, HEMBA1000231, HEMBA1000243, HEMBA1000244, HEMBA1000280, HEMBA1000282, HEMBA1000288, HEMBA1000303, HEMBA1000304, HEMBA1000327, HEMBA1000338, HEMBA1000351, HEMBA1000355, HEMBA1000356, HEMBA1000357, HEMBA1000366, HEMBA1000369, HEMBA1000376, HEMBA1000387, HEMBA1000392, HEMBA1000396, HEMBA1000411, HEMBA1000422, HEMBA1000428, HEMBA1000456, HEMBA1000459, HEMBA1000469, HEMBA1000488, HEMBA1000491, HEMBA1000501, HEMBA1000505, HEMBA1000508, HEMBA1000519, HEMBA1000523, HEMBA1000534, HEMBA1000540, HEMBA1000542, HEMBA1000545, HEMBA1000557, HEMBA1000561, HEMBA1000568, HEMBA1000569, HEMBA1000575, HEMBA1000588, HEMBA1000591, HEMBA1000604, HEMBA1000622, HEMBA1000636, HEMBA1000655, HEMBA1000657, HEMBA1000673, HEMBA1000682, HEMBA1000702, HEMBA1000705, HEMBA1000726, HEMBA1000749, HEMBA1000752, HEMBA1000769, HEMBA1000774, HEMBA1000791, HEMBA1000827, HEMBA1000843, HEMBA1000852, HEMBA1000870, HEMBA1000872, HEMBA1000876, HEMBA1000908, HEMBA1000910, HEMBA1000918, HEMBA1000919, HEMBA1000934, HEMBA1000942, HEMBA1000960, HEMBA1000971, HEMBA1000972, HEMBA1000975, HEMBA1000986, HEMBA1000991, HEMBA1001007, HEMBA1001008, HEMBA1001017, HEMBA1001020, HEMBA1001051, HEMBA1001059, HEMBA1001060, HEMBA1001077, HEMBA1001080, HEMBA1001085, HEMBA1001088, HEMBA1001109, HEMBA1001121, HEMBA1001123, HEMBA1001133, HEMBA1001137, HEMBA1001140, HEMBA1001172, HEMBA1001197, HEMBA1001208, HEMBA1001213, HEMBA1001226, HEMBA1001235, HEMBA1001265, HEMBA1001281, HEMBA1001286, HEMBA1001289, HEMBA1001294, HEMBA1001299, HEMBA1001302, HEMBA1001303, HEMBA1001310, HEMBA1001326, HEMBA1001330, HEMBA1001351, HEMBA1001375, HEMBA1001377, HEMBA1001387, HEMBA1001388, HEMBA1001398, HEMBA1001405, HEMBA1001413, HEMBA1001415, HEMBA1001432, HEMBA1001433, HEMBA1001435, HEMBA1001446, HEMBA1001450, HEMBA1001454, HEMBA1001463, HEMBA1001476, HEMBA1001497, HEMBA1001510, HEMBA1001515, HEMBA1001517, HEMBA1001526, HEMBA1001533, HEMBA1001557, HEMBA1001566, HEMBA1001569, HEMBA1001570, HEMBA1001579, HEMBA1001581, HEMBA1001589, HEMBA1001595, HEMBA1001608, HEMBA1001620, HEMBA1001636, HEMBA1001640, HEMBA1001647, HEMBA1001651, HEMBA1001655, HEMBA1001661, HEMBA1001678, HEMBA1001709, HEMBA1001712, HEMBA1001714, HEMBA1001718, HEMBA1001731, HEMBA1001734, HEMBA1001745, HEMBA1001761, HEMBA1001781, HEMBA1001784, HEMBA1001791, HEMBA1001804, HEMBA1001808, HEMBA1001809, HEMBA1001815, HEMBA1001822, HEMBA1001824, HEMBA1001844, HEMBA1001847, HEMBA1001864, HEMBA1001866, HEMBA1001869, HEMBA1001888, HEMBA1001896, HEMBA1001910, HEMBA1001912, HEMBA1001913, HEMBA1001939, HEMBA1001940, HEMBA1001964, HEMBA1001967, HEMBA1001987, HEMBA1001991, HEMBA1002003, HEMBA1002008, HEMBA1002018, HEMBA1002035, HEMBA1002049, HEMBA1002092, HEMBA1002100, HEMBA1002102, HEMBA1002113, HEMBA1002119, HEMBA1002125, HEMBA1002144, HEMBA1002150, HEMBA1002151, HEMBA1002160, HEMBA1002161, HEMBA1002162, HEMBA1002166, HEMBA1002177, HEMBA1002185, HEMBA1002189, HEMBA1002191, HEMBA1002226, HEMBA1002229, HEMBA1002237, HEMBA1002241, HEMBA1002265, HEMBA1002267, HEMBA1002270, HEMBA1002328, HEMBA1002337, HEMBA1002341, HEMBA1002363, HEMBA1002381, HEMBA1002389, HEMBA1002417, HEMBA1002419, HEMBA1002439, HEMBA1002458, HEMBA1002462, HEMBA1002469, HEMBA1002477, HEMBA1002486, HEMBA1002495, HEMBA1002498, HEMBA1002503, HEMBA1002508, HEMBA1002513, HEMBA1002515, HEMBA1002538, HEMBA1002542, HEMBA1002552, HEMBA1002558, HEMBA1002561, HEMBA1002569, HEMBA1002590, HEMBA1002592, HEMBA1002609, HEMBA1002624, HEMBA1002629, HEMBA1002645, HEMBA1002659, HEMBA1002661, HEMBA1002678, HEMBA1002679, HEMBA1002696, HEMBA1002703, HEMBA1002712, HEMBA1002728, HEMBA1002730, HEMBA1002746, HEMBA1002748, HEMBA1002750, HEMBA1002768, HEMBA1002777, HEMBA1002779, HEMBA1002780, HEMBA1002794, HEMBA1002810, HEMBA1002816, HEMBA1002818, HEMBA1002826, HEMBA1002833, HEMBA1002863, HEMBA1002876, HEMBA1002896, HEMBA1002921, HEMBA1002924, HEMBA1002934, HEMBA1002935, HEMBA1002944, HEMBA1002968, HEMBA1002970, HEMBA1002971, HEMBA1002973, HEMBA1002997, HEMBA1003021, HEMBA1003033, HEMBA1003034, HEMBA1003037, HEMBA1003041, HEMBA1003046, HEMBA1003067, HEMBA1003071, HEMBA1003078, HEMBA1003079, HEMBA1003083, HEMBA1003086, HEMBA1003098, HEMBA1003129, HEMBA1003133, HEMBA1003136, HEMBA1003142, HEMBA1003148, HEMBA1003166, HEMBA1003175, HEMBA1003179, HEMBA1003199, HEMBA1003202, HEMBA1003204, HEMBA1003212, HEMBA1003220, HEMBA1003229, HEMBA1003235, HEMBA1003257, HEMBA1003273, HEMBA1003276, HEMBA1003278, HEMBA1003281, HEMBA1003286, HEMBA1003296, HEMBA1003314, HEMBA1003322, HEMBA1003327, HEMBA1003328, HEMBA1003330, HEMBA1003348, HEMBA1003370, HEMBA1003373, HEMBA1003376, HEMBA1003380, HEMBA1003384, HEMBA1003403, HEMBA1003408, HEMBA1003418, HEMBA1003447, HEMBA1003461, HEMBA1003463, HEMBA1003480, HEMBA1003528, HEMBA1003531, HEMBA1003538, HEMBA1003556, HEMBA1003571, HEMBA1003581, HEMBA1003591, HEMBA1003595, HEMBA1003597, HEMBA1003598, HEMBA1003615, HEMBA1003617, HEMBA1003621, HEMBA1003637, HEMBA1003640, HEMBA1003645, HEMBA1003656, HEMBA1003667, HEMBA1003680, HEMBA1003690, HEMBA1003692, HEMBA1003711, HEMBA1003714, HEMBA1003715, HEMBA1003720, HEMBA1003725, HEMBA1003729, HEMBA1003733, HEMBA1003742, HEMBA1003758, HEMBA1003760, HEMBA1003773, HEMBA1003803, HEMBA1003804, HEMBA1003805, HEMBA1003827, HEMBA1003836, HEMBA1003838, HEMBA1003864, HEMBA1003879, HEMBA1003880, HEMBA1003885, HEMBA1003893, HEMBA1003902, HEMBA1003926, HEMBA1003937, HEMBA1003942, HEMBA1003958, HEMBA1003978, HEMBA1003987, HEMBA1003989, HEMBA1004011, HEMBA1004012, HEMBA1004024, HEMBA1004048, HEMBA1004049, HEMBA1004056, HEMBA1004074, HEMBA1004086, HEMBA1004097, HEMBA1004111, HEMBA1004131, HEMBA1004132, HEMBA1004133, HEMBA1004138, HEMBA1004146, HEMBA1004164, HEMBA1004200, HEMBA1004203, HEMBA1004225, HEMBA1004227, HEMBA1004238, HEMBA1004246, HEMBA1004267, HEMBA1004274, HEMBA1004275, HEMBA1004289, HEMBA1004306, HEMBA1004312, HEMBA1004321, HEMBA1004323, HEMBA1004327, HEMBA1004335, HEMBA1004341, HEMBA1004353, HEMBA1004354, HEMBA1004356, HEMBA1004396, HEMBA1004405, HEMBA1004408, HEMBA1004429, HEMBA1004433, HEMBA1004460, HEMBA1004461, HEMBA1004479, HEMBA1004499, HEMBA1004506, HEMBA1004507, HEMBA1004509, HEMBA1004534, HEMBA1004538, HEMBA1004542, HEMBA1004554, HEMBA1004560, HEMBA1004577, HEMBA1004586, HEMBA1004596, HEMBA1004604, HEMBA1004610, HEMBA1004617, HEMBA1004629, HEMBA1004669, HEMBA1004670, HEMBA1004672, HEMBA1004697, HEMBA1004705, HEMBA1004709, HEMBA1004711, HEMBA1004725, HEMBA1004736, HEMBA1004748, HEMBA1004751, HEMBA1004752, HEMBA1004753, HEMBA1004756, HEMBA1004758, HEMBA1004763, HEMBA1004771, HEMBA1004778, HEMBA1004803, HEMBA1004816, HEMBA1004847, HEMBA1004850, HEMBA1004863, HEMBA1004864, HEMBA1004865, HEMBA1004880, HEMBA1004909, HEMBA1004918, HEMBA1004923, HEMBA1004930, HEMBA1004933, HEMBA1004934, HEMBA1004944, HEMBA1004954, HEMBA1004960, HEMBA1004972, HEMBA1004980, HEMBA1005008, HEMBA1005019, HEMBA1005035, HEMBA1005039, HEMBA1005047, HEMBA1005050, HEMBA1005075, HEMBA1005079, HEMBA1005101, HEMBA1005113, HEMBA1005123, HEMBA1005133, HEMBA1005149, HEMBA1005152, HEMBA1005201, HEMBA1005202, HEMBA1005206, HEMBA1005223, HEMBA1005241, HEMBA1005244, HEMBA1005251, HEMBA1005252, HEMBA1005275, HEMBA1005296, HEMBA1005304, HEMBA1005311, HEMBA1005315, HEMBA1005331, HEMBA1005338, HEMBA1005353, HEMBA1005359, HEMBA1005367, HEMBA1005374, HEMBA1005382, HEMBA1005389, HEMBA1005403, HEMBA1005408, HEMBA1005411, HEMBA1005423, HEMBA1005443, HEMBA1005447, HEMBA1005468, HEMBA1005469, HEMBA1005472, HEMBA1005474, HEMBA1005475, HEMBA1005500, HEMBA1005511, HEMBA1005513, HEMBA1005518, HEMBA1005520, HEMBA1005526, HEMBA1005530, HEMBA1005548, HEMBA1005552, HEMBA1005558, HEMBA1005568, HEMBA1005570, HEMBA1005576, HEMBA1005577, HEMBA1005581, HEMBA1005583, HEMBA1005588, HEMBA1005593, HEMBA1005595, HEMBA1005606, HEMBA1005609, HEMBA1005616, HEMBA1005627, HEMBA1005632, HEMBA1005634, HEMBA1005670, HEMBA1005679, HEMBA1005680, HEMBA1005685, HEMBA1005705, HEMBA1005717, HEMBA1005732, HEMBA1005765, HEMBA1005780, HEMBA1005813, HEMBA1005815, HEMBA1005822, HEMBA1005829, HEMBA1005834, HEMBA1005852, HEMBA1005853, HEMBA1005894, HEMBA1005911, HEMBA1005921, HEMBA1005931, HEMBA1005934, HEMBA1005962, HEMBA1005990, HEMBA1005991, HEMBA1005999, HEMBA1006002, HEMBA1006005, HEMBA1006031, HEMBA1006036, HEMBA1006042, HEMBA1006081, HEMBA1006090, HEMBA1006091, HEMBA1006100, HEMBA1006108, HEMBA1006121, HEMBA1006124, HEMBA1006138, HEMBA1006142, HEMBA1006155, HEMBA1006173, HEMBA1006182, HEMBA1006235, HEMBA1006248, HEMBA1006252, HEMBA1006253, HEMBA1006259, HEMBA1006278, HEMBA1006283, HEMBA1006309, HEMBA1006310, HEMBA1006328, HEMBA1006344, HEMBA1006349, HEMBA1006359, HEMBA1006364, HEMBA1006377, HEMBA1006380, HEMBA1006381, HEMBA1006398, HEMBA1006416, HEMBA1006419, HEMBA1006421, HEMBA1006426, HEMBA1006438, HEMBA1006445, HEMBA1006461, HEMBA1006483, HEMBA1006485, HEMBA1006486, HEMBA1006497, HEMBA1006502, HEMBA1006546, HEMBA1006562, HEMBA1006569, HEMBA1006595, HEMBA1006597, HEMBA1006612, HEMBA1006617, HEMBA1006624, HEMBA1006631, HEMBA1006635, HEMBA1006639, HEMBA1006643, HEMBA1006648, HEMBA1006652, HEMBA1006653, HEMBA1006659, HEMBA1006674, HEMBA1006676, HEMBA1006695, HEMBA1006696, HEMBA1006708, HEMBA1006709, HEMBA1006717, HEMBA1006737, HEMBA1006744, HEMBA1006754, HEMBA1006758, HEMBA1006779, HEMBA1006780, HEMBA1006795, HEMBA1006796, HEMBA1006807, HEMBA1006821, HEMBA1006824, HEMBA1006832, HEMBA1006849, HEMBA1006865, HEMBA1006877, HEMBA1006885, HEMBA1006900, HEMBA1006914, HEMBA1006921, HEMBA1006926, HEMBA1006936, HEMBA1006941, HEMBA1006949, HEMBA1006973, HEMBA1006993, HEMBA1007002, HEMBA1007045, HEMBA1007051, HEMBA1007052, HEMBA1007062, HEMBA1007066, HEMBA1007073, HEMBA1007078, HEMBA1007080, HEMBA1007085, HEMBA1007087, HEMBA1007113, HEMBA1007121, HEMBA1007129, HEMBA1007147, HEMBA1007149, HEMBA1007151, HEMBA1007174, HEMBA1007178, HEMBA1007194, HEMBA1007203, HEMBA1007206, HEMBA1007224, HEMBA1007243, HEMBA1007256, HEMBA1007267, HEMBA1007273, HEMBA1007279, HEMBA1007288, HEMBA1007300, HEMBA1007301, HEMBA1007320, HEMBA1007322, HEMBA1007327, HEMBA1007341, HEMBA1007347, HEMBB1000005, HEMBB1000008, HEMBB1000018, HEMBB1000024, HEMBB1000025, HEMBB1000030, HEMBB1000036, HEMBB1000037, HEMBB1000039, HEMBB1000044, HEMBB1000050, HEMBB1000054, HEMBB1000055, HEMBB1000059, HEMBB1000083, HEMBB1000089, HEMBB1000099, HEMBB1000103, HEMBB1000113, HEMBB1000119, HEMBB1000136, HEMBB1000141, HEMBB1000144, HEMBB1000173, HEMBB1000198, HEMBB1000215, HEMBB1000217, HEMBB1000218, HEMBB1000226, HEMBB1000240, HEMBB1000244, HEMBB1000258, HEMBB1000264, HEMBB1000266, HEMBB1000274, HEMBB1000307, HEMBB1000312, HEMBB1000317, HEMBB1000318, HEMBB1000336, HEMBB1000337, HEMBB1000338, HEMBB1000339, HEMBB1000341, HEMBB1000343, HEMBB1000354, HEMBB1000369, HEMBB1000374, HEMBB1000376, HEMBB1000391, HEMBB1000402, HEMBB1000420, HEMBB1000434, HEMBB1000438, HEMBB1000441, HEMBB1000455, HEMBB1000472, HEMBB1000480, HEMBB1000490, HEMBB1000491, HEMBB1000493, HEMBB1000510, HEMBB1000523, HEMBB1000530, HEMBB1000550, HEMBB1000554, HEMBB1000556, HEMBB1000564, HEMBB1000573, HEMBB1000575, HEMBB1000586, HEMBB1000589, HEMBB1000591, HEMBB1000593, HEMBB1000598, HEMBB1000623, HEMBB1000630, HEMBB1000631, HEMBB1000632, HEMBB1000637, HEMBB1000638, HEMBB1000643, HEMBB1000649, HEMBB1000652, HEMBB1000671, HEMBB1000684, HEMBB1000693, HEMBB1000705, HEMBB1000706, HEMBB1000709, HEMBB1000726, HEMBB1000738, HEMBB1000749, HEMBB1000763, HEMBB1000770, HEMBB1000781, HEMBB1000790, HEMBB1000807, HEMBB1000810, HEMBB1000821, HEMBB1000826, HEMBB1000827, HEMBB1000835, HEMBB1000840, HEMBB1000848, HEMBB1000870, HEMBB1000887, HEMBB1000890, HEMBB1000893, HEMBB1000908, HEMBB1000910, HEMBB1000913, HEMBB1000915, HEMBB1000917, HEMBB1000927, HEMBB1000947, HEMBB1000959, HEMBB1000975, HEMBB1000991, HEMBB1000996, HEMBB1001014, HEMBB1001020, HEMBB1001024, HEMBB1001037, HEMBB1001047, HEMBB1001056, HEMBB1001058, HEMBB1001060, HEMBB1001063, HEMBB1001068, HEMBB1001096, HEMBB1001102, HEMBB1001105, HEMBB1001112, HEMBB1001114, HEMBB1001119, HEMBB1001126, HEMBB1001133, HEMBB1001137, HEMBB1001142, HEMBB1001151, HEMBB1001153, HEMBB1001169, HEMBB1001175, HEMBB1001177, HEMBB1001182, HEMBB1001208, HEMBB1001209, HEMBB1001210, HEMBB1001218, HEMBB1001234, HEMBB1001249, HEMBB1001253, HEMBB1001254, HEMBB1001267, HEMBB1001271, HEMBB1001282, HEMBB1001288, HEMBB1001289, HEMBB1001294, HEMBB1001302, HEMBB1001317, HEMBB1001337, HEMBB1001346, HEMBB1001348, HEMBB1001366, HEMBB1001367, HEMBB1001369, HEMBB1001380, HEMBB1001426, HEMBB1001429, HEMBB1001436, HEMBB1001449, HEMBB1001454, HEMBB1001458, HEMBB1001463, HEMBB1001500, HEMBB1001521, HEMBB1001527, HEMBB1001531, HEMBB1001535, HEMBB1001536, HEMBB1001537, HEMBB1001555, HEMBB1001562, HEMBB1001564, HEMBB1001565, HEMBB1001585, HEMBB1001586, HEMBB1001588, HEMBB1001618, HEMBB1001619, HEMBB1001635, HEMBB1001637, HEMBB1001653, HEMBB1001673, HEMBB1001704, HEMBB1001706, HEMBB1001707, HEMBB1001717, HEMBB1001735, HEMBB1001749, HEMBB1001753, HEMBB1001756, HEMBB1001802, HEMBB1001812, HEMBB1001816, HEMBB1001831, HEMBB1001834, HEMBB1001836, HEMBB1001850, HEMBB1001863, HEMBB1001869, HEMBB1001880, HEMBB1001906, HEMBB1001908, HEMBB1001910, HEMBB1001911, HEMBB1001915, HEMBB1001921, HEMBB1001922, HEMBB1001925, HEMBB1001944, HEMBB1001945, HEMBB1001947, HEMBB1001950, HEMBB1001952, HEMBB1001953, HEMBB1001957, HEMBB1001962, HEMBB1001967, HEMBB1001973, HEMBB1001983, HEMBB1001988, HEMBB1001990, HEMBB1001996, HEMBB1001997, HEMBB1002005, HEMBB1002015, HEMBB1002042, HEMBB1002043, HEMBB1002045, HEMBB1002049, HEMBB1002050, HEMBB1002068, HEMBB1002069, HEMBB1002092, HEMBB1002094, HEMBB1002115, HEMBB1002134, HEMBB1002139, HEMBB1002142, HEMBB1002152, HEMBB1002189, HEMBB1002190, HEMBB1002193, HEMBB1002217, HEMBB1002218, HEMBB1002232, HEMBB1002247, HEMBB1002249, HEMBB1002254, HEMBB1002280, HEMBB1002300, HEMBB1002306, HEMBB1002327, HEMBB1002329, HEMBB1002342, HEMBB1002358, HEMBB1002359, HEMBB1002364, HEMBB1002371, HEMBB1002381, HEMBB1002383, HEMBB1002387, HEMBB1002409, HEMBB1002415, HEMBB1002425, HEMBB1002442, HEMBB1002453, HEMBB1002457, HEMBB1002477, HEMBB1002489, HEMBB1002495, HEMBB1002520, HEMBB1002531, HEMBB1002534, HEMBB1002545, HEMBB1002556, HEMBB1002579, HEMBB1002582, HEMBB1002590, HEMBB1002596, HEMBB1002601, HEMBB1002603, HEMBB1002607, HEMBB1002610, HEMBB1002613, HEMBB1002614, HEMBB1002617, HEMBB1002623, HEMBB1002635, HEMBB1002664, HEMBB1002683, HEMBB1002684, HEMBB1002692, HEMBB1002697, HEMBB1002699, HEMBB1002712, MAMMA1000009, MAMMA1000019, MAMMA1000020, MAMMA1000025, MAMMA1000043, MAMMA1000045, MAMMA1000055, MAMMA1000057, MAMMA1000069, MAMMA1000084, MAMMA1000085, MAMMA1000092, MAMMA1000103, MAMMA1000117, MAMMA1000129, MAMMA1000133, MAMMA1000134, MAMMA1000139, MAMMA1000143, MAMMA1000155, MAMMA1000163, MAMMA1000171, MAMMA1000173, MAMMA1000183, MAMMA1000198, MAMMA1000227, MAMMA1000241, MAMMA1000251, MAMMA1000254, MAMMA1000257, MAMMA1000264, MAMMA1000266, MAMMA1000270, MAMMA1000277, MAMMA1000278, MAMMA1000279, MAMMA1000284, MAMMA1000287, MAMMA1000302, MAMMA1000307, MAMMA1000312, MAMMA1000313, MAMMA1000331, MAMMA1000339, MAMMA1000340, MAMMA1000348, MAMMA1000356, MAMMA1000360, MAMMA1000361, MAMMA1000372, MAMMA1000385, MAMMA1000388, MAMMA1000395, MAMMA1000402, MAMMA1000410, MAMMA1000413, MAMMA1000414, MAMMA1000416, MAMMA1000421, MAMMA1000422, MAMMA1000423, MAMMA1000429, MAMMA1000431, MAMMA1000444, MAMMA1000446, MAMMA1000472, MAMMA1000478, MAMMA1000483, MAMMA1000500, MAMMA1000501, MAMMA1000516, MAMMA1000522, MAMMA1000524, MAMMA1000559, MAMMA1000565, MAMMA1000567, MAMMA1000576, MAMMA1000583, MAMMA1000585, MAMMA1000594, MAMMA1000597, MAMMA1000605, MAMMA1000612, MAMMA1000623, MAMMA1000625, MAMMA1000643, MAMMA1000664, MAMMA1000669, MAMMA1000670, MAMMA1000672, MAMMA1000684, MAMMA1000696, MAMMA1000707, MAMMA1000713, MAMMA1000714, MAMMA1000718, MAMMA1000720, MAMMA1000723, MAMMA1000731, MAMMA1000732, MAMMA1000733, MAMMA1000734, MAMMA1000738, MAMMA1000744, MAMMA1000746, MAMMA1000752, MAMMA1000760, MAMMA1000761, MAMMA1000775, MAMMA1000776, MAMMA1000778, MAMMA1000782, MAMMA1000798, MAMMA1000802, MAMMA1000824, MAMMA1000831, MAMMA1000839, MAMMA1000841, MAMMA1000842, MAMMA1000851, MAMMA1000856, MAMMA1000859, MAMMA1000862, MAMMA1000863, MAMMA1000867, MAMMA1000875, MAMMA1000876, MAMMA1000877, MAMMA1000880, MAMMA1000883, MAMMA1000897, MAMMA1000905, MAMMA1000906, MAMMA1000908, MAMMA1000914, MAMMA1000921, MAMMA1000931, MAMMA1000940, MAMMA1000941, MAMMA1000942, MAMMA1000943, MAMMA1000956, MAMMA1000957, MAMMA1000962, MAMMA1000968, MAMMA1000975, MAMMA1000979, MAMMA1000987, MAMMA1000998, MAMMA1001003, MAMMA1001008, MAMMA1001021, MAMMA1001024, MAMMA1001035, MAMMA1001038, MAMMA1001041, MAMMA1001050, MAMMA1001059, MAMMA1001067, MAMMA1001073, MAMMA1001074, MAMMA1001078, MAMMA1001080, MAMMA1001082, MAMMA1001092, MAMMA1001105, MAMMA1001126, MAMMA1001133, MAMMA1001139, MAMMA1001143, MAMMA1001145, MAMMA1001154, MAMMA1001161, MAMMA1001162, MAMMA1001181, MAMMA1001186, MAMMA1001191, MAMMA1001198, MAMMA1001202, MAMMA1001203, MAMMA1001206, MAMMA1001215, MAMMA1001220, MAMMA1001243, MAMMA1001244, MAMMA1001249, MAMMA1001256, MAMMA1001259, MAMMA1001260, MAMMA1001268, MAMMA1001271, MAMMA1001274, MAMMA1001280, MAMMA1001292, MAMMA1001296, MAMMA1001298, MAMMA1001305, MAMMA1001324, MAMMA1001330, MAMMA1001341, MAMMA1001343, MAMMA1001346, MAMMA1001383, MAMMA1001388, MAMMA1001397, MAMMA1001408, MAMMA1001411, MAMMA1001419, MAMMA1001420, MAMMA1001435, MAMMA1001442, MAMMA1001446, MAMMA1001452, MAMMA1001465, MAMMA1001487, MAMMA1001501, MAMMA1001502, MAMMA1001522, MAMMA1001547, MAMMA1001551, MAMMA1001575, MAMMA1001576, MAMMA1001590, MAMMA1001600, MAMMA1001604, MAMMA1001606, MAMMA1001620, MAMMA1001630, MAMMA1001633, MAMMA1001635, MAMMA1001654, MAMMA1001663, MAMMA1001670, MAMMA1001671, MAMMA1001679, MAMMA1001683, MAMMA1001686, MAMMA1001692, MAMMA1001711, MAMMA1001715, MAMMA1001735, MAMMA1001740, MAMMA1001743, MAMMA1001745, MAMMA1001751, MAMMA1001754, MAMMA1001760, MAMMA1001768, MAMMA1001769, MAMMA1001771, MAMMA1001783, MAMMA1001785, MAMMA1001790, MAMMA1001806, MAMMA1001815, MAMMA1001818, MAMMA1001820, MAMMA1001824, MAMMA1001836, MAMMA1001837, MAMMA1001848, MAMMA1001851, MAMMA1001854, MAMMA1001858, MAMMA1001864, MAMMA1001868, MAMMA1001874, MAMMA1001878, MAMMA1001880, MAMMA1001890, MAMMA1001907, MAMMA1001908, MAMMA1001931, MAMMA1001956, MAMMA1001969, MAMMA1001970, MAMMA1001992, MAMMA1002009, MAMMA1002032, MAMMA1002033, MAMMA1002042, MAMMA1002047, MAMMA1002056, MAMMA1002058, MAMMA1002068, MAMMA1002078, MAMMA1002082, MAMMA1002084, MAMMA1002108, MAMMA1002125, MAMMA1002132, MAMMA1002140, MAMMA1002143, MAMMA1002145, MAMMA1002153, MAMMA1002155, MAMMA1002158, MAMMA1002174, MAMMA1002198, MAMMA1002209, MAMMA1002215, MAMMA1002219, MAMMA1002230, MAMMA1002236, MAMMA1002243, MAMMA1002250, MAMMA1002267, MAMMA1002282, MAMMA1002292, MAMMA1002293, MAMMA1002294, MAMMA1002297, MAMMA1002298, MAMMA1002299, MAMMA1002308, MAMMA1002310, MAMMA1002311, MAMMA1002312, MAMMA1002317, MAMMA1002319, MAMMA1002322, MAMMA1002329, MAMMA1002332, MAMMA1002333, MAMMA1002339, MAMMA1002347, MAMMA1002351, MAMMA1002352, MAMMA1002353, MAMMA1002355, MAMMA1002356, MAMMA1002359, MAMMA1002360, MAMMA1002361, MAMMA1002362, MAMMA1002380, MAMMA1002384, MAMMA1002392, MAMMA1002411, MAMMA1002413, MAMMA1002417, MAMMA1002427, MAMMA1002428, MAMMA1002434, MAMMA1002446, MAMMA1002454, MAMMA1002461, MAMMA1002470, MAMMA1002475, MAMMA1002480, MAMMA1002485, MAMMA1002494, MAMMA1002498, MAMMA1002524, MAMMA1002530, MAMMA1002545, MAMMA1002554, MAMMA1002556, MAMMA1002571, MAMMA1002573, MAMMA1002585, MAMMA1002590, MAMMA1002597, MAMMA1002598, MAMMA1002603, MAMMA1002612, MAMMA1002617, MAMMA1002618, MAMMA1002622, MAMMA1002623, MAMMA1002625, MAMMA1002629, MAMMA1002636, MAMMA1002637, MAMMA1002646, MAMMA1002655, MAMMA1002662, MAMMA1002665, MAMMA1002671, MAMMA1002673, MAMMA1002684, MAMMA1002698, MAMMA1002701, MAMMA1002708, MAMMA1002711, MAMMA1002721, MAMMA1002728, MAMMA1002744, MAMMA1002748, MAMMA1002754, MAMMA1002764, MAMMA1002765, MAMMA1002775, MAMMA1002780, MAMMA1002782, MAMMA1002796, MAMMA1002807, MAMMA1002830, MAMMA1002833, MAMMA1002838, MAMMA1002842, MAMMA1002843, MAMMA1002844, MAMMA1002858, MAMMA1002868, MAMMA1002869, MAMMA1002880, MAMMA1002881, MAMMA1002886, MAMMA1002887, MAMMA1002890, MAMMA1002892, MAMMA1002895, MAMMA1002908, MAMMA1002909, MAMMA1002930, MAMMA1002937, MAMMA1002941, MAMMA1002947, MAMMA1002964, MAMMA1002970, MAMMA1002972, MAMMA1002973, MAMMA1002987, MAMMA1003003, MAMMA1003004, MAMMA1003007, MAMMA1003011, MAMMA1003013, MAMMA1003015, MAMMA1003031, MAMMA1003035, MAMMA1003039, MAMMA1003040, MAMMA1003044, MAMMA1003047, MAMMA1003055, MAMMA1003057, MAMMA1003066, MAMMA1003089, MAMMA1003099, MAMMA1003113, MAMMA1003127, MAMMA1003150, NT2RM1000018, NT2RM1000035, NT2RM1000037, NT2RM1000039, NT2RM1000059, NT2RM1000086, NT2RM1000252, NT2RM1000256, NT2RM1000260, NT2RM1000272, NT2RM1000300, NT2RM1000314, NT2RM1000341, NT2RM1000355, NT2RM1000377, NT2RM1000499, NT2RM1000553, NT2RM1000555, NT2RM1000672, NT2RM1000725, NT2RM1000802, NT2RM1000826, NT2RM1000829, NT2RM1000857, NT2RM1000867, NT2RM1000874, NT2RM1000882, NT2RM1000883, NT2RM1000885, NT2RM1000894, NT2RM1000905, NT2RM1000927, NT2RM1000962, NT2RM1001044, NT2RM1001082, NT2RM1001092, NT2RM1001115, NT2RM1001139, NT2RM2000006, NT2RM2000013, NT2RM2000030, NT2RM2000032, NT2RM2000093, NT2RM2000101, NT2RM2000191, NT2RM2000239, NNNNNNNNNNNN, NT2RM2000250, NT2RM2000259, NT2RM2000260, NT2RM2000287, NT2RM2000359, NT2RM2000363, NT2RM2000368, NT2RM2000371, NT2RM2000374, NT2RM2000402, NT2RM2000407, NT2RM2000420, NT2RM2000422, NT2RM2000452, NT2RM2000490, NT2RM2000502, NT2RM2000504, NT2RM2000567, NT2RM2000569, NT2RM2000577, NT2RM2000581, NT2RM2000588, NT2RM2000599, NT2RM2000612, NT2RM2000623, NT2RM2000624, NT2RM2000635, NT2RM2000636, NT2RM2000649, NT2RM2000714, NT2RM2000735, NT2RM2000740, NT2RM2000795, NT2RM2000821, NT2RM2000837, NT2RM2000952, NT2RM2000984, NT2RM2001004, NT2RM2001065, NT2RM2001100, NT2RM2001105, NT2RM2001131, NT2RM2001141, NT2RM2001177, NT2RM2001194, NT2RM2001196, NT2RM2001201, NT2RM2001221, NT2RM2001238, NT2RM2001243, NT2RM2001247, NT2RM2001306, NT2RM2001312, NT2RM2001324, NT2RM2001345, NT2RM2001360, NT2RM2001393, NT2RM2001424, NT2RM2001499, NT2RM2001504, NT2RM2001575, NT2RM2001582, NT2RM2001605, NT2RM2001632, NT2RM2001635, NT2RM2001641, NT2RM2001668, NT2RM2001670, NT2RM2001671, NT2RM2001688, NT2RM2001695, NT2RM2001696, NT2RM2001698, NT2RM2001699, NT2RM2001706, NT2RM2001716, NT2RM2001718, NT2RM2001727, NT2RM2001743, NT2RM2001753, NT2RM2001760, NT2RM2001771, NT2RM2001782, NT2RM2001785, NT2RM2001797, NT2RM2001839, NT2RM2001840, NT2RM2001867, NT2RM2001896, NT2RM2001903, NT2RM2001930, NT2RM2001936, NT2RM2001950, NT2RM2001989, NT2RM2001997, NT2RM2001998, NT2RM2002030, NT2RM2002049, NT2RM2002088, NT2RM2002091, NT2RM2002100, NT2RM2002109, NT2RM2002142, NT2RM2002145, NT2RM2002178, NT2RM2002580, NT2RM4000030, NT2RM4000046, NT2RM4000086, NT2RM4000139, NT2RM4000155, NT2RM4000169, NT2RM4000191, NT2RM4000199, NT2RM4000202, NT2RM4000210, NT2RM4000229, NT2RM4000233, NT2RM4000251, NT2RM4000265, NT2RM4000290, NT2RM4000324, NT2RM4000327, NT2RM4000344, NT2RM4000354, NT2RM4000356, NT2RM4000366, NT2RM4000368, NT2RM4000395, NT2RM4000414, NT2RM4000425, NT2RM4000433, NT2RM4000457, NT2RM4000471, NT2RM4000496, NT2RM4000511, NT2RM4000515, NT2RM4000585, NT2RM4000595, NT2RM4000603, NT2RM4000616, NT2RM4000674, NT2RM4000689, NT2RM4000698, NT2RM4000700, NT2RM4000712, NT2RM4000733, NT2RM4000734, NT2RM4000741, NT2RM4000751, NT2RM4000764, NT2RM4000779, NT2RM4000787, NT2RM4000790, NT2RM4000795, NT2RM4000796, NT2RM4000798, NT2RM4000820, NT2RM4000833, NT2RM4000848, NT2RM4000852, NT2RM4000855, NT2RM4000887, NT2RM4000895, NT2RM4000971, NT2RM4000996, NT2RM4001084, NT2RM4001092, NT2RM4001140, NT2RM4001151, NT2RM4001155, NT2RM4001160, NT2RM4001187, NT2RM4001191, NT2RM4001200, NT2RM4001204, NT2RM4001309, NT2RM4001313, NT2RM4001316, NT2RM4001320, NT2RM4001340, NT2RM4001347, NT2RM4001371, NT2RM4001382, NT2RM4001412, NT2RM4001414, NT2RM4001437, NT2RM4001444, NT2RM4001483, NT2RM4001522, NT2RM4001565, NT2RM4001566, NT2RM4001569, NT2RM4001594, NT2RM4001597, NT2RM4001662, NT2RM4001666, NT2RM4001682, NT2RM4001710, NT2RM4001714, NT2RM4001715, NT2RM4001731, NT2RM4001741, NT2RM4001746, NT2RM4001754, NT2RM4001783, NT2RM4001813, NT2RM4001819, NT2RM4001828, NT2RM4001836, NT2RM4001841, NT2RM4001842, NT2RM4001865, NT2RM4001876, NT2RM4001880, NT2RM4001905, NT2RM4001922, NT2RM4001940, NT2RM4001953, NT2RM4001965, NT2RM4001979, NT2RM4001987, NT2RM4002013, NT2RM4002034, NT2RM4002044, NT2RM4002054, NT2RM4002055, NT2RM4002063, NT2RM4002066, NT2RM4002067, NT2RM4002109, NT2RM4002140, NT2RM4002145, NT2RM4002174, NT2RM4002189, NT2RM4002194, NT2RM4002205, NT2RM4002213, NT2RM4002226, NT2RM4002256, NT2RM4002266, NT2RM4002278, NT2RM4002281, NT2RM4002287, NT2RM4002294, NT2RM4002323, NT2RM4002339, NT2RM4002373, NT2RM4002374, NT2RM4002383, NT2RM4002398, NT2RM4002409, NT2RM4002438, NT2RM4002446, NT2RM4002457, NT2RM4002479, NT2RM4002482, NT2RM4002493, NT2RM4002499, NT2RM4002504, NT2RM4002532, NT2RM4002534, NT2RM4002558, NT2RM4002571, NT2RM4002593, NT2RM4002594, NT2RP1000101, NT2RP1000124, NT2RP1000272, NT2RP1000324, NT2RP1000326, NT2RP1000333, NT2RP1000357, NT2RP1000358, NT2RP1000363, NT2RP1000376, NT2RP1000439, NT2RP1000443, NT2RP1000460, NT2RP1000470, NT2RP1000513, NT2RP1000522, NT2RP1000630, NT2RP1000677, NT2RP1000688, NT2RP1000721, NT2RP1000730, NT2RP1000738, NT2RP1000796, NT2RP1000825, NT2RP1000833, NT2RP1000851, NT2RP1000856, NT2RP1000860, NT2RP1000902, NT2RP1000944, NT2RP1000958, NT2RP1000959, NT2RP1000966, NT2RP1001011, NT2RP1001013, NT2RP1001033, NT2RP1001079, NT2RP1001177, NT2RP1001185, NT2RP1001248, NT2RP1001310, NT2RP1001311, NT2RP1001313, NT2RP1001361, NT2RP1001385, NT2RP1001395, NT2RP1001410, NT2RP1001432, NT2RP1001449, NT2RP1001475, NT2RP1001543, NT2RP1001546, NT2RP1001569, NT2RP2000001, NT2RP2000006, NT2RP2000007, NT2RP2000008, NT2RP2000027, NT2RP2000040, NT2RP2000045, NT2RP2000054, NT2RP2000056, NT2RP2000067, NT2RP2000070, NT2RP2000076, NT2RP2000077, NT2RP2000079, NT2RP2000088, NT2RP2000108, NT2RP2000120, NT2RP2000126, NT2RP2000133, NT2RP2000147, NT2RP2000153, NT2RP2000173, NT2RP2000175, NT2RP2000183, NT2RP2000195, NT2RP2000205, NT2RP2000208, NT2RP2000224, NT2RP2000232, NT2RP2000233, NT2RP2000257, NT2RP2000258, NT2RP2000270, NT2RP2000283, NT2RP2000289, NT2RP2000297, NT2RP2000327, NT2RP2000328, NT2RP2000329, NT2RP2000346, NT2RP2000412, NT2RP2000414, NT2RP2000438, NT2RP2000459, NT2RP2000498, NT2RP2000603, NT2RP2000617, NT2RP2000644, NT2RP2000668, NT2RP2000704, NT2RP2000715, NT2RP2000758, NT2RP2000764, NT2RP2000809, NT2RP2000816, NT2RP2000845, NT2RP2000863, NT2RP2000880, NT2RP2000931, NT2RP2000938, NT2RP2000943, NT2RP2000965, NT2RP2000970, NT2RP2000987, NT2RP2001036, NT2RP2001044, NT2RP2001056, NT2RP2001065, NT2RP2001070, NT2RP2001081, NT2RP2001119, NT2RP2001127, NT2RP2001137, NT2RP2001149, NT2RP2001168, NT2RP2001174, NT2RP2001226, NT2RP2001233, NT2RP2001268, NT2RP2001290, NT2RP2001312, NT2RP2001327, NT2RP2001328, NT2RP2001347, NT2RP2001366, NT2RP2001378, NT2RP2001392, NT2RP2001394, NT2RP2001397, NT2RP2001420, NT2RP2001427, NT2RP2001436, NT2RP2001449, NT2RP2001450, NT2RP2001467, NT2RP2001506, NT2RP2001511, NT2RP2001526, NT2RP2001560, NT2RP2001569, NT2RP2001576, NT2RP2001581, NT2RP2001597, NT2RP2001601, NT2RP2001628, NT2RP2001634, NT2RP2001660, NT2RP2001663, NT2RP2001677, NT2RP2001678, NT2RP2001699, NT2RP2001720, NT2RP2001721, NT2RP2001748, NT2RP2001839, NT2RP2001861, NT2RP2001869, NT2RP2001883, NT2RP2001898, NT2RP2001900, NT2RP2001907, NT2RP2001926, NT2RP2001943, NT2RP2001947, NT2RP2001969, NT2RP2001985, NT2RP2002025, NT2RP2002032, NT2RP2002033, NT2RP2002066, NT2RP2002070, NT2RP2002078, NT2RP2002099, NT2RP2002105, NT2RP2002137, NT2RP2002154, NT2RP2002172, NT2RP2002192, NT2RP2002193, NT2RP2002208, NT2RP2002252, NT2RP2002259, NT2RP2002292, NT2RP2002312, NT2RP2002316, NT2RP2002333, NT2RP2002373, NT2RP2002385, NT2RP2002426, NT2RP2002439, NT2RP2002442, NT2RP2002457, NT2RP2002464, NT2RP2002475, NT2RP2002479, NT2RP2002503, NT2RP2002504, NT2RP2002520, NT2RP2002537, NT2RP2002546, NT2RP2002549, NT2RP2002591, NT2RP2002595, NT2RP2002609, NT2RP2002618, NT2RP2002621, NT2RP2002643, NT2RP2002672, NT2RP2002701, NT2RP2002706, NT2RP2002710, NT2RP2002741, NT2RP2002750, NT2RP2002752, NT2RP2002753, NT2RP2002778, NT2RP2002800, NT2RP2002839, NT2RP2002862, NT2RP2002880, NT2RP2002928, NT2RP2002939, NT2RP2002979, NT2RP2002980, NT2RP2002986, NT2RP2002987, NT2RP2002993, NT2RP2003000, NT2RP2003034, NT2RP2003073, NT2RP2003099, NT2RP2003117, NT2RP2003121, NT2RP2003129, NT2RP2003157, NT2RP2003158, NT2RP2003164, NT2RP2003165, NT2RP2003177, NT2RP2003194, NT2RP2003228, NT2RP2003230, NT2RP2003237, NT2RP2003243, NT2RP2003272, NT2RP2003277, NT2RP2003280, NT2RP2003293, NT2RP2003329, NT2RP2003339, NT2RP2003391, NT2RP2003433, NT2RP2003445, NT2RP2003446, NT2RP2003466, NT2RP2003480, NT2RP2003499, NT2RP2003511, NT2RP2003517, NT2RP2003533, NT2RP2003543, NT2RP2003564, NT2RP2003567, NT2RP2003581, NT2RP2003596, NT2RP2003604, NT2RP2003668, NT2RP2003691, NT2RP2003702, NT2RP2003704, NT2RP2003714, NT2RP2003737, NT2RP2003760, NT2RP2003764, NT2RP2003769, NT2RP2003770, NT2RP2003777, NT2RP2003781, NT2RP2003825, NT2RP2003840, NT2RP2003857, NT2RP2003859, NT2RP2003885, NT2RP2003912, NT2RP2003968, NT2RP2003976, NT2RP2003981, NT2RP2003984, NT2RP2003986, NT2RP2003988, NT2RP2004013, NT2RP2004014, NT2RP2004041, NT2RP2004042, NT2RP2004066, NT2RP2004081, NT2RP2004098, NT2RP2004124, NT2RP2004165, NT2RP2004170, NT2RP2004194, NT2RP2004196, NT2RP2004226, NT2RP2004239, NT2RP2004240, NT2RP2004270, NT2RP2004300, NT2RP2004339, NT2RP2004347, NT2RP2004364, NT2RP2004389, NT2RP2004392, NT2RP2004396, NT2RP2004399, NT2RP2004400, NT2RP2004463, NT2RP2004476, NT2RP2004490, NT2RP2004523, NT2RP2004538, NT2RP2004568, NT2RP2004580, NT2RP2004602, NT2RP2004614, NT2RP2004664, NT2RP2004675, NT2RP2004681, NT2RP2004709, NT2RP2004710, NT2RP2004736, NT2RP2004743, NT2RP2004767, NT2RP2004775, NT2RP2004791, NT2RP2004861, NT2RP2004897, NT2RP2004933, NT2RP2004961, NT2RP2004962, NT2RP2004967, NT2RP2004978, NT2RP2004985, NT2RP2004999, NT2RP2005003, NT2RP2005012, NT2RP2005018, NT2RP2005020, NT2RP2005022, NT2RP2005108, NT2RP2005116, NT2RP2005144, NT2RP2005147, NT2RP2005168, NT2RP2005204, NT2RP2005227, NT2RP2005239, NT2RP2005254, NT2RP2005276, NT2RP2005287, NT2RP2005288, NT2RP2005289, NT2RP2005315, NT2RP2005325, NT2RP2005336, NT2RP2005354, NT2RP2005358, NT2RP2005360, NT2RP2005393, NT2RP2005407, NT2RP2005436, NT2RP2005457, NT2RP2005472, NT2RP2005476, NT2RP2005490, NT2RP2005491, NT2RP2005496, NT2RP2005498, NT2RP2005501, NT2RP2005509, NT2RP2005525, NT2RP2005539, NT2RP2005540, NT2RP2005555, NT2RP2005581, NT2RP2005600, NT2RP2005605, NT2RP2005620, NT2RP2005635, NT2RP2005651, NT2RP2005654, NT2RP2005669, NT2RP2005675, NT2RP2005694, NT2RP2005701, NT2RP2005722, NT2RP2005723, NT2RP2005726, NT2RP2005732, NT2RP2005741, NT2RP2005752, NT2RP2005753, NT2RP2005767, NT2RP2005773, NT2RP2005781, NT2RP2005784, NT2RP2005804, NT2RP2005812, NT2RP2005835, NT2RP2005841, NT2RP2005853, NT2RP2005868, NT2RP2005886, NT2RP2005908, NT2RP2005980, NT2RP2006023, NT2RP2006043, NT2RP2006052, NT2RP2006071, NT2RP2006103, NT2RP2006106, NT2RP2006166, NT2RP2006184, NT2RP2006196, NT2RP2006200, NT2RP2006258, NT2RP2006275, NT2RP2006312, NT2RP2006320, NT2RP2006393, NT2RP2006436, NT2RP2006441, NT2RP2006464, NT2RP2006467, NT2RP2006472j NT2RP2006571, NT2RP2006598, NT2RP3000002, NT2RP3000031, NT2RP3000046, NT2RP3000047, NT2RP3000050, NT2RP3000055, NT2RP3000080, NT2RP3000085, NT2RP3000134, NT2RP3000142, NT2RP3000149, NT2RP3000186, NT2RP3000197, NT2RP3000207, NT2RP3000220, NT2RP3000235, NT2RP3000251, NT2RP3000252, NT2RP3000255, NT2RP3000267, NT2RP3000299, NT2RP3000312, NT2RP3000320, NT2RP3000324, NT2RP3000341, NT2RP3000348, NT2RP3000350, NT2RP3000359, NT2RP3000361, NT2RP3000366, NT2RP3000393, NT2RP3000403, NT2RP3000418, NT2RP3000433, NT2RP3000439, NT2RP3000451, NT2RP3000456, NT2RP3000487, NT2RP3000512, NT2RP3000526, NT2RP3000527, NT2RP3000531, NT2RP3000542, NT2RP3000562, NT2RP3000584, NT2RP3000596, NT2RP3000603, NT2RP3000622, NT2RP3000624, NT2RP3000628, NT2RP3000632, NT2RP3000644, NT2RP3000661, NT2RP3000685, NT2RP3000690, NT2RP3000736, NT2RP3000739, NT2RP3000742, NT2RP3000753, NT2RP3000815, NT2RP3000826, NT2RP3000836, NT2RP3000841, NT2RP3000845, NT2RP3000847, NT2RP3000850, NT2RP3000859, NT2RP3000865, NT2RP3000868, NT2RP3000869, NT2RP3000875, NT2RP3000901, NT2RP3000904, NT2RP3000919, NT2RP3000968, NT2RP3000980, NT2RP3001007, NT2RP3001055, NT2RP3001057, NT2RP3001081, NT2RP3001084, NT2RP3001096, NT2RP3001107, NT2RP3001111, NT2RP3001116, NT2RP3001119, NT2RP3001120, NT2RP3001133, NT2RP3001140, NT2RP3001147, NT2RP3001150, NT2RP3001155, NT2RP3001176, NT2RP3001216, NT2RP3001245, NT2RP3001272, NT2RP3001274, NT2RP3001281, NT2RP3001297, NT2RP3001307, NT2RP3001338, NT2RP3001339, NT2RP3001340, NT2RP3001355, NT2RP3001356, NT2RP3001384, NT2RP3001398, NT2RP3001399, NT2RP3001420, NT2RP3001426, NT2RP3001427, NT2RP3001428, NT2RP3001432, NT2RP3001447, NT2RP3001453, NT2RP3001457, NT2RP3001459, NT2RP3001472, NT2RP3001495, NT2RP3001527, NT2RP3001529, NT2RP3001538, NT2RP3001554, NT2RP3001587, NT2RP3001589, NT2RP3001608, NT2RP3001629, NT2RP3001634, NT2RP3001642, NT2RP3001646, NT2RP3001671, NT2RP3001672, NT2RP3001676, NT2RP3001678, NT2RP3001679, NT2RP3001688, NT2RP3001690, NT2RP3001698, NT2RP3001712, NT2RP3001724, NT2RP3001727, NT2RP3001730, NT2RP3001739, NT2RP3001752, NT2RP3001764, NT2RP3001777, NT2RP3001782, NT2RP3001792, NT2RP3001799, NT2RP3001819, NT2RP3001844, NT2RP3001857, NT2RP3001896, NT2RP3001898, NT2RP3001929, NT2RP3001931, NT2RP3001938, NT2RP3001943, NT2RP3001944, NT2RP3002002, NT2RP3002014, NT2RP3002062, NT2RP3002102, NT2RP3002108, NT2RP3002142, NT2RP3002146, NT2RP3002147, NT2RP3002151, NT2RP3002163, NT2RP3002165, NT2RP3002173, NT2RP3002244, NT2RP3002248, NT2RP3002255, NT2RP3002273, NT2RP3002276, NT2RP3002303, NT2RP3002330, NT2RP3002343, NT2RP3002352, NT2RP3002399, NT2RP3002402, NT2RP3002455, NT2RP3002484, NT2RP3002501, NT2RP3002512, NT2RP3002529, NT2RP3002545, NT2RP3002566, NT2RP3002587, NT2RP3002602, NT2RP3002603, NT2RP3002650, NT2RP3002660, NT2RP3002701, NT2RP3002763, NT2RP3002799, NT2RP3002810, NT2RP3002869, NT2RP3002876, NT2RP3002877, NT2RP3002909, NT2RP3002953, NT2RP3002985, NT2RP3003008, NT2RP3003032, NT2RP3003061, NT2RP3003071, NT2RP3003078, NT2RP3003101, NT2RP3003121, NT2RP3003138, NT2RP3003139, NT2RP3003145, NT2RP3003150, NT2RP3003157, NT2RP3003185, NT2RP3003193, NT2RP3003197, NT2RP3003203, NT2RP3003204, NT2RP3003210, NT2RP3003212, NT2RP3003251, NT2RP3003264, NT2RP3003282, NT2RP3003290, NT2RP3003301, NT2RP3003302, NT2RP3003327, NT2RP3003346, NT2RP3003377, NT2RP3003384, NT2RP3003385, NT2RP3003403, NT2RP3003411, NT2RP3003427, NT2RP3003433, NT2RP3003543, NT2RP3003555, NT2RP3003564, NT2RP3003572, NT2RP3003576, NT2RP3003589, NT2RP3003625, NT2RP3003656, NT2RP3003659, NT2RP3003672, NT2RP3003686, NT2RP3003726, NT2RP3003795, NT2RP3003799, NT2RP3003805, NT2RP3003809, NT2RP3003819, NT2RP3003825, NT2RP3003831, NT2RP3003842, NT2RP3003870, NT2RP3003876, NT2RP3003914, NT2RP3003918, NT2RP3003932, NT2RP3003989, NT2RP3004013, NT2RP3004051, NT2RP3004070, NT2RP3004078, NT2RP3004093, NT2RP3004095, NT2RP3004110, NT2RP3004125, NT2RP3004145, NT2RP3004148, NT2RP3004155, NT2RP3004189, NT2RP3004206, NT2RP3004207, NT2RP3004246, NT2RP3004258, NT2RP3004262, NT2RP3004282, NT2RP3004332, NT2RP3004334, NT2RP3004348, NT2RP3004349, NT2RP3004378, NT2RP3004424, NT2RP3004428, NT2RP3004451, NT2RP3004466, NT2RP3004470, NT2RP3004475, NT2RP3004498, NT2RP3004503, NT2RP3004504, NT2RP3004507, NT2RP3004534, NT2RP3004539, NT2RP3004544, NT2RP3004566, NT2RP3004569, NT2RP3004572, NT2RP3004594, NT2RP3004618, NT2RP3004669, NT2RP3004670, NT2RP4000008, NT2RP4000023, NT2RP4000035, NT2RP4000049, NT2RP4000051, NT2RP4000078, NT2RP4000102, NT2RP4000109, NT2RP4000150, NT2RP4000151, NT2RP4000185, NT2RP4000210, NT2RP4000212, NT2RP4000214, NT2RP4000218, NT2RP4000243, NT2RP4000246, NT2RP4000259, NT2RP4000263, NT2RP4000290, NT2RP4000312, NT2RP4000321, NT2RP4000323, NT2RP4000355, NT2RP4000360, NT2RP4000381, NT2RP4000398, NT2RP4000415, NT2RP4000417, NT2RP4000424, NT2RP4000448, NT2RP4000457, NT2RP4000480, NT2RP4000515, NT2RP4000517, NT2RP4000518, NT2RP4000528, NT2RP4000541, NT2RP4000560, NT2RP4000614, NT2RP4000638, NT2RP4000648, NT2RP4000657, NT2RP4000704, NT2RP4000728, NT2RP4000817, NT2RP4000833, NT2RP4000837, NT2RP4000839, NT2RP4000865, NT2RP4000878, NT2RP4000907, NT2RP4000915, NT2RP4000918, NT2RP4000928, NT2RP4000955, NT2RP4000975, NT2RP4000989, NT2RP4000996, NT2RP4000997, NT2RP4001006, NT2RP4001010, NT2RP4001029, NT2RP4001041, NT2RP4001057, NT2RP4001064, NT2RP4001078, NT2RP4001080, NT2RP4001086, NT2RP4001095, NT2RP4001100, NT2RP4001117, NT2RP4001122, NT2RP4001126, NT2RP4001143, NT2RP4001149, NT2RP4001150, NT2RP4001174, NT2RP4001206, NT2RP4001213, NT2RP4001228, NT2RP4001235, NT2RP4001256, NT2RP4001276, NT2RP4001336, NT2RP4001339, NT2RP4001343, NT2RP4001345, NT2RP4001351, NT2RP4001372, NT2RP4001373, NT2RP4001375, NT2RP4001379, NT2RP4001389, NT2RP4001414, NT2RP4001433, NT2RP4001442, NT2RP4001502, NT2RP4001507, NT2RP4001524, NT2RP4001529, NT2RP4001547, NT2RP4001568, NT2RP4001574, NT2RP4001575, NT2RP4001592, NT2RP4001610, NT2RP4001634, NT2RP4001656, NT2RP4001677, NT2RP4001679, NT2RP4001696, NT2RP4001739, NT2RP4001753, NT2RP4001790, NT2RP4001822, NT2RP4001828, NT2RP4001838, NT2RP4001841, NT2RP4001849, NT2RP4001861, NT2RP4001889, NT2RP4001893, NT2RP4001896, NT2RP4001901, NT2RP4001938, NT2RP4001946, NT2RP4001950, NT2RP4001953, NT2RP4001966, NT2RP4001975, NT2RP4002018, NT2RP4002047, NT2RP4002071, NT2RP4002078, NT2RP4002081, NT2RP4002888, NT2RP4002905, NT2RP5003459, NT2RP5003477, NT2RP5003492, NT2RP5003506, NT2RP5003522, NT2RP5003524, NT2RP5003534, OVARC1000001, OVARC1000004, OVARC1000013, OVARC1000014, OVARC1000017, OVARC1000035, OVARC1000058, OVARC1000060, OVARC1000085, OVARC1000092, OVARC1000106, OVARC1000109, OVARC1000114, OVARC1000139, OVARC1000148, OVARC1000151, OVARC1000168, OVARC1000198, OVARC1000209, OVARC1000212, OVARC1000240, OVARC1000241, OVARC1000288, OVARC1000302, OVARC1000304, OVARC1000309, OVARC1000321, OVARC1000326, OVARC1000408, OVARC1000411, OVARC1000414, OVARC1000420, OVARC1000427, OVARC1000431, OVARC1000437, OVARC1000442, OVARC1000466, OVARC1000473, OVARC1000486, OVARC1000526, OVARC1000533, OVARC1000556, OVARC1000564, OVARC1000573, OVARC1000576, OVARC1000578, OVARC1000588, OVARC1000622, OVARC1000640, OVARC1000649, OVARC1000661, OVARC1000678, OVARC1000681, OVARC1000682, OVARC1000689, OVARC1000700, OVARC1000703, OVARC1000722, OVARC1000769, OVARC1000787, OVARC1000800, OVARC1000802, OVARC1000834, OVARC1000846, OVARC1000850, OVARC1000883, OVARC1000885, OVARC1000886, OVARC1000890, OVARC1000915, OVARC1000937, OVARC1000945, OVARC1000959, OVARC1000960, OVARC1000964, OVARC1000984, OVARC1000999, OVARC1001000, OVARC1001011, OVARC1001038, OVARC1001040, OVARC1001051, OVARC1001055, OVARC1001062, OVARC1001068, OVARC1001072, OVARC1001085, OVARC1001092, OVARC1001107, OVARC1001117, OVARC1001118, OVARC1001154, OVARC1001161, OVARC1001162, OVARC1001167, OVARC1001170, OVARC1001171, OVARC1001173, OVARC1001176, OVARC1001180, OVARC1001188, OVARC1001232, OVARC1001240, OVARC1001244, OVARC1001261, OVARC1001268, OVARC1001271, OVARC1001306, OVARC1001329, OVARC1001339, OVARC1001341, OVARC1001342, OVARC1001344, OVARC1001372, OVARC1001376, OVARC1001381, OVARC1001399, OVARC1001419, OVARC1001436, OVARC1001442, OVARC1001480, OVARC1001496, OVARC1001506, OVARC1001555, OVARC1001600, OVARC1001615, OVARC1001668, OVARC1001702, OVARC1001711, OVARC1001713, OVARC1001726, OVARC1001731, OVARC1001745, OVARC1001766, OVARC1001791, OVARC1001802, OVARC1001809, OVARC1001812, OVARC1001813, OVARC1001820, OVARC1001861, OVARC1001879, OVARC1001880, OVARC1001883, OVARC1001900, OVARC1001901, OVARC1001916, OVARC1001943, OVARC1001949, OVARC1001950, OVARC1001987, OVARC1001989, OVARC1002044, OVARC1002050, OVARC1002082, OVARC1002107, OVARC1002112, OVARC1002127, OVARC1002143, OVARC1002158, OVARC1002165, OVARC1002182, PLACE1000004, PLACE1000007, PLACE1000014, PLACE1000031, PLACE1000050, PLACE1000061, PLACE1000066, PLACE1000078, PLACE1000081, PLACE1000094, PLACE1000142, PLACE1000185, PLACE1000213, PLACE1000236, PLACE1000246, PLACE1000292, PLACE1000347, PLACE1000374, PLACE1000401, PLACE1000406, PLACE1000420, PLACE1000421, PLACE1000424, PLACE1000435, PLACE1000444, PLACE1000453, PLACE1000481, PLACE1000492, PLACE1000547, PLACE1000562, PLACE1000564, PLACE1000583, PLACE1000588, PLACE1000596, PLACE1000599, PLACE1000610, PLACE1000611, PLACE1000656, PLACE1000706, PLACE1000712, PLACE1000749, PLACE1000785, PLACE1000786, PLACE1000793, PLACE1000798, PLACE1000849, PLACE1000863, PLACE1000931, PLACE1000948, PLACE1000972, PLACE1000979, PLACE1000987, PLACE1001007, PLACE1001024, PLACE1001036, PLACE1001054, PLACE1001062, PLACE1001092, PLACE1001104, PLACE1001118, PLACE1001136, PLACE1001185, PLACE1001238, PLACE1001257, PLACE1001272, PLACE1001280, PLACE1001304, PLACE1001311, PLACE1001323, PLACE1001366, PLACE1001387, PLACE1001399, PLACE1001414, PLACE1001440, PLACE1001456, PLACE1001484, PLACE1001502, PLACE1001503, PLACE1001517, PLACE1001545, PLACE1001570, PLACE1001603, PLACE1001608, PLACE1001610, PLACE1001611, PLACE1001632, PLACE1001640, PLACE1001672, PLACE1001691, PLACE1001692, PLACE1001705, PLACE1001720, PLACE1001729, PLACE1001739, PLACE1001740, PLACE1001745, PLACE1001746, PLACE1001748, PLACE1001756, PLACE1001761, PLACE1001799, PLACE1001821, PLACE1001869, PLACE1001897, PLACE1001912, PLACE1001983, PLACE1001989, PLACE1002004, PLACE1002046, PLACE1002066, PLACE1002072, PLACE1002073, PLACE1002090, PLACE1002119, PLACE1002140, PLACE1002157, PLACE1002163, PLACE1002170, PLACE1002213, PLACE1002227, PLACE1002342, PLACE1002395, PLACE1002433, PLACE1002437, PLACE1002465, PLACE1002474, PLACE1002477, PLACE1002500, PLACE1002514, PLACE1002532, PLACE1002537, PLACE1002578, PLACE1002604, PLACE1002655, PLACE1002665, PLACE1002685, PLACE1002714, PLACE1002722, PLACE1002775, PLACE1002811, PLACE1002816, PLACE1002834, PLACE1002881, PLACE1002941, PLACE1002968, PLACE1002991, PLACE1002993, PLACE1003025, PLACE1003100, PLACE1003108, PLACE1003136, PLACE1003153, PLACE1003205, PLACE1003249, PLACE1003256, PLACE1003296, PLACE1003302, PLACE1003342, PLACE1003353, PLACE1003361, PLACE1003366, PLACE1003369, PLACE1003373, PLACE1003394, PLACE1003420, PLACE1003454, PLACE1003478, PLACE1003493, PLACE1003519, PLACE1003528, PLACE1003553, PLACE1003566, PLACE1003575, PLACE1003584, PLACE1003592, PLACE1003596, PLACE1003605, PLACE1003611, PLACE1003638, PLACE1003704, PLACE1003711, PLACE1003723, PLACE1003738, PLACE1003760, PLACE1003762, PLACE1003768, PLACE1003795, PLACE1003833, PLACE1003850, PLACE1003858, PLACE1003870, PLACE1003885, PLACE1003886, PLACE1003900, PLACE1003903, PLACE1003936, PLACE1003968, PLACE1004103, PLACE1004104, PLACE1004114, PLACE1004128, PLACE1004149, PLACE1004156, PLACE1004161, PLACE1004183, PLACE1004203, PLACE1004242, PLACE1004256, PLACE1004270, PLACE1004277, PLACE1004289, PLACE1004336, PLACE1004358, PLACE1004376, PLACE1004384, PLACE1004428, PLACE1004437, PLACE1004467, PLACE1004471, PLACE1004506, PLACE1004510, PLACE1004518, PLACE1004548, PLACE1004564, PLACE1004629, PLACE1004645, PLACE1004646, PLACE1004658, PLACE1004672, PLACE1004681, PLACE1004686, PLACE1004691, PLACE1004736, PLACE1004740, PLACE1004743, PLACE1004751, PLACE1004773, PLACE1004804, PLACE1004814, PLACE1004824, PLACE1004838, PLACE1004885, PLACE1004900, PLACE1004902, PLACE1004934, PLACE1004937, PLACE1004979, PLACE1004982, PLACE1005027, PLACE1005046, PLACE1005052, PLACE1005066, PLACE1005085, PLACE1005086, PLACE1005101, PLACE1005102, PLACE1005108, PLACE1005111, PLACE1005128, PLACE1005146, PLACE1005232, PLACE1005243, PLACE1005277, PLACE1005305, PLACE1005308, PLACE1005327, PLACE1005331, PLACE1005335, PLACE1005373, PLACE1005374, PLACE1005409, PLACE1005453, PLACE1005467, PLACE1005477, PLACE1005528, PLACE1005530, PLACE1005630, PLACE1005646, PLACE1005666, PLACE1005763, PLACE1005799, PLACE1005803, PLACE1005813, PLACE1005828, PLACE1005850, PLACE1005898, PLACE1005921, PLACE1005923, PLACE1005925, PLACE1005934, PLACE1005968, PLACE1006002, PLACE1006011, PLACE1006017, PLACE1006040, PLACE1006129, PLACE1006139, PLACE1006143, PLACE1006159, PLACE1006167, PLACE1006170, PLACE1006196, PLACE1006223, PLACE1006288, PLACE1006318, PLACE1006325, PLACE1006368, PLACE1006385, PLACE1006412, PLACE1006438, PLACE1006469, PLACE1006470, PLACE1006488, PLACE1006492, PLACE1006521, PLACE1006531, PLACE1006540, PLACE1006552, PLACE1006615, PLACE1006617, PLACE1006673, PLACE1006704, PLACE1006760, PLACE1006782, PLACE1006792, PLACE1006829, PLACE1006867, PLACE1006883, PLACE1006904, PLACE1006932, PLACE1006956, PLACE1006961, PLACE1006962, PLACE1006989, PLACE1007014, PLACE1007045, PLACE1007068, PLACE1007132, PLACE1007140, PLACE1007238, PLACE1007257, PLACE1007274, PLACE1007276, PLACE1007282, PLACE1007286, PLACE1007346, PLACE1007367, PLACE1007386, PLACE1007402, PLACE1007450, PLACE1007452, PLACE1007454, PLACE1007460, PLACE1007524, PLACE1007525, PLACE1007537, PLACE1007547, PLACE1007557, PLACE1007621, PLACE1007632, PLACE1007688, PLACE1007737, PLACE1007846, PLACE1007866, PLACE1007877, PLACE1007908, PLACE1007946, PLACE1007969, PLACE1008080, PLACE1008095, PLACE1008177, PLACE1008280, PLACE1008329, PLACE1008330, PLACE1008331, PLACE1008398, PLACE1008405, PLACE1008455, PLACE1008457, PLACE1008465, PLACE1008531, PLACE1008533, PLACE1008627, PLACE1008643, PLACE1008813, PLACE1008851, PLACE1008867, PLACE1008947, PLACE1009091, PLACE1009094, PLACE1009111, PLACE1009155, PLACE1009166, PLACE1009174, PLACE1009183, PLACE1009200, PLACE1009246, PLACE1009308, PLACE1009368, PLACE1009388, PLACE1009444, PLACE1009459, PLACE1009524, PLACE1009595, PLACE1009607, PLACE1009621, PLACE1009670, PLACE1009731, PLACE1009861, PLACE1009879, PLACE1009947, PLACE1010023, PLACE1010074, PLACE1010076, PLACE1010293, PLACE1010310, PLACE1010321, PLACE1010362, PLACE1010383, PLACE1010522, PLACE1010529, PLACE1010580, PLACE1010629, PLACE1010661, PLACE1010702, PLACE1010720, PLACE1010761, PLACE1010771, PLACE1010786, PLACE1010833, PLACE1010856, PLACE1010900, PLACE1010925, PLACE1010926, PLACE1010942, PLACE1010944, PLACE1010947, PLACE1010954, PLACE1011032, PLACE1011041, PLACE1011046, PLACE1011054, PLACE1011056, PLACE1011090, PLACE1011109, PLACE1011114, PLACE1011133, PLACE1011185, PLACE1011219, PLACE1011291, PLACE1011296, PLACE1011340, PLACE1011371, PLACE1011452, PLACE1011472, PLACE1011477, PLACE1011492, PLACE1011567, PLACE1011576, PLACE1011586, PLACE1011646, PLACE1011649, PLACE1011650, PLACE1011682, PLACE1011719, PLACE1011725, PLACE1011749, PLACE1011783, PLACE1011891, PLACE1011922, PLACE1011923, PLACE1011962, PLACE1011995, PLACE2000003, PLACE2000007, PLACE2000011, PLACE2000017, PLACE2000030, PLACE2000034, PLACE2000039, PLACE2000047, PLACE2000050, PLACE2000062, PLACE2000100, PLACE2000103, PLACE2000111, PLACE2000124, PLACE2000132, PLACE2000140, PLACE2000170, PLACE2000172, PLACE2000176, PLACE2000187, PLACE2000216, PLACE2000235, PLACE2000246, PLACE2000264, PLACE2000274, PLACE2000302, PLACE2000305, PLACE2000317, PLACE2000335, PLACE2000341, PLACE2000342, PLACE2000347, PLACE2000359, PLACE2000366, PLACE2000373, PLACE2000394, PLACE2000398, PLACE2000399, PLACE2000404, PLACE2000411, PLACE2000419, PLACE2000425, PLACE2000427, PLACE2000433, PLACE2000435, PLACE2000438, PLACE2000450, PLACE2000455, PLACE2000458, PLACE2000465, PLACE3000004, PLACE3000009, PLACE3000020, PLACE3000029, PLACE3000070, PLACE3000103, PLACE3000119, PLACE3000124, PLACE3000136, PLACE3000142, PLACE3000145, PLACE3000147, PLACE3000148, PLACE3000155, PLACE3000156, PLACE3000157, PLACE3000158, PLACE3000169, PLACE3000194, PLACE3000197, PLACE3000207, PLACE3000208, PLACE3000220, PLACE3000221, PLACE3000226, PLACE3000230, PLACE3000242, PLACE3000254, PLACE3000271, PLACE3000276, PLACE3000304, PLACE3000322, PLACE3000331, PLACE3000341, PLACE3000352, PLACE3000353, PLACE3000362, PLACE3000363, PLACE3000365, PLACE3000388, PLACE3000399, PLACE3000400, PLACE3000401, PLACE3000402, PLACE3000405, PLACE3000406, PLACE3000413, PLACE3000416, PLACE3000425, PLACE3000455, PLACE3000475, PLACE3000477, PLACE4000009, PLACE4000014, PLACE4000034, PLACE4000049, PLACE4000052, PLACE4000063, PLACE4000100, PLACE4000106, PLACE4000128, PLACE4000129, PLACE4000131, PLACE4000156, PLACE4000192, PLACE4000211, PLACE4000222, PLACE4000230, PLACE4000233, PLACE4000247, PLACE4000250, PLACE4000259, PLACE4000261, PLACE4000269, PLACE4000300, PLACE4000320, PLACE4000323, PLACE4000326, PLACE4000344, PLACE4000369, PLACE4000379, PLACE4000387, PLACE4000411, PLACE4000431, PLACE4000445, PLACE4000450, PLACE4000465, PLACE4000487, PLACE4000489, PLACE4000494, PLACE4000521, PLACE4000522, PLACE4000548, PLACE4000581, PLACE4000593, PLACE4000612, PLACE4000638, PLACE4000650, THYRO1000017, THYRO1000026, THYRO1000034, THYRO1000040, THYRO1000070, THYRO1000072, THYRO1000085, THYRO1000092, THYRO1000107, THYRO1000132, THYRO1000163, THYRO1000173, THYRO1000186, THYRO1000187, THYRO1000190, THYRO1000197, THYRO1000206, THYRO1000221, THYRO1000241, THYRO1000253, THYRO1000320, THYRO1000343, THYRO1000358, THYRO1000368, THYRO1000387, THYRO1000394, THYRO1000395, THYRO1000401, THYRO1000452, THYRO1000471, THYRO1000484, THYRO1000558, THYRO1000569, THYRO1000585, THYRO1000602, THYRO1000625, THYRO1000637, THYRO1000658, THYRO1000666, THYRO1000676, THYRO1000684, THYRO1000699, THYRO1000712, THYRO1000715, THYRO1000748, THYRO1000756, THYRO1000787, THYRO1000815, THYRO1000843, THYRO1000855, THYRO1000865, THYRO1000916, THYRO1000926, THYRO1000951, THYRO1000974, THYRO1000975, THYRO1000983, THYRO1000984, THYRO1000988, THYRO1001003, THYRO1001031, THYRO1001062, THYRO1001093, THYRO1001120, THYRO1001121, THYRO1001133, THYRO1001173, THYRO1001177, THYRO1001189, THYRO1001213, THYRO1001287, THYRO1001313, THYRO1001320, THYRO1001321, THYRO1001322, THYRO1001363, THYRO1001365, THYRO1001374, THYRO1001401, THYRO1001403, THYRO1001405, THYRO1001406, THYRO1001411, THYRO1001426, THYRO1001434, THYRO1001458, THYRO1001480, THYRO1001487, THYRO1001534, THYRO1001537, THYRO1001541, THYRO1001570, THYRO1001573, THYRO1001584, THYRO1001595, THYRO1001602, THYRO1001605, THYRO1001617, THYRO1001637, THYRO1001656, THYRO1001671, THYRO1001673, THYRO1001703, THYRO1001706, THYRO1001738, THYRO1001746, THYRO1001772, THYRO1001793, THYRO1001809, THYRO1001828, THYRO1001854, THYRO1001895, THYRO1001907, VESEN1000122, Y79AA1000013, Y79AA1000033, Y79AA1000037, Y79AA1000059, Y79AA1000065, Y79AA1000131, Y79AA1000181, Y79AA1000202, Y79AA1000214, Y79AA1000230, Y79AA1000231, Y79AA1000258, Y79AA1000268, Y79AA1000313, Y79AA1000342, Y79AA1000346, Y79AA1000349, Y79AA1000355, Y79AA1000368, Y79AA1000405, Y79AA1000410, Y79AA1000469, Y79AA1000480, Y79AA1000538, Y79AA1000539, Y79AA1000540, Y79AA1000560, Y79AA1000574, Y79AA1000589, Y79AA1000627, Y79AA1000782, Y79AA1000794, Y79AA1000800, Y79AA1000805, Y79AA1000833, Y79AA1000850, Y79AA1000962, Y79AA1000966, Y79AA1000968, Y79AA1000969, Y79AA1000985, Y79AA1001023, Y79AA1001041, Y79AA1001048, Y79AA1001061, Y79AA1001068, Y79AA1001077, Y79AA1001105, Y79AA1001145, Y79AA1001167, Y79AA1001177, Y79AA1001185, Y79AA1001211, Y79AA1001216, Y79AA1001228, Y79AA1001233, Y79AA1001236, Y79AA1001299, Y79AA1001323, Y79AA1001384, Y79AA1001391, Y79AA1001394, Y79AA1001402, Y79AA1001511, Y79AA1001533, Y79AA1001548, Y79AA1001555, Y79AA1001594, Y79AA1001603, Y79AA1001613, Y79AA1001647, Y79AA1001665, Y79AA1001679, Y79AA1001692, Y79AA1001705, Y79AA1001711, Y79AA1001805, Y79AA1001827, Y79AA1001846, Y79AA1001866, Y79AA1001875, Y79AA1001963, Y79AA1002083, Y79AA1002089, Y79AA1002093, Y79AA1002103, Y79AA1002125, Y79AA1002204, Y79AA1002211, Y79AA1002229, Y79AA1002234, Y79AA1002246, Y79AA1002258, Y79AA1002351, Y79AA1002361, Y79AA1002399, Y79AA1002433, Y79AA1002472, Y79AA1002482.

[0530] Genes that were expressed in all the tissues tested are indicated below by the corresponding clone names:

[0531] HEMBA1000020, HEMBA1000150, HEMBA1000282, HEMBA1000376, HEMBA1000387, HEMBA1000508, HEMBA1000519, HEMBA1000575, HEMBA1000655, HEMBA1000682, HEMBA1000702, HEMBA1000726, HEMBA1000774, HEMBA1000960, HEMBA1000986, HEMBA1001051, HEMBA1001085, HEMBA1001109, HEMBA1001197, HEMBA1001226, HEMBA1001286, HEMBA1001299, HEMBA1001377, HEMBA1001435, HEMBA1001476, HEMBA1001510, HEMBA1001557, HEMBA1001570, HEMBA1001581, HEMBA1001651, HEMBA1001678, HEMBA1001791, HEMBA1001824, HEMBA1001991, HEMBA1002100, HEMBA1002102, HEMBA1002113, HEMBA1002150, HEMBA1002160, HEMBA1002166, HEMBA1002226, HEMBA1002229, HEMBA1002381, HEMBA1002508, HEMBA1002552, HEMBA1002624, HEMBA1002645, HEMBA1002659, HEMBA1002678, HEMBA1002703, HEMBA1002728, HEMBA1002818, HEMBA1002934, HEMBA1003021, HEMBA1003033, HEMBA1003037, HEMBA1003166, HEMBA1003212, HEMBA1003220, HEMBA1003314, HEMBA1003322, HEMBA1003330, HEMBA1003348, HEMBA1003370, HEMBA1003376, HEMBA1003480, HEMBA1003528, HEMBA1003531, HEMBA1003571, HEMBA1003591, HEMBA1003621, HEMBA1003667, HEMBA1003690, HEMBA1003827, HEMBA1003836, HEMBA1003838, HEMBA1003893, HEMBA1003926, HEMBA1004024, HEMBA1004056, HEMBA1004111, HEMBA1004164, HEMBA1004267, HEMBA1004306, HEMBA1004335, HEMBA1004499, HEMBA1004538, HEMBA1004753, HEMBA1005035, HEMBA1005079, HEMBA1005123, HEMBA1005149, HEMBA1005241, HEMBA1005296, HEMBA1005443, HEMBA1005468, HEMBA1005475, HEMBA1005513, HEMBA1005520, HEMBA1005552, HEMBA1005634, HEMBA1005852, HEMBA1005931, HEMBA1005934, HEMBA1005990, HEMBA1005999, HEMBA1006036, HEMBA1006138, HEMBA1006142, HEMBA1006381, HEMBA1006744, HEMBA1006832, HEMBA1006865, HEMBA1006993, HEMBA1007078, HEMBA1007080, HEMBA1007085, HEMBA1007121, HEMBB1000018, HEMBB1000024, HEMBB1000059, HEMBB1000173, HEMBB1000215, HEMBB1000337, HEMBB1000339, HEMBB1000343, HEMBB1000354, HEMBB1000374, HEMBB1000376, HEMBB1000434, HEMBB1000472, HEMBB1000490, HEMBB1000510, HEMBB1000554, HEMBB1000593, HEMBB1000637, HEMBB1000671, HEMBB1000684, HEMBB1000915, HEMBB1000996, HEMBB1001112, HEMBB1001126, HEMBB1001234, HEMBB1001367, HEMBB1001436, HEMBB1001527, HEMBB1001564, HEMBB1001588, HEMBB1001753, HEMBB1001834, HEMBB1001836, HEMBB1001967, HEMBB1001983, HEMBB1002005, HEMBB1002042, HEMBB1002045, HEMBB1002069, HEMBB1002134, HEMBB1002189, HEMBB1002218, HEMBB1002249, HEMBB1002364, HEMBB1002381, HEMBB1002442, HEMBB1002453, HEMBB1002520, HEMBB1002556, HEMBB1002596, HEMBB1002664, HEMBB1002699, MAMMA1000043, MAMMA1000057, MAMMA1000134, MAMMA1000155, MAMMA1000227, MAMMA1000257, MAMMA1000270, MAMMA1000307, MAMMA1000372, MAMMA1000416, MAMMA1000429, MAMMA1000431, MAMMA1000472, MAMMA1000478, MAMMA1000501, MAMMA1000524, MAMMA1000576, MAMMA1000594, MAMMA1000597, MAMMA1000605, MAMMA1000625, MAMMA1000696, MAMMA1000718, MAMMA1000734, MAMMA1000744, MAMMA1000760, MAMMA1000761, MAMMA1000782, MAMMA1000839, MAMMA1000851, MAMMA1000875, MAMMA1000877, MAMMA1000931, MAMMA1000940, MAMMA1000941, MAMMA1000942, MAMMA1000943, MAMMA1000962, MAMMA1000968, MAMMA1000998, MAMMA1001035, MAMMA1001080, MAMMA1001126, MAMMA1001133, MAMMA1001139, MAMMA1001143, MAMMA1001154, MAMMA1001161, MAMMA1001186, MAMMA1001198, MAMMA1001202, MAMMA1001203, MAMMA1001206, MAMMA1001215, MAMMA1001220, MAMMA1001256, MAMMA1001260, MAMMA1001274, MAMMA1001296, MAMMA1001383, MAMMA1001388, MAMMA1001397, MAMMA1001442, MAMMA1001452, MAMMA1001465, MAMMA1001606, MAMMA1001620, MAMMA1001663, MAMMA1001743, MAMMA1001745, MAMMA1001760, MAMMA1001769, MAMMA1001783, MAMMA1001878, MAMMA1001956, MAMMA1001969, MAMMA1001970, MAMMA1002009, MAMMA1002032, MAMMA1002056, MAMMA1002058, MAMMA1002132, MAMMA1002155, MAMMA1002174, MAMMA1002215, MAMMA1002267, MAMMA1002293, MAMMA1002310, MAMMA1002311, MAMMA1002319, MAMMA1002359, MAMMA1002428, MAMMA1002434, MAMMA1002454, MAMMA1002573, MAMMA1002603, MAMMA1002612, MAMMA1002617, MAMMA1002618, MAMMA1002623, MAMMA1002629, MAMMA1002665, MAMMA1002673, MAMMA1002708, MAMMA1002721, MAMMA1002764, MAMMA1002830, MAMMA1002844, MAMMA1002858, MAMMA1002908, MAMMA1002909, MAMMA1002970, MAMMA1003031, MAMMA1003040, MAMMA1003047, MAMMA1003150, NT2RM1000018, NT2RM1000039, NT2RM1000059, NT2RM1000086, NT2RM1000252, NT2RM1000256, NT2RM1000260, NT2RM1000314, NT2RM1000857, NT2RM1000883, NT2RM1000885, NT2RM1000894, NT2RM2000191, NT2RM2000368, NT2RM2000407, NT2RM2000422, NT2RM2000599, NT2RM2000623, NT2RM2000795, NT2RM2001100, NT2RM2001141, NT2RM2001247, NT2RM2001716, NT2RM2001896, NT2RM2002091, NT2RM2002142, NT2RM4000366, NT2RM4000764, NT2RM4000779, NT2RM4000852, NT2RM4001140, NT2RM4002044, NT2RM4002189, NT2RM4002482, NT2RM4002499, NT2RP1000324, NT2RP1000357, NT2RP1000363, NT2RP1000460, NT2RP1000721, NT2RP1000738, NT2RP1000851, NT2RP2000040, NT2RP2000108, NT2RP2000704, NT2RP2000845, NT2RP2001036, NT2RP2001168, NT2RP2001226, NT2RP2001312, NT2RP2001328, NT2RP2001366, NT2RP2001394, NT2RP2001511, NT2RP2001526, NT2RP2001569, NT2RP2001581, NT2RP2001678, NT2RP2001907, NT2RP2001943, NT2RP2002457, NT2RP2002672, NT2RP2002710, NT2RP2002750, NT2RP2002752, NT2RP2002862, NT2RP2002979, NT2RP2002987, NT2RP2003117, NT2RP2003293, NT2RP2003391, NT2RP2003668, NT2RP2003781, NT2RP2003825, NT2RP2003912, NT2RP2003986, NT2RP2003988, NT2RP2004170, NT2RP2004270, NT2RP2004339, NT2RP2004392, NT2RP2004538, NT2RP2004568, NT2RP2004736, NT2RP2005354, NT2RP2005457, NT2RP2005496, NT2RP2005701, NT2RP2005753, NT2RP2005773, NT2RP2005908, NT2RP2006023, NT2RP2006184, NT2RP3000080, NT2RP3000348, NT2RP3000531, NT2RP3000596, NT2RP3000644, NT2RP3000742, NT2RP3000826, NT2RP3000850, NT2RP3000968, NT2RP3001274, NT2RP3001338, NT2RP3001340, NT2RP3001527, NT2RP3001712, NT2RP3002142, NT2RP3002603, NT2RP3002909, NT2RP3003157, NT2RP3003576, NT2RP3003819, NT2RP3003842, NT2RP3004093, NT2RP3004095, NT2RP3004110, NT2RP3004125, NT2RP3004282, NT2RP3004332, NT2RP3004348, NT2RP3004349, NT2RP3004466, NT2RP3004470, NT2RP3004503, NT2RP3004670, NT2RP4000035, NT2RP4000109, NT2RP4000150, NT2RP4000185, NT2RP4000210, NT2RP4000212, NT2RP4000214, NT2RP4000243, NT2RP4000515, NT2RP4000728, NT2RP4000878, NT2RP4000918, NT2RP4001100, NT2RP4001502, NT2RP4001568, NT2RP4001677, NT2RP4001679, NT2RP4001828, NT2RP4001861, NT2RP4002888, NT2RP5003506, OVARC1000085, OVARC1000408, OVARC1000420, OVARC1000427, OVARC1000442, OVARC1000526, OVARC1000533, OVARC1000576, OVARC1000622, OVARC1000800, OVARC1000846, OVARC1000890, OVARC1000960, OVARC1000964, OVARC1000999, OVARC1001000, OVARC1001051, OVARC1001173, OVARC1001176, OVARC1001180, OVARC1001271, OVARC1001329, OVARC1001341, OVARC1001342, OVARC1001344, OVARC1001381, OVARC1001668, OVARC1001731, OVARC1001802, OVARC1001809, OVARC1001880, OVARC1001950, OVARC1001989, OVARC1002082, OVARC1002107, OVARC1002165, PLACE1000061, PLACE1000292, PLACE1000374, PLACE1000401, PLACE1000444, PLACE1000547, PLACE1000583, PLACE1000706, PLACE1000749, PLACE1000972, PLACE1001036, PLACE1001062, PLACE1001136, PLACE1001304, PLACE1001323, PLACE1001399, PLACE1001414, PLACE1001456, PLACE1001484, PLACE1001545, PLACE1001610, PLACE1001761, PLACE1001912, PLACE1002004, PLACE1002066, PLACE1002532, PLACE1002578, PLACE1002655, PLACE1002775, PLACE1002881, PLACE1003205, PLACE1003256, PLACE1003361, PLACE1003493, PLACE1003519, PLACE1003528, PLACE1003566, PLACE1003592, PLACE1003870, PLACE1003968, PLACE1004103, PLACE1004149, PLACE1004156, PLACE1004161, PLACE1004242, PLACE1004336, PLACE1004358, PLACE1004672, PLACE1004736, PLACE1004824, PLACE1004900, PLACE1004979, PLACE1005086, PLACE1005101, PLACE1005102, PLACE1005128, PLACE1005232, PLACE1005528, PLACE1006002, PLACE1006139, PLACE1006412, PLACE1006540, PLACE1007132, PLACE1007367, PLACE1008405, PLACE1008457, PLACE1010310, PLACE1011056, PLACE1011340, PLACE1011646, PLACE1011783, PLACE2000003, PLACE2000030, PLACE2000039, PLACE2000047, PLACE2000124, PLACE2000235, PLACE2000305, PLACE2000335, PLACE2000347, PLACE2000411, PLACE2000419, PLACE2000435, PLACE2000450, PLACE2000465, PLACE3000004, PLACE3000009, PLACE3000070, PLACE3000124, PLACE3000136, PLACE3000145, PLACE3000155, PLACE3000158, PLACE3000207, PLACE3000254, PLACE3000271, PLACE3000304, PLACE3000331, PLACE3000399, PLACE3000401, PLACE3000455, PLACE3000475, PLACE4000009, PLACE4000049, PLACE4000128, PLACE4000131, PLACE4000192, PLACE4000211, PLACE4000250, PLACE4000323, PLACE4000445, PLACE4000450, PLACE4000465, PLACE4000612, THYRO1000085, THYRO1000132, THYRO1000186, THYRO1000484, THYRO1000569, THYRO1000699, THYRO1000712, THYRO1000815, THYRO1001173, THYRO1001189, THYRO1001401, THYRO1001406, THYRO1001411, THYRO1001426, THYRO1001480, THYRO1001487, THYRO1001537, THYRO1001637, THYRO1001772, THYRO1001793, THYRO1001828, THYRO1001854, Y79AA1000059, Y79AA1000131, Y79AA1000202, Y79AA1000214, Y79AA1000231, Y79AA1000313, Y79AA1000342, Y79AA1000349, Y79AA1000410, Y79AA1000539, Y79AA1000560, Y79AA1000589, Y79AA1000833, Y79AA1000985, Y79AA1001077, Y79AA1001145, Y79AA1001216, Y79AA1001228, Y79AA1001299, Y79AA1001402, Y79AA1001548, Y79AA1001603, Y79AA1001613, Y79AA1001805, Y79AA1002472, Y79AA1002482.

[0532] Genes that were expressed at low levels in any of the tissues tested are indicated below by the corresponding clone names:

[0533] HEMBA1000005, HEMBA1000050, HEMBA1000141, HEMBA1000180, HEMBA1000193, HEMBA1000201, HEMBA1000213, HEMBA1000251, HEMBA1000264, HEMBA1000290, HEMBA1000302, HEMBA1000307, HEMBA1000333, HEMBA1000390, HEMBA1000418, HEMBA1000434, HEMBA1000442, HEMBA1000460, HEMBA1000464, HEMBA1000490, HEMBA1000504, HEMBA1000518, HEMBA1000520, HEMBA1000531, HEMBA1000555, HEMBA1000563, HEMBA1000592, HEMBA1000594, HEMBA1000608, HEMBA1000637, HEMBA1000662, HEMBA1000686, HEMBA1000719, HEMBA1000722, HEMBA1000727, HEMBA1000747, HEMBA1000773, HEMBA1000817, HEMBA1000822, HEMBA1000851, HEMBA1000867, HEMBA1000869, HEMBA1000943, HEMBA1000946, HEMBA1000968, HEMBA1000974, HEMBA1000985, HEMBA1001009, HEMBA1001019, HEMBA1001022, HEMBA1001024, HEMBA1001026, HEMBA1001043, HEMBA1001052, HEMBA1001071, HEMBA1001094, HEMBA1001099, HEMBA1001122, HEMBA1001174, HEMBA1001247, HEMBA1001257, HEMBA1001319, HEMBA1001323, HEMBA1001327, HEMBA1001361, HEMBA1001383, HEMBA1001391, HEMBA1001407, HEMBA1001411, HEMBA1001442, HEMBA1001455, HEMBA1001478, HEMBA1001522, HEMBA1001585, HEMBA1001635, HEMBA1001658, HEMBA1001672, HEMBA1001675, HEMBA1001681, HEMBA1001702, HEMBA1001711, HEMBA1001723, HEMBA1001744, HEMBA1001746, HEMBA1001800, HEMBA1001803, HEMBA1001819, HEMBA1001820, HEMBA1001835, HEMBA1001861, HEMBA1001915, HEMBA1001918, HEMBA1001921, HEMBA1001942, HEMBA1001945, HEMBA1001950, HEMBA1001960, HEMBA1001962, HEMBA1001979, HEMBA1002022, HEMBA1002039, HEMBA1002084, HEMBA1002139, HEMBA1002153, HEMBA1002199, HEMBA1002204, HEMBA1002212, HEMBA1002215, HEMBA1002253, HEMBA1002257, HEMBA1002321, HEMBA1002348, HEMBA1002349, HEMBA1002430, HEMBA1002460, HEMBA1002475, HEMBA1002547, HEMBA1002555, HEMBA1002583, HEMBA1002621, HEMBA1002628, HEMBA1002651, HEMBA1002666, HEMBA1002688, HEMBA1002716, HEMBA1002742, HEMBA1002770, HEMBA1002801, HEMBA1002850, HEMBA1002886, HEMBA1002937, HEMBA1002939, HEMBA1002951, HEMBA1002954, HEMBA1002999, HEMBA1003035, HEMBA1003064, HEMBA1003077, HEMBA1003096, HEMBA1003117, HEMBA1003197, HEMBA1003222, HEMBA1003250, HEMBA1003291, HEMBA1003304, HEMBA1003309, HEMBA1003369, HEMBA1003395, HEMBA1003402, HEMBA1003417, HEMBA1003433, HEMBA1003545, HEMBA1003548, HEMBA1003555, HEMBA1003560, HEMBA1003568, HEMBA1003569, HEMBA1003579, HEMBA1003622, HEMBA1003630, HEMBA1003646, HEMBA1003662, HEMBA1003679, HEMBA1003684, HEMBA1003783, HEMBA1003784, HEMBA1003799, HEMBA1003807, HEMBA1003856, HEMBA1003866, HEMBA1003908, HEMBA1003939, HEMBA1003950, HEMBA1003953, HEMBA1003959, HEMBA1003976, HEMBA1003985, HEMBA1004000, HEMBA1004015, HEMBA1004038, HEMBA1004042, HEMBA1004045, HEMBA1004055, HEMBA1004143, HEMBA1004150, HEMBA1004168, HEMBA1004199, HEMBA1004202, HEMBA1004207, HEMBA1004241, HEMBA1004248, HEMBA1004264, HEMBA1004272, HEMBA1004276, HEMBA1004286, HEMBA1004295, HEMBA1004330, HEMBA1004334, HEMBA1004366, HEMBA1004372, HEMBA1004389, HEMBA1004394, HEMBA1004482, HEMBA1004502, HEMBA1004573, HEMBA1004631, HEMBA1004632, HEMBA1004637, HEMBA1004638, HEMBA1004666, HEMBA1004693, HEMBA1004730, HEMBA1004733, HEMBA1004734, HEMBA1004768, HEMBA1004770, HEMBA1004776, HEMBA1004795, HEMBA1004806, HEMBA1004807, HEMBA1004820, HEMBA1004889, HEMBA1004900, HEMBA1004929, HEMBA1004956, HEMBA1004973, HEMBA1004977, HEMBA1004978, HEMBA1004983, HEMBA1004995, HEMBA1005009, HEMBA1005029, HEMBA1005062, HEMBA1005066, HEMBA1005083, HEMBA1005159, HEMBA1005185, HEMBA1005219, HEMBA1005232, HEMBA1005274, HEMBA1005293, HEMBA1005314, HEMBA1005318, HEMBA1005372, HEMBA1005394, HEMBA1005410, HEMBA1005426, HEMBA1005497, HEMBA1005506, HEMBA1005508, HEMBA1005517, HEMBA1005528, HEMBA1005582, HEMBA1005621, HEMBA1005631, HEMBA1005666, HEMBA1005699, HEMBA1005737, HEMBA1005746, HEMBA1005755, HEMBA1005884, HEMBA1005891, HEMBA1005909, HEMBA1005963, HEMBA1006035, HEMBA1006067, HEMBA1006130, HEMBA1006158, HEMBA1006198, HEMBA1006268, HEMBA1006272, HEMBA1006284, HEMBA1006291, HEMBA1006293, HEMBA1006334, HEMBA1006347, HEMBA1006424, HEMBA1006446, HEMBA1006467, HEMBA1006471, HEMBA1006474, HEMBA1006489, HEMBA1006492, HEMBA1006494, HEMBA1006507, HEMBA1006521, HEMBA1006530, HEMBA1006535, HEMBA1006540, HEMBA1006559, HEMBA1006566, HEMBA1006579, HEMBA1006583, HEMBA1006665, HEMBA1006682, HEMBA1006767, HEMBA1006789, HEMBA1006929, HEMBA1006938, HEMBA1006976, HEMBA1006996, HEMBA1007017, HEMBA1007018, HEMBA1007112, HEMBA1007251, HEMBA1007281, HEMBA1007319, HEMBA1007342, HEMBB1000048, HEMBB1000175, HEMBB1000250, HEMBB1000272, HEMBB1000284, HEMBB1000335, HEMBB1000399, HEMBB1000404, HEMBB1000449, HEMBB1000487, HEMBB1000518, HEMBB1000592, HEMBB1000665, HEMBB1000673, HEMBB1000725, HEMBB1000774, HEMBB1000789, HEMBB1000794, HEMBB1000822, HEMBB1000831, HEMBB1000852, HEMBB1000876, HEMBB1000883, HEMBB1000888, HEMBB1000973, HEMBB1000981, HEMBB1000985, HEMBB1001004, HEMBB1001008, HEMBB1001011, HEMBB1001051, HEMBB1001117, HEMBB1001199, HEMBB1001221, HEMBB1001242, HEMBB1001304, HEMBB1001314, HEMBB1001315, HEMBB1001326, HEMBB1001331, HEMBB1001335, HEMBB1001339, HEMBB1001356, HEMBB1001364, HEMBB1001384, HEMBB1001387, HEMBB1001394, HEMBB1001410, HEMBB1001424, HEMBB1001443, HEMBB1001464, HEMBB1001482, HEMBB1001603, HEMBB1001630, HEMBB1001641, HEMBB1001665, HEMBB1001668, HEMBB1001684, HEMBB1001685, HEMBB1001695, HEMBB1001736, HEMBB1001747, HEMBB1001760, HEMBB1001762, HEMBB1001785, HEMBB1001797, HEMBB1001839, HEMBB1001867, HEMBB1001868, HEMBB1001872, HEMBB1001874, HEMBB1001875, HEMBB1001899, HEMBB1001905, HEMBB1001930, HEMBB1002002, HEMBB1002009, HEMBB1002044, HEMBB1002255, HEMBB1002266, HEMBB1002340, HEMBB1002458, HEMBB1002492, HEMBB1002502, HEMBB1002509, HEMBB1002510, HEMBB1002522, HEMBB1002550, HEMBB1002600, HEMBB1002677, HEMBB1002686, HEMBB1002702, HEMBB1002705, MAMMA1000175, MAMMA1000221, MAMMA1000309, MAMMA1000424, MAMMA1000458, MAMMA1000468, MAMMA1000490, MAMMA1000616, MAMMA1000621, MAMMA1000843, MAMMA1000845, MAMMA1000855, MAMMA1000865, MAMMA1001030, MAMMA1001075, MAMMA1001091, MAMMA1001110, MAMMA1001222, MAMMA1001322, MAMMA1001476, MAMMA1001510, MAMMA1001627, MAMMA1001649, MAMMA1001730, MAMMA1001744, MAMMA1001757, MAMMA1001764, MAMMA1001788, MAMMA1001812, MAMMA1001817, MAMMA1001963, MAMMA1002011, MAMMA1002041, MAMMA1002093, MAMMA1002118, MAMMA1002156, MAMMA1002170, MAMMA1002268, MAMMA1002269, MAMMA1002385, MAMMA1002566, MAMMA1002619, MAMMA1002650, MAMMA1002685, MAMMA1002699, MAMMA1002727, MAMMA1002746, MAMMA1002758, MAMMA1002769, MAMMA1002820, MAMMA1002835, MAMMA1002871, MAMMA1002938, MAMMA1002982, MAMMA1003019, MAMMA1003026, MAMMA1003049, MAMMA1003056, MAMMA1003104, MAMMA1003135, MAMMA1003140, MAMMA1003146, MAMMA1003166, NT2RM1000001, NT2RM1000032, NT2RM1000055, NT2RM1000062, NT2RM1000080, NT2RM1000092, NT2RM1000118, NT2RM1000119, NT2RM1000127, NT2RM1000131, NT2RM1000132, NT2RM1000153, NT2RM1000186, NT2RM1000187, NT2RM1000199, NT2RM1000242, NT2RM1000244, NT2RM1000257, NT2RM1000271, NT2RM1000280, NT2RM1000318, NT2RM1000354, NT2RM1000365, NT2RM1000388, NT2RM1000394, NT2RM1000399, NT2RM1000421, NT2RM1000430, NT2RM1000539, NT2RM1000563, NT2RM1000623, NT2RM1000648, NT2RM1000661, NT2RM1000666, NT2RM1000669, NT2RM1000691, NT2RM1000699, NT2RM1000702, NT2RM1000741, NT2RM1000742, NT2RM1000746, NT2RM1000770, NT2RM1000772, NT2RM1000780, NT2RM1000781, NT2RM1000800, NT2RM1000811, NT2RM1000833, NT2RM1000850, NT2RM1000852, NT2RM1000898, NT2RM1000924, NT2RM1000978, NT2RM1001003, NT2RM1001008, NT2RM1001043, NT2RM1001059, NT2RM1001066, NT2RM1001072, NT2RM1001074, NT2RM1001085, NT2RM1001102, NT2RM1001105, NT2RM1001112, NT2RM2000042, NT2RM2000092, NT2RM2000124, NT2RM2000192, NT2RM2000322, NT2RM2000395, NT2RM2000469, NT2RM2000522, NT2RM2000540, NT2RM2000556, NT2RM2000566, NT2RM2000594, NT2RM2000609, NT2RM2000639, NT2RM2000669, NT2RM2000691, NT2RM2000718, NT2RM2000951, NT2RM2001035, NT2RM2001152, NT2RM2001256, NT2RM2001291, NT2RM2001319, NT2RM2001370, NT2RM2001420, NT2RM2001524, NT2RM2001544, NT2RM2001547, NT2RM2001588, NT2RM2001592, NT2RM2001613, NT2RM2001637, NT2RM2001648, NT2RM2001652, NT2RM2001659, NT2RM2001664, NT2RM2001675, NT2RM2001681, NT2RM2001700, NT2RM2001723, NT2RM2001730, NT2RM2001768, NT2RM2001784, NT2RM2001800, NT2RM2001803, NT2RM2001805, NT2RM2001813, NT2RM2001823, NT2RM2001855, NT2RM2001879, NT2RM2001886, NT2RM2001935, NT2RM2001982, NT2RM2001983, NT2RM2002004, NT2RM2002014, NT2RM2002055, NT2RM2002128, NT2RM4000024, NT2RM4000027, NT2RM4000061, NT2RM4000085, NT2RM4000104, NT2RM4000156, NT2RM4000167, NT2RM4000197, NT2RM4000200, NT2RM4000215, NT2RM4000244, NT2RM4000349, NT2RM4000386, NT2RM4000421, NT2RM4000486, NT2RM4000514, NT2RM4000520, NT2RM4000531, NT2RM4000532, NT2RM4000534, NT2RM4000590, NT2RM4000611, NT2RM4000717, NT2RM4000778, NT2RM4000813, NT2RM4000950, NT2RM4000979, NT2RM4001002, NT2RM4001016, NT2RM4001032,- NT2RM4001047, NT2RM4001054, NT2RM4001116, NT2RM4001203, NT2RM4001217, NT2RM4001256, NT2RM4001258, NT2RM4001344, NT2RM4001384, NT2RM4001410, NT2RM4001411, NT2RM4001454, NT2RM4001455, NT2RM4001489, NT2RM4001519, NT2RM4001557, NT2RM4001582, NT2RM4001592, NT2RM4001605, NT2RM4001611, NT2RM4001629, NT2RM4001650, NT2RM4001758, NT2RM4001776, NT2RM4001810, NT2RM4001823, NT2RM4001856, NT2RM4001858, NT2RM4001930, NT2RM4001938, NT2RM4001969, NT2RM4001984, NT2RM4002018, NT2RM4002062, NT2RM4002073, NT2RM4002075, NT2RM4002093, NT2RM4002128, NT2RM4002146, NT2RM4002161, NT2RM4002251, NT2RM4002301, NT2RM4002344, NT2RM4002390, NT2RM4002452, NT2RM4002460, NT2RM4002527, NT2RM4002565, NT2RM4002567, NT2RM4002623, NT2RP1000018, NT2RP1000035, NT2RP1000040, NT2RP1000063, NT2RP1000086, NT2RP1000111, NT2RP1000112, NT2RP1000130, NT2RP1000163, NT2RP1000170, NT2RP1000174, NT2RP1000191, NT2RP1000202, NT2RP1000243, NT2RP1000259, NT2RP1000348, NT2RP1000409, NT2RP1000413, NT2RP1000416, NT2RP1000418, NT2RP1000478, NT2RP1000481, NT2RP1000493, NT2RP1000547, NT2RP1000574, NT2RP1000577, NT2RP1000581, NT2RP1000609, NT2RP1000629, NT2RP1000695, NT2RP1000701, NT2RP1000733, NT2RP1000746, NT2RP1000767, NT2RP1000782, NT2RP1000834, NT2RP1000836, NT2RP1000846, NT2RP1000915, NT2RP1000916, NT2RP1000943, NT2RP1000947, NT2RP1000954, NT2RP1000980, NT2RP1000988, NT2RP1001014, NT2RP1001073, NT2RP1001080, NT2RP1001113, NT2RP1001173, NT2RP1001199, NT2RP1001247, NT2RP1001253, NT2RP1001286, NT2RP1001294, NT2RP1001302, NT2RP1001424, NT2RP1001457, NT2RP1001466, NT2RP1001482, NT2RP1001494, NT2RP1001616, NT2RP1001665, NT2RP2000032, NT2RP2000091, NT2RP2000097, NT2RP2000098, NT2RP2000114, NT2RP2000157, NT2RP2000161, NT2RP2000239, NT2RP2000248, NT2RP2000274, NT2RP2000288, NT2RP2000298, NT2RP2000310, NT2RP2000337, NT2RP2000369, NT2RP2000420, NT2RP2000422, NT2RP2000448, NT2RP2000503, NT2RP2000510, NT2RP2000516, NT2RP2000523, NT2RP2000634, NT2RP2000656, NT2RP2000658, NT2RP2000678, NT2RP2000710, NT2RP2000731, NT2RP2000812, NT2RP2000814, NT2RP2000819, NT2RP2000841, NT2RP2000842, NT2RP2000892, NT2RP2000932, NT2RP2000985, NT2RP2001094, NT2RP2001173, NT2RP2001196, NT2RP2001218, NT2RP2001245, NT2RP2001277, NT2RP2001295, NT2RP2001381, NT2RP2001423, NT2RP2001440, NT2RP2001445, NT2RP2001520, NT2RP2001536, NT2RP2001613, NT2RP2001675, NT2RP2001740, NT2RP2001762, NT2RP2001813, NT2RP2001876, NT2RP2001936, NT2RP2001946, NT2RP2001976, NT2RP2001991, NT2RP2002041, NT2RP2002046, NT2RP2002047, NT2RP2002058, NT2RP2002076, NT2RP2002079, NT2RP2002124, NT2RP2002185, NT2RP2002219, NT2RP2002231, NT2RP2002235, NT2RP2002256, NT2RP2002270, NT2RP2002325, NT2RP2002394, NT2RP2002408, NT2RP2002498, NT2RP2002606, NT2RP2002727, NT2RP2002736, NT2RP2002740, NT2RP2002769, NT2RP2002857, NT2RP2002891, NT2RP2002925, NT2RP2002929, NT2RP2002954, NT2RP2002959, NT2RP2003108, NT2RP2003125, NT2RP2003137, NT2RP2003161, NT2RP2003206, NT2RP2003265, NT2RP2003286, NT2RP2003295, NT2RP2003297, NT2RP2003307, NT2RP2003308, NT2RP2003347, NT2RP2003367, NT2RP2003393, NT2RP2003394, NT2RP2003401, NT2RP2003456, NT2RP2003506, NT2RP2003513, NT2RP2003522, NT2RP2003559, NT2RP2003629, NT2RP2003643, NT2RP2003687, NT2RP2003706, NT2RP2003713, NT2RP2003727, NT2RP2003751, NT2RP2003793, NT2RP2003871, NT2RP2003952, NT2RP2004142, NT2RP2004152, NT2RP2004172, NT2RP2004187, NT2RP2004207, NT2RP2004232, NT2RP2004242, NT2RP2004245, NT2RP2004316, NT2RP2004321, NT2RP2004365, NT2RP2004366, NT2RP2004373, NT2RP2004412, NT2RP2004425, NT2RP2004512, NT2RP2004551, NT2RP2004587, NT2RP2004594, NT2RP2004600, NT2RP2004655, NT2RP2004689, NT2RP2004768, NT2RP2004799, NT2RP2004802, NT2RP2004816, NT2RP2004841, NT2RP2004936, NT2RP2004959, NT2RP2004982, NT2RP2005000, NT2RP2005001, NT2RP2005031, NT2RP2005037, NT2RP2005038, NT2RP2005126, NT2RP2005139, NT2RP2005140, NT2RP2005159, NT2RP2005162, NT2RP2005270, NT2RP2005293, NT2RP2005344, NT2RP2005441, NT2RP2005453, NT2RP2005464, NT2RP2005465, NT2RP2005495, NT2RP2005520, NT2RP2005531, NT2RP2005549, NT2RP2005557, NT2RP2005622, NT2RP2005637, NT2RP2005640, NT2RP2005645, NT2RP2005683, NT2RP2005690, NT2RP2005712, NT2RP2005719, NT2RP2005748, NT2RP2005763, NT2RP2005775, NT2RP2005815, NT2RP2005857, NT2RP2005859, NT2RP2005890, NT2RP2005901, NT2RP2005933, NT2RP2005942, NT2RP2006038, NT2RP2006069, NT2RP2006098, NT2RP2006100, NT2RP2006141, NT2RP2006186, NT2RP2006219, NT2RP2006237, NT2RP2006238, NT2RP2006261, NT2RP2006321, NT2RP2006323, NT2RP2006333, NT2RP2006334, NT2RP2006365, NT2RP2006454, NT2RP2006456, NT2RP2006534, NT2RP2006554, NT2RP2006565, NT2RP2006573, NT2RP3000068, NT2RP3000072, NT2RP3000092, NT2RP3000109, NT2RP3000233, NT2RP3000247, NT2RP3000333, NT2RP3000397, NT2RP3000441, NT2RP3000449, NT2RP3000484, NT2RP3000561, NT2RP3000578, NT2RP3000582, NT2RP3000590, NT2RP3000592, NT2RP3000599, NT2RP3000605, NT2RP3000665, NT2RP3000759, NT2RP3000825, NT2RP3000852, NT2RP3000917, NT2RP3000994, NT2RP3001004, NT2RP3001109, NT2RP3001113, NT2RP3001115, NT2RP3001126, NT2RP3001214, NT2RP3001221, NT2RP3001232, NT2RP3001236, NT2RP3001239, NT2RP3001253, NT2RP3001260, NT2RP3001268, NT2RP3001318, NT2RP3001325, NT2RP3001374, NT2RP3001383, NT2RP3001392, NT2RP3001396, NT2RP3001407, NT2RP3001449, NT2RP3001490, NT2RP3001497, NT2RP3001580, NT2RP3001607, NT2RP3001621, NT2RP3001708, NT2RP3001716, NT2RP3001753, NT2RP3001854, NT2RP3001855, NT2RP3001915, NT2RP3001926, NT2RP3001969, NT2RP3001989, NT2RP3002004, NT2RP3002007, NT2RP3002033, NT2RP3002045, NT2RP3002054, NT2RP3002056, NT2RP3002057, NT2RP3002063, NT2RP3002081, NT2RP3002097, NT2RP3002166, NT2RP3002181, NT2RP3002304, NT2RP3002351, NT2RP3002377, NT2RP3002549, NT2RP3002590, NT2RP3002628, NT2RP3002631, NT2RP3002659, NT2RP3002663, NT2RP3002671, NT2RP3002682, NT2RP3002687, NT2RP3002688, NT2RP3002713, NT2RP3002770, NT2RP3002785, NT2RP3002818, NT2RP3002861, NT2RP3002911, NT2RP3002948, NT2RP3002955, NT2RP3002969, NT2RP3002972, NT2RP3002978, NT2RP3002988, NT2RP3003059, NT2RP3003068, NT2RP3003133, NT2RP3003230, NT2RP3003242, NT2RP3003278, NT2RP3003311, NT2RP3003313, NT2RP3003330, NT2RP3003344, NT2RP3003353, NT2RP3003409, NT2RP3003464, NT2RP3003490, NT2RP3003491, NT2RP3003500, NT2RP3003552, NT2RP3003621, NT2RP3003665, NT2RP3003680, NT2RP3003701, NT2RP3003716, NT2RP3003746, NT2RP3003800, NT2RP3003828, NT2RP3003833, NT2RP3003846, NT2RP3003992, NT2RP3004016, NT2RP3004041, NT2RP3004209, NT2RP3004215, NT2RP3004242, NT2RP3004253, NT2RP3004341, NT2RP3004399, NT2RP3004454, NT2RP3004472, NT2RP3004480, NT2RP3004490, NT2RP3004527, NT2RP3004578, NT2RP3004617, NT2RP4000111, NT2RP4000129, NT2RP4000147, NT2RP4000159, NT2RP4000167, NT2RP4000367, NT2RP4000370, NT2RP4000376, NT2RP4000449, NT2RP4000455, NT2RP4000481, NT2RP4000498, NT2RP4000500, NT2RP4000519, NT2RP4000524, NT2RP4000556, NT2RP4000588, NT2RP4000713, NT2RP4000724, NT2RP4000737, NT2RP4000739, NT2RP4000781, NT2RP4000787, NT2RP4000855, NT2RP4000879, NT2RP4000925, NT2RP4000927, NT2RP4000929, NT2RP4000973, NT2RP4000979, NT2RP4000984, NT2RP4001004, NT2RP4001079, NT2RP4001138, NT2RP4001148, NT2RP4001159, NT2RP4001207, NT2RP4001210, NT2RP4001219, NT2RP4001260, NT2RP4001274, NT2RP4001313, NT2RP4001315, NT2RP4001353, NT2RP4001407, NT2RP4001447, NT2RP4001474, NT2RP4001483, NT2RP4001498, NT2RP4001551, NT2RP4001555, NT2RP4001567, NT2RP4001571, NT2RP4001614, NT2RP4001638, NT2RP4001644, NT2RP4001725, NT2RP4001730, NT2RP4001760, NT2RP4001803, NT2RP4001823, NT2RP4001927, NT2RP4002052, NT2RP4002058, NT2RP4002075, NT2RP4002083, NT2RP4002408, NT2RP4002791, NT2RP5003461, NT2RP5003500, NT2RP5003512, OVARC1000006, OVARC1000068, OVARC1000071, OVARC1000087, OVARC1000091, OVARC1000113, OVARC1000133, OVARC1000145, OVARC1000191, OVARC1000335, OVARC1000347, OVARC1000384, OVARC1000440, OVARC1000443, OVARC1000461, OVARC1000465, OVARC1000479, OVARC1000496, OVARC1000520, OVARC1000543, OVARC1000557, OVARC1000605, OVARC1000679, OVARC1000730, OVARC1000746, OVARC1000771, OVARC1000781, OVARC1000862, OVARC1000876, OVARC1000891, OVARC1000897, OVARC1000912, OVARC1000924, OVARC1000936, OVARC1000948, OVARC1000971, OVARC1000996, OVARC1001004, OVARC1001010, OVARC1001032, OVARC1001034, OVARC1001044, OVARC1001065, OVARC1001074, OVARC1001113, OVARC1001129, OVARC1001169, OVARC1001200, OVARC1001243, OVARC1001270, OVARC1001282, OVARC1001296, OVARC1001330, OVARC1001357, OVARC1001360, OVARC1001369, OVARC1001391, OVARC1001417, OVARC1001425, OVARC1001453, OVARC1001476, OVARC1001489, OVARC1001525, OVARC1001542, OVARC1001547, OVARC1001577, OVARC1001610, OVARC1001611, OVARC1001703, OVARC1001762, OVARC1001767, OVARC1001768, OVARC1001795, OVARC1001805, OVARC1001828, OVARC1001846, OVARC1001873, OVARC1001911, OVARC1001928, OVARC1001942, OVARC1002066, OVARC1002138, OVARC1002156, PLACE1000005, PLACE1000040, PLACE1000048, PLACE1000133, PLACE1000184, PLACE1000214, PLACE1000308, PLACE1000332, PLACE1000380, PLACE1000383, PLACE1000540, PLACE1000636, PLACE1000653, PLACE1000716, PLACE1000748, PLACE1000755, PLACE1000769, PLACE1000841, PLACE1000856, PLACE1000909, PLACE1000977, PLACE1001000, PLACE1001010, PLACE1001015, PLACE1001076, PLACE1001088, PLACE1001168, PLACE1001171, PLACE1001241, PLACE1001279, PLACE1001294, PLACE1001351, PLACE1001377, PLACE1001383, PLACE1001384, PLACE1001395, PLACE1001412, PLACE1001468, PLACE1001534, PLACE1001551, PLACE1001602, PLACE1001634, PLACE1001716, PLACE1001771, PLACE1001781, PLACE1001810, PLACE1001817, PLACE1001844, PLACE1001845, PLACE1001920, PLACE1001928, PLACE1002052, PLACE1002115, PLACE1002150, PLACE1002171, PLACE1002205, PLACE1002256, PLACE1002259, PLACE1002319, PLACE1002399, PLACE1002438, PLACE1002450, PLACE1002493, PLACE1002499, PLACE1002529, PLACE1002571, PLACE1002583, PLACE1002591, PLACE1002598, PLACE1002625, PLACE1002768, PLACE1002772, PLACE1002782, PLACE1002794, PLACE1002815, PLACE1002839, PLACE1002851, PLACE1002853, PLACE1002908, PLACE1002962, PLACE1002996, PLACE1003027, PLACE1003044, PLACE1003045, PLACE1003092, PLACE1003145, PLACE1003174, PLACE1003176, PLACE1003190, PLACE1003200, PLACE1003238, PLACE1003258, PLACE1003334, PLACE1003343, PLACE1003375, PLACE1003383, PLACE1003401, PLACE1003516, PLACE1003521, PLACE1003537, PLACE1003583, PLACE1003593, PLACE1003602, PLACE1003618, PLACE1003625, PLACE1003669, PLACE1003709, PLACE1003771, PLACE1003783, PLACE1003784, PLACE1003864, PLACE1003888, PLACE1003892, PLACE1003915, PLACE1003923, PLACE1003932, PLACE1004118, PLACE1004197, PLACE1004257, PLACE1004258, PLACE1004274, PLACE1004284, PLACE1004302, PLACE1004316, PLACE1004388, PLACE1004405, PLACE1004425, PLACE1004451, PLACE1004460, PLACE1004473, PLACE1004491, PLACE1004516, PLACE1004550, PLACE1004664, PLACE1004674, PLACE1004693, PLACE1004716, PLACE1004722, PLACE1004777, PLACE1004793, PLACE1004813, PLACE1004815, PLACE1004827, PLACE1004836, PLACE1004840, PLACE1004868, PLACE1004913, PLACE1004918, PLACE1004930, PLACE1004969, PLACE1004972, PLACE1004985, PLACE1005026, PLACE1005055, PLACE1005077, PLACE1005162, PLACE1005176, PLACE1005181, PLACE1005187, PLACE1005206, PLACE1005261, PLACE1005266, PLACE1005287, PLACE1005313, PLACE1005471, PLACE1005480, PLACE1005481, PLACE1005494, PLACE1005502, PLACE1005526, PLACE1005550, PLACE1005554, PLACE1005557, PLACE1005574, PLACE1005584, PLACE1005595, PLACE1005603, PLACE1005611, PLACE1005623, PLACE1005639, PLACE1005656, PLACE1005698, PLACE1005727, PLACE1005730, PLACE1005739, PLACE1005755, PLACE1005802, PLACE1005804, PLACE1005834, PLACE1005845, PLACE1005851, PLACE1005876, PLACE1005884, PLACE1005890, PLACE1005932, PLACE1005936, PLACE1005951, PLACE1005953, PLACE1005955, PLACE1005966, PLACE1005990, PLACE1006003, PLACE1006037, PLACE1006076, PLACE1006119, PLACE1006157, PLACE1006164, PLACE1006187, PLACE1006195, PLACE1006205, PLACE1006225, PLACE1006236, PLACE1006239, PLACE1006246, PLACE1006248, PLACE1006262, PLACE1006335, PLACE1006357, PLACE1006360, PLACE1006371, PLACE1006382, PLACE1006414, PLACE1006445, PLACE1006482, PLACE1006506, PLACE1006534, PLACE1006598, PLACE1006626, PLACE1006629, PLACE1006640, PLACE1006678, PLACE1006731, PLACE1006754, PLACE1006779, PLACE1006795, PLACE1006800, PLACE1006805, PLACE1006815, PLACE1006819, PLACE1006860, PLACE1006878, PLACE1006901, PLACE1006917, PLACE1006935, PLACE1006958, PLACE1006966, PLACE1007021, PLACE1007053, PLACE1007097, PLACE1007105, PLACE1007111, PLACE1007112, PLACE1007178, PLACE1007226, PLACE1007239, PLACE1007242, PLACE1007243, PLACE1007301, PLACE1007317, PLACE1007342, PLACE1007375, PLACE1007409, PLACE1007416, PLACE1007478, PLACE1007484, PLACE1007488, PLACE1007507, PLACE1007511, PLACE1007544, PLACE1007583, PLACE1007598, PLACE1007618, PLACE1007645, PLACE1007649, PLACE1007677, PLACE1007690, PLACE1007697, PLACE1007705, PLACE1007706, PLACE1007725, PLACE1007729, PLACE1007730, PLACE1007743, PLACE1007746, PLACE1007791, PLACE1007807, PLACE1007810, PLACE1007829, PLACE1007843, PLACE1007852, PLACE1007858, PLACE1007897, PLACE1007954, PLACE1007955, PLACE1007958, PLACE1007990, PLACE1008000, PLACE1008002, PLACE1008044, PLACE1008045, PLACE1008111, PLACE1008122, PLACE1008129, PLACE1008132, PLACE1008181, PLACE1008198, PLACE1008201, PLACE1008209, PLACE1008231, PLACE1008244, PLACE1008273, PLACE1008275, PLACE1008309, PLACE1008356, PLACE1008368, PLACE1008369, PLACE1008392, PLACE1008401, PLACE1008402, PLACE1008424, PLACE1008426, PLACE1008429, PLACE1008437, PLACE1008488, PLACE1008524, PLACE1008532, PLACE1008568, PLACE1008584, PLACE1008603, PLACE1008621, PLACE1008625, PLACE1008626, PLACE1008629, PLACE1008630, PLACE1008650, PLACE1008693, PLACE1008696, PLACE1008715, PLACE1008748, PLACE1008757, PLACE1008790, PLACE1008798, PLACE1008807, PLACE1008808, PLACE1008854, PLACE1008887, PLACE1008902, PLACE1008920, PLACE1008925, PLACE1008934, PLACE1008941, PLACE1009020, PLACE1009027, PLACE1009039, PLACE1009045, PLACE1009048, PLACE1009050, PLACE1009060, PLACE1009090, PLACE1009099, PLACE1009110, PLACE1009113, PLACE1009130, PLACE1009150, PLACE1009158, PLACE1009172, PLACE1009186, PLACE1009190, PLACE1009230, PLACE1009298, PLACE1009319, PLACE1009328, PLACE1009335, PLACE1009338, PLACE1009375, PLACE1009398, PLACE1009404, PLACE1009410, PLACE1009434, PLACE1009443, PLACE1009468, PLACE1009476, PLACE1009477, PLACE1009493, PLACE1009539, PLACE1009542, PLACE1009571, PLACE1009581, PLACE1009596, PLACE1009613, PLACE1009622, PLACE1009637, PLACE1009639, PLACE1009659, PLACE1009665, PLACE1009708, PLACE1009721, PLACE1009763, PLACE1009794, PLACE1009798, PLACE1009845, PLACE1009886, PLACE1009888, PLACE1009908, PLACE1009921, PLACE1009924, PLACE1009925, PLACE1009935, PLACE1009971, PLACE1009992, PLACE1009995, PLACE1009997, PLACE1010031, PLACE1010053, PLACE1010069, PLACE1010083, PLACE1010089, PLACE1010096, PLACE1010102, PLACE1010105, PLACE1010106, PLACE1010134, PLACE1010148, PLACE1010152, PLACE1010181, PLACE1010194, PLACE1010202, PLACE1010231, PLACE1010261, PLACE1010270, PLACE1010274, PLACE1010324, PLACE1010329, PLACE1010341, PLACE1010364, PLACE1010401, PLACE1010481, PLACE1010491, PLACE1010492, PLACE1010547, PLACE1010562, PLACE1010579, PLACE1010599, PLACE1010616, PLACE1010622, PLACE1010624, PLACE1010628, PLACE1010630, PLACE1010631, PLACE1010662, PLACE1010714, PLACE1010739, PLACE1010743, PLACE1010800, PLACE1010802, PLACE1010811, PLACE1010857, PLACE1010870, PLACE1010877, PLACE1010891, PLACE1010896, PLACE1010916, PLACE1010917, PLACE1010960, PLACE1010965, PLACE1011026, PLACE1011057, PLACE1011143, PLACE1011160, PLACE1011165, PLACE1011203, PLACE1011214, PLACE1011221, PLACE1011229, PLACE1011263, PLACE1011273, PLACE1011310, PLACE1011325, PLACE1011332, PLACE1011375, PLACE1011399, PLACE1011419, PLACE1011433, PLACE1011465, PLACE1011503, PLACE1011520, PLACE1011563, PLACE1011635, PLACE1011641, PLACE1011643, PLACE1011664, PLACE1011675, PLACE1011729, PLACE1011762, PLACE1011778, PLACE1011858, PLACE1011874, PLACE1011875, PLACE1011896, PLACE1011964, PLACE1011982, PLACE1012031, PLACE2000006, PLACE2000014, PLACE2000015, PLACE2000021, PLACE2000033, PLACE2000061, PLACE2000072, PLACE2000097, PLACE2000115, PLACE2000136, PLACE2000164, PLACE2000223, PLACE2000371, PLACE2000379, PLACE2000477, PLACE3000059, PLACE3000121, PLACE3000160, PLACE3000199, PLACE3000218, PLACE3000244, PLACE3000310, PLACE3000320, PLACE3000339, PLACE3000350, PLACE3000373, PLACE4000089, PLACE4000093, PLACE4000147, PLACE4000252, PLACE4000270, PLACE4000367, PLACE4000392, PLACE4000401, PLACE4000558, PLACE4000590, PLACE4000654, PLACE4000670, SKNMC1000011, SKNMC1000013, SKNMC1000046, SKNMC1000050, SKNMC1000091, THYRO1000035, THYRO1000111, THYRO1000121, THYRO1000124, THYRO1000129, THYRO1000156, THYRO1000199, THYRO1000242, THYRO1000270, THYRO1000279, THYRO1000288, THYRO1000327, THYRO1000381, THYRO1000438, THYRO1000488, THYRO1000501, THYRO1000502, THYRO1000505, THYRO1000570, THYRO1000596, THYRO1000605, THYRO1000641, THYRO1000662, THYRO1000734, THYRO1000777, THYRO1000783, THYRO1000793, THYRO1000796, THYRO1000805, THYRO1000829, THYRO1000852, THYRO1000895, THYRO1000934, THYRO1000952, THYRO1001033, THYRO1001100, THYRO1001134, THYRO1001142, THYRO1001204, THYRO1001262, THYRO1001271, THYRO1001290, THYRO1001347, THYRO1001559, THYRO1001661, THYRO1001721, THYRO1001745, Y79AA1000328, Y79AA1000420, Y79AA1000705, Y79AA1000734, Y79AA1000748, Y79AA1000752, Y79AA1000774, Y79AA1000784, Y79AA1000802, Y79AA1000824, Y79AA1000827, Y79AA1000976, Y79AA1001078, Y79AA1001281, Y79AA1001312, Y79AA1001493, Y79AA1001541, Y79AA1001581, Y79AA1001585, Y79AA1001696, Y79AA1001781, Y79AA1001848, Y79AA1001874, Y79AA1001923, Y79AA1002027, Y79AA1002115, Y79AA1002139, Y79AA1002208, Y79AA1002209, Y79AA1002210, Y79AA1002220, Y79AA1002298, Y79AA1002307, Y79AA1002311, Y79AA1002407, Y79AA1002416, Y79AA1002431, Y79AA1002487.

[0534] Genes exhibiting characteristic features in the expression thereof were selected by statistical analysis of these data. Two examples are shown below to describe the selection of genes of which expression is varied greatly among tissues. The β-actin gene is used frequently as a control in gene expression analysis. Genes of which expression is varied greatly among tissues as compared that of the β-actin gene were determined as follows. Specifically, sum of squared deviation was calculated in the signal intensity of β-actin observed in each tissue, which was divided by 7 degrees of freedom to determine a variance Sₐ². Next, sum of squared deviation was calculated in the signal intensity of a gene to be compared observed in each tissue, which was divided by 7 degrees of freedom to determine a variance S_{b}². By taking variance ratio F as F=S_{b}²/Sₐ², genes with a significance level of 5% or more were extracted in the F distribution. Genes extracted are indicated below by the corresponding clone names:

[0535] HEMBA1002113, HEMBA1005296, HEMBA1007121, HEMBB1000637, HEMBB1000915, MAMMA1000597, MAMMA1000605, MAMMA1000962, MAMMA1001139, MAMMA1001198, MAMMA1002858, NT2RM2001896, NT2RP2002710, NT2RP2004339, NT2RP2004538, NT2RP3000348, NT2RP3003121, PLACE3000009, PLACE3000254, THYRO1000569, Y79AA1000131.

[0536] Gene of OVARC1000037{heterogeneous nuclear ribonucleoprotein (hnRNP)} which expression is varied little. Genes of which expression is varied greatly among tissues as compared that of the OVARC1000037 gene were determined as follows. Specifically, sum of squared deviation was calculated in the signal intensity of β-actin observed in each tissue, which was divided by 7 degrees of freedom to determine a variance Sₐ². Next, sum of squared deviation was calculated in the signal intensity of a gene to be compared observed in each tissue, which was divided by 7 degrees of freedom to determine a variance S_{b}². By taking variance ratio F as F=S_{b}²/Sₐ², genes with a significance level of 5% or more were extracted in the F distribution. Genes extracted are indicated below by the corresponding clone names:

[0537] HEMBA1000304, NT2RM2001716, NT2RM2001840, HEMBA1001051, HEMBA1001109, OVARC1001731, HEMBA1000726, HEMBA1001286, HEMBA1000387, HEMBA1000519, NT2RM2001896, HEMBA1000042, HEMBA1001085, HEMBA1001330, OVARC1000576, HEMBA1000575, NT2RM2000599, NT2RM2000714, HEMBA1000469, NT2RM4000366, HEMBA1001377, HEMBA1000769, HEMBA1000338, NT2RM2000795, HEMBA1001299, HEMBA1000508, HEMBA1000150, HEMBA1000774, HEMBA1001226, HEMBA1000960, NT2RM4000795, HEMBA1002162, NT2RM4001876, NT2RM4002482, HEMBA1001678, HEMBA1002113, NT2RM4002383, HEMBA1002229, HEMBA1002818, HEMBA1001454, NT2RM4000764, HEMBA1001510, HEMBA1001714, HEMBA1002150, NT2RM4002044, HEMBA1002728, NT2RM4002189, HEMBA1001991, HEMBA1002166, NT2RM4002499, NT2RM4001140, NT2RM4002504, HEMBA1002590, HEMBA1001435, PLACE1000706, HEMBA1002160, HEMBA1001824, HEMBA1001463, HEMBA1001533, HEMBA1001570, PLACE1001036, HEMBA1001651, HEMBA1002381, HEMBA1002934, HEMBA1003370, HEMBA1003021, HEMBA1003166, NT2RP1000738, NT2RP2000040, HEMBA1004164, HEMBA1003836, HEMBA1004267, NT2RP2000845, HEMBA1003041, HEMBA1003571, HEMBA1003758, NT2RP2000108, HEMBA1003838, NT2RP1000357, HEMBA1003376, PLACE1003528, HEMBA1003528, NT2RP1001475, HEMBA1004049, HEMBA1003212, HEMBA1003667, PLACE1004149, HEMBA1003926, HEMBA1004306, HEMBA1004024, NT2RP1000363, HEMBA1003033, HEMBA1004335, HEMBA1003348, HEMBA1003034, NT2RP2001081, HEMBA1004056, HEMBA1003314, HEMBA1003827, HEMBA1003893, NT2RP2001036, NT2RP2001168, NT2RP2001328, HEMBA1005035, NT2RP2001569, NT2RP2002439, HEMBA1005511, HEMBA1005999, NT2RP2002862, NT2RP2002979, NT2RP2001394, HEMBA1004753, NT2RP2002621, HEMBA1005853, HEMBA1005443, NT2RP2002980, NT2RP2001347, HEMBA1005241, NT2RP2002750, NT2RP2003533, HEMBA1005634, NT2RP2003034, HEMBA1006138, NT2RP2003117, NT2RP2001366, HEMBA1005079, NT2RP2003293, NT2RP2002710, HEMBA1005911, NT2RP2002752, HEMBA1006036, NT2RP2002987, HEMBA1006100, HEMBA1004460, HEMBA1004538, NT2RP2001943, NT2RP2002033, HEMBA1005296, HEMBA1005829, HEMBA1005520, HEMBA1005123, HEMBA1005552, HEMBA1004930, NT2RP2001312, HEMBA1005304, HEMBA1005834, HEMBA1005990, HEMBA1005526, NT2RP2003073, HEMBA1005331, HEMBA1006744, HEMBA1006780, NT2RP2004339, HEMBB1000173, HEMBA1007113, NT2RP2005908, HEMBB1000376, HEMBB1000024, HEMBB1000510, NT2RP2004580, NT2RP2003912, HEMBA1006381, NT2RP2004270, HEMBA1006993, NT2RP2005325, HEMBB1000218, HEMBA1007121, HEMBB1000434, NT2RP2006166, PLACE1010310, HEMBB1000589, NT2RP2003986, HEMBA1006419, HEMBB1000141, HEMBB1000030, HEMBB1000099, HEMBA1006624, NT2RP2003988, NT2RP2005753, HEMBA1007147, HEMBB1000354, NT2RP2006023, HEMBB1000441, HEMBB1000523, HEMBB1000059, HEMBA1006631, NT2RP2004538, HEMBA1006695, HEMBB1000490, NT2RP2006184, HEMBB1000573, NT2RP2004675, HEMBA1007078, NT2RP2005457, NT2RP2005491, HEMBB1000491, HEMBB1000575, PLACE1008405, NT2RP2005773, NT2RP2005354, HEMBB1000337, HEMBB1000008, NT2RP2005701, NT2RP2003825, HEMBB1000215, HEMBB1000258, NT2RP2005496, HEMBB1000374, NT2RP2005581, HEMBB1000018, HEMBB1000493, HEMBB1000554, HEMBB1000671, NT2RP3000348, HEMBB1001267, HEMBB1002092, HEMBB1001749, PLACE3000304, HEMBB1001834, HEMBB1001142, HEMBB1001177, HEMBB1000840, HEMBB1001436, HEMBB1001921, HEMBB1002005, NT2RP3001398, HEMBB1002069, HEMBB1002094, HEMBB1001836, HEMBB1001114, NT2RP3000628, HEMBB1001367, HEMBB1001588, HEMBB1002249, HEMBB1000684, NT2RP2006571, HEMBB1001802, HEMBB1000915, HEMBB1000996, NT2RP3001274, HEMBB1001564, NT2RP3000968, PLACE3000156, HEMBB1002045, NT2RP3000341, HEMBB1000917, PLACE1011090, NT2RP3000742, PLACE2000435, HEMBB1001944, PLACE3000254, HEMBB1002218, NT2RP2006436, NT2RP3000320, HEMBB1001126, HEMBB1000749, NT2RP3000644, HEMBB1001527, NT2RP3000850, HEMBB1001967, PLACE3000401, HEMBB1000637, HEMBB1001234, NT2RP3000080, PLACE2000411, PLACE3000009, PLACE3000070, HEMBB1002134, PLACE3000475, PLACE4000192, HEMBB1002520, HEMBB1002545, MAMMA1000155, MAMMA1000307, THYRO1000787, MAMMA1000348, MAMMA1000372, NT2RP3003121, MAMMA1000851, MAMMA1000501, THYRO1000569, MAMMA1000576, MAMMA1000605, HEMBB1002442, HEMBB1002596, MAMMA1000198, MAMMA1000714, MAMMA1000356, MAMMA1000760, MAMMA1000416, MAMMA1000931, MAMMA1000962, HEMBB1002387, NT2RP3001712, HEMBB1002556, HEMBB1002617, MAMMA1000171, PLACE4000612, MAMMA1000761, MAMMA1000421, MAMMA1000444, HEMBB1002358, HEMBB1002453, HEMBB1002664, HEMBB1002699, MAMMA1000720, MAMMA1000360, MAMMA1000744, MAMMA1000802, MAMMA1000839, MAMMA1000478, MAMMA1000877, MAMMA1000585, MAMMA1000941, NT2RP3002909, MAMMA1000968, HEMBB1002457, HEMBB1002495, MAMMA1000057, MAMMA1000696, MAMMA1000942, MAMMA1000302, MAMMA1000943, MAMMA1000998, NT2RP3001752, NT2RP3003032, MAMMA1000429, MAMMA1000565, MAMMA1000594, MAMMA1000625, NT2RP3002146, MAMMA1000084, MAMMA1000257, NT2RP3003157, MAMMA1000431, MAMMA1000597, MAMMA1001078, MAMMA1001126, THYRO1001537, NT2RP3004093, MAMMA1001202, NT2RP3003842, Y79AA1000342, MAMMA1002311, MAMMA1001969, Y79AA1000560, MAMMA1002359, MAMMA1002056, MAMMA1002413, MAMMA1002454, MAMMA1002612, MAMMA1001411, MAMMA1001035, MAMMA1001080, MAMMA1001133, NT2RP3004095, MAMMA1001161, MAMMA1001203, MAMMA1001663, NT2RP3003819, MAMMA1001745, MAMMA1001790, NT2RP3004470, NT2RP3004503, MAMMA1002293, NT2RP4000321, MAMMA1001880, Y79AA1000410, MAMMA1001970, MAMMA1002058, NT2RP4000515, MAMMA1002215, MAMMA1002617, NT2RP3003576, MAMMA1001139, MAMMA1001576, Y79AA1000131, MAMMA1001330, MAMMA1001769, MAMMA1001383, MAMMA1002032, MAMMA1002125, MAMMA1002174, NT2RP4000614, NT2RP4000243, NT2RP3004110, MAMMA1001271, MAMMA1001296, MAMMA1001992, MAMMA1002033, MAMMA1002428, MAMMA1002590, MAMMA1001186, MAMMA1002267, MAMMA1002322, MAMMA1001956, MAMMA1002155, NT2RP4000210, MAMMA1002622, NT2RP3004125, MAMMA1001220, MAMMA1001683, NT2RP3004348, Y79AA1000214, Y79AA1000833, NT2RP4000212, MAMMA1002230, MAMMA1001452, MAMMA1001620, MAMMA1001256, MAMMA1001760, NT2RP3004349, MAMMA1001783, MAMMA1001907, MAMMA1002009, MAMMA1002545, NT2RP4000214, NT2RP4000728, MAMMA1001465, MAMMA1001154, MAMMA1001198, MAMMA1001343, MAMMA1002310, NT2RP4000035, NT2RP4000833, MAMMA1003150, MAMMA1002886, NT2RP4001938, NT2RM2000260, MAMMA1002629, MAMMA1002973, MAMMA1002721, MAMMA1002909, NT2RP4001100, NT2RM1000857, NT2RP4000878, MAMMA1002844, NT2RM1000039, NT2RP4001174, MAMMA1002665, MAMMA1003047, NT2RM1000086, NT2RM1000260, NT2RM1000355, MAMMA1002701, NT2RP4000918, MAMMA1002830, MAMMA1002970, NT2RP4001677, NT2RM2000422, MAMMA1003004, MAMMA1002673, MAMMA1003031, MAMMA1002764, MAMMA1002858, NT2RP4001679, NT2RP4002888, MAMMA1002711, NT2RP4001276, NT2RM1000018, NT2RP4001568, NT2RM1000883.

[0538] Thus, characteristic features in the expression of a gene are illustrated by comparing and statistically analyzing the expression of many genes.

Analysis of Disease-Associated Genes

[0539] Non-enzymic protein glycation reaction is believed to be a cause of a variety of chronic diabetic complications. Accordingly, genes of which expression is elevated or decreased in a glycated protein-specific manner in the endothelial cells are associated with diabetic complications caused by glycated proteins. Vascular endothelial cells are affected with glycated proteins present in blood. Reaction products of non-enzymic protein glycation include amadori compound (glycated protein) as a mildly glycated protein and advanced glycation endproduct as a heavily glycated protein. Hence, a survey was carried out for genes of which expression levels are varied depending on the presence of these glycated proteins in endothelial cells. The mRNAs were extracted from endothelial cells that were cultured in the presence or absence of glycated protein. The mRNAs were converted into radiolabeled first strand cDNAs for preparing probes. The probes were hybridized to the above-mentioned DNA array. Signal of each DNA spot was detected by BAS2000 and analyzed by ArrayGauge (Fuji Photo Film Co., Ltd.).

[0540] Advanced glycation endproduct of bovine serum albumin was prepared as follows: bovine serum albumin (BSA; Sigma) was incubated in a phosphate buffer solution containing 50 mM glucose at 37° C. for 8 weeks; and the resulting brownish BSA was dialyzed against a phosphate buffer solution.

[0541] Human normal pulmonary arterial endothelial cells (Cell Applications) were cultured in an Endothelial Cell Growth Medium (Cell Applications). The culture dish (Farcon) with the cells were incubated in a CO₂ incubator (37° C., 5% CO₂, in a humid atmosphere). When the cells were grown to be confluent in the dish, 250 μg/ml of bovine serum albumin (sigma), glycated bovine serum albumin (Sigma) or advanced glycation endproduct of bovine serum albumin was added thereto and the cells were incubated for 33 hours. The mRNA was extracted from the cells by using a FastTack™ 2.0 kit (Invitrogen). The labeling of hybridization probe was carried out by using the mRNA according to the same procedure as described above.

[0542] Table 169 shows the expression level of each cDNA in human pulmonary arterial endothelial cells cultured in a medium containing bovine serum albumin (sigma), glycated bovine serum albumin (Sigma) or advanced glycation endproduct of bovine serum albumin. Genes of which expression was detected in the endothelial cell are as follows:

[0543] HEMBA1000005, HEMBA1000012, HEMBA1000020, HEMBA1000042, HEMBA1000046, HEMBA1000076, HEMBA1000111, HEMBA1000150, HEMBA1000185, HEMBA1000216, HEMBA1000231, HEMBA1000280, HEMBA1000282, HEMBA1000288, HEMBA1000304, HEMBA1000327, HEMBA1000338, HEMBA1000356, HEMBA1000357, HEMBA1000366, HEMBA1000376, HEMBA1000387, HEMBA1000428, HEMBA1000456, HEMBA1000459, HEMBA1000460, HEMBA1000469, HEMBA1000501, HEMBA1000504, HEMBA1000505, HEMBA1000508, HEMBA1000519, HEMBA1000534, HEMBA1000540, HEMBA1000542, HEMBA1000555, HEMBA1000557, HEMBA1000575, HEMBA1000592, HEMBA1000604, HEMBA1000622, HEMBA1000636, HEMBA1000655, HEMBA1000673, HEMBA1000682, HEMBA1000686, HEMBA1000702, HEMBA1000726, HEMBA1000727, HEMBA1000749, HEMBA1000769, HEMBA1000774, HEMBA1000791, HEMBA1000827, HEMBA1000852, HEMBA1000872, HEMBA1000876, HEMBA1000918, HEMBA1000942, HEMBA1000960, HEMBA1000974, HEMBA1001020, HEMBA1001051, HEMBA1001059, HEMBA1001060, HEMBA1001080, HEMBA1001085, HEMBA1001088, HEMBA1001109, HEMBA1001122, HEMBA1001123, HEMBA1001140, HEMBA1001172, HEMBA1001196, HEMBA1001197, HEMBA1001213, HEMBA1001226, HEMBA1001235, HEMBA1001247, HEMBA1001265, HEMBA1001281, HEMBA1001286, HEMBA1001299, HEMBA1001302, HEMBA1001326, HEMBA1001330, HEMBA1001351, HEMBA1001377, HEMBA1001387, HEMBA1001398, HEMBA1001432, HEMBA1001433, HEMBA1001435, HEMBA1001446, HEMBA1001450, HEMBA1001454, HEMBA1001463, HEMBA1001497, HEMBA1001510, HEMBA1001517, HEMBA1001526, HEMBA1001533, HEMBA1001557, HEMBA1001566, HEMBA1001569, HEMBA1001570, HEMBA1001579, HEMBA1001581, HEMBA1001595, HEMBA1001608, HEMBA1001620, HEMBA1001640, HEMBA1001647, HEMBA1001651, HEMBA1001655, HEMBA1001658, HEMBA1001678, HEMBA1001714, HEMBA1001718, HEMBA1001723, HEMBA1001746, HEMBA1001784, HEMBA1001791, HEMBA1001800, HEMBA1001804, HEMBA1001809, HEMBA1001819, HEMBA1001824, HEMBA1001844, HEMBA1001866, HEMBA1001888, HEMBA1001912, HEMBA1001913, HEMBA1001918, HEMBA1001940, HEMBA1001960, HEMBA1001987, HEMBA1001991, HEMBA1002003, HEMBA1002008, HEMBA1002049, HEMBA1002100, HEMBA1002102, HEMBA1002113, HEMBA1002119, HEMBA1002125, HEMBA1002151, HEMBA1002153, HEMBA1002160, HEMBA1002161, HEMBA1002166, HEMBA1002185, HEMBA1002189, HEMBA1002191, HEMBA1002226, HEMBA1002229, HEMBA1002237, HEMBA1002241, HEMBA1002267, HEMBA1002270, HEMBA1002337, HEMBA1002348, HEMBA1002381, HEMBA1002458, HEMBA1002462, HEMBA1002469, HEMBA1002503, HEMBA1002508, HEMBA1002542, HEMBA1002547, HEMBA1002552, HEMBA1002558, HEMBA1002583, HEMBA1002590, HEMBA1002592, HEMBA1002609, HEMBA1002624, HEMBA1002629, HEMBA1002645, HEMBA1002678, HEMBA1002688, HEMBA1002703, HEMBA1002712, HEMBA1002728, HEMBA1002730, HEMBA1002750, HEMBA1002770, HEMBA1002779, HEMBA1002780, HEMBA1002818, HEMBA1002833, HEMBA1002876, HEMBA1002934, HEMBA1002935, HEMBA1002968, HEMBA1002970, HEMBA1002973, HEMBA1003021, HEMBA1003033, HEMBA1003034, HEMBA1003041, HEMBA1003046, HEMBA1003064, HEMBA1003067, HEMBA1003079, HEMBA1003083, HEMBA1003086, HEMBA1003098, HEMBA1003129, HEMBA1003133, HEMBA1003142, HEMBA1003166, HEMBA1003175, HEMBA1003179, HEMBA1003202, HEMBA1003204, HEMBA1003212, HEMBA1003220, HEMBA1003235, HEMBA1003257, HEMBA1003286, HEMBA1003296, HEMBA1003322, HEMBA1003330, HEMBA1003348, HEMBA1003370, HEMBA1003376, HEMBA1003403, HEMBA1003418, HEMBA1003447, HEMBA1003480, HEMBA1003531, HEMBA1003538, HEMBA1003548, HEMBA1003560, HEMBA1003571, HEMBA1003591, HEMBA1003597, HEMBA1003615, HEMBA1003621, HEMBA1003640, HEMBA1003656, HEMBA1003667, HEMBA1003680, HEMBA1003690, HEMBA1003692, HEMBA1003715, HEMBA1003720, HEMBA1003742, HEMBA1003758, HEMBA1003803, HEMBA1003805, HEMBA1003827, HEMBA1003836, HEMBA1003838, HEMBA1003864, HEMBA1003879, HEMBA1003880, HEMBA1003885, HEMBA1003893, HEMBA1003902, HEMBA1003926, HEMBA1003937, HEMBA1003939, HEMBA1003950, HEMBA1003958, HEMBA1003989, HEMBA1004000, HEMBA1004012, HEMBA1004015, HEMBA1004024, HEMBA1004048, HEMBA1004056, HEMBA1004074, HEMBA1004111, HEMBA1004132, HEMBA1004143, HEMBA1004164, HEMBA1004225, HEMBA1004227, HEMBA1004238, HEMBA1004246, HEMBA1004267, HEMBA1004274, HEMBA1004289, HEMBA1004306, HEMBA1004321, HEMBA1004323, HEMBA1004335, HEMBA1004353, HEMBA1004354, HEMBA1004356, HEMBA1004408, HEMBA1004429, HEMBA1004499, HEMBA1004507, HEMBA1004534, HEMBA1004538, HEMBA1004542, HEMBA1004577, HEMBA1004586, HEMBA1004596, HEMBA1004604, HEMBA1004629, HEMBA1004669, HEMBA1004693, HEMBA1004709, HEMBA1004730, HEMBA1004736, HEMBA1004751, HEMBA1004753, HEMBA1004763, HEMBA1004778, HEMBA1004803, HEMBA1004816, HEMBA1004850, HEMBA1004880, HEMBA1004923, HEMBA1004930, HEMBA1004954, HEMBA1004977, HEMBA1004978, HEMBA1004980, HEMBA1005009, HEMBA1005019, HEMBA1005035, HEMBA1005079, HEMBA1005123, HEMBA1005133, HEMBA1005149, HEMBA1005202, HEMBA1005206, HEMBA1005219, HEMBA1005241, HEMBA1005296, HEMBA1005304, HEMBA1005331, HEMBA1005338, HEMBA1005353, HEMBA1005359, HEMBA1005374, HEMBA1005382, HEMBA1005403, HEMBA1005408, HEMBA1005411, HEMBA1005443, HEMBA1005469, HEMBA1005472, HEMBA1005474, HEMBA1005475, HEMBA1005500, HEMBA1005508, HEMBA1005511, HEMBA1005513, HEMBA1005520, HEMBA1005526, HEMBA1005528, HEMBA1005548, HEMBA1005552, HEMBA1005568, HEMBA1005576, HEMBA1005588, HEMBA1005606, HEMBA1005609, HEMBA1005616, HEMBA1005627, HEMBA1005631, HEMBA1005634, HEMBA1005670, HEMBA1005679, HEMBA1005680, HEMBA1005705, HEMBA1005765, HEMBA1005813, HEMBA1005822, HEMBA1005829, HEMBA1005834, HEMBA1005853, HEMBA1005894, HEMBA1005911, HEMBA1005921, HEMBA1005931, HEMBA1005934, HEMBA1005990, HEMBA1005991, HEMBA1005999, HEMBA1006002, HEMBA1006036, HEMBA1006042, HEMBA1006100, HEMBA1006138, HEMBA1006142, HEMBA1006173, HEMBA1006182, HEMBA1006198, HEMBA1006278, HEMBA1006283, HEMBA1006328, HEMBA1006344, HEMBA1006359, HEMBA1006377, HEMBA1006380, HEMBA1006381, HEMBA1006416, HEMBA1006419, HEMBA1006426, HEMBA1006461, HEMBA1006471, HEMBA1006474, HEMBA1006483, HEMBA1006485, HEMBA1006486, HEMBA1006492, HEMBA1006502, HEMBA1006507, HEMBA1006546, HEMBA1006579, HEMBA1006583, HEMBA1006597, HEMBA1006612, HEMBA1006624, HEMBA1006631, HEMBA1006648, HEMBA1006652, HEMBA1006659, HEMBA1006674, HEMBA1006695, HEMBA1006744, HEMBA1006779, HEMBA1006780, HEMBA1006795, HEMBA1006807, HEMBA1006821, HEMBA1006824, HEMBA1006832, HEMBA1006849, HEMBA1006865, HEMBA1006885, HEMBA1006900, HEMBA1006914, HEMBA1006926, HEMBA1006929, HEMBA1006936, HEMBA1006941, HEMBA1006993, HEMBA1007002, HEMBA1007078, HEMBA1007080, HEMBA1007085, HEMBA1007087, HEMBA1007113, HEMBA1007121, HEMBA1007147, HEMBA1007194, HEMBA1007206, HEMBA1007224, HEMBA1007243, HEMBA1007256, HEMBA1007267, HEMBA1007279, HEMBA1007288, HEMBA1007300, HEMBA1007322, HEMBA1007327, HEMBA1007341, HEMBA1007347, HEMBB1000005, HEMBB1000008, HEMBB1000018, HEMBB1000024, HEMBB1000030, HEMBB1000036, HEMBB1000044, HEMBB1000054, HEMBB1000055, HEMBB1000059, HEMBB1000083, HEMBB1000089, HEMBB1000099, HEMBB1000103, HEMBB1000136, HEMBB1000141, HEMBB1000173, HEMBB1000215, HEMBB1000217, HEMBB1000218, HEMBB1000226, HEMBB1000258, HEMBB1000264, HEMBB1000272, HEMBB1000307, HEMBB1000337, HEMBB1000338, HEMBB1000339, HEMBB1000343, HEMBB1000354, HEMBB1000374, HEMBB1000376, HEMBB1000391, HEMBB1000420, HEMBB1000434, HEMBB1000441, HEMBB1000455, HEMBB1000480, HEMBB1000490, HEMBB1000491, HEMBB1000510, HEMBB1000523, HEMBB1000554, HEMBB1000564, HEMBB1000573, HEMBB1000575, HEMBB1000586, HEMBB1000591, HEMBB1000593, HEMBB1000598, HEMBB1000631, HEMBB1000632, HEMBB1000637, HEMBB1000649, HEMBB1000652, HEMBB1000671, HEMBB1000684, HEMBB1000705, HEMBB1000709, HEMBB1000726, HEMBB1000738, HEMBB1000749, HEMBB1000770, HEMBB1000790, HEMBB1000826, HEMBB1000827, HEMBB1000835, HEMBB1000840, HEMBB1000848, HEMBB1000870, HEMBB1000887, HEMBB1000890, HEMBB1000893, HEMBB1000908, HEMBB1000913, HEMBB1000915, HEMBB1000917, HEMBB1000959, HEMBB1000996, HEMBB1001024, HEMBB1001037, HEMBB1001102, HEMBB1001112, HEMBB1001114, HEMBB1001133, HEMBB1001142, HEMBB1001151, HEMBB1001153, HEMBB1001169, HEMBB1001177, HEMBB1001208, HEMBB1001209, HEMBB1001210, HEMBB1001218, HEMBB1001234, HEMBB1001267, HEMBB1001271, HEMBB1001289, HEMBB1001294, HEMBB1001317, HEMBB1001337, HEMBB1001346, HEMBB1001367, HEMBB1001380, HEMBB1001384, HEMBB1001426, HEMBB1001429, HEMBB1001436, HEMBB1001443, HEMBB1001449, HEMBB1001463, HEMBB1001521, HEMBB1001527, HEMBB1001535, HEMBB1001536, HEMBB1001537, HEMBB1001555, HEMBB1001564, HEMBB1001588, HEMBB1001619, HEMBB1001653, HEMBB1001704, HEMBB1001706, HEMBB1001707, HEMBB1001736, HEMBB1001749, HEMBB1001753, HEMBB1001756, HEMBB1001802, HEMBB1001812, HEMBB1001816, HEMBB1001834, HEMBB1001836, HEMBB1001850, HEMBB1001863, HEMBB1001869, HEMBB1001880, HEMBB1001910, HEMBB1001911, HEMBB1001921, HEMBB1001922, HEMBB1001925, HEMBB1001944, HEMBB1001953, HEMBB1001962, HEMBB1001967, HEMBB1001973, HEMBB1001983, HEMBB1001990, HEMBB1001997, HEMBB1002005, HEMBB1002042, HEMBB1002043, HEMBB1002045, HEMBB1002050, HEMBB1002069, HEMBB1002092, HEMBB1002094, HEMBB1002115, HEMBB1002134, HEMBB1002139, HEMBB1002142, HEMBB1002189, HEMBB1002190, HEMBB1002217, HEMBB1002218, HEMBB1002249, HEMBB1002342, HEMBB1002358, HEMBB1002359, HEMBB1002364, HEMBB1002381, HEMBB1002409, HEMBB1002425, HEMBB1002442, HEMBB1002453, HEMBB1002457, HEMBB1002495, HEMBB1002520, HEMBB1002534, HEMBB1002556, HEMBB1002579, HEMBB1002582, HEMBB1002590, HEMBB1002596, HEMBB1002600, HEMBB1002601, HEMBB1002603, HEMBB1002607, HEMBB1002613, HEMBB1002617, HEMBB1002623, HEMBB1002635, HEMBB1002664, HEMBB1002683, HEMBB1002699, HEMBB1002705, MAMMA1000019, MAMMA1000020, MAMMA1000025, MAMMA1000043, MAMMA1000057, MAMMA1000084, MAMMA1000092, MAMMA1000103, MAMMA1000134, MAMMA1000155, MAMMA1000163, MAMMA1000171, MAMMA1000173, MAMMA1000183, MAMMA1000198, MAMMA1000227, MAMMA1000241, MAMMA1000257, MAMMA1000270, MAMMA1000279, MAMMA1000284, MAMMA1000287, MAMMA1000302, MAMMA1000307, MAMMA1000348, MAMMA1000356, MAMMA1000360, MAMMA1000361, MAMMA1000372, MAMMA1000385, MAMMA1000388, MAMMA1000402, MAMMA1000413, MAMMA1000416, MAMMA1000421, MAMMA1000422, MAMMA1000423, MAMMA1000429, MAMMA1000431, MAMMA1000444, MAMMA1000472, MAMMA1000478, MAMMA1000483, MAMMA1000501, MAMMA1000516, MAMMA1000522, MAMMA1000524, MAMMA1000559, MAMMA1000565, MAMMA1000576, MAMMA1000585, MAMMA1000594, MAMMA1000597, MAMMA1000605, MAMMA1000625, MAMMA1000664, MAMMA1000672, MAMMA1000684, MAMMA1000696, MAMMA1000713, MAMMA1000714, MAMMA1000718, MAMMA1000720, MAMMA1000723, MAMMA1000732, MAMMA1000734, MAMMA1000744, MAMMA1000752, MAMMA1000760, MAMMA1000761, MAMMA1000775, MAMMA1000776, MAMMA1000778, MAMMA1000802, MAMMA1000824, MAMMA1000839, MAMMA1000851, MAMMA1000859, MAMMA1000863, MAMMA1000867, MAMMA1000875, MAMMA1000877, MAMMA1000880, MAMMA1000905, MAMMA1000921, MAMMA1000931, MAMMA1000940, MAMMA1000941, MAMMA1000942, MAMMA1000943, MAMMA1000957, MAMMA1000962, MAMMA1000968, MAMMA1000979, MAMMA1000987, MAMMA1000998, MAMMA1001003, MAMMA1001008, MAMMA1001021, MAMMA1001035, MAMMA1001050, MAMMA1001059, MAMMA1001067, MAMMA1001074, MAMMA1001075, MAMMA1001078, MAMMA1001080, MAMMA1001105, MAMMA1001126, MAMMA1001133, MAMMA1001139, MAMMA1001143, MAMMA1001145, MAMMA1001154, MAMMA1001161, MAMMA1001181, MAMMA1001186, MAMMA1001198, MAMMA1001202, MAMMA1001203, MAMMA1001206, MAMMA1001215, MAMMA1001220, MAMMA1001256, MAMMA1001259, MAMMA1001260, MAMMA1001268, MAMMA1001271, MAMMA1001274, MAMMA1001292, MAMMA1001296, MAMMA1001298, MAMMA1001305, MAMMA1001324, MAMMA1001330, MAMMA1001341, MAMMA1001343, MAMMA1001383, MAMMA1001388, MAMMA1001397, MAMMA1001419, MAMMA1001420, MAMMA1001435, MAMMA1001442, MAMMA1001446, MAMMA1001452, MAMMA1001465, MAMMA1001502, MAMMA1001547, MAMMA1001551, MAMMA1001576, MAMMA1001590, MAMMA1001600, MAMMA1001620, MAMMA1001630, MAMMA1001633, MAMMA1001635, MAMMA1001654, MAMMA1001663, MAMMA1001679, MAMMA1001683, MAMMA1001692, MAMMA1001711, MAMMA1001735, MAMMA1001743, MAMMA1001745, MAMMA1001754, MAMMA1001760, MAMMA1001764, MAMMA1001769, MAMMA1001783, MAMMA1001785, MAMMA1001790, MAMMA1001806, MAMMA1001820, MAMMA1001824, MAMMA1001836, MAMMA1001837, MAMMA1001848, MAMMA1001851, MAMMA1001854, MAMMA1001858, MAMMA1001878, MAMMA1001880, MAMMA1001890, MAMMA1001907, MAMMA1001956, MAMMA1001969, MAMMA1001970, MAMMA1001992, MAMMA1002009, MAMMA1002032, MAMMA1002033, MAMMA1002042, MAMMA1002047, MAMMA1002056, MAMMA1002058, MAMMA1002068, MAMMA1002082, MAMMA1002084, MAMMA1002125, MAMMA1002132, MAMMA1002140, MAMMA1002153, MAMMA1002155, MAMMA1002158, MAMMA1002174, MAMMA1002198, MAMMA1002209, MAMMA1002215, MAMMA1002219, MAMMA1002230, MAMMA1002236, MAMMA1002250, MAMMA1002267, MAMMA1002268, MAMMA1002282, MAMMA1002292, MAMMA1002293, MAMMA1002297, MAMMA1002308, MAMMA1002310, MAMMA1002311, MAMMA1002319, MAMMA1002322, MAMMA1002332, MAMMA1002339, MAMMA1002347, MAMMA1002353, MAMMA1002355, MAMMA1002356, MAMMA1002359, MAMMA1002361, MAMMA1002380, MAMMA1002384, MAMMA1002392, MAMMA1002413, MAMMA1002427, MAMMA1002428, MAMMA1002434, MAMMA1002446, MAMMA1002454, MAMMA1002461, MAMMA1002475, MAMMA1002480, MAMMA1002485, MAMMA1002494, MAMMA1002524, MAMMA1002545, MAMMA1002556, MAMMA1002590, MAMMA1002597, MAMMA1002598, MAMMA1002603, MAMMA1002612, MAMMA1002617, MAMMA1002619, MAMMA1002622, MAMMA1002623, MAMMA1002625, MAMMA1002629, MAMMA1002636, MAMMA1002665, MAMMA1002671, MAMMA1002673, MAMMA1002701, MAMMA1002708, MAMMA1002711, MAMMA1002721, MAMMA1002728, MAMMA1002744, MAMMA1002754, MAMMA1002764, MAMMA1002765, MAMMA1002775, MAMMA1002807, MAMMA1002830, MAMMA1002833, MAMMA1002838, MAMMA1002842, MAMMA1002858, MAMMA1002868, MAMMA1002869, MAMMA1002881, MAMMA1002886, MAMMA1002892, MAMMA1002908, MAMMA1002909, MAMMA1002930, MAMMA1002937, MAMMA1002947, MAMMA1002964, MAMMA1002970, MAMMA1002973, MAMMA1002987, MAMMA1003003, MAMMA1003004, MAMMA1003013, MAMMA1003031, MAMMA1003040, MAMMA1003044, MAMMA1003047, MAMMA1003055, MAMMA1003066, MAMMA1003089, MAMMA1003099, NT2RM1000018, NT2RM1000039, NT2RM1000059, NT2RM1000086, NT2RM1000092, NT2RM1000132, NT2RM1000187, NT2RM1000260, NT2RM1000272, NT2RM1000314, NT2RM1000318, NT2RM1000355, NT2RM1000377, NT2RM1000539, NT2RM1000553, NT2RM1000555, NT2RM1000563, NT2RM1000661, NT2RM1000672, NT2RM1000702, NT2RM1000725, NT2RM1000742, NT2RM1000770, NT2RM1000802, NT2RM1000826, NT2RM1000829, NT2RM1000833, NT2RM1000850, NT2RM1000852, NT2RM1000857, NT2RM1000867, NT2RM1000874, NT2RM1000883, NT2RM1000885, NT2RM1000894, NT2RM1000898, NT2RM1000905, NT2RM1000962, NT2RM1001003, NT2RM1001082, NT2RM1001092, NT2RM1001139, NT2RM2000006, NT2RM2000013, NT2RM2000030, NT2RM2000032, NT2RM2000042, NT2RM2000093, NT2RM2000101, NT2RM2000191, NT2RM2000260, NT2RM2000287, NT2RM2000368, NT2RM2000371, NT2RM2000374, NT2RM2000402, NT2RM2000407, NT2RM2000502, NT2RM2000504, NT2RM2000540, NT2RM2000566, NT2RM2000569, NT2RM2000577, NT2RM2000581, NT2RM2000588, NT2RM2000599, NT2RM2000609, NT2RM2000612, NT2RM2000623, NT2RM2000624, NT2RM2000636, NT2RM2000649, NT2RM2000669, NT2RM2000714, NT2RM2000740, NT2RM2000795, NT2RM2000821, NT2RM2000952, NT2RM2001004, NT2RM2001035, NT2RM2001065, NT2RM2001100, NT2RM2001105, NT2RM2001131, NT2RM2001141, NT2RM2001194, NT2RM2001201, NT2RM2001243, NT2RM2001247, NT2RM2001324, NT2RM2001345, NT2RM2001360, NT2RM2001370, NT2RM2001393, NT2RM2001424, NT2RM2001547, NT2RM2001582, NT2RM2001588, NT2RM2001613, NT2RM2001632, NT2RM2001635, NT2RM2001648, NT2RM2001695, NT2RM2001696, NT2RM2001699, NT2RM2001706, NT2RM2001723, NT2RM2001727, NT2RM2001753, NT2RM2001760, NT2RM2001785, NT2RM2001839, NT2RM2001840, NT2RM2001896, NT2RM2001903, NT2RM2001930, NT2RM2001936, NT2RM2001950, NT2RM2001997, NT2RM2001998, NT2RM2002088, NT2RM2002100, NT2RM2002145, NT2RM4000085, NT2RM4000155, NT2RM4000156, NT2RM4000169, NT2RM4000233, NT2RM4000251, NT2RM4000265, NT2RM4000344, NT2RM4000349, NT2RM4000366, NT2RM4000395, NT2RM4000425, NT2RM4000457, NT2RM4000471, NT2RM4000486, NT2RM4000511, NT2RM4000514, NT2RM4000515, NT2RM4000611, NT2RM4000689, NT2RM4000698, NT2RM4000712, NT2RM4000717, NT2RM4000733, NT2RM4000734, NT2RM4000751, NT2RM4000764, NT2RM4000779, NT2RM4000787, NT2RM4000790, NT2RM4000796, NT2RM4000813, NT2RM4000820, NT2RM4000848, NT2RM4000852, NT2RM4000855, NT2RM4000895, NT2RM4000971, NT2RM4000979, NT2RM4000996, NT2RM4001002, NT2RM4001016, NT2RM4001032, NT2RM4001092, NT2RM4001140, NT2RM4001191, NT2RM4001200, NT2RM4001203, NT2RM4001217, NT2RM4001258, NT2RM4001313, NT2RM4001316, NT2RM4001320, NT2RM4001340, NT2RM4001344, NT2RM4001347, NT2RM4001371, NT2RM4001382, NT2RM4001384, NT2RM4001410, NT2RM4001437, NT2RM4001444, NT2RM4001454, NT2RM4001455, NT2RM4001483, NT2RM4001489, NT2RM4001522, NT2RM4001557, NT2RM4001565, NT2RM4001566, NT2RM4001594, NT2RM4001597, NT2RM4001629, NT2RM4001662, NT2RM4001666, NT2RM4001682, NT2RM4001710, NT2RM4001714, NT2RM4001715, NT2RM4001731, NT2RM4001741, NT2RM4001746, NT2RM4001828, NT2RM4001841, NT2RM4001856, NT2RM4001858, NT2RM4001876, NT2RM4001880, NT2RM4001905, NT2RM4001922, NT2RM4001930, NT2RM4001938, NT2RM4001953, NT2RM4001965, NT2RM4001969, NT2RM4001979, NT2RM4001987, NT2RM4002013, NT2RM4002034, NT2RM4002044, NT2RM4002055, NT2RM4002062, NT2RM4002063, NT2RM4002066, NT2RM4002067, NT2RM4002073, NT2RM4002109, NT2RM4002140, NT2RM4002145, NT2RM4002146, NT2RM4002174, NT2RM4002194, NT2RM4002205, NT2RM4002213, NT2RM4002226, NT2RM4002256, NT2RM4002278, NT2RM4002281, NT2RM4002287, NT2RM4002383, NT2RM4002398, NT2RM4002438, NT2RM4002446, NT2RM4002457, NT2RM4002479, NT2RM4002482, NT2RM4002499, NT2RM4002504, NT2RM4002532, NT2RM4002558, NT2RM4002565, NT2RM4002571, NT2RM4002594, NT2RP1000124, NT2RP1000272, NT2RP1000324, NT2RP1000326, NT2RP1000333, NT2RP1000357, NT2RP1000358, NT2RP1000363, NT2RP1000409, NT2RP1000413, NT2RP1000439, NT2RP1000460, NT2RP1000470, NT2RP1000478, NT2RP1000513, NT2RP1000522, NT2RP1000630, NT2RP1000677, NT2RP1000721, NT2RP1000738, NT2RP1000782, NT2RP1000834, NT2RP1000851, NT2RP1000856, NT2RP1000860, NT2RP1000902, NT2RP1000915, NT2RP1000947, NT2RP1000954, NT2RP1000958, NT2RP1000959, NT2RP1000966, NT2RP1000988, NT2RP1001011, NT2RP1001013, NT2RP1001033, NT2RP1001073, NT2RP1001080, NT2RP1001185, NT2RP1001294, NT2RP1001302, NT2RP1001310, NT2RP1001313, NT2RP1001361, NT2RP1001385, NT2RP1001395, NT2RP1001410, NT2RP1001466, NT2RP1001475, NT2RP1001482, NT2RP1001494, NT2RP1001546, NT2RP1001569, NT2RP1001616, NT2RP2000001, NT2RP2000006, NT2RP2000027, NT2RP2000040, NT2RP2000045, NT2RP2000056, NT2RP2000067, NT2RP2000070, NT2RP2000076, NT2RP2000077, NT2RP2000079, NT2RP2000088, NT2RP2000091, NT2RP2000098, NT2RP2000108, NT2RP2000114, NT2RP2000120, NT2RP2000133, NT2RP2000147, NT2RP2000153, NT2RP2000161, NT2RP2000173, NT2RP2000183, NT2RP2000195, NT2RP2000208, NT2RP2000224, NT2RP2000233, NT2RP2000258, NT2RP2000270, NT2RP2000283, NT2RP2000297, NT2RP2000298, NT2RP2000329, NT2RP2000337, NT2RP2000346, NT2RP2000369, NT2RP2000412, NT2RP2000414, NT2RP2000422, NT2RP2000438, NT2RP2000448, NT2RP2000498, NT2RP2000617, NT2RP2000644, NT2RP2000656, NT2RP2000668, NT2RP2000704, NT2RP2000710, NT2RP2000715, NT2RP2000758, NT2RP2000809, NT2RP2000812, NT2RP2000845, NT2RP2000880, NT2RP2000931, NT2RP2000932, NT2RP2000938, NT2RP2000943, NT2RP2000970, NT2RP2000985, NT2RP2000987, NT2RP2001036, NT2RP2001056, NT2RP2001070, NT2RP2001081, NT2RP2001119, NT2RP2001168, NT2RP2001174, NT2RP2001226, NT2RP2001233, NT2RP2001245, NT2RP2001268, NT2RP2001277, NT2RP2001295, NT2RP2001312, NT2RP2001327, NT2RP2001328, NT2RP2001347, NT2RP2001366, NT2RP2001394, NT2RP2001420, NT2RP2001423, NT2RP2001427, NT2RP2001436, NT2RP2001467, NT2RP2001506, NT2RP2001526, NT2RP2001560, NT2RP2001569, NT2RP2001576, NT2RP2001581, NT2RP2001597, NT2RP2001634, NT2RP2001660, NT2RP2001663, NT2RP2001677, NT2RP2001678, NT2RP2001699, NT2RP2001740, NT2RP2001748, NT2RP2001839, NT2RP2001869, NT2RP2001876, NT2RP2001898, NT2RP2001907, NT2RP2001926, NT2RP2001943, NT2RP2001969, NT2RP2002025, NT2RP2002033, NT2RP2002078, NT2RP2002079, NT2RP2002172, NT2RP2002185, NT2RP2002192, NT2RP2002208, NT2RP2002235, NT2RP2002256, NT2RP2002259, NT2RP2002270, NT2RP2002292, NT2RP2002316, NT2RP2002373, NT2RP2002426, NT2RP2002442, NT2RP2002457, NT2RP2002503, NT2RP2002504, NT2RP2002537, NT2RP2002546, NT2RP2002549, NT2RP2002591, NT2RP2002595, NT2RP2002606, NT2RP2002618, NT2RP2002621, NT2RP2002643, NT2RP2002672, NT2RP2002701, NT2RP2002706, NT2RP2002710, NT2RP2002736, NT2RP2002741, NT2RP2002750, NT2RP2002752, NT2RP2002753, NT2RP2002839, NT2RP2002862, NT2RP2002880, NT2RP2002929, NT2RP2002939, NT2RP2002954, NT2RP2002959, NT2RP2002979, NT2RP2002980, NT2RP2002987, NT2RP2003000, NT2RP2003034, NT2RP2003073, NT2RP2003108, NT2RP2003117, NT2RP2003125, NT2RP2003129, NT2RP2003157, NT2RP2003158, NT2RP2003165, NT2RP2003194, NT2RP2003228, NT2RP2003230, NT2RP2003237, NT2RP2003272, NT2RP2003277, NT2RP2003280, NT2RP2003293, NT2RP2003339, NT2RP2003391, NT2RP2003394, NT2RP2003433, NT2RP2003466, NT2RP2003480, NT2RP2003499, NT2RP2003517, NT2RP2003522, NT2RP2003533, NT2RP2003567, NT2RP2003596, NT2RP2003604, NT2RP2003668, NT2RP2003691, NT2RP2003702, NT2RP2003714, NT2RP2003770, NT2RP2003777, NT2RP2003781, NT2RP2003793, NT2RP2003825, NT2RP2003857, NT2RP2003859, NT2RP2003871, NT2RP2003912, NT2RP2003968, NT2RP2003976, NT2RP2003981, NT2RP2003984, NT2RP2003986, NT2RP2003988, NT2RP2004013, NT2RP2004014, NT2RP2004041, NT2RP2004081, NT2RP2004098, NT2RP2004124, NT2RP2004165, NT2RP2004170, NT2RP2004172, NT2RP2004194, NT2RP2004196, NT2RP2004207, NT2RP2004226, NT2RP2004232, NT2RP2004240, NT2RP2004242, NT2RP2004270, NT2RP2004300, NT2RP2004339, NT2RP2004347, NT2RP2004364, NT2RP2004365, NT2RP2004366, NT2RP2004373, NT2RP2004389, NT2RP2004392, NT2RP2004396, NT2RP2004399, NT2RP2004400, NT2RP2004412, NT2RP2004463, NT2RP2004476, NT2RP2004523, NT2RP2004538, NT2RP2004551, NT2RP2004568, NT2RP2004580, NT2RP2004594, NT2RP2004602, NT2RP2004655, NT2RP2004675, NT2RP2004709, NT2RP2004710, NT2RP2004736, NT2RP2004743, NT2RP2004767, NT2RP2004768, NT2RP2004791, NT2RP2004802, NT2RP2004816, NT2RP2004936, NT2RP2004959, NT2RP2004961, NT2RP2004962, NT2RP2004967, NT2RP2004978, NT2RP2004985, NT2RP2004999, NT2RP2005003, NT2RP2005012, NT2RP2005020, NT2RP2005022, NT2RP2005031, NT2RP2005116, NT2RP2005140, NT2RP2005147, NT2RP2005204, NT2RP2005227, NT2RP2005254, NT2RP2005270, NT2RP2005276, NT2RP2005287, NT2RP2005289, NT2RP2005293, NT2RP2005315, NT2RP2005325, NT2RP2005336, NT2RP2005354, NT2RP2005358, NT2RP2005360, NT2RP2005393, NT2RP2005436, NT2RP2005441, NT2RP2005457, NT2RP2005464, NT2RP2005472, NT2RP2005476, NT2RP2005490, NT2RP2005491, NT2RP2005496, NT2RP2005498, NT2RP2005509, NT2RP2005520, NT2RP2005539, NT2RP2005581, NT2RP2005600, NT2RP2005605, NT2RP2005635, NT2RP2005637, NT2RP2005640, NT2RP2005645, NT2RP2005651, NT2RP2005669, NT2RP2005675, NT2RP2005683, NT2RP2005694, NT2RP2005701, NT2RP2005719, NT2RP2005722, NT2RP2005726, NT2RP2005732, NT2RP2005748, NT2RP2005752, NT2RP2005753, NT2RP2005773, NT2RP2005775, NT2RP2005781, NT2RP2005784, NT2RP2005804, NT2RP2005812, NT2RP2005835, NT2RP2005841, NT2RP2005853, NT2RP2005857, NT2RP2005859, NT2RP2005868, NT2RP2005886, NT2RP2005890, NT2RP2005908, NT2RP2005933, NT2RP2006023, NT2RP2006043, NT2RP2006052, NT2RP2006098, NT2RP2006106, NT2RP2006166, NT2RP2006184, NT2RP2006196, NT2RP2006219, NT2RP2006275, NT2RP2006312, NT2RP2006320, NT2RP2006393, NT2RP2006436, NT2RP2006467, NT2RP2006472, NT2RP2006534, NT2RP2006554, NT2RP2006565, NT2RP2006598, NT2RP3000002, NT2RP3000046, NT2RP3000050, NT2RP3000055, NT2RP3000068, NT2RP3000080, NT2RP3000134, NT2RP3000142, NT2RP3000186, NT2RP3000197, NT2RP3000233, NT2RP3000251, NT2RP3000252, NT2RP3000312, NT2RP3000324, NT2RP3000341, NT2RP3000348, NT2RP3000350, NT2RP3000359, NT2RP3000361, NT2RP3000366, NT2RP3000393, NT2RP3000397, NT2RP3000403, NT2RP3000418, NT2RP3000433, NT2RP3000487, NT2RP3000512, NT2RP3000531, NT2RP3000542, NT2RP3000596, NT2RP3000603, NT2RP3000628, NT2RP3000632, NT2RP3000644, NT2RP3000665, NT2RP3000685, NT2RP3000739, NT2RP3000742, NT2RP3000759, NT2RP3000815, NT2RP3000826, NT2RP3000836, NT2RP3000841, NT2RP3000845, NT2RP3000850, NT2RP3000859, NT2RP3000865, NT2RP3000869, NT2RP3000875, NT2RP3000901, NT2RP3000917, NT2RP3000968, NT2RP3001007, NT2RP3001055, NT2RP3001057, NT2RP3001084, NT2RP3001096, NT2RP3001116, NT2RP3001119, NT2RP3001126, NT2RP3001133, NT2RP3001176, NT2RP3001216, NT2RP3001268, NT2RP3001272, NT2RP3001274, NT2RP3001281, NT2RP3001297, NT2RP3001325, NT2RP3001338, NT2RP3001340, NT2RP3001355, NT2RP3001398, NT2RP3001399, NT2RP3001407, NT2RP3001426, NT2RP3001428, NT2RP3001432, NT2RP3001447, NT2RP3001449, NT2RP3001453, NT2RP3001457, NT2RP3001490, NT2RP3001527, NT2RP3001529, NT2RP3001538, NT2RP3001587, NT2RP3001589, NT2RP3001608, NT2RP3001642, NT2RP3001678, NT2RP3001679, NT2RP3001688, NT2RP3001698, NT2RP3001708, NT2RP3001712, NT2RP3001716, NT2RP3001724, NT2RP3001727, NT2RP3001730, NT2RP3001752, NT2RP3001753, NT2RP3001782, NT2RP3001844, NT2RP3001854, NT2RP3001898, NT2RP3001938, NT2RP3001943, NT2RP3001944, NT2RP3002002, NT2RP3002014, NT2RP3002063, NT2RP3002081, NT2RP3002097, NT2RP3002102, NT2RP3002142, NT2RP3002146, NT2RP3002147, NT2RP3002151, NT2RP3002163, NT2RP3002165, NT2RP3002166, NT2RP3002244, NT2RP3002248, NT2RP3002255, NT2RP3002273, NT2RP3002303, NT2RP3002330, NT2RP3002399, NT2RP3002402, NT2RP3002455, NT2RP3002484, NT2RP3002501, NT2RP3002590, NT2RP3002603, NT2RP3002628, NT2RP3002650, NT2RP3002660, NT2RP3002682, NT2RP3002876, NT2RP3002877, NT2RP3002909, NT2RP3002911, NT2RP3002969, NT2RP3002985, NT2RP3003032, NT2RP3003061, NT2RP3003068, NT2RP3003071, NT2RP3003101, NT2RP3003139, NT2RP3003145, NT2RP3003157, NT2RP3003193, NT2RP3003203, NT2RP3003204, NT2RP3003210, NT2RP3003230, NT2RP3003251, NT2RP3003264, NT2RP3003290, NT2RP3003411, NT2RP3003433, NT2RP3003555, NT2RP3003576, NT2RP3003589, NT2RP3003621, NT2RP3003625, NT2RP3003656, NT2RP3003659, NT2RP3003672, NT2RP3003805, NT2RP3003819, NT2RP3003825, NT2RP3003828, NT2RP3003831, NT2RP3003842, NT2RP3003846, NT2RP3003876, NT2RP3003914, NT2RP3003918, NT2RP3003932, NT2RP3003989, NT2RP3004013, NT2RP3004041, NT2RP3004051, NT2RP3004070, NT2RP3004093, NT2RP3004095, NT2RP3004110, NT2RP3004125, NT2RP3004155, NT2RP3004189, NT2RP3004242, NT2RP3004246, NT2RP3004258, NT2RP3004282, NT2RP3004332, NT2RP3004341, NT2RP3004348, NT2RP3004349, NT2RP3004378, NT2RP3004466, NT2RP3004470, NT2RP3004480, NT2RP3004498, NT2RP3004503, NT2RP3004504, NT2RP3004534, NT2RP3004539, NT2RP3004544, NT2RP3004566, NT2RP3004569, NT2RP3004572, NT2RP3004594, NT2RP3004670, NT2RP4000008, NT2RP4000023, NT2RP4000035, NT2RP4000049, NT2RP4000051, NT2RP4000078, NT2RP4000109, NT2RP4000150, NT2RP4000151, NT2RP4000185, NT2RP4000210, NT2RP4000212, NT2RP4000214, NT2RP4000218, NT2RP4000243, NT2RP4000246, NT2RP4000312, NT2RP4000321, NT2RP4000355, NT2RP4000370, NT2RP4000376, NT2RP4000381, NT2RP4000398, NT2RP4000415, NT2RP4000417, NT2RP4000424, NT2RP4000449, NT2RP4000480, NT2RP4000481, NT2RP4000498, NT2RP4000515, NT2RP4000517, NT2RP4000556, NT2RP4000560, NT2RP4000588, NT2RP4000614, NT2RP4000638, NT2RP4000657, NT2RP4000704, NT2RP4000713, NT2RP4000724, NT2RP4000728, NT2RP4000739, NT2RP4000817, NT2RP4000833, NT2RP4000837, NT2RP4000839, NT2RP4000865, NT2RP4000878, NT2RP4000907, NT2RP4000918, NT2RP4000928, NT2RP4000973, NT2RP4000975, NT2RP4000979, NT2RP4000996, NT2RP4000997, NT2RP4001029, NT2RP4001041, NT2RP4001064, NT2RP4001079, NT2RP4001095, NT2RP4001100, NT2RP4001117, NT2RP4001122, NT2RP4001126, NT2RP4001143, NT2RP4001149, NT2RP4001159, NT2RP4001174, NT2RP4001206, NT2RP4001207, NT2RP4001210, NT2RP4001213, NT2RP4001219, NT2RP4001228, NT2RP4001235, NT2RP4001260, NT2RP4001274, NT2RP4001276, NT2RP4001336, NT2RP4001343, NT2RP4001351, NT2RP4001373, NT2RP4001379, NT2RP4001389, NT2RP4001414, NT2RP4001498, NT2RP4001502, NT2RP4001507, NT2RP4001524, NT2RP4001529, NT2RP4001547, NT2RP4001568, NT2RP4001571, NT2RP4001574, NT2RP4001592, NT2RP4001638, NT2RP4001644, NT2RP4001677, NT2RP4001679, NT2RP4001696, NT2RP4001730, NT2RP4001739, NT2RP4001753, NT2RP4001760, NT2RP4001790, NT2RP4001803, NT2RP4001822, NT2RP4001828, NT2RP4001841, NT2RP4001861, NT2RP4001889, NT2RP4001901, NT2RP4001927, NT2RP4001938, NT2RP4001953, NT2RP4001975, NT2RP4002018, NT2RP4002047, NT2RP4002052, NT2RP4002071, NT2RP4002078, NT2RP4002081, NT2RP4002298, NT2RP5003459, NT2RP5003461, NT2RP5003506, NT2RP5003534, OVARC1000001, OVARC1000004, OVARC1000006, OVARC1000013, OVARC1000014, OVARC1000035, OVARC1000058, OVARC1000060, OVARC1000085, OVARC1000092, OVARC1000106, OVARC1000109, OVARC1000113, OVARC1000114, OVARC1000133, OVARC1000139, OVARC1000148, OVARC1000168, OVARC1000198, OVARC1000209, OVARC1000240, OVARC1000241, OVARC1000288, OVARC1000321, OVARC1000347, OVARC1000408, OVARC1000414, OVARC1000420, OVARC1000427, OVARC1000431, OVARC1000437, OVARC1000440, OVARC1000442, OVARC1000443, OVARC1000466, OVARC1000479, OVARC1000486, OVARC1000526, OVARC1000533, OVARC1000556, OVARC1000564, OVARC1000573, OVARC1000576, OVARC1000578, OVARC1000622, OVARC1000640, OVARC1000649, OVARC1000661, OVARC1000678, OVARC1000679, OVARC1000682, OVARC1000689, OVARC1000700, OVARC1000703, OVARC1000722, OVARC1000730, OVARC1000769, OVARC1000800, OVARC1000846, OVARC1000883, OVARC1000886, OVARC1000890, OVARC1000891, OVARC1000912, OVARC1000915, OVARC1000937, OVARC1000959, OVARC1000960, OVARC1000964, OVARC1000999, OVARC1001000, OVARC1001011, OVARC1001038, OVARC1001040, OVARC1001051, OVARC1001055, OVARC1001062, OVARC1001065, OVARC1001107, OVARC1001117, OVARC1001118, OVARC1001154, OVARC1001161, OVARC1001162, OVARC1001167, OVARC1001170, OVARC1001171, OVARC1001173, OVARC1001176, OVARC1001180, OVARC1001232, OVARC1001240, OVARC1001244, OVARC1001268, OVARC1001271, OVARC1001329, OVARC1001339, OVARC1001341, OVARC1001342, OVARC1001344, OVARC1001357, OVARC1001376, OVARC1001381, OVARC1001489, OVARC1001496, OVARC1001506, OVARC1001542, OVARC1001555, OVARC1001577, OVARC1001668, OVARC1001711, OVARC1001713, OVARC1001731, OVARC1001745, OVARC1001766, OVARC1001802, OVARC1001809, OVARC1001813, OVARC1001820, OVARC1001880, OVARC1001883, OVARC1001900, OVARC1001942, OVARC1001949, OVARC1001950, OVARC1001987, OVARC1001989, OVARC1002044, OVARC1002066, OVARC1002082, OVARC1002107, OVARC1002112, OVARC1002156, OVARC1002165, PLACE1000005, PLACE1000014, PLACE1000040, PLACE1000050, PLACE1000061, PLACE1000066, PLACE1000078, PLACE1000133, PLACE1000185, PLACE1000292, PLACE1000347, PLACE1000374, PLACE1000420, PLACE1000421, PLACE1000424, PLACE1000435, PLACE1000444, PLACE1000453, PLACE1000481, PLACE1000540, PLACE1000547, PLACE1000562, PLACE1000583, PLACE1000599, PLACE1000611, PLACE1000656, PLACE1000706, PLACE1000712, PLACE1000748, PLACE1000749, PLACE1000785, PLACE1000793, PLACE1000798, PLACE1000841, PLACE1000849, PLACE1000863, PLACE1000909, PLACE1000931, PLACE1000972, PLACE1000979, PLACE1001000, PLACE1001007, PLACE1001036, PLACE1001054, PLACE1001062, PLACE1001092, PLACE1001118, PLACE1001136, PLACE1001168, PLACE1001185, PLACE1001238, PLACE1001257, PLACE1001272, PLACE1001280, PLACE1001304, PLACE1001311, PLACE1001323, PLACE1001383, PLACE1001395, PLACE1001399, PLACE1001414, PLACE1001456, PLACE1001503, PLACE1001517, PLACE1001534, PLACE1001545, PLACE1001551, PLACE1001602, PLACE1001603, PLACE1001610, PLACE1001634, PLACE1001640, PLACE1001691, PLACE1001692, PLACE1001705, PLACE1001740, PLACE1001746, PLACE1001748, PLACE1001756, PLACE1001761, PLACE1001771, PLACE1001781, PLACE1001821, PLACE1001844, PLACE1001845, PLACE1001869, PLACE1001897, PLACE1001912, PLACE1001989, PLACE1002004, PLACE1002066, PLACE1002072, PLACE1002090, PLACE1002119, PLACE1002140, PLACE1002171, PLACE1002205, PLACE1002213, PLACE1002342, PLACE1002395, PLACE1002477, PLACE1002493, PLACE1002500, PLACE1002532, PLACE1002537, PLACE1002571, PLACE1002578, PLACE1002598, PLACE1002604, PLACE1002655, PLACE1002775, PLACE1002815, PLACE1002816, PLACE1002834, PLACE1002853, PLACE1002881, PLACE1002968, PLACE1002991, PLACE1002993, PLACE1002996, PLACE1003025, PLACE1003027, PLACE1003092, PLACE1003100, PLACE1003108, PLACE1003136, PLACE1003153, PLACE1003174, PLACE1003190, PLACE1003205, PLACE1003249, PLACE1003256, PLACE1003296, PLACE1003302, PLACE1003353, PLACE1003361, PLACE1003366, PLACE1003373, PLACE1003420, PLACE1003493, PLACE1003516, PLACE1003519, PLACE1003521, PLACE1003528, PLACE1003537, PLACE1003566, PLACE1003575, PLACE1003584, PLACE1003592, PLACE1003596, PLACE1003602, PLACE1003605, PLACE1003611, PLACE1003638, PLACE1003704, PLACE1003711, PLACE1003723, PLACE1003738, PLACE1003760, PLACE1003762, PLACE1003771, PLACE1003783, PLACE1003795, PLACE1003850, PLACE1003870, PLACE1003886, PLACE1003892, PLACE1003900, PLACE1003915, PLACE1003923, PLACE1003932, PLACE1003968, PLACE1004103, PLACE1004104, PLACE1004114, PLACE1004128, PLACE1004149, PLACE1004156, PLACE1004183, PLACE1004242, PLACE1004256, PLACE1004257, PLACE1004274, PLACE1004277, PLACE1004284, PLACE1004289, PLACE1004316, PLACE1004336, PLACE1004358, PLACE1004376, PLACE1004384, PLACE1004425, PLACE1004428, PLACE1004437, PLACE1004451, PLACE1004467, PLACE1004471, PLACE1004506, PLACE1004548, PLACE1004629, PLACE1004645, PLACE1004658, PLACE1004672, PLACE1004674, PLACE1004681, PLACE1004686, PLACE1004716, PLACE1004736, PLACE1004740, PLACE1004751, PLACE1004813, PLACE1004814, PLACE1004815, PLACE1004824, PLACE1004827, PLACE1004836, PLACE1004885, PLACE1004900, PLACE1004902, PLACE1004930, PLACE1004979, PLACE1004982, PLACE1005027, PLACE1005046, PLACE1005052, PLACE1005055, PLACE1005066, PLACE1005085, PLACE1005086, PLACE1005101, PLACE1005102, PLACE1005108, PLACE1005128, PLACE1005162, PLACE1005232, PLACE1005243, PLACE1005305, PLACE1005308, PLACE1005327, PLACE1005374, PLACE1005453, PLACE1005467, PLACE1005477, PLACE1005481, PLACE1005528, PLACE1005530, PLACE1005550, PLACE1005574, PLACE1005584, PLACE1005595, PLACE1005630, PLACE1005646, PLACE1005666, PLACE1005763, PLACE1005799, PLACE1005803, PLACE1005813, PLACE1005828, PLACE1005834, PLACE1005850, PLACE1005898, PLACE1005934, PLACE1006002, PLACE1006003, PLACE1006011, PLACE1006076, PLACE1006119, PLACE1006139, PLACE1006143, PLACE1006157, PLACE1006159, PLACE1006170, PLACE1006288, PLACE1006325, PLACE1006412, PLACE1006438, PLACE1006470, PLACE1006482, PLACE1006488, PLACE1006492, PLACE1006521, PLACE1006540, PLACE1006615, PLACE1006617, PLACE1006673, PLACE1006760, PLACE1006792, PLACE1006805, PLACE1006829, PLACE1006867, PLACE1006883, PLACE1006904, PLACE1006917, PLACE1006961, PLACE1006962, PLACE1007068, PLACE1007132, PLACE1007274, PLACE1007276, PLACE1007286, PLACE1007346, PLACE1007367, PLACE1007386, PLACE1007450, PLACE1007452, PLACE1007454, PLACE1007537, PLACE1007544, PLACE1007621, PLACE1007645, PLACE1007677, PLACE1007737, PLACE1007791, PLACE1007829, PLACE1007858, PLACE1007866, PLACE1007877, PLACE1007908, PLACE1007969, PLACE1008129, PLACE1008132, PLACE1008330, PLACE1008398, PLACE1008401, PLACE1008405, PLACE1008426, PLACE1008455, PLACE1008457, PLACE1008603, PLACE1008629, PLACE1008693, PLACE1008798, PLACE1008851, PLACE1009060, PLACE1009091, PLACE1009155, PLACE1009166, PLACE1009183, PLACE1009200, PLACE1009230, PLACE1009246, PLACE1009298, PLACE1009319, PLACE1009328, PLACE1009443, PLACE1009468, PLACE1009539, PLACE1009595, PLACE1009607, PLACE1009621, PLACE1009622, PLACE1009659, PLACE1009763, PLACE1009798, PLACE1009861, PLACE1009879, PLACE1009888, PLACE1009924, PLACE1009995, PLACE1009997, PLACE1010023, PLACE1010074, PLACE1010076, PLACE1010096, PLACE1010105, PLACE1010293, PLACE1010310, PLACE1010321, PLACE1010329, PLACE1010383, PLACE1010492, PLACE1010522, PLACE1010599, PLACE1010616, PLACE1010624, PLACE1010702, PLACE1010720, PLACE1010761, PLACE1010771, PLACE1010786, PLACE1010856, PLACE1010857, PLACE1010870, PLACE1010877, PLACE1010900, PLACE1010925, PLACE1010942, PLACE1010947, PLACE1010954, PLACE1010960, PLACE1010965, PLACE1011026, PLACE1011032, PLACE1011054, PLACE1011056, PLACE1011057, PLACE1011090, PLACE1011109, PLACE1011114, PLACE1011185, PLACE1011214, PLACE1011291, PLACE1011332, PLACE1011340, PLACE1011371, PLACE1011452, PLACE1011477, PLACE1011492, PLACE1011567, PLACE1011576, PLACE1011586, PLACE1011635, PLACE1011646, PLACE1011719, PLACE1011729, PLACE1011749, PLACE1011783, PLACE1011874, PLACE1011923, PLACE1011962, PLACE1011995, PLACE2000003, PLACE2000006, PLACE2000011, PLACE2000014, PLACE2000021, PLACE2000030, PLACE2000033, PLACE2000034, PLACE2000039, PLACE2000047, PLACE2000050, PLACE2000062, PLACE2000097, PLACE2000100, PLACE2000103, PLACE2000111, PLACE2000124, PLACE2000140, PLACE2000170, PLACE2000176, PLACE2000187, PLACE2000216, PLACE2000235, PLACE2000246, PLACE2000264, PLACE2000302, PLACE2000305, PLACE2000335, PLACE2000341, PLACE2000342, PLACE2000347, PLACE2000366, PLACE2000371, PLACE2000373, PLACE2000394, PLACE2000399, PLACE2000404, PLACE2000411, PLACE2000419, PLACE2000450, PLACE2000458, PLACE2000465, PLACE3000004, PLACE3000009, PLACE3000020, PLACE3000029, PLACE3000070, PLACE3000103, PLACE3000121, PLACE3000124, PLACE3000145, PLACE3000147, PLACE3000155, PLACE3000158, PLACE3000160, PLACE3000169, PLACE3000194, PLACE3000207, PLACE3000208, PLACE3000220, PLACE3000221, PLACE3000226, PLACE3000242, PLACE3000254, PLACE3000271, PLACE3000304, PLACE3000320, PLACE3000331, PLACE3000339, PLACE3000341, PLACE3000350, PLACE3000352, PLACE3000353, PLACE3000362, PLACE3000388, PLACE3000399, PLACE3000400, PLACE3000401, PLACE3000405, PLACE3000425, PLACE3000455, PLACE3000475, PLACE3000477, PLACE4000009, PLACE4000034, PLACE4000049, PLACE4000063, PLACE4000089, PLACE4000100, PLACE4000128, PLACE4000131, PLACE4000156, PLACE4000211, PLACE4000222, PLACE4000230, PLACE4000233, PLACE4000250, PLACE4000259, PLACE4000320, PLACE4000323, PLACE4000379, PLACE4000411, PLACE4000431, PLACE4000445, PLACE4000450, PLACE4000465, PLACE4000487, PLACE4000521, PLACE4000581, SKNMC1000011, SKNMC1000050, SKNMC1000091, THYRO1000017, THYRO1000085, THYRO1000092, THYRO1000132, THYRO1000163, THYRO1000186, THYRO1000187, THYRO1000190, THYRO1000197, THYRO1000221, THYRO1000241, THYRO1000253, THYRO1000320, THYRO1000394, THYRO1000438, THYRO1000452, THYRO1000471, THYRO1000484, THYRO1000569, THYRO1000602, THYRO1000625, THYRO1000658, THYRO1000676, THYRO1000699, THYRO1000712, THYRO1000715, THYRO1000815, THYRO1000829, THYRO1000843, THYRO1000855, THYRO1000865, THYRO1000916, THYRO1000974, THYRO1000975, THYRO1000983, THYRO1000984, THYRO1000988, THYRO1001003, THYRO1001031, THYRO1001093, THYRO1001133, THYRO1001173, THYRO1001177, THYRO1001189, THYRO1001204, THYRO1001213, THYRO1001287, THYRO1001320, THYRO1001321, THYRO1001374, THYRO1001401, THYRO1001405, THYRO1001406, THYRO1001411, THYRO1001426, THYRO1001480, THYRO1001487, THYRO1001534, THYRO1001537, THYRO1001541, THYRO1001559, THYRO1001573, THYRO1001584, THYRO1001595, THYRO1001602, THYRO1001617, THYRO1001637, THYRO1001656, THYRO1001671, THYRO1001673, THYRO1001703, THYRO1001706, THYRO1001738, THYRO1001772, THYRO1001793, THYRO1001828, THYRO1001854, THYRO1001907, VESEN1000122, Y79AA1000033, Y79AA1000037, Y79AA1000059, Y79AA1000065, Y79AA1000131, Y79AA1000202, Y79AA1000214, Y79AA1000231, Y79AA1000268, Y79AA1000313, Y79AA1000342, Y79AA1000346, Y79AA1000349, Y79AA1000355, Y79AA1000368, Y79AA1000405, Y79AA1000410, Y79AA1000420, Y79AA1000469, Y79AA1000480, Y79AA1000538, Y79AA1000539, Y79AA1000560, Y79AA1000589, Y79AA1000627, Y79AA1000705, Y79AA1000734, Y79AA1000774, Y79AA1000782, Y79AA1000784, Y79AA1000827, Y79AA1000833, Y79AA1000850, Y79AA1000966, Y79AA1000968, Y79AA1000985, Y79AA1001061, Y79AA1001068, Y79AA1001077, Y79AA1001078, Y79AA1001105, Y79AA1001145, Y79AA1001211, Y79AA1001216, Y79AA1001228, Y79AA1001236, Y79AA1001299, Y79AA1001394, Y79AA1001402, Y79AA1001511, Y79AA1001533, Y79AA1001548, Y79AA1001555, Y79AA1001581, Y79AA1001585, Y79AA1001603, Y79AA1001647, Y79AA1001665, Y79AA1001679, Y79AA1001711, Y79AA1001805, Y79AA1001827, Y79AA1001846, Y79AA1001866, Y79AA1001875, Y79AA1001923, Y79AA1001963, Y79AA1002089, Y79AA1002093, Y79AA1002115, Y79AA1002125, Y79AA1002209, Y79AA1002211, Y79AA1002220, Y79AA1002246, Y79AA1002258, Y79AA1002311, Y79AA1002351, Y79AA1002361, Y79AA1002472, Y79AA1002482

[0544] Signal ratios of EC_AGE_BSA to EC_BSA and of EC_glycated_BSA to EC_BSA were calculated for each gene. Genes with high signal ratios were selected. In the case of calculating the ratio of signal value of 40 or less to that of more than 40, such signal values were, for convenience, taken as 40 instead of the real values. When the ratio EC_AGE_BSA/EC_BSA is 2 or more, expression of the genes exhibiting such ratio is expected to be elevated due to advanced glycation endproduct of bovine serum albumin. The higher the value is, the higher the gene expression level is. When the ratio EC_AGE_BSA/EC_BSA ranges from 0.5 to 2, expression of the genes exhibiting such ratio is expected to be unaffected due to advanced glycation endproduct of bovine serum albumin. When the ratio EC_AGE_BSA/EC_BSA is less than 0.5, expression of the genes exhibiting such ratio value is expected to be decreased due to advanced glycation endproduct of bovine serum albumin. The lower the value is, the lower the gene expression level is.

[0545] Clone with EC_AGE_BSA/EC_BSA ratio of 2 or higher are as follows:

HEMBA1003958, MAMMA1001256, PLACE2000411.

[0546] Clone with EC_AGE_BSA/EC_BSA ratio of 0.5 or less is as follows:

[0547] MAMMA1001783.

[0548] These cDNAs are associated with diabetes.

[0549] When the ratio EC_glycated_BSA/EC_BSA is 2 or more, the expression level of the gene exhibiting such ratio is expected to be elevated due to glycated bovine serum albumin. The higher the value is, the higher the gene expression level is. When the ratio EC_glycated_BSA/EC_BSA ranges from 0.5 to 2, the expression level of the gene exhibiting such ratio is expected to be unaffected with glycated bovine serum albumin. When the ratio EC_glycated_BSA/EC_BSA is less than 0.5, the expression level of a gene exhibiting such ratio is expected to be decreased due to glycated bovine serum albumin. The lower the value is, the lower the gene expression level is.

[0550] Clones with EC_glycated_BSA/EC_BSA ratio of 2 or more are as follows:

HEMBA1004850, MAMMA1001256, MAMMA1002132 and PLACE3000119.

[0551] A clone with EC_glycated_BSA/EC_BSA ratio of 0.5 or less is as follows:

[0552] MAMMA1001783.

[0553] These cDNAs are also associated with diabetes.

[0554] Analysis of genes associated with neural cell differentiation

[0555] Genes involved in neural cell differentiation are useful for treating neurological diseases. It is possible that genes with varying expression levels in response to induction of cellular differentiation in neural cells are associated with neurological diseases.

[0556] A survey was performed for genes of which expression levels are varied in response to induction of differentiation (stimulation by retinoic acid (RA)) in cultured cells of a neural strain, NT2.

[0557] The NT2 cells were treated basically according to supplier's instruction manual. “Undifferentiated NT2 cells” means NT2 cells successively cultured in an Opti-MEM I (GIBCO-BRL; catalog No. 31985) containing 10% (v/v) fetal bovine serum and 1% (v/v) penicillin-streptomycin (GIBCO BRL). “NT2 cells cultured in the presence of retinoic acid” means the cells resulted from transferring undifferentiated NT2 cells into a retinoic acid-containing medium, which consists of D-MEM (GIBCO BRL; catalog No. 11965), 10% (v/v) fetal bovine serum, 1% (v/v) penicillin-streptomycin and 10 μM retinoic acid (GIBCO-BRL), and the subsequent successive culture therein for 5 weeks. “NT2 cells that were cultured in the presence of retinoic acid and then further cultured in the presence of cell-division inhibitor added” means NT2 cells resulted from transferring NT2 cells cultured in the presence of retinoic acid for 5 weeks into a cell-division inhibitor-containing medium, which consisted of D-MEM (GIBCO BRL; catalog No. 11965), 10% (v/v) fetal bovine serum, 1% (v/v) penicillin-streptomycin, 10 μM retinoic acid, 10μM FudR (5-fluoro-2′-deoxyuridine: GIBCO BRL), 10 μM Urd (Uridine: GIBCO BRL) and 1 μM araC (Cytosine,-D-Arabinofuranoside: GIBCO BRL), and the subsequence successive culture for 2 weeks. Each of the cells were treated with trypsin and then harvested. Total RNAs were extracted from the cells by using S.N.A.P.™ Total RNA Isolation kit (Invitrogen®). The labeling of probe used for hybridization was carried out by using 10 μg of the total RNA according to the same methods as described above. The data were obtained in triplicate (n=3). The data of signal value representing gene expression level in the cells in the presence of stimulation for inducing differentiation were compared with those in the absence of the stimulation. The comparison was performed by statistical treatment of two-sample t-test. Clones with significant difference in the signal distribution were selected under the condition of p<0.05. In this analysis, clones with the difference can be statistically detected even when the signals were low. Accordingly, clones with signal value of 40 or less were also assessed for the selection.

[0558] Tables 170-349 show the expression level of each cDNA in undifferentiated NT2 cells, NT2 cells cultured in the presence of RA, and NT2 cells that were cultured in the presence of RA and that were further cultured in the presence of cell-division inhibitor added.

[0559] Averaged signal values (M₁, M₂) and sample variances (s₁², s₂²) were calculated for each gene in each of the cells, and then, the pooled sample variances s² were obtained from the sample variances of the two types of cells to be compared. The t values were determined according to the following formula: t=(M1−M2)//(⅓+⅓)^{1/2}. When the determined t-value was greater than a t-value at P, which means the probability of significance level, of 0.05 or 0.01 in the t-distribution table with 4 degrees of freedom, the difference was judged to be found in the expression level of the gene between the two types of cells at p<0.05 or p<0.01, respectively. The tables also include the information on an increase (+) or decrease (−) in the expression level of a gene in the treated cells when the level is compared with that of untreated undifferentiated cells.

[0560] Clones of which expression levels increased by RA are as follows:

[0561] HEMBA1000005, HEMBA1000042, HEMBA1000046, HEMBA1000076, HEMBA1000111, HEMBA1000141, HEMBA1000150, HEMBA1000185, HEMBA1000282, HEMBA1000304, HEMBA1000307, HEMBA1000338, HEMBA1000357, HEMBA1000376, HEMBA1000387, HEMBA1000392, HEMBA1000428, HEMBA1000456, HEMBA1000459, HEMBA1000469, HEMBA1000504, HEMBA1000508, HEMBA1000519, HEMBA1000540, HEMBA1000545, HEMBA1000557, HEMBA1000563, HEMBA1000568, HEMBA1000575, HEMBA1000588, HEMBA1000592, HEMBA1000604, HEMBA1000622, HEMBA1000655, HEMBA1000673, HEMBA1000682, HEMBA1000726, HEMBA1000727, HEMBA1000749, HEMBA1000769, HEMBA1000774, HEMBA1000791, HEMBA1000822, HEMBA1000872, HEMBA1000876, HEMBA1000910, HEMBA1000942, HEMBA1000943, HEMBA1000960, HEMBA1000972, HEMBA1000974, HEMBA1000991, HEMBA1001008, HEMBA1001020, HEMBA1001043, HEMBA1001051, HEMBA1001060, HEMBA1001071, HEMBA1001077, HEMBA1001085, HEMBA1001094, HEMBA1001109, HEMBA1001121, HEMBA1001122, HEMBA1001140, HEMBA1001172, HEMBA1001226, HEMBA1001235, HEMBA1001265, HEMBA1001281, HEMBA1001294, HEMBA1001299, HEMBA1001319, HEMBA1001323, HEMBA1001330, HEMBA1001351, HEMBA1001361, HEMBA1001377, HEMBA1001388, HEMBA1001391, HEMBA1001398, HEMBA1001432, HEMBA1001435, HEMBA1001442, HEMBA1001454, HEMBA1001455, HEMBA1001497, HEMBA1001517, HEMBA1001569, HEMBA1001570, HEMBA1001581, HEMBA1001585, HEMBA1001620, HEMBA1001711, HEMBA1001718, HEMBA1001723, HEMBA1001761, HEMBA1001815, HEMBA1001819, HEMBA1001861, HEMBA1001864, HEMBA1001869, HEMBA1001888, HEMBA1001915, HEMBA1001918, HEMBA1001940, HEMBA1001964, HEMBA1001967, HEMBA1001979, HEMBA1001987, HEMBA1001991, HEMBA1002008, HEMBA1002022, HEMBA1002039, HEMBA1002049, HEMBA1002084, HEMBA1002102, HEMBA1002113, HEMBA1002144, HEMBA1002160, HEMBA1002162, HEMBA1002185, HEMBA1002212, HEMBA1002226, HEMBA1002229, HEMBA1002267, HEMBA1002270, HEMBA1002337, HEMBA1002381, HEMBA1002458, HEMBA1002477, HEMBA1002508, HEMBA1002558, HEMBA1002561, HEMBA1002583, HEMBA1002590, HEMBA1002628, HEMBA1002645, HEMBA1002661, HEMBA1002678, HEMBA1002712, HEMBA1002728, HEMBA1002780, HEMBA1002850, HEMBA1002886, HEMBA1002934, HEMBA1002935, HEMBA1002939, HEMBA1002951, HEMBA1002968, HEMBA1002970, HEMBA1002973, HEMBA1002999, HEMBA1003021, HEMBA1003033, HEMBA1003034, HEMBA1003064, HEMBA1003067, HEMBA1003078, HEMBA1003086, HEMBA1003096, HEMBA1003129, HEMBA1003142, HEMBA1003148, HEMBA1003166, HEMBA1003175, HEMBA1003197, HEMBA1003199, HEMBA1003202, HEMBA1003204, HEMBA1003212, HEMBA1003235, HEMBA1003250, HEMBA1003273, HEMBA1003276, HEMBA1003278, HEMBA1003291, HEMBA1003309, HEMBA1003322, HEMBA1003328, HEMBA1003348, HEMBA1003369, HEMBA1003376, HEMBA1003384, HEMBA1003395, HEMBA1003463, HEMBA1003480, HEMBA1003531, HEMBA1003548, HEMBA1003591, HEMBA1003595, HEMBA1003597, HEMBA1003617, HEMBA1003621, HEMBA1003622, HEMBA1003637, HEMBA1003640, HEMBA1003645, HEMBA1003646, HEMBA1003656, HEMBA1003679, HEMBA1003692, HEMBA1003715, HEMBA1003720, HEMBA1003725, HEMBA1003729, HEMBA1003758, HEMBA1003803, HEMBA1003805, HEMBA1003836, HEMBA1003838, HEMBA1003879, HEMBA1003885, HEMBA1003893, HEMBA1003908, HEMBA1003937, HEMBA1003942, HEMBA1003953, HEMBA1003958, HEMBA1003959, HEMBA1003978, HEMBA1003987, HEMBA1003989, HEMBA1004000, HEMBA1004011, HEMBA1004012, HEMBA1004015, HEMBA1004024, HEMBA1004049, HEMBA1004056, HEMBA1004111, HEMBA1004132, HEMBA1004143, HEMBA1004164, HEMBA1004199, HEMBA1004200, HEMBA1004207, HEMBA1004225, HEMBA1004246, HEMBA1004248, HEMBA1004267, HEMBA1004289, HEMBA1004312, HEMBA1004323, HEMBA1004335, HEMBA1004353, HEMBA1004354, HEMBA1004356, HEMBA1004366, HEMBA1004396, HEMBA1004405, HEMBA1004429, HEMBA1004433, HEMBA1004460, HEMBA1004499, HEMBA1004502, HEMBA1004506, HEMBA1004534, HEMBA1004538, HEMBA1004573, HEMBA1004577, HEMBA1004586, HEMBA1004610, HEMBA1004629, HEMBA1004666, HEMBA1004669, HEMBA1004672, HEMBA1004709, HEMBA1004733, HEMBA1004736, HEMBA1004748, HEMBA1004751, HEMBA1004758, HEMBA1004763, HEMBA1004768, HEMBA1004770, HEMBA1004778, HEMBA1004803, HEMBA1004820, HEMBA1004847, HEMBA1004863, HEMBA1004880, HEMBA1004909, HEMBA1004918, HEMBA1004923, HEMBA1004930, HEMBA1004934, HEMBA1004944, HEMBA1004954, HEMBA1004980, HEMBA1005035, HEMBA1005039, HEMBA1005075, HEMBA1005079, HEMBA1005113, HEMBA1005123, HEMBA1005133, HEMBA1005149, HEMBA1005152, HEMBA1005219, HEMBA1005223, HEMBA1005232, HEMBA1005251, HEMBA1005274, HEMBA1005275, HEMBA1005304, HEMBA1005311, HEMBA1005314, HEMBA1005359, HEMBA1005367, HEMBA1005374, HEMBA1005410, HEMBA1005411, HEMBA1005423, HEMBA1005426, HEMBA1005443, HEMBA1005447, HEMBA1005474, HEMBA1005508, HEMBA1005511, HEMBA1005520, HEMBA1005526, HEMBA1005548, HEMBA1005552, HEMBA1005576, HEMBA1005581, HEMBA1005582, HEMBA1005583, HEMBA1005588, HEMBA1005595, HEMBA1005609, HEMBA1005616, HEMBA1005627, HEMBA1005631, HEMBA1005666, HEMBA1005670, HEMBA1005679, HEMBA1005699, HEMBA1005705, HEMBA1005765, HEMBA1005780, HEMBA1005822, HEMBA1005829, HEMBA1005834, HEMBA1005853, HEMBA1005891, HEMBA1005894, HEMBA1005911, HEMBA1005921, HEMBA1005991, HEMBA1005999, HEMBA1006036, HEMBA1006042, HEMBA1006100, HEMBA1006138, HEMBA1006142, HEMBA1006268, HEMBA1006278, HEMBA1006328, HEMBA1006344, HEMBA1006359, HEMBA1006398, HEMBA1006416, HEMBA1006419, HEMBA1006421, HEMBA1006426, HEMBA1006438, HEMBA1006483, HEMBA1006485, HEMBA1006502, HEMBA1006507, HEMBA1006546, HEMBA1006559, HEMBA1006562, HEMBA1006579, HEMBA1006597, HEMBA1006612, HEMBA1006617, HEMBA1006631, HEMBA1006635, HEMBA1006652, HEMBA1006695, HEMBA1006744, HEMBA1006754, HEMBA1006779, HEMBA1006780, HEMBA1006795, HEMBA1006821, HEMBA1006865, HEMBA1006926, HEMBA1006973, HEMBA1007017, HEMBA1007052, HEMBA1007080, HEMBA1007085, HEMBA1007113, HEMBA1007121, HEMBA1007147, HEMBA1007149, HEMBA1007206, HEMBA1007224, HEMBA1007256, HEMBA1007267, HEMBA1007288, HEMBA1007327, HEMBA1007341, HEMBA1007347,

[0562] HEMBB1000005, HEMBB1000008, HEMBB1000018, HEMBB1000024, HEMBB1000030, HEMBB1000039, HEMBB1000048, HEMBB1000054, HEMBB1000059, HEMBB1000083, HEMBB1000089, HEMBB1000099, HEMBB1000113, HEMBB1000141, HEMBB1000144, HEMBB1000173, HEMBB1000175, HEMBB1000215, HEMBB1000218, HEMBB1000258, HEMBB1000264, HEMBB1000272, HEMBB1000307, HEMBB1000338, HEMBB1000339, HEMBB1000343, HEMBB1000354, HEMBB1000374, HEMBB1000376, HEMBB1000420, HEMBB1000434, HEMBB1000441, HEMBB1000449, HEMBB1000490, HEMBB1000491, HEMBB1000523, HEMBB1000530, HEMBB1000550, HEMBB1000554, HEMBB1000573, HEMBB1000575, HEMBB1000593, HEMBB1000598, HEMBB1000638, HEMBB1000643, HEMBB1000649, HEMBB1000671, HEMBB1000684, HEMBB1000709, HEMBB1000726, HEMBB1000770, HEMBB1000774, HEMBB1000790, HEMBB1000835, HEMBB1000840, HEMBB1000848, HEMBB1000870, HEMBB1000883, HEMBB1000887, HEMBB1000890, HEMBB1000910, HEMBB1000917, HEMBB1000959, HEMBB1000985, HEMBB1000996, HEMBB1001004, HEMBB1001020, HEMBB1001024, HEMBB1001037, HEMBB1001060, HEMBB1001096, HEMBB1001114, HEMBB1001117, HEMBB1001142, HEMBB1001153, HEMBB1001177, HEMBB1001210, HEMBB1001218, HEMBB1001242, HEMBB1001267, HEMBB1001289, HEMBB1001346, HEMBB1001348, HEMBB1001364, HEMBB1001366, HEMBB1001369, HEMBB1001380, HEMBB1001387, HEMBB1001394, HEMBB1001426, HEMBB1001436, HEMBB1001454, HEMBB1001463, HEMBB1001521, HEMBB1001535, HEMBB1001537, HEMBB1001555, HEMBB1001585, HEMBB1001603, HEMBB1001619, HEMBB1001668, HEMBB1001685, HEMBB1001695, HEMBB1001704, HEMBB1001706, HEMBB1001707, HEMBB1001735, HEMBB1001747, HEMBB1001749, HEMBB1001760, HEMBB1001812, HEMBB1001816, HEMBB1001831, HEMBB1001836, HEMBB1001850, HEMBB1001863, HEMBB1001867, HEMBB1001908, HEMBB1001910, HEMBB1001911, HEMBB1001915, HEMBB1001921, HEMBB1001930, HEMBB1001944, HEMBB1001952, HEMBB1001957, HEMBB1001967, HEMBB1001988, HEMBB1001997, HEMBB1002005, HEMBB1002042, HEMBB1002043, HEMBB1002045, HEMBB1002049, HEMBB1002069, HEMBB1002094, HEMBB1002139, HEMBB1002152, HEMBB1002189, HEMBB1002217, HEMBB1002232, HEMBB1002249, HEMBB1002254, HEMBB1002266, HEMBB1002280, HEMBB1002306, HEMBB1002364, HEMBB1002371, HEMBB1002409, HEMBB1002425, HEMBB1002453, HEMBB1002492, HEMBB1002520, HEMBB1002556, HEMBB1002582, HEMBB1002590, HEMBB1002607, HEMBB1002614, HEMBB1002617, HEMBB1002623, HEMBB1002635, HEMBB1002677, HEMBB1002683, HEMBB1002684, HEMBB1002697, HEMBB1002699, HEMBB1002705,

[0563] MAMMA1000009, MAMMA1000043, MAMMA1000045, MAMMA1000084, MAMMA1000103, MAMMA1000134, MAMMA1000139, MAMMA1000143, MAMMA1000171, MAMMA1000241, MAMMA1000251, MAMMA1000254, MAMMA1000257, MAMMA1000264, MAMMA1000266, MAMMA1000270, MAMMA1000279, MAMMA1000287, MAMMA1000340, MAMMA1000348, MAMMA1000360, MAMMA1000361, MAMMA1000372, MAMMA1000385, MAMMA1000402, MAMMA1000424, MAMMA1000478, MAMMA1000500, MAMMA1000522, MAMMA1000524, MAMMA1000565, MAMMA1000567, MAMMA1000576, MAMMA1000585, MAMMA1000594, MAMMA1000597, MAMMA1000605, MAMMA1000616, MAMMA1000643, MAMMA1000664, MAMMA1000669, MAMMA1000696, MAMMA1000718, MAMMA1000723, MAMMA1000731, MAMMA1000744, MAMMA1000746, MAMMA1000752, MAMMA1000760, MAMMA1000761, MAMMA1000776, MAMMA1000802, MAMMA1000824, MAMMA1000839, MAMMA1000880, MAMMA1000905, MAMMA1000931, MAMMA1000940, MAMMA1000941, MAMMA1000943, MAMMA1000957, MAMMA1000962, MAMMA1000968, MAMMA1000987, MAMMA1000998, MAMMA1001003, MAMMA1001035, MAMMA1001038, MAMMA1001067, MAMMA1001078, MAMMA1001092, MAMMA1001126, MAMMA1001133, MAMMA1001139, MAMMA1001161, MAMMA1001186, MAMMA1001202, MAMMA1001206, MAMMA1001220, MAMMA1001243, MAMMA1001268, MAMMA1001274, MAMMA1001296, MAMMA1001298, MAMMA1001305, MAMMA1001343, MAMMA1001383, MAMMA1001397, MAMMA1001419, MAMMA1001420, MAMMA1001435, MAMMA1001442, MAMMA1001663, MAMMA1001670, MAMMA1001683, MAMMA1001692, MAMMA1001740, MAMMA1001745, MAMMA1001754, MAMMA1001768, MAMMA1001769, MAMMA1001783, MAMMA1001785, MAMMA1001806, MAMMA1001890, MAMMA1001907, MAMMA1001969, MAMMA1002009, MAMMA1002032, MAMMA1002056, MAMMA1002058, MAMMA1002125, MAMMA1002132, MAMMA1002140, MAMMA1002155, MAMMA1002158, MAMMA1002174, MAMMA1002198, MAMMA1002230, MAMMA1002293, MAMMA1002310, MAMMA1002311, MAMMA1002322, MAMMA1002339, MAMMA1002359, MAMMA1002384, MAMMA1002428, MAMMA1002434, MAMMA1002475, MAMMA1002494, MAMMA1002545, MAMMA1002573, MAMMA1002603, MAMMA1002619, MAMMA1002622, MAMMA1002623, MAMMA1002625, MAMMA1002662, MAMMA1002698, MAMMA1002701, MAMMA1002708, MAMMA1002721, MAMMA1002744, MAMMA1002764, MAMMA1002769, MAMMA1002820, MAMMA1002830, MAMMA1002833, MAMMA1002868, MAMMA1002871, MAMMA1002892, MAMMA1002895, MAMMA1002908, MAMMA1002909, MAMMA1002930, MAMMA1002941, MAMMA1002964, MAMMA1002970, MAMMA1002973, MAMMA1002987, MAMMA1003004, MAMMA1003040, MAMMA1003066, MAMMA1003089,

[0564] NT2RM1000039, NT2RM1000672, NT2RM1000691, NT2RM1000725, NT2RM1000781, NT2RM1000829, NT2RM1000882, NT2RM1001105, NT2RM2000013, NT2RM2000374, NT2RM2000420, NT2RM2000452, NT2RM2000504, NT2RM2000609, NT2RM2000635, NT2RM2000735, NT2RM2000795, NT2RM2000821, NT2RM2001035, NT2RM2001105, NT2RM2001141, NT2RM2001177, NT2RM2001196, NT2RM2001306, NT2RM2001524, NT2RM2001582, NT2RM2001588, NT2RM2001592, NT2RM2001605, NT2RM2001632, NT2RM2001637, NT2RM2001648, NT2RM2001668, NT2RM2001671, NT2RM2001675, NT2RM2001681, NT2RM2001695, NT2RM2001699, NT2RM2001706, NT2RM2001723, NT2RM2001753, NT2RM2001771, NT2RM2001797, NT2RM2001840, NT2RM2001879, NT2RM2002049, NT2RM2002091, NT2RM4000265, NT2RM4000290, NT2RM4000324, NT2RM4000327, NT2RM4000368, NT2RM4000421, NT2RM4000425, NT2RM4000471, NT2RM4000486, NT2RM4000531, NT2RM4000532, NT2RM4000712, NT2RM4000751, NT2RM4000787, NT2RM4000790, NT2RM4000820, NT2RM4000852, NT2RM4000855, NT2RM4000895, NT2RM4000996, NT2RM4001002, NT2RM4001032, NT2RM4001047, NT2RM4001116, NT2RM4001151, NT2RM4001200, NT2RM4001313, NT2RM4001371, NT2RM4001410, NT2RM4001411, NT2RM4001437, NT2RM4001454, NT2RM4001483, NT2RM4001489, NT2RM4001522, NT2RM4001557, NT2RM4001566, NT2RM4001582, NT2RM4001650, NT2RM4001682, NT2RM4001746, NT2RM4001828, NT2RM4001842, NT2RM4001865, NT2RM4001922, NT2RM4001953, NT2RM4001979, NT2RM4002013, NT2RM4002067, NT2RM4002075, NT2RM4002093, NT2RM4002128, NT2RM4002140, NT2RM4002174, NT2RM4002205, NT2RM4002301, NT2RM4002323, NT2RM4002383, NT2RM4002409, NT2RM4002457, NT2RM4002499, NT2RM4002504, NT2RM4002558, NT2RM4002565, NT2RM4002594,

[0565] NT2RP1000018, NT2RP1000112, NT2RP1000124, NT2RP1000130, NT2RP1000170, NT2RP1000202, NT2RP1000259, NT2RP1000418, NT2RP1000493, NT2RP1000547, NT2RP1000574, NT2RP1000577, NT2RP1000630, NT2RP1000730, NT2RP1000782, NT2RP1000846, NT2RP1000856, NT2RP1000902, NT2RP1000943, NT2RP1000944, NT2RP1000988, NT2RP1001011, NT2RP1001013, NT2RP1001033, NT2RP1001173, NT2RP1001177, NT2RP1001185, NT2RP1001199, NT2RP1001286, NT2RP1001449, NT2RP1001475, NT2RP1001546, NT2RP2000032, NT2RP2000079, NT2RP2000091, NT2RP2000097, NT2RP2000120, NT2RP2000157, NT2RP2000195, NT2RP2000208, NT2RP2000224, NT2RP2000248, NT2RP2000257, NT2RP2000270, NT2RP2000274, NT2RP2000283, NT2RP2000288, NT2RP2000297, NT2RP2000298, NT2RP2000329, NT2RP2000369, NT2RP2000498, NT2RP2000634, NT2RP2000644, NT2RP2000656, NT2RP2000678, NT2RP2000715, NT2RP2000809, NT2RP2000932, NT2RP2000970, NT2RP2000987, NT2RP2001036, NT2RP2001081, NT2RP2001119, NT2RP2001127, NT2RP2001173, NT2RP2001268, NT2RP2001277, NT2RP2001290, NT2RP2001328, NT2RP2001366, NT2RP2001394, NT2RP2001420, NT2RP2001423, NT2RP2001427, NT2RP2001436, NT2RP2001440, NT2RP2001467, NT2RP2001506, NT2RP2001526, NT2RP2001601, NT2RP2001660, NT2RP2001678, NT2RP2001720, NT2RP2001861, NT2RP2001869, NT2RP2001876, NT2RP2001907, NT2RP2001926, NT2RP2001985, NT2RP2001991, NT2RP2002033, NT2RP2002041, NT2RP2002046, NT2RP2002078, NT2RP2002124, NT2RP2002193, NT2RP2002208, NT2RP2002256, NT2RP2002312, NT2RP2002316, NT2RP2002325, NT2RP2002333, NT2RP2002426, NT2RP2002457, NT2RP2002475, NT2RP2002520, NT2RP2002537, NT2RP2002595, NT2RP2002621, NT2RP2002672, NT2RP2002701, NT2RP2002706, NT2RP2002741, NT2RP2002750, NT2RP2002752, NT2RP2002769, NT2RP2002800, NT2RP2002925, NT2RP2002928, NT2RP2002959, NT2RP2002980, NT2RP2002987, NT2RP2003000, NT2RP2003034, NT2RP2003073, NT2RP2003099, NT2RP2003117, NT2RP2003129, NT2RP2003137, NT2RP2003157, NT2RP2003161, NT2RP2003165, NT2RP2003206, NT2RP2003230, NT2RP2003237, NT2RP2003243, NT2RP2003265, NT2RP2003272, NT2RP2003280, NT2RP2003293, NT2RP2003297, NT2RP2003339, NT2RP2003393, NT2RP2003394, NT2RP2003445, NT2RP2003456, NT2RP2003533, NT2RP2003559, NT2RP2003564, NT2RP2003596, NT2RP2003629, NT2RP2003691, NT2RP2003702, NT2RP2003760, NT2RP2003825, NT2RP2003859, NT2RP2003871, NT2RP2003976, NT2RP2003986, NT2RP2003988, NT2RP2004014, NT2RP2004081, NT2RP2004152, NT2RP2004187, NT2RP2004232, NT2RP2004239, NT2RP2004240, NT2RP2004321, NT2RP2004339, NT2RP2004400, NT2RP2004476, NT2RP2004538, NT2RP2004551, NT2RP2004580, NT2RP2004602, NT2RP2004675, NT2RP2004681, NT2RP2004689, NT2RP2004709, NT2RP2004710, NT2RP2004736, NT2RP2004743, NT2RP2004767, NT2RP2004775, NT2RP2004802, NT2RP2004861, NT2RP2004933, NT2RP2004961, NT2RP2004962, NT2RP2004967, NT2RP2004982, NT2RP2004985, NT2RP2005003, NT2RP2005038, NT2RP2005227, NT2RP2005276, NT2RP2005287, NT2RP2005289, NT2RP2005315, NT2RP2005436, NT2RP2005441, NT2RP2005453, NT2RP2005465, NT2RP2005476, NT2RP2005496, NT2RP2005509, NT2RP2005525, NT2RP2005540, NT2RP2005555, NT2RP2005581, NT2RP2005669, NT2RP2005719, NT2RP2005722, NT2RP2005767, NT2RP2005773, NT2RP2005853, NT2RP2005886, NT2RP2005901, NT2RP2005942, NT2RP2005980, NT2RP2006023, NT2RP2006043, NT2RP2006071, NT2RP2006166, NT2RP2006196, NT2RP2006237, NT2RP2006312, NT2RP2006320, NT2RP2006365, NT2RP2006393, NT2RP2006436, NT2RP2006441, NT2RP2006467, NT2RP2006554, NT2RP2006565, NT2RP2006598,

[0566] NT2RP3000002, NT2RP3000050, NT2RP3000072, NT2RP3000109, NT2RP3000134, NT2RP3000197, NT2RP3000341, NT2RP3000359, NT2RP3000366, NT2RP3000403, NT2RP3000418, NT2RP3000433, NT2RP3000441, NT2RP3000526, NT2RP3000531, NT2RP3000542, NT2RP3000561, NT2RP3000562, NT2RP3000603, NT2RP3000605, NT2RP3000644, NT2RP3000759, NT2RP3000815, NT2RP3000825, NT2RP3000836, NT2RP3000847, NT2RP3000850, NT2RP3000865, NT2RP3000901, NT2RP3000968, NT2RP3001007, NT2RP3001057, NT2RP3001120, NT2RP3001126, NT2RP3001140, NT2RP3001214, NT2RP3001216, NT2RP3001236, NT2RP3001245, NT2RP3001253, NT2RP3001260, NT2RP3001268, NT2RP3001274, NT2RP3001281, NT2RP3001297, NT2RP3001355, NT2RP3001356, NT2RP3001383, NT2RP3001396, NT2RP3001407, NT2RP3001420, NT2RP3001428, NT2RP3001449, NT2RP3001453, NT2RP3001472, NT2RP3001490, NT2RP3001495, NT2RP3001497, NT2RP3001527, NT2RP3001554, NT2RP3001589, NT2RP3001642, NT2RP3001679, NT2RP3001688, NT2RP3001712, NT2RP3001752, NT2RP3001782, NT2RP3001799, NT2RP3001844, NT2RP3001926, NT2RP3001989, NT2RP3002002, NT2RP3002004, NT2RP3002033, NT2RP3002056, NT2RP3002062, NT2RP3002102, NT2RP3002142, NT2RP3002173, NT2RP3002248, NT2RP3002304, NT2RP3002343, NT2RP3002484, NT2RP3002529, NT2RP3002545, NT2RP3002549, NT2RP3002682, NT2RP3002687, NT2RP3002713, NT2RP3002876, NT2RP3002877, NT2RP3002972, NT2RP3003032, NT2RP3003133, NT2RP3003139, NT2RP3003145, NT2RP3003157, NT2RP3003193, NT2RP3003204, NT2RP3003210, NT2RP3003212, NT2RP3003251, NT2RP3003264, NT2RP3003282, NT2RP3003290, NT2RP3003301, NT2RP3003313, NT2RP3003346, NT2RP3003403, NT2RP3003500, NT2RP3003543, NT2RP3003576, NT2RP3003672, NT2RP3003828, NT2RP3003831, NT2RP3003992, NT2RP3004041, NT2RP3004093, NT2RP3004155, NT2RP3004209, NT2RP3004215, NT2RP3004246, NT2RP3004332, NT2RP3004348, NT2RP3004349, NT2RP3004470, NT2RP3004472, NT2RP3004480, NT2RP3004490, NT2RP3004503, NT2RP3004566, NT2RP3004569, NT2RP3004572, NT2RP4000035, NT2RP4000147, NT2RP4000167, NT2RP4000212, NT2RP4000214, NT2RP4000259, NT2RP4000360, NT2RP4000381, NT2RP4000398, NT2RP4000424, NT2RP4000448, NT2RP4000455, NT2RP4000517, NT2RP4000519, NT2RP4000524, NT2RP4000614, NT2RP4000728, NT2RP4000737, NT2RP4000817, NT2RP4000865, NT2RP4001079, NT2RP4001122, NT2RP4001150, NT2RP4001174, NT2RP4001274, NT2RP4001353, NT2RP4001447, NT2RP4001507, NT2RP4001547, NT2RP4001677, NT2RP4001679, NT2RP4001730, NT2RP4001803, NT2RP4001889, NT2RP4001946, NT2RP4001953, NT2RP4002018, NT2RP4002071, NT2RP4002791, NT2RP5003461,

[0567] OVARC1000058, OVARC1000091, OVARC1000092, OVARC1000113, OVARC1000114, OVARC1000145, OVARC1000168, OVARC1000198, OVARC1000321, OVARC1000335, OVARC1000384, OVARC1000408, OVARC1000414, OVARC1000442, OVARC1000443, OVARC1000486, OVARC1000520, OVARC1000526, OVARC1000556, OVARC1000557, OVARC1000573, OVARC1000578, OVARC1000588, OVARC1000622, OVARC1000679, OVARC1000682, OVARC1000700, OVARC1000703, OVARC1000746, OVARC1000769, OVARC1000800, OVARC1000846, OVARC1000862, OVARC1000885, OVARC1000924, OVARC1000936, OVARC1000959, OVARC1000960, OVARC1000971, OVARC1000984, OVARC1000996, OVARC1000999, OVARC1001000, OVARC1001004, OVARC1001032, OVARC1001034, OVARC1001040, OVARC1001044, OVARC1001092, OVARC1001117, OVARC1001118, OVARC1001154, OVARC1001161, OVARC1001170, OVARC1001173, OVARC1001200, OVARC1001240, OVARC1001268, OVARC1001271, OVARC1001329, OVARC1001341, OVARC1001344, OVARC1001376, OVARC1001381, OVARC1001436, OVARC1001476, OVARC1001489, OVARC1001525, OVARC1001542, OVARC1001547, OVARC1001668, OVARC1001745, OVARC1001767, OVARC1001802, OVARC1001812, OVARC1001820, OVARC1001873, OVARC1001883, OVARC1001949, OVARC1001987, OVARC1001989, OVARC1002044, OVARC1002082, OVARC1002107, OVARC1002138, OVARC1002165,

[0568] PLACE1000014, PLACE1000031, PLACE1000040, PLACE1000048, PLACE1000078, PLACE1000184, PLACE1000246, PLACE1000292, PLACE1000332, PLACE1000347, PLACE1000424, PLACE1000435, PLACE1000444, PLACE1000540, PLACE1000547, PLACE1000562, PLACE1000583, PLACE1000599, PLACE1000706, PLACE1000712, PLACE1000755, PLACE1000793, PLACE1000798, PLACE1000979, PLACE1001000, PLACE1001010, PLACE1001062, PLACE1001088, PLACE1001118, PLACE1001136, PLACE1001238, PLACE1001257, PLACE1001280, PLACE1001294, PLACE1001304, PLACE1001311, PLACE1001323, PLACE1001366, PLACE1001384, PLACE1001395, PLACE1001399, PLACE1001456, PLACE1001484, PLACE1001503, PLACE1001570, PLACE1001603, PLACE1001608, PLACE1001610, PLACE1001632, PLACE1001634, PLACE1001691, PLACE1001720, PLACE1001746, PLACE1001760, PLACE1001821, PLACE1001844, PLACE1001845, PLACE1001897, PLACE1001912, PLACE1001989, PLACE1002004, PLACE1002066, PLACE1002072, PLACE1002119, PLACE1002150, PLACE1002157, PLACE1002205, PLACE1002256, PLACE1002259, PLACE1002342, PLACE1002438, PLACE1002450, PLACE1002474, PLACE1002477, PLACE1002499, PLACE1002500, PLACE1002537, PLACE1002578, PLACE1002655, PLACE1002665, PLACE1002722, PLACE1002815, PLACE1002834, PLACE1002851, PLACE1002881, PLACE1002968, PLACE1002993, PLACE1003027, PLACE1003108, PLACE1003174, PLACE1003200, PLACE1003205, PLACE1003249, PLACE1003256, PLACE1003302, PLACE1003334, PLACE1003343, PLACE1003361, PLACE1003373, PLACE1003394, PLACE1003420, PLACE1003516, PLACE1003519, PLACE1003575, PLACE1003584, PLACE1003592, PLACE1003593, PLACE1003638, PLACE1003669, PLACE1003704, PLACE1003723, PLACE1003760, PLACE1003762, PLACE1003768, PLACE1003771, PLACE1003795, PLACE1003833, PLACE1003870, PLACE1003892, PLACE1003915, PLACE1003968, PLACE1004103, PLACE1004149, PLACE1004156, PLACE1004256, PLACE1004277, PLACE1004284, PLACE1004384, PLACE1004425, PLACE1004467, PLACE1004471, PLACE1004473, PLACE1004510, PLACE1004629, PLACE1004658, PLACE1004672, PLACE1004686, PLACE1004751, PLACE1004777, PLACE1004814, PLACE1004815, PLACE1004824, PLACE1004827, PLACE1004836, PLACE1004840, PLACE1004885, PLACE1004972, PLACE1004979,

[0569] PLACE1005027, PLACE1005046, PLACE1005055, PLACE1005085, PLACE1005102, PLACE1005108, PLACE1005128, PLACE1005146, PLACE1005266, PLACE1005305, PLACE1005374, PLACE1005409, PLACE1005453, PLACE1005477, PLACE1005481, PLACE1005528, PLACE1005574, PLACE1005666, PLACE1005763, PLACE1005804, PLACE1005828, PLACE1005834, PLACE1005850, PLACE1005851, PLACE1005934, PLACE1006002, PLACE1006076, PLACE1006119, PLACE1006143, PLACE1006159, PLACE1006164, PLACE1006170, PLACE1006187, PLACE1006223, PLACE1006239, PLACE1006248, PLACE1006412, PLACE1006445, PLACE1006482, PLACE1006492, PLACE1006521, PLACE1006540, PLACE1006617, PLACE1006629, PLACE1006673, PLACE1006704, PLACE1006760, PLACE1006792, PLACE1006795, PLACE1006800, PLACE1006860, PLACE1006904, PLACE1006961, PLACE1006962, PLACE1007045, PLACE1007274, PLACE1007346, PLACE1007367, PLACE1007375, PLACE1007386, PLACE1007416, PLACE1007450, PLACE1007454, PLACE1007478, PLACE1007484, PLACE1007544, PLACE1007547, PLACE1007557, PLACE1007598, PLACE1007645, PLACE1007677, PLACE1007743, PLACE1007807, PLACE1007829, PLACE1007858, PLACE1008002, PLACE1008129, PLACE1008132, PLACE1008201, PLACE1008209, PLACE1008273, PLACE1008368, PLACE1008532, PLACE1008568, PLACE1008696, PLACE1008867, PLACE1008887, PLACE1008941, PLACE1009027, PLACE1009039, PLACE1009050, PLACE1009099, PLACE1009155, PLACE1009172, PLACE1009174, PLACE1009298, PLACE1009328, PLACE1009335, PLACE1009338, PLACE1009388, PLACE1009444, PLACE1009595, PLACE1009596, PLACE1009607, PLACE1009621, PLACE1009637, PLACE1009665, PLACE1009708, PLACE1009798, PLACE1009861, PLACE1009886, PLACE1009971, PLACE1009995, PLACE1010089, PLACE1010102, PLACE1010106, PLACE1010152, PLACE1010383, PLACE1010491, PLACE1010616, PLACE1010630, PLACE1010631, PLACE1010702, PLACE1010739, PLACE1010761, PLACE1010833, PLACE1010870, PLACE1010896, PLACE1010916, PLACE1010925, PLACE1010942, PLACE1010954, PLACE1010965, PLACE1011041, PLACE1011046, PLACE1011054, PLACE1011057, PLACE1011090, PLACE1011109, PLACE1011203, PLACE1011214, PLACE1011296, PLACE1011340, PLACE1011433, PLACE1011452, PLACE1011567, PLACE1011576, PLACE1011643, PLACE1011675, PLACE1011719, PLACE1011729, PLACE1011749, PLACE1011762, PLACE1011783, PLACE1011874, PLACE1011995,

[0570] PLACE2000017, PLACE2000021, PLACE2000033, PLACE2000039, PLACE2000047, PLACE2000062, PLACE2000103, PLACE2000124, PLACE2000170, PLACE2000216, PLACE2000235, PLACE2000264, PLACE2000302, PLACE2000305, PLACE2000335, PLACE2000342, PLACE2000347, PLACE2000379, PLACE2000394, PLACE2000433, PLACE2000450, PLACE2000465, PLACE3000103, PLACE3000119, PLACE3000121, PLACE3000124, PLACE3000155, PLACE3000158, PLACE3000207, PLACE3000220, PLACE3000242, PLACE3000271, PLACE3000304, PLACE3000322, PLACE3000331, PLACE3000341, PLACE3000362, PLACE3000365, PLACE3000388, PLACE3000399, PLACE3000400, PLACE3000401, PLACE3000402, PLACE3000425, PLACE3000455, PLACE4000034, PLACE4000049, PLACE4000089, PLACE4000128, PLACE4000156, PLACE4000222, PLACE4000250, PLACE4000320, PLACE4000379, PLACE4000431, PLACE4000445, PLACE4000465, PLACE4000487, PLACE4000494, PLACE4000522, PLACE4000558, PLACE4000581, PLACE4000650, PLACE4000654,

[0571] THYRO1000034, THYRO1000085, THYRO1000092, THYRO1000111, THYRO1000156, THYRO1000163, THYRO1000173, THYRO1000190, THYRO1000197, THYRO1000221, THYRO1000241, THYRO1000327, THYRO1000381, THYRO1000387, THYRO1000394, THYRO1000488, THYRO1000585, THYRO1000625, THYRO1000637, THYRO1000658, THYRO1000666, THYRO1000676, THYRO1000684, THYRO1000712, THYRO1000734, THYRO1000793, THYRO1000796, THYRO1000805, THYRO1000815, THYRO1000865, THYRO1000916, THYRO1000934, THYRO1000974, THYRO1000975, THYRO1001031, THYRO1001062, THYRO1001093, THYRO1001133, THYRO1001173, THYRO1001177, THYRO1001189, THYRO1001204, THYRO1001213, THYRO1001262, THYRO1001290, THYRO1001320, THYRO1001322, THYRO1001401, THYRO1001406, THYRO1001426, THYRO1001480, THYRO1001487, THYRO1001537, THYRO1001595, THYRO1001617, THYRO1001637, THYRO1001706, THYRO1001772, THYRO1001828, THYRO1001854, Y79AA1000059, Y79AA1000214, Y79AA1000355, Y79AA1000410, Y79AA1000538, Y79AA1000539, Y79AA1000705, Y79AA1000800, Y79AA1000850, Y79AA1000962, Y79AA1000976, Y79AA1001061, Y79AA1001068, Y79AA1001493, Y79AA1001548, Y79AA1001585, Y79AA1001594, Y79AA1001696, Y79AA1001711, Y79AA1002103, Y79AA1002115, Y79AA1002258, Y79AA1002361, Y79AA1002407, Y79AA1002472, Y79AA1002482.

[0572] Clones of which expression levels decreased by RA are as follows:

[0573] HEMBA1000946, HEMBA1003569, HEMBA1005570, HEMBB1000915, NT2RM1000666, NT2RM2000092, NT2RM2000594, NT2RM2001256, NT2RM4001754, NT2RM4001905, NT2RP2001675, NT2RP2002047, NT2RP2005491, NT2RP3000980, NT2RP3002081, NT2RP3004594, NT2RP4001950, NT2RP4002408, OVARC1000431, OVARC1001942, OVARC1001943, PLACE1003190, PLACE1004868, PLACE1005923, PLACE1007257, PLACE1010624, Y79AA1000346.

[0574] Clones of which expression levels increase by RA/inhibitor are as follows:

[0575] HEMBA1000046, HEMBA1000307, HEMBA1000434, HEMBA1000504, HEMBA1000588, HEMBA1000682, HEMBA1000726, HEMBA1000943, HEMBA1001071, HEMBA1001094, HEMBA1001122, HEMBA1001323, HEMBA1001361, HEMBA1001455, HEMBA1001709, HEMBA1001746, HEMBA1001869, HEMBA1002084, HEMBA1002583, HEMBA1002628, HEMBA1002801, HEMBA1002937, HEMBA1003096, HEMBA1003142, HEMBA1003229, HEMBA1003276, HEMBA1003309, HEMBA1003463, HEMBA1003597, HEMBA1003617, HEMBA1003725, HEMBA1003803, HEMBA1003879, HEMBA1003989, HEMBA1004000, HEMBA1004015, HEMBA1004024, HEMBA1004049, HEMBA1004056, HEMBA1004199, HEMBA1004248, HEMBA1004356, HEMBA1004554, HEMBA1004666, HEMBA1004725, HEMBA1004770, HEMBA1004803, HEMBA1004923, HEMBA1004934, HEMBA1004954, HEMBA1005039, HEMBA1005075, HEMBA1005113, HEMBA1005219, HEMBA1005232, HEMBA1005251, HEMBA1005304, HEMBA1005367, HEMBA1005372, HEMBA1005403, HEMBA1005410, HEMBA1005411, HEMBA1005548, HEMBA1005581, HEMBA1005631, HEMBA1005666, HEMBA1005755, HEMBA1005780, HEMBA1006067, HEMBA1006130, HEMBA1006364, HEMBA1006485, HEMBA1006559, HEMBA1006579, HEMBA1006754, HEMBB1000059, HEMBB1000575, HEMBB1000709, HEMBB1000822, HEMBB1000848, HEMBB1000852, HEMBB1000913, HEMBB1000985, HEMBB1001117, HEMBB1001210, HEMBB1001317, HEMBB1001394, HEMBB1001443, HEMBB1001668, HEMBB1001695, HEMBB1002049, HEMBB1002254, HEMBB1002266, HEMBB1002371, HEMBB1002502, HEMBB1002614, HEMBB1002617, HEMBB1002692, HEMBB1002697, MAMMA1000241, MAMMA1000424, MAMMA1000616, MAMMA1000731, MAMMA1000824, MAMMA1000908, MAMMA1000956, MAMMA1001038, MAMMA1001091, MAMMA1001243, MAMMA1001815, MAMMA1001820, MAMMA1002267, MAMMA1002769, MAMMA1002871, MAMMA1002941, NT2RM1000355, NT2RM1000725, NT2RM1000829, NT2RM1000850, NT2RM1000898, NT2RM2000504, NT2RM2000635, NT2RM2000718, NT2RM2000821, NT2RM2001370, NT2RM2001582, NT2RM2001592, NT2RM2001613, NT2RM2001632, NT2RM2001635, NT2RM2001648, NT2RM2001659, NT2RM2001671, NT2RM2001695, NT2RM2001760, NT2RM2001782, NT2RM2001839, NT2RM2001879, NT2RM2001983, NT2RM4000104, NT2RM4000290, NT2RM4000425, NT2RM4000433, NT2RM4000471, NT2RM4000531, NT2RM4000852, NT2RM4001047, NT2RM4001347, NT2RM4001454, NT2RM4001557, NT2RM4001566, NT2RM4001582, NT2RM4001938, NT2RM4001953, NT2RM4002018, NT2RM4002409, NT2RM4002558, NT2RM4002594, NT2RP1000259, NT2RP1000418, NT2RP1000574, NT2RP1000629, NT2RP1000782, NT2RP1000856, NT2RP1000943, NT2RP1000988, NT2RP1001013, NT2RP1001173, NT2RP1001546, NT2RP2000091, NT2RP2000208, NT2RP2000274, NT2RP2000329, NT2RP2000369, NT2RP2000634, NT2RP2000842, NT2RP2000943, NT2RP2000987, NT2RP2001094, NT2RP2001277, NT2RP2001290, NT2RP2001366, NT2RP2001423, NT2RP2001436, NT2RP2001467, NT2RP2001506, NT2RP2001601, NT2RP2001663, NT2RP2001926, NT2RP2001985, NT2RP2002032, NT2RP2002041, NT2RP2002046, NT2RP2002078, NT2RP2002124, NT2RP2002185, NT2RP2002193, NT2RP2002312, NT2RP2002316, NT2RP2002426, NT2RP2002457, NT2RP2002475, NT2RP2002520, NT2RP2002595, NT2RP2002643, NT2RP2002672, NT2RP2002701, NT2RP2002710, NT2RP2002727, NT2RP2003099, NT2RP2003121, NT2RP2003137, NT2RP2003158, NT2RP2003206, NT2RP2003230, NT2RP2003272, NT2RP2003280, NT2RP2003347, NT2RP2003393, NT2RP2003401, NT2RP2003445, NT2RP2003456, NT2RP2003511, NT2RP2003517, NT2RP2003543, NT2RP2003596, NT2RP2003706, NT2RP2003871, NT2RP2004681, NT2RP2004743, NT2RP2004775, NT2RP2004933, NT2RP2004967, NT2RP2005003, NT2RP2005270, NT2RP2005289, NT2RP2005344, NT2RP2005453, NT2RP2005555, NT2RP2005767, NT2RP2005853, NT2RP2006043, NT2RP2006393, NT2RP2006436, NT2RP2006441, NT2RP2006467, NT2RP2006534, NT2RP2006565, NT2RP3000348, NT2RP3000359, NT2RP3000366, NT2RP3000403, NT2RP3000418, NT2RP3000441, NT2RP3000561, NT2RP3000759, NT2RP3000826, NT2RP3001007, NT2RP3001096, NT2RP3001126, NT2RP3001355, NT2RP3001396, NT2RP3001449, NT2RP3001490, NT2RP3001679, NT2RP3001727, NT2RP3001752, NT2RP3001777, NT2RP3001782, NT2RP3001799, NT2RP3001854, NT2RP3001989, NT2RP3002142, NT2RP3002248, NT2RP3002343, NT2RP3002484, NT2RP3002529, NT2RP3002549, NT2RP3002628, NT2RP3002687, NT2RP3002688, NT2RP3002810, NT2RP3003032, NT2RP3003139, NT2RP3003193, NT2RP3003203, NT2RP3003204, NT2RP3003210, NT2RP3003212, NT2RP3003264, NT2RP3003282, NT2RP3003500, NT2RP3004041, NT2RP3004215, NT2RP4000147, NT2RP4000259, NT2RP4000360, NT2RP4000448, NT2RP4000524, NT2RP4000588, NT2RP4000879, NT2RP4000907, NT2RP4000989, NT2RP4001079, NT2RP4001150, NT2RP4001219, NT2RP4001260, NT2RP4001274, NT2RP4001353, NT2RP4001547, NT2RP4001677, NT2RP4002052, OVARC1000006, OVARC1000092, OVARC1000321, OVARC1000384, OVARC1000408, OVARC1000414, OVARC1000520, OVARC1000526, OVARC1000588, OVARC1000679, OVARC1000682, OVARC1000769, OVARC1000850, OVARC1000862, OVARC1000886, OVARC1000984, OVARC1001000, OVARC1001004, OVARC1001154, OVARC1001170, OVARC1001173, OVARC1001200, OVARC1001268, OVARC1001376, OVARC1001419, OVARC1001425, OVARC1001476, OVARC1001480, OVARC1001542, OVARC1001873, OVARC1001928, OVARC1001987, OVARC1002066, OVARC1002082, OVARC1002112, OVARC1002127,

[0576] PLACE1000014, PLACE1000048, PLACE1000184, PLACE1000185, PLACE1000246, PLACE1000292, PLACE1000332, PLACE1000347, PLACE1000564, PLACE1000656, PLACE1000712, PLACE1001000, PLACE1001168, PLACE1001185, PLACE1001241, PLACE1001294, PLACE1001311, PLACE1001395, PLACE1001570, PLACE1001608, PLACE1001610, PLACE1001716, PLACE1001746, PLACE1001817, PLACE1001821, PLACE1001844, PLACE1001897, PLACE1002066, PLACE1002119, PLACE1002157, PLACE1002205, PLACE1002256, PLACE1002259, PLACE1002399, PLACE1002438, PLACE1002474, PLACE1002477, PLACE1002500, PLACE1002514, PLACE1002578, PLACE1002815, PLACE1002851, PLACE1002968, PLACE1003108, PLACE1003174, PLACE1003200, PLACE1003238, PLACE1003256, PLACE1003334, PLACE1003342, PLACE1003516, PLACE1003521, PLACE1003537, PLACE1003592, PLACE1003596, PLACE1003723, PLACE1003760, PLACE1003771, PLACE1003783, PLACE1003795, PLACE1003892, PLACE1003968, PLACE1004103, PLACE1004256, PLACE1004405, PLACE1004460, PLACE1004506, PLACE1004629, PLACE1004674, PLACE1004813, PLACE1004979, PLACE1005066, PLACE1005101, PLACE1005102, PLACE1005128, PLACE1005181, PLACE1005287, PLACE1005305, PLACE1005327, PLACE1005477, PLACE1005595, PLACE1005603, PLACE1005666, PLACE1005804, PLACE1005884, PLACE1005934, PLACE1006076, PLACE1006119, PLACE1006159, PLACE1006164, PLACE1006170, PLACE1006382, PLACE1006492, PLACE1006629, PLACE1006704, PLACE1006731, PLACE1006760, PLACE1006779, PLACE1006795, PLACE1006805, PLACE1006962, PLACE1007045, PLACE1007111, PLACE1007282, PLACE1007386, PLACE1007416, PLACE1007484, PLACE1007544, PLACE1007645, PLACE1007743, PLACE1007746, PLACE1007807, PLACE1007858, PLACE1008002, PLACE1008181, PLACE1008273, PLACE1008368, PLACE1008405, PLACE1008532, PLACE1008568, PLACE1008625, PLACE1008696, PLACE1008867, PLACE1009027, PLACE1009039, PLACE1009045, PLACE1009110, PLACE1009298, PLACE1009328, PLACE1009581, PLACE1009621, PLACE1009622, PLACE1009637, PLACE1009925, PLACE1009935, PLACE1010089, PLACE1010106, PLACE1010152, PLACE1010274, PLACE1010491, PLACE1010629, PLACE1010630, PLACE1010714, PLACE1010739, PLACE1010891, PLACE1010896, PLACE1010925, PLACE1010965, PLACE1011026, PLACE1011046, PLACE1011214, PLACE1011399, PLACE1011433, PLACE1011492, PLACE1011641, PLACE1011649, PLACE1011719, PLACE1011762, PLACE1011858, PLACE1011923, PLACE2000014, PLACE2000039, PLACE2000216, PLACE2000302, PLACE2000317, PLACE2000342, PLACE2000347, PLACE2000379, PLACE3000121, PLACE3000124, PLACE3000160, PLACE3000242, PLACE3000271, PLACE3000353, PLACE3000362, PLACE3000365, PLACE3000400, PLACE3000401, PLACE4000034, PLACE4000089, PLACE4000522, PLACE4000558,

[0577] SKNMC1000050, THYRO1000040, THYRO1000197, THYRO1000241, THYRO1000327, THYRO1000394, THYRO1000488, THYRO1000501, THYRO1000585, THYRO1000596, THYRO1000625, THYRO1000805, THYRO1000934, THYRO1001133, THYRO1001134, THYRO1001173, THYRO1001213, THYRO1001262, THYRO1001290, THYRO1001721, Y79AA1000037, Y79AA1000800, Y79AA1000976, Y79AA1001078, Y79AA1001228, Y79AA1001299, Y79AA1001402, Y79AA1001585, Y79AA1001696, Y79AA1001711, Y79AA1001827, Y79AA1001875, Y79AA1002027, Y79AA1002211, Y79AA1002234, Y79AA1002258.

[0578] Clones of which expression levels decrease by RA/inhibitor are as follows:

[0579] HEMBA1000012, HEMBA1000501, HEMBA1000946, HEMBA1003220, HEMBA1003403, HEMBA1003569, HEMBA1003591, HEMBA1003926, HEMBA1004168, HEMBA1004507, HEMBA1005009, HEMBA1005296, HEMBA1005528, HEMBA1005570, HEMBA1006467, HEMBA1006486, HEMBA1006492, HEMBA1007322, HEMBB1000055, HEMBB1000244, HEMBB1001665, MAMMA1000684, MAMMA1001139, MAMMA1001743, NT2RM1000257, NT2RM1000318, NT2RM1000539, NT2RM1000666, NT2RM2000092, NT2RM2000192, NT2RM2000371, NT2RM2000594, NT2RM4000511, NT2RM4001140, NT2RM4001754, NT2RM4001905, NT2RM4001940, NT2RM4002593, NT2RP1000086, NT2RP1000439, NT2RP1001073, NT2RP2000098, NT2RP2000965, NT2RP2001397, NT2RP2002047, NT2RP2004226, NT2RP2004396, NT2RP2004655, NT2RP2005126, NT2RP2005464, NT2RP2005712, NT2RP2005859, NT2RP2005890, NT2RP3000980, NT2RP3001383, NT2RP3001621, NT2RP3002081, NT2RP3002181, NT2RP3002244, NT2RP3002590, NT2RP3003059, NT2RP3004258, NT2RP3004378, NT2RP3004527, NT2RP3004594, NT2RP4001760, NT2RP4001950, NT2RP4002047, NT2RP4002408, NT2RP5003459, OVARC1000004, OVARC1000035, OVARC1000431, OVARC1001051, OVARC1001129, OVARC1001176, OVARC1001261, OVARC1001342, OVARC1001942, OVARC1001943, PLACE1002171, PLACE1002465, PLACE1003190, PLACE1003375, PLACE1004128, PLACE1005026, PLACE1005876, PLACE1005923, PLACE1007257, PLACE1007375, PLACE1007507, PLACE1008941, PLACE1010624, PLACE1011090, PLACE1011219, THYRO1000270, Y79AA1000346, Y79AA1001541.

[0580] Clones of which expression levels increase in the presence of both RA and RA/inhibitor are as follows:

[0581] HEMBA1000046, HEMBA1000307, HEMBA1000504, HEMBA1000588, HEMBA1000682, HEMBA1000726, HEMBA1000943, HEMBA1001071, HEMBA1001094, HEMBA1001122, HEMBA1001323, HEMBA1001361, HEMBA1001455, HEMBA1001869, HEMBA1002084, HEMBA1002583, HEMBA1002628, HEMBA1003096, HEMBA1003142, HEMBA1003276, HEMBA1003309, HEMBA1003463, HEMBA1003597, HEMBA1003617, HEMBA1003725, HEMBA1003803, HEMBA1003879, HEMBA1003989, HEMBA1004000, HEMBA1004015, HEMBA1004024, HEMBA1004049, HEMBA1004056, HEMBA1004199, HEMBA1004248, HEMBA1004356, HEMBA1004666, HEMBA1004770, HEMBA1004803, HEMBA1004923, HEMBA1004934, HEMBA1004954, HEMBA1005039, HEMBA1005075, HEMBA1005113, HEMBA1005219, HEMBA1005232, HEMBA1005251, HEMBA1005304, HEMBA1005367, HEMBA1005410, HEMBA1005411, HEMBA1005548, HEMBA1005581, HEMBA1005631, HEMBA1005666, HEMBA1005780, HEMBA1006485, HEMBA1006559, HEMBA1006579, HEMBA1006754, HEMBB1000059, HEMBB1000575, HEMBB1000709, HEMBB1000848, HEMBB1000985, HEMBB1001117, HEMBB1001210, HEMBB1001394, HEMBB1001668, HEMBB1001695, HEMBB1002049, HEMBB1002254, HEMBB1002266, HEMBB1002371, HEMBB1002614, HEMBB1002617, HEMBB1002697, MAMMA1000241, MAMMA1000424, MAMMA1000616, MAMMA1000731, MAMMA1000824, MAMMA1001038, MAMMA1001243, MAMMA1002769, MAMMA1002871, MAMMA1002941,

[0582] NT2RM1000725, NT2RM1000829, NT2RM2000504, NT2RM2000635, NT2RM2000821, NT2RM2001582, NT2RM2001592, NT2RM2001632, NT2RM2001648, NT2RM2001671, NT2RM2001695, NT2RM2001879, NT2RM4000290, NT2RM4000425, NT2RM4000471, NT2RM4000531, NT2RM4000852, NT2RM4001047, NT2RM4001454, NT2RM4001557, NT2RM4001566, NT2RM4001582, NT2RM4001953, NT2RM4002409, NT2RM4002558, NT2RM4002594, NT2RP1000259, NT2RP1000418, NT2RP1000574, NT2RP1000782, NT2RP1000856, NT2RP1000943, NT2RP1000988, NT2RP1001013, NT2RP1001173, NT2RP1001546, NT2RP2000091, NT2RP2000208, NT2RP2000274, NT2RP2000329, NT2RP2000369, NT2RP2000634, NT2RP2000987, NT2RP2001277, NT2RP2001290, NT2RP2001366, NT2RP2001423, NT2RP2001436, NT2RP2001467, NT2RP2001506, NT2RP2001601, NT2RP2001926, NT2RP2001985, NT2RP2002041, NT2RP2002046, NT2RP2002078, NT2RP2002124, NT2RP2002193, NT2RP2002312, NT2RP2002316, NT2RP2002426, NT2RP2002457, NT2RP2002475, NT2RP2002520, NT2RP2002595, NT2RP2002672, NT2RP2002701, NT2RP2003099, NT2RP2003137, NT2RP2003206, NT2RP2003230, NT2RP2003272, NT2RP2003280, NT2RP2003393, NT2RP2003445, NT2RP2003456, NT2RP2003596, NT2RP2003871, NT2RP2004681, NT2RP2004743, NT2RP2004775, NT2RP2004933, NT2RP2004967, NT2RP2005003, NT2RP2005289, NT2RP2005453, NT2RP2005555, NT2RP2005767, NT2RP2005853, NT2RP2006043, NT2RP2006393, NT2RP2006436, NT2RP2006441, NT2RP2006467, NT2RP2006565, NT2RP3000359, NT2RP3000366, NT2RP3000403, NT2RP3000418, NT2RP3000441, NT2RP3000561, NT2RP3000759, NT2RP3001007, NT2RP3001126, NT2RP3001355, NT2RP3001396, NT2RP3001449, NT2RP3001490, NT2RP3001679, NT2RP3001752, NT2RP3001782, NT2RP3001799, NT2RP3001989, NT2RP3002142, NT2RP3002248, NT2RP3002343, NT2RP3002484, NT2RP3002529, NT2RP3002549, NT2RP3002687, NT2RP3003032, NT2RP3003139, NT2RP3003193, NT2RP3003204, NT2RP3003210, NT2RP3003212, NT2RP3003264, NT2RP3003282, NT2RP3003500, NT2RP3004041, NT2RP3004215, NT2RP4000147, NT2RP4000259, NT2RP4000360, NT2RP4000448, NT2RP4000524, NT2RP4001079, NT2RP4001150, NT2RP4001274, NT2RP4001353, NT2RP4001547, NT2RP4001677, OVARC1000092, OVARC1000321, OVARC1000384, OVARC1000408, OVARC1000414, OVARC1000520, OVARC1000526, OVARC1000588, OVARC1000679, OVARC1000682, OVARC1000769, OVARC1000862, OVARC1000984, OVARC1001000, OVARC1001004, OVARC1001154, OVARC1001170, OVARC1001173, OVARC1001200, OVARC1001268, OVARC1001376, OVARC1001476, OVARC1001542, OVARC1001873, OVARC1001987, OVARC1002082,

[0583] PLACE1000014, PLACE1000048, PLACE1000184, PLACE1000246, PLACE1000292, PLACE1000332, PLACE1000347, PLACE1000712, PLACE1001000, PLACE1001294, PLACE1001311, PLACE1001395, PLACE1001570, PLACE1001608, PLACE1001610, PLACE1001746, PLACE1001821, PLACE1001844, PLACE1001897, PLACE1002066, PLACE1002119, PLACE1002157, PLACE1002205, PLACE1002256, PLACE1002259, PLACE1002438, PLACE1002474, PLACE1002477, PLACE1002500, PLACE1002578, PLACE1002815, PLACE1002851, PLACE1002968, PLACE1003108, PLACE1003174, PLACE1003200, PLACE1003256, PLACE1003334, PLACE1003516, PLACE1003592, PLACE1003723, PLACE1003760, PLACE1003771, PLACE1003795, PLACE1003892, PLACE1003968, PLACE1004103, PLACE1004256, PLACE1004629, PLACE1004979, PLACE1005102, PLACE1005128, PLACE1005305, PLACE1005477, PLACE1005666, PLACE1005804, PLACE1005934, PLACE1006076, PLACE1006119, PLACE1006159, PLACE1006164, PLACE1006170, PLACE1006492, PLACE1006629, PLACE1006704, PLACE1006760, PLACE1006795, PLACE1006962, PLACE1007045, PLACE1007386, PLACE1007416, PLACE1007484, PLACE1007544, PLACE1007645, PLACE1007743, PLACE1007807, PLACE1007858, PLACE1008002, PLACE1008273, PLACE1008368, PLACE1008532, PLACE1008568, PLACE1008696, PLACE1008867, PLACE1009027, PLACE1009039, PLACE1009298, PLACE1009328, PLACE1009621, PLACE1009637, PLACE1010089, PLACE1010106, PLACE1010152, PLACE1010491, PLACE1010630, PLACE1010739, PLACE1010896, PLACE1010925, PLACE1010965, PLACE1011046, PLACE1011214, PLACE1011433, PLACE1011719, PLACE1011762, PLACE2000039, PLACE2000216, PLACE2000302, PLACE2000342, PLACE2000347, PLACE2000379, PLACE3000121, PLACE3000124, PLACE3000242, PLACE3000271, PLACE3000362, PLACE3000365, PLACE3000400, PLACE3000401, PLACE4000034, PLACE4000089, PLACE4000522, PLACE4000558, THYRO1000197, THYRO1000241, THYRO1000327, THYRO1000394, THYRO1000488, THYRO1000585, THYRO1000625, THYRO1000805, THYRO1000934, THYRO1001133, THYRO1001173, THYRO1001213, THYRO1001262, THYRO1001290, Y79AA1000800, Y79AA1000976, Y79AA1001585, Y79AA1001696, Y79AA1001711, Y79AA1002258.

[0584] Clones of which expression levels decrease in the presence of both RA and RA/inhibitor are as follows: HEMBA1000946, HEMBA1003569, HEMBA1005570, NT2RM1000666, NT2RM2000092, NT2RM2000594, NT2RM4001754, NT2RM4001905, NT2RP2002047, NT2RP3000980, NT2RP3002081, NT2RP3004594, NT2RP4001950, NT2RP4002408, OVARC1000431, OVARC1001942, OVARC1001943, PLACE1003190, PLACE1005923, PLACE1007257, PLACE1010624, Y79AA11000346.

[0585] These are neurological disease-associated clones.

[0586] Analysis of Rheumatoid Arthritis-Associated Genes

[0587] The onset of rheumatoid arthritis is thought to be involved in the proliferation of synovial cells covering inner surfaces of joint cavity and in inflammatory reaction resulted from the action of cytokines produced by leukocytes infiltrating into the joint synovial tissues (Rheumatism Information Center, http://www.rheuma-net.or.jp/). Recent studies have also revealed that tissue necrosis factor (TNF)-α participates in the onset (Current opinion in immunology 1999, 11, 657-662). When the expression of a gene exhibits responsiveness to the action of TNF on synovial cells, the gene is considered to be involved in rheumatoid arthritis.

[0588] A survey was performed for genes of which expression levels are varied in response to TNF-α in the primary cell culture of synovial tissue. The primary cultured cells of the smooth muscle (Cell Applications) were grown to be confluent in a culture dish, and then, human TNF-α (Boehringer-Mannheim) was added at a final concentration of 10 ng/ml thereto. The culture was further continued for 24 hours.

[0589] Total RNA was extracted from the cells by using S.N.A.P.™ Total RNA Isolation kit (Invitrogen). The labeling of probe used for hybridization was carried out by using 10 μg of the total RNA according to the same methods as described above. The data were obtained in triplicate (n=3). The data of signal value representing gene expression level in the cells in the presence of TNF stimulation were compared with those in the absence of the stimulation. The comparison was performed by statistical treatment of two-sample t-test. Clones with significant difference in the signal distribution were selected under the condition of p<0.05. In this analysis, clones with the difference can be statistically detected even when the signals were low. Accordingly, clones with signal value of 40 or less were also assessed for the selection.

[0590] Table 352 shows the expression level of each cDNA in synovial cells cultured in the absence or presence of TNF.

[0591] Averaged signal values (M₁, M₂) and sample variances (s₁², s₂²) for each gene were calculated in each of the cells, and then, the pooled sample variances s² were obtained from the sample variances of the two types of cells to be compared. The t-values were determined according to the following formula: t=(M₁−M₂)//(⅓+⅓)^{1/2}. When the determined t-value was greater than a t-value at P, which means the probability of significance level, of 0.05 or 0.01 in the t-distribution table with 4 degrees of freedom, the difference was judged to be found in the expression level of the gene between the two types of cells at p<0.05 or p<0.01, respectively. The tables also include the information of an increase (+) or decrease (−) in the expression level of a gene in the stimulated cells when the level is compared with that of unstimulated cells.

[0592] Clones of which expression levels are elevated by TNF-α are as follows:

[0593] HEMBA1000005, HEMBA1000012, HEMBA1000020, HEMBA1000046, HEMBA1000076, HEMBA1000111, HEMBA1000168, HEMBA1000185, HEMBA1000201, HEMBA1000231, HEMBA1000243, HEMBA1000280, HEMBA1000282, HEMBA1000304, HEMBA1000307, HEMBA1000327, HEMBA1000356, HEMBA1000376, HEMBA1000387, HEMBA1000390, HEMBA1000418, HEMBA1000460, HEMBA1000491, HEMBA1000501, HEMBA1000518, HEMBA1000519, HEMBA1000520, HEMBA1000531, HEMBA1000534, HEMBA1000542, HEMBA1000545, HEMBA1000591, HEMBA1000592, HEMBA1000594, HEMBA1000636, HEMBA1000655, HEMBA1000657, HEMBA1000673, HEMBA1000682, HEMBA1000686, HEMBA1000722, HEMBA1000726, HEMBA1000827, HEMBA1000870, HEMBA1000918, HEMBA1000971, HEMBA1000974, HEMBA1000986, HEMBA1001019, HEMBA1001043, HEMBA1001051, HEMBA1001059, HEMBA1001060, HEMBA1001071, HEMBA1001080, HEMBA1001109, HEMBA1001140, HEMBA1001172, HEMBA1001196, HEMBA1001213, HEMBA1001226, HEMBA1001281, HEMBA1001299, HEMBA1001302, HEMBA1001303, HEMBA1001323, HEMBA1001326, HEMBA1001327, HEMBA1001330, HEMBA1001351, HEMBA1001407, HEMBA1001411, HEMBA1001446, HEMBA1001454, HEMBA1001569, HEMBA1001647, HEMBA1001714, HEMBA1001800, HEMBA1001804, HEMBA1001809, HEMBA1001888, HEMBA1001912, HEMBA1001921, HEMBA1001967, HEMBA1002084, HEMBA1002161, HEMBA1002166, HEMBA1002241, HEMBA1002337, HEMBA1002363, HEMBA1002389, HEMBA1002458, HEMBA1002460, HEMBA1002469, HEMBA1002538, HEMBA1002542, HEMBA1002547, HEMBA1002609, HEMBA1002624, HEMBA1002659, HEMBA1002750, HEMBA1002770, HEMBA1002779, HEMBA1002810, HEMBA1002816, HEMBA1002818, HEMBA1002850, HEMBA1002863, HEMBA1003021, HEMBA1003033, HEMBA1003078, HEMBA1003166, HEMBA1003202, HEMBA1003204, HEMBA1003229, HEMBA1003235, HEMBA1003276, HEMBA1003286, HEMBA1003296, HEMBA1003370, HEMBA1003376, HEMBA1003403, HEMBA1003418, HEMBA1003433, HEMBA1003447, HEMBA1003560, HEMBA1003569, HEMBA1003571, HEMBA1003591, HEMBA1003597, HEMBA1003598, HEMBA1003621, HEMBA1003656, HEMBA1003662, HEMBA1003680, HEMBA1003715, HEMBA1003725, HEMBA1003729, HEMBA1003733, HEMBA1003742, HEMBA1003773, HEMBA1003783, HEMBA1003950, HEMBA1004012, HEMBA1004015, HEMBA1004048, HEMBA1004074, HEMBA1004086, HEMBA1004111, HEMBA1004131, HEMBA1004202, HEMBA1004203, HEMBA1004207, HEMBA1004248, HEMBA1004274, HEMBA1004321, HEMBA1004330, HEMBA1004356, HEMBA1004366, HEMBA1004405, HEMBA1004408, HEMBA1004429, HEMBA1004499, HEMBA1004507, HEMBA1004509, HEMBA1004542, HEMBA1004596, HEMBA1004604, HEMBA1004776, HEMBA1004889, HEMBA1004934, HEMBA1004978, HEMBA1005019, HEMBA1005047, HEMBA1005206, HEMBA1005219, HEMBA1005274, HEMBA1005331, HEMBA1005338, HEMBA1005394, HEMBA1005423, HEMBA1005576, HEMBA1005732, HEMBA1005746, HEMBA1006091, HEMBA1006142, HEMBA1006173, HEMBA1006198, HEMBA1006253, HEMBA1006268, HEMBA1006309, HEMBA1006377, HEMBA1006474, HEMBA1006486, HEMBA1006492, HEMBA1006502, HEMBA1006535, HEMBA1006579, HEMBA1006648, HEMBA1006659, HEMBA1006885, HEMBA1006929, HEMBA1006941, HEMBA1007078, HEMBA1007080, HEMBA1007121, HEMBA1007194, HEMBA1007300, HEMBA1007301, HEMBA1007322, HEMBB1000036, HEMBB1000044, HEMBB1000089, HEMBB1000215, HEMBB1000217, HEMBB1000272, HEMBB1000420, HEMBB1000591, HEMBB1000593, HEMBB1000631, HEMBB1000835, HEMBB1000887, HEMBB1000908, HEMBB1000975, HEMBB1000985, HEMBB1001011, HEMBB1001014, HEMBB1001112, HEMBB1001133, HEMBB1001331, HEMBB1001337, HEMBB1001366, HEMBB1001367, HEMBB1001384, HEMBB1001394, HEMBB1001429, HEMBB1001463, HEMBB1001619, HEMBB1001684, HEMBB1001706, HEMBB1001753, HEMBB1001797, HEMBB1001802, HEMBB1001812, HEMBB1001874, HEMBB1001910, HEMBB1001915, HEMBB1001973, HEMBB1001983, HEMBB1001990, HEMBB1002190, HEMBB1002193, HEMBB1002249, HEMBB1002329, HEMBB1002342, HEMBB1002371, HEMBB1002409, HEMBB1002442, HEMBB1002489, HEMBB1002492, HEMBB1002520, HEMBB1002534, HEMBB1002596, HEMBB1002664, HEMBB1002692, HEMBB1002697, HEMBB1002705, MAMMA1000092, MAMMA1000155, MAMMA1000163, MAMMA1000173, MAMMA1000175, MAMMA1000227, MAMMA1000241, MAMMA1000257, MAMMA1000264, MAMMA1000266, MAMMA1000270, MAMMA1000307, MAMMA1000410, MAMMA1000413, MAMMA1000416, MAMMA1000421, MAMMA1000472, MAMMA1000501, MAMMA1000605, MAMMA1000643, MAMMA1000670, MAMMA1000684, MAMMA1000696, MAMMA1000732, MAMMA1000752, MAMMA1000802, MAMMA1000824, MAMMA1000905, MAMMA1000921, MAMMA1000931, MAMMA1000957, MAMMA1000962, MAMMA1000998, MAMMA1001008, MAMMA1001050, MAMMA1001074, MAMMA1001078, MAMMA1001292, MAMMA1001397, MAMMA1001476, MAMMA1001743, MAMMA1001744, MAMMA1001754, MAMMA1001760, MAMMA1001785, MAMMA1001858, MAMMA1001908, MAMMA1002236, MAMMA1002267, MAMMA1002292, MAMMA1002311, MAMMA1002322, MAMMA1002359, MAMMA1002362, MAMMA1002485, MAMMA1002494, MAMMA1002597, MAMMA1002598, MAMMA1002665, MAMMA1002671, MAMMA1002684, MAMMA1002748, MAMMA1002775, MAMMA1002830, MAMMA1002858, MAMMA1002868, MAMMA1002886, MAMMA1002887, MAMMA1002892, MAMMA1002909, MAMMA1002937, MAMMA1002947, MAMMA1002964, MAMMA1002970, MAMMA1003013, MAMMA1003150, NT2RM1000039, NT2RM1000062, NT2RM1000080, NT2RM1000086, NT2RM1000127, NT2RM1000132, NT2RM1000187, NT2RM1000199, NT2RM1000244, NT2RM1000256, NT2RM1000272, NT2RM1000318, NT2RM1000354, NT2RM1000377, NT2RM1000430, NT2RM1000499, NT2RM1000539, NT2RM1000553, NT2RM1000563, NT2RM1000699, NT2RM1000742, NT2RM1000826, NT2RM1000829, NT2RM1000833, NT2RM1000882, NT2RM1000898, NT2RM1000905, NT2RM1001092, NT2RM2000013, NT2RM2000032, NT2RM2000042, NT2RM2000101, NT2RM2000124, NT2RM2000192, NT2RM2000259, NT2RM2000260, NT2RM2000363, NT2RM2000368, NT2RM2000402, NT2RM2000452, NT2RM2000952, NT2RM2001221, NT2RM2002014, NT2RM2002030, NT2RM4000156, NT2RM4000349, NT2RM4000395, NT2RM4000457, NT2RM4000511, NT2RM4000514, NT2RM4000698, NT2RM4000764, NT2RM4001016, NT2RM4001084, NT2RM4001594, NT2RM4001629, NT2RM4001662, NT2RM4001841, NT2RM4002093, NT2RM4002109, NT2RM4002145, NT2RM4002189, NT2RM4002194, NT2RM4002226, NT2RP1000170, NT2RP1000439, NT2RP1000478, NT2RP1000513, NT2RP1000701, NT2RP1000856, NT2RP1001361, NT2RP2000097, NT2RP2000239, NT2RP2000288, NT2RP2000328, NT2RP2000329, NT2RP2000369, NT2RP2000422, NT2RP2000842, NT2RP2000965, NT2RP2001245, NT2RP2001440, NT2RP2001560, NT2RP2001634, NT2RP2001663, NT2RP2001677, NT2RP2001762, NT2RP2002270, NT2RP2002312, NT2RP2002316, NT2RP2002333, NT2RP2002706, NT2RP2002925, NT2RP2002959, NT2RP2002987, NT2RP2003125, NT2RP2003137, NT2RP2003237, NT2RP2003272, NT2RP2003596, NT2RP2003604, NT2RP2003643, NT2RP2003968, NT2RP2003976, NT2RP2004194, NT2RP2004321, NT2RP2005037, NT2RP2005140, NT2RP2005204, NT2RP2005293, NT2RP2005457, NT2RP2005555, NT2RP2005600, NT2RP2005701, NT2RP2005719, NT2RP2005722, NT2RP2005773, NT2RP2005890, NT2RP2006023, NT2RP2006071, NT2RP3000186, NT2RP3000341, NT2RP3000599, NT2RP3000632, NT2RP3000644, NT2RP3000852, NT2RP3000968, NT2RP3001096, NT2RP3001109, NT2RP3001126, NT2,RP3001147, NT2RP3001449, NT2RP3001529, NT2RP3001753, NT2RP3001854, NT2RP3001915, NT2RP3001969, NT2RP3002081, NT2RP3002142, NT2RP3002399, NT2RP3002590, NT2RP3002603, NT2RP3002810, NT2RP3002876, NT2RP3003311, NT2RP3003330, NT2RP3003672, NT2RP3004209, NT2RP3004378, NT2RP4000078, NT2RP4000541, NT2RP4000588, NT2RP4001219, NT2RP4001228, NT2RP4001276, NT2RP4001507, NT2RP4002047, NT2RP5003459, NT2RP5003492, OVARC1000085, OVARC1000087, OVARC1000106, OVARC1000151, OVARC1000198, OVARC1000431, OVARC1000440, OVARC1000564, OVARC1000605, OVARC1000679, OVARC1000883, OVARC1000912, OVARC1000960, OVARC1000971, OVARC1001038, OVARC1001055, OVARC1001085, OVARC1001129, OVARC1001167, OVARC1001339, OVARC1001425, OVARC1001745, OVARC1001762, OVARC1001766, OVARC1001942, OVARC1002044, OVARC1002138, PLACE1000004, PLACE1000005, PLACE1000420, PLACE1000547, PLACE1000562, PLACE1000653, PLACE1001168, PLACE1001311, PLACE1001377, PLACE1001920, PLACE1001983, PLACE1002066, PLACE1002072, PLACE1002140, PLACE10021,71, PLACE1002319, PLACE1002474, PLACE1002499, PLACE1002532, PLACE1002665, PLACE1003025, PLACE1003145, PLACE1003361, PLACE1003605, PLACE1003704, PLACE1003783, PLACE1003885, PLACE1004405, PLACE1004629, PLACE1004686, PLACE1004930, PLACE1005066, PLACE1005077, PLACE1005630, PLACE1005876, PLACE1006143, PLACE1006325, PLACE1006488, PLACE1006805, PLACE1006829, PLACE1007286, PLACE1007858, PLACE1008201, PLACE1009045, PLACE1009113, PLACE1009621, PLACE1010106, PLACE1010310, PLACE1010622, PLACE1010944, PLACE1010965, PLACE1011185, PLACE1011332, PLACE1011635, PLACE1011646, PLACE1011725, PLACE2000014, PLACE2000264, PLACE2000394, PLACE2000419, PLACE3000160, PLACE3000220, PLACE3000254, PLACE3000271, PLACE3000339, PLACE3000341, PLACE3000350, PLACE3000353, PLACE3000401, PLACE4000300, SKNMC1000091, THYRO1000855, THYRO1001559, Y79AA1000065, Y79AA1000202, Y79AA1000214, Y79AA1000346, Y79AA1000784, Y79AA1000833, Y79AA1000968, Y79AA1001555, Y79AA1002220.

[0594] Clones of which expression levels decrease by TNF-a are as follows:

[0595] HEMBA1002150, HEMBB1000240, NT2RM2000469, NT2RM2000984, NT2RM2001688, NT2RM4000290, NT2RM4000496, NT2RM4000590, NT2RM4001047, NT2RM4001582, NT2RM4001611, NT2RM4001650, NT2RM4002075, NT2RM4002128, NT2RP1000174, NT2RP1000243, NT2RP1000581, NT2RP1000688, NT2RP1000767, NT2RP1000825, NT2RP1001185, NT2RP1001286, NT2RP1001432, NT2RP1001457, NT2RP2000001, NT2RP2000248, NT2RP2000841, NT2RP2001813, NT2RP2002137, NT2RP2002928, NT2RP2003517, NT2RP2003559, NT2RP2003564, NT2RP2004933, NT2RP2005038, NT2RP2006365, NT2RP3000072, NT2RP3000320, NT2RP3000484, NT2RP3000980, NT2RP3001111, NT2RP3001420, NT2RP3001495, NT2RP3002056, NT2RP3002057, NT2RP3002545, NT2RP3002713, NT2RP3002799, NT2RP3002869, NT2RP3002953, NT2RP3002955, NT2RP3003282, NT2RP3003290, NT2RP3003384, NT2RP3003385, NT2RP3003870, NT2RP3004207, NT2RP3004262, NT2RP3004527, NT2RP4000500, NT2RP4000524, NT2RP4000787, NT2RP4000927, NT2RP4000955, NT2RP4000989, NT2RP4001442, NT2RP4001638, NT2RP4001950, NT2RP4002888, NT2RP5003524, OVARC1001270, PLACE1000246, PLACE1002816.

[0596] These are rheumatoid arthritis-associated clones.

[0597] Analysis of Ultraviolet Radiation Damage-Associated Genes

[0598] It is known that ultraviolet rays give considerably adverse influence on the health. In recent years, there have been significant risks of tissue damage by ultraviolet rays because of destruction of the ozone layer. Thus, ultraviolet radiation has been recognized as a risk factor for skin diseases such as skin cancers (United States Environmental Protection Agency: Ozone Depletion Home Page, http://www.epa.gov/ozone/). Genes of which expression levels are varied in skin epidermal cells exposed to ultraviolet rays are considered to be associated with skin damage caused by ultraviolet radiation.

[0599] After primary cultured skin fibroblast cells were irradiated with ultraviolet ray and were cultured, a survey was performed for genes of which expression levels were varied depending on the irradiation of ultraviolet ray. First, after cultured to be confluent, the primary cultured skin fibroblast cells (Cell Applications) were exposed to 10,000 μJ/cm² of 254-nm ultraviolet light.

[0600] Messenger RNAs were, then, extracted by using a FastTrack™ 2.0 mRNA Isolation kit (Invitrogen Co.) from the unexposed cells and from the cells that were exposed to the ultraviolet light and then cultured for 4 or 24 hours. The labeling of the hybridization probe was carried out by using a 1.5 μg of each mRNA in the same manner as described above. The data were obtained in triplicate (n=3). The hybridization signals were compared between the cells exposed to the ultraviolet light and the unexposed cells. The comparison was preformed by statistical treatment with two-sample t-test. Clones with significant differences in the signal distribution were selected under the condition of p<0.05. In this analysis, even when the signal is lower than others, the difference in the signal values can be detected statistically. Accordingly, clones with signal value of 40 or lower were also assessed for selection.

[0601] Tables 353-509 show the expression of each cDNA in skin-derived fibroblast cells exposed and unexposed to ultraviolet light.

[0602] Averaged signal values (M₁, M₂) and sample variances (s₁², s₂²) were calculated for each gene in each of the cells, and then, the pooled sample variances s² were obtained from the sample variances of the two types of cells to be compared. The t values were determined according to the following formula: t=(M₁−M₂)//(⅓+⅓)^{1/2}. When the determined t-value was greater than a t-value at P, which means the probability of significance level, of 0.05 or 0.01 in the t-distribution table with 4 degrees of freedom, the difference was judged to be found in the expression level of the gene between the two types of cells at p<0.05 or p<0.01, respectively. The tables also include the information of an increase (+) or decrease (−) in the expression level of a gene in the exposed cells in comparison with that of unexposed cells.

[0603] The expression levels of the following clones were elevated 4 or 24 hours after the ultraviolet irradiation:

[0604] HEMBA1000542, HEMBA1001808, HEMBA1002177, HEMBA1003314, MAMMA1001874, NT2RM2001100, NT2RP2005732, NT2RP3000592, NT2RP4000657, OVARC1000004, OVARC1001092, OVARC1001342, PLACE1002816, NT2RM4001002, NT2RM4001813, NT2RM4002266, NT2RP2001174, NT2RP2001196, NT2RP2005358, NT2RP3000690, NT2RP3001216, NT2RP3003464, PLACE1006382, THYRO1000070, THYRO1001100, Y79AA1000342.

[0605] The expression levels of the following clones were decreased 4 or 24 hours after the ultraviolet irradiation:

[0606] HEMBA1000005, HEMBA1000150, HEMBA1000156, HEMBA1000158, HEMBA1000168, HEMBA1000231, HEMBA1000304, HEMBA1000307, HEMBA1000333, HEMBA1000366, HEMBA1000369, HEMBA1000390, HEMBA1000396, HEMBA1000418, HEMBA1000434, HEMBA1000464, HEMBA1000469, HEMBA1000490, HEMBA1000504, HEMBA1000505, HEMBA1000557, HEMBA1000657, HEMBA1000673, HEMBA1000682, HEMBA1000686, HEMBA1000727, HEMBA1000752, HEMBA1000851, HEMBA1000852, HEMBA1000870, HEMBA1000872, HEMBA1001085, HEMBA1001121, HEMBA1001133, HEMBA1001235, HEMBA1001265, HEMBA1001281, HEMBA1001289, HEMBA1001299, HEMBA1001303, HEMBA1001310, HEMBA1001323, HEMBA1001595, HEMBA1001620, HEMBA1001640, HEMBA1001678, HEMBA1001712, HEMBA1001835, HEMBA1001950, HEMBA1001987, HEMBA1002253, HEMBA1002321, HEMBA1002341, HEMBA1002419, HEMBA1002679, HEMBA1002728, HEMBA1002818, HEMBA1002935, HEMBA1002999, HEMBA1003034, HEMBA1003071, HEMBA1003098, HEMBA1003142, HEMBA1003175, HEMBA1003202, HEMBA1003212, HEMBA1003220, HEMBA1003276, HEMBA1003373, HEMBA1003417, HEMBA1003447, HEMBA1003528, HEMBA1003684, HEMBA1003799, HEMBA1003885, HEMBA1003989, HEMBA1004011, HEMBA1004055, HEMBA1004133, HEMBA1004225, HEMBA1004272, HEMBA1004353, HEMBA1004631, HEMBA1004669, HEMBA1004705, HEMBA1004753, HEMBA1004776, HEMBA1004803, HEMBA1004816, HEMBA1004900, HEMBA1005047, HEMBA1005079, HEMBA1005101, HEMBA1005149, HEMBA1005152, HEMBA1005202, HEMBA1005314, HEMBA1005372, HEMBA1005511, HEMBA1005513, HEMBA1005518, HEMBA1005570, HEMBA1005577, HEMBA1005581, HEMBA1005588, HEMBA1005609, HEMBA1005632, HEMBA1005853, HEMBA1006031, HEMBA1006035, HEMBA1006485, HEMBA1006486, HEMBA1006502, HEMBA1006696, HEMBA1006789, HEMBA1006796, HEMBA1007085, HEMBA1007224, HEMBA1007301, HEMBA1007319, HEMBA1007341, HEMBA1007342, HEMBB1000036, HEMBB1000037, HEMBB1000217, HEMBB1000266, HEMBB1000317, HEMBB1000336, HEMBB1000354, HEMBB1000369, HEMBB1000399, HEMBB1000434, HEMBB1000438, HEMBB1000592, HEMBB1000673, HEMBB1000789, HEMBB1000810, HEMBB1000883, HEMBB1000887, HEMBB1001105, HEMBB1001182, HEMBB1001242, HEMBB1001267, HEMBB1001424, HEMBB1001464, HEMBB1001531, HEMBB1001618, HEMBB1001996, HEMBB1002092, HEMBB1002139, HEMBB1002142, HEMBB1002190, HEMBB1002453, HEMBB1002520, HEMBB1002550, HEMBB1002556, HEMBB1002600, HEMBB1002664, MAMMA1000009, MAMMA1000055, MAMMA1000069, MAMMA1000133, MAMMA1000171, MAMMA1000173, MAMMA1000287, MAMMA1000416, MAMMA1000585, MAMMA1000713, MAMMA1000760, MAMMA1000798, MAMMA1000831, MAMMA1000875, MAMMA1000876, MAMMA1000877, MAMMA1000906, MAMMA1000931, MAMMA1000962, MAMMA1001133, MAMMA1001139, MAMMA1001243, MAMMA1001271, MAMMA1001274, MAMMA1001298, MAMMA1001606, MAMMA1001630, MAMMA1001670, MAMMA1001743, MAMMA1001751, MAMMA1002140, MAMMA1002145, MAMMA1002158, MAMMA1002170, MAMMA1002236, MAMMA1002311, MAMMA1002498, MAMMA1002754, MAMMA1002780, MAMMA1002820, MAMMA1002843, MAMMA1002844, MAMMA1002871, MAMMA1003047, NT2RM1000037, NT2RM1000039, NT2RM1000080, NT2RM1000086, NT2RM1000341, NT2RM1000499, NT2RM1000669, NT2RM1000746, NT2RM1000781, NT2RM1000885, NT2RM1000905, NT2RM1000962, NT2RM2000239, NT2RM2000260, NT2RM2000371, NT2RM2000639, NT2RM2000649, NT2RM2000735, NT2RM2000821, NT2RM2000984, NT2RM2001035, NT2RM2001065, NT2RM2001105, NT2RM2001177, NT2RM2001194, NT2RM2001196, NT2RM2001243, NT2RM2001256, NT2RM2001424, NT2RM2001588, NT2RM2001635, NT2RM2001648, NT2RM2001652, NT2RM2001668, NT2RM2001706, NT2RM2001727, NT2RM2001730, NT2RM2001743, NT2RM2001753, NT2RM2001760, NT2RM2001771, NT2RM2001785, NT2RM2001800, NT2RM2001855, NT2RM2001896, NT2RM2001997, NT2RM2002030, NT2RM2002049, NT2RM2002091, NT2RM2002142, NT2RM2002145, NT2RM2002178, NT2RM2002580, NT2RM4000215, NT2RM4000344, NT2RM4000368, NT2RM4000421, NT2RM4000425, NT2RM4000457, NT2RM4000496, NT2RM4000515, NT2RM4000712, NT2RM4000787, NT2RM4000813, NT2RM4000820, NT2RM4000852, NT2RM4000950, NT2RM4000996, NT2RM4001016, NT2RM4001047, NT2RM4001054, NT2RM4001140, NT2RM4001151, NT2RM4001187, NT2RM4001204, NT2RM4001258, NT2RM4001437, NT2RM4001454, NT2RM4001489, NT2RM4001605, NT2RM4001611, NT2RM4001666, NT2RM4001710, NT2RM4001714, NT2RM4001715, NT2RM4001731, NT2RM4001741, NT2RM4001746, NT2RM4001856, NT2RM4001938, NT2RM4001940, NT2RM4001984, NT2RM4001987, NT2RM4002013, NT2RM4002054, NT2RM4002055, NT2RM4002073, NT2RM4002145, NT2RM4002146, NT2RM4002161, NT2RM4002174, NT2RM4002194, NT2RM4002205, NT2RM4002213, NT2RM4002266, NT2RM4002278, NT2RM4002558, NT2RM4002565, NT2RM4002593, NT2RM4002594, NT2RP1000063, NT2RP1000111, NT2RP1000124, NT2RP1000174, NT2RP1000348, NT2RP1000443, NT2RP1000522, NT2RP1000677, NT2RP1000695, NT2RP1000730, NT2RP1000767, NT2RP1000834, NT2RP1000856, NT2RP1000944, NT2RP1001014, NT2RP1001073, NT2RP1001079, NT2RP1001177, NT2RP1001185, NT2RP1001199, NT2RP1001253, NT2RP1001310, NT2RP1001313, NT2RP1001385, NT2RP1001410, NT2RP1001449, NT2RP1001546, NT2RP2000120, NT2RP2000126, NT2RP2000205, NT2RP2000224, NT2RP2000274, NT2RP2000298, NT2RP2000310, NT2RP2000327, NT2RP2000328, NT2RP2000329, NT2RP2000337, NT2RP2000369, NT2RP2000414, NT2RP2000498, NT2RP2000510, NT2RP2000715, NT2RP2000819, NT2RP2000931, NT2RP2000938, NT2RP2001044, NT2RP2001065, NT2RP2001081, NT2RP2001137, NT2RP2001312, NT2RP2001327, NT2RP2001366, NT2RP2001381, NT2RP2001420, NT2RP2001427, NT2RP2001449, NT2RP2001511, NT2RP2001526, NT2RP2001560, NT2RP2001576, NT2RP2001581, NT2RP2001601, NT2RP2001613, NT2RP2001628, NT2RP2001663, NT2RP2001675, NT2RP2001677, NT2RP2001678, NT2RP2001699, NT2RP2001721, NT2RP2001740, NT2RP2001813, NT2RP2001861, NT2RP2001876, NT2RP2001907, NT2RP2001926, NT2RP2001946, NT2RP2001985, NT2RP2002032, NT2RP2002046, NT2RP2002076, NT2RP2002099, NT2RP2002105, NT2RP2002137, NT2RP2002172, NT2RP2002208, NT2RP2002219, NT2RP2002231, NT2RP2002256, NT2RP2002270, NT2RP2002292, NT2RP2002316, NT2RP2002333, NT2RP2002520, NT2RP2002549, NT2RP2002621, NT2RP2002706, NT2RP2002710, NT2RP2002750, NT2RP2002800, NT2RP2002862, NT2RP2002880, NT2RP2002925, NT2RP2002929, NT2RP2002939, NT2RP2002959, NT2RP2002993, NT2RP2003000, NT2RP2003158, NT2RP2003243, NT2RP2003265, NT2RP2003277, NT2RP2003280, NT2RP2003295, NT2RP2003297, NT2RP2003433, NT2RP2003445, NT2RP2003456, NT2RP2003506, NT2RP2003543, NT2RP2003559, NT2RP2003567, NT2RP2003604, NT2RP2003706, NT2RP2003777, NT2RP2003781, NT2RP2003871, NT2RP2003952, NT2RP2003976, NT2RP2004013, NT2RP2004014, NT2RP2004081, NT2RP2004142, NT2RP2004165, NT2RP2004170, NT2RP2004194, NT2RP2004196, NT2RP2004239, NT2RP2004240, NT2RP2004321, NT2RP2004364, NT2RP2004365, NT2RP2004373, NT2RP2004389, NT2RP2004392, NT2RP2004399, NT2RP2004538, NT2RP2004587, NT2RP2004600, NT2RP2004602, NT2RP2004614, NT2RP2004664, NT2RP2004675, NT2RP2004681, NT2RP2004710, NT2RP2004743, NT2RP2004767, NT2RP2004799, NT2RP2004816, NT2RP2004959, NT2RP2004962, NT2RP2005000, NT2RP2005003, NT2RP2005012, NT2RP2005031, NT2RP2005037, NT2RP2005108, NT2RP2005126, NT2RP2005144, NT2RP2005147, NT2RP2005289, NT2RP2005293, NT2RP2005325, NT2RP2005354, NT2RP2005441, NT2RP2005464, NT2RP2005491, NT2RP2005495, NT2RP2005498, NT2RP2005501, NT2RP2005555, NT2RP2005557, NT2RP2005605, NT2RP2005622, NT2RP2005645, NT2RP2005651, NT2RP2005654, NT2RP2005669, NT2RP2005694, NT2RP2005701, NT2RP2005752, NT2RP2005773, NT2RP2005804, NT2RP2005835, NT2RP2005841, NT2RP2005857, NT2RP2005890, NT2RP2005901, NT2RP2005942, NT2RP2006023, NT2RP2006052, NT2RP2006069, NT2RP2006166, NT2RP2006184, NT2RP2006186, NT2RP2006196, NT2RP2006238, NT2RP2006258, NT2RP2006312, NT2RP2006320, NT2RP2006565, NT2RP2006571, NT2RP3000050, NT2RP3000055, NT2RP3000072, NT2RP3000080, NT2RP3000109, NT2RP3000134, NT2RP3000142, NT2RP3000149, NT2RP3000186, NT2RP3000197, NT2RP3000207, NT2RP3000220, NT2RP3000247, NT2RP3000251, NT2RP3000361, NT2RP3000366, NT2RP3000418, NT2RP3000449, NT2RP3000451, NT2RP3000484, NT2RP3000487, NT2RP3000512, NT2RP3000527, NT2RP3000542, NT2RP3000561, NT2RP3000562, NT2RP3000578, NT2RP3000596, NT2RP3000605, NT2RP3000624, NT2RP3000644, NT2RP3000661, NT2RP3000665, NT2RP3000739, NT2RP3000850, NT2RP3000868, NT2RP3000980, NT2RP3001084, NT2RP3001096, NT2RP3001109, NT2RP3001111, NT2RP3001115, NT2RP3001119, NT2RP3001120, NT2RP3001126, NT2RP3001140, NT2RP3001155, NT2RP3001176, NT2RP3001272, NT2RP3001297, NT2RP3001325, NT2RP3001339, NT2RP3001398, NT2RP3001447, NT2RP3001457, NT2RP3001459, NT2RP3001495, NT2RP3001554, NT2RP3001580, NT2RP3001587, NT2RP3001608, NT2RP3001672, NT2RP3001676, NT2RP3001712, NT2RP3001730, NT2RP3001782, NT2RP3001799, NT2RP3001929, NT2RP3001943, NT2RP3002002, NT2RP3002004, NT2RP3002045, NT2RP3002054, NT2RP3002057, NT2RP3002142, NT2RP3002163, NT2RP3002165, NT2RP3002173, NT2RP3002273, NT2RP3002351, NT2RP3002631, NT2RP3002659, NT2RP3002671, NT2RP3002713, NT2RP3002955, NT2RP3003071, NT2RP3003078, NT2RP3003139, NT2RP3003242, NT2RP3003301, NT2RP3003302, NT2RP3003313, NT2RP3003330, NT2RP3003377, NT2RP3003384, NT2RP3003411, NT2RP3003701, NT2RP3003831, NT2RP3003870, NT2RP3003992, NT2RP3004013, NT2RP3004070, NT2RP3004148, NT2RP3004206, NT2RP3004207, NT2RP3004215, NT2RP3004332, NT2RP3004341, NT2RP3004349, NT2RP3004399, NT2RP4000023, NT2RP4000051, NT2RP4000129, NT2RP4000147, NT2RP4000212, NT2RP4000214, NT2RP4000323, NT2RP4000449, NT2RP4000515, NT2RP4000519, NT2RP4000528, NT2RP4000556, NT2RP4000588, NT2RP4000638, NT2RP4000648, NT2RP4000973, NT2RP4000996, NT2RP4001006, NT2RP4001029, NT2RP4001041, NT2RP4001100, NT2RP4001117, NT2RP4001174, NT2RP4001235, NT2RP4001274, NT2RP4001276, NT2RP4001315, NT2RP4001373, NT2RP4001389, NT2RP4001433, NT2RP4001502, NT2RP4001524, NT2RP4001567, NT2RP4001574, NT2RP4001677, NT2RP4001753, NT2RP4001927, NT2RP4002052, NT2RP4002058, NT2RP4002071, NT2RP4002078, NT2RP4002083, NT2RP5003461, NT2RP5003512, NT2RP5003522, OVARC1000085, OVARC1000091, OVARC1000106, OVARC1000109, OVARC1000114, OVARC1000148, OVARC1000168, OVARC1000198, OVARC1000240, OVARC1000241, OVARC1000288, OVARC1000302, OVARC1000309, OVARC1000326, OVARC1000335, OVARC1000347, OVARC1000384, OVARC1000411, OVARC1000414, OVARC1000420, OVARC1000431, OVARC1000437, OVARC1000440, OVARC1000442, OVARC1000465, OVARC1000473, OVARC1000479, OVARC1000486, OVARC1000526, OVARC1000556, OVARC1000557, OVARC1000564, OVARC1000573, OVARC1000578, OVARC1000588, OVARC1000605, OVARC1000622, OVARC1000678, OVARC1000679, OVARC1000681, OVARC1000703, OVARC1000730, OVARC1000746, OVARC1000769, OVARC1000781, OVARC1000787, OVARC1000800, OVARC1000834, OVARC1000846, OVARC1000850, OVARC1000862, OVARC1000876, OVARC1000883, OVARC1000891, OVARC1000897, OVARC1000912, OVARC1000915, OVARC1000924, OVARC1000937, OVARC1000945, OVARC1000948, OVARC1000959, OVARC1000960, OVARC1000984, OVARC1000996, OVARC1000999, OVARC1001000, OVARC1001010, OVARC1001011, OVARC1001032, OVARC1001034, OVARC1001038, OVARC1001040, OVARC1001044, OVARC1001055, OVARC1001062, OVARC1001085, OVARC1001117, OVARC1001118, OVARC1001162, OVARC1001167, OVARC1001170, OVARC1001173, OVARC1001180, OVARC1001232, OVARC1001240, OVARC1001261, OVARC1001268, OVARC1001270, OVARC1001271, OVARC1001282, OVARC1001296, OVARC1001306, OVARC1001329, OVARC1001330, OVARC1001339, OVARC1001341, OVARC1001344, OVARC1001360, OVARC1001369, OVARC1001376, OVARC1001381, OVARC1001399, OVARC1001417, OVARC1001419, OVARC1001436, OVARC1001496, OVARC1001506, OVARC1001525, OVARC1001542, OVARC1001600, OVARC1001668, OVARC1001702, OVARC1001731, OVARC1001745, OVARC1001762, OVARC1001791, OVARC1001802, OVARC1001812, OVARC1001813, OVARC1001820, OVARC1001861, OVARC1001873, OVARC1001879, OVARC1001880, OVARC1001883, OVARC1001900, OVARC1001911, OVARC1001916, OVARC1001928, OVARC1001942, OVARC1001949, OVARC1001950, OVARC1001987, OVARC1001989, OVARC1002044, OVARC1002050, OVARC1002066, OVARC1002107, OVARC1002112, OVARC1002127, OVARC1002165, PLACE1000004, PLACE1000078, PLACE1000081, PLACE1000142, PLACE1000184, PLACE1000185, PLACE1000246, PLACE1000292, PLACE1000332, PLACE1000383, PLACE1000401, PLACE1000406, PLACE1000420, PLACE1000421, PLACE1000435, PLACE1000453, PLACE1000481, PLACE1000562, PLACE1000583, PLACE1000610, PLACE1000656, PLACE1000785, PLACE1000798, PLACE1000909, PLACE1000948, PLACE1001010, PLACE1001076, PLACE1001092, PLACE1001104, PLACE1001171, PLACE1001185, PLACE1001279, PLACE1001304, PLACE1001311, PLACE1001323, PLACE1001351, PLACE1001366, PLACE1001502, PLACE1001534, PLACE1001602, PLACE1001603, PLACE1001608, PLACE1001610, PLACE1001632, PLACE1001634, PLACE1001720, PLACE1001729, PLACE1001739, PLACE1001745, PLACE1001746, PLACE1001748, PLACE1001781, PLACE1001799, PLACE1001821, PLACE1001912, PLACE1001928, PLACE1001989, PLACE1002072, PLACE1002090, PLACE1002115, PLACE1002150, PLACE1002170, PLACE1002319, PLACE1002342, PLACE1002395, PLACE1002399, PLACE1002433, PLACE1002437, PLACE1002438, PLACE1002450, PLACE1002499, PLACE1002514, PLACE1002583, PLACE1002685, PLACE1002768, PLACE1002772, PLACE1002782, PLACE1002794, PLACE1002811, PLACE1002815, PLACE1002834, PLACE1002839, PLACE1002853, PLACE1002941, PLACE1002968, PLACE1003044, PLACE1003092, PLACE1003100, PLACE1003145, PLACE1003153, PLACE1003176, PLACE1003190, PLACE1003200, PLACE1003205, PLACE1003238, PLACE1003249, PLACE1003302, PLACE1003353, PLACE1003373, PLACE1003383, PLACE1003516, PLACE1003521, PLACE1003592, PLACE1003611, PLACE1003618, PLACE1003704, PLACE1003709, PLACE1003768, PLACE1003784, PLACE1003833, PLACE1003870, PLACE1003886, PLACE1003888, PLACE1003903, PLACE1003936, PLACE1003968, PLACE1004103, PLACE1004114, PLACE1004118, PLACE1004242, PLACE1004256, PLACE1004284, PLACE1004289, PLACE1004316, PLACE1004336, PLACE1004384, PLACE1004388, PLACE1004405, PLACE1004425, PLACE1004428, PLACE1004451, PLACE1004467, PLACE1004491, PLACE1004510, PLACE1004548, PLACE1004658, PLACE1004672, PLACE1004693, PLACE1004716, PLACE1004777, PLACE1004813, PLACE1004824, PLACE1004827, PLACE1004836, PLACE1004840, PLACE1004885, PLACE1004913, PLACE1004918, PLACE1004930, PLACE1004934, PLACE1004972, PLACE1004982, PLACE1004985, PLACE1005026, PLACE1005101, PLACE1005102, PLACE1005128, PLACE1005176, PLACE1005181, PLACE1005187, PLACE1005232, PLACE1005261, PLACE1005277, PLACE1005287, PLACE1005305, PLACE1005327, PLACE1005331, PLACE1005373, PLACE1005374, PLACE1005409, PLACE1005477, PLACE1005480, PLACE1005481, PLACE1005494, PLACE1005502, PLACE1005526, PLACE1005528, PLACE1005530, PLACE1005550, PLACE1005554, PLACE1005557, PLACE1005595, PLACE1005603, PLACE1005611, PLACE1005630, PLACE1005639, PLACE1005646, PLACE1005656, PLACE1005666, PLACE1005730, PLACE1005755, PLACE1005763, PLACE1005799, PLACE1005803, PLACE1005804, PLACE1005834, PLACE1005845, PLACE1005850, PLACE1005876, PLACE1005884, PLACE1005890, PLACE1005898, PLACE1005921, PLACE1005923, PLACE1005932, PLACE1005934, PLACE1005936, PLACE1005951, PLACE1005966, PLACE1005968, PLACE1005990, PLACE1006002, PLACE1006003, PLACE1006011, PLACE1006017, PLACE1006037, PLACE1006040, PLACE1006119, PLACE1006129, PLACE1006139, PLACE1006143, PLACE1006157, PLACE1006159, PLACE1006164, PLACE1006167, PLACE1006170, PLACE1006187, PLACE1006195, PLACE1006205, PLACE1006223, PLACE1006225, PLACE1006236, PLACE1006239, PLACE1006288, PLACE1006318, PLACE1006357, PLACE1006368, PLACE1006371, PLACE1006438, PLACE1006469, PLACE1006482, PLACE1006488, PLACE1006492, PLACE1006506, PLACE1006531, PLACE1006540, PLACE1006552, PLACE1006617, PLACE1006626, PLACE1006673, PLACE1006704, PLACE1006731, PLACE1006754, PLACE1006779, PLACE1006795, PLACE1006800, PLACE1006805, PLACE1006819, PLACE1006829, PLACE1006860, PLACE1006867, PLACE1006878, PLACE1006883, PLACE1006956, PLACE1006958, PLACE1007014, PLACE1007111, PLACE1007140, PLACE1007178, PLACE1007238, PLACE1007239, PLACE1007242, PLACE1007257, PLACE1007274, PLACE1007276, PLACE1007282, PLACE1007286, PLACE1007301, PLACE1007317, PLACE1007346, PLACE1007367, PLACE1007375, PLACE1007386, PLACE1007402, PLACE1007409, PLACE1007416, PLACE1007460, PLACE1007478, PLACE1007484, PLACE1007488, PLACE1007507, PLACE1007511, PLACE1007524, PLACE1007537, PLACE1007544, PLACE1007557, PLACE1007677, PLACE1007688, PLACE1007690, PLACE1007737, PLACE1007743, PLACE1007829, PLACE1007846, PLACE1007852, PLACE1007858, PLACE1007897, PLACE1007908, PLACE1007946, PLACE1007955, PLACE1007958, PLACE1008122, PLACE1008177, PLACE1008181, PLACE1008198, PLACE1008209, PLACE1008244, PLACE1008330, PLACE1008392, PLACE1008405, PLACE1008424, PLACE1008437, PLACE1008455, PLACE1008457, PLACE1008524, PLACE1008531, PLACE1008532, PLACE1008533, PLACE1008568, PLACE1008625, PLACE1008626, PLACE1008627, PLACE1008630, PLACE1008693, PLACE1008715, PLACE1008748, PLACE1008808, PLACE1008813, PLACE1008887, PLACE1008947, PLACE1009045, PLACE1009060, PLACE1009091, PLACE1009099, PLACE1009150, PLACE1009155, PLACE1009183, PLACE1009186, PLACE1009200, PLACE1009308, PLACE1009328, PLACE1009368, PLACE1009398, PLACE1009410, PLACE1009443, PLACE1009444, PLACE1009459, PLACE1009468, PLACE1009476, PLACE1009493, PLACE1009524, PLACE1009581, PLACE1009607, PLACE1009621, PLACE1009721, PLACE1009798, PLACE1009861, PLACE1009879, PLACE1009886, PLACE1009888, PLACE1009947, PLACE1009995, PLACE1010076, PLACE1010083, PLACE1010089, PLACE1010102, PLACE1010105, PLACE1010106, PLACE1010134, PLACE1010194, PLACE1010261, PLACE1010293, PLACE1010310, PLACE1010324, PLACE1010341, PLACE1010364, PLACE1010481, PLACE1010491, PLACE1010547, PLACE1010579, PLACE1010580, PLACE1010599, PLACE1010628, PLACE1010629, PLACE1010662, PLACE1010714, PLACE1010720, PLACE1010739, PLACE1010743, PLACE1010800, PLACE1010811, PLACE1010833, PLACE1010856, PLACE1010870, PLACE1010877, PLACE1010891, PLACE1010896, PLACE1010900, PLACE1010916, PLACE1010917, PLACE1010925, PLACE1010926, PLACE1010942, PLACE1010947, PLACE1010954, PLACE1010960, PLACE1010965, PLACE1011026, PLACE1011041, PLACE1011046, PLACE1011054, PLACE1011090, PLACE1011165, PLACE1011214, PLACE1011229, PLACE1011273, PLACE1011296, PLACE1011310, PLACE1011371, PLACE1011375, PLACE1011399, PLACE1011419, PLACE1011452, PLACE1011465, PLACE1011472, PLACE1011503, PLACE1011563, PLACE1011567, PLACE1011586, PLACE1011641, PLACE1011643, PLACE1011646, PLACE1011650, PLACE1011664, PLACE1011675, PLACE1011725, PLACE1011729, PLACE1011749, PLACE1011762, PLACE1011778, PLACE1011783, PLACE1011858, PLACE1011891, PLACE1011923, PLACE1011962, PLACE1011982, PLACE1011995, PLACE2000006, PLACE2000007, PLACE2000014, PLACE2000017, PLACE2000030, PLACE2000033, PLACE2000039, PLACE2000050, PLACE2000061, PLACE2000100, PLACE2000111, PLACE2000124, PLACE2000132, PLACE2000140, PLACE2000164, PLACE2000170, PLACE2000172, PLACE2000176, PLACE2000187, PLACE2000216, PLACE2000223, PLACE2000264, PLACE2000274, PLACE2000335, PLACE2000341, PLACE2000342, PLACE2000347, PLACE2000366, PLACE2000373, PLACE2000398, PLACE2000419, PLACE2000433, PLACE2000435, PLACE2000455, PLACE2000458, PLACE2000465, PLACE3000020, PLACE3000029, PLACE3000059, PLACE3000103, PLACE3000119, PLACE3000136, PLACE3000156, PLACE3000157, PLACE3000158, PLACE3000160, PLACE3000197, PLACE3000199, PLACE3000207, PLACE3000218, PLACE3000220, PLACE3000221, PLACE3000226, PLACE3000242, PLACE3000244, PLACE3000254, PLACE3000271, PLACE3000276, PLACE3000304, PLACE3000310, PLACE3000320, PLACE3000350, PLACE3000353, PLACE3000363, PLACE3000365, PLACE3000373, PLACE3000388, PLACE3000399, PLACE3000400, PLACE3000455, PLACE4000052, PLACE4000093, PLACE4000128, PLACE4000129, PLACE4000131, PLACE4000147, PLACE4000156, PLACE4000211, PLACE4000222, PLACE4000230, PLACE4000233, PLACE4000261, PLACE4000269, PLACE4000270, PLACE4000320, PLACE4000323, PLACE4000326, PLACE4000369, PLACE4000379, PLACE4000387, PLACE4000392, PLACE4000411, PLACE4000431, PLACE4000487, PLACE4000494, PLACE4000521, PLACE4000522, PLACE4000548, PLACE4000558, PLACE4000581, PLACE4000590, PLACE4000612, SKNMC1000050, SKNMC1000091, THYRO1000040, THYRO1000085, THYRO1000092, THYRO1000111, THYRO1000121, THYRO1000156, THYRO1000163, THYRO1000186, THYRO1000187, THYRO1000206, THYRO1000241, THYRO1000320, THYRO1000343, THYRO1000358, THYRO1000368, THYRO1000381, THYRO1000387, THYRO1000395, THYRO1000401, THYRO1000452, THYRO1000484, THYRO1000501, THYRO1000502, THYRO1000505, THYRO1000662, THYRO1000666, THYRO1000684, THYRO1000748, THYRO1000787, THYRO1000793, THYRO1000815, THYRO1000829, THYRO1000852, THYRO1000855, THYRO1000895, THYRO1000926, THYRO1000951, THYRO1000952, THYRO1000984, THYRO1000988, THYRO1001031, THYRO1001062, THYRO1001093, THYRO1001120, THYRO1001121, THYRO1001133, THYRO1001134, THYRO1001142, THYRO1001173, THYRO1001177, THYRO1001204, THYRO1001213, THYRO1001290, THYRO1001313, THYRO1001321, THYRO1001322, THYRO1001363, THYRO1001374, THYRO1001401, THYRO1001406, THYRO1001458, THYRO1001617, THYRO1001671, THYRO1001673, THYRO1001703, THYRO1001706, THYRO1001721, THYRO1001738, THYRO1001745, THYRO1001746, THYRO1001809, Y79AA1000013, Y79AA1000033, Y79AA1000059, Y79AA1000202, Y79AA1000230, Y79AA1000268, Y79AA1000346, Y79AA1000420, Y79AA1000480, Y79AA1000539, Y79AA1000540, Y79AA1000574, Y79AA1000627, Y79AA1000705, Y79AA1000734, Y79AA1000748, Y79AA1000752, Y79AA1000774, Y79AA1000784, Y79AA1000794, Y79AA1000800, Y79AA1000802, Y79AA1000805, Y79AA1000833, Y79AA1000850, Y79AA1000962, Y79AA1000966, Y79AA1001041, Y79AA1001048, Y79AA1001061, Y79AA1001078, Y79AA1001105, Y79AA1001177, Y79AA1001185, Y79AA1001211, Y79AA1001216, Y79AA1001281, Y79AA1001299, Y79AA1001312, Y79AA1001323, Y79AA1001384, Y79AA1001402, Y79AA1001533, Y79AA1001548, Y79AA1001581, Y79AA1001594, Y79AA1001665, Y79AA1001679, Y79AA1001692, Y79AA1001696, Y79AA1001711, Y79AA1001805, Y79AA1001827, Y79AA1001846, Y79AA1001848, Y79AA1001866, Y79AA1001875, Y79AA1002027, Y79AA1002083, Y79AA1002089, Y79AA1002093, Y79AA1002103, Y79AA1002115, Y79AA1002139, Y79AA1002208, Y79AA1002209, Y79AA1002220, Y79AA1002234, Y79AA1002246, Y79AA1002307, Y79AA1002311, Y79AA1002351, Y79AA1002361, Y79AA1002399, Y79AA1002433, Y79AA1002472, Y79AA1002482, HEMBA1000542, NT2RM2001100, HEMBA1000012, HEMBA1000201, HEMBA1000216, HEMBA1000244, HEMBA1000251, HEMBA1000303, HEMBA1000355, HEMBA1000356, HEMBA1000456, HEMBA1000488, HEMBA1000519, HEMBA1000591, HEMBA1000592, HEMBA1000636, HEMBA1000637, HEMBA1000722, HEMBA1000817, HEMBA1000934, HEMBA1000971, HEMBA1001052, HEMBA1001059, HEMBA1001122, HEMBA1001123, HEMBA1001213, HEMBA1001226, HEMBA1001257, HEMBA1001302, HEMBA1001326, HEMBA1001327, HEMBA1001570, HEMBA1001651, HEMBA1001745, HEMBA1001847, HEMBA1001912, HEMBA1001921, HEMBA1001942, HEMBA1001979, HEMBA1002039, HEMBA1002185, HEMBA1002199, HEMBA1002229, HEMBA1002257, HEMBA1002265, HEMBA1002337, HEMBA1002475, HEMBA1002513, HEMBA1002515, HEMBA1002624, HEMBA1002628, HEMBA1002712, HEMBA1002794, HEMBA1002816, HEMBA1002876, HEMBA1002939, HEMBA1002968, HEMBA1002971, HEMBA1003064, HEMBA1003077, HEMBA1003086, HEMBA1003304, HEMBA1003328, HEMBA1003376, HEMBA1003402, HEMBA1003556, HEMBA1003560, HEMBA1003568, HEMBA1003597, HEMBA1003598, HEMBA1003656, HEMBA1003715, HEMBA1003733, HEMBA1003760, HEMBA1003773, HEMBA1003784, HEMBA1003803, HEMBA1003838, HEMBA1003864, HEMBA1003950, HEMBA1004012, HEMBA1004138, HEMBA1004143, HEMBA1004241, HEMBA1004246, HEMBA1004264, HEMBA1004276, HEMBA1004354, HEMBA1004502, HEMBA1004538, HEMBA1004670, HEMBA1004752, HEMBA1004771, HEMBA1004880, HEMBA1004923, HEMBA1004972, HEMBA1004995, HEMBA1005029, HEMBA1005039, HEMBA1005159, HEMBA1005315, HEMBA1005338, HEMBA1005410, HEMBA1005447, HEMBA1005500, HEMBA1005506, HEMBA1005583, HEMBA1005606, HEMBA1005755, HEMBA1005813, HEMBA1005909, HEMBA1005931, HEMBA1005934, HEMBA1005991, HEMBA1006002, HEMBA1006036, HEMBA1006067, HEMBA1006091, HEMBA1006142, HEMBA1006235, HEMBA1006283, HEMBA1006291, HEMBA1006293, HEMBA1006344, HEMBA1006492, HEMBA1006535, HEMBA1006569, HEMBA1006612, HEMBA1006676, HEMBA1006767, HEMBA1006877, HEMBA1006885, HEMBA1006926, HEMBA1006996, HEMBA1007018, HEMBA1007066, HEMBA1007080, HEMBA1007112, HEMBA1007178, HEMBA1007203, HEMBA1007243, HEMBB1000226, HEMBB1000240, HEMBB1000272, HEMBB1000638, HEMBB1000706, HEMBB1000826, HEMBB1001014, HEMBB1001112, HEMBB1001119, HEMBB1001317, HEMBB1002342, HEMBB1002371, HEMBB1002381, HEMBB1002387, HEMBB1002409, HEMBB1002457, HEMBB1002477, HEMBB1002489, HEMBB1002502, HEMBB1002510, HEMBB1002582, HEMBB1002596, MAMMA1000103, MAMMA1000155, MAMMA1000183, MAMMA1000198, MAMMA1000221, MAMMA1000241, MAMMA1000270, MAMMA1000284, MAMMA1000309, MAMMA1000339, MAMMA1000348, MAMMA1000410, MAMMA1000421, MAMMA1000422, MAMMA1000429, MAMMA1000444, MAMMA1000478, MAMMA1000524, MAMMA1000605, MAMMA1000738, MAMMA1000761, MAMMA1000776, MAMMA1000778, MAMMA1000782, MAMMA1000802, MAMMA1000839, MAMMA1000843, MAMMA1000908, MAMMA1000943, MAMMA1000998, MAMMA1001080, MAMMA1001105, MAMMA1001260, MAMMA1001324, MAMMA1001446, MAMMA1001627, MAMMA1001908, MAMMA1002084, MAMMA1002174, MAMMA1002360, MAMMA1002384, MAMMA1002650, MAMMA1002685, MAMMA1002796, MAMMA1002973, MAMMA1003004, MAMMA1003166, NT2RM1000018, NT2RM1000187, NT2RM1000244, NT2RM1000256, NT2RM1000260, NT2RM1000377, NT2RM1000388, NT2RM1000555, NT2RM1000661, NT2RM1000699, NT2RM1000770, NT2RM1000780, NT2RM1000800, NT2RM1000802, NT2RM1000894, NT2RM1000898, NT2RM1001003, NT2RM1001043, NT2RM1001044, NT2RM1001074, NT2RM1001139, NT2RM2000101, NT2RM2000368, NT2RM2000402, NT2RM2000407, NT2RM2000422, NT2RM2000577, NT2RM2000581, NT2RM2000612, NT2RM2000691, NT2RM2000714, NT2RM2000718, NT2RM2000837, NT2RM2001131, NT2RM2001152, NT2RM2001221, NT2RM2001238, NT2RM2001306, NT2RM2001420, NT2RM2001524, NT2RM2001582, NT2RM2001592, NT2RM2001632, NT2RM2001659, NT2RM2001671, NT2RM2001675, NT2RM2001696, NT2RM2001716, NT2RM2001803, NT2RM2001805, NT2RM2001903, NT2RM2001983, NT2RM4000085, NT2RM4000155, NT2RM4000229, NT2RM4000290, NT2RM4000324, NT2RM4000395, NT2RM4000433, NT2RM4000471, NT2RM4000531, NT2RM4000532, NT2RM4000616, NT2RM4000700, NT2RM4000741, NT2RM4000751, NT2RM4000778, NT2RM4000779, NT2RM4000848, NT2RM4000855, NT2RM4000887, NT2RM4000895, NT2RM4001032, NT2RM4001203, NT2RM4001316, NT2RM4001414, NT2RM4001483, NT2RM4001519, NT2RM4001522, NT2RM4001557, NT2RM4001565, NT2RM4001582, NT2RM4001629, NT2RM4001682, NT2RM4001776, NT2RM4001783, NT2RM4002075, NT2RM4002093, NT2RM4002109, NT2RM4002189, NT2RM4002256, NT2RM4002294, NT2RM4002373, NT2RM4002504, NT2RP1000035, NT2RP1000040, NT2RP1000086, NT2RP1000112, NT2RP1000163, NT2RP1000358, NT2RP1000409, NT2RP1000478, NT2RP1000481, NT2RP1000574, NT2RP1000577, NT2RP1000629, NT2RP1000630, NT2RP1000688, NT2RP1000733, NT2RP1000796, NT2RP1000916, NT2RP1000959, NT2RP1000966, NT2RP1001011, NT2RP1001033, NT2RP1001286, NT2RP1001302, NT2RP1001361, NT2RP1001457, NT2RP1001482, NT2RP2000054, NT2RP2000079, NT2RP2000091, NT2RP2000097, NT2RP2000161, NT2RP2000195, NT2RP2000232, NT2RP2000233, NT2RP2000248, NT2RP2000283, NT2RP2000422, NT2RP2000438, NT2RP2000448, NT2RP2000459, NT2RP2000731, NT2RP2000758, NT2RP2000764, NT2RP2000892, NT2RP2000943, NT2RP2001036, NT2RP2001070, NT2RP2001218, NT2RP2001467, NT2RP2001506, NT2RP2001520, NT2RP2001597, NT2RP2001634, NT2RP2001660, NT2RP2001762, NT2RP2001947, NT2RP2001991, NT2RP2002033, NT2RP2002041, NT2RP2002047, NT2RP2002066, NT2RP2002070, NT2RP2002193, NT2RP2002235, NT2RP2002252, NT2RP2002394, NT2RP2002537, NT2RP2002727, NT2RP2002736, NT2RP2002752, NT2RP2002753, NT2RP2002769, NT2RP2002778, NT2RP2002857, NT2RP2002928, NT2RP2002954, NT2RP2002980, NT2RP2002986, NT2RP2003121, NT2RP2003161, NT2RP2003272, NT2RP2003329, NT2RP2003339, NT2RP2003391, NT2RP2003393, NT2RP2003394, NT2RP2003401, NT2RP2003466, NT2RP2003513, NT2RP2003564, NT2RP2003581, NT2RP2003629, NT2RP2003727, NT2RP2003764, NT2RP2003793, NT2RP2003840, NT2RP2003885, NT2RP2004066, NT2RP2004187, NT2RP2004226, NT2RP2004242, NT2RP2004245, NT2RP2004316, NT2RP2004366, NT2RP2004396, NT2RP2004463, NT2RP2004512, NT2RP2004655, NT2RP2004736, NT2RP2004775, NT2RP2004791, NT2RP2004802, NT2RP2004841, NT2RP2004897, NT2RP2004933, NT2RP2004936, NT2RP2004961, NT2RP2004967, NT2RP2004982, NT2RP2005018, NT2RP2005038, NT2RP2005116, NT2RP2005140, NT2RP2005159, NT2RP2005162, NT2RP2005276, NT2RP2005288, NT2RP2005315, NT2RP2005344, NT2RP2005407, NT2RP2005453, NT2RP2005457, NT2RP2005476, NT2RP2005490, NT2RP2005525, NT2RP2005540, NT2RP2005549, NT2RP2005600, NT2RP2005675, NT2RP2005690, NT2RP2005712, NT2RP2005722, NT2RP2005723, NT2RP2005763, NT2RP2005812, NT2RP2005853, NT2RP2005859, NT2RP2005933, NT2RP2005980, NT2RP2006038, NT2RP2006043, NT2RP2006071, NT2RP2006098, NT2RP2006100, NT2RP2006103, NT2RP2006106, NT2RP2006261, NT2RP2006334, NT2RP2006464, NT2RP2006573, NT2RP3000255, NT2RP3000267, NT2RP3000341, NT2RP3000403, NT2RP3000526, NT2RP3000531, NT2RP3000584, NT2RP3000590, NT2RP3000685, NT2RP3000759, NT2RP3000847, NT2RP3000865, NT2RP3000875, NT2RP3000968, NT2RP3000994, NT2RP3001107, NT2RP3001116, NT2RP3001147, NT2RP3001150, NT2RP3001236, NT2RP3001307, NT2RP3001318, NT2RP3001399, NT2RP3001420, NT2RP3001426, NT2RP3001472, NT2RP3001497, NT2RP3001527, NT2RP3001607, NT2RP3001671, NT2RP3001690, NT2RP3001727, NT2RP3001915, NT2RP3001931, NT2RP3001944, NT2RP3001989, NT2RP3002147, NT2RP3002244, NT2RP3002330, NT2RP3002343, NT2RP3002501, NT2RP3002587, NT2RP3002602, NT2RP3002682, NT2RP3002687, NT2RP3002770, NT2RP3002785, NT2RP3002869, NT2RP3002877, NT2RP3002969, NT2RP3003145, NT2RP3003157, NT2RP3003212, NT2RP3003264, NT2RP3003278, NT2RP3003282, NT2RP3003290, NT2RP3003327, NT2RP3003344, NT2RP3003353, NT2RP3003491, NT2RP3003543, NT2RP3003665, NT2RP3003918, NT2RP3003932, NT2RP3004110, NT2RP3004155, NT2RP3004262, NT2RP3004334, NT2RP3004428, NT2RP3004466, NT2RP3004475, NT2RP3004504, NT2RP3004507, NT2RP3004527, NT2RP3004544, NT2RP3004572, NT2RP3004578, NT2RP4000109, NT2RP4000246, NT2RP4000360, NT2RP4000376, NT2RP4000398, NT2RP4000455, NT2RP4000518, NT2RP4000524, NT2RP4000878, NT2RP4000879, NT2RP4000955, NT2RP4000989, NT2RP4000997, NT2RP4001004, NT2RP4001010, NT2RP4001078, NT2RP4001122, NT2RP4001126, NT2RP4001149, NT2RP4001206, NT2RP4001219, NT2RP4001260, NT2RP4001339, NT2RP4001353, NT2RP4001414, NT2RP4001442, NT2RP4001447, NT2RP4001474, NT2RP4001551, NT2RP4001803, NT2RP4001893, NT2RP4001896, NT2RP4001946, NT2RP4001950, NT2RP4001966, NT2RP4002081, NT2RP4002408, NT2RP4002791, NT2RP4002888, NT2RP5003524, NT2RP5003534, OVARC1000013, OVARC1000035, OVARC1000087, OVARC1000113, OVARC1000139, OVARC1000145, OVARC1000209, OVARC1000212, OVARC1000408, OVARC1000427, OVARC1000466, OVARC1000496, OVARC1000533, OVARC1000576, OVARC1000640, OVARC1000649, OVARC1000682, OVARC1000689, OVARC1000771, OVARC1000885, OVARC1000890, OVARC1000936, OVARC1000964, OVARC1001065, OVARC1001068, OVARC1001072, OVARC1001107, OVARC1001113, OVARC1001154, OVARC1001169, OVARC1001176, OVARC1001372, OVARC1001391, OVARC1001453, OVARC1001476, OVARC1001480, OVARC1001547, OVARC1001555, OVARC1001610, OVARC1001711, OVARC1001713, OVARC1001726, OVARC1001766, OVARC1001767, OVARC1001768, OVARC1001805, OVARC1001809, OVARC1001828, OVARC1001846, OVARC1001901, OVARC1001943, OVARC1002138, OVARC1002156, PLACE1000005, PLACE1000007, PLACE1000040, PLACE1000048, PLACE1000133, PLACE1000214, PLACE1000347, PLACE1000374, PLACE1000424, PLACE1000492, PLACE1000547, PLACE1000564, PLACE1000599, PLACE1000653, PLACE1000706, PLACE1000748, PLACE1000749, PLACE1000755, PLACE1000841, PLACE1000849, PLACE1000856, PLACE1000931, PLACE1000987, PLACE1001015, PLACE1001024, PLACE1001054, PLACE1001062, PLACE1001118, PLACE1001168, PLACE1001238, PLACE1001377, PLACE1001383, PLACE1001384, PLACE1001399, PLACE1001440, PLACE1001503, PLACE1001545, PLACE1001611, PLACE1001640, PLACE1001691, PLACE1001705, PLACE1001740, PLACE1001817, PLACE1001844, PLACE1001845, PLACE1001869, PLACE1001897, PLACE1002004, PLACE1002073, PLACE1002140, PLACE1002157, PLACE1002171, PLACE1002205, PLACE1002213, PLACE1002474, PLACE1002500, PLACE1002529, PLACE1002537, PLACE1002598, PLACE1002655, PLACE1002908, PLACE1003045, PLACE1003136, PLACE1003174, PLACE1003258, PLACE1003296, PLACE1003334, PLACE1003342, PLACE1003361, PLACE1003366, PLACE1003369, PLACE1003420, PLACE1003454, PLACE1003553, PLACE1003566, PLACE1003583, PLACE1003669, PLACE1003711, PLACE1003723, PLACE1003738, PLACE1003760, PLACE1003762, PLACE1003771, PLACE1003783, PLACE1003850, PLACE1003858, PLACE1003915, PLACE1004128, PLACE1004161, PLACE1004183, PLACE1004197, PLACE1004302, PLACE1004358, PLACE1004437, PLACE1004460, PLACE1004471, PLACE1004506, PLACE1004518, PLACE1004646, PLACE1004722, PLACE1004793, PLACE1004804, PLACE1004838, PLACE1004868, PLACE1004900, PLACE1004902, PLACE1004969, PLACE1004979, PLACE1005086, PLACE1005162, PLACE1005243, PLACE1005266, PLACE1005313, PLACE1005584, PLACE1005698, PLACE1005727, PLACE1005739, PLACE1005851, PLACE1005925, PLACE1006196, PLACE1006248, PLACE1006262, PLACE1006335, PLACE1006360, PLACE1006385, PLACE1006412, PLACE1006414, PLACE1006445, PLACE1006598, PLACE1006629, PLACE1006640, PLACE1006792, PLACE1006815, PLACE1006901, PLACE1006917, PLACE1006962, PLACE1007021, PLACE1007045, PLACE1007112, PLACE1007226, PLACE1007243, PLACE1007454, PLACE1007547, PLACE1007598, PLACE1007618, PLACE1007645, PLACE1007649, PLACE1007706, PLACE1007725, PLACE1007746, PLACE1007843, PLACE1007877, PLACE1007954, PLACE1007969, PLACE1008002, PLACE1008095, PLACE1008111, PLACE1008132, PLACE1008273, PLACE1008275, PLACE1008331, PLACE1008356, PLACE1008368, PLACE1008402, PLACE1008603, PLACE1008650, PLACE1008696, PLACE1008757, PLACE1008807, PLACE1008867, PLACE1008941, PLACE1009020, PLACE1009039, PLACE1009158, PLACE1009172, PLACE1009190, PLACE1009230, PLACE1009319, PLACE1009338, PLACE1009375, PLACE1009434, PLACE1009613, PLACE1009637, PLACE1009659, PLACE1009763, PLACE1009845, PLACE1009921, PLACE1009971, PLACE1009992, PLACE1010023, PLACE1010053, PLACE1010069, PLACE1010074, PLACE1010181, PLACE1010202, PLACE1010231, PLACE1010270, PLACE1010274, PLACE1010321, PLACE1010329, PLACE1010492, PLACE1010522, PLACE1010616, PLACE1010624, PLACE1010631, PLACE1010786, PLACE1011032, PLACE1011114, PLACE1011221, PLACE1011325, PLACE1011520, PLACE1011635, PLACE1011649, PLACE1011682, PLACE1011875, PLACE1011896, PLACE1011964, PLACE1012031, PLACE2000015, PLACE2000021, PLACE2000047, PLACE2000072, PLACE2000097, PLACE2000136, PLACE2000246, PLACE2000302, PLACE2000379, PLACE2000394, PLACE2000425, PLACE2000427, PLACE2000477, PLACE3000009, PLACE3000070, PLACE3000142, PLACE3000145, PLACE3000148, PLACE3000155, PLACE3000169, PLACE3000208, PLACE3000230, PLACE3000322, PLACE3000331, PLACE3000352, PLACE3000401, PLACE3000413, PLACE3000425, PLACE3000477, PLACE4000009, PLACE4000049, PLACE4000089, PLACE4000100, PLACE4000247, PLACE4000250, PLACE4000252, PLACE4000300, PLACE4000344, PLACE4000367, PLACE4000465, PLACE4000489, PLACE4000638, SKNMC1000013, THYRO1000017, THYRO1000026, THYRO1000034, THYRO1000072, THYRO1000132, THYRO1000173, THYRO1000190, THYRO1000197, THYRO1000221, THYRO1000253, THYRO1000270, THYRO1000279, THYRO1000327, THYRO1000394, THYRO1000438, THYRO1000558, THYRO1000569, THYRO1000585, THYRO1000596, THYRO1000625, THYRO1000637, THYRO1000676, THYRO1000734, THYRO1000777, THYRO1000783, THYRO1000805, THYRO1000843, THYRO1000934, THYRO1001033, THYRO1001347, THYRO1001405, THYRO1001411, THYRO1001534, THYRO1001573, THYRO1001584, THYRO1001602, THYRO1001605, THYRO1001772, THYRO1001854, VESEN1000122, Y79AA1000037, Y79AA1000065, Y79AA1000181, Y79AA1000231, Y79AA1000349, Y79AA1000355, Y79AA1000368, Y79AA1000538, Y79AA1000782, Y79AA1001023, Y79AA1001145, Y79AA1001391, Y79AA1001541, Y79AA1001585, Y79AA1001705, Y79AA1001781, Y79AA1001923, Y79AA1001963, Y79AA1002125, Y79AA1002229, Y79AA1002407, Y79AA1002487.

[0607] These clones are ultraviolet radiation damage-associated clones.

LENGTHY TABLE REFERENCED HERE
US20070105122A1-20070510-T00001
Please refer to the end of the specification for access instructions.

LENGTHY TABLE REFERENCED HERE
US20070105122A1-20070510-T00002
Please refer to the end of the specification for access instructions.

LENGTHY TABLE REFERENCED HERE
US20070105122A1-20070510-T00003
Please refer to the end of the specification for access instructions.

LENGTHY TABLE REFERENCED HERE
US20070105122A1-20070510-T00004
Please refer to the end of the specification for access instructions.

LENGTHY TABLE REFERENCED HERE
US20070105122A1-20070510-T00005
Please refer to the end of the specification for access instructions.

LENGTHY TABLE REFERENCED HERE
US20070105122A1-20070510-T00006
Please refer to the end of the specification for access instructions.

LENGTHY TABLE REFERENCED HERE
US20070105122A1-20070510-T00007
Please refer to the end of the specification for access instructions.

LENGTHY TABLE REFERENCED HERE
US20070105122A1-20070510-T00008
Please refer to the end of the specification for access instructions.

LENGTHY TABLE REFERENCED HERE
US20070105122A1-20070510-T00009
Please refer to the end of the specification for access instructions.

LENGTHY TABLE REFERENCED HERE
US20070105122A1-20070510-T00010
Please refer to the end of the specification for access instructions.

LENGTHY TABLE REFERENCED HERE
US20070105122A1-20070510-T00011
Please refer to the end of the specification for access instructions.

LENGTHY TABLE REFERENCED HERE
US20070105122A1-20070510-T00012
Please refer to the end of the specification for access instructions.

LENGTHY TABLE REFERENCED HERE
US20070105122A1-20070510-T00013
Please refer to the end of the specification for access instructions.

LENGTHY TABLE REFERENCED HERE
US20070105122A1-20070510-T00014
Please refer to the end of the specification for access instructions.

LENGTHY TABLE REFERENCED HERE
US20070105122A1-20070510-T00015
Please refer to the end of the specification for access instructions.

LENGTHY TABLE REFERENCED HERE
US20070105122A1-20070510-T00016
Please refer to the end of the specification for access instructions.

LENGTHY TABLE REFERENCED HERE
US20070105122A1-20070510-T00017
Please refer to the end of the specification for access instructions.

LENGTHY TABLE REFERENCED HERE
US20070105122A1-20070510-T00018
Please refer to the end of the specification for access instructions.

LENGTHY TABLE REFERENCED HERE
US20070105122A1-20070510-T00019
Please refer to the end of the specification for access instructions.

LENGTHY TABLE REFERENCED HERE
US20070105122A1-20070510-T00020
Please refer to the end of the specification for access instructions.

LENGTHY TABLE REFERENCED HERE
US20070105122A1-20070510-T00021
Please refer to the end of the specification for access instructions.

LENGTHY TABLE REFERENCED HERE
US20070105122A1-20070510-T00022
Please refer to the end of the specification for access instructions.

LENGTHY TABLE REFERENCED HERE
US20070105122A1-20070510-T00023
Please refer to the end of the specification for access instructions.

LENGTHY TABLE REFERENCED HERE
US20070105122A1-20070510-T00024
Please refer to the end of the specification for access instructions.

LENGTHY TABLE REFERENCED HERE
US20070105122A1-20070510-T00025
Please refer to the end of the specification for access instructions.

LENGTHY TABLE REFERENCED HERE
US20070105122A1-20070510-T00026
Please refer to the end of the specification for access instructions.

LENGTHY TABLE REFERENCED HERE
US20070105122A1-20070510-T00027
Please refer to the end of the specification for access instructions.

LENGTHY TABLE REFERENCED HERE
US20070105122A1-20070510-T00028
Please refer to the end of the specification for access instructions.

LENGTHY TABLE REFERENCED HERE
US20070105122A1-20070510-T00029
Please refer to the end of the specification for access instructions.

LENGTHY TABLE REFERENCED HERE
US20070105122A1-20070510-T00030
Please refer to the end of the specification for access instructions.

LENGTHY TABLE REFERENCED HERE
US20070105122A1-20070510-T00031
Please refer to the end of the specification for access instructions.

LENGTHY TABLE REFERENCED HERE
US20070105122A1-20070510-T00032
Please refer to the end of the specification for access instructions.

LENGTHY TABLE REFERENCED HERE
US20070105122A1-20070510-T00033
Please refer to the end of the specification for access instructions.

LENGTHY TABLE REFERENCED HERE
US20070105122A1-20070510-T00034
Please refer to the end of the specification for access instructions.

LENGTHY TABLE REFERENCED HERE
US20070105122A1-20070510-T00035
Please refer to the end of the specification for access instructions.

LENGTHY TABLE REFERENCED HERE
US20070105122A1-20070510-T00036
Please refer to the end of the specification for access instructions.

LENGTHY TABLE REFERENCED HERE
US20070105122A1-20070510-T00037
Please refer to the end of the specification for access instructions.

LENGTHY TABLE REFERENCED HERE
US20070105122A1-20070510-T00038
Please refer to the end of the specification for access instructions.

LENGTHY TABLE REFERENCED HERE
US20070105122A1-20070510-T00039
Please refer to the end of the specification for access instructions.

LENGTHY TABLE REFERENCED HERE
US20070105122A1-20070510-T00040
Please refer to the end of the specification for access instructions.

LENGTHY TABLE REFERENCED HERE
US20070105122A1-20070510-T00041
Please refer to the end of the specification for access instructions.

LENGTHY TABLE REFERENCED HERE
US20070105122A1-20070510-T00042
Please refer to the end of the specification for access instructions.

LENGTHY TABLE REFERENCED HERE
US20070105122A1-20070510-T00043
Please refer to the end of the specification for access instructions.

LENGTHY TABLE REFERENCED HERE
US20070105122A1-20070510-T00044
Please refer to the end of the specification for access instructions.

LENGTHY TABLE REFERENCED HERE
US20070105122A1-20070510-T00045
Please refer to the end of the specification for access instructions.

LENGTHY TABLE REFERENCED HERE
US20070105122A1-20070510-T00046
Please refer to the end of the specification for access instructions.

LENGTHY TABLE REFERENCED HERE
US20070105122A1-20070510-T00047
Please refer to the end of the specification for access instructions.

LENGTHY TABLE REFERENCED HERE
US20070105122A1-20070510-T00048
Please refer to the end of the specification for access instructions.

LENGTHY TABLE REFERENCED HERE
US20070105122A1-20070510-T00049
Please refer to the end of the specification for access instructions.

LENGTHY TABLE REFERENCED HERE
US20070105122A1-20070510-T00050
Please refer to the end of the specification for access instructions.

LENGTHY TABLE REFERENCED HERE
US20070105122A1-20070510-T00051
Please refer to the end of the specification for access instructions.

LENGTHY TABLE REFERENCED HERE
US20070105122A1-20070510-T00052
Please refer to the end of the specification for access instructions.

LENGTHY TABLE REFERENCED HERE
US20070105122A1-20070510-T00053
Please refer to the end of the specification for access instructions.

LENGTHY TABLE REFERENCED HERE
US20070105122A1-20070510-T00054
Please refer to the end of the specification for access instructions.

LENGTHY TABLE REFERENCED HERE
US20070105122A1-20070510-T00055
Please refer to the end of the specification for access instructions.

LENGTHY TABLE REFERENCED HERE
US20070105122A1-20070510-T00056
Please refer to the end of the specification for access instructions.

LENGTHY TABLE REFERENCED HERE
US20070105122A1-20070510-T00057
Please refer to the end of the specification for access instructions.

LENGTHY TABLE REFERENCED HERE
US20070105122A1-20070510-T00058
Please refer to the end of the specification for access instructions.

LENGTHY TABLE REFERENCED HERE
US20070105122A1-20070510-T00059
Please refer to the end of the specification for access instructions.

LENGTHY TABLE REFERENCED HERE
US20070105122A1-20070510-T00060
Please refer to the end of the specification for access instructions.

LENGTHY TABLE REFERENCED HERE
US20070105122A1-20070510-T00061
Please refer to the end of the specification for access instructions.

LENGTHY TABLE REFERENCED HERE
US20070105122A1-20070510-T00062
Please refer to the end of the specification for access instructions.

LENGTHY TABLE REFERENCED HERE
US20070105122A1-20070510-T00063
Please refer to the end of the specification for access instructions.

LENGTHY TABLE REFERENCED HERE
US20070105122A1-20070510-T00064
Please refer to the end of the specification for access instructions.

LENGTHY TABLE REFERENCED HERE
US20070105122A1-20070510-T00065
Please refer to the end of the specification for access instructions.

LENGTHY TABLE REFERENCED HERE
US20070105122A1-20070510-T00066
Please refer to the end of the specification for access instructions.

LENGTHY TABLE REFERENCED HERE
US20070105122A1-20070510-T00067
Please refer to the end of the specification for access instructions.

LENGTHY TABLE REFERENCED HERE
US20070105122A1-20070510-T00068
Please refer to the end of the specification for access instructions.

LENGTHY TABLE REFERENCED HERE
US20070105122A1-20070510-T00069
Please refer to the end of the specification for access instructions.

LENGTHY TABLE REFERENCED HERE
US20070105122A1-20070510-T00070
Please refer to the end of the specification for access instructions.

LENGTHY TABLE REFERENCED HERE
US20070105122A1-20070510-T00071
Please refer to the end of the specification for access instructions.

LENGTHY TABLE REFERENCED HERE
US20070105122A1-20070510-T00072
Please refer to the end of the specification for access instructions.

LENGTHY TABLE REFERENCED HERE
US20070105122A1-20070510-T00073
Please refer to the end of the specification for access instructions.

LENGTHY TABLE REFERENCED HERE
US20070105122A1-20070510-T00074
Please refer to the end of the specification for access instructions.

LENGTHY TABLE REFERENCED HERE
US20070105122A1-20070510-T00075
Please refer to the end of the specification for access instructions.

LENGTHY TABLE REFERENCED HERE
US20070105122A1-20070510-T00076
Please refer to the end of the specification for access instructions.

LENGTHY TABLE REFERENCED HERE
US20070105122A1-20070510-T00077
Please refer to the end of the specification for access instructions.

LENGTHY TABLE REFERENCED HERE
US20070105122A1-20070510-T00078
Please refer to the end of the specification for access instructions.

LENGTHY TABLE REFERENCED HERE
US20070105122A1-20070510-T00079
Please refer to the end of the specification for access instructions.

LENGTHY TABLE REFERENCED HERE
US20070105122A1-20070510-T00080
Please refer to the end of the specification for access instructions.

LENGTHY TABLE REFERENCED HERE
US20070105122A1-20070510-T00081
Please refer to the end of the specification for access instructions.

LENGTHY TABLE REFERENCED HERE
US20070105122A1-20070510-T00082
Please refer to the end of the specification for access instructions.

LENGTHY TABLE REFERENCED HERE
US20070105122A1-20070510-T00083
Please refer to the end of the specification for access instructions.

LENGTHY TABLE REFERENCED HERE
US20070105122A1-20070510-T00084
Please refer to the end of the specification for access instructions.

LENGTHY TABLE REFERENCED HERE
US20070105122A1-20070510-T00085
Please refer to the end of the specification for access instructions.

LENGTHY TABLE REFERENCED HERE
US20070105122A1-20070510-T00086
Please refer to the end of the specification for access instructions.

LENGTHY TABLE REFERENCED HERE
US20070105122A1-20070510-T00087
Please refer to the end of the specification for access instructions.

LENGTHY TABLE REFERENCED HERE
US20070105122A1-20070510-T00088
Please refer to the end of the specification for access instructions.

LENGTHY TABLE REFERENCED HERE
US20070105122A1-20070510-T00089
Please refer to the end of the specification for access instructions.

LENGTHY TABLE REFERENCED HERE
US20070105122A1-20070510-T00090
Please refer to the end of the specification for access instructions.

LENGTHY TABLE REFERENCED HERE
US20070105122A1-20070510-T00091
Please refer to the end of the specification for access instructions.

LENGTHY TABLE REFERENCED HERE
US20070105122A1-20070510-T00092
Please refer to the end of the specification for access instructions.

LENGTHY TABLE REFERENCED HERE
US20070105122A1-20070510-T00093
Please refer to the end of the specification for access instructions.

LENGTHY TABLE REFERENCED HERE
US20070105122A1-20070510-T00094
Please refer to the end of the specification for access instructions.

LENGTHY TABLE REFERENCED HERE
US20070105122A1-20070510-T00095
Please refer to the end of the specification for access instructions.

LENGTHY TABLE REFERENCED HERE
US20070105122A1-20070510-T00096
Please refer to the end of the specification for access instructions.

LENGTHY TABLE REFERENCED HERE
US20070105122A1-20070510-T00097
Please refer to the end of the specification for access instructions.

LENGTHY TABLE REFERENCED HERE
US20070105122A1-20070510-T00098
Please refer to the end of the specification for access instructions.

LENGTHY TABLE REFERENCED HERE
US20070105122A1-20070510-T00099
Please refer to the end of the specification for access instructions.

LENGTHY TABLE REFERENCED HERE
US20070105122A1-20070510-T00100
Please refer to the end of the specification for access instructions.

LENGTHY TABLE REFERENCED HERE
US20070105122A1-20070510-T00101
Please refer to the end of the specification for access instructions.

LENGTHY TABLE REFERENCED HERE
US20070105122A1-20070510-T00102
Please refer to the end of the specification for access instructions.

LENGTHY TABLE REFERENCED HERE
US20070105122A1-20070510-T00103
Please refer to the end of the specification for access instructions.

LENGTHY TABLE REFERENCED HERE
US20070105122A1-20070510-T00104
Please refer to the end of the specification for access instructions.

LENGTHY TABLE REFERENCED HERE
US20070105122A1-20070510-T00105
Please refer to the end of the specification for access instructions.

LENGTHY TABLE REFERENCED HERE
US20070105122A1-20070510-T00106
Please refer to the end of the specification for access instructions.

LENGTHY TABLE REFERENCED HERE
US20070105122A1-20070510-T00107
Please refer to the end of the specification for access instructions.

LENGTHY TABLE REFERENCED HERE
US20070105122A1-20070510-T00108
Please refer to the end of the specification for access instructions.

LENGTHY TABLE REFERENCED HERE
US20070105122A1-20070510-T00109
Please refer to the end of the specification for access instructions.

LENGTHY TABLE REFERENCED HERE
US20070105122A1-20070510-T00110
Please refer to the end of the specification for access instructions.

LENGTHY TABLE REFERENCED HERE
US20070105122A1-20070510-T00111
Please refer to the end of the specification for access instructions.

LENGTHY TABLE REFERENCED HERE
US20070105122A1-20070510-T00112
Please refer to the end of the specification for access instructions.

LENGTHY TABLE REFERENCED HERE
US20070105122A1-20070510-T00113
Please refer to the end of the specification for access instructions.

LENGTHY TABLE REFERENCED HERE
US20070105122A1-20070510-T00114
Please refer to the end of the specification for access instructions.

LENGTHY TABLE REFERENCED HERE
US20070105122A1-20070510-T00115
Please refer to the end of the specification for access instructions.

LENGTHY TABLE REFERENCED HERE
US20070105122A1-20070510-T00116
Please refer to the end of the specification for access instructions.

LENGTHY TABLE REFERENCED HERE
US20070105122A1-20070510-T00117
Please refer to the end of the specification for access instructions.

LENGTHY TABLE REFERENCED HERE
US20070105122A1-20070510-T00118
Please refer to the end of the specification for access instructions.

LENGTHY TABLE REFERENCED HERE
US20070105122A1-20070510-T00119
Please refer to the end of the specification for access instructions.

LENGTHY TABLE REFERENCED HERE
US20070105122A1-20070510-T00120
Please refer to the end of the specification for access instructions.

LENGTHY TABLE REFERENCED HERE
US20070105122A1-20070510-T00121
Please refer to the end of the specification for access instructions.

LENGTHY TABLE REFERENCED HERE
US20070105122A1-20070510-T00122
Please refer to the end of the specification for access instructions.

LENGTHY TABLE REFERENCED HERE
US20070105122A1-20070510-T00123
Please refer to the end of the specification for access instructions.

LENGTHY TABLE REFERENCED HERE
US20070105122A1-20070510-T00124
Please refer to the end of the specification for access instructions.

LENGTHY TABLE REFERENCED HERE
US20070105122A1-20070510-T00125
Please refer to the end of the specification for access instructions.

LENGTHY TABLE REFERENCED HERE
US20070105122A1-20070510-T00126
Please refer to the end of the specification for access instructions.

LENGTHY TABLE REFERENCED HERE
US20070105122A1-20070510-T00127
Please refer to the end of the specification for access instructions.

LENGTHY TABLE REFERENCED HERE
US20070105122A1-20070510-T00128
Please refer to the end of the specification for access instructions.

LENGTHY TABLE REFERENCED HERE
US20070105122A1-20070510-T00129
Please refer to the end of the specification for access instructions.

LENGTHY TABLE REFERENCED HERE
US20070105122A1-20070510-T00130
Please refer to the end of the specification for access instructions.

LENGTHY TABLE REFERENCED HERE
US20070105122A1-20070510-T00131
Please refer to the end of the specification for access instructions.

LENGTHY TABLE REFERENCED HERE
US20070105122A1-20070510-T00132
Please refer to the end of the specification for access instructions.

LENGTHY TABLE REFERENCED HERE
US20070105122A1-20070510-T00133
Please refer to the end of the specification for access instructions.

LENGTHY TABLE REFERENCED HERE
US20070105122A1-20070510-T00134
Please refer to the end of the specification for access instructions.

LENGTHY TABLE REFERENCED HERE
US20070105122A1-20070510-T00135
Please refer to the end of the specification for access instructions.

LENGTHY TABLE REFERENCED HERE
US20070105122A1-20070510-T00136
Please refer to the end of the specification for access instructions.

LENGTHY TABLE REFERENCED HERE
US20070105122A1-20070510-T00137
Please refer to the end of the specification for access instructions.

LENGTHY TABLE REFERENCED HERE
US20070105122A1-20070510-T00138
Please refer to the end of the specification for access instructions.

LENGTHY TABLE REFERENCED HERE
US20070105122A1-20070510-T00139
Please refer to the end of the specification for access instructions.

LENGTHY TABLE REFERENCED HERE
US20070105122A1-20070510-T00140
Please refer to the end of the specification for access instructions.

LENGTHY TABLE REFERENCED HERE
US20070105122A1-20070510-T00141
Please refer to the end of the specification for access instructions.

LENGTHY TABLE REFERENCED HERE
US20070105122A1-20070510-T00142
Please refer to the end of the specification for access instructions.

LENGTHY TABLE REFERENCED HERE
US20070105122A1-20070510-T00143
Please refer to the end of the specification for access instructions.

LENGTHY TABLE REFERENCED HERE
US20070105122A1-20070510-T00144
Please refer to the end of the specification for access instructions.

LENGTHY TABLE REFERENCED HERE
US20070105122A1-20070510-T00145
Please refer to the end of the specification for access instructions.

LENGTHY TABLE REFERENCED HERE
US20070105122A1-20070510-T00146
Please refer to the end of the specification for access instructions.

LENGTHY TABLE REFERENCED HERE
US20070105122A1-20070510-T00147
Please refer to the end of the specification for access instructions.

LENGTHY TABLE REFERENCED HERE
US20070105122A1-20070510-T00148
Please refer to the end of the specification for access instructions.

LENGTHY TABLE REFERENCED HERE
US20070105122A1-20070510-T00149
Please refer to the end of the specification for access instructions.

LENGTHY TABLE REFERENCED HERE
US20070105122A1-20070510-T00150
Please refer to the end of the specification for access instructions.

LENGTHY TABLE REFERENCED HERE
US20070105122A1-20070510-T00151
Please refer to the end of the specification for access instructions.

LENGTHY TABLE REFERENCED HERE
US20070105122A1-20070510-T00152
Please refer to the end of the specification for access instructions.

LENGTHY TABLE REFERENCED HERE
US20070105122A1-20070510-T00153
Please refer to the end of the specification for access instructions.

LENGTHY TABLE REFERENCED HERE
US20070105122A1-20070510-T00154
Please refer to the end of the specification for access instructions.

LENGTHY TABLE REFERENCED HERE
US20070105122A1-20070510-T00155
Please refer to the end of the specification for access instructions.

LENGTHY TABLE REFERENCED HERE
US20070105122A1-20070510-T00156
Please refer to the end of the specification for access instructions.

LENGTHY TABLE REFERENCED HERE
US20070105122A1-20070510-T00157
Please refer to the end of the specification for access instructions.

LENGTHY TABLE REFERENCED HERE
US20070105122A1-20070510-T00158
Please refer to the end of the specification for access instructions.

LENGTHY TABLE REFERENCED HERE
US20070105122A1-20070510-T00159
Please refer to the end of the specification for access instructions.

LENGTHY TABLE REFERENCED HERE
US20070105122A1-20070510-T00160
Please refer to the end of the specification for access instructions.

LENGTHY TABLE REFERENCED HERE
US20070105122A1-20070510-T00161
Please refer to the end of the specification for access instructions.

LENGTHY TABLE REFERENCED HERE
US20070105122A1-20070510-T00162
Please refer to the end of the specification for access instructions.

LENGTHY TABLE REFERENCED HERE
US20070105122A1-20070510-T00163
Please refer to the end of the specification for access instructions.

LENGTHY TABLE REFERENCED HERE
US20070105122A1-20070510-T00164
Please refer to the end of the specification for access instructions.

LENGTHY TABLE REFERENCED HERE
US20070105122A1-20070510-T00165
Please refer to the end of the specification for access instructions.

LENGTHY TABLE REFERENCED HERE
US20070105122A1-20070510-T00166
Please refer to the end of the specification for access instructions.

LENGTHY TABLE REFERENCED HERE
US20070105122A1-20070510-T00167
Please refer to the end of the specification for access instructions.

LENGTHY TABLE REFERENCED HERE
US20070105122A1-20070510-T00168
Please refer to the end of the specification for access instructions.

LENGTHY TABLE REFERENCED HERE
US20070105122A1-20070510-T00169
Please refer to the end of the specification for access instructions.

LENGTHY TABLE REFERENCED HERE
US20070105122A1-20070510-T00170
Please refer to the end of the specification for access instructions.

LENGTHY TABLE REFERENCED HERE
US20070105122A1-20070510-T00171
Please refer to the end of the specification for access instructions.

LENGTHY TABLE REFERENCED HERE
US20070105122A1-20070510-T00172
Please refer to the end of the specification for access instructions.

LENGTHY TABLE REFERENCED HERE
US20070105122A1-20070510-T00173
Please refer to the end of the specification for access instructions.

LENGTHY TABLE REFERENCED HERE
US20070105122A1-20070510-T00174
Please refer to the end of the specification for access instructions.

LENGTHY TABLE REFERENCED HERE
US20070105122A1-20070510-T00175
Please refer to the end of the specification for access instructions.

LENGTHY TABLE REFERENCED HERE
US20070105122A1-20070510-T00176
Please refer to the end of the specification for access instructions.

LENGTHY TABLE REFERENCED HERE
US20070105122A1-20070510-T00177
Please refer to the end of the specification for access instructions.

LENGTHY TABLE REFERENCED HERE
US20070105122A1-20070510-T00178
Please refer to the end of the specification for access instructions.

LENGTHY TABLE REFERENCED HERE
US20070105122A1-20070510-T00179
Please refer to the end of the specification for access instructions.

LENGTHY TABLE REFERENCED HERE
US20070105122A1-20070510-T00180
Please refer to the end of the specification for access instructions.

LENGTHY TABLE REFERENCED HERE
US20070105122A1-20070510-T00181
Please refer to the end of the specification for access instructions.

LENGTHY TABLE REFERENCED HERE
US20070105122A1-20070510-T00182
Please refer to the end of the specification for access instructions.

LENGTHY TABLE REFERENCED HERE
US20070105122A1-20070510-T00183
Please refer to the end of the specification for access instructions.

LENGTHY TABLE REFERENCED HERE
US20070105122A1-20070510-T00184
Please refer to the end of the specification for access instructions.

LENGTHY TABLE REFERENCED HERE
US20070105122A1-20070510-T00185
Please refer to the end of the specification for access instructions.

LENGTHY TABLE REFERENCED HERE
US20070105122A1-20070510-T00186
Please refer to the end of the specification for access instructions.

LENGTHY TABLE REFERENCED HERE
US20070105122A1-20070510-T00187
Please refer to the end of the specification for access instructions.

LENGTHY TABLE REFERENCED HERE
US20070105122A1-20070510-T00188
Please refer to the end of the specification for access instructions.

LENGTHY TABLE REFERENCED HERE
US20070105122A1-20070510-T00189
Please refer to the end of the specification for access instructions.

LENGTHY TABLE REFERENCED HERE
US20070105122A1-20070510-T00190
Please refer to the end of the specification for access instructions.

LENGTHY TABLE REFERENCED HERE
US20070105122A1-20070510-T00191
Please refer to the end of the specification for access instructions.

LENGTHY TABLE REFERENCED HERE
US20070105122A1-20070510-T00192
Please refer to the end of the specification for access instructions.

LENGTHY TABLE REFERENCED HERE
US20070105122A1-20070510-T00193
Please refer to the end of the specification for access instructions.

LENGTHY TABLE REFERENCED HERE
US20070105122A1-20070510-T00194
Please refer to the end of the specification for access instructions.

LENGTHY TABLE REFERENCED HERE
US20070105122A1-20070510-T00195
Please refer to the end of the specification for access instructions.

LENGTHY TABLE REFERENCED HERE
US20070105122A1-20070510-T00196
Please refer to the end of the specification for access instructions.

LENGTHY TABLE REFERENCED HERE
US20070105122A1-20070510-T00197
Please refer to the end of the specification for access instructions.

LENGTHY TABLE REFERENCED HERE
US20070105122A1-20070510-T00198
Please refer to the end of the specification for access instructions.

LENGTHY TABLE REFERENCED HERE
US20070105122A1-20070510-T00199
Please refer to the end of the specification for access instructions.

LENGTHY TABLE REFERENCED HERE
US20070105122A1-20070510-T00200
Please refer to the end of the specification for access instructions.

LENGTHY TABLE REFERENCED HERE
US20070105122A1-20070510-T00201
Please refer to the end of the specification for access instructions.

LENGTHY TABLE REFERENCED HERE
US20070105122A1-20070510-T00202
Please refer to the end of the specification for access instructions.

LENGTHY TABLE REFERENCED HERE
US20070105122A1-20070510-T00203
Please refer to the end of the specification for access instructions.

LENGTHY TABLE REFERENCED HERE
US20070105122A1-20070510-T00204
Please refer to the end of the specification for access instructions.

LENGTHY TABLE REFERENCED HERE
US20070105122A1-20070510-T00205
Please refer to the end of the specification for access instructions.

LENGTHY TABLE REFERENCED HERE
US20070105122A1-20070510-T00206
Please refer to the end of the specification for access instructions.

LENGTHY TABLE REFERENCED HERE
US20070105122A1-20070510-T00207
Please refer to the end of the specification for access instructions.

LENGTHY TABLE REFERENCED HERE
US20070105122A1-20070510-T00208
Please refer to the end of the specification for access instructions.

LENGTHY TABLE REFERENCED HERE
US20070105122A1-20070510-T00209
Please refer to the end of the specification for access instructions.

LENGTHY TABLE REFERENCED HERE
US20070105122A1-20070510-T00210
Please refer to the end of the specification for access instructions.

LENGTHY TABLE REFERENCED HERE
US20070105122A1-20070510-T00211
Please refer to the end of the specification for access instructions.

LENGTHY TABLE REFERENCED HERE
US20070105122A1-20070510-T00212
Please refer to the end of the specification for access instructions.

LENGTHY TABLE REFERENCED HERE
US20070105122A1-20070510-T00213
Please refer to the end of the specification for access instructions.

LENGTHY TABLE REFERENCED HERE
US20070105122A1-20070510-T00214
Please refer to the end of the specification for access instructions.

LENGTHY TABLE REFERENCED HERE
US20070105122A1-20070510-T00215
Please refer to the end of the specification for access instructions.

LENGTHY TABLE REFERENCED HERE
US20070105122A1-20070510-T00216
Please refer to the end of the specification for access instructions.

LENGTHY TABLE REFERENCED HERE
US20070105122A1-20070510-T00217
Please refer to the end of the specification for access instructions.

LENGTHY TABLE REFERENCED HERE
US20070105122A1-20070510-T00218
Please refer to the end of the specification for access instructions.

LENGTHY TABLE REFERENCED HERE
US20070105122A1-20070510-T00219
Please refer to the end of the specification for access instructions.

LENGTHY TABLE REFERENCED HERE
US20070105122A1-20070510-T00220
Please refer to the end of the specification for access instructions.

LENGTHY TABLE REFERENCED HERE
US20070105122A1-20070510-T00221
Please refer to the end of the specification for access instructions.

LENGTHY TABLE REFERENCED HERE
US20070105122A1-20070510-T00222
Please refer to the end of the specification for access instructions.

LENGTHY TABLE REFERENCED HERE
US20070105122A1-20070510-T00223
Please refer to the end of the specification for access instructions.

LENGTHY TABLE REFERENCED HERE
US20070105122A1-20070510-T00224
Please refer to the end of the specification for access instructions.

LENGTHY TABLE REFERENCED HERE
US20070105122A1-20070510-T00225
Please refer to the end of the specification for access instructions.

LENGTHY TABLE REFERENCED HERE
US20070105122A1-20070510-T00226
Please refer to the end of the specification for access instructions.

LENGTHY TABLE REFERENCED HERE
US20070105122A1-20070510-T00227
Please refer to the end of the specification for access instructions.

LENGTHY TABLE REFERENCED HERE
US20070105122A1-20070510-T00228
Please refer to the end of the specification for access instructions.

LENGTHY TABLE REFERENCED HERE
US20070105122A1-20070510-T00229
Please refer to the end of the specification for access instructions.

LENGTHY TABLE REFERENCED HERE
US20070105122A1-20070510-T00230
Please refer to the end of the specification for access instructions.

LENGTHY TABLE REFERENCED HERE
US20070105122A1-20070510-T00231
Please refer to the end of the specification for access instructions.

LENGTHY TABLE REFERENCED HERE
US20070105122A1-20070510-T00232
Please refer to the end of the specification for access instructions.

LENGTHY TABLE REFERENCED HERE
US20070105122A1-20070510-T00233
Please refer to the end of the specification for access instructions.

LENGTHY TABLE REFERENCED HERE
US20070105122A1-20070510-T00234
Please refer to the end of the specification for access instructions.

LENGTHY TABLE REFERENCED HERE
US20070105122A1-20070510-T00235
Please refer to the end of the specification for access instructions.

LENGTHY TABLE REFERENCED HERE
US20070105122A1-20070510-T00236
Please refer to the end of the specification for access instructions.

LENGTHY TABLE REFERENCED HERE
US20070105122A1-20070510-T00237
Please refer to the end of the specification for access instructions.

LENGTHY TABLE REFERENCED HERE
US20070105122A1-20070510-T00238
Please refer to the end of the specification for access instructions.

LENGTHY TABLE REFERENCED HERE
US20070105122A1-20070510-T00239
Please refer to the end of the specification for access instructions.

LENGTHY TABLE REFERENCED HERE
US20070105122A1-20070510-T00240
Please refer to the end of the specification for access instructions.

LENGTHY TABLE REFERENCED HERE
US20070105122A1-20070510-T00241
Please refer to the end of the specification for access instructions.

LENGTHY TABLE REFERENCED HERE
US20070105122A1-20070510-T00242
Please refer to the end of the specification for access instructions.

LENGTHY TABLE REFERENCED HERE
US20070105122A1-20070510-T00243
Please refer to the end of the specification for access instructions.

LENGTHY TABLE REFERENCED HERE
US20070105122A1-20070510-T00244
Please refer to the end of the specification for access instructions.

LENGTHY TABLE REFERENCED HERE
US20070105122A1-20070510-T00245
Please refer to the end of the specification for access instructions.

LENGTHY TABLE REFERENCED HERE
US20070105122A1-20070510-T00246
Please refer to the end of the specification for access instructions.

LENGTHY TABLE REFERENCED HERE
US20070105122A1-20070510-T00247
Please refer to the end of the specification for access instructions.

LENGTHY TABLE REFERENCED HERE
US20070105122A1-20070510-T00248
Please refer to the end of the specification for access instructions.

LENGTHY TABLE REFERENCED HERE
US20070105122A1-20070510-T00249
Please refer to the end of the specification for access instructions.

LENGTHY TABLE REFERENCED HERE
US20070105122A1-20070510-T00250
Please refer to the end of the specification for access instructions.

LENGTHY TABLE REFERENCED HERE
US20070105122A1-20070510-T00251
Please refer to the end of the specification for access instructions.

LENGTHY TABLE REFERENCED HERE
US20070105122A1-20070510-T00252
Please refer to the end of the specification for access instructions.

LENGTHY TABLE REFERENCED HERE
US20070105122A1-20070510-T00253
Please refer to the end of the specification for access instructions.

LENGTHY TABLE REFERENCED HERE
US20070105122A1-20070510-T00254
Please refer to the end of the specification for access instructions.

LENGTHY TABLE REFERENCED HERE
US20070105122A1-20070510-T00255
Please refer to the end of the specification for access instructions.

LENGTHY TABLE REFERENCED HERE
US20070105122A1-20070510-T00256
Please refer to the end of the specification for access instructions.

LENGTHY TABLE REFERENCED HERE
US20070105122A1-20070510-T00257
Please refer to the end of the specification for access instructions.

LENGTHY TABLE REFERENCED HERE
US20070105122A1-20070510-T00258
Please refer to the end of the specification for access instructions.

LENGTHY TABLE REFERENCED HERE
US20070105122A1-20070510-T00259
Please refer to the end of the specification for access instructions.

LENGTHY TABLE REFERENCED HERE
US20070105122A1-20070510-T00260
Please refer to the end of the specification for access instructions.

LENGTHY TABLE REFERENCED HERE
US20070105122A1-20070510-T00261
Please refer to the end of the specification for access instructions.

LENGTHY TABLE REFERENCED HERE
US20070105122A1-20070510-T00262
Please refer to the end of the specification for access instructions.

LENGTHY TABLE REFERENCED HERE
US20070105122A1-20070510-T00263
Please refer to the end of the specification for access instructions.

LENGTHY TABLE REFERENCED HERE
US20070105122A1-20070510-T00264
Please refer to the end of the specification for access instructions.

LENGTHY TABLE REFERENCED HERE
US20070105122A1-20070510-T00265
Please refer to the end of the specification for access instructions.

LENGTHY TABLE REFERENCED HERE
US20070105122A1-20070510-T00266
Please refer to the end of the specification for access instructions.

LENGTHY TABLE REFERENCED HERE
US20070105122A1-20070510-T00267
Please refer to the end of the specification for access instructions.

LENGTHY TABLE REFERENCED HERE
US20070105122A1-20070510-T00268
Please refer to the end of the specification for access instructions.

LENGTHY TABLE REFERENCED HERE
US20070105122A1-20070510-T00269
Please refer to the end of the specification for access instructions.

LENGTHY TABLE REFERENCED HERE
US20070105122A1-20070510-T00270
Please refer to the end of the specification for access instructions.

LENGTHY TABLE REFERENCED HERE
US20070105122A1-20070510-T00271
Please refer to the end of the specification for access instructions.

LENGTHY TABLE REFERENCED HERE
US20070105122A1-20070510-T00272
Please refer to the end of the specification for access instructions.

LENGTHY TABLE REFERENCED HERE
US20070105122A1-20070510-T00273
Please refer to the end of the specification for access instructions.

LENGTHY TABLE REFERENCED HERE
US20070105122A1-20070510-T00274
Please refer to the end of the specification for access instructions.

LENGTHY TABLE REFERENCED HERE
US20070105122A1-20070510-T00275
Please refer to the end of the specification for access instructions.

LENGTHY TABLE REFERENCED HERE
US20070105122A1-20070510-T00276
Please refer to the end of the specification for access instructions.

LENGTHY TABLE REFERENCED HERE
US20070105122A1-20070510-T00277
Please refer to the end of the specification for access instructions.

LENGTHY TABLE REFERENCED HERE
US20070105122A1-20070510-T00278
Please refer to the end of the specification for access instructions.

LENGTHY TABLE REFERENCED HERE
US20070105122A1-20070510-T00279
Please refer to the end of the specification for access instructions.

LENGTHY TABLE REFERENCED HERE
US20070105122A1-20070510-T00280
Please refer to the end of the specification for access instructions.

LENGTHY TABLE REFERENCED HERE
US20070105122A1-20070510-T00281
Please refer to the end of the specification for access instructions.

LENGTHY TABLE REFERENCED HERE
US20070105122A1-20070510-T00282
Please refer to the end of the specification for access instructions.

LENGTHY TABLE REFERENCED HERE
US20070105122A1-20070510-T00283
Please refer to the end of the specification for access instructions.

LENGTHY TABLE REFERENCED HERE
US20070105122A1-20070510-T00284
Please refer to the end of the specification for access instructions.

LENGTHY TABLE REFERENCED HERE
US20070105122A1-20070510-T00285
Please refer to the end of the specification for access instructions.

LENGTHY TABLE REFERENCED HERE
US20070105122A1-20070510-T00286
Please refer to the end of the specification for access instructions.

LENGTHY TABLE REFERENCED HERE
US20070105122A1-20070510-T00287
Please refer to the end of the specification for access instructions.

LENGTHY TABLE REFERENCED HERE
US20070105122A1-20070510-T00288
Please refer to the end of the specification for access instructions.

LENGTHY TABLE REFERENCED HERE
US20070105122A1-20070510-T00289
Please refer to the end of the specification for access instructions.

LENGTHY TABLE REFERENCED HERE
US20070105122A1-20070510-T00290
Please refer to the end of the specification for access instructions.

LENGTHY TABLE REFERENCED HERE
US20070105122A1-20070510-T00291
Please refer to the end of the specification for access instructions.

LENGTHY TABLE REFERENCED HERE
US20070105122A1-20070510-T00292
Please refer to the end of the specification for access instructions.

LENGTHY TABLE REFERENCED HERE
US20070105122A1-20070510-T00293
Please refer to the end of the specification for access instructions.

LENGTHY TABLE REFERENCED HERE
US20070105122A1-20070510-T00294
Please refer to the end of the specification for access instructions.

LENGTHY TABLE REFERENCED HERE
US20070105122A1-20070510-T00295
Please refer to the end of the specification for access instructions.

LENGTHY TABLE REFERENCED HERE
US20070105122A1-20070510-T00296
Please refer to the end of the specification for access instructions.

LENGTHY TABLE REFERENCED HERE
US20070105122A1-20070510-T00297
Please refer to the end of the specification for access instructions.

LENGTHY TABLE REFERENCED HERE
US20070105122A1-20070510-T00298
Please refer to the end of the specification for access instructions.

LENGTHY TABLE REFERENCED HERE
US20070105122A1-20070510-T00299
Please refer to the end of the specification for access instructions.

LENGTHY TABLE REFERENCED HERE
US20070105122A1-20070510-T00300
Please refer to the end of the specification for access instructions.

LENGTHY TABLE REFERENCED HERE
US20070105122A1-20070510-T00301
Please refer to the end of the specification for access instructions.

LENGTHY TABLE REFERENCED HERE
US20070105122A1-20070510-T00302
Please refer to the end of the specification for access instructions.

LENGTHY TABLE REFERENCED HERE
US20070105122A1-20070510-T00303
Please refer to the end of the specification for access instructions.

LENGTHY TABLE REFERENCED HERE
US20070105122A1-20070510-T00304
Please refer to the end of the specification for access instructions.

LENGTHY TABLE REFERENCED HERE
US20070105122A1-20070510-T00305
Please refer to the end of the specification for access instructions.

LENGTHY TABLE REFERENCED HERE
US20070105122A1-20070510-T00306
Please refer to the end of the specification for access instructions.

LENGTHY TABLE REFERENCED HERE
US20070105122A1-20070510-T00307
Please refer to the end of the specification for access instructions.

LENGTHY TABLE REFERENCED HERE
US20070105122A1-20070510-T00308
Please refer to the end of the specification for access instructions.

LENGTHY TABLE REFERENCED HERE
US20070105122A1-20070510-T00309
Please refer to the end of the specification for access instructions.

LENGTHY TABLE REFERENCED HERE
US20070105122A1-20070510-T00310
Please refer to the end of the specification for access instructions.

LENGTHY TABLE REFERENCED HERE
US20070105122A1-20070510-T00311
Please refer to the end of the specification for access instructions.

LENGTHY TABLE REFERENCED HERE
US20070105122A1-20070510-T00312
Please refer to the end of the specification for access instructions.

LENGTHY TABLE REFERENCED HERE
US20070105122A1-20070510-T00313
Please refer to the end of the specification for access instructions.

LENGTHY TABLE REFERENCED HERE
US20070105122A1-20070510-T00314
Please refer to the end of the specification for access instructions.

LENGTHY TABLE REFERENCED HERE
US20070105122A1-20070510-T00315
Please refer to the end of the specification for access instructions.

LENGTHY TABLE REFERENCED HERE
US20070105122A1-20070510-T00316
Please refer to the end of the specification for access instructions.

LENGTHY TABLE REFERENCED HERE
US20070105122A1-20070510-T00317
Please refer to the end of the specification for access instructions.

LENGTHY TABLE REFERENCED HERE
US20070105122A1-20070510-T00318
Please refer to the end of the specification for access instructions.

LENGTHY TABLE REFERENCED HERE
US20070105122A1-20070510-T00319
Please refer to the end of the specification for access instructions.

LENGTHY TABLE REFERENCED HERE
US20070105122A1-20070510-T00320
Please refer to the end of the specification for access instructions.

LENGTHY TABLE REFERENCED HERE
US20070105122A1-20070510-T00321
Please refer to the end of the specification for access instructions.

LENGTHY TABLE REFERENCED HERE
US20070105122A1-20070510-T00322
Please refer to the end of the specification for access instructions.

LENGTHY TABLE REFERENCED HERE
US20070105122A1-20070510-T00323
Please refer to the end of the specification for access instructions.

LENGTHY TABLE REFERENCED HERE
US20070105122A1-20070510-T00324
Please refer to the end of the specification for access instructions.

LENGTHY TABLE REFERENCED HERE
US20070105122A1-20070510-T00325
Please refer to the end of the specification for access instructions.

LENGTHY TABLE REFERENCED HERE
US20070105122A1-20070510-T00326
Please refer to the end of the specification for access instructions.

LENGTHY TABLE REFERENCED HERE
US20070105122A1-20070510-T00327
Please refer to the end of the specification for access instructions.

LENGTHY TABLE REFERENCED HERE
US20070105122A1-20070510-T00328
Please refer to the end of the specification for access instructions.

LENGTHY TABLE REFERENCED HERE
US20070105122A1-20070510-T00329
Please refer to the end of the specification for access instructions.

LENGTHY TABLE REFERENCED HERE
US20070105122A1-20070510-T00330
Please refer to the end of the specification for access instructions.

LENGTHY TABLE REFERENCED HERE
US20070105122A1-20070510-T00331
Please refer to the end of the specification for access instructions.

LENGTHY TABLE REFERENCED HERE
US20070105122A1-20070510-T00332
Please refer to the end of the specification for access instructions.

LENGTHY TABLE REFERENCED HERE
US20070105122A1-20070510-T00333
Please refer to the end of the specification for access instructions.

LENGTHY TABLE REFERENCED HERE
US20070105122A1-20070510-T00334
Please refer to the end of the specification for access instructions.

LENGTHY TABLE REFERENCED HERE
US20070105122A1-20070510-T00335
Please refer to the end of the specification for access instructions.

LENGTHY TABLE REFERENCED HERE
US20070105122A1-20070510-T00336
Please refer to the end of the specification for access instructions.

LENGTHY TABLE REFERENCED HERE
US20070105122A1-20070510-T00337
Please refer to the end of the specification for access instructions.

LENGTHY TABLE REFERENCED HERE
US20070105122A1-20070510-T00338
Please refer to the end of the specification for access instructions.

[0608] The correspondence of the full-length nucleotide sequences of the present invention and the corresponding deduced amino acid sequences with the clone names are shown below.

LENGTHY TABLE REFERENCED HERE
US20070105122A1-20070510-T00339
Please refer to the end of the specification for access instructions.

LENGTHY TABLE REFERENCED HERE
US20070105122A1-20070510-T00340
Please refer to the end of the specification for access instructions.

LENGTHY TABLE REFERENCED HERE
US20070105122A1-20070510-T00341
Please refer to the end of the specification for access instructions.

LENGTHY TABLE REFERENCED HERE
US20070105122A1-20070510-T00342
Please refer to the end of the specification for access instructions.

LENGTHY TABLE REFERENCED HERE
US20070105122A1-20070510-T00343
Please refer to the end of the specification for access instructions.

LENGTHY TABLE REFERENCED HERE
US20070105122A1-20070510-T00344
Please refer to the end of the specification for access instructions.

LENGTHY TABLE REFERENCED HERE
US20070105122A1-20070510-T00345
Please refer to the end of the specification for access instructions.

LENGTHY TABLE REFERENCED HERE
US20070105122A1-20070510-T00346
Please refer to the end of the specification for access instructions.

LENGTHY TABLE REFERENCED HERE
US20070105122A1-20070510-T00347
Please refer to the end of the specification for access instructions.

LENGTHY TABLE REFERENCED HERE
US20070105122A1-20070510-T00348
Please refer to the end of the specification for access instructions.

LENGTHY TABLE REFERENCED HERE
US20070105122A1-20070510-T00349
Please refer to the end of the specification for access instructions.

LENGTHY TABLE REFERENCED HERE
US20070105122A1-20070510-T00350
Please refer to the end of the specification for access instructions.

LENGTHY TABLE REFERENCED HERE
US20070105122A1-20070510-T00351
Please refer to the end of the specification for access instructions.

LENGTHY TABLE REFERENCED HERE
US20070105122A1-20070510-T00352
Please refer to the end of the specification for access instructions.

LENGTHY TABLE REFERENCED HERE
US20070105122A1-20070510-T00353
Please refer to the end of the specification for access instructions.

LENGTHY TABLE REFERENCED HERE
US20070105122A1-20070510-T00354
Please refer to the end of the specification for access instructions.

LENGTHY TABLE REFERENCED HERE
US20070105122A1-20070510-T00355
Please refer to the end of the specification for access instructions.

LENGTHY TABLE REFERENCED HERE
US20070105122A1-20070510-T00356
Please refer to the end of the specification for access instructions.

LENGTHY TABLE REFERENCED HERE
US20070105122A1-20070510-T00357
Please refer to the end of the specification for access instructions.

LENGTHY TABLE REFERENCED HERE
US20070105122A1-20070510-T00358
Please refer to the end of the specification for access instructions.

LENGTHY TABLE REFERENCED HERE
US20070105122A1-20070510-T00359
Please refer to the end of the specification for access instructions.

LENGTHY TABLE REFERENCED HERE
US20070105122A1-20070510-T00360
Please refer to the end of the specification for access instructions.

LENGTHY TABLE REFERENCED HERE
US20070105122A1-20070510-T00361
Please refer to the end of the specification for access instructions.

LENGTHY TABLE REFERENCED HERE
US20070105122A1-20070510-T00362
Please refer to the end of the specification for access instructions.

LENGTHY TABLE REFERENCED HERE
US20070105122A1-20070510-T00363
Please refer to the end of the specification for access instructions.

LENGTHY TABLE REFERENCED HERE
US20070105122A1-20070510-T00364
Please refer to the end of the specification for access instructions.

LENGTHY TABLE REFERENCED HERE
US20070105122A1-20070510-T00365
Please refer to the end of the specification for access instructions.

LENGTHY TABLE REFERENCED HERE
US20070105122A1-20070510-T00366
Please refer to the end of the specification for access instructions.

LENGTHY TABLE REFERENCED HERE
US20070105122A1-20070510-T00367
Please refer to the end of the specification for access instructions.

LENGTHY TABLE REFERENCED HERE
US20070105122A1-20070510-T00368
Please refer to the end of the specification for access instructions.

LENGTHY TABLE REFERENCED HERE
US20070105122A1-20070510-T00369
Please refer to the end of the specification for access instructions.

LENGTHY TABLE REFERENCED HERE
US20070105122A1-20070510-T00370
Please refer to the end of the specification for access instructions.

LENGTHY TABLE REFERENCED HERE
US20070105122A1-20070510-T00371
Please refer to the end of the specification for access instructions.

LENGTHY TABLE REFERENCED HERE
US20070105122A1-20070510-T00372
Please refer to the end of the specification for access instructions.

LENGTHY TABLE REFERENCED HERE
US20070105122A1-20070510-T00373
Please refer to the end of the specification for access instructions.

LENGTHY TABLE REFERENCED HERE
US20070105122A1-20070510-T00374
Please refer to the end of the specification for access instructions.

LENGTHY TABLE REFERENCED HERE
US20070105122A1-20070510-T00375
Please refer to the end of the specification for access instructions.

LENGTHY TABLE REFERENCED HERE
US20070105122A1-20070510-T00376
Please refer to the end of the specification for access instructions.

LENGTHY TABLE REFERENCED HERE
US20070105122A1-20070510-T00377
Please refer to the end of the specification for access instructions.

LENGTHY TABLE REFERENCED HERE
US20070105122A1-20070510-T00378
Please refer to the end of the specification for access instructions.

LENGTHY TABLE REFERENCED HERE
US20070105122A1-20070510-T00379
Please refer to the end of the specification for access instructions.

LENGTHY TABLE REFERENCED HERE
US20070105122A1-20070510-T00380
Please refer to the end of the specification for access instructions.

LENGTHY TABLE REFERENCED HERE
US20070105122A1-20070510-T00381
Please refer to the end of the specification for access instructions.

LENGTHY TABLE REFERENCED HERE
US20070105122A1-20070510-T00382
Please refer to the end of the specification for access instructions.

LENGTHY TABLE REFERENCED HERE
US20070105122A1-20070510-T00383
Please refer to the end of the specification for access instructions.

LENGTHY TABLE REFERENCED HERE
US20070105122A1-20070510-T00384
Please refer to the end of the specification for access instructions.

LENGTHY TABLE REFERENCED HERE
US20070105122A1-20070510-T00385
Please refer to the end of the specification for access instructions.

LENGTHY TABLE REFERENCED HERE
US20070105122A1-20070510-T00386
Please refer to the end of the specification for access instructions.

LENGTHY TABLE REFERENCED HERE
US20070105122A1-20070510-T00387
Please refer to the end of the specification for access instructions.

LENGTHY TABLE REFERENCED HERE
US20070105122A1-20070510-T00388
Please refer to the end of the specification for access instructions.

LENGTHY TABLE REFERENCED HERE
US20070105122A1-20070510-T00389
Please refer to the end of the specification for access instructions.

LENGTHY TABLE REFERENCED HERE
US20070105122A1-20070510-T00390
Please refer to the end of the specification for access instructions.

LENGTHY TABLE REFERENCED HERE
US20070105122A1-20070510-T00391
Please refer to the end of the specification for access instructions.

LENGTHY TABLE REFERENCED HERE
US20070105122A1-20070510-T00392
Please refer to the end of the specification for access instructions.

LENGTHY TABLE REFERENCED HERE
US20070105122A1-20070510-T00393
Please refer to the end of the specification for access instructions.

LENGTHY TABLE REFERENCED HERE
US20070105122A1-20070510-T00394
Please refer to the end of the specification for access instructions.

LENGTHY TABLE REFERENCED HERE
US20070105122A1-20070510-T00395
Please refer to the end of the specification for access instructions.

LENGTHY TABLE REFERENCED HERE
US20070105122A1-20070510-T00396
Please refer to the end of the specification for access instructions.

LENGTHY TABLE REFERENCED HERE
US20070105122A1-20070510-T00397
Please refer to the end of the specification for access instructions.

LENGTHY TABLE REFERENCED HERE
US20070105122A1-20070510-T00398
Please refer to the end of the specification for access instructions.

LENGTHY TABLE REFERENCED HERE
US20070105122A1-20070510-T00399
Please refer to the end of the specification for access instructions.

LENGTHY TABLE REFERENCED HERE
US20070105122A1-20070510-T00400
Please refer to the end of the specification for access instructions.

LENGTHY TABLE REFERENCED HERE
US20070105122A1-20070510-T00401
Please refer to the end of the specification for access instructions.

LENGTHY TABLE REFERENCED HERE
US20070105122A1-20070510-T00402
Please refer to the end of the specification for access instructions.

LENGTHY TABLE REFERENCED HERE
US20070105122A1-20070510-T00403
Please refer to the end of the specification for access instructions.

LENGTHY TABLE REFERENCED HERE
US20070105122A1-20070510-T00404
Please refer to the end of the specification for access instructions.

LENGTHY TABLE REFERENCED HERE
US20070105122A1-20070510-T00405
Please refer to the end of the specification for access instructions.

LENGTHY TABLE REFERENCED HERE
US20070105122A1-20070510-T00406
Please refer to the end of the specification for access instructions.

LENGTHY TABLE REFERENCED HERE
US20070105122A1-20070510-T00407
Please refer to the end of the specification for access instructions.

LENGTHY TABLE REFERENCED HERE
US20070105122A1-20070510-T00408
Please refer to the end of the specification for access instructions.

LENGTHY TABLE REFERENCED HERE
US20070105122A1-20070510-T00409
Please refer to the end of the specification for access instructions.

LENGTHY TABLE REFERENCED HERE
US20070105122A1-20070510-T00410
Please refer to the end of the specification for access instructions.

LENGTHY TABLE REFERENCED HERE
US20070105122A1-20070510-T00411
Please refer to the end of the specification for access instructions.

LENGTHY TABLE REFERENCED HERE
US20070105122A1-20070510-T00412
Please refer to the end of the specification for access instructions.

LENGTHY TABLE REFERENCED HERE
US20070105122A1-20070510-T00413
Please refer to the end of the specification for access instructions.

LENGTHY TABLE REFERENCED HERE
US20070105122A1-20070510-T00414
Please refer to the end of the specification for access instructions.

LENGTHY TABLE REFERENCED HERE
US20070105122A1-20070510-T00415
Please refer to the end of the specification for access instructions.

LENGTHY TABLE REFERENCED HERE
US20070105122A1-20070510-T00416
Please refer to the end of the specification for access instructions.

LENGTHY TABLE REFERENCED HERE
US20070105122A1-20070510-T00417
Please refer to the end of the specification for access instructions.

LENGTHY TABLE REFERENCED HERE
US20070105122A1-20070510-T00418
Please refer to the end of the specification for access instructions.

LENGTHY TABLE REFERENCED HERE
US20070105122A1-20070510-T00419
Please refer to the end of the specification for access instructions.

LENGTHY TABLE REFERENCED HERE
US20070105122A1-20070510-T00420
Please refer to the end of the specification for access instructions.

LENGTHY TABLE REFERENCED HERE
US20070105122A1-20070510-T00421
Please refer to the end of the specification for access instructions.

LENGTHY TABLE REFERENCED HERE
US20070105122A1-20070510-T00422
Please refer to the end of the specification for access instructions.

LENGTHY TABLE REFERENCED HERE
US20070105122A1-20070510-T00423
Please refer to the end of the specification for access instructions.

LENGTHY TABLE REFERENCED HERE
US20070105122A1-20070510-T00424
Please refer to the end of the specification for access instructions.

LENGTHY TABLE REFERENCED HERE
US20070105122A1-20070510-T00425
Please refer to the end of the specification for access instructions.

LENGTHY TABLE REFERENCED HERE
US20070105122A1-20070510-T00426
Please refer to the end of the specification for access instructions.

LENGTHY TABLE REFERENCED HERE
US20070105122A1-20070510-T00427
Please refer to the end of the specification for access instructions.

LENGTHY TABLE REFERENCED HERE
US20070105122A1-20070510-T00428
Please refer to the end of the specification for access instructions.

LENGTHY TABLE REFERENCED HERE
US20070105122A1-20070510-T00429
Please refer to the end of the specification for access instructions.

LENGTHY TABLE REFERENCED HERE
US20070105122A1-20070510-T00430
Please refer to the end of the specification for access instructions.

LENGTHY TABLE REFERENCED HERE
US20070105122A1-20070510-T00431
Please refer to the end of the specification for access instructions.

LENGTHY TABLE REFERENCED HERE
US20070105122A1-20070510-T00432
Please refer to the end of the specification for access instructions.

LENGTHY TABLE REFERENCED HERE
US20070105122A1-20070510-T00433
Please refer to the end of the specification for access instructions.

LENGTHY TABLE REFERENCED HERE
US20070105122A1-20070510-T00434
Please refer to the end of the specification for access instructions.

LENGTHY TABLE REFERENCED HERE
US20070105122A1-20070510-T00435
Please refer to the end of the specification for access instructions.

LENGTHY TABLE REFERENCED HERE
US20070105122A1-20070510-T00436
Please refer to the end of the specification for access instructions.

LENGTHY TABLE REFERENCED HERE
US20070105122A1-20070510-T00437
Please refer to the end of the specification for access instructions.

LENGTHY TABLE REFERENCED HERE
US20070105122A1-20070510-T00438
Please refer to the end of the specification for access instructions.

LENGTHY TABLE REFERENCED HERE
US20070105122A1-20070510-T00439
Please refer to the end of the specification for access instructions.

LENGTHY TABLE REFERENCED HERE
US20070105122A1-20070510-T00440
Please refer to the end of the specification for access instructions.

LENGTHY TABLE REFERENCED HERE
US20070105122A1-20070510-T00441
Please refer to the end of the specification for access instructions.

LENGTHY TABLE REFERENCED HERE
US20070105122A1-20070510-T00442
Please refer to the end of the specification for access instructions.

LENGTHY TABLE REFERENCED HERE
US20070105122A1-20070510-T00443
Please refer to the end of the specification for access instructions.

LENGTHY TABLE REFERENCED HERE
US20070105122A1-20070510-T00444
Please refer to the end of the specification for access instructions.

LENGTHY TABLE REFERENCED HERE
US20070105122A1-20070510-T00445
Please refer to the end of the specification for access instructions.

LENGTHY TABLE REFERENCED HERE
US20070105122A1-20070510-T00446
Please refer to the end of the specification for access instructions.

LENGTHY TABLE REFERENCED HERE
US20070105122A1-20070510-T00447
Please refer to the end of the specification for access instructions.

LENGTHY TABLE REFERENCED HERE
US20070105122A1-20070510-T00448
Please refer to the end of the specification for access instructions.

LENGTHY TABLE REFERENCED HERE
US20070105122A1-20070510-T00449
Please refer to the end of the specification for access instructions.

LENGTHY TABLE REFERENCED HERE
US20070105122A1-20070510-T00450
Please refer to the end of the specification for access instructions.

LENGTHY TABLE REFERENCED HERE
US20070105122A1-20070510-T00451
Please refer to the end of the specification for access instructions.

LENGTHY TABLE REFERENCED HERE
US20070105122A1-20070510-T00452
Please refer to the end of the specification for access instructions.

LENGTHY TABLE REFERENCED HERE
US20070105122A1-20070510-T00453
Please refer to the end of the specification for access instructions.

LENGTHY TABLE REFERENCED HERE
US20070105122A1-20070510-T00454
Please refer to the end of the specification for access instructions.

LENGTHY TABLE REFERENCED HERE
US20070105122A1-20070510-T00455
Please refer to the end of the specification for access instructions.

LENGTHY TABLE REFERENCED HERE
US20070105122A1-20070510-T00456
Please refer to the end of the specification for access instructions.

LENGTHY TABLE REFERENCED HERE
US20070105122A1-20070510-T00457
Please refer to the end of the specification for access instructions.

LENGTHY TABLE REFERENCED HERE
US20070105122A1-20070510-T00458
Please refer to the end of the specification for access instructions.

LENGTHY TABLE REFERENCED HERE
US20070105122A1-20070510-T00459
Please refer to the end of the specification for access instructions.

LENGTHY TABLE REFERENCED HERE
US20070105122A1-20070510-T00460
Please refer to the end of the specification for access instructions.

LENGTHY TABLE REFERENCED HERE
US20070105122A1-20070510-T00461
Please refer to the end of the specification for access instructions.

LENGTHY TABLE REFERENCED HERE
US20070105122A1-20070510-T00462
Please refer to the end of the specification for access instructions.

LENGTHY TABLE REFERENCED HERE
US20070105122A1-20070510-T00463
Please refer to the end of the specification for access instructions.

LENGTHY TABLE REFERENCED HERE
US20070105122A1-20070510-T00464
Please refer to the end of the specification for access instructions.

LENGTHY TABLE REFERENCED HERE
US20070105122A1-20070510-T00465
Please refer to the end of the specification for access instructions.

LENGTHY TABLE REFERENCED HERE
US20070105122A1-20070510-T00466
Please refer to the end of the specification for access instructions.

LENGTHY TABLE REFERENCED HERE
US20070105122A1-20070510-T00467
Please refer to the end of the specification for access instructions.

LENGTHY TABLE REFERENCED HERE
US20070105122A1-20070510-T00468
Please refer to the end of the specification for access instructions.

LENGTHY TABLE REFERENCED HERE
US20070105122A1-20070510-T00469
Please refer to the end of the specification for access instructions.

LENGTHY TABLE REFERENCED HERE
US20070105122A1-20070510-T00470
Please refer to the end of the specification for access instructions.

LENGTHY TABLE REFERENCED HERE
US20070105122A1-20070510-T00471
Please refer to the end of the specification for access instructions.

LENGTHY TABLE REFERENCED HERE
US20070105122A1-20070510-T00472
Please refer to the end of the specification for access instructions.

LENGTHY TABLE REFERENCED HERE
US20070105122A1-20070510-T00473
Please refer to the end of the specification for access instructions.

LENGTHY TABLE REFERENCED HERE
US20070105122A1-20070510-T00474
Please refer to the end of the specification for access instructions.

LENGTHY TABLE REFERENCED HERE
US20070105122A1-20070510-T00475
Please refer to the end of the specification for access instructions.

LENGTHY TABLE REFERENCED HERE
US20070105122A1-20070510-T00476
Please refer to the end of the specification for access instructions.

LENGTHY TABLE REFERENCED HERE
US20070105122A1-20070510-T00477
Please refer to the end of the specification for access instructions.

LENGTHY TABLE REFERENCED HERE
US20070105122A1-20070510-T00478
Please refer to the end of the specification for access instructions.

LENGTHY TABLE REFERENCED HERE
US20070105122A1-20070510-T00479
Please refer to the end of the specification for access instructions.

LENGTHY TABLE REFERENCED HERE
US20070105122A1-20070510-T00480
Please refer to the end of the specification for access instructions.

LENGTHY TABLE REFERENCED HERE
US20070105122A1-20070510-T00481
Please refer to the end of the specification for access instructions.

LENGTHY TABLE REFERENCED HERE
US20070105122A1-20070510-T00482
Please refer to the end of the specification for access instructions.

LENGTHY TABLE REFERENCED HERE
US20070105122A1-20070510-T00483
Please refer to the end of the specification for access instructions.

LENGTHY TABLE REFERENCED HERE
US20070105122A1-20070510-T00484
Please refer to the end of the specification for access instructions.

LENGTHY TABLE REFERENCED HERE
US20070105122A1-20070510-T00485
Please refer to the end of the specification for access instructions.

LENGTHY TABLE REFERENCED HERE
US20070105122A1-20070510-T00486
Please refer to the end of the specification for access instructions.

LENGTHY TABLE REFERENCED HERE
US20070105122A1-20070510-T00487
Please refer to the end of the specification for access instructions.

LENGTHY TABLE REFERENCED HERE
US20070105122A1-20070510-T00488
Please refer to the end of the specification for access instructions.

LENGTHY TABLE REFERENCED HERE
US20070105122A1-20070510-T00489
Please refer to the end of the specification for access instructions.

LENGTHY TABLE REFERENCED HERE
US20070105122A1-20070510-T00490
Please refer to the end of the specification for access instructions.

LENGTHY TABLE REFERENCED HERE
US20070105122A1-20070510-T00491
Please refer to the end of the specification for access instructions.

LENGTHY TABLE REFERENCED HERE
US20070105122A1-20070510-T00492
Please refer to the end of the specification for access instructions.

LENGTHY TABLE REFERENCED HERE
US20070105122A1-20070510-T00493
Please refer to the end of the specification for access instructions.

LENGTHY TABLE REFERENCED HERE
US20070105122A1-20070510-T00494
Please refer to the end of the specification for access instructions.

LENGTHY TABLE REFERENCED HERE
US20070105122A1-20070510-T00495
Please refer to the end of the specification for access instructions.

LENGTHY TABLE REFERENCED HERE
US20070105122A1-20070510-T00496
Please refer to the end of the specification for access instructions.

LENGTHY TABLE REFERENCED HERE
US20070105122A1-20070510-T00497
Please refer to the end of the specification for access instructions.

LENGTHY TABLE REFERENCED HERE
US20070105122A1-20070510-T00498
Please refer to the end of the specification for access instructions.

### EXAMPLE 16

### Selection of Novel cDNA Clones from cDNA Libraries Prepared by Oligo-Capping Method

[0609] The following 54 clones were newly selected from cDNA libraries prepared by oligo-capping method, based on the criterion that the 5′-end sequence of a cDNA clone contained a coding region which was initiated with ATG codon and which encoded 50 amino acids or more:

[0610] HEMBA1000497, HEMBA1001750, HEMBA1003854, HEMBA1004193, HEMBA1004860, HEMBA1005572, HEMBA1006038, HEMBA1006092, HEMBA1006406, HEMBA1006650, HEMBA1006812, HEMBB1000672, HEMBB1001197, HEMBB1001871, MAMMA1001252, MAMMA1002094, NT2RM4000634, NT2RM4000657, NT2RM4000783, NT2RM4000857, NT2RM4001178, NT2RM4002420, NT2RP2000198, NT2RP2000551, NT2RP2000660, NT2RP2001214, NT2RP2001460, NT2RP2001756, NT2RP2002056, NT2RP2002677, NT2RP2002755, NT2RP2002843, NT2RP2003101, NT2RP2003799, NT2RP2004095, NT2RP2004732, NT2RP2004920, NT2RP2005454, NT2RP2005776, NT2RP2005806, NT2RP2005882, NT2RP3001282, NT2RP3001723, NT2RP3002099, NT2RP3003155, NT2RP3004028, OVARC1000008, OVARC1000724, OVARC1000751, OVARC1001029, PLACE1000814, PLACE1003030, PLACE1005549, PLACE1007218.

[0611] Among them, the following 23 clones was predicted to contain a coding region encoding 100 amino acids or more: HEMBA1000497, HEMBA1003854, HEMBA1004193, HEMBA1006812, HEMBB1001871, NT2RM4000657, NT2RM4001178, NT2RP2001756, NT2RP2002677, NT2RP2002755, NT2RP2002843, NT2RP2004095, NT2RP2004920, NT2RP2005806, NT2RP3001282, NT2RP3002099, NT2RP3003155, OVARC1000724, OVARC1001029, PLACE1000814, PLACE1003030, PLACE1005549, PLACE1007218. This indicates that the clones encode proteins.

[0612] Table 510 shows maximal ATGpr1 value determined for each clone. Since the respective maximal ATGpr1 values for HEMBA1006812, HEMBB1001871 and NT2RRP3001282 are higher than 0.3, the clones would be full-length. Other clones indicated below have maximal ATGpr1 values of 0.3 or less, and this means that the fullness ratios of the clones are low. However, the sequences can still be full-length: HEMBA1000497, HEMBA1001750, HEMBA1003854, HEMBA1004193, HEMBA1004860, HEMBA1005572, HEMBA1006038, HEMBA1006092, HEMBA1006406, HEMBA1006650, HEMBB1000672, HEMBB1001197, MAMMA1001252, MAMMA1002094, NT2RM4000634, NT2RM4000657, NT2RM4000783, NT2RM4000857, NT2RM4001178, NT2RM4002420, NT2RP2000198, NT2RP2000551, NT2RP2000660, NT2RP2001214, NT2RP2001460, NT2RP2001756, NT2RP2002056, NT2RP2002677, NT2RP2002755, NT2RP2002843, NT2RP2003101, NT2RP2003799, NT2RP2004095, NT2RP2004732, NT2RP2004920, NT2RP2005454, NT2RP2005776, NT2RP2005806, NT2RP2005882, NT2RP3001723, NT2RP3002099, NT2RP3003155, NT2RP3004028, OVARC1000008, OVARC1000724, OVARC1000751, OVARC1001029, PLACE1000814, PLACE1003030, PLACE1005549, PLACE1007218

[0613] Table 511 (same as Table 2) shows SEQ ID NOs of the nucleotide sequences located at the 5′-end and 3′-end of each of the 54 clones and the corresponding plasmid clone, which was obtained herein, containing a polynucleotide as an insert. SEQ ID NO for a 5′-end sequence is indicated on the right side of the corresponding Sequence name of 5′-end sequence, and SEQ ID NO for a 3′-end sequence is indicated on the right side of the corresponding Sequence name of 3′-end sequence.

[0614] Swiss-Prot was searched for data homologous to the 5′-end sequences of the selected 54 clones, and GenBank and UniGene were searched for data homologous to the 5′-end and 3′-end sequences of the same clones. The search results are indicated as Homology search results 1-7 in the last part of this SPECIFICATION.

[0615] Based on the matching data obtained by the search, 7 clones presumably encode proteins belonging to any of the categories of secretory or membrane proteins, glycoproteins, signal transduction-associated proteins, transcription-associated proteins, disease-associated proteins, and protein synthesis- and/or protein transport-associated proteins. These were clones exhibiting relatively low homology to any of known proteins belonging to said categories. Here, the term “relatively low homology” means that a nucleotide sequence does not satisfy the conditions under which the nucleotide sequence exhibits “relatively high homology” (which means that, when the nucleotide sequence is compared with the known sequences in Swiss-Prot database, the sequence identity is 60% or higher and the P value is 10⁻¹⁰ or less) and that, when the nucleotide sequence is compared with the known sequences in Swiss-Prot database the sequence to be compared contains 55 nucleotides or more, the sequence identity is 25% or higher, and the P value is 10⁻⁶ or less.

[0616] Among the 7 clones, clones presumably encoding proteins belonging to the category of secretory or membrane proteins are the two clones, HEMBB1001871 and NT2RM4000857 (which also belong to other categories); clones presumably encoding proteins belonging to the category of glycoproteins are the two clones, HEMBB1001871 and NT2RM4000857 (which also belong to other categories); a clone presumably encoding a protein belonging to the category of signal transduction-associated proteins is PLACE1005549; clones presumably encoding proteins belonging to the category of transcription-associated proteins are the three clones, HEMBA1005572, NT2RP2001756, and NT2RP2005776; a clone presumably encoding a protein belonging to the category of disease-associated proteins is NT2RM4000857 (which also belong to other categories); a clone presumably encoding a protein belonging to the category of protein synthesis- and/or protein transport-associated proteins is HEMBA1001750 (see Examples 12).

TABLE 510
The maximal ATGprl value of each clone selected in Example 16

| | | maximal |
|---|---|---|
| | name of | ATGprl |
| clone name | sequence | score |
| HEMBA1000497 | F-HEMBA1000497 | 0.25 |
| HEMBA1001750 | F-HEMBA1001750 | 0.08 |
| HEMBA1003854 | F-HEMBA1003854 | 0.23 |
| HEMBA1004193 | F-HEMBA1004193 | 0.22 |
| HEMBA1004860 | F-HEMBA1004860 | 0.29 |
| HEMBA1005572 | F-HEMBA1005572 | 0.24 |
| HEMBA1006038 | F-HEMBA1006038 | 0.29 |
| HEMBA1006092 | F-HEMBA1006092 | 0.28 |
| HEMBA1006406 | F-HEMBA1006406 | 0.26 |
| HEMBA1006650 | F-HEMBA1006650 | 0.22 |
| HEMBA1006812 | F-HEMBA1006812 | 0.71 |
| HEMBB1000672 | F-HEMBB1000672 | 0.24 |
| HEMBB1001197 | F-HEMBB1001197 | 0.22 |
| HEMBB1001871 | F-HEMBB1001871 | 0.94 |
| MAMMA1001252 | F-MAMMA1001252 | 0.29 |
| MAMMA1002094 | F-MAMMA1002094 | 0.28 |
| NT2RM4000634 | F-NT2RM4000634 | 0.07 |
| NT2RM4000657 | F-NT2RM4000657 | 0.24 |
| NT2RM4000783 | F-NT2RM4000783 | 0.22 |
| NT2RM4000857 | F-NT2RM4000857 | 0.12 |
| NT2RM4001178 | F-NT2RM4001178 | 0.27 |
| NT2RM4002420 | F-NT2RM4002420 | 0.06 |
| NT2RP2000198 | F-NT2RP2000198 | 0.15 |
| NT2RP2000551 | F-NT2RP2000551 | 0.07 |
| NT2RP2000660 | F-NT2RP2000660 | 0.22 |
| NT2RP2001214 | F-NT2RP2001214 | 0.26 |
| NT2RP2001460 | F-NT2RP2001460 | 0.07 |
| NT2RP2001756 | F-NT2RP2001756 | 0.17 |
| NT2RP2002056 | F-NT2RP2002056 | 0.12 |
| NT2RP2002677 | F-NT2RP2002677 | 0.14 |
| NT2RP2002755 | F-NT2RP2002755 | 0.12 |
| NT2RP2002843 | F-NT2RP2002843 | 0.11 |
| NT2RP2003101 | F-NT2RP2003101 | 0.13 |
| NT2RP2003799 | F-NT2RP2003799 | 0.24 |
| NT2RP2004095 | F-NT2RP2004095 | 0.16 |
| NT2RP2004732 | F-NT2RP2004732 | 0.18 |
| NT2RP2004920 | F-NT2RP2004920 | 0.15 |
| NT2RP2005454 | F-NT2RP2005454 | 0.09 |
| NT2RP2005776 | F-NT2RP2005776 | 0.19 |
| NT2RP2005806 | F-NT2RP2005806 | 0.27 |
| NT2RP2005882 | F-NT2RP2005882 | 0.11 |
| NT2RP3001282 | F-NT2RP3001282 | 0.39 |
| NT2RP3001723 | F-NT2RP3001723 | 0.22 |
| NT2RP3002099 | F-NT2RP3002099 | 0.20 |
| NT2RP3003155 | F-NT2RP3003155 | 0.29 |
| NT2RP3004028 | F-NT2RP3004028 | 0.13 |
| OVARC1000008 | F-OVARC1000008 | 0.23 |
| OVARC1000724 | F-OVARC1000724 | 0.27 |
| OVARC1000751 | F-OVARC1000751 | 0.28 |
| OVARC1001029 | F-OVARC1001029 | 0.25 |
| PLACE1000814 | F-PLACE1000814 | 0.21 |
| PLACE1003030 | F-PLACE1003030 | 0.26 |
| PLACE1005549 | F-PLACE1005549 | 0.16 |
| PLACE1007218 | F-PLACE1007218 | 0.30 |

[0617] TABLE 511

| | | SEQ ID NO | | SEQ ID NO |
|---|---|---|---|---|
| | name of | of the | name of | of the |
| | the 5′-end | 5′-end | the 3′-end | 3′-end |
| clone name | sequence | sequence | sequence | sequence |
| HEMBA1000497 | F-HEMBA1000497 | 16111 | R-HEMBA1000497 | 16165 |
| HEMBA1001750 | F-HEMBA1001750 | 16112 | R-HEMBA1001750 | 16166 |
| HEMBA1003854 | F-HEMBA1003854 | 16113 | R-HEMBA1003854 | 16167 |
| HEMBA1004193 | F-HEMBA1004193 | 16114 | R-HEMBA1004193 | 16168 |
| HEMBA1004860 | F-HEMBA1004860 | 16115 | R-HEMBA1004860 | 16169 |
| HEMBA1005572 | F-HEMBA1005572 | 16116 | R-HEMBA1005572 | 16170 |
| HEMBA1006038 | F-HEMBA1006038 | 16117 | R-HEMBA1006038 | 16171 |
| HEMBA1006092 | F-HEMBA1006092 | 16118 | R-HEMBA1006092 | 16172 |
| HEMBA1006406 | F-HEMBA1006406 | 16119 | R-HEMBA1006406 | 16173 |
| HEMBA1006650 | F-HEMBA1006650 | 16120 | R-HEMBA1006650 | 16174 |
| HEMBA1006812 | F-HEMBA1006812 | 16121 | R-HEMBA1006812 | 16175 |
| HEMBB1000672 | F-HEMBB1000672 | 16122 | R-HEMBB1000672 | 16176 |
| HEMBB1001197 | F-HEMBB1001197 | 16123 | R-HEMBB1001197 | 16177 |
| HEMBB1001871 | F-HEMBB1001871 | 16124 | R-HEMBB1001871 | 16178 |
| MAMMA1001252 | F-MAMMA1001252 | 16125 | R-MAMMA1001252 | 16179 |
| MAMMA1002094 | F-MAMMA1002094 | 16126 | R-MAMMA1002094 | 16180 |
| NT2RM4000634 | F-NT2RM4000634 | 16127 | R-NT2RM4000634 | 16181 |
| NT2RM4000657 | F-NT2RM4000657 | 16128 | R-NT2RM4000657 | 16182 |
| NT2RM4000783 | F-NT2RM4000783 | 16129 | R-NT2RM4000783 | 16183 |
| NT2RM4000857 | F-NT2RM4000857 | 16130 | R-NT2RM4000857 | 16184 |
| NT2RM4001178 | F-NT2RM4001178 | 16131 | R-NT2RM4001178 | 16185 |
| NT2RM4002420 | F-NT2RM4002420 | 16132 | R-NT2RM4002420 | 16186 |
| NT2RP2000198 | F-NT2RP2000198 | 16133 | R-NT2RP2000198 | 16187 |
| NT2RP2000551 | F-NT2RP2000551 | 16134 | R-NT2RP2000551 | 16188 |
| NT2RP2000660 | F-NT2RP2000660 | 16135 | R-NT2RP2000660 | 16189 |
| NT2RP2001214 | F-NT2RP2001214 | 16136 | R-NT2RP2001214 | 16190 |
| NT2RP2001460 | F-NT2RP2001460 | 16137 | R-NT2RP2001460 | 16191 |
| NT2RP2001756 | F-NT2RP2001756 | 16138 | R-NT2RP2001756 | 16192 |
| NT2RP2002056 | F-NT2RP2002056 | 16139 | R-NT2RP2002056 | 16193 |
| NT2RP2002677 | F-NT2RP2002677 | 16140 | R-NT2RP2002677 | 16194 |
| NT2RP2002755 | F-NT2RP2002755 | 16141 | R-NT2RP2002755 | 16195 |
| NT2RP2002843 | F-NT2RP2002843 | 16142 | R-NT2RP2002843 | 16196 |
| NT2RP2003101 | F-NT2RP2003101 | 16143 | R-NT2RP2003101 | 16197 |
| NT2RP2003799 | F-NT2RP2003799 | 16144 | R-NT2RP2003799 | 16198 |
| NT2RP2004095 | F-NT2RP2004095 | 16145 | R-NT2RP2004095 | 16199 |
| NT2RP2004732 | F-NT2RP2004732 | 16146 | R-NT2RP2004732 | 16200 |
| NT2RP2004920 | F-NT2RP2004920 | 16147 | R-NT2RP2004920 | 16201 |
| NT2RP2005454 | F-NT2RP2005454 | 16148 | R-NT2RP2005454 | 16202 |
| NT2RP2005776 | F-NT2RP2005776 | 16149 | R-NT2RP2005776 | 16203 |
| NT2RP2005806 | F-NT2RP2005806 | 16150 | R-NT2RP2005806 | 16204 |
| NT2RP2005882 | F-NT2RP2005882 | 16151 | R-NT2RP2005882 | 16205 |
| NT2RP3001282 | F-NT2RP3001282 | 16152 | R-NT2RP3001282 | 16206 |
| NT2RP3001723 | F-NT2RP3001723 | 16153 | R-NT2RP3001723 | 16207 |
| NT2RP3002099 | F-NT2RP3002099 | 16154 | R-NT2RP3002099 | 16208 |
| NT2RP3003155 | F-NT2RP3003155 | 16155 | R-NT2RP3003155 | 16209 |
| NT2RP3004028 | F-NT2RP3004028 | 16156 | R-NT2RP3004028 | 16210 |
| OVARC1000008 | F-OVARC1000008 | 16157 | R-OVARC1000008 | 16211 |
| OVARC1000724 | F-OVARC1000724 | 16158 | R-OVARC1000724 | 16212 |
| OVARC1000751 | F-OVARC1000751 | 16159 | R-OVARC1000751 | 16213 |
| OVARC1001029 | F-OVARC1001029 | 16160 | R-OVARC1001029 | 16214 |
| PLACE1000814 | F-PLACE1000814 | 16161 | R-PLACE1000814 | 16215 |
| PLACE1003030 | F-PLACE1003030 | 16162 | R-PLACE1003030 | 16216 |
| PLACE1005549 | F-PLACE1005549 | 16163 | R-PLACE1005549 | 16217 |
| PLACE1007218 | F-PLACE1007218 | 16164 | R-PLACE1007218 | 16218 |

### EXAMPLE 17

### Search for a Signal Sequence, Transmembrane Region and Functional Domain in Deduced Amino Acid Sequences

[0618] The deduced amino acid sequences from the full-length nucleotide sequences were examined to predict the presence of a signal sequence in their amino-termini as well as the presence of a transmembrane region. The amino acid sequences were also searched for a protein functional domain (motif). The examinations for a signal sequence in the amino-terminus, for a transmembrane region and for a functional domain were performed by using PSORT [K. Nakai & M. Kanehisa, Genomics, 14:897-911 (1992)], SOSUI [T. Hirokawa et al., Bioinformatics, 14:378-379 (1998)] (Mitsui Knowledge Industry Co., Ltd.) and Pfam (http://www.sanger.ac.uk/Software/Pfam/index.shtml), respectively. When the presence of a signal sequence or a transmembrane region in the amino-terminus was predicted in the amino acid sequence by PSORT or SOSUI, the protein was predicted to be a secretory protein or a membrane protein. When the amino acid sequence matched a functional domain in the Pfam search for a functional domain, the function of the protein is predictable based on the matching data, for example, by referring to the functional categories in PROSITE (http://www.expasy.ch/cgi-bin/prosite-list.pl). The functional domain search can be performed by using PROSITE instead of Pfam.

[0619] Search results obtained by using the respective software programs are indicated below.

[0620] Clones whose deduced amino acid sequences were predicted to have signal sequences by PSORT search are as follows:

[0621] HEMBA1001052, HEMBA1001407, HEMBA1002486, HEMBA1002661, HEMBA1002818, HEMBA1002876, HEMBA1003086, HEMBA1003711, HEMBA1004752, HEMBA1005991, HEMBA1006067, HEMBA1006173, HEMBA1006198, HEMBA1006789, HEMBA1006921, HEMBB1000054, HEMBB1000175, HEMBB1002692, MAMMA1000798, MAMMA1002427, MAMMA1002881, MAMMA1003035, NT2RM1000035, NT2RM1000742, NT2RM1000811, NT2RM1000905, NT2RM1001008, NT2RM2000287, NT2RM2000609, NT2RM2001613, NT2RM4000634, NT2RM4000778, NT2RM4002339, NT2RM4002460, NT2RP1000782, NT2RP1000856, NT2RP1001247, NT2RP1001546, NT2RP1001569, NT2RP2001597, NT2RP2002537, NT2RP2004142, NT2RP2005752, NT2RP2005812, NT2RP3001084, NT2RP3001589, NT2RP3002163, NT2RP3002650, NT2RP3003145, NT2RP3003242, NT2RP3003621, NT2RP3004282, NT2RP3004503, NT2RP4000051, NT2RP4000151, NT2RP4000243, NT2RP4000259, NT2RP4000323, NT2RP4000417, NT2RP4001064, NT2RP4001117, NT2RP4001730, NT2RP4001739, NT2RP4002075, NT2RP5003500, OVARC1001154, PLACE1000611, PLACE1003030, PLACE1003044, PLACE1003369, PLACE1003596, PLACE1004258, PLACE1005086, PLACE1006239, PLACE1006754, PLACE1006829, PLACE1007954, PLACE1008424, PLACE1008533, PLACE1008693, PLACE1010622, PLACE1010942, PLACE2000176, PLACE2000341, PLACE2000379, PLACE2000427, PLACE2000477, PLACE4000431, PLACE4000593, THYRO1000156, THYRO1001134, THYRO1001287, Y79AA1000258, Y79AA1001874, Y79AA1002399 HEMBB1001871, HEMBB1001925, MAMMA1000778, MAMMA1000897, MAMMA1001080, NT2RP2004300, NT2RP3002985, NT2RP3003059, OVARC1000689, OVARC1000890, PLACE1005162, PLACE3000399, PLACE3000455, PLACE4000247, PLACE4000259, PLACE4000494

[0622] Clones whose deduced amino acid sequences were predicted to have transmembrane regions by SOSUI search are as follows:

[0623] HEMBA1000005, HEMBA1000356, HEMBA1000518, HEMBA1000531, HEMBA1000637, HEMBA1000719, HEMBA1000817, HEMBA1000822, HEMBA1000870, HEMBA1000991, HEMBA1001052, HEMBA1001085, HEMBA1001286, HEMBA1001351, HEMBA1001407, HEMBA1001446, HEMBA1001510, HEMBA1001515, HEMBA1001557, HEMBA1001746, HEMBA1002092, HEMBA1002125, HEMBA1002150, HEMBA1002166, HEMBA1002462, HEMBA1002477, HEMBA1002486, HEMBA1002609, HEMBA1002659, HEMBA1002661, HEMBA1002780, HEMBA1002818, HEMBA1002876, HEMBA1002921, HEMBA1003077, HEMBA1003079, HEMBA1003086, HEMBA1003096, HEMBA1003281, HEMBA1003286, HEMBA1003711, HEMBA1003742, HEMBA1003803, HEMBA1004143, HEMBA1004146, HEMBA1004341, HEMBA1004461, HEMBA1004577, HEMBA1004637, HEMBA1004752, HEMBA1004756, HEMBA1004850, HEMBA1004889, HEMBA1004923, HEMBA1004930, HEMBA1005029, HEMBA1005035, HEMBA1005050, HEMBA1005552, HEMBA1005588, HEMBA1005616, HEMBA1005991, HEMBA1006036, HEMBA1006067, HEMBA1006293, HEMBA1006492, HEMBA1006502, HEMBA1006659, HEMBA1006758, HEMBA1006789, HEMBA1006921, HEMBA1006926, HEMBA1007203, HEMBB1000050, HEMBB1000054, HEMBB1000556, HEMBB1000593, HEMBB1000631, HEMBB1000763, HEMBB1000827, HEMBB1000915, HEMBB1000975, HEMBB1001112, HEMBB1001177, HEMBB1001302, HEMBB1001348, HEMBB1001962, HEMBB1002142, HEMBB1002190, HEMBB1002247, HEMBB1002387, HEMBB1002550, HEMBB1002600, HEMBB1002692, MAMMA1000129, MAMMA1000133, MAMMA1000277, MAMMA1000278, MAMMA1000410, MAMMA1000416, MAMMA1000472, MAMMA1000714, MAMMA1000731, MAMMA1000734, MAMMA1000798, MAMMA1000842, MAMMA1000956, MAMMA1001008, MAMMA1001030, MAMMA1001139, MAMMA1001154, MAMMA1001388, MAMMA1001411, MAMMA1001487, MAMMA1001751, MAMMA1001771, MAMMA1002461, MAMMA1002524, MAMMA1002598, MAMMA1002684, MAMMA1002769, MAMMA1002890, MAMMA1002938, MAMMA1003146, NT2RM1000035, NT2RM1000037, NT2RM1000062, NT2RM1000131, NT2RM1000257, NT2RM1000260, NT2RM1000355, NT2RM1000648, NT2RM1000742, NT2RM1000800, NT2RM1000811, NT2RM1000857, NT2RM1000867, NT2RM1000882, NT2RM1001008, NT2RM1001115, NT2RM1001139, NT2RM2000259, NT2RM2000395, NT2RM2000402, NT2RM2000407, NT2RM2000422, NT2RM2000566, NT2RM2000581, NT2RM2000609, NT2RM2001370, NT2RM2001393, NT2RM2001499, NT2RM2001613, NT2RM2001648, NT2RM2001659, NT2RM2001671, NT2RM2001718, NT2RM2001760, NT2RM2001785, NT2RM2001823, NT2RM2001930, NT2RM2001950, NT2RM2001998, NT2RM2002049, NT2RM4000046, NT2RM4000233, NT2RM4000433, NT2RM4000520, NT2RM4000634, NT2RM4000674, NT2RM4000700, NT2RM4000764, NT2RM4000795, NT2RM4000820, NT2RM4000857, NT2RM4001032, NT2RM4001054, NT2RM4001455, NT2RM4001813, NT2RM4001930, NT2RM4001987, NT2RM4002054, NT2RM4002073, NT2RM4002145, NT2RM4002146, NT2RM4002194, NT2RM4002339, NT2RM4002438, NT2RM4002446, NT2RM4002452, NT2RM4002460, NT2RM4002493, NT2RM4002571, NT2RP1000191, NT2RP1000358, NT2RP1000418, NT2RP1000547, NT2RP1000609, NT2RP1000677, NT2RP1000767, NT2RP1000782, NT2RP1000856, NT2RP1001113, NT2RP1001247, NT2RP1001286, NT2RP1001310, NT2RP1001311, NT2RP1001313, NT2RP1001385, NT2RP1001449, NT2RP1001546, NT2RP1001569, NT2RP2000032, NT2RP2000040, NT2RP2000070, NT2RP2000091, NT2RP2000114, NT2RP2000120, NT2RP2000173, NT2RP2000175, NT2RP2000195, NT2RP2000248, NT2RP2000270, NT2RP2000283, NT2RP2000289, NT2RP2000459, NT2RP2000516, NT2RP2000842, NT2RP2000892, NT2RP2001081, NT2RP2001268, NT2RP2001295, NT2RP2001366, NT2RP2001576, NT2RP2001581, NT2RP2001597, NT2RP2001947, NT2RP2001991, NT2RP2002025, NT2RP2002312, NT2RP2002385, NT2RP2002479, NT2RP2002537, NT2RP2002643, NT2RP2002701, NT2RP2002740, NT2RP2002857, NT2RP2003125, NT2RP2003297, NT2RP2003433, NT2RP2003446, NT2RP2003466, NT2RP2003629, NT2RP2003777, NT2RP2003781, NT2RP2004041, NT2RP2004194, NT2RP2004270, NT2RP2004681, NT2RP2004775, NT2RP2004799, NT2RP2004936, NT2RP2005012, NT2RP2005159, NT2RP2005227, NT2RP2005270, NT2RP2005344, NT2RP2005509, NT2RP2005752, NT2RP2005781, NT2RP2005784, NT2RP2005812, NT2RP2006069, NT2RP2006100, NT2RP2006141, NT2RP2006261, NT2RP2006571, NT2RP3000092, NT2RP3000134, NT2RP3000333, NT2RP3000393, NT2RP3000439, NT2RP3000441, NT2RP3000531, NT2RP3000685, NT2RP3000826, NT2RP3000852, NT2RP3001126, NT2RP3001176, NT2RP3001260, NT2RP3001355, NT2RP3001383, NT2RP3001426, NT2RP3001453, NT2RP3001497, NT2RP3001538, NT2RP3001716, NT2RP3001727, NT2RP3001739, NT2RP3001799, NT2RP3001943, NT2RP3001944, NT2RP3002002, NT2RP3002014, NT2RP3002054, NT2RP3002108, NT2RP3002163, NT2RP3002351, NT2RP3002455, NT2RP3002549, NT2RP3002628, NT2RP3002650, NT2RP3002687, NT2RP3002701, NT2RP3002869, NT2RP3002969, NT2RP3003008, NT2RP3003071, NT2RP3003101, NT2RP3003145, NT2RP3003302, NT2RP3003353, NT2RP3003409, NT2RP3003716, NT2RP3003918, NT2RP3004207, NT2RP3004454, NT2RP3004503, NT2RP4000051, NT2RP4000151, NT2RP4000243, NT2RP4000259, NT2RP4000323, NT2RP4000500, NT2RP4000560, NT2RP4000588, NT2RP4000713, NT2RP4000724, NT2RP4000833, NT2RP4000878, NT2RP4000907, NT2RP4000925, NT2RP4000928, NT2RP4000973, NT2RP4000989, NT2RP4001057, NT2RP4001064, NT2RP4001079, NT2RP4001117, NT2RP4001138, NT2RP4001150, NT2RP4001174, NT2RP4001274, NT2RP4001345, NT2RP4001372, NT2RP4001373, NT2RP4001379, NT2RP4001498, NT2RP4001547, NT2RP4001571, NT2RP4001644, NT2RP4001677, NT2RP4001803, NT2RP4001822, NT2RP4001975, NT2RP4002052, NT2RP4002075, NT2RP5003500, NT2RP5003506, NT2RP5003522, NT2RP5003534, OVARC1000151, OVARC1000241, OVARC1000335, OVARC1000700, OVARC1000722, OVARC1000751, OVARC1000850, OVARC1000924, OVARC1000936, OVARC1000959, OVARC1000984, OVARC1001034, OVARC1001129, OVARC1001381, OVARC1001391, OVARC1001453, OVARC1001476, OVARC1001506, OVARC1001610, OVARC1001702, OVARC1001703, OVARC1001713, OVARC1001745, OVARC1001767, OVARC1002127, OVARC1002158, OVARC1002165, PLACE1000014, PLACE1000401, PLACE1000562, PLACE1000611, PLACE1000656, PLACE1000712, PLACE1000909, PLACE1000948, PLACE1001241, PLACE1001257, PLACE1001377, PLACE1001517, PLACE1001610, PLACE1001771, PLACE1001817, PLACE1001983, PLACE1002213, PLACE1002395, PLACE1002500, PLACE1002714, PLACE1002722, PLACE1002794, PLACE1002851, PLACE1002908, PLACE1003045, PLACE1003238, PLACE1003296, PLACE1003369, PLACE1003493, PLACE1003537, PLACE1003553, PLACE1003768, PLACE1003771, PLACE1003903, PLACE1004197, PLACE1004258, PLACE1004270, PLACE1004289, PLACE1004473, PLACE1004743, PLACE1004840, PLACE1004969, PLACE1005086, PLACE1005206, PLACE1005313, PLACE1005530, PLACE1005595, PLACE1005623, PLACE1005763, PLACE1005884, PLACE1005934, PLACE1006225, PLACE1006754, PLACE1006901, PLACE1006935, PLACE1006956, PLACE1007014, PLACE1007111, PLACE1007243, PLACE1007274, PLACE1007282, PLACE1007317, PLACE1007375, PLACE1007386, PLACE1007409, PLACE1007484, PLACE1007583, PLACE1007632, PLACE1007645, PLACE1007852, PLACE1007877, PLACE1008331, PLACE1008424, PLACE1008531, PLACE1008532, PLACE1008568, PLACE1008715, PLACE1009045, PLACE1009319, PLACE1009338, PLACE1009368, PLACE1009493, PLACE1009639, PLACE1009708, PLACE1009731, PLACE1010089, PLACE1010231, PLACE1010321, PLACE1010622, PLACE1010811, PLACE1010917, PLACE1010954, PLACE1011090, PLACE1011214, PLACE1011221, PLACE1011399, PLACE1011492, PLACE1011646, PLACE1011749, PLACE2000034, PLACE2000111, PLACE2000176, PLACE2000187, PLACE2000341, PLACE2000379, PLACE2000425, PLACE2000458, PLACE3000020, PLACE3000218, PLACE3000226, PLACE3000244, PLACE3000413, PLACE4000052, PLACE4000129, PLACE4000300, PLACE4000387, PLACE4000581, PLACE4000593, PLACE4000650, THYRO1000394, THYRO1000395, THYRO1000570, THYRO1000748, THYRO1000756, THYRO1001134, THYRO1001271, THYRO1001401, THYRO1001534, THYRO1001541, THYRO1001809, Y79AA1000258, Y79AA1000420, Y79AA1000469, Y79AA1000734, Y79AA1000800, Y79AA1000976, Y79AA1001023, Y79AA1001177, Y79AA1001394, Y79AA1001603, Y79AA1001647, Y79AA1001846, Y79AA1001874, Y79AA1002139, Y79AA1002351, Y79AA1002399, Y79AA1002416 HEMBA1004055, HEMBB1001630, HEMBB1001872, HEMBB1002044, HEMBB1002383, MAMMA1000778, MAMMA1000859, MAMMA1000897, MAMMA1001073, MAMMA1002009, MAMMA1002844, MAMMA1002947, MAMMA1003089, NT2RM1000092, NT2RM1000833, NT2RP2002105, NT2RP2003668, NT2RP2006184, NT2RP3001282, NT2RP3002810, NT2RP3002985, NT2RP3003059, NT2RP3003576, NT2RP3003665, NT2RP3003799, NT2RP3003828, NT2RP3003992, NT2RP3004051, NT2RP3004155, OVARC1000890, OVARC1001117, OVARC1001329, PLACE1001761, PLACE1002437, PLACE1004793, PLACE1005611, PLACE1005898, PLACE1009935, PLACE1011896, PLACE2000132, PLACE2000335, PLACE3000373, PLACE3000406, PLACE4000250, PLACE4000487, PLACE4000494, THYRO1001320, THYRO1001537, THYRO1001828, Y79AA1001384

[0624] Names of clones whose deduced amino acid sequences were predicted to have functional domains by Pfam search, and names of the matched functional domains are shown below. When multiple functional domains matched a clone, each domain name was indicated, separated by a double-slash mark, //.

HEMBA1000005//DnaJ, prokaryotic heat shock protein

HEMBA1000020//Tubulin

HEMBA1000129//Helicases conserved C-terminal domain

HEMBA1000156//RNA recognition motif. (aka RRM, RBD, or RNP domain)

HEMBA1000158//Fork head domain, eukaryotic transcription factors //Zinc finger, C2H2 type

HEMBA1000303//Src homology domain 3//Zinc finger, C3HC4 type (RING finger)

HEMBA1000411//Ank repeat

HEMBA1000491//Ras family (contains ATP/GTP binding P-loop)

HEMBA1000531//Heat shock hsp70 proteins

HEMBA1000561//Zinc finger, C2H2 type

HEMBA1000608//Src homology domain 3

HEMBA1000919//WD domain, G-beta repeats

HEMBA1001043//Ank repeat

HEMBA1001088//LIM domain containing proteins

HEMBA1001137//Zinc finger, C2H2 type

HEMBA1001174//ADP-ribosylation factors (Arf family) (contains ATP/GTP binding P-loop)

HEMBA1001247//WW/rsp5/WWP domain containing proteins

HEMBA1001286//Sushi domain

HEMBA1001510//Basic region plus leucine zipper transcription factors

HEMBA1001515//Reverse transcriptase (RNA-dependent DNA polymerase)

HEMBA1001661//Cadherin

HEMBA1001723//WD domain, G-beta repeats

HEMBA1001744//Eukaryotic protein kinase domain

HEMBA1001804//Zinc finger, C2H2 type

HEMBA1001819//Zinc finger, C2H2 type

HEMBA1001847//Zinc finger, C2H2 type

HEMBA1002035//Bromodomain

HEMBA1002102//Ank repeat

HEMBA1002161//Myosin head (motor domain) (contains ATP/GTP binding P-loop)

HEMBA1002177//GATA family of transcription factors //Zinc finger, C2H2 type

HEMBA1002212//Eukaryotic protein kinase domain

HEMBA1002215//LIM domain containing proteins

HEMBA1002419//RNA recognition motif. (aka RRM, RBD, or RNP domain)

HEMBA1002547//Kazal-type serine protease inhibitor domain //Laminin EGF-like (Domains III and V)

HEMBA1002768//Src homology domain 3

HEMBA1002810//WW/rsp5/WWP domain containing proteins

HEMBA1002818//EGF-like domain

HEMBA1002935//Zinc finger, C2H2 type

HEMBA1002939//Ank repeat

HEMBA1002973//3′5′-cyclic nucleotide phosphodiesterases

HEMBA1003077//Fibronectin type III domain

HEMBA1003250//Eukaryotic protein kinase domain

HEMBA1003257//Zinc finger, C2H2 type

HEMBA1003281//IG superfamily

HEMBA1003291//Eukaryotic protein kinase domain

HEMBA1003433//Forkhead-associated (FHA) domain

HEMBA1003545//Homeobox domain //LIM domain containing proteins

HEMBA1003591//RNA recognition motif. (aka RRM, RBD, or RNP domain)

HEMBA1003684//Zinc finger, C2H2 type

HEMBA1003953//Zinc finger, C2H2 type

HEMBA1004202//Ras family (contains ATP/GTP binding P-loop)

HEMBA1004227//Protein phosphatase 2C

HEMBA1004321//Zinc finger, C2H2 type

HEMBA1004356//RNA recognition motif. (aka RRM, RBD, or RNP domain)

HEMBA1004408//Peptidyl-prolyl cis-trans isomerases

HEMBA1004596//RNA recognition motif. (aka RRM, RBD, or RNP domain)

HEMBA1004734//Ubiquitin-conjugating enzymes

HEMBA1004973//Fibronectin type III domain

HEMBA1005009//Actins

HEMBA1005101//RNA recognition motif. (aka RRM, RBD, or RNP domain)

HEMBA1005581//EGF-like domain //Laminin G domain

HEMBA1005732//Polyprenyl synthetases

HEMBA1005737//EF hand

HEMBA1006248//Zinc finger, C2H2 type

HEMBA1006284//Ubiquitin family

HEMBA1006293//IG superfamily

HEMBA1006344//Band 4.1 family

HEMBA1006445//Ras family (contains ATP/GTP binding P-loop)

HEMBA1006492//Ank repeat

HEMBA1006559//Zinc finger, C3HC4 type (RING finger)

HEMBA1006708//WD domain, G-beta repeats

HEMBA1006737//Ank repeat

HEMBA1006758//Cadherin

HEMBA1006941//Thioredoxins

HEMBA1007243//Purine/pyrimidine phosphoribosyl transferases

HEMBA1007300//3′5′-cyclic nucleotide phosphodiesterases

HEMBB1000083//IG superfamily

HEMBB1000317//EGF-like domain //Thrombospondin type 1 domain

HEMBB1000556//Actinin-type actin-binding domain containing proteins //LIM domain containing proteins

HEMBB1000725//Ras family (contains ATP/GTP binding P-loop)

HEMBB1000781//Eukaryotic protein kinase domain

HEMBB1000915//Thrombospondin type 1 domain

HEMBB1000927//EF hand

HEMBB1000947//Double-stranded RNA binding motif

HEMBB1001112//eubacterial secY protein

HEMBB1001175//Ank repeat

HEMBB1001234//WW/rsp5/WWP domain containing proteins

HEMBB1001282//Ank repeat

HEMBB1001294//Ras family (contains ATP/GTP binding P-loop)

HEMBB1001339//Forkhead-associated (FHA) domain

HEMBB1001673//Forkhead-associated (FHA) domain //Zinc finger, C3HC4 type (RING finger)

HEMBB1001802//Intermediate filament proteins

HEMBB1001839//Zinc finger, C2H2 type

HEMBB1002217//Zinc finger, C2H2 type

HEMBB1002342//Thioredoxins

HEMBB1002600//4 transmembrane segments integral membrane proteins

MAMMA1000173//Src homology domain 3

MAMMA1000388//Zinc finger, C2H2 type

MAMMA1000402//Reverse transcriptase (RNA-dependent DNA polymerase)

MAMMA1000612//WD domain, G-beta repeats

MAMMA1000672//Serine carboxypeptidases

MAMMA1000731//SNF2 and others N-terminal domain

MAMMA1001008//Eukaryotic aspartyl proteases

MAMMA1001041//Actinin-type actin-binding domain containing proteins

MAMMA1001059//DEAD and DEAH box helicases //Helicases conserved C-terminal domain

MAMMA1001105//Zinc finger, C2H2 type

MAMMA1001260//Zinc finger, C3HC4 type (RING finger)

MAMMA1001576//Tubulin

MAMMA1001735//Tubulin

MAMMA1001768//ATPases associated with various cellular activities (AAA)

MAMMA1001837//Zinc finger, C2H2 type

MAMMA1002170//Ribosomal protein S5

MAMMA1002385//RNA recognition motif. (aka RRM, RBD, or RNP domain)

MAMMA1002619//Ubiquitin carboxyl-terminal hydrolases family 2

MAMMA1002637//Kinesin light chain repeat

MAMMA1002650//Zinc finger, C2H2 type

MAMMA1002671//AMP-binding enzymes

MAMMA1002869//LIM domain containing proteins

MAMMA1002881//SCP-like extracellular Proteins

MAMMA1002937//Zinc finger, C2H2 type

MAMMA1002938//Multicopper oxidases

MAMMA1003011//Core histones H2A, H2B, H3 and H4

MAMMA1003057//WD domain, G-beta repeats

MAMMA1003127//Myosin head (motor domain) (contains ATP/GTP binding P-loop)

NT2RM1000086//Zinc finger, C3HC4 type (RING finger)

NT2RM1000199//CUB domain //Sushi domain

NT2RM1000256//Glutamine amidotransferases class-II

NT2RM1000499//Ank repeat

NT2RM1000555//‘Cold-shock’ DNA-binding domain containing proteins

NT2RM1000666//‘Cold-shock’ DNA-binding domain containing proteins //Zinc finger, CCHC class

NT2RM1000772//WD domain, G-beta repeats

NT2RM1000826//‘Cold-shock’ DNA-binding domain containing proteins

NT2RM1000850//Ank repeat //Eukaryotic protein kinase domain

NT2RM1000852//DEAD and DEAH box helicases //Helicases conserved C-terminal domain

NT2RM1000882//Heme-binding domain in cytochrome b5 and oxidoreductases

NT2RM1000885//Zinc finger, C3HC4 type (RING finger)

NT2RM1001059//RNA recognition motif. (aka RRM, RBD, or RNP domain)

NT2RM1001072//C2 domain //Phosphatidylinositol-specific phospholipase C, X domain //Phosphatidylinositol-specific phospholipase C, Y domain

NT2RM2000092//Ubiquitin carboxyl-terminal hydrolases family 2

NT2RM2000101//Zinc finger, C3HC4 type (RING finger)

NT2RM2000191//3′5′-cyclic nucleotide phosphodiesterases

NT2RM2000422//Sodium:neurotransmitter symporter family

NT2RM2000490//C2 domain

NT2RM2000566//Integrins alpha chain

NT2RM2000577//tRNA synthetases class I

NT2RM2000594//C-5 cytosine-specific DNA methylases

NT2RM2000691//Actins

NT2RM2000735//Zinc finger, C2H2 type

NT2RM2000740//Helicases conserved C-terminal domain

NT2RM2000951//FGGY family of carbohydrate kinases

NT2RM2001324//LIM domain containing proteins

NT2RM2001499//Amino acid permeases

NT2RM2001547//DnaJ, prokaryotic heat shock protein //Thioredoxins

NT2RM2001613//eubacterial secY protein

NT2RM2001670//Zinc finger, C2H2 type

NT2RM2001700//Acyl-CoA dehydrogenases

NT2RM2001730//Ubiquitin carboxyl-terminal hydrolases family 2

NT2RM2001813//WD domain, G-beta repeats

NT2RM2001823//Helicases conserved C-terminal domain //SNF2 and others N-terminal domain

NT2RM2001896//Cytochrome C oxidase subunit II

NT2RM2001989//RNA recognition motif. (aka RRM, RBD, or RNP domain)

NT2RM2001997//Thioredoxins

NT2RM2002088//KH domain family of RNA binding proteins

NT2RM2002100//DEAD and DEAH box helicases //Helicases conserved C-terminal domain

NT2RM2002109//IG superfamily

NT2RM4000046//Zinc finger, C3HC4 type (RING finger)

NT2RM4000104//Zinc finger, C2H2 type

NT2RM4000167//Kinesin motor domain

NT2RM4000191//DEAD and DEAH box helicases //Helicases conserved C-terminal domain

NT2RM4000202//Zinc finger, C2H2 type

NT2RM4000229//PH (pleckstrin homology) domain

NT2RM4000344//ATPases associated with various cellular activities (AAA)

NT2RM4000356//Ras family (contains ATP/GTP binding P-loop)

NT2RM4000471//Aminotransferases class-V

NT2RM4000496//ATPases associated with various cellular activities (AAA)

NT2RM4000611//WD domain, G-beta repeats

NT2RM4000657//C2 domain //Phosphatidylinositol-specific phospholipase C, Y domain

NT2RM4000712//Ubiquitin carboxyl-terminal hydrolases family 2//Ubiquitin carboxyl-terminal hydrolases family 2

NT2RM4000733//Forkhead-associated (FHA) domain

NT2RM4000734//Zinc finger, C2H2 type

NT2RM4000751//Zinc finger, C2H2 type

NT2RM4000795//Carboxylesterases

NT2RM4000996//Zinc finger, C2H2 type

NT2RM4001054//eubacterial secY protein

NT2RM4001140//Homeobox domain

NT2RM4001178//DEAD and DEAH box helicases

NT2RM4001200//Zinc finger, C2H2 type

NT2RM4001313//Phosphatidylinositol 3- and 4-kinases

NT2RM4001316//Acyl-CoA dehydrogenases

NT2RM4001320//Src homology domain 3

NT2RM4001411//PH (pleckstrin homology) domain //Src homology domain 2

NT2RM4001454//PH (pleckstrin homology) domain

NT2RM4001483//Zinc finger, C2H2 type

NT2RM4001629//Src homology domain 3

NT2RM4001758//Eukaryotic protein kinase domain

NT2RM4001810//Zinc finger, C2H2 type

NT2RM4001813//Lectin C-type domain short and long forms

NT2RM4001823//Zinc finger, C2H2 type

NT2RM4001828//Zinc finger, C2H2 type

NT2RM4001979//Zinc finger, C2H2 type

NT2RM4001987//IG superfamily

NT2RM4002013//WD domain, G-beta repeats

NT2RM4002073//AMP-binding enzymes

NT2RM4002093//RNA recognition motif. (aka RRM, RBD, or RNP domain)

NT2RM4002145//IG superfamily

NT2RM4002287//Fibronectin type III domain

NT2RM4002527//WD domain, G-beta repeats

NT2RM4002623//tRNA synthetases class II

NT2RP1000101//Zinc finger, C2H2 type

NT2RP1000202//Ank repeat

NT2RP1000272//RNA recognition motif. (aka RRM, RBD, or RNP domain)

NT2RP1000363//PH (pleckstrin homology) domain

NT2RP1000376//Ank repeat

NT2RP1000470//DEAD and DEAH box helicases

NT2RP1000478//Tubulin

NT2RP1000522//Ubiquitin carboxyl-terminal hydrolases family 2//Ubiquitin carboxyl-terminal hydrolases family 2

NT2RP1000677//Kazal-type serine protease inhibitor domain

NT2RP1000701//WD domain, G-beta repeats

NT2RP1000733//Elongation factor Tu family (contains ATP/GTP binding P-loop)

NT2RP1000782//4 transmembrane segments integral membrane proteins

NT2RP1000833//3′5′-cyclic nucleotide phosphodiesterases

NT2RP1000856//4 transmembrane segments integral membrane proteins

NT2RP1000947//Ubiquitin-conjugating enzymes

NT2RP1000959//60s Acidic ribosomal protein

NT2RP1000966//RNA recognition motif. (aka RRM, RBD, or RNP domain)

NT2RP1001033//Tubulin

NT2RP1001080//DEAD and DEAH box helicases //Helicases conserved C-terminal domain

NT2RP1001177//Core histones H2A, H2B, H3 and H4

NT2RP1001247//Transforming growth factor beta like domain

NT2RP1001294//WD domain, G-beta repeats

NT2RP1001302//WD domain, G-beta repeats

NT2RP1001313//Heme-binding domain in cytochrome b5 and oxidoreductases

NT2RP1001457//WD domain, G-beta repeats

NT2RP1001546//4 transmembrane segments integral membrane proteins

NT2RP2000008//Zinc finger, C2H2 type

NT2RP2000040//C2 domain

NT2RP2000045//DnaJ, prokaryotic heat shock protein

NT2RP2000054//Zinc finger, C3HC4 type (RING finger)

NT2RP2000070//Cadherin

NT2RP2000126//Helicases conserved C-terminal domain //SNF2 and others N-terminal domain

NT2RP2000153//RNA recognition motif. (aka RRM, RBD, or RNP domain)

NT2RP2000224//PH (pleckstrin homology) domain

NT2RP2000257//Mitochondrial carrier proteins

NT2RP2000329//Adenylate kinases

NT2RP2000414//RNA recognition motif. (aka RRM, RBD, or RNP domain)

NT2RP2000448//PH (pleckstrin homology) domain

NT2RP2000660//ATPases associated with various cellular activities (AAA)

NT2RP2000668//Eukaryotic protein kinase domain

NT2RP2000710//tRNA synthetases class II

NT2RP2000764//Aminotransferases class-V

NT2RP2000842//7 transmembrane receptor (rhodopsin family)

NT2RP2000880//Elongation factor Tu family (contains ATP/GTP binding P-loop)

NT2RP2000931//RNA recognition motif. (aka RRM, RBD, or RNP domain)

NT2RP2000932//Ank repeat

NT2RP2001081//C2 domain

NT2RP2001174//Zinc finger, C2H2 type

NT2RP2001397//Cyclins

NT2RP2001520//Mitochondrial carrier proteins

NT2RP2001597//Zinc finger, C3HC4 type (RING finger)

NT2RP2001740//Ubiquitin carboxyl-terminal hydrolases family 2

NT2RP2001748//Polyprenyl synthetases

NT2RP2001756//Zinc finger, C2H2 type

NT2RP2001839//Eukaryotic protein kinase domain

NT2RP2001900//Actins

NT2RP2001991//Sodium:neurotransmitter symporter family

NT2RP2002058//WD domain, G-beta repeats

NT2RP2002124//Ubiquitin carboxyl-terminal hydrolases family 2//Ubiquitin carboxyl-terminal hydrolases family 2

NT2RP2002185//Ubiquitin family

NT2RP2002208//Zinc finger, C3HC4 type (RING finger)

NT2RP2002256//Cytochrome P450

NT2RP2002479//ABC transporters

NT2RP2002503//Zinc finger, C2H2 type

NT2RP2002520//Ank repeat

NT2RP2002591//Zinc finger, C2H2 type

NT2RP2002741//Src homology domain 3

NT2RP2002929//WD domain, G-beta repeats

NT2RP2002939//Zinc finger, C2H2 type

NT2RP2002959//Ubiquitin-conjugating enzymes

NT2RP2002980//Ribosomal protein S10

NT2RP2003137//Ubiquitin family

NT2RP2003164//Eukaryotic protein kinase domain

NT2RP2003228//MCM2/3/5 family

NT2RP2003243//Fibronectin type III domain

NT2RP2003272//Ubiquitin family

NT2RP2003307//Kinesin light chain repeat

NT2RP2003401//Ubiquitin carboxyl-terminal hydrolases family 2//Ubiquitin carboxyl-terminal hydrolases family 2

NT2RP2003433//eubacterial secY protein

NT2RP2003480//Zinc finger, C2H2 type

NT2RP2003713//Ubiquitin carboxyl-terminal hydrolases family 2

NT2RP2003737//Ubiquitin-conjugating enzymes

NT2RP2003777//Zinc finger, C3HC4 type (RING finger)

NT2RP2003840//Ubiquitin-conjugating enzymes

NT2RP2003857//Ank repeat

NT2RP2003981//Zinc finger, C3HC4 type (RING finger)

NT2RP2004170//WD domain, G-beta repeats

NT2RP2004187//Zinc finger, C2H2 type

NT2RP2004232//Phorbol esters/diacylglycerol binding domain //PH (pleckstrin homology) domain //Eukaryotic protein kinase domain

NT2RP2004389//Ribosomal protein S9

NT2RP2004538//PH (pleckstrin homology) domain

NT2RP2004568//DEAD and DEAH box helicases //Helicases conserved C-terminal domain

NT2RP2004710//WW/rsp5/WWP domain containing proteins

NT2RP2004768//Eukaryotic protein kinase domain

NT2RP2004933//Eukaryotic protein kinase domain

NT2RP2004961//Zinc finger, C2H2 type

NT2RP2005003//Zinc finger, C3HC4 type (RING finger)

NT2RP2005012//DnaJ, prokaryotic heat shock protein

NT2RP2005126//DEAD and DEAH box helicases //Helicases conserved C-terminal domain

NT2RP2005139//Ank repeat

NT2RP2005140//PH (pleckstrin homology) domain

NT2RP2005239//Aminotransferases class-V

NT2RP2005288//Regulator of chromosome condensation (RCC1)

NT2RP2005293//PH (pleckstrin homology) domain

NT2RP2005325//Homeobox domain //LIM domain containing proteins

NT2RP2005344//E1-E2 ATPases

NT2RP2005465//Mitochondrial carrier proteins

NT2RP2005525//Forkhead-associated (FHA) domain

NT2RP2005531//Band 4.1 family

NT2RP2005557//Bacterial mutT protein

NT2RP2005654//DnaJ, prokaryotic heat shock protein

NT2RP2005701//Zinc finger, C3HC4 type (RING finger)

NT2RP2005722//Zinc finger, C2H2 type

NT2RP2005752//TNFR/NGFR cysteine-rich region

NT2RP2005763//DEAD and DEAH box helicases //Helicases conserved C-terminal domain

NT2RP2005767//HMG (high mobility group) box

NT2RP2006312//HMG (high mobility group) box

NT2RP2006464//HMG (high mobility group) box

NT2RP2006571//Cytochrome P450

NT2RP3000050//Zinc finger, C2H2 type

NT2RP3000068//PH (pleckstrin homology) domain

NT2RP3000085//Biotin-requiring enzymes //Carbamoyl-phosphate synthase (CPSase)

NT2RP3000299//Src homology domain 3

NT2RP3000359//Adenylate kinases

NT2RP3000366//Ras family (contains ATP/GTP binding P-loop)

NT2RP3000403//WW/rsp5/WWP domain containing proteins

NT2RP3000487//WW/rsp5/WWP domain containing proteins

NT2RP3000512//Homeobox domain

NT2RP3000527//Zinc finger, C2H2 type

NT2RP3000531//IG superfamily

NT2RP3000590//Zinc finger, C3HC4 type (RING finger)

NT2RP3000603//Helix-loop-helix DNA-binding domain

NT2RP3000605//Zinc finger, C2H2 type

NT2RP3000632//Zinc finger, C2H2 type

NT2RP3000742//Phosphatidylinositol-specific phospholipase C, X domain //Phosphatidylinositol-specific phospholipase C, Y domain

NT2RP3000759//ADP-ribosylation factors (Arf family) (contains ATP/GTP binding P-loop)

NT2RP3000825//EGF-like domain

NT2RP3000869//ATPases associated with various cellular activities (AAA)

NT2RP3000994//Double-stranded RNA binding motif

NT2RP3001057//Zinc finger, C2H2 type

NT2RP3001084//PH (pleckstrin homology) domain

NT2RP3001120//Zinc finger, C2H2 type

NT2RP3001140//Thrombospondin type 1 domain

NT2RP3001150//Forkhead-associated (FHA) domain

NT2RP3001155//HMG (high mobility group) box

NT2RP3001214//Zinc finger, C2H2 type

NT2RP3001268//Zinc finger, C2H2 type

NT2RP3001338//Zinc finger, C2H2 type

NT2RP3001355//Mitochondrial carrier proteins

NT2RP3001398//Zinc finger, C2H2 type

NT2RP3001426//DnaJ, prokaryotic heat shock protein

NT2RP3001453//ABC transporters

NT2RP3001457//PH (pleckstrin homology) domain

NT2RP3001472//HMG (high mobility group) box

NT2RP3001495//Alcohol/other dehydrogenases, short chain type //WW/rsp5/WWP domain containing proteins

NT2RP3001497//Zinc finger, C3HC4 type (RING finger)

NT2RP3001724//Helicases conserved C-terminal domain

NT2RP3001792//RNA recognition motif. (aka RRM, RBD, or RNP domain)

NT2RP3001943//Zinc finger, C3HC4 type (RING finger)

NT2RP3001944//Zinc finger, C3HC4 type (RING finger)

NT2RP3002007//ATPases associated with various cellular activities (AAA)

NT2RP3002054//Low-density lipoprotein receptor domain class A

NT2RP3002151//Elongation factor Tu family (contains ATP/GTP binding P-loop)

NT2RP3002399//MCM2/3/5 family

NT2RP3002501//Serine/threonine dehydratases

NT2RP3002602//Thioredoxins

NT2RP3002628//DnaJ, prokaryotic heat shock protein //Thioredoxins

NT2RP3002663//PH (pleckstrin homology) domain

NT2RP3002909//Ank repeat

NT2RP3002953//Cadherin

NT2RP3002969//AMP-binding enzymes

NT2RP3003061//Ank repeat

NT2RP3003145//Zinc carboxypeptidases

NT2RP3003230//WD domain, G-beta repeats

NT2RP3003251//Zinc finger, C3HC4 type (RING finger)

NT2RP3003278//Ank repeat //Zinc finger, C2H2 type

NT2RP3003282//PH (pleckstrin homology) domain

NT2RP3003311//PH (pleckstrin homology) domain

NT2RP3003385//Ank repeat //Chaperonins clpA/B

NT2RP3003589//Ras family (contains ATP/GTP binding P-loop)

NT2RP3003621//CUB domain //Kringle domain

NT2RP3003701//Thrombospondin type 1 domain

NT2RP3003716//Fibronectin type III domain

NT2RP3003809//ATPases associated with various cellular activities (AAA)

NT2RP3004016//Zinc finger, C3HC4 type (RING finger)

NT2RP3004207//CUB domain //Sushi domain

NT2RP3004209//Ubiquitin carboxyl-terminal hydrolases family 2//Ubiquitin carboxyl-terminal hydrolases family 2

NT2RP3004242//PH (pleckstrin homology) domain

NT2RP3004262//DnaJ, prokaryotic heat shock protein

NT2RP3004566//Zinc finger, C2H2 type

NT2RP3004569//Ank repeat

NT2RP3004594//HMG (high mobility group) box

NT2RP3004617//Zinc finger, C3HC4 type (RING finger)

NT2RP4000259//Glutathione peroxidases

NT2RP4000370//Prokaryotic-type class I peptide chain release factors

NT2RP4000376//WD domain, G-beta repeats

NT2RP4000398//Zinc finger, C2H2 type

NT2RP4000455//Forkhead-associated (FHA) domain //Zinc finger, C3HC4 type

(RING finger)

[0625] NT2RP4000457//Ubiquitin carboxyl-terminal hydrolases family 2

NT2RP4000518//DEAD and DEAH box helicases //Helicases conserved C-terminal domain

NT2RP4000588//Actinin-type actin-binding domain containing proteins

NT2RP4000614//RNA recognition motif. (aka RRM, RBD, or RNP domain)

NT2RP4000648//Forkhead-associated (FHA) domain //Zinc finger, C3HC4 type

(RING finger)

[0626] NT2RP4000837//Zinc finger, C2H2 type

NT2RP4000839//WD domain, G-beta repeats

NT2RP4000865//Zinc finger, C2H2 type

NT2RP4000907//Fibronectin type III domain //IG superfamily

NT2RP4000925//Fibronectin type III domain

NT2RP4000927//Ubiquitin carboxyl-terminal hydrolases family 2//Ubiquitin carboxyl-terminal hydrolases family 2

NT2RP4000973//DnaJ, prokaryotic heat shock protein //Thioredoxins

NT2RP4001079//E1-E2 ATPases

NT2RP4001080//RNA recognition motif. (aka RRM, RBD, or RNP domain)

NT2RP4001117//eubacterial secY protein

NT2RP4001150//Fibronectin type III domain

NT2RP4001213//Zinc finger, C2H2 type

NT2RP4001219//Thioredoxins

NT2RP4001235//Zinc finger, CCHC class

NT2RP4001433//Zinc finger, C2H2 type

NT2RP4001498//Ank repeat

NT2RP4001568//Ank repeat

NT2RP4001644//Eukaryotic protein kinase domain

NT2RP4001725//WD domain, G-beta repeats

NT2RP4001753//Zinc finger, C2H2 type

NT2RP4001790//Zinc finger, C2H2 type

NT2RP4001822//4 transmembrane segments integral membrane proteins

NT2RP4001823//Fibrinogen beta and gamma chains, C-terminal globular domain

NT2RP4001893//Ank repeat

NT2RP4001896//WD domain, G-beta repeats

NT2RP4001927//WD domain, G-beta repeats

NT2RP4001938//Zinc finger, C2H2 type

NT2RP4002047//Elongation factor Tu family (contains ATP/GTP binding P-loop)

NT2RP4002078//Zinc finger, C2H2 type

NT2RP4002408//Eukaryotic protein kinase domain

NT2RP4002905//Cyclins

NT2RP5003477//WD domain, G-beta repeats

OVARC1000006//Core histones H2A, H2B, H3 and H4

OVARC1000085//Proteasome A-type and B-type

OVARC1000148//RNA recognition motif. (aka RRM, RBD, or RNP domain)

OVARC1000556//Eukaryotic protein kinase domain

OVARC1000649//PH (pleckstrin homology) domain //Src homology domain 2

OVARC1000746//Double-stranded RNA binding motif

OVARC1000885//Alcohol/other dehydrogenases, short chain type

OVARC1000937//Cyclins

OVARC1000999//Ank repeat

OVARC1001154//Granulins

OVARC1001180//Ubiquitin family

OVARC1001306//Helix-loop-helix DNA-binding domain

OVARC1001577//RNA recognition motif. (aka RRM, RBD, or RNP domain)

OVARC1001731//Tropomyosins

OVARC1001943//Zinc finger, C2H2 type

OVARC1002050//Spectrin alpha chain, repeated domain

OVARC1002112//Core histones H2A, H2B, H3 and H4

OVARC1002138//ATPases associated with various cellular activities (AAA)

OVARC1002182//WD domain, G-beta repeats

PLACE1000014//Zinc finger, C3HC4 type (RING finger)

PLACE1000040//Ras family (contains ATP/GTP binding P-loop)

PLACE1000050//Zinc finger, C2H2 type

PLACE1000081//PH (pleckstrin homology) domain

PLACE1000142//Enoyl-CoA hydratase/isomerase

PLACE1000401//IG superfamily

PLACE1000406//RNA recognition motif. (aka RRM, RBD, or RNP domain)

PLACE1000420//Bacterial mutT protein

PLACE1000706//Bromodomain

PLACE1000769//KH domain family of RNA binding proteins

PLACE1000786//PH (pleckstrin homology) domain

PLACE1000863//Ribosomal protein S4

PLACE1000909//Ank repeat

PLACE1000972//Src homology domain 3

PLACE1000979//Zinc finger, C2H2 type

PLACE1001304//Zinc finger, C2H2 type

PLACE1001387//Src homology domain 3

PLACE1001632//Zinc finger, C2H2 type

PLACE1001672//Aminotransferases class-III pyridoxal-phosphate

PLACE1001716//Zinc finger, CCHC class

PLACE1001739//DEAD and DEAH box helicases //Helicases conserved C-terminal domain

PLACE1001781//Phosphoglucomutase and phosphomannomutase phosphoserine

PLACE1001869//FGGY family of carbohydrate kinases

PLACE1002438//Zinc finger, C2H2 type

PLACE1002450//Zinc finger, C2H2 type

PLACE1002474//EGF-like domain //von Willebrand factor type A domain

PLACE1002499//Zinc finger, C3HC4 type (RING finger)

PLACE1002532//Homeobox domain

PLACE1002571//Actins

PLACE1002685//Src homology domain 2

PLACE1002722//7 transmembrane receptor (rhodopsin family)

PLACE1002775//Bromodomain

PLACE1002834//Zinc finger, C2H2 type

PLACE1003100//Alcohol/other dehydrogenases, short chain type

PLACE1003174//Ubiquitin-conjugating enzymes

PLACE1003238//7 transmembrane receptor (rhodopsin family)

PLACE1003302//Zinc finger, C2H2 type

PLACE1003334//RNA recognition motif. (aka RRM, RBD, or RNP domain)

PLACE1003366//C2 domain

PLACE1003394//Ras family (contains ATP/GTP binding P-loop)

PLACE1003420//Mitochondrial carrier proteins

PLACE1003493//C1q domain

PLACE1003519//KH domain family of RNA binding proteins

PLACE1003723//Src homology domain 2

PLACE1003738//Zinc finger, C2H2 type

PLACE1003888//C2 domain //Phosphatidylinositol-specific phospholipase C, X domain //Phosphatidylinositol-specific phospholipase C, Y domain

PLACE1004128//WD domain, G-beta repeats

PLACE1004358//PH (pleckstrin homology) domain

PLACE1004428//Acyl-CoA dehydrogenases

PLACE1004437//Isocitrate and isopropylmalate dehydrogenases

PLACE1004506//LIM domain containing proteins

PLACE1004674//EF hand

PLACE1004918//L-lactate dehydrogenases

PLACE1005243//Eukaryotic protein kinase domain

PLACE1005305//Adenylate kinases

PLACE1005327//Src homology domain 3

PLACE1005530//Zinc finger, C3HC4 type (RING finger)

PLACE1005646//Helicases conserved C-terminal domain

PLACE1005656//Ribonucleotide reductases

PLACE1005966//WD domain, G-beta repeats

PLACE1006157//Sushi domain

PLACE1006196//DEAD and DEAH box helicases //Helicases conserved C-terminal domain

PLACE1006438//Zinc finger, C2H2 type

PLACE1006626//Double-stranded RNA binding motif

PLACE1006754//IG superfamily

PLACE1006829//Ubiquitin carboxyl-terminal hydrolases family 2//Ubiquitin carboxyl-terminal hydrolases family 2

PLACE1006917//RNA recognition motif. (aka RRM, RBD, or RNP domain)

PLACE1006956//ABC transporters

PLACE1006958//Heat shock hsp70 proteins

PLACE1007375//C2 domain

PLACE1007488//PH (pleckstrin homology) domain

PLACE1007511//Intermediate filament proteins

PLACE1007537//Ank repeat

PLACE1007544//Zinc finger, C2H2 type

PLACE1007547//Zinc finger, C3HC4 type (RING finger)

PLACE1007598//Zinc finger, C2H2 type

PLACE1007697//ABC transporters

PLACE1007958//3′5′-cyclic nucleotide phosphodiesterases

PLACE1007969//RNA recognition motif. (aka RRM, RBD, or RNP domain)

PLACE1008201//Zinc finger, C2H2 type

PLACE1008429//Ank repeat

PLACE1008465//Zinc finger, C2H2 type

PLACE1008650//WD domain, G-beta repeats

PLACE1009020//Aminotransferases class-V

PLACE1009094//von Willebrand factor type C domain

PLACE1009099//Zinc finger, C2H2 type

PLACE1009246//LIM domain containing proteins

PLACE1009468//WD domain, G-beta repeats

PLACE1009476//DEAD and DEAH box helicases //Helicases conserved C-terminal domain

PLACE1009524//PH (pleckstrin homology) domain

PLACE1009596//WD domain, G-beta repeats

PLACE1009622//Double-stranded RNA binding motif

PLACE1009861//Cysteine proteases

PLACE1009925//Helicases conserved C-terminal domain

PLACE1009992//CUB domain //EGF-like domain //Sushi domain //Trypsin

PLACE1010053//Double-stranded RNA binding motif

PLACE1010089//Ubiquitin carboxyl-terminal hydrolases family 2

PLACE1010702//Zinc finger, C2H2 type

PLACE1010833//EF hand

PLACE1010926//Src homology domain 3

PLACE1010960//Actins

PLACE1011041//Src homology domain 3

PLACE1011046//C2 domain //Phosphatidylinositol-specific phospholipase C, X domain //Phosphatidylinositol-specific phospholipase C, Y domain

PLACE1011114//Helicases conserved C-terminal domain

PLACE1011160//Zinc finger, C3HC4 type (RING finger)

PLACE1011263//Ank repeat

PLACE1011433//Zinc finger, C2H2 type

PLACE1011576//Zinc finger, C2H2 type

PLACE1011923//Eukaryotic protein kinase domain

PLACE2000034//Fibronectin type III domain //IG superfamily

PLACE2000072//Zinc finger, C2H2 type

PLACE2000111//IG superfamily

PLACE2000164//WD domain, G-beta repeats

PLACE2000216//PH (pleckstrin homology) domain

PLACE2000341//Sodium:solute symporter family

PLACE2000371//Src homology domain 2

PLACE2000373//Thrombospondin type 1 domain

PLACE2000398//IG superfamily

PLACE2000427//Helicases conserved C-terminal domain

PLACE2000458//Cadherin

PLACE3000020//Guanylate cyclases

PLACE3000169//Zinc finger, C2H2 type

PLACE4000014//Helicases conserved C-terminal domain

PLACE4000052//ABC transporters

PLACE4000192//Zinc finger, C2H2 type

PLACE4000211//Bromodomain

PLACE4000431//Helicases conserved C-terminal domain

PLACE4000522//Ank repeat

PLACE4000581//EGF-like domain //Sushi domain

PLACE4000654//Ubiquitin-conjugating enzymes

THYRO1000072//IG superfamily

THYRO1000242//Zinc finger, C2H2 type

THYRO1000288//Zinc-binding metalloprotease domain

THYRO1000488//Zinc finger, C3HC4 type (RING finger)

THYRO1000501//Zinc finger, C3HC4 type (RING finger)

THYRO1000666//Kinesin motor domain

THYRO1000748//Src homology domain 3

THYRO1000926//3′5′-cyclic nucleotide phosphodiesterases

THYRO1001661//RNA recognition motif. (aka RRM, RBD, or RNP domain)

THYRO1001671//Ubiquitin family

Y79AA1000037//Zinc finger, C3HC4 type (RING finger)

Y79AA1000214//Core histones H2A, H2B, H3 and H4

Y79AA1000342//Zinc finger, C2H2 type

Y79AA1000349//Double-stranded RNA binding motif

Y79AA1000627//Zinc finger, C2H2 type

Y79AA1000705//Helicases conserved C-terminal domain

Y79AA1000752//KH domain family of RNA binding proteins

Y79AA1000833//Tubulin

Y79AA1001048//Acyl-CoA dehydrogenases

Y79AA1001391//Homeobox domain

Y79AA1001394//ATPases associated with various cellular activities (AAA)

Y79AA1001493//Ubiquitin-conjugating enzymes

Y79AA1001613//Zinc finger, C2H2 type

Y79AA1001874//TNFR/NGFR cysteine-rich region

Y79AA1002027//Ubiquitin-conjugating enzymes

Y79AA1002139//DnaJ, prokaryotic heat shock protein

Y79AA1002208//Ank repeat

Y79AA1002246//C2 domain

Y79AA1002307//Fibronectin type III domain

Y79AA1002472//Zinc finger, C2H2 type

HEMBA1003538//CUB domain HEMBA1003645//WD domain, G-beta repeats //Src homology domain 3 HEMBA1005206//Glutathione S-transferases.

HEMBA1006521//Alcohol/other dehydrogenases, short chain type

HEMBB1001482//Zinc finger, C2H2 type HEMBB1001915//Ubiquitin carboxyl-terminal hydrolases family 2//Ubiquitin carboxyl-terminal hydrolases family 2 HEMBB1002044//Cadherin MAMMA1000183//Zinc finger, C2H2 type

MAMMA1000897//von Willebrand factor type A domain MAMMA1001080//IG superfamily MAMMA1002498//IG superfamily MAMMA1002573//KH domain family of RNA binding proteins MAMMA1002617//Zinc finger, C2H2 type

NT2RM1000833//eubacterial secY protein NT2RM2001797//Zinc finger, C2H2 type

NT2RP1001013//Zinc finger, C2H2 type NT2RP2001233//Zinc finger, C2H2 type

[0627] NT2RP2001440//14-3-3 proteins NT2RP2002105//7 transmembrane receptor (rhodopsin family) NT2RP3001723//Laminin G domain NT2RP3001938//Eukaryotic protein kinase domain NT2RP3002330//Elongation factor Tu family (contains ATP/GTP binding P-loop) NT2RP3003133//Zinc finger, C2H2 type

NT2RP3003500//Eukaryotic protein kinase domain. NT2RP3003799//C2 domain

NT2RP3003800//Eukaryotic protein kinase domain NT2RP3004013//Double-stranded RNA binding motif NT2RP3004125//Zinc finger, C2H2 type

[0628] OVARC1001244//Bromodomain OVARC1001496//D-isomer specific 2-hydroxyacid dehydrogenases PLACE1000007//Ubiquitin carboxyl-terminal hydrolases family 2//Ubiquitin carboxyl-terminal hydrolases family 2 PLACE1001118//Zinc finger, C2H2 type PLACE1010310//Zinc finger, C2H2 type PLACE1011896//wnt family of developmental signaling proteins PLACE3000124//Src homology domain 2

PLACE4000100//D-isomer specific 2-hydroxyacid dehydrogenases

PLACE4000259//Helicases conserved C-terminal domain PLACE4000261//Bromodomain

[0629] SKNMC1000013//ABC transporters SKNMC1000091//Basic region plus leucine zipper transcription factors THYRO1000343//Src homology domain 3 THYRO1000569//Zinc finger, C2H2 type THYRO1001189//Zinc finger, C2H2 type Y79AA1002103//Zinc finger, C2H2 type PLACE3000350//Eukaryotic protein kinase domain PLACE4000156//Zinc finger, C2H2 type

### EXAMPLE 18

### Classification of cDNA Clones into Functional Categories Based on the Full-Length Nucleotide Sequences

[0630] Prediction of functions of proteins encoded by the clones and the categorization thereof were performed based on the results of homology search (see Homology search results 6, 12, 13 and 14) of the databases, GenBank, Swiss-Prot and UniGene, for the full-length nucleotide sequences of 4997 clones and based on the results of domain search (see Example 17) of the deduced amino acid sequences encoded by the full-length nucleotide sequences. The target 4997 clones are listed below:

[0631] HEMBA1000005, HEMBA1000012, HEMBA1000020, HEMBA1000030, HEMBA1000042, HEMBA1000046, HEMBA1000050, HEMBA1000076, HEMBA1000129, HEMBA1000141, HEMBA1000150, HEMBA1000156, HEMBA1000158, HEMBA1000168, HEMBA1000185, HEMBA1000193, HEMBA1000201, HEMBA1000213, HEMBA1000216, HEMBA1000227, HEMBA1000231, HEMBA1000243, HEMBA1000244, HEMBA1000251, HEMBA1000264, HEMBA1000280, HEMBA1000282, HEMBA1000288, HEMBA1000290, HEMBA1000302, HEMBA1000303, HEMBA1000304, HEMBA1000307, HEMBA1000327, HEMBA1000333, HEMBA1000338, HEMBA1000351, HEMBA1000356, HEMBA1000357, HEMBA1000369, HEMBA1000376, HEMBA1000387, HEMBA1000392, HEMBA1000396, HEMBA1000411, HEMBA1000428, HEMBA1000442, HEMBA1000456, HEMBA1000459, HEMBA1000460, HEMBA1000469, HEMBA1000488, HEMBA1000491, HEMBA1000497, HEMBA1000501, HEMBA1000504, HEMBA1000505, HEMBA1000508, HEMBA1000518, HEMBA1000519, HEMBA1000520, HEMBA1000523, HEMBA1000531, HEMBA1000534, HEMBA1000542, HEMBA1000545, HEMBA1000555, HEMBA1000557, HEMBA1000561, HEMBA1000568, HEMBA1000569, HEMBA1000575, HEMBA1000588, HEMBA1000591, HEMBA1000592, HEMBA1000594, HEMBA1000604, HEMBA1000608, HEMBA1000622, HEMBA1000636, HEMBA1000637, HEMBA1000655, HEMBA1000657, HEMBA1000673, HEMBA1000682, HEMBA1000686, HEMBA1000702, HEMBA1000719, HEMBA1000722, HEMBA1000726, HEMBA1000727, HEMBA1000749, HEMBA1000752, HEMBA1000769, HEMBA1000773, HEMBA1000774, HEMBA1000817, HEMBA1000822, HEMBA1000843, HEMBA1000851, HEMBA1000852, HEMBA1000867, HEMBA1000869, HEMBA1000870, HEMBA1000872, HEMBA1000876, HEMBA1000908, HEMBA1000910, HEMBA1000918, HEMBA1000919, HEMBA1000934, HEMBA1000942, HEMBA1000943, HEMBA1000946, HEMBA1000960, HEMBA1000968, HEMBA1000971, HEMBA1000972, HEMBA1000975, HEMBA1000985, HEMBA1000986, HEMBA1000991, HEMBA1001008, HEMBA1000009, HEMBA1001019, HEMBA1001020, HEMBA1001022, HEMBA1001024, HEMBA1001026, HEMBA1001043, HEMBA1001051, HEMBA1001052, HEMBA1001059, HEMBA1001060, HEMBA1001071, HEMBA1001077, HEMBA1001080, HEMBA1001085, HEMBA1001088, HEMBA1001094, HEMBA1001099, HEMBA1001119, HEMBA1001121, HEMBA1001122, HEMBA1001123, HEMBA1001133, HEMBA1001137, HEMBA1001140, HEMBA1001174,HEMBA1001197, HEMBA1001208, HEMBA1001213, HEMBA1001226, HEMBA1001235, HEMBA1001247, HEMBA1001257, HEMBA1001281, HEMBA1001286, HEMBA1001299, HEMBA1001302, HEMBA1001303, HEMBA1001310, HEMBA1001319, HEMBA1001323, HEMBA1001326, HEMBA1001327, HEMBA1001330, HEMBA1001351, HEMBA1001361, HEMBA1001375, HEMBA1001377, HEMBA1001383, HEMBA1001387, HEMBA1001388, HEMBA1001391, HEMBA1001398, HEMBA1001405, HEMBA1001407, HEMBA1001411, HEMBA1001413, HEMBA1001415, HEMBA1001432, HEMBA1001433, HEMBA1001435, HEMBA1001442, HEMBA1001446, HEMBA1001450, HEMBA1001455, HEMBA1001463, HEMBA1001497, HEMBA1001510, HEMBA1001515, HEMBA1001522, HEMBA1001526, HEMBA1001533, HEMBA1001557, HEMBA1001566, HEMBA1001569, HEMBA1001570, HEMBA1001579, HEMBA1001581, HEMBA1001589, HEMBA1001595, HEMBA1001608, HEMBA1001620, HEMBA1001635, HEMBA1001636, HEMBA1001640, HEMBA1001647, HEMBA1001651, HEMBA1001655, HEMBA1001658, HEMBA1001661, HEMBA1001672, HEMBA1001675, HEMBA1001702, HEMBA1001711, HEMBA1001712, HEMBA1001714, HEMBA1001723, HEMBA1001731, HEMBA1001734, HEMBA1001744, HEMBA1001745, HEMBA1001746, HEMBA1001750, HEMBA1001781, HEMBA1001784, HEMBA1001791, HEMBA1001803, HEMBA1001804, HEMBA1001809, HEMBA1001815, HEMBA1001819, HEMBA1001820, HEMBA1001822, HEMBA1001824, HEMBA1001835, HEMBA1001847, HEMBA1001864, HEMBA1001866, HEMBA1001869, HEMBA1001888, HEMBA1001896, HEMBA1001910, HEMBA1001912, HEMBA1001913, HEMBA1001915, HEMBA1001918, HEMBA1001921, HEMBA1001939, HEMBA1001940, HEMBA1001942, HEMBA1001950, HEMBA1001964, HEMBA1001967, HEMBA1001987, HEMBA1002018, HEMBA1002022, HEMBA1002035, HEMBA1002039, HEMBA1002049, HEMBA1002084, HEMBA1002092, HEMBA1002100, HEMBA1002102, HEMBA1002113, HEMBA1002119, HEMBA1002125, HEMBA1002139, HEMBA1002150, HEMBA1002151, HEMBA1002160, HEMBA1002161, HEMBA1002162, HEMBA1002166, HEMBA1002177, HEMBA1002185, HEMBA1002189, HEMBA1002191, HEMBA1002199, HEMBA1002204, HEMBA1002212, HEMBA1002215, HEMBA1002229, HEMBA1002237, HEMBA1002241, HEMBA1002265, HEMBA1002267, HEMBA1002328, HEMBA1002337, HEMBA1002341, HEMBA1002348, HEMBA1002349, HEMBA1002363, HEMBA1002381, HEMBA1002417, HEMBA1002419, HEMBA1002430, HEMBA1002439, HEMBA1002458, HEMBA1002460, HEMBA1002462, HEMBA1002469, HEMBA1002475, HEMBA1002477, HEMBA1002486, HEMBA1002495, HEMBA1002498, HEMBA1002503, HEMBA1002508, HEMBA1002513, HEMBA1002515, HEMBA1002538, HEMBA1002542, HEMBA1002547, HEMBA1002552, HEMBA1002555, HEMBA1002558, HEMBA1002569, HEMBA1002583, HEMBA1002609, HEMBA1002621, HEMBA1002624, HEMBA1002629, HEMBA1002645, HEMBA1002659, HEMBA1002661, HEMBA1002666, HEMBA1002678, HEMBA1002679, HEMBA1002688, HEMBA1002696, HEMBA1002703, HEMBA1002712, HEMBA1002716, HEMBA1002742, HEMBA1002746, HEMBA1002748, HEMBA1002750, HEMBA1002768, HEMBA1002770, HEMBA1002777, HEMBA1002779, HEMBA1002780, HEMBA1002794, HEMBA1002801, HEMBA1002810, HEMBA1002816, HEMBA1002818, HEMBA1002826, HEMBA1002833, HEMBA1002850, HEMBA1002863, HEMBA1002876, HEMBA1002921, HEMBA1002934, HEMBA1002935, HEMBA1002937, HEMBA1002939, HEMBA1002944, HEMBA1002951, HEMBA1002954, HEMBA1002968, HEMBA1002970, HEMBA1002971, HEMBA1002973, HEMBA1002997, HEMBA1002999, HEMBA1003021, HEMBA1003033, HEMBA1003034, HEMBA1003035, HEMBA1003037, HEMBA1003041, HEMBA1003046, HEMBA1003067, HEMBA1003071, HEMBA1003077, HEMBA1003078, HEMBA1003079, HEMBA1003083, HEMBA1003086, HEMBA1003096, HEMBA1003098, HEMBA1003117, HEMBA1003129, HEMBA1003133, HEMBA1003136, HEMBA1003142, HEMBA1003148, HEMBA1003166, HEMBA1003175, HEMBA1003179, HEMBA1003197, HEMBA1003199, HEMBA1003202, HEMBA1003220, HEMBA1003222, HEMBA1003229, HEMBA1003235, HEMBA1003250, HEMBA1003257, HEMBA1003273, HEMBA1003276, HEMBA1003278, HEMBA1003281, HEMBA1003286, HEMBA1003291, HEMBA1003304, HEMBA1003309, HEMBA1003322, HEMBA1003327, HEMBA1003328, HEMBA1003369, HEMBA1003370, HEMBA1003373, HEMBA1003376, HEMBA1003380, HEMBA1003384, HEMBA1003395, HEMBA1003402, HEMBA1003408, HEMBA1003417, HEMBA1003418, HEMBA1003433, HEMBA1003447, HEMBA1003461, HEMBA1003463, HEMBA1003480, HEMBA1003528, HEMBA1003531, HEMBA1003538, HEMBA1003545, HEMBA1003548, HEMBA1003555, HEMBA1003556, HEMBA1003560, HEMBA1003568, HEMBA1003569, HEMBA1003571, HEMBA1003579, HEMBA1003581, HEMBA1003591, HEMBA1003597, HEMBA1003598, HEMBA1003615, HEMBA1003617, HEMBA1003621, HEMBA1003645, HEMBA1003646, HEMBA1003656, HEMBA1003662, HEMBA1003667, HEMBA1003679, HEMBA1003680, HEMBA1003684, HEMBA1003690, HEMBA1003692, HEMBA1003711, HEMBA1003720, HEMBA1003725, HEMBA1003729, HEMBA1003733, HEMBA1003742, HEMBA1003758, HEMBA1003760, HEMBA1003773, HEMBA1003783, HEMBA1003799, HEMBA1003803, HEMBA1003804, HEMBA1003805, HEMBA1003807, HEMBA1003827, HEMBA1003836, HEMBA1003838, HEMBA1003854, HEMBA1003856, HEMBA1003864, HEMBA1003866, HEMBA1003879, HEMBA1003880, HEMBA1003893, HEMBA1003908, HEMBA1003926, HEMBA1003937, HEMBA1003939, HEMBA1003942, HEMBA1003953, HEMBA1003958, HEMBA1003959, HEMBA1003976, HEMBA1003978, HEMBA1003985, HEMBA1003987, HEMBA1003989, HEMBA1004011, HEMBA1004012, HEMBA1004015, HEMBA1004024, HEMBA1004038, HEMBA1004045, HEMBA1004048, HEMBA1004055, HEMBA1004056, HEMBA1004074, HEMBA1004086, HEMBA1004097, HEMBA1004111, HEMBA1004131, HEMBA1004138, HEMBA1004143, HEMBA1004146, HEMBA1004150, HEMBA1004168, HEMBA1004193, HEMBA1004199, HEMBA1004200, HEMBA1004202, HEMBA1004203, HEMBA1004207, HEMBA1004225, HEMBA1004227, HEMBA1004238, HEMBA1004241, HEMBA1004246, HEMBA1004248, HEMBA1004267, HEMBA1004272, HEMBA1004274, HEMBA1004275, HEMBA1004276, HEMBA1004286, HEMBA1004289, HEMBA1004295, HEMBA1004312, HEMBA1004321, HEMBA1004323, HEMBA1004327, HEMBA1004330, HEMBA1004335, HEMBA1004341, HEMBA1004353, HEMBA1004354, HEMBA1004356, HEMBA1004366, HEMBA1004372, HEMBA1004389, HEMBA1004394, HEMBA1004396, HEMBA1004405, HEMBA1004408, HEMBA1004429, HEMBA1004433, HEMBA1004460, HEMBA1004461, HEMBA1004479, HEMBA1004499, HEMBA1004502, HEMBA1004507, HEMBA1004509, HEMBA1004534, HEMBA1004538, HEMBA1004542, HEMBA1004554, HEMBA1004560, HEMBA1004573, HEMBA1004577, HEMBA1004596, HEMBA1004604, HEMBA1004610, HEMBA1004617, HEMBA1004629, HEMBA1004631, HEMBA1004632, HEMBA1004637, HEMBA1004638, HEMBA1004669, HEMBA1004670, HEMBA1004672, HEMBA1004693, HEMBA1004697, HEMBA1004705, HEMBA1004709, HEMBA1004711, HEMBA1004725, HEMBA1004730, HEMBA1004733, HEMBA1004734, HEMBA1004736, HEMBA1004748, HEMBA1004751, HEMBA1004752, HEMBA1004753, HEMBA1004756, HEMBA1004758, HEMBA1004763, HEMBA1004768, HEMBA1004771, HEMBA1004776, HEMBA1004778, HEMBA1004795, HEMBA1004803, HEMBA1004806, HEMBA1004807, HEMBA1004820, HEMBA1004847, HEMBA1004850, HEMBA1004860, HEMBA1004863, HEMBA1004865, HEMBA1004880, HEMBA1004889, HEMBA1004900, HEMBA1004909, HEMBA1004923, HEMBA1004929, HEMBA1004930, HEMBA1004933, HEMBA1004934, HEMBA1004944, HEMBA1004954, HEMBA1004960, HEMBA1004972, HEMBA1004973, HEMBA1004977, HEMBA1004978, HEMBA1004980, HEMBA1004983, HEMBA1004995, HEMBA1005009, HEMBA1005019, HEMBA1005029, HEMBA1005035, HEMBA1005039, HEMBA1005047, HEMBA1005050, HEMBA1005062, HEMBA1005066, HEMBA1005075, HEMBA1005079, HEMBA1005083, HEMBA1005101, HEMBA1005113, HEMBA1005123, HEMBA1005133, HEMBA1005149, HEMBA1005152, HEMBA1005185, HEMBA1005201, HEMBA1005202, HEMBA1005206, HEMBA1005219, HEMBA1005223, HEMBA1005232, HEMBA1005241, HEMBA1005252, HEMBA1005275, HEMBA1005293, HEMBA1005296, HEMBA1005311, HEMBA1005314, HEMBA1005331, HEMBA1005338, HEMBA1005359, HEMBA1005367, HEMBA1005374, HEMBA1005382, HEMBA1005394, HEMBA1005403, HEMBA1005411, HEMBA1005423, HEMBA1005426, HEMBA1005443, HEMBA1005447, HEMBA1005468, HEMBA1005469, HEMBA1005472, HEMBA1005474, HEMBA1005475, HEMBA1005497, HEMBA1005500, HEMBA1005506, HEMBA1005508, HEMBA1005513, HEMBA1005517, HEMBA1005518, HEMBA1005526, HEMBA1005528, HEMBA1005530, HEMBA1005548, HEMBA1005552, HEMBA1005558, HEMBA1005568, HEMBA1005572, HEMBA1005576, HEMBA1005581, HEMBA1005582, HEMBA1005583, HEMBA1005588, HEMBA1005593, HEMBA1005595, HEMBA1005606, HEMBA1005609, HEMBA1005616, HEMBA1005621, HEMBA1005627, HEMBA1005666, HEMBA1005670, HEMBA1005679, HEMBA1005680, HEMBA1005685, HEMBA1005699, HEMBA1005705, HEMBA1005732, HEMBA1005737, HEMBA1005746, HEMBA1005755, HEMBA1005780, HEMBA1005813, HEMBA1005815, HEMBA1005822, HEMBA1005834, HEMBA1005852, HEMBA1005884, HEMBA1005891, HEMBA1005894, HEMBA1005909, HEMBA1005911, HEMBA1005921, HEMBA1005931, HEMBA1005963, HEMBA1005990, HEMBA1005991, HEMBA1006005, HEMBA1006031, HEMBA1006035, HEMBA1006036, HEMBA1006038, HEMBA1006067, HEMBA1006081, HEMBA1006090, HEMBA1006091, HEMBA1006092, HEMBA1006100, HEMBA1006108, HEMBA1006121, HEMBA1006124, HEMBA1006130, HEMBA1006138, HEMBA1006155, HEMBA1006158, HEMBA1006173, HEMBA1006182, HEMBA1006198, HEMBA1006235, HEMBA1006248, HEMBA1006252, HEMBA1006253, HEMBA1006259, HEMBA1006268, HEMBA1006272, HEMBA1006278, HEMBA1006283, HEMBA1006284, HEMBA1006291, HEMBA1006293, HEMBA1006309, HEMBA1006310, HEMBA1006344, HEMBA1006347, HEMBA1006349, HEMBA1006359, HEMBA1006364, HEMBA1006377, HEMBA1006380, HEMBA1006381, HEMBA1006398, HEMBA1006406, HEMBA1006416, HEMBA1006421, HEMBA1006424, HEMBA1006426, HEMBA1006445, HEMBA1006446, HEMBA1006461, HEMBA1006467, HEMBA1006474, HEMBA1006483, HEMBA1006485, HEMBA1006486, HEMBA1006492, HEMBA1006494, HEMBA1006497, HEMBA1006502, HEMBA1006507, HEMBA1006521, HEMBA1006530, HEMBA1006535, HEMBA1006546, HEMBA1006559, HEMBA1006562, HEMBA1006566, HEMBA1006579, HEMBA1006583, HEMBA1006595, HEMBA1006597, HEMBA1006612, HEMBA1006617, HEMBA1006624, HEMBA1006631, HEMBA1006639, HEMBA1006643, HEMBA1006650, HEMBA1006652, HEMBA1006659, HEMBA1006665, HEMBA1006674, HEMBA1006676, HEMBA1006682, HEMBA1006695, HEMBA1006708, HEMBA1006709, HEMBA1006717, HEMBA1006737, HEMBA1006744, HEMBA1006754, HEMBA1006758, HEMBA1006767, HEMBA1006779, HEMBA1006780, HEMBA1006789, HEMBA1006795, HEMBA1006796, HEMBA1006807, HEMBA1006812, HEMBA1006824, HEMBA1006832, HEMBA1006865, HEMBA1006877, HEMBA1006885, HEMBA1006900, HEMBA1006914, HEMBA1006921, HEMBA1006926, HEMBA1006936, HEMBA1006941, HEMBA1006949, HEMBA1006973, HEMBA1006976, HEMBA1006993, HEMBA1007002, HEMBA1007018, HEMBA1007051, HEMBA1007052, HEMBA1007062, HEMBA1007066, HEMBA1007073, HEMBA1007078, HEMBA1007080, HEMBA1007085, HEMBA1007087, HEMBA1007112, HEMBA1007113, HEMBA1007121, HEMBA1007129, HEMBA1007147, HEMBA1007151, HEMBA1007174, HEMBA1007178, HEMBA1007194, HEMBA1007203, HEMBA1007206, HEMBA1007224, HEMBA1007243, HEMBA1007251, HEMBA1007256, HEMBA1007267, HEMBA1007281, HEMBA1007288, HEMBA1007300, HEMBA1007301, HEMBA1007319, HEMBA1007320, HEMBA1007322, HEMBA1007327, HEMBA1007341, HEMBA1007342, HEMBA1007347, HEMBB1000005, HEMBB1000008, HEMBB1000018, HEMBB1000024, HEMBB1000025, HEMBB1000030, HEMBB1000036, HEMBB1000037, HEMBB1000048, HEMBB1000050, HEMBB1000054, HEMBB1000059, HEMBB1000083, HEMBB1000089, HEMBB1000099, HEMBB1000103, HEMBB1000113, HEMBB1000119, HEMBB1000136, HEMBB1000141, HEMBB1000144, HEMBB1000173, HEMBB1000175, HEMBB1000198, HEMBB1000215, HEMBB1000217, HEMBB1000218, HEMBB1000226, HEMBB1000240, HEMBB1000244, HEMBB1000264, HEMBB1000266, HEMBB1000272, HEMBB1000274, HEMBB1000312, HEMBB1000317, HEMBB1000318, HEMBB1000335, HEMBB1000336, HEMBB1000337, HEMBB1000338, HEMBB1000339, HEMBB1000341, HEMBB1000343, HEMBB1000354, HEMBB1000374, HEMBB1000391, HEMBB1000402, HEMBB1000420, HEMBB1000434, HEMBB1000438, HEMBB1000441, HEMBB1000449, HEMBB1000480, HEMBB1000491, HEMBB1000493, HEMBB1000510, HEMBB1000530, HEMBB1000550, HEMBB1000554, HEMBB1000556, HEMBB1000573, HEMBB1000586, HEMBB1000589, HEMBB1000591, HEMBB1000592, HEMBB1000593, HEMBB1000623, HEMBB1000630, HEMBB1000631, HEMBB1000632, HEMBB1000637, HEMBB1000649, HEMBB1000652, HEMBB1000671, HEMBB1000672, HEMBB1000673, HEMBB1000684, HEMBB1000693, HEMBB1000705, HEMBB1000706, HEMBB1000709, HEMBB1000725, HEMBB1000726, HEMBB1000749, HEMBB1000763, HEMBB1000770, HEMBB1000774, HEMBB1000781, HEMBB1000789, HEMBB1000790, HEMBB1000807, HEMBB1000810, HEMBB1000822, HEMBB1000826, HEMBB1000827, HEMBB1000831, HEMBB1000835, HEMBB1000848, HEMBB1000852, HEMBB1000870, HEMBB1000883, HEMBB1000887, HEMBB1000888, HEMBB1000890, HEMBB1000893, HEMBB1000908, HEMBB1000913, HEMBB1000915, HEMBB1000917, HEMBB1000927, HEMBB1000947, HEMBB1000973, HEMBB1000975, HEMBB1000985, HEMBB1000991, HEMBB1000996, HEMBB1001004, HEMBB1001008, HEMBB1001011, HEMBB1001014, HEMBB1001020, HEMBB1001024, HEMBB1001047, HEMBB1001051, HEMBB1001056, HEMBB1001058, HEMBB1001060, HEMBB1001068, HEMBB1001096, HEMBB1001105, HEMBB1001112, HEMBB1001114, HEMBB1001117, HEMBB1001119, HEMBB1001126, HEMBB1001133, HEMBB1001137, HEMBB1001142, HEMBB1001151, HEMBB1001153, HEMBB1001169, HEMBB1001175, HEMBB1001177, HEMBB1001182, HEMBB1001197, HEMBB1001199, HEMBB1001208, HEMBB1001209, HEMBB1001210, HEMBB1001221, HEMBB1001234, HEMBB1001242, HEMBB1001249, HEMBB1001253, HEMBB1001254, HEMBB1001271, HEMBB1001282, HEMBB1001288, HEMBB1001289, HEMBB1001294, HEMBB1001302, HEMBB1001304, HEMBB1001314, HEMBB1001315, HEMBB1001317, HEMBB1001331, HEMBB1001335, HEMBB1001337, HEMBB1001339, HEMBB1001346, HEMBB1001348, HEMBB1001356, HEMBB1001364, HEMBB1001366, HEMBB1001367, HEMBB1001369, HEMBB1001384, HEMBB1001387, HEMBB1001394, HEMBB1001410, HEMBB1001424, HEMBB1001426, HEMBB1001429, HEMBB1001436, HEMBB1001443, HEMBB1001449, HEMBB1001458, HEMBB1001482, HEMBB1001500, HEMBB1001521, HEMBB1001527, HEMBB1001531, HEMBB1001535, HEMBB1001536, HEMBB1001537, HEMBB1001562, HEMBB1001564, HEMBB1001565, HEMBB1001585, HEMBB1001588, HEMBB1001603, HEMBB1001618, HEMBB1001619, HEMBB1001630, HEMBB1001635, HEMBB1001653, HEMBB1001665, HEMBB1001668, HEMBB1001673, HEMBB1001684, HEMBB1001685, HEMBB1001695, HEMBB1001707, HEMBB1001735, HEMBB1001736, HEMBB1001747, HEMBB1001749, HEMBB1001753, HEMBB1001756, HEMBB1001760, HEMBB1001785, HEMBB1001797, HEMBB1001802, HEMBB1001812, HEMBB1001816, HEMBB1001831, HEMBB1001834, HEMBB1001839, HEMBB1001850, HEMBB1001863, HEMBB1001868, HEMBB1001869, HEMBB1001871, HEMBB1001872, HEMBB1001874, HEMBB1001880, HEMBB1001899, HEMBB1001905, HEMBB1001906, HEMBB1001908, HEMBB1001910,HEMBB1001911, HEMBB1001915, HEMBB1001921, HEMBB1001922, HEMBB1001925, HEMBB1001930, HEMBB1001944, HEMBB1001945, HEMBB1001947, HEMBB1001950, HEMBB1001952, HEMBB1001957, HEMBB1001962, HEMBB1001967, HEMBB1001983, HEMBB1001990, HEMBB1001996, HEMBB1002002, HEMBB1002005, HEMBB1002042, HEMBB1002043, HEMBB1002044, HEMBB1002045, HEMBB1002049, HEMBB1002050, HEMBB1002068, HEMBB1002092, HEMBB1002134, HEMBB1002139, HEMBB1002142, HEMBB1002152, HEMBB1002190, HEMBB1002193, HEMBB1002217, HEMBB1002218, HEMBB1002232, HEMBB1002247, HEMBB1002249, HEMBB1002266, HEMBB1002280, HEMBB1002300, HEMBB1002327, HEMBB1002329, HEMBB1002342, HEMBB1002358, HEMBB1002359, HEMBB1002371, HEMBB1002381, HEMBB1002383, HEMBB1002387, HEMBB1002409, HEMBB1002415, HEMBB1002425, HEMBB1002442, HEMBB1002453, HEMBB1002457, HEMBB1002458, HEMBB1002477, HEMBB1002489, HEMBB1002492, HEMBB1002495, HEMBB1002502, HEMBB1002510, HEMBB1002520, HEMBB1002522, HEMBB1002534, HEMBB1002545, HEMBB1002550, HEMBB1002579, HEMBB1002582, HEMBB1002596, HEMBB1002600, HEMBB1002603, HEMBB1002607, HEMBB1002610, HEMBB1002613, HEMBB1002617, HEMBB1002623, HEMBB1002635, HEMBB1002677, HEMBB1002683, HEMBB1002684, HEMBB1002692, HEMBB1002697, HEMBB1002699, HEMBB1002702, HEMBB1002705, MAMMA1000009, MAMMA100009, MAMMA1000020, MAMMA1000025, MAMMA1000043, MAMMA1000045, MAMMA1000055, MAMMA1000057, MAMMA1000069, MAMMA1000084, MAMMA1000085, MAMMA1000092, MAMMA1000103, MAMMA1000117, MAMMA1000129, MAMMA1000133, MAMMA1100139, MAMMA1000143, MAMMA1000155, MAMMA1000163, MAMMA1100171, MAMMA1000173, MAMMA1000175, MAMMA1000183, MAMMA1000198, MAMMA1000227, MAMMA1000241, MAMMA1000251, MAMMA1000254, MAMMA1000257, MAMMA1000264, MAMMA1000266, MAMMA1000270, MAMMA1000277, MAMMA1000278, MAMMA1000279, MAMMA1000284, MAMMA1000287, MAMMA1000307, MAMMA1000309, MAMMA1000312, MAMMA1000313, MAMMA1000331, MAMMA1000339, MAMMA1000340, MAMMA1000348, MAMMA1000356, MAMMA1000360, MAMMA1000361, MAMMA1000372, MAMMA1000388, MAMMA1000395, MAMMA1000402, MAMMA1000410, MAMMA1000414, MAMMA1000416, MAMMA1000421, MAMMA1000422, MAMMA1000431, MAMMA1000444, MAMMA1000458, MAMMA1000468, MAMMA1000472, MAMMA1000490, MAMMA1000500, MAMMA1000522, MAMMA1000524, MAMMA1000559, MAMMA1000567, MAMMA1000576, MAMMA1000583, MAMMA1000594, MAMMA1000605, MAMMA1000612, MAMMA1000616, MAMMA1000623, MAMMA1000625, MAMMA1000643, MAMMA1000664, MAMMA1000670, MAMMA1000672, MAMMA1000684, MAMMA1000696, MAMMA1000707, MAMMA1000713, MAMMA1000714, MAMMA1000720, MAMMA1000731, MAMMA1000734, MAMMA1000738, MAMMA1000744, MAMMA1000746, MAMMA1000752, MAMMA1000760, MAMMA1000761, MAMMA1000775, MAMMA1000776, MAMMA1000778, MAMMA1000798, MAMMA1000802, MAMMA1000824, MAMMA1000831, MAMMA1000839, MAMMA1000841, MAMMA1000842, MAMMA1000843, MAMMA1000851, MAMMA1000855, MAMMA1000856, MAMMA1000859, MAMMA1000863, MAMMA1000865, MAMMA1000867, MAMMA1000875, MAMMA1000876, MAMMA1000880, MAMMA1000883, MAMMA1000897, MAMMA1000906, MAMMA1000908, MAMMA1000914, MAMMA1000921, MAMMA1000931, MAMMA1000940, MAMMA1000941, MAMMA1000956, MAMMA1000957, MAMMA1000962, MAMMA1000968, MAMMA1000975, MAMMA1000979, MAMMA1000987, MAMMA1001003, MAMMA1001008, MAMMA1001021, MAMMA1001030, MAMMA1001038, MAMMA1001041, MAMMA1001059, MAMMA1001073, MAMMA1001075, MAMMA1001078, MAMMA1001080, MAMMA1001082, MAMMA1001091, MAMMA1001105, MAMMA100110, MAMMA1001126, MAMMA1001139, MAMMA11001143, MAMMA1001154, MAMMA1001162, MAMMA1001181, MAMMA11001186, MAMMA11001191, MAMMA11001198, MAMMA1001202, MAMMA1001206, MAMMA1001215, MAMMA1001220, MAMMA1001222, MAMMA1001243, MAMMA1001244, MAMMA1001249, MAMMA1001252, MAMMA1001256, MAMMA1001259, MAMMA1001260, MAMMA1001268, MAMMA1001271, MAMMA1001274, MAMMA1001292, MAMMA1001296, MAMMA1001305, MAMMA1001322, MAMMA1001324, MAMMA1001341, MAMMA1001343, MAMMA1001388, MAMMA1001397, MAMMA1001408, MAMMA1001411, MAMMA1001419, MAMMA1001420, MAMMA1001442, MAMMA1001452, MAMMA1001465, MAMMA1001476, MAMMA1001487, MAMMA1001501, MAMMA1001502, MAMMA1001510, MAMMA1001522, MAMMA1001547, MAMMA1001551, MAMMA1001575, MAMMA1001576, MAMMA1001590, MAMMA1001600, MAMMA1001604, MAMMA1001606, MAMMA1001620, MAMMA1001627, MAMMA1001630, MAMMA1001633, MAMMA1001635, MAMMA1001649, MAMMA1001663, MAMMA1001670, MAMMA1001671, MAMMA1001679, MAMMA1001683, MAMMA1001686, MAMMA1001692, MAMMA1001711, MAMMA1001715, MAMMA1001730, MAMMA1001735, MAMMA1001743, MAMMA1001744, MAMMA1001745, MAMMA1001751, MAMMA1001754, MAMMA1001757, MAMMA1001760, MAMMA1001764, MAMMA1001768, MAMMA1001769, MAMMA1001771, MAMMA1001783, MAMMA1001785, MAMMA1001788, MAMMA1001790, MAMMA1001806, MAMMA11001812, MAMMA1001815, MAMMA1001817, MAMMA1001818, MAMMA1001820, MAMMA1001824, MAMMA1001837, MAMMA1001848, MAMMA1001851, MAMMA1001854, MAMMA1001858, MAMMA1001864, MAMMA1001868, MAMMA1001874, MAMMA1001878, MAMMA1001890, MAMMA1001907, MAMMA1001908, MAMMA1001931, MAMMA1001956, MAMMA1001969, MAMMA1001970, MAMMA1002009, MAMMA1002011, MAMMA1002032, MAMMA1002033, MAMMA1002041, MAMMA1002042, MAMMA1002047, MAMMA1002056, MAMMA1002058, MAMMA1002068, MAMMA1002078, MAMMA1002082, MAMMA1002084, MAMMA1002093, MAMMA1002094, MAMMA1002118, MAMMA1002125, MAMMA1002132, MAMMA1002140, MAMMA1002143, MAMMA1002145, MAMMA1002153, MAMMA1002155, MAMMA1002156, MAMMA1002170, MAMMA1002174, MAMMA1002198, MAMMA1002209, MAMMA1002215, MAMMA1002219, MAMMA1002230, MAMMA1002236, MAMMA1002243, MAMMA1002250, MAMMA1002268, MAMMA1002269, MAMMA1002282, MAMMA1002292, MAMMA1002293, MAMMA1002294, MAMMA1002297, MAMMA1002298, MAMMA1002299, MAMMA1002308, MAMMA1002310, MAMMA1002311, MAMMA1002312, MAMMA1002317, MAMMA1002319, MAMMA1002322, MAMMA1002329, MAMMA1002333, MAMMA1002339, MAMMA1002351, MAMMA1002352, MAMMA1002353, MAMMA1002355, MAMMA1002356, MAMMA1002359, MAMMA1002360, MAMMA1002362, MAMMA1002380, MAMMA1002384, MAMMA1002385, MAMMA1002392, MAMMA1002411, MAMMA1002413, MAMMA1002417, MAMMA1002427, MAMMA1002428, MAMMA1002434, MAMMA1002446, MAMMA1002454, MAMMA1002461, MAMMA1002470, MAMMA1002475, MAMMA1002485, MAMMA1002494, MAMMA1002498, MAMMA1002524, MAMMA1002530, MAMMA1002545, MAMMA1002554, MAMMA1002556, MAMMA1002566, MAMMA1002571, MAMMA1002573, MAMMA1002585, MAMMA1002590, MAMMA1002597, MAMMA1002598, MAMMA1002612, MAMMA1002617, MAMMA1002618, MAMMA1002619, MAMMA1002622, MAMMA1002636, MAMMA1002637, MAMMA1002646, MAMMA1002650, MAMMA1002655, MAMMA1002665, MAMMA1002671, MAMMA1002673, MAMMA1002684, MAMMA1002699, MAMMA1002708, MAMMA1002711, MAMMA1002721, MAMMA1002727, MAMMA1002728, MAMMA1002744, MAMMA1002748, MAMMA1002758, MAMMA1002764, MAMMA1002765, MAMMA1002769, MAMMA1002775, MAMMA1002780, MAMMA1002782, MAMMA1002796, MAMMA1002807, MAMMA1002820, MAMMA1002830, MAMMA1002833, MAMMA1002838, MAMMA1002842, MAMMA1002843, MAMMA1002844, MAMMA1002858, MAMMA1002868, MAMMA1002869, MAMMA1002880, MAMMA1002881, MAMMA1002886, MAMMA1002890, MAMMA1002892, MAMMA1002895, MAMMA1002909, MAMMA1002937, MAMMA1002938, MAMMA1002941, MAMMA1002947, MAMMA1002964, MAMMA1002972, MAMMA1002973, MAMMA1002987, MAMMA1003003, MAMMA1003004, MAMMA1003011, MAMMA1003013, MAMMA1003015, MAMMA1003019, MAMMA1003026, MAMMA1003031, MAMMA1003035, MAMMA1003039, MAMMA1003044, MAMMA1003047, MAMMA1003049, MAMMA1003056, MAMMA1003057, MAMMA1003066, MAMMA1003089, MAMMA1003099, MAMMA1003104, MAMMA1003113, MAMMA1003127, MAMMA1003135, MAMMA1003146, MAMMA1003150, MAMMA1003166, NT2RM1000000, NT2RM1000018, NT2RM1000032, NT2RM1000035, NT2RM1000037, NT2RM1000039, NT2RM1000055, NT2RM1000059, NT2RM1000062, NT2RM1000080, NT2RM1000086, NT2RM1000092, NT2RM1000118, NT2RM1000119, NT2RM1000127, NT2RM1000131, NT2RM1000132, NT2RM1000153, NT2RM1000186, NT2RM1000187, NT2RM1000199, NT2RM1000242, NT2RM1000244, NT2RM1000252, NT2RM1000256, NT2RM1000257, NT2RM1000260, NT2RM1000271, NT2RM1000272, NT2RM1000280, NT2RM1000300, NT2RM1000314, NT2RM1000341, NT2RM1000354, NT2RM1000355, NT2RM1000365, NT2RM1000377, NT2RM1000388, NT2RM1000399, NT2RM1000421, NT2RM1000430, NT2RM1000499, NT2RM1000539, NT2RM1000553, NT2RM1000555, NT2RM1000563, NT2RM1000623, NT2RM1000648, NT2RM1000661, NT2RM1000666, NT2RM1000669, NT2RM1000672, NT2RM1000691,

[0632] NT2RM1000699, NT2RM1000702, NT2RM1000741, NT2RM1000742, NT2RM1000746, NT2RM1000770, NT2RM1000772, NT2RM1000780, NT2RM1000781, NT2RM1000800, NT2RM1000802, NT2RM1000811, NT2RM1000826, NT2RM1000829, NT2RM1000833, NT2RM1000850, NT2RM1000852, NT2RM1000857, NT2RM1000867, NT2RM1000874, NT2RM1000882, NT2RM1000883, NT2RM1000885, NT2RM1000894, NT2RM1000898, NT2RM1000905, NT2RM1000924, NT2RM1000927, NT2RM1000962, NT2RM1000978, NT2RM1001003, NT2RM1001008, NT2RM1001043, NT2RM1001044, NT2RM1001059, NT2RM1001066, NT2RM1001072, NT2RM1001074, NT2RM1001082, NT2RM1001085, NT2RM1001092, NT2RM1001102, NT2RM1001105, NT2RM1001112, NT2RM1001115, NT2RM1001139, NT2RM2000006, NT2RM2000013, NT2RM2000030, NT2RM2000032, NT2RM2000042, NT2RM2000092, NT2RM2000093, NT2RM2000101, NT2RM2000191, NT2RM2000192, NT2RM2000239, NT2RM2000250, NT2RM2000259, NT2RM2000260, NT2RM2000287, NT2RM2000322, NT2RM2000359, NT2RM2000363, NT2RM2000368, NT2RM2000371, NT2RM2000374, NT2RM2000395, NT2RM2000402, NT2RM2000407, NT2RM2000420, NT2RM2000422, NT2RM2000452, NT2RM2000469, NT2RM2000490, NT2RM2000502, NT2RM2000504, NT2RM2000522, NT2RM2000540, NT2RM2000566, NT2RM2000567, NT2RM2000569, NT2RM2000577, NT2RM2000581, NT2RM2000588, NT2RM2000594, NT2RM2000599, NT2RM2000609, NT2RM2000612, NT2RM2000624, NT2RM2000635, NT2RM2000636, NT2RM2000639, NT2RM2000649, NT2RM2000669, NT2RM2000691, NT2RM2000714, NT2RM2000718, NT2RM2000735, NT2RM2000740, NT2RM2000795, NT2RM2000821, NT2RM2000837, NT2RM2000951, NT2RM2000952, NT2RM2000984, NT2RM2001004, NT2RM2001035, NT2RM2001065, NT2RM2001100, NT2RM2001105, NT2RM2001131, NT2RM2001141, NT2RM2001152, NT2RM200117i, NT2RM2001194, NT2RM2001196, NT2RM2001201, NT2RM2001221, NT2RM2001238, NT2RM2001243, NT2RM2001247, NT2RM2001256, NT2RM2001291, NT2RM2001306, NT2RM2001312, NT2RM2001319, NT2RM2001324, NT2RM2001345, NT2RM2001360, NT2RM2001370, NT2RM2001393, NT2RM2001420, NT2RM2001424, NT2RM2001499, NT2RM2001504, NT2RM2001524, NT2RM2001544, NT2RM2001547, NT2RM2001575, NT2RM2001582, NT2RM2001588, NT2RM2001592, NT2RM2001605, NT2RM2001613, NT2RM2001632, NT2RM2001635, NT2RM2001637, NT2RM2001641, NT2RM2001648, NT2RM2001652, NT2RM2001659, NT2RM2001664, NT2RM2001668, NT2RM2001670, NT2RM2001671, NT2RM2001675, NT2RM2001681, NT2RM2001688, NT2RM2001695, NT2RM2001696, NT2RM2001698, NT2RM2001699, NT2RM2001700, NT2RM2001706, NT2RM2001716, NT2RM2001718, NT2RM2001723, NT2RM2001727, NT2RM2001730, NT2RM2001743, NT2RM2001753, NT2RM2001760, NT2RM2001768, NT2RM2001771, NT2RM2001782, NT2RM2001784, NT2RM2001785, NT2RM2001797, NT2RM2001803, NT2RM2001805, NT2RM2001813, NT2RM2001823, NT2RM2001839, NT2RM2001840, NT2RM2001855, NT2RM2001867, NT2RM2001879, NT2RM2001886, NT2RM2001896, NT2RM2001903, NT2RM2001930, NT2RM2001935, NT2RM2001936, NT2RM2001950, NT2RM2001982, NT2RM2001983, NT2RM2001989, NT2RM2001997, NT2RM2001998, NT2RM2002004, NT2RM2002014, NT2RM2002030, NT2RM2002049, NT2RM2002055, NT2RM2002088, NT2RM2002091, NT2RM2002100, NT2RM2002109, NT2RM2002128, NT2RM2002142, NT2RM2002145, NT2RM2002178, NT2RM4000024, NT2RM4000027, NT2RM4000030, NT2RM4000046, NT2RM4000061, NT2RM4000086, NT2RM4000104, NT2RM4000139, NT2RM4000155, NT2RM4000156, NT2RM4000167, NT2RM4000169, NT2RM4000191, NT2RM4000197, NT2RM4000199, NT2RM4000200, NT2RM4000202, NT2RM4000210, NT2RM4000215, NT2RM4000229, NT2RM4000233, NT2RM4000244, NT2RM4000251, NT2RM4000265, NT2RM4000290, NT2RM4000324, NT2RM4000327, NT2RM4000344, NT2RM4000349, NT2RM4000354, NT2RM4000356, NT2RM4000386, NT2RM4000395, NT2RM4000414, NT2RM4000421, NT2RM4000425, NT2RM4000433, NT2RM4000457, NT2RM4000471, NT2RM4000486, NT2RM4000496, NT2RM4000511, NT2RM4000514, NT2RM4000515, NT2RM4000520, NT2RM4000531, NT2RM4000532, NT2RM4000534, NT2RM4000585, NT2RM4000590, NT2RM4000595, NT2RM4000603, NT2RM4000611, NT2RM4000616, NT2RM4000634, NT2RM4000657, NT2RM4000674, NT2RM4000689, NT2RM4000698, NT2RM4000700, NT2RM4000712, NT2RM4000717, NT2RM4000733, NT2RM4000734, NT2RM4000741, NT2RM4000751, NT2RM4000764, NT2RM4000778, NT2RM4000783, NT2RM4000787, NT2RM4000790, NT2RM4000795, NT2RM4000796, NT2RM4000798, NT2RM4000813, NT2RM4000820, NT2RM4000833, NT2RM4000848, NT2RM4000852, NT2RM4000855, NT2RM4000857, NT2RM4000887, NT2RM4000895, NT2RM4000950, NT2RM4000971, NT2RM4000979, NT2RM4000996, NT2RM4001002, NT2RM4001032, NT2RM4001047, NT2RM4001054, NT2RM4001084, NT2RM4001092, NT2RM4001116, NT2RM4001140, NT2RM4001151, NT2RM4001155, NT2RM4001160, NT2RM4001178, NT2RM4001187, NT2RM4001191, NT2RM4001200, NT2RM4001203, NT2RM4001204, NT2RM4001217, NT2RM4001256, NT2RM4001258, NT2RM4001309, NT2RM4001313, NT2RM4001316, NT2RM4001320, NT2RM4001340, NT2RM4001344, NT2RM4001347, NT2RM4001371, NT2RM4001382, NT2RM4001384, NT2RM4001410, NT2RM4001411, NT2RM4001412, NT2RM4001414, NT2RM4001437, NT2RM4001444, NT2RM4001454, NT2RM4001455, NT2RM4001483, NT2RM4001489, NT2RM4001522, NT2RM4001557, NT2RM4001565, NT2RM4001566, NT2RM4001569, NT2RM4001582, NT2RM4001592, NT2RM4001594, NT2RM4001597, NT2RM4001611, NT2RM4001629, NT2RM4001650, NT2RM4001662, NT2RM4001666, NT2RM4001682, NT2RM4001710, NT2RM4001714, NT2RM4001715, NT2RM4001731, NT2RM4001746, NT2RM4001754, NT2RM4001758, NT2RM4001783, NT2RM4001810, NT2RM4001813, NT2RM4001819, NT2RM4001823, NT2RM4001828, NT2RM4001836, NT2RM4001841, NT2RM4001842, NT2RM4001856, NT2RM4001858, NT2RM4001865, NT2RM4001876, NT2RM4001880, NT2RM4001905, NT2RM4001922, NT2RM4001930, NT2RM4001938, NT2RM4001940, NT2RM4001953, NT2RM4001965, NT2RM4001969, NT2RM4001979, NT2RM4001984, NT2RM4001987, NT2RM4002013, NT2RM4002018, NT2RM4002034, NT2RM4002044, NT2RM4002054, NT2RM4002062, NT2RM4002063, NT2RM4002066, NT2RM4002073, NT2RM4002075, NT2RM4002093, NT2RM4002109, NT2RM4002128, NT2RM4002140, NT2RM4002145, NT2RM4002146, NT2RM4002161, NT2RM4002174, NT2RM4002189, NT2RM4002194, NT2RM4002205, NT2RM4002213, NT2RM4002226, NT2RM4002251, NT2RM4002256, NT2RM4002266, NT2RM4002281, NT2RM4002287, NT2RM4002294, NT2RM4002301, NT2RM4002323, NT2RM4002339, NT2RM4002344, NT2RM4002373, NT2RM4002374, NT2RM4002383, NT2RM4002390, NT2RM4002398, NT2RM4002409, NT2RM4002420, NT2RM4002438, NT2RM4002446, NT2RM4002452, NT2RM4002457, NT2RM4002460, NT2RM4002493, NT2RM4002504, NT2RM4002527, NT2RM4002532, NT2RM4002534, NT2RM4002558, NT2RM4002565, NT2RM4002567, NT2RM4002571, NT2RM4002593, NT2RM4002594, NT2RM4002623, NT2RP1000018, NT2RP1000035, NT2RP1000040, NT2RP1000063, NT2RP1000086, NT2RP1000101, NT2RP1000111, NT2RP1000112, NT2RP1000124, NT2RP1000130, NT2RP1000163, NT2RP1000170, NT2RP1000191, NT2RP1000202, NT2RP1000243, NT2RP1000259, NT2RP1000272, NT2RP1000324, NT2RP1000326, NT2RP1000333, NT2RP1000348, NT2RP1000357, NT2RP1000358, NT2RP1000363, NT2RP1000376, NT2RP1000409, NT2RP1000413, NT2RP1000416, NT2RP1000418, NT2RP1000439, NT2RP1000443, NT2RP1000460, NT2RP1000470, NT2RP1000478, NT2RP1000481, NT2RP1000493, NT2RP1000513, NT2RP1000522, NT2RP1000547, NT2RP1000574, NT2RP1000581, NT2RP1000609, NT2RP1000630, NT2RP1000677, NT2RP1000688, NT2RP1000695, NT2RP1000701, NT2RP1000721, NT2RP1000730, NT2RP1000733, NT2RP1000738, NT2RP1000746, NT2RP1000767, NT2RP1000782, NT2RP1000796, NT2RP1000825, NT2RP1000833, NT2RP1000834, NT2RP1000836, NT2RP1000846, NT2RP1000851, NT2RP1000856, NT2RP1000860, NT2RP1000902, NT2RP1000915, NT2RP1000916, NT2RP1000943, NT2RP1000944, NT2RP1000947, NT2RP1000954, NT2RP1000958, NT2RP1000959, NT2RP1000966, NT2RP1000980, NT2RP1000988, NT2RP1001011, NT2RP1001013, NT2RP1001014, NT2RP1001033, NT2RP1001073, NT2RP1001079, NT2RP1001080, NT2RP1001113, NT2RP101173, NT2RP1001177, NT2RP1001185, NT2RP1001199, NT2RP1001247, NT2RP1001248, NT2RP1001253, NT2RP1001286, NT2RP1001294, NT2RP11001302, NT2RP1001310, NT2RP1001311, NT2RP1001313, NT2RP1001361, NT2RP1001385, NT2RP11001395, NT2RP11001410, NT2RP1001424, NT2RP1001432, NT2RP1001449, NT2RP1001457, NT2RP1001466, NT2RP1001475, NT2RP1001482, NT2RP1001494, NT2RP1001543, NT2RP1001546, NT2RP1001569, NT2RP1001616, NT2RP1001665, NT2RP2000001, NT2RP2000006, NT2RP2000007, NT2RP2000008, NT2RP2000027, NT2RP2000032, NT2RP2000040, NT2RP2000045, NT2RP2000054, NT2RP2000056, NT2RP2000067, NT2RP2000070, NT2RP2000076, NT2RP2000079, NT2RP2000088, NT2RP2000091, NT2RP2000097, NT2RP2000098, NT2RP2000108, NT2RP2000114, NT2RP2000120, NT2RP2000126, NT2RP2000133, NT2RP2000147, NT2RP2000153, NT2RP2000157, NT2RP2000161, NT2RP2000173, NT2RP2000175, NT2RP2000183, NT2RP2000195, NT2RP2000198, NT2RP2000205, NT2RP2000208, NT2RP2000224, NT2RP2000232, NT2RP2000233, NT2RP2000239, NT2RP2000248, NT2RP2000257, NT2RP2000258, NT2RP2000270, NT2RP2000274, NT2RP2000283, NT2RP2000288, NT2RP2000289, NT2RP2000297, NT2RP2000298, NT2RP2000310, NT2RP2000327, NT2RP2000328, NT2RP2000329, NT2RP2000337, NT2RP2000346, NT2RP2000369, NT2RP2000412, NT2RP2000414, NT2RP2000420, NT2RP2000422, NT2RP2000438, NT2RP2000448, NT2RP2000459, NT2RP2000498, NT2RP2000503, NT2RP2000510, NT2RP2000516, NT2RP2000523, NT2RP2000551, NT2RP2000603, NT2RP2000617, NT2RP2000634, NT2RP2000644, NT2RP2000656, NT2RP2000658, NT2RP2000660, NT2RP2000668, NT2RP2000678, NT2RP2000704, NT2RP2000710, NT2RP2000715, NT2RP2000758, NT2RP2000764, NT2RP2000809, NT2RP2000812, NT2RP2000814, NT2RP2000816, NT2RP2000819, NT2RP2000841, NT2RP2000842, NT2RP2000845, NT2RP2000863, NT2RP2000880, NT2RP2000892, NT2RP2000931, NT2RP2000932, NT2RP2000938, NT2RP2000943, NT2RP2000965, NT2RP2000970, NT2RP2000985, NT2RP2001036, NT2RP2001044, NT2RP2001056, NT2RP2001065, NT2RP2001070, NT2RP2001081, NT2RP2001094, NT2RP2001119, NT2RP2001127, NT2RP2001137, NT2RP2001149, NT2RP2001168, NT2RP2001173, NT2RP2001174, NT2RP2001196, NT2RP2001214, NT2RP2001218, NT2RP2001226, NT2RP2001233, NT2RP2001245, NT2RP2001268, NT2RP2001290, NT2RP2001295, NT2RP2001312, NT2RP2001327, NT2RP2001328, NT2RP2001347, NT2RP2001366, NT2RP2001378, NT2RP2001381, NT2RP2001392, NT2RP2001394, NT2RP2001397, NT2RP2001420, NT2RP2001427, NT2RP2001440, NT2RP2001450, NT2RP2001460, NT2RP2001467, NT2RP2001506, NT2RP2001511, NT2RP2001520, NT2RP2001536, NT2RP2001560, NT2RP2001576, NT2RP2001581, NT2RP2001597, NT2RP2001601, NT2RP2001613, NT2RP2001628, NT2RP2001634, NT2RP2001660, NT2RP2001663, NT2RP2001675, NT2RP2001677, NT2RP2001678, NT2RP2001720, NT2RP2001721, NT2RP2001740, NT2RP2001748, NT2RP2001756, NT2RP2001813, NT2RP2001839, NT2RP2001861, NT2RP2001869, NT2RP2001876, NT2RP2001883, NT2RP2001898, NT2RP2001900, NT2RP2001907, NT2RP2001936, NT2RP2001943, NT2RP2001946, NT2RP2001947, NT2RP2001969, NT2RP2001976, NT2RP2001985, NT2RP2001991, NT2RP2002025, NT2RP2002032, NT2RP2002033, NT2RP2002041, NT2RP2002046, NT2RP2002047, NT2RP2002056, NT2RP2002058, NT2RP2002066, NT2RP2002070, NT2RP2002076, NT2RP2002078, NT2RP2002079, NT2RP2002099, NT2RP2002105, NT2RP2002124, NT2RP2002154, NT2RP2002172, NT2RP2002185, NT2RP2002193, NT2RP2002208, NT2RP2002219, NT2RP2002231, NT2RP2002235, NT2RP2002252, NT2RP2002256, NT2RP2002270, NT2RP2002292, NT2RP2002312, NT2RP2002316, NT2RP2002325, NT2RP2002333, NT2RP2002373, NT2RP2002385, NT2RP2002408, NT2RP2002426, NT2RP2002439, NT2RP2002442, NT2RP2002464, NT2RP2002475, NT2RP2002479, NT2RP2002498, NT2RP2002503, NT2RP2002520, NT2RP2002537, NT2RP2002546, NT2RP2002549, NT2RP2002591, NT2RP2002595, NT2RP2002606, NT2RP2002609, NT2RP2002618, NT2RP2002621, NT2RP2002643, NT2RP2002672, NT2RP2002677, NT2RP2002701, NT2RP2002706, NT2RP2002710, NT2RP2002727, NT2RP2002736, NT2RP2002740, NT2RP2002741, NT2RP2002752, NT2RP2002753, NT2RP2002755, NT2RP2002769, NT2RP2002800, NT2RP2002843, NT2RP2002857, NT2RP2002862, NT2RP2002880, NT2RP2002891, NT2RP2002928, NT2RP2002929, NT2RP2002939, NT2RP2002954, NT2RP2002959, NT2RP2002979, NT2RP2002980, NT2RP2002986, NT2RP2002993, NT2RP2003000, NT2RP2003034, NT2RP2003073, NT2RP2003099, NT2RP2003101, NT2RP2003108, NT2RP2003117, NT2RP2003121, NT2RP2003125, NT2RP2003137, NT2RP2003157, NT2RP2003158, NT2RP2003161, NT2RP2003164, NT2RP2003165, NT2RP2003177, NT2RP2003194, NT2RP2003206, NT2RP2003228, NT2RP2003230, NT2RP2003237, NT2RP2003243, NT2RP2003265, NT2RP2003272, NT2RP2003277, NT2RP2003280, NT2RP2003286, NT2RP2003293, NT2RP2003295, NT2RP2003297, NT2RP2003307, NT2RP2003308, NT2RP2003329, NT2RP2003339, NT2RP2003347, NT2RP2003367, NT2RP2003391, NT2RP2003393, NT2RP2003394, NT2RP2003401, NT2RP2003433, NT2RP2003445, NT2RP2003446, NT2RP2003456, NT2RP2003466, NT2RP2003480, NT2RP2003506, NT2RP2003511, NT2RP2003513, NT2RP2003517, NT2RP2003522, NT2RP2003533, NT2RP2003543, NT2RP2003559, NT2RP2003564, NT2RP2003567, NT2RP2003581, NT2RP2003596, NT2RP2003604, NT2RP2003629, NT2RP2003643, NT2RP2003668, NT2RP2003687, NT2RP2003691, NT2RP2003702, NT2RP2003704, NT2RP2003713, NT2RP2003714, NT2RP2003727, NT2RP2003737, NT2RP2003751, NT2RP2003760, NT2RP2003764, NT2RP2003769, NT2RP2003777, NT2RP2003781, NT2RP2003793, NT2RP2003799, NT2RP2003825, NT2RP2003840, NT2RP2003857, NT2RP2003871, NT2RP2003885, NT2RP2003912, NT2RP2003952, NT2RP2003976, NT2RP2003981, NT2RP2003984, NT2RP2003986, NT2RP2003988, NT2RP2004013, NT2RP2004041, NT2RP2004042, NT2RP2004066, NT2RP2004081, NT2RP2004095, NT2RP2004098, NT2RP2004124, NT2RP2004142, NT2RP2004152, NT2RP2004165, NT2RP2004170, NT2RP2004187, NT2RP2004194, NT2RP2004207, NT2RP2004226, NT2RP2004232, NT2RP2004239, NT2RP2004242, NT2RP2004245, NT2RP2004270, NT2RP2004300, NT2RP2004316, NT2RP2004321, NT2RP2004339, NT2RP2004347, NT2RP2004364, NT2RP2004365, NT2RP2004366, NT2RP2004373, NT2RP2004389, NT2RP2004392, NT2RP2004396, NT2RP2004399, NT2RP2004400, NT2RP2004412, NT2RP2004425, NT2RP2004463, NT2RP2004476, NT2RP2004490, NT2RP2004523, NT2RP2004538, NT2RP2004551, NT2RP2004568, NT2RP2004580, NT2RP2004587, NT2RP2004594, NT2RP2004600, NT2RP2004602, NT2RP2004614, NT2RP2004655, NT2RP2004664, NT2RP2004675, NT2RP2004681, NT2RP2004689, NT2RP2004709, NT2RP2004710, NT2RP2004732, NT2RP2004743, NT2RP2004767, NT2RP2004768, NT2RP2004775, NT2RP2004791, NT2RP2004799, NT2RP2004802, NT2RP2004816, NT2RP2004841, NT2RP2004861, NT2RP2004897, NT2RP2004920, NT2RP2004933, NT2RP2004936, NT2RP2004959, NT2RP2004961, NT2RP2004962, NT2RP2004978, NT2RP2004982, NT2RP2004999, NT2RP2005000, NT2RP2005001, NT2RP2005003, NT2RP2005012, NT2RP2005018, NT2RP2005020, NT2RP2005022, NT2RP2005031, NT2RP2005037, NT2RP2005038, NT2RP2005116, NT2RP2005126, NT2RP2005139, NT2RP2005140, NT2RP2005144, NT2RP2005147, NT2RP2005159, NT2RP2005162, NT2RP2005168, NT2RP2005204, NT2RP2005227, NT2RP2005239, NT2RP2005254, NT2RP2005270, NT2RP2005276, NT2RP2005287, NT2RP2005288, NT2RP2005293, NT2RP2005315, NT2RP2005325, NT2RP2005336, NT2RP2005344, NT2RP2005358, NT2RP2005360, NT2RP2005393, NT2RP2005407, NT2RP2005436, NT2RP2005441, NT2RP2005453, NT2RP2005454, NT2RP2005457, NT2RP2005464, NT2RP2005465, NT2RP2005472, NT2RP2005476, NT2RP2005490, NT2RP2005491, NT2RP2005495, NT2RP2005496, NT2RP2005498, NT2RP2005501, NT2RP2005509, NT2RP2005520, NT2RP2005525, NT2RP2005531, NT2RP2005539, NT2RP2005540, NT2RP2005549, NT2RP2005555, NT2RP2005557, NT2RP2005600, NT2RP2005605, NT2RP2005620, NT2RP2005622, NT2RP2005635, NT2RP2005637, NT2RP2005640, NT2RP2005645, NT2RP2005654, NT2RP2005669, NT2RP2005675, NT2RP2005683, NT2RP2005690, NT2RP2005694, NT2RP2005701, NT2RP2005712, NT2RP2005719, NT2RP2005722, NT2RP2005723, NT2RP2005726, NT2RP2005732, NT2RP2005741, NT2RP2005748, NT2RP2005752, NT2RP2005753, NT2RP2005763, NT2RP2005767, NT2RP2005773, NT2RP2005775, NT2RP2005776, NT2RP2005781, NT2RP2005784, NT2RP2005804, NT2RP2005806, NT2RP2005812, NT2RP2005815, NT2RP2005835, NT2RP2005841, NT2RP2005853, NT2RP2005859, NT2RP2005868, NT2RP2005882, NT2RP2005886, NT2RP2005890, NT2RP2005901, NT2RP2005933, NT2RP2005942, NT2RP2005980, NT2RP2006023, NT2RP2006038, NT2RP2006043, NT2RP2006052, NT2RP2006069, NT2RP2006071, NT2RP2006100, NT2RP2006103, NT2RP2006106, NT2RP2006141, NT2RP2006166, NT2RP2006184, NT2RP2006186, NT2RP2006196, NT2RP2006200, NT2RP2006219, NT2RP2006237, NT2RP2006238, NT2RP2006258, NT2RP2006261, NT2RP2006275, NT2RP2006312, NT2RP2006321, NT2RP2006333, NT2RP2006334, NT2RP2006365, NT2RP2006393, NT2RP2006436, NT2RP2006441, NT2RP2006454, NT2RP2006456, NT2RP2006464, NT2RP2006467, NT2RP2006472, NT2RP2006534, NT2RP2006554, NT2RP2006565, NT2RP2006571, NT2RP2006573, NT2RP2006598, NT2RP3000002, NT2RP3000031, NT2RP3000046, NT2RP3000047, NT2RP3000050, NT2RP3000055, NT2RP3000068, NT2RP3000072, NT2RP3000080, NT2RP3000085, NT2RP3000092, NT2RP3000109, NT2RP3000134, NT2RP3000142, NT2RP3000149, NT2RP3000197, NT2RP3000207, NT2RP3000220, NT2RP3000233, NT2RP3000235, NT2RP3000247, NT2RP3000251, NT2RP3000252, NT2RP3000267, NT2RP3000299, NT2RP3000312, NT2RP3000320, NT2RP3000324, NT2RP3000333, NT2RP3000341, NT2RP3000348, NT2RP3000350, NT2RP3000359, NT2RP3000361, NT2RP3000366, NT2RP3000393, NT2RP3000397, NT2RP3000403, NT2RP3000418, NT2RP3000439, NT2RP3000441, NT2RP3000449, NT2RP3000451, NT2RP3000456, NT2RP3000484, NT2RP3000487, NT2RP3000512, NT2RP3000526, NT2RP3000527, NT2RP3000531, NT2RP3000542, NT2RP3000561, NT2RP3000562, NT2RP3000578, NT2RP3000584, NT2RP3000590, NT2RP3000592, NT2RP3000596, NT2RP3000599, NT2RP3000603, NT2RP3000605, NT2RP3000622, NT2RP3000624, NT2RP3000628, NT2RP3000632, NT2RP3000644, NT2RP3000661, NT2RP3000665, NT2RP3000685, NT2RP3000690, NT2RP3000736, NT2RP3000739, NT2RP3000742, NT2RP3000753, NT2RP3000759, NT2RP3000825, NT2RP3000826, NT2RP3000836, NT2RP3000841, NT2RP3000845, NT2RP3000850, NT2RP3000852, NT2RP3000859, NT2RP3000865, NT2RP3000868, NT2RP3000869, NT2RP3000875, NT2RP3000901, NT2RP3000917, NT2RP3000919, NT2RP3000968, NT2RP3000980, NT2RP3000994, NT2RP3001004, NT2RP3001007, NT2RP3001055, NT2RP3001057, NT2RP3001081, NT2RP3001084, NT2RP3001096, NT2RP3001107, NT2RP3001109, NT2RP3001111, NT2RP3001113, NT2RP3001115, NT2RP3001116, NT2RP3001119, NT2RP3001120, NT2RP3001126, NT2RP3001133, NT2RP3001140, NT2RP3001150, NT2RP3001155, NT2RP3001176, NT2RP3001214, NT2RP3001216, NT2RP3001221, NT2RP3001232, NT2RP3001236, NT2RP3001239, NT2RP3001245, NT2RP3001253, NT2RP3001260, NT2RP3001268, NT2RP3001272, NT2RP3001274, NT2RP3001281, NT2RP3001282, NT2RP3001297, NT2RP3001307, NT2RP3001318, NT2RP3001325, NT2RP3001338, NT2RP3001355, NT2RP3001356, NT2RP3001374, NT2RP3001383, NT2RP3001384, NT2RP3001392, NT2RP3001396, NT2RP3001398, NT2RP3001399, NT2RP3001407, NT2RP3001420, NT2RP3001426, NT2RP3001427, NT2RP3001428, NT2RP3001432, NT2RP3001447, NT2RP3001449, NT2RP3001453, NT2RP3001457, NT2RP3001459, NT2RP3001472, NT2RP3001495, NT2RP3001497, NT2RP3001527, NT2RP3001529, NT2RP3001538, NT2RP3001554, NT2RP3001580, NT2RP3001587, NT2RP3001589, NT2RP3001607, NT2RP3001608, NT2RP3001621, NT2RP3001629, NT2RP3001642, NT2RP3001646, NT2RP3001671, NT2RP3001672, NT2RP3001676, NT2RP3001678, NT2RP3001679, NT2RP3001688, NT2RP3001690, NT2RP3001698, NT2RP3001708, NT2RP3001712, NT2RP3001716, NT2RP3001723, NT2RP3001724, NT2RP3001727, NT2RP3001730, NT2RP3001739, NT2RP3001752, NT2RP3001777, NT2RP3001792, NT2RP3001799, NT2RP3001819, NT2RP3001844, NT2RP3001854, NT2RP3001855, NT2RP3001857, NT2RP3001896, NT2RP3001898, NT2RP3001915, NT2RP3001929, NT2RP3001931, NT2RP3001938, NT2RP3001943, NT2RP3001944, NT2RP3001969, NT2RP3002002, NT2RP3002004, NT2RP3002007, NT2RP3002014, NT2RP3002033, NT2RP3002045, NT2RP3002054, NT2RP3002056, NT2RP3002062, NT2RP3002063, NT2RP3002081, NT2RP3002097, NT2RP3002099, NT2RP3002102, NT2RP3002108, NT2RP3002142, NT2RP3002146, NT2RP3002147, NT2RP3002151, NT2RP3002163, NT2RP3002165, NT2RP3002166, NT2RP3002173, NT2RP3002181, NT2RP3002244, NT2RP3002248, NT2RP3002255, NT2RP3002273, NT2RP3002276, NT2RP3002303, NT2RP3002304, NT2RP3002330, NT2RP3002343, NT2RP3002351, NT2RP3002399, NT2RP3002402, NT2RP3002455, NT2RP3002484, NT2RP3002501, NT2RP3002512, NT2RP3002529, NT2RP3002545, NT2RP3002549, NT2RP3002566, NT2RP3002587, NT2RP3002590, NT2RP3002602, NT2RP3002603, NT2RP3002628, NT2RP3002631, NT2RP3002650, NT2RP3002659, NT2RP3002660, NT2RP3002663, NT2RP3002671, NT2RP3002682, NT2RP3002687, NT2RP3002688, NT2RP3002701, NT2RP3002713, NT2RP3002763, NT2RP3002770, NT2RP3002785, NT2RP3002799, NT2RP3002810, NT2RP3002818, NT2RP3002861, NT2RP3002869, NT2RP3002876, NT2RP3002877, NT2RP3002909, NT2RP3002911, NT2RP3002948, NT2RP3002953, NT2RP3002955, NT2RP3002969, NT2RP3002972, NT2RP3002985, NT2RP3002988, NT2RP3003008, NT2RP3003032, NT2RP3003059, NT2RP3003061, NT2RP3003071, NT2RP3003078, NT2RP3003101, NT2RP3003121, NT2RP3003133, NT2RP3003138, NT2RP3003139, NT2RP3003145, NT2RP3003150, NT2RP3003155, NT2RP3003157, NT2RP3003185, NT2RP3003193, NT2RP3003197, NT2RP3003203, NT2RP3003204, NT2RP3003210, NT2RP3003212, NT2RP3003230, NT2RP3003242, NT2RP3003251, NT2RP3003264, NT2RP3003278, NT2RP3003282, NT2RP3003290, NT2RP3003301, NT2RP3003302, NT2RP3003311, NT2RP3003313, NT2RP3003327, NT2RP3003344, NT2RP3003346, NT2RP3003353, NT2RP3003377, NT2RP3003385, NT2RP3003403, NT2RP3003409, NT2RP3003411, NT2RP3003427, NT2RP3003433, NT2RP3003490, NT2RP3003491, NT2RP3003500, NT2RP3003543, NT2RP3003552, NT2RP3003555, NT2RP3003564, NT2RP3003572, NT2RP3003576, NT2RP3003589, NT2RP3003621, NT2RP3003625, NT2RP3003656, NT2RP3003659, NT2RP3003665, NT2RP3003672, NT2RP3003680, NT2RP3003686, NT2RP3003701, NT2RP3003716, NT2RP3003726, NT2RP3003795, NT2RP3003799, NT2RP3003800, NT2RP3003805, NT2RP3003809, NT2RP3003819, NT2RP3003825, NT2RP3003828, NT2RP3003831, NT2RP3003833, NT2RP3003842, NT2RP3003846, NT2RP3003870, NT2RP3003876, NT2RP3003914, NT2RP3003918, NT2RP3003932, NT2RP3003989, NT2RP3003992, NT2RP3004013, NT2RP3004016, NT2RP3004028, NT2RP3004041, NT2RP3004051, NT2RP3004070, NT2RP3004078, NT2RP3004093, NT2RP3004095, NT2RP3004125, NT2RP3004145, NT2RP3004148, NT2RP3004155, NT2RP3004189, NT2RP3004206, NT2RP3004207, NT2RP3004209, NT2RP3004215, NT2RP3004242, NT2RP3004246, NT2RP3004253, NT2RP3004258, NT2RP3004262, NT2RP3004282, NT2RP3004332, NT2RP3004341, NT2RP3004348, NT2RP3004349, NT2RP3004378, NT2RP3004424, NT2RP3004428, NT2RP3004451, NT2RP3004454, NT2RP3004466, NT2RP3004470, NT2RP3004472, NT2RP3004480, NT2RP3004490, NT2RP3004498, NT2RP3004503, NT2RP3004504, NT2RP3004507, NT2RP3004534, NT2RP3004539, NT2RP3004544, NT2RP3004566, NT2RP3004569, NT2RP3004572, NT2RP3004578, NT2RP3004594, NT2RP3004617, NT2RP3004618, NT2RP3004669, NT2RP3004670, NT2RP4000008, NT2RP4000023, NT2RP4000035, NT2RP4000049, NT2RP4000051, NT2RP4000078, NT2RP4000102, NT2RP4000109, NT2RP4000111, NT2RP4000129, NT2RP4000147, NT2RP4000150, NT2RP4000151, NT2RP4000159, NT2RP4000167, NT2RP4000185, NT2RP4000210, NT2RP4000212, NT2RP4000218, NT2RP4000243, NT2RP4000246, NT2RP4000259, NT2RP4000290, NT2RP4000312, NT2RP4000323, NT2RP4000355, NT2RP4000360, NT2RP4000367, NT2RP4000370, NT2RP4000376, NT2RP4000381, NT2RP4000398, NT2RP4000415, NT2RP4000417, NT2RP4000424, NT2RP4000448, NT2RP4000449, NT2RP4000455, NT2RP4000457, NT2RP4000480, NT2RP4000481, NT2RP4000498, NT2RP4000500, NT2RP4000515, NT2RP4000517, NT2RP4000518, NT2RP4000519, NT2RP4000524, NT2RP4000528, NT2RP4000541, NT2RP4000556, NT2RP4000560, NT2RP4000588, NT2RP4000614, NT2RP4000638, NT2RP4000648, NT2RP4000657, NT2RP4000704, NT2RP4000713, NT2RP4000724, NT2RP4000728, NT2RP4000737, NT2RP4000739, NT2RP4000781, NT2RP4000817, NT2RP4000833, NT2RP4000837, NT2RP4000839, NT2RP4000855, NT2RP4000865, NT2RP4000878, NT2RP4000879, NT2RP4000907, NT2RP4000925, NT2RP4000927, NT2RP4000928, NT2RP4000929, NT2RP4000955, NT2RP4000973, NT2RP4000975, NT2RP4000979, NT2RP4000984, NT2RP4000989, NT2RP4000997, NT2RP4001004, NT2RP4001006, NT2RP4001010, NT2RP4001029, NT2RP4001041, NT2RP4001057, NT2RP4001064, NT2RP4001079, NT2RP4001080, NT2RP4001086, NT2RP4001095, NT2RP4001100, NT2RP4001117, NT2RP4001122, NT2RP4001126, NT2RP4001138, NT2RP4001143, NT2RP4001148, NT2RP4001149, NT2RP4001150, NT2RP4001174, NT2RP4001206, NT2RP4001207, NT2RP4001210, NT2RP4001213, NT2RP4001219, NT2RP4001228, NT2RP4001235, NT2RP4001256, NT2RP4001260, NT2RP4001274, NT2RP4001276, NT2RP4001313, NT2RP4001315, NT2RP4001336, NT2RP4001339, NT2RP4001343, NT2RP4001345, NT2RP4001351, NT2RP4001353, NT2RP4001372, NT2RP4001373, NT2RP4001375, NT2RP4001379, NT2RP4001389, NT2RP4001407, NT2RP4001414, NT2RP4001433, NT2RP4001442, NT2RP4001447, NT2RP4001474, NT2RP4001483, NT2RP4001498, NT2RP4001502, NT2RP4001507, NT2RP4001524, NT2RP4001529, NT2RP4001547, NT2RP4001551, NT2RP4001555, NT2RP4001567, NT2RP4001568, NT2RP4001571, NT2RP4001574, NT2RP4001575, NT2RP4001592, NT2RP4001610, NT2RP4001614, NT2RP4001634, NT2RP4001638, NT2RP4001644, NT2RP4001656, NT2RP4001677, NT2RP4001679, NT2RP4001696, NT2RP4001725, NT2RP4001730, NT2RP4001739, NT2RP4001753, NT2RP4001760, NT2RP4001790, NT2RP4001803, NT2RP4001822, NT2RP4001823, NT2RP4001828, NT2RP4001838, NT2RP4001841, NT2RP4001849, NT2RP4001861, NT2RP4001893, NT2RP4001896, NT2RP4001901, NT2RP4001927, NT2RP4001938, NT2RP4001946, NT2RP4001950, NT2RP4001953, NT2RP4001966, NT2RP4001975, NT2RP4002018, NT2RP4002047, NT2RP4002052, NT2RP4002058, NT2RP4002071, NT2RP4002075, NT2RP4002078, NT2RP4002081, NT2RP4002083, NT2RP4002298, NT2RP4002408, NT2RP4002791, NT2RP4002888, NT2RP4002905, NT2RP5003461, NT2RP5003477, NT2RP5003492, NT2RP5003500, NT2RP5003506, NT2RP5003512, NT2RP5003522, NT2RP5003524, NT2RP5003534, OVARC1000001, OVARC1000006, OVARC1000008, OVARC1000013, OVARC1000014, OVARC1000017, OVARC1000035, OVARC1000058, OVARC1000060, OVARC1000068, OVARC1000071, OVARC1000085, OVARC1000087, OVARC1000091, OVARC1000092, OVARC1000106, OVARC1000109, OVARC1000113, OVARC1000114, OVARC1000139, OVARC1000145, OVARC1000148, OVARC1000151, OVARC1000168, OVARC1000198, OVARC1000209, OVARC1000212, OVARC1000240, OVARC1000241, OVARC1000288, OVARC1000302, OVARC1000304, OVARC1000309, OVARC1000321, OVARC1000326, OVARC1000335, OVARC1000347, OVARC1000384, OVARC1000408, OVARC1000411, OVARC1000414, OVARC1000420, OVARC1000437, OVARC1000440, OVARC1000442, OVARC1000443, OVARC1000461, OVARC1000465, OVARC1000466, OVARC1000473, OVARC1000479, OVARC1000496, OVARC1000520, OVARC1000533, OVARC1000556, OVARC1000557, OVARC1000564, OVARC1000576, OVARC1000578, OVARC1000588, OVARC1000605, OVARC1000622, OVARC1000640, OVARC1000649, OVARC1000661, OVARC1000678, OVARC1000679, OVARC1000681, OVARC1000682, OVARC1000689, OVARC1000700, OVARC1000703, OVARC1000722, OVARC1000724, OVARC1000730, OVARC1000746, OVARC1000751, OVARC1000771, OVARC1000781, OVARC1000787, OVARC1000800, OVARC1000802, OVARC1000834, OVARC1000846, OVARC1000850, OVARC1000862, OVARC1000876, OVARC1000883, OVARC1000885, OVARC1000886, OVARC1000890, OVARC1000891, OVARC1000912, OVARC1000915, OVARC1000924, OVARC1000936, OVARC1000937, OVARC1000945, OVARC1000959, OVARC1000960, OVARC1000964, OVARC1000971, OVARC1000984, OVARC1000999, OVARC1001000, OVARC1001004, OVARC1001010, OVARC1001011, OVARC1001029, OVARC1001032, OVARC1001034, OVARC1001038, OVARC1001040, OVARC1001044, OVARC1001051, OVARC1001055, OVARC1001065, OVARC1001068, OVARC1001072, OVARC1001074, OVARC1001092, OVARC1001107, OVARC100113, OVARC1001117, OVARC100118, OVARC1001129, OVARC1001154, OVARC1001161, OVARC1001162, OVARC11001167, OVARC1001169, OVARC1001170, OVARC1001171, OVARC1001173, OVARC1001176, OVARC1001180, OVARC1001188, OVARC1001200, OVARC11001232, OVARC11001240, OVARC11001243, OVARC1001244, OVARC1001261, OVARC1001270, OVARC1001271, OVARC1001296, OVARC1001306, OVARC1001329, OVARC1001339, OVARC1001341, OVARC1001342, OVARC1001344, OVARC1001357, OVARC1001360, OVARC1001369, OVARC1001372, OVARC1001376, OVARC1001381, OVARC1001391, OVARC1001399, OVARC1001417, OVARC1001419, OVARC1001425, OVARC1001436, OVARC1001442, OVARC1001453, OVARC1001476, OVARC1001480, OVARC1001489, OVARC1001496, OVARC1001506, OVARC1001525, OVARC1001555, OVARC1001577, OVARC1001600, OVARC1001610, OVARC11001611, OVARC1001702, OVARC1001703, OVARC11001711, OVARC11001713, OVARC1001726, OVARC1001731, OVARC1001745, OVARC1001762, OVARC1001766, OVARC1001767, OVARC1001768, OVARC1001791, OVARC1001795, OVARC1001802, OVARC1001809, OVARC1001813, OVARC1001828, OVARC1001846, OVARC1001861, OVARC1001873, OVARC1001879, OVARC1001880, OVARC1001883, OVARC1001916, OVARC1001928, OVARC1001942, OVARC1001943, OVARC1001950, OVARC1001987, OVARC1002050, OVARC1002082, OVARC1002107, OVARC1002112, OVARC1002127, OVARC1002138, OVARC1002143, OVARC1002156, OVARC1002158, OVARC1002165, OVARC1002182, PLACE1000004, PLACE1000005, PLACE1000007, PLACE1000014, PLACE1000040, PLACE1000048, PLACE1000050, PLACE1000061, PLACE1000066, PLACE1000078, PLACE1000081, PLACE1000094, PLACE1000133, PLACE1000142, PLACE1000184, PLACE1000185, PLACE1000213, PLACE1000214, PLACE1000236, PLACE1000246, PLACE1000292, PLACE1000308, PLACE1000332, PLACE1000347, PLACE1000374, PLACE1000380, PLACE1000383, PLACE1000401, PLACE1000406, PLACE1000420, PLACE1000435, PLACE1000444, PLACE1000453, PLACE1000492, PLACE1000547, PLACE1000562, PLACE1000564, PLACE1000583, PLACE1000588, PLACE1000596, PLACE1000599, PLACE1000610, PLACE1000611, PLACE1000636, PLACE1000653, PLACE1000656, PLACE1000706, PLACE1000712, PLACE1000716, PLACE1000748, PLACE1000749, PLACE1000755, PLACE1000769, PLACE1000785, PLACE1000786, PLACE1000793, PLACE1000798, PLACE1000814, PLACE1000849, PLACE1000856, PLACE1000863, PLACE1000909, PLACE1000931, PLACE1000948, PLACE1000972, PLACE1000977, PLACE1000979, PLACE1000987, PLACE1001000, PLACE1001007, PLACE1001010, PLACE1001015, PLACE1001024, PLACE1001036, PLACE1001054, PLACE1001062, PLACE1001076, PLACE1001088, PLACE1001092, PLACE1001104, PLACE1001118, PLACE1001136, PLACE1001168, PLACE1001171, PLACE1001185, PLACE1001238, PLACE1001241, PLACE1001257, PLACE1001280, PLACE1001294, PLACE1001304, PLACE1001311, PLACE1001323, PLACE1001351, PLACE1001366, PLACE1001377, PLACE1001383, PLACE1001387, PLACE1001395, PLACE1001399, PLACE1001412, PLACE1001414, PLACE1001440, PLACE1001456, PLACE1001484, PLACE1001503, PLACE1001517, PLACE1001545, PLACE1001570, PLACE1001602, PLACE1001608, PLACE1001610, PLACE1001632, PLACE1001634, PLACE1001640, PLACE1001672, PLACE1001692, PLACE1001705, PLACE1001716, PLACE1001720, PLACE1001729, PLACE1001739, PLACE1001740, PLACE1001745, PLACE1001746, PLACE1001748, PLACE1001761, PLACE1001771, PLACE1001781, PLACE1001799, PLACE1001810, PLACE1001817, PLACE1001845, PLACE1001869, PLACE1001897, PLACE1001912, PLACE1001920, PLACE1001928, PLACE1001983, PLACE1001989, PLACE1002004, PLACE1002046, PLACE1002066, PLACE1002072, PLACE1002073, PLACE1002090, PLACE1002115, PLACE1002140, PLACE1002157, PLACE1002163, PLACE1002170, PLACE1002171, PLACE1002213, PLACE1002227, PLACE1002256, PLACE1002259, PLACE1002319, PLACE1002342, PLACE1002395, PLACE1002433, PLACE1002437, PLACE1002438, PLACE1002450, PLACE1002465, PLACE1002474, PLACE1002477, PLACE1002493, PLACE1002499, PLACE1002500, PLACE1002514, PLACE1002529, PLACE1002532, PLACE1002537, PLACE1002571, PLACE1002578, PLACE1002583, PLACE1002591, PLACE1002598, PLACE1002625, PLACE1002655, PLACE1002665, PLACE1002685, PLACE1002714, PLACE1002722, PLACE1002768, PLACE1002772, PLACE1002775, PLACE1002782, PLACE1002794, PLACE1002815, PLACE1002816, PLACE1002834, PLACE1002839, PLACE1002851, PLACE1002853, PLACE1002908, PLACE1002941, PLACE1002962, PLACE1002968, PLACE1002991, PLACE1002993, PLACE1002996, PLACE1003025, PLACE1003027, PLACE1003030, PLACE1003044, PLACE1003045, PLACE1003092, PLACE1003100, PLACE1003108, PLACE1003145, PLACE1003174, PLACE1003176, PLACE1003190, PLACE1003200, PLACE1003205, PLACE1003238, PLACE1003249, PLACE1003256, PLACE1003258, PLACE1003296, PLACE1003302, PLACE1003334, PLACE1003342, PLACE1003343, PLACE1003353, PLACE1003361, PLACE1003366, PLACE1003369, PLACE1003373, PLACE1003375, PLACE1003383, PLACE1003394, PLACE1003420, PLACE1003454, PLACE1003478, PLACE1003493, PLACE1003516, PLACE1003519, PLACE1003521, PLACE1003528, PLACE1003537, PLACE1003553, PLACE1003566, PLACE1003584, PLACE1003592, PLACE1003593, PLACE1003596, PLACE1003602, PLACE1003605, PLACE1003611, PLACE1003618, PLACE1003625, PLACE1003638, PLACE1003669, PLACE1003704, PLACE1003709, PLACE1003711, PLACE1003723, PLACE1003738, PLACE1003760, PLACE1003762, PLACE1003768, PLACE1003771, PLACE1003784, PLACE1003795, PLACE1003864, PLACE1003870, PLACE1003885, PLACE1003886, PLACE1003888, PLACE1003892, PLACE1003900, PLACE1003903, PLACE1003915, PLACE1003923, PLACE1003936, PLACE1003968, PLACE1004104, PLACE1004114, PLACE1004118, PLACE1004128, PLACE1004149, PLACE1004156, PLACE1004161, PLACE1004183, PLACE1004197, PLACE1004203, PLACE1004256, PLACE1004258, PLACE1004270, PLACE1004274, PLACE1004277, PLACE1004284, PLACE1004289, PLACE1004302, PLACE1004316, PLACE1004336, PLACE1004358, PLACE1004376, PLACE1004384, PLACE1004388, PLACE1004405, PLACE1004425, PLACE1004428, PLACE1004437, PLACE1004451, PLACE1004460, PLACE1004471, PLACE1004473, PLACE1004491, PLACE1004506, PLACE1004510, PLACE1004516, PLACE1004518, PLACE1004548, PLACE1004550, PLACE1004564, PLACE1004629, PLACE1004645, PLACE1004646, PLACE1004664, PLACE1004672, PLACE1004674, PLACE1004681, PLACE1004686, PLACE1004691, PLACE1004693, PLACE1004716, PLACE1004722, PLACE1004736, PLACE1004740, PLACE1004743, PLACE1004751, PLACE1004777, PLACE1004793, PLACE1004804, PLACE1004814, PLACE1004815, PLACE1004824, PLACE1004836, PLACE1004838, PLACE1004840, PLACE1004868, PLACE1004885, PLACE1004900, PLACE1004902, PLACE1004913, PLACE1004918, PLACE1004930, PLACE1004934, PLACE1004937, PLACE1004969, PLACE1004979, PLACE1004982, PLACE1004985, PLACE1005026, PLACE1005027, PLACE1005046, PLACE1005052, PLACE1005055, PLACE1005077, PLACE1005085, PLACE1005086, PLACE1005101, PLACE1005102, PLACE1005108, PLACE1005111, PLACE1005128, PLACE1005146, PLACE1005162, PLACE1005176, PLACE1005181, PLACE1005187, PLACE1005206, PLACE1005232, PLACE1005243, PLACE1005261, PLACE1005266, PLACE1005277, PLACE1005287, PLACE1005305, PLACE1005308, PLACE1005313, PLACE1005327, PLACE1005331, PLACE1005335, PLACE1005373, PLACE1005374, PLACE1005409, PLACE1005453, PLACE1005467, PLACE1005477, PLACE1005480, PLACE1005481, PLACE1005494, PLACE1005530, PLACE1005549, PLACE1005550, PLACE1005554, PLACE1005557, PLACE1005574, PLACE1005584, PLACE1005595, PLACE1005603, PLACE1005611, PLACE1005623, PLACE1005639, PLACE1005646, PLACE1005656, PLACE1005727, PLACE1005730, PLACE1005739, PLACE1005755, PLACE1005763, PLACE1005799, PLACE1005802, PLACE1005803, PLACE1005804, PLACE1005813, PLACE1005828, PLACE1005850, PLACE1005851, PLACE1005876, PLACE1005884, PLACE1005890, PLACE1005898, PLACE1005921, PLACE1005923, PLACE1005925, PLACE1005932, PLACE1005934, PLACE1005936, PLACE1005951, PLACE1005953, PLACE1005955, PLACE1005966, PLACE1005968, PLACE1005990, PLACE1006002, PLACE1006003, PLACE1006011, PLACE1006017, PLACE1006037, PLACE1006040, PLACE1006076, PLACE1006119, PLACE1006129, PLACE1006139, PLACE1006143, PLACE1006157, PLACE1006159, PLACE1006167, PLACE1006170, PLACE1006195, PLACE1006196, PLACE1006225, PLACE1006236, PLACE1006239, PLACE1006246, PLACE1006248, PLACE1006288, PLACE1006318, PLACE1006325, PLACE1006335, PLACE1006357, PLACE1006360, PLACE1006368, PLACE1006371, PLACE1006382, PLACE1006385, PLACE1006412, PLACE1006414, PLACE1006438, PLACE1006445, PLACE1006469, PLACE1006470, PLACE1006482, PLACE1006488, PLACE1006492, PLACE1006506, PLACE1006521, PLACE1006531, PLACE1006534, PLACE1006552, PLACE1006598, PLACE1006615, PLACE1006617, PLACE1006626, PLACE1006640, PLACE1006673, PLACE1006678, PLACE1006704, PLACE1006731, PLACE1006754, PLACE1006760, PLACE1006779, PLACE1006782, PLACE1006792, PLACE1006795, PLACE1006805, PLACE1006815, PLACE1006819, PLACE1006829, PLACE1006867, PLACE1006878, PLACE1006883, PLACE1006901, PLACE1006917, PLACE1006932, PLACE1006935, PLACE1006956, PLACE1006958, PLACE1006961, PLACE1006962, PLACE1006966, PLACE1007014, PLACE1007021, PLACE1007045, PLACE1007053, PLACE1007068, PLACE1007097, PLACE1007105, PLACE1007111, PLACE1007112, PLACE1007140, PLACE1007178, PLACE1007218, PLACE1007226, PLACE1007238, PLACE1007239, PLACE1007242, PLACE1007243, PLACE1007257, PLACE1007274, PLACE1007282, PLACE1007301, PLACE1007317, PLACE1007342, PLACE1007346, PLACE1007367, PLACE1007375, PLACE1007386, PLACE1007402, PLACE1007409, PLACE1007416, PLACE1007450, PLACE1007452, PLACE1007454, PLACE1007460, PLACE1007478, PLACE1007484, PLACE1007488, PLACE1007507, PLACE1007511, PLACE1007524, PLACE1007537, PLACE1007544, PLACE1007547, PLACE1007557, PLACE1007583, PLACE1007598, PLACE1007618, PLACE1007621, PLACE1007632, PLACE1007645, PLACE1007649, PLACE1007677, PLACE1007688, PLACE1007690, PLACE1007697, PLACE1007705, PLACE1007706, PLACE1007725, PLACE1007729, PLACE1007730, PLACE1007737, PLACE1007743, PLACE1007746, PLACE1007791, PLACE1007807, PLACE1007810, PLACE1007843, PLACE1007846, PLACE1007852, PLACE1007858, PLACE1007866, PLACE1007877, PLACE1007897, PLACE1007946, PLACE1007954, PLACE1007955, PLACE1007958, PLACE1007969, PLACE1007990, PLACE1008000, PLACE1008002, PLACE1008044, PLACE1008045, PLACE1008080, PLACE1008095, PLACE1008111, PLACE1008122, PLACE1008129, PLACE1008132, PLACE1008177, PLACE1008181, PLACE1008201, PLACE1008209, PLACE1008231, PLACE1008244, PLACE1008273, PLACE1008275, PLACE1008280, PLACE1008309, PLACE1008329, PLACE1008330, PLACE1008331, PLACE1008356, PLACE1008368, PLACE1008369, PLACE1008392, PLACE1008398, PLACE1008401, PLACE1008402, PLACE1008405, PLACE1008424, PLACE1008426, PLACE1008429, PLACE1008455, PLACE1008457, PLACE1008465, PLACE1008488, PLACE1008524, PLACE1008531, PLACE1008532, PLACE1008533, PLACE1008568, PLACE1008584, PLACE1008603, PLACE1008621, PLACE1008625, PLACE1008626, PLACE1008627, PLACE1008629, PLACE1008630, PLACE1008643, PLACE1008650, PLACE1008693, PLACE1008696, PLACE1008715, PLACE1008748, PLACE1008757, PLACE1008790, PLACE1008798, PLACE1008808, PLACE1008813, PLACE1008851, PLACE1008854, PLACE1008867, PLACE1008887, PLACE1008902, PLACE1008925, PLACE1008941, PLACE1008947, PLACE1009020, PLACE1009027, PLACE1009039, PLACE1009045, PLACE1009048, PLACE1009050, PLACE1009060, PLACE1009090, PLACE1009091, PLACE1009094, PLACE0009099, PLACE1009110, PLACE1009111, PLACE1009113, PLACE1009130, PLACE1009150, PLACE1009158, PLACE1009166, PLACE1009174, PLACE1009186, PLACE1009190, PLACE1009200, PLACE1009230, PLACE1009246, PLACE1009298, PLACE1009308, PLACE1009319, PLACE1009328, PLACE1009335, PLACE1009338, PLACE1009368, PLACE1009375, PLACE1009388, PLACE1009398, PLACE1009404, PLACE1009410, PLACE1009434, PLACE1009443, PLACE1009444, PLACE1009459, PLACE1009468, PLACE1009476, PLACE1009477, PLACE1009493, PLACE1009524, PLACE1009539, PLACE1009542, PLACE1009571, PLACE1009581, PLACE1009595, PLACE1009596, PLACE1009607, PLACE1009621, PLACE1009622, PLACE1009637, PLACE1009639, PLACE1009659, PLACE1009665, PLACE1009670, PLACE1009708, PLACE1009721, PLACE1009731, PLACE1009763, PLACE1009794, PLACE1009798, PLACE1009845, PLACE1009861, PLACE1009886, PLACE1009888, PLACE1009908, PLACE1009921, PLACE1009925, PLACE1009935, PLACE1009947, PLACE1009971, PLACE1009992, PLACE1009995, PLACE1009997, PLACE1010023, PLACE1010031, PLACE1010053, PLACE1010069, PLACE1010074, PLACE1010076, PLACE1010089, PLACE1010096, PLACE1010102, PLACE1010105, PLACE1010106, PLACE1010134, PLACE1010148, PLACE1010194, PLACE1010202, PLACE1010231, PLACE1010261, PLACE1010270, PLACE1010274, PLACE1010293, PLACE1010310, PLACE1010321, PLACE1010324, PLACE1010329, PLACE1010362, PLACE1010364, PLACE1010383, PLACE1010401, PLACE1010481, PLACE1010491, PLACE1010492, PLACE1010522, PLACE1010529, PLACE1010547, PLACE1010562, PLACE1010579, PLACE1010599, PLACE1010616, PLACE1010622, PLACE1010624, PLACE1010628, PLACE1010629, PLACE1010630, PLACE1010661, PLACE1010662, PLACE1010702, PLACE1010714, PLACE1010720, PLACE1010743, PLACE1010761, PLACE1010771, PLACE1010786, PLACE1010800, PLACE1010802, PLACE1010811, PLACE1010833, PLACE1010856, PLACE1010857, PLACE1010870, PLACE1010877, PLACE1010896, PLACE1010900, PLACE1010916, PLACE1010917, PLACE1010925, PLACE1010926, PLACE1010942, PLACE1010944, PLACE1010947, PLACE1010954, PLACE1010960, PLACE1010965, PLACE1011026, PLACE1011032, PLACE1011041, PLACE1011046, PLACE1011054, PLACE1011056, PLACE1011057, PLACE1010190, PLACE1011109, PLACE1011114, PLACE1011133, PLACE1011143, PLACE1011160, PLACE1011165, PLACE1011185, PLACE1011214, PLACE1011219, PLACE1011221, PLACE1011229, PLACE1011263, PLACE1011273, PLACE1011291, PLACE1011310, PLACE1011325, PLACE1011332, PLACE1011340, PLACE1011371, PLACE1011399, PLACE1011433, PLACE1011452, PLACE1011465, PLACE1011472, PLACE1011477, PLACE1011492, PLACE1011503, PLACE1011520, PLACE1011563, PLACE1011567,PLACE1011576, PLACE1011586, PLACE1011635, PLACE1011643, PLACE1011646, PLACE1011649, PLACE1011650, PLACE1011664, PLACE1011675, PLACE1011682, PLACE1011719, PLACE1011725,PLACE1011729, PLACE1011749, PLACE1011858, PLACE1011874, PLACE1011875, PLACE1011891, PLACE1011896, PLACE1011922, PLACE1011923, PLACE1011982, PLACE1012031, PLACE2000003, PLACE2000006, PLACE2000007, PLACE2000014, PLACE2000015, PLACE2000017, PLACE2000021, PLACE2000034, PLACE2000039, PLACE2000047, PLACE2000050, PLACE2000061, PLACE2000062, PLACE2000072, PLACE2000097, PLACE2000100, PLACE2000103, PLACE2000111, PLACE2000115, PLACE2000124, PLACE2000132, PLACE2000140, PLACE2000164, PLACE2000170, PLACE2000172, PLACE2000176, PLACE2000187, PLACE2000216, PLACE2000223, PLACE2000235, PLACE2000246, PLACE2000274, PLACE2000302, PLACE2000317, PLACE2000335, PLACE2000341, PLACE2000347, PLACE2000359, PLACE2000366, PLACE2000371, PLACE2000373, PLACE2000379, PLACE2000394, PLACE2000398, PLACE2000399, PLACE2000404, PLACE2000411, PLACE2000425, PLACE2000427, PLACE2000433, PLACE2000438, PLACE2000450, PLACE2000455, PLACE2000458, PLACE2000477, PLACE3000009, PLACE3000020, PLACE3000059, PLACE3000070, PLACE3000103, PLACE3000119, PLACE3000121, PLACE3000124, PLACE3000136, PLACE3000142, PLACE3000145, PLACE3000147, PLACE3000148, PLACE3000155, PLACE3000156, PLACE3000157, PLACE3000158, PLACE3000160, PLACE3000169, PLACE3000194, PLACE3000197, PLACE3000199, PLACE3000207, PLACE3000208, PLACE3000218, PLACE3000221, PLACE3000226, PLACE3000230, PLACE3000242, PLACE3000244, PLACE3000254, PLACE3000271, PLACE3000276, PLACE3000304, PLACE3000310, PLACE3000320, PLACE3000322, PLACE3000331, PLACE3000339, PLACE3000341, PLACE3000350, PLACE3000352, PLACE3000353, PLACE3000362, PLACE3000363, PLACE3000365, PLACE3000373, PLACE3000388, PLACE3000399, PLACE3000401, PLACE3000402, PLACE3000405, PLACE3000406, PLACE3000413, PLACE3000416, PLACE3000425, PLACE3000455, PLACE3000475, PLACE3000477, PLACE4000009, PLACE4000014, PLACE4000052, PLACE4000063, PLACE4000089, PLACE4000093, PLACE4000100, PLACE4000106, PLACE4000128, PLACE4000129, PLACE4000131, PLACE4000147, PLACE4000156, PLACE4000192, PLACE4000211, PLACE4000222, PLACE4000230, PLACE4000247, PLACE4000250, PLACE4000252, PLACE4000259, PLACE4000261, PLACE4000269, PLACE4000270, PLACE4000300, PLACE4000320, PLACE4000323, PLACE4000326, PLACE4000344, PLACE4000367, PLACE4000369, PLACE4000387, PLACE4000392, PLACE4000401, PLACE4000411, PLACE4000431, PLACE4000445, PLACE4000450, PLACE4000465, PLACE4000487, PLACE4000489, PLACE4000494, PLACE4000521, PLACE4000522, PLACE4000548, PLACE4000558, PLACE4000581, PLACE4000590, PLACE4000593, PLACE4000612, PLACE4000638, PLACE4000650, PLACE4000654, PLACE4000670, SKNMC1000011, SKNMC1000013, SKNMC1000046, SKNMC1000050, SKNMC1000091, THYRO1000026, THYRO1000034, THYRO1000070, THYRO1000072, THYRO1000085, THYRO1000092, THYRO1000107, THYRO1000111, THYRO1000121, THYRO1000124, THYRO1000132, THYRO1000156, THYRO1000173, THYRO1000186, THYRO1000187, THYRO1000197, THYRO1000199, THYRO1000206, THYRO1000241, THYRO1000242, THYRO1000253, THYRO1000270, THYRO1000279, THYRO1000288, THYRO1000320, THYRO1000327, THYRO1000343, THYRO1000358, THYRO1000368, THYRO1000381, THYRO1000387, THYRO1000394, THYRO1000395, THYRO1000401, THYRO1000452, THYRO1000471, THYRO1000484, THYRO1000488, THYRO1000501, THYRO1000502, THYRO1000505, THYRO1000558, THYRO1000569, THYRO1000570, THYRO1000585, THYRO1000596, THYRO1000605, THYRO1000625, THYRO1000637, THYRO1000662, THYRO1000666, THYRO1000676, THYRO1000684, THYRO1000712, THYRO1000715, THYRO1000734, THYRO1000748, THYRO1000756, THYRO1000777, THYRO1000783, THYRO1000787, THYRO1000793, THYRO1000796, THYRO1000805, THYRO1000815, THYRO1000843, THYRO1000852, THYRO1000855, THYRO1000865, THYRO1000895, THYRO1000916, THYRO1000926, THYRO1000934, THYRO1000951, THYRO1000952, THYRO1000983, THYRO1000988, THYRO1001003, THYRO1001031, THYRO1001033, THYRO1001062, THYRO1001100, THYRO1001120, THYRO1001133, THYRO1001134, THYRO1001142, THYRO1001173, THYRO1001189, THYRO1001204, THYRO1001213, THYRO1001262, THYRO1001271, THYRO1001287, THYRO1001313, THYRO1001320, THYRO1001321, THYRO1001322, THYRO1001347, THYRO1001363, THYRO1001365, THYRO1001374, THYRO1001401, THYRO1001403, THYRO1001405, THYRO1001406, THYRO1001411, THYRO1001426, THYRO1001434, THYRO1001458, THYRO1001480, THYRO1001487, THYRO1001534, THYRO1001537, THYRO1001541, THYRO1001559, THYRO1001570, THYRO1001584, THYRO1001595, THYRO1001602, THYRO1001605, THYRO1001617, THYRO1001637, THYRO1001656, THYRO1001661, THYRO1001671, THYRO1001673, THYRO1001703, THYRO1001706, THYRO1001721, THYRO1001738, THYRO1001745, THYRO1001746, THYRO1001772, THYRO1001793, THYRO1001809, THYRO1001828, THYRO1001854, THYRO1001895, THYRO1001907, VESEN1000122, Y79AA1000013, Y79AA1000033, Y79AA1000037, Y79AA1000059, Y79AA1000065, Y79AA1000131, Y79AA1000181, Y79AA1000202, Y79AA1000214, Y79AA1000230, Y79AA1000231, Y79AA1000258, Y79AA1000268, Y79AA1000313, Y79AA1000328, Y79AA1000342, Y79AA1000346, Y79AA1000349, Y79AA1000355, Y79AA1000368, Y79AA1000410, Y79AA1000420, Y79AA1000469, Y79AA1000480, Y79AA1000539, Y79AA1000540, Y79AA1000560, Y79AA1000574, Y79AA1000589, Y79AA1000627, Y79AA1000705, Y79AA1000734, Y79AA1000748, Y79AA1000752, Y79AA1000774, Y79AA1000782, Y79AA1000784, Y79AA1000794, Y79AA1000800, Y79AA1000802, Y79AA1000805, Y79AA1000824, Y79AA1000827, Y79AA1000833, Y79AA1000850, Y79AA1000962, Y79AA1000966, Y79AA1000968, Y79AA1000969, Y79AA1000976, Y79AA1000985, Y79AA1001023, Y79AA1001041, Y79AA1001048, Y79AA1001061, Y79AA1001068, Y79AA1001077, Y79AA1001078, Y79AA1001145, Y79AA1001167, Y79AA1001177, Y79AA1001185, Y79AA1001211, Y79AA1001216, Y79AA1001228, Y79AA1001233, Y79AA1001236, Y79AA1001281, Y79AA1001299, Y79AA1001312, Y79AA1001323, Y79AA1001384, Y79AA1001391, Y79AA1001394, Y79AA1001402, Y79AA1001493, Y79AA1001511, Y79AA1001533, Y79AA1001541, Y79AA1001548, Y79AA1001555, Y79AA1001581, Y79AA1001585, Y79AA1001594, Y79AA1001603, Y79AA1001613, Y79AA1001647, Y79AA1001665, Y79AA1001679, Y79AA1001692, Y79AA1001696, Y79AA1001705, Y79AA1001711, Y79AA1001781, Y79AA1001805, Y79AA1001827, Y79AA1001846, Y79AA1001866, Y79AA1001874, Y79AA1001875, Y79AA1001923, Y79AA1001963, Y79AA1002027, Y79AA1002083, Y79AA1002089, Y79AA1002103, Y79AA1002115, Y79AA1002125, Y79AA1002139, Y79AA1002204, Y79AA1002208, Y79AA1002209, Y79AA1002210, Y79AA1002211, Y79AA1002220, Y79AA1002229, Y79AA1002234, Y79AA1002246, Y79AA1002258, Y79AA1002298, Y79AA1002307, Y79AA1002311, Y79AA1002351, Y79AA1002361, Y79AA1002399, Y79AA1002407, Y79AA1002416, Y79AA1002431, Y79AA1002433, Y79AA1002472, Y79AA1002482, Y79AA1002487,

[0633] Among the 4997 clones, there are 2189 clones that presumably encode proteins belonging to any of the categories of secretory or membrane proteins, glycoprotein-associated proteins, signal transduction-associated proteins, transcription-associated proteins, disease-associated proteins, enzymes and/or metabolism-associated proteins, ATP- and/or GTP-binding proteins, nuclear proteins, DNA- and/or RNA-binding proteins, RNA synthesis-associated proteins, protein synthesis- and/or protein transport-associated proteins, cytoskeleton-associated proteins, cell division- and/or cell proliferation-associated proteins, embryogenesis- and/or development-associated proteins, or cellular defense-associated proteins.

[0634] The clones that presumably encode proteins belonging to the category of secretory or membrane proteins are those which matched the full-length sequences of Swiss-Prot database with the keywords “growth factor”, “cytokine”, “hormone”, “signal”, “transmembrane”, “membrane”, “extracellular matrix”, “receptor”, “G-protein coupled receptor”, “ionic channel”, “voltage-gated channel”, “calcium channel”, “cell adhesion”, “collagen”, or “connective tissue”; those which matched the data, suggesting that the proteins are secretory or membrane proteins; or those which matched the full-length sequences of GenBank or UniGene database with similar description; and, further, those predicted to have an N-terminal signal sequence or a transmembrane region as a result of domain search for the amino acid sequences deduced from the full-length nucleotide sequences.

[0635] The clones that presumably encode proteins belonging to the category of glycoprotein-associated proteins are those which matched the full-length sequences of Swiss-Prot database with the keywords “glycoprotein”; those which matched the data, suggesting that the proteins are glycoprotein; or those which matched the full-length sequences of GenBank or UniGene database with similar description.

[0636] The clones that presumably encode proteins belonging to the category of signal transduction-associated proteins are those which matched the full-length sequences of Swiss-Prot database with the keywords “serine/threonine-protein kinase”, “tyrosine-protein kinase”, or “SH3 domain”; those which matched the data, suggesting that the proteins are signal transduction-associated proteins (for example, “ADP-ribosylation factor”); or those which matched the full-length sequences of GenBank or UniGene database with similar description.

[0637] The clones that presumably encode proteins belonging to the category of transcription-associated proteins are those which matched the full-length sequences of Swiss-Prot database with the keywords “transcription regulation”, “zinc finger”, or “homeobox”; those which matched the data, suggesting that the proteins are transcription-associated proteins; or those which matched the full-length sequences of GenBank or UniGene database with similar description.

[0638] The clones that presumably encode proteins belonging to the category of disease-associated proteins are those which matched the full-length sequences of Swiss-Prot database with the keywords “disease mutation” or “syndrome”; those which matched the data, suggesting that the proteins are disease-associated proteins; or those which matched the full-length sequences of Swiss-Prot database and GenBank or UniGene database where the matched sequences of genes or proteins which had been registered in the database of Online Mendelian Inheritance in Man (OMIM) (http://www.ncbi.nlm.nih.gov/Omim/), which is a database of human genes and diseases.

[0639] The clones that presumably encode proteins belonging to the category of enzymes and/or metabolism-associated proteins are those which showed the terms “metabolism”, “oxidoreductase”, or “E.C. No. (Enzyme commission number)” in the matching data.

[0640] The clones that presumably encode proteins belonging to the category of ATP- and/or GTP-binding proteins are those which matched the data with the terms “ATP-binding” or “GTP-binding”.

[0641] The clones that presumably encode proteins belonging to the category of nuclear proteins are those which matched the data with the terms “nuclear protein”.

[0642] The clones that presumably encode proteins belonging to the category of DNA- and/or RNA-binding proteins are those which matched the data with the terms “DNA-binding” or “RNA-binding”.

[0643] The clones that presumably encode proteins belonging to the category of RNA synthesis-associated proteins are those which matched the data with the terms “RNA splicing”, “RNA processing”, “RNA helicase”, or “polyadenylation”.

[0644] The clones that presumably encode proteins belonging to the category of protein synthesis- and/or protein transport-associated proteins are those which matched the data with the terms “translation regulation”, “protein biosynthesis”, “amino-acid biosynthesis”, “ribosomal protein”, “protein transport”, or “signal recognition particle”.

[0645] The clones that presumably encode proteins belonging to the category of cytoskeleton-associated proteins are those which matched the data with the terms “structural protein”, “cytoskeleton”, “actin-binding”, or “microtubules”.

[0646] The clones that presumably encode proteins belonging to the category of cell division- and/or cell proliferation-associated proteins are those which matched the data with the terms “cell division”, “cell cycle”, “mitosis”, “chromosomal protein”, “cell growth”, or “apoptosis”.

[0647] The clones that presumably encode proteins belonging to the category of embryogenesis- and/or development-associated proteins are those which matched the data with the terms “developmental protein”.

[0648] The clones that presumably encode proteins belonging to the category of cellular defense-associated proteins are those which matched the data with the terms “heat shock”, “DNA repair”, or “DNA damage”.

[0649] When a clone belonged to the above-mentioned multiple functional categories, the clone was classified into the multiple categories. However, the functions of the protein encoded by the clone are not limited to the functions of the categories into which the clone was classified, and therefore, additional functions can be found for the protein by further analyses.

[0650] The following 796 clones are categorized into secretory or membrane proteins.

[0651] HEMBA1000356, HEMBA1000518, HEMBA1000531, HEMBA1000637, HEMBA1000719, HEMBA1000817, HEMBA1000822, HEMBA1000852, HEMBA1000870, HEMBA1000991, HEMBA1001052, HEMBA1001071, HEMBA1001085, HEMBA1001286, HEMBA1001351, HEMBA1001407, HEMBA1001446, HEMBA1001515, HEMBA1001557, HEMBA1001569, HEMBA1001661, HEMBA1001734, HEMBA1001746, HEMBA1001866, HEMBA1002125, HEMBA1002150, HEMBA1002166, HEMBA1002417, HEMBA1002462, HEMBA1002475, HEMBA1002477, HEMBA1002486, HEMBA1002609, HEMBA1002659, HEMBA1002661, HEMBA1002780, HEMBA1002818, HEMBA1002876, HEMBA1002921, HEMBA1003071, HEMBA1003077, HEMBA1003079, HEMBA1003086, HEMBA1003096, HEMBA1003281, HEMBA1003286, HEMBA1003538, HEMBA1003711, HEMBA1003742, HEMBA1003803, HEMBA1004055, HEMBA1004143, HEMBA1004146, HEMBA1004207, HEMBA1004341, HEMBA1004461, HEMBA1004577, HEMBA1004637, HEMBA1004752, HEMBA1004756, HEMBA1004850, HEMBA1004889, HEMBA1004923, HEMBA1004930, HEMBA1005029, HEMBA1005035, HEMBA1005050, HEMBA1005552, HEMBA1005576, HEMBA1005581, HEMBA1005588, HEMBA1005616, HEMBA1005699, HEMBA1005991, HEMBA1006036, HEMBA1006038, HEMBA1006067, HEMBA1006173, HEMBA1006198, HEMBA1006293, HEMBA1006310, HEMBA1006492, HEMBA1006502, HEMBA1006583, HEMBA1006659, HEMBA1006758, HEMBA1006789, HEMBA1006921, HEMBA1006926, HEMBA1006976, HEMBA1007203, HEMBA1007301, HEMBB1000037, HEMBB1000050, HEMBB1000054, HEMBB1000175, HEMBB1000317, HEMBB1000556, HEMBB1000593, HEMBB1000631, HEMBB1000763, HEMBB1000827, HEMBB1000915, HEMBB1000975, HEMBB1001112, HEMBB1001151, HEMBB1001177, HEMBB1001302, HEMBB1001348, HEMBB1001564, HEMBB1001630, HEMBB1001871, HEMBB1001872, HEMBB1001925, HEMBB1001962, HEMBB1002042, HEMBB1002044, HEMBB1002142, HEMBB1002190, HEMBB1002193, HEMBB1002247, HEMBB1002383, HEMBB1002387, HEMBB1002550, HEMBB1002600, HEMBB1002692, MAMMA1000045, MAMMA1000129, MAMMA1000133, MAMMA1000277, MAMMA1000278, MAMMA1000410, MAMMA1000416, MAMMA1000472, MAMMA1000672, MAMMA1000684, MAMMA1000714, MAMMA1000734, MAMMA1000778, MAMMA1000798, MAMMA1000842, MAMMA1000859, MAMMA1000897, MAMMA1000956, MAMMA1001008, MAMMA1001030, MAMMA1001041, MAMMA1001073, MAMMA1001080, MAMMA1001139, MAMMA1001154, MAMMA11001322, MAMMA1001388, MAMMA1001411, MAMMA1001487, MAMMA1001751, MAMMA1001754, MAMMA1001771, MAMMA1002009, MAMMA1002427, MAMMA1002428, MAMMA1002461, MAMMA1002524, MAMMA1002573, MAMMA1002598, MAMMA1002655, MAMMA1002684, MAMMA1002769, MAMMA1002844, MAMMA1002881, MAMMA1002890, MAMMA1002938, MAMMA1002947, MAMMA1003035, MAMMA1003089, MAMMA1003146, MAMMA1003150, NT2RM1000035, NT2RM1000037, NT2RM1000062, NT2RM1000080, NT2RM1000092, NT2RM1000131, NT2RM1000199, NT2RM1000257, NT2RM1000260, NT2RM1000355, NT2RM1000430, NT2RM1000563, NT2RM1000648, NT2RM1000742, NT2RM1000770, NT2RM1000800, NT2RM1000811, NT2RM1000833, NT2RM1000857, NT2RM1000867, NT2RM1000882, NT2RM1000905, NT2RM1001008,

[0652] NT2RM1001115, NT2RM1001139, NT2RM2000259, NT2RM2000260, NT2RM2000287, NT2RM2000395, NT2RM2000402, NT2RM2000407, NT2RM2000422, NT2RM2000490, NT2RM2000522, NT2RM2000566, NT2RM2000581, NT2RM2000609, NT2RM2000821, NT2RM2001370, NT2RM2001393, NT2RM2001499, NT2RM2001547, NT2RM2001613, NT2RM2001648, NT2RM2001659, NT2RM2001671, NT2RM2001688, NT2RM2001698, NT2RM2001718, NT2RM2001753, NT2RM2001760, NT2RM2001785, NT2RM2001930, NT2RM2001950, NT2RM2001997, NT2RM2001998, NT2RM2002049, NT2RM2002145, NT2RM4000233, NT2RM4000433, NT2RM4000457, NT2RM4000486, NT2RM4000496, NT2RM4000520, NT2RM4000634, NT2RM4000674, NT2RM4000700, NT2RM4000764, NT2RM4000778, NT2RM4000795, NT2RM4000820, NT2RM4000857, NT2RM4001032, NT2RM4001054, NT2RM4001116, NT2RM4001455, NT2RM4001666, NT2RM4001810, NT2RM4001813, NT2RM4001930, NT2RM4001987, NT2RM4002054, NT2RM4002073, NT2RM4002145, NT2RM4002146, NT2RM4002189, NT2RM4002194, NT2RM4002251, NT2RM4002339, NT2RM4002438, NT2RM4002446, NT2RM4002452, NT2RM4002460, NT2RM4002493, NT2RM4002558, NT2RM4002565, NT2RM4002571, NT2RM4002594, NT2RP1000130, NT2RP1000191, NT2RP1000326, NT2RP1000358, NT2RP1000413, NT2RP1000418, NT2RP1000547, NT2RP1000609, NT2RP1000677, NT2RP1000767, NT2RP1000782, NT2RP1000856, NT2RP1001113, NT2RP1001247, NT2RP1001286, NT2RP1001310, NT2RP1001311, NT2RP1001313, NT2RP1001385, NT2RP1001449, NT2RP1001546, NT2RP1001569, NT2RP2000032, NT2RP2000040, NT2RP2000056, NT2RP2000070, NT2RP2000091, NT2RP2000114, NT2RP2000120, NT2RP2000173, NT2RP2000175, NT2RP2000195, NT2RP2000257, NT2RP2000270, NT2RP2000283, NT2RP2000288, NT2RP2000289, NT2RP2000459, NT2RP2000516, NT2RP2000660, NT2RP2000842, NT2RP2000892, NT2RP2001081, NT2RP2001268, NT2RP2001295, NT2RP2001366, NT2RP2001378, NT2RP2001576, NT2RP2001581, NT2RP2001597, NT2RP2001613, NT2RP2001947, NT2RP2001991, NT2RP2002025, NT2RP2002066, NT2RP2002078, NT2RP2002105, NT2RP2002312, NT2RP2002325, NT2RP2002385, NT2RP2002479, NT2RP2002537, NT2RP2002643, NT2RP2002701, NT2RP2002740, NT2RP2002857, NT2RP2003125, NT2RP2003297, NT2RP2003433, NT2RP2003446, NT2RP2003466, NT2RP2003506, NT2RP2003513, NT2RP2003629, NT2RP2003668, NT2RP2003760, NT2RP2003777, NT2RP2003781, NT2RP2004041, NT2RP2004142, NT2RP2004194, NT2RP2004270, NT2RP2004300, NT2RP2004392, NT2RP2004655, NT2RP2004681, NT2RP2004775, NT2RP2004799, NT2RP2004936, NT2RP2004959, NT2RP2005012, NT2RP2005159, NT2RP2005227, NT2RP2005270, NT2RP2005344, NT2RP2005465, NT2RP2005509, NT2RP2005752, NT2RP2005781, NT2RP2005784, NT2RP2005812, NT2RP2006069, NT2RP2006100, NT2RP2006141, NT2RP2006184, NT2RP2006261, NT2RP2006565, NT2RP2006571, NT2RP2006573, NT2RP3000092, NT2RP3000109, NT2RP3000134, NT2RP3000207, NT2RP3000333, NT2RP3000341, NT2RP3000393, NT2RP3000439, NT2RP3000441, NT2RP3000531, NT2RP3000685, NT2RP3000825, NT2RP3000826, NT2RP3000852, NT2RP3000919, NT2RP3001084, NT2RP3001096, NT2RP3001126, NT2RP3001140, NT2RP3001176, NT2RP3001260, NT2RP3001282, NT2RP3001355, NT2RP3001383, NT2RP3001426, NT2RP3001453, NT2RP3001497, NT2RP3001538, NT2RP3001589, NT2RP3001642, NT2RP3001708, NT2RP3001716, NT2RP3001727, NT2RP3001739, NT2RP3001799, NT2RP3001943, NT2RP3001944, NT2RP3002002, NT2RP3002007, NT2RP3002014, NT2RP3002054, NT2RP3002108, NT2RP3002163, NT2RP3002351, NT2RP3002455, NT2RP3002549, NT2RP3002602, NT2RP3002628, NT2RP3002650, NT2RP3002687, NT2RP3002701, NT2RP3002810, NT2RP3002869, NT2RP3002969, NT2RP3002985, NT2RP3003008, NT2RP3003059, NT2RP3003071, NT2RP3003101, NT2RP3003145, NT2RP3003197, NT2RP3003203, NT2RP3003242, NT2RP3003302, NT2RP3003353, NT2RP3003409, NT2RP3003576, NT2RP3003621, NT2RP3003665, NT2RP3003672, NT2RP3003701, NT2RP3003716, NT2RP3003799, NT2RP3003828, NT2RP3003914, NT2RP3003918, NT2RP3003992, NT2RP3004051, NT2RP3004148, NT2RP3004155, NT2RP3004207, NT2RP3004282, NT2RP3004454, NT2RP3004480, NT2RP3004503, NT2RP4000008, NT2RP4000051, NT2RP4000151, NT2RP4000212, NT2RP4000243, NT2RP4000259, NT2RP4000323, NT2RP4000417, NT2RP4000500, NT2RP4000524, NT2RP4000556, NT2RP4000560, NT2RP4000588, NT2RP4000713, NT2RP4000724, NT2RP4000817, NT2RP4000833, NT2RP4000878, NT2RP4000907, NT2RP4000925, NT2RP4000928, NT2RP4000973, NT2RP4000989, NT2RP4001057, NT2RP4001064, NT2RP4001079, NT2RP4001117, NT2RP4001138, NT2RP4001149, NT2RP4001150, NT2RP4001174, NT2RP4001219, NT2RP4001274, NT2RP4001313, NT2RP4001345, NT2RP4001372, NT2RP4001373, NT2RP4001379, NT2RP4001498, NT2RP4001547, NT2RP4001571, NT2RP4001574, NT2RP4001644, NT2RP4001656, NT2RP4001677, NT2RP4001730, NT2RP4001739, NT2RP4001803, NT2RP4001822, NT2RP4001823, NT2RP4001950, NT2RP4001975, NT2RP4002052, NT2RP4002075, NT2RP5003500, NT2RP5003506, NT2RP5003522, NT2RP5003534, OVARC1000060, OVARC1000335, OVARC1000682, OVARC1000689, OVARC1000700, OVARC1000722, OVARC1000751, OVARC1000850, OVARC1000890, OVARC1000924, OVARC1000936, OVARC1000959, OVARC1000984, OVARC1000999, OVARC1001034, OVARC1001055, OVARC1001117, OVARC1001129, OVARC1001154, OVARC1001329, OVARC1001381, OVARC1001391, OVARC1001453, OVARC1001476, OVARC1001506, OVARC1001610, OVARC1001702, OVARC1001703, OVARC1001713, OVARC1001745, OVARC1001767, OVARC1002127, OVARC1002138, OVARC1002158, OVARC1002165, PLACE1000014, PLACE1000213, PLACE1000401, PLACE1000562, PLACE1000611, PLACE1000656, PLACE1000712, PLACE1000793, PLACE1000909, PLACE1000948, PLACE1000977, PLACE1001241, PLACE1001257, PLACE1001377, PLACE1001517, PLACE1001610, PLACE1001761, PLACE1001771, PLACE1001817, PLACE1001983, PLACE1002046, PLACE1002140, PLACE1002213, PLACE1002395, PLACE1002437, PLACE1002500, PLACE1002583, PLACE1002714, PLACE1002722, PLACE1002782, PLACE1002794, PLACE1002851, PLACE1002908, PLACE1003030, PLACE1003044, PLACE1003045, PLACE1003238, PLACE1003296, PLACE1003369, PLACE1003420, PLACE1003493, PLACE1003537, PLACE1003553, PLACE1003596, PLACE1003760, PLACE1003768, PLACE1003771, PLACE1003903, PLACE1004149, PLACE1004197, PLACE1004203, PLACE1004258, PLACE1004270, PLACE1004277, PLACE1004289, PLACE1004473, PLACE1004629, PLACE1004646, PLACE1004743, PLACE1004751, PLACE1004793, PLACE1004840, PLACE1004969, PLACE1005086, PLACE1005162, PLACE1005206, PLACE1005313, PLACE1005467, PLACE1005530, PLACE1005595, PLACE1005611, PLACE1005623, PLACE1005763, PLACE1005884, PLACE1005890, PLACE1005898, PLACE1005934, PLACE1005953, PLACE1006157, PLACE1006225, PLACE1006239, PLACE1006288, PLACE1006492, PLACE1006534, PLACE1006678, PLACE1006754, PLACE1006901, PLACE1006935, PLACE1006956, PLACE1007111, PLACE1007243, PLACE1007274, PLACE1007282, PLACE1007317, PLACE1007375, PLACE1007386, PLACE1007409, PLACE1007416, PLACE1007484, PLACE1007583, PLACE1007632, PLACE1007645, PLACE1007649, PLACE1007852, PLACE1007877, PLACE1007954, PLACE1008273, PLACE1008309, PLACE1008331, PLACE1008402, PLACE1008424, PLACE1008429, PLACE1008531, PLACE1008532, PLACE1008533, PLACE1008568, PLACE1008643, PLACE1008693, PLACE1008715, PLACE1009045, PLACE1009094, PLACE1009298, PLACE1009319, PLACE1009338, PLACE1009368, PLACE1009493, PLACE1009639, PLACE1009659, PLACE1009708, PLACE1009731, PLACE1009845, PLACE1009861, PLACE1009935, PLACE1009992, PLACE1010089, PLACE1010231, PLACE1010321, PLACE1010362, PLACE1010599, PLACE1010622, PLACE1010662, PLACE1010811, PLACE1010917, PLACE1010942, PLACE1010954, PLACE1011090, PLACE1011214, PLACE1011221, PLACE1011371, PLACE1011399, PLACE1011492, PLACE1011646, PLACE1011749, PLACE1011896, PLACE2000034, PLACE2000062, PLACE2000111, PLACE2000132, PLACE2000176, PLACE2000187, PLACE2000216, PLACE2000335, PLACE2000341, PLACE2000373, PLACE2000379, PLACE2000398, PLACE2000399, PLACE2000425, PLACE2000438, PLACE2000458, PLACE2000477, PLACE3000020, PLACE3000218, PLACE3000226, PLACE3000242, PLACE3000244, PLACE3000339, PLACE3000373, PLACE3000399, PLACE3000406, PLACE3000413, PLACE3000455, PLACE4000052, PLACE4000063, PLACE4000129, PLACE4000247, PLACE4000250, PLACE4000259, PLACE4000300, PLACE4000387, PLACE4000431, PLACE4000487, PLACE4000494, PLACE4000522, PLACE4000548, PLACE4000581, PLACE4000593, PLACE4000650, THYRO1000156, THYRO1000327, THYRO1000394, THYRO1000395, THYRO1000570, THYRO1000748, THYRO1000756, THYRO1000783, THYRO1001134, THYRO1001271, THYRO1001287, THYRO1001320, THYRO1001401, THYRO1001534, THYRO1001537, THYRO1001541, THYRO1001828, Y79AA1000258, Y79AA1000420, Y79AA1000469, Y79AA1000734, Y79AA1000800, Y79AA1000976, Y79AA1001023, Y79AA11001177, Y79AA1001384, Y79AA1001394, Y79AA1001603, Y79AA1001647, Y79AA1001846, Y79AA1001874, Y79AA1002139, Y79AA1002246, Y79AA1002351, Y79AA1002399, Y79AA1002416,

[0653] The following 141 clones are categorized into glycoproteins-associated proteins.

[0654] HEMBA1000156, HEMBA1000518, HEMBA1000852, HEMBA1001071, HEMBA1001286, HEMBA1001661, HEMBA1001734, HEMBA1001866, HEMBA1003071, HEMBA1003077, HEMBA1003281, HEMBA1003538, HEMBA1003679, HEMBA1003866, HEMBA1005576, HEMBA1005581, HEMBA1005699, HEMBA1006038, HEMBA1006976, HEMBA1007301, HEMBB1000317, HEMBB1000915, HEMBB1001871, HEMBB1001872, HEMBB1002193, MAMMA1000672, MAMMA1000897, MAMMA1001030, MAMMA1001388, MAMMA1002329, MAMMA1002428, MAMMA1002573, MAMMA1003150, NT2RM1000648, NT2RM1001115, NT2RM2000260, NT2RM2000407, NT2RM2000422, NT2RM2000490, NT2RM2001499, NT2RM2001659, NT2RM2001930, NT2RM4000820, NT2RM4000857, NT2RM4001810, NT2RM4001813, NT2RM4001987, NT2RM4002145, NT2RM4002189, NT2RM4002251, NT2RM4002460, NT2RM4002558, NT2RP1000677, NT2RP1000782, NT2RP1000856, NT2RP1001546, NT2RP2000056, NT2RP2000070, NT2RP2001295, NT2RP2001378, NT2RP2001597, NT2RP2001991, NT2RP2002025, NT2RP2002078, NT2RP2002385, NT2RP2004587, NT2RP2004732, NT2RP2005531, NT2RP3000207, NT2RP3000531, NT2RP3000825, NT2RP3001140, NT2RP3002810, NT2RP3003672, NT2RP3003701, NT2RP3003716, NT2RP3003914, NT2RP3004148, NT2RP4000212, NT2RP4000417, NT2RP4000724, NT2RP4000817, NT2RP4000925, NT2RP4001150, NT2RP4001372, NT2RP4001730, NT2RP4001822, NT2RP4001823, NT2RP5003522, OVARC1000091, OVARC1000288, OVARC1000682, OVARC1001055, OVARC1001506, OVARC1001713, OVARC1002127, PLACE1000213, PLACE1000401, PLACE1002437, PLACE1002583,

[0655] PLACE1002722, PLACE1003045, PLACE1003238, PLACE1003258, PLACE1003493, PLACE1004197, PLACE1004793, PLACE1005953, PLACE1005955, PLACE1006157, PLACE1006239, PLACE1006368, PLACE1006534, PLACE1006754, PLACE1006956, PLACE1007416, PLACE1007632, PLACE1007649, PLACE1008643, PLACE1009094, PLACE1009992, PLACE1010231, PLACE1010662, PLACE1010371, PLACE2000034, PLACE2000373, PLACE2000398, PLACE2000399, PLACE2000438, PLACE2000458, PLACE3000339, PLACE4000063, PLACE4000230, PLACE4000522, PLACE4000548, PLACE4000581, THYRO1000327, THYRO1000756, THYRO1001287, Y79AA1001603, Y79AA1001874

[0656] The following 129 clones are categorized into signal transduction-associated proteins.

[0657] HEMBA1000303, HEMBA1000369, HEMBA1000608, HEMBA1000657, HEMBA1000919, HEMBA1100109, HEMBA1001174, HEMBA1001822, HEMBA1001921, HEMBA1002139, HEMBA1002212, HEMBA1002341, HEMBA1002417, HEMBA1002768, HEMBA1003250, HEMBA1003291, HEMBA1003645, HEMBA1004286, HEMBA1005737, HEMBA1006130, HEMBA1006708, HEMBB1000083, HEMBB1000266, HEMBB1000632, HEMBB1000781, HEMBB1000831, HEMBB1002193, MAMMA1000173, MAMMA1001038, MAMMA1001198, MAMMA1002842, MAMMA1003057, NT2RM1000702, NT2RM1000772, NT2RM1001072, NT2RM2000030, NT2RM2000469, NT2RM2000612, NT2RM2001221, NT2RM2001345, NT2RM2002128, NT2RM4000229, NT2RM4000354, NT2RM4000611, NT2RM4000798, NT2RM4001411, NT2RM4001412, NT2RM4001629, NT2RM4001758, NT2RM4002013, NT2RM4002527, NT2RP1000018, NT2RP1000701, NT2RP1001294, NT2RP1001302, NT2RP2000668, NT2RP2001440, NT2RP2001560, NT2RP2002058, NT2RP2002193, NT2RP2002408, NT2RP2002710, NT2RP2002929, NT2RP2003164, NT2RP2003912, NT2RP2004232, NT2RP2004768, NT2RP2006071, NT2RP2006534, NT2RP3000759, NT2RP3000845, NT2RP3001646, NT2RP3001857, NT2RP3001938, NT2RP3002004, NT2RP3002785, NT2RP3002909, NT2RP3002988, NT2RP3003800, NT2RP3004189, NT2RP3004544, NT2RP4000147, NT2RP4000839, NT2RP4001122, NT2RP4001148, NT2RP4001336, NT2RP4001375, NT2RP4001644, NT2RP4001725, NT2RP4001849, NT2RP4001896, NT2RP4001927, NT2RP4002408, NT2RP5003477, OVARC1000013, OVARC1000437, OVARC1000556, OVARC1000649, OVARC1000945, OVARC1001200, OVARC1002182, PLACE1000977, PLACE1001387, PLACE1002493, PLACE1002591, PLACE1003190, PLACE1003353, PLACE1004128, PLACE1004302, PLACE1004937, PLACE1005243, PLACE1008000, PLACE1008244, PLACE1008650, PLACE1009468, PLACE1009596, PLACE1009708, PLACE1009845, PLACE1010926, PLACE1011041, PLACE2000164, PLACE2000371, PLACE3000145, PLACE3000350, THYRO1000072, THYRO1000748, THYRO1001120, Y79AA1000328, Y79AA1002431

[0658] The following 309 clones are categorized into transcription -associated proteins.

[0659] HEMBA1000158, HEMBA1000201, HEMBA1000216, HEMBA1000555, HEMBA1000561, HEMBA1000851, HEMBA1001077, HEMBA1001137, HEMBA1001405, HEMBA1001510, HEMBA1001635, HEMBA1001804, HEMBA1001809, HEMBA1001819, HEMBA1001847, HEMBA1001869, HEMBA1002035, HEMBA1002092, HEMBA1002177, HEMBA1002770, HEMBA1002935, HEMBA1003408, HEMBA1003545, HEMBA1003568, HEMBA1003662, HEMBA1003684, HEMBA1003760, HEMBA1003953, HEMBA1004097, HEMBA1004321, HEMBA1004353, HEMBA1004389, HEMBA1004479, HEMBA1004758, HEMBA1004973, HEMBA1005219, HEMBA1005359, HEMBA1005513, HEMBA1005528, HEMBA1005548, HEMBA1005558, HEMBA1005931, HEMBA1006158, HEMBA1006248, HEMBA1006278, HEMBA1006283, HEMBA1006347, HEMBA1006359, HEMBA1006559, HEMBA1006941, HEMBB1000789, HEMBB1001011, HEMBB1001314, HEMBB1001482, HEMBB1001673, HEMBB1001749, HEMBB1001839, HEMBB1001908, HEMBB1002134, HEMBB1002217, HEMBB1002342, HEMBB1002607, MAMMA1000183, MAMMA1000388, MAMMA1001105, MAMMA1001222, MAMMA1001260, MAMMA1001627, MAMMA1001633, MAMMA1001743, MAMMA1001820, MAMMA1001837, MAMMA1002617, MAMMA1002650, MAMMA1002937, NT2RM1000055, NT2RM1000086, NT2RM1000746, NT2RM1000885, NT2RM1000894, NT2RM1001092, NT2RM2000013, NT2RM2000452, NT2RM2000735, NT2RM2000740, NT2RM2001035, NT2RM2001105, NT2RM2001575, NT2RM2001670, NT2RM2001716, NT2RM2001771, NT2RM2002091, NT2RM4000024, NT2RM4000046, NT2RM4000104, NT2RM4000202, NT2RM4000531, NT2RM4000595, NT2RM4000733, NT2RM4000734,

[0660] NT2RM4000741, NT2RM4000751, NT2RM4000996, NT2RM4001092, NT2RM4001140, NT2RM4001200, NT2RM4001483, NT2RM4001592, NT2RM4001783, NT2RM4001823, NT2RM4001828, NT2RM4001858, NT2RM4001979, NT2RM4002066, NT2RP1000086, NT2RP1000111, NT2RP1000574, NT2RP1000902, NT2RP1001013, NT2RP2000008, NT2RP2000126, NT2RP2000297, NT2RP2000420, NT2RP2001174, NT2RP2001233, NT2RP2001756, NT2RP2001869, NT2RP2002046, NT2RP2002252, NT2RP2002270, NT2RP2002464, NT2RP2002503, NT2RP2002520, NT2RP2002591, NT2RP2002880, NT2RP2002939, NT2RP2002993, NT2RP2003243, NT2RP2003329, NT2RP2003347, NT2RP2003480, NT2RP2003522, NT2RP2003564, NT2RP2003714, NT2RP2004013, NT2RP2004066, NT2RP2004187, NT2RP2004920, NT2RP2004961, NT2RP2005003, NT2RP2005139, NT2RP2005325, NT2RP2005496, NT2RP2005701, NT2RP2005722, NT2RP2005776, NT2RP2005942, NT2RP2006238, NT2RP2006436, NT2RP3000050, NT2RP3000320, NT2RP3000512, NT2RP3000527, NT2RP3000590, NT2RP3000603, NT2RP3000605, NT2RP3000632, NT2RP3001057, NT2RP3001107, NT2RP3001111, NT2RP3001120, NT2RP3001150, NT2RP3001268, NT2RP3001338, NT2RP3001398, NT2RP3001527, NT2RP3001688, NT2RP3001855, NT2RP3002165, NT2RP3002399, NT2RP3002876, NT2RP3003133, NT2RP3003193, NT2RP3003251, NT2RP3003313, NT2RP3003327, NT2RP3003555, NT2RP3004016, NT2RP3004125, NT2RP3004242, NT2RP3004428, NT2RP3004498, NT2RP3004566, NT2RP3004617, NT2RP4000210, NT2RP4000398, NT2RP4000455, NT2RP4000648, NT2RP4000837, NT2RP4000865, NT2RP4000997, NT2RP4001029, NT2RP4001080, NT2RP4001213, NT2RP4001433, NT2RP4001529, NT2RP4001551, NT2RP4001568, NT2RP4001638, NT2RP4001753, NT2RP4001760, NT2RP4001790, NT2RP4001838, NT2RP4001938, NT2RP4002078, NT2RP4002081, NT2RP5003461, OVARC1000151, OVARC1000241, OVARC1000479, OVARC1001271, OVARC1001417, OVARC1001436, PLACE1000133, PLACE1000583, PLACE1000706, PLACE1000786, PLACE1000979, PLACE1001118, PLACE1001238, PLACE1001294, PLACE1001304, PLACE1001383, PLACE1001602, PLACE1001632, PLACE1002171, PLACE1002438, PLACE1002450, PLACE1002532, PLACE1002775, PLACE1002834, PLACE1003302, PLACE1003605, PLACE1003738, PLACE1003885, PLACE1004471, PLACE1005584, PLACE1005803, PLACE1005966, PLACE1006167, PLACE1006318, PLACE1006438, PLACE1006482, PLACE1007239, PLACE1007346, PLACE1007488, PLACE1007547, PLACE1007598, PLACE1007955, PLACE1008132, PLACE1008201, PLACE1009099, PLACE1009246, PLACE1009308, PLACE1009398, PLACE1009798, PLACE1010134, PLACE1010702, PLACE1010771, PLACE1010870, PLACE1011160, PLACE1011433, PLACE1011576, PLACE3000009, PLACE3000169, PLACE3000254, PLACE4000128, PLACE4000156, PLACE4000192, PLACE4000211, PLACE4000261, PLACE4000450, PLACE4000489, THYRO1000085, THYRO1000121, THYRO1000242, THYRO1000488, THYRO1000501, THYRO1000569, THYRO1001100, THYRO1001189, THYRO1001809, Y79AA1000013, Y79AA1000033, Y79AA1000037, Y79AA1000342, Y79AA1000627, Y79AA1000705, Y79AA1001299, Y79AA1001312, Y79AA1001391, Y79AA1001533, Y79AA1001613, Y79AA1001866, Y79AA1002103, Y79AA1002229, Y79AA1002433, Y79AA1002472, Y79AA1002482,

[0661] The following 392 clones are categorized into disease-associated proteins.

[0662] HEMBA1000020, HEMBA1000216, HEMBA1000304, HEMBA1000561, HEMBA1000569, HEMBA1000910, HEMBA1001043, HEMBA1001059, HEMBA1001071, HEMBA1001088, HEMBA1001569, HEMBA1001661, HEMBA1001672, HEMBA1001819, HEMBA1001921, HEMBA1002267, HEMBA1002419, HEMBA1002469, HEMBA1002547, HEMBA1002555, HEMBA1002810, HEMBA1002939, HEMBA1002997, HEMBA1003148, HEMBA1003369, HEMBA1003417, HEMBA1003418, HEMBA1003433, HEMBA1003538, HEMBA1003555, HEMBA1003568, HEMBA1003569, HEMBA1003581, HEMBA1004168, HEMBA1004202, HEMBA1004248, HEMBA1004275, HEMBA1004321, HEMBA1004353, HEMBA1004356, HEMBA1004479, HEMBA1004509, HEMBA1004669, HEMBA1005009, HEMBA1005338, HEMBA1005367, HEMBA1005423, HEMBA1005528, HEMBA1005581, HEMBA1005621, HEMBA1005699, HEMBA1006507, HEMBA1006650, HEMBA1006652, HEMBA1006737, HEMBA1006807, HEMBA1006877, HEMBA1007121, HEMBA1007243, HEMBB1000119, HEMBB1000693, HEMBB1000927, HEMBB1000985, HEMBB1001068, HEMBB1001282, HEMBB1001339, HEMBB1001482, HEMBB1001564, HEMBB1001802, HEMBB1001905, HEMBB1001908, HEMBB1002217, HEMBB1002477, MAMMA1000388, MAMMA1000731, MAMMA1001305, MAMMA1001633, MAMMA1001868, MAMMA1002170, MAMMA1002198, MAMMA1002268, MAMMA1002485, MAMMA1002530, MAMMA1002858, MAMMA1002869, MAMMA1002881, MAMMA1003047, MAMMA1003146, MAMMA1003166, NT2RM1000001, NT2RM1000153, NT2RM1000252, NT2RM1000555, NT2RM1000770, NT2RM1000826, NT2RM1000850, NT2RM1001003, NT2RM1001092, NT2RM1001102, NT2RM2000191,

[0663] NT2RM2000363, NT2RM2000594, NT2RM2000624, NT2RM2000714, NT2RM2000821, NT2RM2001035, NT2RM2001575, NT2RM2001652, NT2RM2001664, NT2RM2001668, NT2RM2001698, NT2RM2001803, NT2RM2001839, NT2RM4000155, NT2RM4000471, NT2RM4000486, NT2RM4000657, NT2RM4000751, NT2RM4000996, NT2RM4001629, NT2RM4001810, NT2RM4001819, NT2RM4001865, NT2RM4001876, NT2RM4001940, NT2RM4002066, NT2RM4002093, NT2RM4002146, NT2RM4002161, NT2RM4002323, NT2RM4002558, NT2RM4002571, NT2RP1000086, NT2RP1000574, NT2RP1000738, NT2RP1000825, NT2RP1000833, NT2RP1000959, NT2RP1000966, NT2RP10113, NT2RP1001185, NT2RP1001482, NT2RP1001665, NT2RP2000070, NT2RP2000147, NT2RP2000224, NT2RP2000248, NT2RP2000297, NT2RP2000310, NT2RP2000414, NT2RP2000420, NT2RP2000523, NT2RP2000809, NT2RP2000812, NT2RP2001233, NT2RP2001327, NT2RP2001378, NT2RP2001394, NT2RP2001397, NT2RP2001460, NT2RP2001520, NT2RP2001536, NT2RP2001876, NT2RP2001898, NT2RP2002025, NT2RP2002058, NT2RP2002124, NT2RP2002325, NT2RP2002503, NT2RP2002959, NT2RP2003000, NT2RP2003157, NT2RP2003164, NT2RP2003228, NT2RP2003295, NT2RP2003517, NT2RP2003564, NT2RP2003604, NT2RP2003714, NT2RP2003737, NT2RP2003952, NT2RP2004013, NT2RP2004170, NT2RP2004587, NT2RP2004732, NT2RP2004933, NT2RP2005003, NT2RP2005144, NT2RP2005239, NT2RP2005276, NT2RP2005288, NT2RP2005315, NT2RP2005325, NT2RP2005336, NT2RP2005358, NT2RP2005407, NT2RP2005436, NT2RP2005476, NT2RP2005525, NT2RP2005694, NT2RP2005719, NT2RP2006043, NT2RP2006071, NT2RP2006219, NT2RP2006312, NT2RP2006456, NT2RP3000050, NT2RP3000068, NT2RP3000085, NT2RP3000299, NT2RP3000403, NT2RP3000596, NT2RP3000739, NT2RP3000753, NT2RP3000875, NT2RP3001057, NT2RP3001081, NT2RP3001216, NT2RP3001307, NT2RP3001338, NT2RP3001427, NT2RP3001428, NT2RP3001679, NT2RP3001723, NT2RP3001855, NT2RP3001898, NT2RP3001969, NT2RP3002056, NT2RP3002062, NT2RP3002151, NT2RP3002351, NT2RP3002399, NT2RP3002953, NT2RP3002988, NT2RP3003078, NT2RP3003251, NT2RP3003282, NT2RP3003313, NT2RP3003327, NT2RP3003409, NT2RP3003672, NT2RP3003831, NT2RP3004016, NT2RP3004078, NT2RP3004209, NT2RP3004258, NT2RP3004490, NT2RP3004534, NT2RP3004569, NT2RP3004572, NT2RP4000109, NT2RP4000367, NT2RP4000376, NT2RP4000449, NT2RP4000855, NT2RP4000879, NT2RP4000925, NT2RP4001086, NT2RP4001126, NT2RP4001150, NT2RP4001213, NT2RP4001276, NT2RP4001407, NT2RP4001433, NT2RP4001483, NT2RP4001575, NT2RP4001760, NT2RP4001861, NT2RP4002078, NT2RP4002791, OVARC1000014, OVARC1000139, OVARC1000520, OVARC1000722, OVARC1000771, OVARC1000834, OVARC1001051, OVARC1001113, OVARC1001244, OVARC1001372, OVARC1001417, OVARC1001496, OVARC1001506, OVARC1001577, OVARC1001726, OVARC1001766, OVARC1001809, OVARC1002165, PLACE1000133, PLACE1000383, PLACE1000420, PLACE1000583, PLACE1000588, PLACE1001171, PLACE1001387, PLACE1001602, PLACE1002046, PLACE1002140, PLACE1002437, PLACE1002474, PLACE1002685, PLACE1002782, PLACE1002834, PLACE1002908, PLACE1003045, PLACE1003302, PLACE1003353, PLACE1003366, PLACE1003493, PLACE1003669, PLACE1003704, PLACE1003903, PLACE1003968, PLACE1004183, PLACE1004197, PLACE1004277, PLACE1004316, PLACE1004358, PLACE1004471, PLACE1004506, PLACE1004510, PLACE1004674, PLACE1004777, PLACE1004814, PLACE1005494, PLACE1006040, PLACE1006170, PLACE1006438, PLACE1006615, PLACE1007140, PLACE1007239, PLACE1007257, PLACE1007511, PLACE1007598, PLACE1008177, PLACE1008356, PLACE1008402, PLACE1008696, PLACE1009027, PLACE1009113, PLACE1009158, PLACE1009444, PLACE1009524, PLACE1010529, PLACE1010870, PLACE1010896, PLACE1011635, PLACE1011858, PLACE1011922, PLACE2000015, PLACE2000072, PLACE2000216, PLACE2000399, PLACE2000438, PLACE2000458, PLACE3000242, PLACE4000009, PLACE4000014, PLACE4000156, PLACE4000369, SKNMC1000046, SKNMC1000050, THYRO1000034, THYRO1000327, THYRO1000343, THYRO1000358, THYRO1000501, THYRO1000662, THYRO1000684, THYRO1000748, THYRO1000934, THYRO1001120, THYRO1001189, THYRO1001204, THYRO1001458, THYRO1001617, THYRO1001671, Y79AA1000346, Y79AA1000469, Y79AA1000560, Y79AA1000734, Y79AA1000782, Y79AA1001391, Y79AA1001548, Y79AA1001594, Y79AA1001711, Y79AA1001874, Y79AA1002204, Y79AA1002210, Y79AA1002258, Y79AA1002472, Y79AA1002482,

[0664] Among them, Swiss-Prot database search and GenBank or UniGene database search revealed that the following 380 clones matched the data of genes or proteins which had been registered in the database of Online Mendelian Inheritance in Man (OMIM) (http://www.ncbi.nlm.nih.gov/Omim/), which is a database of human genes and diseases. (The corresponding OMIM numbers are parenthetically indicated following the clone names.)

[0665] HEMBB1000985(147485), HEMBB1001068(603142), HEMBB1001282(182900), HEMBB1001339(300080), HEMBB1001482(603971), HEMBB1001564(603931), HEMBB1001802(125660), HEMBB1001905(190370), HEMBB1001908(601408), HEMBB1002217(603971), HEMBB1002477(604439), MAMMA1000388(604865), MAMMA1000731(602118), MAMMA1001305(602732), MAMMA1001633(600834), MAMMA1001868(190370), MAMMA1002170(603624), MAMMA1002198(600538), MAMMA1002268(603730), MAMMA1002485(603665), MAMMA1002530(603602), MAMMA1002858(601064), MAMMA1002869(602567), MAMMA1002881(602692), MAMMA1003047(603566), MAMMA1003146(603094), MAMMA1003166(604061), NT2RM1000001(601169), NT2RM1000153(600417), NT2RM1000252(604108), NT2RM1000555(191510), NT2RM1000770(300061), NT2RM1000826(191510), NT2RM1000850(182900), NT2RM1001003(604785), NT2RM1001092(603971), NT2RM1001102(604533), NT2RM2000191(602973), NT2RM2000363(151410), NT2RM2000594(602900), NT2RM2000624(601940), NT2RM2000714(179555), NT2RM2000821(600959), NT2RM2001035(604913), NT2RM2001575(109092), NT2RM2001652(604141), NT2RM2001664(603722), NT2RM2001668(602952), NT2RM2001698(604327), NT2RM2001803(603722), NT2RM2001839(603420), NT2RM4000155(187790), NT2RM4000471(603485), NT2RM4000486(168730), NT2RM4000657(602142), NT2RM4000751(602277), NT2RM4000996(603971), NT2RM4001629(601114), NT2RM4001810(155760), NT2RM4001819(176873), NT2RM4001876(179555), NT2RM4001940(603887), NT2RM4002066(300188), NT2RM4002093(600693), NT2RM4002146(602603), NT2RM4002161(254780), NT2RM4002558(604194), NT2RM4002571(602274), NT2RP1000086(602219), NT2RP1000574(601740), NT2RP1000825(602732), NT2RP1000833(602973), NT2RP1000959(180510), NT2RP1000966(164035), NT2RP1001013(194558), NT2RP1001185(243500), NT2RP1001482(600586), NT2RP1001665(114180), NT2RP2000070(600976), NT2RP2000147(603535), NT2RP2000248(603367), NT2RP2000297(602277), NT2RP2000310(239500), NT2RP2000414(601037), NT2RP2000420(600834), NT2RP2000523(600130), NT2RP2000809(603885), NT2RP2000812(160777), NT2RP2001233(603971), NT2RP2001327(191161), NT2RP2001378(158370), NT2RP2001394(300208), NT2RP2001397(602755), NT2RP2001460(190370), NT2RP2001520(603667), NT2RP2001536(600675), NT2RP2001876(601833), NT2RP2001898(147264), NT2RP2002025(601581), NT2RP2002058(604737),

[0666] NT2RP2002124(603486), NT2RP2002325(603866), NT2RP2002503(601781), NT2RP2002959(602962), NT2RP2003000(191161), NT2RP2003157(601940), NT2RP2003164(604746), NT2RP2003228(602638), NT2RP2003295(603494), NT2RP2003517(190040), NT2RP2003564(109092), NT2RP2003604(604785), NT2RP2003714(603971), NT2RP2003737(602962), NT2RP2003952(602675), NT2RP2004013(602542), NT2RP2004170(300196), NT2RP2004587(162250), NT2RP2004732(162250), NT2RP2004933(603289), NT2RP2005003(109092), NT2RP2005144(604730), NT2RP2005239(603485), NT2RP2005276(602371), NT2RP2005288(603524), NT2RP2005315(604039), NT2RP2005325(603759), NT2RP2005336(190370), NT2RP2005358(603573), NT2RP2005407(167040), NT2RP2005436(601940), NT2RP2005476(602680), NT2RP2005525(602655), NT2RP2005719(601178), NT2RP2006043(601940), NT2RP2006071(604299), NT2RP2006219(601279), NT2RP2006312(603111), NT2RP2006456(604619), NT2RP3000050(603971), NT2RP3000068(182530), NT2RP3000085(300032), NT2RP3000299(602941), NT2RP3000403(604981), NT2RP3000596(190370), NT2RP3000739(125370), NT2RP3000753(162230), NT2RP3001057(603971), NT2RP3001081(603524), NT2RP3001216(603121), NT2RP3001307(180069), NT2RP3001338(314998), NT2RP3001428(189940), NT2RP3001723(604569), NT2RP3001855(602100), NT2RP3001898(604561), NT2RP3001969(190370), NT2RP3002056(180201), NT2RP3002062(603885), NT2RP3002151(139259), NT2RP3002351(604887), NT2RP3002399(602638), NT2RP3002953(604967), NT2RP3002988(603258), NT2RP3003251(109092), NT2RP3003282(602378), NT2RP3003313(603810), NT2RP3003409(604533), NT2RP3003672(313470), NT2RP3003831(604051), NT2RP3004016(601742), NT2RP3004078(142765), NT2RP3004209(125255), NT2RP3004258(604347), NT2RP3004490(603328), NT2RP3004534(600586), NT2RP3004569(106410), NT2RP3004572(604912), NT2RP4000109(603745), NT2RP4000367(603722), NT2RP4000376(603873), NT2RP4000449(604479), NT2RP4000855(602675), NT2RP4000879(314370), NT2RP4000925(600245), NT2RP4001086(162230), NT2RP4001126(190370), NT2RP4001150(601581), NT2RP4001213(602277), NT2RP4001276(190370), NT2RP4001407(190370), NT2RP4001433(602277), NT2RP4001483(203740), NT2RP4001575(603443), NT2RP4001760(305400), NT2RP4001861(190370), NT2RP4002078(603971), NT2RP4002791(189940), OVARC1000014(603371), OVARC1000139(603486),

[0667] OVARC1000520(604126), OVARC1000722(604014), OVARC1000771(179509), OVARC1001051(600051), OVARC10113(602121), OVARC1001244(601540), OVARC1001372(603145), OVARC1001417(300182), OVARC1001496(602619), OVARC1001506(601313), OVARC1001577(603269), OVARC1001726(300103), OVARC1001766(603910), OVARC1001809(603730), PLACE1000133(602542), PLACE1000383(300171), PLACE1000420(600312), PLACE1000583(194558), PLACE1000588(600411), PLACE1001171(310400), PLACE1001387(600206), PLACE1001602(604913), PLACE1002046(151625), PLACE1002140(603748), PLACE1002437(600046), PLACE1002474(602108), PLACE1002685(604515), PLACE1002782(602095), PLACE1002834(194558), PLACE1002908(604327), PLACE1003045(173910), PLACE1003302(194558), PLACE1003353(604704), PLACE1003366(603681), PLACE1003493(601456), PLACE1003669(190370), PLACE1003704(601940), PLACE1003903(123860), PLACE1003968(602742), PLACE1004183(604701), PLACE1004197(601610), PLACE1004277(603493), PLACE1004316(604261), PLACE1004358(603272), PLACE1004471(194558), PLACE1004506(603450), PLACE1004510(604912), PLACE1004674(601057), PLACE1004777(118423), PLACE1004814(601940), PLACE1005494(603652), PLACE1006040(603061), PLACE1006170(601026), PLACE1006438(600834), PLACE1006615(603910), PLACE1007140(190370), PLACE1007239(604784), PLACE1007257(300108), PLACE1007511(148020), PLACE1007598(602277), PLACE1008177(190370), PLACE1008356(604039), PLACE1008402(603344), PLACE1008696(602141), PLACE1009027(300121), PLACE1009113(600675), PLACE1009158(604140), PLACE1009444(600286), PLACE1009524(602488), PLACE1010529(604834), PLACE1010870(603971), PLACE1010896(160776), PLACE1011635(604058), PLACE1011858(603882), PLACE1011922(160776), PLACE2000015(600051), PLACE2000072(603430), PLACE2000216(182790), PLACE2000399(313470), PLACE2000438(602273), PLACE2000458(600976), PLACE3000242(300132), PLACE4000009(160776), PLACE4000014(300032), PLACE4000156(603971), PLACE4000369(603808), SKNMC1000046(603144), SKNMC1000050(114230), THYRO1000034(190370), THYRO1000327(603243), THYRO1000343(125370), THYRO1000358(604188), THYRO1000511(109092), THYRO1000662(278750), THYRO1000684(603885), THYRO1000748(300023), THYRO1000934(179035), THYRO1001120(602582), THYRO1001189(603971), THYRO1001204(603169),

[0668] THYRO1001458(160776), THYRO1001617(602744), THYRO1001671(603281), Y79AA1000346(604355), Y79AA1000469(602434), Y79AA1000560(601026), Y79AA1000734(603867), Y79AA1000782(600417), Y79AA1001391(142959), Y79AA1001548(600286), Y79AA1001594(600936), Y79AA1001711(600063), Y79AA1001874(600315), Y79AA1002204(605033), Y79AA1002210(191161), Y79AA1002472(603971), Y79AA1002482(603971),

[0669] The following 425 clones presumably belong to enzymes and/or metabolism-associated proteins.

[0670] HEMBA1000012, HEMBA1000129, HEMBA1000141, HEMBA1000150, HEMBA1000542, HEMBA1000852, HEMBA1001019, HEMBA1001257, HEMBA1001526, HEMBA1001620, HEMBA1001866, HEMBA1001896, HEMBA1002212, HEMBA1002513, HEMBA1002746, HEMBA1002973, HEMBA1003046, HEMBA1003136, HEMBA1003179, HEMBA1003250, HEMBA1003291, HEMBA1003408, HEMBA1003538, HEMBA1003679, HEMBA1003680, HEMBA1004199, HEMBA1004227, HEMBA1004408, HEMBA1004509, HEMBA1004734, HEMBA1004768, HEMBA1005394, HEMBA1005513, HEMBA1005737, HEMBA1005815, HEMBA1006031, HEMBA1006272, HEMBA1006278, HEMBA1006291, HEMBA1006309, HEMBA1006347, HEMBA1006485, HEMBA1006521, HEMBA1006624, HEMBA1006885, HEMBA1006976, HEMBA1007121, HEMBA1007224, HEMBA1007243, HEMBA1007300, HEMBB1000083, HEMBB1000217, HEMBB1000915, HEMBB1000947, HEMBB1001137, HEMBB1001346, HEMBB1001429, HEMBB1001443, HEMBB1001915, HEMBB1001950, HEMBB1002042, MAMMA1000020, MAMMA1000085, MAMMA1000672, MAMMA1000713, MAMMA1000841, MAMMA1000897, MAMMA1001008, MAMMA1001038, MAMMA1001059, MAMMA1001476, MAMMA1001501, MAMMA1002268, MAMMA1002470, MAMMA1002530, MAMMA1002573, MAMMA1002619, MAMMA1002655, MAMMA1002671, MAMMA1003013, MAMMA1003035, NT2RM1000039, NT2RM1000132, NT2RM1000153, NT2RM1000256, NT2RM1000280, NT2RM1000377, NT2RM1000553, NT2RM1000648, NT2RM1000702, NT2RM1000894, NT2RM1001072, NT2RM1100115, NT2RM2000013, NT2RM2000092, NT2RM2000322, NT2RM2000368, NT2RM2000371, NT2RM2000469, NT2RM2000504, NT2RM2000577, NT2RM2000594, NT2RM2000951, NT2RM2001238, NT2RM2001547, NT2RM2001632, NT2RM2001664, NT2RM2001698, NT2RM2001700, NT2RM2001730, NT2RM2001782, NT2RM2001803, NT2RM2001886, NT2RM2001935, NT2RM2001997, NT2RM2002030, NT2RM2002128, NT2RM4000024, NT2RM4000155, NT2RM4000344, NT2RM4000471, NT2RM4000616, NT2RM4000657, NT2RM4000712, NT2RM4000820, NT2RM4001313, NT2RM4001316, NT2RM4001444, NT2RM4001592, NT2RM4001758, NT2RM4001819, NT2RM4001880, NT2RM4002062, NT2RM4002063, NT2RM4002189, NT2RM4002213, NT2RM4002251, NT2RM4002409, NT2RM4002532, NT2RM4002623, NT2RP1000376, NT2RP1000443, NT2RP1000522, NT2RP1000834, NT2RP1000947, NT2RP1001079, NT2RP1001185, NT2RP1001253, NT2RP1001361, NT2RP1001543, NT2RP2000056, NT2RP2000114, NT2RP2000183, NT2RP2000248, NT2RP2000329, NT2RP2000422, NT2RP2000448, NT2RP2000668, NT2RP2000710, NT2RP2000816, NT2RP2001070, NT2RP2001392, NT2RP2001601, NT2RP2001663, NT2RP2001740, NT2RP2001748, NT2RP2001898, NT2RP2002124, NT2RP2002256, NT2RP2002609, NT2RP2002618, NT2RP2002959, NT2RP2002993, NT2RP2003230, NT2RP2003286, NT2RP2003401, NT2RP2003506, NT2RP2003543, NT2RP2003643, NT2RP2003702, NT2RP2003704, NT2RP2003713, NT2RP2003737, NT2RP2003840, NT2RP2003912, NT2RP2003952, NT2RP2004098, NT2RP2004239, NT2RP2004245, NT2RP2004768, NT2RP2004791, NT2RP2004799, NT2RP2004933, NT2RP2005038, NT2RP2005139, NT2RP2005162, NT2RP2005204, NT2RP2005239, NT2RP2005276, NT2RP2005344, NT2RP2005360, NT2RP2005457, NT2RP2005498, NT2RP2005549, NT2RP2005557, NT2RP2005605, NT2RP2005635, NT2RP2005723, NT2RP2005773, NT2RP2005775, NT2RP2005776, NT2RP2005784, NT2RP2005835, NT2RP2005942, NT2RP2006534, NT2RP2006571, NT2RP2006573, NT2RP3000031, NT2RP3000085, NT2RP3000207, NT2RP3000359, NT2RP3000578, NT2RP3000742, NT2RP3000845, NT2RP3000875, NT2RP3000917, NT2RP3001055, NT2RP3001221, NT2RP3001495, NT2RP3001898, NT2RP3001938, NT2RP3002303, NT2RP3002351, NT2RP3002501, NT2RP3002602, NT2RP3002628, NT2RP3002663, NT2RP3003301, NT2RP3003385, NT2RP3003490, NT2RP3003659, NT2RP3003825, NT2RP3003831, NT2RP3003846, NT2RP3003914, NT2RP3004148, NT2RP3004209, NT2RP3004378, NT2RP3004669, NT2RP3004670, NT2RP4000259, NT2RP4000312, NT2RP4000367, NT2RP4000417, NT2RP4000457, NT2RP4000657, NT2RP4000817, NT2RP4000855, NT2RP4000879, NT2RP4000927, NT2RP4000973, NT2RP4000997, NT2RP4001041, NT2RP4001079, NT2RP4001095, NT2RP4001143, NT2RP4001219, NT2RP4001375, NT2RP4001389, NT2RP4001483, NT2RP4001555, NT2RP4001592, NT2RP4001644, NT2RP4001730, NT2RP4001946, NT2RP4002408, NT2RP5003500, NT2RP5003522, OVARC1000013, OVARC1000060, OVARC1000139, OVARC1000288, OVARC1000309, OVARC1000473, OVARC1000556, OVARC1000682, OVARC1000722, OVARC1000751, OVARC1000885, OVARC1000915, OVARC1001107, OVARC1001713, OVARC1001762, OVARC1001809, OVARC1001942, OVARC1002156, OVARC1002165, PLACE1000007, PLACE1000142, PLACE1000185, PLACE1000213, PLACE1000383, PLACE1000420, PLACE1000547, PLACE1000653, PLACE1000755, PLACE1001054, PLACE1001062, PLACE1001672, PLACE1001692, PLACE1001748, PLACE1001781, PLACE1001817, PLACE1001869, PLACE1001989, PLACE1002073, PLACE1002598, PLACE1002908, PLACE1002991, PLACE1003174, PLACE1003176, PLACE1003709, PLACE1003885, PLACE1003888, PLACE1003903, PLACE1003915, PLACE1004270, PLACE1004428, PLACE1004437, PLACE1004751, PLACE1004804, PLACE1004918, PLACE1005243, PLACE1005305, PLACE1005373, PLACE1005656, PLACE1005763, PLACE1005804, PLACE1005953, PLACE1005955, PLACE1006011, PLACE1006469, PLACE1006534, PLACE1006626, PLACE1006731, PLACE1006819, PLACE1006829, PLACE1006878, PLACE1007226, PLACE1007416, PLACE1007649, PLACE1007706, PLACE1007729, PLACE1007954, PLACE1007958, PLACE1008111, PLACE1008275, PLACE1008330, PLACE1008643, PLACE1009094, PLACE1009130, PLACE1009444, PLACE1009763, PLACE1009861, PLACE1009992, PLACE1009997, PLACE1010096, PLACE1010362, PLACE1010481, PLACE1010662, PLACE1011046, PLACE1011219, PLACE1011229, PLACE1011332, PLACE1011635, PLACE1011923, PLACE2000021, PLACE2000034, PLACE2000398, PLACE2000404, PLACE2000438, PLACE3000009, PLACE3000020, PLACE3000059, PLACE3000147, PLACE3000339, PLACE3000350, PLACE4000063, PLACE4000100, PLACE4000401, PLACE4000548, PLACE4000654, SKNMC1000050, THYRO1000072, THYRO1000197, THYRO1000288, THYRO1000605, THYRO1000662, THYRO1000756, THYRO1000852, THYRO1000926, THYRO1000934, THYRO1000951, THYRO1000983, THYRO1001003, THYRO1001287, THYRO1001374, THYRO1001406, THYRO1001617, THYRO1001671, THYRO1001738, Y79AA1000782, Y79AA1001048, Y79AA1001233, Y79AA1001394, Y79AA1001493, Y79AA1001548, Y79AA1001581, Y79AA1001603, Y79AA1001827, Y79AA1002027, Y79AA1002209, Y79AA1002211, Y79AA1002361, Y79AA1002416,

[0671] The following 217 clones presumably belong to a group of cDNAs encoding ATP- and/or GTP-binding proteins.

[0672] HEMBA1000012, HEMBA1000129, HEMBA1000185, HEMBA1000491, HEMBA1000531, HEMBA1001019, HEMBA1001174, HEMBA1001387, HEMBA1001595, HEMBA1001723, HEMBA1001913, HEMBA1002161, HEMBA1002212, HEMBA1002876, HEMBA1002997, HEMBA1003250, HEMBA1003291, HEMBA1003369, HEMBA1003555, HEMBA1003560, HEMBA1004131, HEMBA1004199, HEMBA1004202, HEMBA1004354, HEMBA1004697, HEMBA1005047, HEMBA1005595, HEMBA1007018, HEMBA1007151, HEMBB1000083, HEMBB1000226, HEMBB1000264, HEMBB1000632, HEMBB1000725, HEMBB1001294, HEMBB1002193, MAMMA1000085, MAMMA1000612, MAMMA1000731, MAMMA1000738, MAMMA1001038, MAMMA1001735, MAMMA1001768, MAMMA1003127, NT2RM1000187, NT2RM1000388, NT2RM1000702, NT2RM1000772, NT2RM1000924, NT2RM2000469, NT2RM2000577, NT2RM2000740, NT2RM2001100, NT2RM2001201, NT2RM2001345, NT2RM2001823, NT2RM2002128, NT2RM4000155, NT2RM4000191, NT2RM4000356, NT2RM4000496, NT2RM4000611, NT2RM4000733, NT2RM4000820, NT2RM4001084, NT2RM4001178, NT2RM4001344, NT2RM4001444, NT2RM4001592, NT2RM4001714, NT2RM4001758, NT2RM4001880, NT2RM4002062, NT2RM4002174, NT2RM4002205, NT2RM4002527, NT2RM4002594, NT2RM4002623, NT2RP1000470, NT2RP1000478, NT2RP1000915, NT2RP1000958, NT2RP1001080, NT2RP1001410, NT2RP1001569, NT2RP2000126, NT2RP2000258, NT2RP2000329, NT2RP2000660, NT2RP2000668, NT2RP2000710, NT2RP2000812, NT2RP2000880, NT2RP2001245, NT2RP2001392, NT2RP2002606, NT2RP2003277, NT2RP2003912, NT2RP2004538, NT2RP2004568,

[0673] NT2RP2004689, NT2RP2004768, NT2RP2004791, NT2RP2004920, NT2RP2005344, NT2RP2005393, NT2RP2005763, NT2RP2006534, NT2RP3000046, NT2RP3000252, NT2RP3000350, NT2RP3000359, NT2RP3000366, NT2RP3000397, NT2RP3000759, NT2RP3000845, NT2RP3000875, NT2RP3001150, NT2RP3001427, NT2RP3001453, NT2RP3001529, NT2RP3001730, NT2RP3001799, NT2RP3001857, NT2RP3001938, NT2RP3002007, NT2RP3002151, NT2RP3002330, NT2RP3002399, NT2RP3002671, NT2RP3003301, NT2RP3003353, NT2RP3003589, NT2RP3003809, NT2RP3003876, NT2RP3004189, NT2RP3004428, NT2RP3004578, NT2RP4000290, NT2RP4000481, NT2RP4000518, NT2RP4000781, NT2RP4000839, NT2RP4000929, NT2RP4001041, NT2RP4001079, NT2RP4001375, NT2RP4001414, NT2RP4001592, NT2RP4001634, NT2RP4001644, NT2RP4001656, NT2RP4001896, NT2RP4002047, NT2RP4002058, NT2RP4002408, NT2RP5003477, OVARC1000013, OVARC1000304, OVARC1000556, OVARC1000771, OVARC1000800, OVARC1001068, OVARC1002138, PLACE1000040, PLACE1000588, PLACE1001104, PLACE1001739, PLACE1002433, PLACE1002437, PLACE1002714, PLACE1003394, PLACE1003521, PLACE1003915, PLACE1004902, PLACE1005243, PLACE1005305, PLACE1005549, PLACE1005739, PLACE1005921, PLACE1006119, PLACE1006196, PLACE1006552, PLACE1006956, PLACE1007409, PLACE1007697, PLACE1007946, PLACE1008244, PLACE1009404, PLACE1009476, PLACE1009596, PLACE1009908, PLACE1010134, PLACE1010720, PLACE1010896, PLACE1011109, PLACE1011114, PLACE1011310, PLACE1011922, PLACE2000014, PLACE2000039, PLACE2000274, PLACE2000404, PLACE2000427, PLACE3000350, PLACE4000009, PLACE4000014, PLACE4000326, SKNMC1000013, THYRO1000072, THYRO1001458, Y79AA1000833, Y79AA1000962, Y79AA1001394, Y79AA1001875, Y79AA1001963, Y79AA1002209,

[0674] The following 320 clones presumably belong to nuclear proteins.

[0675] HEMBA1000005, HEMBA1000158, HEMBA1000216, HEMBA1000561, HEMBA1000591, HEMBA1001088, HEMBA1001137, HEMBA1001405, HEMBA1001510, HEMBA1001579, HEMBA1001809, HEMBA1001819, HEMBA1001824, HEMBA1001847, HEMBA1001869, HEMBA1002177, HEMBA1002241, HEMBA1002495, HEMBA1002569, HEMBA1002935, HEMBA1002951, HEMBA1002999, HEMBA1003408, HEMBA1003545, HEMBA1003662, HEMBA1003684, HEMBA1003690, HEMBA1003760, HEMBA1004203, HEMBA1004321, HEMBA1004353, HEMBA1004479, HEMBA1004973, HEMBA1005219, HEMBA1005359, HEMBA1005558, HEMBA1005931, HEMBA1006278, HEMBA1006283, HEMBA1006359, HEMBA1006485, HEMBA1007087, HEMBB1000226, HEMBB1000789, HEMBB1001011, HEMBB1001056, HEMBB1001242, HEMBB1001482, HEMBB1001915, HEMBB1002134, HEMBB1002217, MAMMA1000183, MAMMA1000731, MAMMA1001105, MAMMA1001222, MAMMA1001260, MAMMA1001633, MAMMA1001743, MAMMA1001837, MAMMA1002617, MAMMA1002869, MAMMA1002937, MAMMA1003011, NT2RM1000086, NT2RM1000187, NT2RM1000666, NT2RM1000885, NT2RM1000894, NT2RM1001059, NT2RM1001092, NT2RM2000013, NT2RM2000588, NT2RM2000624, NT2RM2000735, NT2RM2000740, NT2RM2001105, NT2RM2001635, NT2RM2001670, NT2RM2001771, NT2RM2001823, NT2RM2001936, NT2RM2001989, NT2RM2002004, NT2RM2002088, NT2RM2002091, NT2RM4000024, NT2RM4000046, NT2RM4000104, NT2RM4000202, NT2RM4000215, NT2RM4000290, NT2RM4000531, NT2RM4000751, NT2RM4000996, NT2RM4001092, NT2RM4001140, NT2RM4001200, NT2RM4001483, NT2RM4001566, NT2RM4001592,

[0676] NT2RM4001597, NT2RM4001783, NT2RM4001823, NT2RM4001828, NT2RM4001858, NT2RM4001979, NT2RP1000035, NT2RP1000111, NT2RP1000493, NT2RP1000574, NT2RP1000630, NT2RP1000902, NT2RP1000915, NT2RP1000958, NT2RP1000966, NT2RP1001013, NT2RP1001177, NT2RP2000008, NT2RP2000076, NT2RP2000126, NT2RP2000153, NT2RP2000161, NT2RP2000248, NT2RP2000258, NT2RP2000297, NT2RP2000420, NT2RP2000931, NT2RP2001233, NT2RP2001420, NT2RP2001756, NT2RP2001869, NT2RP2002079, NT2RP2002270, NT2RP2002503, NT2RP2002591, NT2RP2002880, NT2RP2002939, NT2RP2002993, NT2RP2003137, NT2RP2003157, NT2RP2003277, NT2RP2003286, NT2RP2003308, NT2RP2003347, NT2RP2003714, NT2RP2003912, NT2RP2004013, NT2RP2004187, NT2RP2004689, NT2RP2004920, NT2RP2005393, NT2RP2005436, NT2RP2005496, NT2RP2005539, NT2RP2005701, NT2RP2005767, NT2RP2005776, NT2RP2005933, NT2RP2005942, NT2RP2006043, NT2RP2006436, NT2RP3000031, NT2RP3000050, NT2RP3000397, NT2RP3000512, NT2RP3000527, NT2RP3000590, NT2RP3000603, NT2RP3000632, NT2RP3000917, NT2RP3001057, NT2RP3001107, NT2RP3001120, NT2RP3001253, NT2RP3001338, NT2RP3001384, NT2RP3001398, NT2RP3001427, NT2RP3001428, NT2RP3001472, NT2RP3001646, NT2RP3001671, NT2RP3001792, NT2RP3001855, NT2RP3002056, NT2RP3002165, NT2RP3002399, NT2RP3002876, NT2RP3003193, NT2RP3003212, NT2RP3003555, NT2RP3004016, NT2RP3004206, NT2RP3004424, NT2RP3004428, NT2RP3004566, NT2RP3004617, NT2RP4000078, NT2RP4000111, NT2RP4000210, NT2RP4000398, NT2RP4000481, NT2RP4000518, NT2RP4000997, NT2RP4001148, NT2RP4001206, NT2RP4001213, NT2RP4001433, NT2RP4001568, NT2RP4001638, NT2RP4001696, NT2RP4001753, NT2RP4001938, NT2RP4002058, NT2RP4002078, NT2RP4002081, NT2RP4002791, OVARC1000006, OVARC1000087, OVARC1000091, OVARC1000241, OVARC1000326, OVARC1000556, OVARC1000846, OVARC1001038, OVARC1001180, OVARC1001232, OVARC1001271, OVARC1001306, OVARC1001436, OVARC1002112, PLACE1000133, PLACE1000184, PLACE1000406, PLACE1000583, PLACE1000596, PLACE1000979, PLACE1001118, PLACE1001383, PLACE1001632, PLACE1002171, PLACE1002433, PLACE1002438, PLACE1002532, PLACE1002775, PLACE1002816, PLACE1002834, PLACE1003100, PLACE1003190, PLACE1003302, PLACE1003519, PLACE1003521, PLACE1003605, PLACE1003704, PLACE1003738, PLACE1003885, PLACE1003923, PLACE1004302, PLACE1004471, PLACE1004564, PLACE1004814, PLACE1004902, PLACE1005287, PLACE1005876, PLACE1005966, PLACE1006167, PLACE1006438, PLACE1006482, PLACE1006829, PLACE1006878, PLACE1006917, PLACE1007014, PLACE1007547, PLACE1007598, PLACE1007688, PLACE1007969, PLACE1008044, PLACE1008132, PLACE1008603, PLACE1009099, PLACE1009130, PLACE1009308, PLACE1009398, PLACE1010134, PLACE1010194, PLACE1010702, PLACE1010720, PLACE1010870, PLACE1011056, PLACE1011433, PLACE1011664, PLACE2000014, PLACE2000427, PLACE3000009, PLACE3000169, PLACE4000014, PLACE4000156, PLACE4000192, PLACE4000261, PLACE4000326, PLACE4000489, SKNMC1000011, THYRO1000085, THYRO1000242, THYRO1000585, THYRO1001100, THYRO1001189, THYRO1001809, Y79AA1000037, Y79AA1000214, Y79AA1000231, Y79AA1000589, Y79AA1000752, Y79AA1001391, Y79AA1001613, Y79AA1001705, Y79AA1001963, Y79AA1002431, Y79AA1002472, Y79AA1002482

[0677] The following 292 clones presumably belong to DNA- and/or RNA-binding proteins.

[0678] HEMBA1000158, HEMBA1000216, HEMBA1000561, HEMBA1000591, HEMBA1000851, HEMBA1001088, HEMBA1001137, HEMBA1001405, HEMBA1001510, HEMBA1001804, HEMBA1001809, HEMBA1001819, HEMBA1001847, HEMBA1001869, HEMBA1002177, HEMBA1002935, HEMBA1003408, HEMBA1003545, HEMBA1003568, HEMBA1003591, HEMBA1003662, HEMBA1003684, HEMBA1003760, HEMBA1003783, HEMBA1003805, HEMBA1003953, HEMBA1004321, HEMBA1004354, HEMBA1004389, HEMBA1004479, HEMBA1004669, HEMBA1004847, HEMBA1004973, HEMBA1005202, HEMBA1005359, HEMBA1005931, HEMBA1006248, HEMBA1006278, HEMBA1006283, HEMBA1006359, HEMBA1006652, HEMBA1007087, HEMBA1007194, HEMBB1000264, HEMBB1000789, HEMBB1001011, HEMBB1001482, HEMBB1001736, HEMBB1001749, HEMBB1001839, HEMBB1002217, MAMMA1000183, MAMMA1000284, MAMMA1000731, MAMMA1001105, MAMMA1001222, MAMMA1001260, MAMMA1001743, MAMMA1001837, MAMMA1002385, MAMMA1002617, MAMMA1002869, MAMMA1002937, MAMMA1003011, NT2RM1000086, NT2RM1000539, NT2RM1000555, NT2RM1000666, NT2RM1000691, NT2RM1000826, NT2RM1000885, NT2RM1001059, NT2RM1001092, NT2RM2000371, NT2RM2000624, NT2RM2000735, NT2RM2001105, NT2RM2001424, NT2RM2001575, NT2RM2001605, NT2RM2001670, NT2RM2001771, NT2RM2001823, NT2RM2001989, NT2RM2002004, NT2RM2002014, NT2RM2002088, NT2RM2002091, NT2RM4000046, NT2RM4000104, NT2RM4000167, NT2RM4000191, NT2RM4000202, NT2RM4000531, NT2RM4000595, NT2RM4000733, NT2RM4000751, NT2RM4000996, NT2RM4001092, NT2RM4001140,

[0679] NT2RM4001178, NT2RM4001200, NT2RM4001483, NT2RM4001592, NT2RM4001783, NT2RM4001823, NT2RM4001828, NT2RM4001858, NT2RM4001880, NT2RM4001979, NT2RM4002093, NT2RM4002109, NT2RP1000470, NT2RP1000493, NT2RP1000574, NT2RP1000902, NT2RP1000966, NT2RP1001013, NT2RP1001073, NT2RP1001080, NT2RP2000008, NT2RP2000153, NT2RP2000258, NT2RP2000297, NT2RP2001127, NT2RP2001174, NT2RP2001233, NT2RP2001511, NT2RP2001756, NT2RP2001869, NT2RP2002079, NT2RP2002099, NT2RP2002503, NT2RP2002591, NT2RP2002939, NT2RP2003157, NT2RP2003329, NT2RP2003347, NT2RP2003480, NT2RP2003522, NT2RP2003564, NT2RP2003714, NT2RP2004187, NT2RP2004568, NT2RP2004920, NT2RP2005003, NT2RP2005139, NT2RP2005168, NT2RP2005436, NT2RP2005496, NT2RP2005701, NT2RP2005763, NT2RP2005776, NT2RP2005942, NT2RP2006043, NT2RP2006436, NT2RP2006464, NT2RP3000050, NT2RP3000512, NT2RP3000527, NT2RP3000562, NT2RP3000590, NT2RP3000603, NT2RP3000624, NT2RP3000632, NT2RP3000994, NT2RP3001057, NT2RP3001107, NT2RP3001120, NT2RP3001150, NT2RP3001155, NT2RP3001338, NT2RP3001398, NT2RP3001472, NT2RP3001672, NT2RP3001688, NT2RP3001724, NT2RP3001792, NT2RP3001855, NT2RP3002165, NT2RP3002399, NT2RP3002876, NT2RP3003138, NT2RP3003193, NT2RP3003251, NT2RP3003327, NT2RP3003555, NT2RP3004013, NT2RP3004078, NT2RP3004428, NT2RP3004490, NT2RP3004566, NT2RP3004594, NT2RP3004617, NT2RP3004618, NT2RP4000111, NT2RP4000398, NT2RP4000455, NT2RP4000518, NT2RP4000648, NT2RP4000865, NT2RP4000929, NT2RP4001080, NT2RP4001095, NT2RP4001213, NT2RP4001433, NT2RP4001568, NT2RP4001696, NT2RP4001753, NT2RP4001838, NT2RP4001938, NT2RP4002078, OVARC1000006, OVARC1000087, OVARC1000241, OVARC1000746, OVARC1000846, OVARC1001232, OVARC1001271, OVARC1001306, OVARC1001987, OVARC1002112, PLACE1000406, PLACE1000583, PLACE1000979, PLACE1001118, PLACE1001632, PLACE1001739, PLACE1002438, PLACE1002532, PLACE1002775, PLACE1002834, PLACE1003302, PLACE1003519, PLACE1003605, PLACE1003704, PLACE1003738, PLACE1003885, PLACE1004471, PLACE1004564, PLACE1004814, PLACE1005584, PLACE1005876, PLACE1005951, PLACE1006196, PLACE1006482, PLACE1006488, PLACE1006531, PLACE1006917, PLACE1007346, PLACE1007547, PLACE1007598, PLACE1007688, PLACE1007969, PLACE1008132, PLACE1009099, PLACE1009246, PLACE1009398, PLACE1009476, PLACE1009622, PLACE1010053, PLACE1010194, PLACE1010702, PLACE1010870, PLACE1011056, PLACE1010114, PLACE1011433, PLACE2000427, PLACE3000009, PLACE3000169, PLACE4000014, PLACE4000156, PLACE4000192, PLACE4000261, PLACE4000489, SKNMC1000091, THYRO1000085, THYRO1000242, THYRO1000501, THYRO1001100, THYRO1001189, THYRO1001809, Y79AA1000037, Y79AA1000349, Y79AA1000752, Y79AA1001211, Y79AA1001312, Y79AA1001391, Y79AA1001613, Y79AA1002103, Y79AA1002472, Y79AA1002482,

[0680] The following 66 clones presumably belong to the category of RNA synthesis-associated proteins.

[0681] HEMBA1000591, HEMBA1001579, HEMBA1003179, HEMBA1003591, HEMBA1006278, HEMBB1000226, NT2RM1000187, NT2RM1000852, NT2RM2000624, NT2RM2001989, NT2RM2002100, NT2RM4000191, NT2RM4001178, NT2RM4002093, NT2RP1000035, NT2RP1000272, NT2RP1000470, NT2RP1001080, NT2RP2000153, NT2RP2002928, NT2RP2003157, NT2RP2004568, NT2RP2005126, NT2RP2005436, NT2RP2005539, NT2RP2005605, NT2RP2005776, NT2RP2005942, NT2RP2006043, NT2RP2006238, NT2RP3000361, NT2RP3000397, NT2RP3001671, NT2RP3004504, NT2RP4000078, NT2RP4000111, NT2RP4000481, NT2RP4000518, NT2RP4000614, NT2RP4000929, NT2RP4001696, NT2RP4002058, OVARC1001232, OVARC1001577, PLACE1000406, PLACE1000596, PLACE1000755, PLACE1001739, PLACE1003704, PLACE1003885, PLACE1004564, PLACE1004814, PLACE1004902, PLACE1005373, PLACE1005646, PLACE1005876, PLACE1006196, PLACE1006626, PLACE1006878, PLACE1006917, PLACE1009476, PLACE1009925, PLACE1010194, PLACE1011114, THYRO1000121, Y79AA1001963,

[0682] The following 183 clones presumably belong to protein synthesis-associated and/or protein transport-associated proteins.

[0683] HEMBA1000012, HEMBA1000141, HEMBA1000592, HEMBA1003617, HEMBA1003773, HEMBA1004202, HEMBA1004276, HEMBA1004734, HEMBA1004847, HEMBA1004929, HEMBA1004930, HEMBA1005047, HEMBA1005202, HEMBA1006031, HEMBA1006272, HEMBA1006474, HEMBA1006652, HEMBA1006914, HEMBA1006973, HEMBA1007224, HEMBB1000915, HEMBB1001112, HEMBB1001137, HEMBB1001736, HEMBB1001831, HEMBB1001915, MAMMA1000085, MAMMA1000734, MAMMA1001008, MAMMA1002170, MAMMA1002219, MAMMA1002236, MAMMA1002619, NT2RM1000661, NT2RM1000833, NT2RM2000092, NT2RM2000504, NT2RM2000577, NT2RM2000821, NT2RM2001201, NT2RM2001592, NT2RM2001613, NT2RM2001648, NT2RM2001730, NT2RM2001760, NT2RM2002055, NT2RM4000155, NT2RM4000169, NT2RM4000344, NT2RM4000356, NT2RM4000421, NT2RM4000712, NT2RM4001054, NT2RM4001203, NT2RM4001382, NT2RM4001444, NT2RM4002062, NT2RM4002205, NT2RM4002623, NT2RP1000326, NT2RP1000522, NT2RP1000547, NT2RP1000746, NT2RP1000947, NT2RP1001569, NT2RP2000147, NT2RP2000710, NT2RP2000880, NT2RP2000943, NT2RP2001290, NT2RP2001392, NT2RP2001601, NT2RP2001613, NT2RP2001660, NT2RP2001740, NT2RP2002124, NT2RP2002606, NT2RP2002862, NT2RP2002959, NT2RP2002980, NT2RP2003137, NT2RP2003158, NT2RP2003391, NT2RP2003394, NT2RP2003401, NT2RP2003433, NT2RP2003704, NT2RP2003713, NT2RP2003737, NT2RP2003760, NT2RP2003981, NT2RP2004366, NT2RP2004389, NT2RP2004791, NT2RP2005012, NT2RP2005116, NT2RP2005360, NT2RP2005763, NT2RP2005784, NT2RP3000366,

[0684] NT2RP3000759, NT2RP3000968, NT2RP3001113, NT2RP3001690, NT2RP3002045, NT2RP3002151, NT2RP3002529, NT2RP3002671, NT2RP3003301, NT2RP3003846, NT2RP3003876, NT2RP3004209, NT2RP4000370, NT2RP4000457, NT2RP4000879, NT2RP4000927, NT2RP4001041, NT2RP4001117, NT2RP4001313, NT2RP4001315, NT2RP4001574, NT2RP4001592, OVARC1000013, OVARC1000071, OVARC1000085, OVARC1000465, OVARC1000564, OVARC1000771, OVARC1000862, OVARC1001171, OVARC1001180, OVARC1001342, PLACE1000007, PLACE1000061, PLACE1000081, PLACE1000492, PLACE1000863, PLACE1001092, PLACE1001748, PLACE1002090, PLACE1003174, PLACE1003915, PLACE1004104, PLACE1004270, PLACE1004743, PLACE1005557, PLACE1005813, PLACE1006170, PLACE1006488, PLACE1006829, PLACE1007706, PLACE1007729, PLACE1008273, PLACE1008402, PLACE1008790, PLACE1008813, PLACE1009094, PLACE1009130, PLACE1009477, PLACE1009721, PLACE1009845, PLACE1010074, PLACE1010547, PLACE1011109, PLACE1011229, PLACE1011477, PLACE1012031, PLACE2000404, PLACE3000059, PLACE3000121, PLACE4000269, PLACE4000654, SKNMC1000011, THYRO1000983, THYRO1001003, THYRO1001313, Y79AA1000560, Y79AA1000784, Y79AA1000968, Y79AA1001493, Y79AA1001875, Y79AA1002027, Y79AA1002209,

[0685] The following 130 clones presumably belong to cytoskeletal-associated proteins.

[0686] HEMBA1000156, HEMBA1000168, HEMBA1000411, HEMBA1000588, HEMBA1001043, HEMBA1001651, HEMBA1001661, HEMBA1002102, HEMBA1002161, HEMBA1002939, HEMBA1003235, HEMBA1003581, HEMBA1004499, HEMBA1004534, HEMBA1004697, HEMBA1004929, HEMBA1004972, HEMBA1005582, HEMBA1005595, HEMBA1006344, HEMBA1006737, HEMBB1001175, HEMBB1001282, HEMBB1001562, HEMBB1001802, MAMMA1000824, MAMMA1001041, MAMMA1001576, MAMMA1001679, MAMMA1001735, MAMMA1002297, MAMMA1002351, MAMMA1002622, MAMMA1002637, MAMMA1003127, NT2RM1000850, NT2RM1000898, NT2RM2000030, NT2RM2000260, NT2RM2000691, NT2RM2001324, NT2RM4000169, NT2RM4000229, NT2RM4000515, NT2RM4001217, NT2RP1000202, NT2RP1000348, NT2RP1000460, NT2RP1000478, NT2RP1001033, NT2RP1001294, NT2RP1001302, NT2RP2000070, NT2RP2000812, NT2RP2000814, NT2RP2001168, NT2RP2001245, NT2RP2001634, NT2RP2001900, NT2RP2003307, NT2RP2003394, NT2RP2004041, NT2RP2004242, NT2RP2004538, NT2RP2004587, NT2RP2004681, NT2RP2004732, NT2RP2004978, NT2RP2005491, NT2RP2005531, NT2RP2005712, NT2RP2006275, NT2RP3000753, NT2RP3001113, NT2RP3001216, NT2RP3001239, NT2RP3001272, NT2RP3001554, NT2RP3001690, NT2RP3001799, NT2RP3002688, NT2RP3003061, NT2RP3003185, NT2RP3003230, NT2RP3004569, NT2RP3004578, NT2RP4001004, NT2RP4001086, NT2RP4001256, NT2RP4001567, NT2RP4001927, OVARC1000001, OVARC1000106, OVARC1000437, OVARC1000520, OVARC1000679, OVARC1001731, OVARC1002050, PLACE1001104, PLACE1002571,

[0687] PLACE1002591, PLACE1002655, PLACE1002714, PLACE1003625, PLACE1005287, PLACE1006552, PLACE1007946, PLACE1008426, PLACE1010148, PLACE1010547, PLACE1010743, PLACE1010896, PLACE1010960, PLACE1011310, PLACE1011922, PLACE2000216, PLACE2000274, PLACE2000371, PLACE2000458, PLACE3000145, PLACE3000416, PLACE4000009, THYRO1000132, THYRO1001405, THYRO1001458, Y79AA1000368, Y79AA1000794, Y79AA1000833, Y79AA1000962, Y79AA1002208,

[0688] The following 54 clones presumably belong to cell division-associated and/or cell proliferation-associated proteins.

[0689] HEMBA1001019, HEMBA1001595, HEMBA1002363, HEMBA1002997, HEMBA1003136, HEMBA1003369, HEMBA1004131, HEMBA1004354, HEMBA1005621, HEMBB1000037, HEMBB1000264, MAMMA1001768, MAMMA1002769, NT2RM1000354, NT2RM1000430, NT2RM1000874, NT2RM2001256, NT2RM2001743, NT2RM2001896, NT2RM2002145, NT2RM4000215, NT2RM4001714, NT2RP1000163, NT2RP1000333, NT2RP1000439, NT2RP2000346, NT2RP2001397, NT2RP2002595, NT2RP2003177, NT2RP2003596, NT2RP2003912, NT2RP2004396, NT2RP2005037, NT2RP2005520, NT2RP2005669, NT2RP2005835, NT2RP3001730, NT2RP3002081, NT2RP4000210, NT2RP4000415, NT2RP4001414, NT2RP4001634, OVARC1000013, OVARC1000937, PLACE1001383, PLACE1002433, PLACE1004316, PLACE1005287, PLACE1008808, PLACE1010720, PLACE1010833, Y79AA1000748, Y79AA1001236, Y79AA1001394,

[0690] The following 36 clones presumably belong to the category of embryogenesis- and/or development-associated proteins.

[0691] HEMBA1000518, HEMBA1001847, HEMBA1001869, HEMBA1003545, HEMBA1004973, HEMBB1002442, MAMMA1001837, NT2RM2001670, NT2RM4000046, NT2RM4000531, NT2RM4001140, NT2RM4001858, NT2RP2002078, NT2RP2004187, NT2RP2006436, NT2RP3000603, NT2RP3000994, NT2RP3001580, NT2RP3001708, NT2RP3003071, NT2RP3004472, NT2RP3004617, NT2RP4000246, NT2RP4001567, OVARC1000304, OVARC1000746, PLACE1000793, PLACE1002532, PLACE1003258, PLACE1003625, PLACE1004460, PLACE1009622, PLACE4000558, THYRO1000085, Y79AA1001391, Y79AA1001692,

[0692] The following 30 clones presumably belong to cellular defense-associated proteins.

[0693] HEMBA1000005, HEMBA1000531, HEMBA1003417, HEMBA1006253, NT2RM4000354, NT2RM4001880, NT2RP1000333, NT2RP1000493, NT2RP2000006, NT2RP2000045, NT2RP2000809, NT2RP2001536, NT2RP2002464, NT2RP2004920, NT2RP2005037, NT2RP3000590, NT2RP3001426, NT2RP3002062, NT2RP3002785, NT2RP3004262, NT2RP4001555, NT2RP4001638, PLACE1006958, PLACE1008275, PLACE1009113, PLACE101858, PLACE4000014, THYRO1000684, Y79AA1002139, Y79AA1002229,

[0694] Although it is unclear whether or not 261 clones out of clones other than the above-mentioned clones belong to any of the above-described categories, these clones are predicted to have some functions, based on the homology search using the full-length sequences thereof. The clone names and the gene definitions found in the result of homology search are shown below, separated with a double-slash mark, //.

HEMBA1000030//Homo sapiens ARF GTPase-activating protein GIT1 mRNA, complete cds.

HEMBA1000307//CARNITINE DEFICIENCY-ASSOCIATED PROTEIN EXPRESSED IN VENTRICLE 1

HEMBA1000333//Homo sapiens F-box protein Fbx21 (FBX21) mRNA, complete cds.

HEMBA1000488//RING CANAL PROTEIN (KELCH PROTEIN).

HEMBA1000523//TESTIS-SPECIFIC PROTEIN PBS13.

HEMBA1001197//Homo sapiens rap2 interacting protein x mRNA, complete cds.

HEMBA1001302//Homo sapiens calcium binding protein precursor, mRNA, complete cds.

HEMBA1001455//Mus musculus transposon-derived Buster2 transposase-like protein gene, partial cds.

HEMBA1001675//VACUOLAR PROTEIN SORTING-ASSOCIATED PROTEIN VPS9.

HEMBA1001714//Homo sapiens mRNA for ATPase inhibitor precursor, complete cds.

HEMBA1001744//SCY1 PROTEIN.

HEMBA1001967//Homo sapiens NY-REN-57 antigen mRNA, partial cds.

HEMBA1002151//Rattus norvegicus p34 mRNA, complete cds.

HEMBA1002215//TESTIN 2 (TES2) [CONTAINS: TESTIN 1 (TES1)].

HEMBA1002458//OVARIAN GRANULOSA CELL 13.0 KD PROTEIN HGR74.

HEMBA1002777//Fugu rubripes BAW (BAW) mRNA, complete cds.

HEMBA1003098//Homo sapiens NY-REN-6 antigen mRNA, partial cds.

HEMBA1003199//Homo sapiens chromosome 5 F-box protein Fbx4 (FBX4) mRNA, complete cds.

HEMBA1003615//Homo sapiens ART-4 mRNA, complete cds.

HEMBA1003836//MOB1 PROTEIN (MPS1 BINDER 1).

HEMBA1004295//Homo sapiens NY-REN-25 antigen mRNA, partial cds.

HEMBA1004573//Homo sapiens mRNA for HELG protein.

HEMBA1004604//Homo sapiens COP9 complex subunit 7a mRNA, complete cds.

HEMBA1004795//CDC4-LIKE PROTEIN (FRAGMENT).

HEMBA1005101//Homo sapiens SYT interacting protein SIP mRNA, complete cds.

HEMBA1005201//Homo sapiens CGI-07 protein mRNA, complete cds.

HEMBA1005206//Drosophila simulans anon73B1 gene and Su(P) gene.

HEMBA1005530//Homo sapiens anaphase-promoting complex subunit 7 (APC7) mRNA, complete cds.

HEMBA1005666//Homo sapiens mRNA for DIPB protein.

HEMBA1005990//Homo sapiens I-1 receptor candidate protein mRNA, complete cds.

HEMBA1006268//Homo sapiens HQ0024c mRNA, complete cds.

HEMBA1006398//Human L1 element L1.6 putative p150 gene, complete cds.

HEMBA1006445//Homo sapiens putative tumor supressor NOEY2 mRNA, complete cds.

HEMBA1007174//Homo sapiens epsin 2b mRNA, complete cds.

HEMBA1007251//Homo sapiens F-box protein FBX29 (FBX29) mRNA, partial cds.

HEMBB1000036//Homo sapiens CGI-51 protein mRNA, complete cds.

HEMBB1000144//GUANYLATE CYCLASE ACTIVATING PROTEIN 2 (GCAP 2) (RETINAL GUANYLYL CYCLASE ACTIVATOR PROTEIN P24).

HEMBB1000973//Mus musculus schlafen3 (Slfn3) mRNA, complete cds.

HEMBB1001058//Homo sapiens neuronal thread protein AD7c-NTP mRNA, complete cds

HEMBB1001234//65 KD YES-ASSOCIATED PROTEIN (YAP65).

HEMBB1001288//COPPER HOMEOSTASIS PROTEIN CUTC.

HEMBB1001331//Mus musculus mRNA for hepatoma-derived growth factor, complete cds, strain:BALB/c.

HEMBB1001384//Homo sapiens COP9 complex subunit 4 mRNA, complete cds.

HEMBB1002266//NEURONAL PROTEIN.

HEMBB1002510//GYP7 PROTEIN.

HEMBB1002705//Homo sapiens CGI-27 protein mRNA, complete cds.

MAMMA1000055//TESTIN 2 (TES2) [CONTAINS: TESTIN 1 (TES1)].

MAMMA1000625//GYP7 PROTEIN.

MAMMA1001075//Homo sapiens CGI-72 protein mRNA, complete cds.

MAMMA1001181//ABC1 PROTEIN HOMOLOG PRECURSOR.

MAMMA1001259//Mus musculus F-box protein FBX18 mRNA, partial cds.

MAMMA1001730//Homo sapiens brain and nasopharyngeal carcinoma susceptibility protein NSG-x mRNA, partial cds.

MAMMA1002143//Homo sapiens Cdc42 effector protein 4 mRNA, complete cds.

MAMMA1002699//Rattus norvegicus EH domain binding protein Epsin mRNA, complete cds.

MAMMA1002972//VACUOLAR PROTEIN SORTING-ASSOCIATED PROTEIN VPS27.

MAMMA1003113//Mus musculus COP9 complex subunit 7a (COPS7a) mRNA, complete cds.

NT2RM1000118//CALCINEURIN B SUBUNIT (PROTEIN PHOSPHATASE 2B REGULATORY SUBUNIT) (CALCINEURIN REGULATORY SUBUNIT).

NT2RM1000186//CALCINEURIN B SUBUNIT (PROTEIN PHOSPHATASE 2B REGULATORY SUBUNIT) (CALCINEURIN REGULATORY SUBUNIT).

NT2RM1000244//Homo sapiens TRAF4 associated factor 1 mRNA, partial cds.

NT2RM1000421//RIBONUCLEASE INHIBITOR.

NT2RM1000499//Caenorhabditis elegans mRNA for centaurin gamma 1A.

NT2RM1000623//RIBONUCLEASE INHIBITOR.

NT2RM1000883//Homo sapiens I-1 receptor candidate protein mRNA, complete cds.

NT2RM2000502//Rattus norvegicus W307 mRNA, complete cds.

NT2RM2000599//Homo sapiens F-box protein Lilina (LILINA) mRNA, complete cds.

NT2RM2000718//Homo sapiens endocrine regulator mRNA, complete cds.

NT2RM2001065//Homo sapiens COP9 complex subunit 4 mRNA, complete cds.

NT2RM2001196//PROLINE-RICH PROTEIN MP-3 (FRAGMENT).

NT2RM2001983//Homo sapiens RGS-GAIP interacting protein GIPC mRNA, complete cds.

NT2RM2002109//Homo sapiens glioma amplified on chromosome 1 protein (GAC1) mRNA, complete cds.

NT2RM2002142//GASTRULATION SPECIFIC PROTEIN G12.

NT2RM4000030//LAS1 PROTEIN.

NT2RM4000139//R. norvegicus trg mRNA.

NT2RM4000156//H. sapiens HPBRII-7 gene.

NT2RM4000386//Mus musculus ODZ3 (Odz3) mRNA, partial cds.

NT2RM4000590//RING CANAL PROTEIN (KELCH PROTEIN).

NT2RM4001047//MO25 PROTEIN.

NT2RM4001155//ADRENAL MEDULLA 50 KD PROTEIN.

NT2RM4001256//Xenopus laevis putative Zic3 binding protein mRNA, complete cds.

NT2RM4001320//Homo sapiens mRNA for Neuroblastoma, complete cds.

NT2RM4001340//UTR4 PROTEIN (UNKNOWN TRANSCRIPT 4 PROTEIN).

NT2RM4001347//Homo sapiens NY-REN-25 antigen mRNA, partial cds.

NT2RM4001371//Homo sapiens IDN3 mRNA, partial cds.

NT2RM4001582//Mus musculus COP9 complex subunit 7b (COPS7b) mRNA, complete cds.

NT2RM4001611//SIS2 PROTEIN (HALOTOLERANCE PROTEIN HAL3).

NT2RM4001731//Homo sapiens F-box protein Lilina (LILINA) mRNA, complete cds.

NT2RM4001969//R. norvegicus mRNA for IP63 protein.

NT2RM4002034//Homo sapiens hiwi mRNA, partial cds.

NT2RM4002075//RING CANAL PROTEIN (KELCH PROTEIN).

NT2RM4002226//GTPASE ACTIVATING PROTEIN ROTUND.

NT2RP1000040//Mus musculus donson protein (Donson) mRNA, partial cds.

NT2RP1000363//R. norvegicus LL5 mRNA.

NT2RP1000481//Homo sapiens antigen NY-CO-3 (NY-CO-3) mRNA, partial cds.

NT2RP1000513//Human NifU-like protein (hNifU) mRNA, partial cds.

NT2RP1000733//Human mRNA for GSPT1-TK protein, complete cds.

NT2RP1000860//Homo sapiens KL04P mRNA, complete cds.

NT2RP1000954//RING CANAL PROTEIN (KELCH PROTEIN).

NT2RP1001011//Drosophila melanogaster putative 43 kDa protein (TH1) mRNA, complete cds.

NT2RP1001395//Homo sapiens COP9 complex subunit 7a mRNA, complete cds.

NT2RP1001457//Homo sapiens partial mRNA for beta-transducin family protein (putative).

NT2RP1001494//MALE STERILITY PROTEIN 2.

NT2RP2000054//Homo sapiens putative ring zinc finger protein NY-REN-43 antigen mRNA, complete cds.

NT2RP2000067//Mus musculus ODZ3 (Odz3) mRNA, partial cds.

NT2RP2000133//Homo sapiens Leman coiled-coil protein (LCCP) mRNA, complete cds.

NT2RP2000157//ML02 PROTEIN.

NT2RP2000764//NIFS PROTEIN.

NT2RP2000965//Homo sapiens mRNA for fls353, complete cds.

NT2RP2001839//SCY1 PROTEIN.

NT2RP2001883//Homo sapiens CGI-01 protein mRNA, complete cds.

NT2RP2001976//Mus musculus calmodulin-binding protein SHA1 (Sha1) mRNA, complete cds.

NT2RP2001985//Homo sapiens high-risk human papilloma viruses E6 oncoproteins targeted protein E6TP1 alpha mRNA, complete cds.

NT2RP2002185//Homo sapiens ubiquilin mRNA, complete cds.

NT2RP2002442//HESA PROTEIN.

NT2RP2002727//Rattus norvegicus tulip 2 mRNA, complete cds.

NT2RP2002741//Homo sapiens mRNA for Neuroblastoma, complete cds.

NT2RP2002986//Homo sapiens mRNA for Kelch motif containing protein, complete cds.

NT2RP2003121//Mus musculus enhancer of polycomb (Epc1) mRNA, complete cds.

NT2RP2003265//Homo sapiens CGI-53 protein mRNA, complete cds.

NT2RP2003272//Homo sapiens ubiquilin mRNA, complete cds.

NT2RP2003857//MYOTROPHIN (V-1 PROTEIN) (GRANULE CELL DIFFERENTIATION PROTEIN).

NT2RP2003871//Homo sapiens transposon-derived Buster1 transposase-like protein gene, complete cds.

NT2RP2004425//Mus musculus axotrophin mRNA, complete cds.

NT2RP2004476//Homo sapiens cyclin L ania-6a mRNA, complete cds.

NT2RP2004710//Mus musculus formin binding protein 30 mRNA, complete cds.

NT2RP2004816//H58 PROTEIN.

NT2RP2005441//Homo sapiens hypothalamus protein HT002 mRNA, complete cds.

NT2RP2005490//Mus musculus D3Mm3e (D3Mm3e) mRNA, complete cds.

NT2RP2005620//Homo sapiens epsin 2a mRNA, complete cds.

NT2RP2005654//CYSTEINE STRING PROTEIN (CCCS1).

NT2RP2005675//Homo sapiens growth suppressor related (DOC-1R) mRNA, complete cds.

NT2RP2005753//Homo sapiens I-1 receptor candidate protein mRNA, complete cds.

NT2RP2005841//Homo sapiens mRNA for ALEX3, complete cds.

NT2RP2006598//Homo sapiens retinoid x receptor interacting protein mRNA, complete cds.

NT2RP3000047//NPL4 PROTEIN.

NT2RP3000233//RING CANAL PROTEIN (KELCH PROTEIN).

NT2RP3000868//Human ovarian cancer downregulated myosin heavy chain homolog (Doc1) mRNA, complete cds.

NT2RP3000869//Drosophila melanogaster AAA family protein Bor (bor) mRNA, complete cds.

NT2RP3001399//SSU72 PROTEIN.

NT2RP3001407//SCY1 PROTEIN.

NT2RP3001457//Drosophila melanogaster Melted (melt) mRNA, partial cds.

NT2RP3001587//Human anthracycline-associated resistance ARX mRNA, complete cds.

NT2RP3001712//Homo sapiens HP1-BP74 protein mRNA, complete cds.

NT2RP3001819//RING CANAL PROTEIN (KELCH PROTEIN).

NT2RP3001854//Homo sapiens novel retinal pigment epithelial cell protein (NORPEG) mRNA, complete cds.

NT2RP3001931//Rattus norvegicus clone C48 CDK5 activator-binding protein mRNA, complete cds.

NT2RP3002273//SCD6 PROTEIN.

NT2RP3002631//Homo sapiens Ran binding protein 11 mRNA, complete cds.

NT2RP3002682//Homo sapiens CGI-145 protein mRNA, complete cds.

NT2RP3002770//MYELOID DIFFERENTIATION PRIMARY RESPONSE PROTEIN MYD116.

NT2RP3002818//INSERTION ELEMENT IS2A HYPOTHETICAL 48.2 KD PROTEIN.

NT2RP3002948//RING CANAL PROTEIN (KELCH PROTEIN).

NT2RP3002972//Halocynthia roretzi mRNA for HrPET-1, complete cds.

NT2RP3003032//Homo sapiens okadaic acid-inducible and cAMP-regulated phosphoprotein 19 (ARPP-19) mRNA, complete cds.

NT2RP3003290//Mus musculus mRNA for Ndr1 related protein Ndr3, complete cds.

NT2RP3003411//Mus musculus COP9 complex subunit 7b (COPS7b) mRNA, complete cds.

NT2RP3003491//Drosophila melanogaster Pelle associated protein Pellino (Pli) mRNA, complete cds.

NT2RP3003500//SCY1 PROTEIN.

NT2RP3003726//Homo sapiens spermatogenesis associated PD1 mRNA, complete cds.

NT2RP3004348//R. norvegicus mRNA for cytosolic resiniferatoxin-binding protein.

NT2RP3004507//MOB1 PROTEIN (MPS1 BINDER 1).

NT2RP4000129//Xenopus laevis F-box protein 28 (Fbx28) mRNA, partial cds.

NT2RP4000498//MOB1 PROTEIN (MPS1 BINDER 1).

NT2RP4000528//NPL4 PROTEIN.

NT2RP4000737//Mus musculus F-box protein FBL10 mRNA, partial cds.

NT2RP4000979//Homo sapiens putative HIV-1 infection related protein mRNA, partial cds.

NT2RP4001010//Rattus norvegicus PSD-95/SAP90-associated protein-4 mRNA, complete cds.

NT2RP4001207//Homo sapiens Ran binding protein 11 mRNA, complete cds.

NT2RP4001228//RING CANAL PROTEIN (KELCH PROTEIN).

NT2RP4001260//Homo sapiens F-box protein Fbx21 (FBX21) mRNA, complete cds.

NT2RP4001339//Homo sapiens mRNA for AMMERC1 protein.

NT2RP4001351//Human ovarian cancer downregulated myosin heavy chain homolog (Doc1) mRNA, complete cds.

NT2RP4001474//Xenopus laevis putative Zic3 binding protein mRNA, complete cds.

NT2RP4001966//Mus musculus ODZ3 (Odz3) mRNA, partial cds.

NT2RP4002018//RING CANAL PROTEIN (KELCH PROTEIN).

OVARC1000209//Oryza sativa submergence induced protein 2A mRNA, complete cds.

OVARC1000876//MOB1 PROTEIN (MPS1 BINDER 1).

OVARC1001065//Homo sapiens CGI-12 protein mRNA, complete cds.

OVARC1001092//Homo sapiens mRNA for JM5 protein, complete CDS (clone IMAGE 53337, LLNLc110F1857Q7 (RZPD Berlin) and LLNLc110G0913Q7 (RZPD Berlin)).

OVARC1001419//Homo sapiens G0K (STIM1) mRNA, complete cds.

OVARC1001555//NGG1-INTERACTING FACTOR 3.

OVARC1001711//CORNIFIN B (SMALL PROLINE-RICH PROTEIN 1B) (SPR1B) (SPR1B).

OVARC1001943//Mus musculus DEBT-91 mRNA, complete cds.

PLACE1000004//Homo sapiens IDN3-B mRNA, complete cds.

PLACE1000066//SSU72 PROTEIN.

PLACE1000610//MSN5 PROTEIN.

PLACE1000636//MALE STERILITY PROTEIN 2.

PLACE1000769//Homo sapiens CGI-18 protein mRNA, complete cds.

PLACE1000987//Rattus norvegicus late gestation lung 2 protein (Lg12) mRNA, complete cds.

PLACE1001036//Homo sapiens mRNA for alpha integrin binding protein 63, partial.

PLACE1001845//Mus musculus cyclin ania-6a mRNA, complete cds.

PLACE1001920//Homo sapiens MDC-3.13 isoform 2 mRNA, complete cds.

PLACE1002665//Mus musculus enhancer of polycomb (Epc1) mRNA, complete cds.

PLACE1003602//Homo sapiens mRNA expressed in placenta.

PLACE1003611//Homo sapiens anaphase-promoting complex subunit 4 (APC4) mRNA, complete cds.

PLACE1004256//Mus musculus short coiled coil protein SCOCO (Scoc) mRNA, complete cds.

PLACE1004550//Homo sapiens CGI-20 protein mRNA, complete cds.

PLACE1004868//MALE STERILITY PROTEIN 2.

PLACE1004930//Homo sapiens MDC-3.13 isoform 2 mRNA, complete cds

PLACE1005052//Homo sapiens CGI-16 protein mRNA, complete cds.

PLACE1005102//RING CANAL PROTEIN (KELCH PROTEIN).

PLACE1005176//Homo sapiens hypothalamus protein HT001 mRNA, complete cds.

PLACE1005187//APAG PROTEIN.

PLACE1005331//Homo sapiens 7h3 protein mRNA, partial cds.

PLACE1005727//Homo sapiens STRIN protein (STRIN) mRNA, complete cds.

PLACE1006003//Homo sapiens CGI-94 protein mRNA, complete cds.

PLACE1006335//Homo sapiens NY-REN-50 antigen mRNA, partial cds.

PLACE1006385//Homo sapiens epsin 2a mRNA, complete cds.

PLACE1006506//Homo sapiens anaphase-promoting complex subunit 4 (APC4) mRNA, complete cds.

PLACE1007105//Homo sapiens muskelin (MKLN1) mRNA, complete cds.

PLACE1007537//Homo sapiens ankyrin repeat-containing protein ASB-2 mRNA, complete cds.

PLACE1007705//Mus musculus mRNA for Ndr1 related protein Ndr3, complete cds.

PLACE1007791//Homo sapiens IDN3-B mRNA, complete cds.

PLACE1007897//Homo sapiens FLASH mRNA, complete cds.

PLACE1008080//Homo sapiens mRNA for HEXIM1 protein, complete cds.

PLACE1008368//RING CANAL PROTEIN (KELCH PROTEIN).

PLACE1008398//GENE 33 POLYPEPTIDE.

PLACE1008465//Homo sapiens mRNA for rapa-1 (rapa gene).

PLACE1008627//Homo sapiens mRNA for cysteine-rich protein.

PLACE1009020//NIFS PROTEIN.

PLACE1009060//BRO1 PROTEIN.

PLACE1009186//Homo sapiens small zinc finger-like protein (TIM9b) mRNA, complete cds.

PLACE1009443//Mus musculus F-box protein FBL8 mRNA, complete cds.

PLACE1009571//Homo sapiens PTD002 mRNA, complete cds.

PLACE1009670//Homo sapiens genethonin 1 mRNA, complete cds.

PLACE1010105//RING CANAL PROTEIN (KELCH PROTEIN).

PLACE1010261//SEGREGATION DISTORTER PROTEIN.

PLACE1010310//SPIDROIN 2 (DRAGLINE SILK FIBROIN 2) (FRAGMENT).

PLACE1010522//Homo sapiens mRNA for DEPP (decidual protein induced by progesterone), complete cds.

PLACE1010579//Homo sapiens CED-6 protein (CED-6) mRNA, complete cds.

PLACE1010628//Homo sapiens S164 gene, partial cds; PS1 and hypothetical protein genes, complete cds; and S171 gene, partial cds.

PLACE1010661//TESTIS-SPECIFIC PROTEIN PBS13.

PLACE1010761//Homo sapiens mRNA for cisplatin resistance-associated overexpressed protein, complete cds.

PLACE1011185//INSERTION ELEMENT IS1 PROTEIN INSB.

PLACE1011340//Homo sapiens IDN3-B mRNA, complete cds.

PLACE1011586//Rattus norvegicus clone C53 CDK5 activator-binding protein mRNA, complete cds.

PLACE2000246//RING CANAL PROTEIN (KELCH PROTEIN).

PLACE2000411//Homo sapiens epsin 2b mRNA, complete cds.

PLACE3000477//Homo sapiens phosphoprotein pp75 mRNA, partial cds. THYRO1000173//Homo sapiens AP-mu chain family member mu1B (HSMU1B) mRNA, complete cds.

THYRO1000401//Human TcD37 homolog (HTcD37) mRNA, partial cds.

THYRO1000666//Mus musculus mRNA for kinesin like protein 9.

THYRO1001033//TRANSFORMATION-SENSITIVE PROTEIN IEF SSP 3521.

THYRO1001347//Homo sapiens RAN binding protein 16 mRNA, complete cds.

THYRO1001656//Homo sapiens Leman coiled-coil protein (LCCP) mRNA, complete cds.

THYRO1001703//NIFR3-LIKE PROTEIN.

THYRO1001721//RING CANAL PROTEIN (KELCH PROTEIN).

Y79AA1000059//Homo sapiens aryl-hydrocarbon interacting protein-like 1 (AIPL1) gene, complete cds.

Y79AA1000181//Homo sapiens CGI-01 protein mRNA, complete cds.

Y79AA1000268//Mus musculus Nip21 mRNA, complete cds.

Y79AA1000313//CALPHOTIN.

Y79AA1000540//CELL POLARITY PROTEIN TEA1.

Y79AA1000966//Homo sapiens COP9 complex subunit 4 mRNA, complete cds.

Y79AA1000985//Human centrosomal protein kendrin mRNA, complete cds.

Y79AA1001323//Mus musculus mRNA for GSG1, complete cds.

Y79AA1001402//Homo sapiens paraneoplastic cancer-testis-brain antigen (MA4) mRNA, partial cds.

Y79AA1001679//Homo sapiens lambda-crystallin mRNA, complete cds.

Y79AA1001923//Homo sapiens F-box protein Fbx22 (FBX22) gene, partial cds.

Y79AA1002083//H. sapiens mRNA for MUF1 protein.

Y79AA1002307//Homo sapiens astrotactin2 (ASTN2) mRNA, complete cds.

Y79AA1002311//R. norvegicus mRNA for cytosolic resiniferatoxin-binding protein.

Y79AA1002487//Homo sapiens chromosome 5 F-box protein Fbx4 (FBX4) mRNA, complete cds.

[0695] Among the clones other than the above-mentioned, there were 36 clones that were similarly classified into the functional categories based on the results of functional domain search using the Pfam program. These clones were categorized as follows.

[0696] Clones presumably belonging to the category of secretory or membrane proteins are two clones, MAMMA1002498 and NT2RM4002287; a clone presumably belonging to the category of glycoproteins-associated proteins is a clone MAMMA1002498; clones presumably belonging to the category of signal transduction-associated proteins are 11 clones, HEMBA1001247, NT2RM2001813, NT2RM4001454, NT2RP2005140, NT2RP2005293, NT2RP3000487, NT2RP3003311, PLACE1000972, PLACE1003723, PLACE1005327, and PLACE3000124; clones presumably belonging to the category of transcription-associated proteins are 12 clones, HEMBA1003257, NT2RM2000101, NT2RM2001797, NT2RP1000101, NT2RP2002208, NT2RP3001214, NT2RP3003278, NT2RP4001235, PLACE1000050, PLACE1001716, PLACE1002499, and PLACE1007544; clones presumably belonging to the category of enzymes and/or metabolism-associated proteins are 2 clones, HEMBA1005732 and MAMMA1000402; clones presumably belonging to the category of DNA- and/or RNA-binding proteins are 4 clones, HEMBA1004596, OVARC1000148, PLACE1003334, and THYRO1001661; a clone presumably belonging to the category of protein synthesis- and/or protein transport-associated proteins is a clone, HEMBA1006284.

[0697] So far, useful information for presuming the functions is unavailable for the remaining 2511 clones. Their functions will possibly be revealed by further analyses. Names of the clones are listed below.

[0698] So far, useful information for presuming the functions are unavailable for the remaining 2511 clones. Their functions will possibly be revealed by further analyses. Names of the clones are listed below.

[0699] HEMBA1000042, HEMBA1000046, HEMBA1000050, HEMBA1000076, HEMBA1000193, HEMBA1000213, HEMBA1000227, HEMBA1000231, HEMBA1000243, HEMBA1000244, HEMBA1000251, HEMBA1000264, HEMBA1000280, HEMBA1000282, HEMBA1000288, HEMBA1000290, HEMBA1000302, HEMBA1000327, HEMBA1000338, HEMBA1000351, HEMBA1000357, HEMBA1000376, HEMBA1000387, HEMBA1000392, HEMBA1000396, HEMBA1000428, HEMBA1000442, HEMBA1000456, HEMBA1000459, HEMBA1000460, HEMBA1000469, HEMBA1000497, HEMBA1000501, HEMBA1000504, HEMBA1000505, HEMBA1000508, HEMBA1000519, HEMBA1000520, HEMBA1000534, HEMBA1000545, HEMBA1000557, HEMBA1000568, HEMBA1000575, HEMBA1000594, HEMBA1000604, HEMBA1000622, HEMBA1000636, HEMBA1000655, HEMBA1000673, HEMBA1000682, HEMBA1000686, HEMBA1000702, HEMBA1000722, HEMBA1000726, HEMBA1000727, HEMBA1000749, HEMBA1000752, HEMBA1000769, HEMBA1000773, HEMBA1000774, HEMBA1000843, HEMBA1000867, HEMBA1000869, HEMBA1000872, HEMBA1000876, HEMBA1000908, HEMBA1000918, HEMBA1000934, HEMBA1000942, HEMBA1000943, HEMBA1000946, HEMBA1000960, HEMBA1000968, HEMBA1000971, HEMBA1000972, HEMBA1000975, HEMBA1000985, HEMBA1000986, HEMBA1001008, HEMBA1001009, HEMBA1001020, HEMBA1001022, HEMBA1001024, HEMBA1001026, HEMBA1001051, HEMBA1001060, HEMBA1001080, HEMBA1001094, HEMBA1001099, HEMBA1001109, HEMBA1001121,HEMBA1001122, HEMBA1001123, HEMBA1001133, HEMBA1001140, HEMBA1001208, HEMBA1001213, HEMBA1001226, HEMBA1001235, HEMBA1001281, HEMBA1001299, HEMBA1001303, HEMBA1001310, HEMBA1001319, HEMBA1001323, HEMBA1001326, HEMBA1001327, HEMBA1001330, HEMBA1001361, HEMBA1001375, HEMBA1001377, HEMBA1001383, HEMBA1001388, HEMBA1001391, HEMBA1001398, HEMBA1001411, HEMBA1001413, HEMBA1001415, HEMBA1001432, HEMBA1001433, HEMBA1001435, HEMBA1001442, HEMBA1001450, HEMBA1001463, HEMBA1001497, HEMBA1001522, HEMBA1001533, HEMBA1001566, HEMBA1001570, HEMBA1001581, HEMBA1001589, HEMBA1001608, HEMBA1001636, HEMBA1001640, HEMBA1001647, HEMBA1001655, HEMBA1001658, HEMBA1001702, HEMBA1001711, HEMBA1001712, HEMBA1001731, HEMBA1001745, HEMBA1001750, HEMBA1001781, HEMBA1001784, HEMBA1001791, HEMBA1001803, HEMBA1001815, HEMBA1001820, HEMBA1001835, HEMBA1001864, HEMBA1001888, HEMBA1001910, HEMBA1001912, HEMBA1001915, HEMBA1001918, HEMBA1001939, HEMBA1001940, HEMBA1001942, HEMBA1001950, HEMBA1001964, HEMBA1001987, HEMBA1002018, HEMBA1002022, HEMBA1002039, HEMBA1002049, HEMBA1002084, HEMBA1002100, HEMBA1002113, HEMBA1002119, HEMBA1002160, HEMBA1002162, HEMBA1002185, HEMBA1002189, HEMBA1002191, HEMBA1002199, HEMBA1002204, HEMBA1002229, HEMBA1002237, HEMBA1002265, HEMBA1002328, HEMBA1002337, HEMBA1002348, HEMBA1002349, HEMBA1002381, HEMBA1002430, HEMBA1002439, HEMBA1002460, HEMBA1002498, HEMBA1002503, HEMBA1002508, HEMBA1002515, HEMBA1002538, HEMBA1002542, HEMBA1002552, HEMBA1002558, HEMBA1002583, HEMBA1002621, HEMBA1002624, HEMBA1002629, HEMBA1002645, HEMBA1002666, HEMBA1002678, HEMBA1002679, HEMBA1002688, HEMBA1002696, HEMBA1002703, HEMBA1002712, HEMBA1002716, HEMBA1002742, HEMBA1002748, HEMBA1002750, HEMBA1002779, HEMBA1002794, HEMBA1002801, HEMBA1002816, HEMBA1002826, HEMBA1002833, HEMBA1002850, HEMBA1002863, HEMBA1002934, HEMBA1002937, HEMBA1002944, HEMBA1002954, HEMBA1002968, HEMBA1002970, HEMBA1002971, HEMBA1003021, HEMBA1003033, HEMBA1003034, HEMBA1003035, HEMBA1003037, HEMBA1003041, HEMBA1003067, HEMBA1003078, HEMBA1003083, HEMBA1003117, HEMBA1003129, HEMBA1003133, HEMBA1003142, HEMBA1003166, HEMBA1003175, HEMBA1003197, HEMBA1003202, HEMBA1003220, HEMBA1003222, HEMBA1003229, HEMBA1003273, HEMBA1003276, HEMBA1003278, HEMBA1003304, HEMBA1003309, HEMBA1003322, HEMBA1003327, HEMBA1003328, HEMBA1003370, HEMBA1003373, HEMBA1003376, HEMBA1003380, HEMBA1003384, HEMBA1003395, HEMBA1003402, HEMBA1003447, HEMBA1003461, HEMBA1003463, HEMBA1003480, HEMBA1003528, HEMBA1003531, HEMBA1003548, HEMBA1003556, HEMBA1003571, HEMBA1003579, HEMBA1003597, HEMBA1003598, HEMBA1003621, HEMBA1003646, HEMBA1003656, HEMBA1003667, HEMBA1003692, HEMBA1003720, HEMBA1003725, HEMBA1003729, HEMBA1003733, HEMBA1003758, HEMBA1003799, HEMBA1003804, HEMBA1003807, HEMBA1003827, HEMBA1003838, HEMBA1003854, HEMBA1003856, HEMBA1003864, HEMBA1003879, HEMBA1003880, HEMBA1003893, HEMBA1003908, HEMBA1003926, HEMBA1003937, HEMBA1003939, HEMBA1003942, HEMBA1003958, HEMBA1003959, HEMBA1003976, HEMBA1003978, HEMBA1003985, HEMBA1003987, HEMBA1003989, HEMBA1004011, HEMBA1004012, HEMBA1004015, HEMBA1004024, HEMBA1004038, HEMBA1004045, HEMBA1004048, HEMBA1004056, HEMBA1004074, HEMBA1004086, HEMBA1004111, HEMBA1004138, HEMBA1004150, HEMBA1004193, HEMBA1004200, HEMBA1004225, HEMBA1004238, HEMBA1004241, HEMBA1004246, HEMBA1004267, HEMBA1004272, HEMBA1004274, HEMBA1004289, HEMBA1004312, HEMBA1004323, HEMBA1004327, HEMBA1004330, HEMBA1004335, HEMBA1004366, HEMBA1004372, HEMBA1004394, HEMBA1004396, HEMBA1004405, HEMBA1004429, HEMBA1004433, HEMBA1004460, HEMBA1004502, HEMBA1004507, HEMBA1004538, HEMBA1004542, HEMBA1004554, HEMBA1004560, HEMBA1004610, HEMBA1004617, HEMBA1004629, HEMBA1004631, HEMBA1004632, HEMBA1004638, HEMBA1004670, HEMBA1004672, HEMBA1004693, HEMBA1004705, HEMBA1004709, HEMBA1004711, HEMBA1004725, HEMBA1004730, HEMBA1004733, HEMBA1004736, HEMBA1004748, HEMBA1004751, HEMBA1004753, HEMBA1004763, HEMBA1004771, HEMBA1004776, HEMBA1004778, HEMBA1004803, HEMBA1004806, HEMBA1004807, HEMBA1004820, HEMBA1004860, HEMBA1004863, HEMBA1004865, HEMBA1004880, HEMBA1004900, HEMBA1004909, HEMBA1004933, HEMBA1004934, HEMBA1004944, HEMBA1004954, HEMBA1004960, HEMBA1004977, HEMBA1004978, HEMBA1004980, HEMBA1004983, HEMBA1004995, HEMBA1005019, HEMBA1005039, HEMBA1005062, HEMBA1005066, HEMBA1005075, HEMBA1005079, HEMBA1005083, HEMBA1005113, HEMBA1005123, HEMBA1005133, HEMBA1005149, HEMBA1005152, HEMBA1005185, HEMBA1005223, HEMBA1005232, HEMBA1005241, HEMBA1005252, HEMBA1005275, HEMBA1005293, HEMBA1005296, HEMBA1005311, HEMBA1005314, HEMBA1005331, HEMBA1005374, HEMBA1005382, HEMBA1005403, HEMBA1005411, HEMBA1005426, HEMBA1005443, HEMBA1005447, HEMBA1005468, HEMBA1005469, HEMBA1005472, HEMBA1005474, HEMBA1005475, HEMBA1005497, HEMBA1005500, HEMBA1005506, HEMBA1005508, HEMBA1005517, HEMBA1005518, HEMBA1005526, HEMBA1005568, HEMBA1005572, HEMBA1005583, HEMBA1005593, HEMBA1005606, HEMBA1005609, HEMBA1005627, HEMBA1005670, HEMBA1005679, HEMBA1005680, HEMBA1005685, HEMBA1005705, HEMBA1005746, HEMBA1005755, HEMBA1005780, HEMBA1005813, HEMBA1005822, HEMBA1005834, HEMBA1005852, HEMBA1005884, HEMBA1005891, HEMBA1005894, HEMBA1005909, HEMBA1005911, HEMBA1005921, HEMBA1005963, HEMBA1006005, HEMBA1006035, HEMBA1006081, HEMBA1006090, HEMBA1006091, HEMBA1006092, HEMBA1006100, HEMBA1006108, HEMBA1006121, HEMBA1006124, HEMBA1006138, HEMBA1006155, HEMBA1006182, HEMBA1006235, HEMBA1006252, HEMBA1006259, HEMBA1006349, HEMBA1006364, HEMBA1006377, HEMBA1006380, HEMBA1006381, HEMBA1006406, HEMBA1006416, HEMBA1006421, HEMBA1006424, HEMBA1006426, HEMBA1006446, HEMBA1006461, HEMBA1006467, HEMBA1006483, HEMBA1006486, HEMBA1006494, HEMBA1006497, HEMBA1006530, HEMBA1006535, HEMBA1006546, HEMBA1006562, HEMBA1006566, HEMBA1006579, HEMBA1006595, HEMBA1006597, HEMBA1006612, HEMBA1006617, HEMBA1006631, HEMBA1006639, HEMBA1006643, HEMBA1006665, HEMBA1006674, HEMBA1006676, HEMBA1006682, HEMBA1006695, HEMBA1006709, HEMBA1006717, HEMBA1006744, HEMBA1006754, HEMBA1006767, HEMBA1006779, HEMBA1006780, HEMBA1006795, HEMBA1006796, HEMBA1006812, HEMBA1006824, HEMBA1006832, HEMBA1006865, HEMBA1006900, HEMBA1006936, HEMBA1006949, HEMBA1006993, HEMBA1007002, HEMBA1007051, HEMBA1007052, HEMBA1007062, HEMBA1007066, HEMBA1007073, HEMBA1007078, HEMBA1007080, HEMBA1007085, HEMBA1007112, HEMBA1007113, HEMBA1007129, HEMBA1007147, HEMBA1007178, HEMBA1007206, HEMBA1007256, HEMBA1007267, HEMBA1007281, HEMBA1007288, HEMBA1007319, HEMBA1007320, HEMBA1007322, HEMBA1007327, HEMBA1007341, HEMBA1007342, HEMBA1007347, HEMBB1000005, HEMBB1000008, HEMBB1000018, HEMBB1000024, HEMBB1000025, HEMBB1000030, HEMBB1000048, HEMBB1000059, HEMBB1000089, HEMBB1000099, HEMBB1000103, HEMBB1000113, HEMBB1000136, HEMBB1000141, HEMBB1000173, HEMBB1000198, HEMBB1000215, HEMBB1000218, HEMBB1000240, HEMBB1000244, HEMBB1000272, HEMBB1000274, HEMBB1000312, HEMBB1000318, HEMBB1000335, HEMBB1000336, HEMBB1000337, HEMBB1000338, HEMBB1000339, HEMBB1000341, HEMBB1000343, HEMBB1000354, HEMBB1000374, HEMBB1000391, HEMBB1000402, HEMBB1000420, HEMBB1000434, HEMBB1000438, HEMBB1000441, HEMBB1000449, HEMBB1000480, HEMBB1000491, HEMBB1000493, HEMBB1000510, HEMBB1000530, HEMBB1000550, HEMBB1000554, HEMBB1000573, HEMBB1000586, HEMBB1000589, HEMBB1000591, HEMBB1000592, HEMBB1000623, HEMBB1000630, HEMBB1000637, HEMBB1000649, HEMBB1000652, HEMBB1000671, HEMBB1000672, HEMBB1000673, HEMBB1000684, HEMBB1000705, HEMBB1000706, HEMBB1000709, HEMBB1000726, HEMBB1000749, HEMBB1000770, HEMBB1000774, HEMBB1000790, HEMBB1000807, HEMBB1000810, HEMBB1000822, HEMBB1000826, HEMBB1000835, HEMBB1000848, HEMBB1000852, HEMBB1000870, HEMBB1000883, HEMBB1000887, HEMBB1000888, HEMBB1000890, HEMBB1000893, HEMBB1000908, HEMBB1000913, HEMBB1000917, HEMBB1000991, HEMBB1000996, HEMBB1001004, HEMBB1001008, HEMBB1001014, HEMBB1001020, HEMBB1001024, HEMBB1001047, HEMBB1001051, HEMBB1001060, HEMBB1001096, HEMBB1000105, HEMBB1001114, HEMBB1001117, HEMBB1001119, HEMBB1001126, HEMBB1001133, HEMBB1001142, HEMBB1001153, HEMBB1001169, HEMBB1001182, HEMBB1001197, HEMBB1001199, HEMBB1001208, HEMBB1001209, HEMBB1001210, HEMBB1001221, HEMBB1001249, HEMBB1001253, HEMBB1001254, HEMBB1001271, HEMBB1001289, HEMBB1001304, HEMBB1001315, HEMBB1001317, HEMBB1001335, HEMBB1001337, HEMBB1001356, HEMBB1001364, HEMBB1001366, HEMBB1001367, HEMBB1001369, HEMBB1001387, HEMBB1001394, HEMBB1001410, HEMBB1001424, HEMBB1001426, HEMBB1001436, HEMBB1001449, HEMBB1001458, HEMBB1001500, HEMBB1001521, HEMBB1001527, HEMBB1001531, HEMBB1001535, HEMBB1001536, HEMBB1001537, HEMBB1001565, HEMBB1001585, HEMBB1001588, HEMBB1001603, HEMBB1001618, HEMBB1001619, HEMBB1001635, HEMBB1001653, HEMBB1001665, HEMBB1001668, HEMBB1001684, HEMBB1001685, HEMBB1001695, HEMBB1001707, HEMBB1001735, HEMBB1001747, HEMBB1001753, HEMBB1001756, HEMBB1001760, HEMBB1001785, HEMBB1001797, HEMBB1001812, HEMBB1001816, HEMBB1001834, HEMBB1001850, HEMBB1001863, HEMBB1001868, HEMBB1001869, HEMBB1001874, HEMBB1001880, HEMBB1001899, HEMBB1001906, HEMBB1001910, HEMBB1001911, HEMBB1001921, HEMBB1001922, HEMBB1001930, HEMBB1001944, HEMBB1001945, HEMBB1001947, HEMBB1001952, HEMBB1001957, HEMBB1001967, HEMBB1001983, HEMBB1001990, HEMBB1001996, HEMBB1002002, HEMBB1002005, HEMBB1002043, HEMBB1002045, HEMBB1002049, HEMBB1002050, HEMBB1002068, HEMBB1002092, HEMBB1002139, HEMBB1002152, HEMBB1002218, HEMBB1002232, HEMBB1002249, HEMBB1002280, HEMBB1002300, HEMBB1002327, HEMBB1002329, HEMBB1002358, HEMBB1002359, HEMBB1002371, HEMBB1002381, HEMBB1002409, HEMBB1002415, HEMBB1002425, HEMBB1002453, HEMBB1002457, HEMBB1002458, HEMBB1002489, HEMBB1002492, HEMBB1002495, HEMBB1002502, HEMBB1002520, HEMBB1002522, HEMBB1002534, HEMBB1002545, HEMBB1002579, HEMBB1002582, HEMBB1002596, HEMBB1002603, HEMBB1002610, HEMBB1002613, HEMBB1002617, HEMBB1002623, HEMBB1002635, HEMBB1002677, HEMBB1002683, HEMBB1002684, HEMBB1002697, HEMBB1002699, HEMBB1002702, MAMMA1000009, MAMMA1000009, MAMMA1000025, MAMMA1000043, MAMMA1000057, MAMMA1000069, MAMMA1000084, MAMMA1000092,

[0700] MAMMA1000103, MAMMA1000117, MAMMA1000139, MAMMA1000143, MAMMA1000155, MAMMA1000163, MAMMA1000171, MAMMA1000175, MAMMA1000198, MAMMA1000227, MAMMA1000241, MAMMA1000251, MAMMA1000254, MAMMA1000257, MAMMA1000264, MAMMA1000266, MAMMA1000270, MAMMA1000279, MAMMA1000287, MAMMA1000307, MAMMA1000309, MAMMA1000312, MAMMA1000313, MAMMA1000331, MAMMA1000339, MAMMA1000340, MAMMA1000348, MAMMA1000356, MAMMA1000360, MAMMA1000361, MAMMA1000372, MAMMA1000395, MAMMA1000414, MAMMA1000421, MAMMA1000422, MAMMA1000431, MAMMA1000444, MAMMA1000458, MAMMA1000468, MAMMA1000490, MAMMA1000500, MAMMA1000522, MAMMA1000524, MAMMA1000559, MAMMA1000567, MAMMA1000576, MAMMA1000583, MAMMA1000594, MAMMA1000605, MAMMA1000616, MAMMA1000623, MAMMA1000643, MAMMA1000664, MAMMA1000670, MAMMA1000696, MAMMA1000707, MAMMA1000720, MAMMA1000744, MAMMA1000746, MAMMA1000752, MAMMA1000760, MAMMA1000761, MAMMA1000775, MAMMA1000776, MAMMA1000802, MAMMA1000831, MAMMA1000839, MAMMA1000843, MAMMA1000851, MAMMA1000855, MAMMA1000856, MAMMA1000863, MAMMA1000865, MAMMA1000867, MAMMA1000875, MAMMA1000876, MAMMA1000880, MAMMA1000883, MAMMA1000906, MAMMA1000908, MAMMA1000914, MAMMA1000921, MAMMA1000931, MAMMA1000940, MAMMA1000941, MAMMA1000957, MAMMA1000962, MAMMA1000968, MAMMA1000975, MAMMA1000979, MAMMA1000987, MAMMA1001003, MAMMA1001021, MAMMA1001078, MAMMA1001082, MAMMA1001091, MAMMA1001110, MAMMA1001126, MAMMA1001143, MAMMA1001162, MAMMA1001186, MAMMA11001191, MAMMA11001202, MAMMA1001206, MAMMA1001215, MAMMA1001220, MAMMA1001243, MAMMA1001244, MAMMA1001249, MAMMA1001252, MAMMA1001256, MAMMA1001268, MAMMA1001271, MAMMA1001274, MAMMA1001292, MAMMA1001296, MAMMA1001324, MAMMA1001341, MAMMA1001343, MAMMA1001397, MAMMA1001408, MAMMA1001419, MAMMA1001420, MAMMA1001442, MAMMA1001452, MAMMA1001465, MAMMA1001502, MAMMA1001510, MAMMA1001522, MAMMA1001547, MAMMA1001551, MAMMA1001575, MAMMA1001590, MAMMA1001600, MAMMA1001604, MAMMA1001606, MAMMA1001620, MAMMA1001630, MAMMA1001635, MAMMA1001649, MAMMA1001663, MAMMA1001670, MAMMA1001671, MAMMA1001683, MAMMA1001686, MAMMA1001692, MAMMA1001711, MAMMA1001715, MAMMA1001744, MAMMA1001745, MAMMA1001757, MAMMA1001760, MAMMA1001764, MAMMA1001769, MAMMA1001783, MAMMA1001785, MAMMA1001788, MAMMA1001790, MAMMA1001806, MAMMA1001812, MAMMA1001815, MAMMA1001817, MAMMA1001818, MAMMA1001824, MAMMA1001848, MAMMA1001851, MAMMA1001854, MAMMA1001858, MAMMA1001864, MAMMA1001874, MAMMA1001878, MAMMA1001890, MAMMA1001907, MAMMA1001908, MAMMA1001931, MAMMA1001956, MAMMA1001969, MAMMA1001970, MAMMA1002011, MAMMA1002032, MAMMA1002033, MAMMA1002041, MAMMA1002042, MAMMA1002047, MAMMA1002056, MAMMA1002058, MAMMA1002068, MAMMA1002078, MAMMA1002082, MAMMA1002084, MAMMA1002093, MAMMA1002094, MAMMA1002118, MAMMA1002125, MAMMA1002132, MAMMA1002140, MAMMA1002145, MAMMA1002153, MAMMA1002155, MAMMA1002156, MAMMA1002174, MAMMA1002209, MAMMA1002230, MAMMA1002243, MAMMA1002250, MAMMA1002269, MAMMA1002282, MAMMA1002292, MAMMA1002293, MAMMA1002294, MAMMA1002298, MAMMA1002299, MAMMA1002308, MAMMA1002310, MAMMA1002311, MAMMA1002312, MAMMA1002317, MAMMA1002319, MAMMA1002322, MAMMA1002333, MAMMA1002339, MAMMA1002352, MAMMA1002353, MAMMA1002355, MAMMA1002356, MAMMA1002359, MAMMA1002360, MAMMA1002362, MAMMA1002380, MAMMA1002384, MAMMA1002392, MAMMA1002411, MAMMA1002413, MAMMA1002417, MAMMA1002434, MAMMA1002446, MAMMA1002454, MAMMA1002475, MAMMA1002494, MAMMA1002545, MAMMA1002554, MAMMA1002556, MAMMA1002566, MAMMA1002571, MAMMA1002585, MAMMA1002590, MAMMA1002597, MAMMA1002612, MAMMA1002618, MAMMA1002636, MAMMA1002646, MAMMA1002665, MAMMA1002673, MAMMA1002708, MAMMA1002711, MAMMA1002727, MAMMA1002728, MAMMA1002744, MAMMA1002748, MAMMA1002758, MAMMA1002764, MAMMA1002765, MAMMA1002775, MAMMA1002780, MAMMA1002782, MAMMA1002796, MAMMA1002807, MAMMA1002820, MAMMA1002830, MAMMA1002833, MAMMA1002838, MAMMA1002843, MAMMA1002868, MAMMA1002880, MAMMA1002886, MAMMA1002892, MAMMA1002895, MAMMA1002909, MAMMA1002941, MAMMA1002964, MAMMA1002973, MAMMA1002987, MAMMA1003003, MAMMA1003004, MAMMA1003015, MAMMA1003019, MAMMA1003026, MAMMA1003031, MAMMA1003039, MAMMA1003044, MAMMA1003049, MAMMA1003056, MAMMA1003066, MAMMA1003099, MAMMA1003104, MAMMA1003135, NT2RM1000018, NT2RM1000032, NT2RM1000059, NT2RM1000119,

[0701] NT2RM1000127, NT2RM1000242, NT2RM1000271, NT2RM1000272, NT2RM1000300, NT2RM1000314, NT2RM1000341, NT2RM1000365, NT2RM1000399, NT2RM1000669, NT2RM1000672, NT2RM1000699, NT2RM1000741, NT2RM1000780, NT2RM1000781, NT2RM1000802, NT2RM1000829, NT2RM1000927, NT2RM1000962, NT2RM1000978, NT2RM1001043, NT2RM1001044, NT2RM1001066, NT2RM1001074, NT2RM1001082, NT2RM1001085, NT2RM1001105, NT2RM1001112, NT2RM2000006, NT2RM2000032, NT2RM2000042, NT2RM2000093, NT2RM2000192, NT2RM2000239, NT2RM2000250, NT2RM2000359, NT2RM2000374, NT2RM2000420, NT2RM2000540, NT2RM2000567, NT2RM2000569, NT2RM2000635, NT2RM2000636, NT2RM2000639, NT2RM2000649, NT2RM2000669, NT2RM2000795, NT2RM2000837, NT2RM2000952, NT2RM2000984, NT2RM2001004, NT2RM2001131, NT2RM2001141, NT2RM2001152, NT2RM2001177, NT2RM2001194, NT2RM2001243, NT2RM2001247, NT2RM2001291, NT2RM2001306, NT2RM2001312, NT2RM2001319, NT2RM2001360, NT2RM2001420, NT2RM2001504, NT2RM2001524, NT2RM2001544, NT2RM2001582, NT2RM2001588, NT2RM2001637, NT2RM2001641, NT2RM2001675, NT2RM2001681, NT2RM2001695, NT2RM2001696, NT2RM2001699, NT2RM2001706, NT2RM2001723, NT2RM2001727, NT2RM2001768, NT2RM2001784, NT2RM2001805, NT2RM2001840, NT2RM2001855, NT2RM2001867, NT2RM2001879, NT2RM2001903, NT2RM2001982, NT2RM2002178, NT2RM4000027, NT2RM4000061, NT2RM4000086, NT2RM4000197, NT2RM4000199, NT2RM4000200, NT2RM4000210, NT2RM4000244, NT2RM4000251, NT2RM4000265, NT2RM4000324, NT2RM4000327, NT2RM4000349, NT2RM4000395, NT2RM4000414, NT2RM4000425, NT2RM4000511, NT2RM4000514, NT2RM4000532, NT2RM4000534, NT2RM4000585, NT2RM4000603, NT2RM4000689, NT2RM4000698, NT2RM4000717, NT2RM4000783, NT2RM4000787, NT2RM4000790, NT2RM4000796, NT2RM4000813, NT2RM4000833, NT2RM4000848, NT2RM4000852, NT2RM4000855, NT2RM4000887, NT2RM4000895, NT2RM4000950, NT2RM4000971, NT2RM4000979, NT2RM4001002, NT2RM4001151, NT2RM4001160, NT2RM4001187, NT2RM4001191, NT2RM4001204, NT2RM4001258, NT2RM4001309, NT2RM4001384, NT2RM4001410, NT2RM4001414, NT2RM4001437, NT2RM4001489, NT2RM4001522, NT2RM4001557, NT2RM4001565, NT2RM4001569, NT2RM4001594, NT2RM4001650, NT2RM4001662, NT2RM4001682, NT2RM4001710, NT2RM4001715, NT2RM4001746, NT2RM4001754, NT2RM4001836, NT2RM4001841, NT2RM4001842, NT2RM4001856, NT2RM4001905, NT2RM4001922, NT2RM4001938, NT2RM4001953, NT2RM4001965, NT2RM4001984, NT2RM4002018, NT2RM4002044, NT2RM4002128, NT2RM4002140, NT2RM4002256, NT2RM4002266, NT2RM4002281, NT2RM4002294, NT2RM4002301, NT2RM4002344, NT2RM4002373, NT2RM4002374, NT2RM4002383, NT2RM4002390, NT2RM4002398, NT2RM4002420, NT2RM4002457, NT2RM4002504, NT2RM4002534, NT2RM4002567, NT2RM4002593, NT2RP1000063, NT2RP1000112, NT2RP1000124, NT2RP1000170, NT2RP1000243, NT2RP1000259, NT2RP1000324, NT2RP1000357, NT2RP1000409, NT2RP1000416, NT2RP1000581, NT2RP1000688, NT2RP1000695, NT2RP1000721, NT2RP1000730, NT2RP1000796, NT2RP1000836, NT2RP1000846, NT2RP1000851, NT2RP1000916, NT2RP1000943, NT2RP1000944, NT2RP1000980, NT2RP1000988, NT2RP1001014, NT2RP1001173, NT2RP1001199, NT2RP1001248, NT2RP1001424, NT2RP1001432, NT2RP1001466, NT2RP1001475, NT2RP1001616, NT2RP2000001, NT2RP2000007, NT2RP2000027, NT2RP2000079, NT2RP2000088, NT2RP2000097, NT2RP2000098, NT2RP2000108, NT2RP2000198, NT2RP2000205, NT2RP2000208, NT2RP2000232, NT2RP2000233, NT2RP2000239, NT2RP2000274, NT2RP2000298, NT2RP2000327, NT2RP2000328, NT2RP2000337, NT2RP2000369, NT2RP2000412, NT2RP2000438, NT2RP2000498, NT2RP2000503, NT2RP2000510, NT2RP2000551, NT2RP2000603, NT2RP2000617, NT2RP2000634, NT2RP2000644, NT2RP2000656, NT2RP2000658, NT2RP2000678, NT2RP2000704, NT2RP2000715, NT2RP2000758, NT2RP2000819, NT2RP2000841, NT2RP2000845, NT2RP2000863, NT2RP2000938, NT2RP2000970, NT2RP2000985, NT2RP2001036, NT2RP2001044, NT2RP2001056, NT2RP2001065, NT2RP2001094, NT2RP2001119, NT2RP2001137, NT2RP2001149, NT2RP2001173, NT2RP2001196, NT2RP2001214, NT2RP2001218, NT2RP2001226, NT2RP2001312, NT2RP2001328, NT2RP2001347, NT2RP2001381, NT2RP2001427, NT2RP2001450, NT2RP2001467, NT2RP2001506, NT2RP2001628, NT2RP2001675, NT2RP2001677, NT2RP2001678, NT2RP2001720, NT2RP2001721, NT2RP2001813, NT2RP2001861, NT2RP2001907, NT2RP2001936, NT2RP2001943, NT2RP2001946, NT2RP2001969, NT2RP2002032, NT2RP2002033, NT2RP2002041, NT2RP2002047, NT2RP2002056, NT2RP2002076, NT2RP2002154, NT2RP2002172, NT2RP2002219, NT2RP2002231, NT2RP2002235, NT2RP2002292, NT2RP2002316, NT2RP2002333, NT2RP2002373, NT2RP2002426, NT2RP2002439, NT2RP2002475, NT2RP2002498, NT2RP2002546, NT2RP2002549, NT2RP2002621, NT2RP2002672, NT2RP2002677, NT2RP2002706, NT2RP2002736, NT2RP2002752, NT2RP2002753, NT2RP2002755, NT2RP2002769, NT2RP2002800, NT2RP2002843, NT2RP2002891, NT2RP2002954, NT2RP2002979, NT2RP2003034, NT2RP2003073, NT2RP2003099, NT2RP2003101, NT2RP2003108, NT2RP2003117, NT2RP2003161, NT2RP2003165, NT2RP2003194, NT2RP2003206, NT2RP2003237, NT2RP2003280, NT2RP2003293, NT2RP2003339, NT2RP2003367, NT2RP2003393, NT2RP2003445, NT2RP2003456, NT2RP2003511, NT2RP2003533, NT2RP2003559, NT2RP2003567, NT2RP2003581, NT2RP2003687, NT2RP2003691, NT2RP2003727, NT2RP2003751, NT2RP2003764, NT2RP2003769, NT2RP2003793, NT2RP2003799, NT2RP2003825, NT2RP2003885, NT2RP2003976, NT2RP2003984, NT2RP2003986, NT2RP2003988, NT2RP2004042, NT2RP2004081, NT2RP2004095, NT2RP2004124, NT2RP2004152, NT2RP2004165, NT2RP2004207, NT2RP2004226, NT2RP2004316, NT2RP2004321, NT2RP2004339, NT2RP2004347, NT2RP2004364, NT2RP2004365, NT2RP2004373, NT2RP2004399, NT2RP2004400, NT2RP2004412, NT2RP2004463, NT2RP2004490, NT2RP2004523, NT2RP2004551, NT2RP2004580, NT2RP2004594, NT2RP2004600, NT2RP2004602, NT2RP2004614, NT2RP2004664, NT2RP2004675, NT2RP2004709, NT2RP2004743, NT2RP2004767, NT2RP2004802, NT2RP2004841, NT2RP2004861, NT2RP2004897, NT2RP2004962, NT2RP2004982, NT2RP2004999, NT2RP2005000, NT2RP2005001, NT2RP2005018, NT2RP2005020, NT2RP2005022, NT2RP2005031, NT2RP2005147, NT2RP2005254, NT2RP2005287, NT2RP2005453, NT2RP2005454, NT2RP2005464, NT2RP2005472, NT2RP2005495, NT2RP2005501, NT2RP2005540, NT2RP2005555, NT2RP2005600, NT2RP2005622, NT2RP2005637, NT2RP2005640, NT2RP2005645, NT2RP2005683, NT2RP2005690, NT2RP2005726, NT2RP2005732, NT2RP2005741, NT2RP2005748, NT2RP2005804, NT2RP2005806, NT2RP2005815, NT2RP2005853, NT2RP2005859, NT2RP2005868, NT2RP2005882, NT2RP2005886, NT2RP2005890, NT2RP2005901, NT2RP2005980, NT2RP2006023, NT2RP2006038, NT2RP2006052, NT2RP2006103, NT2RP2006106, NT2RP2006166, NT2RP2006186, NT2RP2006196, NT2RP2006200, NT2RP2006237, NT2RP2006258, NT2RP2006321, NT2RP2006333, NT2RP2006334, NT2RP2006365, NT2RP2006393, NT2RP2006441, NT2RP2006454, NT2RP2006467, NT2RP2006472, NT2RP2006554, NT2RP3000002, NT2RP3000055, NT2RP3000072, NT2RP3000080, NT2RP3000142, NT2RP3000149, NT2RP3000197, NT2RP3000220, NT2RP3000235, NT2RP3000247, NT2RP3000251, NT2RP3000267, NT2RP3000312, NT2RP3000324, NT2RP3000348, NT2RP3000418, NT2RP3000449, NT2RP3000451, NT2RP3000456, NT2RP3000484, NT2RP3000526, NT2RP3000542, NT2RP3000561, NT2RP3000584, NT2RP3000592, NT2RP3000599, NT2RP3000622, NT2RP3000628, NT2RP3000644, NT2RP3000661, NT2RP3000665, NT2RP3000690, NT2RP3000736, NT2RP3000836, NT2RP3000841, NT2RP3000850, NT2RP3000859, NT2RP3000865, NT2RP3000901, NT2RP3000980, NT2RP3001004, NT2RP3001007, NT2RP3001109, NT2RP3001115, NT2RP3001116, NT2RP3001119, NT2RP3001133, NT2RP3001232, NT2RP3001236, NT2RP3001245, NT2RP3001274, NT2RP3001281, NT2RP3001297, NT2RP3001318, NT2RP3001325, NT2RP3001356, NT2RP3001374, NT2RP3001392, NT2RP3001396, NT2RP3001420, NT2RP3001432, NT2RP3001447, NT2RP3001449, NT2RP3001459, NT2RP3001607, NT2RP3001608, NT2RP3001621, NT2RP3001629, NT2RP3001676, NT2RP3001678, NT2RP3001698, NT2RP3001752, NT2RP3001777, NT2RP3001844, NT2RP3001896, NT2RP3001915, NT2RP3001929, NT2RP3002033, NT2RP3002063, NT2RP3002097, NT2RP3002099, NT2RP3002102, NT2RP3002142, NT2RP3002146, NT2RP3002147, NT2RP3002166, NT2RP3002173, NT2RP3002181, NT2RP3002244, NT2RP3002248, NT2RP3002255, NT2RP3002276, NT2RP3002304, NT2RP3002343, NT2RP3002402, NT2RP3002484, NT2RP3002512, NT2RP3002545, NT2RP3002566, NT2RP3002587, NT2RP3002590, NT2RP3002603, NT2RP3002659, NT2RP3002660, NT2RP3002713, NT2RP3002763, NT2RP3002799, NT2RP3002861, NT2RP3002877, NT2RP3002911, NT2RP3002955, NT2RP3003121, NT2RP3003139, NT2RP3003150, NT2RP3003155, NT2RP3003157, NT2RP3003204, NT2RP3003210, NT2RP3003264, NT2RP3003344, NT2RP3003346, NT2RP3003377, NT2RP3003403, NT2RP3003427, NT2RP3003433, NT2RP3003543, NT2RP3003552, NT2RP3003564, NT2RP3003572, NT2RP3003625, NT2RP3003656, NT2RP3003680, NT2RP3003686, NT2RP3003795, NT2RP3003805, NT2RP3003819, NT2RP3003833, NT2RP3003842, NT2RP3003870, NT2RP3003932, NT2RP3003989, NT2RP3004028, NT2RP3004041, NT2RP3004070, NT2RP3004093, NT2RP3004095, NT2RP3004145, NT2RP3004215, NT2RP3004246, NT2RP3004253, NT2RP3004332, NT2RP3004341, NT2RP3004349, NT2RP3004451, NT2RP3004466, NT2RP3004470, NT2RP3004539, NT2RP4000023, NT2RP4000035, NT2RP4000049, NT2RP4000102, NT2RP4000150, NT2RP4000159, NT2RP4000167, NT2RP4000185, NT2RP4000218, NT2RP4000355, NT2RP4000360, NT2RP4000381, NT2RP4000424, NT2RP4000448, NT2RP4000480, NT2RP4000515, NT2RP4000517, NT2RP4000519, NT2RP4000541, NT2RP4000638, NT2RP4000704, NT2RP4000728, NT2RP4000739, NT2RP4000955, NT2RP4000975, NT2RP4000984, NT2RP4001006, NT2RP4001100, NT2RP4001210, NT2RP4001343, NT2RP4001353, NT2RP4001442, NT2RP4001447, NT2RP4001502, NT2RP4001507, NT2RP4001524, NT2RP4001610, NT2RP4001614, NT2RP4001679, NT2RP4001828, NT2RP4001841, NT2RP4001901, NT2RP4001953, NT2RP4002071, NT2RP4002083, NT2RP4002298, NT2RP4002888, NT2RP5003492, NT2RP5003512, NT2RP5003524, OVARC1000008, OVARC1000017, OVARC1000035, OVARC1000058, OVARC1000068, OVARC1000092, OVARC1000109, OVARC1000113, OVARC1000114, OVARC1000145, OVARC1000168, OVARC1000198, OVARC1000212, OVARC1000240, OVARC1000302, OVARC1000321, OVARC1000347, OVARC1000384, OVARC1000408, OVARC1000411, OVARC1000414, OVARC1000420, OVARC1000440, OVARC1000442, OVARC1000443, OVARC1000461, OVARC1000466, OVARC1000496, OVARC1000533, OVARC1000557, OVARC1000576, OVARC1000578, OVARC1000588, OVARC1000605, OVARC1000622, OVARC1000640, OVARC1000661, OVARC1000678, OVARC1000681, OVARC1000703, OVARC1000724, OVARC1000730, OVARC1000781, OVARC1000787, OVARC1000802, OVARC1000883, OVARC1000886, OVARC1000891, OVARC1000912, OVARC1000960, OVARC1000964, OVARC1000971, OVARC1001000, OVARC1001004, OVARC1001110, OVARC1001011, OVARC1001029, OVARC1001032, OVARC1001040, OVARC1001044, OVARC1001072, OVARC1001074, OVARC1001118, OVARC11001161, OVARC1001162, OVARC11001167, OVARC1001169, OVARC1001170, OVARC1001173, OVARC1001176, OVARC1001188, OVARC1001240, OVARC1001243, OVARC1001261, OVARC1001270, OVARC1001296, OVARC1001339, OVARC1001341, OVARC1001344, OVARC1001357, OVARC1001360, OVARC1001369, OVARC1001376, OVARC1001399, OVARC1001425, OVARC1001442, OVARC1001480, OVARC1001489, OVARC1001525, OVARC1001600, OVARC1001611, OVARC1001768, OVARC1001791, OVARC1001795, OVARC1001802, OVARC1001813, OVARC1001828, OVARC1001846, OVARC1001861, OVARC1001873, OVARC1001879, OVARC1001880, OVARC1001883, OVARC1001916, OVARC1001928, OVARC1001950, OVARC1002082, OVARC1002107, OVARC1002143, PLACE1000005, PLACE1000048, PLACE1000078, PLACE1000094, PLACE1000214, PLACE1000236, PLACE1000246, PLACE1000292, PLACE1000308, PLACE1000332, PLACE1000347, PLACE1000374, PLACE1000380, PLACE1000435, PLACE1000444, PLACE1000453, PLACE1000564, PLACE1000599, PLACE1000716, PLACE1000748, PLACE1000749, PLACE1000785, PLACE1000798, PLACE1000814, PLACE1000849, PLACE1000856, PLACE1000931, PLACE1001000, PLACE1001007, PLACE1001010, PLACE1001015, PLACE1001024, PLACE1001076, PLACE1001088, PLACE1001136, PLACE1001168, PLACE1001185, PLACE1001280, PLACE1001311, PLACE1001323, PLACE1001351, PLACE1001366, PLACE1001395, PLACE1001399, PLACE1001412, PLACE1001414, PLACE1001440, PLACE1001456, PLACE1001484, PLACE1001503, PLACE1001545, PLACE1001570, PLACE1001608, PLACE1001634, PLACE1001640, PLACE1001705, PLACE1001720, PLACE1001729, PLACE1001740, PLACE1001745, PLACE1001746, PLACE1001799, PLACE1001810, PLACE1001897, PLACE1001912, PLACE1001928, PLACE1002004, PLACE1002066, PLACE1002072, PLACE1002115, PLACE1002157, PLACE1002163, PLACE1002170, PLACE1002227, PLACE1002256, PLACE1002259, PLACE1002319, PLACE1002342, PLACE1002465, PLACE1002477, PLACE1002514, PLACE1002529, PLACE1002537, PLACE1002578, PLACE1002625, PLACE1002768, PLACE1002772, PLACE1002815, PLACE1002839, PLACE1002853, PLACE1002941, PLACE1002962, PLACE1002968, PLACE1002993, PLACE1002996, PLACE1003025, PLACE1003027, PLACE1003092, PLACE1003108, PLACE1003145, PLACE1003200, PLACE1003205, PLACE1003249, PLACE1003256, PLACE1003342, PLACE1003343, PLACE1003361, PLACE1003373, PLACE1003375, PLACE1003383, PLACE1003454, PLACE1003478, PLACE1003516, PLACE1003528, PLACE1003566, PLACE1003584, PLACE1003592, PLACE1003593, PLACE1003618, PLACE1003638, PLACE1003711, PLACE1003762, PLACE1003784, PLACE1003795, PLACE1003864, PLACE1003870, PLACE1003886, PLACE1003892, PLACE1003900, PLACE1003936, PLACE1004114, PLACE1004118, PLACE1004156, PLACE1004161, PLACE1004274, PLACE1004284, PLACE1004336, PLACE1004376, PLACE1004384, PLACE1004388, PLACE1004405, PLACE1004425, PLACE1004451, PLACE1004491, PLACE1004516, PLACE1004518, PLACE1004548, PLACE1004645, PLACE1004664, PLACE1004672, PLACE1004681, PLACE1004686, PLACE1004691, PLACE1004693, PLACE1004716, PLACE1004722, PLACE1004736, PLACE1004740, PLACE1004815, PLACE1004824, PLACE1004836, PLACE1004838, PLACE1004885, PLACE1004900, PLACE1004913, PLACE1004934, PLACE1004979, PLACE1004982, PLACE1004985, PLACE1005026, PLACE1005027, PLACE1005046, PLACE1005055, PLACE1005077, PLACE1005085, PLACE1005101, PLACE1005108, PLACE1005111, PLACE1005128, PLACE1005146, PLACE1005181, PLACE1005232, PLACE1005261, PLACE1005266, PLACE1005277, PLACE1005308, PLACE1005335, PLACE1005374, PLACE1005409, PLACE1005453, PLACE1005477, PLACE1005480, PLACE1005481, PLACE1005550, PLACE1005554, PLACE1005574, PLACE1005603, PLACE1005639, PLACE1005730, PLACE1005755, PLACE1005799, PLACE1005802, PLACE1005828, PLACE1005850, PLACE1005851, PLACE1005923, PLACE1005925, PLACE1005932, PLACE1005936, PLACE1005968, PLACE1005990, PLACE1006002, PLACE1006017, PLACE1006037, PLACE1006076, PLACE1006129, PLACE1006139, PLACE1006143, PLACE1006159, PLACE1006195, PLACE1006236, PLACE1006246, PLACE1006248, PLACE1006325, PLACE1006357, PLACE1006360, PLACE1006371, PLACE1006382, PLACE1006412, PLACE1006414, PLACE1006445, PLACE1006470, PLACE1006521, PLACE1006598, PLACE1006617, PLACE1006640, PLACE1006673, PLACE1006704, PLACE1006760, PLACE1006779, PLACE1006782, PLACE1006792, PLACE1006795, PLACE1006805, PLACE1006815, PLACE1006867, PLACE1006883, PLACE1006932, PLACE1006961, PLACE1006962, PLACE1006966, PLACE1007021, PLACE1007045, PLACE1007053, PLACE1007068, PLACE1007097, PLACE1007112, PLACE1007178, PLACE1007218, PLACE1007238, PLACE1007242, PLACE1007301, PLACE1007342, PLACE1007367, PLACE1007402, PLACE1007450, PLACE1007452, PLACE1007454, PLACE1007460, PLACE1007478, PLACE1007507, PLACE1007524, PLACE1007557, PLACE1007618, PLACE1007621, PLACE1007677, PLACE1007690, PLACE1007725, PLACE1007730, PLACE1007737, PLACE1007743, PLACE1007746, PLACE1007807, PLACE1007810, PLACE1007843, PLACE1007846, PLACE1007858, PLACE1007866, PLACE1007990, PLACE1008002, PLACE1008045, PLACE1008095, PLACE1008122, PLACE1008129, PLACE1008181, PLACE1008209, PLACE1008231, PLACE1008280, PLACE1008329, PLACE1008369, PLACE1008392, PLACE1008401, PLACE1008405, PLACE1008455, PLACE1008457, PLACE1008488, PLACE1008524, PLACE1008584, PLACE1008621, PLACE1008625, PLACE1008626, PLACE1008629, PLACE1008630, PLACE1008748, PLACE1008757, PLACE1008798, PLACE1008851, PLACE1008854, PLACE1008867, PLACE1008887, PLACE1008902, PLACE1008925, PLACE1008941, PLACE1008947, PLACE1009039, PLACE1009048, PLACE1009050, PLACE1009090, PLACE1009091, PLACE1009110, PLACE1009111, PLACE1009150, PLACE1009166, PLACE1009174, PLACE1009190, PLACE1009200, PLACE1009230, PLACE1009328, PLACE1009335, PLACE1009375, PLACE1009388, PLACE1009410, PLACE1009434, PLACE1009459, PLACE1009539, PLACE1009542, PLACE1009581, PLACE1009595, PLACE1009607, PLACE1009621, PLACE1009637, PLACE1009665, PLACE1009794, PLACE1009886, PLACE1009888, PLACE1009921, PLACE1009947, PLACE1009971, PLACE1009995, PLACE1010023, PLACE1010031, PLACE1010069, PLACE1010076, PLACE1010102, PLACE1010106, PLACE1010202, PLACE1010270, PLACE1010274, PLACE1010293, PLACE1010324, PLACE1010329, PLACE1010364, PLACE1010383, PLACE1010401, PLACE1010491, PLACE1010492, PLACE1010562, PLACE1010616, PLACE1010624, PLACE1010629, PLACE1010630, PLACE1010714, PLACE1010786, PLACE1010800, PLACE1010802, PLACE1010856, PLACE1010857, PLACE1010877, PLACE1010900, PLACE1010916, PLACE1010925, PLACE1010944, PLACE1010947, PLACE1010965, PLACE1011026, PLACE1011032, PLACE1011054, PLACE1011057, PLACE1011133, PLACE1011143, PLACE1011165, PLACE1011273, PLACE1011291, PLACE1011325, PLACE1011452, PLACE1011465, PLACE1011472, PLACE1011503, PLACE1011520, PLACE1011563, PLACE1011567, PLACE1011643, PLACE1011649, PLACE1011650, PLACE1011675, PLACE1011682, PLACE1011719, PLACE1011725, PLACE1011729, PLACE1011874, PLACE1011875, PLACE1011891, PLACE1011982, PLACE2000003, PLACE2000006, PLACE2000007, PLACE2000017, PLACE2000047, PLACE2000050, PLACE2000061, PLACE2000097, PLACE2000100, PLACE2000103, PLACE2000115, PLACE2000124, PLACE2000140, PLACE2000170, PLACE2000172, PLACE2000223, PLACE2000235, PLACE2000302, PLACE2000317, PLACE2000347, PLACE2000359, PLACE2000366, PLACE2000394, PLACE2000433, PLACE2000450, PLACE2000455, PLACE3000070, PLACE3000103, PLACE3000119, PLACE3000136, PLACE3000142, PLACE3000148, PLACE3000155, PLACE3000156, PLACE3000157, PLACE3000158, PLACE3000160, PLACE3000194, PLACE3000197, PLACE3000199, PLACE3000207, PLACE3000208, PLACE3000221, PLACE3000230, PLACE3000271, PLACE3000276, PLACE3000304, PLACE3000310, PLACE3000320, PLACE3000322, PLACE3000331, PLACE3000341, PLACE3000352, PLACE3000353, PLACE3000362, PLACE3000363, PLACE3000365, PLACE3000388, PLACE3000401, PLACE3000402, PLACE3000405, PLACE3000425, PLACE3000475, PLACE4000089, PLACE4000093, PLACE4000106, PLACE4000131, PLACE4000147, PLACE4000222, PLACE4000252, PLACE4000270, PLACE4000320, PLACE4000323, PLACE4000344, PLACE4000367, PLACE4000392, PLACE4000411, PLACE4000445, PLACE4000465, PLACE4000521, PLACE4000590, PLACE4000612, PLACE4000638, PLACE4000670, THYRO1000026, THYRO1000070, THYRO1000092, THYRO1000107, THYRO1000111, THYRO1000124, THYRO1000186, THYRO1000187, THYRO1000199, THYRO1000206, THYRO1000241, THYRO1000253, THYRO1000270, THYRO1000279, THYRO1000320, THYRO1000368, THYRO1000381, THYRO1000387, THYRO1000452, THYRO1000471, THYRO1000484, THYRO1000502, THYRO1000505, THYRO1000558, THYRO1000596, THYRO1000625, THYRO1000637, THYRO1000676, THYRO1000712, THYRO1000715, THYRO1000734, THYRO1000777, THYRO1000787, THYRO1000793, THYRO1000796, THYRO1000805, THYRO1000815, THYRO1000843, THYRO1000855, THYRO1000865, THYRO1000895, THYRO1000916, THYRO1000952, THYRO1000988, THYRO1001031, THYRO1001062, THYRO1001133, THYRO1001142, THYRO1001173, THYRO1001213, THYRO1001262, THYRO1001321, THYRO1001322, THYRO1001363, THYRO1001365, THYRO1001403, THYRO1001411, THYRO1001426, THYRO1001434, THYRO1001480, THYRO1001487, THYRO1001559, THYRO1001570, THYRO1001584, THYRO1001595, THYRO1001602, THYRO1001605, THYRO1001637, THYRO1001673, THYRO1001706, THYRO1001745, THYRO1001746, THYRO1001772, THYRO1001793, THYRO1001854, THYRO1001895, THYRO1001907, VESEN1000122, Y79AA1000065, Y79AA1000131, Y79AA1000202, Y79AA1000230, Y79AA1000355, Y79AA1000410, Y79AA1000480, Y79AA1000539, Y79AA1000574, Y79AA1000774, Y79AA1000802, Y79AA1000805, Y79AA1000824, Y79AA1000827, Y79AA1000850, Y79AA1000969, Y79AA1001041, Y79AA1001061, Y79AA1001068, Y79AA1001077, Y79AA1001078, Y79AA1001145, Y79AA1001167, Y79AA1001185, Y79AA1001216, Y79AA1001228, Y79AA1001281, Y79AA1001511, Y79AA1001541, Y79AA1001555, Y79AA1001585, Y79AA1001665, Y79AA1001696, Y79AA1001781, Y79AA1001805, Y79AA1002089, Y79AA1002115, Y79AA1002125, Y79AA1002220, Y79AA1002234, Y79AA1002298, Y79AA1002407, MAMMA1002215, MAMMA1002721, NT2RP2002070,

Homology Search Result Data 1.

[0702] The result of the homology search of the SwissProt using the 5′-end sequence.

[0703] Data include

[0704] the name of clone,

[0705] definition of the top hit data,

[0706] the P-value: the length of the compared sequence: identity (%), and

[0707] the organism and the Accession No. of the top hit data, as in the order separated by //.

[0708] Data are not shown for the clones in which the P-value was higher than 1.

[0709] The P-value is a score obtained statistically by taking into account the possible similarity between two sequences. In general, the smaller P-value reflects the higher similarity. (Altschul, S. F., Gish, W., Miller, W., Myers, E. W. &amp; Lipman, D. J. (1990) &quot; Basic local alignment search tool.&quot; J. Mol. Biol. 215:403-410; Gish, W. &amp; States, D. J. (1993) &quot; Identification of protein coding regions by database similarity search.&quot; Nature Genet. 3:266-272).

[0710] F-HEMBA1000005//DNAJ PROTEIN HOMOLOG MTJ1.//1.8e-85:244:75//MUS MUSCULUS (MOUSE).//Q61712

[0711] F-HEMBA1000012//PROBABLE LEUCYL-TRNA SYNTHETASE (EC 6.1.1.4) (LEUCINE-TRNA LIGASE) (LEURS).//7.6e-57:231:53//CAENORHABDITIS ELEGANS.//Q09996

[0712] F-HEMBA1000020//TUBULIN BETA CHAIN.//1.0e-92:143:80//AJELLOMYCES CAPSULATA (HISTOPLASMA CAPSULATUM).//P41742

[0713] F-HEMBA1000030//CIRCUMSPOROZOITE PROTEIN PRECURSOR (CS).//0.021:136:33//PLASMODIUM KNOWLESI (STRAIN NURI).//P04922

[0714] F-HEMBA1000042//METALLOTHIONEIN 10-II (MT-10-II).//0.71:64:32//MYTILUS EDULIS (BLUE MUSSEL).//P80247

[0715] F-HEMBA1000046//PROTEIN Q300.//0.92:40:37//MUS MUSCULUS (MOUSE).//Q02722

[0716] F-HEMBA1000050//COMPETENCE PROTEIN S.//0.50:28:35//BACILLUS SUBTILIS.//P80355

[0717] F-HEMBA1000076//ATP SYNTHASE E CHAIN, MITOCHONDRIAL (EC 3.6.1.34).//0.86:41:41//HOMO SAPIENS (HUMAN).//P56385

[0718] F-HEMBA1000111

[0719] F-HEMBA1000129//UVSW PROTEIN (DAR PROTEIN).//0.023:68:33//BACTERIOPHAGE T4.//P20703

[0720] F-HEMBA1000141//YSY6 PROTEIN.//0.90:29:37//SACCHAROMYCES CEREVISIAE (BAKER'S YEAST).//P38374

[0721] F-HEMBA1000150//!!!! ALU SUBFAMILY SP WARNING ENTRY !!!!//8.4e-16:47:70//HOMO SAPIENS (HUMAN).//P39193

[0722] F-HEMBA1000156//IMMEDIATE-EARLY PROTEIN.//8.1e-07:143:28//HERPESVIRUS SAIMIRI (STRAIN 11).//Q01042

[0723] F-HEMBA1000158//HYPOTHETICAL PROTEIN KIAA0192 (FRAGMENT).//7.9e-11:129:40//HOMO SAPIENS (HUMAN).//Q93074

[0724] F-HEMBA1000168//INSULIN RECEPTOR SUBSTRATE-2 (IRS-2) (4PS).//0.00055:86:36//MUS MUSCULUS (MOUSE).//P81122

[0725] F-HEMBA1000180//VPU PROTEIN (U ORF PROTEIN).//0.22:73:28//CHIMPANZEE IMMUNODEFICIENCY VIRUS (SIV(CPZ)) (CIV).//P17286

[0726] F-HEMBA1000185//RAS-1 PROTEIN.//5.1e-10:121:29//NEUROSPORA CRASSA.//P22126

[0727] F-HEMBA1000193//PROLINE-RICH PEPTIDE P-B.//0.00078:56:41//HOMO SAPIENS (HUMAN).//P02814

[0728] F-HEMBA1000201//PROLINE-RICH PROTEIN MP-2 PRECURSOR.//0.00061:49:42//MUS MUSCULUS (MOUSE).//P05142

[0729] F-HEMBA1000213

[0730] F-HEMBA1000216//HYPOXIA-INDUCIBLE FACTOR 1 ALPHA (HIF-1 ALPHA) (ARNT INTERACTING PROTEIN).//1.6e-59:115:53//MUS MUSCULUS (MOUSE).//Q61221

[0731] F-HEMBA1000227//SUPPRESSOR PROTEIN SRP40.//0.00059:135:22//SACCHAROMYCES CEREVISIAE (BAKER'S YEAST).//P32583

[0732] F-HEMBA1000231//HYPOTHETICAL 60.7 KD PROTEIN C56F8.17C IN CHROMOSOME I.//0.024:60:38//SCHIZOSACCHAROMYCES POMBE (FISSION YEAST).//Q10264

[0733] F-HEMBA1000243//LINE-1 REVERSE TRANSCRIPTASE HOMOLOG.//0.0038:125:34//HOMO SAPIENS (HUMAN).//P08547

[0734] F-HEMBA1000244//HYPOTHETICAL 123.6 KD PROTEIN IN POR2-COX5B INTERGENIC REGION.//3.1e-17:149:36//SACCHAROMYCES CEREVISIAE (BAKER'S YEAST).//P40480

[0735] F-HEMBA1000251

[0736] F-HEMBA1000264//PROBABLE E5 PROTEIN.//1.0:49:36//HUMAN PAPILLOMAVIRUS TYPE 58.//P26552

[0737] F-HEMBA1000280//SHORT NEUROTOXIN 1 (TOXIN C-6).//0.98:58:31//NAJA NAJA KAOUTHIA (MONOCLED COBRA) (NAJA NAJA SIAMENSIS).//P14613

[0738] F-HEMBA1000282//!!!! ALU SUBFAMILY J WARNING ENTRY !!!!//0.14:26:65//HOMO SAPIENS (HUMAN).//P39188

[0739] F-HEMBA1000288

[0740] F-HEMBA1000290//HYPOTHETICAL 14 KD PROTEIN IN TVRI-6 REPETITIVE REGION.//3.8e-06:98:39//HOMO SAPIENS (HUMAN).//P10516

[0741] F-HEMBA1000302

[0742] F-HEMBA1000303//HYPOTHETICAL 104.4 KD PROTEIN F54G8.4 IN CHROMOSOME III.//1.3e-05:69:42//CAENORHABDITIS ELEGANS.//Q03601

[0743] F-HEMBA1000304//!!!! ALU SUBFAMILY SQ WARNING ENTRY !!!!//0.021:18:83//HOMO SAPIENS (HUMAN).//P39194

[0744] F-HEMBA1000307//MYOSIN HEAVY CHAIN, CLONE 203 (FRAGMENT).//7.1e-06:235:25//HYDRA ATTENUATA (HYDRA) (HYDRA VULGARIS).//P39922

[0745] F-HEMBA1000327

[0746] F-HEMBA1000333//SRP1 PROTEIN.//1.0:159:30//SCHIZOSACCHAROMYCES POMBE (FISSION YEAST).//Q10193

[0747] F-HEMBA1000338//!!!! ALU SUBFAMILY SP WARNING ENTRY !!!!//8.8e-26:36:83//HOMO SAPIENS (HUMAN).//P39193

[0748] F-HEMBA1000351

[0749] F-HEMBA1000355//BASIC PROLINE-RICH PEPTIDE P-E (IB-9).//0.99:22:50//HOMO SAPIENS (HUMAN).//P02811

[0750] F-HEMBA1000356//IMMEDIATE-EARLY PROTEIN IE180.//0.11:82:36//PSEUDORABIES VIRUS (STRAIN INDIANA-FUNKHAUSER/BECKER) (PRV).//P11675

[0751] F-HEMBA1000357//!!!! ALU SUBFAMILY SC WARNING ENTRY !!!!//2.1e-35:105:74//HOMO SAPIENS (HUMAN).//P39192

[0752] F-HEMBA1000366//HYPOTHETICAL TRANSCRIPTIONAL REGULATOR AF 1627./11.0:28:42//ARCHAEOGLOBUS FULGIDUS.//O28646

[0753] F-HEMBA1000369//PRESYNAPTIC DENSITY PROTEIN 95 (PSD-95).//0.013:140:26//HOMO SAPIENS (HUMAN).//P78352

[0754] F-HEMBA1000376//RETROVIRUS-RELATED POL POLYPROTEIN [CONTAINS: REVERSE TRANSCRIPTASE (EC 2.7.7.49); ENDONUCLEASE].//6.8e-08:66:42//MUS MUSCULUS (MOUSE).//P11369

[0755] F-HEMBA1000387//HYPOTHETICAL 63.2 KD PROTEIN C1F3.09 IN CHROMOSOME I.//1.5e-15:177:32//SCHIZOSACCHAROMYCES POMBE (FISSION YEAST).//Q10414

[0756] F-HEMBA1000390//PARATHYMOSIN.//0.0071:61:29//HOMO SAPIENS (HUMAN).//P20962

[0757] F-HEMBA1000392//!!!! ALU SUBFAMILY SQ WARNING ENTRY !!!!//2.1e-30:92:69//HOMO SAPIENS (HUMAN).//P39194

[0758] F-HEMBA1000396//LINE-1 REVERSE TRANSCRIPTASE HOMOLOG.//3.9e-23:64:57//HOMO SAPIENS (HUMAN).//P08547

[0759] F-HEMBA1000411

[0760] F-HEMBA1000418

[0761] F-HEMBA1000422//!!!! ALU SUBFAMILY J WARNING ENTRY !!!!//8.3e-10:90:53//HOMO SAPIENS (HUMAN).//P39188

[0762] F-HEMBA1000428//LINE-1 REVERSE TRANSCRIPTASE HOMOLOG.//3.1e-12:72:55//HOMO SAPIENS (HUMAN).//P08547

[0763] F-HEMBA1000434

[0764] F-HEMBA1000442//GENE 11 PROTEIN.//1.0:28:46//SPIROPLASMA VIRUS SPV1-R8A2B.//P15902

[0765] F-HEMBA1000456//26S PROTEASOME REGULATORY SUBUNIT MTS4 (19S REGULATORY CAP REGION OF 26S PROTEASE SUBUNIT 2).//0.077:118:28//SCHIZOSACCHAROMYCES POMBE (FISSION YEAST).//P87048

[0766] F-HEMBA1000459//HEME-REGULATED EUKARYOTIC INITIATION FACTOR EIF-2-ALPHA KINASE (EC 2.7.1.-) (HRI).//4.8e-62:102:78//ORYCTOLAGUS CUNICULUS (RABBIT).//P33279

[0767] F-HEMBA1000460//LYSIS PROTEIN (E PROTEIN) (GPE).//1.0:24:50//BACTERIOPHAGE ALPHA-3.//P31280

[0768] F-HEMBA1000464

[0769] F-HEMBA1000469//PILI PROTEIN.//1.0:27:44//PSEUDOMONAS AERUGINOSA.//P43502

[0770] F-HEMBA1000488//ZINC FINGER PROTEIN 151 (MIZ-1 PROTEIN).//1.1e-07:90:38//HOMO SAPIENS (HUMAN).//Q13105

[0771] F-HEMBA1000490//PLECTIN.//0.74:254:25//RATTUS NORVEGICUS (RAT).//P30427

[0772] F-HEMBA1000491//RAS-RELATED PROTEIN M-RAS .//3.0e-14:100:36//RATTUS NORVEGICUS (RAT).//P97538

[0773] F-HEMBA1000501//!!!! ALU SUBFAMILY SQ WARNING ENTRY !!!!//1.5e-20:81:54//HOMO SAPIENS (HUMAN).//P39194

[0774] F-HEMBA1000504

[0775] F-HEMBA1000505//NEURON-SPECIFIC X11 PROTEIN (FRAGMENT).//0.00028:128:32//HOMO SAPIENS (HUMAN).//Q02410

[0776] F-HEMBA1000508//CHITIN SYNTHASE 3 (EC 2.4.1.16) (CHITIN-UDP ACETYL-GLUCOSAMINYL TRANSFERASE 3).//0.61:132:25//SACCHAROMYCES CEREVISIAE (BAKER'S YEAST).//P29465

[0777] F-HEMBA1000518

[0778] F-HEMBA1000519//!!!! ALU SUBFAMILY SB WARNING ENTRY !!!!//1.8e-37:68:75//HOMO SAPIENS (HUMAN).//P39189

[0779] F-HEMBA1000520//!!!! ALU SUBFAMILY SC WARNING ENTRY !!!!//5.2e-09:75:49//HOMO SAPIENS (HUMAN).//P39192

[0780] F-HEMBA1000523//TESTIS-SPECIFIC PROTEIN PBS 13.//1.5e-35:257:36//MUS MUSCULUS (MOUSE).//Q01755

[0781] F-HEMBA1000531//HEAT SHOCK PROTEIN 70 B2.1/1.6e-14:72:44//ANOPHELES ALBIMANUS (NEW WORLD MALARIA MOSQUITO).//P41827

[0782] F-HEMBA1000534//!!!! ALU SUBFAMILY SP WARNING ENTRY !!!!/19.7e-32:96:78//HOMO SAPIENS (HUMAN).//P39193

[0783] F-HEMBA1000540//LANTIBIOTIC LACTICIN 481 PRECURSOR (LACTOCOCCIN DR).//1.0:12:75//LACTOCOCCUS LACTIS (SUBSP. LACTIS) (STREPTOCOCCUS LACTIS).//P36499

[0784] F-HEMBA1000542//SPERM MITOCHONDRIAL CAPSULE SELENOPROTEIN (MCS).//0.0089:79:31//MUS MUSCULUS (MOUSE).//P15265

[0785] F-HEMBA1000545//LINE-1 REVERSE TRANSCRIPTASE HOMOLOG.//9.0e-83:256:66//HOMO SAPIENS (HUMAN).//P08547

[0786] F-HEMBA1000555//TRANSLATION INITIATION FACTOR IF-2.//3.6e-06:252:22//SACCHAROMYCES CEREVISIAE (BAKER'S YEAST).//P39730

[0787] F-HEMBA1000557

[0788] F-HEMBA1000561//ZINC FINGER PROTEIN 81 (FRAGMENT).//9.1e-18:200:28//HOMO SAPIENS (HUMAN).//P51508

[0789] F-HEMBA1000563

[0790] F-HEMBA1000568

[0791] F-HEMBA1000569//GPI-ANCHORED PROTEIN P137.//1.0e-40:137:54//HOMO SAPIENS (HUMAN).//Q14444

[0792] F-HEMBA1000575

[0793] F-HEMBA1000588

[0794] F-HEMBA1000591//!!!! ALU SUBFAMILY SQ WARNING ENTRY !!!!//3.1e-17:41:92//HOMO SAPIENS (HUMAN).//P39194

[0795] F-HEMBA1000592//CENTROMERIC PROTEIN E (CENP-E PROTEIN).//0.18:128:23//HOMO SAPIENS (HUMAN).//Q02224

[0796] F-HEMBA1000594//HYPOTHETICAL 29.3 KD PROTEIN B0280.6 IN CHROMOSOME III.//0.93:24:54//CAENORHABDITIS ELEGANS.//P41997

[0797] F-HEMBA1000604//!!!! ALU SUBFAMILY J WARNING ENTRY !!!!//0.00010:49:55//HOMO SAPIENS (HUMAN).//P39188

[0798] F-HEMBA1000608//HYPOTHETICAL PROTEIN KIAA0411 (FRAGMENT).//1.8e-55:179:61//HOMO SAPIENS (HUMAN).//O43295

[0799] F-HEMBA1000622//!!!! ALU SUBFAMILY J WARNING ENTRY !!!!//1.1e-21:94:62//HOMO SAPIENS (HUMAN).//P39188

[0800] F-HEMBA1000636//SULFATED SURFACE GLYCOPROTEIN 185 (SSG 185).//0.34:73:36//VOLVOX CARTERI.//P21997

[0801] F-HEMBA1000637//BASIC PROLINE-RICH PEPTIDE IB-1.//0.0057:76:38//HOMO SAPIENS (HUMAN).//P04281

[0802] F-HEMBA1000655

[0803] F-HEMBA1000657//ZINC FINGER PROTEIN GCS 1.//1.5e-07:66:37//SACCHAROMYCES CEREVISIAE (BAKER'S YEAST).//P35197

[0804] F-HEMBA1000662//METALLOTHIONEIN-II (MT-II).//0.79:33:39//CRICETULUS GRISEUS (CHINESE HAMSTER).//P02799

[0805] F-HEMBA1000673//!!!! ALU SUBFAMILY SP WARNING ENTRY !!!!//3.1e-17:86:59//HOMO SAPIENS (HUMAN).//P39193

[0806] F-HEMBA1000682//RETROVIRUS-RELATED POL POLYPROTEIN [CONTAINS: REVERSE TRANSCRIPTASE (EC 2.7.7.49); ENDONUCLEASE].//3.0e-13:45:44//MUS MUSCULUS (MOUSE).//P1369

[0807] F-HEMBA1000686//HYPOTHETICAL 48.0 KD PROTEIN C1B3.08 IN CHROMOSOME I.//4.5e-07:79:34//SCHIZOSACCHAROMYCES POMBE (FISSION YEAST).//O13873

[0808] F-HEMBA1000702

[0809] F-HEMBA1000705//PROTEIN Q300.//0.80:25:44//MUS MUSCULUS (MOUSE).//Q02722

[0810] F-HEMBA1000719//MYOSIN IC HEAVY CHAIN.//0.0026:115:44//ACANTHAMOEBA CASTELLANII (AMOEBA).//P10569

[0811] F-HEMBA1000722

[0812] F-HEMBA1000726//!!!! ALU SUBFAMILY SB2 WARNING ENTRY !!!!//7.4e-32:83:77//HOMO SAPIENS (HUMAN).//P39191

[0813] F-HEMBA1000727//ZINC FINGER PROTEIN CTH2 (YTIS11 PROTEIN).//0.73:26:46//SACCHAROMYCES CEREVISIAE (BAKER'S YEAST).//P47977

[0814] F-HEMBA1000747

[0815] F-HEMBA1000749//HYPOTHETICAL PROTEIN HI1484.1/1.0:42:35//HAEMOPHILUS INFLUENZAE.//P44211

[0816] F-HEMBA1000752//RETROVIRUS-RELATED ENV POLYPROTEIN.//1.0e-08:84:39//HOMO SAPIENS (HUMAN).//P10267

[0817] F-HEMBA1000769

[0818] F-HEMBA1000773//PAIRED BOX PROTEIN PAX-4.//1.0:107:33//HOMO SAPIENS (HUMAN).//O43316

[0819] F-HEMBA1000774//!!!! ALU SUBFAMILY J WARNING ENTRY !!!!//1.3e-23:92:63//HOMO SAPIENS (HUMAN).//P39188

[0820] F-HEMBA1000791

[0821] F-HEMBA1000817//PROLACTIN RECEPTOR PRECURSOR (PRL-R).//0.079:87:29//CERVUS ELAPHUS (RED DEER).//Q28235

[0822] F-HEMBA1000822

[0823] F-HEMBA1000827//HYPOTHETICAL 8.4 KD PROTEIN.//0.98:48:39//VACCINIA VIRUS (STRAIN COPENHAGEN).//P20546

[0824] F-HEMBA1000843//HYPOTHETICAL 7.3 KD PROTEIN D1044.5 IN CHROMOSOME III.//0.92:46:34//CAENORHABDITIS ELEGANS.//P41953

[0825] F-HEMBA1000851//HOMEOBOX PROTEIN GBX-2 (GASTRULATION AND BRAIN-SPECIFIC HOMEOBOX PROTEIN 2).//0.048:39:51//HOMO SAPIENS (HUMAN).//P52951

[0826] F-HEMBA1000852//ARYLSULFATASE D PRECURSOR (EC 3.1.6.-) (ASD).//4.0e-24:29:100//HOMO SAPIENS (HUMAN).//P51689

[0827] F-HEMBA1000867

[0828] F-HEMBA1000869//PROBABLE E5 PROTEIN.//0.99:70:27//HUMAN PAPILLOMAVIRUS TYPE 18.//P06792

[0829] F-HEMBA1000870//MYOTOXIN 3 PRECURSOR (CROTAMINE 3).//0.79:43:32//CROTALUS DURISSUS TERRIFICUS (SOUTH AMERICAN RATTLESNAKE).//P24333

[0830] F-HEMBA1000872//GAR2 PROTEIN.//0.89:70:31//SCHIZOSACCHAROMYCES POMBE (FISSION YEAST).//P41891

[0831] F-HEMBA1000876//DEFENSIN.//0.89:34:38//ALLOMYRINA DICHOTOMA.//Q10745

[0832] F-HEMBA1000908//DNA-BINDING P52/P100 COMPLEX, 100 KD SUBUNIT (FRAGMENTS).//0.69:43:37//HOMO SAPIENS (HUMAN).//P30808

[0833] F-HEMBA1000910//MELANOMA-ASSOCIATED ANTIGEN B3 (MAGE-B3 ANTIGEN).//5.1e-08:44:38//HOMO SAPIENS (HUMAN).//O15480

[0834] F-HEMBA1000918//60S RIBOSOMAL PROTEIN L37-A (YL35) (FRAGMENT).//1.0:19:52//SCHIZOSACCHAROMYCES POMBE (FISSION YEAST).//P22667

[0835] F-HEMBA1000919//69 KD PARAFLAGELLAR ROD PROTEIN (69 KD PFR PROTEIN) (PFR-A/PFR-B).//0.29:116:30//TRYPANOSOMA BRUCEI BRUCEI.//P22225

[0836] F-HEMBA1000934

[0837] F-HEMBA1000942//!!!! ALU SUBFAMILY J WARNING ENTRY !!!!//0.85:27:59//HOMO SAPIENS (HUMAN).//P39188

[0838] F-HEMBA1000943

[0839] F-HEMBA1000946//STO-2 PROTEIN.//0.82:82:30//CAENORHABDITIS ELEGANS.//Q19958

[0840] F-HEMBA1000960//!!!! ALU SUBFAMILY SC WARNING ENTRY !!!!//0.0097:29:72//HOMO SAPIENS (HUMAN).//P39192

[0841] F-HEMBA1000968//METALLOTHIONEIN 20-III ISOFORMS A AND B (MT-20-IIIA AND MT-20-IIIB).//0.047:45:37//MYTILUS EDULIS (BLUE MUSSEL).//P80253

[0842] F-HEMBA1000971//HYPOTHETICAL BHLF1 PROTEIN.//0.038:172:31//EPSTEIN-BARR VIRUS (STRAIN B95-8) (HUMAN HERPESVIRUS 4).//P03181

[0843] F-HEMBA1000972

[0844] F-HEMBA1000974//HYPOTHETICAL PROTEIN MG441.//0.98:66:28//MYCOPLASMA GENITALIUM.//P47679

[0845] F-HEMBA1000975//COLLAGEN ALPHA 2(VIII) CHAIN (ENDOTHELIAL COLLAGEN) (FRAGMENT).//0.028:57:36//HOMO SAPIENS (HUMAN).//P25067

[0846] F-HEMBA1000985

[0847] F-HEMBA1000986//SUBMANDIBULAR GLAND SECRETORY GLX-RICH PROTEIN CB PRECURSOR (GRP-CB) (CONTIGUOUS REPEAT POLYPEPTIDE) (CRP).//0.13:91:34//RATTUS NORVEGICUS (RAT).//P08462

[0848] F-HEMBA1000991//HYPOTHETICAL 46.2 KD TRP-ASP REPEATS CONTAINING PROTEIN D2013.2 IN CHROMOSOME II.//5.6e-05:37:45//CAENORHABDITIS ELEGANS.//Q18964

[0849] F-HEMBA1001007//HYPOTHETICAL PROTEIN KIAA0179.//0.27:72:41//HOMO SAPIENS (HUMAN).//Q14684

[0850] F-HEMBA1001008//!!!! ALU SUBFAMILY SQ WARNING ENTRY !!!!//2.4e-25:61:70//HOMO SAPIENS (HUMAN).//P39194

[0851] F-HEMBA1001009//CUTICLE COLLAGEN 34.//0.044:214:29//CAENORHABDITIS ELEGANS.//P34687

[0852] F-HEMBA1001017//SYNDECAN-3 PRECURSOR (N-SYNDECAN) (NEUROGLYCAN).//5.0e-85:191:84//RATTUS NORVEGICUS (RAT).//P33671

[0853] F-HEMBA1001019

[0854] F-HEMBA1001020//!!!! ALU SUBFAMILY J WARNING ENTRY !!!!//6.7e-24:49:73//HOMO SAPIENS (HUMAN).//P39188

[0855] F-HEMBA1001022

[0856] F-HEMBA1001024//LINE-1 REVERSE TRANSCRIPTASE HOMOLOG.//3.0e-11:61:59//HOMO SAPIENS (HUMAN).//P08547

[0857] F-HEMBA1001026//HYPOTHETICAL PROTEIN BB0073.//0.94:63:34//BORRELIA BURGDORFERI (LYME DISEASE SPIROCHETE).//O51100

[0858] F-HEMBA1001043//INVOLUCRIN.//0.0036:238:25//SAGUINUS OEDIPUS (COTTON-TOP TAMARIN).//P24712

[0859] F-HEMBA1001051//!!!! ALU SUBFAMILY SB WARNING ENTRY !!!!//3.3e-32:95:75//HOMO SAPIENS (HUMAN).//P39189

[0860] F-HEMBA1001052//CURROMYCIN RESISTANCE PROTEIN.//1.0:31:38//STREPTOMYCES HYGROSCOPICUS.//P16961

[0861] F-HEMBA1001059//N-ACETYLGALACTOSAMINE-6-SULFATASE PRECURSOR (EC 3.1.6.4) (N- ACETYLGALACTOSAMINE-6-SULFATE SULFATASE) (GALACTOSE-6-SULFATE SULFATASE) (GALNAC6S SULFATASE) (CHONDROITINSULFATASE) (CHONDROITINASE).//3.2e-132:249:94//HOMO SAPIENS (HUMAN).//P34059

[0862] F-HEMBA1001060

[0863] F-HEMBA1001071//PROCOLLAGEN ALPHA 1(III) CHAIN PRECURSOR.//8.3e-23:51:96//HOMO SAPIENS (HUMAN).//P02461

[0864] F-HEMBA1001077//AUTOIMMUNE REGULATOR (APECED PROTEIN).//3.4e-06:37:56//HOMO SAPIENS (HUMAN).//O43918

[0865] F-HEMBA1001080//INFECTED CELL PROTEIN ICP34.5 (NEUROVIRULENCE FACTOR ICP34.5).//0.0012:70:38//HERPES SIMPLEX VIRUS (TYPE 1/STRAIN MGH-10).//P37319

[0866] F-HEMBA1001085//SERINE/THREONINE PROTEIN PHOSPHATASE 5 (EC 3.1.3.16) (PP5) (PROTEIN PHOSPHATASE T) (PPT) (FRAGMENT).//0.00018:76:32//MUS MUSCULUS (MOUSE).//Q60676

[0867] F-HEMBA1001088//PINCH PROTEIN (PARTICULARY INTERESTING NEW CYS-HIS PROTEIN).//3.5e-50:176:57//HOMO SAPIENS (HUMAN).//P48059

[0868] F-HEMBA1001094

[0869] F-HEMBA1001099//LIGHT-HARVESTING PROTEIN B800/850/890, ALPHA-2 CHAIN (EHA-ALPHA-2) (ANTENNA PIGMENT PROTEIN, ALPHA-2 CHAIN) (FRAGMENT).//1.0:15:60//ECTOTHIORHODOSPIRA HALOPHILA.//P80101

[0870] F-HEMBA1001109//!!!! ALU SUBFAMILY SB WARNING ENTRY !!!!//6.7e-37:102:82//HOMO SAPIENS (HUMAN).//P39189

[0871] F-HEMBA1001121//LINE-1 REVERSE TRANSCRIPTASE HOMOLOG.//0.036:49:46//HOMO SAPIENS (HUMAN).//P08547

[0872] F-HEMBA1001122

[0873] F-HEMBA1001123

[0874] F-HEMBA1001133//HYPOTHETICAL 9.4 KD PROTEIN (ORF2).//0.86:29:41//FELINE IMMUNODEFICIENCY VIRUS (ISOLATE SAN DIEGO) (FIV), AND FELINE IMMUNODEFICIENCY VIRUS (ISOLATE PETALUMA) (FIV).//P19033

[0875] F-HEMBA1001137//ZINC FINGER PROTEIN 84 (ZINC FINGER PROTEIN HPF2).//2.0e-22:103:52//HOMO SAPIENS (HUMAN).//P51523

[0876] F-HEMBA1001140//COLLAGEN ALPHA 4(IV) CHAIN PRECURSOR.//0.032:94:36//HOMO SAPIENS (HUMAN).//P53420

[0877] F-HEMBA1001172

[0878] F-HEMBA1001174//ADP-RIBOSYLATION FACTOR-LIKE PROTEIN 5.//2.9e-78:179:79//RATTUS NORVEGICUS (RAT).//P51646

[0879] F-HEMBA1001197//MAJOR PRION PROTEIN PRECURSOR (PRP) (PRP27-30) (PRP33-35C) (FRAGMENT).//0.051:96:32//CERCOCEBUS ATERRIMUS, AND MACACA SYLVANUS (BARBARY APE).//Q95145

[0880] F-HEMBA1001208

[0881] F-HEMBA1001213

[0882] F-HEMBA1001226//PROTEASOME COMPONENT C8 (EC 3.4.99.46) (MACROPAIN SUBUNIT C8) (MULTICATALYTIC ENDOPEPTIDASE COMPLEX SUBUNIT C8).//1.5e-08:24:91//HOMO SAPIENS (HUMAN).//P25788

[0883] F-HEMBA1001235//FIBRONECTIN (FN) (FRAGMENT).//0.76:50:38//ORYCTOLAGUS CUNICULUS (RABBIT).//Q28749

[0884] F-HEMBA1001247//SULFATED SURFACE GLYCOPROTEIN 185 (SSG 185).//0.00052:16:81//VOLVOX CARTERI.//P21997

[0885] F-HEMBA1001257//2-ARYLPROPIONYL-COA EPIMERASE (EC 5.-.-.-).//1.6e-68:178:77//RATTUS NORVEGICUS (RAT).//P70473

[0886] F-HEMBA1001265//MANNAN ENDO-1,4-BETA-MANNOSIDASE A PRECURSOR (EC 3.2.1.78) (BETA-MANNANASE A) (1,4-BETA-D-MANNAN MANNANOHYDROLASE A).//0.67:23:60//PIROMYCES SP.//P55296

[0887] F-HEMBA1001281//HYPOTHETICAL 8.9 KD PROTEIN YCF34 (ORF76).//0.83:48:35//PORPHYRA PURPUREA.//P51229

[0888] F-HEMBA1001286//COMPLEMENT DECAY-ACCELERATING FACTOR PRECURSOR.//1.3e-07:185:29//CAVIA PORCELLUS (GUINEA PIG).//Q60401

[0889] F-HEMBA1001289//METABOTROPIC GLUTAMATE RECEPTOR 3 PRECURSOR.//0.00018:159:30//RATTUS NORVEGICUS (RAT).//P31422

[0890] F-HEMBA1001294

[0891] F-HEMBA1001299//!!!! ALU SUBFAMILY SX WARNING ENTRY !!!!//5.3e-07:27:77//HOMO SAPIENS (HUMAN).//P39195

[0892] F-HEMBA1001302//45 KD CALCIUM-BINDING PROTEIN PRECURSOR (STROMAL CELL-DERIVED FACTOR 4) (SDF-4).//3.3e-61:150:76//MUS MUSCULUS (MOUSE).//Q61112

[0893] F-HEMBA1001303

[0894] F-HEMBA1001310//HYPOTHETICAL PROTEIN KIAA0161.//2.7e-10:170:27//HOMO SAPIENS (HUMAN).//P50876

[0895] F-HEMBA1001319

[0896] F-HEMBA1001323

[0897] F-HEMBA1001326//HYPOTHETICAL 55.1 KD PROTEIN IN FAB1-PES4 INTERGENIC REGION.//1.1e-39:144:38//SACCHAROMYCES CEREVISIAE (BAKER'S YEAST).//P43601

[0898] F-HEMBA1001327

[0899] F-HEMBA1001330

[0900] F-HEMBA1001351//VESICLE-ASSOCIATED MEMBRANE PROTEIN/SYNAPTOBREVIN BINDING PROTEIN (VAP-33).//1.9e-37:155:46//APLYSIA CALIFORNICA (CALIFORNIA SEA HARE).//Q16943

[0901] F-HEMBA1001361//RUBREDOXIN (RD).//0.95:44:29//ALCALIGENES EUTROPHUS.//P31912

[0902] F-HEMBA1001375//AEROLYSIN REGULATORY PROTEIN.//0.013:45:33//AEROMONAS SOBRIA.//P09165

[0903] F-HEMBA1001377//SPERM PROTAMINE P1.//1.0:22:40//PLANIGALE MACULATA SINUALIS (COMMON PLANIGALE).//O18746

[0904] F-HEMBA1001383//TAT PROTEIN (TRANSACTIVATING REGULATORY PROTEIN).//0.60:37:29//HUMAN IMMUNODEFICIENCY VIRUS TYPE 1 (Z2/CDC-Z34 ISOLATE) (HIV-1).//P12506

[0905] F-HEMBA1001387//GTP-BINDING PROTEIN TC10.//6.6e-43:83:92//HOMO SAPIENS (HUMAN).//P17081

[0906] F-HEMBA1001388//HYPOTHETICAL PROTEIN KIAA0136 (FRAGMENT).//0.00088:46:45//HOMO SAPIENS (HUMAN).//Q14149

[0907] F-HEMBA1001391

[0908] F-HEMBA1001398//CLOACIN (EC 3.1.-.-) (RIBONUCLEASE).//1.0:59:37//ESCHERICHIA COLI.//P00645

[0909] F-HEMBA1001405//SMALL PROLINE RICH PROTEIN II (SPR-II) (CLONE 930).//0.25:41:34//HOMO SAPIENS (HUMAN).//P22531

[0910] F-HEMBA1001407//SALIVARY PROLINE-RICH PROTEIN PRECURSOR (CLONES CP3, CP4 AND CP5) [CONTAINS: BASIC PEPTIDE IB-6; PEPTIDE P-H].//4.0e-09:129:40//HOMO SAPIENS (HUMAN).//P04280

[0911] F-HEMBA1001411//HYPOTHETICAL 34.9 KD PROTEIN IN CYSJ-ENO INTERGENIC REGION (O313).//0.95:88:31//ESCHERICHIA COLI.//P55140

[0912] F-HEMBA1001413//SOX-12 PROTEIN (FRAGMENT).//0.95:46:32//MUS MUSCULUS (MOUSE).//Q04890

[0913] F-HEMBA1001415//HISTONE H5.//0.43:95:29//GALLUS GALLUS (CHICKEN).//P02259

[0914] F-HEMBA1001432//LANTIBIOTIC NISIN A PRECURSOR.//0.77:46:32//LACTOCOCCUS LACTIS (SUBSP. LACTIS) (STREPTOCOCCUS LACTIS).//P13068

[0915] F-HEMBA1001433//LINE-1 REVERSE TRANSCRIPTASE HOMOLOG.//4.8e-09:132:31//NYCTICEBUS COUCANG (SLOW LORIS).//P08548

[0916] F-HEMBA1001435//!!!! ALU SUBFAMILY SB WARNING ENTRY !!!!//1.2e-31:84:77//HOMO SAPIENS (HUMAN).//P39189

[0917] F-HEMBA1001442

[0918] F-HEMBA1001446//ANTIFREEZE PEPTIDE 4 PRECURSOR.//0.71:41:39//PSEUDOPLEURONECTA AMERICANUS (WINTER FLOUNDER).//P02734

[0919] F-HEMBA1001450//PROLINE-RICH PROTEIN LAS 17.//0.13:127:27//SACCHAROMYCES CEREVISIAE (BAKER'S YEAST).//Q12446

[0920] F-HEMBA1001454//ATP SYNTHASE PROTEIN 8 (EC 3.6.1.34) (A6L).//0.57:38:47//HANSENULA WINGEI (YEAST).//P48882

[0921] F-HEMBA1001455//CHEMOTAXIS PROTEIN CHEA (EC 2.7.3.-).//0.98:124:25//BORRELIA BURGDORFERI (LYME DISEASE SPIROCHETE).//Q44737

[0922] F-HEMBA1001463//!!!! ALU SUBFAMILY SQ WARNING ENTRY !!!!//2.8e-32:62:67//HOMO SAPIENS (HUMAN).//P39194

[0923] F-HEMBA1100476//NUCLEOPORIN NUP159 (NUCLEAR PORE PROTEIN NUP159).//6.8e-09:252:36//SACCHAROMYCES CEREVISIAE (BAKER'S YEAST).//P40477

[0924] F-HEMBA1001478

[0925] F-HEMBA1001497//!!!! ALU SUBFAMILY SQ WARNING ENTRY !!!!//1.2e-33:105:72//HOMO SAPIENS (HUMAN).//P39194

[0926] F-HEMBA1001510//!!!! ALU SUBFAMILY SB WARNING ENTRY !!!!//8.3e-37:54:81//HOMO SAPIENS (HUMAN).//P39189

[0927] F-HEMBA1001515//LINE-1 REVERSE TRANSCRIPTASE HOMOLOG.//2.0e-63:223:57//HOMO SAPIENS (HUMAN).//P08547

[0928] F-HEMBA1001517

[0929] F-HEMBA1001522//TROPOMYOSIN ALPHA CHAIN, SMOOTH MUSCLE.//0.78:150:22//COTURNIX COTURNIX JAPONICA (JAPANESE QUAIL).//P49437

[0930] F-HEMBA1001526//PERIPLASMIC [FE] HYDROGENASE 1 (EC 1.18.99.1).//1.6e-06:130:29//CLOSTRIDIUM PASTEURIANUM.//P29166

[0931] F-HEMBA1001533//PROBABLE E5A PROTEIN.//0.73:35:37//HUMAN PAPILLOMAVIRUS TYPE 6A.//Q84296

[0932] F-HEMBA1001557//HYPOTHETICAL 17.1 KD PROTEIN IN PUR5 3′REGION.//1.5e-07:99:36//SACCHAROMYCES CEREVISIAE (BAKER'S YEAST).//P38898

[0933] F-HEMBA1001566//HYPOTHETICAL PROTEIN BB0692.//0.91:27:44//BORRELIA BURGDORFERI (LYME DISEASE SPIROCHETE).//O51635

[0934] F-HEMBA1001569//SYNAPTOBREVIN 2 (VESICLE ASSOCIATED MEMBRANE PROTEIN 2) (VAMP-2).//2.2e-50:110:95//HOMO SAPIENS (HUMAN), AND BOS TAURUS (BOVINE).//P19065

[0935] F-HEMBA1001570//!!!! ALU SUBFAMILY SX WARNING ENTRY !!!!//3.3e-33:107:72//HOMO SAPIENS (HUMAN).//P39195

[0936] F-HEMBA1001579//RING CANAL PROTEIN (KELCH PROTEIN).1/1.2e-14:111:39//DROSOPHILA MELANOGASTER (FRUIT FLY).//Q04652

[0937] F-HEMBA1001581

[0938] F-HEMBA1001585

[0939] F-HEMBA1001589//PROBABLE DNA-BINDING PROTEIN (AGNOPROTEIN).//0.98:51:33//HUMAN ADENOVIRUS TYPE 2.//P03263

[0940] F-HEMBA1001595//SEPTIN 2 HOMOLOG (FRAGMENT).//3.0e-124:274:85//HOMO SAPIENS (HUMAN).//Q14141

[0941] F-HEMBA1001608//RENAL SODIUM/DICARBOXYLATE COTRANSPORTER (NA(+)/DICARBOXYLATE COTRANSPORTER).//0.99:28:39//ORYCTOLAGUS CUNICULUS (RABBIT).//Q28615

[0942] F-HEMBA1001620//MYO-INOSITOL-1-PHOSPHATE SYNTHASE (EC 5.5.1.4) (IPS).//4.3e-45:222:46//SPIRODELA POLYRRHIZA.//P42803

[0943] F-HEMBA1001635//FIBRILLARIN.//0.10:72:38//CAENORHABDITIS ELEGANS.//Q22053

[0944] F-HEMBA1001636//PAIRED BOX PROTEIN PAX-8, ISOFORMS 8C/8D.//0.75:38:47//HOMO SAPIENS (HUMAN).//Q09155

[0945] F-HEMBA1001640//!!!! ALU SUBFAMILY J WARNING ENTRY !!!!//4.7e-06:80:41//HOMO SAPIENS (HUMAN).//P39188

[0946] F-HEMBA1001647//TRANSCRIPTION INITIATION FACTOR TFIID 135 KD SUBUNIT (TAFII-135) (TAFII135) (TAFII-130) (TAFII130).//0.075:165:32//HOMO SAPIENS (HUMAN).//O00268

[0947] F-HEMBA1001651//GOLGIN-95.//6.8e-05:141:24//HOMO SAPIENS (HUMAN).//Q08379

[0948] F-HEMBA1001655//PROLINE-RICH PROTEIN LAS 17.//0.19:97:30//SACCHAROMYCES CEREVISIAE (BAKER'S YEAST).//Q12446

[0949] F-HEMBA1001658//TETRAHYDROMETHANOPTERIN S-METHYLTRANSFERASE 12 KD SUBUNIT (EC 2.1.1.86) (N5-METHYLTETRAHYDROMETHANOPTERIN-COENZYME M METHYLTRANSFERASE 12 KD SUBUNIT).//1.0:29:44//METHANOBACTERIUM THERMOAUTOTROPHICUM (STRAIN MARBURG/DSM 2133).//Q50773

[0950] F-HEMBA1001661//CELLULOSE COMPLEMENTING PROTEIN.//0.35:87:33//ACETOBACTER XYLINUM (ACETOBACTER PASTEURIANUS).//P37697

[0951] F-HEMBA1001672//CIRCUMSPOROZOITE PROTEIN PRECURSOR (CS).//2.7e-10:216:35//PLASMODIUM CYNOMOLGI (STRAIN BEROK).//P08672

[0952] F-HEMBA1001675//NODULIN 20 PRECURSOR (N-20).//0.98:36:44//GLYCINE MAX (SOYBEAN).//P08960

[0953] F-HEMBA1001678//!!!! ALU SUBFAMILY SX WARNING ENTRY !!!!//8.2e-13:62:64//HOMO SAPIENS (HUMAN).//P39195

[0954] F-HEMBA1001681//HYPOTHETICAL 41.5 KD PROTEIN IN P6.5-VP48 INTERGENIC REGION (P40) (ORF3) (ORF102).//1.0:51:39//ORGYIA PSEUDOTSUGATA MULTICAPSID POLYHEDROSIS VIRUS (OPMNPV).//P24653

[0955] F-HEMBA1001702//ATP SYNTHASE A CHAIN (EC 3.6.1.34) (PROTEIN 6).//0.017:54:37//TRYPANOSOMA BRUCEI BRUCEI.//P24499

[0956] F-HEMBA1001709//HYPOTHETICAL 21.2 KD PROTEIN IN TOR2-MNN4 INTERGENIC REGION.//0.59:109:35//SACCHAROMYCES CEREVISIAE (BAKER'S YEAST).//P36042

[0957] F-HEMBA1001711

[0958] F-HEMBA1100712//HYPOTHETICAL 6.9 KD PROTEIN IN 100 KD PROTEIN REGION.//0.54:44:34//HUMAN ADENOVIRUS TYPE 41.//P23690

[0959] F-HEMBA1001714//ATPASE INHIBITOR, MITOCHONDRIAL PRECURSOR.//1.2e-19:60:75//RATTUS NORVEGICUS (RAT).//Q03344

[0960] F-HEMBA1001718//HYPOTHETICAL PROTEIN UL63.//1.0:54:37//HUMAN CYTOMEGALOVIRUS (STRAIN AD 169).//P16820

[0961] F-HEMBA1001723//HYPOTHETICAL 34.0 KD TRP-ASP REPEATS CONTAINING PROTEIN IN SIS1-MRPL2 INTERGENIC REGION.//5.1e-26:90:53//SACCHAROMYCES CEREVISIAE (BAKER'S YEAST).//P41318

[0962] F-HEMBA1001731//HYPOTHETICAL 16.6 KD PROTEIN.//0.71:49:32//AVIAN INFECTIOUS BURSAL DISEASE VIRUS (STRAIN 52/70) (IBDV).//P25221

[0963] F-HEMBA1001734

[0964] F-HEMBA1001744//SCY1 PROTEIN.//2.1e-11:182:29//SACCHAROMYCES CEREVISIAE (BAKER'S YEAST).//P53009

[0965] F-HEMBA1001745//HYPOTHETICAL 11.6 KD PROTEIN IN NUT1-ARO2 INTERGENIC REGION PRECURSOR.//1.0:36:38//SACCHAROMYCES CEREVISIAE (BAKER'S YEAST).//P53116

[0966] F-HEMBA1001746//PROTEIN-EXPORT MEMBRANE PROTEIN SECG HOMOLOG.//0.94:48:35//MYCOBACTERIUM LEPRAE.//P38388

[0967] F-HEMBA1001761

[0968] F-HEMBA1001781//ZINC FINGER PROTEIN 19 (ZINC FINGER PROTEIN KOX12) (FRAGMENT).//0.028:47:40//HOMO SAPIENS (HUMAN).//P17023

[0969] F-HEMBA1001784//HYPOTHETICAL 6.1 KD PROTEIN C03B1.10 IN CHROMOSOME X.//0.00068:32:46//CAENORHABDITIS ELEGANS.//Q11116

[0970] F-HEMBA1001791//METALLOTHIONEIN (MT).//1.0:34:35//PLEURONECTES PLATESSA (PLAICE).//P07216

[0971] F-HEMBA1001800//ZINC FINGER PROTEIN MFG-1 (ZINC FINGER PROTEIN 58) (FRAGMENT).//1.5e-14:60:48//MUS MUSCULUS (MOUSE).//P16372

[0972] F-HEMBA1001803

[0973] F-HEMBA1100804//GLYCINE-RICH CELL WALL STRUCTURAL PROTEIN 1 PRECURSOR.//9.3e-17:56:57//ORYZA SATIVA (RICE).//P25074

[0974] F-HEMBA1001808//PARANEOPLASTIC ENCEPHALOMYELITIS ANTIGEN HUD HOMOLOG (HU-ANTIGEN D).//0.75:97:31//RATTUS NORVEGICUS (RAT).//O09032

[0975] F-HEMBA1001809//IMMEDIATE-EARLY PROTEIN IE180.//4.5e-11:206:36//PSEUDORABIES VIRUS (STRAIN INDIANA-FUNKHAUSER/BECKER) (PRV).//P11675

[0976] F-HEMBA1001815//60S RIBOSOMAL PROTEIN L37-B (YL27) (FRAGMENT).//0.34:30:30//SCHIZOSACCHAROMYCES POMBE (FISSION YEAST).M/P05733

[0977] F-HEMBA1001819//ZINC FINGER PROTEIN 135.//2.6e-102:262:66//HOMO SAPIENS (HUMAN).//P52742

[0978] F-HEMBA1001820

[0979] F-HEMBA1001822//EPIDERMAL GROWTH FACTOR RECEPTOR SUBSTRATE SUBSTRATE 15 (PROTEIN EPS15).//1.2e-18:251:33//MUS MUSCULUS (MOUSE).//P42567

[0980] F-HEMBA1100824//KERATIN, ULTRA HIGH-SULFUR MATRIX PROTEIN (UHS KERATIN).//4.7e-11:124:37//OVIS ARIES (SHEEP).//P26372

[0981] F-HEMBA1001835

[0982] F-HEMBA1001844//!!!! ALU SUBFAMILY SX WARNING ENTRY !!!!//4.3e-14:36:63//HOMO SAPIENS (HUMAN).//P39195

[0983] F-HEMBA1001847//ZINC FINGER PROTEIN 29 (ZFP-29).//2.7e-36:135:51//MUS MUSCULUS (MOUSE).//Q07230

[0984] F-HEMBA1001861

[0985] F-HEMBA1001864//HEAT-STABLE ENTEROTOXIN A3/A4 PRECURSOR (STA3/STA4) (ST-IB) (ST-H).//1.0:31:38//ESCHERICHIA COLI.//P07965

[0986] F-HEMBA1001866//UDP-GLUCOSE: GLYCOPROTEIN GLUCOSYLTRANSFERASE PRECURSOR (EC 2.4.1.-) (DUGT).//9.7e-42:234:41//DROSOPHILA MELANOGASTER (FRUIT FLY).//Q09332

[0987] F-HEMBA1001869//HYPOTHETICAL 94.9 KD PROTEIN C22E12.11C IN CHROMOSOME I.//5.3e-13:65:47//SCHIZOSACCHAROMYCES POMBE (FISSION YEAST).//Q10362

[0988] F-HEMBA1001888//HYPOTHETICAL 11.4 KD PROTEIN (ORF1).//0.85:62:37//STREPTOMYCES FRADIAE.//P26800

[0989] F-HEMBA1001896//DIMETHYLGLYCINE DEHYDROGENASE PRECURSOR (EC 1.5.99.2) (ME2GLYDH).//9.8e-20:250:29//RATTUS NORVEGICUS (RAT).//Q63342

[0990] F-HEMBA1001910//EUKARYOTIC TRANSLATION INITIATION FACTOR 4E (EIF-4E) (EIF4E) (MRNA CAP-BINDING PROTEIN) (EIF-4F 25 KD SUBUNIT).//0.94:44:38//CAENORHABDITIS ELEGANS.//O61955

[0991] F-HEMBA1001912//!!!! ALU SUBFAMILY J WARNING ENTRY !!!!//8.7e-07:53:62//HOMO SAPIENS (HUMAN).//P39188

[0992] F-HEMBA1001913//GCN20 PROTEIN.//1.8e-21:68:60//SACCHAROMYCES CEREVISIAE (BAKER'S YEAST).//P43535

[0993] F-HEMBA1001915//KLEE PROTEIN (KCRB3 PROTEIN).//0.94:64:21//ESCHERICHIA COLI.//Q52280

[0994] F-HEMBA1001918

[0995] F-HEMBA1001921

[0996] F-HEMBA1001939//CHLOROPLAST 50S RIBOSOMAL PROTEIN L24.//1.0:47:31//ODONTELLA SINENSIS.//P49560

[0997] F-HEMBA1001940//!!!! ALU SUBFAMILY J WARNING ENTRY !!!!//0.0017:31:77//HOMO SAPIENS (HUMAN).//P39188

[0998] F-HEMBA1001942//HIBERNATION-ASSOCIATED PLASMA PROTEIN HP-27 PRECURSOR (HIBERNATOR-SPECIFIC BLOOD COMPLEX, 27 KD SUBUNIT).//1.0:77:28//TAMIAS ASIATICUS (CHIPMUNK).//Q06577

[0999] F-HEMBA1001945//HYPOTHETICAL 4.6 KD PROTEIN IN GP47-AGT INTERGENIC REGION (ORF E).//1.0:35:37//BACTERIOPHAGE T4.//P32269

[1000] F-HEMBA1001950//ATP SYNTHASE PROTEIN 8 (EC 3.6.1.34) (A6L).//0.43:18:44//DROSOPHILA YAKUBA (FRUIT FLY).//P03933

[1001] F-HEMBA1001960//HOMEOBOX PROTEIN HOX-C5 (HOX-3D) (CP11).//0.17:12:66//HOMO SAPIENS (HUMAN).//Q00444

[1002] F-HEMBA1001962//HYPOTHETICAL 9.0 KD PROTEIN IN ADH4 5′REGION.//1.0:30:36//SACCHAROMYCES CEREVISIAE (BAKER'S YEAST).//P53056

[1003] F-HEMBA1001964

[1004] F-HEMBA1001967//HYPOTHETICAL PROTEIN UL61.//0.027:111:36//HUMAN CYTOMEGALOVIRUS (STRAIN AD169).//P16818

[1005] F-HEMBA1001979

[1006] F-HEMBA1001987//HYPOTHETICAL 11.2 KD PROTEIN (ORF 117).//1.0:83:32//ORGYIA PSEUDOTSUGATA MULTICAPSID POLYHEDROSIS VIRUS (OPMNPV).//O10356

[1007] F-HEMBA1001991//NEUROTOXIN 1 (TOXIN ATX-1).//0.99:31:45//ANEMONIA SULCATA (SNAKE-LOCKS SEA ANEMONE).//P01533

[1008] F-HEMBA1002003//GLYCERALDEHYDE 3-PHOSPHATE DEHYDROGENASE, TESTIS-SPECIFIC (EC 1.2.1.12) (GAPDH).//5.5e-07:109:32//MUS MUSCULUS (MOUSE).//Q64467

[1009] F-HEMBA1002008

[1010] F-HEMBA1002018//EC PROTEIN HOMOLOG 2 (FRAGMENT).//0.83:66:33//ARABIDOPSIS THALIANA (MOUSE-EAR CRESS).//Q42377

[1011] F-HEMBA1002022//INSULIN.//1.0:59:32//SQUALUS ACANTHIAS (SPINY DOGFISH).//P12704

[1012] F-HEMBA1002035//MONOCYTIC LEUKEMIA ZINC FINGER PROTEIN.//8.3e-15:64:40//HOMO SAPIENS (HUMAN).//Q92794

[1013] F-HEMBA1002039//HYPOTHETICAL PROLINE-RICH PROTEIN KIAA0269.//0.0070:70:40//HOMO SAPIENS (HUMAN).//Q92558

[1014] F-HEMBA1002049//!!!! ALU SUBFAMILY J WARNING ENTRY !!!!//1.5e-07:37:75//HOMO SAPIENS (HUMAN).//P39188

[1015] F-HEMBA1002084

[1016] F-HEMBA1002092//SPT23 PROTEIN.//0.12:208:26//SACCHAROMYCES CEREVISIAE (BAKER'S YEAST).//P35210

[1017] F-HEMBA1002100

[1018] F-HEMBA1002102//ANKYRIN.//1.4e-12:106:35//MUS MUSCULUS (MOUSE).//Q02357

[1019] F-HEMBA1002113//EARLY NODULIN 20 PRECURSOR (N-20).//0.073:155:32//MEDICAGO TRUNCATULA (BARREL MEDIC).//P93329

[1020] F-HEMBA1002119//MALE SPECIFIC SPERM PROTEIN MST84 DB.//0.85:22:36//DROSOPHILA MELANOGASTER (FRUIT FLY).//Q01643

[1021] F-HEMBA1002125//GAG POLYPROTEIN [CONTAINS: CORE PROTEINS P15, P12, P30].//0.35:111:33//FELINE SARCOMA VIRUS (STRAIN SNYDER-THEILEN).//P03338

[1022] F-HEMBA1002139//HYPOTHETICAL 12.4 KD PROTEIN IN SEC17-QCR1 INTERGENIC REGION.//0.88:72:25//SACCHAROMYCES CEREVISIAE (BAKER'S YEAST).//P38192

[1023] F-HEMBA1002144

[1024] F-HEMBA1002150//THROMBOMODULIN (FETOMODULIN) (TM) (FRAGMENT).//4.8e-10:65:46//BOS TAURUS (BOVINE).//P06579

[1025] F-HEMBA1002151//A-AGGLUTININ ATTACHMENT SUBUNIT PRECURSOR.//0.24:146:28//SACCHAROMYCES CEREVISIAE (BAKER'S YEAST).//P32323

[1026] F-HEMBA1002153//NADH-UBIQUINONE OXIDOREDUCTASE CHAIN 4L (EC 1.6.5.3).//0.93:58:25//APIS MELLIFERA (HONEYBEE).//P34859

[1027] F-HEMBA1002160//!!!! ALU SUBFAMILY SP WARNING ENTRY !!!!//5.1e-21:94:65//HOMO SAPIENS (HUMAN).//P39193

[1028] F-HEMBA1002161//MYOSIN HEAVY CHAIN, CARDIAC MUSCLE BETA ISOFORM.//1.4e-51:180:56//SUS SCROFA (PIG).//P79293

[1029] F-HEMBA1002162//!!!! ALU SUBFAMILY SP WARNING ENTRY !!!!//4.1e-40:102:75//HOMO SAPIENS (HUMAN).//P39193

[1030] F-HEMBA1002166//!!!! ALU SUBFAMILY J WARNING ENTRY !!!!//1.8e-13:133:45//HOMO SAPIENS (HUMAN).//P39188

[1031] F-HEMBA1002177//ZINC FINGER PROTEIN 142 (KIAA0236) (HA4654).//0.0014:153:26//HOMO SAPIENS (HUMAN).//P52746

[1032] F-HEMBA1002185

[1033] F-HEMBA1002189//!!!! ALU SUBFAMILY SQ WARNING ENTRY !!!!//0.86:46:45//HOMO SAPIENS (HUMAN).//P39194

[1034] F-HEMBA1002191//MALE SPECIFIC SPERM PROTEIN MST84DC.//0.037:14:57//DROSOPHILA MELANOGASTER (FRUIT FLY).//Q01644

[1035] F-HEMBA1002199

[1036] F-HEMBA1002204

[1037] F-HEMBA1002212//DUAL SPECIFICITY MITOGEN-ACTIVATED PROTEIN KINASE KINASE DSOR1 (EC 2.7.1.-) (DOWNSTREAM OF RAF) (MAPKK).//3.2e-13:201:30//DROSOPHILA MELANOGASTER (FRUIT FLY).//Q24324

[1038] F-HEMBA1002215//TESTIN 2 (TES2) [CONTAINS: TESTIN 1 (TES1)].//1.1e-62:147:84//MUS MUSCULUS (MOUSE).//P47226

[1039] F-HEMBA1002226//!!!! ALU SUBFAMILY J WARNING ENTRY !!!!//1.6e-26:168:44//HOMO SAPIENS (HUMAN).//P39188

[1040] F-HEMBA1002229//!!!! ALU SUBFAMILY SB1 WARNING ENTRY !!!!//6.8e-18:68:72//HOMO SAPIENS (HUMAN).//P39190

[1041] F-HEMBA1002237//EAMZP30-47 PROTEIN (FRAGMENT).//0.96:21:61//EIMERIA ACERVULINA.//P21959

[1042] F-HEMBA1002241//METALLOTHIONEIN (MT).//0.95:25:48//PARACENTROTUS LIVIDUS (COMMON SEA URCHIN).//P80367

[1043] F-HEMBA1002253//METALLOTHIONEIN-II (MT-II).//0.97:27:48//MESOCRICETUS AURATUS (GOLDEN HAMSTER).//P17808

[1044] F-HEMBA1002257

[1045] F-HEMBA1002265//MALE SPECIFIC SPERM PROTEIN MST84DC.//0.95:24:50//DROSOPHILA MELANOGASTER (FRUIT FLY).//Q01644

[1046] F-HEMBA1002267//NEURONAL PROTEIN 3.1 (P311 PROTEIN).//0.94:33:33//GALLUS GALLUS (CHICKEN).//Q90667

[1047] F-HEMBA1002270

[1048] F-HEMBA1002321//HYPOTHETICAL IMMUNITY REGION PROTEIN 14.//0.99:22:40//BACTERIOPHAGE PHI-105.//P10437

[1049] F-HEMBA1002328

[1050] F-HEMBA1002337

[1051] F-HEMBA1002341//P53-BINDING PROTEIN 53BP2 (FRAGMENT).//3.7e-55:109:96//MUS MUSCULUS (MOUSE).//Q62415

[1052] F-HEMBA1002348//PROBABLE E5 PROTEIN.//0.43:30:50//HUMAN PAPILLOMAVIRUS TYPE 35.//P27226

[1053] F-HEMBA1002349

[1054] F-HEMBA1002363//CHROMOSOME ASSEMBLY PROTEIN XCAP-E.//5.7e-105:278:71//XENOPUS LAEVIS (AFRICAN CLAWED FROG).//P50533

[1055] F-HEMBA1002381//!!!! ALU SUBFAMILY J WARNING ENTRY !!!!l/3.3e-24:69:73//HOMO SAPIENS (HUMAN).//P39188

[1056] F-HEMBA1002389//EARLY NODULIN 20 PRECURSOR (N-20).//0.16:110:31//MEDICAGO TRUNCATULA (BARREL MEDIC).//P93329

[1057] F-HEMBA1002417//TIGHT JUNCTION PROTEIN ZO-1 (TIGHT JUNCTION PROTEIN 1).//2.6e-51:187:56//MUS MUSCULUS (MOUSE).//P39447

[1058] F-HEMBA1002419//PROLINE-RICH PEPTIDE P-B.//1.0:18:61//HOMO SAPIENS (HUMAN).//P02814

[1059] F-HEMBA1002430//HYPOTHETICAL 12.3 KD PROTEIN IN GAP1-NAP1 INTERGENIC REGION.//0.042:41:46//SACCHAROMYCES CEREVISIAE (BAKER'S YEAST).//P36140

[1060] F-HEMBA1002439//CHLOROPLAST 50S RIBOSOMAL PROTEIN L27 (FRAGMENT).//0.99:47:29//CALYPTROSPHAERA SPHAEROIDEA.//P41548

[1061] F-HEMBA1002458//OVARIAN GRANULOSA CELL 13.0 KD PROTEIN HGR74.//4.1e-24:109:55//HOMO SAPIENS (HUMAN).//Q00994

[1062] F-HEMBA1002460

[1063] F-HEMBA1002462//SALIVARY PROLINE-RICH PROTEIN II-1 (FRAGMENT).//0.00025:80:30//HOMO SAPIENS (HUMAN).//P81489

[1064] F-HEMBA1002469//PUTATIVE TUMOR SUPPRESSOR LUCA15.//0.0012:110:33//HOMO SAPIENS (HUMAN).//P52756

[1065] F-HEMBA1002475//PROLINE-RICH PROTEIN MP-3 (FRAGMENT).//0.37:106:33//MUS MUSCULUS (MOUSE).//P05143

[1066] F-HEMBA1002477//!!!! ALU SUBFAMILY SQ WARNING ENTRY !!!!//3.3e-34:96:71//HOMO SAPIENS (HUMAN).//P39194

[1067] F-HEMBA1002486

[1068] F-HEMBA1002495//LIGHT-MEDIATED DEVELOPMENT PROTEIN DET1.//2.9e-31:110:39//ARABIDOPSIS THALIANA (MOUSE-EAR CRESS).//P48732

[1069] F-HEMBA1002498//SFT2 PROTEIN.//1.0:54:35//SACCHAROMYCES CEREVISIAE (BAKER'S YEAST).//P38166

[1070] F-HEMBA1002503//!!!! ALU SUBFAMILY J WARNING ENTRY !!!!//3.0e-06:49:63//HOMO SAPIENS (HUMAN).//P39188

[1071] F-HEMBA1002508//!!!! ALU SUBFAMILY SX WARNING ENTRY !!!!//1.6e-22:169:44//HOMO SAPIENS (HUMAN).//P39195

[1072] F-HEMBA1002513//HYPOTHETICAL 89.8 KD PROTEIN F41H10.6 IN CHROMOSOME IV.//0.00017:79:35//CAENORHABDITIS ELEGANS.//Q20296

[1073] F-HEMBA1002515

[1074] F-HEMBA1002538//ATP SYNTHASE E CHAIN, MITOCHONDRIAL (EC 3.6.1.34).//1.0:53:37//SACCHAROMYCES CEREVISIAE (BAKER'S YEAST).//P81449

[1075] F-HEMBA1002542//!!!! ALU SUBFAMILY J WARNING ENTRY !!!!//5.7e-32:96:75//HOMO SAPIENS (HUMAN).//P39188

[1076] F-HEMBA1002547//AGRIN PRECURSOR.//2.5e-100:218:80//RATTUS NORVEGICUS (RAT).//P25304

[1077] F-HEMBA1002552//HEP27 PROTEIN (PROTEIN D).//9.5e-12:29:82//HOMO SAPIENS (HUMAN).//Q13268

[1078] F-HEMBA1002555//COLLAGEN ALPHA 1(III) CHAIN.//2.4e-15:207:36//BOS TAURUS (BOVINE).//P04258

[1079] F-HEMBA1002558//!!!! ALU SUBFAMILY SP WARNING ENTRY !!!!//1.0:34:50//HOMO SAPIENS (HUMAN).//P39193

[1080] F-HEMBA1002561//LINE-1 REVERSE TRANSCRIPTASE HOMOLOG.//1.5e-05:49:46//NYCTICEBUS COUCANG (SLOW LORIS).//P08548

[1081] F-HEMBA1002569//SINGLE-STRANDED DNA-BINDING PROTEIN P12.//0.97:60:33//BACTERIOPHAGE PRD1.//P17637

[1082] F-HEMBA1002583

[1083] F-HEMBA1002590//!!!! ALU SUBFAMILY J WARNING ENTRY !!!!//5.6e-15:54:55//HOMO SAPIENS (HUMAN).//P39188

[1084] F-HEMBA1002592//HISTIDINE-RICH PROTEIN.//0.99:39:28//PLASMODIUM FALCIPARUM (ISOLATE FCM17/SENEGAL).//P14586

[1085] F-HEMBA1002609//SSM4 PROTEIN.//1.9e-12:135:29//SACCHAROMYCES CEREVISIAE (BAKER'S YEAST).//P40318

[1086] F-HEMBA1002621//CYTOCHROME B6-F COMPLEX 3.5 KD SUBUNIT (CYTOCHROME B6-F COMPLEX SUBUNIT 6).//1.0:20:55//ZEA MAYS (MAIZE).//P19445

[1087] F-HEMBA1002624//EXTENSIN PRECURSOR (CELL WALL HYDROXYPROLINE-RICH GLYCOPROTEIN).//0.0035:124:33//NICOTIANA TABACUM (COMMON TOBACCO).//P13983

[1088] F-HEMBA1002628

[1089] F-HEMBA1002629//IMMEDIATE-EARLY PROTEIN IE 180.//0.84:80:36//PSEUDORABIES VIRUS (STRAIN KAPLAN) (PRV).//P33479

[1090] F-HEMBA1002645//!!!! ALU SUBFAMILY SP WARNING ENTRY !!!!//1.8e-16:57:68//HOMO SAPIENS (HUMAN).//P39193

[1091] F-HEMBA1002651

[1092] F-HEMBA1002659//CUTICLE COLLAGEN 2.//0.0077:77:38//CAENORHABDITIS ELEGANS.//P17656

[1093] F-HEMBA1002661//LINE-1 REVERSE TRANSCRIPTASE HOMOLOG.//2.3e-89:116:72//HOMO SAPIENS (HUMAN).//P08547

[1094] F-HEMBA1002666//BETA CRYSTALLIN A4.//0.18:58:44//GALLUS GALLUS (CHICKEN).//P49152

[1095] F-HEMBA1002678

[1096] F-HEMBA1002679//GLUTAMIC ACID-RICH PROTEIN PRECURSOR.//5.7e-06:219:27//PLASMODIUM FALCIPARUM (ISOLATE FC27/PAPUA NEW GUINEA).//P13816

[1097] F-HEMBA1002688//SPIDROIN 2 (DRAGLINE SILK FIBROIN 2) (FRAGMENT).//1.1e-07:198:32//NEPHILA CLAVIPES (ORB SPIDER).//P46804

[1098] F-HEMBA1002696//COLLAGEN ALPHA I (VII) CHAIN PRECURSOR (LONG-CHAIN COLLAGEN) (LC COLLAGEN).//0.16:158:33//HOMO SAPIENS (HUMAN).//Q02388

[1099] F-HEMBA1002703//HYPOTHETICAL BHLF1 PROTEIN.//0.78:147:29//EPSTEIN-BARR VIRUS (STRAIN B95-8) (HUMAN HERPESVIRUS 4).//P03181

[1100] F-HEMBA1002712//11.2 KD PROTEIN (ORF 103).//0.029:75:34//BACTERIOPHAGE PF1.//P25133

[1101] F-HEMBA1002716//50S RIBOSOMAL PROTEIN L28.//1.0:44:27//BACILLUS SUBTILIS.//P37807

[1102] F-HEMBA1002728//!!!! ALU SUBFAMILY SX WARNING ENTRY !!!!//5.4e-18:56:75//HOMO SAPIENS (HUMAN).//P39195

[1103] F-HEMBA1002730//HYPOTHETICAL PROTEIN MJ0316.//0.097:84:35//METHANOCOCCUS JANNASCHII.//Q57764

[1104] F-HEMBA1002742//APOLIPOPROTEIN C-Ill PRECURSOR (APO-CIII).//0.97:26:50//SUS SCROFA (PIG).//P27917

[1105] F-HEMBA1002746//CALPHOTIN.//0.35:65:35//DROSOPHILA MELANOGASTER (FRUIT FLY).//Q02910

[1106] F-HEMBA1002748//PLATELET GLYCOPROTEIN IB BETA CHAIN PRECURSOR (GP-IB BETA) (GPIBB).//1.0:74:32//MUS MUSCULUS (MOUSE).//P56400

[1107] F-HEMBA1002750//!!!! ALU SUBFAMILY J WARNING ENTRY !!!!//7.0e-15:49:75//HOMO SAPIENS (HUMAN).//P39188

[1108] F-HEMBA1002768//HYPOTHETICAL 72.2 KD PROTEIN C12C2.05C IN CHROMOSOME II.//0.00036:197:26//SCHIZOSACCHAROMYCES POMBE (FISSION YEAST).//Q09746

[1109] F-HEMBA1002770//UTEROGLOBIN PRECURSOR (BLASTOKININ).//0.23:88:27//ORYCTOLAGUS CUNICULUS (RABBIT).//P02779

[1110] F-HEMBA1002777//HOMEOBOX PROTEIN HOX-A4 (HOX-1.4) (MH-3).//0.00018:67:43//MUS MUSCULUS (MOUSE).//P06798

[1111] F-HEMBA1002779//HYPOTHETICAL 17.6 KD PROTEIN IN NPR1-RPS3 INTERGENIC REGION.//0.70:30:53//SACCHAROMYCES CEREVISIAE (BAKER'S YEAST).//P53880

[1112] F-HEMBA1002780//OLFACTORY RECEPTOR 3 (K10) (FRAGMENT).//1.0:31:45//MUS MUSCULUS (MOUSE).//Q60879

[1113] F-HEMBA1002794//HMG-Y RELATED PROTEIN B (SB16B PROTEIN) (FRAGMENT).//0.0044:66:37//GLYCINE MAX (SOYBEAN).//Q10370

[1114] F-HEMBA1002801

[1115] F-HEMBA1002810//HYPOTHETICAL 25.9 KD PROTEIN AH6.3 IN CHROMOSOME II.//0.0033:116:31//CAENORHABDITIS ELEGANS.//Q09202

[1116] F-HEMBA1002816//HYPOTHETICAL 47.1 KD PROTEIN C9G1.13C IN CHROMOSOME I.//1.0e-17:68:48//SCHIZOSACCHAROMYCES POMBE (FISSION YEAST).//O14308

[1117] F-HEMBA1002818//FIBULIN-2 PRECURSOR.//2.1e-27:92:44//MUS MUSCULUS (MOUSE).//P37889

[1118] F-HEMBA1002826//DNA-BINDING PROTEIN 65 (PROTEIN GP65).//0.28:46:34//BACTERIOPHAGE T4.//P16012

[1119] F-HEMBA1002833

[1120] F-HEMBA1002850//ATP SYNTHASE PROTEIN 8 (EC 3.6.1.34) (A6L).//1.0:27:37//METRIDIUM SENILE (BROWN SEA ANEMONE) (FRILLED SEA ANEMONE).//O47493

[1121] F-HEMBA1002863//PHOTOSYSTEM I REACTION CENTRE SUBUNIT IV (PHOTOSYSTEM 18.1 KD PROTEIN) (P30 PROTEIN) (PSI-E).//0.84:37:43//SYNECHOCYSTIS SP. (STRAIN PCC 6803).//P12975

[1122] F-HEMBA1002876//OCTAPEPTIDE-REPEAT PROTEIN T2.//0.74:58:34//MUS MUSCULUS (MOUSE).//Q06666

[1123] F-HEMBA1002886

[1124] F-HEMBA1002896//HOMEOBOX PROTEIN HOX-B3 (HOX-2G) (HOX-2.7).//4.7e-05:84:35//HOMO SAPIENS (HUMAN).//P14651

[1125] F-HEMBA1002921//TAT PROTEIN (TRANSACTIVATING REGULATORY PROTEIN).//0.21:42:42//HUMAN IMMUNODEFICIENCY VIRUS TYPE 1 (RF/HAT ISOLATE) (HIV-1).//P05908

[1126] F-HEMBA1002924//EC PROTEIN HOMOLOG 2 (FRAGMENT).//0.85:75:22//ARABIDOPSIS THALIANA (MOUSE-EAR CRESS).//Q42377

[1127] F-HEMBA1002934//!!!! ALU SUBFAMILY J WARNING ENTRY !!!!//3.4e-31:92:72//HOMO SAPIENS (HUMAN).//P39188

[1128] F-HEMBA1002935//GASTRULA ZINC FINGER PROTEIN XLCGF58.1 (FRAGMENT).//7.7e-06:187:29//XENOPUS LAEVIS (AFRICAN CLAWED FROG).//P18730

[1129] F-HEMBA1002937//SUPPRESSOR PROTEIN SRP40.//0.00031:150:24//SACCHAROMYCES CEREVISIAE (BAKER'S YEAST).//P32583

[1130] F-HEMBA1002939//ANKYRIN R (ANKYRINS 2.1 AND 2.2) (ERYTHROCYTE ANKYRIN).//5.2e-25:225:33//HOMO SAPIENS (HUMAN).//P16157

[1131] F-HEMBA1002944

[1132] F-HEMBA1002951//TRICHOHYALIN.//0.0011:220:24//HOMO SAPIENS (HUMAN).//Q07283

[1133] F-HEMBA1002954//PROBABLE E8 PROTEIN.//0.98:49:32//BOVINE PAPILLOMAVIRUS TYPE 4.//P08352

[1134] F-HEMBA1002968//ACCESSORY GLAND PEPTIDE PRECURSOR (PARAGONIAL PEPTIDE B).//0.93:41:34//DROSOPHILA SECHELLIA (FRUIT FLY).//O18417

[1135] F-HEMBA1002970//!!!! ALU SUBFAMILY SP WARNING ENTRY !!!!//0.00010:35:62//HOMO SAPIENS (HUMAN).//P39193

[1136] F-HEMBA1002971//INSULIN.//1 .0:31:35//HYDROLAGUS COLLIEI (SPOTTED RATFISH) (PACIFIC RATFISH), AND CHIMAERA MONSTROSA (RABBIT FISH).//P09536

[1137] F-HEMBA1002973//CAMP-DEPENDENT 3′,5′-CYCLIC PHOSPHODIESTERASE 4B (EC 3.1.4.17) (DPDE4).//3.0e-29:63:100//RATTUS NORVEGICUS (RAT).//P14646

[1138] F-HEMBA1002997//HYPOTHETICAL 106.5 KD PROTEIN IN CTT1-PRP31 INTERGENIC REGION.//1.0e-08:211:28//SACCHAROMYCES CEREVISIAE (BAKER'S YEAST).//P53253

[1139] F-HEMBA1002999//SUPPRESSOR PROTEIN SRP40.//0.026:175:23//SACCHAROMYCES CEREVISIAE (BAKER'S YEAST).//P32583

[1140] F-HEMBA1003021//!!!! ALU SUBFAMILY SQ WARNING ENTRY !!!!//1.3e-36:102:70//HOMO SAPIENS (HUMAN).//P39194

[1141] F-HEMBA1003033//HYPOTHETICAL 23.1 KD PROTEIN CY277.20C.//0.029:75:29//MYCOBACTERIUM TUBERCULOSIS.//P71779

[1142] F-HEMBA1003034//!!!! ALU SUBFAMILY SC WARNING ENTRY !!!!//6.3e-23:144:46//HOMO SAPIENS (HUMAN).//P39192

[1143] F-HEMBA1003035//HYPOTHETICAL 13.3 KD PROTEIN IN AROD-COMER INTERGENIC REGION.//0.99:55:30//BACILLUS SUBTILIS.//P54457

[1144] F-HEMBA1003037//DNA-BINDING PROTEIN INHIBITOR ID-4.//0.17:42:40//HOMO SAPIENS (HUMAN).//P47928

[1145] F-HEMBA1003041//DNA-BINDING P52/P100 COMPLEX, 100 KD SUBUNIT (FRAGMENTS).//0.69:28:46//HOMO SAPIENS (HUMAN).//P30808

[1146] F-HEMBA1003046//MITOCHONDRIAL PROCESSING PROTEASE BETA SUBUNIT PRECURSOR (EC 3.4.24.64) (BETA-MPP) (P-52).//7.9e-124:253:96//HOMO SAPIENS (HUMAN).//O75439

[1147] F-HEMBA1003064//NADH-UBIQUINONE OXIDOREDUCTASE CHAIN 5 (EC 1.6.5.3).//0.25:263:22//TRYPANOSOMA BRUCEI BRUCEI.//P04540

[1148] F-HEMBA1003067//HYPOTHETICAL 57.5 KD PROTEIN IN VMA7-RPS25A INTERGENIC REGION.//4.1e-05:189:30//SACCHAROMYCES CEREVISIAE (BAKER'S YEAST).//P53214

[1149] F-HEMBA1003071//CUTICLE COLLAGEN 40.//6.0e-07:126:38//CAENORHABDITIS ELEGANS.//P34804

[1150] F-HEMBA1003077//FIBROMODULIN PRECURSOR (FM) (COLLAGEN-BINDING 59 KD PROTEIN).//2.4e-12:139:34//HOMO SAPIENS (HUMAN).//Q06828

[1151] F-HEMBA1003078//RETROVIRUS-RELATED POL POLYPROTEIN [CONTAINS: REVERSE TRANSCRIPTASE (EC 2.7.7.49); ENDONUCLEASE].//7.2e-05:60:40//MUS MUSCULUS (MOUSE).//P1369

[1152] F-HEMBA1003079//PROTEIN Q300.//0.0012:16:87//MUS MUSCULUS (MOUSE).//Q02722

[1153] F-HEMBA1003083//!!!! ALU SUBFAMILY SB WARNING ENTRY !!!!//3.3e-32:95:75//HOMO SAPIENS (HUMAN).//P39189

[1154] F-HEMBA1003086

[1155] F-HEMBA1003096//PROTAMINE IA (IRIDINE IA).//0.36:20:40//SALMO IRIDEUS (RAINBOW TROUT).//P02328

[1156] F-HEMBA1003098//!!!! ALU SUBFAMILY J WARNING ENTRY !!!!/14.4e-09:43:72//HOMO SAPIENS (HUMAN).//P39188

[1157] F-HEMBA1003117//PUTATIVE CUTICLE COLLAGEN C09G5.5.//1.0:88:38//CAENORHABDITIS ELEGANS.//Q09456

[1158] F-HEMBA1003129//NADH-UBIQUINONE OXIDOREDUCTASE CHAIN 4L (EC 1.6.5.3).//0.61:63:25//APIS MELLIFERA (HONEYBEE).//P34859

[1159] F-HEMBA1003133//COLLAGEN ALPHA 2(VIII) CHAIN (ENDOTHELIAL COLLAGEN) (FRAGMENT).//0.48:79:37//HOMO SAPIENS (HUMAN).//P25067

[1160] F-HEMBA1003136//MANNOSE-1-PHOSPHATE GUANYLTRANSFERASE (EC 2.7.7.13) (ATP-MANNOSE-1-PHOSPHATE GUANYLYLTRANSFERASE) (NDP-HEXOSE PYROPHOSPHORYLASE).//3.6e-25:190:34//SACCHAROMYCES CEREVISIAE (BAKER'S YEAST).//P41940

[1161] F-HEMBA1003142

[1162] F-HEMBA1003148//HYPOTHETICAL 56.4 KD PROTEIN IN RPL30-CWH41 INTERGENIC REGION PRECURSOR.//0.068:171:23//SACCHAROMYCES CEREVISIAE (BAKER'S YEAST).//P53189

[1163] F-HEMBA1003166//!!!! ALU SUBFAMILY SC WARNING ENTRY !!!!//1.8e-13:54:66//HOMO SAPIENS (HUMAN).//P39192

[1164] F-HEMBA1003175//HYPOTHETICAL 57.5 KD PROTEIN IN VMA7-RPS25A INTERGENIC REGION.//0.015:147:31//SACCHAROMYCES CEREVISIAE (BAKER'S YEAST).//P53214

[1165] F-HEMBA1003179//PROBABLE TRNA (5-METHYLAMINOMETHYL-2-THIOURIDYLATE)-METHYLTRANSFERASE (EC 2.1.1.61).//2.6e-51:164:47//BACILLUS SUBTILIS.//O35020

[1166] F-HEMBA1003197

[1167] F-HEMBA1003199//HOMEOBOX PROTEIN HOX-A4 (HOX-1D) (HOX-1.4).//0.00049:83:38//HOMO SAPIENS (HUMAN).//Q00056

[1168] F-HEMBA1003202//SPERM PROTAMINE P1.//0.98:53:28//PLANIGALE GILESI (FLAT-SKULLED MARSUPIAL MOUSE).//O18747

[1169] F-HEMBA1.003204//!!!! ALU SUBFAMILY SQ WARNING ENTRY !!!!//5.2e-22:42:80//HOMO SAPIENS (HUMAN).//P39194

[1170] F-HEMBA1003212//!!!! ALU SUBFAMILY SP WARNING ENTRY !!!!//1.6e-18:74:71//HOMO SAPIENS (HUMAN).//P39193

[1171] F-HEMBA1003220//!!!! ALU SUBFAMILY SQ WARNING ENTRY !!!!//3.3e-18:56:78//HOMO SAPIENS (HUMAN).//P39194

[1172] F-HEMBA1003222//HYPOTHETICAL 37.5 KD PROTEIN IN GNTR-HTPG INTERGENIC REGION.//0.0018:159:27//BACILLUS SUBTILIS.//P46327

[1173] F-HEMBA1003229//DIHYDRODIPICOLINATE SYNTHASE 1 PRECURSOR (EC 4.2.1.52) (DHDPS).//1.0:85:28//TRITICUM AESTIVUM (WHEAT).//P24846

[1174] F-HEMBA1003235//TROPOMYOSIN.//8.3e-07:109:33//SCHIZOSACCHAROMYCES POMBE (FISSION YEAST).//Q02088

[1175] F-HEMBA1003250

[1176] F-HEMBA1003257//HYPOTHETICAL PROLINE-RICH PROTEIN (FRAGMENT).//1.5e-07:27:74//OWENIA FUSIFORMIS.//P21260

[1177] F-HEMBA1003273

[1178] F-HEMBA1003276

[1179] F-HEMBA1003278

[1180] F-HEMBA1003281//HOMEOBOX PROTEIN HOX-A4 (CHOX-1.4).//0.0053:116:36//GALLUS GALLUS (CHICKEN).//P17277

[1181] F-HEMBA1003286//DNA-DIRECTED RNA POLYMERASE SUBUNIT N (EC 2.7.7.6).110.96:37:35//SULFOLOBUS ACIDOCALDARIUS.//P39472

[1182] F-HEMBA1003291//5′-AMP-ACTIVATED PROTEIN KINASE, CATALYTIC ALPHA-2 CHAIN (EC 2.7.1.-) (AMPK ALPHA-2 CHAIN) (FRAGMENT).//3.3e-15:68:39//SUS SCROFA (PIG).//Q28948

[1183] F-HEMBA1003296//PULMONARY SURFACTANT-ASSOCIATED PROTEIN B (SP-B) (6 KD PROTEIN) (PULMONARY SURFACTANT-ASSOCIATED PROTEOLIPID SPL(PHE)).//0.98:49:28//BOS TAURUS (BOVINE).//P15781

[1184] F-HEMBA1003304//MITOCHONDRIAL RIBOSOMAL PROTEIN S19.//0.99:36:30//PROTOTHECA WICKERHAMII.//P46750

[1185] F-HEMBA1003309//HYPOTHETICAL 7.9 KD PROTEIN.//0.69:54:37/NACCINIA VIRUS (STRAIN WR), AND VACCINIA VIRUS (STRAIN COPENHAGEN).//P04306

[1186] F-HEMBA1003314//MIXED LINEAGE KINASE 2 (EC 2.7.1.-) (FRAGMENT).//2.3e-06:143:22//HOMO SAPIENS (HUMAN).//Q02779

[1187] F-HEMBA1003322//!!!! ALU SUBFAMILY SQ WARNING ENTRY !!!!//1.5e-30:53:77//HOMO SAPIENS (HUMAN).//P39194

[1188] F-HEMBA1003327

[1189] F-HEMBA1003328//TAT PROTEIN (TRANSACTIVATING REGULATORY PROTEIN) (FRAGMENT).//0.53:21:42//HUMAN IMMUNODEFICIENCY VIRUS TYPE I (BH5 ISOLATE) (HIV-1).//P04612

[1190] F-HEMBA1003330//LONG NEUROTOXIN 3 (TOXIN VN2).//1.0:26:34//DENDROASPIS POLYLEPIS POLYLEPIS (BLACK MAMBA).//P25667

[1191] F-HEMBA1003348//!!!! ALU SUBFAMILY SQ WARNING ENTRY !!!!//6.5e-09:56:66//HOMO SAPIENS (HUMAN).//P39194

[1192] F-HEMBA1003369//ANTER-SPECIFIC PROLINE-RICH PROTEIN APG PRECURSOR.//0.0042:97:36//ARABIDOPSIS THALIANA (MOUSE-EAR CRESS).//P40602

[1193] F-HEMBA1003370//!!!! ALU SUBFAMILY J WARNING ENTRY !!!!//7.0e-18:99:53//HOMO SAPIENS (HUMAN).//P39188

[1194] F-HEMBA1003373

[1195] F-HEMBA1003376//!!!! ALU SUBFAMILY SB WARNING ENTRY !!!!//4.7e-16:60:75//HOMO SAPIENS (HUMAN).//P39189

[1196] F-HEMBA1003380//!!!! ALU SUBFAMILY J WARNING ENTRY !!!!//2.8e-10:50:68//HOMO SAPIENS (HUMAN).//P39188

[1197] F-HEMBA1003384

[1198] F-HEMBA1003395//PROBABLE E5 PROTEIN.//0.62:64:29//HUMAN PAPILLOMAVIRUS TYPE 16.//P06927

[1199] F-HEMBA1003402//HYPOTHETICAL 12.0 KD PROTEIN IN TUB1-CPR3 INTERGENIC REGION PRECURSOR.//0.89:74:33//SACCHAROMYCES CEREVISIAE (BAKER'S YEAST).//Q04521

[1200] F-HEMBA1003403//ACIDIC PROLINE-RICH PROTEIN PRECURSOR (CLONE PRP25) (FRAGMENT).//0.0010:69:33//RATTUS NORVEGICUS (RAT).//P10164

[1201] F-HEMBA1003408//WEB1 PROTEIN (PROTEIN TRANSPORT PROTEIN SEC31).//4.8e-06:93:25//SACCHAROMYCES CEREVISIAE (BAKER'S YEAST).//P38968

[1202] F-HEMBA1003417//PROCOLLAGEN ALPHA 1(II) CHAIN PRECURSOR [CONTAINS: CHONDROCALCIN].//0.0021:140:34//MUS MUSCULUS (MOUSE).//P28481

[1203] F-HEMBA1003418//SPLICING FACTOR, ARGININE/SERINE-RICH 4 (PRE-MRNA SPLICING FACTOR SRP75).//1.7e-14:188:33//HOMO SAPIENS (HUMAN).//Q08170

[1204] F-HEMBA1003433//DNA REPAIR PROTEIN XRS2.//1.0:88:35//SACCHAROMYCES CEREVISIAE (BAKER'S YEAST).//P33301

[1205] F-HEMBA1003447//ACIDIC PROLINE-RICH PROTEIN PRECURSOR (CLONE PRP25) (FRAGMENT).//0.0061:69:33//RATTUS NORVEGICUS (RAT).//P10164

[1206] F-HEMBA1003461//SPIDROIN 1 (DRAGLINE SILK FIBROIN 1) (FRAGMENT).//2.3e-09:239:33//NEPHILA CLAVIPES (ORB SPIDER).//P19837

[1207] F-HEMBA1003463//METALLOTHIONEIN-A (MTA) (FRAGMENT).//1.0:40:35//SPHAERECHINUS GRANULARIS (PURPLE SEA URCHIN).//Q26497

[1208] F-HEMBA1003480//FUSARIC ACID RESISTANCE PROTEIN FUSB.//0.0043:96:32//BURKHOLDERIA CEPACIA (PSEUDOMONAS CEPACIA).//P24127

[1209] F-HEMBA1003528//36.4 KD PROLINE-RICH PROTEIN.//6.4e-15:167:33//LYCOPERSICON ESCULENTUM (TOMATO).//Q00451

[1210] F-HEMBA1003531//!!!!! ALU SUBFAMILY SB WARNING ENTRY !!!!//1.2e-18:56:78//HOMO SAPIENS (HUMAN).//P39189

[1211] F-HEMBA1003538//COMPLEMENT CIR COMPONENT PRECURSOR (EC 3.4.21.41).//2.5e-28:136:47//HOMO SAPIENS (HUMAN).//P00736

[1212] F-HEMBA1003545//INSULIN GENE ENHANCER PROTEIN ISL-2 (ISLET-2).//9.2e-105:217:85//RATTUS NORVEGICUS (RAT).//P50480

[1213] F-HEMBA1003548

[1214] F-HEMBA1003555//HYPOTHETICAL 31.9 KD PROTEIN IN BET1-PAN1 INTERGENIC REGION.//8.7e-57:180:55//SACCHAROMYCES CEREVISIAE (BAKER'S YEAST).//P40558

[1215] F-HEMBA1003556//HYPOTHETICAL 19.2 KD PROTEIN IN COX-REP INTERGENIC REGION (ORF5) (ORF21).//0.53:97:25//BACTERIOPHAGE HP1.//P51706

[1216] F-HEMBA1003560//GUANINE NUCLEOTIDE-BINDING PROTEIN G(I)/G(S)/G(O) GAMMA-2 SUBUNIT (G GAMMA-I).//1.8e-32:71:100//BOS TAURUS (BOVINE).//P16874

[1217] F-HEMBA1003568//ZINC-FINGER PROTEIN RFP (RET FINGER PROTEIN).//4.1e-19:126:31//HOMO SAPIENS (HUMAN).//P14373

[1218] F-HEMBA1003569//METASTASIS-ASSOCIATED PROTEIN MTA 1.//3.9e-83:143:74//HOMO SAPIENS (HUMAN).//Q13330

[1219] F-HEMBA1003571//HYPOTHETICAL 8.7 KD PROTEIN (READING FRAME D).//1.0:64:25//STAPHYLOCOCCUS AUREUS.//P03860

[1220] F-HEMBA1003579//CYTOTOXIN I (CYTOTOXIN V-II-1) (TOXIN V(II)1).//1.0:41:29//NAJA MELANOLEUCA (FOREST COBRA) (BLACK-LIPPED COBRA).//P01448

[1221] F-HEMBA1003581//TALIN.//3.7e-36:52:98//MUS MUSCULUS (MOUSE).//P26039

[1222] F-HEMBA1003591//CHLOROPLAST 28 KD RIBONUCLEOPROTEIN PRECURSOR (28RNP).//1.6e-05:91:31//NICOTIANA SYLVESTRIS (WOOD TOBACCO).//P19682

[1223] F-HEMBA1003595//HYPOTHETICAL 12.0 KD PROTEIN IN DST1-HEM2 INTERGENIC REGION.//1.0:55:32//SACCHAROMYCES CEREVISIAE (BAKER'S YEAST).//P53182

[1224] F-HEMBA1003597

[1225] F-HEMBA1003598//T-CELL RECEPTOR BETA CHAIN PRECURSOR (ANA 111).//4.9e-10:85:41//ORYCTOLAGUS CUNICULUS (RABBIT).//P06333

[1226] F-HEMBA1003615//PUTATIVE MINOR COAT PROTEIN (ORF43).//0.086:10:70//BACTERIOPHAGE PHI-LF.//Q07482

[1227] F-HEMBA1003617//HYPOTHETICAL 36.8 KD PROTEIN C26A3.16 IN CHROMOSOME I.//4.4e-13:58:48//SCHIZOSACCHAROMYCES POMBE (FISSION YEAST).//Q10169

[1228] F-HEMBA1003621//LONGNEUROTOXIN 1 (NEUROTOXIN A).//0.096:40:37//OPHIOPHAGUS HANNAH (KING COBRA) (NAJA HANNAH).//P01387

[1229] F-HEMBA1003622

[1230] F-HEMBA1003630

[1231] F-HEMBA1003637//!!!! ALU SUBFAMILY J WARNING ENTRY !!!!//2.4e-13:47:74//HOMO SAPIENS (HUMAN).//P39188

[1232] F-HEMBA1003640//!!!! ALU SUBFAMILY SP WARNING ENTRY !!!!//0.87:25:64//HOMO SAPIENS (HUMAN).//P39193

[1233] F-HEMBA1003645//HYPOTHETICAL 40.4 KD TRP-ASP REPEATS CONTAINING PROTEIN C14B1.4 IN CHROMOSOME III.//1.8e-10:157:26//CAENORHABDITIS ELEGANS.//Q17963

[1234] F-HEMBA1003646//SERINE-ARGININE PROTEIN 55 (SRP55) (ENHANCER OF DEFORMED) (52-KD BRACKETING PROTEIN) (B52 PROTEIN).//4.9e-05:207:27//DROSOPHILA MELANOGASTER (FRUIT FLY).//P26686

[1235] F-HEMBA1003656

[1236] F-HEMBA1003662//PROLINE-RICH PEPTIDE P-B.//0.57:17:52//HOMO SAPIENS (HUMAN).//P02814

[1237] F-HEMBA1003667//!!!! ALU SUBFAMILY SQ WARNING ENTRY !!!!//6.0e-16:43:72//HOMO SAPIENS (HUMAN).//P39194

[1238] F-HEMBA1003679

[1239] F-HEMBA1003680//PUTATIVE AMINOPEPTIDASE ZK353.6 IN CHROMOSOME III (EC 3.4.11.-).//3.9e-08:137:27//CAENORHABDITIS ELEGANS.//P34629

[1240] F-HEMBA1003684//ZINC FINGER PROTEIN 151 (POLYOMAVIRUS LATE INITIATOR PROMOTER BINDING PROTEIN) (LP-1) (ZINC FINGER PROTEIN Z13).//2.1e-20:127:40//MUS MUSCULUS (MOUSE).//Q60821

[1241] F-HEMBA1003690//HYPOTHETICAL PROTEIN KIAA0288 (HA6116).//3.0e-85:201:78//HOMO SAPIENS (HUMAN).//P56524

[1242] F-HEMBA1003692//CELL DIVISION CONTROL PROTEIN 1.//0.13:69:30//SACCHAROMYCES CEREVISIAE (BAKER'S YEAST).//P40986

[1243] F-HEMBA10037 μl/CARCINOEMBRYONIC ANTIGEN PRECURSOR (CEA) (MECONIUM ANTIGEN 100) (CD66E ANTIGEN).//0.021:153:26//HOMO SAPIENS (HUMAN).//P06731

[1244] F-HEMBA1003714//ABAECIN.//0.99:34:32//BOMBUS PASCUORUM.//P81463

[1245] F-HEMBA1003715

[1246] F-HEMBA1003720//LINE-1 REVERSE TRANSCRIPTASE HOMOLOG.//5.4e-34:155:56//HOMO SAPIENS (HUMAN).//P08547

[1247] F-HEMBA1003725//LINE-1 REVERSE TRANSCRIPTASE HOMOLOG.//1.3e-27:181:41//HOMO SAPIENS (HUMAN).//P08547

[1248] F-HEMBA1003729//PTB-ASSOCIATED SPLICING FACTOR (PSF).//0.0037:103:33//HOMO SAPIENS (HUMAN).//P23246

[1249] F-HEMBA1003733//LINE-1 REVERSE TRANSCRIPTASE HOMOLOG.//5.0e-54:210:58//HOMO SAPIENS (HUMAN).//P08547

[1250] F-HEMBA1003742//MALE SPECIFIC SPERM PROTEIN MST84 DB.//0.066:72:33//DROSOPHILA MELANOGASTER (FRUIT FLY).//Q01643

[1251] F-HEMBA1003758

[1252] F-HEMBA1003760//HYPOXIA-INDUCIBLE FACTOR 1 ALPHA (HIF-1 ALPHA) (ARNT INTERACTING PROTEIN).//1.5e-51:220:52//MUS MUSCULUS (MOUSE).//Q61221

[1253] F-HEMBA1003773

[1254] F-HEMBA1003783

[1255] F-HEMBA1003784

[1256] F-HEMBA1003799//SHORT NEUROTOXIN 1 (TOXIN AA C).//0.95:27:37//ACANTHOPHIS ANTARCTICUS (COMMON DEATH ADDER).//P01434

[1257] F-HEMBA1003803//GAG POLYPROTEIN [CONTAINS: CORE PROTEINS P15, P12, P30].//0.46:96:34//FELINE SARCOMA VIRUS (STRAIN SNYDER-THEILEN).//P03338

[1258] F-HEMBA1003804//DNA-BINDING P52/P100 COMPLEX, 100 KD SUBUNIT (FRAGMENTS).//0.019:30:50//HOMO SAPIENS (HUMAN).//P30808

[1259] F-HEMBA1003805//HYPOTHETICAL 75.0 KD PROTEIN B0280.11 IN CHROMOSOME III.//1.8e-20:109:47//CAENORHABDITIS ELEGANS.//P42083

[1260] F-HEMBA1003807

[1261] F-HEMBA1003827//HYPOTHETICAL PROLINE-RICH PROTEIN (FRAGMENT).//2.1e-09:23:78//OWENIA FUSIFORMIS.//P21260

[1262] F-HEMBA1003836//MOB1 PROTEIN (MPS1 BINDER 1).//2.0e-31:134:52//SACCHAROMYCES CEREVISIAE (BAKER'S YEAST).//P40484

[1263] F-HEMBA1003838//!!!! ALU SUBFAMILY SC WARNING ENTRY !!!!//3.9e-22:39:76//HOMO SAPIENS (HUMAN).//P39192

[1264] F-HEMBA1003856

[1265] F-HEMBA1003864//HYPOTHETICAL 39.4 KD PROTEIN IN METI-SIS2 INTERGENIC REGION.//1.5e-15:194:30//SACCHAROMYCES CEREVISIAE (BAKER'S YEAST).//P36151

[1266] F-HEMBA1003866//PROTEIN A39.//0.0027:72:33//VACCINIA VIRUS (STRAIN COPENHAGEN).//P21062

[1267] F-HEMBA1003879//80 KD NUCLEAR CAP BINDING PROTEIN (NCBP 80 KD SUBUNIT) (CBP80).//2.9e-16:22:100//HOMO SAPIENS (HUMAN).//Q09161

[1268] F-HEMBA1003880//ATP SYNTHASE PROTEIN 8 (EC 3.6.1.34) (A6L).//0.99:39:38//FELIS SILVESTRIS CATUS (CAT).//P48896

[1269] F-HEMBA1003885//!!!! ALU SUBFAMILY SP WARNING ENTRY !!!!//3.5e-28:47:76//HOMO SAPIENS (HUMAN).//P39193

[1270] F-HEMBA1003893//HYPOTHETICAL 27.8 KD PROTEIN IN VMA7-RPS25A INTERGENIC REGION.//1.7e-57:215:51//SACCHAROMYCES CEREVISIAE (BAKER'S YEAST).//P53215

[1271] F-HEMBA1003902

[1272] F-HEMBA1003908

[1273] F-HEMBA1003926//!!!! ALU SUBFAMILY J WARNING ENTRY !!!!//4.3e-10:60:63//HOMO SAPIENS (HUMAN).//P39188

[1274] F-HEMBA1003937//!!!! ALU SUBFAMILY SQ WARNING ENTRY !!!!//8.1e-29:68:64//HOMO SAPIENS (HUMAN).//P39194

[1275] F-HEMBA1003939//PROTEIN Q300.//0.0025:24:62//MUS MUSCULUS (MOUSE).//Q02722

[1276] F-HEMBA1003942//EXCITATORY INSECT TOXIN BJXTR-IT PRECURSOR (BJ-XTRIT).//0.084:67:31//BUTHOTUS JUDAICUS (SCORPION) (HOTTENTOTTA JUDAICA).//P56637

[1277] F-HEMBA1003950//HYPOTHETICAL 8.1 KD PROTEIN IN SPEA-METK INTERGENIC REGION (O71).//0.95:26:34//ESCHERICHIA COLI.//P46878

[1278] F-HEMBA1003953//ZINC FINGER PROTEIN MFG-1 (ZINC FINGER PROTEIN 58) (FRAGMENT).//2.5e-17:89:46//MUS MUSCULUS (MOUSE).//P16372

[1279] F-HEMBA1003958//LINE-1 REVERSE TRANSCRIPTASE HOMOLOG.//4.2e-23:43:76//HOMO SAPIENS (HUMAN).//P08547

[1280] F-HEMBA1003959

[1281] F-HEMBA1003976//HYPOTHETICAL PROTEIN KIAA0076 (HA0936).//0.99:88:28//HOMO SAPIENS (HUMAN).//Q14999

[1282] F-HEMBA1003978//SMALL PROLINE RICH PROTEIN II (SPR-II) (CLONE 930).//0.98:19:57//HOMO SAPIENS (HUMAN).//P22531

[1283] F-HEMBA1003985//LYSYL-TRNA SYNTHETASE (EC 6.1.1.6) (LYSINE-TRNA LIGASE) (LYSRS) (FRAGMENT).//1.0:40:32//MYCOBACTERIUM LEPRAE.//P46861

[1284] F-HEMBA1003987//HYPOTHETICAL PROTEIN UL66.//0.27:65:33//HUMAN CYTOMEGALOVIRUS (STRAIN AD169).//P16822

[1285] F-HEMBA1003989//MALE SPECIFIC SPERM PROTEIN MST84 DB.//5.2e-05:64:40//DROSOPHILA MELANOGASTER (FRUIT FLY).//Q01643

[1286] F-HEMBA1004000//PROTEIN Q300.//0.00042:17:82//MUS MUSCULUS (MOUSE).//Q02722

[1287] F-HEMBA1004011//ALPHA-TYPE CALCITONIN GENE-RELATED PEPTIDE PRECURSOR (CGRP-1).//0.47:106:32//HOMO SAPIENS (HUMAN).//P06881

[1288] F-HEMBA1004012//ATP SYNTHASE PROTEIN 9, MITOCHONDRIAL (EC 3.6.1.34) (LIPID-BINDING PROTEIN).//0.96:36:33//PARAMECIUM TETRAURELIA.//P16001

[1289] F-HEMBA1004015//HYPOTHETICAL 29.3 KD PROTEIN B0280.6 IN CHROMOSOME III.//0.00018:90:34//CAENORHABDITIS ELEGANS.//P41997

[1290] F-HEMBA1004024//!!!! ALU SUBFAMILY SQ WARNING ENTRY !!!!//5.1e-34:75:80//HOMO SAPIENS (HUMAN).//P39194

[1291] F-HEMBA1004038

[1292] F-HEMBA1004042

[1293] F-HEMBA1004045//40S RIBOSOMAL PROTEIN S27A.//1.0:20:55//ASPARAGUS OFFICINALIS (GARDEN ASPARAGUS).//P31753

[1294] F-HEMBA1004048//PROLINE-RICH PROTEIN MP-3 (FRAGMENT).//1.3e-06:158:35//MUS MUSCULUS (MOUSE).//P05143

[1295] F-HEMBA1004049//32 KD HEAT SHOCK PROTEIN (4-1 PROTEIN).//0.098:106:32//DICTYOSTELIUM DISCOIDEUM (SLIME MOLD).//P54658

[1296] F-HEMBA1004055//HYPOTHETICAL PROTEIN HI0258/259.//0.87:133:23//HAEMOPHILUS INFLUENZAE.//P43974

[1297] F-HEMBA1004056//!!!! ALU SUBFAMILY SB2 WARNING ENTRY !!!!//3.3e-25:39:64//HOMO SAPIENS (HUMAN).//P39191

[1298] F-HEMBA1004074//!!!! ALU SUBFAMILY J WARNING ENTRY !!!!//9.9e-08:35:68//HOMO SAPIENS (HUMAN).//P39188

[1299] F-HEMBA1004086

[1300] F-HEMBA1004097//IMMEDIATE-EARLY PROTEIN IE4 (IE68) (FRAGMENT).//0.71:95:35//HERPES SIMPLEX VIRUS (TYPE 2).//P14379

[1301] F-HEMBA1004111//!!!! ALU SUBFAMILY J WARNING ENTRY !!!!//4.7e-26:84:64//HOMO SAPIENS (HUMAN).//P39188

[1302] F-HEMBA1004131//SEPTIN 2 HOMOLOG (FRAGMENT).//2.8e-34:108:63//HOMO SAPIENS (HUMAN).//Q14141

[1303] F-HEMBA1004132//HYPOTHETICAL PROTEIN HII1736.//1.0:44:34//HAEMOPHILUS INFLUENZAE.//P44300

[1304] F-HEMBA1004133//HYPOTHETICAL 8.5 KD PROTEIN CY274.40C.//0.89:21:57//MYCOBACTERIUM TUBERCULOSIS.//Q10826

[1305] F-HEMBA1004138//EARLY NODULIN 75 (N-75) (NGM-75) (FRAGMENT).//0.016:39:41//MEDICAGO SATIVA (ALFALFA).//P11728

[1306] F-HEMBA1004143//CYTOCHROME C OXIDASE POLYPEPTIDE VIII PRECURSOR (EC 1.9.3.1).//0.93:34:29//SACCHAROMYCES CEREVISIAE (BAKER'S YEAST).//P04039

[1307] F-HEMBA1004146//BASIC PROLINE-RICH PEPTIDE P-E (IB-9).//0.63:52:36//HOMO SAPIENS (HUMAN).//P02811

[1308] F-HEMBA1004150//METALLOTHIONEIN-II (MT-II).//1.0:20:45//MUS MUSCULUS (MOUSE).//P02798

[1309] F-HEMBA1004164//!!!! ALU SUBFAMILY SX WARNING ENTRY !!!!//3.0e-13:57:71//HOMO SAPIENS (HUMAN).//P39195

[1310] F-HEMBA1004168//V-TYPE SODIUM ATP SYNTHASE SUBUNIT F (EC 3.6.1.34) (NA(+)-TRANSLOCATING ATPASE SUBUNIT F).//0.00035:90:34//ENTEROCOCCUS HIRAE.//P43437

[1311] F-HEMBA1004199//HYPOTHETICAL HELICASE K12H4.8 IN CHROMOSOME III.//5.1e-14:115:31//CAENORHABDITIS ELEGANS.//P34529

[1312] F-HEMBA1004200

[1313] F-HEMBA1004202//YPT1-RELATED PROTEIN 1.//2.5e-24:96:52//SCHIZOSACCHAROMYCES POMBE (FISSION YEAST).//P11620

[1314] F-HEMBA1004203//!!!! ALU SUBFAMILY SP WARNING ENTRY !!!!//2.2e-09:48:64//HOMO SAPIENS (HUMAN).//P39193

[1315] F-HEMBA1004207//HYPOTHETICAL 8.7 KD PROTEIN IN RPL22-RPL23 INTERGENIC REGION (ORF70).//0.98:51:33//ASTASIA LONGA (EUGLENOPHYCEAN ALGA).//P34779

[1316] F-HEMBA1004225//METALLOTHIONEIN-II.//1.0:30:33//CANDIDA GLABRATA (YEAST) (TORULOPSIS GLABRATA).//P15114

[1317] F-HEMBA1004227//PUTATIVE PROTEIN PHOSPHATASE 2C (EC 3.1.3.16) (PP2C) (KIAA0015).//5.9e-06:109:33//HOMO SAPIENS (HUMAN).//P49593

[1318] F-HEMBA1004238//VERY HYPOTHETICAL XYLU PROTEIN.//0.98:39:38//ESCHERICHIA COLI.//P05056

[1319] F-HEMBA1004241//SOX-13 PROTEIN (FRAGMENT).//0.66:36:38//MUS MUSCULUS (MOUSE).//Q04891

[1320] F-HEMBA1004246

[1321] F-HEMBA1004248//INSULIN-INDUCED GROWTH RESPONSE PROTEIN CL-6 (IMMEDIATE-EARLY PROTEIN CL-6).//1.0e-43:98:84//RATTUS NORVEGICUS (RAT).//Q08755

[1322] F-HEMBA1004264//SPIDROIN 2 (DRAGLINE SILK FIBROIN 2) (FRAGMENT).//0.014:160:28//NEPHILA CLAVIPES (ORB SPIDER).//P46804

[1323] F-HEMBA1004267//!!!! ALU SUBFAMILY SB WARNING ENTRY !!!!//1.8e-52:56:83//HOMO SAPIENS (HUMAN).//P39189

[1324] F-HEMBA1004272

[1325] F-HEMBA1004274//HYPOTHETICAL 13.0 KD PROTEIN F59B2.10 IN CHROMOSOME III.//0.00084:33:54//CAENORHABDITIS ELEGANS.//P34485

[1326] F-HEMBA1004275//HYPOTHETICAL 56.5 KD PROTEIN IN CAJ1-HOM3 INTERGENIC REGION.//9.3e-06:125:27//SACCHAROMYCES CEREVISIAE (BAKER'S YEAST).//P40034

[1327] F-HEMBA1004276//BETA-ADAPTIN 1 (PLASMA MEMBRANE ADAPTOR HA2/AP2 ADAPTIN BETA SUBUNIT) (CLATHRIN ASSEMBLY PROTEIN COMPLEX 2 BETA LARGE CHAIN) (AP105A).//3.7e-30:239:32//HOMO SAPIENS (HUMAN).//Q10567

[1328] F-HEMBA1004286//CUTICLE COLLAGEN 34.//0.0027:71:38//CAENORHABDITIS ELEGANS.//P34687

[1329] F-HEMBA1004289//PTR3 PROTEIN (SSY3 PROTEIN).//1.0:76:28//SACCHAROMYCES CEREVISIAE (BAKER'S YEAST).//P43606

[1330] F-HEMBA1004295//DNA-BINDING P52/P100 COMPLEX, 100 KD SUBUNIT (FRAGMENTS).//0.075:58:39//HOMO SAPIENS (HUMAN).//P30808

[1331] F-HEMBA1004306//HYPOTHETICAL 29.3 KD PROTEIN (ORF92).//0.020:132:30//ORGYIA PSEUDOTSUGATA MULTICAPSID POLYHEDROSIS VIRUS (OPMNPV).//O10341

[1332] F-HEMBA1004312//EARLY PROTEIN I73R.//0.99:65:32//AFRICAN SWINE FEVER VIRUS (STRAIN BA71V) (ASFV).//P27946

[1333] F-HEMBA1004321//ZINC FINGER PROTEIN 90 (ZFP-90) (ZINC FINGER PROTEIN NK10).//4.3e-43:133:44//MUS MUSCULUS (MOUSE).//Q61967

[1334] F-HEMBA1004323

[1335] F-HEMBA1004327//SMALL PROLINE-RICH PROTEIN 2-1.//0.027:48:43//HOMO SAPIENS (HUMAN).//P35326

[1336] F-HEMBA1004330//HOMEOBOX PROTEIN ENGRAILED-1 (HU-EN-1).//0.46:70:34//HOMO SAPIENS (HUMAN).//Q05925

[1337] F-HEMBA1004334//LINE-1 REVERSE TRANSCRIPTASE HOMOLOG.//7.7e-05:83:34//HOMO SAPIENS (HUMAN).//P08547

[1338] F-HEMBA1004335//!!!! ALU SUBFAMILY SX WARNING ENTRY !!!!//2.0e-24:41:80//HOMO SAPIENS (HUMAN).//P39195

[1339] F-HEMBA1004341//PROLINE-RICH PROTEIN MP-3 (FRAGMENT).//2.8e-06:148:35//MUS MUSCULUS (MOUSE).//P05143

[1340] F-HEMBA1004353//!!!! ALU SUBFAMILY SX WARNING ENTRY !!!!//2.2e-29:57:80//HOMO SAPIENS (HUMAN).//P39195

[1341] F-HEMBA1004354//CHL1 PROTEIN.//0.017:40:40//SACCHAROMYCES CEREVISIAE (BAKER'S YEAST).//P22516

[1342] F-HEMBA1004356

[1343] F-HEMBA1004366//LINE-1 REVERSE TRANSCRIPTASE HOMOLOG.//0.00045:49:46//HOMO SAPIENS (HUMAN).//P08547

[1344] F-HEMBA1004372//VERY HYPOTHETICAL 20.6 KD PROTEIN C56F8.15 IN CHROMOSOME I.//1.0:125:28//SCHIZOSACCHAROMYCES POMBE (FISSION YEAST).//Q10263

[1345] F-HEMBA1004389//HYPOTHETICAL 113.1 KD PROTEIN IN PRE5-FET4 INTERGENIC REGION.//0.76:170:25//SACCHAROMYCES CEREVISIAE (BAKER'S YEAST).//Q04893

[1346] F-HEMBA1004394

[1347] F-HEMBA1004396//LINE-1 REVERSE TRANSCRIPTASE HOMOLOG.//1.2e-10:72:51//HOMO SAPIENS (HUMAN).//P08547

[1348] F-HEMBA1004405

[1349] F-HEMBA1004408//PEPTIDYL-PROLYL CIS-TRANS ISOMERASE 10 (EC 5.2.1.8) (PPIASE) (ROTAMASE) (CYCLOPHILIN-10).//2.7e-29:146:48//CAENORHABDITIS ELEGANS.//P52017

[1350] F-HEMBA1004429//!!!! ALU SUBFAMILY SB2 WARNING ENTRY !!!!//0.0019:47:59//HOMO SAPIENS (HUMAN).//P39191

[1351] F-HEMBA1004433//!!!! ALU SUBFAMILY SC WARNING ENTRY !!!!//1.1e-20:47:68//HOMO SAPIENS (HUMAN).//P39192

[1352] F-HEMBA1004460//!!!! ALU SUBFAMILY SP WARNING ENTRY !!!!//6.2e-64:134:69//HOMO SAPIENS (HUMAN).//P39193

[1353] F-HEMBA1004461//METALLOTHIONEIN-LIKE PROTEIN 1.//1.0:39:35//PISUM SATIVUM (GARDEN PEA).//P20830

[1354] F-HEMBA1004479//HYPOXIA-INDUCIBLE FACTOR 1 ALPHA (HIF-1 ALPHA) (ARNT INTERACTING PROTEIN).//9.7e-43:101:48//MUS MUSCULUS (MOUSE).//Q61221

[1355] F-HEMBA1004482//ATP SYNTHASE PROTEIN 8 (EC 3.6.1.34).//1.0:41:36//CANDIDA GLABRATA (YEAST) (TORULOPSIS GLABRATA).//P05040

[1356] F-HEMBA1004499//TUBULIN BETA CHAIN.//0.00021:55:36//CAENORHABDITIS ELEGANS.//P52275

[1357] F-HEMBA1004502

[1358] F-HEMBA1004506//HYPOTHETICAL PROTEIN ORF-1137.//5.3e-11:119:35//MUS MUSCULUS (MOUSE).//P1260

[1359] F-HEMBA1004507//SPLICEOSOME ASSOCIATED PROTEIN 62 (SAP 62) (SF3A66).//0.00072:90:37//HOMO SAPIENS (HUMAN).//Q15428

[1360] F-HEMBA1004509//HYPOTHETICAL 52.2 KD PROTEIN IN MPR1-GCN20 INTERGENIC REGION.//6.3e-28:169:42//SACCHAROMYCES CEREVISIAE (BAKER'S YEAST).//P43589

[1361] F-HEMBA1004534//ENDOTHELIAL ACTIN-BINDING PROTEIN (ABP-280) (NONMUSCLE FILAMIN) (FILAMIN 1).//1.3e-80:226:66//HOMO SAPIENS (HUMAN).//P21333

[1362] F-HEMBA1004538//HYPOTHETICAL PROTEIN MJ0764.//0.96:28:35//METHANOCOCCUS JANNASCHII.//Q58174

[1363] F-HEMBA1004542//METALLOTHIONEIN (MT).//0.78:36:41//GADUS MORHUA (ATLANTIC COD).//P51902

[1364] F-HEMBA1004554

[1365] F-HEMBA1004560//HYPOTHETICAL PROTEIN KIAA0281 (HA6725).//4.2e-15:56:69//HOMO SAPIENS (HUMAN).//Q92556

[1366] F-HEMBA1004573//CIRCUMSPOROZOITE PROTEIN PRECURSOR (CS).//0.65:31:58//PLASMODIUM BERGHEI.//P06915

[1367] F-HEMBA1004577//!!!! ALU SUBFAMILY SX WARNING ENTRY !!!!//3.9e-08:35:80//HOMO SAPIENS (HUMAN).//P39195

[1368] F-HEMBA1004586//!!!! ALU SUBFAMILY SQ WARNING ENTRY !!!!//6.6e-08:64:54//HOMO SAPIENS (HUMAN).//P39194

[1369] F-HEMBA1004596//HETEROGENEOUS NUCLEAR RIBONUCLEOPROTEIN C (HNRNP C) (HNRNP CORE PROTEIN C) (FRAGMENT).//0.00057:88:31//RATTUS NORVEGICUS (RAT).//P17132

[1370] F-HEMBA1004604//COLLAGEN ALPHA 2(XI) CHAIN PRECURSOR (FRAGMENT).//0.045:37:45//MUS MUSCULUS (MOUSE).//Q64739

[1371] F-HEMBA1004610//!!!! ALU SUBFAMILY J WARNING ENTRY !!!!//4.3e-11:73:54//HOMO SAPIENS (HUMAN).//P39188

[1372] F-HEMBA1004617

[1373] F-HEMBA1004629

[1374] F-HEMBA1004631//HYPOTHETICAL 7.8 KD PROTEIN IN WAPA-LICT INTERGENIC REGION.//1.0:36:38//BACILLUS SUBTILIS.//P42303

[1375] F-HEMBA1004632//PHOTOSYSTEM I REACTION CENTRE SUBUNIT X PRECURSOR (LIGHT-HARVESTING 8.0 KD POLYPEPTIDE).//0.86:48:35//SYNECHOCOCCUS ELONGATUS NAEGELI.//P20453

[1376] F-HEMBA1004637//HYPOTHETICAL 83.6 KD PROTEIN R05D3.2 IN CHROMOSOME III.//1.7e-32:159:42//CAENORHABDITIS ELEGANS.//P34535

[1377] F-HEMBA1004638//HYPOTHETICAL PROLINE-RICH PROTEIN (FRAGMENT).//2.8e-06:50:46//OWENIA FUSIFORMIS.//P21260

[1378] F-HEMBA1004666//TOXIN S6C4.//1.0:36:30//DENDROASPIS JAMESONI KAIMOSAE (EASTERN JAMESON'S MAMBA).//P25682

[1379] F-HEMBA1004669//SPLICING FACTOR, ARGININE/SERINE-RICH 4 (PRE-MRNA SPLICING FACTOR SRP75).//1.6e-12:105:42//HOMO SAPIENS (HUMAN).//Q08170

[1380] F-HEMBA1004670//PROCOLLAGEN ALPHA 1(I) CHAIN PRECURSOR.//2.5e-06:62:45//HOMO SAPIENS (HUMAN).//P02452

[1381] F-HEMBA1004672//HYPOTHETICAL PROTEIN MJ0437.//0.95:37:29//METHANOCOCCUS JANNASCHII.//Q57879

[1382] F-HEMBA1004693//MYOSIN HEAVY CHAIN, NONMUSCLE TYPE B (CELLULAR MYOSIN HEAVY CHAIN, TYPE B) (NMMHC-B).//0.00035:217:23//HOMO SAPIENS (HUMAN).//P35580

[1383] F-HEMBA1004697//IMMUNOGLOBULIN G BINDING PROTEIN H PRECURSOR (PROTEIN H).//0.058:118:30//STREPTOCOCCUS PYOGENES.//P50470

[1384] F-HEMBA1004705//!!!! ALU SUBFAMILY J WARNING ENTRY !!!!/16.8e-09:43:72//HOMO SAPIENS (HUMAN).//P39188

[1385] F-HEMBA1004709//!!!! ALU SUBFAMILY SB WARNING ENTRY !!!!//8.8e-18:50:84//HOMO SAPIENS (HUMAN).//P39189

[1386] F-HEMBA1004711//ETS-RELATED PROTEIN 71 (ETS TRANSLOCATION VARIANT 2).//0.0027:148:30//HOMO SAPIENS (HUMAN).//O00321

[1387] F-HEMBA1004725//CUTICLE COLLAGEN 2.//0.0051:41:41//CAENORHABDITIS ELEGANS.//P17656

[1388] F-HEMBA1004730//LINE-1 REVERSE TRANSCRIPTASE HOMOLOG.//1.4e-22:210:37//HOMO SAPIENS (HUMAN).//P08547

[1389] F-HEMBA1004733//!!!! ALU SUBFAMILY J WARNING ENTRY !!!!//4.7e-07:50:62//HOMO SAPIENS (HUMAN).//P39188

[1390] F-HEMBA1004734//UBIQUITIN-CONJUGATING ENZYME E2-18 KD (EC 6.3.2.19) (UBIQUITIN- PROTEIN LIGASE) (UBIQUITIN CARRIER PROTEIN) (PM42).//9.9e-39:143:52//ARABIDOPSIS THALIANA (MOUSE-EAR CRESS).//P42743

[1391] F-HEMBA1004736//LINE-1 REVERSE TRANSCRIPTASE HOMOLOG.//4.1e-60:210:61//HOMO SAPIENS (HUMAN).//P08547

[1392] F-HEMBA1004748

[1393] F-HEMBA1004751//!!!! ALU SUBFAMILY J WARNING ENTRY !!!!//4.8e-20:88:63//HOMO SAPIENS (HUMAN).//P39188

[1394] F-HEMBA1004752//SKIN SECRETORY PROTEIN XP2 PRECURSOR (APEG PROTEIN).//0.0043:126:34//XENOPUS LAEVIS (AFRICAN CLAWED FROG).//P17437

[1395] F-HEMBA1004753//!!!! ALU SUBFAMILY SP WARNING ENTRY !!!!//7.8e-28:47:78//HOMO SAPIENS (HUMAN).//P39193

[1396] F-HEMBA1004756//HYPOTHETICAL 53.3 KD PROTEIN IN HXT8-CAN1 INTERGENIC REGION.//0.22:77:27//SACCHAROMYCES CEREVISIAE (BAKER'S YEAST).//P39981

[1397] F-HEMBA1004758

[1398] F-HEMBA1004763//HYPOTHETICAL PROLINE-RICH PROTEIN (FRAGMENT).//1.1e-06:58:43//OWENIA FUSIFORMIS.//P21260

[1399] F-HEMBA1004768//LINE-1 REVERSE TRANSCRIPTASE HOMOLOG.//4.7e-65:298:53//HOMO SAPIENS (HUMAN).//P08547

[1400] F-HEMBA1004770

[1401] F-HEMBA1004771

[1402] F-HEMBA1004776//GRANULIN 1.//0.78:28:42//CYPRINUS CARPIO (COMMON CARP).//P81013

[1403] F-HEMBA1004778

[1404] F-HEMBA1004795//CDC4-LIKE PROTEIN (FRAGMENT).//6.9e-20:74:63//HOMO SAPIENS (HUMAN).//P50851

[1405] F-HEMBA1004803//LINE-1 REVERSE TRANSCRIPTASE HOMOLOG.//1.4e-22:58:86//HOMO SAPIENS (HUMAN).//P08547

[1406] F-HEMBA1004806//HYPOTHETICAL 24.3 KD PROTEIN IN PSBH-RPL11 INTERGENIC REGION (ORF 182).//0.72:75:33//CYANOPHORA PARADOXA.//P48324

[1407] F-HEMBA1004807

[1408] F-HEMBA1004816

[1409] F-HEMBA1004820//HEMOLYMPH TRYPSIN INHIBITOR A (BPI-TYPE) (FRAGMENT).//1.0:50:38//MANDUCA SEXTA (TOBACCO HAWKMOTH) (TOBACCO HORNWORM).//P26226

[1410] F-HEMBA1004847//SIGNAL RECOGNITION PARTICLE 68 KD PROTEIN (SRP68).//3.0e-76:171:91//CANIS FAMILIARIS (DOG).//Q00004

[1411] F-HEMBA1004850//COLLAGEN ALPHA 1(XII) CHAIN (FRAGMENTS).//3.0e-05:64:43//BOS TAURUS (BOVINE).//P25508

[1412] F-HEMBA1004863//TOXIN C 13S1C1 PRECURSOR.//0.38:52:30//DENDROASPIS ANGUSTICEPS (EASTERN GREEN MAMBA).//P18329

[1413] F-HEMBA1004864//TAT PROTEIN (TRANSACTIVATING REGULATORY PROTEIN) (FRAGMENT).//0.89:24:50//HUMAN IMMUNODEFICIENCY VIRUS TYPE I (BH5 ISOLATE) (HIV-1).//P04612

[1414] F-HEMBA1004865

[1415] F-HEMBA1004880

[1416] F-HEMBA1004889//SMALL PROLINE-RICH PROTEIN II (SPR-II) (CLONE 174N).//0.66:23:47//HOMO SAPIENS (HUMAN).//P22532

[1417] F-HEMBA1004900

[1418] F-HEMBA1004909

[1419] F-HEMBA1004918//CHLOROPLAST 30S RIBOSOMAL PROTEIN S8 (FRAGMENT).//0.56:37:32//SPINACIA OLERACEA (SPINACH).//P09597

[1420] F-HEMBA1004923//!!!! ALU SUBFAMILY J WARNING ENTRY !!!!//3.5e-24:44:68//HOMO SAPIENS (HUMAN).//P39188

[1421] F-HEMBA1004929//ATP SYNTHASE PROTEIN 8 (EC 3.6.1.34) (A6L).//0.97:39:38//STRONGYLOCENTROTUS PURPURATUS (PURPLE SEA URCHIN).//P15997

[1422] F-HEMBA1004930//LINE-1 REVERSE TRANSCRIPTASE HOMOLOG.//6.6e-15:64:59//HOMO SAPIENS (HUMAN).//P08547

[1423] F-HEMBA1004933//VASODILATOR-STIMULATED PHOSPHOPROTEIN (VASP).//0.34:58:41//HOMO SAPIENS (HUMAN).//P50552

[1424] F-HEMBA1004934

[1425] F-HEMBA1004944

[1426] F-HEMBA1004954//NADH-UBIQUINONE OXIDOREDUCTASE CHAIN 3 (EC 1.6.5.3).//0.58:78:30//PARAMECIUM TETRAURELIA.//P15579

[1427] F-HEMBA1004956//HYPOTHETICAL 18.8 KD PROTEIN (ORF4).//0.98:57:31//PARAMECIUM TETRAURELIA.//P15605

[1428] F-HEMBA1004960//HYPOTHETICAL 12.6 KD PROTEIN (ORFJ) (RETRON EC67).//1.0:58:27//ESCHERICHIA COLI.//P21324

[1429] F-HEMBA1004972

[1430] F-HEMBA1004973//SMALL PROLINE RICH PROTEIN II (SPR-II) (CLONE 930).//0.90:55:30//HOMO SAPIENS (HUMAN).//P22531

[1431] F-HEMBA1004977

[1432] F-HEMBA1004978

[1433] F-HEMBA1004980//MOTILIN PRECURSOR.//0.088:79:31//MACACA MULATTA (RHESUS MACAQUE).//O18811

[1434] F-HEMBA1004983//10 KD CHAPERONIN (PROTEIN CPN10) (PROTEIN GROES).//0.87:51:31//BUCHNERA APHIDICOLA.//Q59176

[1435] F-HEMBA1004995//MYOCYTE-SPECIFIC ENHANCER FACTOR 2B (SERUM RESPONSE FACTOR-LIKE PROTEIN 2) (XMEF2) (RSRFR2).//0.17:52:40//HOMO SAPIENS (HUMAN).//Q02080

[1436] F-HEMBA1005008//METALLOTHIONEIN (MT).//1.0:52:32//CRASSOSTREA VIRGINICA (EASTERN OYSTER).//P23038

[1437] F-HEMBA1005009//ACTIN.//3.5e-27:171:38//CANDIDA ALBICANS (YEAST).//P14235

[1438] F-HEMBA1005019//HYPOTHETICAL PROTEIN HI1222.//0.13:58:31//HAEMOPHILUS INFLUENZAE.//P44129

[1439] F-HEMBA1005029//P2Y PURINOCEPTOR 5 (P2Y5) (PURINERGIC RECEPTOR 5) (6H1).//0.76:72:31//GALLUS GALLUS (CHICKEN).//P32250

[1440] F-HEMBA1005035//HOMEOBOX PROTEIN HB9.//0.0086:60:40//HOMO SAPIENS (HUMAN).//P50219

[1441] F-HEMBA1005039//SMALL PROLINE-RICH PROTEIN II (SPR-II) (CLONE 174N).//0.47:49:32//HOMO SAPIENS (HUMAN).//P22532

[1442] F-HEMBA1005047//RAS-RELATED PROTEIN RAB-24 (RAB-16).1/1.5e-19:39:100//MUS MUSCULUS (MOUSE).//P35290

[1443] F-HEMBA1005050//COLLAGEN ALPHA 1(XII) CHAIN (FRAGMENTS).//0.074:34:44//BOS TAURUS (BOVINE).//P25508

[1444] F-HEMBA1005062

[1445] F-HEMBA1005066//LINE-1 REVERSE TRANSCRIPTASE HOMOLOG.//2.1e-44:126:65//HOMO SAPIENS (HUMAN).//P08547

[1446] F-HEMBA1005075//SUPPRESSOR PROTEIN SRP40.//0.35:96:31//SACCHAROMYCES CEREVISIAE (BAKER'S YEAST).//P32583

[1447] F-HEMBA1005079//!!!! ALU SUBFAMILY SB2 WARNING ENTRY !!!!//3.6e-20:75:64//HOMO SAPIENS (HUMAN).//P39191

[1448] F-HEMBA1005083//COLLAGEN ALPHA 1(XII) CHAIN (FRAGMENTS).//0.00015:72:34//BOS TAURUS (BOVINE).//P25508

[1449] F-HEMBA1005101//HETEROGENEOUS NUCLEAR RIBONUCLEOPROTEIN 27C (HNRNP 48) (HRP48.1).//4.8e-10:176:25//DROSOPHILA MELANOGASTER (FRUIT FLY).//P48809

[1450] F-HEMBA1005113

[1451] F-HEMBA1005123//!!!! ALU SUBFAMILY SQ WARNING ENTRY !!!!//3.6e-24:99:60//HOMO SAPIENS (HUMAN).//P39194

[1452] F-HEMBA1005133//HYPOTHETICAL 13.5 KD PROTEIN IN MOB1-SGA1 INTERGENIC REGION.//0.11:22:54//SACCHAROMYCES CEREVISIAE (BAKER'S YEAST).//P40490

[1453] F-HEMBA1005149//!!!! ALU SUBFAMILY J WARNING ENTRY !!!!//3.7e-16:59:71//HOMO SAPIENS (HUMAN).//P39188

[1454] F-HEMBA1005152//GENOME POLYPROTEIN 2 [CONTAINS: HELPER COMPONENT PROTEINASE (EC 3.4.22.-) (HC-PRO); 70 KD PROTEIN].//1.0:77:27//BARLEY YELLOW MOSAIC VIRUS (JAPANESE STRAIN II-1) (BAYMV).//Q01207

[1455] F-HEMBA1005159//NADH-UBIQUINONE OXIDOREDUCTASE CHAIN 4L (EC 1.6.5.3).//0.40:53:33//APIS MELLIFERA (HONEYBEE).//P34859

[1456] F-HEMBA1005185//MYOSIN IB HEAVY CHAIN.//0.011:58:48//DICTYOSTELIUM DISCOIDEUM (SLIME MOLD).//P34092

[1457] F-HEMBA1005201//HYPOTHETICAL 56.6 KD PROTEIN C16C9.03 IN CHROMOSOME I.//3.9e-67:241:53//SCHIZOSACCHAROMYCES POMBE (FISSION YEAST).//Q09817

[1458] F-HEMBA1005202//SIGNAL RECOGNITION PARTICLE 68 KD PROTEIN (SRP68).//3.8e-124:257:95//CANIS FAMILIARIS (DOG).//Q00004

[1459] F-HEMBA1005206//CUTICLE COLLAGEN 1.//0.010:118:33//CAENORHABDITIS ELEGANS.//P08124

[1460] F-HEMBA1005219//PTB-ASSOCIATED SPLICING FACTOR (PSF).//0.99:85:40//HOMO SAPIENS (HUMAN).//P23246

[1461] F-HEMBA1005223//HYPOTHETICAL GENE 1.05 PROTEIN.//0.31:75:28//BACTERIOPHAGE T3.//P07715

[1462] F-HEMBA1005232//HYPOTHETICAL 7.8 KD PROTEIN.//0.99:48:29//VACCINIA VIRUS (STRAIN WR), AND VACCINIA VIRUS (STRAIN COPENHAGEN).//P20544

[1463] F-HEMBA1005241//!!!! ALU SUBFAMILY SP WARNING ENTRY !!!!//1.4e-28:138:55//HOMO SAPIENS (HUMAN).//P39193

[1464] F-HEMBA1005244//SMALL PROLINE RICH PROTEIN II (SPR-II) (CLONE 930).//0.014:39:41//HOMO SAPIENS (HUMAN).//P22531

[1465] F-HEMBA1005251//ATP SYNTHASE PROTEIN 8 (EC 3.6.1.34) (A6L).//0.55:15:46//DICENTRARCHUS LABRAX (EUROPEAN SEA BASS).//Q36362

[1466] F-HEMBA1005252//EC PROTEIN HOMOLOG (ZINC-METALLOTHIONEIN CLASS II).//0.088:33:42//ZEA MAYS (MAIZE).//P43401

[1467] F-HEMBA1005274

[1468] F-HEMBA1005275//!!!! ALU SUBFAMILY J WARNING ENTRY !!!!//0.96:42:45//HOMO SAPIENS (HUMAN).//P39188

[1469] F-HEMBA1005293//PROBABLE COATOMER BETA′ SUBUNIT (BETA′-COAT PROTEIN) (BETA′-COP).//0.55:98:30//CAENORHABDITIS ELEGANS.//Q20168

[1470] F-HEMBA1005296//MUCIN 2 PRECURSOR (INTESTINAL MUCIN 2).//0.095:75:34//HOMO SAPIENS (HUMAN).//Q02817

[1471] F-HEMBA1005304//!!!! ALU SUBFAMILY SB WARNING ENTRY !!!!//5.4e-33:103:74//HOMO SAPIENS (HUMAN).//P39189

[1472] F-HEMBA1005311//PERIOD CLOCK PROTEIN (FRAGMENT).//0.99:45:31//DROSOPHILA SALTANS (FRUIT FLY).//Q04536

[1473] F-HEMBA1005314//HYPOTHETICAL 6.3 KD PROTEIN T19C3.3 IN CHROMOSOME III.//0.98:30:30//CAENORHABDITIS ELEGANS.//Q10009

[1474] F-HEMBA1005315//LINE-1 REVERSE TRANSCRIPTASE HOMOLOG.//1.1e-05:35:51//HOMO SAPIENS (HUMAN).//P08547

[1475] F-HEMBA1005318//OLFACTORY RECEPTOR-LIKE PROTEIN COR8 (FRAGMENT).//0.57:44:38//GALLUS GALLUS (CHICKEN).//Q98913

[1476] F-HEMBA1005331//IMMEDIATE-EARLY PROTEIN IE180.//0.57:106:33//PSEUDORABIES VIRUS (STRAIN INDIANA-FUNKHAUSER/BECKER) (PRV).//P11675

[1477] F-HEMBA1005338//CARTILAGE MATRIX PROTEIN PRECURSOR (MATRILIN-1).//1.8e-55:199:59//GALLUS GALLUS (CHICKEN).//P05099

[1478] F-HEMBA1005353//CHLOROPLAST 30S RIBOSOMAL PROTEIN S17.//0.88:33:36//PORPHYRA PURPUREA.//P51305

[1479] F-HEMBA1005359//ZINC FINGER PROTEIN 83 (ZINC FINGER PROTEIN HPF1).//1.1e-68:255:48//HOMO SAPIENS (HUMAN).//P51522

[1480] F-HEMBA1005367//ALPHA-AMYLASE INHIBITOR AAI.//1.0:25:40//AMARANTHUS HYPOCHONDRIACUS (PRINCE'S FEATHER).//P80403

[1481] F-HEMBA1005372

[1482] F-HEMBA1005374//!!!! ALU SUBFAMILY SQ WARNING ENTRY !!!!//2.0e-34:92:75//HOMO SAPIENS (HUMAN).//P39194

[1483] F-HEMBA1005382//APOLIPOPROTEIN C-II (APO-CII).//0.99:39:33//BOS TAURUS (BOVINE).//P19034

[1484] F-HEMBA1005389//HYPOTHETICAL 70.0 KD PROTEIN IN DNAK 3′REGION (ORF4).//0.82:164:311//LACTOCOCCUS LACTIS (SUBSP. LACTIS) (STREPTOCOCCUS LACTIS).//P42377

[1485] F-HEMBA1005394//HYPOTHETICAL 8.9 KD PROTEIN IN IE0-IE1 INTERGENIC REGION.//0.98:44:38//AUTOGRAPHA CALIFORNICA NUCLEAR POLYHEDROSIS VIRUS (ACMNPV).//P41703

[1486] F-HEMBA1005403//SPERM HISTONE P2 PRECURSOR (PROTAMINE MP2).//0.066:64:29//MUS MUSCULUS (MOUSE).//P07978

[1487] F-HEMBA1005408//50S RIBOSOMAL PROTEIN L33.//0.77:32:25//BACILLUS SUBTILIS.//Q06798

[1488] F-HEMBA1005410//RETROVIRUS-RELATED POL POLYPROTEIN [CONTAINS: REVERSE TRANSCRIPTASE (EC 2.7.7.49); ENDONUCLEASE].//0.0065:38:52//MUS MUSCULUS (MOUSE).//P11369

[1489] F-HEMBA1005411//TOXIN S4C8.//0.16:46:28//DENDROASPIS JAMESONI KAIMOSAE (EASTERN JAMESON'S MAMBA).//P25683

[1490] F-HEMBA1005423//CYCLIN-DEPENDENT KINASE 6 INHIBITOR (P18-INK6) (CYCLIN-DEPENDENT KINASE 4 INHIBITOR C) (P18-INK4C).//4.3e-09:29:96//HOMO SAPIENS (HUMAN).//P42773

[1491] F-HEMBA1005426//TOXIN C 10S2C2.//0.99:49:34//DENDROASPIS ANGUSTICEPS (EASTERN GREEN MAMBA).//P25684

[1492] F-HEMBA1005443//!!!! ALU SUBFAMILY J WARNING ENTRY !!!!//2.9e-16:78:60//HOMO SAPIENS (HUMAN).//P39188

[1493] F-HEMBA1005447//ATP SYNTHASE PROTEIN 8 (EC 3.6.1.34) (A6L).//0.99:57:31//DASYPUS NOVEMCINCTUS (NINE-BANDED ARMADILLO).//O21329

[1494] F-HEMBA1005468//NADH-UBIQUINONE OXIDOREDUCTASE CHAIN 1 (EC 1.6.5.3) (FRAGMENTS).//0.68:41:31//ARTEMIA SALINA (BRINE SHRIMP).//P19040

[1495] F-HEMBA1005469

[1496] F-HEMBA1005472//LINE-1 REVERSE TRANSCRIPTASE HOMOLOG.//H1.5e-39:142:70//HOMO SAPIENS (HUMAN).//P08547

[1497] F-HEMBA1005474//!!!! ALU SUBFAMILY SQ WARNING ENTRY !!!!//5.8e-10:44:68//HOMO SAPIENS (HUMAN).//P39194

[1498] F-HEMBA1005475//U1 SMALL NUCLEAR RIBONUCLEOPROTEIN 70 KD (U1 SNRNP 70 KD) (SNRP70).//9.2e-14:179:33//HOMO SAPIENS (HUMAN).//P08621

[1499] F-HEMBA1005497

[1500] F-HEMBA1005500//60S RIBOSOMAL PROTEIN L37.//0.11:53:33//SCHISTOSOMA MANSONI (BLOOD FLUKE).//O44125

[1501] F-HEMBA1005506

[1502] F-HEMBA1005508

[1503] F-HEMBA1005511//!!!! ALU SUBFAMILY SQ WARNING ENTRY !!!!//3.5e-30:92:73//HOMO SAPIENS (HUMAN).//P39194

[1504] F-HEMBA1005513//MALES-ABSENT ON THE FIRST PROTEIN (EC 2.3.1.-).//2.0e-39:95:61//DROSOPHILA MELANOGASTER (FRUIT FLY).//O02193

[1505] F-HEMBA1005517//PROLINE-RICH PROTEIN MP-2 PRECURSOR.//2.1e-06:56:44//MUS MUSCULUS (MOUSE).//P05142

[1506] F-HEMBA1005518//COLLAGEN ALPHA 1(I) CHAIN (FRAGMENTS).//5.8e-05:192:33//BOS TAURUS (BOVINE).//P02453

[1507] F-HEMBA1005520//!!!! ALU SUBFAMILY J WARNING ENTRY !!!!//2.0e-18:87:57//HOMO SAPIENS (HUMAN).//P39188

[1508] F-HEMBA1005526//!!!! ALU SUBFAMILY SB2 WARNING ENTRY !!!!//5.1e-22:77:54//HOMO SAPIENS (HUMAN).//P39191

[1509] F-HEMBA1005528//CCR4-ASSOCIATED FACTOR 1 (CAF1).//10.2e-81:157:98//MUS MUSCULUS (MOUSE).//Q60809

[1510] F-HEMBA1005530//POLLEN ALLERGEN AMB P 5-A PRECURSOR (AMB P V-A).110.98:19:47//AMBROSIA PSILOSTACHYA (WESTERN RAGWEED).//P43174

[1511] F-HEMBA1005548//TRANSCRIPTION FACTOR MAF1.//1 .4e-72:137:97//RATTUS NORVEGICUS (RAT).//P54842

[1512] F-HEMBA1005552//!!!! ALU SUBFAMILY SP WARNING ENTRY !!!!//1.7e-29:47:78//HOMO SAPIENS (HUMAN).//P39193

[1513] F-HEMBA1005558//HYPOTHETICAL 25.6 KD PROTEIN IN ABF2-CHL12 INTERGENIC REGION.//1.6e-20:202:30//SACCHAROMYCES CEREVISIAE (BAKER'S YEAST).//Q04272

[1514] F-HEMBA1005568

[1515] F-HEMBA1005570//NADH-UBIQUINONE OXIDOREDUCTASE CHAIN 6 (EC 1.6.5.3).//1.0:80:31//CAENORHABDITIS ELEGANS.//P24885

[1516] F-HEMBA1005576//TRANSMEMBRANE PROTEIN SEX PRECURSOR.//8.5e-58:152:75//HOMO SAPIENS (HUMAN).//P51805

[1517] F-HEMBA1005577//KERATIN, HIGH-SULFUR MATRIX PROTEIN, B2A.//0.98:57:36//OVIS ARIES (SHEEP).//P02438

[1518] F-HEMBA1005581//SLIT PROTEIN PRECURSOR.//1.1e-62:254:41//DROSOPHILA MELANOGASTER (FRUIT FLY).//P24014

[1519] F-HEMBA1005582//DYNACTIN, 150 KD ISOFORM (150 KD DYNEIN-ASSOCIATED POLYPEPTIDE) (DP-150) (DAP-150) (P150-GLUED).//0.0091:189:29//RATTUS NORVEGICUS (RAT).//P28023

[1520] F-HEMBA1005583//HYPOTHETICAL 41.2 KD PROTEIN IN CPS REGION (ORF7).//0.83:119:23//KLEBSIELLA PNEUMONIAE.//Q48453

[1521] F-HEMBA1005588//!!!! ALU SUBFAMILY J WARNING ENTRY !!!!//1.9e-17:108:53//HOMO SAPIENS (HUMAN).//P39188

[1522] F-HEMBA1005593//SMALL PROLINE-RICH PROTEIN II (SPR-II) (CLONE 174N).//0.23:24:54//HOMO SAPIENS (HUMAN).//P22532

[1523] F-HEMBA1005595//DYNEIN HEAVY CHAIN, CYTOSOLIC (DYHC).//2.7e-39:257:39//DICTYOSTELIUM DISCOIDEUM (SLIME MOLD).//P34036

[1524] F-HEMBA1005606

[1525] F-HEMBA1005609//!!!! ALU SUBFAMILY SC WARNING ENTRY !!!!//3.2e-20:27:96//HOMO SAPIENS (HUMAN).//P39192

[1526] F-HEMBA1005616//LATE CONTROL GENE B PROTEIN (GPB).//0.48:51:33//BACTERIOPHAGE 186.//P08711

[1527] F-HEMBA1005621//MITOTIC MAD2 PROTEIN.//1.2e-06:137:32//SACCHAROMYCES CEREVISIAE (BAKER'S YEAST).//P40958

[1528] F-HEMBA1005627//HYPOTHETICAL 17.1 KD PROTEIN IN PUR5 3′REGION.//0.18:100:32//SACCHAROMYCES CEREVISIAE (BAKER'S YEAST).//P38898

[1529] F-HEMBA1005631

[1530] F-HEMBA1005632//HYPOTHETICAL 7.4 KD PROTEIN.//0.32:59:32//VACCINIA VIRUS (STRAIN WR).//P04309

[1531] F-HEMBA1005634//!!!! ALU SUBFAMILY J WARNING ENTRY !!!!//2.6e-14:93:58//HOMO SAPIENS (HUMAN).//P39188

[1532] F-HEMBA1005666//HYPOTHETICAL PROTEIN KIAA0129.//2.1e-05:126:25//HOMO SAPIENS (HUMAN).//Q14142

[1533] F-HEMBA1005670

[1534] F-HEMBA1005679//LINE-1 REVERSE TRANSCRIPTASE HOMOLOG.//2.2e-08:40:72//HOMO SAPIENS (HUMAN).//P08547

[1535] F-HEMBA1005680//SMALL PROLINE-RICH PROTEIN 2-1.//0.015:19:47//HOMO SAPIENS (HUMAN).//P35326

[1536] F-HEMBA1005685

[1537] F-HEMBA1005699//EPHRIN-B3 PRECURSOR (EPH-RELATED RECEPTOR TYROSINE KINASE LIGAND 8) (LERK-8) (EPH-RELATED RECEPTOR TRANSMEMBRANE LIGAND ELK-L3).//4.2e-38:98:81//HOMO SAPIENS (HUMAN).//Q15768

[1538] F-HEMBA1005705//PROTEIN Q300.//0.11:23:56//MUS MUSCULUS (MOUSE).//Q02722

[1539] F-HEMBA1005717

[1540] F-HEMBA1005732//BACTENECIN 7 PRECURSOR (BAC7).//0.22:55:41//OVIS ARIES (SHEEP).//P50415

[1541] F-HEMBA1005737//CALCINEURIN B SUBUNIT (PROTEIN PHOSPHATASE 2B REGULATORY SUBUNIT).//4.5e-18:167:34//SACCHAROMYCES CEREVISIAE (BAKER'S YEAST).//P25296

[1542] F-HEMBA1005746

[1543] F-HEMBA1005755//LINE-1 REVERSE TRANSCRIPTASE HOMOLOG.//7.4e-30:69:65//HOMO SAPIENS (HUMAN).//P08547

[1544] F-HEMBA1005765//!!!! ALU SUBFAMILY SQ WARNING ENTRY !!!!//2.8e-19:60:63//HOMO SAPIENS (HUMAN).//P39194

[1545] F-HEMBA1005780//METALLOTHIONEIN-1 (MT-1).//1.0:31:38//COLUMBA LIVIA (DOMESTIC PIGEON).//P15786

[1546] F-HEMBA1005813

[1547] F-HEMBA1005815//CALPAIN, LARGE [CATALYTIC] SUBUNIT (EC 3.4.22.17) (CALCIUM- ACTIVATED NEUTRAL PROTEINASE) (CANP) (MU/M-TYPE).//1.0e-23:200:31//GALLUS GALLUS (CHICKEN).//P00789

[1548] F-HEMBA1005822//PROTEIN Q300.//0.0016:21:80//MUS MUSCULUS (MOUSE).//Q02722

[1549] F-HEMBA1005829//!!!! ALU SUBFAMILY SQ WARNING ENTRY !!!!//9.6e-33:96:73//HOMO SAPIENS (HUMAN).//P39194

[1550] F-HEMBA1005834//LINE-1 REVERSE TRANSCRIPTASE HOMOLOG.//1.6e-22:103:46//NYCTICEBUS COUCANG (SLOW LORIS).//P08548

[1551] F-HEMBA1005852//PROLINE-RICH PROTEIN MP-3 (FRAGMENT).//8.8e-06:95:35//MUS MUSCULUS (MOUSE).//P05143

[1552] F-HEMBA1005853//HYPOTHETICAL PROTEIN MJ0647.//0.39:28:39//METHANOCOCCUS JANNASCHII.//Q58063

[1553] F-HEMBA1005884

[1554] F-HEMBA1005891//HYPOTHETICAL PROTEIN MTH137.//0.95:51:27//METHANOBACTERIUM THERMOAUTOTROPHICUM.//O26240

[1555] F-HEMBA1005894//!!!! ALU SUBFAMILY SX WARNING ENTRY !!!!//2.6e-29:81:71//HOMO SAPIENS (HUMAN).//P39195

[1556] F-HEMBA1005909//HYPOTHETICAL 8.2 KD PROTEIN B0353.1 IN CHROMOSOME III.//0.98:19:52//CAENORHABDITIS ELEGANS.//Q10958

[1557] F-HEMBA1005911//!!!! ALU SUBFAMILY J WARNING ENTRY !!!!//1.9e-27:86:70//HOMO SAPIENS (HUMAN).//P39188

[1558] F-HEMBA1005921//!!!! ALU SUBFAMILY SQ WARNING ENTRY !!!!//1.3e-38:99:81//HOMO SAPIENS (HUMAN).//P39194

[1559] F-HEMBA1005931//ZINC FINGER PROTEIN 83 (ZINC FINGER PROTEIN HPF1).//2.3e-17:76:51//HOMO SAPIENS (HUMAN).//P51522

[1560] F-HEMBA1005934//!!!! ALU SUBFAMILY SB WARNING ENTRY !!!!//0.024:54:40//HOMO SAPIENS (HUMAN).//P39189

[1561] F-HEMBA1005962

[1562] F-HEMBA1005963//COATOMER GAMMA SUBUNIT (GAMMA-COAT PROTEIN) (GAMMA-COP).//1.7e-32:89:79//BOS TAURUS (BOVINE).//P53620

[1563] F-HEMBA1005990//HYPOTHETICAL BHLF1 PROTEIN.//3.0e-09:180:36//EPSTEIN-BARR VIRUS (STRAIN B95-8) (HUMAN HERPESVIRUS 4).//P03181

[1564] F-HEMBA1005991//HYPOTHETICAL PROTEIN KIAA0032.//3.0e-17:107:43//HOMO SAPIENS (HUMAN).//Q15034

[1565] F-HEMBA1005999

[1566] F-HEMBA1006002

[1567] F-HEMBA1006005//CORNIFIN B (SMALL PROLINE-RICH PROTEIN 1B) (SPR1B) (SPR1 B).//0.0017:45:44//MUS MUSCULUS (MOUSE).//Q62267

[1568] F-HEMBA1006031//BASIC PROLINE-RICH PEPTIDE IB-1.//0.00016:84:39//HOMO SAPIENS (HUMAN).//P04281

[1569] F-HEMBA1006035//DNAK PROTEIN 1 (HEAT SHOCK PROTEIN 70) (HSP70).//0.43:100:27//SYNECHOCYSTIS SP. (STRAIN PCC 6803).//Q55154

[1570] F-HEMBA1006036//!!!! ALU SUBFAMILY SQ WARNING ENTRY !!!!//6.2e-64:150:74//HOMO SAPIENS (HUMAN).//P39194

[1571] F-HEMBA1006042

[1572] F-HEMBA1006067//METALLOTHIONEIN A (MT-A).//0.86:34:41//THERMARCES CERBERUS.//P52721

[1573] F-HEMBA1006081

[1574] F-HEMBA1006090//SODIUM/GLUCOSE COTRANSPORTER 3 (NA(+)/GLUCOSE COTRANSPORTER 3) (LOW AFFINITY SODIUM-GLUCOSE COTRANSPORTER).//0.87:35:54//SUS SCROFA (PIG).//P31636

[1575] F-HEMBA1006091//EARLY NODULIN 20 PRECURSOR (N-20).//0.027:87:32//MEDICAGO TRUNCATULA (BARREL MEDIC).//P93329

[1576] F-HEMBA1006100//!!!! ALU SUBFAMILY SX WARNING ENTRY !!!!//8.1e-09:58:60//HOMO SAPIENS (HUMAN).//P39195

[1577] F-HEMBA1006108//HYPOTHETICAL 56.6 KD PROTEIN IN URE2-SSU72 INTERGENIC REGION.//5.6e-16:88:36//SACCHAROMYCES CEREVISIAE (BAKER'S YEAST).//P53867

[1578] F-HEMBA1006121//HOMEOBOX PROTEIN CDX-1 (CAUDAL-TYPE HOMEOBOX PROTEIN 1).//3.4e-05:106:37//HOMO SAPIENS (HUMAN).//P47902

[1579] F-HEMBA1006124//50S RIBOSOMAL PROTEIN L33.//1.0:12:83//BACILLUS STEAROTHERMOPHILUS.//P23375

[1580] F-HEMBA1006130//SEL-10 PROTEIN.//7.7e-05:129:28//CAENORHABDITIS ELEGANS.//Q93794

[1581] F-HEMBA1006138//!!!! ALU SUBFAMILY SQ WARNING ENTRY !!!!//7.8e-13:41:73//HOMO SAPIENS (HUMAN).//P39194

[1582] F-HEMBA1006142//!!!! ALU SUBFAMILY SC WARNING ENTRY !!!!//2.3e-39:101:77//HOMO SAPIENS (HUMAN).//P39192

[1583] F-HEMBA1006155//GENE 33 POLYPEPTIDE.//0.21:70:31//RATTUS NORVEGICUS (RAT).//P05432

[1584] F-HEMBA1006158

[1585] F-HEMBA1006173//PROTEIN-TYROSINE PHOSPHATASE STRIATUM-ENRICHED (EC 3.1.3.48) (STEP) (NEURAL-SPECIFIC PROTEIN-TYROSINE PHOSPHATASE) (FRAGMENT).//0.017:20:95//HOMO SAPIENS (HUMAN).//P54829

[1586] F-HEMBA1006182//!!!! ALU SUBFAMILY J WARNING ENTRY !!!!//0.37:31:61//HOMO SAPIENS (HUMAN).//P39188

[1587] F-HEMBA1006198//HOMEOBOX PROTEIN HOX-B3 (HOX-2.7) (MH-23).//0.85:61:29//MUS MUSCULUS (MOUSE).//P09026

[1588] F-HEMBA1006235//50S RIBOSOMAL PROTEIN L33.//1.0:26:38//AQUIFEX AEOLICUS.//O67756

[1589] F-HEMBA1006248//MALE SPECIFIC SPERM PROTEIN MST84 DB.//0.0041:64:37//DROSOPHILA MELANOGASTER (FRUIT FLY).//Q01643

[1590] F-HEMBA1006252//BOWMAN-BIRK TYPE PROTEINASE INHIBITOR DE-3.//1.0:22:40//DOLICHOS AXILLARIS (MACROTYLOMA AXILLARE).//P01057

[1591] F-HEMBA1006253//DISINTEGRIN ERISTICOPHIN (PLATELET AGGREGATION ACTIVATION INHIBITOR).//0.95:19:47//ERISTOCOPHIS MACMAHONI (LEAF-NOSED VIPER).//P22826

[1592] F-HEMBA1006259

[1593] F-HEMBA1006268//!!!! ALU SUBFAMILY SC WARNING ENTRY !!!!//7.0e-05:32:65//HOMO SAPIENS (HUMAN).//P39192

[1594] F-HEMBA1006272//RETROVIRUS-RELATED GAG POLYPROTEIN (VERSION 2).//14.8e-112:248:78//HOMO SAPIENS (HUMAN).//P10264

[1595] F-HEMBA1006278//POLY(A) POLYMERASE (EC 2.7.7.19) (PAP) (POLYNUCLEOTIDE ADENYLYLTRANSFERASE) (FRAGMENT).//2.5e-71:164:75//HOMO SAPIENS (HUMAN).//P51003

[1596] F-HEMBA1006283//50S RIBOSOMAL PROTEIN L32.//0.81:27:44//THERMUS AQUATICUS (SUBSP. THERMOPHILUS).//P80339

[1597] F-HEMBA1006284//CUTICLE COLLAGEN 2.//0.36:42:40//CAENORHABDITIS ELEGANS.//P17656

[1598] F-HEMBA1006291//HYPOTHETICAL 43.3 KD PROTEIN IN EVGS-GLK INTERGENIC REGION.//2.4e-37:143:31//ESCHERICHIA COLI.//P76518

[1599] F-HEMBA1006293//MYELIN-OLIGODENDROCYTE GLYCOPROTEIN PRECURSOR.//0.20:134:29//RATTUS NORVEGICUS (RAT).//Q63345

[1600] F-HEMBA1006309//HYPOTHETICAL 54.2 KD PROTEIN IN ERP5-ORC6 INTERGENIC REGION.//2.1e-43:187:48//SACCHAROMYCES CEREVISIAE (BAKER'S YEAST).//P38821

[1601] F-HEMBA1006310//SIGNAL TRANSDUCER CD24 PRECURSOR (HEAT STABLE ANTIGEN) (HSA) (NECTADRIN).//0.71:46:39//RATTUS NORVEGICUS (RAT).//Q07490

[1602] F-HEMBA1006328//RNA POLYMERASE ALPHA SUBUNIT (EC 2.7.7.48) (NUCLEOCAPSID PHOSPHOPROTEIN).//0.44:141:24//HUMAN PARAINFLUENZA 1 VIRUS (STRAIN C1-5/73).//P32531

[1603] F-HEMBA1006334//HYPOTHETICAL TRANSCRIPTIONAL REGULATOR AF 1627.//0.98:26:46//ARCHAEOGLOBUS FULGIDUS.//O28646

[1604] F-HEMBA1006344//EZRIN (P81) (CYTOVILLIN) (VILLIN-2).//8.8e-08:91:36//MUS MUSCULUS (MOUSE).//P26040

[1605] F-HEMBA1006347//MALES-ABSENT ON THE FIRST PROTEIN (EC 2.3.1.-).//9.1e-48:149:50//DROSOPHILA MELANOGASTER (FRUIT FLY).//O02193

[1606] F-HEMBA1006349//METALLOTHIONEIN-LIKE PROTEIN 1.//0.015:59:33//CASUARINA GLAUCA (SWAMP OAK).//Q39511

[1607] F-HEMBA1006359//ZINC FINGER PROTEIN 43 (ZINC PROTEIN HTF6).//6.8e-96:261:66//HOMO SAPIENS (HUMAN).//P28160

[1608] F-HEMBA1006364//PUTATIVE ENDONUCLEASE C1F12.06C (EC 3.1.-.-).//0.97:60:35//SCHIZOSACCHAROMYCES POMBE (FISSION YEAST).//Q10348

[1609] F-HEMBA1006377//EARLY NODULIN 20 PRECURSOR (N-20).//0.00023:110:35//MEDICAGO TRUNCATULA (BARREL MEDIC).//P93329

[1610] F-HEMBA1006380

[1611] F-HEMBA1006381//METALLOTHIONEIN-II.//1.0:26:38//CANDIDA GLABRATA (YEAST) (TORULOPSIS GLABRATA).//P15114

[1612] F-HEMBA1006398//LINE-1 REVERSE TRANSCRIPTASE HOMOLOG.//3.3e-26:123:52//HOMO SAPIENS (HUMAN).//P08547

[1613] F-HEMBA1006416

[1614] F-HEMBA1006419//!!!! ALU SUBFAMILY SB WARNING ENTRY !!!!//1.2e-24:102:50//HOMO SAPIENS (HUMAN).//P39189

[1615] F-HEMBA1006421//!!!! ALU SUBFAMILY J WARNING ENTRY !!!!//3.1e-21:101:57//HOMO SAPIENS (HUMAN).//P39188

[1616] F-HEMBA1006424//HYPOTHETICAL PROTEIN IORF1.//0.85:55:30//BOVINE CORONAVIRUS (STRAIN MEBUS), AND BOVINE CORONAVIRUS (STRAIN QUEBEC).//P22053

[1617] F-HEMBA1006426//!!!! ALU SUBFAMILY SX WARNING ENTRY !!!!//1.8e-36:78:74//HOMO SAPIENS (HUMAN).//P39195

[1618] F-HEMBA1006438//HYPOTHETICAL 8.1 KD PROTEIN (ORF65).//1.0:38:36//GUILLARDIA THETA (CRYPTOMONAS PHI).//O78421

[1619] F-HEMBA1006445//RAS-LIKE PROTEIN 3.//1.9e-06:40:47//RHIZOMUCOR RACEMOSUS (MUCOR CIRCINELLOIDES F. LUSITANICUS).//P22280

[1620] F-HEMBA1006446

[1621] F-HEMBA1006461//!!!! ALU SUBFAMILY SC WARNING ENTRY !!!!//4.1e-18:68:67//HOMO SAPIENS (HUMAN).//P39192

[1622] F-HEMBA1006467

[1623] F-HEMBA1006471

[1624] F-HEMBA1006474//40 KD PROTEIN.//1.1e-37:231:38//BORNA DISEASE VIRUS (BDV).//Q01552

[1625] F-HEMBA1006483//!!!! ALU SUBFAMILY SC WARNING ENTRY !!!!//6.1e-38:77:74//HOMO SAPIENS (HUMAN).//P39192

[1626] F-HEMBA1006485//HYPOTHETICAL 9.3 KD PROTEIN IN NAD3-NAD7 INTERGENIC REGION (ORF 79).//0.91:30:40//MARCHANTIA POLYMORPHA (LIVERWORT).//P38465

[1627] F-HEMBA1006486//LINE-1 REVERSE TRANSCRIPTASE HOMOLOG.//1.1e-12:78:51//HOMO SAPIENS (HUMAN).//P08547

[1628] F-HEMBA1006489//FUN34 PROTEIN.//0.94:58:37//SACCHAROMYCES CEREVISIAE (BAKER'S YEAST).//P32907

[1629] F-HEMBA1006492//NADH-UBIQUINONE OXIDOREDUCTASE MWFE SUBUNIT (EC 1.6.5.3) (EC 1.6.99.3) (COMPLEX I-MWFE) (CI-MWFE).//0.87:44:36//HOMO SAPIENS (HUMAN).//O15239

[1630] F-HEMBA1006494//FERREDOXIN-LIKE PROTEIN IN NIF REGION.//0.11:46:26//RHIZOBIUM LEGUMINOSARUM (BIOVAR TRIFOLII).//P42711

[1631] F-HEMBA1006497

[1632] F-HEMBA1006502//!!!! ALU SUBFAMILY J WARNING ENTRY !!!!//0.15:26:73//HOMO SAPIENS (HUMAN).//P39188

[1633] F-HEMBA1006507//DIAPHANOUS PROTEIN.//0.0055:129:28//DROSOPHILA MELANOGASTER (FRUIT FLY).//P48608

[1634] F-HEMBA1006521//3-OXOACYL-[ACYL-CARRIER PROTEIN] REDUCTASE (EC 1.1.1.100) (3-KETOACYL- ACYL CARRIER PROTEIN REDUCTASE).//1.1e-32:177:41//ESCHERICHIA COLI.//P25716

[1635] F-HEMBA1006530//NADH-UBIQUINONE OXIDOREDUCTASE CHAIN 5 (EC 1.6.5.3) (FRAGMENT).//0.052:84:26//LEISHMANIA TARENTOLAE (SAUROLEISHMANIA TARENTOLAE).//P15583

[1636] F-HEMBA1006535//INHIBITOR OF APOPTOSIS PROTEIN 1 (MIAP1) (MIAP-1).//6.6e-05:53:39//MUS MUSCULUS (MOUSE).//O08863

[1637] F-HEMBA1006540//PRESYNAPTIC PROTEIN SAP97 (SYNAPSE-ASSOCIATED PROTEIN 97) (DISCS, LARGE HOMOLOG 1).//2.1e-07:206:23//RATTUS NORVEGICUS (RAT).//Q62696

[1638] F-HEMBA1006546//PROBABLE E5 PROTEIN.//0.11:70:32//HUMAN PAPILLOMAVIRUS TYPE 51.//P26553

[1639] F-HEMBA1006559//SUPPRESSOR PROTEIN SRP40.//0.015:221:20//SACCHAROMYCES CEREVISIAE (BAKER'S YEAST).//P32583

[1640] F-HEMBA1006562//SALIVARY PROLINE-RICH PROTEIN PO PRECURSOR (ALLELE S).//1.5e-07:122:33//HOMO SAPIENS (HUMAN).//P10163

[1641] F-HEMBA1006566//CELL DIVISION PROTEIN KINASE 2 (EC 2.7.1.-) (CDC2 HOMOLOG EG1 PROTEIN KINASE).//0.63:53:37//XENOPUS LAEVIS (AFRICAN CLAWED FROG).//P23437

[1642] F-HEMBA1006569//COLLAGEN ALPHA 2(I) CHAIN (FRAGMENT).//4.4e-06:88:39//BOS TAURUS (BOVINE).//P02465

[1643] F-HEMBA1006579

[1644] F-HEMBA1006583//PROLINE-RICH PROTEIN MP-2 PRECURSOR.//0.011:61:40//MUS MUSCULUS (MOUSE).//P05142

[1645] F-HEMBA1006595//!!!! ALU SUBFAMILY SQ WARNING ENTRY !!!!//5.6e-34:93:77//HOMO SAPIENS (HUMAN).//P39194

[1646] F-HEMBA1006597//!!!! ALU SUBFAMILY SX WARNING ENTRY !!!!//1.9e-26:75:74//HOMO SAPIENS (HUMAN).//P39195

[1647] F-HEMBA1006612//SUPPRESSOR PROTEIN SRP40.//0.026:221:22//SACCHAROMYCES CEREVISIAE (BAKER'S YEAST).//P32583

[1648] F-HEMBA1006617//!!!! ALU SUBFAMILY J WARNING ENTRY !!!!//6.6e-20:73:63//HOMO SAPIENS (HUMAN).//P39188

[1649] F-HEMBA1006624//HYPOTHETICAL 41.9 KD PROTEIN IN SDS3-THS1 INTERGENIC REGION.//2.6e-31:209:44//SACCHAROMYCES CEREVISIAE (BAKER'S YEAST).//P40506

[1650] F-HEMBA1006631//HYPOTHETICAL 62.8 KD PROTEIN IN TAF145-YOR1 INTERGENIC REGION.//1.5e-15:131:41//SACCHAROMYCES CEREVISIAE (BAKER'S YEAST).//P53331

[1651] F-HEMBA1006635

[1652] F-HEMBA1006639//POLYADENYLATE-BINDING PROTEIN 1 (POLY(A) BINDING PROTEIN 1) (PABP 1).//2.2e-1:48:75//MUS MUSCULUS (MOUSE).//P29341

[1653] F-HEMBA1006643//LONG NEUROTOXIN CR1 PRECURSOR (KAPPA NEUROTOXIN).//0.28:48:27//BUNGARUS MULTICINCTUS (MANY-BANDED KRAIT).//P15817

[1654] F-HEMBA1006648//ZINC FINGER PROTEIN 12 (ZINC FINGER PROTEIN KOX3) (FRAGMENT).//0.26:17:47//HOMO SAPIENS (HUMAN).//P17014

[1655] F-HEMBA1006652//60S RIBOSOMAL PROTEIN L7.//2.4e-44:206:47//MUS MUSCULUS (MOUSE).//P14148

[1656] F-HEMBA1006653

[1657] F-HEMBA1006659

[1658] F-HEMBA1006665//LINE-1 REVERSE TRANSCRIPTASE HOMOLOG.//0.018:43:58//HOMO SAPIENS (HUMAN).//P08547

[1659] F-HEMBA1006674//TRANSCRIPTION INITIATION FACTOR TFIID 135 KD SUBUNIT (TAFII-135) (TAFII135) (TAFII-130) (TAF1130).//2.9e-05:154:33//HOMO SAPIENS (HUMAN).//O00268

[1660] F-HEMBA1006676//HYPOTHETICAL PROLINE-RICH PROTEIN (FRAGMENT).//3.6e-09:52:51//OWENIA FUSIFORMIS.//P21260

[1661] F-HEMBA1006682

[1662] F-HEMBA1006695//!!!! ALU SUBFAMILY J WARNING ENTRY !!!!//2.1e-06:35:65//HOMO SAPIENS (HUMAN).//P39188

[1663] F-HEMBA1006696

[1664] F-HEMBA1006708//HYPOTHETICAL 46.4 KD TRP-ASP REPEATS CONTAINING PROTEIN IN PMC1-TFG2 INTERGENIC REGION.//3.4e-19:104:45//SACCHAROMYCES CEREVISIAE (BAKER'S YEAST).//P53196

[1665] F-HEMBA1006709//RETINOIC ACID RECEPTOR RXR-BETA.//0.24:111:36//HOMO SAPIENS (HUMAN).//P28702

[1666] F-HEMBA1006717

[1667] F-HEMBA1006737//ANKYRIN, BRAIN VARIANT 2 (ANKYRIN B) (ANKYRIN, NONERYTHROID) (FRAGMENT).//5.8e-09:111:40//HOMO SAPIENS (HUMAN).//Q01485

[1668] F-HEMBA1006744//!!!! ALU SUBFAMILY SB2 WARNING ENTRY !!!!//1.8e-32:84:78//HOMO SAPIENS (HUMAN)./MP39191

[1669] F-HEMBA1006754//LINE-1 REVERSE TRANSCRIPTASE HOMOLOG.//1.3e-75:220:62//HOMO SAPIENS (HUMAN).//P08547

[1670] F-HEMBA1006758//VASCULAR ENDOTHELIAL-CADHERIN PRECURSOR (VE-CADHERIN) (CADHERIN-5) (7B4 ANTIGEN) (CD144 ANTIGEN).//0.024:110:29//HOMO SAPIENS (HUMAN).//P33151

[1671] F-HEMBA1006767

[1672] F-HEMBA1006779//MITOCHONDRIAL RIBOSOMAL PROTEIN S12.//0.67:19:42//LEISHMANIA TARENTOLAE (SAUROLEISHMANIA TARENTOLAE).//Q34940

[1673] F-HEMBA1006780

[1674] F-HEMBA1006789//PROLINE-RICH PROTEIN MP-3 (FRAGMENT).//0.056:98:30//MUS MUSCULUS (MOUSE).//P05143

[1675] F-HEMBA1006795//LINE-1 REVERSE TRANSCRIPTASE HOMOLOG.//2.9e-11:143:30//NYCTICEBUS COUCANG (SLOW LORIS).//P08548

[1676] F-HEMBA1006796//WISKOTT-ALDRICH SYNDROME PROTEIN HOMOLOG (WASP).//0.16:38:42//MUS MUSCULUS (MOUSE).//P70315

[1677] F-HEMBA1006807//HYPOTHETICAL 46.4 KD PROTEIN T16H12.5 IN CHROMOSOME III.//4.4e-75:184:77//CAENORHABDITIS ELEGANS.//P34568

[1678] F-HEMBA1006821//!!!!! ALU SUBFAMILY SQ WARNING ENTRY !!!!//0.011:20:85//HOMO SAPIENS (HUMAN).//P39194

[1679] F-HEMBA1006824//PROTEIN B11.//0.44:27:44//VACCINIA VIRUS (STRAIN WR).//Q01229

[1680] F-HEMBA1006832//HYPOTHETICAL 34.6 KD PROTEIN C13G5.2 IN CHROMOSOME III.//1.0:46:36//CAENORHABDITIS ELEGANS.//P34327

[1681] F-HEMBA1006849

[1682] F-HEMBA1006865//ACROSIN INHIBITORS IIA AND IIB (BUSI-II).//1.0:41:31//BOS TAURUS (BOVINE).//P01001

[1683] F-HEMBA1006877//OXYSTEROL-BINDING PROTEIN.//3.7e-26:239:36//ORYCTOLAGUS CUNICULUS (RABBIT).//P16258

[1684] F-HEMBA1006885//HYPOTHETICAL 27.2 KD PROTEIN F09E5.8 IN CHROMOSOME II.//4.5e-38:185:43//CAENORHABDITIS ELEGANS.//P52057

[1685] F-HEMBA1006900

[1686] F-HEMBA1006914//UBIQUITIN-ACTIVATING ENZYME E1-LIKE (POLYMERASE-INTERACTING PROTEIN 2).//5.2e-27:269:33//SACCHAROMYCES CEREVISIAE (BAKER'S YEAST).//P52488

[1687] F-HEMBA1006921//CYTOTOXIN 3 (COMPONENT 3.20).//0.99:32:37//NAJA MELANOLEUCA (FOREST COBRA) (BLACK-LIPPED COBRA).//P01473

[1688] F-HEMBA1006926//ATROPHIN-1 (DENTATORUBRAL-PALLIDOLUYSIAN ATROPHY PROTEIN).//0.0024:148:33//RATTUS NORVEGICUS (RAT).//P54258

[1689] F-HEMBA1006929//HYPOTHETICAL PROTEIN MJ0525.//0.95:35:20//METHANOCOCCUS JANNASCHII.//Q57945

[1690] F-HEMBA1006936//SALIVARY ACIDIC PROLINE-RICH PHOSPHOPROTEIN 1/2 PRECURSOR (PRP-1/PRP-3) (PRP-2/PRP-4) (PIF-F/PIF-S) (PROTEIN A/PROTEIN C) [CONTAINS: PEPTIDE P-C].//0.074:116:31//HOMO SAPIENS (HUMAN).//P02810

[1691] F-HEMBA1006938

[1692] F-HEMBA1006941//THIOREDOXIN H-TYPE 1 (TRX-H 1).//2.1e-13:90:33//NICOTIANA TABACUM (COMMON TOBACCO).//P29449

[1693] F-HEMBA1006949

[1694] F-HEMBA1006973//COLLAGEN ALPHA 1 (XII) CHAIN (FRAGMENTS).//0.75:29:55//BOS TAURUS (BOVINE).//P25508

[1695] F-HEMBA1006976//CMP-N-ACETYLNEURAMINATE-BETA-GALACTOSAMIDE-ALPHA-2,3-SIALYLTRANSFERASE (EC 2.4.99.-) (BETA-GALACTOSIDE ALPHA-2,3-SIALYLTRANSFERASE) (ST3GALIII) (ALPHA 2,3-ST) (GAL-NAC6S) (STZ) (SIAT4-C) (SAT-3) (ST-4).//3.9e-108:117:95//HOMO SAPIENS (HUMAN).//Q11206

[1696] F-HEMBA1006993

[1697] F-HEMBA1006996//HYPOTHETICAL 8.7 KD PROTEIN IN RPL22-RPL23 INTERGENIC REGION (ORF70).//0.12:51:33//ASTASIA LONGA (EUGLENOPHYCEAN ALGA).//P34779

[1698] F-HEMBA1007002//PLATELET GLYCOPROTEIN IX PRECURSOR (GPIX) (CD42A).//0.00096:60:33//HOMO SAPIENS (HUMAN).//P14770

[1699] F-HEMBA1007017//HYPOTHETICAL 7.2 KD PROTEIN IN CYAY-DAPF INTERGENIC REGION.//1.0:25:56//ESCHERICHIA COLI.//P39166

[1700] F-HEMBA1007018//DYNEIN LIGHT INTERMEDIATE CHAIN 1, CYTOSOLIC (LIC57/59) (DYNEIN LIGHT CHAIN A) (DLC-A).//8.5e-120:278:80//GALLUS GALLUS (CHICKEN).//Q90828

[1701] F-HEMBA1007045//SKIN SECRETORY PROTEIN XP2 PRECURSOR (APEG PROTEIN).//2.1e-12:158:29//XENOPUS LAEVIS (AFRICAN CLAWED FROG).//P17437

[1702] F-HEMBA1007051

[1703] F-HEMBA1007052//60S RIBOSOMAL PROTEIN L37-B (L35) (YP55).//0.94:37:35//SACCHAROMYCES CEREVISIAE (BAKER'S YEAST).//P51402

[1704] F-HEMBA1007062//ATP SYNTHASE PROTEIN 8 (EC 3.6.1.34) (A6L).//0.93:55:29//RHINOCEROS UNICORNIS (GREATER INDIAN RHINOCEROS).//Q96063

[1705] F-HEMBA1007066//ECLOSION HORMONE PRECURSOR (ECDYSIS ACTIVATOR) (EH).//0.58:49:38//BOMBYX MORI (SILK MOTH).//P25331

[1706] F-HEMBA1007073//PUTATIVE SMALL MEMBRANE PROTEIN (ORF 4).//0.86:46:34//CANINE ENTERIC CORONAVIRUS (STRAIN INSAVC-1) (CCV).//P36696

[1707] F-HEMBA1007078//!!!! ALU SUBFAMILY SP WARNING ENTRY !!!!//8.6e-29:56:67//HOMO SAPIENS (HUMAN).//P39193

[1708] F-HEMBA1007080//SKIN SECRETORY PROTEIN XP2 PRECURSOR (APEG PROTEIN).//0.028:122:30//XENOPUS LAEVIS (AFRICAN CLAWED FROG).//P17437

[1709] F-HEMBA1007085//RTOA PROTEIN (RATIO-A).//7.4e-11:221:31//DICTYOSTELIUM DISCOIDEUM (SLIME MOLD).//P54681

[1710] F-HEMBA1007087//HYPOTHETICAL PROTEIN MJ0162.//3.3e-29:173:36//METHANOCOCCUS JANNASCHII.//Q57626

[1711] F-HEMBA1007112

[1712] F-HEMBA1007113

[1713] F-HEMBA1007121//INOSITOL POLYPHOSPHATE 1-PHOSPHATASE (EC 3.1.3.57) (IPP).//5.4e-07:90:28//HOMO SAPIENS (HUMAN).//P49441

[1714] F-HEMBA1007129//HIRUSTASIN.//0.88:37:32//HIRUDO MEDICINALIS (MEDICINAL LEECH).//P80302

[1715] F-HEMBA1007147//HYPOTHETICAL 12.0 KD PROTEIN IN DST1-HEM2 INTERGENIC REGION.//0.92:23:34//SACCHAROMYCES CEREVISIAE (BAKER'S YEAST).//P53182

[1716] F-HEMBA1007149//BACTERIOCIN MICROCIN B17 PRECURSOR (MCB17).//0.0078:17:70//ESCHERICHIA COLI.//P05834

[1717] F-HEMBA1007151//WDNM1 PROTEIN PRECURSOR.//0.25:45:37//MUS MUSCULUS (MOUSE).//Q62477

[1718] F-HEMBA1007174//HYPOTHETICAL 45.1 KD PROTEIN IN RPS5-ZMS1 INTERGENIC REGION.//6.9e-18:97:47//SACCHAROMYCES CEREVISIAE (BAKER'S YEAST).//P47160

[1719] F-HEMBA1007178//!!!! ALU SUBFAMILY SX WARNING ENTRY !!!!//9.8e-06:38:65//HOMO SAPIENS (HUMAN).//P39195

[1720] F-HEMBA1007194//GLUCOSE-6-PHOSPHATE 1-DEHYDROGENASE, CHOLOROPLAST ISOFORM PRECURSOR (EC 1.1.1.49) (G6PD).//1.0:80:32//NICOTIANA TABACUM (COMMON TOBACCO).//Q43793

[1721] F-HEMBA1007203//PROTEIN A22.//1.0:115:26//VARIOLA VIRUS.//P33845

[1722] F-HEMBA1007206

[1723] F-HEMBA1007224//HYPOTHETICAL 35.7 KD PROTEIN C41C4.6 IN CHROMOSOME II.//2.4e-05:92:30//CAENORHABDITIS ELEGANS.//Q09275

[1724] F-HEMBA1007243//HYPOXANTHINE-GUANINE PHOSPHORIBOSYLTRANSFERASE (EC 2.4.2.8) (HGPRT) (HGPRTASE) (HPRT B).//3.1e-74:205:67//MUS MUSCULUS (MOUSE).//P00493

[1725] F-HEMBA1007251//VITELLINE MEMBRANE PROTEIN VM26AB PRECURSOR (PROTEIN TU-4) (PROTEIN SV23).//0.52:108:30//DROSOPHILA MELANOGASTER (FRUIT FLY).//P13238

[1726] F-HEMBA1007256

[1727] F-HEMBA1007267//CALICIN (FRAGMENT).//0.060:88:31//HOMO SAPIENS (HUMAN)./Q13939

[1728] F-HEMBA1007273//HYPOTHETICAL 8.1 KD PROTEIN (ORF65).//0.95:40:37//GUILLARDIA THETA (CRYPTOMONAS PHI).//O78421

[1729] F-HEMBA1007279//!!!! ALU SUBFAMILY J WARNING ENTRY !!!!//4.6e-24:98:64//HOMO SAPIENS (HUMAN).//P39188

[1730] F-HEMBA1007281

[1731] F-HEMBA1007288//HYPOTHETICAL 13.5 KD PROTEIN IN ZMS1-MNS1 INTERGENIC REGION.//0.88:11:54//SACCHAROMYCES CEREVISIAE (BAKER'S YEAST).//P47162

[1732] F-HEMBA1007300//CGMP-SPECIFIC 3′,5′-CYCLIC PHOSPHODIESTERASE (EC 3.1.4.17) (CGB-PDE).//2.7e-43:220:41//BOS TAURUS (BOVINE).//Q28156

[1733] F-HEMBA1007301//PROCOLLAGEN ALPHA 1(III) CHAIN PRECURSOR.//3.3e-22:115:33//HOMO SAPIENS (HUMAN).//P02461

[1734] F-HEMBA1007319

[1735] F-HEMBA1007320//HYPOTHETICAL 28.0 KD PROTEIN IN GLOB-RNHA INTERGENIC REGION.//1.0:48:37//ESCHERICHIA COLI.//P75672

[1736] F-HEMBA1007322//THREONINE DEHYDRATASE OPERON ACTIVATOR PROTEIN.//1.0:59:33//ESCHERICHIA COLI.//P11866

[1737] F-HEMBA1007327

[1738] F-HEMBA1007341//!!!! ALU SUBFAMILY J WARNING ENTRY !!!!//9.1e-12:37:62//HOMO SAPIENS (HUMAN).//P39188

[1739] F-HEMBA1007342//PROBABLE E5 PROTEIN.//0.89:96:29//PYGMY CHIMPANZEE PAPILLOMAVIRUS TYPE 1.//Q02268

[1740] F-HEMBA1007347//INSULIN-LIKE GROWTH FACTOR BINDING PROTEIN 2 PRECURSOR (IGFBP-2) (IBP-2) (IGF-BINDING PROTEIN 2).//0.92:62:43//OVIS ARIES (SHEEP).//Q29400

[1741] F-HEMBB1000005//WEAK NEUROTOXIN 5.//0.98:30:33//NAJA NAJA (INDIAN COBRA).//P29179

[1742] F-HEMBB1000008//!!!! ALU SUBFAMILY SX WARNING ENTRY !!!!//2.7e-35:73:84//HOMO SAPIENS (HUMAN).//P39195

[1743] F-HEMBB1000018//HYPOTHETICAL BHLF1 PROTEIN.//0.39:90:37//EPSTEIN-BARR VIRUS (STRAIN B95-8) (HUMAN HERPESVIRUS 4).//P03181

[1744] F-HEMBB1000024//VIRE LOCUS 9 KD VIRULENCE PROTEIN.//0.66:36:41//AGROBACTERIUM TUMEFACIENS.//P08061

[1745] F-HEMBB1000025//MUSCARINIC TOXIN ALPHA (MT-ALPHA).//0.46:32:40//DENDROASPIS POLYLEPIS POLYLEPIS (BLACK MAMBA).//P80494

[1746] F-HEMBB1000030//SUPPRESSOR PROTEIN SRP40.//6.7e-07:50:52//SACCHAROMYCES CEREVISIAE (BAKER'S YEAST).//P32583

[1747] F-HEMBB1000036//HYPOTHETICAL 43.2 KD PROTEIN C34E10.1 IN CHROMOSOME III.//2.5e-07:120:29//CAENORHABDITIS ELEGANS.//P46576

[1748] F-HEMBB1000037//HYPOTHETICAL 59.9 KD PROTEIN IN SGA1-KTR7 INTERGENIC REGION.//1.7e-05:71:29//SACCHAROMYCES CEREVISIAE (BAKER'S YEAST).M/P40492

[1749] F-HEMBB1000039//VERY HYPOTHETICAL 11.9 KD PROTEIN C4H3.12C IN CHROMOSOME 1.//1.0:61:21//SCHIZOSACCHAROMYCES POMBE (FISSION YEAST).//Q10219

[1750] F-HEMBB1000044

[1751] F-HEMBB1000048//HYPOTHETICAL 15.7 KD PROTEIN IN IDH-DEOR INTERGENIC REGION.//1.0:63:31//BACILLUS SUBTILIS.//P54942

[1752] F-HEMBB1000050//!!!! ALU SUBFAMILY SQ WARNING ENTRY !!!!//9.0e-14:34:79//HOMO SAPIENS (HUMAN).//P39194

[1753] F-HEMBB1000054//!!!! ALU SUBFAMILY SP WARNING ENTRY !!!!//5.9e-31:45:73//HOMO SAPIENS (HUMAN).//P39193

[1754] F-HEMBB1000055//IMUSCARINIC TOXIN ALPHA (MT-ALPHA).//1.0:14:57//DENDROASPIS POLYLEPIS POLYLEPIS (BLACK MAMBA).//P80494

[1755] F-HEMBB1000059//!!!! ALU SUBFAMILY SX WARNING ENTRY !!!!//1.0e-21:82:59//HOMO SAPIENS (HUMAN).//P39195

[1756] F-HEMBB1000083//CHROMOGRANIN A PRECURSOR (CGA) [CONTAINS: PANCREASTATIN; BETA-GRANIN; WE-14].//0.87:172:28//RATTUS NORVEGICUS (RAT).//P10354

[1757] F-HEMBB1000089//HYPOTHETICAL 9.5 KD PROTEIN IN SPEA-METK INTERGENIC REGION (F83).//1.0:42:33//ESCHERICHIA COLI.//P46879

[1758] F-HEMBB1000099//!!!! ALU SUBFAMILY SB WARNING ENTRY !!!!//7.7e-08:31:87//HOMO SAPIENS (HUMAN).//P39189

[1759] F-HEMBB1000103//LINE-1 REVERSE TRANSCRIPTASE HOMOLOG.//1.4e-38:136:58//HOMO SAPIENS (HUMAN).//P08547

[1760] F-HEMBB1000113//!!!! ALU SUBFAMILY J WARNING ENTRY !!!!//3.9e-13:57:64//HOMO SAPIENS (HUMAN).//P39188

[1761] F-HEMBB1000119//MAF PROTEIN.//3.6e-32:195:43//BACILLUS SUBTILIS.//Q02169

[1762] F-HEMBB1000136//HYPOTHETICAL 12.7 KD PROTEIN IN PCS60-ABD1 INTERGENIC REGION.//0.65:71:32//SACCHAROMYCES CEREVISIAE (BAKER'S YEAST).//P38327

[1763] F-HEMBB1000141//B-CELL GROWTH FACTOR PRECURSOR (BCGF-12 KD).//0.00014:34:64//HOMO SAPIENS (HUMAN).//P20931

[1764] F-HEMBB1000144//!!!! ALU SUBFAMILY SB2 WARNING ENTRY !!!!//2.0e-26:81:69//HOMO SAPIENS (HUMAN).//P39191

[1765] F-HEMBB1000173//!!!! ALU SUBFAMILY J WARNING ENTRY !!!!//9.2e-29:91:71//HOMO SAPIENS (HUMAN).//P39188

[1766] F-HEMBB1000175//ANTIMICROBIAL PEPTIDE ENAP-1 (FRAGMENT).//0.97:41:36//EQUUS CABALLUS (HORSE).//P80930

[1767] F-HEMBB1000198//HYPOTHETICAL 7.7 KD PROTEIN YCF33 (ORF67).//0.91:21:52//PORPHYRA PURPUREA.//P51329

[1768] F-HEMBB1000215//!!!! ALU SUBFAMILY SC WARNING ENTRY !!!!//3.4e-08:39:76//HOMO SAPIENS (HUMAN).//P39192

[1769] F-HEMBB1000217//DNA DAMAGE TOLERANCE PROTEIN RHC31 (RAD31 HOMOLOG).//2.9e-32:174:40//SACCHAROMYCES CEREVISIAE (BAKER'S YEAST).//Q06624

[1770] F-HEMBB1000218//ATP SYNTHASE PROTEIN 8 (EC 3.6.1.34) (A6L).//0.73:31:38//MICROTUS PENNSYLVANICUS (MEADOW VOLE).//P24949

[1771] F-HEMBB1000226//HYPOTHETICAL 37.0 KD PROTEIN B0495.8 IN CHROMOSOME II.//6.5e-26:191:34//CAENORHABDITIS ELEGANS.//Q09217

[1772] F-HEMBB1000240

[1773] F-HEMBB1000244//!!!! ALU SUBFAMILY J WARNING ENTRY !!!!//1.9e-05:44:61//HOMO SAPIENS (HUMAN).//P39188

[1774] F-HEMBB1000250

[1775] F-HEMBB1000258

[1776] F-HEMBB1000264//CUTICLE COLLAGEN SQT-1.//0.15:89:33//CAENORHABDITIS ELEGANS.//P12114

[1777] F-HEMBB1000266//TRANSLATION INITIATION FACTOR IF-2.//2.7e-06:167:22//SACCHAROMYCES CEREVISIAE (BAKER'S YEAST).//P39730

[1778] F-HEMBB1000272//CYTOCHROME C OXIDASE POLYPEPTIDE VIB (EC 1.9.3.1) (AED).//0.75:30:43//BOS TAURUS (BOVINE).//P00429

[1779] F-HEMBB1000274//CORNIFIN (SMALL PROLINE-RICH PROTEIN I) (SPR-I) (SMALL PROLINE-RICH SQUAMOUS CELL MARKER) (SPRP).//1.0:38:36//SUS SCROFA (PIG).//P35323

[1780] F-HEMBB1000284//CALTRIN (CALCIUM TRANSPORT INHIBITOR).//1.0:56:30//MUS MUSCULUS (MOUSE).//Q09098

[1781] F-HEMBB1000307

[1782] F-HEMBB1000312

[1783] F-HEMBB1000317//THROMBOSPONDIN I PRECURSOR.//3.2e-32:135:43//HOMO SAPIENS (HUMAN).//P07996

[1784] F-HEMBB1000318//PUTATIVE SMALL MEMBRANE PROTEIN (NONSTRUCTURAL PROTEIN NS3) (NONSTRUCTURAL 9.5 KD PROTEIN).//0.41:51:3//HUMAN CORONAVIRUS (STRAIN OC43).//Q04854

[1785] F-HEMBB1000335//ZINC FINGER PROTEIN 13 (ZFP-13) (KROX-8 PROTEIN) (FRAGMENT).//0.82:33:45//MUS MUSCULUS (MOUSE).//P10754

[1786] F-HEMBB1000336//ALDEHYDE OXIDASE (EC 1.2.3.1) (FRAGMENTS).//0.80:44:40//ORYCTOLAGUS CUNICULUS (RABBIT).//P80456

[1787] F-HEMBB1000337//SPLICING FACTOR, ARGININE/SERINE-RICH 4 (PRE-MRNA SPLICING FACTOR SRP75).//0.94:118:22//HOMO SAPIENS (HUMAN).//Q08170

[1788] F-HEMBB1000338//MALE SPECIFIC SPERM PROTEIN MST84DA.//0.042:33:39//DROSOPHILA MELANOGASTER (FRUIT FLY).//Q01642

[1789] F-HEMBB1000339//!!!! ALU SUBFAMILY J WARNING ENTRY !!!!//2.2e-14:54:55//HOMO SAPIENS (HUMAN).//P39188

[1790] F-HEMBB1000341//GENE 74 PROTEIN (GP74).//1.0:39:33//MYCOBACTERIOPHAGE L5.//Q05289

[1791] F-HEMBB1000343

[1792] F-HEMBB1000354//!!!! ALU SUBFAMILY J WARNING ENTRY !!!!//1.1e-15:83:56//HOMO SAPIENS (HUMAN).//P39188

[1793] F-HEMBB1000369//PROTEIN Q300.//0.99:27:40//MUS MUSCULUS (MOUSE).//Q02722

[1794] F-HEMBB1000374//!!!! ALU SUBFAMILY SB WARNING ENTRY !!!!//4.7e-34:56:78//HOMO SAPIENS (HUMAN).//P39189

[1795] F-HEMBB1000376

[1796] F-HEMBB1000391//COLLAGEN ALPHA 1 (XII) CHAIN (FRAGMENTS).//0.0013:79:35//BOS TAURUS (BOVINE).//P25508

[1797] F-HEMBB1000399//CHECKPOINT PROTEIN RAD 17.//2.8e-15:187:31//SCHIZOSACCHAROMYCES POMBE (FISSION YEAST).//P50531

[1798] F-HEMBB1000402//NADH-UBIQUINONE OXIDOREDUCTASE CHAIN 5 (EC 1.6.5.3) (FRAGMENT).//0.027:60:38//LEISHMANIA TARENTOLAE (SAUROLEISHMANIA TARENTOLAE).//P15583

[1799] F-HEMBB1000404//CYANELLE 50S RIBOSOMAL PROTEIN L28.//0.94:29:27//CYANOPHORA PARADOXA.//P48129

[1800] F-HEMBB1000420//SPLICEOSOME ASSOCIATED PROTEIN 49 (SAP 49) (SF3B53).//0.023:97:35//HOMO SAPIENS (HUMAN).//Q15427

[1801] F-HEMBB1000434//!!!! ALU SUBFAMILY SQ WARNING ENTRY !!!!//4.8e-20:111:54//HOMO SAPIENS (HUMAN).//P39194

[1802] F-HEMBB1000438//HYPOTHETICAL 7.9 KD PROTEIN IN GP55-NRDG INTERGENIC REGION.//0.93:24:50//BACTERIOPHAGE T4.//P07076

[1803] F-HEMBB1000441//!!!! ALU SUBFAMILY J WARNING ENTRY !!!!//4.4e-23:85:70//HOMO SAPIENS (HUMAN).//P39188

[1804] F-HEMBB1000449//!!!! ALU SUBFAMILY SX WARNING ENTRY !!!!//0.88:27:51//HOMO SAPIENS (HUMAN).//P39195

[1805] F-HEMBB1000455

[1806] F-HEMBB1000472

[1807] F-HEMBB1000480//PROTEIN STBC.//1.0:52:30//ESCHERICHIA COLI.//P11905

[1808] F-HEMBB1000487//SHORT NEUROTOXIN I (NEUROTOXIN ALPHA) (NEUROTOXIN II).//0.93:29:34//NAJA OXIANA (CENTRAL ASIAN COBRA) (OXUS COBRA).//P01427

[1809] F-HEMBB1000490//!!!! ALU SUBFAMILY SX WARNING ENTRY !!!!//2.3e-16:50:80//HOMO SAPIENS (HUMAN).//P39195

[1810] F-HEMBB1000491

[1811] F-HEMBB1000493//3A PROTEIN.//1.0:51:35//AVIAN INFECTIOUS BRONCHITIS VIRUS (STRAIN BEAUDETTE) (IBV).//P30237

[1812] F-HEMBB1000510//LINE-1 REVERSE TRANSCRIPTASE HOMOLOG.//9.7e-27:132:45//HOMO SAPIENS (HUMAN).//P08547

[1813] F-HEMBB1000518//CYTOCHROME C OXIDASE POLYPEPTIDE III (EC 1.9.3.1).//0.021:47:40//LEISHMANIA TARENTOLAE (SAUROLEISHMANIA TARENTOLAE).//P14546

[1814] F-HEMBB1000523

[1815] F-HEMBB1000530//COLLAGEN ALPHA 1(XIV) CHAIN PRECURSOR (UNDULIN).//9.8e-14:43:83//GALLUS GALLUS (CHICKEN).//P32018

[1816] F-HEMBB1000550//NADH-UBIQUINONE OXIDOREDUCTASE CHAIN 5 (EC 1.6.5.3).//0.19:97:30//TRYPANOSOMA BRUCEI BRUCEI.//P04540

[1817] F-HEMBB1000554//MATERNAL B9.10 PROTEIN (P30 B9.10).//0.94:82:25//XENOPUS LAEVIS (AFRICAN CLAWED FROG).//P40744

[1818] F-HEMBB1000556//TRANSCRIPTION INITIATION FACTOR TFIID 135 KD SUBUNIT (TAFII-135) (TAFII135) (TAFII-130) (TAFII130).//0.043:201:29//HOMO SAPIENS (HUMAN).//O00268

[1819] F-HEMBB1000564//ATP SYNTHASE PROTEIN 8 (EC 3.6.1.34) (A6L).//1.0:52:34//METRIDIUM SENILE (BROWN SEA ANEMONE) (FRILLED SEA ANEMONE).//O47493

[1820] F-HEMBB1000573//!!!! ALU SUBFAMILY SB2 WARNING ENTRY !!!!//2.3e-10:52:73//HOMO SAPIENS (HUMAN).//P39191

[1821] F-HEMBB1000575//!!!! ALU SUBFAMILY SC WARNING ENTRY !!!!//1.8e-26:76:76//HOMO SAPIENS (HUMAN).//P39192

[1822] F-HEMBB1000586//NADH-UBIQUINONE OXIDOREDUCTASE MLRQ SUBUNIT (EC 1.6.5.3) (EC 1.6.99.3) (COMPLEX I-MLRQ) (CI-MLRQ).//0.74:23:52//HOMO SAPIENS (HUMAN).//O00483

[1823] F-HEMBB1000589//!!!! ALU SUBFAMILY SP WARNING ENTRY !!!!//2.9e-25:61:75//HOMO SAPIENS (HUMAN).//P39193

[1824] F-HEMBB1000591//ATP SYNTHASE PROTEIN 8 (EC 3.6.1.34) (A6L).//1.0:34:35//PETROMYZON MARINUS (SEA LAMPREY).//Q35537

[1825] F-HEMBB1000592//SMALL PROLINE-RICH PROTEIN 2-1.//0.0016:49:42//HOMO SAPIENS (HUMAN).//P35326

[1826] F-HEMBB1000593//COLLAGEN ALPHA I (III) CHAIN (FRAGMENTS).//0.0070:189:32//GALLUS GALLUS (CHICKEN).//P12105

[1827] F-HEMBB1000598//LINE-1 REVERSE TRANSCRIPTASE HOMOLOG.//5.7e-10:110:41//NYCTICEBUS COUCANG (SLOW LORIS).//P08548

[1828] F-HEMBB1000623//HYPOTHETICAL 54.9 KD PROTEIN C02F5.7 IN CHROMOSOME III.//0.0022:98:28//CAENORHABDITIS ELEGANS.//P34284

[1829] F-HEMBB1000630

[1830] F-HEMBB1000631//ALPHA-2C-1 ADRENERGIC RECEPTOR (ALPHA-2C-1 ADRENOCEPTOR) (SUBTYPE C4).//8.8e-06:59:40//HOMO SAPIENS (HUMAN).//P18825

[1831] F-HEMBB1000632//GUANINE NUCLEOTIDE RELEASING PROTEIN (GNRP).//7.3e-13:173:28//MUS MUSCULUS (MOUSE).//P27671

[1832] F-HEMBB1000637//!!!! ALU SUBFAMILY SP WARNING ENTRY !!!!//4.6e-41:94:82//HOMO SAPIENS (HUMAN).//P39193

[1833] F-HEMBB1000638//INVOLUCRIN.//1.9e-06:144:29//HOMO SAPIENS (HUMAN).//P07476

[1834] F-HEMBB1000643//!!!! ALU SUBFAMILY SX WARNING ENTRY !!!!//8.3e-30:77:76//HOMO SAPIENS (HUMAN).//P39195

[1835] F-HEMBB1000649//!!!! ALU SUBFAMILY SB WARNING ENTRY !!!!//2.5e-37:58:81//HOMO SAPIENS (HUMAN).//P39189

[1836] F-HEMBB1000652//!!!! ALU SUBFAMILY SP WARNING ENTRY !!!!//2.2e-37:61:77//HOMO SAPIENS (HUMAN).//P39193

[1837] F-HEMBB1000665//HYPOTHETICAL PROTEIN BBD24.//0.83:38:36//BORRELIA BURGDORFERI (LYME DISEASE SPIROCHETE).//P70845

[1838] F-HEMBB1000671//LINE-1 REVERSE TRANSCRIPTASE HOMOLOG.//6.8e-51:74:71//HOMO SAPIENS (HUMAN).//P08547

[1839] F-HEMBB1000673//HEAT-STABLE ENTEROTOXIN A3/A4 PRECURSOR (STA3/STA4) (ST-IB) (ST-H).//0.012:37:37//ESCHERICHIA COLI.//P07965

[1840] F-HEMBB1000684//!!!! ALU SUBFAMILY SP WARNING ENTRY !!!!//3.1e-21:66:72//HOMO SAPIENS (HUMAN).//P39193

[1841] F-HEMBB1000693//HUNTINGTIN ASSOCIATED PROTEIN 1 (HAP1).//5.2e-26:121:49//RATTUS NORVEGICUS (RAT).//P54256

[1842] F-HEMBB1000705

[1843] F-HEMBB1000706

[1844] F-HEMBB1000709//HYPOTHETICAL 5.8 KD PROTEIN.//1.0:29:44//CLOVER YELLOW MOSAIC VIRUS (CYMV).//P16485

[1845] F-HEMBB1000725//RAS-RELATED PROTEIN RAB-8B.//7.4e-105:205:98//RATTUS NORVEGICUS (RAT).//P70550

[1846] F-HEMBB1000726//!!!! ALU SUBFAMILY SQ WARNING ENTRY !!!!//1.4e-25:85:70//HOMO SAPIENS (HUMAN).//P39194

[1847] F-HEMBB1000738//50S RIBOSOMAL PROTEIN L33.//1.0:41:31//THERMUS AQUATICUS (SUBSP. THERMOPHILUS).//P35871

[1848] F-HEMBB1000749//!!!! ALU SUBFAMILY SQ WARNING ENTRY !!!!//1.3e-29:42:85//HOMO SAPIENS (HUMAN).//P39194

[1849] F-HEMBB1000763//NIFU PROTEIN.//0.089:63:36//FRANKIA ALNI.//P46045

[1850] F-HEMBB1000770//CALTRIN-LIKE PROTEIN II.//0.98:13:69//CAVIA PORCELLUS (GUINEA PIG).//P22075

[1851] F-HEMBB1000774//HIGH MOBILITY GROUP PROTEIN HMG-Y.//0.029:53:32//MUS MUSCULUS (MOUSE).//P17095

[1852] F-HEMBB1000781//MAPK/ERK KINASE KINASE 2 (EC 2.7.1.-) (MEK KINASE 2) (MEKK 2).//3.5e-75:144:98//MUS MUSCULUS (MOUSE).//Q61083

[1853] F-HEMBB1000789//PUTATIVE 90.2 KD ZINC FINGER PROTEIN IN CCA1-ADK2 INTERGENIC REGION.//2.6e-49:232:43//SACCHAROMYCES CEREVISIAE (BAKER'S YEAST).//P39956

[1854] F-HEMBB1000790/!!!!! ALU SUBFAMILY J WARNING ENTRY !!!!//2.9e-16:93:51//HOMO SAPIENS (HUMAN).//P39188

[1855] F-HEMBB1000794

[1856] F-HEMBB1000807//MUSCARINIC ACETYLCHOLINE RECEPTOR M3.//0.54:111:27//GALLUS GALLUS (CHICKEN).//P49578

[1857] F-HEMBB1000810

[1858] F-HEMBB1000821

[1859] F-HEMBB1000822//HYPOTHETICAL 10 KD PROTEIN (ORF 6).//0.10:50:34//NARCISSUS MOSAIC VIRUS (NMV).//P15099

[1860] F-HEMBB1000826//B-CELL GROWTH FACTOR PRECURSOR (BCGF-12 KD).//0.00025:73:39//HOMO SAPIENS (HUMAN).//P20931

[1861] F-HEMBB1000827//HYPOTHETICAL 7.4 KD PROTEIN.//0.89:23:52//THERMOPROTEUS TENAX VIRUS 1 (STRAIN KRA1) (TTV1).//P19302

[1862] F-HEMBB1000831//MALE SPECIFIC SPERM PROTEIN MST87F.//0.98:35:40//DROSOPHILA MELANOGASTER (FRUIT FLY).//P08175

[1863] F-HEMBB1000835//LINE-1 REVERSE TRANSCRIPTASE HOMOLOG.//7.8e-31:96:46//HOMO SAPIENS (HUMAN).//P08547

[1864] F-HEMBB1000840//LINE-1 REVERSE TRANSCRIPTASE HOMOLOG.//0.00012:102:36//NYCTICEBUS COUCANG (SLOW LORIS).//P08548

[1865] F-HEMBB1000848//LINE-1 REVERSE TRANSCRIPTASE HOMOLOG.//7.3e-97:239:70//HOMO SAPIENS (HUMAN).//P08547

[1866] F-HEMBB1000852

[1867] F-HEMBB1000870

[1868] F-HEMBB1000876//METALLOTHIONEIN (MT).//0.99:14:64//PERCA FLUVIATILIS (PERCH).//P52725

[1869] F-HEMBB1000883//HYPOTHETICAL 7.8 KD PROTEIN (ORF62).//0.34:60:33//GUILLARDIA THETA (CRYPTOMONAS PHI).//O78459

[1870] F-HEMBB1000887//HISTIDINE-RICH, METAL BINDING POLYPEPTIDE.//1.0:26:42//HELICOBACTER PYLORI (CAMPYLOBACTER PYLORI).//Q48251

[1871] F-HEMBB1000888

[1872] F-HEMBB1000890

[1873] F-HEMBB1000893

[1874] F-HEMBB1000908//!!!! ALU SUBFAMILY J WARNING ENTRY !!!!!//0.0074:45:51//HOMO SAPIENS (HUMAN).//P39188

[1875] F-HEMBB1000910//PROBABLE E5 PROTEIN.//1.0:49:36//HUMAN PAPILLOMAVIRUS TYPE 58.//P26552

[1876] F-HEMBB1000913//!!!! ALU SUBFAMILY SX WARNING ENTRY !!!!//0.29:56:46//HOMO SAPIENS (HUMAN).//P39195

[1877] F-HEMBB1000915//CYTOCHROME B (EC 1.10.2.2).//2.5e-24:62:90//HOMO SAPIENS (HUMAN).//P00156

[1878] F-HEMBB1000917//!!!! ALU SUBFAMILY SP WARNING ENTRY !!!!//5.9e-26:53:66//HOMO SAPIENS (HUMAN).//P39193

[1879] F-HEMBB1000927//NEURONAL CALCIUM SENSOR I (NCS-1) (FREQUENIN).//3.9e-44:182:45//XENOPUS LAEVIS (AFRICAN CLAWED FROG).//Q91614

[1880] F-HEMBB1000947//SMALL PROLINE-RICH PROTEIN 2-1.//0.24:69:27//HOMO SAPIENS (HUMAN).//P35326 A

[1881] F-HEMBB1000959//!!!! ALU SUBFAMILY SX WARNING ENTRY !!!!//3.0e-31:89:68//HOMO SAPIENS (HUMAN).//P39195

[1882] F-HEMBB1000973//CONNECTIVE TISSUE GROWTH FACTOR PRECURSOR.//0.96:66:36//BOS TAURUS (BOVINE).//O18739

[1883] F-HEMBB1000975//HISTIDINE-RICH GLYCOPROTEIN PRECURSOR (HISTIDINE-PROLINE RICH GLYCOPROTEIN) (HPRG).//0.00042:77:41//HOMO SAPIENS (HUMAN).//P04196

[1884] F-HEMBB1000981

[1885] F-HEMBB1000985//MIPP PROTEIN (MURINE IAP-PROMOTED PLACENTA-EXPRESSED PROTEIN).//1.0e-18:178:30//MUS MUSCULUS (MOUSE).//P28575

[1886] F-HEMBB1000991

[1887] F-HEMBB1000996//HYPOTHETICAL 10.1 KD PROTEIN IN RHSD-GCL INTERGENIC REGION (ORFD3).//0.58:34:35//ESCHERICHIA COLI.//P33669

[1888] F-HEMBB1001004//PROBABLE E4 PROTEIN.//0.24:110:35//HUMAN PAPILLOMAVIRUS TYPE 5B.//P26550

[1889] F-HEMBB1001008

[1890] F-HEMBB1001011//ZINC FINGER PROTEIN 7 (ZINC FINGER PROTEIN KOX4) (ZINC FINGER PROTEIN HF.16).//3.2e-17:104:47//HOMO SAPIENS (HUMAN).//P17097

[1891] F-HEMBB1001014//EOTAXIN PRECURSOR (EOSINOPHIL CHEMOTACTIC PROTEIN).//1.0:58:39//RATTUS NORVEGICUS (RAT).//P97545

[1892] F-HEMBB1001020//!!!! ALU SUBFAMILY SB WARNING ENTRY !!!!//1.4e-07:36:75//HOMO SAPIENS (HUMAN).//P39189

[1893] F-HEMBB1001024

[1894] F-HEMBB1001037//FERREDOXIN.//1.0:52:25//MOORELLA THERMOACETICA (CLOSTRIDIUM THERMOACETICUM).//P00203

[1895] F-HEMBB1001047

[1896] F-HEMBB1001051//PROTEIN FAN (FACTOR ASSOCIATED WITH N-SMASE ACTIVATION).//3.4e-21:50:100//HOMO SAPIENS (HUMAN).//Q92636

[1897] F-HEMBB1001056//HYPOTHETICAL 29.3 KD PROTEIN (ORF92).//0.0099:115:35//ORGYIA PSEUDOTSUGATA MULTICAPSID POLYHEDROSIS VIRUS (OPMNPV).//O10341

[1898] F-HEMBB1001058//!!!! ALU SUBFAMILY SC WARNING ENTRY !!!!//1.1e-33:95:76//HOMO SAPIENS (HUMAN).//P39192

[1899] F-HEMBB1001060//HYPOTHETICAL 8.2 KD PROTEIN ZC21.7 IN CHROMOSOME III.//1.0:38:36//CAENORHABDITIS ELEGANS.//P34591

[1900] F-HEMBB1001063

[1901] F-HEMBB1001068

[1902] F-HEMBB1001096//NOXIUSTOXIN (NTX) (TOXIN 11.11).//0.99:36:38//CENTRUROIDES NOXIUS (MEXICAN SCORPION).//P08815

[1903] F-HEMBB1001102//HYPOTHETICAL 72.5 KD PROTEIN C2F7.10 IN CHROMOSOME I.//1.1e-27:115:36//SCHIZOSACCHAROMYCES POMBE (FISSION YEAST).//Q09701

[1904] F-HEMBB1001105//CLASS II HISTOCOMPATIBILITY ANTIGEN, M ALPHA CHAIN PRECURSOR.//0.80:70:40//HOMO SAPIENS (HUMAN).//P28067

[1905] F-HEMBB1001112//PROTEIN TRANSPORT PROTEIN SEC61 ALPHA SUBUNIT.//1.1e-126:287:85//RATTUS NORVEGICUS (RAT).//P38378

[1906] F-HEMBB1001114//HYPOTHETICAL 9.6 KD PROTEIN (ORF2).//0.84:62:27//BACTERIOPHAGE L2.//P42537

[1907] F-HEMBB101117

[1908] F-HEMBB1100119//COLLAGEN ALPHA 1(XII) CHAIN PRECURSOR.//1.6e-21:50:98//HOMO SAPIENS (HUMAN).//Q99715

[1909] F-HEMBB1001126//HYPOTHETICAL 55.9 KD PROTEIN EEED8.6 IN CHROMOSOME II.//1.7e-50:184:53//CAENORHABDITIS ELEGANS.//Q09296

[1910] F-HEMBB1001133//!!!! ALU SUBFAMILY SC WARNING ENTRY !!!!//1.4e-09:53:62//HOMO SAPIENS (HUMAN).//P39192

[1911] F-HEMBB1001137//DNA-DIRECTED RNA POLYMERASE II LARGEST SUBUNIT (EC 2.7.7.6) (RPB1) (FRAGMENT).//2.0e-05:206:27//CRICETULUS GRISEUS (CHINESE HAMSTER).//P11414

[1912] F-HEMBB1001142//!!!! ALU SUBFAMILY SP WARNING ENTRY !!!!//4.1e-05:46:56//HOMO SAPIENS (HUMAN).//P39193

[1913] F-HEMBB1001151//HYPOTHETICAL 33.5 KD PROTEIN C1D4.02C IN CHROMOSOME I.//2.3e-23:109:44//SCHIZOSACCHAROMYCES POMBE (FISSION YEAST).//Q10149

[1914] F-HEMBB1001153//PROCOLLAGEN ALPHA 2(IV) CHAIN PRECURSOR.//0.75:76:34//ASCARIS SUUM (PIG ROUNDWORM) (ASCARIS LUMBRICOIDES).//P27393

[1915] F-HEMBB1001169//!!!! ALU SUBFAMILY SX WARNING ENTRY !!!!//1.4e-16:71:59//HOMO SAPIENS (HUMAN).//P39195

[1916] F-HEMBB1001175//ANKYRIN.//3.2e-12:169:31//MUS MUSCULUS (MOUSE).//Q02357

[1917] F-HEMBB1001177//PERIODIC TRYPTOPHAN PROTEIN 2 HOMOLOG.//9.4e-07:148:27//HOMO SAPIENS (HUMAN).//Q15269

[1918] F-HEMBB1001182//HYPOTHETICAL 36.0 KD PROTEIN.//1.3e-09:110:31//SACCHAROMYCES CEREVISIAE (BAKER'S YEAST).//P54858

[1919] F-HEMBB1001199

[1920] F-HEMBB1001208//HYPOTHETICAL PROTEIN LAMBDA-SP5.//0.053:23:47//MUS MUSCULUS (MOUSE).//P15974

[1921] F-HEMBB1001209

[1922] F-HEMBB1001210//HYPOTHETICAL PROTEIN LAMBDA-SP5.//0.14:40:37//MUS MUSCULUS (MOUSE).//P15974

[1923] F-HEMBB1001218//!!!! ALU SUBFAMILY SQ WARNING ENTRY !!!!//3.4e-19:49:67//HOMO SAPIENS (HUMAN).//P39194

[1924] F-HEMBB1001221//CYTOCHROME C OXIDASE POLYPEPTIDE VIIA-LIVER PRECURSOR (EC 1.9.3.1).//0.11:44:38//HOMO SAPIENS (HUMAN).//P14406

[1925] F-HEMBB1001234//65 KD YES-ASSOCIATED PROTEIN (YAP65).//2.0e-45:192:53//MUS MUSCULUS (MOUSE).//P46938

[1926] F-HEMBB1001242//HYPOTHETICAL 143.3 KD TRP-ASP REPEATS CONTAINING PROTEIN C12G12.13C IN CHROMOSOME I.//5.5e-37:226:41//SCHIZOSACCHAROMYCES POMBE (FISSION YEAST).//Q09876

[1927] F-HEMBB1001249//OXALOACETATE DECARBOXYLASE GAMMA CHAIN (EC 4.1.1.3).//1.0:23:43//KLEBSIELLA PNEUMONIAE.//P13155

[1928] F-HEMBB1001253//METALLOTHIONEIN-IH (MT-IH) (METALLOTHIONEIN-0) (MT-0).//0.14:16:43//HOMO SAPIENS (HUMAN).//P80294

[1929] F-HEMBB1001254//!!!! ALU SUBFAMILY SX WARNING ENTRY !!!!//1.4e-12:40:75//HOMO SAPIENS (HUMAN).//P39195

[1930] F-HEMBB1001267//!!!! ALU SUBFAMILY SP WARNING ENTRY !!!!//1.0e-12:33:78//HOMO SAPIENS (HUMAN).//P39193

[1931] F-HEMBB1001271//HYPOTHETICAL 25.1 KD PROTEIN B0302.5 IN CHROMOSOME X.//1.0:58:37//CAENORHABDITIS ELEGANS.//Q10928

[1932] F-HEMBB1001282//ANKYRIN HOMOLOG PRECURSOR.//9.5e-13:206:31/CHROMATIUM VINOSUM.//Q06527

[1933] F-HEMBB1001288//COPPER HOMEOSTASIS PROTEIN CUTC.//4.6e-42:163:51//ESCHERICHIA COLI.//P46719

[1934] F-HEMBB1001289//HYPOTHETICAL PROTEIN ORF-1137.//1.0e-05:106:26//MUS MUSCULUS (MOUSE).//P11260

[1935] F-HEMBB1001294//GTP-BINDING PROTEIN TC 10.//1.3e-34:58:94//HOMO SAPIENS (HUMAN).//P17081

[1936] F-HEMBB1001302//HOMEOBOX PROTEIN CDX-2 (CAUDAL-TYPE HOMEOBOX PROTEIN 2) (CDX-3).//0.24:49:46//HOMO SAPIENS (HUMAN).//Q99626

[1937] F-HEMBB1001304//GLYCINE-RICH CELL WALL STRUCTURAL PROTEIN (CLONE W10-1) (FRAGMENT).//1.0:17:70//LYCOPERSICON ESCULENTUM (TOMATO).//Q01157

[1938] F-HEMBB1001314//SALIVARY GLUE PROTEIN SGS-3 PRECURSOR.//0.21:104:27//DROSOPHILA ERECTA (FRUIT FLY).//P13730

[1939] F-HEMBB1001315//!!!! ALU SUBFAMILY SX WARNING ENTRY !!!!//1.3e-24:53:71//HOMO SAPIENS (HUMAN).//P39195

[1940] F-HEMBB1001317//HYPOTHETICAL 85.7 KD PROTEIN C13G6.03 IN CHROMOSOME I.//0.24:90:31//SCHIZOSACCHAROMYCES POMBE (FISSION YEAST).//Q09782

[1941] F-HEMBB1001326//HYPOTHETICAL PROTEIN LAMBDA-SP5.//0.36:26:50//MUS MUSCULUS (MOUSE).//P15974

[1942] F-HEMBB1001331//HYPOTHETICAL BHLF1 PROTEIN.//11.0:127:33//EPSTEIN-BARR VIRUS (STRAIN B95-8) (HUMAN HERPESVIRUS 4).//P03181

[1943] F-HEMBB1001335//ESCARGOT/SNAIL PROTEIN HOMOLOG (FRAGMENT).//0.85:44:29//SCIARA COPROPHILA (FUNGUS GNAT).//Q01799

[1944] F-HEMBB1001337//!!!! ALU SUBFAMILY SQ WARNING ENTRY !!!!//4.2e-20:62:62//HOMO SAPIENS (HUMAN).//P39194

[1945] F-HEMBB1001339//HYPOTHETICAL 17.3 KD PROTEIN CY1A11.16C.//8.2e-07:123:34//MYCOBACTERIUM TUBERCULOSIS.//Q50606

[1946] F-HEMBB1001346//LINE-1 REVERSE TRANSCRIPTASE HOMOLOG.//4.2e-14:60:45//HOMO SAPIENS (HUMAN).//P08547

[1947] F-HEMBB1001348//!!!! ALU SUBFAMILY J WARNING ENTRY !!!!//5.6e-14:61:62//HOMO SAPIENS (HUMAN).//P39188

[1948] F-HEMBB1001356

[1949] F-HEMBB1001364

[1950] F-HEMBB1001366//HISTIDINE-RICH PROTEIN.//0.87:26:42//PLASMODIUM FALCIPARUM (ISOLATE FCM17/SENEGAL).//P14586

[1951] F-HEMBB1001367//!!!! ALU SUBFAMILY SC WARNING ENTRY !!!!//8.6e-40:146:61//HOMO SAPIENS (HUMAN).//P39192

[1952] F-HEMBB1001369

[1953] F-HEMBB1001380//!!!! ALU SUBFAMILY SP WARNING ENTRY !!!!//1.9e-25:49:83//HOMO SAPIENS (HUMAN).//P39193

[1954] F-HEMBB1001384//BH3 INTERACTING DOMAIN DEATH AGONIST (BID).//0.80:95:29//MUS MUSCULUS (MOUSE).//P70444

[1955] F-HEMBB1001387//PEA2 PROTEIN (PPF2 PROTEIN).//0.022:117:34//SACCHAROMYCES CEREVISIAE (BAKER'S YEAST).//P40091

[1956] F-HEMBB1001394//ALPHA-ADAPTIN A (CLATHRIN ASSEMBLY PROTEIN COMPLEX 2 ALPHA-A LARGE CHAIN) (100 KD COATED VESICLE PROTEIN A) (PLASMA MEMBRANE ADAPTOR HA2/AP2 ADAPTIN ALPHA A SUBUNIT).//0.38:85:31//MUS MUSCULUS (MOUSE).//P17426

[1957] F-HEMBB1001410

[1958] F-HEMBB1100424//PHOTOSYSTEM 114 KD REACTION CENTRE PROTEIN PRECURSOR.//0.99:37:21//ORYZA SATIVA (RICE).//P12162

[1959] F-HEMBB1001426//!!!! ALU SUBFAMILY SX WARNING ENTRY !!!!//0.0035:40:60//HOMO SAPIENS (HUMAN).//P39195

[1960] F-HEMBB1100429//CYTOSOL AMINOPEPTIDASE (EC 3.4.11.1) (LEUCINE AMINOPEPTIDASE) (LAP) (LEUCYL AMINOPEPTIDASE) (PROLINE AMINOPEPTIDASE) (EC 3.4.11.5) (PROLYL AMINOPEPTIDASE).//1.1e-99:219:86//BOS TAURUS (BOVINE).//P00727

[1961] F-HEMBB1001436//!!!! ALU SUBFAMILY SX WARNING ENTRY !!!!//3.4e-30:57:78//HOMO SAPIENS (HUMAN).//P39195

[1962] F-HEMBB1001443//[PYRUVATE DEHYDROGENASE (LIPOAMIDE)]-PHOSPHATASE PRECURSOR (PDP) (EC 3.1.3.43) (PYRUVATE DEHYDROGENASE PHOSPHATASE, CATALYTIC SUBUNIT) (PDPC).//2.5e-79:155:97//BOS TAURUS (BOVINE).//P35816

[1963] F-HEMBB1001449

[1964] F-HEMBB1001454//SALIVARY PROLINE-RICH PROTEIN PO (ALLELE M) [CONTAINS: PEPTIDE P-D] (FRAGMENT).//1.1e-05:196:31//HOMO SAPIENS (HUMAN).//P10161

[1965] F-HEMBB1001458//24 KD ANTIGEN (FRAGMENT).//0.94:18:50//PLASMODIUM CHABAUDI.//P14592

[1966] F-HEMBB1001463

[1967] F-HEMBB1001464//PPF2L ANTIGEN (FRAGMENT).//1.0:45:28//PLASMODIUM FALCIPARUM (ISOLATE PALO ALTO/UGANDA).//P07765

[1968] F-HEMBB1001482//GASTRULA ZINC FINGER PROTEIN XLCGF16.1 (FRAGMENT).//4.2e-10:37:43//XENOPUS LAEVIS (AFRICAN CLAWED FROG).//P18712

[1969] F-HEMBB1001500

[1970] F-HEMBB1001521//!!!! ALU SUBFAMILY J WARNING ENTRY !!!!//2.4e-39:59:72//HOMO SAPIENS (HUMAN).//P39188

[1971] F-HEMBB1001527//HOMEOBOX PROTEIN HOX-B5 (XLHBOX-4) (XHOX-1B) (FRAGMENT).//0.21:131:25//XENOPUS LAEVIS (AFRICAN CLAWED FROG).//P09019

[1972] F-HEMBB1001531//GENE 32 PROTEIN (GP32).//0.88:95:30//MYCOBACTERIOPHAGE L5.//Q05241

[1973] F-HEMBB1001535//ATP SYNTHASE PROTEIN 8 (EC 3.6.1.34) (A6L).//1.0:31:38//LUMBRICUS TERRESTRIS (COMMON EARTHWORM).//Q34942

[1974] F-HEMBB1001536

[1975] F-HEMBB1001537//!!!! ALU SUBFAMILY SB2 WARNING ENTRY !!!!//0.0063:52:50//HOMO SAPIENS (HUMAN).//P39191

[1976] F-HEMBB1001555//!!!! ALU SUBFAMILY J WARNING ENTRY !!!!//4.9e-23:69:63//HOMO SAPIENS (HUMAN).//P39188

[1977] F-HEMBB1001562//RABPHILIN-3A.//0.087:147:27//RATTUS NORVEGICUS (RAT).//P47709

[1978] F-HEMBB1001564//LINE-1 REVERSE TRANSCRIPTASE HOMOLOG.//5.9e-27:107:54//HOMO SAPIENS (HUMAN).//P08547

[1979] F-HEMBB1001565//!!!! ALU SUBFAMILY SQ WARNING ENTRY !!!!//1.9e-12:51:54//HOMO SAPIENS (HUMAN).//P39194

[1980] F-HEMBB1001585

[1981] F-HEMBB1001586

[1982] F-HEMBB1001588//HYPOTHETICAL 12.3 KD PROTEIN IN GAP1-NAP1 INTERGENIC REGION.//0.0031:31:48//SACCHAROMYCES CEREVISIAE (BAKER'S YEAST).//P36140

[1983] F-HEMBB1001603

[1984] F-HEMBB1001618//RETROVIRUS-RELATED POL POLYPROTEIN [CONTAINS: REVERSE TRANSCRIPTASE (EC 2.7.7.49); ENDONUCLEASE].//0.00076:47:44//MUS MUSCULUS (MOUSE).//P11369

[1985] F-HEMBB1001619//SMALL PROLINE RICH PROTEIN II (SPR-II) (CLONE 930).//1.0:52:32//HOMO SAPIENS (HUMAN).//P22531

[1986] F-HEMBB1001630

[1987] F-HEMBB1001635//METALLOTHIONEIN-LIKE PROTEIN TYPE 2 A.//1.0:27:44//LYCOPERSICON ESCULENTUM (TOMATO).//Q40157

[1988] F-HEMBB1001637//!!!! ALU SUBFAMILY J WARNING ENTRY !!!!//0.0042:26:73//HOMO SAPIENS (HUMAN).//P39188

[1989] F-HEMBB1001641

[1990] F-HEMBB1001653//SURVIVAL MOTOR NEURON PROTEIN 1.//0.51:36:47//CANIS FAMILIARIS (DOG).//O02771

[1991] F-HEMBB1001665//HOMEOBOX PROTEIN ENGRAILED-1 (HU-EN-1).//0.0030:135:34//HOMO SAPIENS (HUMAN).//Q05925

[1992] F-HEMBB1001668//PROBABLE 60S RIBOSOMAL PROTEIN L39.//0.99:25:44//CAENORHABDITIS ELEGANS.//P52814

[1993] F-HEMBB1001673//HYPOTHETICAL 46.1 KD PROTEIN IN ERP5-ORC6 INTERGENIC REGION.//0.0054:128:34//SACCHAROMYCES CEREVISIAE (BAKER'S YEAST).//P38823

[1994] F-HEMBB1001684//SUPPRESSOR PROTEIN SRP40.//0.56:81:34//SACCHAROMYCES CEREVISIAE (BAKER'S YEAST).//P32583

[1995] F-HEMBB1001685//CYTOCHROME C OXIDASE POLYPEPTIDE VIII-HEART PRECURSOR (EC 1.9.3.1) (VIIIB) (IX).//1.0:21:47//BOS TAURUS (BOVINE).//P10175

[1996] F-HEMBB1001695//MYOSIN IC HEAVY CHAIN.//8.9e-05:86:40//ACANTHAMOEBA CASTELLANII (AMOEBA).//P10569

[1997] F-HEMBB1001704//!!!! ALU SUBFAMILY SX WARNING ENTRY !!!!//9.0e-08:35:71//HOMO SAPIENS (HUMAN).//P39195

[1998] F-HEMBB1001706//CORNIFIN (SMALL PROLINE-RICH PROTEIN I) (SPR-I) (SMALL PROLINE-RICH SQUAMOUS CELL MARKER) (SPRP).//0.91:39:41//SUS SCROFA (PIG).//P35323

[1999] F-HEMBB1001707//FERREDOXIN-LIKE PROTEIN IN NIF REGION.//1.0:43:23//BRADYRHIZOBIUM JAPONICUM.//P27394

[2000] F-HEMBB1001717//NADH-UBIQUINONE OXIDOREDUCTASE CHAIN 4 (EC 1.6.5.3) (FRAGMENT).//11.0:71:25//LEMUR CATTA (RING-TAILED LEMUR).//Q34878

[2001] F-HEMBB1001735//!!!! ALU SUBFAMILY SQ WARNING ENTRY !!!!//9.0e-35:97:74//HOMO SAPIENS (HUMAN).//P39194

[2002] F-HEMBB1001736//EUKARYOTIC TRANSLATION INITIATION FACTOR 3 BETA SUBUNIT (EIF-3 BETA) (EIF3 P116) (EIF3 P110).//0.00069:180:28//HOMO SAPIENS (HUMAN).//P55884

[2003] F-HEMBB1001747

[2004] F-HEMBB1001749//!!!! ALU SUBFAMILY SX WARNING ENTRY !!!!//1.8e-43:75:70//HOMO SAPIENS (HUMAN).//P39195

[2005] F-HEMBB1001753//PROTEIN Q300.//0.00091:16:81//MUS MUSCULUS (MOUSE).//Q02722

[2006] F-HEMBB1001756//CYCLIN-DEPENDENT KINASES REGULATORY SUBUNIT 2 (XE-P9).//0.94:35:42//XENOPUS LAEVIS (AFRICAN CLAWED FROG).//Q91879

[2007] F-HEMBB1001760

[2008] F-HEMBB1001762//GENE 35 PROTEIN (GP35).//0.76:21:47//MYCOBACTERIOPHAGE L5.//Q05245

[2009] F-HEMBB1001785

[2010] F-HEMBB1001797//CHLOROPLAST 50S RIBOSOMAL PROTEIN L35./0.99:41:31//PORPHYRA PURPUREA.//P51270

[2011] F-HEMBB1001802

[2012] F-HEMBB1001812//!!!! ALU SUBFAMILY SP WARNING ENTRY !!!!//2.2e-39:54:77//HOMO SAPIENS (HUMAN).//P39193

[2013] F-HEMBB1001816//!!!! ALU SUBFAMILY SQ WARNING ENTRY !!!!//1.1e-19:97:57//HOMO SAPIENS (HUMAN).//P39194

[2014] F-HEMBB1001831//HYPOTHETICAL 45.6 KD PROTEIN IN COX5A-ALG11 INTERGENIC REGION.//0.62:204:23//SACCHAROMYCES CEREVISIAE (BAKER'S YEAST).//P53951

[2015] F-HEMBB1100834//GLYCINE-RICH RNA-BINDING PROTEIN I (FRAGMENT).//0.0014:40:45//SORGHUM VULGARE (SORGHUM).//Q99069

[2016] F-HEMBB1001836//!!!! ALU SUBFAMILY SB2 WARNING ENTRY !!!!//7.1e-14:85:61//HOMO SAPIENS (HUMAN).//P39191

[2017] F-HEMBB1001839//PROBABLE E4 PROTEIN.//0.61:49:34//HUMAN PAPILLOMAVIRUS TYPE 6C.//P20969

[2018] F-HEMBB1001850

[2019] F-HEMBB1001863//!!!! ALU SUBFAMILY SQ WARNING ENTRY !!!!//2.7e-30:57:68//HOMO SAPIENS (HUMAN).//P39194

[2020] F-HEMBB1001867

[2021] F-HEMBB1001868//EXTENSIN PRECURSOR (CELL WALL HYDROXYPROLINE-RICH GLYCOPROTEIN).//0.00036:47:53//NICOTIANA TABACUM (COMMON TOBACCO).//P13983

[2022] F-HEMBB1001869//!!!! ALU SUBFAMILY J WARNING ENTRY !!!!//7.0e-11:95:45//HOMO SAPIENS (HUMAN).//P39188

[2023] F-HEMBB1001872//HYPOTHETICAL 8.2 KD PROTEIN IN LEF8-FP INTERGENIC REGION.//1.0:34:38//AUTOGRAPHA CALIFORNICA NUCLEAR POLYHEDROSIS VIRUS (ACMNPV).//P41459

[2024] F-HEMBB1001874

[2025] F-HEMBB1001875

[2026] F-HEMBB1001880

[2027] F-HEMBB1001899//GENE 11 PROTEIN.//1.0:45:31//SPIROPLASMA VIRUS SPV1-R8A2 B.//P15902

[2028] F-HEMBB1001905//HYPOTHETICAL 81.7 KD PROTEIN IN MOL1-NAT2 INTERGENIC REGION.//8.8e-54:216:51//SACCHAROMYCES CEREVISIAE (BAKER'S YEAST).//P48234

[2029] F-HEMBB1001906

[2030] F-HEMBB1001908//MONOCYTIC LEUKEMIA ZINC FINGER PROTEIN.//6.3e-51:138:80//HOMO SAPIENS (HUMAN).//Q92794

[2031] F-HEMBB1001910

[2032] F-HEMBB1001911

[2033] F-HEMBB1001915//UBIQUITIN CARBOXYL-TERMINAL HYDROLASE 64E (EC 3.1.2.15) (UBIQUITIN THIOLESTERASE 64E) (UBIQUITIN-SPECIFIC PROCESSING PROTEASE 64E) (DEUBIQUITINATING ENZYME 64E).//2.3e-27:71:70//DROSOPHILA MELANOGASTER (FRUIT FLY).//Q24574

[2034] F-HEMBB1001921//LINE-1 REVERSE TRANSCRIPTASE HOMOLOG.//9.8e-13:75:53//HOMO SAPIENS (HUMAN).//P08547

[2035] F-HEMBB1001922

[2036] F-HEMBB1001925//EPITHELIAL MEMBRANE PROTEIN-1 (EMP-1) (TUMOR-ASSOCIATED MEMBRANE PROTEIN).//1.0:55:30//MUS MUSCULUS (MOUSE).//P47801

[2037] F-HEMBB1001930//HYPOTHETICAL 9.6 KD PROTEIN K10D2.7 IN CHROMOSOME III.//0.43:49:26//CAENORHABDITIS ELEGANS.//Q09412

[2038] F-HEMBB1001944//!!!! ALU SUBFAMILY SB WARNING ENTRY !!!!//5.1e-34:63:85//HOMO SAPIENS (HUMAN).//P39189

[2039] F-HEMBB1001945//NONSPECIFIC LIPID-TRANSFER PROTEIN (LTP) (PHOSPHOLIPID TRANSFER PROTEIN) (PLTP).//0.28:45:40//AMARANTHUS CAUDATUS (LOVE-LIES-BLEEDING) (INCA-WHEAT).//P80450

[2040] F-HEMBB1001947//PROTEIN UL24.//0.48:42:47//HERPES SIMPLEX VIRUS (TYPE 1/STRAIN 17).//P10208

[2041] F-HEMBB1100950//HYPOTHETICAL 42.6 KD PROTEIN IN GSHB-ANSB INTERGENIC REGION (0378).//1.6e-24:162:36//ESCHERICHIA COLI.//P52062

[2042] F-HEMBB1001952

[2043] F-HEMBB1001953

[2044] F-HEMBB1001957//!!!! ALU SUBFAMILY J WARNING ENTRY !!!!//2.7e-11:51:60//HOMO SAPIENS (HUMAN).//P39188

[2045] F-HEMBB1001962//!!!! ALU SUBFAMILY J WARNING ENTRY !!!!//7.6e-24:163:42//HOMO SAPIENS (HUMAN).//P39188

[2046] F-HEMBB1001967//!!!! ALU SUBFAMILY SB WARNING ENTRY !!!!//2.1e-35:55:80//HOMO SAPIENS (HUMAN).//P39189

[2047] F-HEMBB1001973//!!!! ALU SUBFAMILY SC WARNING ENTRY !!!!//2.1e-37:108:75//HOMO SAPIENS (HUMAN).//P39192

[2048] F-HEMBB1001983//LYSIS PROTEIN (E PROTEIN) (GPE).//0.84:45:37//BACTERIOPHAGE ALPHA-3.//P31280

[2049] F-HEMBB1001988

[2050] F-HEMBB1001990

[2051] F-HEMBB1001996//LINE-1 REVERSE TRANSCRIPTASE HOMOLOG.//1.4e-14:98:40//HOMO SAPIENS (HUMAN).//P08547

[2052] F-HEMBB1001997//!!!! ALU SUBFAMILY J WARNING ENTRY !!!!//4.1e-19:38:73//HOMO SAPIENS (HUMAN).//P39188

[2053] F-HEMBB1002002//CYTOCHROME C BIOGENESIS PROTEIN CCSA.//1.0:150:25//PORPHYRA PURPUREA.//P51369

[2054] F-HEMBB1002005//!!!! ALU SUBFAMILY SX WARNING ENTRY !!!!//7.6e-12:94:40//HOMO SAPIENS (HUMAN).//P39195

[2055] F-HEMBB1002009

[2056] F-HEMBB1002015//HYPOTHETICAL 7.7 KD PROTEIN IN MRR-TSR INTERGENIC REGION (F67).//1.0:17:47//ESCHERICHIA COLI.//P39395

[2057] F-HEMBB1002042//CYTOCHROME P450 4C1 (EC 1.14.14.1) (CYPIVC1).//2.4e-50:139:55//BLABERUS DISCOIDALIS (TROPICAL COCKROACH).//P29981

[2058] F-HEMBB1002043//HYPOTHETICAL 9.5 KD PROTEIN IN DHFR 3′REGION (ORF3).//0.052:40:42//HERPESVIRUS SAIMIRI (SUBGROUP C/STRAIN 488).//P22577

[2059] F-HEMBB1002044//CELLULOSE COMPLEMENTING PROTEIN.//0.45:87:33//ACETOBACTER XYLINUM (ACETOBACTER PASTEURIANUS).//P37697

[2060] F-HEMBB1002045//ATP SYNTHASE PROTEIN 8 (EC 3.6.1.34) (A6L).//0.78:18:55//HOMO SAPIENS (HUMAN).//P03928

[2061] F-HEMBB1002049

[2062] F-HEMBB1002050//SALIVARY PROLINE-RICH PROTEIN PRECURSOR (CLONE CP7) [CONTAINS: BASIC PEPTIDE P-F] (FRAGMENT).//1.0e-06:188:27//HOMO SAPIENS (HUMAN).//P02812

[2063] F-HEMBB1002068//HOMEOBOX PROTEIN HOX-A4 (CHOX-1.4).//0.0023:56:44//GALLUS GALLUS (CHICKEN).//P17277

[2064] F-HEMBB1002069//EXTENSIN PRECURSOR (CELL WALL HYDROXYPROLINE-RICH GLYCOPROTEIN).//0.0074:134:33//NICOTIANA TABACUM (COMMON TOBACCO).//P13983

[2065] F-HEMBB1002092//ENV POLYPROTEIN PRECURSOR (COAT POLYPROTEIN) [CONTAINS: OUTER MEMBRANE PROTEIN GP70; TRANSMEMBRANE PROTEIN P20E].//2.4e-07:75:40//BABOON ENDOGENOUS VIRUS (STRAIN M7).//P10269

[2066] F-HEMBB1002094//!!!! ALU SUBFAMILY SB2 WARNING ENTRY !!!!//1.9e-24:63:82//HOMO SAPIENS (HUMAN).//P39191

[2067] F-HEMBB1002115//EC PROTEIN HOMOLOG (ZINC-METALLOTHIONEIN CLASS II).//0.94:26:42//ZEA MAYS (MAIZE).//P43401

[2068] F-HEMBB1002134//ZINC-FINGER PROTEIN NEURO-D4.//4.6e-57:176:67//RATTUS NORVEGICUS (RAT).//P56163

[2069] F-HEMBB1002139//CHLOROPLAST 50S RIBOSOMAL PROTEIN L35.//1.0:17:52//PORPHYRA PURPUREA.//P51270

[2070] F-HEMBB1002142//EARLY NODULIN 20 PRECURSOR (N-20).//0.087:52:36//MEDICAGO TRUNCATULA (BARREL MEDIC).//P93329

[2071] F-HEMBB1002152//HYPOTHETICAL 12.3 KD PROTEIN IN RPL3-RPL33 INTERGENIC REGION (ORF102).//5.8e-05:61:37//CYANOPHORA PARADOXA.//P15811

[2072] F-HEMBB1002189//HYPOTHETICAL PROTEIN UL125.//.0:77:32//HUMAN CYTOMEGALOVIRUS (STRAIN AD 169).//P16835

[2073] F-HEMBB1002190

[2074] F-HEMBB1002193//TYROSINE-PROTEIN KINASE RECEPTOR TYRO3 PRECURSOR (TYROSINE-PROTEIN KINASE RSE) (TYROSINE-PROTEIN KINASE SKY) (TYROSINE-PROTEIN KINASE DTK).//1.2e-27:59:100//HOMO SAPIENS (HUMAN).//Q06418

[2075] F-HEMBB1002217//ZINC FINGER PROTEIN 184 (FRAGMENT).//6.6e-22:106:50//HOMO SAPIENS (HUMAN).//Q99676

[2076] F-HEMBB1002218//PROTEIN Q300.//0.85:19:52//MUS MUSCULUS (MOUSE).//Q02722

[2077] F-HEMBB1002232//!!!! ALU SUBFAMILY SX WARNING ENTRY !!!!//9.6e-21:56:71//HOMO SAPIENS (HUMAN).//P39195

[2078] F-HEMBB1002247

[2079] F-HEMBB1002249//!!!! ALU SUBFAMILY SQ WARNING ENTRY !!!!//7.2e-29:93:69//HOMO SAPIENS (HUMAN).//P39194

[2080] F-HEMBB1002254//!!!! ALU SUBFAMILY SQ WARNING ENTRY !!!!//2.0e-29:101:67//HOMO SAPIENS (HUMAN).//P39194

[2081] F-HEMBB1002255//NADH-UBIQUINONE OXIDOREDUCTASE CHAIN 3 (EC 1.6.5.3).//1.0:73:28//PARAMECIUM TETRAURELIA.//P15579

[2082] F-HEMBB1002266//GLUTAMIC ACID-RICH PROTEIN PRECURSOR.//0.0079:151:26//PLASMODIUM FALCIPARUM (ISOLATE FC27/PAPUA NEW GUINEA).//P13816

[2083] F-HEMBB1002280//LINE-1 REVERSE TRANSCRIPTASE HOMOLOG.//5.2e-15:182:36//NYCTICEBUS COUCANG (SLOW LORIS).//P08548

[2084] F-HEMBB1002300

[2085] F-HEMBB1002306//!!!! ALU SUBFAMILY SX WARNING ENTRY !!!!!//0.00011:26:84//HOMO SAPIENS (HUMAN).//P39195

[2086] F-HEMBB1002327//!!!! ALU SUBFAMILY SB WARNING ENTRY !!!!//4.1e-11:41:85//HOMO SAPIENS (HUMAN).//P39189

[2087] F-HEMBB1002329//HYPOTHETICAL 74.0 KD PROTEIN IN CAJ1-HOM3 INTERGENIC REGION.//9.9e-17:232:30//SACCHAROMYCES CEREVISIAE (BAKER'S YEAST).//P40032

[2088] F-HEMBB1002340

[2089] F-HEMBB1002342//HYPOTHETICAL 32.5 KD PROTEIN IN MSH6-BMH2 INTERGENIC REGION.//3.6e-40:102:57//SACCHAROMYCES CEREVISIAE (BAKER'S YEAST).//Q03835

[2090] F-HEMBB1002358//THYMIDYLATE KINASE (EC 2.7.4.9) (DTMP KINASE).//6.1e-30:63:96//HOMO SAPIENS (HUMAN).//P23919

[2091] F-HEMBB1002359//HYPOTHETICAL 7.1 KD PROTEIN C6G9.01C IN CHROMOSOME I.//0.97:28:46//SCHIZOSACCHAROMYCES POMBE (FISSION YEAST).//Q92346

[2092] F-HEMBB1002364//RETROVIRUS-RELATED POL POLYPROTEIN (FRAGMENT).//0.47:119:25//HOMO SAPIENS (HUMAN).//P12895

[2093] F-HEMBB1002371//HYPOTHETICAL 15.5 KD PROTEIN C2F7.12 IN CHROMOSOME I PRECURSOR.//3.0e-05:111:30//SCHIZOSACCHAROMYCES POMBE (FISSION YEAST).//Q09703

[2094] F-HEMBB1002381//PUTATIVE CUTICLE COLLAGEN C09G5.4.//0.34:105:34//CAENORHABDITIS ELEGANS.//Q09455

[2095] F-HEMBB1002383//ATP SYNTHASE A CHAIN (EC 3.6.1.34) (PROTEIN 6).//0.049:103:32//AQUIFEX AEOLICUS.//O66566

[2096] F-HEMBB1002387//10 KD CHAPERONIN (PROTEIN CPN10) (PROTEIN GROES) (HEAT SHOCK PROTEIN 11).//0.18:75:28//RICKETTSIA TSUTSUGAMUSHI.//P16626

[2097] F-HEMBB1002409//HIGH MOBILITY GROUP PROTEIN HMG-Y.//0.014:61:36//MUS MUSCULUS (MOUSE).//P17095

[2098] F-HEMBB1002415

[2099] F-HEMBB1002425//!!!! ALU SUBFAMILY SQ WARNING ENTRY !!!!//3.8e-18:55:70//HOMO SAPIENS (HUMAN).//P39194

[2100] F-HEMBB1002442//LIN-10 PROTEIN.//5.1e-15:121:31//CAENORHABDITIS ELEGANS.//P34692

[2101] F-HEMBB1002453//!!!! ALU SUBFAMILY SB WARNING ENTRY !!!!//1.2e-32:54:75//HOMO SAPIENS (HUMAN).//P39189

[2102] F-HEMBB1002457//!!!! ALU SUBFAMILY J WARNING ENTRY !!!!//1.5e-07:31:64//HOMO SAPIENS (HUMAN).//P39188

[2103] F-HEMBB1002458//MALE SPECIFIC SPERM PROTEIN MST84DA.//0.92:28:53//DROSOPHILA MELANOGASTER (FRUIT FLY).//Q01642

[2104] F-HEMBB1002477//DNA-DIRECTED RNA POLYMERASE II LARGEST SUBUNIT (EC 2.7.7.6) (RPB1) (FRAGMENT).//0.0066:198:27//CRICETULUS GRISEUS (CHINESE HAMSTER).//P11414

[2105] F-HEMBB1002489//SPLICEOSOME ASSOCIATED PROTEIN 49 (SAP 49) (SF3B53).//0.030:182:28//HOMO SAPIENS (HUMAN).//Q15427

[2106] F-HEMBB1002492

[2107] F-HEMBB1002495//!!!! ALU SUBFAMILY SC WARNING ENTRY !!!!//2.1e-08:41:75//HOMO SAPIENS (HUMAN).//P39192

[2108] F-HEMBB1002502//RETROVIRUS-RELATED POL POLYPROTEIN (FRAGMENT).//0.00030:31:77//HOMO SAPIENS (HUMAN).//P12895

[2109] F-HEMBB1002509

[2110] F-HEMBB1002510

[2111] F-HEMBB1002520//LINE-1 REVERSE TRANSCRIPTASE HOMOLOG.//6.8e-36:162:50//NYCTICEBUS COUCANG (SLOW LORIS).//P08548

[2112] F-HEMBB1002522//7 KD PROTEIN (ORF 4).//0.77:32:40//CHRYSANTHEMUM VIRUS B (CVB).//P37990

[2113] F-HEMBB1002531

[2114] F-HEMBB1002534//!!!! ALU SUBFAMILY SX WARNING ENTRY !!!!//3.1e-36:80:73//HOMO SAPIENS (HUMAN).//P39195

[2115] F-HEMBB1002545

[2116] F-HEMBB1002550//HOMEOBOX PROTEIN HOX-D11 (HOX-4.6) (HOX-5.5).//3.8e-05:83:34//MUS MUSCULUS (MOUSE).//P23813

[2117] F-HEMBB1002556

[2118] F-HEMBB1002579//SPLICING FACTOR U2AF 35 KD SUBUNIT (U2 AUXILIARY FACTOR 35 KD SUBUNIT) (U2 SNRNP AUXILIARY FACTOR SMALL SUBUNIT) (FRAGMENT).//5.0e-06:27:77//SUS SCROFA (PIG).//Q29350

[2119] F-HEMBB1002582//PROTEINASE INHIBITOR.//1.0:27:40//SOLANUM MELONGENA (EGGPLANT) (AUBERGINE).//P01078

[2120] F-HEMBB1002590//HYPOTHETICAL PROTEIN IN MMSB 3′REGION (ORF1) (FRAGMENT).//1.9e-20:90:54//PSEUDOMONAS AERUGINOSA.//P28812

[2121] F-HEMBB1002596

[2122] F-HEMBB1002600//NOVEL ANTIGEN 2 (NAG-2).//1.9e-60:187:59//HOMO SAPIENS (HUMAN).//O14817

[2123] F-HEMBB1002601//M PROTEIN, SEROTYPE 6 PRECURSOR.//1.0:71:35//STREPTOCOCCUS PYOGENES.//P08089

[2124] F-HEMBB1002603

[2125] F-HEMBB1002607//SALIVARY PROLINE-RICH PROTEIN PO (ALLELE K) [CONTAINS: PEPTIDE P-D] (FRAGMENT).//0.0032:142:33//HOMO SAPIENS (HUMAN).//P10162

[2126] F-HEMBB1002610//LINE-1 REVERSE TRANSCRIPTASE HOMOLOG.//2.0e-11:79:49//HOMO SAPIENS (HUMAN).//P08547

[2127] F-HEMBB1002613//!!!! ALU SUBFAMILY J WARNING ENTRY !!!!//3.9e-08:41:60//HOMO SAPIENS (HUMAN).//P39188

[2128] F-HEMBB1002614//HYPOTHETICAL 9.5 KD PROTEIN.//1.0:40:35//VACCINIA VIRUS (STRAIN COPENHAGEN).//P20553

[2129] F-HEMBB1002617//INSECT TOXIN 1 (BOT IT1).//1.0:44:29//BUTHUS OCCITANUS TUNETANUS (COMMON EUROPEAN SCORPION).//P55902

[2130] F-HEMBB1002623//HYPOTHETICAL 9.7 KD PROTEIN (ORF88) (PUTATIVE DNA-BINDING PROTEIN).//0.42:31:54//BACTERIOPHAGE P4.//P12552

[2131] F-HEMBB1002635//STRESS-ACTIVATED PROTEIN KINASE JNK3 (EC 2.7.1.-) (C-JUN N-TERMINAL KINASE 3) (MAP KINASE P49 3F12).//6.2e-17:44:95//HOMO SAPIENS (HUMAN).//P53779

[2132] F-HEMBB1002664//SMALL NUCLEAR RIBONUCLEOPROTEIN ASSOCIATED PROTEIN B (SM-B) (SNRNP-B) (SM11) (FRAGMENT).//1 .0:57:36//RATTUS NORVEGICUS (RAT).//P17136

[2133] F-HEMBB1002677//LINE-1 REVERSE TRANSCRIPTASE HOMOLOG.//1.9e-06:194:34//NYCTICEBUS COUCANG (SLOW LORIS).//P08548

[2134] F-HEMBB1002683//NADH-UBIQUINONE OXIDOREDUCTASE CHAIN 5 (EC 1.6.5.3) (FRAGMENT).//0.96:56:35//LEMUR CATTA (RING-TAILED LEMUR).//Q34879

[2135] F-HEMBB1002684//SILLUCIN.//1.0:16:50//RHIZOMUCOR PUSILLUS.//P02885

[2136] F-HEMBB1002686

[2137] F-HEMBB1002692

[2138] F-HEMBB1002697//HELIX-DESTABILIZING PROTEIN (SINGLE-STRANDED DNA BINDING PROTEIN) (GPV).//0.57:36:38//BACTERIOPHAGE FD, BACTERIOPHAGE F1, AND BACTERIOPHAGE M13.//P03669

[2139] F-HEMBB1002699

[2140] F-HEMBB1002702

[2141] F-HEMBB1002705//HYPOTHETICAL 34.8 KD PROTEIN C4H3.04C IN CHROMOSOME I.//3.6e-40:180:37//SCHIZOSACCHAROMYCES POMBE (FISSION YEAST).//Q10212

[2142] F-HEMBB1002712

[2143] F-MAMMA1000009//!!!! ALU SUBFAMILY SB WARNING ENTRY !!!!//1.2e-32:95:75//HOMO SAPIENS (HUMAN).//P39189

[2144] F-MAMMA1000019

[2145] F-MAMMA1000020//DIMETHYLANILINE MONOOXYGENASE [N-OXIDE FORMING] 5 (EC 1.14.13.8) (HEPATIC FLAVIN-CONTAINING MONOOXYGENASE 5) (FMO 5) (DIMETHYLANILINE OXIDASE 5).//5.2e-12:24:100//HOMO SAPIENS (HUMAN).//P49326

[2146] F-MAMMA1000025//BETA-2-MICROGLOBULIN PRECURSOR.//1.0:73:26//BRACHYDANIO RERIO (ZEBRAFISH) (ZEBRA DANIO).//Q04475

[2147] F-MAMMA1000043//HYPOTHETICAL PXBL-I PROTEIN (FRAGMENT).//0.057:130:31//BOVINE LEUKEMIA VIRUS (JAPANESE ISOLATE BLV-1) (BLV).//P03412

[2148] F-MAMMA1000045

[2149] F-MAMMA1000055//TESTIN 2 (TES2) [CONTAINS: TESTIN 1 (TES1)].//7.5e-44:138:55//MUS MUSCULUS (MOUSE).//P47226

[2150] F-MAMMA1000057//!!!! ALU SUBFAMILY SQ WARNING ENTRY !!!!//1.2e-39:92:69//HOMO SAPIENS (HUMAN).//P39194

[2151] F-MAMMA1000069//HYPOTHETICAL 29.3 KD PROTEIN (ORF92).//0.0044:96:34//ORGYIA PSEUDOTSUGATA MULTICAPSID POLYHEDROSIS VIRUS (OPMNPV).//O10341

[2152] F-MAMMA1000084//!!!! ALU SUBFAMILY SX WARNING ENTRY !!!!//5.4e-28:94:73//HOMO SAPIENS (HUMAN).//P39195

[2153] F-MAMMA1000085//PUTATIVE CYSTEINYL-TRNA SYNTHETASE C29E6.06C (EC 6.1.1.16) (CYSTEINE-TRNA LIGASE) (CYSRS).//6.6e-38:90:51//SCHIZOSACCHAROMYCES POMBE (FISSION YEAST).//Q09860

[2154] F-MAMMA1000092//!!!! ALU SUBFAMILY SC WARNING ENTRY !!!!//6.4e-30:43:86//HOMO SAPIENS (HUMAN).//P39192

[2155] F-MAMMA1000103//SMALL PROLINE RICH PROTEIN II (SPR-II) (CLONE 930).//0.038:17:52//HOMO SAPIENS (HUMAN).//P22531

[2156] F-MAMMA1000117//50S RIBOSOMAL PROTEIN L24E (HL21/HL22).//0.90:25:48//HALOARCULA MARISMORTUI (HALOBACTERIUM MARISMORTUI).//P14116

[2157] F-MAMMA1000129//HYPOTHETICAL BHLF1 PROTEIN.//0.0016:75:40//EPSTEIN-BARR VIRUS (STRAIN B95-8) (HUMAN HERPESVIRUS 4).//P03181

[2158] F-MAMMA1000133

[2159] F-MAMMA1000134//HYPOTHETICAL PROTEIN MJ0647.//1.0:41:41//METHANOCOCCUS JANNASCHII.//Q58063

[2160] F-MAMMA11000139//GUANINE NUCLEOTIDE-BINDING PROTEIN G(I)/G(S)/G(O) GAMMA-3 SUBUNIT.//0.99:69:28//BOS TAURUS (BOVINE), AND MUS MUSCULUS (MOUSE).//P29798

[2161] F-MAMMA1000143//CALPAIN INHIBITOR (CALPASTATIN) (FRAGMENT).//0.023:111:27//MUS MUSCULUS (MOUSE).//P51125

[2162] F-MAMMA1000155//PUTATIVE CUTICLE COLLAGEN C09G5.5.//0.018:125:34//CAENORHABDITIS ELEGANS.//Q09456

[2163] F-MAMMA1000163//MERCURIC TRANSPORT PROTEIN PERIPLASMIC COMPONENT PRECURSOR (PERIPLASMIC MERCURY ION BINDING PROTEIN) (MERCURY SCAVENGER PROTEIN).//0.11:88:25//SHEWANELLA PUTREFACIENS (PSEUDOMONAS PUTREFACIENS).//Q54463

[2164] F-MAMMA1000171

[2165] F-MAMMA1000173//DREBRIN E.//7.6e-41:197:43//HOMO SAPIENS (HUMAN).//Q16643

[2166] F-MAMMA1000175//GAMMA-THIONIN HOMOLOG PPT PRECURSOR.//0.92:39:38//PETUNIA INTEGRIFOLIA (VIOLET-FLOWERED PETUNIA) (PETUNIA INFLATA).//Q40901

[2167] F-MAMMA1000183//ZINC FINGER PROTEIN 84 (ZINC FINGER PROTEIN HPF2).//2.4e-106:249:61//HOMO SAPIENS (HUMAN).//P51523

[2168] F-MAMMA1000198//MALE SPECIFIC SPERM PROTEIN MST84DD.//0.0014:35:42//DROSOPHILA MELANOGASTER (FRUIT FLY).//Q01645

[2169] F-MAMMA1000221

[2170] F-MAMMA1000227//6.8 KD MITOCHONDRIAL PROTEOLIPID.//1.0:30:40//MUS MUSCULUS (MOUSE).//P56379

[2171] F-MAMMA1000241//PHOTOSYSTEM I REACTION CENTRE SUBUNIT X (PSI-K).//1.0:40:37//PORPHYRA PURPUREA.//P51370

[2172] F-MAMMA1000251//HYPOTHETICAL 6.8 KD PROTEIN IN FIC-PPIA INTERGENIC REGION.//0.99:29:48//SALMONELLA TYPHIMURIUM.//P37771

[2173] F-MAMMA1000254//HYPOTHETICAL 6.0 KD PROTEIN IN THI12 5′REGION.//1.0:20:50//SACCHAROMYCES CEREVISIAE (BAKER'S YEAST).//P53820

[2174] F-MAMMA1000257//HYPOTHETICAL 50.0 KD PROTEIN IN HEML 3′REGION (ORF2).//0.22:50:44//PSEUDOMONAS AERUGINOSA.//Q51470

[2175] F-MAMMA1000264//GASTRIN-RELEASING PEPTIDE RECEPTOR (GRP-R) (GRP-PREFERRING BOMBESIN RECEPTOR).//0.80:39:43//HOMO SAPIENS (HUMAN).//P30550

[2176] F-MAMMA1000266

[2177] F-MAMMA1000270//!!!! ALU SUBFAMILY SB WARNING ENTRY !!!!//9.5e-42:95:84//HOMO SAPIENS (HUMAN).//P39189

[2178] F-MAMMA1000277//PROCOLLAGEN ALPHA 1(II) CHAIN PRECURSOR [CONTAINS: CHONDROCALCIN].//0.0062:90:34//MUS MUSCULUS (MOUSE).//P28481

[2179] F-MAMMA1000278//C-HORDEIN (CLONE PC HOR1-3) (FRAGMENT).//0.00096:59:33//HORDEUM VULGARE (BARLEY).//P17991

[2180] F-MAMMA1000279//!!!! ALU SUBFAMILY SX WARNING ENTRY !!!!//8.4e-17:56:76//HOMO SAPIENS (HUMAN).//P39195

[2181] F-MAMMA1000284//ARYL HYDROCARBON RECEPTOR NUCLEAR TRANSLOCATOR 2 (ARNT PROTEIN 2).//0.017:146:30//MUS MUSCULUS (MOUSE).//Q61324

[2182] F-MAMMA1000287//!!!! ALU SUBFAMILY SB WARNING ENTRY !!!!//1.5e-32:84:58//HOMO SAPIENS (HUMAN).//P39189

[2183] F-MAMMA1000302//C-HORDEIN (CLONE PC-919) (FRAGMENT).//1.0:42:33//HORDEUM VULGARE (BARLEY).//P17992

[2184] F-MAMMA1000307//PROBABLE E4 PROTEIN.//0.21:71:30//RHESUS PAPILLOMAVIRUS TYPE I (RHPV 1).//P24832

[2185] F-MAMMA1000309//COLLAGEN ALPHA 1 (VIII) CHAIN PRECURSOR (ENDOTHELIAL COLLAGEN).//0.0026:141:36//HOMO SAPIENS (HUMAN).//P27658

[2186] F-MAMMA1000312

[2187] F-MAMMA1000313//DNA REPAIR PROTEIN RADC HOMOLOG (25 KD PROTEIN) (FRAGMENT).//0.76:52:32//STAPHYLOCOCCUS AUREUS.//P31337

[2188] F-MAMMA1000331

[2189] F-MAMMA1000339//50S RIBOSOMAL PROTEIN L29P.//0.78:32:46//METHANOBACTERIUM THERMOAUTOTROPHICUM.//O26117

[2190] F-MAMMA1000340//HYPOTHETICAL 29.4 KD PROTEIN IN STE6-LOS1 INTERGENIC REGION.//1.0:29:58//SACCHAROMYCES CEREVISIAE (BAKER'S YEAST).//P36039

[2191] F-MAMMA1000348//!!!! ALU SUBFAMILY J WARNING ENTRY !!!!//7.5e-09:63:60//HOMO SAPIENS (HUMAN).//P39188

[2192] F-MAMMA1000356//!!!! ALU SUBFAMILY J WARNING ENTRY !!!!//3.3e-05:42:52//HOMO SAPIENS (HUMAN).//P39188

[2193] F-MAMMA1000360

[2194] F-MAMMA1000361//!!!! ALU SUBFAMILY SB WARNING ENTRY !!!!//4.4e-33:84:72//HOMO SAPIENS (HUMAN).//P39189

[2195] F-MAMMA1000372//!!!! ALU SUBFAMILY SP WARNING ENTRY !!!!//6.6e-21:53:71//HOMO SAPIENS (HUMAN).//P39193

[2196] F-MAMMA1000385

[2197] F-MAMMA1000388//OX40L RECEPTOR PRECURSOR (ACT35 ANTIGEN) (TAX-TRANSCRIPTIONALLY ACTIVATED GLYCOPROTEIN 1 RECEPTOR) (CD134 ANTIGEN).//0.40:72:36//HOMO SAPIENS (HUMAN).//P43489

[2198] F-MAMMA1000395//RABPHILIN-3A (FRAGMENT).//0.032:125:25//MUS MUSCULUS (MOUSE).//P47708

[2199] F-MAMMA1000402//LINE-1 REVERSE TRANSCRIPTASE HOMOLOG.//3.1e-28:266:40//HOMO SAPIENS (HUMAN).//P08547

[2200] F-MAMMA1000410//NADH-UBIQUINONE OXIDOREDUCTASE 13 KD-B SUBUNIT (EC 1.6.5.3) (EC 1.6.99.3) (COMPLEX I-13 KD-B) (CI-13 KD-B) (B13).//5.9e-06:32:68//HOMO SAPIENS (HUMAN).//Q16718

[2201] F-MAMMA1000413//RETROVIRUS-RELATED POL POLYPROTEIN [CONTAINS: REVERSE TRANSCRIPTASE (EC 2.7.7.49); ENDONUCLEASE].//6.7e-05:93:31//MUS MUSCULUS (MOUSE).//P11369

[2202] F-MAMMA1000414

[2203] F-MAMMA1000416//HYPOTHETICAL 32.0 KD PROTEIN C09F5.2 IN CHROMOSOME III.//4.1e-28:119:53//CAENORHABDITIS ELEGANS.//Q09232

[2204] F-MAMMA1000421//!!!! ALU SUBFAMILY SQ WARNING ENTRY !!!!//2.7e-23:68:76//HOMO SAPIENS (HUMAN).//P39194

[2205] F-MAMMA1000422//METALLOTHIONEIN (MT).//0.037:42:42//GADUS MORHUA (ATLANTIC COD).//P51902

[2206] F-MAMMA1000423

[2207] F-MAMMA1000424//!!!! ALU SUBFAMILY SB WARNING ENTRY !!!!//0.048:23:73//HOMO SAPIENS (HUMAN).//P39189

[2208] F-MAMMA1000429//VACUOLAR PROTEIN SORTING-ASSOCIATED PROTEIN VPS5.//2.7e-05:110:30//SACCHAROMYCES CEREVISIAE (BAKER'S YEAST).//Q92331

[2209] F-MAMMA1000431//!!!! ALU SUBFAMILY SQ WARNING ENTRY !!!!//9.4e-15:85:58//HOMO SAPIENS (HUMAN).//P39194

[2210] F-MAMMA1000444//!!!! ALU SUBFAMILY SQ WARNING ENTRY !!!!//4.3e-25:65:76//HOMO SAPIENS (HUMAN).//P39194

[2211] F-MAMMA1000446//ZYXIN.//0.79:155:29//GALLUS GALLUS (CHICKEN).//Q04584

[2212] F-MAMMA1000458//HYPOTHETICAL 37.7 KD PROTEIN C18B11.06 IN CHROMOSOME I.//0.0048:46:43//SCHIZOSACCHAROMYCES POMBE (FISSION YEAST).//Q09713

[2213] F-MAMMA1000468//PERIOD CLOCK PROTEIN (FRAGMENT).//0.50:20:55//DROSOPHILA ROBUSTA (FRUIT FLY).//Q03296

[2214] F-MAMMA1000472//!!!! ALU SUBFAMILY J WARNING ENTRY !!!!//1.5e-17:106:55//HOMO SAPIENS (HUMAN).//P39188

[2215] F-MAMMA1000478//!!!! ALU SUBFAMILY SX WARNING ENTRY !!!!//3.9e-35:80:68//HOMO SAPIENS (HUMAN).//P39195

[2216] F-MAMMA1000483//!!!! ALU SUBFAMILY SP WARNING ENTRY !!!!//2.8e-24:74:77//HOMO SAPIENS (HUMAN).//P39193

[2217] F-MAMMA1000490//TYROSINE-PROTEIN KINASE TXK (EC 2.7.1.112) (PTK-RL-18) (RESTING LYMPHOCYTE KINASE).//0.43:21:57//MUS MUSCULUS (MOUSE).//P42682

[2218] F-MAMMA1000500//TAT PROTEIN (TRANSACTIVATING REGULATORY PROTEIN).//0.61:33:54//HUMAN IMMUNODEFICIENCY VIRUS TYPE 1 (Z2/CDC-Z34 ISOLATE) (HIV-1).//P12506

[2219] F-MAMMA1000501//!!!! ALU SUBFAMILY SQ WARNING ENTRY !!!!//1.1e-32:43:83//HOMO SAPIENS (HUMAN).//P39194

[2220] F-MAMMA1000516

[2221] F-MAMMA1000522//LINE-1 REVERSE TRANSCRIPTASE HOMOLOG.//0.0015:113:32//HOMO SAPIENS (HUMAN).//P08547

[2222] F-MAMMA1000524//HYPOTHETICAL HOST RANGE 8.5 KD PROTEIN.//1.0:63:31//VACCINIA VIRUS (STRAIN WR).//P17359

[2223] F-MAMMA1000559//METALLOTHIONEIN-I (MT-I) (MT-IB/MT-IA).//0.31:16:50//CALLINECTES SAPIDUS (BLUE CRAB).//P55949

[2224] F-MAMMA1000565//FERREDOXIN-TYPE PROTEIN NAPF.//0.98:37:35//ESCHERICHIA COLI.//P33939

[2225] F-MAMMA1000567//!!!! ALU SUBFAMILY SX WARNING ENTRY !!!!//5.5e-37:95:76//HOMO SAPIENS (HUMAN).//P39195

[2226] F-MAMMA1000576//!!!! ALU SUBFAMILY SB2 WARNING ENTRY !!!!//4.1e-07:34:64//HOMO SAPIENS (HUMAN).//P39191

[2227] F-MAMMA1000583

[2228] F-MAMMA1000585//!!!! ALU SUBFAMILY SQ WARNING ENTRY !!!!//1.5e-28:89:75//HOMO SAPIENS (HUMAN).//P39194

[2229] F-MAMMA1000594//!!!! ALU SUBFAMILY SX WARNING ENTRY !!!!//4.8e-24:38:71//HOMO SAPIENS (HUMAN).//P39195

[2230] F-MAMMA1000597//!!!! ALU SUBFAMILY SX WARNING ENTRY !!!!//1.1e-25:74:77//HOMO SAPIENS (HUMAN).//P39195

[2231] F-MAMMA1000605//!!!! ALU SUBFAMILY SX WARNING ENTRY !!!!//2.1e-18:83:50//HOMO SAPIENS (HUMAN).//P39195

[2232] F-MAMMA1000612//HYPOTHETICAL 34.0 KD TRP-ASP REPEATS CONTAINING PROTEIN IN SIS1-MRPL2 INTERGENIC REGION.//4.0e-42:166:48//SACCHAROMYCES CEREVISIAE (BAKER'S YEAST).//P41318

[2233] F-MAMMA1000616

[2234] F-MAMMA1000621

[2235] F-MAMMA1000623//METALLOTHIONEIN-IK (MT-1K).//0.0045:25:48//HOMO SAPIENS (HUMAN).//P80296

[2236] F-MAMMA1000625//PROLINE-RICH PROTEIN MP-3 (FRAGMENT).//0.00078:79:35//MUS MUSCULUS (MOUSE).//P05143

[2237] F-MAMMA1000643//HYPOTHETICAL 9.3 KD PROTEIN.//1.0:25:28//MAGUARI VIRUS.//P16607

[2238] F-MAMMA1000664

[2239] F-MAMMA1000669//LINE-1 REVERSE TRANSCRIPTASE HOMOLOG.//4.2e-05:186:30//HOMO SAPIENS (HUMAN).//P08547

[2240] F-MAMMA1000670//PROLINE-RICH PROTEIN MP-3 (FRAGMENT).//1.6e-06:195:30//MUS MUSCULUS (MOUSE).//P05143

[2241] F-MAMMA1000672//VITELLOGENIC CARBOXYPEPTIDASE PRECURSOR (EC 3.4.16.-).//3.8e-28:184:35//AEDES AEGYPTI (YELLOWFEVER MOSQUITO).//P42660

[2242] F-MAMMA1000684//DNA-BINDING PROTEIN (VMW21).//1.1e-07:55:56//HERPES SIMPLEX VIRUS (TYPE 1/STRAIN 17).//P04487

[2243] F-MAMMA1000696//!!!! ALU SUBFAMILY SQ WARNING ENTRY !!!!//1.2e-31:97:74//HOMO SAPIENS (HUMAN).//P39194

[2244] F-MAMMA1000707//METALLOTHIONEIN-II (MT-II) (MT-IIB/MT-IIA).//0.31:19:42//CALLINECTES SAPIDUS (BLUE CRAB).//P55950

[2245] F-MAMMA1000713//XYLULOSE KINASE (EC 2.7.1.17) (XYLULOKINASE).//1.6e-05:88:35//LACTOBACILLUS PENTOSUS.//P21939

[2246] F-MAMMA1000714//PROTEIN-LYSINE 6-OXIDASE PRECURSOR (EC 1.4.3.13) (LYSYL OXIDASE).//0.44:126:30//RATTUS NORVEGICUS (RAT).//P16636

[2247] F-MAMMA1000718//METALLOTHIONEIN-IIE (MT-2E).//1.0:51:31//ORYCTOLAGUS CUNICULUS (RABBIT).//P80292

[2248] F-MAMMA1000720//!!!! ALU SUBFAMILY SP WARNING ENTRY !!!!//3.3e-28:60:71//HOMO SAPIENS (HUMAN).//P39193

[2249] F-MAMMA1000723//LINE-1 REVERSE TRANSCRIPTASE HOMOLOG.//3.7e-14:63:53//HOMO SAPIENS (HUMAN).//P08547

[2250] F-MAMMA1000731//CHROMODOMAIN-HELICASE-DNA-BINDING PROTEIN 2 (CHD-2).//1.8e-43:258:43//HOMO SAPIENS (HUMAN).//O14647

[2251] F-MAMMA1000732//!!!! ALU SUBFAMILY J WARNING ENTRY !!!!//9.9e-12:76:55//HOMO SAPIENS (HUMAN).//P39188

[2252] F-MAMMA1000733

[2253] F-MAMMA1000734//NPL1 PROTEIN (SEC63 PROTEIN).//2.5e-18:181:39//SACCHAROMYCES CEREVISIAE (BAKER'S YEAST).//P14906

[2254] F-MAMMA1000738//HYPOTHETICAL 116.5 KD PROTEIN C20G8.09C IN CHROMOSOME I.//5.4e-52:196:58//SCHIZOSACCHAROMYCES POMBE (FISSION YEAST).//P87115

[2255] F-MAMMA1000744//!!!! ALU SUBFAMILY SB1 WARNING ENTRY !!!!//6.3e-36:144:47//HOMO SAPIENS (HUMAN).//P39190

[2256] F-MAMMA1000746

[2257] F-MAMMA1000752

[2258] F-MAMMA1000760//!!!! ALU SUBFAMILY SX WARNING ENTRY !!!!//6.6e-29:75:72//HOMO SAPIENS (HUMAN).//P39195

[2259] F-MAMMA1000761//!!!! ALU SUBFAMILY SQ WARNING ENTRY !!!!//3.6e-09:59:64//HOMO SAPIENS (HUMAN).//P39194

[2260] F-MAMMA1000775

[2261] F-MAMMA1000776//!!!! ALU SUBFAMILY SP WARNING ENTRY !!!!//3.3e-35:99:74//HOMO SAPIENS (HUMAN).//P39193

[2262] F-MAMMA1000778//!!!! ALU SUBFAMILY SX WARNING ENTRY !!!!//2.1e-19:65:70//HOMO SAPIENS (HUMAN).//P39195

[2263] F-MAMMA1000782

[2264] F-MAMMA1000798//HYPOTHETICAL PROTEIN ORF-1137.//0.015:59:37//MUS MUSCULUS (MOUSE).//P11260

[2265] F-MAMMA1000802//MYOSIN IC HEAVY CHAIN.//0.35:94:41//ACANTHAMOEBA CASTELLANII (AMOEBA).//P10569

[2266] F-MAMMA1000824//ACTIN 1.//0.046:60:31//ZEA MAYS (MAIZE).//P02582

[2267] F-MAMMA1000831//PROBABLE NI/FE-HYDROGENASE I B-TYPE CYTOCHROME SUBUNIT.//1.0:30:46//ESCHERICHIA COLI.//P19929

[2268] F-MAMMA1000839//!!!! ALU SUBFAMILY J WARNING ENTRY !!!!//1.1e-28:80:58//HOMO SAPIENS (HUMAN).//P39188

[2269] F-MAMMA1000841//PUTATIVE AMIDASE (EC 3.5.1.4).//1.5e-39:130:36//METHANOBACTERIUM THERMOAUTOTROPHICUM.//O27540

[2270] F-MAMMA1000842//C-HORDEIN (CLONE PC-919) (FRAGMENT).//0.064:43:41//HORDEUM VULGARE (BARLEY).//P17992

[2271] F-MAMMA1000843

[2272] F-MAMMA1000845//NADH-UBIQUINONE OXIDOREDUCTASE CHAIN 2 (EC 1.6.5.3).//0.43:58:34//DROSOPHILA YAKUBA (FRUIT FLY).//P03895

[2273] F-MAMMA1000851//CUTICLE COLLAGEN 34.//0.019:107:29//CAENORHABDITIS ELEGANS.//P34687

[2274] F-MAMMA1000855//SPLICEOSOME ASSOCIATED PROTEIN 62 (SAP 62) (SF3A66).//0.00098:149:32//HOMO SAPIENS (HUMAN).//Q15428

[2275] F-MAMMA1000856//METALLOTHIONEIN (MT).//0.63:39:41//POTAMON POTAMIOS.//P55952

[2276] F-MAMMA1000859//GLYCOPROTEIN X PRECURSOR.//0.014:192:28//EQUINE HERPESVIRUS TYPE I (STRAIN AB4P) (EHV-1).//P28968

[2277] F-MAMMA1000862//DISINTEGRIN KISTRIN (PLATELET AGGREGATION ACTIVATION INHIBITOR).//1.0:66:27//AGKISTRODON RHODOSTOMA (MALAYAN PIT VIPER) (CALLOSELASMA RHODOSTOMA).//P17494

[2278] F-MAMMA1000863//!!!! ALU SUBFAMILY J WARNING ENTRY !!!!//5.4e-16:41:68//HOMO SAPIENS (HUMAN).//P39188

[2279] F-MAMMA1000865//SALIVARY PROLINE-RICH PROTEIN II-1 (FRAGMENT).//0.030:100:32//HOMO SAPIENS (HUMAN).//P81489

[2280] F-MAMMA1000867//APTOTOXIN IX (PARALYTIC PEPTIDE IX) (PP IX).//0.98:43:32//APTOSTICHUS SCHLINGERI (TRAP-DOOR SPIDER).//P49272

[2281] F-MAMMA1000875//PROLINE-RICH PEPTIDE P-B.//0.18:21:47//HOMO SAPIENS (HUMAN).//P02814

[2282] F-MAMMA1000876//!!!! ALU SUBFAMILY SB WARNING ENTRY !!!!//0.5e-22:85:71//HOMO SAPIENS (HUMAN).//P39189

[2283] F-MAMMA1000877//!!!! ALU SUBFAMILY J WARNING ENTRY !!!!//1.2e-38:62:74//HOMO SAPIENS (HUMAN).//P39188

[2284] F-MAMMA1000880//COLLAGEN ALPHA I (XII) CHAIN (FRAGMENTS).//0.49:79:32//BOS TAURUS (BOVINE).//P25508

[2285] F-MAMMA1000883//HYPOTHETICAL 6.1 KD PROTEIN C03B1.10 IN CHROMOSOME X.//0.87:15:60//CAENORHABDITIS ELEGANS.//Q11116

[2286] F-MAMMA1000897//INTER-ALPHA-TRYPSIN INHIBITOR HEAVY CHAIN H4 PRECURSOR (ITI HEAVY CHAIN H4) (INTER-ALPHA-TRYPSIN INHIBITOR FAMILY HEAVY CHAIN-RELATED PROTEIN) (PLASMA KALLIKREIN SENSITIVE GLYCOPROTEIN 120) (PK-120).//5.3e-17:130:40//HOMO SAPIENS (HUMAN).//Q14624

[2287] F-MAMMA1000905

[2288] F-MAMMA1000906

[2289] F-MAMMA1000908//LINE-1 REVERSE TRANSCRIPTASE HOMOLOG.//8.0e-17:70:62//HOMO SAPIENS (HUMAN).//P08547

[2290] F-MAMMA1000914//HYPOTHETICAL 6.2 KD PROTEIN.//0.97:36:36//THERMOPROTEUS TENAX VIRUS 1 (STRAIN KRA1) (TTV1).//P19299

[2291] F-MAMMA1000921

[2292] F-MAMMA1000931//!!!! ALU SUBFAMILY J WARNING ENTRY !!!!//5.6e-10:49:65//HOMO SAPIENS (HUMAN).//P39188

[2293] F-MAMMA1000940//MITOCHONDRIAL 60S RIBOSOMAL PROTEIN L32.//0.42:22:54//RECLINOMONAS AMERICANA.//O21281

[2294] F-MAMMA1000941//!!!! ALU SUBFAMILY J WARNING ENTRY !!!!//2.3e-25:55:69//HOMO SAPIENS (HUMAN).//P39188

[2295] F-MAMMA1000942//!!!! ALU SUBFAMILY SQ WARNING ENTRY !!!!//3.3e-08:36:75//HOMO SAPIENS (HUMAN).//P39194

[2296] F-MAMMA1000943

[2297] F-MAMMA1000956//SMALL HISTIDINE-ALANINE-RICH PROTEIN PRECURSOR (SHARP) (ANTIGEN 57).//0.041:122:25//PLASMODIUM FALCIPARUM (ISOLATE FC27/PAPUA NEW GUINEA).//P04930

[2298] F-MAMMA1000957//HEAT-STABLE ENTEROTOXIN A2 PRECURSOR (STA2).//0.024:37:37//ESCHERICHIA COLI.//Q47185

[2299] F-MAMMA1000962//!!!! ALU SUBFAMILY SB WARNING ENTRY !!!!//6.0e-39:61:78//HOMO SAPIENS (HUMAN).//P39189

[2300] F-MAMMA1000968//!!!! ALU SUBFAMILY SQ WARNING ENTRY !!!!//0.0054:29:72//HOMO SAPIENS (HUMAN).//P39194

[2301] F-MAMMA1000975//CUTICLE COLLAGEN DPY-2 PRECURSOR.//1.0:93:30//CAENORHABDITIS ELEGANS.//P35799

[2302] F-MAMMA1000979//PROLINE-RICH PEPTIDE P-B.//0.012:12:66//HOMO SAPIENS (HUMAN).//P02814

[2303] F-MAMMA1000987//HYPOTHETICAL PROTEIN LAMBDA-SP34.//1.0:47:40//MUS MUSCULUS (MOUSE).//P15973

[2304] F-MAMMA1000998

[2305] F-MAMMA1001003//PROBABLE E5 PROTEIN.//1.0:52:42//HUMAN PAPILLOMAVIRUS TYPE 33.//P06426

[2306] F-MAMMA1001008//PROGASTRICSIN PRECURSOR (EC 3.4.23.3) (PEPSINOGEN C) (FRAGMENT).//3.2e-14:131:35//MACACA FUSCATA FUSCATA (JAPANESE MACAQUE).//P03955

[2307] F-MAMMA1001021//HYPOTHETICAL 35.5 KD PROTEIN IN TRANSPOSON TN4556.//0.016:61:42//STREPTOMYCES FRADIAE.//P20186

[2308] F-MAMMA1001024

[2309] F-MAMMA11001030//LUTROPIN-CHORIOGONADOTROPIC HORMONE RECEPTOR (LH/CG-R) (LSH-R) (LUTEINIZING HOROMINE RECEPTOR) (FRAGMENT).//2.4e-20:234:29//GALLUS GALLUS (CHICKEN).//Q90674

[2310] F-MAMMA1001035//!!!! ALU SUBFAMILY SP WARNING ENTRY !!!!//1.7e-15:52:78//HOMO SAPIENS (HUMAN).//P39193

[2311] F-MAMMA1001038//NEUROTOXIN II (TOXIN RP-II) (SODIUM CHANNEL TOXIN II).//0.53:25:48//RADIANTHUS PAUMOTENSIS (SEA ANEMONE) (HETERACTIS PAUMOTENSIS).//P01534

[2312] F-MAMMA100104H1/SPECTRIN BETA CHAIN, ERYTHROCYTE.//6.3e-18:112:43//MUS MUSCULUS (MOUSE).//P15508

[2313] F-MAMMA1001050

[2314] F-MAMMA1001059//PUTATIVE ATP-DEPENDENT RNA HELICASE C12C2.06.//1.3e-34:187:47//SCHIZOSACCHAROMYCES POMBE (FISSION YEAST).//Q09747

[2315] F-MAMMA1001067//PROTEIN Q300.//0.36:12:75//MUS MUSCULUS (MOUSE).//Q02722

[2316] F-MAMMA1100073//HEPATOCYTE NUCLEAR FACTOR 3 FORKHEAD HOMOLOG 1 (HFH-1).//1.0:70:37//RATTUS NORVEGICUS (RAT).//Q63244

[2317] F-MAMMA1001074//LINE-1 REVERSE TRANSCRIPTASE HOMOLOG.//0.00067:163:32//HOMO SAPIENS (HUMAN).//P08547

[2318] F-MAMMA1001075//RETINOBLASTOMA BINDING PROTEIN 1 (RBBP-1).//0.53:72:34//HOMO SAPIENS (HUMAN).//P29374

[2319] F-MAMMA1001078//LINE-1 REVERSE TRANSCRIPTASE HOMOLOG.//5.0e-79:184:73//HOMO SAPIENS (HUMAN).//P08547

[2320] F-MAMMA1001080//IG HEAVY CHAIN PRECURSOR V-III REGION (VH26).//1.7e-27:82:71//HOMO SAPIENS (HUMAN).//P01764

[2321] F-MAMMA1001082

[2322] F-MAMMA1001091//HYPOTHETICAL BHLF1 PROTEIN.//3.1e-05:198:32//EPSTEIN-BARR VIRUS (STRAIN B95-8) (HUMAN HERPESVIRUS 4).//P03181

[2323] F-MAMMA1001092//LINE-1 REVERSE TRANSCRIPTASE HOMOLOG.//7.1e-21:65:72//HOMO SAPIENS (HUMAN).//P08547

[2324] F-MAMMA1001105//OVO PROTEIN (SHAVEN BABY PROTEIN).//1.0e-18:68:48//DROSOPHILA MELANOGASTER (FRUIT FLY).//P51521

[2325] F-MAMMA1001110//PROCOLLAGEN ALPHA 1 (IV) CHAIN PRECURSOR.//0.080:108:37//MUS MUSCULUS (MOUSE).//P02463

[2326] F-MAMMA1001126//!!!! ALU SUBFAMILY SB WARNING ENTRY !!!!//2.3e-07:66:45//HOMO SAPIENS (HUMAN).//P39189

[2327] F-MAMMA1001133//HYPOTHETICAL 13.2 KD PROTEIN IN RPS4A-BAT2 INTERGENIC REGION.//0.96:43:25//SACCHAROMYCES CEREVISIAE (BAKER'S YEAST).//P47174

[2328] F-MAMMA1001139//HYPOTHETICAL 36.7 KD PROTEIN AH6.2 IN CHROMOSOME II.//5.4e-42:81:62//CAENORHABDITIS ELEGANS.//Q09201

[2329] F-MAMMA1001143//!!!! ALU SUBFAMILY J WARNING ENTRY !!!!!//0.00014:36:66//HOMO SAPIENS (HUMAN).//P39188

[2330] F-MAMMA1001145

[2331] F-MAMMA1001154//CSBA PROTEIN.//1.0:39:38//BACILLUS SUBTILIS.//P37953

[2332] F-MAMMA10161//H!!!! ALU SUBFAMILY J WARNING ENTRY !!!!//5.2e-23:53:64//HOMO SAPIENS (HUMAN).//P39188

[2333] F-MAMMA1001162//CD27L RECEPTOR PRECURSOR (T-CELL ACTIVATION ANTIGEN CD27).//0.69:86:31//MUS MUSCULUS (MOUSE).//P41272

[2334] F-MAMMA1001181//HYPOTHETICAL 81.0 KD PROTEIN C35D10.4 IN CHROMOSOME III.//0.00010:74:47//CAENORHABDITIS ELEGANS.//Q18486

[2335] F-MAMMA1001186//!!!! ALU SUBFAMILY SQ WARNING ENTRY !!!!//9.0e-32:44:86//HOMO SAPIENS (HUMAN).//P39194

[2336] F-MAMMA1001191//OCTAMER-BINDING TRANSCRIPTION FACTOR 1 (OTF-1) (NF-A1) (FRAGMENT).//0.096:40:40//MACROPUS EUGENII (TAMMAR WALLABY).//Q28466

[2337] F-MAMMA1001198//EPIDERMAL GROWTH FACTOR RECEPTOR SUBSTRATE SUBSTRATE 15 (PROTEIN EPS15) (AF-IP PROTEIN).//2.5e-75:204:70//HOMO SAPIENS (HUMAN).//P42566

[2338] F-MAMMA1001202//METALLOTHIONEIN-II (MT-II) (MT-IIB/MT-IIA).//0.52:46:32//CALLINECTES SAPIDUS (BLUE CRAB).//P55950

[2339] F-MAMMA1001203//!!!! ALU SUBFAMILY SC WARNING ENTRY !!!!//7.3e-11:82:58//HOMO SAPIENS (HUMAN).//P39192

[2340] F-MAMMA1001206//!!!! ALU SUBFAMILY J WARNING ENTRY !!!!//1.9e-17:67:71//HOMO SAPIENS (HUMAN).//P39188

[2341] F-MAMMA1001215//9 KD PROTEIN.//1.0:51:33//HOMO SAPIENS (HUMAN).//P13994

[2342] F-MAMMA1001220//!!!! ALU SUBFAMILY SB WARNING ENTRY !!!!//3.4e-37:55:87//HOMO SAPIENS (HUMAN).//P39189

[2343] F-MAMMA1001222//HYPOTHETICAL 73.6 KD PROTEIN CY49.21.//3.7e-06:168:38//MYCOBACTERIUM TUBERCULOSIS.//Q10690

[2344] F-MAMMA1001243

[2345] F-MAMMA1001244//TRP OPERON LEADER PEPTIDE.//1.0:18:55//SERRATIA MARCESCENS.//P03055

[2346] F-MAMMA1001249//HYPOTHETICAL 7.2 KD PROTEIN IN RPS2 3′REGION (ORF57).//0.57:23:34//ASTASIA LONGA (EUGLENOPHYCEAN ALGA).//P34774

[2347] F-MAMMA1001256//!!!! ALU SUBFAMILY J WARNING ENTRY !!!!//2.3e-07:79:44//HOMO SAPIENS (HUMAN).//P39188

[2348] F-MAMMA1001259//PUTATIVE DNA HELICASE II HOMOLOG (EC 3.6.1.-).//0.046:86:32//MYCOPLASMA GENITALIUM.//P47486

[2349] F-MAMMA1001260//MYOSIN HEAVY CHAIN, PERINATAL SKELETAL MUSCLE.//2.7e-05:219:27//HOMO SAPIENS (HUMAN).//P13535

[2350] F-MAMMA1001268//LINE-1 REVERSE TRANSCRIPTASE HOMOLOG.//9.7e-27:89:67//HOMO SAPIENS (HUMAN).//P08547

[2351] F-MAMMA1001271//ATROPHIN-1 (DENTATORUBRAL-PALLIDOLUYSIAN ATROPHY PROTEIN).//4.0e-06:126:38//HOMO SAPIENS (HUMAN).//P54259

[2352] F-MAMMA1001274/1!!!! ALU SUBFAMILY SQ WARNING ENTRY !!!!//7.4e-29:57:66//HOMO SAPIENS (HUMAN).//P39194

[2353] F-MAMMA1001280//BACTERIOCIN MICROCIN B17 PRECURSOR (MCB17).//0.27:24:54//ESCHERICHIA COLI.//P05834

[2354] F-MAMMA1001292//HYPOTHETICAL PROTEIN KIAA0176 (FRAGMENT).//1.3e-73:208:69//HOMO SAPIENS (HUMAN).//Q14681

[2355] F-MAMMA1001296//!!!! ALU SUBFAMILY SP WARNING ENTRY !!!!//6.9e-22:41:80//HOMO SAPIENS (HUMAN).//P39193

[2356] F-MAMMA1001298//HYPOTHETICAL PROTEIN H10371./0.99:29:37//HAEMOPHILUS INFLUENZAE.//P44668

[2357] F-MAMMA1001305//GTPASE-ACTIVATING PROTEIN RHOGAP (RHO-RELATED SMALL GTPASE PROTEIN ACTIVATOR) (CDC42 GTPASE-ACTIVATING PROTEIN) (P50-RHOGAP).//9.9e-62:222:54//HOMO SAPIENS (HUMAN).//Q07960

[2358] F-MAMMA10013 22//B-CELL GROWTH FACTOR PRECURSOR (BCGF-12 KD).//2.1e-09:46:60//HOMO SAPIENS (HUMAN).//P20931

[2359] F-MAMMA1001324//POL POLYPROTEIN [CONTAINS: PROTEASE (EC 3.4.23.-); REVERSE TRANSCRIPTASE (EC 2.7.7.49); RIBONUCLEASE H (EC 3.1.26.4)].//2.5e-43:128:50//FRIEND MURINE LEUKEMIA VIRUS (ISOLATE PVC-211) (F-MULV).//P26808

[2360] F-MAMMA1001330//HEMOGLOBIN ZETA CHAIN (FRAGMENTS).//0.30:51:37//MACROPUS EUGENII (TAMMAR WALLABY).//P81044

[2361] F-MAMMA1001341//TRISTETRAPROLINE (TTP) (TIS11A) (TIS11) (ZFP-36) (GROWTH FACTOR-INDUCIBLE NUCLEAR PROTEIN NUP475).//0.024:89:39//HOMO SAPIENS (HUMAN).//P26651

[2362] F-MAMMA1001343//PROBABLE E5 PROTEIN.//0.60:64:29//HUMAN PAPILLOMAVIRUS TYPE 16.//P06927

[2363] F-MAMMA1001346//PROTEINASE INHIBITOR IIB (FRAGMENTS).//0.97:33:45//SOLANUM TUBEROSUM (POTATO).//P01082

[2364] F-MAMMA1001383//!!!! ALU SUBFAMILY SQ WARNING ENTRY !!!!//1.2e-30:86:77//HOMO SAPIENS (HUMAN).//P39194

[2365] F-MAMMA100138 8//LEUCINE-RICH ALPHA-2-GLYCOPROTEIN (LRG).//9.2e-91:195:92//HOMO SAPIENS (HUMAN).//P02750

[2366] F-MAMMA1001397//!!!! ALU SUBFAMILY J WARNING ENTRY !!!!//3.5e-19:55:69//HOMO SAPIENS (HUMAN).//P39188

[2367] F-MAMMA1001408//SALIVARY GLUE PROTEIN SGS-7 PRECURSOR.//0.60:45:35//DROSOPHILA MELANOGASTER (FRUIT FLY).//P02841

[2368] F-MAMMA1001411//GLUCOAMYLASE S1/S2 PRECURSOR (EC 3.2.1.3) (GLUCAN 1,4-ALPHA-GLUCOSIDASE) (1,4-ALPHA-D-GLUCAN GLUCOHYDROLASE).//5.8e-06:153:26//SACCHAROMYCES CEREVISIAE (BAKER'S YEAST).//P08640

[2369] F-MAMMA1001419//!!!! ALU SUBFAMILY SQ WARNING ENTRY !!!!//2.3e-16:99:51//HOMO SAPIENS (HUMAN).//P39194

[2370] F-MAMMA1001420//!!!! ALU SUBFAMILY SB1 WARNING ENTRY !!!!//0.0018:23:65//HOMO SAPIENS (HUMAN).//P39190

[2371] F-MAMMA1001435//!!!! ALU SUBFAMILY SX WARNING ENTRY !!!!//1.7e-22:60:58//HOMO SAPIENS (HUMAN).//P39195

[2372] F-MAMMA1001442

[2373] F-MAMMA1001446//!!!! ALU SUBFAMILY SQ WARNING ENTRY !!!!//1.2e-23:48:75//HOMO SAPIENS (HUMAN).//P39194

[2374] F-MAMMA1001452//GENE 35 PROTEIN (GP35).//0.61:31:45//MYCOBACTERIOPHAGE L5.//Q05245

[2375] F-MAMMA1001465//HYPOTHETICAL PROTEIN E-115.//0.0026:68:38//HUMAN ADENOVIRUS TYPE 2.//P03290

[2376] F-MAMMA1001476//URIDINE KINASE (EC 2.7.1.48) (URIDINE MONOPHOSPHOKINASE) (FRAGMENT).//3.7e-94:201:92//MUS MUSCULUS (MOUSE).//P52623

[2377] F-MAMMA1001487//LINE-1 REVERSE TRANSCRIPTASE HOMOLOG.//4.6e-16:89:41//NYCTICEBUS COUCANG (SLOW LORIS).//P08548

[2378] F-MAMMA1001501//CALPAIN 1, LARGE [CATALYTIC] SUBUNIT (EC 3.4.22.17) (CALCIUM-ACTIVATED NEUTRAL PROTEINASE) (CANP) (MU-TYPE).//6.2e-59:86:97//HOMO SAPIENS (HUMAN).//P07384

[2379] F-MAMMA1001502//HYPOTHETICAL 11.4 KD PROTEIN (ORF 1).//0.21:79:30//STREPTOMYCES FRADIAE.//P26800

[2380] F-MAMMA1001510

[2381] F-MAMMA1001522//HYPOTHETICAL 35.5 KD PROTEIN IN TRANSPOSON TN4556.//0.67:98:31//STREPTOMYCES FRADIAE.//P20186

[2382] F-MAMMA1001547//PROBABLE MOLYBDENUM-PTERIN BINDING PROTEIN.//0.97:35:42//HAEMOPHILUS INFLUENZAE.//P45183

[2383] F-MAMMA1001551//HYPOTHETICAL PROTEIN MJ0458.1.//0.038:31:41//METHANOCOCCUS JANNASCHII.//P81308

[2384] F-MAMMA1001575

[2385] F-MAMMA1001576//TUBULIN GAMMA CHAIN.//1.6e-86:162:99//XENOPUS LAEVIS (AFRICAN CLAWED FROG).//P23330

[2386] F-MAMMA1001590//!!!! ALU SUBFAMILY SX WARNING ENTRY !!!!//0.0035:38:55//HOMO SAPIENS (HUMAN).//P39195

[2387] F-MAMMA1001600//CONNECTIVE TISSUE GROWTH FACTOR PRECURSOR.//0.85:53:33//HOMO SAPIENS (HUMAN).//P29279

[2388] F-MAMMA1001604//HYPOTHETICAL 11.1 KD PROTEIN C30D11.02C IN CHROMOSOME I.//0.14:82:29//SCHIZOSACCHAROMYCES POMBE (FISSION YEAST).//Q09902

[2389] F-MAMMA1001606//HIGH MOBILITY GROUP PROTEIN HMGI-C.//8.2e-05:77:37//HOMO SAPIENS (HUMAN).//P52926

[2390] F-MAMMA1001620//!!!! ALU SUBFAMILY SX WARNING ENTRY !!!!//5.5e-05:24:66//HOMO SAPIENS (HUMAN).//P39195

[2391] F-MAMMA1001627//CUTICLE COLLAGEN 40.//0.82:131:31//CAENORHABDITIS ELEGANS.//P34804

[2392] F-MAMMA1001630//!!!! ALU SUBFAMILY SQ WARNING ENTRY !!!!//8.6e-26:57:78//HOMO SAPIENS (HUMAN).//P39194

[2393] F-MAMMA1001633//ZINC FINGER PROTEIN 165.//6.9e-38:160:55//HOMO SAPIENS (HUMAN).//P49910

[2394] F-MAMMA1001635

[2395] F-MAMMA1001649//SPERM PROTAMINE P1.//0.39:31:41//TACHYGLOSSUS ACULEATUS ACULEATUS (AUSTRALIAN ECHIDNA).//P35311

[2396] F-MAMMA1001654//NON-RECEPTOR TYROSINE KINASE SPORE LYSIS A (EC 2.7.1.112) (TYROSINE- PROTEIN KINASE 1).//5.6e-06:99:28//DICTYOSTELIUM DISCOIDEUM (SLIME MOLD).//P18160

[2397] F-MAMMA1001663//VERY HYPOTHETICAL XYLU PROTEIN.//0.99:27:37//ESCHERICHIA COLI.//P05056

[2398] F-MAMMA1001670//CUTICLE COLLAGEN 1.//0.033:97:37//CAENORHABDITIS ELEGANS.//P08124

[2399] F-MAMMA1001671

[2400] F-MAMMA1001679//PROCOLLAGEN ALPHA 2(IV) CHAIN PRECURSOR.//0.92:32:50//HOMO SAPIENS (HUMAN).//P08572

[2401] F-MAMMA1001683//HYPOTHETICAL 35.5 KD PROTEIN IN TRANSPOSON TN4556.//0.00026:147:34//STREPTOMYCES FRADIAE.//P20186

[2402] F-MAMMA1001686

[2403] F-MAMMA1001692//SMALL HYDROPHOBIC PROTEIN (SMALL PROTEIN 1A).//1.0:34:26//BOVINE RESPIRATORY SYNCYTIAL VIRUS (STRAIN A51908) (BRS).//P24616

[2404] F-MAMMA1001711//!!!! ALU SUBFAMILY SQ WARNING ENTRY !!!!//1.1e-28:56:69//HOMO SAPIENS (HUMAN).//P39194

[2405] F-MAMMA1001715//!!!! ALU SUBFAMILY J WARNING ENTRY !!!!//1.6e-08:39:71//HOMO SAPIENS (HUMAN).//P39188

[2406] F-MAMMA1001730//METALLOTHIONEIN-B (MTB).//11.0:17:64//STRONGYLOCENTROTUS PURPURATUS (PURPLE SEA URCHIN).//Q27287

[2407] F-MAMMA1001735//TUBULIN BETA-5 CHAIN (CLASS-V).//5.1e-121:213:97//GALLUS GALLUS (CHICKEN).//P09653

[2408] F-MAMMA1001740

[2409] F-MAMMA1001743//!!!! ALU SUBFAMILY SX WARNING ENTRY !!!!//1.3e-09:100:42//HOMO SAPIENS (HUMAN).//P39195

[2410] F-MAMMA1001744//POU DOMAIN PROTEIN 2.//0.97:59:38//BRACHYDANIO RERIO (ZEBRAFISH) (ZEBRA DANIO).//Q90270

[2411] F-MAMMA1001745//LINE-1 REVERSE TRANSCRIPTASE HOMOLOG.//2.1e-43:199:42//HOMO SAPIENS (HUMAN).//P08547

[2412] F-MAMMA1001751//TWK-8 PROTEIN.//2.9e-15:77:36//CAENORHABDITIS ELEGANS.//P34410

[2413] F-MAMMA1001754//MALE SPECIFIC SPERM PROTEIN MST84DD.//0.019:20:45//DROSOPHILA MELANOGASTER (FRUIT FLY).//Q01645

[2414] F-MAMMA1001757//HYPOTHETICAL 9.2 KD PROTEIN IN RNPA 3′REGION.//0.94:30:43//PSEUDOMONAS PUTIDA.//P25753

[2415] F-MAMMA11001760//!!!! ALU SUBFAMILY SB2 WARNING ENTRY !!!!//4.6e-34:103:59//HOMO SAPIENS (HUMAN).//P39191

[2416] F-MAMMA1001764

[2417] F-MAMMA1001768//HYPOTHETICAL PROTEIN UL61./0.042:167:33//HUMAN CYTOMEGALOVIRUS (STRAIN AD169).//P16818

[2418] F-MAMMA1001769//!!!! ALU SUBFAMILY SQ WARNING ENTRY !!!!//2.0e-29:97:69//HOMO SAPIENS (HUMAN).//P39194

[2419] F-MAMMA1001771//TRANSMEMBRANE PROTEIN SEX PRECURSOR.//3.3e-09:123:32//HOMO SAPIENS (HUMAN).//P51805

[2420] F-MAMMA1001783//!!!! ALU SUBFAMILY J WARNING ENTRY !!!!//1.1e-09:55:61//HOMO SAPIENS (HUMAN).//P39188

[2421] F-MAMMA1001785//RAS-RELATED PROTEIN RABC.//1.9e-06:120:25//DICTYOSTELIUM DISCOIDEUM (SLIME MOLD).//P34143

[2422] F-MAMMA1001788//LINE-1 REVERSE TRANSCRIPTASE HOMOLOG.//9.3e-29:46:76//HOMO SAPIENS (HUMAN).//P08547

[2423] F-MAMMA1001790//!!!! ALU SUBFAMILY J WARNING ENTRY !!!!//4.7e-24:69:69//HOMO SAPIENS (HUMAN).//P39188

[2424] F-MAMMA1001806//HYPOTHETICAL 21.2 KD PROTEIN IN TOR2-MNN4 INTERGENIC REGION.//0.95:58:36//SACCHAROMYCES CEREVISIAE (BAKER'S YEAST).//P36042

[2425] F-MAMMA1001812//!!!! ALU SUBFAMILY SX WARNING ENTRY !!!!//8.8e-12:53:69//HOMO SAPIENS (HUMAN).//P39195

[2426] F-MAMMA1001815//LINE-1 REVERSE TRANSCRIPTASE HOMOLOG.//0.11:30:70//HOMO SAPIENS (HUMAN).//P08547

[2427] F-MAMMA1001817//!!!! ALU SUBFAMILY J WARNING ENTRY !!!!//2.9e-16:86:55//HOMO SAPIENS (HUMAN).//P39188

[2428] F-MAMMA1001818

[2429] F-MAMMA1001820//VITELLINE MEMBRANE PROTEIN VM26AB PRECURSOR (PROTEIN TU-4) (PROTEIN SV23).//0.0030:63:42//DROSOPHILA MELANOGASTER (FRUIT FLY).//P13238

[2430] F-MAMMA1001824//APTOTOXIN VII (PARALYTIC PEPTIDE VII) (PP VII).//0.99:26:34//APTOSTICHUS SCHLINGERI (TRAP-DOOR SPIDER).//P49271

[2431] F-MAMMA1001836//!!!! ALU SUBFAMILY SX WARNING ENTRY !!!!//2.6e-35:77:88//HOMO SAPIENS (HUMAN).//P39195

[2432] F-MAMMA1001837//ZINC FINGER PROTEIN 191.//1.3e-27:106:58//HOMO SAPIENS (HUMAN).//O14754

[2433] F-MAMMA1001848//!!!! ALU SUBFAMILY J WARNING ENTRY !!!!//1.0e-19:92:58//HOMO SAPIENS (HUMAN).//P39188

[2434] F-MAMMA1001851

[2435] F-MAMMA1001854

[2436] F-MAMMA1001858//ISOTOCIN-NEUROPHYSIN IT 1 PRECURSOR.//0.93:42:38//CATOSTOMUS COMMERSONI (WHITE SUCKER).//P15210

[2437] F-MAMMA1001864//PROBABLE ABC TRANSPORTER PERMEASE PROTEIN MG189.//0.77:161:27//MYCOPLASMA GENITALIUM.//P47435

[2438] F-MAMMA1001868//FK506-BINDING NUCLEAR PROTEIN (PEPTIDYL-PROLYL CIS-TRANS ISOMERASE) (PPIASE) (EC 5.2.1.8) (PROLINE ROTAMASE) (NUCLEOLAR PROLINE ISOMERASE) (FKBP-70).//0.00013:219:26//SACCHAROMYCES CEREVISIAE (BAKER'S YEAST).//P38911

[2439] F-MAMMA1001874//SPERM HISTONE P2 PRECURSOR (PROTAMINE MP2).//0.0075:76:31//MUS MUSCULUS (MOUSE).//P07978

[2440] F-MAMMA1001878//GLYCINE-RICH CELL WALL STRUCTURAL PROTEIN (CLONE W10-1) (FRAGMENT).//0.020:10:80//LYCOPERSICON ESCULENTUM (TOMATO).//Q01157

[2441] F-MAMMA1001880

[2442] F-MAMMA1100890//!!!! ALU SUBFAMILY SC WARNING ENTRY !!!!//5.1e-34:56:83//HOMO SAPIENS (HUMAN).//P39192

[2443] F-MAMMA1100907//!!!!! ALU SUBFAMILY SQ WARNING ENTRY !!!!//2.7e-12:44:68//HOMO SAPIENS (HUMAN).//P39194

[2444] F-MAMMA1001908//HYPOTHETICAL 16.2 KD PROTEIN IN PRP24-RRN9 INTERGENIC REGION.//0.00013:77:37//SACCHAROMYCES CEREVISIAE (BAKER'S YEAST).//Q03525

[2445] F-MAMMA1001931//HYPOTHETICAL 118.2 KD PROTEIN F43C1.1 IN CHROMOSOME III.//0.41:106:29//CAENORHABDITIS ELEGANS.//Q09564

[2446] F-MAMMA1001956//OCTAPEPTIDE-REPEAT PROTEIN T2.//0.00053:149:30//MUS MUSCULUS (MOUSE).//Q06666

[2447] F-MAMMA1100963/HYPOTHETICAL PROTEIN IN NAC 5′REGION (ORF X) (FRAGMENT).//1.0:46:28//KLEBSIELLA AEROGENES.//Q08600

[2448] F-MAMMA1001969//LINE-1 REVERSE TRANSCRIPTASE HOMOLOG.//1.7e-34:97:68//HOMO SAPIENS (HUMAN).//P08547

[2449] F-MAMMA1001970//LINE-1 REVERSE TRANSCRIPTASE HOMOLOG.//6.2e-07:67:37//HOMO SAPIENS (HUMAN).//P08547

[2450] F-MAMMA1001992//PROTEIN Q300.//0.53:14:71//MUS MUSCULUS (MOUSE).//Q02722

[2451] F-MAMMA1002009//PROBABLE E5 PROTEIN.//0.17:56:32//HUMAN PAPILLOMAVIRUS TYPE 31.//P17385

[2452] F-MAMMA100201//MYRISTOYLATED ALANINE-RICH C-KINASE SUBSTRATE (MARCKS) (PROTEIN KINASE C SUBSTRATE, 80 KD PROTEIN, LIGHT CHAIN) (PKCSL) (80K-L PROTEIN).//1.0:100:31//HOMO SAPIENS (HUMAN).//P29966

[2453] F-MAMMA1002032//!!!! ALU SUBFAMILY J WARNING ENTRY !!!!//3.1e-21:86:65//HOMO SAPIENS (HUMAN).//P39188

[2454] F-MAMMA1002033//!!!! ALU SUBFAMILY J WARNING ENTRY !!!!//8.5e-20:67:58//HOMO SAPIENS (HUMAN).//P39188

[2455] F-MAMMA1002041//MALE SPECIFIC SPERM PROTEIN MST84DC.//1.0:17:52//DROSOPHILA MELANOGASTER (FRUIT FLY).//Q01644

[2456] F-MAMMA1002042//!!!! ALU SUBFAMILY SC WARNING ENTRY !!!!//0.19:45:46//HOMO SAPIENS (HUMAN).//P39192

[2457] F-MAMMA1002047//TYROSINE AMINOTRANSFERASE (EC 2.6.1.5) (L-TYROSINE:2-OXOGLUTARATE AMINOTRANSFERASE) (TAT).//0.0017:50:46//RATTUS NORVEGICUS (RAT).//P04694

[2458] F-MAMMA1002056//!!!! ALU SUBFAMILY SQ WARNING ENTRY !!!!//3.2e-37:70:77//HOMO SAPIENS (HUMAN).//P39194

[2459] F-MAMMA1002058//!!!! ALU SUBFAMILY J WARNING ENTRY !!!!//1.1e-08:26:76//HOMO SAPIENS (HUMAN).//P39188

[2460] F-MAMMA1002068//LINE-1 REVERSE TRANSCRIPTASE HOMOLOG.//2.0e-11:78:46//HOMO SAPIENS (HUMAN).//P08547

[2461] F-MAMMA1002078//ATP SYNTHASE PROTEIN 8 (EC 3.6.1.34) (A6L).//0.96:26:46//COTURNIX COTURNIX JAPONICA (JAPANESE QUAIL).//P50682

[2462] F-MAMMA1002082//SUPPRESSOR PROTEIN SRP40.//0.23:95:32//SACCHAROMYCES CEREVISIAE (BAKER'S YEAST).//P32583

[2463] F-MAMMA1002084//HYPOTHETICAL 7.5 KD PROTEIN.//1.0:40:35//VACCINIA VIRUS (STRAIN COPENHAGEN).//P20520

[2464] F-MAMMA1002093

[2465] F-MAMMA1002108//HYPOTHETICAL 35.5 KD PROTEIN IN TRANSPOSON TN4556.//0.00079:143:33//STREPTOMYCES FRADIAE.//P20186

[2466] F-MAMMA1002118//ATP SYNTHASE PROTEIN 8 (EC 3.6.1.34) (A6L).//1.0:43:34//METRIDIUM SENILE (BROWN SEA ANEMONE) (FRILLED SEA ANEMONE).//O47493

[2467] F-MAMMA1002125//!!!! ALU SUBFAMILY SC WARNING ENTRY !!!!//1.9e-14:60:68//HOMO SAPIENS (HUMAN).//P39192

[2468] F-MAMMA1002132

[2469] F-MAMMA1002140//!!!! ALU SUBFAMILY J WARNING ENTRY !!!!//1.4e-24:69:65//HOMO SAPIENS (HUMAN).//P39188

[2470] F-MAMMA1002143//SERUM PROTEIN MSE55.//2.1e-16:166:43//HOMO SAPIENS (HUMAN).//Q00587

[2471] F-MAMMA1002145//36.4 KD PROLINE-RICH PROTEIN.//0.00014:84:29//LYCOPERSICON ESCULENTUM (TOMATO).//Q00451

[2472] F-MAMMA1002153

[2473] F-MAMMA1002155

[2474] F-MAMMA1002156//METALLOPROTEINASE INHIBITOR PRECURSOR.//0.90:58:34//STREPTOMYCES NIGRESCENS.//P01077

[2475] F-MAMMA1002158

[2476] F-MAMMA1002170//40S RIBOSOMAL PROTEIN S2 (S4) (LLREP3 PROTEIN).//6.0e-66:157:70//HOMO SAPIENS (HUMAN).//P15880

[2477] F-MAMMA1002174//!!!! ALU SUBFAMILY J WARNING ENTRY !!!!//6.5e-25:56:64//HOMO SAPIENS (HUMAN)./MP39188

[2478] F-MAMMA1002198//THIOREDOXIN PEROXIDASE 1 (THIOREDOXIN-DEPENDENT PEROXIDE REDUCTASE 1) (THIOL-SPECIFIC ANTIOXIDANT PROTEIN) (TSA) (PRP) (NATURAL KILLER CELL ENHANCING FACTOR B) (NKEF-B).//9.0e-09:28:100//HOMO SAPIENS (HUMAN).//P32119

[2479] F-MAMMA1002209//TRANSCRIPTION INITIATION FACTOR TFIID 135 KD SUBUNIT (TAFII-135) (TAFII135) (TAFII-130) (TAFII130).//0.0023:132:33//HOMO SAPIENS (HUMAN).//O00268

[2480] F-MAMMA1002215//PROCOLLAGEN ALPHA 1 (I) CHAIN PRECURSOR.//0.00032:68:35//HOMO SAPIENS (HUMAN).//P02452

[2481] F-MAMMA1002219//INTRACELLULAR PROTEIN TRANSPORT PROTEIN USO1.//0.0079:224:24//SACCHAROMYCES CEREVISIAE (BAKER'S YEAST).//P25386

[2482] F-MAMMA1002230

[2483] F-MAMMA1002236//TRANSLATION INITIATION FACTOR EIF-2B GAMMA SUBUNIT (EIF-2B GDP-GTP EXCHANGE FACTOR).//1.4e-118:151:94//RATTUS NORVEGICUS (RAT).//P70541

[2484] F-MAMMA1002243//WISKOTT-ALDRICH SYNDROME PROTEIN HOMOLOG (WASP).//0.028:112:33//MUS MUSCULUS (MOUSE).//P70315

[2485] F-MAMMA1002250//T-CELL RECEPTOR BETA CHAIN PRECURSOR (ANA 11).//0.0012:80:32//ORYCTOLAGUS CUNICULUS (RABBIT).//P06333

[2486] F-MAMMA1002267//ATP SYNTHASE A CHAIN (EC 3.6.1.34) (PROTEIN 6).//0.17:139:28//TRYPANOSOMA BRUCEI BRUCEI.//P24499

[2487] F-MAMMA1002268//60S RIBOSOMAL PROTEIN L22.//0.00026:163:30//DROSOPHILA MELANOGASTER (FRUIT FLY).//P50887

[2488] F-MAMMA1002269//HISTIDINE-RICH, METAL BINDING POLYPEPTIDE.//0.35:14:57//HELICOBACTER PYLORI (CAMPYLOBACTER PYLORI).//Q48251

[2489] F-MAMMA1002282//!!!! ALU SUBFAMILY SC WARNING ENTRY !!!!//6.1e-05:32:65//HOMO SAPIENS (HUMAN).//P39192

[2490] F-MAMMA1002292//TROPOMYOSIN 2.1110.4e-05:100:30//SACCHAROMYCES CEREVISIAE (BAKER'S YEAST).//P40414

[2491] F-MAMMA1002293//!!!! ALU SUBFAMILY J WARNING ENTRY !!!!//6.8e-25:127:44//HOMO SAPIENS (HUMAN).//P39188

[2492] F-MAMMA1002294//ALPHA TRANS-INDUCING PROTEIN (ALPHA-TIF).//0.00011:138:38//BOVINE HERPESVIRUS TYPE I (STRAIN P8-2).//P30020

[2493] F-MAMMA1002297//A-AGGLUTININ ATTACHMENT SUBUNIT PRECURSOR.//0.15:144:30//SACCHAROMYCES CEREVISIAE (BAKER'S YEAST).//P32323

[2494] F-MAMMA1002298//PROLINE-RICH PROTEIN MP-3 (FRAGMENT).//1.0e-05:40:50//MUS MUSCULUS (MOUSE).//P05143

[2495] F-MAMMA1002299//NADH-UBIQUINONE OXIDOREDUCTASE CHAIN 4L (EC 1.6.5.3).//0.84:65:32//STRUTHIO CAMELUS (OSTRICH).//O21405

[2496] F-MAMMA1002308//!!!! ALU SUBFAMILY J WARNING ENTRY !!!!//4.3e-29:61:73//HOMO SAPIENS (HUMAN).//P39188

[2497] F-MAMMA1002310//SPERM MITOCHONDRIAL CAPSULE SELENOPROTEIN (MCS).//0.00016:70:38//MUS MUSCULUS (MOUSE).//P15265

[2498] F-MAMMA1002311/!!!! ALU SUBFAMILY SB WARNING ENTRY !!!!l/9.4e-09:84:54//HOMO SAPIENS (HUMAN).//P39189

[2499] F-MAMMA1002312//HYPOTHETICAL 10.8 KD PROTEIN IN GP30-RIII INTERGENIC REGION (URF Y).//0.48:48:33//BACTERIOPHAGE T4.//P33084

[2500] F-MAMMA1002317

[2501] F-MAMMA1002319//RETROVIRUS-RELATED POL POLYPROTEIN [CONTAINS: REVERSE TRANSCRIPTASE (EC 2.7.7.49); ENDONUCLEASE].//0.011:128:27//MUS MUSCULUS (MOUSE).//P11369

[2502] F-MAMMA1002322//!!!! ALU SUBFAMILY SX WARNING ENTRY !!!!//5.2e-20:92:57//HOMO SAPIENS (HUMAN).//P39195

[2503] F-MAMMA1002329//ATP SYNTHASE PROTEIN 8 (EC 3.6.1.34) (A6L).//0.051:33:36//XENOPUS LAEVIS (AFRICAN CLAWED FROG).//P03931

[2504] F-MAMMA1002332//LINE-1 REVERSE TRANSCRIPTASE HOMOLOG.//6.5e-20:116:51//HOMO SAPIENS (HUMAN).//P08547

[2505] F-MAMMA1002333//COLLAGEN ALPHA 1(I) CHAIN (FRAGMENTS).//0.0017:214:31//BOS TAURUS (BOVINE).//P02453

[2506] F-MAMMA1002339//COPPER-METALLOTHIONEIN (CU-MT).//0.59:42:38//HELIX POMATIA (ROMAN SNAIL) (EDIBLE SNAIL).//P55947

[2507] F-MAMMA1002347//!!!! ALU SUBFAMILY J WARNING ENTRY !!!!//0.43:26:61//HOMO SAPIENS (HUMAN).//P39188

[2508] F-MAMMA1002351//HYPOTHETICAL PROTEIN MJ0304.//2.3e-07:139:25//METHANOCOCCUS JANNASCHII.//Q57752

[2509] F-MAMMA1002352

[2510] F-MAMMA1002353//!!!! ALU SUBFAMILY J WARNING ENTRY !!!!//0.00028:31:80//HOMO SAPIENS (HUMAN).//P39188

[2511] F-MAMMA1002355//!!!! ALU SUBFAMILY SP WARNING ENTRY !!!!//4.2e-28:87:73//HOMO SAPIENS (HUMAN).//P39193

[2512] F-MAMMA1002356//RELAXIN.//0.95:31:35//SQUALUS ACANTHIAS (SPINY DOGFISH).//P11953

[2513] F-MAMMA1002359//CHLOROPLAST 50S RIBOSOMAL PROTEIN L33.//0.93:44:36//GUILLARDIA THETA (CRYPTOMONAS PHI).//O78487

[2514] F-MAMMA1002360//LATE L2 MU CORE PROTEIN PRECURSOR (PROTEIN X).//0.94:30:43//BOVINE ADENOVIRUS TYPE 2 (MASTADENOVIRUS BOS2).//Q96626

[2515] F-MAMMA1002361//!!!! ALU SUBFAMILY J WARNING ENTRY !!!!//2.0e-08:45:68//HOMO SAPIENS (HUMAN).//P39188

[2516] F-MAMMA1002362//ATP SYNTHASE PROTEIN 8 (EC 3.6.1.34) (A6L).//0.58:23:26//LUMBRICUS TERRESTRIS (COMMON EARTHWORM).//Q34942

[2517] F-MAMMA1002380//SALIVARY GLUE PROTEIN SGS-3 PRECURSOR.//0.23:100:27//DROSOPHILA SIMULANS (FRUIT FLY).//P13729

[2518] F-MAMMA1002384

[2519] F-MAMMA1002385//HYPOTHETICAL 40.9 KD PROTEIN IN ORC2-TIP1 INTERGENIC REGION.//3.8e-14:125:37//SACCHAROMYCES CEREVISIAE (BAKER'S YEAST).//P38241

[2520] F-MAMMA1002392//ATP SYNTHASE PROTEIN 8 (EC 3.6.1.34) (A6L).//11.0:17:58//BRANCHIOSTOMA LANCEOLATUM (COMMON LANCELET) (AMPHIOXUS).//O21003

[2521] F-MAMMA1002411//30S RIBOSOMAL PROTEIN S17.//0.85:49:32//SYNECHOCYSTIS SP. (STRAIN PCC 6803).//P73311

[2522] F-MAMMA1002413//NADH-UBIQUINONE OXIDOREDUCTASE CHAIN 1 (EC 1.6.5.3) (FRAGMENT).//0.97:41:39//DROSOPHILA AFFINIS (FRUIT FLY).//P51926

[2523] F-MAMMA1002417//RFBJ PROTEIN.//0.99:31:35//SHIGELLA FLEXNERI.//P37786

[2524] F-MAMMA1002427//!!!! ALU SUBFAMILY SQ WARNING ENTRY !!!!//1.6e-33:135:59//HOMO SAPIENS (HUMAN).//P39194

[2525] F-MAMMA1002428//HYPOTHETICAL PROTEIN C18.//0.97:34:44//SWINEPOX VIRUS (STRAIN KASZA) (SPV).//P32217

[2526] F-MAMMA1002434//!!!! ALU SUBFAMILY SB WARNING ENTRY !!!!//3.1e-36:56:78//HOMO SAPIENS (HUMAN).//P39189

[2527] F-MAMMA1002446

[2528] F-MAMMA1002454//EARLY NODULIN 20 PRECURSOR (N-20).//0.77:57:45//MEDICAGO TRUNCATULA (BARREL MEDIC).//P93329

[2529] F-MAMMA1002461//VASODILATOR-STIMULATED PHOSPHOPROTEIN (VASP).//1.3e-05:193:32//CANIS FAMILIARIS (DOG).//P50551

[2530] F-MAMMA1002470//HYPOTHETICAL 80.7 KD PROTEIN IN ERG7-NMD2 INTERGENIC REGION.//1.0e-75:231:60//SACCHAROMYCES CEREVISIAE (BAKER'S YEAST).//P38795

[2531] F-MAMMA1002475//POSSIBLE GLOBAL TRANSCRIPTION ACTIVATOR SNF2L4 (SNF2-BETA) (BRG-1 PROTEIN) (MITOTIC GROWTH AND TRANSCRIPTION ACTIVATOR) (BRAHMA PROTEIN HOMOLOG 1).//0.013:99:30//HOMO SAPIENS (HUMAN).//P51532

[2532] F-MAMMA1002480//NONSTRUCTURAL PROTEIN 5B.//1.0:23:43//HUMAN CORONAVIRUS (STRAIN 229E).//P19741

[2533] F-MAMMA1002485//STANNIOCALCIN PRECURSOR.//2.1e-23:88:46//HOMO SAPIENS (HUMAN).//P52823

[2534] F-MAMMA1002494//MOLT-INHIBITING HORMONE (MIH).//1.0:32:37//PROCAMBARUS CLARKII (RED SWAMP CRAYFISH).//P55848

[2535] F-MAMMA1002498//6.7 KD PROTEIN (ORF 5).//1.0:26:42//BARLEY YELLOW DWARF VIRUS (ISOLATE PAV) (BYDV).//P09517

[2536] F-MAMMA1002524//HYPOTHETICAL 117.8 KD PROTEIN IN STE2-FRS2 INTERGENIC REGION.//5.0e-26:222:35//SACCHAROMYCES CEREVISIAE (BAKER'S YEAST).//P43571

[2537] F-MAMMA1002530//CYTOSOLIC PHOSPHOLIPASE A2 (EC 3.1.1.4) (CPLA2) (PHOSPHATIDYLCHOLINE 2-ACYLHYDROLASE)/LYSOPHOSPHOLIPASE (EC 3.1.1.5).//4.5e-12:88:44//HOMO SAPIENS (HUMAN).//P47712

[2538] F-MAMMA1002545//!!!! ALU SUBFAMILY SX WARNING ENTRY !!!!//4.3e-29:97:71//HOMO SAPIENS (HUMAN).//P39195

[2539] F-MAMMA1002554//DNA-DIRECTED RNA POLYMERASE II LARGEST SUBUNIT (EC 2.7.7.6) (RPB1) (FRAGMENT).//0.46:54:40//CRICETULUS GRISEUS (CHINESE HAMSTER).//P11414

[2540] F-MAMMA1002556//METALLOTHIONEIN 20-1 ISOFORMS A AND B (MT-20-IA AND MT-20-IB).//0.99:21:47//MYTILUS EDULIS (BLUE MUSSEL).//P80251

[2541] F-MAMMA1002566//TRANSCRIPTION FACTOR P65 (NUCLEAR FACTOR NF-KAPPA-B P65 SUBUNIT).//0.70:130:30//MUS MUSCULUS (MOUSE).//Q04207

[2542] F-MAMMA1002571//DNA-DIRECTED RNA POLYMERASE II LARGEST SUBUNIT (EC 2.7.7.6) (FRAGMENT).//0.54:45:51//DICTYOSTELIUM DISCOIDEUM (SLIME MOLD).//P35084

[2543] F-MAMMA1002573//PARATHYMOSIN.//1.5e-07:69:46//HOMO SAPIENS (HUMAN).//P20962

[2544] F-MAMMA1002585//MYOSIN LIGHT CHAIN 1, SLOW-TWITCH MUSCLE B/VENTRICULAR ISOFORM (FRAGMENT).//0.38:36:36//MUS MUSCULUS (MOUSE).//P09542

[2545] F-MAMMA1002590//!!!! ALU SUBFAMILY SX WARNING ENTRY !!!!//0.99:22:77//HOMO SAPIENS (HUMAN).//P39195

[2546] F-MAMMA1002597//!!!! ALU SUBFAMILY SQ WARNING ENTRY !!!!//2.1e-18:44:70//HOMO SAPIENS (HUMAN).//P39194

[2547] F-MAMMA1002598//60S RIBOSOMAL PROTEIN L7.//1.8e-16:40:100//HOMO SAPIENS (HUMAN).//P18124

[2548] F-MAMMA1002603

[2549] F-MAMMA1002612//30S RIBOSOMAL PROTEIN S16 (FRAGMENT).//1.0:29:37//THERMUS AQUATICUS.//O07348

[2550] F-MAMMA1002617//ACIDIC PROLINE-RICH PROTEIN PRECURSOR (CLONE PRP25) (FRAGMENT).//0.00041:81:34//RATTUS NORVEGICUS (RAT).//P10164

[2551] F-MAMMA1002618//ESCARGOT/SNAIL PROTEIN HOMOLOG (FRAGMENT).//0.11:18:50//PSYCHODA CINEREA.//Q02027

[2552] F-MAMMA1002619//PROBABLE UBIQUITIN CARBOXYL-TERMINAL HYDROLASE K02C4.3 (EC 3.1.2.15) (UBIQUITIN THIOLESTERASE) (UBIQUITIN-SPECIFIC PROCESSING PROTEASE) (DEUBIQUITINATING ENZYME).//1.8e-13:110:40//CAENORHIABDITIS ELEGANS.//Q09931

[2553] F-MAMMA1002622//!!!! ALU SUBFAMILY J WARNING ENTRY !!!!//8.4e-05:53:58//HOMO SAPIENS (HUMAN).//P39188

[2554] F-MAMMA1002623//PEPTIDYL-GLYCINE ALPHA-AMIDATING MONOOXYGENASE PRECURSOR (EC 1.14.17.3) (PAM).//2.6e-07:37:78//HOMO SAPIENS (HUMAN).//P19021

[2555] F-MAMMA1002625

[2556] F-MAMMA1002629//!!!! ALU SUBFAMILY J WARNING ENTRY !!!!//4.4e-19:49:73//HOMO SAPIENS (HUMAN).//P39188

[2557] F-MAMMA1002636//COLLAGEN ALPHA 2(VI) CHAIN (FRAGMENT).//1.7e-07:189:32//HOMO SAPIENS (HUMAN).//P12110

[2558] F-MAMMA1002637//KINESIN LIGHT CHAIN (KLC).//7.7e-54:227:52//RATTUS NORVEGICUS (RAT).//P37285

[2559] F-MAMMA1002646//NEUROFILAMENT TRIPLET H PROTEIN (200 KD NEUROFILAMENT PROTEIN) (NF-H).//0.034:199:25//MUS MUSCULUS (MOUSE).//P19246

[2560] F-MAMMA1002650//TRANSCRIPTION REGULATOR PROTEIN BACH2 (BTB AND CNC HOMOLOG 2).//1.7e-07:104:32//MUS MUSCULUS (MOUSE).//P97303

[2561] F-MAMMA1002655//SMALL PROLINE-RICH PROTEIN II (SPR-II) (CLONE 174N).//1.0:25:44//HOMO SAPIENS (HUMAN).//P22532

[2562] F-MAMMA1002662

[2563] F-MAMMA1002665//!!!! ALU SUBFAMILY SQ WARNING ENTRY !!!!//2.3e-07:54:57//HOMO SAPIENS (HUMAN).//P39194

[2564] F-MAMMA10026711/ACETYL-COENZYME A SYNTHETASE (EC 6.2.1.1) (ACETATE-COA LIGASE) (ACYL- ACTIVATING ENZYME).//1.4e-10:144:31//ESCHERICHIA COLI.//P27550

[2565] F-MAMMA1002673//BREVICAN CORE PROTEIN PRECURSOR.//0.76:64:39//BOS TAURUS (BOVINE).//Q28062

[2566] F-MAMMA1002684//HYPOTHETICAL 11.8 KD PROTEIN IN GP55-NRDG INTERGENIC REGION.//0.094:77:27//BACTERIOPHAGE T4.//P07079

[2567] F-MAMMA1002685//COLLAGEN ALPHA 1(I) CHAIN (FRAGMENTS).//0.0017:177:34//RATTUS NORVEGICUS (RAT).//P02454

[2568] F-MAMMA1002698

[2569] F-MAMMA1002699//HYPOTHETICAL 45.1 KD PROTEIN IN RPS5-ZMS1 INTERGENIC REGION.//1.2e-28:127:47//SACCHAROMYCES CEREVISIAE (BAKER'S YEAST).//P47160

[2570] F-MAMMA1002701//!!!! ALU SUBFAMILY J WARNING ENTRY !!!!//1.0:14:92//HOMO SAPIENS (HUMAN).//P39188

[2571] F-MAMMA1002708//!!!! ALU SUBFAMILY SP WARNING ENTRY !!!!//7.9e-27:52:65//HOMO SAPIENS (HUMAN).//P39193

[2572] F-MAMMA1002711//!!!! ALU SUBFAMILY J WARNING ENTRY !!!!/13.7e-24:54:75//HOMO SAPIENS (HUMAN).//P39188

[2573] F-MAMMA1002721

[2574] F-MAMMA1002727//SOX-13 PROTEIN (FRAGMENT).//0.70:36:38//MUS MUSCULUS (MOUSE).//Q04891

[2575] F-MAMMA1002728//HYPOTHETICAL 6.0 KD PROTEIN.//1.0:25:44//THERMOPROTEUS TENAX VIRUS 1 (STRAIN KRA1) (TTV1).//P19305

[2576] F-MAMMA1002744//HYPOTHETICAL 13.4 KD PROTEIN IN ACT5-YCK1 INTERGENIC REGION.//1.0:52:34//SACCHAROMYCES CEREVISIAE (BAKER'S YEAST).//P38834

[2577] F-MAMMA1002746//HYPOTHETICAL 5.6 KD PROTEIN (ORF A-45).//1.0:22:40//SULFOLOBUS VIRUS-LIKE PARTICLE SSV1.//P20198

[2578] F-MAMMA1002748

[2579] F-MAMMA1002754//!!!! ALU SUBFAMILY J WARNING ENTRY !!!!//5.1e-21:56:64//HOMO SAPIENS (HUMAN).//P39188

[2580] F-MAMMA1002758//MALE SPECIFIC SPERM PROTEIN MST84DD.//0.37:14:64//DROSOPHILA MELANOGASTER (FRUIT FLY).//Q01645

[2581] F-MAMMA1002764//!!!! ALU SUBFAMILY SQ WARNING ENTRY !!!!/14.7e-32:79:60//HOMO SAPIENS (HUMAN).//P39194

[2582] F-MAMMA1002765//PARATHYMOSIN.//0.79:63:28//BOS TAURUS (BOVINE).//P08814

[2583] F-MAMMA1002769//GAR2 PROTEIN.//0.00037:192:27//SCHIZOSACCHAROMYCES POMBE (FISSION YEAST).//P41891

[2584] F-MAMMA1002775//HYPOTHETICAL 36.7 KD PROTEIN C2F7.14C IN CHROMOSOME I.//5.4e-54:240:49//SCHIZOSACCHAROMYCES POMBE (FISSION YEAST).//Q09704

[2585] F-MAMMA1002780

[2586] F-MAMMA1002782//MARGATOXIN (MGTX).//1.0:31:38//CENTRUROIDES MARGARITATUS (SCORPION).//P40755

[2587] F-MAMMA1002796//ICE NUCLEATION PROTEIN.//0.0018:100:41//PSEUDOMONAS FLUORESCENS.//P09815

[2588] F-MAMMA1002807//!!!! ALU SUBFAMILY J WARNING ENTRY !!!!//9.3e-23:100:59//HOMO SAPIENS (HUMAN).//P39188

[2589] F-MAMMA1002820//NEUROTOXIN IV (LQQ IV).//1.0:18:50//LEIURUS QUINQUESTRIATUS QUINQUESTRIATUS (EGYPTIAN SCORPION).//P01489

[2590] F-MAMMA1002830//!!!! ALU SUBFAMILY SX WARNING ENTRY !!!!//4.7e-24:55:74//HOMO SAPIENS (HUMAN).//P39195

[2591] F-MAMMA1002833//!!!! ALU SUBFAMILY SB WARNING ENTRY !!!!l/2.6e-31:95:73//HOMO SAPIENS (HUMAN).//P39189

[2592] F-MAMMA1002835//HYPOTHETICAL 42.1 KD PROTEIN F13G3.3 IN CHROMOSOME I.//1.0:54:37//CAENORHABDITIS ELEGANS.//Q19417

[2593] F-MAMMA1002838//!!!! ALU SUBFAMILY SP WARNING ENTRY !!!!//2.5e-27:99:70//HOMO SAPIENS (HUMAN).//P39193

[2594] F-MAMMA1002842//!!!! ALU SUBFAMILY SX WARNING ENTRY !!!!//2.3e-13:65:63//HOMO SAPIENS (HUMAN).//P39195

[2595] F-MAMMA1002843//METALLOTHIONEIN-II (MT-II).//0.97:19:47//MUS MUSCULUS (MOUSE).//P02798

[2596] F-MAMMA1002844//HYPOTHETICAL 24.1 KD PROTEIN IN LEF4-P33 INTERGENIC REGION.//4.9e-08:119:36//AUTOGRAPHA CALIFORNICA NUCLEAR POLYHEDROSIS VIRUS (ACMNPV).//P41479

[2597] F-MAMMA1002858//ATP SYNTHASE PROTEIN 8 (EC 3.6.1.34) (A6L).//0.98:37:37//PAN TROGLODYTES (CHIMPANZEE).//Q35647

[2598] F-MAMMA1002868//!!!! ALU SUBFAMILY J WARNING ENTRY !!!!//3.8e-10:51:62//HOMO SAPIENS (HUMAN).//P39188

[2599] F-MAMMA1002869//PINCH PROTEIN (PARTICULARY INTERESTING NEW CYS-HIS PROTEIN).//1.8e-95:194:78//HOMO SAPIENS (HUMAN).//P48059

[2600] F-MAMMA1002871//G-PROTEIN COUPLED RECEPTOR HOMOLOG R33.//11.0:51:35//RAT CYTOMEGALOVIRUS (STRAIN MAASTRICHT).//O12000

[2601] F-MAMMA1002880

[2602] F-MAMMA10028811/GLIOMA PATHOGENESIS-RELATED PROTEIN (RTVP-1 PROTEIN).//3.3e-22:180:35//HOMO SAPIENS (HUMAN).M/P48060

[2603] F-MAMMA1002886//MYOSIN HEAVY CHAIN IB (MYOSIN HEAVY CHAIN IL).//0.00011:148:39//ACANTHAMOEBA CASTELLANII (AMOEBA).//P19706

[2604] F-MAMMA1002887

[2605] F-MAMMA1002890//A-AGGLUTININ ATTACHMENT SUBUNIT PRECURSOR.//0.030:142:25//SACCHAROMYCES CEREVISIAE (BAKER'S YEAST).//P32323

[2606] F-MAMMA1002892

[2607] F-MAMMA1002895//HYPOTHETICAL PROTEIN UL61.//0.00099:143:35//HUMAN CYTOMEGALOVIRUS (STRAIN AD169).//P16818

[2608] F-MAMMA1002908//T-CELL RECEPTOR BETA CHAIN PRECURSOR (ANA 11).//0.12:44:43//ORYCTOLAGUS CUNICULUS (RABBIT).//P06333

[2609] F-MAMMA1002909//!!!! ALU SUBFAMILY J WARNING ENTRY !!!!//0.00011:28:75//HOMO SAPIENS (HUMAN).//P39188

[2610] F-MAMMA1002930//BOMBYXIN A-7 PRECURSOR (BBX-A7) (4K-PROTHORACICOTROPIC HORMONE) (4K-PTTH).//0.99:45:46//BOMBYX MORI (SILK MOTH).//P26730

[2611] F-MAMMA1002937//ZINC FINGER PROTEIN 42 (MYELOID ZINC FINGER 1) (MZF-1).//6.5e-24:147:34//HOMO SAPIENS (HUMAN).//P28698

[2612] F-MAMMA1002938//CERULOPLASMIN PRECURSOR (EC 1.16.3.1) (FERROXIDASE).//4.7e-11:44:68//MUS MUSCULUS (MOUSE).//Q61147

[2613] F-MAMMA1002941//PROTEIN Q300.//0.0076:21:61 //MUS MUSCULUS (MOUSE).//Q02722

[2614] F-MAMMA1002947//HYPOTHETICAL 35.5 KD PROTEIN IN TRANSPOSON TN4556.//1.9e-08:152:38//STREPTOMYCES FRADIAE.//P20186

[2615] F-MAMMA1002964

[2616] F-MAMMA1002970//!!!! ALU SUBFAMILY SB WARNING ENTRY !!!!//0.0057:55:43//HOMO SAPIENS (HUMAN).//P39189

[2617] F-MAMMA1002972//BRAIN-SPECIFIC HOMEOBOX/POU DOMAIN PROTEIN 3A (BRN-3A) (OCT-T1) (HOMEOBOX/POU DOMAIN PROTEIN RDC-1).//0.84:53:41//HOMO SAPIENS (HUMAN).//Q01851

[2618] F-MAMMA1002973//!!!! ALU SUBFAMILY SC WARNING ENTRY !!!!/14.6e-11:54:68//HOMO SAPIENS (HUMAN).//P39192

[2619] F-MAMMA1002982

[2620] F-MAMMA1002987//HYPOTHETICAL 11.9 KD PROTEIN IN RPC8-MFA2 INTERGENIC REGION.//0.17:47:29//SACCHAROMYCES CEREVISIAE (BAKER'S YEAST).//P53906

[2621] F-MAMMA1003003//!!!! ALU SUBFAMILY SX WARNING ENTRY !!!!//8.6e-09:30:73//HOMO SAPIENS (HUMAN).//P39195

[2622] F-MAMMA1003004//!!!! ALU SUBFAMILY SX WARNING ENTRY !!!!!//0.0071:41:58//HOMO SAPIENS (HUMAN).//P39195

[2623] F-MAMMA1003007//SPERM PROTAMINE P1 .//0.0076:51:37//TACHYGLOSSUS ACULEATUS ACULEATUS (AUSTRALIAN ECHIDNA).//P35311

[2624] F-MAMMA1003011//HISTONE MACR0-H2A.1.//1.8e-60:175:70//RATTUS NORVEGICUS (RAT).//Q02874

[2625] F-MAMMA1003013//ACTIN BINDING PROTEIN.//0.097:83:31//SACCHAROMYCES EXIGUUS (YEAST).//P38479

[2626] F-MAMMA1003015

[2627] F-MAMMA1003019//MYOTUBULARIN.//0.022:56:37//HOMO SAPIENS (HUMAN).//Q13496

[2628] F-MAMMA1003026//HYPOTHETICAL 29.3 KD PROTEIN (ORF92).//0.0014:208:27//ORGYIA PSEUDOTSUGATA MULTICAPSID POLYHEDROSIS VIRUS (OPMNPV).//O10341

[2629] F-MAMMA1003031//PROBABLE E4 PROTEIN (E1ˆE4).//0.14:49:32//HUMAN PAPILLOMAVIRUS TYPE 6B.//P06459

[2630] F-MAMMA1003035//HYPOTHETICAL 24.4 KD PROTEIN IN LPD 3′REGION (ORF4).//5.1e-12:112:34//ZYMOMONAS MOBILIS.//O66114

[2631] F-MAMMA1003039//!!!! ALU SUBFAMILY J WARNING ENTRY !!!!//2.4e-07:68:54//HOMO SAPIENS (HUMAN).//P39188

[2632] F-MAMMA1003040//!!!! ALU SUBFAMILY SB1 WARNING ENTRY !!!!//2.8e-39:90:57//HOMO SAPIENS (HUMAN).//P39190

[2633] F-MAMMA1003044

[2634] F-MAMMA1003047//SPERM HISTONE P2 PRECURSOR (PROTAMINE 2).//0.18:25:44//BOS TAURUS (BOVINE).//P19782

[2635] F-MAMMA1003049//PROBABLE E4 PROTEIN.//0.50:67:29//HUMAN PAPILLOMAVIRUS TYPE 6C.//P20969

[2636] F-MAMMA1003055//WEAK TOXIN CM-2.//0.99:23:30//NAJA HAJE HAJE (EGYPTIAN COBRA).//P01415

[2637] F-MAMMA1003056//EXPORTED PROTEIN 7 (FRAGMENT).//1.0:52:32//STREPTOCOCCUS PNEUMONIAE.//P35597

[2638] F-MAMMA1003057//MD6 PROTEIN.//1.5e-85:168:95//MUS MUSCULUS (MOUSE).//Q60584

[2639] F-MAMMA1003066//REGB PROTEIN.//1.0:62:27//PSEUDOMONAS AERUGINOSA.//Q03381

[2640] F-MAMMA1003089//!!!! ALU SUBFAMILY SB1 WARNING ENTRY !!!!//5.1e-15:44:77//HOMO SAPIENS (HUMAN).//P39190

[2641] F-MAMMA1003099//ENDOTHELIAL ACTIN-BINDING PROTEIN (ABP-280) (NONMUSCLE FILAMIN) (FILAMIN 1).//4.8e-20:80:62//HOMO SAPIENS (HUMAN).//P21333

[2642] F-MAMMA1003104//PHOTOSYSTEM I REACTION CENTRE SUBUNIT VIII.//0.98:22:40//SYNECHOCOCCUS ELONGATUS NAEGELI.//P25900

[2643] F-MAMMA1003113//PROCOLLAGEN ALPHA 2(I) CHAIN PRECURSOR (FRAGMENTS).//0.67:35:45//GALLUS GALLUS (CHICKEN).//P02467

[2644] F-MAMMA1003127//MYOSIN I ALPHA (MMI-ALPHA).//5.2e-34:141:56//MUS MUSCULUS (MOUSE).//P46735

[2645] F-MAMMA1003135//HYPOTHETICAL 182.0 KD PROTEIN IN NMD5-HOM6 INTERGENIC REGION.//3.6e-05:91:34//SACCHAROMYCES CEREVISIAE (BAKER'S YEAST).//P47170

[2646] F-MAMMA1003140

[2647] F-MAMMA1003146//MALE SPECIFIC SPERM PROTEIN MST87F.//1.0:33:36//DROSOPHILA MELANOGASTER (FRUIT FLY).//P08175

[2648] F-MAMMA1003150//HYPOTHETICAL 84.3 KD PROTEIN ZK945.10 IN CHROMOSOME II.//4.4e-10:254:30//CAENORHABDITIS ELEGANS.//Q09625

[2649] F-MAMMA1003166//BRAIN PROTEIN H5.//4.0e-42:182:48//HOMO SAPIENS (HUMAN).//O43236

[2650] F-NT2RM1000001//HYPOTHETICAL 8.7 KD PROTEIN IN RPL22-RPL23 INTERGENIC REGION (ORF70).//0.15:38:34//ASTASIA LONGA (EUGLENOPHYCEAN ALGA).//P34779

[2651] F-NT2RM1000018

[2652] F-NT2RM1000032//ATP SYNTHASE PROTEIN 8 (EC 3.6.1.34) (A6L).//0.51:17:41//CYPRINUS CARPIO (COMMON CARP).//P24948

[2653] F-NT2RM1000035//3-HYDROXY-3-METHYLGLUTARYL-COENZYME A REDUCTASE (EC 1.1.1.34) (HMG-COA REDUCTASE).//0.00011:114:27//BLATTELLA GERMANICA (GERMAN COCKROACH).//P54960

[2654] F-NT2RM1000037//METALLOTHIONEIN-II (MT-II).//0.025:19:47//SCYLLA SERRATA (MUD CRAB).//P02806

[2655] F-NT2RM1000039//VITELLINE MEMBRANE VM34CA PROTEIN PRECURSOR.//0.00083:84:33//DROSOPHILA MELANOGASTER (FRUIT FLY).//Q06521

[2656] F-NT2RM1000055//HISTIDINE-RICH GLYCOPROTEIN PRECURSOR.//1.1e-07:34:55//PLASMODIUM LOPHURAE.//P04929

[2657] F-NT2RM1000059//MYOCYTE-SPECIFIC ENHANCER FACTOR 2B (SERUM RESPONSE FACTOR-LIKE PROTEIN 2) (XMEF2) (RSRFR2).//0.18:83:36//HOMO SAPIENS (HUMAN).//Q02080

[2658] F-NT2RM1000062//PROLINE-RICH PEPTIDE P-B.//0.54:34:44//HOMO SAPIENS (HUMAN).//P02814

[2659] F-NT2RM1000080//HYPOTHETICAL 35.7 KD PROTEIN SLR1128.//2.1e-20:119:40//SYNECHOCYSTIS SP. (STRAIN PCC 6803).//P72655

[2660] F-NT2RM1000086//SALIVARY PROLINE-RICH PROTEIN PO (ALLELE K) [CONTAINS: PEPTIDE P-D] (FRAGMENT).//0.20:56:35//HOMO SAPIENS (HUMAN).//P10162

[2661] F-NT2RM1000092//COLLAGEN-LIKE PROTEIN.//0.0017:44:45//HERPESVIRUS SAIMIRI (SUBGROUP C/STRAIN 488).//P22576

[2662] F-NT2RM1000118//CALCINEURIN B SUBUNIT (PROTEIN PHOSPHATASE 2B REGULATORY SUBUNIT) (CALCINEURIN REGULATORY SUBUNIT).//5.7e-07:109:28//NEUROSPORA CRASSA.//P87072

[2663] F-NT2RM1000119//TRANSCRIPTIONAL REGULATOR IE63 (VMW63) (ICP27).//0.0050:135:32//HERPES SIMPLEX VIRUS (TYPE 2/STRAIN HG52).//P28276

[2664] F-NT2RM1000127//EXTENSIN PRECURSOR (PROLINE-RICH GLYCOPROTEIN).//0.032:68:32//SORGHUM VULGARE (SORGHUM).//P24152

[2665] F-NT2RM1000131//METALLOTHIONEIN-III (MT-III) (GROWTH INHIBITORY FACTOR) (GIF).//0.82:33:39//BOS TAURUS (BOVINE).//P37359

[2666] F-NT2RM1000132//NADH-UBIQUINONE OXIDOREDUCTASE 13 KD-A SUBUNIT PRECURSOR (EC 1.6.5.3) (EC 1.6.99.3) (COMPLEX I-13 KD-A) (CI-13 KD-A).//2.7e-59:124:91//HOMO SAPIENS (HUMAN).//O75380

[2667] F-NT2RM1000153//CYTOSOLIC PURINE 5′-NUCLEOTIDASE (EC 3.1.3.5).//2.5e-08:148:29//HOMO SAPIENS (HUMAN).//P49902

[2668] F-NT2RM1000186//CALCINEURIN B SUBUNIT (PROTEIN PHOSPHATASE 2B REGULATORY SUBUNIT) (CALCINEURIN REGULATORY SUBUNIT).//1.9e-07:109:27//NEUROSPORA CRASSA.//P87072

[2669] F-NT2RM1000187//PUTATIVE PRE-MRNA SPLICING FACTOR ATP-DEPENDENT RNA HELICASE SPAC10F6.02C.//1.0e-12:94:46//SCHIZOSACCHAROMYCES POMBE (FISSION YEAST).//O42643

[2670] F-NT2RM1000199//CUTICLE COLLAGEN 12 PRECURSOR.//0.46:130:33//CAENORHABDITIS ELEGANS.//P20630

[2671] F-NT2RM1000242//PUTATIVE ATP SYNTHASE J CHAIN, MITOCHONDRIAL (EC 3.6.1.34).//0.85:38:36//SCHIZOSACCHAROMYCES POMBE (FISSION YEAST).//O13931

[2672] F-NT2RM1000244//HYPOTHETICAL 131.5 KD PROTEIN C02F12.7 IN CHROMOSOME X.//0.0055:98:36//CAENORHABDITIS ELEGANS.//Q11102

[2673] F-NT2RM1000252//TRICHOHYALIN.//2.9e-06:88:36//OVIS ARIES (SHEEP).//P22793

[2674] F-NT2RM1000256//GLUCOSAMINE-FRUCTOSE-6-PHOSPHATE AMINOTRANSFERASE [ISOMERIZING] (EC 2.6.1.16) (HEXOSEPHOSPHATE AMINOTRANSFERASE) (D-FRUCTOSE-6-PHOSPHATE AMIDOTRANSFERASE) (GFAT).//2.9e-54:153:67//MUS MUSCULUS (MOUSE).//P47856

[2675] F-NT2RM1000257//MAGO NASHI PROTEIN.//5.9e-64:136:89//DROSOPHILA MELANOGASTER (FRUIT FLY).//P49028

[2676] F-NT2RM1000260

[2677] F-NT2RM1000271//GALACTOKINASE (EC 2.7.1.6).//0.99:41:39//BACILLUS SUBTILIS.//P39574

[2678] F-NT2RM1000272//HYPOTHETICAL 55.5 KD PROTEIN ZK1128.2 IN CHROMOSOME III.//8.8e-25:131:45//CAENORHABDITIS ELEGANS.//Q09357

[2679] F-NT2RM1000280//VACUOLAR ATP SYNTHASE SUBUNIT D (EC 3.6.1.34) (V-ATPASE D SUBUNIT) (V- ATPASE 28 KD ACCESSORY PROTEIN).//2.5e-63:121:94//BOS TAURUS (BOVINE).//P39942

[2680] F-NT2RM1000300//TREACLE PROTEIN (TREACHER COLLINS SYNDROME PROTEIN).//0.51:145:26//HOMO SAPIENS (HUMAN).//Q13428

[2681] F-NT2RM1000314

[2682] F-NT2RM1000318//50S RIBOSOMAL PROTEIN L23.//0.83:28:35//AQUIFEX AEOLICUS.//O66433

[2683] F-NT2RM1000341

[2684] F-NT2RM1000354//HYPOTHETICAL 5.8 KD PROTEIN IN PUHA 5′REGION (ORF55).//0.95:43:37//RHODOBACTER CAPSULATUS (RHODOPSEUDOMONAS CAPSULATA).//P26159

[2685] F-NT2RM1000355//SPERM-SPECIFIC PROTEIN PHI-1.//0.0016:73:43//MYTILUS EDULIS (BLUE MUSSEL).//Q04621

[2686] F-NT2RM1000365//HYPOTHETICAL PROTEIN KIAA0140.//3.5e-10:83:49//HOMO SAPIENS (HUMAN).//Q14153

[2687] F-NT2RM1000377//DUAL SPECIFICITY PROTEIN PHOSPHATASE 9 (EC 3.1.3.48) (EC 3.1.3.16) (MITOGEN-ACTIVATED PROTEIN KINASE PHOSPHATASE 4) (MAP KINASE PHOSPHATASE 4) (MKP-4).//4.9e-18:113:38//HOMO SAPIENS (HUMAN).//Q99956

[2688] F-NT2RM1000388//HYPOTHETICAL 27.7 KD PROTEIN IN CPT1-SPC98 INTERGENIC REGION.//0.00023:67:31//SACCHAROMYCES CEREVISIAE (BAKER'S YEAST).//P53915

[2689] F-NT2RM1000394//HISTONE H3.3 (H3.B) (H3.3Q).//4.7e-52:71:91//HOMO SAPIENS (HUMAN), MUS MUSCULUS (MOUSE), RATTUS NORVEGICUS (RAT), ORYCTOLAGUS CUNICULUS (RABBIT), GALLUS GALLUS (CHICKEN), SPISULA SOLIDISSIMA (ATLANTIC SURF-CLAM), DROSOPHILA MELANOGASTER (FRUIT FLY), AND DROSOPHILA HYDEI (FRUIT FLY).//P06351

[2690] F-NT2RM1000399//ENDOTHELIN-2 PRECURSOR (ET-2) (FRAGMENT).//0.92:24:45//CANIS FAMILIARIS (DOG).//P12064

[2691] F-NT2RM1000421//CUTICLE COLLAGEN 2C (FRAGMENT).//0.12:93:33//HAEMONCHUS CONTORTUS.//P16252

[2692] F-NT2RM1000430//PISTIL-SPECIFIC EXTENSIN-LIKE PROTEIN PRECURSOR (PELP).//0.13:86:31//NICOTIANA TABACUM (COMMON TOBACCO).//Q03211

[2693] F-NT2RM1000499//HYPOTHETICAL PROTEIN KIAA0041 (FRAGMENT).//2.9e-17:75:49//HOMO SAPIENS (HUMAN).//Q15057

[2694] F-NT2RM1000539//HYPOTHETICAL 10.4 KD PROTEIN IN FTR1-SPT15 INTERGENIC REGION.//2.9e-16:82:51//SACCHAROMYCES CEREVISIAE (BAKER'S YEAST).//P40089

[2695] F-NT2RM1000553//GLYCOLIPID TRANSFER PROTEIN (GLTP).//6.4e-06:103:33//SUS SCROFA (PIG).//P17403

[2696] F-NT2RM1000555//UNR PROTEIN.//8.7e-77:105:95//RATTUS NORVEGICUS (RAT).//P18395

[2697] F-NT2RM1000563//DNA-BINDING P52/P100 COMPLEX, 100 KD SUBUNIT (FRAGMENTS).//0.15:20:50//HOMO SAPIENS (HUMAN).//P30808

[2698] F-NT2RM1000623//CLARA CELL PHOSPHOLIPID-BINDING PROTEIN PRECURSOR (CCPBP) (CLARA CELLS 10 KD SECRETORY PROTEIN) (CC10).//0.17:70:34//HOMO SAPIENS (HUMAN).//P1684

[2699] F-NT2RM1000648//GLYCOSYLTRANSFERASE ALG2 (EC 2.4.1.-).//2.0e-22:133:42//SACCHAROMYCES CEREVISIAE (BAKER'S YEAST).//P43636

[2700] F-NT2RM1000661//METALLOTHIONEIN-III (MT-III) (GROWTH INHIBITORY FACTOR) (GIF) (GIFB).//0.0060:24:33//HOMO SAPIENS (HUMAN).//P25713

[2701] F-NT2RM1000666//COLD SHOCK PROTEIN SCOF.//9.1e-07:67:41//STREPTOMYCES COELICOLOR.//P48859

[2702] F-NT2RM1000669//CHLOROPLAST 50S RIBOSOMAL PROTEIN L31.//0.071:69:31//PORPHYRA PURPUREA.//P51290

[2703] F-NT2RM1000672//SIGNAL RECOGNITION PARTICLE SEC65 SUBUNIT (FRAGMENT).//0.27:42:42//KLUYVEROMYCES LACTIS (YEAST).//O13475

[2704] F-NT2RM1000691//RETINOBLASTOMA BINDING PROTEIN 2 (RBBP-2).//4.3e-42:241:42//HOMO SAPIENS (HUMAN).//P29375

[2705] F-NT2RM1000699//N2,N2-DIMETHYLGUANOSINE TRNA METHYLTRANSFERASE PRECURSOR (EC 2.1.1.32).//0.94:48:37//SACCHAROMYCES CEREVISIAE (BAKER'S YEAST).//P15565

[2706] F-NT2RM1000702//GUANINE NUCLEOTIDE-BINDING PROTEIN BETA SUBUNIT 1.//0.0013:139:25//DROSOPHILA MELANOGASTER (FRUIT FLY).//P26308

[2707] F-NT2RM1000725//BASIC PROLINE-RICH PEPTIDE P-E (IB-9).//1.0:15:60//HOMO SAPIENS (HUMAN).//P02811

[2708] F-NT2RM1000741//STATHMIN (CLONE X020) (FRAGMENT).//1.0:53:32//XENOPUS LAEVIS (AFRICAN CLAWED FROG).//Q09005

[2709] F-NT2RM1000742//HYPOTHETICAL 24.1 KD PROTEIN IN DHFR 3′REGION (ORF2).//1.0:54:42//HERPESVIRUS SAIMIRI (STRAIN 484-77).//P25049

[2710] F-NT2RM1000746//HYPOTHETICAL 16.8 KD PROTEIN C29E6.04 IN CHROMOSOME I.//0.11:87:21//SCHIZOSACCHAROMYCES POMBE (FISSION YEAST).//Q09858

[2711] F-NT2RM1000770//DXS6673E PROTEIN.//2.0e-38:190:48//HOMO SAPIENS (HUMAN).//Q14202

[2712] F-NT2RM1000772//VEGETATIBLE INCOMPATIBILITY PROTEIN HET-E-1.//4.3e-12:141:30//PODOSPORA ANSERINA.//Q00808

[2713] F-NT2RM1000780//MALE SPECIFIC SPERM PROTEIN MST87F.//0.98:34:38//DROSOPHILA MELANOGASTER (FRUIT FLY).//P08175

[2714] F-NT2RM1000781

[2715] F-NT2RM1000800//24.1 KD PROTEIN IN VMA12-APN1 INTERGENIC REGION.//7.9e-11:135:34//SACCHAROMYCES CEREVISIAE (BAKER'S YEAST).//P28707

[2716] F-NT2RM1000802//ALPHA-AMYLASE INHIBITOR PAIM I (PIG PANCREATIC ALPHA-AMYLASE INHIBITOR OF MICROBES I).//0.43:62:35//STREPTOMYCES OLIVACEOVIRIDIS (STREPTOMYCES CORCHORUSII).//P09921

[2717] F-NT2RM1000811

[2718] F-NT2RM1000826//UNR PROTEIN.//1.1e-110:144:83//RATTUS NORVEGICUS (RAT).//P18395

[2719] F-NT2RM1000829//ATP SYNTHASE PROTEIN 8 (EC 3.6.1.34) (A6L).//1.0:38:34//DROSOPHILA SIMULANS (FRUIT FLY).//P50270

[2720] F-NT2RM1000833//PROTEIN TRANSPORT PROTEIN SEC61 ALPHA SUBUNIT.//1.4e-62:145:84//CANIS FAMILIARIS (DOG).//P38377

[2721] F-NT2RM1000850//TESTIS-SPECIFIC PROTEIN KINASE 1 (EC 2.7.1.-).//6.1e-08:136:33//RATTUS NORVEGICUS (RAT).//Q63572

[2722] F-NT2RM1000852//ATP-DEPENDENT RNA HELICASE ROK1.//1.6e-34:212:43//SACCHAROMYCES CEREVISIAE (BAKER'S YEAST).//P45818

[2723] F-NT2RM1000857//HISTONE H1.M6.1.//0.76:31:48//TRYPANOSOMA CRUZI.//P40273

[2724] F-NT2RM1000867//MICROSOMAL SIGNAL PEPTIDASE 10.8 KD SUBUNIT (EC 3.4.-.-).//0.0082:76:25//SACCHAROMYCES CEREVISIAE (BAKER'S YEAST).//P46965

[2725] F-NT2RM1000874//DNA-BINDING P52/P100 COMPLEX, 100 KD SUBUNIT (FRAGMENTS).//0.38:12:58//HOMO SAPIENS (HUMAN).//P30808

[2726] F-NT2RM1000882//CYTOCHROME B5.//9.0e-13:92:38//SACCHAROMYCES CEREVISIAE (BAKER'S YEAST).//P40312

[2727] F-NT2RM1000883//DNA-BINDING P52/P100 COMPLEX, 100 KD SUBUNIT (FRAGMENTS).//0.79:22:59//HOMO SAPIENS (HUMAN).//P30808

[2728] F-NT2RM1000885//HYPOTHETICAL 5.8 KD PROTEIN.//0.76:18:38//CLOVER YELLOW MOSAIC VIRUS (CYMV).//P16485

[2729] F-NT2RM1000894//DNA-DIRECTED RNA POLYMERASE 1135 KD POLYPEPTIDE (EC 2.7.7.6) (RNA POLYMERASE I SUBUNIT 2) (RPA135) (RNA POLYMERASE 1127 KD SUBUNIT).//6.2e-70:153:88//RATTUS NORVEGICUS (RAT).//O54888

[2730] F-NT2RM1000898//ACTIN, CYTOPLASMIC (ACTIN, MICRONUCLEAR).//4.3e-12:159:28//OXYTRICHA FALLAX.//P02583

[2731] F-NT2RM1000905//GLUTATHIONE S-TRANSFERASE 1-1 (EC 2.5.1.18) (CLASS-THETA).//0.98:39:35//LUCILIA CUPRINA (GREENBOTTLE FLY) (AUSTRALIAN SHEEP BLOWFLY).//P42860

[2732] F-NT2RM1000924//HYPOTHETICAL 39.7 KD PROTEIN C34E10.2 IN CHROMOSOME III.//1.3e-11:169:28//CAENORHABDITIS ELEGANS.//P46577

[2733] F-NT2RM1000927//CUTICLE COLLAGEN I.//0.00048:141:31 //CAENORHABDITIS ELEGANS.//P08124

[2734] F-NT2RM1000962//HYPOTHETICAL 35.8 KD PROTEIN C4F8.04 IN CHROMOSOME I.//7.1e-13:169:31//SCHIZOSACCHAROMYCES POMBE (FISSION YEAST).//O14180

[2735] F-NT2RM1000978//HYPOTHETICAL 20.2 KD PROTEIN IN MNN4-PTK1 INTERGENIC REGION.//0.61:82:34//SACCHAROMYCES CEREVISIAE (BAKER'S YEAST).//P36045

[2736] F-NT2RM1100003//ALPHA-2 CATENIN (ALPHA N-CATENIN) (NEURAL ALPHA-CATENIN).//1.6e-21:211:31//GALLUS GALLUS (CHICKEN).//P30997

[2737] F-NT2RM1001008//HYPOTHETICAL 72.5 KD PROTEIN C2F7.10 IN CHROMOSOME I.//3.2e-15:119:36//SCHIZOSACCHAROMYCES POMBE (FISSION YEAST).//Q09701

[2738] F-NT2RM1001043//ENDOTHELIN-1 (ET-1) (FRAGMENT).//0.78:32:34//MACACA FASCICULARIS (CRAB EATING MACAQUE) (CYNOMOLGUS MONKEY).//Q28469

[2739] F-NT2RM1001044

[2740] F-NT2RM1001059//LORICRIN.//8.6e-08:108:39//HOMO SAPIENS (HUMAN).//P23490

[2741] F-NT2RM1001066//METALLOTHIONEIN-LIKE PROTEIN TYPE 2.//0.99:24:50//LYCOPERSICON ESCULENTUM (TOMATO).//Q43513

[2742] F-NT2RM1001072//1-PHOSPHATIDYLINOSITOL-4,5-BISPHOSPHATE PHOSPHODIESTERASE GAMMA 1 (EC 3.1.4.11) (PLC-GAMMA-1) (PHOSPHOLIPASE C-GAMMA-1) (PLC-II) (PLC-148).//4.7e-15:148:33//HOMO SAPIENS (HUMAN).//P19174

[2743] F-NT2RM1001074//HYPOTHETICAL PROTEIN F-215.//8.6e-05:126:30//HUMAN ADENOVIRUS TYPE 2.//P03291

[2744] F-NT2RM1001082//!!!! ALU SUBFAMILY SX WARNING ENTRY !!!!//6.5e-19:75:54//HOMO SAPIENS (HUMAN).//P39195

[2745] F-NT2RM1001085//MALE SPECIFIC SPERM PROTEIN MST84 DB.//0.49:29:41//DROSOPHILA MELANOGASTER (FRUIT FLY).//Q01643

[2746] F-NT2RM1001092//ZINC FINGER PROTEIN 83 (ZINC FINGER PROTEIN HPF1).//2.8e-42:200:38//HOMO SAPIENS (HUMAN).//P51522

[2747] F-NT2RM1001102//HYPOTHETICAL 62.8 KD PROTEIN IN TAF145-YOR1 INTERGENIC REGION.//1.7e-18:161:36//SACCHAROMYCES CEREVISIAE (BAKER'S YEAST).//P53331

[2748] F-NT2RM1001105//HYPOTHETICAL 35.5 KD PROTEIN IN TRANSPOSON TN4556.//4.0e-05:157:35//STREPTOMYCES FRADIAE.//P20186

[2749] F-NT2RM1001112//NONHISTONE CHROMOSOMAL PROTEIN HMG-17.//0.18:20:55//BOS TAURUS (BOVINE).//P02313

[2750] F-NT2RM1001115

[2751] F-NT2RM1001139//GLYCINE-RICH CELL WALL STRUCTURAL PROTEIN 1.8 PRECURSOR (GRP 1.8).//2.0e-25:156:46//PHASEOLUS VULGARIS (KIDNEY BEAN) (FRENCH BEAN).//P10496

[2752] F-NT2RM2000006//MITOCHONDRIAL RIBOSOMAL PROTEIN S12.//0.76:45:35//LEISHMANIA TARENTOLAE (SAUROLEISHMANIA TARENTOLAE).//Q34940

[2753] F-NT2RM2000013//DNA-DIRECTED RNA POLYMERASE III 128 KD POLYPEPTIDE (EC 2.7.7.6) (RNA POLYMERASE III SUBUNIT 2).//3.9e-87:238:65//DROSOPHILA MELANOGASTER (FRUIT FLY).//P25167

[2754] F-NT2RM2000030//TOXINS 1 AND 2.//0.98:21:42//TRIMERESURUS WAGLERI (WAGLER'S PIT VIPER) (TROPIDOLAEMUS WAGLERI).//P24335

[2755] F-NT2RM2000032//!!!! ALU SUBFAMILY J WARNING ENTRY !!!!//0.00059:53:49//HOMO SAPIENS (HUMAN).//P39188

[2756] F-NT2RM2000042//SMALL PROLINE-RICH PROTEIN II (SPR-II) (CLONE 174N).//1.0:68:26//HOMO SAPIENS (HUMAN).//P22532

[2757] F-NT2RM2000092//HYPOTHETICAL 67.5 KD PROTEIN IN PRPS4-STE20 INTERGENIC REGION.//7.0e-11:80:40//SACCHAROMYCES CEREVISIAE (BAKER'S YEAST).//P38748

[2758] F-NT2RM2000093//OVARY MATURATING PARSIN (OMP).//1.0:26:38//LOCUSTA MIGRATORIA (MIGRATORY LOCUST).//P80045

[2759] F-NT2RM2000101//HYPOTHETICAL 39.3 KD PROTEIN C02B8.6 IN CHROMOSOME X.//3.3e-09:56:35//CAENORHABDITIS ELEGANS.//Q11096

[2760] F-NT2RM2000124//CAMP-DEPENDENT PROTEIN KINASE, ALPHA-CATALYTIC SUBUNIT (EC 2.7.1.37) (PKA C-ALPHA).//3.1e-35:77:96//MUS MUSCULUS (MOUSE).//P05132

[2761] F-NT2RM2000191//3′,5′-CYCLIC-NUCLEOTIDE PHOSPHODIESTERASE REGA (EC 3.1.4.17) (PDEASE REGA).//3.3e-05:181:27//DICTYOSTELIUM DISCOIDEUM (SLIME MOLD).//Q23917

[2762] F-NT2RM2000192//REPLICATION PROTEIN E1 (FRAGMENTS).//0.019:148:25//COTTONTAIL RABBIT (SHOPE) PAPILLOMAVIRUS (STRAIN WASHINGTON B) (CRPV).//P51894

[2763] F-NT2RM2000239//PROLINE-RICH PROTEIN MP-3 (FRAGMENT).//0.00032:111:32//MUS MUSCULUS (MOUSE).//P05143

[2764] F-nnnnnnnnnnnn//METALLOTHIONEIN-LIKE PROTEIN TYPE 2.//0.046:59:33//LYCOPERSICON ESCULENTUM (TOMATO).//Q43512

[2765] F-NT2RM2000250//GALECTIN-3 (GALACTOSE-SPECIFIC LECTIN 3) (MAC-2 ANTIGEN) (IGE-BINDING PROTEIN) (35 KD LECTIN) (CARBOHYDRATE BINDING PROTEIN 35) (CBP 35) (LAMININ-BINDING PROTEIN) (LECTIN L-29).//0.054:46:34//RATTUS NORVEGICUS (RAT).//P08699

[2766] F-NT2RM2000259//TRANS-ACTING TRANSCRIPTIONAL PROTEIN ICPO (P135 PROTEIN) (IER 2.9/ER2.6).//0.27:112:33//BOVINE HERPESVIRUS TYPE 1 (STRAIN JURA).//P29128

[2767] F-NT2RM2000260//PROLINE-RICH PROTEIN MP-3 (FRAGMENT).//4.7e-22:191:35//MUS MUSCULUS (MOUSE).//P05143

[2768] F-NT2RM2000287//HYPOTHETICAL 11.8 KD PROTEIN C1B3.02C IN CHROMOSOME I.//5.0e-19:83:53//SCHIZOSACCHAROMYCES POMBE (FISSION YEAST).//O13868

[2769] F-NT2RM2000322//DIAMINOPIMELATE DECARBOXYLASE (EC 4.1.1.20) (DAP DECARBOXYLASE).//0.47:117:29//HELICOBACTER PYLORI (CAMPYLOBACTER PYLORI).//P56129

[2770] F-NT2RM2000359//SPORE GERMINATION PROTEIN 270-11.//0.12:83:36//DICTYOSTELIUM DISCOIDEUM (SLIME MOLD).//P22698

[2771] F-NT2RM2000363//BREAKPOINT CLUSTER REGION PROTEIN.//1.3e-16:203:30//HOMO SAPIENS (HUMAN).//P1274

[2772] F-NT2RM2000368//DEK PROTEIN.//0.00027:100:32//HOMO SAPIENS (HUMAN).//P35659

[2773] F-NT2RM2000371//POLYRIBONUCLEOTIDE NUCLEOTIDYLTRANSFERASE (EC 2.7.7.8) (POLYNUCLEOTIDE PHOSPHORYLASE) (PNPASE).//6.8e-36:170:47//ESCHERICHIA COLI.//P05055

[2774] F-NT2RM2000374//NODAL PRECURSOR.//1.1e-32:64:95//MUS MUSCULUS (MOUSE).//P43021

[2775] F-NT2RM2000395//IMMEDIATE-EARLY PROTEIN IE180.//0.31:41:43//PSEUDORABIES VIRUS (STRAIN INDIANA-FUNKHAUSER/BECKER) (PRV).//P11675

[2776] F-NT2RM2000402//ENDOSOMAL P24A PROTEIN PRECURSOR (70 KD ENDOMEMBRANE PROTEIN) (PHEROMONE ALPHA-FACTOR TRANSPORTER) (ACIDIC 24 KD LATE ENDOCYTIC INTERMEDIATE COMPONENT).//1.2e-30:228:32//SACCHAROMYCES CEREVISIAE (BAKER'S YEAST).//P32802

[2777] F-NT2RM2000407//TRANSMEMBRANE PROTEIN SEX PRECURSOR.//0.032:105:30//HOMO SAPIENS (HUMAN).//P51805

[2778] F-NT2RM2000420//METALLOTHIONEIN (MT).//0.88:42:38//PLEURONECTES PLATESSA (PLAICE).//P07216

[2779] F-NT2RM2000422//SODIUM- AND CHLORIDE-DEPENDENT TRANSPORTER NTT73.//2.0e-117:237:87//RATTUS NORVEGICUS (RAT).//Q08469

[2780] F-NT2RM2000452//HYPOTHETICAL 63.6 KD PROTEIN IN YPT52-GCN3 INTERGENIC REGION.//1.1e-08:157:28//SACCHAROMYCES CEREVISIAE (BAKER'S YEAST).//P36113

[2781] F-NT2RM2000469//70 KD ANTIGEN.//0.050:207:23//SHIGELLA FLEXNERI.//P18010

[2782] F-NT2RM2000490//BASIC PROLINE-RICH PEPTIDE P-E (IB-9).//0.022:25:44//HOMO SAPIENS (HUMAN).//P02811

[2783] F-NT2RM2000502//MALE SPECIFIC SPERM PROTEIN MST84DD.//0.0037:17:58//DROSOPHILA MELANOGASTER (FRUIT FLY).//Q01645

[2784] F-NT2RM2000504//HYPOTHETICAL 99.0 KD PROTEIN SPBC119.17.//1.7e-22:195:27//SCHIZOSACCHAROMYCES POMBE (FISSION YEAST).//O42908

[2785] F-NT2RM2000522//RAS-RELATED PROTEIN RABA (FRAGMENT).//3.6e-05:67:29//DICTYOSTELIUM DISCOIDEUM (SLIME MOLD).//P34141

[2786] F-NT2RM2000540//HYPOTHETICAL 83.8 KD PROTEIN C27F2.7 IN CHROMOSOME III.//8.4e-33:214:38//CAENORHABDITIS ELEGANS.//Q18262

[2787] F-NT2RM2000556//HYPOTHETICAL PROTEIN KIAA0288 (HA6116).//1.7e-09:133:36//HOMO SAPIENS (HUMAN).//P56524

[2788] F-NT2RM2000566//INTEGRIN ALPHA-6 PRECURSOR (VLA-6) (CD49F).//2.2e-60:244:51//HOMO SAPIENS (HUMAN).//P23229

[2789] F-NT2RM2000567//PROLINE-RICH PROTEIN MP-3 (FRAGMENT).//2.3e-09:192:34//MUS MUSCULUS (MOUSE).//P05143

[2790] F-NT2RM2000569//!!!! ALU SUBFAMILY J WARNING ENTRY !!!!//9.0e-08:43:72//HOMO SAPIENS (HUMAN).//P39188

[2791] F-NT2RM2000577//ISOLEUCYL-TRNA SYNTHETASE (EC 6.1.1.5) (ISOLEUCINE-TRNA LIGASE) (ILERS).//9.1e-54:225:45//SYNECHOCYSTIS SP. (STRAIN PCC 6803).//P73505

[2792] F-NT2RM2000581//SPLICEOSOME ASSOCIATED PROTEIN 49 (SAP 49) (SF3B53).//0.079:111:34//HOMO SAPIENS (HUMAN).//Q15427

[2793] F-NT2RM2000588//HYPOTHETICAL PROTEIN KIAA0288 (HA6116).//2.3e-09:193:32//HOMO SAPIENS (HUMAN).//P56524

[2794] F-NT2RM2000594//BASIC PROLINE-RICH PEPTIDE P-E (IB-9).//0.18:33:42//HOMO SAPIENS (HUMAN).//P02811

[2795] F-NT2RM2000599//DNA (CYTOSINE-5)-METHYLTRANSFERASE (EC 2.1.1.37) (DNA METHYLTRANSFERASE) (DNA METASE) (MCMT) (M.MMUI).//1.5e-09:68:45//MUS MUSCULUS (MOUSE).//P13864

[2796] F-NT2RM2000609//GRANULIN 2.//0.83:42:35//CYPRINUS CARPIO (COMMON CARP).//P81014

[2797] F-NT2RM2000612//ZINC FINGER PROTEIN GCS1.//7.2e-05:155:29//SACCHAROMYCES CEREVISIAE (BAKER'S YEAST).M/P35197

[2798] F-NT2RM2000623//A-AGGLUTININ ATTACHMENT SUBUNIT PRECURSOR.//1.8e-09:196:33//SACCHAROMYCES CEREVISIAE (BAKER'S YEAST).//P32323

[2799] F-NT2RM2000624//SALIVARY GLUE PROTEIN SGS-3 PRECURSOR.//0.070:113:27//DROSOPHILA ERECTA (FRUIT FLY).//P13730

[2800] F-NT2RM2000635//SPERM PROTAMINE P1 .//0.54:47:38//ANTECHINUS STUARTII.//P42129

[2801] F-NT2RM2000636//OUTER MEMBRANE PROTEIN H.8 PRECURSOR.//0.096:62:35//NEISSERIA GONORRHOEAE.//P11910

[2802] F-NT2RM2000639//HYPOTHETICAL PROTEIN MJ0243.//0.99:32:34//METHANOCOCCUS JANNASCHII.//Q57694

[2803] F-NT2RM2000649//NEURONAL CALCIUM SENSOR 1 (NCS-1).//0.00049:70:35//RATTUS NORVEGICUS (RAT), AND GALLUS GALLUS (CHICKEN).//P36610

[2804] F-NT2RM2000669//50S RIBOSOMAL PROTEIN L34.//1.0:34:44//BACILLUS SUBTILIS.//P05647

[2805] F-NT2RM2000691/ACTIN-LIKE PROTEIN 3 (ACTIN-2).//7.0e-116:243:87//HOMO SAPIENS (HUMAN), AND BOS TAURUS (BOVINE).//P32391

[2806] F-NT2RM2000714//RAS SUPPRESSOR PROTEIN 1 (RSU-1) (RSP-1 PROTEIN) (RSP-1).//3.8e-21:174:35//HOMO SAPIENS (HUMAN).//Q15404

[2807] F-NT2RM2000718//HYPOTHETICAL 52.9 KD SERINE-RICH PROTEIN C11G7.01 IN CHROMOSOME I.//0.0022:174:29//SCHIZOSACCHAROMYCES POMBE (FISSION YEAST).//O13695

[2808] F-NT2RM2000735//ZINC FINGER PROTEIN 43 (ZINC PROTEIN HTF6).//1.6e-102:246:74//HOMO SAPIENS (HUMAN).//P28160

[2809] F-NT2RM2000740//HYPOTHETICAL 131.1 KD HELICASE IN ALG7-ENP1 INTERGENIC REGION.//8.5e-51:212:49//SACCHAROMYCES CEREVISIAE (BAKER'S YEAST).//P38144

[2810] F-NT2RM2000795//!!!! ALU SUBFAMILY SB WARNING ENTRY !!!!//9.0e-41:125:53//HOMO SAPIENS (HUMAN).//P39189

[2811] F-NT2RM2000821//COATOMER BETA SUBUNIT (BETA-COAT PROTEIN) (BETA-COP).//1.1e-128:291:89//RATTUS NORVEGICUS (RAT).//P23514

[2812] F-NT2RM2000837//CYCLIN-DEPENDENT KINASE INHIBITOR 1C (CYCLIN-DEPENDENT KINASE INHIBITOR P57) (P57KIP2).//3.9e-05:113:36//HOMO SAPIENS (HUMAN).//P49918

[2813] F-NT2RM2000951//HYPOTHETICAL 60.3 KD PROTEIN R08D7.7 IN CHROMOSOME III.//2.5e-49:273:39//CAENORHABDITIS ELEGANS.//P30646

[2814] F-NT2RM2000952//NEUROFILAMENT TRIPLET H PROTEIN (200 KD NEUROFILAMENT PROTEIN) (NF-H) (FRAGMENT).//0.037:234:23//RATTUS NORVEGICUS (RAT).//P16884

[2815] F-NT2RM2000984//HYPOTHETICAL 54.7 KD PROTEIN F37A4.1 IN CHROMOSOME III.//6.3e-44:216:43//CAENORHABDITIS ELEGANS.//P41879

[2816] F-NT2RM2001004//SYNAPSINS IA AND IB.//0.15:178:32//RATTUS NORVEGICUS (RAT).//P09951

[2817] F-NT2RM2001035//CCR4-ASSOCIATED FACTOR 1 (CAF I).//1.4e-87:188:90//MUS MUSCULUS (MOUSE).//Q60809

[2818] F-NT2RM2001065//ATP SYNTHASE A CHAIN (EC 3.6.1.34) (PROTEIN 6).//0.53:122:31//TRYPANOSOMA BRUCEI BRUCEI.//P24499

[2819] F-NT2RM2001100//HYPOTHETICAL 39.7 KD PROTEIN C34E10.2 IN CHROMOSOME III.//3.4e-13:171:30//CAENORHABDITIS ELEGANS.//P46577

[2820] F-NT2RM2001105//SPORE COAT PROTEIN SP96.//7.8e-06:141:34//DICTYOSTELIUM DISCOIDEUM (SLIME MOLD).//P14328

[2821] F-NT2RM2001131//PROBABLE EUKARYOTIC INITIATION FACTOR C17C9.03.//2.3e-18:249:31//SCHIZOSACCHAROMYCES POMBE (FISSION YEAST).//Q10475

[2822] F-NT2RM2001141//HYPOTHETICAL 115.4 KD PROTEIN ZK757.3 IN CHROMOSOME III.//0.050:134:26//CAENORHABDITIS ELEGANS.//P34681

[2823] F-NT2RM2001152

[2824] F-NT2RM2001177//COLLAGEN ALPHA I (XIV) CHAIN PRECURSOR (UNDULIN).//0.86:42:40//GALLUS GALLUS (CHICKEN).//P32018

[2825] F-NT2RM2001194//SMOOTHELIN.//4.7e-05:77:32//HOMO SAPIENS (HUMAN).//P53814

[2826] F-NT2RM2001196//PROLINE-RICH PROTEIN MP-3 (FRAGMENT).//1.7e-18:218:35//MUS MUSCULUS (MOUSE).//P05143

[2827] F-NT2RM2001201//CYSTEINE STRING PROTEIN (CCCS1).//0.041:22:59//TORPEDO CALIFORNICA (PACIFIC ELECTRIC RAY).//P56101

[2828] F-NT2RM2001221//KALIRIN (PAM COOH-TERMINAL INTERACTOR PROTEIN 10) (P-CIP10).//1.3e-13:183:32//RATTUS NORVEGICUS (RAT).//P97924

[2829] F-NT2RM2001238//GLUTAMINASE, KIDNEY ISOFORM PRECURSOR (EC 3.5.1.2) (GLS) (L-GLUTAMINE AMIDOHYDROLASE).//6.5e-121:218:98//RATTUS NORVEGICUS (RAT).//P13264

[2830] F-NT2RM2001243//HYPOTHETICAL 200.0 KD PROTEIN IN GZF3-IME2 INTERGENIC REGION.//0.00019:177:27//SACCHAROMYCES CEREVISIAE (BAKER'S YEAST).//P42945

[2831] F-NT2RM2001247//LEGUMIN B (FRAGMENT).//0.22:54:35//PISUM SATIVUM (GARDEN PEA).//P14594

[2832] F-NT2RM2001256//PROTEIN TSG24 (MEIOTIC CHECK POINT REGULATOR).//1.8e-109:207:98//MUS MUSCULUS (MOUSE).//P53995

[2833] F-NT2RM2001291//SMALL PROLINE RICH PROTEIN II (SPR-II) (CLONE 930).//0.016:22:40//HOMO SAPIENS (HUMAN).//P22531

[2834] F-NT2RM2001306//REF(2)P PROTEIN.//0.61:51:33//DROSOPHILA MELANOGASTER (FRUIT FLY).//P14199

[2835] F-NT2RM2001312//!!!! ALU SUBFAMILY SX WARNING ENTRY !!!!//7.2e-11:33:72//HOMO SAPIENS (HUMAN).//P39195

[2836] F-NT2RM2001319

[2837] F-NT2RM2001324//ZYXIN.//5.1e-22:91:38//GALLUS GALLUS (CHICKEN).//Q04584

[2838] F-NT2RM2001345//VEGETATIBLE INCOMPATIBILITY PROTEIN HET-E-1.//7.4e-10:159:27//PODOSPORA ANSERINA.//Q00808

[2839] F-NT2RM2001360//ACCESSORY GLAND PEPTIDE PRECURSOR (PARAGONIAL PEPTIDE B).//1.0:27:48//DROSOPHILA MELANOGASTER (FRUIT FLY).//P05623

[2840] F-NT2RM2001370//NAPE PROTEIN.//0.98:44:31//PARACOCCUS DENITRIFICANS (SUBSP. THIOSPHAERA PANTOTROPHA).//Q56348

[2841] F-NT2RM2001393//VITELLOGENIN PRECURSOR (VTG) [CONTAINS: LIPOVITELLIN LV-1N; LIPOVITELLIN LV-1C; LIPOVITELLIN LV-2].//0.0024:163:31//ICHTHYOMYZON UNICUSPUS (SILVER LAMPREY).//Q91062

[2842] F-NT2RM2001420

[2843] F-NT2RM2001424//HETEROGENOUS NUCLEAR RIBONUCLEOPROTEIN U (HNRNP U).//2.4e-41:140:59//HOMO SAPIENS (HUMAN).//Q00839

[2844] F-NT2RM2001499//HIGH-AFFINITY CATIONIC AMINO ACID TRANSPORTER-1 (CAT-1) (CAT1) (SYSTEM Y+BASIC AMINO ACID TRANSPORTER) (ECOTROPIC RETROVIRAL LEUKEMIA RECEPTOR HOMOLOG) (ERR) (ECOTROPIC RETROVIRUS RECEPTOR HOMOLOG).//3.7e-71:201:68//HOMO SAPIENS (HUMAN).//P30825

[2845] F-NT2RM2001504//CUTICLE COLLAGEN 2.//0.028:41:39//CAENORHABDITIS ELEGANS.//P17656

[2846] F-NT2RM2001524//HYPOTHETICAL 61.3 KD PROTEIN F25B5.5 IN CHROMOSOME III.//6.7e-47:190:42//CAENORHABDITIS ELEGANS.//Q09316

[2847] F-NT2RM2001544//TELOMERE-BINDING PROTEIN 51 KD SUBUNIT.//0.0027:136:33//EUPLOTES CRASSUS.//Q06184

[2848] F-NT2RM2001547//HYPOTHETICAL 48.6 KD PROTEIN IN BET1-PAN1 INTERGENIC REGION.//8.5e-18:91:50//SACCHAROMYCES CEREVISIAE (BAKER'S YEAST).//P40564

[2849] F-NT2RM2001575//52 KD RO PROTEIN (SJOGREN SYNDROME TYPE A ANTIGEN (SS-A)) (RO(SS-A)).//3.9e-35:212:41//HOMO SAPIENS (HUMAN).//P19474

[2850] F-NT2RM2001582//RESA PROTEIN.//0.0033:72:27//BACILLUS SUBTILIS.//P35160

[2851] F-NT2RM2001588//EXTENSIN PRECURSOR (PROLINE-RICH GLYCOPROTEIN).//1.0e-06:115:32//ZEA MAYS (MAIZE).//P14918

[2852] F-NT2RM2001592//KERATIN, ULTRA HIGH-SULFUR MATRIX PROTEIN (UHS KERATIN).//0.033:156:23//HOMO SAPIENS (HUMAN).//P26371

[2853] F-NT2RM2001605//RETINOBLASTOMA BINDING PROTEIN 2 (RBBP-2).//1.1e-116:249:82//HOMO SAPIENS (HUMAN).//P29375

[2854] F-NT2RM2001613//PROTEIN TRANSPORT PROTEIN SEC61 ALPHA SUBUNIT.//1.2e-97:192:100//RATTUS NORVEGICUS (RAT).//P38378

[2855] F-NT2RM2001632//A-AGGLUTININ ATTACHMENT SUBUNIT PRECURSOR.//0.00068:145:28//SACCHAROMYCES CEREVISIAE (BAKER'S YEAST).//P32323

[2856] F-NT2RM2001635//NUCLEAR ENVELOPE PORE MEMBRANE PROTEIN POM 121 (PORE MEMBRANE PROTEIN OF 121 KD) (P145).//1.1e-39:235:47//RATTUS NORVEGICUS (RAT).//P52591

[2857] F-NT2RM2001637//HYPOTHETICAL BHLF1 PROTEIN.//0.075:197:29//EPSTEIN-BARR VIRUS (STRAIN B95-8) (HUMAN HERPESVIRUS 4).//P03181

[2858] F-NT2RM2001641//NADH-CYTOCHROME B5 REDUCTASE (EC 1.6.2.2) (B5R).//0.013:29:68//HOMO SAPIENS (HUMAN).//P00387

[2859] F-NT2RM2001648//PROTEIN TRANSPORT PROTEIN SEC61 ALPHA SUBUNIT.//3.2e-65:132:100//CANIS FAMILIARIS (DOG).//P38377

[2860] F-NT2RM2001652//PROTEIN TRANSPORT PROTEIN SEC7.//1.6e-32:261:32//SACCHAROMYCES CEREVISIAE (BAKER'S YEAST).//P11075

[2861] F-NT2RM2001659//CARBOXYPEPTIDASE A INHIBITOR.//0.83:30:46//ASCARIS SUUM (PIG ROUNDWORM) (ASCARIS LUMBRICOIDES).//P19399

[2862] F-NT2RM2001664//IK13 PROTEIN.//1.3e-31:265:34//SACCHAROMYCES CEREVISIAE (BAKER'S YEAST).//Q06706

[2863] F-NT2RM2001668//TONB PROTEIN.//0.32:39:41//XANTHOMONAS CAMPESTRIS (PV. CAMPESTRIS).//O34261

[2864] F-NT2RM2001670//ZINC FINGER PROTEIN 174.//3.6e-21:172:39//HOMO SAPIENS (HUMAN).//Q15697

[2865] F-NT2RM2001671//HYPOTHETICAL 118.6 KD PROTEIN C29E6.03C IN CHROMOSOME I.//1.6e-10:229:24//SCHIZOSACCHAROMYCES POMBE (FISSION YEAST).//Q09857

[2866] F-NT2RM2001675//DIHYDRODIPICOLINATE SYNTHASE (EC 4.2.1.52) (DHDPS).//1.0:184:21//METHANOCOCCUS JANNASCHII.//Q57695

[2867] F-NT2RM2001681//PROTEIN DISULFIDE ISOMERASE PRECURSOR (PDI) (EC 5.3.4.1).//0.0039:199:22//DROSOPHILA MELANOGASTER (FRUIT FLY).//P54399

[2868] F-NT2RM2001688//HYPOTHETICAL 28.1 KD PROTEIN IN SIPU-PBPC INTERGENIC REGION.//2.6e-21:162:33//BACILLUS SUBTILIS.//P42966

[2869] F-NT2RM2001695//!!!! ALU SUBFAMILY SQ WARNING ENTRY !!!!//4.9e-41:60:81//HOMO SAPIENS (HUMAN).//P39194

[2870] F-NT2RM2001696//HYPOTHETICAL 24.1 KD PROTEIN IN LEF4-P33 INTERGENIC REGION.//9.8e-16:126:38//AUTOGRAPHA CALIFORNICA NUCLEAR POLYHEDROSIS VIRUS (ACMNPV).//P41479

[2871] F-NT2RM2001698//PENAEIDIN-3B PRECURSOR (P3-B).//0.36:52:34//PENAEUS VANNAMEI (PENOEID SHRIMP) (EUROPEAN WHITE SHRIMP).//P81059

[2872] F-NT2RM2001699//TRANSCRIPTION INITIATION FACTOR TFIID 30 KD SUBUNIT (TAFII-30) (TAFII30).//0.0012:79:40//HOMO SAPIENS (HUMAN).//Q12962

[2873] F-NT2RM2001700//ACYL-COA DEHYDROGENASE, VERY-LONG-CHAIN SPECIFIC (EC 1.3.99.-) (VLCAD) (FRAGMENT).//1.0e-30:140:53//MUS MUSCULUS (MOUSE).//P50544

[2874] F-NT2RM2001706//!!!! ALU SUBFAMILY SX WARNING ENTRY !!!!//1.5e-33:95:75//HOMO SAPIENS (HUMAN).//P39195

[2875] F-NT2RM2001716//HYPOTHETICAL 118.4 KD PROTEIN IN BAT2-DAL5 INTERGENIC REGION PRECURSOR.//0.010:116:30//SACCHAROMYCES CEREVISIAE (BAKER'S YEAST).//P47179

[2876] F-NT2RM2001718//METHYL-ACCEPTING CHEMOTAXIS PROTEIN TLPB.//0.00029:77:37//BACILLUS SUBTILIS.//P39217

[2877] F-NT2RM2001723//POSTERIOR PITUITARY PEPTIDE.//0.94:26:53//BOS TAURUS (BOVINE).//P01154

[2878] F-NT2RM2001727//E7 PROTEIN.//0.91:46:34//HUMAN PAPILLOMAVIRUS TYPE 23.//P50781

[2879] F-NT2RM2001730//PROBABLE UBIQUITIN CARBOXYL-TERMINAL HYDROLASE K02C4.3 (EC 3.1.2.15) (UBIQUITIN THIOLESTERASE) (UBIQUITIN-SPECIFIC PROCESSING PROTEASE) (DEUBIQUITINATING ENZYME).//4.9e-07:139:29//CAENORHABDITIS ELEGANS.//Q09931

[2880] F-NT2RM2001743//PROENKEPHALIN A PRECURSOR.//0.75:65:35//CAVIA PORCELLUS (GUINEA PIG).//P47969

[2881] F-NT2RM2001753//HYPOTHETICAL PROTEIN KIAA0210.//1.5e-14:119:36//HOMO SAPIENS (HUMAN).//Q92609

[2882] F-NT2RM2001760//PROTEIN TRANSPORT PROTEIN SEC61 ALPHA SUBUNIT.//8.3e-58:119:99//CANIS FAMILIARIS (DOG).//P38377

[2883] F-NT2RM2001768//HYPOTHETICAL PROTEIN UL25.//0.45:77:32//HUMAN CYTOMEGALOVIRUS (STRAIN AD 169).//P16761

[2884] F-NT2RM2001771//ZINC FINGER PROTEIN 135.//4.6e-80:224:60//HOMO SAPIENS (HUMAN).//P52742

[2885] F-NT2RM2001782//MANNOSE-1-PHOSPHATE GUANYLTRANSFERASE (EC 2.7.7.13) (ATP-MANNOSE-1-PHOSPHATE GUANYLYLTRANSFERASE) (NDP-HEXOSE PYROPHOSPHORYLASE).//7.0e-06:61:45//SACCHAROMYCES CEREVISIAE (BAKER'S YEAST).//P41940

[2886] F-NT2RM2001784//HYPOTHETICAL PROTEIN UL61.//0.00070:145:33//HUMAN CYTOMEGALOVIRUS (STRAIN AD 169).//P16818

[2887] F-NT2RM2001785//LINOLEOYL-COA DESATURASE (EC 1.14.99.25) (DELTA(6)-DESATURASE).//1.5e-08:127:32//SYNECHOCYSTIS SP. (STRAIN PCC 6803).//Q08871

[2888] F-NT2RM2001797//ZINC FINGER PROTEIN 135.//1.6e-73:267:49//HOMO SAPIENS (HUMAN).//P52742

[2889] F-NT2RM2001800//HYPOTHETICAL HELICASE MG018/MG017/MG016 HOMOLOG.//3.9e-12:171:33//MYCOPLASMA PNEUMONIAE.//P75093

[2890] F-NT2RM2001803//IK13 PROTEIN.//1.6e-38:283:36//SACCHAROMYCES CEREVISIAE (BAKER'S YEAST).//Q06706

[2891] F-NT2RM2001805//COLD SHOCK-LIKE PROTEIN CSPH.//0.51:46:32//SALMONELLA TYPHIMURIUM.//O33793

[2892] F-NT2RM2001813//HYPOTHETICAL 40.4 KD TRP-ASP REPEATS CONTAINING PROTEIN C14B1.4 IN CHROMOSOME III.//5.0e-05:82:32//CAENORHABDITIS ELEGANS.//Q17963

[2893] F-NT2RM2001823//CHROMODOMAIN-HELICASE-DNA-BINDING PROTEIN 2 (CHD-2).//3.6e-49:233:45//HOMO SAPIENS (HUMAN).//O14647

[2894] F-NT2RM2001839//RETICULOCALBIN 1 PRECURSOR.//5.2e-65:222:56//HOMO SAPIENS (HUMAN).//Q15293

[2895] F-NT2RM2001840//!!!! ALU SUBFAMILY SQ WARNING ENTRY !!!!//9.6e-33:102:68//HOMO SAPIENS (HUMAN).//P39194

[2896] F-NT2RM2001855//BASP1 PROTEIN.//0.054:120:30//HOMO SAPIENS (HUMAN).//P80723

[2897] F-NT2RM2001867//HYPOTHETICAL 56.6 KD PROTEIN IN URE2-SSU72 INTERGENIC REGION.//4.1e-19:88:36//SACCHAROMYCES CEREVISIAE (BAKER'S YEAST).//P53867

[2898] F-NT2RM2001879//HYPOTHETICAL 47.3 KD PROTEIN C22G7.07C IN CHROMOSOME I.//5.9e-15:76:38//SCHIZOSACCHAROMYCES POMBE (FISSION YEAST).//Q09800

[2899] F-NT2RM2001886//HYPOTHETICAL 126.9 KD PROTEIN C22G7.04 IN CHROMOSOME I.//1.4e-41:249:38//SCHIZOSACCHAROMYCES POMBE (FISSION YEAST).//Q09798

[2900] F-NT2RM2001896//HYPOTHETICAL 83.2 KD PROTEIN IN KAR4-PBN1 INTERGENIC REGION.//2.1e-59:197:56//SACCHAROMYCES CEREVISIAE (BAKER'S YEAST).//P25582

[2901] F-NT2RM2001903//HYPOTHETICAL PROTEIN MJ0263.//0.070:132:31//METHANOCOCCUS JANNASCHII.//O06917

[2902] F-NT2RM2001930//THROMBOSPONDIN 2 PRECURSOR.//7.1e-05:53:47//MUS MUSCULUS (MOUSE).//Q03350

[2903] F-NT2RM2001935//PUTATIVE CUTICLE COLLAGEN F55C 10.3.//0.00046:116:35//CAENORHABDITIS ELEGANS.//Q21184

[2904] F-NT2RM2001936//32.3 KD PROTEIN IN CWP1-MBR1 INTERGENIC REGION.//4.5e-27:216:34//SACCHAROMYCES CEREVISIAE (BAKER'S YEAST).//P28320

[2905] F-NT2RM2001950//HIRUDIN HV 1 (BUFRUDIN).//0.59:43:34//HIRUDINARIA MANILLENSIS (BUFFALO LEECH).//P81492

[2906] F-NT2RM2001982//GUANINE NUCLEOTIDE-BINDING PROTEIN G(I)/G(S)/G(O) GAMMA-8 SUBUNIT (G GAMMA-C).//0.72:35:42//BOS TAURUS (BOVINE).//P50154

[2907] F-NT2RM2001983//PROLINE-RICH PEPTIDE P-B.//0.00035:23:52//HOMO SAPIENS (HUMAN).//P02814

[2908] F-NT2RM2001989//NUCLEOLAR PROTEIN NOP4 (NUCLEOLAR PROTEIN NOP77).//8.6e-24:197:37//SACCHAROMYCES CEREVISIAE (BAKER'S YEAST).//P37838

[2909] F-NT2RM2001997

[2910] F-NT2RM2001998//IMMEDIATE-EARLY PROTEIN IE 180.//0.076:92:27//PSEUDORABIES VIRUS (STRAIN INDIANA-FUNKHAUSER/BECKER) (PRV).//P11675

[2911] F-NT2RM2002004//SLF1 PROTEIN.//3.5e-06:235:27//SACCHAROMYCES CEREVISIAE (BAKER'S YEAST).//Q12034

[2912] F-NT2RM2002014//HYPOTHETICAL PROTEIN H10568.//2.1e-17:235:29//HAEMOPHILUS INFLUENZAE.//P71353

[2913] F-NT2RM2002030//GLUCOSAMINE-FRUCTOSE-6-PHOSPHATE AMINOTRANSFERASE [ISOMERIZING] (EC 2.6.1.16) (HEXOSEPHOSPHATE AMINOTRANSFERASE) (D-FRUCTOSE-6-PHOSPHATE AMIDOTRANSFERASE) (GFAT).//9.5e-105:271:76//MUS MUSCULUS (MOUSE).//P47856

[2914] F-NT2RM2002049//SMALL PROLINE-RICH PROTEIN 2-1.//0.099:41:41//HOMO SAPIENS (HUMAN).//P35326

[2915] F-NT2RM2002055//VACUOLAR PROTEIN SORTING-ASSOCIATED PROTEIN VPS13.//0.012:217:24//SACCHAROMYCES CEREVISIAE (BAKER'S YEAST).//Q07878

[2916] F-NT2RM2002088//PUTATIVE HETEROGENEOUS NUCLEAR RIBONUCLEOPROTEIN X (HNRNP X) (CBP).//1.1e-09:65:53//MUS MUSCULUS (MOUSE).//Q61990

[2917] F-NT2RM2002091//HYPOTHETICAL 57.5 KD PROTEIN IN VMA7-RPS25A INTERGENIC REGION.//0.072:74:37//SACCHAROMYCES CEREVISIAE (BAKER'S YEAST).//P53214

[2918] F-NT2RM2002100//ATP-DEPENDENT RNA HELICASE ROK1.//4.5e-50:289:41//SACCHAROMYCES CEREVISIAE (BAKER'S YEAST).//P45818

[2919] F-NT2RM2002109//NT-3 GROWTH FACTOR RECEPTOR PRECURSOR (EC 2.7.1.112) (TRKC TYROSINE KINASE) (GP145-TRKC) (TRK-C).//1.4e-14:203:32//RATTUS NORVEGICUS (RAT).//Q03351

[2920] F-NT2RM2002128//SKIN SECRETORY PROTEIN XP2 PRECURSOR (APEG PROTEIN).//0.0025:139:31//XENOPUS LAEVIS (AFRICAN CLAWED FROG).//P17437

[2921] F-NT2RM2002142//GASTRULATION SPECIFIC PROTEIN G 12.//9.2e-20:42:73//BRACHYDANIO RERIO (ZEBRAFISH) (ZEBRA DANIO).//P47805

[2922] F-NT2RM2002145//GLUTENIN, HIGH MOLECULAR WEIGHT SUBUNIT 12 PRECURSOR.//0.0085:200:26//TRITICUM AESTIVUM (WHEAT).//P08488

[2923] F-NT2RM2002178//COLLAGEN ALPHA I (XII) CHAIN (FRAGMENTS).//5.8e-05:56:39//BOS TAURUS (BOVINE).//P25508

[2924] F-NT2RM2002580//CCAAT-BINDING TRANSCRIPTION FACTOR SUBUNIT A (CBF-A) (NF-Y PROTEIN CHAIN B) (NF-YB) (CAAT-BOX DNA BINDING PROTEIN SUBUNIT B).//2.9e-14:96:37//PETROMYZON MARINUS (SEA LAMPREY).//P25210

[2925] F-NT2RM4000024//DNA-DIRECTED RNA POLYMERASE III 128 KD POLYPEPTIDE (EC 2.7.7.6) (RNA POLYMERASE III SUBUNIT 2).//8.6e-95:271:67//DROSOPHILA MELANOGASTER (FRUIT FLY).//P25167

[2926] F-NT2RM4000027//INTERFERON-ACTIVATABLE PROTEIN 202 (IFI-202).//0.99:72:31//MUS MUSCULUS (MOUSE).//P15091

[2927] F-NT2RM4000030//LAS1 PROTEIN.//1.4e-14:184:32//SACCHAROMYCES CEREVISIAE (BAKER'S YEAST).//P36146

[2928] F-NT2RM4000046//COLLAGEN ALPHA I (III) CHAIN (FRAGMENT).//0.99:120:28//RATTUS NORVEGICUS (RAT).//P13941

[2929] F-NT2RM4000061

[2930] F-NT2RM4000085//ATP-DEPENDENT RNA HELICASE A (NUCLEAR DNA HELICASE II) (NDH II) (DEAD BOX PROTEIN 9) (MHEL-5).//8.5e-40:263:38//MUS MUSCULUS (MOUSE).//O70133

[2931] F-NT2RM4000086//HYPOTHETICAL PROTEIN HI1497.//1.0:27:37//HAEMOPHILUS INFLUENZAE.//P44221

[2932] F-NT2RM4000104//ZINC FINGER PROTEIN 134.//1.0e-26:64:56//HOMO SAPIENS (HUMAN).//P52741

[2933] F-NT2RM4000139//PREPROTEIN TRANSLOCASE SECE SUBUNIT.//0.99:38:42//THERMOTOGA MARITIMA.//P35874

[2934] F-NT2RM4000155//THREONYL-TRNA SYNTHETASE, CYTOPLASMIC (EC 6.1.1.3) (THREONINE-TRNA LIGASE) (THRRS).//6.3e-34:181:40//HOMO SAPIENS (HUMAN).//P26639

[2935] F-NT2RM4000156//EXTENSIN PRECURSOR (CELL WALL HYDROXYPROLINE-RICH GLYCOPROTEIN).//4.6e-12:142:33//NICOTIANA TABACUM (COMMON TOBACCO).//P13983

[2936] F-NT2RM4000167//KINESIN-LIKE PROTEIN KIF4.//3.4e-123:269:91//MUS MUSCULUS (MOUSE).//P33174

[2937] F-NT2RM4000169//M PROTEIN, SEROTYPE 2.2 PRECURSOR.//9.7e-10:229:26//STREPTOCOCCUS PYOGENES.//P50469

[2938] F-NT2RM4000191//P68-LIKE PROTEIN.//2.1e-11:104:40//SACCHAROMYCES CEREVISIAE (BAKER'S YEAST).//P24783

[2939] F-NT2RM4000197//CUTICLE PROTEIN CP463 (CPCP463).//0.84:29:37//CANCER PAGURUS (ROCK CRAB).//P81587

[2940] F-NT2RM4000199//SALIVARY PROLINE-RICH PROTEIN PO (ALLELE K) [CONTAINS: PEPTIDE P-D] (FRAGMENT).//1.8e-06:187:34//HOMO SAPIENS (HUMAN).//P10162

[2941] F-NT2RM4000200//HYPOTHETICAL 9.4 KD PROTEIN IN FLAL 3′REGION (ORF3).//0.52:42:40//BACILLUS LICHENIFORMIS.//P22754

[2942] F-NT2RM4000202//COLLAGEN ALPHA I (VIII) CHAIN PRECURSOR (ENDOTHELIAL COLLAGEN).//0.00044:168:32//ORYCTOLAGUS CUNICULUS (RABBIT).//P14282

[2943] F-NT2RM4000210//EXTENSIN PRECURSOR.//0.27:129:27//DAUCUS CAROTA (CARROT)./IP06599

[2944] F-NT2RM4000215//MAK16 PROTEIN.//2.0e-65:234:52//SACCHAROMYCES CEREVISIAE (BAKER'S YEAST).//P10962

[2945] F-NT2RM4000229//GAR2 PROTEIN.//0.13:217:26//SCHIZOSACCHAROMYCES POMBE (FISSION YEAST).//P41891

[2946] F-NT2RM4000233//TRANSMEMBRANE PROTEIN SEX PRECURSOR.//0.047:108:30//HOMO SAPIENS (HUMAN).//P51805

[2947] F-NT2RM4000244//ATP SYNTHASE PROTEIN 8 (EC 3.6.1.34) (A6L).//0.67:59:27//BALAENOPTERA PHYSALUS (FINBACK WHALE) (COMMON RORQUAL).//P24947

[2948] F-NT2RM4000251//PROLINE-RICH PROTEIN MP-3 (FRAGMENT).//0.0059:108:35//MUS MUSCULUS (MOUSE).//P05143

[2949] F-NT2RM4000265//!!!! ALU SUBFAMILY J WARNING ENTRY !!!!//8.1e-38:70:70//HOMO SAPIENS (HUMAN).//P39188

[2950] F-NT2RM4000290//TRANSDUCIN-LIKE ENHANCER PROTEIN 3 (ESG3).//1.6e-115:209:94//HOMO SAPIENS (HUMAN).//Q04726

[2951] F-NT2RM4000324//PRESPORE PROTEIN DP87 PRECURSOR.//0.14:136:30//DICTYOSTELIUM DISCOIDEUM (SLIME MOLD).//Q04503

[2952] F-NT2RM4000327//HYPOTHETICAL 8.9 KD PROTEIN IN IE0-IE1 INTERGENIC REGION.//0.91:73:28//AUTOGRAPHA CALIFORNICA NUCLEAR POLYHEDROSIS VIRUS (ACMNPV).//P41703

[2953] F-NT2RM4000344//YME1 PROTEIN HOMOLOG (EC 3.4.24.-).//9.4e-78:241:55//CAENORHABDITIS ELEGANS.//P54813

[2954] F-NT2RM4000349//CYSTEINE STRING PROTEIN (CCCS 1).//0.055:22:59//TORPEDO CALIFORNICA (PACIFIC ELECTRIC RAY).//P56101.

[2955] F-NT2RM4000354//LETHAL(2)DENTICLELESS PROTEIN (DTL83 PROTEIN).//4.6e-26:208:35//DROSOPHILA MELANOGASTER (FRUIT FLY).//Q24371

[2956] F-NT2RM4000356//COAT PROTEIN.//0.11:105:36//SATELLITE TOBACCO MOSAIC VIRUS (STMV).//P17574

[2957] F-NT2RM4000366//IMMEDIATE-EARLY PROTEIN.//1.2e-05:215:24//HERPESVIRUS SAIMIRI (STRAIN 11).//Q01042

[2958] F-NT2RM4000368//HYPOTHETICAL 7.3 KD PROTEIN IN RPBA-GP46 INTERGENIC REGION.//0.54:46:36//BACTERIOPHAGE RB69.//064300

[2959] F-NT2RM4000386//RHSC PROTEIN PRECURSOR.//0.0096:162:29//ESCHERICHIA COLI.//P16918

[2960] F-NT2RM4000395//HYPOTHETICAL 52.9 KD PROTEIN IN SAP155-YMR31 INTERGENIC REGION.//4.5e-66:256:53//SACCHAROMYCES CEREVISIAE (BAKER'S YEAST).//P43616

[2961] F-NT2RM4000414//HYPOTHETICAL 6.0 KD PROTEIN IN THI12 5′REGION.//0.13:33:48//SACCHAROMYCES CEREVISIAE (BAKER'S YEAST).//P53820

[2962] F-NT2RM4000421//MRNA TRANSPORT REGULATOR MTR10.//5.0e-13:171:29//SACCHAROMYCES CEREVISIAE (BAKER'S YEAST).//Q99189

[2963] F-NT2RM4000425//!!!! ALU SUBFAMILY SP WARNING ENTRY !!!!//2.1e-25:46:80//HOMO SAPIENS (HUMAN).//P39193

[2964] F-NT2RM4000433//CUTICLE COLLAGEN 3A3.//2.5e-06:77:38//HAEMONCHUS CONTORTUS.//P16253

[2965] F-NT2RM4000457//HYPOTHETICAL 111.9 KD PROTEIN C22H10.03C IN CHROMOSOME I.//4.3e-09:215:22//SCHIZOSACCHAROMYCES POMBE (FISSION YEAST).//Q10297

[2966] F-NT2RM4000471//TRNA SPLICING PROTEIN SPL1.//6.7e-73:163:65//CANDIDA ALBICANS (YEAST).//P87185

[2967] F-NT2RM4000486//COLLAGEN ALPHA 2(VI) CHAIN PRECURSOR.//0.0012:121:34//GALLUS GALLUS (CHICKEN).//P15988

[2968] F-NT2RM4000496//DNA-DIRECTED RNA POLYMERASE II LARGEST SUBUNIT (EC 2.7.7.6) (RNA POLYMERASE II SUBUNIT 1).//5.9e-09:175:35//SCHIZOSACCHAROMYCES POMBE (FISSION YEAST).//P36594

[2969] F-NT2RM4000511//SALIVARY GLUE PROTEIN SGS-3 PRECURSOR.//0.020:122:31//DROSOPHILA SIMULANS (FRUIT FLY).//P13729

[2970] F-NT2RM4000514//ATP SYNTHASE A CHAIN (EC 3.6.1.34) (PROTEIN 6).//0.46:68:32//ARTEMIA SANFRANCISCANA (BRINE SHRIMP) (ARTEMIA FRANCISCANA).//Q37708

[2971] F-NT2RM4000515//GAR2 PROTEIN.//3.2e-05:198:27//SCHIZOSACCHAROMYCES POMBE (FISSION YEAST).//P41891

[2972] F-NT2RM4000520//HYPOTHETICAL 7.5 KD PROTEIN (ORF 63).//0.011:55:38//SPINACIA OLERACEA (SPINACH).//P08974

[2973] F-NT2RM4000531//ZINC FINGER PROTEIN 169 (FRAGMENT).//3.6e-44:244:42//HOMO SAPIENS (HUMAN).//Q14929

[2974] F-NT2RM4000532//PUTATIVE MEMBRANE PROTEIN 53.//1.0:47:34//HERPESVIRUS SAIMIRI (STRAIN 11).//Q01049

[2975] F-NT2RM4000534//HYPOTHETICAL 5.9 KD PROTEIN IN WRBA-PUTA INTERGENIC REGION.//0.75:26:46//ESCHERICHIA COLI.//P56614

[2976] F-NT2RM4000585//GAG POLYPROTEIN [CONTAINS: CORE PROTEIN P16; CORE PROTEIN P26].//0.019:86:34//HUMAN IMMUNODEFICIENCY VIRUS TYPE 2 (ISOLATE SBLISY) (HIV-2).//P12450

[2977] F-NT2RM4000590//RING CANAL PROTEIN (KELCH PROTEIN).//5.0e-23:224:29//DROSOPHILA MELANOGASTER (FRUIT FLY).//Q04652

[2978] F-NT2RM4000595//HYPOTHETICAL 54.9 KD PROTEIN C02F5.7 IN CHROMOSOME III.//3.8e-62:226:50//CAENORHABDITIS ELEGANS.//P34284

[2979] F-NT2RM4000603//SRC SUBSTRATE CORTACTIN (AMPLAXIN) (EMS I ONCOGENE).//0.077:132:22//HOMO SAPIENS (HUMAN).//Q14247

[2980] F-NT2RM4000611//HYPOTHETICAL 40.4 KD TRP-ASP REPEATS CONTAINING PROTEIN C14B1.4 IN CHROMOSOME III.//1.9e-06:82:32//CAENORHABDITIS ELEGANS.//Q17963

[2981] F-NT2RM4000616//ACETYL-COENZYME A SYNTHETASE (EC 6.2.1.1) (ACETATE-COA LIGASE) (ACYL-ACTIVATING ENZYME).//5.3e-79:213:62//ESCHERICHIA COLI.//P27550

[2982] F-NT2RM4000674//HYPOTHETICAL SYMPORTER SLL1374.//1.3e-11:147:32//SYNECHOCYSTIS SP. (STRAIN PCC 6803).//P74168

[2983] F-NT2RM4000689

[2984] F-NT2RM4000698//CHORION CLASS HIGH-CYSTEINE HCA PROTEIN 12 PRECURSOR (HC-A.12).//0.26:45:33//BOMBYX MORI (SILK MOTH).//P05687

[2985] F-NT2RM4000700//THIOPHENE AND FURAN OXIDATION PROTEIN THDF.//0.95:165:25//BORRELIA BURGDORFERI (LYME DISEASE SPIROCHETE).//P53364

[2986] F-NT2RM4000712//PROBABLE UBIQUITIN CARBOXYL-TERMINAL HYDROLASE R10E11.3 (EC 3.1.2.15) (UBIQUITIN THIOLESTERASE) (UBIQUITIN-SPECIFIC PROCESSING PROTEASE) (DEUBIQUITINATING ENZYME).//2.2e-82:152:63//CAENORHABDITIS ELEGANS.//P34547

[2987] F-NT2RM4000717//SALIVARY GLUE PROTEIN SGS-3 PRECURSOR.//0.80:54:40//DROSOPHILA SIMULANS (FRUIT FLY).//P13729

[2988] F-NT2RM4000733//OCTAPEPTIDE-REPEAT PROTEIN T2.//1.5e-08:139:28//MUS MUSCULUS (MOUSE).//Q06666

[2989] F-NT2RM4000734//GASTRULA ZINC FINGER PROTEIN XLCGF26.1 (FRAGMENT).//7.2e-20:205:28//XENOPUS LAEVIS (AFRICAN CLAWED FROG).//P18715

[2990] F-NT2RM4000741//SPERM PROTAMINE P1.//0.89:52:38//ISOODON MACROURUS (SHORT-NOSED BANDICOOT).//P42136

[2991] F-NT2RM4000751//ZINC FINGER PROTEIN 26 (ZFP-26) (MKR3 PROTEIN) (FRAGMENT).//5.2e-77:246:52//MUS MUSCULUS (MOUSE).//P10076

[2992] F-NT2RM4000764//KERATIN, GLYCINE/TYROSINE-RICH OF HAIR.//0.062:33:42//OVIS ARIES (SHEEP).//Q02958

[2993] F-NT2RM4000778

[2994] F-NT2RM4000779//SULFATED SURFACE GLYCOPROTEIN 185 (SSG 185).//0.014:53:45//VOLVOX CARTERI.//P21997

[2995] F-NT2RM4000787//BONE MORPHOGENETIC PROTEIN 1 PRECURSOR (EC 3.4.24.-) (BMP-1).//0.00011:73:39//MUS MUSCULUS (MOUSE).//P98063

[2996] F-NT2RM4000790//SPORE COAT PROTEIN SP96.//0.00083:157:29//DICTYOSTELIUM DISCOIDEUM (SLIME MOLD).//P14328

[2997] F-NT2RM4000795//CHOLINESTERASE PRECURSOR (EC 3.1.1.8) (ACYLCHOLINE ACYLHYDROLASE) (CHOLINE ESTERASE II) (BUTYRYLCHOLINE ESTERASE) (PSEUDOCHOLINESTERASE).//7.4e-41:271:36//HOMO SAPIENS (HUMAN).//P06276

[2998] F-NT2RM4000796//5-METHYLCYTOSINE-SPECIFIC RESTRICTION ENZYME B (EC 3.1.21.-).//0.28:82:30//ESCHERICHIA COLI.//P15005

[2999] F-NT2RM4000798//PROTEIN TRANSPORT PROTEIN SEC7.//4.7e-38:165:48//SACCHAROMYCES CEREVISIAE (BAKER'S YEAST).//P11075

[3000] F-NT2RM4000813//METALLOTHIONEIN-IB.//0.0025:25:44//OVIS ARIES (SHEEP).//P09577

[3001] F-NT2RM4000820

[3002] F-NT2RM4000833//HYPOTHETICAL PROTEIN MJ1136.//6.5e-42:206:41//METHANOCOCCUS JANNASCHII.//Q58536

[3003] F-NT2RM4000848//BRAIN-SPECIFIC HOMEOBOX/POU DOMAIN PROTEIN 3A (BRN-3A) (BRN-3.0).//0.00060:159:33//MUS MUSCULUS (MOUSE).//P17208

[3004] F-NT2RM4000852//SMALL PROLINE-RICH PROTEIN 2B (SPR-2B).//0.0076:13:69//HOMO SAPIENS (HUMAN).//P35325

[3005] F-NT2RM4000855//!!!! ALU SUBFAMILY SQ WARNING ENTRY !!!!//0.0060:68:44//HOMO SAPIENS (HUMAN).//P39194

[3006] F-NT2RM4000887//RTS1 PROTEIN (SCS1 PROTEIN).//0.23:153:24//SACCHAROMYCES CEREVISIAE (BAKER'S YEAST).//P38903

[3007] F-NT2RM4000895//HYPOTHETICAL 53.5 KD PROTEIN IN PHO2-POL3 INTERGENIC REGION.//3.3e-09:80:46//SACCHAROMYCES CEREVISIAE (BAKER'S YEAST).//P43123

[3008] F-NT2RM4000950//HYPOTHETICAL PROTEIN MJ0572.//0.090:68:29//METHANOCOCCUS JANNASCHII.//Q57992

[3009] F-NT2RM4000971//KINESIN LIGHT CHAIN (KLC).//0.79:201:24//LOLIGO PEALEII (LONGFIN SQUID).//P46825

[3010] F-NT2RM4000979//MYOSIN REGULATORY LIGHT CHAIN 2, NONSARCOMERIC (MYOSIN RLC).//1.2e-07:25:96//HOMO SAPIENS (HUMAN).//P19105

[3011] F-NT2RM4000996//ZINC FINGER PROTEIN 37 (ZFP-37) (MALE GERM CELL SPECIFIC ZINC FINGER PROTEIN).//1.4e-56:253:46//MUS MUSCULUS (MOUSE).//P17141

[3012] F-NT2RM4001002

[3013] F-NT2RM4001016//GAG POLYPROTEIN [CONTAINS: CORE PROTEIN P15; INNER COAT PROTEIN P12; CORE SHELL PROTEIN P30].//0.25:101:31//FBR MURINE OSTEOSARCOMA VIRUS.//P29175

[3014] F-NT2RM4001032//CUTICLE COLLAGEN 2.//2.6e-07:130:39//CAENORHABDITIS ELEGANS.//P17656

[3015] F-NT2RM4001047//MO25 PROTEIN.//5.6e-107:252:80//MUS MUSCULUS (MOUSE).//Q06138

[3016] F-NT2RM4001054//PROTEIN TRANSPORT PROTEIN SEC61 ALPHA SUBUNIT.//9.0e-109:209:94//CANIS FAMILIARIS (DOG).//P38377

[3017] F-NT2RM4001084//HYPOTHETICAL TRANSCRIPTIONAL REGULATOR IN UXUR-IADA INTERGENIC REGION.//0.57:95:30//ESCHERICHIA COLI.//P39376

[3018] F-NT2RM4001092//HYPOTHETICAL 127.4 KD PROTEIN F07F6.4 IN CHROMOSOME III.//2.5e-47:231:47//CAENORHABDITIS ELEGANS.//Q09531

[3019] F-NT2RM4001116//HYPOTHETICAL 216.3 KD PROTEIN R06F6.8 IN CHROMOSOME II.//1.3e-08:243:23//CAENORHABDITIS ELEGANS.//Q09417

[3020] F-NT2RM4001140//HOMEOBOX PROTEIN MSH-D.//7.1e-13:103:38//BRACHYDANIO RERIO (ZEBRAFISH) (ZEBRA DANIO).//Q01704

[3021] F-NT2RM4001151//SYNAPSINS IA AND IB (BRAIN PROTEIN 4.1).//0.26:96:34//HOMO SAPIENS (HUMAN).//P17600

[3022] F-NT2RM4001155//ADRENAL MEDULLA 50 KD PROTEIN.//3.6e-103:201:91//BOS TAURUS (BOVINE).//Q27969

[3023] F-NT2RM4001160//GLUTATHIONE S-TRANSFERASE (EC 2.5.1.18) (CLASS-PHI) (FRAGMENTS).//1.0:33:36//BRASSICA OLERACEA (CAULIFLOWER).//P48438

[3024] F-NT2RM4001187//PREPROTEIN TRANSLOCASE SECA SUBUNIT.//0.44:158:27//MYCOPLASMA GENITALIUM.//P47318

[3025] F-NT2RM4001191//LONG NEUROTOXIN 2 (TOXIN C).//0.99:44:43//ASTROTIA STOKESI (STOKES'S SEA SNAKE) (DISTEIRA STOKESI).//P01381

[3026] F-NT2RM4001200//ZINC FINGER PROTEIN 135.//2.2e-82:245:59//HOMO SAPIENS (HUMAN).//P52742

[3027] F-NT2RM4001203//HYPOTHETICAL 57.5 KD PROTEIN IN VMA7-RPS25A INTERGENIC REGION.//0.028:94:40//SACCHAROMYCES CEREVISIAE (BAKER'S YEAST).//P53214

[3028] F-NT2RM4001204//SPLICEOSOME ASSOCIATED PROTEIN 62 (SAP 62) (SF3A66).//0.0096:182:34//HOMO SAPIENS (HUMAN).//Q15428

[3029] F-NT2RM4001217//RING CANAL PROTEIN (KELCH PROTEIN).//2.1e-21:221:29//DROSOPHILA MELANOGASTER (FRUIT FLY).//Q04652

[3030] F-NT2RM4001256//CBP3 PROTEIN PRECURSOR.//0.30:55:32//SACCHAROMYCES CEREVISIAE (BAKER'S YEAST).//P21560

[3031] F-NT2RM4001258//HYPOTHETICAL 35.5 KD PROTEIN IN TRANSPOSON TN4556.//0.00031:132:39//STREPTOMYCES FRADIAE.//P20186

[3032] F-NT2RM4001309//SALIVARY PROLINE-RICH PROTEIN PRECURSOR (CLONE CP7) [CONTAINS: BASIC PEPTIDE P-F] (FRAGMENT).//0.048:132:28//HOMO SAPIENS (HUMAN).//P02812

[3033] F-NT2RM4001313//PHOSPHATIDYLINOSITOL 3-KINASE VPS34-LIKE (EC 2.7.1.137) (PI3-KINASE) (PTDINS-3-KINASE) (PI3K).//2.6e-37:124:65//DICTYOSTELIUM DISCOIDEUM (SLIME MOLD).//P54676

[3034] F-NT2RM4001316//ACYL-COA DEHYDROGENASE, MEDIUM-CHAIN SPECIFIC PRECURSOR (EC 1.3.99.3) (MCAD).//1.7e-10:185:30//RATTUS NORVEGICUS (RAT).//P08503

[3035] F-NT2RM4001320//PUTATIVE RHO/RAC GUANINE NUCLEOTIDE EXCHANGE FACTOR (RHO/RAC GEF) (FACIOGENITAL DYSPLASIA PROTEIN HOMOLOG).//1.5e-08:197:26//MUS MUSCULUS (MOUSE).//P52734

[3036] F-NT2RM4001340//UTR4 PROTEIN (UNKNOWN TRANSCRIPT 4 PROTEIN).//7.7e-14:82:36//SACCHAROMYCES CEREVISIAE (BAKER'S YEAST).//P32626

[3037] F-NT2RM4001344//HYPOTHETICAL GTP-BINDING PROTEIN IN POP2-HOL1 INTERGENIC REGION.//3.3e-16:128:35//SACCHAROMYCES CEREVISIAE (BAKER'S YEAST).//P53742

[3038] F-NT2RM4001347//HYPOTHETICAL 76.9 KD PROTEIN IN RPM2-TUB1 INTERGENIC REGION.//0.067:111:33//SACCHAROMYCES CEREVISIAE (BAKER'S YEAST).//Q04511

[3039] F-NT2RM4001371

[3040] F-NT2RM4001382//HISTIDINE-RICH GLYCOPROTEIN PRECURSOR.//1.0e-08:82:39//PLASMODIUM LOPHURAE.//P04929

[3041] F-NT2RM4001384

[3042] F-NT2RM4001410//A-AGGLUTININ ATTACHMENT SUBUNIT PRECURSOR.//2.1e-08:185:31//SACCHAROMYCES CEREVISIAE (BAKER'S YEAST).//P32323

[3043] F-NT2RM4001411//EARLY NODULIN 20 PRECURSOR (N-20).//5.3e-05:105:38//MEDICAGO TRUNCATULA (BARREL MEDIC).//P93329

[3044] F-NT2RM4001412//GTPASE-ACTIVATING PROTEIN (GAP) (RAS P21 PROTEIN ACTIVATOR) (P120GAP) (RASGAP).//6.2e-17:109:41//RATTUS NORVEGICUS (RAT).//P50904

[3045] F-NT2RM4001414//ZINC FINGER PROTEIN 177.//8.3e-06:54:50//HOMO SAPIENS (HUMAN).//Q13360

[3046] F-NT2RM4001437//!!!! ALU SUBFAMILY SC WARNING ENTRY !!!!//2.1e-24:87:65//HOMO SAPIENS (HUMAN).//P39192

[3047] F-NT2RM4001444//PROBABLE ISOLEUCYL-TRNA SYNTHETASE (EC 6.1.1.5) (ISOLEUCINE-TRNA LIGASE) (ILERS) (FRAGMENT).//2.6e-45:197:47//CIONA INTESTINALIS.//Q94425

[3048] F-NT2RM4001454//HYPOTHETICAL PROTEIN KIAA0041 (FRAGMENT).//0.0060:95:29//HOMO SAPIENS (HUMAN).//Q15057

[3049] F-NT2RM4001455//PROBABLE E5B PROTEIN.//0.41:44:36//HUMAN PAPILLOMAVIRUS TYPE 6B.//P06461

[3050] F-NT2RM4001483//ZINC FINGER PROTEIN 136.//1.7e-28:85:64//HOMO SAPIENS (HUMAN).//P52737

[3051] F-NT2RM4001489//PTB-ASSOCIATED SPLICING FACTOR (PSF).//0.086:111:34//HOMO SAPIENS (HUMAN).//P23246

[3052] F-NT2RM4001519//ACID UREASE ALPHA SUBUNIT (EC 3.5.1.5) (UREA AMIDOHYDROLASE).//0.82:51:47//LACTOBACILLUS FERMENTUM.//P26929

[3053] F-NT2RM4001522//TROPOMYOSIN.//0.030:117:23//SCHIZOSACCHAROMYCES POMBE (FISSION YEAST).//Q02088

[3054] F-NT2RM4001557

[3055] F-NT2RM4001565//HYPOTHETICAL 44.3 KD PROTEIN C1 F7.07C IN CHROMOSOME I.//0.99:42:40//SCHIZOSACCHAROMYCES POMBE (FISSION YEAST).//Q09919

[3056] F-NT2RM4001566//GLUCOAMYLASE S1/S2 PRECURSOR (EC 3.2.1.3) (GLUCAN 1,4-ALPHA-GLUCOSIDASE) (1,4-ALPHA-D-GLUCAN GLUCOHYDROLASE).//0.054:190:23//SACCHAROMYCES CEREVISIAE (BAKER'S YEAST).//P08640

[3057] F-NT2RM4001569//GUANINE NUCLEOTIDE-BINDING PROTEIN BETA SUBUNIT-LIKE PROTEIN (ACTIVATED PROTEIN KINASE C RECEPTOR HOMOLOG).//0.72:64:31//TRYPANOSOMA BRUCEI BRUCEI.//Q94775

[3058] F-NT2RM4001582

[3059] F-NT2RM4001592//DNA REPAIR PROTEIN RAD9.//0.00037:198:31//SACCHAROMYCES CEREVISIAE (BAKER'S YEAST).//P14737

[3060] F-NT2RM4001594//IMMEDIATE-EARLY PROTEIN IE180.//1.9e-05:147:34//PSEUDORABIES VIRUS (STRAIN KAPLAN) (PRV).//P33479

[3061] F-NT2RM4001597//THIOL:DISULFIDE INTERCHANGE PROTEIN TLPA (CYTOCHROME C BIOGENESIS PROTEIN TLPA).//5.7e-06:122:29//BRADYRHIZOBIUM JAPONICUM.//P43221

[3062] F-NT2RM4001605//NUCLEAR PORE COMPLEX PROTEIN NUP 155 (NUCLEOPORIN NUP 155) (155 KD NUCLEOPORIN) (P140).//1.7e-128:249:96//RATTUS NORVEGICUS (RAT).//P37199

[3063] F-NT2RM4001611//SIS2 PROTEIN (HALOTOLERANCE PROTEIN HAL3).//1.5e-35:128:47//SACCHAROMYCES CEREVISIAE (BAKER'S YEAST).//P36024

[3064] F-NT2RM4001629//MAGUK P55 SUBFAMILY MEMBER 3 (MPP3 PROTEIN) (DISCS, LARGE HOMOLOG 3).//5.8e-42:254:37//HOMO SAPIENS (HUMAN).//Q13368

[3065] F-NT2RM4001650//HOMEOBOX PROTEIN HOX-A4 (CHOX-1.4).//0.62:19:57//GALLUS GALLUS (CHICKEN).//P17277

[3066] F-NT2RM4001662//PROTEIN KINASE C, ALPHA TYPE (EC 2.7.1.-) (PKC-ALPHA).//0.29:90:32//HOMO SAPIENS (HUMAN).//P17252

[3067] F-NT2RM4001666//HYPOTHETICAL 48.6 KD PROTEIN IN ALPA-GABP INTERGENIC REGION.//1.1e-31:137:44//ESCHERICHIA COLI.//P37339

[3068] F-NT2RM4001682//PROBABLE 60S RIBOSOMAL PROTEIN L22.//0.98:55:29//CAENORHABDITIS ELEGANS.//P52819

[3069] F-NT2RM4001710//HYPOTHETICAL PROTEIN KIAA0039 (FRAGMENT).//0.56:113:28//HOMO SAPIENS (HUMAN).//Q15054

[3070] F-NT2RM4001714//SEPTIN 2 HOMOLOG (FRAGMENT).//1.4e-108:255:77//HOMO SAPIENS (HUMAN).//Q14141

[3071] F-NT2RM4001715//HYPOTHETICAL PROTEIN C19G 10.16 IN CHROMOSOME I (FRAGMENT).//2.1e-36:148:38//SCHIZOSACCHAROMYCES POMBE (FISSION YEAST).//Q10342

[3072] F-NT2RM4001731//HYPOTHETICAL 54.9 KD PROTEIN C02F5.7 IN CHROMOSOME III.//1.1e-05:90:33//CAENORHABDITIS ELEGANS.//P34284

[3073] F-NT2RM4001741//TALIN.//1.1e-106:208:99//MUS MUSCULUS (MOUSE).//P26039

[3074] F-NT2RM4001746//EBNA-1 NUCLEAR PROTEIN.//1.6e-09:155:38//EPSTEIN-BARR VIRUS (STRAIN B95-8) (HUMAN HERPESVIRUS 4).//P03211

[3075] F-NT2RM4001754//COLLAGEN ALPHA 5(IV) CHAIN PRECURSOR.//0.93:158:33//HOMO SAPIENS (HUMAN).//P29400

[3076] F-NT2RM4001758//PUTATIVE SERINE/THREONINE-PROTEIN KINASE P78 (EC 2.7.1.-).//5.1e-113:277:79//HOMO SAPIENS (HUMAN).//P27448

[3077] F-NT2RM4001776//MYOSIN I ALPHA (MMI-ALPHA).//2.2e-73:262:54//MUS MUSCULUS (MOUSE).//P46735

[3078] F-NT2RM4001783//ZINC FINGER PROTEIN HRX (ALL-1) (FRAGMENT).//5.3e-26:169:39//MUS MUSCULUS (MOUSE).//P55200

[3079] F-NT2RM4001810//MALE SPECIFIC SPERM PROTEIN MST84 DB.//2.3e-05:68:42//DROSOPHILA MELANOGASTER (FRUIT FLY).//Q01643

[3080] F-NT2RM4001813//RHODOCETIN ALPHA SUBUNIT.//2.3e-05:115:34//AGKISTRODON RHODOSTOMA (MALAYAN PIT VIPER) (CALLOSELASMA RHODOSTOMA).//P81397

[3081] F-NT2RM4001819//CELL SURFACE GLYCOPROTEIN EMR1 PRECURSOR (EMR1 HORMONE RECEPTOR) (CELL SURFACE GLYCOPROTEIN F4/80).//1.7e-06:159:25//MUS MUSCULUS (MOUSE).//Q61549

[3082] F-NT2RM4001823//ZINC FINGER PROTEIN ZIC1 (ZINC FINGER PROTEIN OF THE CEREBELLUM 1).//2.6e-18:114:40//MUS MUSCULUS (MOUSE).//P46684

[3083] F-NT2RM4001828//ZINC FINGER PROTEIN 84 (ZINC FINGER PROTEIN HPF2).//4.0e-81:253:59//HOMO SAPIENS (HUMAN).//P51523

[3084] F-NT2RM4001836//SPIDROIN 2 (DRAGLINE SILK FIBROIN 2) (FRAGMENT).//0.21:176:30//NEPHILA CLAVIPES (ORB SPIDER).//P46804

[3085] F-NT2RM4001841//PROLINE-RICH PEPTIDE P-B.//0.046:27:40//HOMO SAPIENS (HUMAN).//P02814

[3086] F-NT2RM4001842//HYPOTHETICAL 7.0 KD PROTEIN B03B8.1 IN CHROMOSOME III.//0.98:35:42//CAENORHABDITIS ELEGANS.//Q11104

[3087] F-NT2RM4001856//HYPOTHETICAL 75.2 KD PROTEIN IN ACSI-GCV3 INTERGENIC REGION.//2.3e-37:242:37//SACCHAROMYCES CEREVISIAE (BAKER'S YEAST).//P39722

[3088] F-NT2RM4001858//T-BOX PROTEIN VEGT (T-BOX PROTEIN BRAT) (T-BOX PROTEIN ANTIPODEAN).//1.8e-23:78:64//XENOPUS LAEVIS (AFRICAN CLAWED FROG).//P87377

[3089] F-NT2RM4001865//NEURONAL CALCIUM SENSOR 2 (NCS-2).//0.012:83:28//CAENORHABDITIS ELEGANS.//P36609

[3090] F-NT2RM4001876//HYPOTHETICAL 118.4 KD PROTEIN IN BAT2-DAL5 INTERGENIC REGION PRECURSOR.//3.8e-10:242:32//SACCHAROMYCES CEREVISIAE (BAKER'S YEAST).//P47179

[3091] F-NT2RM4001880//EC PROTEIN HOMOLOG.//0.22:59:32//ARABIDOPSIS THALIANA (MOUSE-EAR CRESS).//P93746

[3092] F-NT2RM4001905//60S RIBOSOMAL PROTEIN L40 (CEP52).//0.57:20:60//HOMO SAPIENS (HUMAN), RATTUS NORVEGICUS (RAT), AND GALLUS GALLUS (CHICKEN).//P14793

[3093] F-NT2RM4001922

[3094] F-NT2RM4001930//PUTATIVE GLUCOSYLTRANSFERASE C08B11.8 (EC 2.4.1.-).//5.5e-45:167:53//CAENORHABDITIS ELEGANS.//Q09226

[3095] F-NT2RM4001938//RTOA PROTEIN (RATIO-A).//0.0036:120:32//DICTYOSTELIUM DISCOIDEUM (SLIME MOLD).//P54681

[3096] F-NT2RM4001940//IROQUOIS-CLASS HOMEODOMAIN PROTEIN IRX-1 (FRAGMENT).//0.32:31:48//HOMO SAPIENS (HUMAN).//P78415

[3097] F-NT2RM4001953//!!!! ALU SUBFAMILY SC WARNING ENTRY !!!!//2.2e-43:56:85//HOMO SAPIENS (HUMAN).//P39192

[3098] F-NT2RM4001965//IG ALPHA-1 CHAIN C REGION.//0.56:73:34//GORILLA GORILLA GORILLA (LOWLAND GORILLA).//P20758

[3099] F-NT2RM4001969//SALIVARY PROLINE-RICH PROTEIN PRECURSOR (CLONES CP3, CP4 AND CP5) [CONTAINS: BASIC PEPTIDE IB-6; PEPTIDE P-H].//0.0016:140:27//HOMO SAPIENS (HUMAN).//P04280

[3100] F-NT2RM4001979//ZINC FINGER PROTEIN 84 (ZINC FINGER PROTEIN HPF2).//3.9e-21:103:51//HOMO SAPIENS (HUMAN).//P51523

[3101] F-NT2RM4001984//HYPOTHETICAL PROTEIN LAMBDA-SP5.//0.0034:50:40//MUS MUSCULUS (MOUSE).//P15974

[3102] F-NT2RM4001987//IRREGULAR CHIASM C-ROUGHEST PROTEIN PRECURSOR (IRREC PROTEIN).//6.9e-17:115:31//DROSOPHILA MELANOGASTER (FRUIT FLY).//Q08180

[3103] F-NT2RM4002013//HYPOTHETICAL 54.5 KD TRP-ASP REPEATS CONTAINING PROTEIN ZC302.2 IN CHROMOSOME V.//0.0062:117:28//CAENORHABDITIS ELEGANS.//Q23256

[3104] F-NT2RM4002018//SPORE COAT PROTEIN SP96.//4.3e-06:203:28//DICTYOSTELIUM DISCOIDEUM (SLIME MOLD).//P14328

[3105] F-NT2RM4002034//RHO-GAP HEMATOPOIETIC PROTEIN C1 (P115) (KIAA0131).//0.78:132:25//HOMO SAPIENS (HUMAN).//P98171

[3106] F-NT2RM4002044//VITELLOGENIN I PRECURSOR (MINOR VITELLOGENIN) [CONTAINS: LIPOVITELLIN I (LVI); PHOSVITIN (PV); LIPOVITELLIN II (LVII); YGP42].//0.062:201:24//GALLUS GALLUS (CHICKEN).//P87498

[3107] F-NT2RM4002054//DUPLICATE PROCYCLIN.//0.0079:44:52//TRYPANOSOMA BRUCEI BRUCEI.//P14044

[3108] F-NT2RM4002055//PUTATIVE Z PROTEIN.//0.82:39:30//OVIS ARIES (SHEEP).//P08105

[3109] F-NT2RM4002062//ASPARTYL-TRNA SYNTHETASE (EC 6.1.1.12) (ASPARTATE-TRNA LIGASE) (ASPRS).//7.0e-37:80:52//THERMUS AQUATICUS (SUBSP. THERMOPHILUS).//P36419

[3110] F-NT2RM4002063//SARCOSINE OXIDASE (EC 1.5.3.1).//2.2e-25:216:31//BACILLUS SP. (STRAIN NS-129).//P23342

[3111] F-NT2RM4002066//HYPOTHETICAL PROTEIN KIAA0192 (FRAGMENT).//1.1e-94:260:71//HOMO SAPIENS (HUMAN).//Q93074

[3112] F-NT2RM4002067//!!!! ALU SUBFAMILY J WARNING ENTRY !!!!//1.5e-15:51:70//HOMO SAPIENS (HUMAN).//P39188

[3113] F-NT2RM4002073//ELASTIN PRECURSOR (TROPOELASTIN).//4.9e-05:88:36//HOMO SAPIENS (HUMAN).//P15502

[3114] F-NT2RM4002075//RING CANAL PROTEIN (KELCH PROTEIN).//7.2e-43:220:41//DROSOPHILA MELANOGASTER (FRUIT FLY).//Q04652

[3115] F-NT2RM4002093//POLYPYRIMIDINE TRACT-BINDING PROTEIN (PTB) (HETEROGENEOUS NUCLEAR RIBONUCLEOPROTEIN I) (HNRNP I) (57 KD RNA-BINDING PROTEIN PPTB-1).//1.8e-93:255:72//HOMO SAPIENS (HUMAN).//P26599

[3116] F-NT2RM4002109//KINESIN-LIKE PROTEIN KIF4.//3.7e-101:260:78//MUS MUSCULUS (MOUSE).//P33174

[3117] F-NT2RM4002128//HYPOTHETICAL PROTEIN IN CYCB 3′REGION PRECURSOR (ORF2) (FRAGMENT).//0.91:49:32//PARACOCCUS DENITRIFICANS.//P29969

[3118] F-NT2RM4002140//GROUCHO PROTEIN (ENHANCER OF SPLIT M9/10).//0.36:104:22//DROSOPHILA MELANOGASTER (FRUIT FLY).//P16371

[3119] F-NT2RM4002145//SLIT PROTEIN PRECURSOR.//8.6e-13:127:33//DROSOPHILA MELANOGASTER (FRUIT FLY).//P24014

[3120] F-NT2RM4002146//MAGO NASHI PROTEIN.//7.9e-69:143:91//DROSOPHILA MELANOGASTER (FRUIT FLY).//P49028

[3121] F-NT2RM4002161//DUAL SPECIFICITY PROTEIN PHOSPHATASE (EC 3.1.3.48) (EC 3.1.3.16).//0.0062:99:26//CHLAMYDOMONAS EUGAMETOS.//Q39491

[3122] F-NT2RM4002174//MRP PROTEIN.//4.5e-50:183:55//ESCHERICHIA COLI.//P21590

[3123] F-NT2RM4002189//MUCIN 2 PRECURSOR (INTESTINAL MUCIN 2).//2.6e-14:233:29//HOMO SAPIENS (HUMAN).//Q02817

[3124] F-NT2RM4002194//TRANSMEMBRANE PROTEIN SEX PRECURSOR.//0.92:108:28//HOMO SAPIENS (HUMAN).//P51805

[3125] F-NT2RM4002205//ELONGATION FACTOR G, MITOCHONDRIAL PRECURSOR (MEF-G).//5.8e-39:122:72//RATTUS NORVEGICUS (RAT).//Q07803

[3126] F-NT2RM4002213//HYPOTHETICAL 88.4 KD PROTEIN B0464.7 IN CHROMOSOME III.//9.9e-27:110:43//CAENORHABDITIS ELEGANS.//Q03565

[3127] F-NT2RM4002226//GTPASE ACTIVATING PROTEIN ROTUND.//1.3e-21:147:41//DROSOPHILA MELANOGASTER (FRUIT FLY).//P40809

[3128] F-NT2RM4002251//PROTEIN EF-7 (FRAGMENT).//0.00082:45:42//MUS MUSCULUS (MOUSE).//P97805

[3129] F-NT2RM4002256//COLD-REGULATED PROTEIN 1 (FRAGMENT).//0.00015:114:42//HORDEUM VULGARE (BARLEY).//P23251

[3130] F-NT2RM4002266//CUTICLE COLLAGEN 2.//0.00013:142:33//CAENORHABDITIS ELEGANS.//P17656

[3131] F-NT2RM4002278//HYPOTHETICAL 22.2 KD PROTEIN IN NSR1-TIF4631 INTERGENIC REGION.//1.0:40:52//SACCHAROMYCES CEREVISIAE (BAKER'S YEAST).//P53288

[3132] F-NT2RM4002281

[3133] F-NT2RM4002287//GAR2 PROTEIN.//0.00055:225:23//SCHIZOSACCHAROMYCES POMBE (FISSION YEAST).//P41891

[3134] F-NT2RM4002294//HYPOTHETICAL PROTEIN KIAA0281 (HA6725).//1.1e-60:152:75//HOMO SAPIENS (HUMAN).//Q92556

[3135] F-NT2RM4002301//GENERAL STRESS PROTEIN CTC (FRAGMENT).//0.56:43:39//BACILLUS CALDOLYTICUS.//P42832

[3136] F-NT2RM4002323//NONHISTONE CHROMOSOMAL PROTEIN HMG-17.//0.0080:73:35//BOS TAURUS (BOVINE).//P02313

[3137] F-NT2RM4002339//METALLOTHIONEIN 10-III (MT-10-III).//0.67:34:38//MYTILUS EDULIS (BLUE MUSSEL).//P80248

[3138] F-NT2RM4002344//METALLOTHIONEIN-I (MT-I).//0.84:41:31//MUS MUSCULUS (MOUSE).//P02802

[3139] F-NT2RM4002373//GLUTENIN, HIGH MOLECULAR WEIGHT SUBUNIT DY10 PRECURSOR.//0.0019:190:28//TRITICUM AESTIVUM (WHEAT).//P10387

[3140] F-NT2RM4002374//5E5 ANTIGEN.//0.0059:170:32//RATTUS NORVEGICUS (RAT).//Q63003

[3141] F-NT2RM4002383//!!!! ALU SUBFAMILY SP WARNING ENTRY !!!!//0.13:17:88//HOMO SAPIENS (HUMAN).//P39193

[3142] F-NT2RM4002390

[3143] F-NT2RM4002398//HNRNP ARGININE N-METHYLTRANSFERASE (EC 2.1.1.-) (ODP1 PROTEIN).//0.034:110:27//SACCHAROMYCES CEREVISIAE (BAKER'S YEAST).//P38074

[3144] F-NT2RM4002409//ACETYL-COENZYME A SYNTHETASE (EC 6.2.1.1) (ACETATE-COA LIGASE) (ACYL- ACTIVATING ENZYME).//4.0e-20:179:31//METHANOTHRIX SOEHNGENII.//P27095

[3145] F-NT2RM4002438//!!!! ALU SUBFAMILY SQ WARNING ENTRY !!!!//1.7e-15:41:95//HOMO SAPIENS (HUMAN).//P39194

[3146] F-NT2RM4002446//CRYPTDIN-RELATED PROTEIN 4C-1 PRECURSOR (CRS4C).//0.0058:24:50//MUS MUSCULUS (MOUSE).//P17534

[3147] F-NT2RM4002452//METALLOTHIONEIN 10-II (MT-10-II).//0.83:48:37//MYTILUS EDULIS (BLUE MUSSEL).//P80247

[3148] F-NT2RM4002457//!!!! ALU SUBFAMILY SC WARNING ENTRY !!!!//4.9e-07:52:63//HOMO SAPIENS (HUMAN).//P39192

[3149] F-NT2RM4002460//C-HORDEIN (CLONE PC-919) (FRAGMENT).//0.92:43:30//HORDEUM VULGARE (BARLEY).//P17992

[3150] F-NT2RM4002479//RNA HELICASE-LIKE PROTEIN DB10.//1.7e-28:200:41//NICOTIANA SYLVESTRIS (WOOD TOBACCO).//P46942

[3151] F-NT2RM4002482//HYPOTHETICAL 65.9 KD PROTEIN YPRO65W.//8.8e-26:123:49//SACCHAROMYCES CEREVISIAE (BAKER'S YEAST).//Q12514

[3152] F-NT2RM4002493//LARVAL CUTICLE PROTEIN I PRECURSOR.//0.17:126:27//DROSOPHILA MIRANDA (FRUIT FLY).//P91627

[3153] F-NT2RM4002499//!!!! ALU SUBFAMILY SQ WARNING ENTRY !!!!//9.4e-34:92:80//HOMO SAPIENS (HUMAN).//P39194

[3154] F-NT2RM4002504//!!!! ALU SUBFAMILY SB WARNING ENTRY !!!!//3.4e-19:55:83//HOMO SAPIENS (HUMAN).//P39189

[3155] F-NT2RM4002527//WD-40 REPEAT PROTEIN MS12.//3.0e-07:193:27//ARABIDOPSIS THALIANA (MOUSE-EAR CRESS).//O22468

[3156] F-NT2RM4002532//AEROLYSIN REGULATORY PROTEIN.//0.97:19:47//AEROMONAS SOBRIA.//P09165

[3157] F-NT2RM4002534//MITOCHONDRIAL 60S RIBOSOMAL PROTEIN L32 PRECURSOR (YML32).//0.76:86:22//SACCHAROMYCES CEREVISIAE (BAKER'S YEAST).//P25348

[3158] F-NT2RM4002558//LONG-CHAIN FATTY ACID TRANSPORT PROTEIN (FATP).//4.2e-55:204:50//MUS MUSCULUS (MOUSE).//Q60714

[3159] F-NT2RM4002565//CHYMOTRYPSIN/ELASTASE ISOINHIBITORS 2 TO 5.//1.0:16:62//ASCARIS SUUM (PIG ROUNDWORM) (ASCARIS LUMBRICOIDES).//P07852

[3160] F-NT2RM4002567//HYPOTHETICAL 74.0 KD PROTEIN IN CAJ1-HOM3 INTERGENIC REGION.//2.7e-10:184:29//SACCHAROMYCES CEREVISIAE (BAKER'S YEAST).//P40032

[3161] F-NT2RM4002571//POLYPEPTIDE N-ACETYLGALACTOSAMINYLTRANSFERASE (EC 2.4.1.41) (PROTEIN- UDP ACETYLGALACTOSAMINYLTRANSFERASE) (UDP-GALNAC:POLYPEPTIDE, N- ACETYLGALACTOSAMINYLTRANSFERASE) (GALNAC-T1).//2.4e-25:124:47//HOMO SAPIENS (HUMAN).//Q10472

[3162] F-NT2RM4002593//HYPOTHETICAL 9.1 KD PROTEIN IN TETB-EXOA INTERGENIC REGION.//0.95:36:38//BACILLUS SUBTILIS.//P37509

[3163] F-NT2RM4002594//MSP1 PROTEIN HOMOLOG.//9.0e-68:227:60//CAENORHABDITIS ELEGANS.//P54815

[3164] F-NT2RM4002623//ASPARTYL-TRNA SYNTHETASE (EC 6.1.1.12) (ASPARTATE-TRNA LIGASE) (ASPRS).//3.3e-54:243:47//SYNECHOCYSTIS SP. (STRAIN PCC 6803).//P73851

[3165] F-NT2RP1000018//SUPPRESSOR PROTEIN SRP40.//0.0023:131:25//SACCHAROMYCES CEREVISIAE (BAKER'S YEAST).//P32583

[3166] F-NT2RP1000035//RING CANAL PROTEIN (KELCH PROTEIN).//1.0e-06:63:34//DROSOPHILA MELANOGASTER (FRUIT FLY).//Q04652

[3167] F-NT2RP1000040//LETHAL NEUROTOXIN TX 1./0.69:21:47//PHONEUTRIA NIGRIVENTER (BRAZILIAN ARMED SPIDER).//P17727

[3168] F-NT2RP1000063//HYPOTHETICAL 25.1 KD PROTEIN IN SMC3-MRPL8 INTERGENIC REGION.//3.8e-14:130:30//SACCHAROMYCES CEREVISIAE (BAKER'S YEAST).//P40359

[3169] F-NT2RP1000086//HYPOTHETICAL 9.4 KD PROTEIN IN RNPA-THDF INTERGENIC REGION.//0.16:44:40//ESCHERICHIA COLI.//P22847

[3170] F-NT2RP1000101//45.8 KD PROTEIN IN SHM1-MRPL37 INTERGENIC REGION.//1.9e-06:74:32//SACCHAROMYCES CEREVISIAE (BAKER'S YEAST).//P38344

[3171] F-NT2RP1000111//COP1 REGULATORY PROTEIN (FUSCA PROTEIN FUS1).//2.7e-19:135:36//ARABIDOPSIS THALIANA (MOUSE-EAR CRESS).//P43254

[3172] F-NT2RP1000112//DUAL SPECIFICITY PROTEIN KINASE TTK (EC 2.7.1.-) (PYT).//1.2e-39:91:62//HOMO SAPIENS (HUMAN).//P33981

[3173] F-NT2RP1000124//ATP-DEPENDENT PROTEASE LA 2 (EC 3.4.21.53).//0.074:131:24//MYXOCOCCUS XANTHUS.//P36774

[3174] F-NT2RP1000130//HEPATOMA-DERIVED GROWTH FACTOR (HDGF).//1.5e-49:186:56//MUS MUSCULUS (MOUSE).//P51859

[3175] F-NT2RP1000163//METALLOTHIONEIN (MT).//0.98:41:34//PLEURONECTES PLATESSA (PLAICE).//P07216

[3176] F-NT2RP1000170//SALIVARY PROLINE-RICH PROTEIN PO (ALLELE K) [CONTAINS: PEPTIDE P-D] (FRAGMENT).//0.85:64:35//HOMO SAPIENS (HUMAN).//P10162

[3177] F-NT2RP1000174//IMMEDIATE-EARLY PROTEIN IE180.//0.00056:89:37//PSEUDORABIES VIRUS (STRAIN KAPLAN) (PRV).//P33479

[3178] F-NT2RP1000191//NIFU PROTEIN.//0.53:78:35//FRANKIA ALNI.//P46045

[3179] F-NT2RP1000202//ANKYRIN, BRAIN VARIANT 2 (ANKYRIN B) (ANKYRIN, NONERYTHROID) (FRAGMENT).//9.1e-21:148:39//HOMO SAPIENS (HUMAN).//Q01485

[3180] F-NT2RP1000243//HYPOTHETICAL PROTEIN MJ 1136.//1.4e-37:219:36//METHANOCOCCUS JANNASCHII.//Q58536

[3181] F-NT2RP1000259//HYPOTHETICAL PROTEIN TP0318.//0.18:25:44//TREPONEMA PALLIDUM.//O83338

[3182] F-NT2RP1000272//SPLICING FACTOR, ARGININE/SERINE-RICH 3 (PRE-MRNA SPLICING FACTOR SRP20) (X16 PROTEIN).//1.6e-18:133:36//HOMO SAPIENS (HUMAN), AND MUS MUSCULUS (MOUSE).//P23152

[3183] F-NT2RP1000324

[3184] F-NT2RP1000326//HYPOTHETICAL 29.8 KD PROTEIN ZC97.1 IN CHROMOSOME III.//1.0e-23:129:36//CAENORHABDITIS ELEGANS.//P34599

[3185] F-NT2RP1000333//ANTI-SILENCING PROTEIN 1.//2.5e-45:147:57//SACCHAROMYCES CEREVISIAE (BAKER'S YEAST).//P32447

[3186] F-NT2RP1000348//REDUCED VIABILITY UPON STARVATION PROTEIN 161.//4.8e-14:119:34//SACCHAROMYCES CEREVISIAE (BAKER'S YEAST).//P25343

[3187] F-NT2RP1000357//TRYPOMASTIGOTE DECAY-ACCELERATING FACTOR (T-DAF) (FRAGMENT).//1.0:43:32//TRYPANOSOMA CRUZI.//Q26327

[3188] F-NT2RP1000358//HYPOTHETICAL 84.4 KD PROTEIN IN RPC2/RET13′REGION.//7.9e-28:244:35//SACCHAROMYCES CEREVISIAE (BAKER'S YEAST).//P39744

[3189] F-NT2RP1000363//SKIN SECRETORY PROTEIN XP2 PRECURSOR (APEG PROTEIN).//2.2e-07:178:30//XENOPUS LAEVIS (AFRICAN CLAWED FROG).//P17437

[3190] F-NT2RP1000376//ANKYRIN R (ANKYRINS 2.1 AND 2.2) (ERYTHROCYTE ANKYRIN).//1H.Se-20:254:31//HOMO SAPIENS (HUMAN).//P16157

[3191] F-NT2RP1000409//CYTOCHROME C3 (CYTOCHROME C7) (C551.5).//1.0:34:26//DESULFUROMONAS ACETOXIDANS (CHLOROPSEUDOMONAS ETHYLICA).//P00137

[3192] F-NT2RP1000413//MEMBRANE-ASSOCIATED PROTEIN HEM-2 (NAP 1 PROTEIN).//3.7e-131:230:97//RATTUS NORVEGICUS (RAT).//P55161

[3193] F-NT2RP1000416//SALIVARY GLUE PROTEIN SGS-3 PRECURSOR.//0.83:54:40//DROSOPHILA SIMULANS (FRUIT FLY).//P13729

[3194] F-NT2RP1000418//HYPOTHETICAL 9.9 KD PROTEIN IN GCVT-SPOIIIAA INTERGENIC REGION.//0.24:91:35//BACILLUS SUBTILIS.//P49779

[3195] F-NT2RP1000439//HYPOTHETICAL 100.5 KD PROTEIN C1B9.04 IN CHROMOSOME I.//0.13:172:22//SCHIZOSACCHAROMYCES POMBE (FISSION YEAST).//Q10429

[3196] F-NT2RP1000443//QUINONE OXIDOREDUCTASE (EC 1.6.5.5) (NADPH:QUINONE REDUCTASE) (ZETA-CRYSTALLIN).//1.9e-08:167:24//HOMO SAPIENS (HUMAN).//Q08257

[3197] F-NT2RP1000460//NUCLEAR MOVEMENT PROTEIN NUDC.//1.0e-18:149:34//EMERICELLA NIDULANS (ASPERGILLUS NIDULANS).//P17624

[3198] F-NT2RP1000470//PUTATIVE ATP-DEPENDENT RNA HELICASE T26G 10.1 IN CHROMOSOME III.//1.3e-43:180:47//CAENORHABDITIS ELEGANS.//P34580

[3199] F-NT2RP1000478//TUBULIN BETA-6 CHAIN (CLASS-VI).//1.5e-45:85:63//GALLUS GALLUS (CHICKEN).//P09207

[3200] F-NT2RP1000481//HYPOTHETICAL 5.8 KD PROTEIN IN PUHA 5′REGION (ORF55).//0.083:21:47//RHODOBACTER CAPSULATUS (RHODOPSEUDOMONAS CAPSULATA).//P26159

[3201] F-NT2RP1000493//POSSIBLE DNA-REPAIR PROTEIN XP-E (POSSIBLE XERODERMA PIGMENTOSUM GROUP E PROTEIN) (UV-DAMAGED DNA-BINDING PROTEIN) (UV-DDB).//6.6e-11:139:31//CERCOPITHECUS AETHIOPS (GREEN MONKEY) (GRIVET).//P33194

[3202] F-NT2RP1000513//60S RIBOSOMAL PROTEIN L22.//0.017:92:30//DROSOPHILA MELANOGASTER (FRUIT FLY).//P50887

[3203] F-NT2RP1000522//UBIQUITIN CARBOXYL-TERMINAL HYDROLASE DUB-1 (EC 3.1.2.15) (UBIQUITIN THIOLESTERASE DUB-1) (UBIQUITIN-SPECIFIC PROCESSING PROTEASE DUB-1) (DEUBIQUITINATING ENZYME 1).//0.0055:86:36//MUS MUSCULUS (MOUSE).//Q61068

[3204] F-NT2RP1000547//COP-COATED VESICLE MEMBRANE PROTEIN P24 PRECURSOR (FRAGMENT).//1.2e-09:69:36//CRICETULUS GRISEUS (CHINESE HAMSTER).//P49020

[3205] F-NT2RP1000574//HOMEOBOX PROTEIN MEIS2 (MEIS1-RELATED PROTEIN 1).//6.0e-39:141:65//MUS MUSCULUS (MOUSE).//P97367

[3206] F-NT2RP1000577//PUTATIVE ATP-DEPENDENT RNA HELICASE YDL031W.//0.00016:48:45//SACCHAROMYCES CEREVISIAE (BAKER'S YEAST).//Q12389

[3207] F-NT2RP1000581//VON WILLEBRAND FACTOR PRECURSOR.//0.00017:61:50//HOMO SAPIENS (HUMAN).//P04275

[3208] F-NT2RP1000609//LINOLEOYL-COA DESATURASE (EC 1.14.99.25) (DELTA(6)-DESATURASE).//4.4e-07:128:31//SYNECHOCYSTIS SP. (STRAIN PCC 6803).//Q08871

[3209] F-NT2RP1000629//CLATHRIN COAT ASSEMBLY PROTEIN AP47 (CLATHRIN COAT ASSOCIATED PROTEIN AP47) (GOLGI ADAPTOR AP-147 KD PROTEIN) (HA147 KD SUBUNIT) (CLATHRIN ASSEMBLY PROTEIN ASSEMBLY PROTEIN COMPLEX I MEDIUM CHAIN).//4.2e-70:167:86//MUS MUSCULUS (MOUSE).//P35585

[3210] F-NT2RP1000630//HYPOTHETICAL 118.4 KD PROTEIN IN BAT2-DAL5 INTERGENIC REGION PRECURSOR.//0.0011:238:21//SACCHAROMYCES CEREVISIAE (BAKER'S YEAST).//P47179

[3211] F-NT2RP1000677//COLLAGEN ALPHA 1(XVI) CHAIN PRECURSOR.//0.99:71:33//HOMO SAPIENS (HUMAN).//Q07092

[3212] F-NT2RP1000688//!!!! ALU SUBFAMILY SP WARNING ENTRY !!!!//0.0024:19:94//HOMO SAPIENS (HUMAN).//P39193

[3213] F-NT2RP1000695//HYPOTHETICAL 83.8 KD PROTEIN C27F2.7 IN CHROMOSOME III.//2.2e-30:185:37//CAENORHABDITIS ELEGANS.//Q18262

[3214] F-NT2RP1000701//PHOSPHOLIPASE A-2-ACTIVATING PROTEIN (PLAP).//3.2e-65:128:93//RATTUS NORVEGICUS (RAT).//P54319

[3215] F-NT2RP1000721//TRANSCRIPTION INITIATION FACTOR TFIID 135 KD SUBUNIT (TAFII-135) (TAFII 135) (TAFII-130) (TAFII 130).//2.3e-06:139:34//HOMO SAPIENS (HUMAN).//O00268

[3216] F-NT2RP1000730//MYOSIN LIGHT CHAIN 1, SLOW-TWITCH MUSCLE B/VENTRICULAR ISOFORM (FRAGMENT).//0.89:40:40//MUS MUSCULUS (MOUSE).//P09542

[3217] F-NT2RP1000733//METALLOTHIONEIN-LIKE PROTEIN CRS5.//0.024:24:45//SACCHAROMYCES CEREVISIAE (BAKER'S YEAST).//P41902

[3218] F-NT2RP1000738//SALIVARY ACIDIC PROLINE-RICH PHOSPHOPROTEIN 1/2 PRECURSOR (PRP-1/PRP-3) (PRP-2/PRP-4) (PIF-F/PIF-S) (PROTEIN A/PROTEIN C) [CONTAINS: PEPTIDE P-C].//0.040:82:36//HOMO SAPIENS (HUMAN).//P02810

[3219] F-NT2RP1000746//HYPOTHETICAL 27.1 KD PROTEIN UFD4-CAP1 INTERGENIC REGION.//2.0e-30:170:37//SACCHAROMYCES CEREVISIAE (BAKER'S YEAST).//P33201

[3220] F-NT2RP1000767//PSEUDOMONAPEPSIN PRECURSOR (EC 3.4.23.37) (PEPSTATIN-INSENSITIVE CARBOXYL PROTEINASE).//0.99:75:34//PSEUDOMONAS SP. (STRAIN 101).//P42790

[3221] F-NT2RP1000782//CELL SURFACE GLYCOPROTEIN A15 (T-CELL ACUTE LYMPHOBLASTIC LEUKEMIA ASSOCIATED ANTIGEN 1) (TALLA-1) (MEMBRANE COMPONENT, X CHROMOSOME, SURFACE MARKER 1).//2.3e-23:159:35//HOMO SAPIENS (HUMAN).//P41732

[3222] F-NT2RP1000796//CORNIFIN (SMALL PROLINE-RICH PROTEIN I) (SPR-I) (SMALL PROLINE-RICH SQUAMOUS CELL MARKER) (SPRP).//0.00018:79:32//SUS SCROFA (PIG).//P35323

[3223] F-NT2RP1000825//GTPASE-ACTIVATING PROTEIN RHOGAP (RHO-RELATED SMALL GTPASE PROTEIN ACTIVATOR) (CDC42 GTPASE-ACTIVATING PROTEIN) (P50-RHOGAP).//3.1e-37:89:64//HOMO SAPIENS (HUMAN).//Q07960

[3224] F-NT2RP1000833//SMALL PROLINE RICH PROTEIN II (SPR-II) (CLONE 930).//0.32:29:48//HOMO SAPIENS (HUMAN).//P22531

[3225] F-NT2RP1000834//2-ARYLPROPIONYL-COA EPIMERASE (EC 5.-.-.-).//6.4e-67:202:68//RATTUS NORVEGICUS (RAT).//P70473

[3226] F-NT2RP1000836//HYPOTHETICAL 7.3 KD PROTEIN IN 100 KD PROTEIN REGION.//1.0:35:54//HUMAN ADENOVIRUS TYPE 41.//P23691

[3227] F-NT2RP1000846//SMALL PROLINE-RICH PROTEIN 2-1//0.013:35:48//HOMO SAPIENS (HUMAN).//P35326

[3228] F-NT2RP1000851//PERIOD CLOCK PROTEIN (FRAGMENT).//0.082:28:57//DROSOPHILA SALTANS (FRUIT FLY).//Q04536

[3229] F-NT2RP1000856//PLATELET-ENDOTHELIAL TETRASPAN ANTIGEN 3 (PETA-3) (GP27) (MEMBRANE GLYCOPROTEIN SFA-1) (CD151 ANTIGEN).//2.5e-26:190:30//MUS MUSCULUS (MOUSE).//O35566

[3230] F-NT2RP1000860//POTENTIAL TRANSCRIPTIONAL ADAPTOR.//0.13:86:36//SACCHAROMYCES CEREVISIAE (BAKER'S YEAST).//Q02336

[3231] F-NT2RP1000902//HYPOTHETICAL 127.4 KD PROTEIN F07F6.4 IN CHROMOSOME III.//7.6e-11:200:35//CAENORHABDITIS ELEGANS.//Q09531

[3232] F-NT2RP1000915//HYPOTHETICAL GTP-BINDING PROTEIN IN PMI40-PAC2 INTERGENIC REGION.//1.4e-06:88:35//SACCHAROMYCES CEREVISIAE (BAKER'S YEAST).//P40010

[3233] F-NT2RP1000916//SUPPRESSOR PROTEIN SRP40.//0.40:90:35//SACCHAROMYCES CEREVISIAE (BAKER'S YEAST).//P32583

[3234] F-NT2RP1000943//MUCIN 2 PRECURSOR (INTESTINAL MUCIN 2).//0.099:75:34//HOMO SAPIENS (HUMAN).//Q02817

[3235] F-NT2RP1000944//HYPOTHETICAL 29.3 KD PROTEIN (ORF92).//7.6e-06:65:41//ORGYIA PSEUDOTSUGATA MULTICAPSID POLYHEDROSIS VIRUS (OPMNPV).//O10341

[3236] F-NT2RP1000947//UBIQUITIN-CONJUGATING ENZYME E2-17 KD 2 (EC 6.3.2.19) (UBIQUITIN-PROTEIN LIGASE) (UBIQUITIN CARRIER PROTEIN) (E2(17)KB 2).//3.6e-12:27:77//HOMO SAPIENS (HUMAN), MUS MUSCULUS (MOUSE), RATTUS NORVEGICUS (RAT), AND XENOPUS LAEVIS (AFRICAN CLAWED FROG).//P51669

[3237] F-NT2RP1000954//RING CANAL PROTEIN (KELCH PROTEIN).//2.8e-15:169:28//DROSOPHILA MELANOGASTER (FRUIT FLY).//Q04652

[3238] F-NT2RP1000958//HYPOTHETICAL GTP-BINDING PROTEIN IN PMI40-PAC2 INTERGENIC REGION.//4.2e-16:162:32//SACCHAROMYCES CEREVISIAE (BAKER'S YEAST).//P40010

[3239] F-NT2RP1000959//CORNIFIN A (SMALL PROLINE-RICH PROTEIN IA) (SPR-IA) (SPRK).//0.0031:34:44//HOMO SAPIENS (HUMAN).//P35321

[3240] F-NT2RP1000966//NUCLEOLIN (PROTEIN C23).//1.5e-52:110:95//HOMO SAPIENS (HUMAN).//P19338

[3241] F-NT2RP1000980//LIGHT-HARVESTING PROTEIN B-015, ALPHA CHAIN PRECURSOR (ANTENNA PIGMENT PROTEIN, ALPHA CHAIN).//0.87:37:45//RHODOPSEUDOMONAS VIRIDIS.//P04123

[3242] F-NT2RP1000988

[3243] F-NT2RP1001011//PROTEIN P19.//0.96:30:50//BACTERIOPHAGE PRD1.//P17638

[3244] F-NT2RP10013//DNA-BINDING PROTEIN 65 (PROTEIN GP65).//1.0:20:45//BACTERIOPHAGE T4.//P16012

[3245] F-NT2RP1001014

[3246] F-NT2RP1001033//TUBULIN GAMMA CHAIN.//2.5e-16:112:42//SCHIZOSACCHAROMYCES POMBE (FISSION YEAST).//P25295

[3247] F-NT2RP1001073//HYPOTHETICAL 10.4 KD PROTEIN IN FTR1-SPT15 INTERGENIC REGION.//7.6e-16:82:51//SACCHAROMYCES CEREVISIAE (BAKER'S YEAST).//P40089

[3248] F-NT2RP1001079//SARCOSINE OXIDASE (EC 1.5.3.1).//4.8e-15:95:40//ARTHROBACTER SP. (STRAIN TE1826).//P40873

[3249] F-NT2RPIO01080//PROBABLE ATP-DEPENDENT RNA HELICASE DBP9.//2.4e-29:126:46//SACCHAROMYCES CEREVISIAE (BAKER'S YEAST).//Q06218

[3250] F-NT2RP1001113//SMALL PROLINE-RICH PROTEIN 2-1.//0.49:38:39//HOMO SAPIENS (HUMAN).//P35326

[3251] F-NT2RP1001173//RHOMBOTIN-1 (CYSTEINE RICH PROTEIN TTG-1) (T-CELL TRANSLOCATION PROTEIN 1) (LIM-ONLY PROTEIN 1).//0.99:54:37//HOMO SAPIENS (HUMAN).//P25800

[3252] F-NT2RP1001177//HISTONE MACR0-H2A.1.//1.6e-29:85:76//RATTUS NORVEGICUS (RAT).//Q02874

[3253] F-NT2RP1001185

[3254] F-NT2RP1001199//NEUROTOXIN I.//1.0:23:47//CENTRUROIDES SCULPTURATUS (BARK SCORPION).//P01491

[3255] F-NT2RP1001247//TRANSFORMING GROWTH FACTOR BETA 4 PRECURSOR (TGF-BETA 4) (ENDOMETRIAL BLEEDING-ASSOCIATED FACTOR).//3.3e-08:28:89//HOMO SAPIENS (HUMAN).//O00292

[3256] F-NT2RP1001248//TAT PROTEIN (TRANSACTIVATING REGULATORY PROTEIN).//0.33:49:28//HUMAN IMMUNODEFICIENCY VIRUS TYPE 1 (NDK ISOLATE) (HIV-1).//P18804

[3257] F-NT2RP1001253//GLUCOSAMINE-6-PHOSPHATE ISOMERASE (EC 5.3.1.10) (GLUCOSAMINE-6- PHOSPHATE DEAMINASE) (GNPDA) (OSCILLIN) (KIAA0060).//3.8e-46:115:81//HOMO SAPIENS (HUMAN).//P46926

[3258] F-NT2RP1001286//GALECTIN-3 (GALACTOSE-SPECIFIC LECTIN 3) (MAC-2 ANTIGEN) (IGE-BINDING PROTEIN) (35 KD LECTIN) (CARBOHYDRATE BINDING PROTEIN 35) (CBP 35) (LAMININ-BINDING PROTEIN) (LECTIN L-29) (L-34 GALACTOSIDE-BINDING LECTIN).//0.16:48:37//MUS MUSCULUS (MOUSE).//P16110

[3259] F-NT2RP1001294//MICROTUBULE-ASSOCIATED PROTEIN YTM1.//6.1e-05:92:34//SACCHAROMYCES CEREVISIAE (BAKER'S YEAST).//Q12024

[3260] F-NT2RP1001302//MICROTUBULE-ASSOCIATED PROTEIN YTM1.//1.2e-05:92:33//SACCHAROMYCES CEREVISIAE (BAKER'S YEAST).//Q12024

[3261] F-NT2RP1001310//PROBABLE E4 PROTEIN.//0.99:109:26//HUMAN PAPILLOMAVIRUS TYPE 5.//P06924

[3262] F-NT2RP1001311//SODIUM/HYDROGEN EXCHANGER 5 (NA(+)/H(+) EXCHANGER 5) (NHE-5) (FRAGMENT).//0.99:94:31//HOMO SAPIENS (HUMAN).//Q14940

[3263] F-NT2RP1001313//CYTOCHROME B5.//9.0e-13:92:38//SACCHAROMYCES CEREVISIAE (BAKER'S YEAST).//P40312

[3264] F-NT2RP1001361//NADH-UBIQUINONE OXIDOREDUCTASE SUBUNIT B14.5B (EC 1.6.5.3) (EC 1.6.99.3) (COMPLEX I-B14.5B) (C1-B14.5B).//1.2e-47:117:74//BOS TAURUS (BOVINE).//Q02827

[3265] F-NT2RP1001385//CELL DIVISION PROTEIN FTSN.//0.64:107:28//ESCHERICHIA COLI.//P29131

[3266] F-NT2RP1001395//PROCOLLAGEN ALPHA 2(I) CHAIN PRECURSOR (FRAGMENTS).//0.25:35:45//GALLUS GALLUS (CHICKEN).//P02467

[3267] F-NT2RP1001410//PUTATIVE GTP-BINDING PROTEIN W08E3.3.//2.2e-41:129:67//CAENORHABDITIS ELEGANS.//P91917

[3268] F-NT2RP1001424//UREASE ACCESSORY PROTEIN UREF (FRAGMENT).//0.87:24:45//ESCHERICHIA COLI.//Q03286

[3269] F-NT2RP1001432//CYSTEINE PROTEINASE INHIBITOR B (CYSTATIN B) (SCB).//1.0:35:42//HELIANTHUS ANNUUS (COMMON SUNFLOWER).//Q10993

[3270] F-NT2RP1001449//KERATIN, ULTRA HIGH-SULFUR MATRIX PROTEIN (UHS KERATIN).//0.053:37:37//OVIS ARIES (SHEEP).//P26372

[3271] F-NT2RP1001457//HYPOTHETICAL 57.0 KD TRP-ASP REPEATS CONTAINING PROTEIN IN CPR4-SSK22 INTERGENIC REGION.//2.9e-16:159:30//SACCHAROMYCES CEREVISIAE (BAKER'S YEAST).//P25382

[3272] F-NT2RP1001466//HYPOTHETICAL PROTEIN MJ0284.//5.3e-15:162:35//METHANOCOCCUS JANNASCHII.//Q57732

[3273] F-NT2RP1001475//HYPOTHETICAL 195.1 KD PROTEIN IN DNA43-UBI1 INTERGENIC REGION.//0.69:119:27//SACCHAROMYCES CEREVISIAE (BAKER'S YEAST).//P40457

[3274] F-NT2RP1001482//PROTEASOME COMPONENT C9 (EC 3.4.99.46) (MACROPAIN SUBUNIT C9) (MULTICATALYTIC ENDOPEPTIDASE COMPLEX SUBUNIT C9).//1.0:58:32//HOMO SAPIENS (HUMAN).//P25789

[3275] F-NT2RP1001494//MALE STERILITY PROTEIN 2 .112.4e-12:84:42//ARABIDOPSIS THALIANA (MOUSE-EAR CRESS).//Q08891

[3276] F-NT2RP1001543//MYO-INOSITOL-1-PHOSPHATE SYNTHASE (EC 5.5.1.4) (IPS).//6.3e-37:94:52//SPIRODELA POLYRRHIZA.//P42803

[3277] F-NT2RP1001546//LEUKOCYTE SURFACE ANTIGEN CD53 (CELL SURFACE GLYCOPROTEIN CD53).//9.3e-11:98:29//HOMO SAPIENS (HUMAN).//P19397

[3278] F-NT2RP1001569//SIGNAL RECOGNITION PARTICLE RECEPTOR BETA SUBUNIT (SR-BETA).//2.2e-64:159:84//MUS MUSCULUS (MOUSE).//P47758

[3279] F-NT2RP1001616//HYPOTHETICAL 13.5 KD PROTEIN C45G9.7 IN CHROMOSOME III.//9.2e-05:49:42//CAENORHABDITIS ELEGANS.//Q09506

[3280] F-NT2RP1001665//REGB PROTEIN.//0.99:29:37//PSEUDOMONAS AERUGINOSA.//Q03381

[3281] F-NT2RP2000001//SMALL PROLINE-RICH PROTEIN 2-1.//0.64:36:41//HOMO SAPIENS (HUMAN).//P35326

[3282] F-NT2RP2000006//DNAJ PROTEIN HOMOLOG 1 (HDJ-1) (HEAT SHOCK PROTEIN 40) (HSP40).//1.7e-19:74:52//HOMO SAPIENS (HUMAN).//P25685

[3283] F-NT2RP2000007//TROPOMYOSIN, FIBROBLAST AND EPITHELIAL MUSCLE-TYPE (TM36) (TME1) (TM1).//0.93:126:23//HOMO SAPIENS (HUMAN).//P06468

[3284] F-NT2RP2000008//ZINC FINGER PROTEIN 33A (ZINC FINGER PROTEIN KOX31) (KIAA0065) (HA0946) (FRAGMENT).//4.2e-35:156:54//HOMO SAPIENS (HUMAN).//Q06730

[3285] F-NT2RP2000027//NADH-UBIQUINONE OXIDOREDUCTASE CHAIN 5 (EC 1.6.5.3) (FRAGMENT).//0.95:41:39//MACACA FASCICULARIS (CRAB EATING MACAQUE) (CYNOMOLGUS MONKEY).//P50665

[3286] F-NT2RP2000032//BAX PROTEIN, CYTOPLASMIC ISOFORM GAMMA.//1.0:35:34//HOMO SAPIENS (HUMAN).//Q07815

[3287] F-NT2RP2000040//BASIC PROLINE-RICH PEPTIDE IB-1.//0.0024:58:36//HOMO SAPIENS (HUMAN).//P04281

[3288] F-NT2RP2000045//DNAJ PROTEIN.//1.1e-12:42:66//THERMUS AQUATICUS (SUBSP. THERMOPHILUS).//Q56237

[3289] F-NT2RP2000054//GONADOLIBERIN III PRECURSOR (GONADOTROPIN-RELEASING HORMONE III) (GNRH-III) (LH-RH III) (LULIBERIN III).//0.20:46:36//ONCORHYNCHUS MASOU (CHERRY SALMON) (MASU SALMON).//P30973

[3290] F-NT2RP2000056//PROTEIN-TYROSINE PHOSPHATASE EPSILON PRECURSOR (EC 3.1.3.48) (R-PTP- EPSILON).//1.3e-18:45:100//MUS MUSCULUS (MOUSE).//P49446

[3291] F-NT2RP2000067//HOMEOBOX PROTEIN HOX-A5 (S12-B) (FRAGMENT).//0.71:44:40//SALMO SALAR (ATLANTIC SALMON).//P09637

[3292] F-NT2RP2000070//INSULIN.//0.94:30:43//HYSTRIX CRISTATA (CRESTED PORCUPINE).//P01328

[3293] F-NT2RP2000076//ETS-LIKE PROTEIN POINTED P1 (D-ETS-2).//0.0013:76:40//DROSOPHILA MELANOGASTER (FRUIT FLY).//P51022

[3294] F-NT2RP2000077//U1 SMALL NUCLEAR RIBONUCLEOPROTEIN C (U1-C).//0.24:49:40//HOMO SAPIENS (HUMAN).//P09234

[3295] F-NT2RP2000079//PLATELET FACTOR 4 (PF-4).//0.15:52:30//SUS SCROFA (PIG).//P30034

[3296] F-NT2RP2000088//HYPOTHETICAL 13.6 KD PROTEIN IN SPT4-ROM1 INTERGENIC REGION.//1.0:36:44//SACCHAROMYCES CEREVISIAE (BAKER'S YEAST).//P53245

[3297] F-NT2RP2000091//HYPOTHETICAL PROTEIN H10149 PRECURSOR.//0.22:38:47//HAEMOPHILUS INFLUENZAE.//P43953

[3298] F-NT2RP2000097//VIRUS ATTACHMENT PROTEIN (061 R).//0.75:33:36//AFRICAN SWINE FEVER VIRUS (STRAIN BA71V) (ASFV).//P32510

[3299] F-NT2RP2000098

[3300] F-NT2RP2000108//!!!! ALU SUBFAMILY SX WARNING ENTRY !!!!//2.4e-09:50:70//HOMO SAPIENS (HUMAN).//P39195

[3301] F-NT2RP2000114//WISKOTT-ALDRICH SYNDROME PROTEIN (WASP).//0.024:52:44//HOMO SAPIENS (HUMAN).//P42768

[3302] F-NT2RP2000120//5.8 KD PROTEIN IN HMC OPERON (ORF 4).//0.67:37:32//DESULFOVIBRIO VULGARIS (STRAIN HILDENBOROUGH).//P33391

[3303] F-NT2RP2000126//CHROMODOMAIN-HELICASE-DNA-BINDING PROTEIN 1 (CHD-1).//1.5e-23:94:47//HOMO SAPIENS (HUMAN).//O14646

[3304] F-NT2RP2000133//SPLICEOSOME ASSOCIATED PROTEIN 49 (SAP 49) (SF3B53).//5.6e-10:82:39//HOMO SAPIENS (HUMAN).//Q15427

[3305] F-NT2RP2000147//CLATHRIN COAT ASSEMBLY PROTEIN AP47 (CLATHRIN COAT ASSOCIATED PROTEIN AP47) (GOLGI ADAPTOR AP-147 KD PROTEIN) (HA147 KD SUBUNIT) (CLATHRIN ASSEMBLY PROTEIN ASSEMBLY PROTEIN COMPLEX 1 MEDIUM CHAIN).//6.7e-89:96:98//MUS MUSCULUS (MOUSE).//P35585

[3306] F-NT2RP2000153//PEPTIDYLPROLYL ISOMERASE CYP-1 (EC 5.2.1.8) (PEPTIDYLPROLYL CIS-TRANS ISOMERASE) (CYCLOPHILIN) (PPIASE).//1.7e-05:136:33//BRUGIA MALAYI.//Q27450

[3307] F-NT2RP2000157//ML02 PROTEIN.//2.7e-06:62:40//SCHIZOSACCHAROMYCES POMBE (FISSION YEAST).//Q09329

[3308] F-NT2RP2000161//DIS3 PROTEIN HOMOLOG.//2.7e-33:173:45//CAENORHABDITIS ELEGANS.//Q17632

[3309] F-NT2RP2000173//HYPOTHETICAL 10.5 KD PROTEIN IN SODA-COMGA INTERGENIC REGION.//0.99:62:25//BACILLUS SUBTILIS.//P54499

[3310] F-NT2RP2000175//MALE SPECIFIC SPERM PROTEIN MST84 DB.//0.19:41:43//DROSOPHILA MELANOGASTER (FRUIT FLY).//Q01643

[3311] F-NT2RP2000183//DIHYDROPYRIMIDINASE RELATED PROTEIN-2 (DRP-2) (NEURAL SPECIFIC PROTEIN NSP60).//4.1e-19:114:44//BOS TAURUS (BOVINE).//O02675

[3312] F-NT2RP2000195//ATP SYNTHASE PROTEIN 8 (EC 3.6.1.34) (A6L).//0.99:30:33//MICROTUS PENNSYLVANICUS (MEADOW VOLE).//P24949

[3313] F-NT2RP2000205//MERCURIC TRANSPORT PROTEIN PERIPLASMIC COMPONENT PRECURSOR (PERIPLASMIC MERCURY ION BINDING PROTEIN) (MERCURY SCAVENGER PROTEIN).//0.098:88:25//SHEWANELLA PUTREFACIENS (PSEUDOMONAS PUTREFACIENS).//Q54463

[3314] F-NT2RP2000208//MALE SPECIFIC SPERM PROTEIN MST84DD.//0.020:19:57//DROSOPHILA MELANOGASTER (FRUIT FLY).//Q01645

[3315] F-NT2RP2000224//PUTATIVE CUTICLE COLLAGEN C09G5.4.//0.0058:159:32//CAENORHABDITIS ELEGANS.//Q09455

[3316] F-NT2RP2000232//P55-C-FOS PROTO-ONCOGENE PROTEIN (FRAGMENT).//1.0:44:38//OVIS ARIES (SHEEP).//O02761

[3317] F-NT2RP2000233//GASTRIN/CHOLECYSTOKININ TYPE B RECEPTOR (CCK-B RECEPTOR) (CCK-BR).//0.34:53:43//CANIS FAMILIARIS (DOG).//P30552

[3318] F-NT2RP2000239//ACIDIC PROLINE-RICH PROTEIN PRECURSOR (CLONE PRP25) (FRAGMENT).//0.019:69:33//RATTUS NORVEGICUS (RAT).//P10164

[3319] F-NT2RP2000248//OVOMUCOID (FRAGMENT).//0.88:18:55//POLYPLECTRON EMPHANUM (PALAWAN PEACOCK-PHEASANT).//P52250

[3320] F-NT2RP2000257//PUTATIVE MITOCHONDRIAL CARRIER YIL006W.//6.4e-09:83:37//SACCHAROMYCES CEREVISIAE (BAKER'S YEAST).//P40556

[3321] F-NT2RP2000258//MYOSIN II HEAVY CHAIN, NON MUSCLE.//0.081:217:28//DICTYOSTELIUM DISCOIDEUM (SLIME MOLD).//P08799

[3322] F-NT2RP2000270//!!!! ALU SUBFAMILY J WARNING ENTRY !!!!//2.4e-17:80:57//HOMO SAPIENS (HUMAN).//P39188

[3323] F-NT2RP2000274//HYPOTHETICAL 5.8 KD PROTEIN.//0.082:22:45//CLOVER YELLOW MOSAIC VIRUS (CYMV).//P16485

[3324] F-NT2RP2000283//HYPOTHETICAL 83.6 KD PROTEIN R05D3.2 IN CHROMOSOME III.//0.39:38:34//CAENORHABDITIS ELEGANS.//P34535

[3325] F-NT2RP2000288

[3326] F-NT2RP2000289//HYPOTHETICAL 9.4 KD PROTEIN IN RNPA-THDF INTERGENIC REGION.//0.40:38:42//ESCHERICHIA COLI.//P22847

[3327] F-NT2RP2000297//ZINC FINGER PROTEIN 85 (ZINC FINGER PROTEIN HPF4) (HTF1).//2.3e-62:206:47//HOMO SAPIENS (HUMAN).//Q03923

[3328] F-NT2RP2000298//CUTICLE COLLAGEN 12 PRECURSOR.//0.55:81:40//CAENORHABDITIS ELEGANS.//P20630

[3329] F-NT2RP20003110//RUBREDOXIN (RD).//0.13:43:41//TREPONEMA PALLIDUM.//O83956

[3330] F-NT2RP2000327//ATP SYNTHASE PROTEIN 8 (EC 3.6.1.34) (A6L).//1.0:46:30//GADUS MORHUA (ATLANTIC COD).//P15996

[3331] F-NT2RP2000328//HYPOTHETICAL 86.6 KD PROTEIN IN PFK1-TDS4 INTERGENIC REGION.//2.0e-21:198:31//SACCHAROMYCES CEREVISIAE (BAKER'S YEAST).//P53313

[3332] F-NT2RP2000329//GTP:AMP PHOSPHOTRANSFERASE MITOCHONDRIAL (EC 2.7.4.10) (AK3).//1.8e-91:155:92//BOS TAURUS (BOVINE).//P08760

[3333] F-NT2RP2000337//PROTEIN A54.//0.75:48:35//VACCINIA VIRUS (STRAIN WR), AND VACCINIA VIRUS (STRAIN COPENHAGEN).//P21072

[3334] F-NT2RP2000346//MYELOID DIFFERENTIATION PRIMARY RESPONSE PROTEIN MYD116.//9.7e-13:114:42//MUS MUSCULUS (MOUSE).//P17564

[3335] F-NT2RP2000369//CALTRIN (CALCIUM TRANSPORT INHIBITOR).//0.98:47:34//MUS MUSCULUS (MOUSE).//Q09098

[3336] F-NT2RP2000412//SHORT NEUROTOXIN D PRECURSOR.//0.66:57:36//AIPYSURUS LAEVIS (OLIVE SEA SNAKE).//P19960

[3337] F-NT2RP2000414//HETEROGENEOUS NUCLEAR RIBONUCLEOPROTEIN F (HNRNP F).//1.0e-27:96:67//HOMO SAPIENS (HUMAN).//P52597

[3338] F-NT2RP2000420//ZINC FINGER PROTEIN 191.//0.16:47:38//HOMO SAPIENS (HUMAN).//O14754

[3339] F-NT2RP2000422//PUTATIVE PHOSPHOACETYLGLUCOSAMINE MUTASE (EC 5.4.2.3) (ACETYLGLUCOSAMINE PHOSPHOMUTASE) (N-ACETYLGLUCOSAMINE-PHOSPHATE MUTASE).//3.6e-19:148:36//SCHIZOSACCHAROMYCES POMBE (FISSION YEAST).//Q09687

[3340] F-NT2RP2000438//TUBULIN GAMMA CHAIN.//0.86:190:27//RETICULOMYXA FILOSA.//P54405

[3341] F-NT2RP2000448//OXYSTEROL-BINDING PROTEIN.//3.7e-13:140:42//HOMO SAPIENS (HUMAN).//P22059

[3342] F-NT2RP2000459//NEURONAL PROTEIN 3.1 (P311 PROTEIN).//1.0:45:35//HOMO SAPIENS (HUMAN).//Q16612

[3343] F-NT2RP2000498//!!!! ALU SUBFAMILY SQ WARNING ENTRY !!!!//0.062:25:68//HOMO SAPIENS (HUMAN).//P39194

[3344] F-NT2RP2000503

[3345] F-NT2RP2000510//TOXIN IV-5.//1.0:51:33//TITYUS BAHIENSIS (BRAZILIAN SCORPION).//P56608

[3346] F-NT2RP2000516//SLYX PROTEIN.//1.0:52:32//ESCHERICHIA COLI.//P30857

[3347] F-NT2RP2000523//PHORBOLIN I (FRAGMENTS).//1.4e-06:36:47//HOMO SAPIENS (HUMAN).//P31941

[3348] F-NT2RP2000603//ALPHA/BETA-GLIADIN PRECURSOR (PROLAMIN) (CLASS A-III).//0.93:119:26//TRITICUM AESTIVUM (WHEAT).//P04723

[3349] F-NT2RP2000617//SPERM PROTAMINE P1 (CYSTEINE-RICH PROTAMINE).//0.056:16:62//OVIS ARIES (SHEEP), AND CAPRA HIRCUS (GOAT).//P04102

[3350] F-NT2RP2000634//NEDD-4 PROTEIN (EC 6.3.2.-) (KIAA0093) (FRAGMENT).//1.8e-05:128:28//HOMO SAPIENS (HUMAN).//P46934

[3351] F-NT2RP2000644//HYPOTHETICAL PROTEIN HI1566 PRECURSOR.//0.85:48:39//HAEMOPHILUS INFLUENZAE.//P44257

[3352] F-NT2RP2000656//EARLY GROWTH RESPONSE PROTEIN 1 (EGR-1) (NERVE GROWTH FACTOR-INDUCED PROTEIN A) (NGFI-A).//1.0:111:24//RATTUS NORVEGICUS (RAT).//P08154

[3353] F-NT2RP2000658//URONATE ISOMERASE (EC 5.3.1.12) (GLUCURONATE ISOMERASE) (URONIC ISOMERASE).//0.49:79:31//ESCHERICHIA COLI.//P42607

[3354] F-NT2RP2000668//MEROZOITE SURFACE ANTIGEN 2 PRECURSOR (MSA-2) (45 KD MEROZOITE SURFACE ANTIGEN).//0.020:115:30//PLASMODIUM FALCIPARUM (ISOLATE 3D7).//P50498

[3355] F-NT2RP2000678//!!!! ALU SUBFAMILY J WARNING ENTRY !!!!//0.00085:38:68//HOMO SAPIENS (HUMAN).//P39188

[3356] F-NT2RP2000704//!!!! ALU SUBFAMILY J WARNING ENTRY !!!!//2.2e-17:55:74//HOMO SAPIENS (HUMAN).//P39188

[3357] F-NT2RP2000710//ASPARTYL-TRNA SYNTHETASE (EC 6.1.1.12) (ASPARTATE-TRNA LIGASE) (ASPRS).//8.9e-47:106:59//TREPONEMA PALLIDUM.//O83950

[3358] F-NT2RP2000715

[3359] F-NT2RP2000731//CONIDIATION-SPECIFIC PROTEIN 10.//0.094:31:41//NEUROSPORA CRASSA.//P10713

[3360] F-NT2RP2000758//!!!! ALU SUBFAMILY J WARNING ENTRY !!!!//0.00027:31:74//HOMO SAPIENS (HUMAN).//P39188

[3361] F-NT2RP2000764//NIFS PROTEIN.//2.7e-27:175:47//ANABAENA SP. (STRAIN PCC 7120).//P12623

[3362] F-NT2RP2000809//HYPOTHETICAL PROTEIN MG381 HOMOLOG.//0.91:85:25//MYCOPLASMA PNEUMONIAE.//P75219

[3363] F-NT2RP2000812//DILUTE MYOSIN HEAVY CHAIN, NON-MUSCLE (MYOSIN 5A).//2.8e-07:133:31//MUS MUSCULUS (MOUSE).//Q99104

[3364] F-NT2RP2000814//40S RIBOSOMAL PROTEIN S27A.//0.93:44:38//LYCOPERSICON ESCULENTUM (TOMATO), AND SOLANUM TUBEROSUM (POTATO).//P27083

[3365] F-NT2RP2000816//HYPOTHETICAL 88.4 KD PROTEIN B0464.7 IN CHROMOSOME III.//3.3e-21:123:39//CAENORHABDITIS ELEGANS.//Q03565

[3366] F-NT2RP2000819//TROPOMYOSIN 5, CYTOSKELETAL TYPE.//1.0:71:30//MUS MUSCULUS (MOUSE).//P21107

[3367] F-NT2RP20008411/GUANINE NUCLEOTIDE RELEASING PROTEIN (GNRP).//0.0011:133:26//MUS MUSCULUS (MOUSE).//P27671

[3368] F-NT2RP2000842//LYSOPHOSPHATIDIC ACID RECEPTOR (EDG-2).//6.4e-13:22:95//HOMO SAPIENS (HUMAN).//Q92633

[3369] F-NT2RP2000845//BOWMAN-BIRK TYPE PROTEINASE INHIBITOR (MST1).//0.92:24:41//MEDICAGO SCUTELLATA (SNAIL MEDIC).//P80321

[3370] F-NT2RP2000863//N-MYC PROTO-ONCOGENE PROTEIN.//0.010:148:27//XENOPUS LAEVIS (AFRICAN CLAWED FROG).//P24793

[3371] F-NT2RP2000880//PROBABLE TRANSLATION INITIATION FACTOR IF-2.//4.0e-100:199:94//HOMO SAPIENS (HUMAN).//O60841

[3372] F-NT2RP2000892//PROCOLLAGEN ALPHA 1(II) CHAIN PRECURSOR [CONTAINS: CHONDROCALCIN].//0.43:45:44//MUS MUSCULUS (MOUSE).//P28481

[3373] F-NT2RP2000931//MATRIN 3.//2.8e-46:104:92//RATTUS NORVEGICUS (RAT).//P43244

[3374] F-NT2RP2000932//2-5A-DEPENDENT RIBONUCLEASE (EC 3.1.26.-) (2-5A-DEPENDENT RNAASE) (RNASE L) (RIBONUCLEASE 4) (FRAGMENT).//3.9e-07:113:31//MUS MUSCULUS (MOUSE).//Q05921

[3375] F-NT2RP2000938//VOLTAGE-GATED POTASSIUM CHANNEL PROTEIN KV3.3 (KSHIIID).//0.026:59:45//RATTUS NORVEGICUS (RAT).//Q01956

[3376] F-NT2RP2000943//HYPOTHETICAL PROTEIN KIAA0079 (HA3543).//5.9e-18:161:42//HOMO SAPIENS (HUMAN).//P53992

[3377] F-NT2RP2000965//INNER CENTROMERE PROTEIN (INCENP).//0.062:156:25//GALLUS GALLUS (CHICKEN).//P53352

[3378] F-NT2RP2000970//EC PROTEIN HOMOLOG.//1.0:50:30//ARABIDOPSIS THALIANA (MOUSE-EAR CRESS).//P93746

[3379] F-NT2RP2000985//HYPOTHETICAL 96.8 KD PROTEIN IN SIS2-MTD1 INTERGENIC REGION.//2.5e-06:53:47//SACCHAROMYCES CEREVISIAE (BAKER'S YEAST).//P36159

[3380] F-NT2RP2000987//INSECT TOXIN 4 (INSECT TOXIN AAH IT4).//1.0:32:34//ANDROCTONUS AUSTRALIS HECTOR (SAHARA SCORPION).//P21150

[3381] F-NT2RP2001036//!!!! ALU SUBFAMILY SP WARNING ENTRY !!!!//1.2e-33:65:81//HOMO SAPIENS (HUMAN).//P39193

[3382] F-NT2RP2001044//HIRUSTASIN.//0.97:15:66//HIRUDO MEDICINALIS (MEDICINAL LEECH).//P80302

[3383] F-NT2RP2001056//!!!! ALU SUBFAMILY SQ WARNING ENTRY !!!!//1.0e-24:85:65//HOMO SAPIENS (HUMAN).//P39194

[3384] F-NT2RP2001065//BOWMAN-BIRK TYPE SEED TRYPSIN AND CHYMOTRYPSIN INHIBITOR (BTCI).//0.41:50:32//VIGNA UNGUICULATA (COWPEA).//P17734

[3385] F-NT2RP2001070//PROBABLE PYRIDOXAMINE 5′-PHOSPHATE OXIDASE (EC 1.4.3.5) (PNP/PMP OXIDASE) (FPRA PROTEIN).//6.2e-18:64:48//MYXOCOCCUS XANTHUS.//P21159

[3386] F-NT2RP20010811/SYNAPTOTAGMIN IV.//7.8e-16:94:46//RATTUS NORVEGICUS (RAT).//P50232

[3387] F-NT2RP2001094//METALLOTHIONEIN-I (MT-I).//1.0:24:33//RATTUS NORVEGICUS (RAT).//P02803

[3388] F-NT2RP2001119//!!!! ALU SUBFAMILY SX WARNING ENTRY !!!!/17.5e-11:61:63//HOMO SAPIENS (HUMAN).//P39195

[3389] F-NT2RP2001127//XE169 PROTEIN (SMCX PROTEIN) (FRAGMENTS).//1.0e-47:155:58//MUS MUSCULUS (MOUSE).//P41230

[3390] F-NT2RP2001137//COLLAGEN ALPHA 1(XII) CHAIN (FRAGMENTS).//0.10:68:39//BOS TAURUS (BOVINE).//P25508

[3391] F-NT2RP2001149//!!!! ALU SUBFAMILY J WARNING ENTRY !!!!//1.1e-13:81:59//HOMO SAPIENS (HUMAN).//P39188

[3392] F-NT2RP2001168//PROTEIN KINASE C SUBSTRATE 80 KD PROTEIN (FRAGMENTS).//0.0071:77:33//RATTUS NORVEGICUS (RAT).//P20468

[3393] F-NT2RP2001173//CYTOSKELETON-ASSOCIATED PROTEIN CKAPI (TUBULIN FOLDING COFACTOR B).//1.0:36:41//HOMO SAPIENS (HUMAN).//Q99426

[3394] F-NT2RP2001174//ZINC FINGER PROTEIN 137.//7.2e-11:65:43//HOMO SAPIENS (HUMAN).//P52743

[3395] F-NT2RP2001196//NADH-UBIQUINONE OXIDOREDUCTASE CHAIN 2 (EC 1.6.5.3).//1.0:95:26//CAPRA HIRCUS (GOAT).//Q36346

[3396] F-NT2RP2001218//HYPOTHETICAL 59.2 KD PROTEIN IN MOB1-SGA1 INTERGENIC REGION.//0.00024:80:23//SACCHAROMYCES CEREVISIAE (BAKER'S YEAST).//P40486

[3397] F-NT2RP2001226//RABPHILIN-3A (FRAGMENT).//4.6e-05:121:39//MUS MUSCULUS (MOUSE).//P47708

[3398] F-NT2RP2001233//ZINC FINGER PROTEIN ZFP-36 (FRAGMENT).//3.2e-61:153:56//HOMO SAPIENS (HUMAN).//P16415

[3399] F-NT2RP2001245//SYNAPTONEMAL COMPLEX PROTEIN 1 (SCP-1 PROTEIN).//4.9e-05:230:21//HOMO SAPIENS (HUMAN).//Q15431

[3400] F-NT2RP2001268//HOMEOBOX PROTEIN CEH-32.//0.23:159:25//CAENORHABDITIS ELEGANS.//Q23175

[3401] F-NT2RP2001277

[3402] F-NT2RP2001290//BETA-SOLUBLE NSF ATTACHMENT PROTEIN (SNAP-BETA) (SNAP-ALPHA HOMOLOG) (BRAIN PROTEIN 147) (FRAGMENT).//1.0e-86:131:97//MUS MUSCULUS (MOUSE).//P28663

[3403] F-NT2RP2001295

[3404] F-NT2RP2001312//N-ACETYLGLUCOSAMINE-6-SULFATASE PRECURSOR (EC 3.1.6.14) (G6S) (GLUCOSAMINE-6-SULFATASE).//0.64:80:33//CAPRA HIRCUS (GOAT).//P50426

[3405] F-NT2RP2001327//TUMOR NECROSIS FACTOR, ALPHA-INDUCED PROTEIN 1, ENDOTHELIAL (B12 PROTEIN).//1.0e-36:118:65//HOMO SAPIENS (HUMAN).//Q13829

[3406] F-NT2RP2001328//PROBABLE E5 PROTEIN.//1.0:46:41//HUMAN PAPILLOMAVIRUS TYPE 33.//P06426

[3407] F-NT2RP2001347//!!!! ALU SUBFAMILY SP WARNING ENTRY !!!!//4.5e-19:66:62//HOMO SAPIENS (HUMAN).//P39193

[3408] F-NT2RP2001366//SPERM-SPECIFIC PROTEIN PHI-1.//0.66:55:32//MYTILUS EDULIS (BLUE MUSSEL).//Q04621

[3409] F-NT2RP2001378//VOLTAGE-GATED POTASSIUM CHANNEL PROTEIN KV3.3 (KSHIIID) (FRAGMENT).//0.060:78:33//HOMO SAPIENS (HUMAN).//Q14003

[3410] F-NT2RP2001381//26S PROTEASE REGULATORY SUBUNIT 8 (SUG1 HOMOLOG) (XSUG1).//1.0:167:26//XENOPUS LAEVIS (AFRICAN CLAWED FROG).//P46470

[3411] F-NT2RP2001392//KERATIN, HIGH-SULFUR MATRIX PROTEIN, IIIA3.//0.0080:82:32//OVIS ARIES (SHEEP).//P02441

[3412] F-NT2RP2001394//POLYHOMEOTIC-PROXIMAL CHROMATIN PROTEIN.//0.024:39:53//DROSOPHILA MELANOGASTER (FRUIT FLY).//P39769

[3413] F-NT2RP2001397//G2/MITOTIC-SPECIFIC CYCLIN B2.//1.4e-46:125:78//MESOCRICETUS AURATUS (GOLDEN HAMSTER).//P37883

[3414] F-NT2RP2001420//SALIVARY PROLINE-RICH PROTEIN PRECURSOR (CLONES CP3, CP4 AND CP5) [CONTAINS: BASIC PEPTIDE IB-6; PEPTIDE P-H].//0.00018:113:38//HOMO SAPIENS (HUMAN).//P04280

[3415] F-NT2RP2001423//HYPOTHETICAL 9.4 KD PROTEIN IN GP31-CD INTERGENIC REGION (ORF A).//0.90:23:43//BACTERIOPHAGE T4.//P17307

[3416] F-NT2RP2001427//!!!! ALU SUBFAMILY J WARNING ENTRY !!!!//2.2e-11:38:68//HOMO SAPIENS (HUMAN).//P39188

[3417] F-NT2RP2001436//DYNEIN LIGHT INTERMEDIATE CHAIN 2, CYTOSOLIC (LIC53/55) (LIC-2).//0.25:124:28//RATTUS NORVEGICUS (RAT).//Q62698

[3418] F-NT2RP2001440//14-3-3 PROTEIN GAMMA (PROTEIN KINASE C INHIBITOR PROTEIN-1) (KC1P-1).//4.8e-62:145:90//RATTUS NORVEGICUS (RAT).//P35214

[3419] F-NT2RP2001445

[3420] F-NT2RP2001449//CLEAVAGE AND POLYADENYLATION SPECIFICITY FACTOR, 100 KD SUBUNIT (CPSF 100 KD SUBUNIT).//9.5e-118:226:95//BOS TAURUS (BOVINE).//Q10568

[3421] F-NT2RP2001450

[3422] F-NT2RP2001467//SHORT NEUROTOXIN I (TOXIN V-II-1).//1.0:25:40//BUNGARUS FASCIATUS (BANDED KRAIT).//P10808

[3423] F-NT2RP2001506

[3424] F-NT2RP2001511//HYPOTHETICAL 115.4 KD PROTEIN ZK757.3 IN CHROMOSOME III.//0.49:124:29//CAENORHABDITIS ELEGANS.//P34681

[3425] F-NT2RP2001520//VITAMIN D-DEPENDENT CALCIUM-BINDING PROTEIN, INTESTINAL (CABP) (CALBINDIN D9K).//0.035:71:33//HOMO SAPIENS (HUMAN).//P29377

[3426] F-NT2RP2001526

[3427] F-NT2RP2001536//METALLOTHIONEIN-1 (MT-1).//1.0:19:42//COLUMBA LIVIA (DOMESTIC PIGEON).//P15786

[3428] F-NT2RP2001560//CUTICLE COLLAGEN 12 PRECURSOR.//0.0018:144:35//CAENORHABDITIS ELEGANS.//P20630

[3429] F-NT2RP2001569//!!!! ALU SUBFAMILY SQ WARNING ENTRY !!!!//2.7e-31:102:67//HOMO SAPIENS (HUMAN).//P39194

[3430] F-NT2RP2001576//SMP3 PROTEIN.//0.00016:75:36//SACCHAROMYCES CEREVISIAE (BAKER'S YEAST).//Q04174

[3431] F-NT2RP2001581//TRANSMEMBRANE PROTEIN SEX PRECURSOR.//0.040:46:36//HOMO SAPIENS (HUMAN).//P51805

[3432] F-NT2RP2001597//PROBABLE E4 PROTEIN.//0.00042:113:34//HUMAN PAPILLOMAVIRUS TYPE 5.//P06924

[3433] F-NT2RP2001601

[3434] F-NT2RP2001613//HOMEOBOX PROTEIN SAX-1 (CHOX-3) (FRAGMENT).//0.14:59:32//GALLUS GALLUS (CHICKEN).//P19601

[3435] F-NT2RP2001628//A-AGGLUTININ ATTACHMENT SUBUNIT PRECURSOR.//0.056:140:33//SACCHAROMYCES CEREVISIAE (BAKER'S YEAST).//P32323

[3436] F-NT2RP2001634//ALPHA-CATENIN.//7.1e-12:152:35//DROSOPHILA MELANOGASTER (FRUIT FLY).//P35220

[3437] F-NT2RP2001660//HYPOTHETICAL 80.4 KD PROTEIN IN SMC3-MRPL8 INTERGENIC REGION.//0.43:119:26//SACCHAROMYCES CEREVISIAE (BAKER'S YEAST).//P40358

[3438] F-NT2RP2001663//ALPHA ENOLASE (EC 4.2.1.11) (2-PHOSPHO-D-GLYCERATE HYDRO-LYASE) (NON- NEURAL ENOLASE) (NNE) (PHOSPHOPYRUVATE HYDRATASE).//1.2e-26:126:56//HOMO SAPIENS (HUMAN).//P06733

[3439] F-NT2RP2001675//HYPOTHETICAL 107.7 KD PROTEIN IN RPSO 5′REGION (ORF1).//0.25:148:25//CAMPYLOBACTER JEJUNI.//Q46089

[3440] F-NT2RP2001677//ACIDIC PROLINE-RICH PROTEIN PRECURSOR (CLONE PRP25) (FRAGMENT).//0.010:101:31//RATTUS NORVEGICUS (RAT).//P10164

[3441] F-NT2RP2001678//!!!! ALU SUBFAMILY J WARNING ENTRY !!!!//2.6e-18:83:61//HOMO SAPIENS (HUMAN).//P39188

[3442] F-NT2RP2001699//PROTEIN C 14.//0.98:51:31//VACCINIA VIRUS (STRAIN COPENHAGEN).//P21045

[3443] F-NT2RP2001720//MEROZOITE SURFACE ANTIGEN 2 PRECURSOR (MSA-2) (ALLELIC FORM1).//0.16:145:30//PLASMODIUM FALCIPARUM (ISOLATE CAMP /MALAYSIA).//Q99317

[3444] F-NT2RP2001721//MALE-SPECIFIC LETHAL-2 PROTEIN.//0.00090:48:39//DROSOPHILA MELANOGASTER (FRUIT FLY).//P50534

[3445] F-NT2RP2001740//ANNEXIN VII (SYNEXIN) (FRAGMENT).//0.50:43:25//BOS TAURUS (BOVINE).//P20072

[3446] F-NT2RP2001748//SALIVARY PROLINE-RICH PROTEIN PO (ALLELE K) [CONTAINS: PEPTIDE P-D] (FRAGMENT).//0.77:111:28//HOMO SAPIENS (HUMAN).//P10162

[3447] F-NT2RP2001762

[3448] F-NT2RP2001813//PHOTOSYSTEM I REACTION CENTRE SUBUNIT VIII (PSI-1).//1.0:22:40//PICEA ABIES (NORWAY SPRUCE) (PICEA EXCELSA).//O47040

[3449] F-NT2RP2001839//SCY1 PROTEIN.//6.8e-17:204:27//SACCHAROMYCES CEREVISIAE (BAKER'S YEAST).//P53009

[3450] F-NT2RP2001861//D15KZ1 PROTEIN (FRAGMENT).//0.31:56:39//MUS MUSCULUS (MOUSE).//Q61466

[3451] F-NT2RP2001869//CORNEODESMOSIN (S PROTEIN) (FRAGMENT).//0.97:78:30//SUS SCROFA (PIG).//O19084

[3452] F-NT2RP2001876//ALLOGRAFT INFLAMMATORY FACTOR-1 (AIF-1) (IONIZED CALCIUM BINDING ADAPTER MOLECULE 1).//3.5e-36:106:66//HOMO SAPIENS (HUMAN).//P55008

[3453] F-NT2RP2001883//CATHEPSIN L (EC 3.4.22.15).//10.95:29:41//OVIS ARIES (SHEEP).//Q10991

[3454] F-NT2RP2001898//TYPE II INOSITOL-1,4,5-TRISPHOSPHATE 5-PHOSPHATASE PRECURSOR (EC 3.1.3.56) (5PTASE) (FRAGMENT).//1.6e-84:185:88//HOMO SAPIENS (HUMAN).//P32019

[3455] F-NT2RP2001900//ACTIN-LIKE PROTEIN ARP5.//1.1e-17:180:34//SACCHAROMYCES CEREVISIAE (BAKER'S YEAST).//P53946

[3456] F-NT2RP2001907//HYPHAL WALL PROTEIN 1 (CELL ELONGATION PROTEIN 2).//0.13:108:27//CANDIDA ALBICANS (YEAST).//P46593

[3457] F-NT2RP2001926//HYPOTHETICAL 7.6 KD PROTEIN YCF33.1/0.55:57:26//CYANOPHORA PARADOXA.//P48273

[3458] F-NT2RP2001936

[3459] F-NT2RP2001943//HYPOTHETICAL 57.7 KD PROTEIN IN AIP1-CTF13 INTERGENIC REGION.//1.8e-13:208:22//SACCHAROMYCES CEREVISIAE (BAKER'S YEAST).//Q04305

[3460] F-NT2RP2001946//HYPOTHETICAL 13.0 KD PROTEIN IN ALGR3 3′REGION.//0.59:76:28//PSEUDOMONAS AERUGINOSA.//P21485

[3461] F-NT2RP2001947//ZINC FINGER PROTEIN DAN (N03).//0.53:68:29//RATTUS NORVEGICUS (RAT).//Q06880

[3462] F-NT2RP2001969//CHLOROPLAST 30S RIBOSOMAL PROTEIN S 18.//0.0015:52:34//CHLORELLA VULGARIS.//P56353

[3463] F-NT2RP2001976//DILUTE MYOSIN HEAVY CHAIN, NON-MUSCLE (MYOSIN 5A).//9.5e-07:201:22//MUS MUSCULUS (MOUSE).//Q99104

[3464] F-NT2RP2001985//PROLINE-RICH PROTEIN MP-2 PRECURSOR.//0.016:90:32//MUS MUSCULUS (MOUSE).//P05142

[3465] F-NT2RP2001991//SODIUM- AND CHLORIDE-DEPENDENT TRANSPORTER NTT73.//8.0e-14:47:76//RATTUS NORVEGICUS (RAT).//Q08469

[3466] F-NT2RP2002025//NG-CAM RELATED CELL ADHESION MOLECULE PRECURSOR (NR-CAM) (BRAVO).//2.9e-30:211:42//GALLUS GALLUS (CHICKEN).//P35331

[3467] F-NT2RP2002032//FLOCCULANT-ACTIVE PROTEINS MO2.1 AND M02.2.//0.23:20:40//MORINGA OLEIFERA (HORSERADISH TREE) (MORINGA PTERYGOSPERMA).//P24303

[3468] F-NT2RP2002033//!!!! ALU SUBFAMILY SP WARNING ENTRY !!!!//0.88:27:62//HOMO SAPIENS (HUMAN).//P39193

[3469] F-NT2RP2002041

[3470] F-NT2RP2002046//MATING PROCESS PROTEIN MID2 (SERINE-RICH PROTEIN SMS1) (PROTEIN KINASE A INTERFERENCE PROTEIN).//1.0:85:31//SACCHAROMYCES CEREVISIAE (BAKER'S YEAST).//P36027

[3471] F-NT2RP2002047

[3472] F-NT2RP2002058//DOM34 INTERACTING PROTEIN 2.//9.4e-25:165:34//SACCHAROMYCES CEREVISIAE (BAKER'S YEAST).//Q12220

[3473] F-NT2RP2002066//TIGHT JUNCTION PROTEIN ZO-1 (TIGHT JUNCTION PROTEIN 1).//5.7e-12:108:41//HOMO SAPIENS (HUMAN).//Q07157

[3474] F-NT2RP2002070//CYTOCHROME C OXIDASE POLYPEPTIDE II (EC 1.9.3.1) (FRAGMENT).//0.88:28:50//ASTERINA PECTINIFERA (STARFISH).//P11958

[3475] F-NT2RP2002076//TRP-ASP REPEATS CONTAINING PROTEIN RBA-2.//0.0031:124:27//CAENORHABDITIS ELEGANS.//P90916

[3476] F-NT2RP2002078//KERATIN, GLYCINE/TYROSINE-RICH OF HAIR.//0.82:30:40//OVIS ARIES (SHEEP).//Q02958

[3477] F-NT2RP2002079//OUTER DENSE FIBER PROTEIN.//0.34:41:39//HOMO SAPIENS (HUMAN).//Q14990

[3478] F-NT2RP2002099//HETEROGENOUS NUCLEAR RIBONUCLEOPROTEIN U (HNRNP U).//5.2e-08:81:48//HOMO SAPIENS (HUMAN).//Q00839

[3479] F-NT2RP2002105//COLLAGEN 1(X) CHAIN PRECURSOR.//0.0012:100:34//BOS TAURUS (BOVINE).//P23206

[3480] F-NT2RP2002124//EARLY GROWTH RESPONSE PROTEIN 1 (EGR-1) (KROX24) (TRANSCRIPTION FACTOR ETR103) (ZINC FINGER PROTEIN 225) (AT225).//0.74:72:31//HOMO SAPIENS (HUMAN).//P18146

[3481] F-NT2RP2002137//NEUROTOXIN B-II.//1.0:27:44//CEREBRATULUS LACTEUS (MILKY RIBBON WORM).//P01526

[3482] F-NT2RP2002154//GALECTIN-3 (GALACTOSE-SPECIFIC LECTIN 3) (MAC-2 ANTIGEN) (IGE-BINDING PROTEIN) (35 KD LECTIN) (CARBOHYDRATE BINDING PROTEIN 35) (CBP 35) (LAMININ-BINDING PROTEIN) (LECTIN L-29) (L-34 GALACTOSIDE-BINDING LECTIN).//0.0029:112:34//MUS MUSCULUS (MOUSE).//P16110

[3483] F-NT2RP2002172

[3484] F-NT2RP2002185//UBIQUITIN-LIKE PROTEIN DSK2.//1.8e-07:87:40//SACCHAROMYCES CEREVISIAE (BAKER'S YEAST).//P48510

[3485] F-NT2RP2002192

[3486] F-NT2RP2002193//CUTICLE COLLAGEN 40.//0.0062:70:37//CAENORHABDITIS ELEGANS.//P34804

[3487] F-NT2RP2002208//PEROXISOME ASSEMBLY PROTEIN PEX10 (PEROXIN-10).//0.00011:45:40//HOMO SAPIENS (HUMAN).//O60683

[3488] F-NT2RP2002219

[3489] F-NT2RP2002231//V-TYPE SODIUM ATP SYNTHASE SUBUNIT E (EC 3.6.1.34) (NA(+)-TRANSLOCATING ATPASE SUBUNIT E).//1.0:68:32//ENTEROCOCCUS HIRAE.//P43436

[3490] F-NT2RP2002235//INFECTED CELL PROTEIN ICP34.5 (NEUROVIRULENCE FACTOR ICP34.5).//0.0022:66:45//HERPES SIMPLEX VIRUS (TYPE 1/STRAIN CVG-2).//P37318

[3491] F-NT2RP2002252//DNA-DIRECTED RNA POLYMERASE II LARGEST SUBUNIT (EC 2.7.7.6) (RPB 1) (FRAGMENT).//0.071:110:31//CRICETULUS GRISEUS (CHINESE HAMSTER).//P11414

[3492] F-NT2RP2002256//CYTOCHROME P450 26 (EC 1.14.-.-) (RETINOIC ACID-METABOLIZING CYTOCHROME) (P450RAI) (RETINOIC ACID 4-HYDROXYLASE).//3.1e-31:75:84//MUS MUSCULUS (MOUSE).//O55127

[3493] F-NT2RP2002259//L-MYC-1 PROTO-ONCOGENE PROTEIN.//1.9e-17:41:90//HOMO SAPIENS (HUMAN).//P12524

[3494] F-NT2RP2002270//HYPOTHETICAL 26.0 KD PROTEIN IN CYB5-LEU4 INTERGENIC REGION.//2.1e-27:164:36//SACCHAROMYCES CEREVISIAE (BAKER'S YEAST).//P53930

[3495] F-NT2RP2002292//IMMEDIATE-EARLY PROTEIN RSP40.//0.018:107:23//PSEUDORABIES VIRUS (STRAIN KAPLAN) (PRV).//P24827

[3496] F-NT2RP2002312//PHOSPHATIDATE CYTIDYLYLTRANSFERASE (EC 2.7.7.41) (CDP-DIGLYCERIDE SYNTHETASE) (CDP-DIGLYCERIDE PYROPHOSPHORYLASE) (CDP-DIACYLGLYCEROL SYNTHASE) (CDS) (CTP:PHOSPHATIDATE CYTIDYLYLTRANSFERASE) (CDP-DAG SYNTHASE).//1.4e-52:174:55//HOMO SAPIENS (HUMAN).//Q92903

[3497] F-NT2RP2002316//HISTONE H1.C6/H1.C9.//1.0:40:40//TRYPANOSOMA CRUZI.//P40269

[3498] F-NT2RP2002325//PEROXISOMAL MEMBRANE PROTEIN PMP30A (PMP31) (PEROXIN-11).//2.2e-06:145:26//CANDIDA BOIDINII (YEAST).//Q00316

[3499] F-NT2RP2002333//HYPOTHETICAL 39.1 KD PROTEIN IN RNPB-SOHA INTERGENIC REGION (ORF 3).//0.30:86:32//ESCHERICHIA COLI.//P23524

[3500] F-NT2RP2002373//SYNAPSINS IA AND IB.//0.080:145:31//BOS TAURUS (BOVINE).//P17599

[3501] F-NT2RP2002385//ENV POLYPROTEIN PRECURSOR (COAT POLYPROTEIN) [CONTAINS: KNOB PROTEIN GP70; SPIKE PROTEIN P15E; R PROTEIN].//0.021:66:28//MINK CELL FOCUS-FORMING MURINE LEUKEMIA VIRUS (ISOLATE CI-3).//P03388

[3502] F-NT2RP2002394

[3503] F-NT2RP2002408//COLLAGEN ALPHA 1(I) CHAIN (FRAGMENTS).//0.00030:107:37//BOS TAURUS (BOVINE).//P02453

[3504] F-NT2RP2002426

[3505] F-NT2RP2002439//CIRCUMSPOROZOITE PROTEIN PRECURSOR (CS).//0.00032:79:32//PLASMODIUM BERGHEI (STRAIN ANKA).//P23093

[3506] F-NT2RP2002442//HESA PROTEIN.//6.0e-16:163:30//PLECTONEMA BORYANUM.//P46037

[3507] F-NT2RP2002457

[3508] F-NT2RP2002464//HYPOTHETICAL 60.7 KD PROTEIN C56F8.17C IN CHROMOSOME I.//9.3e-18:165:32//SCHIZOSACCHAROMYCES POMBE (FISSION YEAST).//Q10264

[3509] F-NT2RP2002475//CYSTEINE-RICH HEART PROTEIN (HCRHP).//0.91:45:35//HOMO SAPIENS (HUMAN).//P50238

[3510] F-NT2RP2002479//ATP-BINDING CASSETTE TRANSPORTER 7 PRECURSOR (ABC TRANSPORTER 7 PROTEIN).//6.8e-96:186:94//HOMO SAPIENS (HUMAN).//O75027

[3511] F-NT2RP2002498//HYPOTHETICAL MERCURIC RESISTANCE PROTEIN MERC.//0.65:37:45//PSEUDOMONAS AERUGINOSA.//P04139

[3512] F-NT2RP2002503//ZINC FINGER PROTEIN 45 (BRC1744).//1.3e-31:124:59//HOMO SAPIENS (HUMAN).//Q02386

[3513] F-NT2RP2002504//NUCLEAR PORE COMPLEX PROTEIN NUP155 (NUCLEOPORIN NUP155) (155 KD NUCLEOPORIN) (P140).//1.2e-123:240:92//RATTUS NORVEGICUS (RAT).//P37199

[3514] F-NT2RP2002520//ACIDIC PROLINE-RICH PROTEIN HP43A PRECURSOR.//0.94:83:28//MESOCRICETUS AURATUS (GOLDEN HAMSTER).//P06680

[3515] F-NT2RP2002537//HYPOTHETICAL 55.1 KD PROTEIN B0416.5 IN CHROMOSOME X.//4.0e-10:194:23//CAENORHABDITIS ELEGANS.//Q11073

[3516] F-NT2RP2002546

[3517] F-NT2RP2002549//G2/MITOTIC-SPECIFIC CYCLIN C13-1 (A-LIKE CYCLIN) (FRAGMENT).i/0.98:65:30//DAUCUS CAROTA (CARROT).//P25010

[3518] F-NT2RP2002591//ZINC FINGER PROTEIN 84 (ZINC FINGER PROTEIN HPF2).//2.6e-19:60:61//HOMO SAPIENS (HUMAN).//P51523

[3519] F-NT2RP2002595//ANNEXIN VII (SYNEXIN).//1.2e-15:121:49//XENOPUS LAEVIS (AFRICAN CLAWED FROG).//Q92125

[3520] F-NT2RP2002606//PROTEIN TRANSPORT PROTEIN SEC2.//0.00034:98:31//SACCHAROMYCES CEREVISIAE (BAKER'S YEAST).//P17065

[3521] F-NT2RP2002609//HYPOTHETICAL 52.0 KD PROTEIN IN CLB6-SPT6 INTERGENIC REGION.//0.00022:79:39//SACCHAROMYCES CEREVISIAE (BAKER'S YEAST).//P53264

[3522] F-NT2RP2002618//PROTEIN ARGININE N-METHYLTRANSFERASE 1 (EC 2.1.1.-).//6.2e-37:180:44//RATTUS NORVEGICUS (RAT).//Q63009

[3523] F-NT2RP2002621//NADH-UBIQUINONE OXIDOREDUCTASE CHAIN 5 (EC 1.6.5.3) (FRAGMENT).//0.98:37:35//LEMUR CATTA (RING-TAILED LEMUR).//Q34879

[3524] F-NT2RP2002643//INFECTED CELL PROTEIN ICP34.5 (NEUROVIRULENCE FACTOR ICP34.5).//0.042:77:32//HERPES SIMPLEX VIRUS (TYPE 1/STRAIN MGH-10).//P37319

[3525] F-NT2RP2002672//PROTEIN Q300.//0.0018:41:43//MUS MUSCULUS (MOUSE).//Q02722

[3526] F-NT2RP2002701//HYPOTHETICAL 72.5 KD PROTEIN C2F7.10 IN CHROMOSOME I.//3.6e-17:100:42//SCHIZOSACCHAROMYCES POMBE (FISSION YEAST).//Q09701

[3527] F-NT2RP2002706//IMMEDIATE-EARLY PROTEIN IE180.//0.00027:139:33//PSEUDORABIES VIRUS (STRAIN KAPLAN) (PRV).//P33479

[3528] F-NT2RP2002710//SH3-BINDING PROTEIN 3BP- I.//6.9e-09:96:40//MUS MUSCULUS (MOUSE).//P55194

[3529] F-NT2RP2002727//TUBERIN (TUBEROUS SCLEROSIS 2 HOMOLOG PROTEIN).//3.6e-20:160:36//RATTUS NORVEGICUS (RAT).//P49816

[3530] F-NT2RP2002736

[3531] F-NT2RP2002740

[3532] F-NT2RP2002741//RHO1 GDP-GTP EXCHANGE PROTEIN 2.//2.0e-07:178:28//SACCHAROMYCES CEREVISIAE (BAKER'S YEAST).//P51862

[3533] F-NT2RP2002750//!!!! ALU SUBFAMILY SB2 WARNING ENTRY !!!!//1.6e-09:43:72//HOMO SAPIENS (HUMAN).//P39191

[3534] F-NT2RP2002752//LOW CALCIUM RESPONSE LOCUS PROTEIN T.//0.95:33:39//YERSINIA PSEUDOTUBERCULOSIS.//Q00932

[3535] F-NT2RP2002753//ENDOGLUCANASE EG-1 PRECURSOR (EC 3.2.1.4) (ENDO-1,4-BETA-GLUCANASE) (CELLULASE).//0.71:78:33//TRICHODERMA LONGIBRACHIATUM.//Q12714

[3536] F-NT2RP2002769//50 KD SPICULE MATRIX PROTEIN PRECURSOR.//0.44:76:32//STRONGYLOCENTROTUS PURPURATUS (PURPLE SEA URCHIN).//P11994

[3537] F-NT2RP2002778

[3538] F-NT2RP2002800//CRAMBIN.//0.99:20:50//CRAMBE ABYSSINICA (ABYSSINIAN CRAMBE).//P01542

[3539] F-NT2RP2002839//SALIVARY PROLINE-RICH PROTEIN PRECURSOR (CLONE CP7) [CONTAINS: BASIC PEPTIDE P-F] (FRAGMENT).//0.010:87:31//HOMO SAPIENS (HUMAN).//P02812

[3540] F-NT2RP2002857//ACIDIC PROLINE-RICH PROTEIN PRECURSOR (CLONE PRP33).//0.00018:57:45//RATTUS NORVEGICUS (RAT).//P04474

[3541] F-NT2RP2002862//HYPOTHETICAL 27.1 KD PROTEIN UFD4-CAP1 INTERGENIC REGION.//7.2e-27:140:40//SACCHAROMYCES CEREVISIAE (BAKER'S YEAST).//P33201

[3542] F-NT2RP2002880//DNA REPAIR PROTEIN RAD32.//0.83:67:28//SCHIZOSACCHAROMYCES POMBE (FISSION YEAST).//Q09683

[3543] F-NT2RP2002891//HOMEOBOX PROTEIN DLX-2 (DLX-5) (FRAGMENT).//0.99:70:24//RATTUS NORVEGICUS (RAT).//Q64204

[3544] F-NT2RP2002925//ALPHA-1D ADRENERGIC RECEPTOR (ALPHA 1D-ADRENOCEPTOR) (ALPHA-1A ADRENERGIC RECEPTOR).//0.31:48:43//HOMO SAPIENS (HUMAN).//P25100

[3545] F-NT2RP2002928//CELL DIVISION CONTROL PROTEIN 40.//2.8e-26:142:42//SACCHAROMYCES CEREVISIAE (BAKER'S YEAST).//P40968

[3546] F-NT2RP2002929//HYPOTHETICAL 46.2 KD TRP-ASP REPEATS CONTAINING PROTEIN D2013.2 IN CHROMOSOME II.//2.0e-31:186:35//CAENORHABDITIS ELEGANS.//Q18964

[3547] F-NT2RP2002939//ADENYLATE CYCLASE, TYPE V (EC 4.6.1.1) (ATP PYROPHOSPHATE-LYASE) (CA(2+)-INHIBITABLE ADENYLYL CYCLASE).//0.0022:98:39//CANIS FAMILIARIS (DOG).//P30803

[3548] F-NT2RP2002954//U2 SMALL NUCLEAR RIBONUCLEOPROTEIN A′ (U2 SNRNP-A′).//0.0019:107:30//ARABIDOPSIS THALIANA (MOUSE-EAR CRESS).//P43333

[3549] F-NT2RP2002959//UBIQUITIN-CONJUGATING ENZYME E2-17 KD 2 (EC 6.3.2.19) (UBIQUITIN- PROTEIN LIGASE) (UBIQUITIN CARRIER PROTEIN) (E2(17)KB 2).//2.8e-11:33:81//HOMO SAPIENS (HUMAN), MUS MUSCULUS (MOUSE), RATTUS NORVEGICUS (RAT), AND XENOPUS LAEVIS (AFRICAN CLAWED FROG).//P51669

[3550] F-NT2RP2002979

[3551] F-NT2RP2002980//30S RIBOSOMAL PROTEIN S10.//1.1e-09:98:36//MYCOPLASMA CAPRICOLUM.//P10129

[3552] F-NT2RP2002986//RING CANAL PROTEIN (KELCH PROTEIN).//1.1e-19:141:39//DROSOPHILA MELANOGASTER (FRUIT FLY).//Q04652

[3553] F-NT2RP2002987//!!!! ALU SUBFAMILY SC WARNING ENTRY !!!!//1.3e-07:78:47//HOMO SAPIENS (HUMAN).//P39192

[3554] F-NT2RP2002993//DNA-DIRECTED RNA POLYMERASE 1135 KD POLYPEPTIDE (EC 2.7.7.6) (RNA POLYMERASE I SUBUNIT 2) (RPA135) (RNA POLYMERASE 1127 KD SUBUNIT).//8.0e-77:165:85//RATTUS NORVEGICUS (RAT).//O54888

[3555] F-NT2RP2003000/!!!!! ALU SUBFAMILY SQ WARNING ENTRY !!!!//2.8e-19:62:64//HOMO SAPIENS (HUMAN).//P39194

[3556] F-NT2RP2003034//HYPOTHETICAL PROTEIN HI1458.//1.0:42:35//HAEMOPHILUS INFLUENZAE.//P44204

[3557] F-NT2RP2003073//!!!! ALU SUBFAMILY SB WARNING ENTRY !!!!//0.0051:16:87//HOMO SAPIENS (HUMAN).//P39189

[3558] F-NT2RP2003099

[3559] F-NT2RP2003108//BASIC PROLINE-RICH PEPTIDE IB-1.//0.84:47:34//HOMO SAPIENS (HUMAN).//P04281

[3560] F-NT2RP2003117

[3561] F-NT2RP2003121//HYPOTHETICAL 96.7 KD PROTEIN IN STE2-FRS2 INTERGENIC REGION.//9.0e-08:99:29//SACCHAROMYCES CEREVISIAE (BAKER'S YEAST).//P43572

[3562] F-NT2RP2003125//TRANSCRIPTION REGULATOR PROTEIN BACH2 (BTB AND CNC HOMOLOG 2).//9.2e-08:134:28//MUS MUSCULUS (MOUSE).//P97303

[3563] F-NT2RP2003129

[3564] F-NT2RP2003137//UBIQUITIN.//3.4e-06:70:30//NEUROSPORA CRASSA.//P13117

[3565] F-NT2RP2003157//HYPOTHETICAL 37.0 KD PROTEIN B0495.8 IN CHROMOSOME II.//7.8e-13:84:40//CAENORHABDITIS ELEGANS.//Q09217

[3566] F-NT2RP2003158//26S PROTEASOME REGULATORY SUBUNIT S3 (PROTEASOME SUBUNIT P58).//3.1e-65:155:84//HOMO SAPIENS (HUMAN).//O43242

[3567] F-NT2RP2003161//PROLINE-RICH PROTEIN MP-2 PRECURSOR.//0.0011:59:42//MUS MUSCULUS (MOUSE).//P05142

[3568] F-NT2RP2003164//ZYXIN.//0.0037:85:36//MUS MUSCULUS (MOUSE).//Q62523

[3569] F-NT2RP2003165//!!!! ALU SUBFAMILY SQ WARNING ENTRY !!!!//1.2e-24:77:64//HOMO SAPIENS (HUMAN).//P39194

[3570] F-NT2RP2003177//MALE SPECIFIC SPERM PROTEIN MST84 DB.//0.55:38:39//DROSOPHILA MELANOGASTER (FRUIT FLY).//Q01643

[3571] F-NT2RP2003194//HYPOTHETICAL 12.5 KD PROTEIN ZK637.2 IN CHROMOSOME III.//2.3e-14:87:37//CAENORHABDITIS ELEGANS.//P30629

[3572] F-NT2RP2003206//NADH-UBIQUINONE OXIDOREDUCTASE CHAIN 3 (EC 1.6.5.3).//1.0:100:28//DIDELPHIS MARSUPIALIS VIRGINIANA (NORTH AMERICAN OPOSSUM).//P41306

[3573] F-NT2RP2003228//DNA REPLICATION LICENSING FACTOR MCM4 (CDC21 HOMOLOG) (P1-CDC21).//9.3e-82:211:81//HOMO SAPIENS (HUMAN).//P33991

[3574] F-NT2RP2003230//SEC14 CYTOSOLIC FACTOR (PHOSPHATIDYLINOSITOL/PHOSPHATIDYLCHOLINE TRANSFER PROTEIN) (PI/PC TP).//1.0:51:31//CANDIDA GLABRATA (YEAST) (TORULOPSIS GLABRATA).//P53989

[3575] F-NT2RP2003237//!!!! ALU SUBFAMILY SQ WARNING ENTRY !!!!//5.1e-44:66:84//HOMO SAPIENS (HUMAN).//P39194

[3576] F-NT2RP2003243//M PROTEIN, SEROTYPE 5 PRECURSOR.//0.027:204:23//STREPTOCOCCUS PYOGENES.//P02977

[3577] F-NT2RP2003265//BP4A PROTEIN.//0.95:35:34//BRASSICA NAPUS (RAPE).//P41505

[3578] F-NT2RP2003272//ANTER-SPECIFIC PROLINE-RICH PROTEIN APG (PROTEIN CEX) (FRAGMENT).//5.5e-06:78:35//BRASSICA NAPUS (RAPE).//P40603

[3579] F-NT2RP2003277//NAM7 PROTEIN (NONSENSE-MEDIATED MRNA DECAY PROTEIN 1) (UP-FRAMESHIFT SUPPRESSOR 1).//1.9e-19:145:43//SACCHAROMYCES CEREVISIAE (BAKER'S YEAST).//P30771

[3580] F-NT2RP2003280

[3581] F-NT2RP2003286//RNA 3′-TERMINAL PHOSPHATE CYCLASE (EC 6.5.1.4) (RNA-3′-PHOSPHATE CYCLASE) (RNA CYCLASE).//2.1e-32:137:42//SACCHAROMYCES CEREVISIAE (BAKER'S YEAST).//Q08096

[3582] F-NT2RP2003293//ZINC FINGER PROTEIN 83 (ZINC FINGER PROTEIN HPF1).//7.7e-12:175:33//HOMO SAPIENS (HUMAN).//P51522

[3583] F-NT2RP2003295//PTB-ASSOCIATED SPLICING FACTOR (PSF).//0.055:44:45//HOMO SAPIENS (HUMAN).//P23246

[3584] F-NT2RP2003297

[3585] F-NT2RP2003307//KINESIN LIGHT CHAIN (KLC).//2.0e-18:87:49//RATTUS NORVEGICUS (RAT).//P37285

[3586] F-NT2RP2003308//CROOKED NECK PROTEIN.//2.1e-91:244:67//DROSOPHILA MELANOGASTER (FRUIT FLY).//P17886

[3587] F-NT2RP2003329//HYPOTHETICAL 54.9 KD PROTEIN C02F5.7 IN CHROMOSOME III.//5.8e-57:186:55//CAENORHABDITIS ELEGANS.//P34284

[3588] F-NT2RP2003339//SHORT NEUROTOXIN 1 (NEUROTOXIN ALPHA).//0.98:11:72//DENDROASPIS POLYLEPIS POLYLEPIS (BLACK MAMBA).//P01416

[3589] F-NT2RP2003347//60S RIBOSOMAL PROTEIN L38.//0.83:42:33//OSTERTAGIA OSTERTAGI.//O61570

[3590] F-NT2RP2003367//SYNERGISTIC-TYPE VENOM PROTEIN C9S3, CHAIN 1.//1.0:37:35//DENDROASPIS ANGUSTICEPS (EASTERN GREEN MAMBA).//P01408

[3591] F-NT2RP2003391//MRNA TRANSPORT REGULATOR MTR10.//3.3e-11:229:24//SACCHAROMYCES CEREVISIAE (BAKER'S YEAST).//Q99189

[3592] F-NT2RP2003393//PROTOCHLOROPHYLLIDE REDUCTASE CHLB SUBUNIT (EC 1.3.1.33) (NADPH- PROTOCHLOROPHYLLIDE OXIDOREDUCTASE CHLB SUBUNIT) (FRAGMENT).//0.94:29:34//ARAUCARIA HETEROPHYLLA.//P37843

[3593] F-NT2RP2003394

[3594] F-NT2RP2003401//60 KD CHAPERONIN (PROTEIN CPN60) (GROEL PROTEIN).//0.95:125:28//THERMUS AQUATICUS (SUBSP. THERMOPHILUS).//P45746

[3595] F-NT2RP2003433//PROTEIN TRANSPORT PROTEIN SEC61 ALPHA SUBUNIT.//9.8e-78:178:84//RATTUS NORVEGICUS (RAT).//P38378

[3596] F-NT2RP2003445

[3597] F-NT2RP2003446//HYPOTHETICAL PROTEIN E-115.//0.00030:106:33//HUMAN ADENOVIRUS TYPE 2.//P03290

[3598] F-NT2RP2003456//PHOTOSYSTEM II REACTION CENTRE M PROTEIN.//1.0:27:51//MARCHANTIA POLYMORPHA (LIVERWORT).//P12168

[3599] F-NT2RP2003466//LINOLEOYL-COA DESATURASE (EC 1.14.99.25) (DELTA(6)-DESATURASE).//6.7e-06:108:32//SYNECHOCYSTIS SP. (STRAIN PCC 6803).//Q08871

[3600] F-NT2RP2003480//TRANSCRIPTION FACTOR BF-2 (BRAIN FACTOR 2) (BF2) (CBF-2) (T-14-6).//7.2e-15:38:50//GALLUS GALLUS (CHICKEN).//Q98937

[3601] F-NT2RP2003499//5E5 ANTIGEN.//0.090:114:32//RATTUS NORVEGICUS (RAT).//Q63003

[3602] F-NT2RP2003506//NADPH-CYTOCHROME P450 REDUCTASE (EC 1.6.2.4) (CPR).//2.0e-11:91:43//SUS SCROFA (PIG).//P04175

[3603] F-NT2RP2003511//PARAMYOSIN, SHORT FORM (MIMIPARAMYOSIN).//0.0020:108:25//DROSOPHILA MELANOGASTER (FRUIT FLY).//P35416

[3604] F-NT2RP2003513//PTB-ASSOCIATED SPLICING FACTOR (PSF).//1.2e-05:96:36//HOMO SAPIENS (HUMAN).//P23246

[3605] F-NT2RP2003517//HYPOTHETICAL 12.9 KD PROTEIN CY49.27.//0.0059:22:31//MYCOBACTERIUM TUBERCULOSIS.//Q10696

[3606] F-NT2RP2003522//HYPOTHETICAL 10.0 KD PROTEIN.//1.0:65:30//THERMOPROTEUS TENAX VIRUS 1 (STRAIN KRA1) (TTV1).//P19283

[3607] F-NT2RP2003533//LINE-1 REVERSE TRANSCRIPTASE HOMOLOG.//8.7e-18:94:54//HOMO SAPIENS (HUMAN).//P08547

[3608] F-NT2RP2003543//SYNAPSINS IA AND IB.//0.045:101:35//RATTUS NORVEGICUS (RAT).//P09951

[3609] F-NT2RP2003559//ITBA2 PROTEIN (DXS9879E).//0.98:37:37//HOMO SAPIENS (HUMAN).//Q14657

[3610] F-NT2RP2003564//52 KD RO PROTEIN (SJOGREN SYNDROME TYPE A ANTIGEN (SS-A)) (RO(SS-A)).//6.4e-35:175:44//HOMO SAPIENS (HUMAN).//P19474

[3611] F-NT2RP2003567//HYPOTHETICAL 11.2 KD PROTEIN T18D3.7 IN CHROMOSOME X.//0.72:82:34//CAENORHABDITIS ELEGANS.//Q22544

[3612] F-NT2RP2003581//HOMEOBOX PROTEIN OTX1.//0.90:61:37//MUS MUSCULUS (MOUSE).//P80205

[3613] F-NT2RP2003596//ELONGATION FACTOR P (EF-P).//0.83:61:32//MYCOPLASMA GENITALIUM.//P47272

[3614] F-NT2RP2003604//ALPHA-CATENIN.//1.5e-11:152:33//DROSOPHILA MELANOGASTER (FRUIT FLY).//P35220

[3615] F-NT2RP2003629//PHOSPHOLIPASE A2 ALPHA (EC 3.1.1.4) (PHOSPHATIDYLCHOLINE 2-ACYLHYDROLASE).//0.97:85:27//CROTALUS ADAMANTEUS (EASTERN DIAMONDBACK RATTLESNAKE).//P00623

[3616] F-NT2RP2003643//ACYLNEURAMINATE CYTIDYLYLTRANSFERASE (EC 2.7.7.43) (CMP-N-ACETYLNEURAMINIC ACID SYNTHETASE) (CMP-NEUNAC SYNTHETASE) (CMP-SIALIC ACID SYNTHETASE).//3.9e-12:84:40//NEISSERIA MENINGITIDIS.//Q57385

[3617] F-NT2RP2003668//!!!! ALU SUBFAMILY SX WARNING ENTRY !!!!//5.0e-33:74:81//HOMO SAPIENS (HUMAN).//P39195

[3618] F-NT2RP2003687//!!!! ALU SUBFAMILY J WARNING ENTRY !!!!//5.7e-05:40:67//HOMO SAPIENS (HUMAN).//P39188

[3619] F-NT2RP2003691//!!!! ALU SUBFAMILY SQ WARNING ENTRY !!!!//2.5e-37:56:67//HOMO SAPIENS (HUMAN).//P39194

[3620] F-NT2RP2003702//HYPOTHETICAL OXIDOREDUCTASE IN INLA 5′REGION (EC 1.-.-.-) (ORFA).//1.3e-07:98:37//LISTERIA MONOCYTOGENES.//P25145

[3621] F-NT2RP2003704//GAMMA-GLUTAMYLTRANSPEPTIDASE 5 PRECURSOR (EC 2.3.2.2) (GAMMA-GLUTAMYLTRANSFERASE 5) (GGT-REL).//0.66:23:52//HOMO SAPIENS (HUMAN).//P36269

[3622] F-NT2RP2003706//GLUTAMYL AMINOPEPTIDASE (EC 3.4.11.7) (EAP) (AMINOPEPTIDASE A) (APA) (DIFFERENTIATION ANTIGEN GP160).//1.2e-22:187:35//HOMO SAPIENS (HUMAN).//Q07075

[3623] F-NT2RP2003713//UBIQUITIN CARBOXYL-TERMINAL HYDROLASE 6 (EC 3.1.2.15) (UBIQUITIN THIOLESTERASE 6) (UBIQUITIN-SPECIFIC PROCESSING PROTEASE 6) (DEUBIQUITINATING ENZYME 6) (PROTO-ONCOGENE TRE-2).//2.7e-06:119:34//HOMO SAPIENS (HUMAN).//P35125

[3624] F-NT2RP2003714//ZINC FINGER PROTEIN 91 (ZINC FINGER PROTEIN HTF10) (HPF7).//6.7e-27:68:75//HOMO SAPIENS (HUMAN).//Q05481

[3625] F-NT2RP2003727//HYPOTHETICAL PROTEIN MG007 HOMOLOG.//0.64:110:30//MYCOPLASMA PNEUMONIAE.//P75105

[3626] F-NT2RP2003737//UBIQUITIN-CONJUGATING ENZYME E2-17 KD 2 (EC 6.3.2.19) (UBIQUITIN-PROTEIN LIGASE) (UBIQUITIN CARRIER PROTEIN) (E2(17)KB 2).//1.2e-72:147:90//HOMO SAPIENS (HUMAN), MUS MUSCULUS (MOUSE), RATTUS NORVEGICUS (RAT), AND XENOPUS LAEVIS (AFRICAN CLAWED FROG).//P51669

[3627] F-NT2RP2003751//EXTRACELLULAR GLOBIN PRECURSOR.//0.67:68:30//PSEUDOTERRANOVA DECIPIENS (COD WORM).//P26914

[3628] F-NT2RP2003760//COATOMER GAMMA SUBUNIT (GAMMA-COAT PROTEIN) (GAMMA-COP).//1.0e-98:235:82//BOS TAURUS (BOVINE).//P53620

[3629] F-NT2RP2003764//HYPOTHETICAL 29.3 KD PROTEIN (ORF92).//0.01:69:34//ORGYIA PSEUDOTSUGATA MULTICAPSID POLYHEDROSIS VIRUS (OPMNPV).//O10341

[3630] F-NT2RP2003769//ATP SYNTHASE PROTEIN 8 (EC 3.6.1.34) (A6L).//1.0:33:36//EQUUS CABALLUS (HORSE).//P48663

[3631] F-NT2RP2003770//PHOSPHATE REGULON SENSOR PROTEIN PHOR (EC 2.7.3.-) (FRAGMENT).//0.029:35:42//PSEUDOMONAS AERUGINOSA.//P23621

[3632] F-NT2RP2003777//HYPOTHETICAL 82 KD AVIRULENCE PROTEIN IN AVRBS3 REGION.//0.041:67:34//XANTHOMONAS CAMPESTRIS (PV. VESICATORIA).//P14728

[3633] F-NT2RP2003781//HYPOTHETICAL 36.7 KD PROTEIN AH6.2 IN CHROMOSOME II.//4.7e-54:204:47//CAENORHABDITIS ELEGANS.//Q09201

[3634] F-NT2RP2003793//PSEUDO-HEVEIN (MINOR HEVEIN).//0.61:30:36//HEVEA BRASILIENSIS (PARA RUBBER TREE).//P80359

[3635] F-NT2RP2003825//ENDOTHELIN-1 PRECURSOR (ET-1) (FRAGMENT).//1.0:35:37//CANIS FAMILIARIS (DOG).//P13206

[3636] F-NT2RP2003840//HYPOTHETICAL 48.1 KD PROTEIN B0403.2 IN CHROMOSOME X.//2.5e-05:80:38//CAENORHABDITIS ELEGANS.//Q11076

[3637] F-NT2RP2003857//BACTERIOCIN MICROCIN B17 PRECURSOR (MCB17).//0.54:28:50//ESCHERICHIA COLI.//P05834

[3638] F-NT2RP2003859//DROSOCIN PRECURSOR.//1.0:37:35//DROSOPHILA MELANOGASTER (FRUIT FLY).//P36193

[3639] F-NT2RP2003871

[3640] F-NT2RP2003885//CUTICLE PROTEIN 32 (LM-32) (LM-ACP 32) (FRAGMENT).//1.0:28:50//LOCUSTA MIGRATORIA (MIGRATORY LOCUST).//P11736

[3641] F-NT2RP2003912//SERINE/THREONINE-PROTEIN KINASE NEK1 (EC 2.7.1.-) (NIMA-RELATED PROTEIN KINASE 1).//4.8e-1110:268:80//MUS MUSCULUS (MOUSE).//P51954

[3642] F-NT2RP2003952//AMINOPEPTIDASE B (EC 3.4.11.6) (ARGINYL AMINOPEPTIDASE) (ARGININE AMINOPEPTIDASE) (CYTOSOL AMINOPEPTIDASE IV) (AP-B).//0.00024:92:31//RATTUS NORVEGICUS (RAT).//O09175

[3643] F-NT2RP2003968//SKIN SECRETORY PROTEIN XP2 PRECURSOR (APEG PROTEIN).//9.2e-05:101:36//XENOPUS LAEVIS (AFRICAN CLAWED FROG).//P17437

[3644] F-NT2RP2003976//!!!! ALU SUBFAMILY J WARNING ENTRY !!!!//1.7e-21:62:62//HOMO SAPIENS (HUMAN).//P39188

[3645] F-NT2RP2003981//VACUOLAR PROTEIN SORTING-ASSOCIATED PROTEIN VPS8.//2.7e-08:165:22//SACCHAROMYCES CEREVISIAE (BAKER'S YEAST).//P39702

[3646] F-NT2RP2003984//UNC-87 PROTEIN.//0.75:71:28//CAENORHABDITIS ELEGANS.//P37806

[3647] F-NT2RP2003986//!!!! ALU SUBFAMILY SP WARNING ENTRY !!!!//5.3e-19:47:70//HOMO SAPIENS (HUMAN).//P39193

[3648] F-NT2RP2003988//!!!! ALU SUBFAMILY SX WARNING ENTRY !!!!//2.2e-18:80:58//HOMO SAPIENS (HUMAN).//P39195

[3649] F-NT2RP2004013//TRANSCRIPTION FACTOR BTF3 (RNA POLYMERASE B TRANSCRIPTION FACTOR 3).//1.0e-52:141:77//HOMO SAPIENS (HUMAN).//P20290

[3650] F-NT2RP2004014//MACROPHAGE INFLAMMATORY PROTEIN-2-ALPHA (MIP2-ALPHA) (CINC-2-ALPHA).//0.99:45:26//RATTUS NORVEGICUS (RAT).//Q10746

[3651] F-NT2RP2004041//SYNAPSINS IA AND IB.//0.0022:51:37//BOS TAURUS (BOVINE).//P17599

[3652] F-NT2RP2004042//CRUSTACEAN HYPERGLYCEMIC HORMONE PRECURSOR (CHH) (FRAGMENT).//1.0:49:28//PENAEUS VANNAMEI (PENOEID SHRIMP) (EUROPEAN WHITE SHRIMP).//Q26181

[3653] F-NT2RP2004066//CALDESMON (CDM).//2.9e-05:175:21//GALLUS GALLUS (CHICKEN).//P12957

[3654] F-NT2RP2004081//CADMIUM-METALLOTHIONEIN (CD-MT).//0.93:59:23//HELIX POMATIA (ROMAN SNAIL) (EDIBLE SNAIL).//P33187

[3655] F-NT2RP2004098//RAS SUPPRESSOR PROTEIN 1 (RSU-1) (RSP-1 PROTEIN) (RSP-1).//4.6e-09:121:30//HOMO SAPIENS (HUMAN).//Q15404

[3656] F-NT2RP2004124//NONHISTONE CHROMOSOMAL PROTEIN HMG-17.//0.068:63:31//GALLUS GALLUS (CHICKEN).//P02314

[3657] F-NT2RP2004142//HYPOTHETICAL 59.1 KD PROTEIN IN VPS15-YMC2 INTERGENIC REGION.//7.9e-05:94:28//SACCHAROMYCES CEREVISIAE (BAKER'S YEAST).//P38262

[3658] F-NT2RP2004152//LAMIN L(I).//0.25:167:19//XENOPUS LAEVIS (AFRICAN CLAWED FROG).//P09010

[3659] F-NT2RP2004165//HYPOTHETICAL 57.5 KD PROTEIN IN VMA7-RPS25A INTERGENIC REGION.//0.0014:124:31//SACCHAROMYCES CEREVISIAE (BAKER'S YEAST).//P53214

[3660] F-NT2RP2004170//PROLINE-RICH PROTEIN MP-3 (FRAGMENT).//0.012:125:30//MUS MUSCULUS (MOUSE).//P05143

[3661] F-NT2RP2004172//HYPOTHETICAL 105.7 KD PROTEIN IN TPK3-PIR1 INTERGENIC REGION.//4.1e-26:214:35//SACCHAROMYCES CEREVISIAE (BAKER'S YEAST).//P36051

[3662] F-NT2RP2004187//ZINC FINGER PROTEIN 174.//3.7e-12:76:47//HOMO SAPIENS (HUMAN).//Q15697

[3663] F-NT2RP2004194//HYPOTHETICAL 10.5 KD PROTEIN C31A2.13C IN CHROMOSOME I.//0.0013:92:23//SCHIZOSACCHAROMYCES POMBE (FISSION YEAST).//Q09730

[3664] F-NT2RP2004196//METALLOTHIONEIN 10-II (MT-10-II).//0.92:36:36//MYTILUS EDULIS (BLUE MUSSEL).//P80247

[3665] F-NT2RP2004207//MALE ACCESSORY GLAND SECRETORY PROTEIN 355A PRECURSOR.//0.92:62:35//DROSOPHILA SIMULANS (FRUIT FLY).//P33737

[3666] F-NT2RP2004226//66 KD STRESS PROTEIN (P66).//0.030:113:26//PHYSARUM POLYCEPHALUM (SLIME MOLD).//P90587

[3667] F-NT2RP2004232//PROTEIN KINASE C, MU TYPE (EC 2.7.1.-) (NPKC-MU).//2.0e-48:211:51//HOMO SAPIENS (HUMAN).//Q15139

[3668] F-NT2RP2004239//GLUTENIN, HIGH MOLECULAR WEIGHT SUBUNIT PW212 PRECURSOR.//0.00038:111:36//TRITICUM AESTIVUM (WHEAT).//P08489

[3669] F-NT2RP2004240//METALLOTHIONEIN-II (MT-II) (METALLOTHIONEIN-LIKE PROTEIN) (MT-CE).//1.0:39:28//CAENORHABDITIS ELEGANS.//P17512

[3670] F-NT2RP2004242//RAS-RELATED PROTEIN RGP1 (GTP-BINDING REGULATORY PROTEIN RGP1).//0.0036:64:28//ORYZA SATIVA (RICE).//P25766

[3671] F-NT2RP2004245//ATP SYNTHASE PROTEIN 8 (EC 3.6.1.34) (A6L).//1.0:21:42//PONGO PYGMAEUS PYGMAEUS (BORNEAN ORANGUTAN).//P92896

[3672] F-NT2RP2004270//SPIDROIN 2 (DRAGLINE SILK FIBROIN 2) (FRAGMENT).//0.00023:118:33//NEPHILA CLAVIPES (ORB SPIDER).//P46804

[3673] F-NT2RP2004300//PROBABLE E4 PROTEIN.//0.18:77:40//HUMAN PAPILLOMAVIRUS TYPE 8.//P06425

[3674] F-NT2RP2004316

[3675] F-NT2RP2004321//HYPOTHETICAL 10.8 KD PROTEIN SSR2439.//1.0:50:28//SYNECHOCYSTIS SP. (STRAIN PCC 6803).//Q01904

[3676] F-NT2RP2004339//!!!! ALU SUBFAMILY SX WARNING ENTRY !!!!//5.0e-33:84:77//HOMO SAPIENS (HUMAN).//P39195

[3677] F-NT2RP2004347//HYPOTHETICAL 40.9 KD PROTEIN F33H1.3 FROM CHROMOSOME II.//0.78:96:30//CAENORHABDITIS ELEGANS.//Q09556

[3678] F-NT2RP2004364//MINOR OUTER CAPSID PROTEIN (NS26) (NONSTRUCTURAL PROTEIN VP9).//0.059:143:30//BOVINE ROTAVIRUS (STRAIN UK).//P04515

[3679] F-NT2RP2004365//EAMZP30-47 PROTEIN (FRAGMENT).//0.27:38:39//EIMERIA ACERVULINA.//P21959

[3680] F-NT2RP2004366//GLYCOPROTEIN L PRECURSOR.//0.64:71:28//MAREK'S DISEASE HERPESVIRUS (STRAIN GA) (MDHV).//P52510

[3681] F-NT2RP2004373//HISTIDINE-RICH GLYCOPROTEIN PRECURSOR (HISTIDINE-PROLINE RICH GLYCOPROTEIN) (HPRG) (FRAGMENT).//0.59:50:40//ORYCTOLAGUS CUNICULUS (RABBIT).//Q28640

[3682] F-NT2RP2004389//HYPOTHETICAL 70.7 KD PROTEIN F09G8.3 IN CHROMOSOME III.//4.0e-16:89:43//CAENORHABDITIS ELEGANS.//P34388

[3683] F-NT2RP2004392

[3684] F-NT2RP2004396//SINGLE-STRANDED NUCLEIC ACID-BINDING PROTEIN.//0.42:89:29//SACCHAROMYCES CEREVISIAE (BAKER'S YEAST).//P10080

[3685] F-NT2RP2004399//SOMATOTROPIN PRECURSOR (GROWTH HORMONE).//1.0:72:34//MESOCRICETUS AURATUS (GOLDEN HAMSTER).//P37886

[3686] F-NT2RP2004400

[3687] F-NT2RP2004412//SPERM PROTAMINE P1./0.24:38:31//NOTORYCTES TYPHLOPS (MARSUPIAL MOLE).//P42143

[3688] F-NT2RP2004425//SUPPRESSOR PROTEIN SRP40.//0.0087:197:22//SACCHAROMYCES CEREVISIAE (BAKER'S YEAST).//P32583

[3689] F-NT2RP2004463//ALPHA-2A ADRENERGIC RECEPTOR (ALPHA-2A ADRENOCEPTOR) (ALPHA-2AAR).//1.3e-05:121:37//MUS MUSCULUS (MOUSE).//Q01338

[3690] F-NT2RP2004476//NICKEL-SENSITIVE T-TYPE CALCIUM CHANNEL ALPHA-1 SUBUNIT (RBE-II).//0.20:68:36//RATTUS NORVEGICUS (RAT).//Q07652

[3691] F-NT2RP2004490//FOS-RELATED ANTIGEN I.//0.94:59:33//HOMO SAPIENS (HUMAN).//P15407

[3692] F-NT2RP2004512//NADH-UBIQUINONE OXIDOREDUCTASE CHAIN 4 (EC 1.6.5.3) (FRAGMENTS).//1.0:37:32//PISASTER OCHRACEUS (SEA STAR).//P24998

[3693] F-NT2RP2004523//!!!! ALU SUBFAMILY SQ WARNING ENTRY !!!!//2.1e-15:57:71//HOMO SAPIENS (HUMAN).//P39194

[3694] F-NT2RP2004538//KINESIN-LIKE PROTEIN KIFIA (AXONAL TRANSPORTER OF SYNAPTIC VESICLES).//1.2e-48:121:60//HOMO SAPIENS (HUMAN).//Q12756

[3695] F-NT2RP2004551//HYPOTHETICAL 7.6 KD PROTEIN (ORF 65).//1.0:20:50//EUGLENA GRACILIS.//P32095

[3696] F-NT2RP2004568//PUTATIVE ATP-DEPENDENT RNA HELICASE C30D11.03.//5.2e-07:150:30//SCHIZOSACCHAROMYCES POMBE (FISSION YEAST).//Q09903

[3697] F-NT2RP2004580//!!!! ALU SUBFAMILY SC WARNING ENTRY !!!!//3.7e-37:100:78//HOMO SAPIENS (HUMAN).//P39192

[3698] F-NT2RP2004587//HYPOTHETICAL 57.5 KD PROTEIN IN VMA7-RPS25A INTERGENIC REGION.//8.2e-06:150:32//SACCHAROMYCES CEREVISIAE (BAKER'S YEAST).//P53214

[3699] F-NT2RP2004594//HYPOTHETICAL 45.3 KD PROTEIN C09F5.7 IN CHROMOSOME II.//0.84:105:24//CAENORHABDITIS ELEGANS.//Q09458

[3700] F-NT2RP2004600//MYRISTOYLATED ALANINE-RICH C-KINASE SUBSTRATE (MARCKS).//0.17:127:29//RATTUS NORVEGICUS (RAT).//P30009

[3701] F-NT2RP2004602//!!!! ALU SUBFAMILY J WARNING ENTRY !!!!//1.1e-05:50:58//HOMO SAPIENS (HUMAN).//P39188

[3702] F-NT2RP2004614//HYPOTHETICAL 11.6 KD PROTEIN.//1.0:68:33//VACCINIA VIRUS (STRAIN COPENHAGEN).//P20561

[3703] F-NT2RP2004655//GLYCINE-RICH RNA-BINDING PROTEIN 7.//7.0e-05:70:42//ARABIDOPSIS THALIANA (MOUSE-EAR CRESS).//Q03250

[3704] F-NT2RP2004664//HYPOTHETICAL 104.0 KD PROTEIN C32A11.03C IN CHROMOSOME I.//0.30:78:38//SCHIZOSACCHAROMYCES POMBE (FISSION YEAST).//Q10328

[3705] F-NT2RP2004675

[3706] F-NT2RP2004681

[3707] F-NT2RP2004689//HYPOTHETICAL 78.3 KD PROTEIN IN RAM2-ATP7 INTERGENIC REGION.//0.021:179:24//SACCHAROMYCES CEREVISIAE (BAKER'S YEAST).//P34243

[3708] F-NT2RP2004709//HYPOTHETICAL PROTEIN MJ0647.//0.90:39:43//METHANOCOCCUS JANNASCHII.//Q58063

[3709] F-NT2RP2004710//GAR2 PROTEIN.//0.085:60:30//SCHIZOSACCHAROMYCES POMBE (FISSION YEAST).//P41891

[3710] F-NT2RP2004736//!!!! ALU SUBFAMILY J WARNING ENTRY !!!!//4.4e-15:97:49//HOMO SAPIENS (HUMAN).//P39188

[3711] F-NT2RP2004743//MALE SPECIFIC SPERM PROTEIN MST87F.//0.43:24:41//DROSOPHILA MELANOGASTER (FRUIT FLY).//P08175

[3712] F-NT2RP2004767//36.4 KD PROLINE-RICH PROTEIN.//0.0051:88:27//LYCOPERSICON ESCULENTUM (TOMATO).//Q00451

[3713] F-NT2RP2004768//SERINE/THREONINE-PROTEIN KINASE NRK1 (EC 2.7.1.-) (N-RICH KINASE 1).//9.0e-29:166:43//SACCHAROMYCES CEREVISIAE (BAKER'S YEAST).//P38692

[3714] F-NT2RP2004775

[3715] F-NT2RP2004791//PROBABLE LEUCYL-TRNA SYNTHETASE (EC 6.1.1.4) (LEUCINE-TRNA LIGASE) (LEURS).//7.4e-60:226:53//CAENORHABDITIS ELEGANS.//Q09996

[3716] F-NT2RP2004799//SUCCINYL-COA LIGASE [GDP-FORMING], BETA-CHAIN PRECURSOR (EC 6.2.1.4) (SUCCINYL-COA SYNTHETASE, BETA CHAIN) (SCS-BETA).//2.2e-42:133:57//NEOCALLIMASTIX FRONTALIS (RUMEN FUNGUS).//P53587

[3717] F-NT2RP2004802//HYPOTHETICAL 17.1 KD PROTEIN IN PUR5 3′REGION.//0.018:86:32//SACCHAROMYCES CEREVISIAE (BAKER'S YEAST).//P38898

[3718] F-NT2RP2004816//H<BETA>58 PROTEIN.//1.0e-68:145:93//MUS MUSCULUS (MOUSE).//P40336

[3719] F-NT2RP2004841//DSRD PROTEIN.//0.83:33:39//ARCHAEOGLOBUS FULGIDUS.//P70742

[3720] F-NT2RP2004861//KERATIN, HIGH-SULFUR MATRIX PROTEIN, IIIA3A.//0.0072:41:39//OVIS ARIES (SHEEP).//P02443

[3721] F-NT2RP2004897//METALLOTHIONEIN-LIKE PROTEIN 1.//0.99:41:41//CASUARINA GLAUCA (SWAMP OAK).//Q39511

[3722] F-NT2RP2004933//DEATH-ASSOCIATED PROTEIN KINASE 1 (EC 2.7.1.-) (DAP KINASE 1).//8.4e-34:102:67//HOMO SAPIENS (HUMAN).//P53355

[3723] F-NT2RP2004936//HIGH POTENTIAL IRON-SULFUR PROTEIN, ISOZYME 2 (HIPIP 2).//0.87:36:33//ECTOTHIORHODOSPIRA VACUOLATA.//P38524

[3724] F-NT2RP2004959//STEM CELL FACTOR PRECURSOR (SCF) (MAST CELL GROWTH FACTOR) (MGF) (C-KIT LIGAND).//1.0:69:28//CANIS FAMILIARIS (DOG).//Q06220

[3725] F-NT2RP2004961//ZINC FINGER PROTEIN 33A (ZINC FINGER PROTEIN KOX31) (KIAA0065) (HA0946) (FRAGMENT).//2.1e-21:73:58//HOMO SAPIENS (HUMAN).//Q06730

[3726] F-NT2RP2004962//!!!! ALU SUBFAMILY SB WARNING ENTRY !!!!//0.17:28:57//HOMO SAPIENS (HUMAN).//P39189

[3727] F-NT2RP2004967//HYPOTHETICAL 7.3 KD PROTEIN.//0.76:41:3//THERMOPROTEUS TENAX VIRUS 1 (STRAIN KRA1) (TTV1).//P19301

[3728] F-NT2RP2004978//SPERMATID-SPECIFIC PROTEIN T2 [CONTAINS: SPERM PROTAMINE SP2].//0.44:40:45//SEPIA OFFICINALIS (COMMON CUTTLEFISH).//P80002

[3729] F-NT2RP2004982

[3730] F-NT2RP2004985//HYPOTHETICAL PROTEIN KIAA0144.//1.2e-51:204:57//HOMO SAPIENS (HUMAN).//Q14157

[3731] F-NT2RP2004999//LONG NEUROTOXIN I (ALPHA-BUNGAROTOXIN) (BGTX).//0.23:73:26//BUNGARUS MULTICINCTUS (MANY-BANDED KRAIT).//P01378

[3732] F-NT2RP2005000//ATPASE STABILIZING FACTOR 15 KD PROTEIN.//0.12:37:32//SACCHAROMYCES CEREVISIAE (BAKER'S YEAST).//P16965

[3733] F-NT2RP2005001//SMALL PROLINE RICH PROTEIN II (SPR-II) (CLONE 930).//0.90:54:31//HOMO SAPIENS (HUMAN).//P22531

[3734] F-NT2RP2005003//DOWN REGULATORY PROTEIN OF INTERLEUKIN 2 RECEPTOR.//1.6e-30:78:56//MUS MUSCULUS (MOUSE).//P15533

[3735] F-NT2RP2005012//NPL1 PROTEIN (SEC63 PROTEIN).//0.00024:94:35//SACCHAROMYCES CEREVISIAE (BAKER'S YEAST).//P14906

[3736] F-NT2RP2005018//GAG POLYPROTEIN (CORE POLYPROTEIN) [CONTAINS: CORE PROTEINS P19, P10] (FRAGMENT).//1.0:91:28//AVIAN ENDOGENOUS ROUS-ASSOCIATED VIRUS-0 (EV-2) (AVIAN RETROVIRUS RAV-0).//P06937

[3737] F-NT2RP2005020

[3738] F-NT2RP2005022//VEGETATIBLE INCOMPATIBILITY PROTEIN HET-E-1.//4.9e-11:106:35//PODOSPORA ANSERINA.//Q00808

[3739] F-NT2RP2005031

[3740] F-NT2RP2005037//ANTI-SILENCING PROTEIN 1.//2.2e-32:117:55//SACCHAROMYCES CEREVISIAE (BAKER'S YEAST).//P32447

[3741] F-NT2RP2005038//DNA NUCLEOTIDYLEXOTRANSFERASE (EC 2.7.7.31) (TERMINAL ADDITION ENZYME) (TERMINAL DEOXYNUCLEOTIDYLTRANSFERASE) (TERMINAL TRANSFERASE).//9.3e-28:187:40//AMBYSTOMA MEXICANUM (AXOLOTL).//O57486

[3742] F-NT2RP2005108//CUTICLE COLLAGEN 2.//0.33:62:38//CAENORHABDITIS ELEGANS.//P17656

[3743] F-NT2RP2005116//PUTATIVE EUKARYOTIC TRANSLATION INITIATION FACTOR 3 ALPHA SUBUNIT (EIF-3 ALPHA).//4.0e-54:161:63//CAENORHABDITIS ELEGANS.//P34466

[3744] F-NT2RP2005126//CHLOROPLAST 50S RIBOSOMAL PROTEIN L27 (FRAGMENT).//0.23:46:39//PLEUROCHRYSIS HAPTONEMOFERA.//P41552

[3745] F-NT2RP2005139//COLLAGEN ALPHA 1(XII) CHAIN (FRAGMENTS).//0.016:43:37//BOS TAURUS (BOVINE).//P25508

[3746] F-NT2RP2005140//HYPOTHETICAL 7.4 KD PROTEIN YCF33.//0.96:51:39//GUILLARDIA THETA (CRYPTOMONAS PHI).//O78517

[3747] F-NT2RP2005144//TUBBY PROTEIN.//5.6e-08:66:45//MUS MUSCULUS (MOUSE).//P50586

[3748] F-NT2RP2005147

[3749] F-NT2RP2005159//PHOTOSYSTEM 114 KD REACTION CENTRE PROTEIN PRECURSOR.//0.94:57:29//NICOTIANA TABACUM (COMMON TOBACCO), AND SPINACIA OLERACEA (SPINACH).//P12164

[3750] F-NT2RP2005162//HYPOTHETICAL 54.2 KD PROTEIN IN ERP5-ORC6 INTERGENIC REGION.//1.2e-33:139:51//SACCHAROMYCES CEREVISIAE (BAKER'S YEAST).//P38821

[3751] F-NT2RP2005168//HETEROGENOUS NUCLEAR RIBONUCLEOPROTEIN U (HNRNP U).//2.8e-33:102:61//HOMO SAPIENS (HUMAN).//Q00839

[3752] F-NT2RP2005204//DNA DAMAGE TOLERANCE PROTEIN RHC31 (RAD31 HOMOLOG).//3.9e-28:141:42//SACCHAROMYCES CEREVISIAE (BAKER'S YEAST).//Q06624

[3753] F-NT2RP2005227

[3754] F-NT2RP2005239//TRNA SPLICING PROTEIN SPL1.//2.0e-38:117:64//CANDIDA ALBICANS (YEAST).//P87185

[3755] F-NT2RP2005254//OMEGA-AGATOXIN IB (OMEGA-AGA-IB) (FRAGMENT).//0.26:29:48//AGELENOPSIS APERTA (FUNNEL-WEB SPIDER).//P15970

[3756] F-NT2RP2005270//HOMEOBOX PROTEIN HOX-A4 (CHOX-1.4).//0.037:82:34//GALLUS GALLUS (CHICKEN).//P17277

[3757] F-NT2RP2005276//LONG-CHAIN-FATTY-ACID-COA LIGASE 4 (EC 6.2.1.3) (LONG-CHAIN ACYL-COA SYNTHETASE 4) (LACS 4).//2.0e-59:174:61//RATTUS NORVEGICUS (RAT).//O35547

[3758] F-NT2RP2005287//ZINC FINGER PROTEIN 26 (ZINC FINGER PROTEIN KOX20) (FRAGMENT).//1.5e-05:27:70//HOMO SAPIENS (HUMAN).//P17031

[3759] F-NT2RP2005288//PROBABLE RUBREDOXIN HUPI.//1.0:42:28//RHIZOBIUM LEGUMINOSARUM (BIOVAR VICIAE).//P28151

[3760] F-NT2RP2005289//!!!! ALU SUBFAMILY SP WARNING ENTRY !!!!//1.1e-21:75:70//HOMO SAPIENS (HUMAN).//P39193

[3761] F-NT2RP2005293//TRANSLATION INITIATION FACTOR IF-2.//0.58:170:24//HELICOBACTER PYLORI (CAMPYLOBACTER PYLORI).//P55972

[3762] F-NT2RP2005315//CUTICLE COLLAGEN 7 (FRAGMENT).//0.091:65:38//CAENORHABDITIS ELEGANS.//P18832

[3763] F-NT2RP2005325//CHROMOGRANIN A PRECURSOR (CGA) (PITUITARY SECRETORY PROTEIN I) (SP-I) [CONTAINS: PANCREASTATIN; WE-14].//9.5e-09:98:39//HOMO SAPIENS (HUMAN).//P10645

[3764] F-NT2RP2005336//HYPOTHETICAL 68.7 KD PROTEIN IN STB1-MCK1 INTERGENIC REGION.//0.00011:124:28//SACCHAROMYCES CEREVISIAE (BAKER'S YEAST).//P42846

[3765] F-NT2RP2005344//PROBABLE CALCIUM-TRANSPORTING ATPASE 4 (EC 3.6.1.38).//4.7e-21:92:52//SACCHAROMYCES CEREVISIAE (BAKER'S YEAST).//Q12675

[3766] F-NT2RP2005354

[3767] F-NT2RP2005358//MYOSIN IC HEAVY CHAIN.//0.012:91:39//ACANTHAMOEBA CASTELLANII (AMOEBA).//P10569

[3768] F-NT2RP2005360//ACROSIN PRECURSOR (EC 3.4.21.10).//0.0022:73:36//ORYCTOLAGUS CUNICULUS (RABBIT).//P48038

[3769] F-NT2RP2005393//HYPOTHETICAL 25.9 KD PROTEIN AH6.3 IN CHROMOSOME II.//0.00085:135:28//CAENORHABDITIS ELEGANS.//Q09202

[3770] F-NT2RP2005407//SQUALENE MONOOXYGENASE (EC 1.14.99.7) (SQUALENE EPOXIDASE) (SE).//0.96:109:26//SACCHAROMYCES CEREVISIAE (BAKER'S YEAST).//P32476

[3771] F-NT2RP2005436//EXTENSIN PRECURSOR (PROLINE-RICH GLYCOPROTEIN).//0.0011:54:42//ZEA MAYS (MAIZE).//P14918

[3772] F-NT2RP2005441//PROLINE-RICH PROTEIN MP-2 PRECURSOR.//0.039:182:29//MUS MUSCULUS (MOUSE).//P05142

[3773] F-NT2RP2005453

[3774] F-NT2RP2005457//NADH-UBIQUINONE OXIDOREDUCTASE SUBUNIT B14.5B (EC 1.6.5.3) (EC 1.6.99.3) (COMPLEX I-B 14.5B) (C1-B14.5B).//4.0e-10:124:37//BOS TAURUS (BOVINE).//Q02827

[3775] F-NT2RP2005464//HYPOTHETICAL 9.5 KD PROTEIN.//0.96:42:33//VACCINIA VIRUS (STRAIN COPENHAGEN).//P20553

[3776] F-NT2RP2005465//MITOCHONDRIAL CARRIER PROTEIN RIM2.//4.6e-09:92:42//SACCHAROMYCES CEREVISIAE (BAKER'S YEAST).//P38127

[3777] F-NT2RP2005472//HYPOTHETICAL PROTEIN BB0129.//0.76:80:32//BORRELIA BURGDORFERI (LYME DISEASE SPIROCHETE).//O51155

[3778] F-NT2RP2005476//!!!! ALU SUBFAMILY SP WARNING ENTRY !!!!//1.0e-31:39:89//HOMO SAPIENS (HUMAN).//P39193

[3779] F-NT2RP2005490//METALLOTHIONEIN-II (MT-II).//0.14:27:33//SCYLLA SERRATA (MUD CRAB).//P02806

[3780] F-NT2RP2005491//DNA-DIRECTED RNA POLYMERASE SUBUNIT I (EC 2.7.7.6).//0.95:45:31//METHANOCOCCUS JANNASCHII.//Q58785

[3781] F-NT2RP2005495//HYPOTHETICAL 10.8 KD PROTEIN IN GP30-RIII INTERGENIC REGION.//0.99:68:30//BACTERIOPHAGE T4.//Q02407

[3782] F-NT2RP2005496//ZINC FINGER PROTEIN 135.//1.4e-54:120:59//HOMO SAPIENS (HUMAN).//P52742

[3783] F-NT2RP2005498//PROTEIN PHOSPHATASE PP2A, 55 KD REGULATORY SUBUNIT, ALPHA ISOFORM (PROTEIN PHOSPHATASE PP2A B SUBUNIT ALPHA ISOFORM) (ALPHA-PR55).//9.5e-76:146:86//RATTUS NORVEGICUS (RAT).//P36876

[3784] F-NT2RP2005501//GALECTIN-3 (GALACTOSE-SPECIFIC LECTIN 3) (MAC-2 ANTIGEN) (IGE-BINDING PROTEIN) (35 KD LECTIN) (CARBOHYDRATE BINDING PROTEIN 35) (CBP 35) (LAMININ-BINDING PROTEIN) (LECTIN L-29) (L-31) (GALACTOSIDE-BINDING PROTEIN) (GALBP).//0.025:70:40//HOMO SAPIENS (HUMAN).//P17931

[3785] F-NT2RP2005509//PROCOLLAGEN ALPHA 1(I) CHAIN PRECURSOR.//1.0:166:27//GALLUS GALLUS (CHICKEN).//P02457

[3786] F-NT2RP2005520//CHROMOSOME ASSEMBLY PROTEIN XCAP-E.//7.9e-45:118:79//XENOPUS LAEVIS (AFRICAN CLAWED FROG).//P50533

[3787] F-NT2RP2005525//SOS RIBOSOMAL PROTEIN L11.//1.0:47:27//BORRELIA BURGDORFERI (LYME DISEASE SPIROCHETE).//O51354

[3788] F-NT2RP2005531//PROTEIN-TYROSINE PHOSPHATASE MEG1 (EC 3.1.3.48) (PTPASE-MEG1) (MEG).//9.8e-13:84:45//HOMO SAPIENS (HUMAN).//P29074

[3789] F-NT2RP2005539//RING CANAL PROTEIN (KELCH PROTEIN).//4.9e-10:90:33//DROSOPHILA MELANOGASTER (FRUIT FLY).//Q04652

[3790] F-NT2RP2005540//NUCLEOTIDE BINDING PROTEIN EXPZ.//0.36:119:21//BACILLUS SUBTILIS.//P39115

[3791] F-NT2RP2005549//HYPOTHETICAL 32.0 KD PROTEIN C16C10.10 IN CHROMOSOME III.//6.0e-39:179:46//CAENORHABDITIS ELEGANS.//Q09253

[3792] F-NT2RP2005555

[3793] F-NT2RP2005557//HYPOTHETICAL 23.7 KD PROTEIN C13G6.14 IN CHROMOSOME I.//4.9e-06:90:35//SCHIZOSACCHAROMYCES POMBE (FISSION YEAST).//Q09790

[3794] F-NT2RP2005581

[3795] F-NT2RP2005600//BASIC PROLINE-RICH PEPTIDE P-E (IB-9).//0.014:37:40//HOMO SAPIENS (HUMAN).//P02811

[3796] F-NT2RP2005605//GONADOLIBERIN I PRECURSOR (LHRH I) (LUTEINIZING HORMONE RELEASING HORMONE I) (GONADOTROPIN RELEASING HORMONE I) (GNRH I) (LULIBERIN I) (FRAGMENT).//0.64:26:42//MACACA MULATTA (RHESUS MACAQUE).//P55247

[3797] F-NT2RP2005620//HYPOTHETICAL 45.1 KD PROTEIN IN RPS5-ZMS1 INTERGENIC REGION.//8.7e-31:138:49//SACCHAROMYCES CEREVISIAE (BAKER'S YEAST).//P47160

[3798] F-NT2RP2005622//NEUROTOXIN-LIKE PROTEIN STR1 (ANATOXIN AAH STR1).//0.39:22:40//ANDROCTONUS AUSTRALIS HECTOR (SAHARA SCORPION).//P80950

[3799] F-NT2RP2005635//HYPOTHETICAL 80.7 KD PROTEIN IN ERG7-NMD2 INTERGENIC REGION.//5.8e-43:144:56//SACCHAROMYCES CEREVISIAE (BAKER'S YEAST).//P38795

[3800] F-NT2RP2005637//VPU PROTEIN (U ORF PROTEIN).//0.91:33:45//CHIMPANZEE IMMUNODEFICIENCY VIRUS (SIV(CPZ)) (CIV).//P17286

[3801] F-NT2RP2005640//METALLOTHIONEIN-LIKE PROTEIN LSC54.//0.63:41:31//BRASSICA NAPUS (RAPE).//P43402

[3802] F-NT2RP2005645

[3803] F-NT2RP2005651//OCTAMER-BINDING TRANSCRIPTION FACTOR 3A (OCT-3A) (OCT-4).//0.0023:50:42//HOMO SAPIENS (HUMAN).//Q01860

[3804] F-NT2RP2005654//HYPOTHETICAL 48.6 KD PROTEIN IN BET1-PAN1 INTERGENIC REGION.//6.1e-16:76:44//SACCHAROMYCES CEREVISIAE (BAKER'S YEAST).//P40564

[3805] F-NT2RP2005669//METALLOTHIONEIN-II (MT-II).//0.76:16:50//SCYLLA SERRATA (MUD CRAB).//P02806

[3806] F-NT2RP2005675//PUTATIVE ORAL CANCER SUPPRESSOR (DELETED IN ORAL CANCER-1).//6.5e-26:116:54//MESOCRICETUS AURATUS (GOLDEN HAMSTER).//P49119

[3807] F-NT2RP2005683//HYPOTHETICAL PROTEIN H10275.//0.17:50:40//HAEMOPHILUS INFLUENZAE.//P43975

[3808] F-NT2RP2005690//PYRROLINE-5-CARBOXYLATE REDUCTASE (EC 1.5.1.2) (P5CR) (P5C REDUCTASE).//1.3e-16:75:30//PISUM SATIVUM (GARDEN PEA).//Q04708

[3809] F-NT2RP2005694//HYPOTHETICAL PROTEIN KIAA0032.//9.6e-11:135:34//HOMO SAPIENS (HUMAN).//Q15034

[3810] F-NT2RP200570//SALIVARY PROLINE-RICH PROTEIN PO (ALLELE M) [CONTAINS: PEPTIDE P-D] (FRAGMENT).//0.084:158:32//HOMO SAPIENS (HUMAN).//P10161

[3811] F-NT2RP2005712//METALLOTHIONEIN-II (MT-II).//0.19:14:50//STENELLA COERULEOALBA (STRIPED DOLPHIN).//P14425

[3812] F-NT2RP2005719//COLLAGEN ALPHA I (I) CHAIN (FRAGMENT).//1.0:36:41//ORYCTOLAGUS CUNICULUS (RABBIT).//P02456

[3813] F-NT2RP2005722//ZINC FINGER PROTEIN ZFP-36 (FRAGMENT).//7.8e-37:131:62//HOMO SAPIENS (HUMAN).//P16415

[3814] F-NT2RP2005723//!!!! ALU SUBFAMILY SC WARNING ENTRY !!!!//0.98:23:60//HOMO SAPIENS (HUMAN).//P39192

[3815] F-NT2RP2005726//HYPOTHETICAL PROTEIN TP0375.//0.98:30:43//TREPONEMA PALLIDUM.//O83390

[3816] F-NT2RP2005732//PERIOD CLOCK PROTEIN (FRAGMENT).//0.41:20:55//DROSOPHILA ROBUSTA (FRUIT FLY).//Q03296

[3817] F-NT2RP2005741//SMR1 PROTEIN PRECURSOR (VCS-ALPHA 1).//0.38:58:36//RATTUS NORVEGICUS (RAT).//P13432

[3818] F-NT2RP2005748//ZINC FINGER PROTEIN KOX23 (FRAGMENT).//0.026:19:68//HOMO SAPIENS (HUMAN).//P17034

[3819] F-NT2RP2005752//PROCOLLAGEN ALPHA 1(III) CHAIN PRECURSOR.//0.90:101:31//HOMO SAPIENS (HUMAN).//P02461

[3820] F-NT2RP2005753//DNA-BINDING P52/P100 COMPLEX, 100 KD SUBUNIT (FRAGMENTS).//0.50:22:59//HOMO SAPIENS (HUMAN).//P30808

[3821] F-NT2RP2005763//PUTATIVE ATP-DEPENDENT RNA HELICASE STE13.//4.7e-14:108:37//SCHIZOSACCHAROMYCES POMBE (FISSION YEAST).//Q09181

[3822] F-NT2RP2005767//NONHISTONE CHROMOSOMAL PROTEIN 6B.//4.1e-08:65:32//SACCHAROMYCES CEREVISIAE (BAKER'S YEAST).//P11633

[3823] F-NT2RP2005773//PYRROLINE-5-CARBOXYLATE REDUCTASE (EC 1.5.1.2) (P5CR) (P5C REDUCTASE).//1.2e-14:65:61//HOMO SAPIENS (HUMAN).//P32322

[3824] F-NT2RP2005775//NEUROLYSIN PRECURSOR (EC 3.4.24.16) (NEUROTENSIN ENDOPEPTIDASE) (MITOCHONDRIAL OLIGOPEPTIDASE M) (MICROSOMAL ENDOPEPTIDASE) (MEP).//1.3e-103:199:90//ORYCTOLAGUS CUNICULUS (RABBIT).//P42675

[3825] F-NT2RP2005781//SALIVARY ACIDIC PROLINE-RICH PHOSPHOPROTEIN 1/2 PRECURSOR (PRP-1//PRP-3) (PRP-2/PRP-4) (PIF-F/PIF-S) (PROTEIN A/PROTEIN C) [CONTAINS: PEPTIDE P-C].//0.090:73:36//HOMO SAPIENS (HUMAN).//P02810

[3826] F-NT2RP2005784//TRANS-ACTING TRANSCRIPTIONAL PROTEIN ICPO (IMMEDIATE-EARLY PROTEIN IE110) (VMW110) (ALPHA-0 PROTEIN).//3.5e-06:79:37//HERPES SIMPLEX VIRUS (TYPE 1/STRAIN 17).//P08393

[3827] F-NT2RP2005804//HYPOTHETICAL PROLINE-RICH PROTEIN (FRAGMENT).//1.8e-07:43:55//OWENIA FUSIFORMIS.//P21260

[3828] F-NT2RP2005812//HYPOTHETICAL 39.3 KD PROTEIN IN GCN4-WBP1 INTERGENIC REGION.//6.3e-14:143:31//SACCHAROMYCES CEREVISIAE (BAKER'S YEAST).//P40004

[3829] F-NT2RP2005815//FERROCHELATASE (EC 4.99.1.1) (PROTOHEME FERRO-LYASE) (HEME SYNTHETASE).//0.0017:123:37//MYCOBACTERIUM AVIUM.//O07401

[3830] F-NT2RP2005835//SHP1 PROTEIN.//1.2e-08:135:26//SACCHAROMYCES CEREVISIAE (BAKER'S YEAST).//P34223

[3831] F-NT2RP2005841//SMALL PROLINE-RICH PROTEIN II (SPR-II) (CLONE 174N).//0.23:28:53//HOMO SAPIENS (HUMAN).//P22532

[3832] F-NT2RP2005853//HYPOTHETICAL 8.5 KD PROTEIN IN ASIA-MOTA INTERGENIC REGION.//0.99:33:48//BACTERIOPHAGE T4.//P22917

[3833] F-NT2RP2005857//CHROMOSOME ASSEMBLY PROTEIN XCAP-C.//8.6e-84:235:66//XENOPUS LAEVIS (AFRICAN CLAWED FROG).//P50532

[3834] F-NT2RP2005859//MALE SPECIFIC SPERM PROTEIN MST84 DB.//0.017:60:40//DROSOPHILA MELANOGASTER (FRUIT FLY).//Q01643

[3835] F-NT2RP2005868//ATP SYNTHASE B′ CHAIN PRECURSOR (EC 3.6.1.34) (SUBUNIT II).//0.28:121:28//SPINACIA OLERACEA (SPINACH).//P31853

[3836] F-NT2RP2005886//MICRONUCLEAR LINKER HISTONE POLYPROTEIN (MIC LH) [CONTAINS: LINKER HISTONE PROTEINS ALPHA, BETA, DELTA AND GAMMA].//0.80:130:28//TETRAHYMENA THERMOPHILA.//P40631

[3837] F-NT2RP2005890

[3838] F-NT2RP2005901//ATP SYNTHASE PROTEIN 8 (EC 3.6.1.34). (A6L).//0.35:18:44//DROSOPHILA YAKUBA (FRUIT FLY).//P03933

[3839] F-NT2RP2005908//!!!! ALU SUBFAMILY SQ WARNING ENTRY !!!!//1.0e-28:61:65//HOMO SAPIENS (HUMAN).//P39194

[3840] F-NT2RP2005933//PERIOD CLOCK PROTEIN (P230) (FRAGMENT).//1.7e-11:85:49//ACETABULARIA MEDITERRANEA (MERMAID'S WINE GLASS).//P12347

[3841] F-NT2RP2005942//POLY(A) POLYMERASE (EC 2.7.7.19) (PAP) (POLYNUCLEOTIDE ADENYLYLTRANSFERASE).//7.2e-59:216:58//BOS TAURUS (BOVINE).//P25500

[3842] F-NT2RP2005980//HYPOTHETICAL 11.5 KD PROTEIN IN RSP8A-AST1 INTERGENIC REGION.//1.0:49:34//SACCHAROMYCES CEREVISIAE (BAKER'S YEAST).//P38185

[3843] F-NT2RP2006023//DNA REPAIR PROTEIN RECN (RECOMBINATION PROTEIN N) (FRAGMENT).//1.0:40:45//VIBRIO CHOLERAE.//P52118

[3844] F-NT2RP2006038//HYPOTHETICAL 30.2 KD PROTEIN C02F5.4 IN CHROMOSOME III.//4.0e-11:90:34//CAENORHABDITIS ELEGANS.//P34281

[3845] F-NT2RP2006043//LAMININ BETA-1 CHAIN VARIANT (LAMININ BETA-1-2 CHAIN) (FRAGMENT).//0.00067:73:38//GALLUS GALLUS (CHICKEN).//Q01636

[3846] F-NT2RP2006052//METALLOTHIONEIN-I (MT-I).//0.19:31:38//CERCOPITHECUS AETHIOPS (GREEN MONKEY) (GRIVET).//P02797

[3847] F-NT2RP2006069//COLLAGEN ALPHA 2(I) CHAIN (FRAGMENTS).//1.0:66:34//RATTUS NORVEGICUS (RAT).//P02466

[3848] F-NT2RP2006071//RESTIN.//0.40:156:29//GALLUS GALLUS (CHICKEN).//O42184

[3849] F-NT2RP2006098//HYPOTHETICAL 21.7 KD PROTEIN IN TUP1-ABP1 INTERGENIC REGION.//0.99:95:20//SACCHAROMYCES CEREVISIAE (BAKER'S YEAST).//P25651

[3850] F-NT2RP2006100//LONG NEUROTOXIN 4 (ALPHA-NEUROTOXIN).//0.94:43:34//OPHIOPHAGUS HANNAH (KING COBRA) (NAJA HANNAH).//P80156

[3851] F-NT2RP2006103//50S RIBOSOMAL PROTEIN L32.//0.40:36:38//SYNECHOCYSTIS SP. (STRAIN PCC 6803).//P73014

[3852] F-NT2RP2006106//CUTICLE COLLAGEN 1.//0.28:85:29//CAENORHABDITIS ELEGANS.//P08124

[3853] F-NT2RP2006141//HYPOTHETICAL 72.5 KD PROTEIN C2F7.10 IN CHROMOSOME I.//1.9e-08:57:42//SCHIZOSACCHAROMYCES POMBE (FISSION YEAST).//Q09701

[3854] F-NT2RP2006166

[3855] F-NT2RP2006184//HYPOTHETICAL 11.2 KD PROTEIN IN CSGC-MDOG INTERGENIC REGION PRECURSOR.//0.95:87:26//ESCHERICHIA COLI.//P75917

[3856] F-NT2RP2006186//MICROTUBULE-ASSOCIATED PROTEIN 2.//0.088:124:33//MUS MUSCULUS (MOUSE).//P20357

[3857] F-NT2RP2006196//!!!! ALU SUBFAMILY SP WARNING ENTRY !!!!//4.0e-05:49:61//HOMO SAPIENS (HUMAN).//P39193

[3858] F-NT2RP2006200//PROCOLLAGEN ALPHA 2(V) CHAIN PRECURSOR.//0.0013:205:32//HOMO SAPIENS (HUMAN).//P05997

[3859] F-NT2RP2006219//GONADAL PROTEIN GDL.//3.5e-18:158:37//DROSOPHILA MELANOGASTER (FRUIT FLY).//P22468

[3860] F-NT2RP2006237//FIBRINOGEN- AND IG-BINDING PROTEIN PRECURSOR (MRP PROTEIN).//0.79:103:28//STREPTOCOCCUS PYOGENES.//P30141

[3861] F-NT2RP2006238//PROLINE-RICH PROTEIN MP-3 (FRAGMENT).//4.7e-07:127:39//MUS MUSCULUS (MOUSE).//P05143

[3862] F-NT2RP2006258//PROBABLE E5 PROTEIN.//0.78:47:34//RHESUS PAPILLOMAVIRUS TYPE 1 (RHPV 1).//P24834

[3863] F-NT2RP2006261//PENAEIDIN-3A PRECURSOR (P3-A).//0.61:35:40//PENAEUS VANNAMEI (PENOEID SHRIMP) (EUROPEAN WHITE SHRIMP).//P81058

[3864] F-NT2RP2006275//ELECTROMOTOR NEURON-ASSOCIATED PROTEIN 2 (FRAGMENT).//1.2e-28:59:57//TORPEDO CALIFORNICA (PACIFIC ELECTRIC RAY).//P14401

[3865] F-NT2RP2006312//HIGH-MOBILITY-GROUP PROTEIN (NONHISTONE CHROMOSOMAL PROTEIN).//1.6e-06:53:35//TETRAHYMENA PYRIFORMIS.//P40625

[3866] F-NT2RP2006320//TAT PROTEIN (TRANSACTIVATING REGULATORY PROTEIN) (FRAGMENT).//0.90:24:41//HUMAN IMMUNODEFICIENCY VIRUS TYPE 1 (BH5 ISOLATE) (HIV-1).//P04612

[3867] F-NT2RP2006321//!!!! ALU SUBFAMILY SP WARNING ENTRY !!!!//0.0051:25:76//HOMO SAPIENS (HUMAN).//P39193

[3868] F-NT2RP2006323//WISKOTT-ALDRICH SYNDROME PROTEIN (WASP).//0.84:33:39//HOMO SAPIENS (HUMAN).//P42768

[3869] F-NT2RP2006333//MYOTOXIN 3 PRECURSOR (CROTAMINE 3).//0.56:37:40//CROTALUS DURISSUS TERRIFICUS (SOUTH AMERICAN RATTLESNAKE).//P24333

[3870] F-NT2RP2006334//SUCCINYL-COA LIGASE [GDP-FORMING], ALPHA-CHAIN 3 PRECURSOR (EC 6.2.1.4) (SUCCINYL-COA SYNTHETASE, ALPHA CHAIN 3).//0.00097:46:41//TRICHOMONAS VAGINALIS.//P53401

[3871] F-NT2RP2006365//NONSPECIFIC LIPID-TRANSFER PROTEIN 4.3 PRECURSOR (LTP 4.3).//0.18:75:29//HORDEUM VULGARE (BARLEY).//Q42842

[3872] F-NT2RP2006393//OMEGA-CONOTOXIN MVIIC PRECURSOR (FRAGMENT).//0.82:15:66//CONUS MAGUS (MAGUS CONE).//P37300

[3873] F-NT2RP2006436//ANTERIOR-RESTRICTED HOMEOBOX PROTEIN (RATHKE POUCH HOMEO BOX).//1.4e-08:50:50//MUS MUSCULUS (MOUSE).//Q61658

[3874] F-NT2RP2006441//METALLOTHIONEIN-LIKE PROTEIN 1.//0.99:22:54//MIMULUS GUTTATUS (SPOTTED MONKEY FLOWER) (YELLOW MONKEY FLOWER).//P20238

[3875] F-NT2RP2006454//SPERM PROTAMINE P1 .//0.60:47:36//TACHYGLOSSUS ACULEATUS ACULEATUS (AUSTRALIAN ECHIDNA).//P35311

[3876] F-NT2RP2006456

[3877] F-NT2RP2006464//PHOTOSYSTEM I IRON-SULFUR CENTER (PHOTOSYSTEM I SUBUNIT VII) (9 KD POLYPEPTIDE) (PSI-C).//0.91:79:30//SYNECHOCOCCUS SP. (STRAIN PCC 7002) (AGMENELLUM QUADRUPLICATUM).//P31087

[3878] F-NT2RP2006467//PUTATIVE CUTICLE COLLAGEN F55C10.3.//0.15:53:35//CAENORHABDITIS ELEGANS.//Q21184

[3879] F-NT2RP2006472//HYPOTHETICAL 19 KD PROTEIN (ORF 167).//0.33:98:26//MARCHANTIA POLYMORPHA (LIVERWORT).//P12202

[3880] F-NT2RP2006534

[3881] F-NT2RP2006554//ANTI-SIGMA F FACTOR ANTAGONIST (STAGE II SPORULATION PROTEIN AA).//0.91:50:34//BACILLUS SPHAERICUS.//O32723

[3882] F-NT2RP2006565//SECRETORY CARRIER-ASSOCIATED MEMBRANE PROTEIN 1 (SCAMP 37).//6.0e-66:93:96//RATTUS NORVEGICUS (RAT).//P56603

[3883] F-NT2RP2006571//CYTOCHROME P4502B10 (EC 1.14.14.1) (CYPIIB10) (TESTOSTERONE 16-ALPHA HYDROXYLASE) (P450-16-ALPHA) (CLONE PF3/46).//4.5e-40:138:57//MUS MUSCULUS (MOUSE).//P12791

[3884] F-NT2RP2006573//SPERM PROTAMINE P1 (CYSTEINE-RICH PROTAMINE).//0.53:46:39//BOS TAURUS (BOVINE).//P02318

[3885] F-NT2RP2006598//!!!! ALU SUBFAMILY SX WARNING ENTRY !!!!//1.3e-12:44:77//HOMO SAPIENS (HUMAN).//P39195

[3886] F-NT2RP3000002//!!!! ALU SUBFAMILY SC WARNING ENTRY !!!!//1.4e-19:60:63//HOMO SAPIENS (HUMAN).//P39192

[3887] F-NT2RP3000031//HYPOTHETICAL 89.8 KD PROTEIN F41H10.6 IN CHROMOSOME IV.//2.1e-39:210:42//CAENORHABDITIS ELEGANS.//Q20296

[3888] F-NT2RP3000046//POSSIBLE THIOPHENE AND FURAN OXIDATION PROTEIN THDF.//1.4e-25:149:44//PSEUDOMONAS PUTIDA.//P25755

[3889] F-NT2RP3000047//NPL4 PROTEIN.//4.7e-48:275:38//SACCHAROMYCES CEREVISIAE (BAKER'S YEAST).//P33755

[3890] F-NT2RP3000050//ZINC FINGER PROTEIN 83 (ZINC FINGER PROTEIN HPF1).//3.2e-72:232:59//HOMO SAPIENS (HUMAN).//P51522

[3891] F-NT2RP3000055//MALE SPECIFIC SPERM PROTEIN MST84 DB.//0.26:57:36//DROSOPHILA MELANOGASTER (FRUIT FLY).//Q01643

[3892] F-NT2RP3000068//HYPOTHETICAL 182.0 KD PROTEIN IN NMD5-HOM6 INTERGENIC REGION.//0.0014:66:34//SACCHAROMYCES CEREVISIAE (BAKER'S YEAST).//P47170

[3893] F-NT2RP3000072//HYPOTHETICAL 6.7 KD PROTEIN IN NOHA-CSPI INTERGENIC REGION.//0.95:49:30//ESCHERICHIA COLI.//P77695

[3894] F-NT2RP3000080/!!!!! ALU SUBFAMILY J WARNING ENTRY !!!!//5.1e-17:64:68//HOMO SAPIENS (HUMAN).//P39188

[3895] F-NT2RP3000085//BIOTIN CARBOXYLASE (EC 6.3.4.14) (A SUBUNIT OF ACETYL-COA CARBOXYLASE (EC 6.4.1.2)) (ACC).//4.4e-43:169:51//BACILLUS SUBTILIS.//P49787

[3896] F-NT2RP3000092//CELL DIVISION CONTROL PROTEIN 1.//0.00016:103:31//SACCHAROMYCES CEREVISIAE (BAKER'S YEAST).//P40986

[3897] F-NT2RP3000109//ACYL CARRIER PROTEIN HOMOLOG (ACP).//0.76:83:28//MYCOPLASMA GENITALIUM.//P47529

[3898] F-NT2RP3000134

[3899] F-NT2RP3000142//GAR2 PROTEIN.//0.00098:241:20//SCHIZOSACCHAROMYCES POMBE (FISSION YEAST).//P41891

[3900] F-NT2RP3000149//ATP SYNTHASE PROTEIN 8 (EC 3.6.1.34) (A6L).//0.0014:33:36//PONGO PYGMAEUS ABELII (SUMATRAN ORANGUTAN).//P92694

[3901] F-NT2RP300018611!!!! ALU SUBFAMILY J WARNING ENTRY !!!!//8.3e-15:36:83//HOMO SAPIENS (HUMAN).//P39188

[3902] F-NT2RP3000197//HYPOTHETICAL 6.0 KD PROTEIN IN THI12 5′REGION.//0.91:21:52//SACCHAROMYCES CEREVISIAE (BAKER'S YEAST).//P53820

[3903] F-NT2RP3000207//GLUCOAMYLASE S1/S2 PRECURSOR (EC 3.2.1.3) (GLUCAN 1,4-ALPHA-GLUCOSIDASE) (1,4-ALPHA-D-GLUCAN GLUCOHYDROLASE).//0.026:209:27//SACCHAROMYCES CEREVISIAE (BAKER'S YEAST).//P08640

[3904] F-NT2RP3000220//DNA-BINDING P52/P100 COMPLEX, 100 KD SUBUNIT (FRAGMENTS).//1.0:26:42//HOMO SAPIENS (HUMAN).//P30808

[3905] F-NT2RP3000233//RING CANAL PROTEIN (KELCH PROTEIN).//2.1e-42:249:39//DROSOPHILA MELANOGASTER (FRUIT FLY).//Q04652

[3906] F-NT2RP3000235//HOMEOBOX PROTEIN H40 (FRAGMENT).//0.55:45:40//APIS MELLIFERA (HONEYBEE).//P15858

[3907] F-NT2RP3000247//HYPOTHETICAL PROTEIN KIAA0218.//1.7e-82:123:69//HOMO SAPIENS (HUMAN).//Q93075

[3908] F-NT2RP3000251//SERINE PROTEINASE STUBBLE (EC 3.4.21.-) (STUBBLE-STUBBLOID PROTEIN).//1.0:53:33//DROSOPHILA MELANOGASTER (FRUIT FLY).//Q05319

[3909] F-NT2RP3000252//HYPOTHETICAL 40 KD GTP-BINDING PROTEIN IN RIBOSOMAL PROTEIN GENE CLUSTER 5′REGION.//2.2e-06:96:32//HALOBACTERIUM CUTIRUBRUM.//P17103

[3910] F-NT2RP3000255//HISTONE H1.1 (FRAGMENT).//0.95:71:33//BOS TAURUS (BOVINE).//P02253

[3911] F-NT2RP3000267//HYPOTHETICAL 21.1 KD PROTEIN IN SSR-SERA INTERGENIC REGION (O182).//0.38:77:33//ESCHERICHIA COLI.//P09160

[3912] F-NT2RP3000299//MYOSIN IC HEAVY CHAIN.//1.2e-11:147:34//ACANTHAMOEBA CASTELLANII (AMOEBA).//P10569

[3913] F-NT2RP3000312//HYPOTHETICAL 57.5 KD PROTEIN IN VMA7-RPS25A INTERGENIC REGION.//0.64:216:29//SACCHAROMYCES CEREVISIAE (BAKER'S YEAST).//P53214

[3914] F-NT2RP3000320//TRANSLATION INITIATION FACTOR IF-2.//5.2e-05:184:22//AQUIFEX AEOLICUS.//O67825

[3915] F-NT2RP3000324//HYPOTHETICAL PROTEIN HI 1036.//0.69:64:35//HAEMOPHILUS INFLUENZAE.//P44097

[3916] F-NT2RP3000333//WIR1A PROTEIN.//0.35:51:41//TRITICUM AESTIVUM (WHEAT).//Q01482

[3917] F-NT2RP300Q341//!!!! ALU SUBFAMILY SB WARNING ENTRY !!!!//2.1e-30:57:80//HOMO SAPIENS (HUMAN).//P39189

[3918] F-NT2RP3000348

[3919] F-NT2RP3000350//HYPOTHETICAL 40 KD GTP-BINDING PROTEIN IN RIBOSOMAL PROTEIN GENE CLUSTER 5′REGION.//0.0011:77:35//HALOBACTERIUM CUTIRUBRUM.//P17103

[3920] F-NT2RP3000359//GTP:AMP PHOSPHOTRANSFERASE MITOCHONDRIAL (EC 2.7.4.10) (AK3).//1.2e-97:222:84//BOS TAURUS (BOVINE).//P08760

[3921] F-NT2RP3000361//PRE-MRNA SPLICING FACTOR PRP6.//2.2e-08:128:28//SACCHAROMYCES CEREVISIAE (BAKER'S YEAST).//P19735

[3922] F-NT2RP3000366//RAS-RELATED PROTEIN RAB-18.//2.1e-107:206:99//MUS MUSCULUS (MOUSE).//P35293

[3923] F-NT2RP3000393//HOMEOBOX PROTEIN HOX-C4 (HOX-3E) (CP19).//0.0023:36:52//HOMO SAPIENS (HUMAN).//P09017

[3924] F-NT2RP3000397//PUTATIVE PRE-MRNA SPLICING FACTOR RNA HELICASE (DEAH BOX PROTEIN 13).//5.5e-27:116:44//MUS MUSCULUS (MOUSE).//O35286

[3925] F-NT2RP3000403//PRE-MRNA PROCESSING PROTEIN PRP40.//0.00044:67:34//SACCHAROMYCES CEREVISIAE (BAKER'S YEAST).//P33203

[3926] F-NT2RP3000418//RETROVIRUS-RELATED POL POLYPROTEIN [CONTAINS: REVERSE TRANSCRIPTASE (EC 2.7.7.49); ENDONUCLEASE].//2.2e-16:228:34//MUS MUSCULUS (MOUSE).//P1369

[3927] F-NT2RP3000433//!!!! ALU SUBFAMILY J WARNING ENTRY !!!!!//1.7e-17:79:55//HOMO SAPIENS (HUMAN).//P39188

[3928] F-NT2RP3000439//HYPOTHETICAL 46.4 KD PROTEIN IN FFH-GRPE INTERGENIC REGION.//9.8e-10:201:26//ESCHERICHIA COLI.//P37908

[3929] F-NT2RP3000441//PROTEIN-EXPORT MEMBRANE PROTEIN SECG HOMOLOG.//0.91:48:35//MYCOBACTERIUM LEPRAE.//P38388

[3930] F-NT2RP3000449//HOMEOBOX PROTEIN HOX-B8 (CHOX-2.4) (FRAGMENT).//1.0:42:33//GALLUS GALLUS (CHICKEN).//P23681

[3931] F-NT2RP3000451

[3932] F-NT2RP3000456//COLLAGEN ALPHA 1(I) CHAIN (FRAGMENTS).//0.00018:178:36//RATTUS NORVEGICUS (RAT).M/P02454

[3933] F-NT2RP3000484//METALLOTHIONEIN-III (MT-III) (GROWTH INHIBITORY FACTOR) (GIF).//0.098:40:27//BOS TAURUS (BOVINE).//P37359

[3934] F-NT2RP3000487//SULFATED SURFACE GLYCOPROTEIN 185 (SSG 185).//0.00037:16:81//VOLVOX CARTERI.//P21997

[3935] F-NT2RP3000512

[3936] F-NT2RP3000526//HYPOTHETICAL NIN REGION PROTEIN ORF56.//0.51:37:43//BACTERIOPHAGE LAMBDA.//P03769

[3937] F-NT2RP3000527//ZINC FINGER PROTEIN 83 (ZINC FINGER PROTEIN HPF1).//1.0e-16:234:30//HOMO SAPIENS (HUMAN).//P51522

[3938] F-NT2RP3000531M/POLIOVIRUS RECEPTOR PRECURSOR (CD155 ANTIGEN).//3.4e-15:192:30//HOMO SAPIENS (HUMAN).//P15151

[3939] F-NT2RP3000542//CYTOCHROME C OXIDASE POLYPEPTIDE II (EC 1.9.3.1) (FRAGMENT).//0.60:51:39//ASTERINA PECTINIFERA (STARFISH).//P11958

[3940] F-NT2RP3000561//HYPOTHETICAL ATP-BINDING PROTEIN MJ0423.//0.79:53:32//METHANOCOCCUS JANNASCHII.//Q57866

[3941] F-NT2RP3000562//ACCESSORY GLAND PEPTIDE PRECURSOR (PARAGONIAL PEPTIDE B).//0.99:26:34//DROSOPHILA MAURITIANA (FRUIT FLY), AND DROSOPHILA SIMULANS (FRUIT FLY).//O18666

[3942] F-NT2RP3000578//HYPOTHETICAL 49.8 KD PROTEIN IN RPL14B-GPA1 INTERGENIC REGION.//1.5e-26:127:37//SACCHAROMYCES CEREVISIAE (BAKER'S YEAST).//P38755

[3943] F-NT2RP3000582

[3944] F-NT2RP3000584//METALLOTHIONEIN-II (MT-II).//0.28:27:29//MUS MUSCULUS (MOUSE).//P02798

[3945] F-NT2RP3000590//UVS-2 PROTEIN.//4.8e-10:113:33//NEUROSPORA CRASSA.//P33288

[3946] F-NT2RP3000592//TRANSCRIPTION INITIATION FACTOR TFIID 135 KD SUBUNIT (TAFII-135) (TAFII135) (TAFII-130) (TAFII130).//0.00087:178:31//HOMO SAPIENS (HUMAN).//O00268

[3947] F-NT2RP3000596//YEMANUCLEIN-ALPHA.//1.8e-05:98:34//DROSOPHILA MELANOGASTER (FRUIT FLY).MIP25992

[3948] F-NT2RP3000599//SPLICEOSOME ASSOCIATED PROTEIN 62 (SAP 62) (SF3A66).//0.00095:90:37//HOMO SAPIENS (HUMAN).//Q15428

[3949] F-NT2RP3000603//5E5 ANTIGEN.//1.0e-09:181:34//RATTUS NORVEGICUS (RAT).//Q63003

[3950] F-NT2RP3000605//STEROL REGULATORY ELEMENT BINDING PROTEIN-1 (SREBP-1) (STEROL REGULATORY ELEMENT-BINDING TRANSCRIPTION FACTOR 1).//0.00098:76:34//HOMO SAPIENS (HUMAN).//P36956

[3951] F-NT2RP3000622//HYPOTHETICAL PROTEIN MG096 HOMOLOG 5 (P02_{—}0RF427).//0.15:52:36//MYCOPLASMA PNEUMONIAE.//P75277

[3952] F-NT2RP3000624//HYPOTHETICAL PROTEIN KIAA0256.//5.4e-16:222:31//HOMO SAPIENS (HUMAN).//Q93073

[3953] F-NT2RP3000628

[3954] F-NT2RP3000632//ZINC FINGER PROTEIN 90 (ZFP-90) (ZINC FINGER PROTEIN NK10).//2.0e-16:52:63//MUS MUSCULUS (MOUSE).//Q61967

[3955] F-NT2RP3000644//!!!! ALU SUBFAMILY SQ WARNING ENTRY !!!!//6.7e-40:102:79//HOMO SAPIENS (HUMAN).//P39194

[3956] F-NT2RP3000661//HYPOTHETICAL 139.1 KD PROTEIN C08B11.3 IN CHROMOSOME II.//6.0e-08:83:36//CAENORHABDITIS ELEGANS.//Q09441

[3957] F-NT2RP3000665//HOMEOBOX PROTEIN PROPHET OF PIT-1 (PROP-1) (PITUITARY SPECIFIC HOMEODOMAIN FACTOR).//0.13:48:35//HOMO SAPIENS (HUMAN).//O75360

[3958] F-NT2RP3000685//HYPOTHETICAL 33.5 KD PROTEIN IN CAT15′REGION (ORFY).//0.26:202:23//CLOSTRIDIUM KLUYVERI.//P38943

[3959] F-NT2RP3000690//INORGANIC PYROPHOSPHATASE (EC 3.6.1.1) (PYROPHOSPHATE PHOSPHO-HYDROLASE) (PPASE).//0.99:131:26//SACCHAROMYCES CEREVISIAE (BAKER'S YEAST).//P00817

[3960] F-NT2RP3000736//HYPOTHETICAL 28.7 KD PROTEIN IN RNR3-ARC15 INTERGENIC REGION.//3.5e-27:211:34//SACCHAROMYCES CEREVISIAE (BAKER'S YEAST).//P40516

[3961] F-NT2RP3000739//HYPOTHETICAL 33.5 KD PROTEIN CID4.02C IN CHROMOSOME I.//6.0e-23:114:42//SCHIZOSACCHAROMYCES POMBE (FISSION YEAST).//Q10149

[3962] F-NT2RP3000742//1-PHOSPHATIDYLINOSITOL-4,5-BISPHOSPHATE PHOSPHODIESTERASE DELTA 1 (EC 3.1.4.11) (PLC-DELTA-1) (PHOSPHOLIPASE C-DELTA-1) (PLC-III).//6.7e-12:85:36//RATTUS NORVEGICUS (RAT).//P10688

[3963] F-NT2RP3000753//CELL SURFACE GLYCOPROTEIN 1 PRECURSOR (OUTER LAYER PROTEIN B) (S-LAYER PROTEIN 1).//0.00011:208:28//CLOSTRIDIUM THERMOCELLUM.//Q06852

[3964] F-NT2RP3000759//ADP-RIBOSYLATION FACTOR 6.//8.1e-28:141:38//GALLUS GALLUS (CHICKEN).//P26990

[3965] F-NT2RP3000815//CYTOCHROME C-551 (C551) (CYTOCHROME C8).//0.24:45:37//PSEUDOMONAS DENITRIFICANS.//P00103

[3966] F-NT2RP3000825//ALPHA-LACTALBUMIN (LACTOSE SYNTHASE B PROTEIN (EC 2.4.1.22)).//0.82:51:39//MACROPUS RUFOGRISEUS (RED-NECKED WALLABY).//P07458

[3967] F-NT2RP3000826//COLLAGEN ALPHA 1(XII) CHAIN (FRAGMENTS).//0.025:79:37//BOS TAURUS (BOVINE).//P25508

[3968] F-NT2RP3000836//HYPOTHETICAL PROTEIN IN KSGA 3′REGION (ORF L5) (FRAGMENT).//0.85:36:47//MYCOPLASMA CAPRICOLUM.//P43040

[3969] F-NT2RP3000841//UDP-GLUCURONOSYLTRANSFERASE 1-7 PRECURSOR, MICROSOMAL (EC 2.4.1.17) (UDPGT) (UGTI*7) (UGTI-07) (UGTI.7) (UGTIA7) (UGTP4) (FRAGMENT).//1.0:70:34//MUS MUSCULUS (MOUSE).//Q62452

[3970] F-NT2RP3000845//PUTATIVE SERINE/THREONINE-PROTEIN KINASE P78 (EC 2.7.1.-).115.2e-72:247:61//HOMO SAPIENS (HUMAN).//P27448

[3971] F-NT2RP3000847//HYPOTHETICAL PROTEIN KIAA0161.//0.037:55:30//HOMO SAPIENS (HUMAN).//P50876

[3972] F-NT2RP3000850//!!!! ALU SUBFAMILY SQ WARNING ENTRY !!!!//7.4e-31:90:75//HOMO SAPIENS (HUMAN).//P39194

[3973] F-NT2RP3000852//HYDROPHOBIC SEED PROTEIN (HPS).//0.33:23:69//GLYCINE MAX (SOYBEAN).//P24337

[3974] F-NT2RP3000859//IMMEDIATE-EARLY PROTEIN.//3.6e-07:189:25//HERPESVIRUS SAIMIRI (STRAIN 11).//Q01042

[3975] F-NT2RP3000865

[3976] F-NT2RP3000868//MYOSIN HEAVY CHAIN, CARDIAC MUSCLE ISOFORM (FRAGMENT).//1.4e-09:232:28//GALLUS GALLUS (CHICKEN).//P29616

[3977] F-NT2RP3000869//CUTICLE COLLAGEN 2.l/4.5e-08:58:46//CAENORHABDITIS ELEGANS.//P17656

[3978] F-NT2RP3000875//HOMEOBOX PROTEIN CDX-2 (CAUDAL-TYPE HOMEOBOX PROTEIN 2).//0.90:62:37//MUS MUSCULUS (MOUSE).//P43241

[3979] F-NT2RP3000901//COLLAGEN ALPHA 1(I) CHAIN (FRAGMENTS).//0.99:124:33//BOS TAURUS (BOVINE).//P02453

[3980] F-NT2RP3000904

[3981] F-NT2RP3000917//DHP1 PROTEIN.//6.5e-60:229:55//SCHIZOSACCHAROMYCES POMBE (FISSION YEAST).//P40848

[3982] F-NT2RP3000919//HYPOTHETICAL 33.5 KD PROTEIN C1D4.02C IN CHROMOSOME I.//2.4e-19:159:34//SCHIZOSACCHAROMYCES POMBE (FISSION YEAST).//Q10149

[3983] F-NT2RP3000968//40S RIBOSOMAL PROTEIN S15A.//3.7e-48:73:98//HOMO SAPIENS (HUMAN), AND RATTUS NORVEGICUS (RAT).//P39027

[3984] F-NT2RP3000980//COPA/INCA PROTEIN (REPA3 PROTEIN).//0.24:19:47//ESCHERICHIA COLI.//P13946

[3985] F-NT2RP3000994//MATERNAL EFFECT PROTEIN STAUFEN.//1.4e-10:78:48//DROSOPHILA MELANOGASTER (FRUIT FLY).M/P25159

[3986] F-NT2RP3001004//HYPOTHETICAL 7.6 KD PROTEIN B0563.8 IN CHROMOSOME X.//0.70:50:32//CAENORHABDITIS ELEGANS.//Q11084

[3987] F-NT2RP3001007

[3988] F-NT2RP3001055//N-TERMINAL ACETYLTRANSFERASE COMPLEX ARD1 SUBUNIT HOMOLOG.//1.3e-05:138:28//DICTYOSTELIUM DISCOIDEUM (SLIME MOLD).//P36416

[3989] F-NT2RP3001057//ZINC FINGER PROTEIN 45 (BRC1744).//4.0e-28:141:51//HOMO SAPIENS (HUMAN).//Q02386

[3990] F-NT2RP30001081//HYPOTHETICAL 46.4 KD PROTEIN T16H12.5 IN CHROMOSOME III.//3.8e-08:144:29//CAENORHABDITIS ELEGANS.//P34568

[3991] F-NT2RP3001084//SPIDROIN 2 (DRAGLINE SILK FIBROIN 2) (FRAGMENT).//3.4e-06:217:32//NEPHILA CLAVIPES (ORB SPIDER).//P46804

[3992] F-NT2RP3001096//SYNAPTONEMAL COMPLEX PROTEIN SC65.//1.1e-30:244:33//RATTUS NORVEGICUS (RAT).//Q64375

[3993] F-NT2RP3001107//ARYLSULFATASE F (EC 3.1.6.-) (ASF) (FRAGMENT).//0.041:47:44//HOMO SAPIENS (HUMAN).//P54793

[3994] F-NT2RP3001109

[3995] F-NT2RP300111//MALE SPECIFIC SPERM PROTEIN MST84DC.//0.17:28:39//DROSOPHILA MELANOGASTER (FRUIT FLY).//Q01644

[3996] F-NT2RP3001113//INVOLUCRIN.//0.00036:192:23//MUS MUSCULUS (MOUSE).//P48997

[3997] F-NT2RP3001115

[3998] F-NT2RP3001116//AMINOPEPTIDASE G (EC 3.4.11.-) (FRAGMENT).//0.99:29:51//STREPTOMYCES LIVIDANS.//Q54340

[3999] F-NT2RP3001119//COLLAGEN ALPHA 4(IV) CHAIN (FRAGMENT).//0.0015:73:39//BOS TAURUS (BOVINE).//Q29442

[4000] F-NT2RP3001120//ZINC FINGER PROTEIN ZFP-36 (FRAGMENT).//1.3e-57:229:52//HOMO SAPIENS (HUMAN).//P16415

[4001] F-NT2RP3001126//HYPOTHETICAL 91.2 KD PROTEIN IN RPS4B-SCH9 INTERGENIC REGION.//2.8e-07:83:34//SACCHAROMYCES CEREVISIAE (BAKER'S YEAST).//P38888

[4002] F-NT2RP3001133//CALCIUM BINDING PROTEIN.//2.0e-08:171:32//DICTYOSTELIUM DISCOIDEUM (SLIME MOLD).//P35085

[4003] F-NT2RP3001140//F-SPONDIN PRECURSOR.//2.0e-147:244:97//RATTUS NORVEGICUS (RAT).//P35446

[4004] F-NT2RP3001147//TROPOMYOSIN 2 (TMII).//0.11:159:23//SCHISTOSOMA MANSONI (BLOOD FLUKE).//P42638

[4005] F-NT2RP3001150//OCTAPEPTIDE-REPEAT PROTEIN T2.//6.2e-09:163:25//MUS MUSCULUS (MOUSE).//Q06666

[4006] F-NT2RP3001155//DNA POLYMERASE ALPHA-BINDING PROTEIN (POB1/CTF4 PROTEIN) (CHROMOSOME REPLICATION PROTEIN CHL15).//4.1e-05:244:23//SACCHAROMYCES CEREVISIAE (BAKER'S YEAST).//Q01454

[4007] F-NT2RP3001176//LEUKOSIALIN PRECURSOR (LEUCOCYTE SIALOGLYCOPROTEIN) (SIALOPHORIN) (CD43) (LY 48) (B CELL DIFFERENTIATION ANTIGEN LP-3).//0.21:136:26//MUS MUSCULUS (MOUSE).//P15702

[4008] F-NT2RP3001214//SAP 1 PROTEIN.//0.058:133:30//SACCHAROMYCES CEREVISIAE (BAKER'S YEAST).//P39955

[4009] F-NT2RP3001216//CYLICIN I (MULTIPLE-BAND POLYPEPTIDE I) (FRAGMENT).//2.1e-08:137:33//HOMO SAPIENS (HUMAN).//P35663

[4010] F-NT2RP3001221//GAMMA-BUTYROBETAINE, 2-OXOGLUTARATE DIOXYGENASE (EC 1.14.11.1) (GAMMA-BUTYROBETAINE HYDROXYLASE).//4.2e-05:131:26//PSEUDOMONAS SP. (STRAIN AK-1).//P80193

[4011] F-NT2RP3001232//HYPOTHETICAL PROTEIN PRECURSOR IN CS5 3′REGION (FRAGMENT).//0.75:57:31//ESCHERICHIA COLI.//P33792

[4012] F-NT2RP3001236//TRANSFORMING PROTEIN MAF.//0.017:136:30//AVIAN MUSCULOAPONEUROTIC FIBROSARCOMA VIRUS AS42.//P23091

[4013] F-NT2RP3001239//ELECTROMOTOR NEURON-ASSOCIATED PROTEIN 1 (FRAGMENT).//4.2e-55:221:49//TORPEDO CALIFORNICA (PACIFIC ELECTRIC RAY).//P14400

[4014] F-NT2RP3001245

[4015] F-NT2RP3001253//TROPOMYOSIN 2, MUSCLE THORACIC ISOFORM (TROPOMYOSIN I).//0.0042:142:24//DROSOPHILA MELANOGASTER (FRUIT FLY).//P09491

[4016] F-NT2RP3001260//COLLAGEN ALPHA 4(IV) CHAIN PRECURSOR.//0.0011:89:43//HOMO SAPIENS (HUMAN).//P53420

[4017] F-NT2RP3001268//ZINC FINGER PROTEIN 45 (BRC1744).//9.0e-29:194:44//HOMO SAPIENS (HUMAN).//Q02386

[4018] F-NT2RP3001272//HYPOTHETICAL 75.2 KD PROTEIN C13F4.08C IN CHROMOSOME I.//8.2e-17:183:26//SCHIZOSACCHAROMYCES POMBE (FISSION YEAST).//Q10199

[4019] F-NT2RP3001274//SERINE/THREONINE PROTEIN PHOSPHATASE 5 (EC 3.1.3.16) (PP5) (PROTEIN PHOSPHATASE T) (PPT) (FRAGMENT).//1.7e-09:78:39//MUS MUSCULUS (MOUSE).//Q60676

[4020] F-NT2RP3001281//!!!! ALU SUBFAMILY J WARNING ENTRY !!!!!//7.7e-08:38:71//HOMO SAPIENS (HUMAN).//P39188

[4021] F-NT2RP3001297//HYPOTHETICAL PROTEIN KIAA0281 (HA6725).//2.2e-57:159:70//HOMO SAPIENS (HUMAN).//Q92556

[4022] F-NT2RP3001307//SPERM PROTAMINE P1 .//0.21:46:39//ORNITHORHYNCHUS ANATINUS (DUCKBILL PLATYPUS).//P35307

[4023] F-NT2RP3001318

[4024] F-NT2RP3001325//ENHANCER OF RUDIMENTARY HOMOLOG.//1.0:73:24//BRACHYDANIO RERIO (ZEBRAFISH) (ZEBRA DANIO).//Q98874

[4025] F-NT2RP3001338//ZINC FINGER PROTEIN 29 (ZINC FINGER PROTEIN KOX26) (FRAGMENT).//0.0021:56:35//HOMO SAPIENS (HUMAN).//P17037

[4026] F-NT2RP3001339//CITRON PROTEIN.//3.6e-06:90:33//MUS MUSCULUS (MOUSE).//P49025

[4027] F-NT2RP3001340//HYPOTHETICAL PROTEIN UL61.//7.2e-11:202:34//HUMAN CYTOMEGALOVIRUS (STRAIN AD169).//P16818

[4028] F-NT2RP3001355//TRICARBOXYLATE TRANSPORT PROTEIN PRECURSOR (CITRATE TRANSPORT PROTEIN) (CTP) (TRICARBOXYLATE CARRIER PROTEIN).//7.7e-16:129:33//HOMO SAPIENS (HUMAN).//P53007

[4029] F-NT2RP3001356//RAS-RELATED PROTEIN RABA (FRAGMENT).//0.00041:66:28//DICTYOSTELIUM DISCOIDEUM (SLIME MOLD).//P34141

[4030] F-NT2RP3001374

[4031] F-NT2RP3001383//PTB-ASSOCIATED SPLICING FACTOR (PSF).//2.5e-06:190:32//HOMO SAPIENS (HUMAN).//P23246

[4032] F-NT2RP3001384//CHORION PROTEIN S15.//0.00079:94:37//DROSOPHILA VIRILIS (FRUIT FLY).//P13424

[4033] F-NT2RP3001392//VPU PROTEIN (ORF-X PROTEIN) (UPX PROTEIN).//1.0:22:45//CAPRINE ARTHRITIS ENCEPHALITIS VIRUS (CAEV).//P31834

[4034] F-NT2RP3001396//HYPOTHETICAL 8.1 KD PROTEIN (ORF4).//1.0:37:32//STRAWBERRY MILD YELLOW EDGE-ASSOCIATED VIRUS (SMYEAV).//Q00848

[4035] F-NT2RP3001398//KRUEPPEL-RELATED ZINC FINGER PROTEIN 2 (HKR2 PROTEIN) (FRAGMENT).//1.9e-08:45:37//HOMO SAPIENS (HUMAN).//P10073

[4036] F-NT2RP3001399//SSU72 PROTEIN.//7.3e-18:84:52//SACCHAROMYCES CEREVISIAE (BAKER'S YEAST).//P53538

[4037] F-NT2RP3001407//SCY1 PROTEIN.//1.5e-08:143:25//SACCHAROMYCES CEREVISIAE (BAKER'S YEAST).//P53009

[4038] F-NT2RP3001420//HYPOTHETICAL 7.9 KD PROTEIN.//0.25:41:26//VACCINIA VIRUS (STRAIN COPENHAGEN).//P20542

[4039] F-NT2RP3001426//DNAJ PROTEIN.//7.5e-15:78:43//HAEMOPHILUS INFLUENZAE.//P43735

[4040] F-NT2RP3001427//WERNER SYNDROME HELICASE.//3.6e-13:159:33//HOMO SAPIENS (HUMAN).//Q14191

[4041] F-NT2RP3001428//NUCLEOPROTEIN TPR.//1.8e-53:117:99//HOMO SAPIENS (HUMAN).//P12270

[4042] F-NT2RP3001432//NADH-UBIQUINONE OXIDOREDUCTASE CHAIN 5 (EC 1.6.5.3) (FRAGMENT).//0.96:52:21//TARSIUS SYRICHTA (TARSIER).//Q36151

[4043] F-NT2RP3001447//HYPOTHETICAL 5.5 KD PROTEIN IN REPLICATION ORIGIN REGION (ORF1).//0.96:45:35//ESCHERICHIA COLI.//P14505

[4044] F-NT2RP3001449//HOMEOBOX PROTEIN SAX-1 (CHOX-3) (FRAGMENT).//0.0043:53:43//GALLUS GALLUS (CHICKEN).//P19601

[4045] F-NT2RP3001453//MALE SPECIFIC SPERM PROTEIN MST84 DB.//0.0048:65:40//DROSOPHILA MELANOGASTER (FRUIT FLY).//Q01643

[4046] F-NT2RP3001457//VACUOLAR PROTEIN SORTING-ASSOCIATED PROTEIN VPS28.//0.55:121:20//SACCHAROMYCES CEREVISIAE (BAKER'S YEAST).//Q02767

[4047] F-NT2RP3001459//MYOSIN IC HEAVY CHAIN.//0.10:126:34//ACANTHAMOEBA CASTELLANII (AMOEBA).//P10569

[4048] F-NT2RP3001472//NONHISTONE CHROMOSOMAL PROTEIN 6A.//3.0e-14:87:43//SACCHAROMYCES CEREVISIAE (BAKER'S YEAST).//P11632

[4049] F-NT2RP3001490//METALLOTHIONEIN-LIKE PROTEIN LSC54.//1.0:39:35//BRASSICA NAPUS (RAPE).//P43402

[4050] F-NT2RP3001495//UBIQUITIN-PROTEIN LIGASE RSP5 (EC 6.3.2.-).//3.3e-14:148:35//SACCHAROMYCES CEREVISIAE (BAKER'S YEAST).//P39940

[4051] F-NT2RP3001497//COLLAGEN ALPHA 1 (XII) CHAIN (FRAGMENTS).//0.13:44:38//BOS TAURUS (BOVINE).//P25508

[4052] F-NT2RP3001527//SPERM PROTAMINE P11.0.35:29:37//DIDELPHIS MARSUPIALIS VIRGINIANA (NORTH AMERICAN OPOSSUM), AND MONODELPHIS DOMESTICA (SHORT-TAILED GREY OPOSSUM)./MP35305

[4053] F-NT2RP3001529//HYPOTHETICAL 43.3 KD GTP-BINDING PROTEIN IN DACB-RPMA INTERGENIC REGION.//3.3e-21:125:37//ESCHERICHIA COLI.//P42641

[4054] F-NT2RP3001538//HNF3/FH TRANSCRIPTION FACTOR GENESIS (WINGED HELIX PROTEIN CWH-3).//0.13:53:39//GALLUS GALLUS (CHICKEN).//P79772

[4055] F-NT2RP3001554//ELECTROMOTOR NEURON-ASSOCIATED PROTEIN 2 (FRAGMENT).//2.3e-48:137:52//TORPEDO CALIFORNICA (PACIFIC ELECTRIC RAY).//P14401

[4056] F-NT2RP3001580//GERM CELL-LESS PROTEIN.//8.2e-18:100:42//DROSOPHILA MELANOGASTER (FRUIT FLY).//Q01820

[4057] F-NT2RP3001587//UBIQUITIN-ACTIVATING ENZYME E1-LIKE (POLYMERASE-INTERACTING PROTEIN 2).//2.0e-47:188:51//SACCHAROMYCES CEREVISIAE (BAKER'S YEAST).//P52488

[4058] F-NT2RP3001589//!!!! ALU SUBFAMILY SP WARNING ENTRY !!!!//7.4e-41:87:80//HOMO SAPIENS (HUMAN).//P39193

[4059] F-NT2RP3001607//ATP SYNTHASE PROTEIN 8 (EC 3.6.1.34) (A6L).//1.0:49:32//DICENTRARCHUS LABRAX (EUROPEAN SEA BASS).//Q36362

[4060] F-NT2RP3001608//EXTENSIN PRECURSOR (PROLINE-RICH GLYCOPROTEIN).//0.0013:177:25//ZEA MAYS (MAIZE).//P14918

[4061] F-NT2RP3001621//MALE SPECIFIC SPERM PROTEIN MST84DD.//0.84:29:37//DROSOPHILA MELANOGASTER (FRUIT FLY).//Q01645

[4062] F-NT2RP3001629//RAS-RELATED C3 BOTULINUM TOXIN SUBSTRATE 1 (P21-RAC1) (FRAGMENTS).//0.91:57:24//CAVIA PORCELLUS (GUINEA PIG).//P80236

[4063] F-NT2RP3001634//!!!! ALU SUBFAMILY SB WARNING ENTRY !!!!//8.9e-11:73:54//HOMO SAPIENS (HUMAN).//P39189

[4064] F-NT2RP30001642//HYPOTHETICAL PROTEIN KIAA0210.//1.1e-12:117:29//HOMO SAPIENS (HUMAN).//Q92609

[4065] F-NT2RP3001646//HYPOTHETICAL 29.3 KD PROTEIN (ORF92).//0.0092:69:34//ORGYIA PSEUDOTSUGATA MULTICAPSID POLYHEDROSIS VIRUS (OPMNPV).//O10341

[4066] F-NT2RP3001671//RING CANAL PROTEIN (KELCH PROTEIN).//0.0042:55:41//DROSOPHILA MELANOGASTER (FRUIT FLY).//Q04652

[4067] F-NT2RP3001672

[4068] F-NT2RP3001676//GTP-BINDING PROTEIN LEPA (FRAGMENT).//1.2e-15:56:62//PSEUDOMONAS FLUORESCENS.//P26843

[4069] F-NT2RP3001678//SPIDROIN 2 (DRAGLINE SILK FIBROIN 2) (FRAGMENT).//0.054:187:31//NEPHILA CLAVIPES (ORB SPIDER).//P46804

[4070] F-NT2RP3001679//HYPOTHETICAL 68.7 KD PROTEIN ZK757.1 IN CHROMOSOME III.//1.5e-07:63:44//CAENORHABDITIS ELEGANS.//P34679

[4071] F-NT2RP3001688//GLUCOAMYLASE SI PRECURSOR (EC 3.2.1.3) (GLUCAN 1,4-ALPHA-GLUCOSIDASE) (1,4-ALPHA-D-GLUCAN GLUCOHYDROLASE) (GAI).//1.0:83:28//SACCHAROMYCES DIASTATICUS (YEAST).//P04065

[4072] F-NT2RP3001690//MYOSIN HEAVY CHAIN, CARDIAC MUSCLE BETA ISOFORM.//0.021:247:24//HOMO SAPIENS (HUMAN).//P12883

[4073] F-NT2RP3001698

[4074] F-NT2RP3001708//TWISTED GASTRULATION PROTEIN PRECURSOR.//7.7e-12:73:43//DROSOPHILA MELANOGASTER (FRUIT FLY).//P54356

[4075] F-NT2RP3001712//CEC-1 PROTEIN.//1.9e-07:121:29//CAENORHABDITIS ELEGANS.//P34618

[4076] F-NT2RP3001716//SALIVARY GLUE PROTEIN SGS-3 PRECURSOR.//0.89:54:40//DROSOPHILA SIMULANS (FRUIT FLY).//P13729

[4077] F-NT2RP3001724//CHROMODOMAIN-HELICASE-DNA-BINDING PROTEIN 1 (CHD-1).//7.5e-41:164:48//HOMO SAPIENS (HUMAN).//O14646

[4078] F-NT2RP3001727//HYPOTHETICAL 37.7 KD PROTEIN ZK686.3 IN CHROMOSOME III.//1.5e-51:240:41//CAENORHABDITIS ELEGANS.//P34669

[4079] F-NT2RP3001730//SEPTIN 2 HOMOLOG (FRAGMENT).//2.4e-122:267:86//HOMO SAPIENS (HUMAN).//Q14141

[4080] F-NT2RP3001739//INTESTINAL SODIUM/DICARBOXYLATE COTRANSPORTER (NA(+)/DICARBOXYLATE COTRANSPORTER).//0.99:63:34//RATTUS NORVEGICUS (RAT).//P70545

[4081] F-NT2RP3001752//!!!! ALU SUBFAMILY SP WARNING ENTRY !!!!//4.0e-21:60:85//HOMO SAPIENS (HUMAN).//P39193

[4082] F-NT2RP3001753//HYPOTHETICAL PROTEIN KIAA0127./17.9e-12:83:44//HOMO SAPIENS (HUMAN).//Q14140

[4083] F-NT2RP3001764//DUAL SPECIFICITY PROTEIN PHOSPHATASE 6 (EC 3.1.3.48) (EC 3.1.3.16) (DUAL SPECIFICITY PROTEIN PHOSPHATASE PYST1).//7.7e-25:146:36//HOMO SAPIENS (HUMAN).//Q16828

[4084] F-NT2RP3001777//SERINE/THREONINE-PROTEIN KINASE STE20 HOMOLOG (EC 2.7.1.-).//0.0096:204:25//CANDIDA ALBICANS (YEAST).//Q92212

[4085] F-NT2RP3001782//ATP SYNTHASE PROTEIN 8 (EC 3.6.1.34) (A6L).//0.91:34:44//PONGO PYGMAEUS ABELII (SUMATRAN ORANGUTAN).//P92694

[4086] F-NT2RP3001792//HETEROGENEOUS NUCLEAR RIBONUCLEOPROTEIN M (HNRNP M).//1.8e-33:159:53//HOMO SAPIENS (HUMAN).//P52272

[4087] F-NT2RP3001799//LIGHT-HARVESTING PROTEIN B800/830/1020, ALPHA-2 CHAIN (EHS-ALPHA-2) (ANTENNA PIGMENT PROTEIN, ALPHA-2 CHAIN).//0.14:46:28//ECTOTHIORHODOSPIRA HALOCHLORIS.//P80103

[4088] F-NT2RP3001819//PROCOLLAGEN ALPHA 2(I) CHAIN PRECURSOR.//0.00030:77:36//HOMO SAPIENS (HUMAN).//P08123

[4089] F-NT2RP3001844//OCTAMER-BINDING TRANSCRIPTION FACTOR 1 (OTF-1) (NF-A1) (FRAGMENT).//0.99:43:34//MACROPUS EUGENII (TAMMAR WALLABY).//Q28466

[4090] F-NT2RP3001854//FIBRINOGEN- AND IG-BINDING PROTEIN PRECURSOR (MRP PROTEIN).//9.3e-10:213:24//STREPTOCOCCUS PYOGENES.//P30141

[4091] F-NT2RP3001855//HOMEOBOX PROTEIN PKNOX1 (HOMEOBOX PROTEIN PREP-1).//2.6e-61:220:60//HOMO SAPIENS (HUMAN).//P55347

[4092] F-NT2RP3001857//VEGETATIBLE INCOMPATIBILITY PROTEIN HET-E-1.//1.0e-13:213:24//PODOSPORA ANSERINA.//Q00808

[4093] F-NT2RP3001896//SPLICEOSOME ASSOCIATED PROTEIN 62 (SAP 62) (SF3A66).//0.074:124:34//HOMO SAPIENS (HUMAN).//Q15428

[4094] F-NT2RP3001898//REGULATORY PROTEIN E2.//0.36:131:29//CANINE ORAL PAPILLOMAVIRUS (COPV).//Q89420

[4095] F-NT2RP3001915//CHITIN BIOSYNTHESIS PROTEIN CHS5 (CAL3 PROTEIN).//0.0021:237:23//SACCHAROMYCES CEREVISIAE (BAKER'S YEAST).//Q12114

[4096] F-NT2RP3001926//HYPOTHETICAL 14.0 KD PROTEIN IN RPL15B-GCR3 INTERGENIC REGION.//1.0:63:34//SACCHAROMYCES CEREVISIAE (BAKER'S YEAST).//Q03880

[4097] F-NT2RP3001929//!!!! ALU SUBFAMILY SX WARNING ENTRY !!!!//1.4e-14:35:60//HOMO SAPIENS (HUMAN).//P39195

[4098] F-NT2RP3001931//HYPOTHETICAL 59.3 KD PROTEIN IN TAP42-ARP9 INTERGENIC REGION.//0.86:162:24//SACCHAROMYCES CEREVISIAE (BAKER'S YEAST).//Q05040

[4099] F-NT2RP3001938//GLYCOPROTEIN GP50.//0.0036:54:40//PSEUDORABIES VIRUS (STRAIN RICE) (PRV).//P07645

[4100] F-NT2RP3001943//33.2 KD PROTEIN IN DIND-RPH INTERGENIC REGION (ORF X).//1.0:113:27//ESCHERICHIA COLI.//P23839

[4101] F-NT2RP3001944//HYPOTHETICAL 47.6 KD PROTEIN C16C10.5 IN CHROMOSOME III.//4.1e-56:208:47//CAENORHABDITIS ELEGANS.//Q09251

[4102] F-NT2RP3001969//PUFF IV/9-2 PROTEIN PRECURSOR.//0.0078:149:26//SCIARA COPROPHILA (FUNGUS GNAT).//P22312

[4103] F-NT2RP3001989//SPERM PROTAMINE P1 (CYSTEINE-RICH PROTAMINE).//1.0:41:31//MUS MUSCULUS (MOUSE).//P02319

[4104] F-NT2RP3002002//!!!! ALU SUBFAMILY SX WARNING ENTRY !!!!//1H.2e-44:69:79//HOMO SAPIENS (HUMAN).//P39195

[4105] F-NT2RP3002004//TRANSCRIPTION FACTOR BF-2 (BRAIN FACTOR 2) (BF2).//0.00024:45:40//MUS MUSCULUS (MOUSE).//Q61345

[4106] F-NT2RP3002007//TENASCIN PRECURSOR (TN) (HEXABRACHION) (CYTOTACTIN) (NEURONECTIN) (GMEM) (JI) (MIOTENDINOUS ANTIGEN) (GLIOMA-ASSOCIATED-EXTRACELLULAR MATRIX ANTIGEN) (GP 150-225) (TENASCIN-C).//0.21:115:28//HOMO SAPIENS (HUMAN).//P24821

[4107] F-NT2RP3002014//HYPOTHETICAL 32.0 KD PROTEIN C09F5.2 IN CHROMOSOME III.//1.7e-25:139:48//CAENORHABDITIS ELEGANS.//Q09232

[4108] F-NT2RP3002033//ACTIVATOR OF APOPTOSIS HARAKIRI (NEURONAL DEATH PROTEIN DP5).//0.14:65:41//HOMO SAPIENS (HUMAN).//O00198

[4109] F-NT2RP3002045//ALPHA-ADAPTIN C (CLATHRIN ASSEMBLY PROTEIN COMPLEX 2 ALPHA-C LARGE CHAIN) (100 KD COATED VESICLE PROTEIN C) (PLASMA MEMBRANE ADAPTOR HA2/AP2 ADAPTIN ALPHA C SUBUNIT).//8.1e-108:192:98//MUS MUSCULUS (MOUSE).//P17427

[4110] F-NT2RP3002054//HYPOTHETICAL 35.5 KD PROTEIN IN TRANSPOSON TN4556.//0.046:176:31//STREPTOMYCES FRADIAE.//P20186

[4111] F-NT2RP3002056//140 KD NUCLEOLAR PHOSPHOPROTEIN (NOPP140).//1.4e-07:245:25//RATTUS NORVEGICUS (RAT).//P41777

[4112] F-NT2RP3002057//SMALL HYDROPHOBIC PROTEIN.//1.0:12:66//SIMIAN VIRUS 5 (STRAIN W3) (SV5).//P07577

[4113] F-NT2RP3002062//PROTEASE A INHIBITOR 3 (PROTEINASE INHIBITOR I(A)3).//1.0:49:32//SACCHAROMYCES CEREVISIAE (BAKER'S YEAST).//P01094

[4114] F-NT2RP3002063//ACYL CARRIER PROTEIN (ACP).//0.99:38:31//HAEMOPHILUS INFLUENZAE.//P43709

[4115] F-NT2RP3002081//HYPOTHETICAL 100.5 KD PROTEIN C1B9.04 IN CHROMOSOME 1.115 .8e-35:253:37//SCHIZOSACCHAROMYCES POMBE (FISSION YEAST).//Q10429

[4116] F-NT2RP3002097//HYPOTHETICAL 98.1 KD PROTEIN IN SPX19-GCR2 INTERGENIC REGION.//6.2e-06:99:31//SACCHAROMYCES CEREVISIAE (BAKER'S YEAST).//P40164

[4117] F-NT2RP3002102//HYPOTHETICAL 7.4 KD PROTEIN.//0.68:34:47//THERMOPROTEUS TENAX VIRUS 1 (STRAIN KRA1) (TTV1).//P19302

[4118] F-NT2RP3002108//HYPOTHETICAL 105.5 KD PROTEIN R13F6.10 IN CHROMOSOME III.//7.9e-19:179:34//CAENORHABDITIS ELEGANS.//Q21986

[4119] F-NT2RP3002142//!!!! ALU SUBFAMILY J WARNING ENTRY !!!!//2.6e-17:37:75//HOMO SAPIENS (HUMAN).//P39188

[4120] F-NT2RP3002146//CUTICLE COLLAGEN 40.//0.00034:90:37//CAENORHABDITIS ELEGANS.//P34804

[4121] F-NT2RP3002147//SALIVARY PROLINE-RICH PROTEIN PO PRECURSOR (ALLELE S).//0.011:166:28//HOMO SAPIENS (HUMAN).//P10163

[4122] F-NT2RP3002151//G1 TO S PHASE TRANSITION PROTEIN 1 HOMOLOG (GTP-BINDING PROTEIN GST1-HS).//4.8e-11:60:53//HOMO SAPIENS (HUMAN).//P15170

[4123] F-NT2RP3002163//TRANSCRIPTION INITIATION FACTOR TFIID 135 KD SUBUNIT (TAFII-135) (TAFII 135) (TAFII-130) (TAFII130).//0.028:191:29//HOMO SAPIENS (HUMAN).//O00268

[4124] F-NT2RP3002165//TRANSCRIPTIONAL REGULATOR PROTEIN HCNGP.//2.3e-131:223:91//MUS MUSCULUS (MOUSE).//Q02614

[4125] F-NT2RP3002166//D-ALANYL CARRIER PROTEIN (DCP).//1.0:65:33//LACTOBACILLUS CASEI.//P55153

[4126] F-NT2RP3002173//!!!! ALU SUBFAMILY SQ WARNING ENTRY !!!!//2.4e-26:114:62//HOMO SAPIENS (HUMAN).//P39194

[4127] F-NT2RP3002181//MALE SPECIFIC SPERM PROTEIN MST84DD.//0.25:31:38//DROSOPHILA MELANOGASTER (FRUIT FLY).//Q01645

[4128] F-NT2RP3002244//SPERM PROTAMINE P1 (CYSTEINE-RICH PROTAMINE).//0.069:16:62//OVIS ARIES (SHEEP), AND CAPRA HIRCUS (GOAT).//P04102

[4129] F-NT2RP3002248//MICROFIBRILLAR-ASSOCIATED PROTEIN 1 (ASSOCIATED MICROFIBRIL PROTEIN) (AMF).//0.0079:187:24//GALLUS GALLUS (CHICKEN).//P55080

[4130] F-NT2RP3002255//PROLINE-RICH PROTEIN MP-3 (FRAGMENT).//4.6e-10:168:34//MUS MUSCULUS (MOUSE).//P05143

[4131] F-NT2RP3002273//SCD6 PROTEIN.//1.5e-1:160:33//SACCHAROMYCES CEREVISIAE (BAKER'S YEAST).//P45978

[4132] F-NT2RP3002276//PROBABLE E4 PROTEIN.//0.91:54:29//HUMAN PAPILLOMAVIRUS TYPE 16.//P06922

[4133] F-NT2RP3002303//HYPOTHETICAL 30.2 KD PROTEIN C4D7.04C IN CHROMOSOME I.//1.7e-42:191:43//SCHIZOSACCHAROMYCES POMBE (FISSION YEAST).//O14171

[4134] F-NT2RP3002304

[4135] F-NT2RP3002330//NNP-1 PROTEIN.//0.52:140:18//MUS MUSCULUS (MOUSE).//P56183

[4136] F-NT2RP3002343//5E5 ANTIGEN.//0.0056:189:30//RATTUS NORVEGICUS (RAT).//Q63003

[4137] F-NT2RP3002351//NAD-DEPENDENT METHYLENETETRAHYDROFOLATE DEHYDROGENASE (EC 1.5.1.15)/METHENYLTETRAHYDROFOLATE CYCLOHYDROLASE (EC 3.5.4.9) MITOCHONDRIAL PRECURSOR.//1.0e-66:196:68//HOMO SAPIENS (HUMAN).//P13995

[4138] F-NT2RP3002352//PRESYNAPTIC PROTEIN SAP 102 (SYNAPSE-ASSOCIATED PROTEIN 102) (NEUROENDOCRINE-DLG) (NE-DLG).//0.79:173:27//HOMO SAPIENS (HUMAN).//Q92796

[4139] F-NT2RP3002377//PUTATIVE HELICASE YGR271W.//1.0e-56:216:44//SACCHAROMYCES CEREVISIAE (BAKER'S YEAST).//P53327

[4140] F-NT2RP3002399//MINICHROMOSOME MAINTENANCE PROTEIN 6.//1.4e-19:136:31//SACCHAROMYCES CEREVISIAE (BAKER'S YEAST).//P53091

[4141] F-NT2RP3002402//EBNA-6 NUCLEAR PROTEIN (EBNA-3C) (EBNA-4B).//0.74:107:36//EPSTEIN-BARR VIRUS (STRAIN B95-8) (HUMAN HERPESVIRUS 4).//P03204

[4142] F-NT2RP3002455//DNAJ PROTEIN (FRAGMENT).//5.6e-06:57:42//AGROBACTERIUM TUMEFACIENS.//P50018

[4143] F-NT2RP3002484//HYPOTHETICAL 46.5 KD PROTEIN C12B10.04 IN CHROMOSOME I.//0.00032:52:48//SCHIZOSACCHAROMYCES POMBE (FISSION YEAST).//Q10438

[4144] F-NT2RP3002501//HYPOTHETICAL 34.9 KD PROTEIN IN FRE2-JEN1 INTERGENIC REGION.//9.4e-42:209:42//SACCHAROMYCES CEREVISIAE (BAKER'S YEAST).//P36007

[4145] F-NT2RP3002512//HYPOTHETICAL 37.4 KD PROTEIN IN GPM1-MCR1 INTERGENIC REGION.//7.7e-32:162:37//SACCHAROMYCES CEREVISIAE (BAKER'S YEAST).//P36059

[4146] F-NT2RP3002529//PUTATIVE VACUOLAR PROTEIN SORTING-ASSOCIATED PROTEIN C2G 11.03C.//2.1e-45:241:43//SCHIZOSACCHAROMYCES POMBE (FISSION YEAST).//Q09805

[4147] F-NT2RP3002545

[4148] F-NT2RP3002549//HYPOTHETICAL 26.6 KD PROTEIN T19C3.4 IN CHROMOSOME III.//2.8e-41:161:52//CAENORHABDITIS ELEGANS.//Q10010

[4149] F-NT2RP3002566//IMMEDIATE-EARLY PROTEIN IE180.//0.56:130:24//PSEUDORABIES VIRUS (STRAIN KAPLAN) (PRV).//P33479

[4150] F-NT2RP3002587

[4151] F-NT2RP3002590

[4152] F-NT2RP3002602//PROTEIN DISULFIDE ISOMERASE PRECURSOR (PDI) (EC 5.3.4.1) (THIOREDOXIN- RELATED GLYCOPROTEIN I ).//0.00091:111:28//SACCHAROMYCES CEREVISIAE (BAKER'S YEAST).//P17967

[4153] F-NT2RP3002603//HYPOTHETICAL 14.2 KD PROTEIN IN BLAB 3′REGION.//1.0:65:40//STREPTOMYCES CACAOI.//P33654

[4154] F-NT2RP3002628//DNAJ-LIKE PROTEIN SLR0093 .//2.4e-17:101:44//SYNECHOCYSTIS SP. (STRAIN PCC 6803).//P50027

[4155] F-NT2RP3002631//METALLOTHIONEIN-IB (MT-1 B).//0.092:36:33//HOMO SAPIENS (HUMAN).//P07438.

[4156] F-NT2RP3002650//DUALIN.//3.0e-21:184:37//GALLUS GALLUS (CHICKEN).//Q90830

[4157] F-NT2RP3002659//PROCOLLAGEN ALPHA 2(I) CHAIN PRECURSOR.//0.00016:223:33//HOMO SAPIENS (HUMAN).//P08123

[4158] F-NT2RP3002660//40S RIBOSOMAL PROTEIN S27A.//0.16:72:31//CAENORHABDITIS ELEGANS.//P37165

[4159] F-NT2RP3002663//OXYSTEROL-BINDING PROTEIN.//5.4e-23:168:41//HOMO SAPIENS (HUMAN).//P22059

[4160] F-NT2RP3002671//HYPOTHETICAL 124.5 KD PROTEIN IN SKO1-RPL44A INTERGENIC REGION.//6.0e-38:203:43//SACCHAROMYCES CEREVISIAE (BAKER'S YEAST).//P53893

[4161] F-NT2RP3002682//NADH-UBIQUINONE OXIDOREDUCTASE CHAIN 4L (EC 1.6.5.3).//0.25:63:31//ARTEMIA SALINA (BRINE SHRIMP).//P19049

[4162] F-NT2RP3002687//HYPOTHETICAL 30.4 KD PROTEIN IN LEF3-IAP2 INTERGENIC REGION.//0.029:60:36//AUTOGRAPHA CALIFORNICA NUCLEAR POLYHEDROSIS VIRUS (ACMNPV).//P41469

[4163] F-NT2RP3002688//KINESIN-LIKE PROTEIN K1F1B.//5.3e-61:130:88//MUS MUSCULUS (MOUSE).//Q60575

[4164] F-NT2RP3002701//SPERM MITOCHONDRIAL CAPSULE SELENOPROTEIN (MCS).//7.4e-05:109:33//MUS MUSCULUS (MOUSE).//P15265

[4165] F-NT2RP3002713//PROBABLE ATP-DEPENDENT RNA HELICASE DDX10 (DEAH BOX PROTEIN 10).//0.77:70:32//HOMO SAPIENS (HUMAN).//Q13206

[4166] F-NT2RP3002763//HYPOTHETICAL 11.3 KD PROTEIN C2C6.07 IN CHROMOSOME I.//6.7e-11:66:40//SCHIZOSACCHAROMYCES POMBE (FISSION YEAST).//O14056

[4167] F-NT2RP3002770//COLLAGEN ALPHA 1(IX) CHAIN (FRAGMENT).//0.33:87:34//MUS MUSCULUS (MOUSE).//Q05722

[4168] F-NT2RP3002785//LETHAL(2)DENTICLELESS PROTEIN (DTL83 PROTEIN).//9.7e-36:187:39//DROSOPHILA MELANOGASTER (FRUIT FLY).//Q24371

[4169] F-NT2RP3002799//!!!! ALU SUBFAMILY J WARNING ENTRY !!!!//5.6e-08:41:73//HOMO SAPIENS (HUMAN).//P39188

[4170] F-NT2RP3002810//!!!! ALU SUBFAMILY SP WARNING ENTRY !!!!//0.0034:35:65//HOMO SAPIENS (HUMAN).//P39193

[4171] F-NT2RP3002818//MAJOR CENTROMERE AUTOANTIGEN B (CENTROMERE PROTEIN B) (CENP-B).//3.2e-17:148:37//MUS MUSCULUS (MOUSE).//P27790

[4172] F-NT2RP3002861//HYPOTHETICAL 70.2 KD PROTEIN IN GSH1-CHS6 INTERGENIC REGION.//1.7e-05:95:31//SACCHAROMYCES CEREVISIAE (BAKER'S YEAST).//P42951

[4173] F-NT2RP3002869//TRYPSIN INHIBITOR II (BDTI-II).//0.97:23:39//BRYONIA DIOICA (RED BRYONY).//P11968

[4174] F-NT2RP3002876//ACIDIC PROLINE-RICH PROTEIN PRECURSOR (CLONE PRP33).//0.00017:140:31//RATTUS NORVEGICUS (RAT).//P04474

[4175] F-NT2RP3002877//!!!! ALU SUBFAMILY SQ WARNING ENTRY !!!!//2.5e-06:55:60//HOMO SAPIENS (HUMAN).//P39194

[4176] F-NT2RP3002909//P53-BINDING PROTEIN 53BP2 (BCL2-BINDING PROTEIN) (BBP).//4.6e-08:129:38//HOMO SAPIENS (HUMAN).//Q13625

[4177] F-NT2RP3002911//HYPOTHETICAL PROTEIN C 18.//0.99:26:50//SWINEPOX VIRUS (STRAIN KASZA) (SPV).//P32217

[4178] F-NT2RP3002948//RING CANAL PROTEIN (KELCH PROTEIN).//1.2e-23:113:47//DROSOPHILA MELANOGASTER (FRUIT FLY).//Q04652

[4179] F-NT2RP3002953//CADHERIN-RELATED TUMOR SUPPRESSOR PRECURSOR (FAT PROTEIN).//0.55:116:27//DROSOPHILA MELANOGASTER (FRUIT FLY).//P33450

[4180] F-NT2RP3002955//HYPOTHETICAL 16.5 KD PROTEIN IN BLTR-SPOIIIC INTERGENIC REGION.//0.87:67:37//BACILLUS SUBTILIS.//P54445

[4181] F-NT2RP3002969//LONG-CHAIN-FATTY-ACID-COA LIGASE 4 (EC 6.2.1.3) (LONG-CHAIN ACYL-COA SYNTHETASE 4) (LACS 4).//6.7e-56:189:59//HOMO SAPIENS (HUMAN).//O60488

[4182] F-NT2RP3002972//HYPOTHETICAL 73.0 KD PROTEIN IN CLA4-MID1 INTERGENIC REGION.//0.0028:147:27//SACCHAROMYCES CEREVISIAE (BAKER'S YEAST).//P48566

[4183] F-NT2RP3002978//PROBABLE E5 PROTEIN.//0.15:55:36//HUMAN PAPILLOMAVIRUS TYPE 51.//P26553

[4184] F-NT2RP3002985//METALLOTHIONEIN (MT).//0.0031:49:42//PLEURONECTES PLATESSA (PLAICE).//P07216

[4185] F-NT2RP3002988//NEUROGENIC LOCUS NOTCH HOMOLOG PROTEIN 1 PRECURSOR (MOTCH PROTEIN).//1.0:111:29//MUS MUSCULUS (MOUSE).//Q01705

[4186] F-NT2RP3003008//HYPOTHETICAL 54.7 KD PROTEIN F37A4.1 IN CHROMOSOME III.//0.96:112:25//CAENORHABDITIS ELEGANS.//P41879

[4187] F-NT2RP3003032

[4188] F-NT2RP3003059//HYPOTHETICAL 52.3 KD PROTEIN C56F8.06C IN CHROMOSOME I PRECURSOR.//9.7e-27:216:37//SCHIZOSACCHAROMYCES POMBE (FISSION YEAST).//Q10254

[4189] F-NT2RP3003061//ANKYRIN R (ANKYRINS 2.1 AND 2.2) (ERYTHROCYTE ANKYRIN).//3.7e-25:167:34//HOMO SAPIENS (HUMAN).//P16157

[4190] F-NT2RP3003068//SERYL-TRNA SYNTHETASE (EC 6.1.1.11) (SERINE-TRNA LIGASE) (SERRS) (FRAGMENT).//0.074:82:39//SULFOLOBUS SOLFATARICUS.//O33780

[4191] F-NT2RP3003071//VASODILATOR-STIMULATED PHOSPHOPROTEIN (VASP).//0.0085:128:30//HOMO SAPIENS (HUMAN).//P50552

[4192] F-NT2RP3003078//SPERM ACROSOMAL PROTEIN FSA-ACR.1 PRECURSOR (FRAGMENT).//0.028:165:31//VULPES VWLPES (RED FOX).//P53353

[4193] F-NT2RP3003101//TETRACYCLINE RESISTANCE PROTEIN, CLASS C (TETA(C)).//1.0e-14:243:25//ESCHERICHIA COLI.//P02981

[4194] F-NT2RP3003121//SUPPRESSOR PROTEIN SRP40.//7.4e-05:143:27//SACCHAROMYCES CEREVISIAE (BAKER'S YEAST).//P32583

[4195] F-NT2RP3003133//65 KD YES-ASSOCIATED PROTEIN (YAP65).//0.024:61:42//GALLUS GALLUS (CHICKEN).//P46936

[4196] F-NT2RP3003138//KINESIN-LIKE PROTEIN KIF4.//1.1e-118:151:93//MUS MUSCULUS (MOUSE).//P33174

[4197] F-NT2RP3003139//ATP-BINDING CASSETTE TRANSPORTER ABC 1.//1.0:70:30//SCHIZOSACCHAROMYCES POMBE (FISSION YEAST).//Q92337

[4198] F-NT2RP3003145//MILK FAT GLOBULE-EGF FACTOR 8 PRECURSOR (MFG-E8) (HMFG) (BREAST EPITHELIAL ANTIGEN BA46) (MFGM).//2.0e-12:121:37//HOMO SAPIENS (HUMAN).//Q08431

[4199] F-NT2RP3003150

[4200] F-NT2RP3003157//ZINC FINGER PROTEIN 83 (ZINC FINGER PROTEIN HPF1).//4.0e-79:260:54//HOMO SAPIENS (HUMAN).//P51522

[4201] F-NT2RP3003185//TROPOMYOSIN.//0.077:122:27//SCHIZOSACCHAROMYCES POMBE (FISSION YEAST).//Q02088

[4202] F-NT2RP3003193//ZINC FINGER PROTEIN 135.//7.2e-91:239:65//HOMO SAPIENS (HUMAN).//P52742

[4203] F-NT2RP3003197//HYPOTHETICAL 28.1 KD PROTEIN IN SIPU-PBPC INTERGENIC REGION.//1.3e-07:117:34//BACILLUS SUBTILIS.//P42966

[4204] F-NT2RP3003203//HYPOTHETICAL 33.5 KD PROTEIN C1D4.02C IN CHROMOSOME I.//9.9e-23:132:39//SCHIZOSACCHAROMYCES POMBE (FISSION YEAST).//Q10149

[4205] F-NT2RP3003204//RAS-LIKE PROTEIN RASB.//0.92:103:27//DICTYOSTELIUM DISCOIDEUM (SLIME MOLD).//P32252

[4206] F-NT2RP3003210//VERY HYPOTHETICAL 13.2 KD PROTEIN IN PTC3-SAS3 INTERGENIC REGION.//0.23:106:33//SACCHAROMYCES CEREVISIAE (BAKER'S YEAST).//P38190

[4207] F-NT2RP3003212//SUPPRESSOR PROTEIN SRP40.//0.019:171:23//SACCHAROMYCES CEREVISIAE (BAKER'S YEAST).//P32583

[4208] F-NT2RP3003230//CORONIN-LIKE PROTEIN P57.//8.3e-74:183:73//BOS TAURUS (BOVINE).//Q92176

[4209] F-NT2RP3003242//STANNIOCALCIN PRECURSOR.//1.4e-21:127:37//HOMO SAPIENS (HUMAN).//P52823

[4210] F-NT2RP3003251//DOWN REGULATORY PROTEIN OF INTERLEUKIN 2 RECEPTOR.//3.1e-51:198:52//MUS MUSCULUS (MOUSE).//P15533

[4211] F-NT2RP3003264//E6 PROTEIN.//1.0:31:41//HUMAN PAPILLOMAVIRUS TYPE 48.//Q80920

[4212] F-NT2RP3003278//45.8 KD PROTEIN IN SHM1-MRPL37 INTERGENIC REGION.//8.6e-07:80:33//SACCHAROMYCES CEREVISIAE (BAKER'S YEAST).//P38344

[4213] F-NT2RP3003282//DYNAMIN 2 (DYNAMIN UDNM).//8.0e-108:226:88//MUS MUSCULUS (MOUSE).//P39054

[4214] F-NT2RP3003290//BIOH PROTEIN.//0.0055:107:30//ESCHERICHIA COLI.//P13001

[4215] F-NT2RP3003301//MITOCHONDRIAL LON PROTEASE HOMOLOG 1 PRECURSOR (EC 3.4.21.-).//1.3e-69:200:55//ARABIDOPSIS THALIANA (MOUSE-EAR CRESS).//O64948

[4216] F-NT2RP3003302//LINE-1 REVERSE TRANSCRIPTASE HOMOLOG.//6.4e-69:102:66//HOMO SAPIENS (HUMAN).//P08547

[4217] F-NT2RP3003311//MYOSIN II HEAVY CHAIN, NON MUSCLE.//0.18:225:26//ACANTHAMOEBA CASTELLANII (AMOEBA).//P05659

[4218] F-NT2RP3003313//SALIVARY PROLINE-RICH PROTEIN PO (ALLELE K) [CONTAINS: PEPTIDE P-D] (FRAGMENT).//0.0014:142:33//HOMO SAPIENS (HUMAN).//P10162

[4219] F-NT2RP3003327//52 KD RO PROTEIN (SJOGREN SYNDROME TYPE A ANTIGEN (SS-A)) (RO(SS-A)) (RO52).//8.8e-18:94:43//MUS MUSCULUS (MOUSE).//Q62191

[4220] F-NT2RP3003330//HYPOTHETICAL PROTEIN KIAA0176 (FRAGMENT).//1.3e-20:123:44//HOMO SAPIENS (HUMAN).//Q14681

[4221] F-NT2RP3003344//HYPOTHETICAL 8.8 KD PROTEIN IN ICDC-MINE INTERGENIC REGION.//1.0:28:42//ESCHERICHIA COLI.//P75991

[4222] F-NT2RP3003346//!!!! ALU SUBFAMILY SB2 WARNING ENTRY !!!!//6.9e-26:74:78//HOMO SAPIENS (HUMAN).//P39191

[4223] F-NT2RP3003353//HYPOTHETICAL 52.4 KD PROTEIN R08D7.2 IN CHROMOSOME III.//3.7e-10:118:33//CAENORHABDITIS ELEGANS.//P30641

[4224] F-NT2RP3003377//PUTATIVE CUTICLE COLLAGEN F09G8.6.//1.5e-05:102:37//CAENORHABDITIS ELEGANS.//P34391

[4225] F-NT2RP3003384

[4226] F-NT2RP3003385//SKD3 PROTEIN.//5.1e-83:210:69//MUS MUSCULUS (MOUSE).//Q60649

[4227] F-NT2RP3003403

[4228] F-NT2RP3003409//SOX-22 PROTEIN.//0.042:173:28//HOMO SAPIENS (HUMAN).//O15370

[4229] F-NT2RP3003411//PROBABLE E3 PROTEIN.//0.17:91:31//BOVINE PAPILLOMAVIRUS TYPE 2.//P11300

[4230] F-NT2RP3003427//HOLOTRICIN 3 PRECURSOR.//0.012:36:41//HOLOTRICHIA DIOMPHALIA.//Q25055

[4231] F-NT2RP3003433

[4232] F-NT2RP3003464//HYPOTHETICAL 57.5 KD PROTEIN IN VMA7-RPS25A INTERGENIC REGION.//0.0042:110:40//SACCHAROMYCES CEREVISIAE (BAKER'S YEAST).//P53214

[4233] F-NT2RP3003490

[4234] F-NT2RP3003491//10 KD CHAPERONIN (PROTEIN CPN10) (PROTEIN GROES) (HEAT SHOCK 10 KD PROTEIN).//0.99:49:34//LEPTOSPIRA INTERROGANS.//P35472

[4235] F-NT2RP3003500//SCY1 PROTEIN.//6.8e-14:192:26//SACCHAROMYCES CEREVISIAE (BAKER'S YEAST).//P53009

[4236] F-NT2RP3003543//COLLAGEN ALPHA 5(IV) CHAIN PRECURSOR.//0.0026:175:30//HOMO SAPIENS (HUMAN).//P29400

[4237] F-NT2RP3003552//ANNEXIN VII (SYNEXIN) (FRAGMENT).//0.19:21:47//BOS TAURUS (BOVINE).//P20072

[4238] F-NT2RP3003555//HYPOTHETICAL 32.6 KD PROTEIN IN MET30-PIG2 INTERGENIC REGION.//7.3e-27:159:43//SACCHAROMYCES CEREVISIAE (BAKER'S YEAST).//P40529

[4239] F-NT2RP3003564//RNA REPLICASE POLYPROTEIN (EC 2.7.7.48).//1.0:99:30//TURNIP YELLOW MOSAIC VIRUS.//P10358

[4240] F-NT2RP3003572//PUTATIVE CUTICLE COLLAGEN F09G8.6.//0.33:128:32//CAENORHABDITIS ELEGANS.//P34391

[4241] F-NT2RP3003576//!!!! ALU SUBFAMILY SX WARNING ENTRY !!!!//7.1e-28:58:77//HOMO SAPIENS (HUMAN).//P39195

[4242] F-NT2RP3003589//RAS-RELATED PROTEIN RAB-10.//5.4e-54:114:94//CANIS FAMILIARIS (DOG).//P24409

[4243] F-NT2RP3003621//COAGULATION FACTOR XII PRECURSOR (EC 3.4.21.38) (HAGEMAN FACTOR) (HAF).//2.0e-15:89:40//HOMO SAPIENS (HUMAN).//P00748

[4244] F-NT2RP3003625//MALE SPECIFIC SPERM PROTEIN MST84DD.//0.99:22:50//DROSOPHILA MELANOGASTER (FRUIT FLY).//Q01645

[4245] F-NT2RP3003656//HOMEOBOX PROTEIN OTX3 (ZOTX3).//0.30:111:25//BRACHYDANIO RERIO (ZEBRAFISH) (ZEBRA DANIO).//Q90267

[4246] F-NT2RP3003659//HYPOTHETICAL 49.8 KD PROTEIN IN RPL14B-GPA1 INTERGENIC REGION.//1.1e-20:127:37//SACCHAROMYCES CEREVISIAE (BAKER'S YEAST).//P38755

[4247] F-NT2RP3003665//PENAEIDIN-3C PRECURSOR (P3-C).//0.34:52:34//PENAEUS VANNAMEI (PENOEID SHRIMP) (EUROPEAN WHITE SHRIMP).//P81060

[4248] F-NT2RP3003672//T-CELL SURFACE GLYCOPROTEIN E2 PRECURSOR (E2 ANTIGEN) (CD99) (MIC2 PROTEIN) (12E7).//8.7e-15:146:42//HOMO SAPIENS (HUMAN).//P14209

[4249] F-NT2RP3003680//HYPOTHETICAL 55.1 KD PROTEIN IN FAB1-PES4 INTERGENIC REGION.//4.3e-25:159:40//SACCHAROMYCES CEREVISIAE (BAKER'S YEAST).//P43601

[4250] F-NT2RP3003686//NONHISTONE CHROMOSOMAL PROTEIN HMG-17.//0.067:63:3 //GALLUS GALLUS (CHICKEN).//P02314

[4251] F-NT2RP3003701//F-SPONDIN PRECURSOR.//1.8e-13:193:27//RATTUS NORVEGICUS (RAT).//P35446

[4252] F-NT2RP3003716//SLIT PROTEIN PRECURSOR.//1.3e-12:150:34//DROSOPHILA MELANOGASTER (FRUIT FLY).//P24014

[4253] F-NT2RP3003726//INSERTION ELEMENT IS136 HYPOTHETICAL 16.9 KD PROTEIN.//0.47:109:28//AGROBACTERIUM TUMEFACIENS.//P05680

[4254] F-NT2RP3003746//HYPOTHETICAL 7.7 KD PROTEIN IN FIXX 3′REGION (ORF1).//0.57:34:38//AZORHIZOBIUM CAULINODANS.//P26486

[4255] F-NT2RP3003795//!!!! ALU SUBFAMILY SX WARNING ENTRY !!!!//4.3e-10:40:90//HOMO SAPIENS (HUMAN).//P39195

[4256] F-NT2RP3003799//MATING-TYPE PHEROMONE BBP 1(3) PRECURSOR.//0.75:60:36//SCHIZOPHYLLUM COMMUNE (BRACKET FUNGUS).//P78744

[4257] F-NT2RP3003800//PROTO-ONCOGENE TYROSINE-PROTEIN KINASE SRC (EC 2.7.1.112) (P60-SRC).//4.2e-51:72:95//GALLUS GALLUS (CHICKEN).//P00523

[4258] F-NT2RP3003805//HYPOTHETICAL 32.1 KD PROTEIN IN DBP7-GCN3 INTERGENIC REGION.//0.00069:160:25//SACCHAROMYCES CEREVISIAE (BAKER'S YEAST).//P36121

[4259] F-NT2RP3003809//COLLAGEN ALPHA 1(III) CHAIN (FRAGMENTS).//0.028:135:35//GALLUS GALLUS (CHICKEN).//P12105

[4260] F-NT2RP3003819//C-HORDEIN (PCP387) (FRAGMENT).//0.0026:90:33//HORDEUM VULGARE (BARLEY).//P06472

[4261] F-NT2RP3003825//PHOSPHATIDYLCHOLINE TRANSFER PROTEIN (PC-TP).//5.6e-20:174:31//BOS TAURUS (BOVINE).//P02720

[4262] F-NT2RP3003828//ADENYLATE CYCLASE, TYPE V (EC 4.6.1.1) (ATP PYROPHOSPHATE-LYASE) (CA(2+)-INHIBITABLE ADENYLYL CYCLASE).//0.0017:111:38//CANIS FAMILIARIS (DOG).//P30803

[4263] F-NT2RP3003831//ENDONUCLEASE G PRECURSOR (EC 3.1.30.-) (ENDO G).//1.1e-37:187:42//MUS MUSCULUS (MOUSE).//O08600

[4264] F-NT2RP3003833//HYPOTHETICAL 6.4 KD PROTEIN IN INTE-PIN INTERGENIC REGION.//1.0:38:39//ESCHERICHIA COLI.//P75979

[4265] F-NT2RP3003842

[4266] F-NT2RP3003846//RETINAL DEGENERATION B PROTEIN (PROBABLE CALCIUM TRANSPORTER RDGB).//0.61:54:35//DROSOPHILA MELANOGASTER (FRUIT FLY).//P43125

[4267] F-NT2RP3003870//MALE SPECIFIC SPERM PROTEIN MST84 DB.//0.83:51:37//DROSOPHILA MELANOGASTER (FRUIT FLY).//Q01643

[4268] F-NT2RP3003876//PROTEIN TRANSPORT PROTEIN SEC2.//0.0017:151:27//SACCHAROMYCES CEREVISIAE (BAKER'S YEAST).//P17065

[4269] F-NT2RP3003914//UDP-GLUCOSE: GLYCOPROTEIN GLUCOSYLTRANSFERASE PRECURSOR (EC 2.4.1.-) (DUGT).//3.3e-23:76:64//DROSOPHILA MELANOGASTER (FRUIT FLY).//Q09332

[4270] F-NT2RP3003918//VESICLE-ASSOCIATED MEMBRANE PROTEIN/SYNAPTOBREVIN BINDING PROTEIN (VAP-33).//5.5e-45:127:69//APLYSIA CALIFORNICA (CALIFORNIA SEA HARE).//Q16943

[4271] F-NT2RP3003932

[4272] F-NT2RP3003989//PREPROTEIN TRANSLOCASE SECE SUBUNIT.//0.96:46:32//THERMOTOGA MARITIMA.//P35874

[4273] F-NT2RP3003992//NUCLEAR LOCALIZATION SEQUENCE BINDING PROTEIN (P67).//0.0011:170:26//SACCHAROMYCES CEREVISIAE (BAKER'S YEAST).//P27476

[4274] F-NT2RP3004013//DOUBLE-STRANDED RNA-SPECIFIC EDITASE 1 (EC 3.5.-.-) (DSRNA ADENOSINE DEAMINASE) (RNA EDITING ENZYME 1).//3.6e-21:134:45//RATTUS NORVEGICUS (RAT).//P51400

[4275] F-NT2RP3004016//HYPOTHETICAL 24.1 KD PROTEIN IN LEF4-P33 INTERGENIC REGION.//0.00021:64:40//AUTOGRAPHA CALIFORNICA NUCLEAR POLYHEDROSIS VIRUS (ACMNPV).//P41479

[4276] F-NT2RP3004041//SPERM PROTAMINE P1.//0.0028:43:46//ORNITHORHYNCHUS ANATINUS (DUCKBILL PLATYPUS).//P35307

[4277] F-NT2RP3004051//MICROBIAL COLLAGENASE PRECURSOR (EC 3.4.24.3) (120 KD COLLAGENASE).//0.0079:194:24//CLOSTRIDIUM PERFRINGENS.//P43153

[4278] F-NT2RP3004070//!!!! ALU SUBFAMILY J WARNING ENTRY !!!!//3.4e-11:51:72//HOMO SAPIENS (HUMAN).//P39188

[4279] F-NT2RP3004078//DNA BINDING PROTEIN RFX2.//2.7e-114:243:87//MUS MUSCULUS (MOUSE).//P48379

[4280] F-NT2RP3004093//HYPOTHETICAL 32.3 KD PROTEIN IN RHSE-NARV INTERGENIC REGION (ORFB).//8.0e-13:111:41//ESCHERICHIA COLI.//P37757

[4281] F-NT2RP3004095//!!!! ALU SUBFAMILY J WARNING ENTRY !!!!//1.5e-17:72:65//HOMO SAPIENS (HUMAN).//P39188

[4282] F-NT2RP3004110//!!!! ALU SUBFAMILY SX WARNING ENTRY !!!!//2.6e-10:51:72//HOMO SAPIENS (HUMAN).//P39195

[4283] F-NT2RP3004125//ZINC FINGER PROTEIN 75.//1.1e-28:118:47//HOMO SAPIENS (HUMAN).//P51815

[4284] F-NT2RP3004145//AEROLYSIN REGULATORY PROTEIN.//0.012:45:33//AEROMONAS SOBRIA.//P09165

[4285] F-NT2RP3004148//METALLOTHIONEIN-1 (MT-1).//0.055:18:50//COLUMBA LIVIA (DOMESTIC PIGEON).//P15786

[4286] F-NT2RP3004155//UBIQUINONE BIOSYNTHESIS PROTEIN COQ7 HOMOLOG.//1.7e-82:178:89//RATTUS NORVEGICUS (RAT).//Q63619

[4287] F-NT2RP3004189//VEGETATIBLE INCOMPATIBILITY PROTEIN HET-E-1.//1.7e-11:215:24//PODOSPORA ANSERINA.//Q00808

[4288] F-NT2RP3004206//CROOKED NECK PROTEIN.//3.8e-101:241:73//DROSOPHILA MELANOGASTER (FRUIT FLY).//P17886

[4289] F-NT2RP3004207//CUTICLE COLLAGEN 12 PRECURSOR.//0.13:130:33//CAENORHABDITIS ELEGANS.//P20630

[4290] F-NT2RP3004209//UBIQUITIN CARBOXYL-TERMINAL HYDROLASE 4 (EC 3.1.2.15) (UBIQUITIN THIOLESTERASE 4) (UBIQUITIN-SPECIFIC PROCESSING PROTEASE 4) (DEUBIQUITINATING ENZYME 4) (UBIQUITOUS NUCLEAR PROTEIN HOMOLOG).//6.5e-16:207:29//HOMO SAPIENS (HUMAN).//Q13107

[4291] F-NT2RP3004215//PROTEIN TRANSPORT PROTEIN SEC61 GAMMA SUBUNIT.//1.0:69:31//SACCHAROMYCES CEREVISIAE (BAKER'S YEAST).//P35179

[4292] F-NT2RP3004242//HYPOTHETICAL 30.2 KD PROTEIN ZK632.12 IN CHROMOSOME III.//1.1e-64:191:63//CAENORHABDITIS ELEGANS.//P34657

[4293] F-NT2RP3004246//RING3 PROTEIN (KIAA9001).//0.060:101:28//HOMO SAPIENS (HUMAN).//P25440

[4294] F-NT2RP3004253//COLLAGEN ALPHA 1(I) CHAIN (FRAGMENTS).//1.1e-07:184:35//BOS TAURUS (BOVINE).//P02453

[4295] F-NT2RP3004258//SUPPRESSOR PROTEIN SRP40.//4.9e-08:98:39//SACCHAROMYCES CEREVISIAE (BAKER'S YEAST).//P32583

[4296] F-NT2RP3004262//DNAJ PROTEIN HOMOLOG 1 (HDJ-1) (HEAT SHOCK PROTEIN 40) (HSP40).//1.6e-63:210:61//HOMO SAPIENS (HUMAN).//P25685

[4297] F-NT2RP3004282//HYPOTHETICAL PROTEIN F44G4.1 IN CHROMOSOME II (FRAGMENT).//1.6e-29:177:38//CAENORHABDITIS ELEGANS.//P54073

[4298] F-NT2RP3004332//DNA-DIRECTED RNA POLYMERASE II LARGEST SUBUNIT (EC 2.7.7.6) (RPB1) (FRAGMENT).//0.030:118:36//CRICETULUS GRISEUS (CHINESE HAMSTER).//P11414

[4299] F-NT2RP3004334

[4300] F-NT2RP3004341//ALPHA-INTERNEXIN (ALPHA-INX).//0.91:110:26//MUS MUSCULUS (MOUSE).//P46660

[4301] F-NT2RP3004348//HYPOTHETICAL 105.3 KD PROTEIN C01G6.5 IN CHROMOSOME III.//0.60:198:24//CAENORHABDITIS ELEGANS.//P46012

[4302] F-NT2RP3004349//!!!! ALU SUBFAMILY SP WARNING ENTRY !!!!//1.0e-37:60:76//HOMO SAPIENS (HUMAN).//P39193

[4303] F-NT2RP3004378//HYPOTHETICAL 18.8 KD PROTEIN IN GNTR-GGT INTERGENIC REGION (0162).//0.0026:76:28//ESCHERICHIA COLI.//P46854

[4304] F-NT2RP3004399//LEUCINE-RICH PRIMARY RESPONSE PROTEIN 1 (FOLLICLE-STIMULATING HORMONE PRIMARY RESPONSE PROTEIN).//4.4e-109:212:96//HOMO SAPIENS (HUMAN).//Q92674

[4305] F-NT2RP3004424//JTV-1 PROTEIN.//4.5e-18:60:70//HOMO SAPIENS (HUMAN).//Q13155

[4306] F-NT2RP3004428//METALLOTHIONEIN-A (MTA).//0.0010:36:47//STRONGYLOCENTROTUS PURPURATUS (PURPLE SEA URCHIN).//P04734

[4307] F-NT2RP3004451//MYOSIN IC HEAVY CHAIN.//0.00072:113:34//ACANTHAMOEBA CASTELLANII (AMOEBA).//P10569

[4308] F-NT2RP3004454//VERPROLIN.//3.3e-07:156:29//SACCHAROMYCES CEREVISIAE (BAKER'S YEAST).//P37370

[4309] F-NT2RP3004466//HYPOTHETICAL PROTEIN F-215.//0.0013:125:32//HUMAN ADENOVIRUS TYPE 2.//P03291

[4310] F-NT2RP3004470//HYPOTHETICAL 15.4 KD PROTEIN C16C110.1 IN CHROMOSOME III.//1.0:33:51//CAENORHABDITIS ELEGANS.//Q09254

[4311] F-NT2RP3004472//GERM CELL-LESS PROTEIN.//7.3e-33:170:40//DROSOPHILA MELANOGASTER (FRUIT FLY).//Q01820

[4312] F-NT2RP3004475//RHO-GAP HEMATOPOIETIC PROTEIN C1 (P115) (KIAA0131).//8.4e-54:214:46//HOMO SAPIENS (HUMAN).//P98171

[4313] F-NT2RP3004480//VACUOLAR PROTEIN SORTING-ASSOCIATED PROTEIN VPS35.//3.9e-47:199:49//SACCHAROMYCES CEREVISIAE (BAKER'S YEAST).//P34110

[4314] F-NT2RP3004490//SKIN SECRETORY PROTEIN XP2 PRECURSOR (APEG PROTEIN).//0.0013:121:33//XENOPUS LAEVIS (AFRICAN CLAWED FROG).//P17437

[4315] F-NT2RP3004498//HYPOTHETICAL 43.5 KD PROTEIN IN COTD-KDUD INTERGENIC REGION PRECURSOR.//0.066:87:35//BACILLUS SUBTILIS.//P50840

[4316] F-NT2RP3004503//!!!! ALU SUBFAMILY SQ WARNING ENTRY !!!!//2.0e-34:102:69//HOMO SAPIENS (HUMAN).//P39194

[4317] F-NT2RP3004504//SUPPRESSOR PROTEIN SRP40.//0.64:93:34//SACCHAROMYCES CEREVISIAE (BAKER'S YEAST).//P32583

[4318] F-NT2RP3004507//MOB1 PROTEIN (MPS1 BINDER 1).//2.2e-16:90:42//SACCHAROMYCES CEREVISIAE (BAKER'S YEAST).//P40484

[4319] F-NT2RP3004527

[4320] F-NT2RP3004534//S-PHASE ENTRY CYCLIN 6.//0.38:148:22//SACCHAROMYCES CEREVISIAE (BAKER'S YEAST).//P32943

[4321] F-NT2RP3004539//INSULIN-LIKE GROWTH FACTOR BINDING PROTEIN 1 PRECURSOR (IGFBP-1) (IBP-1) (IGF-BINDING PROTEIN 1).//0.38:89:38//RATTUS NORVEGICUS (RAT).//P21743

[4322] F-NT2RP3004544//CYTADHERENCE HIGH MOLECULAR WEIGHT PROTEIN 2 (CYTADHERENCE ACCESSORY PROTEIN 2).//0.0024:200:24//MYCOPLASMA PNEUMONIAE.//P75471

[4323] F-NT2RP3004566//GASTRULA ZINC FINGER PROTEIN XLCGF17.1 (FRAGMENT).//4.6e-25:126:43//XENOPUS LAEVIS (AFRICAN CLAWED FROG).//P18713

[4324] F-NT2RP3004569//ANKYRIN.//8.3e-07:150:28//MUS MUSCULUS (MOUSE).//Q02357

[4325] F-NT2RP3004572//TRANSCRIPTION INITIATION FACTOR TFIID 150 KD SUBUNIT (TAFII-150) (TAFII150).//1.6e-70:247:54//DROSOPHILA MELANOGASTER (FRUIT FLY).//Q24325

[4326] F-NT2RP3004578//CENTROMERIC PROTEIN E (CENP-E PROTEIN).//1.5e-10:210:26//HOMO SAPIENS (HUMAN).//Q02224

[4327] F-NT2RP3004594//P54 PROTEIN PRECURSOR.//0.0044:230:24//ENTEROCOCCUS FAECIUM (STREPTOCOCCUS FAECIUM).//P13692

[4328] F-NT2RP3004617//DOWN REGULATORY PROTEIN OF INTERLEUKIN 2 RECEPTOR.//1.5e-14:113:34//MUS MUSCULUS (MOUSE).//P15533

[4329] F-NT2RP3004618//HYPOTHETICAL 115.4 KD PROTEIN ZK757.3 IN CHROMOSOME III.//4.5e-08:149:30//CAENORHABDITIS ELEGANS.//P34681

[4330] F-NT2RP3004669//ETHANOLAMINE KINASE (EC 2.7.1.82) (EASILY SHOCKED PROTEIN).//1.0e-24:75:48//DROSOPHILA MELANOGASTER (FRUIT FLY).//P54352

[4331] F-NT2RP3004670//CUTICLE COLLAGEN 2.//0.00090:159:29//CAENORHABDITIS ELEGANS.//P17656

[4332] F-NT2RP4000008//CHLORINE CHANNEL PROTEIN P64.//4.0e-79:243:62//BOS TAURUS (BOVINE).//P35526

[4333] F-NT2RP4000023

[4334] F-NT2RP4000035//!!!! ALU SUBFAMILY SQ WARNING ENTRY !!!!//3.6e-06:46:67//HOMO SAPIENS (HUMAN).//P39194

[4335] F-NT2RP4000049//CALDESMON (CDM).//0.41:63:34//GALLUS GALLUS (CHICKEN).//P12957

[4336] F-NT2RP4000051//DUALIN.//2.3e-23:195:37//GALLUS GALLUS (CHICKEN).//Q90830

[4337] F-NT2RP4000078//RING CANAL PROTEIN (KELCH PROTEIN).//1.2e-24:182:31//DROSOPHILA MELANOGASTER (FRUIT FLY).//Q04652

[4338] F-NT2RP4000102//XPAR7 PROTEIN.//1.0:54:33//BACILLUS LICHENIFORMIS.//Q99166

[4339] F-NT2RP4000109//SLIT PROTEIN PRECURSOR.//1.9e-60:230:46//DROSOPHILA MELANOGASTER (FRUIT FLY).//P24014

[4340] F-NT2RP4000111//CLEAVAGE AND POLYADENYLATION SPECIFICITY FACTOR, 100 KD SUBUNIT (CPSF 100 KD SUBUNIT).//1.4e-91:157:100//BOS TAURUS (BOVINE).//Q10568

[4341] F-NT2RP4000129//5E5 ANTIGEN.//0.00072:124:37//RATTUS NORVEGICUS (RAT).//Q63003

[4342] F-NT2RP4000147//ZINC FINGER PROTEIN GCS1.//1.5e-26:119:43//SACCHAROMYCES CEREVISIAE (BAKER'S YEAST).//P35197

[4343] F-NT2RP4000150

[4344] F-NT2RP4000151//HYPOTHETICAL 31.0 KD PROTEIN R107.2 IN CHROMOSOME III.//4.2e-31:180:47//CAENORHABDITIS ELEGANS.//P32740

[4345] F-NT2RP4000159//SPORE COAT PROTEIN SP96.//0.84:107:28//DICTYOSTELIUM DISCOIDEUM (SLIME MOLD).//P14328

[4346] F-NT2RP4000167//HYPOTHETICAL 98.1 KD PROTEIN IN SPX19-GCR2 INTERGENIC REGION.//2.4e-08:133:32//SACCHAROMYCES CEREVISIAE (BAKER'S YEAST).//P40164

[4347] F-NT2RP4000185//TRANS-ACTING TRANSCRIPTIONAL PROTEIN ICPO (VMW118 PROTEIN).//5.4e-05:143:32//HERPES SIMPLEX VIRUS (TYPE 2/STRAIN HG52).//P28284

[4348] F-NT2RP4000210//PAIRED AMPHIPATHIC HELIX PROTEIN.//1.8e-40:258:35//SACCHAROMYCES CEREVISIAE (BAKER'S YEAST).//P22579

[4349] F-NT2RP4000212//ATRIAL GLAND-SPECIFIC ANTIGEN PRECURSOR (AGSA).//1.4e-20:104:40//APLYSIA CALIFORNICA (CALIFORNIA SEA HARE).//P15287

[4350] F-NT2RP4000214//FERREDOXIN.//1.0:19:42//MOORELLA THERMOACETICA (CLOSTRIDIUM THERMOACETICUM).//P00203

[4351] F-NT2RP4000218//!!!! ALU SUBFAMILY J WARNING ENTRY !!!!//1.7e-15:48:60//HOMO SAPIENS (HUMAN).//P39188

[4352] F-NT2RP4000243//DUALIN.//5.8e-78:192:70//GALLUS GALLUS (CHICKEN).//Q90830

[4353] F-NT2RP4000246//NPC DERIVED PROLINE RICH PROTEIN 1 (NDPP-1).//3.1e-83:207:76//MUS MUSCULUS (MOUSE).//Q03173

[4354] F-NT2RP4000259//GLUTATHIONE PEROXIDASE 2 (EC 1.11.1.9).//5.5e-29:153:43//HELIANTHUS ANNUUS (COMMON SUNFLOWER).//O23968

[4355] F-NT2RP4000263//ANNEXIN VII (SYNEXIN) (FRAGMENT).//0.98:42:40//BOS TAURUS (BOVINE).//P20072

[4356] F-NT2RP4000290//HYPOTHETICAL 116.5 KD PROTEIN C20G8.09C IN CHROMOSOME I.//3.5e-71:209:66//SCHIZOSACCHAROMYCES POMBE (FISSION YEAST).//P87115

[4357] F-NT2RP4000312//RAS SUPPRESSOR PROTEIN 1 (RSU-1) (RSP-1 PROTEIN) (RSP-1).//8.9e-22:166:37//HOMO SAPIENS (HUMAN).//Q15404

[4358] F-NT2RP4000321//VERPROLIN.//0.00018:260:28//SACCHAROMYCES CEREVISIAE (BAKER'S YEAST).//P37370

[4359] F-NT2RP4000323//ANTHOPLEURIN B (TOXIN AP-B).//0.42:15:46//ANTHOPLEURA XANTHOGRAMMICA (GIANT GREEN SEA ANEMONE).//P01531

[4360] F-NT2RP4000355//HYPOTHETICAL 90.9 KD PROTEIN IN GCN20-CMK1 INTERGENIC REGION.//0.75:125:29//SACCHAROMYCES CEREVISIAE (BAKER'S YEAST).//P43596

[4361] F-NT2RP4000360//ACIDIC PROLINE-RICH PROTEIN PRECURSOR (CLONE PRP25) (FRAGMENT).//0.27:92:33//RATTUS NORVEGICUS (RAT).//P10164

[4362] F-NT2RP4000367//HYPOTHETICAL 7.3 KD PROTEIN IN 100 KD PROTEIN REGION.//0.99:52:32//HUMAN ADENOVIRUS TYPE 41.//P23691

[4363] F-NT2RP4000370//MITOCHONDRIAL PEPTIDE CHAIN RELEASE FACTOR 1 PRECURSOR (MRF-1).//4.1e-40:163:52//HOMO SAPIENS (HUMAN).//O75570

[4364] F-NT2RP4000376//PHOSPHOLIPASE A-2-ACTIVATING PROTEIN (PLAP).//4.2e-59:125:80//RATTUS NORVEGICUS (RAT).//P54319

[4365] F-NT2RP4000381//NEUROFILAMENT TRIPLET H PROTEIN (200 KD NEUROFILAMENT PROTEIN) (NF-H).//0.00058:194:30//MUS MUSCULUS (MOUSE).//P19246

[4366] F-NT2RP4000398//ZINC FINGER PROTEIN 184 (FRAGMENT).//1.2e-45:153:39//HOMO SAPIENS (HUMAN).//Q99676

[4367] F-NT2RP4000415//HYPOTHETICAL 118.4 KD PROTEIN IN BAT2-DAL5 INTERGENIC REGION PRECURSOR.//0.00066:201:27//SACCHAROMYCES CEREVISIAE (BAKER'S YEAST).//P47179

[4368] F-NT2RP4000417//PROCESSING ALPHA-1,2-MANNOSIDASE (EC 3.2.1.-) (ALPHA-1,2-MANNOSIDASE 1B).//1.8e-25:196:40//MUS MUSCULUS (MOUSE).//P39098

[4369] F-NT2RP4000424//!!!! ALU SUBFAMILY SX WARNING ENTRY !!!!//1.0e-15:72:61//HOMO SAPIENS (HUMAN).//P39195

[4370] F-NT2RP4000448//!!!! ALU SUBFAMILY SC WARNING ENTRY !!!!//7.0e-23:63:82//HOMO SAPIENS (HUMAN).//P39192

[4371] F-NT2RP4000449//REGULATORY PROTEIN SIR2 (SILENT INFORMATION REGULATOR 2).//1.3e-41:102:45//KLUYVEROMYCES LACTIS (YEAST).//P33294

[4372] F-NT2RP4000455//HOMEOBOX PROTEIN SAX-1 (CHOX-3) (FRAGMENT).//0.00014:92:30//GALLUS GALLUS (CHICKEN).//P19601

[4373] F-NT2RP4000457//UBIQUITIN CARBOXYL-TERMINAL HYDROLASE 7 (EC 3.1.2.15) (UBIQUITIN THIOLESTERASE 7) (UBIQUITIN-SPECIFIC PROCESSING PROTEASE 7) (DEUBIQUITINATING ENZYME 7) (HERPESVIRUS ASSOCIATED UBIQUITIN-SPECIFIC PROTEASE).//1.0e-29:218:38//HOMO SAPIENS (HUMAN).//Q93009

[4374] F-NT2RP4000480//TRANSCRIPTIONAL REGULATORY PROTEIN ALGP (ALGINATE REGULATORY PROTEIN ALGR3).//0.049:117:29//PSEUDOMONAS AERUGINOSA.//P15276

[4375] F-NT2RP4000481//HYPOTHETICAL HELICASE C28H8.3 IN CHROMOSOME III.//2.3e-05:152:23//CAENORHABDITIS ELEGANS.//Q09475

[4376] F-NT2RP4000498//MOB1 PROTEIN (MPS1 BINDER 1).//2.3e-48:172:52//SACCHAROMYCES CEREVISIAE (BAKER'S YEAST).//P40484

[4377] F-NT2RP4000500//HYPOTHETICAL 83.6 KD PROTEIN R05D3.2 IN CHROMOSOME III.//1.3e-23:165:35//CAENORHABDITIS ELEGANS.//P34535

[4378] F-NT2RP4000515//PHOSPHODIESTERASE I (EC 3.1.4.1) (5′-EXONUCLEASE) (5′-NUCLEOTIDE PHOSPHODIESTERASE) (FRAGMENT).//1.0:48:37//BOS TAURUS (BOVINE).//P15396

[4379] F-NT2RP4000517//METALLOTHIONEIN-LIKE PROTEIN TYPE 2.//1.0:41:36//VICIA FABA (BROAD BEAN).//Q41657

[4380] F-NT2RP4000518//ATP-DEPENDENT RNA HELICASE ROK1.//1.1e-11:93:36//SACCHAROMYCES CEREVISIAE (BAKER'S YEAST).//P45818

[4381] F-NT2RP4000519//COLLAGEN ALPHA 1 (XII) CHAIN (FRAGMENTS).//0.68:55:40//BOS TAURUS (BOVINE).//P25508

[4382] F-NT2RP4000524//IGA FC RECEPTOR PRECURSOR (BETA ANTIGEN) (B ANTIGEN).//0.37:187:24//STREPTOCOCCUS AGALACTIAE.//P27951

[4383] F-NT2RP4000528//NPL4 PROTEIN.//2.1e-45:305:36//SACCHAROMYCES CEREVISIAE (BAKER'S YEAST).//P33755

[4384] F-NT2RP4000541//HOMEOBOX PROTEIN CHOX-1 (FRAGMENT).//0.23:28:50//GALLUS GALLUS (CHICKEN).//P13544

[4385] F-NT2RP4000556//HYPOTHETICAL 34.1 KD PROTEIN C40H1.4 IN CHROMOSOME III.//4.3e-14:174:34//CAENORHABDITIS ELEGANS.//Q03574

[4386] F-NT2RP4000560//HYPOTHETICAL 68.7 KD PROTEIN ZK757.1 IN CHROMOSOME III.//2.1e-19:155:36//CAENORHABDITIS ELEGANS.//P34679

[4387] F-NT2RP4000588//HYPOTHETICAL PROTEIN E-115.//0.014:64:35//HUMAN ADENOVIRUS TYPE 2.//P03290

[4388] F-NT2RP4000614//SPLICING FACTOR, ARGININE/SERINE-RICH 2 (SPLICING FACTOR SC35) (SC-35) (SPLICING COMPONENT, 35 KD) (PR264 PROTEIN).//2.7e-27:188:44//GALLUS GALLUS (CHICKEN).//P30352

[4389] F-NT2RP4000638//EARLY NODULIN 55-1 PRECURSOR (N-55-1) (FRAGMENT).//0.55:40:40//GLYCINE MAX (SOYBEAN).//Q05544

[4390] F-NT2RP4000648//!!!! ALU SUBFAMILY J WARNING ENTRY !!!!//2.4e-06:31:74//HOMO SAPIENS (HUMAN).//P39188

[4391] F-NT2RP4000657//HYPOTHETICAL PROTEIN MJ1065.//2.5e-40:237:40//METHANOCOCCUS JANNASCHII.//Q58465

[4392] F-NT2RP4000704

[4393] F-NT2RP4000713//HYPOTHETICAL 35.5 KD PROTEIN IN TRANSPOSON TN4556.//4.0e-07:134:40//STREPTOMYCES FRADIAE.//P20186

[4394] F-NT2RP4000724//RETROVIRUS-RELATED POL POLYPROTEIN [CONTAINS: REVERSE TRANSCRIPTASE (EC 2.7.7.49); ENDONUCLEASE].//1.1e-62:109:88//HOMO SAPIENS (HUMAN).//P10266

[4395] F-NT2RP4000728//A-AGGLUTININ ATTACHMENT SUBUNIT PRECURSOR.//0.0033:190:25//SACCHAROMYCES CEREVISIAE (BAKER'S YEAST).//P32323

[4396] F-NT2RP4000737//PTB-ASSOCIATED SPLICING FACTOR (PSF).//1.0e-05:114:34//HOMO SAPIENS (HUMAN).//P23246

[4397] F-NT2RP4000739//ATP SYNTHASE PROTEIN 8 (EC 3.6.1.34) (A6L).//1.0:20:50//ANAS PLATYRHYNCHOS (DOMESTIC DUCK).//P50655

[4398] F-NT2RP4000781//HYPOTHETICAL 27.7 KD PROTEIN IN CPT1-SPC98 INTERGENIC REGION.//0.0013:67:31//SACCHAROMYCES CEREVISIAE (BAKER'S YEAST).//P53915

[4399] F-NT2RP4000787//POLLEN SPECIFIC PROTEIN SF3.//1.3e-13:79:39//HELIANTHUS ANNUUS (COMMON SUNFLOWER).//P29675

[4400] F-NT2RP4000817//SUPPRESSOR PROTEIN SRP40.//1.3e-05:255:21//SACCHAROMYCES CEREVISIAE (BAKER'S YEAST).//P32583

[4401] F-NT2RP4000833

[4402] F-NT2RP4000837//MALE SPECIFIC SPERM PROTEIN MST84 DB.//0.18:38:44//DROSOPHILA MELANOGASTER (FRUIT FLY).//Q01643

[4403] F-NT2RP4000839//TRANSCRIPTION INITIATION FACTOR TFIID 90 KD SUBUNIT (TAFII-90).//0.026:38:44//SACCHAROMYCES CEREVISIAE (BAKER'S YEAST).//P38129

[4404] F-NT2RP4000855//AMINOPEPTIDASE B (EC 3.4.11.6) (ARGINYL AMINOPEPTIDASE) (ARGININE AMINOPEPTIDASE) (CYTOSOL AMINOPEPTIDASE IV) (AP-B).//2.8e-64:229:53//RATTUS NORVEGICUS (RAT).//O09175

[4405] F-NT2RP4000865//ZINC FINGER PROTEIN ZFP-36 (FRAGMENT).//3.6e-84:174:54//HOMO SAPIENS (HUMAN).//P16415

[4406] F-NT2RP4000878//MYELOID UPREGULATED PROTEIN.//8.2e-88:227:74//MUS MUSCULUS (MOUSE).//O35682

[4407] F-NT2RP4000879//UBIQUITIN-ACTIVATING ENZYME E1 (A1S9 PROTEIN).//9.1e-55:268:43//HOMO SAPIENS (HUMAN).//P22314

[4408] F-NT2RP4000907//BDNF/NT-3 GROWTH FACTORS RECEPTOR PRECURSOR (EC 2.7.1.112) (TRKB TYROSINE KINASE) (GP145-TRKB) (TRK-B).//5.4e-10:220:25//HOMO SAPIENS (HUMAN).//Q16620

[4409] F-NT2RP4000915//60S ACIDIC RIBOSOMAL PROTEIN P2 (FRAGMENT).//0.46:23:60//ARABIDOPSIS THALIANA (MOUSE-EAR CRESS).//P51407

[4410] F-NT2RP4000918//METHYL-ACCEPTING CHEMOTAXIS PROTEIN TLPB.//0.00010:148:32//BACILLUS SUBTILIS.//P39217

[4411] F-NT2RP4000925//FIBROMODULIN PRECURSOR (FM) (COLLAGEN-BINDING 59 KD PROTEIN).//3.5e-27:220:36//HOMO SAPIENS (HUMAN).//Q06828

[4412] F-NT2RP4000927//TRANS-ACTING TRANSCRIPTIONAL PROTEIN ICPO (P135 PROTEIN) (IER 2.9/ER2.6).//0.64:75:37//BOVINE HERPESVIRUS TYPE I (STRAIN JURA).//P29128

[4413] F-NT2RP4000928//PHOSPHATIDATE CYTIDYLYLTRANSFERASE (EC 2.7.7.41) (CDP-DIGLYCERIDE SYNTHETASE) (CDP-DIGLYCERIDE PYROPHOSPHORYLASE) (CDP-DIACYLGLYCEROL SYNTHASE) (CDS) (CTP:PHOSPHATIDATE CYTIDYLYLTRANSFERASE) (CDP-DAG SYNTHASE).//3.1e-104:263:66//HOMO SAPIENS (HUMAN).//Q92903

[4414] F-NT2RP4000929//HYPOTHETICAL 22.2 KD PROTEIN IN NSR1-TIF4631 INTERGENIC REGION.//0.93:107:28//SACCHAROMYCES CEREVISIAE (BAKER'S YEAST).//P53288

[4415] F-NT2RP4000955//PUTATIVE CUTICLE COLLAGEN F09G8.6.//2.0e-05:102:37//CAENORHABDITIS ELEGANS.//P34391

[4416] F-NT2RP4000973//HYPOTHETICAL 48.6 KD PROTEIN IN BET1-PAN1 INTERGENIC REGION.//2.3e-17:78:56//SACCHAROMYCES CEREVISIAE (BAKER'S YEAST).//P40564

[4417] F-NT2RP4000975//SALIVARY PROLINE-RICH PROTEIN PO (ALLELE K) [CONTAINS: PEPTIDE P-D] (FRAGMENT).//0.0041:142:33//HOMO SAPIENS (HUMAN).//P10162

[4418] F-NT2RP4000979//HYPOTHETICAL 14.5 KD PROTEIN.//0.77:106:33//VACCINIA VIRUS (STRAIN COPENHAGEN).//P20517

[4419] F-NT2RP4000984//HYPOTHETICAL 124.8 KD PROTEIN C29E4.4 IN CHROMOSOME III.//0.90:94:25//CAENORHABDITIS ELEGANS.//P34343

[4420] F-NT2RP4000989//ANTHOPLEURIN B (TOXIN AP-B).//0.76:41:41//ANTHOPLEURA XANTHOGRAMMICA (GIANT GREEN SEA ANEMONE).//P01531

[4421] F-NT2RP4000996//PROTEIN Q300.//0.00024:41:53//MUS MUSCULUS (MOUSE).//Q02722

[4422] F-NT2RP4000997//DNA-DIRECTED RNA POLYMERASE 1135 KD POLYPEPTIDE (EC 2.7.7.6) (RNA POLYMERASE I SUBUNIT 2) (RPA135) (RNA POLYMERASE 1127 KD SUBUNIT).//8.7e-1115:261:82//RATTUS NORVEGICUS (RAT).//O54888

[4423] F-NT2RP4001004//EC PROTEIN HOMOLOG 2 (FRAGMENT).//0.50:61:34//ARABIDOPSIS THALIANA (MOUSE-EAR CRESS).//Q42377

[4424] F-NT2RP4001006//HYPOTHETICAL 43.5 KD PROTEIN IN COTD-KDUD INTERGENIC REGION PRECURSOR.//0.010:152:29//BACILLUS SUBTILIS.//P50840

[4425] F-NT2RP4001010//GLUCOAMYLASE S1/S2 PRECURSOR (EC 3.2.1.3) (GLUCAN 1,4-ALPHA- GLUCOSIDASE) (1,4-ALPHA-D-GLUCAN GLUCOHYDROLASE).//9.9e-05:247:25//SACCHAROMYCES CEREVISIAE (BAKER'S YEAST).//P08640

[4426] F-NT2RP4001029//PROTEIN GRAINY-HEAD (DNA-BINDING PROTEIN ELF-1) (ELEMENT I-BINDING ACTIVITY) (TRANSCRIPTION FACTOR NTF-1).//1.1e-14:175:31//DROSOPHILA MELANOGASTER (FRUIT FLY).//P13002

[4427] F-NT2RP4001041//PROBABLE LEUCYL-TRNA SYNTHETASE (EC 6.1.1.4) (LEUCINE-TRNA LIGASE) (LEURS).//1.5e-74:272:55//CAENORHABDITIS ELEGANS.//Q09996

[4428] F-NT2RP4001057//HYPOTHETICAL 62.2 KD PROTEIN ZK652.6 IN CHROMOSOME III.//0.0064:76:38//CAENORHABDITIS ELEGANS.//P34664

[4429] F-NT2RP4001064//DUALIN.//2.5e-24:199:38//GALLUS GALLUS (CHICKEN).//Q90830

[4430] F-NT2RP4001078//TRANSCRIPTION INITIATION FACTOR TFIID 135 KD SUBUNIT (TAFII-135) (TAFII135) (TAFII-130) (TAFII130).//0.11:139:38//HOMO SAPIENS (HUMAN).//O00268

[4431] F-NT2RP4001079//CALCIUM-TRANSPORTING ATPASE 1 (EC 3.6.1.38) (GOLGI CA2+-ATPASE).//1.5e-22:242:31//SACCHAROMYCES CEREVISIAE (BAKER'S YEAST).//P13586

[4432] F-NT2RP4001080//POLYPYRIMIDINE TRACT-BINDING PROTEIN (PTB) (HETEROGENEOUS NUCLEAR RIBONUCLEOPROTEIN I) (HNRNP I).//1.7e-82:178:69//SUS SCROFA (PIG).//Q29099

[4433] F-NT2RP4001086//LEUCINE-RICH ACIDIC NUCLEAR PROTEIN.//0.00039:141:26//RATTUS NORVEGICUS (RAT).//P49911

[4434] F-NT2RP4001095//DOUBLE-STRANDED RNA-SPECIFIC EDITASE 1 (EC 3.5.-.-) (DSRNA ADENOSINE DEAMINASE) (RNA EDITING ENZYME 1).//9.9e-07:79:43//HOMO SAPIENS (HUMAN).//P78563

[4435] F-NT2RP4001100//HYPOTHETICAL 74.0 KD PROTEIN IN CAJ1-HOM3 INTERGENIC REGION.//4.4e-16:207:35//SACCHAROMYCES CEREVISIAE (BAKER'S YEAST).//P40032

[4436] F-NT2RP4001117//PROTEIN TRANSPORT PROTEIN SEC61 ALPHA SUBUNIT.//8.1e-115:224:99//RATTUS NORVEGICUS (RAT).//P38378

[4437] F-NT2RP4001122//TIPD PROTEIN.//7.5e-11:129:31//DICTYOSTELIUM DISCOIDEUM (SLIME MOLD).//O15736

[4438] F-NT2RP4001126//TRICHOHYALIN.//1.4e-19:257:28//OVIS ARIES (SHEEP).//P22793

[4439] F-NT2RP4001138//PUTATIVE F420-DEPENDENT NADP REDUCTASE (EC 1.-.-.-).//0.00010:204:25//METHANOCOCCUS JANNASCHII.//Q58896

[4440] F-NT2RP4001143//HYPOTHETICAL 52.9 KD PROTEIN IN SAPI55-YMR31 INTERGENIC REGION.//4.5e-34:168:44//SACCHAROMYCES CEREVISIAE (BAKER'S YEAST).//P43616

[4441] F-NT2RP4001148//SOF1 PROTEIN.//2.4e-41:158:41//SACCHAROMYCES CEREVISIAE (BAKER'S YEAST).//P33750

[4442] F-NT2RP4001149//SULFATED SURFACE GLYCOPROTEIN 185 (SSG 185).//1.3e-08:106:41//VOLVOX CARTERI.//P21997

[4443] F-NT2RP4001150//NG-CAM RELATED CELL ADHESION MOLECULE PRECURSOR (NR-CAM) (BRAVO).//3.6e-24:194:32//GALLUS GALLUS (CHICKEN).//P35331

[4444] F-NT2RP4001159//MEROZOITE SURFACE ANTIGEN 2 PRECURSOR (MSA-2).//0.0056:117:25//PLASMODIUM FALCIPARUM (ISOLATE K1/THAILAND).//Q03643

[4445] F-NT2RP4001174//NON-GREEN PLASTID TRIOSE PHOSPHATE TRANSLOCATOR PRECURSOR (CTPT).//5.9e-24:184:34//BRASSICA OLERACEA (CAULIFLOWER).//P52178

[4446] F-NT2RP4001206//MEROZOITE SURFACE ANTIGEN 2 PRECURSOR (MSA-2).//0.0029:117:26//PLASMODIUM FALCIPARUM (ISOLATE K1/THAILAND).//Q03643

[4447] F-NT2RP4001207//CHROMOSOME SEGREGATION PROTEIN CSE1.//1.0e-07:144:28//SACCHAROMYCES CEREVISIAE (BAKER'S YEAST).//P33307

[4448] F-NT2RP4001210//DERMORPHIN 1 PRECURSOR [CONTAINS: DELTORPHIN (DERMENKEPHALIN); DERMORPHIN].//0.019:130:30//PHYLLOMEDUSA SAUVAGEI (SAUVAGE'S LEAF FROG).//P05422

[4449] F-NT2RP4001213//ZINC FINGER PROTEIN 177.//3.2e-28:176:39//HOMO SAPIENS (HUMAN).//Q13360

[4450] F-NT2RP4001219//DISULFIDE ISOMERASE MPD1 PRECURSOR (EC 5.3.4.1).//2.4e-13:108:37//SACCHAROMYCES CEREVISIAE (BAKER'S YEAST).//Q12404

[4451] F-NT2RP4001228//RING CANAL PROTEIN (KELCH PROTEIN).//2.7e-56:242:40//DROSOPHILA MELANOGASTER (FRUIT FLY).//Q04652

[4452] F-NT2RP4001235//REGULATORY PROTEIN E2.//0.0080:100:38//HUMAN PAPILLOMAVIRUS TYPE 25.//P36787

[4453] F-NT2RP4001256//CUTICLE COLLAGEN 1.//0.014:104:31//CAENORHABDITIS ELEGANS.//P08124

[4454] F-NT2RP4001260//BACTERIOCIN MICROCIN B17 PRECURSOR (MCB17).//0.00077:16:68//ESCHERICHIA COLI.//P05834

[4455] F-NT2RP4001274//HISTONE Hi .M6.1.//0.98:65:35//TRYPANOSOMA CRUZI.//P40273

[4456] F-NT2RP4001276//ELAV PROTEIN.//0.00054:134:33//DROSOPHILA VIRILIS (FRUIT FLY).//P23241

[4457] F-NT2RP4001313//EXTENSIN PRECURSOR (CELL WALL HYDROXYPROLINE-RICH GLYCOPROTEIN).//0.014:71:35//NICOTIANA TABACUM (COMMON TOBACCO).//P13983

[4458] F-NT2RP4001315//VACUOLAR PROTEIN SORTING-ASSOCIATED PROTEIN VPS9.//2.3e-12:190:27//SACCHAROMYCES CEREVISIAE (BAKER'S YEAST).//P54787

[4459] F-NT2RP4001336//VEGETATIBLE INCOMPATIBILITY PROTEIN HET-E-1.//0.0037:108:31//PODOSPORA ANSERINA.//Q00808

[4460] F-NT2RP4001339//HYPOTHETICAL PROTEIN MJ0810.//1.2e-09:150:34//METHANOCOCCUS JANNASCHII.//Q58220

[4461] F-NT2RP4001343//HYPOTHETICAL 85.2 KD PROTEIN F52C9.3 IN CHROMOSOME III.//1.4e-18:244:27//CAENORHABDITIS ELEGANS.//Q10123

[4462] F-NT2RP4001345//PHOSPHATIDYLCHOLINE-STEROL ACYLTRANSFERASE PRECURSOR (EC 2.3.1.43) (LECITHIN-CHOLESTEROL ACYLTRANSFERASE) (PHOSPHOLIPID-CHOLESTEROL ACYLTRANSFERASE) (FRAGMENT).//4.0e-49:212:50//GALLUS GALLUS (CHICKEN).//P53760

[4463] F-NT2RP4001351//INTRACELLULAR PROTEIN TRANSPORT PROTEIN USO1.//5.7e-11:229:26//SACCHAROMYCES CEREVISIAE (BAKER'S YEAST).//P25386

[4464] F-NT2RP4001353//RAS SUPPRESSOR PROTEIN 1 (RSU-1) (RSP-1 PROTEIN) (RSP-1).//0.00088:84:28//HOMO SAPIENS (HUMAN).//Q15404

[4465] F-NT2RP4001372//IRREGULAR CHIASM C-ROUGHEST PROTEIN PRECURSOR (IRREC PROTEIN).//1.0e-22:222:30//DROSOPHILA MELANOGASTER (FRUIT FLY).//Q08180

[4466] F-NT2RP4001373//OV-17 ANTIGEN PRECURSOR (IMMUNODOMINANT HYPODERMAL ANTIGEN).//0.51:92:26//ONCHOCERCA VOLVULUS.//P36991

[4467] F-NT2RP4001375//NON-RECEPTOR TYROSINE KINASE SPORE LYSIS A (EC 2.7.1.112) (TYROSINE- PROTEIN KINASE 1).//3.5e-13:146:35//DICTYOSTELIUM DISCOIDEUM (SLIME MOLD).//P18160

[4468] F-NT2RP4001379//HYPOTHETICAL 64.2 KD PROTEIN IN SLT2-PUT2 INTERGENIC REGION.//1.2e-14:207:28//SACCHAROMYCES CEREVISIAE (BAKER'S YEAST).//P38767

[4469] F-NT2RP4001389//DNA-DIRECTED RNA POLYMERASE II LARGEST SUBUNIT (EC 2.7.7.6) (RPB1) (FRAGMENT).//0.073:112:33//CRICETULUS GRISEUS (CHINESE HAMSTER).//P11414

[4470] F-NT2RP4001407//CENTROMERIC PROTEIN E (CENP-E PROTEIN).//0.0019:233:24//HOMO SAPIENS (HUMAN).//Q02224

[4471] F-NT2RP4001414//SEPTIN 2 HOMOLOG (FRAGMENT).//6.2e-89:195:81//HOMO SAPIENS (HUMAN).//Q14141

[4472] F-NT2RP4001433//ZINC FINGER PROTEIN 43 (ZINC PROTEIN HTF6).//1.5e-85:216:56//HOMO SAPIENS (HUMAN).//P28160

[4473] F-NT2RP4001442//DNA-DIRECTED RNA POLYMERASE II LARGEST SUBUNIT (EC 2.7.7.6) (VERSION 1).//0.012:107:35//ARABIDOPSIS THALIANA (MOUSE-EAR CRESS).//P18616

[4474] F-NT2RP4001447//60S ACIDIC RIBOSOMAL PROTEIN P2 (EL12).//0.0046:69:33//ARTEMIA SALINA (BRINE SHRIMP).//P02399

[4475] F-NT2RP4001474//CBP3 PROTEIN PRECURSOR.//0.0011:111:29//SACCHAROMYCES CEREVISIAE (BAKER'S YEAST).//P21560

[4476] F-NT2RP4001483//2-OXOGLUTARATE DEHYDROGENASE E1 COMPONENT PRECURSOR (EC 1.2.4.2) (ALPHA-KETOGLUTARATE DEHYDROGENASE).//6.2e-60:146:61//HOMO SAPIENS (HUMAN).//Q02218

[4477] F-NT2RP4001498//HYPOTHETICAL 72.5 KD PROTEIN C2F7.10 IN CHROMOSOME I.//2.3e-24:137:37//SCHIZOSACCHAROMYCES POMBE (FISSION YEAST).//Q09701

[4478] F-NT2RP4001502//HYPOTHETICAL 24.7 KD PROTEIN IN POM152-REC114 INTERGENIC REGION.//6.0e-22:148:34//SACCHAROMYCES CEREVISIAE (BAKER'S YEAST).//P40206

[4479] F-NT2RP4001507//CUTICLE COLLAGEN 40.//0.00029:166:31//CAENORHABDITIS ELEGANS.//P34804

[4480] F-NT2RP4001524//LACTOCOCCIN A IMMUNITY PROTEIN.//0.74:96:30//LACTOCOCCUS LACTIS (SUBSP. LACTIS) (STREPTOCOCCUS LACTIS), AND LACTOCOCCUS LACTIS (SUBSP. CREMORIS) (STREPTOCOCCUS CREMORIS).//Q00561

[4481] F-NT2RP4001529//PROTEIN GRAINY-HEAD (DNA-BINDING PROTEIN ELF-1) (ELEMENT I-BINDING ACTIVITY) (TRANSCRIPTION FACTOR NTF-1).//2.8e-06:79:41//DROSOPHILA MELANOGASTER (FRUIT FLY).//P13002

[4482] F-NT2RP4001547//HYPOTHETICAL 45.0 KD PROTEIN IN NOT1/CDC39-HMR INTERGENIC REGION.//5.4e-34:88:46//SACCHAROMYCES CEREVISIAE (BAKER'S YEAST).//P25656

[4483] F-NT2RP4001551//CELL DIVISION CONTROL PROTEIN 68.//1.5e-18:243:30//SACCHAROMYCES CEREVISIAE (BAKER'S YEAST).//P32558

[4484] F-NT2RP4001555//PUTATIVE ENDONUCLEASE VIII (EC 3.2.-.-).//0.00030:158:24//MYCOBACTERIUM TUBERCULOSIS.//P96902

[4485] F-NT2RP4001567//IMPORTIN ALPHA-1 SUBUNIT (KARYOPHERIN ALPHA-1 SUBUNIT).//0.00013:147:29//XENOPUS LAEVIS (AFRICAN CLAWED FROG).//P52170

[4486] F-NT2RP4001568//HYPOTHETICAL PROTEIN KIAA0041 (FRAGMENT).//8.0e-22:119:42//HOMO SAPIENS (HUMAN).//Q15057

[4487] F-NT2RP4001571//NEUROMODULIN (AXONAL MEMBRANE PROTEIN GAP-43) (PP46) (B-50) (PROTEIN F1) (CALMODULIN-BINDING PROTEIN P-57).//0.012:167:28//BOS TAURUS (BOVINE).//P06836

[4488] F-NT2RP4001574//COATOMER GAMMA SUBUNIT (GAMMA-COAT PROTEIN) (GAMMA-COP).//6.8e-1115:208:98//BOS TAURUS (BOVINE).//P53620

[4489] F-NT2RP4001575//M-RELATED PROTEIN PRECURSOR.//0.22:184:25//STREPTOCOCCUS PYOGENES.//P16946

[4490] F-NT2RP4001592//ISOLEUCYL-TRNA SYNTHETASE (EC 6.1.1.5) (ISOLEUCINE-TRNA LIGASE) (ILERS).//7.4e-45:229:39//SYNECHOCYSTIS SP. (STRAIN PCC 6803).//P73505

[4491] F-NT2RP4001610//APOLIPOPROTEIN C-Ill PRECURSOR (APO-CIII).//0.41:74:28//SUS SCROFA (PIG).//P27917

[4492] F-NT2RP4001614//BASIC PROLINE-RICH PEPTIDE P-E (IB-9).//1.0:29:37//HOMO SAPIENS (HUMAN).//P02811

[4493] F-NT2RP4001634//MYOSIN HEAVY CHAIN, PERINATAL SKELETAL MUSCLE (FRAGMENT).//0.16:233:23//RATTUS NORVEGICUS (RAT).//P04462

[4494] F-NT2RP4001638//DNA REPAIR/TRANSCRIPTION PROTEIN MET18/MMS19.//4.2e-21:249:30//SACCHAROMYCES CEREVISIAE (BAKER'S YEAST).//P40469

[4495] F-NT2RP4001644//MYOSIN LIGHT CHAIN KINASE (EC 2.7.1.117) (MLCK).//4.5e-18:111:44//DICTYOSTELIUM DISCOIDEUM (SLIME MOLD).//P25323

[4496] F-NT2RP4001656//HYPOTHETICAL 108.5 KD PROTEIN R06F6.2 IN CHROMOSOME II.//3.4e-13:175:32//CAENORHABDITIS ELEGANS.//Q09600

[4497] F-NT2RP4001677//HYPOTHETICAL 73.6 KD PROTEIN CY49.21./0.065:66:43//MYCOBACTERIUM TUBERCULOSIS.//Q10690

[4498] F-NT2RP4001679/1!!!! ALU SUBFAMILY SQ WARNING ENTRY !!!!//1.3e-36:103:72//HOMO SAPIENS (HUMAN).//P39194

[4499] F-NT2RP4001696//PHOTOSYSTEM II REACTION CENTRE J PROTEIN.//0.93:37:37//CHLORELLA VULGARIS.//P56338

[4500] F-NT2RP4001725//GUANINE NUCLEOTIDE-BINDING PROTEIN BETA SUBUNIT.//4.3e-11:128:32//SCHIZOSACCHAROMYCES POMBE (FISSION YEAST).//Q10282

[4501] F-NT2RP4001730//UDP-GLUCOSE: GLYCOPROTEIN GLUCOSYLTRANSFERASE PRECURSOR (EC 2.4.1.-) (DUGT).//4.1e-22:201:27//DROSOPHILA MELANOGASTER (FRUIT FLY).//Q09332

[4502] F-NT2RP4001739//HOMEOBOX PROTEIN HOX-AL10 (HOX-1H) (HOX-1.8) (PL).//1.0:67:34//HOMO SAPIENS (HUMAN).//P31260

[4503] F-NT2RP4001753//ZINC FINGER PROTEIN 10 (ZINC FINGER PROTEIN KOX1) (FRAGMENT).//1.2e-19:72:62//HOMO SAPIENS (HUMAN).//P21506

[4504] F-NT2RP4001760//BREAKPOINT CLUSTER REGION PROTEIN.//1.8e-13:179:28//HOMO SAPIENS (HUMAN).//P11274

[4505] F-NT2RP4001790//ZINC FINGER PROTEIN 38 (ZFP-38) (CTFIN51) (TRANSCRIPTION FACTOR RU49).//7.9e-38:147:49//MUS MUSCULUS (MOUSE).//Q07231

[4506] F-NT2RP4001803//CUTICLE COLLAGEN 12 PRECURSOR.//0.40:48:39//CAENORHABDITIS ELEGANS.//P20630

[4507] F-NT2RP4001822//NOVEL ANTIGEN 2 (NAG-2).//2.7e-27:173:36//HOMO SAPIENS (HUMAN).//O14817

[4508] F-NT2RP4001823//PUTATIVE CUTICLE COLLAGEN F09G8.6.//3.3e-16:152:42//CAENORHABDITIS ELEGANS.//P34391

[4509] F-NT2RP4001828//HOLIN.//0.99:33:36//BACTERIOPHAGE HP1.//P51727

[4510] F-NT2RP4001838//METASTASIS-ASSOCIATED PROTEIN MTA1.//1.2e-07:95:31//HOMO SAPIENS (HUMAN).//Q13330

[4511] F-NT2RP4001841//INTESTINAL MUCIN-LIKE PROTEIN (MLP) (FRAGMENT).//0.94:141:22//RATTUS NORVEGICUS (RAT).//P98089

[4512] F-NT2RP4001849//SH3-BINDING PROTEIN 3BP-1.//5.6e-52:276:45//MUS MUSCULUS (MOUSE).//P55194

[4513] F-NT2RP4001861//HYPOTHETICAL 10.6 KD PROTEIN IN GALE-PEPT INTERGENIC REGION.//0.92:39:51//BACILLUS SUBTILIS.//P55185

[4514] F-NT2RP4001889//HYPOTHETICAL BHLF1 PROTEIN.//0.32:97:31//EPSTEIN-BARR VIRUS (STRAIN B95-8) (HUMAN HERPESVIRUS 4).//P03181

[4515] F-NT2RP4001893//2-5A-DEPENDENT RIBONUCLEASE (EC 3.1.26.-) (2-SA-DEPENDENT RNAASE) (RNASE L) (RIBONUCLEASE 4) (FRAGMENT).//3.6e-07:124:29//MUS MUSCULUS (MOUSE).//Q05921

[4516] F-NT2RP4001896//HYPOTHETICAL 89.4 KD TRP-ASP REPEATS CONTAINING PROTEIN IN PMT6-PCT1 INTERGENIC REGION.//3.9e-10:210:28//SACCHAROMYCES CEREVISIAE (BAKER'S YEAST).//P42935

[4517] F-NT2RP4001901//ACROSIN PRECURSOR (EC 3.4.21.10).//2.4e-07:53:45//ORYCTOLAGUS CUNICULUS (RABBIT).//P48038

[4518] F-NT2RP4001927//MICROTUBULE-ASSOCIATED PROTEIN YTM1.//3.1e-19:170:32//SACCHAROMYCES CEREVISIAE (BAKER'S YEAST).//Q12024

[4519] F-NT2RP4001938//ZINC FINGER PROTEIN MOK-2.//1.3e-28:72:50//MUS MUSCULUS (MOUSE).//P24399

[4520] F-NT2RP4001946//PROTEIN-L-ISOASPARTATE O-METHYLTRANSFERASE (EC 2.1.1.77) (PROTEIN- BETA-ASPARTATE METHYLTRANSFERASE) (PIMT) (PROTEIN L-ISOASPARTYL METHYLTRANSFERASE) (L-ISOASPARTYL PROTEIN CARBOXYL METHYLTRANSFERASE).//4.8e-14:183:30//TRITICUM AESTIVUM (WHEAT).//Q43209

[4521] F-NT2RP4001950//HYPOTHETICAL PROTEIN ORF-1137.//3.7e-07:115:29//MUS MUSCULUS (MOUSE).//P1260

[4522] F-NT2RP4001953

[4523] F-NT2RP4001966//WALL-ASSOCIATED PROTEIN PRECURSOR.//0.13:151:27//BACILLUS SUBTILIS.//Q07833

[4524] F-NT2RP4001975//FIBRIL-FORMING COLLAGEN ALPHA CHAIN.//0.00031:190:31//RIFTIA PACHYPTILA (TUBE WORM).//P30754

[4525] F-NT2RP4002018//RING CANAL PROTEIN (KELCH PROTEIN).//3.5e-18:185:29//DROSOPHILA MELANOGASTER (FRUIT FLY).//Q04652

[4526] F-NT2RP4002047//GTP-BINDING PROTEIN GUF1 (GTPASE GUF1).//4.0e-49:158:65//SACCHAROMYCES CEREVISIAE (BAKER'S YEAST).//P46943

[4527] F-NT2RP4002052//HYPOTHETICAL 54.3 KD PROTEIN C23D3.03C IN CHROMOSOME I.//0.0047:148:27//SCHIZOSACCHAROMYCES POMBE (FISSION YEAST).//Q09844

[4528] F-NT2RP4002058//PUTATIVE PRE-MRNA SPLICING FACTOR ATP-DEPENDENT RNA HELICASE F56D2.6.//0.057:66:30//CAENORHABDITIS ELEGANS.//Q20875

[4529] F-NT2RP4002071//VERY HYPOTHETICAL 13.2 KD PROTEIN CY251.09.//0.94:45:46//MYCOBACTERIUM TUBERCULOSIS.//Q10888

[4530] F-NT2RP4002075//TAT PROTEIN (TRANSACTIVATING REGULATORY PROTEIN).//0.44:36:38//HUMAN IMMUNODEFICIENCY VIRUS TYPE 1 (NDK ISOLATE) (HIV-1).//P18804

[4531] F-NT2RP4002078//ZINC FINGER PROTEIN 91 (ZINC FINGER PROTEIN HTF10) (HPF7).//2.6e-19:46:76//HOMO SAPIENS (HUMAN).//Q05481

[4532] F-NT2RP4002081//MHC CLASS II REGULATORY FACTOR RFX1 (RFX) (ENHANCER FACTOR C) (EF-C).//2.8e-05:196:31//HOMO SAPIENS (HUMAN).//P22670

[4533] F-NT2RP4002083//HYPOTHETICAL PROLINE-RICH PROTEIN (FRAGMENT).//0.0064:29:55//OWENIA FUSIFORMIS.//P21260

[4534] F-NT2RP4002408//PROTEIN KINASE CEK1 (EC 2.7.1.-).//1.1e-37:159:53//SCHIZOSACCHAROMYCES POMBE (FISSION YEAST).//P38938

[4535] F-NT2RP4002791//30S RIBOSOMAL PROTEIN S20.//1.0:73:26//HELICOBACTER PYLORI (CAMPYLOBACTER PYLORI).//P56027

[4536] F-NT2RP4002888//HYPOTHETICAL PROTEIN TP0352.//0.98:52:26//TREPONEMA PALLIDUM.//O83371

[4537] F-NT2RP4002905//G2/MITOTIC-SPECIFIC CYCLIN S13-7 (B-LIKE CYCLIN) (FRAGMENT).//5.9e-05:138:27//GLYCINE MAX (SOYBEAN).//P25012

[4538] F-NT2RP5003459//HOMEOBOX PROTEIN HOX-A3 (HOX-1.5) (MO-10).//0.027:40:40//MUS MUSCULUS (MOUSE).//P02831

[4539] F-NT2RP5003461//HYPOTHETICAL PROTEIN C22F3.14C IN CHROMOSOME I (FRAGMENT).//1.1e-12:142:35//SCHIZOSACCHAROMYCES POMBE (FISSION YEAST).//Q09779

[4540] F-NT2RP5003477//VEGETATIBLE INCOMPATIBILITY PROTEIN HET-E-1.//5.3e-13:215:28//PODOSPORA ANSERINA.//Q00808

[4541] F-NT2RP5003492//GLUCOAMYLASE S1/S2 PRECURSOR (EC 3.2.1.3) (GLUCAN 1,4-ALPHA- GLUCOSIDASE) (1,4-ALPHA-D-GLUCAN GLUCOHYDROLASE).//0.0055:144:27//SACCHAROMYCES CEREVISIAE (BAKER'S YEAST).//P08640

[4542] F-NT2RP5003500//PROLINE-RICH PROTEIN MP-2 PRECURSOR.//9.0e-05:103:38//MUS MUSCULUS (MOUSE).//P05142

[4543] F-NT2RP5003506//MALE SPECIFIC SPERM PROTEIN MST87F.//0.53:21:38//DROSOPHILA MELANOGASTER (FRUIT FLY).//P08175

[4544] F-NT2RP5003512//HYPOTHETICAL PROTEIN IN CYCB3′REGION PRECURSOR (ORF2) (FRAGMENT).//0.92:49:32//PARACOCCUS DENITRIFICANS.//P29969

[4545] F-NT2RP5003522//NADPH-CYTOCHROME P450 REDUCTASE (EC 1.6.2.4) (CPR).//2.7e-18:165:39//PHASEOLUS AUREUS (MUNG BEAN) (VIGNA RADIATA).//P37116

[4546] F-NT2RP5003524//COLLAGEN ALPHA 1(I) CHAIN (FRAGMENTS).//6.0e-08:125:41//RATTUS NORVEGICUS (RAT).//P02454

[4547] F-NT2RP5003534//ATP SYNTHASE, SUBUNIT F (EC 3.6.1.34).//10.88:37:45//HALOBACTERIUM VOLCANII (HALOFERAX VOLCANII).//Q48331

[4548] F-OVARC1000001//GAR22 PROTEIN.//1.9e-05:41:58//HOMO SAPIENS (HUMAN).//Q99501

[4549] F-OVARC1000004//70 KD EXOCYST COMPLEX PROTEIN.//3.7e-08:186:25//SACCHAROMYCES CEREVISIAE (BAKER'S YEAST).//P19658

[4550] F-OVARC1000006//HISTONE H2A.1.//4.7e-55:117:98//RATTUS NORVEGICUS (RAT).//P02262

[4551] F-OVARC1000013//WD-REPEAT PROTEIN POP 1.//0.00022:126:28//SCHIZOSACCHAROMYCES POMBE (FISSION YEAST).//P87060

[4552] F-OVARC1000014//PROCOLLAGEN ALPHA 1(I) CHAIN PRECURSOR.//2.3e-05:220:30//GALLUS GALLUS (CHICKEN).//P02457

[4553] F-OVARC1000017//CUTICLE COLLAGEN DPY-13.//2.6e-05:97:30//CAENORHABDITIS ELEGANS.//P17657

[4554] F-OVARC1000035

[4555] F-OVARC1000058//RAS-RELATED PROTEIN RABC.//0.00015:110:24//DICTYOSTELIUM DISCOIDEUM (SLIME MOLD).//P34143

[4556] F-OVARC1000060//EXTRACELLULAR RIBONUCLEASE LE PRECURSOR (EC 3.1.27.1) (RNASE LE).//6.8e-09:60:45//LYCOPERSICON ESCULENTUM (TOMATO).//P80022

[4557] F-OVARC1000068//CYTOTOXIN 4 (CARDIOTOXIN V-II-4).//1.0:27:44//NAJA MOSSAMBICA (MOZAMBIQUE COBRA).//P01452

[4558] F-OVARC1000071//NUCLEAR TRANSPORT FACTOR 2 (NTF-2) (PLACENTAL PROTEIN 15) (PP15).//5.2e-06:115:29//HOMO SAPIENS (HUMAN), AND RATTUS NORVEGICUS (RAT).//P13662

[4559] F-OVARC1000085

[4560] F-OVARC1000087//HISTONE MACR0-H2A.1.//1.2e-13:174:26//RATTUS NORVEGICUS (RAT).//Q02874

[4561] F-OVARC1000091//OCTAPEPTIDE-REPEAT PROTEIN T2.//0.0013:137:32//MUS MUSCULUS (MOUSE).//Q06666

[4562] F-OVARC1000092//MITOCHONDRIAL RIBOSOMAL PROTEIN S7.//0.97:46:39//ACANTHAMOEBA CASTELLANII (AMOEBA).//P46756

[4563] F-OVARC1000106//HYPOTHETICAL 141.5 KD PROTEIN IN YPT53-RHO2 INTERGENIC REGION.//0.0012:165:29//SACCHAROMYCES CEREVISIAE (BAKER'S YEAST).//P53935

[4564] F-OVARC1000109//PROLINE RICH 33 KD EXTENSIN-RELATED PROTEIN PRECURSOR (FRAGMENT).//0.18:35:34//DAUCUS CAROTA (CARROT).//P06600

[4565] F-OVARC1000113//HYPOTHETICAL PROTEIN C18.//1.0:26:26//SWINEPOX VIRUS (STRAIN KASZA) (SPV).//P32217

[4566] F-OVARC1000114//!!!! ALU SUBFAMILY SQ WARNING ENTRY !!!!//3.6e-28:57:63//HOMO SAPIENS (HUMAN).//P39194

[4567] F-OVARC1000133

[4568] F-OVARC1000139//UBIQUITIN CARBOXYL-TERMINAL HYDROLASE 4 (EC 3.1.2.15) (UBIQUITIN THIOLESTERASE 4) (UBIQUITIN-SPECIFIC PROCESSING PROTEASE 4) (DEUBIQUITINATING ENZYME 4) (UBIQUITOUS NUCLEAR PROTEIN HOMOLOG).//1.9e-09:200:29//HOMO SAPIENS (HUMAN).//Q13107

[4569] F-OVARC1000145//HOMEOBOX PROTEIN DLX-3.//1.0:65:30//BRACHYDANIO RERIO (ZEBRAFISH) (ZEBRA DANIO).//Q01702

[4570] F-OVARC1000148//HYPHAL WALL PROTEIN 1 (CELL ELONGATION PROTEIN 2).//0.12:175:29//CANDIDA ALBICANS (YEAST).//P46593

[4571] F-OVARC1000151//HYPOTHETICAL PROTEIN KIAA0161.//15.6e-20:197:30//HOMO SAPIENS (HUMAN).//P50876

[4572] F-OVARC1000168//!!!! ALU SUBFAMILY J WARNING ENTRY !!!!//0.0030:77:38//HOMO SAPIENS (HUMAN).//P39188

[4573] F-OVARC1000191//COLANIC ACID BIOSYNTHESIS PROTEIN WCAH.//0.95:56:35//ESCHERICHIA COLI.//P32056

[4574] F-OVARC1000198//HISTONE HI .C2.//0.96:70:25//TRYPANOSOMA CRUZI.//P40268

[4575] F-OVARC1000209//HYPOTHETICAL 20.9 KD PROTEIN IN PLB1-HXT2 INTERGENIC REGION.//2.5e-33:178:44//SACCHAROMYCES CEREVISIAE (BAKER'S YEAST).//Q03677

[4576] F-OVARC1000212//PROLINE-RICH PROTEIN MP-2 PRECURSOR.//1.7e-05:66:46//MUS MUSCULUS (MOUSE).//P05142

[4577] F-OVARC1000240//!!!! ALU SUBFAMILY SP WARNING ENTRY !!!!//1.8e-10:41:78//HOMO SAPIENS (HUMAN).//P39193

[4578] F-OVARC1000241//ENDOTHELIAL PAS DOMAIN PROTEIN 1 (EPAS-1) (HIF-1 ALPHA-LIKE FACTOR) (MHLF) (HIF-RELATED FACTOR) (HRF).//7.4e-54:177:54//MUS MUSCULUS (MOUSE).//P97481

[4579] F-OVARC1000288//HYPOTHETICAL 54.2 KD PROTEIN IN ERP5-ORC6 INTERGENIC REGION.//2.9e-20:115:45//SACCHAROMYCES CEREVISIAE (BAKER'S YEAST).//P38821

[4580] F-OVARC1000302//CORTICOSTEROID-BINDING GLOBULIN PRECURSOR (CBG) (TRANSCORTIN).//1.0:79:25//MUS MUSCULUS (MOUSE).//Q06770

[4581] F-OVARC1000304//PROTEIN MOV-10.//1.6e-79:181:83//MUS MUSCULUS (MOUSE).//P23249

[4582] F-OVARC1000309//THREONINE SYNTHASE (EC 4.2.99.2).//6.9e-36:156:42//ASHBYA GOSSYPII (EREMOTHECIUM GOSSYPII).//Q00063

[4583] F-OVARC1000321//HYPOTHETICAL 28.1 KD PROTEIN C4F8.03 IN CHROMOSOME I.//5.2e-45:159:53//SCHIZOSACCHAROMYCES POMBE (FISSION YEAST).//O14179

[4584] F-OVARC1000326//BASIC PROLINE-RICH PEPTIDE IB-1.//0.036:67:35//HOMO SAPIENS (HUMAN).//P04281

[4585] F-OVARC1000335//HYPOTHETICAL 39.3 KD PROTEIN IN GCN4-WBP1 INTERGENIC REGION.//1.2e-16:200:27//SACCHAROMYCES CEREVISIAE (BAKER'S YEAST).//P40004

[4586] F-OVARC1000347//HYPOTHETICAL 7.6 KD PROTEIN YCF33.//0.69:41:43//CYANOPHORA PARADOXA.//P48273

[4587] F-OVARC1000384//ANTIFREEZE PEPTIDE 4 PRECURSOR.//0.98:49:34//PSEUDOPLEURONECTA AMERICANUS (WINTER FLOUNDER).//P02734

[4588] F-OVARC1000408//INTEGUMENTARY MUCIN C.1 (FIM-C.1) (FRAGMENT).//8.1e-05:115:33//XENOPUS LAEVIS (AFRICAN CLAWED FROG).//Q05049

[4589] F-OVARC1000411//DYNACTIN, 150 KD ISOFORM (150 KD DYNEIN-ASSOCIATED POLYPEPTIDE) (DP-150) (DAP-150) (P 150-GLUED).//0.00076:100:29//RATTUS NORVEGICUS (RAT).//P28023

[4590] F-OVARC1000414//HYPOTHETICAL 7.0 KD PROTEIN IN BLTR-SPOIIIC INTERGENIC REGION.//1.0:46:34//BACILLUS SUBTILIS.//P54431

[4591] F-OVARC1000420//COLLAGEN ALPHA 2(VIII) CHAIN (ENDOTHELIAL COLLAGEN) (FRAGMENT).//0.0028:97:37//HOMO SAPIENS (HUMAN).//P25067

[4592] F-OVARC1000427//HYPOTHETICAL 13.9 KD PROTEIN IN PRFA-SPOIIR INTERGENIC REGION.//0.70:21:47//BACILLUS SUBTILIS.//P39150

[4593] F-OVARC1000431

[4594] F-OVARC1000437//TENSIN.//9.2e-42:195:52//GALLUS GALLUS (CHICKEN).//Q04205

[4595] F-OVARC1000440//PINCH PROTEIN (PARTICULARY INTERESTING NEW CYS-HIS PROTEIN).//3.4e-31:37:97//HOMO SAPIENS (HUMAN).//P48059

[4596] F-OVARC1000442

[4597] F-OVARC1000443//CUTICLE COLLAGEN 2C (FRAGMENT).//0.0056:163:34//HAEMONCHUS CONTORTUS.//P16252

[4598] F-OVARC1000461//FIXU PROTEIN.//0.36:36:44//RHIZOBIUM LEGUMINOSARUM (BIOVAR TRIFOLII).//P42710

[4599] F-OVARC1000465//PROTEIN TRANSPORT PROTEIN SEC7.//2.4e-14:222:26//SACCHAROMYCES CEREVISIAE (BAKER'S YEAST).//P11075

[4600] F-OVARC1000466//!!!! ALU SUBFAMILY SC WARNING ENTRY !!!!//2.3e-08:29:93//HOMO SAPIENS (HUMAN).//P39192

[4601] F-OVARC1000473//DUAL SPECIFICITY PROTEIN PHOSPHATASE 7 (EC 3.1.3.48) (EC 3.1.3.16) (DUAL SPECIFICITY PROTEIN PHOSPHATASE MKP-X) (FRAGMENT).//2.8e-06:96:36//RATTUS NORVEGICUS (RAT).//Q63340

[4602] F-OVARC1000479//PHOTOSYSTEM I REACTION CENTRE SUBUNIT X (PSI-K).//0.99:48:37//CYANIDIUM CALDARIUM (GALDIERIA SULPHURARIA).//P31567

[4603] F-OVARC1000486

[4604] F-OVARC1000496//HYPOTHETICAL PROTEIN MJ1213.//1.0:62:32//METHANOCOCCUS JANNASCHII.//Q58610

[4605] F-OVARC1000520//MEROZOITE SURFACE PROTEIN CMZ-8 (FRAGMENT).//0.0011:66:40//EIMERIA ACERVULINA.//P09125

[4606] F-OVARC1000526//PROTEIN Q300.//1.2e-05:51:43//MUS MUSCULUS (MOUSE).//Q02722

[4607] F-OVARC1000533//NEURONAL PROTEIN 3.1 (P311 PROTEIN).//0.74:43:41//HOMO SAPIENS (HUMAN).//Q16612

[4608] F-OVARC1000543//POLYPEPTIDE N-ACETYLGALACTOSAMINYLTRANSFERASE (EC 2.4.1.41) (PROTEIN- UDP ACETYLGALACTOSAMINYLTRANSFERASE) (UDP-GALNAC:POLYPEPTIDE, N-ACETYLGALACTOSAMINYLTRANSFERASE) (GALNAC-T1).//2.3e-23:192:35//HOMO SAPIENS (HUMAN).//Q10472

[4609] F-OVARC1000556

[4610] F-OVARC1000557//!!!! ALU SUBFAMILY J WARNING ENTRY !!!!//1.6e-08:80:47//HOMO SAPIENS (HUMAN).//P39188

[4611] F-OVARC1000564//VPX PROTEIN (X ORF PROTEIN) (VIRAL ACCESSORY PROTEIN).//0.45:32:50//HUMAN IMMUNODEFICIENCY VIRUS TYPE 2 (ISOLATE D194) (HIV-2).//P17760

[4612] F-OVARC1000573

[4613] F-OVARC1000576//BETA-DEFENSIN 1 (BNDB-1).//0.47:29:41//BOS TAURUS (BOVINE).//P46159

[4614] F-OVARC1000578//COLLAGEN ALPHA 1(II) CHAIN (FRAGMENTS).//0.023:96:36//BOS TAURUS (BOVINE).//P02459

[4615] F-OVARC1000588//MITOCHONDRIAL 60S RIBOSOMAL PROTEIN L3.//0.75:57:29//HOMO SAPIENS (HUMAN).//P09001

[4616] F-OVARC1000605//AUTOLYSIN PRECURSOR (EC 3.4.24.38) (GAMETE LYTIC ENZYME) (GLE).//0.91:134:28//CHLAMYDOMONAS REINHARDTII.//P31178

[4617] F-OVARC1000622//!!!! ALU SUBFAMILY SB WARNING ENTRY !!!!//2.6e-36:100:80//HOMO SAPIENS (HUMAN).//P39189

[4618] F-OVARC1000640//HYPOTHETICAL 8.5 KD PROTEIN YCF40 (ORF73).//0.96:34:38//ODONTELLA SINENSIS.//P49535

[4619] F-OVARC1000649//ANTHER-SPECIFIC PROTEIN SF18 PRECURSOR (FRAGMENT).//0.0036:64:37//HELIANTHUS ANNUUS (COMMON SUNFLOWER).//P22357

[4620] F-OVARC1000661//COLLAGEN ALPHA 2(I) CHAIN (FRAGMENTS).//0.21:53:47//RATTUS NORVEGICUS (RAT).//P02466

[4621] F-OVARC1000678//BACTERIOCIN MICROCIN B17 PRECURSOR (MCB17).//1.0:17:58//ESCHERICHIA COLI.//P05834

[4622] F-OVARC1000679//DNA-DIRECTED RNA POLYMERASE OMEGA CHAIN (EC 2.7.7.6) (TRANSCRIPTASE OMEGA CHAIN) (RNA POLYMERASE OMEGA SUBUNIT).//0.096:67:29//ESCHERICHIA COLI.//P08374

[4623] F-OVARC1000681//PROTEIN Q300.//0.72:16:43//MUS MUSCULUS (MOUSE).//Q02722

[4624] F-OVARC1000682//PROCESSING ALPHA-1,2-MANNOSIDASE (EC 3.2.1.-) (ALPHA-1,2-MANNOSIDASE 1B).//7.6e-70:102:99//MUS MUSCULUS (MOUSE).//P39098

[4625] F-OVARC1000689//CADMIUM-METALLOTHIONEIN (CD-MT).//0.032:30:40//HELIX POMATIA (ROMAN SNAIL) (EDIBLE SNAIL).//P33187

[4626] F-OVARC1000700//BRAIN NEURON CYTOPLASMIC PROTEIN 2.//0.17:60:40//RATTUS NORVEGICUS (RAT).//P02684

[4627] F-OVARC1000703//BASIC PROLINE-RICH PEPTIDE P-E (1B-9).//0.57:42:42//HOMO SAPIENS (HUMAN).//P02811

[4628] F-OVARC1000722//N-ACETYLLACTOSAMINE SYNTHASE (EC 2.4.1.90) (N-ACETYLGLUCOSAMINE (BETA 1-&gt; 4) GALACTOSYLTRANSFERASE) (EC 2.4.1.38) (LACTOSE SYNTHASE A PROTEIN (EC 2.4.1.22)) (GALACTOSYLTRANSFERASE) (GT).//1.1e-20:44:70//BOS TAURUS (BOVINE).//P08037

[4629] F-OVARC1000730//HYPOTHETICAL 83.8 KD PROTEIN C27F2.7 IN CHROMOSOME III.//5.2e-29:224:36//CAENORHABDITIS ELEGANS.//Q18262

[4630] F-OVARC1000746//MATERNAL EFFECT PROTEIN STAUFEN.//6.2e-12:78:48//DROSOPHILA MELANOGASTER (FRUIT FLY).//P25159

[4631] F-OVARC1000769

[4632] F-OVARC1000771//RAS-RELATED PROTEIN RAB-2.//1.1e-46:121:79//HOMO SAPIENS (HUMAN), AND CANIS FAMILIARIS (DOG).//P08886

[4633] F-OVARC1000781//HOMEOBOX PROTEIN GBX-2 (GASTRULATION AND BRAIN-SPECIFIC HOMEOBOX PROTEIN 2).//0.81:36:52//HOMO SAPIENS (HUMAN).//P52951

[4634] F-OVARC11000787//40S RIBOSOMAL PROTEIN S14 (FRAGMENT).//0.96:37:48//SUS SCROFA (PIG).//Q29303

[4635] F-OVARC1000800//!!!! ALU SUBFAMILY SB WARNING ENTRY !!!!//2.5e-31:47:82//HOMO SAPIENS (HUMAN).//P39189

[4636] F-OVARC1000802//HYPOTHETICAL 8.8 KD PROTEIN B0302.2 IN CHROMOSOME X.//0.16:55:40//CAENORHABDITIS ELEGANS.//Q10926

[4637] F-OVARC1000834//SERINE/THREONINE-PROTEIN KINASE PAK-ALPHA (EC 2.7.1.-) (P68-PAK) (P21- ACTIVATED KINASE) (ALPHA-PAK) (PROTEIN KINASE MUK2).//0.87:140:31//RATTUS NORVEGICUS (RAT).//P35465

[4638] F-OVARC1000846//NUCLEOLIN (PROTEIN C23).//7.0e-07:109:30//MESOCRICETUS AURATUS (GOLDEN HAMSTER).//P08199

[4639] F-OVARC1000850//HYPOTHETICAL 56.2 KD PROTEIN IN ERG8-UBP8 INTERGENIC REGION.//6.9e-09:180:28//SACCHAROMYCES CEREVISIAE (BAKER'S YEAST).//Q04991

[4640] F-OVARC1000862//UBIQUITIN-CONJUGATING ENZYME E2-17.5 KD (EC 6.3.2.19) (UBIQUITIN-PROTEIN LIGASE) (UBIQUITIN CARRIER PROTEIN).//0.0020:74:28//SACCHAROMYCES CEREVISIAE (BAKER'S YEAST).//P52490

[4641] F-OVARC1000876//MOB1 PROTEIN (MPS1 BINDER 1).//9.8e-39:154:55//SACCHAROMYCES CEREVISIAE (BAKER'S YEAST).//P40484

[4642] F-OVARC1000883//METALLOTHIONEIN-1.//0.87:38:36//CANDIDA GLABRATA (YEAST) (TORULOPSIS GLABRATA).//P15113

[4643] F-OVARC1000885//OXIDOREDUCTASE UCPA (EC 1.-.-.-).//2.8e-18:170:34//ESCHERICHIA COLI.//P37440

[4644] F-OVARC1000886//COLLAGEN ALPHA 2(I) CHAIN (FRAGMENT).//0.00033:60:45//BOS TAURUS (BOVINE).//P02465

[4645] F-OVARC1000890//PROBABLE E5 PROTEIN.//0.92:7:71//HUMAN PAPILLOMAVIRUS TYPE 70.//P50774

[4646] F-OVARC1000891//HYPOTHETICAL 8.3 KD PROTEIN (ORF5).//1.0:36:36//PARAMECIUM TETRAURELIA.//P15606

[4647] F-OVARC1000897//HYPOTHETICAL 6.1 KD PROTEIN PRECURSOR (ORF87).//1.0:34:44//ORGYIA PSEUDOTSUGATA MULTICAPSID POLYHEDROSIS VIRUS (OPMNPV).//O10337

[4648] F-OVARC1000912//PUTATIVE CUTICLE COLLAGEN C09G5.4.//4.0e-07:98:35//CAENORHABDITIS ELEGANS.//Q09455

[4649] F-OVARC1000915//HYPOTHETICAL PROTEIN KIAA0288 (HA6116).//1.7e-47:115:76//HOMO SAPIENS (HUMAN).//P56524

[4650] F-OVARC1000924//CYTOCHROME B (EC 1.10.2.2) (FRAGMENT).//0.99:54:24//BOA CONSTRICTOR (BOA).//P92848

[4651] F-OVARC1000936//HYPOTHETICAL 7.5 KD PROTEIN IN INAA-GLPQ INTERGENIC REGION.//1.0:48:33//ESCHERICHIA COLI.//P45505

[4652] F-OVARC1000937//PROCOLLAGEN ALPHA 1(I) CHAIN PRECURSOR.//1.0:135:31//HOMO SAPIENS (HUMAN).//P02452

[4653] F-OVARC1000945//EARLY E1A11 KD PROTEIN.//0.087:81:24//MOUSE ADENOVIRUS TYPE 1 (MAV-1).//P12533

[4654] F-OVARC1000948

[4655] F-OVARC1000959//HYPOTHETICAL PROTEIN MJ0933.1/0.99:67:28//METHANOCOCCUS JANNASCHII.//Q58343

[4656] F-OVARC1000960//!!!! ALU SUBFAMILY SP WARNING ENTRY !!!!//1.8e-32:56:75//HOMO SAPIENS (HUMAN).//P39193

[4657] F-OVARC1000964//MAMBIN (GLYCOPROTEIN IIB-IIA ANTAGONIST) (PLATELET AGGREGATION INHIBITOR) (DENDROASPIN).//1.0:30:36//DENDROASPIS JAMESONI KAIMOSAE (EASTERN JAMESON'S MAMBA).//P28375

[4658] F-OVARC1000971

[4659] F-OVARC1000984//HYPOTHETICAL 52.3 KD PROTEIN IN MRPL10-ERG24 INTERGENIC REGION PRECURSOR.//0.093:36:47//SACCHAROMYCES CEREVISIAE (BAKER'S YEAST).//P53832

[4660] F-OVARC1000996//MO25 PROTEIN.//1.9e-39:80:95//MUS MUSCULUS (MOUSE).//Q06138

[4661] F-OVARC1000999//BRAIN-SPECIFIC HOMEOBOX/POU DOMAIN PROTEIN 1 (BRN-1 PROTEIN).//0.00020:50:40//HOMO SAPIENS (HUMAN).//P20264

[4662] F-OVARC1001000//!!!! ALU SUBFAMILY SX WARNING ENTRY !!!!//1.4e-16:43:90//HOMO SAPIENS (HUMAN).//P39195

[4663] F-OVARC1001004//MALE SPECIFIC SPERM PROTEIN MST84DA.//0.95:33:42//DROSOPHILA MELANOGASTER (FRUIT FLY).//Q01642

[4664] F-OVARC1001010//HYPOTHETICAL PROTEIN MJ0926.//0.50:71:23//METHANOCOCCUS JANNASCHII.//Q58336

[4665] F-OVARC1001011/CORTISTATIN PRECURSOR.//0.81:45:37//RATTUS NORVEGICUS (RAT).//Q62949

[4666] F-OVARC1001032//FERREDOXIN LIKE PROTEIN.//1.0:26:46//RHIZOBIUM LEGUMINOSARUM (BIOVAR PHASEOLI).//Q05561

[4667] F-OVARC1001034//METALLOTHIONEIN-IG (MT-1G).//0.14:9:77//HOMO SAPIENS (HUMAN).//P13640

[4668] F-OVARC1001038//NUCLEOLIN (PROTEIN C23).//3.2e-07:36:80//HOMO SAPIENS (HUMAN).//P19338

[4669] F-OVARC1001040//!!!! ALU SUBFAMILY SQ WARNING ENTRY !!!!//1.5e-18:45:60//HOMO SAPIENS (HUMAN).//P39194

[4670] F-OVARC1001044//BIS(5′-NUCLEOSYL)-TETRAPHOSPHATASE (SYMMETRICAL) (EC 3.6.1.41) (DIADENOSINE TETRAPHOSPHATASE).//0.88:43:39//ESCHERICHIA COLI.//P05637

[4671] F-OVARC1001051//SERINE PROTEINASE STUBBLE (EC 3.4.21.-) (STUBBLE-STUBBLOID PROTEIN).//0.34:117:25//DROSOPHILA MELANOGASTER (FRUIT FLY).//Q05319

[4672] F-OVARC1001055//PRE-B CELL ENHANCING FACTOR PRECURSOR.//1.6e-33:43:97//HOMO SAPIENS (HUMAN).//P43490

[4673] F-OVARC1001062

[4674] F-OVARC1001065//METHIONYL-TRNA SYNTHETASE (EC 6.1.1.10) (METHIONINE-TRNA LIGASE) (METRS).//0.79:76:39//BORRELIA BURGDORFERI (LYME DISEASE SPIROCHETE).//Q44951

[4675] F-OVARC1001068//GTP-BINDING PROTEIN ERA HOMOLOG (FRAGMENT).//5.3e-15:100:44//BRADYRHIZOBIUM JAPONICUM.//O69162

[4676] F-OVARC1001072//!!!! ALU SUBFAMILY J WARNING ENTRY !!!!//0.0076:41:56//HOMO SAPIENS (HUMAN).//P39188

[4677] F-OVARC1001074//60S RIBOSOMAL PROTEIN L38.//1.0:32:40//LYCOPERSICON ESCULENTUM (TOMATO).//P46291

[4678] F-OVARC1001085//HYPOTHETICAL 126.5 KD PROTEIN C13F4.06 IN CHROMOSOME I.//0.73:135:25//SCHIZOSACCHAROMYCES POMBE (FISSION YEAST).//Q10197

[4679] F-OVARC1001092//HYPOTHETICAL 51.2 KD PROTEIN IN PET54-DIE2 INTERGENIC REGION.//5.6e-05:30:56//SACCHAROMYCES CEREVISIAE (BAKER'S YEAST).//P50079

[4680] F-OVARC1001107//SHK1 KINASE-BINDING PROTEIN 1.//1.8e-08:52:51//SCHIZOSACCHAROMYCES POMBE (FISSION YEAST).//P78963

[4681] F-OVARC1001113//DIAPHANOUS PROTEIN.//1.9e-33:218:35//DROSOPHILA MELANOGASTER (FRUIT FLY).//P48608

[4682] F-OVARC101117//GENE 7 PROTEIN.//0.68:12:50//SPIROPLASMA VIRUS 4 (SPV4).//P11339

[4683] F-OVARC1001118

[4684] F-OVARC1001129/3 OS RIBOSOMAL PROTEIN S17.//0.15:57:22//AQUIFEX AEOLICUS.//O66439

[4685] F-OVARC1001154//GRANULINS PRECURSOR (ACROGRANIN).//2.3e-95:99:77//MUS MUSCULUS (MOUSE).//P28798

[4686] F-OVARC1001161//GUANINE NUCLEOTIDE-BINDING PROTEIN BETA SUBUNIT.//0.17:87:34//ARABIDOPSIS THALIANA (MOUSE-EAR CRESS).//P49177

[4687] F-OVARC11001162

[4688] F-OVARC1001167//TRBD PROTEIN.//0.92:24:45//ESCHERICHIA COLI.//P41070

[4689] F-OVARC1001169//FRUCTOSE-1,6-BISPHOSPHATASE (EC 3.1.3.11) (D-FRUCTOSE-1,6-BISPHOSPHATE 1-PHOSPHOHYDROLASE) (FBPASE) (FRAGMENT).//0.82:35:40//MUS MUSCULUS (MOUSE).//P97323

[4690] F-OVARC1001170//PROLINE-RICH PEPTIDE P-B.//0.17:27:37//HOMO SAPIENS (HUMAN).//P02814

[4691] F-OVARC1001171//!!!! ALU SUBFAMILY J WARNING ENTRY !!!!//0.00023:28:75//HOMO SAPIENS (HUMAN).//P39188

[4692] F-OVARC1001173

[4693] F-OVARC1001176//HYPOTHETICAL BHLF1 PROTEIN.//2.7e-05:158:31//EPSTEIN-BARR VIRUS (STRAIN B95-8) (HUMAN HERPESVIRUS 4).//P03181

[4694] F-OVARC1001180//UBIQUITIN-LIKE PROTEIN DSK2.//1.4e-12:208:25//SACCHAROMYCES CEREVISIAE (BAKER'S YEAST).//P48510

[4695] F-OVARC1001188//HYPOTHETICAL 27.8 KD PROTEIN IN VMA7-RPS25A INTERGENIC REGION.//3.3e-31:129:51//SACCHAROMYCES CEREVISIAE (BAKER'S YEAST).//P53215

[4696] F-OVARC1001200//HYPOTHETICAL 49.0 KD PROTEIN IN NSP1-KAR2 INTERGENIC REGION.//0.018:148:26//SACCHAROMYCES CEREVISIAE (BAKER'S YEAST).//P47057

[4697] F-OVARC1001232//HYPOTHETICAL PROTEIN MJ1236.//2.5e-27:141:39//METHANOCOCCUS JANNASCHII.//Q58633

[4698] F-OVARC1001240

[4699] F-OVARC1001243

[4700] F-OVARC1001244//RING3 PROTEIN (KIAA9001).//1.7e-13:37:91//HOMO SAPIENS (HUMAN).//P25440

[4701] F-OVARC1001261//OCTAPEPTIDE-REPEAT PROTEIN T2.//1.3e-07:109:35//MUS MUSCULUS (MOUSE).//Q06666

[4702] F-OVARC1001268//HYPOTHETICAL 57.4 KD PROTEIN IN PILT REGION (ORF4).//0.71:43:41//PSEUDOMONAS AERUGINOSA.//P24563

[4703] F-OVARC1001270//HYPOTHETICAL 9.0 KD PROTEIN IN UVSW-UVSY INTERGENIC REGION.//1.0:44:29//BACTERIOPHAGE T4.//P32281

[4704] F-OVARC1001271//HYPOTHETICAL 104.7 KD PROTEIN F23F12.8 IN CHROMOSOME III PRECURSOR.//0.00015:188:23//CAENORHABDITIS ELEGANS.//P46504

[4705] F-OVARC1001282

[4706] F-OVARC1001296//WEB1 PROTEIN (PROTEIN TRANSPORT PROTEIN SEC31).//0.022:101:31//SACCHAROMYCES CEREVISIAE (BAKER'S YEAST).//P38968

[4707] F-OVARC1001306//HYPOTHETICAL 52.9 KD SERINE-RICH PROTEIN C11G7.01 IN CHROMOSOME I.//0.023:134:26//SCHIZOSACCHAROMYCES POMBE (FISSION YEAST).//O13695

[4708] F-OVARC1001329//CHLOROPLAST TRIOSE PHOSPHATE TRANSLOCATOR PRECURSOR (CTPT).//1.3e-14:150:28//ZEA MAYS (MAIZE).//P49133

[4709] F-OVARC1001330

[4710] F-OVARC1001339//RIBONUCLEOPROTEIN RB97D.//0.0013:55:38//DROSOPHILA MELANOGASTER (FRUIT FLY).//Q02926

[4711] F-OVARC1001341//HYPOTHETICAL 74.0 KD PROTEIN IN CAJ1-HOM3 INTERGENIC REGION.//4.9e-17:110:43//SACCHAROMYCES CEREVISIAE (BAKER'S YEAST).//P40032

[4712] F-OVARC1001342

[4713] F-OVARC1001344//PREPROTEIN TRANSLOCASE SECE SUBUNIT.//0.99:39:23//STAPHYLOCOCCUS CARNOSUS.//P36253

[4714] F-OVARC1001357//METALLOTHIONEIN.//0.99:28:42//XENOPUS LAEVIS (AFRICAN CLAWED FROG).//Q05890

[4715] F-OVARC1001360//LARGE PROLINE-RICH PROTEIN BAT2 (HLA-B-ASSOCIATED TRANSCRIPT 2).//0.86:109:31//HOMO SAPIENS (HUMAN).//P48634

[4716] F-OVARC1001369//COLLAGEN ALPHA 2(I) CHAIN (FRAGMENT).//6.7e-05:124:36//BOS TAURUS (BOVINE).//P02465

[4717] F-OVARC1001372//HYPOTHETICAL 34.5 KD PROTEIN IN CLCB-CLCD INTERGENIC REGION PRECURSOR.//0.75:33:48//PSEUDOMONAS PUTIDA, AND PSEUDOMONAS SP. (STRAIN B13).//Q47100

[4718] F-OVARC1001376//!!!! ALU SUBFAMILY J WARNING ENTRY !!!!//2.8e-24:96:61//HOMO SAPIENS (HUMAN).//P39188

[4719] F-OVARC1001381//MEMBRANE-ASSOCIATED ATPASE EPSILON CHAIN (EC 3.6.1.34) (SUL-ATPASE EPSILON).//0.96:46:39//SULFOLOBUS ACIDOCALDARIUS.//P23039

[4720] F-OVARC1001391//SALIVARY PROLINE-RICH PROTEIN PO (ALLELE K) [CONTAINS: PEPTIDE P-D] (FRAGMENT).//0.00024:189:29//HOMO SAPIENS (HUMAN).//P10162

[4721] F-OVARC1001399//!!!! ALU SUBFAMILY SX WARNING ENTRY !!!!!/0.062:18:77//HOMO SAPIENS (HUMAN).//P39195

[4722] F-OVARC1001417//HYPOTHETICAL 157.0 KD PROTEIN C38C10.5 IN CHROMOSOME III.//0.010:185:23//CAENORHABDITIS ELEGANS.//Q03570

[4723] F-OVARC1001419//A-TYPE INCLUSION PROTEIN (ATI).//0.50:135:28//CAMELPOX VIRUS (STRAIN CP-1).//Q05482

[4724] F-OVARC1001425//COLLAGEN ALPHA 1(X) CHAIN PRECURSOR.//0.43:85:40//HOMO SAPIENS (HUMAN).//Q03692

[4725] F-OVARC1001436//HYPOTHETICAL 11.4 KD PROTEIN (C4 PROTEIN).//0.031:100:30//TOMATO YELLOW LEAF CURL VIRUS (STRAIN AUSTRALIA) (TYLCV).//P36283

[4726] F-OVARC1001442//HOMEOBOX PROTEIN HTR-A2 (FRAGMENT).//1.0:32:34//HELOBDELLA TRISERIALIS (LEECH).//P17138

[4727] F-OVARC1001453//METALLOTHIONEIN-III (MT-III) (GROWTH INHIBITORY FACTOR) (GIF).//0.74:19:47//MUS MUSCULUS (MOUSE).//P28184

[4728] F-OVARC1001476//GTP-BINDING PROTEIN GTR2.//3.0e-12:114:34//SACCHAROMYCES CEREVISIAE (BAKER'S YEAST).//P53290

[4729] F-OVARC1001480//COLLAGEN ALPHA 2(VI) CHAIN PRECURSOR.//0.00019:134:32//MUS MUSCULUS (MOUSE).//Q02788

[4730] F-OVARC1001489//HYPOTHETICAL PROTEIN HI1270.//0.98:30:43//HAEMOPHILUS INFLUENZAE.//P44149

[4731] F-OVARC1001496//C-TERMINAL BINDING PROTEIN 2.//4.0e-65:132:100//HOMO SAPIENS (HUMAN).//P56545

[4732] F-OVARC1001506//POLYCYSTIN PRECURSOR (AUTOSOMAL DOMINANT POLYCYSTIC KIDNEY DISEASE PROTEIN 1).//3.2e-70:159:94//HOMO SAPIENS (HUMAN).//P98161

[4733] F-OVARC1100525//FIBROBLAST GROWTH FACTOR INDUCIBLE PROTEIN 14 (FIN14).//1.0:36:33//MUS MUSCULUS (MOUSE).//Q61077

[4734] F-OVARC1001542//SMALL PROLINE-RICH PROTEIN 2B (SPR-2B).//0.69:57:33//HOMO SAPIENS (HUMAN).//P35325

[4735] F-OVARC1001547

[4736] F-OVARC1001555//NGG1-INTERACTING FACTOR 3.//7.6e-16:148-34//SACCHAROMYCES CEREVISIAE (BAKER'S YEAST).//P53081

[4737] F-OVARC1001577//SPLICING FACTOR, ARGININE/SERINE-RICH 2 (SPLICING FACTOR SC35) (SC-35) (SPLICING COMPONENT, 35 KD) (PR264 PROTEIN).//8.8e-38:94:81//GALLUS GALLUS (CHICKEN).//P30352

[4738] F-OVARC1001600//GENE 7 PROTEIN.//0.80:38:39//SPIROPLASMA VIRUS SPV1-R8A2 B.//P15898

[4739] F-OVARC1001610//DIACYLGLYCEROL CHOLINEPHOSPHOTRANSFERASE (EC 2.7.8.2) (SN-1,2- DIACYLGLYCEROL CHOLINEPHOSPHOTRANSFERASE) (CHOPT).//1.6e-22:122:39//SACCHAROMYCES CEREVISIAE (BAKER'S YEAST).//P17898

[4740] F-OVARC1001611

[4741] F-OVARC1001615//HYPOTHETICAL 6.1 KD PROTEIN C03B1.10 IN CHROMOSOME X.//0.30:43:34//CAENORHABDITIS ELEGANS.//Q11116

[4742] F-OVARC1001668//!!!! ALU SUBFAMILY SC WARNING ENTRY !!!!//1.0e-19:45:82//HOMO SAPIENS (HUMAN).//P39192

[4743] F-OVARC1001702//SOX-20 PROTEIN.//2.4e-28:71:83//HOMO SAPIENS (HUMAN).//O60248

[4744] F-OVARC1001703//INTERFERON-INDUCED GUANYLATE-BINDING PROTEIN 1 (GUANINE NUCLEOTIDE- BINDING PROTEIN 1) (INTERFERON-GAMMA INDUCIBLE PROTEIN MAG-1).//0.00018:88:36//MUS MUSCULUS (MOUSE).//Q01514

[4745] F-OVARC100171/CORNIFIN B (SMALL PROLINE-RICH PROTEIN 1B) (SPR1B) (SPR1 B).//2.7e-05:98:32//MUS MUSCULUS (MOUSE).//Q62267

[4746] F-OVARC1001713//ENDOZEPINE-RELATED PROTEIN PRECURSOR (MEMBRANE-ASSOCIATED DIAZEPAM BINDING INHIBITOR) (MA-DB1).//4.5e-20:46:67//BOS TAURUS (BOVINE).M/P07106

[4747] F-OVARC1001726//ALPHA-AMYLASE INHIBITOR PAIM I (PIG PANCREATIC ALPHA-AMYLASE INHIBITOR OF MICROBES I).//0.59:23:56//STREPTOMYCES OLIVACEOVIRIDIS (STREPTOMYCES CORCHORUSII).//P09921

[4748] F-OVARC1001731//TROPOMYOSIN ALPHA CHAIN, SKELETAL MUSCLE.//2.1e-75:176:87//XENOPUS LAEVIS (AFRICAN CLAWED FROG).//Q01173

[4749] F-OVARC1001745//GENE 11 PROTEIN.//0.31:36:52//SPIROPLASMA VIRUS SPV1-R8A2 B.//P15902

[4750] F-OVARC1001762//N-TERMINAL ACETYLTRANSFERASE 1 (EC 2.3.1.88) (AMINO-TERMINAL, ALPHA- AMINO, ACETYLTRANSFERASE 1).//2.8e-23:197:35//SACCHAROMYCES CEREVISIAE (BAKER'S YEAST).//P12945

[4751] F-OVARC1001766//FK506-BINDING NUCLEAR PROTEIN (PEPTIDYL-PROLYL CIS-TRANS ISOMERASE) (PPIASE) (EC 5.2.1.8) (PROLINE ROTAMASE) (NUCLEOLAR PROLINE ISOMERASE) (FKBP-70).//2.2e-06:99:40//SACCHAROMYCES CEREVISIAE (BAKER'S YEAST).//P38911

[4752] F-OVARC1001767//33.2 KD PROTEIN IN DIND-RPH INTERGENIC REGION (ORF X).//0.99:113:27//ESCHERICHIA COLI.//P23839

[4753] F-OVARC1001768

[4754] F-OVARC1001791//HYPOTHETICAL 63.3 KD PROTEIN IN MPT5-SAE2 INTERGENIC REGION.//0.090:75:32//SACCHAROMYCES CEREVISIAE (BAKER'S YEAST).//P46945

[4755] F-OVARC1001795//HYPOTHETICAL 7.5 KD PROTEIN IN RPBA-GP46 INTERGENIC REGION.//0.81:21:38//BACTERIOPHAGE T4.//P07878

[4756] F-OVARC1001802//PLECTOXIN VIII (PLT-VIII) (PLTVIII).//0.41:19:36//PLECTREURYS TRISTIS (SPIDER).//P36984

[4757] F-OVARC1001805//60S RIBOSOMAL PROTEIN L40 (CEP52).//0.67:24:58//SACCHAROMYCES CEREVISIAE (BAKER'S YEAST).//P14796

[4758] F-OVARC1001809//COLLAGEN ALPHA 1(I) CHAIN (FRAGMENTS).//0.23:111:31//RATTUS NORVEGICUS (RAT).//P02454

[4759] F-OVARC1001812//ATP SYNTHASE PROTEIN 8 (EC 3.6.1.34) (A6L).//0.99:28:42//HALICHOERUS GRYPUS (GRAY SEAL).//P38592

[4760] F-OVARC11001813//HYPOTHETICAL 9.9 KD PROTEIN.//0.41:36:30//VACCINIA VIRUS (STRAIN COPENHAGEN).//P20562

[4761] F-OVARC1001820//HYPOTHETICAL PROTEIN ORF-1137.//0.80:58:29//MUS MUSCULUS (MOUSE).//P11260

[4762] F-OVARC1001828

[4763] F-OVARC1001846

[4764] F-OVARC1001861//METALLOTHIONEIN (MT).//0.18:11:54//PLEURONECTES PLATESSA (PLAICE).//P07216

[4765] F-OVARC1001873

[4766] F-OVARC1001879//HYPOTHETICAL 55.9 KD PROTEIN EEED8.6 IN CHROMOSOME II.//2.3e-05:73:31//CAENORHABDITIS ELEGANS.//Q09296

[4767] F-OVARC1001880//SALIVARY PROLINE-RICH PROTEIN PRECURSOR (CLONE CP7) [CONTAINS: BASIC PEPTIDE P-F] (FRAGMENT).//2.4e-11:203:32//HOMO SAPIENS (HUMAN).//P02812

[4768] F-OVARC1001883//!!!! ALU SUBFAMILY J WARNING ENTRY !!!!//2.3e-16:86:59//HOMO SAPIENS (HUMAN).//P39188

[4769] F-OVARC1001900//HYPOTHETICAL 105.9 KD PROTEIN F22B7.5 IN CHROMOSOME III.//0.0053:48:47//CAENORHABDITIS ELEGANS.//P34408

[4770] F-OVARC1001901

[4771] F-OVARC1001911//40S RIBOSOMAL PROTEIN S28.//1.0:33:36//ARABIDOPSIS THALIANA (MOUSE-EAR CRESS).//P34789

[4772] F-OVARC1001916//PUTATIVE RHO/RAC GUANINE NUCLEOTIDE EXCHANGE FACTOR (RHO/RAC GEF) (FACIOGENITAL DYSPLASIA PROTEIN).//0.00082:114:27//HOMO SAPIENS (HUMAN).//P98174

[4773] F-OVARC1001928//FERREDOXIN III (FDIII).//1.0:64:29//ANABAENA VARIABILIS.//P46050

[4774] F-OVARC1001942//N-TERMINAL ACETYLTRANSFERASE 1 (EC 2.3.1.88) (AMINO-TERMINAL, ALPHA- AMINO, ACETYLTRANSFERASE 1).//3.0e-07:93:37//SACCHAROMYCES CEREVISIAE (BAKER'S YEAST).//P12945

[4775] F-OVARC1001943//HYPOTHETICAL 62.2 KD PROTEIN ZK652.6 IN CHROMOSOME III.//1.7e-23:147:43//CAENORHABDITIS ELEGANS.//P34664

[4776] F-OVARC1001949//ZINC FINGER PROTEIN 177.//2.0e-23:56:66//HOMO SAPIENS (HUMAN).//Q13360

[4777] F-OVARC1001950/!!!!! ALU SUBFAMILY J WARNING ENTRY !!!!//0.011:57:47//HOMO SAPIENS (HUMAN).//P39188

[4778] F-OVARC1001987//SPERM PROTAMINE P1 (CYSTEINE-RICH PROTAMINE).//0.39:14:64//MUS MUSCULUS (MOUSE).//P02319

[4779] F-OVARC1001989//!!!! ALU SUBFAMILY J WARNING ENTRY !!!!//2.4e-13:55:72//HOMO SAPIENS (HUMAN).//P39188

[4780] F-OVARC1002044

[4781] F-OVARC1002050//UTROPHIN (DYSTROPHIN-RELATED PROTEIN 1) (DRP1) (DRP).//3.6e-12:221:25//HOMO SAPIENS (HUMAN).//P46939

[4782] F-OVARC1002066

[4783] F-OVARC1002082

[4784] F-OVARC1002107//INTRACELLULAR PROTEIN TRANSPORT PROTEIN USO1.//0.99:149:24//SACCHAROMYCES CEREVISIAE (BAKER'S YEAST).//P25386

[4785] F-OVARC1002112//HISTONE MACR0-H2A.1.//2.8e-64:133:98//RATTUS NORVEGICUS (RAT).//Q02874

[4786] F-OVARC1002127//60S RIBOSOMAL PROTEIN L22.//0.0023:95:35//DROSOPHILA MELANOGASTER (FRUIT FLY).//P50887

[4787] F-OVARC1002138//PROBABLE 26S PROTEASE SUBUNIT YTA6 (TAT-BINDING HOMOLOG 6).//6.4e-51:198:56//SACCHAROMYCES CEREVISIAE (BAKER'S YEAST).//P40328

[4788] F-OVARC1002143

[4789] F-OVARC1002156//HYPOTHETICAL 27.7 KD PROTEIN IN CPT1-SPC98 INTERGENIC REGION.//0.00010:64:34//SACCHAROMYCES CEREVISIAE (BAKER'S YEAST).//P53915

[4790] F-OVARC1002158//HYPOTHETICAL 24.1 KD PROTEIN IN LEF4-P33 INTERGENIC REGION.//8.2e-07:119:35//AUTOGRAPHA CALIFORNICA NUCLEAR POLYHEDROSIS VIRUS (ACMNPV).//P41479

[4791] F-OVARC1002165//EBNA-6 NUCLEAR PROTEIN (EBNA-3C) (EBNA-4B).//0.00023:90:45//EPSTEIN-BAMR VIRUS (STRAIN B95-8) (HUMAN HERPESVIRUS 4).//P03204

[4792] F-OVARC1002182//HYPOTHETICAL 46.2 KD TRP-ASP REPEATS CONTAINING PROTEIN D2013.2 IN CHROMOSOME II.//1.3e-34:165:35//CAENORHABDITIS ELEGANS.//Q18964

[4793] F-PLACE1000004//HYPOTHETICAL 180.2 KD PROTEIN C31A2.05C IN CHROMOSOME I.//8.8e-05:148:25//SCHIZOSACCHAROMYCES POMBE (FISSION YEAST).//Q09725

[4794] F-PLACE1000005//PROTEIN Q300.//0.30:10:100//MUS MUSCULUS (MOUSE).//Q02722

[4795] F-PLACE1000007//PROBABLE UBIQUITIN CARBOXYL-TERMINAL HYDROLASE R10E11.3 (EC 3.1.2.15) (UBIQUITIN THIOLESTERASE) (UBIQUITIN-SPECIFIC PROCESSING PROTEASE) (DEUBIQUITINATING ENZYME).//2.3e-39:134:62//CAENORHABDITIS ELEGANS.//P34547

[4796] F-PLACE1000014//52 KD RO PROTEIN (SJOGREN SYNDROME TYPE A ANTIGEN (SS-A)) (RO(SS-A)).//0.00036:63:39//HOMO SAPIENS (HUMAN).//P19474

[4797] F-PLACE1000031

[4798] F-PLACE1000040//!!!! ALU SUBFAMILY SQ WARNING ENTRY !!!!//4.4e-12:97:41//HOMO SAPIENS (HUMAN).//P39194

[4799] F-PLACE1000048//50S RIBOSOMAL PROTEIN L15 (FRAGMENT).//0.98:31:38//BACILLUS SP. (STRAIN C-125).//P38373

[4800] F-PLACE1000050//COLLAGEN ALPHA 1(III) CHAIN.//0.00062:190:33//BOS TAURUS (BOVINE).//P04258

[4801] F-PLACE1000061//60S RIBOSOMAL PROTEIN L37A.//6.4e-19:51:86//GALLUS GALLUS (CHICKEN).//P32046

[4802] F-PLACE1000066//SSU72 PROTEIN.//2.3e-39:165:49//SACCHAROMYCES CEREVISIAE (BAKER'S. YEAST).//P53538

[4803] F-PLACE1000078//BAD PROTEIN (BCL-2 BINDING COMPONENT 6).//1.7e-06:21:95//HOMO SAPIENS (HUMAN).//Q92934

[4804] F-PLACE1000081//HOMEOBOX PROTEIN HOX-A4 (HOX-1.4) (MH-3).//0.0053:146:33//MUS MUSCULUS (MOUSE).//P06798

[4805] F-PLACE1000094

[4806] F-PLACE1000133//TRANSCRIPTION FACTOR BTF3 (RNA POLYMERASE B TRANSCRIPTION FACTOR 3).//1.8e-62:158:81//HOMO SAPIENS (HUMAN).//P20290

[4807] F-PLACE1000142//ENOYL-COA HYDRATASE, MITOCHONDRIAL PRECURSOR (EC 4.2.1.17) (SHORT CHAIN ENOYL-COA HYDRATASE) (SCEH) (ENOYL-COA HYDRATASE 1).//9.8e-12:104:34//HOMO SAPIENS (HUMAN).//P30084

[4808] F-PLACE1000184//AC PROTEIN.//0.44:31:29//BACTERIOPHAGE T4.//P18924

[4809] F-PLACE1000185//HYPOTHETICAL GLYCINE-RICH 49.6 KD PROTEIN CY130.1° C. PRECURSOR.//0.11:48:33//MYCOBACTERIUM TUBERCULOSIS.//Q10637

[4810] F-PLACE1000213//GLUCOAMYLASE S1/S2 PRECURSOR (EC 3.2.1.3) (GLUCAN 1,4-ALPHA-GLUCOSIDASE) (1,4-ALPHA-D-GLUCAN GLUCOHYDROLASE).//3.4e-05:194:26//SACCHAROMYCES CEREVISIAE (BAKER'S YEAST).//P08640

[4811] F-PLACE1000214

[4812] F-PLACE1000236//PROCOLLAGEN ALPHA 1(I) CHAIN PRECURSOR.//0.027:63:34//GALLUS GALLUS (CHICKEN).//P02457

[4813] F-PLACE1000246//TEGUMENT PROTEIN (GENE 11 PROTEIN).//0.78:100:26//EQUINE HERPESVIRUS TYPE 4 (STRAIN 1942) (EHV-4) (EQUINE HERPESVIRUS TYPE 1 SUBTYPE 2).//Q00039

[4814] F-PLACE1000292

[4815] F-PLACE1000308//EARLY NODULIN 75 (N-75) (NGM-75) (FRAGMENT).//0.049:28:42//MEDICAGO SATIVA (ALFALFA).//P11728

[4816] F-PLACE1000332

[4817] F-PLACE1000347//HYPOTHETICAL PROTEIN TP0420.//0.15:24:54//TREPONEMA PALLIDUM./O83435

[4818] F-PLACE1000374//LYSOZYME C (EC 3.2.1.17) (1,4-BETA-N-ACETYLMURAMIDASE C).//1.0:63:25//ORYCTOLAGUS CUNICULUS (RABBIT).//P16973

[4819] F-PLACE1000380//MATING PROCESS PROTEIN MID2 (SERINE-RICH PROTEIN SMS1) (PROTEIN KINASE A INTERFERENCE PROTEIN).//0.018:169:28//SACCHAROMYCES CEREVISIAE (BAKER'S YEAST).//P36027

[4820] F-PLACE1000383//MYOTUBULARIN.//1.2e-65:215:57//HOMO SAPIENS (HUMAN).//Q13496

[4821] F-PLACE1000401//ELASTIN PRECURSOR (TROPOELASTIN).//0.00023:145:30//MUS MUSCULUS (MOUSE).//P54320

[4822] F-PLACE1000406//54 KD NUCLEAR RNA-BINDING PROTEIN (P54(NRB)).//3.4e-27:90:63//HOMO SAPIENS (HUMAN).//Q15233

[4823] F-PLACE1000420//7,8-DIHYDRO-8-OXOGUANINE TRIPHOSPHATASE (EC 3.1.6.-) (8-OXO-DGTPASE).//4.7e-07:134:29//MUS MUSCULUS (MOUSE).//P53368

[4824] F-PLACE1000421//HYPOTHETICAL 8.8 KD PROTEIN C11D3.01C IN CHROMOSOME I.//0.48:72:27//SCHIZOSACCHAROMYCES POMBE (FISSION YEAST).//Q10080

[4825] F-PLACE1000424

[4826] F-PLACE1000435

[4827] F-PLACE1000444//!!!! ALU SUBFAMILY SX WARNING ENTRY !!!!//2.0e-31:129:63//HOMO SAPIENS (HUMAN).//P39195

[4828] F-PLACE1000453//PROTEIN Q300.//0.013:16:68//MUS MUSCULUS (MOUSE).//Q02722

[4829] F-PLACE1000481//LINE- I REVERSE TRANSCRIPTASE HOMOLOG.//0.14:63:36//HOMO SAPIENS (HUMAN).//P08547

[4830] F-PLACE1000492//BASP1 PROTEIN.//0.17:114:28//HOMO SAPIENS (HUMAN).//P80723

[4831] F-PLACE1000540

[4832] F-PLACE1000547//MANNOSE-1-PHOSPHATE GUANYLTRANSFERASE (EC 2.7.7.13) (ATP-MANNOSE-1-PHOSPHATE GUANYLYLTRANSFERASE) (NDP-HEXOSE PYROPHOSPHORYLASE).//1.8e-21:87:56//SACCHAROMYCES CEREVISIAE (BAKER'S YEAST).//P41940

[4833] F-PLACE1000562//HYPOTHETICAL PROTEIN MJ0562.//1.0:35:34//METHANOCOCCUS JANNASCHII.//Q57982

[4834] F-PLACE1000564//ADRENAL SPECIFIC 30 KD PROTEIN (CLONE PG2).//0.13:66:37//HOMO SAPIENS (HUMAN).//P15803

[4835] F-PLACE1000583//ZINC FINGER PROTEIN 83 (ZINC FINGER PROTEIN HPF1).//7.0e-45:192:47//HOMO SAPIENS (HUMAN).//P51522

[4836] F-PLACE1000588//INTERFERON-INDUCED GUANYLATE-BINDING PROTEIN 1 (GUANINE NUCLEOTIDE-BINDING PROTEIN 1).//5.3e-63:122:88//HOMO SAPIENS (HUMAN).//P32455

[4837] F-PLACE1000596//RING CANAL PROTEIN (KELCH PROTEIN).//2.6e-12:120:38//DROSOPHILA MELANOGASTER (FRUIT FLY).//Q04652

[4838] F-PLACE1000599//EARLY E3B 12.7 KD PROTEIN PRECURSOR.//0.83:53:32//HUMAN ADENOVIRUS TYPE 12.//P36707

[4839] F-PLACE1000610

[4840] F-PLACE1000611//HYPOTHETICAL 33.6 KD PROTEIN IN MCK1-RPS19B INTERGENIC REGION.//9.4e-07:64:28//SACCHAROMYCES CEREVISIAE (BAKER'S YEAST).//P48558

[4841] F-PLACE1000636//MALE STERILITY PROTEIN 2.//3.7e-09:83:43//ARABIDOPSIS THALIANA (MOUSE-EAR CRESS).//Q08891

[4842] F-PLACE1000653//PUTATIVE PHOSPHOACETYLGLUCOSAMINE MUTASE (EC 5.4.2.3) (ACETYLGLUCOSAMINE PHOSPHOMUTASE) (N-ACETYLGLUCOSAMINE-PHOSPHATE MUTASE).//1.9e-30:203:41//SCHIZOSACCHAROMYCES POMBE (FISSION YEAST).//Q09687

[4843] F-PLACE1000656//EXTENSIN PRECURSOR (CELL WALL HYDROXYPROLINE-RICH GLYCOPROTEIN).//0.0029:75:33//NICOTIANA TABACUM (COMMON TOBACCO).//P13983

[4844] F-PLACE1000706//TRANSCRIPTION INTERMEDIARY FACTOR 1-BETA (NUCLEAR COREPRESSOR KAP-1) (KRAB-ASSOCIATED PROTEIN 1).//1.1e-38:180:42//HOMO SAPIENS (HUMAN).//Q13263

[4845] F-PLACE1000712//VERY HYPOTHETICAL 8.9 KD PROTEIN CY441.05 PRECURSOR.//0.93:49:34//MYCOBACTERIUM TUBERCULOSIS.//P71934

[4846] F-PLACE1000716

[4847] F-PLACE1000748//HYPOTHETICAL 10.4 KD PROTEIN IN SPAT 3′REGION (ORF-11).//0.90:53:37//SHIGELLA FLEXNERI.//P55794

[4848] F-PLACE1000749//HYPOTHETICAL PROTEIN MG 148.//0.0014:142:27//MYCOPLASMA GENITALIUM.//P47394

[4849] F-PLACE1000755//HYPOTHETICAL HELICASE K12H4.8 IN CHROMOSOME III.//1.1e-15:98:48//CAENORHABDITIS ELEGANS.//P34529

[4850] F-PLACE1000769//VIGILIN.//0.51:60:33//GALLUS GALLUS (CHICKEN).//P81021

[4851] F-PLACE1000785//PROBABLE COLD SHOCK PROTEIN CY15C10.04.//1.0:22:45//MYCOBACTERIUM TUBERCULOSIS.//O06360

[4852] F-PLACE1000786//HYPOTHETICAL 30.2 KD PROTEIN ZK632.12 IN CHROMOSOME III.//2.6e-38:159:51//CAENORHABDITIS ELEGANS.//P34657

[4853] F-PLACE1000793//VASODILATOR-STIMULATED PHOSPHOPROTEIN (VASP).//0.0097:128:30//HOMO SAPIENS (HUMAN).//P50552

[4854] F-PLACE1000798//!!!! ALU SUBFAMILY J WARNING ENTRY !!!!//9.4e-07:47:61//HOMO SAPIENS (HUMAN).//P39188

[4855] F-PLACE1000841

[4856] F-PLACE1000849//ELAV PROTEIN.//3.5e-05:140:35//DROSOPHILA VIRILIS (FRUIT FLY).//P23241

[4857] F-PLACE1000856//HYPOTHETICAL PROTEIN MJ0008.//0.95:100:23//METHANOCOCCUS JANNASCHII.//Q60319

[4858] F-PLACE1000863//PUTATIVE MITOCHONDRIAL 40S RIBOSOMAL PROTEIN YHR148W.//2.3e-46:172:54//SACCHAROMYCES CEREVISIAE (BAKER'S YEAST).//P32899

[4859] F-PLACE1000909//ANKYRIN R (ANKYRINS 2.1 AND 2.2) (ERYTHROCYTE ANKYRIN).//0.00022:105:35//HOMO SAPIENS (HUMAN).//P16157

[4860] F-PLACE1000931//KILLER TOXIN HM-1.//0.95:24:33//WILLIOPSIS MRAKII (YEAST) (HANSENULA MRAKII).//P10410

[4861] F-PLACE1000948//SL CYTOKINE PRECURSOR (FLT3 LIGAND).//0.97:52:40//HOMO SAPIENS (HUMAN).//P49771

[4862] F-PLACE1000972//MYOSIN ID HEAVY CHAIN.//1.9e-06:79:43//DICTYOSTELIUM DISCOIDEUM (SLIME MOLD).//P34109

[4863] F-PLACE1000977//HYPOTHETICAL 94.2 KD PROTEIN C38D4.5 IN CHROMOSOME III.//2.5e-23:105:41//CAENORHABDITIS ELEGANS.//P46941

[4864] F-PLACE1000979//ZINC FINGER PROTEIN 7 (ZINC FINGER PROTEIN KOX4) (ZINC FINGER PROTEIN HF.16).//0.91:83:30//HOMO SAPIENS (HUMAN).//P17097

[4865] F-PLACE1000987//HYPOTHETICAL 111.5 KD PROTEIN C22G7.02 IN CHROMOSOME I.//0.10:128:24//SCHIZOSACCHAROMYCES POMBE (FISSION YEAST).//Q09796

[4866] F-PLACE1001000

[4867] F-PLACE1001007//ZYXIN.//2.2e-05:135:30//GALLUS GALLUS (CHICKEN).//Q04584

[4868] F-PLACE1010101//BETA-1 BUNGAROTOXIN B CHAIN, MAJOR COMPONENT PRECURSOR (BUNGAROTOXIN, BI CHAIN).//1.0:30:40//BUNGARUS MULTICINCTUS (MANY-BANDED KRAIT).//P00987

[4869] F-PLACE1001015

[4870] F-PLACE1001024

[4871] F-PLACE1001036

[4872] F-PLACE1001054//HOLOTRICIN 3 PRECURSOR.//0.0044:56:39//HOLOTRICHIA DIOMPHALIA.//Q25055

[4873] F-PLACE1001062//SACCHAROPINE DEHYDROGENASE [NADP+, L-GLUTAMATE FORMING] (EC 1.5.1.10).//0.0013:38:52//SACCHAROMYCES CEREVISIAE (BAKER'S YEAST).//P38999

[4874] F-PLACE1001076

[4875] F-PLACE1001088//EARLY NODULIN 75 (N-75) (NGM-75) (FRAGMENT).//0.95:32:50//MEDICAGO SATIVA (ALFALFA).//P11728

[4876] F-PLACE0011092//HYPOTHETICAL 49.0 KD PROTEIN IN NSP1-KAR2 INTERGENIC REGION.//0.0026:81:35//SACCHAROMYCES CEREVISIAE (BAKER'S YEAST).//P47057

[4877] F-PLACE1001104//HYPOTHETICAL 131.5 KD PROTEIN C02F12.7 IN CHROMOSOME X.//0.00063:125:32//CAENORHABDITIS ELEGANS.//Q1102

[4878] F-PLACE1001118//ZINC FINGER PROTEIN MLZ-4 (ZINC FINGER PROTEIN 46).//2.6e-77:209:63//MUS MUSCULUS (MOUSE).//Q03309

[4879] F-PLACE1001136//ALPHA-N-ACETYLGALACTOSAMINIDASE PRECURSOR (EC 3.2.1.49) (ALPHA- GALACTOSIDASE B).//0.99:107:30//HOMO SAPIENS (HUMAN).//P17050

[4880] F-PLACE1001168

[4881] F-PLACE1001171//RETROVIRUS-RELATED POL POLYPROTEIN (FRAGMENT).//0.00012:37:59//HOMO SAPIENS (HUMAN).//P12895

[4882] F-PLACE1001185//HYPOTHETICAL 56.6 KD PROTEIN IN URE2-SSU72 INTERGENIC REGION.//3.6e-12:88:36//SACCHAROMYCES CEREVISIAE (BAKER'S YEAST).//P53867

[4883] F-PLACE1001238

[4884] F-PLACE1001241//METALLOTHIONEIN B (MTB) (FRAGMENT).//0.13:30:53//COLINUS VIRGINIANUS (BOBWHITE QUAIL) (COMMON BOBWHITE).//P27087

[4885] F-PLACE1001257//RING CANAL PROTEIN (KELCH PROTEIN).//4.1e-24:125:46//DROSOPHILA MELANOGASTER (FRUIT FLY).//Q04652

[4886] F-PLACE1001272//HYPOTHETICAL PROTEIN IN KSGA 3′REGION (ORF L5) (FRAGMENT).//1.0:24:45//MYCOPLASMA CAPRICOLUM.//P43040

[4887] F-PLACE1001279//CYTOTOXIN 3 (CYTOTOXIN V-II-3).//0.98:31:41//NAJA MOSSAMBICA (MOZAMBIQUE COBRA).//P01470

[4888] F-PLACE1001280//PROCOLLAGEN ALPHA 1(II) CHAIN PRECURSOR [CONTAINS: CHONDROCALCIN].//0.0051:156:32//MUS MUSCULUS (MOUSE).//P28481

[4889] F-PLACE1001294//GAMETOGENESIS EXPRESSED PROTEIN GEG-154.//3.7e-56:109:93//MUS MUSCULUS (MOUSE).//P50636

[4890] F-PLACE1001304//ZINC FINGER PROTEIN 35 (ZFP-35).//3.2e-30:75:57//MUS MUSCULUS (MOUSE).//P15620

[4891] F-PLACE1001311//!!!! ALU SUBFAMILY SB WARNING ENTRY !!!!//2.7e-31:66:66//HOMO SAPIENS (HUMAN).//P39189

[4892] F-PLACE1001323

[4893] F-PLACE1001351//REV PROTEIN (ANTI-REPRESSION TRANSACTIVATOR PROTEIN) (ART/TRS).//0.11:66:27//SIMIAN IMMUNODEFICIENCY VIRUS (AGM155 ISOLATE) (SIV-AGM)./IP27971

[4894] F-PLACE1100366//SHORT NEUROTOXIN 2 (TOXIN CM-14) (TOXIN V-N-12).//0.070:18:33//NAJA HAJE ANNULIFERA (BANDED EGYPTIAN COBRA).//P01422

[4895] F-PLACE1001377//DISINTEGRIN TRIGRAMIN BETA (PLATELET AGGREGATION ACTIVATION INHIBITOR).//4.9e-06:50:46//TRIMERESURUS GRAMINEUS (INDIAN GREEN TREE VIPER) (GREEN HABU SNAKE).//P17495

[4896] F-PLACE1001383//M PROTEIN, SEROTYPE 49 PRECURSOR.//0.080:136:24//STREPTOCOCCUS PYOGENES.//P16947

[4897] F-PLACE1001384

[4898] F-PLACE1001387//EPIDERMAL GROWTH FACTOR RECEPTOR KINASE SUBSTRATE EPS8.//1.9e-22:142:39//HOMO SAPIENS (HUMAN).//Q12929

[4899] F-PLACE1001395//HYPOTHETICAL 8.5 KD PROTEIN IN ASIA-MOTA INTERGENIC REGION.//0.98:67:34//BACTERIOPHAGE T4.//P22917

[4900] F-PLACE1001399//!!!! ALU SUBFAMILY SQ WARNING ENTRY !!!!//3.1e-32:47:74//HOMO SAPIENS (HUMAN).//P39194

[4901] F-PLACE1001412//GLYCOPHORIN C (PAS-2′) (GLYCOPROTEIN BETA) (GLPC) (GLYCOCONNECTIN) (SIALOGLYCOPROTEIN D) (GLYCOPHORIN D) (GPD).//0.00021:125:36//HOMO SAPIENS (HUMAN).//P04921

[4902] F-PLACE1001414//CHYMOTRYPSIN/ELASTASE ISOINHIBITORS 2 TO 5.//0.99:37:35//ASCARIS SUUM (PIG ROUNDWORM) (ASCARIS LUMBRICOIDES).//P07852

[4903] F-PLACE1001440//PROLINE-RICH PEPTIDE P-B.//0.35:16:50//HOMO SAPIENS (HUMAN).//P02814

[4904] F-PLACE1001456//RELAXIN.//0.48:38:36//BALAENOPTERA ACUTOROSTRATA (MINKE WHALE) (LESSER RORQUAL).//P11184

[4905] F-PLACE1001468//HYPOTHETICAL PROTEIN MJ0602.//0.10:86:32//METHANOCOCCUS JANNASCHII.//Q58019

[4906] F-PLACE1001484//HYPOTHETICAL 7.5 KD PROTEIN IN DNAC-RPLI INTERGENIC REGION.//1.0:47:34//BACILLUS SUBTILIS.//P37480

[4907] F-PLACE1001502//COLLAGEN 1(X) CHAIN PRECURSOR.//0.00029:118:34//BOS TAURUS (BOVINE).//P23206

[4908] F-PLACE1001503//HYPOTHETICAL 77.3 KD PROTEIN T05G5.8 IN CHROMOSOME III.//2.2e-07:107:30//CAENORHABDITIS ELEGANS.//P34561

[4909] F-PLACE1001517//SMALL PROTEIN INHIBITOR OF INSECT ALPHA-AMYLASES 2 (SI ALPHA-2).//0.56:22:45//SORGHUM BICOLOR MILO (SORGHUM).//P21924

[4910] F-PLACE1001534//PUTATIVE GENE PROTEIN 54.//0.43:44:40//BACTERIOPHAGE SP01.//048408

[4911] F-PLACE1001545//HYPOTHETICAL 7.9 KD PROTEIN IN CELF-KATE INTERGENIC REGION.//0.99:70:32//ESCHERICHIA COLI.//P37795

[4912] F-PLACE1001551//CHLOROPLAST 50S RIBOSOMAL PROTEIN L32.//1.0:66:28//MARCHANTIA POLYMORPHA (LIVERWORT).//P12196

[4913] F-PLACE1001570//SYNAPTONEMAL COMPLEX PROTEIN 1 (SCP-1 PROTEIN).//0.024:120:27//HOMO SAPIENS (HUMAN).//Q15431

[4914] F-PLACE1001602//CCR4-ASSOCIATED FACTOR 1 (CAF1).//1.1e-30:90:78//MUS MUSCULUS (MOUSE).//Q60809

[4915] F-PLACE1100603//ACIDIC PROLINE-RICH PROTEIN PRECURSOR (CLONE PRP25) (FRAGMENT).//0.054:77:33//RATTUS NORVEGICUS (RAT).//P10164

[4916] F-PLACE1001608

[4917] F-PLACE1001610//PROBABLE E4 PROTEIN.//0.90:58:29//HUMAN PAPILLOMAVIRUS TYPE 28.//P51896

[4918] F-PLACE1001611//METALLOTHIONEIN-IG (MT-1G).//0.35:30:40//HOMO SAPIENS (HUMAN).//P13640

[4919] F-PLACE1001632//ZINC FINGER PROTEIN 84 (ZINC FINGER PROTEIN HPF2).//3.6e-28:144:43//HOMO SAPIENS (HUMAN).//P51523

[4920] F-PLACE1001634//PHOTOSYSTEM II REACTION CENTRE N PROTEIN.//1.0:36:41//CYANIDIUM CALDARIUM (GALDIERIA SULPHURARIA).//O19926

[4921] F-PLACE1001640//TAT PROTEIN (TRANSACTIVATING REGULATORY PROTEIN).//0.24:47:38//HUMAN IMMUNODEFICIENCY VIRUS TYPE 1 (NDK ISOLATE) (HIV-1).//P18804

[4922] F-PLACE1001672//!!!! ALU SUBFAMILY J WARNING ENTRY !!!!//1.0:27:66//HOMO SAPIENS (HUMAN).//P39188

[4923] F-PLACE1001691//HYPOTHETICAL 15.5 KD PROTEIN IN PIK1-POL2 INTERGENIC REGION.//0.40:81:33//SACCHAROMYCES CEREVISIAE (BAKER'S YEAST).//P53842

[4924] F-PLACE1100692//S-ACYL FATTY ACID SYNTHASE THIOESTERASE, MEDIUM CHAIN (EC 3.1.2.14) (THIOESTERASE II).//8.3e-41:103:55//RATTUS NORVEGICUS (RAT).//P08635

[4925] F-PLACE1001705

[4926] F-PLACE1001716//HYPOTHETICAL 138.5 KD PROTEIN C17H9.01 IN CHROMOSOME I.//6.1e-07:157:29//SCHIZOSACCHAROMYCES POMBE (FISSION YEAST).//O13798

[4927] F-PLACE1001720

[4928] F-PLACE1001729//PROLINE-RICH PROTEIN MP-3 (FRAGMENT).//6.5e-05:196:32//MUS MUSCULUS (MOUSE).//P05143

[4929] F-PLACE1001739//NEUROFILAMENT TRIPLET M PROTEIN (160 KD NEUROFILAMENT PROTEIN) (NF-M).//0.00050:213:23//RATTUS NORVEGICUS (RAT).//P12839

[4930] F-PLACE1001740//!!!! ALU SUBFAMILY J WARNING ENTRY !!!!//2.4e-17:90:56//HOMO SAPIENS (HUMAN).//P39188

[4931] F-PLACE1001745//HYPOTHETICAL PROTEIN KIAA0125.//0.96:38:36//HOMO SAPIENS (HUMAN).//Q14138

[4932] F-PLACE1001746//CONGLUTIN DELTA-2 SMALL CHAIN.//0.98:23:43//LUPINUS ANGUSTIFOLIUS (NARROW-LEAVED BLUE LUPINE).//P09930

[4933] F-PLACE1001748//HYPOTHETICAL 99.0 KD PROTEIN SPBC119.17.//2.9e-28:167:38//SCHIZOSACCHAROMYCES POMBE (FISSION YEAST).//O42908

[4934] F-PLACE1001756//!!!! ALU SUBFAMILY SB WARNING ENTRY !!!!//9.2e-43:126:77//HOMO SAPIENS (HUMAN).//P39189

[4935] F-PLACE1001761//50S RIBOSOMAL PROTEIN L35.//0.26:42:38//HELICOBACTER PYLORI (CAMPYLOBACTER PYLORI).//P56057

[4936] F-PLACE1001771//TRANSIENT-RECEPTOR-POTENTIAL LIKE PROTEIN.//4.8e-35:223:40//DROSOPHILA MELANOGASTER (FRUIT FLY).//P48994

[4937] F-PLACE1001781//HYPOTHETICAL 71.1 KD PROTEIN IN DSK2-CAT8 INTERGENIC REGION.//9.5e-41:194:46//SACCHAROMYCES CEREVISIAE (BAKER'S YEAST).//Q03262

[4938] F-PLACE1001799

[4939] F-PLACE1001810

[4940] F-PLACE1001817//SUCCINYL-COA LIGASE [GDP-FORMING], BETA-CHAIN PRECURSOR (EC 6.2.1.4) (SUCCINYL-COA SYNTHETASE, BETA CHAIN) (SCS-BETA).//2.8e-40:115:61//NEOCALLIMASTIX FRONTALIS (RUMEN FUNGUS).//P53587

[4941] F-PLACE1001821

[4942] F-PLACE1001844//IG KAPPA CHAIN V-I REGION (HAU).//0.59:89:35//HOMO SAPIENS (HUMAN).//P01600

[4943] F-PLACE1001845

[4944] F-PLACE1001869//MPA43 PROTEIN.//3.5e-14:153:33//SACCHAROMYCES CEREVISIAE (BAKER'S YEAST).//P53583

[4945] F-PLACE1001897//LIGATOXIN A.//1.0:43:27//PHORADENDRON LIGA (ARGENTINE MISTLETOE).//P01540

[4946] F-PLACE1001912//LONG NEUROTOXIN 2 (TOXIN C).//0.57:44:45//ASTROTIA STOKESI (STOKES'S SEA SNAKE) (DISTEIRA STOKESI).//P01381

[4947] F-PLACE1001920//LATE GENES ACTIVATOR (EARLY PROTEIN GP4) (GPF).//0.89:75:29//BACTERIOPHAGE NF.//P09877

[4948] F-PLACE1001928

[4949] F-PLACE1001983//IMMEDIATE-EARLY PROTEIN IE 180.//0.0049:51:45//PSEUDORABIES VIRUS (STRAIN KAPLAN) (PRV).//P33479

[4950] F-PLACE1001989//PUTATIVE AMIDASE (EC 3.5.1.4).1/8.9e-08:125:36//MORAXELLA CATARRHALIS.//Q49091

[4951] F-PLACE1002004

[4952] F-PLACE1002046//LIGATIN (FRAGMENT).//1.6e-84:191:84//MUS MUSCULUS (MOUSE).//Q61211

[4953] F-PLACE1002052

[4954] F-PLACE1002066

[4955] F-PLACE1002072//ANTER-SPECIFIC PROLINE-RICH PROTEIN APG PRECURSOR.//0.16:77:31//ARABIDOPSIS THALIANA (MOUSE-EAR CRESS).//P40602

[4956] F-PLACE1002073//HYPOTHETICAL 118.2 KD PROTEIN F43C1.1 IN CHROMOSOME III.//4.0e-11:174:28//CAENORHABDITIS ELEGANS.//Q09564

[4957] F-PLACE1002090//SIGNAL RECOGNITION PARTICLE 72 KD PROTEIN (SRP72).//2.8e-57:112:99//HOMO SAPIENS (HUMAN).//O76094

[4958] F-PLACE1002115//P8 MTCP-1 PROTEIN (MATURE T-CELL PROLIFERATION-1 TYPE A) (MTCP-1 TYPE A) (P8MTCP1).//1.0:49:30//MUS MUSCULUS (MOUSE).//Q61908

[4959] F-PLACE1002119//T-LYMPHOCYTE ACTIVATED PROTEIN (CYCLOHEXIMIDE-INDUCED) (CHX1) (IMMEDIATE EARLY RESPONSE 2 PROTEIN).//2.7e-11:118:36//MUS MUSCULUS (MOUSE).//P17950

[4960] F-PLACE1002140//HYPOTHETICAL 12.3 KD PROTEIN IN MOBL 3′REGION (ORF 4).//0.0086:39:46//THIOBACILLUS FERROOXIDANS.//P20088

[4961] F-PLACE1002150

[4962] F-PLACE1002157//!!!! ALU SUBFAMILY SB WARNING ENTRY !!!!//2.4e-34:56:82//HOMO SAPIENS (HUMAN).//P39189

[4963] F-PLACE1002163//NEUROTOXIN 1./11.0:17:52//CENTRUROIDES SCULPTURATUS (BARK SCORPION).//P01492

[4964] F-PLACE1002170

[4965] F-PLACE1002171//TRANSCRIPTION REGULATORY PROTEIN SW13 (SWI/SNF COMPLEX COMPONENT SWI3) (TRANSCRIPTION FACTOR TYE2).//0.00023:179:23//SACCHAROMYCES CEREVISIAE (BAKER'S YEAST).//P32591

[4966] F-PLACE1002205//HYPOTHETICAL 13.5 KD PROTEIN IN MOB1-SGA1 INTERGENIC REGION.//0.77:21:47//SACCHAROMYCES CEREVISIAE (BAKER'S YEAST).//P40490

[4967] F-PLACE1002213//HISTONE H4 (FRAGMENT).//0.62:31:32//BLEPHARISMA JAPONICUM.//P80738

[4968] F-PLACE1002227//HYPOTHETICAL 7.9 KD PROTEIN IN FIXW 5′REGION.//0.41:49:36//RHIZOBIUM LEGUMINOSARUM.//P14310

[4969] F-PLACE1002256//CYTOCHROME B (EC 1.10.2.2).//0.61:95:29//CAENORHABDITIS ELEGANS.//P24890

[4970] F-PLACE1002259//HYPOTHETICAL 9.2 KD PROTEIN IN SPS1-QCR7 INTERGENIC REGION.//0.99:22:45//SACCHAROMYCES CEREVISIAE (BAKER'S YEAST).//P56508

[4971] F-PLACE1002319//HYPOTHETICAL 56.6 KD PROTEIN IN URE2-SSU72 INTERGENIC REGION.//0.91:18:72//SACCHAROMYCES CEREVISIAE (BAKER'S YEAST)./MP53867

[4972] F-PLACE1002342//HYPOTHETICAL PROTEIN C 16.//1.0:53:32//SWINEPOX VIRUS (STRAIN KASZA) (SPV).//P32219

[4973] F-PLACE1002395//CIRCUMSPOROZOITE PROTEIN PRECURSOR (CS).//6.4e-05:127:37//PLASMODIUM VIVAX.//P08677

[4974] F-PLACE1002399

[4975] F-PLACE1002433//DYNACTIN, 150 KD ISOFORM (150 KD DYNEIN-ASSOCIATED POLYPEPTIDE) (DP-150) (DAP-150) (P150-GLUED).//0.00094:182:25//RATTUS NORVEGICUS (RAT).//P28023

[4976] F-PLACE1002437//ATP-BINDING CASSETTE TRANSPORTER I.//4.5e-19:62:77//MUS MUSCULUS (MOUSE).//P41233

[4977] F-PLACE1002438//HYPOTHETICAL 141.5 KD ZINC FINGER PROTEIN IN TUB1-CPR3 INTERGENIC REGION.//0.014:63:34//SACCHAROMYCES CEREVISIAE (BAKER'S YEAST).//Q04545

[4978] F-PLACE1002450//OOCYTE ZINC FINGER PROTEIN XLCOF6 (FRAGMENT).//3.9e-28:159:38//XENOPUS LAEVIS (AFRICAN CLAWED FROG).//P18749

[4979] F-PLACE1002465//LARIAT DEBRANCHING ENZYME (EC 3.1.-.-).//0.0014:148:28//SCHIZOSACCHAROMYCES POMBE (FISSION YEAST).//O13765

[4980] F-PLACE1002474//FIBRILLIN 2 PRECURSOR.//2.1e-24:203:33//MUS MUSCULUS (MOUSE).//Q61555

[4981] F-PLACE1002477//!!!! ALU SUBFAMILY SP WARNING ENTRY !!!!//0.15:65:41//HOMO SAPIENS (HUMAN).//P39193

[4982] F-PLACE1002493//SEMENOGELIN II PRECURSOR (SGII).//1.0:72:31//MACACA MULATTA (RHESUS MACAQUE).//Q95196

[4983] F-PLACE1002499//HYPOTHETICAL 39.3 KD PROTEIN C02B8.6 IN CHROMOSOME X.//2.9e-11:67:35//CAENORHABDITIS ELEGANS.//Q11096

[4984] F-PLACE1002500//COBALT-ZINC-CADMIUM RESISTANCE PROTEIN CZCD (CATION EFFLUX SYSTEM PROTEIN CZCD).//8.4e-11:143:32//ALCALIGENES EUTROPHUS.//P13512

[4985] F-PLACE1002514//HYPOTHETICAL 8.1 KD PROTEIN IN SPEA-METK INTERGENIC REGION (071).//1.0:15:60//ESCHERICHIA COLI.//P46878

[4986] F-PLACE1002529

[4987] F-PLACE1002532//HOMEOBOX PROTEIN DLX-5.//1.1e-76:183:81//MUS MUSCULUS (MOUSE).//P70396

[4988] F-PLACE1002537//!!!! ALU SUBFAMILY SX WARNING ENTRY !!!!//2.6e-18:51:86//HOMO SAPIENS (HUMAN).//P39195

[4989] F-PLACE1002571//ACTIN-LIKE PROTEIN 13E.//6.0e-56:140:47//DROSOPHILA MELANOGASTER (FRUIT FLY).//P45890

[4990] F-PLACE1002578

[4991] F-PLACE1002583

[4992] F-PLACE1002591//CORONIN-LIKE PROTEIN P57.//5.5e-26:78:69//BOS TAURUS (BOVINE).//Q92176

[4993] F-PLACE1002598

[4994] F-PLACE1002604

[4995] F-PLACE1002625//HYPOTHETICAL 180.2 KD PROTEIN IN FAA4-HOR7 INTERGENIC REGION.//6.4e-08:193:23//SACCHAROMYCES CEREVISIAE (BAKER'S YEAST).//Q04781

[4996] F-PLACE1002655//ADSEVERIN (GELSOLIN-LIKE PROTEIN).//7.1e-100:210:89//MUS MUSCULUS (MOUSE).//Q60604

[4997] F-PLACE1002665//MOBILIZATION PROTEIN MOBS.//0.35:60:30//THIOBACILLUS FERROOXIDANS.//P20086

[4998] F-PLACE1002685//ACTIN BINDING PROTEIN.//0.052:115:29//SACCHAROMYCES EXIGUUS (YEAST).//P38479

[4999] F-PLACE1002714//CIS-GOLGI MATRIX PROTEIN GM 130.//1.8e-06:214:30//RATTUS NORVEGICUS (RAT).//Q62839

[5000] F-PLACE1002722//THROMBIN RECEPTOR PRECURSOR.//2.0e-19:134:38//XENOPUS LAEVIS (AFRICAN CLAWED FROG).//P47749

[5001] F-PLACE1002768//FOLLICLE STIMULATING HORMONE RECEPTOR PRECURSOR (FSH-R) (FOLLITROPIN RECEPTOR) (FRAGMENT).//0.43:40:35//MUS MUSCULUS (MOUSE).//P35378

[5002] F-PLACE1002772

[5003] F-PLACE1002775//CENTROMERE/MICROTUBULE BINDING PROTEIN CBF5 (CENTROMERE-BINDING FACTOR 5) (NUCLEOLAR PROTEIN CBF5).//4.8e-07:96:29//SCHIZOSACCHAROMYCES POMBE (FISSION YEAST).//O14007

[5004] F-PLACE1002782//COBALT-ZINC-CADMIUM RESISTANCE PROTEIN CZCD (CATION EFFLUX SYSTEM PROTEIN CZCD).//1.1e-07:114:35//ALCALIGENES EUTROPHUS.//P13512

[5005] F-PLACE1002794//CUTICLE COLLAGEN 12 PRECURSOR.//0.0068:98:39//CAENORHABDITIS ELEGANS.//P20630

[5006] F-PLACE1002811//CYCLIN-DEPENDENT KINASE 6 INHIBITOR (P18-INK6) (CYCLIN-DEPENDENT KINASE 4 INHIBITOR C) (P18-INK4C).//1.1e-09:137:34//MUS MUSCULUS (MOUSE).//Q60772

[5007] F-PLACE1002815//C-HORDEIN (CLONE PC HOR1-3) (FRAGMENT).//0.46:35:42//HORDEUM VULGARE (BARLEY).//P17991

[5008] F-PLACE1002816//HYPOTHETICAL PROTEIN KIAA0288 (HA6116).//1.0e-86:201:74//HOMO SAPIENS (HUMAN).//P56524

[5009] F-PLACE1002834//ZINC FINGER PROTEIN 83 (ZINC FINGER PROTEIN HPF1).//1.6e-30:54:96//HOMO SAPIENS (HUMAN).//P51522

[5010] F-PLACE1002839//METALLOTHIONEIN-1 (MT-1).//1.0:43:37//MUS MUSCULUS (MOUSE).//P02802

[5011] F-PLACE1002851//BOWMAN-BIRK TYPE PROTEINASE INHIBITOR (VAI).//0.77:35:37//VICIA ANGUSTIFOLIA (COMMON VETCH).//P01065

[5012] F-PLACE1002853//HYPOTHETICAL 7.9 KD PROTEIN IN PE 5′REGION (ORF1).//1.0:18:55//LYMANTRIA DISPAR MULTICAPSID NUCLEAR POLYHEDROSIS VIRUS (LDMNPV).//P36866

[5013] F-PLACE1002881//!!!! ALU SUBFAMILY J WARNING ENTRY !!!!//4.1e-27:91:70//HOMO SAPIENS (HUMAN).//P39188

[5014] F-PLACE1002908//HYPOTHETICAL 33.8 KD PROTEIN R10E11.4 IN CHROMOSOME III.//2.0e-31:148:46//CAENORHABDITIS ELEGANS.//P34548

[5015] F-PLACE1002941//!!!! ALU SUBFAMILY SX WARNING ENTRY !!!!//2.6e-11:40:85//HOMO SAPIENS (HUMAN).//P39195

[5016] F-PLACE1002962//ENDOTHELIN-1 PRECURSOR (ET-1) (FRAGMENT).//0.90:38:36//CANIS FAMILIARIS (DOG).//P13206

[5017] F-PLACE1002968//TOXIN IV-5 PRECURSOR (TITYUSTOXIN) (FRAGMENT).//0.97:26:38//TITYUS SERRULATUS (BRAZILIAN SCORPION).//P01496

[5018] F-PLACE1002991//PUTATIVE AMIDASE (EC 3.5.1.4).//3.3e-20:120:41//METHANOCOCCUS JANNASCHII.//Q58560

[5019] F-PLACE1002993//HYPOTHETICAL 17.8 KD PROTEIN IN SMPA-SMPB INTERGENIC REGION (F158).//0.00045:93:23//ESCHERICHIA COLI.//P52121

[5020] F-PLACE1002996//PUTATIVE REGULATORY PROTEIN TSC-22 (TGFB STIMULATED CLONE 22 HOMOLOG).//0.17:91:29//GALLUS GALLUS (CHICKEN).//Q91012

[5021] F-PLACE1003025//SUPPRESSOR PROTEIN SRP40.//0.0079:214:24//SACCHAROMYCES CEREVISIAE (BAKER'S YEAST).//P32583

[5022] F-PLACE1003027//HYPOTHETICAL 128.6 KD PROTEIN ZK1098.10 IN CHROMOSOME III.//1.3e-49:167:63//CAENORHABDITIS ELEGANS.//P34609

[5023] F-PLACE1003044//SPORE COAT PROTEIN D.//0.97:24:45//BACILLUS SUBTILIS.//P07791

[5024] F-PLACE1003045

[5025] F-PLACE1003092

[5026] F-PLACE1003100//HEP27 PROTEIN (PROTEIN D).//3.9e-51:188:57//HOMO SAPIENS (HUMAN).//Q13268

[5027] F-PLACE1003108

[5028] F-PLACE1003136

[5029] F-PLACE1003145//BUTYROPHILIN PRECURSOR (BT).//0.00024:170:24//BOS TAURUS (BOVINE).//P18892

[5030] F-PLACE1003153//HUNCHBACK PROTEIN (FRAGMENT).//1.0:32:37//LOCUSTA MIGRATORIA (MIGRATORY LOCUST).//Q01777

[5031] F-PLACE1003174//UBIQUITIN-CONJUGATING ENZYME E2-18 KD (EC 6.3.2.19) (UBIQUITIN- PROTEIN LIGASE) (UBIQUITIN CARRIER PROTEIN) (PM42).//6.3e-05:54:38//ARABIDOPSIS THALIANA (MOUSE-EAR CRESS).//P42743

[5032] F-PLACE1003176//HYPOTHETICAL 62.3 KD PROTEIN IN PCS60-ABD1 INTERGENIC REGION.//0.24:74:36//SACCHAROMYCES CEREVISIAE (BAKER'S YEAST).//P38319

[5033] F-PLACE1003190//SOF1 PROTEIN.//1.0e-52:158:41//SACCHAROMYCES CEREVISIAE (BAKER'S YEAST).//P33750

[5034] F-PLACE1003200

[5035] F-PLACE1003205//SPERM PROTAMINE P1 .//0.074:20:45//CAENOLESTES FULIGINOSUS.//P42131

[5036] F-PLACE1003238//PROBABLE G PROTEIN-COUPLED RECEPTOR KIAA0001.//0.013:20:55//HOMO SAPIENS (HUMAN).//Q15391

[5037] F-PLACE1003249//HYPOTHETICAL PROTEIN KIAA0125.//0.98:48:37//HOMO SAPIENS (HUMAN).//Q14138

[5038] F-PLACE1003256//OMEGA-CONOTOXINS GVIA, GVIB AND GVIC PRECURSOR (SHAKER PEPTIDE).//0.84:53:30//CONUS GEOGRAPHUS (GEOGRAPHY CONE).//P01522

[5039] F-PLACE1003258//EARLY EMBRYOGENESIS ZYG-11 PROTEIN.//4.1e-18:70:47//CAENORHABDITIS ELEGANS.//P21541

[5040] F-PLACE1003296//SPECTRIN BETA CHAIN, ERYTHROCYTE.//0.063:160:24//HOMO SAPIENS (HUMAN).//P11277

[5041] F-PLACE1003302//ZINC FINGER PROTEIN 83 (ZINC FINGER PROTEIN HPF1).//9.4e-69:84:94//HOMO SAPIENS (HUMAN).//P51522

[5042] F-PLACE1003334//NUCLEOBINDIN PRECURSOR (NUCB1) (BONE 63 KD CALCIUM-BINDING PROTEIN).//0.029:125:24//RATTUS NORVEGICUS (RAT).//Q63083

[5043] F-PLACE1003342//MALE SPECIFIC SPERM PROTEIN MST84 DB.//0.97:44:40//DROSOPHILA MELANOGASTER (FRUIT FLY).//Q01643

[5044] F-PLACE1003343//GENE 11 PROTEIN.//1.0:37:37//SPIROPLASMA VIRUS SPV1-R8A2 B.//P15902

[5045] F-PLACE1003353//SH2/SH3 ADAPTOR CRK (ADAPTER MOLECULE CRK) (CRK2).//6.4e-05:69:40//XENOPUS LAEVIS (AFRICAN CLAWED FROG).//P87378

[5046] F-PLACE1003361//!!!! ALU SUBFAMILY SC WARNING ENTRY !!!!//1.6e-23:66:75//HOMO SAPIENS (HUMAN).//P39192

[5047] F-PLACE1003366//SMALL PROLINE-RICH PROTEIN 2-1.//0.62:19:57//HOMO SAPIENS (HUMAN).//P35326

[5048] F-PLACE1003369//A-AGGLUTININ ATTACHMENT SUBUNIT PRECURSOR.//4.3e-06:102:42//SACCHAROMYCES CEREVISIAE (BAKER'S YEAST).//P32323

[5049] F-PLACE1003373//PROTEIN Q300.//0.042:29:37//MUS MUSCULUS (MOUSE).//Q02722

[5050] F-PLACE1003375//OLFACTORY RECEPTOR 11 (M49) (FRAGMENT).//0.99:46:34//MUS MUSCULUS (MOUSE).//Q60890

[5051] F-PLACE1003383

[5052] F-PLACE1003394//RAS-RELATED PROTEIN RAB-14.//2.8e-80:166:89//RATTUS NORVEGICUS (RAT).//P35287

[5053] F-PLACE1003401

[5054] F-PLACE1003420//PUTATIVE MITOCHONDRIAL CARRIER YIL006W.//8.1e-17:138:37//SACCHAROMYCES CEREVISIAE (BAKER'S YEAST).//P40556

[5055] F-PLACE1003454

[5056] F-PLACE1003478

[5057] F-PLACE1003493//ENDOTHELIAL CELL MULTIMERIN PRECURSOR.//3.4e-11:123:32//HOMO SAPIENS (HUMAN).//Q13201

[5058] F-PLACE1003516//LINE-1 REVERSE TRANSCRIPTASE HOMOLOG.//1.0e-32:68:76//HOMO SAPIENS (HUMAN).//P08547

[5059] F-PLACE1003519//!!!! ALU SUBFAMILY J WARNING ENTRY !!!!//9.2e-17:77:50//HOMO SAPIENS (HUMAN).//P39188

[5060] F-PLACE1003521//HYPOTHETICAL BAMHI-ORF9 PROTEIN.//1.0:38:42//FOWLPOX VIRUS (ISOLATE HP-438[MUNICH]).//P14366

[5061] F-PLACE1003528//ATP SYNTHASE PROTEIN 8 (EC 3.6.1.34) (A6L).//0.96:32:40//XENOPUS LAEVIS (AFRICAN CLAWED FROG).//P03931

[5062] F-PLACE1003537//CEF PROTEIN.//0.92:47:29//BACTERIOPHAGE T4.//Q01436

[5063] F-PLACE1003553

[5064] F-PLACE1003566//HYPOTHETICAL BAMHI-ORF9 PROTEIN.//1.0:32:34//FOWLPOX VIRUS (ISOLATE HP-438[MUNICH]).//P14366

[5065] F-PLACE1003575

[5066] F-PLACE1003583//PROBABLE E5 PROTEIN.//0.16:64:31//HUMAN PAPILLOMAVIRUS TYPE 35.//P27226

[5067] F-PLACE1003584

[5068] F-PLACE1003592//EXCISIONASE.//0.26:19:52//BACTERIOPHAGE PHI-80.//P05998

[5069] F-PLACE1003593//ATP SYNTHASE PROTEIN 8 (EC 3.6.1.34) (A6L).//1.0:42:30//OVIS ARIES (SHEEP).//O78751

[5070] F-PLACE1003596//OLIGOSACCHARYL TRANSFERASE STT3 SUBUNIT HOMOLOG.//6.3e-87:238:67//CAENORHABDITIS ELEGANS.//P46975

[5071] F-PLACE1003602//HYPOTHETICAL 11.0 KD PROTEIN IN FAA3-MAS3 INTERGENIC REGION.//8.4e-17:98:42//SACCHAROMYCES CEREVISIAE (BAKER'S YEAST).//P40554

[5072] F-PLACE1003605//HAP5 TRANSCRIPTIONAL ACTIVATOR.//2.0e-09:82:35//SACCHAROMYCES CEREVISIAE (BAKER'S YEAST).//Q02516

[5073] F-PLACE1003611//PANCREATIC SECRETORY TRYPSIN INHIBITOR.//0.99:32:43//CANIS FAMILIARIS (DOG).//P04542

[5074] F-PLACE1003618//LINE-1 REVERSE TRANSCRIPTASE HOMOLOG.//4.7e-65:229:58//HOMO SAPIENS (HUMAN).//P08547

[5075] F-PLACE1003625//30S RIBOSOMAL PROTEIN S20 (FRAGMENT).//1.0:56:26//PROTEUS MIRABILIS.//P42275

[5076] F-PLACE1003638//PROTEIN Q300.//0.079:41:39//MUS MUSCULUS (MOUSE).//Q02722

[5077] F-PLACE1003669//TRICHOHYALIN.//2.9e-07:180:30//OVIS ARIES (SHEEP).//P22793

[5078] F-PLACE1003704//SPLICING FACTOR, ARGININE/SERINE-RICH 4 (PRE-MRNA SPLICING FACTOR SRP75).//3.3e-16:98:40//HOMO SAPIENS (HUMAN).//Q08170

[5079] F-PLACE1003709//HYPOTHETICAL 59.5 KD PROTEIN IN CCT3-CCT8 INTERGENIC REGION.//2.8e-07:128:27//SACCHAROMYCES CEREVISIAE (BAKER'S YEAST).//P47074

[5080] F-PLACE1003711//ALPHA/BETA-GLIADIN PRECURSOR (PROLAMIN) (CLASS A-IV).//5.0e-05:88:30//TRITICUM AESTIVUM (WHEAT).//P04724

[5081] F-PLACE1003723//TYROSINE-PROTEIN KINASE SRM (EC 2.7.1.112) (PTK70).//6.0e-06:98:36//MUS MUSCULUS (MOUSE).//Q62270

[5082] F-PLACE1003738//OOCYTE ZINC FINGER PROTEIN XLCOF6 (FRAGMENT).//2.5e-45:147:46//XENOPUS LAEVIS (AFRICAN CLAWED FROG).//P18749

[5083] F-PLACE1003760//CYTOCHROME B (EC 1.10.2.2).//0.91:49:34//TRYPANOSOMA BRUCEI BRUCEI.//P00164

[5084] F-PLACE1003762//METALLOTHIONEIN-LIKE PROTEIN TYPE 2./10.98:28:32//MALUS DOMESTICA (APPLE) (MALUS SYLVESTRIS).//O24058

[5085] F-PLACE1003768//LINE-1 REVERSE TRANSCRIPTASE HOMOLOG.//8.5e-19:123:37//HOMO SAPIENS (HUMAN).//P08547

[5086] F-PLACE1003771

[5087] F-PLACE1003783//SRY-RELATED PROTEIN ADW2 (FRAGMENT).//1.0:29:37//ALLIGATOR MISSISSIPPIENSIS (AMERICAN ALLIGATOR).//P40634

[5088] F-PLACE1003784//HYPOTHETICAL 98.1 KD PROTEIN IN SPX19-GCR2 INTERGENIC REGION.//1.2e-13:199:28//SACCHAROMYCES CEREVISIAE (BAKER'S YEAST).//P40164

[5089] F-PLACE1003795//EC PROTEIN I/II (ZINC-METALLOTHIONEIN CLASS II).//0.67:53:30//TRITICUM AESTIVUM (WHEAT).//P30569

[5090] F-PLACE1003833//METHIONYL-TRNA FORMYLTRANSFERASE (EC 2.1.2.9).//0.99:158:28//THERMUS AQUATICUS (SUBSP. THERMOPHILUS).//P43523

[5091] F-PLACE1003850

[5092] F-PLACE1003858//HUNCHBACK PROTEIN (FRAGMENT).//0.37:28:42//LITHOBIUS FORFICATUS.//Q02030

[5093] F-PLACE1003864//OUTER MEMBRANE LIPOPROTEIN LOLB PRECURSOR.//0.0046:116:31//ACTINOBACILLUS ACTINOMYCETEMCOMITANS (HAEMOPHILUS ACTINOMYCETEMCOMITANS).//O52727

[5094] F-PLACE1003870

[5095] F-PLACE1003885//POLY(A) POLYMERASE (EC 2.7.7.19) (PAP) (POLYNUCLEOTIDE ADENYLYLTRANSFERASE) (FRAGMENT).//1.6e-92:166:75//HOMO SAPIENS (HUMAN).//P51003

[5096] F-PLACE1003886//IMMEDIATE-EARLY PROTEIN IE 180.//0.54:96:34//PSEUDORABIES VIRUS (STRAIN INDIANA-FUNKHAUSER/BECKER) (PRV).//P11675

[5097] F-PLACE1003888//1-PHOSPHATIDYLINOSITOL-4,5-BISPHOSPHATE PHOSPHODIESTERASE DELTA 1 (EC 3.1.4.11) (PLC-DELTA-1) (PHOSPHOLIPASE C-DELTA-1) (PLC-III) (FRAGMENT).//8.8e-54:260:46//BOS TAURUS (BOVINE).//P10895

[5098] F-PLACE1003892//PROBABLE E5 PROTEIN.//1.0:13:61//HUMAN PAPILLOMAVIRUS TYPE 18.//P06792

[5099] F-PLACE1003900//BETA-FRUCTOFURANOSIDASE, SOLUBLE ISOENZYME 1 (EC 3.2.1.26) (SUCROSE-6-PHOSPHATE HYDROLASE) (INVERTASE) (FRAGMENTS).//0.58:49:36//DAUCUS CAROTA (CARROT).//P80065

[5100] F-PLACE1003903//CTP SYNTHASE (EC 6.3.4.2) (UTP-AMMONIA LIGASE) (CTP SYNTHETASE).//3.8e-52:92:85//HOMO SAPIENS (HUMAN).//P17812

[5101] F-PLACE1003915//PROBABLE ARGINYL-TRNA SYNTHETASE, CYTOPLASMIC (EC 6.1.1.19) (ARGININE- -TRNA LIGASE) (ARGRS).//2.6e-26:202:36//SACCHAROMYCES CEREVISIAE (BAKER'S YEAST).//Q05506

[5102] F-PLACE1003923//HISTIDYL-TRNA SYNTHETASE (EC 6.1.1.21) (HISTIDINE-TRNA LIGASE) (HISRS).//0.94:65:29//STREPTOCOCCUS EQUISIMILIS.//P30053

[5103] F-PLACE1003932//HYPOTHETICAL 17.3 KD PROTEIN IN SEC15-SAP4 INTERGENIC REGION.//0.098:79:31//SACCHAROMYCES CEREVISIAE (BAKER'S YEAST).//P53074

[5104] F-PLACE1003936

[5105] F-PLACE1003968//5′-AMP-ACTIVATED PROTEIN KINASE, GAMMA-1 SUBUNIT (AMPK GAMMA-1 CHAIN).//4.7e-68:164:78//RATTUS NORVEGICUS (RAT).//P80385

[5106] F-PLACE1004103//!!!! ALU SUBFAMILY SC WARNING ENTRY !!!!//1.9e-14:60:73//HOMO SAPIENS (HUMAN).//P39192

[5107] F-PLACE1004104//EXOCYST COMPLEX COMPONENT SEC5.//0.020:202:20//SACCHAROMYCES CEREVISIAE (BAKER'S YEAST).//P89102

[5108] F-PLACE1004114//!!!! ALU SUBFAMILY J WARNING ENTRY !!!!//2.1e-15:69:60//HOMO SAPIENS (HUMAN).//P39188

[5109] F-PLACE1004118//REGULATORY PROTEIN E2.//0.73:58:36//CANINE ORAL PAPILLOMAVIRUS (COPV).//Q89420

[5110] F-PLACE1004128//GUANINE NUCLEOTIDE-BINDING PROTEIN BETA SUBUNIT 4 (TRANSDUCIN BETA CHAIN 4).//7.7e-62:108:100//MUS MUSCULUS (MOUSE).//P29387

[5111] F-PLACE1004149//PROBABLE NUCLEAR ANTIGEN.//0.0011:73:42//PSEUDORABIES VIRUS (STRAIN KAPLAN) (PRV).//P33485

[5112] F-PLACE1004156//HYPOTHETICAL PROLINE-RICH PROTEIN (FRAGMENT).//0.00061:39:48//OWENIA FUSIFORMIS.//P21260

[5113] F-PLACE1004161//PLASMINOGEN-BINDING PROTEIN PAM PRECURSOR (FRAGMENT).//0.033:108:27//STREPTOCOCCUS PYOGENES.//P49054

[5114] F-PLACE1004183//HYPOTHETICAL 64.3 KD PROTEIN IN CDCl₂-ERP5 INTERGENIC REGION.//4.0e-07:146:35//SACCHAROMYCES CEREVISIAE (BAKER'S YEAST).//P38817

[5115] F-PLACE1004197//BUTYROPHILIN PRECURSOR (BT).//5.9e-11:208:27//MUS MUSCULUS (MOUSE).//Q62556

[5116] F-PLACE1004203//PROTEIN A39.//8.5e-18:139:33//VACCINIA VIRUS (STRAIN COPENHAGEN).//P21062

[5117] F-PLACE1004242//PHOTOSYSTEM II REACTION CENTRE J PROTEIN.//1.0:28:42//PISUM SATIVUM (GARDEN PEA).//P13555

[5118] F-PLACE1004256//MYOSIN HEAVY CHAIN D (MHC D).//0.73:134:25//CAENORHABDITIS ELEGANS.//P02567

[5119] F-PLACE1004257//HYPOTHETICAL PROTEIN H10490.//0.13:75:29//HAEMOPHILUS INFLUENZAE.//P44006

[5120] F-PLACE1004258//COLLAGEN ALPHA 2(VIII) CHAIN (ENDOTHELIAL COLLAGEN) (FRAGMENT).//0.027:128:35//HOMO SAPIENS (HUMAN).//P25067

[5121] F-PLACE1004270//LARGE TEGUMENT PROTEIN.//1.8e-10:100:44//EPSTEIN-BARR VIRUS (STRAIN B95-8) (HUMAN HERPESVIRUS 4).//P03186

[5122] F-PLACE1004274//HYPOTHETICAL PROTEIN E-95.//0.44:61:42//HUMAN ADENOVIRUS TYPE 2.//P03286

[5123] F-PLACE1004277//COLLAGEN ALPHA I(XII) CHAIN (FRAGMENTS).//0.0013:55:38//BOS TAURUS (BOVINE).//P25508

[5124] F-PLACE1004284//7 KD PROTEIN (ORF 4).//1.0:63:23//CHRYSANTHEMUM VIRUS B (CVB).//P37990

[5125] F-PLACE1004289//SPERM PROTAMINE P3.//0.00057:22:77//MUS MUSCULUS (MOUSE).//Q62100

[5126] F-PLACE1004302//SERINE/THREONINE PROTEIN KINASE AFSK (EC 2.7.1.-).//0.0065:148:29//STREPTOMYCES COELICOLOR.//P54741

[5127] F-PLACE1004316//AUTOPHAGY PROTEIN APG5.//8.8e-06:117:29//SACCHAROMYCES CEREVISIAE (BAKER'S YEAST).//Q12380

[5128] F-PLACE1004336//COLLAGEN ALPHA 4(IV) CHAIN PRECURSOR.//0.0027:83:36//HOMO SAPIENS (HUMAN).//P53420

[5129] F-PLACE1004358//PROCOLLAGEN ALPHA 1(I) CHAIN PRECURSOR.//2.9e-05:200:33//GALLUS GALLUS (CHICKEN).//P02457

[5130] F-PLACE1004376//AXONEME-ASSOCIATED PROTEIN MST110(2).//2.4e-05:179:29//DROSOPHILA HYDEI (FRUIT FLY).//Q08696

[5131] F-PLACE1004384//!!!! ALU SUBFAMILY SQ WARNING ENTRY !!!!//1.6e-28:46:76//HOMO SAPIENS (HUMAN).//P39194

[5132] F-PLACE1004388//HYPOTHETICAL 75.2 KD PROTEIN IN ACS1-GCV3 INTERGENIC REGION.//5.7e-34:202:37//SACCHAROMYCES CEREVISIAE (BAKER'S YEAST).//P39722

[5133] F-PLACE1004405//NEURAMINYLLACTOSE-BINDING HEMAGGLUTININ (N-ACETYLNEURAMINYLLACTOSE-BINDING FIBRILLAR HEMAGGLUTININ RECEPTOR-BINDING SUBUNIT) (NLBH) (FLAGELLAR SHEATH ADHESIN) (ADHESIN A) (FRAGMENT).//0.93:74:33//HELICOBACTER ACINONYX.//Q47947

[5134] F-PLACE1004425//!!!! ALU SUBFAMILY SX WARNING ENTRY !!!!//0.81:70:42//HOMO SAPIENS (HUMAN).//P39195

[5135] F-PLACE1004428//PRISTANOYL-COA OXIDASE (EC 1.3.3.-).//1.9e-31:203:39//RATTUS NORVEGICUS (RAT).//Q63448

[5136] F-PLACE1004437//ISOCITRATE DEHYDROGENASE [NAD], MITOCHONDRIAL SUBUNIT BETA PRECURSOR (EC 1.1.1.41) (ISOCITRIC DEHYDROGENASE) (NAD+-SPECIFIC ICDH) (FRAGMENT).//4.2e-93:140:100//MACACA FASCICULARIS (CRAB EATING MACAQUE) (CYNOMOLGUS MONKEY).//Q28479

[5137] F-PLACE1004451//!!!! ALU SUBFAMILY J WARNING ENTRY !!!!//0.00013:40:62//HOMO SAPIENS (HUMAN).//P39188

[5138] F-PLACE1004460//MATERNAL TUDOR PROTEIN.//0.0066:218:23//DROSOPHILA MELANOGASTER (FRUIT FLY).//P25823

[5139] F-PLACE1004467//!!!! ALU SUBFAMILY SP WARNING ENTRY !!!!//7.8e-10:33:87//HOMO SAPIENS (HUMAN).//P39193

[5140] F-PLACE1004471//ZINC FINGER PROTEIN 83 (ZINC FINGER PROTEIN HPF1).//7.0e-56:92:58//HOMO SAPIENS (HUMAN).//P51522

[5141] F-PLACE1004473//HYPOTHETICAL 54.3 KD PROTEIN C23D3.03C IN CHROMOSOME I.//0.019:136:27//SCHIZOSACCHAROMYCES POMBE (FISSION YEAST).//Q09844

[5142] F-PLACE1004491//LYSIS PROTEIN.//0.95:53:30//BACTERIOPHAGE FR.//P19903

[5143] F-PLACE1004506//AUTOIMMUNOGENIC CANCER/TESTIS ANTIGEN NY-ESO-1 (LAGE-1).//0.58:66:34//HOMO SAPIENS (HUMAN).//P78358

[5144] F-PLACE1004510//TRANSCRIPTION INITIATION FACTOR TFIID 150 KD SUBUNIT (TAFII-150) (TAFII 150).//3.0e-07:63:46//DROSOPHILA MELANOGASTER (FRUIT FLY).//Q24325

[5145] F-PLACE1004516//HYPOTHETICAL PROTEIN 5′ TO ASP-RICH AND HIS-RICH PROTEINS (FRAGMENT).//0.95:62:29//PLASMODIUM FALCIPARUM (ISOLATE FCM17/SENEGAL).//P14587

[5146] F-PLACE1004518//METALLOTHIONEIN 10-III (MT-10-III).//0.91:28:42//MYTILUS EDULIS (BLUE MUSSEL).//P80248

[5147] F-PLACE1004548//DIHYDROPYRIDINE-SENSITIVE L-TYPE, SKELETAL MUSCLE CALCIUM CHANNEL GAMMA SUBUNIT.//0.94:75:32//ORYCTOLAGUS CUNICULUS (RABBIT).//P19518

[5148] F-PLACE1004550//CUTICLE COLLAGEN 2.//0.90:155:31//CAENORHABDITIS ELEGANS.//P17656

[5149] F-PLACE1004564//CLEAVAGE AND POLYADENYLATION SPECIFICITY FACTOR, 100 KD SUBUNIT (CPSF 100 KD SUBUNIT).//3.2e-70:121:100//BOS TAURUS (BOVINE).//Q10568

[5150] F-PLACE1004629//PROTEIN OS-9 PRECURSOR.//1.7e-10:132:36//HOMO SAPIENS (HUMAN).//Q13438

[5151] F-PLACE1004645//TRANSCRIPTION INITIATION FACTOR IIB HOMOLOG (TFIIB).//0.00036:100:30//PYROCOCCUS FURIOSUS.//Q51731

[5152] F-PLACE1004646//PROBABLE UDP-GALACTOPYRANOSE MUTASE (EC 5.4.99.9).//0.91:58:29//KLEBSIELLA PNEUMONIAE.//Q48481

[5153] F-PLACE1004658//GLUTAMATE [NMDA] RECEPTOR SUBUNIT EPSILON 4 PRECURSOR (N-METHYL D-ASPARTATE RECEPTOR SUBTYPE 2D) (NR2D) (NMDAR2D).//0.031:134:32//MUS MUSCULUS (MOUSE).//Q03391

[5154] F-PLACE1004664//HYPOTHETICAL 180.2 KD PROTEIN IN FAA4-HOR7 INTERGENIC REGION.//0.025:125:20//SACCHAROMYCES CEREVISIAE (BAKER'S YEAST).//Q04781

[5155] F-PLACE1004672//HYPOTHETICAL 36.7 KD PROTEIN C2F7.14C IN CHROMOSOME I.//7.6e-52:158:56//SCHIZOSACCHAROMYCES POMBE (FISSION YEAST).//Q09704

[5156] F-PLACE1004674//PROBABLE CALCIUM-BINDING PROTEIN ALG-2 (PMP41) (ALG-257).//1.4e-88:144:93//MUS MUSCULUS (MOUSE).//P12815

[5157] F-PLACE1004681//CCR4-ASSOCIATED FACTOR 1 (CAF1).//1.0e-34:70:100//MUS MUSCULUS (MOUSE).//Q60809

[5158] F-PLACE1004686//!!!! ALU SUBFAMILY SC WARNING ENTRY !!!!//3.4e-08:48:62//HOMO SAPIENS (HUMAN).//P39192

[5159] F-PLACE1004691//METALLOTHIONEIN (MT).//0.064:24:45//ARIANTA ARBUSTORUM.//P55946

[5160] F-PLACE1004693

[5161] F-PLACE1004716//ATP SYNTHASE PROTEIN 8 (EC 3.6.1.34) (A6L).//1.0:27:37//PAN PANISCUS (PYGMY CHIMPANZEE) (BONOBO).//Q35587

[5162] F-PLACE1004722//HYPOTHETICAL 61.5 KD PROTEIN IN CLA4-MID1 INTERGENIC REGION.//0.95:53:33//SACCHAROMYCES CEREVISIAE (BAKER'S YEAST).//P48565

[5163] F-PLACE1004736//NEURONAL AXONAL MEMBRANE PROTEIN NAP-22.//0.014:163:30//RATTUS NORVEGICUS (RAT).//Q05175

[5164] F-PLACE1004740//!!!! ALU SUBFAMILY SQ WARNING ENTRY !!!!//1.9e-09:37:70//HOMO SAPIENS (HUMAN).//P39194

[5165] F-PLACE1004743//HYPOTHETICAL 12.6 KD PROTEIN IN ALGR3 3′REGION.//0.99:72:33//PSEUDOMONAS AERUGINOSA.//P21484

[5166] F-PLACE1004751//CMP-N-ACETYLNEURAMINATE-BETA-GALACTOSAMIDE-ALPHA-2,3-SIALYLTRANSFERASE (EC 2.4.99.-) (BETA-GALACTOSIDE ALPHA-2,3-SIALYLTRANSFERASE) (ST3GALIII) (ALPHA 2,3-ST) (GAL-NAC6S) (STZ) (SIAT4-C) (SAT-3) (ST-4).//2.2e-08:90:38//HOMO SAPIENS (HUMAN).//Q11206

[5167] F-PLACE1004773//ANKYRIN R (ANKYRINS 2.1 AND 2.2) (ERYTHROCYTE ANKYRIN).//3.2e-25:233:32//HOMO SAPIENS (HUMAN).//P16157

[5168] F-PLACE1004777//N-CHIMAERIN (NC) (N-CHIMERIN) (ALPHA CHIMERIN) (A-CHIMAERIN).//8.1e-26:210:30//RATTUS NORVEGICUS (RAT).//P30337

[5169] F-PLACE1004793//ENV POLYPROTEIN [CONTAINS: COAT PROTEIN GP52; COAT PROTEIN GP36].//0.00062:106:25//MOUSE MAMMARY TUMOR VIRUS (STRAIN BR6).//P10259

[5170] F-PLACE1004804

[5171] F-PLACE1004813//HYPOTHETICAL PROTEIN UL12.//1.0:22:40//HUMAN CYTOMEGALOVIRUS (STRAIN AD169).//P16777

[5172] F-PLACE1004814//HYPOTHETICAL 37.0 KD PROTEIN B0495.8 IN CHROMOSOME II.//2.8e-06:136:25//CAENORHABDITIS ELEGANS.//Q09217

[5173] F-PLACE1004815

[5174] F-PLACE1004824//HYPOTHETICAL 106.7 KD PROTEIN IN MUP1-SPR3 INTERGENIC REGION.//2.3e-09:70:38//SACCHAROMYCES CEREVISIAE (BAKER'S YEAST).//P53236

[5175] F-PLACE1004827//HYPOTHETICAL 9.4 KD PROTEIN IN FLAL 3′REGION (ORF3).//0.54:25:56//BACILLUS LICHENIFORMIS.//P22754

[5176] F-PLACE1004836//ANNEXIN VII (SYNEXIN) (FRAGMENT).//0.0066:12:66//BOS TAURUS (BOVINE).//P20072

[5177] F-PLACE1004838

[5178] F-PLACE1004840

[5179] F-PLACE1004868//MALE STERILITY PROTEIN 2.//4.0e-16:172:30//ARABIDOPSIS THALIANA (MOUSE-EAR CRESS).//Q08891

[5180] F-PLACE1004885

[5181] F-PLACE1004900//MAST CELL DEGRANULATING PEPTIDE PRECURSOR (MCDP) (MCD) (PEPTIDE 401).//1.0:23:47//APIS MELLIFERA (HONEYBEE).//P01499

[5182] F-PLACE1004902//PUTATIVE PRE-MRNA SPLICING FACTOR ATP-DEPENDENT RNA HELICASE SPAC 10F6.02C.//7.3e-15:94:47//SCHIZOSACCHAROMYCES POMBE (FISSION YEAST).//O42643

[5183] F-PLACE1004913//HYPOTHETICAL 7.2 KD PROTEIN IN BCSA-DEGR INTERGENIC REGION.//1.0:42:33//BACILLUS SUBTILIS.//P54165

[5184] F-PLACE1004918//HYPOTHETICAL 12.4 KD PROTEIN IN RPS21B-MRS3 INTERGENIC REGION.//0.98:50:34//SACCHAROMYCES CEREVISIAE (BAKER'S YEAST).//P47012

[5185] F-PLACE1004930//HYPOTHETICAL PROTEIN MJ0562.//0.82:44:36//METHANOCOCCUS JANNASCHII.//Q57982

[5186] F-PLACE1004934

[5187] F-PLACE1004937//HYPOTHETICAL 67.1 KD TRP-ASP REPEATS CONTAINING PROTEIN C57A10.05C IN CHROMOSOME I.//9.0e-10:87:33//SCHIZOSACCHAROMYCES POMBE (FISSION YEAST).//P87053

[5188] F-PLACE1004969//HYPOTHETICAL 55.1 KD PROTEIN B0416.5 IN CHROMOSOME X.//4.0e-14:184:25//CAENORHABDITIS ELEGANS.//Q11073

[5189] F-PLACE1004972//BROMELAIN INHIBITOR 2 (BI-II) (BROMELAIN INHIBITOR VI) (BI-VI).//1.0:35:37//ANANAS COMOSUS (PINEAPPLE).//P27478

[5190] F-PLACE1004979//!!!! ALU SUBFAMILY SC WARNING ENTRY !!!!//5.3e-30:55:72//HOMO SAPIENS (HUMIAN).//P39192

[5191] F-PLACE1004982//M PROTEIN, SEROTYPE 12 PRECURSOR (FRAGMENT).//0.00049:124:27//STREPTOCOCCUS PYOGENES.//P19401

[5192] F-PLACE1004985//ATP SYNTHASE PROTEIN 8 (EC 3.6.1.34) (A6L).//1.0:26:34//LUMBRICUS TERRESTRIS (COMMON EARTHWORM).//Q34942

[5193] F-PLACE1005026//TELOMERE-BINDING PROTEIN HOMOLOG.//0.0011:179:27//EUPLOTES CRASSUS.//Q06183

[5194] F-PLACE1005027

[5195] F-PLACE1005046//ANNEXIN VII (SYNEXIN) (FRAGMENT).//0.082:44:36//BOS TAURUS (BOVINE).//P20072

[5196] F-PLACE1005052//MALE SPECIFIC SPERM PROTEIN MST84DD.//0.38:36:44//DROSOPHILA MELANOGASTER (FRUIT FLY).//Q01645

[5197] F-PLACE1005055

[5198] F-PLACE1005066//RING CANAL PROTEIN (KELCH PROTEIN).//2.9e-38:194:39//DROSOPHILA MELANOGASTER (FRUIT FLY).//Q04652

[5199] F-PLACE1005077

[5200] F-PLACE1005085//INSECT TOXIN 1 (BOT IT1).//0.85:36:33//BUTHUS OCCITANUS TUNETANUS (COMMON EUROPEAN SCORPION).//P55902

[5201] F-PLACE1005086//!!!! ALU SUBFAMILY SQ WARNING ENTRY !!!!//8.5e-38:93:76//HOMO SAPIENS (HUMAN).//P39194

[5202] F-PLACE1005101//HYPOTHETICAL PROTEIN ZAP128 (FRAGMENT).//1.6e-11:35:100//HOMO SAPIENS (HUMAN).//P49753

[5203] F-PLACE1005102//ZINC FINGER PROTEIN 151 (POLYOMAVIRUS LATE INITIATOR PROMOTER BINDING PROTEIN) (LP-1) (ZINC FINGER PROTEIN Z13).//3.0e-14:110:38//MUS MUSCULUS (MOUSE).//Q60821

[5204] F-PLACE1005108//METALLOTHIONEIN-III (MT-III) (GROWTH INHIBITORY FACTOR) (GIF).//0.41:35:34//BOS TAURUS (BOVINE).//P37359

[5205] F-PLACE100511//ATP SYNTHASE PROTEIN 8 (EC 3.6.1.34) (A6L) (CHARGERIN II).//1.0:29:41//RATTUS NORVEGICUS (RAT).//P11608

[5206] F-PLACE1005128//RABPHILIN-3A (FRAGMENT).//5.9e-05:95:36//MUS MUSCULUS (MOUSE).//P47708

[5207] F-PLACE1005146//FIBROBLAST GROWTH FACTOR INDUCIBLE PROTEIN 15 (FIN 15).//0.17:48:35//MUS MUSCULUS (MOUSE).//Q61075

[5208] F-PLACE1005162//!!!! ALU SUBFAMILY SB WARNING ENTRY !!!!//1.0e-31:60:76//HOMO SAPIENS (HUMAN).//P39189

[5209] F-PLACE1005176

[5210] F-PLACE1005181//HYPOTHETICAL 7 KD PROTEIN.//1.0:31:45//MEASLES VIRUS (STRAIN HALLE) (SUBACUTE SCLEROSE PANENCEPHALITIS VIRUS).//P06831

[5211] F-PLACE1005187//GLUCAN SYNTHASE-1 (EC 2.4.1.34) (1,3-BETA-GLUCAN SYNTHASE) (UDP-GLUCOSE-1,3-BETA-D-GLUCAN GLUCOSYLTRANSFERASE).//0.0025:58:34//NEUROSPORA CRASSA.//P38678

[5212] F-PLACE1005206//HYPOTHETICAL 10.7 KD PROTEIN.//0.34:57:42//VACCINIA VIRUS (STRAIN COPENHAGEN).//P20511

[5213] F-PLACE1005232//AMELOGENIN, Y ISOFORM PRECURSOR.//0.70:60:35//HOMO SAPIENS (HUMAN).//Q99218

[5214] F-PLACE1005243//SERINE/THREONINE PROTEIN KINASE PKPA (EC 2.7.1.-).//0.0017:114:27//PHYCOMYCES BLAKESLEEANUS.//Q01577

[5215] F-PLACE1005261//HYPOTHETICAL 90.8 KD PROTEIN T05H10.7 IN CHROMOSOME II.//0.2e-38:206:41//CAENORHABDITIS ELEGANS.//Q10003

[5216] F-PLACE1005266

[5217] F-PLACE1005277//PROTEIN GURKEN PRECURSOR.//0.58:95:29//DROSOPHILA MELANOGASTER (FRUIT FLY).//P42287

[5218] F-PLACE1005287//INNER CENTROMERE PROTEIN (INCENP).//2.0e-12:211:29//GALLUS GALLUS (CHICKEN).//P53352

[5219] F-PLACE1005305//GTP:AMP PHOSPHOTRANSFERASE MITOCHONDRIAL (EC 2.7.4.10) (AK3).1/ 1.8e-78:205:78//BOS TAURUS (BOVINE).//P08760

[5220] F-PLACE1005308/[WOUND-INDUCED BASIC PROTEIN.//0.99:40:40//PHASEOLUS VULGARIS (KIDNEY BEAN) (FRENCH BEAN).//Q09020

[5221] F-PLACE1005313//HYPOTHETICAL 8.7 KD PROTEIN IN LEUX-FECE INTERGENIC REGION (067).//0.15:36:41//ESCHERICHIA COLI.//P39355

[5222] F-PLACE1005327//DNA-BINDING P52/P100 COMPLEX, 100 KD SUBUNIT (FRAGMENTS).//1.0:19:52//HOMO SAPIENS (HUMAN).//P30808

[5223] F-PLACE1005331//BREAKPOINT CLUSTER REGION PROTEIN.//0.00021:98:35//HOMO SAPIENS (HUMAN).//P11274

[5224] F-PLACE1005335//IROQUOIS-CLASS HOMEODOMAIN PROTEIN IRX-3.//0.37:98:33//MUS MUSCULUS (MOUSE).//P81067

[5225] F-PLACE1005373//PSEUDOURIDYLATE SYNTHASE 4 (EC 4.2.1.70) (PSEUDOURIDINE SYNTHASE 4) (TRNA PSEUDOURIDINE 55 SYNTHASE) (PSI55 SYNTHASE) (PSEUDOURIDYLATE SYNTHASE) (URACIL HYDROLYASE).//0.010:96:28//SACCHAROMYCES CEREVISIAE (BAKER'S YEAST).//P48567

[5226] F-PLACE1005374

[5227] F-PLACE1005409

[5228] F-PLACE1005453//LICHENASE PRECURSOR (EC 3.2.1.73) (ENDO-BETA-1,3-1,4 GLUCANASE).//1.0:50:32//NICOTIANA PLUMBAGINIFOLIA (LEADWORT-LEAVED TOBACCO).//P07979

[5229] F-PLACE1005467//KERATIN, FEATHER (F-KER).//0.0095:42:35//LARUS NOVAE-HOLLANDIAE (SILVER GULL).//P02451

[5230] F-PLACE1005471//NADH-UBIQUINONE OXIDOREDUCTASE CHAIN 4L (EC 1.6.5.3).//0.23:49:32//PHYTOPHTHORA INFESTANS (POTATO LATE BLIGHT FUNGUS).//Q37598

[5231] F-PLACE1005477//HYPOTHETICAL PROTEIN ORF-1137.//9.6e-13:115:38//MUS MUSCULUS (MOUSE).//P1260

[5232] F-PLACE1005480//C-HORDEIN (CLONE PC HOR1-3) (FRAGMENT).//0.H97:33:30//HORDEUM VULGARE (BARLEY).//P17991

[5233] F-PLACE1005481//HUNCHBACK PROTEIN (FRAGMENT).//0.30:52:38//APIS MELLIFERA (HONEYBEE).//P31504

[5234] F-PLACE1005494//TRANSIENT-RECEPTOR-POTENTIAL PROTEIN.//3.9e-05:87:33//DROSOPHILA MELANOGASTER (FRUIT FLY).//P19334

[5235] F-PLACE1005502

[5236] F-PLACE1005526//IMMEDIATE-EARLY PROTEIN IE180.//4.6e-05:132:32//PSEUDORABIES VIRUS (STRAIN KAPLAN) (PRV).//P33479

[5237] F-PLACE1005528//!!!! ALU SUBFAMILY SX WARNING ENTRY !!!!//3.4e-09:31:74//HOMO SAPIENS (HUMAN).//P39195

[5238] F-PLACE1005530//HYPOTHETICAL 47.6 KD PROTEIN C16C10.5 IN CHROMOSOME III.//9.7e-50:148:58//CAENORHABDITIS ELEGANS.//Q09251

[5239] F-PLACE1005550//HYPOTHETICAL 40.2 KD PROTEIN K12H4.3 IN CHROMOSOME III.//3.0e-21:127:37//CAENORHABDITIS ELEGANS.//P34524

[5240] F-PLACE100SS54//CYTOCHROME B (EC 1.10.2.2) (FRAGMENT).//0.84:38:31//DIPODOMYS CALIFORNICUS (KANGAROO RAT).//P16359

[5241] F-PLACE1005557//60S RIBOSOMAL PROTEIN L27.//4.8e-09:60:48//CRYPTOCOCCUS NEOFORMANS (FILOBASIDIELLA NEOFORMANS).//P46288

[5242] F-PLACE1005574//ATP SYNTHASE PROTEIN 8 (EC 3.6.1.34) (A6L).//0.89:44:29//BOS TAURUS (BOVINE).//P03929

[5243] F-PLACE1005584//MALE SPECIFIC SPERM PROTEIN MST87F.//0.00030:33:48//DROSOPHILA MELANOGASTER (FRUIT FLY).//P08175

[5244] F-PLACE1005595//IMMEDIATE-EARLY PROTEIN IE180.//0.00048:162:30//PSEUDORABIES VIRUS (STRAIN INDIANA-FUNKHAUSER /BECKER) (PRV).//P1675

[5245] F-PLACE1005603//HIGH-MOBILITY-GROUP PROTEIN (NONHISTONE CHROMOSOMAL PROTEIN).//0.00034:83:30//TETRAHYMENA PYRIFORMIS.//P40625

[5246] F-PLACE1005611//DNAJ PROTEIN.//8.6e-20:108:48//CLOSTRIDIUM ACETOBUTYLICUM.//P30725

[5247] F-PLACE1005623//EXTRACELLULAR SIGNAL-REGULATED KINASE 5 (EC 2.7.1.-) (ERK5) (ERK4) (BMK1 KINASE).//0.80:116:31//HOMO SAPIENS (HUMAN).//Q13164

[5248] F-PLACE1005630//INTERLEUKIN-14 PRECURSOR (IL-14) (HIGH MOLECULAR WEIGHT B-CELL GROWTH FACTOR) (HMW-BCGF).//0.0024:74:39//HOMO SAPIENS (HUMAN).//P40222

[5249] F-PLACE1005639//EXTRACELLULAR MATRIX PROTEIN I (SECRETORY COMPONENT P85) (FRAGMENT).//0.72:18:61//RATTUS NORVEGICUS (RAT).//Q62894

[5250] F-PLACE1005646//RNA HELICASE-LIKE PROTEIN DB 10.//4.8e-29:172:45//NICOTIANA SYLVESTRIS (WOOD TOBACCO).//P46942

[5251] F-PLACE1005656//RIBONUCLEOSIDE-DIPHOSPHATE REDUCTASE M2 CHAIN (EC 1.17.4.1) (RIBONUCLEOTIDE REDUCTASE).//3.7e-64:133:75//MESOCRICETUS AURATUS (GOLDEN HAMSTER).//Q60561

[5252] F-PLACE1005666//CHLOROPLAST 50S RIBOSOMAL PROTEIN L28.//0.57:36:41//PORPHYRA PURPUREA.//P51224

[5253] F-PLACE1005698//HYPOTHETICAL PROTEIN IN SIGD 3′REGION (ORFC) (FRAGMENT).//0.50:61:29//BACILLUS SUBTILIS.//P40405

[5254] F-PLACE1005727//ANTER-SPECIFIC PROLINE-RICH PROTEIN APG (PROTEIN CEX) (FRAGMENT).//0.46:27:51//BRASSICA NAPUS (RAPE).//P40603

[5255] F-PLACE1005730//COLLAGEN ALPHA 1(I) CHAIN (FRAGMENT).//0.95:21:52//ORYCTOLAGUS CUNICULUS (RABBIT).//P02456

[5256] F-PLACE1005739//INTERFERON-GAMMA INDUCIBLE PROTEIN MG11.//3.4e-46:111:53//MUS MUSCULUS (MOUSE).//Q60710

[5257] F-PLACE1005755//HYPOTHETICAL 70.2 KD PROTEIN IN GSH1-CHS6 INTERGENIC REGION.//2.6e-12:66:51//SACCHAROMYCES CEREVISIAE (BAKER'S YEAST).//P42951

[5258] F-PLACE1005763//S-ACYL FATTY ACID SYNTHASE THIOESTERASE, MEDIUM CHAIN (EC 3.1.2.14) (THIOESTERASE II).//1.5e-26:69:57//RATTUS NORVEGICUS (RAT).//P08635

[5259] F-PLACE1005799//KERATIN, ULTRA HIGH-SULFUR MATRIX PROTEIN (UHS KERATIN).//0.028:96:32//HOMO SAPIENS (HUMAN).//P26371

[5260] F-PLACE1005802//PROTEIN PROSPERO.//0.86:64:42//DROSOPHILA MELANOGASTER (FRUIT FLY).//P29617

[5261] F-PLACE1005803//MYELOID DIFFERENTIATION PRIMARY RESPONSE PROTEIN MYD116.//1.0:95:25//MUS MUSCULUS (MOUSE).//P17564

[5262] F-PLACE1005804//PROCESSING ALPHA-1,2-MANNOSIDASE (EC 3.2.1.-) (ALPHA-1,2-MANNOSIDASE 1B).//2.8e-73:198:73//MUS MUSCULUS (MOUSE).//P39098

[5263] F-PLACE1005813//HYPOTHETICAL 49.0 KD PROTEIN IN NSP1-KAR2 INTERGENIC REGION.//0.022:78:38//SACCHAROMYCES CEREVISIAE (BAKER'S YEAST).//P47057

[5264] F-PLACE1005828//!!!! ALU SUBFAMILY SX WARNING ENTRY !!!!//1.8e-23:56:76//HOMO SAPIENS (HUMAN).//P39195

[5265] F-PLACE1005834//LATE CONTROL GENE B PROTEIN (GPB).//0.97:33:39//BACTERIOPHAGE 186.//P08711

[5266] F-PLACE1005845

[5267] F-PLACE1005850//!!!! ALU SUBFAMILY SQ WARNING ENTRY !!!!//5.5e-28:96:73//HOMO SAPIENS (HUMAN).//P39194

[5268] F-PLACE1005851

[5269] F-PLACE1005876//CLEAVAGE AND POLYADENYLATION SPECIFICITY FACTOR, 100 KD SUBUNIT (CPSF 100 KD SUBUNIT).//2.2e-99:155:95//BOS TAURUS (BOVINE).//Q10568

[5270] F-PLACE1005884

[5271] F-PLACE1005890//BEM46 PROTEIN (FRAGMENT).//1.8e-33:137:49//SCHIZOSACCHAROMYCES POMBE (FISSION YEAST).//P54069

[5272] F-PLACE1005898//NADH-UBIQUINONE OXIDOREDUCTASE MLRQ SUBUNIT (EC 1.6.5.3) (EC 1.6.99.3) (COMPLEX I-MLRQ) (CI-MLRQ).//0.77:58:34//HOMO SAPIENS (HUMAN).//O00483

[5273] F-PLACE1005921//AIGI PROTEIN.//1.4e-23:165:38//ARABIDOPSIS THALIANA (MOUSE-EAR CRESS).//P54120

[5274] F-PLACE1005923//HYPOTHETICAL 22.4 KD PROTEIN (ORF 16).//0.90:118:28//PARAMECIUM TETRAURELIA.//P15617

[5275] F-PLACE1005925//HYPOTHETICAL GENE 30 PROTEIN.//0.94:57:29//HERPESVIRUS SAIMIR1 (STRAIN 11).//Q00100

[5276] F-PLACE1005932//EXTENSIN PRECURSOR (CELL WALL HYDROXYPROLINE-RICH GLYCOPROTEIN).//0.42:128:32//NICOTIANA TABACUM (COMMON TOBACCO).//P13983

[5277] F-PLACE1005934//DNA-DIRECTED RNA POLYMERASE II LARGEST SUBUNIT (EC 2.7.7.6) (RPBI) (FRAGMENT).//0.40:76:35//CRICETULUS GRISEUS (CHINESE HAMSTER).//P11414

[5278] F-PLACE1005936//TAT PROTEIN (TRANSACTIVATING REGULATORY PROTEIN).//0.50:15:66//HUMAN IMMUNODEFICIENCY VIRUS TYPE I (CLONE 12) (HIV-1).//P04326

[5279] F-PLACE1005951//EXTENSIN PRECURSOR (CELL WALL HYDROXYPROLINE-RICH GLYCOPROTEIN).//0.0025:135:32//NICOTIANA TABACUM (COMMON TOBACCO).//P13983

[5280] F-PLACE1005953//HIGH POTENTIAL IRON-SULFUR PROTEIN (HIPIP).//0.64:57:33//RHODOFERAX FERMENTANS.//P80882

[5281] F-PLACE1005955//HYPOTHETICAL 54.2 KD PROTEIN IN ERP5-ORC6 INTERGENIC REGION.//1.0e-32:110:50//SACCHAROMYCES CEREVISIAE (BAKER'S YEAST).//P38821

[5282] F-PLACE1005966//TACHYPLESIN II PRECURSOR.//0.97:31:35//TACHYPLEUS TRIDENTATUS (JAPANESE HORSESHOE CRAB).//P14214

[5283] F-PLACE1005968//GATA FACTOR SREP.//0.17:52:40//PENICILLIUM CHRYSOGENUM.//Q92259

[5284] F-PLACE1005990//CELL PATTERN FORMATION-ASSOCIATED PROTEIN.//0.36:55:36//EMERICELLA NIDULANS (ASPERGILLUS NIDULANS).//P36011

[5285] F-PLACE1006002//!!!! ALU SUBFAMILY SC WARNING ENTRY !!!!//1.5e-36:102:75//HOMO SAPIENS (HUMAN).//P39192

[5286] F-PLACE1006003//HYPOTHETICAL 6.8 KD PROTEIN IN COX3-NADI INTERGENIC REGION (ORF 61).//1.0:22:40//MARCHANTIA POLYMORPHA (LIVERWORT).//P38473

[5287] F-PLACE1006011//POLY [ADP-RIBOSE] POLYMERASE (EC 2.4.2.30) (PARP) (ADPRT) (NAD(+) ADP- RIBOSYLTRANSFERASE) (POLY[ADP-RIBOSE] SYNTHETASE).//2.8e-21:163:36//ARABIDOPSIS THALIANA (MOUSE-EAR CRESS).//Q11207

[5288] F-PLACE1006017//!!!! ALU SUBFAMILY SC WARNING ENTRY !!!!//1.1e-10:43:67//HOMO SAPIENS (HUMAN).//P39192

[5289] F-PLACE1006037//VITELLOGENIN 1 PRECURSOR (VTG1) [CONTAINS: LIPOVITELLIN 1 (LV1); PHOSVITIN (PV); LIPOVITELLIN 2 (LV2)].//0.00019:123:37//FUNDULUS HETEROCLITUS (KILLIFISH) (MUMMICHOG).//Q90508

[5290] F-PLACE1006040//CAMP-REGULATED PHOSPHOPROTEIN 19 (ARPP-19).//3.2e-40:110:76//HOMO SAPIENS (HUMAN).//P56211

[5291] F-PLACE1006076//BOWMAN-BIRK TYPE PROTEINASE INHIBITOR A-II.//0.99:30:40//ARACHIS HYPOGAEA (PEANUT).//P01066

[5292] F-PLACE1006119//IMPORTIN BETA-3 SUBUNIT (KARYOPHERIN BETA-3 SUBUNIT) (RAN-BINDING PROTEIN 5).//8.8e-94:218:76//HOMO SAPIENS (HUMAN).//O00410

[5293] F-PLACE1006129//A-AGGLUTININ ATTACHMENT SUBUNIT PRECURSOR.//0.00092:228:26//SACCHAROMYCES CEREVISIAE (BAKER'S YEAST).//P32323

[5294] F-PLACE1006139//HYPOTHETICAL 52.9 KD PROTEIN IN SAP155-YMR31 INTERGENIC REGION.//5.9e-55:128:50//SACCHAROMYCES CEREVISIAE (BAKER'S YEAST).//P43616

[5295] F-PLACE1006143//!!!! ALU SUBFAMILY SQ WARNING ENTRY !!!!//1.4e-25:107:63//HOMO SAPIENS (HUMAN).//P39194

[5296] F-PLACE1006157//E-SELECTIN PRECURSOR (ENDOTHELIAL LEUKOCYTE ADHESION MOLECULE 1) (ELAM-1) (LEUKOCYTE-ENDOTHELIAL CELL ADHESION MOLECULE 2) (LECAM2) (CD62E).//1.3e-21:168:32//SUS SCROFA (PIG).//P98110

[5297] F-PLACE1006159//COLD SHOCK INDUCED PROTEIN TIR1 PRECURSOR (SERINE-RICH PROTEIN 1).//0.46:98:29//SACCHAROMYCES CEREVISIAE (BAKER'S YEAST).//P10863

[5298] F-PLACE1006164//NADH-UBIQUINONE OXIDOREDUCTASE CHAIN 4L (EC 1.6.5.3).//0.70:28:42//ARTEMIA SALINA (BRINE SHRIMP).//P19049

[5299] F-PLACE1006167//GLUCOAMYLASE S1/S2 PRECURSOR (EC 3.2.1.3) (GLUCAN 1,4-ALPHA- GLUCOSIDASE) (1,4-ALPHA-D-GLUCAN GLUCOHYDROLASE).//8.9e-05:167:32//SACCHAROMYCES CEREVISIAE (BAKER'S YEAST).//P08640

[5300] F-PLACE1006170//ALPHA-ADAPTIN C (CLATHRIN ASSEMBLY PROTEIN COMPLEX 2 ALPHA-C LARGE CHAIN) (100 KD COATED VESICLE PROTEIN C) (PLASMA MEMBRANE ADAPTOR HA2/AP2 ADAPTIN ALPHA C SUBUNIT).//1.1e-67:157:88//MUS MUSCULUS (MOUSE).//P17427

[5301] F-PLACE1006187G 1/S-SPECIFIC CYCLIN E.//5.6e-75:224:62//HOMO SAPIENS (HUMAN).//P24864

[5302] F-PLACE1006195//T-RELATED PROTEIN (TRP) (BRACHYENTERON PROTEIN).//0.99:177:29//DROSOPHILA MELANOGASTER (FRUIT FLY).//P55965

[5303] F-PLACE1006196//PUTATIVE ATP-DEPENDENT RNA HELICASE C12C2.06.//2.0e-33:183:46//SCHIZOSACCHAROMYCES POMBE (FISSION YEAST).//Q09747

[5304] F-PLACE1006205

[5305] F-PLACE1006223//SPERM MITOCHONDRIAL CAPSULE SELENOPROTEIN (MCS).//0.00015:22:50//MUS MUSCULUS (MOUSE).//P15265

[5306] F-PLACE1006225//VIRION INFECTIVITY FACTOR (SOR PROTEIN).//1.0:63:34//HUMAN IMMUNODEFICIENCY VIRUS TYPE I (NDK ISOLATE) (HIV-1).//P18805

[5307] F-PLACE1006236

[5308] F-PLACE1006239//60S ACIDIC RIBOSOMAL PROTEIN P2 (FRAGMENT).//0.48:23:52//ARABIDOPSIS THALIANA (MOUSE-EAR CRESS).//P51407

[5309] F-PLACE1006246//CMP-SIALIC ACID TRANSPORTER (CMP-SIA-TR).//0.012:84:30//MUS MUSCULUS (MOUSE).//Q61420

[5310] F-PLACE1006248//140 KD NUCLEOLAR PHOSPHOPROTEIN (NOPP 140).//0.017:203:22//RATTUS NORVEGICUS (RAT).//P41777

[5311] F-PLACE1006262//L-FUCULOSE PHOSPHATE ALDOLASE (EC 4.1.2.17).//0.84:25:52//HAEMOPHILUS INFLUENZAE.//P44777

[5312] F-PLACE1006288

[5313] F-PLACE1006318//CYSTEINE-RICH ANTIFUNGAL PROTEIN 1 (AFP1) (M1).//1.0:29:48//SINAPIS ALBA (WHITE MUSTARD) (BRASSICA HIRTA).//P30231

[5314] F-PLACE1006325//CYCLIN-DEPENDENT KINASE INHIBITOR IC (CYCLIN-DEPENDENT KINASE INHIBITOR P57) (P57KIP2).//0.99:97:32//HOMO SAPIENS (HUMAN).//P49918

[5315] F-PLACE1006335//PROLINE-RICH PEPTIDE P-B.//0.56:19:52//HOMO SAPIENS (HUMAN).//P02814

[5316] F-PLACE1006357

[5317] F-PLACE1006360

[5318] F-PLACE1006368//NUF1 PROTEIN (SPINDLE POLY BODY SPACER PROTEIN SPC110).//0.0057:122:31//SACCHAROMYCES CEREVISIAE (BAKER'S YEAST).//P32380

[5319] F-PLACE1006371//ARS BINDING PROTEIN 1.i/0.00030:142:30//SCHIZOSACCHAROMYCES POMBE (FISSION YEAST).//P49777

[5320] F-PLACE1006382//NEUROTOXIN V.//0.85:28:39//ANDROCTONUS MAURETANICUS MAURETANICUS (SCORPION).//P01482

[5321] F-PLACE1006385//HYPOTHETICAL 45.1 KD PROTEIN IN RPS5-ZMS1 INTERGENIC REGION.//3.1e-35:165:47//SACCHAROMYCES CEREVISIAE (BAKER'S YEAST).//P47160

[5322] F-PLACE1006412//LINE-1 REVERSE TRANSCRIPTASE HOMOLOG.//4.3e-08:40:47//HOMO SAPIENS (HUMAN).//P08547

[5323] F-PLACE1006414//FORKHEAD-RELATED TRANSCRIPTION FACTOR 4 (FREAC-4).//3.8e-05:123:39//HOMO SAPIENS (HUMAN).//Q16676

[5324] F-PLACE1006438//ZINC FINGER PROTEIN 165.//2.8e-21:76:64//HOMO SAPIENS (HUMAN).//P49910

[5325] F-PLACE1006445//SUPPRESSOR OF HAIRY WING PROTEIN.//0.058:99:29//DROSOPHILA VIRILIS (FRUIT FLY).//Q08876

[5326] F-PLACE1006469//ACETYL-COENZYME A SYNTHETASE (EC 6.2.1.1) (ACETATE-COA LIGASE) (ACYL- ACTIVATING ENZYME).//1.8e-64:177:50//ESCHERICHIA COLI.//P27550

[5327] F-PLACE1006470

[5328] F-PLACE1006482//TRANSCRIPTION FACTOR MAFF.//2.0e-47:120:85//GALLUS GALLUS (CHICKEN).//Q90595

[5329] F-PLACE1006488//SIGNAL RECOGNITION PARTICLE 68 KD PROTEIN (SRP68).//1.8e-85:173:95//CANIS FAMILIARIS (DOG).//Q00004

[5330] F-PLACE1006492//VERY HYPOTHETICAL 11.2 KD PROTEIN C56F8.13 IN CHROMOSOME I.//0.75:32:56//SCHIZOSACCHAROMYCES POMBE (FISSION YEAST).//Q10261

[5331] F-PLACE1006506

[5332] F-PLACE1006521

[5333] F-PLACE1006531//HYPOTHETICAL 115.4 KD PROTEIN ZK757.3 IN CHROMOSOME III.//1.3e-53:167:61//CAENORHABDITIS ELEGANS.//P34681

[5334] F-PLACE1006534

[5335] F-PLACE1006540

[5336] F-PLACE1006552//MYOSIN HEAVY CHAIN, CLONE 203 (FRAGMENT).//1.3e-07:242:23//HYDRA ATTENUATA (HYDRA) (HYDRA VULGARIS).//P39922

[5337] F-PLACE1006598//!!!! ALU SUBFAMILY SBI WARNING ENTRY !!!!//0.17:43:51//HOMO SAPIENS (HUMAN).//P39190

[5338] F-PLACE1006615//ACROSIN PRECURSOR (EC 3.4.21.10).//3.6e-05:66:43//ORYCTOLAGUS CUNICULUS (RABBIT).//P48038

[5339] F-PLACE1006617//HYPOTHETICAL 14.6 KD PROTEIN (READING FRAME C) (REPLICATION).//1.0:74:29//STAPHYLOCOCCUS AUREUS.//P03861

[5340] F-PLACE1006626//HYPOTHETICAL HELICASE K12H4.8 IN CHROMOSOME III.//2.9e-10:73:46//CAENORHABDITIS ELEGANS.//P34529

[5341] F-PLACE1006629//HYPOTHETICAL PROTEIN BB0410.//1.0:23:43//BORRELIA BURGDORFER1 (LYME DISEASE SPIROCHETE).//O51371

[5342] F-PLACE1006640

[5343] F-PLACE1006673

[5344] F-PLACE1006678//COLLAGEN ALPHA 1(I) CHAIN (FRAGMENT).//1.0:36:41//ORYCTOLAGUS CUNICULUS (RABBIT).//P02456

[5345] F-PLACE1006704//BROAD-COMPLEX CORE-TNT1-Q1-Z1 PROTEIN (BRCORE-TNT1-Q1-Z1) [CONTAINS: BROAD-COMPLEX CORE-Q1-Z1 PROTEIN].//0.00062:157:26//DROSOPHILA MELANOGASTER (FRUIT FLY).//Q01295

[5346] F-PLACE1006731//RIBOFLAVIN KINASE (EC 2.7.1.26) (FLAVOKINASE)/FMN ADENYLYLTRANSFERASE (EC 2.7.7.2) (FAD PYROPHOSPHORYLASE) (FAD SYNTHETASE).//1.3e-07:127:36//CORYNEBACTERIUM AMMONIAGENES (BREVIBACTERIUM AMMONIAGENES).//Q59263

[5347] F-PLACE1006754//CARCINOEMBRYONIC ANTIGEN CGM1 PRECURSOR (CD66D ANTIGEN).//1.9e-19:78:53//HOMO SAPIENS (HUMAN).//P40198

[5348] F-PLACE1006760//COLLAGEN ALPHA 1 (III) CHAIN (FRAGMENT).//0.21:107:30//RATTUS NORVEGICUS (RAT).//P13941

[5349] F-PLACE1006779//CYTOTOXIN 5 (CTX V).//1.0:20:30//NAJA MOSSAMBICA (MOZAMBIQUE COBRA).//P25517

[5350] F-PLACE1006782//ZINC FINGER PROTEIN 1.//0.00052:178:28//CANDIDA ALBICANS (YEAST).//P28875

[5351] F-PLACE1006792

[5352] F-PLACE1006795//VOLTAGE-GATED POTASSIUM CHANNEL PROTEIN SHAW (SHAW2).//1.0:80:30//DROSOPHILA MELANOGASTER (FRUIT FLY).//P17972

[5353] F-PLACE1006800//HYPOTHETICAL 9.4 KD PROTEIN.//0.99:62:33//VACCINIA VIRUS (STRAIN COPENHAGEN).//P20569

[5354] F-PLACE1006805

[5355] F-PLACE1006815//HYPOTHETICAL PROTEIN UL61.//0.038:146:32//HUMAN CYTOMEGALOVIRUS (STRAIN AD169).//P16818

[5356] F-PLACE1006819//LINE-1 REVERSE TRANSCRIPTASE HOMOLOG.//7.3e-98:239:76//HOMO SAPIENS (HUMAN).//P08547

[5357] F-PLACE1006829//UBIQUITIN CARBOXYL-TERMINAL HYDROLASE 8 (EC 3.1.2.15) (UBIQUITIN THIOLESTERASE 8) (UBIQUITIN-SPECIFIC PROCESSING PROTEASE 8) (DEUBIQUITINATING ENZYME 8).//0.061:34:58//SACCHAROMYCES CEREVISIAE (BAKER'S YEAST).//P50102

[5358] F-PLACE1006860

[5359] F-PLACE1006867

[5360] F-PLACE1006878//HYPOTHETICAL 8.2 KD PROTEIN IN MOBL 3′REGION (ORF 3).//0.85:27:37//THIOBACILLUS FERROOXIDANS.//P20087

[5361] F-PLACE1006883//VITAMIN D3 RECEPTOR (VDR) (1,25-DIHYDROXYVITAMIN D3 RECEPTOR).//0.78:51:37//MUS MUSCULUS (MOUSE).//P48281

[5362] F-PLACE1006901//HYPOTHETICAL 8.1 KD PROTEIN.//0.99:55:23//VACCINIA VIRUS (STRAIN COPENHAGEN).//P20567

[5363] F-PLACE1006904//MATING-TYPE LOCUS ALLELE BI PROTEIN.//0.95:86:26//USTILAGO MAYDIS (SMUT FUNGUS).//P22015

[5364] F-PLACE1006917//HYPOTHETICAL 40.9 KD PROTEIN C08BI 1.5 IN CHROMOSOME II.//6.9e-15:101:45//CAENORHABDITIS ELEGANS.//Q09442

[5365] F-PLACE1006932//HISTIDINE-RICH, METAL BINDING POLYPEPTIDE.//0.089:28:39//HELICOBACTER PYLORI (CAMPYLOBACTER PYLORI).//Q48251

[5366] F-PLACE1006935//HYPOTHETICAL 95.2 KD PROTEIN R144.6 IN CHROMOSOME III.//0.93:35:48//CAENORHABDITIS ELEGANS.//Q10000

[5367] F-PLACE1006956//TRANSCRIPTION INITIATION FACTOR TFIID 135 KD SUBUNIT (TAFII-135) (TAFII 135) (TAFII-130) (TAFII 130).//0.00079:122:36//HOMO SAPIENS (HUMAN).//O00268

[5368] F-PLACE1006958//OSMOTIC STRESS PROTEIN 94 (HEAT SHOCK 70-RELATED PROTEIN APG-1).//8.8e-70:140:98//MUS MUSCULUS (MOUSE).//P48722

[5369] F-PLACE1006961

[5370] F-PLACE1006962//APOLIPOPROTEIN C-1 PRECURSOR (APO-C1).//11.0:25:40//PAPIO HAMADRYAS (HAMADRYAS BABOON).M/P34929

[5371] F-PLACE1006966//HYPOTHETICAL 49.1 KD PROTEIN IN SSB2-SPX18 INTERGENIC REGION.//0.6e-47:221:45//SACCHAROMYCES CEREVISIAE (BAKER'S YEAST).//P40160

[5372] F-PLACE1006989//HYPOTHETICAL 13.1 KD HIT-LIKE PROTEIN IN P37 5′REGION.//0.15:46:32//MYCOPLASMA HYORHINIS.//P32083

[5373] F-PLACE1007014//36 KD NUCLEOLAR PROTEIN HNP36 (DELAYED-EARLY RESPONSE PROTEIN 12) (DER12).//3.4e-09:120:29//HOMO SAPIENS (HUMAN).//Q14542

[5374] F-PLACE1007021//!!!! ALU SUBFAMILY J WARNING ENTRY !!!!//0.00046:42:59//HOMO SAPIENS (HUMAN).//P39188

[5375] F-PLACE1007045//HYPOTHETICAL PROTEIN ORF-1137.//8.1e-14:115:35//MUS MUSCULUS (MOUSE).//P1260

[5376] F-PLACE1007053//SMALL PROLINE RICH PROTEIN II (SPR-II) (CLONE 930).//0.038:48:39//HOMO SAPIENS (HUMAN).//P22531

[5377] F-PLACE1007068//PROTEIN-LYSINE 6-OXIDASE PRECURSOR (EC 1.4.3.13) (LYSYL OXIDASE).//0.0040:113:39//GALLUS GALLUS (CHICKEN).//Q05063

[5378] F-PLACE1007097//HYPOTHETICAL 6.8 KD PROTEIN IN HE65-PK2 INTERGENIC REGION.//0.97:47:29//AUTOGRAPHA CALIFORNICA NUCLEAR POLYHEDROSIS VIRUS (ACMNPV).//P41663

[5379] F-PLACE1007105//HYPOTHETICAL 83.6 KD PROTEIN C15A10.10 IN CHROMOSOME I.//2.9e-33:219:37//SCHIZOSACCHAROMYCES POMBE (FISSION YEAST).//O13730

[5380] F-PLACE1007111

[5381] F-PLACE1007112//HYPOTHETICAL 9.2 KD PROTEIN.//0.47:75:28//ESCHERICHIA COLI.//P03853

[5382] F-PLACE1007132//!!!! ALU SUBFAMILY J WARNING ENTRY !!!!//1.8e-11:56:57//HOMO SAPIENS (HUMAN).//P39188

[5383] F-PLACE1007140//GAR2 PROTEIN.//0.72:185:24//SCHIZOSACCHAROMYCES POMBE (FISSION YEAST).//P41891

[5384] F-PLACE1007178//HYPOTHETICAL 8.5 KD PROTEIN CY274.40C.//0.97:79:30//MYCOBACTERIUM TUBERCULOSIS.//Q10826

[5385] F-PLACE1007226//HYPOTHETICAL 42.6 KD PROTEIN IN GSHB-ANSB INTERGENIC REGION (0378).//1.9e-15:123:32//ESCHERICHIA COLI.//P52062

[5386] F-PLACE1007238//MYOSIN HEAVY CHAIN IB (MYOSIN HEAVY CHAIN IL).//5.5e-10:98:44//ACANTHAMOEBA CASTELLANII (AMOEBA).//P19706

[5387] F-PLACE1007239//TRANSCRIPTION ELONGATION FACTOR S-II (TRANSCRIPTION ELONGATION FACTOR A).//3.9e- 19:96:57//HOMO SAPIENS (HUMAN).//P23193

[5388] F-PLACE1007242//GUANINE NUCLEOTIDE DISSOClATION STIMULATOR RALGDS FORM B (RALGEF).//1.0:132:30//RATTUS NORVEGICUS (RAT).//Q03386

[5389] F-PLACE1007243//HYPOTHETICAL 53.3 KD PROTEIN IN HXT8-CAN1 INTERGENIC REGION.//0.041:114:29//SACCHAROMYCES CEREVISIAE (BAKER'S YEAST).//P39981

[5390] F-PLACE1007257//DIAPHANOUS PROTEIN.//1.3e-42:205:46//DROSOPHILA MELANOGASTER (FRUIT FLY).//P48608

[5391] F-PLACE1007274//CADMIUM-METALLOTHIONEIN (CD-MT).//0.054:60:30//HELIX POMATIA (ROMAN SNAIL) (EDIBLE SNAIL).//P33187

[5392] F-PLACE1007276//BETA-DEFENSIN I PRECURSOR (RHBD-1) (DEFENSIN, BETA 1).//1.0:42:28//SUS SCROFA (PIG).//O62697

[5393] F-PLACE1007282//OUTER CAPSID PROTEIN VP4 (HEMAGGLUTININ) (OUTER LAYER PROTEIN VP4) [CONTAINS: OUTER CAPSID PROTEINS VP5 AND VP8].//0.070:126:27//HUMAN ROTAVIRUS (SEROTYPE 4/STRAIN ST. THOMAS 3).//P11200

[5394] F-PLACE1007286

[5395] F-PLACE1007301//HYPOTHETICAL PROTEIN KIAA0168.//0.042:61:39//HOMO SAPIENS (HUMAN).//P50749

[5396] F-PLACE1007317

[5397] F-PLACE1007342//PROTEIN GRAINY-HEAD (DNA-BINDING PROTEIN ELF-1) (ELEMENT I-BINDING ACTIVITY) (TRANSCRIPTION FACTOR NTF-1).//1.7e-06:77:36//DROSOPHILA MELANOGASTER (FRUIT FLY).//P13002

[5398] F-PLACE1007346//TRANSCRIPTION INTERMEDIARY FACTOR 1-BETA (KRAB-A INTERACTING PROTEIN) (KRIP-1).//0.0026:147:27//MUS MUSCULUS (MOUSE).//Q62318

[5399] F-PLACE1007367//!!!! ALU SUBFAMILY SB WARNING ENTRY !!!!//1.3e-37:110:76//HOMO SAPIENS (HUMAN).//P39189

[5400] F-PLACE1007375//PHORBOL ESTER/DIACYLGLYCEROL-BINDING PROTEIN UNC-13.//4.7e-07:71:39//CAENORHABDITIS ELEGANS.//P27715

[5401] F-PLACE1007386//HYPOTHETICAL 7.6 KD PROTEIN IN FLO1-PHO11 INTERGENIC REGION.//0.74:48:29//SACCHAROMYCES CEREVISIAE (BAKER'S YEAST).//P39561

[5402] F-PLACE1007402//TRANSCRIPTIONAL REGULATORY PROTEIN ENTR (ENTERICIDIN R).//0.99:63:36//CITROBACTER FREUNDII.//O69280

[5403] F-PLACE1007409//WHITE PROTEIN.//7.9e-38:179:41//DROSOPHILA MELANOGASTER (FRUIT FLY).//P10090

[5404] F-PLACE1007416//DIPEPTIDYL PEPTIDASE IV (EC 3.4.14.5) (DPP IV) (T-CELL ACTIVATION ANTIGEN CD26) (TP103) (ADENOSINE DEAMINASE COMPLEXING PROTEIN-2) (ADABP).//0.031:159:23//HOMO SAPIENS (HUMAN).//P27487

[5405] F-PLACE1007450//ZINC FINGER PROTEIN 39 (ZINC FINGER PROTEIN KOX27) (FRAGMENT).//0.023:36:50//HOMO SAPIENS (HUMAN).//P17038

[5406] F-PLACE1007452//HYPOTHETICAL 22.1 KD PROTEIN IN CCP1-METI INTERGENIC REGION.//2.2e-18:85:54//SACCHAROMYCES CEREVISIAE (BAKER'S YEAST).//P36149

[5407] F-PLACE1007454//PHOTOSYSTEM II REACTION CENTRE N PROTEIN.//0.66:13:53//CHLAMYDOMONAS REINHARDTII.//Q06480

[5408] F-PLACE1007460//ATP SYNTHASE PROTEIN 8 (EC 3.6.1.34) (A6L).//0.93:45:33//SUS SCROFA (PIG).//Q35914

[5409] F-PLACE1007478//RETROVIRUS-RELATED POL POLYPROTEIN [CONTAINS: REVERSE TRANSCRIPTASE (EC 2.7.7.49); ENDONUCLEASE].//5.3e-08:50:56//MUS MUSCULUS (MOUSE).//P1369

[5410] F-PLACE1007484//HYPOTHETICAL 6.8 KD PROTEIN IN REPLICATION ORIGIN REGION.//0.87:43:37//ESCHERICHIA COLI.//P03849

[5411] F-PLACE1007488//PUTATIVE RHO/RAC GUANINE NUCLEOTIDE EXCHANGE FACTOR (RHO/RAC GEF) (FACIOGENITAL DYSPLASIA PROTEIN).//1.2e-25:202:31//HOMO SAPIENS (HUMAN).//P98174

[5412] F-PLACE1007507//HYPOTHETICAL 16.0 KD PROTEIN IN TAF60-G4P1 INTERGENIC REGION.//0.12:128:25//SACCHAROMYCES CEREVISIAE (BAKER'S YEAST).//P53139

[5413] F-PLACE1007511//KERATIN, TYPE I CYTOSKELETAL 19 (CYTOKERATIN 19) (K19) (CK 19).//2.1e-45:209:48//BOS TAURUS (BOVINE).//P08728

[5414] F-PLACE1007524//HYPOTHETICAL 9.2 KD PROTEIN.//0.74:80:30//VACCINIA VIRUS (STRAIN COPENHAGEN).//P20550

[5415] F-PLACE1007525

[5416] F-PLACE1007537//MYOTROPHIN (V-1 PROTEIN) (GRANULE CELL DIFFERENTIATION PROTEIN).//0.045:92:30//MUS MUSCULUS (MOUSE), AND RATTUS NORVEGICUS (RAT).//P80144

[5417] F-PLACE1007544//IMMEDIATE-EARLY PROTEIN IE180.//1.5e-07:59:50//PSEUDORABIES VIRUS (STRAIN KAPLAN) (PRV).//P33479

[5418] F-PLACE1007547//HYPOTHETICAL 97.1 KD PROTEIN R05D3.4 IN CHROMOSOME III.//2. Se-16:188:34//CAENORHABDITIS ELEGANS.//P34537

[5419] F-PLACE1007557

[5420] F-PLACE1007583//PROLINE RICH 33 KD EXTENSIN-RELATED PROTEIN PRECURSOR (FRAGMENT).//0.98:72:33//DAUCUS CAROTA (CARROT).//P06600

[5421] F-PLACE1007598//ZINC FINGER PROTEIN 92 (ZINC FINGER PROTEIN HTF12) (FRAGMENT).//1.7e-11:88:43//HOMO SAPIENS (HUMAN).//Q03936

[5422] F-PLACE1007618//ANION EXCHANGE PROTEIN 2 (NON-ERYTHROID BAND 3-LIKE PROTEIN) (B3RP).//0.19:109:27//MUS MUSCULUS (MOUSE).//P13808

[5423] F-PLACE1007621//PHOSPHATE REGULON SENSOR PROTEIN PHOR (EC 2.7.3.-) (FRAGMENT).//0.98:34:41//PSEUDOMONAS AERUGINOSA.//P23621

[5424] F-PLACE1007632//COLLAGEN ALPHA 2(I) CHAIN (FRAGMENT).//0.70:110:34//BOS TAURUS (BOVINE).//P02465

[5425] F-PLACE1007645//ATP SYNTHASE PROTEIN 8 (EC 3.6.1.34) (A6L).//0.99:20:45//STRUTHIO CAMELUS (OSTRICH).//O21401

[5426] F-PLACE1007649//GLUCOAMYLASE S1/S2 PRECURSOR (EC 3.2.1.3) (GLUCAN 1,4-ALPHA- GLUCOSIDASE) (1,4-ALPHA-D-GLUCAN GLUCOHYDROLASE).//8.1e-06:197:26//SACCHAROMYCES CEREVISIAE (BAKER'S YEAST).//P08640

[5427] F-PLACE1007677//!!!! ALU SUBFAMILY SC WARNING ENTRY !!!!//1.0:47:46//HOMO SAPIENS (HUMAN).//P39192

[5428] F-PLACE1007688//LA PROTEIN HOMOLOG (LA RIBONUCLEOPROTEIN) (LA AUTOANTIGEN HOMOLOG).//2.7e-06:116:28//AEDES ALBOPICTUS (FOREST DAY MOSQUITO).//Q26457

[5429] F-PLACE1007690//SPERM PROTAMINE P1.//0.12:26:50//TACHYGLOSSUS ACULEATUS ACULEATUS (AUSTRALIAN ECHIDNA).//P35311

[5430] F-PLACE1007697//SPERM PROTAMINE P1.//0.19:34:52//DIDELPHIS MARSUPIALIS VIRGINIANA (NORTH AMERICAN OPOSSUM), AND MONODELPHIS DOMESTICA (SHORT-TAILED GREY OPOSSUM).//P35305

[5431] F-PLACE1007705//BIOH PROTEIN.//0.015:97:29//ESCHERICHIA COLI.//P13001

[5432] F-PLACE1007706//HYPOTHETICAL 112.2 KD PROTEIN IN TIF35-NPL3 INTERGENIC REGION (ORF 1).//5.3e-55:190:56//SACCHAROMYCES CEREVISIAE (BAKER'S YEAST).//P32898

[5433] F-PLACE1007725

[5434] F-PLACE1007729//PROTEASE (EC 3.4.23.-).//1.8e-21:136:42//MOUSE MAMMARY TUMOR VIRUS (STRAIN BR6).//P10271

[5435] F-PLACE1007730//SALIVARY PROLINE-RICH PROTEIN II-I (FRAGMENT).//0.0031:77:40//HOMO SAPIENS (HUMAN).//P81489

[5436] F-PLACE1007737//!!!! ALU SUBFAMILY SX WARNING ENTRY !!!!//0.78:39:56//HOMO SAPIENS (HUMAN).//P39195

[5437] F-PLACE1007743

[5438] F-PLACE1007746//RRP5 PROTEIN HOMOLOG (KIAA0185) (FRAGMENT).//0.0066:168:25//HOMO SAPIENS (HUMAN).//Q14690

[5439] F-PLACE1007791//KRUEPPEL PROTEIN (FRAGMENT).//0.62:17:41//LITHOBIUS FORFICATUS.//Q01872

[5440] F-PLACE1007807//HYPOTHETICAL 6.4 KD PROTEIN IN BLTR-SPOIIIC INTERGENIC REGION.//1.0:40:30//BACILLUS SUBTILIS.//P54446

[5441] F-PLACE1007810//ANTHOPLEURIN A (TOXIN AP-A).//0.79:28:46//ANTHOPLEURA XANTHOGRAMMICA (GIANT GREEN SEA ANEMONE).//P01530

[5442] F-PLACE1007829//SPORE COAT PROTEIN G.//1.0:65:38//BACILLUS SUBTILIS.//P39801

[5443] F-PLACE1007843

[5444] F-PLACE1007846//LINE-1 REVERSE TRANSCRIPTASE HOMOLOG.//1.5e-32:37:94//HOMO SAPIENS (HUMAN).//P08547

[5445] F-PLACE1007852//RHO-RELATED GTP-BINDING PROTEIN RHOH (GTP-BINDING PROTEIN TTF).//8.7e-05:138:30//HOMO SAPIENS (HUMAN).//Q15669

[5446] F-PLACE1007858//ANAPHASE SPINDLE ELONGATION PROTEIN.//0.0039:127:25//SACCHAROMYCES CEREVISIAE (BAKER'S YEAST).//P50275

[5447] F-PLACE1007866

[5448] F-PLACE1007877

[5449] F-PLACE1007897//CD44 ANTIGEN PRECURSOR (PHAGOCYTIC GLYCOPROTEIN I) (PGP-1) (HUTCH-1) (EXTRACELLULAR MATRIX RECEPTOR-III) (ECMR-III) (GP90 LYMPHOCYTE HOMING/ADHESION RECEPTOR) (HERMES ANTIGEN) (HYALURONATE RECEPTOR) (HEPARAN SULFATE PROTEOGLYCAN) (HAM I ANTIGEN).//0.44:128:28//MESOCRICETUS AURATUS (GOLDEN HAMSTER).//Q60522

[5450] F-PLACE1007908//!!!! ALU SUBFAMILY SC WARNING ENTRY !!!!//5.5e-28:61:65//HOMO SAPIENS (HUMAN).//P39192

[5451] F-PLACE1007946//HYPOTHETICAL MERCURIC RESISTANCE PROTEIN MERC.//0.84:48:37//PSEUDOMONAS AERUGINOSA.//P04139

[5452] F-PLACE1007954//HYPOTHETICAL 45.5 KD PROTEIN IN FIGI-GIPI INTERGENIC REGION.//0.00070:96:29//SACCHAROMYCES CEREVISIAE (BAKER'S YEAST).//P38226

[5453] F-PLACE1007955//HYPOTHETICAL 84.3 KD PROTEIN ZK945.10 IN CHROMOSOME II.//0.00027:255:23//CAENORHABDITIS ELEGANS.//Q09625

[5454] F-PLACE1007958//HIGH-AFFINITY CAMP-SPECIFIC 3′,5′-CYCLIC PHOSPHODIESTERASE (EC 3.1.4.17).//1.7e-09:127:30//MUS MUSCULUS (MOUSE).//P70453

[5455] F-PLACE1007969//HYPOTHETICAL 24.1 KD PROTEIN IN LEF4-P33 INTERGENIC REGION.//2.4e-05:104:37//AUTOGRAPHA CALIFORNICA NUCLEAR POLYHEDROSIS VIRUS (ACMNPV).//P41479

[5456] F-PLACE1007990//SPERM PROTAMINE P1 .//0.78:36:47//ORNITHORHYNCHUS ANATINUS (DUCKBILL PLATYPUS).//P35307

[5457] F-PLACE1008000//CHANNEL ASSOCIATED PROTEIN OF SYNAPSE-110 (CHAPSYN-110) (SYNAPTIC DENSITY PROTEIN PSD-93).//1.2e-116:128:39//RATTUS NORVEGICUS (RAT).//Q63622

[5458] F-PLACE1008002

[5459] F-PLACE1008044//NUCLEAR PORE COMPLEX PROTEIN NUP 107 (NUCLEOPORIN NUP 107) (107 KD NUCLEOPORIN) (P105).//3.9e-106:208:93//RATTUS NORVEGICUS (RAT).//P52590

[5460] F-PLACE1008045//COLLAGEN ALPHA 1(XII) CHAIN (FRAGMENTS).//3.9e-09:49:53//BOS TAURUS (BOVINE).//P25508

[5461] F-PLACE1008080//RNA REPLICASE POLYPROTEIN (EC 2.7.7.48).//0.00025:100:27//EGGPLANT MOSAIC VIRUS.//P20126

[5462] F-PLACE1008095//PROTOPORPHYRINOGEN OXIDASE (EC 1.3.3.4) (PPO).//0.90:74:25//MYCOBACTERIUM TUBERCULOSIS.//O53230

[5463] F-PLACE1008111//HYPOTHETICAL PROTEIN MJECS 12.//0.30:38:42//METHANOCOCCUS JANNASCHII.//Q60311

[5464] F-PLACE1008122//PEA2 PROTEIN (PPF2 PROTEIN).//0.0085:117:34//SACCHAROMYCES CEREVISIAE (BAKER'S YEAST).//P40091

[5465] F-PLACE1008129//PROCOLLAGEN ALPHA 2(I) CHAIN PRECURSOR (FRAGMENTS).//1.8e-06:154:36//GALLUS GALLUS (CHICKEN).//P02467

[5466] F-PLACE1008132//HYPOTHETICAL 127.4 KD PROTEIN F07F6.4 IN CHROMOSOME III.//1.4e-13:227:36//CAENORHABDITIS ELEGANS.//Q09531

[5467] F-PLACE1008177//TRICHOHYALIN.//2.7e-10:230:26//OVIS ARIES (SHEEP).//P22793

[5468] F-PLACE1008181

[5469] F-PLACE1008198//SKIN SECRETORY PROTEIN XP2 PRECURSOR (APEG PROTEIN).//0.00044:121:34//XENOPUS LAEVIS (AFRICAN CLAWED FROG).//P17437

[5470] F-PLACE1008201//ZINC FINGER PROTEIN ZFMSA 12A.//3.0e-05:82:37//MICROPTERUS SALMOIDES (LARGEMOUTH BASS).//P38621

[5471] F-PLACE1008209//METALLOTHIONEIN-I (MT-I).//0.95:39:35//CERCOPITHECUS AETHIOPS (GREEN MONKEY) (GRIVET).//P02797

[5472] F-PLACE1008231//PROCYCLIC FORM SPECIFIC POLYPEPTIDE B1-ALPHA PRECURSOR (PROCYCLIN) (PARP).//0.028:23:52//TRYPANOSOMA BRUCEI BRUCEI.//P08469

[5473] F-PLACE1008244//VEGETATIBLE INCOMPATIBILITY PROTEIN HET-E-1.//2.2e-23:148:38//PODOSPORA ANSERINA.//Q00808

[5474] F-PLACE1008273//COATOMER GAMMA SUBUNIT (GAMMA-COAT PROTEIN) (GAMMA-COP).//1.1e-97:222:81//BOS TAURUS (BOVINE).//P53620

[5475] F-PLACE1008275//DNA REPAIR PROTEIN REVI (EC 2.7.7.-).//5.8e-20:161:37//SACCHAROMYCES CEREVISIAE (BAKER'S YEAST).//P12689

[5476] F-PLACE1008280//LINE-1 REVERSE TRANSCRIPTASE HOMOLOG.//6.1e-23:124:42//HOMO SAPIENS (HUMAN).//P08547

[5477] F-PLACE1008309//HYPOTHETICAL 98.3 KD PROTEIN C9G1.06C IN CHROMOSOME I.//0.47:99:37//SCHIZOSACCHAROMYCES POMBE (FISSION YEAST).//O14302

[5478] F-PLACE1008329//PUTATIVE Z PROTEIN.//0.73:52:28//OVIS ARIES (SHEEP).//P08105

[5479] F-PLACE1008330//!!!! ALU SUBFAMILY SQ WARNING ENTRY !!!!//9.0e-37:75:81//HOMO SAPIENS (HUMAN).//P39194

[5480] F-PLACE1008331//!!!! ALU SUBFAMILY J WARNING ENTRY !!!!//4.1e-08:70:50//HOMO SAPIENS (HUMAN).//P39188

[5481] F-PLACE1008356//FRUIT PROTEIN PKIWI501.//0.0037:148:29//ACTINIDIA CHINENSIS (KIWI) (YANGTAO).//P43393

[5482] F-PLACE1008368//RING CANAL PROTEIN (KELCH PROTEIN).//3.5e-18:205:30//DROSOPHILA MELANOGASTER (FRUIT FLY).//Q04652

[5483] F-PLACE1008369

[5484] F-PLACE1008392

[5485] F-PLACE1008398//GENE 33 POLYPEPTIDE.//1.5e-102:225:84//RATTUS NORVEGICUS (RAT).//P05432

[5486] F-PLACE1008401//PROLINE-RICH PROTEIN MP-3 (FRAGMENT).//2.9e-08:186:34//MUS MUSCULUS (MOUSE).//P05143

[5487] F-PLACE1008402//GENERAL VESICULAR TRANSPORT FACTOR P115 (TRANSCYTOSIS ASSOCIATED PROTEIN) (TAP).//9.4e-105:207:98//BOS TAURUS (BOVINE).//P41541

[5488] F-PLACE1008405

[5489] F-PLACE1008424//PROTEIN UL56.//1.0:65:33//HERPES SIMPLEX VIRUS (TYPE 1/STRAIN HFEM).//P36297

[5490] F-PLACE1008426//MYOSIN HEAVY CHAIN, NON-MUSCLE (ZIPPER PROTEIN) (MYOSIN II).//4.4e-05:185:28//DROSOPHILA MELANOGASTER (FRUIT FLY).//Q99323

[5491] F-PLACE1008429//NEURONAL AXONAL MEMBRANE PROTEIN NAP-22.//0.00054:172:25//RATTUS NORVEGICUS (RAT).//Q05175

[5492] F-PLACE1008437//HYPOTHETICAL 115.4 KD PROTEIN ZK757.3 IN CHROMOSOME III.//1.9e-23:226:34//CAENORHABDITIS ELEGANS.//P34681

[5493] F-PLACE1008455//DNA-BINDING PROTEIN (AGNOPROTEIN).//0.97:23:52//BUDGERIGAR FLEDGLING DISEASE VIRUS (BFDV).//P13893

[5494] F-PLACE1008457//!!!! ALU SUBFAMILY J WARNING ENTRY !!!!//2.1e-12:89:47//HOMO SAPIENS (HUMAN).//P39188

[5495] F-PLACE1008465//ZINC FINGER PROTEIN 31 (ZINC FINGER PROTEIN KOX29) (FRAGMENT).//0.00017:23:43//HOMO SAPIENS (HUMAN).//P17040

[5496] F-PLACE1008488//HYPOTHETICAL PROTEIN UL61.//9.1e-05:204:30//HUMAN CYTOMEGALOVIRUS (STRAIN AD169).//P16818

[5497] F-PLACE1008524//HOMEOBOX PROTEIN HLX1 (HOMEOBOX PROTEIN HB24).//0.95:74:36//HOMO SAPIENS (HUMAN).//Q14774

[5498] F-PLACE1008531//!!!! ALU SUBFAMILY SC WARNING ENTRY !!!!//3.1e-05:86:45//HOMO SAPIENS (HUMAN).//P39192

[5499] F-PLACE1008532//HYPOTHETICAL 36.4 KD PROTEIN IN SMPl-MBAl INTERGENIC REGION.//3 .9e-21:62:451/SACCHAROMYCES CEREVISIAE (BAKER'S YEAST).//P38298

[5500] F-PLACE1008533//HYPOTHETICAL 86.2 KD PROTEIN C4G8.04 IN CHROMOSOME I.//3.5e-06:118:29//SCHIZOSACCHAROMYCES POMBE (FISSION YEAST).//Q09830

[5501] F-PLACE1008568//NEURONATIN.//0.046:34:52//HOMO SAPIENS (HUMAN).//Q16517

[5502] F-PLACE1008584//HUNCHBACK PROTEIN (FRAGMENT).//0.94:30:43//LITHOBIUS FORFICATUS.//Q02030

[5503] F-PLACE1008603//NUCLEAR PORE COMPLEX PROTEIN NUP 155 (NUCLEOPORIN NUP155) (155 KD NUCLEOPORIN) (P140).//3.9e-123:224:96//RATTUS NORVEGICUS (RAT).//P37199

[5504] F-PLACE1008621//B-CELL GROWTH FACTOR PRECURSOR (BCGF-12 KD).//5.0e-05:31:67//HOMO SAPIENS (HUMAN).//P20931

[5505] F-PLACE1008625//DISAGREGIN (PLATELET AGGREGATION ACTIVATION INHIBITOR).//0.87:17:52//ORNITHODOROS MOUBATA (SOFT TICK).//P36235

[5506] F-PLACE1008626//METALLOTHIONEIN-I (MT-I).//0.77:33:36//SCYLLA SERRATA (MUD CRAB).//P02805

[5507] F-PLACE1008627//METALLOTHIONEIN-III (MT-III) (GROWTH INHIBITORY FACTOR) (GIF) (GIFB).//0.14:44:31//HOMO SAPIENS (HUMAN).//P25713

[5508] F-PLACE1008629

[5509] F-PLACE1008630//PROTAMINE Z3 (SCYLLIORHININE Z3).//0.78:33:36//SCYLIORHINUS CANICULA (SPOTTED DOGFISH) (SPOTTED CATSHARK).//P30258

[5510] F-PLACE1008643//INTER-ALPHA-TRYPSIN INHIBITOR HEAVY CHAIN H4 PRECURSOR (ITI HEAVY CHAIN H4) (INTER-ALPHA-TRYPSIN INHIBITOR FAMILY HEAVY CHAIN-RELATED PROTEIN) (PLASMA KALLIKREIN SENSITIVE GLYCOPROTEIN 120) (PK-120).//1.7e-30:220:41//HOMO SAPIENS (HUMAN).//Q14624

[5511] F-PLACE1008650//PP1/PP2A PHOSPHATASES PLEIOTROPIC REGULATOR PRLI.//2.5e-10:106:31//ARABIDOPSIS THALIANA (MOUSE-EAR CRESS).//Q42384

[5512] F-PLACE1008693//BOWMAN-BIRK TYPE PROTEINASE INHIBITOR (MSTI).//1.0:36:38//MEDICAGO SCUTELLATA (SNAIL MEDIC).//P80321

[5513] F-PLACE1008696//NADH-UBIQUINONE OXIDOREDUCTASE 23 KD SUBUNIT PRECURSOR (EC 1.6.5.3) (EC 1.6.99.3) (COMPLEX I-23 KD) (CI-23 KD) (TYKY SUBUNIT).//4.8e-14:47:80//HOMO SAPIENS (HUMAN).//O00217

[5514] F-PLACE1008715//HYPOTHETICAL 13.4 KD PROTEIN IN ACT5-YCK1 INTERGENIC REGION.//0.66:105:24//SACCHAROMYCES CEREVISIAE (BAKER'S YEAST).//P38834

[5515] F-PLACE1008748//HYPOTHETICAL 57.5 KD PROTEIN IN VMA7-RPS25A INTERGENIC REGION.//0.10:178:26//SACCHAROMYCES CEREVISIAE (BAKER'S YEAST).//P53214

[5516] F-PLACE1008757//HYPOTHETICAL 10.1 KD PROTEIN IN RHSD-GCL INTERGENIC REGION (ORFD3).//0.60:44:34//ESCHERICHIA COLI.//P33669

[5517] F-PLACE1008790//IMPORTIN ALPHA-6 SUBUNIT (KARYOPHERIN ALPHA-6 SUBUNIT) (IMPORTIN ALPHA S2).//3.0e-69:191:80//MUS MUSCULUS (MOUSE).//O35345

[5518] F-PLACE1008798//BACTERIOCIN LACTOBIN A.//1.0:34:41//LACTOBACILLUS AMYLOVORUS.//P80696

[5519] F-PLACE1008807//LINE-1 REVERSE TRANSCRIPTASE HOMOLOG.//0.91:77:36//HOMO SAPIENS (HUMAN).//P08547

[5520] F-PLACE1008808//REC I PROTEIN.//0.45:39:30//USTILAGO MAYDIS (SMUT FUNGUS).//P14746

[5521] F-PLACE1008813

[5522] F-PLACE1008851//VERY HYPOTHETICAL 11.8 KD PROTEIN IN KTR3-DUR1,2 INTERGENIC REGION.//1.0:62:30//SACCHAROMYCES CEREVISIAE (BAKER'S YEAST).//P38309

[5523] F-PLACE1008854//HYPOTHETICAL 182.0 KD PROTEIN IN NMD5-HOM6 INTERGENIC REGION.//1.0:82:26//SACCHAROMYCES CEREVISIAE (BAKER'S YEAST).//P47170

[5524] F-PLACE1008867//PATATIN T5 PRECURSOR (POTATO TUBER PROTEIN).//0.65:61:36//SOLANUM TUBEROSUM (POTATO).//P15478

[5525] F-PLACE1008887//LINE-1 REVERSE TRANSCRIPTASE HOMOLOG.//1.5e-56:180:54//NYCTICEBUS COUCANG (SLOW LORIS).//P08548

[5526] F-PLACE1008902

[5527] F-PLACE1008920

[5528] F-PLACE1008925//HYPOTHETICAL 41.2 KD PROTEIN IN GAPA-RND INTERGENIC REGION.//0.90:77:33//ESCHERICHIA COLI.//P76242

[5529] F-PLACE1008934//HYPOTHETICAL PROTEIN IN ADHS 5′REGION (ORF3) (FRAGMENT).//0.14:77:45//GLUCONOBACTER SUBOXYDANS.//O05543

[5530] F-PLACE1008941//ZINC FINGER PROTEIN 141.//1.1e-17:45:95//HOMO SAPIENS (HUMAN).//Q15928

[5531] F-PLACE1008947//MAJOR CENTROMERE AUTOANTIGEN B (CENTROMERE PROTEIN B) (CENP-B).//4.1e-14:136:39//MUS MUSCULUS (MOUSE).//P27790

[5532] F-PLACE1009020//ANNEXIN VII (SYNEXIN) (FRAGMENT).//0.74:37:48//BOS TAURUS (BOVINE).//P20072

[5533] F-PLACE1009027//NADH-UBIQUINONE OXIDOREDUCTASE CHAIN 4L (EC 1.6.5.3).//0.39:57:36//BALAENOPTERA MUSCULUS (BLUE WHALE).//P41301

[5534] F-PLACE1009039

[5535] F-PLACE1009045//HYPOTHETICAL 9.5 KD PROTEIN IN SPEA-METK INTERGENIC REGION (F83).//0.48:32:43//ESCHERICHIA COLI.//P46879

[5536] F-PLACE1009048

[5537] F-PLACE1009050

[5538] F-PLACE1009060//HYPOTHETICAL 98.3 KD PROTEIN RIOE12.1 IN CHROMOSOME III.//4.9e-23:244:31//CAENORHABDITIS ELEGANS.//P34552

[5539] F-PLACE1009090//50S RIBOSOMAL PROTEIN L35.//1.0:27:51//MYCOPLASMA GENITALIUM.//P47439

[5540] F-PLACE1009091

[5541] F-PLACE1009094//NEL-LIKE PROTEIN (FRAGMENT).//3.6e-15:180:30//HOMO SAPIENS (HUMAN).//Q92832

[5542] F-PLACE1009099//ZINC FINGER PROTEIN 27 (ZFP-27) (MKR4 PROTEIN) (FRAGMENT).//1.4e-94:228:71//MUS MUSCULUS (MOUSE).//P10077

[5543] F-PLACE1009110//HIRUDIN HVI (BUFRUDIN).//1.0:49:34//HIRUDINARIA MANILLENSIS (BUFFALO LEECH).//P81492

[5544] F-PLACE1009111//!!!! ALU SUBFAMILY SX WARNING ENTRY !!!!//1.4e-05:30:83//HOMO SAPIENS (HUMAN).//P39195

[5545] F-PLACE1009113//ANNEXIN VII (SYNEXIN) (FRAGMENT).//0.032:40:52//BOS TAURUS (BOVINE).//P20072

[5546] F-PLACE1009130//HYPOTHETICAL PROTEIN KIAA0032.//3.3e-37:214:38//HOMO SAPIENS (HUMAN).//Q15034

[5547] F-PLACE1009150//!!!! ALU SUBFAMILY SX WARNING ENTRY !!!!//1.6e-32:56:76//HOMO SAPIENS (HUMAN).//P39195

[5548] F-PLACE1009155//!!!! ALU SUBFAMILY SQ WARNING ENTRY !!!!//1.2e-17:101:57//HOMO SAPIENS (HUMAN).//P39194

[5549] F-PLACE1009158//HYPOTHETICAL PROTEIN HKRFX (J11).//0.0058:73:42//HUMAN CYTOMEGALOVIRUS (STRAIN AD169).//P09711

[5550] F-PLACE1009166//CYTOSOLIC PURINE 5′-NUCLEOTIDASE (EC 3.1.3.5).//0.0086:96:30//HOMO SAPIENS (HUMAN).//P49902

[5551] F-PLACE1009172//HYPOTHETICAL 8.7 KD PROTEIN IN GAPA-RND INTERGENIC REGION.//1.0:19:52//ESCHERICHIA COLI.//P76246

[5552] F-PLACE1009174//!!!! ALU SUBFAMILY SQ WARNING ENTRY !!!!//3.1e-17:47:82//HOMO SAPIENS (HUMAN).//P39194

[5553] F-PLACE1009183

[5554] F-PLACE1009186//HYPOTHETICAL 11.4 KD PROTEIN C13G6.04 IN CHROMOSOME I.//0.019:62:24//SCHIZOSACCHAROMYCES POMBE (FISSION YEAST).//Q09783

[5555] F-PLACE1009190//PALMITOYL-COA HYDROLASE (EC 3.1.2.2) (LONG-CHAIN FATTY-ACYL-COA HYDROLASE) (FRAGMENT).//0.027:53:28//RATTUS NORVEGICUS (RAT).//P80250

[5556] F-PLACE1009200//!!!! ALU SUBFAMILY SQ WARNING ENTRY !!!!//5.4e-28:84:71//HOMO SAPIENS (HUMAN).//P39194

[5557] F-PLACE1009230//!!!! ALU SUBFAMILY SB WARNING ENTRY !!!!//2.8e-12:50:74//HOMO SAPIENS (HUMAN).//P39189

[5558] F-PLACE1009246//UBIQUINOL-CYTOCHROME C REDUCTASE COMPLEX 7.8 KD PROTEIN (EC 1.10.2.2) (MITOCHONDRIAL HINGE PROTEIN) (CR7).//1.0:17:52//SOLANUM TUBEROSUM (POTATO).//P48504

[5559] F-PLACE1009298//VACUOLAR PROTEIN SORTING-ASSOCIATED PROTEIN VPS35.//6.6e-41:177:53//SACCHAROMYCES CEREVISIAE (BAKER'S YEAST).//P34110

[5560] F-PLACE1009308//KERATIN, ULTRA HIGH-SULFUR MATRIX PROTEIN (UHS KERATIN).//0.00034:108:33//HOMO SAPIENS (HUMAN).//P26371

[5561] F-PLACE1009319//PRESYNAPTIC DENSITY PROTEIN 95 (PSD-95).//5.3e-16:84:50//HOMO SAPIENS (HUMAN).//P78352

[5562] F-PLACE1009328//LINE-1 REVERSE TRANSCRIPTASE HOMOLOG.//6.9e-82:263:67//HOMO SAPIENS (HUMAN).//P08547

[5563] F-PLACE1009335//60S RIBOSOMAL PROTEIN L32.//0.95:71:36//HOMO SAPIENS (HUMAN), MUS MUSCULUS (MOUSE), AND RATTUS NORVEGICUS (RAT).//P02433

[5564] F-PLACE1009338//TRANSCRIPTION FACTOR HES-5 (HAIRY AND ENHANCER OF SPLIT 5).//0.90:42:40//MUS MUSCULUS (MOUSE).//P70120

[5565] F-PLACE1009368//BASIC PROLINE-RICH PEPTIDE IB-1.//0.013:33:48//HOMO SAPIENS (HUMAN).//P04281

[5566] F-PLACE1009375//HYPOTHETICAL 88.1 KD PROTEIN K02D10.1 IN CHROMOSOME III.//0.0022:135:21//CAENORHABDITIS ELEGANS.//P34492

[5567] F-PLACE1009388//!!!! ALU SUBFAMILY SX WARNING ENTRY !!!!//4.8e-22:73:65//HOMO SAPIENS (HUMAN).//P39195

[5568] F-PLACE1009398//ZINC FINGER PROTEIN 84 (ZINC FINGER PROTEIN HPF2).//8.1e-83:223:65//HOMO SAPIENS (HUMAN).//P51523

[5569] F-PLACE1009404//GLUTENIN, HIGH MOLECULAR WEIGHT SUBUNIT PW212 PRECURSOR.//0.047:145:29//TRITICUM AESTIVUM (WHEAT).//P08489

[5570] F-PLACE1009410//TOXIN C 13S1 CI PRECURSOR.//0.22:21:47//DENDROASPIS ANGUSTICEPS (EASTERN GREEN MAMBA).//P18329

[5571] F-PLACE1009434//NADH-UBIQUINONE OXIDOREDUCTASE SUBUNIT K (EC 1.6.5.3) (FRAGMENT).//0.81:61:29//ANTHOCEROS FORMOSAE.//Q31791

[5572] F-PLACE1009443//SPLICEOSOME ASSOCIATED PROTEIN 62 (SAP 62) (SF3A66).//9.1e-05:93:32//MUS MUSCULUS (MOUSE).//Q62203

[5573] F-PLACE1009444//PHOSPHATIDYLINOSITOL 4-KINASE ALPHA (EC 2.7.1.67) (PI4-KINASE) (PTDINS-4-KINASE) (PI4K-ALPHA).//6.4e-15:41:97//HOMO SAPIENS (HUMAN).//P42356

[5574] F-PLACE1009459//HYPOTHETICAL 42.3 KD PROTEIN C12G12.11C IN CHROMOSOME I.//0.0011:119:31//SCHIZOSACCHAROMYCES POMBE (FISSION YEAST).//Q09874

[5575] F-PLACE1009468//PHOSPHOLIPASE A-2-ACTIVATING PROTEIN (PLAP).//4.2e-34:101:75//RATTUS NORVEGICUS (RAT).//P54319

[5576] F-PLACE1009476//DNA-BINDING P52/P100 COMPLEX, 100 KD SUBUNIT (FRAGMENTS).//0.086:21:52//HOMO SAPIENS (HUMAN).//P30808

[5577] F-PLACE1009477

[5578] F-PLACE1009493//HYPOTHETICAL 127.3 KD PROTEIN B0416.1 IN CHROMOSOME X.//1.4e-18:138:39//CAENORHABDITIS ELEGANS.//Q11069

[5579] F-PLACE1009524//ARF NUCLEOTIDE-BINDING SITE OPENER (ARNO PROTEIN) (ARF EXCHANGE FACTOR).//9.4e-80:155:85//HOMO SAPIENS (HUMAN).//Q99418

[5580] F-PLACE1009539//GTP-BINDING NUCLEAR PROTEIN RAN/TC4.//1.0:76:26//GIARDIA LAMBLIA (GIARDIA INTESTINALIS).//P38543

[5581] F-PLACE1009542//!!!! ALU SUBFAMILY J WARNING ENTRY !!!!//0.00016:31:77//HOMO SAPIENS (HUMAN).//P39188

[5582] F-PLACE1009571//ATP SYNTHASE B CHAIN (EC 3.6.1.34) (SUBUNIT I).//0.88:116:29//STREPTOCOCCUS PNEUMONIAE.//Q59952

[5583] F-PLACE1009581H50S RIBOSOMAL PROTEIN L32.//0.00023:37:51//RHODOBACTER CAPSULATUS (RHODOPSEUDOMONAS CAPSULATA).//P30788

[5584] F-PLACE1009595

[5585] F-PLACE1009596//HYPOTHETICAL 40.4 KD TRP-ASP REPEATS CONTAINING PROTEIN C14B 1.4 IN CHROMOSOME III.//2.1e-36:116:49//CAENORHABDITIS ELEGANS.//Q17963

[5586] F-PLACE1009607//!!!! ALU SUBFAMILY J WARNING ENTRY !!!!!//1.8e-43:73:69//HOMO SAPIENS (HUMAN).//P39188

[5587] F-PLACE1009613

[5588] F-PLACE1009621//TRANSCRIPTION FACTOR BTF3 HOMOLOG 2.//0.91:29:44//HOMO SAPIENS (HUMAN).//Q13891

[5589] F-PLACE1009622//MATERNAL EFFECT PROTEIN STAUFEN.//1.3e-22:132:47//DROSOPHILA MELANOGASTER (FRUIT FLY).//P25159

[5590] F-PLACE1009637//HYPOTHETICAL 18.1 KD PROTEIN IN CFXA 3′REGION.//0.30:28:57//BACTEROIDES VULGATUS.//P30905

[5591] F-PLACE1009639//LIPASE MODULATOR PRECURSOR (LIPASE HELPER PROTEIN).//0.23:79:31//PSEUDOMONAS AERUGINOSA.//Q04591

[5592] F-PLACE1009659//MEMBRANE-ASSOCIATED PROTEIN HEM-2 (BRAIN PROTEIN H19) (MH 19) (FRAGMENT).//3.9e-126:227:96//MUS MUSCULUS (MOUSE).//P28660

[5593] F-PLACE1009665//IG KAPPA CHAIN V-I REGION (HAU).//0.52:89:35//HOMO SAPIENS (HUMAN).//P01600

[5594] F-PLACE1009670//CYCLOMALTODEXTRIN GLUCANOTRANSFERASE PRECURSOR (EC 2.4.1.19) (CYCLODEXTRIN-GLYCOSYLTRANSFERASE) (CGTASE).//0.16:114:29//PAENIBACILLUS MACERANS (BACILLUS MACERANS).//P31835

[5595] F-PLACE1009708//HYPOTHETICAL 143.3 KD TRP-ASP REPEATS CONTAINING PROTEIN C12G12.13C IN CHROMOSOME I.//9.6e-19:156:36//SCHIZOSACCHAROMYCES POMBE (FISSION YEAST).//Q09876

[5596] F-PLACE1009721//MSF1 PROTEIN.//7.7e-23:176:33//SACCHAROMYCES CEREVISIAE (BAKER'S YEAST).//P35200

[5597] F-PLACE1009731//AIG 1 PROTEIN.//1.1e-09:91:43//ARABIDOPSIS THALIANA (MOUSE-EAR CRESS).//P54120

[5598] F-PLACE1009763//HYPOTHETICAL 48.9 KD PROTEIN C24H6.12C IN CHROMOSOME I.//8.3e-42:171:51//SCHIZOSACCHAROMYCES POMBE (FISSION YEAST).//Q09765

[5599] F-PLACE1009794//C-HORDEIN (CLONE PC HOR1-3) (FRAGMENT).//0.99:36:33//HORDEUM VULGARE (BARLEY).//P17991

[5600] F-PLACE1009798//HYPOTHETICAL PROTEIN C22F3.14C IN CHROMOSOME I (FRAGMENT).//2.6e-34:191:38//SCHIZOSACCHAROMYCES POMBE (FISSION YEAST).//Q09779

[5601] F-PLACE1009845//WEB1 PROTEIN (PROTEIN TRANSPORT PROTEIN SEC31).//2.2e-19:190:33//SACCHAROMYCES CEREVISIAE (BAKER'S YEAST).//P38968

[5602] F-PLACE1009861//CATHEPSIN B PRECURSOR (EC 3.4.22.1).//4.4e-20:171:33//BOS TAURUS (BOVINE).//P07688

[5603] F-PLACE1009879//HYPOTHETICAL 8.7 KD PROTEIN IN RPL22-RPL23 INTERGENIC REGION (ORF70).//0.99:30:33//ASTASIA LONGA (EUGLENOPHYCEAN ALGA).//P34779

[5604] F-PLACE1009886

[5605] F-PLACE1009888//NONSTRUCTURAL POLYPROTEIN [CONTAINS: NONSTRUCTURAL PROTEIN NSP4] (FRAGMENT).//1.0:33:42//WESTERN EQUINE ENCEPHALITIS VIRUS.//P13896

[5606] F-PLACE1009908//HYPOTHETICAL GTP-BINDING PROTEIN C3F10.16C IN CHROMOSOME I.//3.1e-42:205:46//SCHIZOSACCHAROMYCES POMBE (FISSION YEAST).//Q10190

[5607] F-PLACE1009921

[5608] F-PLACE1009924//ATP SYNTHASE A CHAIN (EC 3.6.1.34) (PROTEIN 6).//0.70:128:29//TRYPANOSOMA BRUCEI BRUCEI.//P24499

[5609] F-PLACE1009925//ATP SYNTHASE D CHAIN, MITOCHONDRIAL (EC 3.6.1.34).//0.99:111:27//SACCHAROMYCES CEREVISIAE (BAKER'S YEAST).//P30902

[5610] F-PLACE1009935//HYPOTHETICAL PROTEIN MJ0258.//0.063:75:32//METHANOCOCCUS JANNASCHII.//Q57706

[5611] F-PLACE1009947//NEUROGRANIN (NG) (P17) (B-50 IMMUNOREACTIVE C-KINASE SUBSTRATE) (BICKS) (FRAGMENT).//0.33:51:45//BOS TAURUS (BOVINE).//P35722

[5612] F-PLACE1009971//MIPP PROTEIN (MURINE IAP-PROMOTED PLACENTA-EXPRESSED PROTEIN).//0.022:84:27//MUS MUSCULUS (MOUSE).//P28575

[5613] F-PLACE1009992//BONE MORPHOGENETIC PROTEIN I PRECURSOR (EC 3.4.24.-) (BMP-1).//0.00011:35:51//HOMO SAPIENS (HUMAN).//P13497

[5614] F-PLACE1009995//TROPOMYOSIN, SMOOTH MUSCLE/FIBROBLAST CTM1.//0.052:185:22//CIONA INTESTINALIS.//Q07068

[5615] F-PLACE1009997//TRANSCRIPTION ELONGATION FACTOR S-II (RNA POLYMERASE II ELONGATION FACTOR DMS-II) (TFIIS).//0.68:98:28//DROSOPHILA MELANOGASTER (FRUIT FLY).//P20232

[5616] F-PLACE1010023//HYPOTHETICAL 83.8 KD PROTEIN C27F2.7 IN CHROMOSOME III.//6.6e-06:111:32//CAENORHABDITIS ELEGANS.//QI8262

[5617] F-PLACE1010031//HYPOTHETICAL 24.1 KD PROTEIN IN LEF4-P33 INTERGENIC REGION.//0.0024:72:33//AUTOGRAPHA CALIFORNICA NUCLEAR POLYHEDROSIS VIRUS (ACMNPV).//P41479

[5618] F-PLACE1010053//HYPOTHETICAL PROTEIN H10593.//0.83:24:45//HAEMOPHILUS INFLUENZAE.//P44022

[5619] F-PLACE1010069

[5620] F-PLACE1010074//VACUOLAR PROTEIN SORTING-ASSOCIATED PROTEIN VPS5.//0.00027:192:28//SACCHAROMYCES CEREVISIAE (BAKER'S YEAST).//Q92331

[5621] F-PLACE1010076//HUNCHBACK PROTEIN (FRAGMENT).//0.80:39:30//SCIARA COPROPHILA (FUNGUS GNAT).//Q01790

[5622] F-PLACE1010083//RHO-GAP HEMATOPOIETIC PROTEIN C1 (P115) (KIAA0131).//2.7e-48:177:46//HOMO SAPIENS (HUMAN).//P98171

[5623] F-PLACE1010089//UBIQUITIN CARBOXYL-TERMINAL HYDROLASE 11 (EC 3.1.2.15) (UBIQUITIN THIOLESTERASE 11) (UBIQUITIN-SPECIFIC PROCESSING PROTEASE 13) (DEUBIQUITINATING ENZYME 11) (KIAA0055).//7.9e-07:55:43//HOMO SAPIENS (HUMAN).//P40818

[5624] F-PLACE1010096//100 KD PROTEIN (EC 6.3.2.-).//1.0e-107:232:90//RATTUS NORVEGICUS (RAT).//Q62671

[5625] F-PLACE1010102//DNA-DIRECTED RNA POLYMERASE SUBUNIT N (EC 2.7.7.6).//1.0:33:45//METHANOCOCCUS JANNASCHII.//Q57649

[5626] F-PLACE1010105//RING CANAL PROTEIN (KELCH PROTEIN).//1.2e-47:200:46//DROSOPHILA MELANOGASTER (FRUIT FLY).//Q04652

[5627] F-PLACE1010106//RETROVIRUS-RELATED POL POLYPROTEIN [CONTAIN S: REVERSE TRANSCRIPTASE (EC 2.7.7.49); ENDONUCLEASE].//1.2e-14:94:41//MUS MUSCULUS (MOUSE).//P11369

[5628] F-PLACE1010134//HYPOTHETICAL 171.5 KD HELICASE IN NUT1-ARO2 INTERGENIC REGION.//4.0e-28:78:76//SACCHAROMYCES CEREVISIAE (BAKER'S YEAST).//P53115

[5629] F-PLACE1010148//GAR2 PROTEIN.//2.6e-05:180:26//SCHIZOSACCHAROMYCES POMBE (FISSION YEAST).//P41891

[5630] F-PLACE1010152//UBIQUITIN CARBOXYL-TERMINAL HYDROLASE 64E (EC 3.1.2.15) (UBIQUITIN THIOLESTERASE 64E) (UBIQUITIN-SPECIFIC PROCESSING PROTEASE 64E) (DEUBIQUITINATING ENZYME 64E).//2.1e-59:227:54//DROSOPHILA MELANOGASTER (FRUIT FLY).//Q24574

[5631] F-PLACE1010181//MALE SPECIFIC SPERM PROTEIN MST87F.//0.39:12:58//DROSOPHILA MELANOGASTER (FRUIT FLY).//P08175

[5632] F-PLACE1010194//SPLICING FACTOR, ARGININE/SERINE-RICH 2 (SPLICING FACTOR SC35) (SC-35) (SPLICING COMPONENT, 35 KD) (PR264 PROTEIN).//1.4e-07:95:43//GALLUS GALLUS (CHICKEN).//P30352

[5633] F-PLACE1010202//TRISTETRAPROLINE (TTP) (TISI IA) (TISI 1) (ZFP-36).//0.094:109:29//RATTUS NORVEGICUS (RAT).//P47973

[5634] F-PLACE1010231//LANTIBIOTIC NISIN A PRECURSOR.//0.99:42:35//LACTOCOCCUS LACTIS (SUBSP. LACTIS) (STREPTOCOCCUS LACTIS).//P13068

[5635] F-PLACE1010261//SEGREGATION DISTORTER PROTEIN.//6.0e-71:201:62//DROSOPHILA MELANOGASTER (FRUIT FLY).//P25722

[5636] F-PLACE1010270

[5637] F-PLACE1010274//HYPOTHETICAL 16.2 KD PROTEIN C4F8.01 IN CHROMOSOME I.//4.4e-08:100:26//SCHIZOSACCHAROMYCES POMBE (FISSION YEAST).//O14177

[5638] F-PLACE1010293//!!!! ALU SUBFAMILY J WARNING ENTRY !!!/!3.9e-26:94:64//HOMO SAPIENS (HUMAN).//P39188

[5639] F-PLACE1010310//SYNAPSINS IA AND IB.//5.7e-09:89:37//RATTUS NORVEGICUS (RAT).//P09951

[5640] F-PLACE1010321//IMMEDIATE-EARLY PROTEIN IE 180.//0.033:145:31//PSEUDORABIES VIRUS (STRAIN KAPLAN) (PRV).//P33479

[5641] F-PLACE1010324//MAST CELL DEGRANULATING PEPTIDE (MCDP) (MCD).//0.60:25:48//MEGABOMBUS PENNSYLVANICUS (AMERICAN COMMON BUMBLEBEE).//P04567

[5642] F-PLACE1010329//TOXIN S5C10./11.0:39:33//DENDROASPIS JAMESONI KAIMOSAE (EASTERN JAMESON'S MAMBA).//P01419

[5643] F-PLACE1010341//!!!! ALU SUBFAMILY SB WARNING ENTRY !!!!//0.0049:49:55//HOMO SAPIENS (HUMAN).//P39189

[5644] F-PLACE1010362//VARIANT-SURFACE-GLYCOPROTEIN PHOSPHOLIPASE C (EC 3.1.4.47) (VSG LIPASE) (GLYCOSYLPHOSPHATIDYLINOSITOL-SPECIFIC PHOSPHOLIPASE C) (GPI-PLC).//0.0034:89:30//TRYPANOSOMA CRUZI.//O15886

[5645] F-PLACE1010364//NADH-UBIQUINONE OXIDOREDUCTASE B17 SUBUNIT (EC 1.6.5.3) (EC 1.6.99.3) (COMPLEX I-B17) (C1-B17).//1.0:40:35//SUS SCROFA (PIG).//Q29259

[5646] F-PLACE1010383

[5647] F-PLACE1010401//140 KD NUCLEOLAR PHOSPHOPROTEIN (NOPP140).//0.10:174:22//RATTUS NORVEGICUS (RAT).//P41777

[5648] F-PLACE1010481//HYPOTHETICAL 71.9 KD PROTEIN B0285.5 IN CHROMOSOME III.//1.5e-21:170:35//CAENORHABDITIS ELEGANS./IP46555

[5649] F-PLACE1010491//HYPOTHETICAL 13.5 KD PROTEIN IN MOBl-SGAI INTERGENIC REGION.//1.0:31:41//SACCHAROMYCES CEREVISIAE (BAKER'S YEAST).//P40490

[5650] F-PLACE1010492//HYPOTHETICAL 42.3 KD PROTEIN C12G12.1 IC IN CHROMOSOME I.//0.77:97:30//SCHIZOSACCHAROMYCES POMBE (FISSION YEAST).//Q09874

[5651] F-PLACE1010522//SMALL PROLINE RICH PROTEIN II (SPR-II) (CLONE 930).//0.74:45:37//HOMO SAPIENS (HUMAN).//P22531

[5652] F-PLACE1010529//DELTA 1-PYRROLINE-5-CARBOXYLATE SYNTHETASE (P5CS) [CONTAINS: GLUTAMATE 5-KINASE (EC 2.7.2.11) (GAMMA-GLUTAMYL KINASE) (GK); GAMMA-GLUTAMYL PHOSPHATE REDUCTASE (GPR) (EC 1.2.1.41) (GLUTAMATE-5-SEMIALDEHYDE DEHYDROGENASE) (GLUTAMYL-GAMMA-SEMIALDEHYDE DEHYDROGENASE)].//0.70:58:39//VIGNA ACONITIFOLIA (MOTHBEAN).//P32296

[5653] F-PLACE1010547//HYPOTHETICAL 31.0 KD PROTEIN IN BUD9-RME1 INTERGENIC REGION.//0.17:68:39//SACCHAROMYCES CEREVISIAE (BAKER'S YEAST).//P53227

[5654] F-PLACE1010562//CHLOROPLAST 50S RIBOSOMAL PROTEIN L33.//0.50:48:29//PORPHYRA PURPUREA.//P51255

[5655] F-PLACE1010579//HYPOTHETICAL PROTEIN HI 1571.//0.29:37:43//HAEMOPHILUS INFLUENZAE.//P44260

[5656] F-PLACE1010580//PUTATIVE ATP-DEPENDENT RNA HELICASE C12C2.06.//3.3e-38:178:48//SCHIZOSACCHAROMYCES POMBE (FISSION YEAST).//Q09747

[5657] F-PLACE1010599//PEROXISOMAL MEMBRANE PROTEIN PER 10 (PEROXIN- 14).//4.6e-17:192:31//PICHIA ANGUSTA (YEAST) (HANSENULA POLYMORPHA).//P78723

[5658] F-PLACE1010616//HYPOTHETICAL 9.2 KD PROTEIN IN RNPA 3′REGION.//0.44:32:37//PSEUDOMONAS PUTIDA.//P25753

[5659] F-PLACE1010622//A-AGGLUTININ ATTACHMENT SUBUNIT PRECURSOR.//5.0e-06:102:42//SACCHAROMYCES CEREVISIAE (BAKER'S YEAST).//P32323

[5660] F-PLACE1010624//SALIVARY PROLINE-RICH PROTEIN PO (ALLELE K) [CONTAINS: PEPTIDE P-D] (FRAGMENT).//0.00036:134:32//HOMO SAPIENS (HUMAN).//P10162

[5661] F-PLACE1010628

[5662] F-PLACE1010629//!!!! ALU SUBFAMILY SQ WARNING ENTRY !!!!//2.7e-12:37:81//HOMO SAPIENS (HUMAN).//P39194

[5663] F-PLACE1010630

[5664] F-PLACE1010631//WNT-5B PROTEIN (FRAGMENT).//0.49:62:30//EUMECES SKILTONIANUS (WESTERN SKINK).//P28118

[5665] F-PLACE1010661//MATERNAL EXUPERANTIA 2 PROTEIN.//11.0:95:30//DROSOPHILA PSEUDOOBSCURA (FRUIT FLY).//Q24617

[5666] F-PLACE1010662//UDP-GLUCOSE:GLYCOPROTEIN GLUCOSYLTRANSFERASE PRECURSOR (EC 2.4.1.-) (DUGT).//3.2e-05:117:24//DROSOPHILA MELANOGASTER (FRUIT FLY).//Q09332

[5667] F-PLACE1010702//ZINC FINGER PROTEIN 195.//1.4e-62:117:62//HOMO SAPIENS (HUMAN).//O14628

[5668] F-PLACE1010714

[5669] F-PLACE1010720//CHROMOSOME ASSEMBLY PROTEIN XCAP-C.//1.1e-64:176:76//XENOPUS LAEVIS (AFRICAN CLAWED FROG).//P50532

[5670] F-PLACE1010739//TAT PROTEIN (TRANSACTIVATING REGULATORY PROTEIN) (FRAGMENT).//0.97:31:41//HUMAN IMMUNODEFICIENCY VIRUS TYPE I (BH5 ISOLATE) (HIV-1).//P04612

[5671] F-PLACE1010743//PROLINE-RICH PROTEIN MP-3 (FRAGMENT).//3.8e-05:253:30//MUS MUSCULUS (MOUSE).//P05143

[5672] F-PLACE1010761//HYPOTHETICAL 37.0 KD PROTEIN B0495.8 IN CHROMOSOME II.//1.5e-14:175:25//CAENORHABDITIS ELEGANS.//Q09217

[5673] F-PLACE1010771//TRANSCRIPTIONAL REGULATOR PROTEIN HCNGP.//1.3e-120:216:89//MUS MUSCULUS (MOUSE).//Q02614

[5674] F-PLACE1010786//CENTROSOMIN (ARROW PROTEIN).//0.97:133:24//DROSOPHILA MELANOGASTER (FRUIT FLY).//P54623

[5675] F-PLACE1010800//HYPOTHETICAL 31.7 KD PROTEIN IN TRAX-FINO INTERGENIC REGION (ORFC).//0.0060:111:31//ESCHERICHIA COLI.//Q99390

[5676] F-PLACE1010802//UREASE ACCESSORY PROTEIN UREI.//0.82:44:29//BACILLUS SP. (STRAIN TB-90).//Q07415

[5677] F-PLACE1010811//CYTOCHROME C-551 (C551).//0.99:42:38//ECTOTHIORHODOSPIRA HALOCHLORIS.//P38587

[5678] F-PLACE1010833//CALTRACTIN, ISOFORM I (CENTRIN).//2.8e-09:90:34//HOMO SAPIENS (HUMAN).//P41208

[5679] F-PLACE1010856//MOLT-INHIBITING HORMONE (MIH).//1.0:32:37//PROCAMBARUS CLARKII (RED SWAMP CRAYFISH).//P55848

[5680] F-PLACE1010857//IG ALPHA-1 CHAIN C REGION.//0.49:73:34//GORILLA GORILLA GORILLA (LOWLAND GORILLA).//P20758

[5681] F-PLACE1010870//ZINC FINGER PROTEIN 91 (ZINC FINGER PROTEIN HTF10) (HPF7).//1.2e-56:173:58//HOMO SAPIENS (HUMAN).//Q05481

[5682] F-PLACE1010877//HEAT SHOCK PROTEIN 82.//0.13:130:25//ZEA MAYS (MAIZE).//Q08277

[5683] F-PLACE1010891//HYPOTHETICAL 8.2 KD PROTEIN IN BLTR-SPOIIIC INTERGENIC REGION.//0.95:51:27//BACILLUS SUBTILIS.//P54436

[5684] F-PLACE1010896//SERINE/THREONINE-PROTEIN KINASE PTK1/STK1 (EC 2.7.1.-).//0.98:71:30//SACCHAROMYCES CEREVISIAE (BAKER'S YEAST).//P36002

[5685] F-PLACE1010900//HYPOTHETICAL PROTEIN H10840.//1.0:42:30//HAEMOPHILUS INFLUENZAE.//P44897

[5686] F-PLACE1010916//KERATIN, HIGH-SULFUR MATRIX PROTEIN, 111B3.//0.060:59:35//OVIS ARIES (SHEEP).//P02444

[5687] F-PLACE1010917//E2 GLYCOPROTEIN PRECURSOR (SPIKE GLYCOPROTEIN) (PEPLOMER PROTEIN).//0.71:141:24//BOVINE CORONAVIRUS (STRAIN L9).//P25191

[5688] F-PLACE1010925//HYPOTHETICAL 8.1 KD PROTEIN.//1.0:17:58//THERMOPROTEUS TENAX VIRUS 1 (STRAIN KRA1) (TTV1).//P19285

[5689] F-PLACE1010926//HYPOTHETICAL PROLINE-RICH PROTEIN KIAA0269.//0.01:51:45//HOMO SAPIENS (HUMAN).//Q92558

[5690] F-PLACE1010942//EPIDERMAL GROWTH FACTOR RECEPTOR SUBSTRATE SUBSTRATE 15 (PROTEIN EPS15).//3.1e-09:64:37//MUS MUSCULUS (MOUSE).//P42567

[5691] F-PLACE1010944//GAP JUNCTION ALPHA-3 PROTEIN (CONNEXIN 44) (CX44).//0.17:71:38//BOS TAURUS (BOVINE).//P41987

[5692] F-PLACE1010947

[5693] F-PLACE1010954//TROPOMYOSIN ALPHA CHAIN, SKELETAL MUSCLE.//0.011:144:26//HOMO SAPIENS (HUMAN).//P09493

[5694] F-PLACE1010960//ACTIN-LIKE PROTEIN 13E.//1.1e-60:136:52//DROSOPHILA MELANOGASTER (FRUIT FLY).//P45890

[5695] F-PLACE1010965

[5696] F-PLACE1011026//PERIOD CLOCK PROTEIN (FRAGMENT).//1.0:64:31//DROSOPHILA ANANASSAE (FRUIT FLY).//Q03293

[5697] F-PLACE1011032//RIBONUCLEASE HI (EC 3.1.26.4) (RNASE HI) (RIBONUCLEASE H) (RNASE H).//1.0:32:37//SALMONELLA TYPHIMURIUM.//P23329

[5698] F-PLACE101041//HOMEOBOX PROTEIN VAB-7.//0.36:65:30//CAENORHABDITIS ELEGANS.//Q93899

[5699] F-PLACE1011046//1-PHOSPHATIDYLINOSITOL-4,5-BISPHOSPHATE PHOSPHODIESTERASE BETA 1 (EC 3.1.4.11) (PLC-BETA-1) (PHOSPHOLIPASE C-BETA-1) (PLC-1) (PLC-154).//1.3e-22:58:93//RATTUS NORVEGICUS (RAT).//P10687

[5700] F-PLACE1010154//!!!! ALU SUBFAMILY SX WARNING ENTRY !!!!//1.6e-07:38:73//HOMO SAPIENS (HUMAN).//P39195

[5701] F-PLACE1011056//HISTONE H1.//2.2e-10:109:41//PISUM SATIVUM (GARDEN PEA).//P08283

[5702] F-PLACE1011057

[5703] F-PLACE1011090//HYPOTHETICAL 33.8 KD PROTEIN IN TWT1-FLO5 INTERGENIC REGION.//1.8e-07:133:32//SACCHAROMYCES CEREVISIAE (BAKER'S YEAST).//P38892

[5704] F-PLACE1011090//ELONGATION FACTOR G, MITOCHONDRIAL PRECURSOR (MEF-G).//5.4e-25:63:88//RATTUS NORVEGICUS (RAT).//Q07803

[5705] F-PLACE1011114//PUTATIVE ATP-DEPENDENT RNA HELICASE C1F7.02C.//8.4e-31:157:45//SCHIZOSACCHAROMYCES POMBE (FISSION YEAST).//Q09916

[5706] F-PLACE1011330//SERUM AMYLOID P-COMPONENT PRECURSOR (SAP) (9.5S ALPHA-1-GLYCOPROTEIN).//0.92:58:31//HOMO SAPIENS (HUMAN).//P02743

[5707] F-PLACE1011143//PROBABLE E5 PROTEIN.//0.24:42:35//HUMAN PAPILLOMAVIRUS TYPE 31.//P17385

[5708] F-PLACE101160//EARLY NODULIN 55-2 PRECURSOR (N-55-2) (NODULIN-315).//0.88:98:27//GLYCINE MAX (SOYBEAN).//Q02917

[5709] F-PLACE1011165//HISTIDINE-RICH PROTEIN.//0.013:13:76//PLASMODIUM FALCIPARUM (ISOLATE FCM17/SENEGAL).//P14586

[5710] F-PLACE1011851!!!! ALU SUBFAMILY J WARNING ENTRY !!!!//1.4e-13:98:50//HOMO SAPIENS (HUMAN).//P39188

[5711] F-PLACE1011203

[5712] F-PLACE1011214//ATP SYNTHASE PROTEIN 8 (EC 3.6.1.34) (A6L).//1.0:48:27//EQUUS ASINUS (DONKEY).//P92479

[5713] F-PLACE1011219//PROBABLE OXIDOREDUCTASE (EC 1.-.-.-).//1.9e-15:162:31//STREPTOMYCES ANTIBIOTICUS.//Q03326

[5714] F-PLACE1011221//ANTITHROMBIN-III HOMOLOG.//0.84:74:33//FOWLPOX VIRUS (ISOLATE HP-438[MUNICH]).//P14369

[5715] F-PLACE101229//UBIQUITIN CARBOXYL-TERMINAL HYDROLASE 4 (EC 3.1.2.15) (UBIQUITIN THIOLESTERASE 4) (UBIQUITIN-SPECIFIC PROCESSING PROTEASE 4) (DEUBIQUITINATING ENZYME 4) (UBIQUITOUS NUCLEAR PROTEIN HOMOLOG).//3.5e-86:218:68//HOMO SAPIENS (HUMAN).//Q13107

[5716] F-PLACE1011263//ANKYRIN, BRAIN VARIANT 2 (ANKYRIN B) (ANKYRIN, NONERYTHROID) (FRAGMENT).//3.0e-07:99:36//HOMO SAPIENS (HUMAN).//Q01485

[5717] F-PLACE1011273

[5718] F-PLACE1011291//PROTEIN KINASE C SUBSTRATE 80 KD PROTEIN (FRAGMENTS).//0.01:36:50//RATTUS NORVEGICUS (RAT).//P20468

[5719] F-PLACE1011296//HOMEOBOX PROTEIN DLX-6.//0.76:55:32//BRACHYDANIO RERIO (ZEBRAFISH) (ZEBRA DANIO).//Q98877

[5720] F-PLACE1011310//ATP SYNTHASE PROTEIN 9, MITOCHONDRIAL (EC 3.6.1.34) (LIPID-BINDING PROTEIN).//0.46:43:44//PETUNIA SP. (PETUNIA).//Q07060

[5721] F-PLACE1011325//HYPOTHETICAL 222.8 KD PROTEIN CIF3.06C IN CHROMOSOME I.//0.00021:171:27//SCHIZOSACCHAROMYCES POMBE (FISSION YEAST).//Q10411

[5722] F-PLACE1011332//DNA-DAMAGE-REPAIR/TOLERATION PROTEIN DRT101 PRECURSOR.//7.3e-27:113:52//ARABIDOPSIS THALIANA (MOUSE-EAR CRESS).//Q05211

[5723] F-PLACE1011340/1!!!! ALU SUBFAMILY J WARNING ENTRY !!!!//2.6e-07:40:62//HOMO SAPIENS (HUMAN).//P39188

[5724] F-PLACE1011371//INTER-ALPHA-TRYPSIN INHIBITOR HEAVY CHAIN H2 PRECURSOR (ITI HEAVY CHAIN H2).//2.2e-54:227:44//MUS MUSCULUS (MOUSE).//Q61703

[5725] F-PLACE1011375//PROBABLE E5 PROTEIN.//0.93:28:57//HUMAN PAPILLOMAVIRUS TYPE 51.//P26553

[5726] F-PLACE1011399//HISTONE H2B-IV.//0.19:129:27//VOLVOX CARTERI.//P16868

[5727] F-PLACE1011419

[5728] F-PLACE1011433//ZINC FINGER PROTEIN GLI3 (FRAGMENT).//3.4e-05:133:24//GALLUS GALLUS (CHICKEN).//P55879

[5729] F-PLACE1111452//LINE-1 REVERSE TRANSCRIPTASE HOMOLOG.//3.9e-25:76:63//HOMO SAPIENS (HUMAN).//P08547

[5730] F-PLACE1011465//ECTODERMAL DYSPLASIA PROTEIN (EDA PROTEIN).//0.97:36:41//HOMO SAPIENS (HUMAN).//Q92838

[5731] F-PLACE1011472//METALLOTHIONEIN-1 (CUMT-1).//0.084:55:30//HOMARUS AMERICANUS (AMERICAN LOBSTER).//P29499

[5732] F-PLACE1011477//CELL SURFACE GLYCOPROTEIN I PRECURSOR (OUTER LAYER PROTEIN B) (S-LAYER PROTEIN 1).//0.028:129:34//CLOSTRIDIUM THERMOCELLUM.//Q06852

[5733] F-PLACE1011492//NON-GREEN PLASTID TRIOSE PHOSPHATE TRANSLOCATOR PRECURSOR (CTPT).//2.9e-13:147:31//BRASSICA OLERACEA (CAULIFLOWER).//P52178

[5734] F-PLACE1011503//PUTATIVE FERREDOXIN-LIKE PROTEIN IN PURL-DPJ INTERGENIC REGION (086).//0.66:32:40//ESCHERICHIA COLI.//P52102

[5735] F-PLACE1011520

[5736] F-PLACE1011563//LORICRIN.//0.00023:112:39//HOMO SAPIENS (HUMAN).//P23490

[5737] F-PLACE1011567//!!!! ALU SUBFAMILY SX WARNING ENTRY !!!!//9.2e-31:78:76//HOMO SAPIENS (HUMAN).//P39195

[5738] F-PLACE1011576//ZINC FINGER PROTEIN 91 (ZINC FINGER PROTEIN HTFIO) (HPF7).//1.5e-32:45:86//HOMO SAPIENS (HUMAN).//Q05481

[5739] F-PLACE1011586//N-TYPE CALCIUM CHANNEL ALPHA-1 B SUBUNIT (OMEGA-CONOTOXIN-SENSITIVE N- TYPE, BRAIN CALCIUM CHANNEL ALPHA-1 SUBUNIT).//0.26:81:37//HOMO SAPIENS (HUMAN).//Q00975

[5740] F-PLACE1011635//IMMEDIATE-EARLY PROTEIN IE180.//0.00045:170:30//PSEUDORABIES VIRUS (STRAIN INDIANA-FUNKHAUSER/BECKER) (PRV).//P11675

[5741] F-PLACE1011641

[5742] F-PLACE1011643//CUTICLE COLLAGEN 40.//1.0:128:32//CAENORHABDITIS ELEGANS.//P34804

[5743] F-PLACE1011646//!!!! ALU SUBFAMILY J WARNING ENTRY !!!!!//1.1e-15:44:63//HOMO SAPIENS (HUMAN).//P39188

[5744] F-PLACE1011649//HYPOTHETICAL PROTEIN F-215.//0.48:106:34//HUMAN ADENOVIRUS TYPE 2.//P03291

[5745] F-PLACE1011650

[5746] F-PLACE1011664//CROOKED NECK PROTEIN.//1.2e-79:201:68//DROSOPHILA MELANOGASTER (FRUIT FLY).//P17886

[5747] F-PLACE1011675//FERREDOXIN.//1.0:44:29//METHANOCOCCUS THERMOLITHOTROPHICUS.//P21305

[5748] F-PLACE1011682//HYPOTHETICAL 7.0 KD PROTEIN IN RPS26A-COX4 INTERGENIC REGION.//1.0:40:22//SACCHAROMYCES CEREVISIAE (BAKER'S YEAST).//P53098

[5749] F-PLACE1011719//NEUROTOXIN TX2-6.//0.90:31:35//PHONEUTRIA NIGRIVENTER (BRAZILIAN ARMED SPIDER).//P29425

[5750] F-PLACE1011725//NUCLEOBINDIN PRECURSOR (NUCB1) (BONE 63 KD CALCIUM-BINDING PROTEIN).//0.0065:125:25//RATTUS NORVEGICUS (RAT).//Q63083

[5751] F-PLACE1011729//SRY-RELATED PROTEIN LG27 (FRAGMENT).//0.97:48:39//EUBLEPHARIS MACULARIUS.//P40654

[5752] F-PLACE1011749

[5753] F-PLACE1011762//D-BINDING PROTEIN (DBP) (ALBUMIN D BOX-BINDING PROTEIN).//0.028:91:39//MUS MUSCULUS (MOUSE).//Q60925

[5754] F-PLACE1011778

[5755] F-PLACE1011783//EMBRYONIC GROWTH/DIFFERENTIATION FACTOR 1 PRECURSOR (GDF-1).//0.97:48:43//MUS MUSCULUS (MOUSE).//P20863

[5756] F-PLACE1011858//COLLAGEN 1(X) CHAIN PRECURSOR.//0.0027:154:33//BOS TAURUS (BOVINE).//P23206

[5757] F-PLACE1011874//BACTERIOCHLOROPHYLL A PROTEIN (BCHL A PROTEIN) (BCP).//1.0:60:26//PROSTHECOCHLORIS AESTUAR11.//P11741

[5758] F-PLACE1011875//HYPOTHETICAL 6.6 KD PROTEIN IN GP54-ALT INTERGENIC REGION.//0.99:34:35//BACTERIOPHAGE T4.//P39495

[5759] F-PLACE1011891//SMOOTHELIN.//0.018:122:31//HOMO SAPIENS (HUMAN).//P53814

[5760] F-PLACE1011896//SKIN SECRETORY PROTEIN XP2 PRECURSOR (APEG PROTEIN).//6.3e-09:203:35//XENOPUS LAEVIS (AFRICAN CLAWED FROG).//P17437

[5761] F-PLACE1011922//CRYPTDIN-RELATED PROTEIN 4C-2 PRECURSOR (CRS4C).//0.067:37:48//MUS MUSCULUS (MOUSE).//P50715

[5762] F-PLACE1011923//SERINE/THREONINE-PROTEIN KINASE SNK (EC 2.7.1.-) (SERUM INDUCIBLE KINASE).//1.5e-83:175:89//MUS MUSCULUS (MOUSE).//P53351

[5763] F-PLACE1011962//MATING-TYPE PHEROMONE BAP 1(2) PRECURSOR.//0.50:46:41//SCHIZOPHYLLUM COMMUNE (BRACKET FUNGUS).//Q02593

[5764] F-PLACE1011964//LINE-1 REVERSE TRANSCRIPTASE HOMOLOG.//1.6e-05:47:51//NYCTICEBUS COUCANG (SLOW LORIS).//P08548

[5765] F-PLACE1011982//APICAL MEMBRANE ANTIGEN I PRECURSOR (MEROZOITE SURFACE ANTIGEN).//0.98:83:31//PLASMODIUM FRAGILE.//P22622

[5766] F-PLACE1011995

[5767] F-PLACE1012031//HYPOTHETICAL PROTEIN KIAA0254.//0.032:62:33//HOMO SAPIENS (HUMAN).//Q92543

[5768] F-PLACE2000003//!!!! ALU SUBFAMILY SP WARNING ENTRY !!!!//5.4e-18:63:73//HOMO SAPIENS (HUMAN).//P39193

[5769] F-PLACE2000006//ANNEXIN VII (SYNEXIN) (FRAGMENT).//0.14:20:50//BOS TAURUS (BOVINE).//P20072

[5770] F-PLACE2000007//PROLINE-RICH PROTEIN MP-3 (FRAGMENT).//0.0045:176:30//MUS MUSCULUS (MOUSE).//P05143

[5771] F-PLACE2000011//!!!! ALU SUBFAMILY SQ WARNING ENTRY !!!!//3.6e-25:57:78//HOMO SAPIENS (HUMAN).//P39194

[5772] F-PLACE2000014//HYPOTHETICAL HELICASE C28H8.3 IN CHROMOSOME III.//0.00013:237:27//CAENORHABDITIS ELEGANS.//Q09475

[5773] F-PLACE2000015/1!!!! ALU SUBFAMILY SP WARNING ENTRY !!!!//1.4e-33:60:80//HOMO SAPIENS (HUMAN).//P39193

[5774] F-PLACE2000017//FOLATE RECEPTOR BETA PRECURSOR (FR-BETA) (FOLATE RECEPTOR 2) (FOLATE RECEPTOR, FETAL/PLACENTAL) (PLACENTAL FOLATE-BINDING PROTEIN) (FBP).//1.0:83:31//HOMO SAPIENS (HUMAN).//P14207

[5775] F-PLACE2000021//EPHRIN TYPE-A RECEPTOR 4 PRECURSOR (EC 2.7.1.112) (TYROSINE-PROTEIN KINASE RECEPTOR CEK8).//0.99:103:26//GALLUS GALLUS (CHICKEN).//Q07496

[5776] F-PLACE2000030//MALE SPECIFIC SPERM PROTEIN MST84DA.//0.69:29:44//DROSOPHILA MELANOGASTER (FRUIT FLY).//Q01642

[5777] F-PLACE2000033//PROBABLE OXIDOREDUCTASE (EC .-.-.-).//1.1e-05:74:41//STREPTOMYCES ANTIBIOTICUS.//Q03326

[5778] F-PLACE2000034//AXONIN-1 PRECURSOR (AXONAL GLYCOPROTEIN TAG-1) (TRANSIENT AXONAL GLYCOPROTEIN 1).//6.7e-18:191:35//HOMO SAPIENS (HUMAN).//Q02246

[5779] F-PLACE2000039//DYNEIN HEAVY CHAIN, CYTOSOLIC (DYHC) (MAP IC).//4.7e-80:163:96//RATTUS NORVEGICUS (RAT).//P38650

[5780] F-PLACE2000047//!!!! ALU SUBFAMILY SB2 WARNING ENTRY !!!!//6.4e-06:63:49//HOMO SAPIENS (HUMAN).//P39191

[5781] F-PLACE2000050//!!!! ALU SUBFAMILY SC WARNING ENTRY !!!!//3.2e-22:74:64//HOMO SAPIENS (HUMAN).//P39192

[5782] F-PLACE2000061

[5783] F-PLACE2000062//GLUCOSE STARVATION-INDUCIBLE PROTEIN B (GENERAL STRESS PROTEIN B).//1.9e-06:108:37//BACILLUS SUBTILIS.//P26907

[5784] F-PLACE2000072//ZINC FINGER PROTEIN//65.//3.5e-34:175:49//HOMO SAPIENS (HUMAN).//P49910

[5785] F-PLACE2000097//RIBONUCLEASE PANCREATIC (EC 3.1.27.5) (RNASE 1) (RNASE A).//0.36:39:38//ONDATRA ZIBETHICUS (MUSKRAT).//P00681

[5786] F-PLACE2000100

[5787] F-PLACE2000103//TUBULIN ALPHA-4 CHAIN (FRAGMENTS).//0.18:32:37//ZEA MAYS (MAIZE).//P33626

[5788] F-PLACE2000111//CMRF35 ANTIGEN PRECURSOR.//0.056:107:27//HOMO SAPIENS (HUMAN).//Q08708

[5789] F-PLACE2000115//DIAMINOPIMELATE EPIMERASE (EC 5.1.1.7) (DAP EPIMERASE) (FRAGMENT).//1.0:21:52//CLOSTRIDIUM PERFRINGENS.//Q46185

[5790] F-PLACE2000124//!!!! ALU SUBFAMILY SQ WARNING ENTRY !!!!//3.4e-37:108:68//HOMO SAPIENS (HUMAN).//P39194

[5791] F-PLACE2000132//PROBABLE MEMBRANE ANTIGEN GP85.//0.99:133:29//EPSTEIN-BARR VIRUS (STRAIN B95-8) (HUMAN HERPESVIRUS 4).//P03224

[5792] F-PLACE2000136//VASOACTIVE INTESTINAL POLYPEPTIDE RECEPTOR 2 PRECURSOR (VIP-R-2) (PITUITARY ADENYLATE CYCLASE ACTIVATING POLYPEPTIDE TYPE III RECEPTOR) (PACAP TYPE III RECEPTOR) (PACAP-R-3).//0.83:65:32//MUS MUSCULUS (MOUSE).//P41588

[5793] F-PLACE2000140

[5794] F-PLACE2000164//TIPD PROTEIN.//5.7e-12:190:28//DICTYOSTELIUM DISCOIDEUM (SLIME MOLD).//O15736

[5795] F-PLACE2000170//BACTERIOCIN CARNOBACTERIOCIN BM1 PRECURSOR (CARNOBACTERIOCIN B1).//1.0:30:26//CARNOBACTERIUM PISCICOLA.//P38579

[5796] F-PLACE2000172

[5797] F-PLACE2000176//HYPOTHETICAL PROTEIN AF0526.//0.76:44:43//ARCHAEOGLOBUS FULGIDUS.//O29724

[5798] F-PLACE2000187//EM-LIKE PROTEIN GEA6.//0.84:42:35//ARABIDOPSIS THALIANA (MOUSE-EAR CRESS).//Q02973

[5799] F-PLACE2000216

[5800] F-PLACE2000223//NEUROTOXIN III (LQQ III).//0.99:38:34//LEIURUS QUINQUESTRIATUS QUINQUESTRIATUS (EGYPTIAN SCORPION).//P01487

[5801] F-PLACE2000235

[5802] F-PLACE2000246//RING CANAL PROTEIN (KELCH PROTEIN).//5.l e-37:121:42//DROSOPHILA MELANOGASTER (FRUIT FLY).//Q04652

[5803] F-PLACE2000264//!!!! ALU SUBFAMILY SB2 WARNING ENTRY !!!!//2.4e-05:77:42//HOMO SAPIENS (HUMAN).//P39191

[5804] F-PLACE2000274//DYNEIN BETA CHAIN, CILIARY.//5.3e-46:232:45//TRIPNEUSTES GRATILLA (HAWAIAN SEA URCHIN).//P23098

[5805] F-PLACE2000302//TRICHOHYALIN.//1.5e-06:215:29//ORYCTOLAGUS CUNICULUS (RABBIT).//P37709

[5806] F-PLACE2000305//!!!! ALU SUBFAMILY J WARNING ENTRY !!!!//5.3e-06:33:66//HOMO SAPIENS (HUMAN).//P39188

[5807] F-PLACE2000317//TOXIN C 13S1C1 PRECURSOR.//0.44:45:33//DENDROASPIS ANGUSTICEPS (EASTERN GREEN MAMBA).//P18329

[5808] F-PLACE2000335//!!!! ALU SUBFAMILY SX WARNING ENTRY !!!!//7.9e-08:35:71//HOMO SAPIENS (HUMAN).//P39195

[5809] F-PLACE2000341//SODIUM/GLUCOSE COTRANSPORTER 1 (NA(+)/GLUCOSE COTRANSPORTER 1) (HIGH AFFINITY SODIUM-GLUCOSE COTRANSPORTER).//0.014:141:24//ORYCTOLAGUS CUNICULUS (RABBIT).//P11170

[5810] F-PLACE2000342//HYPOTHETICAL 24.1 KD PROTEIN IN LEF4-P33 INTERGENIC REGION.//5.7e-09:96:38//AUTOGRAPHA CALIFORNICA NUCLEAR POLYHEDROSIS VIRUS (ACMNPV).//P41479

[5811] F-PLACE2000347//ZINC FINGER PROTEIN 177.//5.9e-05:49:53//HOMO SAPIENS (HUMAN).//Q13360

[5812] F-PLACE2000359//!!!! ALU SUBFAMILY SQ WARNING ENTRY !!!!//7.5e-10:69:52//HOMO SAPIENS (HUMAN).//P39194

[5813] F-PLACE2000366

[5814] F-PLACE2000371//ATROPHIN-1 (DENTATORUBRAL-PALLIDOLUYSIAN ATROPHY PROTEIN).//1.5e-05:216:29//HOMO SAPIENS (HUMAN).//P54259

[5815] F-PLACE2000373//MAX BINDING PROTEIN MNT (ROX PROTEIN) (MYC ANTAGONIST MNT).//0.27:63:33//HOMO SAPIENS (HUMAN).//Q99583

[5816] F-PLACE2000379//HYPOTHETICAL GENE I PROTEIN.//0.72:120:31//EQUINE HERPESVIRUS TYPE 1 (STRAIN AB4P) (EHV-1).//P28978

[5817] F-PLACE2000394//BASIC PROLINE-RICH PEPTIDE P-E (IB-9).//0.95:40:42//HOMO SAPIENS (HUMAN).//P02811

[5818] F-PLACE2000398//RIBONUCLEASE PRECURSOR (EC 3.1.27.-).//0.88:88:31//AEROMONAS HYDROPHILA.//Q07465

[5819] F-PLACE2000399//T-CELL SURFACE GLYCOPROTEIN E2 PRECURSOR (E2 ANTIGEN) (CD99) (MIC2 PROTEIN) (12E7).//7.6e-16:180:39//HOMO SAPIENS (HUMAN).//P14209

[5820] F-PLACE2000404//PROBABLE LEUCYL-TRNA SYNTHETASE (EC 6.1.1.4) (LEUCINE-TRNA LIGASE) (LEURS).//1.7e-94:243:64//CAENORHABDITIS ELEGANS.//Q09996

[5821] F-PLACE2000410//SERINE/THREONINE PROTEIN PHOSPHATASE 5 (EC 3.1.3.16) (PP5) (PROTEIN PHOSPHATASE T) (PPT) (FRAGMENT).//1.2e-09:78:39//MUS MUSCULUS (MOUSE).//Q60676

[5822] F-PLACE2000419//!!!! ALU SUBFAMILY J WARNING ENTRY !!!!//2.6e-20:61:62//HOMO SAPIENS (HUMAN).//P39188

[5823] F-PLACE2000425//HYPOTHETICAL 11.9 KD PROTEIN IN MSB2-UGAI INTERGENIC REGION.//0.98:75:32//SACCHAROMYCES CEREVISIAE (BAKER'S YEAST).//P53211

[5824] F-PLACE2000427//INSULIN PRECURSOR.//0.98:55:34//CERCOPITHECUS AETHIOPS (GREEN MONKEY) (GRIVET).//P30407

[5825] F-PLACE2000433//!!!! ALU SUBFAMILY J WARNING ENTRY !!!!//7.5e-07:65:50//HOMO SAPIENS (HUMAN).//P39188

[5826] F-PLACE2000435

[5827] F-PLACE2000438//HYPOTHETICAL 67.9 KD PROTEIN ZK688.8 IN CHROMOSOME III.//4.7e-66:178:47//CAENORHABDITIS ELEGANS.//P34678

[5828] F-PLACE2000450//!!!! ALU SUBFAMILY SX WARNING ENTRY !!!!/12.1e-23:88:62//HOMO SAPIENS (HUMAN).//P39195

[5829] F-PLACE2000455//TOXIN II (TOXIN 11.10.9.2) (FRAGMENT).//0.093:18:44//CENTRUROIDES LIMPIDUS LIMPIDUS (MEXICAN SCORPION).//P45630

[5830] F-PLACE2000458//CADHERIN-RELATED TUMOR SUPPRESSOR PRECURSOR (FAT PROTEIN).//3.1e-23:165:40//DROSOPHILA MELANOGASTER (FRUIT FLY).//P33450

[5831] F-PLACE2000465//!!!! ALU SUBFAMILY J WARNING ENTRY !!!!//3.6e-23:73:63//HOMO SAPIENS (HUMAN).//P39188

[5832] F-PLACE2000477//!!!! ALU SUBFAMILY SQ WARNING ENTRY !!!!//4.4e-37:90:78//HOMO SAPIENS (HUMAN).//P39194

[5833] F-PLACE3000004//EYES ABSENT HOMOLOG 3./1.1e-09:27:100//MUS MUSCULUS (MOUSE).//P97480

[5834] F-PLACE3000009//PUTATIVE CUTICLE COLLAGEN C09G5.6.//0.0061:148:34//CAENORHABDITIS ELEGANS.//Q09457

[5835] F-PLACE3000020//ADENYLATE CYCLASE, OLFACTIVE TYPE (EC 4.6.1.1) (TYPE III) (ATP PYROPHOSPHATE-LYASE) (ADENYLYL CYCLASE).//8.8e-93:193:92//RATTUS NORVEGICUS (RAT).//P21932

[5836] F-PLACE3000029//50S RIBOSOMAL PROTEIN L3 I E.//0.15:50:38/METHANOCOCCUS JANNASCHII.//P54009

[5837] F-PLACE3000059//TCP1-CHAPERONIN COFACTOR A.//0.96:50:34//BOS TAURUS (BOVINE).//P48427

[5838] F-PLACE3000070//HYPOTHETICAL 17.1 KD PROTEIN IN PUR5 3′REGION.//0.29:22:59//SACCHAROMYCES CEREVISIAE (BAKER'S YEAST).//P38898

[5839] F-PLACE3000103//LYSIS PROTEIN (E PROTEIN) (GPE).//0.99:53:32//BACTERIOPHAGE ALPHA-3.//P31280

[5840] F-PLACE3000119//!!!! ALU SUBFAMILY SB WARNING ENTRY !!!!//5.4e-41:87:78//HOMO SAPIENS (HUMAN)./MP39189

[5841] F-PLACE3000121/VESICULAR TRAFFIC CONTROL PROTEIN SEC15.//1.0e-07:269:22//SACCHAROMYCES CEREVISIAE (BAKER'S YEAST)./IP22224

[5842] F-PLACE3000124//!!!! ALU SUBFAMILY J WARNING ENTRY !!!!//1.2e-29:97:73//HOMO SAPIENS (HUMAN).//P39188

[5843] F-PLACE3000136//PARS INTERCEREBRALIS MAJOR PEPTIDE D1 (PMP-D1).//0.77:26:42//LOCUSTA MIGRATORIA (MIGRATORY LOCUST).//P80059

[5844] F-PLACE3000142//HYPOTHETICAL 7.1 KD PROTEIN IN NAD2 3′REGION (ORF 63).//0.82:34:41//MARCHANTIA POLYMORPHA (LIVERWORT).//P38468

[5845] F-PLACE3000145//TENSIN.//3.5e-91:238:74//GALLUS GALLUS (CHICKEN).//Q04205

[5846] F-PLACE3000147//!!!! ALU SUBFAMILY SQ WARNING ENTRY !!!!//4.4e-30:61:65//HOMO SAPIENS (HUMAN).//P39194

[5847] F-PLACE3000148//POL POLYPROTEIN [CONTAINS: PROTEASE (EC 3.4.23.-); REVERSE TRANSCRIPTASE (EC 2.7.7.49); ENDONUCLEASE].//1.4e-18:226:34//GIBBON APE LEUKEMIA VIRUS.//P21414

[5848] F-PLACE3000155//EXTENSIN PRECURSOR (PROLINE-RICH GLYCOPROTEIN).//0.00014:107:33//ZEA MAYS (MAIZE).//P14918

[5849] F-PLACE3000156//POL POLYPROTEIN [CONTAINS: PROTEASE (EC 3.4.23.-); REVERSE TRANSCRIPTASE (EC 2.7.7.49); ENDONUCLEASE].//2.7e-19:169:30//BABOON ENDOGENOUS VIRUS (STRAIN M7).//P10272

[5850] F-PLACE3000157//PROBABLE SERINE/THREONINE-PROTEIN KINASE CY50.16 (EC 2.7.1.-).//0.0061:92:30//MYCOBACTERIUM TUBERCULOSIS.//Q11053

[5851] F-PLACE3000158/!!!! ALU SUBFAMILY SB WARNING ENTRY !!!!//5.7e-49:56:80//HOMO SAPIENS (HUMAN).//P39189

[5852] F-PLACE3000160//DNA TRANSFORMATION PROTEIN TFOX (COMPETENCE ACTIVATOR) (PROTEIN SXY).//10.39:94:34//HAEMOPHILUS INFLUENZAE.//P43779

[5853] F-PLACE3000169//!!!! ALU SUBFAMILY SP WARNING ENTRY !!!!//5.6e-28:99:59//HOMO SAPIENS (HUMAN).//P39193

[5854] F-PLACE3000194//PROLINE-RICH PROTEIN LAS 17.//0.91:80:36//SACCHAROMYCES CEREVISIAE (BAKER'S YEAST).//Q12446

[5855] F-PLACE3000197//NEUROFILAMENT TRIPLET M PROTEIN (160 KD NEUROFILAMENT PROTEIN) (NF-M).//0.24:119:32//GALLUS GALLUS (CHICKEN).//P16053

[5856] F-PLACE3000199//EXTENSIN PRECURSOR (CELL WALL HYDROXYPROLINE-RICH GLYCOPROTEIN).//0.76:87:37//NICOTIANA TABACUM (COMMON TOBACCO).//P13983

[5857] F-PLACE3000207//!!!! ALU SUBFAMILY J WARNING ENTRY !!!!//4.5e-09:32:78//HOMO SAPIENS (HUMAN).//P39188

[5858] F-PLACE3000208

[5859] F-PLACE3000218//!!!! ALU SUBFAMILY SQ WARNING ENTRY !!!!//7.2e-34:96:70//HOMO SAPIENS (HUMAN).//P39194

[5860] F-PLACE3000220//OSTEOCALCIN (GAMMA-CARBOXYGLUTAMIC ACID-CONTAINING PROTEIN) (BONE GLA- PROTEIN) (BGP).//0.46:13:53//CANIS FAMILIARIS (DOG).//P81455

[5861] F-PLACE3000221//!!!! ALU SUBFAMILY J WARNING ENTRY !!!!//2.8e-24:178:45//HOMO SAPIENS (HUMAN).//P39188

[5862] F-PLACE3000226//30S RIBOSOMAL PROTEIN SI 8.//0.98:38:34//NEISSERIA GONORRHOEAE.//O07815

[5863] F-PLACE3000230//METALLOTHIONEIN (MT).//0.97:25:48//OREOCHROMIS MOSSAMBICUS (MOZAMBIQUE TILAPIA) (TILAPIA MOSSAMBICA).//P52726

[5864] F-PLACE3000242//MELANOMA-ASSOCIATED ANTIGEN 8 (MAGE-8 ANTIGEN).//8.0e-21:121:39//HOMO SAPIENS (HUMAN).//P43361

[5865] F-PLACE3000244//PROTEIN TSG24 (MEIOTIC CHECK POINT REGULATOR).//2.3e-125:264:87//MUS MUSCULUS (MOUSE).//P53995

[5866] F-PLACE3000254//RTOA PROTEIN (RATIO-A).//0.99:142:23//DICTYOSTELIUM DISCOIDEUM (SLIME MOLD).//P54681

[5867] F-PLACE3000271//!!!! ALU SUBFAMILY J WARNING ENTRY !!!!//2.2e-12:63:53//HOMO SAPIENS (HUMAN).//P39188

[5868] F-PLACE3000276//COLLAGEN ALPHA I(VIII) CHAIN PRECURSOR (ENDOTHELIAL COLLAGEN).//1.0:55:38//HOMO SAPIENS (HUMAN).//P27658

[5869] F-PLACE3000304//DNA-BINDING P52/P100 COMPLEX, 100 KD SUBUNIT (FRAGMENTS).//0.0028:31:54//HOMO SAPIENS (HUMAN).//P30808

[5870] F-PLACE3000310//ATROPHIN-1 (DENTATORUBRAL-PALLIDOLUYSIAN ATROPHY PROTEIN).//0.98:82:34//RATTUS NORVEGICUS (RAT).//P54258

[5871] F-PLACE3000320

[5872] F-PLACE3000322//GLYCINE-RICH CELL WALL STRUCTURAL PROTEIN I PRECURSOR.//2.2e-22:61:52//ORYZA SATIVA (RICE).//P25074

[5873] F-PLACE3000331//SMALL PROLINE-RICH PROTEIN II (SPR-II) (CLONE 174N).//0.32:15:53//HOMO SAPIENS (HUMAN).//P22532

[5874] F-PLACE3000339//CHORION PROTEIN S19.//0.34:89:37//DROSOPHILA VIRILIS (FRUIT FLY).//P24516

[5875] F-PLACE3000341//NADH-UBIQUINONE OXIDOREDUCTASE CHAIN 1 (EC 1.6.5.3) (FRAGMENT).//1.0:47:38//COTURNIX COTURNIX JAPONICA (JAPANESE QUAIL).//P24968

[5876] F-PLACE3000350//SERINE/THREONINE-PROTEIN KINASE SULU (EC 2.7.1.-).//3.9e-50:168:60//CAENORHABDITIS ELEGANS.//P46549

[5877] F-PLACE3000352//!!!! ALU SUBFAMILY SQ WARNING ENTRY !!!!//7.8e-29:76:71//HOMO SAPIENS (HUMAN).//P39194

[5878] F-PLACE3000353//POLYPEPTIDE N-ACETYLGALACTOSAMINYLTRANSFERASE (EC 2.4.1.41) (PROTEIN- UDP ACETYLGALACTOSAMINYLTRANSFERASE) (UDP-GALNAC:POLYPEPTIDE, N- ACETYLGALACTOSAMINYLTRANSFERASE) (GALNAC-T1).//3.0e-09:100:41//HOMO SAPIENS (HUMAN).//Q10472

[5879] F-PLACE3000362//HYPOTHETICAL PROTEIN TP0064.//1.0:75:26//TREPONEMA PALLIDUM.//O83103

[5880] F-PLACE3000363//METALLOTHIONEIN (MT).//0.067:42:33//ASTACUS FLUVIATILIS (BROAD-FINGERED CRAYFISH) (ASTACUS ASTACUS).//P55951

[5881] F-PLACE3000365//LYSIS PROTEIN (E PROTEIN) (GPE).//1.0:65:27//BACTERIOPHAGE PHI-K.//Q38040

[5882] F-PLACE3000373//RETROVIRUS-RELATED ENV POLYPROTEIN.//1.5e-18:90:47//HOMO SAPIENS (HUMAN).//P10267

[5883] F-PLACE3000388

[5884] F-PLACE3000399//!!!! ALU SUBFAMILY SP WARNING ENTRY !!!!//6.3e-45:60:75//HOMO SAPIENS (HUMAN).//P39193

[5885] F-PLACE3000400

[5886] F-PLACE3000401//!!!! ALU SUBFAMILY J WARNING ENTRY !!!!//3 .6e-09:46:73//HOMO SAPIENS (HUMAN).//P39188

[5887] F-PLACE3000402//!!!! ALU SUBFAMILY J WARNING ENTRY !!!!//0.036:43:44//HOMO SAPIENS (HUMAN).//P39188

[5888] F-PLACE3000405//POSTERIOR PITUITARY PEPTIDE.//0.70:25:40//BOS TAURUS (BOVINE).//P01154

[5889] F-PLACE3000406//!!!! ALU SUBFAMILY SX WARNING ENTRY !!!!//4.3e-09:49:67//HOMO SAPIENS (HUMAN).//P39195

[5890] F-PLACE3000413//MALE SPECIFIC SPERM PROTEIN MST87F.//0.12:42:40//DROSOPHILA MELANOGASTER (FRUIT FLY).//P08175

[5891] F-PLACE3000416//CYLICIN I (MULTIPLE-BAND POLYPEPTIDE I).//0.67:236:21//BOS TAURUS (BOVINE).//P35662

[5892] F-PLACE3000425//PROLINE-RICH PEPTIDE P-B.//0.45:19:42//HOMO SAPIENS (HUMAN).//P02814

[5893] F-PLACE3000455//AMELOGENIN, CLASS I PRECURSOR.//0.0073:81:43//BOS TAURUS (BOVINE).//P02817

[5894] F-PLACE3000475//8.6 KD TRANSGLUTAMINASE SUBSTRATE.//1.0:53:32//TACHYPLEUS TRIDENTATUS (JAPANESE HORSESHOE CRAB).//P81281

[5895] F-PLACE3000477//MUSCARINIC TOXIN 7 (MT-7).//0.13:55:32//DENDROASPIS ANGUSTICEPS (EASTERN GREEN MAMBA).//P80970

[5896] F-PLACE4000009//MYOSIN HEAVY CHAIN, SMOOTH MUSCLE ISOFORM (SMMHC) (FRAGMENT).//7.0e-19:180:27//HOMO SAPIENS (HUMAN).//P35749

[5897] F-PLACE4000014//X-LINKED HELICASE II (X-LINKED NUCLEAR PROTEIN) (XNP).//3.2e-15:193:30//HOMO SAPIENS (HUMAN).//P46100

[5898] F-PLACE4000034//BRIDE OF SEVENLESS PROTEIN PRECURSOR.//0.0024:97:29//DROSOPHILA MELANOGASTER (FRUIT FLY).//P22815

[5899] F-PLACE4000049//!!!! ALU SUBFAMILY SQ WARNING ENTRY !!!!/13.8e-32:79:75//HOMO SAPIENS (HUMAN).//P39194

[5900] F-PLACE4000052//ATP-BINDING CASSETTE TRANSPORTER 1.//2.2e-99:178:97//MUS MUSCULUS (MOUSE).//P41233

[5901] F-PLACE4000063//IMMEDIATE-EARLY PROTEIN.//0.0017:159:25//HERPESVIRUS SAIMIR1 (STRAIN 11).//Q01042

[5902] F-PLACE4000089

[5903] F-PLACE4000093

[5904] F-PLACE4000100//!!!! ALU SUBFAMILY J WARNING ENTRY !!!!//1.5e-14:68:60//HOMO SAPIENS (HUMAN).//P39188

[5905] F-PLACE4000106//IA PROTEIN [CONTAINS: HELICASE; METHYLTRANSFERASE].//1.0:46:41//BROAD BEAN MOTTLE VIRUS.//Q00020

[5906] F-PLACE4000128//HYPOTHETICAL PROTEIN E-115.//0.00020:101:30//HUMAN ADENOVIRUS TYPE 2.//P03290

[5907] F-PLACE4000129//CORNIFIN B (SMALL PROLINE-RICH PROTEIN IB) (SPR-IB) (14.9 KD PANCORNULIN).//0.15:57:31//HOMO SAPIENS (HUMAN).//P22528

[5908] F-PLACE4000131

[5909] F-PLACE4000147//COMPETENCE PHEROMONE PRECURSOR.//1.0:45:24//BACILLUS SUBTILIS.//P45453

[5910] F-PLACE4000156//ZINC FINGER PROTEIN 136.//2.1e-88:194:59//HOMO SAPIENS (HUMAN).//P52737

[5911] F-PLACE4000192//ZINC FINGER PROTEIN 142 (KIAA0236) (HA4654).//0.083:148:26//HOMO SAPIENS (HUMAN).//P52746

[5912] F-PLACE4000211//CALPHOTIN.//0.20:43:39//DROSOPHILA MELANOGASTER (FRUIT FLY).//Q02910

[5913] F-PLACE4000222//!!!! ALU SUBFAMILY J WARNING ENTRY !!!!//H.1e-05:20:85//HOMO SAPIENS (HUMAN).//P39188

[5914] F-PLACE4000230//DIHYDROFOLATE REDUCTASE (EC 1.5.1.3)/THYMIDYLATE SYNTHASE (EC 2.1.1.45) (DHFR-TS).//1.0:96:28//TRYPANOSOMA BRUCEI BRUCEI.//Q27783

[5915] F-PLACE4000233

[5916] F-PLACE4000247//METALLOTHIONEIN (MT).//1.0e-05:34:41//PLEURONECTES PLATESSA (PLAICE).//P07216

[5917] F-PLACE4000250//VPU PROTEIN (ORF-X PROTEIN) (UPX PROTEIN).//0.99:33:42//CAPRINE ARTHRITIS ENCEPHALITIS VIRUS (CAEV).//P31834

[5918] F-PLACE4000252//MALE SPECIFIC SPERM PROTEIN MST84 DB.//0.42:24:45//DROSOPHILA MELANOGASTER (FRUIT FLY).//QO 1643

[5919] F-PLACE4000259//PRE-MRNA SPLICING HELICASE BRR2 (EC 3.6.1.-).//3.5e-09:189:32//SACCHAROMYCES CEREVISIAE (BAKER'S YEAST).//P32639

[5920] F-PLACE4000261//PEREGRIN (BR140 PROTEIN).//5.0e-11:103:37//HOMO SAPIENS (HUMAN).//P55201

[5921] F-PLACE4000269//INTRACELLULAR PROTEIN TRANSPORT PROTEIN USO1.//0.037:181:25//SACCHAROMYCES CEREVISIAE (BAKER'S YEAST).//P25386

[5922] F-PLACE4000270//COAGULATION FACTOR VII PRECURSOR (EC 3.4.21.21).//1.0:46:39//MUS MUSCULUS (MOUSE).//P70375

[5923] F-PLACE4000300//50S RIBOSOMAL PROTEIN L32.//0.81:28:46//THERMUS AQUATICUS (SUBSP. THERMOPHILUS).//P80339

[5924] F-PLACE4000320//FKBP-RAPAMYCIN ASSOCIATED PROTEIN (FRAP) (RAPAMYCIN TARGET PROTEIN).//1.6e-29:44:93//HOMO SAPIENS (HUMAN).//P42345

[5925] F-PLACE4000323

[5926] F-PLACE4000326//PARATHYMOSIN.//0.0018:54:48//HOMO SAPIENS (HUMAN).//P20962

[5927] F-PLACE4000344//EPIDERMAL GROWTH FACTOR (EGF) (FRAGMENT).//0.97:28:42//SUS SCROFA (PIG).//Q00968

[5928] F-PLACE4000367//NEUROTOXIN 1 (TOXIN SHP-1) (SHNA) (NEUROTOXIN SHI).//1.0:33:36//STOICHACTIS HELIANTHUS (CARRIBEAN SEA ANEMONE) (STICHODACTYLA HELIANTHUS).//P19651

[5929] F-PLACE4000369//EXTENSIN PRECURSOR (PROLINE-RICH GLYCOPROTEIN).//0.071:42:42//SORGHUM VULGARE (SORGHUM).//P24152

[5930] F-PLACE4000379//!!!! ALU SUBFAMILY SP WARNING ENTRY !!!!//1H.4e-16:54:77//HOMO SAPIENS (HUMAN).//P39193

[5931] F-PLACE4000387//PHOTOSYSTEM 114 KD REACTION CENTRE PROTEIN PRECURSOR.//0.25:21:52//HORDEUM VULGARE (BARLEY), AND SECALE CEREALE (RYE).//P25877

[5932] F-PLACE4000392//FERROCHELATASE (EC 4.99.1.1) (PROTOHEME FERRO-LYASE) (HEME SYNTHETASE) (FRAGMENT).//0.91:36:50//YERSINIA PSEUDOTUBERCULOSIS.//Q05338

[5933] F-PLACE4000401//!!!! ALU SUBFAMILY SQ WARNING ENTRY !!!!//4.4e-29:96:67//HOMO SAPIENS (HUMAN).//P39194

[5934] F-PLACE4000411//!!!! ALU SUBFAMILY J WARNING ENTRY !!!!//2.3e-18:41:73//HOMO SAPIENS (HUMAN).//P39188

[5935] F-PLACE4000431//PRE-MRNA SPLICING HELICASE BRR2 (EC 3.6.1.-).//5.4e-21:237:33//SACCHAROMYCES CEREVISIAE (BAKER'S YEAST).//P32639

[5936] F-PLACE4000445//HYPOTHETICAL 99.7 KD PROTEIN IN SDL15′REGION PRECURSOR.//0.00081:210:26//SACCHAROMYCES CEREVISIAE (BAKER'S YEAST).//P40442

[5937] F-PLACE4000450//TRANSCRIPTION FACTOR HBP-1A (HISTONE-SPECIFIC TRANSCRIPTION FACTOR HBP 1).//0.020:87:33//TRITICUM AESTIVUM (WHEAT).//P23922

[5938] F-PLACE4000465//METALLOTHIONEIN-IL (MT-1 L) (MT 1×).//0.20:18:38//HOMO SAPIENS (HUMAN).//P80297

[5939] F-PLACE4000487//!!!! ALU SUBFAMILY J WARNING ENTRY !!!!//1.5e-19:73:52//HOMO SAPIENS (HUMAN).//P39188

[5940] F-PLACE4000489

[5941] F-PLACE4000494//NPC DERIVED PROLINE RICH PROTEIN 1 (NDPP-1).//0.17:130:30//MUS MUSCULUS (MOUSE).//Q03173

[5942] F-PLACE4000521//RETROVIRUS-RELATED POL POLYPROTEIN [CONTAINS: REVERSE TRANSCRIPTASE (EC 2.7.7.49); ENDONUCLEASE] (FRAGMENT).//3.0e-05:50:36//MUS MUSCULUS (MOUSE).//P10400

[5943] F-PLACE4000522//NEUROGENIC LOCUS NOTCH HOMOLOG PROTEIN 1 PRECURSOR.//1.8e-45:231:47//RATTUS NORVEGICUS (RAT).//Q07008

[5944] F-PLACE4000548//CYTOCHROME C-551 (C551).//0.96:50:34//ECTOTHIORHODOSPIRA HALOPHILA.//P00122

[5945] F-PLACE4000558//PROBABLE UBIQUITIN CARBOXYL-TERMINAL HYDROLASE FAF (EC 3.1.2.15) (UBIQUITIN THIOLESTERASE FAF) (UBIQUITIN-SPECIFIC PROCESSING PROTEASE FAF) (DEUBIQUITINATING ENZYME FAF) (FAT FACETS PROTEIN).//1.6e-28:223:36//DROSOPHILA MELANOGASTER (FRUIT FLY).//P55824

[5946] F-PLACE4000580//P-SELECTIN PRECURSOR (GRANULE MEMBRANE PROTEIN 140) (GMP-140) (PADGEM) (CD62P) (LEUKOCYTE-ENDOTHELIAL CELL ADHESION MOLECULE 3) (LECAM3).//9.7e-11:166:28//HOMO SAPIENS (HUMAN).//P16109

[5947] F-PLACE4000590//POL POLYPROTEIN [CONTAINS: PROTEASE (EC 3.4.23.-); REVERSE TRANSCRIPTASE (EC 2.7.7.49); ENDONUCLEASE].//1.6e-17:134:35//GIBBON APE LEUKEMIA VIRUS.//P21414

[5948] F-PLACE4000593//GONADOTROPIN-RELEASING HORMONE RECEPTOR (GNRH-R).//1.0:54:29//RATTUS NORVEGICUS (RAT).//P30969

[5949] F-PLACE4000612//GAG POLYPROTEIN [CONTAINS: CORE PROTEIN P15; INNER COAT PROTEIN P12; CORE SHELL PROTEIN P30].//2.6e-14:221:32//MOLONEY MURINE SARCOMA VIRUS (STRAIN TS 10).//P32594

[5950] F-PLACE4000638//HYPOTHETICAL 9.3 KD PROTEIN IN NRDB-INAA INTERGENIC REGION.//0.65:37:40//ESCHERICHIA COLI.//P37910

[5951] F-PLACE4000650//ZINC FINGER PROTEIN 16 (ZINC FINGER PROTEIN KOX9) (FRAGMENT).//1.0:33:33//HOMO SAPIENS (HUMAN).//P17020

[5952] F-PLACE4000654

[5953] F-PLACE4000670//HYPOTHETICAL 44.1 KD PROTEIN IN RPB5-CDC28 INTERGENIC REGION.//1.6e-07:161:25//SACCHAROMYCES CEREVISIAE (BAKER'S YEAST).//P33313

[5954] F-SKNMC1000011//PUTATIVE IMPORTIN BETA-4 SUBUNIT (KARYOPHERIN BETA-4 SUBUNIT).//7.4e-15:223:31//SCHIZOSACCHAROMYCES POMBE (FISSION YEAST).//O60100

[5955] F-SKNMC1000013//TRANSCRIPTION FACTOR BF-2 (BRAIN FACTOR 2) (BF2) (CBF-2) (T-14-6).//0.0013:128:35//GALLUS GALLUS (CHICKEN).//Q98937

[5956] F-SKNMC1000046//CUTICLE COLLAGEN 1.//0.0010:154:33//CAENORHABDITIS ELEGANS.//P08124

[5957] F-SKNMC1000050//CALPAIN 2, LARGE [CATALYTIC] SUBUNIT (EC 3.4.22.17) (CALCIUM-ACTIVATED NEUTRAL PROTEINASE) (CANP) (M-TYPE).//3.2e-41:87:98//HOMO SAPIENS (HUMAN).//P17655

[5958] F-SKNMC1000091//NTAK PROTEIN (NEURAL- AND THYMUS- DERIVED ACTIVATOR FOR ERBB KINASES).//0.0032:154:35//HOMO SAPIENS (HUMAN).//O14511

[5959] F-THYRO1000017//PUTATIVE PYRIDOXAMINE 5′-PHOSPHATE OXIDASE (EC 1.4.3.5) (PNP/PMP OXIDASE).//1.6e-23:124:37//CAENORHABDITIS ELEGANS.//Q20939

[5960] F-THYRO1000026//!!!! ALU SUBFAMILY SC WARNING ENTRY !!!!//3.0e-13:54:66//HOMO SAPIENS (HUMAN).//P39192

[5961] F-THYRO1000034//HYPOTHETICAL 10.4 KD PROTEIN.//0.16:44:34//HEPATITIS B VIRUS (SUBTYPE AYW).//P03163

[5962] F-THYRO1000035//CAMPATH-1 ANTIGEN PRECURSOR (CD52 ANTIGEN) (CDW52) (CAMBRIDGE PATHOLOGY I ANTIGEN).//0.83:59:37//MACACA FASCICULARIS (CRAB EATING MACAQUE) (CYNOMOLGUS MONKEY).//P32763

[5963] F-THYRO1000040//60S RIBOSOMAL PROTEIN L37 (FRAGMENT).//0.25:23:39//BOS TAURUS (BOVINE).//P79244

[5964] F-THYRO1000070//HYPOTHETICAL 29.3 KD PROTEIN (ORF92).//2.3e-11:133:36//ORGYIA PSEUDOTSUGATA MULTICAPSID POLYHEDROSIS VIRUS (OPMNPV).//O10341

[5965] F-THYRO1000072//C-PROTEIN, SKELETAL MUSCLE SLOW-ISOFORM.//1.5e-14:205:29//HOMO SAPIENS (HUMAN).//Q00872

[5966] F-THYRO1000085

[5967] F-THYRO1000092//SPERM MITOCHONDRIAL CAPSULE SELENOPROTEIN (MCS).//0.063:59:33//HOMO SAPIENS (HUMAN).//P49901

[5968] F-THYRO1000107

[5969] F-THYRO1000111//LINE-1 REVERSE TRANSCRIPTASE HOMOLOG.//5.0e-58:110:67//NYCTICEBUS COUCANG (SLOW LORIS).//P08548

[5970] F-THYRO10001211/SPLICEOSOME ASSOCIATED PROTEIN 62 (SAP 62) (SF3A66).//2.6e-06:134:35//MUS MUSCULUS (MOUSE).//Q62203

[5971] F-THYRO1000124//TENECIN 3 PRECURSOR.//0.047:76:35//TENEBR10 MOLITOR (YELLOW MEALWORM).//Q27270

[5972] F-THYRO1000129//FIBROSIN (FRAGMENT).//0.35:43:34//MUS MUSCULUS (MOUSE).//Q60791

[5973] F-THYRO1000132//!!!! ALU SUBFAMILY J WARNING ENTRY !!!!//8.7e-14:104:42//HOMO SAPIENS (HUMAN).//P39188

[5974] F-THYRO1000156

[5975] F-THYRO1000163//!!!! ALU SUBFAMILY SB WARNING ENTRY !!!!//3.7e-20:71:71//HOMO SAPIENS (HUMAN).//P39189

[5976] F-THYRO1000173//CLATHRIN COAT ASSEMBLY PROTEIN AP47 (CLATHRIN COAT ASSOCIATED PROTEIN AP47) (GOLGI ADAPTOR AP-147 KD PROTEIN) (HAI47 KD SUBUNIT) (CLATHRIN ASSEMBLY PROTEIN ASSEMBLY PROTEIN COMPLEX 1 MEDIUM CHAIN).//6.7e-88:216:76//MUS MUSCULUS (MOUSE).//P35585

[5977] F-THYRO1000186//!!!! ALU SUBFAMILY SC WARNING ENTRY !!!!//2.9e-24:72:77//HOMO SAPIENS (HUMAN).//P39192

[5978] F-THYRO1000187

[5979] F-THYRO1000190//PROTEIN TRANSPORT PROTEIN SEC61 BETA 2 SUBUNIT.//0.060:50:42//SACCHAROMYCES CEREVISIAE (BAKER'S YEAST).//P52871

[5980] F-THYRO1000197

[5981] F-THYRO1000199//HYPOTHETICAL 49.8 KD PROTEIN D2007.5 IN CHROMOSOME III.//2.0e-06:88:35//CAENORHABDITIS ELEGANS.//P34379

[5982] F-THYRO1000206

[5983] F-THYRO1000221

[5984] F-THYRO1000241//HYPOTHETICAL 11.8 KD PROTEIN IN HE65-PK2 INTERGENIC REGION.//1.0:51:35//AUTOGRAPHA CALIFORNIWA NUCLEAR POLYHEDROSIS VIRUS (ACMNPV).//P41661

[5985] F-THYRO1000242//ZINC FINGER PROTEIN 84 (ZINC FINGER PROTEIN HPF2).//7.4e-37:137:36//HOMO SAPIENS (HUMAN).//P51523

[5986] F-THYRO1000253//DNA-BINDING P52/P100 COMPLEX, 100 KD SUBUNIT (FRAGMENTS).//0.11:21:52//HOMO SAPIENS (HUMAN).//P30808

[5987] F-THYRO1000270//WDNM1 PROTEIN PRECURSOR.//0.40:52:32//MUS MUSCULUS (MOUSE).//Q62477

[5988] F-THYRO1000279//BETA CRYSTALLIN A4.//0.97:64:26//BOS TAURUS (BOVINE).//P11842

[5989] F-THYRO1000288//POTENTIAL CAAX PRENYL PROTEASE I (EC 3.4.24.-) (PRENYL PROTEIN- SPECIFIC ENDOPROTEASE 1) (PPSEP1).//3.4e-48:142:42//SCHIZOSACCHAROMYCES POMBE (FISSION YEAST).//Q10071

[5990] F-THYRO1000320//ZINC FINGER PROTEIN 14 (ZFP-14) (KROX-9 PROTEIN) (FRAGMENT).//0.87:35:45//MUS MUSCULUS (MOUSE).//P10755

[5991] F-THYRO1000327//HYPOTHETICAL 64.7 KD PROTEIN F26E4.11 IN CHROMOSOME I.//0.00010:75:26//CAENORHABDITIS ELEGANS.//P90859

[5992] F-THYRO1000343//CHROMOGRANIN A PRECURSOR (CGA) [CONTAINS: PANCREASTATIN; BETA-GRANIN; WE-14].//0.88:107:26//MUS MUSCULUS (MOUSE).//P26339

[5993] F-THYRO1000358//SELENIUM-BINDING LIVER PROTEIN./t4.6e-25:49:81 IIMUS MUSCULUS (MOUSE).//P17563

[5994] F-THYRO1000368//LOCOMOTION-RELATED PROTEIN HIKARU GENKI PRECURSOR.//1.0:136:26//DROSOPHILA MELANOGASTER (FRUIT FLY).//Q09101

[5995] F-THYRO1000381//GAG POLYPROTEIN [CONTAINS: CORE PROTEIN P15; INNER COAT PROTEIN P12; CORE SHELL PROTEIN P30; NUCLEOPROTEIN PIO].//0.032:99:35//SIMIAN SARCOMA VIRUS.//P03330

[5996] F-THYRO1000387//ATP SYNTHASE PROTEIN 8 (EC 3.6.1.34) (A6L).//0.90:46:30//HALICHOERUS GRYPUS (GRAY SEAL).//P38592

[5997] F-THYRO1000394//SMALL PROLINE RICH PROTEIN II (SPR-II) (CLONE 930).//0.00019:48:37//HOMO SAPIENS (HUMAN).//P22531

[5998] F-THYRO1000395//RING CANAL PROTEIN (KELCH PROTEIN).//1.2e-33:186:38//DROSOPHILA MELANOGASTER (FRUIT FLY).//Q04652

[5999] F-THYRO1000401//50S RIBOSOMAL PROTEIN L7/L12 (FRAGMENT).//0.57:67:31//STAPHYLOCOCCUS AUREUS.//P48860

[6000] F-THYRO1000438//ATP SYNTHASE PROTEIN 8 (EC 3.6.1.34) (A6L).//1.0:42:38//STRONGYLOCENTROTUS PURPURATUS (PURPLE SEA URCHIN).//P15997

[6001] F-THYRO1000452//BACTERIOCIN CARNOBACTERIOCIN A PRECURSOR (PISCICOLIN 61).//0.31:34:44//CARNOBACTERIUM PISCICOLA.//P38578

[6002] F-THYRO1000471//!!!! ALU SUBFAMILY SQ WARNING ENTRY !!!!//2.1e-31:94:72//HOMO SAPIENS (HUMAN).//P39194

[6003] F-THYRO1000484//!!!! ALU SUBFAMILY SX WARNING ENTRY !!!!//5.9e-08:30:86//HOMO SAPIENS (HUMAN).//P39195

[6004] F-THYRO1000488//EARLY NODULIN 55-2 PRECURSOR (N-55-2) (NODULIN-315).//0.93:98:27//GLYCINE MAX (SOYBEAN).//Q02917

[6005] F-THYRO1000501//DOWN REGULATORY PROTEIN OF INTERLEUKIN 2 RECEPTOR.//2.4e-51:198:50//MUS MUSCULUS (MOUSE).//P15533

[6006] F-THYRO1000502//HUNCHBACK PROTEIN (FRAGMENT).//0.84:41:43//APIS MELLIFERA (HONEYBEE).//P31504

[6007] F-THYRO1000505//HYPOTHETICAL BHLF1 PROTEIN.//0.99:231:33//EPSTEIN-BARR VIRUS (STRAIN B95-8) (HUMAN HERPESVIRUS 4).//P03181

[6008] F-THYRO1000558//ANTITHROMBIN-III PRECURSOR (ATIII) (FRAGMENT).//0.47:58:37//GALLUS GALLUS (CHICKEN).//Q03352

[6009] F-THYRO1000569//COLLAGEN ALPHA 1 (I) CHAIN (FRAGMENTS).//0.00048:64:42//RATTUS NORVEGICUS (RAT).//P02454

[6010] F-THYRO1000570//HYPOTHETICAL 11.6 KD PROTEIN IN ACSI-GCV3 INTERGENIC REGION.//0.94:61:32//SACCHAROMYCES CEREVISIAE (BAKER'S YEAST).//P39725

[6011] F-THYRO1000585//SPLICING FACTOR, ARGININE/SERINE-RICH 6 (PRE-MRNA SPLICING FACTOR SRP55).//0.050:104:36//HOMO SAPIENS (HUMAN).//Q13247

[6012] F-THYRO1000596//INFECTED CELL PROTEIN ICP34.5 (NEUROVIRULENCE FACTOR ICP34.5).//0.99:37:40//HERPES SIMPLEX VIRUS (TYPE I/STRAIN MGH-10).//P37319

[6013] F-THYRO1000602//EAMZP30-47 PROTEIN (FRAGMENT).//0.88:61:34//EIMERIA ACERVULINA.//P21959

[6014] F-THYRO1000605//SUPPRESSOR PROTEIN SRP40.//0.0016:116:26//SACCHAROMYCES CEREVISIAE (BAKER'S YEAST).//P32583

[6015] F-THYRO1000625//!!!! ALU SUBFAMILY SQ WARNING ENTRY !!!!//3.4e-33:88:78//HOMO SAPIENS (HUMAN).//P39194

[6016] F-THYRO1000637//METALLOTHIONEIN A (MT A).//1.0:23:43//SPARUS AURATA (GILTHEAD SEA BREAM).//P52727

[6017] F-THYRO1000641//PHOTOSYSTEM 1110 KD PHOSPHOPROTEIN.//0.99:26:46//CYANIDIUM CALDARIUM (GALDIERIA SULPHURARIA).//O19925

[6018] F-THYRO1000658//!!!! ALU SUBFAMILY SB WARNING ENTRY !!!!//1.5e-49:116:69//HOMO SAPIENS (HUMAN).//P39189

[6019] F-THYRO1000662//DNA-DAMAGE-INDUCIBLE PROTEIN P.//3.7e-15:119:43//ESCHERICHIA COLI.//Q47155

[6020] F-THYRO1000666//KINESIN-LIKE PROTEIN KLP1.//1.0e-44:232:41//CHLAMYDOMONAS REINHARDTII.//P46870

[6021] F-THYRO1000676//!!!! ALU SUBFAMILY SP WARNING ENTRY !!!!//2.1e-15:144:39//HOMO SAPIENS (HUMAN).//P39193

[6022] F-THYRO1000684//HYPOTHETICAL 73.5 K1) PROTEIN IN SCS3-RPS2 INTERGENIC REGION.//0.00033:84:30//SACCHAROMYCES CEREVISIAE (BAKER'S YEAST).//P53129

[6023] F-THYRO1000699//!!!! ALU SUBFAMILY SC WARNING ENTRY !!!!//0.97:20:85//HOMO SAPIENS (HUMAN).//P39192

[6024] F-THYRO1000712//!!!! ALU SUBFAMILY J WARNING ENTRY !!!!//4.2e-10:69:59//HOMO SAPIENS (HUMAN).//P39188

[6025] F-THYRO1000715//SALIVARY PROLINE-RICH PROTEIN PRECURSOR (CLONES CP3, CP4 AND CP5) [CONTAINS: BASIC PEPTIDE IB-6; PEPTIDE P-H].//4.6e-10:204:32//HOMO SAPIENS (HUMAN).//P04280

[6026] F-THYRO1000734

[6027] F-THYRO11000748//HYPOTHETICAL PROTEIN KIAA0411 (FRAGMENT).//1.8e-46:130:70//HOMO SAPIENS (HUMAN).//O43295

[6028] F-THYRO1000756//ALPHA-N-ACETYLGALACTOSAMINIDE ALPHA-2,6-SIALYLTRANSFERASE (EC 2.4.99.-) (ST6GALNACIII) (STY).//1.1e-06:95:31//RATTUS NORVEGICUS (RAT).//Q64686

[6029] F-THYRO1000777//CUTICLE COLLAGEN 2C (FRAGMENT).//0.0031:119:34//HAEMONCHUS CONTORTUS.//P16252

[6030] F-THYRO1000783//MYOSIN IC HEAVY CHAIN.//0.0014:121:37//ACANTHAMOEBA CASTELLANII (AMOEBA).//P10569

[6031] F-THYRO1000787//HUNCHBACK PROTEIN (FRAGMENT).//0.54:25:52//PHOLCUS PHALANGIOIDES.//Q02031

[6032] F-THYRO1000793//PRE-MRNA SPLICING FACTOR PRP9.//0.91:30:36//SACCHAROMYCES CEREVISIAE (BAKER'S YEAST).//P19736

[6033] F-THYRO1000796

[6034] F-THYRO1000805//HYPOTHETICAL 7.3 KD PROTEIN IN 100 KD PROTEIN REGION.//0.081:31:38//HUMAN ADENOVIRUS TYPE 41.//P23691

[6035] F-THYRO1000815//!!!! ALU SUBFAMILY SX WARNING ENTRY !!!!//6.0e-30:81:70//HOMO SAPIENS (HUMAN).//P39195

[6036] F-THYRO1000829//NEUROTOXIN III (BOM III).//0.022:32:34//BUTHUS OCCITANUS MARDOCHEI (MOROCCAN SCORPION).//P13488

[6037] F-THYRO1000843//HYPOTHETICAL 7.7 KD PROTEIN IN GENES 5-4 INTERGENIC REGION (ORF 109).//0.98:25:44//BACTERIOPHAGE P22.//P26750

[6038] F-THYRO1000852//SULFATED SURFACE GLYCOPROTEIN 185 (SSG 185).//7.3e-09:83:42//VOLVOX CARTERI.//P21997

[6039] F-THYRO1000855//ANTIFREEZE PEPTIDE 4 PRECURSOR.//11.0:54:35//PSEUDOPLEURONECTA AMERICANUS (WINTER FLOUNDER).//P02734

[6040] F-THYRO1000865//!!!! ALU SUBFAMILY J WARNING ENTRY !!!!//5.2e-17:66:57//HOMO SAPIENS (HUMAN).//P39188

[6041] F-THYRO1000895//!!!! ALU SUBFAMILY SB WARNING ENTRY !!!!//1.0e-12:58:62//HOMO SAPIENS (HUMAN).//P39189

[6042] F-THYRO1000916//!!!! ALU SUBFAMILY SB WARNING ENTRY !!!!//2.0e-32:101:69//HOMO SAPIENS (HUMAN).//P39189

[6043] F-THYRO1000926//NITROGEN FIXATION REGULATORY PROTEIN.//5.5e-05:108:27//KLEBSIELLA OXYTOCA.//P56267

[6044] F-THYRO1000934//PYRROLINE-5-CARBOXYLATE REDUCTASE (EC 1.5.1.2) (P5CR) (P5C REDUCTASE).//3.9e-50:147:40//HOMO SAPIENS (HUMAN).//P32322

[6045] F-THYRO1000951//DIHYDROXYACETONE KINASE (EC 2.7.1.29) (GLYCERONE KINASE).//1.8e-31:136:56//CITROBACTER FREUNDII.//P45510

[6046] F-THYRO1000952//HYPOTHETICAL 182.0 KD PROTEIN IN NMD5-HOM6 INTERGENIC REGION.//2.4e-05:91:34//SACCHAROMYCES CEREVISIAE (BAKER'S YEAST).//P47170

[6047] F-THYRO1000974//MITOCHONDRIAL ATP-DEPENDENT RNA HELICASE SUV3 PRECURSOR.//1.0:35:40//SACCHAROMYCES CEREVISIAE (BAKER'S YEAST)./MP32580

[6048] F-THYRO1000975

[6049] F-THYRO1000983//HYPOTHETICAL 48.1 KD PROTEIN B0403.2 IN CHROMOSOME X.//1.3e-20:96:51//CAENORHABDITIS ELEGANS.//Q11076

[6050] F-THYRO1000984//GTP-BINDING ADP-RIBOSYLATION FACTOR HOMOLOG I PROTEIN.//0.011:76:34//DROSOPHILA MELANOGASTER (FRUIT FLY).//P25160

[6051] F-THYRO1000988

[6052] F-THYRO1001003//HYPOTHETICAL 8.1 KD PROTEIN IN MSCL-RPLQ INTERGENIC REGION.//0.97:60:31//ESCHERICHIA COLI.//P36675

[6053] F-THYRO1001031//!!!! ALU SUBFAMILY SX WARNING ENTRY !!!!//9.5e-18:56:66//HOMO SAPIENS (HUMAN).//P39195

[6054] F-THYRO1001033//TRANSFORMATION-SENSITIVE PROTEIN IEF SSP 3521.//5.0e-13:126:35//HOMO SAPIENS (HUMAN).//P31948

[6055] F-THYRO1001062//!!!! ALU SUBFAMILY SQ WARNING ENTRY !!!!//1.1e-35:97:79//HOMO SAPIENS (HUMAN).//P39194

[6056] F-THYRO1001093//!!!! ALU SUBFAMILY SQ WARNING ENTRY !!!!/16.4e-13:70:57//HOMO SAPIENS (HUMAN).//P39194

[6057] F-THYRO1001100//ZINC FINGER X-LINKED PROTEIN ZXDA (FRAGMENT).//4.2e-63:219:63//HOMO SAPIENS (HUMAN).//P98168

[6058] F-THYRO1001120//SPLICEOSOME ASSOCIATED PROTEIN 49 (SAP 49) (SF3B53).//0.00068:160:31//HOMO SAPIENS (HUMAN).//Q15427

[6059] F-THYRO1001121//VERY HYPOTHETICAL 20.6 KD PROTEIN C56F8.15 IN CHROMOSOME I.//0.37:158:28//SCHIZOSACCHAROMYCES POMBE (FISSION YEAST).//QI0263

[6060] F-THYRO1001133//!!!! ALU SUBFAMILY J WARNING ENTRY !!!!//7.3e-15:59:66//HOMO SAPIENS (HUMAN).//P39188

[6061] F-THYRO1001134//SALIVARY PROLINE-RICH PROTEIN PO (ALLELE M) [CONTAINS: PEPTIDE P-D] (FRAGMENT).//0.00088:159:29//HOMO SAPIENS (HUMAN).//P10161

[6062] F-THYRO1001142//!!!! ALU SUBFAMILY SQ WARNING ENTRY !!!!//3.0e-29:81:71//HOMO SAPIENS (HUMAN).//P39194

[6063] F-THYRO1001173//CYTOCHROME C OXIDASE POLYPEPTIDE VIIS (EC 1.9.3.1).//0.88:51:35//DICTYOSTELIUM DISCOIDEUM (SLIME MOLD).//P20610

[6064] F-THYRO1001177//!!!! ALU SUBFAMILY SC WARNING ENTRY !!!!//3.0e-24:91:68//HOMO SAPIENS (HUMAN).//P39192

[6065] F-THYRO1001189//MKR2 PROTEIN (ZINC FINGER PROTEIN 2).//7.3e-27:165:39//MUS MUSCULUS (MOUSE).//P08043

[6066] F-THYRO1001204//BASIC PROLINE-RICH PEPTIDE P-E (IB-9).//0.67:42:42//HOMO SAPIENS (HUMAN).//P02811

[6067] F-THYRO1001213/!!!! ALU SUBFAMILY SQ WARNING ENTRY !!!!//2.9e-16:61:68//HOMO SAPIENS (HUMAN).//P39194

[6068] F-THYRO1001262//!!!! ALU SUBFAMILY SP WARNING ENTRY !!!!//1.4e-36:50:84//HOMO SAPIENS (HUMAN).//P39193

[6069] F-THYRO1001271//HYPOTHETICAL 35.5 KD PROTEIN IN TRANSPOSON TN4556.//0.62:126:30//STREPTOMYCES FRADIAE.//P20186

[6070] F-THYRO1001287//HYPOTHETICAL 91.2 KD PROTEIN IN RPS4B-SCH9 INTERGENIC REGION.//1.9e-26:208:37//SACCHAROMYCES CEREVISIAE (BAKER'S YEAST).//P38888

[6071] F-THYRO1001290//GIANT HEMOGLOBIN AIV CHAIN (FRAGMENT).//1.0:31:38//LAMELLIBRACHIA SP. (DEEP-SEA GIANT TUBE WORM).//P20413

[6072] F-THYRO1001313//VACUOLAR PROTEIN SORTING-ASSOCIATED PROTEIN VPS5.//0.00042:105:31//SACCHAROMYCES CEREVISIAE (BAKER'S YEAST).//Q92331

[6073] F-THYRO1001320//COLLAGEN ALPHA 1(III) CHAIN.//0.27:57:38//BOS TAURUS (BOVINE).//P04258

[6074] F-THYRO10013211/!!!! ALU SUBFAMILY J WARNING ENTRY !!!!//5.5e-20:74:64//HOMO SAPIENS (HUMAN).//P39188

[6075] F-THYRO1001322//HYPOTHETICAL 7.2 KD PROTEIN.//0.66:49:30//VACCINIA VIRUS (STRAIN COPENHAGEN).//P21123

[6076] F-THYRO1001347//TOXIN F-VIII PRECURSOR (TOXIN TA2) (TOXIN DAF8).//0.94:61:36//DENDROASPIS ANGUSTICEPS (EASTERN GREEN MAMBA).//P01404

[6077] F-THYRO1001363//!!!! ALU SUBFAMILY J WARNING ENTRY !!!!//0.0025:23:73//HOMO SAPIENS (HUMAN).//P39188

[6078] F-THYRO1001365//MERSACIDIN PRECURSOR.//0.35:38:42//BACILLUS SP. (STRAIN HIL-Y85/54728).//P43683

[6079] F-THYRO1001374//PROTEIN VDLD.//1.6e-13:140:31//HELICOBACTER PYLORI (CAMPYLOBACTER PYLORI).//O05729

[6080] F-THYRO1001401//!!!! ALU SUBFAMILY SC WARNING ENTRY !!!!//0.047:43:48//HOMO SAPIENS (HUMAN).//P39192

[6081] F-THYRO1001403

[6082] F-THYRO1001405//SMALL PROLINE RICH PROTEIN II (SPR-II) (CLONE 930).//0.0068:26:42//HOMO SAPIENS (HUMAN).//P22531

[6083] F-THYRO1001406//PUTATIVE STEROID DEHYDROGENASE KIK-1 (EC 1.1.1.-).//3.1e-81:97:83//MUS MUSCULUS (MOUSE).//O70503

[6084] F-THYRO1001411//!!!! ALU SUBFAMILY SP WARNING ENTRY !!!!//1.9e-26:89:74//HOMO SAPIENS (HUMAN).//P39193

[6085] F-THYRO1001426//!!!! ALU SUBFAMILY SP WARNING ENTRY !!!!//1.4e-09:55:61//HOMO SAPIENS (HUMAN).//P39193

[6086] F-THYRO1001434//BETA-DEFENSIN 4 PRECURSOR (BNDB-4).//0.68:44:34//BOS TAURUS (BOVINE).//P46162

[6087] F-THYRO1001458//MYOSIN HEAVY CHAIN, NONMUSCLE TYPE B (CELLULAR MYOSIN HEAVY CHAIN, TYPE B) (NMMHC-B).//3.8e-64:216:62//HOMO SAPIENS (HUMAN).//P35580

[6088] F-THYRO1001480//!!!! ALU SUBFAMILY SQ WARNING ENTRY !!!!//9.3e-29:88:75//HOMO SAPIENS (HUMAN).//P39194

[6089] F-THYRO1001487//HOMEOBOX PROTEIN HOX-B4 (HOX-2.6).//0.99:59:37//MUS MUSCULUS (MOUSE).//P10284

[6090] F-THYRO1001534//!!!! ALU SUBFAMILY SQ WARNING ENTRY !!!!//1.4e-1440:82//HOMO SAPIENS (HUMAN).//P39194

[6091] F-THYRO1001537//HYPOTHETICAL 33.8 KD PROTEIN IN TWT1-FLO5 INTERGENIC REGION.//2.4e-07:142:32//SACCHAROMYCES CEREVISIAE (BAKER'S YEAST).//P38892

[6092] F-THYRO1001541//!!!! ALU SUBFAMILY SX WARNING ENTRY !!!!//0.98:26:61//HOMO SAPIENS (HUMAN).//P39195

[6093] F-THYRO1001559//PROTEIN Q300.//2.6e-05:20:75//MUS MUSCULUS (MOUSE).//Q02722

[6094] F-THYRO1001570

[6095] F-THYRO1001573//SPERM MITOCHONDRIAL CAPSULE SELENOPROTEIN (MCS).//0.033:71:36//MUS MUSCULUS (MOUSE).//P15265

[6096] F-THYRO11001584//SUPPRESSOR PROTEIN SRP40.//2.1e-05:188:27//SACCHAROMYCES CEREVISIAE (BAKER'S YEAST).//P32583

[6097] F-THYRO1001595//RAS SUPPRESSOR PROTEIN 1 (RSU-1) (RSP-1 PROTEIN) (RSP-1).//6.1e-21:35:91//HOMO SAPIENS (HUMAN).//Q15404

[6098] F-THYRO1001602//TRK SYSTEM POTASSIUM UPTAKE PROTEIN TRKH.//1.0:57:42//HAEMOPHILUS INFLUENZAE.//P44843

[6099] F-THYRO1001605//VENOM BASIC PROTEASE INHIBITORS 1×AND VIIIB.//1.0:34:38//BUNGARUS FASCIATUS (BANDED KRAIT).//P25660

[6100] F-THYRO1001617//!!!! ALU SUBFAMILY SQ WARNING ENTRY !!!!//7.0e-18:55:81//HOMO SAPIENS (HUMAN).//P39194

[6101] F-THYRO1001637/1!!!! ALU SUBFAMILY SX WARNING ENTRY !!!!//0.00020:25:80//HOMO SAPIENS (HUMAN).//P39195

[6102] F-THYRO1001656//PROLINE-RICH PROTEIN MP-2 PRECURSOR.//0.0091:54:42//MUS MUSCULUS (MOUSE).//P05142

[6103] F-THYRO1001661//HYPOTHETICAL 21.1 KD PROTEIN IN SSR-SERA INTERGENIC REGION (0182).//0.033:77:35//ESCHERICHIA COLI.//P09160

[6104] F-THYRO1001671//(2′-5′)OLIGOADENYLATE SYNTHETASE I (EC 2.7.7.-) ((2-5′)OLIGO(A) SYNTHETASE 1) (2-5A SYNTHETASE 1) (P46/P41) (E18/E16).//4.3e-34:207:34//HOMO SAPIENS (HUMAN).//P00973

[6105] F-THYRO1001673//!!!! ALU SUBFAMILY SQ WARNING ENTRY !!!!//3.9e-08:49:65//HOMO SAPIENS (HUMAN).//P39194

[6106] F-THYRO1001703//HYPOTHETICAL 69.8 KD PROTEIN IN BDFI-SFPI INTERGENIC REGION.//6.4e-16:134:35//SACCHAROMYCES CEREVISIAE (BAKER'S YEAST).//Q06053

[6107] F-THYRO1001706

[6108] F-THYRO1001721//RING CANAL PROTEIN (KELCH PROTEIN).//2.7e-27:191:36//DROSOPHILA MELANOGASTER (FRUIT FLY).//Q04652

[6109] F-THYRO1001738//MATING PROCESS PROTEIN MID2 (SERINE-RICH PROTEIN SMSI) (PROTEIN KINASE A INTERFERENCE PROTEIN).//0.0032:105:32//SACCHAROMYCES CEREVISIAE (BAKER'S YEAST).//P36027

[6110] F-THYRO1001745

[6111] F-THYRO1001746//GENE 10 PROTEIN.//1.0:55:30//SPIROPLASMA VIRUS SPV1-R8A2 B.//P15901

[6112] F-THYRO1001772//!!!! ALU SUBFAMILY J WARNING ENTRY !!!!//1.2e-05:41:63//HOMO SAPIENS (HUMAN).//P39188

[6113] F-THYRO1001793//HYPOTHETICAL 21.6 KD PROTEIN F37A4.2 IN CHROMOSOME III.//1.5e-26:161:42//CAENORHABDITIS ELEGANS.//P41880

[6114] F-THYRO1001809//LATENCY-RELATED PROTEIN 2.//0.49:74:27//HERPES SIMPLEX VIRUS (TYPE I/STRAIN F).//P17589

[6115] F-THYRO1001828//PROTEINASE INHIBITOR.//0.11:34:50//SOLANUM MELONGENA (EGGPLANT) (AUBERGINE).//P01078

[6116] F-THYRO1001854//ACYL-COA-BINDING PROTEIN HOMOLOG (ACBP) (DIAZEPAM BINDING INHIBITOR HOMOLOG) (DBI).//0.63:50:38//RANA RIDIBUNDA (LAUGHING FROG) (MARSH FROG).//P45883

[6117] F-THYRO1001895//!!!! ALU SUBFAMILY J WARNING ENTRY !!!!//6.1e-09:72:47//HOMO SAPIENS (HUMAN).//P39188

[6118] F-THYRO1001907//TRYPOMASTIGOTE DECAY-ACCELERATING FACTOR (T-DAF) (FRAGMENT).//0.79:36:44//TRYPANOSOMA CRUZI.//Q26327

[6119] F-VESEN1000122//HOMEOBOX PROTEIN HB9.//0.57:64:32//HOMO SAPIENS (HUMAN).//P50219

[6120] F-Y79AA1000013//METALLOTHIONEIN B (MT-B).//0.034:35:48//SALMO SALAR (ATLANTIC SALMON).//P52720

[6121] F-Y79AA1000033//CHOLECYSTOKININ.//0.97:49:30//PSEUDEMYS SCRIPTA (SLIDER TURTLE).//P80345

[6122] F-Y79AA1000037//DNA-BINDING PROTEIN BMI-1.//1.4e-23:80:60//HOMO SAPIENS (HUMAN).//P35226

[6123] F-Y79AA1000059//HYPOTHETICAL 35.5 KD PROTEIN IN TRANSPOSON TN4556.//0.0075:127:36//STREPTOMYCES FRADIAE.//P20186

[6124] F-Y79AA1000065//SALIVARY PROLINE-RICH PROTEIN PO (ALLELE K) [CONTAINS: PEPTIDE P-D] (FRAGMENT).//0.022:135:29//HOMO SAPIENS (HUMAN).//P10162

[6125] F-Y79AA1000131//REGULATORY PROTEIN E2.//1.1e-05:175:26//HUMAN PAPILLOMAVIRUS TYPE 24.//P50770

[6126] F-Y79AA1000181//PROLINE-RICH PROTEIN MP-3 (FRAGMENT).//1.4e-06:187:29//MUS MUSCULUS (MOUSE).//P05143

[6127] F-Y79AA1000202//HYPOTHETICAL PROLINE-RICH PROTEIN (FRAGMENT).//6.2e-09:47:53//OWENIA FUSIFORMIS.//P21260

[6128] F-Y79AA1000214//HISTONE H2A VARIANT.//1.7e-50:107:100//GALLUS GALLUS (CHICKEN).//P02272

[6129] F-Y79AA1000230//GONADOLIBERIN I PRECURSOR (LHRH I) (LUTEINIZING HORMONE RELEASING HORMONE I) (GONADOTROPIN RELEASING HORMONE I) (GNRH I) (LULIBERIN I).//0.27:64:34//HOMO SAPIENS (HUMAN).//P01148

[6130] F-Y79AA1000231//HYPOTHETICAL 47.9 KD PROTEIN M021 B04.12.//2.5e-72:277:53//ARABIDOPSIS THALIANA (MOUSE-EAR CRESS).//O04658

[6131] F-Y79AA1000258//PROLINE-RICH PROTEIN MP-2 PRECURSOR.//2.8e-08:174:35//MUS MUSCULUS (MOUSE).//P05142

[6132] F-Y79AA1000268//COLLAGEN ALPHA 1(III) CHAIN (FRAGMENT).//0.00020:176:33//RATTUS NORVEGICUS (RAT).//P13941

[6133] F-Y79AA1000313//HYPOTHETICAL 54.0 KD PROTEIN C32A3.1 IN CHROMOSOME III.//0.092:127:21//CAENORHABDITIS ELEGANS.//Q09260

[6134] F-Y79AA1000328//SEL-10 PROTEIN.//5.3e-05:129:28//CAENORHABDITIS ELEGANS.//Q93794

[6135] F-Y79AA1000342//KERATIN, ULTRA HIGH-SULFUR MATRIX PROTEIN (UHS KERATIN).//1.0:73:30//OVIS ARIES (SHEEP).//P26372

[6136] F-Y79AA1000346//COATOMER GAMMA SUBUNIT (GAMMA-COAT PROTEIN) (GAMMA-COP).//1.8e-95:205:83//BOS TAURUS (BOVINE).//P53620

[6137] F-Y79AA1000349//ANTIFREEZE PEPTIDE 4 PRECURSOR.//0.036:37:54//PSEUDOPLEURONECTA AMERICANUS (WINTER FLOUNDER).//P02734

[6138] F-Y79AA1000355//HYPOTHETICAL 18.2 KD PROTEIN ZK632.13 IN CHROMOSOME III.//0.0031:106:28//CAENORHABDITIS ELEGANS.//Q10120

[6139] F-Y79AA1000368//REDUCED VIABILITY UPON STARVATION PROTEIN 161./11.4e-16:208:28//SACCHAROMYCES CEREVISIAE (BAKER'S YEAST).//P25343

[6140] F-Y79AA1000405//LIGHT-HARVESTING PROTEIN B-800-850, ALPHA CHAIN C (ANTENNA PIGMENT PROTEIN, ALPHA CHAIN C) (LH II-C ALPHA).//0.98:50:30//RHODOPSEUDOMONAS PALUSTRIS.//P35103

[6141] F-Y79AA1000410//!!!! ALU SUBFAMILY SQ WARNING ENTRY !!!!//7.9e-20:62:79//HOMO SAPIENS (HUMAN).//P39194

[6142] F-Y79AA1000420//HYPOTHETICAL 27.7 KD PROTEIN IN UME3-HDAI INTERGENIC REGION.//1.4e-06:86:38//SACCHAROMYCES CEREVISIAE (BAKER'S YEAST).//P53970

[6143] F-Y79AA1000469//HYPOTHETICAL 48.4 KD PROTEIN F44B9.5 IN CHROMOSOME III.//2.8e-34:211:40//CAENORHABDITIS ELEGANS.//P34426

[6144] F-Y79AAI000480//HYPOTHETICAL 63.2 KD PROTEIN CIF3.09 IN CHROMOSOME I.//3.9e-15:90:32//SCHIZOSACCHAROMYCES POMBE (FISSION YEAST).//Q10414

[6145] F-Y79AA1000538//!!!! ALU SUBFAMILY SX WARNING ENTRY !!!!//0.37:41:48//HOMO SAPIENS (HUMAN).//P39195

[6146] F-Y79AA1000539//SPLICING FACTOR, ARGININE/SERINE-RICH 4 (PRE-MRNA SPLICING FACTOR SRP75).//1.8e-21:190:37//HOMO SAPIENS (HUMAN).//Q08170

[6147] F-Y79AA1000540//SPERM PROTAMINE PI.//0.00045:66:45//DASYURUS VIVERRINUS (SOUTHEASTERN QUOLL), AND DASYURUS HALLUCATUS.//P42135

[6148] F-Y79AA1000560//ALPHA-ADAPTIN C (CLATHRIN ASSEMBLY PROTEIN COMPLEX 2 ALPHA-C LARGE CHAIN) (100 KD COATED VESICLE PROTEIN C) (PLASMA MEMBRANE ADAPTOR HA2/AP2 ADAPTIN ALPHA C SUBUNIT).//1.6e-79:186:87//MUS MUSCULUS (MOUSE).//P17427

[6149] F-Y79AA1000574//AKLAVINONE C-II HYDROXYLASE (EC 1.-.-.-) (FRAGMENT).//0.010:35:60//STREPTOMYCES PEUCETIUS.//P32009

[6150] F-Y79AA1000589//32.3 KD PROTEIN IN CWPl-MBR1 INTERGENIC REGION.//4.5e-27:197:36//SACCHAROMYCES CEREVISIAE (BAKER'S YEAST).//P28320

[6151] F-Y79AA1000627//ZINC FINGER PROTEIN 134.//1.6e-34:191:35//HOMO SAPIENS (HUMAN).//P52741

[6152] F-Y79AA1000705//HYPOTHETICAL 128.5 KD HELICASE IN ATSI-TPD3 INTERGENIC REGION.//8.7e-36:250:40//SACCHAROMYCES CEREVISIAE (BAKER'S YEAST).//P31380

[6153] F-Y79AA1000734//PEROXISOMAL MEMBRANE PROTEIN PMP30A (PMP31) (PEROXIN-11 A).//0.00037:108:27//CANDIDA BOIDINII (YEAST).//Q00316

[6154] F-Y79AA1000748//HYPOTHETICAL 61.3 KD PROTEIN F25B5.5 IN CHROMOSOME III.//1.0e-23:210:34//CAENORHABDITIS ELEGANS.//Q09316

[6155] F-Y79AA1000752//PUTATIVE HETEROGENEOUS NUCLEAR RIBONUCLEOPROTEIN X (HNRNP X) (CBP).//1.4e-53:156:68//MUS MUSCULUS (MOUSE).//Q61990

[6156] F-Y79AA1000774//HYPOTHETICAL 77.9 KD PROTEIN IN RRN10-MCM2 INTERGENIC REGION.//1.2e-11:231:26//SACCHAROMYCES CEREVISIAE (BAKER'S YEAST).//P38205

[6157] F-Y79AA1000782//CUTICLE COLLAGEN 2.//0.012:56:35//CAENORHABDITIS ELEGANS.//P17656

[6158] F-Y79AA1000784//HISTIDINE-RICH GLYCOPROTEIN PRECURSOR.//1.3e-08:82:39//PLASMODIUM LOPHURAE.//P04929

[6159] F-Y79AA1000794//DNA-BINDING P52/P100 COMPLEX, 100 KD SUBUNIT (FRAGMENTS).//0.043:13:53//HOMO SAPIENS (HUMAN).//P30808

[6160] F-Y79AA1000800//PRIA PROTEIN PRECURSOR.//0.031:94:34//LENTINULA EDODES (SHIITAKE MUSHROOM) (LENTINUS EDODES).//Q01200

[6161] F-Y79AA1000802//HYPOTHETICAL 67.4 KD PROTEIN IN RPS3-PSDI INTERGENIC REGION.//0.26:186:23//SACCHAROMYCES CEREVISIAE (BAKER'S YEAST).//P53882

[6162] F-Y79AA1000805//AMP DEAMINASE (EC 3.5.4.6) (MYOADENYLATE DEAMINASE).//0.99:78:35//SCHIZOSACCHAROMYCES POMBE (FISSION YEAST).//P50998

[6163] F-Y79AA1000824//HYPOTHETICAL 81.7 KD PROTEIN IN MOLI-NAT21NTERGENIC REGION.//3.4e-44:111:49//SACCHAROMYCES CEREVISIAE (BAKER'S YEAST).//P48234

[6164] F-Y79AA1000827//HYPOTHETICAL BHLF I PROTEIN.//0.0046:187:33//EPSTEIN-BARR VIRUS (STRAIN B95-8) (HUMAN HERPESVIRUS 4).//P03181

[6165] F-Y79AA1000833//TUBULIN ALPHA-1 CHAIN.//1.0e-75:239:66//CRICETULUS GRISEUS (CHINESE HAMSTER).//P05209

[6166] F-Y79AA1000850//SMALL PROLINE-RICH PROTEIN II (SPR-II) (CLONE 174N).//0.0078:57:31//HOMO SAPIENS (HUMAN).//P22532

[6167] F-Y79AA1000962//MYOSIN HEAVY CHAIN, GIZZARD SMOOTH MUSCLE.//8.5e-11:241:26//GALLUS GALLUS (CHICKEN).//P10587

[6168] F-Y79AA1000966//ATP SYNTHASE A CHAIN (EC 3.6.1.34) (PROTEIN 6).//0.69:122:31//TRYPANOSOMA BRUCEI BRUCEI.//P24499

[6169] F-Y79AA1000968//TRANSLATION INITIATION FACTOR EIF-2B GAMMA SUBUNIT (EIF-2B GDP-GTP EXCHANGE FACTOR).//3.3e-102:211:93//RATTUS NORVEGICUS (RAT).//P70541

[6170] F-Y79AA1000969//PROCOLLAGEN ALPHA 1(I) CHAIN PRECURSOR.//1.0:67:38//GALLUS GALLUS (CHICKEN).//P02457

[6171] F-Y79AA1000976//INVOLUCRIN.//0.99:66:31//CEBUS ALBIFRONS (WHITE-FRONTED CAPUCHIN).//P24709

[6172] F-Y79AA1000985//PERICENTRIN.//1.1e-24:116:59/lMUS MUSCULUS (MOUSE).//P48725

[6173] F-Y79AA1001023//HYPOTHETICAL 105.9 KD PROTEIN IN AAC3-RFC5 INTERGENIC REGION.//0.37:79:27//SACCHAROMYCES CEREVISIAE (BAKER'S YEAST).//P38250

[6174] F-Y79AA1001041//SPERMATID-SPECIFIC PROTEIN T1 [CONTAINS: SPERM PROTAMINE SP1].//0.93:43:39//SEPIA OFFICINALIS (COMMON CUTTLEFISH).//P80001

[6175] F-Y79AA1001048//ACYL-COA DEHYDROGENASE, VERY-LONG-CHAIN SPECIFIC PRECURSOR (EC 1.3.99.-) (VLCAD).//1.5e-51:211:52//BOS TAURUS (BOVINE).//P48818

[6176] F-Y79AA1001061//!!!! ALU SUBFAMILY SQ WARNING ENTRY !!!!//3.8e-25:85:69//HOMO SAPIENS (HUMAN).//P39194

[6177] F-Y79AA1001068//PROCOLLAGEN ALPHA 1(II) CHAIN PRECURSOR [CONTAINS: CHONDROCALCIN].//0.0015:207:33//MUS MUSCULUS (MOUSE).//P28481

[6178] F-Y79AA1001077//ADULT-SPECIFIC RIGID CUTICULAR PROTEIN 11.9 (ACP 11.9).//0.99:36:41//ARANEUS DIADEMATUS (SPIDER).//P80515

[6179] F-Y79AA1001078//HYPOTHETICAL 88.1 KD PROTEIN K02D10.1 IN CHROMOSOME III.//1.0e-06:197:23//CAENORHABDITIS ELEGANS.//P34492

[6180] F-Y79AA1001105//HOMEOBOX PROTEIN OTX2.//2.9e-62:163:79//MUS MUSCULUS (MOUSE).//P80206

[6181] F-Y79AA1001145/1!!!! ALU SUBFAMILY SX WARNING ENTRY !!!!//0.024:42:59//HOMO SAPIENS (HUMAN).//P39195

[6182] F-Y79AA1001167//HYPOTHETICAL 7.1 KD PROTEIN IN IAP2-VLF1 INTERGENIC REGION.//0.96:20:50//AUTOGRAPHA CALIFORNICA NUCLEAR POLYHEDROSIS VIRUS (ACMNPV).//P41471

[6183] F-Y79AA1001177//HYPOTHETICAL BHLF 1 PROTEIN.//3.9e-05:135:34//EPSTEIN-BARR VIRUS (STRAIN B95-8) (HUMAN HERPESVIRUS 4).//P03181

[6184] F-Y79AA1001185//PUTATIVE CUTICLE COLLAGEN C09G5.5.//0.00017:93:38//CAENORHABDITIS ELEGANS.//Q09456

[6185] F-Y79AA1001211

[6186] F-Y79AA1001216//TENSIN.//0.012:134:32//GALLUS GALLUS (CHICKEN).//Q04205

[6187] F-Y79AA1001228//MUCIN 2 PRECURSOR (INTESTINAL MUCIN 2).//0.088:75:34//HOMO SAPIENS (HUMAN).//Q02817

[6188] F-Y79AA1001233//ESTRADIOL 17 BETA-DEHYDROGENASE I (EC 1.1.1.62) (17-BETA-HSD 1) (17-BETA-HYDROXYSTEROID DEHYDROGENASE 1).//1.l e-40:139:51//RATTUS NORVEGICUS (RAT).//P51657

[6189] F-Y79AA1001236//HYPOTHETICAL 34.7 KD PROTEIN IN ORC2-TIP1 INTERGENIC REGION.//2.0e-22:108:53//SACCHAROMYCES CEREVISIAE (BAKER'S YEAST).//P38238

[6190] F-Y79AA1001281

[6191] F-Y79AA1001299//PROLINE-RICH PROTEIN MP-3 (FRAGMENT).//0.0022:49:44//MUS MUSCULUS (MOUSE).//P05143

[6192] F-Y79AA1001312//50S RIBOSOMAL PROTEIN L24, CHLOROPLAST PRECURSOR.//0.98:117:25//ARABIDOPSIS THALIANA (MOUSE-EAR CRESS).//P92959

[6193] F-Y79AA1001323//CORNIFIN (SMALL PROLINE-RICH PROTEIN I) (SPR-I) (SMALL PROLINE-RICH SQUAMOUS CELL MARKER) (SPRP).//0.082:44:40//SUS SCROFA (PIG).//P35323

[6194] F-Y79AA1001384//APOLIPOPROTEIN C-III PRECURSOR (APO-CIII).//0.99:47:40Q/MUS MUSCULUS (MOUSE).//P33622

[6195] F-Y79AA1001391//HOMEOBOX PROTEIN HOX-A 13 (HOX-1 J).//9.8e-58:157:62//HOMO SAPIENS (HUMAN).//P31271

[6196] F-Y79AA1001394//TRICHOHYALIN.//4.7e-08:121:36//HOMO SAPIENS (HUMAN).//Q07283

[6197] F-Y79AA1001402//ETS-DOMAIN TRANSCRIPTION FACTOR ERF.//0.0087:81:33//MUS MUSCULUS (MOUSE).//P70459

[6198] F-Y79AA1001493//HYPOTHETICAL 48.1 KD PROTEIN B0403.2 IN CHROMOSOME X.//4.5e-21:125:44//CAENORHABDITIS ELEGANS.//Q1076

[6199] F-Y79AA1001511//HYPOTHETICAL 86.6 KD PROTEIN IN PFK1-TDS4 INTERGENIC REGION.//2.3e-17:249:31//SACCHAROMYCES CEREVISIAE (BAKER'S YEAST).//P53313

[6200] F-Y79AA1001533//DNA-DIRECTED RNA POLYMERASE 149 KD POLYPEPTIDE (EC 2.7.7.6) (A49).//0.0099:155:23//SACCHAROMYCES CEREVISIAE (BAKER'S YEAST).//Q01080

[6201] F-Y79AA1001541

[6202] F-Y79AAI001548//!!!! ALU SUBFAMILY SC WARNING ENTRY !!!!//1.1e-17:53:83//HOMO SAPIENS (HUMAN).//P39192

[6203] F-Y79AA1001555//MAJOR SURFACE ANTIGEN.//0.046:62:29//HEPATITIS B VIRUS.//P31873

[6204] F-Y79AA1001581//ACETYL-COENZYME A SYNTHETASE (EC 6.2.1.1) (ACETATE-COA LIGASE) (ACYL- ACTIVATING ENZYME).//8.6e-11:144:31//ESCHERICHIA COLI.//P27550

[6205] F-Y79AA1001585//SPERM MITOCHONDRIAL CAPSULE SELENOPROTEIN (MCS).//0.012:64:40//MUS MUSCULUS (MOUSE).//P15265

[6206] F-Y79AA1001594//CORNIFIN BETA.//0.61:88:31//MUS MUSCULUS (MOUSE).//O09116

[6207] F-Y79AA1001603//TRANSCRIPTION INITIATION FACTOR TFIID 135 KD SUBUNIT (TAFII-135) (TAF1135) (TAFII-130) (TAF1130).//0.024:170:30//HOMO SAPIENS (HUMAN).//O00268

[6208] F-Y79AA1001613//ZINC FINGER PROTEIN 42 (MYELOID ZINC FINGER 1) (MZF-1).//4.5e-09:136:27//HOMO SAPIENS (HUMAN).//P28698

[6209] F-Y79AA1001647//HYPOTHETICAL 23.1 KD PROTEIN CY277.20C.//0.093:94:26//MYCOBACTERIUM TUBERCULOSIS.//P71779

[6210] F-Y79AA1001665//HOMEOBOX PROTEIN DLX-2 (HOMEOBOX PROTEIN TES-1).//0.79:90:26//MUS MUSCULUS (MOUSE).//P40764

[6211] F-Y79AA1001679//LAMBDA-CRYSTALLIN.//1.6e-95:224:81//ORYCTOLAGUS CUNICULUS (RABBIT).//P14755

[6212] F-Y79AA1001692//GERM CELL-LESS PROTEIN.//3.5e-08:78:38//DROSOPHILA MELANOGASTER (FRUIT FLY).//QO 1820

[6213] F-Y79AA1001696//INSULIN.//1.0:33:27//ANGUILLA ROSTRATA (AMERICAN EEL).//P42633

[6214] F-Y79AA1001705//HYPOTHETICAL BHLF 1 PROTEIN.//0.0013:192:33//EPSTEIN-BARR VIRUS (STRAIN B95-8) (HUMAN HERPESVIRUS 4).//P03181

[6215] F-Y79AA1001711//PARATHYMOSIN (ZINC-BINDING 11.5 KD PROTEIN).//0.032:38:34//RATTUS NORVEGICUS (RAT).//P04550

[6216] F-Y79AA1001781

[6217] F-Y79AA1001805//VASODILATOR-STIMULATED PHOSPHOPROTEIN (VASP).//0.0063:128:30//HOMO SAPIENS (HUMAN).//P50552

[6218] F-Y79AA1001827//SPERM PROTAMINE P1 .//0.015:45:40//DIDELPHIS MARSUPIALIS VIRGINIANA (NORTH AMERICAN OPOSSUM), AND MONODELPHIS DOMESTICA (SHORT-TAILED GREY OPOSSUM).//P35305

[6219] F-Y79AA1001846//!!!! ALU SUBFAMILY J WARNING ENTRY !!!!//2.4e-09:42:73//HOMO SAPIENS (HUMAN).//P39188

[6220] F-Y79AA1001848//KRUEPPEL PROTEIN (FRAGMENT).//1.8e-10:63:44//PSYCHODA CINEREA.//Q02035

[6221] F-Y79AA1001866//ZINC FINGER PROTEIN 90 (ZFP-90) (ZINC FINGER PROTEIN NK10).//0.00036:108:37//MUS MUSCULUS (MOUSE).//Q61967

[6222] F-Y79AA1001874//OX40L RECEPTOR PRECURSOR (ACT35 ANTIGEN) (TAX-TRANSCRIPTIONALLY ACTIVATED GLYCOPROTEIN I RECEPTOR) (CD134 ANTIGEN).//3.2e-07:100:35//HOMO SAPIENS (HUMAN).//P43489

[6223] F-Y79AA1001875//B-CELL GROWTH FACTOR PRECURSOR (BCGF-12 KD).//0.020:25:64//HOMO SAPIENS (HUMAN).//P20931

[6224] F-Y79AA1001923//SALIVARY PROLINE-RICH PROTEIN PO (ALLELE K) [CONTAINS: PEPTIDE P-D] (FRAGMENT).//0.016:83:36//HOMO SAPIENS (HUMAN).//P10162

[6225] F-Y79AA1001963//PUTATIVE PRE-MRNA SPLICING FACTOR ATP-DEPENDENT RNA HELICASE SPAC10F6.02C.//8.1e-13:94:47//SCHIZOSACCHAROMYCES POMBE (FISSION YEAST).//O42643

[6226] F-Y79AA1002027//UBIQUITIN-CONJUGATING ENZYME E2-18 KD (EC 6.3.2.19) (UBIQUITIN- PROTEIN LIGASE) (UBIQUITIN CARRIER PROTEIN) (PM42).//9.8e-39:143:52//ARABIDOPSIS THALIANA (MOUSE-EAR CRESS).//P42743

[6227] F-Y79AA1002083//DNA-BINDING P52/P100 COMPLEX, 100 KD SUBUNIT (FRAGMENTS).//0.036:53:45//HOMO SAPIENS (HUMAN).//P30808

[6228] F-Y79AA1002089//HYPOTHETICAL 49.1 KD PROTEIN F02A9.4 IN CHROMOSOME III.//0.12:171:22//CAENORHABDITIS ELEGANS.//P34384

[6229] F-Y79AA1002093//MAX PROTEIN.//3.1e-07:111:29//BRACHYDANIO RERIO (ZEBRAFISH) (ZEBRA DANIO).//P52161

[6230] F-Y79AA1002103//SHORT NEUROTOXIN C.//0.040:21:47//AIPYSURUS LAEVIS (OLIVE SEA SNAKE).//P19958

[6231] F-Y79AA1002115//HYPOTHETICAL PROTEIN MJ0827.//0.84:68:30//METHANOCOCCUS JANNASCHII.//Q58237

[6232] F-Y79AA1002125//HYPOTHETICAL 24.7 KD PROTEIN IN POM152-REC114 INTERGENIC REGION.//3.4e-29:197:39//SACCHAROMYCES CEREVISIAE (BAKER'S YEAST).//P40206

[6233] F-Y79AA1002139//DNAJ PROTEIN HOMOLOG 1 (DROJ1).//1.9e-19:120:45//DROSOPHILA MELANOGASTER (FRUIT FLY).//Q24133

[6234] F-Y79AA1002204//TBX6 PROTEIN (T-BOX PROTEIN 6).//0.0011:162:32//MUS MUSCULUS (MOUSE).//P70327

[6235] F-Y79AA1002208//ANKYRIN.//2.9e-08:231:29//MUS MUSCULUS (MOUSE).//Q02357

[6236] F-Y79AA1002209//TYROSYL-TRNA SYNTHETASE, MITOCHONDRIAL PRECURSOR (EC 6.1.1.1) (TYROSINE-TRNA LIGASE) (TYRRS).//3.7e-23:170:32//SACCHAROMYCES CEREVISIAE (BAKER'S YEAST).//P48527

[6237] F-Y79AA1002210//CORNIFIN A (SMALL PROLINE-RICH PROTEIN IA) (SPR-IA) (SPRK).//0.0061:69:31//HOMO SAPIENS (HUMAN).//P35321

[6238] F-Y79AA1002211//!!!! ALU SUBFAMILY SP WARNING ENTRY !!!!//9.2e-10:43:62//HOMO SAPIENS (HUMAN).//P39193

[6239] F-Y79AA1002220

[6240] F-Y79AA1002229//HYPOTHETICAL 60.7 KD PROTEIN C56F8.17C IN CHROMOSOME I.//1.9e-21:147:40//SCHIZOSACCHAROMYCES POMBE (FISSION YEAST).//Q10264

[6241] F-Y79AA1002234

[6242] F-Y79AA1002246//MYOSIN IC HEAVY CHAIN.//0.00066:131:34//ACANTHAMOEBA CASTELLANII (AMOEBA).//P10569

[6243] F-Y79AA1002258//HYPOTHETICAL 103.9 KD PROTEIN ZK370.3 IN CHROMOSOME III.//4.3e-45:164:48//CAENORHABDITIS ELEGANS.//Q02328

[6244] F-Y79AA1002298//SALIVARY PROLINE-RICH PROTEIN PO (ALLELE M) [CONTAINS: PEPTIDE P-D] (FRAGMENT).//0.0063:99:3//HOMO SAPIENS (HUMAN).//P10161

[6245] F-Y79AA1002307

[6246] F-Y79AA1002311//HYPOTHETICAL 105.3 KD PROTEIN CO0G6.5 IN CHROMOSOME III.//0.75:198:24//CAENORHABDITIS ELEGANS.//P46012

[6247] F-Y79AA1002351//CUTICLE COLLAGEN 34.//0.74:128:35//CAENORHABDITIS ELEGANS.//P34687

[6248] F-Y79AA1002361//GLC7-INTERACTING PROTEIN 2.//0.050:71:29//SACCHAROMYCES CEREVISIAE (BAKER'S YEAST).//P40036

[6249] F-Y79AA1002399//NEUROMODULIN (AXONAL MEMBRANE PROTEIN GAP-43) (PP46) (B-50) (PROTEIN F1) (CALMODULIN-BINDING PROTEIN P-57).//1.0:89:30//CARASSIUS AURATUS (GOLDFISH).//P17691

[6250] F-Y79AA1002407//HYPOTHETICAL 31.5 KD PROTEIN IN YGP1-YCK2 INTERGENIC REGION.//3.7e-16:232:28//SACCHAROMYCES CEREVISIAE (BAKER'S YEAST).//P53899

[6251] F-Y79AA1002416//CTP SYNTHASE (EC 6.3.4.2) (UTP-AMMONIA LIGASE) (CTP SYNTHETASE).//6.7e-72:162:84//HOMO SAPIENS (HUMAN).//P17812

[6252] F-Y79AA1002431//SMALL PROLINE RICH PROTEIN II (SPR-II) (CLONE 930).//0.81:34:41//HOMO SAPIENS (HUMAN).//P22531

[6253] F-Y79AA1002433//CELL DIVISION CONTROL PROTEIN 68.//0.00024:85:27//SACCHAROMYCES CEREVISIAE (BAKER'S YEAST).//P32558

[6254] F-Y79AA1002472//ZINC FINGER PROTEIN 35 (ZFP-35).//2.3e-60:217:44//MUS MUSCULUS (MOUSE).//P15620

[6255] F-Y79AA1002482//ZINC FINGER PROTEIN 141.//2.0e-31:90:55//HOMO SAPIENS (HUMAN).//Q15928

[6256] F-Y79AA1002487//HYPOTHETICAL 67.1 KD TRP-ASP REPEATS CONTAINING PROTEIN C57A10.05C IN CHROMOSOME I.//0.18:41:36//SCHIZOSACCHAROMYCES POMBE (FISSION YEAST).//P87053

[6257] Homology Search Result Data 2.

[6258] The result of the homology search of the GenBank using the clone sequence of 5′-end except EST and STS.

[6259] Data include

[6260] the name of clone,

[6261] definition of the top hit data,

[6262] the P-value: the length of the compared sequence: identity (%), and

[6263] the Accession No. of the top hit data, as in the order separated by //.

[6264] Data are not shown for the clones in which the P-value was higher than 1.

[6265] F-HEMBA1000005//Mouse tumor cell dnaJ-like protein 1 mRNA, complete cds.//3.4e-106:695:86//L16953

[6266] F-HEMBA1000012//Caenorhabditis elegans cosmid C16C10, complete sequence.//1.5e-24:374:6611Z46787

[6267] F-HEMBA1000020//Homo sapiens beta 2 gene.//3.5e-112:529:90//X02344

[6268] F-HEMBA1000030//Rattus norvegicus G protein-coupled receptor kinase-associated ADP ribosylation factor GTPase-activating protein (GIT1) mRNA, complete cds.//5.6e-124:743:88//AF085693

[6269] F-HEMBA1000042//Human Chromosome 15q26.1 PAC clone pDJ460gl6, WORKING DRAFT SEQUENCE, 3 unordered pieces.//1.1e-25:529:65//AC004581

[6270] F-HEMBA1000046//Human DNA sequence *** SEQUENCING IN PROGRESS *** from clone 12513, WORKING DRAFT SEQUENCE.//3.2e-11:330:63//AL033528

[6271] F-HEMBA1000050//Homo sapiens DNA sequence from PAC 172K10 on chromosome 6q24. Contains STS, GSS and chromosome 6 fragment, complete sequence.//0.32:407:59//AL022477

[6272] F-HEMBA1000076//Homo sapiens full-length insert cDNA clone ZB97G06.//6.2e-135:594:98//AF086182

[6273] F-HEMBA1000110//CIT-HSP-2291M18.TF CIT-HSP Homo sapiens genomic clone 2291M18, genomic survey sequence.//2.8e-16:132:79//AQ004134

[6274] F-HEMBA1000129//Homo sapiens chromosome 17, clone HClT48C 15, complete sequence.//8.6e-98:230:93//AC003104

[6275] F-HEMBA1000141//Homo sapiens mRNA for KIAA0797 protein, partial cds.//2.1e-167:791:98//AB018340

[6276] F-HEMBA1000150//Homo sapiens mRNA for KIAA0788 protein, partial cds.//2.2e-44:242:96//AB018331

[6277] F-HEMBA1000156//Rattus norvegicus scaffold attachment factor B mRNA, complete cds.//1.1e-10:409:60//AF056324

[6278] F-HEMBA1000158//Homo sapiens CAGH44 mRNA, partial cds.//1.6e-35:365:73//U80741

[6279] F-HEMBA1000168//Human DNA sequence *** SEQUENCING IN PROGRESS *** from clone 321D2, WORKING DRAFT SEQUENCE.//0.99:290:61//AL031033

[6280] F-HEMBA1000180//rat u2 small nuclear ma gene and flanks.//3.7e-18:112:98//K00034

[6281] F-HEMBA1000185

[6282] F-HEMBA1000193//Human FMR1 gene, 5′ end.//0.0012:191:67//L19476

[6283] F-HEMBA1000201//Human Ini mRNA, complete cds.//2.0e-73:440:92//U04847

[6284] F-HEMBA1000213//Plasmodium falciparum MAL3P7, complete sequence.//0.90:332:59//AL034559

[6285] F-HEMBA1000216//Mus musculus hypoxia inducible factor three alpha mRNA, complete cds.//4.8e-117:585:83//AF060194

[6286] F-HEMBA1000227//H. sapiens CpG island DNA genomic Mse1 fragment, clone 179h6, reverse read cpg179h6.rt1a.//1.9e-14:95:98//Z64921

[6287] F-HEMBA1000231//H. sapiens CpG island DNA genomic Mse1 fragment, clone 90a5, reverse read cpg90a5.rt1a.//5.1e-34:186:97//Z56144

[6288] F-HEMBA1000243//Human DNA sequence from PAC 440021 on chromosome X contains ESTs and STS.//4.1e-67:291:82//Z84481

[6289] F-HEMBA1000244//M. musculus Ank-1 mRNA for erythroid ankyrin.//0.029:316:59//X69065

[6290] F-HEMBA1000251//Homo sapiens PAC clone DJ0988L12 from 7q11.23-q21.1, complete sequence.//0.35:467:60//AC004454

[6291] F-HEMBA1000264

[6292] F-HEMBA1000280//Homo sapiens clone DJ0292L20, WORKING DRAFT SEQUENCE, 2 unordered pieces.//8.9e-20:218:78//AC004825

[6293] F-HEMBA1000282//Homo sapiens chromosome Y, clone 264, M, 20, complete sequence.//4.2e-08:134:77//AC004617

[6294] F-HEMBA1000288//345L5.TPB CIT978SKA1 Homo sapiens genomic clone A-345L05, genomic survey sequence.//1.1e-06:152:73//B17459

[6295] F-HEMBA1000290//Human ornithine decarboxylase gene, complete cds.//3.2e-11:507:62//M33764

[6296] F-HEMBA1000302//CIT-HSP-2169N13.TF CIT-HSP Homo sapiens genomic clone 2169N13, genomic survey sequence.//5.4e-06:86:88//B90730

[6297] F-HEMBA1000303//Mus musculus Plenty of SH3s (POSH) mRNA, complete cds.//7.9e-111:701:86//AF030131

[6298] F-HEMBA1000304//HS_{—}3006_A1_A09_T7 CIT Approved Human Genomic Sperm Library D Homo sapiens genomic clone Plate=3006 Col=17 Row=A, genomic survey sequence.//5.2e-40:240:92//AQ118226

[6299] F-HEMBA1000307//Mus musculus mRNA for CDV-IR protein.//7.9e-127:815:84//Y10495

[6300] F-HEMBA1000327//HS_{—}3124_B2_H08_MR CIT Approved Human Genomic Sperm Library D Homo sapiens genomic clone Plate=3124 Col=16 Row=P, genomic survey sequence.//1.4e-11:87:96//AQ187492

[6301] F-HEMBA1000333

[6302] F-HEMBA1000338//Homo sapiens chromosome X, PAC 671D9, complete sequence.//4.0e-66:271:84//AF031078

[6303] F-HEMBA1000351//Homo sapiens PAC clone DJ0649P17 from 7q1.23-q21, complete sequence.//0.64:334:60//AC004848

[6304] F-HEMBA1000355//Pseudorabies virus serine/threonine kinase (ULPK) gene, partial cds and alkaline nuclease (AN) gene, complete cds.//0.017:313:63//U25056

[6305] F-HEMBA1000356//Oryctolagus cuniculus troponin T cardiac isoform mRNA, 3′ end of cds.//0.87:198:61//L40178

[6306] F-HEMBA1000357//HS_{—}3194_A1_D05_MR CIT Approved Human Genomic Sperm Library D Homo sapiens genomic clone Plate=3194 Col=9 Row=G, genomic survey sequence.//6.5e-90:436:98//AQ173748

[6307] F-HEMBA1000366//HS_{—}3027_B2_G06_MF CIT Approved Human Genomic Sperm Library D Homo sapiens genomic clone Plate=3027 Col=12 Row=N, genomic survey sequence.//0.0074:192:64//AQ128843

[6308] F-HEMBA1000369//Human DNA sequence from clone 1039K5 on chromosome 22q12.3-13.2 Contains gene similar to PICKI perinuclear binding protein, gene similar to monocarboxylate transporter (MCT3), ESTs, STS, GSS and a CpG island, complete sequence.//4.2e-106:133:99//AL031587

[6309] F-HEMBA1000376//Homo sapiens chromosome 19, BAC CIT-B-393j5 (BC301323), complete sequence.//1.6e-22:659:63//AC006116

[6310] F-HEMBA1000387//Homo sapiens chromosome 12 p13.3 clone RPCI11-264F23, WORKING DRAFT SEQUENCE, 90 unordered pieces.//3.2e-06:136:75//AC006122

[6311] F-HEMBA1000390//Homo sapiens BAC clone RG1119C02 from 7p15, complete sequence.//3.5e-111:284:95//AC004520

[6312] F-HEMBA1000392//Human DNA sequence *** SEQUENCING IN PROGRESS *** from clone 173D1, WORKING DRAFT SEQUENCE.//1.8e-39:332:80//AL031984

[6313] F-HEMBA1000396//Human Xq133′ end of PAC 92E23 containing the X inactivation transcipt (XIST) gene, complete sequence.//9.5e-35:364:73//U80460

[6314] F-HEMBA1000411//Human Xp22 contig of 3 PACS (R7-39D12, R7-134G1, R7-185L21) from the Roswell Park Cancer Institute, complete sequence.//8.1e-18:424:64//U96409

[6315] F-HEMBA1000418//Drosophila melanogaster Oregon-R mitochondrial A+T region.//0.0026:564:59//U11584

[6316] F-HEMBA1000422//Human DNA from chromosome 19 specific cosmid R30292, genomic sequence, complete sequence.//9.2e-14:232:70//AC003112

[6317] F-HEMBA1000428//Homo sapiens Xp22 BAC GSHB-590J6 (Genome Systems Human BAC library) complete sequence.//3.8e-37:408:69//AC004554

[6318] F-HEMBA1000434//Caenorhabditis elegans cosmid Y48E I B, complete sequence.//0.73:454:5711Z93393

[6319] F-HEMBA1000442

[6320] F-HEMBA1000456//RPCI11-30J5.TV RPCI-11 Homo sapiens genomic clone RPCI-11-30J5, genomic survey sequence.//6.3e-06:62:96//B85188

[6321] F-HEMBA1000459//Mus musculus hemin-sensitive initiation factor 2 alpha kinase mRNA, complete cds.//6.8e-70:580:79//AF028808

[6322] F-HEMBA1000460//Homo sapiens PAC clone DJ0593H 12 from 7p31, complete sequence.//2.8e-154:746:98//AC004839

[6323] F-HEMBA1000464//Homo sapiens, clone hRPK.15_A_I, complete sequence.//4.8e-25:397:72//AC006213

[6324] F-HEMBA1000469//CIT-HSP-2167P21.TF CIT-HSP Homo sapiens genomic clone 2167P21, genomic survey sequence.//4.0e-83:406:99//B94160

[6325] F-HEMBA1000488//Homo sapiens Chromosome 22q11.2 PAC Clone pml I In BCRL2-GGT Region, complete sequence.//4.2e-53:312:93//AC004033

[6326] F-HEMBA1000490//Campylobacter jejuni groES, groEL genes.//0.59:451:62//Y13334

[6327] F-HEMBA1000491//Murine sarcoma virus (Harvey-strain) H-ras transforming p21 gene.//8.6e-06:338:58//X00740

[6328] F-HEMBA1000501//Homo sapiens chromosome 17, clone hRPK.264_B_{—}14, complete sequence.//9.4e-41:591:69//AC005884

[6329] F-HEMBA1000504//Homo sapiens mRNA for osteoblast specific factor 2 (OSF-2os).//4.0e-07:57:100//D13666

[6330] F-HEMBA1000505

[6331] F-HEMBA1000508//*** SEQUENCING IN PROGRESS *** Homo sapiens chromosome 4, BAC clone C0135005; HTGS phase 1, WORKING DRAFT SEQUENCE, 23 unordered pieces.//0.035:329:61//AC004661

[6332] F-HEMBA1000518//Caenorhabditis elegans cosmid C17H12.//0.96:425:58//AF045642

[6333] F-HEMBA1000519//Homo sapiens Xp22 BAC GSHB-536K7 (Genome Systems Human BAC library) complete sequence.//1.6e-53:300:89//AC004616

[6334] F-HEMBA1000520//Homo sapiens clone DJO813F11, WORKING DRAFT SEQUENCE, 5 unordered pieces.//1.7e-10:117:86//AC006006

[6335] F-HEMBA1000523

[6336] F-HEMBA1000531//Mus musculus Hsp70-related NST-1 (hsr.1) mRNA, complete cds.//3.9e-35:290:80//U08215

[6337] F-HEMBA1000534//Homo sapiens chromosome 17, clone hRPK.177_H_{—}5, WORKING DRAFT SEQUENCE, 2 ordered pieces.//1.7e-36:328:77//AC005973

[6338] F-HEMBA1000540//Arabidopsis thaliana DNA chromosome 4, BAC clone F7K2 (ESSAII project).//0.057:265:6311AL033545

[6339] F-HEMBA1000542//Rattus norvegicus mRNA for dipeptidyl peptidase III, complete cds.//1.2e-110:572:88//D89340

[6340] F-HEMBA1000545//Human DNA from cosmid L27h9, Huntington's Disease Region, chromosome 4 p16.3 contains CpG island.//7.5e-130:780:89//Z49237

[6341] F-HEMBA1000555//Human DNA sequence *** SEQUENCING IN PROGRESS *** from clone 134019, WORKING DRAFT SEQUENCE.//3.2e-175:838:98//AL034555

[6342] F-HEMBA1000557//CIT-HSP-2369F15.TF CIT-HSP Homo sapiens genomic clone 2369F15, genomic survey sequence.//2.8e-32:315:78//AQ074611

[6343] F-HEMBA1000561//Rattus norvegicus Olf-1/EBF associated Zn finger protein Roaz mRNA, alternatively spliced form, complete cds.//3.4e-69:665:72//U92564

[6344] F-HEMBA1000563//Plasmodium falciparum 3D7 chromosome 12 PFYAC1383 genomic sequence, WORKING DRAFT SEQUENCE, 3 unordered pieces.//0.59:261:61//AC005504

[6345] F-HEMBA1000568//HS_{—}3243_B2_A12_MR CIT Approved Human Genomic Sperm Library D Homo sapiens genomic clone Plate=3243 Col=24 Row=B, genomic survey sequence.//3.1e-54:323:91//AQ219628

[6346] F-HEMBA1000569//M. musculus mRNA for GPI-anchored protein.//1.4e-19:440:61//X89571

[6347] F-HEMBA1000575//Plasmodium falciparum 3D7 chromosome 12 PFYAC357 genomic sequence, WORKING DRAFT SEQUENCE, 7 unordered pieces.//0.0016:557:57//AC005506

[6348] F-HEMBA1000588//Mus musculus FLI-LRR associated protein-1 mRNA, complete cds.//1.7e-11:132:79//AF045573

[6349] F-HEMBA1000591//Homo sapiens mRNA for E1B-55 kDa-associated protein.//7.3e-43:228:97//AJ007509

[6350] F-HEMBA1000592//Mus musculus clone OST7314, genomic survey sequence.//7.3e-07:68:94//AF046733

[6351] F-HEMBA1000594//Human DNA sequence from PAC 306D1 on chromosome X contains ESTs.//8.7e-71:553:79//Z83822

[6352] F-HEMBA1000604//Human DNA sequence *** SEQUENCING IN PROGRESS *** from clone 237J2, WORKING DRAFT SEQUENCE.//2.9e-21:158:75//AL021394

[6353] F-HEMBA1000608//Homo sapiens mRNA for KIAA0456 protein, partial cds.//1.1e-118:561:99//AB007925

[6354] F-HEMBA1000622//Homo sapiens Chromosome 16 BAC clone CIT987SK-A-152E5, complete sequence.//2.2e-28:426:70//AC004382

[6355] F-HEMBA1000636//Human CpG island sequence, clone Q28B8.//1.0e-15:274:68//D85773

[6356] F-HEMBA1000637//Homo sapiens mRNA for KIAA0690 protein, partial cds.//6.7e-137:639:99//AB014590

[6357] F-HEMBA1000655//, complete sequence.//5.1e-83:685:80//AC005815

[6358] F-HEMBA1000657//Rattus norvegicus ADP-ribosylation factor-directed GTPase activating protein mRNA, complete cds.//1.1e-91:597:84//U35776

[6359] F-HEMBA1000662//Homo sapiens clone DJ0853H₂O, WORKING DRAFT SEQUENCE, 5 unordered pieces.//0.019:695:57//AC004907

[6360] F-HEMBA1000673//Human DNA sequence *** SEQUENCING IN PROGRESS *** from clone 229A8, WORKING DRAFT SEQUENCE.//1.5e-48:325:85//Z86090

[6361] F-HEMBA1000682//Homo sapiens (subclone 5_g5 from PI H25) DNA sequence.//7.7e-61:615:74//L43411

[6362] F-HEMBA1000686

[6363] F-HEMBA1000702

[6364] F-HEMBA1000705//Plasmodium falciparum 3D7 chromosome 12 PFYACB8-628 genomic sequence, WORKING DRAFT SEQUENCE, 9 unordered pieces.//0.0037:569:57//AC005507

[6365] F-HEMBAI1000719//Streptomyces coelicolor cosmid I C2.//2.0e-09:483:62//AL031124

[6366] F-HEMBA1000722//Toxoplasma gondii chloroplast, complete genome.//0.00058:762:57//U87145

[6367] F-HEMBA1000726//H. sapiens HLA-DRB1*15 gene.//9.8e-49:189:89//X88791

[6368] F-HEMBA1000727//CIT-HSP-387P22.TRB CIT-HSP Homo sapiens genomic clone 387P22, genomic survey sequence.//0.0054:206:67//B60158

[6369] F-HEMBA1000747

[6370] F-HEMBA1000749//Human DNA sequence from clone 522P 13 on chromosome 6p21.31-22.3. Contains a 60S Ribosomal Protein L21 pseudogene and an HNRNP A3 (Heterogenous Nuclear Riboprotein A3, FBRNP) pseudogene. Contains ESTs, STSs and GSSs, complete sequence.//3.3e-05:124:75//AL024509

[6371] F-HEMBA1000752//Human Chromosome X, complete sequence.//5.9e-48:502:75//AC004073

[6372] F-HEMBA1000769//Homo sapiens clone NH0576N21, WORKING DRAFT SEQUENCE, 5 unordered pieces.//0.011:179:67//AC005043

[6373] F-HEMBA1000773//Caenorhabditis elegans DNA *** SEQUENCING IN PROGRESS *** from clone Y59A8, WORKING DRAFT SEQUENCE.//0.070:231:63//Z98870

[6374] F-HEMBA1000774//Homo sapiens PAC clone DJ1059M17 from 7q21-q31.1, complete sequence.//6.2e-40:385:75//AC004953

[6375] F-HEMBA1000791

[6376] F-HEMBA1000817//Mymecia pilosula H187-135 mitochondrion cytochrome b gene, partial cds.//0.99:244:58//U15678

[6377] F-HEMBA1000822//Human DNA sequence from PAC 179D3, between markers DXS6791 and DXS8038 on chromosome X contains SI 0 GTP-binding protein, ESTs and CpG island.//0.033:294:62//Z81370

[6378] F-HEMBA1000827//Borrelia burgdorferi (section 50 of 70) of the complete genome.//9.7e-05:463:58//AE001164

[6379] F-HEMBA1000843//Homo sapiens DNA sequence from clone 511 B24 on chromosome 20q11.2-12. Contains the TOPI gene for Topoisomerase I, the PLCG1 gene for 1-Phosphatidylinositol-4,5-Bisphosphate Phosphodiesterase Gamma 1 (EC 3.1.4.11, PLC-Gamma-1, Phospholipase C-Gamma-1 PLC-II, PLC-148), the KIAA0395 gene for a probable Zinc Finger Homeobox protein and a 60S Ribosomal Protein L23 LIKE pseudogene. Contains a predicted CpG island, ESTs, STSs and GSSs, complete sequence.//3.0e-153:732:98//AL022394

[6380] F-HEMBA1000851//Rattus norvegicus glucocorticoid modulatory element binding protein 2 mRNA, complete cds.//1.6e-31:386:72//AF059273

[6381] F-HEMBA1000852//Homo sapiens Xp22 bins 3-5 PAC RPCI4-617A9 (Roswell Park Cancer Institute Human PAC Library) containing Arylsulfatase D and E genes, complete sequence.//8.5e-115:455:98//AC005295

[6382] F-HEMBA1000867

[6383] F-HEMBA1000869//Human DNA sequence from cosmid J138017, between markers DXS6791 and DXS8038 on chromosome X contains EST CA repeat and an endogenous retroviral like element.//6.6e-41:424:7511Z72519

[6384] F-HEMBA1000870//Gnamptodon pumilio cytochrome oxidase II gene, partial cds; and tRNA-Asp, tRNA-His, and tRNA-Lys genes, complete sequence, mitochondrial genes for mitochondrial products.//0.0049:211:66//AF034598

[6385] F-HEMBA1000872//CIT-HSP-2355D20.TF CIT-HSP Homo sapiens genomic clone 2355D20, genomic survey sequence.//3.7e-33:180:98//AQ059583

[6386] F-HEMBA1000876//Human DNA sequence *** SEQUENCING IN PROGRESS *** from clone 473B4, WORKING DRAFT SEQUENCE.//5.6e-37:262:72//Z83826

[6387] F-HEMBA1000908//Triticum aestivum low-affinity cation transporter (LCTI) mRNA, complete cds.//1.0:304:59//AF015523

[6388] F-HEMBA1000910//M. musculus necdin mRNA, complete cds.//6.1e-08:256:61//M80840

[6389] F-HEMBA1000918//Tetrahymena thermophila micronuclear developmentally eliminated sequence region.//0.13:232:63//U88158

[6390] F-HEMBA1000919//Gallus domesticus filamin mRNA, complete cds.//11.0:213:65//U001147

[6391] F-HEMBA1000934//CIT-HSP-2053H24.TR CIT-HSP Homo sapiens genomic clone 2053H24, genomic survey sequence.//5.5e-11:275:64//B69224

[6392] F-HEMBA1000942//Homo sapiens clone DJ0754G14, WORKING DRAFT SEQUENCE, 15 unordered pieces.//9.7e-05:78:83//AC004878

[6393] F-HEMBA1000943//Homo sapiens chromosome 17, clone hRPK.640_I_{—}15, complete sequence.//5.8e-140:661:99//AC005324

[6394] F-HEMBA1000946

[6395] F-HEMBA1000960//Homo sapiens clone DJI 11F22, WORKING DRAFT SEQUENCE, 12 unordered pieces.//8.3e-16:181:75//AC004967

[6396] F-HEMBA1000968//Human DNA sequence *** SEQUENCING IN PROGRESS *** from clone 69M21, WORKING DRAFT SEQUENCE.//4.4e-117:398:86//AL031735

[6397] F-HEMBA1000971//H. sapiens CpG island DNA genomic Mse1 fragment, clone 182f4, forward read cpg182f4.ft1a.//1.5e-20:126:96//Z57528

[6398] F-HEMBA1000972//Homo sapiens genomic DNA of 8p21.3-p22 anti-oncogene of hepatocellular colorectal and non-small cell lung cancer, segment 1/11 .//0.34:642:59//AB020858

[6399] F-HEMBA1000974//Homo sapiens clone DA0091H08, complete sequence.//5.1e-183:865:98//AC004817

[6400] F-HEMBA1000975//Orf virus homologue of retroviral pseudoprotease gene, complete cds.//0.00065:391:62//M30023

[6401] F-HEMBA1000985//Human DNA sequence from clone 272E8 on chromosome Xp22.13-22.31. Contains a pseudogene similar to MDM2-Like P53-binding protein gene. Contains STSs, GSSs and a CA repeat polymorphism, complete sequence.//3.4e-05:243:65//Z93929

[6402] F-HEMBA1000986//Homo sapiens DNA from chromosome 19-cosmid R31491, genomic sequence.//6.6e-06:508:61//AD000813

[6403] F-HEMBA1000991//Homo sapiens mRNA for Hrs, complete cds.//1.2e-22:193:84//D84064

[6404] F-HEMBA1001007

[6405] F-HEMBA1001008//Human DNA sequence from clone 391022 on chromosome 6p21.2-21.31 Contains pseudogenes similar to ribosomal protein, ESTs, GSSs, complete sequence.//7.8e-46:532:73//AL031577

[6406] F-HEMBA1001009//Human mRNA for IgM heavy chain complete sequence.//0.97:369:59//X17115

[6407] F-HEMBA1001017//Homo sapiens mRNA for KIAA0468 protein, complete cds.//4.4e-139:661:98//AB007937

[6408] F-HEMBA1001019//Homo sapiens, clone hRPK.15_A_{—}1, complete sequence.//1.6e-16:521:64//AC006213

[6409] F-HEMBA1001020//Homo sapiens chromosome 17, clone hRPK.178_C_{—}3, complete sequence.//3.8e-50:367:72//AC005702

[6410] F-HEMBA1001022

[6411] F-HEMBA1001024//Homo sapiens T-cell receptor alpha delta locus from bases 1 to 250529 (section 1 of 5) of the Complete Nucleotide Sequence.//5.0e-23:378:69//AE000658

[6412] F-HEMBA1001026//Homo sapiens DNA sequence from PAC 435D1 on chromosome Xq25. Contains ESTs and STS.//7.6e-19:867:60//Z86064

[6413] F-HEMBA1001043//HS_{—}2219_B1_A10_MF CIT Approved Human Genomic Sperm Library D Homo sapiens genomic clone Plate=2219 Col=19 Row=B, genomic survey sequence.//3.0e-15:124:88//AQ301521

[6414] F-HEMBA1001051//Human Chromosome X clone bWXD342, complete sequence.//4.8e-79:308:84//AC004072

[6415] F-HEMBA1001052//Homo sapiens chromosome 17, clone hRPK.146_P_{—}2, WORKING DRAFT SEQUENCE, 4 unordered pieces.//0.53:384:61//AC005341

[6416] F-HEMBA1001059//Human N-acetylgalactosamine 6-sulphatase (GALNS) gene, exon 10.//2.8e-26:397:71//U06084

[6417] F-HEMBA1001060//Homo sapiens chromosome 17, clone hRPK.855_D_{—}21, complete sequence.//0.98:280:62//AC006079

[6418] F-HEMBA1001071//Human mRNA for pro alpha I (III) collagen C-terminal propeptide.//1.1e-31:181:96//X01742

[6419] F-HEMBA1001077//nuclear protein TIFI [mice, mRNA, 3951 nt].//3.6e-13:338:65//S78219

[6420] F-HEMBA1001080//Streptomyces coelicolor cosmid I A9.//0.00012:364:63//AL034446

[6421] F-HEMBA1001085//Human Chromosome 15q26.1 PAC clone pDJ290i21 containing fur, fes, and alpha mannosidase 11x genes, WORKING DRAFT SEQUENCE, 9 unordered pieces.//8.5e-134:476:96//AC004586

[6422] F-HEMBA1001088//Sequence 1 from patent U.S. Pat. No. 5,552,529.//2.2e-71:303:78//125863

[6423] F-HEMBA1001094//Homo sapiens clone RG491N20, complete sequence.//8.9e-119:609:96//AC005105

[6424] F-HEMBA1001099

[6425] F-HEMBA1001109//Homo sapiens BAC clone RG318MO5 from 7q22-q31.1, complete sequence.//2.4e-58:347:87//AC005250

[6426] F-HEMBA1001121//Human DNA sequence * SEQUENCING IN PROGRESS *** from clone 90G24, WORKING DRAFT SEQUENCE.//3.4e-21:226:65//AL008723

[6427] F-HEMBA1001122//Plasmodium falciparum chromosome 2, section 20 of 73 of the complete sequence.//9.2e-07:732:57//AE001383

[6428] F-HEMBA1001123//Homo sapiens full-length insert cDNA clone ZD38E12.//1.1e-11:231:68//AF086247

[6429] F-HEMBA1001133//Homo sapiens clone DJ0856024, WORKING DRAFT SEQUENCE, 4 unordered pieces.//0.011:163:69//AC004909

[6430] F-HEMBA1001137//Homo sapiens mRNA for KIAA0798 protein, complete cds.//6.9e-72:527:77//AB018341

[6431] F-HEMBA1001140//Homo sapiens clone RG228D17, WORKING DRAFT SEQUENCE, 2 unordered pieces.//2.3e-120:578:98//AC005077

[6432] F-HEMBA1001172//Plasmodium falciparum 3D7 chromosome 12 PFYACB8-628 genomic sequence, WORKING DRAFT SEQUENCE, 9 unordered pieces.//0.010:520:59//AC005507

[6433] F-HEMBA1001174//R. norvegicus (Sprague Dawley) ARL5 mRNA for ARF-like protein 5.//1.0e-59:565:73//X78604

[6434] F-HEMBA1001197//Homo sapiens clone 82F9, WORKING DRAFT SEQUENCE, 4 unordered pieces.//0.0037:151:70//AC004815

[6435] F-HEMBA1001208//Human BAC clone RG264L 19 from 7p 15-p21, complete sequence.//7.4e-35:195:81//AC002410

[6436] F-HEMBA1001213//Homo sapiens clone DJ0892G19, complete sequence.//1.9e-171:826:98//AC004917

[6437] F-HEMBA1001226//Homo sapiens clone DJ0850101, WORKING DRAFT SEQUENCE, I unordered pieces.//0.00010:557:57//AC006009

[6438] F-HEMBA1001235//Homo sapiens chromosome 17, clone hRPK.601_N_{—}13, complete sequence.//0.0086:372:58//AC005389

[6439] F-HEMBA1001247//H. sapiens CpG island DNA genomic Mse1 fragment, clone 11b11, reverse read cpg11b11.rt1a.//2.0e-24:154:93//Z64441

[6440] F-HEMBA1001257//Homo sapiens alpha-methylacyl-CoA racemase mRNA, complete cds.//1.9e-88:659:81//AF047020

[6441] F-HEMBA1001265//Human 18S ribosomal RNA.//1.0e-32:180:97//X03205

[6442] F-HEMBA1001281

[6443] F-HEMBA1001286//B. taurus mRNA for RF-36-DNA-binding protein.//7.7e-26:236:81//X15543

[6444] F-HEMBA1001289//Homo sapiens Chromosome 16 BAC clone CIT987SK-A-69G12, complete sequence.//5.5e-28:530:64//AC004131

[6445] F-HEMBA1001294//Yeast mitochondrial aapl gene for ATPase subunit 8.//2.8e-15:722:60//X00960

[6446] F-HEMBA1001299//Human DNA sequence from clone 422G23 on chromosome 6q24 Contains EST, STS, GSS, CpG island, complete sequence.//4.2e-24:288:76//AL031003

[6447] F-HEMBA1001302//cDNA encoding a human homologue of a mouse novel polypeptide derived from stromal cell.//7.2e-121:439:96//E12260

[6448] F-HEMBA1001303//Plasmodium falciparum 3D7 chromosome 12 PFYAC181 genomic sequence, WORKING DRAFT SEQUENCE, 8 unordered pieces.//0.011:637:56//AC005505

[6449] F-HEMBA1001310//HS_{—}3252_B2_B12_T7 CIT Approved Human Genomic Sperm Library D Homo sapiens genomic clone Plate=3252 Col=24 Row=D, genomic survey sequence.//1.2e-16:166:82//AQ217054

[6450] F-HEMBA1001319//CIT-HSP-2034J6.TF CIT-HSP Homo sapiens genomic clone 2034J6, genomic survey sequence.//0.33:256:59//B79408

[6451] F-HEMBA1001323//Homo sapiens proto-oncogene (Wnt-Sa) mRNA, complete cds.//7.8e-30:165:99//L20861

[6452] F-HEMBA1001326//Homo sapiens DNA sequence from BAC 55C20 on chromosome 6. Contains a Spinal Muscular Atrophy (SMA3) LIKE gene overlapping with a beta-glucoronidase LIKE pseudogene. Contains a membrane protein LIKE pseudogene, a Glyceraldehyde 3-phosphate dehydrogenase (GAPDH) LIKE pseudogene, five predicted tRNA genes. Contains ESTs, GSSs (BAC end sequences) and a CA repeat polymorphism, complete sequence.//5.4e-19:347:68//AL021368

[6453] F-HEMBA1001327//CIT-HSP-2354E10.TR CIT-HSP Homo sapiens genomic clone 2354E10, genomic survey sequence.//0.012:152:65//AQ075713

[6454] F-HEMBA1001330//Plasmodium falciparum DNA *** SEQUENCING IN PROGRESS * from contig 3-103, complete sequence.//0.0037:254:62//AL010208

[6455] F-HEMBA1001351//Homo sapiens VAMP-associated protein of 33 kDa (VAP-33) mRNA, complete cds.//1.1e-103:516:97//AF057358

[6456] F-HEMBA1001361//Homo sapiens chromosome 9, clone hRPK.202_H_{—}3, complete sequence.//1.7e-150:706:99//AC006241

[6457] F-HEMBA1001375//Streptomyces coelicolor cosmid I E6.//1.0:375:59//AL033505

[6458] F-HEMBA1001377//HS_{—}3020_B1_D12_MR CIT Approved Human Genomic Sperm Library D Homo sapiens genomic clone Plate=3020 Col=23 Row=H, genomic survey sequence.//0.00022:63:77//AQ105297

[6459] F-HEMBA1001383//Plasmodium falciparum chromosome 2, section 68 of 73 of the complete sequence.//0.00035:317:60//AE001431

[6460] F-HEMBA1001387//HS_{—}3039_B1_D01_MF CIT Approved Human Genomic Sperm Library D Homo sapiens genomic clone Plate=3039 Col=1 Row=H, genomic survey sequence.//5.0e-90:437:98//AQ155035

[6461] F-HEMBA1001388//Homo sapiens clone RG189J21, WORKING DRAFT SEQUENCE, 15 unordered pieces.//4.2e-47:159:89//AC005073

[6462] F-HEMBA1001391//Human DNA sequence from clone 409010 on chromosome 20q12 Contains CA repeat, GSS, STS, complete sequence.//2.0e-06:495:60//AL031256

[6463] F-HEMBA1001398//H. sapiens CpG island DNA genomic Mse1 fragment, clone 70dl 1, forward read cpg70d11.ftlb.//0.018:46:9711Z62591

[6464] F-HEMBA1001405//Human DNA sequence *** SEQUENCING IN PROGRESS *** from clone 50024, WORKING DRAFT SEQUENCE.//2.3e-74:623:71//AL034380

[6465] F-HEMBA1001407//Mus musculus domesticus Torino (Sry) gene, complete cds.//0.36:363:57//U03645

[6466] F-HEMBA100141//Homo sapiens genomic DNA, 21q region, clone: S39BG29, genomic survey sequence.//8.4e-12:516:60//AG001050

[6467] F-HEMBA1001413

[6468] F-HEMBA1001415//Human DNA sequence *** SEQUENCING IN PROGRESS *** from clone 41018, WORKING DRAFT SEQUENCE.//0.98:177:64//AL031732

[6469] F-HEMBA1001432//Homo sapiens clone DJ0693M11, WORKING DRAFT SEQUENCE, 7 unordered pieces.//8.0e-177:859:97//AC006146

[6470] F-HEMBA1001433//Homo sapiens clone DJ0892G19, complete sequence.//2.0e-35:376:64//AC004917

[6471] F-HEMBA1001435//Homo sapiens chromosome 17, clone hRPK.63_A_I, complete sequence.//1.2e-74:284:84//AC005670

[6472] F-HEMBA1001442//Plasmodium falciparum DNA *** SEQUENCING IN PROGRESS *** from contig 3-66, complete sequence.//0.056:194:63//AL010138

[6473] F-HEMBA1100446//Homo sapiens chromosome 4 clone B150J4 map 4q25, complete sequence.//0.96:328:61//AC004047

[6474] F-HEMBA1001450

[6475] F-HEMBA1001454//Human DNA sequence from clone 598A24 on chromosome Xp11.1-11.23 Contains zinc finger X-linked proteins ZXDA, ZXDB. ESTs and STS, complete sequence.//2.0e-47:468:73//AL031115

[6476] F-HEMBA1001455//CIT978SK-32J2.TV CIT978SK Homo sapiens genomic clone 32J2, genomic survey sequence.//1.5e-05:223:65//B78859

[6477] F-HEMBA1001463//cSRL-69dl-u cSRL flow sorted Chromosome 11 specific cosmid Homo sapiens genomic clone cSRL-69dl, genomic survey sequence.//5.1e-66:564:77//B05652

[6478] F-HEMBA1001476//Homo sapiens mRNA for KIAA0572 protein, partial cds.//1.9e-102:489:99//AB011144

[6479] F-HEMBA1001478//HS_{—}2228_A2_B03_MF CIT Approved Human Genomic Sperm Library D Homo sapiens genomic clone Plate=2228 Col=6 Row=C, genomic survey sequence.//4.5e-40:275:88//AQ032041

[6480] F-HEMBA1001497//Human DNA sequence from clone 281H8 on chromosome 6q25.1-25.3. Contains up to four novel genes, one with similarity to KIAA0323 and worm C30F12.1 and another with Ubiquitin-Like protein gene SMT3 (the latter in an intron of a novel gene). Contains ESTs, STSs, GSSs, a putative CpG island and genomic marker D6S1553, complete sequence.//7.7e-47:311:85//AL031133

[6481] F-HEMBA1001510//Human HLA class III region containing cAMP response element binding protein-related protein (CREB-RP) and tenascin X (tenascin-X) genes, complete cds, complete sequence.//2.0e-130:699:93//U89337

[6482] F-HEMBA1001515//Homo sapiens chromosome 19, cosmid F24866, complete sequence.//4.1e-114:711:85//AC005794

[6483] F-HEMBAI100517//Homo sapiens BAC clone RG459N13 from 7p15, complete sequence.//5.7e-162:769:98//AC004549

[6484] F-HEMBA1001522//Caenorhabditis elegans cosmid ZK328.//8.6e-17:498:61//UJ50193

[6485] F-HEMBA1001526//Human DNA sequence from cosmid 444G9 from a contig from the tip of the short arm of chromosome 16, spanning 2 Mb of 16p 13.3 Contains ESTs and CpG islands.//0.31:120:69//Z98258

[6486] F-HEMBA1001533

[6487] F-HEMBA1001557//Chionoecetes opilio (clone COP41) DNA microsatellite repeat regions.//7.0e-25:303:721/L49136

[6488] F-HEMBA1001566//Homo sapiens DNA sequence from PAC 127D3 on chromosome 1q23-25. Contains FMO2 and FMO3 genes for Flavin-containing Monooxygenase 2 and Flavin-containing Monooxygenase 3 (Dimethylaniline Monooxygenase (N-Oxide 3, EC 1.14.13.8, Dimethylaniline Oxidase 3, FMO II, FMO 3), and a gene for another, unknown, Flavin-containing Monooxygenase family protein. Contains ESTs and GSSs, complete sequence.//7.2e-18:805:60//AL021026

[6489] F-HEMBA1001569//Homo sapiens mRNA for vesicle associated membrane protein 2 (VAMP2).//1.1e-64:338:95//AJ225044

[6490] F-HEMBA1001570//Homo sapiens PAC clone DJ0844F09 from 7 p12-p13, complete sequence.//2.1e-148:698:99//AC004453

[6491] F-HEMBA1001579//Homo sapiens mRNA for NS 1-binding protein (NS 1-BP).//2.2e-173:678:99//AJ012449

[6492] F-HEMBA1001581//Homo sapiens clone DJ1158B01, WORKING DRAFT SEQUENCE, 23 unordered pieces.//0.30:484:59//AC004980

[6493] F-HEMBA1001585

[6494] F-HEMBA1001589//Human BAC clone RG317G18 from 7q31, complete sequence.//0.98:197:63//AC002432

[6495] F-HEMBAI1001595//Human mRNA for KIAA0128 gene, partial cds.//8.2e-109:855:78//D50918

[6496] F-HEMBA1001608//RPC111-72E2.TJ RPCI11 Homo sapiens genomic clone R-72E2, genomic survey sequence.//3.8e-05:235:64//AQ267131

[6497] F-HEMBA1001620//Oryza sativa RINO1 mRNA for myo-inositol phosphate synthase, complete cds.//3.8e-40:719:64//AB012107

[6498] F-HEMBA1001635//HS_{—}3208_A1_D07_MR CIT Approved Human Genomic Sperm Library D Homo sapiens genomic clone Plate=3208 Col=13 Row=G, genomic survey sequence.//1.4e-15:120:90//AQ176944

[6499] F-HEMBA1001636//Homo sapiens 12q24 PAC RPCII-66E7 (Roswell Park Cancer Institute Human PAC library) complete sequence.//0.15:221:64//AC004216

[6500] F-HEMBA1100640//HS_{—}3253_B2_D03_MR CIT Approved Human Genomic Sperm Library D Homo sapiens genomic clone Plate=3253 Col=6 Row=H, genomic survey sequence.//9.1e-52:278:95//AQ216058

[6501] F-HEMBA1001647//H. sapiens gene for plectin.//0.00052:629:61//Z54367

[6502] F-HEMBA1001651//Salmo salar DNA for a cryptic repeat.//7.9e-08:270:64//AJ012206

[6503] F-HEMBA1100655//Homo sapiens chromosome 5, BAC clone 194j18 (LBNL H158), complete sequence.//5.9e-164:802:97//AC005368

[6504] F-HEMBA1001658//M. musculus COL3A1 gene for collagen alpha-1.//2.4e-30:742:62//X52046

[6505] F-HEMBA1001661//Homo sapiens chromosome 5p, BAC clone 50g21 (LBNL H154), complete sequence.//2.2e-144:682:99//AC005740

[6506] F-HEMBA1001672//Homo sapiens methyl-CpG binding protein MBD3 (MBD3) mRNA, complete cds.//6.1e-152:725:98//AF072247

[6507] F-HEMBA1001675//RPC111-54F8.TV RPCII 1 Homo sapiens genomic clone R-54F8, genomic survey sequence.//5.3e-75:341:85//AQ082126

[6508] F-HEMBA1001678//Homo sapiens Xp22 PAC RPCII-167A22 (from Roswell Park Cancer Center) complete sequence.//8.4e-54:551:74//AC002349

[6509] F-HEMBA1001681

[6510] F-HEMBA1001702//Plasmodium falciparum chromosome 2, section 35 of 73 of the complete sequence.//0.94:676:54//AE001398

[6511] F-HEMBA1001709//Human DNA sequence * SEQUENCING IN PROGRESS * from clone 702J19, WORKING DRAFT SEQUENCE.//0.74:659:58//AL033531

[6512] F-HEMBA1001711//Lysiphlebus melandriicola NADH dehydrogenase I gene, mitochondrial gene encoding mitochondrial protein, partial cds.//3.0e-07:413:60//AF069178

[6513] F-HEMBA1001712//Homo sapiens BAC clone RGO41H04 from 7q21-q22, complete sequence.//0.091:315:61//AC004519

[6514] F-HEMBA1001714//Rattus norvegicus mitochondrial ATPase inhibitor gene, complete cds.//1.6e-28:218:75//U12250

[6515] F-HEMBA1001718//HS_{—}3056_A2_H08_MF CIT Approved Human Genomic Sperm Library D Homo sapiens genomic clone Plate=3056 Col=16 Row=O, genomic survey sequence.//2.0e-79:383:99//AQ106367

[6516] F-HEMBA1001723//HS_{—}2188_A2_D02_MF CIT Approved Human Genomic Sperm Library D Homo sapiens genomic clone Plate=2188 Col=4 Row=G, genomic survey sequence.//3.8e-28:174:94//AQ116793

[6517] F-HEMBA1001731//HS_{—}3021_A1_A11_T7 CIT Approved Human Genomic Sperm Library D Homo sapiens genomic clone Plate=3021 Col=21 Row=A, genomic survey sequence.//2.5e-11:420:62//AQ154658

[6518] F-HEMBA1001734//Homo sapiens chromosome Y, clone 264, M, 20, complete sequence.//0.00060:392:60//AC004617

[6519] F-HEMBA1001744//HS_{—}3194_A1_D05_T7 CIT Approved Human Genomic Sperm Library D Homo sapiens genomic clone Plate=3194 Col=9 Row=G, genomic survey sequence.//5.8e-29:163:97//AQ252295

[6520] F-HEMBA1001745//Homo sapiens chromosome 9q34, clone 280C11, complete sequence.//0.66:627:59//AC002102

[6521] F-HEMBA1001746//HS_{—}2163_B1_F04_MR CIT Approved Human Genomic Sperm Library D Homo sapiens genomic clone Plate=2163 Col=7 Row=L, genomic survey sequence.//1.4e-16:238:70//AQ085995

[6522] F-HEMBA1001761//Genomic sequence from Mouse 9, complete sequence.//3.5e-52:198:86//AC002109

[6523] F-HEMBA1001781

[6524] F-HEMBA1001784//Genomic sequence from Human 9q34, WORKING DRAFT SEQUENCE, 2 unordered pieces.//5.5e-13:296:65//AC002099

[6525] F-HEMBA1001791//Homo sapiens DNA from chromosome 19-cosmids R31158, R31874, and R28125, genomic sequence, complete sequence.//0.18:534:59//AF038458

[6526] F-HEMBA1001800//CIT-HFP-2049N5.TF CIT-HSP Homo sapiens genomic clone 2049N5, genomic survey sequence.//2.2e-40:335:80//AQ009222

[6527] F-HEMBA1001803//M. musculus (Balb/C) P/LO1 mRNA.//1.7e-25:286:74//Z31360

[6528] F-HEMBA1001804//Mouse interleukin 2 receptor (p55 IL-2R) mRNA, 5′ end.//1.9e-58:358:89//M21977

[6529] F-HEMBA1001808//Homo sapiens mRNA, chromosome 1 specific transcript KIAA0500.//7.8e-174:809:98//AB007969

[6530] F-HEMBAI1001809//Bovine herpesvirus 1 complete genome.//9.0e-09:639:57//AJ004801

[6531] F-HEMBA1001815

[6532] F-HEMBA1100819//HS_{—}3079_B1_E04_T7 CIT Approved Human Genomic Sperm Library D Homo sapiens genomic clone Plate=3079 Col=7 Row=J, genomic survey sequence.//1.4e-79:396:97//AQ186616

[6533] F-HEMBA1001820//Homo sapiens BAC clone GS165L15 from 7 p15, complete sequence.//0.00026:436:60//AC005013

[6534] F-HEMBA1001822//Homo sapiens intersectin short form mRNA, complete cds.//1.2e-40:510:65//AF064243

[6535] F-HEMBA1001824//Homo sapiens expanded SCA7 CAG repeat.//6.1e-20:344:68//AF020275

[6536] F-HEMBA1001835//Homo sapiens BAC clone RGO17K18 from 7q31, complete sequence.//0.0094:553:58//AC005161

[6537] F-HEMBAI1001844//Homo sapiens chromosome Xp22-135-136 clone GSHB-56711, WORKING DRAFT SEQUENCE, 35 unordered pieces.//1.2e-22:316:70//AC005867

[6538] F-HEMBAI1001847//M. musculus Zfp-29 gene for zinc finger protein.//5.3e-27:397:69//X55126

[6539] F-HEMBA1001861//Homo sapiens mRNA for KIAA0617 protein, complete cds.//8.8e-184:865:98//AB014517

[6540] F-HEMBA1001864//Arabidopsis thaliana chromosome II BAC F17H15 genomic sequence, complete sequence.//0.38:337:62//AC005395

[6541] F-HEMBA1001866//Caenorhabditis elegans cosmid F48E3.//1.4e-10:224:63//U28735

[6542] F-HEMBA1100869//Homo sapiens BAC clone RGI 14B19 from 7q31.1, complete sequence.//6.7e-98:288:91//AC005065

[6543] F-HEMBA1001888//Human Chromosome 1 lp 15.5 PAC clone pDJ915fl containing KVLQTI gene, complete sequence.//4.9e-114:476:84//AC003693

[6544] F-HEMBA1001896//Bos taurus pyruvate dehydrogenase phosphatase regulatory subunit precursor, mRNA, complete cds.//2.2e-137:839:86//AF026954

[6545] F-HEMBA1001910//Homo sapiens Chromosome 2 p13 BAC Clone h173, complete sequence.//0.90:221:63//AC003065

[6546] F-HEMBA1001912//HS_{—}2237_A1_C10_MF CIT Approved Human Genomic Sperm Library D Homo sapiens genomic clone Plate=2237 Col=19 Row=E, genomic survey sequence.//9.7e-76:364:100//AQ033732

[6547] F-HEMBA1001913//Leishmania major chromosome 3 clone L4625 strain Friedlin, WORKING DRAFT SEQUENCE, 6 unordered pieces.//0.00063:219:65//AC005766

[6548] F-HEMBA1001915//Homo sapiens genomic DNA of 9q32 anti-oncogene of flat epitherium cancer, segment 5/10.//0.00011:366:63//AB020873

[6549] F-HEMBA1001918//Pneumocystis carinii gene for major surface glycoprotein MSG105, exon1-2, complete cds.//0.00024:562:58//D82031

[6550] F-HEMBA1001921//Homo sapiens germinal center kinase related protein kinase mRNA, complete cds.//2.1e-184:855:99//AF000145

[6551] F-HEMBA1001939//Human DNA sequence from clone 395P12 on chromosome 1q24-25. Contains the TXGP1 gene for tax-transcriptionally activated glycoprotein 1 (34 kD) (OX40 ligand, OX40L) and a GOT2 (Aspartate Aminotransferase, mitochondrial precursor, EC 2.6.1.1, Transaminase A, Glutamate Oxaloacetate Transaminase-2) pseudogene. Contains ESTs, STSs and GSSs, complete sequence.//1.1e-42:380:80//AL022310

[6552] F-HEMBA1001940//Homo sapiens clone DJ1093116, WORKING DRAFT SEQUENCE, 5 unordered pieces.//7.5e-175:861:97//AC005629

[6553] F-HEMBA1100942//Homo sapiens chromosome 12p13.3 clone RPCII-96H9, WORKING DRAFT SEQUENCE, 66 unordered pieces.//0.097:107:71//AC006057

[6554] F-HEMBA1100945//Drosophila F family transposable element F123′ region.//0.94:140:65//X01934

[6555] F-HEMBA1001950//H. sapiens CpG island DNA genomic Mse1 fragment, clone 15b5, forward read cpg15b5.ft1q.//1.4e-27:168:95//Z54728

[6556] F-HEMBA1000960//Locusta migratoria mRNA for nAChR alpha1 subunit.//0.010:108:71//AJ000390

[6557] F-HEMBA1001962//Plasmodium falciparum 3D7 chromosome 12 PFYACB8-628 genomic sequence, WORKING DRAFT SEQUENCE, 9 unordered pieces.//9.7e-05:494:60//AC005507

[6558] F-HEMBA1001964

[6559] F-HEMBA1001967//Human DNA sequence from clone 341E18 on chromosome 6p11.2-12.3. Contains a Serine/Threonine Protein Kinase gene (presumptive isolog of a Rat gene) and a novel alternatively spliced gene. Contains a putative CpG island, ESTs and GSSs, complete sequence.//9.6e-122:373:99//AL031178

[6560] F-HEMBA1001979//HS_{—}3067_B1_A06_MR CIT Approved Human Genomic Sperm Library D Homo sapiens genomic clone Plate=3067 Col=11 Row=B, genomic survey sequence.//0.43:193:64//AQ143506

[6561] F-HEMBA1001987//Plasmodium falciparum MAL3P6, complete sequence.//1.0:428:56//Z98551

[6562] F-HEMBA1001991//HS_{—}2237_A2_G09_MF CIT Approved Human Genomic Sperm Library D Homo sapiens genomic clone Plate=2237 Col=18 Row=M, genomic survey sequence.//4.3e-05:240:64//AQ067283

[6563] F-HEMBA1002003//protein phosphatase 2C isoform [rats, liver, mRNA, 1950 nt].//2.7e-33:364:74//S90449

[6564] F-HEMBA1002008//WORKING DRAFT SEQUENCE, 3 unordered pieces.//0.00032:214:68//AC005948

[6565] F-HEMBA1002018

[6566] F-HEMBA1002022//Human p37NB mRNA, complete cds.//0.014:58:96//U32907

[6567] F-HEMBA1002035//Mouse transcriptional control element.//7.8e-07:200:69//M17284

[6568] F-HEMBA1002039//Human DNA sequence from clone 267M20 on chromosome Xq22.2-22.3. Contains part of the DIAPH2 gene and a pseudogene, ESTs, STSs and GSSs, complete sequence.//0.31:497:58//AL031053

[6569] F-HEMBA1002049//Homo sapiens chromosome 5, BAC clone 282B7 (LBNL H192), complete sequence.//4.5e-42:532:63//AC005216

[6570] F-HEMBA1002084//Homo sapiens chromosome 19 cosmid F15386, genomic sequence, complete sequence.//0.81:435:59//AF025422

[6571] F-HEMBA1002092//Mus musculus Olf-1/EBF-like-3 transcription factor (O/E-3) mRNA, complete cds.//7.2e-130:769:87//U92703

[6572] F-HEMBA1002100//Homo sapiens PAC clone DJ0991 G20, complete sequence.//1.3e-47:124:96//AC004943

[6573] F-HEMBA1002102//Xenopus laevis mRNA for x50x7 protein, complete cds.//2.7e-13:132:71//D83649

[6574] F-HEMBA1002113//F. rubripes GSS sequence, clone 063K10bB4, genomic survey sequence.//0.029:142:66//Z88840

[6575] F-HEMBA1002119//Human Chromosome 11 pac pDJ1173a5, complete sequence.//1.3e-14:515:62//AC000378

[6576] F-HEMBA1002125//Homo sapiens calcium-activated potassium channel (KCNN3) mRNA, complete cds.//0.98:222:61//AF031815

[6577] F-HEMBA1002139//Caenorhabditis elegans cosmid F55C9, complete sequence.//0.0081:371:60//Z81549

[6578] F-HEMBA1002144//Saccharomyces cerevisiae mitochondrion transfer RNA-Met (tRNA-Met) gene, oxil gene, and ORF1.//4.9e-06:341:61//L36888

[6579] F-HEMBA1002150//Homo sapiens mRNA for KIAA0720 protein, partial cds.//0.00017:353:62//AB018263

[6580] F-HEMBA1002151

[6581] F-HEMBA1002153//CITBI-E1-2519120.TR CITBI-EL Homo sapiens genomic clone 2519120, genomic survey sequence.//8.5e-61:334:94//AQ277613

[6582] F-HEMBA1002160//Homo sapiens clone DJI 1189D06, complete sequence.//8.5e-44:385:77//AC005232

[6583] F-HEMBA1002161//Coturnix cotumix slow myosin heavy chain 2 (qmyhc2) mRNA, partial cds.//2.1e-59:571:74//AF006829

[6584] F-HEMBA1002162//Homo sapiens Xp22-150 BAC GSHB-309P15 (Genome Systems Human BAC Library) complete sequence.//5.3e-53:698:67//AC006210

[6585] F-HEMBA1002166//Human DNA sequence from PAC 84F12 on chromosome Xq25-Xq26.3. Contains glypican-3 precursor (intestinal protein OCI-5) (GTR2-2), ESTs and CA repeat.//1.2e-50:319:78//AL008712

[6586] F-HEMBA1002177//Homo sapiens BAC clone RG293F11 from 7q21-7q22, complete sequence.//2.5e-18:150:88//AC000066

[6587] F-HEMBA1002185//Homo sapiens clone DJ0292L20, WORKING DRAFT SEQUENCE, 2 unordered pieces.//0.00066:466:59//AC004825

[6588] F-HEMBA1002189//Homo sapiens clone GS166C05, WORKING DRAFT SEQUENCE, 7 unordered pieces.//3.3e-23:176:77//AC005015

[6589] F-HEMBA1002191//Homo sapiens mRNA for KIAA0689 protein, partial cds.//1.0:382:59//AB014589

[6590] F-HEMBA1002199//Homo sapiens chromosome 4 clone B55B24 map 4q25, complete sequence.//1.8e-20:368:66//AC005150

[6591] F-HEMBA1002204//HS_{—}2055_A1_H09_T7 CIT Approved Human Genomic Sperm Library D Homo sapiens genomic clone Plate=2055 Col=17 Row=0, genomic survey sequence.//1.2e-06:178:65//AQ235350

[6592] F-HEMBA1002212//S. cerevisiae chromosome IV reading frame ORF YDL101c.//0.035:345:60//Z74149

[6593] F-HEMBA1002215//M. musculus mRNA for testin.//4.6e-80:504:87//X78989

[6594] F-HEMBA1002226//Homo sapiens Xp22 bins 87-93 PAC RPCII-122K4 (Roswell Park Cancer Institute Human PAC Library) complete sequence.//5.7e-63:336:74//AC003035

[6595] F-HEMBA1002229//Homo sapiens BAC clone NH0539B24 from 7 p15.1-p14, complete sequence.//2.6e-39:311:81//AC006044

[6596] F-HEMBA1002237//Homo sapiens PAC clone DJ0696N01 from 7p21-p22, complete sequence.//1.6e-12:397:64//AC004861

[6597] F-HEMBA1002241

[6598] F-HEMBA1002253

[6599] F-HEMBA1002257//Homo sapiens diacylglycerol kinase iota (DGKi) mRNA, complete cds.//3.5e-15I :731:97//AF061936

[6600] F-HEMBA1002265//Human DNA sequence from cosmid N28H9 on chromosome 22q11.2-qter contains ESTs, STS and endogenous retrovirus.//1.3e-09:313:62//Z71183

[6601] F-HEMBA1002267

[6602] F-HEMBA1002270//Homo sapiens Xp22-150 BAC GSHB-309P15 (Genome Systems Human BAC Library) complete sequence.//0.069:495:58//AC006210

[6603] F-HEMBA1002321//Homo sapiens PAC clone DJ0991023, complete sequence.//0.019:564:58//AC004944

[6604] F-HEMBA1002328//CIT-HSP-2387N15.TF.1 CIT-HSP Homo sapiens genomic clone 2387N15, genomic survey sequence.//1.8e-71:346:991/AQ240836

[6605] F-HEMBA1002337//Arabidopsis thaliana genomic DNA, chromosome 5, P1 clone: MYN8, complete sequence.//0.84:547:57//AB020754

[6606] F-HEMBA1002341//Homo sapiens mRNA for KIAA0771 protein, partial cds.//2.4e-185:872:98//AB018314

[6607] F-HEMBA1002348//CIT-HSP-2372K24.TR CIT-HSP Homo sapiens genomic clone 2372K24, genomic survey sequence.//9.1e-33:230:75//AQ110676

[6608] F-HEMBA1002349//Plasmodium falciparum histidine-rich protein II (HRP II) gene, complete cds.//9.4e-06:504:57//U69551

[6609] F-HEMBA1002363//Homo sapiens chromosome-associated protein-E (hCAP-E) mRNA, complete cds.//7.3e-188:872:99//AF092563

[6610] F-HEMBA1002381//Homo sapiens genomic DNA of 8p21.3-p22 anti-oncogene of hepatocellular colorectal and non-small cell lung cancer, segment 11/11 .//2.1e-20:262:72//AB020868

[6611] F-HEMBA1002389//D. discoideum spore coat 60 (sp60) gene, 5′ flank.//0.010:95:73//M34546

[6612] F-HEMBA1002417//Canis familiaris ZO-3 (zo-3) mRNA, complete cds.//6.2e-120:767:85//AF023617

[6613] F-HEMBA1002419//HS-1047-A1-F01-MF.abi CIT Human Genomic Sperm Library C Homo sapiens genomic clone Plate=CT 830 Col=1 Row=K, genomic survey sequence.//7.6e-06:111:76//B38165

[6614] F-HEMBA1002430//HS_{—}3137_B2_F10_T7 CIT Approved Human Genomic Sperm Library D Homo sapiens genomic clone Plate=3137 Col=20 Row=L, genomic survey sequence.//1.6e-56:367:88//AQ148697

[6615] F-HEMBA1002439//Dictyostelium discoideum actin 8 gene, 3′ UTR.//0.67:129:64//M25216

[6616] F-HEMBA1002458//Mus musculus REX-3 mRNA, complete cds.//1.1e-30:274:72//AF051347

[6617] F-HEMBA1002460//Homo sapiens clone DJ1137M13, complete sequence.//4.0e-173:822:98//AC005378

[6618] F-HEMBA1002462//Sequence 41 from patent U.S. Pat. No. 5,708,157.//9.8e-51:519:73//180067

[6619] F-HEMBA1002469//Human mRNA for KIAA0122 gene, partial cds.//4.0e-108:603:92//D50912

[6620] F-HEMBA1002475//Streptomyces coelicolor cosmid 2H4.//0.0068:626:57//AL031514

[6621] F-HEMBA1002477//Homo sapiens BAC clone NH0342K06 from 2, complete sequence.//1.5e-40:349:78//AC005034

[6622] F-HEMBA1002486

[6623] F-HEMBA1002495//HS_{—}3218_B1_A12_T7 CIT Approved Human Genomic Sperm Library D Homo sapiens genomic clone Plate=3218 Col=23 Row=B, genomic survey sequence.//1.0:179:6711AQ181410

[6624] F-HEMBA1002498//Homo sapiens full-length insert cDNA clone ZD76BO1.//1.4e-129:619:98//AF086404

[6625] F-HEMBA1002503//Homo sapiens clone DJ0742P04, WORKING DRAFT SEQUENCE, 6 unordered pieces.//1.9e-24:306:68//AC004873

[6626] F-HEMBA1002508//Homo sapiens chromosome 19, cosmid R33516, complete sequence.//2.9e-76:464:83//AC004799

[6627] F-HEMBA1002513//Homo sapiens mRNA for histone deacetylase-like protein (JM21).//2.8e-157:738:98//AJ01972

[6628] F-HEMBA1002515//Human DNA sequence *** SEQUENCING IN PROGRESS *** from clone 407F11, WORKING DRAFT SEQUENCE.//2.6e-07:307:64//AL022329

[6629] F-HEMBA1002538//HS_{—}2185_B2_B04_MR CIT Approved Human Genomic Sperm Library D Homo sapiens genomic clone Plate=2185 Col=8-Row=D, genomic survey sequence.//4.7e-37:339:78//AQ298315

[6630] F-HEMBA1002542//HS_{—}3197_B2_BIO_T7 CIT Approved Human Genomic Sperm Library D Homo sapiens genomic clone Plate=3197 Col=20 Row=D, genomic survey sequence.//3.2e-70:372:95//AQ188792

[6631] F-HEMBA1002547//Homo sapiens agrin precursor mRNA, partial cds.//3.5e-137:655:98//AF016903

[6632] F-HEMBA1002552//Human Hep27 protein mRNA, complete cds.//8.8e-07:173:68//U31875

[6633] F-HEMBA1002555//*** SEQUENCING IN PROGRESS *** Homo sapiens chromosome 4, BAC clone C0190L06; HTGS phase 1, WORKING DRAFT SEQUENCE, 21 unordered pieces.//2.2e-15:628:60//AC004670

[6634] F-HEMBA1002558//Human Xp22 BAC CT-285115 (from CalTech/Research Genetics), PAC RPCI1-27C22 (from Roswell Park Cancer Center), and Cosmid U35B5 (from Lawrence Livermore), complete sequence.//2.3e-41:353:76//AC002366

[6635] F-HEMBA1002561//Homo sapiens chromosome 17, clone HRPC29G21, complete sequence.//1.1e-39:538:66//AC003687

[6636] F-HEMBA1002569//Homo sapiens protein associated with Myc mRNA, complete cds.//1.3e-140:457:99//AF075587

[6637] F-HEMBA1002583//CIT-HSP-2321D3.TR CIT-HSP Homo sapiens genomic clone 2321D3, genomic survey sequence.//5.1e-79:385:99//AQ038102

[6638] F-HEMBA1002590//Homo sapiens chromosome 17, clone hRPK.167_N_{—}20, complete sequence.//1.9e-35:430:70//AC005940

[6639] F-HEMBA1002592//Human genomic DNA sequence from clone 30801 on chromosome Xp11.3-11.4. Contains EST, CA repeat, STS, GSS, CpG island.//4.4e-19:303:71//Z93403

[6640] F-HEMBA1002609//Homo sapiens mRNA for KIAA0597 protein, partial cds.//4.4e-175:820:99//AB011169

[6641] F-HEMBA1002621//Homo sapiens PAC clone DJ0650P09 from 7q21, complete sequence.//0.14:353:58//AC004413

[6642] F-HEMBA1002624//Homo sapiens mRNA for KIAA0808 protein, complete cds.//2.9e-187:632:97//AB018351

[6643] F-HEMBA1002628//Plasmodium falciparum 3D7 chromosome 12 PFYAC812 genomic sequence, WORKING DRAFT SEQUENCE, 8 unordered pieces.//1.5e-05:792:58//AC004153

[6644] F-HEMBA1002629//Streptomyces coelicolor cosmid 1 A9.//8.4e-08:576:58//AL034446

[6645] F-HEMBA1002645//Human DNA sequence *** SEQUENCING IN PROGRESS *** from clone 153G14, WORKING DRAFT SEQUENCE.//5.6e-47:222:86//AL031118

[6646] F-HEMBA1002651//Homo sapiens PAC clone DJ0593H12 from 7p31, complete sequence.//3.8e-182:859:99//AC004839

[6647] F-HEMBA1002659//Z. mobilis alcohol dehydrogenase I (adhA) gene, complete cds.//0.97:144:66//M32100

[6648] F-HEMBA1002661//Homo sapiens PAC clone DJ0698G21 from 7p21-p22, complete sequence.//1.3e-116:774:84//AC004535

[6649] F-HEMBA1002666

[6650] F-HEMBA1002678//Human DNA sequence *** SEQUENCING IN PROGRESS *** from clone 1137F22, WORKING DRAFT SEQUENCE.//5.7e- 156:750:98//AL034421

[6651] F-HEMBA1002679//nbxb0002cC12r CUGI Rice BAC Library Oryza sativa genomic clone nbxb0002F23r, genomic survey sequence.//4.3e-09:517:58//AQ051621

[6652] F-HEMBA1002688//Herpes simplex virus type 2 (strain HG52), complete genome.//8.3e-20:651:61//Z86099

[6653] F-HEMBA1002696//Mus musculus proteasome regulator PA28 beta subunit gene, complete cds.//7.6e-62:306:81//AF060195

[6654] F-HEMBA1002703//Homo sapiens mRNA for KIAA0455 protein, complete cds.//1.9e-10:327:62//AB007924

[6655] F-HEMBA1002712

[6656] F-HEMBA1002716//HS_{—}3064_A1_C1_MF CIT Approved Human Genomic Sperm Library D Homo sapiens genomic clone Plate=3064 Col=19 Row=E, genomic survey sequence.//8.4e-97:491:96//AQ142980

[6657] F-HEMBA1002728//Homo sapiens chromosome 5, BAC clone 205e20 (LBNL H170), complete sequence.//6.1e-21:217:77//AC004782

[6658] F-HEMBA1002730//Human platelet glycoprotein 111a (GPIIIa) gene, exon 1.//0.57:125:67//M57481

[6659] F-HEMBA1002742//RPCII 1-39J10.TP RPCI-11 Homo sapiens genomic clone RPCI-11-39J10, genomic survey sequence.//1.1e-86:414:991/AQ029102

[6660] F-HEMBA1002746//Mus musculus chromosome 19, clone CIT282B21, complete sequence.//7.1e-70:303:82//AC003694

[6661] F-HEMBA1002748//Human DNA sequence *** SEQUENCING IN PROGRESS *** from clone 41018, WORKING DRAFT SEQUENCE.//0.096:212:62//AL031732

[6662] F-HEMBA1002750//Homo sapiens chromosome 5, PAC clone 170 mlO (LBNL H89), complete sequence.//6.7e-40:232:70//AC004622

[6663] F-HEMBA1002768//Homo sapiens mRNA for KIAA0554 protein, partial cds.//9.0e-177:834:98//AB0011261

[6664] F-HEMBA1002770//cDNA encoding novel rat protein TIP 120 which is formed of complex with TBP (TATA binding protein).//1.3e-140:840:88//E12829

[6665] F-HEMBA1002777//F. rubripes GSS sequence, clone 189C06 dB12, genomic survey sequence.//1.1e-28:263:77//AL007965

[6666] F-HEMBA1002779//CIT-HSP-233311.TF CIT-HSP Homo sapiens genomic clone 233311, genomic survey sequence.//1.8e-32:180:98//AQ036891

[6667] F-HEMBA1002780//Homo sapiens PAC clone DJ0244J05 from 5q31, complete sequence.//7.0e-06:199:67//AC004592

[6668] F-HEMBA1002794//H. sapiens mRNA for protein kinase C mu.//0.00015:244:67//X75756

[6669] F-HEMBA1002801//Plasmodium falciparum MAL3P2, complete sequence.//0.0010:534:57//AL034558

[6670] F-HEMBA1002810//Homo sapiens formin binding protein 21 mRNA, complete cds.//1.1e-167:820:97//AF071185

[6671] F-HEMBA1002816//Homo sapiens clone NH0576N21, WORKING DRAFT SEQUENCE, 5 unordered pieces.//3.1e-113:254:90//AC005043

[6672] F-HEMBA1002818//Cricetulus griseus H411 precursor (H411) mRNA, complete cds.//1.2e-122:760:86//AF046870

[6673] F-HEMBA1002826//Human DNA sequence from clone 23K20 on chromosome Xq25-26.2 Contains EST, STS, GSS, complete sequence.//0.0055:235:65//AL022153

[6674] F-HEMBA1002833//Homo sapiens chromosome 17, clone hRPC.117_B_{—}12, complete sequence.//1.4e-170:744:99//AC004707

[6675] F-HEMBA1002850//Ephedrus persicae NADH dehydrogenase I gene, mitochondrial gene encoding mitochondrial protein, partial cds.//1.3e-05:334:59//AF069186

[6676] F-HEMBA1002863//CIT-HSP-2323A16.TF CIT-HSP Homo sapiens genomic clone 2323A16, genomic survey sequence.//2.9e-140:750:93//AQ028419

[6677] F-HEMBA1002876//HS_{—}2270_B1_H03_MF CIT Approved Human Genomic Sperm Library D Homo sapiens genomic clone Plate=2270 Col=5 Row=P, genomic survey sequence.//0.44:163:64//AQ164031

[6678] F-HEMBA1002886

[6679] F-HEMBA1002896//Homo sapiens chromosome 5, P1 clone 793C5 (LBNL H58), complete sequence.//0.00015:277:61//AC005195

[6680] F-HEMBA1002921

[6681] F-HEMBA1002924//CIT-HSP-2171H4.TR CIT-HSP Homo sapiens genomic clone 2171H4, genomic survey sequence.//0.0016:175:6611B89715

[6682] F-HEMBA1002934//Human DNA sequence *** SEQUENCING IN PROGRESS *** from clone 862K6, WORKING DRAFT SEQUENCE.//1.2e-169:797:98//AL031681

[6683] F-HEMBA1002935//Homo sapiens mRNA for KIAA0576 protein, partial cds.//4.9e-173:803:99//AB011148

[6684] F-HEMBA1002937//Human DNA sequence *** SEQUENCING IN PROGRESS *** from clone 702J19, WORKING DRAFT SEQUENCE.//1.2e-163:411:99//AL033531

[6685] F-HEMBA1002939//RPCI11-74014.TJ RPCII 1 Homo sapiens genomic clone R-74014, genomic survey sequence.//1.7e-41:215:99//AQ266676

[6686] F-HEMBA1002944//RPCII1-55C2.TV RPCII 1 Homo sapiens genomic clone R-55C2, genomic survey sequence.//1.7e-37:375:74//AQ082240

[6687] F-HEMBA1002951//Homo sapiens chromosome 19, cosmid F20887, complete sequence.//0.00074:683:58//AC005578

[6688] F-HEMBA1002954//RPCII1-79F7.TV RPCII 1 Homo sapiens genomic clone R-79F7, genomic survey sequence.//6.1e-24:250:78//AQ284146

[6689] F-HEMBA1002968//HS_{—}2262_B2_G04_T7 CIT Approved Human Genomic Sperm Library D Homo sapiens genomic clone Plate=2262 Col=8 Row=N, genomic survey sequence.//0.99:270:60//AQ217059

[6690] F-HEMBA1002970//RPCII 1-5L24.TV RPCI-11 Homo sapiens genomic clone RPCI-11-5L24, genomic survey sequence.//1.4e-10:189:71//B49289

[6691] F-HEMBA1002971//CIT-HSP-2363L16.TF CIT-HSP Homo sapiens genomic clone 2363L16, genomic survey sequence.//4.3e-21:181:80//AQ080538

[6692] F-HEMBA1002973//Rattus norvegicus Wistar 3′,5′-cyclic AMP phosphodiesterase (PDE4-10) gene, exon 10.//2.5e-40:257:89//U01290

[6693] F-HEMBA1002997//CIT-HSP-2387H15.TF.1 CIT-HSP Homo sapiens genomic clone 2387H15, genomic survey sequence.//9.5e-17:128:92//AQ240797

[6694] F-HEMBA1002999//Rattus norvegicus lamina associated polypeptide IC (LAPIC) mRNA, complete cds.//3.1e-62:713:73//U20286

[6695] F-HEMBA1003021//Homo sapiens clone DJ0847008, WORKING DRAFT SEQUENCE, 3 unordered pieces.//7.5e-50:331:85//AC005484

[6696] F-HEMBA1003033//Drosophila melanogaster, chromosome 3L, region 62A10-62B5, P1 clones DS02777, DS03222, DS02345, and DS04808, complete sequence.//2.6e-20:357:66//AC005557

[6697] F-HEMBA1003034//Human DNA sequence from 4PTEL, Huntington's Disease Region, chromosome 4p 16.3.//4.5e-60:415:73//Z95704

[6698] F-HEMBA1003035//Homo sapiens chromosome Y, clone 264, M, 20, complete sequence.//2.3e-05:591:57//AC004617

[6699] F-HEMBA1003037//RPCII 1-88F2.TJ RPCII 1 Homo sapiens genomic clone R-88F2, genomic survey sequence.//0.68:230:60//AQ286677

[6700] F-HEMBA1003041//Homo sapiens PAC clone DJI 163J12 from 7q21.2-q31.1, complete sequence.//8.1e-128:550:94//AC004983

[6701] F-HEMBA1003046//Homo sapiens mitochondrial processing peptidase beta-subunit mRNA, complete cds.//1.0e-164:777:98//AF054182

[6702] F-HEMBA1003064//Plasmodium falciparum 3D7 chromosome 12 PFYAC 181 genomic sequence, WORKING DRAFT SEQUENCE, 8 unordered pieces.//1.5e-07:744:59//AC005505

[6703] F-HEMBA1003067//Rat dynorphin gene, exon 3.//1.0:140:63//M32783

[6704] F-HEMBA1003071//Homo sapiens alpha2-C4-adrenergic receptor gene, complete cds.//1.5e-20:595:65//U72648

[6705] F-HEMBA1003077//CIT-HSP-2366J21.TF CIT-HSP Homo sapiens genomic clone 2366J21, genomic survey sequence.//4.4e-33:176:99//AQ080257

[6706] F-HEMBA1003078//Homo sapiens DNA sequence from PAC 262D12 on chromosome 1q23.3-24.3. Contains a Tenascin (Hexabrachion, Cytotactin, Neuronectin, Myotendinous antigen)-LIKE gene and a mitochondrial/chloroplast 30S ribosomal protein S14-LIKE gene preceeded by a CpG island. Contains ESTs, genomic marker D1S2691 and STSs.//9.4e-43:478:70//Z99297

[6707] F-HEMBA1003079//Homo sapiens Xp22-132-134 BAC GSHB-590J15 (Genome Systems Human BAC library) complete sequence.//0.96:57:85//AC004673

[6708] F-HEMBA1003083//Homo sapiens PAC clone DJ1182N03 from 7q11.23-q21.1, complete sequence.//8.0e-74:359:81//AC004548

[6709] F-HEMBA1003086//Homo sapiens chromosome 16 BAC clone CIT987SK-334D11 complete sequence.//3.6e-11:734:58//AF001550

[6710] F-HEMBA1003096//Sequence 4 from patent U.S. Pat. No. 5,440,017.//5.7e-56:594:71//113750

[6711] F-HEMBA1003098//Human DNA sequence from cosmid SRL11M20, chromosome region 11p13. Contains EST and STS.//1.9e-09:230:69//Z83308

[6712] F-HEMBA1003117//Mouse TIS11 primary response gene, complete cds.//0.00054:480:60//M58564

[6713] F-HEMBA1003129//HS_{—}3139_B2_F05_T7 CIT Approved Human Genomic Sperm Library D Homo sapiens genomic clone Plate=3139 Col=10 Row=L, genomic survey sequence.//2.3e-100:510:97//AQ187635

[6714] F-HEMBA1003133//Mouse BAC CitbCJ7219 m7, genomic sequence, complete sequence.//1.3e-78:370:90//AC005259

[6715] F-HEMBA1003136

[6716] F-HEMBA1003142//Homo sapiens full-length insert cDNA clone ZC39B06.//6.9e-121:563:100//AF086197

[6717] F-HEMBA1003148//Homo sapiens mRNA for dachshund protein.//6.7e-183:850:99//AJ005670

[6718] F-HEMBA1003166//Homo sapiens Chromosome 16 BAC clone CIT987-SKA-345G4 complete genomic sequence, complete sequence.//3.8e-27:229:76//AC002302

[6719] F-HEMBA1003175//Homo sapiens genomic DNA for centromeric end of MHC class I region on chromosome 6, WORKING DRAFT SEQUENCE.//9.4e-09:837:58//AB000882

[6720] F-HEMBA1003179//Homo sapiens DNA sequence from Fosmid 27C3 on chromosome 22q11.2-qter. Contains two possibly alternatively spliced unknown genes, one with homology to a worm protein. Contains ESTs, complete sequence.//5.4e-115:174:98//AL022325

[6721] F-HEMBA1003197//Arabidopsis thaliana chromosome II BAC F 15K20 genomic sequence, complete sequence.//1.1e-05:473:59//AC005824

[6722] F-HEMBA1003199//Rattus norvegicus Sprague-Dawley thyroid hormone receptor alpha gene, exon I.//6e-05:367:61//U09302

[6723] F-HEMBA1003202//Homo sapiens BAC clone RG437L15 from 8q21, complete sequence.//9.0e-23:247:73//AC004003

[6724] F-HEMBA1003204//Human DNA sequence *** SEQUENCING IN PROGRESS *** from clone 409J21, WORKING DRAFT SEQUENCE.//4.7e-26:141:8311Z83824

[6725] F-HEMBA1003212//Human Chromosome 11 Overlapping Cosmids cSRL72g7 and cSRL140b8, complete sequence.//1.9e-31:158:86//AC002037

[6726] F-HEMBA1003220//Homo sapiens chromosome 17, clone hRPC.971_F_{—}3, WORKING DRAFT SEQUENCE, I ordered pieces.//3.4e-24:284:75//AC004150

[6727] F-HEMBA1003222//RPCI11-47P17.TJ RPCII 1 Homo sapiens genomic clone R-47P17, genomic survey sequence.//8.7e-39:202:99//AQ202885

[6728] F-HEMBA1003229//Arabidopsis thaliana genomic DNA, chromosome 3, P1 clone: MEB5, complete sequence.//0.86:227:62//AB019230

[6729] F-HEMBA1003235//Plasmodium falciparum chromosome 2, section 10 of 73 of the complete sequence.//8.6e-05:372:61//AE001373

[6730] F-HEMBA1003250//HS-1063-A1-H02-MR.abi CIT Human Genomic Sperm Library C Homo sapiens genomic clone Plate=CT 796 Col=3 Row=O, genomic survey sequence.//0.00032:57:96//B46142

[6731] F-HEMBA1003257//H. sapiens mRNA for RDC-1 POU domain containing protein.//2.2e-08:531:59//X64624

[6732] F-HEMBA1003273//H. sapiens flow-sorted chromosome 6 HindIII fragment, SC6pA 19H4.//0.070:267:64//Z78949

[6733] F-HEMBA1003276//CIT-HSP-2301B4.TF CIT-HSP Homo sapiens genomic clone 2301B4, genomic survey sequence.//5.2e-08:295:63//AQO 15073

[6734] F-HEMBA1003278//HS_{—}3075_A11G09_MF CIT Approved Human Genomic Sperm Library D Homo sapiens genomic clone Plate=3075 Col=17 Row=M, genomic survey sequence.//0.98:399:58//AQ120599

[6735] F-HEMBA1003281//High throughput sequencing of human chromosome 12, WORKING DRAFT SEQUENCE, I ordered pieces.//4.8e-101:277:97//AC005840

[6736] F-HEMBA1003286//Homo sapiens chromosome 3q13 beta-1,4-galactosyltransferase mRNA, complete cds.//9.0e-145:539:97//AF038662

[6737] F-HEMBA1003291//Homo sapiens mRNA for KIAA0537 protein, complete cds.//5.0e-166:799:98//AB01109

[6738] F-HEMBA1003296//CITBI-E1-2507M8.TR CITBI-E1 Homo sapiens genomic clone 2507M8, genomic survey sequence.//1.9e-05:388:63//AQ262551

[6739] F-HEMBA1003304//Budworm mitochondrial partial transfer RNA-Met (tRNA-Met) gene, and partial 12S ribosomal RNA (12S rRNA) gene.//8.0e-05:388:62//L17343

[6740] F-HEMBA1003309//Crassostrea gigas clone CN20 microsatellite sequence.//0.0017:210:64//AF051177

[6741] F-HEMBA1003314//Homo sapiens mRNA for leucine zipper bearing kinase, complete cds.//4.6e-188:865:99//AB001872

[6742] F-HEMBA1003322//Human DNA sequence *** SEQUENCING IN PROGRESS *** from clone 16915, WORKING DRAFT SEQUENCE.//2.4e-54:316:87//Z93015

[6743] F-HEMBA1003327//CIT-HSP-2024C24.TRB CIT-HSP Homo sapiens genomic clone 2024C24, genomic survey sequence.//8.4e-12:166:76//B67147

[6744] F-HEMBA1003328//HS_{—}2230_B2_H08_MR CIT Approved Human Genomic Sperm Library D Homo sapiens genomic clone Plate=2230 Col=16 Row=P, genomic survey sequence.//0.026:128:71//AQ153313

[6745] F-HEMBA1003330//Homo sapiens wbscr1 (WBSCR1) and replication factor C subunit 2 (RFC2) genes, complete cds.//4.0e-160:745:99//AF045555

[6746] F-HEMBA1003348//HS_{—}3194_A1_G05_MR CIT Approved Human Genomic Sperm Library D Homo sapiens genomic clone Plate=3194 Col=9 Row=M, genomic survey sequence.//5.0e-79:381:99//AQ173779

[6747] F-HEMBA1003369//H. vulgare GAA-satellite DNA.//0.12:89:71//Z50100

[6748] F-HEMBA1003370//Homo sapiens cosmid 123E15, complete sequence.//3.5e-32:199:80//AF024533

[6749] F-HEMBA1003373//Human DNA sequence *** SEQUENCING IN PROGRESS *** from clone 537K23, WORKING DRAFT SEQUENCE.//0.019:117:71//AL034405

[6750] F-HEMBA1003376//Human clone HS4.66 Alu-Ya5 sequence.//4.2e-30:196:85//U67229

[6751] F-HEMBA1003380//Homo sapiens DNA sequence from clone 394P21 on chromosome Ip36.12-36.13. Contains the PAX7 gene, locus DI S2644, ESTs and STSs, complete sequence.//4.6e-22:206:81//AL021528

[6752] F-HEMBA1003384//Homo sapiens clone GS096J14, WORKING DRAFT SEQUENCE, 3 unordered pieces.//0.00094:72:90//AC006026

[6753] F-HEMBA1003395//Plasmodium falciparum DNA *** SEQUENCING IN PROGRESS * from MALIPI, WORKING DRAFT SEQUENCE.//0.00041:826:57//AL031744

[6754] F-HEMBA1003402//CIT-HSP-2339K16.TR CIT-HSP Homo sapiens genomic clone 2339K16, genomic survey sequence.//2.4e-05:265:64//AQ056234

[6755] F-HEMBA1003403//Homo sapiens chromosome 4 clone B353C18 map 4q25, complete sequence.//4.3e-135:780:90//AC004066

[6756] F-HEMBA1003408

[6757] F-HEMBA1003417//Human DNA sequence from clone 496N17 on chromosome 6 p11.2-12.3 Contains EST, GSS, complete sequence.//1.9e-41:239:95//AL031321

[6758] F-HEMBA1003418//Rattus norvegicus Wistar polymeric immunoglobulin receptor (PIGR) gene, 3′UTR and trinucleotide repeat microsatellites.//2.2e-06:247:64//U08273

[6759] F-HEMBA1003433//Homo sapiens nibrin (NBS) mRNA, complete cds.//1.4e-149:697:99//AF051334

[6760] F-HEMBA1003447//Homo sapiens chromosome 4 clone B353C18 map 4q25, complete sequence.//1.7e-77:461:90//AC004066

[6761] F-HEMBA1003461//Rhodobacter sphaeroides FliH (fliH) gene, partial cds, Fliu (fliI) and FliJ (fliJ) genes, complete cds.//8.6e-08:752:58//U31090

[6762] F-HEMBA1003463//Homo sapiens chromosome 17, clone HClT305D20, complete sequence.//0.089:172:68//AC004098

[6763] F-HEMBA1003480//Homo sapiens clone NH0523H20, complete sequence.//4.5e-150:562:97//AC005041

[6764] F-HEMBA1003528//Streptomyces fradiae gene for trypsinogen precursor, complete cds.//4.7e-09:433:60//D16687

[6765] F-HEMBA1003531//Homo sapiens PAC clone DJ1185107 from 7q11.23-q21, complete sequence.//2.3e-48:297:90//AC004990

[6766] F-HEMBA1003538//Human complement Clr mRNA, complete cds.//4.3e-22:474:63//M14058

[6767] F-HEMBA1003545//Rattus norvegicus (clone 1.6 kB) islet-2 mRNA, complete cds.//3.5e-143:805:91//L35571

[6768] F-HEMBA1003548

[6769] F-HEMBA1003555//Human DNA sequence *** SEQUENCING IN PROGRESS *** from clone 447E6, WORKING DRAFT SEQUENCE.//3.4e-58:331:83//AL031724

[6770] F-HEMBA1003556//Homo sapiens Xp22-175-176 BAC GSHB-484017 (Genome Systems Human BAC Library) complete sequence.//6.0e-99:703:84//AC005913

[6771] F-HEMBA1003560//Bovine GTP-binding regulatory protein gamma-6 subunit mRNA, complete cds.//1.3e-99:587:89//J05071

[6772] F-HEMBA1003568//HS_{—}3149_A1_C04_MR CIT Approved Human Genomic Sperm Library D Homo sapiens genomic clone Plate=3149 Col=7 Row=E, genomic survey sequence.//4.1e-05:389:57//AQ166810

[6773] F-HEMBA1003569//Homo sapiens BAC clone NHO335J18 from 2, complete sequence.//1.6e-102:669:85//AC005539

[6774] F-HEMBA1003571//Dictyostelium discoideum RegA (regA) gene, complete cds.//0.00033:649:58//U60170

[6775] F-HEMBA1003579//Plasmodium falciparum DNA *** SEQUENCING IN PROGRESS * from MALIP1, WORKING DRAFT SEQUENCE.//0.00034:623:56//AL031744

[6776] F-HEMBA1003581//Mouse mRNA for talin.//3.3e-41:181:86//X56123

[6777] F-HEMBA1003591//Homo sapiens chromosome 16, BAC clone RPCI-11_{—}192K18, complete sequence.//4.4e-70:273:94//AC006075

[6778] F-HEMBA1003595//Plasmodium falciparum chromosome 2, section 32 of 73 of the complete sequence.//6.0e-17:768:58//AE001395

[6779] F-HEMBA1003597//Plasmodium falciparum chromosome 2, section 35 of 73 of the complete sequence.//4.0e-09:777:56//AE001398

[6780] F-HEMBA1003598//Homo sapiens PAC clone DJ0537P09 from 7 p11.2-p12, complete sequence.//1.3e-146:692:98//AC005153

[6781] F-HEMBA1003615//HS_{—}2010_A2_A07_MR CIT Approved Human Genomic Sperm Library D Homo sapiens genomic clone Plate=2010 Col=14 Row=A, genomic survey sequence.//1.1e-22:137:97//AQ226592

[6782] F-HEMBA1003617//Homo sapiens HRIHFB2157 mRNA, partial cds.//2.4e-169:501:97//AB015344

[6783] F-HEMBA1003621//Mus musculus PIAS3 mRNA, complete cds.//4.7e-37:165:92//AF034080

[6784] F-HEMBA1003622//Plasmodium falciparum 3D7 chromosome 12 PFYAC336 genomic sequence, WORKING DRAFT SEQUENCE, 5 unordered pieces.//0.0024:514:58//AC005139

[6785] F-HEMBA1003630//CIT-HSP-2168N15.TR CIT-HSP Homo sapiens genomic clone 2168NI15, genomic survey sequence.//6.5e-15:358:63//B92984

[6786] F-HEMBA1003637//Homo sapiens clone RG228D17, WORKING DRAFT SEQUENCE, 2 unordered pieces.//5.0e-21:238:76//AC005077

[6787] F-HEMBA1003640//Human DNA sequence *** SEQUENCING IN PROGRESS *** from clone 112K5, WORKING DRAFT SEQUENCE.//2.3e-15:371:6311Z85987

[6788] F-HEMBA1003645//A. thaliana 81 kb genomic sequence.//1.0:529:57//X98130

[6789] F-HEMBA1003646

[6790] F-HEMBA1003656

[6791] F-HEMBA1003662//Homo sapiens chromosome 17, clone hRPK.332_H_{—}18, complete sequence.//1.6e-175:824:98//AC005746

[6792] F-HEMBA1003667//Homo sapiens chromosome 12 p13.3, WORKING DRAFT SEQUENCE, 21 unordered pieces.//1.1e-24:190:87//AC004765

[6793] F-HEMBA1003679//Homo sapiens BAC clone RG 114BI9 from 7q31.1, complete sequence.//1.7e-162:579:99//AC005065

[6794] F-HEMBA1003680//H. sapiens DNA sequence.//7.3e-22:172:87//Z22322

[6795] F-HEMBA1003684//H. sapiens mRNA for Miz-1 protein.//0.0054:146:70//Y09723

[6796] F-HEMBA1003690//Homo sapiens antigen NY-CO-9 (NY-CO-9) mRNA, partial cds.//2.9e-72:606:77//AF039691

[6797] F-HEMBA1003692

[6798] F-HEMBA100371//Homo sapiens chromosome 17, clone HRPC41C23, complete sequence.//0.55:450:60//AC003101

[6799] F-HEMBA1003714

[6800] F-HEMBA1003715//Human DNA sequence from clone 931E15 on chromosome Xq25. Contains STSs, GSSs and genomic marker DXS8098, complete sequence.//3.0e-16:316:68//AL023575

[6801] F-HEMBA1003720//Homo sapiens chromosome 4 clone B227H22 map 4q25, complete sequence.//1.3e-41:483:73//AC004056

[6802] F-HEMBA1003725//CIT-HSP-2351H9.TF CIT-HSP Homo sapiens genomic clone 2351H9, genomic survey sequence.//1.1e-112:532:99//AQ079348

[6803] F-HEMBA1003729//HS_{—}3043_A1_E07_MR CIT Approved Human Genomic Sperm Library D Homo sapiens genomic clone Plate=3043 Col=13 Row=I, genomic survey sequence.//1.6e-12:87:98//AQ129345

[6804] F-HEMBA1003733//Homo sapiens, clone hRPK.15_A_{—}1, complete sequence.//4.7e-104:761:82//AC006213

[6805] F-HEMBA1003742//HS_{—}3027_A2_B02_MF CIT Approved Human Genomic Sperm Library D Homo sapiens genomic clone Plate=3027 Col=4 Row=C, genomic survey sequence.//3.4e-08:67:97//AQ154731

[6806] F-HEMBA1003758//CIT-HSP-2379DI 8.TR CIT-HSP Homo sapiens genomic clone 2379DI18, genomic survey sequence.//2.9e-10:310:63//AQ113513

[6807] F-HEMBA1003760//Mus musculus hypoxia inducible factor three alpha mRNA, complete cds.//6.4e-14:714:86//AF060194

[6808] F-HEMBA1003773//Plasmodium falciparum 3D7 chromosome 12 PFYAC336 genomic sequence, WORKING DRAFT SEQUENCE, 5 unordered pieces.//0.078:378:58//AC005139

[6809] F-HEMBA1003783//Human DNA sequence from PAC 509L4 on chromosome 6q22.1-6q22.33. Contains SSX3 like pseudogene, EST, STS.//9.0e-135:804:89//Z99496

[6810] F-HEMBA1003784//Caenorhabditis elegans cosmid C55B6.//0.054:463:58//U88181

[6811] F-HEMBA1003799//Homo sapiens Chromosome 22q11.2 Cosmid Clone 105a In DGCR Region, complete sequence.//1.9e-44:425:76//AC000070

[6812] F-HEMBA1003803//Oryctolagus cuniculus troponin T cardiac isoform mRNA, 3′ end of cds.//0.95:198:62//L40178

[6813] F-HEMBA1003804//Homo sapiens chromosome 17, clone hCIT.175_E_{—}5, complete sequence.//1.2e-138:275:99//AC004596

[6814] F-HEMBA1003805//Mus musculus quaking type I (QKI) mRNA, complete cds.//6.6e-148:753:95//U44940

[6815] F-HEMBA1003807//HS-1068-B1-G06-MR.abi CIT Human Genomic Sperm Library C Homo sapiens genomic clone Plate=CT 278 Col=1 I Row=N, genomic survey sequence.//6.7e-07:241:67//B47212

[6816] F-HEMBA1003827//Homo sapiens mRNA for KIAA0616 protein, partial cds.//1.0e-83:586:87//AB014516

[6817] F-HEMBA1003836//S. cerevisiae chromosome IX cosmid 9150.//5.1e-16:368:63//Z38125

[6818] F-HEMBA1003838//CIT-HSP-384J 15.TR CIT-HSP Homo sapiens genomic clone 384J 15, genomic survey sequence.//1.4e-45:180:90//B54810

[6819] F-HEMBA1003856//Homo sapiens chromosome 10 clone CIT987SK-1188B12 map 10p 12.1, complete sequence.//0.0014:574:58//AC005875

[6820] F-HEMBA1003864//, complete sequence.//2.1e-91:234:95//AC005300

[6821] F-HEMBA1003866//Mus musculus semaphorin VIa mRNA, complete cds.//5.9e-81:853:71//AF030430

[6822] F-HEMBA1003879//H. sapiens CBP80 mRNA.//2.0e-08:87:95//X80030

[6823] F-HEMBA1003880//Homo sapiens genomic DNA, chromosome 21q11.1, segment 7/28, WORKING DRAFT SEQUENCE.//1.7e-180:853:98//AP000036

[6824] F-HEMBA1003885//Homo sapiens PAC clone DJ0167F23 from 7 p15, complete sequence.//4.5e-39:376:67//AC004079

[6825] F-HEMBA1003893//H. sapiens CpG island DNA genomic Mse1 fragment, clone 11b6, forward read cpg11b6.ft1a.13.6e-32:173:99//Z59012

[6826] F-HEMBA1003902//RPCI11-26M20.TPB RPCI-11 Homo sapiens genomic clone RPCI-1 l-26M20, genomic survey sequence.//8.2e-12:422:61//AQ003455

[6827] F-HEMBA1003908//Plasmodium falciparum chromosome 2, section 38 of 73 of the complete sequence.//0.0063:468:58//AE001401

[6828] F-HEMBA1003926//Human DNA sequence *** SEQUENCING IN PROGRESS *** from clone 310013, WORKING DRAFT SEQUENCE.//3.6e-27:278:76//AL031658

[6829] F-HEMBA1003937//Homo sapiens chromosome 3 subtelomeric region.//1.4e-55:315:81//AF109718

[6830] F-HEMBA1003939//HS-1047-A1-G04-MF.abi CIT Human Genomic Sperm Library C Homo sapiens genomic clone Plate=CT 830 Col=7 Row=M, genomic survey sequence.//6.1e-09:413:63//B38195

[6831] F-HEMBA1003942//Plasmodium falciparum 3D7 chromosome 12 PFYACB8-420 genomic sequence, WORKING DRAFT SEQUENCE, 14 unordered pieces.//0.42:205:65//AC005140

[6832] F-HEMBA1003950//M. capricolum DNA for CONTIG MC072.//0.029:458:58//Z33058

[6833] F-HEMBA1003953//HS_{—}2268_A1_B04_MF CIT Approved Human Genomic Sperm Library D Homo sapiens genomic clone Plate=2268 Col=7 Row=C, genomic survey sequence.//9.0e-07:239:64//AQ085098

[6834] F-HEMBA1003958//Homo sapiens PAC clone DJ0808G16 from 7q11.23-q21, complete sequence.//2.8e-57:424:74//AC004894

[6835] F-HEMBA1003959//RPCI11-78E8.TV RPCII 1 Homo sapiens genomic clone R-78E8, genomic survey sequence.//4.3e-86:441:9611AQ285498

[6836] F-HEMBA1003976//HS_{—}3146_A1_H09_T7 CIT Approved Human Genomic Sperm Library D Homo sapiens genomic clone Plate=3146 Col=17 Row=O, genomic survey sequence.//6.3e-10:129:80//AQ141146

[6837] F-HEMBA1003978

[6838] F-HEMBA1003985//Caenorhabditis elegans DNA *** SEQUENCING IN PROGRESS *** from clone Y105C5, WORKING DRAFT SEQUENCE.//1.0:258:60//Z98855

[6839] F-HEMBA1003987

[6840] F-HEMBA1003989//Streptomyces coelicolor cosmid 1 A9.//0.40:238:61//AL034446

[6841] F-HEMBA1004000//Rattus norvegicus satellite sequence dOMco2.//2.0e-07:116:70//U19354

[6842] F-HEMBA1004011//Plasmodium falciparum 3D7 chromosome 12 PFYAC588 genomic sequence, WORKING DRAFT SEQUENCE, 2 unordered pieces.//0.098:286:60//AC004710

[6843] F-HEMBA1004012//Homo sapiens chromosome 17, clone hRPK.63_A-1, complete sequence.//2.8e-185:896:97//AC005670

[6844] F-HEMBA1004015//Homo sapiens chromosome 17, clone hRPK.721_K_{—}1, complete sequence.//6.3e-68:417:80//AC005411

[6845] F-HEMBA1004024//Homo sapiens Xp22-83 BAC GSHB-324M7 (Genome Systems Human BAC Library) complete sequence.//2.0e-47:418:77//AC005859

[6846] F-HEMBA1004038//Homo sapiens genomic DNA, chromosome 21q11.1, segment 23/28, WORKING DRAFT SEQUENCE.//1.6e-51:564:74//AP000052

[6847] F-HEMBA1004042//Plasmodium falciparum chromosome 2, section 35 of 73 of the complete sequence.//1.2e-05:636:55//AE001398

[6848] F-HEMBA1004045//Homo sapiens (subclone I_g7 from BAC H76) DNA sequence, complete sequence.//1.9e-31:373:76//AC002252

[6849] F-HEMBA1004048//Homo sapiens DNA for P35-related protein, exon 2.1/0.039:234:63//D63393

[6850] F-HEMBA1004049//Homo sapiens Xp22 GS-52411 (Genome Systems Human BAC library), complete sequence.//4.8e-135:780:89//AC003106

[6851] F-HEMBA1004055//Human chromosome 3p21.1 gene sequence.//4.7e-09:457:58//L13435

[6852] F-HEMBA1004056//Human DNA sequence *** SEQUENCING IN PROGRESS *** from clone 447C4, WORKING DRAFT SEQUENCE.//3.3e-25:246:77//AL021977

[6853] F-HEMBA1004074//CIT-HSP-2053J5.TF CIT-HSP Homo sapiens genomic clone 2053J5, genomic survey sequence.//7.8e-24:233:76//B68555

[6854] F-HEMBA1004086//Saccharomyces douglasii mitochondrial tRNA-Ser and tRNA-Phe genes, partial sequence, and Varlp (varl) gene, mitochondrial gene encoding mitochondrial protein, complete cds.//4.5e-08:614:59//U49822

[6855] F-HEMBA1004097//Mus musculus putative transcription factor mRNA, complete cds.//5.9e-121:502:85//AF091234

[6856] F-HEMBA1004111//*** SEQUENCING IN PROGRESS *** Homo sapiens chromosome 4, BAC clone C0481 P14; HTGS phase 1, WORKING DRAFT SEQUENCE, 7 unordered pieces.//2.0e-36:317:80//AC006160

[6857] F-HEMBA1004131//Mus musculus clone OST2067, genomic survey sequence.//8.7e-24:320:71//AF046393

[6858] F-HEMBA1004132//HS_{—}3226_B1_D10_T7 CIT Approved Human Genomic Sperm Library D Homo sapiens genomic clone Plate=3226 Col=19 Row=H, genomic survey sequence.//9.7e-13:232:71//AQ182017

[6859] F-HEMBA1004133

[6860] F-HEMBA1004138//HS_{—}3036_B1_G11_MR CIT Approved Human Genomic Sperm Library D Homo sapiens genomic clone Plate=3036 Col=21 Row=N, genomic survey sequence.//0.0035:165:64//AQ294763

[6861] F-HEMBA1004143

[6862] F-HEMBA1004146

[6863] F-HEMBA1004150//Human DNA sequence from PAC 52D1 on chromosome Xq21. Contains CA repeats, STS.//0.00011:618:60//Z96811

[6864] F-HEMBA1004164//Homo sapiens Xp22-175-176 BAC GSHB-484017 (Genome Systems Human BAC Library) complete sequence.//2.9e-30:454:68//AC005913

[6865] F-HEMBA1004168//Homo sapiens geminin mRNA, complete cds.//4.5e-133:649:97//AF067855

[6866] F-HEMBA1004199

[6867] F-HEMBA1004200//HS_{—}2015_A1_B05_T7 CIT Approved Human Genomic Sperm Library D Homo sapiens genomic clone Plate=2015 Col=9 Row=C, genomic survey sequence.//8.5e-34:236:87//AQ247957

[6868] F-HEMBA1004202//Mus musculus chromosome 11, clone mCIT.268_P_{—}23, complete sequence.//7.8e-59:216:83//AC004807

[6869] F-HEMBA1004203//Homo sapiens clone NH0313P13, WORKING DRAFT SEQUENCE, 15 unordered pieces.//6.3e-98:173:98//AC005488

[6870] F-HEMBA1004207//Homo sapiens leptin receptor short form (db) mRNA, complete cds.//3.2e-166:791:98//U50748

[6871] F-HEMBA1004225//Plasmodium falciparum chromosome 2, section 61 of 73 of the complete sequence.//6.5e-08:584:60//AE001424

[6872] F-HEMBA1004227//Rattus norvegicus protein phosphatase 2C mRNA, complete cds.//8.0e-115:713:86//AF095927

[6873] F-HEMBA1004238

[6874] F-HEMBA1004241//C1C5B11.1 check: 4870 from: I to: 167234, complete sequence.//0.57:552:58//AC004708

[6875] F-HEMBA1004246//Human DNA sequence from clone 422F24 on chromosome 6q24.1-25.2. Contains a novel gene similar to C. elegans C02C2.5. Contains ESTs, STSs and GSSs, complete sequence.//6.1e-21:254:77//AL031010

[6876] F-HEMBA1004248//Rattus rattus insulin-induced growth-respons protein (CL-6) mRNA, complete cds.//1.7e-30:315:74//L13619

[6877] F-HEMBA1004264//Homo sapiens cosmid clone LUCA20 from 3p21.3, complete sequence.//4.4e-07:674:60//AC004693

[6878] F-HEMBA1004267//Homo sapiens chromosome 17, clone hRPC.117_B_{—}12, complete sequence.//3.1e-78:335:87//AC004707

[6879] F-HEMBA1004272//Homo sapiens 12 p13.3 PAC RPCI5-1180D12 (Roswell Park Cancer Institute Human PAC Library) complete sequence.//1.4e-176:856:97//AC005831

[6880] F-HEMBA1004274//HS_{—}3064_B2_A04_MF CIT Approved Human Genomic Sperm Library D Homo sapiens genomic clone Plate=3064 Col=8 Row=B, genomic survey sequence.//3.1e-28:153:100//AQ136993

[6881] F-HEMBA1004275//Human DNA sequence *** SEQUENCING IN PROGRESS *** from clone 501A4, WORKING DRAFT SEQUENCE.//5.2e-17:109:99//Z98051

[6882] F-HEMBA1004276//CIT-HSP-2387K6.TF.1 CIT-HSP Homo sapiens genomic clone 2387K6, genomic survey sequence.//5.0e-07:63:98//AQ240477

[6883] F-HEMBA1004286//Homo sapiens TGF beta receptor associated protein-1 mRNA, complete cds.//2.1e-185:868:99//AF022795

[6884] F-HEMBA1004289//Arabidopsis thaliana genomic DNA, chromosome 5, P1 clone: MQN23, complete sequence.//1.0:387:59//AB013395

[6885] F-HEMBA1004295//Homo sapiens DNA, anonymous heat-stable fragment RP11-3A.//7.8e-06:92:89//AB012254

[6886] F-HEMBA1004306//Homo sapiens clone DJO811N16, complete sequence.//0.00037:413:59//AC004897

[6887] F-HEMBA1004312//Rickettsia prowazekii strain Madrid E, complete genome; segment 2/4.//0.28:522:5711AJ235271

[6888] F-HEMBA1004321//Homo sapiens chromosome 19, BAC CIT-B-19ln6, complete sequence.//7.1e-136:548:92//AC006130

[6889] F-HEMBA1004323//Human DNA sequence from PAC 450C20 on chromosome X.//1.3e-32:320:65//Z84720

[6890] F-HEMBA1004327//Homo sapiens mRNA for KIAA0522 protein, partial cds.//0.93:222:62//AB011094

[6891] F-HEMBA1004330//Homo sapiens clone DJI 196H06, WORKING DRAFT SEQUENCE, 4 unordered pieces.//7.0e-168:895:93//AC004995

[6892] F-HEMBA1004334//Homo sapiens Xp22 BAC 620F15 (Genome Systems BAC library) complete sequence.//4.6e-73:713:75//AC002980

[6893] F-HEMBA1004335//Human DNA sequence *** SEQUENCING IN PROGRESS *** from clone 417M14, WORKING DRAFT SEQUENCE.//1.3e-25:121:85//AL024498

[6894] F-HEMBA1004341

[6895] F-HEMBA1004353//***ALU WARNING: Human Alu-Sc subfamily consensus sequence.//6.4e-38:278:85//U14571

[6896] F-HEMBA1004354//Human clone C3 CHL1 protein (CHLR1) mRNA, alternatively spliced, complete cds.//4.1e-45:190:92//U75968

[6897] F-HEMBA1004356

[6898] F-HEMBA1004366//P. falciparum complete gene map of plastid-like DNA (IR-A).//2.2e-07:736:57//X95275

[6899] F-HEMBA1004372//H. sapiens dystrophin gene intron 44.//1.0:129:62//X77644

[6900] F-HEMBA1004389//Mouse interleukin 2 receptor (p55 IL-2R) mRNA, 5′ end.//4.7e-42:237:94//M21977

[6901] F-HEMBA1004394//Plasmodium falciparum chromosome 2, section 39 of 73 of the complete sequence.//5.2e-05:519:59//AE001402

[6902] F-HEMBA1004396//Human BAC clone RG302F04 from 7q31, complete sequence.//4.0e-32:261:76//AC002463

[6903] F-HEMBA1004405//Plasmodium falciparum 3D7 chromosome 12 PFYACB8-628 genomic sequence, WORKING DRAFT SEQUENCE, 9 unordered pieces.//1.4e-07:693:58//AC005507

[6904] F-HEMBA1004408//Homo sapiens clone NH0469M07, WORKING DRAFT SEQUENCE, 7 unordered pieces.//1.2e-69:195:100//AC005037

[6905] F-HEMBA1004429//HS_{—}3193_A1_B06_T7 CIT Approved Human Genomic Sperm Library D Homo sapiens genomic clone Plate=3193 Col=11 Row=C, genomic survey sequence.//5.1e-67:386:91//AQ172942

[6906] F-HEMBA1004433//Human Chromosome 11p11.2 PAC clone pDJ404 m15, complete sequence.//3.2e-27:242:82//AC002554

[6907] F-HEMBA1004460//Homo sapiens clone DJ0647C14, WORKING DRAFT SEQUENCE, 21 unordered pieces.//1.7e-75:590:81//AC004846

[6908] F-HEMBA1004461//Human DNA sequence from clone 657J8 on chromosome Xq26.1-26.3 Contains GSS, complete sequence.//0.045:215:66//AL034407

[6909] F-HEMBA1004479//Mus musculus hypoxia inducible factor three alpha mRNA, complete cds.//5.2e-43:364:79//AF060194

[6910] F-HEMBA1004482//Plasmodium falciparum 3D7 chromosome 12 PFYAC181 genomic sequence, WORKING DRAFT SEQUENCE, 8 unordered pieces.//6.8e-17:791:59//AC005505

[6911] F-HEMBA1004499//Homo sapiens chromosome 17, clone hRPC.1073_F_{—}15, complete sequence.//4.4e-125:251:94//AC004686

[6912] F-HEMBA1004502//Plasmodium falciparum 3D7 chromosome 12 PFYACI 122 genomic sequence, WORKING DRAFT SEQUENCE, 3 unordered pieces.//0.012:635:57//AC004709

[6913] F-HEMBA1004506//Homo sapiens PAC clone DJ0844F09 from 7 p12-p13, complete sequence.//2.8e-127:766:88//AC004453

[6914] F-HEMBA1004507

[6915] F-HEMBA1004509//Arabidopsis thaliana DNA chromosome 4, BAC clone T10114 (ESSAII project).//1.0e-13:244:67//AL021712

[6916] F-HEMBA1004534//Human mRNA for actin-binding protein (filamin) (ABP-280).//1.6e-72:678:74//X53416

[6917] F-HEMBA1004538//Sequence 1 from patent U.S. Pat. No. 5,612,190.//0.00015:416:59//I36871

[6918] F-HEMBA1004542//Homo sapiens clone NH0486122, WORKING DRAFT SEQUENCE, 5 unordered pieces.//0.95:202:64//AC005038

[6919] F-HEMBA1004554//Arabidopsis thaliana BAC T26D22.//0.45:624:56//AF058826

[6920] F-HEMBA1004560//Human mRNA for KIAA0281 gene, complete cds.//9.1e-10:173:70//D87457

[6921] F-HEMBA1004573//Human BAC clone RGI 14A06 from 7q31, complete sequence.//6.1e-23:134:73//AC002542

[6922] F-HEMBA1004577//Homo sapiens Chromosome 16 BAC clone CIT987SK-582J2, complete sequence.//1.6e-15:190:77//AC004525

[6923] F-HEMBA1004586//Homo sapiens clone DJO810E06, WORKING DRAFT SEQUENCE, 8 unordered pieces.//3.1e-31:388:76//AC004895

[6924] F-HEMBA1004596//RPCI11-81021.TJ RPCII 1 Homo sapiens genomic clone R-81021, genomic survey sequence.//2.2e-90:458:90//AQ285136

[6925] F-HEMBA1004604//Mus musculus COP9 complex subunit 7a (COPS7a) mRNA, complete cds.//8.6e-105:699:84//AF071316

[6926] F-HEMBA1004610//Homo sapiens PAC clone DJI 163J12 from 7q21.2-q31.1, complete sequence.//5.4e-20:267:72//AC004983

[6927] F-HEMBA1004617//CIT-HSP-2319H15.TF CIT-HSP Homo sapiens genomic clone 2319H15, genomic survey sequence.//6.2e-26:147:99//AQ034944

[6928] F-HEMBA1004629//Plasmodium falciparum 3D7 chromosome 12 PFYAC1383 genomic sequence, WORKING DRAFT SEQUENCE, 3 unordered pieces.//5.6e-06:766:56//AC005504

[6929] F-HEMBA1004631//Human DNA sequence from PAC 368A4 on chromosome X. Contains ESTs, CELLULAR NUCLEIC ACID BINDING PROTEIN (CNBP) like gene and STSs.//4.7e-73:412:9211Z83843

[6930] F-HEMBA1004632//Canine herpesvirus DNA for gene homolog of HSV1 UL16, EHV1 ORF 46, VZV ORF 44.//0.92:181:61//X90418

[6931] F-HEMBA1004637//G. gallus mRNA for LRP/alpha-2-macroglobulin receptor.//7.8e-47:784:65//X74904

[6932] F-HEMBA1004638//Rattus norvegicus homeodomain protein Nk×6.1 (nk×6.1) mRNA, complete cds.//6.4e-06:458:61//AF004431

[6933] F-HEMBA1004666//Caenorhabditis elegans DNA *** SEQUENCING IN PROGRESS * from clone Y47D3, WORKING DRAFT SEQUENCE.//0.30:733:55//Z98865

[6934] F-HEMBA1004669//Human DNA sequence from clone 465N24 on chromosome I p35.1-36.13. Contains two novel genes, ESTs, GSSs and CpG islands, complete sequence.//7.5e-136:521:98//AL031432

[6935] F-HEMBA1004670//Homo sapiens Chromosome 22q12 Cosmid Clone p90g5, complete sequence.//0.43:365:59//AC000045

[6936] F-HEMBA1004672

[6937] F-HEMBA1004693//Plasmodium falciparum 3D7 chromosome 12 PFYAC492 genomic sequence, WORKING DRAFT SEQUENCE, 5 unordered pieces.//0.096:651:54//AC005308

[6938] F-HEMBA1004697//CIT-HSP-2326C13.TR CIT-HSP Homo sapiens genomic clone 2326C13, genomic survey sequence.//0.23:238:65//AQ040642

[6939] F-HEMBA1004705//Homo sapiens Xp22 Cosmid U 151 G 1 (from Lawrence Livermore X library) and PAC RPCII-93D1 I (from Roswell Park Cancer Center) complete sequence.//2.1e-27:375:72//AC002357

[6940] F-HEMBA1004709//Homo sapiens Xp22-150 BAC GSHB-309P15 (Genome Systems Human BAC Library) complete sequence.//1.6e-36:191:91//AC006210

[6941] F-HEMBA1004711//Homo sapiens chromosome 17, clone hRPK.271_K_{—}11, complete sequence.//1.1e-133:639:99//AC005562

[6942] F-HEMBA1004725//RPCI11-75013.TJ RPCII 1 Homo sapiens genomic clone R-75013, genomic survey sequence.//6.2e-32:169:100//AQ266512

[6943] F-HEMBA1004730//Human BAC clone RG035E18 from 7q31, complete sequence.//8.0e-68:732:72//AC004029

[6944] F-HEMBA1004733//CIT-HSP-2305M23.TF CIT-HSP Homo sapiens genomic clone 2305M23, genomic survey sequence.//4.9e-18:209:69//AQ017556

[6945] F-HEMBA1004734//Arabidopsis thaliana ubiquitin-conjugating enzyme 17 (UBC17) mRNA, complete cds.//1.8e-13:451:62//AF028340

[6946] F-HEMBA1004736//Human DNA sequence from PAC 436M11 on chromosome Xp22.11-22.2. Contains the serine threonine protein phosphatase gene PPEF1, and the first coding exon of the RS1 gene for retinoschisis (X-linked, juvenile) 1 (XLRS1). Contains ESTs, an STS and GSSs, complete sequence.//5.0e-87:646:78//Z94056

[6947] F-HEMBA1004748//Human BAC clone RG204116 from 7q31, complete sequence.//0.24:526:57//AC002461

[6948] F-HEMBA1004751//Homo sapiens clone DJ0876A24, WORKING DRAFT SEQUENCE, 6 unordered pieces.//1.4e-25:268:76//AC004913

[6949] F-HEMBA1004752//R. norvegicus mRNA for leucocyte common antigen-related protein (3941 bp).//1.1e-07:503:61//X83546

[6950] F-HEMBA1004753//Homo sapiens Chromosome 12 Cosmid Clone 6e5, complete sequence.//4.5e-38:314:81//AC000028

[6951] F-HEMBA1004756//Homo sapiens, complete sequence.//1.4e-111:326:84//AC005854

[6952] F-HEMBA1004758//Sequence 29 from patent U.S. Pat. No. 5,534,410.//3.9e-135:769:91//123472

[6953] F-HEMBA1004763//Homo sapiens apoptosis inhibitor survivin gene, complete cds.//3.6e-47:404:79//U75285

[6954] F-HEMBA1004768//Homo sapiens PAC clone DJ0979P20 from 7q33-q35, complete sequence.//6.7e-107:890:78//AC004941

[6955] F-HEMBA1004770//Plasmodium falciparum 3D7 chromosome 12 PFYAC1122 genomic sequence, WORKING DRAFT SEQUENCE, 3 unordered pieces.//7.9e-09:806:59//AC004709

[6956] F-HEMBA1004771//G. muris ribosomal RNA operon DNA encoding 16S, 23S and 5.8S ribosomal RNA.//0.69:239:61//X65063

[6957] F-HEMBA1004776

[6958] F-HEMBA1004778

[6959] F-HEMBA1004795//Drosophila melanogaster A-kinase anchor protein DAKAP550 mRNA, partial cds.//3.4e-46:778:64//AF003622

[6960] F-HEMBA1004803//Homo sapiens chromosome Y, clone 264, M, 20, complete sequence.//4.3e-82:580:82//AC004617

[6961] F-HEMBA1004806//Homo sapiens BAC clone RG281 G05 from 7p 15-p21, complete sequence.//5.4e-07:642:59//AC005083

[6962] F-HEMBA1004807//Human HIVI tata element modulatory factor mRNA sequence from chromosome 3.//1.4e-46:171:92//L01042

[6963] F-HEMBA1004816//Homo sapiens calpastatin (CAST) gene, exons 10-14.//3.5e-31:546:66//M86257

[6964] F-HEMBA1004820//C. botulinum progenitor toxin complex genes.//0.0014:343:62//X87972

[6965] F-HEMBA1004847//Canine mRNA for 68 kDA subunit of signal recognition particle (SRP68).//1.5e-85:512:88//X53744

[6966] F-HEMBA1004850//Homo sapiens TGF-beta type 1 receptor (TGFBR1) gene, exon 1.//0.0065:284:61//AF054590

[6967] F-HEMBA1004863//Genomic sequence from Mouse 11, complete sequence.//0.92:250:59//AC000400

[6968] F-HEMBA1004864

[6969] F-HEMBA1004865//Human DNA sequence from clone 459L4 on chromosome 6p22.3-24.1 Contains EST, STS, GSS, complete sequence.//3.6e-12:214:72//AL031120

[6970] F-HEMBA1004880//Homo sapiens Chromosome 16 BAC clone CIT987SK-A-319E8, complete sequence.//1.1e-08:255:69//AC004020

[6971] F-HEMBA1004889//Schistocerca americana Antennapedia homeotic protein (Antp) mRNA, complete cds.//0.062:155:69//U32943

[6972] F-HEMBA1004900//Plasmodium falciparum unidentified mRNA sequence.//0.00055:323:60//L12043

[6973] F-HEMBA1004909//Homo sapiens chromosome 17, clone 289A8, complete sequence.//9.6e-16:166:80//AC003051

[6974] F-HEMBA1004918//Turritella communis mitochondrial 16S ribosomal RNA gene, partial.//0.81:146:65//M94003

[6975] F-HEMBA1004923//Human DNA from overlapping chromosome 19-specific cosmids R32543, and F15613 containing ZNF gene family member, genomic sequence, complete sequence.//1.4e-36:338:78//AC003006

[6976] F-HEMBA1004929//CIT-HSP-2373116.TR CIT-HSP Homo sapiens genomic clone 2373116, genomic survey sequence.//2.4e-86:443:96//AQ108676

[6977] F-HEMBA1004930//Homo sapiens PAC clone DJ0608H12 from 7q21, complete sequence.//4.6e-20:219:73//AC004109

[6978] F-HEMBA1004933//HS-1003-A1-E10-MF.abi CIT Human Genomic Sperm Library C Homo sapiens genomic clone Plate=CT 497 Col=19 Row=I, genomic survey sequence.//1.4e-28:216:85//B30726

[6979] F-HEMBA1004934//Homo sapiens chromosome 21q22.3 PAC 267010, complete sequence.//0.53:222:61//AF042091

[6980] F-HEMBA1004944//Homo sapiens clone DJ0736H05, WORKING DRAFT SEQUENCE, 5 unordered pieces.//1.2e-58:509:78//AC005482

[6981] F-HEMBA1004954//HS_{—}2033_A2_A08_T7 CIT Approved Human Genomic Sperm Library D Homo sapiens genomic clone Plate=2033 Col=16 Row=A, genomic survey sequence.//3.7e-47:243:99//AQ229758

[6982] F-HEMBA1004956//P. falciparum complete gene map of plastid-like DNA (IR-B).//0.048:421:58//X95276

[6983] F-HEMBA1004960//Arabidopsis thaliana DNA chromosome 4, ESSA I contig fragment No. 8.//0.89:333:58//Z97343

[6984] F-HEMBA1004972

[6985] F-HEMBA1004973//RPCI11-66P8.TK RPCI11 Homo sapiens genomic clone R-66P8, genomic survey sequence.//3.5e-22:245:77//AQ238471

[6986] F-HEMBA1004977//Homo sapiens full-length insert cDNA clone YZ83B08.//9.0e-11:84:98//AF086080

[6987] F-HEMBA1004978//CIT-HSP-2354E10.TR CIT-HSP Homo sapiens genomic clone 2354E10, genomic survey sequence.//0.0021:152:66//AQ075713

[6988] F-HEMBA1004980//HS_{—}3018_A2_E04_MR CIT Approved Human Genomic Sperm Library D Homo sapiens genomic clone Plate=3018 Col=8 Row=I, genomic survey sequence.//1.9e-77:392:97//AQ071873

[6989] F-HEMBA1004983//Albinaria corrugata isolate cor.Pm1.116S ribosomal RNA gene, mitochondrial gene for mitochondrial RNA, partial sequence.//0.0030:276:61//AF031680

[6990] F-HEMBA1004995//Homo sapiens chromosome 16, cosmid bridge clone 306E6 (LANL), complete sequence.//4.2e-138:640:99//AC005590

[6991] F-HEMBA1005008//Human marinerl transposase gene, complete consensus sequence.//6.8e-20:160:88//U52077

[6992] F-HEMBA1005009//Homo sapiens BAF53a (BAF53a) mRNA, complete cds.//2.0e-144:668:99//AF041474

[6993] F-HEMBA1005019//Homo sapiens mRNA for KIAA0648 protein, partial cds.//1.4e-146:693:98//AB014548

[6994] F-HEMBA1005029//Homo sapiens DNA sequence from PAC 97D16 on chromosome 6p21.3-22.2. Contains an unknown pseudogene, a 60S Ribosomal protein L24 (L30) LIKE pseudogene and histone genes H2BFC (H2B/c), H4FFP (H4/f pseudogene), H2AFC (H2A/c), H3F1K (H3.1/k) and a tRNA-Val pseudogene and tRNA-Thr gene. Contains ESTs, STSs, GSSs and genomic marker D6S464, complete sequence.//2.2e-115:668:90//AL009179

[6995] F-HEMBA1005035//Homo sapiens chromosome 17, clone hCIT.175_E_{—}5, complete sequence.//4.6e-138:591:98//AC004596

[6996] F-HEMBA1005039//CIT-HSP-2338L5.TR CIT-HSP Homo sapiens genomic clone 2338L5, genomic survey sequence.//3.7e-61:271:88//AQ055486

[6997] F-HEMBA1005047//Mus musculus mRNA for Rab24 protein.//3.8e-17:218:73//Z22819

[6998] F-HEMBA1005050//Human Tis 11d gene, complete cds.//0.079:251:63//U07802

[6999] F-HEMBA1005062//Plasmodium falciparum 3D7 chromosome 12 PFYAC69 genomic sequence, WORKING DRAFT SEQUENCE, 4 unordered pieces.//0.018:560:56//AC004688

[7000] F-HEMBA1005066//Human DNA sequence *** SEQUENCING IN PROGRESS *** from clone 774G10, WORKING DRAFT SEQUENCE.//3.4e-97:432:84//AL034410

[7001] F-HEMBA1005075//H. sapiens DNA 3′ flanking simple sequence region clone wg2c3.//6.9e-07:176:68//X76589

[7002] F-HEMBA1005079//CIT-HSP-2325M21.TRB CIT-HSP Homo sapiens genomic clone 2325M21, genomic survey sequence.//2.1e-48:274:93//AQ038720

[7003] F-HEMBA1005083//HS_{—}2248_B1_D05_MR CIT Approved Human Genomic Sperm Library D Homo sapiens genomic clone Plate=2248 Col=9 Row=H, genomic survey sequence.//3.4e-06:230:64//AQ129575

[7004] F-HEMBA1005101//Homo sapiens SYT interacting protein SIP mRNA, complete cds.//1.3e-161:762:98//AF080561

[7005] F-HEMBA1005113//L. esculentum microsatellite repeat DNA region.//0.0038:742:57//X90770

[7006] F-HEMBA1005123//Homo sapiens clone DJ0673M15, WORKING DRAFT SEQUENCE, 33 unordered pieces.//9.6e-83:479:78//AC004854

[7007] F-HEMBA1005133//Human DNA sequence *** SEQUENCING IN PROGRESS *** from clone Y313F4, WORKING DRAFT SEQUENCE.//3.9e-24:576:64//AL023808

[7008] F-HEMBA1005149//Homo sapiens PAC clone DJ430N08 from 22q12.1-qter, complete sequence.//4.7e-36:283:80//AC004542

[7009] F-HEMBA1005152//Homo sapiens chromosome Xp22-67-68, WORKING DRAFT SEQUENCE, 99 unordered pieces.//5.0e-10:332:64//AC004469

[7010] F-HEMBA1005159//Homo sapiens genomic DNA, chromosome 21q11.1, segment 1/5, WORKING DRAFT SEQUENCE.//4.0e-10:734:58//AP000023

[7011] F-HEMBA1005185//H. sapiens CpG island DNA genomic Mse1 fragment, clone 91b2, forward read cpg91b2.ft1a.//2.2e-14:93:100//Z63847

[7012] F-HEMBA1005201//Drosophila melanogaster cosmid 152A3.//4.7e-35:679:64//AL009194

[7013] F-HEMBA1005202//Canine mRNA for 68 kDA subunit of signal recognition particle (SRP68).//6.7e-138:778:90//X53744

[7014] F-HEMBA1005206//Drosophila melanogaster Su(P) and anon-73Bl genes and partial o25 gene and Pros26 gene.//7.1e-12:376:62//AJ011320

[7015] F-HEMBA1005219//Homo sapiens mRNA for KIAA0445 protein, complete cds.//7.1e-05:411:60//AB007914

[7016] F-HEMBA1005223//Homo sapiens PAC clone DJ430N08 from 22q12.1-qter, complete sequence.//3.5e-06:212:66//AC004542

[7017] F-HEMBA1005232//Plasmodium falciparum 3D7 chromosome 12 PFYAC492 genomic sequence, WORKING DRAFT SEQUENCE, 5 unordered pieces.//3.7e-07:625:57//AC005308

[7018] F-HEMBA1005241//Homo sapiens PAC clone DJ0777023 from 7 p14-p15, complete sequence.//8.7e-45:567:72//AC005154

[7019] F-HEMBA1005244//Homo sapiens chromosome X clone U177G4, U152H5, U168D5, 174A6, U172D6, and U186B3 from Xp22, complete sequence.//0.96:298:62//AC002365

[7020] F-HEMBA1005251

[7021] F-HEMBA1005252//Homo sapiens chromosome 17, clone hRPK.318_A_{—}15, complete sequence.//4.5e-160:392:99//AC005837

[7022] F-HEMBA1005274//Homo sapiens BAC clone 255A7 from 8q21 containing NBS I gene, complete sequence.//2.3e-05:496:60//AF069291

[7023] F-HEMBA1005275//Human DNA sequence from clone 444C7 on chromosome 6p22.3-23. Contains an EST, an STS and GSSs, complete sequence.//5.7e-05:220:64//AL033521

[7024] F-HEMBA1005293//Homo sapiens echinoderm microtubule-associated protein homolog HuEMAP mRNA, complete cds.//2.4e-20:338:65//U97018

[7025] F-HEMBA1005296

[7026] F-HEMBA1005304//Human DNA sequence from clone 364122 on chromosome Xq21.31-22.3. Contains an STS and GSSs, complete sequence.//1.6e-51:381:78//AL031012

[7027] F-HEMBA1005311

[7028] F-HEMBA1005314//Homo sapiens genomic DNA, chromosome 21q11.1, segment 2/28, WORKING DRAFT SEQUENCE.//0.94:226:63//AP000031

[7029] F-HEMBAI1005315//Homo sapiens BAC810, complete sequence.//9.5e-15:684:62//U85198

[7030] F-HEMBA1005318//Human DNA sequence from PAC 394F12 on chromosome X contains EST, STS, CpG island clone.//2.6e-05:472:59//Z83823

[7031] F-HEMBA1005331//Homo sapiens chromosome 17, clone hRPK.214_C_{—}8, complete sequence.//3.3e-90:300:90//AC005803

[7032] F-HEMBA1005338//Homo sapiens mRNA for matrilin-4, partial.//0.4e-151:740:97//AJ007581

[7033] F-HEMBA1005353//CIT-HSP-2310N10.TR CIT-HSP Homo sapiens genomic clone 2310N10, genomic survey sequence.//2.1e-86:438:97//AQ016145

[7034] F-HEMBA1005359//Human zinc finger protein ZNF137 mRNA, complete cds.//1.8e-98:500:88//U09414

[7035] F-HEMBA1005367//Mus musculus melastatin mRNA, complete cds.//8.3e-72:577:73//AF047714

[7036] F-HEMBA1005372//Human DNA sequence from PAC 293E14 contains ESTs, STS.//1.3e-07:274:66//Z82900

[7037] F-HEMBA1005374//Homo sapiens clone 277F10, WORKING DRAFT SEQUENCE, 5 unordered pieces.//1.9e-48:611:69//AC004813

[7038] F-HEMBA1005382//HS_{—}3063_B2_F1_MF CIT Approved Human Genomic Sperm Library D Homo sapiens genomic clone Plate=3063 Col=22 Row=L, genomic survey sequence.//1.6e-27:154:98//AQ103204

[7039] F-HEMBA1005389//Plasmodium falciparum telomere nucleotide sequence.//4.0e-07:443:61//M23175

[7040] F-HEMBA1005394//CIT-HSP-2368Bl I .TR CIT-HSP Homo sapiens genomic clone 2368B11, genomic survey sequence.//7.6e-17:225:71//AQ076749

[7041] F-HEMBA1005403//Human DNA sequence *** SEQUENCING IN PROGRESS *** from clone 423B22, WORKING DRAFT SEQUENCE.//4.5e-131:278:98//AL034379

[7042] F-HEMBA1005408//HS_{—}3007 B2 G04 MR CIT Approved Human Genomic Sperm Library D Homo sapiens genomic clone Plate=3007 Col=8 Row=N, genomic survey sequence.//8.0e-06:218:66//AQ294366

[7043] F-HEMBA1005410//Human DNA sequence from cosmid cU 120E2, on chromosome X contains Lowe oculocerebrorenal syndrome (OCRL) ESTs and STS.//1.5e-41:432:76//Z73496

[7044] F-HEMBA1005411

[7045] F-HEMBA1005423//Homo sapiens cyclin-dependent kinase inhibitor (CDKN2C) mRNA, complete cds.//1.0e-169:537:99//AF041248

[7046] F-HEMBA1005426

[7047] F-HEMBA1005443//Homo sapiens chromosome 19, BAC CIT-B-191n6, complete sequence.//7.1e-37:260:76//AC006130

[7048] F-HEMBA1005447//CIT-HSP-2173N7.TR CIT-HSP Homo sapiens genomic clone 2173N7, genomic survey sequence.//5.0e-133:631:98//B93234

[7049] F-HEMBA1005468//Human DNA sequence from clone 20J23 on chromosome Xq26.2-27.2 Contains ras-related C3 botulinum toxin substrate I (P21-RAC 1) (ras-like protein TC25) EST, CA repeat, STS, CpG island, complete sequence.//1.5e-118:868:83//AL022576

[7050] F-HEMBA1005469//Homo sapiens chromosome 16, P1 clone 96-4B (LANL), complete sequence.//1.2e-179:838:99//AC005212

[7051] F-HEMBA1005472//Human DNA sequence *** SEQUENCING IN PROGRESS *** from clone 228H13, WORKING DRAFT SEQUENCE.//3.4e-20:187:74//AL031985

[7052] F-HEMBA1005474//Homo sapiens genomic DNA, chromosome 21q11.1, segment 12/28, WORKING DRAFT SEQUENCE.//4.1e-22:445:65//AP000041

[7053] F-HEMBA1005475//CIT-HSP-2322D14.TR CIT-HSP Homo sapiens genomic clone 2322D14, genomic survey sequence.//6.7e-51:269:97//AQ026941

[7054] F-HEMBA1005497//HS_{—}3097_A2_G05_T7 CIT Approved Human Genomic Sperm Library D Homo sapiens genomic clone Plate=3097 Col=10 Row=M, genomic survey sequence.//1.4e-66:345:96//AQ103810

[7055] F-HEMBA1005500//Homo sapiens PAC clone DJ1093017 from 7q11.23-q21, complete sequence.//5.4e-178:818:98//AC004957

[7056] F-HEMBA1005506//Mus musculus (clone OEBF17) early B-cell factor (EBF) mRNA, complete cds.//2.6e-06:73:98//L12147

[7057] F-HEMBA1005508//Homo sapiens, clone hRPK.1_A-1, complete sequence.//0.00012:455:60//AC006196

[7058] F-HEMBA1005511//Homo sapiens MHC class 1 region.//3.3e-43:421:77//AF055066

[7059] F-HEMBA1005513//Drosophila melanogaster males-absent on the first (mof) gene, complete cds.//2.3e-20:352:69//U71219

[7060] F-HEMBA1005517//Homo sapiens DNA for (CGG)n trinucleotide repeat region, isolate E7.//2.5e-08:431:62//AJ001216

[7061] F-HEMBA1005518//M. musculus mRNA for paladin gene.//8.2e-90:651:81//X99384

[7062] F-HEMBA1005520//Homo sapiens clone DJ0876A24, WORKING DRAFT SEQUENCE, 6 unordered pieces.//7.8e-167:755:99//AC004913

[7063] F-HEMBA1005526//Homo sapiens chromosome 9, clone hRPK.202_H_{—}3, complete sequence.//2.4e-42:475:73//AC006241

[7064] F-HEMBA1005528//Mus musculus mCAFI protein mRNA, complete cds.//1.2e-94:512:92//U21855

[7065] F-HEMBA1005530

[7066] F-HEMBA1005548//Human DNA sequence *** SEQUENCING IN PROGRESS *** from clone 970A17, WORKING DRAFT SEQUENCE.//9.4e-87:422:99//AL034431

[7067] F-HEMBA1005552//Homo sapiens PAC clone DJ0807C15 from 7q34-q36, complete sequence.//6.1e-41:486:68//AC004743

[7068] F-HEMBA1005558//Drosophila melanogaster DNA sequence (P 1 DS00837 (D87)), complete sequence.//2.9e-19:306:68//AC004377

[7069] F-HEMBA1005568//Plasmodium falciparum 3D7 chromosome 12 PFYAC812 genomic sequence, WORKING DRAFT SEQUENCE, 8 unordered pieces.//0.0093:345:60//AC004153

[7070] F-HEMBA1005570//Plasmodium falciparum chromosome 2, section 44 of 73 of the complete sequence.//4.2e-09:592:59//AE001407

[7071] F-HEMBA1005576//Homo sapiens mRNA for KIAA0463 protein, partial cds.//5.9e-127:610:98//AB007932

[7072] F-HEMBA1005577//HS-1004-A1-E 11-MR.abi CIT Human Genomic Sperm Library C Homo sapiens genomic clone Plate=CT 498 Col=21 Row=I, genomic survey sequence.//0.00034:254:64//B30971

[7073] F-HEMBA1005581//Rattus norvegicus mRNA for MEGF5, complete cds.//4.0e-57:826:65//AB011531

[7074] F-HEMBA1005582//HS_{—}3242_A1_B07_MR CIT Approved Human Genomic Sperm Library D Homo sapiens genomic clone Plate=3242 Col=13 Row=C, genomic survey sequence.//1.1e-13:91:981/AQ211275

[7075] F-HEMBA1005583

[7076] F-HEMBA1005588//Homo sapiens PAC clone DJI 188N21 from 7q11.23-q21.1, complete sequence.//8.7e-31:283:75//AC006025

[7077] F-HEMBA1005593//Homo sapiens chromosome 17, clone hRPK.332_H_{—}18, complete sequence.//8.3e-158:748:99//AC005746

[7078] F-HEMBA1005595//CIT-HSP-2309F14.TF CIT-HSP Homo sapiens genomic clone 2309F14, genomic survey sequence.//6.4e-30:194:91//AQ016527

[7079] F-HEMBA1005606//CIT-HSP-232616.TR CIT-HSP Homo sapiens genomic clone 232616, genomic survey sequence.//0.0014:132:70//AQ041484

[7080] F-HEMBA1005609//Homo sapiens clone RG315HI 1, WORKING DRAFT SEQUENCE, 5 unordered pieces.//2.9e-33:249:85//AC005089

[7081] F-HEMBA1005616//Homo sapiens DNA sequence from PAC 43C13 on chromosome Xq21.1-Xq21.3.rab proteins geranylgeranyltransferase component A1 (rab escort protein 1) (REP-1) (choroideraemia protein) (TCD protein).//6.5e-29:279:69//AL009175

[7082] F-HEMBA1005621//Human DNA sequence *** SEQUENCING IN PROGRESS *** from clone 330012, WORKING DRAFT SEQUENCE.//6.4e-90:158:87//AL031731

[7083] F-HEMBA1005627//RPCII 1-34P9.TJ RPCI-11 Homo sapiens genomic clone RPCI-11-34P9, genomic survey sequence.//0.014:168:67//AQ045110

[7084] F-HEMBA1005631//Homo sapiens PAC clone DJ1086D14, complete sequence.//1.0e-149:736:93//AC004460

[7085] F-HEMBA1005632

[7086] F-HEMBA1005634//Human DNA sequence from PAC 187N21 on chromosome 6p21.2-6p21.33. Contains ESTs.//6.6e-38:452:67//Z98036

[7087] F-HEMBA1005666

[7088] F-HEMBA1005670//Homo sapiens PAC clone DJ0665C04 from 7 p14-p13, complete sequence.//5.1e-59:687:74//AC004850

[7089] F-HEMBA1005679//Homo sapiens clone DJ0425102, WORKING DRAFT SEQUENCE, 5 unordered pieces.//1.0e-47:357:85//AC005478

[7090] F-HEMBA1005680

[7091] F-HEMBA1005685//RPCI11-23D19.TKBR RPCI-11 Homo sapiens genomic clone RPCI-11-23D19, genomic survey sequence.//0.99:228:63//AQ013742

[7092] F-HEMBA1005699//Human ligand for eph-related receptor tyrosine kinases (EPLG8) mRNA, complete cds.//1.4e-72:406:92//U57001

[7093] F-HEMBA1005705//Human (D21S172) DNA segment containing (CA) repeat.//0.00040:190:66//X56513

[7094] F-HEMBA1005717//Plasmodium falciparum MAL3P1, complete sequence.//0.0099:260:63//Z97348

[7095] F-HEMBA1005732//Human mRNA for KIAA0003 gene, complete cds.//8.1e-19:151:88//D14697

[7096] F-HEMBA1005737//Homo sapiens PAC clone DJ1099CI9 from 7q21-q22, complete sequence.//5.6e-15:157:79//AC005156

[7097] F-HEMBA1005746//RPCI11-63N8.TK RPCII 1 Homo sapiens genomic clone R-63N8, genomic survey sequence.//1.3e-118:113:100//AQ238535

[7098] F-HEMBA1005755//Homo sapiens DNA sequence from PAC 95C20 on chromosome Xp11.3-11.4. Contains STSs and the DXS7 locus with GT and GTG repeat polymorphisms, complete sequence.//3.6e-56:764:70//Z97181

[7099] F-HEMBA1005765//Human DNA sequence from PAC 288L1 on chromosome 22q12-qter contains ESTs and polymorphic CA repeat (D22S1152).//1.1e-30:275:77//Z82196

[7100] F-HEMBA1005780//RPCII 1-74E19.TJ RPCII 1 Homo sapiens genomic clone R-74E19, genomic survey sequence.//0.0011:283:62//AQ268432

[7101] F-HEMBA1005813//Homo sapiens PAC clone DJ0167F23 from 7 p15, complete sequence.//0.14:326:61//AC004079

[7102] F-HEMBA1005815//M. musculus mRNA for skeletal muscle-specific calpain.//6.3e-10:706:59//X92523

[7103] F-HEMBA1005822//Mouse Bac 291G16, WORKING DRAFT SEQUENCE, 19 unordered pieces.//0.87:417:56//AC003020

[7104] F-HEMBA1005829//Homo sapiens Chromosome 22q11.2 Fosmid Clone f39e1 In DGCR Region, complete sequence.//8.8e-42:370:79//AC000094

[7105] F-HEMBA1005834//Human DNA sequence from clone 353H6 on chromosome Xq25-26.2. Contains the alternatively spliced SMARCA1 gene for SWI/SNF related, matrix associated, actin dependent regulator of chromatin, subfamily a, member 1 (SNF2L1) and a 40S Ribosomal Protein S26 pseudogene. Contains ESTs, STSs and GSSs, complete sequence.//2.1e-42:690:67//AL022577

[7106] F-HEMBA1005852//F. rubripes GSS sequence, clone 163A22aE9, genomic survey sequence.//4.3e-07:253:59//AL018749

[7107] F-HEMBA1005853//CIT-HSP-2289L23.TR CIT-HSP Homo sapiens genomic clone 2289L23, genomic survey sequence.//2.2e-68:333:99//B98952

[7108] F-HEMBA1005884//Homo sapiens chromosome 5, BAC clone 78c6 (LBNL HI 91), complete sequence.//1.9e-57:331:87//AC005351

[7109] F-HEMBA1005891//Homo sapiens PAC clone DJ0997N05 from 7q11.23-q21.1, complete sequence.//5.1e-182:864:98//AC004945

[7110] F-HEMBA1005894//Homo sapiens, WORKING DRAFT SEQUENCE, 52 unordered pieces.//3.0e-44:340:80//AC004086

[7111] F-HEMBA1005909//Homo sapiens DNA sequence from PAC 127D3 on chromosome 1q23-25. Contains FMO2 and FMO3 genes for Flavin-containing Monooxygenase 2 and Flavin-containing Monooxygenase 3 (Dimethylaniline Monooxygenase (N-Oxide 3, EC1.14.13.8, Dimethylaniline Oxidase 3, FMO 11, FMO 3), and a gene for another, unknown, Flavin-containing Monooxygenase family protein. Contains ESTs and GSSs, complete sequence.//8.3e-12:828:57//AL021026

[7112] F-HEMBA1005910//Human DNA sequence from clone 1158E12 on chromosome Xp 1.23-11.4 Contains EST, STS, GSS, CpG island, complete sequence.//1.0e-44:328:77//AL031584

[7113] F-HEMBA1005921//Homo sapiens chromosome 17, clone hRPK.112_H_{—}10, complete sequence.//1.3e-41:431:77//AC005666

[7114] F-HEMBA1005931//Homo sapiens chromosome 12p13.3 clone RPCI4-761J14, WORKING DRAFT SEQUENCE, 60 unordered pieces.//1.1e-29:394:70//AC006086

[7115] F-HEMBA1005934//Homo sapiens PAC clone DJ1140G11 from 14q24.3, complete sequence.//8.1e-06:115:80//AC004974

[7116] F-HEMBA1005962//RPCI 11-17015.TV RPCI-11 Homo sapiens genomic clone RPCI-11-17015, genomic survey sequence.//9.5e-36:315:84//B82821

[7117] F-HEMBA1005963//HS_{—}3055_A1_E08_MR CIT Approved Human Genomic Sperm Library D Homo sapiens genomic clone Plate=3055 Col=15 Row=I, genomic survey sequence.//9.3e-73:372:9711AQ147357

[7118] F-HEMBA1005990//Homo sapiens I-1 receptor candidate protein mRNA, complete cds.//1.3e-149:697:99//AF082516

[7119] F-HEMBA1005991//Plasmodium falciparum chromosome 2, section 45 of 73 of the complete sequence.//6.3e-07:423:60//AE001408

[7120] F-HEMBA1005999//Homo sapiens chromosome 4 clone C0026P05 map 4P16, complete sequence.//3.8e-09:360:64//AC005599

[7121] F-HEMBA1006002

[7122] F-HEMBA1006005//Homo sapiens MLL (MLL) gene, exons 1-3, and partial cds.//4.5e-83:495:90//AF036405

[7123] F-HEMBA1006031

[7124] F-HEMBA1006035

[7125] F-HEMBA1006036//Human (lambda) DNA for immunogloblin light chain.//2.4e-59:652:74//D87009

[7126] F-HEMBA1006042//Homo sapiens chromosome 10 clone CIT987SK-1057L21 map 10q25, complete sequence.//2.1e-43:330:70//AC005386

[7127] F-HEMBA1006067//Plasmodium falciparum 3D7 chromosome 12 PFYAC812 genomic sequence, WORKING DRAFT SEQUENCE, 8 unordered pieces.//0.11:433:59//AC004153

[7128] F-HEMBA1006081

[7129] F-HEMBA1006090//, complete sequence.//4.5e-139:748:92//AC005500

[7130] F-HEMBA1006091//Homo sapiens gene encoding telethonin, exons 1 to 2, partial.//0.0091:346:62//AJ011098

[7131] F-HEMBA1006100//Homo sapiens chromosome 10 clone CIT987SK-1143A11 map 10q25, complete sequence.//2.8e-18:180:78//AC005880

[7132] F-HEMBA1006108//Human DNA sequence from clone 889N15 on chromosome Xq22.1-22.3. Contains part of the gene for a novel protein similar to X. laevis Cortical Thymocyte Marker CTX, the possibly alternatively spliced gene for 26S Proteasome subunit p28 (Ankyrin repeat protein), a novel gene and exons 36 through 45 of the COL4A6 for Collagen Alpha 6(IV). Contains ESTs, STSs, GSSs and a putative CpG island, complete sequence.//0.26:84:71//AL031177

[7133] F-HEMBA1006121//Human DNA sequence *** SEQUENCING IN PROGRESS *** from clone 691N24, WORKING DRAFT SEQUENCE.//5.2e-18:147:87//AL031672

[7134] F-HEMBA1006124//CIT-HSP-2355B17.TF CIT-HSP Homo sapiens genomic clone 2355B17, genomic survey sequence.//0.044:225:61//AQ058966

[7135] F-HEMBA1006130//CIT-HSP-386A20.TF CIT-HSP Homo sapiens genomic clone 386A20, genomic survey sequence.//8.8e-07:173:69//B55085

[7136] F-HEMBA1006138//Homo sapiens DNA sequence from PAC 454M7 on chromosome Xq25-26.3. Contains the OCRLI gene for Lowe Oculocerebrorenal Syndrome protein OCRL-1. Contains ESTs, STSs and GSSs, complete sequence.//7.5e-22:164:75//AL022162

[7137] F-HEMBA1006142//, complete sequence.//7.9e-125:586:99//AC005500

[7138] F-HEMBA1006155//H. sapiens CpG island DNA genomic Mse1 fragment, clone 119b6, forward read cpg119b6.ft1a.//1.0:85:72//Z64428

[7139] F-HEMBA1006158//Homo sapiens transcription factor forkhead-like 7 (FKHL7) gene, complete cds.//1.1e-185:852:99//AF048693

[7140] F-HEMBA1006173//striatum enriched phosphatase=protein-tyrosin, e-phosphatase [rat, striata, mRNA, 2815 nt].//8.4e-50:642:73//S49400

[7141] F-HEMBA1006182//Homo sapiens Chromosome 15q26.1 PAC clone pDJ105 j19, complete sequence.//1.4e-22:194:74//AC005318

[7142] F-HEMBA1006198

[7143] F-HEMBA1006235//Homo sapiens clone 24422 mRNA sequence.//2.6e-175:836:98//AF070557

[7144] F-HEMBA1006248//Pinctada fucata mRNA for insoluble protein, complete cds.//8.2e-05:359:61//D86074

[7145] F-HEMBA1006252//Human DNA sequence *** SEQUENCING IN PROGRESS *** from clone 531H 16, WORKING DRAFT SEQUENCE.//0.98:397:58//AL031664

[7146] F-HEMBA1006253

[7147] F-HEMBA1006259//HS_{—}2231_A1_D10_MF CIT Approved Human Genomic Sperm Library D Homo sapiens genomic clone Plate=2231 Col=19 Row=G, genomic survey sequence.//1.2e-11:233:68//AQ152722

[7148] F-HEMBA1006268//Homo sapiens Xp22-132-134 BAC GSHB-590J15 (Genome Systems Human BAC library) complete sequence.//5.2e-27:156:85//AC004673

[7149] F-HEMBA1006272//Human endogenous retrovirus gag mRNA.//8.1e-115:847:80//X72791

[7150] F-HEMBA1006278//Mus musculus poly(A) polymerase VI mRNA, complete cds.//2.1e-57:665:70//U58134

[7151] F-HEMBA1006283

[7152] F-HEMBA1006284//Streptomyces fradiae tylactone synthase, starter module and modules 1-7, (tylG) gene, complete cds.//9.6e-06:623:60//U78289

[7153] F-HEMBA1006291//HS_{—}2208_A1_C03_MR CIT Approved Human Genomic Sperm Library D Homo sapiens genomic clone Plate=2208 Col=5 Row=E, genomic survey sequence.//1.2e-13:105:9211AQ091804

[7154] F-HEMBA1006293//Sequence 8 from patent U.S. Pat. No. 5,721,351.//5H.6e-77:580:75//189415

[7155] F-HEMBA1006309//Caenorhabditis elegans cosmid F01F1.//1.1e-21:420:63//U13070

[7156] F-HEMBA1006310//Rattus norvegicus cytosolic sorting protein PACS-la (PACS-1) mRNA, complete cds.//6.8e-120:748:85//AF076183

[7157] F-HEMBA1006328//Homo sapiens fragile X mental retardation protein (FMR-1) gene (6 alternative splices), complete cds.//1.5e-46:485:73//L29074

[7158] F-HEMBA1006334//HS-1051-B2-F01-MR.abi CIT Human Genomic Sperm Library C Homo sapiens genomic clone Plate=CT 773 Col=2 Row=L, genomic survey sequence.//0.0032:61:91//B40563

[7159] F-HEMBA1006344//HS-1009-A2-B02-MF.abi CIT Human Genomic Sperm Library C Homo sapiens genomic clone Plate=CT 331 Col=4 Row=C, genomic survey sequence.//3.3e-09:218:66//B31420

[7160] F-HEMBA1006347//Drosophila melanogaster males-absent on the first (mof) gene, complete cds.//1.6e-31:484:68//U71219

[7161] F-HEMBA1006349//HS-1054-A1-G06-MR.abi CIT Human Genomic Sperm Library C Homo sapiens genomic clone Plate=CT 776 Col=11 Row=M, genomic survey sequence.//5.4e-15:95:100//B41671

[7162] F-HEMBA1006359//Human ZNF43 mRNA.//1.4e-115:823:81//X59244

[7163] F-HEMBA1006364//Mouse mRNA for transforming growth factor-beta2.//2.7e-10:247:71//X57413

[7164] F-HEMBA1006377//Mus musculus chromosome 7, clone 19K5, complete sequence.//3.0e-57:401:81//AC002327

[7165] F-HEMBA1006380//CIT-HSP-2172K18.TF CIT-HSP Homo sapiens genomic clone 2172K18, genomic survey sequence.//1.3e-110:525:99//B92570

[7166] F-HEMBA1006381//HS-1045-B2-F10-MF.abi CIT Human Genomic Sperm Library C Homo sapiens genomic clone Plate=CT 828 Col=20 Row=L, genomic survey sequence.//4.4e-05:163:70//B37813

[7167] F-HEMBA1006398//Homo sapiens 12q24.2 BAC RPC111-360E111 (Roswell Park Cancer Institute Human BAC Library) complete sequence.//3.8e-62:370:86//AC004806

[7168] F-HEMBA1006416//Homo sapiens chromosome 5, P1 clone 1041F10 (LBNL H88), complete sequence.//3.7e-15:157:78//AC005179

[7169] F-HEMBA1006419//Human DNA sequence from clone 71 L16 on chromosome Xp11. Contains a probable Zinc Finger protein (pseudo)gene, an unknown putative gene, a pseudogene with high similarity to part of antigen KI-67, a putative Chondroitin 6-Sulfotransferase LIKE gene and a KIAA0267 LIKE putative Na(+)/H(+) exchanger protein gene. Contains a predicted CpG island, ESTs, STSs and GSSs and genomic markers DXS1003 and DXS1055, complete sequence.//1.2e-39:752:63//AL022165

[7170] F-HEMBA1006421//Homo sapiens chromosome 14q24.3 clone BAC270M14 transforming growth factor-beta 3 (TGF-beta 3) gene, complete cds; and unknown genes.//2.4e-41:438:76//AF107885

[7171] F-HEMBA1006424//Human DNA sequence from clone 51J12 on chromosome 6q26-27. Contains the 3′ part of the alternatively spliced gene for the human orthologs of mouse QKI-7 and QKI-7B (KH Domain RNA Binding proteins) and zebrafish ZKQ-1 (Quaking protein homolog). Contains ESTs, STSs and GSSs, complete sequence.//0.027:293:64//AL031781

[7172] F-HEMBA1006426//Human DNA sequence *** SEQUENCING IN PROGRESS * from clone 292E10, WORKING DRAFT SEQUENCE.//1.7e-50:310:80//Z93930

[7173] F-HEMBA1006438//Liverwort Marchantia polymorpha chloroplast genome DNA.//0.051:440:59//X04465

[7174] F-HEMBA1006445//Felis catus ras p21 (H-ras) mRNA, partial cds.//1.0:238:59//U62088

[7175] F-HEMBA1006446//Plasmodium falciparum DNA *** SEQUENCING IN PROGRESS * from MAL1P6, WORKING DRAFT SEQUENCE.//2.4e-05:702:58//AL031749

[7176] F-HEMBA1006461//Homo sapiens chromosome 19, cosmid R30676, complete sequence.//8.6e-55:409:83//AC004560

[7177] F-HEMBA1006467//Homo sapiens chromosome 17, clone hRPK.346_K_{—}10, complete sequence.//1.0:293:59//AC006120

[7178] F-HEMBA1006471//Plasmodium falciparum 3D7 chromosome 12 PFYAC1122 genomic sequence, WORKING DRAFT SEQUENCE, 3 unordered pieces.//1.4e-05:731:59//AC004709

[7179] F-HEMBA1006474//CIT-HSP-2017H3.TF CIT-HSP Homo sapiens genomic clone 2017H3, genomic survey sequence.//5.2e-60:435:83//B54247

[7180] F-HEMBA1006483//Homo sapiens chromosome 5, BAC clone 8e5 (LBNL H167), complete sequence.//2.9e-48:286:84//AC004752

[7181] F-HEMBA1006485//Homo sapiens BAC clone NH0044G14 from 7q11.23-21.1, complete sequence.//0.96:283:59//AC006031

[7182] F-HEMBA1006486//Human DNA sequence from clone 353H6 on chromosome Xq25-26.2. Contains the alternatively spliced SMARCAI gene for SW1/SNF related, matrix associated, actin dependent regulator of chromatin, subfamily a, member I (SNF2L 1) and a 40S Ribosomal Protein S26 pseudogene. Contains ESTs, STSs and GSSs, complete sequence.//1.8e-14:259:67//AL022577

[7183] F-HEMBA1006489//Human DNA sequence *** SEQUENCING IN PROGRESS *** from clone 467K16, WORKING DRAFT SEQUENCE.//6.6e-11:595:61//AL031283

[7184] F-HEMBA1006492//Homo sapiens chromosome 17, clone hRPK.269_G_{—}24, complete sequence.//6.0e-122:337:100//AC005828

[7185] F-HEMBA1006494//Homo sapiens chromosome 7qtelo BAC E3, complete sequence.//3.8e-23:459:68//AF093117

[7186] F-HEMBA1006497//HS_{—}3023_B2_H03_T7 CIT Approved Human Genomic Sperm Library D Homo sapiens genomic clone Plate=3023 Col=6 Row=P, genomic survey sequence.//2.3e-81:433:95//AQ093846

[7187] F-HEMBA1006502//H. sapiens 7SL repeat (clones 2-19b).//1.6e-13:86:87//X62364

[7188] F-HEMBA1006507//Homo sapiens mRNA for KIAA0666 protein, partial cds.//2.3e-139:470:98//AB014566

[7189] F-HEMBA1006521//Human BAC clone RG167B05 from 7q21, complete sequence.//4.3e-27:406:71//AC003991

[7190] F-HEMBA1006530//Human DNA sequence *** SEQUENCING IN PROGRESS *** from clone 1018D 12, WORKING DRAFT SEQUENCE.//2.9e-27:408:65//AL031650

[7191] F-HEMBA1006535//Plasmodium falciparum DNA *** SEQUENCING IN PROGRESS ** from MAL4P1, WORKING DRAFT SEQUENCE.//0.028:599:60//AL034557

[7192] F-HEMBA1006540//Homo sapiens multi PDZ domain protein MUPPI (MUPPI) mRNA, complete cds.//1.4e-171:654:98//AF093419

[7193] F-HEMBA1006546//Human DNA sequence from cosmid 232L22, between markers DXS366 and DXS87 on chromosome X contains ESTs glycerol kinase pseudogene.//3.8e-104:811:80//Z73986

[7194] F-HEMBA1006559//Mus musculus PRAJA1 (Praja1) mRNA, complete cds.//4.8e-99:386:82//U06944

[7195] F-HEMBA1006562//Human fructose-1,6-biphosphatase (FBP1) gene, exon 1.//0.012:322:60//U21925

[7196] F-HEMBA1006566//Plasmodium falciparum 3D7 chromosome 12 PFYAC1383 genomic sequence, WORKING DRAFT SEQUENCE, 3 unordered pieces.//0.0026:580:58//AC005504

[7197] F-HEMBA1006569//Ovis aries beta actin mRNA, complete cds.//6.3e-08:231:70//U39357

[7198] F-HEMBA1006579//CIT-HSP-2380A22.TR CIT-HSP Homo sapiens genomic clone 2380A22, genomic survey sequence.//0.036:250:62//AQ197107

[7199] F-HEMBA1006583//Mycobacterium tuberculosis H37Rv complete genome; segment 143/162.//1.0:225:63//AL021841

[7200] F-HEMBA1006595//Human DNA sequence *** SEQUENCING IN PROGRESS *** from clone 30A23, WORKING DRAFT SEQUENCE.//3.6e-50:689:69//AL022156

[7201] F-HEMBA1006597//Homo sapiens Chromosome 7 BAC Clone 239c10, WORKING DRAFT SEQUENCE, 9 unordered pieces.//1.9e-42:253:84//AC004166

[7202] F-HEMBA1006612//RPCI11-88F20.TJ RPCI11 Homo sapiens genomic clone R-88F20, genomic survey sequence.//1.1e-51:266:98//AQ286726

[7203] F-HEMBA1006617//HS_{—}2193_B2_H07_MF CIT Approved Human Genomic Sperm Library D Homo sapiens genomic clone Plate=2193 Col=14 Row=P, genomic survey sequence.//1.1e-59:413:85//AQ299685

[7204] F-HEMBA1006624//Human DNA sequence from clone 406A7 on chromosome 6q23-24. Contains three pseudogenes similar to Elongation Factor 1-Alpha (EF-1-ALPHA, Statin S1), 60S Acidic Ribosomal Protein P1 and NADH-Ubiquinone Oxidoreductase 15 kDa subunit, and part of the Microtuble Associated Protein E-MAP-115 gene. Contains ESTs, STSs and GSSs, complete sequence.//1.4e-35:257:89//AL023284

[7205] F-HEMBA100663//Homo sapiens Chromosome 11q23 PAC clone pDJ356d6, complete sequence.//9.6e-112:800:83//AC002036

[7206] F-HEMBA1006635//Plasmodium falciparum DNA *** SEQUENCING IN PROGRESS * from MAL1P2, WORKING DRAFT SEQUENCE.//0.15:393:58//AL031745

[7207] F-HEMBA1006639//Petromyzon marinus polyadenylate binding protein (PABP) mRNA, complete cds.//9.6e-15:318:68//AF032896

[7208] F-HEMBA1006643//Homo sapiens clone DJ0902E20, WORKING DRAFT SEQUENCE, 1 unordered pieces.//0.58:254:65//AC006148

[7209] F-HEMBA1006648//Mus musculus integrin binding protein kinase mRNA, complete cds.//1.5e-37:108:88//U94479

[7210] F-HEMBA1006652//Homo sapiens chromosome 5, BAC clone 343g16 (LBNL HI 80), complete sequence.//1.3e-154:671:96//AC005601

[7211] F-HEMBA1006653

[7212] F-HEMBA1006659//Homo sapiens PAC clone DJO90SJO8 from 7 p12-p14, complete sequence.//5.2e-110:254:93//AC005189

[7213] F-HEMBA1006665//Homo sapiens Xp22 BAC GSHB-590J6 (Genome Systems Human BAC library) complete sequence.//1.4e-14:177:76//AC004554

[7214] F-HEMBA1006674//Homo sapiens mRNA for nucleolar protein hNopS6.//5.5e-15:122:90//Y12065

[7215] F-HEMBA1006676//Homo sapiens chromosome 19, fosmid 37502, complete sequence.//0.098:218:63//AC004755

[7216] F-HEMBA1006682//Human DNA sequence *** SEQUENCING IN PROGRESS *** from clone 668J24, WORKING DRAFT SEQUENCE.//1.4e-05:719:57//AL034346

[7217] F-HEMBA1006695//Homo sapiens clone DJ0935K16, complete sequence.//3.1e-22:151:78//AC006011

[7218] F-HEMBA1006696//CITBI-E1-2522D16.TF CITB1-E1 Homo sapiens genomic clone 2522D16, genomic survey sequence.//5.6e-17:324:66//AQ280738

[7219] F-HEMBA1006708

[7220] F-HEMBA1006709

[7221] F-HEMBA1006717//Homo sapiens clone GS308H05, WORKING DRAFT SEQUENCE, 6 unordered pieces.//3.3e-08:136:79//AC005537

[7222] F-HEMBA1006737//Homo sapiens chromosome 17, clone hRPK.269_G_{—}24, complete sequence.//5.8e-162:497:98//AC005828

[7223] F-HEMBA1006744//Homo sapiens Chromosome 11p14.3 PAC clone pDJ1034g4, complete sequence.//7.4e-48:320:87//AC004796

[7224] F-HEMBA1006754//Human DNA sequence from PAC 82J11 and cosmid U 134E6 on chromosome Xq22. Contains NIK like and Thyroxin-binding globulin precursor (T4-binding globulin, TBG) genes, ESTs and STSs.//4.1e-129:804:85//Z83850

[7225] F-HEMBA1006758//Homo sapiens chromosome 5, BAC clone 182a8 (LBNL H161), complete sequence.//2.2e-162:766:99//AC005752

[7226] F-HEMBA1006767//Human Xq28 cosmid U247A3 from LLOXNCO1 X chromosome library, complete sequence.//1.2e- 19:326:69//U73465

[7227] F-HEMBA1006779//Human DNA sequence from clone 80119 on chromosome 6p21.31-22.2 Contains genes and pseudogenes for olfactory receptor-like proteins, STS, GSS, complete sequence.//1.4e-103:355:87//AL022727

[7228] F-HEMBA1006780//CIT-HSP-2359P7.TR CIT-HSP Homo sapiens genomic clone 2359P7, genomic survey sequence.//0.072:147:68//AQ077208

[7229] F-HEMBA1006789//nbxb0037113r CUGI Rice BAC Library Oryza sativa genomic clone nbxb0037113r, genomic survey sequence.//0.00011:288:63//AQ290474

[7230] F-HEMBA1006795//CIT-HSP-2307E3.TF CIT-HSP Homo sapiens genomic clone 2307E3, genomic survey sequence.//5.1e-80:420:96//AQ020511

[7231] F-HEMBA1006796//Human clone 23803 mRNA, partial cds.//4.5e-06:202:68//U79298

[7232] F-HEMBA1006807//Homo sapiens mRNA for SPOP.//1.2e-66:651:73//AJ000644

[7233] F-HEMBA1006821//Homo sapiens chromosome 17, clone hRPC.62_{—}0_{—}9, complete sequence.//6.0e-116:541:99//AC004797

[7234] F-HEMBA1006824//Homo sapiens chromosome 19, cosmid R29368, complete sequence.//0.40:159:66//AC004262

[7235] F-HEMBA1006832//Homo sapiens (subclone 3_g8 from P1H25) DNA sequence, complete sequence.//1.8e-24:323:71//AC002196

[7236] F-HEMBA1006849//Homo sapiens genomic DNA of 9q32 anti-oncogene of flat epitherium cancer, segment 4/10.//0.15:403:60//AB020872

[7237] F-HEMBA1006865//Plasmodium falciparum chromosome 2, section 6 of 73 of the complete sequence.//0.20:472:57//AE001369

[7238] F-HEMBA1006877//Mus musculus clone OST9241, genomic survey sequence.//3.4e-79:641:76//AF046757

[7239] F-HEMBA1006885//HS_{—}2208_B2_G06_MR CIT Approved Human Genomic Sperm Library D Homo sapiens genomic clone Plate=2208 Col=12 Row=N, genomic survey sequence.//4.9e-18:206:76//AQ089246

[7240] F-HEMBA1006900//Human DNA sequence from clone 496N17 on chromosome 6 p11.2-12.3 Contains EST, GSS, complete sequence.//5.4e-07:298:65//AL031321

[7241] F-HEMBA1006914//S. pombe chromosome II cosmid c16H5.//0.00040:194:66//AL022104

[7242] F-HEMBA1006921//Homo sapiens BAC clone GSI 14109 from 7 p14-p15, complete sequence.//1.1e-174:813:99//AC006027

[7243] F-HEMBA1006926//Caenorhabditis elegans cosmid ZK185.//0.0075:183:65//AF036704

[7244] F-HEMBA1006929//P. falciparum complete gene map of plastid-like DNA (IR-A).//4.0e-06:739:57//X95275

[7245] F-HEMBA1006936

[7246] F-HEMBA1006938//Plasmodium falciparum DNA *** SEQUENCING IN PROGRESS * from MAL1P4, WORKING DRAFT SEQUENCE.//1.1e-05:733:57//AL031747

[7247] F-HEMBA1006941//Homo sapiens mRNA for putative thioredoxin-like protein.//1.3e-90:437:98//AJ010841

[7248] F-HEMBA1006949//Human DNA sequence from PAC 363L9 on chromosome X. contains STS and polymorphic CA repeat.//0.67:217:62//Z82205

[7249] F-HEMBA1006973//Homo sapiens rab3-GAP regulatory domain mRNA, complete cds.//5.6e-143:740:94//AF004828

[7250] F-HEMBA1006976//cDNA encoding alpha 2 to 3 sialyltransferase.//2.8e-101:338:89//E06058

[7251] F-HEMBA1006993//Homo sapiens BAC clone BK085E05 from 22q12.1-qter, complete sequence.//7.1e-31:536:66//AC003071

[7252] F-HEMBA1006996//Human DNA sequence from clone J428A131, WORKING DRAFT SEQUENCE.//9.5e-07:285:60//Z82209

[7253] F-HEMBA1007002//Genomic sequence for Arabidopsis thaliana BAC F20N2, complete sequence.//0.99:388:58//AC002328

[7254] F-HEMBA1007017//Sequence 3 from patent WO9416067.//0.96:220:62//A39358

[7255] F-HEMBA1007018//G. gallus mRNA for dynein light chain-A.//1.3e-124:838:83//X79088

[7256] F-HEMBA1007045

[7257] F-HEMBA1007051//Caenorhabditis elegans cosmid Y57G11C, complete sequence.//0.17:343:60//Z99281

[7258] F-HEMBA1007052//Homo sapiens FSHD-associated repeat DNA, proximal region.//4.3e-67:659:74//U85056

[7259] F-HEMBA1007062//Tubulin gene.//1H.0:113:67//A18572

[7260] F-HEMBA1007066//HS_{—}3116_A2_A03_T7 CIT Approved Human Genomic Sperm Library D Homo sapiens genomic clone Plate=3116 Col=6 Row=A, genomic survey sequence.//0.80:214:62//AQ140467

[7261] F-HEMBA1007073//Homo sapiens 12q13 PAC RPCII-316M24 (Roswell Park Cancer Institute Human PAC library) complete sequence.//9.3e-54:519:68//AC004242

[7262] F-HEMBA1007078//CIT-HSP-2318N6.TF CIT-HSP Homo sapiens genomic clone 2318N6, genomic survey sequence.//8.7e-80:387:98//AQ044076

[7263] F-HEMBA1007080

[7264] F-HEMBA1007085//Streptomyces coelicolor cosmid 7A I.//3.5e-06:496:59//AL034447

[7265] F-HEMBA1007087//Plasmodium falciparum MAL3P6, complete sequence.//7.4e-07:553:56//Z98551

[7266] F-HEMBA1007112//HS_{—}2171_A1_B00_T7 CIT Approved Human Genomic Sperm Library D Homo sapiens genomic clone Plate=2171 Col=1 Row=C, genomic survey sequence.//1.0:172:61//AQ091865

[7267] F-HEMBA1007113//Human DNA sequence from clone 1044017 on chromosome Xp11.3-11.4 Contains GSS and STS, complete sequence.//0.54:502:56//AL023875

[7268] F-HEMBA1007121//Caenorhabditis elegans cosmid ZK430.//1.4e-08:265:64//U42833

[7269] F-HEMBA1007129//CITBI-E1-2504A5.TF CITBI-E1 Homo sapiens genomic clone 2504A5, genomic survey sequence.//0.97:267:62//AQ264035

[7270] F-HEMBA1007147//HS_{—}3208_A2_C04_T7 CIT Approved Human Genomic Sperm Library D Homo sapiens genomic clone Plate=3208 Col=8 Row=E, genomic survey sequence.//9.1e-90:466:95//AQ176696

[7271] F-HEMBA1007149//Homo sapiens chromosome 19, cosmid F23149, complete sequence.//6.0e-138:524:98//AC005239

[7272] F-HEMBA1007151//CITBI-E1-2522H6.TF CITBI-E1 Homo sapiens genomic clone 2522H6, genomic survey sequence.//2.0e-20:157:87//AQ280780

[7273] F-HEMBA1007174//Homo sapiens epsin 2a mRNA, complete cds.//2.0e-62:318:97//AF062085

[7274] F-HEMBA1007178//Homo sapiens chromosome 12p13.3 clone RPCI11-372B4, WORKING DRAFT SEQUENCE, 129 ordered pieces.//1.6e-21:205:80//AC005911

[7275] F-HEMBA1007194//HS_{—}3124_B2_H08_MR CIT Approved Human Genomic Sperm Library D Homo sapiens genomic clone Plate=3124 Col=16 Row=P, genomic survey sequence.//1.3e-11:87:96//AQ187492

[7276] F-HEMBA1007203//Homo sapiens mRNA for KIAA0214 protein, complete cds.//1.7e-156:478:98//D86987

[7277] F-HEMBA1007206//Homo sapiens chromosome 17, clone HRPC837J 1, complete sequence.//0.024:342:63//AC004223

[7278] F-HEMBA1007224//Homo sapiens mRNA for KIAA0797 protein, partial cds.//5.0e-176:839:98//AB018340

[7279] F-HEMBA1007243//Chinese hamster hprt mRNA, complete cds.//4.3e-58:687:68//J00060

[7280] F-HEMBA1007251//Rabbit troponin T messenger fragment (aa 49 to 129).//0.084:177:62//V00899

[7281] F-HEMBA1007256//Human DNA sequence *** SEQUENCING IN PROGRESS *** from clone 328E19, WORKING DRAFT SEQUENCE.//1.3e-75:490:88//AL022240

[7282] F-HEMBA1007267//HS_{—}3218_A1_F07_MR CIT Approved Human Genomic Sperm Library D Homo sapiens genomic clone Plate=3218 Col=13 Row=K, genomic survey sequence.//2.9e-62:393:8711AQ181128

[7283] F-HEMBA1007273//CIT-HSP-2171B10.TF CIT-HSP Homo sapiens genomic clone 2171B10, genomic survey sequence.//1.1e-63:314:99//B95401

[7284] F-HEMBA1007279//Homo sapiens Chromosome 16 BAC clone CIT987SK-A-116A10, complete sequence.//3.1e-31:401:72//AC004638

[7285] F-HEMBA1007281//HS_{—}3115_A1_A11_T7 CIT Approved Human Genomic Sperm Library D Homo sapiens genomic clone Plate=3115 Col=21 Row=A, genomic survey sequence.//5.0e-70:372:96//AQ186691

[7286] F-HEMBA1007288//Human DNA sequence from clone 422G23 on chromosome 6q24 Contains EST, STS, GSS, CpG island, complete sequence.//1.2e-152:727:98//AL031003

[7287] F-HEMBA1007300//Canis familiaris PDE5 mRNA for 3′,5′-Cyclic GMP Phosphodiesterase, complete cds.//2.1e-21:542:63//AB008467

[7288] F-HEMBA1007301//COL1A1=type I collagen pro alpha 1(I) chain propeptide {3′ region} [human, fetal cells 86-237, 86-146, 88-251, mRNA Partial Mutant, 855 nt].//1.7e-08:388:61//S64596

[7289] F-HEMBA1007319//Genomic sequence from Mouse 9, complete sequence.//6.0e-84:390:75//AC000399

[7290] F-HEMBA1007320

[7291] F-HEMBA1007322//Homo sapiens BAC clone RG118E13 from 7 p15-p21, complete sequence.//0.091:260:64//AC004485

[7292] F-HEMBA1007327//Plasmodium falciparum 3D7 chromosome 12 PFYACB8-420 genomic sequence, WORKING DRAFT SEQUENCE, 14 unordered pieces.//0.12:472:59//AC005140

[7293] F-HEMBA1007341//Homo sapiens chromosome 17, clone hRPK.346_K_{—}10, complete sequence.//1.5e-18:408:64//AC006120

[7294] F-HEMBA1007342//Homo sapiens clone DJ 1136G02, WORKING DRAFT SEQUENCE, 4 unordered pieces.//8.7e-25:500:62//AC005377

[7295] F-HEMBA1007347//Homo sapiens chromosome 5, BAC clone 7g12 (LBNL H126), complete sequence.//0.75:269:61//AC005738

[7296] F-HEMBB1000005//Homo sapiens chromosome Y, clone 264, M, 20, complete sequence.//5.0e-05:441:60//AC004617

[7297] F-HEMBB1000008//Homo sapiens BAC clone RG 139P 11 from 7q11-q21, complete sequence.//1.0e-44:417:77//AC004491

[7298] F-HEMBB1000018//HS_{—}2179_B2_E04_MF CIT Approved Human Genomic Sperm Library D Homo sapiens genomic clone Plate=2179 Col=8 Row=J, genomic survey sequence.//0.012:87:77//AQ023250

[7299] F-HEMBB1000024//Human DNA sequence from PAC 106120 on chromosome 22q12-qter contains NADH pseudogene, ESTs, STS.//8.1e-11:461:61//Z81369

[7300] F-HEMBB1000025//CIT-HSP-2348F3.TR CIT-HSP Homo sapiens genomic clone 2348F3, genomic survey sequence.//0.96:198:62//AQ062938

[7301] F-HEMBB1000030//Homo sapiens DNA sequence from PAC 32F7 on chromosome X. Contains NUCLEOSOME ASSEMBLY PROTEIN 1-LIKE 3, ESTs.//0.00049:276:64//AL009173

[7302] F-HEMBB1000036//H. sapiens chromosome 22 CpG island DNA genomic Mse1 fragment, clone 302e2, reverse read 302e2.//0.0057:66:81//Z79857

[7303] F-HEMBB1000037//Homo sapiens erythroblast macrophage protein EMP mRNA, complete cds.//1.9e-100:450:98//AF084928

[7304] F-HEMBB1000039//HS_{—}2167_B1_F12_T7 CIT Approved Human Genomic Sperm Library D Homo sapiens genomic clone Plate=2167 Col=23 Row=L, genomic survey sequence.//0.022:108:69//AQ092404

[7305] F-HEMBB1000044//Borrelia burgdorferi (section 50 of 70) of the complete genome.//1.0e-07:486:61//AE001164

[7306] F-HEMBB1000048//Plasmodium falciparum 3D7 chromosome 12 PFYACB8-628 genomic sequence, WORKING DRAFT SEQUENCE, 9 unordered pieces.//5.3e-05:585:58//AC005507

[7307] F-HEMBB1000050//Homo sapiens DNA sequence from clone 501N12 on chromosome 6p22.1-22.3 Contains a gene almost identical to four genes of unknown function, a pseudogene, three (pseudo?) genes similar to genes of unknown function, an unknown gene similar to a rat EST, a PX19 LIKE pseudogene and another unknown gene. Contains ESTs, STSs and GSSs, complete sequence.//5.8e-38:549:67//AL022170

[7308] F-HEMBB1000054//Homo sapiens Xp22 PAC RPCI1-167A22 (from Roswell Park Cancer Center) complete sequence.//7.0e-98:328:83//AC002349

[7309] F-HEMBB1000055//Homo sapiens genomic DNA for centromeric end of MHC class I region on chromosome 6, cosmid clone: TY2F10, WORKING DRAFT SEQUENCE.//3.7e-05:600:58//AB000880

[7310] F-HEMBB1000059//Homo sapiens clone RG339C12, WORKING DRAFT SEQUENCE, 10 unordered pieces.//1.3e-48:472:78//AC005096

[7311] F-HEMBB1000083

[7312] F-HEMBB1000089//Plasmodium falciparum DNA * SEQUENCING IN PROGRESS * from MAL1P1, WORKING DRAFT SEQUENCE.//0.0036:679:56//AL031744

[7313] F-HEMBB1000099//Homo sapiens chromosome 18 BAC RPCI11-128D14 (Roswell Park Cancer Institute Human BAC Library) complete sequence//1.1e-15:312:68//AC005909

[7314] F-HEMBB1000103//Homo sapiens Xp22-150 BAC GSHB-309P15 (Genome Systems Human BAC Library) complete sequence.//1.0e-37:316:74//AC006210

[7315] F-HEMBB1000113//Homo sapiens chromosome 21q22.3 cosmid Q11M15, complete sequence.//3.1e-25:259:76//AF045450

[7316] F-HEMBB1000119//Homo sapiens ASMTL gene.//1.2e-137:654:98//Y15521

[7317] F-HEMBB1000136//Mycobacterium tuberculosis H37Rv complete genome; segment 127/162.//0.59:217:66//Z74697

[7318] F-HEMBB1000141//Homo sapiens DNA from choromosome 19q13.1 cosmid f14121 containing ATP4A and GADPH-2 genes, genomic sequence.//8.4e-31:113:88//AD000090

[7319] F-HEMBB1000144//Human BAC clone RG 114A06 from 7q31, complete sequence.//4.4e-58:339:87//AC002542

[7320] F-HEMBB1000173//Homo sapiens 12q24 BAC RPCI11-162P23 (Roswell Park Cancer Institute Human BAC library) complete sequence.//9.4e-160:562:93//AC002996

[7321] F-HEMBB1000175

[7322] F-HEMBB1000198//HS_{—}3071_A2_A10_MF CIT Approved Human Genomic Sperm Library D Homo sapiens genomic clone Plate=3071 Col=20 Row=A, genomic survey sequence.//0.99:261:61//AQ1137388

[7323] F-HEMBB1000215//Homo sapiens chromosome 17, clone hRPK.48 I_C_{—}4, complete sequence.//6.7e-17:138:86//AC005839

[7324] F-HEMBB1000217//Arabidopsis thaliana ubiquitin activating enzyme (UBA1) gene, complete cds.//0.00083:287:60//U80808

[7325] F-HEMBB1000218//Caenorhabditis elegans cosmid C52A 11, complete sequence.//0.90:337:56//Z46792

[7326] F-HEMBB1000226//Human DNA sequence from cosmid RJ 14 from a contig from the tip of the short arm of chromosome 16, spanning 2 Mb of 16 p13.3. Contains ESTs and CpG island.//1.7e-90:175:92//Z69890

[7327] F-HEMBB1000240//Human G-protein-coupled inwardly rectifying potassium channel (KCNJ3) gene, polymorphic repeat sequence.//0.16:171:62//U07918

[7328] F-HEMBB1000244//Homo sapiens clone DJ1129E22, WORKING DRAFT SEQUENCE, 7 unordered pieces.//4.8e-08:355:63//AC005522

[7329] F-HEMBB1000250//Homo sapiens protein associated with Myc mRNA, complete cds.//6.6e-155:735:98//AF075587

[7330] F-HEMBB1000258//Human adenosine monophosphate deaminase 1 (AMPD1) gene, exons 1-16.//0.58:396:59//M98818

[7331] F-HEMBB1000264//Human clone C3 CHL1 protein (CHLR1) mRNA, alternatively spliced, complete cds.//4.4e-32:100:100//U75968

[7332] F-HEMBB1000266//Homo sapiens Xp22 BAC GSHB-433024 (Genome Systems Human BAC library) complete sequence.//3.8e-16:176:78//AC004470

[7333] F-HEMBB1000272//Plasmodium falciparum chromosome 2, section 6 of 73 of the complete sequence.//0.011:379:58//AE001369

[7334] F-HEMBB1000274//Arabidopsis thaliana DNA chromosome 4, BAC clone T5KI8 (ESSAII project).//0.92:272:61//AL022580

[7335] F-HEMBB1000284//Human Xp22 BAC CT-285115 (from CalTech/Research Genetics), PAC RPCII -27C22 (from Roswell Park Cancer Center), and Cosmid U35B5 (from Lawrence Livermore), complete sequence.//0.00071:568:57//AC002366

[7336] F-HEMBB1000307//Human DNA sequence from PAC 29K1 on chromosome 6p21.3-22.2. Contains glutathione peroxidase-like; zinc finger, ESTs, mRNA, STS, tRNAs, olfactory receptor pseudogene.//3.0e-13:439:65//Z98745

[7337] F-HEMBB1000312//Homo sapiens clone GS051M12, complete sequence.//0.031:252:65//AC005007

[7338] F-HEMBB1000317//Fugu rubripes GSS sequence, clone 060J22aE 10, genomic survey sequence.//0.00033:173:65//AL026242

[7339] F-HEMBB1000318//HSS_{—}3244_B2_HI10_T7 CIT Approved Human Genomic Sperm Library D Homo sapiens genomic clone Plate=3244 Col=20 Row=P, genomic survey sequence.//3.9e-85:438:95//AQ252951

[7340] F-HEMBB1000335//Homo sapiens chromosome 18, clone hRPK.24_A_{—}23, complete sequence.//0.63:285:61//AC005968

[7341] F-HEMBB1000336

[7342] F-HEMBB1000337//Homo sapiens chromosome 4 clone B208G5 map 4q25, complete sequence.//0.0014:309:64//AC004051

[7343] F-HEMBB1000338//HS_{—}3108_A2_F07_T7 CIT Approved Human Genomic Sperm Library D Homo sapiens genomic clone Plate=3108 Col=14 Row=K, genomic survey sequence.//3.8e-09:331:63//AQ140356

[7344] F-HEMBB1000339//Homo sapiens 12q24 PAC RPCI 1-46F2 (Roswell Park Cancer Institute Human PAC library) complete sequence.//1.2e-52:295:77//AC002351

[7345] F-HEMBB1000341

[7346] F-HEMBB1000343//Plasmodium falciparum MAL3P3, complete sequence.//0.00081:397:61//Z98547

[7347] F-HEMBB1000354//Human DNA sequence from clone 192P9 on chromosome Xp11.23-11.4. Contains a pseudogene similar to rat Plasmolipin, ESTs and GSSs, complete sequence.//9.1e-34:596:66//AL020989

[7348] F-HEMBB1000369//Genomic sequence from Human 17, complete sequence.//0.012:298:60//AC002090

[7349] F-HEMBB1000374//Human Xp22 contig of 3 PACS (R7-39D12, R7-134G1, R7-185L21) from the Roswell Park Cancer Institute, complete sequence.//9.3e-69:294:89//U96409

[7350] F-HEMBB1000376//Human DNA sequence from clone 751H9 on chromosome 6q13. Contains part of an unknown gene, ESTs, STSs and GSSs, complete sequence.//3.5e-54:352:88//AL034377

[7351] F-HEMBB1000391//Trichothecium roseum internal transcribed spacer 1, 5.8S ribosomal RNA gene; and internal transcribed spacer 2, complete sequence.//0.011:168:67//U51982

[7352] F-HEMBB1000399//Homo sapiens Rad17-like protein (RAD17) mRNA, complete cds.//2.6e-163:762:981/AF076838

[7353] F-HEMBB1000402//Homo sapiens Xq28 BAC PAC and cosmid clones containing FMR2 gene exons 1,2, and 3, complete sequence.//7.7e-15:466:63//AC002368

[7354] F-HEMBB1000404//Homo sapiens mRNA for myosin-IXA.//3.5e-65:324:98//AJ001714

[7355] F-HEMBB1000420//244 Kb Contig from Human Chromsome 11p15.5 spanning D11S1 through D11S25, complete sequence.//0.013:399:62//AC001228

[7356] F-HEMBB1000434//Homo sapiens PAC clone 278C 19 from 12q, complete sequence.//6.1e-83:571:84//AC004263

[7357] F-HEMBB1000438//RPCI11-21E14.TP RPCI-11 Homo sapiens genomic clone RPCI-11-21E14, genomic survey sequence.//0.0030:295:63//B83110

[7358] F-HEMBB1000441//Homo sapiens Chromosome 22q12 Cosmid Clone 1147g11, complete sequence.//2.5e-33:372:72//AC000035

[7359] F-HEMBB1000449//Human DNA sequence from PAC 296K21 on chromosome X contains cytokeratin exon, delta-aminolevulinate synthase (erythroid); 5-aminolevulinic acid synthase.(EC 2.3.1.37). 6-phosphofructo-2-kinase/fructose-2,6-bisphosphatase (EC 2.7.1.105, EC 3.1.3.46), ESTs and STS.//1.3e-51:534:72//Z83821

[7360] F-HEMBB1000455//Saccharomyces cerevisiae mitochondrion origin of replication (ori6) and oli1 gene, complete cds.//0.016:522:58//L36899

[7361] F-HEMBB1000472

[7362] F-HEMBB1000480

[7363] F-HEMBB1000487//Human DNA sequence *** SEQUENCING IN PROGRESS *** from clone 12803, WORKING DRAFT SEQUENCE.//0.00013:314:64//Z98742

[7364] F-HEMBB1000490//Human DNA sequence *** SEQUENCING IN PROGRESS * from clone 1185N5, WORKING DRAFT SEQUENCE.//4.1e-110:529:98//AL034423

[7365] F-HEMBB1000491//Plasmodium falciparum chromosome 2, section 25 of 73 of the complete sequence.//0.10:187:65//AE001388

[7366] F-HEMBB1000493//Human DNA sequence from clone 353H6 on chromosome Xq25-26.2. Contains the alternatively spliced SMARCA1 gene for SW1/SNF related, matrix associated, actin dependent regulator of chromatin, subfamily a, member 1 (SNF2L1) and a 40S Ribosomal Protein S26 pseudogene. Contains ESTs, STSs and GSSs, complete sequence.//3.7e-06:637:58//AL022577

[7367] F-HEMBB1000510//Homo sapiens chromosome 17, clone hRPK.112_J_{—}9, complete sequence.//3.1e-96:737:81//AC005553

[7368] F-HEMBB1000518//Homo Sapiens Chromosome X clone bWXD171, WORKING DRAFT SEQUENCE, 1 ordered pieces.//0.00014:163:68//AC004676

[7369] F-HEMBB1000523//Plasmodium falciparum DNA *** SEQUENCING IN PROGRESS *** from contig 3-105, complete sequence.//0.41:349:56//AL010212

[7370] F-HEMBB1000530//H. sapiens mRNA for extracellular matrix protein collagen type XIV, C-terminus.//6.6e-37:138:96//Y11710

[7371] F-HEMBB1000550//Homo sapiens genomic DNA of 8p21.3-p22 anti-oncogene of hepatocellular colorectal and non-small cell lung cancer, segment 3/11 ./3.9e-56:683:71//AB020860

[7372] F-HEMBB1000554//Homo sapiens *** SEQUENCING IN PROGRESS ***, WORKING DRAFT SEQUENCE.//2.2e-51:282:84//AJ011929

[7373] F-HEMBB1000556//Homo sapiens mRNA for KIAA0750 protein, complete cds.//6.1e-32:537:65//AB018293

[7374] F-HEMBB1000564

[7375] F-HEMBB1000573//Homo sapiens clone RG228D17, WORKING DRAFT SEQUENCE, 2 unordered pieces.//8.2e-33:268:73//AC005077

[7376] F-HEMBB1000575//Human DNA sequence from clone 323M22 on chromosome 22q13.1-13.2. Contains the 5′ part of the human ortholog of chicken P52 and mouse H74, and a novel gene coding for a protein similar to KIAA0173 and worm Tubulin Tyrosine Ligase. Contains ESTS, STSs, GSSs, genomic marker D22S418 and putative CpG islands, complete sequence.//5.8e-47:734:66//AL022476

[7377] F-HEMBB1000586//H. sapiens highly polymorphic microsatellite DNA.//0.030:147:67//X79883

[7378] F-HEMBB1000589//Homo sapiens Chromosome 16 BAC clone CIT987SK-A-279B10, complete sequence.//6.3e-41:278:83//AC002300

[7379] F-HEMBB1005911//Homo sapiens Xp22 bins 45-47 BAC GSHB-665N22 (Genome Systems Human BAC Library) complete sequence.//1.1e-182:871:98//AC005184

[7380] F-HEMBB1000592//Hepatitis C virus genomic RNA, 3′ nonstranslated region, partial sequence. clone #19.//0.012:185:64//AF009074

[7381] F-HEMBB1000593//Homo sapiens chromosome 7q22 sequence, complete sequence.//1.2e-131:353:93//AF053356

[7382] F-HEMBB1000598//Homo sapiens 12 p13.3 BAC RPCI3-488H23 (Roswell Park Cancer Institute Human BAC Library) complete sequence.//9.1e-58:600:72//AC006207

[7383] F-HEMBB1000623//cDNA encoding Coliolus manganese peroxidase.//0.89:284:62//E12284

[7384] F-HEMBB1000630//Mus musculus clone NSAT47 nonsatellite RNA sequence.//1.9e-15:129:87//U26231

[7385] F-HEMBB1000631//Sequence 26 from patent U.S. Pat. No. 5,708,157.//3.2e-27:180:88//180057

[7386] F-HEMBB1000632//Human mRNA for KIAA0351 gene, complete cds.//1.6e-48:811:65//AB002349

[7387] F-HEMBB1000637//Homo sapiens clone DJ0425102, WORKING DRAFT SEQUENCE, 5 unordered pieces.//4.1e-58:649:73//AC005478

[7388] F-HEMBB1000638//HS_{—}3051_A1_G00_MF CIT Approved Human Genomic Sperm Library D Homo sapiens genomic clone Plate=3051 Col=1 Row=M, genomic survey sequence.//0.0032:497:56//AQ155234

[7389] F-HEMBB1000643//Homo sapiens clone RG228D17, WORKING DRAFT SEQUENCE, 2 unordered pieces.//2.4e-50:791:68//AC005077

[7390] F-HEMBB1000649//Homo sapiens Chromosome 16 BAC clone CIT987-SK502C 10, complete sequence.//5.2e-64:775:69//AC003009

[7391] F-HEMBB1000652//Homo sapiens chromosome 10 clone CR1-JC2048 map 10q22.1, WORKING DRAFT SEQUENCE, 4 unordered pieces.//2.7e-52:334:89//AC006186

[7392] F-HEMBB1000665//Human DNA sequence from clone 452M 16 on chromosome Xq21.1-21.33 Contains capping protein alpha subunit isoform I pseudogene, STS, GSS, and CA repeat, complete sequence.//0.0062:426:60//AL024493

[7393] F-HEMBB1000671//Human DNA sequence from PAC 93H 18 on chromosome 6 contains ESTs heterochromatin protein HPIHs-gamma pseudogene, STS and CpG island.//9.6e-95:399:7811Z84488

[7394] F-HEMBB1000673//HS_{—}3039_A2_C08_MF CIT Approved Human Genomic Sperm Library D Homo sapiens genomic clone Plate=3039 Col=16 Row=E, genomic survey sequence.//3.8e-50:293:92//AQ155121

[7395] F-HEMBB1000684//Human DNA sequence *** SEQUENCING IN PROGRESS * from clone 222E 13, WORKING DRAFT SEQUENCE.//8.0e-65:282:83//Z93 241

[7396] F-HEMBB1000693//Homo sapiens neuroanl mRNA, complete cds.//1.6e-118:575:97//AF040723

[7397] F-HEMBB1000705//Plasmodium falciparum 3D7 chromosome 12 PFYACB8-628 genomic sequence, WORKING DRAFT SEQUENCE, 9 unordered pieces.//8.6e-07:251:61//AC005507

[7398] F-HEMBB1000706//Human DNA sequence *** SEQUENCING IN PROGRESS * from clone 153G14, WORKING DRAFT SEQUENCE.//2.9e-20:434:64//AL031118

[7399] F-HEMBB1000709//Human DNA sequence *** SEQUENCING IN PROGRESS * from clone 994L9, WORKING DRAFT SEQUENCE.//0.26:184:65//AL034554

[7400] F-HEMBB1000725//Rattus norvegicus GTPase Rab8b (Rab8b) mRNA, complete cds.//1.8e-129:692:93//U53475

[7401] F-HEMBB1000726//Human Chromosome 16 BAC clone CIT987SK-A-363E6, complete sequence.//2.7e-40:304:80//U91321

[7402] F-HEMBB1000738//Human Xq28 cosmids U126G1, U142F2, U69B6, U145C10, U169A5, U84H1, U24D12, U80A7, U153E6, L35485, and R7-163A8 containing iduronate 2-sulfatase gene and pseudogene, complete sequence.//8.9e-35:582:63//AF011889

[7403] F-HEMBB1000749//Homo sapiens chromosome II clone CIT-HSP-1337H24, WORKING DRAFT SEQUENCE, 9 unordered pieces.//6.2e-46:262:89//AC005849

[7404] F-HEMBB1000763//Human DNA sequence *** SEQUENCING IN PROGRESS *** from clone 537K23, WORKING DRAFT SEQUENCE.//1.6e-99:316:98//AL034405

[7405] F-HEMBB1000770//Human DNA sequence from clone 80119 on chromosome 6p21.31-22.2 Contains genes and pseudogenes for olfactory receptor-like proteins, STS, GSS, complete sequence.//0.044:325:60//AL022727

[7406] F-HEMBB1000774

[7407] F-HEMBB1000781//Sequence 3 from patent U.S. Pat. No. 5,753,446.//1.2e-92:599:86//AR008277

[7408] F-HEMBB1000789//Homo sapiens mRNA for KIAA0677 protein, complete cds.//9.3e-64:672:71//AB014577

[7409] F-HEMBB1000790//Homo sapiens 12q13.1 PAC RPCII-228P16 (Roswell Park Cancer Institute Human PAC Library) complete sequence.//2.4e-41:460:74//AC004801

[7410] F-HEMBB1000794//HS_{—}3034_B2_D12_MF CIT Approved Human Genomic Sperm Library D Homo sapiens genomic clone Plate=3034 Col=24 Row=H, genomic survey sequence.//1.8e-74:378:97//AQ117099

[7411] F-HEMBB1000807//H. sapiens CpG island DNA genomic Mse1 fragment, clone 39d7, reverse read cpg39d7.rt1a.//8.5e-14:95:97//Z58412

[7412] F-HEMBB1000810//H. sapiens chromosome 22 CpG island DNA genomic Mse1 fragment, clone 303a8, complete read.//3.2e-05:138:71//Z79983

[7413] F-HEMBB1000821//HS_{—}2168_B1_A12_MF CIT Approved Human Genomic Sperm Library D Homo sapiens genomic clone Plate=2168 Col=23 Row=B, genomic survey sequence.//0.85:208:60//AQ086361

[7414] F-HEMBB1000822//Human BAC clone GSI113H23 from 5 p15.2, complete sequence.//3.0e-06:361:60//AC003015

[7415] F-HEMBB1000826//Human BAC clone RG180F08 from 7q31, complete sequence.//1.1e-27:360:69//AC002431

[7416] F-HEMBB1000827

[7417] F-HEMBB1000831

[7418] F-HEMBB1000835//Human DNA sequence from clone 4514 on chromosome 6q24.1-24.3. Contains two putative unknown genes, ESTs, STSs and GSSs, complete sequence.//0.00098:234:63//AL023581

[7419] F-HEMBB1000840//Human Chromosome 11 Cosmid cSRL97a6, complete sequence.//4.5e-61:328:79//U73649

[7420] F-HEMBB1000848//Homo sapiens DNA sequence from PAC 206D 15 on chromosome 1q24. Contains a Reduced Folate Carrier protein (RFC) LIKE gene, a mitochondrial ATP Synthetase protein 8 (ATP8, MTATP8) LIKE pseudogene, an unknown gene and the last exon of the JEMI gene coding for the Basic-Leucine Zipper nuclear factor JEM-1. Contains ESTs, an STS and a BAC end sequence (GSS), complete sequence.//9.7e-144:809:87//AL021068

[7421] F-HEMBB1000852//Plasmodium falciparum 3D7 chromosome 12 PFYAC293 genomic sequence, WORKING DRAFT SEQUENCE, 9 unordered pieces.//0.12:492:58//AC004157

[7422] F-HEMBB1000870//Plasmodium falciparum 3D7 chromosome 12 PFYAC293 genomic sequence, WORKING DRAFT SEQUENCE, 9 unordered pieces.//0.0024:212:67//AC004157

[7423] F-HEMBB1000876//Homo sapiens ELISC-1 mRNA, partial cds.//1.5e-32:200:94//AF085351

[7424] F-HEMBB1000883//HS_{—}3065_B2_C04_MR CIT Approved Human Genomic Sperm Library D Homo sapiens genomic clone Plate=3065 Col=8 Row=F, genomic survey sequence.//0.0017:152:66//AQ137687

[7425] F-HEMBB1000887

[7426] F-HEMBB1000888//CIT-HSP-2329A10.TR CIT-HSP Homo sapiens genomic clone 2329A10, genomic survey sequence.//1.5e-31:172:98//AQ044369

[7427] F-HEMBB1000890

[7428] F-HEMBB1000893//Plasmodium falciparum MAL3P2, complete sequence.//9.5e-06:768:56//AL034558

[7429] F-HEMBB1000908//Homo sapiens clone DJ 1119N05, complete sequence.//4.5e-21:199:82//AC004968

[7430] F-HEMBB1000910//Plasmodium falciparum DNA *** SEQUENCING IN PROGRESS * from MAL4P 1, WORKING DRAFT SEQUENCE.//0.72:366:59//AL034557

[7431] F-HEMBB1000913//HS_{—}3078_B1_C02_MR CIT Approved Human Genomic Sperm Library D Homo sapiens genomic clone Plate=3078 Col=3 Row=F, genomic survey sequence.//9;9e-12:221:63//AQ144507

[7432] F-HEMBB1000915//Homo sapiens DNA for (CGG)n trinucleotide repeat region, isolate P4.//1.2e-49:252:99//AJ001215

[7433] F-HEMBB1000917//Homo sapiens chromosome 5, P1 clone 254fl I (LBNL H62), complete sequence.//2.3e-42:316:76//AC006077

[7434] F-HEMBB1000927//Human BDR-2 mRNA for hippocalcin, complete cds.//3.6e-30:528:65//D16593

[7435] F-HEMBB1000947//CpGO856B Cp10WAgDNA1 Cryptosporidium parvum genomic, genomic survey sequence.//0.81:262:6211AQ254493

[7436] F-HEMBB1000959//Human DNA sequence *** SEQUENCING IN PROGRESS *** from clone 34606, WORKING DRAFT SEQUENCE.//1.2e-43:454:75//Z84487

[7437] F-HEMBB1000973//Mus musculus schlafen2 (Slfin2) mRNA, complete cds.//8.3e-42:458:72//AF099973

[7438] F-HEMBB1000975//Arabidopsis thaliana genomic DNA, chromosome 5, P1 clone: MBK5, complete sequence.//0.98:196:63//AB005234

[7439] F-HEMBB1000981

[7440] F-HEMBB1000985//Homo sapiens chromosome 19, cosmid R29388, complete sequence.//2.9e-06:566:57//AC004476

[7441] F-HEMBB1000991//Human DNA sequence from PAC 238J17 on chromosome 6q22. Contains EST and STS.//0.099:391:57//Z98753

[7442] F-HEMBB1000996//Human DNA sequence from BAC 999D10 on chromosome 22q13.3. Contains two BAC end-sequences (GSSs).//6.2e-33:227:8011Z94802

[7443] F-HEMBB1001004

[7444] F-HEMBB1001008//Human Chromosome 16 BAC clone CIT987SK-A-951C11, complete sequence.//4.0e-13:164:79//AC002551

[7445] F-HEMBB1100111//Human Chromosome 16 BAC clone CIT987SK-A-635H12, complete sequence.//7.5e-13:229:69//AC002310

[7446] F-HEMBB101014//Homo sapiens chromosome 16, BAC clone 375G12 (LANL), complete sequence.//0.32:474:58//AC005751

[7447] F-HEMBB1001020//Homo sapiens BAC clone 255A7 from 8q21 containing NBS1 gene, complete sequence.//2.6e-39:218:80//AF069291

[7448] F-HEMBB1001024//Homo sapiens BAC clone 393122 from 8q21, complete sequence.//5.3e-05:656:59//AF070717

[7449] F-HEMBB1001037//CIT-HSP-2358K16.TF CIT-HSP Homo sapiens genomic clone 2358K16, genomic survey sequence.//6.6e-05:228:64//AQ080539

[7450] F-HEMBB1001047//Homo sapiens cosmids Qc14E2, Qc12H12, Qc11F9, Qc10G9, LA1733 and Qc17B8 from Xq28, complete sequence.//4.0e-27:385:71//U82671

[7451] F-HEMBB1001051//H. sapiens mRNA for FAN protein.//1.2e-27:160:98//X96586

[7452] F-HEMBB1001056//Homo sapiens clone DJ0953A04, WORKING DRAFT SEQUENCE, 5 unordered pieces.//2.3e-89:180:91//AC006014

[7453] F-HEMBB1001058//Homo sapiens 3p22-8 PAC RPCI4-736H12 (Roswell Park Cancer Institute Human PAC Library) complete sequence.//1.2e-41:468:74//AC006060

[7454] F-HEMBB1001060//Human Tigger I transposable element, complete consensus sequence.//4.3e-122:785:86//U49973

[7455] F-HEMBB1001063//Human DNA sequence *** SEQUENCING IN PROGRESS *** from clone 523G 1, WORKING DRAFT SEQUENCE.//7.1e-162:770:99//AL034375

[7456] F-HEMBB1001068//Homo sapiens liprin-beta2 mRNA, partial cds.//3.1e-146:736:95//AF034803

[7457] F-HEMBB1001096//Buchnera aphidicola genomic fragment containing (chaperone Hsp60) groEL, DNA biosynthesis initiating protein (dnaA), ATP operon (atpCDGAHFEB), and putative chromosome replication protein (gidA) genes, complete cds; and termination factor Rho (rho) gene, partial cds.//0.00088:690:57//AF008210

[7458] F-HEMBB1001102//Homo sapiens huntingtin interacting protein HYPH mRNA, partial cds.//2.1e-76:368:99//AF049612

[7459] F-HEMBB1001105//CIT-HSP-2185N1.TR CIT-HSP Homo sapiens genomic clone 2185N1, genomic survey sequence.//1.0e-09:136:76//AQ002987

[7460] F-HEMBB1001112//Rattus rattus sec61 homologue mRNA, complete cds.//1.0e-108:909:76//M96630

[7461] F-HEMBB1001114//Homo sapiens chromosome 17, clone hRPK.795_F_{—}17, complete sequence.//7.2e-07:459:59//AC005284

[7462] F-HEMBB1001117//HS_{—}2178_B1_E12_MR CIT Approved Human Genomic Sperm Library D Homo sapiens genomic clone Plate=2178 Col=23 Row=J, genomic survey sequence.//7.8e-50:331:86//AQ068244

[7463] F-HEMBB1001119//Human collagen type XII alpha-1 precursor (COL12A1) mRNA, complete cds.//1.6e-25:150:98//U73778

[7464] F-HEMBB1001126

[7465] F-HEMBB1001133//Homo sapiens Xp22-132-134 BAC GSHB-590J15 (Genome Systems Human BAC library) complete sequence.//2.8e-24:228:80//AC004673

[7466] F-HEMBB1001137

[7467] F-HEMBB1001142//Homo sapiens chromosome Y, clone 264, M, 20, complete sequence.//1.0e-40:231:76//AC004617

[7468] F-HEMBB1001151//Rattus norvegicus golgi peripheral membrane protein p65 (GRASP65) mRNA, complete cds.//2.9e-47:640:67//AF015264

[7469] F-HEMBB1001153//CIT-HSP-2359K11.TR CIT-HSP Homo sapiens genomic clone 2359K11, genomic survey sequence.//0.76:136:67//AQ075724

[7470] F-HEMBB1001169//Human DNA sequence from PAC 84F12 on chromosome Xq25-Xq26.3. Contains glypican-3 precursor (intestinal protein OCI-5) (GTR2-2), ESTs and CA repeat.//9.9e-63:259:79//AL008712

[7471] F-HEMBB1001175//Human mRNA for ankyrin motif, complete cds.//2.2e-34:509:66//D78334

[7472] F-HEMBB1001177//CIT-HSP-2321117.TR CIT-HSP Homo sapiens genomic clone 2321117, genomic survey sequence.//5.9e-27:320:75//AQ036473

[7473] F-HEMBB1001182//RPCII 1-30J5.TV RPCI-11 Homo sapiens genomic clone RPCI-11-30J5, genomic survey sequence.//5.7e-06:62:96//B85188

[7474] F-HEMBB1001199

[7475] F-HEMBB1001208//HS_{—}2026_B1_C07_T7 CIT Approved Human Genomic Sperm Library D Homo sapiens genomic clone Plate=2026 Col=13 Row=F, genomic survey sequence.//0.00018:134:70//AQ229237

[7476] F-HEMBB1001209//CITBI-E 1-2521 F23.TF CITBI-E1 Homo sapiens genomic clone 2521 F23, genomic survey sequence.//1.4e-95:464:98//AQ278357

[7477] F-HEMBB1001210//HS_{—}3102_A2_F09_MF CIT Approved Human Genomic Sperm Library D Homo sapiens genomic clone Plate=3102 Col=18 Row=K, genomic survey sequence.//2.6e-90:446:98//AQ119196

[7478] F-HEMBB1001218//Human DNA sequence *** SEQUENCING IN PROGRESS *** from clone 796F 18, WORKING DRAFT SEQUENCE.//1.0e-31:315:72//AL031291

[7479] F-HEMBB1001221//Plasmodium falciparum 3D7 chromosome 12 PFYAC1383 genomic sequence, WORKING DRAFT SEQUENCE, 3 unordered pieces.//9.7e-17:770:59//AC005504

[7480] F-HEMBB1001234//H. sapiens CpG island DNA genomic Mse1 fragment, clone 39f9, forward read cpg39f9.ft1e.//4.0e-30:171:97//Z65435

[7481] F-HEMBB1001242//Homo sapiens mRNA for LAK-1, complete cds.//3.8e-30:458:67//AB005754

[7482] F-HEMBB1001249//CIT-HSP-2375NI9.TF CIT-HSP Homo sapiens genomic clone 2375N19, genomic survey sequence.//0.0076:250:63//AQ109087

[7483] F-HEMBB1001253//Homo sapiens genomic DNA, chromosome 21q11.1, segment 3/28, WORKING DRAFT SEQUENCE.//0.0097:89:80//AP000032

[7484] F-HEMBB1001254//CIT-HSP-2320E5.TF CIT-HSP Homo sapiens genomic clone 2320E5, genomic survey sequence.//3.7e-54:284:97//AQ037173

[7485] F-HEMBB1100267//Homo sapiens chromosome 17, clone hRPK.488_L_l, complete sequence.//3.5e-30:236:78//AC005303

[7486] F-HEMBB1001271//HS_{—}3011_A1_G02_T7 CIT Approved Human Genomic Sperm Library D Homo sapiens genomic clone Plate=3011 Col=3 Row=M, genomic survey sequence.//5.2e-07:364:62//AQ214217

[7487] F-HEMBB1001282//CIT-HSP-2356J20.TF CIT-HSP Homo sapiens genomic clone 2356J20, genomic survey sequence.//1.8e-16:109:97//AQ060969

[7488] F-HEMBB1001288//R. norvegicus mRNA for gephyrin.//3.4e-18:194:77//X66366

[7489] F-HEMBB1001289//Genomic sequence from Human 9q34, complete sequence.//4.8e-66:434:74//AC000387

[7490] F-HEMBB1001294//HS_{—}3039_B1D01_MF CIT Approved Human Genomic Sperm Library D Homo sapiens genomic clone Plate=3039 Col=1 Row=H, genomic survey sequence.//2.0e-90:437:99//AQ155035

[7491] F-HEMBB1001302

[7492] F-HEMBB1001304//CIT-HSP-2053E15.TF CIT-HSP Homo sapiens genomic clone 2053E15, genomic survey sequence.//2.2e-07:370:61//B69144

[7493] F-HEMBB1001314//Mus musculus Olf- I /EBF-like-3 transcription factor (O/E-3) mRNA, complete cds.//5.7e-116:663:85//U92703

[7494] F-HEMBB1100315//Homo sapiens chromosome 10 clone LAIONCOI_{—}40_G_{—}3 map 10q26.1-110q26.2, WORKING DRAFT SEQUENCE, 1 ordered pieces.//2.5e-33:328:77//AC006096

[7495] F-HEMBB1100317//Homo sapiens Xp22-150 BAC GSHB-309P15 (Genome Systems Human BAC Library) complete sequence.//1.4e-122:680:91//AC006210

[7496] F-HEMBB1001326//Homo sapiens BAC clone RG136N17 from 7 p15-p21, complete sequence.//2.8e-09:518:60//AC004129

[7497] F-HEMBB1001331//Mus musculus mRNA for hepatoma-derived growth factor, complete cds, strain:BALB/c.//3.7e-56:458:79//D63850

[7498] F-HEMBB1001335//HS_{—}3055_A1_H10_MR CIT Approved Human Genomic Sperm Library D Homo sapiens genomic clone Plate=3055 Col=19 Row=O, genomic survey sequence.//1.0:222:63//AQ147384

[7499] F-HEMBB1001337//Human PAC clone DJ0093103 from Xq23, complete sequence.//1.0e-74:319:85//AC003983

[7500] F-HEMBB1001339//Homo sapiens FSHD-associated repeat DNA, proximal region.//4.0e-135:856:87//U85056

[7501] F-HEMBB1001346//Human familial Alzheimer's disease (STM2) gene, complete cds.//3.3e-44:481:74//U50871

[7502] F-HEMBB1100348//Homo sapiens BAC clone NH0491 B03 from 7p21-p 15, complete sequence.//1.8e-17:210:73//AC006041

[7503] F-HEMBB1001356//Homo sapiens clone RG252P22, WORKING DRAFT SEQUENCE, 3 unordered pieces.//1.0:386:59//AC005079

[7504] F-HEMBB1001364//Homo sapiens chromosome 17, clone hRPC.842_A_{—}23, complete sequence.//0.97:349:61//AC004662

[7505] F-HEMBB1001366//Homo sapiens chromosome 10 clone CIT987SK-118815 map 10p11.2-10 p12.1, complete sequence.//5.5e-161:766:98//AC005876

[7506] F-HEMBB1001367//Homo sapiens chromosome 17, clone hRPC.906_A_{—}24, complete sequence.//3.0e-55:510:76//AC004408

[7507] F-HEMBB1001369//Homo sapiens BAC clone RG163K11 from 7q31, complete sequence.//0.048:244:64//AC005192

[7508] F-HEMBB1001380//Homo sapiens PAC clone DJI 102B04 from 7q11.23-7q21, complete sequence.//2.5e-26:257:78//AC006204

[7509] F-HEMBB1001384//Mus musculus COP9 complex subunit 4 (COPS4) mRNA, complete cds.//5.1e-99:571:89//AF071314

[7510] F-HEMBB1001387//Leishmania tarentolae mitochondrial 12S ribosomal RNA gene.//7.1e-05:546:58//X02354

[7511] F-HEMBB1001394//Homo sapiens BAC clone GS421103 from Xq25-q26, complete sequence.//4.0e-129:788:88//AC005023

[7512] F-HEMBB1001410//Homo sapiens wbscrl (WBSCR1) and replication factor C subunit 2 (RFC2) genes, complete cds.//4.8e-11:632:59//AF045555

[7513] F-HEMBB1001424//Mus musculus Chromosome 4 BAC clone BacB6, complete sequence.//0.0012:435:59//AC003019

[7514] F-HEMBB1001426//Homo sapiens clone DJ0736H05, WORKING DRAFT SEQUENCE, 5 unordered pieces.//3.8e-17:360:64//AC005482

[7515] F-HEMBB1001429//leucine aminopeptidase [cattle, kidney, mRNA, 2056 nt].//4.1e-114:668:88//S65367

[7516] F-HEMBB1001436//Homo sapiens FUT2 gene, intron 1, complete sequence.//2.3e-37:438:74//AB000931

[7517] F-HEMBB1001443//Bos taurus pyruvate dehydrogenase phosphatase mRNA, complete cds.//9.1e-92:550:88//L18966

[7518] F-HEMBB1001449//Homo sapiens chromosome 5, PAC clone 228g9 (LBNL H 142), complete sequence.//0.00024:385:62//AC004768

[7519] F-HEMBB1001454//Homo sapiens chromosome 19, cosmid R34169, complete sequence.//0.84:577:57//AC005790

[7520] F-HEMBB1001458//Human Chromosome 11 pac pDJ197h17, WORKING DRAFT SEQUENCE, 11 unordered pieces.//8.0e-40:377:78//AC000382

[7521] F-HEMBB1001463//Human Chromosome 16 BAC clone CIT987SK-A-270G1, complete sequence.//0.011:482:59//AF001549

[7522] F-HEMBB1001464//Human chromosome 16 p13 BAC clone CIT987SK-3H8 complete sequence.//0.019:263:61//IU91320

[7523] F-HEMBB1001482//Rattus norvegicus Olf-1/EBF associated Zn finger protein Roaz mRNA, alternatively spliced form, complete cds.//1.0e-30:521:66//U92564

[7524] F-HEMBB1001500//Homo sapiens clone DJ0742P04, WORKING DRAFT SEQUENCE, 6 unordered pieces.//1.3e-31:479:71//AC004873

[7525] F-HEMBB1001521//Homo sapiens clone RG269P13, WORKING DRAFT SEQUENCE, 6 unordered pieces.//3.7e-51:680:70//AC005080

[7526] F-HEMBB1001527

[7527] F-HEMBB100153//Homo sapiens Chromosome 22q11.2 Cosmid Clone 89h In DGCR Region, complete sequence.//1.3e-79:696:79//AC000089

[7528] F-HEMBB1001535//O. aries DNA for polymorphic marker OVINRAO1′ (339 bp).//0.00034:217:62//X89268

[7529] F-HEMBB1001536//Homo sapiens PAC clone DJI 182N03 from 7q11.23-q21.1, complete sequence.//0.54:266:60//AC004548

[7530] F-HEMBB1001537//Homo sapiens chromosome 19, cosmid R29368, complete sequence.//4.6e-25:784:61//AC004262

[7531] F-HEMBB1001555//Homo sapiens Chromosome 16 BAC clone CIT987SK-A-248F7, complete sequence.//6.9e-50:213:80//AC004605

[7532] F-HEMBB1001562//Homo sapiens clone NH0523H02, complete sequence.//0.46:269:60//AC005041

[7533] F-HEMBB1001564//Human DNA sequence from clone 192P9 on chromosome Xp 11.23-11.4. Contains a pseudogene similar to rat Plasmolipin, ESTs and GSSs, complete sequence.//1.7e-107:620:83//AL020989

[7534] F-HEMBB1001565//Homo sapiens BAC clone RG437L15 from 8q21, complete sequence.//2.4e-50:734:67//AC004003

[7535] F-HEMBB1001585//Human DNA sequence from clone 790B6 on chromosome 20p11.22-12.2. Contains STSs and GSSs, complete sequence.//1.4e-166:816:97//AL031677

[7536] F-HEMBB1001586

[7537] F-HEMBB1001588//Homo sapiens chromosome 19, CIT-HSP-444n24, complete sequence.//1.6e-21:419:65//AC005261

[7538] F-HEMBB1001603

[7539] F-HEMBB1001618//Homo sapiens DNA sequence from PAC 142L7 on chromosome 6q21. Contains a Laminin Alpha 4 (LAMA4) LIKE gene coding for two alternatively spliced transcripts, a Tubulin Beta LIKE pseudogene, a Connective tissue growth factor (NOV, GIG) LIKE gene, A predicted CpG island, ESTs, STSs and genomic marker D6S416, complete sequence.//4.5e-29:422:72//Z99289

[7540] F-HEMBB1001619//HS_{—}3079 BI A04 MR CIT Approved Human Genomic Sperm Library D Homo sapiens genomic clone Plate=3079 Col=7 Row=B, genomic survey sequence.//0.0010:77:79//AQ123388

[7541] F-HEMBB1001630//Homo sapiens clone RG315Hl 1, WORKING DRAFT SEQUENCE, 5 unordered pieces.//3.2e-12:667:59//AC005089

[7542] F-HEMBB1001635//Plasmodium falciparum MAL3P7, complete sequence.//3.8e-05:475:57//AL034559

[7543] F-HEMBB1001637//Homo sapiens DNA sequence from PAC 934G17 on chromosome 1p36.21. Contains the alternatively spliced CLCN6 gene for chloride channel proteins CLC-6A (KIAA0046)-B, -C and -D, the alternatively spliced NPPA gene coding for Atrial Natriuretic Factor ANF precursor (Atrial Natriuretic peptide ANP, Prepronatriodilatin), the NPPB gene for Brain Natriuretic Protein BNP, and a pseudogene similar to SBF1 (and other Myotubularin-related protein genes). Contains ESTs, STSs and the genomic marker DI S2740, complete sequence.//9.2e-13:168:76//AL021155

[7544] F-HEMBB1001641//Arabidopsis thaliana genomic DNA, chromosome 5, P1 clone: MPO12, complete sequence.//0.00097:721:58//AB006702

[7545] F-HEMBB1001653//Homo sapiens chromosome 2 clone 101B6 map 2 p11, complete sequence.//0.15:276:63//AC002038

[7546] F-HEMBB1001665//Bovine herpesvirus type I early-intermediate transcription control protein (BICP4) gene, complete cds.//0.43:393:61//L14320

[7547] F-HEMBB1100668//F16C 15-T7 IGF Arabidopsis thaliana genomic clone F 16C15, genomic survey sequence.//0.040:275:60//B12308

[7548] F-HEMBB1001673//Homo sapiens mRNA for KIAA0646 protein, complete cds.//7.2e-171:803:98//AB014546

[7549] F-HEMBB1001684//Sequence 1 from patent U.S. Pat. No. 5,700,927.//7.5e-124:883:81//186429

[7550] F-HEMBB1001685//CIT-HSP-228709.TF CIT-HSP Homo sapiens genomic clone 228709, genomic survey sequence.//2.3e-34:191:97//B99261

[7551] F-HEMBB1001695//Human DNA sequence from clone 431 P23 on chromosome 6q27. Contains the first coding exon of the MLLT4 gene for myeloid/lymphoid or mixed-lineage leukemia (trithorax (Drosophila) homolog); translocated to, 4 (AF-6, Afadin, MLLT-4, ALL-1 fusion partner), and a Serine Palmitoyltransferase 2 (EC 2.3.1.50, Long Chain Base Biosynthesis protein 2, LCB-2, SPT-2) pseudogene. Contains ESTs, STss, GSSs, and a putative CpG island, complete sequence.//0.0091:334:63//AL009178

[7552] F-HEMBB1001704//Human DNA sequence from clone 931E15 on chromosome Xq25. Contains STSs, GSSs and genomic marker DXS8098, complete sequence.//1.2e-17:144:87//AL023575

[7553] F-HEMBB1001706

[7554] F-HEMBB1001707//Guinea pig CD19 mRNA, complete cds.//0.57:232:62//M62543

[7555] F-HEMBB1001717//Saccharomyces cerevisiae mitochondrial tRNA-Tyr, tRNA-Asn, &amp; tRNA-Met genes.//1.1e-13:723:5811AJ223323

[7556] F-HEMBB1001735//Human PAC clone DJ0596009 from 7 p15, complete sequence.//1.3e-36:427:73//AC003074

[7557] F-HEMBB1001736//S. pombe chromosome II cosmid c4B4.//0.0085:479:57//AL023706

[7558] F-HEMBB1100747//Homo sapiens PAC clone DJI002N02 from 7p21-p22, complete sequence.//4.0e-112:532:84//AC005376

[7559] F-HEMBB1001749//Homo sapiens chromosome 17, clone hRPK.259_G_{—}18, complete sequence.//1.3e-98:395:82//AC005829

[7560] F-HEMBB1001753//S. maximus repeat region, 342 bp.//4.2e-11:69:85//Z78099

[7561] F-HEMBB1001756//Homo sapiens full-length insert cDNA clone ZD86A11.//0.0015:302:62//AF088064

[7562] F-HEMBB1001760//P. falciparum complete gene map of plastid-like DNA (IR-A).//0.011:615:56//X95275

[7563] F-HEMBB1001762//CIT-HSP-2290J16.TF CIT-HSP Homo sapiens genomic clone 2290J16, genomic survey sequence.//0.84:208:64//AQ005184

[7564] F-HEMBB1001785//Plasmodium falciparum DNA *** SEQUENCING IN PROGRESS * from MAL1P3, WORKING DRAFT SEQUENCE.//0.0019:469:60//AL031746

[7565] F-HEMBB1001797//Human heterogenous nuclear RNA W16W.//0.00012:83:86//X17272

[7566] F-HEMBB1001802//Plasmodium falciparum MAL3P7, complete sequence.//1.8e-11:538:60//AL034559

[7567] F-HEMBB1001812//Human DNA sequence *** SEQUENCING IN PROGRESS * from clone 356B8, WORKING DRAFT SEQUENCE.//1.0e-56:304:84//Z98882

[7568] F-HEMBB1001816//Homo sapiens chromosome 19, cosmid F24083, complete sequence.//3.6e-75:300:87//AC005204

[7569] F-HEMBB1001831//Homo sapiens PAM COOH-terminal interactor protein I (PCIP1) mRNA, complete cds.//2.3e-162:763:98//AF056209

[7570] F-HEMBB1001834//CIT-HSP-2291012.TF CIT-HSP Homo sapiens genomic clone 2291012, genomic survey sequence.//7.6e-08:73:94//AQ004168

[7571] F-HEMBB1001836//Homo sapiens 12q13.1 PAC RPCII-228P16 (Roswell Park Cancer Institute Human PAC Library) complete sequence.//5.7e-30:297:79//AC004801

[7572] F-HEMBB1001839//Human Chromosome X, complete sequence.//0.016:293:63//AC004073

[7573] F-HEMBB1001850//Plasmodium falciparum 3D7 chromosome 12 PFYAC1383 genomic sequence, WORKING DRAFT SEQUENCE, 3 unordered pieces.//0.0027:812:58//AC005504

[7574] F-HEMBB1001863//Human Chromosome 15q26.1 PAC clone pDJ460g16, WORKING DRAFT SEQUENCE, 3 unordered pieces.//8.3e-43:520:72//AC004581

[7575] F-HEMBB1001867//Human proto-oncogene tyrosine-protein kinase (ABL) gene, exon I a and exons 2-10, complete cds.//1.7e-56:399:86//U07563

[7576] F-HEMBB1001868//Rattus norvegicus clone 923 polymeric immunoglobulin receptor mRNA 3′ untranslated region, GA rich region, and microsatellites with GGA-triplet and GAA-triplet repeats.//6.1e-08:234:67//U01145

[7577] F-HEMBB1001869//Homo sapiens full-length insert cDNA clone YT86F01.//7.4e-87:432:97//AF085974

[7578] F-HEMBB1001872

[7579] F-HEMBB1001874//Homo sapiens clone DJ241P17, WORKING DRAFT SEQUENCE, 7 unordered pieces.//3.4e-14:631:61//AC005000

[7580] F-HEMBB1001875//Human DNA sequence from clone J428A131, WORKING DRAFT SEQUENCE.//0.93:415:57//Z82209

[7581] F-HEMBB1001880//Human genomic DNA sequence from clone 30801 on chromosome Xp 11.3-11.4. Contains EST, CA repeat, STS, GSS, CpG island.//1.0e-18:729:60//Z93403

[7582] F-HEMBB1001899//Plasmodium falciparum DNA *** SEQUENCING IN PROGRESS * from contig 4-10, complete sequence.//0.0038:425:58//AL010216

[7583] F-HEMBB1001905//S. pombe chromosome III cosmid c330.//1.1e-23:520:62//AL031603

[7584] F-HEMBB1001906

[7585] F-HEMBB1001908//Human monocytic leukaemia zinc finger protein (MOZ) mRNA, complete cds.//3.7e-82:672:81//U47742

[7586] F-HEMBB1001910//Plasmodium falciparum 3D7 chromosome 12 PFYAC181 genomic sequence, WORKING DRAFT SEQUENCE, 8 unordered pieces.//0.0033:566:55//AC005505

[7587] F-HEMBB1001191//Arabidopsis thaliana chromosome II BAC F26C24 genomic sequence, complete sequence.//1.0:581:58//AC004705

[7588] F-HEMBB1001915//Caenorhabditis elegans cosmid T05H10, complete sequence.//1.2e-16:283:67//Z47812

[7589] F-HEMBB1001921//Homo sapiens chromosome 17, clone hCIT.123_J_{—}14, complete sequence.//3.4e-07:803:58//AC003950

[7590] F-HEMBB1001922//Plasmodium falciparum chromosome 2, section 28 of 73 of the complete sequence.//5.0e-06:756:56//AE001391

[7591] F-HEMBB1100925//Human DNA sequence from PAC 212P9 on chromosome 1p34.1-1p35. Contains delta opiate receptor, CpG island, CA repeat.//3.1e-45:609:73//AL009181

[7592] F-HEMBB1001930//Homo sapiens genomic DNA of 8p21.3-p22 anti-oncogene of hepatocellular colorectal and non-small cell lung cancer, segment 10/11 .//3.2e-158:745:99//AB020867

[7593] F-HEMBB1001944//, complete sequence.//4.1e-60:638:73//AC005815

[7594] F-HEMBB1001945//HS_{—}3185_B1_G05_MR CIT Approved Human Genomic Sperm Library D Homo sapiens genomic clone Plate=3185 Col=9 Row=N, genomic survey sequence.//1.0:280:58//AQ188882

[7595] F-HEMBB1001947//Human mRNA for KIAA0392 gene, partial cds.//5.6e-20:333:66//AB002390

[7596] F-HEMBB1001950//Human lipocortin (LIP) 2 gene, upstream region.//0.0094:180:63//M62899

[7597] F-HEMBB1001952//Human DNA sequence *** SEQUENCING IN PROGRESS *** from clone 101 A4, WORKING DRAFT SEQUENCE.//5.4e-19:329:70//Z93341

[7598] F-HEMBB1100953//Homo sapiens chromosome 17, clone hRPK.795_F_{—}17, complete sequence.//0.11:589:58//AC005284

[7599] F-HEMBB1001957//Human DNA sequence from PAC 204E5 on chromosome 12. Contains exon similar to Wilms' Tumour-related protein QM-like P2X-like receptor, ATP ligand gated ion channel, ESTs, CpG island.//9.8e-25:446:67//Z98941

[7600] F-HEMBB1100962//Homo sapiens chromosome 16, BAC clone 462G18 (LANL), complete sequence.//2.8e-147:727:97//AC005736

[7601] F-HEMBB1100967//Homo sapiens clone DJ1102A12, WORKING DRAFT SEQUENCE, 15 unordered pieces.//3.2e-56:650:71//AC004963

[7602] F-HEMBB1001973//Homo sapiens chromosome 12p13.3 clone RPCI11-350L7, WORKING DRAFT SEQUENCE, 72 unordered pieces.//1.2e-42:327:84//AC005844

[7603] F-HEMBB1001983//CIT-HSP-2315M4.TF CIT-HSP Homo sapiens genomic clone 2315M4, genomic survey sequence.//8.8e-35:198:96//AQ028071

[7604] F-HEMBB1001988//D. polychroa microsatellite sequence (clone Dp IC e12).//4.5e-07:337:62//X92189

[7605] F-HEMBB1001990//HS_{—}3234_A1_G08_T7 CIT Approved Human Genomic Sperm Library D Homo sapiens genomic clone Plate=3234 Col=15 Row=M, genomic survey sequence.//0.039:279:59//AQ204689

[7606] F-HEMBB1001996//Human DNA sequence *** SEQUENCING IN PROGRESS *** from clone 191J18, WORKING DRAFT SEQUENCE.//0.18:392:58//AL024507

[7607] F-HEMBB1001997//Homo sapiens clone RG140B11, WORKING DRAFT SEQUENCE, I unordered pieces.//1.3e-43:446:71//AC005069

[7608] F-HEMBB1002002//Plasmodium falciparum 3D7 chromosome 12 PFYAC812 genomic sequence, WORKING DRAFT SEQUENCE, 8 unordered pieces.//0.077:444:58//AC004153

[7609] F-HEMBB1002005//Human DNA sequence *** SEQUENCING IN PROGRESS *** from clone 963K23, WORKING DRAFT SEQUENCE.//3.4e-16:173:78//AL031685

[7610] F-HEMBB1002009//Plasmodium falciparum 3D7 chromosome 12 PFYAC357 genomic sequence, WORKING DRAFT SEQUENCE, 7 unordered pieces.//0.00033:790:56//AC005506

[7611] F-HEMBB1002015//Homo sapiens genomic DNA, chromosome 21q11.1, segment 27/28, WORKING DRAFT SEQUENCE.//6.7e-05:126:76//AP000056

[7612] F-HEMBB1002042//Oncorhynchus mykiss cytochrome P450 (CYP4VI) mRNA, partial cds.//6.4e-33:402:69//AF046012

[7613] F-HEMBB1002043

[7614] F-HEMBB1002044//Homo sapiens chromosome 5p, BAC clone 50g21 (LBNL H154), complete sequence.//3.0e-167:809:97//AC005740

[7615] F-HEMBB1002045

[7616] F-HEMBB1002049//Homo sapiens chromosome 17, clone hRPC.161_P_{—}9, complete sequence.//0.87:177:65//AC006237

[7617] F-HEMBB1002050//Streptomyces coelicolor cosmid D78.//8.5e-08:644:58//AL034355

[7618] F-HEMBB1002068//Homo sapiens mRNA for KIAA0612 protein, partial cds.//2.5e-05:402:61//AB014512

[7619] F-HEMBB1002069

[7620] F-HEMBB1002092//*** SEQUENCING IN PROGRESS *** Homo sapiens chromosome 4, BAC clone B33108; HTGS phase 1, WORKING DRAFT SEQUENCE, 10 unordered pieces.//7.8e-104:550:83//AC004064

[7621] F-HEMBB1002094//Homo sapiens genomic DNA, 21q region, clone: 125H6N2, genomic survey sequence.//2.9e-49:302:83//AG001476

[7622] F-HEMBB1002115//Homo sapiens chromosome 16, cosmid clone 378E2 (LANL), complete sequence.//0.00023:542:61//AC004035

[7623] F-HEMBB1002134//Human h-neuro-d4 protein mRNA, complete cds.//7.3e-43:533:701/U43843

[7624] F-HEMBB1002139//HS-1048-A2-B02-MR.abi CIT Human Genomic Sperm Library C Homo sapiens genomic clone Plate=CT 831 Col=4 Row=C, genomic survey sequence.//0.055:228:66//B38714

[7625] F-HEMBB1002142//Plasmodium falciparum DNA *** SEQUENCING IN PROGRESS * from MALI P5, WORKING DRAFT SEQUENCE.//0.0095:276:64//AL031748

[7626] F-HEMBB1002152//Human Chromosome X, WORKING DRAFT SEQUENCE, 4 unordered pieces.//0.055:520:57//AC002421

[7627] F-HEMBB1002189//Homo sapiens cosmid ICRFc10410935Q8 from Xq28, complete sequence.//2.6e-05:311:63//AF002998

[7628] F-HEMBB1002190//Plasmodium falciparum 3D7 chromosome 12 PFYACB8-420 genomic sequence, WORKING DRAFT SEQUENCE, 14 unordered pieces.//5.4e-05:647:59//AC005140

[7629] F-HEMBB1002193//Sequence 5 from patent U.S. Pat. No. 5,709,858.//1.8e-34:179:100//I80846

[7630] F-HEMBB1002217//Homo sapiens mRNA for zinc finger protein 10.//1.2e-23:405:67//X52332

[7631] F-HEMBB1002218//HS_{—}2056_B1_C09_T7 CIT Approved Human Genomic Sperm Library D Homo sapiens genomic clone Plate=2056 Col=17 Row=F, genomic survey sequence.//3.3e-45:245:97//AQ24471 I

[7632] F-HEMBB1002232//Human chromosome 1172g7 cosmid, complete sequence.//1.9e-21:314:70//U73648

[7633] F-HEMBB1002247

[7634] F-HEMBB1002249//Homo sapiens DNA sequence from BAC 3418 on chromosome 6p21.3-22.1. Contains ZNF184 gene coding for Kruppel related Zinc Finger protein 184, a hnRNP core protein A1 (mouse Fli-2, rat helix destabilizing protein, mouse Topoisomerase-inhibitor suppressed gene TIS) LIKE pseudogene, a HB15 (CD83 antigen precursor) LIKE pseudogene, Ser-tRNA, Glu-tRNA and Met-tRNA (Met-tRNA-1 gene 1) genes. Contains ESTs, STSs and GSSs, complete sequence.//4.1e-45:327:83//AL021918

[7635] F-HEMBB1002254//Human chromosome 16 BAC clone LANL cosmid-440E5, WORKING DRAFT SEQUENCE, 2 unordered pieces.//9.8e-40:315:82//AC002506

[7636] F-HEMBB1002255//Plasmodium falciparum MAL3P3, complete sequence.//0.0035:312:62//Z98547

[7637] F-HEMBB1002266//Plasmodium falciparum 3D7 chromosome 12 PFYAC1383 genomic sequence, WORKING DRAFT SEQUENCE, 3 unordered pieces.//0.013:469:59//AC005504

[7638] F-HEMBB1002280//Homo sapiens Chromosome 16 BAC clone CIT987SK-A-259H 10, complete sequence.//5.3e-18:527:61//AC004682

[7639] F-HEMBB1002300//Human Chromosome 11 Cosmid cSRL30hl 1, complete sequence.//8.6e-139:818:88//U73642

[7640] F-HEMBB1002306//HS_{—}3109_A2_H00_MR CIT Approved Human Genomic Sperm Library D Homo sapiens genomic clone Plate=3109 Col=2 Row=O, genomic survey sequence.//1.3e-75:371:98//AQ148164

[7641] F-HEMBB1002327//HS_{—}3235_B2_G10_T7 CIT Approved Human Genomic Sperm Library D Homo sapiens genomic clone Plate=3235 Col=20 Row=N, genomic survey sequence.//3.3e-83:418:97//AQ209752

[7642] F-HEMBB1002329//CITBI-EI-2503J7.TR CITBI-El Homo sapiens genomic clone 2503J7, genomic survey sequence.//3.3e-31:220:88//AQ263402

[7643] F-HEMBB1002340

[7644] F-HEMBB1002342//Homo sapiens mRNA for putative thioredoxin-like protein.//4.1e-154:724:98//AJ010841

[7645] F-HEMBB1002358//Human thymidylate kinase (CDC8) mRNA, complete cds.//3.3e-36:192:98//L16991

[7646] F-HEMBB1002359//Human Rev interacting protein R1p-1 mRNA, complete cds.//1.8e-13:96:96//U55766

[7647] F-HEMBB1002364//Human DNA sequence *** SEQUENCING IN PROGRESS *** from clone 376D21, WORKING DRAFT SEQUENCE.//7.5e-24:202:71//Z98946

[7648] F-HEMBB1002371//Plasmodium falciparum 3D7 chromosome 12 PFYAC812 genomic sequence, WORKING DRAFT SEQUENCE, 8 unordered pieces.//1.9e-06:674:56//AC004153

[7649] F-HEMBB1002381//Homo sapiens chromosome 16, cosmid clone RT163 (LANL), complete sequence.//0.34:238:61//AC005222

[7650] F-HEMBB1002383

[7651] F-HEMBB1002387//CIT-HSP-2173E20.TR CIT-HSP Homo sapiens genomic clone 2173E20, genomic survey sequence.//5.2e-17:434:66//B91052

[7652] F-HEMBB1002409//Human DNA sequence from PAC 84F12 on chromosome Xq25-Xq26.3. Contains glypican-3 precursor (intestinal protein OCI-5) (GTR2-2), ESTs and CA repeat.//1.2e-56:324:88//AL008712

[7653] F-HEMBB1002415//Human DNA sequence *** SEQUENCING IN PROGRESS *** from clone 36411, WORKING DRAFT SEQUENCE.//8.9e-35:334:75//AL031319

[7654] F-HEMBB1002425//Chromosome 22q13 BAC Clone CIT987SK-384D8 complete sequence.//1.0e-36:317:76//U62317

[7655] F-HEMBB1002442//Rattus norvegicus lin-10 protein homolog (lin-10) mRNA, complete cds.//4.3e-88:296:92//U92010

[7656] F-HEMBB1002453//Human DNA sequence *** SEQUENCING IN PROGRESS *** from clone 86D1, WORKING DRAFT SEQUENCE.//2.7e-43:419:78//AL034349

[7657] F-HEMBB1002457//Homo sapiens clone DJ0982E09, WORKING DRAFT SEQUENCE, 3 unordered pieces.//1.3e-27:542:68//AC005534

[7658] F-HEMBB1002458//HS_{—}3246_A2_GO5_MR CIT Approved Human Genomic Sperm Library D Homo sapiens genomic clone Plate=3246 Col=10 Row=M, genomic survey sequence.//3.2e-51:257:991/AQ217993

[7659] F-HEMBB1002477//Human Grb2-associated binder-1 mRNA, complete cds.//1.9e-87:493:92//U43885

[7660] F-HEMBB1002489

[7661] F-HEMBB1002492//Arabidopsis thaliana BAC T15B16.//0.028:516:57//AF104919

[7662] F-HEMBB1002495//Homo sapiens chromosome 17, clone hRPK.421_E_{—}14, complete sequence.//1.1e-16:297:68//AC006141

[7663] F-HEMBB1002502//Homo sapiens clone DJ1163L11, complete sequence.//1.1e-91:675:82//AC005230

[7664] F-HEMBB1002509//Homo sapiens Chromosome 16 BAC clone CIT987SK-A-248F7, complete sequence.//2.7e-11:648:60//AC004605

[7665] F-HEMBB1002510//HS_{—}3236_B1_Hi 1_MR CIT Approved Human Genomic Sperm Library D Homo sapiens genomic clone Plate=3236 Col=21 Row=P, genomic survey sequence.//1.2e-06:67:94//AQ205992

[7666] F-HEMBB1002520//Homo sapiens BAC clone NHOO04N07 from Y, complete sequence.//1.2e-70:580:72//AC006152

[7667] F-HEMBB1002522//Homo sapiens Xp22 bin 150 clone GSHB-223 P11 (Genome Systems Human BAC library) complete sequence.//5.6e-22:516:64//AC004553

[7668] F-HEMBB1002531

[7669] F-HEMBB1002534//Human DNA sequence *** SEQUENCING IN PROGRESS *** from clone 668J24, WORKING DRAFT SEQUENCE.//6.9e-62:265:87//AL034346

[7670] F-HEMBB1002545//Human BAC clone RG128M16 from 7q21-7q22, complete sequence.//2.7e-44:200:82//AC000059

[7671] F-HEMBB1002550//Homo sapiens PAC clone DJ0910117 from 7q11.21-q11.23, complete sequence.//0.22:161:68//AC004927

[7672] F-HEMBB1002556//Homo sapiens PAC clone DJ0696N01 from 7p21-p22, complete sequence.//7.5e-43:306:77//AC004861

[7673] F-HEMBB1002579

[7674] F-HEMBB1002582//Human DNA sequence *** SEQUENCING IN PROGRESS *** from clone 349A 12, WORKING DRAFT SEQUENCE.//0.00018:431:61//AL033520

[7675] F-HEMBB1002590//Yeast (S. cerevisiae) mitochondrial apocytochrome b gene, 3′ flank.//0.78:147:64//J01471

[7676] F-HEMBB1002596//Human DNA sequence *** SEQUENCING IN PROGRESS *** from clone 9E21, WORKING DRAFT SEQUENCE.//3.6e-50:692:69//AL008639

[7677] F-HEMBB1002600//Homo sapiens tetraspan NET-5 mRNA, complete cds.//9.1e-151:710:98//AF089749

[7678] F-HEMBB1002601//Human BAC clone RGO20DO2 from 7q22, complete sequence.//1.5e-07:416:60//AC002381

[7679] F-HEMBB1002603//Human BAC clone GS552AO1 from 7q21-q22, complete sequence.//0.40:341:60//AC002454

[7680] F-HEMBB1002607//Mus musculus homeobox containing nuclear transcriptional factor Hmx I (Hmx I) gene, complete cds.//0.0042:460:60//AF009614

[7681] F-HEMBB1002610//Homo sapiens Chromosome 12q24 PAC RPCI3-462E2 (Roswell Park Cancer Institute Human PAC library) complete sequence.//6.3e-23:559:63//AC003029

[7682] F-HEMBB1002613//Homo sapiens Chromosome 22q12 BAC Clone 566c 1, complete sequence.//4.2e-17:441:63//AC000025

[7683] F-HEMBB1002614//Plasmodium falciparum chromosome 2, section 54 of 73 of the complete sequence.//0.013:324:56//AE001417

[7684] F-HEMBB1002617//Homo sapiens chromosome 16 BAC clone CIT987SK-334D1 I complete sequence.//2.1e-07:441:60//AF001550

[7685] F-HEMBB1002623//C. hyalina microsatellite marker DNA (id ATCC4).//0.57:106:66//Z95304

[7686] F-HEMBB1002635//Human JNK3 alpha2 protein kinase (JNK3A2) mRNA, complete cds.//4.8e-22:127:100//U34819

[7687] F-HEMBB1002664//HS_{—}2265_A1_H06_MF CIT Approved Human Genomic Sperm Library D Homo sapiens genomic clone Plate=2265 Col=1 I Row=O, genomic survey sequence.//0.54:115:67//AQ101557

[7688] F-HEMBB1002677//Homo sapiens (subclone 3_dl from P1H25) DNA sequence, complete sequence.//2.2e-49:784:68//L81774

[7689] F-HEMBB1002683//Homo sapiens type IV collagen 5a chain (COL4A5) gene, exon 23.//11.0:112:63//U04492

[7690] F-HEMBB1002684//HS-1050-A2-G06-MF.abi CIT Human Genomic Sperm Library C Homo sapiens genomic clone Plate=CT 772 Col=12 Row=M, genomic survey sequence.//4.4e-07:86:84//B39748

[7691] F-HEMBB1002686//HS-1023-B2-F10-MR.abi CIT Human Genomic Sperm Library C Homo sapiens genomic clone Plate=CT 802 Col=20 Row=L, genomic survey sequence.//0.98:183:61//B34077

[7692] F-HEMBB1002692//Human DNA sequence *** SEQUENCING IN PROGRESS *** from clone 1108H3, WORKING DRAFT SEQUENCE.//0.00039:408:60//AL033525

[7693] F-HEMBB1002697//Homo sapiens clone DJ1087M19, WORKING DRAFT SEQUENCE, 7 unordered pieces.//7.3e-35:323:74//AC004955

[7694] F-HEMBB1002699//Mus musculus D6MM5e protein (D6Mm5e) and DOK protein (Dok) genes, complete cds; and LOR2 protein (Lor2) gene, partial cds.//0.031:325:62//AF084363

[7695] F-HEMBB1002702//HS-1025-A2-DO1-MR.abi CIT Human Genomic Sperm Library C Homo sapiens genomic clone Plate=CT 804 Col=2 Row=G, genomic survey sequence.//1.8e-25:158:95//B34720

[7696] F-HEMBB1002705//Homo sapiens DNA, chromosome 21q22.2, PAC clone 25P16 complete sequence, encoding carbonyl reductase and carbonyl reductase 3 (complete cds).//1.7e-137:534:96//AB003151

[7697] F-HEMBB1002712//Human DNA sequence from cosmid cU 15G11, between markers DXS6791 and DXS8038 on chromosome X contains ESTs and STS.//0.0019:612:58//Z71187

[7698] F-MAMMA1000009//Human chromosome 1 BAC 308GI genomic sequence, WORKING DRAFT SEQUENCE, 3 unordered pieces.//6.1e-43:354:81//AC003117

[7699] F-MAMMA1000019

[7700] F-MAMMA1000020//H. sapiens mRNA for flavin-containing monooxygenase 5 (FMO5).//2.0e-40:185:97//Z47553

[7701] F-MAMMA1000025//Homo sapiens PAC clone DJ0806A17 from 7 p13-p14, complete sequence.//1.0:211:65//AC005483

[7702] F-MAMMA1000043//Human angiotensin I-converting enzyme (ACE) gene, intron 12.//0.075:204:65//M73275

[7703] F-MAMMA1000045//Human DNA sequence from clone 142F18 on chromosome Xq26.3-27.2 Contains part of a gene similar to melanoma-associated antigen, EST, GSS and an inverted repeat, complete sequence.//4.1e-122:495:79//AL031073

[7704] F-MAMMA1000055//M. musculus mRNA for testin.//2.1e-35:559:66//X78989

[7705] F-MAMMA1000057//Homo sapiens chromosome 17, clone hRPK.259_G_{—}18, complete sequence.//5.5e-121:703:89//AC005829

[7706] F-MAMMA1000069//Homo sapiens minisatellite ceb1 repeat region.//0.00013:329:60//AF048727

[7707] F-MAMMA1000084//Homo sapiens DNA sequence from PAC 958B3 on chromosome Xp22.11-Xp22.22. Contains ESTs STS and CpG island.//2.1e-53:445:79//Z93023

[7708] F-MAMMA1000085//Caenorhabditis elegans cosmid Y23H5A.//0.0017:164:64//AF077541

[7709] F-MAMMA1000092//Homo sapiens BAC clone GS465N13 from 7 p15-p21, complete sequence.//1.2e-70:598:78//AC004744

[7710] F-MAMMA1000103//Homo sapiens chromosome 17, clone hCIT.91_J_{—}4, complete sequence.//1.1e-156:857:92//AC003976

[7711] F-MAMMA1000117//HS_{—}3223_B2_D08_T7 CIT Approved Human Genomic Sperm Library D Homo sapiens genomic clone Plate=3223 Col=16 Row=H, genomic survey sequence.//5.4e-100:527:94//AQ221160

[7712] F-MAMMA1000129//ryanodine receptor.//0.055:492:59//A20359

[7713] F-MAMMA1000133

[7714] F-MAMMA1000134//HS_{—}3078_B1_C02_MF CIT Approved Human Genomic Sperm Library D Homo sapiens genomic clone Plate=3078 Col=3 Row=F, genomic survey sequence.//2.1e-93:462:97//AQ144362

[7715] F-MAMMA1000139//Homo sapiens Xp22 PAC RPCII-5G11 (from Roswell Park Cancer Center) complete sequence.//3.3e-14:322:65//AC002369

[7716] F-MAMMA1000143//Homo sapiens mRNA for KIAA0685 protein, complete cds.//6.9e-25:148:97//AB014585

[7717] F-MAMMA1000155//Homo sapiens homeobox transcription factor barx2 (BARX2) mRNA, complete cds.//1.0e-29:219:87//AF031924

[7718] F-MAMMA1000163

[7719] F-MAMMA1000171//Homo sapiens chromosome 19, CIT-HSP BAC 470n8, complete sequence.//6.3e-14:92:88//AC005393

[7720] F-MAMMA1000173//Mus musculus SH3-containing protein SH3P7 mRNA, complete cds. similar to Human Drebrin.//2.2e-114:698:87//U58884

[7721] F-MAMMA1000175//HS_{—}3050-B1B03-MF CIT Approved Human Genomic Sperm Library D Homo sapiens genomic clone Plate=3050 Col=5 Row=D, genomic survey sequence.//6.2e-73:357:99//AQ102678

[7722] F-MAMMA1000183//Human DNA sequence *** SEQUENCING IN PROGRESS *** from clone Y313F4, WORKING DRAFT SEQUENCE.//4.6e-94:904:73//AL023808

[7723] F-MAMMA1000198//Z. diploperennis repetitive DNA (clone ZEAR 266).//0.18:152:70//X53610

[7724] F-MAMMA1000221//Human Chromosome 15q11-q13 PAC clone pDJ778a2, complete sequence.//0.017:99:75//AC004583

[7725] F-MAMMA1000227//Human DNA sequence *** SEQUENCING IN PROGRESS *** from clone 467K16, WORKING DRAFT SEQUENCE.//0.36:312:62//AL031283

[7726] F-MAMMA1000241//HS_{—}3217 BI B02 MR CIT Approved Human Genomic Sperm Library D Homo sapiens genomic clone Plate=3217 Col=3 Row=D, genomic survey sequence.//1.9e-94:456:98//AQ193401

[7727] F-MAMMA1000251//Homo sapiens NF2 gene.//0.00092:270:64//Y 18000

[7728] F-MAMMA1000254//Plasmodium falciparum 3D7 chromosome 12 PFYACB8-420 genomic sequence, WORKING DRAFT SEQUENCE, 14 unordered pieces.//0.0034:777:57//AC005140

[7729] F-MAMMA1000257//Homo sapiens DNA sequence from PAC 201D7 on chromosome 6p22.1-22.3. Contains EST and STS.//0.00036:230:65//AL022717

[7730] F-MAMMA1000264//Homo sapiens (subclone 9_f5 from P1H 17) DNA sequence, complete sequence.//1.5e-30:499:68//L81612

[7731] F-MAMMA1000266//Bacillus lynceorum strain pMEL12 Bag320 satellite DNA.//0.28:218:64//AF034430

[7732] F-MAMMA1000270//Human Chromosome 16 BAC clone CIT987SK-A-270G1, complete sequence.//1.4e-157:788:96//AF001549

[7733] F-MAMMA1000277//Mycobacterium tuberculosis H37Rv complete genome; segment 48/162.//0.70:320:61//AL021897

[7734] F-MAMMA1000278//Sequence 23 from patent U.S. Pat. No. 5,708,157.//9.3e-103:540:95//I80055

[7735] F-MAMMA1000279//Human DNA sequence from clone 769D20 on chromosome Xp21.1-21.3 Contains EST, STS, GSS, complete sequence.//2.4e-49:262:77//AL031643

[7736] F-MAMMA1000284//cSRL-165E12-u cSRL flow sorted Chromosome 11 specific cosmid Homo sapiens genomic clone cSRL-165E12, genomic survey sequence.//1.1e-30:324:75//B03004

[7737] F-MAMMA1000287//Homo sapiens, clone hRPK.15_A_{—}1, complete sequence.//2.7e-54:401:83//AC006213

[7738] F-MAMMA1000302//Drosophila melanogaster complete mitochondrial genome.//0.0051:307:61//U37541

[7739] F-MAMMA1000307//Homo sapiens chromosome 12 p13.3 clone RPCI5-1154L15, WORKING DRAFT SEQUENCE, 67 unordered pieces.//0.15:449:59//AC006205

[7740] F-MAMMA1000309//cDNA coding human apolipoprotein E3.//0.00010:691:58//E00359

[7741] F-MAMMA1000312//Human DNA sequence *** SEQUENCING IN PROGRESS *** from clone 798A17, WORKING DRAFT SEQUENCE.//0.27:301:60//AL031274

[7742] F-MAMMA1000313

[7743] F-MAMMA1000331//Human Chromosome 16 BAC clone CIT987SK-A-735G6, complete sequence.//9.8e-06:151:71//AC002400

[7744] F-MAMMA1000339

[7745] F-MAMMA1000340//HS_{—}2181_B2_F07_MR CIT Approved Human Genomic Sperm Library D Homo sapiens genomic clone Plate=2181 Col=14 Row=L, genomic survey sequence.//4.3e-05:181:6811AQ024288

[7746] F-MAMMA1000348//Homo sapiens chromosome 17, clone HRPC843B9, complete sequence.//5.3e-30:575:66//AC004139

[7747] F-MAMMA1000356//Homo sapiens clone RG038K21, WORKING DRAFT SEQUENCE, 3 unordered pieces.//1.8e-52:264:76//AC005052

[7748] F-MAMMA1000360//Homo sapiens PAC clone DJO755G17 from 7p21-p22, complete sequence.//6.5e-91:569:88//AC004879

[7749] F-MAMMA1000361//Human DNA sequence from PAC 507115 on chromosome Xq26.3-27.3. Contains 60S ribosomal protein L44 (L41, L36) like gene, ESTs, STSs and a polymorphic CA repeat.//1.4e-42:315:83//Z98950

[7750] F-MAMMA1000372//Human DNA sequence *** SEQUENCING IN PROGRESS *** from clone Y738F9, WORKING DRAFT SEQUENCE.//2.9e-114:516:89//AL022345

[7751] F-MAMMA1000385//CITBI-EI-2517E13.TF CITB1-E1 Homo sapiens genomic clone 2517E13, genomic survey sequence.//6.9e-26:377:71//AQ279944

[7752] F-MAMMA1000388//Homo sapiens UKLF mRNA for ubiquitous Kruppel like factor, complete cds.//3.7e-148:710:98//AB015132

[7753] F-MAMMA1000395

[7754] F-MAMMA1000402//Homo sapiens clone DJO718N 17, complete sequence.//4.0e-115:845:85//AC005999

[7755] F-MAMMA1000410//HS_{—}3245_A1_C02_MR CIT Approved Human Genomic Sperm Library D Homo sapiens genomic clone Plate=3245 Col=3 Row=E, genomic survey sequence.//9.6e-42:350:80//AQ205768

[7756] F-MAMMA1000413//HS_{—}3223_B2_F01_MR CIT Approved Human Genomic Sperm Library D Homo sapiens genomic clone Plate=3223 Col=2 Row=L, genomic survey sequence.//1.6e-48:318:89//AQ188456

[7757] F-MAMMA1000414//HS_{—}2027_B2_C04_MR CIT Approved Human Genomic Sperm Library D Homo sapiens genomic clone Plate=2027 Col=8 Row=F, genomic survey sequence.//1.4e-46:286:921/AQ231369

[7758] F-MAMMA1000416//Drosophila melanogaster DNA sequence (PIs DS07528 (DI 69) and DS06665 (D220)), complete sequence.//9.4e-33:310:72//AC004640

[7759] F-MAMMA1000421//Homo sapiens clone DJ 1129D05, complete sequence.//3.3e-29:223:84//AC005630

[7760] F-MAMMA1000422

[7761] F-MAMMA1000423//Drosophila yakuba mitochondrial DNA molecule.//2.2e-10:639:57//X03240

[7762] F-MAMMA1000424//Homo sapiens DNA from chromosome 19, BAC 33152, complete sequence.//4.6e-47:556:68//AC003973

[7763] F-MAMMA1000429//Mus musculus SDP8 mRNA, complete cds.//8.0e-99:545:92//AF062484

[7764] F-MAMMA1000431//Homo sapiens clone DJ1039L24, WORKING DRAFT SEQUENCE, 3 unordered pieces.//4.8e-41:289:79//AC005283

[7765] F-MAMMA1000444//Human DNA sequence from clone 714B7 on chromosome 22q12.2-13.2 Contains CYTOCHROME C OXIDASE VIIB precursor like pseudogene and ESTs, complete sequence.//2.3e-34:291:80//Z99755

[7766] F-MAMMA1000446

[7767] F-MAMMA1000458//Mus musculus clone OST9003, genomic survey sequence.//5.0e-53:231:84//AF046620

[7768] F-MAMMA1000468//Human DNA sequence *** SEQUENCING IN PROGRESS * from clone 291J10, WORKING DRAFT SEQUENCE.//0.75:303:60//Z93017

[7769] F-MAMMA1000472//Human DNA sequence *** SEQUENCING IN PROGRESS *** from clone 414D7, WORKING DRAFT SEQUENCE.//4.0e-41:403:77//AL033543

[7770] F-MAMMA1000478//Homo sapiens clone RG270D13, WORKING DRAFT SEQUENCE, 18 unordered pieces.//9.5e-54:369:77//AC005081

[7771] F-MAMMA1000483//Homo sapiens Chromosome 16 BAC clone CIT987SK-44M2, complete sequence.//3.6e-34:332:77//AC004381

[7772] F-MAMMA1000490//Homo sapiens 12q13.1 PAC RPCII-90J4 (Roswell Park Cancer Institute Human PAC library) complete sequence.//8.9e-128:822:87//AC003686

[7773] F-MAMMA1000500//CIT-HSP-231905.TF CIT-HSP Homo sapiens genomic clone 231905, genomic survey sequence.//4.8e-29:175:94//AQ044812

[7774] F-MAMMA1000501//Homo sapiens DNA sequence from clone 78F24 on chromosome 22q12.1-12.3. Contains one exon of an Oxysterol-binding protein (OSBP) LIKE gene. Contains GSSs and an STS, complete sequence.//5.7e-45:334:82//AL022336

[7775] F-MAMMA1000516//Human DNA sequence from PAC 50A13 on chromosome Xp 11. Contains ATP SYNTHASE LIPID BINDING PROTEIN P1 (P2, P3) precursor (ATP5GI, ATP5G2, ATP5G3) like pseudogene, ESTs and STSs. Contains polymorphic CA repeat.//2.9e-43:529:69//Z92545

[7776] F-MAMMA1000522//Human DNA sequence from clone 20J23 on chromosome Xq26.2-27.2 Contains ras-related C3 botulinum toxin substrate 1 (P21-RAC 1) (ras-like protein TC25) EST, CA repeat, STS, CpG island, complete sequence.//2.0e-14:380:63//AL022576

[7777] F-MAMMA1000524//Homo sapiens chromosome 10 clone CIT-HSP-1338F24 map 10p11.2-10 p12.1, complete sequence.//1.4e-22:420:66//AC006101

[7778] F-MAMMA1000559//Human HepG2 3′ region cDNA, clone hmd3f08.//5.4e-29:168:97//D16922

[7779] F-MAMMA1000565//RPCI11-61K6.TJ RPCII 1 Homo sapiens genomic clone R-61K6, genomic survey sequence.//1.7e-120:561:100//AQ194238

[7780] F-MAMMA1000567//Human DNA sequence from PAC 179D3, between markers DXS6791 and DXS8038 on chromosome X contains SI0 GTP-binding protein, ESTs and CpG island.//3.1e-43:387:80//Z81370

[7781] F-MAMMA1000576//Homo sapiens BAC clone RG442F18 from 2, complete sequence.//1.2e-30:237:75//AC005104

[7782] F-MAMMA1000583//RPCI11-60M22.TJ RPCII 1 Homo sapiens genomic clone R-60M22, genomic survey sequence.//9.6e-102:487:99//AQ198091

[7783] F-MAMMA1000585//Homo sapiens clone UWGC:djs14 from 7 p14-15, complete sequence.//5.2e-39:370:78//AC006195

[7784] F-MAMMA1000594//Homo sapiens chromosome 19, cosmid R31646, complete sequence.//3.9e-43:328:83//AC005338

[7785] F-MAMMA1000597//Homo sapiens chromosome 17, clone hRPK.481_C_{—}4, complete sequence.//1.5e-32:259:82//AC005839

[7786] F-MAMMA1000605//Human DNA sequence *** SEQUENCING IN PROGRESS *** from clone 97P20, WORKING DRAFT SEQUENCE.//2.4e-59:318:83//AL031297

[7787] F-MAMMA1000612//HS_{—}2188_A2_D02_MF CIT Approved Human Genomic Sperm Library D Homo sapiens genomic clone Plate=2188 Col=4 Row=G, genomic survey sequence.//4.8e-30:171:96//AQ116793

[7788] F-MAMMA1000616//HS_{—}3176_A1_E06_T7 CIT Approved Human Genomic Sperm Library D Homo sapiens genomic clone Plate=3176 Col=1 I Row=I, genomic survey sequence.//4.7e-28:287:79i/AQ300310

[7789] F-MAMMA1000621//Human DNA sequence *** SEQUENCING IN PROGRESS *** from clone 273F20, WORKING DRAFT SEQUENCE.//0.015:478:58//AL034371

[7790] F-MAMMA1000623

[7791] F-MAMMA1000625//DNA encoding Hepatitis C virus antigen.//0.93:196:61//E06898

[7792] F-MAMMA1000643//Homo sapiens nephrocystin (NPHP 1) mRNA, partial cds.//0.95:365:59//AF023674

[7793] F-MAMMA1000664//HS_{—}3096_B1_C02_MR CIT Approved Human Genomic Sperm Library D Homo sapiens genomic clone Plate=3096 Col=3 Row=F, genomic survey sequence.//2.7e-51:257:99//AQ145137

[7794] F-MAMMA1000669//Homo sapiens chromosome 19, cosmid R26908, complete sequence.//2.0e-66:586:67//AC004785

[7795] F-MAMMA1000670//HSS_{—}2243_B2_A08_MR CIT Approved Human Genomic Sperm Library D Homo sapiens genomic clone Plate=2243 Col=16 Row=B, genomic survey sequence.//8.7e-05:94:80//AQ153650

[7796] F-MAMMA1000672//Mus musculus clone OST8270, genomic survey sequence.//3.9e-64:471:81//AF046705

[7797] F-MAMMA1000684//Suid herpesvirus I Rsp40 mRNA, partial cds.//1.2e-07:186:67//U27489

[7798] F-MAMMA1000696//Human oligodendrocyte myelin glycoprotein (OMG) exons 1-2; neurofibromatosis I (NF1) exons 28-49; ecotropic viral integration site 2B (EVI2B) exons 1-2; ecotropic viral integration site 2A (EVI2A) exons 1-2; adenylate kinase (AK3) exons 1-2.//3.0e-53:653:70//L05367

[7799] F-MAMMA1000707//CIT-HSP-2302019.TR CIT-HSP Homo sapiens genomic clone 2302019, genomic survey sequence.//1.8e-08:131:77//AQ017947

[7800] F-MAMMA1000713//Rattus norvegicus clonel polymeric immunoglobulin receptor mRNA 3′ untranslated region, GA rich region, and microsatellites with GGA-triplet and GAA-triplet repeats.//0.062:134:67//U00762

[7801] F-MAMMA1000714//Chicken hsp90 gene for 90 kDa-heat shock protein 5′-end.//1.0:266:61//X15028

[7802] F-MAMMA1000718//CIT-HSP-2171B10.TF CIT-HSP Homo sapiens genomic clone 2171B10, genomic survey sequence.//3.6e-05:289:60//B95401

[7803] F-MAMMA1000720//Homo sapiens chromosome 19, cosmid R33632, complete sequence.//4.4e-184:842:98//AC005781

[7804] F-MAMMA1000723//Homo sapiens clone DJ0892G 19, complete sequence.//8.8e-05:430:60//AC004917

[7805] F-MAMMA1000731//Drosophila melanogaster DNA sequence (P1 DS07049 (D133)), complete sequence.//3.8e-55:796:66//AC004274

[7806] F-MAMMA1000732//Homo sapiens chromosome 21q22.3 PAC 141B3, complete sequence, containing ribosomal protein homologue pseudogene L23a.//6.6e-77:555:74//AF064859

[7807] F-MAMMA1000733//Plasmodium falciparum DNA *** SEQUENCING IN PROGRESS *** from MALI P6, WORKING DRAFT SEQUENCE.//0.98:479:58//AL031749

[7808] F-MAMMA1000734//Homo sapiens SEC63 (SEC63) mRNA, complete cds.//7.3e-168:802:98//AF100141

[7809] F-MAMMA1000738//S. cerevisiae chromosome XIV reading frame ORF YNLI 32w.//8.6e-31:626:63//Z71408

[7810] F-MAMMA1000744//Gorilla Alu-repetitive sequence in beta-globin gene cluster.//2.7e-54:410:82//X06123

[7811] F-MAMMA1000746//Homo sapiens Chromosome 16 BAC clone CIT987SK-A-IOF4, complete sequence.//3.7e-109:779:83//AC004158

[7812] F-MAMMA1000752//Homo sapiens clone RG219E16, WORKING DRAFT SEQUENCE, 3 unordered pieces.//1.2e-20:444:63//AC005075

[7813] F-MAMMA1000760//Homo sapiens clone RGO 5P03, complete sequence.//1.5e-44:403:79//AC005048

[7814] F-MAMMA1000761//Homo sapiens Chromosome 7 BAC Clone 239c10, WORKING DRAFT SEQUENCE, 9 unordered pieces.//2.3e-22:159:81//AC004166

[7815] F-MAMMA1000775//Homo sapiens chromosome 17, clone hRPK.849_N_{—}15, complete sequence.//1.3e-51:789:68//AC005703

[7816] F-MAMMA1000776//Human DNA sequence from BAC 57G9 on chromosome 22q12.1 Contains ESTs, CA repeat, GSS.//5.7e-40:238:78//Z95116

[7817] F-MAMMA1000778//Human DNA sequence *** SEQUENCING IN PROGRESS *** from clone 153G14, WORKING DRAFT SEQUENCE.//7.6e-29:222:84//AL031118

[7818] F-MAMMA1000782//Human 2,4-dienoyl-CoA reductase gene, exon 9.//0.90:137:62//U94987

[7819] F-MAMMA1000798//*** SEQUENCING IN PROGRESS *** EPMI/APECED region of chromosome 21, clones A68E8, B127P21, B173L3, B23N8, C1242C9, C579E2, A70B6, B 159G9, B 175D10, B52C 10, C124GI Note: Sequencing in this region has been discontinued by the Stanford Human Genome Center, WORKING DRAFT SEQUENCE, 50 unordered pieces.//0.00058:163:71//AC003656

[7820] F-MAMMA1000802//Homo sapiens chromosome 19, cosmid R33729, complete sequence.//6.3e-151:714:99//AC005339

[7821] F-MAMMA1000824//Homo sapiens 12 p13.3 BAC RPCII 1-543P15 (Roswell Park Cancer Institute Human BAC Library) complete sequence.//4.2e-104:503:99//AC005912

[7822] F-MAMMA1000831//Homo sapiens clone UWGC:g1211a139, complete sequence.//0.76:302:58//AC005502

[7823] F-MAMMA1000839//Human BAC clone RGO13LO3 from 7q21, complete sequence.//1.9e-54:322:68//AC002456

[7824] F-MAMMA1000841//Human DNA sequence *** SEQUENCING IN PROGRESS *** from clone 968D22, WORKING DRAFT SEQUENCE.//6.7e-140:647:92//AL023755

[7825] F-MAMMA1000842//, complete sequence.//0.0068:499:59//AC005817

[7826] F-MAMMA1000843//Plasmodium falciparum 3D7 chromosome 12 PFYAC588 genomic sequence, WORKING DRAFT SEQUENCE, 2 unordered pieces.//0.13:439:59//AC004710

[7827] F-MAMMA1000845//Plasmodium falciparum DNA *** SEQUENCING IN PROGRESS * from MAL4P I, WORKING DRAFT SEQUENCE.//2.2e-05:208:64//AL034557

[7828] F-MAMMA1000851//Gallus domesticus filamin gene 5′ region, partial cds.//0.86:193:63//U00146

[7829] F-MAMMA1000855//Human minisatellite region detected by myoglobin 33-repeat probe, clone lambda 33.10.//0.081:229:62//M30549

[7830] F-MAMMA1000856//B. taurus microsatellite marker ETH8 (D6S3) DNA.//0.0024:253:60//Z22747

[7831] F-MAMMA1000859//Sequence 6 from patent WO9722695.//2.3e-79:533:8211A63553

[7832] F-MAMMA1000862

[7833] F-MAMMA1000863//Homo sapiens genomic DNA, chromosome 21 q11.1, segment 21/28, WORKING DRAFT SEQUENCE.//1.0e-28:439:64//AP000050

[7834] F-MAMMA1000865

[7835] F-MAMMA1000867//CIT-HSP-2385J8.TR.1 CIT-HSP Homo sapiens genomic clone 2385J8, genomic survey sequence.//0.00017:158:70//AQ240906

[7836] F-MAMMA1000875//Homo sapiens DNA sequence from PAC 232G24 on chromosome Xq27.1-q27.3. Contains two exons similar to MAGE gene family, EST, CA repeat, STS, complete sequence.//1.0:121:68//AL022152

[7837] F-MAMMA1000876//Homo sapiens clone HS 19.6 Alu-Ya5 sequence.//8.4e-41:185:90//AF015152

[7838] F-MAMMA1000877//Homo sapiens DNA sequence from clone 78F24 on chromosome 22q12.1-12.3. Contains one exon of an Oxysterol-binding protein (OSBP) LIKE gene. Contains GSSs and an STS, complete sequence.//8.3e-57:522:75//AL022336

[7839] F-MAMMA1000880//Homo sapiens full-length insert cDNA clone ZD54A 10.//5.2e-26:143:100//AF086327

[7840] F-MAMMA1000883//Human DNA sequence from clone 786D3 on chromosome 22q13.31-33 Contains GSS, complete sequence.//0.99:225:63//AL023801

[7841] F-MAMMA1000897//R. norvegicus mRNA for plasma protein.//4.8e-07:479:58//Y 11283

[7842] F-MAMMA1000905//F26L5TRB IGF Arabidopsis thaliana genomic clone F26L5, genomic survey sequence.//0.94:115:66//B61433

[7843] F-MAMMA1000906//HS_{—}3110_B2_A I_MR CIT Approved Human Genomic Sperm Library D Homo sapiens genomic clone Plate=3110 Col=22 Row=B, genomic survey sequence.//2.5e-63:548:78//AQ182819

[7844] F-MAMMA1000908//Human DNA sequence *** SEQUENCING IN PROGRESS *** from clone 27K12, WORKING DRAFT SEQUENCE.//5.2e-80:480:90//AL033397

[7845] F-MAMMA1000914//Plasmodium falciparum MAL3P8, complete sequence.//7.6e-09:596:58//AL034560

[7846] F-MAMMA1000921//CIT-HSP-2171 D8.TR CIT-HSP Homo sapiens genomic clone 2171 D8, genomic survey sequence.//6.6e-07:249:66//B89575

[7847] F-MAMMA1000931//Homo sapiens clone DJ0892G 19, complete sequence.//2.9e-43:415:66//AC004917

[7848] F-MAMMA1000940//HS-1056-A2-E02-MF.abi CIT Human Genomic Sperm Library C Homo sapiens genomic clone Plate=CT 778 Col=4 Row=I, genomic survey sequence.//6.1e-44:235:78//B47296

[7849] F-MAMMA1000941//Homo sapiens Chromosome 16 BAC clone CIT987-SKA-113A6-complete genomic sequence, complete sequence.//9.4e-48:443:75//AC002299

[7850] F-MAMMA1000942//Human DNA sequence from clone 914P14 on chromosome Xq23 Contains calpain-like protease gene, DCX (doublecortin) ESTs, CA repeat, GSS, complete sequence//1.8e-14:175:76//AL031117

[7851] F-MAMMA1000943//Plasmodium falciparum 3D7 chromosome 12 PFYAC492 genomic sequence, WORKING DRAFT SEQUENCE, 5 unordered pieces.//0.0082:684:56//AC005308

[7852] F-MAMMA1000956//Homo sapiens chromosome 16, cosmid clone 363E3 (LANL), complete sequence.//3.3e-30:530:67//AC004643

[7853] F-MAMMA1000957//HS_{—}3039_A2_C08_MF CIT Approved Human Genomic Sperm Library D Homo sapiens genomic clone Plate=3039 Col=16 Row=E, genomic survey sequence.//1.3e-72:390:94//AQ155121

[7854] F-MAMMA1000962//Homo sapiens clone DJ0756HI 1, WORKING DRAFT SEQUENCE, 5 unordered pieces.//1.8e-58:318:86//AC006001

[7855] F-MAMMA1000968//Homo sapiens DNA sequence from clone 511 B24 on chromosome 20q11.2-12. Contains the TOPI gene for Topoisomerase I, the PLCGI gene for 1-Phosphatidylinositol-4,5-Bisphosphate Phosphodiesterase Gamma 1 (EC 3.1.4.11, PLC-Gamma-1, Phospholipase C-Gamma-1 PLC-II, PLC-148), the KIAA0395 gene for a probable Zinc Finger Homeobox protein and a 60S Ribosomal Protein L23 LIKE pseudogene. Contains a predicted CpG island, ESTs, STSs and GSSs, complete sequence.//1.4e-18:396:65//AL022394

[7856] F-MAMMA1000975//Human DNA sequence from clone 34417 on chromosome Xp 11.21-11.3. Contains a Keratin, Type II Cytoskeletal 8 (Cytokeratin 8, CYK8, KRT8) pseudogene, ESTs and a GSS, complete sequence.//1.4e-79:690:77//AL024458

[7857] F-MAMMA1000979//Homo sapiens PAC clone DJI 186C01 from 7q21.2-q31.1, complete sequence.//0.089:214:66//AC004991

[7858] F-MAMMA1000987//Human PAC clone DJ527C21 from Xq23, complete sequence.//1.1e-58:458:82//AC000114

[7859] F-MAMMA1000998//Human DNA sequence from PAC 997K18 on chromosome 20p12. Contains ESTs and CA repeat.//1.1e-05:439:62//AL021406

[7860] F-MAMMA1001003//Homo sapiens DNA sequence from PAC 93 L7 on chromosome Xq21. Contains part of the CHM (TCD, REP 1) gene coding for RAB Escort protein I (REP-1, RAB proteins geranylgeranyltransferase component A 1, Choroideraemia protein, Tapetochoroidal Dystrophy (TCD) protein). Contains ESTs and an STS, complete sequence.//0.24:166:68//AL022401

[7861] F-MAMMA1001008//Homo sapiens *** SEQUENCING IN PROGRESS ***, WORKING DRAFT SEQUENCE.//1.6e-103:139:99//AJ011929

[7862] F-MAMMA1001021//Homo sapiens clone 24544 beta-dystrobrevin mRNA, partial cds.//6.5e-48:465:76//AF070567

[7863] F-MAMMA1001024//CITBI-E 1-2501 L21.TF.1CITBI-E1 Homo sapiens genomic clone 2501 L21, genomic survey sequence.//1.0:175:62//AQ241701

[7864] F-MAMMA1001030//Homo sapiens G protein-coupled receptor LGR5 (LGR5) mRNA, complete cds.//1.1e-30:753:61//AF061444

[7865] F-MAMMA1001035//Human Chromosome 16 BAC clone CIT987SK-A-1000D7, complete sequence.//7.9e-24:256:76//AC002990

[7866] F-MAMMA1001038//CIT-HSP-2284N2 I.TF CIT-HSP Homo sapiens genomic clone 2284N21, genomic survey sequence.//0.96:78:75//AQ000903

[7867] F-MAMMA1001041//Chicken mRNA for alpha-actinin, complete cds.//2.8e-09:355:63//D26597

[7868] F-MAMMA1001050//Homo sapiens BAC clone RG060P12 from 7q21, complete sequence.//2.6e-40:378:76//AC002457

[7869] F-MAMMA1001059//Mouse RNA helicase and RNA-dependent ATPase from the DEAD box family mRNA, complete cds.//4.8e-97:661:83//L25125

[7870] F-MAMMA1001067//Homo sapiens genomic intron breakpoint sequence of MLL rearrangement, 285 bp.//2.8e-18:110:100//AJ00069

[7871] F-MAMMA1001073//HS_{—}3046_A2_G08_MF CIT Approved Human Genomic Sperm Library D Homo sapiens genomic clone Plate=3046 Col=16 Row=M, genomic survey sequence.//1.0:142:68//AQ098420

[7872] F-MAMMA1001074//Human DNA sequence *** SEQUENCING IN PROGRESS *** from clone 455J7, WORKING DRAFT SEQUENCE.//1.2e-23:386:70//AL031733

[7873] F-MAMMA1001075//Homo sapiens (clone F4) transmembrane protein mRNA sequence.//1.1e-27:559:65//L09749

[7874] F-MAMMA1001078//Homo sapiens chromosome 17, clone hRPK.346_K_{—}10, complete sequence.//2.0e-22:334:69//AC006120

[7875] F-MAMMA1001080//Human immunoglobulin heavy chain variable region (VH III family) from IgM rheumatoid factor.//6.4e-58:327:92//L29155

[7876] F-MAMMA1001082//Homo sapiens Xp22 GSHB-314C4 (Genome Systems Human BAC library) complete sequence.//3.8e-87:695:77//AC004087

[7877] F-MAMMA1001091//Homo sapiens chromosome 19, cosmid F21967, complete sequence.//7.0e-05:594:60//AC005256

[7878] F-MAMMAI100092//Human DNA sequence from PAC 49C23 on chromosome X contains malate dehydrogenase pseudogene and STS.//1.6e-91:174:87//Z93019

[7879] F-MAMMA1001105//Homo sapiens OVO-like 1 binding protein (OVOL1) mRNA, complete cds.//6.4e-23:507:66//AF016045

[7880] F-MAMMA1001110//Homo sapiens chromosome 19, cosmid F16815, complete sequence.//0.77:316:60//AC004637

[7881] F-MAMMA1001126//Homo sapiens PAC 50H2 in the CUTLI locus, complete sequence.//3.3e-21:237:73//AF047825

[7882] F-MAMMA1001133//Human DNA sequence from BAC 57G9 on chromosome 22q12.1 Contains ESTs, CA repeat, GSS.110.97:202:63//Z95116

[7883] F-MAMMA001139//tricarboxylate carrier [rats, liver, mRNA Partial, 2986 nt].//1.6e-84:406:82//S70011

[7884] F-MAMMA1001143//Homo sapiens DNA sequence from cosmid N75B3 on chromosome 22 Contains EST, exon trap, complete sequence.//1.3e-14:182:76//AL022339

[7885] F-MAMMA1001145//Human DNA sequence from cosmid cU115G 1, between markers DXS6791 and DXS8038 on chromosome X contains ESTs and STS.//5.2e-87:714:78//Z71187

[7886] F-MAMMA1001154//CIT-HSP-2341D13.TF CIT-HSP Homo sapiens genomic clone 2341D13, genomic survey sequence.//0.00051:249:61//AQ055735

[7887] F-MAMMA1001161//Homo sapiens chromosome 14, BAC CITB-135H17 containing the RAD51L1 gene, complete sequence.//2.2e-30:410:70//AC004518

[7888] F-MAMMA1001162//Homo sapiens full-length insert cDNA clone ZA79CO1 .//2.4e-13:87:100//AF086123

[7889] F-MAMMA1001181//Mus musculus C2C12 unknown mRNA, partial cds.//9.3e-15:432:60//U31629

[7890] F-MAMMA1001186//Homo sapiens chromosome 17, clone hRPK.74_E_{—}22, complete sequence.//6.8e-57:670:72//AC005696

[7891] F-MAMMA1001191

[7892] F-MAMMA1001198//Mus musculus eps15R mRNA, complete cds.//1.5e-117:759:84//U29156

[7893] F-MAMMA1001202

[7894] F-MAMMA1001203//Homo sapiens chromosome 17, clone hRPK.22_N_{—}12, WORKING DRAFT SEQUENCE, 2 ordered pieces.//1.5e-161:764:98//AC005412

[7895] F-MAMMA1001206//Homo sapiens chromosome 17, clone HC1T421K24, complete sequence.//5.1e-30:535:65//AC004099

[7896] F-MAMMA1100215//Homo sapiens chromosome 19, CIT-HSP BAC 470n8, complete sequence.//8.4e-182:860:98//AC005393

[7897] F-MAMMA1001220//Homo sapiens PAC clone DJ0745K06 from 7q31, complete sequence.//7.7e-58:690:70//AC004875

[7898] F-MAMMA1001222//Mouse loricrin mRNA, complete cds.//2.7e-07:624:58//M34398

[7899] F-MAMMA1001243//Homo sapiens chromosome 17, clone hRPK.192_H_{—}23, complete sequence.//0.91:177:66//AC005726

[7900] F-MAMMA1001244

[7901] F-MAMMA1001249//Human 28S ribosomal RNA psuedogenes and alu repeat region sequence.//6.7e-09:502:58//U67616

[7902] F-MAMMA1100256//Human DNA sequence from clone 441J1 on chromosome 6p24 Contains STS, GSS, complete sequence.//5.0e-37:342:80//Z99495

[7903] F-MAMMA1001259

[7904] F-MAMMA1001260//Homo sapiens mRNA for KIAA0661 protein, complete cds.//8.7e-40:659:64//AB014561

[7905] F-MAMMA1001268//Homo sapiens PAC clone DJ0844F09 from 7 p12-p13, complete sequence.//4.9e-43:265:81//AC004453

[7906] F-MAMMA100127//Salmo salar DNA for a cryptic repeat.//2.6e-06:311:63//AJ012206

[7907] F-MAMMA1001274//Homo sapiens clone DJ0607J02, WORKING DRAFT SEQUENCE, 12 unordered pieces.//6.6e-70:327:83//AC004840

[7908] F-MAMMA1001280//Homo sapiens Xp22 bins 87-93 PAC RPCII-122K4 (Roswell Park Cancer Institute Human PAC Library) complete sequence.//1.0e-05:276:66//AC003035

[7909] F-MAMMA1001292//Human DNA sequence from clone 1170K4 on chromosome 22q12.2-13.1. Contains three novel genes, one of which codes for a Trypsin family protein with class A LDL receptor domains, and the IL2RB gene for Interleukin 2 Receptor, Beta (IL-2 Receptor, CD122 antigen). Contains a putative CpG island, ESTs, and GSSs, complete sequence.//3.6e-98:199:98//AL022314

[7910] F-MAMMA1001296//RPCI11-38B4.TV RPCI-11 Homo sapiens genomic clone RPCI-11-38B4, genomic survey sequence.//4.7e-33:292:71//AQ030084

[7911] F-MAMMA1001298//Homo sapiens chromosome 17, clone hRPK.849_N_{—}15, complete sequence.//1.6e-182:860:98//AC005703

[7912] F-MAMMA1001305//Human DNA sequence from clone 116F5 on chromosome 22q13. Contains part of an unknown gene and part of a RhoGAP (CDC42 GTPAse Activating Protein) LIKE gene. Contains ESTs, STSs, GSSs, genomic marker D22S1168 and a CA repeat polymorphism, complete sequence.//1.9e-70:163:97//Z93244

[7913] F-MAMMA1001322//Human DNA sequence from clone 774124 on chromosome 1q24.1-24.3 Contains protein similar to pregnancy-associated plasma protein A precursor neuronal migration protein astrotactin, ESTs, STS and GSS, complete sequence.//2.6e-19:379:68//AL031290

[7914] F-MAMMA1001324//Human DNA sequence *** SEQUENCING IN PROGRESS *** from clone 197L1, WORKING DRAFT SEQUENCE.//4.5e-131:751:90//AL031390

[7915] F-MAMMA1001330

[7916] F-MAMMA1001341//Sus scrofa.//1.6e-36:420:73//Z46906

[7917] F-MAMMA1001343//Plasmodium falciparum DNA *** SEQUENCING IN PROGRESS * from MAL1P1, WORKING DRAFT SEQUENCE.//1.1e-05:818:58//AL031744

[7918] F-MAMMA1001346

[7919] F-MAMMA1001383//Homo sapiens, WORKING DRAFT SEQUENCE, 52 unordered pieces.//2.0e-44:505:74//AC004086

[7920] F-MAMMA1001388//Human IGF binding protein complex acid-labile subunit a mRNA, complete cds.//1.5e-07:415:58//M86826

[7921] F-MAMMA1001397//Human DNA sequence from clone 462D8 on chromosome 22q11.21-12.1 Contains EST, STS and GSS, complete sequence.//1.6e-23:209:75//AL022332

[7922] F-MAMMA1001408//HS_{—}3242-A1-H11T7 CIT Approved Human Genomic Sperm Library D Homo sapiens genomic clone Plate=3242 Col=21 Row=O, genomic survey sequence.//2.7e-07:181:69//AQ207300

[7923] F-MAMMA1001411//Homo sapiens autosomal dominant polycystic kidney disease type II protein (PKD2) gene, exon 14.//0.98:120:68//AF004872

[7924] F-MAMMA1001419//HS_{—}2053_B1_F12_T7 CIT Approved Human Genomic Sperm Library D Homo sapiens genomic clone Plate=2053 Col=23 Row=L, genomic survey sequence.//1.9e-75:424:93//AQ244585

[7925] F-MAMMA1001420//Homo sapiens chromosome 4 clone B203C23 map 4q25, complete sequence.//2.4e-09:199:70//AC004049

[7926] F-MAMMA1001435//Homo sapiens chromosome 16p11.2 BAC clone CIT987SK-201104, WORKING DRAFT SEQUENCE, 4 unordered pieces.//5.1e-42:558:69//AC004529

[7927] F-MAMMA1001442//Plasmodium falciparum chromosome 2, section 37 of 73 of the complete sequence.//0.0019:516:56//AE001400

[7928] F-MAMMAI100446//Homo sapiens Xp22 BAC GSHB-519E5 (Genome Systems Human BAC library) complete sequence.//3.6e-42:486:70//AC003684

[7929] F-MAMMA1001452//RPCII 1-48022.TJ RPCII 1 Homo sapiens genomic clone R-48022, genomic survey sequence.//5.3e-87:423:98//AQ199294

[7930] F-MAMMA1001465//Human DNA sequence *** SEQUENCING IN PROGRESS *** from clone 414D7, WORKING DRAFT SEQUENCE.//0.00038:114:75//AL033543

[7931] F-MAMMA1001476//Mus musculus uridine kinase mRNA, partial cds.//4.1e-99:604:87/IL31783

[7932] F-MAMMA1001487//Homo sapiens clone DJ1070G24, WORKING DRAFT SEQUENCE, 12 unordered pieces.//1.0e-13:158:77//AC005486

[7933] F-MAMMA1001501//Human mRNA for calcium activated neutral protease large subunit (muCANP, calpain, EC 3.4.22.17).//9.6e-52:438:81//X04366

[7934] F-MAMMA1001502//Human DNA sequence *** SEQUENCING IN PROGRESS *** from clone 356B7, WORKING DRAFT SEQUENCE.//3.7e-152:720:99//AL031714

[7935] F-MAMMA1001510//Human PAC clone DJ43804 from 22q12.1-qter, complete sequence.//1.1e-05:371:61//AC002378

[7936] F-MAMMA1001522

[7937] F-MAMMA1001547

[7938] F-MAMMA1001551//Homo sapiens mRNA for KIAA0462 protein, partial cds.//2.3e-128:614:98//AB007931

[7939] F-MAMMA1001575//Human Chromosome 16 BAC clone CIT987SK-A-815A9, complete sequence.//0.97:154:68//AF001548

[7940] F-MAMMAI1001576//Human gamma-tubulin mRNA, complete cds.//1.8e-95:529:91//M61764

[7941] F-MAMMA1001590//Human DNA sequence from clone 125H2 on chromosome 22q11-12 Contains part of myosin heavy chain gene, EST, CA repeat, STS, GSS, complete sequence.//1.8e-07:104:84//Z98949

[7942] F-MAMMA1001600//HS_{—}3022_A2_H01_T7 CIT Approved Human Genomic Sperm Library D Homo sapiens genomic clone Plate=3022 Col=2 Row=O, genomic survey sequence.//1.6e-66:405:90//AQ163791

[7943] F-MAMMA1001604//Human DNA sequence from clone 1114G22 on chromosome 1q24-25 Contains EST, CA repeat, Ninenin like sequence, complete sequence.//0.00043:715:58//AL008626

[7944] F-MAMMA1001606//j dl 14 Trypanosome Shotgun M13 genomic Trypanosoma brucei brucei genomic clone 2G6, genomic survey sequence.//0.19:266:62//B13685

[7945] F-MAMMA1001620//Homo sapiens monocyte/neutrophil elastase inhibitor gene, complete cds.//9.7e-54:442:69//AF053630

[7946] F-MAMMA1001627//X. borealis ribosomal spacer DNA, with a DNaseI-hypersensitive site.//0.14:221:62//M29833

[7947] F-MAMMA1001630//Homo sapiens chromosome 17, clone hRPK.22_N_{—}12, WORKING DRAFT SEQUENCE, 2 ordered pieces.//2.0e-47:611:71//AC005412

[7948] F-MAMMA1001633//Human zinc finger protein (LD5-1) mRNA, complete cds.//1.1e-42:611:67//U57796

[7949] F-MAMMA1001635//Human BAC clone RGO72E11 from 7q21-7q22, complete sequence.//4.0e-35:407:70//AC000118

[7950] F-MAMMA1001649//Human DNA sequence from clone 353H6 on chromosome Xq25-26.2. Contains the alternatively spliced SMARCAI gene for SWI/SNF related, matrix associated, actin dependent regulator of chromatin, subfamily a, member I (SNF2L1) and a 40S Ribosomal Protein S26 pseudogene. Contains ESTs, STSs and GSSs, complete sequence.//0.44:245:63//AL022577

[7951] F-MAMMA1001654//Mouse transcriptional control element.//0.0025:189:63//M17284

[7952] F-MAMMA1001663//CIT-HSP-2165E16.TR CIT-HSP Homo sapiens genomic clone 2165E16, genomic survey sequence.//9.7e-05:146:66//B95491

[7953] F-MAMMA1001670//HS_{—}3136_A1_G06_MR CIT Approved Human Genomic Sperm Library D Homo sapiens genomic clone Plate=3136 Col=11 Row=M, genomic survey sequence.//3.1e-28:237:85//AQ148779

[7954] F-MAMMA1001671//Homo sapiens chromosome 19, cosmid F23269, complete sequence.//3.3e-181:863:98//AC005614

[7955] F-MAMMA1001679//HS_{—}3054_A1_H11_MR CIT Approved Human Genomic Sperm Library D Homo sapiens genomic clone Plate=3054 Col=21 Row=O, genomic survey sequence.//1.0:89:70//AQ106118

[7956] F-MAMMA1001683//Spermatozopsis similis mRNA for 90 kD basal apparatus-protein.//8.3e-07:480:62//AJ224970

[7957] F-MAMMA1001686//HS_{—}3219_B1_A03_MR CIT Approved Human Genomic Sperm Library D Homo sapiens genomic clone Plate=3219 Col=5 Row=B, genomic survey sequence.//0.00072:180:65//AQ180345

[7958] F-MAMMA1001692//HS_{—}3047_B1_B10_MF CIT Approved Human Genomic Sperm Library D Homo sapiens genomic clone Plate=3047 Col=19 Row=D, genomic survey sequence.//2.5e-94:459:98//AQ134228

[7959] F-MAMMA1001711//Homo sapiens clone DJ0635005, WORKING DRAFT SEQUENCE, 7 unordered pieces.//1.2e-42:316:82//AC004845

[7960] F-MAMMA1001715//CIT-HSP-2347A14.TF CIT-HSP Homo sapiens genomic clone 2347A14, genomic survey sequence.//1.1e-60:413:87//AQ059125

[7961] F-MAMMA1001730//Homo sapiens brain and nasopharyngeal carcinoma susceptibility protein NSG-x mRNA, partial cds.//1.8e-133:646:97//AF095687

[7962] F-MAMMA1001735//chicken brain tubulin beta chain mma.//3.5e-110:740:84//J00913

[7963] F-MAMMA1001740//Human DNA sequence from PAC 136017 on chromosome X contains ESTs and STS.//0.98:416:57//Z72001

[7964] F-MAMMA1001743//Homo sapiens clone DJ0981007, complete sequence.//3.2e-16:194:75//AC006017

[7965] F-MAMMA1001744//Homo sapiens DNA sequence from clone 46618 on chromosome Xq11.1-13.2. Contains an unknown gene similar to Coagulation Factor V (Activated Protein C Cofactor), Coagulation Factor VIII (Procoagulant Component) and Ceruloplasmin (EC 1.16.3.1, Ferroxidase). Contains ESTs and an STS, complete sequence.//0.0036:181:66//AL030998

[7966] F-MAMMA1001745//Homo sapiens BAC clone 529Fl 1 from 8q21, complete sequence.//1.2e-60:822:68//AF070718

[7967] F-MAMMA1001751//Human potassium channel KCNOI mRNA, complete cds.//1.2e-35:583:65//U90065

[7968] F-MAMMA1001754//Bos taurus vacuolar proton pump subunit SFD alpha isoform (SFD) mRNA, complete cds.//8.4e-102:627:87//AF041338

[7969] F-MAMMA1001757//HS 2058_B2_C04_MR CIT Approved Human Genomic Sperm Library D Homo sapiens genomic clone Plate=2058 Col=8 Row=F, genomic survey sequence.//1.7e-24:173:88//AQ243865

[7970] F-MAMMA1001760//Human DNA sequence from clone 354N19 on chromosome 6q22. Contains the 3′ part of the gene for Mannosyl-Oligosaccharide Alpha-1,2-Mannosidase (Man(9)-alpha-mannosidase, EC 3.2.1.113), a Cytochrome C Oxidase Polypeptide I (EC 1.9.3.1) pseudogene and a pseudogene similar to 60S Ribosomal Protein L13A. Contains genomic markers D6S287 and D6S1696, ESTs, STSs, GSSs and two.CA repeat polymorphisms, complete sequence.//6.6e-76:349:87//AL022722

[7971] F-MAMMA1001764//Saccharomyces douglasii mitochondrial cytochrome c oxidase subunit I (COXI) gene, complete cds.//0.23:633:57//M97514

[7972] F-MAMMA1001768//Bovine herpesvirus I complete genome.//2.3e-1I :547:60//AJ004801

[7973] F-MAMMA1001769//Homo sapiens 12q13.1 PAC RPCII-228P16 (Roswell Park Cancer Institute Human PAC Library) complete sequence.//1.1e-76:509:78//AC004801

[7974] F-MAMMA1001771//M. musculus mRNA for semaphorin B.//2.7e-106:744:82//X85991

[7975] F-MAMMA1001783//Human PAC clone 127H14 from 12q, complete sequence.//6.0e-20:228:75//AC002563

[7976] F-MAMMA1001785

[7977] F-MAMMA1001788//Human DNA sequence from clone 425C 14 on chromosome 6q22 Contains the HSF2 gene for Heat Shock Factor 2 (Heat Shock Transcription Factor 2, HSTF 2) and an unknown gene similar to the placental protein DIFF33 gene. Contains ESTs, STSs and GSSs, complete sequence.//5.0e-05:152:74//Z99129

[7978] F-MAMMA1001790//Homo sapiens chromosome 12 p13.3 clone RPCI3-454B23, WORKING DRAFT SEQUENCE, 48 unordered pieces.//4.5e-53:318:80//AC005845

[7979] F-MAMMA1001806//Homo sapiens chromosome 19, cosmid R29368, complete sequence.//1H.0:131:67//AC004262

[7980] F-MAMMAI1001812//Human Chromosome X clone bWXD187, complete sequence.//3.0e-34:257:83//AC004383

[7981] F-MAMMA1001815//Homo sapiens PAC clone DJO850GO1 from 7q21.2-q22, complete sequence.//5.2e-61:516:79//AC004128

[7982] F-MAMMA1100817//Homo sapiens 12q24 PAC RPCI1-261P5 (Roswell Park Cancer Institute Human PAC library) complete sequence.//3.1e-32:295:78//AC004031

[7983] F-MAMMA1001818//Homo sapiens chromosome 21q22.3, PAC clones 314N7, 225L15, BAC clone 7B7, complete sequence bases 1.333303.//0.71:179:67//AJ001930

[7984] F-MAMMA1001820//Rattus norvegicus mRNA for PAG608 gene.//3.0e-91:726:79//Y 13148

[7985] F-MAMMA1001824//HS_{—}3108_A1_G 12_MR CIT Approved Human Genomic Sperm Library D Homo sapiens genomic clone Plate=3108 Col=23 Row=M, genomic survey sequence.//3.4e-05:119:74//AQ107508

[7986] F-MAMMA11001836//Homo sapiens chromosome 18, clone hRPK.537_E_{—}1, complete sequence.//3.4e-45:312:85//AC006211

[7987] F-MAMMA1001837//Rattus norvegicus zinc finger protein Y1 (RLZF-Y) mRNA, complete cds.//4.5e-51:480:75//AF052042

[7988] F-MAMMA1001848//CITBI-El-2516P17.TF CITB1-E1 Homo sapiens genomic clone 2516P17, genomic survey sequence.//1.0e-100:486:98//AQ279620

[7989] F-MAMMA1001851//Human DNA from overlapping chromosome 19-specific cosmids R30072 and R28588, genomic sequence, complete sequence.//5.1e-07:197:67//AC002390

[7990] F-MAMMA1001854

[7991] F-MAMMA1001858//RPCII 1-11L22.TP RPCI-11 Homo sapiens genomic clone RPCI-11-1 IL22, genomic survey sequence.//0.091:161:65//B75631

[7992] F-MAMMA1001864//Human PAC clone DJ0205E24 from Xq23, complete sequence.//2.6e-09:397:61//AC003013

[7993] F-MAMMA1001868//HS_{—}2196_B2_A12_MR CIT Approved Human Genomic Sperm Library D Homo sapiens genomic clone Plate=2196 Col=24 Row=B, genomic survey sequence.//5.8e-13:86:100//AQ032455

[7994] F-MAMMA1001874//H. sapiens CpG island DNA genomic Mse1 fragment, clone 63h5, reverse read cpg63h5.rt1a.//1.0:127:63//Z62129

[7995] F-MAMMA1001878//Human DNA sequence from BAC 999D10 on chromosome 22q13.3. Contains two BAC end-sequences (GSSs).//1.7e-19:372:67//Z94802

[7996] F-MAMMA1100880//RPCII 1-90K3.TJ RPCII 1 Homo sapiens genomic clone R-90K3, genomic survey sequence.//6.6e-11:362:62//AQ283465

[7997] F-MAMMA1001890//Human DNA sequence *** SEQUENCING IN PROGRESS *** from clone 508115, WORKING DRAFT SEQUENCE.//1.8e-45:317:86//AL021707

[7998] F-MAMMA1001907//Human DNA sequence *** SEQUENCING IN PROGRESS *** from clone 424J12, WORKING DRAFT SEQUENCE.//2.7e-23:255:77//Z82207

[7999] F-MAMMA1001908//HS_{—}2225_A1_A03_MR CIT Approved Human Genomic Sperm Library D Homo sapiens genomic clone Plate=2225 Col=5 Row=A, genomic survey sequence.//5.4e-08:264:62//AQ301597

[8000] F-MAMMA1001931//HS_{—}3049_B2_D09_MR CIT Approved Human Genomic Sperm Library D Homo sapiens genomic clone Plate=3049 Col=18 Row=H, genomic survey sequence.//1.7e-47:295:90//AQ100157

[8001] F-MAMMA1001956//H. sapiens DNA sequence.//0.056:233:66//Z22493

[8002] F-MAMMA1001963//Homo sapiens adenylosuccinate lyase gene, complete cds.//0.99:173:68//AF106656

[8003] F-MAMMA1001969//Human DNA sequence from cosmid 232L22, between markers DXS366 and DXS87 on chromosome X contains ESTs glycerol kinase pseudogene.//5.3e-63:479:78//Z73986

[8004] F-MAMMA1100970//Homo sapiens BAC clone BK085E05 from 22q12.1-qter, complete sequence.//1.4e-126:699:93//AC003071

[8005] F-MAMMA1001992//HS_{—}3078_A1A09_MF CIT Approved Human Genomic Sperm Library D Homo sapiens genomic clone Plate=3078 Col=17 Row=A, genomic survey sequence.//3.3e-08:257:65//AQ143646

[8006] F-MAMMA1002009//Homo sapiens chromosome 17, clone hRPK.214_{—}0_{—}1, complete sequence.//1.5e-07:244:62//AC005224

[8007] F-MAMMA1002011//HS_{—}3252_B1_B05_MR CIT Approved Human Genomic Sperm Library D Homo sapiens genomic clone Plate=3252 Col=9 Row=D, genomic survey sequence.//1.3e-07:170:69//AQ304711

[8008] F-MAMMA1002032//Homo sapiens chromosome 12 p13.3, WORKING DRAFT SEQUENCE, 37 unordered pieces.//2.1e-34:315:79//AC004803

[8009] F-MAMMA1002033//HSS_{—}3023_A2_G04_T7 CIT Approved Human Genomic Sperm Library D Homo sapiens genomic clone Plate=3023 Col=8 Row=M, genomic survey sequence.//4.3e-69:366:9411AQ105493

[8010] F-MAMMA1002041//Genomic sequence from Human 9q34, complete sequence.//5.3e-85:439:82//AC001227

[8011] F-MAMMA1002042//Homo sapiens chromosome 3, clone hRPK.165_I_{—}16, complete sequence.//1.4e-20:314:70//AC005669

[8012] F-MAMMA1002047//Homo sapiens 12p13.3 BAC RPCI11-429A20 (Roswell Park Cancer Institute Human BAC Library) complete sequence.//6.8e-14:526:62//AC005906

[8013] F-MAMMA1002056//Human DNA sequence from clone 1189B24 on chromosome Xq25-26.3. Contains NADH-Ubiquinone Oxidoreductase MLRQ subunit (EC 1.6.5.3, EC 1.6.99.3, CI-MLRQ), Tubulin Beta and Proto-oncogene Tyrosine-protein Kinase FER (EC 2.7.1.112, P94-FER, C-FER, TYK3) pseudogenes, and part of a novel gene similar to hypothetical proteins S. pombe C22F3.14C and C. elegans C16A3.8. Contains ESTs, an STS and GSSs, complete sequence.//1.1e-47:648:71//AL030996

[8014] F-MAMMA1002058//Homo sapiens PAC clone DJ0732C22 from 7 p11.2-p13, complete sequence.//2.4e-19:256:74//AC004869

[8015] F-MAMMA1002068//Homo sapiens, clone hRPK.2_A_{—}1, complete sequence.//5.4e-41:407:78//AC006197

[8016] F-MAMMA1002078//Human DNA sequence from PAC 106120 on chromosome 22q12 Contains ESTs and STS, complete sequence.//0.021:333:64//Z81313

[8017] F-MAMMA1002082

[8018] F-MAMMA1002084//Caenorhabditis elegans cosmid F28C12, complete sequence.//0.032:469:58//Z93380

[8019] F-MAMMA1002093//HS_{—}3050_B1_F06_MR CIT Approved Human Genomic Sperm Library D Homo sapiens genomic clone Plate=3050 Col=1 I Row=L, genomic survey sequence.//1.0:77:71//AQ105997

[8020] F-MAMMA1002108//Homo sapiens anion exchanger 3 gene, exons 1 and 2 and complete 5′UTR.//8.3e-10:464:60//AF017308

[8021] F-MAMMA1002118

[8022] F-MAMMA1002125//Homo sapiens chromosome 17, clone HC1T217L10, complete sequence.//1.0e-35:619:68//AC003962

[8023] F-MAMMA1002132//RPCI11-78F11.TJ RPCII 1 Homo sapiens genomic clone R-78Fl 1, genomic survey sequence.//1.0e-90:357:97//AQ286460

[8024] F-MAMMA1002140//Homo sapiens 12q24 PAC RPCI1-66E7 (Roswell Park Cancer Institute Human PAC library) complete sequence.//1.6e-45:583:64//AC004216

[8025] F-MAMMA1002143//Human serum constituent protein (MSE55) mRNA, complete cds.//6.0e-11:192:70//M88338

[8026] F-MAMMA1002145//Human DNA sequence *** SEQUENCING IN PROGRESS *** from clone 102D24, WORKING DRAFT SEQUENCE.//0.0028:570:59//AL021391

[8027] F-MAMMA1002153//HS_{—}3005_A1_D04_MF CIT Approved Human Genomic Sperm Library D Homo sapiens genomic clone Plate=3005 Col=7 Row=G, genomic survey sequence.//4.9e-41:213:99//AQ132213

[8028] F-MAMMA1002155//Human DNA sequence *** SEQUENCING IN PROGRESS *** from clone 462023, WORKING DRAFT SEQUENCE.//1.2e-45:303:78//AL031431

[8029] F-MAMMA1002156

[8030] F-MAMMA1002158//CITBI-EI-2508P18.TR CITBI-EI Homo sapiens genomic clone 2508P18, genomic survey sequence.//7.1e-42:255:92//AQ266165

[8031] F-MAMMA1002170//Homo sapiens chromosome 17, clone HC1T187M2, complete sequence.//2.0e-81:604:81//AC004448

[8032] F-MAMMA1002174//Homo sapiens clone UWGC:y67c126 from 6p21, complete sequence.//3.2e-43:333:83//AC004212

[8033] F-MAMMA1002198//H. sapiens thiol-specific antioxidant protein mRNA.//1.0e-34:121:98//Z22548

[8034] F-MAMMA1002209//HS_{—}2197_B1_E07_MR CIT Approved Human Genomic Sperm Library D Homo sapiens genomic clone Plate=2197 Col=13 Row=J, genomic survey sequence.//9.6e-18:163:84//AQ210058

[8035] F-MAMMA1002215//Homo sapiens anion exchanger 3 gene, exons 1 and 2 and complete 5′UTR.//6.3e-08:435:60//AF017308

[8036] F-MAMMA1002219//Rattus norvegicus rexo70 mRNA, complete cds.//1.8e-124:752:87//AF032667

[8037] F-MAMMA1002230//Plasmodium falciparum 3D7 chromosome 12 PFYAC588 genomic sequence, WORKING DRAFT SEQUENCE, 2 unordered pieces.//0.67:356:59//AC004710

[8038] F-MAMMA1002236//Rattus norvegicus initiation factor eIF-2B gamma subunit (eIF-2B gamma) mRNA, complete cds.//9.3e-140:836:87//U38253

[8039] F-MAMMA1002243//Homo sapiens chromosome 17, clone hRPK.112_H_{—}10, complete sequence.//1.4e-145:691:98//AC005666

[8040] F-MAMMA1002250//Homo sapiens chromosome 16, P1 clone 109-9G (LANL), complete sequence.//6.0e-138:660:98//AC005600

[8041] F-MAMMA1002267//Homo sapiens chromosome 2, P1 clone 777H5 (LBNL H27), complete sequence.//0.066:333:60//AC003676

[8042] F-MAMMA1002268//Mus musculus sphingosine kinase (SPHKla) mRNA, partial cds.//1.1e-39:404:74//AF068748

[8043] F-MAMMA1002269//HS_{—}3163_B1_D03_MR CIT Approved Human Genomic Sperm Library D Homo sapiens genomic clone Plate=3163 Col=5 Row=H, genomic survey sequence.//1.0:150:63//AQ171576

[8044] F-MAMMA1002282//Human Chromosome 16 BAC clone CIT987SK-327024, complete sequence.//1.5e-22:315:67//AC003108

[8045] F-MAMMA1002292//B. garinii (strain T1s1) p83/100 gene (partial).//0.73:200:64//X81533

[8046] F-MAMMA1002293//Homo sapiens clone DJI 147A01, WORKING DRAFT SEQUENCE, 25 unordered pieces.//1.6e-56:408:75//AC006023

[8047] F-MAMMA1002294//Sequence 2 from patent WO9516779.//1.8e-06:401:62//A45258

[8048] F-MAMMA1002297

[8049] F-MAMMA1002298//Homo sapiens DNA from chromosome 19, cosmid R29144, complete sequence.//0.0056:525:61//AC004221

[8050] F-MAMMA1002299//CIT-HSP-2345B2.TR CIT-HSP Homo sapiens genomic clone 2345B2, genomic survey sequence.//1.2e-90:446:98//AQ053994

[8051] F-MAMMA1002308//Human DNA sequence *** SEQUENCING IN PROGRESS *** from clone 850H21, WORKING DRAFT SEQUENCE.//1.3e-35:329:78//AL031680

[8052] F-MAMMA1002310//Human gastric (H++K+)-ATPase gene, complete cds.//0.0060:301:60//J05451

[8053] F-MAMMA100231//Human Chromosome 15q11-q13 clone pDJ276c12 from the Prader-Willi/Angelman syndrome region, WORKING DRAFT SEQUENCE, 3 unordered pieces.//8.6e-50:327:69//AC004737

[8054] F-MAMMA1002312//Homo sapiens DNA sequence from PAC 435D1 on chromosome Xq25. Contains ESTs and STS.//1.3e-09:741:58//Z86064

[8055] F-MAMMA1002317

[8056] F-MAMMA1002319//Homo sapiens chromosome 19, fosmid 39347, complete sequence.//1.9e-158:746:99//AC005756

[8057] F-MAMMA1002322//Homo sapiens Chromosome 11p14.3 PAC clone pDJ1034g4, complete sequence.//5.3e-52:617:70//AC004796

[8058] F-MAMMA1002329//Homo sapiens RaP2 interacting protein 8 (RPIP8) mRNA, complete cds.//0.22:143:67//U93871

[8059] F-MAMMA1002332//Human DNA sequence *** SEQUENCING IN PROGRESS *** from clone 30G7, WORKING DRAFT SEQUENCE.//1.6e-31:287:74//AL034402

[8060] F-MAMMA1002333//Mycobacterium tuberculosis H37Rv complete genome; segment 148/162.//2.5e-09:674:59//AL022022

[8061] F-MAMMA1002339//Homo sapiens chromosome 21q22.3, cosmid clone Q4H9 complete sequence bases 1.41604.//2.1e-57:522:77//AJ011932

[8062] F-MAMMA1002347//Homo sapiens BAC clone RG136N17 from 7 p15-p21, complete sequence.//2.0e-14:258:69//AC004129

[8063] F-MAMMA1002351//Human DNA sequence *** SEQUENCING IN PROGRESS *** from clone 1059H15, WORKING DRAFT SEQUENCE.//7.8e-132:723:91//AL022100

[8064] F-MAMMA1002352//Human DNA sequence *** SEQUENCING IN PROGRESS * from clone 12803, WORKING DRAFT SEQUENCE.//5.8e-17:326:70//Z98742

[8065] F-MAMMA1002353//Homo sapiens clone DJ0292L20, WORKING DRAFT SEQUENCE, 2 unordered pieces.//1.1e-14:399:63//AC004825

[8066] F-MAMMA1002355//Human DNA sequence *** SEQUENCING IN PROGRESS *** from clone 109G6, WORKING DRAFT SEQUENCE.//3.7e-43:420:75//AL023879

[8067] F-MAMMA1002356//Plasmodium falciparum 3D7 chromosome 12 PFYAC812 genomic sequence, WORKING DRAFT SEQUENCE, 8 unordered pieces.//0.0022:534:59//AC004153

[8068] F-MAMMA1002359//Homo sapiens 12 p13.3 PAC RPCI5-1180D12 (Roswell Park Cancer Institute Human PAC Library) complete sequence.//5.3e-18:156:75//AC005831

[8069] F-MAMMA1002360//Human DNA sequence from cosmid L21F12B, Huntington's Disease Region, chromosome 4 p16.3, contains EST.//4.9e-43:353:69//Z68885

[8070] F-MAMMA1002361//Human DNA sequence from clone 342B11 on chromosome 22q12.1-12.3. Contains ESTs and a GSS, complete sequence.//1.8e-22:282:74//AL008719

[8071] F-MAMMA1002362//Platemys spixii CR1-like LINE, partial sequence.//0.00058:83:79//D82938

[8072] F-MAMMA1002380//CIT-HSP-2383K24.TF CIT-HSP Homo sapiens genomic clone 2383K24, genomic survey sequence.//4.4e-10:85:92//AQ196889

[8073] F-MAMMA1002384//RPCII 1-80J20.TV RPCII 1 Homo sapiens genomic clone R-80J20, genomic survey sequence.//2.7e-56:286:98//AQ284134

[8074] F-MAMMA1002385//CIT-HSP-2328G13.TF CIT-HSP Homo sapiens genomic clone 2328G13, genomic survey sequence.//5.5e-46:335:84//AQ043985

[8075] F-MAMMA1002392//Homo sapiens PAC clone DJ0797C05 from 7q31, complete sequence.//8.5e-29:273:78//AC004888

[8076] F-MAMMA100241//Human DNA sequence from clone 1044017 on chromosome Xp 11.3-11.4 Contains GSS and STS, complete sequence.//8.2e-09:287:63//AL023875

[8077] F-MAMMA1002413//Plasmodium falciparum (strain Dd2) variant-specific surface protein (var-1) gene, complete cds.//9.6e-08:730:57//L40608

[8078] F-MAMMA1002417//Human DNA sequence *** SEQUENCING IN PROGRESS *** from clone 30G7, WORKING DRAFT SEQUENCE.//4.1e-06:181:72//AL034402

[8079] F-MAMMA1002427//*** SEQUENCING IN PROGRESS *** Homo sapiens chromosome 4, BAC clone C0366H07; HTGS phase 1, WORKING DRAFT SEQUENCE, 28 unordered pieces.//1.3e-51:593:72//AC004604

[8080] F-MAMMA1002428

[8081] F-MAMMA1002434//Homo sapiens DNA sequence from PAC 958B3 on chromosome Xp22.11-Xp22.22. Contains ESTs STS and CpG island.//7.3e-56:388:81//Z93023

[8082] F-MAMMA1002446//CIT-HSP-2324022.TR CIT-HSP Homo sapiens genomic clone 2324022, genomic survey sequence.//2.3e-56:302:95//AQ027479

[8083] F-MAMMA1002454//Homo sapiens PAC clone DJ1136G13 from 7q35-q36, complete sequence.//1.1e-54:190:94//AC005229

[8084] F-MAMMA1002461//Rattus norvegicus calcium channel alpha-1 subunit gene, partial cds.//0.00045:457:60//U14005

[8085] F-MAMMA1002470//Saccharomyces cerevisiae chromosome VIII cosmid 9205.//9.7e-33:709:60//U10556

[8086] F-MAMMA1002475//Homo sapiens 12 p13.3 PAC RPCI3-34013 (Roswell Park Cancer Institute Human PAC Library) complete sequence.//0.092:506:58//AC004671

[8087] F-MAMMA1002480//Homo sapiens clone RG228D17, WORKING DRAFT SEQUENCE, 2 unordered pieces.//0.025:100:76//AC005077

[8088] F-MAMMA1002485//Homo sapiens stanniocalcin-2 (STC-2) mRNA, complete cds.//2.9e-118:560:98//AF055460

[8089] F-MAMMA1002494//Homo sapiens Xp22-175-176 BAC GSHB-484017 (Genome Systems Human BAC Library) complete sequence.//1.5e-22:297:73//AC005913

[8090] F-MAMMA1002498//Human PAC clone DJ327AI9 from Xq25-q26, complete sequence.//7.2e-10:330:64//AC002477

[8091] F-MAMMA1002524//Homo sapiens huntingtin gene, partial exon.//0.0080:124:72//L49359

[8092] F-MAMMA1002530//Homo sapiens cytosolic phospholipase A2 gamma (cPLA2 gamma) mRNA, complete cds.//1.4e-160:775:97//AF065214

[8093] F-MAMMA1002545//Homo sapiens chromosome 17, clone hRPK.74_E_{—}22, complete sequence.//1.9e-41:345:80//AC005696

[8094] F-MAMMA1002554

[8095] F-MAMMA1002556

[8096] F-MAMMA1002566

[8097] F-MAMMA1002571//CIT-HSP-2296N17.TR CIT-HSP Homo sapiens genomic clone 2296N17, genomic survey sequence.//1.7e-07:76:90//AQ006579

[8098] F-MAMMA1002573//Homo sapiens DNA, trinucleotide repeats region, clone GAA C27.//2.7e-08:195:70//AB018507

[8099] F-MAMMA1002585

[8100] F-MAMMA1002590//Homo sapiens BAC clone GS250A16 from 7p21-p22, complete sequence.//2.1e-26:361:69//AC005019

[8101] F-MAMMA1002597//Human DNA sequence *** SEQUENCING IN PROGRESS *** from clone 1103G7, WORKING DRAFT SEQUENCE.//1.3e-34:550:69//AL034548

[8102] F-MAMMA1002598//H. sapiens mRNA for ribosomal protein L7.//1.1e-21:123:100//X57958

[8103] F-MAMMA1002603//Homo sapiens chromosome 20, BAC clone 99 (LBNL H80), complete sequence.//0.0018:358:61//AC005220

[8104] F-MAMMA1002612//Homo sapiens PAC clone DJ0696N01 from 7p21-p22, complete sequence.//2.1e-13:336:63//AC004861

[8105] F-MAMMA1002617//Homo sapiens clone DJ 1070G24, WORKING DRAFT SEQUENCE, 12 unordered pieces.//0.14:229:64//AC005486

[8106] F-MAMMA1002618

[8107] F-MAMMA1002619//Homo sapiens chromosome 21 PAC RPCIP704E 14135Q2.//9.5e-71:319:85//AJ010598

[8108] F-MAMMA1002622//Homo sapiens advillin mRNA, complete cds.//1.5e-20:157:90//AF041449

[8109] F-MAMMA1002623//Homo sapiens T-cell receptor alpha delta locus from bases 501613 to 752736 (section 3 of 5) of the Complete Nucleotide Sequence.//8.3e-06:137:72//AE000660

[8110] F-MAMMA1002625//Human DNA sequence *** SEQUENCING IN PROGRESS *** from clone 1056L3, WORKING DRAFT SEQUENCE.//1.9e-171:819:98//AL031727

[8111] F-MAMMA1002629//Human BAC clone RG385F02 from 7 p15, complete sequence.//4.8e-85:478:78//AC003093

[8112] F-MAMMA1002636//Human POU daomain factor (Bm-3a) gene, exon 2, complete cds.//5.6e-09:499:62//U10063

[8113] F-MAMMA1002637//Mus musculus kinesin light chain 2 (Klc2) mRNA, complete cds.//3.6e-115:785:82//AF055666

[8114] F-MAMMA1002646//Homo sapiens chromosome 2 clone 101B6 map 2 p11, complete sequence.//1.5e-45:291:90//AC002038

[8115] F-MAMMA1002650//Homo sapiens candidate tumor suppressor HIC-1 (HIC-1) gene, complete cds.//6.6e-06:661:59//L41919

[8116] F-MAMMA1002655//HS_{—}2003_A2_Al I_MR CIT Approved Human Genomic Sperm Library D Homo sapiens genomic clone Plate=2003 Col=22 Row=A, genomic survey sequence.//9.0e-15:198:74//AQ224233

[8117] F-MAMMA1002662

[8118] F-MAMMA1002665//Homo sapiens BAC clone GS588G18 from 7 p12-p14, complete sequence.//1.4e-37:235:84//AC005029

[8119] F-MAMMA1002671//Human Cdk-inhibitor p57KIP2 (KIP2) mRNA, complete cds.//0.00027:272:64//U22398

[8120] F-MAMMA1002673

[8121] F-MAMMA1002684//Homo sapiens mRNA for KIAA0214 protein, complete cds.//3.7e-161:752:99//D86987

[8122] F-MAMMA1002685//Human DNA sequence *** SEQUENCING IN PROGRESS *** from clone 39417, WORKING DRAFT SEQUENCE.//6.2e-45:510:70//AL023585

[8123] F-MAMMA1002698//HS_{—}3024_B1_C06_T7 CIT Approved Human Genomic Sperm Library D Homo sapiens genomic clone Plate=3024 Col=1 I Row=F, genomic survey sequence.//1.7e-10:155:75//AQ072214

[8124] F-MAMMA1002699//Rattus norvegicus EH domain binding protein Epsin mRNA, complete cds.//5.9e-75:509:83//AF018261

[8125] F-MAMMA1002701//Homo sapiens gene for AF-6, complete cds.//1.2e-159:749:99//AB011399

[8126] F-MAMMA1002708//Human DNA sequence from clone 267M20 on chromosome Xq22.2-22.3. Contains part of the DIAPH2 gene and a pseudogene, ESTs, STSs and GSSs, complete sequence.//3.0e-57:347:79//AL031053

[8127] F-MAMMA1002711//Homo sapiens BAC clone GS589PI9 from 7 p13-p14, complete sequence.//3.4e-31:484:69//AC005030

[8128] F-MAMMA1002721//CIT-HSP-2350M5.TR CIT-HSP Homo sapiens genomic clone 2350M5, genomic survey sequence.//1.4e-06:265:63//AQ061245

[8129] F-MAMMA1002727//Human DNA sequence from clone 67K17 on chromosome 6q24.1-24.3. Contains the HIVEP2 (Schnurri-2) gene for HIV type I Enhancer-binding Protein 2, and a possible pseudogene in an intron of this gene. Contains STSs and GSSs and an AAAT repeat polymorphism, complete sequence.//0.18:386:58//AL023584

[8130] F-MAMMA1002728//Human DNA sequence from PAC 296K21 on chromosome X contains cytokeratin exon, delta-aminolevulinate synthase (erythroid); 5-aminolevulinic acid synthase.(EC 2.3.1.37). 6-phosphofructo-2-kinase/fructose-2,6-bisphosphatase (EC 2.7.1.105, EC 3.1.3.46), ESTs and STS.//3.2e-05:362:631/Z83821

[8131] F-MAMMA1002744//Plasmodium falciparum chromosome 2, section 5 of 73 of the complete sequence.//0.00010:535:58//AE001368

[8132] F-MAMMA1002746//Homo sapiens chromosome 17, clone hRPK.136_H_{—}19, complete sequence.//1.2e-182:880:97//AC005856

[8133] F-MAMMA1002748//Homo sapiens 3p22 Contig 7 PAC RPCI4-672N11 (Roswell Park Cancer Institute Human PAC Library) complete sequence.//2.7e-175:829:98//AC006055

[8134] F-MAMMA1002754//Homo Sapiens Chromosome X clone bWXD171, WORKING DRAFT SEQUENCE, 1 ordered pieces.//3.1e-31:372:75//AC004676

[8135] F-MAMMA1002758//Homo sapiens KIAA0442 mRNA, partial cds.//3.3e-26:151:98//AB007902

[8136] F-MAMMA1002764//Human Chromosome 11 Cosmid cSRL166al, complete sequence.//5.2e-49:355:81//U73636

[8137] F-MAMMA1002765//RPCII 1-20A22.TPB RPCI-11 Homo sapiens genomic clone RPCI-11-20A22, genomic survey sequence.//6.7e-13:155:76//B92153

[8138] F-MAMMA1002769//CIT-HSP-2323GI.TF CIT-HSP Homo sapiens genomic clone 2323GI, genomic survey sequence.//9.7e-21:151:90//AQ028244

[8139] F-MAMMA1002775//Human ABL gene, exon lb and intron lb, and putative M8604 Met protein (M8604 Met) gene, complete cds.//5.6e-105:179:99//U07561

[8140] F-MAMMA1002780//Plasmodium falciparum DNA *** SEQUENCING IN PROGRESS *** from contig 3-08, complete sequence.//0.071:277:58//Z98546

[8141] F-MAMMA1002782//HS_{—}3213_B2_B08_MR CIT Approved Human Genomic Sperm Library D Homo sapiens genomic clone Plate=3213 Col=16 Row=D, genomic survey sequence.//0.00018:219:63//AQ175845

[8142] F-MAMMA1002796

[8143] F-MAMMA1002807//Human Chromosome X PAC RPC11-290C9 from the Pieter de Jong Human PAC library; complete sequence.//6.9e-22:332:69//AC002404

[8144] F-MAMMA1002820//Homo sapiens Xp22 bins 87-93 PAC RPCI1-122K4 (Roswell Park Cancer Institute Human PAC Library) complete sequence.//5.9e-11:483:62//AC003035

[8145] F-MAMMA1002830//Homo sapiens chromosome 17, clone hCIT529110, complete sequence.//1.0e-64:320:83//AC002553

[8146] F-MAMMA1002833//Homo sapiens PAC clone DJ0745K06 from 7q31, complete sequence.//2.8e-47:413:80//AC004875

[8147] F-MAMMA1002835

[8148] F-MAMMA1002838//A-916H10.TP CIT978SK Homo sapiens genomic clone A-916H10, genomic survey sequence.//1.1e-39:164:83//B14462

[8149] F-MAMMA1002842//Mus musculus c-Cb1 associated protein CAP mRNA, complete cds.//1.9e-62:373:81//U58883

[8150] F-MAMMA1002843//Homo sapiens mRNA for KIAA0810 protein, partial cds.//1.7e-135:635:99//AB018353

[8151] F-MAMMA1002844//Fl 707-T7 IGF Arabidopsis thaliana genomic clone F1707, genomic survey sequence.//6.7e-17:383:66//B111616

[8152] F-MAMMA1002858

[8153] F-MAMMA1002868//RPCII 1-54F9.TJ RPCII 1 Homo sapiens genomic clone R-54F9, genomic survey sequence.//8.3e-81:392:99//AQ081566

[8154] F-MAMMA1002869//Sequence 1 from patent U.S. Pat. No. 5,552,529.//2.2e-86:696:78//I125863

[8155] F-MAMMA1002871//Lupinus angustifolius nodulin-45 gene, complete cds.//0.029:370:59//L12388

[8156] F-MAMMA1002880//RPCII 1-23M23.TV RPCI-11 Homo sapiens genomic clone RPCI-11-23M23, genomic survey sequence.//1.8e-20:271:74//B86518

[8157] F-MAMMA1002881//Homo sapiens mRNA for 25 kDa trypsin inhibitor, complete cds.//1.2e-28:680:61//D45027

[8158] F-MAMMA1002886//Human DNA sequence *** SEQUENCING IN PROGRESS *** from clone 380AI, WORKING DRAFT SEQUENCE.//0.00040:505:57//Z97653

[8159] F-MAMMA1002887//HS_{—}3238_B2_G08_MR CIT Approved Human Genomic Sperm Library D Homo sapiens genomic clone Plate=3238 Col=16 Row=N, genomic survey sequence.//5.5e-79:401:97//AQ219814

[8160] F-MAMMA1002890//Mus musculus MHC class III region RD gene, partial cds; Bf, C2, G9A, NG22, G9, HSP70, HSP70, HSC70t, and smRNP genes, complete cds; G7A gene, partial cds; and unknown genes.//4.6e-35:136:73//AF109906

[8161] F-MAMMA1002892//Mouse Cosmid ma66al00 from 14D1-D2, complete sequence.//5.7e-14:450:60//AC004096

[8162] F-MAMMA1002895//H. sapiens CpG island DNA genomic Mse1 fragment, clone 46b6, forward read cpg46b6.ft1a.113.7e-36:190:100//Z58616

[8163] F-MAMMA1002908//Penaeus monodon microsatellite locus Pmo27.//1.1e-05:195:62//AF068828

[8164] F-MAMMA1002909//Human Chromosome 11 pac pDJ205d23, complete sequence.//1.0e-13:457:61//AC002402

[8165] F-MAMMA1002930//Homo sapiens Xp22 BAC GSHB-512P14 (Genome Systems Human BAC library) complete sequence.//0.25:260:62//AC004467

[8166] F-MAMMA1002937//H. sapiens ZNF74- I mRNA.//6.3e-13:577:59//X71623

[8167] F-MAMMA1002938//Homo sapiens mRNA for KIAA0698 protein, complete cds.//5.1e-193:910:98//AB014598

[8168] F-MAMMA1002941//Homo sapiens Chromosome 22q11.2 BAC Clone b437g10 In BCRL2-GGT Region, complete sequence.//2.7e-23:174:77//AC004032

[8169] F-MAMMA1002947//Rhodobacter capsulatus strain SB1003, partial genome.//1.3e-09:475:61//AF010496

[8170] F-MAMMA1002964//Human thiopurine methyltransferase (TPMT) gene, exon 5.//0.0029:314:60//AF019366

[8171] F-MAMMA1002970//Human DNA sequence from PAC 436M11 on chromosome Xp22.11-22.2. Contains the serine threonine protein phosphatase gene PPEF I, and the first coding exon of the RSI gene for retinoschisis (X-linked, juvenile) I (XLRS1). Contains ESTs, an STS and GSSs, complete sequence.//4.0e-10:194:71//Z94056

[8172] F-MAMMA1002972//H. sapiens CpG island DNA genomic Mse1 fragment, clone 2g10, forward read cpg2g10.ft1aa.//0.38:156:66//Z55272

[8173] F-MAMMA1002973//Homo sapiens chromosome 17, clone hRPK.142_H_{—}19, complete sequence.//2.9e-41:234:79//AC005919

[8174] F-MAMMA1002982//Homo sapiens DNA sequence from PAC 510L9 on chromosome 6p24.1-p25.3.//1.7e-05:322:63//AL022098

[8175] F-MAMMA1002987//CITBI-EI-2514J12.TR CITBI-EI Homo sapiens genomic clone 2514J12, genomic survey sequence.//0.0064:135:66//AQ275871

[8176] F-MAMMA1003003//cSRL-145D12-u cSRL flow sorted Chromosome 11 specific cosmid Homo sapiens genomic clone cSRL-145D12, genomic survey sequence.//2.8e-31:201:89//B01998

[8177] F-MAMMA1003004//Human DNA sequence *** SEQUENCING IN PROGRESS *** from clone Y237C10, WORKING DRAFT SEQUENCE.//1.6e-10:180:73//AL031601

[8178] F-MAMMA1003007//Homo sapiens (clone cosmid c11q-8D1) tetranucleotide repeat polymorphism at the Dl IS488 locus.//3.5e-12:435:61//L04732

[8179] F-MAMMA10030101//Rattus norvegicus histone macroH2A1.2 mRNA, complete cds.//2.3e-50:734:67//U79139

[8180] F-MAMMA1003013//Mus musculus chromosome 19, clone CIT282B21, complete sequence.//1.2e-86:341:79//AC003694

[8181] F-MAMMA1003015//Homo sapiens Chromosome 16 BAC clone CIT987SK-591M7, complete sequence.//2.6e-13:443:61//AC003661

[8182] F-MAMMA1003019//HSS_{—}3221_A1_A01_MR CIT Approved Human Genomic Sperm Library D Homo sapiens genomic clone Plate=3221 Col=1 Row=A, genomic survey sequence.//2.8e-51:299:92//AQ184271

[8183] F-MAMMA1003026

[8184] F-MAMMA1003031//Homo sapiens chromosome 5, BAC clone 319C17 (LBNL H159), complete sequence.//0.0037:134:73//AC005214

[8185] F-MAMMA1003035//RPCII 1-11P4.TP RPCI-11 Homo sapiens genomic clone RPCI-11-11 P4, genomic survey sequence.//1.1e-07:66:100//B74936

[8186] F-MAMMA1003039//Homo sapiens 12 p13.3 PAC RPCI3-34013 (Roswell Park Cancer Institute Human PAC Library) complete sequence.//2.1e-19:220:76//AC004671

[8187] F-MAMMA1003040//Human DNA sequence from PAC 340N1 on chromosome 1p35-36.2. Contains ESTs, polymorphic CA repeat, tma and endogenous retrovirus.//9.5e-91:469:78//Z98257

[8188] F-MAMMA1003044//Human DNA sequence from clone 496N17 on chromosome 6 p11.2-12.3 Contains EST, GSS, complete sequence.//0.21:289:61//AL031321

[8189] F-MAMMA1003047//Homo sapiens protein inhibitor of activated STAT protein PIASy mRNA, complete cds.//1.7e-139:663:98//AF077952

[8190] F-MAMMA1003049

[8191] F-MAMMA1003055//HS_{—}3014_B2_F10_MR CIT Approved Human Genomic Sperm Library D Homo sapiens genomic clone Plate=3014 Col=20 Row=L, genomic survey sequence.//4.2e-05:215:6411AQ164940

[8192] F-MAMMA1003056//HS_{—}3221_B2_D12_MR CIT Approved Human Genomic Sperm Library D Homo sapiens genomic clone Plate=3221 Col=24 Row=H, genomic survey sequence.//1.4e-16:206:74//AQ302772

[8193] F-MAMMA1003057//M. domesticus MD6 mRNA.//8.5e-128:654:94//X54352

[8194] F-MAMMA1003066//Human DNA sequence *** SEQUENCING IN PROGRESS *** from clone 273F20, WORKING DRAFT SEQUENCE.//1.0:142:71//AL034371

[8195] F-MAMMA1003089//Homo sapiens Chromosome 11p14.3 PAC clone pDJ1034g4, complete sequence.//1.7e-42:373:78//AC004796

[8196] F-MAMMA1003099//Homo sapiens beta-filamin mRNA, complete cds.//2.6e-42:288:88//AF042166

[8197] F-MAMMA1003104//Mus musculus rostral cerebellar malformation protein (rcm) mRNA, complete cds.//1.6e-12:477:64//U72634

[8198] F-MAMMA1003113//Mus musculus COP9 complex subunit 7a (COPS7a) mRNA, complete cds.//3.4e-121:789:85//AF071316

[8199] F-MAMMA1003127//R. norvegicus MYR1 mRNA for myosin I heavy chain.//9.4e-58:423:83//X68199

[8200] F-MAMMA1003135//Mus musculus dentin sialophosphoprotein precursor (DSPP) mRNA, complete cds.//0.62:676:58//U67916

[8201] F-MAMMA1003140

[8202] F-MAMMA1003146//Homo sapiens mRNA for GalT3 protein.//2.2e-80:397:97//Y15062

[8203] F-MAMMA1003150//Human DNA sequence *** SEQUENCING IN PROGRESS * from clone 598F2, WORKING DRAFT SEQUENCE.//7.3e-123:266:88//AL021579

[8204] F-MAMMA1003166//Human DNA sequence *** SEQUENCING IN PROGRESS *** from clone 250D10, WORKING DRAFT SEQUENCE.//1.6e-33:143:82//Z99716

[8205] F-NT2RM1000001//Human DNA sequence from clone 393P23 on chromosome Xq21.1-21.33. Contains GSSs, complete sequence.//0.50:216:61//Z95400

[8206] F-NT2RM1000018//Human mRNA for KIAA0066 gene, partial cds.//4.8e-65:385:92//D31886

[8207] F-NT2RM1000032

[8208] F-NT2RM1000035//Cricetulus griseus SREBP cleavage activating protein (SCAP) mRNA, complete cds.//6.3e-135:565:84//U67060

[8209] F-NT2RM1000037//Homo sapiens mRNA for KIAA0690 protein, partial cds.//1 le-106:542:95//AB014590

[8210] F-NT2RM1000039//Mouse genetic suppressor element mRNA.//0.080:239:60//L27155

[8211] F-NT2RM1000055//Rattus norvegicus mRNA for TIP120, complete cds.//8.4e-96:535:91//D87671

[8212] F-NT2RM1000059//Human DNA sequence *** SEQUENCING IN PROGRESS *** from clone 390E6, WORKING DRAFT SEQUENCE.//1.0:257:59//AL031600

[8213] F-NT2RM1000062//Nephila clavipes dragline silk protein spidroin I gene, partial cds.//0.54:306:63//U37520

[8214] F-NT2RM1000080//Sequence 2 from patent U.S. Pat. No. 5,7635,89.//1.5e-115:566:97//AR012692

[8215] F-NT2RM1000086//Homo sapiens mRNA for KIAA0661 protein, complete cds.//1.8e-114:550:97//AB014561

[8216] F-NT2RM1000092//Homo sapiens chromosome 19, cosmid R26894, complete sequence.//0.63:180:65//AC005594

[8217] F-NT2RM1000118//Homo sapiens clone 23763 unknown mRNA, partial cds.//0.027:126:70//AF007155

[8218] F-NT2RM1000119//Human DNA sequence *** SEQUENCING IN PROGRESS * from clone 466N1, WORKING DRAFT SEQUENCE.//0.022:644:58//Z97630

[8219] F-NT2RM1000127//RPCI11-44E5.TJ RPCII 1 Homo sapiens genomic clone R-44E5, genomic survey sequence.//1.6e-45:254:94//AQ195884

[8220] F-NT2RM1000131//Homo sapiens mRNA for KIAA0792 protein, complete cds.//5.5e-153:778:95//AB018335

[8221] F-NT2RM1000132//Homo sapiens NADH:ubiquinone oxidoreductase NDUFS6 subunit mRNA, nuclear gene encoding mitochondrial protein, complete cds.//1.1e-90:448:97//AF044959

[8222] F-NT2RM1000153//Human NotI linking clone 924A081 D, genomic survey sequence.//5.9e-07:66:96//U49890

[8223] F-NT2RM1000186//Homo sapiens clone 23763 unknown mRNA, partial cds.//0.025:126:70//AF007155

[8224] F-NT2RM1000187//CITB1-E1-2510J4.TR CITBI-El Homo sapiens genomic clone 2510J4, genomic survey sequence.//1.1e-05:56:98//AQ261184

[8225] F-NT2RM1000199//Mouse mRNA for seizure-related gene product 6 type 2 precursor, complete cds.//1.6e-38:711:65//D64009

[8226] F-NT2RM1000242

[8227] F-NT2RM1000244//HS_{—}2229_A1_C04_MF CIT Approved Human Genomic Sperm Library D Homo sapiens genomic clone Plate=2229 Col=7 Row=E, genomic survey sequence.//2.0e-13:95:95//AQ298474

[8228] F-NT2RM1000252//Homo sapiens chromosome 17, clone hRPK.206_C_{—}20, complete sequence.//0.023:225:61//AC006070

[8229] F-NT2RM1000256//Caenorhabditis elegans cosmid F22B3, complete sequence.//8.5e-24:473:64//Z68336

[8230] F-NT2RM1000257//Homo sapiens MAGOH mRNA, complete cds.//6.4e-69:455:85//AF035940

[8231] F-NT2RM1000260//Human mRNA for KIAA0130 gene, complete cds.//6.5e-57:460:80//D50920

[8232] F-NT2RM1000271

[8233] F-NT2RM1000272

[8234] F-NT2RM1000280//Bos gaurus vacuolar H-ATPase subunit D (VATD) mRNA, complete cds.//6.7e-97:430:92//U11927

[8235] F-NT2RM1000300//Human DNA sequence *** SEQUENCING IN PROGRESS *** from clone 92N 15, WORKING DRAFT SEQUENCE.//2.1e-96:170:100//Z93097

[8236] F-NT2RM1000314//Human mRNA for KIAAO 159 gene, complete cds.//8.1e-127:708:92//D63880

[8237] F-NT2RM1000318//Homo sapiens mRNA for ribosomal protein L39, complete cds.//5.7e-34:182:99//D79205

[8238] F-NT2RM1000341//Homo sapiens full-length insert cDNA clone YP11F06.//1.3e-100:504:97//AF085879

[8239] F-NT2RM1000354//HS_{—}2001_B1_E06_T7 CIT Approved Human Genomic Sperm Library D Homo sapiens genomic clone Plate=2001 Col=1 I Row=J, genomic survey sequence.//1.6e-11:201:73//AQ218494

[8240] F-NT2RM1000355//Mus musculus E25B protein mRNA, complete cds.//1.8e-77:578:82//U76253

[8241] F-NT2RM1000365//Homo sapiens clone DJ0098022, WORKING DRAFT SEQUENCE, 5 unordered pieces.//9.4e-113:367:97//AC004821

[8242] F-NT2RM1000377//H. sapiens mRNA for MAP kinase phosphatase 4.//6.1e-14:362:62//Y08302

[8243] F-NT2RM1000388//Azospirillum brasilense lateral flagellin (lafl) gene, complete cds.//1.0:482:58//U26679

[8244] F-NT2RM1000394//M. musculus mRNA for histone H3.3A.//1.7e-94:549:89//Z85979

[8245] F-NT2RM1000399

[8246] F-NT2RM1000421//HS_{—}2213_B1_EOI_MF CIT Approved Human Genomic Sperm Library D Homo sapiens genomic clone Plate=2213 Col=1 Row=J, genomic survey sequence.//3.6e-08:195:72//AQ032737

[8247] F-NT2RM1000430//Homo sapiens erythroblast macrophage protein EMP mRNA, complete cds.//3.7e-84:418:97//AF084928

[8248] F-NT2RM1000499//Human mRNA for KIAA0167 gene, complete cds.//1.3e-35:525:69//D79989

[8249] F-NT2RM1000539//Homo sapiens PAC clone DJI 194E14 from 7p21, complete sequence.//4.6e-73:533:83//AC004993

[8250] F-NT2RM1000553

[8251] F-NT2RM1000555//Homo sapiens clone 24514 unknown mRNA.//2.3e-110:555:97//AF070542

[8252] F-NT2RM1000563//Homo sapiens clone DJ0742P04, WORKING DRAFT SEQUENCE, 6 unordered pieces.//1.3e-123:477:100//AC004873

[8253] F-NT2RM1000623//HS_{—}2213_B1_EO1_MF CIT Approved Human Genomic Sperm Library D Homo sapiens genomic clone Plate=2213 Col=1 Row=J, genomic survey sequence.//8.2e-06:75:89//AQ032737

[8254] F-NT2RM1000648//Halobium cutirubrum L11, L1, L10 and L12 equivalent ribosomal protein gene cluster.//1.3e-06:414:61//X15078

[8255] F-NT2RM1000661//Homo sapiens cap-binding protein 4EHP mRNA, complete cds.//9.3e-54:275:97//AF047695

[8256] F-NT2RM1000666//HS_{—}2016_B2_H08_MR CIT Approved Human Genomic Sperm Library D Homo sapiens genomic clone Plate=2016 Col=16 Row=P, genomic survey sequence.//5.7e-13:199:73//AQ227865

[8257] F-NT2RM1000669//Human DNA sequence from clone 281H8 on chromosome 6q25.1-25.3. Contains up to four novel genes, one with similarity to KIAA0323 and worm C30F12.1 and another with Ubiquitin-Like protein gene SMT3 (the latter in an intron of a novel gene). Contains ESTs, STSs, GSSs, a putative CpG island and genomic marker D6S1553, complete sequence.//2.7e-94:499:94//AL031133

[8258] F-NT2RM1000672

[8259] F-NT2RM1000691//Homo sapiens HRIHFB2060 mRNA, partial cds.//2.2e-119:582:98//AB015348

[8260] F-NT2RM1000699//Caenorhabditis elegans cosmid Y41C4A, complete sequence.//0.95:284:6//AL032627

[8261] F-NT2RM1000702//HS_{—}3005_A1_A02_MR CIT Approved Human Genomic Sperm Library D Homo sapiens genomic clone Plate=3005 Col=3 Row=A, genomic survey sequence.//0.073:290:58//AQ089514

[8262] F-NT2RM1000725//Homo sapiens mRNA for neuropathy target esterase.//4.8e-65:435:85//AJ004832

[8263] F-NT2RM1000741//Homo sapiens mRNA for KIAA0567 protein, partial cds.//8.0e-126:690:92//AB011139

[8264] F-NT2RM1000742//Homo sapiens AC133 antigen mRNA, complete cds.//2.5e-66:524:83//AF027208

[8265] F-NT2RM1000746//Homo sapiens chromosome 21q22.3, PAC clones 314N7, 225L15, BAC clone 7B7, complete sequence bases 1.333303.//0.92:395:58//AJ001930

[8266] F-NT2RM1000770//Homo sapiens inosine monophosphate dehydrogenase type II gene, complete cds.//2.1e-70:407:92//L39210

[8267] F-NT2RM1000772//Human Chromosome 3 pac pDJ70i 11, WORKING DRAFT SEQUENCE, 2 unordered pieces.//6.6e-36:98:93//AC000380

[8268] F-NT2RM1000780//Human DNA for 5′ terminal region of LINE-1 transposable element clone CGLI -4.//9.3e-22:126:99//X52233

[8269] F-NT2RM1000781//Plasmodium falciparum 3D7 chromosome 12 PFYAC812 genomic sequence, WORKING DRAFT SEQUENCE, 8 unordered pieces.//7.1e-09:540:59//AC004153

[8270] F-NT2RM1000800//Mus musculus mRNA for B-INDI protein.//4.0e-81:497:88//Z97207

[8271] F-NT2RM1000802

[8272] F-NT2RM1000811//Homo sapiens AC133 antigen mRNA, complete cds.//3.7e-63:490:84//AF027208

[8273] F-NT2RM1000826//Homo sapiens clone 24514 unknown mRNA.//7.2e-153:749:96//AF070542

[8274] F-NT2RM1000829//HS_{—}3047_A1_A05_MF CIT Approved Human Genomic Sperm Library D Homo sapiens genomic clone Plate=3047 Col=9 Row=A, genomic survey sequence.//0.74:215:67//AQ099134

[8275] F-NT2RM1000833//Canis familiaris sec61 homologue mRNA, complete cds.//5.1e-114:683:88//M96629

[8276] F-NT2RM1000850//F. rubripes GSS sequence, clone 163A22aF11, genomic survey sequence.//1.1e-26:279:74//AL018762

[8277] F-NT2RM1000852//Homo sapiens mRNA for ATP-dependent RNA helicase, partial.//9.3e-148:726:97//AJ010840

[8278] F-NT2RM1000857//Rattus norvegicus gene for cytochrome P450/6 beta B, exon 2.//0.97:124:65//AB008378

[8279] F-NT2RM1000867//H. sapiens DNA sequence surrounding NotI site, clone NRLA143D.//1.2e-31:172:98//X95834

[8280] F-NT2RM1000874//Homo sapiens KE05 protein mRNA, complete cds.//2.8e-131:632:97//AF064605

[8281] F-NT2RM1000882//Homo sapiens Chromosome 11q12.2 PAC clone pDJ519013 containing human gene for ferritin heavy chain (FTH), complete sequence.//1.2e-98:214:99//AC004228

[8282] F-NT2RM1000883//Homo sapiens I-1 receptor candidate protein mRNA, complete cds.//2.7e-156:762:97//AF082516

[8283] F-NT2RM1000885//Homo sapiens mRNA for KIAA0661 protein, complete cds.//2.0e-17:310:67//AB014561

[8284] F-NT2RM1000894//Mus musculus second largest subunit of RNA polymerase I (RPA2) mRNA, complete cds.//3.2e-95:469:83//U58280

[8285] F-NT2RM1000898

[8286] F-NT2RM1000905//Human DNA sequence *** SEQUENCING IN PROGRESS *** from clone 466NI, WORKING DRAFT SEQUENCE.//1.8e-74:188:98//Z97630

[8287] F-NT2RM1000924//Homo sapiens clone DJ0742P04, WORKING DRAFT SEQUENCE, 6 unordered pieces.//5.7e-148:601:98//AC004873

[8288] F-NT2RM1000927//Homo sapiens clone DJ0647C14, WORKING DRAFT SEQUENCE, 21 unordered pieces.//0.071:392:60//AC004846

[8289] F-NT2RM1000962//H. sapiens CpG island DNA genomic Mse1 fragment, clone 140dl, forward read cpg140d1.ft1a.114.1e-35:187:99//Z56803

[8290] F-NT2RM1000978//Homo sapiens Chromosome 15q22.3-23 PAC 88 m3, WORKING DRAFT SEQUENCE, 2 ordered pieces.//H1.1e-23:266:77//AC005959

[8291] F-NT2RM1001003//Homo sapiens alpha-catenin-like protein mRNA, complete cds.//4.0e-160:760:98//U97067

[8292] F-NT2RM1001008//Kaposi's sarcoma-associated herpes-like virus ORF73 homolog gene, complete cds.//1.7e-11:602:61//U52064

[8293] F-NT2RM1001043//Human DNA sequence from PAC 27K14 on chromosome Xp 11.3-Xp 11.4. Contains monoamine oxidase B (MAOB), ESTs and polymorphic CA repeats.//3.9e-93:645:86//Z95125

[8294] F-NT2RM1001044//S. pombe chromosome III cosmid c320.//0.90:128:66//AL022245

[8295] F-NT2RM1001059//Homo sapiens chromosome 5, Bac clone 58g14 (LBNL H76), complete sequence.//3.8e-53:261:80//AC005915

[8296] F-NT2RM1001066//CIT-HSP-2172N17.TF CIT-HSP Homo sapiens genomic clone 2172N17, genomic survey sequence.//0.64:285:59//B94391

[8297] F-NT2RM1001072//HS_{—}3115_B I_D07_T7 CIT Approved Human Genomic Sperm Library D Homo sapiens genomic clone Plate=3115 Col=13 Row=H, genomic survey sequence.//7.3e-23:140:95//AQ147905

[8298] F-NT2RM1001074//Homo sapiens chromosome 19, cosmid F20489, complete sequence.//5.0e-50:186:98//AC005263

[8299] F-NT2RM1001082//Sequence 1 from patent WO9718303.//2.1e-144:736:95//A62731

[8300] F-NT2RM1001085//CIT-HSP-2310F21.TR CIT-HSP Homo sapiens genomic clone 2310F21, genomic survey sequence.//8.8e-45:235:97//AQ020757

[8301] F-NT2RM1001092//HS_{—}3055 BI G05 MF CIT Approved Human Genomic Sperm Library D Homo sapiens genomic clone Plate=3055 Col=9 Row=N, genomic survey sequence.//1.1e-89:471:95//AQ155489

[8302] F-NT2RM1001102//Human HEM45 mRNA, complete cds.//1.2e-28:482:63//U88964

[8303] F-NT2RM1001105//Homo sapiens hRED1 gene, exon 1 (5′UTR).//0.0014:349:61//Z95973

[8304] F-NT2RM1001112//Homo sapiens chromosome 19, cosmid R34094, complete sequence.//0.060:429:58//AC004678

[8305] F-NT2RM100115//Plasmodium falciparum merozoite surface protein 3 (MSP-3) gene, partial cds.//0.93:156:62//AF024624

[8306] F-NT2RM1001139//Homo sapiens chromosome 19, fosmid 37502, complete sequence.//1.2e-10:466:59//AC004755

[8307] F-NT2RM2000006//Human DNA sequence *** SEQUENCING IN PROGRESS *** from clone 796F18, WORKING DRAFT SEQUENCE.//5.3e-150:724:98//AL031291

[8308] F-NT2RM2000013//D. melanogaster DmRP128 gene for RNA polymerase III second-largest subunit.//1.5e-58:749:69//X58826

[8309] F-NT2RM2000030//Homo sapiens clone DJ0708P22, WORKING DRAFT SEQUENCE, 11 unordered pieces.//2.1e-97:270:77//AC004863

[8310] F-NT2RM2000032//Human DNA sequence *** SEQUENCING IN PROGRESS *** from clone 423B22, WORKING DRAFT SEQUENCE.//1.9e-25:172:76//AL034379

[8311] F-NT2RM2000042//Human DNA sequence from cosmid U55E4, between markers DXS6791 and DXS8038 on chromosome X contains ESTs.//5.0e-05:325:65//Z73418

[8312] F-NT2RM2000092//Homo sapiens (D8S321 locus) DNA sequence, tetranucleotide repeat polymorphism.//0.63:117:68//L12269

[8313] F-NT2RM2000093//Mus musculus major histocompatibility locus class III regions Hsc70t gene, partial cds; smRNP, G7A, NG23, MutS homolog, CLCP, NG24, NG25, and NG26 genes, complete cds; and unknown genes.//0.38:312:62//AF109905

[8314] F-NT2RM2000101

[8315] F-NT2RM2000124//Mouse cAMP-dependent protein kinase catalytic subunit mRNA, complete cds.//3.8e-58:297:97//M12303

[8316] F-NT2RM2000191//Homo sapiens cGMP phosphodiesterase A2 (PDE9A) mRNA, complete cds.//3.8e-138:653:98//AF067224

[8317] F-NT2RM2000192//CIT-HSP-2172B3.TF CIT-HSP Homo sapiens genomic clone 2172B3, genomic survey sequence.//2.2e-33:191:95//B93289

[8318] F-NT2RM2000239//F. rubripes GSS sequence, clone 156P04aG12, genomic survey sequence.//8.9e-44:445:69//AL018549

[8319] F-nnnnnnnnnnnn//Homo sapiens fibroblast growth factor 18 (FGF18) mRNA, complete cds.//0.00020:380:61//AF075292

[8320] F-NT2RM2000250//Homo sapiens mRNA for KIAA0590 protein, complete cds.//3.1e-128:615:98//AB011162

[8321] F-NT2RM2000259//Human DNA sequence *** SEQUENCING IN PROGRESS *** from clone 310013, WORKING DRAFT SEQUENCE.//0.0013:305:63//AL031658

[8322] F-NT2RM2000260//Mus musculus WW domain binding protein 15 mRNA, partial sequence.//3.0e-14:645:61//AF073934

[8323] F-NT2RM2000287//*** SEQUENCING IN PROGRESS *** EPM1/APECED region of chromosome 21, clones A68E8, B127P21, B173L3, B23N8, C1242C9, C579E2, A70B6, B159G9, B175D10, B52C10, C124G1 Note: Sequencing in this region has been discontinued by the Stanford Human Genome Center, WORKING DRAFT SEQUENCE, 50 unordered pieces.//1.3e-11:96:86//AC003656

[8324] F-NT2RM2000322//Human DNA sequence from clone 612B18 on chromosome 1q24-25.3 Contains exon from gene similar to 40S ribosomal protein, first coding exon of dynamin 2 (DYNII). ESTs, STS, GSS, CpG Island, complete sequence.//8.5e-115:233:97//AL031864

[8325] F-NT2RM2000359//Homo sapiens mRNA for KIAA0560 protein, complete cds.//8.8e-175:805:99//AB011132

[8326] F-NT2RM2000363//RPCI 1-90B 10.TJ RPCI 11 Homo sapiens genomic clone R-90B 10, genomic survey sequence.//6.7e-15:96:98//AQ285300

[8327] F-NT2RM2000368//Homo sapiens protein kinase C-binding protein RACK7 mRNA, partial cds.//1.2e-94:599:86//U48251

[8328] F-NT2RM2000371//RPCI11-5714.TJ RPCII 1 Homo sapiens genomic clone R-5714, genomic survey sequence.//1.1e-52:312:91//AQ083343

[8329] F-NT2RM2000374//M. musculus nodal gene, a TGF-beta-like gene.//6.7e-31:196:91//X70514

[8330] F-NT2RM2000395//Leishmania major chromosome 1, complete sequence.//0.99:345:58//AE001274

[8331] F-NT2RM2000402//Arabidopsis thaliana BAC T19D 16 genomic sequence.//2.1e-23:414:63//U95973

[8332] F-NT2RM2000407//Mus musculus semaphorin VIa mRNA, complete cds.//1.4e-131:439:88//AF030430

[8333] F-NT2RM2000420//HS_{—}3063_B2_Fl 1_MF CIT Approved Human Genomic Sperm Library D Homo sapiens genomic clone Plate=3063 Col=22 Row=L, genomic survey sequence.//3.2e-25:154:95//AQ103204

[8334] F-NT2RM2000422//Rat orphan transporter v7-3 (NTT73) mRNA, complete cds.//1.7e-128:782:86//L22022

[8335] F-NT2RM2000452//HS_{—}3009_B2 D05_MR CIT Approved Human Genomic Sperm Library D Homo sapiens genomic clone Plate=3009 Col=10 Row=H, genomic survey sequence.//1.2e-16:122:90//AQ130794

[8336] F-NT2RM2000469//HS_{—}2019_A1_G02_MR CIT Approved Human Genomic Sperm Library D Homo sapiens genomic clone Plate=2019 Col=3 Row=M, genomic survey sequence.//9.6e-22:176:85//AQ229041

[8337] F-NT2RM2000490//Homo sapiens mRNA for KIAA0747 protein, partial cds.//7.5e-15:386:63//AB018290

[8338] F-NT2RM2000502

[8339] F-NT2RM2000504//Homo sapiens metalloprotease 1 (MP1) mRNA, complete cds.//5.1e-171:824:97//AF061243

[8340] F-NT2RM2000522

[8341] F-NT2RM2000540

[8342] F-NT2RM2000556//Homo sapiens 12q13.1 PAC RPCI5-1057120 (Roswell Park Cancer Institute Human PAC library) complete sequence.//2.9e-42:344:82//AC004466

[8343] F-NT2RM2000566//Homo sapiens integrin alpha-7 mRNA, complete cds.//2.8e-154:751:97//AF072132

[8344] F-NT2RM2000567//Pseudomonas aeruginosa enoyl-CoA hydratase gene, partial cds; pilin biosynthetic protein (fimL) gene, complete cds; and unknown gene.//3.0e-06:664:58//AF083252

[8345] F-NT2RM2000569//Human DNA sequence *** SEQUENCING IN PROGRESS *** from clone 862K6, WORKING DRAFT SEQUENCE.//1.3e-15:348:67//AL031681

[8346] F-NT2RM2000577//RPCI11-43G22.TJ RPCII 1 Homo sapiens genomic clone R-43G22, genomic survey sequence.//1.6e-14:155:80//AQ199391

[8347] F-NT2RM2000581//Homo sapiens mRNA for KIAA0214 protein, complete cds.//5.4e-174:820:98//D86987

[8348] F-NT2RM2000588//Homo sapiens 12q13.1 PAC RPCI5-1057120 (Roswell Park Cancer Institute Human PAC library) complete sequence.//1.1e-60:344:82//AC004466

[8349] F-NT2RM2000594//Mus musculus DNA cytosine-5 methyltransferase 3BI (Dnmt3b) mRNA, alternatively spliced, complete cds.//4.9e-118:761:85//AF068626

[8350] F-NT2RM2000599//O. sativa osr40g3 gene.//0.30:585:56//Y08988

[8351] F-NT2RM2000609

[8352] F-NT2RM2000612//Rattus norvegicus ADP-ribosylation factor-directed GTPase activating protein mRNA, complete cds.//7.8e-102:709:83//U35776

[8353] F-NT2RM2000623//Homo sapiens chromosome 19, cosmid F19847, complete sequence.//3.4e-17:450:65//AC005952

[8354] F-NT2RM2000624 2.9e-06:231:64//Z82061

[8355] F-NT2RM2000635//Homo sapiens mRNA for KIAA0729 protein, partial cds.//6.3e-142:664:98//AB018272

[8356] F-NT2RM2000636//Homo sapiens mRNA for KIAA0658 protein, partial cds.//7.4e-138:664:98//AB014558

[8357] F-NT2RM2000639//RPCI11-69E5.TJ RPCII 1 Homo sapiens genomic clone R-69E5, genomic survey sequence.//3.7e-14:97:9711AQ267491

[8358] F-NT2RM2000649//Homo sapiens mRNA for KIAA0676 protein, partial cds.//1.1e-167:518:99//AB014576

[8359] F-NT2RM2000669

[8360] F-NT2RM2000691//Homo sapiens chromosome 2 clone 101 B6 map 2p 11, complete sequence.//1.1e-106:748:82//AC002038

[8361] F-NT2RM2000714//Human mRNA for KIAA0231 gene, partial cds.//6.8e-49:748:64//D86984

[8362] F-NT2RM2000718//Homo sapiens HRIHFB2436 mRNA, partial cds.//2.4e-124:594:98//AB015342

[8363] F-NT2RM2000735//Human ZNF43 mRNA.//8.4e-111:756:82//X59244

[8364] F-NT2RM2000740//Mus musculus lymphocyte specific helicase mRNA, complete cds.//1.3e-141:815:89//U25691

[8365] F-NT2RM2000795//Human DNA sequence *** SEQUENCING IN PROGRESS *** from clone 439F8, WORKING DRAFT SEQUENCE.//1.0e-78:723:76//AL021392

[8366] F-NT2RM2000821//Rat mRNA for beta COP.//2.0e-150:879:88//X57228

[8367] F-NT2RM2000837//Homo sapiens BAC clone GS214N13 from 7 p14-p15, complete sequence.//1.1e-05:361:62//AC005017

[8368] F-NT2RM2000951//Homo sapiens XYLB mRNA for xylulokinase, complete cds.//8.7e-184:847:99//AB015046

[8369] F-NT2RM2000952

[8370] F-NT2RM2000984//Mus musculus major histocompatibility locus class III regions Hsc70t gene, partial cds; smRNP, G7A, NG23, MutS homolog, CLCP, NG24, NG25, and NG26 genes, complete cds; and unknown genes.//7.6e-41:239:76//AF109905

[8371] F-NT2RM2001004//CIT-HSP-2333N18.TR CIT-HSP Homo sapiens genomic clone 2333N18, genomic survey sequence.//1.1e-11:298:66//AQ035862

[8372] F-NT2RM2001035//Mus musculus mCAF1 protein mRNA, complete cds.//1.4e-120:627:91//U21855

[8373] F-NT2RM2001065//Mus musculus COP9 complex subunit 4 (COPS4) mRNA, complete cds.//6.8e-18:690:88//AF071314

[8374] F-NT2RM2001100//Homo sapiens clone DJ0742P04, WORKING DRAFT SEQUENCE, 6 unordered pieces.//2.3e-145:614:99//AC004873

[8375] F-NT2RM2001105//Human DNA sequence *** SEQUENCING IN PROGRESS *** from clone 50024, WORKING DRAFT SEQUENCE.//2.7e-95:461:99//AL034380

[8376] F-NT2RM2001131//Kaposi's sarcoma-associated herpes-like virus ORF73 homolog gene, complete cds.//7.2e-24:726:62//U52064

[8377] F-NT2RM2001141

[8378] F-NT2RM2001152//Homo sapiens DNA sequence from PAC 93L7 on chromosome Xq21. Contains part of the CHM (TCD, REP 1) gene coding for RAB Escort protein 1 (REP-1, RAB proteins geranylgeranyltransferase component A 1, Choroideraemia protein, Tapetochoroidal Dystrophy (TCD) protein). Contains ESTs and an STS, complete sequence.//0.98:300:62//AL022401

[8379] F-NT2RM2001177//Homo sapiens clone NH0313P13, WORKING DRAFT SEQUENCE, 15 unordered pieces.//1.2e-147:741:96//AC005488

[8380] F-NT2RM2001194//Suid herpesvirus 1 UL5 gene, partial cds, UL6 and UL7 genes, complete cds, UL8 gene, partial cds.//0.026:408:59//U66829

[8381] F-NT2RM2001196//Homo sapiens clone DJI 173120, WORKING DRAFT SEQUENCE, 5 unordered pieces.//2.2e-135:627:98//AC004987

[8382] F-NT2RM2001201//Mus musculus clone OST431, genomic survey sequence.//6.1e-80:503:86//AF046700

[8383] F-NT2RM2001221//Chimpanzee (P. paniscus) involucrin, complete cds.//0.53:670:55//M26514

[8384] F-NT2RM2001238//Rat glutaminase mRNA, complete cds.//3.4e-128:719:90//M65150

[8385] F-NT2RM2001243

[8386] F-NT2RM2001247//CITB1-E1-2521M18.TR CITB1-E1 Homo sapiens genomic clone 2521M18, genomic survey sequence.//0.0011:274:59//AQ276184

[8387] F-NT2RM2001256//M. musculus mRNA for 200 kD protein.//2.3e-129:742:90//X80169

[8388] F-NT2RM2001291//CIT-HSP-2010115.TR CIT-HSP Homo sapiens genomic clone 2010115, genomic survey sequence.//4.6e-09:156:72//B57734

[8389] F-NT2RM2001306//RPCI11-2815.TP RPCI-11 Homo sapiens genomic clone RPCI-11-2815, genomic survey sequence.//0.069:234:64//B84850

[8390] F-NT2RM2001312//Homo sapiens chromosome 17, clone hRPK.142_H_{—}19, complete sequence.//1.1e-22:111:81//AC005919

[8391] F-NT2RM2001319//Borrelia burgdorferi (section 4 of 70) of the complete genome.//0.99:340:58//AE001118

[8392] F-NT2RM2001324//Human DNA sequence *** SEQUENCING IN PROGRESS *** from clone 209H 1, WORKING DRAFT SEQUENCE.//3.7e-44:340:85//Z84465

[8393] F-NT2RM2001345//HS_{—}3005_A1_A02_MR CIT Approved Human Genomic Sperm Library D Homo sapiens genomic clone Plate=3005 Col=3 Row=A, genomic survey sequence.//0.042:290:58//AQ089514

[8394] F-NT2RM2001360//Human HeLa mRNA isolated as a false positive in a two-hybrid-screen.//5.0e-60:365:87//U56429

[8395] F-NT2RM2001370//Homo sapiens PAC clone DJ0815D20 from 7 p11-p13, complete sequence.//0.98:415:58//AC004899

[8396] F-NT2RM2001393//Homo sapiens Chromosome 22q11.2 PAC Clone p_ml I In BCRL2-GGT Region, complete sequence.//4.0e-54:394:75//AC004033

[8397] F-NT2RM2001420//Human DNA sequence *** SEQUENCING IN PROGRESS *** from clone 349A12, WORKING DRAFT SEQUENCE.//2.8e-169:789:99//AL033520

[8398] F-NT2RM2001424//Homo sapiens mRNA for E1B-55 kDa-associated protein.//7.1e-96:453:99//AJ007509

[8399] F-NT2RM2001499//Rattus norvegicus mRNA for cationic amino acid transporter 3, complete cds.//7.1e-91:601:83//AB000113

[8400] F-NT2RM2001504//Homo sapiens chromosome 19, cosmid R30017, complete sequence.//0.81:200:69//AC005624

[8401] F-NT2RM2001524//Arabidopsis thaliana DNA chromosome 4, ESSA1 AP2 contig fragment No. 2.//3.8e-16:316:65//Z99708

[8402] F-NT2RM2001544

[8403] F-NT2RM2001547//Caenorhabditis elegans cosmid Y47H9C, complete sequence.//3.3e-24:318:67//AL032657

[8404] F-NT2RM2001575//Human 52-kD ribonucleoprotein Ro/SSA mRNA, complete cds.//2.1e-26:582:64//M34551

[8405] F-NT2RM2001582//M. musculus red-1 gene.//1.4e-102:581:90//X92750

[8406] F-NT2RM2001588//Homo sapiens KIAA0442 mRNA, partial cds.//7.0e-10:282:65//AB007902

[8407] F-NT2RM2001592//Rattus norvegicus rexo70 mRNA, complete cds.//9.6e-131:736:90//AF032667

[8408] F-NT2RM2001605//RBP2=retinoblastoma binding protein 2 [human, Nalm-6 pre-B cell leukemia, mRNA, 6455 nt].//2.3e-85:749:7511S66431

[8409] F-NT2RM2001613//Rattus rattus sec61 homologue mRNA, complete cds.//8.6e-118:779:85//M96630

[8410] F-NT2RM2001632//Homo sapiens PAC clone DJ0740D02 from 7 p14-p15, complete sequence.//1.5e-50:561:71//AC004691

[8411] F-NT2RM2001635//Homo sapiens mRNA for KIAA0618 protein, complete cds.//9.2e-153:740:98//AB014518

[8412] F-NT2RM2001637//F. rubripes GSS sequence, clone 155D22bD8, genomic survey sequence.//2.5e-13:224:64//Z91020

[8413] F-NT2RM2001641//CIT-HSP-2347F23.TF CIT-HSP Homo sapiens genomic clone 2347F23, genomic survey sequence.//1.3e-67:340:98//AQ060913

[8414] F-NT2RM2001648//Canis familiaris sec61 homologue mRNA, complete cds.//1.4e-110:459:89//M96629

[8415] F-NT2RM2001652//Bos taurus guanine nucleotide-exchange protein (ARF-GEP1) mRNA, complete cds.//1.2e-153:807:93//AF023451

[8416] F-NT2RM2001659//nbxb0002cE07fCUGI Rice BAC Library Oryza sativa genomic clone nbxb0002J 13f, genomic survey sequence.//1.0:485:56//AQ051653

[8417] F-NT2RM2001664//Homo sapiens IkappaB kinase complex associated protein (IKAP) mRNA, complete cds.//3.7e-172:802:99//AF044195

[8418] F-NT2RM2001668

[8419] F-NT2RM2001670//Homo sapiens complete genomic sequence between D16S3070 and D16S3275, containing Familial Mediterranean Fever gene disease.//3.2e-18:279:70//AJ003147

[8420] F-NT2RM2001671//Oryctolagus cuniculus sarcolemmal associated protein-3 mRNA, complete cds.//1.6e-137:683:94//U21157

[8421] F-NT2RM2001675//RPCII 1-51J16.TJ RPCII 1 Homo sapiens genomic clone R-51J16, genomic survey sequence.//1.0:394:58//AQ053677

[8422] F-NT2RM2001681//Arabidopsis thaliana DNA chromosome 4, BAC clone T805 (ESSAII project).//0.87:220:61//AL021890

[8423] F-NT2RM2001688//B. parapertussis bvg locus (transcription regulators of virulence factors) with bvgA and bvgS genes.//1.0:286:62//X52948

[8424] F-NT2RM2001695//CIT-HSP-345H13.TVB CIT-HSP Homo sapiens genomic clone 345H13, genomic survey sequence.//3.2e-53:241:82//B59854

[8425] F-NT2RM2001696//Mouse DNA with homology to EBV IR3 repeat, segment 2, clone Mu2.//1.2e-05:306:58//M10668

[8426] F-NT2RM2001698//Homo sapiens DNA sequence from PAC 163M9 on chromosome 1p35.1-p36.21. Contains protein synthesis factor (eIF-4C), DIF15SIA pseudogene, ESTs, STS, GSS, complete sequence.//6.0e-06:548:59//AL021920

[8427] F-NT2RM2001699//HS_{—}3195_B2 D01_T7 CIT Approved Human Genomic Sperm Library D Homo sapiens genomic clone Plate=3195 Col=2 Row=H, genomic survey sequence.//2.7e-07:322:61//AQ189056

[8428] F-NT2RM2001700//Mycobacterium tuberculosis H37Rv complete genome; segment 109/162.//7.8e-05:354:5811Z95556

[8429] F-NT2RM2001706//Homo sapiens chromosome Xp22-67-68, WORKING DRAFT SEQUENCE, 99 unordered pieces.//7.5e-42:335:81//AC004469

[8430] F-NT2RM2001716

[8431] F-NT2RM2001718//Drosophila melanogaster DNA sequence (P1 DS04106 (DI 72)), complete sequence.//4.2e-08:536:58//AC004290

[8432] F-NT2RM2001723//Homo sapiens clone 23770 mRNA sequence.//1.4e-26:163:95//AF052123

[8433] F-NT2RM2001727//Homo sapiens mRNA for KIAA0462 protein, partial cds.//6.2e-111:530:98//AB007931

[8434] F-NT2RM2001730//Homo sapiens chromosome 21 PAC RPCIP704E14135Q2.//3.1e-102:248:95//AJ010598

[8435] F-NT2RM2001743

[8436] F-NT2RM2001753//Caenorhabditis elegans cosmid F45E6, complete sequence.//0.11:138:66//Z68117

[8437] F-NT2RM2001760//Canis familiaris sec61 homologue mRNA, complete cds.//9.4e-100:418:8811M96629

[8438] F-NT2RM2001768//HS_{—}30641 B2 A04 MF CIT Approved Human Genomic Sperm Library D Homo sapiens genomic clone Plate=3064 Col=8 Row=B, genomic survey sequence.//3.1e-28:153:100//AQ136993

[8439] F-NT2RM2001771//Homo sapiens chromosome 19, BAC CIT-B-393i15 (BC301323), complete sequence.//1.3e-66:680:72//AC006116

[8440] F-NT2RM2001782

[8441] F-NT2RM2001784//Bovine herpesvirus type 1 (Cooper) DNA (30 kb).//0.027:384:60//Z48053

[8442] F-NT2RM2001785//Homo sapiens chromosome 11, BAC CIT-HSP-31 Ie8 (BC269730) containing the hFENI gene, complete sequence.//1.6e-18:229:65//AC004770

[8443] F-NT2RM2001797//HS_{—}3045_A1_D01_MF CIT Approved Human Genomic Sperm Library D Homo sapiens genomic clone Plate=3045 Col=1 Row=G, genomic survey sequence.//1.4e-74:381:97//AQ129456

[8444] F-NT2RM2001800

[8445] F-NT2RM2001803//Homo sapiens IkappaB kinase complex associated protein (IKAP) mRNA, complete cds.//8.3e-178:827:99//AF044195

[8446] F-NT2RM2001805//Malus domestica leucine-rich receptor-like protein kinase (LRPKm1) gene, 5′ flanking region and 5′ UTR.//1.0:290:58//AF053126

[8447] F-NT2RM2001813//CIT-HSP-2169F21.TR CIT-HSP Homo sapiens genomic clone 2169F21, genomic survey sequence.//3.3e-16:109:95//B89870

[8448] F-NT2RM2001823//Drosophila melanogaster DNA sequence (PI DS07049 (DI 33)), complete sequence.//5.8e-62:819:68//AC004274

[8449] F-NT2RM2001839//Homo sapiens calumein (Calu) mRNA, complete cds.//3.6e-131:738:90//AF013759

[8450] F-NT2RM2001840//Homo sapiens chromosome 17, clone 297N7, complete sequence.//11.1e-57:422:79//AC002347

[8451] F-NT2RM2001855//HSS_{—}3224_A1_H07_MR CIT Approved Human Genomic Sperm Library D Homo sapiens genomic clone Plate=3224 Col=13 Row=O, genomic survey sequence.//0.00012:68:91//AQ205285

[8452] F-NT2RM2001867//Human DNA sequence from clone 889N15 on chromosome Xq22.1-22.3. Contains part of the gene for a novel protein similar to X. laevis Cortical Thymocyte Marker CTX, the possibly alternatively spliced gene for 26S Proteasome subunit p28 (Ankyrin repeat protein), a novel gene and exons 36 through 45 of the COL4A6 for Collagen Alpha 6(IV). Contains ESTs, STSs, GSSs and a putative CpG island, complete sequence.//0.068:102:70//AL031177

[8453] F-NT2RM2001879//Human DNA sequence from cosmid cU72E5, between markers DXS366 and DXS87 on chromosome X.//0.0029:500:59//Z68328

[8454] F-NT2RM2001886//Homo sapiens mRNA for KIAA0710 protein, complete cds.//1.9e-187:866:97//AB014610

[8455] F-NT2RM2001896//S. cerevisiae chromosome III complete DNA sequence.//8.6e-30:613:63//X59720

[8456] F-NT2RM2001903//Homo sapiens mRNA for KIAA0462 protein, partial cds.//2.9e-176:859:97//AB007931

[8457] F-NT2RM2001930//M. musculus mRNA for semaphorin G.//4.7e-117:730:85//X97818

[8458] F-NT2RM2001935//Sequence 11 from patent WO9610637.//1.0:356:60//A50028

[8459] F-NT2RM2001936//Homo sapiens clone 614 unknown mRNA, complete sequence.//6.9e-138:653:98//AF091080

[8460] F-NT2RM2001950//RPCI11-24L12.TP RPCI-11 Homo sapiens genomic clone RPCI-11-24L12, genomic survey sequence.//2.7e-19:188:81//B86700

[8461] F-NT2RM2001982//Arabidopsis thaliana chromosome II BAC T24121 genomic sequence, complete sequence.//0.42:179:65//AC005825

[8462] F-NT2RM2001983//Homo sapiens RGS-GAIP interacting protein GIPC mRNA, complete cds.//3.8e-20:123:98//AF089816

[8463] F-NT2RM2001989//Sequence 3 from patent U.S. Pat. No. 5,747,317.//1.9e-167:786:98//AR004981

[8464] F-NT2RM2001997//Human HepG2 partial cDNA, clone hmdlb08 m5.//9.6e-25:160:95//D16955

[8465] F-NT2RM2001998//Homo sapiens DNA, chromosome 21q22.2, PAC clone 25P16 complete sequence, encoding carbonyl reductase and carbonyl reductase 3 (complete cds)//0.88:380:60//AB003151

[8466] F-NT2RM2002004//Human Chromosome X, complete sequence.//5.0e-88:831:77//AC002407

[8467] F-NT2RM2002014

[8468] F-NT2RM2002030//Mus musculus glutamine:fructose-6-phosphate amidotransferase mRNA, complete cds.//1.5e-89:822:74//U00932

[8469] F-NT2RM2002049//Bovine elastin mRNA, partial cds.//8.8e-11:125:81//M26132

[8470] F-NT2RM2002055

[8471] F-NT2RM2002088//Mus musculus WW domain binding protein 17 mRNA, partial sequence.//1.4e-15:421:63//AF073936

[8472] F-NT2RM2002091//Human DNA sequence *** SEQUENCING IN PROGRESS *** from clone 50024, WORKING DRAFT SEQUENCE.//4.6e-160:771:98//AL034380

[8473] F-NT2RM2002100//Homo sapiens mRNA for ATP-dependent RNA helicase, partial.//7.7e-164:776:98//AJ010840

[8474] F-NT2RM2002109//Homo sapiens glioma amplified on chromosome 1 protein (GACI) mRNA, complete cds.//2.4e-143:684:98//AF030435

[8475] F-NT2RM2002128//Mesocricetus auratus guanine nucleotide-binding protein beta 5 (Gnb5) mRNA, complete cds.//7.0e-27:330:73//U13152

[8476] F-NT2RM2002142//Danio rerio gastrulation specific (G12) mRNA, complete cds.//6.3e-10:135:80//U27121

[8477] F-NT2RM2002145//Homo sapiens erythroblast macrophage protein EMP mRNA, complete cds.//4.2e-143:800:92//AF084928

[8478] F-NT2RM2002178//Homo sapiens mRNA for KIAA0467 protein, partial cds.//5.2e-164:787:97//AB007936

[8479] F-NT2RM2002580//Drosophila melanogaster DNA sequence (P1 DS02110 (D147)), complete sequence.//7.4e-13:337:62//AC004423

[8480] F-NT2RM4000024//D. melanogaster DmRP128 gene for RNA polymerase III second-largest subunit.//1.2e-62:801:70//X58826

[8481] F-NT2RM4000027//Caenorhabditis elegans cosmid F09E5.//0.36:336:60//U37429

[8482] F-NT2RM4000030//H. sapiens CpG island DNA genomic Mse1 fragment, clone 56h10, forward read cpg56h10.ft1a.119.3e-22:127:100//Z55685

[8483] F-NT2RM4000046//Curcurbita maxima 25S -18S rDNA intergenic spacer.//4.1e-05:386:60//X13059

[8484] F-NT2RM4000061

[8485] F-NT2RM4000085//B. taurus mRNA for nuclear DNA helicase II.//1.9e-10:485:59/HX82829

[8486] F-NT2RM4000086

[8487] F-NT2RM4000104//Homo sapiens chromosome 16 zinc finger protein ZNF210 (ZNF210) mRNA, complete cds.//4.2e-23:345:69//AF060865

[8488] F-NT2RM4000139//R. norvegicus trg mRNA.//1.4e-56:708:69//X68101

[8489] F-NT2RM4000155//CIT-HSP-2282N15.TR CIT-HSP Homo sapiens genomic clone 2282N15, genomic survey sequence.//3.0e-09:88:90//AQ000070

[8490] F-NT2RM4000156//H. sapiens HPBR11-7 gene.//2.0e-21:586:60//X67336

[8491] F-NT2RM4000167//Mouse kif4 mRNA for microtubule-based motor protein KIF4, complete cds.//2.7e-143:810:90//D 12646

[8492] F-NT2RM4000169//Plasmodium falciparum 3D7 chromosome 12 PFYAC293 genomic sequence, WORKING DRAFT SEQUENCE, 9 unordered pieces.//0.0054:746:57//AC004157

[8493] F-NT2RM4000191//Mus musculus cathepsin S (CatS) gene, promoter region and exons 1 and 2.//0.00018:468:60//AF051726

[8494] F-NT2RM4000197

[8495] F-NT2RM4000199//Human DNA sequence *** SEQUENCING IN PROGRESS *** from clone 620EI 1, WORKING DRAFT SEQUENCE.//0.67:461:60//AL031667

[8496] F-NT2RM4000200

[8497] F-NT2RM4000202//H. sapiens CpG island DNA genomic Mse1 fragment, clone 34c2, forward read cpg34c2.ft1a.//1.7e-27:190:90//Z65361

[8498] F-NT2RM4000210//Homo sapiens mRNA for KIAA0712 protein, complete cds.//1.4e-182:856:98//AB018255

[8499] F-NT2RM4000215//S. cerevisiae MAKI 6 protein gene, complete cds, and LTEI protein gene, 3′ end.//3.1e-31:731:62//J03852

[8500] F-NT2RM4000229//Homo sapiens chromosome 10 clone CIT987SK-1144G6 map 10q25.1, complete sequence.//4.6e-102:233:94//AC005383

[8501] F-NT2RM4000233//Mus musculus semaphorin VIa mRNA, complete cds.//1.6e-135:835:86//AF030430

[8502] F-NT2RM4000244//RPCI 11-24P 15.TV RPCI-11 Homo sapiens genomic clone RPCI-11-24P 15, genomic survey sequence.//5.5e-08:422:62//B86757

[8503] F-NT2RM4000251//Mus musculus clone UWGC:mbac92 from 14D1-D2 (T-Cell Receptor Alpha Locus), complete sequence.//0.98:207:60//AC005855

[8504] F-NT2RM4000265//Homo sapiens Chromosome 11q12.2 PAC clone pDJ1081b4 containing human mRNA for T-cell glycoprotein CD6, complete sequence.//5.2e-41:707:65//AC003689

[8505] F-NT2RM4000290//Human transducin-like enhancer protein (TLE3) mRNA, complete cds.//7.9e-153:609:93//M99438

[8506] F-NT2RM4000324

[8507] F-NT2RM4000327//Rattus norvegicus guanine nucleotide binding protein beta 4 subunit mRNA, partial cds.//3.9e-44:727:68//AF022085

[8508] F-NT2RM4000344//Mus musculus ATP-dependent metalloprotease FtsH1 mRNA, complete cds.//1.0e-143:801:90//AF090430

[8509] F-NT2RM4000349//Mus musculus clone OST431, genomic survey sequence.//6.1e-80:503:86//AF046700

[8510] F-NT2RM4000354//HS_{—}2221_A2_C07_MF CIT Approved Human Genomic Sperm Library D Homo sapiens genomic clone Plate=2221 Col=14 Row=E, genomic survey sequence.//1.0e-20:180:83//AQ253449

[8511] F-NT2RM4000356

[8512] F-NT2RM4000366//Homo sapiens mRNA for KIAA0642 protein, partial cds.//1.6e-133:628:99//AB014542

[8513] F-NT2RM4000368//RPCI 11-91B5.TJ RPCII 1 Homo sapiens genomic clone R-91B5, genomic survey sequence.//5.0e-12:431:61//AQ283217

[8514] F-NT2RM4000386//Mus musculus DOC4 (Doc4) mRNA, complete cds.//7.4e-86:845:72//AF059485

[8515] F-NT2RM4000395//Saccharomyces cerevisiae chromosome VI cosmid 9965.//2.5e-34:767:61//D44597

[8516] F-NT2RM4000414//Homo sapiens XYLB mRNA for xylulokinase, complete cds.//1.5e-15:114:94//AB015046

[8517] F-NT2RM4000421

[8518] F-NT2RM4000425//Homo sapiens chromosome 17, clone hRPK.294_J_{—}22, complete sequence.//1.5e-37:295:82//AC005921

[8519] F-NT2RM4000433//Mus musculus retinoic acid-responsive protein (Stra6) mRNA, complete cds.//3.9e-94:740:78//AF062476

[8520] F-NT2RM4000457//CIT-HSP-2346B17.TR CIT-HSP Homo sapiens genomic clone 2346B17, genomic survey sequence.//1.5e-22:149:92//AQ062111

[8521] F-NT2RM4000471//Homo sapiens mRNA for putative tRNA splicing protein, partial.//1.3e-76:386:97//AJ010952

[8522] F-NT2RM4000486//Homo sapiens mRNA, complete cds, clone:RES4-22A.//1.1e-22:356:67//AB000459

[8523] F-NT2RM4000496//Homo sapiens 12p13.3 BAC RPCII 1-476M19 (Roswell Park Cancer Institute Human BAC Library) complete sequence.//0.53:198:70//AC005908

[8524] F-NT2RM4000511

[8525] F-NT2RM4000514

[8526] F-NT2RM4000515//CIT-HSP-2285L3.TR CIT-HSP Homo sapiens genomic clone 2285L3, genomic survey sequence.//0.0012:200:66//AQ000113

[8527] F-NT2RM4000520

[8528] F-NT2RM4000531//Human zinc finger protein 42 (MZF-1) mRNA, complete cds.//2.9e-31:732:64//M58297

[8529] F-NT2RM4000532//HS_{—}3231_B1_C05_T7 CIT Approved Human Genomic Sperm Library D Homo sapiens genomic clone Plate=3231 Col=9 Row=F, genomic survey sequence.//1.3e-59:362:90//AQ192093

[8530] F-NT2RM4000534

[8531] F-NT2RM4000585//CITB1-E1-2508118.TR CITBI-EL Homo sapiens genomic clone 2508118, genomic survey sequence.//1.1e-34:208:93//AQ260706

[8532] F-NT2RM4000590//CIT-HSP-2291M14.TF CIT-HSP Homo sapiens genomic clone 2291M14, genomic survey sequence.//8.3e-34:180:99//AQ004125

[8533] F-NT2RM4000595//Homo sapiens chromosome 17, clone hCIT.131_KK11, complete sequence.//1.2e-09:203:66//AC005288

[8534] F-NT2RM4000603//Human mRNA for KIAA0392 gene, partial cds.//5.3e-14:305:68//AB002390

[8535] F-NT2RM4000611//CIT-HSP-2169F21.TR CIT-HSP Homo sapiens genomic clone 2169F21, genomic survey sequence.//8.4e-16:109:94//B89870

[8536] F-NT2RM4000616//D. melanogaster mRNA for acetyl-CoA synthetase.//2.3e-59:721:68//Z46786

[8537] F-NT2RM4000674

[8538] F-NT2RM4000689//CIT-HSP-2381013.TF CIT-HSP Homo sapiens genomic clone 2381013, genomic survey sequence.//2.6e-31:174:97//AQ110303

[8539] F-NT2RM4000698

[8540] F-NT2RM4000700

[8541] F-NT2RM4000712//Homo sapiens ubiquitin hydrolyzing enzyme I (UBH 1) mRNA, partial cds.//1.1e-89:744:77//AF022789

[8542] F-NT2RM4000717

[8543] F-NT2RM4000733//Human DNA sequence *** SEQUENCING IN PROGRESS *** from clone 423B22, WORKING DRAFT SEQUENCE.//2.1e-140:299:99//AL034379

[8544] F-NT2RM4000734//Homo sapiens mRNA for KIAA0760 protein, partial cds.//3.8e-158:743:98//AB018303

[8545] F-NT2RM4000741

[8546] F-NT2RM4000751//Human zinc finger protein 20 (ZNF20) pentanucleotide repeat polymorphism.//7.1e-95:754:77//M99593

[8547] F-NT2RM4000764

[8548] F-NT2RM4000778//Caenorhabditis elegans cosmid F36H 12.//0.30:523:60//AF078790

[8549] F-NT2RM4000779//Homo sapiens mRNA for KIAA0451 protein, complete cds.//5.5e-172:810:98//AB007920

[8550] F-NT2RM4000787//Human DNA sequence from PAC 370M22 on chromosome 22q12-qter. contains GRB2 ADAPTOR LIKE PROTEIN, UBIQUINOL-CYTOCHROME C REDUCTASE IRON-SULFUR SUBUNIT PRECURSOR (UQCRFS1) exon, ESTs, STS, CA repeat and CpG island.//0.0057:163:69//Z82206

[8551] F-NT2RM4000790//Homo sapiens chromosome 19, cosmid R27216, complete sequence.//6.9e-39:237:94//AC005306

[8552] F-NT2RM4000795//Rattus norvegicus neuroligin 3 mRNA, complete cds.//5.9e-97:857:74//U41663

[8553] F-NT2RM4000796//HS_{—}3214_B1_F11_T7 CIT Approved Human Genomic Sperm Library D Homo sapiens genomic clone Plate=3214 Col=21 Row=L, genomic survey sequence.//1.1e-14:254:68//AQ175988

[8554] F-NT2RM4000798//Bos taurus guanine nucleotide-exchange protein (ARF-GEP 1) mRNA, complete cds.//6.2e-78:816:72//AF023451

[8555] F-NT2RM4000813//Leishmania major glycoprotein 96-92 (GP 96-92) gene, partial cds.//0.33:276:63//M63109

[8556] F-NT2RM4000820//, complete sequence.//2.6e-142:450:97//AC005406

[8557] F-NT2RM4000833//Drosophila melanogaster DNA sequence (P1 DS05273 (D80)), complete sequence.//1.9e-52:501:71//AC004373

[8558] F-NT2RM4000848//Homo sapiens chromosome 17, clone hRPK.167_N_{—}20, complete sequence.//1.0:477:56//AC005940

[8559] F-NT2RM4000852

[8560] F-NT2RM4000855//Homo sapiens chromosome 17, clone hCIT.457_L_{—}16, complete sequence.//3.4e-29:229:83//AC003957

[8561] F-NT2RM4000887

[8562] F-NT2RM4000895//Homo sapiens HuUAPI mRNA for UDP-N-acetylglucosamine pyrophosphorylase, complete cds.//2.1e-20:407:64//AB011004

[8563] F-NT2RM4000950//Homo sapiens clone DJO917G04, WORKING DRAFT SEQUENCE, 35 unordered pieces.//0.41:311:64//AC004929

[8564] F-NT2RM4000971//RPCII 1-53H3.TJ RPCII 1 Homo sapiens genomic clone R-53H3, genomic survey sequence.//1.0:208:64//AQ053735

[8565] F-NT2RM4000979//Homo sapiens chromosome 17, clone hRPK.642_C_{—}21, complete sequence.//1.3e-19:207:78//AC005245

[8566] F-NT2RM4000996//CITBI-EI-2506B10.TF CITBI-EI Homo sapiens genomic clone 2506B10, genomic survey sequence.//11.4e-73:361:98//AQ263651

[8567] F-NT2RM4001002//Homo sapiens mRNA for KIAA0729 protein, partial cds.//5.1e-170:803:98//AB018272

[8568] F-NT2RM4001016//Homo sapiens mRNA for KIAA0639 protein, partial cds.//3.3e-125:584:99//AB014539

[8569] F-NT2RM4001032//Gallus gallus chicken brain factor-2 (CBF-2) mRNA, complete cds.//0.00034:777:58//U47276

[8570] F-NT2RM4001047//MO25 gene [mice, embryos, mRNA, 2322 nt].//2.5e-92:776:74//S51858

[8571] F-NT2RM4001054//Canis familiaris sec61 homologue mRNA, complete cds.//3.1e-102:859:76//M96629

[8572] F-NT2RM4001084//CIT-HSP-2330F9.TR CIT-HSP Homo sapiens genomic clone 2330F9, genomic survey sequence.//4.6e-78:379:99//AQ044479

[8573] F-NT2RM4001092//cSRL-71b1-u cSRL flow sorted Chromosome 11 specific cosmid Homo sapiens genomic clone cSRL-71b1, genomic survey sequence.//1.1e-12:152:75//B05776

[8574] F-NT2RM4001116

[8575] F-NT2RM4001140//Homo sapiens PAC clone DJ0964C11 from 7 p14-p 15, complete sequence.//1.9e-136:717:93//AC004593

[8576] F-NT2RM4001151//Streptomyces antibioticus ATP-binding protein and membrane protein (oleC-ORF1, oleC-ORF2, oleC-ORF3, oleC-ORF4, and oleC-ORF5) genes, complete cds; 3427 base-pairs.//0.0083:368:60//L06249

[8577] F-NT2RM4001155//Bos taurus 50 kDa protein (adp50) mRNA, complete cds.//3.9e-120:764:85//U04706

[8578] F-NT2RM4001160

[8579] F-NT2RM4001187

[8580] F-NT2RM4001191//CIT-HSP-2010E7.TF CIT-HSP Homo sapiens genomic clone 2010E7, genomic survey sequence.//6.2e-12:181:72//B53378

[8581] F-NT2RM4001200//H. sapiens HZF10 mRNA for zinc finger protein.//1.3e-66:799:69//X78933

[8582] F-NT2RM4001203//Homo sapiens rab3-GAP regulatory domain mRNA, complete cds.//4.2e-152:707:99//AF004828

[8583] F-NT2RM4001204

[8584] F-NT2RM4001217//Homo sapiens ectoderm-neural cortex-1 protein (ENC-1) mRNA, complete cds.//1.6e-62:715:70//AF005381

[8585] F-NT2RM4001256//Human NotI linking clone 924A058R, genomic survey sequence.//7.6e-14:109:90//U49884

[8586] F-NT2RM4001258//HS_{—}3171_B2_G09_T7 CIT Approved Human Genomic Sperm Library D Homo sapiens genomic clone Plate=3171 Col=18 Row=N, genomic survey sequence.//2.5e-18:215:7711AQ149676

[8587] F-NT2RM4001309//Human DNA sequence from clone 551E13 on chromosome Xp 11.2-11.3 Contains farnesyl pyrophosphate synthetase pseudogene, VT4 protein pseudogene, EST, GSS, complete sequence.//4.9e-28:526:66//AL022163

[8588] F-NT2RM4001313//H. sapiens mRNA for phosphatidylinositol 3-kinase.//2.5e-77:474:89//Z46973

[8589] F-NT2RM4001316//Caenorhabditis elegans cosmid K09H11.//1.2e-16:230:73//U97002

[8590] F-NT2RM4001320//Homo sapiens mRNA for Neuroblastoma, complete cds.//1.1e-41:642:66//D89016

[8591] F-NT2RM4001340//EP(3)0614 Drosophila melanogaster EP line Drosophila melanogaster genomic Sequence recovered from 5′ end of P element, genomic survey sequence.//0.0040:141:68//AQ025127

[8592] F-NT2RM4001344//Caenorhabditis elegans DNA *** SEQUENCING IN PROGRESS ** from clone YIE3, WORKING DRAFT SEQUENCE.//5.5e-06:469:60//AL021388

[8593] F-NT2RM4001347

[8594] F-NT2RM4001371//Arabidopsis thaliana chromosome II BAC T20K9 genomic sequence, complete sequence.//0.10:400:61//AC004786

[8595] F-NT2RM4001382//Homo sapiens RanBP7/importin 7 mRNA, complete cds.//2.2e-167:790:98//AF098799

[8596] F-NT2RM4001384//Homo sapiens DNA sequence from BAC 747E2 on chromosome 22q12.1. Contains ESTs, STSs and GSSs and genomic marker D22S56, complete sequence.//0.99:255:59//AL021393

[8597] F-NT2RM4001410//Homo sapiens genomic DNA, chromosome 21q11.1, segment 1/5, WORKING DRAFT SEQUENCE.//0.027:336:58//AP000023

[8598] F-NT2RM4001411//Mus musculus Pro-rich, PH, SH2 domain-containing signaling mediator (PSM) mRNA, complete cds.//5.9e-124:783:85//AF020526

[8599] F-NT2RM4001412//Rattus norvegicus GTPase activating protein SynGAP-c mRNA, complete cds.//2.2e-34:418:71//AF050183

[8600] F-NT2RM4001414//Homo sapiens full-length insert cDNA clone ZEI6C11.//9.1e-76:363:100//AF086563

[8601] F-NT2RM4001437//Homo sapiens chromosome 5, BAC clone 313n8 (LBNL H146), complete sequence.//2.0e-47:623:69//AC004226

[8602] F-NT2RM4001444//Streptococcus pneumoniae penicillin-binding protein 2b (pbp2b), RecM (recM), D-Ala-D-Ala ligase (ddI), D-Ala-D-Ala adding enzyme (murF), MutT (mutT), cell division protein FtsA (ftsA), cell division protein FtsZ (ftsZ), YlmE (ylmE), YlmF (ylmF), YlmG (ylmG), YlmH (ylmH), cell division protein DivIVA (divIVA), and isoleucine-tRNA synthetase (ileS) genes, complete cds; and unknown gene.//3.6e-09:566:58//AF068901

[8603] F-NT2RM4001454

[8604] F-NT2RM4001455

[8605] F-NT2RM4001483//Human zinc finger protein ZNF 136.//3.2e-36:329:78//U09367

[8606] F-NT2RM4001489//Homo sapiens mRNA for KIAA0685 protein, complete cds.//1.2e-155:724:99//AB014585

[8607] F-NT2RM4001519//Plasmodium falciparum 3D7 chromosome 12 PFYAC69 genomic sequence, WORKING DRAFT SEQUENCE, 4 unordered pieces.//0.00019:418:59//AC004688

[8608] F-NT2RM4001522//Human HepG2 3′ region MboI cDNA, clone hmd6aO8 m3.//1.4e-16:130:88//D17274

[8609] F-NT2RM4001557

[8610] F-NT2RM4001565

[8611] F-NT2RM4001566

[8612] F-NT2RM4001569//HS_{—}2050_B1_C08_MR CIT Approved Human Genomic Sperm Library D Homo sapiens genomic clone Plate=2050 Col=15 Row=F, genomic survey sequence.//2.7e-09:109:84//AQ234720

[8613] F-NT2RM4001582//Mus musculus COP9 complex subunit 7b (COPS7b) mRNA, complete cds.//1.2e-127:740:89//AF071317

[8614] F-NT2RM4001592//M. musculus mRNA of enhancer-trap-locus 1.//7.3e-117:710:88//X69942

[8615] F-NT2RM4001594//Homo sapiens chromosome 9q34, clone 107G20, WORKING DRAFT SEQUENCE, 2 ordered pieces.//0.34:388:59//AC002355

[8616] F-NT2RM4001597//M. musculus red-1 gene.//6.2e-139:788:90//X92750

[8617] F-NT2RM4001605//Homo sapiens mRNA for KIAA0791 protein, complete cds.//3.3e-162:750:99//AB018334

[8618] F-NT2RM4001611/Synechocystis sp. PCC6803 complete genome, 12/27, 1430419-1576592.//2.5e-05:490:58//D90910

[8619] F-NT2RM4001629//Mus musculus palmytoylated protein p55 mRNA, complete cds.//0.65:186:64//U38196

[8620] F-NT2RM4001650//*** SEQUENCING IN PROGRESS *** Homo sapiens chromosome 4, BAC clone C0435P12; HTGS phase 1, WORKING DRAFT SEQUENCE, 10 unordered pieces.//0.99:422:59//AC004689

[8621] F-NT2RM4001662//Human mRNA for KIAA0322 gene, partial cds.//2.6e-81:449:93//AB002320

[8622] F-NT2RM4001666

[8623] F-NT2RM4001682//Mus musculus clone OST9187, genomic survey sequence.//3.2e-35:240:87//AF046699

[8624] F-NT2RM4001710//Human DNA sequence *** SEQUENCING IN PROGRESS *** from clone 126A5, WORKING DRAFT SEQUENCE.//1.9e-151:564:97//AL031447

[8625] F-NT2RM4001714//Human mRNA for KIAA0202 gene, partial cds.//7.0e-85:748:74//D86957

[8626] F-NT2RM4001715//Human DNA sequence from clone 931 K24 on chromosome 20p 12 Contains ESTs and GSSs, complete sequence.//1.2e-91:488:94//AL034430

[8627] F-NT2RM4001731//Orang-utan involucrin gene, complete cds.//0.40:530:59//M25312

[8628] F-NT2RM4001741//Mouse mRNA for talin.//1.1e-129:737:90//X56123

[8629] F-NT2RM4001746//Human DNA sequence *** SEQUENCING IN PROGRESS *** from clone 316G12, WORKING DRAFT SEQUENCE.//2.3e-49:320:89//AL031709

[8630] F-NT2RM4001754//Homo sapiens 12 p13.3 PAC RPCI5-1180D12 (Roswell Park Cancer Institute Human PAC Library) complete sequence.//6.3e-64:379:76//AC005831

[8631] F-NT2RM4001758//R. norvegicus mRNA for serine/threonine kinase MARKI.//3.7e-146:871:87//Z83868

[8632] F-NT2RM4001776//Homo sapiens mRNA for KIAA0727 protein, partial cds.//2.3e-173:803:99//AB018270

[8633] F-NT2RM4001783//Homo sapiens clone DJ0981007, complete sequence.//2.0e-165:593:99//AC006017

[8634] F-NT2RM4001810

[8635] F-NT2RM4001813//Homo sapiens BAC clone NH0364H22 from 2, complete sequence.//7.1e-31:176:84//AC005036

[8636] F-NT2RM4001819//Human p58/GTA (galactosyltransferase associated protein kinase) mRNA, complete cds.//4.4e-34:195:95//M37712

[8637] F-NT2RM4001823//Mus musculus zinc finger protein (Zfp64) mRNA, complete cds.//3.3e-51:490:75//U49046

[8638] F-NT2RM4001828//Human zinc finger containing protein ZNF157 (ZNF157) mRNA, complete cds.//5.6e-74:688:72//U28687

[8639] F-NT2RM4001836//Homo sapiens Chromosome 22q11.2 Cosmid Clone 2h In DGCR Region, complete sequence.//1.0:406:60//AC000076

[8640] F-NT2RM4001841//Mus musculus A kinase anchor protein (AKAP-KL) mRNA, alternatively spliced isoform 2, complete cds.//1.6e-131:831:86//AF033275

[8641] F-NT2RM4001842//HS_{—}3163_A2_GI 0_MR CIT Approved Human Genomic Sperm Library D Homo sapiens genomic clone Plate=3163 Col=20 Row=M, genomic survey sequence.//1.5e-05:355:60//AQ168513

[8642] F-NT2RM4001856//Caenorhabditis elegans cosmid K08F11.//4.0e-23:823:60//U70855

[8643] F-NT2RM4001858//Notophthalmus viridescens NvTboxl mRNA, partial cds.//6.4e-11:266:66//U64433

[8644] F-NT2RM4001865//Homo sapiens mRNA for atopy related autoantigen CALC.//6.9e-149:704:98//Y17711

[8645] F-NT2RM4001876//F. rubripes GSS sequence, clone 060E22bA4, genomic survey sequence.//5.7e-48:600:68//Z88651

[8646] F-NT2RM4001880//CIT-HSP-2348J1.TF CIT-HSP Homo sapiens genomic clone 2348J1, genomic survey sequence.//0.0025:61:88//AQ060809

[8647] F-NT2RM4001905//R. norvegicus CYP3A1 gene, 5′ flanking region.//2.5e-29:535:67//X98335

[8648] F-NT2RM4001922//HS_{—}2237_A1_C0_MF CIT Approved Human Genomic Sperm Library D Homo sapiens genomic clone Plate=2237 Col=19 Row=E, genomic survey sequence.//2.2e-73:364:98//AQ033732

[8649] F-NT2RM4001930//Arabidopsis thaliana genomic DNA, chromosome 5, P1 clone: MXI10, complete sequence.//4.9e-10:269:63//AB005248

[8650] F-NT2RM4001938//Homo sapiens chromosome 17, clone hRPC.1081_P_{—}3, complete sequence.//7.6e-152:311100//AC005207

[8651] F-NT2RM4001940//Homo sapiens timeless homolog mRNA, complete cds.//1.1e-170:808:98//AF098162

[8652] F-NT2RM4001953//*** SEQUENCING IN PROGRESS *** Homo sapiens chromosome 4, BAC clone B13E4; HTGS phase 1, WORKING DRAFT SEQUENCE, 10 unordered pieces.//2.7e-45:310:86//AC004046

[8653] F-NT2RM4001965//Homo sapiens genomic DNA of 8p21.3-p22 anti-oncogene of hepatocellular colorectal and non-small cell lung cancer, segment 11/11.//1.6e-107:622:90//AB020868

[8654] F-NT2RM4001969//R. norvegicus mRNA for IP63 protein.//3.9e-24:221:76//X99330

[8655] F-NT2RM4001979//Homo sapiens mRNA for KIAA0798 protein, complete cds.//1.0e-61:527:76//AB018341

[8656] F-NT2RM4001984//Human DNA sequence from cosmid U151E3, between markers on chromosome X.//5.8e-07:502:60//Z82253

[8657] F-NT2RM4001987//RPCII 1-49L11.TJ RPCII 1 Homo sapiens genomic clone R-49L 1, genomic survey sequence.//2.6e-33:177:99//AQ051701

[8658] F-NT2RM4002013//Homo sapiens chromosome 17, clone hRPK.294_J_{—}22, complete sequence.//0.019:65:90//AC005921

[8659] F-NT2RM4002018//Human high molecular weight B cell growth factor mRNA sequence.//1.0:527:57//L15344

[8660] F-NT2RM4002034//Human DNA sequence from PAC 84F12 on chromosome Xq25-Xq26.3. Contains glypican-3 precursor (intestinal protein OCI-5) (GTR2-2), ESTs and CA repeat.//0.11:322:60//AL008712

[8661] F-NT2RM4002044//Homo sapiens SS-A/Ro autoantigen 52 kda component gene, complete cds.//0.015:513:61//U01882

[8662] F-NT2RM4002054//Homo sapiens clone DJ1039L24, WORKING DRAFT SEQUENCE, 3 unordered pieces.//2.0e-44:473:76//AC005283

[8663] F-NT2RM4002055//Homo sapiens mRNA for KIAA0640 protein, partial cds.//1.0e-171:803:98//AB014540

[8664] F-NT2RM4002062//Drosophila melanogaster; Chromosome 2L; Region 36B1-36B3; P1 clone DS02528, WORKING DRAFT SEQUENCE, 8 unordered pieces.//0.0031:298:59//AC005122

[8665] F-NT2RM4002063//Oryctolagus cuniculus sarcosine oxidase (SOX) mRNA, complete cds.//1.1e-147:705:98//U82267

[8666] F-NT2RM4002066//Human mRNA for KIAA0192 gene, partial cds.//3.4e-73:889:69//D83783

[8667] F-NT2RM4002067//Homo sapiens chromosome 5, BAC clone 282B7 (LBNL HI 92), complete sequence.//1.1e-53:295:76//AC005216

[8668] F-NT2RM4002073//Mus musculus fatty acid transport protein 3 mRNA, partial cds.//7.8e-25:277:75//AF072758

[8669] F-NT2RM4002075//Homo sapiens actin binding protein MAYVEN mRNA, complete cds.//9.0e-23:588:61//AF059569

[8670] F-NT2RM4002093//Rat PYBP 1 mRNA for pyrimidine binding protein 1.//3.1e-68:544:69//X60789

[8671] F-NT2RM4002109//Mouse kif4 mRNA for microtubule-based motor protein KIF4, complete cds.//2.0e-121:762:86//D12646

[8672] F-NT2RM4002128//HS_{—}3084_A1_D04_MF CIT Approved Human Genomic Sperm Library D Homo sapiens genomic clone Plate=3084 Col=7 Row=G, genomic survey sequence.//7.7e-18:117:95//AQ186312

[8673] F-NT2RM4002140

[8674] F-NT2RM4002145//Homo sapiens chromosome 19, fosmid 37308, complete sequence.//1.8e-49:736:65//AC004152

[8675] F-NT2RM4002146//Homo sapiens MAGOH mRNA, complete cds.//6.5e-70:454:85//AF035940

[8676] F-NT2RM4002161//Homo sapiens mRNA for LAFPTPase, isoform 1, partial.//4.2e-151:763:96//AJ130763

[8677] F-NT2RM4002174//Helicobacter pylori 26695 section 18 of 134 of the complete genome.//2.1e-16:580:60//AE000540

[8678] F-NT2RM4002189//Homo sapiens DNA sequence from BAC 722E9 on chromosome 22q13.2-13.33. Contains ESTs.//1.0e-07:792:61//AL008636

[8679] F-NT2RM4002194//Mus musculus semaphorin VIa mRNA, complete cds.//3.2e-132:782:87//AF030430

[8680] F-NT2RM4002205//Rattus norvegicus nuclear-encoded mitochondrial elongation factor G mRNA, complete cds.//1.5e-40:292:84//L14684

[8681] F-NT2RM4002213

[8682] F-NT2RM4002226//Mus musculus p190-B gene, complete cds.//0.099:350:59//U67160

[8683] F-NT2RM4002251//Homo sapiens chromosome 17, clone HClT 187M2, complete sequence.//1.0:428:58//AC004448

[8684] F-NT2RM4002256//Mouse genomic DNA, chromosome 17, clone cosmid 49.1, genomic survey sequence.//9.4e-60:294:81//AB005959

[8685] F-NT2RM4002266//Fugu rubripes GSS sequence, clone 006118aG12, genomic survey sequence.//3.3e-12:217:67//AL024779

[8686] F-NT2RM4002278//HS_{—}3089_A1_E05_MF CIT Approved Human Genomic Sperm Library D Homo sapiens genomic clone Plate=3089 Col=9 Row=I, genomic survey sequence.//1.9e-64:381:92//AQ121653

[8687] F-NT2RM4002281

[8688] F-NT2RM4002287//CIT-HSP-2327E14.TF CIT-HSP Homo sapiens genomic clone 2327E14, genomic survey sequence.//9.0e-49:336:86//AQ042515

[8689] F-NT2RM4002294//Human mRNA for KIAA0281 gene, complete cds.//2.1e-48:511:72//D87457

[8690] F-NT2RM4002301//Human NotI linking clone 924A053D, genomic survey sequence.//8.9e-05:62:91//U49881

[8691] F-NT2RM4002323//Human DNA sequence from clone 59B16 on chromosome 6p22.1-22.3. Contains a pseudogene similar to GPISG20 and other exonucleases). Contains ESTs, STSs, GSSs, genomic markers D6S1691 and D6S299 and a ca repeat polymorphism, complete sequence.//4.9e-115:729:87//AL032822

[8692] F-NT2RM4002339//Homo sapiens PAC clone DJ0728D04, complete sequence.//1.1e-97:457:93//AC004865

[8693] F-NT2RM4002344//Caenorhabditis elegans cosmid K04A8.//2.2e-06:190:69//U64849

[8694] F-NT2RM4002373//Homo sapiens mRNA for KIAA0649 protein, complete cds.//2.8e-149:708:98//AB014549

[8695] F-NT2RM4002374//Homo sapiens 12q24 PAC P336P3 (Research Park Cancer Institute Human Genome PAC library) complete sequence.//0.00040:312:63//AC002978

[8696] F-NT2RM4002383//Human DNA sequence *** SEQUENCING IN PROGRESS *** from clone 469D22, WORKING DRAFT SEQUENCE.//6.8e-29:378:66//AL031284

[8697] F-NT2RM4002390

[8698] F-NT2RM4002398//CIT-HSP-2288N22.TR CIT-HSP Homo sapiens genomic clone 2288N22, genomic survey sequence.//3.4e-35:184:100//AQ001110

[8699] F-NT2RM4002409//Archaeoglobus fulgidus section 15 of 172 of the complete genome.//2.0e-16:468:59//AE001092

[8700] F-NT2RM4002438//Human HLA class III region containing NOTCH4 gene, partial sequence, homeobox PBX2 (HPBX) gene, receptor for advanced glycosylation end products (RAGE) gene, complete cds, and 6 unidentified cds, complete sequence.//1.6e-16:123:91//U89336

[8701] F-NT2RM4002446//Human DNA sequence from cosmid 443D9 from a contig from the tip of the short arm of chromosome 16, spanning 2 Mb of 16p13.3 Contains ESTs, STS and CpG islands.//9.6e-64:467:84//Z92845

[8702] F-NT2RM4002452

[8703] F-NT2RM4002457//Human DNA sequence from PAC 151B14 on chromosome 22, complete sequence.//2.2e-24:201:86//Z85988

[8704] F-NT2RM4002460//Homo sapiens PAC clone DJ0630C24 from 7q31-q32, complete sequence.//1.3e-45:487:70//AC004690

[8705] F-NT2RM4002479//Homo sapiens RNA helicase-related protein mRNA, complete cds.//2.7e-163:777:98//AF083255

[8706] F-NT2RM4002482//Homo sapiens mRNA for KIAA0691 protein, complete cds.//2.3e-93:464:97//AB014591

[8707] F-NT2RM4002493

[8708] F-NT2RM4002499//Homo sapiens clone DJ0847008, WORKING DRAFT SEQUENCE, 3 unordered pieces.//3.5e-41:442:75//AC005484

[8709] F-NT2RM4002504//Human DNA sequence from clone 391022 on chromosome 6p21.2-21.31 Contains pseudogenes similar to ribosomal protein, ESTs, GSSs, complete sequence.//3.8e-31:233:87//AL031577

[8710] F-NT2RM4002527//Fugu rubripes GSS sequence, clone 096G17aC8, genomic survey sequence.//7.7e-08:274:62//AL027162

[8711] F-NT2RM4002532

[8712] F-NT2RM4002534

[8713] F-NT2RM4002558//Mus musculus fatty acid transport protein 4 mRNA, partial cds.//3.8e-53:394:81//AF072759

[8714] F-NT2RM4002565//Mus musculus Sec8 mRNA, complete cds.//6.4e-160:902:89//AF022962

[8715] F-NT2RM4002567//CITBI-EI-2503J7.TR CITBI-EL Homo sapiens genomic clone 2503J7, genomic survey sequence.//8.5e-31:220:88//AQ263402

[8716] F-NT2RM4002571//Rattus norvegicus UDP-GalNAc:polypeptide N-acetylgalactosaminyltransferase T5 mRNA, complete cds.//5.2e-05:199:65//AF049344

[8717] F-NT2RM4002593//Homo sapiens PAC clone DJ0745K06 from 7q31, complete sequence.//0.89:275:61//AC004875

[8718] F-NT2RM4002594//Drosophila melanogaster, chromosome 2R, region 31 C 1-31 D6, P1 clone DS08879, complete sequence.//3.7e-44:768:64//AC005454

[8719] F-NT2RM4002623//Drosophila melanogaster; Chromosome 2L; Region 36BI-36B3; PI clone DS02528, WORKING DRAFT SEQUENCE, 8 unordered pieces.//7.8e-34:574:65//AC005122

[8720] F-NT2RP1000018//Homo sapiens mRNA for NIK, partial cds.//3.9e-11:582:95//AB013385

[8721] F-NT2RP1000035//Homo sapiens mRNA for NSI-binding protein (NSI-BP).//1.1e-153:747:96//AJ012449

[8722] F-NT2RP1000040//Homo sapiens genomic DNA, chromosome 21q11.1, segment 18/28, WORKING DRAFT SEQUENCE.//1.6e-125:243:88//AP000047

[8723] F-NT2RP1000063//Caenorhabditis elegans cosmid F31 C3, complete sequence.//9.6e-09:414:59//Z92784

[8724] F-NT2RP1000086//H. sapiens mRNA for zinc finger protein, Hsal2.//2.8e-183:548:91//X98834

[8725] F-NT2RP1000101//H. sapiens CpG island DNA genomic Mse1 fragment, clone 28b4, forward read cpg28b4.ft1a.//6.0e-27:163:95//Z60555

[8726] F-NT2RP100011//CIT-HSP-2307014.TR CIT-HSP Homo sapiens genomic clone 2307014, genomic survey sequence.//1.2e-11:128:81//AQ016069

[8727] F-NT2RP1000112//Human kinase (TTK) mRNA, complete cds.//1.0e-38:324:81//M86699

[8728] F-NT2RP1000124//Plasmodium falciparum DNA *** SEQUENCING IN PROGRESS *** from MAL4PI, WORKING DRAFT SEQUENCE.//0.59:476:59//AL034557

[8729] F-NT2RP1000130//DNA encoding human Hepatoma-derived Growth Factor.//2.7e-35:535:68//E08546

[8730] F-NT2RP1000163//Homo sapiens cell cycle progression 2 protein (CPR2) mRNA, complete cds.//6.7e-05:77:90//AF011792

[8731] F-NT2RP1000170//Homo sapiens clone NH0001P09, WORKING DRAFT SEQUENCE, I unordered pieces.//1.9e-20:431:64//AC006030

[8732] F-NT2RP1000174//Homo sapiens clone 24432 mRNA sequence.//2.5e-138:679:97//AF070535

[8733] F-NT2RP1000191

[8734] F-NT2RP1000202//Porcine mRNA for M130 of smooth muscle myosin phosphatase, partial cds.//5.3e-05:220:61//D89496

[8735] F-NT2RP1000243//Drosophila melanogaster DNA sequence (PI DS05273 (D80)), complete sequence.//4.7e-51:508:69//AC004373

[8736] F-NT2RP1000259

[8737] F-NT2RP1000272//Mus musculus TLS-associated protein with SR repeats mRNA, complete cds.//7.8e-142:866:88//AF042383

[8738] F-NT2RP1000324//RPCI 11-81021.TJ RPCI 11 Homo sapiens genomic clone R-81021, genomic survey sequence.//2.8e-29:182:9211AQ285136

[8739] F-NT2RP1000326//Homo sapiens metaxin 2 (MTX2) mRNA, nuclear gene encoding mitochondrial protein, complete cds.//4.2e-147:693:98//AF053551

[8740] F-NT2RP1000333//Caenorhabditis elegans cosmid C3D6, complete sequence.I/1.4e-08:281:611/Z75525

[8741] F-NT2RP1000348//H. sapiens CpG island DNA genomic Mse1 fragment, clone 12fl, reverse read cpg12f1.rt1c.//1.7e-09:71:100//Z56610

[8742] F-NT2RP1000357

[8743] F-NT2RP1000358 5.7e-16:403:61//AC005456

[8744] F-NT2RP1000363//Homo sapiens mRNA for KIAA0638 protein, partial cds.//9.8e-125:497:86//AB014538

[8745] F-NT2RP1000376//Homo sapiens calcium-independent phospholipase A2 mRNA, complete cds.//1.8e-176:877:96//AF064594

[8746] F-NT2RP1000409//Homo sapiens repetitive sequences, alphoid DNA, 2482 bp.//4.6e-106:700:84//AJ001558

[8747] F-NT2RP1000413//Homo sapiens mRNA for KIAA0587 protein, complete cds.//9.4e-178:710:98//AB011159

[8748] F-NT2RP1000416

[8749] F-NT2RP1000418//Oryctolagus cuniculus troponin T cardiac isoform mRNA, 3′ end of cds.//1.0:198:60//L40178

[8750] F-NT2RP1000439//HS_{—}2182_A1_D06_MF CIT Approved Human Genomic Sperm Library D Homo sapiens genomic clone Plate=2182 Col=1 I Row=G, genomic survey sequence.//2.1e-68:441:87//AQ024305

[8751] F-NT2RP1000443//Homo sapiens genomic DNA, chromosome 21q11.1, segment 18/28, WORKING DRAFT SEQUENCE.//3.8e-57:185:88//AP000047

[8752] F-NT2RP1000460//Homo sapiens PAC clone DJ0844F09 from 7 p12-p13, complete sequence.//2.7e-132:204:99//AC004453

[8753] F-NT2RP1000470//Human DNA from chromosome 19-specific cosmid R27090, genomic sequence, complete sequence.//4.9e-80:196:95//AC002985

[8754] F-NT2RP1000478//Human beta-tubulin class III isotype (beta-3) mRNA, complete cds.//1.9e-55:440:80//U47634

[8755] F-NT2RP1000481//Homo sapiens DNA sequence from PAC 262D12 on chromosome 1q23.3-24.3. Contains a Tenascin (Hexabrachion, Cytotactin, Neuronectin, Myotendinous antigen)-LIKE gene and a mitochondrial/chloroplast 30S ribosomal protein S14-LIKE gene preceeded by a CpG island. Contains ESTs, genomic marker Dl S2691 and STSs.//2.6e-92:562:8811Z99297

[8756] F-NT2RP1000493//Homo sapiens mRNA for KIAA0017 protein, complete cds.//2.0e-130:622:98//D87686

[8757] F-NT2RP1000513//Xanthomonas campestris campestris xpsD, xpsM, and xpsN genes, complete cds's.//0.11:360:58//M81648

[8758] F-NT2RP1000522//Homo sapiens clone DJO8110E06, WORKING DRAFT SEQUENCE, 8 unordered pieces.//4.9e-34:209:93//AC004895

[8759] F-NT2RP1000547//Cricetulus griseus COP-coated vesicle membrane protein CHOp24 mRNA, partial cds.//1.2e-08:331:63//U26264

[8760] F-NT2RP1000574//Homo sapiens homeobox protein MEIS2 (MEIS2) mRNA, partial cds.//4.4e-81:295:92//AF017418

[8761] F-NT2RP1000577//HS_{—}2228_B2_C05_MR CIT Approved Human Genomic Sperm Library D Homo sapiens genomic clone Plate=2228 Col=10 Row=F, genomic survey sequence.//1.9e-31:179:75//AQ185128

[8762] F-NT2RP1000581//Pan troglodytes von Willebrand factor (vWF) gene, partial cds.//4.7e-34:223:90//U31620

[8763] F-NT2RP1000609//Homo sapiens chromosome 11, BAC CIT-HSP-311e8 (BC269730) containing the hFEN I gene, complete sequence.//1.6e-18:229:65//AC004770

[8764] F-NT2RP1000629//Mouse clathrin-associated protein (AP47) mRNA, complete cds.//9.3e-89:584:84//M62419

[8765] F-NT2RP1000630//Human DNA sequence from PAC 151B14 on chromosome 22 Contains EST, complete sequence.//1.0:203:63//Z85989

[8766] F-NT2RP1000677//Homo sapiens chromosome 19, cosmid R30538, complete sequence.//0.0034:350:61//AC005943

[8767] F-NT2RP1000688//H. sapiens gene for mitochondrial ATP synthase c subunit (P1 form).//5.2e-10:120:80//X69907

[8768] F-NT2RP1000695

[8769] F-NT2RP1000701//Sequence 1 from patent U.S. Pat. No. 5,580,968.//2.4e-99:624:86//I30536

[8770] F-NT2RP1000721//Homo sapiens clone DJ0943F02, WORKING DRAFT SEQUENCE, 3 unordered pieces.//1.1e-19:188:81//AC004932

[8771] F-NT2RP1000730

[8772] F-NT2RP1000733//Human chromosome 16 p13.1 BAC clone CIT987SK-551G9 complete sequence.//1.3e-30:315:75//U95742

[8773] F-NT2RP1000738//Homo sapiens Wolf-Hirschhom syndrome candidate 2 protein (WHSC2) mRNA, complete cds.//8.0e-122:604:96//AF101434

[8774] F-NT2RP1000746//HS_{—}3084_A1_H03_MF CIT Approved Human Genomic Sperm Library D Homo sapiens genomic clone Plate=3084 Col=5 Row=O, genomic survey sequence.//1.5e-83:466:92//AQ186344

[8775] F-NT2RP1000767//Homo sapiens full-length insert cDNA clone ZD81B04.//2.8e-21:144:91//AF086442

[8776] F-NT2RP1000782//Homo sapiens tetraspan TM4SF (TSPAN-3) mRNA, complete cds.//2.1e-121:591:97//AF054840

[8777] F-NT2RP1000796//T. thermophilus phosphofructokinase 1 (PFK1) gene, complete cds.//0.76:263:64//M71213

[8778] F-NT2RP1000825//Human DNA sequence from clone 116F5 on chromosome 22q13. Contains part of an unknown gene and part of a RhoGAP (CDC42 GTPAse Activating Protein) LIKE gene. Contains ESTs, STSs, GSSs, genomic marker D22S1168 and a CA repeat polymorphism, complete sequence//1.5e-77:163:96//Z93244

[8779] F-NT2RP1000833//Homo sapiens cGMP-specific phosphodiesterase (PDE9A2) mRNA, complete cds.//1.3e-147:424:96//AF048837

[8780] F-NT2RP1000834//Homo sapiens alpha-methylacyl-CoA racemase mRNA, complete cds.//1.9e-89:702:79//AF047020

[8781] F-NT2RP1000836//Homo sapiens DNA sequence from PAC 434014 on chromosome 1q32.3.-41. Contains the HSDI IBI gene for Hydroxysteroid (11-beta) Dehydrogenase 1, the ADORA2BP adenosine A2b receptor LIKE pseudogene, the IRF6 gene for Interferon Regulatory Factor 6 and two novel genes. Contains ESTs and GSSs, complete sequence.//8.7e-169:842:96//AL022398

[8782] F-NT2RP1000846//Human chromosome 8 BAC clone CIT987SK-2A8 complete sequence.//3.3e-15:196:76//U96629

[8783] F-NT2RP1000851//Homo sapiens PAC clone 267D11 from 12, complete sequence.//1.6e-144:724:96//AC004812

[8784] F-NT2RP1000856//Homo sapiens tetraspan TM4SF (TSPAN-3) mRNA, complete cds.//2.1e-121:591:97//AF054840

[8785] F-NT2RP1000860//Homo sapiens KL04P mRNA, complete cds.//6.7e-106:551:95//AF064094

[8786] F-NT2RP1000902//Human DNA sequence *** SEQUENCING IN PROGRESS *** from clone 316D5, WORKING DRAFT SEQUENCE.//0.0097:55:100//Z82199

[8787] F-NT2RP1000915//H. sapiens genomic DNA fragment (clone J32A032R).//1.3e-30:174:97//Z94761

[8788] F-NT2RP1000916

[8789] F-NT2RP1000943//Hylobates lar huntingtin gene, partial exon.//0.19:103:7211L49362

[8790] F-NT2RP1000944//HS_{—}2179_B2_C 12_MR CIT Approved Human Genomic Sperm Library D Homo sapiens genomic clone Plate=2179 Col=24 Row=F, genomic survey sequence.//0.032:140:63//AQ065269

[8791] F-NT2RP1000947//Mus musculus ubiquitin conjugating enzyme (ubc4) mRNA, complete cds.//3.7e-53:461:78//U62483

[8792] F-NT2RP1000954//cSRL-143G4-u cSRL flow sorted Chromosome 11 specific cosmid Homo sapiens genomic clone cSRL-143G4, genomic survey sequence.//0.030:89:78//B01950

[8793] F-NT2RP1000958//Caenorhabditis elegans cosmid KOIC8, complete sequence.//3.9e-11:445:61//Z49068

[8794] F-NT2RP1000959//Homo sapiens PAC clone 278C19 from 12q, complete sequence.//3.3e-57:326:92//AC004263

[8795] F-NT2RP1000966//Human nucleolin gene, complete cds.//3.4e-64:197:98//M60858

[8796] F-NT2RP1000980//CIT-HSP-2314B10.TF CIT-HSP Homo sapiens genomic clone 2314B 10, genomic survey sequence.//0.32:137:6811AQ017126

[8797] F-NT2RP1000988//Human chromosome 3p21.1 gene sequence.//8.0e-72:665:80//L13435

[8798] F-NT2RP1001011//Drosophila melanogaster DNA repair protein (mei-41) gene, complete cds, and TH1 gene, partial cds.//1.3e-31:497:65//U34925

[8799] F-NT2RP1001013//HS_{—}3068_B1_B09_MR CIT Approved Human Genomic Sperm Library D Homo sapiens genomic clone Plate=3068 Col=17 Row=D, genomic survey sequence.//1.0e-24:414:66//AQ127667

[8800] F-NT2RP1001014//HS_{—}3252_B1_B05_MR CIT Approved Human Genomic Sperm Library D Homo sapiens genomic clone Plate=3252 Col=9 Row=D, genomic survey sequence.//0.00052:83:81//AQ304711

[8801] F-NT2RP1001033//Homo sapiens chromosome 17, clone hRPC.1073-F_{—}15, complete sequence.//1.3e-134:241:99//AC004686

[8802] F-NT2RP1001073//Homo sapiens PAC clone DJ1194E14 from 7p21, complete sequence.//2.5e-59:451:83//AC004993

[8803] F-NT2RP1001079//Oryctolagus cuniculus sarcosine oxidase (SOX) mRNA, complete cds.//4.5e-93:476:96//U82267

[8804] F-NT2RP1001080//Homo sapiens clone DJ0971 C03, WORKING DRAFT SEQUENCE, 18 unordered pieces.//6.6e-54:217:89//AC004938

[8805] F-NT2RP1001113

[8806] F-NT2RP1001173

[8807] F-NT2RP1001177//Rattus norvegicus histone macroH2A//1.2 mRNA, complete cds.//8.1e-26:373:68//U79139

[8808] F-NT2RP1001185//Homo sapiens clone NHO319F03, WORKING DRAFT SEQUENCE, 3 unordered pieces.//3.5e-32:388:73//AC006039

[8809] F-NT2RP1001199

[8810] F-NT2RP1001247//Homo sapiens signaling molecule LEFTY-A gene, exon 1.//2.0e-29:166:96//AF081508

[8811] F-NT2RP1001248//Homo sapiens Chromosome 11q23 PAC clone pDJ356d6, complete sequence.//7.3e-50:128:99//AC002036

[8812] F-NT2RP1001253//Homo sapiens oscillin (hLn) mRNA, complete cds.//4.3e-91:344:93//AF029914

[8813] F-NT2RP1001286//Homo sapiens chromosome X region from filamin (FLN) gene to glucose-6-phosphate dehydrogenase (G6PD) gene, complete cds's.//0.54:292:63//L44140

[8814] F-NT2RP1001294

[8815] F-NT2RP1001302

[8816] F-NT2RP1001310//Rabbit skeletal muscle mRNA for ryanodine receptor.//1.5e-07:335:64//X15750

[8817] F-NT2RP1001311//RPCI11-67014.TK RPCII 1 Homo sapiens genomic clone R-67014, genomic survey sequence.//0.26:80:75//AQ239291

[8818] F-NT2RP1001313//Homo sapiens Chromosome 11q12.2 PAC clone pDJ519o 13 containing human gene for ferritin heavy chain (FTH), complete sequence.//8.8e-75:304:98//AC004228

[8819] F-NT2RP1001361//B. taurus C1-B14.5b mRNA for NADH dehydrogenase (ubiquinone).//2.7e-57:412:84//X68647

[8820] F-NT2RP1001385

[8821] F-NT2RP1001395//Mus musculus COP9 complex subunit 7a (COPS7a) mRNA, complete cds.//1.4e-72:535:83//AF071316

[8822] F-NT2RP1001410//Homo sapiens DNA sequence from PAC 257120 on chromosome 22q13.1-13.2. Contains cytochrome P450 pseudogenes CYP2D7P, CYP2D8P, CYP2D6(D),TCF20, NADH ubiquinone oxidoreductase B14 subunit, ESTs, CA repeat, STS, GSS.//5.8e-105:570:94//AL021878

[8823] F-NT2RP1001424

[8824] F-NT2RP1001432

[8825] F-NT2RP1001449//Homo sapiens clone 24733 mRNA sequence.//1.7e-84:422:97//AF052149

[8826] F-NT2RP1001457//Xenopus laevis notchless (nle) mRNA, complete cds.//1.3e-47:471:73//AF069737

[8827] F-NT2RP1001466//HS_{—}3006_A2_D08_T7 CIT Approved Human Genomic Sperm Library D Homo sapiens genomic clone Plate=3006 Col=16 Row=G, genomic survey sequence.//0.56:289:60//AQ154336

[8828] F-NT2RP1001475//H. sapiens genomic DNA fragment (clone NLMA194R).//0.00011:91:79//Z95375

[8829] F-NT2RP1001482//Mouse oncogene (ect2) mRNA, complete cds.//4.0e-87:563:85//LI 1316

[8830] F-NT2RP1001494

[8831] F-NT2RP1001543//Drosophila melanogaster DNA sequence (P1 DSO1142 (D148)), complete sequence.//1.9e-27:387:67//AC004280

[8832] F-NT2RP1001546//Homo sapiens tetraspan TM4SF (TSPAN-3) mRNA, complete cds.//8.0e-63:314:98//AF054840

[8833] F-NT2RP1001569//Mus musculus signal recognition particle receptor beta subunit mRNA, complete cds.//1.2e-68:514:81//U17343

[8834] F-NT2RP1001616//Human clone 23665 mRNA sequence.//7.6e-40:496:74//U90913

[8835] F-NT2RP1001665//CIT-HSP-2059N5.TF CIT-HSP Homo sapiens genomic clone 2059N5, genomic survey sequence.//2.4e-45:305:88//B69912

[8836] F-NT2RP2000001//Homo sapiens clone 617 unknown mRNA, complete sequence.//1.5e-135:685:96//AF091081

[8837] F-NT2RP2000006//HS_{—}3061_B2_C03_MR CIT Approved Human Genomic Sperm Library D Homo sapiens genomic clone Plate=3061 Col=6 Row=F, genomic survey sequence.//1.9e-17:394:67//AQ178856

[8838] F-NT2RP2000007//Human mRNA for KIAA0392 gene, partial cds.//3.5e-14:241:68//AB002390

[8839] F-NT2RP2000008//Human DNA sequence *** SEQUENCING IN PROGRESS *** from clone 257E24, WORKING DRAFT SEQUENCE.//1.7e-34:147:99//AL034424

[8840] F-NT2RP2000027//Homo sapiens BAC clone RG118P15 from 8q21, complete sequence.//1.4e-32:345:75//AC005066

[8841] F-NT2RP2000032//F. rubripes GSS sequence, clone 060E22aG10, genomic survey sequence.//5.0e-41:445:72//Z88655

[8842] F-NT2RP2000040//Homo sapiens mRNA for KIAA0747 protein, partial cds.//1.9e-76:383:97//AB018290

[8843] F-NT2RP2000045//Homo sapiens tumorous imaginal discs protein Tid56 homolog (TIDI) mRNA, complete cds.//2.4e-95:467:97//AF061749

[8844] F-NT2RP2000054//CIT-HSP-2328J24.TF CIT-HSP Homo sapiens genomic clone 2328J24, genomic survey sequence.//3.3e-39:236:91//AQ043092

[8845] F-NT2RP2000056//Rat mRNA for protein tyrosine phosphatase epsilon C, partial cds.//3.2e-50:311:90//D78610

[8846] F-NT2RP2000067//Mus musculus DOC4 (Doc4) mRNA, complete cds.//3.0e-55:766:66//AF059485

[8847] F-NT2RP2000070//Homo sapiens chromosome 5, BAC clone 34j 15 (LBNL H 169), complete sequence.//2.0e-118:597:95//AC005754

[8848] F-NT2RP2000076//Homo sapiens clone NH0263G22, complete sequence.//0.0017:423:60//AC006037

[8849] F-NT2RP2000077//Homo sapiens growth arrest specific 11 (GAS 11) mRNA, complete cds.//2.1e-77:278:97//AF050079

[8850] F-NT2RP2000079//H. sapiens CpG island DNA genomic Mse1 fragment, clone 40c2, forward read cpg40c2.ft1k.//3.2e-33:197:95//Z55440

[8851] F-NT2RP2000088//Homo sapiens mRNA for KIAA0795 protein, partial cds.//2.2e-158:752:98//AB018338

[8852] F-NT2RP2000091//HS_{—}2228_A2_B02_MR CIT Approved Human Genomic Sperm Library D Homo sapiens genomic clone Plate=2228 Col=4 Row=C, genomic survey sequence.//0.26:55:90//AQ146363

[8853] F-NT2RP2000097

[8854] F-NT2RP2000098//Homo sapiens clone DJ 1098J04, WORKING DRAFT SEQUENCE, 2 unordered pieces.//2.5e-05:482:60//AC004961

[8855] F-NT2RP2000108//Homo sapiens DNA from chromosome 19, BAC 33152, complete sequence.//1.0e-22:274:69//AC003973

[8856] F-NT2RP2000114//Homo sapiens mRNA for GM3 synthase, complete cds.//4.9e-114:551:97//AB018356

[8857] F-NT2RP2000120//HS_{—}3000_B1_E03_MR CIT Approved Human Genomic Sperm Library D Homo sapiens genomic clone Plate=3000 Col=5 Row=J, genomic survey sequence.//1.8e-21:129:97//AQ090365

[8858] F-NT2RP2000126//Homo sapiens chromodomain-helicase-DNA-binding protein mRNA, complete cds.//4.2e-119:607:96//AF054177

[8859] F-NT2RP2000133//Homo sapiens PAC clone DJO44L15 from Xq23, complete sequence.//1.3e-07:339:63//AC004827

[8860] F-NT2RP2000147//Mouse clathrin-associated protein (AP47) mRNA, complete cds.//9.0e-101:638:85//M62419

[8861] F-NT2RP2000153//Human DNA sequence from clone 218J18 on chromosome Xp 11.3-11.4. Contains the NDP (Norrie Disease (Pseudoglioma)) gene and a CC1.3 Splicing Factor pseudogene. Contains ESTs, STSs and GSSs, complete sequence.//0.45:377:58//AL034370

[8862] F-NT2RP2000157//Homo sapiens Chr.14 PAC RPCI4-794B2 (Roswell Park Cancer Institute Human PAC Library) complete sequence.//4.0e-73:317:87//AC005924

[8863] F-NT2RP2000161//CIT-HSP-2353L5.TF.1 CIT-HSP Homo sapiens genomic clone 2353L5, genomic survey sequence.//3.0e-14:123:90//AQ263431

[8864] F-NT2RP2000173

[8865] F-NT2RP2000175

[8866] F-NT2RP2000183//F. rubripes GSS sequence, clone 168M02aC2, genomic survey sequence.//3.7e-06:152:66//AL007295

[8867] F-NT2RP2000195//Human DNA sequence from clone 4514 on chromosome 6q24.1-24.3. Contains two putative unknown genes, ESTs, STSs and GSSs, complete sequence.//7.6e-62:170:99//AL023581

[8868] F-NT2RP2000205

[8869] F-NT2RP2000208//Homo sapiens chromosome 19, overlapping cosmids R29828 and F25496, complete sequence.//7.2e-80:170:90//AC003030

[8870] F-NT2RP2000224//Homo sapiens Chromosome 16 BAC clone CIT987SK-A-152E5, complete sequence.//5.5e-64:400:85//AC004382

[8871] F-NT2RP2000232//Human DNA sequence from PAC 196E23 on chromosome Xq26.1-27.2. Contains the TAT-SF1 (HIV-1 transcriptional elongation factor TAT cofactor TAT-SF 1) gene, the BRS3 (Bombesin Receptor subtype-3 (Uterine Bombesin Receptor, BRS-3) gene, an unknown gene coding for two isoforms, a predicted CpG island, ESTs and STSs.//2.2e-07:280:66//Z97632

[8872] F-NT2RP2000233//Mus musculus tumor metastasis associated gene product (MAG) mRNA, complete cds.//8.8e-30:508:67//U88401

[8873] F-NT2RP2000239//Homo sapiens chromosome 4 clone B353C18 map 4q25, complete sequence.//4.0e-79:504:87//AC004066

[8874] F-NT2RP2000248

[8875] F-NT2RP2000257//Caenorhabditis elegans DNA *** SEQUENCING IN PROGRESS *** from clone Y1E3, WORKING DRAFT SEQUENCE.//0.0078:286:60//AL021388

[8876] F-NT2RP2000258//CIT-HSP-2349P21.TF CIT-HSP Homo sapiens genomic clone 2349P21, genomic survey sequence.//5.7e-82:416:97//AQ059184

[8877] F-NT2RP2000270//Homo sapiens chromosome 19, BAC CIT-B-393i15 (BC301323), complete sequence.//4.5e-29:310:73//AC006116

[8878] F-NT2RP2000274

[8879] F-NT2RP2000283//G. gallus mRNA for LRP/alpha-2-macroglobulin receptor.//6.3e-20:260:73//X74904

[8880] F-NT2RP2000288

[8881] F-NT2RP2000289

[8882] F-NT2RP2000297//FIG. 2. Nucleotide and translated protein sequences of HPF1, -2, and -9.//4.6e-69:744:70//M27877

[8883] F-NT2RP2000298//Streptomyces coelicolor cosmid 2E9.//4.4e-05:502:59//AL021530

[8884] F-NT2RP2000310//WORKING DRAFT SEQUENCE, 6 unordered pieces.//2.1e-13:173:76//AC006082

[8885] F-NT2RP2000327//Homo sapiens DNA sequence from PAC 434014 on chromosome 1q32.3.-41. Contains the HSD1 IBI gene for Hydroxysteroid (II-beta) Dehydrogenase 1, the ADORA2BP adenosine A2b receptor LIKE pseudogene, the IRF6 gene for Interferon Regulatory Factor 6 and two novel genes. Contains ESTs and GSSs, complete sequence.//8.3e-144:731:95//AL022398

[8886] F-NT2RP2000328//Human DNA sequence from clone 931 K24 on chromosome 20p12 Contains ESTs and GSSs, complete sequence.//1.9e-102:555:90//AL034430

[8887] F-NT2RP2000329//Bovine mitochondrial GTP:AMP phosphotransferase mRNA, complete cds.//6.4e-105:639:87//M25757

[8888] F-NT2RP2000337//HS_{—}2060_B1_E01_MR CIT Approved Human Genomic Sperm Library D Homo sapiens genomic clone Plate=2060 Col=1 Row=J, genomic survey sequence.//0.78:218:60//AQ243333

[8889] F-NT2RP2000346//Homo sapiens apoptosis associated protein (GADD34) mRNA, complete cds.//3.6e-129:627:97//U83981

[8890] F-NT2RP2000369//HS_{—}2182_B1_B11_MR CIT Approved Human Genomic Sperm Library D Homo sapiens genomic clone Plate=2182 Col=21 Row=D, genomic survey sequence.//2.5e-87:421:99//AQ024835

[8891] F-NT2RP2000412//Human DNA sequence from PAC 12409 on chromosome 6q21. Contains DNAJ2 (HDJ1) like pseudogene, ESTs, STSs and GSSs.//0.72:170:65//AL021327

[8892] F-NT2RP2000414//Homo sapiens HnRNP F protein mRNA, complete cds.//5.0e-66:375:93//L28010

[8893] F-NT2RP2000420//Homo sapiens full-length insert cDNA YQ86E07.//9.2e-77:423:93//AF075093

[8894] F-NT2RP2000422//Homo sapiens N-acetylglucosamine-phosphate mutase mRNA, complete cds.//2.1e-126:609:96//AF102265

[8895] F-NT2RP2000438//CITBI-EI-2519019.TR CITBI-EL Homo sapiens genomic clone 2519019, genomic survey sequence.//0.96:61:78//AQ276878

[8896] F-NT2RP2000448//Homo sapiens PAC clone DJ0740D02 from 7 p14-p15, complete sequence.//7.1e-17:341:67//AC004691

[8897] F-NT2RP2000459//H. sapiens mRNA for imogen 38.//5.7e-21:158:87//Z68747

[8898] F-NT2RP2000498//Human DNA sequence from PAC 435C23 on chromosome X. Contains ESTs.//3.2e-11:160:73//Z92844

[8899] F-NT2RP2000503//Homo sapiens PAC clone DJ1136G13 from 7q35-q36, complete sequence.//0.0031:187:66//AC005229

[8900] F-NT2RP2000510//Fugu rubripes GSS sequence, clone 066G04aCI, genomic survey sequence.//8.8e-07:179:64//AL026277

[8901] F-NT2RP2000516//Mus musculus t complex testis-specific protein (Tctex2) gene, wild type, promoter sequence.//0.19:72:81//U21671

[8902] F-NT2RP2000523//Human DNA sequence *** SEQUENCING IN PROGRESS *** from clone 150C2, WORKING DRAFT SEQUENCE.//5.0e-115:570:96//AL022318

[8903] F-NT2RP2000603//Homo sapiens mRNA for MCM3 import factor, complete cds.//8.4e-37:196:98//AB005543

[8904] F-NT2RP2000617//Homo sapiens chromosome 19, cosmid R27377, complete sequence.//0.81:354:60//AC005321

[8905] F-NT2RP2000634//Homo sapiens mRNA for KIAA0614 protein, partial cds.//1.3e-149:732:97//AB014514

[8906] F-NT2RP2000644//HS_{—}3211_A1_F06_T7 CIT Approved Human Genomic Sperm Library D Homo sapiens genomic clone Plate=3211 Col=11 Row=K, genomic survey sequence.//3.6e-42:282:86//AQ175486

[8907] F-NT2RP2000656

[8908] F-NT2RP2000658//CITBI-EI-2518N15.TF CITBI-EL Homo sapiens genomic clone 2518N15, genomic survey sequence.//0.57:141:66//AQ278386

[8909] F-NT2RP2000668

[8910] F-NT2RP2000678//Homo sapiens clone DJ0891L14, WORKING DRAFT SEQUENCE, 12 unordered pieces.//4.3e-22:433:62//AC004916

[8911] F-NT2RP2000704//Homo sapiens Xp22-175-176 BAC GSHB-484017 (Genome Systems Human BAC Library) complete sequence.//2.7e-22:270:75//AC005913

[8912] F-NT2RP2000710//Drosophila melanogaster; Chromosome 2L; Region 36B I-36B3; PI clone DS02528, WORKING DRAFT SEQUENCE, 8 unordered pieces.//1.4e-32:574:64//AC005122

[8913] F-NT2RP2000715//Homo sapiens PAC clone DJ 1066K24 from 7p 15, complete sequence.//4.8e-113:546:98//AC004540

[8914] F-NT2RP200073 I //Homo sapiens clone DJ 1106H 14, WORKING DRAFT SEQUENCE, 42 unordered pieces.//0.97:115:70//AC004965

[8915] F-NT2RP2000758//Human LIM-kinase1 and alternatively spliced LIM-kinase1 (LIMK1) gene, complete cds.//9.7e-16:162:77//U62293

[8916] F-NT2RP2000764//HS-2254_B2_D07_MF CIT Approved Human Genomic Sperm Library D Homo sapiens genomic clone Plate=2254 Col=14 Row=H, genomic survey sequence.//0.071:45:95//AQ068887

[8917] F-NT2RP2000809

[8918] F-NT2RP2000812//Egernia stokesii clone EST3 microsatellite.//0.040:158:64//AF069698

[8919] F-NT2RP2000814

[8920] F-NT2RP2000816

[8921] F-NT2RP2000819

[8922] F-NT2RP2000841//Human mRNA for KIAA0294 gene, complete cds.//1.1e-26:390:70//AB002292

[8923] F-NT2RP2000842//H. sapiens mRNA for G protein-coupled receptor Edg-2.//1.2e-44:255:93//Y09479

[8924] F-NT2RP2000845

[8925] F-NT2RP2000863//Human partial cDNA sequence, clone x874;.//5.9e-29:173:94//Z47045

[8926] F-NT2RP2000880//Homo sapiens mRNA for KIAA0741 protein, complete cds.//2.4e-140:732:94//AB018284

[8927] F-NT2RP2000892

[8928] F-NT2RP2000931//Homo sapiens mRNA for KIAA0723 protein, complete cds.//3.4e-129:610:98//AB018266

[8929] F-NT2RP2000932//Homo sapiens BAC clone GS166A23 from 7p21, complete sequence.//1.8e-37:212:84//AC005014

[8930] F-NT2RP2000938//Human DNA sequence from cosmid RJ14 from a contig from the tip of the short arm of chromosome 16, spanning 2 Mb of 16 p13.3. Contains ESTs and CpG island.//1.6e-126:682:93//Z69890

[8931] F-NT2RP2000943//Homo sapiens mRNA for KIAA0755 protein, complete cds.//5.8e-112:533:98//AB018298

[8932] F-NT2RP2000965

[8933] F-NT2RP2000970//Homo sapiens DNA sequence from BAC 747E2 on chromosome 22q12.1. Contains ESTs, STSs and GSSs and genomic marker D22S56, complete sequence.//9.2e-101:505:96//AL021393

[8934] F-NT2RP2000985//Homo sapiens chromosome 17, clone hRPK.597_M_{—}12, complete sequence.//1.6e-72:498:82//AC005277

[8935] F-NT2RP2000987//Human Chromosome 16 BAC clone CIT987SK-A-21 IC6, complete sequence.//7.4e-12:171:77//AC002394

[8936] F-NT2RP2001036//Homo sapiens chromosome 17, clone HRPC1096F1, complete sequence.//1.2e-37:390:76//AC004167

[8937] F-NT2RP2001044//HS_{—}2253_B1_G01_MF CIT Approved Human Genomic Sperm Library D Homo sapiens genomic clone Plate=2253 Col=1 Row=N, genomic survey sequence.//0.21:276:61//AQ069224

[8938] F-NT2RP2001056//Homo sapiens mRNA, chromosome 1 specific transcript K1AA0488.//3.2e-144:696:97//AB007957

[8939] F-NT2RP2001065

[8940] F-NT2RP2001070//Rattus norvegicus pyridoxine 5′-phosphate oxidase mRNA, complete cds.//4.3e-104:775:81//U91561

[8941] F-NT2RP2001081//Rattus norvegicus synaptotagmin XI mRNA, complete cds.//3.7e-69:488:82//AF000423

[8942] F-NT2RP2001094//Human DNA sequence from PAC 410Bl I on chromosome X contains STS.//7.4e-11:490:61//Z86063

[8943] F-NT2RP2001119//Human DNA sequence *** SEQUENCING IN PROGRESS *** from clone 745C22, WORKING DRAFT SEQUENCE.//5.1e-30:316:76//AL031596

[8944] F-NT2RP2001127//Human mRNA for KIAA0234 gene, complete cds.//1.1e-31:519:63//D87072

[8945] F-NT2RP2001137//HS_{—}2193_B2_D12_MR CIT Approved Human Genomic Sperm Library D Homo sapiens genomic clone Plate=2193 Col=24 Row=H, genomic survey sequence.//1.8e-11:136:78//AQ032187

[8946] F-NT2RP2001149//Homo sapiens Chromosome 22q11.2 Cosmid Clone 2h In DGCR Region, complete sequence.//6.2e-29:247:78//AC000076

[8947] F-NT2RP2001168//Human DNA sequence from clone 431 P23 on chromosome 6q27. Contains the first coding exon of the MLLT4 gene for myeloid/lymphoid or mixed-lineage leukemia (trithorax (Drosophila) homolog); translocated to, 4 (AF-6, Afadin, MLLT-4, ALL-1 fusion partner), and a Serine Palmitoyltransferase 2 (EC 2.3.1.50, Long Chain Base Biosynthesis protein 2, LCB-2, SPT-2) pseudogene. Contains ESTs, STss, GSSs, and a putative CpG island, complete sequence.//0.23:207:66//AL009178

[8948] F-NT2RP2001173//Homo sapiens mRNA for KIAA0480 protein, complete cds.//2.3e-112:567:96//AB007949

[8949] F-NT2RP2001174//RPCII 1-58L2.TK RPCI11 Homo sapiens genomic clone R-58L2, genomic survey sequence.//7.6e-07:196:64//AQ237306

[8950] F-NT2RP2001196

[8951] F-NT2RP2001218

[8952] F-NT2RP2001226//Homo sapiens LERK-6 (EPLG6) gene, exon 1.//1.1e-09:320:65//U92893

[8953] F-NT2RP2001233//Human ZFP-36 mRNA for a zinc finger protein.//6.1e-71:681:72//X51760

[8954] F-NT2RP2001245//HS_{—}3062_B1_F07_MR CIT Approved Human Genomic Sperm Library D Homo sapiens genomic clone Plate=3062 Col=13 Row=L, genomic survey sequence.//1.5e-05:268:63//AQ143177

[8955] F-NT2RP2001268//Homo sapiens mRNA for KIAA0810 protein, partial cds.//2.5e-106:514:97//AB018353-F-NT2RP2001277//Plasmodium falciparum chromosome 2, section 67 of 73 of the complete sequence.//0.32:183:64//AE001430

[8956] F-NT2RP2001290//M. musculus mRNA for 147 clone.//8.6e-102:641:86//X61455

[8957] F-NT2RP2001295//Caenorhabditis elegans DNA *** SEQUENCING IN PROGRESS *** from clone Y105E8, WORKING DRAFT SEQUENCE.//0.20:171:63//AL022594

[8958] F-NT2RP2001312//Bovine synaptophysin mRNA, complete cds.//0.98:253:58//M22967

[8959] F-NT2RP2001327//Human B12 protein mRNA, complete cds.//5.8e-29:359:71//M80783

[8960] F-NT2RP2001328//CIT-HSP-2335A5.TF CIT-HSP Homo sapiens genomic clone 2335A5, genomic survey sequence.//1.3e-65:366:94//AQ038539

[8961] F-NT2RP2001347//Homo sapiens complete genomic sequence between DI 6S3070 and D16S3275, containing Familial Mediterranean Fever gene disease.//3.8e-31:325:77//AJ003147

[8962] F-NT2RP2001366//H. sapiens CpG island DNA genomic Mse1 fragment, clone 4e11, forward read cpg4e11.f1a.//1.7e-12:98:92//Z61305

[8963] F-NT2RP2001378//HS_{—}3054_B2_A03_MR CIT Approved Human Genomic Sperm Library D Homo sapiens genomic clone Plate=3054 Col=6 Row=B, genomic survey sequence.//9.8e-17:131:89//AQ100721

[8964] F-NT2RP2001381//Arabidopsis thaliana BAC T2L5.//0.080:434:59//AF096371

[8965] F-NT2RP2001392//S. pristinaespiralis snbC gene &amp; snbDE gene.//0.019:267:59/NY11548

[8966] F-NT2RP2001394//Human DNA sequence from PAC 389A20 on chromosome X contains ESTs STS, CpG islands and polymorphic CA repeat.//1.9e-16:133:78//Z93242

[8967] F-NT2RP2001397//Bos taurus cyclin B2 (CYCB2) mRNA, complete cds.//1.3e-63:419:84//AF080219

[8968] F-NT2RP2001420//Mus musculus nuclear protein NIP45 mRNA, complete cds.//3.1e-98:747:791/U76759

[8969] F-NT2RP2001423//Xenopus laevis ER1 mRNA, complete cds.//3.7e-34:269:85//AF015454

[8970] F-NT2RP2001427//Homo sapiens Chromosome 2p13 BAC Clone hl 73, complete sequence.//3.2e-13:164:78//AC003065

[8971] F-NT2RP2001436//Mus musculus clone OST1784, genomic survey sequence.//3.0e-06:136:71//AF046702

[8972] F-NT2RP2001440//cDNA sequence coding for gamma protein.//7.9e-83:553:86//E02350

[8973] F-NT2RP2001445//P. falciparum complete gene map of plastid-like DNA (IR-A).//1.5e-09:829:57//X95275

[8974] F-NT2RP2001449//B. taurus mRNA for cleavage and polyadenylation specificity factor.//1.3e-136:766:90//X75931

[8975] F-NT2RP2001450

[8976] F-NT2RP2001467

[8977] F-NT2RP2001506//CIT-HSP-2374H21.TF CIT-HSP Homo sapiens genomic clone 2374H21, genomic survey sequence.//7.9e-14:151:80//AQ109561

[8978] F-NT2RP2001511//Oryctolagus cuniculus translation initiation factor eIF2C mRNA, complete cds.//2.6e-22:462:64//AF005355

[8979] F-NT2RP2001520//Homo sapiens mRNA for mitochondrial carrier protein ARALAR1 .//2.0e-136:657:97//Y14494

[8980] F-NT2RP2001526//Homo sapiens chromosome 17, clone hCIT.175_E_{—}5, complete sequence.//1.2e-37:357:64//AC004596

[8981] F-NT2RP2001536//Homo sapiens X-ray repair cross-complementing protein 3 (XRCC3) mRNA, complete cds.//1.6e-103:384:94//AF035586

[8982] F-NT2RP2001560

[8983] F-NT2RP2001569//Homo sapiens mRNA, chromosome 1 specific transcript KIAA0488.//4.4e-123:590:98//AB007957

[8984] F-NT2RP2001576//Schistocerca americana Antennapedia homeotic protein (Antp) mRNA, complete cds.//0.038:580:58//U32943

[8985] F-NT2RP2001581//Mus musculus semaphorin VIa mRNA, complete cds.//6.5e-09:222:66//AF030430

[8986] F-NT2RP2001597//Homo sapiens alpha2-C4-adrenergic receptor gene, complete cds.//0.0057:361:60//U72648

[8987] F-NT2RP2001601//Homo sapiens mRNA for KIAA0797 protein, partial cds.//7.2e-137:647:98//AB018340

[8988] F-NT2RP2001613

[8989] F-NT2RP2001628//H. sapiens (xs 128) mRNA, 380 bp.//1.7e-15:279:68//Z36784

[8990] F-NT2RP2001634//Homo sapiens alpha-catenin-like protein (CTNNALI) mRNA, complete cds.//5.4e-123:606:96//AF030233

[8991] F-NT2RP2001660//Homo sapiens putative 13 S Golgi transport complex 90 kD subunit brain-specific isoform mRNA, complete cds.//4.2e-144:687:97//AF058718

[8992] F-NT2RP2001663//H. sapiens mRNA for 2-phosphopyruvate-hydratase-alpha-enolase.//1.0e-36:372:74//X84907

[8993] F-NT2RP2001675//S. pombe chromosome I cosmid c2G11.//0.070:507:59//Z54354

[8994] F-NT2RP2001677//Mouse BAC CitbCJ7219 m7, genomic sequence, complete sequence.//2.0e-60:232:96//AC005259

[8995] F-NT2RP2001678//HS-2007_A_A04_T7 CIT Approved Human Genomic Sperm Library D Homo sapiens genomic clone Plate=2007 Col=8 Row=A, genomic survey sequence.//7.3e-62:370:91//AQ269699

[8996] F-NT2RP2001699//RPCI11-57B17.TK RPCII 1 Homo sapiens genomic clone R-57B17, genomic survey sequence.//0.99:141:63//AQ115592

[8997] F-NT2RP2001720//Homo sapiens PAC clone DJO167F23 from 7p15, complete sequence.//9.4e-117:604:95//AC004079

[8998] F-NT2RP2001721//Homo sapiens DNA sequence from clone 46618 on chromosome Xq11.1-13.2. Contains an unknown gene similar to Coagulation Factor V (Activated Protein C Cofactor), Coagulation Factor VIII (Procoagulant Component) and Ceruloplasmin (EC 1.16.3.1, Ferroxidase). Contains ESTs and an STS, complete sequence.//1.0:273:61//AL030998

[8999] F-NT2RP2001740//Homo sapiens Chromosome 22q11.2 Cosmid Clone 8c In DGCR Region, complete sequence.//1.0:356:62//AC000090

[9000] F-NT2RP2001748//Human mRNA for KIAA0003 gene, complete cds.//3.7e-18:151:86/11D14697

[9001] F-NT2RP2001762//Homo sapiens chromosome 1, BAC CIT-HSP-292g8 (BC262482), complete sequence.//6.0e-145:715:97//AC004783

[9002] F-NT2RP2001813//Plasmodium falciparum chromosome 2, section 15 of 73 of the complete sequence.//0.38:340:60//AE001378

[9003] F-NT2RP2001839//HS_{—}3000_B1_C07_MR CIT Approved Human Genomic Sperm Library D Homo sapiens genomic clone Plate=3000 Col=13 Row=F, genomic survey sequence.//0.026:253:60//AQ090347

[9004] F-NT2RP2001861//Homo sapiens mRNA for paraplegin.//0.89:146:71//16610

[9005] F-NT2RP2001869//Homo sapiens ZNF202 beta (ZNF202) mRNA, complete cds.//0.040:174:62//AF027219

[9006] F-NT2RP2001876//Cyprinus carpio mRNA for allograft inflammatory factor-1, complete cds.//2.8e-44:483:71//AB012309

[9007] F-NT2RP2001883//Human DNA sequence from clone 612B18 on chromosome 1q24-25.3 Contains exon from gene similar to 40S ribosomal protein, first coding exon of dynamin 2 (DYNII). ESTs, STS, GSS, CpG Island, complete sequence.//1.8e-87:496:92//AL031864

[9008] F-NT2RP2001898//Human inositol polyphosphate 5-phosphatase (5ptase) mRNA, 3′ end.//9.2e-112:633:90//M74161

[9009] F-NT2RP2001900//Caenorhabditis elegans DNA *** SEQUENCING IN PROGRESS *** from clone R08A5, WORKING DRAFT SEQUENCE.//0.0026:360:62//Z82281

[9010] F-NT2RP2001907//H. sapiens CpG island DNA genomic Mse1 fragment, clone 97fl 1, forward read cpg97f11.ft1a.//4.2e-26:206:84//Z64125

[9011] F-NT2RP2001926//Plasmodium falciparum 3D7 chromosome 12 PFYAC69 genomic sequence, WORKING DRAFT SEQUENCE, 4 unordered pieces.//5.5e-06:621:59//AC004688

[9012] F-NT2RP2001936//cSRL-47D9-u cSRL flow sorted Chromosome 11 specific cosmid Homo sapiens genomic clone cSRL-47D9, genomic survey sequence.//3.1e-50:282:93//B04856

[9013] F-NT2RP2001943//Drosophila melanogaster cosmid 25E8.//0.00036:248:60//AL009196

[9014] F-NT2RP2001946//Homo sapiens clone NHO140K04, complete sequence.//3.8e-78:232:99//AC005033

[9015] F-NT2RP2001947//Homo sapiens full-length insert cDNA clone ZD81B04.//2.0e-28:172:94//AF086442

[9016] F-NT2RP2001969//H. sapiens CpG island DNA genomic Mse1 fragment, clone 152a8, reverse read cpg152a8.rt1a.//1.0e-20:123:99//Z59378

[9017] F-NT2RP2001976

[9018] F-NT2RP2001985//Homo sapiens mRNA for KIAA0545 protein, partial cds.//0.0023:235:62//AB011117

[9019] F-NT2RP2001991//Rat orphan transporter v7-3 (NTT73) mRNA, complete cds.//3.1e-35:180:80//L22022

[9020] F-NT2RP2002025//Homo sapiens mRNA for KIAA0756 protein, partial cds.//9.8e-61:314:97//AB018299

[9021] F-NT2RP2002032//Homo sapiens chromosome 5, Bac clone 5 m9 (LBNL H220), complete sequence.//0.76:189:65//AC005895

[9022] F-NT2RP2002033//Homo sapiens clone DJ0292L20, WORKING DRAFT SEQUENCE, 2 unordered pieces.//2.9e-12:160:79//AC004825

[9023] F-NT2RP2002041//Human BAC clone RG035E18 from 7q31, complete sequence.//0.0014:123:73//AC004029

[9024] F-NT2RP2002046//Homo sapiens Xp22 BAC GSHB- 184P 14 (Genome Systems Human BAC library) complete sequence.//2.2e-86:722:77//AC004552

[9025] F-NT2RP2002047//Human DNA sequence from clone 21 F7 on chromosome 6q16.1-21. Contains part of an exon of a putative new gene and STSs and GSSs, complete sequence.//0.13:350:61//AL033375

[9026] F-NT2RP2002058//S. cerevisiae chromosome XII reading frame ORF YLR129w.//9.7e-11:480:60//Z73301

[9027] F-NT2RP2002066//Rattus norvegicus transmembrane receptor Unc5H2 mRNA, complete cds.//6.5e-97:610:86//U87306

[9028] F-NT2RP2002070//beta -ADD=adducin beta subunit 63 kda isoform/membrane skeleton protein, beta -ADD=adducin beta subunit 63 kda isoform/membrane skeleton protein {alternatively spliced, exon 10 to 13 region} [human, Genomic, 1851 nt, segment 3 of 3].//0.0059:107:73//S81083

[9029] F-NT2RP2002076//Homo sapiens clone 24804 mRNA sequence.//1.0e-127:643:96//AF052183

[9030] F-NT2RP2002078//F12016-T7.1 IGF Arabidopsis thaliana genomic clone F12016, genomic survey sequence.//0.14:191:64//AQ249805

[9031] F-NT2RP2002079//Homo sapiens clone DJ0892G19, complete sequence.//0.0094:325:60//AC004917

[9032] F-NT2RP2002099//Homo sapiens mRNA for El B-55 kDa-associated protein.//9.8e-111:533:97//AJ007509

[9033] F-NT2RP2002105//H. sapiens CpG island DNA genomic Mse1 fragment, clone 10h8, forward read cpg10h8.ft1a.//2.4e-29:178:94//Z58857

[9034] F-NT2RP2002124//CIT-HSP-2023E9.TF CIT-HSP Homo sapiens genomic clone 2023E9, genomic survey sequence.//2.5e-32:202:92//B64468

[9035] F-NT2RP2002137//Human plasma membrane calcium ATPase (hPMCA4) mRNA, complete cds.//0.095:319:59//M25874

[9036] F-NT2RP2002154//Mus musculus mRNA for myosin, complete cds.//1.0:258:63//D85923

[9037] F-NT2RP2002172//HS_{—}3020_B1_H02_T7 CIT Approved Human Genomic Sperm Library D Homo sapiens genomic clone Plate=3020 Col=3 Row=P, genomic survey sequence.//1.2e-11:124:82//AQ093169

[9038] F-NT2RP2002185//RPCI11-67B15.TJ RPCII 1 Homo sapiens genomic clone R-67B15, genomic survey sequence.//2.8e-18:109:100//AQ201833

[9039] F-NT2RP2002192//Human PM-Scl-75 autoantigen (PM-scl) mRNA, complete cds.//2.7e-36:363:78//U09215

[9040] F-NT2RP2002193//Rattus norvegicus potassium channel regulatory protein KChAP mRNA, complete cds.//9.5e-82:477:89//AF032872

[9041] F-NT2RP2002208

[9042] F-NT2RP2002219//Plasmodium falciparum DNA *** SEQUENCING IN PROGRESS *** from MAL4PI, WORKING DRAFT SEQUENCE.//1.0:378:58//AL034557

[9043] F-NT2RP2002231//Plasmodium falciparum 3D7 chromosome 12 PFYAC492 genomic sequence, WORKING DRAFT SEQUENCE, 5 unordered pieces.//0.60:560:56//AC005308

[9044] F-NT2RP2002235//P. falciparum glutamic acid-rich protein gnen, complete cds.//0.59:341:60//J03998

[9045] F-NT2RP2002252//Mus musculus mSin3A (sin3A) mRNA, complete cds.//3.5e-81:398:87//U22394

[9046] F-NT2RP2002256//Homo sapiens retinoic acid hydroxylase mRNA, complete cds.//6.6e-50:315:89//AF005418

[9047] F-NT2RP2002259//Human DNA sequence *** SEQUENCING IN PROGRESS *** from clone 118J21, WORKING DRAFT SEQUENCE.//9.7e-67:340:89//AL033527

[9048] F-NT2RP2002270//RPCII 1-77C23.TV RPCII 1 Homo sapiens genomic clone R-77C23, genomic survey sequence.//2.9e-18:79:93//AQ268098

[9049] F-NT2RP2002292//Human DNA sequence *** SEQUENCING IN PROGRESS *** from clone 321D2, WORKING DRAFT SEQUENCE.//1.0:290:60//AL031033

[9050] F-NT2RP2002312//Homo sapiens CDP-diacylglycerol synthase 2 (CDS2) mRNA, partial cds.//1.5e-93:467:96//AF069532

[9051] F-NT2RP2002316//HSS_{—}2171_B2_D11_MR CIT Approved Human Genomic Sperm Library D Homo sapiens genomic clone Plate=2171 Col=22 Row=H, genomic survey sequence.//7.3e-94:463:97//AQ119673

[9052] F-NT2RP2002325//Homo sapiens mRNA for Pex11p, complete cds.//3.9e-123:640:95//AB015594

[9053] F-NT2RP2002333

[9054] F-NT2RP2002373//F. rubripes GSS sequence, clone 026F10aB8, genomic survey sequence.//0.46:234:61//Z87330

[9055] F-NT2RP2002385//Homo sapiens synaptic glycoprotein SC2 spliced variant mRNA, complete cds.//9.4e-138:673:97//AF038958

[9056] F-NT2RP2002394//P. falciparum complete gene map of plastid-like DNA (IR-A).//0.79:421:56//X95275

[9057] F-NT2RP2002408//F. rubripes GSS sequence, clone 080G11aA8, genomic survey sequence.//5.7e-15:220:71//AL015615

[9058] F-NT2RP2002426//Sus scrofa SCAMPI gene, exon 9.//7.1e-71:582:8011AJ223742

[9059] F-NT2RP2002439//Caenorhabditis elegans cosmid T07D3.//0.0018:210:67//AF016682

[9060] F-NT2RP2002442//Caenorhabditis elegans cosmid T03F 1.//2.8e-18:295:67//U88169

[9061] F-NT2RP2002457//Homo sapiens Chromosome 16 BAC clone CIT987SK-44M2, complete sequence.//1.9e-06:281:66//AC004381

[9062] F-NT2RP2002464//Human mRNA for KIAA0086 gene, complete cds.//0.039:207:63//D42045

[9063] F-NT2RP2002475

[9064] F-NT2RP2002479//Homo sapiens mRNA for ABC transporter 7 protein, complete cds.//2.4e-123:607:96//AB005289

[9065] F-NT2RP2002498//Arabidopsis thaliana BAC F3D 13.//0.73:395:57//AF069300

[9066] F-NT2RP2002503//Homo sapiens, clone hRPK.15_A_{—}1, complete sequence.//7.2e-18:134:90//AC006213

[9067] F-NT2RP2002504//Homo sapiens mRNA for KIAA0791 protein, complete cds.//1.2e-157:761:97//AB018334

[9068] F-NT2RP2002520

[9069] F-NT2RP2002537

[9070] F-NT2RP2002546//Homo sapiens Chromosome 1q12 pac pDJ74 n 1n5, WORKING DRAFT SEQUENCE, 7 unordered pieces.//0.83:252:60//AC004127

[9071] F-NT2RP2002549//Human Chromosome 15q26.1 PAC clone pDJ457j 11 containing DNA polymerase gamma (polg) gene, complete sequence.//5.9e-93:186:99//AC005317

[9072] F-NT2RP2002591//Human DNA sequence *** SEQUENCING IN PROGRESS *** from clone 54B20, WORKING DRAFT SEQUENCE.//4.0e-38:175:78//Z98304

[9073] F-NT2RP2002595//Sequence 2 from patent U.S. Pat. No. 5,763,220.//1.5e-84:430:95//AR012155

[9074] F-NT2RP2002606//Rattus norvegicus Rabin3 mRNA, complete cds.//1.9e-43:282:87//U19181

[9075] F-NT2RP2002609//Mus musculus defender against death I (DADI) gene, partial cds.//1.5e-11:99:90//AF051310

[9076] F-NT2RP2002618//H. sapiens mRNA for arginine methyltransferase, splice variant, 1316 bp.//5.6e-27:460:63//Y10806

[9077] F-NT2RP2002621

[9078] F-NT2RP2002643//Rat calmodulin III gene for calmodulin, promoter region and exon 1.//0.023:322:60//D90397

[9079] F-NT2RP2002672//Homo sapiens chromosome 10 clone CIT-HSP-1326H7 map 10q24.3-10q25.1, complete sequence.//3.9e-149:794:94//AC005384

[9080] F-NT2RP2002701//Human DNA sequence *** SEQUENCING IN PROGRESS *** from clone 50024, WORKING DRAFT SEQUENCE.//9.2e-10:129:75//AL034380

[9081] F-NT2RP2002706//S .griseus secA gene.//1.3e-05:311:63//Y 10980

[9082] F-NT2RP2002710//Homo sapiens mRNA for KIAA0672 protein, complete cds.//2.5e-40:631:65//AB014572

[9083] F-NT2RP2002727//Rattus norvegicus tulip 2 mRNA, complete cds.//4.8e-65:600:73//AF041107

[9084] F-NT2RP2002736//S. pombe chromosome II cosmid c887.//0.17:352:58//AL033388

[9085] F-NT2RP2002740//Absidia glauca ORF, 3′ end; (+) mating type surface protein (PSSP15) gene, complete cds; ORF, 5′ end.//0.0073:274:66//M94861

[9086] F-NT2RP2002741//Homo sapiens mRNA for Neuroblastoma, complete cds.//7.5e-29:628:62//D89016

[9087] F-NT2RP2002750//Homo sapiens Xp22 Bins 35-37 BAC GSHB-214D18 (Genome Systems Human BAC Library) complete sequence.//3.6e-31:568:67//AC005296

[9088] F-NT2RP2002752//Human BAC clone RG317M02 from 7 p15-p21, complete sequence.//1.7e-08:206:63//AC002433

[9089] F-NT2RP2002753//Human DNA sequence from cosmid B11B7 on chromosome 22 contains ESTs.//2.8e-71:195:89//Z82171

[9090] F-NT2RP2002769//Streptomyces fradiae tylactone synthase, starter module and modules 1-7, (tylG) gene, complete cds.//0.0016:412:60//U78289

[9091] F-NT2RP2002778//CIT-HSP-2059C5.TF CIT-HSP Homo sapiens genomic clone 2059C5, genomic survey sequence.//6.8e-18:186:79//B69837

[9092] F-NT2RP2002800

[9093] F-NT2RP2002839//Homo sapiens Chromosome 11q12.2 PAC clone pDJ688 p12 containing uteroglobin gene, WORKING DRAFT SEQUENCE, 11 unordered pieces.//1.2e-41:134:94//AC006078

[9094] F-NT2RP2002857//Rat T-cell receptor active beta-chain V-region (V-beta6-J-beta2.5) mRNA, partial cds, clone TRB-4.//0.85:93:68//M18845

[9095] F-NT2RP2002862//HS_{—}3084_A1_H03_MF CIT Approved Human Genomic Sperm Library D Homo sapiens genomic clone Plate=3084 Col=5 Row=O, genomic survey sequence.//5.0e-67:390:91//AQ186344

[9096] F-NT2RP2002880

[9097] F-NT2RP2002891//CIT-HSP-2310014.TF CIT-HSP Homo sapiens genomic clone 2310014, genomic survey sequence.//0.11:53:90//AQ019792

[9098] F-NT2RP2002925//Pig mRNA for carbonyl reductase, complete cds.//0.66:194:65//D16511

[9099] F-NT2RP2002928//Homo sapiens pre-mRNA splicing factor (PRP17) mRNA, complete cds.//2.3e-135:628:99//AF038392

[9100] F-NT2RP2002929//F. rubripes GSS sequence, clone 123123aA1, genomic survey sequence.//3.9e-06:66:83//AL017246

[9101] F-NT2RP2002939

[9102] F-NT2RP2002954

[9103] F-NT2RP2002959//Mus musculus ubiquitin conjugating enzyme (ubc4) mRNA, complete cds.//1.3e-47:411:79//U62483

[9104] F-NT2RP2002979//CIT-HSP-2340D12.TF CIT-HSP Homo sapiens genomic clone 2340D12, genomic survey sequence.//4.6e-96:476:97//AQ057233

[9105] F-NT2RP2002980//Sequence 20 from patent EP0705842.//4.0e-13:100:94//A52230

[9106] F-NT2RP2002986//Homo sapiens actin binding protein MAYVEN mRNA, complete cds.//2.4e-09:272:61//AF059569

[9107] F-NT2RP2002987//Homo sapiens (subclone 6_d9 from PI H21) DNA sequence, complete sequence.//1.0e-22:293:67//AC000958

[9108] F-NT2RP2002993//Rattus norvegicus RNA polymerase 1127 kDa subunit mRNA, complete cds.//4.0e-74:502:84//AF025424

[9109] F-NT2RP2003000//Homo sapiens chromosome 12 p13.3, WORKING DRAFT SEQUENCE, 21 unordered pieces.//2.3e-46:474:76//AC004765

[9110] F-NT2RP2003034//Homo sapiens chromosome 17, clone hRPK.849_N_{—}15, complete sequence.//4.2e-23:202:82//AC005703

[9111] F-NT2RP2003073//Human DNA sequence from PAC 306DI on chromosome X contains ESTs.//3.4e-59:330:82//Z83822

[9112] F-NT2RP2003099//HS_{—}3008_B2_C09 T7 CIT Approved Human Genomic Sperm Library D Homo sapiens genomic clone Plate=3008 Col=18 Row=F, genomic survey sequence.//1.4e-71:362:96//AQ089786

[9113] F-NT2RP2003108//Sequence 59 from patent U.S. Pat. No. 5,773,577.//0.95:123:69//AR014362

[9114] F-NT2RP2003117//HS_{—}2034_B2_D12_T7 CIT Approved Human Genomic Sperm Library D Homo sapiens genomic clone Plate=2034 Col=24 Row=H, genomic survey sequence.//1.5e-88:461:96//AQ230797

[9115] F-NT2RP2003121//Mus musculus enhancer of polycomb (Epc1) mRNA, complete cds.//4.3e-46:470:72//AF079765

[9116] F-NT2RP2003125//Homo sapiens chromosome 19, cosmid R34382, complete sequence.//5.7e-10:436:61//AC005329

[9117] F-NT2RP2003129//P. thunbergii cab gene.//0.00044:541:60//X61915

[9118] F-NT2RP2003137//CIT-HSP-2300J6.TR CIT-HSP Homo sapiens genomic clone 2300J6, genomic survey sequence.//5.0e-78:393:9711AQ012976

[9119] F-NT2RP2003157//Human DNA sequence from cDNA 16pHQG; 16 from chromosome 16 p13.3.//5.4e-07:137:71//Z84716

[9120] F-NT2RP2003158//Homo sapiens mRNA for proteasome subunit p58, complete cds.//1.8e-111:581:93//D67025

[9121] F-NT2RP2003161//CITB1-E1-2506E20.TR CITBI-El Homo sapiens genomic clone 2506E20, genomic survey sequence.//0.0025:156:67//AQ262657

[9122] F-NT2RP2003164

[9123] F-NT2RP2003165//Human hereditary haemochromatosis region, histone 2A-like protein gene, hereditary haemochromatosis (HLA-H) gene, RoRet gene, and sodium phosphate transporter (NPT3) gene, complete cds.//1.4e-43:334:79//U91328

[9124] F-NT2RP2003177//Human signaling inositol polyphosphate 5 phosphatase SIP-110 mRNA, complete cds.//0.91:346:62//U50040

[9125] F-NT2RP2003194//Human DNA sequence *** SEQUENCING IN PROGRESS *** from clone 996D20, WORKING DRAFT SEQUENCE.//1.7e-108:511:90//AL031597

[9126] F-NT2RP2003206

[9127] F-NT2RP2003228//H. sapiens P1-Cdc21 mRNA.//2.9e-136:726:93//X74794

[9128] F-NT2RP2003230//Rattus norvegicus endo-alpha-D-mannosidase (Enman) mRNA, complete cds.//2.6e-51:348:86//AF023657

[9129] F-NT2RP2003237//Human DNA sequence *** SEQUENCING IN PROGRESS *** from clone 126A5, WORKING DRAFT SEQUENCE.//2.6e-56:415:83//AL031447

[9130] F-NT2RP2003243//RPCII 1-36J1.TP RPCI-11 Homo sapiens genomic clone RPCI-11-36J1, genomic survey sequence.//2.1e-16:112:93//AQ047107

[9131] F-NT2RP2003265//Muridae sp. (mouse-rat, neuroblastoma-glioma hybrid cell line NGD5) mRNA, complete cds.//6.0e-114:696:87//L38481

[9132] F-NT2RP2003272//RPCII 1-67B15.TJ RPCII 1 Homo sapiens genomic clone R-67B15, genomic survey sequence.//3.8e-16:110:94//AQ201833

[9133] F-NT2RP2003277//Homo sapiens mRNA for KIAA0625 protein, partial cds.//1.5e-145:714:96//AB014525

[9134] F-NT2RP2003280//RPCII 1-1412.TVB RPCI-11 Homo sapiens genomic clone RPCI-11-1412, genomic survey sequence.//6.4e-77:400:95//B85286

[9135] F-NT2RP2003286//CIT-HSP-2336D3.TF CIT-HSP Homo sapiens genomic clone 2336D3, genomic survey sequence.//5.3e-29:287:73//AQ041024

[9136] F-NT2RP2003293//Homo sapiens DNA from chromosome 19, BAC 33152, complete sequence.//1.5e-54:508:74//AC003973

[9137] F-NT2RP2003295//Homo sapiens RMP mRNA for RPB5 meidating protein, complete cds.//6.1e-85:416:97//AB006572

[9138] F-NT2RP2003297//S. pombe pho2 gene for specific p-nitrophenylphosphatase.//0.60:309:64//X62722

[9139] F-NT2RP2003307//Mus musculus kinesin light chain 2 (Klc2) mRNA, complete cds.//1.0e-45:442:75//AF055666

[9140] F-NT2RP2003308//D. melanogaster cm mRNA.//1.1e-63:697:70//X58374

[9141] F-NT2RP2003329//Homo sapiens chromosome 17, clone hCIT.131_K_{—}11, complete sequence.//0.040:145:64//AC005288

[9142] F-NT2RP2003339

[9143] F-NT2RP2003347//Plasmodium falciparum MAL3P7, complete sequence.//0.12:275:60//AL034559

[9144] F-NT2RP2003367//Homo sapiens chromosome 4 clone B368A9 map 4q25, complete sequence.//0.83:225:63//AC005510

[9145] F-NT2RP2003391

[9146] F-NT2RP2003393//HS_{—}3218_A2_B09_T7 CIT Approved Human Genomic Sperm Library D Homo sapiens genomic clone Plate=3218 Col=18 Row=C, genomic survey sequence.//0.021:93:79//AQ204356

[9147] F-NT2RP2003394

[9148] F-NT2RP2003401

[9149] F-NT2RP2003433//Rattus rattus sec61 homologue mRNA, complete cds.//4.2e-61:533:75//M96630

[9150] F-NT2RP2003445//Homo sapiens genomic DNA, chromosome 21 q11.1, segment 1/5, WORKING DRAFT SEQUENCE.//2.1e-49:301:72//AP000023

[9151] F-NT2RP2003446

[9152] F-NT2RP2003456//Rickettsia prowazekii strain Madrid E, complete genome; segment 3/4.//0.0018:366:60//AJ235272

[9153] F-NT2RP2003466//Homo sapiens chromosome 11, BAC CIT-HSP-3.11e8 (BC269730) containing the hFEN 1 gene, complete sequence.//7.5e-16:189:68//AC004770

[9154] F-NT2RP2003480//Mouse interleukin 2 receptor (p55 IL-2R) mRNA, 5′ end.//1.9e-25:197:85//M21977

[9155] F-NT2RP2003499 2.1e-08:408:61//AB000826

[9156] F-NT2RP2003506//Homo sapiens clone NH0479C13, WORKING DRAFT SEQUENCE, 12 unordered pieces.//1.9e-33:192:96//AC005236

[9157] F-NT2RP2003511//Ceratopteris richardii mRNA for CRHB 1, partial cds.//1.0:328:60//AB013801

[9158] F-NT2RP2003513//Human mRNA for KIAA0270 gene, partial cds.//7.3e-76:403:93//D87460

[9159] F-NT2RP2003517//Human osteosarcoma cell line U-20S mRNA fragment for PDGF-B chain (PDGF=platelet-derived growth factor).//1.5e-24:151:95//X03702

[9160] F-NT2RP2003522//Mouse interleukin 2 receptor (p55 IL-2R) mRNA, 5′ end.//1.3e-101:564:91//M21977

[9161] F-NT2RP2003533//Human DNA sequence from cosmid Fl 121 on chromosome 6.//2.0e-40:315:75//Z80899

[9162] F-NT2RP2003543

[9163] F-NT2RP2003559//H. sapiens CpG island DNA genomic Mse1 fragment, clone 90a5, reverse read cpg90a5.rt1a.//1.1e-20:122:99//Z56144

[9164] F-NT2RP2003564//Human 52-kD ribonucleoprotein Ro/SSA mRNA, complete cds.//8.8e-27:664:63//M34551

[9165] F-NT2RP2003567//Homo sapiens mRNA for KIAA0462 protein, partial cds.//4.1e-113:541:98//AB007931

[9166] F-NT2RP2003581

[9167] F-NT2RP2003596//F. rubripes GSS sequence, clone 036L10aF12, genomic survey sequence.//1.9e-11:210:65//AL012756

[9168] F-NT2RP2003604//Homo sapiens alpha-catenin-like protein (CTNNAL1) mRNA, complete cds.//1.9e-123:587:98//AF030233

[9169] F-NT2RP2003629

[9170] F-NT2RP2003643//Mus musculus mRNA for CMP-N-acetylneuraminic acid synthetase.//7.8e-88:582:84//AJ006215

[9171] F-NT2RP2003668//Homo sapiens clone RG270D13, WORKING DRAFT SEQUENCE, 18 unordered pieces.//5.6e-47:335:83//AC005081

[9172] F-NT2RP2003687//Homo sapiens Xp22 BAC GSHB-519E5 (Genome Systems Human BAC library) complete sequence.//1.2e-06:133:74//AC003684

[9173] F-NT2RP2003691//Human DNA sequence *** SEQUENCING IN PROGRESS *** from clone 525L6, WORKING DRAFT SEQUENCE.//1.7e-47:337:81//AL023807

[9174] F-NT2RP2003702//Rattus norvegicus ovarian-specific protein mRNA, complete cds.//1.3e-65:458:82//U44803

[9175] F-NT2RP2003704//H. sapiens CpG island DNA genomic Mse1 fragment, clone 2a9, reverse read cpg2a9.rt1e.//13.8e-17:170:84//Z60615

[9176] F-NT2RP2003706//Homo sapiens mRNA for KIAA0525 protein, partial cds.//2.6e-108:518:98//AB011097

[9177] F-NT2RP2003713//HS_{—}2016_B1_B05_MR CIT Approved Human Genomic Sperm Library D Homo sapiens genomic clone Plate=2016 Col=9 Row=D, genomic survey sequence.//1.3e-11:102:90//AQ226895

[9178] F-NT2RP2003714//Homo sapiens DNA from chromosome 19, BAC 33152, complete sequence.//1.4e-27:249:78//AC003973

[9179] F-NT2RP2003727//RPCII 1-77119.TV RPCII 1 Homo sapiens genomic clone R-77119, genomic survey sequence.//3.4e-26:294:74//AQ268303

[9180] F-NT2RP2003737//Homo sapiens clone DJ1022114, WORKING DRAFT SEQUENCE, 14 unordered pieces.//2.6e-74:194:91//AC004951

[9181] F-NT2RP2003751//Homo sapiens Chromosome 16 BAC clone CIT987SK-A-911E12, complete sequence.//1.7e-92:165:96//AC003964

[9182] F-NT2RP2003760//B. primigenius mRNA for coat protein gamma-cop.//4.5e-76:696:73//X92987

[9183] F-NT2RP2003764//Homo sapiens gene for MTG16, exon lb, partial sequence.//1.0:109:69//AB013275

[9184] F-NT2RP2003769

[9185] F-NT2RP2003770//Homo sapiens chromosome 17, clone hRPC.1050_D_{—}4, complete sequence.//3.0e-96:467:98//AC004771

[9186] F-NT2RP2003777

[9187] F-NT2RP2003781//tricarboxylate carrier [rats, liver, mRNA Partial, 2986 nt].//7.2e-107:731:82//S70011

[9188] F-NT2RP2003793//CIT-HSP-2326L12.TF CIT-HSP Homo sapiens genomic clone 2326L12, genomic survey sequence.//7.0e-20:124:95//AQ038761

[9189] F-NT2RP2003825//Homo sapiens BAC clone RG139P11 from 7q11-q21, complete sequence.//8.9e-06:151:74//AC004491

[9190] F-NT2RP2003840//Arabidopsis thaliana chromosome II BAC F12A24 genomic sequence, complete sequence.//0.018:145:69//AC005167

[9191] F-NT2RP2003857//HS_{—}3227_A2_G04_T7 CIT Approved Human Genomic Sperm Library D Homo sapiens genomic clone Plate=3227 Col=8 Row=M, genomic survey sequence.//0.96:257:61//AQ303467

[9192] F-NT2RP2003859

[9193] F-NT2RP2003871//Homo sapiens 12q24 PAC RPCII-74B13 (Roswell Park Cancer Institute Human PAC library) complete sequence.//2.0e-12:369:65//AC002375

[9194] F-NT2RP2003885//CITBI-EI-2514D6.TF CITBI-EL Homo sapiens genomic clone 2514D6, genomic survey sequence.//0.13:167:64//AQ265722

[9195] F-NT2RP2003912/nek1=serine/threonine- and tyrosine-specific protein kinase [mice, erythroleukemia cells, mRNA, 4263 nt].//1/0.3e-136:838:86//S45828

[9196] F-NT2RP2003952

[9197] F-NT2RP2003968//Homo sapiens hUBP mRNA for ubiquitin specific protease, complete cds.//2.1e-28:165:96//AB014458

[9198] F-NT2RP2003976//Human DNA sequence from clone 283E3 on chromosome 1p36.21-36.33. Contains the alternatively spliced gene for Matrix Metalloproteinase in the Female Reproductive tract MIFR1, -2, MMP21/22A, -B and -C, a novel gene, the alternatively spliced CDC2L2 gene for Cell Division Cycle 2-Like 2 (PITSLRE, p58/GTA, Galactosyltransferase Associated Protein Kinase) beta 1, beta 2-1, beta 2-2 and alpha 2-4, a 40S Ribosomal Protein S7 pseudogene, part of the KIAA0447 gene, a novel alternatively spliced gene similar to many (archae)bacterial, worm and yeast hypothetical genes, and the GNB 1 gene for Guanine Nucleotide Binding Protein (G protein), Beta polypeptide I (Transducin Beta chain 1). Contains putative CpG islands, ESTs, STSs and GSSs, complete sequence.//2.6e-24:298:74//AL031282

[9199] F-NT2RP2003981//Homo sapiens mRNA for KIAA0804 protein, partial cds.//9.9e-160:783:96//AB018347

[9200] F-NT2RP2003984

[9201] F-NT2RP2003986//Human Chromosome 11 pac pDJ197h17, WORKING DRAFT SEQUENCE, 11 unordered pieces.//1.7e-26:260:77//AC000382

[9202] F-NT2RP2003988//Human DNA sequence *** SEQUENCING IN PROGRESS *** from clone 862K6, WORKING DRAFT SEQUENCE.//9.1e-61:701:70//AL031681

[9203] F-NT2RP2004013//Human DNA sequence from clone 372K1 on chromosome 6q24 Contains EST, STS, GSS and CpG Island, complete sequence.//3.0e-123:693:91//AL023580

[9204] F-NT2RP2004014

[9205] F-NT2RP2004041//Homo sapiens chromosome 19, cosmid F 17127, complete sequence.//5.8e-83:427:87//AC004780

[9206] F-NT2RP2004042

[9207] F-NT2RP2004066//Human DNA sequence *** SEQUENCING IN PROGRESS *** from clone 134019, WORKING DRAFT SEQUENCE.//5.6e-110:528:98//AL034555

[9208] F-NT2RP2004081

[9209] F-NT2RP2004098//HS_{—}2216_A1_B12_MF CIT Approved Human Genomic Sperm Library D Homo sapiens genomic clone Plate=2216 Col=23 Row=C, genomic survey sequence.//1.0e-07:86:84//AQ145694

[9210] F-NT2RP2004124//HS_{—}3064_B2_A04_MF CIT Approved Human Genomic Sperm Library D Homo sapiens genomic clone Plate=3064 Col=8 Row=B, genomic survey sequence.//3.0e-25:155:94//AQ136993

[9211] F-NT2RP2004142//Arabidopsis thaliana genomic DNA, chromosome 5, TAC clone: K8K14, complete sequence.//1.0:220:62//AB007645

[9212] F-NT2RP2004152//Drosophila melanogaster DNA sequence (P1 DS02252 (D97)), complete sequence.//0.93:480:56//AC002493

[9213] F-NT2RP2004165//Plasmodium falciparum 3D7 chromosome 12 PFYACB8-420 genomic sequence, WORKING DRAFT SEQUENCE, 14 unordered pieces.//0.051:265:61//AC005140

[9214] F-NT2RP2004170//Homo sapiens distal-less homeobox protein (DLX7) gene, complete cds.//1.0:162:66//AF028235

[9215] F-NT2RP2004172//S. pombe chromosome II cosmid c24E9.//1.7e-06:466:59//AL021816

[9216] F-NT2RP2004187//Homo sapiens full-length insert cDNA YQ86E07.//3.5e-17:354:64//AF075093

[9217] F-NT2RP2004194//Rattus norvegicus Golgi SNARE GS 15 mRNA, complete cds.//9.4e-53:397:82//AF003998

[9218] F-NT2RP2004196

[9219] F-NT2RP2004207//Human von Willebrand factor pseudogene corresponding to exons 23 through 34.//0.0023:386:61//M60676

[9220] F-NT2RP2004226//HS_{—}2186_A1_D03_MF CIT Approved Human Genomic Sperm Library D Homo sapiens genomic clone Plate=2186 Col=5 Row=G, genomic survey sequence.//7.8e-58:370:87//AQ063813

[9221] F-NT2RP2004232//H. sapiens mRNA for protein kinase C mu.//1.2e-34:448:67//X75756

[9222] F-NT2RP2004239//Homo sapiens lok mRNA for protein kinase, complete cds.//5.2e-108:510:99//AB015718

[9223] F-NT2RP2004240//Pyrococcus horikoshii OT3 genomic DNA, 1166001-1485000 nt. position (6/7).//1.1e-12:489:61//AP000006

[9224] F-NT2RP2004242

[9225] F-NT2RP2004245

[9226] F-NT2RP2004270//Streptomyces coelicolor cosmid 1 A9.//7.5e-07:462:62//AL034446

[9227] F-NT2RP2004300//Homo sapiens chromosome 19, cosmid R33632, complete sequence.//3.5e-11:299:64//AC005781

[9228] F-NT2RP2004316//Homo sapiens EXT-like protein 2 (EXTL2) mRNA, complete cds.//4.5e-150:735:97//AF000416

[9229] F-NT2RP2004321//Drosophila melanogaster DNA sequence (P1 DS02110 (D147)), complete sequence.//0.98:267:59//AC004423

[9230] F-NT2RP2004339//Human Chromosome 16 BAC clone CIT987SK-A-355G7, complete sequence.//1.6e-40:419:75//AC002519

[9231] F-NT2RP2004347//Human DNA sequence *** SEQUENCING IN PROGRESS *** from clone 1018D12, WORKING DRAFT SEQUENCE.//1.2e-72:439:82//AL031650

[9232] F-NT2RP2004364

[9233] F-NT2RP2004365

[9234] F-NT2RP2004366//Human DNA sequence from clone 612B18 on chromosome 1q24-25.3 Contains exon from gene similar to 40S ribosomal protein, first coding exon of dynamin 2 (DYNII). ESTs, STS, GSS, CpG Island, complete sequence.//0.92:427:57//AL031864

[9235] F-NT2RP2004373//Homo sapiens cosmids Qc15C1 and 94B6 from Xq28, complete sequence.//2.6e-26:493:65//AF035397

[9236] F-NT2RP2004389//HS_{—}2183_B2_H04_MR CIT Approved Human Genomic Sperm Library D Homo sapiens genomic clone Plate=2183 Col=8 Row=P, genomic survey sequence.//2.9e-11:83:96//AQ063969

[9237] F-NT2RP2004392

[9238] F-NT2RP2004396//Homo sapiens BAC clone RG135C18 from 7q21, complete sequence.//1.1e-171:875:95//AC005164

[9239] F-NT2RP2004399//Homo sapiens SYBL1 gene.//1.4e-24:467:64//AJ004799

[9240] F-NT2RP2004400//Arabidopsis thaliana BAC TI 9B 17 from chromsome IV, near 19.3 cM, complete sequence.//0.00074:455:59//AF069441

[9241] F-NT2RP2004412//H. sapiens CpG island DNA genomic Mse1 fragment, clone 34g4, reverse read cpg34g4.rt1a.//5.0e-27:154:98//Z65369

[9242] F-NT2RP2004425

[9243] F-NT2RP2004463//Streptomyces coelicolor cosmid 2E9.//0.0053:196:65//AL021530

[9244] F-NT2RP2004476//Drosophila melanogaster cosmid 67A9.//5.2e-15:377:63//AL034388

[9245] F-NT2RP2004490//Homo sapiens chromosome 16, P1 clone 94-10H (LANL), complete sequence.//4.3e-100:497:97//AC005591

[9246] F-NT2RP2004512//Plasmodium falciparum MAL3P5, complete sequence.//2.3e-07:815:57//AL034556

[9247] F-NT2RP2004523//Homo sapiens clone DJO800GO7, complete sequence.//8.5e-138:718:95//AC004890

[9248] F-NT2RP2004538//Homo sapiens mRNA for KIAA0591 protein, partial cds.//1.4e-137:687:96//AB011163

[9249] F-NT2RP2004551//CIT-HSP-2387G7.TF.1 CIT-HSP Homo sapiens genomic clone 2387G7, genomic survey sequence.//2.1e-85:484:91//AQ239555

[9250] F-NT2RP2004568//H. vulgare GAA-satellite DNA.//2.0e-07:292:62//Z50100

[9251] F-NT2RP2004580//Human DNA sequence *** SEQUENCING IN PROGRESS *** from clone 968D22, WORKING DRAFT SEQUENCE.//4.5e-44:512:72//AL023755

[9252] F-NT2RP2004587//Candida albicans cytoskeleton assembly control protein (SLA2) gene, partial cds.//1.0:344:56//AF092908

[9253] F-NT2RP2004594//nbxb0019H 13r CUGI Rice BAC Library Oryza sativa genomic clone nbxb0019H13r, genomic survey sequence.//0.053:324:60//AQ258020

[9254] F-NT2RP2004600

[9255] F-NT2RP2004602//Homo sapiens chromosome 19, cosmid F21431, complete sequence.//0.12:109:73//AC005176

[9256] F-NT2RP2004614

[9257] F-NT2RP2004655//Homo sapiens mRNA for leucine rich protein.//2.6e-102:496:98//AJ006291

[9258] F-NT2RP2004664//Homo sapiens mRNA for KIAA0460 protein, partial cds.//1.6e-153:728:98//AB007929

[9259] F-NT2RP2004675//Homo sapiens chromosome 12q24.1, WORKING DRAFT SEQUENCE, 33 unordered pieces.//0.092:239:61//AC005805

[9260] F-NT2RP2004681//Human DNA sequence from clone 51J23 on chromosome Xq26.3-27.3. Contains an EST and GSSs, complete sequence.//1.0:236:61//AL031312

[9261] F-NT2RP2004689//Homo sapiens mRNA for KIAA0625 protein, partial cds.//1.3e-59:327:94//AB014525

[9262] F-NT2RP2004709//HS_{—}2033_B2_E04_MR CIT Approved Human Genomic Sperm Library D Homo sapiens genomic clone Plate=2033 Col=8 Row=J, genomic survey sequence.//1.9e-15:187:74//AQ230714

[9263] F-NT2RP2004710//HS_{—}3185_B2_D07_T7 CIT Approved Human Genomic Sperm Library D Homo sapiens genomic clone Plate=3185 Col=14 Row=H, genomic survey sequence.//9.9e-10:110:84//AQ172885

[9264] F-NT2RP2004736//Homo sapiens mRNA for KIAA0478 protein, complete cds.//6.4e-117:582:96//AB007947

[9265] F-NT2RP2004743//Human DNA sequence from PAC 37M17 chromosome X.//0.14:138:71//Z78022

[9266] F-NT2RP2004767//H. sapiens CpG island DNA genomic Mse1 fragment, clone 65cl 1, reverse read cpg65c11.rt1a.//1.3e-24:217:81//Z62210

[9267] F-NT2RP2004768//Homo sapiens STE20-like kinase 3 (mst-3) mRNA, complete cds.//1.6e-45:541:71//AF024636

[9268] F-NT2RP2004775//Plasmodium falciparum chromosome 2, section 35 of 73 of the complete sequence.//5.8e-13:697:59//AE001398

[9269] F-NT2RP2004791//Human HeLa mRNA isolated as a false-positive in a two-hybrid-screen.//5.0e-53:353:84//U56252

[9270] F-NT2RP2004799//Homo sapiens ATP-specific succinyl-CoA synthetase beta subunit (SCS) mRNA, partial cds.//1.5e-116:594:95//AF058953

[9271] F-NT2RP2004802

[9272] F-NT2RP2004816//Homo sapiens H beta 58 homolog mRNA, complete cds.//2.1e-101:495:97//AF054179

[9273] F-NT2RP2004841//Human DNA sequence from cosmid J138017, between markers DXS6791 and DXS8038 on chromosome X contains EST CA repeat and an endogenous retroviral like element.//7.6e-82:531:84//Z72519

[9274] F-NT2RP2004861//Fugu rubripes GSS sequence, clone 040017bA3, genomic survey sequence.//0.96:183:64//AL025645

[9275] F-NT2RP2004897//Human Chromosome X clone bWXD187, complete sequence.//4.8e-142:710:96//AC004383

[9276] F-NT2RP2004933//Homo sapiens mRNA for ZIP-kinase, complete cds.//2.0e-82:418:95//AB007144

[9277] F-NT2RP2004936

[9278] F-NT2RP2004959//HS_{—}3197_A2_G111_MR CIT Approved Human Genomic Sperm Library D Homo sapiens genomic clone Plate=3197 Col=22 Row=M, genomic survey sequence.//3.5e-25:218:83//AQ150183

[9279] F-NT2RP2004961//Rattus norvegicus KRAB/zinc finger suppressor protein 1 (KS 1) mRNA, complete cds.//2.5e-59:339:79//U56732

[9280] F-NT2RP2004962//Human hereditary haemochromatosis region, histone 2A-like protein gene, hereditary haemochromatosis (HLA-H) gene, RoRet gene, and sodium phosphate transporter (NPT3) gene, complete cds.//3.6e-19:187:72//U91328

[9281] F-NT2RP2004967//Plasmodium falciparum MAL3P6, complete sequence.//0.0020:297:61//Z98551

[9282] F-NT2RP2004978//Chlamydomonas reinhardtii VSP-3 mRNA, complete cds.//0.22:162:69//L29029

[9283] F-NT2RP2004982//F26D4-Sp6 IGF Arabidopsis thaliana genomic clone F26D4, genomic survey sequence.//0.13:273:61//B12642

[9284] F-NT2RP2004985//Human mRNA for KIAA0144 gene, complete cds.//1.5e-20:431:65//D63478

[9285] F-NT2RP2004999

[9286] F-NT2RP2005000//R. rattus gene for beta-1 subunit of Na,K-ATPase.//0.019:240:63//X63375

[9287] F-NT2RP2005001//Homo sapiens mRNA for KIAA0615 protein, complete cds.//6.0e-159:782:97//AB014515

[9288] F-NT2RP2005003//H. sapiens Staf50 mRNA.//3.1e-42:430:75//X82200

[9289] F-NT2RP2005012//Homo sapiens SEC63 (SEC63) mRNA, complete cds.//1.4e-98:501:96//AF100141

[9290] F-NT2RP2005018//Homo sapiens PAC clone DJ0659J06 from 7q33-q35, complete sequence.//1.0:209:63//AC004849

[9291] F-NT2RP2005020

[9292] F-NT2RP2005022//Human Chromosome 3 pac pDJ70i11, WORKING DRAFT SEQUENCE, 2 unordered pieces.//3.0e-43:98:93//AC000380

[9293] F-NT2RP2005031//HS_{—}2052_B2_G10_MR CIT Approved Human Genomic Sperm Library D Homo sapiens genomic clone Plate=2052 Col=20 Row=N, genomic survey sequence.//0.019:363:61//AQ231464

[9294] F-NT2RP2005037//Human 3′ of immunoglobulin heavy chain locus (IGHA2) gene.//0.70:174:65//U64454

[9295] F-NT2RP2005038//Homo sapiens chromosome 17, clone hRPK.74_E_{—}22, complete sequence.//0.20:519:57//AC005696

[9296] F-NT2RP2005108

[9297] F-NT2RP2005116//Homo sapiens mRNA for KIAA0664 protein, partial cds.//2.0e-103:495:98//AB014564

[9298] F-NT2RP2005126//H. sapiens mRNA for RNA helicase (Myc-regulated dead box protein).//2.9e-27:157:98//X98743

[9299] F-NT2RP2005139//Amycolatopsis mediterranei genes encoding rifamycin polyketide synthases, ORFs 1 to 5.//0.00024:547:59//AJ223012

[9300] F-NT2RP2005140//Homo sapiens chromosome 21, Neurofibromatosis 1 (NF 1) related locus, complete sequence.//0.95:191:62//AC004527

[9301] F-NT2RP2005144//Homo sapiens tubby like protein 3 (TULP3) mRNA, complete cds.//2.6e-89:447:96//AF045583

[9302] F-NT2RP2005147//HSS_{—}3184_A1_E00_MR CIT Approved Human Genomic Sperm Library D Homo sapiens genomic clone Plate=3184 Col=1 Row=I, genomic survey sequence.//0.10:294:60//AQ252226

[9303] F-NT2RP2005159//H. sapiens CpG island DNA genomic Mse1 fragment, clone 132g6, forward read cpg132g6.ft1a.//1.1e-13:93:97//Z59162

[9304] F-NT2RP2005162//Caenorhabditis elegans cosmid F01F1.//2.6e-20:394:64//U13070

[9305] F-NT2RP2005168//Homo sapiens mRNA for El B-55 kDa-associated protein.//1.4e-125:633:96//AJ007509

[9306] F-NT2RP2005204//Arabidopsis thaliana ubiquitin activating enzyme (UBA1) gene, complete cds.//0.00016:316:60//U80808

[9307] F-NT2RP2005227//Homo sapiens PAC clone DJ0905J08 from 7 p12-p14, complete sequence.//0.51:52:92//AC005189

[9308] F-NT2RP2005239//S. pombe chromosome II cosmid c21 D 10.//1.3e-22:356:67//AL031536

[9309] F-NT2RP2005254

[9310] F-NT2RP2005270//H. sapiens genomic DNA (chromosome 3; clone NL197R).//0.58:132:65//X87513

[9311] F-NT2RP2005276//Rat mRNA for brain acyl-CoA synthetase II, complete cds.//9.0e-103:656:85//D30666

[9312] F-NT2RP2005287//Cavia porcellus zinc finger protein (zfoCl) mRNA, complete cds.//3.4e-37:302:84//L26335

[9313] F-NT2RP2005288//Homo sapiens RCC 1-like G exchanging factor RLG mRNA, complete cds.//7.1e-122:604:96//AF060219

[9314] F-NT2RP2005289//Homo sapiens mRNA for XRP2 protein.//4.0e-140:670:98//AJ007590

[9315] F-NT2RP2005293//HS_{—}3245-B1_E10_T7 CIT Approved Human Genomic Sperm Library D Homo sapiens genomic clone Plate=3245 Col=19 Row=J, genomic survey sequence.//8.2e-37:223:92//AQ217454

[9316] F-NT2RP2005315//Homo sapiens mRNA for KIAA0676 protein, partial cds.//1.1e-95:483:96//AB014576

[9317] F-NT2RP2005325//Human LIM-homeobox domain protein (hLH-2) mRNA, complete cds.//8.2e-22:166:90//U11701

[9318] F-NT2RP2005336//Homo sapiens snRNA activating protein complex 190 kD subunit (SNAP 190) mRNA, complete cds.//0.39:353:62//AF032387

[9319] F-NT2RP2005344//Homo sapiens mRNA for KIAA0566 protein, partial cds.//8.8e-29:456:66//AB011138

[9320] F-NT2RP2005354//Human DNA sequence from PAC 435C23 on chromosome X. Contains ESTs.//0.72:431:61//Z92844

[9321] F-NT2RP2005358//Homo sapiens methyl-CpG binding protein MBD3 (MBD3) mRNA, complete cds.//4.7e-99:489:96//AF072247

[9322] F-NT2RP2005360//Pan troglodytes huntingtin gene, partial exon.//0.93:105:67//L49358

[9323] F-NT2RP2005393//Rat parathyroid hormone receptor mRNA, complete cds.//2.4e-08:97:83//M77184

[9324] F-NT2RP2005407

[9325] F-NT2RP2005436//Homo sapiens chromosome 16, cosmid clone 2H2 (LANL), complete sequence.//0.014:235:62//AC005346

[9326] F-NT2RP2005441//CIT-HSP-2338P5.TR CIT-HSP Homo sapiens genomic clone 2338P5, genomic survey sequence.//4.0e-107:532:97//AQ055548

[9327] F-NT2RP2005453//F21C16TFC IGF Arabidopsis thaliana genomic clone F21C16, genomic survey sequence.//1.0:239:61//B97865

[9328] F-NT2RP2005457//B. taurus C1-B14.5b mRNA for NADH dehydrogenase (ubiquinone).//4.7e-25:245:79//X68647

[9329] F-NT2RP2005464//Human DNA sequence from clone 836E8 on chromosome 20p12 Contains EST, CA repeat, STS, GSS, retroviral sequence, complete sequence.//4.6e-111:724:86//AL031679

[9330] F-NT2RP2005465//Homo sapiens chromosome 19, BAC CIT-B-393i15 (BC301323), complete sequence.//6.5e-18:152:75//AC006116

[9331] F-NT2RP2005472//Human DNA sequence from clone 1118D24 on chromosome 1p36.11-36.33. Contains part of a novel gene similar to worm genes T08G11 and C25H3.9, part of a 60S Ribosomal Protein L10 LIKE (pseudo)gene and two 3′ exons of the TNFR2 gene for Tumor Necrosis Factor Receptor 2 (75 kD) (TNF Binding Protein 2, TBPII, TNF-R2, CD120B, TNFBR). Contains ESTs, STSs, GSSs, genomic marker DI S434 and a ca repeat polymorphism, complete sequence.//4.4e-12:89:97//AL031276

[9332] F-NT2RP2005476//Homo sapiens BAC clone RG293F 17 from 7p 15-p21, complete sequence.//4.3e-40:463:73//AC004130

[9333] F-NT2RP2005490//Homo sapiens clone NH0001P09, WORKING DRAFT SEQUENCE, 1 unordered pieces.//3.2e-115:228:99//AC006030

[9334] F-NT2RP2005491//HS_{—}2253_A2_G10_MR CIT Approved Human Genomic Sperm Library D Homo sapiens genomic clone Plate=2253 Col=20 Row=M, genomic survey sequence.//4.6e-23:234:80//AQ116847

[9335] F-NT2RP2005495

[9336] F-NT2RP2005496//HS_{—}3064_A1_F08_MR CIT Approved Human Genomic Sperm Library D Homo sapiens genomic clone Plate=3064 Col=15 Row=K, genomic survey sequence.//5.3e-90:436:98//AQ143097

[9337] F-NT2RP2005498//Rabbit protein phosphatase 2A beta subunit mRNA, complete cds.//1.4e-63:503:78//M64931

[9338] F-NT2RP2005501//Homo sapiens chromosome 10 clone CIT987SK-1143A11 map 10q25, complete sequence.//0.86:183:63//AC005880

[9339] F-NT2RP2005509//Homo sapiens cosmid LM1937 from Xq28.//1.0:160:65//U82695

[9340] F-NT2RP2005520//Homo sapiens chromosome-associated protein-E (hCAP-E) mRNA, complete cds.//3.9e-81:444:92//AF092563

[9341] F-NT2RP2005525//Homo sapiens mRNA for KIAA0764 protein, complete cds.//6.9e-18:112:99//AB018307

[9342] F-NT2RP2005531//Human structural protein 4.1 mRNA, complete cds.//1.1e-06:282:60//M14993

[9343] F-NT2RP2005539//Homo sapiens mRNA for NS1-binding protein (NS1-BP).//2.9e-153:747:97//AJ012449

[9344] F-NT2RP2005540//Homo sapiens mRNA for KIAA0494 protein, complete cds.//5.9e-130:618:98//AB007963

[9345] F-NT2RP2005549//Mus musculus clone OST142, genomic survey sequence.//3.1e-43:277:89//AF046734

[9346] F-NT2RP2005555//HS_{—}2188_A2_D04_MR CIT Approved Human Genomic Sperm Library D Homo sapiens genomic clone Plate=2188 Col=8 Row=G, genomic survey sequence.//8.0e-05:195:65//AQ086723

[9347] F-NT2RP2005557//Homo sapiens clone 486790 diphosphoinositol polyphosphate phosphohydrolase mRNA, complete cds.//2.5e-44:473:71//AF062529

[9348] F-NT2RP2005581//Homo sapiens BAC clone GS180J15 from 7q31, complete sequence.//0.99:213:65//AC005016

[9349] F-NT2RP2005600//H. sapiens CpG island DNA genomic Mse1 fragment, clone 172d12, reverse read cpg172d12.rt1a.//0.32:134:63//Z57359

[9350] F-NT2RP2005605

[9351] F-NT2RP2005620//Homo sapiens epsin 2a mRNA, complete cds.//9.8e-91:447:97//AF062085

[9352] F-NT2RP2005622

[9353] F-NT2RP2005635//Saccharomyces cerevisiae chromosome VIII cosmid 9205.//8.6e-17:411:61//U10556

[9354] F-NT2RP2005637//NATI (NATI* 10)=acetyltransferase I {3′ region, polyadenylation polymorphism} [human, unrelated Caucasians, mRNA Partial Mutant, 300 nt].//0.22:156:65//S78829

[9355] F-NT2RP2005640//Mouse U6 RNA gene.//5.5e-19:249:76//X06980

[9356] F-NT2RP2005645//HS_{—}2201_B2_D07_MF CIT Approved Human Genomic Sperm Library D Homo sapiens genomic clone Plate=2201 Col=14 Row=H, genomic survey sequence.//0.30:159:65//AQ066763

[9357] F-NT2RP2005651//H. sapiens DNA sequence.//0.00037:150:66//Z22493

[9358] F-NT2RP2005654//Homo sapiens mRNA for KIAA0288 gene, complete cds.//4.7e-07:351:62//AB006626

[9359] F-NT2RP2005669//Homo sapiens KE05 protein mRNA, complete cds.//8.2e-98:472:98//AF064605

[9360] F-NT2RP2005675//Homo sapiens growth suppressor related (DOC-IR) mRNA, complete cds.//2.4e-94:462:98//AF089814

[9361] F-NT2RP2005683//HS-1024-B1-H05-MF.abi CIT Human Genomic Sperm Library C Homo sapiens genomic clone Plate=CT 803 Col=9 Row=P, genomic survey sequence.//0.99:156:64//B34405

[9362] F-NT2RP2005690//Human pyrroline 5-carboxylate reductase mRNA, complete cds.//7.7e-10:328:61//M77836

[9363] F-NT2RP2005694

[9364] F-NT2RP2005701//Homo sapiens 12 p13.3 BAC RPC111-288K12 (Roswell Park Cancer Institute Human BAC Library) complete sequence.//0.72:160:65//AC005183

[9365] F-NT2RP2005712//Homo sapiens mRNA for KIAA0799 protein, partial cds.//1.6e-124:599:97//AB018342

[9366] F-NT2RP2005719//R. norvegicus mRNA for metallothionein-III.//0.86:117:64//X89603

[9367] F-NT2RP2005722//Human zinc finger protein ZNF136.//2.6e-44:415:77//U09367

[9368] F-NT2RP2005723//Human BAC clone GS542D18 from 7q31-q32, complete sequence.//6.9e-15:153:81//AC002528

[9369] F-NT2RP2005726//Homo sapiens clone DJ0577P23, WORKING DRAFT SEQUENCE, 28 unordered pieces.//5.1e-41:138:95//AC005627

[9370] F-NT2RP2005732//Human DNA sequence *** SEQUENCING IN PROGRESS *** from clone 291 J10, WORKING DRAFT SEQUENCE.//0.61:303:60//Z93017

[9371] F-NT2RP2005741//Homo sapiens PALM gene, exon 1 and joined CDS.//0.52:116:67//Y16270

[9372] F-NT2RP2005748//Human KoxII mRNA for zinc finger protein, partial.//0.11:136:66//X52342

[9373] F-NT2RP2005752//Homo sapiens TNFR-related death receptor-6 (DR6) mRNA, complete cds.//7.8e-22:134:96//AF068868

[9374] F-NT2RP2005753//Homo sapiens 1-1 receptor candidate protein mRNA, complete cds.//1.2e-100:486:98//AF082516

[9375] F-NT2RP2005763//Human mRNA for KIAA0111 gene, complete cds.//0.00073:425:56//D21853

[9376] F-NT2RP2005767//G. gallus PB1 gene.//2.1e-73:544:80//X90849

[9377] F-NT2RP2005773//Human pyrroline 5-carboxylate reductase mRNA, complete cds.//6.2e-15:153:82//M77836

[9378] F-NT2RP2005775//Sus scrofa mRNA for soluble angiotesin-binding protein, complete cds.//1.2e-121:649:88//D11336

[9379] F-NT2RP200578 I //Pseudomonas aeruginosa gene for MexX and MexY, complete cds.//0.96:184:60//AB015853

[9380] F-NT2RP2005784//Human DNA sequence *** SEQUENCING IN PROGRESS *** from clone 1185N5, WORKING DRAFT SEQUENCE.//1.9e-63:222:96//AL034423

[9381] F-NT2RP2005804//Oryza sativa glycine-rich protein (OSGRPI) mRNA, complete cds.//2.6e-07:232:64//AF010579

[9382] F-NT2RP2005812

[9383] F-NT2RP2005815//Streptomyces sp. gene for alkaline serine protease I.//0.031:358:59//X74103

[9384] F-NT2RP2005835//Rattus norvegicus mRNA for p47, complete cds.//2.5e-107:449:91//AB002086

[9385] F-NT2RP2005841//Human DNA sequence from cosmid U209G1 on chromosome X.//5.1e-05:144:73//Z68873

[9386] F-NT2RP2005853//RPCI11-24D4.TKBF RPCI-11 Homo sapiens genomic clone RPCI-11-24D4, genomic survey sequence.//6.4e-13:130:85//AQ013490

[9387] F-NT2RP2005857//Homo sapiens chromosome-associated protein-C (hCAP-C) mRNA, partial cds.//1.7e-174:829:98//AF092564

[9388] F-NT2RP2005859//Human DNA sequence *** SEQUENCING IN PROGRESS *** from clone 914P20, WORKING DRAFT SEQUENCE.//0.25:174:62//AL034553

[9389] F-NT2RP2005868//Fugu rubripes GSS sequence, clone 103124aF4, genomic survey sequence.//7.8e-06:92:79//AL027276

[9390] F-NT2RP2005886//HS_{—}3187_A2_D08_T7 CIT Approved Human Genomic Sperm Library D Homo sapiens genomic clone Plate=3187 Col=16 Row=G, genomic survey sequence.//7.1e-95:494:95//AQ155885

[9391] F-NT2RP2005890//Mouse oncogene (ect2) mRNA, complete cds.//2.7e-32:660:66//L1316

[9392] F-NT2RP2005901//H. sapiens CpG island DNA genomic Mse1 fragment, clone 15b5, reverse read cpg15b5.rt1a.//0.0026:66:84//Z54729

[9393] F-NT2RP2005908//Homo sapiens 12q13.1 PAC RPCI3-197B17 (Roswell Park Cancer Institute Human PAC library) complete sequence.//6.4e-49:481:75//AC004241

[9394] F-NT2RP2005933//Rattus norvegicus nucleoporin p54 mRNA, complete cds.//6.6e-61:657:73//U63840

[9395] F-NT2RP2005942//H. sapiens PAP mRNA.//1.6e-46:618:67//X76770

[9396] F-NT2RP2005980//Homo sapiens chromosome 17, clone hRPC.1081_P_{—}3, complete sequence.//1.0e-48:533:71//AC005207

[9397] F-NT2RP2006023//HS_{—}3048_A1_A11_MF CIT Approved Human Genomic Sperm Library D Homo sapiens genomic clone Plate=3048 Col=21 Row=A, genomic survey sequence.//2.1e-25:167:91//AQ126553

[9398] F-NT2RP2006038//CIT-HSP-384K4.TR CIT-HSP Homo sapiens genomic clone 384K4, genomic survey sequence.//3.9e-06:102:74//B51912

[9399] F-NT2RP2006043//Human intercrine-alpha (hIRH) mRNA, complete cds.//1.9e-05:418:59//U19495

[9400] F-NT2RP2006052//Peromyscus polionotus ammobates dinucleotide microsatellite Ppa55.//0.0035:226:65//AF016861

[9401] F-NT2RP2006069//Human HepG2 partial cDNA, clone hmd3g02m5.//3.9e-11:121:85//D17047

[9402] F-NT2RP2006071

[9403] F-NT2RP2006098//Homo sapiens chromosome 21 q22.2, cosmid D13 C2, complete sequence.//0.46:264:59//AF027207

[9404] F-NT2RP2006100//Human Chromosome X, complete sequence.//3.2e-94:488:95//AC004073

[9405] F-NT2RP2006103//HS_{—}2254_A2_D02_MR CIT Approved Human Genomic Sperm Library D Homo sapiens genomic clone Plate=2254 Col=4 Row=G, genomic survey sequence.//5.7e-27:156:96//AQ129602

[9406] F-NT2RP2006106//Human Chromosome 11 pac pDJ1173a5, complete sequence.//1.2e-62:655:71//AC000378

[9407] F-NT2RP2006141//Human DNA sequence *** SEQUENCING IN PROGRESS *** from clone 537K23, WORKING DRAFT SEQUENCE.//1.2e-69:316:98//AL034405

[9408] F-NT2RP2006166//Homo sapiens chromosome 4 clone B3218, complete sequence.//3.1e-45:387:81//AC004063

[9409] F-NT2RP2006184//Cricetulus griseus beta-1,6-N-acetylglucosaminyltransferase Lec4A cell line point mutant mRNA, complete cds.//0.99:111:73//U62587

[9410] F-NT2RP2006186//Homo sapiens mRNA for KIAA0654 protein, partial cds.//7.8e-113:567:96//AB014554

[9411] F-NT2RP2006196//Homo sapiens clone DJ11189D06, complete sequence.//2.8e-28:718:62//AC005232

[9412] F-NT2RP2006200//Homo sapiens chromosome 12p13.3 clone RPCII -96H9, WORKING DRAFT SEQUENCE, 66 unordered pieces.//6.5e-83:239:94//AC006057

[9413] F-NT2RP2006219//H. sapiens mRNA for DGCR6 protein.//1.4e-116:618:93//X96484

[9414] F-NT2RP2006237//CIT-HSP-2300P9.TR CIT-HSP Homo sapiens genomic clone 2300P9, genomic survey sequence.//2.0e-18:118:97//AQ012480

[9415] F-NT2RP2006238//Rattus norvegicus CTD-binding SR-like protein rA8 mRNA, complete cds.//7.6e-102:635:86//U49055

[9416] F-NT2RP2006258//RPCII 1-9N9.TP RPCI-11 Homo sapiens genomic clone RPCI-11-9N9, genomic survey sequence.//8.6e-05:181:63//B71615

[9417] F-NT2RP2006261//H. sapiens mRNA for serine/threonine protein kinase EMK.//0.44:1111:71//X97630

[9418] F-NT2RP2006275//Pseudorabies virus UL[5,6,7,8,8.5,9,10,11,12,13] genes.//2.0e-05:501:59//X97257

[9419] F-NT2RP2006312//Homo sapiens BAF57 (BAF57) gene, complete cds.//2.7e-138:679:97//AF035262

[9420] F-NT2RP2006320//P. falciparum pfmdr1 gene.//0.00013:425:60//X56851

[9421] F-NT2RP2006321//Homo sapiens DNA from chromosome 19, BAC 33152, complete sequence.//4.1e-19:545:62//AC003973

[9422] F-NT2RP2006323//Human DNA sequence *** SEQUENCING IN PROGRESS *** from clone 745114, WORKING DRAFT SEQUENCE.//8.9e-18:131:90//AL033532

[9423] F-NT2RP2006333//Homo sapiens PAC clone DJ0808A01 from 7q21.1-q31.1, complete sequence.//6.2e-125:602:98//AC004893

[9424] F-NT2RP2006334//Homo sapiens chromosome 19, cosmid R27139, complete sequence.//2.1e-06:241:65//AC005514

[9425] F-NT2RP2006365//Fugu rubripes GSS sequence, clone 171K15aC5, genomic survey sequence.//7.8e-06:148:70//AL029590

[9426] F-NT2RP2006393//Human DNA sequence from clone 80119 on chromosome 6p21.31-22.2 Contains genes and pseudogenes for olfactory receptor-like proteins, STS, GSS, complete sequence.//6.8e-06:167:70//AL022727

[9427] F-NT2RP2006436//Human DNA sequence *** SEQUENCING IN PROGRESS * from clone Y313F4, WORKING DRAFT SEQUENCE.//4.2e-92:363:84//AL023808

[9428] F-NT2RP2006441

[9429] F-NT2RP2006454//Sequence 8 from patent WO9517522.//2.9e-06:180:66//A45338

[9430] F-NT2RP2006456

[9431] F-NT2RP2006464//Homo sapiens mRNA for AND-1 protein.//3.4e-148:545:98//AJ006266

[9432] F-NT2RP2006467//Sus scrofa IgM heavy chain gene, switch region and exons encoding ch1-ch4 and secretion domains, partial cds.//0.061:201:66//U50149

[9433] F-NT2RP2006472

[9434] F-NT2RP2006534//Human DNA sequence from clone 272E8 on chromosome Xp22.13-22.31. Contains a pseudogene similar to MDM2-Like P53-binding protein gene. Contains STSs, GSSs and a CA repeat polymorphism, complete sequence.//8.8e-10:273:66//Z93929

[9435] F-NT2RP2006554//Human DNA mismatch repair protein homolog (hMLHI) gene, exon 6.//0.71:174:59//U40965

[9436] F-NT2RP2006565//Homo sapiens secretory carrier-associated membrane protein (SCAMP) mRNA, complete cds.//6.6e-114:669:90//AF038966

[9437] F-NT2RP2006571//Rabbit cytochrome P-450 isozyme 2 (type B2) mRNA, complete cds, clone B2-1.//6.0e-26:503:63//M20855

[9438] F-NT2RP2006573//Molluscum contagiosum virus subtype 1, complete genome.//0.44:134:71//U60315

[9439] F-NT2RP2006598//Human BRCA2 region, mRNA sequence CG033.//5.0e-16:140:85//U50537

[9440] F-NT2RP3000002//***ALU WARNING: Human Alu-Sc subfamily consensus sequence.//3.8e-32:214:89//U14571

[9441] F-NT2RP3000031//Homo sapiens mRNA for histone deacetylase-like protein (JM21).//5.8e-136:637:98//AJ01972

[9442] F-NT2RP3000046//Bovine herpesvirus type 1 early-intermediate transcription control protein (BICP4) gene, complete cds.//5.4e-05:571:60//L14320

[9443] F-NT2RP3000047

[9444] F-NT2RP3000050//FIG. 2. Nucleotide and translated protein sequences of HPF 1, -2, and -9.//1.0e-67:626:74//M27877

[9445] F-NT2RP3000055//Genomic sequence from Human 9q34, complete sequence.//3.5e-10:394:64//AC001227

[9446] F-NT2RP3000068

[9447] F-NT2RP3000072//Homo sapiens BAC clone RG290G13 from 7q21, complete sequence.//1.0:301:61//AC004746

[9448] F-NT2RP3000080//Human DNA sequence *** SEQUENCING IN PROGRESS *** from clone 102D24, WORKING DRAFT SEQUENCE.//1.9e-44:297:79//AL021391

[9449] F-NT2RP3000085//Arabidopsis thaliana 3-methylcrotonyl-CoA carboxylase precursor mRNA, complete cds.//4.5e-33:528:65//U12536

[9450] F-NT2RP3000092//RPCII 1-22M5.TV RPCI-11 Homo sapiens genomic clone RPCI-11-22M5, genomic survey sequence.//3.3e-27:157:97//B84237

[9451] F-NT2RP3000109//Arabidopsis thaliana 1-amino-1-cyclopropanecarboxylate synthase (ACS5) gene, complete cds.//0.92:185:64//L29260

[9452] F-NT2RP3000134//Homo sapiens PAC clone DJ0905J08 from 7 p12-p14, complete sequence.//1.2e-112:286:89//AC005189

[9453] F-NT2RP3000142//Homo sapiens mRNA for KIAA0592 protein, partial cds.//9.0e-181:849:98//AB011164

[9454] F-NT2RP3000149//Homo sapiens chromosome 17, clone hRPK.264_B_{—}14, complete sequence.//4.2e-24:155:94//AC005884

[9455] F-NT2RP3000186//Human DNA sequence *** SEQUENCING IN PROGRESS *** from clone 500L14, WORKING DRAFT SEQUENCE.//7.2e-43:269:81//AL023583

[9456] F-NT2RP3000197//Homo sapiens interleukin 9 receptor (IL9R) pseudogene, exons 1-9.//0.098:405:57//L39063

[9457] F-NT2RP3000207//Drosophila melanogaster DNA sequence (P1 DS00164 (D269)), complete sequence.//0.96:608:55//AC004716

[9458] F-NT2RP3000220

[9459] F-NT2RP3000233//Homo sapiens actin binding protein MAYVEN mRNA, complete cds.//2.0e-18:509:58//AF059569

[9460] F-NT2RP3000235//Mouse Cosmid ma53aO16 from 14D1-D2, complete sequence.//3.5e-05:224:65//AC004101

[9461] F-NT2RP3000247//Human mRNA for KIAA0218 gene, complete cds.//2.1e-109:691:86//D86972

[9462] F-NT2RP3000251//Caenorhabditis elegans cosmid ZK930, complete sequence.//0.20:119:68//Z70213

[9463] F-NT2RP3000252//Homo sapiens cosmid I Fl, complete sequence.//9.8e-78:174:88//AF065393

[9464] F-NT2RP3000255

[9465] F-NT2RP3000267

[9466] F-NT2RP3000299//Mus musculus Crk-associated substrate (Cas-b) mRNA, complete cds.//5.9e-48:374:82//U48853

[9467] F-NT2RP3000312//Fruit fly (D. melanogaster) Glued mRNA, complete cds.//4.9e-22:583:63//J02932

[9468] F-NT2RP3000320//RPCII 1-36J1.TP RPCI-11 Homo sapiens genomic clone RPCI-11-36J1, genomic survey sequence.//4.4e-06:87:88//AQ047107

[9469] F-NT2RP3000324//Rattus norvegicus potassium channel regulator I mRNA, complete cds.//5.5e-26:283:79//U78090

[9470] F-NT2RP3000333//Human DNA sequence *** SEQUENCING IN PROGRESS *** from clone 973M2, WORKING DRAFT SEQUENCE.//1.0:309:60//AL033533

[9471] F-NT2RP3000341//Homo sapiens DNA sequence from PAC 95C20 on chromosome Xp 11.3-11.4. Contains STSs and the DXS7 locus with GT and GTG repeat polymorphisms, complete sequence.//6.7e-42:465:74//Z97181

[9472] F-NT2RP3000348

[9473] F-NT2RP3000350//Homo sapiens cosmid IFI, complete sequence.//3.4e-79:174:88//AF065393

[9474] F-NT2RP3000359//Bovine mitochondrial GTP:AMP phosphotransferase mRNA, complete cds.//2.2e-127:816:85//M25757

[9475] F-NT2RP3000361//Schizosaccharomyces pombe DNA for pre-mRNA splicing factor, complete cds.//0.0075:288:58//D83743

[9476] F-NT2RP3000366//Mus musculus ras-related protein (rab18) mRNA, complete cds.//7.1e-134:693:94//L04966

[9477] F-NT2RP3000393//Rattus norvegicus mRNA for GABA-B R2 receptor.//0.049:308:60//AJ011318

[9478] F-NT2RP3000397//S. cerevisiae chromosome VII reading frame ORF YGL120c.//0.00012:441:58//Z72642

[9479] F-NT2RP3000403//Homo sapiens formin binding protein 21 mRNA, complete cds.//5.0e-174:841:97//AF071185

[9480] F-NT2RP3000418//Homo sapiens chromosome 17, clone hRPK.1053_B_{—}8, complete sequence.//7.9e-53:817:68//AC006083

[9481] F-NT2RP3000433//Human DNA sequence *** SEQUENCING IN PROGRESS *** from clone 862K6, WORKING DRAFT SEQUENCE.//6.1e-31:590:63//AL031681

[9482] F-NT2RP3000439//Fugu rubripes GSS sequence, clone 075E22aB10, genomic survey sequence.//4.0e-19:169:81//AL026471

[9483] F-NT2RP3000441//Human DNA sequence from PAC 93H18 on chromosome 6 contains ESTs heterochromatin protein HPlHs-gamma pseudogene, STS and CpG island.//2.4e-41:459:65//Z84488

[9484] F-NT2RP3000449//Human DNA sequence *** SEQUENCING IN PROGRESS *** from clone 1018D12, WORKING DRAFT SEQUENCE.//1.1e-100:365:87//AL031650

[9485] F-NT2RP3000451//HS_{—}2024_A1_E10_T7 CIT Approved Human Genomic Sperm Library D Homo sapiens genomic clone Plate=2024 Col=19 Row=I, genomic survey sequence.//0.011:367:57//AQ229420

[9486] F-NT2RP3000456//CIT-HSP-2338P5.TR CIT-HSP Homo sapiens genomic clone 2338P5, genomic survey sequence.//1.5e-89:458:96//AQ055548

[9487] F-NT2RP3000484//Human DNA sequence *** SEQUENCING IN PROGRESS *** from clone 90L6, WORKING DRAFT SEQUENCE.//0.043:147:70//Z97353

[9488] F-NT2RP3000487//H. sapiens CpG island DNA genomic Mse1 fragment, clone 11b11, forward read cpg11b11.ft1a.//1.7e-1:96:92//Z64440

[9489] F-NT2RP3000512//Human HOX2G mRNA from the Hox2 locus.//9.7e-17:109:97//X16667

[9490] F-NT2RP3000526//Homo sapiens full-length insert cDNA clone YZ38E04.//4.1e-30:283:76//AF086071

[9491] F-NT2RP3000527//Human mRNA for KIAA0211 gene, complete cds.//2.5e-34:706:63//D86966

[9492] F-NT2RP3000531//Mus musculus immunosuperfamily protein B12 mRNA, complete cds.//1.9e-14:220:70//AF061260

[9493] F-NT2RP3000542//Human Chromosome 11p11.2 PAC clone pDJ404 ml 5, complete sequence.//0.00019:361:60//AC002554

[9494] F-NT2RP3000561//Homo sapiens PAC clone DJ0942116 from 7q11, complete sequence.//9.0e-171:827:98//AC006012

[9495] F-NT2RP3000562

[9496] F-NT2RP3000578//F. rubripes GSS sequence, clone 013G07cE7, genomic survey sequence.//1.7e-25:284:74//AL011271

[9497] F-NT2RP3000582//CIT978SK-A-56H4.TP CIT978SK Homo sapiens genomic clone A-56H4, genomic survey sequence.//5.8e-07:239:66/11B73597

[9498] F-NT2RP3000584

[9499] F-NT2RP3000590//H. sapiens CpG island DNA genomic Mse1 fragment, clone 170d7, forward read cpg170d7.ft1a.//3.0e-22:128:100//Z59723

[9500] F-NT2RP3000592//CIT-HSP-2288J7.TR CIT-HSP Homo sapiens genomic clone 2288J7, genomic survey sequence.//2.2e-78:382:98/11B98868

[9501] F-NT2RP3000596//CIT-HSP-2375J10.TR CIT-HSP Homo sapiens genomic clone 2375J10, genomic survey sequence.//0.00076:143:67//AQ109305

[9502] F-NT2RP3000599//Caenorhabditis elegans cosmid T19B 10, complete sequence.//1.2e-13:295:66//Z74043

[9503] F-NT2RP3000603//Bovine herpesvirus type 1 early-intermediate transcription control protein (BICP4) gene, complete cds.//0.37:520:57//L14320

[9504] F-NT2RP3000605//Homo sapiens chromosome 19, cosmid F20900, complete sequence.//8.8e-155:526:97//AC006128

[9505] F-NT2RP3000622//HS_{—}3213_A2_D02_T7 CIT Approved Human Genomic Sperm Library D Homo sapiens genomic clone Plate=3213 Col=4 Row=G, genomic survey sequence.//4.1e-29:238:85//AQ175104

[9506] F-NT2RP3000624//Homo sapiens clone DJO800GO7, complete sequence.//0.47:75:80//AC004890

[9507] F-NT2RP3000628//Human DNA sequence from clone 581F12 on chromosome Xq21. Contains Eukaryotic Translation Initiation Factor EIF3 P35 Subunit and 60S Ribosomal protein L22 pseudogenes. Contains ESTs, complete sequence.//0.078:393:58//AL031313

[9508] F-NT2RP3000632//Human zinc finger protein zfp6 (ZF6) mRNA, partial cds.//1.4e-96:541:79//U71363

[9509] F-NT2RP3000644//Homo sapiens clone RG315H 11, WORKING DRAFT SEQUENCE, 5 unordered pieces.//5.2e-46:421:77//AC005089

[9510] F-NT2RP3000661

[9511] F-NT2RP3000665//Human DNA sequence from clone 1191B2 on chromosome 22q13.2-13.3. Contains part of the BIK (NBK, BP4, BIP 1) gene for BCL2-interacting killer (apoptosis-inducing), a 40S Ribososmal Protein S25 pseudogene and part of an alternatively spliced novel Acyl Transferase gene similar to C. elegans C50D2.7. Contains ESTs, STSs, GSSs, two putative CpG islands and genomic marker D22S1151, complete sequence.//1.7e-11:292:65//AL022237

[9512] F-NT2RP3000685//H. sapiens mRNA for novel protein.//2.4e-80:460:92//X99961

[9513] F-NT2RP3000690//H. sapiens flow-sorted chromosome 6 TaqI fragment, SC6pA10F6./1.0:141:65//Z77872

[9514] F-NT2RP3000736//Human mRNA for KIAA0140 gene, complete cds.//6.1e-20:127:96//D50930

[9515] F-NT2RP3000739//Rattus norvegicus golgi peripheral membrane protein p65 (GRASP65) mRNA, complete cds.//1.1e-46:622:67//AF015264

[9516] F-NT2RP3000742//Rattus norvegicus phospholipase C delta-4 mRNA, complete cds.//4.7e-37:429:70//U16655

[9517] F-NT2RP3000753

[9518] F-NT2RP3000759//Caenorhabditis elegans cosmid Y57GI IC, complete sequence.//2.8e-38:519:69//Z99281

[9519] F-NT2RP3000815//HS_{—}2237_A2_D12_MF CIT Approved Human Genomic Sperm Library D Homo sapiens genomic clone Plate=2237 Col=24 Row=G, genomic survey sequence.//0.79:151:61//AQ067252

[9520] F-NT2RP3000825//Campanula ramosa chloroplast NADH dehydrogenase (ndhF) gene, complete cds.//0.36:378:58//L39387

[9521] F-NT2RP3000826//Suid herpesvirus 1 Kaplan glycoprotein L (UL1) and uracil-DNA glycosylase (UL2) genes, complete cds, and (UL3) gene, partial cds.//0.0025:291:62//U02513

[9522] F-NT2RP3000836//Mouse complement factor H-related protein mRNA, complete cds, clone 9C4.//0.69:563:57//M29009

[9523] F-NT2RP3000841//Human DNA sequence from PAC 121G13 on chromosome 6 contains flow sorted chromosome 6 HindIII fragment ESTs. polymorphic CA repeat, CpG island, CpG island genomic fragments.//2.1e-46:666:68//Z86062

[9524] F-NT2RP3000845//Homo sapiens chromosome 19, cosmid R31237, complete sequence.//3.4e-92:193:93//AC005581

[9525] F-NT2RP3000847//Human HepG2 3′ region cDNA, clone hmd5d02.//3.4e-32:261:81//D16938

[9526] F-NT2RP3000850//Homo sapiens clone RG271G13, WORKING DRAFT SEQUENCE, 7 unordered pieces.//5.1e-44:358:81//AC005082

[9527] F-NT2RP3000852//Homo sapiens DNA sequence from PAC 117P20 on chromosome 1q24. Contains the LNHR (SELL) gene coding for Lymph Node Homing Receptor (L-Selectin precursor, LAM-1 Leukocyte Adhesion Molecule, Leukocyte surface antigen Leu-8, TQ1, GP90-MEL, LECAMI Leukocyte-Endothelial Cell Adhesion Molecule 1, CD62L). Contains the SELE gene coding for E-Selectin precursor (CD62E, ELAM-1 Endothelial Leukocyte Adhesion Molecule 1, LECAM-2 Leukocyte-Endothelial Cell Adhesion Molecule 2). Contains an unknown gene with homology to predicted yeast plant and worm proteins. Contains ESTs and STSs, complete sequence.//4.4e-123:150:98//AL021940

[9528] F-NT2RP3000859//T19M2TF TAMU Arabidopsis thaliana genomic clone T19M2, genomic survey sequence.//0.016:185:65//B60831

[9529] F-NT2RP3000865

[9530] F-NT2RP3000868//Human ovarian cancer downregulated myosin heavy chain homolog (Doc1) mRNA, complete cds.//2.0e-29:766:60//U53445

[9531] F-NT2RP3000869//H. sapiens gene for plectin.//1.1e-12:700:60//Z54367

[9532] F-NT2RP3000875//HS_{—}2236_B1_G10_MF CIT Approved Human Genomic Sperm Library D Homo sapiens genomic clone Plate=2236 Col=19 Row=N, genomic survey sequence.//0.98:153:68//AQ154007

[9533] F-NT2RP3000901//Human herpesvirus 2 glycoprotein B precursor (UL27) gene, complete cds.//0.44:213:65//AF021340

[9534] F-NT2RP3000904//Rat Na+channel mRNA, 3′ end.//3.6e-106:505:99//M27223

[9535] F-NT2RP3000917//Mouse mRNA for Dhml protein, complete cds.//3.1e-132:691:93//D38517

[9536] F-NT2RP3000919//Rattus norvegicus golgi peripheral membrane protein p65 (GRASP65) mRNA, complete cds.//3.2e-97:585:88//AF015264

[9537] F-NT2RP3000968//Human Chromosome 16 BAC clone CIT987SK-A-234F9, complete sequence.//5.8e-70:181:89//U91326

[9538] F-NT2RP3000980//R. norvegicus CYP3A1 gene, 5′ flanking region.//6.1e-26:507:66//X98335

[9539] F-NT2RP3000994//HS-1049-B2-F03-MF.abi CIT Human Genomic Sperm Library C Homo sapiens genomic clone Plate=CT 771 Col=6 Row=L, genomic survey sequence.//1.5e-22:128:100//B39529

[9540] F-NT2RP3001004//H. sapiens CpG island DNA genomic Mse1 fragment, clone 39cl, reverse read cpg39c1.rt1a.//5.9e-27:150:99//Z60925

[9541] F-NT2RP3001007//Homo sapiens clone NH0319F03, WORKING DRAFT SEQUENCE, 3 unordered pieces.//0.11:610:57//AC006039

[9542] F-NT2RP3001055//Drosophila melanogaster; Chromosome 2R; Region 47F1-47F7; P1 clone DS02304, WORKING DRAFT SEQUENCE, 5 unordered pieces.//1.8e-23:352:67//AC005653

[9543] F-NT2RP3001057//H. sapiens HZF4 mRNA for zinc finger protein.//1.4e-49:437:77//X78927

[9544] F-NT2RP3001081//Homo sapiens RCCl-like G exchanging factor RLG mRNA, complete cds.//8.4e-50:534:74//AF060219

[9545] F-NT2RP3001084//Homo sapiens mRNA for KIAA0782 protein, partial cds.//1.2e-14:474:60//AB018325

[9546] F-NT2RP3001096//CIT-HSP-2305P8.TF CIT-HSP Homo sapiens genomic clone 2305P8, genomic survey sequence.//3.4e-37:222:93//AQ021278

[9547] F-NT2RP3001107//Human mRNA for KIAA0215 gene, complete cds.//8.5e-33:712:64//D86969

[9548] F-NT2RP3001109//Human Chromosome 15q26.1 PAC clone pDJ457j II containing DNA polymerase gamma (polg) gene, complete sequence.//2.7e-116:186:99//AC005317

[9549] F-NT2RP3001111

[9550] F-NT2RP3001113//Human DNA sequence from cosmid U157D4, between markers DXS366 and DXS87 on chromosome X.//2.4e-05:702:58//Z68871

[9551] F-NT2RP3001115//Homo sapiens PAC clone DJ0905J08 from 7 p12-p14, complete sequence.//1.9e-170:821:98//AC005189

[9552] F-NT2RP3001116//HS_{—}3075_A1_F01_MF CIT Approved Human Genomic Sperm Library D Homo sapiens genomic clone Plate=3075 Col=1 Row=K, genomic survey sequence.//7.3e-49:290:92//AQ120581

[9553] F-NT2RP31001119//Human DNA sequence from clone 612B18 on chromosome 1q24-25.3 Contains exon from gene similar to 40S ribosomal protein, first coding exon of dynamin 2 (DYNII). ESTs, STS, GSS, CpG Island, complete sequence.//1.4e-121:598:97//AL031864

[9554] F-NT2RP3001120//Human zinc finger protein ZNFI 36.//7.4e-76:687:75//U09367

[9555] F-NT2RP3001126//Bovine herpesvirus type I DNA for UL36, UL37, UL38, UL39, UL40 and UL41.//6.8e-05:344:64//Z49078

[9556] F-NT2RP3001133//Nephila clavipes minor ampullate silk protein MiSpl mRNA, partial cds.//0.00021:529:60//AF027735

[9557] F-NT2RP3001140//Homo sapiens mRNA for KIAA0762 protein, partial cds.//3.6e-179:851:98//AB018305

[9558] F-NT2RP3001147//RPCII 1-3M16.TP RPCI-11 Homo sapiens genomic clone RPCI-11-3M16, genomic survey sequence.//2.1e-15:106:96//B48859

[9559] F-NT2RP3001150//Human DNA sequence *** SEQUENCING IN PROGRESS *** from clone 423B22, WORKING DRAFT SEQUENCE.//2.0e-159:418:95//AL034379

[9560] F-NT2RP3001155//Homo sapiens mRNA for AND-1 protein.//5.1e-190:891:98//AJ006266

[9561] F-NT2RP3001176//Human DNA sequence from clone 879K22 on chromosome 1q32.1-41 Contains GSS, complete sequence.//1.1e-69:207:97//AL034351

[9562] F-NT2RP3001214//Plasmodium falciparum 3D7 chromosome 12 PFYACB8-628 genomic sequence, WORKING DRAFT SEQUENCE, 9 unordered pieces.//0.16:475:58//AC005507

[9563] F-NT2RP3001216//Homo sapiens clone DJ0635005, WORKING DRAFT SEQUENCE, 7 unordered pieces.//3.3e-05:561:56//AC004845

[9564] F-NT2RP3001221

[9565] F-NT2RP3001232//Mouse mRNA for serine protease PC6, comlete cds.//1.0e-11:120:87//D12619

[9566] F-NT2RP3001236

[9567] F-NT2RP3001239//Mouse MAPIB mRNA for MAPIB microtubule-associated protein.//3.9e-19:501:61//X51396

[9568] F-NT2RP3001245//CITBI-EI-2505C1.TF.1 CITBI-EI Homo sapiens genomic clone 2505C1, genomic survey sequence.//8.5e-70:337:100//AQ242007

[9569] F-NT2RP3001253//CITBI-El-2505N14.TR CITBI-El Homo sapiens genomic clone 2505N14, genomic survey sequence.//0.83:235:60//AQ260430

[9570] F-NT2RP3001260//Homo sapiens mRNA for KIAA0726 protein, complete cds.//3.8e-47:761:64//AB018269

[9571] F-NT2RP3001268//Homo sapiens zinc finger protein (HZF6) mRNA, 5′ UTR and partial cds.//2.3e-64:618:72//AF027513

[9572] F-NT2RP3001272//Mus musculus mRNA for macrophage actin-associated-tyrosine-phosphorylated protein.//2.6e-99:669:83//Y 18101

[9573] F-NT2RP3001274//Human ABL gene, exon lb and intron lb, and putative M8604 Met protein (M8604 Met) gene, complete cds.//0.99:400:58//U07561

[9574] F-NT2RP3001281//Homo sapiens chromosome 17, clone hRPK.318_A_{—}15, complete sequence.//5.9e-39:304:70//AC005837

[9575] F-NT2RP3001297//Human mRNA for KIAA0281 gene, complete cds.//7.6e-47:544:69//D87457

[9576] F-NT2RP3001307//Ambystoma tigrinum RPE65 protein mRNA, complete cds.//2.4e-27:547:63//AF047465

[9577] F-NT2RP3001318//Plasmodium falciparum 3D7 chromosome 12 PFYAC 1122 genomic sequence, WORKING DRAFT SEQUENCE, 3 unordered pieces.//0.00022:624:60//AC004709

[9578] F-NT2RP3001325//Caenorhabditis elegans cosmid F36H 12.//0.25:523:59//AF078790

[9579] F-NT2RP3001338//Human mRNA for KIAA0211 gene, complete cds.//5.1e-29:345:73//D86966

[9580] F-NT2RP3001339//Rattus norvegicus mytonic dystrophy kinase-related Cdc42-binding kinase (MRCK) mRNA, complete cds.//1.2e-151:821:91//AF021935

[9581] F-NT2RP3001340//Homo sapiens HMG box factor SOX-13 mRNA, complete cds.//5.3e-27:247:81//AF083105

[9582] F-NT2RP3001355//Homo sapiens Chromosome 22q11.2 BAC Clone 77h2 In CES Region, WORKING DRAFT SEQUENCE, 7 unordered pieces.//2.1e-16:130:76//AC000052

[9583] F-NT2RP3001356

[9584] F-NT2RP3001374

[9585] F-NT2RP3001383//Homo sapiens DNA sequence from PAC 140C12 on chromosome 6q26-q27.//0.00082:365:61//AL008628

[9586] F-NT2RP3001384//Homo sapiens HRIHFB2018 mRNA, partial cds.//6.4e-157:743:98//AB015332

[9587] F-NT2RP3001392//Human DNA sequence from PAC 302D9 on chromosome 22q11.2-qter. Contains STS, complete sequence.//0.045:359:61//Z82198

[9588] F-NT2RP3001396//Drosophila melanogaster DNA sequence (PI DS08860 (DI 81)), complete sequence.//1.3e-16:336:65//AC004296

[9589] F-NT2RP3001398//Mus musculus zinc finger protein (Zfp64) mRNA, complete cds.//3.1e-100:711:82//U49046

[9590] F-NT2RP3001399//Homo sapiens PAC clone DJ 1106E03 from 7q31.3-7q3, complete sequence.//5.4e-20:245:73//AC005521

[9591] F-NT2RP3001407//RPCI11-41A20.TP RPCI-11 Homo sapiens genomic clone RPCI-11-41A20, genomic survey sequence.//0.051:306:59//AQ029031

[9592] F-NT2RP3001420//Human DNA sequence from PAC 12409 on chromosome 6q21. Contains DNAJ2 (HDJI) like pseudogene, ESTs, STSs and GSSs.//0.90:170:65//AL021327

[9593] F-NT2RP3001426//Human DNA sequence *** SEQUENCING IN PROGRESS *** from clone 126A5, WORKING DRAFT SEQUENCE.//2.9e-89:138:98//AL031447

[9594] F-NT2RP3001427//CIT-HSP-2302H24.TF CIT-HSP Homo sapiens genomic clone 2302H24, genomic survey sequence.//8.1e-36:212:94//AQ020997

[9595] F-NT2RP3001428//Human nuclear pore complex-associated protein TPR (tpr) mRNA, complete cds.//8.5e-73:431:91//U69668

[9596] F-NT2RP3001432//HS_{—}3032_B1_A03_MF CIT Approved Human Genomic Sperm Library D Homo sapiens genomic clone Plate=3032 Col=5 Row=B, genomic survey sequence.//0.00024:111:76//AQ096619

[9597] F-NT2RP3001447

[9598] F-NT2RP3001449//Human DNA sequence from clone 283E3 on chromosome 1p36.21-36.33. Contains the alternatively spliced gene for Matrix Metalloproteinase in the Female Reproductive tract MIFR1, -2, MMP21/22A, -B and -C, a novel gene, the alternatively spliced CDC2L2 gene for Cell Division Cycle 2-Like 2 (PITSLRE, p58/GTA, Galactosyltransferase Associated Protein Kinase) beta 1, beta 2-1, beta 2-2 and alpha 2-4, a 40S Ribosomal Protein S7 pseudogene, part of the KIAA0447 gene, a novel alternatively spliced gene similar to many (archae)bacterial, worm and yeast hypothetical genes, and the GNB 1 gene for Guanine Nucleotide Binding Protein (G protein), Beta polypeptide I (Transducin Beta chain 1). Contains putative CpG islands, ESTs, STSs and GSSs, complete sequence.//2.1e-105:223:99//AL031282

[9599] F-NT2RP3001453//Ralstonia sp. E2 positive phenol-degradative gene regulator (poxR), phenol hydroxylase components (poxA, poxB, poxC, poxD, poxE, poxF), and ferredoxin-like protein (poxG) genes, complete cds.//0.75:349:59//AF026065

[9600] F-NT2RP3001457

[9601] F-NT2RP3001459

[9602] F-NT2RP3001472//Homo sapiens Sox-like transcriptional factor mRNA, complete cds.//1.3e-08:168:70//AF072836

[9603] F-NT2RP3001490

[9604] F-NT2RP3001495//Human oxidoreductase (HHCMA56) mRNA, complete cds.//1.0e-26:191:90//U13395

[9605] F-NT2RP3001497//Homo sapiens multiple membrane spanning receptor TRC8 (TRC8) mRNA, complete cds.//8.5e-171:804:98//AF064801

[9606] F-NT2RP3001527//Human lymphoid-specific SP 100 homolog (LYSP 100-A) mRNA, complete cds.//8.9e-140:743:91//U36499

[9607] F-NT2RP3001529//Streptomyces griseus DNA for ribosoma protein L21, ribosomal protein L27, Obg, complete cds.//2.1e-14:517:59//D87916

[9608] F-NT2RP3001538//Capra hircus hircus clone 12 RAPD PCR sequence, genomic survey sequence.//4.7e-05:217:63//AF078176

[9609] F-NT2RP3001554//Rattus norvegicus microtubule-associated protein 1 A MAP IA (Mtap-1) mRNA, complete cds.//4.3e-17:332:67//M83196

[9610] F-NT2RP3001580//RPCI11-91E19.TV RPCI11 Homo sapiens genomic clone R-91E19, genomic survey sequence.//4.2e-15:110:91//AQ281332

[9611] F-NT2RP3001587//S. pombe chromosome II cosmid c16H5.//6.6e-28:491:64//AL022104

[9612] F-NT2RP3001589//RPCI11-68MI5.TK RPCI11 Homo sapiens genomic clone R-68MI5, genomic survey sequence.//8.7e-108:517:98//AQ237629

[9613] F-NT2RP3001607//Homo sapiens Xp22 BAC GSHB-600G8 (Genome Systems Human BAC library) complete sequence.//1.0e-09:257:65//AC004674

[9614] F-NT2RP3001608//Methylococcus capsulatus methane monooxygenase component A alpha chain, methane monooxygenase A beta chain and methane monooxygenase component C genes, complete cds.//0.59:450:57//M90050

[9615] F-NT2RP3001621//Human DNA sequence from clone 24018 on chromosome 6p21.31-22.2 Contains zinc finger protein pseudogene, VNO-type olfactory receptor pseudogene, nuclear envelope pore membrane protein, EST, STS, GSS, complete sequence.//1.8e-42:278:79//AL021808

[9616] F-NT2RP3001629

[9617] F-NT2RP3001634//Homo sapiens mRNA for Ariadne-2 protein.//1.5e-63:276:97//AJ130978

[9618] F-NT2RP3001642//Caenorhabditis elegans cosmid F45E6, complete sequence.//0.08:127:66//Z68117

[9619] F-NT2RP3001646

[9620] F-NT2RP3001671//Homo sapiens mRNA for NS 1-binding protein (NS 1-BP).//3.4e-171:816:98//AJ012449

[9621] F-NT2RP3001672//Drosophila melanogaster transcriptional repressor protein (Scm) mRNA, complete cds.//1.6e-38:542:66//U49793

[9622] F-NT2RP3001676//HS_{—}3090_B_B04_T7 CIT Approved Human Genomic Sperm Library D Homo sapiens genomic clone Plate=3090 Col=7 Row=D, genomic survey sequence.//3.1e-07:333:64//AQ123250

[9623] F-NT2RP3001678//Drosophila melanogaster; Chromosome 3L; Region 63C5-63D3; P1 clone DSOI 859, WORKING DRAFT SEQUENCE, 6 unordered pieces.//1.0:539:57//AC004358

[9624] F-NT2RP3001679//Homo sapiens genomic DNA of 8p21.3-p22 anti-oncogene of hepatocellular colorectal and non-small cell lung cancer, segment 3/11.//2.8e-130:355:96//AB020860

[9625] F-NT2RP3001688//Rattus norvegicus glucocorticoid modulatory element binding protein 2 mRNA, complete cds.//2.1e-37:512:70//AF059273

[9626] F-NT2RP3001690//CIT-HSP-2300P9.TR CIT-HSP Homo sapiens genomic clone 2300P9, genomic survey sequence.//2.8e-19:123:95//AQ012480

[9627] F-NT2RP3001698//Rat mRNA for RhoGAP, complete cds.//9.4e-111:167:74//D31962

[9628] F-NT2RP3001708//H. sapiens CpG island DNA genomic Mse1 fragment, clone 4g7, reverse read cpg4g7.rt1d.//1.3e-17:113:97//Z61312

[9629] F-NT2RP3001712//M. musculus mRNA for HP 1-BP74 protein.//2.2e-95:601:88//X99642

[9630] F-NT2RP3001716

[9631] F-NT2RP3001724//Homo sapiens chromodomain-helicase-DNA-binding protein mRNA, complete cds.//1.4e-159:565:97//AF054177

[9632] F-NT2RP3001727//Rattus norvegicus implantation-associated protein (IAG2) mRNA, partial cds.//1.7e-132:786:88//AF008554

[9633] F-NT2RP3001730//Human mRNA for KIAA0128 gene, partial cds.//3.9e-104:811:78//D50918

[9634] F-NT2RP3001739//Homo sapiens Chromosome 22q11.2 PAC Clone p201 m18 In DGCR Region, complete sequence.//6.5e-07:178:69//AC000097

[9635] F-NT2RP3001752//Human DNA sequence from clone 105D16 on chromosome Xp11.3-11.4 Contains pseudogene similar to laminin-binding protein, CA repeat, STS, complete sequence.//5.2e-31:311:77//AL031311

[9636] F-NT2RP3001753//Sequence 29 from patent U.S. Pat. No. 5,658,882.//0.11:513:58//I62381

[9637] F-NT2RP3001764//Sequence 6 from patent WO9706245.//6.4e-47:673:66//A59888

[9638] F-NT2RP3001777//Caenorhabditis elegans cosmid T10E 10.//0.078:290:63//U39644

[9639] F-NT2RP3001782//Homo sapiens mRNA for KIAA0459 protein, partial cds.//2.8e-151:710:98//AB007928

[9640] F-NT2RP3001792//Mus musculus myelin gene expression factor (MEF-2) mRNA, partial cds.//1.2e-26:213:85//U13262

[9641] F-NT2RP3001799//Human DNA sequence *** SEQUENCING IN PROGRESS *** from clone 469D22, WORKING DRAFT SEQUENCE.//8.4e-51:168:95//AL031284

[9642] F-NT2RP3001819//S. glaucescens genes strU, strX, strV and strW for 5′-hydroxystreptomycin pruduction and transport polypeptides.//0.084:526:58//X89010

[9643] F-NT2RP3001844//HS_{—}3110_B 1_El 0_T7 CIT Approved Human Genomic Sperm Library D Homo sapiens genomic clone Plate=3110 Col=19 Row=J, genomic survey sequence.//1.5e-40:232:82//AQ140433

[9644] F-NT2RP3001854//Plasmodium falciparum 3D7 chromosome 12 PFYAC181 genomic sequence, WORKING DRAFT SEQUENCE, 8 unordered pieces.//0.14:452:58//AC005505

[9645] F-NT2RP3001855//Mus musculus homeobox protein PKNOX1 (Pknoxl) mRNA, complete cds.//2.7e-39:575:67//AF061270

[9646] F-NT2RP3001857//M. musculus tex292 mRNA (5′region).//8.7e-07:106:81//X80434

[9647] F-NT2RP3001896

[9648] F-NT2RP3001898//Human DNA sequence *** SEQUENCING IN PROGRESS *** from clone 163G9, WORKING DRAFT SEQUENCE.//0.094:456:60//AL008733

[9649] F-NT2RP3001915//Caenorhabditis elegans cosmid C12D8, complete sequence.//0.58:482:56//Z73969

[9650] F-NT2RP3001926//Plasmodium falciparum DNA *** SEQUENCING IN PROGRESS *** from MAL4P1, WORKING DRAFT SEQUENCE.//0.42:401:58//AL034557

[9651] F-NT2RP3001929//Homo sapiens chromosome 16, cosmid clone RT102 (LANL), complete sequence.//3.1e-28:263:77//AC004651

[9652] F-NT2RP3001931

[9653] F-NT2RP3001938//CIT-HSP-2165E8.TR CIT-HSP Homo sapiens genomic clone 2165E8, genomic survey sequence.//3.6e-24:182:91//B95475

[9654] F-NT2RP3001943//Homo sapiens mRNA for KIAA0675 protein, complete cds.//1.8e-165:815:96//AB014575

[9655] F-NT2RP3001944

[9656] F-NT2RP3001969//Homo sapiens chromosome 12 p13.3 clone RPCI11-350L7, WORKING DRAFT SEQUENCE, 72 unordered pieces.//4.8e-62:304:89//AC005844

[9657] F-NT2RP3001989//Plasmodium falciparum strain Dd2 heat shock protein 86 (HSP86), O1 (o1), O3 (o3), O2 (o2), CG8 (cg8), CG4 (cg4), CG3 (cg3), CG9 (cg9), CG1 (cg1), CG6 (cg6), chloroquine resistance candidate protein (cg2), and CG7 (cg7) genes, complete cds.//8.2e-10:564:60//AF030694

[9658] F-NT2RP3002002//Human DNA sequence from PAC 306D1 on chromosome X contains ESTs.//2.5e-57:361:80//Z83822

[9659] F-NT2RP3002004//Sequence 3 from patent U.S. Pat. No. 5,798,245.//1.6e-26:104:100//AR025386

[9660] F-NT2RP3002007//Human Chromosome 15q11-q13 PAC clone pDJ223c9 from the Prader-Willi/Angelman Syndrome region, complete sequence.//0.0053:633:58//AC004137

[9661] F-NT2RP3002014//Drosophila melanogaster DNA sequence (PIs DS07528 (DI 69) and DS06665 (D220)), complete sequence.//1.3e-32:334:68//AC004640

[9662] F-NT2RP3002033//H. sapiens DNA sequence.//0.012:214:63//Z22493

[9663] F-NT2RP3002045//Rat mRNA for alpha-c large chain of the protein complex AP-2 associated with clathrin.//8.7e-116:713:86//X53773

[9664] F-NT2RP3002054//Mycobacterium tuberculosis H37Rv complete genome; segment 143/162.//1.6e-12:613:60//AL021841

[9665] F-NT2RP3002056//Human DNA sequence from PAC 358H7 on chromosome X.//0.17:566:59//Z77249

[9666] F-NT2RP3002057//Homo sapiens clone NH0084K19, WORKING DRAFT SEQUENCE, 30 unordered pieces.//3.3e-24:167:82//AC005682

[9667] F-NT2RP3002062

[9668] F-NT2RP3002063//Rickettsia prowazekii strain Madrid E, complete genome; segment 3/4′.//0.24:508:581/AJ235272

[9669] F-NT2RP3002081//HS_{—}2001_B1_E06_T7 CIT Approved Human Genomic Sperm Library D Homo sapiens genomic clone Plate=2001 Col=1 I Row=J, genomic survey sequence.//9.7e-22:155:90//AQ218494

[9670] F-NT2RP3002097//Homo sapiens Xp22-150 BAC GSHB-309P15 (Genome Systems Human BAC Library) complete sequence.//9.6e-66:562:77//AC006210

[9671] F-NT2RP3002102//CIT-HSP-2307B 10.TR CIT-HSP Homo sapiens genomic clone 2307B 10, genomic survey sequence.//5.9e-16:214:74//AQ018040

[9672] F-NT2RP3002108

[9673] F-NT2RP3002142//Homo sapiens Chromosome 16 BAC clone CIT987SK-A-319E8, complete sequence.//7.6e-29:414:68//AC004020

[9674] F-NT2RP3002146//Pseudomonas fluorescens polyketide synthase type I (pltB) and polyketide synthase type I (pltC) genes, complete cds.//0.96:434:60//AF003370

[9675] F-NT2RP3002147//Human DNA sequence *** SEQUENCING IN PROGRESS *** from clone 329F2, WORKING DRAFT SEQUENCE.//1.3e-63:380:91//AL031710

[9676] F-NT2RP3002151//Human chromosome 16 p13.1 BAC clone CIT987SK-551G9 complete sequence.//9.9e-60:315:80//U95742

[9677] F-NT2RP3002163

[9678] F-NT2RP3002165//M. musculus HCNGP mRNA.//1.4e-142:867:87//X68061

[9679] F-NT2RP3002166//Homo sapiens chromosome X, clone hCIT.200_L_{—}4, complete sequence.//0.090:394:59//AC006121

[9680] F-NT2RP3002173//HS_{—}3062_B1_G05_MF CIT Approved Human Genomic Sperm Library D Homo sapiens genomic clone Plate=3062 Col=9 Row=N, genomic survey sequence.//3.3e-101:509:96//AQ193219

[9681] F-NT2RP3002181//Human DNA sequence from clone 24018 on chromosome 6p21.31-22.2 Contains zinc finger protein pseudogene, VNO-type olfactory receptor pseudogene, nuclear envelope pore membrane protein, EST, STS, GSS, complete sequence.//4.5e-106:432:84//AL021808

[9682] F-NT2RP3002244//Homo sapiens chromosome 19, cosmid R27377, complete sequence.//0.63:353:60//AC005321

[9683] F-NT2RP3002248//HS_{—}3029_A1_D10_MR CIT Approved Human Genomic Sperm Library D Homo sapiens genomic clone Plate=3029 Col=19 Row=G, genomic survey sequence.//3.5e-10:125:79//AQ094880

[9684] F-NT2RP3002255//Bovine herpesvirus type I immedidate-early transcriptional control protein (BICP4) gene, 5′ end.//5.6e-09:629:59//L14321

[9685] F-NT2RP3002273//cSRL-165E12-u cSRL flow sorted Chromosome 11 specific cosmid Homo sapiens genomic clone cSRL-165E12, genomic survey sequence.//4.9e-35:366:74//B03004

[9686] F-NT2RP3002276//B. taurus mRNA for B15 subunit of NADH: ubiquinone oxidoreductase complex.//0.023:326:60//X64898

[9687] F-NT2RP3002303//Methanobacterium thermoautotrophicum from bases 172512 to 182957 (section 16 of 148) of the complete genome.//3.8e-12:643:57//AE000810

[9688] F-NT2RP3002304//Plasmodium falciparum 3D7 chromosome 12 PFYAC1383 genomic sequence, WORKING DRAFT SEQUENCE, 3 unordered pieces.//1.6e-09:490:60//AC005504

[9689] F-NT2RP3002330//Human DNA sequence from cosmid L58b6, Huntington's Disease Region, chromosome 4p 16.3, containing STS matches.//1.9e-93:572:88//Z49862

[9690] F-NT2RP3002343//HS_{—}3010_A2_B08_T7 CIT Approved Human Genomic Sperm Library D Homo sapiens genomic clone Plate=3010 Col=16 Row=C, genomic survey sequence.//9.0e-75:373:97//AQ119068

[9691] F-NT2RP3002351//Human mRNA for NAD-dependent methylene tetrahydrofolate dehydrogenase cyclohydrolase (EC 1.5.1.15).//4.9e-64:588:75//X16396

[9692] F-NT2RP3002352//Homo sapiens mRNA for protein encoded by cxorf5 (71-7A) gene, alternatively spliced form.//1.3e-164:770:98//Y 16355

[9693] F-NT2RP3002377//Homo sapiens mRNA for KIAA0788 protein, partial cds.//1.4e-190:911:98//AB018331

[9694] F-NT2RP3002399

[9695] F-NT2RP3002402//Rattus norvegicus mRNA for dipeptidyl peptidase III, complete cds.//7.2e-25:249:79//D89340

[9696] F-NT2RP3002455//Homo sapiens mRNA for KIAA0678 protein, partial cds.//1.2e-138:649:99//AB014578

[9697] F-NT2RP3002484//CIT-HSP-367N3.TP.1 CIT-HSP Homo sapiens genomic clone 367N3, genomic survey sequence.//5.0e-18:115:96//B78927

[9698] F-NT2RP3002501//Caenorhabditis elegans cosmid KOIC8, complete sequence.//0.00020:170:65//Z49068

[9699] F-NT2RP3002512//Homo sapiens clone 664 unknown mRNA, partial sequence.//1.6e-59:308:97//AF091088

[9700] F-NT2RP3002529//Human vacuolar protein sorting homolog h-vps45 mRNA, complete cds.//1.4e-144:763:93//U35246

[9701] F-NT2RP3002545//Homo sapiens mRNA for KIAA0729 protein, partial cds.//1.8e-178:833:98//AB018272

[9702] F-NT2RP3002549//Homo sapiens clone DJ0098022, WORKING DRAFT SEQUENCE, 5 unordered pieces.//4.7e-26:123:72//AC004821

[9703] F-NT2RP3002566//Streptomyces viridifaciens sigma factor (hrdD) gene, complete cds.//0.76:459:59//U60418

[9704] F-NT2RP3002587//Homo sapiens chromosome Y, clone 264M20, complete sequence.//4.6e-13:199:76//AC004617

[9705] F-NT2RP3002590//Porphyra purpurea chloroplast, complete genome.//0.88:284:60//U38804

[9706] F-NT2RP3002602//CIT978SK-A-441H11-2.TPB CIT978SK Homo sapiens genomic clone A-441 H11, genomic survey sequence.//2.0e-22:140:95//B68331

[9707] F-NT2RP3002603

[9708] F-NT2RP3002628//C. acetobutylicum dnaJ and orfB genes.//2.0e-05:333:60//X69050

[9709] F-NT2RP3002631

[9710] F-NT2RP3002650//Mus musculus mRNA for cartilage-associated protein (CASP).//1.5e-20:641:62//AJ006469

[9711] F-NT2RP3002659//Bovine herpesvirus type I UL22-35 genes.//5.2e-05:621:59//Z78205

[9712] F-NT2RP3002660//Homo sapiens PAC clone DJ1006K12 from 7q31.2-q31, complete sequence.//0.98:453:57//AC004946

[9713] F-NT2RP3002663//Homo sapiens chromosome 19, cosmid F6697, complete sequence.//3.3e-22:407:67//AC006129

[9714] F-NT2RP3002671//S. pombe chromosome III cosmid c553.//1.0e-12:336:66//AL023704

[9715] F-NT2RP3002682//Caenorhabditis elegans cosmid F17C11, complete sequence.//1.3e-21:448:64//Z72507

[9716] F-NT2RP3002687//CIT978SK-A-789B1.TP CIT978SK Homo sapiens genomic clone A-789B1, genomic survey sequence.//2.5e-25:173:91//B51656

[9717] F-NT2RP3002688//Mouse mRNA for kinesin-like protein (Kiflb), complete cds.//1.2e-73:728:74//D17577

[9718] F-NT2RP3002701//CITBI-El-2507L14.TF CITBI-EL Homo sapiens genomic clone 2507L14, genomic survey sequence.//0.0012:55:9211AQ263530

[9719] F-NT2RP3002713

[9720] F-NT2RP3002763//Caenorhabditis elegans cosmid T20F10, complete sequence.//0.98:209:63//Z81594

[9721] F-NT2RP3002770

[9722] F-NT2RP3002785//Homo sapiens laminin beta-4 chain precursor (LAMB4) mRNA, alternatively spliced short variant, partial cds.//0.78:515:57//AF029325

[9723] F-NT2RP3002799//Human DNA sequence from clone 1052M9 on chromosome Xq25. Contains the SH2D1A gene for SH2 domain protein 1A, Duncan's disease (lymphoproliferative syndrome) (DSHP), part of a 60S Acidic Ribosomal protein 1 (RPLP1) LIKE gene and part of a mouse DOC4 LIKE gene. Contains ESTs and GSSs, complete sequence.//1.9e-21:167:79//AL022718

[9724] F-NT2RP3002810//Homo sapiens chromosome 17, clone hRPK.215_E_{—}13, complete sequence.//0.32:187:66//AC005549

[9725] F-NT2RP3002818//Homo sapiens jerky gene product homolog mRNA, complete cds.//6.9e-54:615:70//AF004715

[9726] F-NT2RP3002861//Caenorhabditis elegans cosmid M03F4.//4.2e-05:226:65//U64601

[9727] F-NT2RP3002869//Mus musculus semaphorin VIa mRNA, complete cds.//2.0e-93:638:83//AF030430

[9728] F-NT2RP3002876//Homo sapiens mRNA for B120, complete cds.//8.5e-89:557:88//AB001895

[9729] F-NT2RP3002877//Homo sapiens chromosome 12 p13.3 clone RPCI11-433J6, WORKING DRAFT SEQUENCE, 100 unordered pieces.//7.9e-12:160:78//AC006087

[9730] F-NT2RP3002909//Homo sapiens mRNA for KIAA0771 protein, partial cds.//5.7e-180:853:98//AB018314

[9731] F-NT2RP3002911//RPCI11-24N15.TPC RPCI-11 Homo sapiens genomic clone RPCI-11-24N15, genomic survey sequence.//2.3e-13:442:61//B88815

[9732] F-NT2RP3002948//, complete sequence.//2.2e-110:637:91//AC005500

[9733] F-NT2RP3002953//Homo sapiens chromosome 5, BAC clone 34j15 (LBNL HI 69), complete sequence.//1.7e-1166:793:98//AC005754

[9734] F-NT2RP3002955//Human HepG2 partial cDNA, clone hmd3cO2 m5.//0.00011:61:95//D17024

[9735] F-NT2RP3002969//Rat mRNA for brain acyl-CoA synthetase II, complete cds.//1.2e-128:808:85//D30666

[9736] F-NT2RP3002972//H. sapiens (xs168) mRNA, 381bp.//1.5e-43:312:85//Z36820

[9737] F-NT2RP3002978//Plasmodium falciparum 3D7 chromosome 12 PFYAC 181 genomic sequence, WORKING DRAFT SEQUENCE, 8 unordered pieces.//0.00044:527:57//AC005505

[9738] F-NT2RP3002985//Genomic sequence from Human 9q34, complete sequence.//0.92:341:60//AC001644

[9739] F-NT2RP3002988//HS_{—}3015_A1_B07_T7 CIT Approved Human Genomic Sperm Library D Homo sapiens genomic clone Plate=3015 Col=13 Row=C, genomic survey sequence.//4.4e-05:379:58//AQ091708

[9740] F-NT2RP3003008//Mus musculus major histocompatibility locus class III regions Hsc70t gene, partial cds; smRNP, G7A, NG23, MutS homolog, CLCP, NG24, NG25, and NG26 genes, complete cds; and unknown genes.//1.4e-72:197:79//AF109905

[9741] F-NT2RP3003032//Plasmodium falciparum DNA *** SEQUENCING IN PROGRESS *** from contig 3-80, complete sequence.//1.6e-08:809:58//AL010153

[9742] F-NT2RP3003059//Rattus norvegicus potassium channel regulator I mRNA, complete cds.//4.1e-111:804:81//U78090

[9743] F-NT2RP3003061//Human mRNA for ankyrin (variant 2.1).//1.4e-12:633:59//X16609

[9744] F-NT2RP3003068//Human BAC clone RG264L19 from 7 p15-p21, complete sequence.//0.034:282:60//AC002410

[9745] F-NT2RP3003071//H. sapiens CpG island DNA genomic Mse1 fragment, clone 13d12, reverse read cpg13d12.rt1c.//6.8e-15:95:100//Z64565

[9746] F-NT2RP3003078

[9747] F-NT2RP3003101//Mouse mRNA for tetracycline transporter-like protein, complete cds.//8.1e-72:732:71//D88315

[9748] F-NT2RP3003121

[9749] F-NT2RP3003133//Homo sapiens chromosome 19, cosmid R30385, complete sequence.//3.5e-12:168:76//AC004510

[9750] F-NT2RP3003138//Mouse kif4 mRNA for microtubule-based motor protein KIF4, complete cds.//4.0e-148:908:87//DI2646

[9751] F-NT2RP3003139//Rattus norvegicus kappa opioid receptor gene, exon 4 and complete cds.//2.0e-31:658:63//U17995

[9752] F-NT2RP3003145//Mus musculus carboxypeptidase X2 mRNA, complete cds.//3.5e-22:430:63//AF017639

[9753] F-NT2RP3003150

[9754] F-NT2RP3003157//HS_{—}3055_B1_G05_MF CIT Approved Human Genomic Sperm Library D Homo sapiens genomic clone Plate=3055 Col=9 Row=N, genomic survey sequence.//1.9e-92:493:941/AQ155489

[9755] F-NT2RP3003185//Rattus norvegicus brain-enriched guanylate kinase-associated protein 1 mRNA, complete cds.//8.6e-06:228:65//AF064868

[9756] F-NT2RP3003193//H. sapiens HZF10 mRNA for zinc finger protein.//7.4e-73:737:71//X78933

[9757] F-NT2RP3003197

[9758] F-NT2RP3003203//Rattus norvegicus golgi peripheral membrane protein p65 (GRASP65) mRNA, complete cds.//4.1e-48:640:67//AF015264

[9759] F-NT2RP3003204//Human Mermaid LINE-1 element mRNA sequence.//0.0033:69:81//U31059

[9760] F-NT2RP3003210//Homo sapiens SYBL1 gene.//1.1e-34:430:70//AJ004799

[9761] F-NT2RP3003212//Rattus norvegicus lamina associated polypeptide IC (LAPIC) mRNA, complete cds.//6.3e-75:776:74//U20286

[9762] F-NT2RP3003230//Rattus norvegicus mRNA for coronin-like protein.//1.8e-62:575:7411AJ006064

[9763] F-NT2RP3003242//Homo sapiens stanniocalcin-2 (STC-2) mRNA, complete cds.//3.7e-128:617:98//AF055460

[9764] F-NT2RP3003251//H. sapiens StafSO mRNA.//3.5e-67:651:76//X82200

[9765] F-NT2RP3003264//Plasmodium falciparum 3D7 chromosome 12 PFYAC812 genomic sequence, WORKING DRAFT SEQUENCE, 8 unordered pieces.//0.015:473:58//AC004153

[9766] F-NT2RP3003278//H. sapiens CpG island DNA genomic Mse1 fragment, clone 28b4, forward read cpg28b4.ft1a.//4.0e-27:174:93//Z60555

[9767] F-NT2RP3003282//Homo sapiens dynamin (DNM) mRNA, complete cds.//1.3e-131:694:93//L36983

[9768] F-NT2RP3003290//Homo sapiens nickel-specific induction protein (Cap43) mRNA, complete cds.//1.7e-64:662:71//AF004162

[9769] F-NT2RP3003301//Spinacia oleracea mRNA for ATP-dependent protease Lon, complete cds.//4.9e-37:682:64//D85610

[9770] F-NT2RP3003302//Homo sapiens, clone hRPK.15_A-1, complete sequence.//4.6e-95:680:82//AC006213

[9771] F-NT2RP3003311//Homo sapiens chromosome 21, Neurofibromatosis 1 (NF1) related locus, complete sequence.//0.0:191:62//AC004527

[9772] F-NT2RP3003313//Streptomyces coelicolor cosmid 5A7.//0.0084:403:61//AL031107

[9773] F-NT2RP3003327//H. sapiens StafSO mRNA.//2.5e-29:253:67//X82200

[9774] F-NT2RP3003330

[9775] F-NT2RP3003344

[9776] F-NT2RP3003346//Homo sapiens chromosome 17, clone hRPK.795_F_{—}17, complete sequence.//9.0e-41:296:84//AC005284

[9777] F-NT2RP3003353//Human DNA sequence from PAC 970D1 on chromosome 1q24. Contains ESTs, STSs and a BAC end-sequence (GSS).//0.047:404:60//AL021069

[9778] F-NT2RP3003377//Homo sapiens clone DJ0919J22, WORKING DRAFT SEQUENCE, 34 unordered pieces.//8.3e-122:632:96//AC005519

[9779] F-NT2RP3003384//Homo sapiens Chromosome 2 BAC Clone 376al, WORKING DRAFT SEQUENCE, 17 unordered pieces.//0.0036:127:74//AC000360

[9780] F-NT2RP3003385//Mus musculus SKD3 mRNA, complete cds.//2.0e-110:843:79//U09874

[9781] F-NT2RP3003403//Human Chromosome X, complete sequence.//7.5e-21:647:61//AC002407

[9782] F-NT2RP3003409//Human DHHC-domain-containing cysteine-rich protein mRNA, complete cds.//1.0e-20:430:63//U90653

[9783] F-NT2RP3003411//Mus musculus COP9 complex subunit 7b (COPS7b) mRNA, complete cds.//4.2e-139:524:90//AF071317

[9784] F-NT2RP3003427//HS-1051-A1-D03-MF.abi CIT Human Genomic Sperm Library C Homo sapiens genomic clone Plate=CT 773 Col=5 Row=G, genomic survey sequence.//8.8e-18:111:97//B40173

[9785] F-NT2RP3003433//HS_{—}2219_B2_A11_MF CIT Approved Human Genomic Sperm Library D Homo sapiens genomic clone Plate=2219 Col=22 Row=B, genomic survey sequence.//1.2e-57:410:83//AQ145866

[9786] F-NT2RP3003464//Homo sapiens rab3-GAP regulatory domain mRNA, complete cds.//5.2e-181:853:98//AF004828

[9787] F-NT2RP3003490//Homo sapiens mRNA for KIAA0725 protein, partial cds.//1.6e-173:826:98//AB018268

[9788] F-NT2RP3003491//CIT-HSP-234401.TR CIT-HSP Homo sapiens genomic clone 234401, genomic survey sequence.//1.2e-39:213:97//AQ057124

[9789] F-NT2RP3003500//HS_{—}3000_B1_C07_MR CIT Approved Human Genomic Sperm Library D Homo sapiens genomic clone Plate=3000 Col=13 Row=F, genomic survey sequence.//0.025:253:60//AQ090347

[9790] F-NT2RP3003543//Homo sapiens chromosome 16, cosmid clone 399H11 (LANL), complete sequence.//0.95:279:60//AC004234

[9791] F-NT2RP3003552//Homo sapiens clone UWGC:y54c222 from 6p21, complete sequence.//1.8e-88:166:84//AC006049

[9792] F-NT2RP3003555//Human DNA sequence *** SEQUENCING IN PROGRESS *** from clone 228H 13, WORKING DRAFT SEQUENCE.//8.9e-17:245:72//AL031985

[9793] F-NT2RP3003564//HS_{—}3141_B1-G10_T7 CIT Approved Human Genomic Sperm Library D Homo sapiens genomic clone Plate=3141 Col=19 Row=N, genomic survey sequence.//2.7e-79:442:9311AQ187798

[9794] F-NT2RP3003572

[9795] F-NT2RP3003576//Homo sapiens clone RG031N19, WORKING DRAFT SEQUENCE, 1 unordered pieces.//5.8e-55:275:84//AC005632

[9796] F-NT2RP3003589//Canine rab10 mRNA for ras-related GTP-binding protein.//1.1e-94:488:95//X56387

[9797] F-NT2RP3003621//Homo sapiens chromosome 16, cosmid clone 432A1 (LANL), complete sequence.//6.0e-88:463:84//AC004235

[9798] F-NT2RP3003625//Human DNA sequence *** SEQUENCING IN PROGRESS *** from clone 390E6, WORKING DRAFT SEQUENCE.//0.98:307:60//AL031600

[9799] F-NT2RP3003656

[9800] F-NT2RP3003659//F. rubripes GSS sequence, clone 013G07cE7, genomic survey sequence.//1.7e-25:284:74//AL011271

[9801] F-NT2RP3003665//Homo sapiens chromosome 9q34, clone 63G10, complete sequence.//0.011:279:65//AC002096

[9802] F-NT2RP3003672

[9803] F-NT2RP3003680//Drosophila melanogaster; Chromosome 2R; Region 39B1-39B3; P1 clone DS05527, WORKING DRAFT SEQUENCE, 9 unordered pieces.//3.4e-16:425:64//AC005811

[9804] F-NT2RP3003686//HS_{—}3064_B2_A04_MF CIT Approved Human Genomic Sperm Library D Homo sapiens genomic clone Plate=3064 Col=8 Row=B, genomic survey sequence.//3.1e-27:153:9811AQ136993

[9805] F-NT2RP3003701

[9806] F-NT2RP3003716//Rattus norvegicus Sha1-related potassium channel Kv4.3 mRNA, complete cds.//4.6e-107:788:82//U42975

[9807] F-NT2RP3003726//Homo sapiens mRNA for KIAA0757 protein, complete cds.//2.3e-148:700:98//AB018300

[9808] F-NT2RP3003746//CIT-HSP-2306A10.TF CIT-HSP Homo sapiens genomic clone 2306A10, genomic survey sequence.//0.39:212:61//AQ015785

[9809] F-NT2RP3003795//Human DNA sequence from clone 333H23 on chromosome 22q12.1-12.3. Contains the (possibly alternatively spliced) RPL3 gene for 60S Ribosomal Protein L3 and the threefold alternatively spliced gene for Synaptogyrin 1A, 1B and IC (SYNGRIA, SYBGRIB, SYNGRIC), both genes downstream of a putative CpG island. Contains ESTs, an STS, GSSs, genomic marker D22S1155 and a ca repeat polymorphism, complete sequence.//4.2e-21:445:66//AL022326

[9810] F-NT2RP3003799//Homo sapiens DNA from chromosome 19-cosmids R31158, R31874, and R28125, genomic sequence, complete sequence.//1.0:257:63//AF038458

[9811] F-NT2RP3003800//Mouse neuronal proto-oncogene c-src mRNA encoding tyrosine-specific protein kinase, complete cds.//1.2e-63:484:81/IM17031

[9812] F-NT2RP3003805//Homo sapiens chromosome 19, cosmid R27377, complete sequence.//0.96:353:60//AC005321

[9813] F-NT2RP3003809//Bovine herpesvirus 1 complete genome.//7.2e-12:615:60//AJ004801

[9814] F-NT2RP3003819

[9815] F-NT2RP3003825

[9816] F-NT2RP3003828//Human rRNA primary transcript internal transcribed spacer 2 (ITS2).//6.2e-16:543:62//X17626

[9817] F-NT2RP3003831//RPCII 1-50N15.TJ RPCII 1 Homo sapiens genomic clone R-50N15, genomic survey sequence.//1.1e-21:174:85//AQ082633

[9818] F-NT2RP3003833//Homo sapiens clones 24718 and 24825 mRNA sequence.//8.0e-47:242:98//AF070611

[9819] F-NT2RP3003842//RPCII 1-44E5.TJ RPCII 1 Homo sapiens genomic clone R-44E5, genomic survey sequence.//9.7e-25:143:97//AQ195884

[9820] F-NT2RP3003846//Homo sapiens mRNA for KIAA0725 protein, partial cds.//4.2e-36:335:68//AB018268

[9821] F-NT2RP3003870//Homo sapiens mRNA for KIAA0800 protein, complete cds.//4.1e-174:805:99//AB018343

[9822] F-NT2RP3003876//Rattus norvegicus Rabin3 mRNA, complete cds.//2.7e-109:709:84//U19181

[9823] F-NT2RP3003914//Drosophila melanogaster UDP-glucose:glycoprotein glucosyltransferase mRNA, complete cds.//8.9e-11:193:70//U20554

[9824] F-NT2RP3003918//Homo sapiens VAMP-associated protein of 33 kDa (VAP-33) mRNA, complete cds.//2.6e-47:404:77//AF057358

[9825] F-NT2RP3003932//Plasmodium falciparum 3D7 chromosome 12 PFYAC1383 genomic sequence, WORKING DRAFT SEQUENCE, 3 unordered pieces.//0.68:597:55//AC005504

[9826] F-NT2RP3003989//Human DNA sequence *** SEQUENCING IN PROGRESS *** from clone 404H4, WORKING DRAFT SEQUENCE.//0.37:548:56//AL031661

[9827] F-NT2RP3003992//Human cGMP-gated cation channel beta subunit (CNCG2) mRNA, complete cds.//0.021:433:58//U58837

[9828] F-NT2RP3004013//M. musculus Spnr mRNA for RNA binding protein.//1.4e-164:838:94//X84692

[9829] F-NT2RP3004016//Human DNA sequence *** SEQUENCING IN PROGRESS * from clone 1018K9, WORKING DRAFT SEQUENCE.//0.00042:356:62//AL031726

[9830] F-NT2RP3004041//Human DNA sequence *** SEQUENCING IN PROGRESS *** from clone 809F4, WORKING DRAFT SEQUENCE.//6.8e-112:627:82//AL022400

[9831] F-NT2RP3004051//Human mRNA for KIAA0319 gene, complete cds.//2.2e-61:774:67//AB002317

[9832] F-NT2RP3004070//Homo sapiens DNA sequence from PAC 352A20 on chromosome 6q24.1-25.1. Contains a pseudogene similar to yeast, bacterial, worm and slime mold hypothetical genes, and a gene coding for an aldehyde dehydrogenase family protein. Contains ESTs, STSs and GSSs, complete sequence.//7.9e-17:484:62//AL021939

[9833] F-NT2RP3004078//M. musculus (BALB/c) MRFX2 mRNA.//1.9e-102:684:83//X76089

[9834] F-NT2RP3004093//F24P17-Sp6 IGF Arabidopsis thaliana genomic clone F24P 17, genomic survey sequence.//0.021:207:63//B09433

[9835] F-NT2RP3004095//Homo sapiens clone NH0486122, WORKING DRAFT SEQUENCE, 5 unordered pieces.//3.5e-25:272:77//AC005038

[9836] F-NT2RP3004110//Homo sapiens DNA from chromosome 19, BAC 33152, complete sequence.//8.6e-28:223:73//AC003973

[9837] F-NT2RP3004125//Homo sapiens TTF-1 interacting peptide 20 mRNA, partial cds.//2.2e-28:637:63//AF000560

[9838] F-NT2RP3004145

[9839] F-NT2RP3004148

[9840] F-NT2RP3004155//Homo sapiens timing protein CLK-1 mRNA, complete cds.//6.5e-120:578:98//AF032900

[9841] F-NT2RP3004189//M. musculus tex292 mRNA (5′region).//1.1e-06:102:82//X80434

[9842] F-NT2RP3004206//D. melanogaster crn mRNA.//7.3e-69:715:71//X58374

[9843] F-NT2RP3004207//Mouse mRNA for seizure-related gene product 6 type 2 precursor, complete cds.//4.8e-42:650:66//D64009

[9844] F-NT2RP3004209//Human cosmid Q7AI0 (D21S246) insert DNA, complete sequence.//8.4e-55:184:84//D42052

[9845] F-NT2RP3004215//Homo sapiens chromosome 5, Pac clone 9c13 (LBNL H127), complete sequence.//0.22:458:60//AC006084

[9846] F-NT2RP3004242//Caenorhabditis elegans cosmid ZK632, complete sequence.//1.6e-29:409:69//Z22181

[9847] F-NT2RP3004246//Homo sapiens chromosome 10 clone CIT987SK-IOIOK1 map 10q25, complete sequence.//3.6e-117:242:100//AC005385

[9848] F-NT2RP3004253//H. sapiens 28S rRNA V8 region (LAN5-6).//2.6e-12:589:59//X69353

[9849] F-NT2RP3004258//Rattus norvegicus Zis mRNA, complete cds.//1.2e-88:489:91//AF013967

[9850] F-NT2RP3004262//Homo sapiens heat shock protein hsp40-3 mRNA, complete cds.//3.1e-153:733:98//AF088982

[9851] F-NT2RP3004282//Homo sapiens torsinA (DYT1) mRNA, complete cds.//1.3e-24:597:61//AF007871

[9852] F-NT2RP3004332

[9853] F-NT2RP3004334//L. esculentum gene for fruit ripening polygalacturonase.//0.23:501:57//X80908

[9854] F-NT2RP3004341//Human DNA sequence from clone 503G16 on chromosome 6p23 Contains EST, CpG island, complete sequence.//0.0014:198:66//Z93020

[9855] F-NT2RP3004348//R. norvegicus mRNA for cytosolic resiniferatoxin-binding protein.//1.4e-103:600:82//X67877

[9856] F-NT2RP3004349//Homo sapiens Xp22 BAC GS-321G17 (Genome Systems Human BAC library) complete sequence.//5.1e-49:480:75//AC004025

[9857] F-NT2RP3004378//Drosophila melanogaster; Chromosome 2R; Region 47F1-47F7; P1 clone DS02304, WORKING DRAFT SEQUENCE, 5 unordered pieces.//1.8e-23:352:67//AC005653

[9858] F-NT2RP3004399//H. sapiens mRNA for leucine-rich primary response protein 1.//7.2e-140:804:90//X97249

[9859] F-NT2RP3004424//Mus musculus mRNA for nuclear protein SA3.//6.8e-53:413:81//AJ005678

[9860] F-NT2RP3004428//Salmo salar DNA for a cryptic repeat.//3.2e-07:270:63//AJ012206

[9861] F-NT2RP3004451//RPCI11-51J15.TK RPCI11 Homo sapiens genomic clone R-51J15, genomic survey sequence.//8.8e-19:180:82//AQ052326

[9862] F-NT2RP3004454//Homo sapiens mRNA for KIAA0448 protein, complete cds.//6.2e-123:583:99//AB007917

[9863] F-NT2RP3004466//HS_{—}3038_B2_F08_MF CIT Approved Human Genomic Sperm Library D Homo sapiens genomic clone Plate=3038 Col=16 Row=L, genomic survey sequence.//0.41:172:59//AQ102458

[9864] F-NT2RP3004470//H. sapiens CpG island DNA genomic Mse1 fragment, clone 81 al 1, reverse read cpg81 a11.rt1a.//7.0e-25:148:96//Z56029

[9865] F-NT2RP3004472//RPCII 1-42M5.TJ RPCII 1 Homo sapiens genomic clone R-42M5, genomic survey sequence.//1.6e-20:143:92//AQ052792

[9866] F-NT2RP3004475//Homo sapiens mRNA for KIAA0456 protein, partial cds.//3.0e-150:715:98//AB007925

[9867] F-NT2RP3004480//Mus musculus maternal-embryonic 3 (Mem3) mRNA, complete cds.//1.0e-119:679:90//U47024

[9868] F-NT2RP3004490//Homo sapiens mRNA for Musashi, complete cds.//7.1e-155:752:97//AB012851

[9869] F-NT2RP3004498//Homo sapiens clone DJ1147A01, WORKING DRAFT SEQUENCE, 25 unordered pieces.//4.0e-67:265:84//AC006023

[9870] F-NT2RP3004503//Homo sapiens Xp22-132-134 BAC GSHB-590J15 (Genome Systems Human BAC library) complete sequence.//1.2e-55:415:78//AC004673

[9871] F-NT2RP3004504//M. musculus mRNA for CPEB protein.//2.0e-110:618:91//Y08260

[9872] F-NT2RP3004507//Homo sapiens chromosome 19, cosmid R26660, complete sequence.//9.3e-46:433:76//AC005328

[9873] F-NT2RP3004527//Homo sapiens mRNA; transcriptional unit N144, 5′ end.//1.1e-100:508:97//AJ002574

[9874] F-NT2RP3004534//Mouse oncogene (ect2) mRNA, complete cds.//2.0e-93:442:84//L11316

[9875] F-NT2RP3004539//Homo sapiens mRNA for KIAA0632 protein, partial cds.//8.5e-145:679:98//AB014532

[9876] F-NT2RP3004544//Homo sapiens mRNA for KIAA0554 protein, partial cds.//2.8e-169:793:98//AB011126

[9877] F-NT2RP3004566//Mus musculus krupple-related zinc finger protein (Emzfl) mRNA, complete cds.//6.9e-18:433:64//AF031955

[9878] F-NT2RP3004569//CITB1-E1-2522H6.TF CITB1-E1 Homo sapiens genomic clone 2522H6, genomic survey sequence.//5.3e-15:138:84//AQ280780

[9879] F-NT2RP3004572//Homo sapiens cofactor of initiator function (CIF 150) mRNA, complete cds.//1.0e-179:860:97//AF026445

[9880] F-NT2RP3004578//Homo sapiens mRNA for KIAA0477 protein, complete cds.//4.2e-150:711:98//AB007946

[9881] F-NT2RP3004594//Homo sapiens mRNA for AND-1 protein.//1.1e-158:796:95//AJ006266

[9882] F-NT2RP3004617//Homo sapiens clone DJ 1152C17, WORKING DRAFT SEQUENCE, 1 unordered pieces.//9.3e-14:360:65//AC004977

[9883] F-NT2RP3004618//Oryctolagus cuniculus translation initiation factor eIF2C mRNA, complete cds.//2.9e-52:539:73//AF005355

[9884] F-NT2RP3004669//Brn-3a=class V POU transcription factor [mice, CD/CD, embryo fibroblast cells, Genomic, 2160 nt].//0.046:437:57//S69350

[9885] F-NT2RP3004670//Human DNA sequence *** SEQUENCING IN PROGRESS *** from clone 356B8, WORKING DRAFT SEQUENCE.//1.9e-05:625:59//Z98882

[9886] F-NT2RP4000008//Homo sapiens chromosome X, clone hCIT.200_L_{—}4, complete sequence.//5e-155:844:92//AC006121

[9887] F-NT2RP4000023//Arabidopsis thaliana genomic DNA, chromosome 5, TAC clone: K24G6, complete sequence.//0.012:417:59//AB012242

[9888] F-NT2RP4000035//Homo sapiens BAC clone NH0353P23 from 2, complete sequence.//8.0e-18:242:74//AC005035

[9889] F-NT2RP4000049//Homo sapiens decoy receptor 2 mRNA, complete cds.//2.1e-81:556:85//AF029761

[9890] F-NT2RP4000051//Mus musculus mRNA for cartilage-associated protein (CASP).//1.6e-19:654:63//AJ006469

[9891] F-NT2RP4000078//Homo sapiens mRNA for NS1-binding protein (NS1-BP).//2.5e-149:720:97//AJ012449

[9892] F-NT2RP4000102//Plasmodium falciparum MAL3P2, complete sequence.//0.28:336:57//AL034558

[9893] F-NT2RP4000109//Homo sapiens mRNA for MEGF5, partial cds.//4.4e-166:774:99//AB011538

[9894] F-NT2RP4000111//B. taurus mRNA for cleavage and polyadenylation specificity factor.//2.6e-137:678:91//X75931

[9895] F-NT2RP4000129//Homo sapiens mRNA for KIAA0483 protein, partial cds.//3.3e-114:548:98//AB007952

[9896] F-NT2RP4000147//Rattus norvegicus ADP-ribosylation factor-directed GTPase activating protein mRNA, complete cds.//1.2e-104:677:85//U35776

[9897] F-NT2RP4000150//Rat proto-oncogene (Ets-1) mRNA, complete cds.//7.2e-54:327:74//L20681

[9898] F-NT2RP4000151//Homo sapiens clone 664 unknown mRNA, partial sequence.//2.2e-62:360:92//AF091088

[9899] F-NT2RP4000159//RPCI11-75N16.TJ RPCII 1 Homo sapiens genomic clone R-75N16, genomic survey sequence.//2.6e-19:119:98//AQ267551

[9900] F-NT2RP4000167//Homo sapiens Xp22-150 BAC GSHB-309P15 (Genome Systems Human BAC Library) complete sequence.//3.3e-49:683:67//AC006210

[9901] F-NT2RP4000185//Homo sapiens clone DTIPIE11 mRNA, CAG repeat region.//1.1e-99:543:93//U92989

[9902] F-NT2RP4000210//Homo sapiens mRNA for KIAA0700 protein, partial cds.//4.9e-174:825:98//AB014600

[9903] F-NT2RP4000212//, complete sequence.//4.0e-131:233:94//AC005300

[9904] F-NT2RP4000214//Homo sapiens chromosome 19, CIT-HSP-444n24, complete sequence.//1.8e-161:751:99//AC005261

[9905] F-NT2RP4000218//RPCI11-69B7.TJ RPCII 1 Homo sapiens genomic clone R-69B7, genomic survey sequence.//1.7e-84:413:98//AQ268504

[9906] F-NT2RP4000243//Homo sapiens mRNA for cartilage-associated protein (CASP).//2.6e-156:771:97//AJ006470

[9907] F-NT2RP4000246//Mus musculus neural variant mena+++protein (Mena) mRNA, complete cds.//2.1e-120:707:87//U72523

[9908] F-NT2RP4000259//Homo sapiens clone 683 unknown mRNA, complete sequence.//2.8e-128:604:99//AF091092

[9909] F-NT2RP4000263//CIT-HSP-2336N24.TF CIT-HSP Homo sapiens genomic clone 2336N24, genomic survey sequence.//0.27:124:69//AQ043515

[9910] F-NT2RP4000290//S. cerevisiae chromosome XIV reading frame ORF YNL132w.//8.6e-32:619:63//Z71408

[9911] F-NT2RP4000312//Human mRNA for KIAA0147 gene, partial cds.//4.7e-41:685:63//D63481

[9912] F-NT2RP4000321//Mus musculus transcription factor HOXA13 (Hoxa13) gene, complete cds.//6.9e-05:756:59//U59322

[9913] F-NT2RP4000323

[9914] F-NT2RP4000355

[9915] F-NT2RP4000360//Homo sapiens mRNA for KIAA0738 protein, complete cds.//2.0e-140:654:99//AB018281

[9916] F-NT2RP4000367//Homo sapiens IkappaB kinase complex associated protein (IKAP) mRNA, complete cds.//2.6e-135:649:97//AF044195

[9917] F-NT2RP4000370//Rickettsia prowazekii strain Madrid E, complete genome; segment 3/4.//2.0e-23:524:62//AJ235272

[9918] F-NT2RP4000376//Sequence 1 from patent U.S. Pat. No. 5,580,968.//1.6e-115:716:87//I30536

[9919] F-NT2RP4000381//Mus musculus mRNA for hepatoma-derived growth factor, complete cds, strain:BALB/c.//4.3e-05:450:58//D63850

[9920] F-NT2RP4000398//Homo sapiens chromosome 19, BAC CIT-B-393i15 (BC301323), complete sequence.//9.2e-37:336:69//AC006116

[9921] F-NT2RP4000415//Caenorhabditis elegans cosmid C42D8.//0.30:222:60//UI56966

[9922] F-NT2RP4000417//Drosophila melanogaster cosmid clone 86E4.//1.8e-48:580:69//AL021086

[9923] F-NT2RP4000424//Homo sapiens chromosome 17, clone HRPC41C23, complete sequence.//1.6e-42:265:81//AC003101

[9924] F-NT2RP4000448//CIT-HSP-2370F8.TF CIT-HSP Homo sapiens genomic clone 2370F8, genomic survey sequence.//2.0e-56:287:98//AQ110194

[9925] F-NT2RP4000449//CIT-HSP-2366N18.TR CIT-HSP Homo sapiens genomic clone 2366N18, genomic survey sequence.//2.4e-42:236:95//AQ076183

[9926] F-NT2RP4000455//Homo sapiens PAC clone 166H I from 12q, complete sequence.//0.17:158:67//AC003982

[9927] F-NT2RP4000457//H. sapiens mRNA for herpesvirus associated ubiquitin-specific protease (HAUSP).//0.00034:532:5711Z72499

[9928] F-NT2RP4000480//Rhodothermus marinus R-21 DNA ligase gene, complete cds.//0.0094:616:58//U10483

[9929] F-NT2RP4000481

[9930] F-NT2RP4000498//S. cerevisiae chromosome IX cosmid 9150.//5.7e-24:633:60//Z38125

[9931] F-NT2RP4000500//G. gallus mRNA for LRP/alpha-2-macroglobulin receptor.//2.4e-62:667:73//X74904

[9932] F-NT2RP4000515

[9933] F-NT2RP4000517//Homo sapiens chromosome 18, clone hRPK.474_N_{—}24, complete sequence.//1.6e-179:851:98//AC006238

[9934] F-NT2RP4000518//Homo sapiens mRNA for ATP-dependent RNA helicase, partial.//6.7e-33:203:93//AJ010840

[9935] F-NT2RP4000519//Mus musculus tyrosine kinase growth factor receptor (Etk2/tyro3) gene, alternative 5′ coding exon 2C.//0.26:162:61//U23720

[9936] F-NT2RP4000524//Rattus norvegicus rsec8 mRNA, partial cds.//1.2e-139:809:89//U32498

[9937] F-NT2RP4000528//Caenorhabditis elegans cosmid F59E 12.//1.0e-06:404:59//AF003386

[9938] F-NT2RP4000541//Drosophila melanogaster DNA sequence (PI DS02109 (D53)), complete sequence.//1.3e-05:498:58//AC002443

[9939] F-NT2RP4000556//Sequence 1 from patent EP 0285405.//1.2e-18:586:61//105465

[9940] F-NT2RP4000560//Murine genomic DNA; partially digested Sau3A fragment, cloned into cosmid vector pEMBLcos2, complete sequence.//2.5e-53:183:82//AF059580

[9941] F-NT2RP4000588//Human DNA sequence *** SEQUENCING IN PROGRESS *** from clone 414D7, WORKING DRAFT SEQUENCE.//0.00062:253:65//AL033543

[9942] F-NT2RP4000614//Homo sapiens TLS-associated protein TASR-2 mRNA, complete cds.//3.2e-138:666:98//AF067730

[9943] F-NT2RP4000638//HS_{—}3042_B2_D05_MF CIT Approved Human Genomic Sperm Library D Homo sapiens genomic clone Plate=3042 Col=10 Row=H, genomic survey sequence.//3.0e-06:78:89//AQ099333

[9944] F-NT2RP4000648//Homo sapiens KNSL4 and MAZ genes for kinesin-like DNA binding protein and Myc-associated zinc finger protein, complete cds.//1.9e-11:104:85//AB017335

[9945] F-NT2RP4000657//Mus musculus bone morphogenetic factor 11 (Bmp11) gene, exon 1.//0.34:350:62//AF100904

[9946] F-NT2RP4000704//Homo sapiens mRNA expressed in 19 week fetal lung, clone IMAGE:300856.I/3.3e-167:785:99//AB004852

[9947] F-NT2RP4000713//Gallus gallus atonal homolog 1 (Cath1) gene, complete cds.//3.7e-07:261:65//U61149

[9948] F-NT2RP4000724//Human endogenous retrovirus env mRNA.//9.2e-136:474:89//X82272

[9949] F-NT2RP4000728//Homo sapiens mRNA for KIAA0606 protein, partial cds.//3.1e-41:350:71//AB011178

[9950] F-NT2RP4000737//Myxococcus xanthus ATP-dependent protease (bsgA) gene, complete cds.//1.0:504:58//L19301

[9951] F-NT2RP4000739//CIT-HSP-2010022.TR CIT-HSP Homo sapiens genomic clone 2010022, genomic survey sequence.//1.1e-24:161:93//B57903

[9952] F-NT2RP4000781//Homo sapiens clone DJ0892G19, complete sequence.//0.052:493:58//AC004917

[9953] F-NT2RP4000787//Cricetulus griseus SRD-2 mutant sterol regulatory element binding protein-2 (SREBP-2) mRNA, complete cds.//9.6e-18:259:68//U22818

[9954] F-NT2RP4000817//Homo sapiens mRNA for KIAA0470 protein, complete cds.//1.5e-174:816:98//AB007939

[9955] F-NT2RP4000833//Homo sapiens PAC clone DJ0905J08 from 7 p12-p14, complete sequence.//0.97:52:92//AC005189

[9956] F-NT2RP4000837//Human DNA sequence *** SEQUENCING IN PROGRESS *** from clone 1112F 19, WORKING DRAFT SEQUENCE.//2.1e-128:644:97//AL034420

[9957] F-NT2RP4000839//RPCI11-6D8.TP RPCI-11 Homo sapiens genomic clone RPCI-11-6D8, genomic survey sequence.//1.5e-44:281:91//B48216

[9958] F-NT2RP4000855//Rattus norvegicus mRNA for aminopeptidase-B, complete cds.//9.5e-43:722:64//D87515

[9959] F-NT2RP4000865//Human zinc finger protein ZNF136.//6.8e-95:415:78//U09367

[9960] F-NT2RP4000878//Mus musculus mRNA for myeloid associated differentiation protein.//7.0e-87:646:80//AJ001616

[9961] F-NT2RP4000879//N. tabaccum mRNA for ubiquitin activating enzyme El .//9.0e-17:806:58//Y10804

[9962] F-NT2RP4000907//Mouse NLRR-1 mRNA for leucine-rich-repeat protein, complete cds.//6.8e-153:934:86//D45913

[9963] F-NT2RP4000915//Homo sapiens mRNA for ZNF198 protein.//9.4e-79:584:78//AJ224901

[9964] F-NT2RP4000918//Drosophila melanogaster DNA sequence (PI DS04106 (DI 72)), complete sequence.//2.0e-08:609:58//AC004290

[9965] F-NT2RP4000925//Rattus norvegicus Sha1-related potassium channel Kv4.3 mRNA, complete cds.//3.5e-64:415:87//U42975

[9966] F-NT2RP4000927//H. sapiens genomic DNA (chromosome 3; clone NRL062R).//0.75:175:62//X87547

[9967] F-NT2RP4000928//Homo sapiens CDP-diacylglycerol synthase 2 (CDS2) mRNA, partial cds.//3.5e-163:781:97//AF069532

[9968] F-NT2RP4000929//Plasmodium falciparum 3D7 chromosome 12 PFYAC69 genomic sequence, WORKING DRAFT SEQUENCE, 4 unordered pieces.//0.94:763:56//AC004688

[9969] F-NT2RP4000955//Homo sapiens clone DJ0919J22, WORKING DRAFT SEQUENCE, 34 unordered pieces.//1.0e-128:673:96//AC005519

[9970] F-NT2RP4000973//Caenorhabditis elegans cosmid Y47H9C, complete sequence.//1.6e-15:255:69//AL032657

[9971] F-NT2RP4000975//CIT-HSP-230716.TF CIT-HSP Homo sapiens genomic clone 230716, genomic survey sequence.//6.5e-31:317:79//AQ015742

[9972] F-NT2RP4000979//Human bullous pemphigoid antigen mRNA, 3′ end.//0.88:54:90//M22942

[9973] F-NT2RP4000984//Rhodobacter sphaeroides mRNA.//0.76:214:64//M83823

[9974] F-NT2RP4000989//F. rubripes GSS sequence, clone 011A11aE12, genomic survey sequence//1.0:149:65//AL010911

[9975] F-NT2RP4000996//Penaeus setiferus microsatellite PseO17 repeat region.//3.3e-08:139:74//AF047358

[9976] F-NT2RP4000997//Rattus norvegicus RNA polymerase 1127 kDa subunit mRNA, complete cds.//3.6e-126:824:84//AF025424

[9977] F-NT2RP4001004

[9978] F-NT2RP4001006//Mus musculus ROSA 26 transcription AS ROSA26AS mRNA, complete cds.//1.4e-110:861:78//U83176

[9979] F-NT2RP4001010//Rattus norvegicus PSD-95/SAP90-associated protein-4 mRNA, complete cds.//2.0e-135:789:89//U67140

[9980] F-NT2RP4001029//Mus domesticus nuclear binding factor NF2d9 mRNA, complete cds.//3.7e-120:718:88//U20086

[9981] F-NT2RP4001041//Schizosaccharomyces pombe mRNA, partial cds, clone: SY0717.//4.1e-22:452:64//D89170

[9982] F-NT2RP4001057

[9983] F-NT2RP4001064//Mus musculus mRNA for cartilage-associated protein (CASP).//1.2e-20:639:62//AJ006469

[9984] F-NT2RP4001078//Streptomyces coelicolor cosmid I C2.//0.0025:474:59//AL031124

[9985] F-NT2RP4001079//Rat alternatively spliced mRNA.//1.4e-141:832:88//M93018

[9986] F-NT2RP4001080//H. sapiens PTB-4 gene for polypirimidine tract binding protein.//9.0e-64:628:70//X65372

[9987] F-NT2RP4001086//Homo sapiens mRNA for KIAA0592 protein, partial cds.//4.7e-84:604:86//AB011164

[9988] F-NT2RP4001095

[9989] F-NT2RP4001100//CITBI-EI-2503J7.TR CITB1-E1 Homo sapiens genomic clone 2503J7, genomic survey sequence.//9.4e-17:185:79//AQ263402

[9990] F-NT2RP4001117//Canis familiaris sec61 homologue mRNA, complete cds.//1.0e-143:760:87//M96629

[9991] F-NT2RP4001122

[9992] F-NT2RP4001126//Homo sapiens shox gene, alternatively spliced products, complete cds.//4.2e-17:636:61//U82668

[9993] F-NT2RP4001138//Homo sapiens PAC clone DJ 1121 E 10 from 7q21.1-q2, complete sequence.//2.5e-23:408:60//AC004969

[9994] F-NT2RP4001143//Sequence 5 from patent U.S. Pat. No. 5,753,432.//1.8e-39:276:86//AR008079

[9995] F-NT2RP4001148//Homo sapiens clone RG332P12, WORKING DRAFT SEQUENCE, 1 unordered pieces.//2.7e-116:684:89//AC005095

[9996] F-NT2RP4001149//Mouse mRNA for thymic epithelial cell surface antigen, complete cds.//3.0e-48:581:66//D67067

[9997] F-NT2RP4001150//Homo sapiens clone DJ 1032D07, WORKING DRAFT SEQUENCE, 3 unordered pieces.//9.4e-25:193:67//AC004952

[9998] F-NT2RP4001159//Human FMR1 gene, 5′ end.//0.28:130:66//L19476

[9999] F-NT2RP4001174//FMRI {CGG repeats} [human, Fragile X syndrome patient, Genomic, 429 nt].//0.0014:187:67//S74494

[10000] F-NT2RP4001206//Dictyostelium discoideum random slug cDNA19 protein (rsc19) mRNA, partial cds.//0.032:453:58//U82511

[10001] F-NT2RP4001207//HS_{—}2248_A1_C03_MF CIT Approved Human Genomic Sperm Library D Homo sapiens genomic clone Plate=2248 Col=5 Row=E, genomic survey sequence.//0.00018:58:94//AQ192358

[10002] F-NT2RP4001210//Homo sapiens chromosome 10 clone CIT987SK-1019018 map 10p11.2-10 p12.1, complete sequence.//0.93:515:58//AC005877

[10003] F-NT2RP4001213//Human KRAB zinc finger protein (ZNF177) mRNA, splicing variant, complete cds.//3.6e-44:187:74//U37251

[10004] F-NT2RP4001219//Caenorhabditis elegans cosmid Y47H9C, complete sequence.//1.3e-15:288:67//AL032657

[10005] F-NT2RP4001228//Homo sapiens actin binding protein MAYVEN mRNA, complete cds.//2.2e-26:855:60//AF059569

[10006] F-NT2RP4001235//RPCII 1-18E11.TVB RPCI-11 Homo sapiens genomic clone RPCI-11-18E11, genomic survey sequence.//2.7e-15:101:98//B88081

[10007] F-NT2RP4001256//Amycolatopsis mediterranei 3-amino-5-hydroxy benzoic acid synthase (rifD) gene, complete cds.//1.0:459:59//U33061

[10008] F-NT2RP4001260//Sequence 2 from patent WO9601901 .//0.0018:246:63//A48324

[10009] F-NT2RP4001274//Homo sapiens, complete sequence.//2.5e-05:201:67//AC005854

[10010] F-NT2RP4001276//CIT-HSP-2324B15.TF CIT-HSP Homo sapiens genomic clone 2324B15, genomic survey sequence.//3.5e-18:138:92//AQ040728

[10011] F-NT2RP4001313//Homo sapiens mitochondrial outer membrane protein (TOM40) mRNA, nuclear gene encoding mitochondrial protein, complete cds.//7.4e-30:535:65//AF043250

[10012] F-NT2RP4001315//Bos taurus mRNA for Rab5 GDP/GTP exchange factor, Rabex5.//3.5e-145:795:91//AJ001119

[10013] F-NT2RP4001336//CIT-HSP-2169F21.TR CIT-HSP Homo sapiens genomic clone 2169F21, genomic survey sequence.//8.4e-16:109:94//B89870

[10014] F-NT2RP4001339//HS_{—}3205_B1_E08_T7 CIT Approved Human Genomic Sperm Library D Homo sapiens genomic clone Plate=3205 Col=15 Row=J, genomic survey sequence.//7.1e-24:305:73//AQ183725

[10015] F-NT2RP4001343//Homo sapiens PAC clone DJ0894A10 from 7q32-q32, complete sequence.//1.9e-17:106:91//AC004918

[10016] F-NT2RP4001345//G. gallus mRNA for lecithin-cholesterol acyltransferase.//7.6e-40:631:66//X91011

[10017] F-NT2RP4001351//Human DNA sequence *** SEQUENCING IN PROGRESS *** from clone 184J9, WORKING DRAFT SEQUENCE.//2.7e-30:608:64//AL031428

[10018] F-NT2RP4001353//Streptomyces coelicolor cosmid 5A7.//0.23:540:57//AL031107

[10019] F-NT2RP4001372//RPCII 1-49L11.TJ RPCII 1 Homo sapiens genomic clone R-49L11, genomic survey sequence.//8.5e-23:129:100//AQ051701

[10020] F-NT2RP4001373//G. gallus genomic DNA repeat region, clone 16EI.//0.15:213:61//X78609

[10021] F-NT2RP4001375

[10022] F-NT2RP4001379//Homo sapiens chromosome 17, clone hRPK.311_F_{—}12, complete sequence.//7.3e-28:153:88//AC005722

[10023] F-NT2RP4001389//Homo sapiens PAC clone DJ0740D02 from 7p 14-p 15, complete sequence.//7.2e-47:518:73//AC004691

[10024] F-NT2RP4001407//P. falciparum glutamic acid-rich protein gnen, complete cds.//0.00079:686:57//J03998

[10025] F-NT2RP4001414//Human mRNA for KIAA0202 gene, partial cds.//2.0e-76:818:71//D86957

[10026] F-NT2RP4001433//H. sapiens HZF10 mRNA for zinc finger protein.//3.5e-87:839:73//X78933

[10027] F-NT2RP4001442

[10028] F-NT2RP4001447//Homo sapiens mRNA for KIAA0783 protein, complete cds.//0.21:218:63//AB018326

[10029] F-NT2RP4001474//Human NotI linking clone 924A058R, genomic survey sequence.//7.6e-14:109:90//U49884

[10030] F-NT2RP4001483//Human mRNA for 2-oxoglutarate dehydrogenase, complete cds.//2.5e-59:480:75//D10523

[10031] F-NT2RP4001498//Homo sapiens huntingtin interacting protein HYPH mRNA, partial cds.//9.7e-39:392:72//AF049612

[10032] F-NT2RP4001502//H. sapiens (D8S135) DNA segment containing GT repeat.//2.7e-24:147:96//X61693

[10033] F-NT2RP4001507//Plasmid pSB24.2 (from S. cyanogenus) neomycin resistance protein gene, complete cds.//0.87:583:58//M32513

[10034] F-NT2RP4001524//Plasmodium falciparum 3D7 chromosome 12 PFYAC492 genomic sequence, WORKING DRAFT SEQUENCE, 5 unordered pieces.//0.93:394:58//AC005308

[10035] F-NT2RP4001529//Mus domesticus nuclear binding factor NF2d9 mRNA, complete cds.//3.1e-143:820:89//U20086

[10036] F-NT2RP4001547//S. cerevisiae chromosome XIV reading frame ORF YNRO48w.//2.2e-05:319:61//Z71663

[10037] F-NT2RP4001551//S. pombe chromosome II p1p8B7.//0.64:335:60//AL032684

[10038] F-NT2RP4001555//Homo sapiens 12q24.2 BAC RPCI11-360E11 (Roswell Park Cancer Institute Human BAC Library) complete sequence.//1.0:309:58//AC004806

[10039] F-NT2RP4001567//HS_{—}2166_B1_C07_MF CIT Approved Human Genomic Sperm Library D Homo sapiens genomic clone Plate=2166 Col=13 Row=F, genomic survey sequence.//0.99:188:59//AQ086290

[10040] F-NT2RP4001568//Human mRNA for KIAA0167 gene, complete cds.//7.0e-53:566:72//D79989

[10041] F-NT2RP4001571//RPCI11-21F20.TP RPCI-11 Homo sapiens genomic clone RPCI-11-21F20, genomic survey sequence.//2.8e-19:119:97//B85885

[10042] F-NT2RP4001574//B. primigenius mRNA for coat protein gamma-cop.//5.8e-129:813:85//X92987

[10043] F-NT2RP4001575//Rattus norvegicus mRNA for ARE1 protein.//3.4e-131:795:86//AJ223830

[10044] F-NT2RP4001592//S. aureus gene for isoleucyl-tRNA synthetase.//1.3e-14:663:59//X74219

[10045] F-NT2RP4001610//Homo sapiens Xp22 Cosmids U15E4, U115H5, U132E12, U115B9 (Lawrence Livermore human cosmid library) complete sequence.//6.4e-10:135:73//AC002364

[10046] F-NT2RP4001614//HS_{—}3042_B2_D05_MF CIT Approved Human Genomic Sperm Library D Homo sapiens genomic clone Plate=3042 Col=10 Row=H, genomic survey sequence.//3.4e-06:78:89//AQ099333

[10047] F-NT2RP4001634

[10048] F-NT2RP4001638//cSRL-161 Fl-u cSRL flow sorted Chromosome 11 specific cosmid Homo sapiens genomic clone cSRL-161F1, genomic survey sequence.//4.9e-12:144:76//B02870

[10049] F-NT2RP4001644//M. musculus mRNA for map kinase interacting kinase, Mnk2.//3.8e-69:437:86//Y11092

[10050] F-NT2RP4001656//HS_{—}2013_A1_D01_MR CIT Approved Human Genomic Sperm Library D Homo sapiens genomic clone Plate=2013 Col=1 Row=G, genomic survey sequence.//2.0e-30:207:89//AQ224793

[10051] F-NT2RP4001677//Hylobateslar huntingtin gene, partial exon.//0.23:105:71//L49362

[10052] F-NT2RP4001679//Human DNA sequence *** SEQUENCING IN PROGRESS *** from clone 462023, WORKING DRAFT SEQUENCE.//2.7e-45:351:84//AL031431

[10053] F-NT2RP4001696//Human chromosome 8 BAC clone CIT987SK-2A8 complete sequence.//1.8e-30:163:88//U96629

[10054] F-NT2RP4001725//Drosophila melanogaster DNA sequence (P1 DS08860 (DI 81)), complete sequence.//1.1e-13:402:63//AC004296

[10055] F-NT2RP4001730//RPCI11-37M21.TK RPCI-11 Homo sapiens genomic clone RPCI-11-37M21, genomic survey sequence.//0.88:177:67//AQ029840

[10056] F-NT2RP4001739

[10057] F-NT2RP4001753//H. sapiens telomeric DNA sequence, clone 12QTEL023, read 12QTEL00023.seq.//4.9e-36:192:98//Z96232

[10058] F-NT2RP4001760//Mouse oncogene (ect2) mRNA, complete cds.//2.3e-140:866:86//L11316

[10059] F-NT2RP4001790//Homo sapiens clone NH0569124, complete sequence.//1.4e-29:327:74//AC005678

[10060] F-NT2RP4001803

[10061] F-NT2RP4001822//Homo sapiens tetraspan TM4SF (TSPAN-4) mRNA, complete cds.//1.0e-16:576:60//AF054841

[10062] F-NT2RP4001823//Human DNA sequence from clone 181C9 on chromosome 22q13.2-13.33. Contains a PHAPI2 Leucine Rich Acidic Nuclear Protein pseudogene, part of a putative novel gene, ESTs, STSs and GSSs, complete sequence.//2.1e-08:601:59//Z98743

[10063] F-NT2RP4001828

[10064] F-NT2RP4001838//Human mRNA for KIAA0071 gene, partial cds.//2.2e-53:555:73//D31888

[10065] F-NT2RP4001841

[10066] F-NT2RP4001849//Homo sapiens mRNA for KIAA0672 protein, complete cds.//1.7e-55:813:65//AB014572

[10067] F-NT2RP4001861//Human simple repeat polymorphism.//0.0014:145:66//M87691

[10068] F-NT2RP4001889//HS_{—}2052_B 1_H06_T7 CIT Approved Human Genomic Sperm Library D Homo sapiens genomic clone Plate=2052 Col=1 I Row=P, genomic survey sequence.//1.0e-23:187:86//AQ270425

[10069] F-NT2RP4001893//Homo sapiens BAC clone GS166A23 from 7p21, complete sequence.//7.3e-76:178:95//AC005014

[10070] F-NT2RP4001896//T3B4TFC TAMU Arabidopsis thaliana genomic clone T3B4, genomic survey sequence.//0.99:354:61//B26193

[10071] F-NT2RP4001901//Streptomyces griseus genes for Orf2, Orf3, Orf4, Orf5, AfsA, Orf8, partial and complete cds.//0.031:409:60//AB011413

[10072] F-NT2RP4001927//HS_{—}2216_B1_D03_MF CIT Approved Human Genomic Sperm Library D Homo sapiens genomic clone Plate=2216 Col=5 Row=H, genomic survey sequence.//4.9e-32:216:89//AQ184677

[10073] F-NT2RP4001938//Mus musculus zinc finger protein (Zfp64) mRNA, complete cds.//1.2e-83:709:79//U49046

[10074] F-NT2RP4001946//HS_{—}3021_B2_RH_MR CIT Approved Human Genomic Sperm Library D Homo sapiens genomic clone Plate=3021 Col=20 Row=P, genomic survey sequence.//7.6e-09:120:76//AQ133185

[10075] F-NT2RP4001950//Human DNA sequence from clone 353H6 on chromosome Xq25-26.2. Contains the alternatively spliced SMARCA1 gene for SW1/SNF related, matrix associated, actin dependent regulator of chromatin, subfamily a, member I (SNF2LI) and a 40S Ribosomal Protein S26 pseudogene. Contains ESTs, STSs and GSSs, complete sequence.//2.1e-18:421:65//AL022577

[10076] F-NT2RP4001953//CIT-HSP-2294D14.TR CIT-HSP Homo sapiens genomic clone 2294D14, genomic survey sequence.//0.030:358:61//AQ005028

[10077] F-NT2RP4001966//Mus musculus DOC4 (Doc4) mRNA, complete cds.//2.5e-68:812:68//AF059485

[10078] F-NT2RP4001975//Homo sapiens chromosome 17, clone hCIT.91_J_{—}4, complete sequence.//1.9e-57:555:75//AC003976

[10079] F-NT2RP4002018//cSRL-143G4-u cSRL flow sorted Chromosome 11 specific cosmid Homo sapiens genomic clone cSRL-143G4, genomic survey sequence.//8.9e-21:123:98//B01950

[10080] F-NT2RP4002047//Saccharomyces cerevisiae chromosome XII cosmid 8003.//1.6e-29:520:64//U17243

[10081] F-NT2RP4002052//CIT-HSP-2045A15.TF CIT-HSP Homo sapiens genomic clone 2045A15, genomic survey sequence.//2.8e-22:137:96//B80243

[10082] F-NT2RP4002058//T20L11-T7 TAMU Arabidopsis thaliana genomic clone T20L11, genomic survey sequence.//0.019:141:65//AQ248640

[10083] F-NT2RP4002071//CIT-HSP-2314J9.TF CIT-HSP Homo sapiens genomic clone 2314J9, genomic survey sequence.//0.99:163:63//AQ027223

[10084] F-NT2RP4002075//Caenorhabditis elegans DNA *** SEQUENCING IN PROGRESS *** from clone Y57G 11, WORKING DRAFT SEQUENCE.//0.15:506:59//Z92841

[10085] F-NT2RP4002078//RPCI11-73M20.TJ RPCII 1 Homo sapiens genomic clone R-73M20, genomic survey sequence.//4.8e-21:130:96//AQ269030

[10086] F-NT2RP4002081//F. rubripes GSS sequence, clone 190022bB9, genomic survey sequence.//0.0024:350:60//Z92062

[10087] F-NT2RP4002083//M. musculus tex27 mRNA.//8.2e-77:456:89//X80437

[10088] F-NT2RP4002408//Caenorhabditis elegans serine/threonine kinase LET-502 (let-502) mRNA, complete cds.//3.7e-18:541:62//U85515

[10089] F-NT2RP4002791

[10090] F-NT2RP4002888//Homo sapiens BAC clone RG067E13 from 7q21, complete sequence.//4.7e-39:385:75//AC002383

[10091] F-NT2RP4002905//Homo sapiens chromosome 17, clone hRPC.842_A_{—}23, complete sequence.//6.5e-91:672:83//AC004662

[10092] F-NT2RP5003459//Human glyceraldehyde-3-phosphate dehydrogenase (GAPDH) mRNA, complete cds.//2.9e-37:193:99//M33197

[10093] F-NT2RP5003461//Human DNA sequence from PAC 506G2 contains ESTs.//7.9e-51:300:80//Z82901

[10094] F-NT2RP5003477//Human Chromosome 3 pac pDJ70i 11, WORKING DRAFT SEQUENCE, 2 unordered pieces.//6.7e-77:150:100//AC000380

[10095] F-NT2RP5003492

[10096] F-NT2RP5003500//Human DNA sequence from cosmid 97K10, between markers DXS6791 and DXS8038 on chromosome X contains STSs and CpG island.//1.7e-111:623:93//Z81365

[10097] F-NT2RP5003506//H. sapiens CpG island DNA genomic Mse1 fragment, clone 71h2, reverse read cpg71h2.rt1a.//1.4e-49:283:93//Z62703

[10098] F-NT2RP5003512//HS_{—}3084_A1_D04_MF CIT Approved Human Genomic Sperm Library D Homo sapiens genomic clone Plate=3084 Col=7 Row=G, genomic survey sequence.//7.7e-18:117:95//AQ186312

[10099] F-NT2RP5003522//Homo sapiens clone NH0479C13, WORKING DRAFT SEQUENCE, 12 unordered pieces.//3.8e-101:211:96//AC005236

[10100] F-NT2RP5003524//Homo sapiens beta-spectrin (HSpTB1) gene, exon 14 and partial cds.//0.00056:650:57//AF013178

[10101] F-NT2RP5003534//H. sapiens CpG island DNA genomic Mse1 fragment, clone 14c10, forward read cpg14c10.ft1b.//0.00013:70:91//Z54631

[10102] F-OVARC1000001//Homo sapiens mRNA for KIAA0465 protein, partial cds.//1.2e-67:373:94//AB007934

[10103] F-OVARC1000004//Homo sapiens chromosome 4 clone B368A9 map 4q25, complete sequence.//5.8e-93:518:81//AC005510

[10104] F-OVARC1000006//Gallus gallus histone H2A (H2A-VIII) gene, complete cds.//9.1e-56:392:84//U38933

[10105] F-OVARC1000013

[10106] F-OVARC1000014//Homo sapiens GLE1 (GLE1) mRNA, complete cds.//5.6e-170:815:98//AF058922

[10107] F-OVARC1000017//Streptomyces glaucescens tcm operon.//0.37:347:60//M80674

[10108] F-OVARC1000035//Homo sapiens GA17 protein mRNA, complete cds.//6.8e-36:238:89//AF064603

[10109] F-OVARC1000058

[10110] F-OVARC1000060//Homo sapiens ribonuclease 6 precursor, mRNA, complete cds.//2.5e-36:192:98//U85625

[10111] F-OVARC1000068//Human DNA sequence *** SEQUENCING IN PROGRESS * from clone 404K8, WORKING DRAFT SEQUENCE.//0.14:554:57//AL023883

[10112] F-OVARC1000071//Human DNA sequence *** SEQUENCING IN PROGRESS * from clone 596C15, WORKING DRAFT SEQUENCE.//5.3e-104:197:100//AL031387

[10113] F-OVARC1000085//Human DNA sequence from clone 191N21 on chromosome 6q27 Contains genes for PDCD2 (PROGRAMMED CELL DEATH-2/RP8 HOMOLOG), TATA factor (TFIID), proteasome subunit HC5, EST, STS, GSS, complete sequence.//1.6e-116:588:96//AL031259

[10114] F-OVARC1000087//HS_{—}2004 B2 E11MR CIT Approved Human Genomic Sperm Library D Homo sapiens genomic clone Plate=2004 Col=22 Row=J, genomic survey sequence.//7.1e-11:94:94//AQ221037

[10115] F-OVARC1000091//nbxb0020P 17r CUGI Rice BAC Library Oryza sativa genomic clone nbxb0020P17r, genomic survey sequence.//5.2e-05:238:64//AQ258489

[10116] F-OVARC1000092//Homo sapiens chromosome Y, clone 264, M, 20, complete sequence.//1.1e-10:720:58//AC004617

[10117] F-OVARC1000106//HS_{—}3212_B2_G12_MR CIT Approved Human Genomic Sperm Library D Homo sapiens genomic clone Plate=3212 Col=24 Row=N, genomic survey sequence.//9.9e-05:141:73//AQ175369

[10118] F-OVARC1000109

[10119] F-OVARC1000113//Homo sapiens okadaic acid-inducible phosphoprotein (OA48-18) mRNA, complete cds.//1.6e-133:663:96//AF069250

[10120] F-OVARC1000114//Human DNA sequence *** SEQUENCING IN PROGRESS *** from clone 1111N9, WORKING DRAFT SEQUENCE.//2.3e-51:547:70//AL022574

[10121] F-OVARC1000133//Homo sapiens clone GS512121, WORKING DRAFT SEQUENCE, 9 unordered pieces.//0.62:349:61//AC005027

[10122] F-OVARC1000139//Caenorhabditis elegans cosmid F09D 1.//2.5e-18:314:64//AF040640

[10123] F-OVARC1000145//HS_{—}2257_B2_D11_MR CIT Approved Human Genomic Sperm Library D Homo sapiens genomic clone Plate=2257 Col=22 Row=H, genomic survey sequence.//5.8e-30:203:90//AQ304854

[10124] F-OVARC1000148//CIT-HSP-2345A22.TR CIT-HSP Homo sapiens genomic clone 2345A22, genomic survey sequence.//1.1e-26:146:100//AQ056703

[10125] F-OVARC1000151//Sequence 1 from patent U.S. Pat. No. 5,665,588.//2.6e-61:677:70//I64695

[10126] F-OVARC1000168//Homo sapiens chromosome 19, cosmid R31343, complete sequence.//4.9e-19:381:63//AC005764

[10127] F-OVARC1000191//Plasmodium falciparum DNA *** SEQUENCING IN PROGRESS *** from MAL4P 1, WORKING DRAFT SEQUENCE.//1.3e-06:745:57//AL034557

[10128] F-OVARC1000198//*** SEQUENCING IN PROGRESS *** Homo sapiens chromosome 4, BAC clone C0₃₆₆H07; HTGS phase 1, WORKING DRAFT SEQUENCE, 28 unordered pieces.//6.4e-161:781:97//AC004604

[10129] F-OVARC1000209//Oryza sativa submergence induced protein 2A mRNA, complete cds.//9.2e-33:511:65//AF068332

[10130] F-OVARC1000212//F. rubripes GSS sequence, clone 185L11aCl, genomic survey sequence.//1.1e-13:139:79//AL019910

[10131] F-OVARC1000240//Sequence 1 from patent U.S. Pat. No. 5,710,024.//1.4e-129:623:98//I81226

[10132] F-OVARC1000241//Mus musculus hypoxia inducible factor three alpha mRNA, complete cds.//1.1e-112:697:87//AF060194

[10133] F-OVARC1000288

[10134] 2.2e-22:181:83//J00345

[10135] F-OVARC1000302//A-192A9.TP CIT978SK Homo sapiens genomic clone A-192A9, genomic survey sequence.//4.8e-18:110:99//B18003

[10136] F-OVARC1000304//Mouse mRNA from Mov10 locus.//5.5e-100:631:85//X52574

[10137] F-OVARC1000309

[10138] F-OVARC1000321//Homo sapiens clone NH0479C13, WORKING DRAFT SEQUENCE, 12 unordered pieces.//3.1e-122:325:95//AC005236

[10139] F-OVARC1000326//Rattus norvegicus lamina-associated polypeptide IC (LAPIC) mRNA, complete cds.//4.0e-46:339:84//U119614

[10140] F-OVARC1000335//Caenorhabditis elegans cosmid F 15B 10.//0.020:545:57//AF036696

[10141] F-OVARC1000347//Homo sapiens clone GS051M12, complete sequence.//0.71:252:59//AC005007

[10142] F-OVARC1000384//Homo sapiens expanded SCA7 CAG repeat.//2.2e-09:276:64//AF020275

[10143] F-OVARC1000408//Human Chromosome 11p15.5 PAC clone pDJ915fl containing KvLQT1 gene, complete sequence.//0.61:343:59//AC003693

[10144] F-OVARC1000411//S. cerevisiae chromosome XI reading frame ORF YKL202w.//0.075:242:60//Z28201

[10145] F-OVARC1000414//Homo sapiens PAC clone DJO905MO6 from 7q31, complete sequence.//0.00088:285:62//AC005166

[10146] F-OVARC1000420//Human DNA sequence * SEQUENCING IN PROGRESS * from clone 371H6, WORKING DRAFT SEQUENCE.//0.14:487:60//AL031718

[10147] F-OVARC1000427//Homo sapiens clone UWGC:rgO41 aO3 from 7p 14-15, complete sequence.//4.9e-30:195:84//AC005826

[10148] F-OVARC1000431//Plasmodium falciparum MAL3P2, complete sequence.//1.3e-05:651:59//AL034558

[10149] F-OVARC1000437//Chicken tensin mRNA, complete cds.//9.6e-54:296:78//M74165

[10150] F-OVARC1000440//Human PINCH protein mRNA, complete cds.//2.7e-19:116:99//U09284

[10151] F-OVARC1000442//Human DNA sequence from clone 816K17 on chromosome 20p12.2-13 Contains TGM3 (PROTEIN-GLUTAMINE GLUTAMYLTRANSFERASE E3 PRECURSOR (EC 2.3.2.13) (TGASE E3) (TRANSGLUTAMINASE 3), and another member of the Transglutaminase family, complete sequence.//1.0e-21:202:79//AL031678

[10152] F-OVARC1000443//Homo sapiens mRNA for KIAA0683 protein, complete cds.//1.0e-138:566:99//AB014583

[10153] F-OVARC1000461

[10154] F-OVARC1000465//Bos taurus guanine nucleotide-exchange protein (ARF-GEP 1) mRNA, complete cds.//4.7e-124:650:93//AF023451

[10155] F-OVARC1000466//Homo sapiens DNA from chromosome 19, cosmid R29144, complete sequence.//1.0e-15:510:59//AC004221

[10156] F-OVARC1000473//Ciona intestinalis genomic fragment, clone 3F4, genomic survey sequence.//2.5e-06:272:62//AJ227191

[10157] F-OVARC1000479//cDNA encoding novel rat protein TIP 120 which is formed of complex with TBP (TATA binding protein).//1.1e-117:652:90//E12829

[10158] F-OVARC1000486//Homo sapiens DNA sequence from PAC 262D12 on chromosome 1q23.3-24.3. Contains a Tenascin (Hexabrachion, Cytotactin, Neuronectin, Myotendinous antigen)-LIKE gene and a mitochondrial/chloroplast 30S ribosomal protein S14-LIKE gene preceeded by a CpG island. Contains ESTs, genomic marker DI S2691 and STSs.//1.7e-13:709:60//Z99297

[10159] F-OVARC1000496//Human DNA sequence *** SEQUENCING IN PROGRESS *** from clone 455J7, WORKING DRAFT SEQUENCE.//6.0e-23:316:72//AL031733

[10160] F-OVARC1000520//Homo sapiens supervillin mRNA, complete cds.//2.1e-113:539:99//AF051850

[10161] F-OVARC1000526//Homo sapiens clone GS438P06, WORKING DRAFT SEQUENCE, 17 unordered pieces.//8.0e-149:716:98//AC005024

[10162] F-OVARC1000533//Homo sapiens chromosome 19, cosmid R30385, complete sequence.//5.8e-137:545:97//AC004510

[10163] F-OVARC1000543//HS_{—}3055_A2_F10_MF CIT Approved Human Genomic Sperm Library D Homo sapiens genomic clone Plate=3055 Col=20 Row=K, genomic survey sequence.//0.19:104:71//AQ102820

[10164] F-OVARC1000556//Homo sapiens DNA sequence from PAC 168L15 on chromosome 6q26-27. Contains RSK3 gene, ribosomal protein S6 kinase, EST, GSS, STS. CpG island, complete sequence.//4.4e-136:670:97//AL022069

[10165] F-OVARC1000557//Human DNA from chromosome 19-specific cosmid R27090, genomic sequence, complete sequence.//1.3e-15:262:69//AC002985

[10166] F-OVARC1000564//Mus musculus clone OST7314, genomic survey sequence.//1.9e-41:476:70//AF046733

[10167] F-OVARC1000573//HS_{—}3241_B1_H03_T7 CIT Approved Human Genomic Sperm Library D Homo sapiens genomic clone Plate=3241 Col=5 Row=P, genomic survey sequence.//2.2e-101:530:95//AQ211942

[10168] F-OVARC1000576//Human Chromosome X, WORKING DRAFT SEQUENCE, 2 unordered pieces.//9.7e-97:445:90//AC002414

[10169] F-OVARC1000578//Homo sapiens DNA from chromosome 19, BAC 33152, complete sequence.//9.1e-27:354:72//AC003973

[10170] F-OVARC1000588//Human DNA sequence from clone 497J21 on chromosome 6q26-27. Contains a KOC (KH-domain containing transcript overexpressed in cancer) pseudogene, genomic marker D6S193, ESTs, STSs and GSSs, and a ca repeat polymorphism, complete sequence.//0.97:276:62//AL023775

[10171] F-OVARC1000605

[10172] F-OVARC1000622//Homo sapiens (subclone 2_d8 from PI H42) DNA sequence, complete sequence.//7.2e-60:457:82//L81648

[10173] F-OVARC1000640//Human BAC clone RG326K09 from 7q21, complete sequence.//6.2e-58:499:80//AC002069

[10174] F-OVARC1000649//Human squamous cell carcinama of esophagus mRNA for GRB-7 SH2 domain protein, complete cds.//5.l e-77:424:93//D43772

[10175] F-OVARC1000661//Homo sapiens mRNA for KIAA0590 protein, complete cds.//4.8e-99:536:94//AB011162

[10176] F-OVARC1000678//cSRL-29c7-u cSRL flow sorted Chromosome II specific cosmid Homo sapiens genomic clone cSRL-29c7, genomic survey sequence.//2.5e-57:336:91//B04244

[10177] F-OVARC1000679//Rattus norvegicus mRNA for myosin-RhoGAP protein Myr 7.//1.6e-81:291:84//AJ001713

[10178] F-OVARC1000681//Human DNA sequence *** SEQUENCING IN PROGRESS *** from clone 257E24, WORKING DRAFT SEQUENCE.//8.2e-158:782:96//AL034424

[10179] F-OVARC1000682//Homo sapiens alpha 1,2-mannosidase IB mRNA, complete cds.//1.5e-151:549:99//AF027156

[10180] F-OVARC1000689//nbxb0003aG01f CUGI Rice BAC Library Oryza sativa genomic clone nbxb0003M01f, genomic survey sequence.//0.17:499:60//AQ050003

[10181] F-OVARC1000700

[10182] F-OVARC1000703//Drosophila melanogaster DNA repair protein (mei-41) gene, complete cds, and TH1 gene, partial cds.//3.5e-26:425:65//U34925

[10183] F-OVARC1000722//Homo sapiens chromosome 1q21-1q23 beta-1,4-galactosyltransferase mRNA, complete cds.//3.7e-109:451:91//AF038661

[10184] F-OVARC1000730

[10185] F-OVARC1000746

[10186] F-OVARC1000769//HS_{—}2056_B2_G06_T7 CIT Approved Human Genomic Sperm Library D Homo sapiens genomic clone Plate=2056 Col=12 Row=N, genomic survey sequence.//8.8e-19:147:86//AQ245905

[10187] F-OVARC1000771//M. musculus mRNA for GTP-binding protein.//2.2e-62:305:78//X95403

[10188] F-OVARC1000781//Sequence 5 from patent WO9722695.//1.9e-89:705:78//A63552

[10189] F-OVARC1000787//Homo sapiens PAC clone DJ430N08 from 22q12.1-qter, complete sequence.//3.0e-131:631:98//AC004542

[10190] F-OVARC1000800//Human Chromosome 11q23 PAC clone pDJ254e13, complete sequence.//1.7e-32:295:80//AC003691

[10191] F-OVARC1000802//Homo sapiens chromosome Xp22-67-68, WORKING DRAFT SEQUENCE, 99 unordered pieces.//3.2e-55:356:88//AC004469

[10192] F-OVARC1000834//Homo sapiens mRNA for atopy related autoantigen CALC.//9.5e-27:163:94//Y17711

[10193] F-OVARC1000846//Homo sapiens mRNA for KIAA0643 protein, partial cds.//6.0e-150:432:100//AB014543

[10194] F-OVARC1000850//Homo sapiens PB39 mRNA, complete cds.//1.0e-135:632:99//AF045584

[10195] F-OVARC1000862//M. musculus mRNA for FT1.//2.6e-109:769:83//Z67963

[10196] F-OVARC1000876//S. cerevisiae chromosome IX cosmid 9150.//7.4e-21:541:61//Z38125

[10197] F-OVARC1000883//Mus domesticus nuclear binding factor NF2d9 mRNA, complete cds.//2.2e-08:98:88//U20086

[10198] F-OVARC1000885//B. subtilis 25 kb genomic DNA segment (from sspE to katA).//0.25:231:61//Z82044

[10199] F-OVARC1000886//CIT-HSP-2171H6.TR CIT-HSP Homo sapiens genomic clone 2171H6, genomic survey sequence.//0.00035:139:69//B89721

[10200] F-OVARC1000890

[10201] F-OVARC1000891

[10202] F-OVARC1000897//Human DNA sequence from clone 215F16 on chromosome 22q12.1-12.3. Contains part of a Homeobox domain containing gene and GSSs, complete sequence.//1.4e-18:473:64//AL024494

[10203] F-OVARC1000912//Bovine herpesvirus type 1 early-intermediate transcription control protein (BICP4) gene, complete cds.//8.9e-08:378:63//L14320

[10204] F-OVARC1000915//Homo sapiens mRNA for KIAA0600 protein, partial cds.//7.7e-85:440:95//AB011172

[10205] F-OVARC1000924//HS_{—}2022_A1_C0_T7 CIT Approved Human Genomic Sperm Library D Homo sapiens genomic clone Plate=2022 Col=i Row=E, genomic survey sequence.//5.7e-21:122:99//AQ269493

[10206] F-OVARC1000936//Human PAC clone DJ0093103 from Xq23, complete sequence.//1.2e-113:476:91//AC003983

[10207] F-OVARC1000937//Human DNA sequence *** SEQUENCING IN PROGRESS *** from clone 20208, WORKING DRAFT SEQUENCE.//0.00066:436:61//AL031848

[10208] F-OVARC1000945//Rattus norvegicus mRNA for atypical PKC specific binding protein, complete cds.//5.0e-89:556:86//AB005549

[10209] F-OVARC1000948//P. falciparum complete gene map of plastid-like DNA (IR-B).//0.98:160:64//X95276

[10210] F-OVARC1000959//CIT-HSP-2348016.TR CIT-HSP Homo sapiens genomic clone 2348016, genomic survey sequence.//0.99:270:59//AQ062850

[10211] F-OVARC1000960//Human DNA sequence from PAC 212P9 on chromosome 1p34.1-1p35. Contains delta opiate receptor, CpG island, CA repeat.//3.9e-41:577:72//AL009181

[10212] F-OVARC1000964//P. falciparum malaria antigen (M26-32-2) gene, partial cds.//0.19:83:73//M63270

[10213] F-OVARC1000971//Caenorhabditis elegans DNA *** SEQUENCING IN PROGRESS * from clone Y57G11, WORKING DRAFT SEQUENCE.//0.013:670:57//Z92841

[10214] F-OVARC1000984//Leishmania major chromosome 1, complete sequence.//0.80:345:58//AE001274

[10215] F-OVARC1000996//M025 gene [mice, embryos, mRNA, 2322 nt].//2.6e-55:403:82//S51858

[10216] F-OVARC1000999//Synthetic construct galanin receptor type 3 (GALR3) gene, complete cds.//0.33:105:69//AF042785

[10217] F-OVARC1001000//HS_{—}2247_A1_H05_MR CIT Approved Human Genomic Sperm Library D Homo sapiens genomic clone Plate=2247 Col=9 Row=O, genomic survey sequence.//3.1e-60:315:96//AQ153910

[10218] F-OVARC1001004//Homo sapiens from UWGC:y18c282 from 6p21, complete sequence.//3.1e-124:595:98//AC004190

[10219] F-OVARC1001010//CIT-HSP-2034M3.TF CIT-HSP Homo sapiens genomic clone 2034M3, genomic survey sequence.//1.0:151:60//B74290

[10220] F-OVARC1001011//Human DNA sequence from cosmid U85A3, between markers DXS366 and DXS87 on chromosome X contains rad21 and T-cell cyclophorin pseudogenes, STS.//3.0e-08:149:79//Z78021

[10221] F-OVARC1001032//Yeast (S. cerevisiae) mitochondrial Tyr-tRNA gene.//3.2e-13:667:60//M12451

[10222] F-OVARC1001034//Mus musculus Fn54 mRNA, partial cds.//2.5e-119:737:86//AF001533

[10223] F-OVARC1001038//Homo sapiens TRIADI type I mRNA, complete cds.//2.7e-150:733:97//AF099149

[10224] F-OVARC1001040//Homo sapiens clone RG270D 13, WORKING DRAFT SEQUENCE, 18 unordered pieces.//9.8e-29:277:76//AC005081

[10225] F-OVARC1001044//Human DNA sequence *** SEQUENCING IN PROGRESS *** from clone 36411, WORKING DRAFT SEQUENCE.//0.0017:387:61//AL031319

[10226] F-OVARC11001051//Rattus norvegicus brain specific cortactin-binding protein CBP90 mRNA, partial cds.//0.012:112:74//AF053768

[10227] F-OVARC1001055//Sequence 1 from patent U.S. Pat. No. 5,580,754.//3.3e-45:381:81//I30292

[10228] F-OVARC1001062//nbxb0026H08r CUGI Rice BAC Library Oryza sativa genomic clone nbxb0026H08r, genomic survey sequence.//0.018:344:59//AQ271878

[10229] F-OVARC1001065//S. pombe chromosome I cosmid c29E6.//0.86:338:59//Z66525

[10230] F-OVARC1001068//Homo sapiens Era GTPase A protein (HERA-A) mRNA, partial cds.//2.0e-130:620:98//AF082657

[10231] F-OVARC1001072//Homo sapiens glypican 3 (GPC3) gene, partial cds and flanking repeat regions.//9.3e-24:285:65//AF003529

[10232] F-OVARC1001074//Human DNA sequence from clone 23K20 on chromosome Xq25-26.2 Contains EST, STS, GSS, complete sequence.//2.0e-07:652:59//AL022153

[10233] F-OVARC1001085//Homo sapiens c-syn protooncogene mRNA, complete cds.//5.0e-35:187:99//M14333

[10234] F-OVARC1100092//Homo sapiens mRNA for JM5 protein, complete CDS (clone IMAGE 53337, LLNLc110F1857Q7 (RZPD Berlin) and LLNLc110G0913Q7 (RZPD Berlin)).//4.0e-74:289:95//AJ005897

[10235] F-OVARC1001107//Homo sapiens SKBIHs mRNA, complete cds.//3.6e-72:351:86//AF015913

[10236] F-OVARC1001113//Homo sapiens diaphanous 1 (HDIA1) mRNA, complete cds.//6.4e-150:710:98//AF051782

[10237] F-OVARC1001117//Homo sapiens chromosome 5, P1 clone 328E3 (LBNL H53), complete sequence.//0.99:148:67//AC005178

[10238] F-OVARC1001118//Human Chromosome 11 pac pDJ197h17, WORKING DRAFT SEQUENCE, 11 unordered pieces.//2.6e-35:302:74//AC000382

[10239] F-OVARC1001129//CIT-HSP-647P20.TP CIT-HSP Homo sapiens genomic clone 647P20, genomic survey sequence.//0.94:106:66//B79052

[10240] F-OVARC1001154//R. norvegicus mRNA for epithelin 1 and 2.//1.8e-95:462:79//X62322

[10241] F-OVARC1001161//Homo sapiens chromosome 4 clone B71M12 map 4q25, complete sequence.//2.9e-90:496:84//AC004069

[10242] F-OVARC1001162

[10243] F-OVARC1001167//Homo sapiens clone DJ1098J04, WORKING DRAFT SEQUENCE, 2 unordered pieces.//0.00090:219:64//AC004961

[10244] F-OVARC10011169//Borrelia burgdorferi (section 27 of 70) of the complete genome.//1.0:265:59//AE001141

[10245] F-OVARC1001170//H. sapiens (xs 170) mRNA, 350 bp.//4.6e-58:355:90//Z36823

[10246] F-OVARC1001171//CIT-HSP-2285E22.TF CIT-HSP Homo sapiens genomic clone 2285E22, genomic survey sequence.//1.5e-25:152:83//AQ002315

[10247] F-OVARC1001173//Human DNA sequence from clone 243 E7 on chromosome 22q12.1. Contains ESTs, STSs and GSSs, complete sequence.//0.0024:94:80//AL022323

[10248] F-OVARC1001176//Streptomyces plicatus B-N-acetylhexosaminidase (hex) gene, complete cds.//1.0:356:60//AF063001

[10249] F-OVARC1001180//G. gallus DNA for polyubiquitin gene Ub II.//0.0062:275:60//X58195

[10250] F-OVARC1001188//Homo sapiens full-length insert cDNA clone ZD93F03.//1.8e-32:180:97//AF086486

[10251] F-OVARC1001200

[10252] F-OVARC1001232//Caenorhabditis elegans cosmid F10B5, complete sequence.//0.013:128:67//Z48334

[10253] F-OVARC1100240//Human Chromosome 11 pac pDJ360 p17, WORKING DRAFT SEQUENCE, 44 unordered pieces.//3.7e-131:811:87//AC001235

[10254] F-OVARC1001243//Human BAC clone GS 117010 from 7q21-q22, complete sequence.//0.044:457:59//AC003078

[10255] F-OVARC1001244//Human homolog of Drosophila female sterile homeotic mRNA, complete cds.//8.4e-18:118:95//M80613

[10256] F-OVARC1001261//Mus musculus putative membrane-associated guanylate kinase 1 (Magi-1) mRNA, alternatively spliced c form, partial cds.//1.4e-95:649:84//AF027505

[10257] F-OVARC1001268//Rattus norvegicus ADP-ribosylation factor-directed GTPase activating protein mRNA, complete cds.//0.00051:72:83//U35776

[10258] F-OVARC1001270

[10259] F-OVARC1001271//Homo sapiens mRNA for KIAA0643 protein, partial cds.//2.1e-142:644:96//AB014543

[10260] F-OVARC1001282//RPCI11-60K8.TK RPCII 1 Homo sapiens genomic clone R-60K8, genomic survey sequence.//0.0089:285:58//AQ195857

[10261] F-OVARC1001296//Homo sapiens echinoderm microtubule-associated protein homolog HuEMAP mRNA, complete cds.//3.0e-20:263:73//U97018

[10262] F-OVARC1100306//nbxb0002M13r CUGI Rice BAC Library Oryza sativa genomic clone nbxb0002M 13r, genomic survey sequence.//0.98:170:66//AQ156061

[10263] F-OVARC1001329//Homo sapiens BAC clone RG370M10 from 7p15, complete sequence.//1.3e-05:432:61//AC003986

[10264] F-OVARC1001330//Plasmodium falciparum 3D7 chromosome 12 PFYAC1383 genomic sequence, WORKING DRAFT SEQUENCE, 3 unordered pieces.//0.027:444:59//AC005504

[10265] F-OVARC1001339//Homo sapiens chromosome 17, clone hCIT.124_H_{—}2, complete sequence.//0.76:89:74//AC006071

[10266] F-OVARC1001341//CITBI-EI-2503J7.TR CITB1-E1 Homo sapiens genomic clone 2503J7, genomic survey sequence.//0.99:45:8611AQ263402

[10267] F-OVARC1001342

[10268] F-OVARC1001344//HS-1059-A2-H02-MF.abi CIT Human Genomic Sperm Library C Homo sapiens genomic clone Plate=CT 781 Col=4 Row=O, genomic survey sequence.//1.5e-07:254:67//B44456

[10269] F-OVARC1001357//Homo sapiens Xp22-149 BAC RPCI11-46604 (Roswell Park Cancer Institute Human BAC Library) complete sequence.//0.83:376:61//AC005297

[10270] F-OVARC1001360

[10271] F-OVARC1001369//Homo sapiens clone 162B15, complete sequence.//0.0066:99:76//AC004811

[10272] F-OVARC1001372//Homo sapiens liprin-alpha4 mRNA, partial cds.//2.7e-142:683:98//AF034801

[10273] F-OVARC1001376//Human DNA sequence *** SEQUENCING IN PROGRESS *** from clone 850H21, WORKING DRAFT SEQUENCE.//1.9e-52:382:73//AL031680

[10274] F-OVARC1001381//Homo sapiens mRNA for candidate tumor suppressor involved in B-CLL.//1.2e-147:683:99//AJ224819

[10275] F-OVARC1001391//S. coelicolor whiB gene.//0.018:454:59//X62287

[10276] F-OVARC1001399//CIT-HSP-229118.TR CIT-HSP Homo sapiens genomic clone 229118, genomic survey sequence.//1.7e-11:104:87//AQ007611

[10277] F-OVARC1001417//Homo sapiens EXLM1 mRNA, complete cds.//3.9e-149:707:98//AB006651

[10278] F-OVARC1001419//Homo sapiens GOK (STIM1) mRNA, complete cds.//4.9e-48:586:69//U52426

[10279] F-OVARC1001425//Human DNA sequence from clone 1048E9 on chromosome 22q11.2-12.2 Contains pseudogene similar to ribosomal protein S3A and part of a gene similar to C. elegans protein CE02118, ESTs, STS, GSS, complete sequence.//0.0019:96:78//Z99714

[10280] F-OVARC1001436//Caenorhabditis elegans mitotic chromosome and X-chromosome associated MIX-1 protein (mix-1) mRNA, complete cds.//0.77:519:59//U96387

[10281] F-OVARC1001442//Human DNA sequence *** SEQUENCING IN PROGRESS *** from clone 998H6, WORKING DRAFT SEQUENCE.//1.0:167:64//AL031687

[10282] F-OVARC1001453//Human DNA sequence from PAC 453D15 on chromosome 6 contains STS.1/4.4e-64:376:7911Z84482

[10283] F-OVARC1001476//Caenorhabditis elegans DNA *** SEQUENCING IN PROGRESS * from clone Y24F12, WORKING DRAFT SEQUENCE.//0.20:107:71//AL022277

[10284] F-OVARC1001480

[10285] F-OVARC1001489//Plasmodium falciparum 3D7 chromosome 12 PFYACB8-420 genomic sequence, WORKING DRAFT SEQUENCE, 14 unordered pieces.//0.20:281:63//AC005140

[10286] F-OVARC1001496//Homo sapiens C-terminal binding protein 2 mRNA, complete cds.//8.1e-85:479:92//AF016507

[10287] F-OVARC1001506//Homo sapiens Chromosome 16 BAC clone CIT987-SKA-13F4 complete genomic sequence, complete sequence.//1.2e-98:503:83//AC002039

[10288] F-OVARC1001525//Human beta-hexosaminidase alpha chain (HEXA) gene, exon I.//1.7e-13:87:100//M16411

[10289] F-OVARC1001542//H. sapiens polymorphic repeat associated with glutamate dehydrogenase pseudogene 5.//0.43:190:68//X69219

[10290] F-OVARC1001547//Plasmodium falciparum 3D7 chromosome 12 PFYACB8-420 genomic sequence, WORKING DRAFT SEQUENCE, 14 unordered pieces.//0.017:533:56//AC005140

[10291] F-OVARC1001555//Homo sapiens clone NH0469M07, WORKING DRAFT SEQUENCE, 7 unordered pieces.//7.4e-159:416:99//AC005037

[10292] F-OVARC1100577//Homo sapiens SRp46 splicing factor transcribed retropseudogene.//2.4e-115:540:99//AF031165

[10293] F-OVARC1001600//Homo sapiens chromosome 21q22.3 PAC 39C17, complete sequence.//5.5e-13:529:62//AF043945

[10294] F-OVARC1001610/I, complete sequence.//1.4e-12:152:77//AC005409

[10295] F-OVARC1001611

[10296] F-OVARC1001615//Human DNA sequence from clone 873P14 on chromosome 20p12 Contains STS, GSS, complete sequence.//0.022:146:70//AL031682

[10297] F-OVARC1001668//Homo sapiens mRNA for MCM3 import factor, complete cds.//6.5e-109:358:96//AB005543

[10298] F-OVARC1100702//Homo sapiens mRNA for hSOX20 protein, complete cds.//1.8e-47:393:81//AB006867

[10299] F-OVARC1001703//CIT-HSP-2164L6.TF CIT-HSP Homo sapiens genomic clone 2164L6, genomic survey sequence.//0.94:85:69//B92840

[10300] F-OVARC11001711//Human DNA sequence *** SEQUENCING IN PROGRESS *** from clone 317C6, WORKING DRAFT SEQUENCE.//1.9e-06:489:61//Z97651

[10301] F-OVARC1001713//Rattus norvegicus neuroligin 2 mRNA, complete cds.//1.0:262:59//U41662

[10302] F-OVARC1001726//Human telomere associated repeat sequence, complete sequence.//7.5e-08:283:65//M57752

[10303] F-OVARC1001731//Mus musculus gene for beta-tropomyosin.//2.6e-83:606:81//X12650

[10304] F-OVARC1001745//HS_{—}3007_B2_G09_T7 CIT Approved Human Genomic Sperm Library D Homo sapiens genomic clone Plate=3007 Col=18 Row=N, genomic survey sequence.//0.00020:269:60//AQ164522

[10305] F-OVARC1001762//S .pombe chromosome III cosmid c338.//3.0e-17:624:61//AL023781

[10306] F-OVARC1001766//Homo sapiens eukaryotic translation initiation factor eIF3, p35 subunit mRNA, complete cds.//4.2e-149:706:98//U97670

[10307] F-OVARC1001767//Homo sapiens mRNA for KIAA0675 protein, complete cds.//3.0e-115:580:96//AB014575

[10308] F-OVARC1001768

[10309] F-OVARC1001791//Homo sapiens BAC clone RG 118P 15 from 8q21, complete sequence.//5.7e-64:477:78//AC005066

[10310] F-OVARC1001795//Homo sapiens chromosome 4 clone B341C20 map 4q25, complete sequence.//6.5e-11:171:76//AC004704

[10311] F-OVARC1001802//CITBI-E1-2502A17.TR CITBI-E 1 Homo sapiens genomic clone 2502A 17, genomic survey sequence.//0.98:214:61//AQ264481

[10312] F-OVARC1001805//Human DNA sequence from clone 51IE16 on chromosome 6p24.3-25.1. Contains the last coding exon of the gene for P18 component of aminoacyl-tRNA synthetase complex, part of an unknown gene downstream of a putative CpG island, and an STS with a CA repeat polymorphism, complete sequence.//9.5e-151:712:99//AL023694

[10313] F-OVARC1001809//Mus musculus sphingosine kinase (SPHK1a) mRNA, partial cds.//2.7e-56:522:75//AF068748

[10314] F-OVARC1001812//Homo sapiens chromosome 17, clone HC1T 104N 19, complete sequence.//1.7e-63:526:81//AC003662

[10315] F-OVARC1001813//Human DNA sequence from cosmid U144A10, between markers DXS366 and DXS87 on chromosome X contains STS.//0.17:214:65//Z70224

[10316] F-OVARC1001820//Human DNA sequence *** SEQUENCING IN PROGRESS *** from clone 445N2, WORKING DRAFT SEQUENCE.//3.2e-55:379:82//AL031779

[10317] F-OVARC1001828//Homo sapiens chromosome 5, BAC clone 203013 (LBNL H155), complete sequence.//2.8e-17:509:62//AC005609

[10318] F-OVARC1001846//Human DNA sequence from cosmid U73E8, between markers DXS366 and DXS87 on chromosome X.//0.35:403:58//Z73361

[10319] F-OVARC1001861//CIT-HSP-2165M3.TR CIT-HSP Homo sapiens genomic clone 2165M3, genomic survey sequence.//2.4e-25:148:96//B94622

[10320] F-OVARC1001873//Homo sapiens clones 24718 and 24825 mRNA sequence.//1.2e-18:122:95//AF070611

[10321] F-OVARC1001879//HS_{—}3026_B1_F09_T7 CIT Approved Human Genomic Sperm Library D Homo sapiens genomic clone Plate=3026 Col=17 Row=L, genomic survey sequence.//4.9e-29:204:87//AQ207748

[10322] F-OVARC1001880//Human interferon regulatory factor 5 (Huminf5) mRNA, complete cds.//3.5e-05:489:60//U51127

[10323] F-OVARC1001883//Homo sapiens clone GS259H13, WORKING DRAFT SEQUENCE, 4 unordered pieces.//1.9e-29:350:74//AC005020

[10324] F-OVARC1001900//Homo sapiens tumorous imaginal discs protein Tid56 homolog (TID1) mRNA, complete cds.//8.6e-56:300:96//AF061749

[10325] F-OVARC1001901//Human DNA sequence from clone 103M22 on chromosome 6p24. Contains STSs and GSSs, complete sequence.//2.3e-10:253:66//AL031904

[10326] F-OVARC1001911//HS_{—}2196_B2_Hi 1_MF CIT Approved Human Genomic Sperm Library D Homo sapiens genomic clone Plate=2196 Col=22 Row=P, genomic survey sequence.//3.4e-09:123:78//AQ294069

[10327] F-OVARC1001916//H1S_{—}3054_B1_C11 MF CIT Approved Human Genomic Sperm Library D Homo sapiens genomic clone Plate=3054 Col=21 Row=F, genomic survey sequence.//1.2e-31:126:97//AQ099979

[10328] F-OVARC1001928

[10329] F-OVARC1001942//H. sapiens CpG island DNA genomic Mse1 fragment, clone 21d7, forward read cpg21d7.ft1a.//7.2e-12:83:98//Z60390

[10330] F-OVARC1001943//Aplysia californica potassium channel modulatory factor mRNA, complete cds.//3.5e-50:535:69//AF059179

[10331] F-OVARC1100949//Human KRAB zinc finger protein (ZNF177) mRNA, complete cds.//1.7e-16:294:67//U37263

[10332] F-OVARC1001950//Homo sapiens *** SEQUENCING IN PROGRESS ***, WORKING DRAFT SEQUENCE.//1.5e-20:261:68//AJ001929

[10333] F-OVARC1001987//D. melanogaster G6PD gene, exons 2-4.//0.99:447:57//Z 19021

[10334] F-OVARC1100989//Homo sapiens clone DJ0042M02, WORKING DRAFT SEQUENCE, 20 unordered pieces.//2.9e-19:178:83//AC005995

[10335] F-OVARC1002044//Plasmodium falciparum MAL3P7, complete sequence.//0.17:232:62//AL034559

[10336] F-OVARC1002050//Homo sapiens mRNA for KIAA0465 protein, partial cds.//2.1e-158:739:98//AB007934

[10337] F-OVARC1002066//Homo sapiens genomic DNA, chromosome 21q22.2 (Down Syndrome region), segment 4/15, WORKING DRAFT SEQUENCE.//3.0e-17:781:59//AP000011

[10338] F-OVARC1002082//Homo sapiens clone DJ0965K10, WORKING DRAFT SEQUENCE, 6 unordered pieces.//5.4e-136:683:96//AC006015

[10339] F-OVARC1002107//Homo sapiens BAC clone RG276003 from 7q22-q31.1, complete sequence.//1.0:220:61//AC004668

[10340] F-OVARC1002112//Homo sapiens histone macroH2A//1.2 mRNA, complete cds.//6.1e-115:557:98//AF041483

[10341] F-OVARC1002127//Homo sapiens chromosome 9, clone hRPK.202_H_{—}3, complete sequence.//0.013:461:57//AC006241

[10342] F-OVARC1002138//Caenorhabditis elegans cosmid F32D1.//1.0e-29:545:64//AF016427

[10343] F-OVARC1002143//CIT-HSP-2343H20.TR CIT-HSP Homo sapiens genomic clone 2343H20, genomic survey sequence.//2.3e-11:258:67//AQ055576

[10344] F-OVARC1002156

[10345] F-OVARC1002158//Fl 707-T7 IGF Arabidopsis thaliana genomic clone F 1707, genomic survey sequence.//1.8e-16:383:66//B11616

[10346] F-OVARC1002165//H. sapiens BDP 1 mRNA for protein-tyrosine-phosphatase.//0.0041:300:64//X79568

[10347] F-OVARC1002182//F. rubripes GSS sequence, clone 123123aA7, genomic survey sequence.//1.4e-10:240:66//AL017241

[10348] F-PLACE1000004//CIT-HSP-2294H13.TF CIT-HSP Homo sapiens genomic clone 2294H13, genomic survey sequence.//8.2e-10:158:75//AQ003859

[10349] F-PLACE1000005//Mouse alpha-1 antitrypsin gene, segment 1.//4.8e-15:89:93//M12585

[10350] F-PLACE1000007//Homo sapiens ubiquitin hydrolyzing enzyme I (UBH1) mRNA, partial cds.//3.8e-51:550:72//AF022789

[10351] F-PLACE1000014

[10352] F-PLACE1000031//Homo sapiens clone DJ0098022, WORKING DRAFT SEQUENCE, 5 unordered pieces.//0.91:333:61//AC004821

[10353] F-PLACE1000040//Homo sapiens DNA sequence from PAC 958B3 on chromosome Xp22.11-Xp22.22. Contains ESTs STS and CpG island.//2.6e-20:279:67//Z93023

[10354] F-PLACE1000048//Homo sapiens chromosome 17, clone HC1T462L7, complete sequence.//3.6e-63:488:82//AC005177

[10355] F-PLACE1000050//Mus musculus chromosome 14 marker um-m24 GA dinucleotide DNA sequence.//2.3e-10:141:75//U31508

[10356] F-PLACE1000061//Human ribosomal protein L37a mRNA sequence.//1.9e-30:190:94//L22154

[10357] F-PLACE1000066//Homo sapiens PAC clone DJ1106E03 from 7q31.3-7q3, complete sequence.//6.0e-63:597:74//AC005521

[10358] F-PLACE1000078//Homo sapiens chromosome 11 clone CIT987SK-1012F4, WORKING DRAFT SEQUENCE, 6 unordered pieces.//5.2e-09:143:73//AC005848

[10359] F-PLACE1000081//Human DNA from chromosome 19 specific cosmid R28461, genomic sequence, complete sequence.//0.52:390:60//AC002389

[10360] F-PLACE1000094

[10361] F-PLACE1000133//Human DNA sequence from clone 372K1 on chromosome 6q24 Contains EST, STS, GSS and CpG Island, complete sequence.//4.4e-129:731:92//AL023580

[10362] F-PLACE1000142//H. sapiens AUH mRNA.//6.4e-09:328:62//X79888

[10363] F-PLACE1000184//Homo sapiens estrogen-related receptor gamma mRNA, complete cds.//7.7e-150:737:97//AF058291

[10364] F-PLACE1000185//Sequence 15 from patent U.S. Pat. No. 5,691,147.//5.7e-106:558:94//I76211

[10365] F-PLACE1000213

[10366] F-PLACE1000214//Plasmodium falciparum 3D7 chromosome 12 PFYAC 1383 genomic sequence, WORKING DRAFT SEQUENCE, 3 unordered pieces.//1.8e-06:644:57//AC005504

[10367] F-PLACE1000236//Human DNA sequence *** SEQUENCING IN PROGRESS *** from clone 695020, WORKING DRAFT SEQUENCE.//2.6e-39:191:83//AL032818

[10368] F-PLACE1000246//HS_{—}2008_A2_D04_T7 CIT Approved Human Genomic Sperm Library D Homo sapiens genomic clone Plate=2008 Col=8 Row=G, genomic survey sequence.//0.96:153:6111AQ269813

[10369] F-PLACE1000292//Drosophila melanogaster Oregon-R mitochondrial A+T region.//5.1e-12:571:60//U11584

[10370] F-PLACE1000308//D. teissieri mitochondrial DNA for tRNA-fmet, tRNA-Ile, tRNA-Gln &amp; tRNA-Val.//0.00013:369:59//X54011

[10371] F-PLACE1000332//HS_{—}2016_B2_D08_T7 CIT Approved Human Genomic Sperm Library D Homo sapiens genomic clone Plate=2016 Col=16 Row=H, genomic survey sequence.//7.5e-83:424:96//AQ232106

[10372] F-PLACE1000347//CIT-HSP-2326A16.TV CIT-HSP Homo sapiens genomic clone 2326A16, genomic survey sequence.//0.13:46:100//AQ047350

[10373] F-PLACE1000374//Mus musculus putative CCAAT binding factor 1 (mCBF) mRNA, alternatively spliced transcript mCBF1, complete cds.//0.00048:84:83//U119891

[10374] F-PLACE1000380//F. rubripes GSS sequence, clone 047P21aA10, genomic survey sequence.//0.43:198:62//Z88163

[10375] F-PLACE1000383//Homo sapiens myotubularin related protein 1 (MTMR1) mRNA, partial cds.//8.7e-149:740:96//U58032

[10376] F-PLACE1000401//Pinctada fucata mRNA for insoluble protein, complete cds.//0.22:484:56//D86074

[10377] F-PLACE1000406//Human nuclear matrix protein 55 (nmt55) mRNA, complete cds.//3.3e-19:372:65//U89867

[10378] F-PLACE1000420//Homo sapiens chromosome 17, clone hRPK.227_G_{—}15, complete sequence.//1.6e-85:421:87//AC005899

[10379] F-PLACE1000421//Human GT334 protein (GT334) gene, exons 16 and 17.//0.88:145:68//U61515

[10380] F-PLACE1000424//Homo sapiens PAC clone DJ0905J08 from 7 p12-p14, complete sequence.//0.076:196:66//AC005189

[10381] F-PLACE1000435//HS_{—}3217_A2_A12_MR CIT Approved Human Genomic Sperm Library D Homo sapiens genomic clone Plate=3217 Col=24 Row=A, genomic survey sequence.//2.2e-47:438:7611AQ181698

[10382] F-PLACE1000444//Homo sapiens Chromosome 16 BAC clone CIT987SK-A-152E5, complete sequence.//6.9e-61:616:71//AC004382

[10383] F-PLACE1000453//Murine genomic DNA; partially digested Sau3A fragment, cloned into cosmid vector pEMBLcos2, complete sequence.//5.8e-18:314:69//AF059580

[10384] F-PLACE1000481//Homo sapiens Chromosome 22q11.2 Cosmid Clone 94a In DGCR Region, complete sequence.//1.1e-33:349:76//AC002491

[10385] F-PLACE1000492//Rat vacuolar protein sorting homolog r-vps33b mRNA, complete cds.//0.1e-34:256:83//U35245

[10386] F-PLACE1000540//P. falciparum complete gene map of plastid-like DNA (IR-B).//0.099:336:58//X95276

[10387] F-PLACE1000547//Arabidopsis thaliana GDP-mannose pyrophosphorylase (GMP1) mRNA, complete cds.//5.4e-11:279:63//AF076484

[10388] F-PLACE1000562//, complete sequence.//1.7e-97:559:88//AC005409

[10389] F-PLACE1000564

[10390] F-PLACE1000583//FIG. 2. Nucleotide and translated protein sequences of HPF1, -2, and -9.//3.3e-46:631:68//M27877

[10391] F-PLACE1000588//Human guanylate binding protein isoform I (GBP-2) mRNA, complete cds.//7.3e-84:503:88//M55542

[10392] F-PLACE1000596//Homo sapiens mRNA for NS1-binding protein (NS1-BP).//3.8e-164:798:97//AJ012449

[10393] F-PLACE1000599//P. falciparum complete gene map of plastid-like DNA (IR-B).//0.018:295:61//X95276

[10394] F-PLACE1000610//HS_{—}2056_A1_D10_T7 CIT Approved Human Genomic Sperm Library D Homo sapiens genomic clone Plate=2056 Col=19 Row=G, genomic survey sequence.//5.3e-24:188:87//AQ235967

[10395] F-PLACE1000611//Rattus norvegicus neural membrane protein 35 mRNA, complete cds.//2.4e-47:687:66//AF044201

[10396] F-PLACE1000636

[10397] F-PLACE1000653//Homo sapiens N-acetylglucosamine-phosphate mutase mRNA, complete cds.//1.5e-152:747:9611AF102265

[10398] F-PLACE1000656//Homo sapiens mRNA for JM4 protein, complete CDS (clone IMAGE 546750 and LLNLc110F1857Q7 (RZPD Berlin)).//2.3e-156:775:97//AJ005896

[10399] F-PLACE1000706//nuclear protein TIFI [mice, mRNA, 3951 nt].//8.0e-60:675:70//S78219

[10400] F-PLACE1000712

[10401] F-PLACE1000716//HS-1057-A1-A03-MR.abi CIT Human Genomic Sperm Library C Homo sapiens genomic clone Plate=CT 779 Col=5 Row=A, genomic survey sequence.//2.7e-42:266:82//B43026

[10402] F-PLACE1000748//CIT-HSP-2372J8.TR CIT-HSP Homo sapiens genomic clone 2372J8, genomic survey sequence.//0.023:157:68//AQ113109

[10403] F-PLACE1000749//Plasmodium falciparum MAL3P7, complete sequence.//0.099:664:57//AL034559

[10404] F-PLACE1000755//H. sapiens DNA 3′ flanking simple sequence region clone wg2c3.//0.00068:206:62//X76589

[10405] F-PLACE1000769//RPCII 1-3J18.TPB RPCI-11 Homo sapiens genomic clone RPCI-11-3J18, genomic survey sequence.//6.5e-08:93:89//B63806

[10406] F-PLACE1000785//Homo sapiens mRNA for KIAA0648 protein, partial cds.//3.5e-138:663:98//AB014548

[10407] F-PLACE1000786//Drosophila melanogaster cosmid 80H7.//1.4e-43:589:68//AL031027

[10408] F-PLACE1000793//H. sapiens CpG island DNA genomic Mse1 fragment, clone 13d12, reverse read cpg13d12.rt1c.//4.6e-09:71:100//Z64565

[10409] F-PLACE1000798//Human Chromosome 16 BAC clone CIT987SK-A-635H12, complete sequence.//5.0e-14:235:72//AC002310

[10410] F-PLACE1000841//Homo sapiens clone NH0441G08, WORKING DRAFT SEQUENCE, 12 unordered pieces.//0.013:404:60//AC006158

[10411] F-PLACE1000849//H. sapiens CpG island DNA genomic Mse1 fragment, clone 72a10, reverse read cpg72a10.rt1a.//3.3e-09:82:92//Z62712

[10412] F-PLACE1000856//Hydra vulgaris HT4 mRNA for collagen-like protein, partial cds.//1.0:317:59//AB008935

[10413] F-PLACE1000863//H. sapiens CpG island DNA genomic Mse1 fragment, clone 53d2, forward read cpg53d2.ft1b.//7.3e-37:199:98//Z55621

[10414] F-PLACE1000909//H. sapiens CpG island DNA genomic Mse1 fragment, clone 173f8, reverse read cpg173f8.rt1a.//1.5e-17:128:92//Z57391

[10415] F-PLACE1000931//Human DNA sequence from PAC 212P9 on chromosome 1p34.1-1p35. Contains delta opiate receptor, CpG island, CA repeat.//8.1e-55:647:72//AL009181

[10416] F-PLACE1000948

[10417] F-PLACE1000972//RPCII 1-61B1.TJ RPCII 1 Homo sapiens genomic clone R-61B1, genomic survey sequence.//1.0e-26:148:99//AQ194348

[10418] F-PLACE1000977//Homo sapiens mRNA for KIAA0672 protein, complete cds.//6.1e-08:413:61//AB014572

[10419] F-PLACE1000979//H. sapiens CpG island DNA genomic Mse1 fragment, clone 76e8, reverse read cpg76e8.rt1a.//2.7e-10:84:94//Z55963

[10420] F-PLACE1000987//Homo sapiens mRNA for KIAA0724 protein, complete cds.//8.0e-140:694:96//AB018267

[10421] F-PLACE1001000//Herpetomonas muscarum muscarum kinetoplast 12S rRNA gene.//0.0056:443:58//U0101

[10422] F-PLACE1001007//CIT-HSP-2013L15.TF CIT-HSP Homo sapiens genomic clone 2013L15, genomic survey sequence.//0.99:277:58//B58681

[10423] F-PLACE1001010//Human cosmid g1572c101, complete sequence.//3.6e-55:294:88//AC000357

[10424] F-PLACE1001015//Homo sapiens PAC clone DJ0754J18 from 7p21, complete sequence.//7.2e-33:333:73//AC004741

[10425] F-PLACE1001024

[10426] F-PLACE1001036//CIT-HSP-2373110.TF CIT-HSP Homo sapiens genomic clone 2373110, genomic survey sequence.//1.1e-80:393:98//AQ108662

[10427] F-PLACE1001054//Arabidopsis thaliana genomic DNA, chromosome 5, TAC clone: K919, complete sequence.//8.8e-40:483:66//AB013390

[10428] F-PLACE1001062//Mus musculus mRNA encoding lysine-ketoglutarate reductase/saccharopine dehydrogenase.//1.2e-23:224:80//AJ224761

[10429] F-PLACE1001076//HS_{—}2195_B1_D05_MF CIT Approved Human Genomic Sperm Library D Homo sapiens genomic clone Plate=2195 Col=9 Row=H, genomic survey sequence.//0.0014:168:66//AQ066659

[10430] F-PLACE1001088

[10431] F-PLACE1001092//Homo sapiens sorting nexin 4 mRNA, complete cds.//3.1e-95:489:96//AF065485

[10432] F-PLACE1001104//Caprine arthritis-encephalitis virus envelope glycoprotein (env) gene, partial cds.//0.0073:253:62//U81400

[10433] F-PLACE1001118//Homo sapiens KRAB domain zinc finger protein (ZFP37) mRNA, complete cds.//2.5e-64:676:71//AF022158

[10434] F-PLACE1001136//Human amphiregulin (AR) gene, exon 5, clones lambda-ARH(6,12).//3.8e-26:174:93//M30702

[10435] F-PLACE1001168

[10436] F-PLACE1001171//Homo sapiens subtelomeric cosmid 11b-1, complete sequence.//7.6e-23:245:68//AC005603

[10437] F-PLACE1001185//Human DNA sequence from clone 889N15 on chromosome Xq22.1-22.3. Contains part of the gene for a novel protein similar to X. laevis Cortical Thymocyte Marker CTX, the possibly alternatively spliced gene for 26S Proteasome subunit p28 (Ankyrin repeat protein), a novel gene and exons 36 through 45 of the COL4A6 for Collagen Alpha 6(IV). Contains ESTs, STSs, GSSs and a putative CpG island, complete sequence.//0.010:102:70//AL031177

[10438] F-PLACE1001238//Mouse mRNA for RNA polymerase I associated factor (PAF53), complete cds.//9.3e-82:684:77//D14336

[10439] F-PLACE1001241

[10440] F-PLACE1001257//Caenorhabditis elegans cosmid R12E2.//1.1e-16:480:60//AF067219

[10441] F-PLACE1001272//H. sapiens subunit of coatomer complex.//0.31:50:96//X70476

[10442] F-PLACE1001279//Plasmodium falciparum 3D7 chromosome 12 PFYACB8-628 genomic sequence, WORKING DRAFT SEQUENCE, 9 unordered pieces.//0.054:352:60//AC005507

[10443] F-PLACE1001280//Bovine herpesvirus type 1 early-intermediate transcription control protein (BICP4) gene, complete cds.//1.0e-10:620:61//L14320

[10444] F-PLACE1001294//M. musculus GEG-154 mRNA.//5.0e-107:826:80//X71642

[10445] F-PLACE1001304//Mouse Zfp-35 mRNA for zinc finger protein ZFP-35.//1.2e-67:510:77//X17617

[10446] F-PLACE1001311//Homo sapiens clone DJ0826E18, WORKING DRAFT SEQUENCE, 4 unordered pieces.//1.6e-47:491:73//AC005282

[10447] F-PLACE1001323//HS-1007-A2-BIO-MF.abi CIT Human Genomic Sperm Library C Homo sapiens genomic clone Plate=CT 328 Col=20 Row=C, genomic survey sequence.//9.6e-26:142:100//B31181

[10448] F-PLACE1001351

[10449] F-PLACE1001366//Homo sapiens mRNA for KIAA0799 protein, partial cds.//8.6e-25:155:95//AB018342

[10450] F-PLACE1001377//H. sapiens MADM gene (exon 1).//1.6e-43:393:79//Z48614

[10451] F-PLACE1001383//Human DNA sequence from clone 246H3 on chromosome 22q11.21-12.2 Contains LRP5 (Lipoprotein Receptor Related Protein) pseudogene, EST, CA repeats (D22S414, D22S925, D22S926), STS, GSS and CpG island, complete sequence.//1.5e-119:705:91//AL022324

[10452] F-PLACE1001384//Homo sapiens mRNA for multi PDZ domain protein.//5.7e-08:117:84//AJ001319

[10453] F-PLACE1001387//Sequence 3 from patent U.S. Pat. No. 5,610,018.//1.7e-06:395:58//I57340

[10454] F-PLACE1001395//Plasmodium falciparum circular DNA rpoB and rpoC genes for beta and beta-prime subunits of RNA polymerase (EC 2.7.7.6).//7.2e-11:620:60//X52177

[10455] F-PLACE1001399//Homo sapiens chromosome 17, clone hRPK.22_N_{—}12, WORKING DRAFT SEQUENCE, 2 ordered pieces.//3.0e-145:700:98//AC005412

[10456] F-PLACE1001412//Homo sapiens clone 643 unknown mRNA, complete sequence.//2.0e-69:365:96//AF091087

[10457] F-PLACE1001414//Homo sapiens chromosome 9, clone hRPK.202_H_{—}3, complete sequence.//8.2e-121:608:97//AC006241

[10458] F-PLACE1001440//Human Chromosome 11 pac pDJ393015, WORKING DRAFT SEQUENCE, 8 unordered pieces.//1.3e-06:437:61//AC000384

[10459] F-PLACE1001456//Homo sapiens Xp22 GS-52411 (Genome Systems Human BAC library), complete sequence.//0.98:348:60//AC003106

[10460] F-PLACE1001468//Homo sapiens DNA sequence from PAC 435A7 on chromosome Xq22.1-q22.3. Contains STS.//4.4e-05:358:62//AL022148

[10461] F-PLACE1001484//Human DNA sequence *** SEQUENCING IN PROGRESS *** from clone 387E22, WORKING DRAFT SEQUENCE.//5.7e-31:195:93//AL031660

[10462] F-PLACE1001502//Human fibroblast growth factor receptor 3 (FGFR3) gene, exon 1.//0.00015:333:59//L78720

[10463] F-PLACE1100503//Drosophila melanogaster DNA sequence (P1 DS05273 (D80)), complete sequence.//0.00016:161:66//AC004373

[10464] F-PLACE1001517//Human DNA sequence from PAC 696H22 on chromosome Xq21.1-21.2. Contains a mouse E25 like gene, a Kinesin like pseudogene and ESTs.//3.7e-22:260:76//AL021786

[10465] F-PLACE1001534//Human DNA sequence *** SEQUENCING IN PROGRESS *** from clone 620E1, WORKING DRAFT SEQUENCE.//1.1e-143:713:97//AL031667

[10466] F-PLACE1001545//Homo sapiens chromosome 3, clone hRPK.165_I_{—}16, complete sequence.//2.7e-139:482:96//AC005669

[10467] F-PLACE1001551//Homo sapiens chromosome 19, CIT-HSP-444n24, complete sequence.//6.9e-116:681:89//AC005261

[10468] F-PLACE1001570//HS_{—}3105_A1_F06_MR CIT Approved Human Genomic Sperm Library D Homo sapiens genomic clone Plate=3105 Col=11 Row=K, genomic survey sequence.//1.2e-10:137:79//AQ139817

[10469] F-PLACE1001602//Homo sapiens genomic DNA of 8p21.3-p22 anti-oncogene of hepatocellular colorectal and non-small cell lung cancer, segment 3/11.//1.8e-102:217:99//AB020860

[10470] F-PLACE1100603//Homo sapiens nitrilase homolog 1 (NIT1) gene, alternatively spliced product, complete cds.//3.7e-104:501:98//AF069984

[10471] F-PLACE1001608//HS_{—}2189_A1_G07_MR CIT Approved Human Genomic Sperm Library D Homo sapiens genomic clone Plate=2189 Col=13 Row=M, genomic survey sequence.//2.9e-60:429:84//AQ221959

[10472] F-PLACE1001610//Homo sapiens clone NH0469M07, WORKING DRAFT SEQUENCE, 7 unordered pieces.//4.4e-114:552:98//AC005037

[10473] F-PLACE1001611//Human DNA sequence from clone 1039K5 on chromosome 22q12.3-13.2 Contains gene similar to PICKI perinuclear binding protein, gene similar to monocarboxylate transporter (MCT3), ESTs, STS, GSS and a CpG island, complete sequence.//0.93:131:71//AL031587

[10474] F-PLACE1001632//Homo sapiens mRNA for KIAA0798 protein, complete cds.//1.1e-74:702:75//AB018341

[10475] F-PLACE1001634//Human p190-B (p190-B) mRNA, complete cds.//1.2e-18:114:100//U17032

[10476] F-PLACE1001640//Homo sapiens chromosome 17, clone hRPK.651_L_{—}9, complete sequence.//7.7e-159:788:97//AC005971

[10477] F-PLACE1001672//Human DNA sequence from clone 71L16 on chromosome Xp11. Contains a probable Zinc Finger protein (pseudo)gene, an unknown putative gene, a pseudogene with high similarity to part of antigen KI-67, a putative Chondroitin 6-Sulfotransferase LIKE gene and a KIAA0267 LIKE putative Na(+)/H(+) exchanger protein gene. Contains a predicted CpG island, ESTs, STSs and GSSs and genomic markers DXS1003 and DXS1055, complete sequence.//7.8e-36:365:73//AL022165

[10478] F-PLACE1001691//Homo sapiens chromosome 17, clone hRPK.294_J_{—}22, complete sequence.//9.1e-149:760:96//AC005921

[10479] F-PLACE1001692//Rat medium-chain S-acyl fatty acid synthetase thio ester hydrolase (MCH), complete cds.//2.9e-57:643:71//M 16200

[10480] F-PLACE1001705//Homo sapiens chromosome 17, clone hRPK.958_E_{—}11, WORKING DRAFT SEQUENCE, 2 ordered pieces.//3.9e-18:284:71//AC005883

[10481] F-PLACE1001716//Human mRNA for KIAA0191 gene, partial cds.//6.6e-68:369:73//D83776

[10482] F-PLACE1100720//Homo sapiens Chromosome 22q11.2 Cosmid Clone 31f3 In IGLC Region, complete sequence.//1.0:274:59//AC000051

[10483] F-PLACE1001729//Streptomyces coelicolor cosmid 1 C2.//0.22:433:57//AL031124

[10484] F-PLACE1001739//Caenorhabditis elegans cosmid C18H7.//0.049:341:61//AF067607

[10485] F-PLACE1001740//Homo sapiens chromosome 5, P1 clone 1108H7 (LBNL H81), complete sequence.//4.8e-26:372:68//AC005221

[10486] F-PLACE1001745

[10487] F-PLACE1001746//Plasmodium falciparum DNA *** SEQUENCING IN PROGRESS ** from MALIP1, WORKING DRAFT SEQUENCE.//0.018:472:57//AL031744

[10488] F-PLACE1001748//Homo sapiens metalloprotease 1 (MP1) mRNA, complete cds.//8.8e-159:773:97//AF061243

[10489] F-PLACE1001756//Homo sapiens chromosome 12 p13.3 clone RPCI11-303E5, WORKING DRAFT SEQUENCE, 65 unordered pieces.//1.9e-54:274:81//AC005842

[10490] F-PLACE1001761//HS_{—}3027_A1_D02_MR CIT Approved Human Genomic Sperm Library D Homo sapiens genomic clone Plate=3027 Col=3 Row=G, genomic survey sequence.//0.095:49:93//AQ130972

[10491] F-PLACE1001771//Homo sapiens transient receptor potential protein 6 mRNA, complete cds.//1.0e-146:709:97//AF080394

[10492] F-PLACE1001781 1.3e-08:238:65//AC005637

[10493] F-PLACE1001799//HS_{—}3075_B1_H03_MR CIT Approved Human Genomic Sperm Library D Homo sapiens genomic clone Plate=3075 Col=5 Row=P, genomic survey sequence.//1.7e-09:166:6911AQ138474

[10494] F-PLACE1001810//Arabidopsis thaliana genomic DNA, chromosome 3, P1 clone: MRC8, complete sequence.//0.00035:196:66//AB020749

[10495] F-PLACE1001817//Homo sapiens ATP-specific succinyl-CoA synthetase beta subunit (SCS) mRNA, partial cds.//1.1e-108:546:96//AF058953

[10496] F-PLACE1001821//RPCI11-35D17.TK RPCI-11 Homo sapiens genomic clone RPCI-11-35D17, genomic survey sequence.//2.1e-55:300:97//AQ045286

[10497] F-PLACE1001844//Homo sapiens chromosome 17, clone HC1T462L7, complete sequence.//2.8e-67:443:86//AC005177

[10498] F-PLACE1001845//Arabidopsis thaliana chromosome I BAC T25B24 genomic sequence, complete sequence.//0.34:219:64//AC005850

[10499] F-PLACE1001869//Klebsiella pneumoniae ribitol kinase (rbtK) and ribitol transporter (rbtT) genes, complete cds.//7.1e-11:505:57//AF045244

[10500] F-PLACE1008970//RPCII 1-46D15.TJ RPCII 1 Homo sapiens genomic clone R-46D15, genomic survey sequence.//9.3e-08:383:631/AQ194408

[10501] F-PLACE1001912

[10502] F-PLACE1001920//Homo sapiens MDC-3.13 isoform 2 mRNA, complete cds.//7.3e-156:753:98//AF099935

[10503] F-PLACE1001928//HS_{—}2220_B2_G04_MR CIT Approved Human Genomic Sperm Library D Homo sapiens genomic clone Plate=2220 Col=8 Row=N, genomic survey sequence.//2.8e-43:233:97//AQ152361

[10504] F-PLACE1001983//Human DNA sequence *** SEQUENCING IN PROGRESS * from clone 745C22, WORKING DRAFT SEQUENCE.//1.6e-07:396:62//AL031596

[10505] F-PLACE1001989//Human DNA sequence *** SEQUENCING IN PROGRESS *** from clone 968D22, WORKING DRAFT SEQUENCE.//1.0e-109:602:93//AL023755

[10506] F-PLACE1002004//Human DNA sequence *** SEQUENCING IN PROGRESS * from clone 317E23, WORKING DRAFT SEQUENCE.//1.0e-69:475:87//AL020996

[10507] F-PLACE1002046//Mus musculus ligatin (Lgtn) mRNA, partial cds.117.2e-97:623:85//U58337

[10508] F-PLACE1002052//HS_{—}2178_B2_D05_MR CIT Approved Human Genomic Sperm Library D Homo sapiens genomic clone Plate=2178 Col=10 Row=H, genomic survey sequence.//4.8e-22:140:95//AQ307908

[10509] F-PLACE1002066//Apis mellifera NADH dehydrogenase subunit 2 (ND2) gene, mitochondrial gene encoding mitochondrial protein, partial cds.//0.0063:371:60//U72284

[10510] F-PLACE1002072//Homo sapiens tight junction protein ZO (ZO-2) gene, alternative splice products, promoter and exon A.//0.97:248:60//AF043195

[10511] F-PLACE1002073//Homo sapiens mRNA for KIAA0606 protein, partial cds.//1.3e-37:635:64//AB011178

[10512] F-PLACE1002090//Homo sapiens full-length insert cDNA clone ZA85C09.//7.0e-122:583:98//AF086131

[10513] F-PLACE1002115//nbxb0038A20r CUGI Rice BAC Library Oryza sativa genomic clone nbxb0038A20r, genomic survey sequence.//0.039:210:69//AQ291086

[10514] F-PLACE1002119//Mus musculus IER5 (Ier5) mRNA, complete cds.//7.1e-61:540:77//AF079527

[10515] F-PLACE1002140//Homo sapiens DNA sequence from PAC 454M7 on chromosome Xq25-26.3. Contains the OCRL1 gene for Lowe Oculocerebrorenal Syndrome protein OCRL-1. Contains ESTs, STSs and GSSs, complete sequence.//2.1e-125:491:98//AL022162

[10516] F-PLACE1002150//Plasmodium falciparum MAL3P5, complete sequence.//0.12:408:61//AL034556

[10517] F-PLACE1002157//Homo sapiens BAC clone NH0335J18 from 2, complete sequence.//1.1e-44:515:71//AC005539

[10518] F-PLACE1002163//Homo sapiens T-cell receptor alpha delta locus from bases 1000498 to 1071650 (section 5 of 5) of the Complete Nucleotide Sequence.//0.98:210:65//AE000662

[10519] F-PLACE1002170//Homo sapiens Xp22 bins 16-17 BAC GSHB-531117 (Genome Systems Human BAC Library) complete sequence.//1.2e-06:283:60//AC004805

[10520] F-PLACE1002171//Mus musculus interferon alpha/beta receptor (IFNAR) gene, exon 11 and partial cds.//1.0e-24:313:71//U06244

[10521] F-PLACE1002205//Drosophila melanogaster; Chromosome 3 L; Region 79F 1-80A2; BAC clone BACR48EO5, WORKING DRAFT SEQUENCE, 4 unordered pieces.//1.6e-05:428:60//AC005720

[10522] F-PLACE1002213//HS_{—}3238 BI G03 MR CIT Approved Human Genomic Sperm Library D Homo sapiens genomic clone Plate=3238 Col=5 Row=N, genomic survey sequence.//2.2e-74:371:9811AQ206965

[10523] F-PLACE1002227//HS-1056-B1-C01-MF.abi CIT Human Genomic Sperm Library C Homo sapiens genomic clone Plate=CT 778 Col=1 Row=F, genomic survey sequence.//2.1e-07:174:71//B42800

[10524] F-PLACE1002256//Plasmodium falciparum DNA *** SEQUENCING IN PROGRESS *** from contig 3-72, complete sequence.//0.022:458:59//AL010142

[10525] F-PLACE1002259//Human DNA sequence from clone 246H3 on chromosome 22q11.21-12.2 Contains LRP5 (Lipoprotein Receptor Related Protein) pseudogene, EST, CA repeats (D22S414, D22S925, D22S926), STS, GSS and CpG island, complete sequence.//3.5e-91:637:84//AL022324

[10526] F-PLACE1002319

[10527] F-PLACE1002342//Caenorhabditis elegans cosmid M03A 1.//0.47:403:58//U49956

[10528] F-PLACE1002395//Homo sapiens chromosome 19, cosmid R28991, complete sequence.//1.9e-127:487:93//AC004623

[10529] F-PLACE1002399//Homo sapiens chromosome 17, clone hRPK.235_I_{—}10, complete sequence.//5.6e-05:474:59//AC005922

[10530] F-PLACE1002433//Drosophila melanogaster fidipidine gene, exons 1-7.//1.7e-11:613:58//AJ011928

[10531] F-PLACE1002437//M. musculus abc1 mRNA.//5.5e-62:452:8511X75926

[10532] F-PLACE1002438//Dictyostelium discoideum developmental protein DG1098 (DG1098) gene, partial cds.//0.013:372:59//AF081801

[10533] F-PLACE1002450//HS_{—}3233_A1_G00_MR CIT Approved Human Genomic Sperm Library D Homo sapiens genomic clone Plate=3233 Col=1 Row=M, genomic survey sequence.//3.1e-07:449:59//AQ204769

[10534] F-PLACE1002465

[10535] F-PLACE1002474//Mus musculus matrilin-2 precursor mRNA, complete cds.//1.5e-110:720:85//U69262

[10536] F-PLACE1002477//Homo sapiens Xp22-171-173 BAC GSHB-31214 (Genome Systems Human BAC Library) complete sequence.//3.9e-05:195:71//AC005926

[10537] F-PLACE1002493//Homo sapiens 3p22-8 PAC RPCI4-736H12 (Roswell Park Cancer Institute Human PAC Library) complete sequence.//0.020:301:60//AC006060

[10538] F-PLACE1002499

[10539] F-PLACE1002500//Rattus norvegicus zinc transporter (ZnT-2) mRNA, complete cds.//2.1e-58:465:80//U50927

[10540] F-PLACE1002514//Human DNA sequence *** SEQUENCING IN PROGRESS *** from clone 292E10, WORKING DRAFT SEQUENCE.//3.7e-08:139:76//Z93930

[10541] F-PLACE1002529//Homo sapiens mRNA for KIAA0713 protein, partial cds.//9.0e-143:583:95//AB018256

[10542] F-PLACE1002532//Homo sapiens BAC clone RG300E22 from 7q21-q31.1, complete sequence.//0.00019:193:65//AC004774

[10543] F-PLACE1002537//Human DNA sequence from clone 127F18 on chromosome Xp11.4-21.3. Contains part of a novel gene with some similarity to parts of chicken Myosin Light Chain and various species' Interleukin-1 Receptor Type 1 (IL1-R-1). Contains GSSs, complete sequence.//4.7e-25:198:84//AL031575

[10544] F-PLACE1002571//Drosophila melanogaster actin-related protein mRNA, complete cds.//2.0e-13:400:60//L25314

[10545] F-PLACE1002578//Homo sapiens Xq28 BACs 360 F12, GSHB-555C13, complete sequence.//3.5e-11:167:72//AC002523

[10546] F-PLACE1002583//Mus musculus glutamate receptor subunit (GluR6) gene, partial cds.//4.2e-09:370:61//U31443

[10547] F-PLACE1002591//H. sapiens mRNA for coronin.//7.2e-26:279:74//X89109

[10548] F-PLACE1002598//Homo sapiens clone GS308H05, WORKING DRAFT SEQUENCE, 6 unordered pieces.//0.0013:375:64//AC005537

[10549] F-PLACE1002604//Hansenula wingei mitochondrial DNA, complete sequence.//4.7e-05:556:59//D31785

[10550] F-PLACE1002625

[10551] F-PLACE1002655//Homo sapiens PAC clone DJ0722F20 from 7q31.1-q31.3, complete sequence.//1.6e-128:229:92//AC005281

[10552] F-PLACE1002665//Mus musculus enhancer of polycomb (Epc1) mRNA, complete cds.//3.6e-107:706:84//AF079765

[10553] F-PLACE1002685//Homo sapiens B cell linker protein BLNK mRNA, alternatively spliced, complete cds.//3.4e-186:804:97//AF068180

[10554] F-PLACE1002714//Mus musculus cathepsin S (CatS) gene, promoter region and exons 1 and 2.//2.3e-16:474:64//AF051726

[10555] F-PLACE1002722//Sequence 1 from patent U.S. Pat. No. 5,686,597.//1.7e-107:552:95//I73723

[10556] F-PLACE1002768//Human DNA sequence from clone 726F20 on chromosome 1p36.11-36.23. Contains ESTs and a GSS, complete sequence.//0.0076:161:70//AL031273

[10557] F-PLACE1002772//HS-_{—}3058_A1_D02_MR CIT Approved Human Genomic Sperm Library D Homo sapiens genomic clone Plate=3058 Col=3 Row=G, genomic survey sequence.//0.0046:192:64//AQ134567

[10558] F-PLACE1002775//Mus musculus bromodomain-containing protein BP75 mRNA, complete cds.//7.6e-14:459:62//AF084259

[10559] F-PLACE1002782//Rattus norvegicus zinc transporter (ZnT-2) mRNA, complete cds.//3.6e-43:385:77//U50927

[10560] F-PLACE1002794//CIT-HSP-2368A17.TR CIT-HSP Homo sapiens genomic clone 2368A17, genomic survey sequence.//1.3e-71:368:96//AQ075879

[10561] F-PLACE1002811//Human mRNA for KIAA0172 gene, partial cds.//1.8e-44:567:70//D79994

[10562] F-PLACE1002815//Sequence 25 from patent U.S. Pat. No. 5,747,660.//2.6e-07:150:73//AR005295

[10563] F-PLACE1002816//Homo sapiens antigen NY-CO-9 (NY-CO-9) mRNA, partial cds.//1.3e-68:687:73//AF039691

[10564] F-PLACE1002834//FIG. 2. Nucleotide and translated protein sequences of HPF1, -2, and -9.//9.3e-41:240:93//M27877

[10565] F-PLACE1002839//Human BAC clone RG205G13 from 7q31, complete sequence.//0.00087:213:63//AC003045

[10566] F-PLACE1002851//Plasmodium falciparum 3D7 chromosome 12 PFYACB8-420 genomic sequence, WORKING DRAFT SEQUENCE, 14 unordered pieces.//0.0032:269:66//AC005140

[10567] F-PLACE1002853//Leishmania tarentolae kinetoplast pre-edited mitochondrial maxicircle DNA complete transcribed region and flanks.//0.032:275:62//M10126

[10568] F-PLACE1002881//Human DNA sequence *** SEQUENCING IN PROGRESS *** from clone 111B22, WORKING DRAFT SEQUENCE.//4.7e-38:355:76//Z98200

[10569] F-PLACE1002908//Gallus gallus beta-1,4-galactosyltransferase (CKII) mRNA, complete cds.//0.00012:200:64//U19889

[10570] F-PLACE1002941//Human BAC clone RG161 K23 from 7q21, complete sequence.//1.1e-14:241:70//AC000120

[10571] F-PLACE1002962

[10572] F-PLACE1002968//Plasmodium falciparum MAL3P2, complete sequence.//0.21:410:59//AL034558

[10573] F-PLACE1002991//Human DNA sequence *** SEQUENCING IN PROGRESS *** from clone 968D22, WORKING DRAFT SEQUENCE.//6.8e-121:605:93//AL023755

[10574] F-PLACE1002993//CIT-HSP-2338116.TF CIT-HSP Homo sapiens genomic clone 2338116, genomic survey sequence.//1.9e-13:100:95//AQ054760

[10575] F-PLACE1002996//Mouse U6 RNA gene.//2.0e-13:113:90//X06980

[10576] F-PLACE1003025//Plasmodium falciparum MAL3P6, complete sequence.//0.84:374:58//Z98551

[10577] F-PLACE1003027//Homo sapiens mRNA for KIAA0516 protein, partial cds.//6.1e-130:632:97//AB01088

[10578] F-PLACE1003044//cDNA encoding novel rat protein TIP 120 which is formed of complex with TBP (TATA binding protein).//1.6e-123:687:91//E12829

[10579] F-PLACE1003045//H. sapiens CpG island DNA genomic Mse1 fragment, clone 47g6, forward read cpg47g6.ft I a.//0.0064:52:96//Z61200

[10580] F-PLACE1003092//CIT-HSP-387P22.TRB CIT-HSP Homo sapiens genomic clone 387P22, genomic survey sequence.//0.0031:249:63//B60158

[10581] F-PLACE1003100//Human Hep27 protein mRNA, complete cds.//8.9e-65:650:73//U31875

[10582] F-PLACE1003108

[10583] F-PLACE1003136//Homo sapiens chromosome 5, PI clone 1130fl (LBNL H40), complete sequence.//6.3e-46:606:68//AC004219

[10584] F-PLACE1003145

[10585] F-PLACE1003153//RPCII 1-13P16.TP RPCI-11 Homo sapiens genomic clone RPCI-11-13P16, genomic survey sequence.//2.7e-63:478:82//B76206

[10586] F-PLACE1003174//Human DNA sequence from clone 441 J 1 on chromosome 6p24 Contains STS, GSS, complete sequence.//0.61:147:65//Z99495

[10587] F-PLACE1003176//HS_{—}2255_A2_B00_MF CIT Approved Human Genomic Sperm Library D Homo sapiens genomic clone Plate=2255 Col=2 Row=C, genomic survey sequence.//6.3e-09:137:76//AQ131934

[10588] F-PLACE1003190//Homo sapiens clone RG332P12, WORKING DRAFT SEQUENCE, I unordered pieces.//2.4e-138:791:90//AC005095

[10589] F-PLACE1003200//P. falciparum complete gene map of plastid-like DNA (IR-B).//8.7e-06:728:57//X95276

[10590] F-PLACE1003205//Human BAC clone RG354L07 from 7q31, complete sequence.//7.5e-05:249:63//AC002466

[10591] F-PLACE1003238//HS_{—}3239_A2_G02_MR CIT Approved Human Genomic Sperm Library D Homo sapiens genomic clone Plate=3239 Col=4 Row=M, genomic survey sequence.//0.36:64:87//AQ209954

[10592] F-PLACE1003249

[10593] F-PLACE1003256

[10594] F-PLACE1003258//HS_{—}3223_A1_G10_T7 CIT Approved Human Genomic Sperm Library D Homo sapiens genomic clone Plate=3223 Col=19 Row=M, genomic survey sequence.//1.4e-07:227:65//AQ190317

[10595] F-PLACE1003296//CIT-HSP-2337F11.TF CIT-HSP Homo sapiens genomic clone 2337F11, genomic survey sequence.//1.1e-13:97:95//AQ057429

[10596] F-PLACE1003302//FIG. 2. Nucleotide and translated protein sequences of HPF1, -2, and -9.//2.3e-92:485:95//M27877

[10597] F-PLACE1003334

[10598] F-PLACE1003342

[10599] F-PLACE1003343//Homo sapiens clone DJ1022114, WORKING DRAFT SEQUENCE, 14 unordered pieces.//1.0e-20:179:84//AC004951

[10600] F-PLACE1003353//Homo sapiens breast cancer antiestrogen resistance 3 protein (BCAR3) mRNA, complete cds.//8.0e-143:773:92//U92715

[10601] F-PLACE1003361//Human Cosmid g1248a143 from 7q31.3, complete sequence.//1.9e-30:402:70//AC004095

[10602] F-PLACE1003366

[10603] F-PLACE1003369//Plasmodium falciparum MAL3P2, complete sequence.//7.6e-07:378:60//AL034558

[10604] F-PLACE1003373//Homo sapiens PAC clone DJO740L10 from 7 p13-p14, complete sequence.//6.0e-18:471:61//AC005247

[10605] F-PLACE1003375

[10606] F-PLACE1003383//Homo sapiens genomic DNA of 9q32 anti-oncogene of flat epitherium cancer, segment 10/10.//2.3e-157:779:96//AB020878

[10607] F-PLACE1003394//Sprague-Dawley (clone LRB13) RAB14 mRNA, complete cds.//1.2e-104:596:91//M83680

[10608] F-PLACE1003401//RPCII 1-71J5.TJ RPCII 1 Homo sapiens genomic clone R-71J5, genomic survey sequence.//0.85:140:65//AQ268588

[10609] F-PLACE1003420//Caenorhabditis elegans DNA *** SEQUENCING IN PROGRESS *** from clone Y1 E3, WORKING DRAFT SEQUENCE.//0.0015:286:60//AL021388

[10610] F-PLACE1003454//Plasmodium falciparum microsatellite pe63 sequence.//0.0084:219:61//AF015470

[10611] F-PLACE1003478//Homo sapiens calcium-dependent chloride channel-1 (hCLCA1) gene, complete cds.//1.3e-11:746:60//AF039401

[10612] F-PLACE1003493

[10613] F-PLACE1003516//Homo sapiens chromosome 17, clone HRPC987K16, complete sequence.//8.2e-41:379:78//AC002994

[10614] F-PLACE1003519//Homo sapiens chromosome 21q22.3 PAC 141B3, complete sequence, containing ribosomal protein homologue pseudogene L23a.//6.2e-21:247:76//AF064859

[10615] F-PLACE1003521//Human DNA sequence from PAC 257A7 on chromosome 6p24. Contains two unknown genes and ESTs, STSs and a GSS.//4.4e-68:502:79//AL008729

[10616] F-PLACE1003528//Homo sapiens DNA sequence from clone 78F24 on chromosome 22q12.1-12.3. Contains one exon of an Oxysterol-binding protein (OSBP) LIKE gene. Contains GSSs and an STS, complete sequence.//1.0:323:58//AL022336

[10617] F-PLACE1003537//Homo sapiens multispanning membrane protein mRNA, complete cds.//0.0054:322:59//U94831

[10618] F-PLACE1003553//Human DNA sequence *** SEQUENCING IN PROGRESS *** from clone 97P20, WORKING DRAFT SEQUENCE.//2.9e-78:267:88//AL031297

[10619] F-PLACE1003566//Plasmodium falciparum MAL3P3, complete sequence.//0.00026:514:581/Z98547

[10620] F-PLACE1003575//Plasmodium falciparum 3D7 chromosome 12 PFYAC69 genomic sequence, WORKING DRAFT SEQUENCE, 4 unordered pieces.//0.079:755:54//AC004688

[10621] F-PLACE1003583//Human DNA sequence from clone 246H3 on chromosome 22q11.21-12.2 Contains LRP5 (Lipoprotein Receptor Related Protein) pseudogene, EST, CA repeats (D22S414, D22S925, D22S926), STS, GSS and CpG island, complete sequence.//1.1e-41:212:74//AL022324

[10622] F-PLACE1003584//Plasmodium falciparum DNA *** SEQUENCING IN PROGRESS * from contig 4-56, complete sequence.//0.0038:465:57//AL010230

[10623] F-PLACE1003592//Homo sapiens chromosome 17, clone 296K1, WORKING DRAFT SEQUENCE, 10.unordered pieces.//0.72:111:71//AC002557

[10624] F-PLACE1003593//Human PAC clone DJ318C15 from Xq23, complete sequence.//0.096:162:66//AC002476

[10625] F-PLACE1003596//Mus musculus integral membrane protein 1 (Itm1) mRNA, complete cds.//1.4e-54:685:68//L34260

[10626] F-PLACE1003602//Homo sapiens mRNA expressed in placenta.//1.1e-138:679:97//D83200

[10627] F-PLACE1003605//Homo sapiens chromosome 16, cosmid clone RT81 (LANL), complete sequence.//0.0074:265:63//AC005356

[10628] F-PLACE10036I //HS_{—}2198_B1_D02_MF CIT Approved Human Genomic Sperm Library D Homo sapiens genomic clone Plate=2198 Col=3 Row=H, genomic survey sequence.//2.1e-23:137:97//AQ184475

[10629] F-PLACE1003618//Homo sapiens chromosome 4 clone COO 1 C13 map 4p16, complete sequence.//3.0e-122:725:89//AC006226

[10630] F-PLACE1003625//HS_{—}2238_B2_D1_MF CIT Approved Human Genomic Sperm Library D Homo sapiens genomic clone Plate=2238 Col=22 Row=H, genomic survey sequence.//4.8e-12:92:94//AQ065662

[10631] F-PLACE1003638//Arabidopsis thaliana genomic DNA, chromosome 5, P1 clone: MKD10, complete sequence.//0.043:264:63//AB001478

[10632] F-PLACE1003669

[10633] F-PLACE1003704//RPCII 1-23H21.TKBF RPCI-11 Homo sapiens genomic clone RPCI-11-23H21, genomic survey sequence.//7.1e-31:199:91//AQ013830

[10634] F-PLACE1003709//Homo sapiens mitotic checkpoint kinase Bub1 (BUB1) mRNA, complete cds.//4.3e-132:669:95//AF053305

[10635] F-PLACE1003711//Homo sapiens DNA sequence from PAC 163M9 on chromosome 1p35.1-p36.21. Contains protein synthesis factor (eIF-4C), DIFlSSIA pseudogene, ESTs, STS, GSS, complete sequence.//1.5e-31:166:99//AL021920

[10636] F-PLACE1003723//HS_{—}2231_A2_C07_MR CIT Approved Human Genomic Sperm Library D Homo sapiens genomic clone Plate=2231 Col=14 Row=E, genomic survey sequence.//1.2e-12:114:90//AQ235672

[10637] F-PLACE1003738//Human zinc finger protein 42 (MZF-1) mRNA, complete cds.//5.9e-33:592:67//M58297

[10638] F-PLACE1003760//Homo sapiens tetraspan TM4SF (TSPAN-3) mRNA, complete cds.//3.6e-11:92:93//AF054840

[10639] F-PLACE1003762

[10640] F-PLACE1003768//Homo sapiens genomic DNA, chromosome 21q22.2 (Down Syndrome region), segment 7/15, WORKING DRAFT SEQUENCE.//4.8e-77:737:76//AP000014

[10641] F-PLACE1003771//Homo sapiens BAC clone GS164B05 from 7p2i-p22, complete sequence.//2.1e-164:793:98//AC004160

[10642] F-PLACE1003783//HS_{—}2190_A2_C02_T7 CIT Approved Human Genomic Sperm Library D Homo sapiens genomic clone Plate=2190 Col=4 Row=E, genomic survey sequence.//1.1e-26:147:100//AQ218757

[10643] F-PLACE1003784//Homo sapiens Xp22-150 BAC GSHB-309P15 (Genome Systems Human BAC Library) complete sequence.//4.5e-57:706:68//AC006210

[10644] F-PLACE1003795//Homo sapiens Xq28 genomic DNA in the region of the LICAM locus containing the genes for neural cell adhesion molecule L1 (L1CAM), arginine-vasopressin receptor (AVPR2), C1 p115 (C1), ARD1 N-acetyltransferase related protein (TE2), renin-binding protein (RbP), host cell factor 1 (HCF1), and interleukin-1 receptor-associated kinase (IRAK) genes, complete cds, and Xq28lu2 gene.//0.015:296:60//U52112

[10645] F-PLACE1003833//Homo sapiens DNA sequence from cosmid N75B3 on chromosome 22 Contains EST, exon trap, complete sequence.//0.52:212:64//AL022339

[10646] F-PLACE1003850//P. falciparum histidine-rich protein genes.//0.39:330:60//M 17028

[10647] F-PLACE1003858//Human DNA sequence from PAC 332011 on chromosome 1q24-1q25. Contains ESTs and STSs.//4.8e-07:461:59//Z98043

[10648] F-PLACE1003864//Plasmodium falciparum 3D7 chromosome 12 PFYAC336 genomic sequence, WORKING DRAFT SEQUENCE, 5 unordered pieces.//0.026:538:56//AC005139

[10649] F-PLACE1003870//Human DNA sequence *** SEQUENCING IN PROGRESS *** from clone 54B20, WORKING DRAFT SEQUENCE.//6.5e-06:175:69//Z98304

[10650] F-PLACE1003885//Mus musculus poly(A) polymerase VI mRNA, complete cds.//9.4e-75:754:72//U58134

[10651] F-PLACE1003886//Homo sapiens clone NH0001P09, WORKING DRAFT SEQUENCE, 1 unordered pieces.//6.7e-20:432:64//AC006030

[10652] F-PLACE1003888//Human mRNA for phospholipase C, complete cds.//2.6e-53:702:67//D42108

[10653] F-PLACE1003892//RPCII 1-24P 17.TV RPCI-11 Homo sapiens genomic clone RPCI-11-24P 17, genomic survey sequence.//3.3e-20:245:65//B86759

[10654] F-PLACE1003900//Human DNA sequence *** SEQUENCING IN PROGRESS *** from clone 328E19, WORKING DRAFT SEQUENCE.//2.5e-17:260:71//AL022240

[10655] F-PLACE1003903//Mus musculus CTP synthetase homolog (CTPsH) mRNA, complete cds.//2.7e-86:533:87//U49385

[10656] F-PLACE1003915//Mus musculus clone OSTI 963, genomic survey sequence.//6.4e-29:251:80//AF046591

[10657] F-PLACE1003923//Homo sapiens full-length insert cDNA clone ZD40AO5.//2.8e-25:316:70//AF086251

[10658] F-PLACE1003932M/Plasmodium falciparum 3D7 chromosome 12 PFYAC181 genomic sequence, WORKING DRAFT SEQUENCE, 8 unordered pieces.//1.6e-05:652:58//AC005505

[10659] F-PLACE1003936//CIT-HSP-2387C11.TR.1 CIT-HSP Homo sapiens genomic clone 2387CI 1, genomic survey sequence.//1.0:223:62//AQ239494

[10660] F-PLACE1003968//Rattus norvegicus 5′-AMP-activated protein kinase, gamma-1 subunit mRNA, complete cds.//5.2e-47:505:72//U42413

[10661] F-PLACE1004103//Homo sapiens chromosome 19, cosmid R28784, complete sequence.//6.7e-29:241:84//AC005954

[10662] F-PLACE1004104//Rattus norvegicus rsec5 mRNA, complete cds.//3.0e-115:719:86//AF032666

[10663] F-PLACE1004114//Homo sapiens Chromosome 22q11.2 BAC Clone 77h2 In CES Region, WORKING DRAFT SEQUENCE, 7 unordered pieces.//1.5e-22:213:80//AC000052

[10664] F-PLACE1004118//Pseudorabies virus with upstream and downstream sequences.//0.87:209:64//M34651

[10665] F-PLACE1004128//M. musculus G protein beta-subunit mRNA, complete cds.//2.5e-62:437:84/IM63658

[10666] F-PLACE1004149//Oryctolagus cuniculus translation initiation factor eIF2C mRNA, complete cds.//1.4e-16:342:65//AF005355

[10667] F-PLACE1004156//Homo sapiens DNA sequence from PAC 57E3 on chromosome 6 p12.1-21.1. Contains GSSs and an STS with a TATC repeat polymorphism, complete sequence.//1.2e-26:299:74//AL022099

[10668] F-PLACE1004161

[10669] F-PLACE1004183//Homo sapiens for TOM1-like protein.//1.2e-146:731:96//AJ010071

[10670] F-PLACE1004197

[10671] F-PLACE1004203//Homo sapiens GPI-anchored membrane protein CDw108 precursor, mRNA, complete cds.//4.0e-144:695:98//AF069493

[10672] F-PLACE1004242//Homo sapiens DNA sequence from PAC 124C6 on chromosome 6q21. Contains genomic marker D6S1603, ESTs, GSSs and a STS with a CA repeat polymorphism, complete sequence.//2.3e-151:772:95//AL021326

[10673] F-PLACE1004256//HS_{—}2010_B2_G04_T7 CIT Approved Human Genomic Sperm Library D Homo sapiens genomic clone Plate=2010 Col=8 Row=N, genomic survey sequence.//1.5e-44:372:7911AQ252434

[10674] F-PLACE1004257//Homo sapiens BAC clone NH0342K06 from 2, complete sequence.//0.00011:349:63//AC005034

[10675] F-PLACE1004258//Homo sapiens DNA sequence from PAC 779B17 on chromosome 22q13.1. Contains exon trap, complete sequence.//0.77:475:59//AL021806

[10676] F-PLACE1004270//Human IgA C alpha 1 switch region (Sal).//1.7e-08:622:61//L19121

[10677] F-PLACE1004274//H. sapiens CpG island DNA genomic Mse1 fragment, clone 18g6, forward read cpg18g6.ft1b.//8.6e-37:196:98//Z57691

[10678] F-PLACE1004277//Homo sapiens two pore domain K+channel (TASK-2) mRNA, complete cds.//6.0e-156:756:97//AF084830

[10679] F-PLACE1004284//Arabidopsis thaliana genomic DNA, chromosome 5, PI clone: MPI7, complete sequence.//0.0060:635:57//AB011480

[10680] F-PLACE1004289//HS_{—}3023_B1_E04_T7 CIT Approved Human Genomic Sperm Library D Homo sapiens genomic clone Plate=3023 Col=7 Row=J, genomic survey sequence.//2.4e-12:86:98//AQ094451

[10681] F-PLACE1004302//Streptomyces coelicolor cosmid 7H I.//0.26:297:64//AL02141411

[10682] F-PLACE1004316//H. sapiens mRNA for apoptosis specific protein.//2.9e-150:797:94//Y 11588

[10683] F-PLACE1004336//Drosophila melanogaster DNA sequence (P1 DS07968 (DI 17)), complete sequence.//0.87:206:59//AC004267

[10684] F-PLACE1004358//Homo sapiens connector enhancer of KSR-like protein CNKI mRNA, complete cds.//5.9e-139:688:97//AF100153

[10685] F-PLACE1004376//Mus musculus clone OST20307, genomic survey sequence.//4.1e-81:498:89//AF046631

[10686] F-PLACE1004384//Human DNA sequence *** SEQUENCING IN PROGRESS *** from clone 1121 J18, WORKING DRAFT SEQUENCE.//3.6e-41:482:73//AL031653

[10687] F-PLACE1004388//Caenorhabditis elegans cosmid K08F11.//8.6e-26:615:62//U70855

[10688] F-PLACE1004405//Homo sapiens clone GS512121, WORKING DRAFT SEQUENCE, 9 unordered pieces.//9.2e-150:749:96//AC005027

[10689] F-PLACE1004425//Homo sapiens PAC clone DJ0733B09 from 7 p14-p13, complete sequence.//2.4e-08:129:76//AC005532

[10690] F-PLACE1004428//R. norvegicus mRNA for Pristanoyl-CoA Oxidase.//7.0e-17:549:61//X95188

[10691] F-PLACE1004437//Human NAD+-specific isocitrate dehydrogenase beta subunit precursor, mRNA, nuclear gene encoding mitochondrial protein, complete cds.//3.1e-129:536:99//U49283

[10692] F-PLACE1004451//Human DNA sequence from PAC 214K23, BRCA2 gene region chromosome 13q12-13 contains BRCA2 exons 1-24, Interferon Induced 56 Kd pseudogene and ESTs.//4.8e-23:231:71//Z74739

[10693] F-PLACE1004460//Homo sapiens PAC clone DJ 1064B22 from 7q21, complete sequence.//0.96:454:56//AC004954

[10694] F-PLACE1004467//HS_{—}2058_B1_C09_T7 CIT Approved Human Genomic Sperm Library D Homo sapiens genomic clone Plate=2058 Col=17 Row=F, genomic survey sequence.//2.4e-87:433:98//AQ242700

[10695] F-PLACE1004471//FIG. 2. Nucleotide and translated protein sequences of HPF1, -2, and -9.//1.4e-74:665:70//M27877

[10696] F-PLACE1004473//CIT-HSP-2045A15.TF CIT-HSP Homo sapiens genomic clone 2045A15, genomic survey sequence.//3.3e-20:140:92//B80243

[10697] F-PLACE1004491//Plasmodium falciparum 3D7 chromosome 12 PFYAC1122 genomic sequence, WORKING DRAFT SEQUENCE, 3 unordered pieces.//9.9e-05:794:57//AC004709

[10698] F-PLACE1004506//Human Gx-alpha gene.//1.0e-05:231:63//D90150

[10699] F-PLACE1004510//Homo sapiens TATA binding protein associated factor (TAFII 150) mRNA, complete cds.//3.2e-146:699:98//AF040701

[10700] F-PLACE1004516//Human DNA sequence from cosmid SRL9A13, chromosome region 11p13. Contains EST.//1.4e-33:367:71//Z86001

[10701] F-PLACE1004518

[10702] F-PLACE1004548//Dictyostelium discoideum MigA (migA) gene, complete cds.//2.6e-05:318:62//U86962

[10703] F-PLACE1004550//Human FMR1 gene, 5′ end.//0.0018:142:66//L19476

[10704] F-PLACE1004564//B. taurus mRNA for cleavage and polyadenylation specificity factor.//1.7e-114:513:85//X75931

[10705] F-PLACE1004629//Anolis carolinensis Brain-1 gene, complete cds.//0.00013:188:67//AB001868

[10706] F-PLACE1004645//Mycobacterium tuberculosis H37Rv complete genome; segment 138/162.//0.66:337:60//Z95120

[10707] F-PLACE1004646//Rattus norvegicus retinal pigment epithelium-specific protein (Rpe65) mRNA, complete cds.//1.1e-19:326:63//AF035673

[10708] F-PLACE1004658//H. sapiens CpG island DNA genomic Mse1 fragment, clone 55hl, forward read cpg55h1.ft1a.//2.4e-34:188:98//Z61632

[10709] F-PLACE1004664//Caenorhabditis elegans cosmid WIOG6, complete sequence.//1.0:148:65//Z81140

[10710] F-PLACE1004672//Human ABL gene, exon lb and intron lb, and putative M8604 Met protein (M8604 Met) gene, complete cds.//1.9e-101:182:95//U07561

[10711] F-PLACE1004674//Homo sapiens calcium binding protein (ALG-2) mRNA, complete cds.//4.3e-109:625:91//AF035606

[10712] F-PLACE1004681//Homo sapiens genomic DNA of 8p21.3-p22 anti-oncogene of hepatocellular colorectal and non-small cell lung cancer, segment 3/11.//1.9e-152:759:96//AB020860

[10713] F-PLACE1004686//Homo sapiens DNA sequence from PAC 179N 16 on chromosome 6p21.1-21.33. Contains the SAPK4 (MAPK p38delta) gene, and the alternatively spliced SAPK2 gene coding for CSaids binding protein CSBP2 and a MAPK p38beta LIKE protein. Contains ESTs, STSs and two predicted CpG islands, complete sequence.//1.2e-34:320:71//Z95152

[10714] F-PLACE1004691//HS_{—}3044_A1_G01_MF CIT Approved Human Genomic Sperm Library D Homo sapiens genomic clone Plate=3044 Col=1 Row=M, genomic survey sequence.//0.018:191:63//AQ098323

[10715] F-PLACE1004693//Human DNA sequence from clone 353H6 on chromosome Xq25-26.2. Contains the alternatively spliced SMARCAI gene for SWI/SNF related, matrix associated, actin dependent regulator of chromatin, subfamily a, member I (SNF2LI) and a 40S Ribosomal Protein S26 pseudogene. Contains ESTs, STSs and GSSs, complete sequence.//0.28:573:57//AL022577

[10716] F-PLACE1004716//Plasmodium falciparum MAL3P6, complete sequence.//0.00081:428:59//Z98551

[10717] F-PLACE1004722//HS_{—}3052 Bl CIO MR CIT Approved Human Genomic Sperm Library D Homo sapiens genomic clone Plate=3052 Col=19 Row=F, genomic survey sequence.//2.3e-05:104:75//AQ134959

[10718] F-PLACE1004736//CIT-HSP-2365J21.TF CIT-HSP Homo sapiens genomic clone 2365J21, genomic survey sequence.//1.3e-24:180:88//AQ080498

[10719] F-PLACE1004740//RPCII 1-58A7.TJ RPCII 1 Homo sapiens genomic clone R-58A7, genomic survey sequence.//8.6e-26:522:65//AQ195766

[10720] F-PLACE1004743//Mus musculus ubiquitin-protein ligase E3-alpha (Ubrl) mRNA, complete cds.//1.1e-112:711:86//AF061555

[10721] F-PLACE1004751

[10722] F-PLACE1004773//Homo sapiens inversin protein mRNA, complete cds.//5.4e-171:828:97//AF084367

[10723] F-PLACE1004777//Rattus norvegicus mRNA for myosin-RhoGAP protein Myr 7.//4.2e-134:763:90//AJ001713

[10724] F-PLACE1004793//Human DNA sequence from clone 323P24 on chromosome Xp 11.21-11.23 Contains SPIN (spindlin homolog (PROTEIN DXF34), hypothetical protein EST, STS, GSS, complete sequence.//9.3e-132:759:90//AL022157

[10725] F-PLACE1004804

[10726] F-PLACE1004813//Plasmodium falciparum 3D7 chromosome 12 PFYAC588 genomic sequence, WORKING DRAFT SEQUENCE, 2 unordered pieces.//6.5e-06:403:58//AC004710

[10727] F-PLACE1004814//Homo sapiens chromosome 17, clone hRPK.294_J_{—}22, complete sequence.//9.8e-39:207:99//AC005921

[10728] F-PLACE1004815//Homo sapiens PAC clone DJO651K02 from 7p21-p22, complete sequence.//8.1e-15:203:73//AC004613

[10729] F-PLACE1004824//G. gallus PB 1 gene.//1.1e-103:759:80//X90849

[10730] F-PLACE1004827//HS_{—}2230_A2_A05_MR CIT Approved Human Genomic Sperm Library D Homo sapiens genomic clone Plate=2230 Col=10 Row=A, genomic survey sequence.//4.1e-38:330:81//AQ299313

[10731] F-PLACE1004836//H. sapiens nidogen gene (exon 8).//0.97:116:68//X84825

[10732] F-PLACE1004838//HS_{—}3241_A2_A04_MR CIT Approved Human Genomic Sperm Library D Homo sapiens genomic clone Plate=3241 Col=8 Row=A, genomic survey sequence.//1.8e-87:425:98//AQ206740

[10733] F-PLACE1004840//Sequence 2 from patent U.S. Pat. No. 5,728,819.//6.7e-47:285:91//I92819

[10734] F-PLACE1004868

[10735] F-PLACE1004885//Arabidopsis thaliana DNA chromosome 4, ESSA I contig fragment No. 9.//0.14:465:59//Z97344

[10736] F-PLACE1004900

[10737] F-PLACE1004902//CITB1-E1-2510J4.TR CITBI-El Homo sapiens genomic clone 2510J4, genomic survey sequence.//3.6e-06:56:100//AQ261184

[10738] F-PLACE1004913//Homo sapiens BAC clone RG054D04 from 7q31, complete sequence.//2.6e-151:770:91//AC005058

[10739] F-PLACE1004918//Mus musculus signaling molecule (ATTP) mRNA, complete cds.//2.6e-68:459:84//U97571

[10740] F-PLACE1004930//Homo sapiens TNF-induced protein GG2-1 mRNA, complete cds.//4.4e-106:545:95//AF070671

[10741] F-PLACE1004934//Human DNA sequence from clone 192P9 on chromosome Xp 11.23-11.4. Contains a pseudogene similar to rat Plasmolipin, ESTs and GSSs, complete sequence.//3.5e-45:226:84//AL020989

[10742] F-PLACE1004937

[10743] F-PLACE1004969

[10744] F-PLACE1004972//Homo sapiens PAC clone DJO612F 12 from 7p 12-p 14, complete sequence.//0.012:316:61//AC004843

[10745] F-PLACE1004979//Human DNA sequence from clone 142F18 on chromosome Xq26.3-27.2 Contains part of a gene similar to melanoma-associated antigen, EST, GSS and an inverted repeat, complete sequence.//4.7e-39:394:77//AL031073

[10746] F-PLACE1004982//Caenorhabditis elegans cosmid B0507.//0.16:167:65//U64833

[10747] F-PLACE1004985//Plasmodium falciparum chromosome 2, section 10 of 73 of the complete sequence.//8.8e-14:590:61//AE001373

[10748] F-PLACE1005026

[10749] F-PLACE1005027

[10750] F-PLACE1005046

[10751] F-PLACE1005052//Homo sapiens chromosome Xp22-135-136 clone GSHB-56711, WORKING DRAFT SEQUENCE, 35 unordered pieces.//2.1e-135:675:97//AC005867

[10752] F-PLACE1005055//Homo sapiens mRNA for KIAA0576 protein, partial cds.//1.9e-159:761:98//AB011148

[10753] F-PLACE1005066//Homo sapiens actin binding protein MAYVEN mRNA, complete cds.//9.2e-10:757:56//AF059569

[10754] F-PLACE1005077

[10755] F-PLACE1005085//Homo sapiens Xp22-132-134 BAC GSHB-590J15 (Genome Systems Human BAC library) complete sequence.//6.9e-29:253:77//AC004673

[10756] F-PLACE1005086//Homo sapiens chromosome 17, clone HClT11023, complete sequence.//6.5e-52:446:78//AC002316

[10757] F-PLACE1005101//Homo sapiens clone DJO414A15, WORKING DRAFT SEQUENCE, 9 unordered pieces.//2.0e-146:734:96//AC005225

[10758] F-PLACE1005102//Homo sapiens chromosome 19, cosmid R29388, complete sequence.//9.8e-83:254:95//AC004476

[10759] F-PLACE1005108//Human BAC clone RGO09HO2 from 7q31, complete sequence.//0.46:179:64//AC003081

[10760] F-PLACE1005111

[10761] F-PLACE1005128//Bovine herpesvirus type I early-intermediate transcription control protein (BICP4) gene, complete cds.//0.00051:287:63//L14320

[10762] F-PLACE1005146//HS_{—}3071_A1_E03_MF CIT Approved Human Genomic Sperm Library D Homo sapiens genomic clone Plate=3071 Col=5 Row=I, genomic survey sequence.//7.4e-38:299:82//AQ103361

[10763] F-PLACE1005162//Human BAC clone GS306C12 from 7q21-q22, complete sequence.//2.6e-44:346:82//AC002451

[10764] F-PLACE1005176

[10765] F-PLACE1005181//CIT-HSP-234005.TR CIT-HSP Homo sapiens genomic clone 234005, genomic survey sequence.//0.99:211:63//AQ054651

[10766] F-PLACE1005187//CIT-HSP-2358N6.TR CIT-HSP Homo sapiens genomic clone 2358N6, genomic survey sequence.//2.7e-07:80:90//AQ074445

[10767] F-PLACE1005206//Human BAC clone 133K23 from 7q31.2, complete sequence.//0.98:216:61//AC000061

[10768] F-PLACE1005232//Homo sapiens clone DJ1106H14, WORKING DRAFT SEQUENCE, 42 unordered pieces.//0.70:245:63//AC004965

[10769] F-PLACE1005243

[10770] F-PLACE1005261//Caenorhabditis elegans cosmid T05H 10, complete sequence.//0.00041:254:61//Z47812

[10771] F-PLACE1005266//H. sapiens mRNA (fetal brain cDNA a4_{—}2g).//9.6e-33:177:98//Z70695

[10772] F-PLACE1005277//Homo sapiens mRNA for KIAA0610 protein, partial cds.//1.6e-148:706:98//AB011182

[10773] F-PLACE1005287//Plasmodium falciparum (MESA) mRNA exons 1-2, complete cds.//2.8e-15:737:60//M69183

[10774] F-PLACE1005305//Bovine mitochondrial GTP:AMP phosphotransferase mRNA, complete cds.//3.8e-111:728:84//M25757

[10775] F-PLACE1005308//Clethrionomys glareolus endogenous retroviral sequence ERV-L pol gene, clone ERV-L Vole Cg14.//1.0:128:67//AJ233621

[10776] F-PLACE1005313//Caenorhabditis elegans cosmid D2092.//8.8e-11:342:62//U88167

[10777] F-PLACE1005327//HS_{—}3080_B2_A12_MR CIT Approved Human Genomic Sperm Library D Homo sapiens genomic clone Plate=3080 Col=24 Row=B, genomic survey sequence.//4.1e-25:147:96//AQ139116

[10778] F-PLACE1005331//Homo sapiens chromosome 19, cosmid F20569, complete sequence.//1.4e-132:399:94//AC004794

[10779] F-PLACE1005335//Human Chromosome 3 pac pDJ70i11, WORKING DRAFT SEQUENCE, 2 unordered pieces.//5.5e-114:237:92//AC000380

[10780] F-PLACE1005373

[10781] F-PLACE1005374//Homo sapiens chromosome 7 common fragile site, complete sequence.//0.20:305:58//AF017104

[10782] F-PLACE1005409//Human BAC clone RG167B05 from 7q21, complete sequence.//2.5e-148:760:95//AC003991

[10783] F-PLACE1005453//Caenorhabditis elegans DNA *** SEQUENCING IN PROGRESS *** from clone Y48A6, WORKING DRAFT SEQUENCE.//0.00069:582:59//Z92854

[10784] F-PLACE1005467//Rat mRNA.//0.0014:131:70//M59859

[10785] F-PLACE1005471//Human DNA sequence from clone 4514 on chromosome 6q24.1-24.3. Contains two putative unknown genes, ESTs, STSs and GSSs, complete sequence.//3.0e-23:530:67//AL023581

[10786] F-PLACE1005477//Human DNA sequence from clone J181N1, WORKING DRAFT SEQUENCE.//3.3e-131:814:88//Z82191

[10787] F-PLACE1005480//Homo sapiens DNA sequence from PAC 257120 on chromosome 22q13.1-13.2. Contains cytochrome P450 pseudogenes CYP2D7P, CYP2D8P, CYP2D6(D),TCF20, NADH ubiquinone oxidoreductase B14 subunit, ESTs, CA repeat, STS, GSS.//7.0e-34:246:73//AL021878

[10788] F-PLACE1005481//RPCI11-74L17.TJ RPCII 1 Homo sapiens genomic clone R-74L17, genomic survey sequence.//0.37:403:57//AQ266885

[10789] F-PLACE1005494//Homo sapiens transient receptor potential protein 6 mRNA, complete cds.//2.1e-67:325:99//AF080394

[10790] F-PLACE1005502//Homo sapiens BAC clone NHO161HI2 from 7 p14-p15, complete sequence.//0.015:403:61//AC005589

[10791] F-PLACE1005526//H. sapiens CpG island DNA genomic Mse1 fragment, clone 9f1, reverse read cpg9f1.rt1a.//3.6e-27:159:9611Z66485

[10792] F-PLACE1005528//Homo sapiens genomic DNA, chromosome 21q11.1, segment 9/28, WORKING DRAFT SEQUENCE.//2.6e-28:449:67//AP000038

[10793] F-PLACE1005530//Homo sapiens clone DJ0691L07, complete sequence.//6.5e-18:234:72//AC004860

[10794] F-PLACE1005550//Fugu rubripes GSS sequence, clone 048A08bH3, genomic survey sequence.//1.2e-14:123:75//AL025925

[10795] F-PLACE1005554//Leishmania tarentolae mitochondrial 12S ribosomal RNA gene.//0.43:209:66//X02354

[10796] F-PLACE1005557//Homo sapiens chromosome 17, clone hRPC.117_B_{—}12, complete sequence.//9.3e-113:536:97//AC004707

[10797] F-PLACE1005574//Plasmodium falciparum 3D7 chromosome 12 PFYAC1383 genomic sequence, WORKING DRAFT SEQUENCE, 3 unordered pieces.//1.1e-10:514:59//AC005504

[10798] F-PLACE1005584//Homo sapiens mRNA for KIAA0617 protein, complete cds.//0.00056:289:63//AB014517

[10799] F-PLACE1005595//Human Chromosome 11q12.2 PAC clone pDJ606g6, complete sequence.//1.2e-111:262:89//AC004126

[10800] F-PLACE1005603

[10801] F-PLACE1005611//Fl 605TFC IGF Arabidopsis thaliana genomic clone F1605, genomic survey sequence.//2.0e-10:209:66//B98589

[10802] F-PLACE1005623

[10803] F-PLACE1005630//High throughput sequencing of human chromosome 12, WORKING DRAFT SEQUENCE, I ordered pieces.//1.2e-93:230:98//AC005840

[10804] F-PLACE1005639//HS_{—}3095_B1_A03_MF CIT Approved Human Genomic Sperm Library D Homo sapiens genomic clone Plate=3095 Col=5 Row=B, genomic survey sequence.//1.2e-05:220:63//AQ123022

[10805] F-PLACE1005646//Homo sapiens RNA helicase-related protein mRNA, complete cds.//6.4e-150:721:98//AF083255

[10806] F-PLACE1005656//H. sapiens RR2 mRNA for small subunit ribonucleotide reductase.//1.3e-51:480:74//X59618

[10807] F-PLACE1005666//RPCI11-78015.TV RPCII 1 Homo sapiens genomic clone R-78015, genomic survey sequence.//8.7e-05:243:62//AQ284667

[10808] F-PLACE1005698//Human membrane-associated lectin type-C mRNA.//1.9e-63:374:85//M98457

[10809] F-PLACE1005727//Plasmodium falciparum chromosome 2, section 59 of 73 of the complete sequence.//0.69:633:57//AE001422

[10810] F-PLACE1005730//HS_{—}2026_B1_H11_T7 CIT Approved Human Genomic Sperm Library D Homo sapiens genomic clone Plate=2026 Col=21 Row=P, genomic survey sequence.//2.0e-24:286:74//AQ231147

[10811] F-PLACE1005739//Mus musculus IFN-gamma induced (Mg11) mRNA, complete cds.//2.8e-55:621:71//U15635

[10812] F-PLACE1005755//HS_{—}2213_A2_H11_MR CIT Approved Human Genomic Sperm Library D Homo sapiens genomic clone Plate=2213 Col=22 Row=O, genomic survey sequence.//1.4e-25:290:75//AQ136844

[10813] F-PLACE1005763//Rat medium-chain S-acyl fatty acid synthetase thio ester hydrolase (MCH), complete cds.//4.5e-40:297:70//M16200

[10814] F-PLACE1005799//R. norvegicus mRNA for mitochondrial isoform of cytochrome bS.//0.91:287:63//Y12517

[10815] F-PLACE1005802//Homo sapiens PAC clone DJO44L15 from Xq23, complete sequence.//5.0e-109:530:98//AC004827

[10816] F-PLACE1005803//HS_{—}3092_B1_A10_MF CIT Approved Human Genomic Sperm Library D Homo sapiens genomic clone Plate=3092 Col=19 Row=B, genomic survey sequence.//2.4e-08:76:96//AQ103695

[10817] F-PLACE1005804//Homo sapiens alpha 1,2-mannosidase IB mRNA, complete cds.//1.4e-126:636:96//AF027156

[10818] F-PLACE10058.13//Homo sapiens sorting nexin 2 (SNX2) mRNA, complete cds.//2.6e-154:739:98//AF065482

[10819] F-PLACE1005828//Homo sapiens chromosome 17, clone hRPC.971_F_{—}3, WORKING DRAFT SEQUENCE, 1 ordered pieces.//2.2e-37:355:77//AC004150

[10820] F-PLACE1005834//Plasmodium falciparum DNA *** SEQUENCING IN PROGRESS * from contig 4-105, complete sequence.//0.00080:663:58//AL010283

[10821] F-PLACE1005845//Plasmodium falciparum 3D7 chromosome 12 PFYAC812 genomic sequence, WORKING DRAFT SEQUENCE, 8 unordered pieces.//0.00015:340:58//AC004153

[10822] F-PLACE1005850//Human DNA sequence from clone 465N24 on chromosome 1p35.1-36.13. Contains two novel genes, ESTs, GSSs and CpG islands, complete sequence.//1.8e-46:278:85//AL031432

[10823] F-PLACE1005851

[10824] F-PLACE1005876//B. taurus mRNA for cleavage and polyadenylation specificity factor.//5.0e-120:701:89//X75931

[10825] F-PLACE1005884//CIT-HSP-2333012.TR CIT-HSP Homo sapiens genomic clone 2333012, genomic survey sequence.//4.6e-78:385:98//AQ039226

[10826] F-PLACE1005890//Schizosaccharomyces pombe beml/budS suppressor (Bem46+) mRNA, partial cds.//9.3e-16:638:57//U29892

[10827] F-PLACE1005898//Rattus norvegicus A-kinase anchoring protein AKAP150 mRNA, complete cds.//1.0:178:65//U67136

[10828] F-PLACE1005921//M. musculus mRNA for immunity associated protein 38.16.6e-17:614:59//Y08026

[10829] F-PLACE1005923//RPCII 1-33G19.TJ RPCI-11 Homo sapiens genomic clone RPCI-11-33G19, genomic survey sequence.//4.0e-10:535:57//AQ046151

[10830] F-PLACE1005925//Human DNA sequence *** SEQUENCING IN PROGRESS *** from clone 537K23, WORKING DRAFT SEQUENCE.//0.17:159:65//AL034405

[10831] F-PLACE1005932

[10832] F-PLACE1005934//H. sapiens CpG island DNA genomic Mse1 fragment, clone 165g2, forward read cpg165g2.ft1a.118.3e-43:247:9311Z57153

[10833] F-PLACE1005936//F. rubripes GSS sequence, clone 069K22aG2, genomic survey sequence.//0.91:116:68//AL014719

[10834] F-PLACE1005951/Rhodobacter sphaeroides DMSO/TMAO-sensor kinase (dor S), DMSO/TMAO-response regulator (dor R), DMSO/TMAO-cytochrome c-containing subunit (dor C), DMSO-membrane protein (dorB), and DMSO/TMAO-reductase (dorA) genes, complete cds.//0.0022:495:59//AF016236

[10835] F-PLACE1005953//Homo sapiens PAC clone DJO320J15 from Xq23, complete sequence.//2.9e-05:442:61//AC004081

[10836] F-PLACE1005955//Caenorhabditis elegans cosmid F01F1.//4.3e-20:409:64//U13070

[10837] F-PLACE1005966//P. falciparum aarp3 gene, exon.//0.0083:270:64//Y08925

[10838] F-PLACE1005968

[10839] F-PLACE1005990//Homo sapiens chromosome 12p13.3 clone RPCI11-407G6, WORKING DRAFT SEQUENCE, 51 ordered pieces.//1.0e-100:513:96//AC005866

[10840] F-PLACE1006002//Human DNA sequence *** SEQUENCING IN PROGRESS *** from clone 229A8, WORKING DRAFT SEQUENCE.//2.5e-54:444:77//Z86090

[10841] F-PLACE1006003//HS-1059-A2-G01-MF.abi CIT Human Genomic Sperm Library C Homo sapiens genomic clone Plate=CT 781 Col=2 Row=M, genomic survey sequence.//3.4e-05:214:64//B44442

[10842] F-PLACE1006011//Mus musculus poly-(ADPribosyl)-transferase homolog PARP mRNA, complete cds.//4.3e-71:580:79//AF072521

[10843] F-PLACE1006017//Homo sapiens Chromosome 16 BAC clone CIT987-SKA-113A6 complete genomic sequence, complete sequence.//8.6e-32:177:83//AC002299

[10844] F-PLACE1006037//Mus musculus B6D2F1 clone 2C11B mRNA.//1.8e-34:269:83//U01139

[10845] F-PLACE1006040//Homo sapiens mRNA for alpha endosulfine.//3.4e-147:719:97//X99906

[10846] F-PLACE1006076//Homo sapiens DNA sequence from PAC 79C4 on chromosome 1q24. Contains the PMXI gene, coding for two alternative forms of the Paired Mesoderm Homeobox protein I (PMX-1, PHOX-1). Contains ESTs, STSs and BAC end sequences (GSSs), complete sequence.//0.37:332:62//Z97200

[10847] F-PLACE1006119//Homo sapiens Ran-GTP binding protein mRNA, partial cds.//1.3e-145:679:99//AF039023

[10848] F-PLACE1006129

[10849] F-PLACE1006139//Saccharomyces cerevisiae chromosome VI cosmid 9965./4.8e-27:693:60//D44597

[10850] F-PLACE1006143//Human DNA sequence *** SEQUENCING IN PROGRESS *** from clone 16915, WORKING DRAFT SEQUENCE.//4.7e-46:435:77//Z93015

[10851] F-PLACE1006157//Saguinus oedipus mRNA for membrane cofactor protein CD46, complete cds, clone:B2.//0.048:290:60//D85750

[10852] F-PLACE1006159//Homo sapiens chromosome 10 clone CIT987SK-105402 map 10q25, complete sequence.//3.2e-129:466:96//AC005661

[10853] F-PLACE1006164//HS_{—}3003_A1_F08_MR CIT Approved Human Genomic Sperm Library D Homo sapiens genomic clone Plate=3003 Col=15 Row=K, genomic survey sequence.//1.4e-70:388:93//AQ118200

[10854] F-PLACE1006167//Homo sapiens chromosome 19, cosmid F23149, complete sequence.//4.3e-78:385:86//AC005239

[10855] F-PLACE1006170//Mouse mRNA for alpha-adaptin (C).//3.5e-91:630:84//X14972

[10856] F-PLACE1006187//Homo sapiens cyclin E2 mRNA, complete cds.//3.9e-149:694:99//AF091433

[10857] F-PLACE1006195//Homo sapiens Xp22 BAC GS-607H 18 (Genome Systems Human BAC library) complete sequence.//2.5e-16:283:70//AC003658

[10858] F-PLACE1006196//Mouse RNA helicase and RNA-dependent ATPase from the DEAD box family mRNA, complete cds.//2.2e-94:648:84//L25125

[10859] F-PLACE1006205//Human Xp22 cosmid U250A9, complete sequence.//0.15:533:58//U75931

[10860] F-PLACE1006223//F24L20-T7 IGF Arabidopsis thaliana genomic clone F24L20, genomic survey sequence.//0.0068:175:64//B19803

[10861] F-PLACE1006225//CIT-HSP-2335123.TF CIT-HSP Homo sapiens genomic clone 2335123, genomic survey sequence.//2.1e-19:149:90//AQ039880

[10862] F-PLACE1006236//Human chromosome 12 p15 BAC clone CIT987SK-99D8 complete sequence.//0.51:290:58//U91327

[10863] F-PLACE1006239//Homo sapiens BAC clone RG 118D07 from 7q31, complete sequence.//7.4e-158:452:96//AC004142

[10864] F-PLACE1006246//RPCI11-36123.TK RPCI-11 Homo sapiens genomic clone RPCI-11-36123, genomic survey sequence.//2.6e-31:176:97//AQ045400

[10865] F-PLACE1006248//Homo sapiens mRNA for KIAA0648 protein, partial cds.//2.3e-166:791-:98//AB014548

[10866] F-PLACE1006262//342E3.TVD CIT978SKA1 Homo sapiens genomic clone A-342E03, genomic survey sequence.//1.0:228:63//B16447

[10867] F-PLACE1006288//Human DNA sequence *** SEQUENCING IN PROGRESS *** from clone 20N2, WORKING DRAFT SEQUENCE.//6.6e-172:809:99//AL031320

[10868] F-PLACE1006318

[10869] F-PLACE1006325//Homo sapiens PAC clone DJ0988L12 from 7q11.23-q21.1, complete sequence.//0.079:396:59//AC004454

[10870] F-PLACE1006335//Mouse Ig third hypervariable region (HCDR3), nonproductively rearranged alpha-chain gene VHSB32-D-JH2 region.//1.0:90:67//M55721

[10871] F-PLACE1006357//Plasmodium falciparum 3D7 chromosome 12 PFYAC1383 genomic sequence, WORKING DRAFT SEQUENCE, 3 unordered pieces.//0.16:445:56//AC005504

[10872] F-PLACE1006360//Plasmodium falciparum MAL3P7, complete sequence.//6.1e-05:625:57//AL034559

[10873] F-PLACE1006368//X. laevis mRNA for KLP2 protein.//3.0e-25:376:68//X94082

[10874] F-PLACE1006371//Homo sapiens chromosome 16, cosmid clone 360H6 (LANL), complete sequence.//2.0e-146:711:97//AC004232

[10875] F-PLACE1006382

[10876] F-PLACE1006385//Homo sapiens epsin 2a mRNA, complete cds.//5.1e-110:539:97//AF062085

[10877] F-PLACE1006412//Homo sapiens BAC clone GS588G18 from 7 p12-p14, complete sequence.//1.3e-23:463:68//AC005029

[10878] F-PLACE1006414//Homo sapiens PCAF associated factor 65 alpha mRNA, complete cds.//1.3e-109:525:98//AF069735

[10879] F-PLACE1006438//Homo sapiens mRNA for KIAA0557 protein, partial cds.//6.9e-23:531:65//AB011129

[10880] F-PLACE1006445//HS_{—}3071_A1_C11_MF CIT Approved Human Genomic Sperm Library D Homo sapiens genomic clone Plate=3071 Col=21 Row=E, genomic survey sequence.//4.7e-74:392:95//AQ103347

[10881] F-PLACE1006469//Rhodobacter capsulatus strain SB1003, partial genome.//1.1e-40:686:65//AF010496

[10882] F-PLACE1006470//T. brucei kinetoplast maxicircle variable region DNA.//0.99:250:59//Z15118

[10883] F-PLACE1006482//Human DNA sequence *** SEQUENCING IN PROGRESS *** from clone 447C4, WORKING DRAFT SEQUENCE.//4.3e-120:328:98//AL021977

[10884] F-PLACE1006488//Canine mRNA for 68 kDA subunit of signal recognition particle (SRP68).//6.5e-86:478:91//X53744

[10885] F-PLACE1006492

[10886] F-PLACE1006506

[10887] F-PLACE1006521//Homo sapiens BAC clone RG281GO5 from 7 p15-p21, complete sequence.//0.0010:547:58//AC005083

[10888] F-PLACE1006531//Oryctolagus cuniculus translation initiation factor eIF2C mRNA, complete cds.//2.6e-84:625:80//AF005355

[10889] F-PLACE1006534//Caenorhabditis elegans cosmid Y40H7A, complete sequence.//0.00031:671:58//AL033510

[10890] F-PLACE1006540

[10891] F-PLACE1006552//P. falciparum glutamic acid-rich protein gnen, complete cds.//6.0e-10:636:59//J03998

[10892] F-PLACE1006598//Homo sapiens BAC clone NH05399B24 from 7p 15.1-p14, complete sequence.//9.8e-25:170:77//AC006044

[10893] F-PLACE1006615//Homo sapiens eukaryotic translation initiation factor eIF3, p35 subunit mRNA, complete cds.//6.7e-167:781:99//U97670

[10894] F-PLACE1006617//Homo sapiens Xp22 BAC GSHB-433024 (Genome Systems Human BAC library) complete sequence.//0.98:514:59//AC004470

[10895] F-PLACE1006626//H. sapiens DNA 3′ flanking simple sequence region clone wg2c3.//0.00079:206:62//X76589

[10896] F-PLACE1006629//Human BAC clone RG333F24 from 7q11.2-q21, complete sequence.//0.0012:576:57//AC004015

[10897] F-PLACE1006640//P. falciparum complete gene map of plastid-like DNA (IR-B).//0.0018:588:59//X95276

[10898] F-PLACE1006673//Plasmodium falciparum 3D7 chromosome 12 PFYAC69 genomic sequence, WORKING DRAFT SEQUENCE, 4 unordered pieces.//0.0028:469:58//AC004688

[10899] F-PLACE1006678//Mus musculus UDP-Gal:betaGlcNAc beta 1,3-galactosyltranferase-1 (b3GTI) gene, complete cds.//0.0001:184:64//AF029790

[10900] F-PLACE1006704//Mus musculus dentin sialophosphoprotein precursor (DSPP) mRNA, complete cds.//0.0013:380:62//U67916

[10901] F-PLACE1006731//Human DNA sequence from PAC 408N23 on chromosome 22q13. Contains HIP, HSC70-INTERACTING PROTEIN (PROGESTERONE RECEPTOR-ASSOCIATED P48 PROTEIN), ESTs and STS.//1.5e-78:520:86//Z98048

[10902] F-PLACE1006754//Homo sapiens chromosome 19, cosmid R29124, complete sequence.//1.9e-135:378:99//AC005626

[10903] F-PLACE1006760//CIT-HSP-2336013.TR CIT-HSP Homo sapiens genomic clone 2336013, genomic survey sequence.//0.018:147:66//AQ039246

[10904] F-PLACE1006779//Plasmodium falciparum chromosome 2, section 63 of 73 of the complete sequence.//2.6e-08:823:58//AE001426

[10905] F-PLACE1006782//Homo sapiens clone NHOO05N18, WORKING DRAFT SEQUENCE, 2 unordered pieces.//0.043:252:65//AC005487

[10906] F-PLACE1006792//HS_{—}3165_B1_H01_MR CIT Approved Human Genomic Sperm Library D Homo sapiens genomic clone Plate=3165 Col=1 Row=P, genomic survey sequence.//1.4e-11:249:67//AQ149559

[10907] F-PLACE1006795//Mouse eph-related receptor tyrosine kinase (Mek4) mRNA, complete cds.//1.3e-12:155:80//M68513

[10908] F-PLACE1006800//Plasmodium falciparum DNA *** SEQUENCING IN PROGRESS * from contig 4-92, complete sequence.//6.7e-05:391:62//AL010272

[10909] F-PLACE1006805//paramecium species 1,168 mt dna dimer: replication init. region.//9.1e-09:369:62//K00915

[10910] F-PLACE1006815//Human DNA sequence *** SEQUENCING IN PROGRESS *** from clone 321D2, WORKING DRAFT SEQUENCE.//0.89:465:58//AL031033

[10911] F-PLACE1006819//Homo sapiens clone DJ1163L11, complete sequence.//1.5e-121:618:91//AC005230

[10912] F-PLACE1006829//Bm-3a=class V POU transcription factor [mice, CD/CD, embryo fibroblast cells, Genomic, 2160 nt].//0.011:145:68//S69350

[10913] F-PLACE1006860//Plasmodium falciparum MAL3P7, complete sequence.//2.2e-07:691:58//AL034559

[10914] F-PLACE1006867//Human DNA sequence *** SEQUENCING IN PROGRESS *** from clone 323M4, WORKING DRAFT SEQUENCE.//1.5e-132:643:98//AL033378

[10915] F-PLACE1006878

[10916] F-PLACE1006883//Mycobacterium tuberculosis H37Rv complete genome; segment 138/162.//1.0:236:62//Z95120

[10917] F-PLACE1006901//Mus musculus t complex testis-specific protein (Tctex2) gene, t haplotype, promoter sequence.//2.7e-19:171:81//U21672

[10918] F-PLACE1006904

[10919] F-PLACE1006917//H. sapiens CpG island DNA genomic Mse1 fragment, clone 79g10, forward read cpg79g10.ft1a.//1.3e-21:131:9811Z63175

[10920] F-PLACE1006932//Mus musculus FKBP65 binding protein mRNA, complete cds.//0.99:248:61//L07063

[10921] F-PLACE1006935//Homo sapiens chromosome 9 duplication of the T cell receptor beta locus and trypsinogen gene families.//0.85:161:63//AF029308

[10922] F-PLACE1006956//Hylobates lar involucrin gene, complete cds.//0.077:355:61//M35447

[10923] F-PLACE1006958//Mus musculus osmotic stress protein 94 (Osp94) mRNA, complete cds.//2.9e-89:483:86//U23921

[10924] F-PLACE1006961//Saccharomyces cerevisiae mitochondrial tRNA-Tyr, tRNA-Asn, &amp; tRNA-Met genes.//1.6e-06:651:58//AJ223323

[10925] F-PLACE1006962//H. sapiens irlB mRNA.//7.1e-15:202:71//X63417

[10926] F-PLACE1006966//Caenorhabditis elegans DNA *** SEQUENCING IN PROGRESS *** from clone Y105E8, WORKING DRAFT SEQUENCE.//1.7e-26:451:61//AL022594

[10927] F-PLACE1006989//cSRL-172A4-u cSRL flow sorted Chromosome 11 specific cosmid Homo sapiens genomic clone cSRL-172A4, genomic survey sequence.//1.0:97:67//B03188

[10928] F-PLACE1007014//Rattus norvegicus equilbrative nitrobenzylthioinosine-insensitive nucleoside transporter mRNA, complete cds.//4.2e-07:592:58//AF015305

[10929] F-PLACE1007021//Homo sapiens chromosome 19, cosmid F16403, complete sequence.//5.1e-17:285:70//AC005777

[10930] F-PLACE1007045//Human DNA sequence from PAC 181 NI on chromosome X contains ESTs, STS polymorphic CA repeat*.//6.2e-131:775:89//Z82899

[10931] F-PLACE1007053//Homo sapiens clone DJ0810E06, WORKING DRAFT SEQUENCE, 8 unordered pieces.//1.7e-143:675:99//AC004895

[10932] F-PLACE1007068//Homo sapiens chromosome 17, clone hRPK.214_{—}0_{—}1, complete sequence.//1.3e-131:652:97//AC005224

[10933] F-PLACE1007097//Homo sapiens DNA sequence from BAC 55C20 on chromosome 6. Contains a Spinal Muscular Atrophy (SMA3) LIKE gene overlapping with a beta-glucoronidase LIKE pseudogene. Contains a membrane protein LIKE pseudogene, a Glyceraldehyde 3-phosphate dehydrogenase (GAPDH) LIKE pseudogene, five predicted tRNA genes. Contains ESTs, GSSs (BAC end sequences) and a CA repeat polymorphism, complete sequence.//8.3e-158:768:97//AL021368

[10934] F-PLACE1007105//Mus musculus muskelin mRNA, complete cds.//4.1e-124:687:91//U72194

[10935] F-PLACE1007111//Plasmodium falciparum 3D7 chromosome 12 PFYAC336 genomic sequence, WORKING DRAFT SEQUENCE, 5 unordered pieces.//4.7e-05:586:56//AC005139

[10936] F-PLACE1007112//HS_{—}2234_B2_G10_MF CIT Approved Human Genomic Sperm Library D Homo sapiens genomic clone Plate=2234 Col=20 Row=N, genomic survey sequence.//0.26:200:62//AQ087801

[10937] F-PLACE1007132//CIT978SK-A-211C6.TVB CIT978SK Homo sapiens genomic clone A-211C6, genomic survey sequence.//1.3e-40:255:92//B72112

[10938] F-PLACE1007140//QNI orf [Cotumix coturnix, japonica, K2 neuroretinal cells, mRNA Partial, 3884 nt].//4.9e-15:386:62//S68151

[10939] F-PLACE1007178//Plasmodium falciparum 3D7 chromosome 12 PFYACB8-420 genomic sequence, WORKING DRAFT SEQUENCE, 14 unordered pieces.//0.011:329:61//AC005140

[10940] F-PLACE1007226//Human lipocortin (LIP) 2 gene, upstream region.//0.0036:180:63//M62899

[10941] F-PLACE1007238//FMR1 {CGG repeats) [human, Fragile X syndrome patient, Genomic, 429 nt].//2.8e-08:269:63//S74494

[10942] F-PLACE1007239//Homo sapiens mRNA for transcription elongation factor S-II, hS-II-T1, complete cds.//6.3e-57:405:87//D50495

[10943] F-PLACE1007242//HS_{—}3006_A1_B11_MR CIT Approved Human Genomic Sperm Library D Homo sapiens genomic clone Plate=3006 Col=21 Row=C, genomic survey sequence.//0.088:191:59//AQ089443

[10944] F-PLACE1007243//Human transporter protein (g17) mRNA, complete cds.//7.9e-12:245:66//U49082

[10945] F-PLACE1007257//Homo sapiens mRNA for dia-12c protein.//5.2e-144:677:98//Y 15908

[10946] F-PLACE1007274//HS_{—}3003_A1_D08_MF CIT Approved Human Genomic Sperm Library D Homo sapiens genomic clone Plate=3003 Col=15 Row=G, genomic survey sequence.//7.4e-49:345:85//AQ294154

[10947] F-PLACE1007276//Fugu rubripes GSS sequence, clone 014010aG11, genomic survey sequence.//0.0052:228:62//AL024982

[10948] F-PLACE1007282//F. rubripes GSS sequence, clone 019007aB3, genomic survey sequence.//0.024:289:58//AL011743

[10949] F-PLACE1007286//Human Chromosome 16 BAC clone CIT987SK-A-256A9, complete sequence.//0.0048:185:69//AC002492

[10950] F-PLACE1007301//Dictyostelium discoideum gene for TRFA, complete cds.//0.069:761:57//AB009080

[10951] F-PLACE1007317

[10952] F-PLACE1007342

[10953] F-PLACE1007346//Homo sapiens estrogen-responsive B box protein (EBBP) mRNA, complete cds.//5.4e-120:567:98//AF096870

[10954] F-PLACE1007367//Homo sapiens clone RG228D17, WORKING DRAFT SEQUENCE, 2 unordered pieces.//1.2e-59:613:75//AC005077

[10955] F-PLACE1007375//Caenorhabditis elegans cosmid D2092.//1.8e-12:193:70//U88167

[10956] F-PLACE1007386

[10957] F-PLACE1007402//HS_{—}2170_A2_D12_MF CIT Approved Human Genomic Sperm Library D Homo sapiens genomic clone Plate=2170 Col=24 Row=G, genomic survey sequence.//5.6e-06:162:6711AQ125590

[10958] F-PLACE1007409//Homo sapiens mitoxantrone resistance protein 2 mRNA, complete sequence.//1.6e-25:165:93//AF093772

[10959] F-PLACE1007416

[10960] F-PLACE1007450//Homo sapiens DNA from chromosome 19, BAC 33152, complete sequence.//4.9e-34:764:62//AC003973

[10961] F-PLACE1007452//Mus musculus bet3 (Bet3) mRNA, complete cds.//4.1e-17:374:64//AF041433

[10962] F-PLACE1007454//Homo sapiens (clone s153) mRNA fragment.//8.1e-52:317:93//L40391

[10963] F-PLACE1007460//Human DNA sequence from clone 914P14 on chromosome Xq23 Contains calpain-like protease gene, DCX (doublecortin) ESTs, CA repeat, GSS, complete sequence.//0.0019:280:64//AL031117

[10964] F-PLACE1007478//Homo sapiens Chromosome 16 BAC clone CIT987-SKA-345G4-complete genomic sequence, complete sequence.//2.5e-24:362:71//AC002302

[10965] F-PLACE1007484

[10966] F-PLACE1007488//Danio rerio faciogenital dysplasia protein (fgd) mRNA, complete cds.//3.8e-14:293:63//AF017370

[10967] F-PLACE1007507//Human DNA sequence from clone 105D16 on chromosome Xp 11.3-11.4 Contains pseudogene similar to laminin-binding protein, CA repeat, STS, complete sequence.//4.6e-10:152:75//AL031311

[10968] F-PLACE1007511//Homo sapiens chromosome 17, clone hRPC.1110_E_{—}20, complete sequence.//3.6e-139:477:98//AC004231

[10969] F-PLACE1007524//Plasmodium falciparum microsatellite 14C sequence.//0.0055:395:59//AF015461

[10970] F-PLACE1007525//Trypanoplasma borelli mitochondrion cytochrome oxidase subunit 1 (cox1), cytochrome oxidase subunit 2 (cox2), and apocytochrome b (cytb) genes, complete cds, and complete 9S rRNA gene and partial 12S rRNA gene.//0.0013:550:58//U11682

[10971] F-PLACE1007537//H. sapiens CpG island DNA genomic Mse1 fragment, clone 198g6, reverse read cpg198g6.rt1a.//0.98:121:67//Z60280

[10972] F-PLACE1007544//Mus musculus chromosome 14 marker um-m24 GA dinucleotide DNA sequence.//2.3e-10:141:75//U31508

[10973] F-PLACE1007547//Homo sapiens mRNA for KIAA0661 protein, complete cds.//3.1e-69:733:71//AB014561

[10974] F-PLACE1007557//Drosophila yakuba mitochondrial DNA molecule.//0.022:393:61//X03240

[10975] F-PLACE1007583//Human DNA sequence *** SEQUENCING IN PROGRESS *** from clone 545LI7, WORKING DRAFT SEQUENCE.//3.6e-114:565:97//AL031665

[10976] F-PLACE1007598//CIT-HSP-2371G14.TF CIT-HSP Homo sapiens genomic clone 2371G14, genomic survey sequence.//2.0e-22:304:70//AQ111183

[10977] F-PLACE1007618//Homo sapiens chromosome 17, clone hRPK.642_C_{—}21, complete sequence.//1.0:386:59//AC005245

[10978] F-PLACE1007621

[10979] F-PLACE1007632//Homo sapiens 12 p13.3 PAC RPCI5-940J5 (Roswell Park Cancer Institute Human PAC Library) complete sequence.//1.0e-88:276:96//AC006064

[10980] F-PLACE1007645//Bovine elastin mRNA, partial cds.//2.1e-07:110:79//M26132

[10981] F-PLACE1007649

[10982] F-PLACE1007677//Human DNA sequence *** SEQUENCING IN PROGRESS *** from clone 968D22, WORKING DRAFT SEQUENCE.//1.2e-21:567:64//AL023755

[10983] F-PLACE1007688//Pseudorabies virus immediate-early gene.//2.2e-05:287:66//X15120

[10984] F-PLACE1007690//Caenorhabditis elegans cosmid R07G3.//0.40:122:70//U23452

[10985] F-PLACE1007697//Mus musculus LIM/homeobox (Lhx3) gene fragment.//0.85:117:71//L40483

[10986] F-PLACE1007705//Human DNA sequence *** SEQUENCING IN PROGRESS *** from clone 460J8, WORKING DRAFT SEQUENCE.//0.0035:75:88//AL031662

[10987] F-PLACE1007706//Homo sapiens metalloprotease 1 (MP1) mRNA, complete cds.//1.3e-147:709:97//AF061243

[10988] F-PLACE1007725//Arabidopsis thaliana genomic DNA, chromosome 5, P1 clone: MBB18, complete sequence.//1.0:510:58//AB005231

[10989] F-PLACE1007729//Human endogenous retrovirus HML6 proviral clone HML6p, putative leader region, gag, pro and pol pseudogenes.//4.8e-136:516:89//U86698

[10990] F-PLACE1007730//Homo sapiens mRNA for KIAA0685 protein, complete cds.//7.9e-155:728:98//AB014585

[10991] F-PLACE1007737//Homo sapiens clone DJ0847008, WORKING DRAFT SEQUENCE, 3 unordered pieces.//5.8e-22:806:60//AC005484

[10992] F-PLACE1007743//Plasmodium falciparum 3D7 chromosome 12 PFYAC1383 genomic sequence, WORKING DRAFT SEQUENCE, 3 unordered pieces.//1.1e-06:510:56//AC005504

[10993] F-PLACE1007746//HS_{—}2268_B1_G10_MF CIT Approved Human Genomic Sperm Library D Homo sapiens genomic clone Plate=2268 Col=19 Row=N, genomic survey sequence.//0.10:171:6311AQ124780

[10994] F-PLACE1007791//Plasmodium falciparum DNA *** SEQUENCING IN PROGRESS * from MAL1P6, WORKING DRAFT SEQUENCE.//0.63:241:58//AL031749

[10995] F-PLACE1007807//Homo sapiens chromosome 17, clone hRPK.879_D_{—}6, complete sequence.//1.0e-120:743:87//AC005273

[10996] F-PLACE1007810//Homo sapiens Xp22 BAC GS-607H18 (Genome Systems Human BAC library) complete sequence.//1.0e-113:739:86//AC003658

[10997] F-PLACE1007829//CIT-HSP-2383J22.TR CIT-HSP Homo sapiens genomic clone 2383J22, genomic survey sequence.//1.0e-47:254:97//AQ196438

[10998] F-PLACE1007843//F. rubripes GSS sequence, clone 162K02bC12, genomic survey sequence.//1.6e-10:148:72//AL006903

[10999] F-PLACE1007846//Homo sapiens genomic DNA, chromosome 21q22.2 (Down Syndrome region), segment 3/15, WORKING DRAFT SEQUENCE.//3.4e-177:844:98//AP000010

[11000] F-PLACE1007852//Mouse perlecan mRNA, complete cds.//8.5e-39:243:90//M77174

[11001] F-PLACE1007858//Homo sapiens mRNA for KIAA0766 protein, complete cds.//3.9e-189:894:98//AB018309

[11002] F-PLACE1007866//CIT-HSP-2353D1.TF.1CIT-HSP Homo sapiens genomic clone 2353D 1, genomic survey sequence.//0.015:279:61//AQ263271

[11003] F-PLACE1007877

[11004] F-PLACE1007897

[11005] F-PLACE1007908//Homo sapiens mRNA, chromosome 1 specific transcript KIAA0487.//2.3e-154:755:97//AB007956

[11006] F-PLACE1007946//Human chromosome Y cosmid 56B5 genomic sequence, WORKING DRAFT SEQUENCE.//1.1e-59:310:81//AC003097

[11007] F-PLACE1007954//Homo sapiens BAC clone NH0414C23 from Y, complete sequence.//2.1e-61:522:79//AC006157

[11008] F-PLACE1007955//Homo sapiens cyclin-D binding Myb-like protein mRNA, complete cds.//2.7e-171:813:98//AF084530

[11009] F-PLACE1007958//Homo sapiens cAMP-specific phosphodiesterase 8B (PDE8B) mRNA, partial cds.//2.5e-153:730:98//AF079529

[11010] F-PLACE1007969//Mus musculus myelin gene expression factor (MEF-2) mRNA, partial cds.//3.4e-32:383:74//U13262

[11011] F-PLACE1007990//H. sapiens genomic DNA fragment (clone J3 I A212R).//6.6e-35:198:96//Z94758

[11012] F-PLACE1008000//Mus musculus veli 3 mRNA, complete cds.//1.5e-118:706:88//AF087695

[11013] F-PLACE1008002//Homo sapiens clone DJO613C23, WORKING DRAFT SEQUENCE, 4 unordered pieces.//6.4e-163:786:98//AC005628

[11014] F-PLACE1008044//Rattus norvegicus nuclear pore complex protein NUP 107 mRNA, complete cds.//1.2e-95:625:84//L31840

[11015] F-PLACE1008045//Caenorhabditis elegans cosmid F17C8, complete sequence.//0.016:165:65//Z35719

[11016] F-PLACE1008080//Human DNA sequence from cosmid L 118G10, Huntington's Disease Region, chromosome 4 p16.3.//4.0e-07:251:64//Z68883

[11017] F-PLACE1008095//RPCI11-21F19.TP RPCI-11 Homo sapiens genomic clone RPCI-11-21F19, genomic survey sequence.//1.5e-30:166:99//B85883

[11018] F-PLACE1008111//Aphidius picipes NADH dehydrogenase I gene, mitochondrial gene encoding mitochondrial protein, partial cds.//7.5e-06:414:60//AF069163

[11019] F-PLACE1008122//S. cerevisiae chromosome XV reading frame ORF YOLI 25w.//0.046:477:59//Z74867

[11020] F-PLACE1008129//Human Chromosome 15q26.1 PAC clone pDJ290i21 containing fur, fes, and alpha mannosidase 11x genes, WORKING DRAFT SEQUENCE, 9 unordered pieces.//0.0068:446:57//AC004586

[11021] F-PLACE1008132//Human DNA sequence *** SEQUENCING IN PROGRESS *** from clone 316D5, WORKING DRAFT SEQUENCE.//3.6e-20:111:93//Z82199

[11022] F-PLACE1008177//Mouse mRNA for meiosis-specific nuclear structural protein 1 (MNS 1), complete cds.//2.5e-88:866:73//D 14849

[11023] F-PLACE1008181//Human DNA sequence *** SEQUENCING IN PROGRESS *** from clone 159A1, WORKING DRAFT SEQUENCE.//0.0033:727:56//AL034397

[11024] F-PLACE1008198//HS_{—}3073_A1_C06_MR CIT Approved Human Genomic Sperm Library D Homo sapiens genomic clone Plate=3073 Col=11 Row=E, genomic survey sequence.//2.3e-12:94:92//AQ171450

[11025] F-PLACE1008201//Homo sapiens clone RG 140B 11, WORKING DRAFT SEQUENCE, 1 unordered pieces.//2.5e-162:791:97//AC005069

[11026] F-PLACE1008209

[11027] F-PLACE1008231//Mouse testis-specific protein mRNA, complete cds.//0.65:174:66//M26332

[11028] F-PLACE1008244//CIT-HSP-2337B4.TR CIT-HSP Homo sapiens genomic clone 2337B4, genomic survey sequence.//6.7e-28:165:95//AQ039317

[11029] F-PLACE1008273//B. primigenius mRNA for coat protein gamma-cop.//2.8e-71:709:71//X92987

[11030] F-PLACE1008275//D. discoideum actin A-13 gene, 5′ flank.//0.12:131:64//M29123

[11031] F-PLACE1008280//Homo sapiens Xp22-175-176 BAC GSHB-484017 (Genome Systems Human BAC Library) complete sequence.//0.01:96:73//AC005913

[11032] F-PLACE1008309//Rattus norvegicus putative four repeat ion channel mRNA, complete cds.//8.2e-86:672:77//AF078779

[11033] F-PLACE1008329//HS_{—}2027_A1_C06_T7 CIT Approved Human Genomic Sperm Library D Homo sapiens genomic clone Plate=2027 Col=1 I Row=E, genomic survey sequence.//8.7e-09:116:81//AQ244432

[11034] F-PLACE1008330//Homo sapiens chromosome 19, cosmid F21431, complete sequence.//2.2e-141:670:98//AC005176

[11035] F-PLACE1008331//Homo sapiens clone DJ241P17, WORKING DRAFT SEQUENCE, 7 unordered pieces.//2.1e-27:157:78//AC005000

[11036] F-PLACE1008356//Homo sapiens mRNA for KIAA0679 protein, partial cds.//1.1e-137:659:98//AB014579

[11037] F-PLACE1008368//CIT-HSP-2311C9.TR CIT-HSP Homo sapiens genomic clone 2311C9, genomic survey sequence.//7.1e-08:398:60//AQ016352

[11038] F-PLACE1008369//HS_{—}2251_B1_A02_MF CIT Approved Human Genomic Sperm Library D Homo sapiens genomic clone Plate=2251 Col=3 Row=B, genomic survey sequence.//2.1e-35:217:93//AQ066512

[11039] F-PLACE1008392//Homo sapiens chromosome 17, clone hRPK.136_H119, complete sequence.//1.4e-11:403:64//AC005856

[11040] F-PLACE1008398//Human DNA sequence *** SEQUENCING IN PROGRESS *** from clone 215D1 I, WORKING DRAFT SEQUENCE.//3.7e-144:681:99//AL034417

[11041] F-PLACE1008401//*** SEQUENCING IN PROGRESS *** Homo sapiens chromosome 4, BAC clone C0366H07; HTGS phase 1, WORKING DRAFT SEQUENCE, 28 unordered pieces.//2.8e-45:257:96//AC004604

[11042] F-PLACE1008402//Homo sapiens mRNA for p115, complete cds.//4.3e-148:711:98//D86326

[11043] F-PLACE1008405//Plasmodium falciparum 3D7 chromosome 12 PFYAC69 genomic sequence, WORKING DRAFT SEQUENCE, 4 unordered pieces.//0.089:672:56//AC004688

[11044] F-PLACE1008424

[11045] F-PLACE1008426//Homo sapiens genomic DNA of 8p21.3-p22 anti-oncogene of hepatocellular colorectal and non-small cell lung cancer, segment 7/11.//1.0e-88:331:84//AB020864

[11046] F-PLACE1008429//Chromosome 22q13 BAC Clone CIT987SK-384D8 complete sequence.//0.55:530:58//U62317

[11047] F-PLACE1008437//CIT-HSP-2376H4.TR CIT-HSP Homo sapiens genomic clone 2376H4, genomic survey sequence.//3.3e-78:349:94//AQ112479

[11048] F-PLACE1008455//HS_{—}2064_BI E09_MR CIT Approved Human Genomic Sperm Library D Homo sapiens genomic clone Plate=2064 Col=17 Row=J, genomic survey sequence.//4.7e-59:471:81//AQ246589

[11049] F-PLACE1008457//Homo sapiens chromosome 17, Neurofibromatosis 1 locus, complete sequence.//8.9e-43:307:73//AC004526

[11050] F-PLACE1008465//CIT-HSP-2163F24.TR CIT-HSP Homo sapiens genomic clone 2163F24, genomic survey sequence.//8.9e-41:210:99//B90014

[11051] F-PLACE1008488//Mus musculus mRNA for testis-specific protein kinase 1, complete cds.//0.00013:516:58//AB003494

[11052] F-PLACE1008524//Human DNA sequence *** SEQUENCING IN PROGRESS *** from clone 34B21, WORKING DRAFT SEQUENCE.//1.3e-161:778:98//AL031778

[11053] F-PLACE1008531//Homo sapiens wbscrl (WBSCR1) and replication factor C subunit 2 (RFC2) genes, complete cds.//1.1e-78:19:1:00//AF045555

[11054] F-PLACE1008532//Human DNA sequence *** SEQUENCING IN PROGRESS *** from clone 92N 15, WORKING DRAFT SEQUENCE.//3.8e-24:257:70//Z93097

[11055] F-PLACE1008533//Homo sapiens PAC clone DJ130HI6 from 22q12.1-qter, complete sequence.//1.0e-13:215:71//AC004997

[11056] F-PLACE1008568//Human DNA sequence from PAC 388N15 on chromosome Xq21.1 .//0.66:263:64//Z99571

[11057] F-PLACE1008584//Homo sapiens cosmid clone U39B3 from Xp22.1-22.2, complete sequence.//1.1e-19:315:68//U73023

[11058] F-PLACE1008603//Homo sapiens mRNA for KIAA0791 protein, complete cds.//1.2e-173:812:98//AB018334

[11059] F-PLACE1008621//Homo sapiens clone RG228D17, WORKING DRAFT SEQUENCE, 2 unordered pieces.//3.9e-09:198:71//AC005077

[11060] F-PLACE1008625//Homo sapiens chromosome 5, PAC clone 45L14 (LBNL H91), complete sequence.//0.68:568:59//AC005373

[11061] F-PLACE1008626//HS_{—}3221_A2_F03_T7 CIT Approved Human Genomic Sperm Library D Homo sapiens genomic clone Plate=3221 Col=6 Row=K, genomic survey sequence.//1.7e-13:147:82//AQ180967

[11062] F-PLACE1008627//Cricetulus griseus mRNA for Zn finger factor.//9.7e-98:586:88//Y12836

[11063] F-PLACE1008629//CIT-HSP-201214.TR CIT-HSP Homo sapiens genomic clone 201214, genomic survey sequence.//0.00085:203:66//B53732

[11064] F-PLACE1008630//Sequence 26 from patent WO9517522.//9.7e-05:97:80//A45356

[11065] F-PLACE1008643//Human mRNA for inter-alpha-trypsin inhibitor family heavy chain-related protein (IHRP), complete cds.//1.4e-23:299:64//D38595

[11066] F-PLACE1008650//Homo sapiens pleiotropic regulator 1 (PLRGI) mRNA, complete cds.//1.1e-133:622:99//AF044333

[11067] F-PLACE1008693//CIT-HSP-2346F2.TF CIT-HSP Homo sapiens genomic clone 2346F2, genomic survey sequence.//0.24:89:76//AQ060732

[11068] F-PLACE1008696//Homo sapiens NADH dehydrogenase-ubiquinone Fe-S protein 823 kDa subunit (NDUFS8) gene, nuclear gene encoding mitochondrial protein, complete cds.//1.4e-94:420:97//AF038406

[11069] F-PLACE1008715//CIT-HSP-2294K20.TR CIT-HSP Homo sapiens genomic clone 2294K20, genomic survey sequence.//2.1e-70:349:98//AQ007199

[11070] F-PLACE1008748//Arabidopsis thaliana chromosome I BAC Ti 4N5 genomic sequence, complete sequence.//0.14:347:59//AC004260

[11071] F-PLACE1008757//Homo sapiens Xp22 BAC GSHB 526D21 (Genome Systems Human BAC library) complete sequence.//7.9e-25:244:71//AC003037

[11072] F-PLACE1008790//Homo sapiens importin alpha 7 subunit mRNA, complete cds.//4.5e-120:503:97//AF060543

[11073] F-PLACE1008798//Human Chromosome 16 BAC clone CIT987SK-A-270G1, complete sequence.//0.00026:370:61//AF001549

[11074] F-PLACE1008807//CIT-HSP-2334B19.TF CIT-HSP Homo sapiens genomic clone 2334B19, genomic survey sequence.//3.3e-08:220:65//AQ036643

[11075] F-PLACE1008808//Homo sapiens exonuclease homolog RADI (RADI) mRNA, complete cds.//1.7e-120:470:97//AF030933

[11076] F-PLACE1008813//Rattus norvegicus rsec15 mRNA, complete cds.//2.8e-87:504:89//AF032668

[11077] F-PLACE1008851//Homo sapiens DNA sequence from PAC 163M9 on chromosome 1p35.1-p36.21. Contains protein synthesis factor (eIF-4C), DIF15SIA pseudogene, ESTs, STS, GSS, complete sequence.//4.0e-21:212:74//AL021920

[11078] F-PLACE1008854

[11079] F-PLACE1008867//Human DNA sequence from clone J428A131, WORKING DRAFT SEQUENCE.//4.7e-77:477:8411Z82209

[11080] F-PLACE1008887//Homo sapiens BAC clone NH0335J118 from 2, complete sequence.//3.4e-53:699:70//AC005539

[11081] F-PLACE1008902//Mouse G-alpha-13 protein mRNA, complete cds.//2.1e-06:164:68//M63660

[11082] F-PLACE1008920//Homo sapiens mRNA for KIAA0765 protein, partial cds.//6.4e-158:753:98//AB018308

[11083] F-PLACE1008925//Homo sapiens chromosome 16p11.2 BAC clone CIT987SK-A-180G2, WORKING DRAFT SEQUENCE, 5 unordered pieces.//0.00013:400:63//AC002042

[11084] F-PLACE1008934//Human DNA sequence *** SEQUENCING IN PROGRESS *** from clone 1104E15, WORKING DRAFT SEQUENCE.//7.4e-05:145:71//AL022312

[11085] F-PLACE1008941//Human zinc finger protein (ZNF141) mRNA, complete cds.//4.3e-41:282:87//LI 5309

[11086] F-PLACE1008947//Pseudorabies virus with upstream and downsteam sequences.//5.9e-15:710:60//M34651

[11087] F-PLACE1009020//HS_{—}3051_B1_H01_MR CIT Approved Human Genomic Sperm Library D Homo sapiens genomic clone Plate=3051 Col=1 Row=P, genomic survey sequence.//1.9e-21:167:86//AQ253727

[11088] F-PLACE1009027//Human DNA sequence from clone 914P14 on chromosome Xq23 Contains calpain-like protease gene, DCX (doublecortin) ESTs, CA repeat, GSS, complete sequence.//4.1e-152:763:97//AL031117

[11089] F-PLACE1009039//HS 2034_A2_F08 T7 CIT Approved Human Genomic Sperm Library D Homo sapiens genomic clone Plate=2034 Col=16 Row=K, genomic survey sequence.//0.17:252:59//AQ230137

[11090] F-PLACE1009045//HS_{—}3185_B2_B03_T7 CIT Approved Human Genomic Sperm Library D Homo sapiens genomic clone Plate=3185 Col=6 Row=D, genomic survey sequence.//1.9e-34:260:86//AQ172861

[11091] F-PLACE1009048//Pig pituitary glycoprotein hormone alpha subunit gene, 5′flank and exon 1.//4.7e-70:463:80//D00766

[11092] F-PLACE1009050//Homo sapiens 12q13.1 PAC RPCI3-197B17 (Roswell Park Cancer Institute Human PAC library) complete sequence.//0.63:280:61//AC004241

[11093] F-PLACE1009060//Mus musculus mRNA for Alix (ALG-2-interacting protein X), complete CDS.//5.9e-113:725:85//AJ005073

[11094] F-PLACE1009090//Human DNA sequence *** SEQUENCING IN PROGRESS *** from clone 1045J21, WORKING DRAFT SEQUENCE.//9.1e-27:222:84//AL021919

[11095] F-PLACE1009091//Homo sapiens clone DJ0968116, complete sequence.//0.027:630:58//AC006016

[11096] F-PLACE1009094

[11097] F-PLACE1009099//Mouse zinc finger protein (mkr4) mRNA, partial cds.//2.1e-85:726:76//M36515

[11098] F-PLACE1009110

[11099] F-PLACE1009111//Human DNA sequence *** SEQUENCING IN PROGRESS *** from clone 138B7, WORKING DRAFT SEQUENCE.//6.0e-12:362:64//Z98752

[11100] F-PLACE1009113//Homo sapiens X-ray repair cross-complementing protein 3 (XRCC3) mRNA, complete cds.//3.4e-138:671:97//AF035586

[11101] F-PLACE1009130//Human mRNA for KIAA0032 gene, complete cds.//3.6e-23:718:59//D25215

[11102] F-PLACE1009150//Homo sapiens *** SEQUENCING IN PROGRESS ***, WORKING DRAFT SEQUENCE.//6.1e-142:684:98//AJ011929

[11103] F-PLACE1009155//Homo sapiens genomic DNA, chromosome 21q11.1, segment 2/28, WORKING DRAFT SEQUENCE.//4.3e-36:227:77//AP000031

[11104] F-PLACE1009158//H. sapiens genomic sequence for ERCC2 gene 3′region involved in DNA excision repair.//11.0:173:60//X52222

[11105] F-PLACE1009166

[11106] F-PLACE1009172//Human BAC clone 7E 17 from 12q, complete sequence.//4.0e-35:257:85//AC002070

[11107] F-PLACE1009174//Homo sapiens Xp22 bins 16-17 BAC GSHB-53117 (Genome Systems Human BAC Library) complete sequence.//2.9e-19:288:72//AC004805

[11108] F-PLACE1009183//Arabidopsis thaliana genomic DNA, chromosome 5, P1 clone: MHJ24, complete sequence.//0.053:388:60//AB008266

[11109] F-PLACE1009186//Rattus norvegicus fracture callus I (FxCl) mRNA, complete cds.//1.8e-50:317:89//AF061242

[11110] F-PLACE1009190//RPCI11-81N5.TJ RPCII 1 Homo sapiens genomic clone R-8 IN5, genomic survey sequence.//0.91:114:67//AQ281881

[11111] F-PLACE1009200//CITBI-EI-2509J16.TF CITBI-EI Homo sapiens genomic clone 2509J16, genomic survey sequence.//2.8e-44:175:83//AQ262198

[11112] F-PLACE1009230//H. sapiens gene for pregnancy specific beta-1 glycoprotein.//1.1e-106:495:88//X63203

[11113] F-PLACE1009246//HS_{—}3058_B1_A06_MF CIT Approved Human Genomic Sperm Library D Homo sapiens genomic clone Plate=3058 Col=11 Row=B, genomic survey sequence.//0.10:175:68//AQ185945

[11114] F-PLACE1009298//Mus musculus maternal-embryonic 3 (Mem3) mRNA, complete cds.//1.8e-94:575:89//U47024

[11115] F-PLACE1009308//Human clone mcag32 chromosome 7 CTG repeat region.//0.0017:350:62//U23862

[11116] F-PLACE1009319//Homo sapiens post-synaptic density protein 95 (PSD95) mRNA, complete cds.//3.0e-06:411:59//U83192

[11117] F-PLACE1009328//Human DNA sequence *** SEQUENCING IN PROGRESS *** from clone 191 P20, WORKING DRAFT SEQUENCE.//5.7e-138:830:86//AL034399

[11118] F-PLACE1009335//Human (lambda) DNA for immunoglobin light chain.//0.071:253:62//D87015

[11119] F-PLACE1009338//RPCI11-74N24.TV RPCI11 Homo sapiens genomic clone R-74N24, genomic survey sequence.//2.4e-34:180:100//AQ268811

[11120] F-PLACE1009368

[11121] F-PLACE1009375

[11122] F-PLACE1009388//Human DNA sequence *** SEQUENCING IN PROGRESS *** from clone 1014D13, WORKING DRAFT SEQUENCE.//2.0e-37:288:84//AL022311

[11123] F-PLACE1009398//Human DNA binding protein (HPF2) mRNA, complete cds.//4.3e-78:730:74//M27878

[11124] F-PLACE1009404//SmD homolog [mice, liver, mRNA Partial, 199 nt].//0.16:95:71//S71494

[11125] F-PLACE1009410//Homo sapiens chromosome 17, clone hRPK.142_H_{—}19, complete sequence.//1.6e-150:701:99//AC005919

[11126] F-PLACE1009434//Mus musculus clone OST431, genomic survey sequence.//2.9e-73:442:88//AF046700

[11127] F-PLACE1009443//Mycobacterium tuberculosis H37Rv complete genome; segment 148/162.//0.012:582:56//AL022022

[11128] F-PLACE1009444//Homo sapiens phosphatidylinositol 4-kinase 230 (p14K230) mRNA, complete cds.//4.6e-21:146:93//AF012872

[11129] F-PLACE1009459//Mus musculus clone OST9217, genomic survey sequence.//2.9e-31:264:81//AF046660

[11130] F-PLACE1009468//Sequence 1 from patent U.S. Pat. No. 5,580,968.//1.9e-83:567:84//I30536

[11131] F-PLACE1009476//Homo sapiens Chromosome 16 BAC clone CIT987SK-A-67A1, complete sequence.//1.9e-142:704:97//AC004531

[11132] F-PLACE1009477//Human 11p14.3 PAC clone pDJ939 m16, complete sequence.//2.2e-09:235:68//AC004601

[11133] F-PLACE1009493//Human Chromosome 16 BAC clone CIT987SK-A-363E6, complete sequence.//2.9e-83:171:92//U91321

[11134] F-PLACE1009524//Homo sapiens DNA sequence from PAC 63G5 on chromosome 22q12.3-13.1. Contains part of a gene for a human SEC7 homolog B2-1 (cytohesin-2, Arno, ARF exchange factor) LIKE protein, an unknown gene and a gene coding for a Leucine rich protein. Contains ESTs, STSs and GSSs, complete sequence.//3.8e-69:175:92//Z94160

[11135] F-PLACE1009539//Mus musculus synaptojanin 2 isoform alpha mRNA, complete cds.//7.0e-26:237:78//AF041862

[11136] F-PLACE1009542//Human DNA sequence from clone 1039K5 on chromosome 22q12.3-13.2 Contains gene similar to PICKI perinuclear binding protein, gene similar to monocarboxylate transporter (MCT3), ESTs, STS, GSS and a CpG island, complete sequence.//3.1e-10:126:79//AL031587

[11137] F-PLACE1009571//RPCII 1-60K12.TK RPCII 1 Homo sapiens genomic clone R-60K12, genomic survey sequence.//1.4e-05:68:91//AQ195869

[11138] F-PLACE1009581

[11139] F-PLACE1009595//Homo sapiens chromosome 5, P1 clone 1029A7 (LBNL H15), complete sequence.//6.6e-19:309:70//AC003959

[11140] F-PLACE1009596//Rattus norvegicus platelet-activating factor acetylhydrolase beta subunit (PAF-AH beta) gene, complete cds.//9.0e-09:485:59//AF016049

[11141] F-PLACE1009607//Human DNA sequence *** SEQUENCING IN PROGRESS *** from clone 409J21, WORKING DRAFT SEQUENCE.//4.9e-43:714:66//Z83824

[11142] F-PLACE1009613//Plasmodium falciparum 3D7 chromosome 12 PFYAC293 genomic sequence, WORKING DRAFT SEQUENCE, 9 unordered pieces.//0.017:655:57//AC004157

[11143] F-PLACE1009621

[11144] F-PLACE1009622//HS-1016-B2-E08-MF.abi CIT Human Genomic Sperm Library C Homo sapiens genomic clone Plate=CT 791 Col=16 Row=J, genomic survey sequence.//2.7e-15:100:98//B33248

[11145] F-PLACE1009637//Plasmodium falciparum 3D7 chromosome 12 PFYAC492 genomic sequence, WORKING DRAFT SEQUENCE, 5 unordered pieces.//0.63:130:67//AC005308

[11146] F-PLACE1009639//S. pombe chromosome II cosmid c24E9.//0.86:509:58//AL021816

[11147] F-PLACE1009659//Homo sapiens mRNA for KIAA0587 protein, complete cds.//1.4e-171:816:98//AB011159

[11148] F-PLACE1009665//Homo sapiens chromosome 17, clone HClT462L7, complete sequence.//3.4e-67:437:87//AC005177

[11149] F-PLACE1009670//Homo sapiens genethonin 1 mRNA, complete cds.//2.5e-147:701:98//AF062534

[11150] F-PLACE1009708//Homo sapiens clone DJ0935KI6, complete sequence.//1.5e-98:228:100//AC006011

[11151] F-PLACE1009721//Human Cosmid g0771a222 from 7q31.3, complete sequence.//2.2e-130:736:91//AC000109

[11152] F-PLACE1009731//M. musculus mRNA for immunity associated protein 38.//1.1e-13:311:64//Y08026

[11153] F-PLACE1009763//Homo sapiens UBA3 (UBA3) mRNA, complete cds.//4.2e-125:602:98//AF046024

[11154] F-PLACE1009794

[11155] F-PLACE1009798//Human DNA sequence from clone 1189B24 on chromosome Xq25-26.3. Contains NADH-Ubiquinone Oxidoreductase MLRQ subunit (EC 1.6.5.3, EC 1.6.99.3, CI-MLRQ), Tubulin Beta and Proto-oncogene Tyrosine-protein Kinase FER (EC 2.7.1.112, P94-FER, C-FER, TYK3) pseudogenes, and part of a novel gene similar to hypothetical proteins S. pombe C22F3.14C and C. elegans C16A3.8. Contains ESTs, an STS and GSSs, complete sequence.//1.3e-73:271:84//AL030996

[11156] F-PLACE1009845

[11157] F-PLACE1009861//B. tauris cathepsin B mRNA, 3′ end.//0.00023:147:65//M64620

[11158] F-PLACE1009879//Human DNA sequence *** SEQUENCING IN PROGRESS * from clone 159A1, WORKING DRAFT SEQUENCE.//4.9e-27:725:63//AL034397

[11159] F-PLACE1009886//Human DNA sequence *** SEQUENCING IN PROGRESS * from clone 167A 19, WORKING DRAFT SEQUENCE.//8.2e-12:135:82//AL031427

[11160] F-PLACE1009888//F14G3-T7 IGF Arabidopsis thaliana genomic clone F14G3, genomic survey sequence.//0.0044:232:60//AQ251431

[11161] F-PLACE1009908//S. pombe chromosome I cosmid c3F10.//1.5e-19:559:59//Z69369

[11162] F-PLACE1009921//Homo sapiens cosmid clone HDAB (I S149) insert DNA, complete cosmid.//5.9e-48:304:87//M63005

[11163] F-PLACE1009924//Homo sapiens chromosome 16p 11.2 BAC clone CIT987SK-201104, WORKING DRAFT SEQUENCE, 4 unordered pieces.//2.4e-51:481:78//AC004529

[11164] F-PLACE1009925//nbxb0027C22r CUGI Rice BAC Library Oryza sativa genomic clone nbxb0027C22r, genomic survey sequence.//0.98:220:67//AQ272066

[11165] F-PLACE1009935//Sequence 16 from patent U.S. Pat. No. 5,552,281.//0.030:152:67//I25655

[11166] F-PLACE1009947//Homo sapiens clone GS096J14, WORKING DRAFT SEQUENCE, 3 unordered pieces.//2.6e-12:322:67//AC006026

[11167] F-PLACE1009971

[11168] F-PLACE1009992//HS_{—}3178_B1_F04_T7 CIT Approved Human Genomic Sperm Library D Homo sapiens genomic clone Plate=3178 Col=7 Row=L, genomic survey sequence.//4.9e-23:142:95//AQ150311

[11169] F-PLACE1009995//Caenorhabditis elegans cosmid COlA2, complete sequence.//0.00019:231:64//Z81029

[11170] F-PLACE1009997//Rattus norvegicus A-kinase anchoring protein AKAP 220 mRNA, complete cds.//7.9e-87:552:80//U48288

[11171] F-PLACE1010023

[11172] F-PLACE1010031//Human DNA sequence from clone 30M3 on chromosome 6p22.1-22.3. Contains three novel genes, one similar to C. elegans Y63D3A.4 and one similar to (predicted) plant, worm, yeast and archaea bacterial genes, and the first exon of the KIAA0319 gene. Contains ESTs, GSSs and putative CpG islands, complete sequence.//6.9e-101:181:98//AL031775

[11173] F-PLACE1010053//M. musculus Spnr mRNA for RNA binding protein.//2.3e-136:689:95//X84692

[11174] F-PLACE1010069//Human DNA sequence *** SEQUENCING IN PROGRESS *** from clone 212A2, WORKING DRAFT SEQUENCE.//0.0090:383:60//Z95114

[11175] F-PLACE1010074//Homo sapiens sorting nexin 2 (SNX2) mRNA, complete cds.//1.8e-166:792:98//AF065482

[11176] F-PLACE1010076//Mouse mRNA for TGF-beta type I receptor, complete cds.//7.5e-13:203:77//D25540

[11177] F-PLACE1010083//Homo sapiens mRNA for KIAA0456 protein, partial cds.//3.0e-152:727:98//AB007925

[11178] F-PLACE1010089//HS_{—}3111_A1_E08_T7 CIT Approved Human Genomic Sperm Library D Homo sapiens genomic clone Plate=3111 Col=15 Row=I, genomic survey sequence.//4.8e-07:124:78//AQ101268

[11179] F-PLACE1010096//R. norvegicus mRNA for 100 kDa protein.//1.2e-108:700:85//X64411

[11180] F-PLACE1010102//Plasmodium falciparum 3D7 chromosome 12 PFYAC357 genomic sequence, WORKING DRAFT SEQUENCE, 7 unordered pieces.//2.1e-07:476:60//AC005506

[11181] F-PLACE1010105//Homo sapiens actin binding protein MAYVEN mRNA, complete cds.//3.8e-25:728:60//AF059569

[11182] F-PLACE1010106//Human DNA sequence from PAC 127B14 on chromosome Xq22.//6.5e-25:488:6311Z93928

[11183] F-PLACE1010134//S. pombe chromosome I cosmid c29B 12.//1.9e-13:238:67//Z99164

[11184] F-PLACE1010148//Homo sapiens partial human cDNA (660 bp).//4.8e-83:409:98//AJ222636

[11185] F-PLACE1010152//CIT-HSP-2381F24.TF CIT-HSP Homo sapiens genomic clone 2381F24, genomic survey sequence.//1.5e-28:163:98//AQ196757

[11186] F-PLACE1010181//Homo sapiens PAC clone DJ1139101 from Xq23, complete sequence.//2.4e-15:197:72//AC004973

[11187] F-PLACE1010194//Ictalurus punctatus tumor supressor p53 mRNA, complete cds.//3.0e-14:181:74//AF074967

[11188] F-PLACE1010202//Homo sapiens mRNA for MBNL protein.//1.2e-27:509:66//Y 13829

[11189] F-PLACE1010231//Human DNA sequence *** SEQUENCING IN PROGRESS *** from clone 287G14, WORKING DRAFT SEQUENCE.//2.3e-101:194:95//AL033377

[11190] F-PLACE1010261//Homo sapiens mRNA for KIAA0448 protein, complete cds.//5.8e-145:693:97//AB007917

[11191] F-PLACE1010270//Plasmodium falciparum 3D7 chromosome 12 PFYAC588 genomic sequence, WORKING DRAFT SEQUENCE, 2 unordered pieces.//2.1e-05:347:60//AC004710

[11192] F-PLACE1010274//Caenorhabditis elegans cosmid COIA2, complete sequence.//0.00040:231:64//Z81029

[11193] F-PLACE1010293//Homo sapiens chromosome 2 PAC RPCI3-417E16 (Roswell Park Cancer Institute Human PAC library) complete sequence.//6.5e-25:344:70//AC004464

[11194] F-PLACE1010310//Homo sapiens DNA sequence from PAC 329E20 on chromosome 1p34.4-36.13. Contains endothelin-converting-enzyme 1 (ECE-1), EST, STS, CA repeat, complete sequence.//3.5e-10:185:67//AL031005

[11195] F-PLACE1010321//Human DNA sequence from clone 299D3 on chromosome 22q13.3, complete sequence.//0.010:524:58//Z84468

[11196] F-PLACE1010324//CIT-HSP-2335J21.TR CIT-HSP Homo sapiens genomic clone 2335J21, genomic survey sequence.//9.1e-90:448:97//AQ041837

[11197] F-PLACE1010329//Apis mellifera ligustica complete mitochondrial genome.//2.8e-08:384:64//L06178

[11198] F-PLACE1010341//HS-1047-A2-C04-MR.abi CIT Human Genomic Sperm Library C Homo sapiens genomic clone Plate=CT 830 Col=8 Row=E, genomic survey sequence.//4.1e-21:141:92//B38252

[11199] F-PLACE1010362//Mycobacterium tuberculosis H37Rv complete genome; segment 155/162.//0.94:398:57//AL022121

[11200] F-PLACE1010364//Caenorhabditis elegans DNA *** SEQUENCING IN PROGRESS *** from clone Y102G3, WORKING DRAFT SEQUENCE.//0.11:404:56//AL020985

[11201] F-PLACE1010383//Homo sapiens chromosome 17, clone hCIT.186_H_{—}2, complete sequence.//0.066:88:76//AC004675

[11202] F-PLACE1010401//CIT-HSP-2367K17.TR CIT-HSP Homo sapiens genomic clone 2367K17, genomic survey sequence.//2.4e-71:454:88//AQ076825

[11203] F-PLACE1010481//Bos taurus C5-glucuronyl epimerase mRNA, partial cds.//7.5e-134:722:93//AF003927

[11204] F-PLACE1010491//Homo sapiens Cre binding protein-like 2 mRNA, complete cds.//2.2e-150:702:99//AF039081

[11205] F-PLACE1010492

[11206] F-PLACE1010522//Homo sapiens cosmid LM1937 from Xq28.//0.022:405:60//U82695

[11207] F-PLACE1010529//Sequence 1 from patent U.S. Pat. No. 5,776,717.//2.9e-145:684:98//AR016417

[11208] F-PLACE1010547//Human DNA sequence from clone 790B6 on chromosome 20 p11.22-12.2. Contains STSs and GSSs, complete sequence.//1.0:283:61//AL031677

[11209] F-PLACE1010562//RPCII 1-65116.TK RPCII 1 Homo sapiens genomic clone R-65116, genomic survey sequence.//0.017:216:67//AQ200831

[11210] F-PLACE1010579//Homo sapiens full-length insert cDNA Y123D12.//3.9e-19:147:89//AF075014

[11211] F-PLACE1010580//Mouse RNA helicase and RNA-dependent ATPase from the DEAD box family mRNA, complete cds.//6.4e-96:559:89//L25125

[11212] F-PLACE1010599//Homo sapiens peroxisomal membrane anchor protein HsPex14p (PEX14) mRNA, complete cds.//3.1e-146:707:97//AF045186

[11213] F-PLACE1010616//Plasmodium falciparum 3D7 chromosome 12 PFYAC492 genomic sequence, WORKING DRAFT SEQUENCE, 5 unordered pieces.//0.045:454:59//AC005308

[11214] F-PLACE1010622//Plasmodium falciparum MAL3P2, complete sequence.//9.1e-07:378:60//AL034558

[11215] F-PLACE1010624//Streptomyces coelicolor cosmid 5A7.//1.4e-05:518:61//AL031107

[11216] F-PLACE101628//Homo sapiens clone DJ0647C14, WORKING DRAFT SEQUENCE, 21 unordered pieces.//5.0e-137:675:97/HAC004846

[11217] F-PLACE1010629//Homo sapiens Chromosome 16 BAC clone CIT987SK-A-259H10, complete sequence.//2.5e-17:187:80//AC004682

[11218] F-PLACE1010630//Arabidopsis thaliana genomic DNA, chromosome 5, TAC clone: K21P3, complete sequence.//0.21:159:64//AB016872

[11219] F-PLACE1010631//Homo sapiens clone RG 140BI 1, WORKING DRAFT SEQUENCE, I unordered pieces.//1.2e-144:720:97//AC005069

[11220] F-PLACE1010661

[11221] F-PLACE1010662//Arabidopsis thaliana DNA chromosome 4, BAC clone F7J7 (ESSA project).//0.90:257:61//AL021960

[11222] F-PLACE1010702//Human repressor transcriptional factor (ZNF85) mRNA, complete cds.//3.3e-73:697:74//U35376

[11223] F-PLACE1010714//Human Chromosome 15q11-q13 PAC clone pDJ778a2, complete sequence.//0.010:447:59//AC004583

[11224] F-PLACE1010720//Mouse TPA-induced TIS11 mRNA.//2.0e-86:535:88//X14678

[11225] F-PLACE1010739//HS_{—}2013_B2_B10_MR CIT Approved Human Genomic Sperm Library D Homo sapiens genomic clone Plate=2013 Col=20 Row=D, genomic survey sequence.//5.7e-87:435:97//AQ235864

[11226] F-PLACE1010743//R. norvegicus mRNA for myr5.//1.7e-87:582:85//X77609

[11227] F-PLACE1011761//Homo sapiens chromosome 17, clone hRPK.294_J_{—}22, complete sequence.//4.7e-45:235:99//AC005921

[11228] F-PLACE1010771//M. musculus HCNGP mRNA.//1.6e-135:801:88//X68061

[11229] F-PLACE1010786//Plasmodium falciparum DNA *** SEQUENCING IN PROGRESS * from contig 4-15, complete sequence.//0.35:334:60//AL010221

[11230] F-PLACE1010800//RPCI11-79H17.TV RPCII 1 Homo sapiens genomic clone R-79H17, genomic survey sequence.//5.8e-18:168:82//AQ284252

[11231] F-PLACE1010802//Human Chromosome X clone bWXD531, complete sequence.//1.6e-30:693:63//AC004384

[11232] F-PLACE1010811//RPCI11-S1N5.TK RPCI11 Homo sapiens genomic clone R-51N5, genomic survey sequence.//8.3e-11:142:78//AQ052380

[11233] F-PLACE1010833//Human DNA sequence *** SEQUENCING IN PROGRESS *** from clone 467K16, WORKING DRAFT SEQUENCE.//7.3e-40:147:88//AL031283

[11234] F-PLACE1010856//M. musculus mRNA for utrophin.//7.3e-17:150:86//Y12229

[11235] F-PLACE1010857//Homo sapiens genomic DNA of 8p21.3-p22 anti-oncogene of hepatocellular colorectal and non-small cell lung cancer, segment 11/11.//1.4e-94:422:95//AB020868

[11236] F-PLACE1010870//M. musculus mRNA for ZT3 zinc finger factor.//1.3e-93:530:90//Z67747

[11237] F-PLACE1010877//Homo sapiens mRNA for KIAA0610 protein, partial cds.//1.1e-147:694:98//AB011182

[11238] F-PLACE1010891

[11239] F-PLACE1010896//Mouse BAC mbac20 from 14D1-D2 (T-Cell Receptor Alpha Locus), complete sequence.//3.9e-26:394:68//AC003997

[11240] F-PLACE1010900

[11241] F-PLACE1010916//HS_{—}2242_A1_C04_MF CIT Approved Human Genomic Sperm Library D Homo sapiens genomic clone Plate=2242 Col=7 Row=E, genomic survey sequence.//1.0e-78:391:97//AQ146687

[11242] F-PLACE1010917

[11243] F-PLACE1010925//Plasmodium falciparum 3D7 chromosome 12 PFYAC69 genomic sequence, WORKING DRAFT SEQUENCE, 4 unordered pieces.//0.11:629:56//AC004688

[11244] F-PLACE1010926//Homo sapiens mRNA for KIAA0554 protein, partial cds.//9.5e-138:653:98//AB011126

[11245] F-PLACE1010942//Homo sapiens intersectin short form mRNA, complete cds.//5.6e-90:437:98//AF064243

[11246] F-PLACE1010944//Homo sapiens full-length insert cDNA clone ZD38E12.//1.4e-09:208:68//AF086247

[11247] F-PLACE1010947

[11248] F-PLACE1010954//CIT-HSP-2283D9.TR CIT-HSP Homo sapiens genomic clone 2283D9, genomic survey sequence.//2.1e-29:190:91//B98965

[11249] F-PLACE1010960//Plasmodium falciparum DNA *** SEQUENCING IN PROGRESS * from contig 4-52, complete sequence.//0.00074:421:60//AL010226

[11250] F-PLACE1010965//CIT-HSP-2386K24.TF.1 CIT-HSP Homo sapiens genomic clone 2386K24, genomic survey sequence.//1.8e-84:412:99//AQ240696

[11251] F-PLACE1011026//Plasmodium falciparum DNA *** SEQUENCING IN PROGRESS * from contig 3-20, complete sequence.//0.00037:257:64//AL008972

[11252] F-PLACE1011032//Homo sapiens chromosome 5, BAC clone 118L13 (LBNL H176), complete sequence.//3.8e-06:315:65//AC005348

[11253] F-PLACE1011041//Human Fas-ligand associated factor 3 mRNA, partial cds.//1.5e-56:286:98//U70669

[11254] F-PLACE1011046//Rat phospholipase C-1 mRNA, complete cds.//1.3e-24:278:76//M20636

[11255] F-PLACE1011054//Human DNA sequence *** SEQUENCING IN PROGRESS * from clone 981 L23, WORKING DRAFT SEQUENCE.//3.8e-27:196:84//AL031686

[11256] F-PLACE1011056//Ovis aries bactinecin 11 (Bacd 1) gene, exon 4, and complete cds.//5.4e-06:182:67//U77049

[11257] F-PLACE1001057//protein kinase PRK2 [human, DX3 B-cell myeloma cell line, mRNA, 3255 nt].//3.2e-31:169:100//S75548

[11258] F-PLACE1011090//Human DNA sequence *** SEQUENCING IN PROGRESS *** from clone 998H6, WORKING DRAFT SEQUENCE.//5.1e-80:479:89//AL031687

[11259] F-PLACE1010109//Rattus norvegicus nuclear-encoded mitochondrial elongation factor G mRNA, complete cds.//2.3e-24:192:84//L14684

[11260] F-PLACE1001114//S. cerevisiae chromosome XI reading frame ORF YKRO24c.//1.4e-14:346:60//Z28249

[11261] F-PLACE1011133//T7E9-T7.1 TAMU Arabidopsis thaliana genomic clone T7E9, genomic survey sequence.//0.010:345:60//B19698

[11262] F-PLACE1010143//CIT-HSP-2375J10.TR CIT-HSP Homo sapiens genomic clone 2375J10, genomic survey sequence.//0.00013:95:76//AQ109305

[11263] F-PLACE1011160//Homo sapiens PAC clone DJO808AO1 from 7q21.1-q31.1, complete sequence.//3.7e-11:692:87//AC004893

[11264] F-PLACE1010165//H. sapiens galactokinase (GK2) mRNA, complete cds.//8.4e-31:194:92//M84443

[11265] F-PLACE1011185//Homo sapiens Chromosome 16 BAC clone CIT987SK-A-249B 10, complete sequence.//3.1e-43:447:72//AC002288

[11266] F-PLACE1011203//Homo sapiens chromosome 18q11 beta-1,4-galactosyltransferase mRNA, complete cds.//3.3e-124:584:99//AF038664

[11267] F-PLACE1011214//HS_{—}2046_A2_B00_MR CIT Approved Human Genomic Sperm Library D Homo sapiens genomic clone Plate=2046 Col=2 Row=C, genomic survey sequence.//2.0e-39:346:81//AQ305965

[11268] F-PLACE1011219

[11269] F-PLACE1011221//CITBI-El-2513F18.TR CITB1-E1 Homo sapiens genomic clone 2513F18, genomic survey sequence.//2.4e-20:119:100//AQ279801

[11270] F-PLACE1011229//Homo sapiens mRNA for KIAA0529 protein, partial cds.//4.4e-146:675:99//AB010

[11271] F-PLACE1111263//Homo sapiens BAC clone GS166A23 from 7p21, complete sequence.//1.7e-42:212:84//AC005014

[11272] F-PLACE1011273//Caenorhabditis elegans DNA *** SEQUENCING IN PROGRESS *** from clone Y37D8, WORKING DRAFT SEQUENCE.//1.0:214:60//Z92819

[11273] F-PLACE0111291//RPCII 1-16P9.TP RPCI-11 Homo sapiens genomic clone RPCI-11-16P9, genomic survey sequence.//8.0e-08:66:98//B81770

[11274] F-PLACE1011296//Homo sapiens chromosome 16, cosmid clone 443G8 (LANL), complete sequence.//0.027:135:67//AC004647

[11275] F-PLACE1011310//H. sapiens CpG island DNA genomic Mse1 fragment, clone 53c10, reverse read cpg53c10.rt1b.//1.4e-05:57:100//Z61496

[11276] F-PLACE1011325//Human immunodeficiency virus type 1 (D9) proviral structural capsid protein (gag) gene, partial cds.//0.077:193:60//L02290

[11277] F-PLACE1011332//Homo sapiens N-acetylglucosamine-phosphate mutase mRNA, complete cds.//3.1e-150:699:99//AF102265

[11278] F-PLACE1011340//Homo sapiens chromosome 17, clone hRPK.388_F_{—}14, complete sequence.//2.4e-38:186:83//AC005375

[11279] F-PLACE1011371//Mus musculus PK-120 precursor (itih-4) mRNA, complete cds.//6.0e-35:689:63//AF023919

[11280] F-PLACE1011375//Mus musculus Kv3.4 gene, exon 4.//6.0e-88:584:86//AJ010310

[11281] F-PLACE1011399//paramecium species 7,325 mt dna dimer: replication init. region.//0.00011:255:63//K00919

[11282] F-PLACE1011419//Homo sapiens chromosome 21 PAC LLNLP704G1150Q13.//0.067:337:62//AJ006996

[11283] F-PLACE1011433//Homo sapiens mRNA for KIAA0530 protein, partial cds.//4.6e-157:743:98//AB011102

[11284] F-PLACE1011452//Homo sapiens *** SEQUENCING IN PROGRESS ***, WORKING DRAFT SEQUENCE.//1.1e-53:557:73//AJ011929

[11285] F-PLACE1011465//Homo sapiens Chromosome 16 BAC clone CIT987SK-A-248F7, complete sequence.//3.5e-71:498:80//AC004605

[11286] F-PLACE1011472//Homo sapiens mRNA for KIAA0712 protein, complete cds.//4.8e-151:703:99//AB018255

[11287] F-PLACE1011477//Homo sapiens sorting nexin 2 (SNX2) mRNA, complete cds.//5.2e-145:675:99//AF065482

[11288] F-PLACE1011492//Ray (T. californica) acetylcholine receptor beta-subunit mRNA.//1.0:448:59//J00964

[11289] F-PLACE1011503

[11290] F-PLACE1011520//Homo sapiens clone DJ1119N05, complete sequence.//3.8e-147:692:99//AC004968

[11291] F-PLACE1011563//R. norvegicus mRNA for leucocyte common antigen-related protein (3941 bp).//0.00036:296:61//X83546

[11292] F-PLACE1011567//Homo sapiens PAC clone DJ 1164K10 from 7p21-p22, complete sequence//1.1e-38:315:82//AC004984

[11293] F-PLACE1011576//Homo sapiens hematopoietic cell derived zinc finger protein mRNA, complete cds.//1.3e-65:268:86//AF054180

[11294] F-PLACE1011586//Homo sapiens chromosome 17, clone HRPC890E16, complete sequence.//2.0e-82:188:96//AC004477

[11295] F-PLACE1011635//Homo sapiens chromosome 17, clone hRPK.214_{—}0_{—}1, complete sequence.//1.8e-153:752:97//AC005224

[11296] F-PLACE1011641//Homo sapiens T-cell receptor alpha delta locus from bases 501613 to 752736 (section 3 of 5) of the Complete Nucleotide Sequence.//4.8e-05:190:67//AE000660

[11297] F-PLACE1011643//Alcaligenes eutrophus phap gene.//0.16:466:59//X85729

[11298] F-PLACE1011646//Human DNA sequence *** SEQUENCING IN PROGRESS *** from clone 1013A10, WORKING DRAFT SEQUENCE.//9.1e-19:156:76//AL033383

[11299] F-PLACE1011649

[11300] F-PLACE1011650//Homo sapiens retinol dehydrogenase gene, complete cds.//6.4e-09:172:74//AF037062

[11301] F-PLACE1011664//D. melanogaster cm mRNA.//1.1e-52:650:68//X58374

[11302] F-PLACE1011675//Plasmodium falciparum 3D7 chromosome 12 PFYACB8-628 genomic sequence, WORKING DRAFT SEQUENCE, 9 unordered pieces.//0.11:443:58//AC005507

[11303] F-PLACE1011682//Human DNA sequence from clone 342B 1I on chromosome 22q12.1-12.3. Contains ESTs and a GSS, complete sequence.//0.31:127:71//AL008719

[11304] F-PLACE1011719//Human BAC clone RG369K23 from 7q31, complete sequence.//4.6e-52:461:77//AC002487

[11305] F-PLACE1011725

[11306] F-PLACE1011729//Human Chromosome 15q11-q13 clone pDJ276c12 from the Prader-Willi/Angelman syndrome region, WORKING DRAFT SEQUENCE, 3 unordered pieces.//0.011:320:62//AC004737

[11307] F-PLACE1011749//Plasmodium falciparum 3D7 chromosome 12 PFYAC293 genomic sequence, WORKING DRAFT SEQUENCE, 9 unordered pieces.//0.00031:544:59//AC004157

[11308] F-PLACE1011762//Homo sapiens BAC clone RG437L15 from 8q21, complete sequence.//2.4e-115:682:90//AC004003

[11309] F-PLACE1011778//RPCII 1-22D17.TVB RPCI-11 Homo sapiens genomic clone RPCI-11-22D17, genomic survey sequence.//2.7e-114:611:93//AQ008944

[11310] F-PLACE1011783//CIT-HSP-2317N1.TF CIT-HSP Homo sapiens genomic clone 2317N1, genomic survey sequence.//2.3e-17:120:94//AQ042330

[11311] F-PLACE1011858//Gallus domesticus filamin mRNA, complete cds.//4.1e-24:565:64//U00147

[11312] F-PLACE1011874//Homo Sapiens Chromosome X clone bWXD312, complete sequence.//2.5e-141:678:98//AC004478

[11313] F-PLACE1011875//Homo sapiens mRNA for KIAA0580 protein, partial cds.//1.6e-108:526:98//AB011152

[11314] F-PLACE1011891//Human DNA sequence *** SEQUENCING IN PROGRESS *** from clone 439F8, WORKING DRAFT SEQUENCE.//0.0014:330:62//AL021392

[11315] F-PLACE1011896//Mus musculus Wnt10a mRNA, complete cds.//1.4e-89:678:82//U61969

[11316] F-PLACE1011922//Caprine arthritis-encephalitis virus envelope glycoprotein (env) gene, partial cds.//0.069:246:61//U81400

[11317] F-PLACE1011923//Homo sapiens serum-inducible kinase mRNA, complete cds.//1.2e-138:664:98//AF059617

[11318] F-PLACE1011962//HS_{—}3212_B2_G12_MR CIT Approved Human Genomic Sperm Library D Homo sapiens genomic clone Plate=3212 Col=24 Row=N, genomic survey sequence.//2.4e-07:154:74//AQ175369

[11319] F-PLACE1011964//Human DNA sequence *** SEQUENCING IN PROGRESS * from clone 322P7, WORKING DRAFT SEQUENCE.//3.7e-22:369:69//AL023799

[11320] F-PLACE1011982//HS-1041-A1-B01-MR.abi CIT Human Genomic Sperm Library C Homo sapiens genomic clone Plate=CT 823 Col=1 Row=C, genomic survey sequence.//0.44:309:58//B36529

[11321] F-PLACE1011995//Homo sapiens Xq28 BAC RPCI11-382P7 (Roswell Park Cancer Institute Human BAC Library) complete sequence.//8.8e-53:687:71//AC006054

[11322] F-PLACE1012031//Homo sapiens mRNA for KIAA0713 protein, partial cds.//1.2e-146:690:98//AB018256

[11323] F-PLACE2000003//Homo sapiens chromosome 17, clone hRPK.318_A_{—}15, complete sequence.//1.7e-62:293:88//AC005837

[11324] F-PLACE2000006//Homo sapiens chromosome 12p13.3 clone RPCII-96H9, WORKING DRAFT SEQUENCE, 66 unordered pieces.//1.4e-116:261:91//AC006057

[11325] F-PLACE2000007

[11326] F-PLACE2000011//Homo sapiens chromosome 19, cosmid F20887, complete sequence.//5.2e-102:489:99//AC005578

[11327] F-PLACE2000014//Human DNA sequence *** SEQUENCING IN PROGRESS *** from clone 11N9, WORKING DRAFT SEQUENCE.//0.0095:307:62//AL022574

[11328] F-PLACE2000015//Homo sapiens clone RG140BI 1, WORKING DRAFT SEQUENCE, I unordered pieces.//2.0e-36:316:81//AC005069

[11329] F-PLACE2000017//HS_{—}3042_A1_F08_MR CIT Approved Human Genomic Sperm Library D Homo sapiens genomic clone Plate=3042 Col=15 Row=K, genomic survey sequence.//1.0:184:61//AQ098074

[11330] F-PLACE2000021//Homo sapiens TRF 1-interacting ankyrin-related ADP-ribose polymerase mRNA, complete cds.//4.6e-84:844:72//AF082556

[11331] F-PLACE2000030//Human Chromosome 11 Cosmid cSRL16b6, complete sequence.//2.3e-22:233:77//U73638

[11332] F-PLACE2000033//C. capitata mRNA for chorion protein s18.//0.0019:342:62//Y08913

[11333] F-PLACE2000034//Rattus norvegicus transmembrane receptor Robol mRNA, complete cds.//2.8e-13:335:63//AF041082

[11334] F-PLACE2000039//Rattus norvegicus cytoplasmic dynein heavy chain (MAP 1C), mRNA, complete cds.//7.7e-84:489:90//L08505

[11335] F-PLACE2000047//Homo sapiens ccr2b (ccr2), ccr2a (ccr2), ccr5 (ccr5) and ccr6 (ccr6) genes, complete cds, and lactoferrin (lactoferrin) gene, partial cds, complete sequence.//5.0e-28:327:76//U95626

[11336] F-PLACE2000050//Homo sapiens chromosome 17, clone HRPC41 C23, complete sequence.//1.1e-32:527:68//AC003101

[11337] F-PLACE2000061//CIT-HSP-2346L20.TF CIT-HSP Homo sapiens genomic clone 2346L20, genomic survey sequence.//1.1e-05:89:83//AQ059010

[11338] F-PLACE2000062//Human membrane-associated lectin type-C mRNA.//9.0e-113:662:86//M98457

[11339] F-PLACE2000072//Homo sapiens ZNF202 beta (ZNF202) mRNA, complete cds.//2.2e-133:631:98//AF027219

[11340] F-PLACE2000097//Homo sapiens chromosome 12 p13.3 clone RPCII 1-189M20, WORKING DRAFT SEQUENCE, 39 unordered pieces.//1.6e-16:119:93//AC005910

[11341] F-PLACE2000100//HS_{—}3184_A1_D06_T7 CIT Approved Human Genomic Sperm Library D Homo sapiens genomic clone Plate=3184 Col=11 Row=G, genomic survey sequence.//1.5e-80:409:97//AQ150004

[11342] F-PLACE2000103//Human DNA sequence *** SEQUENCING IN PROGRESS *** from clone 20208, WORKING DRAFT SEQUENCE.//1.0e-172:830:98//AL031848

[11343] F-PLACE2000111//Homo sapiens DNA, trinucleotide repeats region.//1.0:200:64//AB018491

[11344] F-PLACE2000115

[11345] F-PLACE2000124//Homo sapiens Chromosome 16 BAC clone CIT987SK-A-67A1, complete sequence.//6.2e-43:362:80//AC004531

[11346] F-PLACE2000132//RPCII 1-79F15.TV RPCII 1 Homo sapiens genomic clone R-79F15, genomic survey sequence.//5.4e-35:206:94//AQ284166

[11347] F-PLACE2000136//Human BAC clone 7E17 from 12q, complete sequence.//2.7e-12:814:59//AC002070

[11348] F-PLACE2000140//Human DNA sequence *** SEQUENCING IN PROGRESS *** from clone 11703, WORKING DRAFT SEQUENCE.//3.6e-165:799:97//AL020995

[11349] F-PLACE2000164//Canine histamine H2 receptor gene, complete cds.//0.10:392:56//M32701

[11350] F-PLACE2000170

[11351] F-PLACE2000172//Homo sapiens PAC clone DJO811017 from 7q21-22, complete sequence.//3.9e-91:552:88//AC006005

[11352] F-PLACE2000176//Homo sapiens Chromosome 22q11.2 BAC Clone b437g10 In BCRL2-GGT Region, complete sequence.//0.98:201:64//AC004032

[11353] F-PLACE2000187

[11354] F-PLACE2000216

[11355] F-PLACE2000223//RPCII 1-12L17.TP RPCI-11 Homo sapiens genomic clone RPCI-11-12L17, genomic survey sequence.//0.00039:325:58//B75888

[11356] F-PLACE2000235//Human Chromosome 16 BAC clone CIT987SK-254P9, complete sequence.//7.5e-55:237:78//AC003003

[11357] F-PLACE2000246//Homo sapiens chromosome 3p clone RPCI4-544D 10, WORKING DRAFT SEQUENCE, 58 unordered pieces.//2.4e-92:236:94//AC005902

[11358] F-PLACE2000264//Human DNA sequence from clone 391022 on chromosome 6p21.2-21.31 Contains pseudogenes similar to ribosomal protein, ESTs, GSSs, complete sequence.//1.4e-32:331:78//AL031577

[11359] F-PLACE2000274//Anthocidaris crassispina mRNA for B2HC, partial cds.//8.5e-48:765:66//AB012308

[11360] F-PLACE2000302//Kaposi's sarcoma-associated herpes-like virus ORF73 homolog gene, complete cds.//8.3e-08:662:58//U52064

[11361] F-PLACE2000305//Homo sapiens clone DJ1129L24, WORKING DRAFT SEQUENCE, 5 unordered pieces.//2.4e-08:95:81//AC006021

[11362] F-PLACE2000317//HSS_{—}3183_B2_F05_MR CIT Approved Human Genomic Sperm Library D Homo sapiens genomic clone Plate=3183 Col=10 Row=L, genomic survey sequence.//2.5e-71:346:99//AQ172747

[11363] F-PLACE2000335//Homo sapiens clone DJ1032D07, WORKING DRAFT SEQUENCE, 3 unordered pieces.//3.7e-14:402:65//AC004952

[11364] F-PLACE2000341//Rattus norvegicus sodium-dependent multi-vitamin transporter (SMVT) mRNA, complete cds.//4.5e-77:555:82//AF026554

[11365] F-PLACE2000342//Suid herpesvirus 1 UL5 gene, partial cds, UL6 and UL7 genes, complete cds, UL8 gene, partial cds.//1.8e-14:259:71//U66829

[11366] F-PLACE2000347//Human DNA from overlapping chromosome 19-specific cosmids R32543, and F15613 containing ZNF gene family member, genomic sequence, complete sequence.//6.0e-34:376:74//AC003006

[11367] F-PLACE2000359//RPCII 1-23J20.TKBR RPCI-11 Homo sapiens genomic clone RPCI-11-23J20, genomic survey sequence.//8.4e-21:288:69//AQ013849

[11368] F-PLACE2000366//Human Tigger1 transposable element, complete consensus sequence.//5.0e-114:692:80//U49973

[11369] F-PLACE2000371//Homo sapiens 12 p13.3 PAC RPCII-29K11 (Roswell Park Cancer Institute Human PAC Library) complete sequence.//0.38:356:58//AC005182

[11370] F-PLACE2000373//RPCI11-49C18.TJ RPC11 Homo sapiens genomic clone R-49C18, genomic survey sequence.//0.064:132:68//AQ051776

[11371] F-PLACE2000379//Homo sapiens Xp22 BAC GS-607H18 (Genome Systems Human BAC library) complete sequence.//1.6e-130:776:88//AC003658

[11372] F-PLACE2000394//Homo sapiens chromosome 18 BAC RPCI11-128D14 (Roswell Park Cancer Institute Human BAC Library) complete sequence.//5.4e-113:808:83//AC005909

[11373] F-PLACE2000398//Mouse hexamer repeat sequence (117) homologous to Drosophila ‘period’ gene.//0.87:286:63//X06967

[11374] F-PLACE2000399

[11375] F-PLACE2000404//Caenorhabditis elegans cosmid R74, complete sequence.//2.9e-59:532:68//Z36238

[11376] F-PLACE2000411//Acanthamoeba castellanii transformation-sensitive protein homolog mRNA, complete cds.//0.44:553:561/U89984

[11377] F-PLACE2000419//Human adenosine deaminase (ADA) gene, complete cds.//1.4e-56:303:86//Mi3792

[11378] F-PLACE2000425//HS_{—}3047_A1_H05_MR CIT Approved Human Genomic Sperm Library D Homo sapiens genomic clone Plate=3047 Col=9 Row=O, genomic survey sequence.//2.8e-42:224:97//AQ126949

[11379] F-PLACE2000427

[11380] F-PLACE2000433//Homo sapiens chromosome 17, clone hRPK.156_L 14, complete sequence.//1.1e-19:363:67//AC005821

[11381] F-PLACE2000435//HS_{—}3036_B1_F11_MR CIT Approved Human Genomic Sperm Library D Homo sapiens genomic clone Plate=3036 Col=21 Row=L, genomic survey sequence.//3.1e-06:184:66//AQ096999

[11382] F-PLACE2000438//Caenorhabditis elegans cosmid Y45F10D, complete sequence.//4.6e-23:550:62//AL021492

[11383] F-PLACE2000450//Homo sapiens PAC clone DJ 188N21 from 7q11.23-q21.1, complete sequence.//1.0e-78:604:80//AC006025

[11384] F-PLACE2000455//Homo sapiens Chromosome 16 BAC clone CIT987SK-A-279B 10, complete sequence.//8.2e-05:330:63//AC002300

[11385] F-PLACE2000458//Homo sapiens chromosome 5p, BAC clone 50g21 (LBNL HI 54), complete sequence.//5.7e-168:816:97//AC005740

[11386] F-PLACE2000465//Human Chromosome 11 Overlapping Cosmids cSRL72g7 and cSRL140b8, complete sequence.//4.3e-33:296:79//AC002037

[11387] F-PLACE2000477//Homo sapiens clone RGO52HO6, WORKING DRAFT SEQUENCE, 11 unordered pieces.//3.4e-59:598:74//AC005057

[11388] F-PLACE3000004//Human EYA3 homolog (EYA3) mRNA, complete cds.//7.6e-49:361:84//U81602

[11389] F-PLACE3000009//Human placenta (Diff48) mRNA, complete cds.//3.0e-58:713:69//U49187

[11390] F-PLACE3000020//R. norvegicus type III adenylyl cyclase mRNA, complete cds.//6.1e-103:600:89//M55075

[11391] F-PLACE3000029

[11392] F-PLACE3000059//Mus musculus mRNA for ubiquitin conjugating enzyme.//4.4e-115:718:86//Y17267

[11393] F-PLACE3000070//Homo sapiens chromosome 5, BAC clone 194i18 (LBNL H158), complete sequence.//1.8e-17:250:74//AC005368

[11394] F-PLACE3000103//Caenorhabditis elegans cosmid C13F 10.//4.6e-07:408:61//U97006

[11395] F-PLACE3000119//*** SEQUENCING IN PROGRESS *** Homo sapiens chromosome 4, BAC clone C0190L06; HTGS phase 1, WORKING DRAFT SEQUENCE, 21 unordered pieces.//1.5e-58:291:86//AC004670

[11396] F-PLACE3000121//Rattus norvegicus rsecl 5 mRNA, complete cds.//8.1e-81:837:71//AF032668

[11397] F-PLACE3000124//Homo sapiens chromosome 17, clone hRPK.85_B_{—}7, complete sequence.//1.8e-48:330:79//AC005695

[11398] F-PLACE3000136

[11399] F-PLACE3000142//Human DNA sequence *** SEQUENCING IN PROGRESS *** from clone 349A12, WORKING DRAFT SEQUENCE.//0.01 I :294:62//AL033520

[11400] F-PLACE3000145//Gallus gallus tensin mRNA, 3′ end.//6.9e-52:659:68//L06662

[11401] F-PLACE3000147//Human DNA sequence from clone 267M20 on chromosome Xq22.2-22.3. Contains part of the DIAPH2 gene and a pseudogene, ESTs, STSs and GSSs, complete sequence.//5.1e-37:305:81//AL031053

[11402] F-PLACE3000148//Homo sapiens chromosome Y, clone 47511, complete sequence.//4.7e-32:766:63//AC004474

[11403] F-PLACE3000155//Homo sapiens chromosome 17, clone hRPK.597_M_{—}12, complete sequence.//7.4e-173:822:98//AC005277

[11404] F-PLACE3000156//Homo sapiens chromosome 19, overlapping cosmids F18547, Fl 1133, R27945, R28830 and R32804, complete sequence.//2.2e-81:783:74//AC003682

[11405] F-PLACE3000157

[11406] F-PLACE3000158//, complete sequence.//1.0e-180:845:97//AC005500

[11407] F-PLACE3000160//CIT978SK-152K7.TV CIT978SK Homo sapiens genomic clone 152K7, genomic survey sequence.//0.080:259:59//B50878

[11408] F-PLACE3000169//Homo sapiens chromosome 19, BAC CIT-B-191n6, complete sequence.//9.8e-158:749:98//AC006130

[11409] F-PLACE3000194

[11410] F-PLACE3000197//F. rubripes GSS sequence, clone 075N04bB7, genomic survey sequence.//1.4e-08:164:68//AL003352

[11411] F-PLACE3000199//Human DNA sequence *** SEQUENCING IN PROGRESS *** from clone 424J12, WORKING DRAFT SEQUENCE.//0.0019:277:58//Z82207

[11412] F-PLACE3000207//Homo sapiens BAC clone GS165L15 from 7 p15, complete sequence.//6.6e-21:312:67//AC005013

[11413] F-PLACE3000208//Homo sapiens (clones: CW52-2, CW27-6, CWI5-2, CW26-5, 11-67) collagen type VII intergenic region and (COL7AI) gene, complete cds.//1.0:279:61//L23982

[11414] F-PLACE3000218//Homo sapiens, WORKING DRAFT SEQUENCE, 52 unordered pieces.//9.3e-43:383:79//AC004086

[11415] F-PLACE3000220//RPC111-54B4.TV RPCII 1 Homo sapiens genomic clone R-54B4, genomic survey sequence.//2.4e-36:381:76//AQ082056

[11416] F-PLACE3000221//Homo sapiens clone DJI 186P10, WORKING DRAFT SEQUENCE, 6 unordered pieces.//7.2e-135:721:91//AC005231

[11417] F-PLACE3000226

[11418] F-PLACE3000230//Homo sapiens ccr2b (ccr2), ccr2a (ccr2), ccr5 (ccr5) and ccr6 (ccr6) genes, complete cds, and lactoferrin (lactoferrin) gene, partial cds, complete sequence.//3.3e-80:498:78//U95626

[11419] F-PLACE3000242//Human DNA sequence from clone 1409 on chromosome Xp 11.1-11.4. Contains a Inter-Alpha-Trypsin Inhibitor Heavy Chain LIKE gene, a alternatively spliced Melanoma-Associated Antigen MAGE LIKE gene and a 6-Phosphofructo-2-kinase (Fructose-2,6-bisphosphatase) LIKE pseudogene. Contains ESTs, STSs and genomic marker DXS8032, complete sequence.//2.6e-54:254:92//Z98046

[11420] F-PLACE3000244//M. musculus mRNA for 200 kD protein.//1.4e-139:850:86//X80169

[11421] F-PLACE3000254//Ateline herpesvirus 3 complete genome.//1.3e-10:399:61//AF083424

[11422] F-PLACE3000271//Human Chromosome 16 BAC clone CIT987SK-A-815A9, complete sequence.//1.8e-21:350:68//AF00548

[11423] F-PLACE3000276//HS_{—}2026_B1_HI 1_T7 CIT Approved Human Genomic Sperm Library D Homo sapiens genomic clone Plate=2026 Col=21 Row=P, genomic survey sequence.//5.7e-45:376:81//AQ231147

[11424] F-PLACE3000304//Homo sapiens chromosome 19, cosmid R26660, complete sequence.//1.6e-138:650:99//AC005328

[11425] F-PLACE3000310

[11426] F-PLACE3000320//Human DNA sequence *** SEQUENCING IN PROGRESS *** from clone 423B22, WORKING DRAFT SEQUENCE.//1.9e-41:379:77//AL034379

[11427] F-PLACE3000322//Homo sapiens chromosome 17, clone hRPK.209_J_{—}20, complete sequence.//3.3e-35:419:68//AC005822

[11428] F-PLACE3000331//CIT-HSP-2347D24.TR CIT-HSP Homo sapiens genomic clone 2347D24, genomic survey sequence.//2.7e-20:119:99//AQ061543

[11429] F-PLACE3000339//Rhodobacter sphaeroides magnesium chelatase subunits BchI (bchi) and BchD (bchD) genes, complete cds; and BchO (bchO) gene, partial cds.//0.99:310:58//AF017642

[11430] F-PLACE3000341//Homo sapiens 3p22 Contig 7 PAC RPCI4-672N11 (Roswell Park Cancer Institute Human PAC Library) complete sequence.//7.5e-159:752:98//AC006055

[11431] F-PLACE3000350//Rattus norvegicus serine/threonine protein kinase TAO1 mRNA, complete cds.//2.3e-107:592:92//AF084205

[11432] F-PLACE3000352//Human DNA sequence from PAC 293L6 on chromosome 22, complete sequence.//2.1e-37:480:70//Z83732

[11433] F-PLACE3000353

[11434] F-PLACE3000362//Homo sapiens chromosome 17, clone hRPK.215_P_{—}18, complete sequence.//0.00011:373:60//AC005969

[11435] F-PLACE3000363

[11436] F-PLACE3000365//Human DNA sequence from PAC 227P17, between markers DXS6791 and DXS8038 on chromosome X contains CpG island, EST.//0.074:279:61//Z81007

[11437] F-PLACE3000373//Human DNA sequence from PAC 50A13 on chromosome Xp 11. Contains ATP SYNTHASE LIPID BINDING PROTEIN P1 (P2, P3) precursor (ATP5G1, ATP5G2, ATP5G3) like pseudogene, ESTs and STSs. Contains polymorphic CA repeat.//2.8e-118:653:92//Z92545

[11438] F-PLACE3000388//Homo sapiens PAC clone DJ0777023 from 7 p14-p15, complete sequence.//2.2e-25:288:71//AC005154

[11439] F-PLACE3000399//Human DNA sequence *** SEQUENCING IN PROGRESS *** from clone 466N1, WORKING DRAFT SEQUENCE.//2.3e-69:303:86//Z97630

[11440] F-PLACE3000400//Caenorhabditis elegans cosmid H03AI1, complete sequence.//0.0063:435:58//Z93239

[11441] F-PLACE3000401//Homo sapiens clone DJI 147A01, WORKING DRAFT SEQUENCE, 25 unordered pieces.//5.8e-25:292:73//AC006023

[11442] F-PLACE3000402//RPCI11-20D6.TVB RPCI-11 Homo sapiens genomic clone RPCI-11-20D6, genomic survey sequence.//1.1e-10:154:74//AQ008761

[11443] F-PLACE3000405//Homo sapiens chromosome 17, clone hRPK.628_E_{—}12, complete sequence.//2.9e-41:515:72//AC005701

[11444] F-PLACE3000406//cSRL-179E11-u cSRL flow sorted Chromosome 11 specific cosmid Homo sapiens genomic clone cSRL-179E11, genomic survey sequence.//2.8e-91:540:89//B03443

[11445] F-PLACE3000413

[11446] F-PLACE3000416//F19L8-Sp6 IGF Arabidopsis thaliana genomic clone F19L8, genomic survey sequence.//0.0018:664:55//B11305

[11447] F-PLACE3000425//Human DNA sequence from clone 231 L4 on chromosome Xq27.1-27.3 Contains GSS, STS, complete sequence.//1.1e-16:284:70//AL022719

[11448] F-PLACE3000455//Human DNA sequence *** SEQUENCING IN PROGRESS *** from clone 469D22, WORKING DRAFT SEQUENCE.//3.6e-146:732:96//AL031284

[11449] F-PLACE3000475//HS_{—}2164_A2_H10_MF CIT Approved Human Genomic Sperm Library D Homo sapiens genomic clone Plate=2164 Col=20 Row=O, genomic survey sequence.//1.5e-07:159:71//AQ132983

[11450] F-PLACE3000477//Human DNA sequence from PAC 368A4 on chromosome X. Contains ESTs, CELLULAR NUCLEIC ACID BINDING PROTEIN (CNBP) like gene and STSs.//2.9e-11:213:70//Z83843

[11451] F-PLACE4000009//Sequence 93 from patent U.S. Pat. No. 5,616,500.//9.9e-08:692:60//I39845

[11452] F-PLACE4000014//Homo sapiens mRNA for KIAA0809 protein, partial cds.//1.1e-116:331:100//AB018352

[11453] F-PLACE4000034//Homo sapiens Chromosome 16 BAC clone CIT987SK-A-69G12, complete sequence.//5.0e-05:244:63//AC004131

[11454] F-PLACE4000049//Homo sapiens Xp22-171-173 BAC GSHB-31214 (Genome Systems Human BAC Library) complete sequence.//1.2e-37:385:74//AC005926

[11455] F-PLACE4000052//M. musculus abc1 mRNA.//1.5e-110:671:88//X75926

[11456] F-PLACE4000063

[11457] F-PLACE4000089//M. musculus BOX DNA for regulatory element and promoter region related to EC cell differentiation.//3.7e-12:114:85//X74311

[11458] F-PLACE4000093//CIT-HSP-2380K5.TF CIT-HSP Homo sapiens genomic clone 2380K5, genomic survey sequence.//0.11:245:60//AQ108342

[11459] F-PLACE4000100//Human DNA sequence *** SEQUENCING IN PROGRESS *** from clone 20208, WORKING DRAFT SEQUENCE.//2.9e-19:384:65//AL031848

[11460] F-PLACE4000106//Homo sapiens mRNA for KIAA0462 protein, partial cds.//1.2e-145:684:99//AB007931

[11461] F-PLACE4000128//Mus musculus putative transcription factor mRNA, complete cds.//3.7e-62:541:78//AF091234

[11462] F-PLACE4000129

[11463] F-PLACE4000131//HS_{—}3139_B2_F12_T7 CIT Approved Human Genomic Sperm Library D Homo sapiens genomic clone Plate=3139 Col=24 Row=L, genomic survey sequence.//2.3e-14:221:70//AQ183207

[11464] F-PLACE4000147//Human DNA sequence from clone 740A11 on chromosome Xq22.2-23. Contains part of the COL4A5 gene for Collagen Alpha 5(IV) Chain Precursor. Contains GSSs, complete sequence.//0.28:412:58//AL031622

[11465] F-PLACE4000156//Human zinc finger protein ZNF 136.//7.2e-88:764:76//U09367

[11466] F-PLACE4000192

[11467] F-PLACE4000211

[11468] F-PLACE4000222//344J1.TVB CIT978SKAI Homo sapiens genomic clone A-344J01, genomic survey sequence.//1.2e-14:177:76//B17158

[11469] F-PLACE4000230//Mus musculus semaphorin VIa mRNA, complete cds.//9.8e-116:662:89//AF030430

[11470] F-PLACE4000233//Homo sapiens DNA from chromosome 19, BAC 33152, complete sequence.//5.2e-54:363:70//AC003973

[11471] F-PLACE4000247

[11472] F-PLACE4000250//Homo sapiens Xp22-132-134 BAC GSHB-590J15 (Genome Systems Human BAC library) complete sequence.//0.0053:229:65//AC004673

[11473] F-PLACE4000252

[11474] F-PLACE4000259//H. sapiens gene for U5 snRNP-specific 200 kD protein.//2.0e-25:191:87//Z70200

[11475] F-PLACE4000261//Mus musculus bromodomain-containing protein BP75 mRNA, complete cds.//2.6e-23:314:71//AF084259

[11476] F-PLACE4000269//Rattus norvegicus rexo70 mRNA, complete cds.//5.5e-122:734:88//AF032667

[11477] F-PLACE4000270

[11478] F-PLACE4000300

[11479] F-PLACE4000320//Human FKBP-rapamycin associated protein (FRAP) mRNA, complete cds.//1 .4e-21:135:96//L34075

[11480] F-PLACE4000323//HS_{—}2165_B 1_B02_MF CIT Approved Human Genomic Sperm Library D Homo sapiens genomic clone Plate=2165 Col=3 Row=D, genomic survey sequence.//4.3e-08:170:71//AQ125036

[11481] F-PLACE4000326//Mouse DNA with homology to EBV IR3 repeat, segment 1, clone Mu2.//2.8e-06:311:63//M10296

[11482] F-PLACE4000344//Plasmodium falciparum chromosome 2, section 38 of 73 of the complete sequence.//0.014:252:60//AE001401

[11483] F-PLACE4000367

[11484] F-PLACE4000369

[11485] F-PLACE4000379//CIT-HSP-2350B9.TF CIT-HSP Homo sapiens genomic clone 2350B9, genomic survey sequence.//9.2e-46:282:86//AQ062661

[11486] F-PLACE4000387//CIT-HSP-2382F11.TR CIT-HSP Homo sapiens genomic clone 2382F11, genomic survey sequence.//0.96:102:70//AQ080649

[11487] F-PLACE4000392//Rattus norvegicus polymorphic marker D20UIAI sequence.//1.2e-05:222:68//AF054088

[11488] F-PLACE4000401//Homo sapiens mRNA for KIAA0640 protein, partial cds.//9.6e-46:605:71//AB014540

[11489] F-PLACE4000411//Human DNA sequence *** SEQUENCING IN PROGRESS * from clone 173D1, WORKING DRAFT SEQUENCE.//3.2e-29:179:79//AL031984

[11490] F-PLACE4000431//H. sapiens gene for U5 snRNP-specific 200 kD protein.//4.0e-44:263:92//Z70200

[11491] F-PLACE4000445//HS-1053-B1-D02-MF.abi CIT Human Genomic Sperm Library C Homo sapiens genomic clone Plate=CT 775 Col=3 Row=H, genomic survey sequence.//0.070:47:100//B41346

[11492] F-PLACE4000450

[11493] F-PLACE4000465//Homo sapiens BAC clone RG 114B 19 from 7q31.1, complete sequence.//2.3e-07:273:65//AC005065

[11494] F-PLACE4000487//Homo sapiens chromosome 17, clone hRPK.156_L 14, complete sequence.//4.1e-34:351:70//AC005821

[11495] F-PLACE4000489//HS_{—}3012_B1_G05_MR CIT Approved Human Genomic Sperm Library D Homo sapiens genomic clone Plate=3012 Col=9 Row=N, genomic survey sequence.//2.0e-36:220:92//AQ095537

[11496] F-PLACE4000494//Homo sapiens 12 p13.3 PAC RPCI5-1063M23 (Roswell Park Cancer Institute Human PAC Library) complete sequence.//2.3e-57:395:79//AC005865

[11497] F-PLACE4000521//Homo sapiens *** SEQUENCING IN PROGRESS ***, WORKING DRAFT SEQUENCE.//1.6e-163:770:98//AJ011929

[11498] F-PLACE4000522//Feline leukemia virus Notch2 gene, clone FeLV/Notch2-C, partial cds.//4.0e-124:686:90//U47645

[11499] F-PLACE4000548

[11500] F-PLACE4000558//Bothrops atrox batroxobin gene (EC 3.4.21.29).//0.049:435:59//X12747

[11501] F-PLACE4000581

[11502] F-PLACE4000590//Homo sapiens chromosome Y, clone 47511, complete sequence.//3.6e-20:747:59//AC004474

[11503] F-PLACE4000593//Caenorhabditis elegans cosmid F25D7, complete sequence.//5.6e-16:326:65//Z78418

[11504] F-PLACE4000612//Homo sapiens PAC clone DJ0722F20 from 7q31.1-q31.3, complete sequence.//1.7e-163:785:97//AC005281

[11505] F-PLACE4000638//Homo sapiens clone NHO319F03, WORKING DRAFT SEQUENCE, 3 unordered pieces.//8.7e-74:707:74//AC006039

[11506] F-PLACE4000650

[11507] F-PLACE4000654//Mus musculus mRNA for ubiquitin conjugating enzyme.//1.1e-145:840:89//Y17267

[11508] F-PLACE4000670//Sequence 13 from patent U.S. Pat. No. 5,712,381.//1.0:311:59//I82816

[11509] F-SKNMC1000011//Gallus gallus bone sialoprotein II mRNA, complete cds.//0.014:92:73//U10577

[11510] F-SKNMC1000013//Orang-utan involucrin gene, complete cds.//0.021:417:59//M25312

[11511] F-SKNMC1000046//Homo sapiens mRNA for KIAA0654 protein, partial cds.//7.6e-147:706:98//AB014554

[11512] F-SKNMC1000050//Sequence 5 from patent U.S. Pat. No. 5,789,181.//1.6e-52:330:90//AR020616

[11513] F-SKNMC1000091//Human NK homeobox protein (Nk×6.1) gene, exon 1.//0.0018:375:60//U66797

[11514] F-THYRO1000017//Rattus norvegicus pyridoxine 5′-phosphate oxidase mRNA, complete cds.//6.6e-97:542:84//U91561

[11515] F-THYRO1000026//Human DNA sequence from clone 833B7 on chromosome 22q12.3-13.2 Contains genes for NCF4 (P40PHOX) protein, cytokine receptor common beta chain precursor CSF2RB (partial), ESTs, CA repeat, STS, GSS, complete sequence.//3.5e-46:353:82//AL008637

[11516] F-THYRO1000034//Human DNA sequence *** SEQUENCING IN PROGRESS *** from clone 90L6, WORKING DRAFT SEQUENCE.//0.83:227:61//Z97353

[11517] F-THYRO1000035//Human Chromosome X clone bWXDI 87, complete sequence.//1.2e-39:303:83//AC004383

[11518] F-THYRO1000040

[11519] F-THYRO1000070//Homo sapiens chromosome 10 clone CIT987SK-1144G6 map 10q25.1, complete sequence.//1.3e-05:613:58//AC005383

[11520] F-THYRO1000072//Homo sapiens mRNA for KIAA0657 protein, partial cds.//2.7e-84:722:77//AB014557

[11521] F-THYRO1000085

[11522] F-THYRO1000092//CIT-HSP-2013L16.TFB CIT-HSP Homo sapiens genomic clone 2013L16, genomic survey sequence.//0.31:186:61//B60606

[11523] F-THYRO1000107

[11524] F-THYRO1000111//Human genomic DNA sequence from clone 30801 on chromosome Xp 11.3-11.4. Contains EST, CA repeat, STS, GSS, CpG island.//6.4e-110:690:87//Z93403

[11525] F-THYRO1000121//Rattus norvegicus CTD-binding SR-like protein rA8 mRNA, complete cds.//1.4e-127:816:85//U49055

[11526] F-THYRO1000124//H. sapiens CpG island DNA genomic Mse1 fragment, clone 72a7, forward read cpg72a7.ft1a.//9.5e-26:169:9411Z62724

[11527] F-THYRO1000129//Homo sapiens TED protein (TED) mRNA, complete cds.//8.5e-154:732:98//AF087142

[11528] F-THYRO1000132//Homo sapiens chromosome 9q34, clone 63G10, complete sequence.//3.7e-39:315:82//AC002096

[11529] F-THYRO1000156//Human DNA sequence from clone 113J7 on chromosome Xp 11.22-11.4. Contains part of a putative Homeobox (pseudo?) gene, ESTs and an STS, complete sequence./1.2e-21:335:71//AL023574

[11530] F-THYRO1000163//Homo sapiens Chromosome 16 BAC clone CIT987SK-A-A-218C7, complete sequence.//8.4e-52:301:88//AC002331

[11531] F-THYRO1000173//Mouse clathrin-associated protein (AP47) mRNA, complete cds.//4.0e-89:821:74//M62419

[11532] F-THYRO1000186//Human DNA sequence *** SEQUENCING IN PROGRESS *** from clone 424J12, WORKING DRAFT SEQUENCE.//7.2e-39:293:85//Z82207

[11533] F-THYRO1000187//Clostridium tetani gene for tetanus toxin.//0.041:473:57//X06214

[11534] F-THYRO1000190//Homo sapiens chromosome 17, clone hRPK.332_H_{—}18, complete sequence.//0.38:184:64//AC005746

[11535] F-THYRO1000197//Homo sapiens mRNA for poly(A)-specific ribonuclease.//7.5e-174:805:99//AJ005698

[11536] F-THYRO1000199//Homo sapiens mRNA for KIAA0652 protein, complete cds.//1.2e-86:616:84//AB014552

[11537] F-THYRO1000206//HS_{—}3047_A1_A05_MF CIT Approved Human Genomic Sperm Library D Homo sapiens genomic clone Plate=3047 Col=9 Row=A, genomic survey sequence.//0.51:331:63//AQ099134

[11538] F-THYRO1000221//Plasmodium falciparum 3D7 chromosome 12 PFYAC293 genomic sequence, WORKING DRAFT SEQUENCE, 9 unordered pieces.//0.092:738:56//AC004157

[11539] F-THYRO1000241//Gallus gallus genome fragment with pentamer tandem repeats.//0.43:191:62//X0086

[11540] F-THYRO1000242//Human zinc finger gene HZF7.//2.8e-43:534:64//X60156

[11541] F-THYRO1000253//Homo sapiens 3p22 Contig 7 PAC RPCI4-672NI 1 (Roswell Park Cancer Institute Human PAC Library) complete sequence.//0.95:139:68//AC006055

[11542] F-THYRO1000270

[11543] F-THYRO1000279//Human DNA sequence *** SEQUENCING IN PROGRESS *** from clone 531H16, WORKING DRAFT SEQUENCE.//1.4e-174:826:98//AL031664

[11544] F-THYRO1000288//Homo sapiens mRNA for Hs Ste24p, complete cds.//3.9e-179:848:98//AB016068

[11545] F-THYRO1000320//Mus musculus sphingosine-1-phosphate lyase mRNA, complete cds.//1.0e-44:331:83//AF036894

[11546] F-THYRO1000327//Homo sapiens autocrine motility factor receptor (AMFR) mRNA, complete cds.//5.7e-112:641:91//L35233

[11547] F-THYRO1000343//Homo sapiens mRNA for KIAA0790 protein, partial cds.//2.2e-162:763:98//AB018333

[11548] F-THYRO1000358//Human selenium-binding protein (hSBP) mRNA, complete cds.//2.2e-32:177:84//U29091

[11549] F-THYRO1000368//Caenorhabditis elegans cosmid WO9G3, complete sequence.//0.97:206:60//Z82080

[11550] F-THYRO1000381//Arthrobacter sp. glc1 gene for beta-1,3-glucanase, complete cds.//0.27:427:62//D23668

[11551] F-THYRO1000387//Homo sapiens PAC clone DJ1048B16 from 7q34-q36, complete sequence.//9.7e-147:698:98//AC006019

[11552] F-THYRO1000394//HS_{—}2061_A2_C04_MR CIT Approved Human Genomic Sperm Library D Homo sapiens genomic clone Plate=2061 Col=8 Row=E, genomic survey sequence.//1.6e-29:202:91//AQ247672

[11553] F-THYRO1000395//Drosophila melanogaster ring canel protein and ORF2 mRNA, complete cds.//4.3e-15:512:59//L08483

[11554] F-THYRO1000401

[11555] 3.2e-116:504:80//AF051908

[11556] F-THYRO1000438//Plasmodium falciparum 3D7 chromosome 12 PFYAC492 genomic sequence, WORKING DRAFT SEQUENCE, 5 unordered pieces.//3.4e-09:539:59//AC005308

[11557] F-THYRO1000452//RPCII 1-IC19.TVB RPCI-11 Homo sapiens genomic clone RPCI-11-IC19, genomic survey sequence.//0.27:132:64//B49573

[11558] F-THYRO1000471//Homo sapiens PAC clone DJ1136G13 from 7q35-q36, complete sequence.//1.3e-38:332:81//AC005229

[11559] F-THYRO1000484//Homo sapiens BAC378, complete sequence.//2.2e-37:254:76//U85196

[11560] F-THYRO1000488//Homo sapiens chromosome 5p, BAC clone 50g21 (LBNL H154), complete sequence.//6.3e-130:327:97//AC005740

[11561] F-THYRO1000501//H. sapiens Staf50 mRNA.//9.8e-74:615:77//X82200

[11562] F-THYRO1000502//Human DNA sequence from PAC 436M11 on chromosome Xp22.11-22.2. Contains the serine threonine protein phosphatase gene PPEF 1, and the first coding exon of the RSI gene for retinoschisis (X-linked, juvenile) I (XLRS1). Contains ESTs, an STS and GSSs, complete sequence.//0.076:380:59//Z94056

[11563] F-THYRO1000505

[11564] F-THYRO1000558//Human PAC clone 127H14 from 12q, complete sequence.//2.4e-27:412:69//AC002563

[11565] F-THYRO1000569//HS_{—}2178_B2_E03_T7 CIT Approved Human Genomic Sperm Library D Homo sapiens genomic clone Plate=2178 Col=6 Row=J, genomic survey sequence.//1.9e-27:326:7411AQ307499

[11566] F-THYRO1000570

[11567] F-THYRO1000585//Homo sapiens protein associated with Myc mRNA, complete cds.//7.4e-167:808:97//AF075587

[11568] F-THYRO1000596//Human Chromosome 16 BAC clone CIT987SK-A-972D3, complete sequence.//0.99:280:61//U91323

[11569] F-THYRO1000602//HS_{—}3037_B2_E04_MR CIT Approved Human Genomic Sperm Library D Homo sapiens genomic clone Plate=3037 Col=8 Row=J, genomic survey sequence.//1.2e-05:109:75//AQ097057

[11570] F-THYRO1000605//Homo sapiens map 2 p11.2; 83cM from GATA85AO6 repeat region, complete sequence.//1.0:84:70//AF067777

[11571] F-THYRO1000625//Homo sapiens chromosome 19, cosmid R29425, complete sequence.//3.4e-174:820:98//AC005546

[11572] F-THYRO1000637//Human DNA sequence from clone 91J24 on chromosome 6q24 Contains part of utrophin Gene, part of cytochrome C oxidase gene, EST, CpG island, complete sequence.//3.6e-38:289:84//AL024474

[11573] F-THYRO1000641//Plasmodium falciparum MAL3P7, complete sequence.//6.8e-07:540:56//AL034559

[11574] F-THYRO1000658//Homo sapiens chromosome 17, clone hRPK.74_E_{—}22, complete sequence.//1.1e-68:468:84//AC005696

[11575] F-THYRO1000662//Arabidopsis thaliana genomic DNA, chromosome 5, TAC clone: K23L20, complete sequence.//0.0072:141:70//AB016874

[11576] F-THYRO1000666//Mus musculus mRNA for motor domain of KIF9, partial cds.//4.7e-58:367:87//AB001437

[11577] F-THYRO1000676//Homo sapiens chromosome 19, cosmid F22676, complete sequence.//1.2e-36:396:71//AC005778

[11578] F-THYRO1000684//Fugu rubripes cosmid 165K09 DNA for GRM7, TRIP, Sand, PRGFR3 genes.//6.6e-13:236:69//AJ010317

[11579] F-THYRO1000699//RPCI 1-50D4.TK RPCII 1 Homo sapiens genomic clone R-50D4, genomic survey sequence.//2.7e-09:135:78//AQ052641

[11580] F-THYRO1000712//Homo sapiens BAC clone RGO41 D 11 from 7q21, complete sequence.//5.2e-17:290:67//AC005053

[11581] F-THYRO1000715//Bovine herpesvirus type I early-intermediate transcription control protein (BICP4) gene, complete cds.//8.6e-08:517:60//L14320

[11582] F-THYRO1000734//HS_{—}3233_B1_B04_T7 CIT Approved Human Genomic Sperm Library D Homo sapiens genomic clone Plate=3233 Col=7 Row=D, genomic survey sequence.//6.0e-72:463:89//AQ182143

[11583] F-THYRO1000748//Homo sapiens KIAA0411 mRNA, complete cds.//9.7e-34:339:74//AB007871

[11584] F-THYRO1000756//M. musculus mRNA for Gal beta1, 3GaINAc alpha2,3-sialyltransferase.//0.00034:349:60//X73523

[11585] F-THYRO1000777//S. griseus strO gene and sts gene cluster.//8.2e-05:625:59//Y08763

[11586] F-THYRO1000783//Xenopus laevis tail-specific thyroid hormone up-regulated (gene 5) mRNA, complete cds.//4.0e-70:860:69//U37373

[11587] F-THYRO1000787//Human DNA sequence *** SEQUENCING IN PROGRESS *** from clone 366DI, WORKING DRAFT SEQUENCE.//5.3e-09:221:66//Z97986

[11588] F-THYRO1000793

[11589] F-THYRO1000796//Cristatella mucedo clone 5.9 microsatellite sequence.//0.34:173:63//AF085422

[11590] F-THYRO1000805//Homo sapiens Xp21 PAC RPCII-37A12 containing exons 10 to 16 of the Duchenne Muscular Dystrophy gene, complete sequence.//7.8e-43:677:66//AC004468

[11591] F-THYRO1000815//Homo sapiens chromosome 5, Bac clone 189 (LBNL H135), complete sequence.//5.5e-43:405:77//AC005914

[11592] F-THYRO1000829//CIT-HSP-2387C10.TF.1 CIT-HSP Homo sapiens genomic clone 2387C10, genomic survey sequence.//2.0e-20:159:88//AQ240053

[11593] F-THYRO1000843

[11594] F-THYRO1000852//Homo sapiens chromosome 19, cosmid R31855, complete sequence.//1.8e-33:445:72//AC005782

[11595] F-THYRO1000855//Mus musculus potassium channel alpha subunit (Kv9.1) mRNA, complete cds.//0.038:208:64//AF008573

[11596] F-THYRO1000865//Homo sapiens PAC clone DJ0283M22 from 14, complete sequence.//1.9e-30:286:74//AC005477

[11597] F-THYRO1000895//Human DNA sequence *** SEQUENCING IN PROGRESS *$* from clone 385E7, WORKING DRAFT SEQUENCE.//2.8e-18:186:80//AL031720

[11598] F-THYRO1000916//Homo sapiens clone DJO965K10, WORKING DRAFT SEQUENCE, 6 unordered pieces.//3.6e-78:432:93//AC006015

[11599] F-THYRO1000926//Homo sapiens cAMP-specific phosphodiesterase 8B (PDE8B) mRNA, partial cds.//9.2e-178:839:98//AF079529

[11600] F-THYRO1000934//Human pyrroline 5-carboxylate reductase mRNA, complete cds.//3.5e-32:759:63//M77836

[11601] F-THYRO1000951//Homo sapiens Chromosome 11q12 pac pDJ57114, WORKING DRAFT SEQUENCE, 29 unordered pieces.//4.9e-76:224:93//AC004229

[11602] F-THYRO1000952

[11603] F-THYRO1000974//HS_{—}3238_B2_FO0_MR CIT Approved Human Genomic Sperm Library D Homo sapiens genomic clone Plate=3238 Col=2 Row=L, genomic survey sequence.//2.4e-26:154:96//AQ219846

[11604] F-THYRO1000975//Plasmodium falciparum Topoll gene.//0.32:491:58//X79345

[11605] F-THYRO1000983//Mvwf9A3 exon amplification products from BACs in Mvwf region Mus musculus genomic, genomic survey sequence.//7.0e-16:112:94//AQ010457

[11606] F-THYRO1000984//CIT-HSP-2167017.TR CIT-HSP Homo sapiens genomic clone 2167017, genomic survey sequence.//0.00015:186:66//B91313

[11607] F-THYRO1000988//Human Chromosome 11q12.2 PAC clone pDJ756b9 containing human ferritin heavy chain mRNA (FTH), WORKING DRAFT SEQUENCE, 19 unordered pieces.//0.024:267:63//AC004588

[11608] F-THYRO1001003

[11609] F-THYRO1001031//Homo sapiens chromosome 17, clone hRPC.859_{—}0_{—}20, complete sequence.//1.1e-55:543:72//AC003695

[11610] F-THYRO1001033//Methanobacterium thermoautotrophicum from bases 48264 to 58328 (section 5 of 148) of the complete genome.//0.94:445:58//AE000799

[11611] F-THYRO1001062//Human DNA sequence *** SEQUENCING IN PROGRESS *** from clone 199H16, WORKING DRAFT SEQUENCE.//4.4e-45:441:75//AL022320

[11612] F-THYRO1001093//Homo sapiens chromosome 9, clone hRPK.202_H_{—}3, complete sequence.//4.9e-34:353:76//AC006241

[11613] F-THYRO1001100//Human DNA-binding protein mRNA, 3′end.//1.1e-72:742:74//L14787

[11614] F-THYRO1001120//Homo sapiens clone DJ1129E22, WORKING DRAFT SEQUENCE, 7 unordered pieces.//1.2e-76:521:86//AC005522

[11615] F-THYRO1001121//Human DNA sequence *** SEQUENCING IN PROGRESS *** from clone 671014, WORKING DRAFT SEQUENCE.//0.00078:594:58//AL031595

[11616] F-THYRO1001133//Homo sapiens PAC clone DJ1200123 from 7 p15, complete sequence.//4.0e-35:349:76//AC004996

[11617] F-THYRO1001134//Homo sapiens clone DJ1070G24, WORKING DRAFT SEQUENCE, 12 unordered pieces.//1.0:154:66//AC005486

[11618] F-THYRO1001142//Human DNA sequence from clone B79B4 on chromosome 22 Contains CA repeat and GSS, complete sequence.//1.4e-44:374:80//Z82178

[11619] F-THYRO101173

[11620] F-THYRO11001177//Human pigment epithelium-derived factor gene, complete cds.//1.9e-42:250:86//U29953

[11621] F-THYRO1001189//HS_{—}3171_B2_F110_MR CIT Approved Human Genomic Sperm Library D Homo sapiens genomic clone Plate=3171 Col=20 Row=L, genomic survey sequence.//1.8e-28:246:83//AQ302330

[11622] F-THYRO1001204//Drosophila melanogaster DNA repair protein (mei-41) gene, complete cds, and TH1 gene, partial cds.//4.9e-39:657:64//U34925

[11623] F-THYRO1001213//, complete sequence.//1.7e-45:257:84//AC005300

[11624] F-THYRO1001262//Homo sapiens genomic DNA, chromosome 21q11.1, segment 7/28, WORKING DRAFT SEQUENCE.//1.5e-40:274:87//AP000036

[11625] F-THYRO1001271//Streptomyces coelicolor cosmid 1 A6.//0.033:364:61//AL023496

[11626] F-THYRO1001287//Drosophila melanogaster cosmid clone 86E4.//9.6e-49:586:69//AL021086

[11627] F-THYRO1001290//HS_{—}2045_B1_H09_MR CIT Approved Human Genomic Sperm Library D Homo sapiens genomic clone Plate=2045 Col=17 Row=P, genomic survey sequence.//4.4e-13:156:78//AQ248237

[11628] F-THYRO1001313//S. lavendulae bla gene for beta-lactamase, complete cds.//1.0:229:64//D 12693

[11629] F-THYRO1100320//Homo sapiens Chromosome 22q11.2 PAC Clone p_n5 In BCRL2-GGT Region, complete sequence.//1.1e-88:672:82//AC002472

[11630] F-THYRO1001321//Human PAC clone DJ527C21 from Xq23, complete sequence.//1.2e-115:740:87//AC000114

[11631] F-THYRO1001322//HS_{—}3205_B2_C12_MR CIT Approved Human Genomic Sperm Library D Homo sapiens genomic clone Plate=3205 Col=24 Row=F, genomic survey sequence.//0.00031:285:61//AQ304025

[11632] F-THYRO1001347//Homo sapiens mRNA for KIAA0745 protein, partial cds.//2.2e-43:638:64//AB018288

[11633] F-THYRO1001363//Homo sapiens PAC clone DJ0845121 from 7q11.21-q11.23, complete sequence.//1.0e-09:189:74//AC004905

[11634] F-THYRO1001365//Homo sapiens chromosome 10 clone CIT987SK-1163G10 map 10q25, complete sequence.//7.6e-168:821:97//AC005660

[11635] F-THYRO1001374//Homo sapiens mRNA for KIAA0707 protein, partial cds.//2.3e-155:740:97//AB014607

[11636] F-THYRO1001401//Homo sapiens chromosome 19, cosmid F23149, complete sequence.//3.2e-07:138:73//AC005239

[11637] F-THYRO1100403//Homo sapiens chromosome 12p13.3 clone RPCI3-454B23, WORKING DRAFT SEQUENCE, 48 unordered pieces.//3.6e-70:360:86//AC005845

[11638] F-THYRO1001405//Bos taurus mRNA for NDP52, complete cds.//2.6e-14:559:63//AB008852

[11639] F-THYRO1001406//Mus musculus putative steroid dehydrogenase (KIK-1) mRNA, complete cds.//1.0e-91:631:82//AF064635

[11640] F-THYRO11001411//Homo sapiens chromosome 19, cosmid F18718, complete sequence.//5.5e-42:509:71//AC006126

[11641] F-THYRO1001426//*** SEQUENCING IN PROGRESS *** Homo sapiens genomic DNA (PAC 1118i22) from chromosome 11; HTGS phase 1, WORKING DRAFT SEQUENCE.//2.7e-31:172:81//AJ002553

[11642] F-THYRO1001434//Human Chromosome 11 pac pDJ393o15, WORKING DRAFT SEQUENCE, 8 unordered pieces.//1.0:98:70//AC000384

[11643] F-THYRO1001458//Bos taurus non-muscle myosin heavy chain mRNA, partial cds.//1.9e-58:653:711/U87265

[11644] F-THYRO1001480//Homo sapiens clone DJ0756HI 1, WORKING DRAFT SEQUENCE, 5 unordered pieces.//7.5e-42:357:80//AC006001

[11645] F-THYRO1001487//H. sapiens DNA sequence.//0.92:160:64//Z22449

[11646] F-THYRO1001534//Homo sapiens chromosome 17, clone hCIT.468_F_{—}23, WORKING DRAFT SEQUENCE, 3 unordered pieces.//4.8e-47:266:80//AC004666

[11647] F-THYRO1001537//Human DNA sequence *** SEQUENCING IN PROGRESS *** from clone 998H6, WORKING DRAFT SEQUENCE.//1.3e-79:479:89//AL031687

[11648] F-THYRO1001541//Human DNA sequence from clone 399M14 on chromosome Xq26.1-26.3. Contains ESTs, an STS and GSSs, complete sequence.//0.0034:106:77//Z96074

[11649] F-THYRO1001559//Rattus norvegicus simple sequence repeat D18Mco6.//1.6e-09:351:63//AF006056

[11650] F-THYRO1100570//RPCII 1-49B23.TJ RPCI11 Homo sapiens genomic clone R-49B23, genomic survey sequence.//1.4e-65:384:91//AQ052105

[11651] F-THYRO1001573//Homo sapiens clone 24778 unknown mRNA.//8.2e-104:546:95//AF070572

[11652] F-THYRO1001584//CIT-HSP-2365J21.TF CIT-HSP Homo sapiens genomic clone 2365J21, genomic survey sequence.//1.3e-24:180:88//AQ080498

[11653] F-THYRO1001595//Human DNA sequence *** SEQUENCING IN PROGRESS *** from clone Y313F4, WORKING DRAFT SEQUENCE.//8.7e-145:779:93//AL023808

[11654] F-THYRO1001602//Homo sapiens chromosome 17, clone hRPK.786_{—}0_{—}4, complete sequence.//2.9e-26:393:68//AC005863

[11655] F-THYRO1001605//Dictyostelium discoideum filopodin (talA) gene, complete cds.//0.0012:436:58//U14576

[11656] F-THYRO1001617//Homo sapiens full-length insert cDNA clone ZD69D05.//8.6e-43:342:82//AF086381

[11657] F-THYRO1001637//Homo sapiens clone DJ1019EO5, WORKING DRAFT SEQUENCE, 10 unordered pieces.//6.2e-15:318:66//AC004950

[11658] F-THYRO1001656//Homo sapiens PAC clone DJO44LI5 from Xq23, complete sequence.//1.5e-05:147:68//AC004827

[11659] F-THYRO1001661

[11660] F-THYRO1001671//Homo sapiens mRNA for 2′-5′ oligoadenylate synthetase 59 kDa isoform.//2.5e-164:780:98//AJ225089

[11661] F-THYRO1001673//Homo sapiens clone RG 161 A02, complete sequence.//4.4e-40:770:64//AC005071

[11662] F-THYRO1001703//S. coelicolor plasmid SCP2 transfer region DNA.//0.14:414:59//X72857

[11663] F-THYRO1001706//Homo sapiens BAC clone RG281B09 from 7q21.1-q31.1, complete sequence.//2.6e-43:308:75//AC004745

[11664] F-THYRO1001721/1, complete sequence.//9.9e-134:770:91//AC005500

[11665] F-THYRO1001738//Human DNA sequence *** SEQUENCING IN PROGRESS * from clone 355C18, WORKING DRAFT SEQUENCE.//0.99:163:61//AL022327

[11666] F-THYRO1001745

[11667] F-THYRO1001746

[11668] F-THYRO1001772//HS_{—}3069_B1_C05_MF CIT Approved Human Genomic Sperm Library D Homo sapiens genomic clone Plate=3069 Col=9 Row=F, genomic survey sequence.//1.5e-61:360:91//AQ171021

[11669] F-THYRO1100793//B. taurus mRNA for beta-subunit of rod photoreceptor CNG-channel.//0.028:446:58//X89626

[11670] F-THYRO1001809

[11671] F-THYRO1001828//Human DNA sequence *** SEQUENCING IN PROGRESS * from clone 110F11, WORKING DRAFT SEQUENCE.//1.3e-175:841:98//AL033526

[11672] F-THYRO1001854//Homo sapiens chromosome 17, clone hCIT54K19, complete sequence.//7.9e-07:445:59//AC003664

[11673] F-THYRO1001895 4.4e-13:248:68//AB012576

[11674] F-THYRO1001907//Homo sapiens BAC clone RG054D04 from 7q31, complete sequence.//2.9e-15:144:77//AC005058

[11675] F-VESEN1000122//HS_{—}3075 B1_C09_MF CIT Approved Human Genomic Sperm Library D Homo sapiens genomic clone Plate=3075 Col=17 Row=F, genomic survey sequence.//1.1e-16:130:90//AQ143749

[11676] F-Y79AA1000013

[11677] F-Y79AA1000033//Homo sapiens BAC clone GS114109 from 7 p14-p15, complete sequence.//2.9e-95:300:94//AC006027

[11678] F-Y79AA1000037//Human prot-oncogene (BMI-1) mRNA, complete cds.//2.4e-19:230:66//L13689

[11679] F-Y79AA1000059//Homo sapiens immunophilin homolog ARA9 mRNA, complete cds.//2.2e-38:629:64//U78521

[11680] F-Y79AA1000065//Human DNA sequence from cosmid J256K24, between markers DXS6791 and DXS8038 on chromosome X contains EST.//5.3e-10:117:83//Z72005

[11681] F-Y79AA1000131//Homo sapiens LERK-6 (EPLG6) gene, exon I.//7.6e-10:381:64//U92893

[11682] F-Y79AA1000181//Human DNA sequence from clone 612B18 on chromosome 1q24-25.3 Contains exon from gene similar to 40S ribosomal protein, first coding exon of dynamin 2 (DYNII). ESTs, STS, GSS, CpG Island, complete sequence.//1.4e-165:732:99//AL031864

[11683] F-Y79AA1000202//Drosophila melanogaster DNA sequence (P I DS06882 (D310)), complete sequence.//9.1e-20:339:65//AC005115

[11684] F-Y79AA1000214//Homo sapiens clone DJ0673M15, WORKING DRAFT SEQUENCE, 33 unordered pieces.//3.7e-72:397:93//AC004854

[11685] F-Y79AA1000230

[11686] F-Y79AA1000231//Mus musculus SIK similar protein mRNA, complete cds.//8.5e-151:833:90//AF053232

[11687] F-Y79AA1000258//Leishmania donovani histidine secretory acid phosphatase (SAcP-1) gene, complete cds.//0.0099:547:58//U78522

[11688] F-Y79AA1000268//Mus musculus Nip21 mRNA, complete cds.//4.0e-11:424:62//AF035207

[11689] F-Y79AA1000313

[11690] F-Y79AA1000328//CIT-HSP-386A20.TF CIT-HSP Homo sapiens genomic clone 386A20, genomic survey sequence.//5.9e-07:173:69//B55085

[11691] F-Y79AA1000342//RPCI11-57J6.TK.1 RPCII 1 Homo sapiens genomic clone R-57J6, genomic survey sequence.//5.2e-27:151:99//AQ115511

[11692] F-Y79AA1000346//B. primigenius mRNA for coat protein gamma-cop.//5.7e-69:694:71//X92987

[11693] F-Y79AA1000349//M. musculus Spnr mRNA for RNA binding protein.//1.8e-98:535:92//X84692

[11694] F-Y79AA1000355//Homo sapiens clone DJ0847008, WORKING DRAFT SEQUENCE, 3 unordered pieces.//1.6e-21:129:85//AC005484

[11695] F-Y79AA1000368//H. sapiens CpG island DNA genomic Mse1 fragment, clone 12fl, reverse read cpg12f1.rt1c.//0.00016:53:98//Z56610

[11696] F-Y79AA1000405//Plasmodium falciparum DNA *** SEQUENCING IN PROGRESS * from MALI P4, WORKING DRAFT SEQUENCE.//0.069:366:59//AL031747

[11697] F-Y79AA1000410//Human DNA sequence from PAC 117P19 on chromosome X.//1.0e-25:235:80//Z86061

[11698] F-Y79AA1000420//H. sapiens CpG island DNA genomic Mse1 fragment, clone 82c3, forward read cpg82c3.ft1a.//2.0e-36:194:98//Z63378

[11699] F-Y79AA1000469//Mus musculus ancient ubiquitous 46 kDa protein AUP 1 precursor (Aup 1) mRNA, complete cds.//8.5e-121:696:89//U41736

[11700] F-Y79AA1000480//HS_{—}2175_A2_Hi 1_T7 CIT Approved Human Genomic Sperm Library D Homo sapiens genomic clone Plate=2175 Col=22 Row=O, genomic survey sequence.//2.5e-26:178:89//AQ307693

[11701] F-Y79AA1000538//Homo sapiens clone DJ1158B01, WORKING DRAFT SEQUENCE, 23 unordered pieces.//0.67:111:72//AC004980

[11702] F-Y79AA1000539//HS_{—}2237_B2_F10_MF CIT Approved Human Genomic Sperm Library D Homo sapiens genomic clone Plate=2237 Col=20 Row=L, genomic survey sequence.//1.2e-14:168:77//AQ153503

[11703] F-Y79AA1000540//Homo sapiens clone DJ0655N24, WORKING DRAFT SEQUENCE, 8 unordered pieces.//0.94:127:67//AC005193

[11704] F-Y79AA1000560//Mouse mRNA for alpha-adaptin (C).//1.7e-114:776:84//X14972

[11705] F-Y79AA1000574//M. musculus tex23 mRNA (5′region).//1.8e-23:291:75//X80424

[11706] F-Y79AA1000589//Homo sapiens clone 614 unknown mRNA, complete sequence.//8.6e-153:755:97//AF091080

[11707] F-Y79AA1000627//Homo sapiens zinc finger protein (ZF5128) mRNA, complete cds.//5.2e-135:644:98//AF060503

[11708] F-Y79AA1000705//M .musculus mRNA of enhancer-trap-locus I.//6.9e-148:902:86//X69942

[11709] F-Y79AA1000734//Homo sapiens PEX11 beta mRNA for peroxisome assembly factor, complete cds.//4.8e-180:850:98//AB018080

[11710] F-Y79AA1000748//Caenorhabditis elegans cosmid F25B5.//0.00019:308:60//U23172

[11711] F-Y79AA1000752//Oryctolagus cuniculus mRNA for hnRNP-El protein.//1.7e-40:513:68//AJ003023

[11712] F-Y79AA1000774

[11713] F-Y79AA1000782

[11714] F-Y79AA1000784//Homo sapiens RanBP7/importin 7 mRNA, complete cds.//3.5e-177:847:97//AF098799

[11715] F-Y79AA1000794//H. sapiens CpG island DNA genomic Mse1 fragment, clone 45a4, forward read cpg45a4.ft11a.//2.5e-13:104:92//Z61120

[11716] F-Y79AA1000800//Homo sapiens GABA-B receptor mRNA, complete cds.//0.98:244:60//AF056085

[11717] F-Y79AA1000802

[11718] F-Y79AA1000805//Human Chromosome 11 Cosmid cSRL30hl 1, complete sequence.//9.3e-76:528:85//U73642

[11719] F-Y79AA1000824//RPCI11-26B4.TP RPCI-11 Homo sapiens genomic clone RPCI-11-26B4, genomic survey sequence.//4.4e-14:99:95//B84538

[11720] F-Y79AA1000827//Human DNA sequence *** SEQUENCING IN PROGRESS *** from clone 117715, WORKING DRAFT SEQUENCE.//1.5e-08:249:69//AL022315

[11721] F-Y79AA1000833//Macaca fascicularis mRNA for alpha-tubulin.//1.8e-103:603:89//X04757

[11722] F-Y79AA1000850

[11723] F-Y79AA1000962//Human DNA sequence from PAC 360E18 on chromosome X contains EST, CpG island and polymorphic CA repeat.//0.038:468:59//Z82203

[11724] F-Y79AA1000966//Mus musculus COP9 complex subunit 4 (COPS4) mRNA, complete cds.//9.7e-150:865:89//AF071314

[11725] F-Y79AA1000968//Rattus norvegicus initiation factor eIF-2B gamma subunit (eIF-2B gamma) mRNA, complete cds.//6.4e-122:717:88//U338253

[11726] F-Y79AA1000969//Mouse chromosome 6 BAC-284H12 (Research Genetics mouse BAC library) complete sequence.//1H.0:155:63//AC002397

[11727] F-Y79AA1000976//Caenorhabditis elegans cosmid F54C1.//4.3e-06:130:73//U88165

[11728] F-Y79AA1000985//Mus musculus pericentrin mRNA, complete cds.//2.4e-44:428:77//U05823

[11729] F-Y79AA1001023

[11730] F-Y79AA1001041//Human mutY homolog (hMYH) gene, complete cds.//2.3e-13:90:100//U63329

[11731] F-Y79AA1001048//Human mRNA for very-long-chain acyl-CoA dehydrogenase (VLCAD), complete cds.//2.6e-28:772:60//D43682

[11732] F-Y79AA1001061//Homo sapiens chromosome 4 clone B331M8 map 4q25, complete sequence.//9.4e-36:292:82//AC004701

[11733] F-Y79AA1001068//tipAL-AS complex: tipA=TipAL-AS [Streptomyces lividans, Genomic, 1146 nt].//0.17:537:59//S64314

[11734] F-Y79AA1001077//Zea mays mRNA for aldehyde oxidase-2, complete cds.//0.17:231:64//D88452

[11735] F-Y79AA1001078

[11736] F-Y79AA1001105//Zebrafish otx2 mRNA for otx homeoprotein, complete cds.//3.1e-63:529:77//D26173

[11737] F-Y79AA1001145//Homo sapiens clone GS166C05, WORKING DRAFT SEQUENCE, 7 unordered pieces.//1.3e-23:228:76//AC005015

[11738] F-Y79AA1001167

[11739] F-Y79AA1001177//M. musculus mRNA for NfiX1-protein.//4.0e-10:398:64//Y07688

[11740] F-Y79AA1001185//Human DNA sequence *** SEQUENCING IN PROGRESS *** from clone 16915, WORKING DRAFT SEQUENCE.//1.1e-113:666:90//Z93015

[11741] F-Y79AA1001211//HS_{—}3124_B2_H08_MR CIT Approved Human Genomic Sperm Library D Homo sapiens genomic clone Plate=3124 Col=16 Row=P, genomic survey sequence.//5.5e-12:87:96//AQ187492

[11742] F-Y79AA1001216

[11743] F-Y79AA1001228//Mycobacterium tuberculosis H37Rv complete genome; segment 143/162.//0.028:188:67//AL021841

[11744] F-Y79AA1001233//Human placental 17-beta-hydroxysteroid dehydrogenase mRNA, complete cds.//3.5e-24:731:60//M36263

[11745] F-Y79AA1001236//Homo sapiens mRNA for JM23 protein, complete coding sequence (clone IMAGE 34581 and IMAGE 45355 and LLNLc101133Q7 (RZPD Berlin)).//1.2e-133:441:97//AJ005892

[11746] F-Y79AA1001281//HS_{—}2241_B2_F09_MF CIT Approved Human Genomic Sperm Library D Homo sapiens genomic clone Plate=2241 Col=18 Row=L, genomic survey sequence.//5.0e-27:169:94//AQ217497

[11747] F-Y79AA1001299//Human Inil mRNA, complete cds.//6.7e-115:323:93//U04847

[11748] F-Y79AA1001312

[11749] F-Y79AA1001323

[11750] F-Y79AA1001384

[11751] F-Y79AA1001391//Mus musculus transcription factor HOXA13 (Hoxal 3) gene, complete cds.//5.8e-42:245:74//U59322

[11752] F-Y79AA1001394//Caenorhabditis elegans cosmid F54B3, complete sequence.//7.8e-18:636:58//Z48583

[11753] F-Y79AA1001402//Homo sapiens Chr.14 PAC RPCI4-794B2 (Roswell Park Cancer Institute Human PAC Library) complete sequence.//1.2e-110:738:85//AC005924

[11754] F-Y79AA1001493//H. sapiens DNA sequence.//2.0e-27:254:8211Z22497

[11755] F-Y79AA1001511//Human DNA sequence from clone 931 K24 on chromosome 20p 12 Contains ESTs and GSSs, complete sequence.//1.1e-158:804:95//AL034430

[11756] F-Y79AA1001533//Mouse mRNA for RNA polymerase I associated factor (PAF53), complete cds.//1.7e-100:820:78//D14336

[11757] F-Y79AA1001541//HS_{—}3197_A2_G11_MR CIT Approved Human Genomic Sperm Library D Homo sapiens genomic clone Plate=3197 Col=22 Row=M, genomic survey sequence.//5.1e-28:218:8611AQ150183

[11758] F-Y79AA1001548//Homo sapiens chromosome 19, cosmid R28738, complete sequence.//5.4e-21:167:86//AC004151

[11759] F-Y79AA1001555//R. norvegicus mRNA for drebrin A.//0.88:463:59//X59267

[11760] F-Y79AA1001581//FMR1 {CGG repeats} [human, Fragile X syndrome patient, Genomic, 429 nt].//0.00051:252:65//S74494

[11761] F-Y79AA1001585//Human hypoxanthine phosphoribosyltransferase (HPRT) gene, complete cds.//7.2e-33:375:76//M26434

[11762] F-Y79AA1001594

[11763] F-Y79AA1001603//Homo sapiens PAC 128M19 derived from chromosome 21q22.3, containing the HMG-14 and CHD5 genes, complete cds, complete sequence.//4.2e-06:338:66//AF064861

[11764] F-Y79AA1001613//Homo sapiens mRNA for KIAA0683 protein, complete cds.//0.024:520:57//AB014583

[11765] F-Y79AA1001647//Caenorhabditis elegans DNA *** SEQUENCING IN PROGRESS *** from clone Y53F4, WORKING DRAFT SEQUENCE.//0.014:331:61//Z92860

[11766] F-Y79AA1001665//Human DNA sequence from clone 299D3 on chromosome 22q13.3, complete sequence.//0.99:273:63//Z84468

[11767] F-Y79AA1001679//O. cuniculus lambda-crystallin mRNA, complete cds.//1.2e-97:682:81//M22743

[11768] F-Y79AA1001692//insulin-like growth factor binding protein-2 [human, placenta, Genomic, 1292 nt, segment I of 4].//5.6e-05:426:59//S37712

[11769] F-Y79AA1001696//Rice endogenous double-stranded RNA encoding polyprotein (containing putative helicase and putative RNA-dependent RNA polymerase domains), complete cds.//1.0:437:60//D32136

[11770] F-Y79AA1001705//M. musculus fkh-5 gene.//0.18:153:64//X71943

[11771] F-Y79AA1001711//Human DNA sequence *** SEQUENCING IN PROGRESS *** from clone 328El 9, WORKING DRAFT SEQUENCE.//5.4e-76:191:98//AL022240

[11772] F-Y79AA1001781//Homo sapiens genomic DNA, chromosome 21q22.2 (Down Syndrome region), segment 10/15, WORKING DRAFT SEQUENCE.//0.99:227:63//AP000017

[11773] F-Y79AA1001805//H. sapiens CpG island DNA genomic Mse1 fragment, clone 13d12, reverse read cpg13d12.rt1c.//2.6e-13:88:100//Z64565

[11774] F-Y79AA1001827//Oryctolagus cuniculus PiUS mRNA, complete cds.//3.7e-130:775:88//U74297

[11775] F-Y79AA1001846//CIT-HSP-2300M6.TR CIT-HSP Homo sapiens genomic clone 2300M6, genomic survey sequence.//8.3e-17:218:76//AQ012369

[11776] F-Y79AA1001848//Human mRNA for KIAA0390 gene, complete cds.//4.2e-10:378:62//AB002388

[11777] F-Y79AA1001866//Rattus norvegicus Cys2/His2 zinc finger protein (rKr1) mRNA, complete cds.//6.9e-41:441:71//U41164

[11778] F-Y79AA1001874//Homo sapiens hJAG2.de1-E6 (JAG2) mRNA, alternatively spliced isoform of Jagged2, complete cds.//0.00017:412:62//AF029779

[11779] F-Y79AA1001875//CIT-HSP-2317GI8.TR CIT-HSP Homo sapiens genomic clone 2317G18, genomic survey sequence.//1.9e-09:271:67//AQ042654

[11780] F-Y79AA1001923//H. sapiens CpG island DNA genomic Mse1 fragment, clone 193c12, forward read cpg193c12.ft1a.//0.0031:108:75//Z60186

[11781] F-Y79AA1001963//CITB1-E1-2510J4.TR CITBI-EL Homo sapiens genomic clone 2510J4, genomic survey sequence.//1.8e-05:56:100//AQ261184

[11782] F-Y79AA1002027//Arabidopsis thaliana ubiquitin-conjugating enzyme 17 (UBC17) mRNA, complete cds.//3.3e-13:451:62//AF028340

[11783] F-Y79AA1002083//Human DNA sequence *** SEQUENCING IN PROGRESS *** from clone 526114, WORKING DRAFT SEQUENCE.//0.91:134:65//Z82214

[11784] F-Y79AA1002089

[11785] F-Y79AA1002093//Mus musculus transcription factor like protein 4 TCFL4 mRNA, partial cds.//1.2e-112:678:88//U43548

[11786] F-Y79AA1002103//HS_{—}3052_B1_H08_MR CIT Approved Human Genomic Sperm Library D Homo sapiens genomic clone Plate=3052 Col=15 Row=P, genomic survey sequence.//6.5e-18:238:72//AQ135014

[11787] F-Y79AA1002115

[11788] F-Y79AA1002125//H. sapiens (D8S135) DNA segment containing GT repeat.//1.5e-14:99:96//X61693

[11789] F-Y79AA1002139//Saccharomyces cerevisiae dnaJ homolog Hlj1p (HLJ1) gene, complete cds.//2.5e-07:208:64//U19358

[11790] F-Y79AA1002204//HS_{—}2235_B2_D12_MF CIT Approved Human Genomic Sperm Library D Homo sapiens genomic clone Plate=2235 Col=24 Row=H, genomic survey sequence.//2.9e-13:89:98//AQ154260

[11791] F-Y79AA1002208//CIT-HSP-2006M21.TV CIT-HSP Homo sapiens genomic clone 2006M21, genomic survey sequence.//3.7e-27:154:98//B56397

[11792] F-Y79AA1002209//E. coli tyrS gene coding for tyrosyl-tRNA synthetase.//2.8e-05:143:70//J01719

[11793] F-Y79AA1002210//Homo sapiens chromosome 19, cosmid R28058, complete sequence.//8.3e-22:229:78//AC005615

[11794] F-Y79AA1002211//Homo sapiens chromosome 17, clone HRPC1067M6, complete sequence.//1.0e-06:241:67//AC003043

[11795] F-Y79AA1002220//CIT-HSP-2374P23.TR CIT-HSP Homo sapiens genomic clone 2374P23, genomic survey sequence.//1.3e-68:375:95//AQ109738

[11796] F-Y79AA1002229//Human mRNA for KIAA0086 gene, complete cds.//0.12:203:63//D42045

[11797] F-Y79AA1002234//Homo sapiens mRNA for KIAA0692 protein, partial cds.//1.3e-174:821:98//AB014592

[11798] F-Y79AA1002246//Homo sapiens clone GS166C05, WORKING DRAFT SEQUENCE, 7 unordered pieces.//0.50:470:60//AC005015

[11799] F-Y79AA1002258//Homo sapiens mRNA for KIAA0655 protein, partial cds.//6.8e-159:748:98//AB014555

[11800] F-Y79AA1002298//Human density enhanced phosphatase-1 mRNA, complete cds.//0.036:278:62//U10886

[11801] F-Y79AA1002307//Homo sapiens mRNA for KIAA0634 protein, partial cds.//6.4e-129:622:97//AB014534

[11802] F-Y79AA1002311//R. norvegicus mRNA for cytosolic resiniferatoxin-binding protein.//2.0e-116:693:82//X67877

[11803] F-Y79AA1002351//S. clavuligerus pah and cas genes.//1.0:369:58//X84101

[11804] F-Y79AA1002361//Rattus norvegicus mRNA for protein phosphatase 1 (GL-subunit).//5.4e-105:762:80//Y18208

[11805] F-Y79AA1002399//Homo sapiens chromosome 17, clone hRPK.700_H-6, complete sequence.//1.0e-159:41:100//AC005920

[11806] F-Y79AA1002407//Homo sapiens chromosome 17, clone hRPC.842_A_{—}23, complete sequence.//. I e-118:609:84//AC004662

[11807] F-Y79AA1002416//Mus musculus CTP synthetase homolog (CTPsH) mRNA, complete cds.//4.4e-90:529:88//U49385

[11808] F-Y79AA1002431//Chlamydomonas reinhardtii novel protein kinase mRNA, complete cds.//1.0:166:66//U36196

[11809] F-Y79AA1002433//CIT-HSP-384K8.TF CIT-HSP Homo sapiens genomic clone 384K8, genomic survey sequence.//0.24:85:72//B51917

[11810] F-Y79AA1002472//Homo sapiens chromosome 19, BAC CIT-B-393i15 (BC301323), complete sequence.//1.9e-13:242:69//AC006116

[11811] F-Y79AA1002482//Homo sapiens full-length insert cDNA clone ZC18H06.//1.2e-35:462:71//AF088022

[11812] F-Y79AA1002487//Bovine herpesvirus type I genes for UL[27,28,29,30,31].//0.93:215:60//X94677

[11813] Homology Search Result Data 3.

[11814] The result of the homology search of the GenBank using the clone sequence of 3′-end except EST and STS.
[11815] Data include

[11816] the name of clone,

[11817] definition of the top hit data,

[11818] the P-value: the length of the compared sequence: identity (%), and

[11819] the Accession No. of the top hit data, as in the order separated by //.

[11820] Blank indicates that the 3′-end sequence corresponding to the 5′-end was not determined in the clone.

[11821] Data are not shown for the clones in which the P-value was higher than 1.

[11822] R-HEMBA1000005//Mouse tumor cell dnaJ-like protein I mRNA, complete cds.//3.6e-60:504:78//L16953

[11823] R-HEMBA1000030//F. rubripes GSS sequence, clone 063K10bD3, genomic survey sequence.//0.28:117:68//Z88864

[11824] R-HEMBA1000042//RPCI11-77G23.TV RPCII 1 Homo sapiens genomic clone R-77G23, genomic survey sequence.//1.3e-56:292:97//AQ268240

[11825] R-HEMBA1000046//Homo sapiens chromosome X map Xq28, complete sequence.//9.8e-56:401:82//U82696

[11826] R-HEMBA1000050//Human cosmid insert containing polymorphic marker DXS455.//0.0010:175:681/L31948

[11827] R-HEMBA1000076//Homo sapiens clone DJ1021120, WORKING DRAFT SEQUENCE, 6 unordered pieces.//4.9e-41:364:79//AC005520

[11828] R-HEMBA1000111//Homo sapiens Xp22 BAC GSHB-519E5 (Genome Systems Human BAC library) complete sequence.//4.7e-30:229:84//AC003684

[11829] R-HEMBA1000129//Homo sapiens chromosome 17, clone HClT48C 15, complete sequence.//2.4e-93:503:93//AC003104

[11830] R-HEMBA1000141//Homo sapiens mRNA for KIAA0797 protein, partial cds.//6.5e-99:514:94//AB018340

[11831] R-HEMBA1000150//Homo sapiens clone RG086D03, WORKING DRAFT SEQUENCE, 3 unordered pieces.//2.7e-37:289:83//AC005060

[11832] R-nnnnnnnnnnnn//Homo sapiens scaffold attachment factor B (SAF-B) mRNA, partial cds.//3.1e-21:417:6411L43631

[11833] R-HEMBA1000158

[11834] R-nnnnnnnnnnnn

[11835] R-HEMBA1000180//Plasmodium falciparum encoding Pfg27/25.//0.073:292:56//X84904

[11836] R-HEMBA1000185//Homo sapiens clone DJ0693MI 1, WORKING DRAFT SEQUENCE, 7 unordered pieces.//5.3e-40:286:85//AC006146

[11837] R-HEMBA1000193

[11838] R-HEMBA1000201//Homo sapiens SNF5/INI1 gene, exon 9.//2.0e-24:137:99//Y17126

[11839] R-HEMBA1000213//Caenorhabditis elegans cosmid C44C8.//0.025:192:68//AF100655

[11840] R-HEMBA1000216//Human Chromosome 16 BAC clone CIT987SK-A-815A9, complete sequence.//2.5e-31:269:79//AF001548

[11841] R-nnnnnnnnnnnn

[11842] R-HEMBA1000231//Human DNA sequence from PAC 212P9 on chromosome 1p34.1-1p35. Contains delta opiate receptor, CpG island, CA repeat.//4.3e-24:400:68//AL009181

[11843] R-HEMBA1000243//Homo sapiens chromosome 17, Neurofibromatosis 1 locus, complete sequence.//1.3e-19:319:69//AC004526

[11844] R-HEMBA1000244

[11845] R-HEMBA1000251//Meloidogyne hapla mitochondrial COII gene, 3′ end of cds; transfer RNA-His gene; 16S ribosomal RNA gene; ND3 gene, complete cds; cytochrome b (cytb) gene, 5′ end of cds.//0.16:338:60//L76262

[11846] R-HEMBA1000264//Homo sapiens genomic DNA, chromosome 21q22.2 (Down Syndrome region), segment 5/15, WORKING DRAFT SEQUENCE.//0.00093:300:66//AP000012

[11847] R-nnnnnnnnnnnn//Homo sapiens Xp22 BAC GSHB 526D21 (Genome Systems Human BAC library) complete sequence.//3.5e-10:238:70//AC003037

[11848] R-HEMBA1000282//Arabidopsis thaliana BAC IG002P 16.//0.71:344:60//AF007270

[11849] R-HEMBA1000288//Homo sapiens Xp22 PACs RPC11-263P4 and RPC11-164K3 complete sequence.//4.8e-33:267:82//AC003046

[11850] R-HEMBA1000290//Homo sapiens chromosome 17, clone HRPC837J 1, complete sequence.//2.2e-15:249:69//AC004223

[11851] R-HEMBA1000302//CIT-HSP-2173N10.TF CIT-HSP Homo sapiens genomic clone 2173N10, genomic survey sequence.//1.0:215:61//B95105

[11852] R-nnnnnnnnnnnn//Mus musculus Plenty of SH3s (POSH) mRNA, complete cds.//1.0e-77:551:82//AF030131

[11853] R-nnnnnnnnnnnn//Rattus norvegicus Ca2+-dependent activator protein (CAPS) mRNA, complete cds.//2.0e-96:546:90//U 16802

[11854] R-HEMBA1000307//Mus musculus mRNA for CDV-1 protein.//3.8e-36:315:68//Y10496

[11855] R-nnnnnnnnnnnn//Plasmodium falciparum 3D7 chromosome 12 PFYAC 181 genomic sequence, WORKING DRAFT SEQUENCE, 8 unordered pieces.//0.078:379:59//AC005505

[11856] R-HEMBA1000338//Human DNA sequence *** SEQUENCING IN PROGRESS *** from clone 620EI 1, WORKING DRAFT SEQUENCE.//2.0e-33:399:72//AL031667

[11857] R-HEMBA1000351//Homo sapiens complete genomic sequence between DI 6S3070 and D16S3275, containing Familial Mediterranean Fever gene disease.//1.7e-39:272:87//AJ003147

[11858] R-HEMBA1000355//Human primary Alu transcript.//0.0045:67:85//U67829

[11859] R-HEMBA1000357//Homo sapiens (subclone 9_h8 from P1H16) DNA sequence.//8.7e-93:426:88//L42086

[11860] R-HEMBA1000366//Homo sapiens PAC clone DJ0942116 from 7q11, complete sequence.//1.7e-12:130:83//AC006012

[11861] R-HEMBA1000369//Human DNA sequence from clone 1039K5 on chromosome 22q12.3-13.2 Contains gene similar to PICKI perinuclear binding protein, gene similar to monocarboxylate transporter (MCT3), ESTs, STS, GSS and a CpG island, complete sequence.//1.9e-69:355:97//AL031587

[11862] R-HEMBA1000376//Homo sapiens chromosome 19, BAC CIT-B-393i15 (BC301323), complete sequence.//3.7e-66:410:89//AC006116

[11863] R-HEMBA1000387//Homo sapiens chromosome 17, clone HClT169H9, WORKING DRAFT SEQUENCE, 6 unordered pieces.//2.0e-43:363:81//AC002993

[11864] R-HEMBA1000390//Homo sapiens BAC clone RGO41 D11 from 7q21, complete sequence.//4.6e-23:417:69//AC005053

[11865] R-HEMBA1000392//Human Chromosome 11p14.3 PAC clone pDJ59 m18, complete sequence.//6.2e-05:174:68//AC004582

[11866] R-HEMBA1000396//Homo sapiens DNA sequence from PAC 159A15 on chromosome Xp 11.21-p 11.23. Contains inter-alpha-trypsin inhibitor heavy chain H3 precursor-like protein.//1.4e-62:564:77//AL022575

[11867] R-HEMBA1000411

[11868] R-HEMBA1000418//Liverwort Marchantia polymorpha chloroplast genome DNA.//0.94:210:60//X04465

[11869] R-HEMBA1000422//CIT-HSP-2382A6.TR CIT-HSP Homo sapiens genomic clone 2382A6, genomic survey sequence.//4.4e-12:98:92//AQ078233

[11870] R-HEMBA1000428//Human DNA sequence from clone 393P23 on chromosome Xq21.1-21.33. Contains GSSs, complete sequence.//2.0e-93:526:90//Z95400

[11871] R-HEMBA1000434//Homo sapiens clone DJ0309D19, WORKING DRAFT SEQUENCE, 12 unordered pieces.//2.7e-07:452:60//AC004826

[11872] R-HEMBA1000442//E. caballus microsatellite DNA, clone HMB4.//0.39:135:62//Y07733

[11873] R-HEMBA1000456//Plasmodium falciparum DNA *** SEQUENCING IN PROGRESS * from contig 4-52, complete sequence.//2.6e-05:174:70//AL010226

[11874] R-HEMBA1000459//Arabidopsis thaliana putative transmembrane protein GIp (AtG1), putative nuclear DNA-binding protein G2p (AtG2), Em1 protein (ATEM1), putative chlorophyll synthetase (AtG4), putative transmembrane protein G5p (AtG5), putative acyl-coA dehydrogenase (AtG6), and calcium dependent protein kinase genes, complete cds; and unknown genes.//0.013:212:63//AF049236

[11875] R-HEMBA1000460//Homo sapiens PAC clone DJ0593H 12 from 7p31, complete sequence.//8.6e-14:556:98//AC004839

[11876] R-HEMBA1000464//Caenorhabditis elegans cosmid C34B7, complete sequence.//0.086:334:61//Z83220

[11877] R-HEMBA1000469//Homo sapiens BAC clone RG442F18 from 2, complete sequence//1.8e-52:472:79//AC005104

[11878] R-HEMBA1000488//, complete sequence.//3.3e-68:200:99//AC005500

[11879] R-HEMBA1000490//Caenorhabditis elegans cosmid Y53C12B, complete sequence.//0.97:233:6111Z99278

[11880] R-HEMBA1000491

[11881] R-HEMBA1000504//Plasmodium falciparum DNA *** SEQUENCING IN PROGRESS *** from contig 3-64, complete sequence.//1.7e-08:440:60//AL009014

[11882] R-HEMBA1000505//Homo sapiens genomic DNA of 8p21.3-p22 anti-oncogene of hepatocellular colorectal and non-small cell lung cancer, segment 1/11.//0.37:189:62//AB020858

[11883] R-HEMBA1000508//Human DNA sequence from cosmid V210E9, between markers DXS366 and DXS87 on chromosome X.//1.1e-25:248:80//Z70280

[11884] R-HEMBA1000518//RPCI11-6022.TV RPCI-11 Homo sapiens genomic clone RPCI-11-6022, genomic survey sequence.//0.0035:293:61//B49544

[11885] R-HEMBA1000519

[11886] R-HEMBA1000520//Arabidopsis thaliana chromosome II BAC F10A12 genomic sequence, complete sequence.//0.30:255:63//AC006232

[11887] R-HEMBA1000523//Human cleavage stimulation factor 77 kDa subunit mRNA, complete cds.//1.2e-53:203:92//U 15782

[11888] R-HEMBA1000531//CIT-HSP-388J17.TR CIT-HSP Homo sapiens genomic clone 388J17, genomic survey sequence.//2.7e-24:137:99//B55638

[11889] R-HEMBA1000540//Human DNA sequence *** SEQUENCING IN PROGRESS *** from clone 51 OD11, WORKING DRAFT SEQUENCE.//0.00014:329:60//Z98044

[11890] R-HEMBA1000545//Homo sapiens Xp22 BAC GS-619J3 (Genome Systems Human BAC library) complete sequence.//6.9e-87:552:87//AC004103

[11891] R-nnnnnnnnnnnnn//Human DNA sequence *** SEQUENCING IN PROGRESS *** from clone 134019, WORKING DRAFT SEQUENCE.//8.9e-121:584:98//AL034555

[11892] R-HEMBA1000557//Homo sapiens Chromosome 16 BAC clone CIT987SK-44M2, complete sequence.//5.7e-45:307:87//AC004381

[11893] R-HEMBA1000561//Mus musculus clone OST20235, genomic survey sequence.//1.3e-43:279:90//AF046762

[11894] R-HEMBA1000563//Plasmodium falciparum chromosome 2, section 5 of 73 of the complete sequence.//3.8e-05:506:56//AE001368

[11895] R-HEMBA1000568//RPCI11-49P8.TK.1 RPCII 1 Homo sapiens genomic clone R-49P8, genomic survey sequence.//1.7e-1101:498:97//AQ116293

[11896] R-nnnnnnnnnnnn

[11897] R-HEMBA1000575//Human DNA sequence *** SEQUENCING IN PROGRESS *** from clone 754E20, WORKING DRAFT SEQUENCE.//1.3e-47:458:75//AL022335

[11898] R-HEMBA1000588//Mus musculus FLI-LRR associated protein-1 mRNA, complete cds.//2.9e-62:447:81//AF045573

[11899] R-HEMBA1000591//Homo sapiens mRNA for EIB-55 kDa-associated protein.//1.2e-111:591:94//AJ007509

[11900] R-HEMBA1000592//Plasmodium falciparum DNA *** SEQUENCING IN PROGRESS *** from contig 4-10, complete sequence.//3.5e-09:421:60//AL010216

[11901] R-HEMBA1000594//Homo sapiens clone RG004N09, WORKING DRAFT SEQUENCE, 5 unordered pieces.//1.1e-15:421:66//AC005044

[11902] R-HEMBA1000604//HS_{—}2220_A1_G10_MF CIT Approved Human Genomic Sperm Library D Homo sapiens genomic clone Plate=2220 Col=19 Row=M, genomic survey sequence.//1.0e-51:306:92//AQ151991

[11903] R-HEMBA1000608

[11904] R-HEMBA1000622//H. sapiens CpG island DNA genomic Mse1 fragment, clone 155e4, reverse read cpg155e4.rt1a.//4.5e-16:105:98//Z56962

[11905] R-HEMBA1000636//Homo sapiens genomic DNA, chromosome 21q22.2 (Down Syndrome region), segment 1/15, WORKING DRAFT SEQUENCE.//4.8e-62:421:86//AP000008

[11906] R-HEMBA1000637//Homo sapiens mRNA for KIAA0690 protein, partial cds.//1.2e-97:443:97//AB014590

[11907] R-HEMBA1000655//Homo sapiens chromosome 19, cosmid R26349, complete sequence.//9.8e-61:311:90//AC005953

[11908] R-HEMBA1000657

[11909] R-HEMBA1000662

[11910] R-HEMBA1000673//Human DNA sequence from PAC 448E20 on chromosome Xq26.1 contains ESTs and STS.//1.0e-13:351:63//Z97196

[11911] R-HEMBA1000682//Homo sapiens clone DJI 136G02, WORKING DRAFT SEQUENCE, 4 unordered pieces.//1.2e-50:298:79//AC005377

[11912] R-HEMBA1000686//HS_{—}3018_B1_H10_T7 CIT Approved Human Genomic Sperm Library D Homo sapiens genomic clone Plate=3018 Col=19 Row=P, genomic survey sequence.//0.00048:210:62//AQ093513

[11913] R-HEMBA1000702//Homo sapiens clone DJ241P17, WORKING DRAFT SEQUENCE, 7 unordered pieces.//9.7e-54:317:88//AC005000

[11914] R-HEMBA1000705//Glossonotus univittatus 12S mitochondrial ribosomal RNA, small subunit, mitochondrial gene, partial sequence.//0.080:138:65//U77850

[11915] R-HEMBA1000719//Rattus norvegicus mRNA for TESK1, complete cds.//0.96:291:58//D50864

[11916] R-HEMBA1000722

[11917] R-HEMBA1000726//Homo sapiens PAC clone DJ0701016 from 7q33-q36, complete sequence.//4.4e-26:284:77//AC005531

[11918] R-HEMBA1000727//Plasmodium falciparum DNA *** SEQUENCING IN PROGRESS * from contig 4-89, complete sequence.//9.1e-05:351:60//AL010266

[11919] R-HEMBA1000747//Homo sapiens DNA sequence from PAC 124C6 on chromosome 6q21. Contains genomic marker D6S1603, ESTs, GSSs and a STS with a CA repeat polymorphism, complete sequence.//2.5e-16:123:93//AL021326

[11920] R-HEMBA1000749//Human Chromosome 16 BAC clone CIT987SK-327024, complete sequence.//2.8e-32:298:79//AC003108

[11921] R-HEMBA1000752//Human DNA sequence from PAC 50A13 on chromosome Xp 11. Contains ATP SYNTHASE LIPID BINDING PROTEIN P1 (P2, P3) precursor (ATP5GI, ATP5G2, ATP5G3) like pseudogene, ESTs and STSs. Contains polymorphic CA repeat.//2.8e-90:542:90//Z92545

[11922] R-HEMBA1000769//Homo sapiens P1 clone GSP13996 from 5q12, complete sequence.//2.7e-36:405:75//AC005031

[11923] R-HEMBA1000773//HS_{—}3050_A2_B08_MF CIT Approved Human Genomic Sperm Library D Homo sapiens genomic clone Plate=3050 Col=16 Row=C, genomic survey sequence.//0.00053:268:60//AQ105619

[11924] R-HEMBA1000774//Homo sapiens PAC clone DJ0630C24 from 7q31-q32, complete sequence.//4.7e-46:338:85//AC004690

[11925] R-HEMBA1000791//***ALU WARNING: Human Alu-Sc subfamily consensus sequence.//5.3e-47:279:91//U14571

[11926] R-HEMBA1000817//Sequence 1 from patent WO 8904839.//.86:148:67//109339

[11927] R-HEMBA1000822//T. brucei kinetoplast maxicircle variable region DNA.//0.00061:246:61//Z15118

[11928] R-HEMBA1000827//Homo sapiens Ser/Arg-related nuclear matrix protein (SRM160) mRNA, complete cds.//6.9e-43:228:98//AF048977

[11929] R-HEMBA1000843//Homo sapiens DNA sequence from clone 511 B24 on chromosome 20q11.2-12. Contains the TOPI gene for Topoisomerase I, the PLCGI gene for 1-Phosphatidylinositol-4,5-Bisphosphate Phosphodiesterase Gamma 1 (EC 3.1.4.11, PLC-Gamma-1, Phospholipase C-Gamma-1 PLC-II, PLC-148), the KIAA0395 gene for a probable Zinc Finger Homeobox protein and a 60S Ribosomal Protein L23 LIKE pseudogene. Contains a predicted CpG island, ESTs, STSs and GSSs, complete sequence.//1.7e-41:319:84//AL022394

[11930] R-HEMBA1000851//Arabidopsis thaliana chromosome I BAC T14N5 genomic sequence, complete sequence.//0.40:168:67//AC004260

[11931] R-HEMBA1000852//Homo sapiens Xp22 bins 3-5 PAC RPCI4-617A9 (Roswell Park Cancer Institute Human PAC Library) containing Arylsulfatase D and E genes, complete sequence.//1.5e-112:572:96//AC005295

[11932] R-HEMBA1000867//Homo sapiens clone DJ0971C03, WORKING DRAFT SEQUENCE, 18 unordered pieces.//0.11:121:71//AC004938

[11933] R-HEMBA1000869//Homo sapiens chromosome 16 p11.2 BAC clone CIT987SK-A-180G2, WORKING DRAFT SEQUENCE, 5 unordered pieces.//3.2e-22:186:76//AC002042

[11934] R-HEMBA1000870//Human BAC clone GS542D18 from 7q31-q32, complete sequence.//0.0060:283:63//AC002528

[11935] R-HEMBA1000872//Rattus norvegicus polymorphic satellite repetitive elements.//3.8e-05:269:61//M98801

[11936] R-HEMBA1000876//Homo sapiens chromosome 12 p13.3 clone RPCI1-96H9, WORKING DRAFT SEQUENCE, 66 unordered pieces.//6.5e-38:327:77//AC006057

[11937] R-HEMBA1000908//CIT-HSP-237314.TR CIT-HSP Homo sapiens genomic clone 237314, genomic survey sequence.//5.0e-34:221:90//AQ108658

[11938] R-HEMBA1000910//T. pigmentosa UM1060 macronuclear rDNA telomeric region 3′ term.//0.19:280:61//X04205

[11939] R-HEMBA1000918//RPCI11-68E14.TK RPCII 1 Homo sapiens genomic clone R-68E14, genomic survey sequence.//1.3e-32:172:100//AQ267293

[11940] R-HEMBA1000919

[11941] R-HEMBA1000934//Homo sapiens DNA sequence from PAC 874C20 on chromosome 6p22.1-22.3. Contains a Zinc Finger Protein ZFP47 LIKE gene, a Zinc Finger Protein pseudogene and a Zinc Finger Protein SRE-ZBP pseudogene. Contains ESTs, STSs and GSSs, complete sequence.//2.6e-18:284:71//AL021997

[11942] R-HEMBA1000942//Homo sapiens clone RG350L10, WORKING DRAFT SEQUENCE, 15 unordered pieces.//1.4e-17:217:76//AC005098

[11943] R-HEMBA1000943//Homo sapiens chromosome 17, clone hRPK.640_I_{—}15, complete sequence.//9.0e-113:586:95//AC005324

[11944] R-HEMBA1000946//T5N8TFB TAMU Arabidopsis thaliana genomic clone T5N8, genomic survey sequence.//0.030:369:59//B26224

[11945] R-HEMBA1000960//Homo sapiens clone RG339C12, WORKING DRAFT SEQUENCE, 10 unordered pieces.//2.5e-52:494:77//AC005096

[11946] R-HEMBA1000968//Homo sapiens P1 clone 797al I containing MHC class II DQ-beta (HLA-DQB) and MHC class II DC-alpha (HLA-DCA) genes, complete cds.//3.5e-77:568:83//U92032

[11947] R-HEMBA1000971//RPCII 1-54D1.TJ RPCII 1 Homo sapiens genomic clone R-54D1, genomic survey sequence.//2.3e-27:153:98//AQ081552

[11948] R-HEMBA1000972//Human DNA sequence from clone II F4 on chromosome Xq23 Contains GSSs, complete sequence.//7.3e-43:375:79//AL023876

[11949] R-HEMBA1000974//Homo sapiens clone DA0091H08, complete sequence.//2.8e-104:521:97//AC004817

[11950] R-HEMBA1000975//Human DNA sequence from clone 105D16 on chromosome Xp 11.3-11.4 Contains pseudogene similar to laminin-binding protein, CA repeat, STS, complete sequence.//8.0e-22:352:68//AL031311

[11951] R-HEMBA1000985//Homo sapiens PAC clone DJ0797C05 from 7q31, complete sequence.//8.5e-05:306:63//AC004888

[11952] R-HEMBA1000986//Homo sapiens clone RG031N19, WORKING DRAFT SEQUENCE, 1 unordered pieces.//5.7e-37:296:83//AC005632

[11953] R-HEMBA1000991//RPCII 1-22017.TVB RPCI-11 Homo sapiens genomic clone RPCI-11-22017, genomic survey sequence.//6.5e-44:162:90//AQ008952

[11954] R-HEMBA1001007

[11955] R-HEMBA1001008//Homo sapiens chromosome 16, P1 clone 79-2A (LANL), complete sequence.//0.082:313:60//AC005365

[11956] R-HEMBA1001009//O. sativa osr40g2 gene.//0.99:203:62//Y08987

[11957] R-HEMBA1001017//Homo sapiens mRNA for KIAA0468 protein, complete cds.//1.0e-113:587:95//AB007937

[11958] R-HEMBA1001019//Bos taurus cyclin-dependent kinase 1 (cdk1/cdc2) mRNA, complete cds.//7.4e-24:215:82//L26547

[11959] R-HEMBA1001020//Human DNA sequence *** SEQUENCING IN PROGRESS *** from clone 732E4, WORKING DRAFT SEQUENCE.//2.8e-18:449:64//AL008722

[11960] R-HEMBA1001022

[11961] R-HEMBA1001024//Homo sapiens BAC clone 393122 from 8q21, complete sequence.//6.6e-48:536:74//AF070717

[11962] R-HEMBA1001026//T33H14TF TAMU Arabidopsis thaliana genomic clone T33H14, genomic survey sequence.//0.013:180:66//B97363

[11963] R-nnnnnnnnnnnn//Caenorhabditis elegans cosmid R10H10, complete sequence.//1.2e-25:438:65//Z70686

[11964] R-HEMBA1001051//Homo sapiens 12q24.1 PAC RPCI3-521E19 (Roswell Park Cancer Institute Human PAC library) complete sequence.//7.3e-38:188:89//AC004217

[11965] R-HEMBA1001052//Rabbit alpha-1-globin gene to theta-1-globin pseudogene region.//2.4e-24:279:74//X04751

[11966] R-HEMBA1001060//HS_{—}2056_B1_C00_MR CIT Approved Human Genomic Sperm Library D Homo sapiens genomic clone Plate=2056 Col=1 Row=F, genomic survey sequence.//4.1e-14:137:83//AQ245004

[11967] R-HEMBA1001071//M. musculus COL3A1 gene for collagen alpha-1.//6.9e-38:513:70//X52046

[11968] R-HEMBA1001077//Human DNA sequence *** SEQUENCING IN PROGRESS *** from clone 150C2, WORKING DRAFT SEQUENCE.//1.9e-22:507:61//AL022318

[11969] R-HEMBA1001080

[11970] R-HEMBA1001085//Human Chromosome 15q26.1 PAC clone pDJ290i21 containing fur, fes, and alpha mannosidase 11x genes, WORKING DRAFT SEQUENCE, 9 unordered pieces.//2.2e-43:317:83//AC004586

[11971] R-HEMBA1001088//Caenorhabditis elegans cosmid C18H7.//0.46:301:60//AF067607

[11972] R-HEMBA1001094//Homo sapiens clone RG491N20, complete sequence.//5.3e-98:501:96//AC005105

[11973] R-HEMBA1001099

[11974] R-HEMBA1001109//Human DNA sequence *** SEQUENCING IN PROGRESS *** from clone 118J21, WORKING DRAFT SEQUENCE.//3.1e-39:335:80//AL033527

[11975] R-HEMBA1001121//Human cosmid LL12NCO1-132B11A, ETV6 gene, intron 2.//9.8e-11:122:81//U81833

[11976] R-HEMBAI1001122//Plasmodium falciparum MAL3P6, complete sequence.//0.0024:284:63//Z98551

[11977] R-HEMBA1001123//Human NFE genomic fragment.//3.6e-26:318:72//M98511

[11978] R-HEMBA1001133

[11979] R-HEMBA1001137//Homo sapiens full-length insert cDNA clone ZD29F04.//4.2e-88:426:98//AF086241

[11980] R-HEMBA1001140//Homo sapiens clone RG228D17, WORKING DRAFT SEQUENCE, 2 unordered pieces.//4.0e-41:304:84//AC005077

[11981] R-HEMBA1001172//Human DNA sequence *** SEQUENCING IN PROGRESS * from clone 54B20, WORKING DRAFT SEQUENCE.//3.7e-36:261:85//Z98304

[11982] R-HEMBA1001174//Plasmodium falciparum chromosome 2, section 35 of 73 of the complete sequence.//1.0:219:58//AE001398

[11983] R-HEMBA1001197

[11984] R-HEMBA1001208//HS_{—}2233_A1_G10_MF CIT Approved Human Genomic Sperm Library D Homo sapiens genomic clone Plate=2233 Col=19 Row=M, genomic survey sequence.//0.083:174:68//AQ170789

[11985] R-HEMBA1100226//Homo sapiens clone DJI 136G02, WORKING DRAFT SEQUENCE, 4 unordered pieces.//5.1e-59:553:75//AC005377

[11986] R-HEMBA1001235//RPCI11-50E6.TJ RPCI11 Homo sapiens genomic clone R-50E6, genomic survey sequence.//2.6e-08:97:76//AQ052666

[11987] R-HEMBA1001247//Caenorhabditis elegans cosmid C01 F 1.//2.4e-05:319:63//U58761

[11988] R-HEMBA1001257//Rattus norvegicus alpha-methylacyl-CoA racemase mRNA, complete cds.//1.5e-24:439:66//U89905

[11989] R-HEMBA1001265//Homo sapiens BAC clone RG 139P11 from 7q11-q21, complete sequence.//9.9e-21:537:63//AC004491

[11990] R-nnnnnnnnnnnn//Homo sapiens chromosome 17, clone HClT75GI6, complete sequence.//0.022:169:65//AC003042

[11991] R-HEMBA1001286

[11992] R-HEMBA1001289

[11993] R-HEMBA1001294//HS_{—}3219_A2_G01_T7 CIT Approved Human Genomic Sperm Library D Homo sapiens genomic clone Plate=3219 Col=2 Row=M, genomic survey sequence.//0.24:251:63//AQ189882

[11994] R-HEMBA1001299//Homo sapiens, clone hRPK.12_A_{—}1, complete sequence.//1.3e-38:381:76//AC006222

[11995] R-HEMBA1001302//cDNA encoding a human homologue of a mouse novel polypeptide derived from stromal cell.//4.1e-28:114:92//E12258

[11996] R-HEMBA1001303//Plasmodium falciparum DNA *** SEQUENCING IN PROGRESS *** from MALIP1, WORKING DRAFT SEQUENCE.//0.00011:382:58//AL031744

[11997] R-HEMBA1001310

[11998] R-HEMBA1001319//Plasmodium falciparum 3D7 chromosome 12 PFYAC1383 genomic sequence, WORKING DRAFT SEQUENCE, 3 unordered pieces.//4.2e-09:491:58//AC005504

[11999] R-HEMBA1001323//Drosophila yakuba mitochondrial DNA molecule.//8.3e-06:485:60//X03240

[12000] R-HEMBA1001326//Homo sapiens DNA sequence from BAC 55C20 on chromosome 6. Contains a Spinal Muscular Atrophy (SMA3) LIKE gene overlapping with a beta-glucoronidase LIKE pseudogene. Contains a membrane protein LIKE pseudogene, a Glyceraldehyde 3-phosphate dehydrogenase (GAPDH) LIKE pseudogene, five predicted tRNA genes. Contains ESTs, GSSs (BAC end sequences) and a CA repeat polymorphism, complete sequence.//2.2e-14:277:69//AL021368

[12001] R-HEMBA1001327//Human DNA sequence from clone 522P13 on chromosome 6p21.31-22.3. Contains a 60S Ribosomal Protein L21 pseudogene and an HNRNP A3 (Heterogenous Nuclear Riboprotein A3, FBRNP) pseudogene. Contains ESTs, STSs and GSSs, complete sequence.//0.15:360:61//AL024509

[12002] R-HEMBA1001330//Homo sapiens 12q24 PAC RPCI 1-66E7 (Roswell Park Cancer Institute Human PAC library) complete sequence.//1.3e-27:481:67//AC004216

[12003] R-HEMBA1001351//Homo sapiens chromosome 18, clone hRPK.474_N_{—}24, complete sequence.//7.1e-45:252:94//AC006238

[12004] R-HEMBA1001361//Homo sapiens chromosome 9, clone hRPK.202_H_{—}3, complete sequence.//1.4e-113:569:97//AC006241

[12005] R-HEMBA1001375//Homo sapiens full-length insert cDNA clone ZE09HO3.//2.8e-89:428:99//AF086542

[12006] R-HEMBA1001377//Homo sapiens PAC clone DJ0728D04, complete sequence.//2.3e-32:324:77//AC004865

[12007] R-HEMBA1001383

[12008] R-HEMBA1001387

[12009] R-HEMBA1001388//Homo sapiens clone RG189J21, WORKING DRAFT SEQUENCE, 15 unordered pieces.//8.9e-06:108:83//AC005073

[12010] R-HEMBA1001391//Yeast mitochondrial aap1 gene for ATPase subunit 8.//7.3e-08:500:59//X00960

[12011] R-HEMBA1100398//Homo sapiens genomic DNA, chromosome 21q11.1, segment 21/28, WORKING DRAFT SEQUENCE.//2.3e-48:315:88//AP000050

[12012] R-HEMBA1001405//Human DNA sequence *** SEQUENCING IN PROGRESS *** from clone 50024, WORKING DRAFT SEQUENCE.//5.5e-35:464:68//AL034380

[12013] R-HEMBA1001407

[12014] R-HEMBA1001411//Yeast (S. cerevisiae) mitochondria Ser-tRNA-UCN gene and flanks.//0.00029:301:62//K01981

[12015] R-HEMBA1001413

[12016] R-HEMBA1001415//Human DNA sequence *** SEQUENCING IN PROGRESS * from clone 41018, WORKING DRAFT SEQUENCE.//5.6e-101:512:96//AL031732

[12017] R-HEMBA1001432//Homo sapiens clone DJ0693MI 1, WORKING DRAFT SEQUENCE, 7 unordered pieces.//6.3e-37:302:81//AC006146

[12018] R-HEMBA1001433//Human DNA sequence from PAC 339A18 on chromosome Xp 11.2. Contains KIAA0178 gene, similar to mitosis-specific chromosome segregation protein SMC1 of S. cerevisiae, DNA binding protein similar to URE-BI, ESTs and STS.//1.9e-32:242:79//Z97054

[12019] R-HEMBAI1001435//Homo sapiens chromosome 21, Neurofibromatosis 1 (NF1) related locus, complete sequence.//5.7e-59:457:82//AC004527

[12020] R-HEMBA1001442//Human DNA sequence from PAC 507115 on chromosome Xq26.3-27.3. Contains 60S ribosomal protein L44 (L41, L36) like gene, ESTs, STSs and a polymorphic CA repeat.//0.051:276:63//Z98950

[12021] R-HEMBA1001446//HS_{—}3207_A1_A08_MR CIT Approved Human Genomic Sperm Library D Homo sapiens genomic clone Plate=3207 Col=15 Row=A, genomic survey sequence.//8.9e-06:119:73//AQ175385

[12022] R-HEMBA1001450//Homo sapiens BAC clone RG 114B 19 from 7q31.1, complete sequence.//0.0043:266:63//AC005065

[12023] R-HEMBA1001454//Homo sapiens PAC clone DJ0673011 from 7q31, complete sequence.//7.1e-25:210:82//AC004855

[12024] R-HEMBA1001455//Homo sapiens chromosome 17, clone hRPK.640_I_{—}15, complete sequence.//2.7e-08:316:62//AC005324

[12025] R-HEMBA1001463//Homo sapiens chromosome 17, clone hRPK.1064_E_{—}11, complete sequence.//0.57:219:60//AC005208

[12026] R-HEMBA1001476//Homo sapiens clone DJ0607J02, WORKING DRAFT SEQUENCE, 12 unordered pieces.//9.3e-50:252:80//AC004840

[12027] R-HEMBA1001478

[12028] R-HEMBA1001497

[12029] R-HEMBA1001510//Human HLA class III region containing cAMP response element binding protein-related protein (CREB-RP) and tenascin X (tenascin-X) genes, complete cds, complete sequence.//3.5e-41:282:86//U89337

[12030] R-HEMBA1001515//Human DNA sequence from PAC 238J17 on chromosome 6q22. Contains EST and STS.//1.9e-79:529:86//Z98753

[12031] R-HEMBA1001517//Homo sapiens BAC clone RG459N13 from 7 p15, complete sequence.//4.3e-18:335:71//AC004549

[12032] R-HEMBA1001522

[12033] R-HEMBA1001526//Human DNA sequence from cosmid 444G9 from a contig from the tip of the short arm of chromosome 16, spanning 2 Mb of 16p 13.3 Contains ESTs and CpG islands.//5.6e-08:265:67//Z98258

[12034] R-HEMBA1001533//Human DNA sequence from PAC 179M20 on chromosome 20q12-13.1. Contains adenosine deaminase (ADA), placental protein Diff33, CA repeat, ESTs, STS.//7.8e-16:235:72//Z97053

[12035] R-HEMBA1001557

[12036] R-HEMBAI100566//Human Chromosome X clone bWXD187, complete sequence.//2.2e-44:416:78//AC004383

[12037] R-HEMBA1001569//Sequence 15 from patent U.S. Pat. No. 5,693,476.//1.8e-59:389:88//I77040

[12038] R-HEMBA1001570//Homo sapiens PAC clone DJ0844FO9 from 7 p12-p13, complete sequence.//1.1e-44:316:87//AC004453

[12039] R-HEMBA1001579//Plasmodium falciparum 3D7 chromosome 12 PFYAC357 genomic sequence, WORKING DRAFT SEQUENCE, 7 unordered pieces.//0.0047:437:60//AC005506

[12040] R-HEMBA1001581//P. falciparum complete gene map of plastid-like DNA (IR-B).//2.3e-07:491:58//X95276

[12041] R-HEMBA1001585//Caenorhabditis elegans cosmid C06A6.//0.68:224:62//U41012

[12042] R-HEMBA1001589

[12043] R-HEMBA1001595//CIT-HSP-2349G19.TF CIT-HSP Homo sapiens genomic clone 2349G19, genomic survey sequence.//8.0e-69:337:99//AQ060483

[12044] R-HEMBA1001608//Homo sapiens chromosome 17, clone HClT462L7, complete sequence.//9.5e-59:514:78//AC005177

[12045] R-HEMBA1001620//S. polyrrhiza mRNA for D-myo-inositol-3-phosphate synthase.//4.5e-12:289:65//Z11693

[12046] R-nnnnnnnnnnnn/HS_{—}2195_A1_E09_MF CIT Approved Human Genomic Sperm Library D Homo sapiens genomic clone Plate=2195 Col=17 Row=I, genomic survey sequence.//5.8e-09:358:58//AQ292688

[12047] R-HEMBA1001636//Human putative potassium channel subunit (h-erg) mRNA, complete cds.//0.77:225:59//U04270

[12048] R-HEMBA1001640//Human DNA sequence from PAC 50J22 on chromosome 6p21. Contains ETS related protein TEL like and GS2 like genes, ESTs and an STS.//6.0e-49:404:79//Z84484

[12049] R-nnnnnnnnnnnn

[12050] R-HEMBA1001655//Homo sapiens chromosome 5, BAC clone 194j18 (LBNL H158), complete sequence.//1.1e-103:532:95//AC005368

[12051] R-HEMBA1001658//Human DNA sequence *** SEQUENCING IN PROGRESS *** from clone Y313F4, WORKING DRAFT SEQUENCE.//1.0:197:64//AL023808

[12052] R-HEMBA1001661//Homo sapiens chromosome 5p, BAC clone 50g21 (LBNL H154), complete sequence.//1.5e-100:457:93//AC005740

[12053] R-HEMBA1001672//Homo sapiens methyl-CpG binding protein MBD3 (MBD3) mRNA, complete cds.//1.2e-90:496:91//AF072247

[12054] R-HEMBA1001675

[12055] R-HEMBA1100678//Homo sapiens voltage dependent anion channel protein mRNA, complete cds.//1.3e-101:534:94//AF038962

[12056] R-HEMBA1001681//CIT-HSP-2345M7.TF CIT-HSP Homo sapiens genomic clone 2345M7, genomic survey sequence.//0.21:124:68//AQ056593

[12057] R-HEMBA1100702//Homo sapiens 12q13.1 PAC RPC11-228P16 (Roswell Park Cancer Institute Human PAC Library) complete sequence.//8.3e-06:279:63//AC004801

[12058] R-HEMBA1001709//Homo sapiens mRNA for KIAA0698 protein, complete cds.//1.9e-96:483:96//AB014598

[12059] R-HEMBA1001711//Human HepG2 3′ region cDNA, clone hmd2b02.//2.3e-31:169:100//D16886

[12060] R-HEMBA1001712//HS-1015-B1-E01-MR.abi CIT Human Genomic Sperm Library C Homo sapiens genomic clone Plate=CT 790 Col=1 Row=J, genomic survey sequence.//0.0025:200:65//B32577

[12061] R-HEMBA1001714//Rattus norvegicus mitochondrial ATPase inhibitor gene, complete cds.//6.6e-27:316:75//U 12250

[12062] R-HEMBA1001718//CIT-HSP-2171J2.TR CIT-HSP Homo sapiens genomic clone 2171J2, genomic survey sequence.//3.1e-41:167:87//B89781

[12063] R-HEMBA1001723//Rattus norvegicus EH domain binding protein Epsin mRNA, complete cds.//0.53:275:61//AF018261

[12064] R-HEMBA1001731//Human DNA sequence *** SEQUENCING IN PROGRESS *** from clone 322P7, WORKING DRAFT SEQUENCE.//2.9e-48:292:84//AL023799

[12065] R-HEMBA1001734//Homo sapiens Chromosome 15q22.3-23 PAC 88 m3, WORKING DRAFT SEQUENCE, 2 ordered pieces.//3.2e-33:290:81//AC005959

[12066] R-HEMBA1001744//Human DNA sequence from clone 134E 15 on chromosome 6q21 Contains Blimp-1, apoptosis specific protein similar to yeast APG5 ESTs, GSSs and retroviral sequence, complete sequence.//0.98:203:62//AL022067

[12067] R-HEMBA1100745//Homo sapiens BAC clone RG298G08 from 7 p15-p21, complete sequence.//0.00019:312:59//AC005084

[12068] R-HEMBA1001746//Plasmodium falciparum 3D7 chromosome 12 PFYAC812 genomic sequence, WORKING DRAFT SEQUENCE, 8 unordered pieces.//0.045:457:61//AC004153

[12069] R-HEMBA1001761//Homo sapiens chromosome X, clone hCIT.200_L_{—}4, complete sequence.//3.8e-39:331:80//AC006121

[12070] R-HEMBA1001781//Homo sapiens Xp22 BAC GSHB-590J6 (Genome Systems Human BAC library) complete sequence.//0.0062:245:60//AC004554

[12071] R-HEMBA1001784//Homo sapiens chromosome 5p, BAC clone 50g21 (LBNL H154), complete sequence.//2.1e-22:370:63//AC005740

[12072] R-HEMBA1001791//Human DNA sequence from clone 931E15 on chromosome Xq25. Contains STSs, GSSs and genomic marker DXS8098, complete sequence.//3.0e-50:408:80//AL023575

[12073] R-HEMBA1001800//CIT-HFP-2049N5.TF CIT-HSP Homo sapiens genomic clone 2049N5, genomic survey sequence.//9.0e-37:335:77//AQ009222

[12074] R-HEMBA1001803//Plasmodium falciparum 3D7 chromosome 12 PFYAC357 genomic sequence, WORKING DRAFT SEQUENCE, 7 unordered pieces.//0.86:536:56//AC005506

[12075] R-nnnnnnnnnnnn/Mouse interleukin 2 receptor (p55 IL-2R) mRNA, 5′ end.//2.9e-93:553:89//M21977

[12076] R-HEMBA1001808//Homo sapiens mRNA, chromosome 1 specific transcript KIAA0500.//2.8e-112:548:98//AB007969

[12077] R-HEMBA1001809

[12078] R-HEMBA1001815//Homo sapiens Xp22 BAC GS-321G17 (Genome Systems Human BAC library) complete sequence.//2.6e-48:363:84//AC004025

[12079] R-HEMBA1001819//Homo sapiens *** SEQUENCING IN PROGRESS *** from PAC 1577, WORKING DRAFT SEQUENCE.//1.1e-15:275:68//AJ009612

[12080] R-HEMBA1001820//HS_{—}3022_B1_A09_T7 CIT Approved Human Genomic Sperm Library D Homo sapiens genomic clone Plate=3022 Col=17 Row=B, genomic survey sequence.//0.00054:335:59//AQ165107

[12081] R-nnnnnnnnnnnn//Xenopus laevis intersectin mRNA, complete cds.//1.4e-19:533:63//AF032118

[12082] R-HEMBA1001824//S. clavuligerus linear plasmid pSCL (complete sequence).//0.62:189:65//X54107

[12083] R-HEMBA1001835//Human DNA sequence *** SEQUENCING IN PROGRESS *** from clone 191J 18, WORKING DRAFT SEQUENCE.//1.0:450:60//AL024507

[12084] R-HEMBA1001844//Human familial Alzheimer's disease (STM2) gene, complete cds.//1.6e-07:170:68//U50871

[12085] R-HEMBA1001847

[12086] R-HEMBA1001861//Homo sapiens mRNA for KIAA0617 protein, complete cds.//3.3e-108:553:96//AB014517

[12087] R-HEMBA1001864//Homo sapiens genomic DNA, 21q22.1 region, clone: Q82F5A16, genomic survey sequence.//1.7e-14:245:67//AG002463

[12088] R-HEMBA1001866//HSS_{—}2258_B2_DO1_MR CIT Approved Human Genomic Sperm Library D Homo sapiens genomic clone Plate=2258 Col=2 Row=H, genomic survey sequence.//2.8e-39:397:75//AQ221138

[12089] R-nnnnnnnnnnnn//Homo sapiens BAC clone RG 114B 19 from 7q31.1, complete sequence.//5.9e-56:303:94//AC005065

[12090] R-HEMBA1001888//Homo sapiens Xp22-150 BAC GSHB-309P15 (Genome Systems Human BAC Library) complete sequence.//1.7e-43:281:88//AC006210

[12091] R-HEMBA1001896

[12092] R-HEMBA1001910

[12093] R-HEMBA1100912//Homo sapiens chromosome 5, P1 clone 1308e5 (LBNL H13), complete sequence.//0.10:307:61//AC004775

[12094] R-HEMBA1001913

[12095] R-HEMBA1001915//HS_{—}2037_A1_E12_MR CIT Approved Human Genomic Sperm Library D Homo sapiens genomic clone Plate=2037 Col=23 Row=I, genomic survey sequence.//0.071:206:641/AQ233106

[12096] R-HEMBA1001918//Homo sapiens chromosome 5, P1 clone 1308e5 (LBNL H13), complete sequence.//0.97:449:59//AC004775

[12097] R-HEMBA1001921//Homo sapiens germinal center kinase related protein kinase mRNA, complete cds.//2.0e-105:534:96//AF000145

[12098] R-HEMBA1001939//Human DNA sequence *** SEQUENCING IN PROGRESS *** from clone 508115, WORKING DRAFT SEQUENCE.//4.6e-13:120:82//AL021707

[12099] R-HEMBA1001940//Homo sapiens clone DJ1093116, WORKING DRAFT SEQUENCE, 5 unordered pieces.//2.2e-36:301:81//AC005629

[12100] R-HEMBA1001942//Human PAC clone DJ0205E24 from Xq23, complete sequence.//1.9e-10:208:68//AC003013

[12101] R-HEMBA1001945//Plasmodium falciparum chromosome 2, section 70 of 73 of the complete sequence.//1.2e-06:393:60//AE001433

[12102] R-HEMBA1001950//R. prowazekii genomic DNA fragment (clone A437R).//0.33:122:6611Z82646

[12103] R-HEMBA1001960//Borrelia afzelii VS461 outer surface protein D (ospD) gene, complete cds.//0.0086:427:59//U05329

[12104] R-HEMBA1001962//Homo sapiens chromosome 4 clone B71M12 map 4q25, complete sequence.//4.5e-07:176:70//AC004069

[12105] R-HEMBA1001964//HS_{—}2215_B1_HO0_MR CIT Approved Human Genomic Sperm Library D Homo sapiens genomic clone Plate=2215 Col=1 Row=P, genomic survey sequence.//7.3e-25:215:74//AQ151931

[12106] R-HEMBA1001967//Human DNA sequence from clone 341E18 on chromosome 6 p11.2-12.3. Contains a Serine/Threonine Protein Kinase gene (presumptive isolog of a Rat gene) and a novel alternatively spliced gene. Contains a putative CpG island, ESTs and GSSs, complete sequence.//1.7e-51:209:95//AL031178

[12107] R-HEMBA1001979//CIT-HSP-2387112.TF.1 CIT-HSP Homo sapiens genomic clone 2387112, genomic survey sequence.//4.9e-06:153:71//AQ240461

[12108] R-HEMBA1001987//Human DNA sequence from clone 444C7 on chromosome 6p22.3-23. Contains an EST, an STS and GSSs, complete sequence.//3.1e-46:437:77//AL033521

[12109] R-HEMBA1001991//Human DNA sequence from PAC 42616 on chromosome 1p34.1-1p35. Contains NIPP-1-like gene a nuclear inhibitor of protein phosphatase-1, ESTs, and a CA repeat.//1.1e-48:446:78//AL020997

[12110] R-HEMBA1002003//Homo sapiens mRNA for protein phosphatase 2C (beta).//5.1e-90:448:97//AJ005801

[12111] R-HEMBA1002008//Homo sapiens DNA sequence from PAC 95C20 on chromosome Xp 11.3-11.4. Contains STSs and the DXS7 locus with GT and GTG repeat polymorphisms, complete sequence.//3.2e-42:317:84//Z97181

[12112] R-HEMBA1002018//HS_{—}3006_B11_D10_T7 CIT Approved Human Genomic Sperm Library D Homo sapiens genomic clone Plate=3006 Col=19 Row=H, genomic survey sequence.//1.0:63:74//AQ089717

[12113] R-HEMBA1002022//Homo sapiens chromosome 18, clone hRPK.453_M_I, complete sequence.//0.93:339:59//AC006203

[12114] R-HEMBA1002035//Mus musculus chromosome 19, clone CIT282B21, complete sequence.//1.4e-11:285:67//AC003694

[12115] R-HEMBA1002039

[12116] R-HEMBA1002049//Human DNA sequence *** SEQUENCING IN PROGRESS *** from clone 117715, WORKING DRAFT SEQUENCE.//5.3e-52:266:84//AL022315

[12117] R-HEMBA1002084//CIT-HSP-2357L11.TR CIT-HSP Homo sapiens genomic clone 2357L11, genomic survey sequence.//0.0013:185:6611AQ063078

[12118] R-HEMBA1002092//Mus musculus Olf-1/EBF-like-3 transcription factor (O/E-3) mRNA, complete cds.//2.7e-70:479:86//U92703

[12119] R-HEMBA1002100//Homo sapiens thyroid receptor interactor (TRIP7) mRNA, 3′ end of cds.//8.5e-32:206:91//L40357

[12120] R-HEMBA1002102//Homo sapiens Chromosome 15q26.1 PAC clone pDJ427d 15, complete sequence.//4.3e-42:302:85//AC005800

[12121] R-HEMBA1002113//Human chromosome 12 p13 sequence, complete sequence.//1.6e-64:550:80//U47924

[12122] R-HEMBA1002119//Human Chromosome 11 pac pDJ1173a5, complete sequence.//1.2e-92:435:92//AC000378

[12123] R-HEMBA1002125

[12124] R-HEMBA1002139//Human nebulin mRNA, partial cds.//0.056:68:88//U35637

[12125] R-HEMBA1002144//Homo sapiens Chromosome 11p14.3 PAC clone 6-130a9 containing tryptophan hydroxylase gene, complete sequence.//2.0e-26:323:70//AC005728

[12126] R-HEMBA1002150//Human DNA sequence from clone 742CI9 on chromosome 22q12.3-13.1. Contains a pseudogene similar to Cytochrome C Oxidase Polypeptide VB and (parts of) up to four novel genes, two with homology to Phorbolin genes and one a novel Chromobox protein gene. Contains ESTs, an STS, GSSs and putative CpG islands, complete sequence.//1.0:371:61//AL031846

[12127] R-HEMBA1002151

[12128] R-HEMBA1002153//Human BAC 367D17 from chromosome 18, complete sequence.//2.4e-21:322:70//AC003971

[12129] R-HEMBA1002160//Human DNA sequence from PAC 339A18 on chromosome Xp 11.2. Contains KIAA0178 gene, similar to mitosis-specific chromosome segregation protein SMC1 of S. cerevisiae, DNA binding protein similar to URE-B1, ESTs and STS.//2.5e-38:216:84//Z97054

[12130] R-HEMBA1002161//CIT-HSP-2163F10.TF CIT-HSP Homo sapiens genomic clone 2163F10, genomic survey sequence.//3.1e-58:284:80//B89969

[12131] R-HEMBA1002162//Caenorhabditis elegans cosmid F48C 11, complete sequence.//0.0079:286:57//Z80789

[12132] R-HEMBA1002166//Homo sapiens Xp22 BAC 620F 15 (Genome Systems BAC library) complete sequence.//5.9e-53:326:80//AC002980

[12133] R-HEMBA1002177

[12134] R-HEMBA1002185//Human DNA sequence *** SEQUENCING IN PROGRESS *** from clone 745114, WORKING DRAFT SEQUENCE.//9.5e-37:356:76//AL033532

[12135] R-HEMBA1002189//Homo sapiens Xp22 BAC GSHB-519E5 (Genome Systems Human BAC library) complete sequence.//3.4e-43:244:77//AC003684

[12136] R-HEMBA1002191//Homo sapiens clone RG228D17, WORKING DRAFT SEQUENCE, 2 unordered pieces.//4.3e-37:323:78//AC005077

[12137] R-HEMBA1002199//Human Cosmid g5129g124 from 7q31.3, complete sequence.//1.4e-89:564:87//AC002498

[12138] R-HEMBA1002204//Homo sapiens Chromosome 22q11.2 Cosmid Clone 817g In IGLC Region, complete sequence.//1.5e-31:313:71//AC000053

[12139] R-HEMBA1002212//K. lactis mitochondrial COX1 and A8 genes for cytochrome oxidase subunit I and ATPase subunit 8.//0.0023:346:60//X57546

[12140] R-HEMBA1002215//M. musculus mRNA for testin.//4.7e-61:414:84//X78989

[12141] R-HEMBA1002226//Human DNA sequence *** SEQUENCING IN PROGRESS *** from clone 2705, WORKING DRAFT SEQUENCE.//4.6e-46:375:77//AL033529

[12142] R-HEMBA1002229//Homo sapiens growth suppressor related (DOC-IR) mRNA, complete cds.//4.6e-46:238:98//AF089814

[12143] R-HEMBA1002237//Homo sapiens 12q13 PAC RPCI1-316M24 (Roswell Park Cancer Institute Human PAC library) complete sequence.//4.3e-26:469:67//AC004242

[12144] R-HEMBA1002253//Homo sapiens BAC clone GS180J15 from 7q31, complete sequence.//5.1e-23:162:82//AC005016

[12145] R-HEMBA1002257

[12146] R-HEMBA1002267//Equus caballus dermatan sulfate proteoglycan II mRNA, complete cds.//4.6e-44:300:88//AF038127

[12147] R-HEMBA1002270//Human BAC clone RG067M09 from 7q21-7q22, complete sequence.//1.9e-19:176:85//AC000057

[12148] R-HEMBA1002321

[12149] R-HEMBA1002328//HS_{—}3061_A1_D06_T7 CIT Approved Human Genomic Sperm Library D Homo sapiens genomic clone Plate=3061 Col=11 Row=G, genomic survey sequence.//1.0:151:65//AQ127617

[12150] R-HEMBA1002337//Saccharomyces cerevisiae RNA polymerase II holoenzyme component (SRB7) gene, complete cds.//3.7e-07:328:63//U23811

[12151] R-HEMBA1002341//Homo sapiens mRNA for KIAA0771 protein, partial cds.//2.4e-128:642:96//AB018314

[12152] R-HEMBA1002348//Human DNA sequence from clone 409010 on chromosome 20q12 Contains CA repeat, GSS, STS, complete sequence.//3.7e-07:587:58//AL031256

[12153] R-HEMBA1002349//Leishmania tarentolae maxicircle DNA fragment.//0.018:341:58//X02438

[12154] R-nnnnnnnnnnnn//Homo sapiens chromosome-associated protein-E (hCAP-E) mRNA, complete cds.//1.2e-121:661:93//AF092563

[12155] R-HEMBA1002381//Homo sapiens genomic DNA of 8p21.3-p22 anti-oncogene of hepatocellular colorectal and non-small cell lung cancer, segment 11//11.//1.1e-70:559:79//AB020868

[12156] R-HEMBA1002389//HS_{—}3218_B2_E08_MR CIT Approved Human Genomic Sperm Library D Homo sapiens genomic clone Plate=3218 Col=16 Row=J, genomic survey sequence.//0.0011:122:72//AQ213602

[12157] R-HEMBA1002417//Homo sapiens chromosome 19, cosmid R28784, complete sequence.//4.2e-81:232:97//AC005954

[12158] R-HEMBA1002419//Homo sapiens PAC clone DJ0649P17 from 7q11.23-q21, complete sequence.//0.50:231:64//AC004848

[12159] R-HEMBA1002430//P. falciparum complete gene map of plastid-like DNA (IR-B).//0.0023:604:56//X95276

[12160] R-HEMBA1002439//Homo sapiens clone GS096J14, WORKING DRAFT SEQUENCE, 3 unordered pieces.//3.4e-23:183:80//AC006026

[12161] R-HEMBA1002458//Human DNA sequence from clone 146H21 on chromosome Xq22 Contains cleavage stimulation factor, 64 KD subunit, gene similar to CYTOCHROME B-245 HEAVY CHAIN. pseudogene similar to hnRNP Al protein and ESTs, complete sequence.//7.7e-32:161:83//Z83819

[12162] R-HEMBA1002460//Homo sapiens clone DJ1137M13, complete sequence.//2.6e-100:305:100//AC005378

[12163] R-HEMBA1002462//Sequence 43 from patent U.S. Pat. No. 5,708,157.//2.0e-10:131:77//I80068

[12164] R-HEMBA1002477//Homo sapiens PAC clone DJ0607J23 from 7q21.2-q31.1, complete sequence.//6.6e-33:279:80//AC004841

[12165] R-HEMBA1002486/* * *ALU WARNING: Human Alu-Sq subfamily consensus sequence.//2.1e-50:290:92//U 14573

[12166] R-HEMBA1002495//CITBI-El-2515J10.TR CITB1-E1 Homo sapiens genomic clone 2515J10, genomic survey sequence.//1.0:122:68//AQ261762

[12167] R-HEMBA1002498//Homo sapiens clone DJ11102A12, WORKING DRAFT SEQUENCE, 15 unordered pieces.//2.8e-22:210:78//AC004963

[12168] R-HEMBA1002503//Homo sapiens chromosome 17, clone HRPC1067M6, complete sequence.//2.7e-17:435:58//AC003043

[12169] R-HEMBA1002508//Homo sapiens, clone hRPK.15_A_{—}1, complete sequence.//3.7e-09:408:61//AC006213

[12170] R-nnnnnnnnnnnn//Homo sapiens mRNA for histone deacetylase-like protein (JM21).//7.1e-112:456:92//AJ011972

[12171] R-HEMBA1002515

[12172] R-HEMBA1002538//Homo sapiens mRNA for KIAA0454 protein, partial cds.//1.6e-104:564:93//AB007923

[12173] R-HEMBA1002542//HS_{—}3197_B2_B 10_T7 CIT Approved Human Genomic Sperm Library D Homo sapiens genomic clone Plate=3197 Col=20 Row=D, genomic survey sequence.//2.8e-25:186:86//AQ188792

[12174] R-HEMBA1002547//Mus musculus agrin gene, exon 36.//0.0095:93:75//M92658

[12175] R-HEMBA1002552//Homo sapiens clone DJ1137M13, complete sequence.//4.0e-49:308:90//AC005378

[12176] R-HEMBA1002555//Homo sapiens full-length insert cDNA clone YR87G10.//8.3e-65:318:99//AF085957

[12177] R-HEMBA1002558//, complete sequence.//2.3e-38:264:89//AC005409

[12178] R-HEMBA1002561//Human DNA sequence from clone 396D17 on chromosome 1p33-35.3 Contains EST, STS, GSS, complete sequence.//7.1e-44:192:80//AL008634

[12179] R-nnnnnnnnnnnn//Homo sapiens protein associated with Myc mRNA, complete cds.//4.5e-119:587:97//AF075587

[12180] R-HEMBA1002583

[12181] R-HEMBA1002590//Homo sapiens DNA sequence from PAC 179N16 on chromosome 6p21.1-21.33. Contains the SAPK4 (MAPK p38delta) gene, and the alternatively spliced SAPK2 gene coding for CSaids binding protein CSBP2 and a MAPK p38beta LIKE protein. Contains ESTs, STSs and two predicted CpG islands, complete sequence.//9.4e-42:248:88//Z95152

[12182] R-HEMBA1002592//Homo sapiens chromosome 19, cosmid R30385, complete sequence.//2.6e-56:302:84//AC004510

[12183] R-HEMBA1002621

[12184] R-HEMBA1002624//Homo sapiens mRNA for KIAA0808 protein, complete cds.//6.7e-76:380:97//AB018351

[12185] R-HEMBA1002628//P. falciparum complete gene map of plastid-like DNA (IR-A).//8.8e-05:327:60//X95275

[12186] R-HEMBA1002629//Mus musculus clone OST16705, genomic survey sequence.//4.3e-06:205:66//AF046247

[12187] R-HEMBA1002645//***ALU WARNING: Human Alu-J subfamily consensus sequence.//7.1e-39:281:84//U14567

[12188] R-HEMBA1002651//Homo sapiens PAC clone DJ0593H 12 from 7p31, complete sequence.//1.1e-104:500:95//AC004839

[12189] R-HEMBA1002659//Human DNA sequence from clone 243E7 on chromosome 22q12.1. Contains ESTs, STSs and GSSs, complete sequence.//1.2e-61:280:92//AL022323

[12190] R-HEMBA1002661//Human DNA sequence *** SEQUENCING IN PROGRESS *** from clone 225E12, WORKING DRAFT SEQUENCE.//3.2e-41:325:81//AL031772

[12191] R-HEMBA1002666//Homo sapiens full-length insert cDNA clone YY74A07.//0.00037:79:84//AF088008

[12192] R-HEMBA1002678//Human DNA sequence *** SEQUENCING IN PROGRESS * from clone 1137F22, WORKING DRAFT SEQUENCE.//2.3e-107:561:94//AL034421

[12193] R-nnnnnnnnnnnn//CIT-HSP-2287E8.TF CIT-HSP Homo sapiens genomic clone 2287E8, genomic survey sequence.//5.4e-17:137:88//B99281

[12194] R-HEMBA1002688//Homo sapiens chromosome 5, P1 clone 1354A7 (LBNL H47), complete sequence.//0.033:146:70//AC004503

[12195] R-HEMBA1002696

[12196] R-HEMBA1002712//Homo sapiens PAC clone 166HI from 12q, complete sequence.//6.2e-44:302:87//AC003982

[12197] R-HEMBA1002716//Mus musculus mRNA for ELM 1, complete cds.//1.1e-31:332:76//AB004873

[12198] R-HEMBA1002728//Homo sapiens mRNA for KIAA0621 protein, partial cds.//1.2e-35:287:81//AB014521

[12199] R-HEMBA1002730//D. discoideum actin M6 gene, 5′ flank.//0.018:233:66//M29109

[12200] R-HEMBA1002742//Human DNA sequence *** SEQUENCING IN PROGRESS *** from clone 1108H3, WORKING DRAFT SEQUENCE.//2.6e-13:419:62//AL033525

[12201] R-HEMBA1002746//Mus musculus chromosome 19, clone CIT282B21, complete sequence.//0.019:202:65//AC003694

[12202] R-HEMBA1002748//Human DNA sequence *** SEQUENCING IN PROGRESS * from clone 404K8, WORKING DRAFT SEQUENCE.//0.046:263:60//AL023883

[12203] R-HEMBA1002750//Human DNA sequence from PAC 452H17 on chromosome X contains sodium- and chloride-dependent glycine transporter 1 (GLYT-1) like, ESTs.//0.052:421:58//Z96810

[12204] R-HEMBA1002768//Homo sapiens mRNA for KIAA0554 protein, partial cds.//1.2e-104:545:95//AB011126

[12205] R-HEMBA1002770//Plasmodium falciparum 3D7 chromosome 12 PFYACB8-420 genomic sequence, WORKING DRAFT SEQUENCE, 14 unordered pieces.//3.0e-07:523:59//AC005140

[12206] R-HEMBA1002777

[12207] R-HEMBA1002779//Human HepG2 3′ region MboI cDNA, clone hmdle03m3.//9.4e-25:158:93//D17139

[12208] R-HEMBA1002780//Human DNA sequence *** SEQUENCING IN PROGRESS *** from clone Y214H10, WORKING DRAFT SEQUENCE.//1.6e-42:463:75//AL022344

[12209] R-HEMBA1002794//Plasmodium falciparum MAL3P8, complete sequence.//2.2e-05:417:59//AL034560

[12210] R-HEMBA1002801//Meloidogyne javanica mitochondrial transfer RNA His, 16S ribosomal RNA (16S rRNA) genes, ND3 gene, complete cds, and cytochrome b gene, 5′ end of CDS.//0.00055:444:59//L76261

[12211] R-HEMBA1002810//Homo sapiens formin binding protein 21 mRNA, complete cds.//4.4e-115:559:97//AF071185

[12212] R-HEMBA1002816//Homo sapiens clone NH0576N21, WORKING DRAFT SEQUENCE, 5 unordered pieces.//4.3e-88:329:94//AC005043

[12213] R-HEMBA1002826//Homo sapiens genomic DNA, chromosome 21q11.1, segment 12/28, WORKING DRAFT SEQUENCE.//1.9e-22:262:67//AP000041

[12214] R-HEMBA1002833//Homo sapiens chromosome 17, clone hRPC.117_B_{—}12, complete sequence.//1.3e-79:396:97//AC004707

[12215] R-HEMBA1002850//Plasmodium falciparum 3D7 chromosome 12 PFYAC357 genomic sequence, WORKING DRAFT SEQUENCE, 7 unordered pieces.//0.013:393:61//AC005506

[12216] R-HEMBA1002863//Homo sapiens chromosome 17, clone hRPK.271_K_{—}11, complete sequence.//4.1e-73:489:85//AC005562

[12217] R-HEMBA1002876//Plasmodium falciparum DNA *** SEQUENCING IN PROGRESS * from MAL4PI, WORKING DRAFT SEQUENCE.//0.21:549:55//AL034557

[12218] R-HEMBA1002886//CIT-HSP-2013C4.TR CIT-HSP Homo sapiens genomic clone 2013C4, genomic survey sequence.//0.30:431:56//B53836

[12219] R-HEMBA1002896//Homo sapiens SH3-containing adaptor molecule-1 mRNA, complete cds.//3.9e-106:541:95//AF037261

[12220] R-HEMBA1002921

[12221] R-HEMBA1002924//Homo sapiens genomic DNA of 9q32 anti-oncogene of flat epitherium cancer, segment 7/10.//4.6e-19:139:78//AB020875

[12222] R-HEMBA1002934//Human DNA sequence *** SEQUENCING IN PROGRESS *** from clone 862K6, WORKING DRAFT SEQUENCE.//7.5e-45:282:89//AL031681

[12223] R-HEMBA1002935//CIT-HSP-2282P14.TFB CIT-HSP Homo sapiens genomic clone 2282P14, genomic survey sequence.//1.5e-102:514:97//AQ008584

[12224] R-HEMBA1002937//Human DNA sequence *** SEQUENCING IN PROGRESS *** from clone 745114, WORKING DRAFT SEQUENCE.//3.3e-87:444:97//AL033532

[12225] R-HEMBA1002939

[12226] R-HEMBA1002944//HS_{—}3107_A1_C05_T7 CIT Approved Human Genomic Sperm Library D Homo sapiens genomic clone Plate=3107 Col=9 Row=E, genomic survey sequence.//6.3e-21:250:73//AQ103952

[12227] R-HEMBA1002951//Xerolycosa miniata mitochondrial 12S rRNA gene.//0.013:228:63//AJ008020

[12228] R-HEMBA1002954//HS_{—}3246_A2_G09_MR CIT Approved Human Genomic Sperm Library D Homo sapiens genomic clone Plate=3246 Col=18 Row=M, genomic survey sequence.//5.8e-42:258:91//AQ218005

[12229] R-HEMBA1002968//Homo sapiens chromosome 17, clone hRPK.112_J_{—}9, complete sequence.//4.2e-38:300:83//AC005553

[12230] R-HEMBA1002970//Slime mold (D. discoideum) prestalk DII gene, complete cds.//5.0e-05:541:57//M11012

[12231] R-HEMBA1002971//Homo sapiens mRNA for KIAA0679 protein, partial cds.//7.2e-29:162:99//AB014579

[12232] R-HEMBA1002973//Homo sapiens chromosome 19, cosmid F20900, complete sequence.//9.l e-36:520:69//AC006128

[12233] R-nnnnnnnnnnnn//Homo Sapiens Chromosome X clone bWXD691, complete sequence.//0.00040:504:59//AC004386

[12234] R-HEMBA1002999//Rattus norvegicus lamina-associated polypeptide 1 C (LAP IC) mRNA, complete cds.//3.7e-66:556:79//U19614

[12235] R-HEMBA1003021//Human Chromosome 11 overlapping pacs pDJ235k10 and pDJ239b22, WORKING DRAFT SEQUENCE, 17 unordered pieces.//1.6e-44:530:70//AC000406

[12236] R-HEMBA1003033//Homo sapiens full-length insert cDNA clone ZC34B10.//4.6e-78:414:94//AF086194

[12237] R-HEMBA1003034//Homo sapiens chromosome 19, cosmid R29351, complete sequence.//9.0e-52:322:75//AC004026

[12238] R-HEMBA1003035//HS_{—}2008_A2_G08_T7 CIT Approved Human Genomic Sperm Library D Homo sapiens genomic clone Plate=2008 Col=16 Row=M, genomic survey sequence.//4.0e-68:343:9711AQ269839

[12239] R-HEMBA1003037//347G15.TVB CIT978SKAI Homo sapiens genomic clone A-347G15, genomic survey sequence.//0.57:188:58//B117694

[12240] R-HEMBA1003041//Homo sapiens PAC clone DJ1163J12 from 7q21.2-q31.1, complete sequence.//6.3e-30:350:72//AC004983

[12241] R-HEMBA1003046//Homo sapiens mitochondrial processing peptidase beta-subunit mRNA, complete cds.//4.1e-118:578:97//AF054182

[12242] R-HEMBA1003064//Human cosmid LL 12NC01-N-136BI 1, located centromeric to the ETV6 gene, chromosome 12 p12-13.//0.0018:271:60//U59962

[12243] R-HEMBA1003067//Human DNA sequence *** SEQUENCING IN PROGRESS *** from clone 633019, WORKING DRAFT SEQUENCE.//5.3e-48:464:76//AL022302

[12244] R-HEMBA1003071//CIT-HSP-2370D6.TR CIT-HSP Homo sapiens genomic clone 2370D6, genomic survey sequence.//0.19:48:87//AQ110136

[12245] R-HEMBA1003077//Rattus norvegicus Sha1-related potassium channel Kv4.3 mRNA, complete cds.//4.9e-69:494:84//U42975

[12246] R-HEMBA1003078//Human DNA sequence from PAC 339A18 on chromosome Xp 11.2. Contains KIAA0178 gene, similar to mitosis-specific chromosome segregation protein SMCI of S. cerevisiae, DNA binding protein similar to URE-B I, ESTs and STS.//1.1e-11:331:64//Z97054

[12247] R-HEMBA1003079//Homo sapiens Xp22-132-134 BAC GSHB-590J15 (Genome Systems Human BAC library) complete sequence.//4.6e-116:576:98//AC004673

[12248] R-HEMBA1003083//*** SEQUENCING IN PROGRESS *** Homo sapiens chromosome 4, BAC clone C0442P12; HTGS phase 1, WORKING DRAFT SEQUENCE, 5 unordered pieces.//3.1e-43:280:83//AC005798

[12249] R-HEMBA1003086//Homo sapiens clone NHO319F03, WORKING DRAFT SEQUENCE, 3 unordered pieces.//1.2e-43:281:88//AC006039

[12250] R-HEMBA1003096//Human DNA sequence from clone J506G21, WORKING DRAFT SEQUENCE.//0.00037:421:59//Z82213

[12251] R-HEMBA1003098//*** SEQUENCING IN PROGRESS *** Homo sapiens chromosome 4, BAC clone C0024K08; HTGS phase 1, WORKING DRAFT SEQUENCE, 5 unordered pieces.//1.4e-30:303:78//AC005598

[12252] R-HEMBA1003117

[12253] R-HEMBA1003129//Human DNA sequence *** SEQUENCING IN PROGRESS *** from clone 407FI 1, WORKING DRAFT SEQUENCE.//7.9e-11:109:85//AL022329

[12254] R-HEMBA1003133//Homo sapiens chromosome 9, PI clone 11659, complete sequence.//3.9e-99:484:98//AC004472

[12255] R-HEMBA1003136//CIT-HSP-2281L22.TF CIT-HSP Homo sapiens genomic clone 2281L22, genomic survey sequence.//2.0e-10:93:92//B99861

[12256] R-HEMBA1003142//Homo sapiens 12q24.2 PAC RPCII-128M12 (Roswell Park Cancer Institute Human PAC library) complete sequence.//9.8e-40:270:87//AC004024

[12257] R-HEMBA1003148//Homo sapiens mRNA for dachshund protein.//1.1e-116:586:96//AJ005670

[12258] R-HEMBA1003166//Human DNA sequence from PAC 306DI on chromosome X contains ESTs.//6.4e-35:364:70//Z83822

[12259] R-HEMBA1003175//Human IFNAR gene for interferon alpha/beta receptor.//1.9e-30:282:77//X60459

[12260] R-HEMBA1003197

[12261] R-HEMBA1003199//HS_{—}2166_A1_E12_MR CIT Approved Human Genomic Sperm Library D Homo sapiens genomic clone Plate=2166 Col=23 Row=I, genomic survey sequence.//0.00026:271:61//AQ164162

[12262] R-HEMBA1003202//Homo sapiens clone DJ0592G07, WORKING DRAFT SEQUENCE, 3 unordered pieces.//5.4e-44:291:83//AC005480

[12263] R-HEMBA1003204//Human BAC clone RGO72E 11 from 7q21-7q22, complete sequence.//3.1e-10:293:62//AC000118

[12264] R-HEMBA1003212//Homo sapiens clone DJ0902E20, WORKING DRAFT SEQUENCE, 1 unordered pieces.//1H.0:118:69//AC006148

[12265] R-HEMBA1003220//HS_{—}3092_B1_F09_MR CIT Approved Human Genomic Sperm Library D Homo sapiens genomic clone Plate=3092 Col=17 Row=L, genomic survey sequence.//0.00014:59:91//AQ128202

[12266] R-HEMBA1003222//Caenorhabditis elegans DNA *** SEQUENCING IN PROGRESS *** from clone Y43F8, WORKING DRAFT SEQUENCE.//0.84:214:62//Z95393

[12267] R-HEMBA1003229//RPCII 1-16Fl 5.TPB RPCI-11 Homo sapiens genomic clone RPCI-11-16F15, genomic survey sequence.//0.42:167:64//B83610

[12268] R-HEMBA1003235//CIT-HSP-2320G19.TF CIT-HSP Homo sapiens genomic clone 2320G19, genomic survey sequence.//3.6e-36:195:81//AQ037231

[12269] R-HEMBA1003250//HS_{—}2168_A2_C09_MF CIT Approved Human Genomic Sperm Library D Homo sapiens genomic clone Plate=2168 Col=18 Row=E, genomic survey sequence.//1.4e-22:158:89//AQ125356

[12270] R-HEMBA1003257//Human PCP4 gene, exon 3 and complete cds.//0.96:268:61//U53709

[12271] R-HEMBA1003273//Homo sapiens Xp22 BAC GS-377014 (Genome Systems Human BAC library) complete sequence.//1.0e-32:255:84//AC002549

[12272] R-HEMBA1003276//Plasmodium falciparum 3D7 chromosome 12 PFYAC492 genomic sequence, WORKING DRAFT SEQUENCE, 5 unordered pieces.//0.0044:212:60//AC005308

[12273] R-HEMBA1003278//Homo sapiens 12q24.1 PAC RPCI1-315L5 (Roswell Park Cancer Institute Human PAC library) complete sequence.//1.1e-34:286:74//AC002395

[12274] R-HEMBA1003281//High throughput sequencing of human chromosome 12, WORKING DRAFT SEQUENCE, 1 ordered pieces.//1.8e-53:428:83//AC005840

[12275] R-HEMBA1003291//Homo sapiens mRNA for KIAA0537 protein, complete cds.//3.0e-115:551:99//AB011109

[12276] R-HEMBA1003296//CIT-HSP-2196L16.TR CIT-HSP Homo sapiens genomic clone 2196L16, genomic survey sequence.//2.9e-20:337:65//AQ003073

[12277] R-HEMBA1003304//Sequence 23 from patent U.S. Pat. No. 5,552,281.//1.8e-31:179:97//I25662

[12278] R-HEMBA1003309//Arabidopsis thaliana genomic DNA, chromosome 5, TAC clone: K19E20, complete sequence.//0.00019:334:60//AB017061

[12279] R-HEMBA1003314//Homo sapiens mRNA for leucine zipper bearing kinase, complete cds.//2.8e-111:545:97//AB001872

[12280] R-HEMBA1003322//Human DNA sequence from clone 23K20 on chromosome Xq25-26.2 Contains EST, STS, GSS, complete sequence.//0.60:274:61//AL022153

[12281] R-HEMBA1003327//Homo sapiens BAC clone RG351JO1 from 7q22-q31, complete sequence.//0.00028:172:65//AC005099

[12282] R-HEMBA1003328//Homo sapiens clone RG270D13, WORKING DRAFT SEQUENCE, 18 unordered pieces.//2.2e-44:268:90//AC005081

[12283] R-HEMBA1003330//Homo sapiens poly(A) binding protein II (PABP2) gene, complete cds.//2.7e-61:312:97//AF026029

[12284] R-HEMBA1003348//***ALU WARNING: Human Alu-J subfamily consensus sequence.//7.2e-38:186:83//U14567

[12285] R-HEMBA1003369//Caenorhabditis elegans cosmid F59C6, complete sequence.//0.00012:465:59//Z79600

[12286] R-HEMBA1003370//Homo sapiens chromosome 17, clone hRPC867C24, complete sequence.//3.2e-42:301:87//AC002558

[12287] R-HEMBA1003373//Human DNA sequence from clone 109F14 on chromosome 6p21.2-21.3. Contains the alternatively spliced gene for Transcriptional Enhancer Factor TEF-5, the 60S Ribosomal Protein RPL10A gene, a PUTATIVE ZNF127 LIKE gene, and the PPARD for Peroxisome Proliferator Activated Receptor Delta (PPAR-Delta, PPAR-Beta, Nuclear Hormone Receptor 1, NUCI, NUCI, PPARB). Contains three putative CpG islands, ESTs, STSs, GSSs and a ca repeat polymorphism, complete sequence.//7.4e-34:375:74//AL022721

[12288] R-HEMBA1003376//Homo sapiens chromosome 16, cosmid clone RT102 (LANL), complete sequence.//1.6e-46:309:88//AC004651

[12289] R-HEMBA1003380//HS_{—}3184_B2_E06_MR CIT Approved Human Genomic Sperm Library D Homo sapiens genomic clone Plate=3184 Col=12 Row=J, genomic survey sequence.//1.0e-35:237:88//AQ189144

[12290] R-HEMBA1003384//HS_{—}2193_B2_H08_MR CIT Approved Human Genomic Sperm Library D Homo sapiens genomic clone Plate=2193 Col=16 Row=P, genomic survey sequence.//0.00029:96:76//AQ032212

[12291] R-HEMBA1003395//Homo sapiens chromosome 17, clone HClT169H9, WORKING DRAFT SEQUENCE, 6 unordered pieces.//2.6e-21:139:86//AC002993

[12292] R-HEMBA1003402//CIT-HSP-2166EI9.TR CIT-HSP Homo sapiens genomic clone 2166E19, genomic survey sequence.//0.99:144:61//B91549

[12293] R-nnnnnnnnnnnn

[12294] R-HEMBA1003417//Human DNA sequence from clone 496N17 on chromosome 6p11.2-12.3 Contains EST, GSS, complete sequence.//2.5e-112:547:98//AL031321

[12295] R-HEMBA1003418//Homo sapiens PAC clone DJ0755G17 from 7p21-p22, complete sequence.//0.082:352:59//AC004879

[12296] R-HEMBA1003433//Homo sapiens cell cycle regulatory protein p95 (NBS1) mRNA, complete cds.//9.9e-114:544:98//AF058696

[12297] R-HEMBA1003461

[12298] R-HEMBA1003463

[12299] R-HEMBA1003480//Homo sapiens clone NHO523H20, complete sequence.//9.1e-106:533:96//AC005041

[12300] R-HEMBA1003528

[12301] R-HEMBA1003531//Human BAC clone GS552A01 from 7q21-q22, complete sequence.//3.4e-08:333:64//AC002454

[12302] R-HEMBA1003538//Human mRNA for complement component C1r.//1.4e-23:333:68//X04701

[12303] R-HEMBA1003545//Zebrafish mRNA for zfls1-2 (insulin gene enhancer binding protein homolog), complete cds.//0.030:144:68//D38453

[12304] R-HEMBA1003548//Plasmodium falciparum 3D7 chromosome 12 PFYAC812 genomic sequence, WORKING DRAFT SEQUENCE, 8 unordered pieces.//0.0017:487:57//AC004153

[12305] R-HEMBA1003555//Human DNA sequence *** SEQUENCING IN PROGRESS *** from clone 371H6, WORKING DRAFT SEQUENCE.//2.8e-99:503:96//AL031718

[12306] R-HEMBA1003556//Homo sapiens Xp22-175-176 BAC GSHB-484017 (Genome Systems Human BAC Library) complete sequence.//1.6e-114:574:97//AC005913

[12307] R-HEMBA1003560//Diplolepis rosae microsatellite clone DR04096.//0.24:116:67//AF034416

[12308] R-HEMBA1003568//Homo sapiens clone NHO215P 16, WORKING DRAFT SEQUENCE, 3 unordered pieces.//3.9e-05:422:63//AC006036

[12309] R-HEMBA1003569//Homo sapiens full-length insert cDNA clone ZD82D06.//8.7e-108:545:95//AF086450

[12310] R-HEMBA1003571//Homo sapiens PAC clone DJ0886008 from 7q32-q35, complete sequence.//4.6e-51:570:71//AC004914

[12311] R-HEMBA1003579//HS_{—}3237_B2_E05_T7 CIT Approved Human Genomic Sperm Library D Homo sapiens genomic clone Plate=3237 Col=10 Row=J, genomic survey sequence.//8.5e-97:495:95//AQ209302

[12312] R-HEMBA1003581//Mouse mRNA for talin.//8.3e-12:128:82//X56123

[12313] R-HEMBA1003591//Homo sapiens chromosome 16, BAC clone 2603 (LANL), complete sequence.//2.9e-87:251:95//AC005774

[12314] R-HEMBA1003595//Homo sapiens DNA sequence from BAC 1216H12 on chromosome 22q12. Contains a pseudogene with similarity to part of mouse Ninein and the KIAA0609 gene for a protein similar to C. elegans K09C8.4. Contains ESTs, GSSs and a ggtt repeat polymorphism, complete sequence.//4.5e-52:384:83//AL008715

[12315] R-HEMBA1003597//Homo sapiens DNA sequence from PAC 418A9 on chromosome 6q21. Contains the first (5′) two exons of a CDK8 (Cell Division Protein Kinase 8) LIKE gene, a Neutral Calponin LIKE pseudogene, ESTs and STSs, complete sequence.//4.6e-41:442:74//Z84480

[12316] R-HEMBA1003598//Homo sapiens PAC clone DJ0537P09 from 7 p11.2-p12, complete sequence.//1.8e-23:177:88//AC005153

[12317] R-HEMBA1003615

[12318] R-HEMBA1003617//Plasmodium falciparum 3D7 chromosome 12 PFYAC336 genomic sequence, WORKING DRAFT SEQUENCE, 5 unordered pieces.//0.039:494:57//AC005139

[12319] R-HEMBA1003621//*** SEQUENCING IN PROGRESS *** Homo sapiens chromosome 4, BAC clone C0052122; HTGS phase 1, WORKING DRAFT SEQUENCE, 4 unordered pieces.//2.3e-26:309:75//AC004599

[12320] R-HEMBA1003622//Homo sapiens Xp22 BAC 620F15 (Genome Systems BAC library) complete sequence.//7.1e-56:545:75//AC002980

[12321] R-HEMBA1003630//Homo sapiens CC chemokine gene cluster, complete sequence.//2.8e-32:546:68//AF088219

[12322] R-HEMBA1003637//Human BAC clone GS552A01 from 7q21-q22, complete sequence.//8.0e-25:457:68//AC002454

[12323] R-HEMBA1003640//Homo sapiens chromosome X, PAC 671D9, complete sequence.//2.8e-40:280:86//AF031078

[12324] R-HEMBA1003645//Human DNA sequence *** SEQUENCING IN PROGRESS *** from clone 32B1, WORKING DRAFT SEQUENCE.//1.7e-33:297:82//AL023693

[12325] R-HEMBA1003646//Plasmodium falciparum MAL3P7, complete sequence.//0.44:319:59//AL034559

[12326] R-HEMBA1003656//Homo sapiens Chromosome 16 BAC clone CIT987SK-A-152E5, complete sequence.//6.9e-36:242:80//AC004382

[12327] R-HEMBA1003662//Homo sapiens chromosome 17, clone hRPK.332_H_{—}18, complete sequence.//8.6e-1117:588:96//AC005746

[12328] R-HEMBA1003667//Sequence 8 from patent U.S. Pat. No. 5,420,245.//1.8e-21:170:88//I12222

[12329] R-HEMBA1003679//Homo sapiens BAC clone RG 114Bl 9 from 7q31.1, complete sequence.//1.6e-22:180:87//AC005065

[12330] R-HEMBA1003680//C. elegans cosmid ZK353.//1.1e-06:270:61//L15313

[12331] R-HEMBA1003684//Colias alexandra alexandra cytochrome oxidase subunit 1 (cox1) gene, mitochondrial gene encoding mitochondrial protein, partial cds.//0.77:171:66//AF044872

[12332] R-HEMBA1003690//Homo sapiens 12q13.1 PAC RPCI5-1057120 (Roswell Park Cancer Institute Human PAC library) complete sequence.//1.6e-104:523:97//AC004466

[12333] R-HEMBA1003692//Human DNA sequence *** SEQUENCING IN PROGRESS *** from clone 508115, WORKING DRAFT SEQUENCE.//1.7e-41:414:77//AL021707

[12334] R-HEMBA1003711//Human Chromosome 11 overlapping pacs pDJ235k10 and pDJ239b22, WORKING DRAFT SEQUENCE, 17 unordered pieces.//1.6e-29:304:77//AC000406

[12335] R-HEMBA1003714

[12336] R-HEMBA1003715//Homo sapiens chromosome 16 p11.2 BAC clone CIT987SK-A-685D8, WORKING DRAFT SEQUENCE, 16 unordered pieces.//1.4e-63:578:77//AC005136

[12337] R-HEMBA1003720//Homo sapiens, WORKING DRAFT SEQUENCE, 135 unordered pieces.//2.4e-36:350:78//AC002353

[12338] R-HEMBA1003725//Homo sapiens chromosome 19, cosmid R31973, complete sequence.//6.3e-42:250:75//AC004699

[12339] R-HEMBA1003729//RPCII 1-22D14.TV RPCI-11 Homo sapiens genomic clone RPCI-11-22D14, genomic survey sequence.//1.0:234:62//B86158

[12340] R-HEMBA1003733//Human DNA sequence from clone 396D17 on chromosome 1p33-35.3 Contains EST, STS, GSS, complete sequence.//7.7e-80:558:83//AL008634

[12341] R-HEMBA1003742//HS_{—}3080_B2_H06_MR CIT Approved Human Genomic Sperm Library D Homo sapiens genomic clone Plate=3080 Col=12 Row=P, genomic survey sequence.//3.4e-55:331:91//AQ139179

[12342] R-HEMBA1003758//Human DNA sequence from PAC 295C6 on chromosome 1q24. Contains ESTs, CA repeat, STS and CpG island.//4.5e-59:521:7511Z97876

[12343] R-HEMBA1003760

[12344] R-HEMBA1003773//Mus musculus signal recognition particle receptor beta subunit mRNA, complete cds.//2.6e-72:467:86//U17343

[12345] R-HEMBA1003783//Mus musculus bromodomain-containing protein BP75 mRNA, complete cds.//1.0e-77:557:81//AF084259

[12346] R-HEMBA1003784

[12347] R-HEMBA1003799//Homo sapiens PAC clone DJ1032B10 from 7p 15.3-p21, complete sequence.//2.1e-49:390:72//AC004455

[12348] R-HEMBA1003803

[12349] R-HEMBA1003804//Homo sapiens chromosome 17, clone hCIT.175_E_{—}5, complete sequence.//9.4e-99:359:99//AC004596

[12350] R-HEMBA1003805//Human DNA sequence from clone 51J12 on chromosome 6q26-27. Contains the 3′ part of the alternatively spliced gene for the human orthologs of mouse QKI-7 and QKI-7B (KH Domain RNA Binding proteins) and zebrafish ZKQ-1 (Quaking protein homolog). Contains ESTs, STSs and GSSs, complete sequence.//8.0e-113:567:96//AL031781

[12351] R-HEMBA1003807//Bovine dinucleotide microsatellite HUJII77.//5.4e-18:194:78//M96348

[12352] R-HEMBA1003836//Human DNA from overlapping chromosome 19 cosmids R31396, F25451, and R31076 containing COX6B and UPKA, genomic sequence, complete sequence.//3.4e-40:256:85//AC002115

[12353] R-HEMBA1003838//CIT-HSP-2380F18.TF CIT-HSP Homo sapiens genomic clone 2380F18, genomic survey sequence.//9.7e-25:150:96//AQ196624

[12354] R-HEMBA1003856//Human DNA sequence from clone 272E8 on chromosome Xp22.13-22.31. Contains a pseudogene similar to MDM2-Like P53-binding protein gene. Contains STSs, GSSs and a CA repeat polymorphism, complete sequence.//4.8e-33:486:68//Z93929

[12355] R-HEMBA1003864//, complete sequence.//4.4e-100:531:94//AC005300

[12356] R-HEMBA1003866//HS_{—}3203_B2_C00_MR CIT Approved Human Genomic Sperm Library D Homo sapiens genomic clone Plate=3203 Col=2 Row=F, genomic survey sequence.//2.6e-05:206:64//AQ180298

[12357] R-HEMBA1003879//Homo sapiens chromosome 10 clone CIT987SK-1119P3 map 10q25.1, WORKING DRAFT SEQUENCE, 1 ordered pieces.//4.7e-17:170:79//U82207

[12358] R-HEMBA1003880//Homo sapiens genomic DNA, chromosome 21q11.1, segment 7/28, WORKING DRAFT SEQUENCE.//7.8e-103:526:96//AP000036

[12359] R-HEMBA1003885//Human apolipoprotein apoC-IV (APOC4) gene, complete cds.//3.5e-45:299:87//U32576

[12360] R-HEMBA1003893//Human DNA sequence *** SEQUENCING IN PROGRESS *** from clone 1137F22, WORKING DRAFT SEQUENCE.//1.1e-41:386:77//AL034421

[12361] R-HEMBA1003902//HS_{—}3031_B2_E07_MR CIT Approved Human Genomic Sperm Library D Homo sapiens genomic clone Plate=3031 Col=14 Row=J, genomic survey sequence.//5.3e-50:293:93//AQ165549

[12362] R-HEMBA1003908//CIT-HSP-2367K7.TR CIT-HSP Homo sapiens genomic clone 2367K7, genomic survey sequence.//1.2e-32:220:92//AQ076795

[12363] R-HEMBA1003926//Homo sapiens chromosome 5, BAC clone 194j18 (LBNL HI 58), complete sequence.//3.1e-58:294:85//AC005368

[12364] R-HEMBA1003937//Homo sapiens chromosome 3 subtelomeric region.//8.0e-111:590:93//AF109718

[12365] R-HEMBA1003939

[12366] R-HEMBA1003942//Homo sapiens clone DJ0828F13, complete sequence.//2.2e-08:474:58//AC004904

[12367] R-HEMBA1003950//Plasmodium vivax from Brazil cytochrome b (cytb) gene, mitochondrial gene encoding mitochondrial protein, partial cds.//0.034:258:62//AF069619

[12368] R-HEMBA1003953//Plasmodium falciparum MAL3P8, complete sequence.//0.096:492:57//AL034560

[12369] R-HEMBA1003958//Human DNA sequence *** SEQUENCING IN PROGRESS *** from clone 64K7, WORKING DRAFT SEQUENCE.//7.3e-40:382:78//AL031668

[12370] R-HEMBA1003959//Amaranthus hypochondriacus betaine aldehyde dehydrogenase (ahybadh4) gene, complete cds.//0.1 I :428:60//AF000132

[12371] R-HEMBA1003976//Homo sapiens PAC clone DJ0724E13 from 7 p11.2-p12, complete sequence.//11.0:222:62//AC004414

[12372] R-HEMBA1003978//Sequence 31 from patent U.S. Pat. No. 5,708,157.//1.9e-14:159:77//I80060

[12373] R-HEMBA1003985//Homo sapiens 12 p13.3 PAC RPCI5-927J10 (Roswell Park Cancer Institute Human PAC library) complete sequence.//5.6e-14:136:83//AC004804

[12374] R-HEMBA1003987//Human chromosome 12 p13 sequence, complete sequence.//3.2e-26:268:791/U47924

[12375] R-HEMBA1003989//RPCII 1-52K22.TJ RPCI11 Homo sapiens genomic clone R-52K22, genomic survey sequence.//2.2e-86:443:95//AQ052484

[12376] R-HEMBA1004000

[12377] R-HEMBA1004011

[12378] R-HEMBA1004012//Homo sapiens chromosome 17, clone hRPK.63_A_{—}1, complete sequence.//4.7e-38:284:85//AC005670

[12379] R-HEMBA1004015//Human DNA sequence from clone 931 E15 on chromosome Xq25. Contains STSs, GSSs and genomic marker DXS8098, complete sequence.//0.48:460:58//AL023575

[12380] R-HEMBA1004024//Homo sapiens clone RG270D 13, WORKING DRAFT SEQUENCE, 18 unordered pieces.//2.5e-21:159:80//AC005081

[12381] R-HEMBA1004038//Homo sapiens Xq28 BAC RPCII -382P7 (Roswell Park Cancer Institute Human BAC Library) complete sequence.//7.9e-10:231:66//AC006054

[12382] R-HEMBA1004042//Homo sapiens clone DJ0968116, complete sequence.//0.00071:263:68//AC006016

[12383] R-HEMBA1004045//Homo sapiens PAC clone DJ0074M20 from X, complete sequence.//8.8e-23:196:69//AC006143

[12384] R-HEMBA1004048//CIT-HSP-2288N20.TF CIT-HSP Homo sapiens genomic clone 2288N20, genomic survey sequence.//0.013:162:67//AQ007283

[12385] R-HEMBA1004049//Human hsp 70 gene 3′ region for 70 kDa heat shock protein.//7.7e-30:176:96//X04677

[12386] R-HEMBA1004055//Plasmodium falciparum 3D7 chromosome 12 PFYAC1383 genomic sequence, WORKING DRAFT SEQUENCE, 3 unordered pieces.//8.4e-05:395:63//AC005504

[12387] R-HEMBA1004056//Homo sapiens clone DJ0847008, WORKING DRAFT SEQUENCE, 3 unordered pieces.//3.5e-61:551:77//AC005484

[12388] R-HEMBA1004074//Homo sapiens clone DJ1032D07, WORKING DRAFT SEQUENCE, 3 unordered pieces.//0.98:275:63//AC004952

[12389] R-HEMBA1004086//Sequence 65 from patent U.S. Pat. No. 5,691,147.//2.8e-54:313:92//I76237

[12390] R-HEMBA1004097//Mus musculus putative transcription factor mRNA, complete cds.//1.8e-11:323:63//AF091234

[12391] R-HEMBA1004131//Human mRNA for KIAA0128 gene, partial cds.//9.3e-42:534:69//D50918

[12392] R-HEMBA1004132//Homo sapiens chromosome 17, clone hCIT.211_P_{—}7, complete sequence.//6.0e-49:491:76//AC003665

[12393] R-HEMBA1004133//HS_{—}3229_B2_E09_T7 CIT Approved Human Genomic Sperm Library D Homo sapiens genomic clone Plate=3229 Col=18 Row=J, genomic survey sequence.//1.1e-72:374:97//AQ192003

[12394] R-HEMBA1004138//Human DNA sequence *** SEQUENCING IN PROGRESS *** from clone 417M14, WORKING DRAFT SEQUENCE.//3.1e-09:277:66//AL024498

[12395] R-HEMBA1004143//Plasmodium falciparum MAL3P4, complete sequence.//0.53:239:61//AL008970

[12396] R-HEMBA1004146//Homo sapiens clone DJ0038110, WORKING DRAFT SEQUENCE, 5 unordered pieces.//3.0e-35:165:88//AC004820

[12397] R-HEMBA1004150//CITB1-E1-251712.TR CITBI-E1 Homo sapiens genomic clone 251712, genomic survey sequence.//0.56:379:59//AQ277616

[12398] R-HEMBA1004164//Human BAC clone GS200K05 from 7q21-q22, complete sequence.//4.6e-49:448:77//AC002429

[12399] R-HEMBA1004168//Homo sapiens geminin mRNA, complete cds.//2.4e-110:563:96//AF067855

[12400] R-HEMBA1004199//S. pombe chromosome I cosmid c8A4.//0.73:187:64//Z66569

[12401] R-HEMBA1004200//Homo sapiens Xp22 BAC GSHB- 184P 14 (Genome Systems Human BAC library) complete sequence.//6.3e-30:293:77//AC004552

[12402] R-HEMBA1004202//rah=ras-related homolog [mice, HT4 neural cell line, mRNA, 993 nt].//3.0e-64:517:80//S72304

[12403] R-HEMBA1004203//Homo sapiens clone NHO313P 13, WORKING DRAFT SEQUENCE, 15 unordered pieces.//1.0e-97:303:98//AC005488

[12404] R-HEMBA1004207//Homo sapiens leptin receptor short form (db) mRNA, complete cds.//3.6e-116:573:97//U50748

[12405] R-HEMBA1004225//Drosophila melanogaster mitochondrial DNA with 12 tRNAs and 7 genes.//5.4e-11:493:60//M37275

[12406] R-HEMBA1004227//Rattus norvegicus protein phosphatase 2C mRNA, complete cds.//6.1e-76:443:86//AF095927

[12407] R-HEMBA1004238//Homo sapiens chromosome 19, cosmid R28341, complete sequence.//1.1e-42:330:83//AC005763

[12408] R-HEMBA1004241

[12409] R-HEMBA1004246//Homo sapiens genomic DNA, chromosome 21q22.2 (Down Syndrome region), segment 4/15, WORKING DRAFT SEQUENCE.//1.1e-45:288:85//AP000011

[12410] R-HEMBA1004248//Homo sapiens PAC clone DJ0828B12 from 7q11.23-q21.1, complete sequence.//5.2e-09:516:61//AC004903

[12411] R-HEMBA1004264

[12412] R-HEMBA1004267//HS_{—}2255_A2_H12_MR CIT Approved Human Genomic Sperm Library D Homo sapiens genomic clone Plate=2255 Col=24 Row=O, genomic survey sequence.//8.6e-59:318:95//AQ068854

[12413] R-HEMBA1004272//Homo sapiens 12 p13.3 PAC RPCI5-1180D12 (Roswell Park Cancer Institute Human PAC Library) complete sequence.//1.1e-113:576:96//AC005831

[12414] R-nnnnnnnnnnnn//Homo sapiens clone 617 unknown mRNA, complete sequence.//4.4e-110:553:96//AF091081

[12415] R-HEMBA1004276

[12416] R-HEMBA1004286//Homo sapiens TGF beta receptor associated protein-1 mRNA, complete cds.//1.9e-106:538:97//AF022795

[12417] R-HEMBA1004289//RPCII 1-74010.TJ RPCII 1 Homo sapiens genomic clone R-74010, genomic survey sequence.//2.3e-37:248:7611AQ266668

[12418] R-HEMBA1004295//Baboon apolipoprotein A-VI mRNA, 3′ end.//0.0016:273:64//L13174

[12419] R-HEMBA1004306//HS_{—}3175_B2_F0_T7 CIT Approved Human Genomic Sperm Library D Homo sapiens genomic clone Plate=3175 Col=2 Row=L, genomic survey sequence.//1.6e-28:190:77//AQ169206

[12420] R-HEMBA1004312//Human BAC clone RG119P24 from 7q31, complete sequence.//6.3e-36:267:82//AC003088

[12421] R-HEMBA1004321//Homo sapiens *** SEQUENCING IN PROGRESS *** from PAC 10155, WORKING DRAFT SEQUENCE.//4.1e-111:576:95//AJ009611

[12422] R-HEMBA1004323//CIT-HSP-2374C8.TR CIT-HSP Homo sapiens genomic clone 2374C8, genomic survey sequence.//2.7e-42:136:91//AQ114933

[12423] R-HEMBA1004327//CIT-HSP-2303L24.TF CIT-HSP Homo sapiens genomic clone 2303L24, genomic survey sequence.//1.0:78:67//AQ017600

[12424] R-HEMBA1004330//Homo sapiens clone DJ1173120, WORKING DRAFT SEQUENCE, 5 unordered pieces.//2.3e-119:580:98//AC004987

[12425] R-HEMBAI1004334//Pimpinella brachycarpa Phyb I mRNA, complete cds.//3.3e-14:238:69//AF082024

[12426] R-HEMBA1004335//Homo sapiens Chromosome 16 BAC clone CIT987SK-A-116A10, complete sequence.//1.8e-21:291:71//AC004638

[12427] R-HEMBA1004341

[12428] R-HEMBA1004353//Homo sapiens mRNA for c-myc binding protein, complete cds.//4.1e-74:444:90//D89667

[12429] R-HEMBA1004354//Human DNA from overlapping chromosome 19-specific cosmids R29515 and R28253, genomic sequence, complete sequence.//7.0e-38:287:82//AC003002

[12430] R-HEMBA1004356//Sequence 2 from patent U.S. Pat. No. 5,652,144.//3.7e-108:588:92//I58611

[12431] R-HEMBA1004366//WORKING DRAFT SEQUENCE, 3 unordered pieces.//1.8e-14:446:63//AC005949

[12432] R-HEMBA1004372//CIT-HSP-2005C13.TF CIT-HSP Homo sapiens genomic clone 2005C13, genomic survey sequence.//0.010:334:61//B55811

[12433] R-HEMBA1004389//Homo sapiens full-length insert cDNA clone ZE09A11.//1.5e-19:170:83//AF086540

[12434] R-HEMBA1004394//Human (D21S198) DNA segment containing (TG)23 repeat.//1.0:50:84//X58124

[12435] R-HEMBA1004396//Homo sapiens chromosome 4 clone B240N9 map 4q25, complete sequence.//8.2e-34:459:69//AC004057

[12436] R-HEMBA1004405//Homo sapiens BAC clone GS589PI9 from 7 p13-p14, complete sequence.//2.8e-42:314:84//AC005030

[12437] R-HEMBA1004408

[12438] R-HEMBA1004429//M. musculus of DNA encoding DNA-binding protein.//1.6e-66:449:82//Z54200

[12439] R-HEMBA1004433//Homo sapiens chromosome 21q22.3, PAC clones 314N7, 225L15, BAC clone 7B7, complete sequence bases 1.333303.//7.2e-32:460:68//AJ011930

[12440] R-HEMBA1004460//Homo sapiens clone DJ0647C 14, WORKING DRAFT SEQUENCE, 21 unordered pieces.//3.9e-113:581:96//AC004846

[12441] R-HEMBA1004461//HS_{—}3244_A2_F12_MR CIT Approved Human Genomic Sperm Library D Homo sapiens genomic clone Plate=3244 Col=24 Row=K, genomic survey sequence.//8.0e-83:397:99//AQ220876

[12442] R-HEMBA1004479//Homo sapiens PAC clone DJ0942116 from 7q11, complete sequence.//1.7e-40:485:70//AC006012

[12443] R-HEMBA1004482//Plasmodium falciparum chromosome 2, section 7 of 73 of the complete sequence.//2.2e-11:513:59//AE001370

[12444] R-HEMBA1004502//Homo sapiens chromosome 17, clone hRPK.372_K_{—}20, complete sequence.//2.0e-08:245:66//AC005951

[12445] R-HEMBA1004506//Human DNA sequence *** SEQUENCING IN PROGRESS * from clone 34606, WORKING DRAFT SEQUENCE.//4.2e-81:582:83//Z84487

[12446] R-HEMBA1004507//Caenorhabditis elegans cosmid C40C9, complete sequence.//0.56:235:64//Z70266

[12447] R-HEMBA1004509

[12448] R-HEMBA1004534//Sequence 58 from patent U.S. Pat. No. 5,691,147.//1.9e-61:430:83//I76230

[12449] R-HEMBA1004538//HS_{—}3189_B2_C03_T7 CIT Approved Human Genomic Sperm Library D Homo sapiens genomic clone Plate=3189 Col=6 Row=F, genomic survey sequence.//6.1e-21:140:92//AQ170330

[12450] R-HEMBA1004554//CIT-HSP-712K9.TP CIT-HSP Homo sapiens genomic clone 712K9, genomic survey sequence.//1.7e-16:116:93//B73329

[12451] R-HEMBA1004560//Human mRNA for KIAA0281 gene, complete cds.//2.2e-14:213:71//D87457

[12452] R-HEMBA1004573

[12453] R-HEMBA1004577//Human DNA sequence from cosmid L247F6, Huntington's Disease Region, chromosome 4p16.3 contains protein similar to Mouse SH3 binding protein 3BP2, multiple ESTs and a CpG island.//1.0:352:60//Z68279

[12454] R-HEMBA1004586

[12455] R-nnnnnnnnnnnn//Plasmodium falciparum MAL3P6, complete sequence.//0.0012:359:60//Z98551

[12456] R-HEMBA1004610//S. pombe chromosome II cosmid c354.//0.0011:362:62//AL022071

[12457] R-HEMBA1004617//Homo sapiens mRNA, chromosome 1 specific transcript KIAA0501.//1.4e-50:327:85//AB007970

[12458] R-HEMBA1004629//Homo sapiens Xp22 bins 16-17 BAC GSHB-531117 (Genome Systems Human BAC Library) complete sequence.//4.4e-13:527:63//AC004805

[12459] R-HEMBA1004631 I/Rattus norvegicus Nclone10 mRNA.//2.9e-24:364:71//U31866

[12460] R-HEMBA1004632

[12461] R-HEMBA1004637//Homo sapiens clone DJ0982E09, WORKING DRAFT SEQUENCE, 3 unordered pieces.//7.7e-117:573:98//AC005534

[12462] R-HEMBA1004638//H. sapiens mRNA for DGCR2.//3.8e-19:118:99//X84076

[12463] R-HEMBA1004666//Arabidopsis thaliana chromosome II BAC T4E 14 genomic sequence, complete sequence.//0.00013:501:58//AC005171

[12464] R-HEMBA1004669//Human DNA sequence from clone 465N24 on chromosome 1p35.1-36.13. Contains two novel genes, ESTs, GSSs and CpG islands, complete sequence.//1.5e-120:571:98//AL031432

[12465] R-HEMBA1004670//Human DNA sequence *** SEQUENCING IN PROGRESS *** from clone 222E13, WORKING DRAFT SEQUENCE.//4.4e-12:110:88//Z93241

[12466] R-HEMBA1004672//Human DNA sequence from PAC 308113 on chromosome 1p35-1p36.3.//3.4e-38:324:81//Z99291

[12467] R-HEMBA1004693//Arabidopsis thaliana genomic DNA, chromosome 5, P1 clone: MPO12, complete sequence.//0.86:309:57//AB006702

[12468] R-HEMBA1004697//T33B22TF TAMU Arabidopsis thaliana genomic clone T33B22, genomic survey sequence.//0.29:331:61/11B97342

[12469] R-HEMBA1004705//Plasmodium falciparum MAL3P7, complete sequence.//0.051:424:58//AL034559

[12470] R-HEMBA1004709//Homo sapiens Chromosome 16 BAC clone CIT987SK-A-116A10, complete sequence.//1.7e-49:497:76//AC004638

[12471] R-HEMBA1004711//Homo sapiens chromosome 17, clone hRPK.271_K_{—}11, complete sequence.//1.6e-38:362:79//AC005562

[12472] R-HEMBA1004725

[12473] R-HEMBA1004730//Homo sapiens Chromosome 17 p13 Cosmid Clone cos26, complete sequence.//1.1e-58:489:79//AC002085

[12474] R-HEMBA1004733

[12475] R-HEMBA1004734//Human DNA sequence from clone 273N12 on chromosome 6q16.1-16.3. Contains the gene for the N-Oct5a (N-Oct3, N-Oct5b) POU domain proteins and an unknown gene. Contains a putative CpG island, ESTs, STS, and GSSs, complete sequence.//0.0030:362:61//AL022395

[12476] R-HEMBA1004736//Homo sapiens clone DJ0981007, complete sequence.//1.9e-58:282:87//AC006017

[12477] R-HEMBA1004748//Homo sapiens PAC clone DJ1059M17 from 7q21-q31.1, complete sequence.//3.6e-34:287:81//AC004953

[12478] R-HEMBA1004751//Human DNA sequence from PAC 507115 on chromosome Xq26.3-27.3. Contains 60S ribosomal protein L44 (L41, L36) like gene, ESTs, STSs and a polymorphic CA repeat.//5.3e-40:266:89//Z98950

[12479] R-HEMBA1004752//Human DNA sequence *** SEQUENCING IN PROGRESS *** from clone 495010, WORKING DRAFT SEQUENCE.//3.3e-39:281:85//AL031121

[12480] R-HEMBA1004753//Homo sapiens ribosomal protein S20 (RPS20) mRNA, complete cds.//2.6e-65:475:84//L06498

[12481] R-HEMBA1004756//Homo sapiens DNA sequence from PAC 86C1 I on chromosome 6p21.31-22.1. Contains histone genes H2A/1, H2B.1A, H4, H2A.1b, H3 pseudogene, pheromone receptor pseudogene, ESTs, STS and CpG island.//1.8e-08:516:59//AL021807

[12482] R-HEMBA1004758//Homo sapiens chromosome 4 clone B240N9 map 4q25, complete sequence.//5.1e-45:577:72//AC004057

[12483] R-HEMBA1004763

[12484] R-HEMBA1004768//Human DNA sequence from clone 395P12 on chromosome 1q24-25. Contains the TXGP1 gene for tax-transcriptionally activated glycoprotein 1 (34 kD) (OX40 ligand, OX40L) and a GOT2 (Aspartate Aminotransferase, mitochondrial precursor, EC 2.6.1.1, Transaminase A, Glutamate Oxaloacetate Transaminase-2) pseudogene. Contains ESTs, STSs and GSSs, complete sequence.//4.1e-60:435:78//AL022310

[12485] R-HEMBA1004770//Plasmodium falciparum chromosome 2, section 8 of 73 of the complete sequence.//8.7e-05:476:61//AE001371

[12486] R-HEMBA1004771//Homo sapiens Xp22 Cosmid U152D7 (Lawrence Livermore human cosmid library) complete sequence.//5.0e-08:113:80//AC003047

[12487] R-HEMBA1004776

[12488] R-HEMBA1004778//***ALU WARNING: Human Alu-J subfamily consensus sequence.//1.1e-35:288:84//U14567

[12489] R-nnnnnnnnnnnn//HS_{—}3192_B1_F09_T7 CIT Approved Human Genomic Sperm Library D Homo sapiens genomic clone Plate=3192 Col=17 Row=L, genomic survey sequence.//1.9e-44:233:98//AQ155855

[12490] R-HEMBA1004803//Homo sapiens minisatellite ms31 repeat region.//3.0e-67:318:87//AF048728

[12491] R-HEMBA1004806

[12492] R-HEMBA1004807//Homo sapiens clone GS166C05, WORKING DRAFT SEQUENCE, 7 unordered pieces.//3.6e-20:333:69//AC005015

[12493] R-HEMBA1004816//Human DNA sequence from PAC 50A13 on chromosome Xp 11. Contains ATP SYNTHASE LIPID BINDING PROTEIN PI (P2, P3) precursor (ATP5G1, ATP5G2, ATP5G3) like pseudogene, ESTs and STSs. Contains polymorphic CA repeat.//6.3e-13:148:77//Z92545

[12494] R-HEMBA1004820//Human arginine-rich nuclear protein mRNA, complete cds.//1.5e-12:141:85//M74002

[12495] R-HEMBA1004847//Canine mRNA for 68 kDA subunit of signal recognition particle (SRP68).//7.6e-80:297:85//X53744

[12496] R-HEMBA1004850

[12497] R-HEMBA1004863//Human DNA sequence from PAC 345P10 on chromosome 22q12-qter contains ESTs and STS and polymorphic CA repeat D22S927.//2.0e-14:159:79//Z82201

[12498] R-HEMBA1004864

[12499] R-HEMBA1004865//Homo sapiens Xp22-149 BAC RPCI11-46604 (Roswell Park Cancer Institute Human BAC Library) complete sequence.//0.90:76:76//AC005297

[12500] R-HEMBA1004880//Homo sapiens clone DJ0309D19, WORKING DRAFT SEQUENCE, 12 unordered pieces.//1.9e-49:551:73//AC004826

[12501] R-HEMBA1004889//Human DNA sequence *** SEQUENCING IN PROGRESS *** from clone 223B I, WORKING DRAFT SEQUENCE.//0.0021:189:65//AL031943

[12502] R-HEMBA1004900//Homo sapiens chromosome 17, clone hRPK.180_P_{—}8, complete sequence.//6.6e-11:144:77//AC005972

[12503] R-HEMBA1004909//Human DNA sequence from clone 505B13 on chromosome 1p36.2-36.3 Contains CA repeat and GSSs, complete sequence.//7.6e-46:341:83//Z98052

[12504] R-HEMBA1004918//Human DNA sequence *** SEQUENCING IN PROGRESS *** from clone 994L9, WORKING DRAFT SEQUENCE.//1.6e-54:301:89//AL034554

[12505] R-HEMBA1004923//Homo sapiens 47 kB DNA fragment from Xq28, proximal to MTMI gene.//2.0e-07:182:69/NY15994

[12506] R-HEMBA1004929

[12507] R-HEMBA1004930//Homo sapiens chromosome 11 clone CIT987SK-1012F4, WORKING DRAFT SEQUENCE, 6 unordered pieces.//7.7e-66:547:79//AC005848

[12508] R-HEMBA1004933//H. sapiens Humig mRNA.//0.13:233:62//X72755

[12509] R-HEMBA1004934//CIT-HSP-2021116.TF CIT-HSP Homo sapiens genomic clone 2021116, genomic survey sequence.//0.66:268:62//B65345

[12510] R-HEMBA1004944//CIT-HSP-2281L12.TR CIT-HSP Homo sapiens genomic clone 2281L12, genomic survey sequence.//3.8e-20:104:82//B99849

[12511] R-HEMBA1004954//Homo sapiens chromosome 17, clone hRPK.146_P_{—}2, WORKING DRAFT SEQUENCE, 4 unordered pieces.//0.00082:385:60//AC005341

[12512] R-HEMBA1004956//CIT-HSP-2305H22.TF CIT-HSP Homo sapiens genomic clone 2305H22, genomic survey sequence.//1.6e-84:411:99//AQ020408

[12513] R-HEMBA1004960//Human DNA sequence from PAC 358H7 on chromosome X.//3.3e-22:249:7411Z77249

[12514] R-HEMBA1004972//nbxb0003aFOlf CUGI Rice BAC Library Oryza sativa genomic clone nbxb0003KOlf, genomic survey sequence.//0.52:171:64//AQ049982

[12515] R-HEMBA1004973//*** SEQUENCING IN PROGRESS *** EPMI/APECED region of chromosome 21, clones A68E8, B127P21, B173L3, B23N8, C1242C9, C579E2, A70B6, B159G9, B175D10, B52CIO, C124G1 Note: Sequencing in this region has been discontinued by the Stanford Human Genome Center, WORKING DRAFT SEQUENCE, 50 unordered pieces.//0.69:179:64//AC003656

[12516] R-HEMBA1004977//Caenorhabditis elegans cosmid F08G2, complete sequence.//7.6e-07:492:58//Z81495

[12517] R-HEMBA1004978//Human DNA sequence from clone 522P13 on chromosome 6p21.31-22.3. Contains a 60S Ribosomal Protein L21 pseudogene and an HNRNP A3 (Heterogenous Nuclear Riboprotein A3, FBRNP) pseudogene. Contains ESTs, STSs and GSSs, complete sequence.//0.20:427:60//AL024509

[12518] R-HEMBA1004980//CIT-HSP-2379K5.TF CIT-HSP Homo sapiens genomic clone 2379K5, genomic survey sequence.//1.6e-53:331:88//AQ108614

[12519] R-HEMBA1004983//Genomic sequence from Human 17, complete sequence.//0.00061:473:58//AC000389

[12520] R-HEMBA1004995//Homo sapiens chromosome 16, cosmid clone 306E5 (LANL), complete sequence.//1.6e-90:527:89//AC004224

[12521] R-HEMBA1005008//Human DNA sequence from clone 461P17 on chromosome 20q12-13.2. Contains four novel (pseudo)genes for proteins with Kunitz/Bovine pancreatic trypsin inhibitor and/or WAP-type (Whey Acidic Protein) ‘four-disulfide core’ domains, COX6C (Cytochrome C Oxidase Polypeptide VIC, EC 1.9.3.1) and RPL5 (60S Ribosomal Protein L5) pseudogenes, a pseudogene similar to part of the HSPD 1 (HSP60, Mitochondrial Matrix Protein P1 precursor, Heat Shock Protein 60, GROEL protein, HUCHA60) gene, and the Major Epididymis-specific protein E4 precursor (HE4, Epididymis Secretory protein E4, WAP-type (Whey Acidic Protein) ‘four-disulfide core’ domain) gene. Contains ESTs, an STS, GSSs and a putative CpG island, complete sequence.//5.4e-65:357:83//AL031663

[12522] R-HEMBA1005009//Homo sapiens BAF53a (BAF53a) mRNA, complete cds.//5.6e-107:550:96//AF041474

[12523] R-HEMBA1005019//Homo sapiens mRNA for KIAA0648 protein, partial cds.l/6.3e-104:542:94//AB014548

[12524] R-HEMBA1005029//Homo sapiens DNA sequence from PAC 97D16 on chromosome 6p21.3-22.2. Contains an unknown pseudogene, a 60S Ribosomal protein L24 (L30) LIKE pseudogene and histone genes H2BFC (H2B/c), H4FFP (H4/f pseudogene), H2AFC (H2A/c), H3FIK (H3.1/k) and a tRNA-Val pseudogene and tRNA-Thr gene. Contains ESTs, STSs, GSSs and genomic marker D6S464, complete sequence.//3.1e-67:493:83//AL009179

[12525] R-HEMBA1005035//Homo sapiens chromosome 17, clone hCIT.175_E_{—}5, complete sequence.//7.4e-101:537:94//AC004596

[12526] R-HEMBA1005039//Human DNA sequence *** SEQUENCING IN PROGRESS *** from clone 1018D12, WORKING DRAFT SEQUENCE.//9.5e-30:446:68//AL031650

[12527] R-HEMBA1005047//Mus musculus mRNA for Rab24 protein.//1.4e-34:229:88//Z22819

[12528] R-HEMBA1005050//Human Chromosome X PAC RPCII-290C9 from the Pieter de Jong Human PAC library; complete sequence.//4.0e-43:371:80//AC002404

[12529] R-HEMBA1005062//Homo sapiens chromosome 17, clone hCIT.186_H_{—}2, complete sequence.//2.3e-15:269:66//AC004675

[12530] R-HEMBA1005066//Homo sapiens clone NHOO01PO9, WORKING DRAFT SEQUENCE, I unordered pieces.//4.0e-30:305:74//AC006030

[12531] R-HEMBA1005075

[12532] R-HEMBA1005079//Homo sapiens clone HS19.11 Alu-Ya5 sequence.//6.5e-48:245:91//AF015156

[12533] R-HEMBA1005083//Human DNA sequence *** SEQUENCING IN PROGRESS *** from clone 1185N5, WORKING DRAFT SEQUENCE.//1.3e-15:142:83//AL034423

[12534] R-HEMBA1005101//Homo sapiens SYT interacting protein SIP mRNA, complete cds.//5.3e-110:545:96//AF080561

[12535] R-HEMBA1005113//Caenorhabditis elegans DNA *** SEQUENCING IN PROGRESS * from clone Y53C 10, WORKING DRAFT SEQUENCE.//0.026:252:64//Z93340

[12536] R-HEMBA1005123//Homo sapiens DNA sequence from clone 78F24 on chromosome 22q12.1-12.3. Contains one exon of an Oxysterol-binding protein (OSBP) LIKE gene. Contains GSSs and an STS, complete sequence.//7.1e-55:306:82//AL022336

[12537] R-HEMBA1005133//Human DNA sequence *** SEQUENCING IN PROGRESS *** from clone Y738F9, WORKING DRAFT SEQUENCE.//6.4e-45:309:87//AL022345

[12538] R-HEMBA1005149//Human cosmid LL12NCO1-95H4, ETV6 gene, exon 2 and partial cds.//3.2e-31:310:76//U81834

[12539] R-HEMBA1005152//Homo sapiens DNA sequence from PAC 13D10 on chromosome 6p22.3-23. Contains CpG island.//1.4e-33:361:79//AL021407

[12540] R-HEMBA1005159//Human DNA sequence from clone 163016 on chromosome Ip35.1-36.13 Contains CA repeat, STS, complete sequence.//2.7e-22:440:66//AL031279

[12541] R-HEMBA1005185//Caenorhabditis elegans DNA *** SEQUENCING IN PROGRESS * from clone Y105E8, WORKING DRAFT SEQUENCE.//0.0017:381:58//AL022594

[12542] R-HEMBA1005201//P. falciparum complete gene map of plastid-like DNA (IR-B).//8.5e-05:457:57//X95276

[12543] R-HEMBA1005202//Human 18S ribosomal RNA.//4.7e-38:236:91//X03205

[12544] R-HEMBA1005219

[12545] R-HEMBA1005223//Homo sapiens clone DJ0673M15, WORKING DRAFT SEQUENCE, 33 unordered pieces.//1.0:209:65//AC004854

[12546] R-HEMBA1005232//Homo sapiens chromosome Y, clone 264, M, 20, complete sequence.//0.0040:439:58//AC004617

[12547] R-HEMBA1005241//Homo sapiens PAC clone DJ0777023 from 7 p14-p15, complete sequence.//4.2e-111:568:96//AC005154

[12548] R-HEMBA1005244//HS_{—}3092_B2_C11_MF CIT Approved Human Genomic Sperm Library D Homo sapiens genomic clone Plate=3092 Col=22 Row=F, genomic survey sequence.//4.9e-12:116:84//AQ127947

[12549] R-HEMBA1005251//Homo sapiens PAC clone DJI 182N03 from 7q11.23-q21.1, complete sequence.//3.2e-27:210:84//AC004548

[12550] R-HEMBA1005252//Homo sapiens chromosome 17, clone hRPK.318_A_{—}15, complete sequence.//4.6e-105:437:97//AC005837

[12551] R-HEMBA1005274//Slime mold mitochondrial DNA, binding region to the membrane system.//0.011:339:59//D86630

[12552] R-HEMBA1005275//Homo sapiens PAC clone DJ0886008 from 7q32-q35, complete sequence.//3.4e-17:269:71//AC004914

[12553] R-HEMBA1005293//Human DNA sequence from PAC 130N4, BRCA2 gene region chromosome 13q12-13 contains xs7 mRNA, ESTs.//6.9e-20:193:73//Z75887

[12554] R-HEMBA1005296//HS_{—}3037_B1 D01_MR CIT Approved Human Genomic Sperm Library D Homo sapiens genomic clone Plate=3037 Col=1 Row=H, genomic survey sequence.//0.26:184:64//AQ117120

[12555] R-HEMBA1005304//Homo sapiens clone DJ0693MI 1, WORKING DRAFT SEQUENCE, 7 unordered pieces.//1.5e-58:445:78//AC006146

[12556] R-HEMBA1005311//Human DNA sequence *** SEQUENCING IN PROGRESS *** from clone 796E4, WORKING DRAFT SEQUENCE.//9.3e-42:383:78//AL022337

[12557] R-HEMBA1005314//Caenorhabditis elegans cosmid F23H11.//0.80:179:65//AF003389

[12558] R-HEMBA1005315//Homo sapiens clone NH0001P09, WORKING DRAFT SEQUENCE, 1 unordered pieces.//2.4e-40:409:71//AC006030

[12559] R-HEMBA1005318//S. pombe chromosome I cosmid c2E11.//0.97:370:61//AL031181

[12560] R-HEMBA1005331//Homo sapiens chromosome 17, clone hRPK.214_C_{—}8, complete sequence.//1.9e-112:577:95//AC005803

[12561] R-HEMBA1005353//Human DNA sequence *** SEQUENCING IN PROGRESS *** from clone 429E7, WORKING DRAFT SEQUENCE.//8.9e-80:406:97//AL031722

[12562] R-HEMBA1005359//Homo sapiens chromosome 17, clone hRPK.22_N_{—}12, WORKING DRAFT SEQUENCE, 2 ordered pieces.//3.2e-50:320:84//AC005412

[12563] R-HEMBA1005367//RPCI11-85E23.TV RPCII 1 Homo sapiens genomic clone R-85E23, genomic survey sequence.//0.39:148:67//AQ281915

[12564] R-HEMBA1005372//Homo sapiens full-length insert cDNA YH93B03.//2.6e-108:557:95//AF074997

[12565] R-HEMBA1005374//Homo sapiens full-length insert cDNA clone ZA95D11.//1.9e-110:531:98//AF086142

[12566] R-HEMBA1005389//Human DNA sequence from clone 245GI9 on chromosome Xp22.11-22.2 Contains serine-threonine kinase (Txp3) gene, a pseudogene similar to ALPHA-1 PROTEIN ((CONNEXIN 43, CX43, GAP JUNCTION 43 KD HEART PROTEIN)), and the 3′ end of the RS 1 (X-linked juvenile retinoschisis precursor protein) gene. Contains ESTs, STSs and GSSs, complete sequence.//6.0e-41:432:75//Z92542

[12567] R-HEMBA1005394//Human DNA sequence *** SEQUENCING IN PROGRESS * from clone 681N20, WORKING DRAFT SEQUENCE.//4.9e-107:585:93//AL031670

[12568] R-HEMBA1005403//Human DNA sequence *** SEQUENCING IN PROGRESS *** from clone 423B22, WORKING DRAFT SEQUENCE.//5.1e-118:586:97//AL034379

[12569] R-HEMBA1005408//Bos taurus retina membrane guanylate cyclase ROS-GC2 mRNA, complete cds.//1.6e-06:204:68//U95958

[12570] R-HEMBA1005410//Human DNA sequence *** SEQUENCING IN PROGRESS *** from clone 732E4, WORKING DRAFT SEQUENCE.//1.2e-23:452:66//AL008722

[12571] R-HEMBA1005411//RPCI11-66N19.TK RPCII 1 Homo sapiens genomic clone R-66N19, genomic survey sequence.//2.2e-38:222:79//AQ237442

[12572] R-HEMBA1005423//Homo sapiens cyclin-dependent kinase inhibitor (CDKN2C) mRNA, complete cds.//5.6e-117:453:99//AF041248

[12573] R-HEMBA1005426//Human DNA sequence from PAC 448E20 on chromosome Xq26.1 contains ESTs and STS.//0.86:278:60//Z97196

[12574] R-HEMBA1005443//Homo sapiens (clone s153) mRNA fragment.//5.4e-46:305:87//L40391

[12575] R-HEMBA1005447//Human DNA sequence from clone 48G12 on chromosome Xq27.1-27.3. Contains STSs and GSSs, complete sequence.//3.3e-79:531:86//AL031054

[12576] R-HEMBA1005468//Homo sapiens PAC clone DJ0808G16 from 7q11.23-q21, complete sequence.//4.0e-27:469:66//AC004894

[12577] R-HEMBA1005469//Homo sapiens chromosome 16, P1 clone 96-4B (LANL), complete sequence.//7.2e-40:410:76//AC005212

[12578] R-HEMBA1005472//Human DNA sequence *** SEQUENCING IN PROGRESS *** from clone 1090E8, WORKING DRAFT SEQUENCE.//3.1e-40:296:85//AL033524

[12579] R-HEMBA1005475//HS_{—}2266_B2_C04_MF CIT Approved Human Genomic Sperm Library D Homo sapiens genomic clone Plate=2266 Col=8 Row=F, genomic survey sequence.//0.49:209:61//AQ069377

[12580] R-HEMBA1005497

[12581] R-HEMBA1005500//Homo sapiens PAC clone DJ1093017 from 7q11.23-q21, complete sequence.//4.5e-116:580:97//AC004957

[12582] R-HEMBA1005506//Arabidopsis thaliana BAC T26D22.//0.0050:442:59//AF058826

[12583] R-HEMBA1005508//Sigalphus sp. 16S ribosomal RNA gene, partial sequence.//0.020:391:59//AF003509

[12584] R-HEMBA1005511//Human DNA sequence from PAC 52D1 on chromosome Xq21. Contains CA repeats, STS.//0.44:195:63//Z96811

[12585] R-HEMBA1005517//Bovine herpesvirus type 1 early-intermediate transcription control protein (BICP4) gene, complete cds.//0.44:470:57//L14320

[12586] R-HEMBA1005518//M. musculus mRNA for paladin gene.//6.2e-29:183:81//X99384

[12587] R-HEMBA1005520//Homo sapiens clone DJ0876A24, WORKING DRAFT SEQUENCE, 6 unordered pieces.//7.2e-40:281:86//AC004913

[12588] R-HEMBA1005526//Human DNA sequence *** SEQUENCING IN PROGRESS *** from clone 341DI0, WORKING DRAFT SEQUENCE.//3.9e-40:482:73//Z97985

[12589] R-HEMBA1005528//Homo sapiens genomic DNA of 8p21.3-p22 anti-oncogene of hepatocellular colorectal and non-small cell lung cancer, segment 3/11.//3.8e-84:309:99//AB020860

[12590] R-HEMBA1005530//Homo sapiens PAC clone 946B23 SCA2 region, SP6 end, genomic sequence, genomic survey sequence.//8.1e-25:154:94//U84091

[12591] R-HEMBA1005548//Human DNA sequence *** SEQUENCING IN PROGRESS *** from clone 970A17, WORKING DRAFT SEQUENCE.//5.3e-105:534:96//AL034431

[12592] R-HEMBA1005552//Homo sapiens PAC clone DJO807CI5 from 7q34-q36, complete sequence.//2.8e-69:432:88//AC004743

[12593] R-HEMBA1005558

[12594] R-HEMBA1005568//Homo sapiens Xp22 GSHB-314C4 (Genome Systems Human BAC library) complete sequence.//5.9e-33:367:74//AC004087

[12595] R-HEMBA1005570//Human DNA sequence from clone 192P9 on chromosome Xp 11.23-11.4. Contains a pseudogene similar to rat Plasmolipin, ESTs and GSSs, complete sequence.//2.2e-67:399:91//AL020989

[12596] R-HEMBA1005576//Homo sapiens chromosome 16, BAC clone 97H22 (LANL), complete sequence.//1.0:156:63//AC005737

[12597] R-HEMBA1005577

[12598] R-HEMBA1005581//Homo sapiens mRNA for MEGF5, partial cds.//9.7e-27:561:64//AB011538

[12599] R-HEMBA1005582//Torulopsis glabrata mitochondrial intergenic region ATPase 9-cytochrome oxidase 2 genes.//2.3e-10:404:62//X02171

[12600] R-HEMBA1005583//HS_{—}3014_B1_D05_T7 CIT Approved Human Genomic Sperm Library D Homo sapiens genomic clone Plate=3014 Col=9 Row=H, genomic survey sequence.//3.0e-81:442:94//AQ154499

[12601] R-HEMBA1005588//Human DNA sequence from clone 1409 on chromosome Xp11.1-11.4. Contains a Inter-Alpha-Trypsin Inhibitor Heavy Chain LIKE gene, a alternatively spliced Melanoma-Associated Antigen MAGE LIKE gene and a 6-Phosphofructo-2-kinase (Fructose-2,6-bisphosphatase) LIKE pseudogene. Contains ESTs, STSs and genomic marker DXS8032, complete sequence.//1.8e-54:490:77//Z98046

[12602] R-HEMBA1005593//Homo sapiens chromosome 17, clone hRPK.332_H_{—}18, complete sequence.//2.2e-28:262:79//AC005746

[12603] R-HEMBA1005595//HSS_{—}2224_A2_G03_MF CIT Approved Human Genomic Sperm Library D Homo sapiens genomic clone Plate=2224 Col=6 Row=M, genomic survey sequence.//3.6e-48:263:95//AQ033446

[12604] R-HEMBA1005606//Human PAC clone DJ0093103 from Xq23, complete sequence.//2.5e-08:355:63//AC003983

[12605] R-HEMBA1005609//HS_{—}2182_B1_H06_MF CIT Approved Human Genomic Sperm Library D Homo sapiens genomic clone Plate=2182 Col=1 I Row=P, genomic survey sequence.//2.2e-82:400:99//AQ023130

[12606] R-HEMBA1005616//Human DNA sequence *** SEQUENCING IN PROGRESS * from clone 124K22, WORKING DRAFT SEQUENCE.//0.80:308:60//AL031176

[12607] R-HEMBA1005621//Human DNA sequence *** SEQUENCING IN PROGRESS *** from clone 330012, WORKING DRAFT SEQUENCE.//7.4e-76:338:98//AL031731

[12608] R-HEMBA1005627//Homo sapiens full-length insert cDNA clone ZD53D02.//4.5e-72:398:93//AF086321

[12609] R-HEMBA1005631//Homo sapiens PAC clone DJI086D14, complete sequence.//3.8e-17:548:60//AC004460

[12610] R-HEMBA1005632//Homo sapiens DNA sequence from PAC 168L15 on chromosome 6q26-27. Contains RSK3 gene, ribosomal protein S6 kinase, EST, GSS, STS. CpG island, complete sequence.//1.4e-13:172:75//AL022069

[12611] R-HEMBA1005634//RPCI11-13015.TVB RPCI-11 Homo sapiens genomic clone RPCI-11-13015, genomic survey sequence.//1.0e-28:153:82//B73293

[12612] R-HEMBA1005666//Human DNA sequence from PAC 696H22 on chromosome Xq21.1-21.2. Contains a mouse E25 like gene, a Kinesin like pseudogene and ESTs.//4.5e-51:343:87//AL021786

[12613] R-HEMBA1005670//Human DNA sequence *** SEQUENCING IN PROGRESS *** from clone 11703, WORKING DRAFT SEQUENCE.//2.5e-33:288:78//AL020995

[12614] R-HEMBA1005679//Human esterase D mRNA, 3′end.//4.2e-49:322:88//M13450

[12615] R-HEMBA1005680//Homo sapiens Chr.14 PAC RPCI4-794B2 (Roswell Park Cancer Institute Human PAC Library) complete sequence.//3.0e-36:285:83//AC005924

[12616] R-HEMBA1005685//H. sapiens (MAR8) chromosome 19 DNA, 343 bp.//0.022:65:86//Z35281

[12617] R-HEMBA1005699//Human putative EPH-related PTK receptor ligand LERK-8 (Eplg8) mRNA, complete cds.//5.4e-46:376:84//U66406

[12618] R-HEMBA1005705//RPCI11-13014.TP RPCI-11 Homo sapiens genomic clone RPCI-11-13014, genomic survey sequence.//0.071:182:59//B76186

[12619] R-HEMBA1005717//Human DNA sequence from PAC 50AI3 on chromosome Xp 11. Contains ATP SYNTHASE LIPID BfNDING PROTEIN P1 (P2, P3) precursor (ATP5GI, ATP5G2, ATP5G3) like pseudogene, ESTs and STSs. Contains polymorphic CA repeat.//0.0:189:66//Z92545

[12620] R-HEMBA1005732//Human Chromosome 11q12 pac pDJ363p2, WORKING DRAFT SEQUENCE, 22 unordered pieces.//2.1e-47:449:75//AC003023

[12621] R-HEMBA1005737

[12622] R-nnnnnnnnnnnn//H. sapiens DNA for repeat unit locus DI 8S51 (285 bp).//0.11:174:63//X91255

[12623] R-HEMBA1005755//Human DNA sequence from clone 396D17 on chromosome 1p33-35.3 Contains EST, STS, GSS, complete sequence.//0.15:160:65//AL008634

[12624] R-HEMBA1005765//Human Xq28 cosmids U225B5 and U236A12, complete sequence.//5.2e-39:422:74//U71148

[12625] R-HEMBA1005780//Homo sapiens genomic DNA, chromosome 21q22.2 (Down Syndrome region), segment 3/15, WORKING DRAFT SEQUENCE.//0.037:261:61//AP00001

[12626] R-HEMBA1005813//Human DNA sequence *** SEQUENCING IN PROGRESS *** from clone Y313F4, WORKING DRAFT SEQUENCE.//1.7e-26:242:80//AL023808

[12627] R-HEMBA1005815//Bufo boreas MVZ 145227 c-mos gene, partial cds.//0.17:199:62//U52805

[12628] R-HEMBA1005822//Plasmodium falciparum MAL3P7, complete sequence.//0.26:437:56//AL034559

[12629] R-HEMBA1005829//Human Cosmid g1572c035, complete sequence.//3.8e-05:366:61//AC000124

[12630] R-HEMBA1005834//Human DNA sequence from clone 51J12 on chromosome 6q26-27. Contains the 3′ part of the alternatively spliced gene for the human orthologs of mouse QKI-7 and QKI-7B (KH Domain RNA Binding proteins) and zebrafish ZKQ-1 (Quaking protein homolog). Contains ESTs, STSs and GSSs, complete sequence.//8.2e-107:551:96//AL031781

[12631] R-HEMBA1005852//F. rubripes GSS sequence, clone 163A22aA4, genomic survey sequence.//2.6e-17:225:72//AL018730

[12632] R-HEMBA1005853//Human Chromosome 15 pac pDJ24 m8, complete sequence.//1.1e-27:314:75//AC000379

[12633] R-HEMBA1005884//Homo sapiens 12 p13.3 BAC RPCI3-488H23 (Roswell Park Cancer Institute Human BAC Library) complete sequence.//2.6e-20:328:67//AC006207

[12634] R-HEMBA1005891//Homo sapiens PAC clone DJ0997N05 from 7q11.23-q21.1, complete sequence.//2.0e-102:543:95//AC004945

[12635] R-HEMBA1005894

[12636] R-HEMBA1005909

[12637] R-HEMBA1005911//CIT-HSP-2342E5.TR CIT-HSP Homo sapiens genomic clone 2342E5, genomic survey sequence.//0.0012:315:60//AQ058081

[12638] R-HEMBA1005921//P. chrysogenum mitochondrion genes for tRNA-Arg, tRNA-Asn, tRNA-Tyr, small subunit rRNA, and ATPase subunit 6.//0.0090:445:58//Z23072

[12639] R-HEMBA1005931//Human DNA sequence *** SEQUENCING IN PROGRESS * from clone 54B20, WORKING DRAFT SEQUENCE.//1.7e-46:351:83//Z98304

[12640] R-HEMBA1005934//Homo sapiens chromosome 17, clone hRPK.261_A_{—}13, complete sequence.//0.0052:179:71//AC005138

[12641] R-HEMBA1005962//Homo sapiens clone RG012D21, complete sequence.//1.1e-11:149:74//AC005045

[12642] R-HEMBA1005963//HS_{—}3055_A1_E08_MR CIT Approved Human Genomic Sperm Library D Homo sapiens genomic clone Plate=3055 Col=15 Row=I, genomic survey sequence.//5.4e-79:403:97//AQ147357

[12643] R-HEMBA1005990//Homo sapiens I-1 receptor candidate protein mRNA, complete cds.//6.9e-112:580:95//AF082516

[12644] R-HEMBA1005991//Human DNA sequence from clone 58A9 on chromosome 1q24.1-24.3. Contains STSs, GSSs, genomic marker Dl S210 and a ca repeat polymorphism, complete sequence.//2.6e-39:299:82//AL031285

[12645] R-HEMBA1005999//Homo sapiens clone DJO691 Fl 1, WORKING DRAFT SEQUENCE, 11 unordered pieces.//1.1e-29:260:70//AC004859

[12646] R-HEMBA1006002//Rattus norvegicus s-nexilin mRNA, complete cds.//6.3e-15:174:78//AF056035

[12647] R-HEMBA1006005//Homo sapiens MLL (MLL) gene, exons 1-3, and partial cds.//2.6e-112:574:95//AF036405

[12648] R-nnnnnnnnnnnn//Homo sapiens mRNA for KIAA0725 protein, partial cds.//7.6e-27:444:67//AB018268

[12649] R-HEMBA1006035//Plasmodium falciparum 3D7 chromosome 12 PFYAC336 genomic sequence, WORKING DRAFT SEQUENCE, 5 unordered pieces.//0.025:373:60//AC005139

[12650] R-HEMBA1006036//Homo sapiens Chromosome 16 BAC clone CIT987SK-625PI 1, complete sequence.//0.0056:535:59//AC004125

[12651] R-HEMBA1006042//HS_{—}2169_A1_B11_MF CIT Approved Human Genomic Sperm Library D Homo sapiens genomic clone Plate=2169 Col=21 Row=C, genomic survey sequence.//1.7e-73:390:95//AQ132995

[12652] R-nnnnnnnnnnnn

[12653] R-HEMBA1006081

[12654] R-HEMBA1006090//HS_{—}2262_A2_A01_T7 CIT Approved Human Genomic Sperm Library D Homo sapiens genomic clone Plate=2262 Col=2 Row=A, genomic survey sequence.//2.1e-70:360:97//AQ216324

[12655] R-HEMBA1006091

[12656] R-HEMBA1006100//Homo sapiens DNA sequence from PAC 212G6 on chromosome Xp 11.3-p11.4. Contains synapsin 1, brain protein 4.1, properdin, tyrosine kinase (ELK1) oncogene, ESTs, STS, GSS, complete sequence.//1.6e-36:354:77//AL009172

[12657] R-HEMBA1006108

[12658] R-HEMBA1006121

[12659] R-HEMBA1006124//Human DNA sequence from BAC 175E3 on chromosome 22q11.2-qter. Contains ESTs, STSs and polymorphic CA repeat.//1.3e-12:327:64//Z95113

[12660] R-HEMBA1006130//WORKING DRAFT SEQUENCE, 3 unordered pieces.//0.60:326:62//AC005948

[12661] R-nnnnnnnnnnnn//Homo sapiens chromosome 19, cosmid F16403, complete sequence.//4.3e-52:321:80//AC005777

[12662] R-HEMBA1006142//, complete sequence.//1.0e-13:160:78//AC005500

[12663] R-HEMBA1006155//Plasmodium falciparum 3D7 chromosome 12 PFYAC69 genomic sequence, WORKING DRAFT SEQUENCE, 4 unordered pieces.//0.0013:389:60//AC004688

[12664] R-HEMBA1006158//Homo sapiens transcription factor forkhead-like 7 (FKHL7) gene, complete cds.//1.4e-119:574:98//AF048693

[12665] R-HEMBA1006173//Mus musculus protein tyrosine phosphatase STEP61 mRNA, complete cds.//4.1e-43:307:86//U28217

[12666] R-HEMBA1006182//Homo sapiens BAC clone RG139 P11 from 7q11-q21, complete sequence.//1.7e-30:300:71//AC004491

[12667] R-HEMBA1006198//***ALU WARNING: Human Alu-J subfamily consensus sequence.//1.3e-36:284:85//U14567

[12668] R-HEMBA1006235//Homo sapiens clone 24422 mRNA sequence.//2.1e-110:545:97//AF070557

[12669] R-HEMBA1006248//Homo sapiens mRNA for KIAA0667 protein, partial cds.//0.46:365:58//AB014567

[12670] R-HEMBA1006252//Human Chromosome 16 BAC clone CIT987SK-A-972D3, complete sequence.//2.8e-41:438:71//U91323

[12671] R-HEMBA1006253//Homo sapiens 45 kDa splicing factor mRNA, complete cds.//1.8e-28:179:91//AF083384

[12672] R-HEMBA1006259//RPCII 1-44N14.TJ RPCII 1 Homo sapiens genomic clone R-44N14, genomic survey sequence.//1.5e-48:348:85//AQ203161

[12673] R-HEMBA1006268

[12674] R-HEMBA1006272//Human DNA sequence from clone 1198H6 on chromosome 1p36.11-36.31. Contains two Melanoma Preferentially Expressed Antigen PRAME LIKE genes. Contains GSSs and ESTs, complete sequence.//2.8e-73:273:87//AL023753

[12675] R-nnnnnnnnnnnn//H. sapiens PAP mRNA.//H.6e-54:585:71//X76770

[12676] R-HEMBA1006283//Sequence 7 from patent U.S. Pat. No. 5,776,683.//9.7e-18:113:98//AR016240

[12677] R-HEMBA1006284//Homo sapiens chromosome 17, clone HRPC.1028_K_{—}7, complete sequence.//0.97:447:59//AC004585

[12678] R-HEMBA1006291//Homo sapiens full-length insert cDNA clone ZB76B10.//2.9e-94:454:98//AF086161

[12679] R-HEMBA1006293//Sequence 8 from patent U.S. Pat. No. 5,721,351.//8.1e-10:111:72//189415

[12680] R-HEMBA1006309//Homo sapiens chromosome 17, clone hRPK.22_N-12, WORKING DRAFT SEQUENCE, 2 ordered pieces.//8.6e-37:288:84//AC005412

[12681] R-HEMBA1006310//Rattus norvegicus cytosolic sorting protein PACS-1 a (PACS-1) mRNA, complete cds.//6. Se-29:132:81//AF076183

[12682] R-HEMBA1006328//Human DNA sequence *** SEQUENCING IN PROGRESS *** from clone 894K16, WORKING DRAFT SEQUENCE.//3.3e-50:340:75//AL034429

[12683] R-HEMBA1006334

[12684] R-HEMBA1006344//Rattus norvegicus nitzin mRNA, partial cds.//8.7e-22:259:72//AF087945

[12685] R-HEMBA1006347//Human prostasin gene, complete cds.//1.8e-78:170:100//U33446

[12686] R-HEMBA1006349//Rat brain calcium channel alpha-1 subunit mRNA, complete cds.//0.00051:120:73//M57682

[12687] R-HEMBA1006359//CITBI-E 1-2516CI 6.TR CITBI-EI Homo sapiens genomic clone 2516CI16, genomic survey sequence.//4.7e-74:576:82//AQ277951

[12688] R-HEMBA1006364//G. gallus gene for transforming growth factor-beta2, exons 5-7.//2.5e-21:118:85//X59080

[12689] R-HEMBA1006377//Homo sapiens chromosome 19, cosmid F23149, complete sequence.//5.7e-68:367:85//AC005239

[12690] R-HEMBA1006380//Human BAC clone RG007J15 from 7q31, complete sequence.//6.1e-47:300:83//AC003989

[12691] R-HEMBA1006381//Homo sapiens chromosome 5, Bac clone 189 (LBNL H135), complete sequence.//1. Se-47:336:86//AC005914

[12692] R-HEMBA1006398//Homo sapiens chromosome 5, BAC clone 203013 (LBNL H155), complete sequence.//1.5e-67:501:83//AC005609

[12693] R-HEMBA1006416//Homo sapiens chromosome 17, clone 347_H_{—}5, complete sequence.//4.4e-37:319:76//AC002119

[12694] R-HEMBA1006419//Homo sapiens chromosome 17, clone HClT542B22, complete sequence.//2.9e-50:502:75//AC004253

[12695] R-HEMBA1006421//Homo sapiens chromosome 14q24.3 clone BAC270M14 transforming growth factor-beta 3 (TGF-beta 3) gene, complete cds; and unknown genes.//4.1e-116:572:97//AF107885

[12696] R-HEMBA1006424//Human DNA sequence from clone 51J12 on chromosome 6q26-27. Contains the 3′ part of the alternatively spliced gene for the human orthologs of mouse QKI-7 and QKI-7B (KH Domain RNA Binding proteins) and zebrafish ZKQ-1 (Quaking protein homolog). Contains ESTs, STSs and GSSs, complete sequence.//9.4e-117:578:97//AL031781

[12697] R-HEMBA1006426//Human DNA sequence *** SEQUENCING IN PROGRESS *** from clone 291J10, WORKING DRAFT SEQUENCE.//2.2e-08:353:63//Z93017

[12698] R-HEMBA1006438//HS_{—}2008_A1_D04_T7 CIT Approved Human Genomic Sperm Library D Homo sapiens genomic clone Plate=2008 Col=7 Row=G, genomic survey sequence.//1.2e-29:194:91//AQ245162

[12699] R-HEMBA1006445//Homo sapiens clone RG219E16, WORKING DRAFT SEQUENCE, 3 unordered pieces.//0.011:330:60//AC005075

[12700] R-HEMBA1006446//Plasmodium falciparum chromosome 2, section 35 of 73 of the complete sequence.//0.032:256:61//AE001398

[12701] R-HEMBA1006461//Homo sapiens Xp22 Cosmids U15E4, U115H5, U132E12, U115B9 (Lawrence Livermore human cosmid library) complete sequence.//5.6e-35:229:77//AC002364

[12702] R-HEMBA1006467//Homo sapiens Chromosome 9p22 Cosmid clone 34a5, complete sequence.//1.1e-14:354:63//AC002052

[12703] R-HEMBA1006471

[12704] R-HEMBA1006474//p40, p24 [Borna disease virus BDV, WT-1, Halle B 1/91, horse brain, field isolate, Genomic RNA, 1138 nt, segment 1 of 3].//1.1e-14:442:60//S67502

[12705] R-HEMBA1006483//Human chromosome 16p13.1 BAC clone CIT987SK-551G9 complete sequence.//3.7e-37:290:82//U95742

[12706] R-HEMBA1006485//H. sapiens mRNA for aminopeptidase.//7.6e-91:517:91//Y07701

[12707] R-HEMBA1006486//Homo sapiens clone RG315H I 11, WORKING DRAFT SEQUENCE, 5 unordered pieces.//1.1e-33:289:81//AC005089

[12708] R-HEMBA1006489//Human DNA sequence from clone 192P9 on chromosome Xp 11.23-11.4. Contains a pseudogene similar to rat Plasmolipin, ESTs and GSSs, complete sequence.//6.0e-07:485:60//AL020989

[12709] R-HEMBA1006492//Homo sapiens chromosome 17, clone hRPK.269_G_{—}24, complete sequence.//4.3e-12:572:95//AC005828

[12710] R-HEMBA1006494//Homo sapiens chromosome 17, clone HRPC987K16, complete sequence.//2.3e-10:186:67//AC002994

[12711] R-HEMBA1006497//RPCII 1-16L10.TPB RPCI-11 Homo sapiens genomic clone RPCI-11-16L10, genomic survey sequence.//1.5e-10:75:100//B88015

[12712] R-HEMBA1006502//Human DNA sequence from clone 272E8 on chromosome Xp22.13-22.31. Contains a pseudogene similar to MDM2-Like P53-binding protein gene. Contains STSs, GSSs and a CA repeat polymorphism, complete sequence.//3.3e-36:516:70//Z93929

[12713] R-HEMBA1006507//Homo sapiens mRNA for KIAA0666 protein, partial cds.//1.2e-115:570:96//AB014566

[12714] R-HEMBA1006521//Human DNA sequence *** SEQUENCING IN PROGRESS *** from clone 54B20, WORKING DRAFT SEQUENCE.//2.2e-20:266:71//Z98304

[12715] R-HEMBA1006530//RPCI11-52MI.TJ RPCII 1 Homo sapiens genomic clone R-52M1, genomic survey sequence.//0.00015:227:64//AQ052526

[12716] R-HEMBA1006535//HS_{—}2234_BI B07_MF CIT Approved Human Genomic Sperm Library D Homo sapiens genomic clone Plate=2234 Col=13 Row=D, genomic survey sequence.//7.5e-33:191:95//AQ129525

[12717] R-HEMBA1006540//Homo sapiens clone GS051M12, complete sequence.//0.026:497:58//AC005007

[12718] R-HEMBA1006546//Homo sapiens chromosome 19, cosmid R33496, complete sequence.//5.2e-41:289:86//AC004603

[12719] R-HEMBA1006559//Mus musculus PRAJAI (Prajal) mRNA, complete cds.//3.4e-64:551:78//U06944

[12720] R-HEMBA1006562//Human Chromosome 11p11.2 PAC clone pDJ404 m15, complete sequence.//5.7e-09:266:66//AC002554

[12721] R-HEMBA1006566//HS 2171_B1_B04_MF CIT Approved Human Genomic Sperm Library D Homo sapiens genomic clone Plate=2171 Col=7 Row=D, genomic survey sequence.//0.012:306:61//AQ125421

[12722] R-HEMBA1006569//Ovis aries beta actin mRNA, complete cds.//3.8e-70:529:82//U39357

[12723] R-HEMBA1006579//Homo sapiens BAC clone NHO 115E20 from Y, complete sequence.//1.0:141:65//AC006032

[12724] R-HEMBA1006583//CIT-HSP-2377M16.TR CIT-HSP Homo sapiens genomic clone 2377M16, genomic survey sequence.//1.7e-31:271:76//AQ111875

[12725] R-HEMBA1006595//Plasmodium falciparum 3D7 chromosome 12 PFYACI 122 genomic sequence, WORKING DRAFT SEQUENCE, 3 unordered pieces.//0.093:270:61//AC004709

[12726] R-HEMBA1006597//Homo sapiens PI clone GSP13996 from Sq12, complete sequence.//2.7e-45:371:80//AC005031

[12727] R-HEMBA1006612

[12728] R-nnnnnnnnnnnn//Human DNA sequence *** SEQUENCING IN PROGRESS *** from clone 8B22, WORKING DRAFT SEQUENCE.//2.1e-20:229:77//AL031737

[12729] R-HEMBA1006624//Human DNA sequence from clone 406A7 on chromosome 6q23-24. Contains three pseudogenes similar to Elongation Factor 1-Alpha (EF-1-ALPHA, Statin S1), 60S Acidic Ribosomal Protein PI and NADH-Ubiquinone Oxidoreductase 15 kDa subunit, and part of the Microtuble Associated Protein E-MAP-115 gene. Contains ESTs, STSs and GSSs, complete sequence.//4.8e-40:321:83//AL023284

[12730] R-HEMBA1006631//Human DNA sequence *** SEQUENCING IN PROGRESS *** from clone 20208, WORKING DRAFT SEQUENCE.//1.5e-45:477:77//AL031848

[12731] R-HEMBA1006635//***ALU WARNING: Human Alu-Sp subfamily consensus sequence.//8.0e-40:245:91//JU14572

[12732] R-HEMBA1006639

[12733] R-HEMBA1006643

[12734] R-HEMBA1006648//Homo sapiens integrin-linked kinase (ILK) mRNA, complete cds.//2.5e-106:567:94//U40282

[12735] R-HEMBA1006652//Human BAC clone RG308B22 from 7q22-q31, complete sequence.//8.7e-54:334:76//AC002089

[12736] R-HEMBA1006653//Homo sapiens 7q telomere, complete sequence.//5.0e-36:207:89//AF027390

[12737] R-HEMBA1006665//HS_{—}3213_B2_D04_T7 CIT Approved Human Genomic Sperm Library D Homo sapiens genomic clone Plate=3213 Col=8 Row=H, genomic survey sequence.//1.2e-21:235:67//AQ175625

[12738] R-HEMBA1006674//H. sapiens telomeric DNA sequence, clone 9QTEL023, read 9QTEL00023.seq.//2.6e-32:212:831/Z96776

[12739] R-HEMBA1006676//Plasmodium falciparum MAL3P6, complete sequence.//1.9e-10:436:60//Z98551

[12740] R-HEMBA1006682//Plasmodium falciparum (strain Dd2) variant-specific surface protein (var-1) gene, complete cds.//6.1e-06:477:59//L40608

[12741] R-HEMBA1006695//Homo sapiens clone RG339C12, WORKING DRAFT SEQUENCE, 10 unordered pieces.//1.8e-30:266:80//AC005096

[12742] R-HEMBA1006696

[12743] R-HEMBA1006708

[12744] R-HEMBA1006709//Human DNA sequence *** SEQUENCING IN PROGRESS *** from clone 715NI 1, WORKING DRAFT SEQUENCE.//6.8e-14:139:82//AL031674

[12745] R-HEMBA1006717

[12746] R-HEMBA1006737//Homo sapiens chromosome 17, clone hRPK.269_G_{—}24, complete sequence.//9.9e-18:365:66//AC005828

[12747] R-HEMBA1006744//Human Chromosome 16 BAC clone CIT987SK-327024, complete sequence.//1.3e-37:380:75//AC003108

[12748] R-HEMBA1006754//Homo sapiens chromosome 5, PI clone 962c5 (LBNL H87), complete sequence.//2.1e-75:338:85//AC003951

[12749] R-HEMBA1006758//Homo sapiens chromosome 5, BAC clone 182a8 (LBNL H161), complete sequence.//1.2e-112:579:95//AC005752

[12750] R-HEMBA1006767//Plasmodium falciparum MAL3P6, complete sequence.//0.00022:528:58//Z98551

[12751] R-HEMBA1006779//Homo sapiens chromosome 17, clone hRPK.628_E_{—}12, complete sequence.//2.3e-46:305:87//AC005701

[12752] R-HEMBA1006780//Human DNA sequence from clone 243E7 on chromosome 22q12.1. Contains ESTs, STSs and GSSs, complete sequence.//7.2e-39:305:82//AL022323

[12753] R-HEMBA1006789//Streptomyces coelicolor cosmid 6G4.//0.0085:449:61//AL031317

[12754] R-HEMBA1006795//Homo sapiens chromosome 17, clone hRPK.346_K_{—}10, complete sequence.//4.1e-43:355:80//AC006120

[12755] R-HEMBA1006796//HS_{—}3038_B2_H11_MF CIT Approved Human Genomic Sperm Library D Homo sapiens genomic clone Plate=3038 Col=22 Row=P, genomic survey sequence.//0.99:158:63//AQ102483

[12756] R-HEMBA1006807//Homo sapiens clone DJ0673M15, WORKING DRAFT SEQUENCE, 33 unordered pieces.//8.4e-47:481:75//AC004854

[12757] R-HEMBA1006821//Homo sapiens chromosome 17, clone hRPC.62_{—}0_{—}9, complete sequence.//3.0e-08:84:90//AC004797

[12758] R-HEMBA1006824//Homo sapiens DNA sequence from PAC 958B3 on chromosome Xp22.11-Xp22.22. Contains ESTs STS and CpG island.//3.7e-54:496:76//Z93023

[12759] R-HEMBA1006832//Homo sapiens chromosome 17, clone hRPK.243_K 12, complete sequence.//0.70:206:65//AC005668

[12760] R-HEMBA1006849//Homo sapiens 12q24.1 PAC RPCI3-521E19 (Roswell Park Cancer Institute Human PAC library) complete sequence.//1.2e-46:281:91//AC004217

[12761] R-HEMBA1006865//Mus musculus clone 101 BI repeat region sequence.//0.61:115:70//AF056074

[12762] R-nnnnnnnnnn//Mus musculus mRNA for oxysterol-binding protein, complete cds.//3.3e-102:618:87//AB017026

[12763] R-HEMBA1006885 4.2e-14:379:63//AG006839

[12764] R-HEMBA1006900/CIT-HSP-2006M20.TR CIT-HSP Homo sapiens genomic clone 2006M20, genomic survey sequence.//2.6e-07:230:66//B56395

[12765] R-HEMBA1006921//Homo sapiens PAC clone DJ0777023 from 7 p14-p15, complete sequence.//2.1e-68:267:86//AC005154

[12766] R-HEMBA1006926

[12767] R-HEMBA1006929//HS_{—}3244_A2_C0_T7 CIT Approved Human Genomic Sperm Library D Homo sapiens genomic clone Plate=3244 Col=2 Row=E, genomic survey sequence.//6.9e-21:191:83//AQ207500

[12768] R-HEMBA1006936

[12769] R-HEMBA1006938//Colias philodice eriphyle large subunit ribosomal RNA gene, partial sequence; tRNA-Val gene, complete sequence; and small subunit ribosomal RNA gene, partial sequence, mitochondrial genes for mitochondrial RNAs.//0.11:309:59//AF044853

[12770] R-HEMBA1006941//Homo sapiens mRNA for putative thioredoxin-like protein.//2.0e-75:371:98//AJ010841

[12771] R-HEMBA1006949//Homo sapiens PAC clone DJ0777G09 from 7q34-q36, complete sequence.//0.47:240:63//AC005518

[12772] R-HEMBA1006973//HS_{—}2009_A2_A12_MR CIT Approved Human Genomic Sperm Library D Homo sapiens genomic clone Plate=2009 Col=24 Row=A, genomic survey sequence.//9.6e-05:407:60//AQ232302

[12773] R-HEMBA1006976//RPCI11-49L11.TJ RPCI11 Homo sapiens genomic clone R-49L11, genomic survey sequence.//0.0018:184:63//AQ051701

[12774] R-HEMBA1006993//Human thymopoietin (TMPO) gene, partial exon 6, complete exon 7, partial exon 8, and partial cds for thymopoietin beta.//1.9e-47:394:79//U18271

[12775] R-HEMBA1006996//CIT-HSP-2172D17.TF CIT-HSP Homo sapiens genomic clone 2172D17, genomic survey sequence.//1.8e-07:365:62//B93406

[12776] R-HEMBA1007002//Plasmodium falciparum MAL3P2, complete sequence.//0.0012:505:56//AL034558

[12777] R-HEMBA1007017//Homo sapiens chromosome 17, clone hRPK.597_M_{—}12, complete sequence.//5.6e-41:437:71//AC005277

[12778] R-HEMBA1007018//G. gallus mRNA for dynein light chain-A.//8.2e-73:556:80//X79088

[12779] R-HEMBA1007045

[12780] R-HEMBA1007051//Human DNA sequence from cosmid N69F4 on chromosome 22q11.2-qter contains EST.//9.9e-27:342:71//Z72006

[12781] R-HEMBA1007052//Homo sapiens FSHD-associated repeat DNA, proximal region.//5.4e-85:558:87//U85056

[12782] R-HEMBA1007062

[12783] R-HEMBA1007066

[12784] R-HEMBA1007073//Homo sapiens chromosome 17, clone hRPK.421_E_{—}14, complete sequence.//2.0e-66:476:85//AC006141

[12785] R-HEMBA1007078//Homo sapiens chromosome 17, clone hRPK.60_A_{—}24, complete sequence.//1.0e-38:179:82//AC005325

[12786] R-HEMBA1007085//Homo sapiens clone DJO965K10, WORKING DRAFT SEQUENCE, 6 unordered pieces.//3.2e-49:551:73//AC006015

[12787] R-HEMBA1007087//Human Chromosome 11 pac pDJ392a17, complete sequence.//1.0:261:61//AC000385

[12788] R-HEMBA1007112//Homo sapiens chromosome 12 p13.3, WORKING DRAFT SEQUENCE, 37 unordered pieces.//0.043:295:62//AC004803

[12789] R-HEMBA1007113//Homo sapiens (subdlone 6_a8 from P1H16) DNA sequence.//1.4e-52:307:87//L43392

[12790] R-HEMBA1007129//Human DNA sequence from PAC 863KI9 on chromosome X. Contains STS.//1.2e-08:131:7511Z92547

[12791] R-HEMBA1007147//H. sapiens CpG island DNA genomic Mse1 fragment, clone 65fl, reverse read cpg65f1.rt1a.//0.16:187:64//Z62246

[12792] R-HEMBA1007149//Homo sapiens chromosome 19, cosmid F23149, complete sequence.//7.6e-108:543:96//AC005239

[12793] R-HEMBA1007151//Homo sapiens PAC clone DJ0745K06 from 7q31, complete sequence.//0.14:323:58//AC004875

[12794] R-nnnnnnnnnnnn//Homo sapiens epsin 2a mRNA, complete cds.//5.1e-103:529:94//AF062085

[12795] R-HEMBA1007178//Homo sapiens chromosome 12p13.3 clone RPCI11-372B4, WORKING DRAFT SEQUENCE, 129 ordered pieces.//5.4e-106:537:96//AC005911

[12796] R-HEMBA1007194//Homo sapiens Xp22 bins 87-93 PAC RPCII-122K4 (Roswell Park Cancer Institute Human PAC Library) complete sequence.//4.1e-39:262:80//AC003035

[12797] R-HEMBA1007203//Homo sapiens mRNA for KIAA0214 protein, complete cds.//5.3e-61:332:95//D86987

[12798] R-HEMBA1007206//Homo sapiens DNA sequence from PAC 958B3 on chromosome Xp22.11-Xp22.22. Contains ESTs STS and CpG island.//1.9e-50:436:81//Z93023

[12799] R-HEMBA1007224//Homo sapiens mRNA for KIAA0797 protein, partial cds.//2.3e-96:471:97//AB018340

[12800] R-HEMBA1007251//Homo sapiens chromosome 5, PAC clone 247f3 (LBNL H85), complete sequence.//0.011:349:62//AC004777

[12801] R-HEMBA1007256//Homo sapiens PAC clone DJ0676L20 from 7q35-q36, complete 45 sequence.//2.8e-10:224:70//AC004856

[12802] R-HEMBA1007267//Homo sapiens Chr.14 PAC RPCI4-794B2 (Roswell Park Cancer Institute Human PAC Library) complete sequence.//3.4e-53:362:86//AC005924

[12803] R-HEMBA1007273

[12804] R-HEMBA1007279//Rickettsia prowazekii strain Madrid E, complete genome; segment 504/4.//0.042:454:57//AJ235273

[12805] R-HEMBA1007281//Rickettsia prowazekii strain Madrid E, complete genome; segment 3/4.//0.99:288:6011AJ235272

[12806] R-HEMBA1007288//Human DNA sequence from clone 422G23 on chromosome 6q24 Contains EST, STS, GSS, CpG island, complete sequence.//7.4e-107:554:95//AL031003

[12807] R-HEMBA1007300//Caenorhabditis elegans cosmid C48C5.//0.22:474:59//U39994

[12808] R-HEMBA1007301

[12809] R-HEMBA1007319//Campylobacter jejuni repetitive DNA, clone pINT.//4.9e-08:524:58//Y14425

[12810] R-HEMBA1007320//Homo sapiens genomic DNA, chromosome 21q11.1, segment 14/28, WORKING DRAFT SEQUENCE.//3.4e-16:244:71//AP000043

[12811] R-HEMBA1007322//Homo sapiens BAC clone RG324D18 from 7 p15-p21, complete sequence.//3.9e-83:383:85//AC005251

[12812] R-HEMBA1007327//Human DNA sequence *** SEQUENCING IN PROGRESS *** from clone 7706, WORKING DRAFT SEQUENCE.//1.6e-38:533:71//Z96804

[12813] R-HEMBA1007341//Human DNA sequence *** SEQUENCING IN PROGRESS *** from clone 268D13, WORKING DRAFT SEQUENCE.//3.6e-21:394:66//AL023513

[12814] R-HEMBA1007342//Human BAC clone GS368F15 from 7q31, complete sequence.//1.7e-15:190:73//AC003080

[12815] R-HEMBA1007347//Human DNA sequence *** SEQUENCING IN PROGRESS *** from clone N38G6, WORKING DRAFT SEQUENCE.//2.2e-47:455:77//Z96802

[12816] R-HEMBB1000005//Homo sapiens 3p21.1-9 PAC RPCI4-793P23 (Roswell Park Cancer Institute Human PAC Library) complete sequence.//1.1e-62:539:79//AC006208

[12817] R-HEMBB1000008//Homo sapiens chromosome 17, clone hCIT.211_P-7, complete sequence.//1.2e-36:285:83//AC003665

[12818] R-HEMBB1000018//Homo sapiens clone DJ0038110, WORKING DRAFT SEQUENCE, 5 unordered pieces.//1.2e-51:416:79//AC004820

[12819] R-HEMBB1000024//Human DNA sequence from BAC 175E3 on chromosome 22q11.2-qter. Contains ESTs, STSs and polymorphic CA repeat.//3.9e-18:211:79//Z95113

[12820] R-HEMBB1000025//HS_{—}3064_B2_B07_MF CIT Approved Human Genomic Sperm Library D Homo sapiens genomic clone Plate=3064 Col=14 Row=D, genomic survey sequence.//5.9e-40:254:90//AQ132765

[12821] R-HEMBB1000030//Human DNA sequence from clone 108K11 on chromosome 6p21 Contains SRP20 (SR protein family member), Ndr protein kinase gene similar to yeast suppressor protein SRP40, EST and GSS, complete sequence.//1.5e-32:452:70//Z85986

[12822] R-HEMBB1000036//CIT-HSP-2024L15.TF CIT-HSP Homo sapiens genomic clone 2024L15, genomic survey sequence.//9.3e-63:541:77//B66264

[12823] R-HEMBB1000037//Homo sapiens erythroblast macrophage protein EMP mRNA, complete cds.//7.6e-91:467:97//AF084928

[12824] R-HEMBB1000039//Homo sapiens chromosome 17, clone hRPK.401_{—}0_{—}9, complete sequence.//2.4e-44:456:68//AC005291

[12825] R-HEMBB1000044//Human BAC clone RGO16J04 from 7q21, complete sequence.//1.4e-54:307:80//AC002064

[12826] R-HEMBB1000048//Homo sapiens Chromosome 16 BAC clone CIT987SK-A-279B 10, complete sequence.//3.8e-09:330:63//AC002300

[12827] R-HEMBB1000050//Human DNA sequence from PAC 436M11 on chromosome Xp22.11-22.2. Contains the serine threonine protein phosphatase gene PPEF I, and the first coding exon of the RS I gene for retinoschisis (X-linked, juvenile) 1 (XLRS 1). Contains ESTs, an STS and GSSs, complete sequence.//6.7e-12:225:6511Z94056

[12828] R-HEMBB1000054//Human DNA sequence from clone 444C7 on chromosome 6p22.3-23. Contains an EST, an STS and GSSs, complete sequence.//8.9e-76:557:82//AL033521

[12829] R-HEMBB1000055//Human housekeeping (QIZ 7F5) gene, exons 2 through 7, complete cds.//1.6e-88:350:86//M81806

[12830] R-HEMBB1000059//Homo sapiens clone DJ0850101, WORKING DRAFT SEQUENCE, I unordered pieces.//4.9e-12:356:65//AC006009

[12831] R-HEMBB1000083//Homo sapiens clone DJ0607J02, WORKING DRAFT SEQUENCE, 12 unordered pieces.//3.7e-41:311:82//AC004840

[12832] R-HEMBB1000089//Homo sapiens clone DJ1021120, WORKING DRAFT SEQUENCE, 6 unordered pieces.//3.6e-34:314:78//AC005520

[12833] R-HEMBB1000099//Homo sapiens DNA sequence from BAC 1216H 12 on chromosome 22q12. Contains a pseudogene with similarity to part of mouse Ninein and the KIAA0609 gene for a protein similar to C. elegans K09C8.4. Contains ESTs, GSSs and a ggtt repeat polymorphism, complete sequence.//8.8e-32:434:71//AL008715

[12834] R-HEMBB1000103//Human DNA sequence from BAC 445C9 on chromosome 22q12.1. Contains CRYBB 1, beta B1 crystallin, CRYBA4, beta A4 crystallin, high mobility group-1 protein (HMG-1), ESTs.//2.5e-16:207:74//Z95115

[12835] R-HEMBB1000113//HS_{—}3013_A1_B08_T7 CIT Approved Human Genomic Sperm Library D Homo sapiens genomic clone Plate=3013 Col=15 Row=C, genomic survey sequence.//0.94:211:63//AQ118730

[12836] R-HEMBB1000119//Homo sapiens ASMTL gene.//1.9e-106:531:96//Y15521

[12837] R-HEMBB1000136//Human Chromosome X, complete sequence.//0.00073:359:59//AC002407

[12838] R-HEMBB1000141//Homo sapiens chromosome 21q22.3 PAC 39C17, complete sequence.//6.8e-41:280:74//AF043945

[12839] R-HEMBB1000144//Homo sapiens chromosome 17, clone hCIT.507_E_{—}2, complete sequence.//0.00083:206:66//AC004134

[12840] R-HEMBB1000173//Homo sapiens, WORKING DRAFT SEQUENCE, 97 unordered pieces.//2.5e-82:401:90//AC004085

[12841] R-HEMBB1000175

[12842] R-HEMBB1000198//Homo sapiens DNA sequence from BAC 55C20 on chromosome 6. Contains a Spinal Muscular Atrophy (SMA3) LIKE gene overlapping with a beta-glucoronidase LIKE pseudogene. Contains a membrane protein LIKE pseudogene, a Glyceraldehyde 3-phosphate dehydrogenase (GAPDH) LIKE pseudogene, five predicted tRNA genes. Contains ESTs, GSSs (BAC end sequences) and a CA repeat polymorphism, complete sequence.//0.91:428:56//AL021368

[12843] R-HEMBB1000215//Homo sapiens DNA sequence from PAC 69E1 I on chromosome 1q23-24. Contains a NADH-Ubiquinone Oxidoreductase MLRQ subunit (EC 1.6.5.3, EC 1.6.99.3, CI-MLRQ) LIKE pseudogene, a 60S Ribosomal protein L34 LIKE pseudogene, an unknown gene similar to yeast YPRO37W and worm C02C2.6 predicted genes, a predicted CpG island, ESTs and an STS, complete sequence.//4.4e-54:298:91//AL021397

[12844] R-HEMBB1000217

[12845] R-HEMBB1000218//Homo sapiens 12q24 PAC RPCI 1-66E7 (Roswell Park Cancer Institute Human PAC library) complete sequence.//5.8e-32:517:70//AC004216

[12846] R-HEMBB1000226//Human DNA sequence from cosmid COS 12 from a contig from the tip of the short arm of chromosome 16, spanning 2 Mb of 16p13.3. Contains ESTs, Flanking sequences of 3′ alpha globin HVR and CpG island.//2.5e-77:450:92//Z69706

[12847] R-HEMBB1000240//Homo sapiens chromosome 9 duplication of the T cell receptor beta locus and trypsinogen gene families.//4.1e-05:310:62//AF029308

[12848] R-HEMBB1000244//Human DNA sequence *** SEQUENCING IN PROGRESS *** from clone 1112Fl 9, WORKING DRAFT SEQUENCE.//1.3e-43:278:85//AL034420

[12849] R-HEMBB1000250//Human DNA sequence from clone 34B20 on chromosome 6p21.31-22.2. Contains seventeen Histone (pseudo)genes and a 40S Ribosomal protein S10 pseudogene. Contains ESTs, STSs and GSSs, complete sequence.//3.8e-16:484:64//AL031777

[12850] R-HEMBB1000258//Human hereditary haemochromatosis region, histone 2A-like protein gene, hereditary haemochromatosis (HLA-H) gene, RoRet gene, and sodium phosphate transporter (NPT3) gene, complete cds.//4.3e-11:286:67//U91328

[12851] R-HEMBB1000264//Mus musculus enhancer of polycomb (Epc1) mRNA, complete cds.//1.2e-42:406:79//AF079765

[12852] R-HEMBB1000266//RPCII 1-76C20.TV RPCII 1 Homo sapiens genomic clone R-76C20, genomic survey sequence.//1.0:232:59//AQ265533

[12853] R-HEMBB1000272//HS_{—}3032_B1_H06_MF CIT Approved Human Genomic Sperm Library D Homo sapiens genomic clone Plate=3032 Col=1 I Row=P, genomic survey sequence.//0.0082:209:62//AQ096702

[12854] R-HEMBB1000274//Homo sapiens Chromosome 22q1.2 Cosmid Clone 817g In IGLC Region, complete sequence.//1.6e-45:277:72//AC000053

[12855] R-HEMBB1000284//Homo sapiens full-length insert cDNA clone YY88A05.//6.9e-112:572:96//AF088018

[12856] R-HEMBB1000307//Homo sapiens chromosome 17, clone hRPK.471_L_{—}13, complete sequence.//5.7e-96:523:93//AC005244

[12857] R-HEMBB1000312//Human DNA sequence *** SEQUENCING IN PROGRESS *** from clone 32B1, WORKING DRAFT SEQUENCE.//7.5e-21:218:67//AL023693

[12858] R-HEMBB1000317//Toxoplasma gondii chloroplast, complete genome.//0.062:354:58//U87145

[12859] R-HEMBB1000318//Human DNA sequence from PAC 292H 14 on chromosome Xp21. Contains STS and CA repeat polymorphism.//4.5e-52:302:81//AL008710

[12860] R-HEMBB1000335//Homo sapiens chromosome 5, P1 clone 1041F10 (LBNL H88), complete sequence.//1.9e-16:139:84//AC005179

[12861] R-HEMBB1000336//Homo sapiens complete genomic sequence between D16S3070 and D 16S3275, containing Familial Mediterranean Fever gene disease.//0.0062:231:64//AJ003147

[12862] R-HEMBB1000337//CIT-HSP-2329010.TF CIT-HSP Homo sapiens genomic clone 2329010, genomic survey sequence.//1.2e-31:192:92//AQ035976

[12863] R-HEMBB1000338//Homo sapiens Chromosome 16 BAC clone CIT987SK-A-248F7, complete sequence.//1.9e-39:477:71//AC004605

[12864] R-HEMBB1000339//Human DNA sequence *** SEQUENCING IN PROGRESS *** from clone 862K6, WORKING DRAFT SEQUENCE.//4.1e-54:357:76//AL031681

[12865] R-HEMBB1000341//Homo sapiens 12q24 PAC RPCI3-424M6 (Roswell Park Cancer Institute Human PAC library) complete sequence.//1.8e-19:501:63//AC002350

[12866] R-HEMBB1000343//Homo sapiens chromosome 16, cosmid clone 367E12 (LANL), complete sequence.//3.6e-41:457:72//AC004644

[12867] R-HEMBB1000354//Human DNA sequence from PAC 560B9 on chromosome 1q24-1q25. Contains profilin-like pseudogene, 60S ribosomal protein L4 pseudogene RNA binding protein, ESTs, GSS.//7.2e-36:325:74//Z98751

[12868] R-HEMBB1000369//Homo sapiens chromosome 4 clone B366024 map 4q25, complete sequence.//9.0e-25:179:79//AC004067

[12869] R-HEMBB1000374//Human DNA sequence *** SEQUENCING IN PROGRESS *** from clone 75N14, WORKING DRAFT SEQUENCE.//8.4e-58:332:79//Z97199

[12870] R-HEMBB1000376//Homo sapiens DNA for amyloid precursor protein, complete cds.//2.1e-47:309:88//D87675

[12871] R-HEMBB1000391//Homo sapiens clone RG269P13, WORKING DRAFT SEQUENCE, 6 unordered pieces.//5.7e-46:302:85//AC005080

[12872] R-HEMBB1000399//Homo sapiens Rad17-like protein (RAD17) mRNA, complete cds.//1.0e-107:531:97//AF076838

[12873] R-HEMBB1000402//Human DNA sequence from clone 505B13 on chromosome 1p36.2-36.3 Contains CA repeat and GSSs, complete sequence.//1.1e-25:441:67//Z98052

[12874] R-HEMBB1000404//HS_{—}2246_A2_D01_MF CIT Approved Human Genomic Sperm Library D Homo sapiens genomic clone Plate=2246 Col=2 Row=G, genomic survey sequence.//0.0025:196:63//AQ084251

[12875] R-HEMBB1000420//Homo sapiens Chromosome 22q11.2 Cosmid Clone 817g In IGLC Region, complete sequence.//1.2e-29:358:72//AC000053

[12876] R-HEMBB1000434//Homo sapiens chromosome 4 clone B71M12 map 4q25, complete sequence.//2.8e-51:299:89//AC004069

[12877] R-HEMBB1000438//HS_{—}2239_B2_E08_MF CIT Approved Human Genomic Sperm Library D Homo sapiens genomic clone Plate=2239 Col=16 Row=J, genomic survey sequence.//1.3e-10:76:100//AQ067700

[12878] R-HEMBB1000441//Human DNA sequence *** SEQUENCING IN PROGRESS *** from clone 424J12, WORKING DRAFT SEQUENCE.//4.4e-60:281:90//Z82207

[12879] R-HEMBB1000449//Homo sapiens clone DJ0898018, WORKING DRAFT SEQUENCE, 8 unordered pieces.//4.8e-11:228:68//AC004920

[12880] R-HEMBB1000455//Homo sapiens clone GS051M12, complete sequence.//3.1e-14:388:65//AC005007

[12881] R-HEMBB1000472//Homo sapiens chromosome 17, clone HClT48C15, complete sequence.//4.9e-34:320:79//AC003104

[12882] R-HEMBB1000480//Human DNA sequence from Fosmid 65B7 on chromosome 22q11.2-qter. Contains exons 6-12 of the SLC5AI (SGLTI) gene for solute carrier family 5 (sodium/glucose cotransporter) member 1 (High Affinity Sodium-Glucose Cotransporter), complete sequence.//3.4e-36:285:82//Z83849

[12883] R-HEMBB1000487

[12884] R-HEMBB1000490//Human DNA sequence *** SEQUENCING IN PROGRESS *** from clone 1185N5, WORKING DRAFT SEQUENCE.//1.5e-34:281:81//AL034423

[12885] R-HEMBB1000491//Homo sapiens DNA sequence from PAC 958B3 on chromosome Xp22.11-Xp22.22. Contains ESTs STS and CpG island.//8.5e-37:483:72//Z93023

[12886] R-HEMBB1000493//Human DNA sequence from clone 109F14 on chromosome 6p21.2-21.3. Contains the alternatively spliced gene for Transcriptional Enhancer Factor TEF-5, the 60S Ribosomal Protein RPL10A gene, a PUTATIVE ZNF127 LIKE gene, and the PPARD for Peroxisome Proliferator Activated Receptor Delta (PPAR-Delta, PPAR-Beta, Nuclear Hormone Receptor 1, NUCI, NUCI, PPARB). Contains three putative CpG islands, ESTs, STSs, GSSs and a ca repeat polymorphism, complete sequence.//7.6e-14:217:71//AL022721

[12887] R-HEMBB1000510//Human DNA sequence *** SEQUENCING IN PROGRESS *** from clone 27K12, WORKING DRAFT SEQUENCE.//7.1e-44:221:80//AL033397

[12888] R-HEMBB1000518//Human PAC clone DJ327AI9 from Xq25-q26, complete sequence.//3.5e-51:280:90//AC002477

[12889] R-HEMBB1000523//Homo sapiens PAC clone DJ0167F23 from 7p15, complete sequence.//1.7e-53:304:82//AC004079

[12890] R-HEMBB1000530//Homo sapiens chromosome 17, clone hCIT.162_E_{—}12, complete sequence.//4.2e-74:428:92//AC006236

[12891] R-HEMBB1000550//Human Chromosome 16 BAC clone CIT987SK-A-363E6, complete sequence.//5.6e-13:112:80//U91321

[12892] R-HEMBB1000554//Human DNA sequence *** SEQUENCING IN PROGRESS *** from clone 409J21, WORKING DRAFT SEQUENCE.//5.1e-14:239:63//Z83824

[12893] R-HEMBB1000556//Homo sapiens envoplakin (EVPL) mRNA, complete cds.//0.031:275:60//U53786

[12894] R-HEMBB1000564//Homo sapiens chromosome 5, Bac clone 189 (LBNL H135), complete sequence.//3.1e-17:227:76//AC005914

[12895] R-HEMBB1000573//Borrelia afzelii (strain NT28) DNA, internal transcribed spacer.//0.078:161:63//D84405

[12896] R-HEMBB1000575//Homo sapiens chromosome 17, clone hRPC.859_{—}0_{—}20, complete sequence.//7.2e-52:260:80//AC003695

[12897] R-HEMBB1000586//Human DNA sequence from cosmid V210E9, between markers DXS366 and DXS87 on chromosome X.//2.0e-33:305:79//Z70280

[12898] R-HEMBB1000589//Homo sapiens chromosome 17, clone hRPK.1064_E_{—}11, complete sequence.//1.3e-14:409:65//AC005208

[12899] R-HEMBB1000591//Homo sapiens Xp22 bins 45-47 BAC GSHB-665N22 (Genome Systems Human BAC Library) complete sequence.//6.2e-39:493:71//AC005184

[12900] R-HEMBB1000592//Homo sapiens 12 p13.3 PAC RPCI5-1180D12 (Roswell Park Cancer Institute Human PAC Library) complete sequence.//1.6e-08:254:64//AC005831

[12901] R-HEMBB1000598//Homo sapiens chromosome 11 pac pDJ15901, complete sequence.//3.3e-38:407:76//AC000381

[12902] R-HEMBB1000623//CIT-HSP-2374P17.TR CIT-HSP Homo sapiens genomic clone 2374P17, genomic survey sequence.//1.3e-41:212:100//AQ109717

[12903] R-HEMBB1000630//Human DNA sequence from clone 413H6 on chromosome 6p22.3-24.3. Contains a hamster Androgen-dependent Expressed Protein like protein gene, ESTs and GSSs, complete sequence.//5.2e-31:319:78//AL022724

[12904] R-HEMBB1000631//Sequence 28 from patent U.S. Pat. No. 5,708,157.//6.8e-20:208:80//I80058

[12905] R-HEMBB1000632//Homo sapiens Cosmid C4, WORKING DRAFT SEQUENCE, 1 ordered pieces.//7.4e-47:457:75//AC004176

[12906] R-HEMBB1000637//Human BAC clone RG094H21 from 7q21-q22, complete sequence.//2.9e-45:263:87//AC003085

[12907] R-HEMBB1000638//Genomic sequence from Human 6, complete sequence.//9.1e-34:375:73//AC002112

[12908] R-HEMBB1000643//HS_{—}2242_A2_B07_MF CIT Approved Human Genomic Sperm Library D Homo sapiens genomic clone Plate=2242 Col=14 Row=C, genomic survey sequence.//0.010:239:60//AQ065993

[12909] R-HEMBB1000649//Homo sapiens RBP56/hTAFII68 gene, exon 7.1/8.3e-63:306:100//AB010061

[12910] R-HEMBB1000652//Human DNA sequence from PAC 467D16 on chromosome 6p22.3-24.1. Contains the 3′ part of the SCA1 (ataxin-1) gene with a poly-glutamine (CAG repeat) polymorphism, the 3′ part of the GMPR (GMP reductase, Guanosine 5′-monophosphate oxidoreductase) gene, ESTs and an STS with a polymorphic CA repeat.//3.3e-14:450:64//AL009031

[12911] R-HEMBB1000665//Arabidopsis thaliana genomic DNA, chromosome 5, P1 clone: MXA21, complete sequence.//0.98:251:63//AB005247

[12912] R-HEMBB1000671//Human DNA sequence from PAC 106C24, between markers DXS294 and DXS730 on chromosome X.//6.8e-58:296:8511Z83313

[12913] R-HEMBB1000673//CITB1-E1-2506F20.TR CITB1-E1 Homo sapiens genomic clone 2506F20, genomic survey sequence.//0.98:71:7611AQ264731

[12914] R-HEMBB1000684//Human DNA sequence from clone 1158E12 on chromosome Xp 11.23-11.4 Contains EST, STS, GSS, CpG island, complete sequence.//2.6e-11:153:77//AL031584

[12915] R-nnnnnnnnnn//Homo sapiens neuroanl mRNA, complete cds.//2.0e-50:287:93//AF040723

[12916] R-HEMBB1000705//Homo sapiens chromosome 19, cosmid R30538, complete sequence.//3.4e-18:340:65//AC005943

[12917] R-HEMBB1000706//Human DNA sequence *** SEQUENCING IN PROGRESS *** from clone 462C17, WORKING DRAFT SEQUENCE.//4.7e-10:358:64//AL033380

[12918] R-HEMBB1000709//RPCI11-79A8.TV RPCI11 Homo sapiens genomic clone R-79A8, genomic survey sequence.//1.4e-40:262:8911AQ282374

[12919] R-HEMBB1000725//Arabidopsis thaliana genomic DNA, chromosome 5, P1 clone: MGN6, complete sequence.//0.00018:386:60//AB017066

[12920] R-HEMBB1000726//Homo sapiens PAC clone DJI 185107 from 7q11.23-q21, complete sequence.//1.5e-48:316:88//AC004990

[12921] R-HEMBB1000738//Homo sapiens PAC clone DJ0745K06 from 7q31, complete sequence.//7.1e-53:382:85//AC004875

[12922] R-HEMBB1000749//Homo sapiens clone RG140B11, WORKING DRAFT SEQUENCE, 1 unordered pieces.//6.5e-51:438:80//AC005069

[12923] R-HEMBB1000763//Plasmid Col Ib-P9 (from E. coli K12) colicin Pb promoter region and 5′ coding region.//11.0:115:63//K02071

[12924] R-HEMBB1000770//Human Rhesus blood group antigen (RHCE) gene, intron 6, partial sequence.//5.6e-24:183:86//U83205

[12925] R-HEMBB1000781//Homo sapiens Xp22 PACs RPC11-263P4 and RPCI 1-164K3 complete sequence.//0.00054:154:67//AC003046

[12926] R-HEMBB1000789//RPCII 1-2114.TVB RPCI-11 Homo sapiens genomic clone RPCI-11-2114, genomic survey sequence.//3.0e-09:299:64//B63628

[12927] R-HEMBB1000790//Human Chromosome 16 BAC clone CIT987SK-A-362G6, complete sequence.//4.5e-46:185:85//U95740

[12928] R-HEMBB1000794//HS_{—}3253_A1_G06_T7 CIT Approved Human Genomic Sperm Library D Homo sapiens genomic clone Plate=3253 Col=1 I Row=M, genomic survey sequence.//5.7e-13:172:6511AQ216291

[12929] R-HEMBB1000807

[12930] R-HEMBB1000810//Human BAC clone RG114A06 from 7q31, complete sequence.//1.3e-24:385:71//AC002542

[12931] R-HEMBB1000821

[12932] R-HEMBB1000822//CITBI-EI-2517E13.TF CITBI-EI Homo sapiens genomic clone 2517E13, genomic survey sequence.//4.5e-08:278:6411AQ279944

[12933] R-HEMBB1000826//Homo sapiens genomic DNA, chromosome 21 q11.1, segment 14/28, WORKING DRAFT SEQUENCE.//1.2e-44:521:72//AP000043

[12934] R-HEMBB1000827//Homo sapiens clone DJ0981007, complete sequence.//6.8e-43:319:84//AC006017

[12935] R-HEMBB1000831//HS_{—}3247_B2_A09_T7 CIT Approved Human Genomic Sperm Library D Homo sapiens genomic clone Plate=3247 Col=18 Row=B, genomic survey sequence.//5.5e-74:381:96//AQ223850

[12936] R-HEMBB1000835//Homo sapiens DNA sequence from BAC 55C20 on chromosome 6. Contains a Spinal Muscular Atrophy (SMA3) LIKE gene overlapping with a beta-glucoronidase LIKE pseudogene. Contains a membrane protein LIKE pseudogene, a Glyceraldehyde 3-phosphate dehydrogenase (GAPDH) LIKE pseudogene, five predicted tRNA genes. Contains ESTs, GSSs (BAC end sequences) and a CA repeat polymorphism, complete sequence.//4.2e-17:167:80//AL021368

[12937] R-HEMBB1000840//Homo sapiens clone DJ 1039L24, WORKING DRAFT SEQUENCE, 3 unordered pieces.//7.9e-26:220:73//AC005283

[12938] R-HEMBB1000848//Homo sapiens, WORKING DRAFT SEQUENCE, 52 unordered pieces.//7.8e-39:356:79//AC004086

[12939] R-HEMBB1000852//HS_{—}3075_A2_B07_MF CIT Approved Human Genomic Sperm Library D Homo sapiens genomic clone Plate=3075 Col=14 Row=C, genomic survey sequence.//3.4e-11:151:75//AQ138816

[12940] R-HEMBB1000870//Human DNA sequence *** SEQUENCING IN PROGRESS *** from clone 72E17, WORKING DRAFT SEQUENCE.//1.8e-44:454:75//AL033523

[12941] R-HEMBB1000876//Human DNA sequence from clone 91J24 on chromosome 6q24 Contains part of utrophin Gene, part of cytochrome C oxidase gene, EST, CpG island, complete sequence.//0.0016:227:65//AL024474

[12942] R-HEMBB1000883//Homo sapiens chromosome 19, cosmid F19678, complete sequence.//0.62:238:62//AC005621

[12943] R-HEMBB1000887//Synthetic human/adenovirus type 5 recombination junction.//9.9e-24:275:76//M34061

[12944] R-HEMBB1000888//CIT-HSP-2282A13.TR CIT-HSP Homo sapiens genomic clone 2282A13, genomic survey sequence.//2.4e-05:310:60//AQ000826

[12945] R-HEMBB1000890//Homo sapiens clone DJ0042M02, WORKING DRAFT SEQUENCE, 20 unordered pieces.//6.5e-44:305:84//AC005995

[12946] R-HEMBB1000893//Homo sapiens BAC clone RG363EI9 from 7q31.1, complete sequence.//3.7e-30:265:80//AC004492

[12947] R-HEMBB1000908//RPCII 1-13P12.TV RPCI-11 Homo sapiens genomic clone RPCI-11-13P12, genomic survey sequence.//0.98:183:61//B76199

[12948] R-HEMBB1000910//Homo sapiens Chromosome 22q11.2 Cosmid Clone 50d10 In IGLC Region, complete sequence.//1.7e-28:302:76//AC000024

[12949] R-HEMBB1000913//Homo sapiens Xp22 BAC GSHB 526D21 (Genome Systems Human BAC library) complete sequence.//4.1e-34:314:76//AC003037

[12950] R-HEMBB1000915//Human chromosome 16 p11.2-p12 BAC clone CIT987SK-224D6 complete sequence.//6.3e-09:536:59//U95739

[12951] R-HEMBB1000917//Human DNA sequence *** SEQUENCING IN PROGRESS *** from clone 16915, WORKING DRAFT SEQUENCE.//1.6e-47:234:86//Z93015

[12952] R-HEMBB1000927

[12953] R-HEMBB1000947//CIT-HSP-2287M13.TF CIT-HSP Homo sapiens genomic clone 2287M13, genomic survey sequence.//0.090:115:69//B99228

[12954] R-HEMBB1000959//Homo sapiens chromosome 17, clone HRPC905N1, complete sequence.//5.7e-89:544:90//AC003098

[12955] R-HEMBB1000973//Arabidopsis thaliana chromosome II BAC F219 genomic sequence, complete sequence.//0.038:377:58//AC005560

[12956] R-HEMBB1000975//Arabidopsis thaliana chromosome II BAC F5H14 genomic sequence, complete sequence.//1.0e-05:342:62//AC006234

[12957] R-HEMBB1000981//CIT-HSP-2386J13.TF.1 CIT-HSP Homo sapiens genomic clone 2386J13, genomic survey sequence.//1.1e-18:231:7411AQ239443

[12958] R-HEMBB1000985//HS_{—}3184_A1_D12_T7 CIT Approved Human Genomic Sperm Library D Homo sapiens genomic clone Plate=3184 Col=23 Row=G, genomic survey sequence.//6.3e-52:286:95//AQ150008

[12959] R-HEMBB1000991

[12960] R-HEMBB1000996//Homo sapiens Xq28 BAC PAC and cosmid clones containing FMR2 gene exons 1,2, and 3, complete sequence.//1.4e-42:343:81//AC002368

[12961] R-HEMBB1001004

[12962] R-HEMBB1001008//CITBI-EI-2504L23.TF CITBI-El Homo sapiens genomic clone 2504L23, genomic survey sequence.//3.1e-57:317:94//AQ262056

[12963] R-HEMBB1001011//HSS_{—}3017_B1_G03_T7 CIT Approved Human Genomic Sperm Library D Homo sapiens genomic clone Plate=3017-Col=5 Row=N, genomic survey sequence.//7.3e-34:237:86//AQ101944

[12964] R-HEMBB1001014//Human DNA sequence *** SEQUENCING IN PROGRESS *** from clone 460J8, WORKING DRAFT SEQUENCE.//2.4e-49:417:80//AL031662

[12965] R-HEMBB1001020//Homo sapiens Xp22 BAC GS-377014 (Genome Systems Human BAC library) complete sequence.//7.6e-41:303:76//AC002549

[12966] R-HEMBB1001024//Homo sapiens (subdlone 2_g5 from P1H16) DNA sequence.//7.4e-48:341:85//L48475

[12967] R-HEMBB1001037//Homo sapiens 22q11 BAC Clone 489dl In MDR Region, complete sequence.//2.0e-50:416:82//AC005527

[12968] R-HEMBB1001047//Homo sapiens chromosome 19, cosmid R31973, complete sequence.//8.4e-22:288:71//AC004699

[12969] R-HEMBB1001051//H. sapiens mRNA for FAN protein.//7.1e-18:114:98//X96586

[12970] R-HEMBB1001056//Homo sapiens clone DJ0953A04, WORKING DRAFT SEQUENCE, 5 unordered pieces.//6.1e-94:520:93//AC006014

[12971] R-HEMBB1001058//Homo sapiens clone UWGC:yl7cl31 from 6p21, complete sequence.//1.1e-56:242:82//AC004187

[12972] R-HEMBB1001060//Human Tigger1 transposable element, complete consensus sequence.//4.2e-66:323:81//U49973

[12973] R-HEMBB1001063//Human DNA sequence *** SEQUENCING IN PROGRESS *** from clone 523GI, WORKING DRAFT SEQUENCE.//4.0e-114:556:98//AL034375

[12974] R-HEMBB1001068//Homo sapiens liprin-beta2 mRNA, partial cds.//2.8e-105:512:97//AF034803

[12975] R-HEMBB1001096//Human DNA sequence from PAC 24608, between markers DXS6791 and DXS8038 on chromosome X contains ESTs.//2.4e-13:225:69//Z76735

[12976] R-HEMBB1001102//Human DNA sequence from clone 353H6 on chromosome Xq25-26.2. Contains the alternatively spliced SMARCAI gene for SWI/SNF related, matrix associated, actin dependent regulator of chromatin, subfamily a, member I (SNF2LI) and a 40S Ribosomal Protein S26 pseudogene. Contains ESTs, STSs and GSSs, complete sequence.//2.4e-35:295:80//AL022577

[12977] R-HEMBB1001105//Human DNA sequence *** SEQUENCING IN PROGRESS * from clone 462023, WORKING DRAFT SEQUENCE.//7.9e-46:380:80//AL031431

[12978] R-HEMBB1001114//Homo sapiens DNA sequence from PAC 119E23 on chromosome Xq25-q27.1. Contains glypican-3 precursor (intestinal protein OCI-5) (GTR2-2),5′UTR. ESTs, STS.//1.1e-38:306:84//Z99570

[12979] R-HEMBB1001117//RPCI11-3518.TK RPCI-11 Homo sapiens genomic clone RPCI-11-3518, genomic survey sequence.//1.5e-08:67:100//AQ047113

[12980] R-HEMBB1001119//Homo sapiens BAC clone BKO85EO5 from 22q12.1-qter, complete sequence.//9.0e-26:481:67//AC003071

[12981] R-HEMBB1001126//Human DNA sequence from clone 441J1 on chromosome 6p24 Contains STS, GSS, complete sequence.//0.045:127:69//Z99495

[12982] R-HEMBB1001133//Human SS-A/Ro ribonucleoprotein autoantigen 60 kd subunit mRNA, complete cds.//5.0e-23:285:73//M25077

[12983] R-HEMBB1001137//Plasmodium falciparum DNA *** SEQUENCING IN PROGRESS * from contig 4-09, complete sequence.//2.5e-07:334:62//AL010222

[12984] R-HEMBB1001142//Human BAC clone RG164L14 from 7q21-q22, complete sequence.//2.5e-46:412:79//AC002564

[12985] R-HEMBB1001151//Mus musculus IFN alpha-treated embryonic fibroblast mRNA.//1.8e-11:148:77//U51904

[12986] R-HEMBB1001153//RPCII 1-10L7.TP RPCI-11 Homo sapiens genomic clone RPCI-11-10L7, genomic survey sequence.//2.3e-34:213:82//B71766

[12987] R-HEMBB1001169//Homo sapiens chromosome 17, clone HClT39G8, complete sequence.//0.040:465:56//AC003070

[12988] R-nnnnnnnnnnnn//Sequence 1 from patent U.S. Pat. No. 5,618,695.//2.8e-15:176:80//I40055

[12989] R-HEMBB1001177

[12990] R-HEMBB1001182//Plasmodium falciparum DNA * SEQUENCING IN PROGRESS ** from contig 4-52, complete sequence.//1.9e-05:174:70//AL010226

[12991] R-HEMBB1001199

[12992] R-HEMBB1001208

[12993] R-HEMBB1001209//RPCI11-41E13.TP RPCI-11 Homo sapiens genomic clone RPCI-11-41E13, genomic survey sequence.//1.1e-95:473:97//AQ029098

[12994] R-HEMBB1001210//Homo sapiens chromosome 16, cosmid clone 330D11 (LANL), complete sequence.//6.2e-08:412:61//AC005199

[12995] R-HEMBB1001218//RPCI11-13L8.TV RPCI-11 Homo sapiens genomic clone RPCI-11-13L8, genomic survey sequence.//1.0e-46:498:74//B75158

[12996] R-HEMBB1001221//RPCI11-62024.TJ RPCII 1 Homo sapiens genomic clone R-62024, genomic survey sequence.//3.2e-09:215:68//AQ200950

[12997] R-HEMBB1001234

[12998] R-HEMBB1001242

[12999] R-HEMBB1001249//Homo sapiens clone DJ1136G02, WORKING DRAFT SEQUENCE, 4 unordered pieces.//1.4e-33:361:72//AC005377

[13000] R-HEMBB1001253//Homo sapiens chromosome 3, olfactory receptor pseudogene cluster 1, complete sequence, and myosin light chain kinase (MLCK) pseudogene, partial sequence.//3.8e-105:517:98//AF042089

[13001] R-HEMBB1001254//Methanococcus jannaschii section 3 of 150 of the complete genome.//0.96:203:61//U67461

[13002] R-HEMBB1100267//Human DNA sequence from clone 1409 on chromosome Xp 11.1-11.4. Contains a Inter-Alpha-Trypsin Inhibitor Heavy Chain LIKE gene, a alternatively spliced Melanoma-Associated Antigen MAGE LIKE gene and a 6-Phosphofructo-2-kinase (Fructose-2,6-bisphosphatase) LIKE pseudogene. Contains ESTs, STSs and genomic marker DXS8032, complete sequence.//2.8e-39:320:80//Z98046

[13003] R-HEMBB1001271//Homo sapiens chromosome 17, clone hRPK.349_A_{—}8, complete sequence.//3.9e-47:494:75//AC005544

[13004] R-HEMBB1001282//Human DNA sequence *** SEQUENCING IN PROGRESS *** from clone 184J9, WORKING DRAFT SEQUENCE.//0.0011:97:79//AL031428

[13005] R-HEMBB1001288

[13006] R-HEMBB1001289//Homo sapiens chromosome 5, BAC clone 343g16 (LBNL H180), complete sequence.//2.0e-31:301:78//AC005601

[13007] R-HEMBB1001294//Homo sapiens BAC clone RG060N22 from 7q21, complete sequence.//0.053:283:60//AC003083

[13008] R-HEMBB1001302

[13009] R-HEMBB1001304//Human DNA sequence *** SEQUENCING IN PROGRESS *** from clone 27K12, WORKING DRAFT SEQUENCE.//6.3e-15:396:64//AL033397

[13010] R-HEMBB1001314//Homo sapiens genomic DNA, 21q region, clone: f30F8SpN6, genomic survey sequence.//3.4e-42:293:8611AGO 13777

[13011] R-HEMBB1001315//Human NFE genomic fragment.//7.5e-30:243:78//M98511

[13012] R-HEMBB1100317//Homo sapiens chromosome 17, clone hRPC.1028_K_{—}7, complete sequence.//2.3e-39:301:82//AC004585

[13013] R-HEMBB1001326//HS_{—}3054_A1_F12_MR CIT Approved Human Genomic Sperm Library D Homo sapiens genomic clone Plate=3054 Col=23 Row=K, genomic survey sequence.//0.90:117:63//AQ106096

[13014] R-HEMBB1001331//Mus musculus mRNA for hepatoma-derived growth factor, complete cds, strain:BALB/c.//0.037:103:77//D63850

[13015] R-HEMBB1001335//Homo sapiens Xp22 BAC GSHB 526D21 (Genome Systems Human BAC library) complete sequence.//9.1e-19:229:77//AC003037

[13016] R-HEMBB1001337

[13017] R-HEMBB1001339//Homo sapiens FSHD-associated repeat DNA, proximal region.//2.9e-45:551:72//U85056

[13018] R-HEMBB1001346//Homo sapiens phenylalanine-tRNA synthetase (FARSI) mRNA, nuclear gene encoding mitochondrial protein, complete cds.//2.7e-59:292:99//AF097441

[13019] R-HEMBB1001348//Homo sapiens clone DJO691FI 1, WORKING DRAFT SEQUENCE, 11 unordered pieces.//9.1e-41:326:82//AC004859

[13020] R-HEMBB1001356//Human DNA sequence *** SEQUENCING IN PROGRESS *** from clone 424J12, WORKING DRAFT SEQUENCE.//1.8e-11:213:67//Z82207

[13021] R-HEMBB1001364//HS_{—}3050_A2_F05_MR CIT Approved Human Genomic Sperm Library D Homo sapiens genomic clone Plate=3050 Col=10 Row=K, genomic survey sequence.//1.8e-21:158:91//AQ133940

[13022] R-HEMBB1001366//Homo sapiens chromosome 10 clone CIT987SK-118815 map 10p11.2-10p 12.1, complete sequence.//4.1e-37:419:73//AC005876

[13023] R-HEMBB1001367//Human Chromosome 16 BAC clone CIT987SK-A-234F9, complete sequence.//9.5e-15:201:75//U91326

[13024] R-HEMBB1001369//Human DNA sequence *** SEQUENCING IN PROGRESS *** from clone 477J 10, WORKING DRAFT SEQUENCE.//1.8e-28:224:83//AL021686

[13025] R-HEMBB1001380//IS_{—}2267_B1_Fl I_MR CIT Approved Human Genomic Sperm Library D Homo sapiens genomic clone Plate=2267 Col=21 Row=L, genomic survey sequence.//4.0e-14:100:95//AQ084896

[13026] R-HEMBB1001384//Mus musculus COP9 complex subunit 4 (COPS4) mRNA, complete cds.//9.6e-55:312:81//AF071314

[13027] R-HEMBB1001387//Homo sapiens chromosome 9, PI clone 8660 (LBNL H105), complete sequence.//1.0:166:63//AC003953

[13028] R-HEMBB1001394//Homo sapiens chromosome 17, clone hRPK.215_E_{—}13, complete sequence.//1.4e-55:494:76//AC005549

[13029] R-HEMBB1001410//Homo sapiens PAC clone DJI 102B04 from 7q11.23-7q21, complete sequence.//0.011:208:63//AC006204

[13030] R-HEMBB1001424//Homo sapiens, WORKING DRAFT SEQUENCE, 76 unordered pieces.//1.5e-22:325:69//AC002370

[13031] R-HEMBB1001426//Homo sapiens 12q24 PAC RPCI3-424M6 (Roswell Park Cancer Institute Human PAC library) complete sequence.//1.3e-46:328:84//AC002350

[13032] R-HEMBB1100429//*** SEQUENCING IN PROGRESS *** Homo sapiens chromosome 4, BAC clone C0481P14; HTGS phase 1, WORKING DRAFT SEQUENCE, 7 unordered pieces.//6.6e-105:550:95//AC006160

[13033] R-HEMBB1001436

[13034] R-HEMBB1001443//HS_{—}2228_A1_B05_MF CIT Approved Human Genomic Sperm Library D Homo sapiens genomic clone Plate=2228 Col=9 Row=C, genomic survey sequence.//0.37:173:62//AQ066934

[13035] R-HEMBB1001449//Homo sapiens clone DJ1129E22, WORKING DRAFT SEQUENCE, 7 unordered pieces.//2.7e-23:339:69//AC005522

[13036] R-HEMBB1001454//Homo sapiens chromosome 5, PI clone 1307e8 (LBNL H60), complete sequence.//1.1e-39:299:84//AC005355

[13037] R-HEMBB1001458//Plasmodium falciparum chromosome 2, section 67 of 73 of the complete sequence.//6.0e-05:486:59//AE001430

[13038] R-HEMBB1001463//Homo sapiens PAC clone DJ0777023 from 7 p14-p15, complete sequence.//1.2e-50:317:89//AC005154

[13039] R-HEMBB1001464//CIT-HSP-2370C10.TF CIT-HSP Homo sapiens genomic clone 2370C10, genomic survey sequence.//0.20:95:71//AQ107941

[13040] R-HEMBB1001482//Mus musculus clone OST20235, genomic survey sequence.//4.3e-09:192:70//AF046762

[13041] R-HEMBB1001500//Human DNA sequence from PAC 465G10 on chromosome X contains Menkes Disease (ATP7A) putative Cu++-transporting P-type ATPase exons 2 to 21, PGAM-B, ESTs.//1.9e-21:253:70//Z94801

[13042] R-HEMBB1001521//Mus musculus clone OST 1209, genomic survey sequence.//7.5e-30:332:75//AF046642

[13043] R-HEMBB1001527//Homo sapiens clone DJ241P17, WORKING DRAFT SEQUENCE, 7 unordered pieces.//9.5e-55:483:76//AC005000

[13044] R-HEMBB1001531//Human BAC clone 7E17 from 12q, complete sequence.//1.3e-08:159:71//AC002070

[13045] R-HEMBB1001535//Human DNA sequence from cosmid E127C11 on chromosome 22q11.2-qter contains STS.//4.0e-30:286:79//Z74581

[13046] R-HEMBB1001536//Homo sapiens cosmid clone LUCA16 from 3p21.3, complete sequence.//1.6e-39:342:80//U73169

[13047] R-HEMBB1001537//Genomic sequence from Human 9q34, complete sequence.//3.7e-41:361:77//AC000394

[13048] R-HEMBB1001555//Homo sapiens Chromosome 16 BAC clone CIT987SK-A-485G10, complete sequence.//0.34:212:61//AC003049

[13049] R-HEMBBB1001562//Homo sapiens Chromosome 16 BAC clone CIT987SK-A-328A3, complete sequence.//8.0e-40:267:88//AC002301

[13050] R-HEMBB1001564//Homo sapiens clone DJ0414A15, WORKING DRAFT SEQUENCE, 9 unordered pieces.//5.1e-30:286:76//AC005225

[13051] R-HEMBB1001565//Homo sapiens clone DJ0607J02, WORKING DRAFT SEQUENCE, 12 unordered pieces.//2.5e-15:194:75//AC004840

[13052] R-HEMBB1001585//Human DNA sequence from clone 790B6 on chromosome 20 p11.22-12.2. Contains STSs and GSSs, complete sequence.//2.6e-33:234:79//AL031677

[13053] R-HEMBB1001586//Homo sapiens clone NH0479C13, WORKING DRAFT SEQUENCE, 12 unordered pieces.//2.7e-30:371:74//AC005236

[13054] R-HEMBB1001588//Homo sapiens Xp22 GS-52411 (Genome Systems Human BAC library), complete sequence.//8.0e-32:323:73//AC003106

[13055] R-HEMBB1001603//Plasmodium falciparum DNA *** SEQUENCING IN PROGRESS *** from contig 4-59, complete sequence.//0.034:302:59//AL010235

[13056] R-HEMBB1001618//Homo sapiens DNA sequence from PAC 958B3 on chromosome Xp22.11-Xp22.22. Contains ESTs STS and CpG island.//7.1e-31:503:68//Z93023

[13057] R-HEMBB1001619//Homo sapiens Xq28 BAC PAC and cosmid clones containing FMR2 gene exons 1,2, and 3, complete sequence.//3.7e-50:539:72//AC002368

[13058] R-HEMBB1001630//Human DNA sequence from PAC 121G13 on chromosome 6 contains flow sorted chromosome 6 HindIII fragment ESTs. polymorphic CA repeat, CpG island, CpG island genomic fragments.//1.3e-27:228:82//Z86062

[13059] R-HEMBB1001635//Homo Sapiens Chromosome X clone bWXD90, complete sequence.//1.5e-23:407:69//AC004075

[13060] R-HEMBB1001637//Homo sapiens Xq28 BAC PAC and cosmid clones containing FMR2 gene exons 1,2, and 3, complete sequence.//3.9e-54:519:74//AC002368

[13061] R-HEMBB1001641//Human DNA sequence from clone 133H11 on chromosome 6p24. Contains STSs, GSSs and genomic marker D6S410, complete sequence.//1.9e-08:464:60//AL024506

[13062] R-HEMBB1001653//Homo sapiens chromosome 17, clone HClT3LI6, WORKING DRAFT SEQUENCE, 7 unordered pieces.//2.8e-39:318:82//AC002344

[13063] R-HEMBB1001665//* * *ALU WARNING: Human Alu-Sp subfamily consensus sequence.//3.8e-47:283:90//U 14572

[13064] R-HEMBB1001668

[13065] R-HEMBB1001673//Homo sapiens mRNA for KIAA0646 protein, complete cds.//1.8e-115:573:97//AB014546

[13066] R-HEMBB1001684//Sequence 1 from patent U.S. Pat. No. 5,700,927.//1.9e-40:343:77//I86429

[13067] R-HEMBB1001685//Homo sapiens chromosome 17, clone hRPK.721_K_{—}1, complete sequence.//2.6e-43:311:83//AC00541 I

[13068] R-HEMBB1001695

[13069] R-HEMBB1001704//CIT-HSP-2324CI5.TR CIT-HSP Homo sapiens genomic clone 2324C15, genomic survey sequence.//0.0074:259:58//AQ028704

[13070] R-HEMBB1001706//Homo sapiens clone DJO665PO5, WORKING DRAFT SEQUENCE, 5 unordered pieces.//9.1e-34:296:80//AC004851

[13071] R-HEMBB1001707//Homo sapiens Chromosome 16 BAC clone CIT987SK-A-319E8, complete sequence.//7.7e-32:241:76//AC004020

[13072] R-HEMBB1001717//CIT-HSP-2378Cl9.TF CIT-HSP Homo sapiens genomic clone 2378C19, genomic survey sequence.//4.8e-35:228:89//AQ108992

[13073] R-HEMBB1001735//Homo sapiens chromosome 5, BAC clone 114k9 (LBNL H94), complete sequence.//1.8e-10:80:90//AC005613

[13074] R-HEMBB1001736//CIT-HSP-2369K6.TF CIT-HSP Homo sapiens genomic clone 2369K6, genomic survey sequence.//9.9e-38:242:90//AQ075221

[13075] R-HEMBB1001747//Homo sapiens cosmids Qc14E2, Qc12H12, Qc11F9, Qc10G9, LA1733 and Qc17B8 from Xq28, complete sequence.//3.3e-60:366:80//U82671

[13076] R-HEMBB1100749//Homo sapiens chromosome 17, clone hRPK.259_G_{—}18, complete sequence.//1.4e-60:242:92//AC005829

[13077] R-HEMBB1100753//RPCI11-59J22.TK RPCII 1 Homo sapiens genomic clone R-59J22, genomic survey sequence.//6.2e-08:281:64//AQ200046

[13078] R-HEMBB1001756//Homo sapiens BAC clone RG293F17 from 7 p15-p21, complete sequence.//3.1e-18:395:67//AC004130

[13079] R-HEMBB1001760//Homo sapiens genomic DNA, chromosome 21q11.1, segment 21/28, WORKING DRAFT SEQUENCE.//9.9e-18:416:64//AP000050

[13080] R-HEMBB1001762//Mus musculus major histocompatibility locus class II region: major histocompatibility protein class II alpha chain (IAalpha) and major histocompatibility protein class II beta chain (IEbeta) genes, complete cds; butyrophilin-like (NG9), butyrophilin-like (NG 10), hypothetical protein (NG8), and butyrophilin-like (NG 11) genes, partial cds; NG 12 pseudogene, partial sequence; and hypothetical butyrophilin-like protein (NG13) gene, partial cds.//0.21:521:57//AF050157

[13081] R-HEMBB1001785//Torulopsis glabrata mitochondrial intergenic region ATPase 6-ATPase 9 genes.//0.00073:189:65//X02170

[13082] R-HEMBB1001797//Plasmodium falciparum 3D7 chromosome 12 PFYACB8-420 genomic sequence, WORKING DRAFT SEQUENCE, 14 unordered pieces.//0.0049:322:62//AC005140

[13083] R-HEMBB1001802//Human desmin gene, complete cds.//8.1e-95:510:93//M63391

[13084] R-HEMBB1001812//Human DNA sequence *** SEQUENCING IN PROGRESS *** from clone 356B8, WORKING DRAFT SEQUENCE.//1.3e-71:368:9611Z98882

[13085] R-HEMBB1001816//Homo sapiens chromosome 21 PAC LLNLP704G 1150Q13.//8.4e-21:164:76//AJ006996

[13086] R-HEMBB1001831//Homo sapiens PAM COOH-terminal interactor protein 1 (PCIP 1) mRNA, complete cds.//1.7e-104:498:98//AF056209

[13087] R-HEMBB1001836//Homo sapiens chromosome 19, cosmid R26660, complete sequence.//9.2e-44:388:71//AC005328

[13088] R-HEMBB1001839

[13089] R-HEMBB1001850//Arabidopsis thaliana genomic DNA, chromosome 5, P1 clone: MOP10, complete sequence.//0.00093:488:60//AB005241

[13090] R-HEMBB1001863//Human poly(ADP-ribose) polymerase gene, 5′ end.//1.2e-16:458:65//M60436

[13091] R-HEMBB1001867//Human DNA sequence from cosmid U25D11, between markers DXS366 and DXS87 on chromosome X.//5.0e-31:399:74//Z68327

[13092] R-HEMBB1001868//Arabidopsis thaliana genomic DNA, chromosome 5, P1 clone: MYN8, complete sequence.//0.26:303:59//AB020754

[13093] R-HEMBB1001869//Homo sapiens chromosome 17, clone hCIT529110, complete sequence.//7.0e-37:285:85//AC002553

[13094] R-HEMBB1001872//Caenorhabditis elegans DNA *** SEQUENCING IN PROGRESS * from clone Y44F5, WORKING DRAFT SEQUENCE.//0.093:367:58//AL009027

[13095] R-HEMBB1001874

[13096] R-HEMBB1001875//Lactococcus lactis DPC3147 plasmid pMRCO1, complete plasmid sequence.//0.037:406:60/HAE001272

[13097] R-HEMBB1001880//Homo sapiens chromosome 17, clone hRPK.235_{—}1110, complete sequence.//1.3e-49:461:77//AC005922

[13098] R-HEMBB1001899//Caenorhabditis elegans DNA *** SEQUENCING IN PROGRESS * from clone Y116A8, WORKING DRAFT SEQUENCE.//0.56:295:60//Z98858

[13099] R-HEMBB1001905//Human DNA sequence *** SEQUENCING IN PROGRESS *** from clone Y738F9, WORKING DRAFT SEQUENCE.//1.9e-28:181:75//AL022345

[13100] R-HEMBB1001906

[13101] R-HEMBB1001908//Genomic sequence from Human 17, complete sequence.//2.9e-36:274:76//AC001231

[13102] R-HEMBB1001910//Homo sapiens chromosome 17, clone HClT39G8, complete sequence.//3.5e-41:408:76//AC003070

[13103] R-HEMBB1001911//Homo sapiens *** SEQUENCING IN PROGRESS ***, WORKING DRAFT SEQUENCE.//6.1e-64:310:89//AJ011929

[13104] R-HEMBB1100915//Mouse mRNA for arylhydrocarbon receptor, complete cds.//2.0e-20:220:78//D38417

[13105] R-HEMBB1001921//Human DNA sequence *** SEQUENCING IN PROGRESS *** from clone 1141El5, WORKING DRAFT SEQUENCE.//1.9e-47:410:80//AL034422

[13106] R-HEMBB1001922//Homo sapiens chromosome 17, clone HClT42 I K24, complete sequence.//6.2e-32:378:74//AC004099

[13107] R-HEMBB1001925//Human Chromosome 11 overlapping pacs pDJ235klO and pDJ239b22, WORKING DRAFT SEQUENCE, 17 unordered pieces.//8.2e-41:304:84//AC000406

[13108] R-HEMBB1001930//Homo sapiens genomic DNA of 8p21.3-p22 anti-oncogene of hepatocellular colorectal and non-small cell lung cancer, segment 10/11 ./8.3e-12:202:69H1AB020867

[13109] R-HEMBB1001944//P. falciparum gene for beta subunit RNA polymerase.//0.00090:264:62//X75544

[13110] R-HEMBB1001945//Swietenia humilis DNA for simple tandem repeat (242 bp).//0.056:224:62//AJ000408

[13111] R-HEMBB1001947//RPCI11-60L13.TJ RPCI11 Homo sapiens genomic clone R-60L13, genomic survey sequence.//7.4e-23:146:94//AQ202335

[13112] R-HEMBB1001950//Human DNA sequence from clone 415G2 on chromosome 22 Contains synapsin 111a exon 1, EST and GSS, complete sequence.//0.57:115:68//Z83846

[13113] R-HEMBB1001952//Homo Sapiens Chromosome X clone bWXD171, WORKING DRAFT SEQUENCE, I ordered pieces.//5.6e-36:283:84//AC004676

[13114] R-HEMBB1001953//Homo sapiens clone NH0469M07, WORKING DRAFT SEQUENCE, 7 unordered pieces.//8.9e-60:334:82//AC005037

[13115] R-HEMBB1001957//Homo sapiens clone RG228D17, WORKING DRAFT SEQUENCE, 2 unordered pieces.//1.9e-56:518:77//AC005077

[13116] R-HEMBB1001962//Homo sapiens chromosome 16, BAC clone 462G18 (LANL), complete sequence.//3.2e-19:157:86//AC005736

[13117] R-HEMBB1100967//Homo sapiens DNA for amyloid precursor protein, complete cds.//5.7e-68:314:89//D87675

[13118] R-HEMBB1001973//Homo sapiens *** SEQUENCING IN PROGRESS *** from PAC E7.1/cosmid 40M1, WORKING DRAFT SEQUENCE.//1.4e-37:484:70//AJ009617

[13119] R-HEMBB1001983//Human DNA sequence *** SEQUENCING IN PROGRESS *** from clone 215D111, WORKING DRAFT SEQUENCE.//2.1e-28:286:75//AL034417

[13120] R-HEMBB1001988//Human DNA sequence *** SEQUENCING IN PROGRESS * from clone 1112F19, WORKING DRAFT SEQUENCE.//6.9e-29:203:88//AL034420

[13121] R-HEMBB1100990//Homo sapiens full-length insert cDNA clone ZC33G03.//7.8e-95:456:99//AF086192

[13122] R-HEMBB1001996

[13123] R-HEMBB1100997//Homo sapiens clone RG050N15, WORKING DRAFT SEQUENCE, 26 unordered pieces.//6.4e-26:162:83//AC005055

[13124] R-HEMBB1002002//Human DNA sequence from PAC 2A2 on chromosome X contains ESTs.//8.2e-83:362:93//Z84816

[13125] R-HEMBB1002005//Homo sapiens chromosome 3p clone RPCI5-1034C 16, WORKING DRAFT SEQUENCE, 45 unordered pieces.//8.5e-36:291:83//AC005903

[13126] R-HEMBB1002009//Homo sapiens clone DJ0828F 13, complete sequence.//5.6e-08:307:65//AC004904

[13127] R-HEMBB1002015//HS-1039-A1-C10-MF.abi CIT Human Genomic Sperm Library C Homo sapiens genomic clone Plate=CT 821 Col=19 Row=E, genomic survey sequence.//1.9e-05:375:62//B36336

[13128] R-HEMBB1002042//CIT-HSP-2313E13.TF CIT-HSP Homo sapiens genomic clone 2313E13, genomic survey sequence.//0.34:241:62//AQ028389

[13129] R-HEMBB1002043//Homo sapiens chromosome 21, P1 clone LBL#8 (LBNL H8), complete sequence.//7.4e-35:297:82//AC005612

[13130] R-HEMBB1002044//Homo sapiens chromosome 5p, BAC clone 50g21 (LBNL H 154), complete sequence.//5.8e-96:582:90//AC005740

[13131] R-HEMBB1002045//Homo sapiens chromosome 19, cosmid F22676, complete sequence.//4.7e-63:575:77//AC005778

[13132] R-HEMBB1002049//Human Chromosome X clone bWXD187, complete sequence.//1.9e-21:384:64//AC004383

[13133] R-HEMBB1002050//Homo sapiens chromosome 17, clone hRPK.112_J_{—}9, complete sequence.//2.5e-37:368:76//AC005553

[13134] R-HEMBB1002068//Homo sapiens chromosome 5, BAC clone 205e20 (LBNL H170), complete sequence.//0.30:167:65//AC004782

[13135] R-HEMBB1002069//Homo sapiens chromosome 19, cosmid R33516, complete sequence.//2.3e-73:449:84//AC004799

[13136] R-HEMBB1002092//Homo sapiens chromosome 17, clone hRPK.269_G_{—}24, complete sequence.//3.8e-45:307:87//AC005828

[13137] R-HEMBB1002094//Homo sapiens chromosome 19, cosmid R30538, complete sequence.//3.1e-47:457:76//AC005943

[13138] R-HEMBB1002115//HS_{—}2223_B1_G10_MF CIT Approved Human Genomic Sperm Library D Homo sapiens genomic clone Plate=2223 Col=19 Row=N, genomic survey sequence.//3.0e-58:295:98//AQ152279

[13139] R-HEMBB1002139//* * *ALU WARNING: Human Alu-Sq subfamily consensus sequence.//6.6e-49:283:93//U 14573

[13140] R-HEMBB1002142//Homo sapiens clone DJO813FI 1, WORKING DRAFT SEQUENCE, 5 unordered pieces.//1.1e-45:451:76//AC006006

[13141] R-HEMBB1002152//Homo sapiens chromosome 10 clone CIT987SK-1079E16 map 10q25, complete sequence.//1.3e-57:359:81//AC005881

[13142] R-HEMBB1002189//Human Chromosome 11 pac pDJ392a17, complete sequence.//4.5e-43:420:77//AC000385

[13143] R-HEMBB1002190//Homo sapiens clone DJ0876A24, WORKING DRAFT SEQUENCE, 6 unordered pieces.//8.2e-33:340:64//AC004913

[13144] R-HEMBB1002193//Sequence 5 from patent U.S. Pat. No. 5,709,858.//3.2e-23:154:92//I80846

[13145] R-HEMBB1002217//Homo sapiens clone HS 19.2 Alu-Ya5 sequence.//2.6e-52:415:81//AF015148

[13146] R-HEMBB1002218//, complete sequence.//3.4e-17:178:82//AC005300

[13147] R-HEMBB1002232//*** SEQUENCING IN PROGRESS *** Homo sapiens chromosome 4, BAC clone C0052122; HTGS phase 1, WORKING DRAFT SEQUENCE, 4 unordered pieces.//1.6e-55:292:88//AC004599

[13148] R-HEMBB1002247//Homo sapiens chromosome 17, clone hRPK.259_G_{—}18, complete sequence.//2.9e-13:227:70//AC005829

[13149] R-HEMBB1002249//Human DNA sequence *** SEQUENCING IN PROGRESS * from clone 455J7, WORKING DRAFT SEQUENCE.//1.1e-06:284:64//AL031733

[13150] R-HEMBB1002254//Human Chromosome X, WORKING DRAFT SEQUENCE, 6 unordered pieces.//6.3e-104:593:91//AC002415

[13151] R-HEMBB1002255//Human DNA sequence *** SEQUENCING IN PROGRESS *** from clone 292E10, WORKING DRAFT SEQUENCE.//2.1e-40:284:85//Z93930

[13152] R-HEMBB1002266//Plasmodium falciparum DNA *** SEQUENCING IN PROGRESS *** from contig 4-10, complete sequence.//1.3e-09:371:63//AL0010216

[13153] R-HEMBB1002280//Homo sapiens PAC clone DJ0545C24 from 7q21-q22, complete sequence.//1.3e-39:247:86//AC004534

[13154] R-HEMBB1002300//Human Chromosome 11 Cosmid cSRL30hl 1, complete sequence.//4.1e-84:549:86//U73642

[13155] R-HEMBB1002306//Homo sapiens BAC clone RG136N17 from 7 p15-p21, complete sequence.//2.5e-10:164:71//AC004129

[13156] R-HEMBB1002327//Homo sapiens BAC clone GS539F22 from 7 p12-p14, complete sequence.//0.39:365:59//AC005028

[13157] R-HEMBB1002329//HS-1049-B1-DO5-MR.abi CIT Human Genomic Sperm Library C Homo sapiens genomic clone Plate=CT 771 Col=9 Row=H, genomic survey sequence.//0.96:180:58//B39313

[13158] R-HEMBB1002340//Homo sapiens PAC clone DJ0659J06 from 7q33-q35, complete sequence.//7.9e-17:258:73//AC004849

[13159] R-HEMBB1002342//Homo sapiens mRNA for putative thioredoxin-like protein.//6.9e-96:479:97//AJ010841

[13160] R-HEMBB1002358//Human Xp22 BAC CT-28515 (from CalTech/Research Genetics), PAC RPCII -27C22 (from Roswell Park Cancer Center), and Cosmid U35B5 (from Lawrence Livermore), complete sequence.//2.3e-53:309:83//AC002366

[13161] R-HEMBBB1002359//Homo sapiens clone NH0486122, WORKING DRAFT SEQUENCE, 5 unordered pieces.//4.9e-27:350:74//AC005038

[13162] R-HEMBB1002364//Homo sapiens Xp22 PAC RPCI1-108M6 (Roswell Park Cancer Center PAC library) complete sequence.//8.6e-53:302:79//AC003036

[13163] R-HEMBB1002371//Human gene for catalase (EC 1.11.1.6) exon 11 mapping to chromosome 11, band p13.//3.2e-38:199:100//X04094

[13164] R-HEMBB1002381//Homo sapiens (JH8) mRNA, partial cds.//3.2e-07:120:78//AF072467

[13165] R-HEMBB1002383//Human DNA sequence from cosmid U19H10 on chromosome X. Contains ESTs and CA repeat.//0.98:351:58//AL021182

[13166] R-HEMBB1002387//HS-1052-B2-G10-MR.abi CIT Human Genomic Sperm Library C Homo sapiens genomic clone Plate=CT 774 Col=20 Row=N, genomic survey sequence.//2.0e-07:276:67//B41091

[13167] R-HEMBB1002415//Homo sapiens chromosome 17, clone hRPK.209_D_{—}14, complete sequence.//1.4e-25:202:79//AC005730

[13168] R-HEMBB1002425//Homo sapiens chromosome 19, cosmid R33516, complete sequence.//3.6e-60:401:87//AC004799

[13169] R-HEMBB1002442//Homo sapiens clone UWGC:r9a from 6p21, complete sequence.//3.1e-51:358:81//AC006046

[13170] R-HEMBB1002453//Human DNA sequence *** SEQUENCING IN PROGRESS *** from clone 86D1, WORKING DRAFT SEQUENCE.//1.4e-115:557:98//AL034349

[13171] R-HEMBB1002457//Human DNA sequence from clone 364122 on chromosome Xq21.31-22.3. Contains an STS and GSSs, complete sequence.//6.3e-37:338:80//AL031012

[13172] R-HEMBB1002458//Homo sapiens T-cell receptor alpha delta locus from bases 250472 to 501670 (section 2 of 5) of the Complete Nucleotide Sequence.//9.7e-09:314:64//AE000659

[13173] R-HEMBB1002477//Arabidopsis thaliana DNA chromosome 4, BAC clone T12H17 (ESSAII project).//0.42:110:74//AL021635

[13174] R-HEMBB1002489//Salvelinus fontinalis microsatellite sequence SFO-12.//6.6e-06:167:71//U50302

[13175] R-HEMBB1002492//RPCI11-74F21.TK RPCII 1 Homo sapiens genomic clone R-74F21, genomic survey sequence.//3.1e-14:410:63//AQ238960

[13176] R-HEMBB1002495//HS_{—}3220_A2-F07-T7 CIT Approved Human Genomic Sperm Library D Homo sapiens genomic clone Plate=3220 Col=14 Row=K, genomic survey sequence.//1.3e-24:137:100//AQ180762

[13177] R-HEMBB1002502//Homo sapiens chromosome 17, clone hRPK.346_K_{—}10, complete sequence.//9.6e-81:538:86//AC006120

[13178] R-HEMBB1002509//Human DNA sequence from clone 581F12 on chromosome Xq21.

[13179] Contains Eukaryotic Translation Initiation Factor EIF3 P35 Subunit and 60S Ribosomal protein L22 pseudogenes. Contains ESTs, complete sequence.//0.0061:482:57//AL031313

[13180] R-HEMBB1002510//HS_{—}2179_A1_F03_MR CIT Approved Human Genomic Sperm Library D Homo sapiens genomic clone Plate=2179 Col=5 Row=K, genomic survey sequence.//6.9e-35:423:72//AQ298309

[13181] R-HEMBB1002520//Human DNA sequence *** SEQUENCING IN PROGRESS *** from clone 27K12, WORKING DRAFT SEQUENCE.//2.0e-62:201:85//AL033397

[13182] R-HEMBB1002522//Homo sapiens chromosome 5, Pac clone 61c2 (LBNL HI 39), complete sequence.//0.99:323:58//AC004225

[13183] R-HEMBB1002531

[13184] R-HEMBB1002534//Homo sapiens genomic DNA, chromosome 21q22.2 (Down Syndrome region), segment 2/15, WORKING DRAFT SEQUENCE.//1.0e-61:380:79//AP000009

[13185] R-HEMBB1002545//RPCI11-2F3.TVB RPCI-11 Homo sapiens genomic clone RPCI-11-2F3, genomic survey sequence.//3.5e-12:414:63//B63283

[13186] R-HEMBB1002550

[13187] R-HEMBB1002556//*** SEQUENCING IN PROGRESS *** Homo sapiens chromosome 4, BAC clone C0481 P14; HTGS phase 1, WORKING DRAFT SEQUENCE, 7 unordered pieces.//2.6e-62:299:85//AC006160

[13188] R-HEMBB1002579//Human DNA sequence *** SEQUENCING IN PROGRESS * from clone 1141E15, WORKING DRAFT SEQUENCE.//1.7e-42:286:88//AL034422

[13189] R-HEMBB1002582//Homo sapiens clone DJ1119N05, complete sequence.//3.0e-14:426:60//AC004968

[13190] R-HEMBB1002590//Homo sapiens clone RG132J19, complete sequence.//1.1e-30:392:74//AC005163

[13191] R-HEMBB1002596//Human DNA sequence *** SEQUENCING IN PROGRESS * from clone 508115, WORKING DRAFT SEQUENCE.//8.5e-44:335:83//AL021707

[13192] R-HEMBB1002600//Homo sapiens 12p13.3 PAC RPCI5-1063M23 (Roswell Park Cancer Institute Human PAC Library) complete sequence.//2.0e-105:470:96//AC005865

[13193] R-HEMBB1002601//Homo sapiens chromosome 17, clone HRPC837J1, complete sequence.//1.3e-44:445:77//AC004223

[13194] R-HEMBB1002603//Homo sapiens clone UWGC:y23cO49 from 6p21, complete sequence.//7.0e-40:321:82//AC006162

[13195] R-HEMBB1002607//CIT-HSP-2347D7.TF CIT-HSP Homo sapiens genomic clone 2347D7, genomic survey sequence.//1.1e-44:234:98//AQ060197

[13196] R-HEMBB1002610//Human Chromosome 16 BAC clone CIT987SK-A-363E6, complete sequence.//7.0e-22:455:65//U91321

[13197] R-HEMBB1002613//Homo sapiens 12p13.3 BAC RPCII 1-476M19 (Roswell Park Cancer Institute Human BAC Library) complete sequence.//3.0e-72:302:85//AC005908 45 R-HEMBB1002614//Homo sapiens 12q13.1 PAC RPCII-228P16 (Roswell Park Cancer Institute Human PAC Library) complete sequence.//3.8e-10:512:60//AC004801

[13198] R-HEMBB1002617//Homo sapiens clone DJ 1021120, WORKING DRAFT SEQUENCE, 6 unordered pieces.//6.8e-24:486:63//AC005520

[13199] R-HEMBB1002623//Homo sapiens PAC clone DJ1059M17 from 7q21-q31.1, complete 50 sequence.//2.4e-41:326:83//AC004953

[13200] R-HEMBB1002635//Homo sapiens chromosome 12p13.3 clone RPCII 1-189M20, WORKING DRAFT SEQUENCE, 39 unordered pieces.//2.6e-42:360:80//AC005910

[13201] R-HEMBB1002664//Homo sapiens chromosome 21 q22.3 PAC 171 F 15, complete sequence.//9.1e-51:335:87//AF042090

[13202] R-HEMBB1002677//Plasmodium falciparum strain Dd2 heat shock protein 86 (HSP86), O1 (o1), O3 (o3), O2 (o2), CG8 (cg8), CG4 (cg4), CG3 (cg3), CG9 (cg9), CG1 (cg1), CG6 (cg6), chloroquine resistance candidate protein (cg2), and CG7 (cg7) genes, complete cds.//0.0011:399:59//AF030694

[13203] R-HEMBB1002683//Homo sapiens chromosome 21q22.3 PAC 171F15, complete sequence.//4.1e-55:515:76//AF042090

[13204] R-HEMBB1002684//Human BAC clone RGO66DI 1 from 7q22, complete sequence.//1.7e-18:504:62//AC002430

[13205] R-HEMBB1002686//Homo sapiens full-length insert cDNA clone ZC65D06.//7.0e-85:413:99//AF086217

[13206] R-HEMBB1002692//Homo sapiens 12p13.3 BAC RPCII 1-319E16 (Roswell Park Cancer Institute Human BAC Library) complete sequence.//9.8e-69:505:82//AC006206

[13207] R-HEMBB1002697//Plasmodium falciparum 3D7 chromosome 12 PFYAC812 genomic sequence, WORKING DRAFT SEQUENCE, 8 unordered pieces.//0.26:390:58//AC004153

[13208] R-HEMBB1002699//Human NFE genomic fragment.//8.0e-32:226:79//M98511

[13209] R-HEMBB1002702//CIT-HSP-344K23.TVC CIT-HSP Homo sapiens genomic clone 344K23, genomic survey sequence.//8.6e-43:351:80//B59764

[13210] R-HEMBB1002705//Plasmodium yoelii rhoptry protein, complete cds.//0.0064:454:59//L27838

[13211] R-HEMBB1002712//Human DNA sequence from clone 505B13 on chromosome 1p36.2-36.3 Contains CA repeat and GSSs, complete sequence.//9.6e-09:187:67//Z98052

[13212] R-MAMMA1000009//Homo sapiens clone NH0469M07, WORKING DRAFT SEQUENCE, 7 unordered pieces.//4.1e-21:201:80//AC005037

[13213] R-MAMMA1000019//Homo sapiens chromosome 21 q22.2 PAC clone P169K17, complete sequence.//4.2e-48:306:82//AF015720

[13214] R-MAMMA1000020//Human DNA sequence from clone 551 El 3 on chromosome Xp 11.2-11.3 Contains farnesyl pyrophosphate synthetase pseudogene, VT4 protein pseudogene, EST, GSS, complete sequence.//1.4e-41:306:86//AL022163

[13215] R-MAMMA1000025//Human DNA sequence from clone 512Bl 1 on chromosome 6p24-25. Contains the Desmoplakin I (DPI) gene, ESTs, STSs and GSSs, complete sequence.//6.1e-36:281:83//AL031058

[13216] R-MAMMA1000043//Homo sapiens Chromosome 22q11.2 Cosmid Clone 8c In DGCR Region, complete sequence.//1.3e-67:321:88//AC000090

[13217] R-MAMMA1000045//Homo sapiens chromosome 4 clone B220G8 map 4q21, complete sequence.//6.7e-86:559:86//AC004054

[13218] R-MAMMA1000055//Branta canadensis CA dinucleotide repeat locus Bcamicro 1.//0.79:63:77//AF025889

[13219] R-MAMMA1000057//Homo sapiens DNA sequence from cosmid ICK0721Q on chromosome 6. Contains a 60S Ribosomal Protein L35A LIKE pseudogene, a gene coding for a 60S Ribosomal Protein L12 LIKE protein in an intron of the HSET gene coding for a Kinesin related protein, the PHF1 (PHF2) gene coding for alternative splice products PHD finger proteins 1 and 2, the gene coding for five different alternatively spliced mRNAs coding for a protein similar to CYTA (CYCY) and identical to a polypeptide coded for by a known patented cDNA, and the first two exons of the gene coding for the human homolog of the rat synaptic ras GTPase-activating protein p135 SynGAP. Contains three predicted CpG islands, ESTs and an STS, complete sequence.//1.6e-53:397:83//AL021366

[13220] R-MAMMA1000069//Homo sapiens clone RG052H06, WORKING DRAFT SEQUENCE, 11 unordered pieces.//2.0e-37:295:83//AC005057

[13221] R-MAMMA1000084//Homo sapiens chromosome Xp22-135-136 clone GSHB-56711, WORKING DRAFT SEQUENCE, 35 unordered pieces.//7.1e-45:296:88//AC005867

[13222] R-MAMMA1000085

[13223] R-MAMMA1000092//Human DNA sequence *** SEQUENCING IN PROGRESS *** from clone 774G 10, WORKING DRAFT SEQUENCE.//8.2e-34:539:69//AL034410

[13224] R-MAMMA1000103//Homo sapiens chromosome 17, clone hCIT.91_J_{—}4, complete sequence.//3.4e-39:297:85//AC003976

[13225] R-MAMMA1000117//Homo sapiens p47-phox (NCF1) pseudogene, clone P38, exon 5.//2.6e-07:162:67/JU69641

[13226] R-MAMMA1000129//Homo sapiens clone DJ076B20, WORKING DRAFT SEQUENCE, 6 unordered pieces.//6.1e-13:141:80//AC004882

[13227] R-MAMMA1000133

[13228] R-MAMMA1000134//Homo sapiens chromosome 19, cosmid R26660, complete sequence.//9.7e-18:171:80//AC005328

[13229] R-MAMMA1000139//Homo sapiens clone DJ241P17, WORKING DRAFT SEQUENCE, 7 unordered pieces.//1.2e-49:366:75//AC005000

[13230] R-MAMMA1000143//Homo sapiens *** SEQUENCING IN PROGRESS *** from PAC D9.2, WORKING DRAFT SEQUENCE.//3.9e-56:318:89//AJ009615

[13231] R-MAMMA1000155//Human DNA sequence from clone 323M22 on chromosome 22q13.1-13.2. Contains the 5′ part of the human ortholog of chicken P52 and mouse H74, and a novel gene coding for a protein similar to KIAA0173 and worm Tubulin Tyrosine Ligase. Contains ESTS, STSs, GSSs, genomic marker D22S418 and putative CpG islands, complete sequence.//2.1e-68:562:78//AL022476

[13232] R-MAMMA1000163//Homo sapiens clone RG315H11, WORKING DRAFT SEQUENCE, 5 unordered pieces.//5.3e-06:408:58//AC005089

[13233] R-MAMMA1000171//CIT-HSP-2335L20.TR CIT-HSP Homo sapiens genomic clone 2335L20, genomic survey sequence.//1.5e-42:173:89//AQ037381

[13234] R-MAMMA1000173

[13235] R-MAMMA1000175//H. sapiens CpG island DNA genomic Mse1 fragment, clone 186c5, reverse read cpg186c5.rt1b.//0.072:90:72//Z57594

[13236] R-MAMMA1000183//Homo sapiens Xp22 BAC GSHB-184P14 (Genome Systems Human BAC library) complete sequence.//1.5e-44:445:75//AC004552

[13237] R-MAMMA1000198//Homo sapiens clone c102D0968, complete sequence.//1.9e-23:135:85//AF038667

[13238] R-MAMMA1000221//HS_{—}3242_B2_H02_T7 CIT Approved Human Genomic Sperm Library D Homo sapiens genomic clone Plate=3242 Col=4 Row=P, genomic survey sequence.//0.031:167:6711AQ220385

[13239] R-MAMMA1000227//Human DNA sequence *** SEQUENCING IN PROGRESS *** from clone 1071N3, WORKING DRAFT SEQUENCE.//4.5e-36:487:71//AL031728

[13240] R-MAMMA1000241//Homo sapiens DNA sequence from PAC 93L7 on chromosome Xq21. Contains part of the CHM (TCD, REP 1) gene coding for RAB Escort protein 1 (REP-1, RAB proteins geranylgeranyltransferase component A 1, Choroideraemia protein, Tapetochoroidal Dystrophy (TCD) protein). Contains ESTs and an STS, complete sequence.//6.2e-07:445:59//AL022401

[13241] R-MAMMA1000251//Homo sapiens chromosome 19, cosmid F23465, complete sequence.//1.6e-25:390:69//AC005266

[13242] R-MAMMA1000254//Homo sapiens DNA sequence from BAC 1216H 12 on chromosome 22q12. Contains a pseudogene with similarity to part of mouse Ninein and the KIAA0609 gene for a protein similar to C. elegans K09C8.4. Contains ESTs, GSSs and a ggtt repeat polymorphism, complete sequence.//1.1e-37:327:80//AL008715

[13243] R-MAMMA1000257//Human DNA sequence *** SEQUENCING IN PROGRESS *** from clone 1125A11, WORKING DRAFT SEQUENCE.//1.3e-22:281:74//AL034549

[13244] R-MAMMA1000264//*** SEQUENCING IN PROGRESS *** EPMI/APECED region of chromosome 21, clones A68E8, B127P21, B1173L3, B23N8, C1242C9, C579E2, A70B6, B159G9, B175D10, B52C10, C124G1 Note: Sequencing in this region has been discontinued by the Stanford Human Genome Center, WORKING DRAFT SEQUENCE, 50 unordered pieces.//1.7e-29:337:67//AC003656

[13245] R-MAMMA1000266//Human DNA sequence *** SEQUENCING IN PROGRESS *** from clone 681N20, WORKING DRAFT SEQUENCE.//7.7e-37:339:80//AL031670

[13246] R-MAMMA1000270//Human Chromosome 16 BAC clone CIT987SK-A-270GI, complete sequence.//1.2e-40:283:86//AF001549

[13247] R-MAMMA1000277//CIT-HSP-516K6.TP CIT-HSP Homo sapiens genomic clone 516K6, genomic survey sequence.//3.0e-29:265:80//B49900

[13248] R-MAMMA1000278//Sequence 25 from patent U.S. Pat. No. 5,708,157.//2.6e-39:282:82//I80056

[13249] R-MAMMA1000279//Homo sapiens chromosome 16, cosmid clone 390H2 (LANL), complete sequence.//1.6e-52:295:84//AC004494

[13250] R-MAMMA1000284//CITB1-E1-2522B20.TF CITBI-El Homo sapiens genomic clone 2522B20, genomic survey sequence.//1.8e-11:288:61//AQ280722

[13251] R-MAMMA1000287

[13252] R-MAMMA1000302//Homo sapiens chromosome 17, clone hRPK.112_J_{—}9, complete sequence.//4.1e-16:169:77//AC005553

[13253] R-MAMMA1000307//RPCII1-89LI.TV RPCII 1 Homo sapiens genomic clone R-89LI, genomic survey sequence.//1.3e-86:429:97//AQ284795

[13254] R-MAMMA1000309//Homo sapiens hJAG2.de1-E6 (JAG2) mRNA, alternatively spliced isoform of Jagged2, complete cds.//0.00020:384:60//AF029779

[13255] R-MAMMA1000312//Ichneutes sp. 16S ribosomal RNA gene, partial sequence.//0.0026:310:60//AF003518

[13256] R-MAMMA1000313//Human cosmid Xq28_IA649, complete sequence.//1.5e-26:317:67//U82694

[13257] R-MAMMA1000331//Homo sapiens clone DJ1007F24, WORKING DRAFT SEQUENCE, 5 unordered pieces.//3.1e-39:277:86//AC004947

[13258] R-MAMMA1000339//Homo sapiens clone HS19.1 Alu-Ya5 sequence.//3.2e-44:180:89//AF015147

[13259] R-MAMMA1000340//Plasmodium falciparum chromosome 2, section 25 of 73 of the complete sequence.//0.97:293:64//AE001388

[13260] R-MAMMA1000348//Homo sapiens BAC129, complete sequence.//4.4e-27:365:72//U85195

[13261] R-MAMMA1000356//Drosophila melanogaster DNA sequence (P1 DS02252 (D97)), complete sequence.//0.73:332:61//AC002493

[13262] R-MAMMA1000360//Homo sapiens PAC clone DJ0905J08 from 7 p12-p14, complete sequence.//4.6e-80:279:89//AC005189

[13263] R-MAMMA1000361//Human DNA sequence *** SEQUENCING IN PROGRESS *** from clone 753D4, WORKING DRAFT SEQUENCE.//7.8e-18:346:63//AL031676

[13264] R-MAMMA1000372//Human DNA sequence *** SEQUENCING IN PROGRESS *** from clone Y214H 10, WORKING DRAFT SEQUENCE.//5.3e-40:299:83//AL022344

[13265] R-MAMMA1000385//Human DNA sequence *** SEQUENCING IN PROGRESS *** from clone 310013, WORKING DRAFT SEQUENCE.//1.0e-28:225:84//AL031658

[13266] R-MAMMA1000388//CIT-HSP-2321D3.TR CIT-HSP Homo sapiens genomic clone 2321D3, genomic survey sequence.//4.7e-60:298:99//AQ038102

[13267] R-MAMMA1000395

[13268] R-MAMMA1000402//Homo sapiens PAC clone DJI 107K12 from 7 p12-p14, complete sequence.//1.4e-84:276:88//AC004692

[13269] R-MAMMA1000410//Human Chromosome 16 BAC clone CIT987SK-A-21 IC6, complete sequence.//6.7e-35:360:76//AC002394

[13270] R-MAMMA1000413//Homo sapiens chromosome 17, clone hRPC.842_A_{—}23, complete sequence.//3.1e-69:327:791/AC004662

[13271] R-MAMMA1000414//Homo sapiens DNA sequence from PAC 164L 12 on chromosome Xq13.1-Xq21.2. Contains GSS (BAC end sequence),STS.//3.6e-41:180:87//AL009028

[13272] R-MAMMA1000416//Homo sapiens clone DJI 136G02, WORKING DRAFT SEQUENCE, 4 unordered pieces.//3.1e-59:478:77//AC005377

[13273] R-MAMMA1000421//Human coxyIb gene, last exon and flanking sequence.//5.3e-53:294:82//X58139

[13274] R-MAMMA1000422//Human DNA sequence *** SEQUENCING IN PROGRESS *** from clone 8B22, WORKING DRAFT SEQUENCE.//1.0:252:59//AL031737

[13275] R-MAMMA1000423//Homo sapiens clone DA0065G23, complete sequence.//2.0e-50:491:76//AC004816

[13276] R-MAMMA1000424//Human DNA sequence from PAC 507115 on chromosome Xq26.3-27.3. Contains 60S ribosomal protein L44 (L41, L36) like gene, ESTs, STSs and a polymorphic CA repeat.//3.5e-40:340:80//Z98950

[13277] R-MAMMA1000429//Mus musculus SDP8 mRNA, complete cds.//0.0019:87:79//AF062484

[13278] R-MAMMA1000431//Homo sapiens clone DJ0098022, WORKING DRAFT SEQUENCE, 5 unordered pieces.//2.0e-58:564:77//AC004821

[13279] R-MAMMA1000444//Human BAC clone RG 126M09 from 7q21-q22, complete sequence.//3.0e-43:328:83//AC002067

[13280] R-MAMMA1000446//Human chromosome X clone Qc15B1, complete sequence.//0.95:209:65//U82672

[13281] R-MAMMA1000458//Arabidopsis thaliana genomic DNA, chromosome 5, PI clone: MXK3, complete sequence.//0.99:182:61//AB019236

[13282] R-MAMMA1000468

[13283] R-MAMMA1000472//Homo sapiens genomic DNA, 21q region, clone: 655M9N34, genomic survey sequence.//1.0e-38:142:88//AGO 10148

[13284] R-MAMMA1000478//Human DNA sequence *** SEQUENCING IN PROGRESS *** from clone 16915, WORKING DRAFT SEQUENCE.//1.3e-37:286:83//Z93015

[13285] R-MAMMA1000483//CIT-HSP-384B14.TR CIT-HSP Homo sapiens genomic clone 384B14, genomic survey sequence.//4.3e-34:158:86//B54637

[13286] R-MAMMA1000490//Homo sapiens chromosome 19, BAC CIT-B-191 n6, complete sequence.//4.2e-98:569:90//AC006130

[13287] R-MAMMA1000500//Human BRCAI, Rho7 and vatl genes, complete cds, and ipf35 gene, partial cds.//1.2e-41:334:7911L78833

[13288] R-MAMMA1000501//Human DNA sequence *** SEQUENCING IN PROGRESS *** from clone 153G14, WORKING DRAFT SEQUENCE.//1.4e-38:250:84//AL031118

[13289] R-MAMMA1000516//Human DNA sequence *** SEQUENCING IN PROGRESS * from clone 424J12, WORKING DRAFT SEQUENCE.//1.3e-43:318:83//Z82207

[13290] R-MAMMA1000522//Human DNA sequence from clone 739H11 on chromosome 1p33-34.2 Contains KIAA0237 gene, EST, STS, GSS, complete sequence.//4.4e-13:202:73//AL031289

[13291] R-MAMMA1000559//Human DNA sequence *** SEQUENCING IN PROGRESS *** from clone 16915, WORKING DRAFT SEQUENCE.//2.2e-30:245:83//Z93015

[13292] R-MAMMA1000565//Homo sapiens chromosome 10 clone LA1 ONCO 1_{—}183_B_{—}7 map 10q24, WORKING DRAFT SEQUENCE, I ordered pieces.//3.6e-39:281:80//U82205

[13293] R-MAMMA1000567//Rattus norvegicus nonmuscle caldesmon mRNA, complete cds.//9.2e-19:216:76//U18419

[13294] R-MAMMA1000576

[13295] R-MAMMA1000583//Homo sapiens chromosome 17, clone hRPK.112_H_{—}10, complete sequence.//5.4e-53:297:85//AC005666

[13296] R-MAMMA1000585//Homo sapiens clone DJIO15P16, WORKING DRAFT SEQUENCE, 4 unordered pieces.//1.2e-35:450:71//AC006018

[13297] R-MAMMA1000594//Homo sapiens *** SEQUENCING IN PROGRESS *** from cosmid 5L5, WORKING DRAFT SEQUENCE.//4.3e-26:293:75//AJ009613

[13298] R-MAMMA1000597//CIT-HSP-2341F4.TF CIT-HSP Homo sapiens genomic clone 2341F4, genomic survey sequence.//0.83:110:70//AQ057131

[13299] R-MAMMA1000605//Homo sapiens clone DJ 1090E20, WORKING DRAFT SEQUENCE, 4 unordered pieces.//2.6e-50:290:86//AC004956

[13300] R-MAMMA1000612//CIT-HSP-2334J18.TF CIT-HSP Homo sapiens genomic clone 2334J18, genomic survey sequence.//0.76:132:65//AQ038364

[13301] R-MAMMA1000616//Ibalia leucospoides mitochondrion 16S rRNA gene, partial sequence.//6.8e-06:431:59//U06970

[13302] R-MAMMA1000621//Human NBR2 mRNA, complete cds.//5.3e-27:258:80//U88573

[13303] R-MAMMA1000623

[13304] R-MAMMA1000625//Homo sapiens chromosome 19, cosmid R31665, complete sequence.//3.3e-07:325:63//AC005498

[13305] R-MAMMA1000643//Human DNA sequence *** SEQUENCING IN PROGRESS *** from clone 39B17, WORKING DRAFT SEQUENCE.//1.4e-06:236:68//AL023656

[13306] R-MAMMA1000664//*** SEQUENCING IN PROGRESS *** Homo sapiens chromosome 4, BAC clone C0326F06; HTGS phase 1, WORKING DRAFT SEQUENCE, 16 unordered pieces.//1.4e-40:338:81//AC004555

[13307] R-MAMMA1000669//Human DNA sequence from clone 453C12 on chromosome 20q12-13.12 Contains SDC4 (syndecan 4 (amphiglycan, ryudocan)) predicts a gene like the mouse transcription factor RBP-L, MATN4 (matrilin-4) STS, GSS, CpG island, complete sequence.//1.2e-46:327:86//AL021578

[13308] R-MAMMA1000670

[13309] R-MAMMA1000672//Human DNA sequence from clone 478D8 on chromosome 6p24. Contains STSs and GSSs, complete sequence.//2.2e-29:328:76//AL031785

[13310] R-MAMMA1000684//Mus musculus frizzled-1 ImRNA, complete cds.//0.21:247:63//AF054623

[13311] R-MAMMA1000696//Human Chromosome X clone bWXD173, WORKING DRAFT SEQUENCE, 2 ordered pieces.//2.7e-46:464:71//AC004387

[13312] R-MAMMA1000707//Homo sapiens clone RG219E16, WORKING DRAFT SEQUENCE, 3 unordered pieces.//3.4e-09:244:66//AC005075

[13313] R-MAMMA1000713//Homo sapiens clone DJ0425102, WORKING DRAFT SEQUENCE, 5 unordered pieces.//3.7e-51:439:74//AC005478

[13314] R-MAMMA1000714//Homo sapiens BAC clone RG152H24 from 7 p15-p21, complete sequence.//2.8e-29:288:75//AC004694

[13315] R-MAMMA1000718//Human Xp22 BAC CT-285115 (from CalTech/Research Genetics), PAC RPCII-27C22 (from Roswell Park Cancer Center), and Cosmid U35B5 (from Lawrence Livermore), complete sequence.//3.0e-37:231:91//AC002366

[13316] R-MAMMA1000720//Homo sapiens chromosome 19, cosmid R33632, complete sequence.//1.4e-35:299:81//AC005781

[13317] R-MAMMA1000723//Human DNA sequence from clone 551EI3 on chromosome Xp 11.2-11.3 Contains farnesyl pyrophosphate synthetase pseudogene, VT4 protein pseudogene, EST, GSS, complete sequence.//3.9e-59:409:79//AL022163

[13318] R-MAMMA1000731//Homo sapiens clone RG228D17, WORKING DRAFT SEQUENCE, 2 unordered pieces.//9.4e-29:560:66//AC005077

[13319] R-MAMMA1000732//Homo sapiens clone DJ0539M06, WORKING DRAFT SEQUENCE, 10 unordered pieces.//2.4e-14:309:68//AC004832

[13320] R-MAMMA1000733//Human DNA sequence *** SEQUENCING IN PROGRESS *** from clone 732E4, WORKING DRAFT SEQUENCE.//4.1e-29:377:71//AL008722

[13321] R-MAMMA1000734//Human DNA sequence *** SEQUENCING IN PROGRESS * from clone 191 J 18, WORKING DRAFT SEQUENCE.//2.0e-108:420:99//AL024507

[13322] R-MAMMA1000738//Human V beta T-cell receptor (TCRBV) gene locus.//6.6e-41:347:82//U03115

[13323] R-MAMMA1000744//T2708-T7 TAMU Arabidopsis thaliana genomic clone T2708, genomic survey sequence.//0.095:367:60//B20150

[13324] R-MAMMA1000746//*** SEQUENCING IN PROGRESS *** Homo sapiens chromosome 4, BAC clone C0135005; HTGS phase 1, WORKING DRAFT SEQUENCE, 23 unordered pieces.//7.4e-95:569:87//AC004661

[13325] R-MAMMA1000752//Homo sapiens BAC clone BK085E05 from 22q12.1-qter, complete sequence.//1.3e-48:295:84//AC003071

[13326] R-MAMMA1000760//Human DNA sequence from clone B79B4 on chromosome 22 Contains CA repeat and GSS, complete sequence.//5.7e-45:347:82//Z82178

[13327] R-MAMMA1000761//Homo sapiens cosmid clone LUCA16 from 3p21.3, complete sequence.//1.1e-32:292:80//U73169

[13328] R-MAMMA1000775//Homo sapiens chromosome 17, clone hRPK.22_N 12, WORKING DRAFT SEQUENCE, 2 ordered pieces.//2.5e-50:467:79//AC005412

[13329] R-MAMMA1000776//Human BAC clone GS552A01 from 7q21-q22, complete sequence.//1.0e-63:429:79//AC002454

[13330] R-MAMMA1000778//Human DNA sequence from 4PTEL, Huntington's Disease Region, chromosome 4 p16.3.//3.5e-25:234:81//Z95704

[13331] R-MAMMA1000782//Human DNA sequence from clone 459L4 on chromosome 6p22.3-24.1 Contains EST, STS, GSS, complete sequence.//0.0021:119:74//AL031120

[13332] R-MAMMA1000798//Homo sapiens 959 kb contig between AML1 and CBR1 on chromosome 21 q22, segment 2/3.//6.3e-08:269:6411AJ229042

[13333] R-MAMMA1000802//Homo sapiens chromosome 19, cosmid R33729, complete sequence.//1.1e-36:261:80//AC005339

[13334] R-MAMMA1000831//CIT-HSP-2387J3.TF.1 CIT-HSP Homo sapiens genomic clone 2387J3, genomic survey sequence.//0.68:156:65//AQ240807

[13335] R-MAMMA1000839//Homo sapiens chromosome 17, clone hRPK.726_{—}012, WORKING DRAFT SEQUENCE, 6 unordered pieces.//4.6e-50:335:86//AC005517

[13336] R-MAMMA1000841//Human Chromosome 16 BAC clone CIT987SK-A-972D3, complete sequence.//1.3e-40:322:77//U91323

[13337] R-MAMMA1000842//Human DNA sequence *** SEQUENCING IN PROGRESS *** from clone 341D10, WORKING DRAFT SEQUENCE.//4.1e-44:471:74//Z97985

[13338] R-MAMMA1000843//Homo sapiens clone 82F9, WORKING DRAFT SEQUENCE, 4 unordered pieces.//0.85:394:60//AC004815

[13339] R-MAMMA1000845//Plasmodium falciparum DNA *** SEQUENCING IN PROGRESS * from MALlP1, WORKING DRAFT SEQUENCE.//0.54:303:63//AL031744

[13340] R-MAMMA1000851//Homo sapiens chromosome X, MeCP2 locus, complete sequence.//1.7e-10:115:83//AF030876

[13341] R-MAMMA1000855//Homo sapiens PAC clone 278C19 from 12q, complete sequence.//5.0e-44:352:83//AC004263

[13342] R-MAMMA1000856//Homo sapiens chromosome 19, cosmid F24200, complete sequence.//1.8e-10:149:74//AC004611

[13343] R-MAMMA1000862//Hepatitis C virus genomic RNA, 3′ nonstranslated region, partial sequence clone #16.//8.1e-05:205:66//AF009075

[13344] R-MAMMA1000863//Homo sapiens Xp22 Cosmids U15E4, U115H5, U132E12, U115B9 (Lawrence Livermore human cosmid library) complete sequence.//2.9e-49:421:80//AC002364

[13345] R-MAMMA1000865//Homo sapiens Chromosome 16 BAC clone CIT987SK-A-328A3, complete sequence.//9.1e-41:302:83//AC002301

[13346] R-MAMMA1000867//Human BRCA 1, Rho7 and vatl genes, complete cds, and ipf35 gene, partial cds.//1.9e-17:500:61//L78833

[13347] R-MAMMA1000875//Homo sapiens chromosome 16, cosmid clone RT99 (LANL), complete sequence.//1.2e-17:211:74//AC004653

[13348] R-MAMMA1000876//Homo sapiens Xp22 BAC GS-607H18 (Genome Systems Human BAC library) complete sequence.//4.7e-09:160:65//AC003658

[13349] R-MAMMA1000877//Homo sapiens DNA sequence from PAC 958B3 on chromosome Xp22.11-Xp22.22. Contains ESTs STS and CpG island.//3.2e-34:354:75//Z93023

[13350] R-MAMMA1000880//Homo sapiens Chromosome 16 BAC clone CIT987SK-A-575C2, complete sequence.//1.4e-41:411:74//AC002425

[13351] R-MAMMA1000883

[13352] R-MAMMA1000897

[13353] R-MAMMA1000905//Homo sapiens chromosome 5, P1 clone 274A11 (LBNL H66), complete sequence.//1.3e-73:304:91//AC004506

[13354] R-MAMMA1000906//Human DNA from chromosome 19-specific cosmid F 14150, genomic sequence, complete sequence.//8.4e-23:194:83//AC003110

[13355] R-MAMMA1000908//Human Chromosome 15q26.1 PAC clone pDJ416i6, complete sequence.//1.5e-09:170:71//AC003024

[13356] R-MAMMA1000914//Homo sapiens PAC clone DJO740L 10 from 7p 13-p14, complete sequence.//8.3e-13:323:67//AC005247

[13357] R-MAMMA1000921//Human DNA sequence *** SEQUENCING IN PROGRESS *** from clone 423B22, WORKING DRAFT SEQUENCE.//6.8e-28:333:72//AL034379

[13358] R-MAMMA1000931//HS_{—}3227_B1_B03_T7 CIT Approved Human Genomic Sperm Library D Homo sapiens genomic clone Plate=3227 Col=5 Row=D, genomic survey sequence.//1.4e-55:443:79//AQ191777

[13359] R-MAMMA1000940//Homo sapiens clone RGO13F03, WORKING DRAFT SEQUENCE, 6 unordered pieces.//2.0e-43:340:84//AC005046

[13360] R-MAMMA1000941//Homo sapiens chromosome 17, clone 297N7, complete sequence.//1.8e-53:330:84//AC002347

[13361] R-MAMMA1000942//Human Chromosome X clone bWXDI 87, complete sequence.//1.2e-39:391:74//AC004383

[13362] R-MAMMA1000943//Human PAC clone DJ327A19 from Xq25-q26, complete sequence.//4.6e-75:566:81//AC002477

[13363] R-MAMMA1000956//Plasmodium falciparum MAL3P7, complete sequence.//0.013:285:59//AL034559

[13364] R-MAMMA1000957//Homo sapiens clone RG339C12, WORKING DRAFT SEQUENCE, 10 unordered pieces.//5.2e-45:288:90//AC005096

[13365] R-MAMMA1000962//Homo sapiens clone DJ0756H11, WORKING DRAFT SEQUENCE, 5 unordered pieces.//2.9e-108:561:96//AC006001

[13366] R-MAMMA1000968//Homo sapiens PAC clone 278C 19 from 12q, complete sequence.//3.9e-41:287:87//AC004263

[13367] R-MAMMA1000975//Homo sapiens DNA sequence from PAC 179N 16 on chromosome 6p21.1-21.33. Contains the SAPK4 (MAPK p38delta) gene, and the alternatively spliced SAPK2 gene coding for CSaids binding protein CSBP2 and a MAPK p38beta LIKE protein. Contains ESTs, STSs and two predicted CpG islands, complete sequence.//9.4e-65:542:79//Z95152

[13368] R-MAMMA1000979//Homo sapiens chromosome 21q22.3, PAC clones 314N7, 225L15, BAC clone 7B7, complete sequence bases 1.333303.//3.2e-34:296:80//AJ011930

[13369] R-MAMMA1000987//Homo sapiens CC chemokine gene cluster, complete sequence.//1.7e-40:255:87//AF088219

[13370] R-MAMMA1000998//Homo sapiens PAC clone DJI 152D16 from Xq23, complete sequence.//2.5e-39:315:73//AC005190

[13371] R-MAMMA1001003//Homo sapiens chromosome 10 clone CIT-HSP-1338F24 map 10p11.2-10p 12.1, complete sequence.//2.4e-52:296:84//AC006101

[13372] R-MAMMA1001008//Homo sapiens *** SEQUENCING IN PROGRESS ***, WORKING DRAFT SEQUENCE.//7.9e-88:432:98//AJ011929

[13373] R-MAMMA1001021//Homo sapiens PAC clone DJ0859M06 from 7q11, complete sequence.//3.8e-39:286:87//AC004910

[13374] R-MAMMA1001024//Homo sapiens clone DJ0876A24, WORKING DRAFT SEQUENCE, 6 unordered pieces.//2.0e-31:274:80//AC004913

[13375] R-MAMMA1001030//Homo sapiens full-length insert cDNA clone ZD96C01.//3.2e-99:469:99//AF088074

[13376] R-MAMMA1001035//RPCI-1-46G8Sp6 RPCI-1 Homo sapiens genomic clone RPCI-1-46G8Sp6, genomic survey sequence.//3.5e-49:270:90//AQ275285

[13377] R-MAMMA1001038//Homo sapiens chromosome 3, olfactory receptor pseudogene cluster 1, complete sequence, and myosin light chain kinase (MLCK) pseudogene, partial sequence.//1.1e-41:285:87//AF042089

[13378] R-nnnnnnnnnnnn

[13379] R-MAMMA1001050//Homo sapiens genomic DNA, 237 kb segment from 6p21.3 region including HLA genes, WORKING DRAFT SEQUENCE.//1.3e-55:334:91//D84394

[13380] R-MAMMAI100059//Mouse RNA helicase and RNA-dependent ATPase from the DEAD box family mRNA, complete cds.//1.7e-51:481:77//L25125

[13381] R-MAMMA1001067//CIT-HSP-2371K20.TF CIT-HSP Homo sapiens genomic clone 2371K20, genomic survey sequence.//7.2e-65:346:95//AQ111326

[13382] R-MAMMA1001073

[13383] R-MAMMA1001074//Homo sapiens BAC clone NH0400010 from Y, complete sequence.//8.6e-33:457:69//AC006040

[13384] R-MAMMA1001075//Homo sapiens Chromosome 16 BAC clone CIT987SK-A-248F7, complete sequence.//0.15:325:62//AC004605

[13385] R-MAMMA1001078//Homo sapiens chromosome 5, BAC clone 203013 (LBNL H155), complete sequence.//1.6e-45:344:84//AC005609

[13386] R-MAMMA1100082//Human genomic DNA sequence from clone 30801 on chromosome Xp 11.3-11.4. Contains EST, CA repeat, STS, GSS, CpG island.//8.5e-15:413:64//Z93403

[13387] R-MAMMA1001091//Sequence 7 from patent U.S. Pat. No. 5,468,610.//0.0027:159:64//I15499

[13388] R-MAMMA1001092//Homo sapiens chromosome 17, clone hRPK.372_K_{—}20, complete sequence.//2.0e-51:267:82//AC005951

[13389] R-MAMMA1001105//Homo sapiens DNA sequence from PAC 119E23 on chromosome Xq25-q27.1. Contains glypican-3 precursor (intestinal protein OCI-5) (GTR2-2),5′UTR. ESTs, STS.//6.9e-22:178:85//Z99570

[13390] R-MAMMA1001110//Homo sapiens chromosome 17, clone HRPC1169K15, complete sequence.//3.0e-19:141:81//AC003963

[13391] R-MAMMA1001126//Human DNA from overlapping chromosome 7 PAC and P1 clones containing the XRCC2 gene, genomic sequence, complete sequence.//2.2e-46:462:75//AC003109

[13392] R-MAMMA100133//Human DNA sequence *** SEQUENCING IN PROGRESS * from clone 120G22, WORKING DRAFT SEQUENCE.//1.8e-68:455:86//AL031847

[13393] R-MAMMA1001139//Human DNA sequence *** SEQUENCING IN PROGRESS * from clone Y738F9, WORKING DRAFT SEQUENCE.//7.1e-09:100:84//AL022345

[13394] R-MAMMA1001143//Papio hamadryas lipoprotein lipase (LPL) gene, intron 7.//1.9e-49:362:85//U73684

[13395] R-MAMMA1001145//Homo sapiens chromosome 17, clone hRPK.235_I_{—}10, complete sequence.//9.5e-49:512:74//AC005922

[13396] R-MAMMA1001154//Homo sapiens Chromosome 16 BAC clone CIT987-SKA-88D1-complete genomic sequence, complete sequence.//1.5e-29:305:76//AC002289

[13397] R-MAMMA1001161//Human DNA sequence from clone 681J21 on chromosome 1q23.2-24.3 Contains CpG island, complete sequence.//1.1e-64:339:90//AL031286

[13398] R-MAMMA1001162//Human DNA from cosmid DNA MMDB (f140080) and MMDC (f13544) from chromosome 19q13.3 (obtained by automated sequence analysis).//3.4e-09:243:64//M89651

[13399] R-MAMMA1001181//Human Chromosome X clone bWXD173, WORKING DRAFT SEQUENCE, 2 ordered pieces.//3.7e-29:351:74//AC004387

[13400] R-MAMMA1001186//Homo sapiens chromosome 19, cosmid R28778, complete sequence.//2.2e-25:415:68//AC006125

[13401] R-MAMMA100191//Homo sapiens T-cell receptor alpha delta locus from bases 1000498 to 1071650 (section 5 of 5) of the Complete Nucleotide Sequence.//0.99:243:61//AE000662

[13402] R-MAMMA1001198//Mus musculus eps15R mRNA, complete cds.//8.0e-57:223:86//U29156

[13403] R-MAMMA1001202//Mus musculus clone OST13722, genomic survey sequence.//1.0e-30:220:85//AF046748

[13404] R-MAMMA1001203//Homo sapiens chromosome 17, clone hRPK.22_N_{—}12, WORKING DRAFT SEQUENCE, 2 ordered pieces.//8.9e-61:567:78//AC005412

[13405] R-MAMMA1001206//Homo sapiens chromosome 5, P1 clone 854b11 (LBNL H44), complete sequence.//4.6e-08:442:61//AC004763

[13406] R-MAMMA1001215//Homo sapiens chromosome 19, CIT-HSP BAC 470n8, complete sequence.//1.3e-117:564:97//AC005393

[13407] R-MAMMA1001220//HS-1023-A1-G10-MR.abi CIT Human Genomic Sperm Library C Homo sapiens genomic clone Plate=CT 802 Col=19 Row=M, genomic survey sequence.//6.0e-16:276:68//B33708

[13408] R-MAMMA1001222//Fl 7E 12TFB IGF Arabidopsis thaliana genomic clone F 17E 12, genomic survey sequence.//0.041:277:61//B97762

[13409] R-MAMMA1001243

[13410] R-MAMMA1001244//HS-1058-A2-G01-MF.abi CIT Human Genomic Sperm Library C Homo sapiens genomic clone Plate=CT 780 Col=2 Row=M, genomic survey sequence.//3.5e-05:104:74//B43862

[13411] R-MAMMA1001249//H. sapiens DNA for matrix attachment region.//0.0013:95:75//Z54221

[13412] R-MAMMA1001256//Human BAC clone GS 188P 18, complete sequence.//3.4e-32:356:74//AC000115

[13413] R-MAMMA1001259

[13414] R-MAMMA1001260//Homo sapiens mRNA for KIAA0661 protein, complete cds.//6.3e-20:226:75//AB014561

[13415] R-MAMMA1001268//Human DNA sequence from PAC 225D2 on chromosome Xq21. Contains ESTS, CA repeat.//1.1e-47:352:85//Z95124

[13416] R-MAMMA1001271

[13417] R-MAMMA1001274//H. sapiens DNA for trapped exon (ID HMC07C06), genomic survey sequence.//3.1e-40:232:93//X88457

[13418] R-MAMMA1001280//Homo sapiens full-length insert cDNA clone YW26C09.//1.9e-112:574:95//AF087976

[13419] R-MAMMA1001292//Human DNA sequence from clone 1170K4 on chromosome 22q12.2-13.1. Contains three novel genes, one of which codes for a Trypsin family protein with class A LDL receptor domains, and the IL2RB gene for Interleukin 2 Receptor, Beta (IL-2 Receptor, CD122 antigen). Contains a putative CpG island, ESTs, and GSSs, complete sequence.//2.9e-114:582:96//AL022314

[13420] R-MAMMA1001296//Human DNA sequence from PAC 487J7 on chromosome 6q21-22.1. Contains an unknown gene coding for three alternative mRNAs. Contains ESTs, STSs, a BAC end-sequence (GSS) and a CA repeat polymorphism.//1.9e-64:268:88//AL008730

[13421] R-MAMMA1001298//Homo sapiens chromosome 17, clone hRPK.849_N_{—}15, complete sequence.//1.5e-38:306:83//AC005703

[13422] R-MAMMA1001305//Human DNA sequence from PAC 127B20 on chromosome 22q11.2-qter, contains gene for GTPase-activating protein similar to rhoGAP protein ribosomal protein L6 pseudogene, ESTs and CA repeat.//1.5e-37:306:82//Z83838

[13423] R-MAMMA1001322//Homo sapiens DNA sequence from PAC 434014 on chromosome 1q32.3.-41. Contains the HSD11B1 gene for Hydroxysteroid (11-beta) Dehydrogenase 1, the ADORA2BP adenosine A2b receptor LIKE pseudogene, the IRF6 gene for Interferon Regulatory Factor 6 and two novel genes. Contains ESTs and GSSs, complete sequence.//2.4e-15:260:71//AL022398

[13424] R-MAMMA1001324//Homo sapiens chromosome 19, cosmid F23269, complete sequence.//4.0e-06:90:83//AC005614

[13425] R-MAMMA1001330//Human BAC clone RGO66D11 from 7q22, complete sequence.//1.4e-45:439:14//AC002430

[13426] R-MAMMAI1001341//Human DNA sequence from PAC 211D12 on chromosome 20q12-13.2. Contains Krs-2, K+channel protein, stress responsive.//1.3e-24:137:81//Z93016

[13427] R-MAMMA1001343//Human Chromosome 16 BAC clone CIT987SK-A-17E1, complete sequence.//5.4e-51:197:89//AC002041

[13428] R-MAMMA1001346//Homo sapiens Chromosome 16 BAC clone CIT987SK-A-233A8, complete sequence.//0.99:182:64//AC004685

[13429] R-MAMMA1001383//Homo sapiens clone 82F9, WORKING DRAFT SEQUENCE, 4 unordered pieces.//1.9e-42:303:86//AC004815

[13430] R-MAMMA1001388//Human DNA sequence *** SEQUENCING IN PROGRESS *** from clone 508115, WORKING DRAFT SEQUENCE.//1.5e-44:324:83//AL021707

[13431] R-MAMMA1001397//Homo sapiens genomic DNA, chromosome 21q11.1, segment 15/28, WORKING DRAFT SEQUENCE.//2.0e-39:254:89//AP000044

[13432] R-MAMMA1001408//Homo sapiens chromosome 12q24.1, WORKING DRAFT SEQUENCE, 33 unordered pieces.//9.4e-36:251:88//AC005805

[13433] R-MAMMA1001411//T1S5F-T7.1 TAMU Arabidopsis thaliana genomic clone T1SF1, genomic survey sequence.//1.0:98:71//AQ248928

[13434] R-MAMMA1001419//Homo sapiens translation initiation factor 4e mRNA, complete cds.//4.8e-18:117:96//AF038957

[13435] R-MAMMA1001420//Homo sapiens chromosome 5, PI clone 1041F10 (LBNL H88), complete sequence.//2.8e-09:377:63//AC005179

[13436] R-MAMMA1001435//S .pombe chromosome I cosmid c26H5.//1.0:356:59//Z99126

[13437] R-MAMMA1001442//Homo sapiens chromosome 4 clone B 150J4 map 4q25, complete sequence.//3.4e-17:259:72//AC004047

[13438] R-MAMMAI100446//Homo sapiens BAC clone RG139 P11 from 7q11-q21, complete sequence.//2.9e-17:231:71//AC004491

[13439] R-MAMMA1001452//Human DNA sequence from clone 452M16 on chromosome Xq21.1-21.33 Contains capping protein alpha subunit isoform I pseudogene, STS, GSS, and CA repeat, complete sequence.//6.1e-50:558:73//AL024493

[13440] R-MAMMA1001465//cSRL-2F3-u cSRL flow sorted Chromosome 11 specific cosmid Homo sapiens genomic clone cSRL-2F3, genomic survey sequence.//3.0e-23:141:96//B04295

[13441] R-MAMMA1001476//Mus musculus uridine kinase mRNA, partial cds.//3.4e-09:309:64//L31783

[13442] R-MAMMAI100487//Homo sapiens chromosome 17, clone hRPC.1108_L_{—}11, complete sequence.//5.1e-30:286:79//AC005206

[13443] R-MAMMA1001501

[13444] R-MAMMA1001502//Human DNA sequence *** SEQUENCING IN PROGRESS *** from clone 356B7, WORKING DRAFT SEQUENCE.//4.3e-19:349:64//AL031714

[13445] R-MAMMA1001510

[13446] R-MAMMA1001522//Homo sapiens chromosome 5, BAC clone 24h24 (LBNL H194), complete sequence.//1.5e-09:136:75//AC005352

[13447] R-MAMMA1001547//Human Chromosome X, complete sequence.//3.5e-40:300:84//AC002418

[13448] R-MAMMA1001551//Human DNA sequence from PAC 42616 on chromosome 1p34.1-1p35. Contains NIPP-1-like gene a nuclear inhibitor of protein phosphatase-1, ESTs, and a CA repeat.//1.1e-57:282:89//AL020997

[13449] R-MAMMA1001575

[13450] R-MAMMA1001576//Human gamma-tubulin mRNA, complete cds.//7.6e-60:530:78//M61764

[13451] R-MAMMA1001590//Homo sapiens Bruton's tyrosine kinase (BTK), alpha-D-galactosidase A (GLA), L44-like ribosomal protein (L44L) and FTP3 (FTP3) genes, complete cds.//1.3e-29:161:86//U78027

[13452] R-MAMMA1001600//Homo sapiens 12q24 PAC RPCII-66E7 (Roswell Park Cancer Institute Human PAC library) complete sequence.//2 .1e-18:390:66//AC004216

[13453] R-MAMMA1001604//Human DNA sequence from clone 1042K 10 on chromosome 22q13.1-13.2. Contains the ADSL gene for Adenylosuccinate lyase (EC 4.3.2.2, Adenylosuccinase, ASL) and 4 novel genes (one with probable rabGAP domains and Src homology domain 3). Contains ESTs, STSs, GSSs and a putative CpG island, complete sequence.//1.0:227:62//AL022238

[13454] R-MAMMA1001606//Human DNA sequence *** SEQUENCING IN PROGRESS *** from clone 228H13, WORKING DRAFT SEQUENCE.//1.3e-17:219:69//AL031985

[13455] R-MAMMA1001620//Human DNA sequence *** SEQUENCING IN PROGRESS *** from clone 1018D 12, WORKING DRAFT SEQUENCE.//2.1e-51:298:84//AL031650

[13456] R-MAMMA1001627//Human DNA sequence *** SEQUENCING IN PROGRESS *** from clone 229A8, WORKING DRAFT SEQUENCE.//7.8e-45:328:85//Z86090

[13457] R-MAMMA1001630//, complete sequence.//2.5e-08:170:72//AC005399

[13458] R-MAMMA1001633//Homo sapiens chromosome 10 clone CIT987SK-1057L21 map 10q25, complete sequence.//2.2e-21:241:70//AC005386

[13459] R-MAMMA1001635//Homo sapiens DNA sequence from PAC 230G1 on chromosome Xp 11.3. Contains EST, STS and GSS, complete sequence.//1.1e-32:346:74//Z84466

[13460] R-MAMMA1001649

[13461] R-MAMMA1001663//Homo sapiens clone 162B 15, complete sequence.//9.4e-68:267:89//AC004811

[13462] R-MAMMA1001670//Human DNA sequence from PAC 75N 13 on chromosome Xq21.1. Contains ZNF6 like gene, ESTs, STSs and CpG islands.//1.7e-49:322:88//Z82216

[13463] R-MAMMA1001671//Homo sapiens chromosome 19, cosmid F23269, complete sequence.//2.4e-114:575:96//AC005614

[13464] R-MAMMA1001679//CIT-HSP-2335N4.TF CIT-HSP Homo sapiens genomic clone 2335N4, genomic survey sequence.//2.4e-82:400:99//AQ037393

[13465] R-MAMMA1001683//Homo sapiens Chromosome 7 BAC Clone 239c10, WORKING DRAFT SEQUENCE, 9 unordered pieces.//5.7e-47:533:72//AC004166

[13466] R-MAMMA1001686//Homo sapiens chromosome 19, CIT-HSP-444n24, complete sequence.//6.6e-12:194:72//AC005261

[13467] R-MAMMA1001692//Human DNA sequence *** SEQUENCING IN PROGRESS *** from clone Y738F9, WORKING DRAFT SEQUENCE.//9.6e-44:414:77//AL022345

[13468] R-MAMMA1001711//Homo sapiens clone BAC 9H 13 chromosome 8 map 8q21, complete sequence.//3.1e-31:436:70//AF110324

[13469] R-MAMMA1001715//Human DNA sequence *** SEQUENCING IN PROGRESS *** from clone 73E16, WORKING DRAFT SEQUENCE.//8.8e-76:524:84//Z95330

[13470] R-MAMMA1001730

[13471] R-MAMMA1001735//Cricetulus griseus (chinese hamster) mRNA for beta tubulin (clone B9T), partial.//2.7e-13:382:63//X60786

[13472] R-MAMMA1001740//Homo sapiens genomic DNA, chromosome 21q11.1, segment 21/28, WORKING DRAFT SEQUENCE.//3.9e-47:318:87//AP000050

[13473] R-MAMMA1001743//Homo sapiens clone DJ0981007, complete sequence.//4.0e-108:566:95//AC006017

[13474] R-MAMMAI1001744

[13475] R-MAMMA1001745//Homo sapiens BAC clone 529Fl 1 from 8q21, complete sequence.//3.5e-113:564:97//AF070718

[13476] R-MAMMA1001751//Homo sapiens chromosome 19, cosmid R27328, complete sequence.//3.6e-30:312:75//AC005625

[13477] R-MAMMA1001754//Bos taurus vacuolar proton pump subunit SFD alpha isoform (SFD) mRNA, complete cds.//4.7e-34:320:77//AF041338

[13478] R-MAMMA1001757//Homo sapiens chromosome 17, clone hRPC.4_G_{—}17, complete sequence.//4.7e-10:244:67//AC003688

[13479] R-MAMMA1001760//RPCII 1-38L16.TV RPCI-11 Homo sapiens genomic clone RPCI-11-38L16, genomic survey sequence.//1.3e-10:236:64//AQ029432

[13480] R-MAMMA1001764//Plasmodium falciparum 3D7 chromosome 12 PFYACB8-420 genomic sequence, WORKING DRAFT SEQUENCE, 14 unordered pieces.//0.74:361:60//AC005140

[13481] R-MAMMA1001768//Homo sapiens chromosome 17, clone hRPK.147_L_{—}13, complete sequence.//1.6e-42:416:76//AC005332

[13482] R-MAMMA1001769//Homo sapiens chromosome 17, clone hRPC.1073_F_{—}15, complete sequence.//1.4e-13:129:83//AC004686

[13483] R-MAMMA1001771//M. musculus mRNA for semaphorin B.//1.1e-34:530:69//X85991

[13484] R-MAMMA1001783//Homo sapiens Chromosome 2 BAC Clone 376al, WORKING DRAFT SEQUENCE, 17 unordered pieces.//H1.1e-42:282:85//AC000360

[13485] R-MAMMA1001785//Human chromosome 16 p13.11 BAC clone CIT987SK-98H8 complete sequence.//3.0e-49:282:86//U91319

[13486] R-MAMMA1001788

[13487] R-MAMMA1001790//Homo sapiens clone DJ0876A24, WORKING DRAFT SEQUENCE, 6 unordered pieces.//9.8e-43:530:71//AC004913

[13488] R-MAMMA1001806//Homo sapiens Chromosome 16 BAC clone CIT987SK-A-319E8, complete sequence.//1.8e-43:324:79//AC004020

[13489] R-MAMMA1001812//Plasmodium falciparum chromosome 2, section 69 of 73 of the complete sequence.//0.65:183:63//AE001432

[13490] R-MAMMA1001815//Homo sapiens clone GS223D04, WORKING DRAFT SEQUENCE, 3 unordered pieces.//1.1e-10:417:62//AC005018

[13491] R-MAMMA1001817//Homo sapiens Xp22-83 BAC GSHB-324M7 (Genome Systems Human BAC Library) complete sequence.//2.6e-40:313:84//AC005859

[13492] R-MAMMA1001818

[13493] R-MAMMA1001820//Homo sapiens, WORKING DRAFT SEQUENCE, 52 unordered pieces.//2.2e-45:340:82//AC004086

[13494] R-MAMMA1001824//Homo sapiens clone DJ1107K15, WORKING DRAFT SEQUENCE, 8 unordered pieces.//1.9e-53:291:85//AC004966

[13495] R-MAMMA1001836//HS_{—}3164_B1_A02_MR CIT Approved Human Genomic Sperm Library D Homo sapiens genomic clone Plate=3164 Col=3 Row=B, genomic survey sequence.//6.5e-08:79:89//AQ185484

[13496] R-MAMMA1001837//Homo sapiens chromosome 19, overlapping cosmids Fl 8547, Fl 1133, R27945, R28830 and R32804, complete sequence.//8.4e-55:309:85//AC003682

[13497] R-MAMMA1001848//Homo sapiens PAC clone DJ0296G 17 from Xq23, complete sequence.//11.6e-16:125:90//AC006144

[13498] R-MAMMA1001851//Genomic sequence from Human 9q34, WORKING DRAFT SEQUENCE, 2 unordered pieces.//2.4e-50:516:74//AC002099

[13499] R-MAMMA1001854//Homo sapiens Chromosome 16 BAC clone CIT987SK-A-575C2, complete sequence.//1.7e-38:308:82//AC002425

[13500] R-MAMMA1001858//Human Xq133′ end of PAC 92E23 containing the X inactivation transcipt (XIST) gene, complete sequence.//6.5e-50:283:86//U80460

[13501] R-MAMMA1001864//Human Chromosome 15q26.1 PAC clone pDJ398g19, WORKING DRAFT SEQUENCE, 21 unordered pieces.//3.4e-36:224:86//AC005143

[13502] R-nnnnnnnnnnnn//Plasmodium falciparum chromosome 2, section 54 of 73 of the complete sequence.//1.4e-11:495:63//AE001417

[13503] R-MAMMA1001874//Human chromosome 1 BAC 308G1 genomic sequence, WORKING DRAFT SEQUENCE, 3 unordered pieces.//3.2e-42:446:76//AC003117

[13504] R-MAMMA1001878//Human DNA sequence from PAC 431A14 on chromosome 6p21. Contains CYCLOPHILIN (PEPTIDYLPROLYL ISOMERASE) like and CIPI (WAFI, CDKNAI, CDKNI, MDA-6, SDII, PICI, CAP20) genes. Contains probable GTPase and receptor genes and ESTs, STSs and CpG islands.//6.9e-44:391:78//Z85996

[13505] R-MAMMA1001880//Human DNA sequence from fosmid F77D 12 on chromosome 22q12-qter contains ESTs, tRNA.//1.3e-15:181:76//Z82097

[13506] R-MAMMA1001890//Homo sapiens Chromosome 16 BAC clone CIT987-SKA-670B5-complete genomic sequence, complete sequence.//1.7e-43:283:86//AC002303

[13507] R-MAMMA1001907//Human DNA sequence *** SEQUENCING IN PROGRESS *** from clone 385E7, WORKING DRAFT SEQUENCE.//1.4e-48:420:79//AL031720

[13508] R-nnnnnnnnnnnn//Saccharomyces cerevisiae chromosome IV cosmid 9481.//2.9e-14:505:60//U28373

[13509] R-MAMMA1001931//Homo sapiens NACP/alpha-synuclein gene, allele AO, intron 4, partial sequence.//0.51:162:63//AF041008

[13510] R-MAMMA1001956//Human DNA sequence *** SEQUENCING IN PROGRESS *** from clone 50024, WORKING DRAFT SEQUENCE.//1.4e-51:422:79//AL034380

[13511] R-MAMMA1001963//Homo sapiens clone HS19.3 Alu-Ya5 sequence.//1.9e-31:163:91//AF015149

[13512] R-MAMMA1001969//Human DNA from chromosome 19 cosmid F 19410, genomic sequence, complete sequence.//8.7e-10:186:76//AC002128

[13513] R-MAMMA1001970//Homo sapiens BAC clone BK085E05 from 22q12.1-qter, complete sequence.//1.0e-62:298:86//AC003071

[13514] R-MAMMA1001992//Human Chromosome 15q26.1 PAC clone pDJ460g16, WORKING DRAFT SEQUENCE, 3 unordered pieces.//1.8e-44:525:72//AC004581

[13515] R-MAMMA1002009//Human DNA sequence *** SEQUENCING IN PROGRESS * from clone 109G6, WORKING DRAFT SEQUENCE.//1.4e-43:282:79//AL023879

[13516] R-MAMMA1002011

[13517] R-MAMMA1002032//Human DNA sequence *** SEQUENCING IN PROGRESS * from clone 469D22, WORKING DRAFT SEQUENCE.//1.1e-39:310:84//AL031284

[13518] R-MAMMA1002033//Homo sapiens chromosome 5, Pac clone 162017 (LBNL H147), complete sequence.//2.5e-17:170:81//AC003954

[13519] R-MAMMA1002041//Homo sapiens PAC clone DJ0728D04, complete sequence.//8.7e-79:296:85//AC004865

[13520] R-MAMMA1002042//Human chromosome 16 BAC clone CIT987SK-A-962B4, complete sequence.//8.8e-46:386:80//U91318

[13521] R-MAMMA1002047//Human chromosome 16 BAC clone CIT987SK-A-962B4, complete sequence.//1.9e-32:326:75//U91318

[13522] R-MAMMA1002056//Homo sapiens chromosome 17, clone hRPK.506_H_{—}21, complete sequence.//6.6e-48:367:82//AC005962

[13523] R-MAMMA1002058//Homo sapiens clone RG038K21, WORKING DRAFT SEQUENCE, 3 unordered pieces.//0.25:139:69//AC005052

[13524] R-MAMMA1002068//Homo Sapiens Chromosome X clone bWXD171, WORKING DRAFT SEQUENCE, 1 ordered pieces.//2.2e-45:406:78//AC004676

[13525] R-MAMMA1002078//Homo sapiens chromosome 17, clone hRPK.401_{—}0_{—}9, complete sequence.//2.3e-22:357:64//AC005291

[13526] R-MAMMA1002082//Homo sapiens PAC clone 278CI9 from 12q, complete sequence.//2.5e-38:304:82//AC004263

[13527] R-MAMMA1002084//Human DNA sequence *** SEQUENCING IN PROGRESS *** from clone 1174N9, WORKING DRAFT SEQUENCE.//8.9e-41:319:83//AL031602

[13528] R-MAMMA1002093//CIT-HSP-2060J9.TF CIT-HSP Homo sapiens genomic clone 2060J9, genomic survey sequence.//9.7e-17:129:88//B69983

[13529] R-MAMMA1002108

[13530] R-MAMMA1002118//Human DNA sequence from cosmid E16C6, on chromosome 22 Contains ESTs, complete sequence.//0.94:168:64//Z73495

[13531] R-MAMMA1002125//Homo sapiens chromosome 17, clone hRPK.63_A_I, complete sequence.//4.8e-40:313:83//AC005670

[13532] R-MAMMA1002132//Homo sapiens PAC clone DJ1059M17 from 7q21-q31.1, complete sequence.//2.0e-70:461:83//AC004953

[13533] R-MAMMA1002140//Human DNA sequence from PAC 465G10 on chromosome X contains Menkes Disease (ATP7A) putative Cu++-transporting P-type ATPase exons 2 to 21, PGAM-B, ESTs.//1.1e-32:477:73//Z94801

[13534] R-MAMMA1002143//Homo sapiens platelet-activating factor acetylhydrolase gene, promoter region and exon 1.//6.6e-06:130:73//AF027357

[13535] R-MAMMA1002145//Human DNA sequence *** SEQUENCING IN PROGRESS *** from clone 126A5, WORKING DRAFT SEQUENCE.//6.0e-19:242:73//AL031447

[13536] R-MAMMA1002153//*** SEQUENCING IN PROGRESS *** Homo sapiens chromosome 4, BAC clone C0281M17; HTGS phase 1, WORKING DRAFT SEQUENCE, 3 unordered pieces.//2.1e-51:291:75//AC006052

[13537] R-MAMMA1002155//Human DNA sequence *** SEQUENCING IN PROGRESS *** from clone 608E8, WORKING DRAFT SEQUENCE.//1.2e-53:461:79//AL022343

[13538] R-MAMMA1002156//Homo sapiens PAC clone DJ 130H 16 from 22q12.1-qter, complete sequence.//5.1e-37:305:82//AC004997

[13539] R-MAMMA1002158//Human DNA sequence from clone 1049G16 on chromosome 20q12-13.2 Contains gene similar to GLUCOSAMINE-6-SULFATASE, a nuclear receptor coactivator gene, ESTs, STSs, GSSs, complete sequence.//8.1e-34:296:81//AL034418

[13540] R-MAMMA1002170//Human DNA sequence from clone 1163J1 on chromosome 22q13.2-13.33. Contains the 3′ part of a gene for the ortholog of mouse transmembrane receptor Celsr1, a novel gene for a protein similar to C. elegans B0035.16 and bacterial tRNA (5-Methylaminomethyl-2-thiouridylate)-Methyltransferases, and the 3′ part of a novel gene for a protein similar to mouse B99. Contains ESTs, GSSs and putative CpG islands, complete sequence.//7.9e-39:332:82//AL031588

[13541] R-MAMMA1002174//Homo sapiens chromosome 10 clone CIT987SK-1109PI 1, complete sequence.//4.4e-12:189:72//AC005871

[13542] R-MAMMA1002198//Homo sapiens clone DJO800GO7, complete sequence.//1.1e-48:338:81//AC004890

[13543] R-MAMMA1002209//Homo sapiens chromosome 17, clone hRPK.156_L_{—}14, complete sequence.//1.2e-23:269:74//AC005821

[13544] R-MAMMA1002215//Homo sapiens clone GS250N06, WORKING DRAFT SEQUENCE, 5 unordered pieces.//3.2e-12:243:68//AC005158

[13545] R-MAMMA1002219//Homo sapiens 12p 13.3 RPCI4-773N5 (Roswell Park Cancer Institute Human PAC library) complete sequence.//3.3e-45:295:88//AC004802

[13546] R-MAMMA1002230//Human DNA sequence *** SEQUENCING IN PROGRESS *** from clone 423B22, WORKING DRAFT SEQUENCE.//7.3e-41:385:78//AL034379

[13547] R-MAMMA1002236//Rattus norvegicus initiation factor eIF-2B gamma subunit (eIF-2B gamma) mRNA, complete cds.//7.3e-45:363:79//U38253

[13548] R-MAMMA1002243//Homo sapiens chromosome 17, clone hRPK.112_H_{—}10, complete sequence.//2.8e-119:582:98//AC005666

[13549] R-MAMMA1002250//Homo sapiens chromosome 16, P1 clone 109-9G (LANL), complete sequence.//4.7e-42:319:84//AC005600

[13550] R-MAMMA1002267//Homo sapiens chromosome 17, clone hRPK.346_K 10, complete sequence.//1.5e-33:571:67//AC006120

[13551] R-MAMMA1002268//Mus musculus sphingosine kinase (SPHKIb) mRNA, complete cds.//2.3e-35:462:70//AF068749

[13552] R-MAMMA1002269//345117.TV CIT978SKA1 Homo sapiens genomic clone A-345117, genomic survey sequence.//4.7e-05:153:69//B15590

[13553] R-MAMMA1002282//Human DNA sequence *** SEQUENCING IN PROGRESS *** from clone 112K5, WORKING DRAFT SEQUENCE.//8.5e-37:467:71//Z85987

[13554] R-MAMMA1002292//Hordeum vulgare lipoxygenase 2 (LoxC) mRNA, complete cds.//0.074:178:61//L37358

[13555] R-MAMMA1002293//Homo sapiens chromosome 16, cosmid clone RT167 (LANL), complete sequence.//5.8e-26:355:71//AC005568

[13556] R-MAMMA1002294//Homo sapiens chromosome 17, clone hRPC.1110_E_{—}20, complete sequence.//1.2e-35:281:82//AC004231

[13557] R-MAMMA1002297//Human DNA sequence from cosmid L174G8, Huntington's Disease Region, chromosome 4 p16.3.//6.7e-48:381:80//Z69375

[13558] R-MAMMA1002298//Homo sapiens BAC clone RG208H19 from 7q11.23, complete sequence.//1.8e-17:296:70//AC005074

[13559] R-MAMMA1002299//HS_{—}3116_A2_F07_T7 CIT Approved Human Genomic Sperm Library D Homo sapiens genomic clone Plate=3116 Col=14 Row=K, genomic survey sequence.//4.1e-60:354:91//AQ140526

[13560] R-MAMMA1002308

[13561] R-MAMMA1002310//Human DNA sequence from cosmid B10B1 on chromosome 22 Contains ESTs, CA repeat and STS, complete sequence.//9.9e-35:283:83//Z73979

[13562] R-MAMMA1002311//Homo sapiens Xp22-150 BAC GSHB-309P15 (Genome Systems Human BAC Library) complete sequence.//1.3e-86:503:90//AC006210

[13563] R-MAMMA1002312//H. sapiens gene encoding La autoantigen.//1.3e-23:382:67//X97869

[13564] R-MAMMA1002317//Human DNA sequence from clone 48G12 on chromosome Xq27.1-27.3. Contains STSs and GSSs, complete sequence.//1.3e-59:323:87//AL031054

[13565] R-MAMMA1002319//Homo sapiens chromosome 19, fosmid 39347, complete sequence.//2.2e-106:522:98//AC005756

[13566] R-MAMMA1002322//Homo sapiens genomic DNA, chromosome 21q11.1, segment 13/28, WORKING DRAFT SEQUENCE.//2.3e-48:452:76//AP000042

[13567] R-MAMMA1002329//M. musculus mRNA for semaphorin B.//2.0e-12:210:73//X85991

[13568] R-MAMMA1002332//Homo sapiens PAC clone DJ1139101 from Xq23, complete sequence.//3.4e-46:393:71//AC004973

[13569] R-MAMMA1002333//HS_{—}3245_A1_B04_MR CIT Approved Human Genomic Sperm Library D Homo sapiens genomic clone Plate=3245 Col=7 Row=C, genomic survey sequence.//3.1e-21:146:92//AQ205759

[13570] R-MAMMA1002339//Human Chromosome 16 BAC clone CIT987SK-A-270G1, complete sequence.//9.7e-39:310:79//AF001549

[13571] R-MAMMA1002347//Homo sapiens 12q24.1 PAC RPCI3-305120 (Roswell Park Cancer Institute Human PAC Library) complete sequence.//1.2e-46:443:76//AC006088

[13572] R-MAMMA1002351//Human DNA sequence *** SEQUENCING IN PROGRESS *** from clone 1059H15, WORKING DRAFT SEQUENCE.//1.1e-90:553:89//AL022100

[13573] R-MAMMA1002352//Homo sapiens mRNA for leukemia associated gene 2.//8.8e-81:388:92//Y15228

[13574] R-MAMMA1002353//Homo sapiens 12q24 BAC RPCII 1-162P23 (Roswell Park Cancer Institute Human BAC library) complete sequence.//5.5e-35:302:80//AC002996

[13575] R-MAMMA1002355//Human DNA sequence *** SEQUENCING IN PROGRESS *** from clone 222E13, WORKING DRAFT SEQUENCE.//5.4e-52:361:76//Z93241

[13576] R-MAMMA1002356//Homo sapiens chromosome 17, clone hRPC.842_A_{—}23, complete sequence.//8.3e-28:187:91//AC004662

[13577] R-MAMMA1002359//Human DNA sequence from cosmid LiI 8D5, Huntington's Disease Region, chromosome 4p 16.3 contains CpG islands.//6.3e-47:297:85//Z68869

[13578] R-MAMMA1002360//HSS_{—}2163_B2_C08_MR CIT Approved Human Genomic Sperm Library D Homo sapiens genomic clone Plate=2163 Col=16 Row=F, genomic survey sequence./1.5e-20:374:66//AQ125213

[13579] R-MAMMA1002361//Human DNA sequence $** SEQUENCING IN PROGRESS *** from clone 349A12, WORKING DRAFT SEQUENCE.//2.2e-35:264:85//AL033520

[13580] R-MAMMA1002362//H. sapiens PEX gene.//1.8e-40:243:86//Y10196

[13581] R-MAMMA1002380//RPCII 1-73J4.TJ RPCII 1 Homo sapiens genomic clone R-73J4, genomic survey sequence.//1.7e-38:295:77//AQ268168

[13582] R-MAMMA1002384//Homo sapiens 12q13.1 PAC RPCII-228P16 (Roswell Park Cancer Institute Human PAC Library) complete sequence.//2.5e-37:311:81//AC004801

[13583] R-MAMMA1002385

[13584] R-MAMMA1002392//Human BAC clone RGO66D11 from 7q22, complete sequence.//2.0e-37:365:77//AC002430

[13585] R-MAMMA1002411//Human DNA sequence *** SEQUENCING IN PROGRESS *** from clone 64K7, WORKING DRAFT SEQUENCE.//9.4e-22:496:65//AL031668

[13586] R-MAMMA1002413//Homo sapiens 12q24.2 PAC RPCII -157K6 (Roswell Park Cancer Institute Human PAC library) complete sequence.//2.3e-15:153:77//AC005146

[13587] R-MAMMA1002417//Human DNA sequence from PAC 42616 on chromosome 1p34.1-1p35. Contains NIPP-1-like gene a nuclear inhibitor of protein phosphatase-1, ESTs, and a CA repeat.//1.8e-23:508:62//AL020997

[13588] R-MAMMA1002427//Human Chromosome 16 BAC clone CIT987SK-A-363E6, complete sequence.//2.5e-37:288:84//U91321

[13589] R-MAMMA1002428//Human DNA sequence *** SEQUENCING IN PROGRESS *** from clone 1185N5, WORKING DRAFT SEQUENCE.//6.0e-05:130:75//AL034423

[13590] R-MAMMA1002434//Homo sapiens DNA sequence from PAC 380E11 on chromosome 6p22.3-p24. Contains HB15 gene, ESTs, CA repeat, STS and GSS.//4.8e-18:205:78//AL022396

[13591] R-MAMMA1002446//CIT-HSP-2021L14.TR CIT-HSP Homo sapiens genomic clone 2021L14, genomic survey sequence.//4.6e-41:387:72//B65379

[13592] R-MAMMA1002454//Homo sapiens chromosome 19, cosmid F23259, complete sequence.//1.2e-67:491:82//AC005512

[13593] R-MAMMA1002461//Homo sapiens PAC clone 166H1 from 12q, complete sequence.//1.4e-28:188:85//AC003982

[13594] R-MAMMA1002470//Saccharomyces cerevisiae chromosome VIII cosmid 9205.//6.3e-09:280:61//U10556

[13595] R-MAMMA1002475//Human DNA sequence from PAC 306DI on chromosome X contains ESTs.//1.5e-25:310:74//Z83822

[13596] R-MAMMA1002480//Homo sapiens clone RG228D17, WORKING DRAFT SEQUENCE, 2 unordered pieces.//1.2e-98:533:93//AC005077

[13597] R-MAMMA1002485//Homo sapiens stanniocalcin-2 (STC-2) mRNA, complete cds.//2.7e-114:560:97//AF055460

[13598] R-MAMMA1002494//Human DNA sequence from cosmid L174G8, Huntington's Disease Region, chromosome 4p 16.3.//2.1e-46:329:84//Z69375

[13599] R-MAMMA1002498//Rat mRNA.//0.0068:223:64//M59859

[13600] R-MAMMA1002524//Plasmodium falciparum 3D7 chromosome 12 PFYAC336 genomic sequence, WORKING DRAFT SEQUENCE, 5 unordered pieces.//0.012:460:60//AC005139

[13601] R-MAMMA1002530//Homo sapiens cytosolic phospholipase A2 gamma (cPLA2 gamma) mRNA, complete cds.//1.2e-101:529:95//AF065214

[13602] R-MAMMA1002545//Homo sapiens ribosomal protein s4 Y isoform gene, complete cds.//6.6e-50:471:77//AF041427

[13603] R-MAMMA1002554//Homo sapiens chromosome 4 clone B227H22 map 4q25, complete sequence.//5.7e-38:279:84//AC004056

[13604] R-MAMMA1002556//Homo sapiens chromosome 10 clone CIT-HSP-1255F20 map 10p11.2-10 p12.1, complete sequence.//9.6e-13:237:67//AC005878

[13605] R-MAMMA1002566//CITB1-E1-2509P21.TR CITB1-E1 Homo sapiens genomic clone 2509P21, genomic survey sequence.//9.7e-14:216:73//AQ261427

[13606] R-MAMMA1002571//CITBI-EI-2516L21.TF CITBI-EI Homo sapiens genomic clone 2516L21, genomic survey sequence.//4.6e-25:142:99//AQ279542

[13607] R-MAMMA1002573//Human DNA sequence *** SEQUENCING IN PROGRESS *** from clone 811H13, WORKING DRAFT SEQUENCE.//1.1e-30:250:82//AL023805

[13608] R-MAMMA1002585//Rabbit angiotensin-converting enzyme (ACE) gene, 5′ end.//1.0:196:61//M58580

[13609] R-MAMMA1002590//H. sapiens CpG island DNA genomic Mse1 fragment, clone 8d5, forward read cpg8d5.f1g.//1.0:114:64//Z63758

[13610] R-MAMMA1002597//Human DNA sequence *** SEQUENCING IN PROGRESS * from clone 1103G7, WORKING DRAFT SEQUENCE.//9.0e-96:459:98//AL034548

[13611] R-MAMMA1002598//Human DNA sequence *** SEQUENCING IN PROGRESS * from clone 120G22, WORKING DRAFT SEQUENCE.//0.79:362:58//AL031847

[13612] R-MAMMA1002603//Homo sapiens chromosome 17, clone hRPK.214_C-8, complete sequence.//1.3e-46:333:80//AC005803

[13613] R-MAMMA1002612//Human DNA sequence *** SEQUENCING IN PROGRESS * from clone 269M 15, WORKING DRAFT SEQUENCE.//7.4e-41:283:86//AL021395

[13614] R-MAMMA1002617//Human DNA sequence *** SEQUENCING IN PROGRESS * from clone 591N18, WORKING DRAFT SEQUENCE.//1.7e-20:308:71//AL031594

[13615] R-MAMMA1002618//Homo sapiens clone RG122E10, complete sequence.//1.2e-31:230:76//AC005067

[13616] R-MAMMA1002619//Homo sapiens chromosome 21 PAC RPCIP704E14135Q2.//9.0e-113:551:98//AJ010598

[13617] R-MAMMA1002622//Homo sapiens chromosome 4 clone B207D4 map 4q25, complete sequence.//2.8e-43:324:83//AC004050

[13618] R-MAMMA1002623//Homo sapiens chromosome 17, clone hRPC.1171_I_{—}10, complete sequence.//2.7e-80:344:84//AC004687

[13619] R-MAMMA1002625//Human DNA sequence *** SEQUENCING IN PROGRESS *** from clone 1056L3, WORKING DRAFT SEQUENCE.//2.6e-34:391:72//AL031727

[13620] R-MAMMA1002629//Human DNA from overlapping chromosome 19-specific cosmids R32543, and F15613 containing ZNF gene family member, genomic sequence, complete sequence.//5.5e-58:346:81//AC003006

[13621] R-MAMMA1002636//Homo sapiens clone DJ0810EO6, WORKING DRAFT SEQUENCE, 8 unordered pieces.//1.1e-52:285:92//AC004895

[13622] R-MAMMA1002637//Mus musculus kinesin light chain 2 (Klc2) mRNA, complete cds.//2.1e-13:359:64//AF055666

[13623] R-MAMMA1002646//Human DNA sequence *** SEQUENCING IN PROGRESS *** from clone 39417, WORKING DRAFT SEQUENCE.//2.5e-24:285:68//AL023585

[13624] R-MAMMA1002650//Human IGF-II gene exon 2 for insulin-like growth factor II located on chromosome II.//0.64:237:61//X03424

[13625] R-MAMMA1002655//Homo sapiens minisatellite ceb1 repeat region.//0.18:152:65//AF048727

[13626] R-MAMMA1002662//Homo sapiens clone DJ0739M23, complete sequence.//2.5e-46:370:82//AC004870

[13627] R-MAMMA1002665//Human DNA sequence from PAC 435C23 on chromosome X. Contains ESTs.//7.4e-55:298:92//Z92844

[13628] R-MAMMA1002671//RPCII 1-45M10.TK RPCII 1 Homo sapiens genomic clone R-45M10, genomic survey sequence.//0.99:151:66//AQ194411

[13629] R-MAMMA1002673//Homo sapiens DNA sequence from PAC 454M7 on chromosome Xq25-26.3. Contains the OCRLI gene for Lowe Oculocerebrorenal Syndrome protein OCRL-1. Contains ESTs, STSs and GSSs, complete sequence.//3.1e-38:410:76//AL022162

[13630] R-MAMMA1002684//Homo sapiens mRNA for KIAA0214 protein, complete cds.//1.4e-107:544:96//D86987

[13631] R-MAMMA1002685//HS_{—}2052_A1_H02_T7 CIT Approved Human Genomic Sperm Library D Homo sapiens genomic clone Plate=2052 Col=3 Row=O, genomic survey sequence.//1.2e-23:255:7511AQ231087

[13632] R-MAMMA1002698//Homo sapiens Xp22-132-134 BAC GSHB-590J15 (Genome Systems Human BAC library) complete sequence.//1.1e-38:299:83//AC004673

[13633] R-MAMMA1002699//Mus musculus intersectin-EH binding protein 1bp1 mRNA, partial cds.//3.3e-05:61:93//AF057285

[13634] R-MAMMA1002701//Homo sapiens gene for AF-6, complete cds.//3.5e-39:317:81//AB011399

[13635] R-MAMMA1002708//Homo sapiens 12 p13.3 PAC RPCI5-977LI (Roswell Park Cancer Institute Human PAC library) complete sequence.//0.26:365:62//AC005293

[13636] R-MAMMA1002711//Homo sapiens chromosome 21 PAC LLNLP704F18108Q13.//2.5e-31:304:77//AJ006995

[13637] R-MAMMA1002721//Human DNA sequence *** SEQUENCING IN PROGRESS *** from clone 473B4, WORKING DRAFT SEQUENCE.//2.3e-40:279:87//Z83826

[13638] R-MAMMA1002727//Plasmodium falciparum 3D7 chromosome 12 PFYAC588 genomic sequence, WORKING DRAFT SEQUENCE, 2 unordered pieces.//0.45:183:64//AC004710

[13639] R-MAMMA1002728//Human Chromosome 11 Overlapping Cosmids cSRL72g7 and cSRL140b8, complete sequence.//1.1e-42:410:74//AC002037

[13640] R-MAMMA1002744//Human chromosome 8 BAC clone CIT987SK-2A8 complete sequence.//1.6e-19:473:63//U96629

[13641] R-MAMMA1002746//Homo sapiens chromosome 17, clone hRPK.136_H_{—}19, complete sequence.//2.2e-108:544:97//AC005856

[13642] R-MAMMA1002748//Homo sapiens 3p22 Contig 7 PAC RPCI4-672N11 (Roswell Park Cancer Institute Human PAC Library) complete sequence.//5.9e-106:551:95//AC006055

[13643] R-MAMMA1002754//Homo sapiens clone GS259H13, WORKING DRAFT SEQUENCE, 4 unordered pieces.//1.7e-34:305:79//AC005020

[13644] R-MAMMA1002758//Homo sapiens ccr2b (ccr2), ccr2a (ccr2), ccr5 (ccr5) and ccr6 (ccr6) genes, complete cds, and lactoferrin (lactoferrin) gene, partial cds, complete sequence.//0.00014:130:74//U95626

[13645] R-MAMMA1002764//Homo sapiens chromosome 19, cosmid R33632, complete sequence.//8.7e-10:118:81//AC005781

[13646] R-MAMMA1002765//Homo sapiens chromosome 19, cosmid F20900, complete sequence.//1.2e-31:290:78//AC006128

[13647] R-MAMMA1002769//Human DNA sequence from PAC 36J3, between markers DXS1192 and DXS102 on chromosome X.//0.94:260:62//Z82975

[13648] R-MAMMA1002780//Human DNA sequence *** SEQUENCING IN PROGRESS * from clone 620EI 1, WORKING DRAFT SEQUENCE.//2.6e-21:529:62//AL031667

[13649] R-MAMMA1002782//Human DNA sequence *** SEQUENCING IN PROGRESS * from clone 199H16, WORKING DRAFT SEQUENCE.//2.8e-30:234:72//AL022320

[13650] R-MAMMA1002796//Human DNA sequence *** SEQUENCING IN PROGRESS *** from clone 237J2, WORKING DRAFT SEQUENCE.//1.0:155:66//AL021394

[13651] R-MAMMA1002807//Human DNA sequence from BAC 941F9 on chromosome 22q11.2-qter. Contains ESTs, STSs and 3′ part of FIBULIN-1D PRECURSOR like gene, part of a Brain Protein E46 like gene and a CpG island, complete sequence.//5.0e-42:443:75//Z95331

[13652] R-MAMMA1002820//345M16.TVB CIT978SKA1 Homo sapiens genomic clone A-345M16, genomic survey sequence.//1.3e-14:95:87//B17487

[13653] R-MAMMA1002830//Human PAC clone DJ515N1 from 22q11.2-q22, complete sequence.//4.1e-20:223:74//AC002073

[13654] R-MAMMA1002833//Homo sapiens Xp22 bins 3-5 PAC RPCI4-617A9 (Roswell Park Cancer Institute Human PAC Library) containing Arylsulfatase D and E genes, complete sequence.//1.8e-37:295:84//AC005295

[13655] R-MAMMA1002835

[13656] R-MAMMA1002838//Human gene hY3 encoding a cytoplasmic Ro RNA.//4.4e-14:108:92//V00585

[13657] R-MAMMA1002842//CIT-HSP-2017022.TRB CIT-HSP Homo sapiens genomic clone 2017022, genomic survey sequence.//5.2e-43:168:85//B67141

[13658] R-MAMMA1002843//Homo sapiens clone GS051M12, complete sequence.//8.7e-44:525:71//AC005007

[13659] R-MAMMA1002844

[13660] R-MAMMA1002858//H. sapiens ERF-1 mRNA 3′ end.//2.8e-99:361:91//X79067

[13661] R-MAMMA1002868//Homo sapiens clone DJ0852024, WORKING DRAFT SEQUENCE, 2 unordered pieces.//9.6e-39:288:81//AC004906

[13662] R-MAMMA1002871//Homo sapiens BAC clone NH0539B24 from 7 p15.1-p14, complete sequence.//0.0022:490:57//AC006044

[13663] R-MAMMA1002880//Homo sapiens Xp22 Bins 35-37 BAC GSHB-214D18 (Genome Systems Human BAC Library) complete sequence.//1.3e-09:143:76//AC005296

[13664] R-MAMMA1002881//Human thymopoietin (TMPO) gene, partial exon 6, complete exon 7, partial exon 8, and partial cds for thymopoietin beta.//5.1e-41:264:87//U18271

[13665] R-MAMMA1002886//Homo sapiens DNA sequence from PAC 168L15 on chromosome 6q26-27. Contains RSK3 gene, ribosomal protein S6 kinase, EST, GSS, STS. CpG island, complete sequence.//4.7e-32:216:90//AL022069

[13666] R-MAMMA1002887

[13667] R-MAMMA1002890 3.4e-49:376:81//AG006257

[13668] R-MAMMA1002892//Homo sapiens PAC clone DJ0765G07 from 7q11, complete sequence.//6.0e-60:344:79//AC004881

[13669] R-MAMMA1002895//RPCII 1-90K13.TV RPCII 1 Homo sapiens genomic clone R-90K13, genomic survey sequence.//2.1e-34:300:77//AQ283502

[13670] R-MAMMA1002908//Human Chromosome X, complete sequence.//4.2e-39:297:85//AC004070

[13671] R-MAMMA1002909//*** SEQUENCING IN PROGRESS *** Homo sapiens chromosome 4, BAC clone C0442P12; HTGS phase 1, WORKING DRAFT SEQUENCE, 5 unordered pieces.//3.4e-23:344:74//AC005798

[13672] R-MAMMA1002930//Homo sapiens PAC clone DJ1048B16 from 7q34-q36, complete sequence.//5.2e-39:261:88//AC006019

[13673] R-MAMMA1002938//C. pasteurianum gap gene.//1.0:343:59//X72219

[13674] R-MAMMA1002941//Homo sapiens chromosome 17, clone hRPK.346_K 10, complete sequence.//6.3e-88:556:87//AC006120

[13675] R-MAMMA1002947 0.48:156:69//AC005469

[13676] R-MAMMA1002964//Human DNA sequence from PAC 42616 on chromosome Ip34.1-1p35. Contains NIPP-1-like gene a nuclear inhibitor of protein phosphatase-1, ESTs, and a CA repeat.//1.2e-39:473:73//AL020997

[13677] R-MAMMA1002970//Homo sapiens chromosome 5, PI clone 793c5 (LBNL H57), complete sequence.//4.7e-47:420:77//AC005200

[13678] R-MAMMA1002972//alpha 1 syntrophin [human, mRNA Partial, 1771 nt].//0.97:305:62//S81737

[13679] R-MAMMA1002973//Human DNA sequence from cosmid V210E9, between markers DXS366 and DXS87 on chromosome X.//2.6e-35:256:85//Z70280

[13680] R-MAMMA1002982

[13681] 1.0e-27:110:85//AG005524

[13682] R-MAMMA1002987//Homo sapiens PAC clone DJI086D14, complete sequence.//1.4e-28:527:66//AC004460

[13683] R-MAMMA1003003//Homo sapiens chromosome 10 clone CR1-JC2059 map 10q24.1-10q24.2, WORKING DRAFT SEQUENCE, I ordered pieces.//7.9e-48:418:78//AC006109

[13684] R-MAMMA1003004//, complete sequence.//2.0e-12:442:61//AC005406

[13685] R-MAMMA1003007//Homo sapiens chromosome 10 clone CR1-JC2059 map 10q24.1-10q24.2, WORKING DRAFT SEQUENCE, I ordered pieces.//1.7e-48:293:91//AC006109

[13686] R-MAMMA1003011//A-306G8.TP CIT978SK Homo sapiens genomic clone A-306G8, genomic survey sequence.//0.45:168:64//B18092

[13687] R-MAMMA1003015//Homo sapiens chromosome 5p, BAC clone 50g21 (LBNL HI 54), complete sequence.//2.9e-44:399:77//AC005740

[13688] R-MAMMA1003019//RPCI11-9J9.TV RPCI-11 Homo sapiens genomic clone RPCI-11-9J9, genomic survey sequence.//2.7e-14:294:68//B71583

[13689] R-MAMMA1003026//HS_{—}2166_B2_C12_MF CIT Approved Human Genomic Sperm Library D Homo sapiens genomic clone Plate=2166 Col=24 Row=F, genomic survey sequence.//0.021:189:64//AQ125639

[13690] R-MAMMA1003031//Homo sapiens chromosome 5, BAC clone 319C17 (LBNL H159), complete sequence.//1.8e-98:525:95//AC005214

[13691] R-MAMMA1003035//Homo sapiens 12q13.1 Cosmid C174F5 (Lawrence Livermore LL12NCO1 or LL12NC02 human cosmid libraries) complete sequence.//6.7e-06:297:63//AC004550

[13692] R-MAMMA1003039//RPCII 1-56J17.TJ RPCI11 Homo sapiens genomic clone R-56J17, genomic survey sequence.//0.21:375:59//AQ081889

[13693] R-MAMMA1003040//Human DNA sequence from cosmid L108f12, Huntington's Disease Region, chromosome 4 p16.3.//2.7e-29:298:67//Z49235

[13694] R-MAMMA1003044//Homo sapiens chromosome 19, cosmid R30676, complete sequence.//2.9e-14:113:91//AC004560

[13695] R-MAMMA1003047

[13696] R-MAMMA1003049

[13697] R-MAMMA1003055//Human DNA sequence *** SEQUENCING IN PROGRESS * from clone 377F16, WORKING DRAFT SEQUENCE.//2.3e-45:317:86//Z93783

[13698] R-MAMMA1003056//Homo sapiens chromosome 19, cosmid R34275, complete sequence.//1.0:229:63//AC005305

[13699] R-MAMMA1003057//M. domesticus MD6 mRNA.//6.2e-42:326:82//X54352

[13700] R-MAMMA1003066//Human DNA sequence *** SEQUENCING IN PROGRESS *** from clone 473B4, WORKING DRAFT SEQUENCE.//3.1e-49:299:87//Z83826

[13701] R-MAMMA1003089//Homo sapiens BAC clone RG298G08 from 7 p15-p21, complete sequence.//2.7e-30:520:67//AC005084

[13702] R-MAMMA1003099//RPCI11-8N9.TP RPCI-11 Homo sapiens genomic clone RPCI-11-8N9, genomic survey sequence.//4.2e-44:338:82/1/B71494

[13703] R-MAMMA1003104//Mus musculus rostral cerebellar malformation protein (rcm) mRNA, complete cds.//3.4e-48:423:79//U72634

[13704] R-MAMMA1003113//Homo sapiens chromosome 12 p13.3 clone RPCI11-433J6, WORKING DRAFT SEQUENCE, 100 unordered pieces.//4.8e-114:567:97//AC006087

[13705] R-MAMMA1003127//Human DNA sequence *** SEQUENCING IN PROGRESS *** from clone 250D10, WORKING DRAFT SEQUENCE.//1.4e-34:283:83//Z99716

[13706] R-MAMMA1003135//P. knowlesi Mbn-cutting sites in lambda KBS50.//0.010:243:62//M38776

[13707] R-MAMMA1003140//Homo sapiens chromosome 17, clone HClT87G17, complete sequence.//6.7e-34:288:81//AC003663

[13708] R-MAMMA1003146//Saccharomyces douglasii mitochondrial cytochrome c oxidase subunit I (COXI) gene, complete cds.//4.8e-08:438:59//M97514

[13709] R-nnnnnnnnnnnn/Human DNA sequence *** SEQUENCING IN PROGRESS *** from clone 598F2, WORKING DRAFT SEQUENCE.//1.7e-63:149:94//AL021579

[13710] R-MAMMA1003166//HS_{—}3128_A1_B01_MR CIT Approved Human Genomic Sperm Library D Homo sapiens genomic clone Plate=3128 Col=1 Row=C, genomic survey sequence.//3.0e-17:261:70//AQ140766

[13711] R-NT2RM2002580//Homo sapiens clone 24781 mRNA sequence.//2.6e-111:593:94//AF070640

[13712] R-NT2RM4000024

[13713] R-NT2RM4000027//Homo sapiens PAC clone DJ 1194E 14 from 7p21, complete sequence.//0.026:476:56//AC004993

[13714] R-NT2RM4000030//Mus musculus musculus sex determining protein (Sry) gene, complete cds.//0.00044:378:59//U70653

[13715] R-NT2RM4000046//M. mulatta MHC DR beta 6 gene encoding major histocompatibility complex.//0.27:130:64//Z26239

[13716] R-NT2RM4000061

[13717] R-NT2RM4000085//Homo sapiens clone 24700 unknown mRNA, partial cds.//7.2e-112:550:97//AF070639

[13718] R-NT2RM4000086//RPCI11-6J23.TV RPCI-11 Homo sapiens genomic clone RPCI-11-6J23, genomic survey sequence.//7.2e-18:277:71//B49463

[13719] R-NT2RM4000104//F. rubripes GSS sequence, clone 063K10aG5, genomic survey sequence.//3.6e-08:287:61//Z88817

[13720] R-NT2RM4000139//Homo sapiens chromosome 16, cosmid clone 330D11 (LANL), complete sequence.//9.4e-08:336:65//AC005199

[13721] R-NT2RM4000155

[13722] R-NT2RM4000156//Homo sapiens chromosome 17, clone hRPK.136_H_{—}19, complete sequence.//3.4e-23:335:72//AC005856

[13723] R-nnnnnnnnnnnn//Mouse kif4 mRNA for microtubule-based motor protein KIF4, complete cds.//1.6e-87:551:87//D12646

[13724] R-NT2RM4000169//Human ribosomal protein L37a mRNA sequence.//5.9e-14:122:88//L22154

[13725] R-NT2RM4000191

[13726] R-NT2RM4000197//HS_{—}3241_A2_H05_MR CIT Approved Human Genomic Sperm Library D Homo sapiens genomic clone Plate=3241 Col=10 Row=O, genomic survey sequence.//2.8e-86:430:97//AQ206812

[13727] R-NT2RM4000199//Mus musculus Yp BAC GSMB-368G7 (Genome Systems Mouse BAC Library) complete sequence.//0.0047:193:63//AC006056

[13728] R-NT2RM4000200

[13729] R-NT2RM4000202//Homo sapiens chromosome 16, cosmid clone 378E2 (LANL), complete sequence.//2.1e-40:334:76//AC004035

[13730] R-NT2RM4000210//Homo sapiens mRNA for KIAA0712 protein, complete cds.//5.2e-102:546:94//AB018255

[13731] R-NT2RM4000215

[13732] R-nnnnnnnnnnnn//Homo sapiens chromosome 10 clone CIT987SK-1144G6 map 10q25.1, complete sequence.//2.1e-55:303:86//AC005383

[13733] R-NT2RM4000233//Struthio camelus microsatellite sequence OSM 7.//1.2e-07:198:67//AF003735

[13734] R-NT2RM4000244//Homo sapiens chromosome 19, BAC CIT-B-393i 15 (BC301323), complete sequence.//1.7e-49:322:88//AC006116

[13735] R-NT2RM4000251//Homo sapiens Chromosome 22q11.2 BAC Clone 72f8 In DGCR Region, complete sequence.//0.97:184:66//AC000085

[13736] R-NT2RM4000265//Human PAC clone DJO73F11 from Xq23, complete sequence.//6.2e-66:552:78//AC000055

[13737] R-NT2RM4000290//Human DNA sequence *** SEQUENCING IN PROGRESS $** from clone 39417, WORKING DRAFT SEQUENCE.//1.4e-05:229:65//AL023585

[13738] R-NT2RM4000324

[13739] R-NT2RM4000327//Human DNA sequence *** SEQUENCING IN PROGRESS *** from clone 75N14, WORKING DRAFT SEQUENCE.//3.3e-42:443:75//Z97199

[13740] R-NT2RM4000344//Homo sapiens clone DJ0309D19, WORKING DRAFT SEQUENCE, 12 unordered pieces.//6.4e-64:433:84//AC004826

[13741] R-NT2RM4000349//Human mRNA for KIAA0005 gene, complete cds.//7.7e-11:210:69//D13630

[13742] R-NT2RM4000354//Caenorhabditis elegans cosmid T14A8.//0.084:257:60//U50066

[13743] R-NT2RM4000356

[13744] R-NT2RM4000366//Homo sapiens mRNA for KIAA0642 protein, partial cds.//8.7e-112:577:95//AB014542

[13745] R-NT2RM4000368 1.6e-48:348:85//AG006257

[13746] R-NT2RM4000386//Rat mRNA for growth potentiating factor, complete cds.//4.4e-35:141:87//D42148

[13747] R-NT2RM4000395//RPCII 1-8N9.TP RPCI-11 Homo sapiens genomic clone RPCI-11-8N9, genomic survey sequence.//1.4e-25:207:75//B71494

[13748] R-NT2RM4000414//Human DNA sequence *** SEQUENCING IN PROGRESS *** from clone 228H 13, WORKING DRAFT SEQUENCE.//7.1e-17:492:64//AL031985

[13749] R-NT2RM4000421//RPCI 1-66B1.TK RPCI 11 Homo sapiens genomic clone R-66B 1, genomic survey sequence.//1.8e-40:311:82//AQ241167

[13750] R-NT2RM4000425//Homo sapiens chromosome Xp22-135-136 clone GSHB-56711, WORKING DRAFT SEQUENCE, 35 unordered pieces.//2.5e-47:316:87//AC005867

[13751] R-NT2RM4000433//Mus musculus retinoic acid-responsive protein (Stra6) mRNA, complete cds.//1.6e-17:133:78//AF062476

[13752] R-NT2RM4000457

[13753] R-NT2RM4000471//Homo sapiens mRNA for putative tRNA splicing protein, partial.//4.6e-113:559:96//AJ010952

[13754] R-NT2RM4000486//Homo sapiens mRNA, complete cds, clone:RES4-22C.//0.00015:170:67//AB000461

[13755] R-NT2RM4000496

[13756] R-NT2RM4000511//Rat troponin T cardiac isoform gene, complete cds.//0.21:290:58//M80829

[13757] R-NT2RM4000514//CIT-HSP-2169K4.TR CIT-HSP Homo sapiens genomic clone 2169K4, genomic survey sequence.//1.5e-20:150:89/11B95717

[13758] R-nnnnnnnnnnnn/HS-1024-B2-G01-MR.abi CIT Human Genomic Sperm Library C Homo sapiens genomic clone Plate=CT 803 Col=2 Row=N, genomic survey sequence.//6.3e-10:74:98//B34556

[13759] R-NT2RM4000520//Caenorhabditis elegans cosmid F36H 12.//0.15:406:61//AF078790

[13760] R-NT2RM4000531

[13761] R-NT2RM4000532//Plasmodium falciparum chromosome 2, section 28 of 73 of the complete sequence.//1.0:119:66//AE0001391

[13762] R-NT2RM4000534//paramecium species 4.51er mt dna dimer: replication init. region, clone 2.//9.8e-05:326:60//K00909

[13763] R-NT2RM4000585//HS_{—}3252_A2_G08_MR CIT Approved Human Genomic Sperm Library D Homo sapiens genomic clone Plate=3252 Col=16 Row=M, genomic survey sequence.//1.9e-69:376:93//AQ219890

[13764] R-NT2RM4000590//CIT-HSP-539024.TV CIT-HSP Homo sapiens genomic clone 539024, genomic survey sequence.//1.7e-38:226:93//B50657

[13765] R-NT2RM4000595//Human Chromosome X clone bWXD342, complete sequence.//1.0:239:61//AC004072

[13766] R-NT2RM4000603//RPCII 1-49P13.TK RPCII 1 Homo sapiens genomic clone R-49P13, genomic survey sequence.//0.77:139:64//AQ051950

[13767] R-nnnnnnnnnnnn

[13768] R-NT2RM4000616//HS_{—}3107_A2_B03 MR CIT Approved Human Genomic Sperm Library D Homo sapiens genomic clone Plate=3107 Col=6 Row=C, genomic survey sequence.//1.3e-54:272:99//AQ210034

[13769] R-NT2RM4000674

[13770] R-NT2RM4000689//Mus musculus pericentrin mRNA, complete cds.//3.5e-70:551:80//U005823

[13771] R-NT2RM4000698

[13772] R-nnnnnnnnnnnn

[13773] R-NT2RM4000712//Homo sapiens clone NHO512E 16, complete sequence.//0.54:294:58//AC005039

[13774] R-NT2RM4000717//Plasmodium falciparum MAL3P8, complete sequence.//0.050:387:58//AL034560

[13775] R-NT2RM4000733//Human DNA sequence *** SEQUENCING IN PROGRESS *** from clone 423B22, WORKING DRAFT SEQUENCE.//1.0e-107:566:95//AL034379

[13776] R-NT2RM4000734//Homo sapiens mRNA for KIAA0760 protein, partial cds.//1.1e-103:536:95//AB018303

[13777] R-NT2RM4000741//CIT-HSP-2294N4.TR CIT-HSP Homo sapiens genomic clone 2294N4, genomic survey sequence.//5.2e-41:244:93//AQ006361

[13778] R-NT2RM4000751//Human DNA sequence *** SEQUENCING IN PROGRESS *** from clone 537K23, WORKING DRAFT SEQUENCE.//2.7e-28:416:67//AL034405

[13779] R-NT2RM4000764//Human HepG2 3′ region MboI cDNA, clone hmd3g01m3.//2.1e-33:199:96//D17217

[13780] R-NT2RM4000778//Homo sapiens Xp22 BAC 620F15 (Genome Systems BAC library) complete sequence.//0.00060:241:62//AC002980

[13781] R-NT2RM4000779//Homo sapiens mRNA for KIAA0451 protein, complete cds.//2.9e-104:546:94//AB007920

[13782] R-NT2RM4000787//Homo sapiens, clone hRPK.3_A_{—}1, complete sequence.//5.3e-32:321:77//AC006198

[13783] R-NT2RM4000790//Homo sapiens chromosome 19, cosmid R27216, complete sequence.//1.9e-111:552:97//AC005306

[13784] R-NT2RM4000795//Homo sapiens Chromosome 17 p13 Cosmid Clone cos39, complete sequence.//0.74:364:57//U58675

[13785] R-NT2RM4000796//Homo sapiens full-length insert cDNA clone ZD62D 10.//2.7e-105:510:98//AF086348

[13786] R-NT2RM4000798//Human polymorphic epithelial mucin core protein mRNA, 3′ end.//7.7e-27:158:96//M21868

[13787] R-NT2RM4000813

[13788] R-NT2RM4000820//, complete sequence.//2.0e-104:432:97//AC005406

[13789] R-NT2RM4000833//Arabidopsis thaliana genomic DNA, chromosome 5, P1 clone: MXI22, complete sequence.//2.0e-07:166:68//AB012248

[13790] R-NT2RM4000848//Rabies virus matrix (M) protein mRNA, complete cds.//0.073:70:84//M22013

[13791] R-NT2RM4000852//Plasmodium falciparum 3D7 chromosome 12 PFYAC1122 genomic sequence, WORKING DRAFT SEQUENCE, 3 unordered pieces.//1.0:237:62//AC004709

[13792] R-NT2RM4000855

[13793] R-nnnnnnnnnnnn//HS_{—}3189_B2_B08_T7 CIT Approved Human Genomic Sperm Library D Homo sapiens genomic clone Plate=3189 Col=16 Row=D, genomic survey sequence.//2.1e-06:114:73//AQ300597

[13794] R-NT2RM4000895//Pan troglodytes HSI 9.8-similar locus and Y Alu element, genomic survey sequence.//3.8e-46:207:91//AF077058

[13795] R-NT2RM4000950//Human BAC clone RG341 D 10 from 7p 15-p21, complete sequence.//1.0:336:60//AC002530

[13796] R-NT2RM4000971//Human Xq28 cosmids U126G1, U142F2, U69B6, U145C10, U169A5, U84H1, U24D12, U80A7, U153E6, L35485, and R7-163A8 containing iduronate 2-sulfatase gene and pseudogene, complete sequence.//7.1e-09:259:64//AF011889

[13797] R-NT2RM4000979

[13798] R-NT2RM4000996//HS_{—}3164 Al E02 T7 CIT Approved Human Genomic Sperm Library D Homo sapiens genomic clone Plate=3164 Col=3 Row=I, genomic survey sequence.//2.0e-82:443:9411AQ141622

[13799] R-NT2RM4001002//Homo sapiens mRNA for KIAA0729 protein, partial cds.//1.2e-112:545:97//AB018272

[13800] R-NT2RM4001016//Homo sapiens mRNA for KIAA0639 protein, partial cds.//7.9e-113:556:97//AB014539

[13801] R-NT2RM4001032//Homo sapiens Surf-5 and Surf-6 genes.//1.2e-10:120:82//AJ224639

[13802] R-NT2RM4001047//Human DNA sequence *** SEQUENCING IN PROGRESS *** from clone 163G9, WORKING DRAFT SEQUENCE.//1 .0:158:67//AL008733

[13803] R-NT2RM4001054//CIT-HSP-2292N8.TR CIT-HSP Homo sapiens genomic clone 2292N8, genomic survey sequence.//5.8e-19:118:97//AQ004096

[13804] R-nnnnnnnnnnnn//Mouse DNA with homology to EBV IR3 repeat, segment 1, clone Mu2.//1.0e-05:271:64//M10296

[13805] R-NT2RM4001092//CITBI-EI -2524J20.TR CITBI-EI Homo sapiens genomic clone 2524J20, genomic survey sequence.//1.0:186:63//AQ277294

[13806] R-NT2RM4001116

[13807] R-NT2RM4001140//Homo sapiens PAC clone DJ0964C11 from 7 p14-p15, complete sequence.//3.6e-79:468:90//AC004593

[13808] R-NT2RM4001151//HS_{—}2270_B I_E05_MF CIT Approved Human Genomic Sperm Library D Homo sapiens genomic clone Plate=2270 Col=9 Row=J, genomic survey sequence.//5.5e-62:312:98//AQ163739

[13809] R-NT2RM4001155//Homo sapiens chromosome 12 p13.3 clone RPCI4-816NI, WORKING DRAFT SEQUENCE, 31 unordered pieces.//1.4e-107:536:97//AC005841

[13810] R-NT2RM4001160//HS_{—}3015_B1_H10_T7 CIT Approved Human Genomic Sperm Library D Homo sapiens genomic clone Plate=3015 Col=19 Row=P, genomic survey sequence.//7.1e-35:201:95//AQ118712

[13811] R-NT2RM4001187//X. laevis xUBFbeta2 mRNA for upstream binding factor 1.//0.019:177:63//X57201

[13812] R-NT2RM4001191//HS_{—}3002_A1_F05_MF CIT Approved Human Genomic Sperm Library D Homo sapiens genomic clone Plate=3002 Col=9 Row=K, genomic survey sequence.//3.9e-33:230:75//AQ088791

[13813] R-NT2RM4001200//Homo sapiens full-length insert cDNA clone YL35H03.//7.5e-69:335:99//AF085857

[13814] R-NT2RM4001203

[13815] R-NT2RM4001204

[13816] R-NT2RM4001217

[13817] R-NT2RM4001256

[13818] R-NT2RM4001258

[13819] R-NT2RM4001309

[13820] R-NT2RM4001313//Homo sapiens 12q24.1 PAC RPCI1-71H24 (Roswell Park Cancer Institute Human PAC library) complete sequence.//0.00055:183:63//AC004551

[13821] R-NT2RM4001316//Homo sapiens chromosome 17, clone hCIT.117_K_{—}16, complete sequence.//4.5e-21:212:79//AC004757

[13822] R-NT2RM4001320//CIT-HSP-2303E22.TR CIT-HSP Homo sapiens genomic clone 2303E22, genomic survey sequence.//3.8e-30:86:89//AQ021084

[13823] R-NT2RM4001340 0.0027:493:60//AC005133

[13824] R-NT2RM4001344

[13825] R-NT2RM4001347//CITB1-E1-2506120.TR CITBI-El Homo sapiens genomic clone 2506120, genomic survey sequence.//6.5e-16:101:99//AQ262797

[13826] R-NT2RM4001371//CITBI-EI-2503G21.TR CITB1-E1 Homo sapiens genomic clone 2503G21, genomic survey sequence.//0.063:140:65//AQ265776

[13827] R-NT2RM4001382//HS_{—}3044_A1_F02_MR CIT Approved Human Genomic Sperm Library D Homo sapiens genomic clone Plate=3044 Col=3 Row=K, genomic survey sequence.//0.96:103:661/AQ098668

[13828] R-NT2RM4001384//R. norvegicus mRNA for dendrin.//8.5e-07:120:75//Y09000

[13829] R-NT2RM4001410//Bovine cytochrome P450-scc mRNA fragment.//2.3e-15:199:75//M25920

[13830] R-NT2RM4001411//Rattus norvegicus FceRI gamma-chain interacting protein SH2-B (SH2-B) mRNA, complete cds.//1.7e-55:235:83//U57391

[13831] R-NT2RM4001412

[13832] R-NT2RM4001414//Homo sapiens Xp22 Cosmids U98B4 and U24F2 (Lawrence Livermore human cosmid library) complete sequence.//1.7e-80:489:89//U69730

[13833] R-NT2RM4001437//RPCI11-56D2.TJ RPCII 1 Homo sapiens genomic clone R-56D2, genomic survey sequence.//3.8e-43:250:93//AQ081969

[13834] R-NT2RM4001444//Homo sapiens Xp22-171-173 BAC GSHB-31214 (Genome Systems Human BAC Library) complete sequence.//0.0034:224:63//AC005926

[13835] R-NT2RM4001454//Homo Sapiens Chromosome X clone bWXD90, complete sequence.//2.4e-33:360:68//AC004075

[13836] R-NT2RM4001455//HS_{—}3229_B1_E04_MR CIT Approved Human Genomic Sperm Library D Homo sapiens genomic clone Plate=3229 Col=7 Row=J, genomic survey sequence.//1.0:183:61//AQ191289

[13837] R-NT2RM4001483//Homo sapiens clone DJ0826E18, WORKING DRAFT SEQUENCE, 4 unordered pieces.//2.2e-51:451:79//AC005282

[13838] R-NT2RM4001489//Homo sapiens mRNA for KIAA0685 protein, complete cds.//2.2e-102:547:93//AB014585

[13839] R-NT2RM4001519//HS_{—}2208_Al F07_MR CIT Approved Human Genomic Sperm Library D Homo sapiens genomic clone Plate=2208 Col=13 Row=K, genomic survey sequence.//0.25:214:63//AQ091836

[13840] R-NT2RM4001522//H. sapiens gene for Cu/Zn-superoxide dismutase.//3.6e-13:246:70//Z29336

[13841] R-NT2RM4001557//Plasmodium falciparum MAL3P4, complete sequence.//0.055:320:58//AL008970

[13842] R-NT2RM4001565//Homo sapiens chromosome 12p 13.3 clone RPCII 1-189M20, WORKING DRAFT SEQUENCE, 39 unordered pieces.//3.9e-26:329:72//AC005910

[13843] R-NT2RM4001566//Human trophinin mRNA, complete cds.//6.3e-38:296:86//U04811

[13844] R-NT2RM4001569//Human DNA sequence from clone 461P17 on chromosome 20q12-13.2. Contains four novel (pseudo)genes for proteins with Kunitz/Bovine pancreatic trypsin inhibitor and/or WAP-type (Whey Acidic Protein) ‘four-disulfide core’ domains, COX6C (Cytochrome C Oxidase Polypeptide VIC, EC 1.9.3.1) and RPL5 (60S Ribosomal Protein L5) pseudogenes, a pseudogene similar to part of the HSPD I (HSP60, Mitochondrial Matrix Protein PI precursor, Heat Shock Protein 60, GROEL protein, HUCHA60) gene, and the Major Epididymis-specific protein E4 precursor (HE4, Epididymis Secretory protein E4, WAP-type (Whey Acidic Protein) ‘four-disulfide core’ domain) gene. Contains ESTs, an STS, GSSs and a putative CpG island, complete sequence.//2.0e-35:213:89//AL031663

[13845] R-NT2RM4001582//Mus musculus COP9 complex subunit 7b (COPS7b) mRNA, complete cds.//5.4e-60:558:77//AF071317

[13846] R-nnnnnnnnnnnn/M. musculus mRNA of enhancer-trap-locus I.//4.8e-86:565:85//X69942

[13847] R-NT2RM4001594//Human interleukin-13 (IL-13) precursor gene, complete cds.//0.083:283:61//U31120

[13848] R-NT2RM4001597//HS_{—}2059_A1_G11_MR CIT Approved Human Genomic Sperm Library D Homo sapiens genomic clone Plate=2059 Col=21 Row=M, genomic survey sequence.//4.4e-09:105:83//AQ245136

[13849] R-NT2RM4001605//Homo sapiens mRNA for KIAA0791 protein, complete cds.//6.7e-111:565:95//AB018334

[13850] R-NT2RM4001611//Homarus americanus ryanodine receptor (RyR) mRNA, partial cds.//1.0:364:61//AF051936

[13851] R-NT2RM4001629//RPCI11-54G14.TJ RPCII 1 Homo sapiens genomic clone R-54G14, genomic survey sequence.//0.0018:347:61//AQ083173

[13852] R-NT2RM4001650

[13853] R-NT2RM4001662//Homo sapiens DNA sequence from PAC 159A 15 on chromosome Xp 11.21-p 11.23. Contains inter-alpha-trypsin inhibitor heavy chain H3 precursor-like protein.//0.75:212:62//AL022575

[13854] R-NT2RM4001666//Homo sapiens Chromosome 16 BAC clone CIT987SK-A-233A8, complete sequence.//2.6e-26:461:65//AC004685

[13855] R-NT2RM4001682//Human DNA sequence from clone 30M3 on chromosome 6p22.1-22.3. Contains three novel genes, one similar to C. elegans Y63D3A.4 and one similar to (predicted) plant, worm, yeast and archaea bacterial genes, and the first exon of the KIAA0319 gene. Contains ESTs, GSSs and putative CpG islands, complete sequence.//1.5e-107:544:96//AL031775

[13856] R-NT2RM4001710//Human DNA sequence *** SEQUENCING IN PROGRESS *** from clone 126A5, WORKING DRAFT SEQUENCE.//1.8e-110:580:95//AL031447

[13857] R-NT2RM4001714//Plasmodium falciparum 3D7 chromosome 12 PFYAC812 genomic sequence, WORKING DRAFT SEQUENCE, 8 unordered pieces.//3.1e-10:543:59//AC004153

[13858] R-nnnnnnnnnn/Human DNA sequence from clone 931 K24 on chromosome 20p 12 Contains ESTs and GSSs, complete sequence.//8.7e-111:577:94//AL034430

[13859] R-NT2RM4001731//Ovis aries dinucleotide repeat polymorphism at MAF92 locus.//0.017:93:73//M80527

[13860] R-NT2RM4001741//Mouse mRNA for talin.//2.4e-34:273:83//X56123

[13861] R-NT2RM4001746//Human DNA sequence *** SEQUENCING IN PROGRESS *** from clone 316G12, WORKING DRAFT SEQUENCE.//1.7e-112:567:96//AL031709

[13862] R-NT2RM4001754//Homo sapiens PAC clone 248015 from 13q12-q13, complete sequence.//1.4e-64:475:83//AC002483

[13863] R-NT2RM4001758//R. norvegicus mRNA for serine/threonine kinase MARKI.//1.9e-18:202:78//Z83868

[13864] R-NT2RM4001776//Homo sapiens mRNA for KIAA0727 protein, partial cds.//2.0e-22:236:80//AB08270

[13865] R-NT2RM4001783//Homo sapiens clone DJ0981007, complete sequence.//4.4e-106:551:95//AC006017

[13866] R-NT2RM4001810//T28D3TF TAMU Arabidopsis thaliana genomic clone T28D3, genomic survey sequence.//0.76:279:60//B27099

[13867] R-NT2RM4001813

[13868] R-NT2RM4001823

[13869] R-NT2RM4001828//HS_{—}3073_A2_E01_MF CIT Approved Human Genomic Sperm Library D Homo sapiens genomic clone Plate=3073 Col=2 Row=1, genomic survey sequence.//1.6e-46:255:96//AQ121030

[13870] R-NT2RM4001836//Sus scrofa microsatellite S0398 sequence.//9.4e-06:141:69//U78024

[13871] R-NT2RM4001841//Salmo salar microsatellite Ssa65 DNA.//1.5e-06:175:65//AF019184

[13872] R-NT2RM4001842//Homo sapiens clone RG228D 17, WORKING DRAFT SEQUENCE, 2 unordered pieces.//5.0e-07:332:61//AC005077

[13873] R-NT2RM4001856//Mus musculus clone OST16642, genomic survey sequence.//4.8e-30:235:85//AF046633

[13874] R-nnnnnnnnnnnn//HS33244_B4_F_{—}10MR CIT Approved Human Genomic Sperm Library D Homo sapiens genomic clone Plate=3244 Col=19 Row=L, genomic survey sequence.//3.0e-40:263:89//AQ252798

[13875] R-NT2RM4001865//Homo sapiens mRNA for atopy related autoantigen CALC.//5.0e-119:592:97//Y17711

[13876] R-NT2RM4001876//Megastigmus wachtli dinucleotide microsatellite, clone MWA47CT.//0.13:134:64//AJ001069

[13877] R-NT2RM4001880

[13878] R-NT2RM4001905//HS_{—}2016_B1_H11_T7 CIT Approved Human Genomic Sperm Library D Homo sapiens genomic clone Plate=2016 Col=21 Row=P, genomic survey sequence.//0.0066:264:59//AQ226877

[13879] R-NT2RM4001922//HS_{—}2228_B2_B07_MF CIT Approved Human Genomic Sperm Library D Homo sapiens genomic clone Plate=2228 Col=14 Row=D, genomic survey sequence.//2.5e-35:205:96//AQ065498

[13880] R-NT2RM4001930//Homo sapiens chromosome 17, clone hRPC.34_M_{—}24, complete sequence.//0.26:325:63//AC004562

[13881] R-NT2RM4001938//Homo sapiens chromosome 17, clone hRPC.1081_P_{—}3, complete sequence.//2.9e-85:421:98//AC005207

[13882] R-NT2RM4001940//Homo sapiens timeless homolog mRNA, complete cds.//6.2e-109:556:95//AF098162

[13883] R-NT2RM4001953//Human DNA sequence *** SEQUENCING IN PROGRESS *** from clone 473B4, WORKING DRAFT SEQUENCE.//1.3e-08:175:70//Z83826

[13884] R-NT2RM4001965//CIT-HSP-385N14.TR CIT-HSP Homo sapiens genomic clone 385N14, genomic survey sequence.//5.7e-69:532:81//B55044

[13885] R-nnnnnnnnnnnn//R. norvegicus mRNA for IP63 protein.//1.9e-61:352:83//X99330

[13886] R-NT2RM4001979//Homo sapiens full-length insert cDNA clone ZD29F04.//1.1e-98:465:100//AF086241

[13887] R-NT2RM4001984//Borrelia burgdorferi (section 47 of 70) of the complete genome.//0.14:461:60//AE001161

[13888] R-NT2RM4001987

[13889] R-NT2RM4002013

[13890] R-NT2RM4002018

[13891] R-NT2RM4002034//Homo sapiens chromosome 5, BAC clone 24p24 (LBNL HI 95), complete sequence.//3.6e-42:277:89//AC005353

[13892] R-NT2RM4002044//Homo sapiens PAC clone DJ11102B04 from 7q11.23-7q21, complete sequence.//0.83:476:57//AC006204

[13893] R-NT2RM4002054

[13894] R-NT2RM4002062//Human microsomal epoxide hydrolase gene, exons 5 and 6.10.11:136:67//U06659

[13895] R-NT2RM4002063//Oryctolagus cuniculus sarcosine oxidase (SOX) mRNA, complete cds.//2.9e-99:503:96//U82267

[13896] R-nnnnnnnnnnnn//Homo sapiens CAGH45 mRNA, complete cds.//9.6e-41:554:68//U80742

[13897] R-NT2RM4002067//Human DNA sequence *** SEQUENCING IN PROGRESS *** from clone 329A5, WORKING DRAFT SEQUENCE.//7.7e-64:476:81//Z97832

[13898] R-NT2RM4002073//Mus musculus fatty acid transport protein 3 mRNA, partial cds.//1.1e-33:238:85//AF072758

[13899] R-NT2RM4002075//Plasmodium falciparum 3D7 chromosome 12 PFYAC1383 genomic sequence, WORKING DRAFT SEQUENCE, 3 unordered pieces.//0.0031:403:57//AC005504

[13900] R-NT2RM4002093//Human Chromosome 11 pac pDJ227b23, WORKING DRAFT SEQUENCE, 19 unordered pieces.//9.4e-07:322:62//AC000383

[13901] R-nnnnnnnnnnnn//Mouse kif4 mRNA for microtubule-based motor protein KIF4, complete cds.//5.6e-44:432:74//D12646

[13902] R-NT2RM4002128//Human HepG2 partial cDNA, clone hmd2e12 m5.//2.0e-26:186:90//D17000

[13903] R-NT2RM4002140

[13904] R-NT2RM4002145//Homo sapiens full-length insert cDNA clone ZD38EI 2.//1.4e-15:193:76//AF086247

[13905] R-NT2RM4002146//Human ABL gene, intron lb, partial sequence.//0.66:170:63//U07562

[13906] R-NT2RM4002161//Homo sapiens laforin (EPM2A) mRNA, partial cds.//4.5e-110:560:96//AF084535

[13907] R-NT2RM4002174//Homo sapiens chromosome 17, clone hRPK.74_E_{—}22, complete sequence.//8.0e-43:302:85//AC005696

[13908] R-NT2RM4002189

[13909] R-NT2RM4002194//Human Cosmid g5129g129 from 7q31.3, complete sequence.//0.29:382:60//AC003960

[13910] R-NT2RM4002205//Spiroplasma virus (SpV1-R8A2 B) complete genome.//3.5e-05:432:56//X51344

[13911] R-NT2RM4002213

[13912] R-NT2RM4002226//Homo sapiens chromosome 17, clone HClT187M2, complete sequence.//0.94:198:61//AC004448

[13913] R-NT2RM4002251

[13914] R-NT2RM4002256//Homo sapiens PAC clone DJ0570D02 from 7 p13-p14, complete sequence.//2.3e-58:299:85//AC004837

[13915] R-NT2RM4002266//H. sapiens CpG island DNA genomic Mse1 fragment, clone 179f11, forward read cpg179f11.ft1a.//0.72:97:69//Z57487

[13916] R-NT2RM4002278//Homo sapiens clone RG140Bl 1, WORKING DRAFT SEQUENCE, 1 unordered pieces.//7.5e-49:405:84//AC005069

[13917] R-NT2RM4002281//Human DNA sequence *** SEQUENCING IN PROGRESS *** from clone 702J19, WORKING DRAFT SEQUENCE.//1.7e-13:168:77//AL033531

[13918] R-NT2RM4002287

[13919] R-NT2RM4002294//Homo Sapiens Chromosome X clone bWXD171, WORKING DRAFT SEQUENCE, 1 ordered pieces.//0.98:208:65//AC004676

[13920] R-NT2RM4002301//HS_{—}2028_A1_E10_T7 CIT Approved Human Genomic Sperm Library D Homo sapiens genomic clone Plate=2028 Col=19 Row=I, genomic survey sequence.//0.94:321:5711AQ233262

[13921] R-NT2RM4002323//Human DNA sequence from clone 59B16 on chromosome 6p22.1-22.3. Contains a pseudogene similar to GPISG20 and other exonucleases). Contains ESTs, STSs, GSSs, genomic markers D6S1691 and D6S299 and a ca repeat polymorphism, complete sequence.//1.9e-35:265:84//AL032822

[13922] R-nnnnnnnnnnnn//Human mRNA for KIAA0319 gene, complete cds.//2.4e-42:569:68//AB002317

[13923] R-NT2RM4002344//Plasmodium falciparum 3D7 chromosome 12 PFYAC 1122 genomic sequence, WORKING DRAFT SEQUENCE, 3 unordered pieces.//0.013:391:59//AC004709

[13924] R-NT2RM4002373//Homo sapiens mRNA for KIAA0649 protein, complete cds.//8.6e-121:593:97//AB014549

[13925] R-NT2RM4002374//Human DNA sequence from cosmid U131B10, between markers DXS366 and DXS87 on chromosome X contains XK membrane transport protein, ESTs and STS.//3.8e-44:258:86//Z73417

[13926] R-NT2RM4002383//Human Chromosome 15q26.1 PAC clone pDJ 10k5 containing human DNA polymerase gamma (polg) gene, complete sequence.//0.00084:345:60//AC005316

[13927] R-NT2RM4002390

[13928] R-NT2RM4002409//RPCII 1-45M10.TK RPCII 1 Homo sapiens genomic clone R-45M10, genomic survey sequence.//0.99:151:66//AQ194411

[13929] R-NT2RM4002438

[13930] R-NT2RM4002446//Human DNA sequence from clone 360A4 on chromosome 16. Contains ESTs, complete sequence.//2.8e-103:533:95//AL031008

[13931] R-NT2RM4002452

[13932] R-NT2RM4002457//Homo sapiens chromosome 16, cosmid clone 321D4 (LANL), complete sequence.//0.99:171:64//AC004034

[13933] R-NT2RM4002460//Human DNA sequence from PAC 50A13 on chromosome Xp 11. Contains ATP SYNTHASE LIPID BINDING PROTEIN P1 (P2, P3) precursor (ATP5G1, ATP5G2, ATP5G3) like pseudogene, ESTs and STSs. Contains polymorphic CA repeat.//0.96:94:71//Z92545

[13934] R-NT2RM4002479//Homo sapiens RNA helicase-related protein mRNA, complete cds.//2.9e-102:508:97//AF083255

[13935] R-NT2RM4002482//Homo sapiens mRNA for KIAA0691 protein, complete cds.//7.0e-31:172:98//AB014591

[13936] R-NT2RM4002493//CIT-HSP-2296C24.TF CIT-HSP Homo sapiens genomic clone 2296C24, genomic survey sequence.//0.46:182:62//AQ006882

[13937] R-NT2RM4002499//Human v-fos transformation effector protein (Fte-1), mRNA complete cds.//7.3e-24:134:99//M84711

[13938] R-NT2RM4002504//Homo sapiens Xq28 BAC PAC and cosmid clones containing FMR2 gene exons 1,2, and 3, complete sequence.//3.9e-11:334:63//AC002368

[13939] R-nnnnnnnnnnnn

[13940] R-NT2RM4002532//Human DNA sequence *** SEQUENCING IN PROGRESS *** from clone 341D10, WORKING DRAFT SEQUENCE.//3.4e-17:171:79//Z97985

[13941] R-NT2RM4002534

[13942] R-NT2RM4002567//Homo sapiens chromosome 7 clone UWGC:g1564a040 from 7 p14-15, complete sequence.//2.2e-26:181:76//AC005271

[13943] R-NT2RM4002571

[13944] R-NT2RM4002593//CIT-HSP-2303L15.TF CIT-HSP Homo sapiens genomic clone 2303L15, genomic survey sequence.//0.034:73:82//AQ015579

[13945] R-NT2RM4002623//Homo sapiens clone UWGC:g1564a209 from 7 p14-15, complete sequence.//0.0014:670:55//AC005862

[13946] R-NT2RP2000001//Plasmodium falciparum chromosome 2, section 59 of 73 of the complete sequence.//0.00087:251:59//AE001422

[13947] R-NT2RP2000006//Human DNA sequence from PAC 155D22 on chromosome 6q27. Contains EST, STSs and a GSS.//2.7e-37:259:86//Z97205

[13948] R-NT2RP2000008//RPCI11-41G16.TP RPCI-11 Homo sapiens genomic clone RPCI-11-41G16, genomic survey sequence.//4.1e-25:365:70//AQ029090

[13949] R-NT2RP2000027//Homo sapiens chromosome 17, clone HClT305D20, complete sequence.//6.0e-05:307:62//AC004098

[13950] R-NT2RP2000040//Homo sapiens mRNA for KIAA0747 protein, partial cds.//8.4e-41:223:96//AB018290

[13951] R-NT2RP2000045//Homo sapiens tumorous imaginal discs protein Tid56 homolog (TID I) mRNA, complete cds.//5.8e-63:325:96//AF061749

[13952] R-NT2RP2000054//Human tyrosinase gene, 5′-flanking region (containing enhancer element resposible for pigment cell-specific transcription).//0.88:210:60//D26163

[13953] R-NT2RP2000056//Mus musculus epsilon tyrosine phosphatase cytoplasmic isoform (Ptpre) mRNA, complete cds.//4.7e-38:377:78//U36758

[13954] R-NT2RP2000067//Rat mRNA for growth potentiating factor, complete cds.//6.0e-10:137:79//D42148

[13955] R-NT2RP2000070//Homo sapiens chromosome 5, BAC clone 34j 15 (LBNL H 169), complete sequence.//3.1e-76:381:98//AC005754

[13956] R-NT2RP2000076//Plasmodium falciparum chromosome 2, section 9 of 73 of the complete sequence.//2.3e-06:380:60//AE001372

[13957] R-NT2RP2000077//Homo sapiens growth arrest specific 11 (GAS 11) mRNA, complete cds.//3.5e-77:379:97//AF050079

[13958] R-NT2RP2000079//Human DNA sequence *** SEQUENCING IN PROGRESS *** from clone 1125AI1, WORKING DRAFT SEQUENCE.//6.5e-32:314:78//AL034549

[13959] R-NT2RP2000088//Homo sapiens mRNA for KIAA0795 protein, partial cds.//5.6e-74:378:96//AB018338

[13960] R-NT2RP2000091//Homo sapiens clone RGO15P03, complete sequence.//9.3e-21:226:76/HAC005048

[13961] R-NT2RP2000097//Human DNA sequence from cosmid U209GI on chromosome X.//9.2e-40:278:81//Z68873

[13962] R-NT2RP2000098//Human BAC clone RG333F24 from 7q11.2-q21, complete sequence.//0.34:132:65//AC004015

[13963] R-NT2RP2000108//Homo sapiens DNA from chromosome 19, BAC 33152, complete sequence.//3 .1e-09:259:67//AC003973

[13964] R-NT2RP2000114//Homo sapiens mRNA for GM3 synthase, complete cds.//1.8e-74:386:95//AB018356

[13965] R-NT2RP2000120//CITBI-E1-2503M8.TR CITBI-E1 Homo sapiens genomic clone 2503M8, genomic survey sequence.//5.1e-05:87:77//AQ263909

[13966] R-nnnnnnnnnnnn

[13967] R-nnnnnnnnnnnn//Homo sapiens PAC clone DJO44L15 from Xq23, complete sequence.//4.9e-11:153:69//AC004827

[13968] R-NT2RP2000147

[13969] R-NT2RP2000153//Homo sapiens ccr2b (ccr2), ccr2a (ccr2), ccr5 (ccr5) and ccr6 (ccr6) genes, complete cds, and lactoferrin (lactoferrin) gene, partial cds, complete sequence.//0.0058:261:57//U95626

[13970] R-NT2RP2000157//Homo sapiens Chr.14 PAC RPCI4-794B2 (Roswell Park Cancer Institute Human PAC Library) complete sequence.//2.5e-19:603:96//AC005924

[13971] R-NT2RP2000161//CIT-HSP-2045P7.TR CIT-HSP Homo sapiens genomic clone 2045P7, genomic survey sequence.//0.89:173:63//B79728

[13972] R-NT2RP2000175

[13973] R-NT2RP2000183

[13974] R-NT2RP2000195//Homo sapiens chromosome 17, clone hRPK.60_A_{—}24, complete sequence.//4.3e-39:306:83//AC005325

[13975] R-NT2RP2000205//Human DNA sequence from clone 302L24 on chromosome Xq21-22, complete sequence.//7.5e-05:101:78//AL022155

[13976] R-NT2RP2000224//Homo sapiens Chromosome 16 BAC clone CIT987SK-A-152E5, complete sequence.//7.3e-55:306:94//AC004382

[13977] R-NT2RP2000232

[13978] R-NT2RP2000233//Mus musculus tumor metastasis associated gene product (MAG) mRNA, complete cds.//7.6e-13:144:75//U88401

[13979] R-NT2RP2000239//Homo sapiens chromosome 4 clone B353C18 map 4q25, complete sequence.//9.6e-63:410:86//AC004066

[13980] R-NT2RP2000248//Caenorhabditis elegans cosmid TOIC8.//1.0:282:58//U58726

[13981] R-NT2RP2000257//Homo sapiens PAC clone DJ0808G16 from 7q11.23-q21, complete sequence.//2.5e-11:163:72//AC004894

[13982] R-NT2RP2000258//Arabidopsis thaliana chromosome II BAC T31EI0 genomic sequence, complete sequence.//0.58:442:58//AC004077

[13983] R-NT2RP2000270//Homo sapiens DNA sequence from PAC 97D16 on chromosome 6p21.3-22.2. Contains an unknown pseudogene, a 60S Ribosomal protein L24 (L30) LIKE pseudogene and histone genes H2BFC (H2B/c), H4FFP (H4/f pseudogene), H2AFC (H2A/c), H3FIK (H3.1/k) and a tRNA-Val pseudogene and tRNA-Thr gene. Contains ESTs, STSs, GSSs and genomic marker D6S464, complete sequence.//1.1e-39:292:84//AL009179

[13984] R-NT2RP2000274//CIT-HSP-237901.TR CIT-HSP Homo sapiens genomic clone 237901, genomic survey sequence.//6.9e-10:121:81//AQ109409

[13985] R-NT2RP2000288

[13986] R-NT2RP2000289

[13987] R-NT2RP2000297//Homo sapiens full-length insert cDNA clone ZB81CO3.//7.7e-109:519:99//AF086165

[13988] R-NT2RP2000298

[13989] R-NT2RP20003110//Homo sapiens p53 induced protein mRNA, partial cds.//1.5e-38:224:93//AF010310)

[13990] R-NT2RP2000327//Homo sapiens DNA sequence from PAC 434014 on chromosome 1q32.3.-41. Contains the HSD11B1 gene for Hydroxysteroid (11-beta) Dehydrogenase 1, the ADORA2BP adenosine A2b receptor LIKE pseudogene, the IRF6 gene for Interferon Regulatory Factor 6 and two novel genes. Contains ESTs and GSSs, complete sequence.//4.3e-113:580:96//AL022398

[13991] R-NT2RP2000329//Homo sapiens clone NHO319F03, WORKING DRAFT SEQUENCE, 3 unordered pieces.//7.4e-47:367:77//AC006039

[13992] R-NT2RP2000337//Anopheles quadrimaculatus NADH dehydrogenase subunits (1-4, 4L, 5-6); cytochrome oxidase subunits (1-3); adenosine triphosphatase subunits (6,8); cytochrome b; transfer RNA; ribosomal RNA (large and small subunits).//4.9e-08:494:58//L04272

[13993] R-NT2RP2000346//Homo sapiens apoptosis associated protein (GADD34) mRNA, complete cds.//3.4e-46:262:94//U83981

[13994] R-NT2RP2000369//Homo sapiens chromosome 17, clone HClT169H9, WORKING DRAFT SEQUENCE, 6 unordered pieces.//3.0e-07:334:61//AC002993

[13995] R-NT2RP2000414//Mouse DNA sequence *** SEQUENCING IN PROGRESS *** from clone BAC394, WORKING DRAFT SEQUENCE.//7.0e-08:98:83//AJ004828

[13996] R-NT2RP2000420//Homo sapiens chromosome 17, clone hRPK.640_{—}1115, complete sequence.//0.99:150:62//AC005324

[13997] R-NT2RP2000422//Homo sapiens N-acetylglucosamine-phosphate mutase mRNA, complete cds.//4.6e-19:142:90//AF102265

[13998] R-NT2RP2000438//RPCI11-62113.TK RPCII 1 Homo sapiens genomic clone R-62113, genomic survey sequence.//3.1e-06:103:79//AQ199572

[13999] R-NT2RP2000448//Homo sapiens PAC clone DJ0740D02 from 7 p14-p 5, complete sequence.//2.0e-22:276:73//AC004691

[14000] R-NT2RP2000459//CIT-HSP-2013N9.TR CIT-HSP Homo sapiens genomic clone 2013N9, genomic survey sequence.//5.5e-27:205:87//B53940

[14001] R-NT2RP2000498//Homo sapiens Chromosome I 1q23 PAC clone pDJ149k2 containing PLZF gene encoding kruppel-like zinc finger protein, complete sequence.//6.0e-12:119:84//AC001234

[14002] R-NT2RP2000503//Human CYPI IB2 gene for steroid 18-hydroxylase (P-450 C1.8), 5′-flanking region and exon 1.//0.48:201:64//D10170

[14003] R-NT2RP20005110//Bactrocera dorsalis strain Tahiti mitochondrial D-loop region, complete sequence.//3.6e-07:472:59//AF033929

[14004] R-nnnnnnnnnnnn

[14005] R-NT2RP2000523//Human DNA sequence *** SEQUENCING IN PROGRESS * from clone 150C2, WORKING DRAFT SEQUENCE.//2.3e-61:317:97//AL022318

[14006] R-NT2RP2000603//Homo sapiens mRNA for MCM3 import factor, complete cds.//6.6e-29:167:97//AB005543

[14007] R-NT2RP2000617

[14008] R-NT2RP2000634//Homo sapiens mRNA for KIAA0614 protein, partial cds.//2.5e-64:335:96//AB014514

[14009] R-NT2RP2000644//Human DNA sequence from PAC 50A13 on chromosome Xp 11. Contains ATP SYNTHASE LIPID BINDING PROTEIN PI (P2, P3) precursor (ATP5G1, ATP5G2, ATP5G3) like pseudogene, ESTs and STSs. Contains polymorphic CA repeat.//1.8e-28:383:70//Z92545

[14010] R-NT2RP2000656//Homo sapiens DNA sequence from PAC 874C20 on chromosome 6p22.1-22.3. Contains a Zinc Finger Protein ZFP47 LIKE gene, a Zinc Finger Protein pseudogene and a Zinc Finger Protein SRE-ZBP pseudogene. Contains ESTs, STSs and GSSs, complete sequence.//0.0093:110:70//AL021997

[14011] R-NT2RP2000658//Bacillus thuringiensis chitinase (chi) gene, complete cds.//0.73:301:60//U89796

[14012] R-NT2RP2000668

[14013] R-NT2RP2000678//Homo sapiens genomic DNA, chromosome 21q22.2 (Down Syndrome region), segment 8/15, WORKING DRAFT SEQUENCE.//2.8e-11:256:66//AP000015

[14014] R-NT2RP2000710//Genomic sequence from Human 17, WORKING DRAFT SEQUENCE, 9 unordered pieces.//0.036:176:69//AC002346

[14015] R-NT2RP2000715//Homo sapiens PAC clone DJ1066K24 from 7p15, complete sequence.//2.7e-110:555:96//AC004540

[14016] R-NT2RP2000731//Human DNA sequence from clone 497J21 on chromosome 6q26-27. Contains a KOC (KH-domain containing transcript overexpressed in cancer) pseudogene, genomic marker D6S193, ESTs, STSs and GSSs, and a ca repeat polymorphism, complete sequence.//2.6e-18:319:68//AL023775

[14017] R-NT2RP2000758//CIT-HSP-507A14.TP CIT-HSP Homo sapiens genomic clone 507A14, genomic survey sequence.//1.0:189:60//B50590

[14018] R-NT2RP2000764

[14019] R-NT2RP2000809//Human BAC clone RG356F09 from 7p21, complete sequence.//1.7e-24:215:81//AC004002

[14020] R-NT2RP2000812//CIT-HSP-2281C3.TR CIT-HSP Homo sapiens genomic clone 2281C3, genomic survey sequence.//9.5e-32:176:97//B99575

[14021] R-nnnnnnnnnnnn//paramecium species 5,87 mt dna dimer: replication init. region.//0.0077:418:57//K00916

[14022] R-NT2RP2000816//F. rubripes GSS sequence, clone 011H02aA6, genomic survey sequence.//0.61:52:73//AL001013

[14023] R-NT2RP2000819

[14024] R-NT2RP2000841//Human DNA sequence *** SEQUENCING IN PROGRESS *** from clone 43408, WORKING DRAFT SEQUENCE.//0.00012:181:70//AL033504

[14025] R-NT2RP2000842//Mus musculus (C57BL/10×C3H)F2 clone 4.9 novel mRNA from renin-expressing kidney tumor cell line, partial sequence.//3.7e-27:388:72//U13370

[14026] R-NT2RP2000845//Homo sapiens chromosome 17, clone hRPK.849_N_{—}15, complete sequence.//0.0022:200:68//AC005703

[14027] R-NT2RP2000863

[14028] R-NT2RP2000880//Homo sapiens mRNA for putative GTP-binding protein, partial.//2.3e-43:279:89//AJ006412

[14029] R-NT2RP2000892//Homo sapiens genomic DNA of 9q32 anti-oncogene of flat epitherium cancer, segment 7/10.//0.0028:221:62//AB020875

[14030] R-NT2RP2000931//Homo sapiens mRNA for KIAA0723 protein, complete cds.//2.2e-55:290:96//AB018266

[14031] R-NT2RP2000938//Homo sapiens full-length insert cDNA clone ZD55G12.//2.1e-37:215:93//AF086336

[14032] R-NT2RP2000943//Homo sapiens mRNA for KIAA0755 protein, complete cds.//3.0e-96:494:96//AB018298

[14033] R-NT2RP2000965

[14034] R-NT2RP2000970//Homo sapiens DNA sequence from BAC 747E2 on chromosome 22q12.1. Contains ESTs, STSs and GSSs and genomic marker D22S56, complete sequence.//4.5e-87:440:97//AL021393

[14035] R-NT2RP2000985//Homo sapiens chromosome 17, clone hRPK.597_M_{—}12, complete sequence.//5.4e-93:484:95//AC005277

[14036] R-NT2RP2000987//Plasmodium falciparum chromosome 2, section 9 of 73 of the complete sequence.//2.1e-06:318:62//AE001372

[14037] R-NT2RP2001036//Human DNA sequence *** SEQUENCING IN PROGRESS *** from clone 41018, WORKING DRAFT SEQUENCE.//2.0e-24:273:73//AL031732-R-NT2RP2001044//Plasmodium falciparum 3D7 chromosome 12 PFYACB8-420 genomic sequence, WORKING DRAFT SEQUENCE, 14 unordered pieces.//3.3e-07:365:65//AC005140

[14038] R-NT2RP2001065//Caenorhabditis elegans cosmid F I OG7.//9.2e-06:273:59//U40029

[14039] R-NT2RP2001070//CITB1-E1-2503F4.TF CITB1-E1 Homo sapiens genomic clone 2503F4, genomic survey sequence.//0.13:97:72//AQ265973

[14040] R-NT2RP2001094//Mycoplasma mycoides mycoides SC immunodominant protein P72 (p72) gene, complete cds, mannitol-1-phosphate dehydrogenase (mtlD) gene, partial cds and insertion sequence IS 1296, complete sequence.//0.018:373:57//U61140

[14041] R-NT2RP2001119

[14042] R-NT2RP2001127//Homo sapiens HRIHFB2060 mRNA, partial cds.//4.5e-55:304:94//AB015348

[14043] R-NT2RP2001137//Homo sapiens DNA sequence from clone 511B24 on chromosome 20q11.2-12. Contains the TOPI gene for Topoisomerase I, the PLCGI gene for l-Phosphatidylinositol-4,5-Bisphosphate Phosphodiesterase Gamma I (EC 3.1.4.11, PLC-Gamma-1, Phospholipase C-Gamma-1 PLC-II, PLC-148), the KIAA0395 gene for a probable Zinc Finger Homeobox protein and a 60S Ribosomal Protein L23 LIKE pseudogene. Contains a predicted CpG island, ESTs, STSs and GSSs, complete sequence.//0.69:129:65//AL022394

[14044] R-NT2RP2001149//Sequence 5 from patent U.S. Pat. No. 4,798,885.//8.5e-28:322:77//I01838

[14045] R-NT2RP2001168

[14046] R-NT2RP2001173//Homo sapiens mRNA for KIAA0480 protein, complete cds.//4.8e-95:490:96//AB007949

[14047] R-NT2RP2001174//CIT-HSP-2170B 18.TR CIT-HSP Homo sapiens genomic clone 2170B18, genomic survey sequence.//1.3e-33:204:93//B89680

[14048] R-NT2RP2001196//Plasmodium falciparum DNA *** SEQUENCING IN PROGRESS * from contig 3-65, complete sequence.//1.7e-06:413:61//AL010134

[14049] R-NT2RP2001218//Human DNA sequence from clone 23K20 on chromosome Xq25-26.2 Contains EST, STS, GSS, complete sequence.//8.5e-15:278:68//AL022153

[14050] R-NT2RP2001226//Human DNA sequence from clone 1170D6 on chromosome Xq22.3-23. Contains a pseudogene similar to U-SNRNP_associated Cyclophilin (USA-CYP, EC 5.2.1.8), ESTs, an STS and a GSS, complete sequence.//0.0020:462:57//AL030995

[14051] R-NT2RP2001233//CIT-HSP-2356P23.TR CIT-HSP Homo sapiens genomic clone 2356P23, genomic survey sequence.//8.0e-108:547:96//AQ081110

[14052] R-NT2RP2001245//Spodoptera frugiperda 16S rRNA gene, Val-tRNA, and Leu-tRNA genes, and ND-1 protein gene, 5′ end.//0.0052:350:58//M76713

[14053] R-NT2RP2001268//Homo sapiens mRNA for KIAA0810 protein, partial cds.//4.6e-111:544:97//AB018353

[14054] R-NT2RP2001277//Caenorhabditis elegans DNA *** SEQUENCING IN PROGRESS *** from clone Y59A8, WORKING DRAFT SEQUENCE.//0.0058:327:59//Z98870

[14055] R-NT2RP2001290//Plasmodium falciparum 3D7 chromosome 12 PFYAC 1122 genomic sequence, WORKING DRAFT SEQUENCE, 3 unordered pieces.//0.96:187:65//AC004709

[14056] R-NT2RP2001295//Homo sapiens BAC clone NH0491B03 from 7p21-p15, complete sequence.//0.59:218:62//AC006041

[14057] R-NT2RP2001312//Human DNA sequence *** SEQUENCING IN PROGRESS *** from clone 349A12, WORKING DRAFT SEQUENCE.//0.12:117:64//AL033520

[14058] R-NT2RP2001327//Caenorhabditis elegans cosmid R04D3, complete sequence.//0.31:119:66//Z70212

[14059] R-NT2RP2001328//HS_{—}2213_A1_D07_MF CIT Approved Human Genomic Sperm Library D Homo sapiens genomic clone Plate=2213 Col=13 Row=G, genomic survey sequence.//1.7e-22:200:83//AQ136874

[14060] R-NT2RP2001347//Plasmodium falciparum MAL3P8, complete sequence.//0.81:509:56//AL034560

[14061] R-NT2RP2001378//H. sapiens DNA sequence.//0.94:147:63//Z22404

[14062] R-NT2RP2001381//Homo sapiens cyclin E2 mRNA, complete cds.//3.2e-09:75:97//AF091433

[14063] R-NT2RP2001392//Myxococcus xanthus ATP-dependent protease (bsgA) gene, complete cds.//0.079:178:62//L19301

[14064] R-NT2RP2001394//Human DNA sequence from PAC 389A20 on chromosome X contains ESTs STS, CpG islands and polymorphic CA repeat.//3.4e-60:351:90//Z93242

[14065] R-NT2RP2001397//Hamster mRNA for cyclinB2, complete cds.//5.4e-55:320:83//D17294

[14066] R-NT2RP2001420//Human DNA sequence *** SEQUENCING IN PROGRESS *** from clone 1108D 11, WORKING DRAFT SEQUENCE.//1.0e-44:246:85//AL034419

[14067] R-NT2RP2001423//Human DNA sequence from clone 726F20 on chromosome 1p36.11-36.23. Contains ESTs and a GSS, complete sequence.//3.7e-05:417:61//AL031273

[14068] R-NT2RP2001427//Human Chromosome 11 Cosmid cSRL34e5, complete sequence.//0.94:287:59//U73643

[14069] R-NT2RP2001436//Mus musculus clone OST1784, genomic survey sequence.//5.2e-31:299:77//AF046702

[14070] R-NT2RP2001440//Rattus norvegicus mRNA for 14-3-3 protein gamma-subtype, complete cds.//7.8e-75:548:83//D17447

[14071] R-NT2RP2001445//Homo sapiens 12q13.1 PAC RPCII-228P16 (Roswell Park Cancer Institute Human PAC Library) complete sequence.//1.0e-06:452:59//AC004801

[14072] R-NT2RP2001449//Homo sapiens clone DJ0647C14, WORKING DRAFT SEQUENCE, 21 unordered pieces.//5.1e-08:218:67//AC004846

[14073] R-NT2RP2001450

[14074] R-NT2RP2001467//Human BAC clone RG343P13 from 7q31, complete sequence.//3.8e-31:254:83//AC002465

[14075] R-NT2RP2001506//C. barati p-47, ntnh, bonT genes.//1.2e-06:415:60//Y12091

[14076] R-NT2RP2001511//Plasmodium falciparum MAL3P7, complete sequence.//0.11:155:63//AL034559

[14077] R-NT2RP2001520//Homo sapiens mRNA for mitochondrial carrier protein ARALAR1.//2.1e-104:545:95//Y14494

[14078] R-NT2RP2001526//Homo sapiens chromosome 17, clone hCIT.175_E_{—}5, complete sequence.//7.0e-16:283:68//AC004596

[14079] R-NT2RP2001536//Human DNA from chromosome 14-specific cosmid containing XRCC3 DNA repair gene, genomic sequence, complete sequence.//7.7e-16:108:96//AF037222

[14080] R-NT2RP2001560//CIT978SK-A-56H4.TP CIT978SK Homo sapiens genomic clone A-56H4, genomic survey sequence.//0.052:112:66//B73597

[14081] R-NT2RP2001569//CIT-HSP-2335F8.TF CIT-HSP Homo sapiens genomic clone 2335F8, genomic survey sequence.//6.0e-78:383:98//AQ042029

[14082] R-NT2RP2001576//Homo sapiens sulfonylurea receptor (SUR2) gene, exon 37.//0.33:135:66//AF061322

[14083] R-NT2RP2001581//Homo sapiens (clone MFD220) PCR primer.//2.7e-07:240:63//L15407

[14084] R-NT2RP2001597//HS_{—}3016_B2_F06_T7 CIT Approved Human Genomic Sperm Library D Homo sapiens genomic clone Plate=3016 Col=12 Row=L, genomic survey sequence.//5.3e-45:310:87//AQ118854

[14085] R-NT2RP2001601//Homo sapiens chromosome 17, clone hRPK.855_D_{—}21, complete sequence.//0.015:445:58//AC006079

[14086] R-NT2RP2001613//Mus musculus orphan nuclear hormone receptor (CAR) gene, complete sequence.//3.5e-16:413:63//AF009326

[14087] R-NT2RP2001628//Phytomonas serpens kinetoplast maxicircle ribosomal protein S12 (G6) edited mRNA, complete cds.//0.11:190:63//AF034626

[14088] R-NT2RP2001663//Homo sapiens Chromosome 16 BAC clone CIT987SK-625PI 1, complete sequence.//3.0e-26:157:81//AC004125

[14089] R-NT2RP2001677//Homo sapiens chromosome 9, PI clone 11659, complete sequence.//3.0e-58:305:96//AC004472

[14090] R-NT2RP2001678//Human BAC clone RG222A16 from 7q31, complete sequence.//0.95:107:66//AC002385

[14091] R-NT2RP2001699//Mus musculus erythroid ankyrin and two alternatively spliced erythroid ankyrins (Ank1) gene, putative exon 41 and partial cds.//8.8e-05:211:63//U76758

[14092] R-NT2RP2001720//Homo sapiens PAC clone DJO167F23 from 7p15, complete sequence.//4.7e-68:352:97//AC004079

[14093] R-NT2RP2001721//HS-1052-B1-G06-MF.abi CIT Human Genomic Sperm Library C Homo sapiens genomic clone Plate=CT 774 Col=11 Row=N, genomic survey sequence.//7.7e-05:346:59//B40914

[14094] R-NT2RP2001740//HS_{—}3213_A2_D02_T7 CIT Approved Human Genomic Sperm Library D Homo sapiens genomic clone Plate=3213 Col=4 Row=G, genomic survey sequence.//1.1e-16:162:82//AQ175104

[14095] R-NT2RP2001748//Human gene for L-histidine decarboxylase, complete cds.//2.0e-33:312:77//D16583

[14096] R-NT2RP2001762//Homo sapiens chromosome 1, BAC CIT-HSP-292g8 (BC262482), complete sequence.//2.3e-100:435:97//AC004783

[14097] R-NT2RP2001813//Human leukocyte common antigen T200 (CD45, LCA) gene, exon 9.//0.031:261:60//M23468

[14098] R-NT2RP2001861

[14099] R-NT2RP2001869//Sequence 5 from patent U.S. Pat. No. 5,595,900.//4.2e-21:194:77//I34189

[14100] R-NT2RP2001876

[14101] R-NT2RP2001883//Human DNA sequence from clone 612B18 on chromosome 1q24-25.3 Contains exon from gene similar to 40S ribosomal protein, first coding exon of dynamin 2 (DYNII). ESTs, STS, GSS, CpG Island, complete sequence.//5.0e-11:485:97//AL031864

[14102] R-NT2RP2001900

[14103] R-NT2RP2001907//Human proto-oncogene tyrosine-protein kinase (ABL) gene, exon I a and exons 2-10, complete cds.//5.4e-42:382:77//U07563

[14104] R-NT2RP2001926//HS_{—}3180_B2_F02_MR CIT Approved Human Genomic Sperm Library D Homo sapiens genomic clone Plate=3180 Col=4 Row=L, genomic survey sequence.//2.8e-25:138:80//AQ185415

[14105] R-NT2RP2001936//Plasmodium falciparum 3D7 chromosome 12 PFYAC1383 genomic sequence, WORKING DRAFT SEQUENCE, 3 unordered pieces.//1.0:320:60//AC005504

[14106] R-NT2RP2001943//Dictyostelium discoideum PkgA (pkgA) gene, partial cds.//1.4e-08:378:59//AF020280

[14107] R-NT2RP2001946//Homo sapiens clone NHO140K04, complete sequence.//3.6e-85:409:100//AC005033

[14108] R-NT2RP2001947//Human mRNA for KIAA0390 gene, complete cds.//0.85:140:64//AB002388

[14109] R-NT2RP2001969

[14110] R-NT2RP2001976//CIT-HSP-2281C3.TR CIT-HSP Homo sapiens genomic clone 2281C3, genomic survey sequence.//2.0e-60:307:98//B99575

[14111] R-NT2RP2001985//Arabidopsis thaliana DNA chromosome 4, BAC clone FIN20 (ESSAII project).//0.031:282:61//AL022140

[14112] R-NT2RP2002025

[14113] R-NT2RP2002032//CITB1-E1-2502C19.TF CITB1-E1 Homo sapiens genomic clone 2502Cl9, genomic survey sequence.//1.2e-52:285:95//AQ264715

[14114] R-NT2RP2002033//Human (lambda) DNA for immunoglobin light chain.//1.1e-08:389:61//D88270

[14115] R-NT2RP2002041//Homo sapiens 12p13.3 BAC RPCI 11-319E16 (Roswell Park Cancer Institute Human BAC Library) complete sequence.//1.1e-49:264:97//AC006206

[14116] R-NT2RP2002046//Human BAC clone GS 119P05 from 7q21, complete sequence.//0.0023:429:61//AC004011

[14117] R-NT2RP2002047//P. falciparum PKI gene.//0.00015:239:62//X83707

[14118] R-NT2RP2002058//HS_{—}2183_A1_G01_MR CIT Approved Human Genomic Sperm Library D Homo sapiens genomic clone Plate=2183 Col=1 Row=M, genomic survey sequence.//1.2e-21:185:84//AQ022560

[14119] R-NT2RP2002066//G. gallus microsatellite DNA (LE10222 (=T15ivDO4)).//0.18:102:70//Z83792

[14120] R-NT2RP2002070//P. falciparum major merozoite surface antigen (PMMSA) mRNA, complete cds, isolate FC27.//0.95:192:61//Mi9143

[14121] R-NT2RP2002076//Homo sapiens clone 24804 mRNA sequence.//3.8e-25:182:86//AF052183

[14122] R-NT2RP2002079//Human DNA sequence from clone 431P23 on chromosome 6q27. Contains the first coding exon of the MLLT4 gene for myeloid/lymphoid or mixed-lineage leukemia (trithorax (Drosophila) homolog); translocated to, 4 (AF-6, Afadin, MLLT-4, ALL-1 fusion partner), and a Serine Palmitoyltransferase 2 (EC 2.3.1.50, Long Chain Base Biosynthesis protein 2, LCB-2, SPT-2) pseudogene. Contains ESTs, STss, GSSs, and a putative CpG island, complete sequence.//1.7e-10:97:90//AL009178

[14123] R-NT2RP2002099//Homo sapiens mRNA for El B-55 kDa-associated protein.//4.6e-59:376:89//AJ007509

[14124] R-NT2RP2002105

[14125] R-NT2RP2002124//RPCI 11-75J16.TJ RPCI 11 Homo sapiens genomic clone R-75J16, genomic survey sequence.//0.58:191:6411AQ266779

[14126] R-NT2RP2002137//Homo sapiens Xp22-175-176 BAC GSHB-484017 (Genome Systems Human BAC Library) complete sequence.//0.0065:294:61//AC005913

[14127] R-NT2RP2002154

[14128] R-NT2RP2002172//RPCI 11-90C20.TJ RPCI 11 Homo sapiens genomic clone R-90C20, genomic survey sequence.//0.049:160:65//AQ282591

[14129] R-NT2RP2002185//CIT-HSP-2341115.TF CIT-HSP Homo sapiens genomic clone 2341115, genomic survey sequence.//6.0e-36:230:90//AQ053355

[14130] R-NT2RP2002192//HS_{—}2222_B1_F08_MF CIT Approved Human Genomic Sperm Library D Homo sapiens genomic clone Plate=2222 Col=15 Row=L, genomic survey sequence.//1.9e-15:249:71//AQ178491

[14131] R-NT2RP2002193//Rattus norvegicus potassium channel regulatory protein KChAP mRNA, complete cds.//4.7e-35:438:73//AF032872

[14132] R-NT2RP2002208//Hansenula wingei mitochondrial DNA, complete sequence.//0.00057:468:57//D31785

[14133] R-NT2RP2002219//HS_{—}2058_A1_C09_MR CIT Approved Human Genomic Sperm Library D Homo sapiens genomic clone Plate=2058 Col=17 Row=E, genomic survey sequence.//3.4e-55:512:77//AQ234380

[14134] R-NT2RP2002231//Plasmodium falciparum DNA *** SEQUENCING IN PROGRESS *** from contig 3-31, complete sequence.//1.5e-06:398:61//Z98557

[14135] R-nnnnnnnnnnnn//Sequence 11 from patent U.S. Pat. No. 5,624,818.//3.3e-91:553:87//I41141

[14136] R-NT2RP2002256//Homo sapiens retinoic acid hydroxylase mRNA, complete cds.//3.0e-14:132:84//AF005418

[14137] R-NT2RP2002259//Human DNA sequence *** SEQUENCING IN PROGRESS *** from clone 118J21, WORKING DRAFT SEQUENCE.//1.6e-96:548:91//AL033527

[14138] R-NT2RP2002270//Homo sapiens Chromosome 16 BAC clone CIT987SK-A-248F7, complete sequence.//5.1e-06:391:60//AC004605

[14139] R-NT2RP2002292//Genomic sequence from Human 13, complete sequence.//0.91:159:64//AC001226

[14140] R-NT2RP2002312//Homo sapiens CDP-diacylglycerol synthase 2 (CDS2) mRNA, partial cds.//1.3e-101:527:94//AF069532

[14141] R-NT2RP2002316//Plasmodium falciparum chromosome 2, section 45 of 73 of the complete sequence.//0.00052:389:59//AE001408

[14142] R-NT2RP2002325//Homo sapiens peroxisomal biogenesis factor (PEX11a) mRNA, complete cds.//2.3e-112:567:95//AF093668

[14143] R-NT2RP2002333//Rat POU domain factor (Brn-5) mRNA.//1.5e-22:323:73//L23204

[14144] R-NT2RP2002385//Homo sapiens synaptic glycoprotein SC2 spliced variant mRNA, complete cds.//3.7e-102:600:89//AF038958

[14145] R-NT2RP2002394//Plasmodium falciparum 3D7 chromosome 12 PFYAC492 genomic sequence, WORKING DRAFT SEQUENCE, 5 unordered pieces.//0.039:399:59//AC005308

[14146] R-NT2RP2002408//HS_{—}2212_A1_E09_MR CIT Approved Human Genomic Sperm Library D Homo sapiens genomic clone Plate=2212 Col=17 Row=I, genomic survey sequence.//9.6e-35:231:8811AQ184632

[14147] R-NT2RP2002426//Human DNA sequence from clone 11G11 on chromosome 22q12. Contains an ACO2 (Mitochondrial Aconitate Hydratase (Aconitase, Citrate Hydro-Lyase, EC 4.2.1.3)) pseudogene, ESTs, STSs, GSSs and a putative CpG island, complete sequence.//2.8e-39:308:82//AL021877

[14148] R-NT2RP2002439//Leishmania tarentolae mitochondrial electron transport chain component mRNA.//0.022:102:71//M74225

[14149] R-NT2RP2002457//Homo sapiens DNA sequence from PAC 142L7 on chromosome 6q21. Contains a Laminin Alpha 4 (LAMA4) LIKE gene coding for two alternatively spliced transcripts, a Tubulin Beta LIKE pseudogene, a Connective tissue growth factor (NOV, GIG) LIKE gene, A predicted CpG island, ESTs, STSs and genomic marker D6S416, complete sequence.//0.00099:354:5911Z99289

[14150] R-NT2RP2002464//Homo sapiens genomic DNA, chromosome 21q22.2 (Down Syndrome region), segment 6/15, WORKING DRAFT SEQUENCE.//0.0015:219:67//AP000013

[14151] R-NT2RP2002475

[14152] R-nnnnnnnnnnnn//Homo sapiens mRNA for ABC transporter 7 protein, complete cds.//3.1e-113:605:92//AB005289

[14153] R-NT2RP2002498//Human DNA sequence from PAC 162H14 on chromosome 22. Contains 3′ part of a FIBULIN I like gene and ESTs, complete sequence.//0.32:210:64//Z98047

[14154] R-NT2RP2002503//Homo sapiens, clone hRPK.15_A_{—}1, complete sequence.//4.0e-86:429:98//AC006213

[14155] R-NT2RP2002504//Homo sapiens mRNA for KIAA0791 protein, complete cds.//2.7e-105:583:91//AB018334

[14156] R-NT2RP2002520//Saccharomyces cerevisiae mitochondrial tRNA-Tyr, tRNA-Asn, &amp; tRNA-Met genes.//0.14:406:5811AJ223323

[14157] R-NT2RP2002537//Human DNA sequence *** SEQUENCING IN PROGRESS *** from clone 500L14, WORKING DRAFT SEQUENCE.//2.8e-16:188:78//AL023583

[14158] R-NT2RP2002546//Homo sapiens clone TUA8 Cri-du-chat region mRNA.//4.7e-108:571:93//AF009314

[14159] R-NT2RP2002549//Human Chromosome 15q26.1 PAC clone pDJ 10kS containing human DNA polymerase gamma (polg) gene, complete sequence.//1.1e-103:422:95/HAC005316

[14160] R-NT2RP2002591//Human DNA binding protein (HPF2) mRNA, complete cds.//1.8e-36:526:67//M27878

[14161] R-NT2RP2002595

[14162] R-NT2RP2002606//Human DNA sequence *** SEQUENCING IN PROGRESS *** from clone 2705, WORKING DRAFT SEQUENCE.//7.2e-10:211:71//AL033529

[14163] R-NT2RP2002609

[14164] R-NT2RP2002618//Plasmodium falciparum MAL3P6, complete sequence.//2.9e-05:566:60/HZ98551

[14165] R-NT2RP2002621//Human DNA sequence from PAC 341110 on chromosome 6q22.2-22.33. Contains 60S ribosomal protein L5 like (pseudo)gene, ESTs and STSs.//1.1e-38:348:78//Z97352

[14166] R-NT2RP2002643//Homo sapiens chromosome 11 clone pTWB15.28 map 11p15.4-p15.5, genomic survey sequence.//1.2e-35:414:66//AF074030

[14167] R-NT2RP2002672//Homo sapiens chromosome 10 clone CIT-HSP-1326H7 map 10q24.3-10q25.1, complete sequence.//1.3e-77:403:95//AC005384

[14168] R-NT2RP2002701

[14169] R-NT2RP2002706//Homo sapiens chromosome 19, cosmid F22676, complete sequence.//4.0e-42:147:90//AC005778

[14170] R-NT2RP2002710//P. falciparum serine rich protein (SERP1) gene.//0.84:135:67//J03983

[14171] R-NT2RP2002727//, complete sequence.//1.0:363:59//AC005815

[14172] R-NT2RP2002736//Arabidopsis thaliana chromosome II BAC Ti 7M13 genomic sequence, complete sequence.//0.44:267:60//AC004138

[14173] R-NT2RP2002740//Homo sapiens Xp22 BAC GSHB-600G8 (Genome Systems Human BAC library) complete sequence.//0.0016:474:60//AC004674

[14174] R-NT2RP2002741//HS_{—}3051_B1_H11_MF CIT Approved Human Genomic Sperm Library D Homo sapiens genomic clone Plate=3051 Col=21 Row=P, genomic survey sequence.//1.1e-38:217:86//AQ106283

[14175] R-NT2RP2002750//Homo sapiens 12q24.1 PAC RPCI1-315L5 (Roswell Park Cancer Institute Human PAC library) complete sequence.//5.0e-36:430:75//AC002395

[14176] R-NT2RP2002752//Human DNA sequence *** SEQUENCING IN PROGRESS *** from clone 366L4, WORKING DRAFT SEQUENCE.//8.2e-41:437:76//AL023494

[14177] R-NT2RP2002753//Homo sapiens clone DJ076B20, WORKING DRAFT SEQUENCE, 6 unordered pieces.//6.8e- 100:496:97//AC004882

[14178] R-NT2RP2002769//paramecium species 5,311 mt dna dimer: replication init. region.//7.4e-10:404:60//K00917

[14179] R-NT2RP2002778//Homo sapiens clone 24606 mRNA sequence.//1.2e-63:341:94//AF070537

[14180] R-NT2RP2002800//RPCI11-37G8.TV RPCI-11 Homo sapiens genomic clone RPCI-11-37G8, genomic survey sequence.//4.9e-60:321:95//AQ029850

[14181] R-NT2RP2002839//Homo sapiens Chromosome 11q12.2 PAC clone pDJ688 p12 containing uteroglobin gene, WORKING DRAFT SEQUENCE, 11 unordered pieces.//2.9e-100:492:98//AC006078

[14182] R-NT2RP2002857//HS_{—}3026_B2_H07_MR CIT Approved Human Genomic Sperm Library D Homo sapiens genomic clone Plate=3026 Col=14 Row=P, genomic survey sequence.//8.9e-06:242:62//AQ128697

[14183] R-NT2RP2002862//RPCII 1-42115.TJ RPCII 1 Homo sapiens genomic clone R-42115, genomic survey sequence.//1.5e-44:270:85//AQ052700

[14184] R-NT2RP2002880//Human DNA sequence *** SEQUENCING IN PROGRESS * from clone 150C2, WORKING DRAFT SEQUENCE.//1.0:295:58//AL022318

[14185] R-NT2RP2002891

[14186] R-NT2RP2002925//Human DNA sequence *** SEQUENCING IN PROGRESS *** from clone 243L18, WORKING DRAFT SEQUENCE.//2.0e-24:395:67//AL034395

[14187] R-NT2RP2002928//Plasmodium falciparum MAL3P5, complete sequence.//0.044:461:55//AL034556

[14188] R-NT2RP2002929//Plasmodium falciparum 3D7 chromosome 12 PFYACB8-420 genomic sequence, WORKING DRAFT SEQUENCE, 14 unordered pieces.//0.35:491:56//AC005140

[14189] R-NT2RP2002954//Homo sapiens chromosome 17, clone hRPK.628_E_{—}12, complete sequence.//1.0:275:61//AC005701

[14190] R-NT2RP2002959//Mus musculus ubiquitin conjugating enzyme (ubc4) mRNA, complete cds.//2.7e-61:508:79//U62483

[14191] R-NT2RP2002979//RPCI11-20F13.TPK RPCI-11 Homo sapiens genomic clone RPCI-11-20F13, genomic survey sequence.//0.88:110:72//AQ008132

[14192] R-NT2RP2002980//Homo sapiens PAC clone DJ0841 B21 from 7q21.1-q31.1, complete sequence.//1 .1e-102:433:95//AC004140

[14193] R-NT2RP2002986//Human DNA sequence from clone 1147016 on chromosome Xp21.1-21.3. Contains 13 exons of the DMD muscular dystrophy gene. Contains an STS and GSSs, complete sequence.//0.31:219:62//AL031542

[14194] R-NT2RP2002987//Homo sapiens chromosome 18, clone hRPK.24_A_{—}23, complete sequence.//1.3e-51:283:88//AC005968

[14195] R-NT2RP2002993//Human DNA sequence from PAC 106B9 on chromosome Xq21.//4.3e-11:430:63//AL021307

[14196] R-NT2RP2003000//Saccharomyces cerevisiae mitochondrion transfer RNA- Leu, Gln, Lys, Arg, Gly, Asp, Ser2, Arg2, Ala, Ile, Tyr, Asn genes.//0.00088:347:62//L36887

[14197] R-NT2RP2003034//Homo sapiens genomic DNA of 9q32 anti-oncogene of flat epitherium cancer, segment 2/10.//3.5e-33:271:82//AB020870

[14198] R-NT2RP2003073

[14199] R-NT2RP2003099//Homo sapiens PAC clone DJ0886008 from 7q32-q35, complete sequence.//1.5e-45:548:69//AC004914

[14200] R-NT2RP2003108

[14201] R-NT2RP2003117//Homo sapiens clone DJ1137M13, complete sequence.//2.0e-51:323:88//AC005378

[14202] R-NT2RP2003121//HS_{—}2238_A1_E08_MF CIT Approved Human Genomic Sperm Library D Homo sapiens genomic clone Plate=2238 Col=15 Row=I, genomic survey sequence.//0.00055:324:61//AQ293058

[14203] R-NT2RP2003125

[14204] R-NT2RP2003129

[14205] R-NT2RP2003137//Human BAC clone RG084D04 from 7q31, complete sequence.//1.1e-46:521:74//AC003084

[14206] R-NT2RP2003161//Homo sapiens chromosome 10 clone CIT-HSP-1287C20, complete sequence.//1.0:368:59//AC005879

[14207] R-NT2RP2003164//Dictyostelium discoideum actin 4 gene, 3′ UTR.//1.0:120:64//M25581

[14208] R-NT2RP2003165//Homo sapiens chromosome 17, clone hRPK.1018_N_{—}14, complete sequence.//2.2e-71:467:86//AC005823

[14209] R-NT2RP2003177

[14210] R-NT2RP2003194//Human DNA sequence *** SEQUENCING IN PROGRESS *** from clone 996D20, WORKING DRAFT SEQUENCE.//1.1e-95:585:88//AL031597

[14211] R-NT2RP2003206//P. falciparum interspersed repeat antigen (FIRA) gene.//0.039:338:60//Mi7877

[14212] R-NT2RP2003230//Plasmodium falciparum MAL3P6, complete sequence.//1.9e-11:542:60//Z98551

[14213] R-NT2RP2003237//Arabidopsis thaliana genomic DNA, chromosome 5, P1 clone: MDH9, complete sequence.//1.0:311:60//AB016888

[14214] R-NT2RP2003243//CIT-HSP-2368D12.TR CIT-HSP Homo sapiens genomic clone 2368D12, genomic survey sequence.//0.39:112:66//AQ077738

[14215] R-NT2RP2003265//Muridae sp. (mouse-rat, neuroblastoma-glioma hybrid cell line NGD5) mRNA, complete cds.//1.3e-38:273:83//L38481

[14216] R-NT2RP2003272//Homo sapiens clone UWGC:yl 7c131 from 6p21, complete sequence.//4.4e-15:181:66//AC004187

[14217] R-NT2RP2003277//Homo sapiens mRNA for KIAA0625 protein, partial cds.//4.2e-110:565:95//AB014525

[14218] R-NT2RP2003280//Homo sapiens 12 p13.3 PAC RPCI5-1180D12 (Roswell Park Cancer Institute Human PAC Library) complete sequence.//3.2e-12:221:70//AC005831

[14219] R-NT2RP2003286//Homo sapiens chromosome 19, CIT-HSP-444n24, complete sequence.//0.86:379:60//AC005261

[14220] R-NT2RP2003293//Homo sapiens clone RG252P22, WORKING DRAFT SEQUENCE, 3 unordered pieces.//1.0e-39:418:74//AC005079

[14221] R-NT2RP2003295//HS_{—}2053_B1_A10_MR CIT Approved Human Genomic Sperm Library D Homo sapiens genomic clone Plate=2053 Col=19 Row=B, genomic survey sequence.//0.0016:346:6111AQ235251

[14222] R-NT2RP2003297//Arabidopsis thaliana chromosome II BAC F4P9 genomic sequence, complete sequence.//0.74:397:56//AC002332

[14223] R-NT2RP2003308//Homo sapiens PAC clone DJIO98B01 from 7q11.23-q21, complete sequence.//0.99:447:60//AC004960

[14224] R-NT2RP2003329//C. reinhartii psbB 5′ flanking region.//0.79:161:59//X59731

[14225] R-NT2RP2003339//RPCI11-57H15.TK RPCII 1 Homo sapiens genomic clone R-57H15, genomic survey sequence.//0.13:184:6411AQ116039

[14226] R-NT2RP2003347//RPCII 1-15B19.TV RPCI-11 Homo sapiens genomic clone RPCI-11-15B19, genomic survey sequence.//6.4e-31:218:89//B76357

[14227] R-NT2RP2003367//Human Chromosome 16 BAC clone CIT987SK-A-363E6, complete sequence.//9.0e-11:101:84//U91321

[14228] R-NT2RP2003391//HS_{—}2255_B2_B04_MF CIT Approved Human Genomic Sperm Library D Homo sapiens genomic clone Plate=2255 Col=8 Row=D, genomic survey sequence.//1.6e-38:247:90//AQ068937

[14229] R-NT2RP2003393//RPCI11-44K6.TJ RPCII 1 Homo sapiens genomic clone R-44K6, genomic survey sequence.//3.9e-31:290:79//AQ202481

[14230] R-NT2RP2003394//Yeast mitochondrial oxi3 gene exon 1 for cytochrome c oxidase subunit I.//5.1e-14:579:61//X14910

[14231] R-NT2RP2003401//Caprine arthritis-encephalitis virus tat protein (tat) and envelope glycoprotein (env) gene, partial cds.//0.32:174:66//U81429

[14232] R-NT2RP2003433//Ascidian MRNA for HRSec61, complete cds.//1.5e-110:193:69//D25536

[14233] R-NT2RP2003445//Human DNA sequence *** SEQUENCING IN PROGRESS *** from clone Y313F4, WORKING DRAFT SEQUENCE.//4.4e-99:585:89//AL023808

[14234] R-NT2RP2003446

[14235] R-NT2RP2003456//Plasmodium falciparum MAL3P7, complete sequence.//0.98:399:57//AL034559

[14236] R-NT2RP2003480//Homo sapiens full-length insert cDNA clone ZE09A11 .//4.7e-111:540:98//AF086540

[14237] R-NT2RP2003499

[14238] R-NT2RP2003506

[14239] R-NT2RP2003511

[14240] R-NT2RP2003513//Human mRNA for KIAA0270 gene, partial cds.//4.1e-107:566:93//D87460

[14241] R-NT2RP2003517//Human c-sis/platelet-derived growth factor 2 (SIS/PDGF2) mRNA, complete cds.//1.5e-60:518:79//M12783

[14242] R-NT2RP2003522//HS_{—}2182_A1_D05_MF CIT Approved Human Genomic Sperm Library D Homo sapiens genomic clone Plate=2182 Col=9 Row=G, genomic survey sequence.//0.053:251:60//AQ024304

[14243] R-NT2RP2003533//Homo sapiens chromosome 12 p13.3 clone RPCI4-816N1, WORKING DRAFT SEQUENCE, 31 unordered pieces.//1.5e-37:328:80//AC005841

[14244] R-NT2RP2003543//HS_{—}3028_A2_C12_MF CIT Approved Human Genomic Sperm Library D Homo sapiens genomic clone Plate=3028 Col=24 Row=E, genomic survey sequence.//2.0e-39:203:100//AQ094957

[14245] R-NT2RP2003559//Homo sapiens full-length insert cDNA clone ZD65E09.//2.3e-59:325:95//AF088055

[14246] R-NT2RP2003564

[14247] R-NT2RP2003581

[14248] R-NT2RP2003596//HS_{—}2163_B1_D11_MF CIT Approved Human Genomic Sperm Library D Homo sapiens genomic clone Plate=2163 Col=21 Row=H, genomic survey sequence.//0.0011:212:67//AQ125143

[14249] R-NT2RP2003604//Homo sapiens alpha-catenin-like protein mRNA, complete cds.//5.4e-102:501:97//U97067

[14250] R-NT2RP2003629//Plasmodium falciparum 3D7 chromosome 12 PFYACB8-628 genomic sequence, WORKING DRAFT SEQUENCE, 9 unordered pieces.//0.0012:363:61//AC005507

[14251] R-NT2RP2003643//Mus musculus mRNA for CMP-N-acetylneuraminic acid synthetase.//5.1e-37:561:68//AJ006215

[14252] R-NT2RP2003668//Human DNA sequence from PAC 24608, between markers DXS6791 and DXS8038 on chromosome X contains ESTs.//0.0053:395:58//Z76735

[14253] R-NT2RP2003687//Human BAC clone RG222A16 from 7q31, complete sequence.//8.0e-10:205:67//AC002385

[14254] R-NT2RP2003691//HS_{—}3252_A2_Al 1_MR CIT Approved Human Genomic Sperm Library D Homo sapiens genomic clone Plate=3252 Col=22 Row=A, genomic survey sequence.//5.3e-05:332:60//AQ219783

[14255] R-NT2RP2003702//CIT-HSP-2333P5.TF CIT-HSP Homo sapiens genomic clone 2333P5, genomic survey sequence.//3.9e-43:431:75//AQ035000

[14256] R-NT2RP2003704

[14257] R-NT2RP2003706//Homo sapiens mRNA for KIAA0525 protein, partial cds.//2.6e-45:265:93//AB011097

[14258] R-NT2RP2003713//Human DNA sequence from PAC 411B6 on chromosome X *.//0.64:169:67//Z84470

[14259] R-NT2RP2003714//Human DNA sequence from 4PTEL, Huntington's Disease Region, chromosome 4p 16.3.//4.6e-11:152:73//Z95704

[14260] R-nnnnnnnnnnnn//H. sapiens mRNA for PIBFI protein, complete.//0.94:443:59//Y09631

[14261] R-NT2RP2003737//Homo sapiens clone DJ1022114, WORKING DRAFT SEQUENCE, 14 unordered pieces.//2.2e-109:547:96//AC004951

[14262] R-NT2RP2003751//Homo sapiens Chromosome 16 BAC clone CIT987SK-A-427H10, complete sequence.//4.1e-109:545:97//AC004626

[14263] R-NT2RP2003760//B. taurus mRNA for gamma-COP.//6.3e-28:400:69//X70019

[14264] R-NT2RP2003764//Mouse preprosomatostatin gene.//0.90:285:62//X51468

[14265] R-NT2RP2003769//Schizosaccharomyces pombe gene for protein involved in sexual development, complete cds.//0.96:446:58//D87956

[14266] R-NT2RP2003770//Homo sapiens sperm acrosomal protein mRNA, complete cds.//1.8e-104:531:96//AF047437

[14267] R-NT2RP2003777

[14268] R-NT2RP2003781//HS_{—}3109_B1_B04_T7 CIT Approved Human Genomic Sperm Library D Homo sapiens genomic clone Plate=3109 Col=7 Row=D, genomic survey sequence.//1.3e-60:346:92//AQ186749

[14269] R-NT2RP2003793

[14270] R-NT2RP2003840

[14271] R-NT2RP2003857//HS_{—}2205_A2_H12_MF CIT Approved Human Genomic Sperm Library D Homo sapiens genomic clone Plate=2205 Col=24 Row=O, genomic survey sequence.//8.1e-22:127:99//AQ151299

[14272] R-NT2RP2003859//RPCII 1-37G8.TV RPCI-11 Homo sapiens genomic clone RPCI-11-37G8, genomic survey sequence.//8.3e-60:320:95//AQ029850

[14273] R-NT2RP2003871//HS_{—}3210_A1_C08_T7 CIT Approved Human Genomic Sperm Library D Homo sapiens genomic clone Plate=3210 Col=15 Row=E, genomic survey sequence.//8.6e-09:322:61//AQ175028

[14274] R-NT2RP2003885//RPCI 11-7M10.TP RPCI-11 Homo sapiens genomic clone RPCI-11-7M10, genomic survey sequence.//4.7e-67:380:92/1/B72214

[14275] R-NT2RP2003912//Human DNA sequence *** SEQUENCING IN PROGRESS *** from clone 32B1, WORKING DRAFT SEQUENCE.//1.2e-33:379:75//AL023693

[14276] R-NT2RP2003952

[14277] R-NT2RP2003968//Homo sapiens hUBP mRNA for ubiquitin specific protease, complete cds.//2.3e-114:568:97//AB014458

[14278] R-NT2RP2003976//Homo sapiens mRNA for KIAA0447 protein, complete cds.//1.1e-107:540:97//AB007916

[14279] R-NT2RP2003981//Homo sapiens mRNA for KIAA0804 protein, partial cds.//7.7e-114:568:96//AB018347

[14280] R-NT2RP2003984

[14281] R-NT2RP2003986//Human Chromosome 11 pac pDJ197h17, WORKING DRAFT SEQUENCE, 11 unordered pieces.//6.6e-99:551:92//AC000382

[14282] R-NT2RP2003988

[14283] R-NT2RP2004014

[14284] R-NT2RP2004041//Homo sapiens chromosome 19, cosmid F17127, complete sequence.//4.9e-114:568:97//AC004780

[14285] R-NT2RP2004042//nbxb0020F03r CUGI Rice BAC Library Oryza sativa genomic clone nbxb0020F03r, genomic survey sequence.//0.11:195:64//AQ258389

[14286] R-nnnnnnnnnnn//Human DNA sequence *** SEQUENCING IN PROGRESS *** from clone 134019, WORKING DRAFT SEQUENCE.//7.6e-110:564:95//AL034555

[14287] R-NT2RP2004081//Plasmodium falciparum 3D7 chromosome 12 PFYAC492 genomic sequence, WORKING DRAFT SEQUENCE, 5 unordered pieces.//0.012:503:57//AC005308

[14288] R-NT2RP2004098//H. sapiens CpG island DNA genomic Mse1 fragment, clone 133h3, reverse read cpg133h3.rt1a.//7.9e-25:140:100//Z64530

[14289] R-NT2RP2004124

[14290] R-NT2RP2004142//CIT-HSP-2316F21.TR CIT-HSP Homo sapiens genomic clone 2316F21, genomic survey sequence.//2.8e-83:409:98//AQ034964

[14291] R-NT2RP2004152//HS_{—}3065_A2_D04_MF CIT Approved Human Genomic Sperm Library D Homo sapiens genomic clone Plate=3065 Col=8 Row=G, genomic survey sequence.//2.5e-62:304:100//AQ137776

[14292] R-NT2RP2004165//Anthocidaris crassispina mRNA for dynein beta-heavy chain, complete cds.//3.4e-20:343:65//DO 1021

[14293] R-NT2RP2004170//*** SEQUENCING IN PROGRESS *** Homo sapiens chromosome 4, BAC clone B33108; HTGS phase 1, WORKING DRAFT SEQUENCE, 10 unordered pieces.//2.5e-89:587:86//AC004064

[14294] R-NT2RP2004172//Dictyostelium discoideum LTR-retrotransposon Skipper, partial genomic sequence, 3′ end.//0.24:440:60//AF017047

[14295] R-NT2RP2004187//RPCI11-59E12.TK RPCII 1 Homo sapiens genomic clone R-59E12, genomic survey sequence.//3.1e-05:175:66//AQ198120

[14296] R-NT2RP2004194

[14297] R-NT2RP2004196//Fugu rubripes GSS sequence, clone 076D01bE2, genomic survey sequence.//1.6e-22:178:71//AL026601

[14298] R-NT2RP2004207//Homo sapiens BAC clone GS421103 from Xq25-q26, complete sequence.//0.19:175:64//AC005023

[14299] R-NT2RP2004226//Human DNA sequence *** SEQUENCING IN PROGRESS *** from clone Y313F4, WORKING DRAFT SEQUENCE.//6.1e-17:445:64//AL023808

[14300] R-NT2RP2004232//M. musculus (Balb/c) mRNA for serine/threonine protein kinase.//3.2e-25:326:71//Z34524

[14301] R-NT2RP2004239//Homo sapiens lok mRNA for protein kinase, complete cds.//8.7e-108:563:94//AB015718

[14302] R-NT2RP2004240//Homo sapiens antigen NY-CO-1 (NY-CO-1) mRNA, complete cds.//1.1e-101:530:93//AF039687

[14303] R-NT2RP2004242

[14304] R-NT2RP2004245//Homo sapiens DNA sequence from PAC 455H14 on chromosome Xq21.3-22.3. Contains genomic marker DXS1203 with a CA repeat polymorphism, STSs and GSSs, complete sequence.//5.1e-08:236:65//AL023280

[14305] R-NT2RP2004270//Lycopersicon esculentum 1dh2 gene.//0.98:259:61//Y10603

[14306] R-NT2RP2004300//Human DNA sequence *** SEQUENCING IN PROGRESS *** from clone 1068F16, WORKING DRAFT SEQUENCE.//5.0e-14:396:65//AL023913

[14307] R-NT2RP2004316//Homo sapiens EXT-like protein 2 (EXTL2) mRNA, complete cds.//.Se-108:544:96//AF000416

[14308] R-NT2RP20043211/Caenorhabditis elegans cosmid F47B8, complete sequence.//0.0078:333:61//Z77662

[14309] R-NT2RP2004339//Homo sapiens PAC clone DJ1136G13 from 7q35-q36, complete sequence.//1.4e-75:306:86//AC005229

[14310] R-NT2RP2004347//RPCI11-90N11.TJ RPCI11 Homo sapiens genomic clone R-90N11, genomic survey sequence.//2.9e-87:494:92//AQ284548

[14311] R-NT2RP2004364//Human DNA sequence from clone 422F24 on chromosome 6q24.1-25.2. Contains a novel gene similar to C. elegans C02C2.5. Contains ESTs, STSs and GSSs, complete sequence.//4.2e-10:161:76//AL031010

[14312] R-NT2RP2004365//Plasmodium falciparum chromosome 2, section 70 of 73 of the complete sequence.//3.6e-08:483:57//AE001433

[14313] R-NT2RP2004366//F. rubripes GSS sequence, clone 013B16aF3, genomic survey sequence.//2.1e-05:128:67//AL000528

[14314] R-NT2RP2004373//Homo sapiens 12q24.2 BAC RPCI11-407A16 (Roswell Park Cancer Institute Human BAC Library) complete sequence.//0.81:205:62//AC006065

[14315] R-NT2RP2004389//HS_{—}2183_B2_H04_MR CIT Approved Human Genomic Sperm Library D Homo sapiens genomic clone Plate=2183 Col=8 Row=P, genomic survey sequence.//3.9e-06:82:84//AQ063969

[14316] R-NT2RP2004392//Ceratovacuna sp. mitochondrial cytochrome oxidase I (3′ end), cytochrome oxidase II (complete cds) and transfer RNA-Leu gene.//2.7e-06:495:58//L39993

[14317] R-NT2RP2004396//Homo sapiens BAC clone RG 135C 18 from 7q21, complete sequence.//6.4e-111:572:96//AC005164

[14318] R-NT2RP2004399//Arabidopsis thaliana chromosome I BAC F11M15 genomic sequence, complete sequence.//0.13:253:64//AC006085

[14319] R-NT2RP2004400//HS_{—}3238_A2_H11_T7 CIT Approved Human Genomic Sperm Library D Homo sapiens genomic clone Plate=3238 Col=22 Row=O, genomic survey sequence.//5.1e-23:162:89//AQ211412

[14320] R-NT2RP2004412//Saccharomyces douglasii mitochondrial cytochrome c oxidase subunit I (COXI) gene, complete cds.//2.6e-09:458:60//M97514

[14321] R-NT2RP2004425//Human DNA sequence from clone 1052M9 on chromosome Xq25. Contains the SH2D1A gene for SH2 domain protein IA, Duncan's disease (lymphoproliferative syndrome) (DSHP), part of a 60S Acidic Ribosomal protein I (RPLP 1) LIKE gene and part of a mouse DOC4 LIKE gene. Contains ESTs and GSSs, complete sequence.//0.99:481:56//AL022718

[14322] R-NT2RP2004476//Rattus norvegicus activity and neurotransmitter-induced early gene 6 (ania-6) mRNA, 3′UTR.//5.3e-99:600:90//AF030091

[14323] R-NT2RP2004490//Homo sapiens chromosome 16, PI clone 94-10H (LANL), complete sequence.//3.9e-115:575:97//AC005591

[14324] R-NT2RP2004512//Plasmodium falciparum MAL3P3, complete sequence.//0.00034:517:58//Z98547

[14325] R-NT2RP2004523//Homo sapiens clone DJO800GO7, complete sequence.//1.8e-115:571:97//AC004890

[14326] R-NT2RP2004538//Homo sapiens BAC clone RG318C11 from 7 p14-p15, complete sequence.//1.7e-47:322:87//AC005091

[14327] R-NT2RP2004551//Homo sapiens Xp22 bins 45-47 BAC GSHB-665N22 (Genome Systems Human BAC Library) complete sequence.//0.035:511:58//AC005184

[14328] R-NT2RP2004568//T7C20-Sp6 TAMU Arabidopsis thaliana genomic clone T7C20, genomic survey sequence.//0.70:446:54//B08766

[14329] R-NT2RP2004580//Human DNA sequence *** SEQUENCING IN PROGRESS *** from clone 136BI, WORKING DRAFT SEQUENCE.//2.2e-53:397:74//AL031768

[14330] R-NT2RP2004587//CIT-HSP-2376P22.TF CIT-HSP Homo sapiens genomic clone 2376P22, genomic survey sequence.//0.0079:223:6311AQ108976

[14331] R-NT2RP2004594//Homo sapiens Chromosome 16 BAC clone CIT987SK-A-248F7, complete sequence.//5.3e-10:493:62//AC004605

[14332] R-NT2RP2004600//Homo sapiens full-length insert cDNA clone ZE04EO6.//2.1e-70:343:99//AF086522

[14333] R-NT2RP2004602//Homo sapiens full-length insert cDNA clone YW26E09.//2.0e-96:528:93//AF086033

[14334] R-NT2RP2004614

[14335] R-NT2RP2004655//Homo sapiens mRNA for leucine rich protein.//7.3e-117:587:96//AJ006291

[14336] R-NT2RP2004664//Homo sapiens mRNA for KIAA0460 protein, partial cds.//1.8e-105:520:96//AB007929

[14337] R-NT2RP2004675//Human elastin (ELN) gene, partial cds, and LIM-kinase (LIMKI) gene, complete cds.//3.4e-22:197:79//U63721

[14338] R-NT2RP2004681 I/Rat notch 2 mRNA.//8.0e-30:276:78//M93661

[14339] R-NT2RP2004689//Homo sapiens mRNA for KIAA0625 protein, partial cds.//1.6e-118:600:96//AB014525

[14340] R-NT2RP2004709//Homo sapiens full-length insert cDNA clone ZD42A08.//3.5e-14:139:86//AF086259

[14341] R-NT2RP2004710//Human DNA sequence *** SEQUENCING IN PROGRESS * from clone 126A5, WORKING DRAFT SEQUENCE.//6.9e-117:592:96//AL031447

[14342] R-NT2RP2004736//Homo sapiens mRNA for KIAA0478 protein, complete cds.//4.2e-117:594:96//AB007947

[14343] R-NT2RP2004743//Plasmodium falciparum 3D7 chromosome 12 PFYAC 181 genomic sequence, WORKING DRAFT SEQUENCE, 8 unordered pieces.//0.53:403:59//AC005505

[14344] R-NT2RP2004767//Human DNA sequence from PAC 491M17 on chromosome I p36.2-1p36.3.//2.0e-81:568:84//Z97988

[14345] R-NT2RP2004775//Anopheles quadrimaculatus NADH dehydrogenase subunits (1-4, 4L, 5-6); cytochrome oxidase subunits (1-3); adenosine triphosphatase subunits (6,8); cytochrome b; transfer RNA; ribosomal RNA (large and small subunits).//4.0e-08:365:62//L04272

[14346] R-NT2RP2004791//Homo sapiens chromosome 5, BAC clone 282B7 (LBNL H192), complete sequence.//7.8e-111:541:98//AC005216

[14347] R-NT2RP2004799//Homo sapiens ATP-specific succinyl-CoA synthetase beta subunit (SCS) mRNA, partial cds.//2.5e-114:564:96//AF058953

[14348] R-NT2RP2004802

[14349] R-NT2RP2004816//Homo sapiens H beta 58 homolog mRNA, complete cds.//2.7e-118:584:97//AF054179

[14350] R-NT2RP2004841//Human BAC clone RG308B22 from 7q22-q31, complete sequence.//4.0e-46:447:72//AC002089

[14351] R-NT2RP2004861//Plasmodium falciparum MAL3P5, complete sequence.//0.19:189:66//AL034556

[14352] R-NT2RP2004897//Human Chromosome X clone bWXD187, complete sequence.//1.1e-08:330:61//AC004383

[14353] R-NT2RP2004936//CIT-HSP-2374L4.TF CIT-HSP Homo sapiens genomic clone 2374L4, genomic survey sequence.//0.99:129:65//AQ110571

[14354] R-nnnnnnnnnnnn//Plasmodium falciparum MAL3P6, complete sequence.//0.014:402:61//Z98551

[14355] R-NT2RP2004961//RPCII 1-45P2.TK RPCII 1 Homo sapiens genomic clone R-45P2, genomic survey sequence.//9.3e-90:453:97//AQ202282

[14356] R-NT2RP2004962//Caenorhabditis elegans DNA *** SEQUENCING IN PROGRESS *** from clone Y40H4, WORKING DRAFT SEQUENCE.//0.017:291:61//AL022573

[14357] R-NT2RP2004967//Homo sapiens clone RG228D 17, WORKING DRAFT SEQUENCE, 2 unordered pieces.//4.6e-52:496:77//AC005077

[14358] R-NT2RP2004978//Homo sapiens chromosome 19, cosmid F23269, complete sequence.//0.088:322:63//AC005614

[14359] R-NT2RP2004982//Homo sapiens BAC clone BK085E05 from 22q12.1-qter, complete sequence.//0.025:339:61//AC003071

[14360] R-NT2RP2004985//T31H24TF TAMU Arabidopsis thaliana genomic clone T31H24, genomic survey sequence.//0.40:111:70//B78148

[14361] R-NT2RP2004999//Homo sapiens clone NH0084KI 9, WORKING DRAFT SEQUENCE, 30 unordered pieces.//0.23:157:68//AC005682

[14362] R-NT2RP2005000

[14363] R-NT2RP2005001//Homo sapiens mRNA for KIAA0615 protein, complete cds.//3.0e-111:577:95//AB014515

[14364] R-NT2RP2005003//Homo sapiens Xp22-132-134 BAC GSHB-590J15 (Genome Systems Human BAC library) complete sequence.//2.4e-21:246:77//AC004673

[14365] R-nnnnnnnnnnnn//Homo sapiens SEC63 (SEC63) mRNA, complete cds.//9.5e-115:568:97//AF100141

[14366] R-NT2RP2005018//HS_{—}3108_B I_E09_T7 CIT Approved Human Genomic Sperm Library D Homo sapiens genomic clone Plate=3108 Col=17 Row=J, genomic survey sequence.//1.9e-31:222:8911AQ104050

[14367] R-NT2RP2005020//Rattus norvegicus cationic amino acid transporter-1 (CAT-1) mRNA, complete cds.//6.6e-41:566:73//U70476

[14368] R-NT2RP2005031/ICIT-HSP-516A2.TV CIT-HSP Homo sapiens genomic clone 516A2, genomic survey sequence.//4.1e-31:357:75//B49897

[14369] R-NT2RP2005037

[14370] R-NT2RP2005038//Sequence 5 from patent U.S. Pat. No. 5,552,281.//2.2e-32:178:98//I25644

[14371] R-NT2RP2005108//Mus musculus orphan nuclear hormone receptor (CAR) gene, complete sequence.//3.7e-23:475:67//AF009326

[14372] R-NT2RP2005116//Homo sapiens mRNA for KIAA0664 protein, partial cds.//8.4e-104:518:97//AB014564

[14373] R-NT2RP2005126//H. sapiens mRNA for RNA helicase (Myc-regulated dead box protein).//1.4e-67:464:85//X98743

[14374] R-NT2RP2005139

[14375] R-NT2RP2005140//Leishmania mexicana amazonensis kinetoplast (clone 29) maxicircle A+T-rich repetitive DNA sequence.//7.9e-08:460:60//U00101

[14376] R-NT2RP2005144//Homo sapiens chromosome 12 p13.3 clone RPCII 1-372B4, WORKING DRAFT SEQUENCE, 129 ordered pieces.//2.5e-103:519:96//AC005911

[14377] R-NT2RP2005147//Homo sapiens clone DJ1125K23, WORKING DRAFT SEQUENCE, 21 unordered pieces.//0.068:100:75//AC004971

[14378] R-NT2RP2005159//CITB1-E1-2506A8.TF CITBI-El Homo sapiens genomic clone 2506A8, genomic survey sequence.//0.90:113:71//AQ262104

[14379] R-NT2RP2005162//Homo sapiens chromosome 17, clone HClT307A 16, complete sequence.//5.0e-14:183:75//AC003041

[14380] R-NT2RP2005168//Homo sapiens mRNA for El B-55 kDa-associated protein.//7.5e-100:513:95//AJ007509

[14381] R-NT2RP2005204

[14382] R-NT2RP2005227//Homo sapiens PAC clone DJ0905J08 from 7 p12-p14, complete sequence.//7.2e-119:583:97//AC005189

[14383] R-NT2RP2005239//Homo sapiens mRNA for putative tRNA splicing protein, partial.//8.4e-62:312:98//AJ010952

[14384] R-NT2RP2005254//Homo sapiens DNA sequence from PAC 262D12 on chromosome 1q23.3-24.3. Contains a Tenascin (Hexabrachion, Cytotactin, Neuronectin, Myotendinous antigen)-LIKE gene and a mitochondrial/chloroplast 30S ribosomal protein Si14-LIKE gene preceeded by a CpG island. Contains ESTs, genomic marker Dl S2691 and STSs.//5.7e-09:328:62//Z99297

[14385] R-NT2RP2005270//Plasmodium falciparum MAL3P8, complete sequence.//2.3e-05:355:61//AL034560

[14386] R-NT2RP2005276//Genomic sequence for Arabidopsis thaliana BAC F17F8, complete sequence.//0.0014:541:58//AC000107

[14387] R-NT2RP2005287//Cavia porcellus zinc finger protein (zfoCl) mRNA, complete cds.//4.4e-69:459:86//L26335

[14388] R-NT2RP2005288//Homo sapiens RCCl-like G exchanging factor RLG mRNA, complete cds.//7.4e-124:594:98//AF060219

[14389] R-NT2RP2005289//Homo sapiens mRNA for XRP2 protein.//1.5e-110:545:96//AJ007590

[14390] R-NT2RP2005293//Leishmania mexicana amazonensis kinetoplast (clone 29) maxicircle A+T-rich repetitive DNA sequence.//1.l e-12:554:61//U00101

[14391] R-NT2RP2005315//Homo sapiens DNA sequence from PAC 168L15 on chromosome 6q26-27. Contains RSK3 gene, ribosomal protein S6 kinase, EST, GSS, STS. CpG island, complete sequence.//9.5e-15:218:77//AL022069

[14392] R-NT2RP2005325//Rattus norvegicus LIM homeodomain protein (LH-2) mRNA sequence.//2.0e-72:478:88//L06804

[14393] R-NT2RP2005336//***ALU WARNING: Human Alu-J subfamily consensus sequence.//7.3e-33:139:82//U14567

[14394] R-NT2RP2005344//Human DNA sequence from PAC 128N22 on chromosome Xq25-Xq26.3. contains STS.//0.094:451:60//Z97629

[14395] R-NT2RP2005354//Homo sapiens mRNA for putative thioredoxin-like protein.//1.3e-11:89:96//AJ010841

[14396] R-NT2RP2005360//Homo sapiens clone RG023115, WORKING DRAFT SEQUENCE, I unordered pieces.//0.046:266:60//AC005049

[14397] R-NT2RP2005393//Homo sapiens chromosome 17, clone hRPK.85_B_{—}7, complete sequence.//6.0e-41:226:86//AC005695

[14398] R-NT2RP2005407

[14399] R-NT2RP2005436//Polistes annularis (clone pan117AAT) tandem repeat region.//0.039:169:63//L10835

[14400] R-NT2RP2005441I/CIT-HSP-2338P5.TR CIT-HSP Homo sapiens genomic clone 2338P5, genomic survey sequence.//3.0e-38:263:88//AQ055548

[14401] R-NT2RP2005453//CIT-HSP-2367N1.TR CIT-HSP Homo sapiens genomic clone 2367N1, genomic survey sequence.//0.67:409:59//AQ079845

[14402] R-NT2RP2005457//Homo sapiens partial XPGC gene, exon 2.//2.0e-42:315:82//X71342

[14403] R-NT2RP2005464//CIT-HSP-2359C16.TF CIT-HSP Homo sapiens genomic clone 2359C16, genomic survey sequence.//1.0:251:60//AQ075816

[14404] R-NT2RP2005465//Drosophila melanogaster, chromosome 2R, region 44D1-44D2, P1 clone DS08616, complete sequence.//0.25:288:62//AC005457

[14405] R-NT2RP2005472//Chlorarachnion CCMP621 small subunit ribosomal RNA, 5.8S ribosomal RNA, large subunit ribosomal RNA, U6 small nuclear RNA, small subunit ribosomal protein S13 (RPS 13), pre-mRNA splicing factor PRP6 homolog, small subunit ribosomal protein 4 (RPS4), small nucleolar ribonucleoprotein E homolog (snRNPE), ATP-dependent clp protease proteolytic subunit homolog (CLPP), putative RNA polymerase II subunit (RNA POLII), and RNA helicase homolog (RNAHEL) genes, complete cds.//1.0:356:59//U58510

[14406] R-NT2RP2005476//Plasmodium falciparum DNA *** SEQUENCING IN PROGRESS *** from MALI P3, WORKING DRAFT SEQUENCE.//0.00092:421:60//AL031746

[14407] R-NT2RP2005490//Homo sapiens clone NH0001P09, WORKING DRAFT SEQUENCE, 1 unordered pieces.//6.2e-71:187:100//AC006030

[14408] R-NT2RP2005491//paramnecium species 5,311 mt dna dimer: replication init. region.//1.6e-10:403:62//K00917

[14409] R-NT2RP2005495//Homo sapiens clone RG037F03, WORKING DRAFT SEQUENCE, 12 unordered pieces.//1.3e-25:208:82//AC005051

[14410] R-NT2RP2005496//Human DNA sequence from clone 354N19 on chromosome 6q22. Contains the 3′ part of the gene for Mannosyl-Oligosaccharide Alpha-1,2-Mannosidase (Man(9)-alpha-mannosidase, EC 3.2.1.113), a Cytochrome C Oxidase Polypeptide I (EC 1.9.3.1) pseudogene and a pseudogene similar to 60S Ribosomal Protein LI 3A. Contains genomic markers D6S287 and D6Si696, ESTs, STSs, GSSs and two CA repeat polymorphisms, complete sequence.//1.5e-22:196:84//AL022722

[14411] R-NT2RP2005498

[14412] R-NT2RP2005501//Homo sapiens chromosome 17, clone hRPK.269_G_{—}24, complete sequence.//1.7e-29:252:76//AC005828

[14413] R-NT2RP2005509//CIT-HSP-2060J6.TR CIT-HSP Homo sapiens genomic clone 2060J6, genomic survey sequence.//3.1e-53:402:84//B69979

[14414] R-NT2RP2005520//Homo sapiens chromosome-associated protein-E (hCAP-E) mRNA, complete cds.//9.9e-109:570:94//AF092563

[14415] R-NT2RP2005525//Human clone JkA2 mRNA induced upon T-cell activation, 3′ end.//5.1e-32:175:98//U38432

[14416] R-NT2RP2005531//Homo sapiens PAC clone DJ0870F17 from 7q33-q36, complete sequence.//0.94:288:61//AC004911

[14417] R-NT2RP2005539//Homo sapiens mRNA for NS 1-binding protein (NS 1-BP).//2.7e-106:560:94//AJ012449

[14418] R-NT2RP2005540//Homo sapiens mRNA for KIAA0494 protein, complete cds.//5.3e-114:583:96//AB007963

[14419] R-NT2RP2005549//Homo sapiens *** SEQUENCING IN PROGRESS ***, WORKING DRAFT SEQUENCE.//0.91:287:58//AJ011929

[14420] R-NT2RP2005555//Homo sapiens 12 p13.3 PAC RPCI5-927J10 (Roswell Park Cancer Institute Human PAC library) complete sequence.//3.6e-05:222:66//AC004804

[14421] R-NT2RP2005557//Homo sapiens PAC clone DJ1200123 from 7 p15, complete sequence.//8.2e-22:236:76//AC004996

[14422] R-NT2RP2005581//Homo sapiens clone DJO693MI 1, WORKING DRAFT SEQUENCE, 7 unordered pieces.//7.2e-45:286:85//AC006146

[14423] R-NT2RP2005600//Human polymorphic microsatellite DNA.//0.043:304:58//M99148

[14424] R-NT2RP2005605//Human Cosmid g1572c190, complete sequence.//2.4e-17:163:77//AC000126

[14425] R-NT2RP2005620

[14426] R-NT2RP2005622//jd432 Trypanosome Shotgun Ml 3 genomic Trypanosoma brucei brucei genomic clone I IB7, genomic survey sequence.//0.010:308:58//B13538

[14427] R-NT2RP2005637//Homo sapiens PAC clone DJO555L14 from 7q34-q36, complete sequence.//2.5e-26:322:72//AC005996

[14428] R-NT2RP2005640//Mus musculus squamous cell carcinoma antigen 2 (Scca2) gene, complete cds.//0.030:370:60//AF063937

[14429] R-NT2RP2005645//Plasmodium falciparum chromosome 2, section 35 of 73 of the complete sequence.//3.2e-08:355:62//AE001398

[14430] R-NT2RP2005651

[14431] R-NT2RP2005654//Leishmania major Friedlin cosmid L5769, complete sequence.//0.96:216:66//AL031908

[14432] R-NT2RP2005669//Homo sapiens nitrilase homolog 1 (NIT1) gene, alternatively spliced product, complete cds.//6.7e-117:594:95//AF069984

[14433] R-NT2RP2005675//Homo sapiens growth suppressor related (DOC-1 R) mRNA, complete cds.//1.8e-89:434:98//AF089814

[14434] R-NT2RP2005683//jd432 Trypanosome Shotgun Ml 3 genomic Trypanosoma brucei brucei genomic clone 11B7, genomic survey sequence.//0.037:283:58//B13538

[14435] R-NT2RP2005690//Homo sapiens clone DJ0425102, WORKING DRAFT SEQUENCE, 5 unordered pieces.//1.5e-38:295:83//AC005478

[14436] R-NT2RP2005694//Plasmodium falciparum DNA *** SEQUENCING IN PROGRESS *** from contig 3-106, complete sequence.//0.0026:414:57//AL010210

[14437] R-NT2RP2005701

[14438] R-NT2RP2005712//Homo sapiens mRNA for KIAA0799 protein, partial cds.//4.1e-104:503:98//AB018342

[14439] R-NT2RP2005719//Caenorhabditis elegans cosmid LLC1, complete sequence.//0.83:275:61//Z82277

[14440] R-NT2RP2005722//Human DNA sequence *** SEQUENCING IN PROGRESS *** from clone 228H13, WORKING DRAFT SEQUENCE.//1.2e-21:199:75//AL031985

[14441] R-NT2RP2005723

[14442] R-NT2RP2005726//Homo sapiens clone DJ0609NI9, WORKING DRAFT SEQUENCE, 3 unordered pieces.//2.6e-64:503:82//AC004842

[14443] R-NT2RP2005741//Human Chromosome 11 pac pDJ393015, WORKING DRAFT SEQUENCE, 8 unordered pieces.//2.5e-09:261:64//AC000384

[14444] R-NT2RP2005748//RPCI11-64K11.TK RPCII 1 Homo sapiens genomic clone R-64K11, genomic survey sequence.//0.00039:215:66//AQ239313

[14445] R-NT2RP2005752//Homo sapiens TNFR-related death receptor-6 (DR6) mRNA, complete cds.//1.3e-40:223:96//AF068868

[14446] R-NT2RP2005753//Homo sapiens I-1 receptor candidate protein mRNA, complete cds.//3.7e-103:494:98//AF082516

[14447] R-NT2RP2005763//Homo sapiens DNA sequence from PAC 510L9 on chromosome 6p24.1-p25.3./19.7e-34:172:86//AL022098

[14448] R-NT2RP2005767//Human clone H3 mRNA.//2.5e-21:179:87//U03672

[14449] R-NT2RP2005773//HS_{—}2168_B1_G12_MF CIT Approved Human Genomic Sperm Library D Homo sapiens genomic clone Plate=2168 Col=23 Row=N, genomic survey sequence.//0.99:212:6311AQ086414

[14450] R-NT2RP2005775//Rabbit mRNA for endopeptidase, complete cds.//4.8e-98:591:88//D 13310

[14451] R-NT2RP2005781//Streptomyces sp. genomic DNA for sarcosine oxidase.//0.019:384:59//DI0623

[14452] R-NT2RP2005784//Human DNA sequence *** SEQUENCING IN PROGRESS *** from clone 1185N5, WORKING DRAFT SEQUENCE.//1.8e-102:490:99//AL034423

[14453] R-NT2RP2005804//Homo sapiens chromosome 17, clone hRPK.147_L_{—}13, complete sequence.//6.3e-16:481:63//AC005332

[14454] R-NT2RP2005812//Caenorhabditis elegans cosmid F 15B 10.//0.81:147:63//AF036696

[14455] R-NT2RP2005815

[14456] R-NT2RP2005835

[14457] R-NT2RP2005841//Human DNA sequence from cosmid U209GI on chromosome X.//1.5e-26:512:64//Z68873

[14458] R-NT2RP2005853//Human DNA sequence from clone 1156N12 on chromosome X. Contains an STS and GSSs, complete sequence.//3.7e-16:340:64//AL009047

[14459] R-NT2RP2005857//Human DNA sequence from cosmid U246D9 on chromosome X. Contains a histone H2B like pseudogene.//1.3e-09:331:65//AL021308

[14460] R-NT2RP2005859//Plasmodium falciparum DNA *** SEQUENCING IN PROGRESS *** from contig 3-83, complete sequence.//0.0097:363:59//AL010152

[14461] R-NT2RP2005868//Plasmodium falciparum DNA *** SEQUENCING IN PROGRESS *** from contig 3-18, complete sequence.//1.1e-07:508:60//AL008971

[14462] R-NT2RP2005890//Mouse oncogene (ect2) mRNA, complete cds.//2.7e-31:500:67//L11316

[14463] R-NT2RP2005901//Homo sapiens T-cell receptor alpha delta locus from bases 752679 to 1000555 (section 4 of 5) of the Complete Nucleotide Sequence.//0.89:276:60//AE000661

[14464] R-NT2RP2005908

[14465] R-NT2RP2005933//Rattus norvegicus nucleoporin p54 mRNA, complete cds.//1.2e-40:285:80//U63840

[14466] R-NT2RP2005942//Homo sapiens DNA sequence from PAC 142L7 on chromosome 6q21. Contains a Laminin Alpha 4 (LAMA4) LIKE gene coding for two alternatively spliced transcripts, a Tubulin Beta LIKE pseudogene, a Connective tissue growth factor (NOV, GIG) LIKE gene, A predicted CpG island, ESTs, STSs and genomic marker D6S416, complete sequence.//0.0011:480:58//Z99289

[14467] R-NT2RP2005980//Homo sapiens Xp22 BAC GSHB-536K7 (Genome Systems Human BAC library) complete sequence.//8.9e-21:136:78//AC004616

[14468] R-NT2RP2006023//HS_{—}2176_B1_C10_MR CIT Approved Human Genomic Sperm Library D Homo sapiens genomic clone Plate=2176 Col=19 Row=F, genomic survey sequence.//2.5e-66:369:95//AQ023148

[14469] R-NT2RP2006038//Plasmodium falciparum chromosome 2, section 6 of 73 of the complete sequence.//0.00029:408:58//AE001369

[14470] R-NT2RP2006043//Polistes annularis (clone pan117AAT) tandem repeat region.//0.032:195:62//L10835

[14471] R-NT2RP2006052//Plasmodium falciparum 3D7 chromosome 12 PFYACB8-420 genomic sequence, WORKING DRAFT SEQUENCE, 14 unordered pieces.//0.11:263:61//AC005140

[14472] R-NT2RP2006069

[14473] R-NT2RP2006071//Plasmodium falciparum 3D7 chromosome 12 PFYAC1122 genomic sequence, WORKING DRAFT SEQUENCE, 3 unordered pieces.//0.00044:333:61//AC004709

[14474] R-NT2RP2006098//Plasmodium falciparum DNA *** SEQUENCING IN PROGRESS *** from contig 3-77, complete sequence.//4.1e-09:393:62//AL001051

[14475] R-NT2RP2006100//HS_{—}2020_A2_H02_T7 CIT Approved Human Genomic Sperm Library D Homo sapiens genomic clone Plate=2020 Col=4 Row=0, genomic survey sequence.//8.3e-53:304:92//AQ228761

[14476] R-NT2RP2006103//Rat sodium-hydrogen exchange protein-isoform 3 (NHE-3) mRNA, complete cds.//1.5e-16:199:79//M85300

[14477] R-NT2RP2006141

[14478] R-NT2RP2006166//Human Chromosome 16 BAC clone CIT987SK-A-589HI, complete sequence.//8.2e-48:329:76//AC002045

[14479] R-NT2RP2006184//RPCI11-6016.TP RPCI-11 Homo sapiens genomic clone RPCI-11-6016, genomic survey sequence.//0.52:273:61//B49539

[14480] R-NT2RP2006186//Homo sapiens mRNA for KIAA0654 protein, partial cds.//1.9e-108:553:95//AB014554

[14481] R-NT2RP2006196//Plasmodium falciparum DNA *** SEQUENCING IN PROGRESS * from contig 3-57, complete sequence.//4.2e-05:420:59//AL008981

[14482] R-NT2RP2006200//Homo sapiens chromosome 12p 13.3 clone RPCI 1-96H9, WORKING DRAFT SEQUENCE, 66 unordered pieces.//2.1e-100:409:96//AC006057

[14483] R-NT2RP2006219//H. sapiens mRNA for DGCR6 protein.//3.8e-93:532:90//X96484

[14484] R-NT2RP2006237//P. falciparum PKI gene.//2.9e-08:481:59//X83707

[14485] R-NT2RP2006238//Human chromosome 16 BAC clone CIT987SK-A-962B4, complete sequence.//3.5e-79:405:89//U91318

[14486] R-NT2RP2006258//Human PAC clone DJ0899B21 from 7p5-p21, complete sequence.//2.2e-08:283:63//AC004008

[14487] R-NT2RP2006261//H. sapiens mRNA for serine/threonine protein kinase EMK.//6.2e-13:234:68//X97630

[14488] R-NT2RP2006312//Homo sapiens BAF57 (BAF57) gene, complete cds.//2.0e-108:542:97//AF035262

[14489] R-NT2RP2006320//347J16.TVB CIT978SKAI Homo sapiens genomic clone A-347J16, genomic survey sequence.//1.2e-27:215:65//B17768

[14490] R-NT2RP2006321//Human karyopherin beta 3 mRNA, complete cds.//1.7e-48:298:90//U72761

[14491] R-NT2RP2006323//Human DNA sequence *** SEQUENCING IN PROGRESS *** from clone 702J 19, WORKING DRAFT SEQUENCE.//2.8e-104:524:96//AL033531

[14492] R-NT2RP2006333//Homo sapiens PAC clone DJO808AO1 from 7q21.1-q31.1, complete sequence.//3.9e-33:298:78//AC004893

[14493] R-NT2RP2006334

[14494] R-NT2RP2006365//RPCI11-72115.TK RPCII 1 Homo sapiens genomic clone R-72115, genomic survey sequence.//2.6e-35:217:92//AQ267043

[14495] R-NT2RP2006393//*** SEQUENCING IN PROGRESS *** Homo sapiens chromosome 4, BAC clone B13E4; HTGS phase 1, WORKING DRAFT SEQUENCE, 10 unordered pieces.//8.0e-40:317:81//AC004046

[14496] R-NT2RP2006436//Human DNA sequence *** SEQUENCING IN PROGRESS *** from clone Y738F9, WORKING DRAFT SEQUENCE.//3.2e-42:184:86//AL022345

[14497] R-NT2RP2006441//Plasmodium falciparum microsatellite TA80 sequence.//0.00021:188:68//AF010568

[14498] R-NT2RP2006454//Plasmodium falciparum chromosome 2, section 60 of 73 of the complete sequence.//0.30:265:60//AE001423

[14499] R-NT2RP2006456//Homo sapiens clone 23566 mRNA sequence.//2.5e-104:532:96//AF052098

[14500] R-NT2RP2006464//Homo sapiens mRNA for AND-1 protein.//6.6e-108:524:97//AJ006266

[14501] R-NT2RP2006467//Sequence 50 from patent U.S. Pat. No. 5,691,147.//8.3e-22:235:74//I76222

[14502] R-NT2RP2006472//Human DNA sequence *** SEQUENCING IN PROGRESS *** from clone 1172A22, WORKING DRAFT SEQUENCE.//5.4e-12:407:62//AL034386

[14503] R-NT2RP2006534//Dictyostelium discoideum actin 8 gene, 3′ UTR.//0.44:111:65//M25216

[14504] R-NT2RP2006554//Plasmodium falciparum chromosome 2, section 7 of 73 of the complete sequence.//0.19:392:58//AE001370

[14505] R-NT2RP2006565//Sus scrofa SCAMP1 gene, exon 9.//1.5e-113:292:68//AJ223742

[14506] R-NT2RP2006571//Homo sapiens chromosome 19, cosmid F17972, complete sequence.//0.0024:409:58//AC004660

[14507] R-nnnnnnnnnnnn//Human BRCA2 region, mRNA sequence CG005.//3.3e-16:334:64//U50532

[14508] R-NT2RP2006598//Mus musculus retinoid X receptor interacting protein (RIP 110) mRNA, partial cds.//1.6e-19:448:64//U22015

[14509] R-NT2RP3000002//Human DNA sequence from cosmid N104C7 on chromosome 22, complete sequence.//4.4e-14:501:63//Z82246

[14510] R-NT2RP3000031//Homo sapiens mRNA for histone deacetylase-like protein (JM21).//5.9e-115:560:97//AJ011972

[14511] R-NT2RP3000046//Homo sapiens clone DJ0042M02, WORKING DRAFT SEQUENCE, 20 unordered pieces.//3.9e-57:402:83//AC005995

[14512] R-NT2RP3000047//Homo sapiens chromosome 17, clone hRPK.138_P_{—}22, complete sequence.//1.0:158:66//AC005697

[14513] R-NT2RP3000050//Human DNA sequence *** SEQUENCING IN PROGRESS *** from clone 451B21, WORKING DRAFT SEQUENCE.//2.7e-32:411:69//AL033522

[14514] R-NT2RP3000055//Human DNA sequence *** SEQUENCING IN PROGRESS * from clone 1000N6, WORKING DRAFT SEQUENCE.//7.9e-17:309:69//AL034378

[14515] R-NT2RP3000072//Brassica rapa DNA for S-locus glycoprotein, complete cds.//2.9e-07:516:60//D88192

[14516] R-NT2RP3000080//Homo sapiens clone DJ1129D05, complete sequence.I/1.7e-27:186:90//AC005630

[14517] R-NT2RP3000085//Arabidopsis thaliana acetyl-CoA carboxylase biotin-containing subunit mRNA, nuclear gene encoding chloroplast protein, complete cds.//0.0051:289:59//U23155

[14518] R-NT2RP3000109//HS_{—}3065_A2_D04_MF CIT Approved Human Genomic Sperm Library D Homo sapiens genomic clone Plate=3065 Col=8 Row=G, genomic survey sequence.//2.5e-62:304:100//AQ137776

[14519] R-NT2RP3000134//Plasmodium falciparum DNA *** SEQUENCING IN PROGRESS * from MALI P3, WORKING DRAFT SEQUENCE.//0.027:414:57//AL031746

[14520] R-NT2RP3000142//Homo sapiens mRNA for KIAA0592 protein, partial cds.//3.8e-115:578:96//AB011164

[14521] R-NT2RP3000149//Homo sapiens chromosome 17, clone hRPK.332_H_{—}18, complete sequence.//1.3e-67:354:95//AC005746

[14522] R-NT2RP3000186

[14523] R-NT2RP3000197//Human DNA sequence from PAC 181N1 on chromosome X contains ESTs, STS polymorphic CA repeat*.//2.5e-31:295:78//Z82899

[14524] R-NT2RP3000207//Homo sapiens Chromosome 16 BAC clone CIT987SK-A-954B10, complete sequence.//0.016:305:61//AC004514

[14525] R-NT2RP3000220//RPCI11-6307.TJ RPCII 1 Homo sapiens genomic clone R-6307, genomic survey sequence.//0.25:118:66//AQ201832

[14526] R-NT2RP3000233//Plasmodium falciparum mRNA for major merozoite surface antigen gp195.//3.2e-11:440:59//X15063

[14527] R-NT2RP3000235//Mus musculus chromosome 6 clone TB6 subclone TB6pD1.//0.81:114:64//U19530

[14528] R-NT2RP3000247//Homo sapiens DNA sequence from clone 326L12 on chromosome Xq27.1-27.3. Contains the cancer/testis antigen CT7 (melanoma-associated antigen MAGE-C1) gene, two MAGE family pseudogenes, STSs and a CA repeat polymorphism, complete sequence.//4.8e-73:362:86//AL023279

[14529] R-NT2RP3000251//Homo sapiens chromosome 17, clone hRPK.192_H_{—}23, complete sequence.//0.025:131:66//AC005726

[14530] R-NT2RP3000252

[14531] R-NT2RP3000255//HS-1025-B2-F08-MF.abi CIT Human Genomic Sperm Library C Homo sapiens genomic clone Plate=CT 804 Col=16 Row=L, genomic survey sequence.//0.67:119:66//B34879

[14532] R-NT2RP3000267

[14533] R-NT2RP3000299//Rattus norvegicus mRNA for Crk-associated substrate, p130, complete cds.//1.2e-23:424:69//D29766

[14534] R-NT2RP3000312//Plasmodium falciparum MAL3P4, complete sequence.//0.55:414:59//AL008970

[14535] R-NT2RP3000320//HS_{—}3056_A1_C03_MR CIT Approved Human Genomic Sperm Library D Homo sapiens genomic clone Plate=3056 Col=5 Row=E, genomic survey sequence.//4.1e-32:214:89//AQ134064

[14536] R-NT2RP3000324//Rattus norvegicus potassium channel regulator 1 mRNA, complete cds.//1.5e-22:265:75//U78090

[14537] R-NT2RP3000333//Plasmodium falciparum MAL3P6, complete sequence.//0.68:460:57//Z98551

[14538] R-NT2RP3000341//H. sapiens mRNA for TIM17 preprotein translocase.//1.4e-19:137:90//X97544

[14539] R-NT2RP3000348//CITBI-E1-2513C11.TF CITBI-E1 Homo sapiens genomic clone 2513CI 1, genomic survey sequence.//0.0014:118:72//AQ278177

[14540] R-NT2RP3000350

[14541] R-NT2RP3000359//Homo sapiens clone NH0319F03, WORKING DRAFT SEQUENCE, 3 unordered pieces.//2.8e-55:320:75//AC006039

[14542] R-NT2RP3000361//Homo sapiens mRNA for KIAA0552 protein, complete cds.//0.18:275:61//AB011124

[14543] R-NT2RP3000366//CIT-HSP-2317H13.TF CIT-HSP Homo sapiens genomic clone 2317H13, genomic survey sequence.//6.7e-42:214:100//AQ041634

[14544] R-NT2RP3000397//HS-1012-B1-FO1-MR.abi CIT Human Genomic Sperm Library C Homo sapiens genomic clone Plate=CT 787 Col=1 Row=L, genomic survey sequence.//0.015:184:63//B31814

[14545] R-NT2RP3000403//Homo sapiens formin binding protein 21 mRNA, complete cds.//1.3e-109:529:98//AF071185

[14546] R-NT2RP3000418//Human DNA sequence *** SEQUENCING IN PROGRESS *** from clone 510B21, WORKING DRAFT SEQUENCE.//6.2e-15:445:65//AL031885

[14547] R-NT2RP3000433

[14548] R-NT2RP3000439

[14549] R-NT2RP3000441

[14550] R-NT2RP3000449//Human DNA sequence *** SEQUENCING IN PROGRESS *** from clone 1018D 12, WORKING DRAFT SEQUENCE.//1.6e-43:300:76//AL031650

[14551] R-NT2RP3000451//3′untranslated region of human mRNA for a K+channel protein.//0.71:101:6611E13519

[14552] R-NT2RP3000456//Human Xq28 cosmids U126G1, U142F2, U69B6, U145C10, U169A5, U84H1, U24D12, U80A7, U153E6, L35485, and R7-163A8 containing iduronate 2-sulfatase gene and pseudogene, complete sequence.//5.2e-16:376:65//AF01889

[14553] R-NT2RP3000484//Human DNA sequence *** SEQUENCING IN PROGRESS *** from clone 120G22, WORKING DRAFT SEQUENCE.//0.61:326:58//AL031847

[14554] R-NT2RP3000487//Sequence 32 from patent U.S. Pat. No. 5,476,781.//8.6e-08:409:61//I16692

[14555] R-NT2RP3000512//RPCI11-60F15.TK RPCII 1 Homo sapiens genomic clone R-60F15, genomic survey sequence.//2.2e-68:379:93//AQ201516

[14556] R-NT2RP3000526//Human DNA sequence *** SEQUENCING IN PROGRESS *** from clone 377F16, WORKING DRAFT SEQUENCE.//4.1e-07:224:65//Z93783

[14557] R-NT2RP3000527//HS_{—}3228_A1_H07_T7 CIT Approved Human Genomic Sperm Library D Homo sapiens genomic clone Plate=3228 Col=13 Row=O, genomic survey sequence.//4.5e-30:184:93//AQ209131

[14558] R-NT2RP3000531//T6M24-Sp6 TAMU Arabidopsis thaliana genomic clone T6M24, genomic survey sequence.//0.67:88:68//AQ248538

[14559] R-NT2RP3000542//Human DNA sequence *** SEQUENCING IN PROGRESS *** from clone 126B4, WORKING DRAFT SEQUENCE.//2.0e-24:145:82//AL022316

[14560] R-NT2RP3000561//Homo sapiens PAC clone DJ0942116 from 7q11, complete sequence.//6.1e-107:548:95//AC006012

[14561] R-NT2RP3000562//HS_{—}2041_B1_E08_T7 CIT Approved Human Genomic Sperm Library D Homo sapiens genomic clone Plate=2041 Col=15 Row=J, genomic survey sequence.//9.6e-55:279:98//AQ230207

[14562] R-NT2RP3000578//Plasmodium falciparum DNA *** SEQUENCING IN PROGRESS *** from contig 3-105, complete sequence.//0.00060:356:58//AL010212

[14563] R-NT2RP3000582//Homo sapiens chromosome 17, clone hCIT.468_F_{—}23, WORKING DRAFT SEQUENCE, 3 unordered pieces.//4.2e-29:282:67//AC004666

[14564] R-NT2RP3000584//Human PAC clone DJ222H05 from Xq25-q26, complete sequence.//7.4e-44:245:78//AC002377

[14565] R-NT2RP3000590//Arabidopsis thaliana chromosome II BAC T31 El 0 genomic sequence, complete sequence.//0.66:341:59//AC004077

[14566] R-NT2RP3000592//Plasmodium falciparum 3D7 chromosome 12 PFYAC 181 genomic sequence, WORKING DRAFT SEQUENCE, 8 unordered pieces.//0.022:491:56//AC005505

[14567] R-nnnnnnnnnnnn//HS_{—}3025_A1_D11_MR CIT Approved Human Genomic Sperm Library D Homo sapiens genomic clone Plate=3025 Col=21 Row=G, genomic survey sequence.//2.6e-21:161:88//AQ101452

[14568] R-NT2RP3000599//Plasmodium falciparum MAL3P8, complete sequence.//1.3e-09:543:58//AL034560

[14569] R-NT2RP3000605//Homo sapiens chromosome 19, cosmid F20900, complete sequence.//5.6e-115:554:98//AC006128

[14570] R-NT2RP3000622//Homo sapiens chromosome 12 p13.3, WORKING DRAFT SEQUENCE, 27 unordered pieces.//0.15:233:63//AC005414

[14571] R-NT2RP3000624//CIT-HSP-2022D4.TR CIT-HSP Homo sapiens genomic clone 2022D4, genomic survey sequence.//1.0:166:66//B64262

[14572] R-NT2RP3000628//Human BAC clone GSI 88P18, complete sequence.//5.3e-56:384:83//AC000115

[14573] R-NT2RP3000632//Human cyclin-selective ubiquitin carrier protein mRNA, complete cds.//4.0e-61:438:85//U73379

[14574] R-NT2RP3000644//Homo sapiens DNA from chromosome 19 p13.2 cosmids R31240, R30272 and R28549 containing the EKLF, GCDH, CRTC, and RAD23A genes, genomic sequence.//1.0e-43:408:77//AD000092

[14575] R-NT2RP3000661//F. rubripes GSS sequence, clone 148D22bB9, genomic survey sequence.//2.7e-17:234:69//AL005927

[14576] R-NT2RP3000665//Human chromosome 1146b2 cosmid, complete sequence.//2.1e-42:526:72//U73645

[14577] R-NT2RP3000685//HS_{—}3007_A2_F02_T7 CIT Approved Human Genomic Sperm Library D Homo sapiens genomic clone Plate=3007 Col=4 Row=K, genomic survey sequence.//1.6e-101:506:97//AQ118425

[14578] R-NT2RP3000690//Plasmodium falciparum MAL3P6, complete sequence.//1.3e-13:411:61//Z98551

[14579] R-NT2RP3000736

[14580] R-NT2RP3000742//Rattus norvegicus phospholipase C delta-4 mRNA, complete cds.//0.0071:231:65//U16655

[14581] R-NT2RP3000753//Homo sapiens DNA sequence from BAC 55C20 on chromosome 6. Contains a Spinal Muscular Atrophy (SMA3) LIKE gene overlapping with a beta-glucoronidase LIKE pseudogene. Contains a membrane protein LIKE pseudogene, a Glyceraldehyde 3-phosphate dehydrogenase (GAPDH) LIKE pseudogene, five predicted tRNA genes. Contains ESTs, GSSs (BAC end sequences) and a CA repeat polymorphism, complete sequence.//0.88:366:56//AL021368

[14582] R-NT2RP3000759//HS_{—}2055 A2 D09_MR CIT Approved Human Genomic Sperm Library D Homo sapiens genomic clone Plate=2055 Col=18 Row=G, genomic survey sequence.//0.45:251:60//AQ234828

[14583] R-NT2RP3000815//Homo sapiens chromosome 17, clone hRPK.209_J_{—}20, complete sequence.//2.0e-20:293:72//AC005822

[14584] R-NT2RP3000825//Plasmodium falciparum MAL3P6, complete sequence.//0.0044:325:62//Z98551

[14585] R-NT2RP3000826//Human DNA sequence *** SEQUENCING IN PROGRESS *** from clone 117715, WORKING DRAFT SEQUENCE.//5.3e-25:375:72//AL022315

[14586] R-NT2RP3000836//Human DNA sequence *** SEQUENCING IN PROGRESS * from clone Y214H10, WORKING DRAFT SEQUENCE.//1.3e-19:181:81//AL022344

[14587] R-NT2RP3000841//Homo sapiens, clone hRPK.1_A_{—}1, complete sequence.//0.20:226:6 I //AC006196

[14588] R-NT2RP3000845//Homo sapiens chromosome 19, cosmid R33632, complete sequence.//6.8e-91:512:92//AC005781

[14589] R-NT2RP3000847//***ALU WARNING: Human Alu-Sp subfamily consensus sequence.//7.9e-38:179:86//U14572

[14590] R-NT2RP3000850//Homo sapiens BAC clone GS166A23 from 7p21, complete sequence.//4.4e-48:505:76//AC005014

[14591] R-NT2RP3000852//Human DNA sequence *** SEQUENCING IN PROGRESS *** from clone 97P20, WORKING DRAFT SEQUENCE.//2.9e-82:311:98//AL031297

[14592] R-NT2RP3000859

[14593] R-NT2RP3000865//Human DNA sequence from clone 23K20 on chromosome Xq25-26.2 Contains EST, STS, GSS, complete sequence.I/1.2e-15:482:63//AL022153

[14594] R-NT2RP3000868//Fruitfly strain g20 mitochondrial DNA, A+T-rich region, partial sequence.//0.00045:260:59//AB003097

[14595] R-NT2RP3000869//Human DNA sequence *** SEQUENCING IN PROGRESS *** from clone 330012, WORKING DRAFT SEQUENCE.//0.0058:172:64//AL031731

[14596] R-NT2RP3000875//H. sapiens/Hepatitis B virus fusion mRNA for mevalonate kinase.//1.4e-99:531:93//X75311

[14597] R-NT2RP3000901

[14598] R-NT2RP3000904//Genomic sequence for Arabidopsis thaliana BAC T7N9, complete sequence.//0.32:261:57//AC000348

[14599] R-NT2RP3000917//Plasmodium falciparum MAL3P7, complete sequence.//0.00092:456:58//AL034559

[14600] R-NT2RP3000919

[14601] R-NT2RP3000968//H. sapiens mRNA for ribosomal protein SI Sa.//4.5e-24:375:71//X84407

[14602] R-NT2RP3000980//Homo sapiens chromosome 17, clone hRPK.855_D_{—}21, complete sequence.//0.36:186:62//AC006079

[14603] R-NT2RP3000994//Plasmodium falciparum 3D7 chromosome 12 PFYACB8-420 genomic sequence, WORKING DRAFT SEQUENCE, 14 unordered pieces.//0.00052:413:60//AC005140

[14604] R-NT2RP3001004//Saccharomyces cerevisiae VAR1 gene, mitochondrial gene encoding mitochondrial protein, 3′ processing site, partial sequence.//1.1e-07:330:64//U32857

[14605] R-NT2RP3001007//Plasmodium falciparum DNA *** SEQUENCING IN PROGRESS * from contig 4-82, complete sequence.//0.045:286:61//AL010255

[14606] R-NT2RP3001055//Human DNA sequence from PAC 27K14 on chromosome Xp 11.3-Xp 11.4. Contains monoamine oxidase B (MAOB), ESTs and polymorphic CA repeats.//2.3e-56:348:91//Z95125

[14607] R-NT2RP3001057//H. sapiens HZF4 mRNA for zinc finger protein.//8.2e-84:531:86//X78927

[14608] R-NT2RP3001081//Plasmodium falciparum DNA *** SEQUENCING IN PROGRESS * from MALI P3, WORKING DRAFT SEQUENCE.//1.1e-08:537:60//AL031746

[14609] R-NT2RP3001084

[14610] R-NT2RP3001096

[14611] R-NT2RP3001107

[14612] R-nnnnnnnnnnnn/Human Chromosome 15q26.1 PAC clone pDJ I OkS containing human DNA polymerase gamma (polg) gene, complete sequence.//7.4e-62:272:73//AC005316

[14613] R-NT2RP3001111

[14614] R-NT2RP3001113

[14615] R-NT2RP3001115//Homo sapiens PAC clone DJ0905J08 from 7 p12-p14, complete sequence.//7.2e-112:550:97//AC005189

[14616] R-NT2RP3001116//CIT-HSP-2282K23.TR CIT-HSP Homo sapiens genomic clone 2282K23, genomic survey sequence.//0.00013:160:69//AQ002011

[14617] R-NT2RP3001119//Human DNA sequence from clone 612B18 on chromosome 1q24-25.3 Contains exon from gene similar to 40S ribosomal protein, first coding exon of dynamin 2 (DYNII). ESTs, STS, GSS, CpG Island, complete sequence.//5.9e-99:497:96//AL031864

[14618] R-NT2RP3001120

[14619] R-NT2RP3001126//Plasmodium falciparum MAL3P7, complete sequence.//0.035:266:56//AL034559

[14620] R-NT2RP3001133

[14621] R-NT2RP3001140//Homo sapiens mRNA for KIAA0762 protein, partial cds.//8.1e-114:549:97//AB018305

[14622] R-NT2RP3001147//Homo sapiens chromosome 17, clone HClT187M2, complete sequence.//0.69:198:63//AC004448

[14623] R-NT2RP3001150//Human DNA sequence *** SEQUENCING IN PROGRESS *** from clone 423B22, WORKING DRAFT SEQUENCE.//2.4e-108:542:97//AL034379

[14624] R-NT2RP3001155//Homo sapiens mRNA for AND-1 protein.//2.9e-116:563:98//AJ006266

[14625] R-NT2RP3001176//Plasmodium falciparum 3D7 chromosome 12 PFYAC69 genomic sequence, WORKING DRAFT SEQUENCE, 4 unordered pieces.//0.44:227:62//AC004688

[14626] R-NT2RP3001214//Borrelia burgdorferi plasmid Ip25, complete plasmid sequence.//0.0023:381:61//AE000785

[14627] R-NT2RP3001216//RPCII1-18C15.TPC RPCI-11 Homo sapiens genomic clone RPCI-11-18C15, genomic survey sequence.//7.0e-29:167:97//B88077

[14628] R-NT2RP3001221//Homo sapiens clone 14503, WORKING DRAFT SEQUENCE, 1 ordered pieces.//0.020:211:63//AC005827

[14629] R-NT2RP3001232//Homo sapiens DNA sequence from PAC 124C6 on chromosome 6q21. Contains genomic marker D6S1603, ESTs, GSSs and a STS with a CA repeat polymorphism, complete sequence.//2.7e-08:390:62//AL021326

[14630] R-NT2RP3001236//RPCI11-25C17.TKBR RPCI-11 Homo sapiens genomic clone RPCI-11-25C17, genomic survey sequence.//9.5e-41:217:88//AQ014003

[14631] R-NT2RP3001239//Human microtubule-associated protein 1B (MAPIB) gene, complete cds.//2.9e-21:438:63//L06237

[14632] R-NT2RP3001245//Homo sapiens DNA sequence from PAC 964D12 on chromosome 1q24-q25. Contains EST, GSS.//0.00026:439:59//AL021398

[14633] R-NT2RP3001253//HS_{—}3002_A2_H12_MR CIT Approved Human Genomic Sperm Library D Homo sapiens genomic clone Plate=3002 Col=24 Row=O, genomic survey sequence.//0.98:190:63//AQ251982

[14634] R-NT2RP3001260

[14635] R-NT2RP3001268//Homo sapiens clone DJ0959C21, WORKING DRAFT SEQUENCE, 2 unordered pieces.//0.012:509:57//AC004936

[14636] R-NT2RP3001272//Homo sapiens BAC clone NHO161HI2 from 7 p14-p15, complete sequence.//2.2e-22:134:87//AC005589

[14637] R-NT2RP3001274//Sequence 11 from patent WO9517522.//0.0058:133:66//A45341

[14638] R-NT2RP3001281//Human DNA sequence from PAC 52D1 on chromosome Xq21. Contains CA repeats, STS.//4.4e-55:558:76//Z96811

[14639] R-NT2RP3001307//HS_{—}2058_A1_C06_MR CIT Approved Human Genomic Sperm Library D Homo sapiens genomic clone Plate=2058 Col=1 I Row=E, genomic survey sequence.//7.2e-33:260:86//AQ305868

[14640] R-NT2RP3001318//Homo sapiens PAC clone DJ0649P17 from 7q11.23-q21, complete sequence.//0.27:210:65//AC004848

[14641] R-NT2RP3001325

[14642] R-NT2RP3001338//Rat tropoelastin gene, intron 17 (partial).//1.0:184:64//M86367

[14643] R-NT2RP3001339//Homo sapiens mRNA for KIAA0451 protein, complete cds.//1.2e-112:566:96//AB007920

[14644] R-NT2RP30001340//Homo sapiens HMG box factor SOX-13 mRNA, complete cds.//3.2e-86:450:95//AF083105

[14645] R-NT2RP3001355

[14646] R-NT2RP3001374//HS_{—}2184_A2_G04_MR CIT Approved Human Genomic Sperm Library D Homo sapiens genomic clone Plate=2184 Col=8 Row=M, genomic survey sequence.//3.7e-10:101:84//AQ024647

[14647] R-NT2RP3001383//Plasmodium falciparum chromosome 2, section 34 of 73 of the complete sequence.//7.4e-07:279:63//AE001397

[14648] R-NT2RP3001384//Homo sapiens chromosome 19, cosmid R33907, complete sequence.//4.4e-75:382:97//AC005785

[14649] R-NT2RP3001392//HSS_{—}3078_B2_D05_MR CIT Approved Human Genomic Sperm Library D Homo sapiens genomic clone Plate=3078 Col=10 Row=H, genomic survey sequence.//1.0:164:64//AQ140587

[14650] R-NT2RP3001396//RPCI11-63N18.TJ RPCII 1 Homo sapiens genomic clone R-63N18, genomic survey sequence.//0.14:242:61//AQ238544

[14651] R-NT2RP3001398//Mus musculus zinc finger protein (Zfp64) mRNA, complete cds.//1.8e-10:193:72/JU49046

[14652] R-NT2RP3001399

[14653] R-NT2RP3001407//Caenorhabditis elegans cosmid D1046, complete sequence.//0.0011:392:60//Z68160

[14654] R-NT2RP3001420//Human BAC clone GS165104 from 7q21, complete sequence.//3.7e-29:412:74//AC002379

[14655] R-NT2RP3001426//Homo sapiens clone 24616 mRNA sequence.//1.1e-104:550:94//AF052158

[14656] R-NT2RP3001427//Caenorhabditis elegans cosmid K 1I D5.//0.39:174:64//U53152

[14657] R-nnnnnnnnnnnn//Human nuclear pore complex-associated protein TPR (tpr) mRNA, complete cds.//1.4e-94:533:91//U69668

[14658] R-NT2RP3001432//Homo sapiens DNA sequence from PAC 164C20 on chromosome 6q16.1-22.1. Contains ESTs and GSSs (BAC end sequences), complete sequence.//2.5e-12:415:61//AL009029

[14659] R-NT2RP3001447//Homo sapiens PAC clone DJ0828B12 from 7q11.23-q21.1, complete sequence.//5.6e-36:358:77//AC004903

[14660] R-NT2RP3001449//Homo sapiens clone 24497 mRNA sequence.//1.5e-100:499:97//AF070630

[14661] R-NT2RP3001453//Homo sapiens clone DJ0852024, WORKING DRAFT SEQUENCE, 2 unordered pieces.//4.0e-47:295:86//AC004906

[14662] R-NT2RP3001457

[14663] R-NT2RP3001459

[14664] R-NT2RP3001472//Crithidia fasciculata kinetoplast apocytochrome b gRNA-mRNA chimera, clone:24.//0.33:150:66//Di3030

[14665] R-NT2RP3001490//Plasmodium falciparum DNA *** SEQUENCING IN PROGRESS * from contig 3-103, complete sequence.//2.3e-08:483:60//AL010208

[14666] R-NT2RP3001495//Human oxidoreductase (HHCMA56) mRNA, complete cds.//4.4e-60:338:93//U13395

[14667] R-NT2RP3001497//Homo sapiens multiple membrane spanning receptor TRC8 (TRC8) mRNA, complete cds.//2.1e-110:549:97//AF064801

[14668] R-NT2RP3001527//Human DNA sequence *** SEQUENCING IN PROGRESS *** from clone 1125AI1, WORKING DRAFT SEQUENCE.//5.3e-32:310:78//AL034549

[14669] R-NT2RP3001529//Human Chromosome X, complete sequence.//5.5e-67:280:93//AC002420

[14670] R-NT2RP3001538

[14671] R-NT2RP3001554//Human microtubule-associated protein la (MAPIA) mRNA, complete cds.//7.8e-16:391:62//U38292

[14672] R-NT2RP3001580//Plasmodium falciparum 3D7 chromosome 12 PFYAC69 genomic sequence, WORKING DRAFT SEQUENCE, 4 unordered pieces.//0.00026:456:58//AC004688

[14673] R-NT2RP3001587//Homo sapiens HRIHFB2115 mRNA, partial cds.//5.6e-08:86:88//AB015337

[14674] R-NT2RP3001589//Homo sapiens chromosome 17, clone hRPK.1096_G_{—}20, complete sequence.//0.066:360:60//AC005410

[14675] R-NT2RP3001607//CIT-HSP-2010M8.TR CIT-HSP Homo sapiens genomic clone 2010M8, genomic survey sequence.//0.041:194:67//B53490

[14676] R-NT2RP3001608//Human DNA sequence from PAC 296K21 on chromosome X contains cytokeratin exon, delta-aminolevulinate synthase (erythroid); 5-aminolevulinic acid synthase.(EC 2.3.1.37). 6-phosphofructo-2-kinase/fructose-2,6-bisphosphatase (EC 2.7.1.105, EC 3.1.3.46), ESTs and STS.//0.69:151:64//Z83821

[14677] R-NT2RP3001621//Human DNA sequence from clone 24018 on chromosome 6p21.31-22.2 Contains zinc finger protein pseudogene, VNO-type olfactory receptor pseudogene, nuclear envelope pore membrane protein, EST, STS, GSS, complete sequence.//1.4e-46:354:83//AL021808

[14678] R-NT2RP3001629//H. sapiens simple DNA sequence region clone wgla10.//0.99:137:63//X76572

[14679] R-NT2RP3001634//Homo sapiens TRIADI type I mRNA, complete cds.//8.5e-108:541:96//AF099149

[14680] R-NT2RP3001642

[14681] R-NT2RP3001646//HS_{—}3218 A2-A01 T7 CIT Approved Human Genomic Sperm Library D Homo sapiens genomic clone Plate=3218 Col=2 Row=A, genomic survey sequence.//2.6e-32:215:91//AQ303003

[14682] R-NT2RP3001671//Plasmodium falciparum DNA *** SEQUENCING IN PROGRESS * from contig 3-88, complete sequence.//0.018:262:61//AL010157

[14683] R-NT2RP3001672

[14684] R-NT2RP3001676//Homo sapiens cosmid Q95D4, chromosome 215′ of IFNAR2.//2.1e-48:413:77//AF039905

[14685] R-NT2RP3001678//RPCI11-50C17.TK RPCII 1 Homo sapiens genomic clone R-50C17, genomic survey sequence.//0.15:232:62//AQ116359

[14686] R-NT2RP3001679//Homo sapiens genomic DNA of 8p21.3-p22 anti-oncogene of hepatocellular colorectal and non-small cell lung cancer, segment 3/11.//7.8e-104:549:95//AB020860

[14687] R-NT2RP3001688//Homo sapiens PAC clone DJ1048B16 from 7q34-q36, complete sequence.//6.6e-41:291:86//AC006019

[14688] R-NT2RP3001690//Plasmodium falciparum chromosome 2, section 52 of 73 of the complete sequence.//3.1e-07:433:59//AE001415

[14689] R-NT2RP3001708//Homo sapiens allele 14 fragile site locus (FRA10B) minisatellite sequence.//6.0e-06:237:64//AF053523

[14690] R-NT2RP3001712//CITBI-EI-2516N9.TF CITB1-E1 Homo sapiens genomic clone 2516N9, genomic survey sequence.//1.5e-95:456:99//AQ279562

[14691] R-NT2RP3001716//Homo sapiens chromosome Y, clone 264, M, 20, complete sequence.//0.0012:346:58//AC004617

[14692] R-NT2RP3001724//Human HepG2 3′ region MboI cDNA, clone hmd6aO6 m3.//1.3e-27:163:95//D17273

[14693] R-NT2RP3001730//Human DNA sequence *** SEQUENCING IN PROGRESS *** from clone 111B22, WORKING DRAFT SEQUENCE.//7.6e-43:409:76//Z98200

[14694] R-NT2RP3001739

[14695] R-NT2RP3001752//Human clone 23774 mRNA sequence.//1.9e-08:104:84//U79279

[14696] R-NT2RP3001753//CIT-HSP-2379P21.TF CIT-HSP Homo sapiens genomic clone 2379P21, genomic survey sequence.//8.8e-06:102:78//AQ113378

[14697] R-NT2RP3001764

[14698] R-NT2RP3001777//Human mRNA for heparan sulfate proteaglycan (glypican).//0.99:166:66//X54232

[14699] R-NT2RP3001782//Homo sapiens mRNA for KIAA0459 protein, partial cds.//1.3e-111:549:97//AB007928

[14700] R-NT2RP3001792//Mus musculus myelin gene expression factor (MEF-2) mRNA, partial cds.//1.6e-32:266:83//Ul 3262

[14701] R-NT2RP3001799//H. sapiens mRNA for OX40 homologue.//8.5e-44:374:79//X75962

[14702] R-NT2RP3001819

[14703] R-NT2RP3001844//Caenorhabditis elegans cosmid C54G7.//0.0042:231:63//U40410

[14704] R-NT2RP3001854//Plasmodium falciparum strain Dd2 heat shock protein 86 (HSP86), O1 (o1), O3 (o3), O2 (o2), CG8 (cg8), CG4 (cg4), CG3 (cg3), CG9 (cg9), CG1 (cg1), CG6 (cg6), chloroquine resistance candidate protein (cg2), and CG7 (cg7) genes, complete cds.//1.0:404:59//AF030694

[14705] R-NT2RP3001855

[14706] R-NT2RP3001896//CIT978SK-A-636F10.TV CIT978SK Homo sapiens genomic clone A-636F10, genomic survey sequence.//0.0012:68:82//AQ116409

[14707] R-NT2RP3001898//Homo sapiens Chromsome 11p15.5 PAC clone pDJ754h15 containing cdk-inhibitor p57/KIP2 (CDKN 1C) gene, complete sequence.//0.37:266:65//AC005950

[14708] R-NT2RP3001915//Human BAC clone RG367017 from 7 p15-p21, complete sequence.//0.018:144:66//AC002486

[14709] R-NT2RP3001926//Human polyadenylate binding protein (TIA-1) mRNA, complete cds.//2.4e-10:77:100//M77142

[14710] R-NT2RP3001929

[14711] R-NT2RP3001931//Homo sapiens full-length insert cDNA clone YU73B11.//1.0e-110:562:96//AF087969

[14712] R-NT2RP3001938//Human DNA sequence from PAC 447B 16 on chromosome Xq13.1-Xq13.3.//0.38:386:56//Z95328

[14713] R-NT2RP3001943//Homo sapiens chromosome 5, P1 clone 1076B9 (LBNL H14), complete sequence.//0.87:298:61//AC004500

[14714] R-NT2RP3001944//Bos taurus clone CSSM056 satellite DNA sequence.//0.0095:76:78//U03836

[14715] R-NT2RP3001969//Homo sapiens chromosome 12 p13.3 clone RPCI11-350L7, WORKING DRAFT SEQUENCE, 72 unordered pieces.//7.0e-109:552:96//AC005844

[14716] R-NT2RP3001989//Caenorhabditis elegans cosmid COlA2, complete sequence.//0.15:111:68//Z81029

[14717] R-NT2RP3002002//Plasmodium falciparum 14-3-3 protein gene, partial cds.//0.016:286:60//AF065987

[14718] R-NT2RP3002004//H. sapiens mRNA for FAST kinase.//5.1e-41:335:82/lX86779

[14719] R-NT2RP3002007

[14720] R-NT2RP3002014//Human DNA sequence from clone 228A9 on chromosome 22q12.3-13.32 Contains 85 KDA CALCIUM-INDEPENDENT PHOSPHOLIPASE A2, EST, GSS, CpG island, complete sequence.//6.6e-41:297:86//AL022322

[14721] R-NT2RP3002033

[14722] R-NT2RP3002045//Drosophila melanogaster fat protein (fat) gene, complete cds.//0.77:320:60//M80537

[14723] R-NT2RP3002054//Caenorhabditis elegans cosmid Y69H2, complete sequence.//0.82:362:57//Z98877

[14724] R-NT2RP3002056//F. rubripes GSS sequence, clone 020E22bF7, genomic survey sequence.//0.010:185:63//Z87006

[14725] R-NT2RP3002057

[14726] R-NT2RP3002062//Human BAC clone RG356F09 from 7p21, complete sequence.//1.7e-17:164:81//AC004002

[14727] R-nnnnnnnnnnnn

[14728] R-NT2RP3002081//HS_{—}3082_A1_G09_MR CIT Approved Human Genomic Sperm Library D Homo sapiens genomic clone Plate=3082 Col=17 Row=M, genomic survey sequence.//4.2e-25:344:73//AQ122260

[14729] R-NT2RP3002097//Homo sapiens Xp22-150 BAC GSHB-309P15 (Genome Systems Human BAC Library) complete sequence.//2.6e-23:212:80//AC006210

[14730] R-NT2RP3002102//Homo sapiens BAC clone RG290G13 from 7q21, complete sequence.//0.43:168:64//AC004746

[14731] R-NT2RP3002108//CIT-HSP-2346P16.TF CIT-HSP Homo sapiens genomic clone 2346P16, genomic survey sequence.//3.5e-08:110:78//AQ059071

[14732] R-NT2RP3002146//Streptococcus gordonii competence factor (comC) and histidine protein kinase (comD) genes, complete cds, and response regulator (comE) gene, partial cds.//0.11:534:55//U80077

[14733] R-NT2RP3002147//Human DNA sequence *** SEQUENCING IN PROGRESS *** from clone 329F2, WORKING DRAFT SEQUENCE.//4.1e-108:551:96//AL031710

[14734] R-NT2RP3002151//Mus musculus mRNA for Guanine Nucleotide Regulatory Protein, complete cds.//6.8e-62:347:80//AB003503

[14735] R-NT2RP3002163//Anolis pulchellus vitellogenin mRNA, partial cds.//0.77:281:63//U46857

[14736] R-NT2RP3002165

[14737] R-NT2RP3002166//D. sargus satellite DNA (clone PSE3).//0.81:124:62//Z48711

[14738] R-NT2RP3002173

[14739] R-NT2RP3002181//HS-1042-A2-F01-MR.abi CIT Human Genomic Sperm Library C Homo sapiens genomic clone Plate=CT 824 Col=2 Row=K, genomic survey sequence.//1.3e-35:305:81//B36980

[14740] R-NT2RP3002244//Caenorhabditis elegans cosmid R1 +L1 E3.//0.0024:393:61//AF100669

[14741] R-NT2RP3002248//Human DNA sequence from PAC 170A21 on chromosome 22q12-qter contains ESTs.//0.30:217:63//Z82189

[14742] R-NT2RP3002255

[14743] R-NT2RP3002273//Homo sapiens BAC clone 393122 from 8q21, complete sequence.//0.84:463:57//AF070717

[14744] R-NT2RP3002276//HS_{—}2260_A1_MF_E07 CIT Approved Human Genomic Sperm Library D Homo sapiens genomic clone Plate=2260 Col=13 Row=I, genomic survey sequence.//0.0017:198:63//AQ292491

[14745] R-NT2RP3002303//Human HMG-17 gene for non-histone chromosomal protein HMG-17.//7.4e-93:510:93//X13546

[14746] R-NT2RP3002304//Human BAC clone GS 188P 18, complete sequence.//6.3e-09:477:59//AC000115

[14747] R-NT2RP3002330//Plasmodium falciparum 3D7 chromosome 12 PFYAC69 genomic sequence, WORKING DRAFT SEQUENCE, 4 unordered pieces.//0.087:388:58//AC004688

[14748] R-NT2RP3002343

[14749] R-NT2RP3002351//Homo sapiens chromosome Y, clone 264, M, 20, complete sequence.//0.20:489:56//AC004617

[14750] R-NT2RP3002352//Homo sapiens mRNA for protein encoded by cxorf5 (71-7A) gene.//2.4e-104:516:94//Y15164

[14751] R-NT2RP3002455//Homo sapiens mRNA for KIAA0678 protein, partial cds.//4.7e-102:524:95//AB014578

[14752] R-NT2RP3002484

[14753] R-NT2RP3002501//Human DNA sequence from PAC 92M18, BRCA2 gene region chromosome 13q12-13 contains BRCA2 exons 25, 26 and 27 ESTs and STS.//5.2e-17:232:75//Z73359

[14754] R-NT2RP3002512

[14755] R-NT2RP3002529//CIT-HSP-2340H2.TR CIT-HSP Homo sapiens genomic clone 2340H2, genomic survey sequence.//0.81:266:58//AQ057387

[14756] R-NT2RP3002545//Homo sapiens mRNA for KIAA0729 protein, partial cds.//3.3e-82:438:94//AB018272

[14757] R-NT2RP3002549//Medicago truncatula ENBPI gene, exons 1 to 12.//0.95:381:56//AJ002479

[14758] R-NT2RP3002566//HS_{—}2036_A1_D08_MR CIT Approved Human Genomic Sperm Library D Homo sapiens genomic clone Plate=2036 Col=15 Row=G, genomic survey sequence.//0.18:162:64//AQ230627

[14759] R-NT2RP3002587//Homo sapiens clone DJ1090E20, WORKING DRAFT SEQUENCE, 4 unordered pieces.//5.1e-15:213:73//AC004956

[14760] R-NT2RP3002590//Arabidopsis thaliana genomic DNA, chromosome 5, P1 clone: MXK3, complete sequence.//0.00010:431:59//AB019236

[14761] R-NT2RP3002602//Mus musculus stannin gene, complete cds.//1.6e-20:339:70//AF030522

[14762] R-NT2RP3002603

[14763] R-NT2RP3002631//Homo sapiens chromosome 21 PAC RPCIP704A9190Q2.//1.0:241:59//AJ006997

[14764] R-NT2RP3002659//Rat sodium-hydrogen exchange protein-isoform 3 (NHE-3) mRNA, complete cds.//6.8e-24:331:76//M85300

[14765] R-NT2RP3002660//H. sapiens partial gene for progesterone receptor and Alu element DNA.//9.8e-43:273:821/Z49816

[14766] R-NT2RP3002663//Lymnaea stagnalis 16S ribosomal RNA gene, mitochondrial gene encoding ribosomal RNA, partial sequence.//0.60:300:59//U82072

[14767] R-NT2RP3002671//S .pombe chromosome III cosmid c553.//1.2e-20:399:66//AL023704

[14768] R-NT2RP3002682//RPCI 11-44K6.TJ RPCII 1 Homo sapiens genomic clone R-44K6, genomic survey sequence.//4.7e-09:122:77//AQ202481

[14769] R-NT2RP3002687//P. falciparum complete gene map of plastid-like DNA (IR-B).//1.1e-07:494:59//X95276

[14770] R-NT2RP3002688//Human 7SL RNA sequence.//2.7e-32:290:79//X01037

[14771] R-NT2RP3002701

[14772] R-NT2RP3002713//Human DNA sequence *** SEQUENCING IN PROGRESS *** from clone 167A19, WORKING DRAFT SEQUENCE.//0.95:334:59//AL031427

[14773] R-NT2RP3002763//***ALU WARNING: Human Alu-J subfamily consensus sequence.//3.9e-40:288:85//U14567

[14774] R-NT2RP3002770//R. prowazekii genomic DNA fragment (clone A615F).//0.21:174:63//Z82710

[14775] R-NT2RP3002785//Homo sapiens PAC clone DJO170D19 from Xq23, complete sequence.//0.78:354:59//AC004822

[14776] R-NT2RP3002799//Homo sapiens X-linked anhidroitic ectodermal dysplasia protein gene (EDA), exon 2 and flanking repeat regions.//1.1e-20:161:77//AF003528

[14777] R-NT2RP3002810//Caenorhabditis elegans cosmid F10D2.//0.28:441:56//AF022972

[14778] R-NT2RP3002818//HS 3053_A2_A08_MR CIT Approved Human Genomic Sperm Library D Homo sapiens genomic clone Plate=3053 Col=16 Row=A, genomic survey sequence.//0.19:220:60//AQ135025

[14779] R-NT2RP3002861//P. falciparum complete gene map of plastid-like DNA (IR-B).//9.3e-05:414:60//X95276

[14780] R-NT2RP3002869//Homo sapiens chromosome 19, cosmid F21967, complete sequence.//0.14:165:64//AC005256

[14781] R-NT2RP3002876//Human DNA sequence *** SEQUENCING IN PROGRESS *** from clone 50024, WORKING DRAFT SEQUENCE.//2.6e-59:311:96//AL034380

[14782] R-NT2RP3002877//Homo sapiens Xp22 bins 87-93 PAC RPCII-122K4 (Roswell Park Cancer Institute Human PAC Library) complete sequence.//4.6e-24:422:63//AC003035

[14783] R-NT2RP3002909//Homo sapiens mRNA for KIAA0771 protein, partial cds.//4.7e-109:570:95//AB018314

[14784] R-NT2RP3002911//Homo sapiens BAC clone GS 166A23 from 7p21, complete sequence.//3 .1e-16:471:64//AC005014

[14785] R-NT2RP3002948//, complete sequence.//4.5e-94:516:93//AC005500

[14786] R-NT2RP3002953//Homo sapiens chromosome 5, BAC clone 34j 15 (LBNL H 169), complete sequence.//3.4e-11:566:96//AC005754

[14787] R-NT2RP3002955//Plasmodium falciparum chromosome 2, section 28 of 73 of the complete sequence.//0.19:424:58//AE001391

[14788] R-NT2RP3002969//Rat mRNA for brain acyl-CoA synthetase II, complete cds.//1.1e-89:562:88//D30666

[14789] R-NT2RP3002972//Stealth virus 5 clone C1311 T7 genomic sequence.//1.0:122:67//AF067482

[14790] R-NT2RP3002978//Human DNA sequence *** SEQUENCING IN PROGRESS *** from clone 455J7, WORKING DRAFT SEQUENCE.//4.8e-05:249:63//AL031733

[14791] R-NT2RP3002988//Human DNA sequence from PAC 106H8 on chromosome 1q24. Contains PHOSPHATIDYLINISITOL-GLYCAN class C (PIG-C) and DYNAMIN-3 genes. Contains ESTs and STSs and a CpG island.//0.0097:246:67//Z97195

[14792] R-NT2RP3003008//Mus musculus major histocompatibility locus class III regions Hsc70t gene, partial cds; smRNP, G7A, NG23, MutS homolog, CLCP, NG24, NG25, and NG26 genes, complete cds; and unknown genes.//1.9e-24:188:78//AF109905

[14793] R-NT2RP3003032//Arabidopsis thaliana (clone DWI) DNA retrotransposon Ta11-1 integration site.//5.3e-07:376:63//L47211

[14794] R-NT2RP3003059//Homo sapiens chromosome 3, clone hRPK.165_I_{—}16, complete sequence.//1.4e-13:323:66//AC005669

[14795] R-NT2RP3003061//Homo sapiens mRNA from HIV associated non-Hodgkin's lymphoma (clone h11-10).//3.8e-42:265:91//Y16708

[14796] R-NT2RP3003068//HS_{—}3214_B2_G09_T7 CIT Approved Human Genomic Sperm Library D Homo sapiens genomic clone Plate=3214 Col=18 Row=N, genomic survey sequence.//0.025:207:64//AQ181894

[14797] R-NT2RP3003071//Human DNA sequence *** SEQUENCING IN PROGRESS *** from clone 510D 11, WORKING DRAFT SEQUENCE.//0.00014:329:60//Z98044

[14798] R-NT2RP3003078//T26A1TF TAMU Arabidopsis thaliana genomic clone T26A1, genomic survey sequence.//0.95:219:63//B27013

[14799] R-NT2RP3003101//Plasmodium falciparum 3D7 chromosome 12 PFYAC812 genomic sequence, WORKING DRAFT SEQUENCE, 8 unordered pieces.//1.4e-05:285:62//AC004153

[14800] R-NT2RP3003121//Homo sapiens full-length insert cDNA clone ZD62D10.//2.1e-47:242:98//AF086348

[14801] R-NT2RP3003133//Human DNA sequence *** SEQUENCING IN PROGRESS *** from clone 228H 13, WORKING DRAFT SEQUENCE.//1.4e-21:199:75//AL031985

[14802] R-NT2RP3003138//Mouse kif4 mRNA for microtubule-based motor protein KIF4, complete cds.//5.1e-14:287:68//D12646

[14803] R-NT2RP3003139//Rattus norvegicus kappa opioid receptor gene, exon 4 and complete cds.//1.5e-13:122:80//UI17995

[14804] R-NT2RP3003150

[14805] R-NT2RP3003157//Homo sapiens 12q15 BAC GSHB-410F4 (Genome Systems Human Bac Library) complete sequence.//5.5e-42:289:74//AC005294

[14806] R-NT2RP3003185//HS_{—}2058_A1_H03_T7 CIT Approved Human Genomic Sperm Library D Homo sapiens genomic clone Plate=2058 Col=5 Row=O, genomic survey sequence.//0.025:52:94//AQ231298

[14807] R-NT2RP3003193//Homo sapiens chromosome 17, clone hRPK.628_E_{—}12, complete sequence.//4.8e-40:349:79//AC005701

[14808] R-NT2RP3003197//Human DNA sequence *** SEQUENCING IN PROGRESS *** from clone 36411, WORKING DRAFT SEQUENCE.//5.2e-10:180:71//AL031319

[14809] R-NT2RP3003203//Mus musculus IFN alpha-treated embryonic fibroblast mRNA.//1.8e-11:148:77//U51904

[14810] R-NT2RP3003204//Human DNA sequence *** SEQUENCING IN PROGRESS *** from clone 892F13, WORKING DRAFT SEQUENCE.//6.6e-41:282:86//AL009183

[14811] R-NT2RP3003212//Homo sapiens full-length insert cDNA clone ZB91B11.//1.7e-68:363:95//AF086173

[14812] R-NT2RP3003230//Caenorhabditis elegans cosmid T12B5.//0.0018:279:64//AF100307

[14813] R-NT2RP3003242//Homo sapiens chromosome 7 clone UWGC:g3586a160 from 7 p14-15, complete sequence.//1.0:346:57//AC005272

[14814] R-NT2RP3003251//Homo sapiens BAC clone RG060N22 from 7q21, complete sequence.//2.5e-10:436:62//AC003083

[14815] R-NT2RP3003264//CIT-HSP-2296M7.TR CIT-HSP Homo sapiens genomic clone 2296M7, genomic survey sequence.//5.8e-05:308:61//AQ005862

[14816] R-NT2RP3003278//Human HepG2 partial cDNA, clone hmd3b11m5.//9.4e-47:302:89//D17022

[14817] R-NT2RP3003282//Homo sapiens dynamin (DNM) mRNA, complete cds.//7.4e-101:550:93//L36983

[14818] R-NT2RP3003290//Human DNA sequence *** SEQUENCING IN PROGRESS *** from clone 460J8, WORKING DRAFT SEQUENCE.//3.0e-22:228:78//AL031662

[14819] R-NT2RP3003301

[14820] R-NT2RP3003302//CIT-HSP-2319H19.TF CIT-HSP Homo sapiens genomic clone 2319HI9, genomic survey sequence.//1.5e-69:367:95//AQ034950

[14821] R-NT2RP3003311//Plasmodium falciparum 3D7 chromosome 12 PFYAC181 genomic sequence, WORKING DRAFT SEQUENCE, 8 unordered pieces.//5.1e-08:398:64//AC005505

[14822] R-NT2RP3003313//Caenorhabditis elegans cosmid F39BI, complete sequence.//0.00022:436:58//Z69660

[14823] R-NT2RP3003327//Homo sapiens Chromosome 16 BAC clone CIT987-SKA-237H1-complete genomic sequence, complete sequence.//1.5e-16:334:70//AC002287

[14824] R-NT2RP3003330//Homo sapiens full-length insert cDNA Y124C02.//4.4e-96:458:99//AF075015

[14825] R-NT2RP3003344//HS_{—}3235_B2_H09_T7 CIT Approved Human Genomic Sperm Library D Homo sapiens genomic clone Plate=3235 Col=18 Row=P, genomic survey sequence.//4.1e-18:197:80//AQ303203

[14826] R-NT2RP3003346

[14827] R-NT2RP3003353//CITBI-EI-2523B18.TR CITBI-EL Homo sapiens genomic clone 2523B118, genomic survey sequence.//8.3e-06:130:73//AQ278834

[14828] R-NT2RP3003377//Homo sapiens clone DJ0919J22, WORKING DRAFT SEQUENCE, 34 unordered pieces.//1.9e-97:481:94//AC005519

[14829] R-NT2RP3003384//Homo sapiens clone DJ0038110, WORKING DRAFT SEQUENCE, 5 unordered pieces.//2.3e-10:226:71//AC004820

[14830] R-NT2RP3003385

[14831] R-NT2RP3003403//Human DNA sequence from clone 227L5 on chromosome Xp 11.22-11.3. Contains a Keratin, Type 1 Cytoskeletal 18 (KRT18, CYKI 8, KI 8, CKI 8) pseudogene and an STS, complete sequence.//2.8e-40:496:72//AL031585

[14832] R-NT2RP3003409//Rat POU domain factor (Bm-5) mRNA.//1.5e-20:375:68//L23204

[14833] R-NT2RP3003411//Human DNA sequence *** SEQUENCING IN PROGRESS *** from clone 438L4, WORKING DRAFT SEQUENCE.//1.0:180:61//Z97635

[14834] R-NT2RP3003427//RPCII 1-45J23.TJ RPCII 1 Homo sapiens genomic clone R-45J23, genomic survey sequence.//0.82:162:69//AQ195566

[14835] R-NT2RP3003433//Homo sapiens BAC clone NH0044G14 from 7q11.23-21.1, complete sequence.//1.1e-10:379:61//AC006031

[14836] R-NT2RP3003464//Homo sapiens rab3-GAP regulatory domain mRNA, complete cds.//1.1e-95:479:96//AF004828

[14837] R-NT2RP3003490//Homo sapiens mRNA for KIAA0725 protein, partial cds.//1.3e-100:527:93//AB018268

[14838] R-NT2RP3003491//Plasmodium falciparum chromosome 2, section 35 of 73 of the complete sequence.//4.0e-08:495:59//AE001398

[14839] R-NT2RP3003500//W. suaveolens mitochondrial ATP9 gene.//0.0074:514:59//X77238

[14840] R-NT2RP3003543//Human clone A9A2BRB7 (CAC)n/(GTG)n repeat-containing mRNA.//1.3e-31:217:88//U00952

[14841] R-NT2RP3003552

[14842] R-NT2RP3003555//Dictyostelium discoideum interaptin (abpD) gene, complete cds.//0.98:321:61//AF057019

[14843] R-NT2RP3003564

[14844] R-NT2RP3003572//Human DNA sequence from BAC 992D9 on chromosome 22q12.1 contains STSH.//0.0015:507:59//AL008638

[14845] R-NT2RP3003576//Human Chromosome 16 BAC clone CIT987SK-A-61E3, complete sequence.//1.2e-39:359:79//AC003007

[14846] R-NT2RP3003589//Plasmodium falciparum MAL3P8, complete sequence.//0.014:539:58//AL034560

[14847] R-NT2RP3003625//Human DNA sequence from clone 1042K10 on chromosome 22q13.1-13.2. Contains the ADSL gene for Adenylosuccinate lyase (EC 4.3.2.2, Adenylosuccinase, ASL) and 4 novel genes (one with probable rabGAP domains and Src homology domain 3). Contains ESTs, STSs, GSSs and a putative CpG island, complete sequence.//1.8e-44:448:77//AL022238

[14848] R-NT2RP3003656//Homo sapiens chromosome 17, clone hRPK.401_{—}0_{—}9, complete sequence.//0.34:257:62//AC005291

[14849] R-NT2RP3003659//O. fuscipennis 16S rRNA gene, partial.//0.021:145:65//Z93701

[14850] R-NT2RP3003665//HS_{—}3078_B2_C09_MR CIT Approved Human Genomic Sperm Library D Homo sapiens genomic clone Plate=3078 Col=18 Row=F, genomic survey sequence.//1.3e-75:397:95//AQ140580

[14851] R-NT2RP3003672

[14852] R-NT2RP3003686

[14853] R-NT2RP3003701//Human BAC clone GS310A05 from 7q21-q22, complete sequence.//6.4e-17:464:62//AC002452

[14854] R-NT2RP3003716//Human DNA sequence *** SEQUENCING IN PROGRESS *** from clone 774G 10, WORKING DRAFT SEQUENCE.//0.00072:425:62//AL034410

[14855] R-NT2RP3003726//Homo sapiens mRNA for KIAA0757 protein, complete cds.//1.7e-101:492:97//AB018300

[14856] R-NT2RP3003746//Homo sapiens Chromosome 16 BAC clone CIT987-SK502C10, complete sequence.//3.7e-07:217:66//AC003009

[14857] R-NT2RP3003795//Human DNA sequence from clone 505B13 on chromosome Ip36.2-36.3 Contains CA repeat and GSSs, complete sequence.//8.1e-26:456:68//Z98052

[14858] R-NT2RP3003799//cSRL-138g10-u cSRL flow sorted Chromosome 11 specific cosmid Homo sapiens genomic clone cSRL-138g10, genomic survey sequence.//4.9e-09:117:77//B01736

[14859] R-NT2RP3003800//Homo sapiens tyrosine kinase pp60c-src (SRC) gene, exon 12 and partial cds.//2.8e-106:551:95//AF077754

[14860] R-NT2RP3003805

[14861] R-NT2RP3003809//Homo sapiens full-length insert cDNA clone YZ95A01.//3.6e-106:533:97//AF086107

[14862] R-NT2RP3003819//Human DNA sequence *** SEQUENCING IN PROGRESS *** from clone 34606, WORKING DRAFT SEQUENCE.//6.0e-44:288:81//Z84487

[14863] R-NT2RP3003825//Mus domesticus interleukin I receptor antagonist (IL-IRA) mRNA.//0.0014:410:58//M64404

[14864] R-NT2RP3003828

[14865] R-NT2RP3003831//***ALU WARNING: Human Alu-J subfamily consensus sequence.//2.3e-41:289:85//U14567

[14866] R-NT2RP3003833//Homo sapiens clones 24718 and 24825 mRNA sequence.//1.6e-108:541:97//AF070611

[14867] R-NT2RP3003842//Homo sapiens Xp22 BAC 620F15 (Genome Systems BAC library) complete sequence.//1.5e-46:457:74//AC002980

[14868] R-NT2RP3003846//Plasmodium falciparum MAL3P3, complete sequence.//3.5e-06:356:62//Z98547

[14869] R-NT2RP3003870//Homo sapiens full-length insert cDNA clone ZD75H11.//8.2e-09:68:98//AF086402

[14870] R-NT2RP3003876//Human DNA sequence *** SEQUENCING IN PROGRESS *** from clone 1018D12, WORKING DRAFT SEQUENCE.//0.0027:180:66//AL031650

[14871] R-NT2RP3003914//Dictyostelium discoideum DNA for transposable element Tdd-3 tandem array.//0.029:234:62//X53439

[14872] R-NT2RP3003918

[14873] R-NT2RP3003932//Mus musculus MRC OX-2 antigen homolog gene, exons 2-5, and complete cds.//0.00087:164:67//AF029215

[14874] R-NT2RP3003989

[14875] R-NT2RP3003992//Sequence 1 from patent U.S. Pat. No. 5,591,825.//0.56:235:59//I33465

[14876] R-NT2RP3004013//HS_{—}3018_A1_G09_MR CIT Approved Human Genomic Sperm Library D Homo sapiens genomic clone Plate=3018 Col=17 Row=M, genomic survey sequence.//0.00026:421:60//AQ119904

[14877] R-NT2RP3004016//Drosophila melanogaster DNA sequence (Pls DS03465 (D149) and DS08544 (Dl 87)), complete sequence.//4.8e-12:308:62//AC004532

[14878] R-NT2RP3004041//Human DNA sequence *** SEQUENCING IN PROGRESS *** from clone 598F2, WORKING DRAFT SEQUENCE.//0.42:190:64//AL021579

[14879] R-NT2RP3004051//Homo sapiens chromosome 19, BAC CIT-B-191 n6, complete sequence.//3.6e-21:332:69//AC006130

[14880] R-NT2RP3004070//Plasmodium falciparum 3D7 chromosome 12 PFYAC492 genomic sequence, WORKING DRAFT SEQUENCE, 5 unordered pieces.//2.0e-05:476:57//AC005308

[14881] R-NT2RP3004078//Homo sapiens chromosome 19, cosmid R30335, complete sequence.//2.0e-86:486:93//AC005784

[14882] R-NT2RP3004093//Human PAC clone 257C22A from 13q12-q13, complete sequence.//5.3e-11:230:69//AC002525

[14883] R-NT2RP3004095//Homo sapiens clone NH0486122, WORKING DRAFT SEQUENCE, 5 unordered pieces.//7.5e-93:551:92//AC005038

[14884] R-NT2RP3004110//Homo sapiens 12 p13.3 PAC RPCI5-940J5 (Roswell Park Cancer Institute Human PAC Library) complete sequence.//1.6e-104:317:100//AC006064

[14885] R-NT2RP3004125//Pongo pygmaeus CT microsatellite, clone #3, from the tandemly repeated genes encoding U2 small nuclear RNA (RNU2 locus).//0.73:168:60//U36532

[14886] R-NT2RP3004145//Homo sapiens full-length insert cDNA clone ZE09HO3.//2.3e-89:427:99//AF086542

[14887] R-NT2RP3004148//Arabidopsis thaliana chromosome II BAC T1B8 genomic sequence, complete sequence.//0.013:134:70//U78721

[14888] R-NT2RP3004155//Homo sapiens PAC clone DJO320J15 from Xq23, complete sequence.//3.8e-10:101:87//AC004081

[14889] R-NT2RP3004206//Homo sapiens clone DJ0794K21, complete sequence.//1.5e-06:442:57//AC005533

[14890] R-NT2RP3004207//Mouse mRNA for seizure-related gene product 6.//1.7e-07:220:69//D29763

[14891] R-NT2RP3004209//Human cosmid Q7A10 (D21S246) insert DNA, complete sequence.//7.3e-89:504:92//D42052

[14892] R-NT2RP3004215//Caenorhabditis elegans cosmid Fl IA6, complete sequence.//0.018:353:59//Z81498

[14893] R-NT2RP3004242//Plasmodium falciparum chromosome 2, section 52 of 73 of the complete sequence.//4.5e-06:407:60//AE001415

[14894] R-NT2RP3004246//Homo sapiens chromosome 10 clone CIT987SK-IOIOK1 map 10q25, complete sequence.//2.8e- 105:534:97//AC005385

[14895] R-NT2RP3004253//RPCI11-78J12.TJ RPCII 1 Homo sapiens genomic clone R-78J12, genomic survey sequence.//4.0e-64:382:90//AQ281324

[14896] R-NT2RP3004258//Rattus norvegicus Zis mRNA, complete cds.//7.0e-60:417:84//AF013967

[14897] R-NT2RP3004262//Mus musculus heat shock protein hsp40-3 gene, complete cds.//2.7e-43:528:73//AF092536

[14898] R-NT2RP3004334//Homo sapiens chromosome 17, clone hRPC.1110_E_{—}20, complete sequence.//1.4e-06:435:62//AC004231

[14899] R-NT2RP3004341//CITBI-EI-2503F11.TR CITBI-E1 Homo sapiens genomic clone 2503FI 1, genomic survey sequence.//0.0018:210:65//AQ263365

[14900] R-NT2RP3004348//Homo sapiens chromosome 17, clone hRPK.85_B_{—}7, complete sequence.//7.1e-46:340:83//AC005695

[14901] R-NT2RP3004349//Human DNA sequence *** SEQUENCING IN PROGRESS *** from clone 11703, WORKING DRAFT SEQUENCE.//9.4e-29:263:79//AL020995

[14902] R-NT2RP3004378//Human DNA sequence from PAC 27K14 on chromosome Xp 11.3-Xp 11.4. Contains monoamine oxidase B (MAOB), ESTs and polymorphic CA repeats.//2.0e-67:422:90//Z95125

[14903] R-NT2RP3004399//HS_{—}3046_A1_E02_MR CIT Approved Human Genomic Sperm Library D Homo sapiens genomic clone Plate=3046 Col=3 Row=I, genomic survey sequence.//0.00014:186:6711AQ137619

[14904] R-NT2RP3004424//RPCI11-59114.TJ RPCII 1 Homo sapiens genomic clone R-59114, genomic survey sequence.//7.4e-71:370:95//AQ201461

[14905] R-NT2RP3004428//Caenorhabditis elegans DNA *** SEQUENCING IN PROGRESS *** from clone Y66A7, WORKING DRAFT SEQUENCE.//0.096:205:64//AL022282

[14906] R-NT2RP3004451//Arabidopsis thaliana chromosome II BAC F 5K20 genomic sequence, complete sequence.//0.0029:396:60//AC005824

[14907] R-NT2RP3004454//Homo sapiens mRNA for KIAA0448 protein, complete cds.//2.9e-106:526:98//AB007917

[14908] R-NT2RP3004466

[14909] R-NT2RP3004470//Homo sapiens chromosome 5, Bac clone 5 m9 (LBNL H220), complete sequence.//8.3e-06:229:64//AC005895

[14910] R-NT2RP3004472//Plasmodium falciparum 3D7 chromosome 12 PFYAC1383 genomic sequence, WORKING DRAFT SEQUENCE, 3 unordered pieces.//0.87:442:59//AC005504

[14911] R-NT2RP3004475//Homo sapiens mRNA for KIAA0456 protein, partial cds.//1.6e-105:521:97//AB007925

[14912] R-NT2RP3004480//Mus musculus maternal-embryonic 3 (Mem3) mRNA, complete cds.//3.9e-38:322:81//U47024

[14913] R-NT2RP3004490//Homo sapiens PAC clone 166HI from 12q, complete sequence.//4.2e-96:527:92//AC003982

[14914] R-NT2RP3004498//Homo sapiens clone DJI 147A01, WORKING DRAFT SEQUENCE, 25 unordered pieces.//2.3e-43:342:82//AC006023

[14915] R-NT2RP3004503//Human cosmid g1572c101, complete sequence.//2.3e-25:392:68//AC000357

[14916] R-NT2RP3004504//M. musculus mRNA for CPEB protein.//1.8e-28:387:70//Y08260

[14917] R-NT2RP3004507

[14918] R-NT2RP3004527//Homo sapiens chromosome 14, BAC CITB-135H17 containing the RAD5 I LI gene, complete sequence.//0.68:244:62//AC004518

[14919] R-nnnnnnnnnnnn//Mouse oncogene (ect2) mRNA, complete cds.//2.6e-79:525:84//L11316

[14920] R-NT2RP3004544

[14921] R-NT2RP3004566

[14922] R-NT2RP3004569//Plasmodium falciparum 3D7 chromosome 12 PFYAC1122 genomic sequence, WORKING DRAFT SEQUENCE, 3 unordered pieces.//0.96:296:58//AC004709

[14923] R-NT2RP3004572//Homo sapiens BAC clone RG281G05 from 7 p15-p21, complete sequence.//8.2e-12:457:6311AC005083

[14924] R-NT2RP3004578//Homo sapiens mRNA for KIAA0477 protein, complete cds.//2.4e-97:488:96//AB007946

[14925] R-NT2RP3004594//Homo sapiens BAC clone NH0436H22 from 2, complete sequence.//1.7e-10:368:61//AC005234

[14926] R-NT2RP3004617

[14927] R-NT2RP3004618//F2H16TF IGF Arabidopsis thaliana genomic clone F2H16, genomic survey sequence.//0.96:212:64//B26414

[14928] R-NT2RP3004670//Homo sapiens GN6ST mRNA for N-acetylglucosamine-6-O-sulfotransferas e (GlcNAc6ST), complete cds.//2.2e-55:291:95//AB014679

[14929] R-NT2RP4000008//H. sapiens polyA site DNA sequence.//2.5e-25:202:85//Z24749

[14930] R-NT2RP4000023//CIT-HSP-2372A9.TF CIT-HSP Homo sapiens genomic clone 2372A9, genomic survey sequence.//3.6e-51:313:89//AQ112388

[14931] R-NT2RP4000035//Homo sapiens clone GS166C05, WORKING DRAFT SEQUENCE, 7 unordered pieces.//4.3e-69:536:81//AC005015

[14932] R-NT2RP4000049//Homo sapiens TRAIL receptor 2 mRNA, complete cds.//2.1e-58:289:82//AF016266

[14933] R-NT2RP4000051//Homo sapiens Chromosome 22q11.2 Cosmid Clone 20b In DGCR Region, complete sequence.//0.56:462:58//AC000074

[14934] R-NT2RP4000078//Plasmodium falciparum 3D7 chromosome 12 PFYAC357 genomic sequence, WORKING DRAFT SEQUENCE, 7 unordered pieces.//0.00021:460:60//AC005506

[14935] R-NT2RP4000102//Homo sapiens chromosome 5, PAC clone 17e19 (LBNL H148), complete sequence.//1.6e-08:518:58//AC004648

[14936] R-NT2RP4000109//Homo sapiens mRNA for MEGF5, partial cds.//3.5e-106:536:96//AB011538

[14937] R-NT2RP4000129//Homo sapiens mRNA for KIAA0483 protein, partial cds.//1 le-110:554:97//AB007952

[14938] R-NT2RP4000147

[14939] R-NT2RP4000150//Rat proto-oncogene (Ets-1) mRNA, complete cds.//3.5e-46:395:83//L20681

[14940] R-NT2RP4000151

[14941] R-NT2RP4000159//Caenorhabditis elegans cosmid R02FI 1.//0.00011:261:63//AF016439

[14942] R-NT2RP4000167//RPCI11-59L8.TK RPCI11 Homo sapiens genomic clone R-59L8, genomic survey sequence.//6.2e-26:163:93//AQ200049

[14943] R-NT2RP4000185

[14944] R-NT2RP4000210//Homo sapiens mRNA for KIAA0700 protein, partial cds.//4.6e-99:505:96//AB014600

[14945] R-NT2RP4000212//, complete sequence.//1.0e-106:538:96//AC005300

[14946] R-NT2RP4000214//Homo sapiens chromosome 19, CIT-HSP-444n24, complete sequence.//1.2e-39:272:88//AC005261

[14947] R-NT2 kP4000218//Homo sapiens PAC clone DJO320J15 from Xq23, complete sequence.//1.6e-09:457:60//AC004081

[14948] R-NT2RP4000243//Homo sapiens mRNA for cartilage-associated protein (CASP).//9.0e-69:354:96//AJ006470

[14949] R-NT2RP4000246//Mus musculus mRNA for NDPP-1 protein, complete cds.//2.0e-27:344:73//D10727

[14950] R-NT2RP4000259//Homo sapiens clone 683 unknown mRNA, complete sequence.//9.7e-78:381:99//AF091092

[14951] R-NT2RP4000263//CIT-HSP-2336N24.TF CIT-HSP Homo sapiens genomic clone 2336N24, genomic survey sequence.//0.26:124:69//AQ043515

[14952] R- nnnnnnnnnnnn//ORF 5′ of ECLF2 . . . ECRF3=G protein-coupled receptor homolog [herpesvirus saimiri HVS, host-squirrel monkey, Genomic, 4 genes, 3720 nt].//0.12:326:61//S76368

[14953] R-NT2RP4000312//Human DNA sequence from clone 523EI9 on chromosome 6 p11.2-12.3 Contains ESTs STS and GSSs, complete sequence.//2.2e-111:538:98//AL033384

[14954] R-NT2RP4000321//Homo sapiens clone 24453 mRNA sequence.//1.4e-108:515:99//AF070524

[14955] R-NT2RP4000323//S. cerevisiae telomeric sequence DNA, clone YLP108CA-2-1.//0.048:107:69//M34311

[14956] R-NT2RP4000355//Homo sapiens clone DJ1136A10, WORKING DRAFT SEQUENCE, 4 unordered pieces.//4.3e-39:350:79//AC004972

[14957] R-NT2RP4000360//Homo sapiens mRNA for KIAA0738 protein, complete cds.//2.4e-109:520:99//AB018281

[14958] R-NT2RP4000367//Homo sapiens IkappaB kinase complex associated protein (IKAP) mRNA, complete cds.//8.7e-109:527:98//AF044195

[14959] R-NT2RP4000370//Homo sapiens PAC clone DJ0777023 from 7 p14-p15, complete sequence.//9.9e-25:348:72//AC005154

[14960] R-NT2RP4000376//Rattus norvegicus phospholipase A-2-activating protein (plap) mRNA, complete cds.//2.2e-69:391:89//U 17901

[14961] R-NT2RP4000381//Homo sapiens chromosome 17, clone hRPK.394_K_{—}10, complete sequence.//0.066:197:63//AC006080

[14962] R-NT2RP4000415//345F19.TV CIT978SKA1 Homo sapiens genomic clone A-345F19, genomic survey sequence.//0.10:79:75//B15527

[14963] R-NT2RP4000417//Homo sapiens full-length insert cDNA clone ZD52B10.//9.6e-96:468:97//AF086313

[14964] R-NT2RP4000424//Homo sapiens DNA sequence from PAC 127D3 on chromosome 1q23-25. Contains FMO2 and FMO3 genes for Flavin-containing Monooxygenase 2 and Flavin-containing Monooxygenase 3 (Dimethylaniline Monooxygenase (N-Oxide 3, EC 1.14.13.8, Dimethylaniline Oxidase 3, FMO II, FMO 3), and a gene for another, unknown, Flavin-containing Monooxygenase family protein. Contains ESTs and GSSs, complete sequence.//1.8e-08:489:59//AL021026

[14965] R-NT2RP4000448//Plasmodium falciparum 3D7 chromosome 12 PFYAC181 genomic sequence, WORKING DRAFT SEQUENCE, 8 unordered pieces.//3.3e-07:510:60//AC005505

[14966] R-NT2RP4000449//HS_{—}2037_B2_A09_T7 CIT Approved Human Genomic Sperm Library D Homo sapiens genomic clone Plate=2037 Col=18 Row=B, genomic survey sequence.//1.3e-58:375:8811AQ243047

[14967] R-NT2RP4000455//Phocine herpesvirus type 1 glycoprotein D (gD) gene, partial cds.//0.62:133:63//U92271

[14968] R-nnnnnnnnnnnn

[14969] R-NT2RP4000480//cSRL-54b 11-u cSRL flow sorted Chromosome 11 specific cosmid Homo sapiens genomic clone cSRL-54b11, genomic survey sequence.//2.1e-19:145:88//B05082

[14970] R-nnnnnnnnnnnn

[14971] R-NT2RP4000500

[14972] R-NT2RP4000515//Plasmodium falciparum 3D7 chromosome 12 PFYACB8-420 genomic sequence, WORKING DRAFT SEQUENCE, 14 unordered pieces.//1.4e-05:411:59//AC005140

[14973] R-NT2RP4000517//Human Chromosome 16 BAC clone CIT987SK-A-61E3, complete sequence.//2.7e-21:230:77//AC003007

[14974] R-NT2RP4000518//Homo sapiens DNA sequence from PAC 206D 15 on chromosome 1 q24. Contains a Reduced Folate Carrier protein (RFC) LIKE gene, a mitochondrial ATP Synthetase protein 8 (ATP8, MTATP8) LIKE pseudogene, an unknown gene and the last exon of the JEMI gene coding for the Basic-Leucine Zipper nuclear factor JEM-1. Contains ESTs, an STS and a BAC end sequence (GSS), complete sequence.//0.0080:461:59//AL021068

[14975] R-NT2RP4000519

[14976] R-NT2RP4000524

[14977] R-NT2RP4000528//Homo sapiens chromosome 17, clone hRPK.138_P_{—}22, complete sequence.//0.99:158:66//AC005697

[14978] R-NT2RP4000541//Homo sapiens Chromosome 22q11.2 Cosmid Clone 33e In DGCR Region, complete sequence.//1.0:309:59//AC000078

[14979] R-NT2RP4000556//Rattus norvegicus cell cycle protein p5SCDC gene, complete cds.//0.0031:126:72//AF052695

[14980] R-NT2RP4000588//Homo sapiens BAC clone RG208K23 from 7q31, complete sequence.//1.0:186:64//AC004161

[14981] R-NT2RP4000614//Plasmodium falciparum DNA *$* SEQUENCING IN PROGRESS * from contig 3-62, complete sequence.//1.4e-06:526:58//AL009013

[14982] R-NT2RP4000638//Homo sapiens chromosome 17, clone hCIT.468_F_{—}23, WORKING DRAFT SEQUENCE, 3 unordered pieces.//6.9e-48:497:75//AC004666

[14983] R-NT2RP4000648//CIT-HSP-230017.TR CIT-HSP Homo sapiens genomic clone 230017, genomic survey sequence.//0.22:110:68//AQ012747

[14984] R-NT2RP4000657//Lycodichthys dearbomi type III antifreeze peptide gene, clone 5′LD-1/NotI-EcoRI subdlone SphI-XbaI, partial cds.//0.0065:189:63//U20443

[14985] R-NT2RP4000704//Human DNA sequence *** SEQUENCING IN PROGRESS *** from clone 409J21, WORKING DRAFT SEQUENCE.//0.22:334:60//Z83824

[14986] R-NT2RP4000724//Homo sapiens Chromosome 22q11.2 Cosmid Clone 56c In DGCR Region, complete sequence.//2.2e-70:448:88//AC000080

[14987] R-NT2RP4000728//CIT-HSP-231 OK14.TF CIT-HSP Homo sapiens genomic clone 2310KI14, genomic survey sequence.//0.00013:289:61//AQ019669

[14988] R-NT2RP4000739//Homo sapiens chromosome 12p13.3, WORKING DRAFT SEQUENCE, 21 unordered pieces.//0.53:254:61//AC004765

[14989] R-NT2RP4000781//P. cepacia fusaric acid-resistance genes encoding 5 proteins, complete cds.//1.0:392:59//D12503

[14990] R-NT2RP4000817//Homo sapiens Xp22 BAC GSHB 526D21 (Genome Systems Human BAC library) complete sequence.//0.59:378:58//AC003037

[14991] R-NT2RP4000833//Human DNA sequence *** SEQUENCING IN PROGRESS *** from clone Y313F4, WORKING DRAFT SEQUENCE.//3.4e-53:307:85//AL023808

[14992] R-NT2RP4000837//Homo sapiens T-cell receptor alpha delta locus from bases 501613 to 752736 (section 3 of 5) of the Complete Nucleotide Sequence.//7.0e-50:367:77//AE000660

[14993] R-NT2RP4000855

[14994] R-NT2RP4000865//Homo sapiens chromosome 17, clone HRPC905N1, complete sequence.I/1.5e-78:479:88//AC003098

[14995] R-NT2RP4000878//Mus musculus mRNA for myeloid associated differentiation protein.//4.5e-09:186:69//AJ001616

[14996] R-NT2RP4000879//Plasmodium falciparum 3D7 chromosome 12 PFYAC812 genomic sequence, WORKING DRAFT SEQUENCE, 8 unordered pieces.//7.8e-08:364:60//AC004153

[14997] R-nnnnnnnnnnnnn/Human S-adenosylmethionine decarboxylase (AMDI) gene, exons 5-9.//3.5e-90:459:96//M88006

[14998] R-nnnnnnnnnnnn//H. sapiens ung gene for uracil DNA-glycosylase.//7.6e-09:392:61//X89398

[14999] R-NT2RP4000925//Rattus norvegicus Sha1-related potassium channel Kv4.3 mRNA, complete cds.//5.8e-45:264:92//U42975

[15000] R-nnnnnnnnnnnn//epstein-barr virus simple repeat array (ir3).//0.00012:367:61//J02079

[15001] R-NT2RP4000928//Arabidopsis thaliana genomic DNA, chromosome 5, PI clone: MCLI9, complete sequence.//1.0:138:68//AB006698

[15002] R-NT2RP4000929//Human DNA sequence from PAC 293L6 on chromosome 22, complete sequence.//0.45:288:62//Z82197

[15003] R-NT2RP4000955//Human DNA sequence *** SEQUENCING IN PROGRESS *** from clone 633019, WORKING DRAFT SEQUENCE.//1.1e-09:322:62//AL022302

[15004] R-NT2RP4000973//Homo sapiens X-linked anhidroitic ectodermal dysplasia protein gene (EDA), exon 2 and flanking repeat regions.//2.3e-06:326:62//AF003528

[15005] R-NT2RP4000975

[15006] R-NT2RP4000979//HS_{—}3009_B1_F08_MR CIT Approved Human Genomic Sperm Library D Homo sapiens genomic clone Plate=3009 Col=15 Row=L, genomic survey sequence.//2.3e-14:117:89//AQ090957

[15007] R-NT2RP4000984//Human immunodeficiency virus type 1 envelope glycoprotein (env) gene, C2-V3 region, isolate HIV194UG011INT.01_dilPD, partial cds.//0.11:219:62//U44882

[15008] R-NT2RP4000989//Sequence 30 from patent U.S. Pat. No. 5,552,281.//3.5e-25:154:97//I25669

[15009] R-NT2RP4000996//Plasmodium falciparum strain Dd2 heat shock protein 86 (HSP86), O1 (O1), O3 (o3), O2 (o2), CG8 (cg8), CG4 (cg4), CG3 (cg3), CG9 (cg9), CG1 (cg1), CG6 (cg6), chloroquine resistance candidate protein (cg2), and CG7 (cg7) genes, complete cds.//3.8e-07:421:59//AF030694

[15010] R-NT2RP4000997//Homo sapiens chromosome 17, clone 104H12, complete sequence.//4.2e-37:499:72//AC000003

[15011] R-NT2RP4001004//HS_{—}3163_A2-H02_MR CIT Approved Human Genomic Sperm Library D Homo sapiens genomic clone Plate=3163 Col=4 Row=O, genomic survey sequence.//2.8e-38:241:90//AQ168515

[15012] R-NT2RP4001006//Homo sapiens clone DJ 1147A01, WORKING DRAFT SEQUENCE, 25 unordered pieces.//7.1e-55:372:73//AC006023

[15013] R-NT2RP4001010//Homo sapiens full-length insert cDNA clone ZD38E12.//3.3e-09:153:74//AF086247

[15014] R-NT2RP4001029//Mus domesticus nuclear binding factor NF2d9 mRNA, complete cds.//2.1e-34:361:78//U20086

[15015] R-NT2RP4001041//Homo sapiens chromosome 5, BAC clone 282B7 (LBNL H192), complete sequence.//9.9e-84:435:96//AC005216

[15016] R-NT2RP4001057//Homo sapiens KIAA0399 mRNA, partial cds.//6.2e-50:282:94//AB007859

[15017] R-NT2RP4001064//H. sapiens NOS2 gene, exon 15.//0.71:183:61//X85771

[15018] R-NT2RP4001078//Human D-site binding protein gene, exon 4 and complete cds.//1.9e-114:569:97//U48213

[15019] R-NT2RP4001079//Homo sapiens mRNA for putative Ca2+-transporting ATPase, partial.//2.4e-118:574:98//AJ010953

[15020] R-NT2RP4001080//Plasmodium falciparum chromosome 2, section 66 of 73 of the complete sequence.//0.013:430:58//AE001429

[15021] R-nnnnnnnnnnnn//Homo sapiens mRNA for KIAA0592 protein, partial cds.//1.8e-119:548:95//AB011164

[15022] R-NT2RP4001095//Homo sapiens cosmids IM0525, LC1233, Qc3C1, LB1439, Qc12C11 and 220B3 from Xq28, complete sequence.//2.8e-39:312:81//AF003626

[15023] R-NT2RP4001100//Human DNA sequence from cosmid U85A3, between markers DXS366 and DXS87 on chromosome X contains rad21 and T-cell cyclophorin pseudogenes, STS.//8.7e-41:389:78//Z78021

[15024] R-NT2RP4001117//Canis familiaris sec61 homologue mRNA, complete cds.//2.8e-12:292:68//M96629

[15025] R-NT2RP4001122//Caenorhabditis elegans cosmid F44D 12, complete sequence.//0.97:129:66//Z68298

[15026] R-NT2RP4001126//HS_{—}3146_A1_B05_T7 CIT Approved Human Genomic Sperm Library D Homo sapiens genomic clone Plate=3146 Col=9 Row=C, genomic survey sequence.//0.013:268:63//AQ141093

[15027] R-NT2RP4001138

[15028] R-NT2RP4001143//Human DNA sequence *** SEQUENCING IN PROGRESS *** from clone 64K7, WORKING DRAFT SEQUENCE.//1.8e-31:380:68//AL031668

[15029] R-NT2RP4001148//Homo sapiens clone RG332P12, WORKING DRAFT SEQUENCE, I unordered pieces.//1.2e-83:325:92//AC005095

[15030] R-NT2RP4001149//Mouse mRNA for thymic epithelial cell surface antigen, complete cds.//8.1e-32:553:67//D67067

[15031] R-NT2RP4001150//AK011 Genomic DNA Hordeum vulgare genomic clone tel44a similar to barley TAS, genomic survey sequence.//0.91:132:63//AQ248412

[15032] R-NT2RP4001159//Cloning vector pAP3neo DNA, complete sequence.//4.0e-118:437:97//AB003468

[15033] R-NT2RP4001174//Homo sapiens 12q24 BAC RPCI 11-162P23 (Roswell Park Cancer Institute Human BAC library) complete sequence.//1.7e-33:289:82//AC002996

[15034] R-nnnnnnnnnnnn//P. falciparum mRNA for AARP2 protein.//0.93:187:64//Y08924

[15035] R-NT2RP4001207

[15036] R-NT2RP4001210//CIT-HSP-2042D13.TF CIT-HSP Homo sapiens genomic clone 2042D13, genomic survey sequence.//3.8e-06:268:63//B74772

[15037] R-NT2RP4001213//Human zinc finger protein 20 (ZNF20) pentanucleotide repeat polymorphism.//4.7e-16:371:66//M99593

[15038] R-NT2RP4001219//HS_{—}2190_A1_A06_T7 CIT Approved Human Genomic Sperm Library D Homo sapiens genomic clone Plate=2190 Col=11 Row=A, genomic survey sequence.//2.4e-06:288:61//AQ216635

[15039] R-NT2RP4001228//Plasmodium falciparum DNA *** SEQUENCING IN PROGRESS * from MAL1P2, WORKING DRAFT SEQUENCE.//0.024:357:58//AL031745

[15040] R-NT2RP4001235//HS_{—}3047_A1_E07_MR CIT Approved Human Genomic Sperm Library D Homo sapiens genomic clone Plate=3047 Col=13 Row=I, genomic survey sequence.//0.0033:301:63//AQ126918

[15041] R-NT2RP4001256//HS_{—}3007_A2_B06_T7 CIT Approved Human Genomic Sperm Library D Homo sapiens genomic clone Plate=3007 Col=12 Row=C, genomic survey sequence.//1.5e-11:140:80//AQ118389

[15042] R-NT2RP4001260//Plasmodium falciparum chromosome 2, section 63 of 73 of the complete sequence.//0.0013:486:59//AE001426

[15043] R-NT2RP4001274//RPCI 11-24021.TKBF RPCI-11 Homo sapiens genomic clone RPCI-11-24021, genomic survey sequence.//3.9e-25:142:99//AQ013887

[15044] R-nnnnnnnnnnnn//Homo sapiens full-length insert cDNA clone ZD55D10.//1.2e-10:90:92//AF086334

[15045] R-NT2RP4001313//Mus musculus orphan nuclear hormone receptor (CAR) gene, complete sequence.//7.7e-23:466:66//AF009326

[15046] R-NT2RP4001315//CIT-HSP-2312C6.TR CIT-HSP Homo sapiens genomic clone 2312C6, genomic survey sequence.//0.98:305:62//AQ018036

[15047] R-NT2RP4001339

[15048] R-NT2RP4001345

[15049] R-NT2RP4001351//Fruitfly strain g20 mitochondrial DNA, A+T-rich region, partial sequence.//0.00082:260:59//AB003097

[15050] R-NT2RP4001353//RPCI11-55N17.TJ RPCII 1 Homo sapiens genomic clone R-55N17, genomic survey sequence.//0.74:106:66//AQ081821

[15051] R-NT2RP4001372

[15052] R-NT2RP4001373//Homo sapiens chromosome 17, clone hRPK.394_K_{—}10, complete sequence.//1.5e-09:473:60//AC006080

[15053] R-NT2RP4001375

[15054] R-NT2RP4001379//CIT-HSP-2335AI0.TF CIT-HSP Homo sapiens genomic clone 2335A10, genomic survey sequence.//9.4e-41:441:75//AQ040083

[15055] R-NT2RP4001389//Homo sapiens PAC clone DJ0740D02 from 7 p14-p15, complete sequence.//2.4e-22:276:73//AC004691

[15056] R-NT2RP4001407//Plasmodium falciparum 3D7 chromosome 12 PFYACB8-420 genomic sequence, WORKING DRAFT SEQUENCE, 14 unordered pieces.//0.49:254:61//AC005140

[15057] R-NT2RP4001414

[15058] R-NT2RP4001433//Human prohibitin (PHB) gene, exons 1-7.//6.6e-66:357:90//L14272

[15059] R-NT2RP4001442//Plasmodium falciparum 3D7 chromosome 12 PFYAC492 genomic sequence, WORKING DRAFT SEQUENCE, 5 unordered pieces.//0.1 I :307:59//AC005308

[15060] R-NT2RP4001447//cSRL-58d2-u cSRL flow sorted Chromosome 11 specific cosmid Homo sapiens genomic clone cSRL-58d2, genomic survey sequence.//0.0039:112:71//B05220

[15061] R-NT2RP4001474

[15062] R-NT2RP4001483

[15063] R-NT2RP4001498//Plasmodium falciparum (clone Dd2) heat shock protein 86 gene, complete cds.//1.2e-07:339:61//L34027

[15064] R-NT2RP4001502//HS_{—}2187_B1_CI0_MR CIT Approved Human Genomic Sperm Library D Homo sapiens genomic clone Plate=2187 Col=19 Row=F, genomic survey sequence.//1.3e-20:183:81//AQ214108

[15065] R-NT2RP4001507//Arabidopsis thaliana chromosome 1 BAC Ti 7H3 sequence, WORKING DRAFT SEQUENCE, 4 unordered pieces.//0.15:333:62//AC005916

[15066] R-NT2RP4001524//Genomic sequence from Human 13, complete sequence.//0.96:159:65//AC001226

[15067] R-NT2RP4001529//Mus domesticus nuclear binding factor NF2d9 mRNA, complete cds.//9.5e-34:337:80//U20086

[15068] R-NT2RP4001547//Plasmodium falciparum 3D7 chromosome 12 PFYAC588 genomic sequence, WORKING DRAFT SEQUENCE, 2 unordered pieces.//0.00027:336:63//AC004710

[15069] R-nnnnnnnnnnnn//Arabidopsis thaliana BAC T 12H20.//1.5e-11:517:60//AF080119

[15070] R-NT2RP4001555//Human DNA sequence from PAC 481A17 on chromosome X contains ESTs.//0.0069:305:6211Z82212

[15071] R-NT2RP4001567//RPCI 11-61A2.TJ RPCI11 Homo sapiens genomic clone R-61A2, genomic survey sequence.//0.0072:180:60//AQ200771

[15072] R-NT2RP4001568

[15073] R-NT2RP4001571//Trypanoplasma borreli kinetoplast ribosomal protein S12 (RPS 12), putative cryptogene (GR11), 12S ribosomal RNA, and apocytochrome b (CYb) genes, primary transcripts, and cytochrome c oxidase subunit III (COIII) gene, complete cds.//1.6e-09:555:58//U14181

[15074] R-NT2RP4001574//HS_{—}2247_B1_B05_MR CIT Approved Human Genomic Sperm Library D Homo sapiens genomic clone Plate=2247 Col=9 Row=D, genomic survey sequence.//1.1e-41:254:90//AQ182345

[15075] R-NT2RP4001575//Human DNA sequence from clone 1033B10 on chromosome 6p21.2-21.31. Contains the BING5 gene, exons 11 to 15 of the BING4 gene, the gene for GalT3 (beta3-Galactosyltransferase), the RPS18 (40S ribosomal protein S18) gene, the SACM2L (suppressor of actin mutation 2, yeast, homolog) gene, a pseudogene similar to TAT-SF1, a Pseudogene similar to zinc finger genes, the RING1 gene, the gene for HKE6 (RING2), the gene for HKE4 (RING5), the RXRB (Retinoid X receptor beta) gene, the COL11A2 (collagen, type XI, alpha 2) gene, the HLA-DPB2 pseudogene and part of the HLA-DPA3 pseudogene. Contains predicted CpG islands, ESTs, STSs, and GSSs, complete sequence.//1.1e-118:567:98//AL031228

[15076] R-NT2RP4001592//Human DNA sequence *** SEQUENCING IN PROGRESS *** from clone 1018D12, WORKING DRAFT SEQUENCE.//2.5e-09:370:61//AL031650

[15077] R-NT2RP4001610//Homo sapiens Xp22 Cosmids U1SE4, Ul lSH5, U132E12, U11SB9 (Lawrence Livermore human cosmid library) complete sequence.//0.99:73:75//AC002364

[15078] R-NT2RP4001614

[15079] R-NT2RP4001634//Homo sapiens full-length insert cDNA clone YU73B11.//5.8e-101:526:94//AF087969

[15080] R-NT2RP4001638//Homo sapiens clone 23967 unknown mRNA, partial cds.//5.4e-115:559:97//AF007151

[15081] R-NT2RP4001644//M. musculus mRNA for map kinase interacting kinase, Mnk2.//6.8e-33:286:79//Y11092

[15082] R-NT2RP4001656//Human Chromosome 11 pac pDJ393015, WORKING DRAFT SEQUENCE, 8 unordered pieces.//2.2e-109:515:99//AC000384

[15083] R-NT2RP4001677//Genomic sequence from Human 9q34, complete sequence.//0.19:504:58//AC000397

[15084] R-NT2RP4001696//Human chromosome 8 BAC clone CIT987SK-2A8 complete sequence.//4.5e-115:583:96//U96629

[15085] R-NT2RP4001725//Human Chromosome 3 pac pDJ70111, WORKING DRAFT SEQUENCE, 2 unordered pieces.//0.98:301:60//AC000380

[15086] R-nnnnnnnnnnnn//Caenorhabditis elegans cosmid F48E3.//2.2e-17:328:64//U28735

[15087] R-NT2RP4001739//RPCI11-74E7.TJ RPCI11 Homo sapiens genomic clone R-74E7, genomic survey sequence.//1.1e-08:141:65//AQ268408

[15088] R-NT2RP4001753//H. sapiens HZF3 mRNA for zinc finger protein.//1.7e-1111:552:96//X78926

[15089] R-NT2RP4001760//Mouse oncogene (ect2) mRNA, complete cds.//9.3e-27:358:72//L11316

[15090] R-NT2RP4001790//Homo sapiens clone GS259H13, WORKING DRAFT SEQUENCE, 4 unordered pieces.//1.7e-99:484:98//AC005020

[15091] R-NT2RP4001803//HS_{—}3087_B2_B05_MF CIT Approved Human Genomic Sperm Library D Homo sapiens genomic clone Plate=3087 Col=10 Row=D, genomic survey sequence.//2.7e-96:471:97//AQ121405

[15092] R-NT2RP4001822

[15093] R-NT2RP4001823

[15094] R-NT2RP4001828//Human DNA sequence from PAC 179115, BRCA2 gene region chromosome 13q12-q13 contains Klotho ESTs and CpG island.//4.1e-14:136:83//Z92540

[15095] R-NT2RP4001838//Plasmodium falciparum chromosome 2, section 9 of 73 of the complete sequence.//2.5e-06:418:60//AE001372

[15096] R-NT2RP4001849//P. falciparum serine rich protein (SERP I) gene.//0.64:135:67//J03983

[15097] R-NT2RP4001889//Homo sapiens PAC clone DJI 182N03 from 7q11.23-q21.1, complete sequence.//4.3e-26:212:82//AC004548

[15098] R-NT2RP4001893//Homo sapiens BAC clone GS166A23 from 7p21, complete sequence.//1.8e-11:570:96//AC005014

[15099] R-NT2RP4001896

[15100] R-NT2RP4001901

[15101] R-NT2RP4001927//Borrelia burgdorferi (section 32 of 70) of the complete genome.//1.0:242:60//AE001146

[15102] R-NT2RP4001938//Human aminopeptidase N gene, exon 1.//3.3e-42:195:85//M55523

[15103] R-NT2RP4001946//Plasmodium falciparum 3D7 chromosome 12 PFYAC293 genomic sequence, WORKING DRAFT SEQUENCE, 9 unordered pieces.//0.97:371:57//AC004157

[15104] R-NT2RP4001950//RPCI 1-69C 18.TJ RPCI 11 Homo sapiens genomic clone R-69C 18, genomic survey sequence.//4.7e-91:552:89//AQ236641

[15105] R-NT2RP4001953//Homo sapiens DNA sequence from PAC 958B3 on chromosome Xp22.11-Xp22.22. Contains ESTs STS and CpG island.//6.6e-70:325:84//Z93023

[15106] R-NT2RP4001966//Rat mRNA for growth potentiating factor, complete cds.//5.5e-37:141:86//D42148

[15107] R-NT2RP4001975//Human Newcastle disease virus inducible protein mRNA, partial 3′UTR region.//1.0e-46:242:98//U25276

[15108] R-NT2RP4002018//RPCI 1-76123.TV RPCI 11 Homo sapiens genomic clone R-76123, genomic survey sequence.//7.9e-89:438:97//AQ268536

[15109] R-NT2RP4002047//Human DNA sequence *** SEQUENCING IN PROGRESS *** from clone 97P20, WORKING DRAFT SEQUENCE.//4.1e-07:325:62//AL031297

[15110] R-NT2RP4002052//Human DNA sequence from clone 352E11 on chromosome 22q13.1-13.31. Contains GSSs, complete sequence.//0.31:452:57//AL022353

[15111] R-NT2RP4002058//RPCI11-6901.TJ RPCII 1 Homo sapiens genomic clone R-6901, genomic survey sequence.//0.23:163:64//AQ268418

[15112] R-NT2RP4002071//Human DNA sequence *** SEQUENCING IN PROGRESS *** from clone 1172A22, WORKING DRAFT SEQUENCE//1.1e-11:407:62//AL034386

[15113] R-NT2RP4002075//Human DNA sequence from clone 21 F7 on chromosome 6q16.1-21. Contains part of an exon of a putative new gene and STSs and GSSs, complete sequence.//0.085:350:61//AL033375

[15114] R-NT2RP4002078//RPCI111-79116.TV RPCII 1 Homo sapiens genomic clone R-79116, genomic survey sequence.//3.3e-87:452:95//AQ283131

[15115] R-nnnnnnnnnnnn

[15116] R-NT2RP4002083//Homo sapiens mineralocorticoid receptor (MLR), exon 5.//0.50:256:61//AF068619

[15117] R-NT2RP4002408//CIT-HSP-2376023.TF CIT-HSP Homo sapiens genomic clone 2376023, genomic survey sequence.//6.8e-62:320:96//AQ111163

[15118] R-NT2RP4002791//Human PAC clone DJ318C 15 from Xq23, complete sequence.//0.022:435:61//AC002476

[15119] R-NT2RP4002888//Homo sapiens BAC clone RGO67EI3 from 7q21, complete sequence.//6.0e-56:660:71/HAC002383

[15120] R-NT2RP4002905//Plasmodium falciparum DNA *** SEQUENCING IN PROGRESS * from contig 3-20, complete sequence.//0.0017:533:57//AL008972

[15121] R-OVARC1000001//Homo sapiens mRNA for KIAA0465 protein, partial cds.//8.7e-114:605:94//AB007934

[15122] R-OVARC1000004//Homo sapiens chromosome 4 clone B368A9 map 4q25, complete sequence.//2.1e-43:326:74//AC005510

[15123] R-OVARC1000006//HS_{—}2253_B1_F01_MR CIT Approved Human Genomic Sperm Library D Homo sapiens genomic clone Plate=2253 Col=1 Row=L, genomic survey sequence.//3.7e-35:191:98//AQ069124

[15124] R-OVARC1000013//HS_{—}2212_A2_G06_MF CIT Approved Human Genomic Sperm Library D Homo sapiens genomic clone Plate=2212 Col=12 Row=M, genomic survey sequence.//0.14:212:63//AQ210584

[15125] R-OVARC1000014//Human DNA sequence from PAC 463A9, on chromosome Xq25 contains STS.//0.0053:356:62//Z80232

[15126] R-OVARC1000017

[15127] R-OVARC1000035//RPCII 1-65E1.TJ RPCI11 Homo sapiens genomic clone R-65E1, genomic survey sequence.//3.3e-05:236:6311AQ237194

[15128] R-OVARC1000058//Homo sapiens DNA sequence from BAC 390C10 on chromosome 22q11.21-12.1. Contains an Immunoglobulin LIKE gene and a pseudogene similar to Beta Crystallin. Contains ESTs, STSs, GSSs and taga and tat repeat polymorphisms, complete sequence.//2.7e-48:325:82//AL008721

[15129] R-OVARC1000060//Human DNA sequence *** SEQUENCING IN PROGRESS * from clone 27K12, WORKING DRAFT SEQUENCE.//5.0e-21:297:70//AL033397

[15130] R-OVARC1000068//P. falciparum complete gene map of plastid-like DNA (IR-B).//0.00038:553:58//X95276

[15131] R-OVARC1000071//Human DNA sequence *** SEQUENCING IN PROGRESS *** from clone 596C15, WORKING DRAFT SEQUENCE.//5.1e-110:599:93//AL031387

[15132] R-OVARC1000085//DNA encoding component HC5 of human proteasome.//2.7e-65:366:92//E03413

[15133] R-nnnnnnnnnnnn//CIT-HSP-2172N17.TF CIT-HSP Homo sapiens genomic clone 2172N17, genomic survey sequence.//0.80:285:59//B94391

[15134] R-OVARC1000091

[15135] R-OVARC1000092//CIT-HSP-2373J20.TR CIT-HSP Homo sapiens genomic clone 2373J20, genomic survey sequence.//1.4e-17:141:8511AQ111520

[15136] R-OVARC1000106

[15137] R-OVARC1000113//Homo sapiens okadaic acid-inducible phosphoprotein (OA48-18) mRNA, complete cds.//2.6e-100:495:97//AF069250

[15138] R-OVARC1000114//Homo sapiens partial XPGC gene, exon 2./19.5e-49:392:80//X71342

[15139] R-OVARC1000133//Human Chromosome 16 BAC clone CIT987SK-A-362G6, complete sequence.//0.00020:243:65//U95740

[15140] R-OVARC1000145//Homo sapiens chromosome 10 clone CIT987SK-IOIOKI map 10q25, complete sequence.//1.8e-16:370:67//AC005385

[15141] R-OVARC1000148//CIT-HSP-2386P14.TF.1 CIT-HSP Homo sapiens genomic clone 2386P14, genomic survey sequence.//1.1e-05:55:98//AQ240492

[15142] R-OVARC1000151//M. musculus GEG-154 mRNA.//9.8e-21:192:81//X71642

[15143] R-OVARC1000168//CIT-HSP-2336F6.TR CIT-HSP Homo sapiens genomic clone 2336F6, genomic survey sequence.//0.050:176:62//AQ042932

[15144] R-OVARC1000191//Plasmodium falciparum 3D7 chromosome 12 PFYAC357 genomic sequence, WORKING DRAFT SEQUENCE, 7 unordered pieces.//3.7e-08:534:58//AC005506

[15145] R-OVARC1000198//*** SEQUENCING IN PROGRESS *** Homo sapiens chromosome 4, BAC clone C0366H07; HTGS phase 1, WORKING DRAFT SEQUENCE, 28 unordered pieces.//5.2e-111:556:96//AC004604

[15146] R-OVARC1000209//Blacus sp. 16S ribosomal RNA gene, partial sequence.//0.55:165:67//AF003501

[15147] R-OVARC1000212//Mouse DNA for beta-casein.//0.56:225:63//X13484

[15148] R-OVARC1000240//Homo sapiens chromosome 17, clone hRPK.63_A_{—}1, complete sequence.//6.2e-38:193:82//AC005670

[15149] R-OVARC1000241/Mus musculus hypoxia inducible factor three alpha mRNA, complete cds.//1.1e-25:312:73//AF060194

[15150] R-OVARC1000288//Human HepG2 3′ region MboI cDNA, clone hmd1d01m3.//5.4e-07:128:70//D17131

[15151] R-OVARC1000302//Homo sapiens chromosome 17, clone hRPK.651_L_{—}9, complete sequence.//1.7e-10:100:88//AC005971

[15152] R-OVARC1000304//Mouse mRNA from Mov10 locus.//7.9e-66:379:81//X52574

[15153] R-OVARC1000309

[15154] R-OVARC1000321//Homo sapiens clone NH0479C 13, WORKING DRAFT SEQUENCE, 12 unordered pieces.//6.5e-83:453:94//AC005236

[15155] R-OVARC1000326//Rattus norvegicus lamina-associated polypeptide 1 C (LAP 1 C) mRNA, complete cds.//5.0e-58:455:81//U19614

[15156] R-OVARC1000335//*** SEQUENCING IN PROGRESS *** Homo sapiens chromosome 4, BAC clone C0483123; HTGS phase 1, WORKING DRAFT SEQUENCE, 7 unordered pieces.//0.034:429:60//AC005690

[15157] R-OVARC1000347//Mus musculus HRS gene, complete cds.//4.6e-06:339:61//AF020308

[15158] R-OVARC1000384//D. discoideum glycoprotein 24 A and B (GP24A and GP24B) genes, complete cds.//0.48:296:62//M27588

[15159] R-OVARC1000408//Homo sapiens DNA from chromosome 19-cosmid R27740 containing MEF2B and RSRFR2 genes, genomic sequence.//9.4e-39:286:87//AD000812

[15160] R-OVARC1000411//CIT-HSP-2303H10.TF CIT-HSP Homo sapiens genomic clone 2303H10, genomic survey sequence.//1.5e-07:94:84//AQ016720

[15161] R-OVARC1000414//Homo sapiens genomic DNA, 21q region, clone: 149C3×10, genomic survey sequence.//1.8e-32:296:75//AG002388

[15162] R-OVARC1000420//Homo sapiens clone DJ1137M13, complete sequence.//2.0e-48:354:77//AC005378

[15163] R-OVARC1000427//D. discoideum vegetative specific gene VI 8 gene for ribosomal protein.//2.5e-09:370:59//X15382

[15164] R-OVARC1000431//HSS_{—}2199_A2_E02_T7 CIT Approved Human Genomic Sperm Library D Homo sapiens genomic clone Plate=2199 Col=4 Row=I, genomic survey sequence.//1.3e-34:186:98//AQ093722

[15165] R-OVARC1000437//Gallus gallus tensin mRNA, 3′ end.//1.3e-15:160:80/HL06662

[15166] R-OVARC1000440//Homo sapiens BAC clone NH0538D15 from 7q11.23-q21.1, complete sequence.//0.0054:337:61//AC006043

[15167] R-OVARC1000442//CIT-HSP-2335L20.TR CIT-HSP Homo sapiens genomic clone 2335L20, genomic survey sequence.//1.0e-45:322:86//AQ037381

[15168] R-OVARC1000443//Homo sapiens mRNA for KIAA0683 protein, complete cds.//1.1e-77:418:94//AB014583

[15169] R-OVARC1000461//Human DNA sequence *** SEQUENCING IN PROGRESS *** from clone 215DI 1, WORKING DRAFT SEQUENCE.//0.62:333:59//AL034417

[15170] R-OVARC1000465//Bos taurus guanine nucleotide-exchange protein (ARF-GEP1) mRNA, complete cds.//1.1e-81:489:91//AF023451

[15171] R-OVARC1000466//Homo sapiens chromosome 17, Neurofibromatosis 1 locus, complete sequence.//0.0088:98:72//AC004526

[15172] R-OVARC1000473//Homo sapiens full-length insert cDNA clone Y153C10.//3.2e-92:317:100//AF085851

[15173] R-OVARC1000479//Rattus norvegicus mRNA for TIP120, complete cds.//2.7e-70:502:84//D87671

[15174] R-OVARC1000486//Dictyostelium discoideum FusC (fusC) gene, partial cds.//0.52:411:58//AF019984

[15175] R-OVARC1000496

[15176] R-OVARC1000520//Homo sapiens PAC clone DJ412A9 from 22, complete sequence.//3.8e-17:294:71//AC005005

[15177] R-OVARC1000526//Homo sapiens clone GS438P06, WORKING DRAFT SEQUENCE, 17 unordered pieces.//4.5e-109:547:96//AC005024

[15178] R-OVARC1000533//Homo sapiens chromosome 19, cosmid R30385, complete sequence.//3.0e-46:264:93//AC004510

[15179] R-OVARC1000543//Caenorhabditis elegans cosmid F 10C 1.//0.00063:417:59//U49831

[15180] R-OVARC1000556//Homo sapiens DNA sequence from PAC 168L15 on chromosome 6q26-27. Contains RSK3 gene, ribosomal protein S6 kinase, EST, GSS, STS. CpG island, complete sequence.//1.5e-39:144:92//AL022069

[15181] R-OVARC1000557//Homo sapiens chromosome 19, cosmid R32469, complete sequence.//1.5e-81:429:96//AC005197

[15182] R-OVARC1000564//Homo sapiens chromosome 17, clone HRPC837J1, complete sequence.//0.83:301:58//AC004223

[15183] R-OVARC1000573//Homo sapiens Xq28 genomic DNA in the region of the ALD locus containing the genes for creatine transporter (SLC6A8), CDM, adrenoleukodystrophy (ALD), Na+-isocitrate dehydrogenase gamma subunit (IDH), and translocon-associated protein delta (TRAP) genes, complete cds, plexin related protein (PLEXR) and serine kinase (SK) genes, partial cds, Xq281u1 gene and cytochrome C (CCp) pseudogene.//2.4e-44:300:88//U52111

[15184] R-OVARC1000578//Human Chromosome 16 BAC clone CIT987SK-A-270G1, complete sequence.//6.4e-48:436:78//AF001549

[15185] R-OVARC1000588//Homo sapiens chromosome 19, cosmid F19847, complete sequence.//2.7e-32:313:78//AC005952

[15186] R-OVARC1000605

[15187] R-OVARC1000622//Homo sapiens PAC clone DJ0942116 from 7q11, complete sequence.//6.2e-43:328:83//AC006012

[15188] R-OVARC1000640//High throughput sequencing of human chromosome 12, WORKING DRAFT SEQUENCE, I ordered pieces.//1.9e-47:514:73//AC005840

[15189] R-OVARC1000661//Homo sapiens mRNA for KIAA0590 protein, complete cds.//1.6e-29:162:100//AB011162

[15190] R-OVARC1000678//Plasmodium falciparum 3D7 chromosome 12 PFYACB8-420 genomic sequence, WORKING DRAFT SEQUENCE, 14 unordered pieces.//0.50:270:60//AC005140

[15191] R-nnnnnnnnnnnn//Rattus norvegicus mRNA for myosin-RhoGAP protein Myr 7.//1.4e-83:549:86//AJ001713

[15192] R-OVARC1000681//Human DNA sequence *** SEQUENCING IN PROGRESS *** from clone 257E24, WORKING DRAFT SEQUENCE.//3.2e-13:160:76//AL034424

[15193] R-OVARC1000689//Schistocerca americana Antennapedia homeotic protein (Antp) mRNA, complete cds.//0.90:230:61//U32943

[15194] R-OVARC1000700//Homo sapiens chromosome 5, BAC clone 34j 15 (LBNL H 169), complete sequence.//5.1e-15:133:85//AC005754

[15195] R-OVARC1000703//Homo sapiens chromosome 22, clone hRPC.130_H_{—}16, complete sequence.//6.9e-48:525:73//AC005585

[15196] R-OVARC1000730//HS_{—}3018_B1_H10_T7 CIT Approved Human Genomic Sperm Library D Homo sapiens genomic clone Plate=3018 Col=19 Row=P, genomic survey sequence.//0.00019:198:63//AQ093513

[15197] R-OVARC1000746//P. falciparum complete gene map of plastid-like DNA (IR-B).//0.98:154:65//X95276

[15198] R-OVARC1000769//Human coagulation factor XI gene, intron 2, partial, clone pTZ18R.//2.0e-30:187:78//M21185

[15199] R-OVARC1000771

[15200] R-OVARC1000781//Sequence 5 from patent WO9722695.//8.4e-47:401:77//A63552

[15201] R-OVARC1000787//Homo sapiens PAC clone DJ430N08 from 22q12.1-qter, complete sequence.//7.8e-111:567:96//AC004542

[15202] R-OVARC1000800//Homo sapiens mitochondrial HSP75 mRNA, complete cds.//1.3e-17:119:95//L15189

[15203] R-OVARC1000802//Homo sapiens chromosome 5, BAC clone 120c13 (LBNL H171), complete sequence.//2.3e-51:482:78//AC005574

[15204] R-OVARC1000834//Homo sapiens mRNA for atopy related autoantigen CALC.//3.6e-105:536:95//Y17711

[15205] R-OVARC1000846//Homo sapiens chromosome 16, cosmid clone 390H2 (LANL), complete sequence.//2.7e-107:538:96//AC004494

[15206] R-OVARC1000850//Homo sapiens PB39 mRNA, complete cds.//3.6e-114:579:96//AF045584

[15207] R-OVARC1000862//M. musculus Fif mRNA.//2.3e-20:346:73//X71978

[15208] R-OVARC1000876//Plasmodium falciparum chromosome 2, section 53 of 73 of the complete sequence.//9.1e-08:427:58//AE001416

[15209] R-OVARC1000883//Mus domesticus nuclear binding factor NF2d9 mRNA, complete cds.//5.6e-34:357:78//U20086

[15210] R-OVARC1000885//Lycopersicon esculentum alcohol dehydrogenase homolog (GAD3) mRNA, partial cds.//0.47:305:60//U21801

[15211] R-OVARC1000886

[15212] R-OVARC1000891//HS_{—}3082_A2_F04_MR CIT Approved Human Genomic Sperm Library D Homo sapiens genomic clone Plate=3082 Col=8 Row=K, genomic survey sequence.//1.1e-16:187:79//AQ122500

[15213] R-OVARC1000897//Human DNA sequence from clone 192P9 on chromosome Xp11.23-11.4. Contains a pseudogene similar to rat Plasmolipin, ESTs and GSSs, complete sequence.//7.2e-07:476:60//AL020989

[15214] R-OVARC1000912

[15215] R-OVARC1000915//Homo sapiens chromosome 17, clone hRPC.971_F_{—}3, WORKING DRAFT SEQUENCE, 1 ordered pieces.//5.4e-70:509:86//AC004150

[15216] R-OVARC1000924//Homo sapiens Chromosome 22q11.2 Cosmid Clone cosk In NF1 Region, complete sequence.//1.6e-77:465:90//AC002471

[15217] R-OVARC1000936//HS_{—}2195_A2_C12_MR CIT Approved Human Genomic Sperm Library D Homo sapiens genomic clone Plate=2195 Col=24 Row=E, genomic survey sequence.//2.4e-76:463:90//AQ191108

[15218] R-OVARC1000937//Human DNA sequence *** SEQUENCING IN PROGRESS *** from clone 250D10, WORKING DRAFT SEQUENCE.//0.0028:161:651/Z99716

[15219] R-OVARC1000945//Rattus norvegicus mRNA for atypical PKC specific binding protein, complete cds.//3. Se-62:526:78//AB005549

[15220] R-OVARC1000948//Hypera postica NADH dehydrogenase subunit I (ND1) gene, partial cds, tRNA-Leu gene, complete sequence, and 16S ribosomal gene, partial sequence, mitochondrial genes encoding mitochondrial products.//0.018:212:61//U61169

[15221] R-OVARC1000959//CIT-HSP-2371K16.TR CIT-HSP Homo sapiens genomic clone 2371K16, genomic survey sequence.//1.1e-45:303:87//AQ111323

[15222] R-OVARC1000960//Homo sapiens BAC clone GS293C05 from 7q21-q22, complete sequence.//7.5e-44:353:81//AC005021

[15223] R-OVARC1000971//H. sapiens DNA for repeat unit locus DI 8S51 (285 bp).//2.2e-07:223:70//X91255

[15224] R-OVARC1000984

[15225] R-OVARC1000996//Human DNA sequence from clone 272L16 on chromosome 1q32.1-32.3. Contains the 3′ end of the LAMB3 gene for Laminin, Beta 3 (Nicein, Kalinin, BM600) and a novel Rat Ca2+/Calmodulin dependent Protein Kinase LIKE gene. Contains ESTs, STSs, GSSs, genomic marker Dl S491 and a ca repeat polymorphism, complete sequence.//1.3e-06:179:70//AL023754

[15226] R-OVARC1000999//Homo sapiens chromosome 17, clone hCIT.457_L_{—}16, complete sequence.//5.8e-71:332:87//AC003957

[15227] R-OVARC1001000//HS_{—}3032_B1_G11_MF CIT Approved Human Genomic Sperm Library D Homo sapiens genomic clone Plate=3032 Col=21 Row=N, genomic survey sequence.//5.1e-51:257:99//AQ096695

[15228] R-OVARC1001004//Homo sapiens from UWGC:y18c282 from 6p21, complete sequence.//5.6e-92:473:96//AC004190

[15229] R-OVARC1001010//RPCII 1-10P1.TV RPCI-11 Homo sapiens genomic clone RPCI-11-IOP1, genomic survey sequence.//4.1e-05:201:65//B71813

[15230] R-OVARC100111//Homo sapiens clone DJ1021120, WORKING DRAFT SEQUENCE, 6 unordered pieces.//7.9e-18:219:69//AC005520

[15231] R-OVARC1001032//Human DNA sequence *** SEQUENCING IN PROGRESS * from clone Y738F9, WORKING DRAFT SEQUENCE.//2.7e-89:464:86//AL022345

[15232] R-OVARC1001034//Homo sapiens chromosome 20, BAC clone 99 (LBNL H80), complete sequence.//1.4e-18:451:64//AC005220

[15233] R-OVARC1001038//Homo sapiens TRIADI type I mRNA, complete cds.//1.3e-99:501:96//AF099149

[15234] R-OVARC1001040//Homo sapiens chromosome 17, clone hRPK.1096_G_{—}20, complete sequence.//9.7e-17:180:78//AC005410

[15235] R-OVARC1001044

[15236] R-OVARC1001051//H. sapiens mRNA for homologue to yeast ribosomal protein L41 ./3.7e-15:124:88//Z12962

[15237] R-OVARC1100055//Homo sapiens, clone hRPK.15_A_{—}1, complete sequence.//2.0e-30:292:76//AC006213

[15238] R-OVARC1001062//Sequence 65 from patent U.S. Pat. No. 5,691,147.//2.6e-54:312:92//I76237

[15239] R-OVARC1001068//Homo sapiens Era GTPase A protein (HERA-A) mRNA, partial cds.//2.3e-95:463:98//AF082657

[15240] R-OVARC1001072//Gallus gallus chicken brain factor-2 (CBF-2) mRNA, complete cds.//0.92:272:59//U47276

[15241] R-OVARC1001074//HS_{—}2205_A1_D07_MF CIT Approved Human Genomic Sperm Library D Homo sapiens genomic clone Plate=2205 Col=13 Row=G, genomic survey sequence.//1.3e-35:205:94//AQ184530

[15242] R-OVARC1001085

[15243] R-OVARC1001092//Homo sapiens mRNA for JM5 protein, complete CDS (clone IMAGE 53337, LLNLc110F1857Q7 (RZPD Berlin) and LLNLc110GO913Q7 (RZPD Berlin)).//4.5e-95:325:98//AJ005897

[15244] R-OVARC1001113//Homo sapiens diaphanous 1 (HDIA1) mRNA, complete cds.//1.0e-73:386:95//AF051782

[15245] R-OVARC101117//Homo sapiens chromosome 7 clone UWGC:g3586a160 from 7 p14-15, complete sequence.//6.1e-37:314:81//AC005272

[15246] R-OVARC1001118//Homo sapiens chromosome 5, P1 clone 1195e2 (LBNL H73), complete sequence.//1.5e-44:390:77//AC005372

[15247] R-OVARC1001129//Rickettsia prowazekii strain Madrid E, complete genome; segment 1/4.//0.81:461:57//AJ235270

[15248] R-OVARC1001161//Human DNA sequence *** SEQUENCING IN PROGRESS *** from clone 850H21, WORKING DRAFT SEQUENCE.//4.6e-08:342:64//AL031680

[15249] R-OVARC1001162//CIT-HSP-2171J2.TR CIT-HSP Homo sapiens genomic clone 2171J2, genomic survey sequence.//5.9e-48:347:85//B89781

[15250] R-OVARC1001167//Homo sapiens clone DJ1102A12, WORKING DRAFT SEQUENCE, 15 unordered pieces.//1.3e-28:427:70//AC004963

[15251] R-OVARC101169//RPCI11-36P6.TV RPCI-11 Homo sapiens genomic clone RPCI-11-36P6, genomic survey sequence.//0.56:113:72//AQ045859

[15252] R-OVARC1001170//Homo sapiens Xp22 BAC GS-377014 (Genome Systems Human BAC library) complete sequence.//8.8e-39:301:85//AC002549

[15253] R-OVARC1001173//Human clone HS2.30 Alu-Ya5 sequence.//2.4e-35:183:83//U67213

[15254] R-OVARC1001180//Homo sapiens 12q24.1 NOVECTOR P443K80 complete sequence.//9.1e-41:516:72//AC005907

[15255] R-OVARC1001188//Homo sapiens Chromosome 11p14.3 PAC clone pDJ1034g4, complete sequence.//1.2e-14:134:85//AC004796

[15256] R-OVARC1001200//ALS=85 kda insulin-like growth factor binding protein-3 complex acid-labile subunit [baboons, liver, mRNA Partial, 1818 nt].//0.12:345:60//S83462

[15257] R-OVARC1001232//Bovine tyrosine hydroxylase mRNA, complete cds.//0.66:257:59//M36794

[15258] R-OVARC1001240//Homo sapiens chromosome 17, clone hCIT.124_H_{—}2, complete sequence.//1.4e-41:284:87//AC006071

[15259] R-OVARC1001243//HS_{—}2055_B2_C00_MR CIT Approved Human Genomic Sperm Library D Homo sapiens genomic clone Plate=2055 Col=2 Row=F, genomic survey sequence.//0.59:83:75//AQ243142

[15260] R-OVARC1001261//Crocodylus porosus mRNA for transthyretin.//0.93:121:6611AJ223148

[15261] R-OVARC1001268

[15262] R-OVARC1001270//Plasmodium falciparum MAL3P6, complete sequence.//0.0031:295:62//Z98551

[15263] R-OVARC1001271//Homo sapiens chromosome 16, cosmid clone 390H2 (LANL), complete sequence.//1.6e-107:544:97//AC004494

[15264] R-OVARC1001282//Homo sapiens Xp22-39-47 PAC RPCI1-199J3 (Roswell Park Cancer Institute Human PAC Library) complete sequence.//0.025:402:59//AC006062

[15265] R-OVARC1001296//Homo sapiens echinoderm microtubule-associated protein homolog HuEMAP mRNA, complete cds.//1.1e-05:319:62//U97018

[15266] R-nnnnnnnnnnnn/Sequence 13 from patent U.S. Pat. No. 5,624,818.//5.4e-85:577:84//I41142

[15267] R-OVARC1001329//Human DNA sequence *** SEQUENCING IN PROGRESS *** from clone 30G7, WORKING DRAFT SEQUENCE.//4.2e-71:282:88//AL034402

[15268] R-OVARC1001330//Homo sapiens PAC clone DJ0697H17 from 7q11.23-q21.1, complete sequence.//0.19:256:59//AC004862

[15269] R-OVARC1001339//Homo sapiens 12q13 PAC RPCI1-316M24 (Roswell Park Cancer Institute Human PAC library) complete sequence.//2.5e-49:366:83//AC004242

[15270] R-OVARC1001341//Human DNA sequence *** SEQUENCING IN PROGRESS *** from clone 695020, WORKING DRAFT SEQUENCE.//4.8e-26:447:69//AL032818

[15271] R-OVARC1001342//Homo sapiens chromosome 10 clone CIT987SK-1175G20 map 10q25.2-10q25.3, complete sequence.//5.5e-86:569:86//AC005874

[15272] R-OVARC1001344//Homo sapiens chromosome 5, BAC clone 261j17 (LBNL H190), complete sequence.//2.8e-46:424:78//AC005350

[15273] R-OVARC1001357//Sequence 1 from patent U.S. Pat. No. 5,597,707.//3.0e-42:250:93//I34297

[15274] R-OVARC1001360//Homo sapiens chromosome 17, clone hRPK.786_{—}0_{—}4, complete sequence.//0.20:335:60//AC005863

[15275] R-OVARC1001369

[15276] R-OVARC1001372//S. scrofa DNA for myogenin 3′flanking region (285 bp).//6.9e-29:249:83//X89210

[15277] R-OVARC1001376//Homo sapiens BAC clone RG139P 1I from 7q11-q21, complete sequence.//2 .1e-50:491:73//AC004491

[15278] R-OVARC1001381//Homo sapiens chromosome 17, clone hRPK.156_L14, complete sequence.//9.3e-20:422:60//AC005821

[15279] R-OVARC1001391

[15280] R-nnnnnnnnnnnn

[15281] R-OVARC1001417//Homo sapiens EXLM 1 mRNA, complete cds.//9.9e-110:561:95//AB006651

[15282] R-OVARC1001419//CIT-HSP-2362F16.TR CIT-HSP Homo sapiens genomic clone 2362F16, genomic survey sequence.//7.6e-47:242:98//AQ074668

[15283] R-OVARC1001425//Homo sapiens PAC clone DJI108A12 from 14q24.3, complete sequence.//2.3e-20:211:66//AC005157

[15284] R-OVARC1001436//Human DNA flanking 3′ end of transposon L1.1.//0.18:148:66//M80341

[15285] R-OVARC1001442

[15286] R-OVARC1001453//Human PAC clone DJ525N14 from Xq23, complete sequence.//2.3e-19:181:81//AC002086

[15287] R-OVARC1001476//CITBI-E1-2517B6.TR CITBI-E1 Homo sapiens genomic clone 2517B6, genomic survey sequence.//0.24:308:59//AQ278655

[15288] R-OVARC1001480//Human DNA sequence *** SEQUENCING IN PROGRESS *** from clone 753D4, WORKING DRAFT SEQUENCE.//0.99:294:62//AL031676

[15289] R-OVARC1001489//E. caballus microsatellite DNA marker (clone ASB32).//0.87:81:71//X93546

[15290] R-OVARC1001496//Homo sapiens C-terminal binding protein 2 mRNA, complete cds.//9.3e-116:585:96//AF016507

[15291] R-OVARC1001506//Homo sapiens Chromosome 16 BAC clone CIT987-SKA-13F4-complete genomic sequence, complete sequence.//2.6e-40:285:86//AC002039

[15292] R-OVARC1001525//Homo sapiens clone NH0215P16, WORKING DRAFT SEQUENCE, 3 unordered pieces.//1.0:320:59//AC006036

[15293] R-OVARC1100542//Homo sapiens hJTB mRNA, complete cds.//5.0e-110:566:95//AB016488

[15294] R-OVARC1001547

[15295] R-OVARC1001577//Homo sapiens SRp46 splicing factor transcribed retropseudogene.//5.9e-33:216:92//AF031165

[15296] R-OVARC1001600//Human Chromosome X, complete sequence.//3.0e-22:157:89//AC002418

[15297] R-OVARC1001610//HS_{—}3070_A2_A06_MR CIT Approved Human Genomic Sperm Library D Homo sapiens genomic clone Plate=3070 Col=12 Row=A, genomic survey sequence.//0.47:107:66//AQ103523

[15298] R-OVARC1001611//Human DNA sequence *** SEQUENCING IN PROGRESS *** from clone 1185N5, WORKING DRAFT SEQUENCE.//0.17:236:63//AL034423

[15299] R-OVARC1001615//Human DNA sequence *** SEQUENCING IN PROGRESS *** from clone 310013, WORKING DRAFT SEQUENCE.//1.3e-19:248:70//AL031658

[15300] R-OVARC1001668//HS_{—}3228_A2_E12_MR CIT Approved Human Genomic Sperm Library D Homo sapiens genomic clone Plate=3228 Col=24 Row=I, genomic survey sequence.//4.6e-13:156:76//AQ188379

[15301] R-OVARC1001702//CITBI-E1-2501P16.TR.1 CITB1-E1 Homo sapiens genomic clone 2501P16, genomic survey sequence.//1.6e-41:217:99//AQ241965

[15302] R-OVARC1001703

[15303] R-OVARC1001711//CITBI-EI-2502N10.TF CITB1-E1 Homo sapiens genomic clone 2502N10, genomic survey sequence.//2.0e-14:220:72//AQ266194

[15304] R-OVARC1001726//CIT-HSP-232001.TF CIT-HSP Homo sapiens genomic clone 232001, genomic survey sequence.//0.021:170:62//AQ038145

[15305] R-OVARC11001731//Human mRNA for fibroblast tropomyosin TM30 (p1).//2.5e-72:422:90//X05276

[15306] R-OVARC1001745//Human DNA sequence from clone 796111 on chromosome 20q12. Contains ESTs, an STS and GSSs, complete sequence.//7.6e-44:314:84//AL031257

[15307] R-nnnnnnnnnnnn//S. cerevisiae N-acetyltransferase (AAAI) mRNA, complete cds.//1.6e-08:396:60//M23166

[15308] R-OVARC1001766//Homo sapiens eukaryotic translation initiation factor eIF3, p35 subunit mRNA, complete cds.//3.5e-108:567:94//U97670

[15309] R-nnnnnnnnnnnn//Homo sapiens mRNA for KIAA0675 protein, complete cds.//6.3e-108:529:97//AB014575

[15310] R-OVARC1001768//Caenorhabditis elegans cosmid Y57G I IA, complete sequence.//0.24:205:64//Z99279

[15311] R-OVARC11001791//Homo sapiens BAC clone RG118P15 from 8q21, complete sequence.//4.6e-58:558:76//AC005066

[15312] R-OVARC1001795

[15313] R-OVARC1001802//Human HLA class III region containing cAMP response element binding protein-related protein (CREB-RP) and tenascin X (tenascin-X) genes, complete cds, complete sequence.//1.1e-37:346:78//U89337

[15314] R-OVARC1001805//Human DNA sequence from clone 51 IE16 on chromosome 6p24.3-25.1. Contains the last coding exon of the gene for P18 component of aminoacyl-tRNA synthetase complex, part of an unknown gene downstream of a putative CpG island, and an STS with a CA repeat polymorphism, complete sequence.//3.0e-112:581:95//AL023694

[15315] R-OVARC1001812//Human DNA sequence from clone 227L5 on chromosome Xp11.22-11.3. Contains a Keratin, Type I Cytoskeletal 18 (KRT18, CYK18, K18, CK18) pseudogene and an STS, complete sequence.//6.6e-41:345:81//AL031585

[15316] R-OVARC1001813//CITBI-E 1-2508J 18.TR CITBI-E 1 Homo sapiens genomic clone 2508J 18, genomic survey sequence.//1.6e-72:386:95//AQ263046

[15317] R-OVARC1001820//Human PAC clone DJ525NI4 from Xq23, complete sequence.//4.8e-41:320:83//AC002086

[15318] R-OVARC1001828//Plasmodium falciparum 3D7 chromosome 12 PFYAC69 genomic sequence, WORKING DRAFT SEQUENCE, 4 unordered pieces.//3.4e-08:527:58//AC004688

[15319] R-OVARC1001846//CIT-HSP-2014F15.TR CIT-HSP Homo sapiens genomic clone 2014F15, genomic survey sequence.//0.0045:165:67//B58905

[15320] R-OVARC1001861//M. musculus mRNA for pMEM2 protein.//9.5e-28:405:68//X95350

[15321] R-OVARC1001873//Homo sapiens clones 24718 and 24825 mRNA sequence.//5.9e-104:571:91//AF070611

[15322] R-OVARC1001879//Human DNA sequence from clone 612B18 on chromosome 1q24-25.3 Contains exon from gene similar to 40S ribosomal protein, first coding exon of dynamin 2 (DYNII). ESTs, STS, GSS, CpG Island, complete sequence.//9.1e-20:206:80//AL031864

[15323] R-OVARC1001880//RPCII 1-42115.TJ RPCII 1 Homo sapiens genomic clone R-42115, genomic survey sequence.//3.9e-50:287:88//AQ052700

[15324] R-OVARC1001883//Homo sapiens chromosome 17, clone hCIT.123_J_{—}14, complete sequence.//6.1e-13:457:63//AC003950

[15325] R-OVARC1100900//Homo sapiens tumorous imaginal discs protein Tid56 homolog (TIDI) mRNA, complete cds.//2.5e-86:346:90//AF061749

[15326] R-OVARC1001901//Homo sapiens testis specific methyl-CpG binding protein MBD2 (MBD2) mRNA, partial cds.//7.2e-89:421:100//AF072246

[15327] R-OVARC1001911//Homo sapiens full-length insert cDNA clone ZD52F10.//8.2e-106:510:98//AF086315

[15328] R-OVARC1001916

[15329] R-OVARC1001928

[15330] R-OVARC1001942//S. cerevisiae N-acetyltransferase (AAAI) mRNA, complete cds.//0.0013:231:63/IM23166

[15331] R-OVARC1001943//Human immunodeficiency virus type 1, strain FRMP329, envelope glycoprotein V3 region (env) gene, partial cds.//0.14:173:64//U58826

[15332] R-OVARC1001949//Human zinc finger protein 20 (ZNF20) pentanucleotide repeat polymorphism.//1.3e-09:306:63//M99593

[15333] R-OVARC1001950//Homo sapiens chromosome 17, clone hRPK.112_H_{—}10, complete sequence.//8.2e-38:385:75//AC005666

[15334] R-OVARC1001987

[15335] R-OVARC1001989//Caenorhabditis elegans DNA *** SEQUENCING IN PROGRESS *** from clone Y57GI 1, WORKING DRAFT SEQUENCE.//6.3e-08:355:60//Z92841

[15336] R-OVARC1002044//Human DNA sequence from clone 681 J21 on chromosome 1q23.2-24.3 Contains CpG island, complete sequence.//5.0e-42:298:86//AL031286

[15337] R-OVARC1002050//Homo sapiens mRNA for KIAA0465 protein, partial cds.//1.4e-107:542:96//AB007934

[15338] R-OVARC1002066//Arabidopsis thaliana chromosome II BAC F14M4 genomic sequence, complete sequence.//0.23:210:61//AC004411

[15339] R-OVARC1002082//Homo sapiens clone DJ0965K10, WORKING DRAFT SEQUENCE, 6 unordered pieces.//5.4e-99:546:92//AC006015

[15340] R-OVARC1002107//Human DNA sequence from PAC 417G 15 on chromosome Xq25-Xq26. Contains glypican-3 precursor (intestinal protein OCI-5) (GTR2-2), pseudogene, ESTs.//4.4e-34:375:74//AL009174

[15341] R-OVARC1002127

[15342] R-OVARC1002138//CIT-HSP-2290018.TF CIT-HSP Homo sapiens genomic clone 2290018, genomic survey sequence.//2.4e-07:316:62//AQ003988

[15343] R-OVARC1002143//RPCI11-54M8.TJ RPCII 1 Homo sapiens genomic clone R-54M8, genomic survey sequence.//2.3e-35:220:90//AQ083241

[15344] R-OVARC1002156

[15345] R-OVARC1002158//CITBI-EI-2514D4.TF CITBI-EL Homo sapiens genomic clone 2514D4, genomic survey sequence.//1.6e-12:140:79//AQ265720

[15346] R-OVARC1002165//CIT-HSP-2307C9.TF CIT-HSP Homo sapiens genomic clone 2307C9, genomic survey sequence.//5.0e-59:291:99//AQ020420

[15347] R-OVARC1002182//P. falciparum SD17 gene for knob-associated histidine-rich protein.//0.74:161:65//Y00060

[15348] R-PLACE1000004//D. discoideum gene for protein kinase.//0.00081:263:59//Z37981

[15349] R-PLACE1000005//Plasmodium falciparum 3D7 chromosome 12 PFYACB8-628 genomic sequence, WORKING DRAFT SEQUENCE, 9 unordered pieces.//0.0082:477:58//AC005507

[15350] R-PLACE1000007//Homo sapiens clone 24422 mRNA sequence.//1.2e-14:100:97//AF070557

[15351] R-PLACE1000014//Homo sapiens genomic DNA, chromosome 21q22.2, p1 clone: T1212 and T1601, WORKING DRAFT SEQUENCE.//2.8e-44:405:77//D83253

[15352] R-PLACE1000031//Homo sapiens clone UWGC:y23cO49 from 6p21, complete sequence.//1.8e-24:291:73//AC006162

[15353] R-PLACE1000040//Caenorhabditis elegans DNA *** SEQUENCING IN PROGRESS *** from clone Y105C5, WORKING DRAFT SEQUENCE.//0.00039:289:61//Z98855

[15354] R-PLACE1000048//Human BAC clone RG210104, complete sequence.//4.7e-83:518:89//AC002462

[15355] R-PLACE1000050//Plasmodium falciparum 3D7 chromosome 12 PFYAC 181 genomic sequence, WORKING DRAFT SEQUENCE, 8 unordered pieces.//0.98:73:76//AC005505

[15356] R-PLACE1000061//Human ribosomal protein L37a mRNA sequence.//5.9e-21:125:98//L22154

[15357] R-PLACE1000066

[15358] R-PLACE1000078//Homo sapiens chromosome 11 clone CIT987SK-1012F4, WORKING DRAFT SEQUENCE, 6 unordered pieces.//1.2e-87:456:95//AC005848

[15359] R-PLACE1000081

[15360] R-PLACE1000094//RPCI 11-91K6.TV RPCII 1 Homo sapiens genomic clone R-91K6, genomic survey sequence.//2.3e-83:409:98//AQ282619

[15361] R-PLACE1000133//Homo sapiens chromosome 17, clone hRPK.746_E_{—}8, complete sequence.//1.8e-06:420:57//AC005358

[15362] R-PLACE1000142

[15363] R-PLACE1000184//Homo sapiens estrogen-related receptor gamma mRNA, complete cds.//1.3e-112:594:94//AF058291

[15364] R-PLACE1000185

[15365] R-PLACE1000213I/CIT-HSP-2308A18.TR CIT-HSP Homo sapiens genomic clone 2308A18, genomic survey sequence.//8.2e-80:410:97//AQ022149

[15366] R-PLACE1000214//Plasmodium falciparum DNA *** SEQUENCING IN PROGRESS * from contig 3-09, complete sequence.//1.6e-05:548:59//AL008989

[15367] R-PLACE1000236//Human DNA sequence *** SEQUENCING IN PROGRESS * from clone 695020, WORKING DRAFT SEQUENCE.//2.2e-16:118:91//AL032818

[15368] R-PLACE1000246//X. laevis mRNA for XLCL2 protein.//6.5e-13:66:95//Z 14122

[15369] R-PLACE1000292//Human DNA sequence *** SEQUENCING IN PROGRESS *** from clone 111 B22, WORKING DRAFT SEQUENCE.//6.6e-41:322:84//Z98200

[15370] R-PLACE1000332//Homo sapiens chromosome 17, clone hCIT.281_F_{—}24, complete sequence.//1.8e-16:598:62//AC004706

[15371] R-PLACE1000347//Homo sapiens PAC clone DJ 1090P 18 from 7q21-q22, complete sequence.//2.3e-11:237:69//AC005326

[15372] R-PLACE1000374//Arabidopsis thaliana chromosome 1 BAC Fl 5K9 sequence, complete sequence.//8.7e-09:492:58//AC005278

[15373] R-PLACE1000380//Plasmodium falciparum chromosome 2, section 1 of 73 of the complete sequence.//0.59:354:59//AE001364

[15374] R-PLACE1000383//Mus musculus myotubularin related protein 1 (Mtmr1) mRNA, complete cds.//0.55:65:84//AF073997

[15375] R-PLACE1000401//Homo sapiens clone GS166C05, WORKING DRAFT SEQUENCE, 7 unordered pieces.//3.6e-17:152:83//AC005015

[15376] R-PLACE1000406//Arabidopsis thaliana genomic DNA, chromosome 5, TAC clone: K21H1, complete sequence.//0.51:346:58//AB020742

[15377] R-PLACE1000420//Homo sapiens genomic DNA, chromosome 21q22.2 (Down Syndrome region), segment 2/15, WORKING DRAFT SEQUENCE.//1.5e-25:243:79//AP000009

[15378] R-PLACE1000421//HS_{—}2251_B2_G12_MR CIT Approved Human Genomic Sperm Library D Homo sapiens genomic clone Plate=2251 Col=24 Row=N, genomic survey sequence.//1.4e-82:430:95//AQ192807

[15379] R-PLACE1000424//Human PAC clone DJ515NI from 22q11.2-q22, complete sequence.//1.8e-36:483:71/HAC002073

[15380] R-PLACE1000435//Homo sapiens chromosome 21q22.2 cosmid clone Q71A3, complete sequence.//2.6e-37:371:76//AF015724

[15381] R-PLACE1000444//Homo sapiens chromosome 17, clone hRPK.227_G_{—}15, complete sequence.//1.0e-54:429:81//AC005899

[15382] R-PLACE1000453//Murine genomic DNA; partially digested Sau3A fragment, cloned into cosmid vector pEMBLcos2, complete sequence.//0.66:103:72//AF059580

[15383] R-PLACE1000481//Human DNA sequence from clone 960017 on chromosome Xp11.21-11.22 Contains EST, CA repeat(DXS991), STS, GSS, complete sequence.//0.019:171:66//AL022166

[15384] R-PLACE1000492//Rat vacuolar protein sorting homolog r-vps33b mRNA, complete cds.//3.2e-17:221:72//U35245

[15385] R-PLACE1000540//Plasmodium falciparum 3D7 chromosome 12 PFYAC492 genomic sequence, WORKING DRAFT SEQUENCE, 5 unordered pieces.//0.00045:480:60//AC005308

[15386] R-PLACE1000547//Homo sapiens chromosome 19, cosmid F17987, complete sequence.//9.6e-32:231:85//AC004790

[15387] R-PLACE1000562//, complete sequence.//1.8e-45:280:92//AC005409

[15388] R-PLACE1000564//Human chromosome 16 creatine transporter (SLC6A8) and (CDM) paralogous genes, complete cds.//0.0079:180:65//U41302

[15389] R-PLACE1000583//Homo sapiens chromosome 17, clone hRPK.799_N_{—}1, complete sequence.//1.5e-37:414:74//AC005323

[15390] R-nnnnnnnnnnnn/Human guanylate binding protein isoform I (GBP-2) mRNA, complete cds.//1.9e-77:542:82//M55542

[15391] R-PLACE1000596//Plasmodium falciparum 3D7 chromosome 12 PFYAC357 genomic sequence, WORKING DRAFT SEQUENCE, 7 unordered pieces.//0.00019:482:59//AC005506

[15392] R-PLACE1000599//Human germline T-cell receptor beta chain Dopamine-beta-hydroxylase-like, TRY1, TRY2, TRY3, TCRBV27S1P, TCRBV22SIA2NIT, TCRBV9SIA1T, TCRBV7SIA1N2T, TCRBV5SIA1T, TCRBV13S3, TCRBV6S7P, TCRBV7S3A2T, TCRBV13S2A1T, TCRBV9S2A2PT, TCRBV7S2A1N4T, TCRBV 13S9/13S2A1 T, TCRBV6S5A1N1, TCRBV30S1P, TCRBV31S1, TCRBV13S5, TCRBV6SIA1N1, TCRBV32S1P, TCRBV5S5P, TCRBV1SIA1N1, TCRBV12S2AIT, TCRBV21S1, TCRBV8S4P, TCRBV12S3, TCRBV21S3A2N2T, TCRBV8S5P, TCRBV13S1 genes from bases 1 to 267156 (section 1 of 3).//5.6e-51:369:85//U66059

[15393] R-PLACE1000610//HS_{—}3071_A1_C05_MF CIT Approved Human Genomic Sperm Library D Homo sapiens genomic clone Plate=3071 Col=9 Row=E, genomic survey sequence.//0.051:147:65//AQ103341

[15394] R-PLACE1000636//HS_{—}3220_B2_E09_T7 CIT Approved Human Genomic Sperm Library D Homo sapiens genomic clone Plate=3220 Col=18 Row=J, genomic survey sequence.//0.010:253:64//AQ181157

[15395] R-PLACE1000653//Homo sapiens N-acetylglucosamine-phosphate mutase mRNA, complete cds.//1.6e-99:506:96//AF102265

[15396] R-PLACE1000656//Homo sapiens mRNA for JM4 protein, complete CDS (clone IMAGE 546750 and LLNLc110F1857Q7 (RZPD Berlin)).//4.5e-101:559:92//AJ005896

[15397] R-PLACE1000706//nuclear protein TIF1 [mice, mRNA, 3951 nt].//9.1e-10:331:63//S78219

[15398] R-PLACE1000712//Homo sapiens full-length insert cDNA clone ZD76G10.//1.0e-69:345:98//AF086408

[15399] R-PLACE1000716//Homo sapiens Chromosome 16 BAC clone CIT987SK-A-279B10, complete sequence.//1.0:174:62//AC002300

[15400] R-PLACE1000748//Plasmodium falciparum MAL3P3, complete sequence.//1.0e-06:337:60//Z98547

[15401] R-PLACE1000749//cSRL-15g9-u cSRL flow sorted Chromosome 11 specific cosmid Homo sapiens genomic clone cSRL-15g9, genomic survey sequence.//8.8e-26:236:80//B02791

[15402] R-PLACE1000755//HS_{—}2183_B1_H1_MF CIT Approved Human Genomic Sperm Library D Homo sapiens genomic clone Plate=2183 Col=21 Row=P, genomic survey sequence.//0.47:151:65//AQ064202

[15403] R-PLACE1000769//Homo sapiens clone DJ0647J21, WORKING DRAFT SEQUENCE, 10 unordered pieces.//7.0e-38:492:74//AC004847

[15404] R-PLACE1000785//Homo sapiens mRNA for KIAA0648 protein, partial cds.//2.6e-101:513:96//AB014548

[15405] R-PLACE1000786//Human putative outer mitochondrial membrane 34 kDa translocase hTOM34 mRNA, complete cds.//0.078:180:68//U58970

[15406] R-PLACE1000798//Homo sapiens cosmid D66B10, chromosome 215′ of IFNAR1.//5.1e-26:348:72//AF039904

[15407] R-PLACE1000841//Human guanine nucleotide regulatory protein (NET1) mRNA, complete cds.//1.4e-26:110:95//U02081

[15408] R-nnnnnnnnnnnn//Homo sapiens full-length insert cDNA clone ZD55D10.//1.4e-13:93:96//AF086334

[15409] R-PLACE1000856//Anopheles quadrimaculatus NADH dehydrogenase subunits (1-4, 4L, 5-6); cytochrome oxidase subunits (1-3); adenosine triphosphatase subunits (6,8); cytochrome b; transfer RNA; ribosomal RNA (large and small subunits).//2.7e-09:484:59//L04272

[15410] R-PLACE1000863

[15411] R-PLACE1000909//Plasmodium falciparum 3D7 chromosome 12 PFYAC181 genomic sequence, WORKING DRAFT SEQUENCE, 8 unordered pieces.//3.0e-05:274:60//AC005505

[15412] R-PLACE1000931//RPCII 1-66P7.TK RPCII 1 Homo sapiens genomic clone R-66P7, genomic survey sequence.//3.4e-73:369:97//AQ237489

[15413] R-PLACE1000948//RPCII 1-64K15.TK RPCII 1 Homo sapiens genomic clone R-64K15, genomic survey sequence.//6.6e-06:258:6211AQ239337

[15414] R-PLACE1000972//Homo sapiens chromosome 17, clone hRPK.112_J_{—}9, complete sequence.//8.3e-20:223:76//AC005553

[15415] R-PLACE1000977//Plasmodium falciparum 3D7 chromosome 12 PFYAC357 genomic sequence, WORKING DRAFT SEQUENCE, 7 unordered pieces.//0.00030:448:59//AC005506

[15416] R-PLACE1000979

[15417] R-PLACE1100000//CIT-HSP-229718.TF CIT-HSP Homo sapiens genomic clone 229718, genomic survey sequence.//7.0e-07:64:95//AQ004997

[15418] R-PLACE1001007//Human endothelial nitric oxide synthase gene, complete cds.//0.0078:215:64//D26607

[15419] R-PLACE1001010

[15420] R-PLACE1001015//Human DNA sequence *** SEQUENCING IN PROGRESS *** from clone 150C2, WORKING DRAFT SEQUENCE.//1.5e-16:452:63//AL022318

[15421] R-PLACE1001024//Human DNA sequence *** SEQUENCING IN PROGRESS * from clone 417M14, WORKING DRAFT SEQUENCE.//0.99:186:63//AL024498

[15422] R-PLACE1001036//Homo sapiens clone DJI136G02, WORKING DRAFT SEQUENCE, 4 unordered pieces.//2.5e-15:313:68//AC005377

[15423] R-PLACE1001062//Homo sapiens chromosome 17, clone hCIT54KI9, complete sequence.//7.3e-16:119:84//AC003664

[15424] R-PLACE1001076

[15425] R-PLACE1001088//Human DNA sequence from cosmid 203C2, between markers DXS6791 and DXS8038 on chromosome X contains ESTs.//0.97:332:59//Z74696

[15426] R-PLACE1001092//Plasmodium falciparum 3D7 chromosome 12 PFYAC336 genomic sequence, WORKING DRAFT SEQUENCE, 5 unordered pieces.//6.2e-07:302:62//AC005139

[15427] R-PLACE1001104//Plasmodium falciparum chromosome 2, section 9 of 73 of the complete sequence.//0.057:280:60//AE001372

[15428] R-PLACE1001118//Homo sapiens DNA sequence from PAC 418A9 on chromosome 6q21. Contains the first (5′) two exons of a CDK8 (Cell Division Protein Kinase 8) LIKE gene, a Neutral Calponin LIKE pseudogene, ESTs and STSs, complete sequence.//4.9e-06:334:60//Z84480

[15429] R-PLACE100136//Homo sapiens chromosome 17, clone hRPK.22_N_{—}12, WORKING DRAFT SEQUENCE, 2 ordered pieces.//1.1e-31:331:75//AC005412

[15430] R-PLACE1001168//HSS_{—}2036_A1_H04_MR CIT Approved Human Genomic Sperm Library D Homo sapiens genomic clone Plate=2036 Col=7 Row=O, genomic survey sequence.//0.40:144:6311AQ230662

[15431] R-PLACE1001171

[15432] R-PLACE1001185

[15433] R-PLACE1001238//Human coxyIb gene, last exon and flanking sequence.//3.4e-36:349:76//X58139

[15434] R-PLACE1001241//Plasmodium falciparum DNA *** SEQUENCING IN PROGRESS * from contig 3-20, complete sequence.//0.11:258:61//AL008972

[15435] R-PLACE1001257//*** SEQUENCING IN PROGRESS *** Homo sapiens chromosome 4, BAC clone B4P3; HTGS phase 1, WORKING DRAFT SEQUENCE, 9 unordered pieces.//1.9e-46:484:73//AC000016

[15436] R-PLACE1001272//Homo sapiens chromosome 21q22.3 PAC 191P10, complete sequence.//0.89:119:65//AF045448

[15437] R-PLACE1001279//Caenorhabditis elegans cosmid Y39AIC, complete sequence.//0.99:95:69//AL023839

[15438] R-PLACE1001280//CIT-HSP-2328B24.TF CIT-HSP Homo sapiens genomic clone 2328B24, genomic survey sequence.//5.4e-24:147:76//AQ042129

[15439] R-PLACE1001294//M. musculus GEG-154 mRNA.//1.3e-22:472:65//X71642

[15440] R-PLACE1001304//Homo sapiens chromosome 19, overlapping cosmids F18547, Fl 1133, R27945, R28830 and R32804, complete sequence.//2.2e-22:139:77//AC003682

[15441] R-PLACE1001311//Loligo pealei repeat region.//0.84:232:64//Z18286

[15442] R-PLACE1001323//Homo sapiens DNA sequence from PAC 418A9 on chromosome 6q21. Contains the first (5′) two exons of a CDK8 (Cell Division Protein Kinase 8) LIKE gene, a Neutral Calponin LIKE pseudogene, ESTs and STSs, complete sequence.//7.2e-39:308:83//Z84480

[15443] R-PLACE1001351//Caenorhabditis elegans DNA *** SEQUENCING IN PROGRESS *** from clone Y39B6, WORKING DRAFT SEQUENCE.//0.0018:408:59//Z95399

[15444] R-PLACE100366//Human Na+/phosphate co-transporter gene, exon 1, partial sequence.//2.2e-46:369:821/D89927

[15445] R-PLACE1001377//Homo sapiens ADAM 10 (ADAM 10) mRNA, complete cds.//7.1e-80:431:93//AF009615

[15446] R-PLACE1001383//Homo sapiens clone 24538 mRNA sequence.//3.6e-35:192:97//AF055030

[15447] R-PLACE1001384//Homo sapiens mRNA for multi PDZ domain protein.//2.6e-86:456:94//AJ001319

[15448] R-PLACE1001387

[15449] R-PLACE1001395//Nyctalus leisleri mitochondrial D-loop, partial sequence.//0.054:148:68//U95355

[15450] R-PLACE1001399//Homo sapiens chromosome 17, clone hRPK.22_N_{—}12, WORKING DRAFT SEQUENCE, 2 ordered pieces.//6.7e-70:352:98//AC005412

[15451] R-PLACE1001412//Homo sapiens clone 643 unknown mRNA, complete sequence.//8.0e-44:242:95//AF091087

[15452] R-PLACE1001414//Homo sapiens chromosome 9, clone hRPK.202_H_{—}3, complete sequence.//0.12:53:84//AC006241

[15453] R-PLACE1001440//Homo sapiens Xq28 genomic DNA in the region of the ALD locus containing the genes for creatine transporter (SLC6A8), CDM, adrenoleukodystrophy (ALD), Na+-isocitrate dehydrogenase gamma subunit (IDH), and translocon-associated protein delta (TRAP) genes, complete cds, plexin related protein (PLEXR) and serine kinase (SK) genes, partial cds, Xq281 ul gene and cytochrome C (CCp) pseudogene.//1.0:250:61//U52111

[15454] R-PLACE1001456//Borrelia burgdorferi (section 16 of 70) of the complete genome.//0.0077:173:62//AE001130

[15455] R-PLACE1001468//HS_{—}3050_A2_D07_MR CIT Approved Human Genomic Sperm Library D Homo sapiens genomic clone Plate=3050 Col=14 Row=G, genomic survey sequence.//0.00023:202:65//AQ133920

[15456] R-PLACE1001484//Homo sapiens Xq28 BAC PAC and cosmid clones containing FMR2 gene exons 1,2, and 3, complete sequence.//7.2e-17:180:80//AC002368

[15457] R-PLACE1001502//RPCII 1-24F2.TP RPCI-11 Homo sapiens genomic clone RPCI-11-24F2, genomic survey sequence.//0.15:203:66//B84401

[15458] R-PLACE1001503//HS_{—}2183_A1_B10_MR CIT Approved Human Genomic Sperm Library D Homo sapiens genomic clone Plate=2183 Col=19 Row=C, genomic survey sequence.//1.3e-38:181:82//AQ022613

[15459] R-PLACE1001517//Homo sapiens hGAA1 mRNA, complete cds.//6.4e-56:339:90//AB006969

[15460] R-PLACE1001534//Human DNA sequence *** SEQUENCING IN PROGRESS *** from clone 620E 1, WORKING DRAFT SEQUENCE.//8.6e-59:304:97//AL031667

[15461] R-PLACE1001545//Homo sapiens chromosome 3, clone hRPK.165_I_{—}16, complete sequence.//2.6e-18:171:82//AC005669

[15462] R-PLACE1001551

[15463] R-PLACE1001570//M. capricolum DNA for CONTIG MC 188.//0.0043:305:57//Z33135

[15464] R-PLACE1001602//Homo sapiens genomic DNA of 8p21.3-p22 anti-oncogene of hepatocellular colorectal and non-small cell lung cancer, segment 3/11 .//2.5e-82:408:98//AB020860

[15465] R-PLACE1001603//Homo sapiens KE05 protein mRNA, complete cds.//1.5e-40:295:84//AF064605

[15466] R-PLACE1001610//Homo sapiens clone NH0469M07, WORKING DRAFT SEQUENCE, 7 unordered pieces.//2.5e-39:307:82//AC005037

[15467] R-PLACE1001611//Homo sapiens histone macroH2A1.2 mRNA, complete cds.//4.9e-41:217:97//AF054174

[15468] R-PLACE1001632//Human DNA binding protein (HPF2) mRNA, complete cds.//1.4e-08:178:65//M27878

[15469] R-PLACE1001634//Caenorhabditis elegans DNA *** SEQUENCING IN PROGRESS * from clone H06C16, WORKING DRAFT SEQUENCE.//0.00026:221:62//Z92791

[15470] R-PLACE1100640//Homo sapiens chromosome 17, clone hRPK.651_L_{—}9, complete sequence.//2.6e-83:441:95//AC005971

[15471] R-PLACE1001672//H. sapiens flow-sorted chromosome 6 TaqI fragment, SC6pA26H8.//0.91:115:69//Z79253

[15472] R-PLACE1001691//Homo sapiens okadaic acid-inducible phosphoprotein (OA48-18) mRNA, complete cds.//1.5e-111:545:97//AF069250

[15473] R-PLACE1001692//Homo sapiens clone RG228D17, WORKING DRAFT SEQUENCE, 2 unordered pieces.//1.0e-46:478:75//AC005077

[15474] R-PLACE1001705//Human DNA sequence *** SEQUENCING IN PROGRESS *** from clone 250D10, WORKING DRAFT SEQUENCE.//0.79:91:73//Z99716

[15475] R-PLACE1001716//Homo sapiens Xp22 PAC RPCI1-167A22 (from Roswell Park Cancer Center) complete sequence.//0.96:172:66//AC002349

[15476] R-PLACE1001720

[15477] R-PLACE1001729//Human interleukin-13 (IL-13) precursor gene, complete cds.//0.79:280:60//U31120

[15478] R-PLACE1001739//Homo sapiens chromosome 19, CIT-HSP-444n24, complete sequence.//1.0:109:65//AC005261

[15479] R-PLACE1001740//Homo sapiens BAC clone GS114109 from 7 p14-p15, complete sequence.//5.3e-11:249:67//AC006027

[15480] R-PLACE1001745

[15481] R-PLACE1001746//Homo sapiens chromosome 4 clone B200N5 map 4q25, complete sequence.//6.0e-05:337:61//AC005509

[15482] R-PLACE1001748//Homo sapiens metalloprotease I (MPI) mRNA, complete cds.//1.3e-91:540:89//AF061243

[15483] R-PLACE1001756//Human BAC clone RG302F04 from 7q31, complete sequence.//0.074:344:62//AC002463

[15484] R-PLACE1001761

[15485] R-PLACE1001771//Homo sapiens full-length insert cDNA clone ZD79CII.//4.4e-57:298:96//AF086426

[15486] R-PLACE1001781//T. thermophila micronuclear DNA containing to chromosomal breakage sequence Cbs-1, clone Tt819.//4.6e-05:282:61//M15711

[15487] R-PLACE1001799//Plasmodium falciparum 3D7 chromosome 12 PFYAC588 genomic sequence, WORKING DRAFT SEQUENCE, 2 unordered pieces.//0.015:331:58//AC004710

[15488] R-PLACE1001817//Homo sapiens ATP-specific succinyl-CoA synthetase beta subunit (SCS) mRNA, partial cds.//4.1e-92:463:95//AF058953

[15489] R-PLACE1001821//* * *ALU WARNING: Human Alu-J subfamily consensus sequence.//3.6e-36:281:82//U14567

[15490] R-PLACE1001845//Mus musculus Paneth cell enhanced expression PCEE mRNA, complete cds.//9.1e-26:313:73//U37351

[15491] R-PLACE1001869

[15492] R-PLACE1001897//Mus musculus homeobox protein (Dlx5) mRNA, complete cds.//0.0043:207:64//AF033011

[15493] R-PLACE1001912//RPCII 1-25F23.TKBR RPCI-11 Homo sapiens genomic clone RPCI-11-25F23, genomic survey sequence.//6.3e-33:248:67//AQ013567

[15494] R-PLACE1001920//Homo sapiens TNF-induced protein GG2-1 mRNA, complete cds.//5.0e-73:363:98//AF070671

[15495] R-PLACE1001928//Homo sapiens chromosome 17, clone hRPK.642_C_{—}21, complete sequence.//0.98:248:60//AC005245

[15496] R-PLACE1001983//Caenorhabditis elegans DNA *** SEQUENCING IN PROGRESS *** from clone Y40H7, WORKING DRAFT SEQUENCE.//0.12:157:61//AL021389

[15497] R-PLACE1001989//Human DNA sequence *** SEQUENCING IN PROGRESS *** from clone 968D22, WORKING DRAFT SEQUENCE.//1.4e-44:376:80//AL023755

[15498] R-PLACE1002046//CITBI-E1-2520J24.TF CITB1-E1 Homo sapiens genomic clone 2520J24, genomic survey sequence.//4.5e-20:144:89//AQ280117

[15499] R-PLACE1002052//Human DNA sequence from cosmid U160A4, between markers DXS366 and DXS87 on chromosome X contains STS.//0.025:362:57//Z80900

[15500] R-PLACE1002066//Leishmania tarentolae maxicircle DNA fragment.//0.0034:197:62//X02438

[15501] R-PLACE1002072//Homo sapiens chromosome 5, P1 clone 854b 1I (LBNL H44), complete sequence.//9.7e-06:414:60//AC004763

[15502] R-PLACE1002073

[15503] R-PLACE1002090//Homo sapiens Chromosome 16 BAC clone CIT987-SKA-345G4-complete genomic sequence, complete sequence.//1.8e-06:278:63//AC002302

[15504] R-PLACE1002115//Human DNA sequence *** SEQUENCING IN PROGRESS *** from clone Y214H10, WORKING DRAFT SEQUENCE.//6.0e-12:327:64//AL022344

[15505] R-PLACE1002119//Mus musculus IER5 (lerS) mRNA, complete cds.//5.1e-67:442:86//AF079527

[15506] R-PLACE1002140//Homo sapiens DNA sequence from PAC 454M7 on chromosome Xq25-26.3. Contains the OCRL1 gene for Lowe Oculocerebrorenal Syndrome protein OCRL-1. Contains ESTs, STSs and GSSs, complete sequence.//2.2e-80:403:97//AL022162

[15507] R-PLACE1002150//Human DNA sequence from PAC 145B12 on chromosome Xq27-Xq28. Contains EST, CA repeat and STS.//0.043:455:59//AL008706

[15508] R-PLACE1002157//Human DNA sequence from Fosmid 65B7 on chromosome 22q11.2-qter. Contains exons 6-12 of the SLC5A1 (SGLT1) gene for solute carrier family 5 (sodium/glucose cotransporter) member 1 (High Affinity Sodium-Glucose Cotransporter), complete sequence.//9.8e-58:384:79//Z83849

[15509] R-PLACE1002163//Canis familiaris MHC class IIA DLA-DQA (DQA I allele) gene, exon 2, partial cds.//0.82:96:70//U44785

[15510] R-PLACE1002171//Homo sapiens PAC clone DJI100F23 from 7q31, complete sequence.//0.83:196:65//AC004456

[15511] R-PLACE1002205//Human DNA sequence from PAC 436Ml I on chromosome Xp22.11-22.2. Contains the serine threonine protein phosphatase gene PPEF1, and the first coding exon of the RS1 gene for retinoschisis (X-linked, juvenile) 1 (XLRS1). Contains ESTs, an STS and GSSs, complete sequence.//0.0017:193:61//Z94056

[15512] R-PLACE1002213//Homo sapiens chromosome 19, fosmid 37308, complete sequence.//8.0e-42:330:81//AC004152

[15513] R-PLACE1002227//Homo sapiens BAC clone BKO85EO5 from 22q12.1-qter, complete sequence.//2.1e-10:126:80//AC003071

[15514] R-PLACE1002256//Homo sapiens clone DJ0853H20, WORKING DRAFT SEQUENCE, 5 unordered pieces.//2.7e-06:478:57//AC004907

[15515] R-PLACE1002259//Human DNA sequence from cosmid U75A4 on chromosome X.//6.5e-81:501:88//Z82255

[15516] R-PLACE1002319//Plasmodium falciparum 3D7 chromosome 12 PFYAC181 genomic sequence, WORKING DRAFT SEQUENCE, 8 unordered pieces.//0.00023:549:58//AC005505

[15517] R-PLACE1002342//Homo sapiens mRNA for KIAA0728 protein, partial cds.//4.9e-94:501:93//AB018271

[15518] R-PLACE1002395//Homo sapiens chromosome 19, cosmid R34382, complete sequence.//1.4e-69:385:93//AC005329

[15519] R-PLACE1002399//Human HepG2 3′ region cDNA, clone hmdSdO6.//2.4e-71:411:92//D16939

[15520] R-PLACE1002433//Human DNA sequence *** SEQUENCING IN PROGRESS *** from clone 173D1, WORKING DRAFT SEQUENCE.//0.85:176:63//AL031984

[15521] R-PLACE1002437//Human BAC clone RG114A06 from 7q31, complete sequence.//0.0040:213:63//AC002542

[15522] R-PLACE1002438//CITBI-El-2501M20.TF.1 CITBI-El Homo sapiens genomic clone 2501M20, genomic survey sequence.//0.70:247:61//AQ242104

[15523] R-PLACE1002450//Homo sapiens 959 kb contig between AML1 and CBR1 on chromosome 21q22; segment 1/3.//0.00060:471:59//AJ229041

[15524] R-PLACE1002465//Homo sapiens clone DJ0673M15, WORKING DRAFT SEQUENCE, 33 unordered pieces.//2.5e-10:98:81//AC004854

[15525] R-PLACE1002474//Mus musculus matrilin-2 precursor mRNA, complete cds.//1.7e-25:199:71//U69262

[15526] R-PLACE1002477//Human DNA sequence from PAC 50AI3 on chromosome Xp11. Contains ATP SYNTHASE LIPID BINDING PROTEIN P1 (P2, P3) precursor (ATP5G1, ATP5G2, ATPSG3) like pseudogene, ESTs and STSs. Contains polymorphic CA repeat.//1.2e-11:382:63//Z92545

[15527] R-PLACE1002493//Homo sapiens signal transducing adaptor molecule 2A (STAM2) mRNA, complete cds.//1.1e-53:307:91//AF042273

[15528] R-PLACE1002499//Plasmodium falciparum MAL3P6, complete sequence.//0.56:270:60//Z98551

[15529] R-PLACE1002500//CIT-HSP-2337C20.TR CIT-HSP Homo sapiens genomic clone 2337C20, genomic survey sequence.//3.2e-42:297:85//AQ037614

[15530] R-PLACE1002514//Human DNA sequence *** SEQUENCING IN PROGRESS *** from clone 212A2, WORKING DRAFT SEQUENCE.//7.8e-16:221:73//Z95114

[15531] R-PLACE1002529//Homo sapiens mRNA for KIAA0713 protein, partial cds.//1.6e-86:582:85//AB018256

[15532] R-PLACE1002532//Homo sapiens BAC clone RG300E22 from 7q21-q31.1, complete sequence.//9.0e-91:453:97//AC004774

[15533] R-PLACE1002537//Hansenula wingei mitochondrial gene for NADH dehydrogenase subunit 5, complete cds.//0.0042:489:60//D 16253

[15534] R-PLACE1002571//Apis mellifera ligustica complete mitochondrial genome.//0.034:493:55//L06178

[15535] R-PLACE1002578//Homo sapiens chromosome 5, Pac clone 9c13 (LBNL H127), complete sequence.//2.5e-44:292:84//AC006084

[15536] R-PLACE1002583//Homo sapiens wbscr1 (WBSCR1) and replication factor C subunit 2 (RFC2) genes, complete cds.//3.1e-17:517:61//AF045555

[15537] R-PLACE1002591

[15538] R-PLACE1002598//Caenorhabditis elegans cosmid Y37D8A, complete sequence.//0.080:308:60//AL032626

[15539] R-PLACE1002604//Human cosmid LL12NCO1-88A9, ETV6 gene, exons 6, 7 and 8 and partial cds.//0.0013:176:65//U63313

[15540] R-PLACE1002625//HS_{—}2233_B2_H04_MF CIT Approved Human Genomic Sperm Library D Homo sapiens genomic clone Plate=2233 Col=8 Row=P, genomic survey sequence.//5.2e-13:137:79//AQ146663

[15541] R-PLACE1002665//Mus musculus enhancer of polycomb (Epc1) mRNA, complete cds.//5.8e-46:272:94//AF079765

[15542] R-PLACE1002685//Homo sapiens B cell linker protein BLNK mRNA, alternatively spliced, complete cds.//1.2e-77:390:97//AF068180

[15543] R-PLACE1002714//Mus musculus clone OST2473, genomic survey sequence.//1.3e-35:328:78//AF046656

[15544] R-PLACE1002722//Sequence 1 from patent U.S. Pat. No. 5,686,597.//1 .7e-42:276:89//I73723

[15545] R-PLACE1002768//Homo sapiens Xp22 bins 169-171 BAC GSHB-383H3 (Genome Systems Human BAC Library) complete sequence.//0.0098:197:64//AC005185

[15546] R-PLACE1002772//Homo sapiens PAC clone DJ0560014 from 7q21.1-q21.2, complete sequence.//6.7e-49:378:82//AC006145

[15547] R-PLACE1002782

[15548] R-PLACE1002794

[15549] R-PLACE1002811//CIT-HSP-2316H11.TF CIT-HSP Homo sapiens genomic clone 2316H11, genomic survey sequence.//6.0e-50:250:100//AQ034981

[15550] R-PLACE1002815//Sequence 2 from patent U.S. Pat. No. 5,747,660.//2.7e-59:312:84//AR005279

[15551] R-PLACE1002816//Homo sapiens 12q13.1 PAC RPCI5-1057120 (Roswell Park Cancer Institute Human PAC library) complete sequence.//6.3e-59:339:93//AC004466

[15552] R-PLACE1002834//FIG. 2. Nucleotide and translated protein sequences of HPF1, -2, and -9.//1.4e-78:413:95//M27877

[15553] R-PLACE1002839//Homo sapiens PAC clone DJO015123 from 22, complete sequence.//6.5e-25:301:74//AC004819

[15554] R-PLACE1002851//CIT-HSP-2317M9.TR CIT-HSP Homo sapiens genomic clone 2317M9, genomic survey sequence.//0.0011:210:61//AQ040519

[15555] R-PLACE1002853//Human interleukin 6 (IL6) gene, 3′ flank.//5.8e-06:327:61//J03049

[15556] R-PLACE1002881

[15557] R-PLACE1002908//HS_{—}3064_A1_D04_MF CIT Approved Human Genomic Sperm Library D Homo sapiens genomic clone Plate=3064 Col=7 Row=G, genomic survey sequence.//1.9e-09:156:72//AQ142985

[15558] R-PLACE1002941

[15559] R-PLACE1002962

[15560] R-PLACE1002968//Human DNA sequence from clone 109F14 on chromosome 6p21.2-21.3. Contains the alternatively spliced gene for Transcriptional Enhancer Factor TEF-5, the 60S Ribosomal Protein RPL10A gene, a PUTATIVE ZNF127 LIKE gene, and the PPARD for Peroxisome Proliferator Activated Receptor Delta (PPAR-Delta, PPAR-Beta, Nuclear Hormone Receptor 1, NUCI, NUCI, PPARB). Contains three putative CpG islands, ESTs, STSs, GSSs and a ca repeat polymorphism, complete sequence.//1.9e-32:314:77//AL022721

[15561] R-PLACE1002991//Human DNA sequence *** SEQUENCING IN PROGRESS *** from clone 968D22, WORKING DRAFT SEQUENCE.//1.6e-42:343:81//AL023755

[15562] R-PLACE1002993//Homo sapiens PAC clone DJ0899E09 from 7q11.23-q21.1, complete sequence.//0.56:88:72//AC004921

[15563] R-PLACE1002996//HS_{—}2064_A1_A05_MR CIT Approved Human Genomic Sperm Library D Homo sapiens genomic clone Plate=2064 Col=9 Row=A, genomic survey sequence.//4.9e-18:117:95//AQ243211

[15564] R-PLACE1003025//Homo sapiens PAC clone DJ0560014 from 7q21.1-q21.2, complete sequence.//0.26:428:58//AC006145

[15565] R-PLACE1003027//Homo sapiens chromosome 17, clone hRPK.700_H_{—}6, complete sequence.//1.3e-95:465:98//AC005920

[15566] R-PLACE1003044

[15567] R-PLACE1003092//Plasmodium falciparum DNA *** SEQUENCING IN PROGRESS * from contig 4-89, complete sequence.//3.6e-05:358:60//AL010266

[15568] R-PLACE1003100//HS_{—}2244_A2_H12_MR CIT Approved Human Genomic Sperm Library D Homo sapiens genomic clone Plate=2244 Col=24 Row=O, genomic survey sequence.//2.3e-42:288:8611AQ084224

[15569] R-PLACE1003108//Homo sapiens clone DJ0781 A 18, WORKING DRAFT SEQUENCE, 3 unordered pieces.//0.00066:233:61//AC004885

[15570] R-PLACE1003136//Plasmodium falciparum MAL3P2, complete sequence.//0.019:429:57//AL034558

[15571] R-PLACE1003145

[15572] R-PLACE1003153//Homo sapiens Xp22 BAC GSHB-536K7 (Genome Systems Human BAC library) complete sequence.//3.2e-05:390:58//AC004616

[15573] R-PLACE1003174//Arabidopsis thaliana genomic DNA, chromosome 5, P1 clone: MTE17, complete sequence.//2.4e-06:390:60//AB015479

[15574] R-PLACE1003176

[15575] R-PLACE1003190//Homo sapiens clone RG332P12, WORKING DRAFT SEQUENCE, 1 unordered pieces.//4.0e-78:406:81//AC005095

[15576] R-PLACE1003200//Plasmodium falciparum MAL3P6, complete sequence.//0.016:411:57//Z98551

[15577] R-PLACE1003205//Plasmodium falciparum 3D7 chromosome 12 PFYAC336 genomic sequence, WORKING DRAFT SEQUENCE, 5 unordered pieces.//0.00084:288:61//AC005139

[15578] R-PLACE1003238//Homo sapiens full-length insert cDNA clone ZD79Hl .//7.6e-114:567:96//AF086432

[15579] R-PLACE1003249//Human Chromosome X, complete sequence.//1.3e-45:317:85//AC002416

[15580] R-PLACE1003256//Homo sapiens chromosome 17, clone HC1T421K24, complete sequence.//1.0e-45:328:85//AC004099

[15581] R-PLACE1003258

[15582] R-PLACE1003296//Diphoropria sp. 16S ribosomal RNA gene, mitochondrial gene encoding mitochondrial rRNA, partial sequence.//0.050:228:59//U39952

[15583] R-PLACE1003302//FIG. 2. Nucleotide and translated protein sequences of HPF1, -2, and -9.//1.7e-91:458:96//M27877

[15584] R-PLACE1003334//Homo sapiens DNA sequence from BAC 217C2 on chromosome 22q13-q13.33. Contains a gene for the presumtive isolog of Rat RTP60 (nuclear pore complex protein Npap60). Contains ESTs, complete sequence.//4.3e-34:370:71//Z82243

[15585] R-PLACE1003342//CIT-HSP-2311D21.TF CIT-HSP Homo sapiens genomic clone 2311D21, genomic survey sequence.//1.0:159:68//AQ020460

[15586] R-PLACE1003343//Plasmodium falciparum 3D7 chromosome 12 PFYAC812 genomic sequence, WORKING DRAFT SEQUENCE, 8 unordered pieces.//1.1e-05:330:61//AC004153

[15587] R-PLACE1003353//Homo sapiens breast cancer antiestrogen resistance 3 protein (BCAR3) mRNA, complete cds.//3.4e-98:469:98//U92715

[15588] R-PLACE1003361

[15589] R-PLACE1003366//Homo sapiens CAG repeated sequence.//0.018:319:61//AJ006805

[15590] R-PLACE1003369//T18H17-T7 TAMU Arabidopsis thaliana genomic clone T18H17, genomic survey sequence.//0.050:155:63//B20174

[15591] R-PLACE1003373//Homo sapiens chromosome 17, clone hRPC.1050_D_{—}4, complete sequence.//1.2e-62:434:83//AC004771

[15592] R-PLACE1003375//Dictyostelium discoideum golvesin (gol) gene, complete cds.//0.042:263:57//U89350

[15593] R-PLACE1003383//Homo sapiens genomic DNA of 9q32 anti-oncogene of flat epitherium cancer, segment 10/10.//1.7e-83:429:96//AB020878

[15594] R-PLACE1003401//Homo sapiens chromosome 17, clone hRPK.85_B_{—}7, complete sequence.//2.4e-13:175:76//AC005695

[15595] R-PLACE1003420//Homo sapiens PAC clone DJ0988G15 from 7q33-q35, complete sequence.//2.1e-05:340:61//AC005587

[15596] R-PLACE1003454//Plasmodium falciparum DNA *** SEQUENCING IN PROGRESS * from contig 3-64, complete sequence.//0.47:411:58//AL009014

[15597] R-PLACE1003478//M. capricolum DNA for CONTIG MCI 75.//0.51:253:59//Z33125

[15598] R-PLACE1003493//Homo sapiens chromosome 17, clone hRPK.394_K_{—}10, complete sequence.//4.6e-37:319:81//AC006080

[15599] R-PLACE1003516//CIT-HSP-2295M19.TF CIT-HSP Homo sapiens genomic clone 2295M19, genomic survey sequence.//1.0e-40:251:90//AQ007480

[15600] R-PLACE1003519//Homo sapiens chromosome 21 q22.3 PAC 141 B3, complete sequence, containing ribosomal protein homologue pseudogene L23a.//2.7e-29:163:89//AF064859

[15601] R-PLACE1003521//HS_{—}3252 A2_G05 MR CIT Approved Human Genomic Sperm Library D Homo sapiens genomic clone Plate=3252 Col=10 Row=M, genomic survey sequence.//0.00017:274:60//AQ221562

[15602] R-PLACE1003528//HS_{—}2041_B1_B07_MR CIT Approved Human Genomic Sperm Library D Homo sapiens genomic clone Plate=2041 Col=13 Row=D, genomic survey sequence.//6.6e-40:219:83//AQ230483

[15603] R-PLACE1003537//Drosophila melanogaster mitochondrial cytochrome c oxidase subunits, ATPase6, 7 tRNAs (Trp, Cys, Tyr, Leu(UUR), Lys, Asp, Gly) genes, and unidentified reading frames A61, 2 and 3.//8.3e-05:300:61//J01404

[15604] R-PLACE1003553//Human DNA sequence *** SEQUENCING IN PROGRESS *** from clone 97P20, WORKING DRAFT SEQUENCE.//2.7e-87:450:96//AL031297

[15605] R-PLACE1003566

[15606] R-PLACE1003575//Homo sapiens chromosome 16, cosmid clone 325D7, complete sequence.//4.7e-20:148:78//AC003965

[15607] R-PLACE1003583//Human DNA sequence from PAC 388N15 on chromosome Xq21.1.//3.5e-18:287:68//Z99571

[15608] R-PLACE1003584

[15609] R-PLACE1003592//Homo sapiens cosmid 223D9 from Xq28, complete sequence.//2.5e-10:153:73//AF061032

[15610] R-PLACE1003593//Human BAC clone RG030H15 from 7q31, complete sequence.//6.9e-07:240:65//AC002066

[15611] R-PLACE1003596//Caenorhabditis elegans DNA *** SEQUENCING IN PROGRESS *** from clone Y87G2, WORKING DRAFT SEQUENCE.//0.13:393:60//AL022597

[15612] R-PLACE1003602//Homo sapiens mRNA expressed in placenta.//2.4e-95:576:88//D83200

[15613] R-PLACE1003605//Homo sapiens BAC clone RG331C24 from 7q21, complete sequence.//2.9e-19:302:71//AC002081

[15614] R-nnnnnnnnnnnn

[15615] R-PLACE1003618//Human DNA sequence *** SEQUENCING IN PROGRESS *** from clone 191 El 9, WORKING DRAFT SEQUENCE.//8.3e-57:469:80//AL034451

[15616] R-PLACE1003625//Plasmodium falciparum 3D7 chromosome 12 PFYAC69 genomic sequence, WORKING DRAFT SEQUENCE, 4 unordered pieces.//2.1e-05:339:62//AC004688

[15617] R-PLACE1003638//Human DNA sequence *** SEQUENCING IN PROGRESS *** from clone 1104E 15, WORKING DRAFT SEQUENCE.//2.5e-38:279:84//AL022312

[15618] R-PLACE1003669//HS_{—}3054_A2_E07_MR CIT Approved Human Genomic Sperm Library D Homo sapiens genomic clone Plate=3054 Col=14 Row=I, genomic survey sequence.//0.014:265:61//AQ132713

[15619] R-PLACE1003704//HS_{—}3213_A1_D12_T7 CIT Approved Human Genomic Sperm Library D Homo sapiens genomic clone Plate=3213 Col=23 Row=G, genomic survey sequence.//0.80:195:61//AQ176784

[15620] R-PLACE1003709//Human BAC clone RG126M09 from 7q21-q22, complete sequence.//0.018:152:61//AC002067

[15621] R-PLACE1003711//Human endothelial nitric oxide synthase gene, complete cds.//1.7e-61:366:89//D26607

[15622] R-PLACE1003723//Homo sapiens DNA sequence from clone 78F24 on chromosome 22q12.1-12.3. Contains one exon of an Oxysterol-binding protein (OSBP) LIKE gene. Contains GSSs and an STS, complete sequence.//2.7e-44:505:73//AL022336

[15623] R-PLACE1003738//H. sapiens DNA sequence.//0.93:185:60//Z22357

[15624] R-PLACE1003760//Human globin gene.//5.9e-97:538:91//M69023

[15625] R-PLACE1003762//Homo sapiens chromosome 17, clone HC1T39G8, complete sequence.//4.6e-13:134:79//AC003070

[15626] R-PLACE1003768//Homo sapiens chromosome 17, clone hRPK.142_H_{—}19, complete sequence.//5.4e-12:189:71//AC005919

[15627] R-PLACE1003771//Homo sapiens BAC clone GS164B05 from 7p21-p22, complete sequence.//1.7e-19:619:95//AC004160

[15628] R-PLACE1003783

[15629] R-PLACE1003784//Homo sapiens chromosome 19, CIT-HSP-87 m17 BAC clone, complete sequence.//5.6e-15:204:74//AC004659

[15630] R-PLACE1003795//CIT-HSP-2374C8.TR CIT-HSP Homo sapiens genomic clone 2374C8, genomic survey sequence.//7.0e-37:234:89//AQ114933

[15631] R-PLACE1003833//Homo sapiens full-length insert cDNA clone ZE15C06.//4.4e-59:313:95//AF086558

[15632] R-PLACE1003850

[15633] R-PLACE1003858

[15634] R-nnnnnnnnnnnn

[15635] R-PLACE1003870//Homo sapiens Chromosome 22q11.2 Cosmid Clone 15al 0 In DGCR Region, complete sequence.//8.7e-33:285:81//AC000072

[15636] R-nnnnnnnnnnnn

[15637] R-PLACE1003886

[15638] R-PLACE1003888//Homo sapiens chromosome 4 clone B71M12 map 4q25, complete sequence.//0.73:127:65//AC004069

[15639] R-PLACE1003900//Homo sapiens ADP/ATP carrier protein (ANT-2) gene, complete cds.//1.9e-05:239:59//L78810

[15640] R-PLACE1003903//Homo sapiens full-length insert cDNA clone ZD78Dl I .//8.1e-74:369:97//AF086422

[15641] R-PLACE1003915//Mus musculus bone morphogenetic protein-6 (BMP-6) gene, exons 6 and 7 and complete cds.//0.56:247:61//U73520

[15642] R-PLACE1003923//Caenorhabditis elegans cosmid Y57G11C, complete sequence.//0.67:213:63//Z99281

[15643] R-PLACE1003932//Human DNA sequence from cosmid U90B3, on chromosome Xp11, contains ESTs.//8.7e-49:342:85//Z74022

[15644] R-PLACE1003936//H. sapiens gene for ventricular myosin light chain 2.//2.6e-09:394:61//Z15030

[15645] R-PLACE1003968//Plasmodium falciparum DNA *** SEQUENCING IN PROGRESS *** from contig 4-62, complete sequence.//1.3e-07:245:65//AL010247

[15646] R-PLACE1004104

[15647] R-PLACE1004114//Human PAC clone RG212D03, complete sequence.//5.0e-07:336:61//AC002485

[15648] R-PLACE1004118//HSS_{—}3092_B1_BO_MR CIT Approved Human Genomic Sperm Library D Homo sapiens genomic clone Plate=3092 Col=1 Row=D, genomic survey sequence.//0.80:207:6011AQ128151

[15649] R-PLACE1004128//Rattus norvegicus guanine nucleotide binding protein beta 4 subunit mRNA, partial cds.//1.8e-06:193:66//AF022085

[15650] R-PLACE1004149//HS_{—}2253_A2_F11_MR CIT Approved Human Genomic Sperm Library D Homo sapiens genomic clone Plate=2253 Col=22 Row=K, genomic survey sequence.//2.4e-59:315:95//AQ129711

[15651] R-PLACE1004156//Homo sapiens Xp22 bins 3-5 PAC RPCI4-617A9 (Roswell Park Cancer Institute Human PAC Library) containing Arylsulfatase D and E genes, complete sequence.//8.3e-53:299:76//AC005295

[15652] R-PLACE1004161

[15653] R-PLACE1004183//Homo sapiens for TOM 1-like protein.//1.3e-80:434:93//AJ010071

[15654] R-PLACE1004197//RPCI 1-69N15.TK RPCI 1 Homo sapiens genomic clone R-69N15, genomic survey sequence.//0.0078:170:65//AQ265515

[15655] R-PLACE1004203//Homo sapiens semaphorin L (SEMAL) mRNA, complete cds.//3.4e-105:501:98//AF030698

[15656] R-PLACE1004242//Homo sapiens DNA sequence from PAC 124C6 on chromosome 6q21. Contains genomic marker D6S1603, ESTs, GSSs and a STS with a CA repeat polymorphism, complete sequence.//6.1e-65:373:86//AL021326

[15657] R-PLACE1004256//Homo sapiens BAC clone NH0044G14 from 7q11.23-21.1, complete sequence.//0.011:383:61//AC006031

[15658] R-PLACE1004257//Homo sapiens Xp22 BAC GSHB-433024 (Genome Systems Human BAC library) complete sequence.//3.4e-09:576:59//AC004470

[15659] R-PLACE1004258//HS 3034_A1_B12_MR CIT Approved Human Genomic Sperm Library D Homo sapiens genomic clone Plate=3034 Col=23 Row=C, genomic survey sequence.//1.4e-35:359:77//AQ128936

[15660] R-PLACE1004270//CITBI-El-2504K14.TR CITBI-EL Homo sapiens genomic clone 2504K14, genomic survey sequence.//2.7e-06:150:74//AQ261108

[15661] R-PLACE1004274//Homo sapiens BAC clone NH0436H22 from 2, complete sequence.//0.025:116:72//AC005234

[15662] R-PLACE1004277//Homo sapiens two pore domain K+channel (TASK-2) mRNA, complete cds.//4.4e-106:581:91//AF084830

[15663] R-PLACE1004284//Plasmodium falciparum 3D7 chromosome 12 PFYAC492 genomic sequence, WORKING DRAFT SEQUENCE, 5 unordered pieces.//0.59:231:60//AC005308

[15664] R-PLACE1004289//Homo sapiens chromosome 17, clone hRPK.700_H_{—}6, complete sequence.//5.8e-31:340:75//AC005920

[15665] R-PLACE1004302//Homo sapiens clone RG332P12, WORKING DRAFT SEQUENCE, 1 unordered pieces.//6.4e-90:572:86//AC005095

[15666] R-PLACE1004316//H. sapiens mRNA for apoptosis specific protein.//1.9e-113:590:94//Y 11588

[15667] R-PLACE1004336//Human DNA sequence *** SEQUENCING IN PROGRESS *** from clone 1013A 10, WORKING DRAFT SEQUENCE.//2.3e-65:292:82//AL033383

[15668] R-PLACE1004358//Homo sapiens connector enhancer of KSR-like protein CNK1 mRNA, complete cds.//2.4e-70:379:93//AF100153

[15669] R-PLACE1004376//CIT-HSP-2287M8.TF CIT-HSP Homo sapiens genomic clone 2287M8, genomic survey sequence.//0.47:173:61//AQ000837

[15670] R-PLACE1004384//CIT-HSP-2316J11.TF CIT-HSP Homo sapiens genomic clone 2316J11, genomic survey sequence.//0.035:109:69//AQ037817

[15671] R-PLACE1004388//Plasmodium falciparum DNA *** SEQUENCING IN PROGRESS *** from contig 3-82, complete sequence.//4.2e-06:381:60//AL010149

[15672] R-PLACE1004405//Homo sapiens clone GS512121, WORKING DRAFT SEQUENCE, 9 unordered pieces.//0.20:270:60//AC005027

[15673] R-PLACE1004425//Homo sapiens PAC clone DJ0733B09 from 7 p14-p13, complete sequence.//1.3e-96:516:94//AC005532

[15674] R-PLACE1004428//Human DNA sequence from clone 888M10 on chromosome 1p36.11-36.31 Contains part of gene KIAA0453, EST, STS, GSS, complete sequence.//5.8e-10:279:65//AL031296

[15675] R-PLACE1004437//Human NAD+-specific isocitrate dehydrogenase beta subunit precursor, mRNA, nuclear gene encoding mitochondrial protein, complete cds.//2.9e-88:516:88//U49283

[15676] R-PLACE1004451//HS_{—}2258_B2_F00_MR CIT Approved Human Genomic Sperm Library D Homo sapiens genomic clone Plate=2258 Col=2 Row=L, genomic survey sequence.//0.82:172:61//AQ221189

[15677] R-PLACE1004460

[15678] R-PLACE1004467//Syrian hamster carbamoylphosphate synthetase-aspartate transcarbamylase-dihydroorotase (CAD) gene, exons 1 and 2.//1.2e-24:311:62//M31621

[15679] R-PLACE1004471//Homo Sapiens Chromosome X clone bWXD75, complete sequence.//2.1e-34:333:70//AC004389

[15680] R-PLACE1004473

[15681] R-PLACE1004491//Drosophila melanogaster Oregon-R mitochondrial A+T region.//1.0e-08:485:60//U11584

[15682] R-PLACE1004506

[15683] R-PLACE1004510//Plasmodium falciparum chromosome 2, section 64 of 73 of the complete sequence.//0.0094:543:56//AE001427

[15684] R-PLACE1004516//Homo sapiens BAC clone BK085E05 from 22q12.1-qter, complete sequence.//0.00011:343:59//AC003071

[15685] R-PLACE1004518

[15686] R-PLACE1004548//Homo sapiens Xp22 BAC GS-551019 (Genome Systems Human BAC library) and cosmids U 199A7 and U209F2 (Lawrence Livermore X chromosome cosmid library) containing part of human chloride channel 4 gene, complete sequence.//4.9e-40:245:80//AC003666

[15687] R-PLACE1004550

[15688] R-PLACE1004564//B. taurus mRNA for cleavage and polyadenylation specificity factor.//2.7e-82:532:86//X75931

[15689] R-PLACE1004629//Homo sapiens chromosome 7 clone UWGC:g3586a230 from 7 p14-15, complete sequence.//0.015:437:59//AC004800

[15690] R-PLACE1004645//CIT-HSP-2370D6.TR CIT-HSP Homo sapiens genomic clone 2370D6, genomic survey sequence.//0.033:76:75//AQ110136

[15691] R-PLACE1004646//Homo sapiens cosmid 120C12 from Xq28, complete sequence.//2.0e-23:237:79//AF036876

[15692] R-PLACE1004658//Homo sapiens Chromosome 12 p13.3 BAC RPCI11-21K20 (Roswell Park Cancer Institute Human BAC Library) complete sequence.//7.1e-09:94:87//AC005343

[15693] R-nnnnnnnnnnnn/RPCI11-79G23.TV RPCII 1 Homo sapiens genomic clone R-79G23, genomic survey sequence.//2.2e-81:433:9411AQ283692

[15694] R-PLACE1004672//Human ABL gene, exon lb and intron lb, and putative M8604 Met protein (M8604 Met) gene, complete cds.//2.7e-24:263:74//U07561

[15695] R-PLACE1004674//Homo sapiens calcium binding protein (ALG-2) mRNA, complete cds.//. I e-89:513:91//AF035606

[15696] R-PLACE1004681//Homo sapiens genomic DNA of 8p21.3-p22 anti-oncogene of hepatocellular colorectal and non-small cell lung cancer, segment 3/11.//1.3e-96:498:95//AB020860

[15697] R-PLACE1004686

[15698] R-PLACE1004691//Homo sapiens genomic DNA of 8p21.3-p22 anti-oncogene of hepatocellular colorectal and non-small cell lung cancer, segment 2/11.//2.1e-33:290:80//AB020859

[15699] R-PLACE1004693//Caenorhabditis elegans cosmid Y2H9A, complete sequence.//1.0:195:60//AL021448

[15700] R-PLACE1004716//CITBI-EI-2519C14.TR CITB1-E1 Homo sapiens genomic clone 2519C14, genomic survey sequence.//5.0e-43:245:93//AQ276965

[15701] R-PLACE1004722//Plasmodium falciparum 3D7 chromosome 12 PFYACB8-628 genomic sequence, WORKING DRAFT SEQUENCE, 9 unordered pieces.//0.0022:360:60//AC005507

[15702] R-PLACE1004736

[15703] R-PLACE1004740

[15704] R-nnnnnnnnnnnn//Homo sapiens ubiquitin-protein ligase E3-alpha (UBR1) mRNA, partial cds.//5.4e-105:575:92//AF061556

[15705] R-PLACE1004751//Homo sapiens Xq28 BACs 360 F12, GSHB-555C13, complete sequence.//9.0e-26:317:76//AC002523

[15706] R-PLACE1004773//Homo sapiens inversin protein mRNA, complete cds.//8.5e-88:437:96//AF084367

[15707] R-PLACE1004777//Homo sapiens genomic DNA, chromosome 21 q22.2 (Down Syndrome region), segment 3/15, WORKING DRAFT SEQUENCE.//0.050:138:65//AP000010

[15708] R-PLACE1004793//Human endogenous retrovirus HERV-K(HML6) proviral clone HML6.17 putative polymerase and envelope genes, partial cds, and 3′LTR.//5.1e-58:313:80//U60269

[15709] R-nnnnnnnnnnnn//Homo sapiens mRNA for KIAA0606 protein, partial cds.//5.8e-98:580:88//AB011178

[15710] R-PLACE1004813//Plasmodium falciparum 3D7 chromosome 12 PFYACB8-420 genomic sequence, WORKING DRAFT SEQUENCE, 14 unordered pieces.//5.3e-09:256:64//AC005140

[15711] R-PLACE1004814//Homo sapiens okadaic acid-inducible phosphoprotein (OA48-18) mRNA, complete cds.//3.5e-107:358:99//AF069250

[15712] R-PLACE1004815//Human Chromosome 11q12.2 PAC clone pDJ606g6, complete sequence.//3.8e-61:353:89//AC004126

[15713] R-PLACE1004824//Homo sapiens chromosome 17, clone hCIT.468_F_{—}23, WORKING DRAFT SEQUENCE, 3 unordered pieces.//5.7e-42:364:79//AC004666

[15714] R-PLACE1004827//Homo sapiens Xp22 BAC GS-594A7 (Genome Systems Human BAC library) contains Bmx gene, complete sequence.//2.7e-14:156:79//AC003669

[15715] R-PLACE1004836//HS_{—}2270_A2_H10_MR CIT Approved Human Genomic Sperm Library D Homo sapiens genomic clone Plate=2270 Col=20 Row=O, genomic survey sequence.//8.6e-51:267:9611AQ164110

[15716] R-PLACE1004838//CIT-HSP-2343E10.TR CIT-HSP Homo sapiens genomic clone 2343E10, genomic survey sequence.//0.071:168:63//AQ058544

[15717] R-PLACE1004840//Sequence 4 from patent U.S. Pat. No. 5,728,819.//1.6e-26:150:98//I92820

[15718] R-PLACE1004868//Human Chromosome X clone bWXD342, complete sequence.//0.57:344:59//AC004072

[15719] R-PLACE1004885//HS_{—}3235_B2_E07_MR CIT Approved Human Genomic Sperm Library D Homo sapiens genomic clone Plate=3235 Col=14 Row=J, genomic survey sequence.//1.1e-38:175:78//AQ210193

[15720] R-PLACE1004900//Human DNA sequence from clone 353H6 on chromosome Xq25-26.2. Contains the alternatively spliced SMARCAI gene for SWI/SNF related, matrix associated, actin dependent regulator of chromatin, subfamily a, member I (SNF2LI) and a 40S Ribosomal Protein S26 pseudogene. Contains ESTs, STSs and GSSs, complete sequence.//2.0e-44:334:84//AL022577

[15721] R-PLACE1004902

[15722] R-nnnnnnnnnnnn//Human DNA sequence from clone J428A131, WORKING DRAFT SEQUENCE.//7.7e-58:377:87//Z82209

[15723] R-PLACE1004918//Homo sapiens Chromosome 16 BAC clone CIT987SK-A-248F7, complete sequence.//0.00084:373:60//AC004605

[15724] R-PLACE1004930//Homo sapiens MDC-3.13 isoform I mRNA, complete cds.//2.0e-100:532:93//AF099936

[15725] R-PLACE1004934//Homo sapiens clone RGO62N11, WORKING DRAFT SEQUENCE, 2 unordered pieces.//0.00030:198:66//AC005683

[15726] R-PLACE1004937//Caenorhabditis elegans SEL-10 (sel-10) mRNA, complete cds.//1.3e-13:367:61//AF020788

[15727] R-PLACE1004969//Human DNA sequence from clone LUCA7 on chromosome 3, complete sequence.//0.97:116:71/HZ84494

[15728] R-PLACE1004972

[15729] R-PLACE1004979//Plasmodium falciparum MAL3P4, complete sequence.//0.74:304:60//AL008970

[15730] R-PLACE1004982//Plasmodium falciparum 3D7 chromosome 12 PFYAC492 genomic sequence, WORKING DRAFT SEQUENCE, 5 unordered pieces.//4.7e-05:495:57//AC005308

[15731] R-PLACE1004985//Human DNA sequence *** SEQUENCING IN PROGRESS *** from clone 451 B21, WORKING DRAFT SEQUENCE.//2.5e-10:410:60//AL033522

[15732] R-PLACE1005026//Homo sapiens PAC clone DJO907C10 from 7q31-3q32, complete sequence.//2.7e-56:158:99//AC004925

[15733] R-PLACE1005027

[15734] R-PLACE1005046//Homo sapiens chromosome 19, cosmid F20237, complete sequence.//3.1e-63:438:86//AC005775

[15735] R-PLACE1005052//Homo sapiens chromosome Xp22-135-136 clone GSHB-5671I, WORKING DRAFT SEQUENCE, 35 unordered pieces.//6.1e-87:301:98//AC005867

[15736] R-PLACE1005066//Human DNA sequence from clone 67K17 on chromosome 6q24.1-24.3. Contains the HIVEP2 (Schnurri-2) gene for HIV type 1 Enhancer-binding Protein 2, and a possible pseudogene in an intron of this gene. Contains STSs and GSSs and an AAAT repeat polymorphism, complete sequence.//1.1e-09:453:61//AL023584

[15737] R-PLACE1005077//H. sapiens genes for semenogelin I and semenogelin II.//2.6e-05:199:66//Z47556

[15738] R-PLACE1005085//Homo sapiens chromosome 17, clone hRPK.293_K_{—}20, complete sequence.//2.1e-42:384:69//AC005495

[15739] R-PLACE1005086//RPCII 1-30H10.TV RPCI-11 Homo sapiens genomic clone RPCI-11-30H10, genomic survey sequence.//0.13:112:67//B87788

[15740] R-PLACE1005101//Homo sapiens (clone zap128) mRNA, 3′ end of cds.//2.5e-97:531:92//L40401

[15741] R-PLACE1005102//Homo sapiens chromosome 19, cosmid R29388, complete sequence.//1.3e-91:504:92//AC004476

[15742] R-PLACE1005108//Homo sapiens BAC129, complete sequence.//4.0e-28:232:84//U85195

[15743] R-PLACE1005111//Human DNA sequence *** SEQUENCING IN PROGRESS *** from clone 566H6, WORKING DRAFT SEQUENCE.//3.0e-18:174:74//AL031845

[15744] R-PLACE1005128

[15745] R-PLACE1005146

[15746] R-PLACE1005162//Plasmodium falciparum 3D7 chromosome 12 PFYACB8-420 genomic sequence, WORKING DRAFT SEQUENCE, 14 unordered pieces.//2.4e-07:273:61//AC005140

[15747] R-nnnnnnnnnnnn//Rat alternatively spliced mRNA.//8.1e-20:185:82//M93018

[15748] R-PLACE1005181//HS_{—}2182_B2_B05_MF CIT Approved Human Genomic Sperm Library D Homo sapiens genomic clone Plate=2182 Col=10 Row=D, genomic survey sequence.//4.9e-05:193:65//AQ030787

[15749] R-PLACE1005187//Arabidopsis thaliana chromosome II BAC Ti 4A4 genomic sequence, complete sequence.//0.00073:264:60//AC006161

[15750] R-PLACE1005206//Homo sapiens full-length insert cDNA YN66A06.//6.3e-64:343:93//AF075043

[15751] R-PLACE1005232//Human DNA sequence *** SEQUENCING IN PROGRESS *** from clone 25J6, WORKING DRAFT SEQUENCE.//1.3e-34:286:81//Z84476

[15752] R-PLACE1005243

[15753] R-PLACE1005261//Caenorhabditis elegans cosmid ZK666, complete sequence.//0.66:180:60//Z49132

[15754] R-PLACE1005266//Homo sapiens clone RG122E10, complete sequence.//1.3e-15:166:78//AC005067

[15755] R-PLACE1005277//CITB1-E1-2514D4.TF CITBI-EL Homo sapiens genomic clone 2514D4, genomic survey sequence.//2.5e-34:358:74//AQ265720

[15756] R-PLACE1005287//Plasmodium falciparum DNA *** SEQUENCING IN PROGRESS ** from MAL1P1, WORKING DRAFT SEQUENCE.//4.1e-07:495:60//AL031744

[15757] R-PLACE1005305//HS_{—}3180 B2_D02_MR CIT Approved Human Genomic Sperm Library D Homo sapiens genomic clone Plate=3180 Col=4 Row=H, genomic survey sequence.//1.1e-42:308:85//AQ169443

[15758] R-PLACE1005308

[15759] R-PLACE1005313//Human Chromosome 11 pac pDJ227b23, WORKING DRAFT SEQUENCE, 19 unordered pieces.//0.00048:320:60//AC000383

[15760] R-PLACE1005327//chromosome 1 specific transcript KIAA0491.//5.4e-103:537:94//AB007960

[15761] R-PLACE1005331//Homo sapiens chromosome 19, cosmid F20569, complete sequence.//2.2e-94:536:91//AC004794

[15762] R-PLACE1005335//Human Chromosome 3 pac pDJ70i11, WORKING DRAFT SEQUENCE, 2 unordered pieces.//5.3e-32:313:79//AC000380

[15763] R-PLACE1005373//Homo sapiens BAC 129, complete sequence.//8.8e-10:229:68//U85195

[15764] R-PLACE1005374//Homo sapiens chromosome 17, clone hRPK.401_{—}0_{—}9, complete sequence.//3.0e-44:434:77//AC005291

[15765] R-PLACE1005409//Human BAC clone RG167B05 from 7q21, complete sequence.//8.8e-105:529:96//AC003991

[15766] R-PLACE1005453//Human PAC clone DJ327A19 from Xq25-q26, complete sequence.//4.7e-39:302:82//AC002477

[15767] R-PLACE1005467//Human DNA sequence *** SEQUENCING IN PROGRESS *** from clone 167P19, WORKING DRAFT SEQUENCE.//1.1e-40:328:81//Z93014

[15768] R-PLACE1005471//Human DNA sequence from clone 395P12 on chromosome 1q24-25. Contains the TXGP1 gene for tax-transcriptionally activated glycoprotein 1 (34 kD) (OX40 ligand, OX40L) and a GOT2 (Aspartate Aminotransferase, mitochondrial precursor, EC 2.6.1.1, Transaminase A, Glutamate Oxaloacetate Transaminase-2) pseudogene. Contains ESTs, STSs and GSSs, complete sequence.//6.4e-68:409:90//AL022310

[15769] R-PLACE1005477//Human DNA sequence *** SEQUENCING IN PROGRESS *** from clone 32B 1, WORKING DRAFT SEQUENCE.//0.020:216:66//AL023693

[15770] R-PLACE1005480//Homo sapiens chromosome 19, CIT-HSP BAC 490g23 (BC338531), complete sequence.//2.8e-44:327:70//AC005392

[15771] R-PLACE1005481//Homo sapiens chromosome 17, clone hRPC.1164_{—}0_{—}3, complete sequence.//4.2e-23:284:74//AC004703

[15772] R-PLACE1005494//Danio rerio homeobox protein LIM-3 (lim3) gene, exon 4.//10.19:468:60//AF031631

[15773] R-PLACE1005502//Homo sapiens formin binding protein 21 mRNA, complete cds.//1.6e-55:277:98//AF071185

[15774] R-PLACE1005526//Human mRNA for alpha-1 type II collagen.//0.10:227:63//X16468

[15775] R-PLACE1005528//Homo sapiens genomic DNA, chromosome 21q11.1, segment 9/28, WORKING DRAFT SEQUENCE.//2.3e-76:395:96//AP000038

[15776] R-PLACE1005530//C. familiaris CA repeat sequence (isolate ).//0.023:90:75//X86184

[15777] R-PLACE1005550//Fugu rubripes GSS sequence, clone 048A08bH I, genomic survey sequence.//2.0e-09:235:64//AL025928

[15778] R-PLACE1005554//Homo sapiens chromosome 17, clone hRPK.215_P_{—}18, complete sequence.//0.069:305:60//AC005969

[15779] R-PLACE1005557//Homo sapiens chromosome 17, clone hRPC.117_B_{—}12, complete sequence.//4.3e-105:587:91//AC004707

[15780] R-PLACE1005574//Human BAC 367D17 from chromosome 18, complete sequence.//1.5e-17:274:67//AC003971

[15781] R-PLACE1005584//Homo sapiens PAC clone DJI186C01 from 7q21.2-q31.1, complete sequence.//2.7e-15:191:77//AC004991

[15782] R-PLACE1005595//Human Chromosome 11q12.2 PAC clone pDJ606g6, complete sequence.//6.4e-90:453:96//AC004126

[15783] R-PLACE1005603//Homo sapiens cosmid clone U169D2 from Xp22.1-22.2, complete sequence.//0.69:322:61//U72788

[15784] R-PLACE1005611//Borrelia burgdorferi plasmid cp18, OspE (ospE) gene, partial cds.//0.059:473:56//U42599

[15785] R-PLACE1005623//Homo sapiens full-length insert cDNA clone ZD76B03.//1.6e-113:575:95//AF086405

[15786] R-PLACE1005630//High throughput sequencing of human chromosome 12, WORKING DRAFT SEQUENCE, 1 ordered pieces.//5.6e-79:270:94//AC005840

[15787] R-PLACE1005639//Human BAC clone RG022J17 from 7q21, complete sequence.//8.2e-56:441:83//AC002382

[15788] R-PLACE1005646//Homo sapiens RNA helicase-related protein mRNA, complete cds.//3.2e-110:585:93//AF083255

[15789] R-PLACE1005656//Homo sapiens chromosome 17, clone hRPK.628_E_{—}12, complete sequence.//8.6e-08:505:58//AC005701

[15790] R-PLACE1005666//Human DNA sequence from PAC 360E18 on chromosome X contains EST, CpG island and polymorphic CA repeat.//3.2e-27:307:72//Z82203

[15791] R-PLACE1005698//344B22.TV CIT978SKA1 Homo sapiens genomic clone A-344B22, genomic survey sequence.//0.030:91:70//B15144

[15792] R-PLACE1005727//Human variable number tandem repeat (VNTR) region, allele 17R13′ to collagen type II (COL2A1) gene.//5.2e-10:587:59//L10171

[15793] R-PLACE1005730//Homo sapiens ADP/ATP carrier protein (ANT-2) gene, complete cds.//0.0039:239:58//L78810

[15794] R-PLACE1005739//Mus musculus IFN-gamma induced (Mg11) mRNA, complete cds.//2.2e-21:270:72//U15635

[15795] R-PLACE1005755//Caenorhabditis elegans cosmid M03F4.//6.9e-08:219:64//U64601

[15796] R-PLACE1005763//Human mRNA for KIAA0118 gene, partial cds.//1.0e-45:268:87//D42087

[15797] R-PLACE1005799//Human X chromsome mRNA for CCGI protein inv. in cell proliferation.//0.030:91:78//X07024

[15798] R-PLACE1005802//Homo sapiens PAC clone DJO44LI 5 from Xq23, complete sequence.//1.4e-69:391:92//AC004827

[15799] R-PLACE1005803

[15800] R-PLACE1005804//Human BAC clone RG341D10 from 7 p15-p21, complete sequence.//1.8e-21:175:75//AC002530

[15801] R-PLACE1005828//Homo sapiens chromosome 17, clone hRPC.971_F_{—}3, WORKING DRAFT SEQUENCE, 1 ordered pieces.//2.9e-56:333:91//AC004150

[15802] R-PLACE1005834//Plasmodium falciparum DNA *** SEQUENCING IN PROGRESS * from MAL1P2, WORKING DRAFT SEQUENCE.//0.020:513:55//AL031745

[15803] R-PLACE1005845//Rabbit mRNA for protein phosphatase 2A-beta.//1.8e-10:182:69//Y00763

[15804] R-PLACE1005850

[15805] R-PLACE1005851//Homo sapiens clone DJ0789105, WORKING DRAFT SEQUENCE, 2 unordered pieces.//5.5e-06:318:63//AC004887

[15806] R-PLACE1005876//B. taurus mRNA for cleavage and polyadenylation specificity factor.//6.7e-28:366:72//X75931

[15807] R-PLACE1005884//Human DNA sequence from cosmid V526F1, between markers DXS366 and DXS87 on chromosome X contains STS.//1.0e-06:306:64//Z70281

[15808] R-PLACE1005898//Plasmodium falciparum 3D7 chromosome 12 PFYAC336 genomic sequence, WORKING DRAFT SEQUENCE, 5 unordered pieces.//0.0094:449:59//AC005139

[15809] R-PLACE1005921//CITBI-E 1-2509N21.TF CITBI-E 1 Homo sapiens genomic clone 2509N21, genomic survey sequence.//4.8e-84:494:89//AQ261347

[15810] R-PLACE1005923//RPCII 1-65N9.TJ RPCII 1 Homo sapiens genomic clone R-65N9, genomic survey sequence.//8.3e-97:520:93//AQ237243

[15811] R-PLACE1005925//Human DNA sequence from clone 231 L4 on chromosome Xq27.1-27.3 Contains GSS, STS, complete sequence.//5.2e-67:578:78//AL022719

[15812] R-PLACE1005932//Caenorhabditis elegans cosmid Y52B I IA, complete sequence.//0.0035:176:62//AL032654

[15813] R-PLACE1005934

[15814] R-PLACE1005936//Arabidopsis Thaliana BAC F6A4, Chromosome IV, near 60.5 cM, complete sequence.//0.00021:272:62//AF069716

[15815] R-PLACE1005951

[15816] R-PLACE1005953//Caenorhabditis elegans cosmid F09E5.//1.3e-07:349:60//U37429

[15817] R-PLACE1005955//Human HepG2 3′ region MboI cDNA, clone hmdld01m3.//8.3e-08:128:70//D17131

[15818] R-PLACE1005966//Pontia protodice large subunit ribosomal RNA gene, partial sequence; tRNA-Val gene, complete sequence; and small subunit ribosomal RNA gene, partial sequence, mitochondrial genes for mitochondrial RNAs.//7.0e-09:549:59//AF044863

[15819] R-PLACE1005968//Rattus norvegicus mRNA for p47, complete cds.//1.1e-51:394:81//AB002086

[15820] R-PLACE1005990//Homo sapiens chromosome 12p13.3 clone RPCII 1-407G6, WORKING DRAFT SEQUENCE, 51 ordered pieces.//4.4e-63:369:91//AC005866

[15821] R-PLACE1006002//Human cosmid CR1-JC2015 at D10S289 in 10sp13.//5.9e-27:299:74//U15177

[15822] R-PLACE1006003//Mus musculus clone OST18050, genomic survey sequence.//3.5e-07:164:67//AF046375

[15823] R-PLACE1006011//Mus musculus poly-(ADPribosyl)-transferase homolog PARP mRNA, complete cds.//1.1e-32:266:83//AF072521

[15824] R-PLACE1006017//Homo sapiens Chromosome 22q11.2 Cosmid Clone 31e In DGCR Region, complete sequence.//1.8e-17:164:82//AC000077

[15825] R-PLACE1006037//Mus musculus B6D2F1 clone 2C11B mRNA.//2.0e-49:557:72//U01139

[15826] R-PLACE1006040//Homo sapiens mRNA for alpha endosulfine.//4.3e-13:128:81//X99906

[15827] R-PLACE1006076//Homo sapiens clone DJ0781A18, WORKING DRAFT SEQUENCE, 3 unordered pieces.//3.3e-18:220:74//AC004885

[15828] R-PLACE1006119//Plasmodium berghei (STRAIN ANKA) gamma-GCS gene, complete CDS.//0.0050:271:63//AJ005122

[15829] R-PLACE1006129//Drosophila melanogaster, chromosome 2R, region 31 C 1-31 D6, P1 clone DS08879, complete sequence.//0.43:178:65//AC005454

[15830] R-PLACE1006139//Homo sapiens PAC clone DJ0659J06 from 7q33-q35, complete sequence.//7.5e-13:222:68//AC004849

[15831] R-PLACE1006143//Plasmodium falciparum MAL3P6, complete sequence.//0.00019:455:59//Z98551

[15832] R-PLACE1006157//Plasmodium falciparum DNA *** SEQUENCING IN PROGRESS *** from MAL4PI, WORKING DRAFT SEQUENCE.//0.00018:351:60//AL034557

[15833] R-PLACE1006159//Homo sapiens chromosome 10 clone LAlONCO_{—}124_D_{—}3 map 10q25.1, WORKING DRAFT SEQUENCE, I ordered pieces.//1.0e-113:586:96//AC006103

[15834] R-PLACE1006164//Human hereditary haemochromatosis region, histone 2A-like protein gene, hereditary haemochromatosis (HLA-H) gene, RoRet gene, and sodium phosphate transporter (NPT3) gene, complete cds.//1.0e-28:342:75//U91328

[15835] R-PLACE1006167//Homo sapiens full-length insert cDNA clone ZE14EO4.//4.6e-77:426:93//AF086555

[15836] R-nnnnnnnnnnnn//Mouse mRNA for alpha-adaptin (C).//3.0e-46:188:82//X14972

[15837] R-PLACE1006187//Homo sapiens cyclin E2 mRNA, complete cds.//1.6e-116:597:95//AF091433

[15838] R-PLACE1006195//Homo sapiens chromosome 19, fosmid 39554, complete sequence.//8.8e-11:148:74//AC004410

[15839] R-PLACE1006196

[15840] R-PLACE1006205//Genomic sequence from Mouse 11, complete sequence.//8.4e-44:332:85//AC000398

[15841] R-PLACE1006223//Human DNA sequence from cosmid U74C11, between markers DXS6791 and DXS8038 on chromosome X contains ESTs.//0.041:215:61//Z73362

[15842] R-PLACE1006225//Caenorhabditis elegans cosmid Y69H2, complete sequence.//9.7e-13:358:63//Z98877

[15843] R-PLACE1006236//Plasmodium falciparum MAL3P4, complete sequence.//0.00019:538:58//AL008970

[15844] R-nnnnnnnnnnnn//Homo sapiens BAC clone RG118D07 from 7q31, complete sequence.//3.1e-96:497:95//AC004142

[15845] R-PLACE1006246//Homo sapiens clone NH0144M13, WORKING DRAFT SEQUENCE, 1 unordered pieces.//0.029:499:56//AC006034

[15846] R-PLACE1006248//Homo sapiens mRNA for KIAA0648 protein, partial cds.//9.2e-96:499:95//AB014548

[15847] R-PLACE1006262//Homo sapiens Xp22 GSHB-314C4 (Genome Systems Human BAC library) complete sequence.//0.00043:160:66//AC004087

[15848] R-PLACE1006288//Human DNA sequence *** SEQUENCING IN PROGRESS *** from clone 20N2, WORKING DRAFT SEQUENCE.//3.5e-120:611:96//AL031320

[15849] R-PLACE1006318

[15850] R-PLACE1006325//Plasmodium falciparum MAL3P8, complete sequence.//1.0:426:57//AL034560

[15851] R-PLACE1006335//Human DNA sequence from PAC 849L7 on chromosome Xq2 I.//0.96:173:66//AL008987

[15852] R-PLACE1006357//P. falciparum complete gene map of plastid-like DNA (IR-B).//1.9e-07:491:58//X95276

[15853] R-PLACE1006360//Plasmodium falciparum chromosome 2, section 35 of 73 of the complete sequence.//0.25:484:56//AE001398

[15854] R-PLACE1006368//Caenorhabditis elegans cosmid Y38H6C, complete sequence.//1.0:240:59//AL031630

[15855] R-PLACE1006371//Homo sapiens chromosome 16, cosmid clone 360H6 (LANL), complete sequence.//3.7e-101:574:91//AC004232

[15856] R-PLACE1006382

[15857] R-PLACE1006385//Mus musculus intersectin-EH binding protein 1bp2 mRNA, partial cds.//1.4e-50:350:86//AF057286

[15858] R-PLACE1006412//Homo sapiens clone DJ0673M15, WORKING DRAFT SEQUENCE, 33 unordered pieces.//5.1e-51:339:82//AC004854

[15859] R-PLACE1006414//Homo sapiens 12 p13.3 PAC RPCI5-927J10 (Roswell Park Cancer Institute Human PAC library) complete sequence.//1.6e-38:297:84//AC004804

[15860] R-PLACE1006438//Homo sapiens full-length insert cDNA YH73H06.//7.6e-73:422:90//AF074985

[15861] R-PLACE1006445//Human DNA sequence *** SEQUENCING IN PROGRESS * from clone 1018K9, WORKING DRAFT SEQUENCE.//3.0e-07:376:61//AL031726

[15862] R-PLACE1006469

[15863] R-PLACE1006470//Mouse B1 repetitive sequence DNA.//1.0:96:66//M24152

[15864] R-PLACE1006482//Human DNA sequence *** SEQUENCING IN PROGRESS * from clone 447C4, WORKING DRAFT SEQUENCE.//3.0e-101:535:94//AL021977

[15865] R-PLACE1006492//Homo sapiens chromosome 17, clone hRPK.180_P_{—}8, complete sequence.//0.78:44:95//AC005972

[15866] R-PLACE1006506//R. norvegicus BSP gene.//1.0:206:60//X86100

[15867] R-PLACE1006521//RPCII 1-13L8.TV RPCI-11 Homo sapiens genomic clone RPCI-11-13L8, genomic survey sequence.//9.0e-17:414:61//B75158

[15868] R-PLACE1006531//Plasmodium falciparum coronin gene, isolate 3D7.//0.98:186:63//AJ002197

[15869] R-PLACE1006534//Anopheles gambiae complete mitochondrial genome.//0.051:412:61//L20934

[15870] R-PLACE1006540//Homo sapiens clone UWGC:y55cO25 from 6p21, complete sequence.//7.5e-41:470:70//AC004209

[15871] R-PLACE1006552//Caenorhabditis elegans DNA *** SEQUENCING IN PROGRESS *** from clone Y47D3, WORKING DRAFT SEQUENCE.//0.57:355:57//Z98865

[15872] R-PLACE1006598//Plasmodium falciparum 3D7 chromosome 12 PFYAC588 genomic sequence, WORKING DRAFT SEQUENCE, 2 unordered pieces.//0.016:291:58//AC004710

[15873] R-PLACE1006615//Homo sapiens eukaryotic translation initiation factor eIF3, p35 subunit mRNA, complete cds.//2.9e-116:590:95//U97670

[15874] R-PLACE1006617//Homo sapiens chromosome 4 clone B207D4 map 4q25, complete sequence.//2.2e-45:209:88//AC004050

[15875] R-PLACE1006626//C. elegans cosmid K12H4.//1.2e-16:344:64//L14331

[15876] R-PLACE1006629//Homo sapiens chromosome 19, cosmid F20900, complete sequence.//2.8e-25:343:70//AC006128

[15877] R-PLACE1006640//CIT-HSP-2169LI.TF CIT-HSP Homo sapiens genomic clone 2169LI, genomic survey sequence.//0.00020:201:62//B90038

[15878] R-PLACE1006673//Homo sapiens clone DJ076B20, WORKING DRAFT SEQUENCE, 6 unordered pieces.//1.4e-42:309:84//AC004882

[15879] R-PLACE1006678//Homo sapiens PAC clone DJ1166G19 from 7 p12-p11.2, complete sequence.//6.4e-09:454:59//AC006024

[15880] R-PLACE1006704//Human DNA sequence from clone 249CI on chromosome Xq21.1-22.2 Contains GSS, complete sequence.//0.56:226:63//AL022154

[15881] R-PLACE1006731//Homo sapiens clone 23923 mRNA sequence.//6.0e-101:486:98//AF038172

[15882] R-PLACE1006754//Homo sapiens chromosome 19, cosmid R29124, complete sequence.//1.4e-68:381:93//AC005626

[15883] R-PLACE1006760//Homo sapiens clone 24800 mRNA sequence.//6.2e-72:397:92//AF070622

[15884] R-PLACE1006779//Rattus norvegicus intestinal trefoil factor gene, promoter and partial cds.//1.6e-11:420:61//U20984

[15885] R-PLACE1006782//Caenorhabditis elegans DNA *** SEQUENCING IN PROGRESS *** from clone Y47D3, WORKING DRAFT SEQUENCE.//0.60:321:5811Z98865

[15886] R-PLACE1006792//Homo sapiens chromosome 4 clone C0026P05 map 4P16, complete sequence.//2.9e-40:379:77//AC005599

[15887] R-PLACE1006795//Homo sapiens BAC clone RG281 G05 from 7p 15-p21, complete sequence.//6.2e-07:291:63//AC005083

[15888] R-PLACE1006800//HS_{—}2270_B1_D02_MR CIT Approved Human Genomic Sperm Library D Homo sapiens genomic clone Plate=2270 Col=3 Row=H, genomic survey sequence.//4.1e-76:367:99//AQ085793

[15889] R-PLACE1006805//Plasmodium falciparum 3D7 chromosome 12 PFYACB8-628 genomic sequence, WORKING DRAFT SEQUENCE, 9 unordered pieces.//0.00058:354:59//AC005507

[15890] R-PLACE1006815//HS_{—}3028_B1_B04_MF CIT Approved Human Genomic Sperm Library D Homo sapiens genomic clone Plate=3028 Col=7 Row=D, genomic survey sequence.//1.5e-33:251:77//AQ120174

[15891] R-PLACE1006819//Human DNA sequence from PAC 121 G 13 on chromosome 6 contains flow sorted chromosome 6 HindIII fragment ESTs. polymorphic CA repeat, CpG island, CpG island genomic fragments.//1.4e-76:544:84//Z86062

[15892] R-PLACE1006829

[15893] R-PLACE1006860

[15894] R-PLACE1006867//Human DNA sequence *** SEQUENCING IN PROGRESS *** from clone 323M4, WORKING DRAFT SEQUENCE.//3.2e-107:549:95//AL033378

[15895] R-PLACE1006878//Homo sapiens full-length insert cDNA clone ZB55G05.//1.4e-46:241:97//AF086155

[15896] R-PLACE1006883//Homo sapiens chromosome 16, cosmid clone 360H6 (LANL), complete sequence.//1.3e-38:283:85//AC004232

[15897] R-nnnnnnnnnnnn

[15898] R-PLACE1006904//Human DNA sequence from PAC 360E18 on chromosome X contains EST, CpG island and polymorphic CA repeat.//4.1e-15:477:62//Z82203

[15899] R-PLACE1006917//Homo sapiens Xp22 bins 45-47 BAC GSHB-665N22 (Genome Systems Human BAC Library) complete sequence.//1.3e-42:305:87//AC005184

[15900] R-PLACE1006932

[15901] R-PLACE1006935//Human DNA sequence from PAC 117P 19 on chromosome X.//0.0014:114:74//Z86061

[15902] R-nnnnnnnnnnnn//Mouse mRNA for germ cell specific protein APG-1, complete cds.//9.5e-85:590:83//D49482

[15903] R-PLACE1006961//Homo sapiens chromosome 17, clone hRPK.349_A_{—}8, complete sequence.//6.7e-42:295:86//AC005544

[15904] R-PLACE1006962//Homo sapiens Xp22 PAC RPCII-167A22 (from Roswell Park Cancer Center) complete sequence.//1.1e-19:302:71//AC002349

[15905] R-PLACE1006966//HS_{—}2219_B2_C02_MF CIT Approved Human Genomic Sperm Library D Homo sapiens genomic clone Plate=2219 Col=4 Row=F, genomic survey sequence.//0.019:180:63//AQ145873

[15906] R-PLACE1006989

[15907] R-PLACE1007014

[15908] R-PLACE1007021//Homo sapiens chromosome 12 p13.3 clone RPCI3-454B23, WORKING DRAFT SEQUENCE, 48 unordered pieces.//1.6e-23:362:70//AC005845

[15909] R-PLACE1007045//Human DNA sequence *** SEQUENCING IN PROGRESS *** from clone 32BI, WORKING DRAFT SEQUENCE.//2.3e-90:584:86//AL023693

[15910] R-PLACE1007053//Homo sapiens clone DJ0810EO6, WORKING DRAFT SEQUENCE, 8 unordered pieces.//2.4e-108:550:96//AC004895

[15911] R-PLACE1007097//Homo sapiens DNA sequence from BAC 55C20 on chromosome 6. Contains a Spinal Muscular Atrophy (SMA3) LIKE gene overlapping with a beta-glucoronidase LIKE pseudogene. Contains a membrane protein LIKE pseudogene, a Glyceraldehyde 3-phosphate dehydrogenase (GAPDH) LIKE pseudogene, five predicted tRNA genes. Contains ESTs, GSSs (BAC end sequences) and a CA repeat polymorphism, complete sequence.//1.8e-103:552:93//AL021368

[15912] R-PLACE1007105//Mus musculus muskelin mRNA, complete cds.//2.7e-32:379:73//U72194

[15913] R-PLACE1007111//Plasmodium falciparum 3D7 chromosome 12 PFYAC69 genomic sequence, WORKING DRAFT SEQUENCE, 4 unordered pieces.//0.14:422:57//AC004688

[15914] R-PLACE1007112//Cynips cornifex cytb gene.//0.020:427:58//AJ228479

[15915] R-PLACE1007132//Homo sapiens full-length insert cDNA YH77E09.//5.7e-107:535:96//AF074987

[15916] R-PLACE1007140//Homo sapiens clone RG030L05, WORKING DRAFT SEQUENCE, 3 unordered pieces.//0.36:408:58//AC005050

[15917] R-PLACE1007178//Homo sapiens clone HEA4 Cri-du-chat region mRNA.//0.99:63:73//AF009283

[15918] R-PLACE1007226

[15919] R-PLACE1007238

[15920] R-PLACE1007239//Homo sapiens mRNA for transcription elongation factor S-II, hS-II-T1, complete cds.//2.0e-91:534:89//D50495

[15921] R-PLACE1007242//CITB1-E1-2512M9.TF CITBI-El Homo sapiens genomic clone 2512M9, genomic survey sequence.//1.3e-05:117:76//AQ279454

[15922] R-PLACE1007243//Prototheca wickerhamii 263-11 complete mitochondrial DNA.//0.21:284:58//U02970

[15923] R-PLACE1007257//Homo sapiens mRNA for dia-12c protein.//6.9e-113:607:93//Y15908

[15924] R-PLACE1007274//Homo sapiens chromosome 17, clone hRPK.394_K_{—}10, complete sequence.//4.4e-10:135:74//AC006080

[15925] R-PLACE1007276//Homo sapiens BAC clone 255A7 from 8q21 containing NBS1 gene, complete sequence.//1.7e-36:435:72//AF069291

[15926] R-PLACE1007282//B. garinii (strain TIs1) p83/100 gene (partial).//0.95:183:60//X81533

[15927] R-PLACE1007286//RPCI 1-13L8.TV RPCI-11 Homo sapiens genomic clone RPCI-11-13L8, genomic survey sequence.//6.1e-55:519:76//B75158

[15928] R-PLACE1007301//Human DNA sequence from PAC 106H8 on chromosome 1q24. Contains PHOSPHATIDYLINISITOL-GLYCAN class C (PIG-C) and DYNAMIN-3 genes. Contains ESTs and STSs and a CpG island.//0.75:180:62//Z97195

[15929] R-PLACE1007317//Drosophila dasycnemia 16S ribosomal RNA gene, mitochondrial gene for mitochondrial RNA, partial sequence.//0.59:236:59//U94253

[15930] R-PLACE1007342

[15931] R-PLACE1007346//Homo sapiens estrogen-responsive B box protein (EBBP) mRNA, complete cds.//3.7e-65:367:91//AF096870

[15932] R-PLACE1007367//Plasmodium falciparum 3D7 chromosome 12 PFYACB8-628 genomic sequence, WORKING DRAFT SEQUENCE, 9 unordered pieces.//1.0e-06:385:62//AC005507

[15933] R-PLACE1007375//Plasmodium falciparum 3D7 chromosome 12 PFYACI 122 genomic sequence, WORKING DRAFT SEQUENCE, 3 unordered pieces.//0.10:309:59//AC004709

[15934] R-PLACE1007386//Reclinomonas americana mitochondrial DNA, complete genome.//0.0012:403:58//AF007261

[15935] R-PLACE1007402//HS_{—}2055_A2_D03_MR CIT Approved Human Genomic Sperm Library D Homo sapiens genomic clone Plate=2055 Col=6 Row=G, genomic survey sequence.//0.0046:88:79//AQ234824

[15936] R-PLACE1007409//Homo sapiens mitoxantrone resistance protein 1 mRNA, partial sequence.//7.6e-112:590:94//AF093771

[15937] R-PLACE1007416//Homo sapiens chromosome 19, cosmid R26894, complete sequence.//0.96:98:70//AC005594

[15938] R-PLACE1007450//Human DNA sequence *** SEQUENCING IN PROGRESS *** from clone 54B20, WORKING DRAFT SEQUENCE.//1.7e-39:308:82//Z98304

[15939] R-PLACE1007452//Homo sapiens PAC clone DJO320J15 from Xq23, complete sequence.//2.6e-59:389:82//AC004081

[15940] R-PLACE1007460

[15941] R-PLACE1007478//Homo sapiens 12q13.1 PAC RPCI3-197B17 (Roswell Park Cancer Institute Human PAC library) complete sequence.//7.0e-08:335:60//AC004241

[15942] R-PLACE1007484

[15943] R-PLACE1007488//Glossina morsitans morsitans 16S ribosomal RNA gene, mitochondrial gene for mitochondrial RNA, partial sequence.//2.5e-05:421:61//AF072373

[15944] R-PLACE1007507//Plasmodium falciparum MAL3P7, complete sequence.//2.3e-09:577:57//AL034559

[15945] R-PLACE1007511//Homo sapiens chromosome 17, clone hRPC.110_E_{—}20, complete sequence.//1.2e-79:387:96//AC004231

[15946] R-PLACE1007524//Homo sapiens chromosome 19, overlapping cosmids F18547, Fl 1133, R27945, R28830 and R32804, complete sequence.//3.4e-09:148:73//AC003682

[15947] R-PLACE1007525//Homo sapiens Chromosome 16 BAC clone CIT987SK-44M2, complete sequence.//4.7e-38:297:82//AC004381

[15948] R-PLACE1007544

[15949] R-PLACE1007547//Human laminin alpha 4 chain (LAMA4*-1) mRNA, complete cds.//4.0e-17:108:97//U77706

[15950] R-PLACE1007557//Human BAC clone RG343P13 from 7q31, complete sequence.//2.2e-45:390:77//AC002465

[15951] R-PLACE1007583//Human DNA sequence *** SEQUENCING IN PROGRESS *** from clone 545L17, WORKING DRAFT SEQUENCE.//1.0e-56:302:95//AL031665

[15952] R-PLACE1007598//Homo sapiens clone 23939 mRNA sequence.//1.5e-102:554:93//AF038179

[15953] R-PLACE1007618

[15954] R-PLACE1007621//Homo sapiens clone 23859 mRNA sequence.//1.4e-103:537:94//AF038176

[15955] R-PLACE1007632//High throughput sequencing of human chromosome 12, WORKING DRAFT SEQUENCE, 1 ordered pieces.//3.3e-76:289:94//AC005840

[15956] R-PLACE1007645//Homo sapiens full-length insert cDNA clone ZD76GI 0.//0.0080:96:77//AF086408

[15957] R-PLACE1007649//CIT-HSP-2308A18.TR CIT-HSP Homo sapiens genomic clone 2308A18, genomic survey sequence.//1.1e-82:412:9711AQ022149

[15958] R-PLACE1007677//Plasmodium falciparum chromosome 2, section 4 of 73 of the complete sequence.//0.0041:470:57//AE00367

[15959] R-PLACE1007688

[15960] R-PLACE1007690//Human Chromosome 16 BAC clone CIT987SK-A-418G10, complete sequence.//1.3e-22:162:91//AC002044

[15961] R-PLACE1007697

[15962] R-PLACE1007705//Human DNA sequence *** SEQUENCING IN PROGRESS *** from clone 460J8, WORKING DRAFT SEQUENCE.//4.4e-121:624:95//AL031662

[15963] R-PLACE1007706//Homo sapiens metalloprotease I (MP1) mRNA, complete cds.//1.8e-73:374:96//AF061243

[15964] R-PLACE1007725//Caenorhabditis elegans cosmid F38A5.//0.070:186:60//U70854

[15965] R-PLACE1007729//Human endogenous retrovirus HERV-K(HML6) proviral clone HML6.17 putative polymerase and envelope genes, partial cds, and 3′LTR.//3.8e-53:415:81//U60269

[15966] R-PLACE1007730//Homo sapiens mRNA for KIAA0685 protein, complete cds.//2.1e-92:556:89//AB014585

[15967] R-PLACE1007737//Homo sapiens clone Sb19.12 Alu-Yb8 sequence.//4.0e-43:302:77//AF015169

[15968] R-PLACE1007743//Plasmodium falciparum MAL3P8, complete sequence.//1.0e-06:533:59//AL034560

[15969] R-PLACE1007746//T. brucei mitochondrial maxicircle DNA encoding cytochrome c oxidase subunit I (COI), and NADH dehydrogenase subunits 4 and 5, complete cds.//0.28:386:58//M14820

[15970] R-PLACE1007791//D. discoideum gene for protein kinase.//0.17:263:60//Z37981

[15971] R-PLACE1007807//Human DNA sequence from clone 87808 on chromosome Xq21.1-21.33. Contains an EST, STSs, a GSS and genomic marker DXS472, complete sequence.//1.1e-72:324:88//AL031116

[15972] R-PLACE1007810//Homo sapiens chromosome 7 common fragile site, complete sequence.//2.2e-14:325:67//AF017104

[15973] R-PLACE1007829//Human BAC clone GS165104 from 7q21, complete sequence.//0.00052:455:61//AC002379

[15974] R-PLACE1007843//P. falciparum complete gene map of plastid-like DNA (IR-A).//0.0050:447:57//X95275

[15975] R-PLACE1007846//Homo sapiens genomic DNA, chromosome 21q22.2 (Down Syndrome region), segment 3/15, WORKING DRAFT SEQUENCE.//2.2e-111:570:95//AP000010

[15976] R-PLACE1007852//HS_{—}3028_B2_F04_MR CIT Approved Human Genomic Sperm Library D Homo sapiens genomic clone Plate=3028 Col=8 Row=L, genomic survey sequence.//1.3e-12:209:71//AQ131021

[15977] R-PLACE1007858//Homo sapiens mRNA for KIAA0766 protein, complete cds.//6.6e-110:574:94//AB018309

[15978] R-PLACE1007866//Homo sapiens DNA sequence from PAC 454M7 on chromosome Xq25-26.3. Contains the OCRL1 gene for Lowe Oculocerebrorenal Syndrome protein OCRL-1. Contains ESTs, STSs and GSSs, complete sequence.//1.6e-43:551:70//AL022162

[15979] R-PLACE1007877//Homo sapiens chromosome 5, BAC clone 34j15 (LBNL H169), complete sequence.//1.6e-22:222:78//AC005754

[15980] R-PLACE1007897//HS_{—}3113_B2_E04_T7 CIT Approved Human Genomic Sperm Library D Homo sapiens genomic clone Plate=3113 Col=8 Row=J, genomic survey sequence.//2.9e-72:381:95//AQ186905

[15981] R-PLACE1007908//Homo sapiens mRNA, chromosome I specific transcript KIAA0487.//8.8e-88:460:95//AB007956

[15982] R-PLACE1007946//Human chromosome Y cosmid 54E8 genomic sequence, WORKING DRAFT SEQUENCE.//4.9e-23:172:78//AC003095

[15983] R-PLACE1007954//Homo sapiens BAC clone NH0414C23 from Y, complete sequence.//1.7e-27:303:75//AC006157

[15984] R-PLACE1007955//Homo sapiens cyclin-D binding Myb-like protein mRNA, complete cds.//3.9e-102:513:95//AF084530

[15985] R-PLACE1007958//Homo sapiens cAMP-specific phosphodiesterase 8B (PDE8B) mRNA, partial cds.//2.2e-87:465:93//AF079529

[15986] R-PLACE1007969//Mus musculus myelin gene expression factor (MEF-2) mRNA, partial cds.//4.8e-72:556:81//U 13262

[15987] R-PLACE1007990//E. tenella antigen LPMC61 mRNA, partial cds.//0.043:273:63//M30933

[15988] R-PLACE1008000//Human DNA sequence *** SEQUENCING IN PROGRESS *** from clone 668J24, WORKING DRAFT SEQUENCE.//8.8e-10:453:62//AL034346

[15989] R-PLACE1008002//Homo sapiens clone DJ0613C23, WORKING DRAFT SEQUENCE, 4 unordered pieces.//9.0e-114:563:96//AC005628

[15990] R-PLACE1008044//Rattus norvegicus nuclear pore complex protein NUP107 mRNA, complete cds.//2.6e-44:509:72//L31840

[15991] R-PLACE1008045//Homo sapiens chromosome 5, BAC clone 79a6 (LBNL HI 72), complete sequence.//0.32:137:66//AC005592

[15992] R-PLACE1008080//Arabidopsis thaliana chromosome II BAC F10A12 genomic sequence, complete sequence.//0.082:292:59//AC006232

[15993] R-PLACE1008095//Homo sapiens BAC clone NH0364H22 from 2, complete sequence.//5.4e-27:260:76//AC005036

[15994] R-PLACE1008111//Human variable number tandem repeat (VNTR) region, allele 12R13′ to collagen type II (COL2A 1) gene.//2.2e-07:444:59//L10157

[15995] R-PLACE1008122//Homo sapiens chromosome 17, clone hRPK.142_H_j9, complete sequence.//1.9e-11:384:63//AC005919

[15996] R-PLACE1008129//Homo sapiens clone DJ1087M19, WORKING DRAFT SEQUENCE, 7 unordered pieces.//3.0e-10:189:66//AC004955

[15997] R-PLACE1008132//Human HepG2 3′ region cDNA, clone hmd5d06.//7.4e-47:320:86//D16939

[15998] R-PLACE1008177//Mouse mRNA for meiosis-specific nuclear structural protein I (MNS1), complete cds.//2.6e-32:410:70//D 14849

[15999] R-PLACE1008181//Caenorhabditis elegans cosmid C31H2.//0.055:358:60//U41748

[16000] R-PLACE1008198

[16001] R-nnnnnnnnnnnn//Homo sapiens mRNA for KIAA0530 protein, partial cds.//4.8e-103:551:93//AB011102

[16002] R-PLACE1008209//Human DNA sequence *** SEQUENCING IN PROGRESS *** from clone 1125AI1, WORKING DRAFT SEQUENCE.//4.6e-16:250:71//AL034549

[16003] R-PLACE1008231//Plasmodium falciparum 3D7 chromosome 12 PFYAC69 genomic sequence, WORKING DRAFT SEQUENCE, 4 unordered pieces.//0.13:341:60//AC004688

[16004] R-PLACE1008244//P. falciparum P.195 gene.//0.11:212:66//A04562

[16005] R-PLACE1008273//Human MEST mRNA, complete cds.//0.00013:52:100//D78611

[16006] R-nnnnnnnnnnnn

[16007] R-PLACE1008280//Homo sapiens chromosome 7 clone UWGC:g3586a160 from 7 p14-15, complete sequence.//1.5e-05:104:76//AC005272

[16008] R-PLACE1008309//Human ‘at’-rich region adjacent to alpha satellite DNA.//0.70:138:63//M80308

[16009] R-PLACE1008329//Homo sapiens chromosome 10 clone CIT-HSP-1240G16 map 10q25.1, complete sequence.//0.00061:150:68//AC005886

[16010] R-PLACE1008330//Homo sapiens chromosome 19, cosmid F21431, complete sequence.//4.8e-74:252:98//AC005176

[16011] R-PLACE1008331//Genomic sequence from Human 13, complete sequence.//1.0:176:65//AC001226

[16012] R-PLACE1008356//Homo sapiens meningioma-expressed antigen 5 (MEA5) mRNA, 3′ UTR.//2.5e-98:556:90//AF036145

[16013] R-PLACE1008368//HS-1039-A1-C10-MF.abi CIT Human Genomic Sperm Library C Homo sapiens genomic clone Plate=CT 821 Col=19 Row=E, genomic survey sequence.//1.2e-05:375:62//B36336

[16014] R-PLACE1008369//Homo sapiens genomic DNA, chromosome 21q22.2 (Down Syndrome region), segment 4/15, WORKING DRAFT SEQUENCE.//2.8e-10:466:61//AP000011

[16015] R-PLACE1008392//Homo sapiens chromosome 17, clone hRPK.471_L_{—}13, complete sequence.//1.0e-46:282:82//AC005244

[16016] R-PLACE1008398//Human DNA sequence *** SEQUENCING IN PROGRESS *** from clone 215D11, WORKING DRAFT SEQUENCE.//4.1e-10:529:94//AL034417

[16017] R-PLACE1008401//*** SEQUENCING IN PROGRESS *** Homo sapiens chromosome 4, BAC clone C0366H07; HTGS phase 1, WORKING DRAFT SEQUENCE, 28 unordered pieces.//0.18:379:58//AC004604

[16018] R-nnnnnnnnnnnn//Homo sapiens mRNA for p115, complete cds.//1.6e-1101:521:95//D86326

[16019] R-PLACE1008405//Human cosmid CR1-JC2015 at DOS289 in 10sp13.//6.8e-22:328:71//U15177

[16020] R-PLACE1008424

[16021] R-PLACE1008426//Homo sapiens genomic DNA of 8p21.3-p22 anti-oncogene of hepatocellular colorectal and non-small cell lung cancer, segment 7/11 .//7.5e-101:505:96//AB020864

[16022] R-PLACE1008429//Human DNA sequence from clone 20J23 on chromosome Xq26.2-27.2 Contains ras-related C3 botulinum toxin substrate 1 (P21-RACI) (ras-like protein TC25) EST, CA repeat, STS, CpG island, complete sequence.//1.2e-11:118:78/HAL022576

[16023] R-PLACE1008437//H. sapiens genomic DNA (PAC 838L14) from chromosome 11, WORKING DRAFT SEQUENCE.//2.2e-06:159:69//Y12335

[16024] R-PLACE1008455

[16025] R-PLACE1008457//Homo sapiens chromosome 17, Neurofibromatosis 1 locus, complete sequence.//1.2e-109:588:93//AC004526

[16026] R-PLACE1008465//CIT978SK-A-28A11.TVE CIT978SK Homo sapiens genomic clone A-28A11, genomic survey sequence.//1.1e-10:133:77//B78696

[16027] R-PLACE1008488

[16028] R-PLACE1008524//Human DNA sequence *** SEQUENCING IN PROGRESS *** from clone 34B21, WORKING DRAFT SEQUENCE.//7.3e-120:612:95//AL031778

[16029] R-PLACE1008531//Homo sapiens wbscr1 (WBSCR1) and replication factor C subunit 2 (RFC2) genes, complete cds.//8.5e-96:510:93//AF045555

[16030] R-PLACE1008532

[16031] R-PLACE1008533

[16032] R-PLACE1008568//HS_{—}3218_B2_D08_T7 CIT Approved Human Genomic Sperm Library D Homo sapiens genomic clone Plate=3218 Col=16 Row=H, genomic survey sequence.//0.0042:295:621/AQ214623

[16033] R-PLACE1008584//Human PAC clone DJ0596009 from 7 p15, complete sequence.//5.0e-26:254:66//AC003074

[16034] R-PLACE1008621//Homo sapiens chromosome 17, clone hRPK.346_K_{—}10, complete sequence.//4.0e-78:498:86//AC006120

[16035] R-PLACE1008626//Human DNA sequence *** SEQUENCING IN PROGRESS *** from clone 97P20, WORKING DRAFT SEQUENCE.//5.5e-06:228:67//AL031297

[16036] R-PLACE1008627//Cricetulus griseus mRNA for Zn finger factor.//3.4e-20:335:71//Y12836

[16037] R-PLACE1008629//Homo sapiens clone DJ0309D19, WORKING DRAFT SEQUENCE, 12 unordered pieces.//0.55:326:58//AC004826

[16038] R-PLACE1008630//Homo sapiens genomic DNA, 21q region, clone: B175P11X96, genomic survey sequence.//0.13:440:55//AGO 11096

[16039] R-PLACE1008643//Human BAC clone RG083J23 from 7q31, complete sequence.//1.3e-58:356:82//AC004001

[16040] R-PLACE1008650//Homo sapiens pleiotropic regulator 1 (PLRG1) mRNA, complete cds.//2.4e-88:434:97//AF044333

[16041] R-PLACE1008693//CIT-HSP-2025M9.TR CIT-HSP Homo sapiens genomic clone 2025M9, genomic survey sequence.//1.2e-41:300:82//B64742

[16042] R-PLACE1008696//Homo sapiens NADH dehydrogenase-ubiquinone Fe-S protein 823 kDa subunit (NDUFS8) gene, nuclear gene encoding mitochondrial protein, complete cds.//4.8e-31:320:75//AF038406

[16043] R-PLACE1008715//Human DNA sequence *** SEQUENCING IN PROGRESS *** from clone 799N4, WORKING DRAFT SEQUENCE.//0.074:478:58//AL022147

[16044] R-PLACE1008748//CIT-HSP-2170P12.TR CIT-HSP Homo sapiens genomic clone 2170P12, genomic survey sequence.//8.5e-42:160:86//B90841

[16045] R-PLACE1008757//Homo sapiens 12q24.2 PAC RPCI4-765H13 (Roswell Park Cancer Institute Human PAC Library) complete sequence.//0.99:211:61//AC005864

[16046] R-PLACE1008790//Rattus norvegicus clone1 polymeric immunoglobulin receptor mRNA 3′ untranslated region, GA rich region, and microsatellites with GGA-triplet and GAA-triplet repeats.//0.052:108:68//U00762

[16047] R-PLACE1008798//Homo sapiens full-length insert cDNA clone YZ86C05.//7.7e-58:285:100//AF086088

[16048] R-PLACE1008807//CIT-HSP-2366014.TR CIT-HSP Homo sapiens genomic clone 2366014, genomic survey sequence.//3.5e-35:223:89//AQ079210

[16049] R-PLACE1008808//Homo sapiens exonuclease homolog RAD1 (RAD1) mRNA, complete cds.//2.3e-97:499:95//AF030933

[16050] R-PLACE1008813//Rattus norvegicus rsec15 mRNA, complete cds.//9.7e-45:394:78//AF032668

[16051] R-PLACE1008851//Human Chromosome 15q26.1 PAC clone pDJ460g16, WORKING DRAFT SEQUENCE, 3 unordered pieces.//2.9e-28:207:87//AC004581

[16052] R-nnnnnnnnnnnn//CIT-HSP-2172B3.TF CIT-HSP Homo sapiens genomic clone 2172B3, genomic survey sequence.//8.9e-30:166:97//B93289

[16053] R-PLACE1008867//Homo sapiens BAC clone RG054D04 from 7q31, complete sequence.//3.5e-76:404:95//AC005058

[16054] R-PLACE1008887//Homo sapiens clone DJ0943F02, WORKING DRAFT SEQUENCE, 3 unordered pieces.//7.7e-37:585:67//AC004932

[16055] R-PLACE1008902//Homo sapiens chromosome Y, clone hCIT.494_G_{—}17, complete sequence.//0.0022:409:60//AC005820

[16056] R-PLACE1008920//Homo sapiens mRNA for KIAA0765 protein, partial cds.//8.2e-55:344:89//AB018308

[16057] R-PLACE1008925//Caenorhabditis elegans DNA *** SEQUENCING IN PROGRESS *** from clone Y53F4, WORKING DRAFT SEQUENCE.//0.0014:398:58//Z92860

[16058] R-PLACE1008934

[16059] R-PLACE1008941//Homo sapiens chromosome 17, clone hRPK.293_K_{—}20, complete sequence.//9.8e-84:429:92//AC005495

[16060] R-PLACE1008947

[16061] R-PLACE1009020

[16062] R-PLACE1009027//Human DNA sequence from clone 914P 14 on chromosome Xq23 Contains calpain-like protease gene, DCX (doublecortin) ESTs, CA repeat, GSS, complete sequence.//1.3e-82:434:95//AL031117

[16063] R-PLACE1009039//Human DNA sequence from clone 276K20 on chromosome 6p22.1-22.3. Contains STSs, GSSs and a putative CpG island, complete sequence.//0.00010:297:58//AL031391

[16064] R-PLACE1009045//Homo sapiens chromosome 17, clone hRPC.117_B_{—}12, complete sequence.//2.9e-06:160:70//AC004707

[16065] R-PLACE1009048//Human DNA sequence from clone 51 IE16 on chromosome 6p24.3-25.1. Contains the last coding exon of the gene for P18 component of aminoacyl-tRNA synthetase complex, part of an unknown gene downstream of a putative CpG island, and an STS with a CA repeat polymorphism, complete sequence.//1.3e-16:339:66//AL023694

[16066] R-PLACE1009050//Aedes aegypti gene sequence, primary transcript.//0.40:393:59//L17023

[16067] R-PLACE1009060//Mus musculus mRNA for Alix-SF (ALG-2-interacting protein X, short form, complete CDS.//0.00075:79:83//AJ005074

[16068] R-PLACE1009090//Homo sapiens chromosome 1, BAC CIT-HSP-292g8 (BC262482), complete sequence.//6.7e-13:212:73//AC004783

[16069] R-PLACE1009094//Caenorhabditis elegans cosmid C49F8, complete sequence.//0.49:221:61//Z70206

[16070] R-PLACE1009099

[16071] R-PLACE1009110//Homo sapiens Xp22 BAC GS-321G17 (Genome Systems Human BAC library) complete sequence.//5.1e-17:301:66//AC004025

[16072] R-PLACE1009111//Plasmodium falciparum 3D7 chromosome 12 PFYACB8-420 genomic sequence, WORKING DRAFT SEQUENCE, 14 unordered pieces.//1.2e-06:234:61//AC005140

[16073] R-PLACE1009130//Plasmodium falciparum MAL3P6, complete sequence.//7.5e-06:426:58//Z98551

[16074] R-PLACE1009150//Homo sapiens *** SEQUENCING IN PROGRESS ***, WORKING DRAFT SEQUENCE.//2.3e-118:614:95//AJ011929

[16075] R-PLACE1009155//Homo sapiens genomic DNA, chromosome 21q11.1, segment 2/28, WORKING DRAFT SEQUENCE.//1.4e-107:584:93//AP000031

[16076] R-PLACE1009158//Homo sapiens full-length insert cDNA clone YPIOD03.//1.9e-105:539:95//AF085876

[16077] R-PLACE1009166//Homo sapiens chromosome 17, clone hRPK.180_P_{—}8, complete sequence.//2.8e-44:360:71//AC005972

[16078] R-PLACE1009172//Human cosmid QLL2C9 from Xq28.//4.1e-37:401:74//Z47046

[16079] R-PLACE1009174//Homo sapiens PAC clone DJO907C10 from 7q31-3q32, complete sequence.//2.1e-17:140:81//AC004925

[16080] R-PLACE1009183//Homo sapiens DNA sequence from PAC 418A9 on chromosome 6q21. Contains the first (5′) two exons of a CDK8 (Cell Division Protein Kinase 8) LIKE gene, a Neutral Calponin LIKE pseudogene, ESTs and STSs, complete sequence.//1.9e-46:572:69//Z84480

[16081] R-PLACE1009186//Human Chromosome X, complete sequence.//0.016:322:61//AC004070

[16082] R-PLACE1009190//Plasmodium falciparum MAL3P8, complete sequence.//0.050:487:58//AL034560

[16083] R-PLACE1009200//H. sapiens mRNA for sortilin.//1.0e-31:195:92//X98248

[16084] R-PLACE1009230//Homo sapiens chromosome 19, CIT-HSP BAC 490g23 (BC338531), complete sequence.//1.8e-75:364:85//AC005392

[16085] R-PLACE1009246//Cricetulus griseus SRD-2 mutant sterol regulatory element binding protein-2 (SREBP-2) mRNA, complete cds.//6.6e-44:525:71//U22818

[16086] R-PLACE1009308

[16087] R-PLACE1009319//Homo sapiens 12q13.1 PAC RPCII-228P16 (Roswell Park Cancer Institute Human PAC Library) complete sequence.//0.00010:132:75//AC004801

[16088] R-PLACE1009328//Homo sapiens chromosome 17, clone hRPK.346_K_{—}10, complete sequence.//3.3e-87:576:85//AC006120

[16089] R-PLACE1009335//Borrelia burgdorferi (section 62 of 70) of the complete genome.//0.32:315:60//AE001176

[16090] R-PLACE1009338//Plasmodium falciparum 3D7 chromosome 12 PFYACB8-420 genomic sequence, WORKING DRAFT SEQUENCE, 14 unordered pieces.//6.8e-05:411:59//AC005140

[16091] R-PLACE1009368//Homo sapiens PAC clone DJ1179J19 from 7q11.23-q21, complete sequence.//0.00040:280:61//AC004989

[16092] R-PLACE1009375//D. yakuba mitochondrial DNA for origin of replication, small ribosomal RNA, transfer RNAs tRNA-fMet, tRNA-Gln, tRNA-Ile and tRNA-Val.//1.1e-08:444:60//X05915

[16093] R-PLACE1009388

[16094] R-PLACE1009398//Homo sapiens BAC clone GS01E15 from 5q31, complete sequence.//0.065:279:61//AC002427

[16095] R-nnnnnnnnnnnn//Homo sapiens clone NH0486122, WORKING DRAFT SEQUENCE, 5 unordered pieces.//1.0e-06:253:64//AC005038

[16096] R-PLACE1009410//Homo sapiens chromosome 17, clone hRPK.142_H_{—}9, complete sequence.//9.8e-112:561:96//AC005919

[16097] R-PLACE1009434//Human DNA sequence from clone 459L4 on chromosome 6p22.3-24.1 Contains EST, STS, GSS, complete sequence.//2.2e-21:126:79//AL031120

[16098] R-PLACE1009443//Homo sapiens nucleolar protein Nop30 and cytoplasmic protein Myp (NOP) gene, alternatively spliced products, complete cds.//4.5e-14:117:91//AF064598

[16099] R-PLACE1009444//Homo sapiens phosphatidylinositol 4-kinase mRNA, complete cds.//9.6e-85:479:90//L36151

[16100] R-PLACE1009459

[16101] R-PLACE1009476//Homo sapiens Chromosome 16 BAC clone CIT987SK-A-67A1, complete sequence.//5.6e-101:540:94//AC004531

[16102] R-PLACE1009477//Homo sapiens, clone hRPK.15_A_{—}1, complete sequence.//3.4e-46:284:91//AC006213

[16103] R-PLACE1009493//Human Chromosome 16 BAC clone CIT987SK-A-363E6, complete sequence.//5.5e-107:581:92//U91321

[16104] R-PLACE1009524//Homo sapiens DNA sequence from PAC 63G5 on chromosome 22q12.3-13.1. Contains part of a gene for a human SEC7 homolog B2-1 (cytohesin-2, Arno, ARF exchange factor) LIKE protein, an unknown gene and a gene coding for a Leucine rich protein. Contains ESTs, STSs and GSSs, complete sequence.//0.74:301:61//Z94160

[16105] R-PLACE1009539//Human DNA sequence *** SEQUENCING IN PROGRESS *** from clone 167Al 9, WORKING DRAFT SEQUENCE.//5.7e-29:357:74//AL031427

[16106] R-PLACE1009542//CIT-HSP-2166P10.TRB CIT-HSP Homo sapiens genomic clone 2166P10, genomic survey sequence.//2.6e-10:145:75//B89614

[16107] R-PLACE1009571//RPCI11-61J16.TK RPCII 1 Homo sapiens genomic clone R-61J16, genomic survey sequence.//0.016:68:80//AQ202146

[16108] R-PLACE1009581

[16109] R-PLACE1009595//Homo sapiens clone DJ56J10, complete sequence.//1.8e-38:365:79//AC005006

[16110] R-PLACE1009596//Human DNA sequence *** SEQUENCING IN PROGRESS *** from clone 501A4, WORKING DRAFT SEQUENCE.//1.2e-29:314:76//Z98051

[16111] R-PLACE1009607//cSRL-77g9-u cSRL flow sorted Chromosome 11 specific cosmid Homo sapiens genomic clone cSRL-77g9, genomic survey sequence.//2.1e-05:142:69//B06230

[16112] R-PLACE1009613//Plasmodium falciparum DNA *** SEQUENCING IN PROGRESS * from contig 4-89, complete sequence.//3.6e-08:434:59HAL010266

[16113] R-PLACE1009621//Sequence 50 from patent U.S. Pat. No. 5,691,147.//1.5e-20:235:73//I76222

[16114] R-PLACE1009622//CIT-HSP-2023D13.TFB CIT-HSP Homo sapiens genomic clone 2023D13, genomic survey sequence.//0.72:176:62//B81271

[16115] R-PLACE1009637//P. falciparum complete gene map of plastid-like DNA (IR-B).//0.0068:396:59//X95276

[16116] R-PLACE1009639//Arabidopsis thaliana DNA chromosome 4, BAC clone F10M6 (ESSAII project).//0.013:521:58//AL021811

[16117] R-PLACE1009659//Homo sapiens mRNA for KIAA0587 protein, complete cds.//1.0e-107:589:92//AB011159

[16118] R-PLACE1009665//Human PAC clone DJ0658N05 from 7p21, complete sequence.//8.4e-72:487:85//AC003075

[16119] R-PLACE1009670//Homo sapiens genethonin 1 mRNA, complete cds.//2.0e-61:310:97//AF062534

[16120] R-PLACE1009708//Homo sapiens clone DJ0935KI6, complete sequence.//2.8e-103:542:94//AC0060111

[16121] R-PLACE1009721//Human Cosmid g0771a222 from 7q31.3, complete sequence.//4.6e-85:518:88//AC000109

[16122] R-PLACE1009731//Homo sapiens DNA sequence from PAC 434014 on chromosome 1q32.3.-41. Contains the HSD11B1 gene for Hydroxysteroid (11-beta) Dehydrogenase 1, the ADORA2BP adenosine A2b receptor LIKE pseudogene, the IRF6 gene for Interferon Regulatory Factor 6 and two novel genes. Contains ESTs and GSSs, complete sequence.//0.0033:215:65//AL022398

[16123] R-PLACE1009763//Homo sapiens UBA3 (UBA3) mRNA, complete cds.//6.2e-116:598:95//AF046024

[16124] R-PLACE1009794

[16125] R-nnnnnnnnnnnn//Human DNA sequence from clone 1189B24 on chromosome Xq25-26.3. Contains NADH-Ubiquinone Oxidoreductase MLRQ subunit (EC 1.6.5.3, EC 1.6.99.3, CI-MLRQ), Tubulin Beta and Proto-oncogene Tyrosine-protein Kinase FER (EC 2.7.1.112, P94-FER, C-FER, TYK3) pseudogenes, and part of a novel gene similar to hypothetical proteins S. pombe C22F3.14C and C. elegans C16A3.8. Contains ESTs, an STS and GSSs, complete sequence.//7.5e-88:191:96//AL030996

[16126] R-PLACE1009845//Homo sapiens DNA sequence from PAC 234H5 on chromosome 6q21. Contains an unknown gene, ESTs and STSs, complete sequence.//8.7e-19:226:69/HZ98172

[16127] R-PLACE1009879//Homo sapiens genomic DNA, 21q region, clone: 149C3A68, genomic survey sequence.//2.1e-29:230:76//AG002672

[16128] R-PLACE1009886//Homo sapiens PAC clone DJ0997N05 from 7q11.23-q21.1, complete sequence.//0.99:203:61//AC004945

[16129] R-PLACE1009888//Homo sapiens chromosome 19, BAC CIT-B-393i15 (BC301323), complete sequence.//5.3e-91:577:88//AC006116

[16130] R-nnnnnnnnnnnn

[16131] R-PLACE1009921//Homo sapiens cosmid clone HDAB (IS149) insert DNA, complete cosmid.//4.7e-81:385:84//M63005

[16132] R-PLACE1009924//HIS_{—}3151 B1B10 MR CIT Approved Human Genomic Sperm Library D Homo sapiens genomic clone Plate=3151 Col=19 Row=D, genomic survey sequence.//5.5e-47:240:99//AQ167412

[16133] R-PLACE1009925//CIT978SK-A-931F6.TV CIT978SK Homo sapiens genomic clone A-931F6, genomic survey sequence.//0.00010:159:68//B51673

[16134] R-PLACE1009935//Plasmodium falciparum 3D7 chromosome 12 PFYAC492 genomic sequence, WORKING DRAFT SEQUENCE, 5 unordered pieces.//0.081:238:65//AC005308

[16135] R-PLACE1009947//Homo sapiens PAC clone 248015 from 13q12-q13, complete sequence.//1.0:353:58//AC002483

[16136] R-PLACE1009971//Homo sapiens full-length insert cDNA clone ZD38E12.//3.7e-11:152:75//AF086247

[16137] R-PLACE1009992

[16138] R-PLACE1009995//Plasmodium falciparum chromosome 2, section 4 of 73 of the complete sequence.//0.0019:305:61//AE001367

[16139] R-PLACE1009997//Homo sapiens chromosome 10 clone CIT987SK-1175G20 map 10q25.2-10q25.3, complete sequence.//1.8e-43:462:76//AC005874

[16140] R-PLACE1010023//HS_{—}3018_B1_H10_T7 CIT Approved Human Genomic Sperm Library D Homo sapiens genomic clone Plate=3018 Col=19 Row=P, genomic survey sequence.//0.00013:198:63//AQ093513

[16141] R-PLACE1010031//Human DNA sequence from clone 30M3 on chromosome 6p22.1-22.3. Contains three novel genes, one similar to C. elegans Y63D3A.4 and one similar to (predicted) plant, worm, yeast and archaea bacterial genes, and the first exon of the KIAA0319 gene. Contains ESTs, GSSs and putative CpG islands, complete sequence.//7.4e-115:581:96//AL031775

[16142] R-PLACE1010053//M. musculus Spnr mRNA for RNA binding protein.//1.9e-05:136:74//X84692

[16143] R-PLACE1010069//CIT-HSP-2328B12.TF CIT-HSP Homo sapiens genomic clone 2328B12, genomic survey sequence.//2.6e-60:324:94//AQ042094

[16144] R-PLACE1010074//Homo sapiens sorting nexin 2 (SNX2) mRNA, complete cds.//4.6e-87:543:88//AF065482

[16145] R-PLACE1010076//*** SEQUENCING IN PROGRESS *** Homo sapiens chromosome 4, BAC clone C0473M13; HTGS phase 1, WORKING DRAFT SEQUENCE, 4 unordered pieces.//6.3e-08:489:58//AC005699

[16146] R-PLACE1010083

[16147] R-PLACE1010089//F19F22-Sp6 IGF Arabidopsis thaliana genomic clone F19F22, genomic survey sequence.//0.14:400:59/11B10583

[16148] R-PLACE1010096//R. norvegicus mRNA for 100 kDa protein.//4.3e-91:562:87//X64411

[16149] R-PLACE1010102//Apis mellifera tRNA-Leu cytochrome oxidase II intergenic spacer region, mitochondrial sequence.//1.5e-08:357:60//AF039556

[16150] R-PLACE1010105//Plasmodium falciparum chromosome 2, section 11 of 73 of the complete sequence.//4.0e-09:510:59//AE001374

[16151] R-PLACE1010106//Human DNA sequence *** SEQUENCING IN PROGRESS *** from clone 54B20, WORKING DRAFT SEQUENCE.//1.4e-12:194:73//Z98304

[16152] R-PLACE1010134

[16153] R-PLACE1010148//HS_{—}3128_A1_D09_MR CIT Approved Human Genomic Sperm Library D Homo sapiens genomic clone Plate=3128 Col=17 Row=G, genomic survey sequence.//0.17:281:61//AQ140790

[16154] R-PLACE1010152//Mouse mRNA for arylhydrocarbon receptor, complete cds.//3.1e-45:351:81//D38417

[16155] R-PLACE1010181//Homo sapiens clone DJ0914M06, WORKING DRAFT SEQUENCE, 1 unordered pieces.//3.6e-06:207:66//AC004928

[16156] R-PLACE1010194//HS_{—}2232_B1_H10_MR CIT Approved Human Genomic Sperm Library D Homo sapiens genomic clone Plate=2232 Col=19 Row=P, genomic survey sequence.//2.4e-08:134:7411AQ185425

[16157] R-PLACE1010202//Human DNA sequence from clone 227L5 on chromosome Xp11.22-11.3. Contains a Keratin, Type 1 Cytoskeletal 18 (KRT18, CYK18, K18, CK18) pseudogene and an STS, complete sequence.//0.00035:383:61//AL031585

[16158] R-PLACE1010231//Human DNA sequence *** SEQUENCING IN PROGRESS * from clone 287G 14, WORKING DRAFT SEQUENCE.//1.2e-95:519:94//AL033377

[16159] R-PLACE1010261

[16160] R-PLACE1010270//H. sapiens CpG island DNA genomic Mse1 fragment, clone 85a6, reverse read cpg85a6.rt1a.//0.068:171:63//Z63482

[16161] R-PLACE1010274//S. douglasii gene for cytochrome b.//4.5e-07:276:63//X59280

[16162] R-PLACE1010293//Homo sapiens chromosome 2 PAC RPCI3-417E16 (Roswell Park Cancer Institute Human PAC library) complete sequence.//4.7e-91:522:90//AC004464

[16163] R-PLACE1010321

[16164] R-PLACE1010324//Caenorhabditis elegans DNA *** SEQUENCING IN PROGRESS *** from clone Y38E10, WORKING DRAFT SEQUENCE.//5.7e-08:484:57//AL021149

[16165] R-PLACE1010329//Homo sapiens Chromosome 22q11.2 Cosmid Clone 50d10 In IGLC Region, complete sequence.//7.9e-35:328:79//AC000024

[16166] R-PLACE1010341//Homo sapiens clone DJ1125K23, WORKING DRAFT SEQUENCE, 21 unordered pieces.//1.3e-31:418:66//AC004971

[16167] R-PLACE1010362

[16168] R-PLACE1010364//Mus cookii mitochondrion DNA fragment.//0.23:162:64//M77098

[16169] R-PLACE1010383//Homo sapiens chromosome 17, clone hCIT.186_H_{—}2, complete sequence.//1.4e-105:543:95//AC004675

[16170] R-PLACE1010401//Human Chromosome 15q11-q13 PAC clone pDJ223c9 from the Prader-Willi/Angelman Syndrome region, complete sequence.//0.00017:268:62//AC004137

[16171] R-PLACE1010481//Bos taurus C5-glucuronyl epimerase mRNA, partial cds.//8.6e-79:556:83//AF003927

[16172] R-PLACE1010491//Homo sapiens Cre binding protein-like 2 mRNA, complete cds.//7.3e-88:438:96//AF039081

[16173] R-PLACE1010492//HSS_{—}3169_B2_B04_T7 CIT Approved Human Genomic Sperm Library D Homo sapiens genomic clone Plate=3169 Col=8 Row=D, genomic survey sequence.//0.98:171:63//AQ169892

[16174] R-PLACE1010522//WORKING DRAFT SEQUENCE, 6 unordered pieces.//0.34:407:62//AC006082

[16175] R-nnnnnnnnnnnn

[16176] R-PLACE1010562//CITBI-EI-2503B16.TF CITBI-EI Homo sapiens genomic clone 2503B16, genomic survey sequence.//6.4e-17:152:8411AQ265929

[16177] R-PLACE1010579//Torulopsis glabrata mitochondrial gene for ribosomal protein var1.//1.7e-05:271:65//X02893

[16178] R-PLACE1010580

[16179] R-PLACE1010599

[16180] R-PLACE1010616//Human BAC clone RG343P13 from 7q31, complete sequence.//3.0e-13:151:75//AC002465

[16181] R-PLACE1010622//Arabidopsis thaliana BAC F 1104.//0.00031:366:60//AF096370

[16182] R-PLACE1010624//Homo sapiens chromosome 7q22 sequence, complete sequence.//8.2e-34:322:79//AF053356

[16183] R-PLACE1010628//Homo sapiens clone DJ0647C14, WORKING DRAFT SEQUENCE, 21 unordered pieces.//2.3e-97:515:94//AC004846

[16184] R-PLACE1010629//HS_{—}3003_A2_C08_MR CIT Approved Human Genomic Sperm Library D Homo sapiens genomic clone Plate=3003 Col=16 Row=E, genomic survey sequence.//5.6e-60:321:9511AQ130493

[16185] R-PLACE1010630//Plasmodium falciparum chromosome 2, section 19 of 73 of the complete sequence.//0.051:372:59//AE001382

[16186] R-PLACE1010631//Homo sapiens mRNA for KIAA0530 protein, partial cds.//2.6e-92:497:93//AB011102

[16187] R-PLACE1010661//CIT-HSP-2008K15.TR CIT-HSP Homo sapiens genomic clone 2008K15, genomic survey sequence.//5.7e-27:160:95//B57089

[16188] R-PLACE1010662//Caenorhabditis elegans cosmid C12C8, complete sequence.//9.4e-09:151:73//Z81467

[16189] R-PLACE1010702//CIT-HSP-2314C3.TR CIT-HSP Homo sapiens genomic clone 2314C3, genomic survey sequence.//1.3e-90:459:96//AQ028536

[16190] R-PLACE1010714//Saccharomyces douglasii mitochondrial tRNA-Ser and tRNA-Phe genes, partial sequence, and Varlp (varl) gene, mitochondrial gene encoding mitochondrial protein, complete cds.//5.3e-08:478:58//U49822

[16191] R-PLACE1010720//Homo sapiens chromosome-associated protein-C (hCAP-C) mRNA, partial cds.//3.8e-55:300:95//AF092564

[16192] R-PLACE1010739//Human DNA sequence from clone 393P23 on chromosome Xq21.1-21.33. Contains GSSs, complete sequence.//3.4e-89:507:90//Z95400

[16193] R-PLACE1010743

[16194] R-PLACE1010761//Homo sapiens chromosome 17, clone hRPK.294_J_{—}22, complete sequence.//3.0e-103:511:97//AC005921

[16195] R-PLACE1010771

[16196] R-PLACE1010786

[16197] R-PLACE1010800//Homo sapiens clone NHOO84K19, WORKING DRAFT SEQUENCE, 30 unordered pieces.//1.8e-43:545:71//AC005682

[16198] R-PLACE1010802//Phoebis agarithe large subunit ribosomal RNA gene, partial sequence; tRNA-Val gene, complete sequence; and small subunit ribosomal RNA gene, partial sequence, mitochondrial genes for mitochondrial RNAs.//1.9e-09:492:59//AF044862

[16199] R-PLACE1010811//Homo sapiens Xp22 BAC GSHB-257G1 (Genome Systems BAC Library) complete sequence.//0.041:415:59//AC002524

[16200] R-PLACE1010833

[16201] R-PLACE1010856//Plasmodium falciparum 3D7 chromosome 12 PFYAC812 genomic sequence, WORKING DRAFT SEQUENCE, 8 unordered pieces.//0.0022:512:55//AC004153

[16202] R-PLACE1010857//Homo sapiens genomic DNA of 8p21.3-p22 anti-oncogene of hepatocellular colorectal and non-small cell lung cancer, segment 11/11 .//4.9e-85:507:90//AB020868

[16203] R-PLACE1010870//RPCII 1-59K21.TK RPCII 1 Homo sapiens genomic clone R-59K21, genomic survey sequence.//8.2e-85:422:97//AQ195697

[16204] R-PLACE1010877//Homo sapiens mRNA for KIAA0610 protein, partial cds.//7.0e-100:501:96//AB011182

[16205] R-PLACE1010891//Homo sapiens chromosome X, clone 592, WORKING DRAFT SEQUENCE, 8 unordered pieces.//0.10:162:61//AC002489

[16206] R-PLACE1010896//Plasmodium falciparum 3D7 chromosome 12 PFYAC181 genomic sequence, WORKING DRAFT SEQUENCE, 8 unordered pieces.//0.00032:409:59//AC005505

[16207] R-PLACE1010900//Homo sapiens DNA, trinucleotide repeats region.//3.2e-07:180:71//AB018488

[16208] R-PLACE1010916//Plasmodium falciparum DNA *** SEQUENCING IN PROGRESS * from MAL4P1, WORKING DRAFT SEQUENCE.//0.041:205:60//AL034557

[16209] R-PLACE1010917

[16210] R-PLACE1010925//HS_{—}2027_B2_B09_T7 CIT Approved Human Genomic Sperm Library D Homo sapiens genomic clone Plate=2027 Col=18 Row=D, genomic survey sequence.//1.6e-46:404:77//AQ247031

[16211] R-PLACE1010926//Homo sapiens mRNA for KIAA0554 protein, partial cds.//4.2e-65:402:89//AB011126

[16212] R-nnnnnnnnnnnn//Homo sapiens intersectin short form mRNA, complete cds.//1.9e-80:441:93//AF064243

[16213] R-PLACE1010944

[16214] R-PLACE1010947//D. discoideum rasG gene.//0.00044:181:65//Z 11533

[16215] R-PLACE1010954//Homo sapiens clone RG228D17, WORKING DRAFT SEQUENCE, 2 unordered pieces.//3.0e-51:518:74//AC005077

[16216] R-PLACE1010960//Human DNA sequence *** SEQUENCING IN PROGRESS *** from clone 451B21, WORKING DRAFT SEQUENCE.//0.022:292:63//AL033522

[16217] R-PLACE1010965//Human mariner1 transposase gene, complete consensus sequence.//1.0e-64:444:84//U52077

[16218] R-PLACE1011026//Rickettsia prowazekii strain Madrid E, complete genome; segment 3/4.//0.59:345:61//AJ235272

[16219] R-PLACE1011032//Human DNA sequence from PAC 389A20 on chromosome X contains ESTs STS, CpG islands and polymorphic CA repeat.//0.62:82:75//Z93242

[16220] R-PLACE1011041//H. sapiens DNA sequence.//0.051:162:66//Z22248

[16221] R-nnnnnnnnnnnn//Homo sapiens mRNA for KIAA0581 protein, partial cds.//2.9e-100:563:91//AB011153

[16222] R-PLACE1011054//Human DNA sequence from PAC 46H23, BRCA2 gene region chromosome 13q12-13 contains Klotho, ESTs.//4.7e-29:280:73//Z84483

[16223] R-PLACE1011056//Human DNA sequence *** SEQUENCING IN PROGRESS *** from clone 341D10, WORKING DRAFT SEQUENCE.//1.7e-39:288:84//Z97985

[16224] R-PLACE0111057//CIT-HSP-2014F10.TF CIT-HSP Homo sapiens genomic clone 2014F10, genomic survey sequence.//2.4e-60:370:90//B58896

[16225] R-PLACE1011090//Homo sapiens chromosome 4 clone B200N5 map 4q25, complete sequence.//0.12:489:59//AC005509

[16226] R-PLACE1011109//Homo sapiens chromosome Y, clone 486, 0, 2, complete sequence.//8.4e-43:427:76//AC002531

[16227] R-PLACE1011114//Homo sapiens mRNA from HIV associated non-Hodgkin's lymphoma (clone hl 1-14).//1.7e-29:179:94//Y16709

[16228] R-PLACE1011133//HS-1058-B1-H02-MF.abi CIT Human Genomic Sperm Library C Homo sapiens genomic clone Plate=CT 780 Col=3 Row=P, genomic survey sequence.//1.0:133:63//B44006

[16229] R-PLACE1011143//H. sapiens CpG island DNA genomic Mse1 fragment, clone 127a4, forward read cpg127a4.ft1a.//1.0:127:67//Z56550

[16230] R-PLACE1011160//Homo sapiens HRIHFB2038 mRNA, partial cds.//2.4e-95:534:91//AB015333

[16231] R-PLACE1011165//Human Cosmid g5129s232 from 7q31.3, complete sequence.//0.47:355:58//AC003968

[16232] R-PLACE1011185//Homo sapiens clone DJ0038110, WORKING DRAFT SEQUENCE, 5 unordered pieces.//1.3e-26:403:70//AC004820

[16233] R-PLACE1011203//paramecium species 4.51 er mt dna dimer: replication init. region, clone 1.//1.0e-10:379:60//K00908

[16234] R-PLACE1011219//HS_{—}3036 B11F08 MR CIT Approved Human Genomic Sperm Library D Homo sapiens genomic clone Plate=3036 Col=15 Row=L, genomic survey sequence.//2.6e-39:253:8811AQ104587

[16235] R-PLACE1011221//Homo sapiens T-cell receptor alpha delta locus from bases 250472 to 501670 (section 2 of 5) of the Complete Nucleotide Sequence.//0.32:279:60//AE000659

[16236] R-PLACE1011229//HS_{—}3002 B1_EIO MR CIT Approved Human Genomic Sperm Library D Homo sapiens genomic clone Plate=3002 Col=19 Row=J, genomic survey sequence.//9.3e-31:317:7411AQ303626

[16237] R-PLACE1011263//Homo sapiens BAC clone GS166A23 from 7p21, complete sequence.//1.2e-109:571:94//AC005014

[16238] R-PLACE1011273//Saccharomyces douglasii mitochondrial cytochrome c oxidase subunit I (COX1) gene, complete cds.//0.00027:337:61//M97514

[16239] R-PLACE1011291

[16240] R-PLACE1011296//H. sapiens steroid reductase pseudogene.//4.2e-37:326:80//M68887

[16241] R-PLACE1011310//H. sapiens 5′ flanking sequence of gene for corticotropin.//0.0017:416:60//X67661

[16242] R-PLACE1011325//Plasmodium falciparum chromosome 2, section 35 of 73 of the complete sequence.//3.0e-10:511:59//AE001398

[16243] R-PLACE1011332//Homo sapiens chromosome 17, clone HC1T3L16, WORKING DRAFT SEQUENCE, 7 unordered pieces.//8.3e-06:250:64//AC002344

[16244] R-PLACE1011340//Human BAC clone RG341D10 from 7 p15-p21, complete sequence.//0.67:290:58//AC002530

[16245] R-PLACE1011375//Mus musculus Kv3.4 gene, exon 4.//6.8e-23:190:86//AJ010310

[16246] R-PLACE1011399//Plasmodium falciparum 3D7 chromosome 12 PFYACB8-420 genomic sequence, WORKING DRAFT SEQUENCE, 14 unordered pieces.//0.22:359:60//AC005140

[16247] R-PLACE1011419//Human DNA sequence from cosmid U90B3, on chromosome Xp11, contains ESTs.//5.1e-32:282:81//Z74022

[16248] R-nnnnnnnnnnnn//Homo sapiens mRNA for KIAA0530 protein, partial cds.//1.5e-112:600:94//AB011102

[16249] R-PLACE1011452//Homo sapiens clone DJ0945F02, WORKING DRAFT SEQUENCE, 7 unordered pieces.//3.9e-77:303:85//AC006013

[16250] R-PLACE1011465

[16251] R-PLACE1011472//Homo sapiens mRNA for KIAA0712 protein, complete cds.//7.9e-103:515:96//AB018255

[16252] R-PLACE1011492//A-837A4.TP CIT978SK Homo sapiens genomic clone A-837A4, genomic survey sequence.//6.5e-37:234:82//B14085

[16253] R-PLACE1011503//Homo sapiens chromosome 17, clone hRPC.1171_{—}110, complete sequence.//0.99:267:60//AC004687

[16254] R-PLACE1011520//Homo sapiens clone DJ1119N05, complete sequence.//2.0e-116:591:96//AC004968

[16255] R-PLACE1011563//Plasmodium falciparum 3D7 chromosome 12 PFYAC69 genomic sequence, WORKING DRAFT SEQUENCE, 4 unordered pieces.//1.2e-13:566:59//AC004688

[16256] R-PLACE1011567//Plasmodium falciparum MAL3P6, complete sequence.//0.62:358:61//Z98551

[16257] R-PLACE1011576//Homo sapiens DNA from chromosome 19, BAC 33152, complete sequence.//8.7e-45:400:78//AC003973

[16258] R-PLACE1011586//Homo sapiens chromosome 17, clone HRPC890E16, complete sequence.//2.2e-59:338:93//AC004477

[16259] R-PLACE1011635//C. pasteurianum pfl gene and act gene.//0.71:288:60//X93463

[16260] R-PLACE1011641//Mycoplasma genitalium random genomic clone sg11, partial cds.//0.023:232:60//U02205

[16261] R-PLACE1011643//Homo sapiens chromosome 19, cosmid R33590, complete sequence.//1.4e-21:432:67//AC005620

[16262] R-PLACE1011649//Homo sapiens clone 24432 mRNA sequence.//7.8e-72:414:91//AF070535

[16263] R-PLACE1011650//Human PAC clone DJ327AI9 from Xq25-q26, complete sequence.//5.1e-27:174:79//AC002477

[16264] R-PLACE1011664//Human DNA sequence *** SEQUENCING IN PROGRESS *** from clone 460D19, WORKING DRAFT SEQUENCE.//7.4e-05:238:65//AL031905

[16265] R-PLACE1011675//CIT-HSP-2370M16.TR CIT-HSP Homo sapiens genomic clone 2370M16, genomic survey sequence.//1.3e-27:233:81//AQ108283

[16266] R-PLACE1011682//H. sapiens HLA-DMB gene.//2.3e-22:390:67//X76776

[16267] R-PLACE1011719//Homo sapiens 12q24.2 BAC RPCII 1-360E1 I (Roswell Park Cancer Institute Human BAC Library) complete sequence.//3.1e-24:409:66//AC004806

[16268] R-PLACE1011725//Homo sapiens unknown mRNA downregulated by induced differentiation with 13-cis retinoic acid.//0.13:143:65//AF026526

[16269] R-PLACE1011729//Human DNA sequence *** SEQUENCING IN PROGRESS *** from clone Y738F9, WORKING DRAFT SEQUENCE.//1.1e-15:157:82//AL022345

[16270] R-PLACE1011749//Homo sapiens clone RG315Hl 1, WORKING DRAFT SEQUENCE, 5 unordered pieces.//1.5e-38:314:81//AC005089

[16271] R-PLACE1011762//Homo sapiens BAC clone RGO67E 13 from 7q21, complete sequence.//1.9e-35:538:68//AC002383

[16272] R-PLACE1011778//CIT-HSP-2326C17.TV CIT-HSP Homo sapiens genomic clone 2326C17, genomic survey sequence.//2.8e-58:346:91//AQ028782

[16273] R-PLACE1011783//Human DNA sequence *** SEQUENCING IN PROGRESS *** from clone 229A8, WORKING DRAFT SEQUENCE.//4.6e-38:288:84//Z86090

[16274] R-PLACE1011858//Human DNA sequence from clone 496N17 on chromosome 6 p11.2-12.3 Contains EST, GSS, complete sequence.//4.1e-104:524:97//AL031321

[16275] R-PLACE1011874//Homo Sapiens Chromosome X clone bWXD312, complete sequence.//2.1e-100:511:95//AC004478

[16276] R-PLACE1011875

[16277] R-PLACE1011891//Human lens membrane protein (mp 19) gene, exon 11.//0.0011:195:64//L04193

[16278] R-PLACE1011896//Homo sapiens DNA sequence from PAC 434014 on chromosome 1q32.3.-41. Contains the HSD 11B1 gene for Hydroxysteroid (II-beta) Dehydrogenase 1, the ADORA2BP adenosine A2b receptor LIKE pseudogene, the IRF6 gene for Interferon Regulatory Factor 6 and two novel genes. Contains ESTs and GSSs, complete sequence.//0.010:110:74//AL022398

[16279] R-PLACE1011922//Homo sapiens chromosome 21q22.3 PAC 171F15, complete sequence.//3.5e-0:152:74//AF042090

[16280] R-PLACE1011923//Homo sapiens serum-inducible kinase mRNA, complete cds.//7.0e-98:546:92//AF059617

[16281] R-PLACE1011962//CIT-HSP-2294L24.TF CIT-HSP Homo sapiens genomic clone 2294L24, genomic survey sequence.//0.31:131:63//AQ006352

[16282] R-PLACE1011964//Homo sapiens chromosome 17, clone HRPC987K16, complete sequence.//2.5e-08:393:63//AC002994

[16283] R-PLACE1011982//Arabidopsis thaliana genomic DNA, chromosome 3, P1 clone: MDJ14, complete sequence.//9.6e-09:463:62//AB016889

[16284] R-PLACE1011995//Human Down Syndrome region of chromosome 21, clone A12HI-2H4.//2.7e-39:294:82//U44738

[16285] R-PLACE1012031//Homo sapiens mRNA for KIAA0713 protein, partial cds.//2.5e-104:540:95//AB08256

[16286] R-PLACE2000003//Human PAC clone DJ404F18 from Xq23, complete sequence.//4.9e-10:439:63//AC004000

[16287] R-PLACE2000007//Human fibroblast growth factor receptor 3 (FGFR3) gene, intron 3.//1.0:151:6611L78722

[16288] R-PLACE200001//Homo sapiens clone 614 unknown mRNA, complete sequence.//1.5e-103:524:95//AF091080

[16289] R-PLACE2000015//Homo sapiens PAC clone DJ269005 from Xq23, complete sequence.//0.94:372:57//AC005191

[16290] R-PLACE2000017//Homo sapiens chromosome 17, clone hCIT.162_E 12, complete sequence.//3.0e-55:299:86//AC006236

[16291] R-PLACE2000021//CIT-HSP-2343C18.TR CIT-HSP Homo sapiens genomic clone 2343C18, genomic survey sequence.//4.5e-54:295:94//AQ058140

[16292] R-PLACE2000033//H. sapiens gene for mitochondrial ATP synthase c subunit (P1 form).//6.5e-38:298:82//X69907

[16293] R-PLACE2000034//Homo sapiens clone DJ0613C23, WORKING DRAFT SEQUENCE, 4 unordered pieces.//5.3e-34:200:79//AC005628

[16294] R-PLACE2000039//Homo sapiens BAC clone RG060N22 from 7q21, complete sequence.//1.8e-49:274:89//AC003083

[16295] R-PLACE2000047//CIT-HSP-2373C2.TR CIT-HSP Homo sapiens genomic clone 2373C2, genomic survey sequence.//1.8e-48:389:79//AQ112243

[16296] R-PLACE2000050//Human DNA sequence *** SEQUENCING IN PROGRESS *** from clone 117715, WORKING DRAFT SEQUENCE.//0.0027:95:76//AL022315

[16297] R-PLACE2000061//Homo sapiens mRNA for KIAA0575 protein, complete cds.//2.9e-39:429:72//AB01147

[16298] R-PLACE2000062//Homo sapiens clone DJ0539M06, WORKING DRAFT SEQUENCE, 10 unordered pieces.//5.9e-40:310:84//AC004832

[16299] R-PLACE2000072//Homo sapiens ZNF202 beta (ZNF202) mRNA, complete cds.//1.9e-109:550:95//AF027219

[16300] R-PLACE2000097//Homo sapiens chromosome 12 p13.3 clone RPCI11-189M20, WORKING DRAFT SEQUENCE, 39 unordered pieces.//1.6e-106:553:95//AC005910

[16301] R-PLACE2000100//Human DNA sequence from clone 301K23 on chromosome 1p35.1-36.21. Contains the 5′ part of a novel gene similar to predicted yeast and worm genes. Contains ESTs and GSSs, complete sequence.//1.8e-38:285:84//AL031730

[16302] R-PLACE2000103//Human DNA sequence *** SEQUENCING IN PROGRESS *** from clone 20208, WORKING DRAFT SEQUENCE.//4.3e-113:559:97//AL031848

[16303] R-PLACE2000111//Rat MLCIV gene encoding alkali myosin ventricel light chain, exon 1.//0.00041:347:61//X16325

[16304] R-PLACE2000115//Cervus elaphus MHC class II DRB pseudogene, intron 2 microsatellite.//0.50:165:63//U63067

[16305] R-PLACE2000132

[16306] R-PLACE2000136//Plasmodium falciparum DNA *** SEQUENCING IN PROGRESS *** from contig 3-30, complete sequence.//0.0032:310:61//AL008974

[16307] R-PLACE2000140//Human DNA sequence *** SEQUENCING IN PROGRESS *** from clone 11703, WORKING DRAFT SEQUENCE.//1.1e-111:566:96//AL020995

[16308] R-PLACE2000164

[16309] R-PLACE2000170//*** SEQUENCING IN PROGRESS *** Homo sapiens chromosome 4, BAC clone C0024K08; HTGS phase 1, WORKING DRAFT SEQUENCE, 5 unordered pieces.//3.9e-40:390:76//AC005598

[16310] R-PLACE2000172

[16311] R-PLACE2000176

[16312] R-PLACE2000187//Human DNA sequence *** SEQUENCING IN PROGRESS *** from clone 268H5, WORKING DRAFT SEQUENCE.//8.7e-45:298:87//AL008718

[16313] R-PLACE2000216//Dog nonerythroid beta-spectrin mRNA, 3′ end.//5.6e-88:495:92//L02897

[16314] R-PLACE2000223

[16315] R-PLACE2000235//HS_{—}3159_B 1_B06_T7 CIT Approved Human Genomic Sperm Library D Homo sapiens genomic clone Plate=3159 Col=1 I Row=D, genomic survey sequence.//1.8e-88:454:96//AQ179271

[16316] R-PLACE2000246//Homo sapiens chromosome 3p clone RPCI4-544D 10, WORKING DRAFT SEQUENCE, 58 unordered pieces.//9.1e-41:282:86//AC005902

[16317] R-PLACE2000264//Homo sapiens DNA sequence from PAC 95C20 on chromosome Xp11.3-11.4. Contains STSs and the DXS7 locus with GT and GTG repeat polymorphisms, complete sequence.//8.3e-35:305:80//Z97181

[16318] R-PLACE2000274//Human Chromosome 16 BAC clone CIT987SK-A-211 C6, complete sequence.//3. Se-18:325:67//AC002394

[16319] R-PLACE2000302//Homo sapiens chromosome 17, clone HRPC1067M6, complete sequence.//1.5e-39:287:85//AC003043

[16320] R-PLACE2000305//Human DNA sequence *** SEQUENCING IN PROGRESS *** from clone 16915, WORKING DRAFT SEQUENCE.//1.2e-43:295:85//Z93015

[16321] R-PLACE2000317//Human DNA sequence from clone 245G19 on chromosome Xp22.11-22.2 Contains serine-threonine kinase (Txp3) gene, a pseudogene similar to ALPHA-1 PROTEIN ((CONNEXIN 43, CX43, GAP JUNCTION 43 KD HEART PROTEIN)), and the 3′ end of the RSI (X-linked juvenile retinoschisis precursor protein) gene. Contains ESTs, STSs and GSSs, complete sequence.//4.0e-05:284:65//Z92542

[16322] R-PLACE2000335//Homo sapiens clone DJ0755D09, WORKING DRAFT SEQUENCE, 3 unordered pieces.//1.5e-26:334:70//AC006147

[16323] R-PLACE2000342//Fugu rubripes cosmid 258N02 containing IGFII, TH, NAP2 genes.//4.0e-05:254:64//AL021880

[16324] R-PLACE2000347//Human DNA sequence *** SEQUENCING IN PROGRESS *** from clone 799N4, WORKING DRAFT SEQUENCE.//1.6e-82:504:88//AL022147

[16325] R-PLACE2000359//Human DNA sequence *** SEQUENCING IN PROGRESS * from clone 40E16, WORKING DRAFT SEQUENCE.//2.0e-36:314:80//AL031963

[16326] R-PLACE2000366//Human DNA sequence *** SEQUENCING IN PROGRESS * from clone 796F 18, WORKING DRAFT SEQUENCE.//2.0e-48:389:80//AL031291

[16327] R-PLACE2000371

[16328] R-PLACE2000373//Human DNA sequence *** SEQUENCING IN PROGRESS * from clone 324M8, WORKING DRAFT SEQUENCE.//0.61:231:61//AL008734

[16329] R-PLACE2000379//Homo sapiens clone DJ0892G19, complete sequence.//3.5e-11:287:67//AC004917

[16330] R-PLACE2000394//Human DNA sequence from clone 465N24 on chromosome 1p35.1-36.13. Contains two novel genes, ESTs, GSSs and CpG islands, complete sequence.//6.8e-108:553:96//AL031432

[16331] R-PLACE2000398//Homo sapiens clone RG074A24, WORKING DRAFT SEQUENCE, 25 unordered pieces.//2.9e-26:326:73//AC005059

[16332] R-PLACE2000399

[16333] R-PLACE2000404//Homo sapiens chromosome 5, BAC clone 282B7 (LBNL H192), complete sequence.//6.5e-84:434:96//AC005216

[16334] R-PLACE2000411//P. clarkii mRNA; repeat region (ID 2R).//0.47:104:70//Z54273

[16335] R-PLACE2000419

[16336] R-PLACE2000425//Homo sapiens X-linked anhidroitic ectodermal dysplasia protein gene (EDA), exon 2 and flanking repeat regions.//1.9e-40:447:74//AF003528

[16337] R-PLACE2000427

[16338] R-PLACE2000433//Human Chromosome 15 pac pDJ24 m8, complete sequence.//3.5e-40:286:85//AC000379

[16339] R-PLACE2000435

[16340] R-PLACE2000438//Homo sapiens full-length insert cDNA clone ZE04DO1.//2.2e-107:523:98//AF086521

[16341] R-PLACE2000450 4.1e-42:328:79//AG006257

[16342] R-PLACE2000455

[16343] R-PLACE2000458//Homo sapiens chromosome 5p, BAC clone 50g21 (LBNL H154), complete sequence.//5.1e-116:570:97//AC005740

[16344] R-PLACE2000465//Human BAC clone RG 191 D16, complete sequence.//6.3e-37:408:75//AC002460

[16345] R-PLACE2000477//M. musculus tex264 mRNA (3′region).//7.5e-06:117:76//X80427

[16346] R-PLACE3000004

[16347] R-PLACE3000029//Human DNA sequence from PAC 506G2 contains STSs and a CpG island.//5.8e-34:308:78//Z82976

[16348] R-PLACE3000059//Mus musculus mRNA for ubiquitin conjugating enzyme.//1.1e-36:273:87//Y17267

[16349] R-PLACE3000070//Homo sapiens chromosome 5, PAC clone 17e19 (LBNL H148), complete sequence.//2.3e-10:181:71//AC004648

[16350] R-PLACE3000103//Human DNA sequence *** SEQUENCING IN PROGRESS *** from clone 30A23, WORKING DRAFT SEQUENCE.//1.2e-48:495:74//AL022156

[16351] R-PLACE3000119//Homo sapiens Chromosome 22q12 BAC Clone 58b8 In Meningioma Deletion Region, complete sequence.//3.4e-39:283:85//AC000026

[16352] R-PLACE3000124//Homo sapiens chromosome 5, P1 clone 793c5 (LBNL H57), complete sequence.//9.2e-23:171:76//AC005200

[16353] R-PLACE3000136//U. arctos microsatellite DNA, clone UarMU23.//0.00052:171:65//Y09645

[16354] R-PLACE3000142//HS_{—}3037_B2_B02_MR CIT Approved Human Genomic Sperm Library D Homo sapiens genomic clone Plate=3037 Col=4 Row=D, genomic survey sequence.//0.88:121:66//AQ097023

[16355] R-PLACE3000147//Mus musculus DNA for ADAMTS-1, complete cds.//3.3e-23:472:66//AB001735

[16356] R-PLACE3000148//Human DNA from cosmid L27h9, Huntington's Disease Region, chromosome 4 p16.3 contains CpG island.//3.5e-11:176:73//Z49237

[16357] R-PLACE3000155//Homo sapiens chromosome 17, clone hRPK.597_M_{—}12, complete sequence.//6.9e-106:549:94//AC005277

[16358] R-PLACE3000156//Homo sapiens BAC clone RG067E13 from 7q21, complete sequence.//7.0e-38:545:70//AC002383

[16359] R-PLACE3000157

[16360] R-PLACE3000158//, complete sequence.//1.4e-33:283:81//AC005500

[16361] R-PLACE3000160

[16362] R-PLACE3000169//Homo sapiens chromosome 19, BAC CIT-B-191n6, complete sequence.//5.2e-43:229:85//AC006130

[16363] R-PLACE3000194

[16364] R-PLACE3000197//Homo sapiens chromosome 17, clone hRPK.401_{—}0_{—}9, complete sequence.//7.2e-61:394:89//AC005291

[16365] R-PLACE3000199//Homo sapiens Xq28 genomic DNA in the region of the LI CAM locus containing the genes for neural cell adhesion molecule L1 (L1CAM), arginine-vasopressin receptor (AVPR2), CI p 115 (C1), ARD1 N-acetyltransferase related protein (TE2), renin-binding protein (RbP), host cell factor 1 (HCF1), and interleukin-1 receptor-associated kinase (IRAK) genes, complete cds, and Xq281u2 gene.//0.23:309:57//U52112

[16366] R-PLACE3000207//CIT-HSP-384B14.TR CIT-HSP Homo sapiens genomic clone 384B14, genomic survey sequence.//1.1e-15:156:81//B54637

[16367] R-PLACE3000208//Human DNA sequence *** SEQUENCING IN PROGRESS *** from clone 591N18, WORKING DRAFT SEQUENCE.//1.3e-16:139:87//AL031594

[16368] R-PLACE3000218//HS_{—}3185_B1_B00_T7 CIT Approved Human Genomic Sperm Library D Homo sapiens genomic clone Plate=3185 Col=1 Row=D, genomic survey sequence.//3.5e-07:120:75//AQ155720

[16369] R-PLACE3000220//Homo sapiens chromosome 17, clone HRPC1096F1, complete sequence.//2.4e-44:363:80//AC004167

[16370] R-PLACE3000226//Caenorhabditis elegans cosmid MOlG5.//0.88:95:77//AF078786

[16371] R-PLACE3000230//Homo sapiens ccr2b (ccr2), ccr2a (ccr2), ccr5 (ccr5) and ccr6 (ccr6) genes, complete cds, and lactoferrin (lactoferrin) gene, partial cds, complete sequence.//5.3e-69:536:81//U95626

[16372] R-PLACE3000242//Sequence 1 from patent U.S. Pat. No. 5,599,918.1/3.2e-62:546:78//I35489

[16373] R-PLACE3000244//M. musculus mRNA for 200 kD protein.//1.7e-45:404:75//X80169

[16374] R-PLACE3000254//Human mRNA for KIAA0309 gene, partial cds.//7.5e-28:174:94//AB002307

[16375] R-PLACE3000271//Human DNA sequence *** SEQUENCING IN PROGRESS *** from clone 423B22, WORKING DRAFT SEQUENCE.//3.9e-54:492:77//AL034379

[16376] R-PLACE3000276//Homo sapiens PAC clone DJO320J15 from Xq23, complete sequence.//5.4e-12:176:69//AC004081

[16377] R-PLACE3000304//Homo sapiens chromosome 19, cosmid R26660, complete sequence.//5.7e-114:555:97//AC005328

[16378] R-PLACE3000310//Human DNA sequence *** SEQUENCING IN PROGRESS *** from clone 467L1, WORKING DRAFT SEQUENCE.//6.2e-51:314:84//Z98884

[16379] R-PLACE3000320//Homo sapiens elastin gene, exons 5-27 and alternatively spliced products, partial cds.//2.5e-44:289:90//U93037

[16380] R-PLACE3000322//Human argininosuccinate lyase (ASL) gene, exon 3.//5.9e-20:153:88//M21006

[16381] R-PLACE3000331//Homo sapiens clone DJ0592G07, WORKING DRAFT SEQUENCE, 3 unordered pieces.//1.1e-43:230:84//AC005480

[16382] R-PLACE3000339

[16383] R-PLACE3000341//Homo sapiens 3p22 Contig 7 PAC RPCI4-672N11 (Roswell Park Cancer Institute Human PAC Library) complete sequence.//2.5e-111:550:97//AC006055

[16384] R-PLACE3000350//Human DNA sequence from clone 243E7 on chromosome 22q12.1. Contains ESTs, STSs and GSSs, complete sequence.//1.5e-44:314:78//AL022323

[16385] R-PLACE3000352//HS_{—}3095_B1_E09_MR CIT Approved Human Genomic Sperm Library D Homo sapiens genomic clone Plate=3095 Col=17 Row=J, genomic survey sequence.//8.5e-73:356:99//AQ123142

[16386] R-PLACE3000353//Caenorhabditis elegans DNA *** SEQUENCING IN PROGRESS *** from clone Y22F5, WORKING DRAFT SEQUENCE.//0.21:194:63//Z99712

[16387] R-PLACE3000362//Plasmodium falciparum coronin gene, isolate 3D7.//0.26:360:60//AJ002197

[16388] R-PLACE3000363

[16389] R-PLACE3000365//Human BAC clone RG343P13 from 7q31, complete sequence.//4.6e-52:487:76//AC002465

[16390] R-PLACE3000373//HS_{—}3202_B1_G05_T7 CIT Approved Human Genomic Sperm Library D Homo sapiens genomic clone Plate=3202 Col=9 Row=N, genomic survey sequence.//2.4e-75:437:90//AQ252699

[16391] R-PLACE3000388//Human DNA sequence *** SEQUENCING IN PROGRESS *** from clone 732E4, WORKING DRAFT SEQUENCE.//6.4e-61:515:81//AL008722

[16392] R-PLACE3000399//Homo sapiens clone DJ1186P10, WORKING DRAFT SEQUENCE, 6 unordered pieces.//0.00098:444:60//AC005231

[16393] R-PLACE3000400//Plasmodium falciparum 3D7 chromosome 12 PFYAC357 genomic sequence, WORKING DRAFT SEQUENCE, 7 unordered pieces.//0.78:155:66//AC005506

[16394] R-PLACE3000401//Homo sapiens clone DJ1147A01, WORKING DRAFT SEQUENCE, 25 unordered pieces.//8.0e-47:223:81//AC006023

[16395] R-PLACE3000402//Homo sapiens chromosome 17, clone 104H12, complete sequence.//1.0:179:63//AC000003

[16396] R-PLACE3000405//Homo sapiens chromosome 7qte10 BAC F6, complete sequence.//2.4e-44:466:7411AF104455

[16397] R-PLACE3000406//Human DNA sequence *** SEQUENCING IN PROGRESS *** from clone 268H5, WORKING DRAFT SEQUENCE.//7.7e-49:471:75//AL008718

[16398] R-PLACE3000413

[16399] R-PLACE3000416//Homo sapiens *** SEQUENCING IN PROGRESS *** from PAC 1577, WORKING DRAFT SEQUENCE.//5.4e-42:416:77//AJ009612

[16400] R-PLACE3000425//Human DNA sequence from PAC 130G2 on chromosome 6p22.2-22.3. Contains ribosomal protein L29 pseudogene, ESTs and STSs.//1.1e-41:366:78//AL008627

[16401] R-PLACE3000455//Human DNA sequence *** SEQUENCING IN PROGRESS *** from clone 469D22, WORKING DRAFT SEQUENCE.//3.8e-98:549:92//AL031284

[16402] R-PLACE3000475//Human signal transducing adaptor molecule STAM mRNA, complete cds.//1.9e-82:440:92//U43899

[16403] R-PLACE3000477

[16404] R-PLACE4000009//R. norvegicus mRNA encoding 45 kDa protein which binds to heymann nephritis antigen gp330.//6.6e-17:344:68 HZ 11995

[16405] R-PLACE4000014//Homo sapiens mRNA for KIAA0809 protein, partial cds.//2.7e-83:433:95//AB018352

[16406] R-PLACE4000034//cSRL-51C5-u cSRL flow sorted Chromosome 11 specific cosmid Homo sapiens genomic clone cSRL-51 C5, genomic survey sequence.//0.54:116:66//B04984

[16407] R-PLACE4000049//Human BAC clone GS 165104 from 7q21, complete sequence.//0.29:313:59//AC002379

[16408] R-PLACE4000052//Plasmodium falciparum DNA *** SEQUENCING IN PROGRESS *** from MAL4P1, WORKING DRAFT SEQUENCE.//0.0058:466:57//AL034557

[16409] R-PLACE4000063//Homo sapiens chromosome 7q22 sequence, complete sequence.//0.98:246:61//AF053356

[16410] R-PLACE4000089//RPCII 1-1511.TVB RPCI-11 Homo sapiens genomic clone RPCI-11-1511, genomic survey sequence.//3.2e-07:284:60//B82414

[16411] R-PLACE4000093//Plasmodium falciparum 3D7 chromosome 12 PFYAC357 genomic sequence, WORKING DRAFT SEQUENCE, 7 unordered pieces.//2.4e-07:429:60//AC005506

[16412] R-PLACE4000100

[16413] R-PLACE4000106//Homo sapiens clone 24561 unknown mRNA, partial cds.//9.3e-100:419:91//AF055010

[16414] R-PLACE4000128//Human Chromosome 16 BAC clone CIT987SK-A-61 E3, complete sequence.//9.6e-45:284:90//AC003007

[16415] R-PLACE4000129//Homo sapiens mRNA, chromosome I specific transcript KIAA050.//1.6e-19:118:100//AB007969

[16416] R-PLACE4000147//Homo sapiens BAC clone NH0342K06 from 2, complete sequence.//8.9e-17:208:73//AC005034

[16417] R-PLACE4000156//Homo sapiens DNA sequence from PAC 352A20 on chromosome 6q24.1-25.1. Contains a pseudogene similar to yeast, bacterial, worm and slime mold hypothetical genes, and a gene coding for an aldehyde dehydrogenase family protein. Contains ESTs, STSs and GSSs, complete sequence.//3.7e-43:281:90//AL021939

[16418] R-PLACE4000192

[16419] R-PLACE4000222//Homo sapiens clone DJ 1129J21, WORKING DRAFT SEQUENCE, 25 unordered pieces.//5.4e-44:280:82//AC005631

[16420] R-PLACE4000233//Homo sapiens full-length insert cDNA YH59G06.//1.8e-79:414:97//AF074981

[16421] R-PLACE4000247//Homo sapiens chromosome 17, clone hRPK.156_L_{—}14, complete sequence.//5.7e-59:558:76//AC005821

[16422] R-PLACE4000250//CIT-HSP-2335L20.TR CIT-HSP Homo sapiens genomic clone 2335L20, genomic survey sequence.//1.7e-44:313:84//AQ037381

[16423] R-PLACE4000252//Homo sapiens chromosome 17, clone hRPK.700_H_{—}6, complete sequence.//1 .5e-39:311:83//AC005920

[16424] R-PLACE4000261//H. sapiens BFIP-glH03np gene for immunoglobulin heavy chain variable region.//0.33:197:61//Z80410

[16425] R-PLACE4000269//Homo sapiens chromosome 4 clone B368A9 map 4q25, complete sequence.//1.4e-31:327:68//AC005510

[16426] R-PLACE4000270//Homo sapiens DNA for amyloid precursor protein, complete cds.//2.3e-32:345:74//D87675

[16427] R-PLACE4000300//Sequence 61 from patent U.S. Pat. No. 5,744,300.//0.0017:51:98//AR003339

[16428] R-PLACE4000320//Human DNA sequence from clone 441J1 on chromosome 6p24 Contains STS, GSS, complete sequence.//8.2e-41:295:85//Z99495

[16429] R-PLACE4000323//Human chromosome 11187a8 cosmid, complete sequence.//1.3e-32:404:75//U73640

[16430] R-PLACE4000326

[16431] R-PLACE4000344//Homo sapiens PAC clone DJ0988G15 from 7q33-q35, complete sequence.//0.32:135:68//AC005587

[16432] R-PLACE4000367//H. sapiens gene encoding RING finger protein.//0.61:146:67//Y07829

[16433] R-PLACE4000369//HS_{—}3181_A1_B02_MR CIT Approved Human Genomic Sperm Library D Homo sapiens genomic clone Plate=3181 Col=3 Row=C, genomic survey sequence.//7.1e-80:424:94//AQ173222

[16434] R-PLACE4000379//Human DNA sequence *** SEQUENCING IN PROGRESS *** from clone 1104E15, WORKING DRAFT SEQUENCE.//1.7e-05:160:65//AL022312

[16435] R-PLACE4000387//Homo sapiens clone DJ0876A24, WORKING DRAFT SEQUENCE, 6 unordered pieces.//2.4e-47:351:81//AC004913

[16436] R-PLACE4000392//Human DNA sequence from clone 751H9 on chromosome 6q13. Contains part of an unknown gene, ESTs, STSs and GSSs, complete sequence.//8.5e-88:541:88//AL034377

[16437] R-PLACE4000401//Human Chromosome 11 overlapping pacs pDJ235k10 and pDJ239b22, WORKING DRAFT SEQUENCE, 17 unordered pieces.//2.7e-17:143:83//AC000406

[16438] R-PLACE4000411

[16439] R-PLACE4000445//Homo sapiens clone DJ0613C23, WORKING DRAFT SEQUENCE, 4 unordered pieces.//0.028:91:78//AC005628

[16440] R-PLACE4000465//Human DNA sequence *** SEQUENCING IN PROGRESS *** from clone 30A23, WORKING DRAFT SEQUENCE.//1.6e-43:532:71//AL022156

[16441] R-PLACE4000489//Plasmodium falciparum chromosome 2, section 64 of 73 of the complete sequence.//4.1e-06:357:61//AE001427

[16442] R-PLACE4000494//Homo sapiens 12p13.3 PAC RPCI5-1063M23 (Roswell Park Cancer Institute Human PAC Library) complete sequence.//2.7e-37:416:74//AC005865

[16443] R-PLACE4000522

[16444] R-PLACE4000548//Homo sapiens 12p13.3 PAC RPCI5-1096D14 (Roswell Park Cancer Institute Human PAC Library) complete sequence.//0.0020:383:60//AC005342

[16445] R-PLACE4000558//Homo sapiens 12q24 BAC RPCI11-162P23 (Roswell Park Cancer Institute Human BAC library) complete sequence.//2.9e-44:465:75//AC002996

[16446] R-THYRO1000026//Human DNA sequence *** SEQUENCING IN PROGRESS *** from clone 37E16, WORKING DRAFT SEQUENCE.//2.2e-43:354:82//Z83844

[16447] R-THYRO1000034//Plasmodium falciparum chromosome 2, section 59 of 73 of the complete sequence.//0.022:327:60//AE001422

[16448] R-THYRO1000035//HS_{—}3018_B2_F10_T7 CIT Approved Human Genomic Sperm Library D Homo sapiens genomic clone Plate=3018 Col=20 Row=L, genomic survey sequence.//2.3e-36:228:91//AQ092318

[16449] R-THYRO1000040//Plasmodium falciparum 3D7 chromosome 12 PFYAC293 genomic sequence, WORKING DRAFT SEQUENCE, 9 unordered pieces.//1.0:367:56//AC004157

[16450] R-THYRO1000070//***ALU WARNING: Human Alu-Sq subfamily consensus sequence.//1.1e-44:284:891/U 14573

[16451] R-THYRO1000072//***ALU WARNING: Human Alu-J subfamily consensus sequence.//6.6e-33:150:83//U14567

[16452] R-THYRO1000085

[16453] R-THYRO1000092//Homo sapiens chromosome 7qte10 BAC F6, complete sequence.//3.3e-36:301:78//AF104455

[16454] R-THYRO1000107//Human DNA sequence *** SEQUENCING IN PROGRESS *** from clone 12513, WORKING DRAFT SEQUENCE.//1.4e-35:282:82//AL033528

[16455] R-THYRO1000111//Homo sapiens Chromosome 16 BAC clone CIT987SK-A-279B10, complete sequence.//4.0e-32:351:65//AC002300

[16456] R-THYRO1000121//Human chromosome 16 BAC clone CIT987SK-A-962B4, complete sequence.//6.6e-77:507:85//U91318

[16457] R-THYRO1000124//High throughput sequencing of human chromosome 12, WORKING DRAFT SEQUENCE, 1 ordered pieces.//0.66:334:59//AC005840

[16458] R-THYRO1000129//Homo sapiens TED protein (TED) mRNA, complete cds.//2.3e-88:449:96//AF087142

[16459] R-THYRO1000132//Human DNA sequence *** SEQUENCING IN PROGRESS *** from clone 212A2, WORKING DRAFT SEQUENCE.//1.1e-40:298:84//Z95114

[16460] R-THYRO1000156//Homo sapiens chromosome 17, clone hRPK.849_N_{—}15, complete sequence.//3.4e-37:425:73//AC005703

[16461] R-THYRO1000163//RPCI11-1B20.TVB RPCI-11 Homo sapiens genomic clone RPCI-11-1B20, genomic survey sequence.//8.4e-38:276:84//B63536

[16462] R-THYRO1000173//Human DNA sequence from PAC 323B6 on chromosome X contains ESTs CpG island.//1.1e-70:553:81//Z83841

[16463] R-THYRO1000186//Human DNA sequence *** SEQUENCING IN PROGRESS *** from clone 41018, WORKING DRAFT SEQUENCE.//6.7e-41:345:81//AL031732

[16464] R-THYRO1000187//Human thymopoietin (TMPO) gene, partial exon 6, complete exon 7, partial exon 8, and partial cds for thymopoietin beta.//1.3e-43:356:80//U18271

[16465] R-THYRO1000190//Homo sapiens chromosome 17, clone HRPC843B9, complete sequence.//2.6e-40:386:77//AC004139

[16466] R-THYRO1000197//Homo sapiens mRNA for poly(A)-specific ribonuclease.//1.1e-108:535:97//AJ005698

[16467] R-THYRO1000199//Homo sapiens mRNA for KIAA0652 protein, complete cds.//1.4e-113:559:97//AB014552

[16468] R-THYRO1000206//Rat PMSG-induced ovarian mRNA, 3′sequence, N4.//4.0e-43:318:86//D84482

[16469] R-THYRO1000221//Human DNA from overlapping chromosome 19 cosmids R31396, F25451, and R31076 containing COX6B and UPKA, genomic sequence, complete sequence.//2.7e-44:452:76//AC002115

[16470] R-THYRO1000241//Homo sapiens Cosmid Clone p129d11 unknown chromosomal location, complete sequence.//4.8e-58:447:81//AC000039

[16471] R-THYRO1000242

[16472] R-THYRO1000253//Homo sapiens DNA sequence from PAC 179N16 on chromosome 6p21.1-21.33. Contains the SAPK4 (MAPK p38delta) gene, and the alternatively spliced SAPK2 gene coding for CSaids binding protein CSBP2 and a MAPK p38beta LIKE protein. Contains ESTs, STSs and two predicted CpG islands, complete sequence.//3.4e-56:300:84//Z95152

[16473] R-THYRO1000270

[16474] R-THYRO1000279//Human DNA sequence *** SEQUENCING IN PROGRESS *** from clone 531 H116, WORKING DRAFT SEQUENCE.//4.8e-113:584:96//AL031664

[16475] R-THYRO1000288//Homo sapiens mRNA for Hs Ste24p, complete cds.//1.1e-98:566:91//AB016068

[16476] R-THYRO1000320//HS_{—}2033_B1_A07_T7 CIT Approved Human Genomic Sperm Library D Homo sapiens genomic clone Plate=2033 Col=13 Row=B, genomic survey sequence.//0.97:211:63//AQ233366

[16477] R-THYRO1000327//Sequence 1 from patent U.S. Pat. No. 5,541,298.//2.8e-52:289:93//I24058

[16478] R-THYRO1000343//Homo sapiens mRNA for KIAA0790 protein, partial cds.//1.1e-111:559:96//AB018333

[16479] R-THYRO1000358//Human selenium-binding protein (hSBP) mRNA, complete cds.//4.6e-47:317:87//U29091

[16480] R-THYRO1000368//HS_{—}3049_A1_E12_MF CIT Approved Human Genomic Sperm Library D Homo sapiens genomic clone Plate=3049 Col=23 Row=I, genomic survey sequence.//7.0e-11:111:8311AQ126777

[16481] R-nnnnnnnnnnnn

[16482] R-THYRO1000387//Homo sapiens PAC clone DJ1048B16 from 7q34-q36, complete sequence.//2.4e-101:545:93//AC006019

[16483] R-THYRO1000394//Homo sapiens Chromosome 11q12.2 PAC clone pDJ688 p12 containing uteroglobin gene, WORKING DRAFT SEQUENCE, 11 unordered pieces.//1.6e-46:233:88//AC006078

[16484] R-THYRO1000395//Mouse MIPP mRNA for a placenta-expressed gene.//2.3e-57:395:85//X58523

[16485] R-THYRO1000401 3.3e-11:546:97//AF051907

[16486] R-THYRO1000438//Homo sapiens clone DJ1186P10, WORKING DRAFT SEQUENCE, 6 unordered pieces.//2.7e-44:289:89//AC005231

[16487] R-THYRO1000452//Homo sapiens chromosome 17, clone hRPK.243_K_{—}12, complete sequence.//6.7e-27:222:82//AC005668

[16488] R-THYRO1000471//Human DNA sequence *** SEQUENCING IN PROGRESS *** from clone 102D24, WORKING DRAFT SEQUENCE.//2.4e-36:369:76//AL021391

[16489] R-THYRO1000484//Homo sapiens clone DJ1099N07, complete sequence.//1.6e-43:288:81//AC004962

[16490] R-THYRO1000488//Homo sapiens chromosome 5p, BAC clone 50g21 (LBNL H154), complete sequence.//1.6e-95:512:94//AC005740

[16491] R-THYRO1000501//HS_{—}2208_A1_G11_T7 CIT Approved Human Genomic Sperm Library D Homo sapiens genomic clone Plate=2208 Col=21 Row=M, genomic survey sequence.//0.0063:189:63//AQ091586

[16492] R-THYRO1000502//Homo sapiens eIF-1A, Y isoform (EIF1AY) mRNA, complete cds.//0.19:468:60//AF000987

[16493] R-THYRO1000505//Homo sapiens chromosome 19, cosmid R31546, complete sequence.//0.20:214:58//AC004798

[16494] R-THYRO1000558

[16495] R-THYRO1000569

[16496] R-THYRO1000570//Homo sapiens full-length insert cDNA clone ZD76G10.//4.3e-41:209:100//AF086408

[16497] R- nnnnnnnnnnnn//Homo sapiens protein associated with Myc mRNA, complete cds.//8.2e-107:533:97//AF075587

[16498] R-THYRO1000596//Mus musculus mitochondrial DNA polymerase accessory subunit (MtPolB) mRNA, nuclear gene encoding mitochondrial protein, partial cds.//0.36:170:67//AF006072

[16499] R-THYRO1000602//Homo sapiens DNA for amyloid precursor protein, complete cds.//2.2e-53:289:92//D87675

[16500] R-THYRO1000605

[16501] R-THYRO1000625//Homo sapiens chromosome 19, cosmid R29425, complete sequence.//1.3e-31:261:82//AC005546

[16502] R-THYRO1000637//Human DNA sequence from clone 243E7 on chromosome 22q12.1. Contains ESTs, STSs and GSSs, complete sequence.//4.0e-06:249:63//AL022323

[16503] R-THYRO1000641//P. falciparum glutamic acid-rich protein gnen, complete cds.//3.1e-08:244:68//J03998

[16504] R-THYRO1000658//***ALU WARNING: Human Alu-Sp subfamily consensus sequence.//3.9e-49:282:93//U14572

[16505] R-nnnnnnnnnnnn

[16506] R-THYRO1000666//Homo sapiens DNA sequence from PAC 329E20 on chromosome 1p34.4-36.13. Contains endothelin-converting-enzyme 1 (ECE-1), EST, STS, CA repeat, complete sequence.//1.9e-20:215:77//AL031005

[16507] R-THYRO1000676//Homo sapiens chromosome 4 clone B71M12 map 4q25, complete sequence.//1.2e-06:227:64//AC004069

[16508] R-THYRO1000684

[16509] R-THYRO1000699

[16510] R-THYRO1000712

[16511] R-THYRO1000734//Human BAC clone RG 191 D16, complete sequence.//3.7e-14:468:64//AC002460

[16512] R-THYRO1000748//Homo sapiens cosmid 123E15, complete sequence.//2.6e-11:182:73//AF024533

[16513] R-THYRO1000756//Sequence 21 from patent U.S. Pat. No. 5,552,281.//1.4e-15:106:98//I25660

[16514] R-THYRO1000777//Plasmodium falciparum MAL3P2, complete sequence.//11.0:175:66//AL034558

[16515] R-THYRO1000783//CIT-HSP-2335P6.TF CIT-HSP Homo sapiens genomic clone 2335P6, genomic survey sequence.//1.2e-81:391:99//AQ038226

[16516] R-THYRO1000787//Homo sapiens chromosome Y, clone 264, M, 20, complete sequence.//9.4e-07:494:58//AC004617

[16517] R-THYRO1000793

[16518] R-THYRO1000796//Human DNA sequence *** SEQUENCING IN PROGRESS *** from clone 167 P19, WORKING DRAFT SEQUENCE.//1.7e-42:379:79//Z93014

[16519] R-THYRO1000805//Human Chromosome II pac pDJ610120, WORKING DRAFT SEQUENCE, 18 unordered pieces.//4.7e-40:362:76//AC002555

[16520] R-THYRO1000815//Human DNA sequence *** SEQUENCING IN PROGRESS *** from clone 316D5, WORKING DRAFT SEQUENCE.//4.0e-58:295:92//Z82199

[16521] R-THYRO1000829//Sequence 7 from patent U.S. Pat. No. 5,716,622.//0.97:362:61//I87788

[16522] R-THYRO1000843//Homo sapiens Chromosome 1Sq11-q13 PAC clone pDJ351h23 from the Prader-Willi/Angelman Syndrome region, complete sequence.//3.3e-57:522:76//AC004738

[16523] R-THYRO1000852//Homo sapiens chromosome 11 clone CIT-HSP-1337H24, WORKING DRAFT SEQUENCE, 9 unordered pieces.//4.2e-17:291:69//AC005849

[16524] R-THYRO1000855//Human DNA sequence from clone 366B10 on chromosome 22q12.2-12.3. Contains GSSs, complete sequence.//1.1e-41:419:75//AL031592

[16525] R-THYRO1000865//Human DNA sequence *** SEQUENCING IN PROGRESS * from clone 1125AI1, WORKING DRAFT SEQUENCE.//9.0e-47:294:84//AL034549

[16526] R-THYRO1000895//Human DNA sequence *** SEQUENCING IN PROGRESS *** from clone 380F5, WORKING DRAFT SEQUENCE.//3.7e-111:569:96//AL031719

[16527] R-THYRO1000916//Homo sapiens clone DJO965K10, WORKING DRAFT SEQUENCE, 6 unordered pieces.//1.0e-97:554:92//AC006015

[16528] R-THYRO1000926//Homo sapiens cAMP-specific phosphodiesterase 8B (PDE8B) mRNA, partial cds.//9.6e-109:566:94//AF079529

[16529] R-THYRO1000934//Homo sapiens full-length insert cDNA clone ZD69A10.//1.6e-104:539:95//AF086378

[16530] R-THYRO1000951//Homo sapiens Chromosome 11q12 pac pDJ57114, WORKING DRAFT SEQUENCE, 29 unordered pieces.//8.9e-61:479:81//AC004229

[16531] R-THYRO1000952//Human autoimmune thyroid disease-related antigen mRNA.//5.3e-16:116:93//M28639

[16532] R-THYRO1000974//Homo sapiens ribosomal protein L33-like protein mRNA, complete cds.//3.2e-59:321:95//AF047440

[16533] R-THYRO1000975//Homo sapiens chromosome 19, cosmid F18718, complete sequence.//1.9e-44:396:79//AC006126

[16534] R-THYRO1000983//Homo sapiens chromosome 17, clone hRPK.271_K_{—}11, complete sequence.//0.99:71:78//AC005562

[16535] R-THYRO1000984//Homo sapiens Chromosome 11q12.2 PAC clone pDJ688p12 containing uteroglobin gene, WORKING DRAFT SEQUENCE, 11 unordered pieces.//6.7e-42:320:84//AC006078

[16536] R-THYRO1000988//Homo sapiens DNA sequence from PAC 230G1 on chromosome Xp11.3. Contains EST, STS and GSS, complete sequence.//6.7e-39:292:78//Z84466

[16537] R-THYRO1001003//HS_{—}3051_B1_H01_MR CIT Approved Human Genomic Sperm Library D Homo sapiens genomic clone Plate=3051 Col=1 Row=P, genomic survey sequence.//2.5e-39:310:83//AQ253727

[16538] R-THYRO1001031//Homo sapiens DNA sequence from PAC 230G1 on chromosome Xp11.3. Contains EST, STS and GSS, complete sequence.//2.5e-50:300:88//Z84466

[16539] R-THYRO1001033//CIT-HSP-2007J14.TF CIT-HSP Homo sapiens genomic clone 2007J14, genomic survey sequence.//5.1e-26:143:100//B56677

[16540] R-THYRO1001062//CIT-HSP-2386P3.TF.1 CIT-HSP Homo sapiens genomic clone 2386P3, genomic survey sequence.//1.4e-48:316:87//AQ239882

[16541] R-THYRO1001093

[16542] R-THYRO1001100//Homo sapiens BAC clone RG 152G 17 from 7q22-q31.1, complete sequence.//0.47:102:73//AC005070

[16543] R-THYRO101120

[16544] R-THYRO1001121//Homo sapiens mRNA for beta-tubulin folding cofactor D.1/8.9e-81:429:94//AJ006417

[16545] R-THYRO1001133//CIT-HSP-2381110.TR CIT-HSP Homo sapiens genomic clone 2381110, genomic survey sequence.//4.7e-12:237:67//AQ111077

[16546] R-THYRO1001134

[16547] R-THYRO1001142//H. sapiens CpG island DNA genomic Mse1 fragment, clone 81 dl, reverse read cpg81d1.rt1a.//0.95:214:60//Z56037

[16548] R-THYRO1001173//cSRL-27cl l-u cSRL flow sorted Chromosome 11 specific cosmid Homo sapiens genomic clone cSRL-27cl 1, genomic survey sequence.//4.6e-26:262:77//B04145

[16549] R-THYRO1001177

[16550] R-THYRO1001189//Homo sapiens DNA from chromosome 19, BAC 33152, complete sequence.//1.0e-41:281:87//AC003973

[16551] R-THYRO1001204

[16552] R-THYRO1001213//Human Alu repeat sequence A6.//3.8e-38:236:88//U12581

[16553] R-THYRO1001262//Homo sapiens, clone hRPK.16_A_{—}1, complete sequence.//8.7e-53:442:79//AC006227

[16554] R-THYRO1001271//*** SEQUENCING IN PROGRESS *** Homo sapiens chromosome 4, BAC clone C0224P12; HTGS phase 1, WORKING DRAFT SEQUENCE, 13 unordered pieces.//0.53:330:61//AC004630

[16555] R-THYRO1001290

[16556] R-THYRO1001313//H. sapiens CpG island DNA genomic Mse1 fragment, clone 195h3, forward read cpg195h3.ft1b.//0.046:126:66//Z57783

[16557] R-THYRO1001320//Human DNA sequence *** SEQUENCING IN PROGRESS *** from clone 424J12, WORKING DRAFT SEQUENCE.//3.0e-58:476:80//Z82207

[16558] R-THYRO1001321//Plasmodium falciparum MAL3P2, complete sequence.//1.0e-08:408:62//AL034558

[16559] R-nnnnnnnnnnnn

[16560] R-THYRO1001347//Homo sapiens mRNA for KIAA0745 protein, partial cds.//3.2e-08:266:64//AB08288

[16561] R-THYRO1001363//cSRL-72f5-u cSRL flow sorted Chromosome 11 specific cosmid Homo sapiens genomic clone cSRL-72f5, genomic survey sequence.//1.7e-85:471:92//B05884

[16562] R-THYRO1001365//Homo sapiens chromosome 10 clone CIT987SK-1163G10 map 10q25, complete sequence.//1.8e-109:584:94//AC005660

[16563] R-THYRO1001374

[16564] R-THYRO1001401//Human pigment epithelium-derived factor gene, complete cds.//4.2e-51:333:88//U29953

[16565] R-THYRO1001403//Human PAC clone DJ222H05 from Xq25-q26, complete sequence.//8.7e-38:307:82//AC002377

[16566] R-THYRO1001405

[16567] R-THYRO1001406//RPCI11-69F22.TK RPCII 1 Homo sapiens genomic clone R-69F22, genomic survey sequence.//1.9e-67:400:90//AQ238297

[16568] R-THYRO1001411//Human DNA sequence *** SEQUENCING IN PROGRESS *** from clone 80N2, WORKING DRAFT SEQUENCE.//2.2e-06:349:63//AL031123

[16569] R-THYRO1001426//*** SEQUENCING IN PROGRESS *** Homo sapiens genomic DNA (PAC 1118i22) from chromosome 11; HTGS phase 1, WORKING DRAFT SEQUENCE.//2.2e-89:506:86//AJ002553

[16570] R-THYRO1001434//Microcentus caryae 12S mitochondrial ribosomal RNA, small subunit, mitochondrial gene, partial sequence.//1.0:176:61//U77877

[16571] R-THYRO1001458//Human DNA sequence from clone 453C12 on chromosome 20q12-13.12 Contains SDC4 (syndecan 4 (amphiglycan, ryudocan)) predicts a gene like the mouse transcription factor RBP-L, MATN4 (matrilin-4) STS, GSS, CpG island, complete sequence.//3.3e-07:196:67//AL021578

[16572] R-THYRO1001480//Homo sapiens clone DJ0756HI 1, WORKING DRAFT SEQUENCE, S unordered pieces.//1.2e-99:517:95//AC006001

[16573] R-THYRO1100487//Homo sapiens, WORKING DRAFT SEQUENCE, 97 unordered pieces.//8.5e-14:221:70//AC004085

[16574] R-THYRO1001534//HS_{—}2242_B2_H04_MR CIT Approved Human Genomic Sperm Library D Homo sapiens genomic clone Plate=2242 Col=8 Row=P, genomic survey sequence.//0.00012:141:68//AQ182326

[16575] R-THYRO1001537//Human DNA sequence from clone 111F4 on chromosome Xq23 Contains GSSs, complete sequence.//0.42:323:60//AL023876

[16576] R-THYRO11001541//Homo sapiens clone RG228D17, WORKING DRAFT SEQUENCE, 2 unordered pieces.//1.7e-42:370:78//AC005077

[16577] R-THYRO1001559//Homo sapiens 12q24.2 PAC RPCI5-944M2 (Roswell Park Cancer Institute Human PAC Library) complete sequence.//1.0:144:67//AC005868

[16578] R-THYRO1001570//Plasmodium falciparum 3D7 chromosome 12 PFYAC492 genomic sequence, WORKING DRAFT SEQUENCE, 5 unordered pieces.//0.43:268:61//AC005308

[16579] R-THYRO11001573//M. avium rpsL gene.//0.98:131:66//X80120

[16580] R-THYRO1001584//A. longa plastid genes for ribosomal proteins and tRNAs.//0.29:502:58//X75653

[16581] R-THYRO1001595//Human DNA sequence *** SEQUENCING IN PROGRESS *** from clone Y313F4, WORKING DRAFT SEQUENCE.//1.5e-33:319:78//AL023808

[16582] R-THYRO1001602//Homo sapiens chromosome 17, clone hRPK.142_H-19, complete sequence.//4.4e-13:320:67//AC005919

[16583] R-THYRO1001605//Human DNA sequence from PAC 358H7 on chromosome X.//1.9e-32:391:76//Z77249

[16584] R-THYRO1001617//Homo sapiens cDNA for dihydroxyacetone phosphate acyltransferase (DAP-AT).//1.9e-81:448:92//AJ002190

[16585] R-THYRO1001637//Human DNA sequence *** SEQUENCING IN PROGRESS *** from clone 688G8, WORKING DRAFT SEQUENCE.//5.4e-41:381:78//AL031671

[16586] R-THYRO1001656//HS_{—}2201_B2_A08_MF CIT Approved Human Genomic Sperm Library D Homo sapiens genomic clone Plate=2201 Col=16 Row=B, genomic survey sequence.//0.096:162:63//AQ293168

[16587] R-THYRO1001661//Human immunoglobulin-associated (B29) gene, promoter and exon 1, partial cds.//1.0:229:62//U22954

[16588] R-THYRO1001671//Homo sapiens mRNA for 2′-5′ oligoadenylate synthetase 59 kDa isoform.//4.8e-110:562:95//AJ225089

[16589] R-THYRO1001673//CIT-HSP-2327D12.TR CIT-HSP Homo sapiens genomic clone 2327D12, genomic survey sequence.//1.5e-17:224:68//AQ042426

[16590] R-THYRO1001703//Homo sapiens clone 198 unknown mRNA, partial sequence.//1.6e-44:251:93//AF091072

[16591] R-THYRO1001706//Homo sapiens clone DJ0935K16, complete sequence.//1.8e-26:378:68//AC006011

[16592] R-THYRO1001721//, complete sequence.//1.3e-101:571:92//AC005500

[16593] R-nnnnnnnnnnnn

[16594] R-THYRO1001745//Homo sapiens chromosome 5, PAC clone 247f3 (LBNL H85), complete sequence.//1.1e-15:193:70//AC004777

[16595] R-THYRO1001746//Human inter-alpha-trypsin inhibitor light chain (ITI) gene, exon 3.//0.54:260:61//M88244

[16596] R-THYRO1001772//Human DNA sequence *** SEQUENCING IN PROGRESS *** from clone 30A23, WORKING DRAFT SEQUENCE.//1.6e-12:285:64//AL022156

[16597] R-THYRO1001793

[16598] R-THYRO1001809//Human DNA sequence *** SEQUENCING IN PROGRESS * from clone 1071N3, WORKING DRAFT SEQUENCE.//2.5e-43:486:74//AL031728

[16599] R-THYRO1001854//Homo sapiens chromosome 17, clone hRPK.74_E_{—}22, complete sequence.//5.0e-41:245:87//AC005696

[16600] R-THYRO1001895//Human Chromosome 11p14.3 PAC clone 6-106f23, complete sequence.//4.4e-12:419:61//AC005137

[16601] R-THYRO1001907//Homo sapiens Chromosome 22q11.2 Cosmid Clone 24b In DGCR Region, complete sequence.//8.1e-35:340:78//AC000075

[16602] R-VESEN1000122//Homo sapiens Luman mRNA, complete cds.//1.3e-23:138:98//AF009368

[16603] R-Y79AA1000013

[16604] R-Y79AA1000033//Homo sapiens BAC clone GS114109 from 7 p14-p15, complete sequence.//9.9e-112:551:97//AC006027

[16605] R-Y79AA1000037//CIT-HSP-2334F3.TR CIT-HSP Homo sapiens genomic clone 2334F3, genomic survey sequence.//0.16:308:60//AQ036673

[16606] R-Y79AA1000059//Homo sapiens Chromosome 16 BAC clone CIT987SK-A-279B10, complete sequence.//6.1e-56:314:88//AC002300

[16607] R-Y79AA1000065//Human carboxylesterase gene, exon 5.//0.64:203:63//D21079

[16608] R-Y79AA1000131//*** SEQUENCING IN PROGRESS *** Homo sapiens chromosome 4, BAC clone C0548N01; HTGS phase 1, WORKING DRAFT SEQUENCE, 31 unordered pieces.//7.0e-18:169:79//AC004795

[16609] R-Y79AA1000181//Human DNA sequence from clone 612B18 on chromosome 1q24-25.3 Contains exon from gene similar to 40S ribosomal protein, first coding exon of dynamin 2 (DYNII). ESTs, STS, GSS, CpG Island, complete sequence.//1.1e-106:474:98//AL031864

[16610] R-Y79AA1000202//CIT978SK-A-518G2.TP CIT978SK Homo sapiens genomic clone A-518G2, genomic survey sequence.//1.0e-10:78:97//B68074

[16611] R-Y79AA1000214//Homo sapiens clone DJ0673M15, WORKING DRAFT SEQUENCE, 33 unordered pieces.//6.5e-59:386:90//AC004854

[16612] R-Y79AA1000230//Cytauxzoon felis 18S ribosomal RNA.//1.0:167:62//L19080

[16613] R-Y79AA1000231//HS_{—}3009_A1_H03_T7 CIT Approved Human Genomic Sperm Library D Homo sapiens genomic clone Plate=3009 Col=5 Row=O, genomic survey sequence.//6.4e-52:348:88//AQ090225

[16614] R-Y79AA1000258//Hepatitis C virus HCV-B9 gene for NS5, partial cds.//0.65:127:65//D10558

[16615] R-Y79AA1000268//Human DNA sequence from PAC 162H14 on chromosome 22. Contains 3′ part of a FIBULIN 1 like gene and ESTs, complete sequence.//4.7e-40:300:84//Z98047

[16616] R-Y79AA1000313//Human DNA sequence from PAC 179115, BRCA2 gene region chromosome 13q12-q13 contains Klotho ESTs and CpG island.//5.0e-14:136:83//Z92540

[16617] R-Y79AA1000328

[16618] R-Y79AA1000342//S. clavuligerus linear plasmid pSCL (complete sequence).//0.55:189:65//X54107

[16619] R-Y79AA1000346//Human MEST mRNA, complete cds.//0.00013:52:100//D78611

[16620] R-Y79AA1000349//M. musculus Spnr mRNA for RNA binding protein.//8.8e-36:300:81//X84692

[16621] R-Y79AA1000355//Human DNA sequence from clone 551E13 on chromosome Xp11.2-11.3 Contains farnesyl pyrophosphate synthetase pseudogene, VT4 protein pseudogene, EST, GSS, complete sequence.//5.7e-45:403:80//AL022163

[16622] R-Y79AA1000368

[16623] R-Y79AA1000405//RPCI 1-16B 12.TPB RPCI-11 Homo sapiens genomic clone RPCI-11-16B 12, genomic survey sequence.//0.10:171:65//B88000

[16624] R-Y79AA1000410//Human DNA sequence * SEQUENCING IN PROGRESS * from clone 92N15, WORKING DRAFT SEQUENCE.//4.1e-50:361:83//Z93097

[16625] R-Y79AA1000420//Plasmodium falciparum merozoite surface protein 4, merozoite surface protein 5, merozoite surface protein 2, and adenylosuccinate lyase genes, complete cds.//0.071:474:57//AF033037

[16626] R-Y79AA1000469//Homo sapiens clone NHO140K04, complete sequence.//1.8e-86:221:90//AC005033

[16627] R-Y79AA1000480//Homo sapiens chromosome 4 clone B240N9 map 4q25, complete sequence.//2.1e-14:179:72//AC004057

[16628] R-Y79AA1000538//Homo sapiens clone DJ0826E18, WORKING DRAFT SEQUENCE, 4 unordered pieces.//4.5e-43:321:83//AC005282

[16629] R-Y79AA1000539//Homo sapiens PAC clone DJ0074M20 from X, complete sequence.//0.0012:275:59//AC006143

[16630] R-Y79AA1000540//Z. diploperennis repetitive DNA (clone ZEAR 260).//0.0017:258:62//X53609

[16631] R-Y79AA1000560//Mouse mRNA for alpha-adaptin (C).//6.1e-32:390:70//X 14972

[16632] R-Y79AA1000574//Homo sapiens chromosome 9q34, clone 23B4, complete sequence.//0.96:224:61//AC002325

[16633] R-Y79AA1000627//Homo sapiens full-length insert cDNA ZA77G02.//6.3e-100:533:94//AF075117

[16634] R-Y79AA1000705//RPCI11-76G7.TV RPCII 1 Homo sapiens genomic clone R-76G7, genomic survey sequence.//4.6e-88:429:98//AQ268433

[16635] R-Y79AA1000734//Homo sapiens peroxisomal biogenesis factor (PEXI 1b) mRNA, complete cds.//2.7e-112:586:95//AF093670

[16636] R-Y79AA1000748

[16637] R-Y79AA1000752

[16638] R-Y79AA1000774//CIT-HSP-2288K24.TF CIT-HSP Homo sapiens genomic clone 2288K24, genomic survey sequence.//5.3e-45:316:86//AQ005014

[16639] R-Y79AA1000782//Human mRNA for KIAA0246 gene, partial cds.//5.0e-17:107:100//D87433

[16640] R-Y79AA1000784//Plasmodium falciparum 3D7 chromosome 12 PFYAC 181 genomic sequence, WORKING DRAFT SEQUENCE, 8 unordered pieces.//0.00034:520:55//AC005505

[16641] R-Y79AA1000794//Human DNA sequence *** SEQUENCING IN PROGRESS *** from clone 989HI 1, WORKING DRAFT SEQUENCE.//0.015:322:60//Z83851

[16642] R-Y79AA1000800//M. musculus tex264 mRNA (3′region).//1.1e-06:104:78//X80427

[16643] R-nnnnnnnnnnnn//CIT-HSP-2295G6.TF CIT-HSP Homo sapiens genomic clone 2295G6, genomic survey sequence.//0.67:152:62//AQ007605

[16644] R-Y79AA1000805//Human Chromosome 11 Cosmid cSRL30hl 1, complete sequence.//3.1e-26:423:68//U73642

[16645] R-Y79AA1000824//Human DNA sequence *** SEQUENCING IN PROGRESS *** from clone 329A5, WORKING DRAFT SEQUENCE.//1.1e-08:449:61//Z97832

[16646] R-Y79AA1000827//Triticum aestivum heat shock protein 101 kDa (HSP101) mRNA, complete cds.//1.0:101:69//AF083344

[16647] R-Y79AA1000850//Homo sapiens small optic lobes homolog (SOLH) mRNA, complete cds.//0.40:386:59//U85647

[16648] R-Y79AA1000962//CIT-HSP-2298N11.TR CIT-HSP Homo sapiens genomic clone 2298N11, genomic survey sequence.//0.00019:253:65//AQ013111

[16649] R-Y79AA1000968//Rattus norvegicus initiation factor eIF-2B gamma subunit (eIF-2B gamma) mRNA, complete cds.//1.7e-58:446:80//U38253

[16650] R-Y79AA1000969

[16651] R-Y79AA1000976//CIT-HSP-2350C4.TF CIT-HSP Homo sapiens genomic clone 2350C4, genomic survey sequence.//3.3e-60:295:100//AQ061422

[16652] R-Y79AA1000985//Mus musculus pericentrin mRNA, complete cds.//5.9e-38:348:76//U05823

[16653] R-Y79AA1001023

[16654] R-Y79AA1001041

[16655] R-Y79AA1001048

[16656] R-Y79AA1001061//Homo sapiens Chromosome 16 BAC clone CIT987SK-A-427H10, complete sequence.//1.2e-60:537:78//AC004626

[16657] R-Y79AA1001068//Homo sapiens P1 clone GSP13996 from Sq12, complete sequence.//2.3e-41:405:77//AC005031

[16658] R-Y79AA1001077

[16659] R-Y79AA1001078//Homo sapiens 12q13.1 PAC RPCII-228P16 (Roswell Park Cancer Institute Human PAC Library) complete sequence.//2.0e-09:534:59//AC004801

[16660] R-Y79AA1001105//Staphyloccous epidermidis trimethoprim resistance plasmid pSK639.//0.0072:309:63//U40259

[16661] R-Y79AA1001145//RPCI11-59N12.TK RPCII 1 Homo sapiens genomic clone R-59N12, genomic survey sequence.//3.7e-07:256:64//AQ200068

[16662] R-Y79AA1001167//Homo sapiens genomic DNA, chromosome 21q22.2 (Down Syndrome region), segment 5/15, WORKING DRAFT SEQUENCE.//0.55:223:61//AP000012

[16663] R-Y79AA1001177//Human gene for Gi3 alpha protein, intron 7 through exon 9, variant U6 gene, and snRNP E protein pseudogene LH87.//7.0e-09:203:69//X54048

[16664] R-Y79AA1001185

[16665] R-Y79AA1001211//Homo sapiens 12 p13.3 BAC RPCI11-543P15 (Roswell Park Cancer Institute Human BAC Library) complete sequence.//2 .1e-32:277:81//AC005912

[16666] R-Y79AA1001216//Human chromosome 12p 13 sequence, complete sequence.//0.98:325:59//U47924

[16667] R-Y79AA1001228//Arabidopsis thaliana genomic DNA, chromosome 5, P1 clone: MAB16, complete sequence.//0.0034:378:59//AB018112

[16668] R-Y79AA1001233//Homo sapiens clone DJ1178G13, WORKING DRAFT SEQUENCE, 5 unordered pieces.//0.19:106:72//AC004988

[16669] R-Y79AA1001236//Homo sapiens mRNA for JM23 protein, complete coding sequence (clone IMAGE 34581 and IMAGE 45355 and LLNLc1101133Q7 (RZPD Berlin)).//3.4e-109:549:95//AJ005892

[16670] R-Y79AA1001281

[16671] R-Y79AA1001299//Homo sapiens SNF5/INII gene, exon 9.//6.3e-24:133:100//Y17126

[16672] R-Y79AA1001312//Human immunodeficiency virus type 1 variant 43 polymerase pseudogene, partial cds.//0.0070:284:58//U45372

[16673] R-Y79AA1001323//Fugu rubripes GSS sequence, clone 027L23aG3, genomic survey sequence.//0.1 I :125:70//AL025355

[16674] R-Y79AA1001384//W. makrii mitochondrial CYTB and tRNA genes.//0.070:209:65//X66594

[16675] R-Y79AA1001391//Plasmodium falciparum DNA *** SEQUENCING IN PROGRESS * from MAL1P2, WORKING DRAFT SEQUENCE.//0.80:163:62//AL031745

[16676] R-Y79AA1001394//Homo sapiens DNA from chromosome 19, cosmid R29144, complete sequence.//0.99:241:63//AC004221

[16677] R-Y79AA1001402//Homo sapiens Chr.14 PAC RPCI4-794B2 (Roswell Park Cancer Institute Human PAC Library) complete sequence.//0.25:81:80//AC005924

[16678] R-Y79AA1001493

[16679] R-Y79AA1001511//Human DNA sequence from clone 931 K24 on chromosome 20p 12 Contains ESTs and GSSs, complete sequence.//1.3e-35:207:95//AL034430

[16680] R-Y79AA1001533//Mouse mRNA for RNA polymerase I associated factor (PAF53), complete cds.//2.7e-44:285:81//D14336

[16681] R-nnnnnnnnnnnn//Human DNA sequence from clone 113J7 on chromosome Xp11.22-11.4. Contains part of a putative Homeobox (pseudo?) gene, ESTs and an STS, complete sequence.//0.70:365:60//AL023574

[16682] R-Y79AA1001548//Homo sapiens phosphatidylinositol 4-kinase mRNA, complete cds.//5.9e-95:517:91//L36151

[16683] R-Y79AA1001555

[16684] R-Y79AA1001585

[16685] R-Y79AA1001594//Human DNA sequence from PAC 60G11 on chromosome X; contains STS.//6.6e-19:241:76//Z94722

[16686] R-Y79AA1001603//H. sapiens CpG island DNA genomic Mse1 fragment, clone 72f8, forward read cpg72f8.ft1a.//3.3e-21:131:96//Z62766

[16687] R-Y79AA1001613

[16688] R-Y79AA1001647//Human DNA sequence from PAC 36J3, between markers DXS1192 and DXS102 on chromosome X.//6.3e-08:338:6311Z82975

[16689] R-Y79AA1001665//Homo sapiens genomic DNA, chromosome 21q22.2 (Down Syndrome region), segment 1/15, WORKING DRAFT SEQUENCE.//3.2e-11:114:84//AP000008

[16690] R-Y79AA1001679//O. cuniculus lambda-crystallin mRNA, complete cds.//3.9e-15:270:68//M22743

[16691] R-nnnnnnnnnnnn//RPCII1-42M5.TJ RPCII 1 Homo sapiens genomic clone R-42M5, genomic survey sequence.//0.013:64:89//AQ052792

[16692] R-Y79AA1001696//Apis mellifera ligustica complete mitochondrial genome.//9.3e-09:428:58//L06178

[16693] R-Y79AA1001705

[16694] R-Y79AA1001711//Mus musculus 60 kDa ribonucleoprotein Ro gene, partial cds.//2.2e-45:554:75//AF042139

[16695] R-Y79AA1001781//Plasmodium falciparum chromosome 2, section 39 of 73 of the complete sequence.//1.0:414:57//AE001402

[16696] R-nnnnnnnnnnnn//Human DNA sequence *** SEQUENCING IN PROGRESS *** from clone 51 OD11, WORKING DRAFT SEQUENCE.//2.8e-05:329:61//Z98044

[16697] R-Y79AA1001827//Oryctolagus cuniculus P1US mRNA, complete cds.//2.3e-90:557:89//U74297

[16698] R-Y79AA1001846//Homo sapiens DNA sequence from PAC 179N 16 on chromosome 6p21.1-21.33. Contains the SAPK4 (MAPK p38delta) gene, and the alternatively spliced SAPK2 gene coding for CSaids binding protein CSBP2 and a MAPK p38beta LIKE protein. Contains ESTs, STSs and two predicted CpG islands, complete sequence.//2.1e-34:306:78//Z95152

[16699] R-Y79AA1001848//Sequence 11 from patent U.S. Pat. No. 5,449,616.//1.0:221:59//I14369

[16700] R-Y79AA1001866//Arabidopsis thaliana genomic DNA, chromosome 5, TAC clone: K23L20, complete sequence.//0.0089:527:58//AB016874

[16701] R-Y79AA1001874

[16702] R-Y79AA1001875//M. musculus mRNA for Rab7 protein.//5.8e-45:170:92//X89650

[16703] R-Y79AA1001923//Human DNA sequence from clone 353H6 on chromosome Xq25-26.2. Contains the alternatively spliced SMARCA1 gene for SW1/SNF related, matrix associated, actin dependent regulator of chromatin, subfamily a, member 1 (SNF2L1) and a 40S Ribosomal Protein S26 pseudogene. Contains ESTs, STSs and GSSs, complete sequence.//1.0:138:68//AL022577

[16704] R-Y79AA1002027//Liverwort Marchantia polymorpha chloroplast genome DNA.//0.71:153:67//X04465

[16705] R-Y79AA1002083//Human DNA sequence *** SEQUENCING IN PROGRESS *** from clone 172B20, WORKING DRAFT SEQUENCE.//1H.0:178:64//AL022319

[16706] R-Y79AA1002089//Homo sapiens clone GS111G14, WORKING DRAFT SEQUENCE, 5 unordered pieces.//6.3e-49:377:81//AC005011

[16707] R-Y79AA1002093//Homo sapiens (clone SEL366) 17q YAC (368C7) RNA.//4.0e-32:174:99//L77612

[16708] R-Y79AA1002103//CIT-HSP-2328121.TR CIT-HSP Homo sapiens genomic clone 2328121, genomic survey sequence.//1.9e-44:245:96//AQ044502

[16709] R-Y79AA1002115//CITBI-E1-2514F10.TF CITBI-E1 Homo sapiens genomic clone 2514F10, genomic survey sequence.//1.8e-24:249:78//AQ265752

[16710] R-Y79AA1002125//RPCII 1-15J6.TV RPCI-11 Homo sapiens genomic clone RPCI-11-15J6, genomic survey sequence.//8.5e-21:147:91//B75354

[16711] R-Y79AA1002139

[16712] R-Y79AA1002204

[16713] R-nnnnnnnnnnnn//Human ankyrin G (ANK-3) mRNA, complete cds.//0.040:319:59//U13616

[16714] R-Y79AA1002209//Psilotum nudum RT gene for reverse transcriptase (PT4).//0.99:106:65//X65415

[16715] R-Y79AA1002210

[16716] R-Y79AA1002211//H. sapiens NGAL gene.//1.0:311:59//X99133

[16717] R-Y79AA1002220//Plasmodium falciparum DNA *** SEQUENCING IN PROGRESS *** from MAL4P1, WORKING DRAFT SEQUENCE.//5.9e-07:535:57//AL034557

[16718] R-Y79AA1002229

[16719] R-Y79AA1002234//Homo sapiens mRNA for KIAA0692 protein, partial cds.//6.1e-117:564:98//AB014592

[16720] R-Y79AA1002246

[16721] R-Y79AA1002258//Homo sapiens mRNA for HIP3, complete cds.//1.3e-92:453:97//AB013384

[16722] R-Y79AA1002298//HS_{—}3071_B2_E08_MR CIT Approved Human Genomic Sperm Library D Homo sapiens genomic clone Plate=3071 Col=16 Row=J, genomic survey sequence.//1.9e-56:384:87//AQ171331

[16723] R-Y79AA1002307//Homo sapiens mRNA for KIAA0634 protein, partial cds.//2.5e-108:403:99//AB014534

[16724] R-Y79AA1002311//Homo sapiens chromosome 10 clone CIT987SK-1173112 map 10q25, complete sequence.//1.1e-07:368:61//AC005887

[16725] R-Y79AA1002351

[16726] R-Y79AA1002361//H. sapiens CpG island DNA genomic Mse1 fragment, clone 65b9, reverse read cpg65b9.rt1a.//0.57:59:79//Z62206

[16727] R-Y79AA1002399//Homo sapiens chromosome 17, clone hRPK.700_H_{—}6, complete sequence.//2.0e-98:385:99//AC005920

[16728] R-Y79AA1002407//Homo sapiens chromosome 17, clone hRPC.842_A_{—}23, complete sequence.//5.4e-59:490:76//AC004662

[16729] R-Y79AA1002416//Homo sapiens Xp22 GSHB-314C4 (Genome Systems Human BAC library) complete sequence.//6.3e-08:103:80//AC004087

[16730] R-Y79AA1002431

[16731] R-nnnnnnnnnnnn//Mouse transcriptional control element.//0.064:84:71//M17284

[16732] R-Y79AA1002472//Homo sapiens chromosome 19, BAC CIT-B-393i15 (BC301323), complete sequence.//1.6e-103:525:96//AC006116

[16733] R-Y79AA1002482//Homo sapiens chromosome 18, clone hRPK.474_N_{—}24, complete sequence.//9.7e-38:302:83//AC006238

[16734] R-Y79AA1002487//P. falciparum complete gene map of plastid-like DNA (IR-B).//0.23:266:61//X95276

[16735] Homology Search Result Data 4.

[16736] The result of the homology search of the Human Unigene using the clone sequence of 5′-end.

[16737] Data include

[16738] the name of clone,

[16739] title of the top hit data,

[16740] the P-value: the length of the compared sequence: identity (%), and

[16741] the Accession No. of the top hit data, as in the order separated by //.

[16742] Data are not shown for the clones in which the P-value was higher than 1.

[16743] F-HEMBA1000005//EST//4.3e-87:422:97//Hs.147830:AI222069

[16744] F-HEMBA1000012//Human endosome-associated protein (EEA1) mRNA, complete cds//0.82:170:64//Hs.2864:L40157

[16745] F-HEMBA1000020//Homo sapiens beta 2 gene//4.0e-74:529:83//Hs.150244:U83668

[16746] F-HEMBA1000030//ESTs//1.1e-91:494:93//Hs.7958:W22078

[16747] F-HEMBA1000042//ESTs//3.5e-22:228:77//Hs.145406:AI253247

[16748] F-HEMBA1000046//ESTs, Highly similar to PRE-MRNA SPLICING FACTOR RNA HELICASE PRP22 [Saccharomyces cerevisiae]//0.00019:192:65//Hs.7900:W22411

[16749] F-HEMBA1000050//EST//0.81:74:72//Hs.156298:AI336759

[16750] F-HEMBA1000076//ESTs//0.11:252:62//Hs.131939:AI417910

[16751] F-HEMBA1000111//ESTs//8.5e-89:449:96//Hs.41105:N66734

[16752] F-HEMBA1000129//Human phosphatidylinositol 3-kinase catalytic subunit p110delta mRNA, complete cds//0.27:342:61//Hs.14207:U86453

[16753] F-HEMBA1000141//Homo sapiens mRNA for KIAA0797 protein, partial cds//6.8e-169:791:98//Hs.27197:AB018340

[16754] F-HEMBA1000150//Homo sapiens mRNA for KIAA0788 protein, partial cds//1.4e-37:243:88//Hs.2397:Z70200

[16755] F-HEMBA1000156//ESTs, Weakly similar to The KIAA0138 gene product is novel. [H. sapiens]//5.3e-80:383:98//Hs.135552:AI215187

[16756] F-HEMBA1000158//Homo sapiens OPA-containing protein mRNA, complete cds//2.1e-07:265:63//Hs.85313:AF071309

[16757] F-HEMBA1000168//ESTs//6.1e-35:257:85//Hs.13533:H23079

[16758] F-HEMBA1000180//ESTs, Moderately similar to RETROVIRUS-RELATED POL POLYPROTEIN [H. sapiens]//1.3e-18:111:96//Hs.163863:W28729

[16759] F-HEMBA1000185//H. sapiens ERF-2 mRNA//1.0:125:68//Hs.78909:U07802

[16760] F-HEMBA1000193//EST//1.5e-48:266:95//Hs.160642:AI240133

[16761] F-HEMBA1000201//Human In11 mRNA, complete cds//6.5e-75:440:92//Hs.155626:U04847

[16762] F-HEMBA1000213//ESTs//0.21:239:62//Hs.26838:AA527529

[16763] F-HEMBA1000216//Homo sapiens clone 23698 mRNA sequence/11.1e-57:529:68//Hs.8136:U81984

[16764] F-HEMBA1000227//Human RNA-binding protein CUG-BP/hNab50 (NAB50) mRNA, complete cds//1.3e-05:311:64//Hs.81248:U63289

[16765] F-HEMBA1000231

[16766] F-HEMBA1000243//EST//5.9e-52:359:85//Hs.141433:N23377

[16767] F-HEMBA1000244//H. sapiens mRNA for cytokine inducible nuclear protein//0.0022:350:60//Hs.74019:X83703

[16768] F-HEMBA1000251//ESTs//3.2e-84:443:95//Hs.21068:N47460

[16769] F-HEMBA1000264//ESTs//0.76:227:61//Hs.5159:AA588562

[16770] F-HEMBA1000280//EST//1.7e-12:149:75//Hs.103418:AA035568

[16771] F-HEMBA1000282//ESTs//1.7e-16:164:79//Hs.123111:AA813186

[16772] F-HEMBA1000288//ESTs//5.4e-06:154:68//Hs.54174:N64406

[16773] F-HEMBA1000290//Human novel homeobox mRNA for a DNA binding protein//3.8e-07:412:61//Hs.37035:U07664

[16774] F-HEMBA1000302//EST//1.2e-41:238:94//Hs.147245:AI206095

[16775] F-HEMBA1000303

[16776] F-HEMBA1000304//ESTs//3.5e-11:96:87//Hs.163057:AA728946

[16777] F-HEMBA1000307//EST//7.7e-05:280:62//Hs.146462:AI124898

[16778] F-HEMBA1000327//ESTs//5.3e-92:435:99//Hs.100605:AA305965

[16779] F-HEMBA1000333//Human mRNA for KIAA0206 gene, partial cds//0.84:395:56//Hs.79299:D86961

[16780] F-HEMBA1000338//ESTs, Moderately similar to novel stromal cell protein [M. musculus]//2.4e-38:317:80//Hs.99189:X84712

[16781] F-HEMBA1000351//Human Line-1 repeat mRNA with 2 open reading frames//0.020:334:59//Hs.23094:M19503

[16782] F-HEMBA1000355//Myosin, heavy polypeptide 11, smooth muscle//0.11:336:61//Hs.78344:AF001548

[16783] F-HEMBA1000356//H. sapiens ERF-2 mRNA//0.031:317:59//Hs.78909:U07802

[16784] F-HEMBA1000357//Human mRNA for KIAA0118 gene, partial cds1/1.2e-50:441:78//Hs.154326:D42087

[16785] F-HEMBA1000366//ESTs//0.025:56:87//Hs.141629:H74010

[16786] F-HEMBA1000369//Homo sapiens PAC clone DJ0669B10 from 7q33-q35//0.99:433:58//Hs.159899:AC004853

[16787] F-HEMBA1000376//Oxytocin receptor//3.4e-43:569:70//Hs.2820:X64878

[16788] F-HEMBA1000387//ESTs//8.2e-104:535:94//Hs.78110:AA741320

[16789] F-HEMBA1000390//Homo sapiens BAC clone RG119C02 from 7 p15//2.3e-141:712:95//Hs.22900:AC004520

[16790] F-HEMBA1000392//Homo sapiens clone 24619 mRNA sequence//1.7e-47:461:74//Hs.139088:AF070533

[16791] F-HEMBA1000396//ESTs, Weakly similar to hypothetical protein [H. sapiens]//1.2e-26:351:70//Hs.138992:C14008

[16792] F-HEMBA1000411//EST//2.8e-27:401:71//Hs.138719:N52915

[16793] F-HEMBA1000418//ESTs//0.0094:375:61//Hs.40140:AI079253

[16794] F-HEMBA1000422//EST//6.2e-23:225:78//Hs.132635:AI032875

[16795] F-HEMBA1000428//Homo sapiens mRNA, chromosome I specific transcript KIAA0501//7.6e-31:616:66//Hs.159897:AB007970

[16796] F-HEMBA1000434//EST//0.0031:157:64//Hs.162328:AA559034

[16797] F-HEMBA1000442//EST//1.0:201:61//Hs.162434:AA577398

[16798] F-HEMBA1000456//Fanconi anemia complementation group C//0.58:362:59//Hs.37953:X66893

[16799] F-HEMBA1000459//EST//9.2e-21:157:86//Hs.132635:A1032875

[16800] F-HEMBA1000460//ESTs//2.9e-77:409:95//Hs.27135:W49590

[16801] F-HEMBA1000464//ESTs//6.6e-17:365:65//Hs.150675:AA127853

[16802] F-HEMBA1000469

[16803] F-HEMBA1000488//Homo sapiens HIV-1 inducer of short transcripts binding protein (FBII) mRNA, complete cds//0.15:253:58//Hs.104640:AF000561

[16804] F-HEMBA1000490//Homo sapiens kinectin mRNA, complete cds//0.71:539:56//Hs.82709:Z22551

[16805] F-HEMBA1000491//ESTs//2.0e-21:361:65//Hs.152453:AA864970

[16806] F-HEMBA1000501//Homo sapiens tapasin (NGS-17) mRNA, complete cds//2.5e-39:312:77//Hs.5247:AF029750

[16807] F-HEMBA1000504//Homo sapiens mRNA for osteoblast specific factor 2 (OSF-2os)//1.3e-08:57:100//Hs.155095:D13666

[16808] F-HEMBA1000505//Homo sapiens KE04p mRNA, complete cds//1.0:197:62//Hs.131962:AF064093

[16809] F-HEMBA1000508//EST//0.67:156:60//Hs.162898:AA659646

[16810] F-HEMBA1000518

[16811] F-HEMBA1000519//EST//6.8e-52:300:91//Hs.149580:AI281881

[16812] F-HEMBA1000520//ESTs, Weakly similar to coded for by C. elegans cDNA CEESB82F [C. elegans]//2.9e-16:132:84//Hs.155871:AA533783

[16813] F-HEMBA1000523//ESTs, Highly similar to TESTIS-SPECIFIC PROTEIN PBS13 [Mus musculus]//2.1e-25:192:87//Hs.22383:R51067

[16814] F-HEMBA1000531//ESTs, Weakly similar to heat shock protein [H. sapiens]//2.4e-57:288:97//Hs.116022:AA455706

[16815] F-HEMBA1000534//Homo sapiens PYRIN (MEFV) mRNA, complete cds//2.8e-47:153:88//Hs.113283:AF018080

[16816] F-HEMBA1000540//ESTs//8.6e-07:60:100//Hs.109755:AA180809

[16817] F-HEMBA1000542//Human lysyl oxidase-like protein mRNA, complete cds//0.088:581:57//Hs.65436:U24389

[16818] F-HEMBA1000545//Human kpni repeat mrna (cdna clone pcd-kpni-4), 3′ end//7.8e-106:731:83//Hs.139107:K00629

[16819] F-HEMBA1000555//Human mRNA for KIAA0242 gene, partial cds//0.75:283:58//Hs.77495:D87684

[16820] F-HEMBA1000557//ESTs//3.9e-27:389:71//Hs.125087:AA495729

[16821] F-HEMBA1000561//Homo sapiens mRNA for KIAA0760 protein, partial cds//3.8e-64:665:72//Hs.137168:AB018303

[16822] F-HEMBA1000563//ESTs//3.8e-51:257:98//Hs.47122:AI338977

[16823] F-HEMBA1000568//EST//0.12:270:61//Hs.134833:AI091046

[16824] F-HEMBA1000569//H. sapiens mRNA encoding GPI-anchored protein p137//3.8e-19:409:62//Hs.119283:Z48042

[16825] F-HEMBA1000575//EST//0.060:156:64//Hs.126277:AA826681

[16826] F-HEMBA1000588//ESTs, Weakly similar to weakly similar to myosin heavy chain [C. elegans]//7.7e-41:217:96//Hs.55084:AA479162

[16827] F-HEMBA1000591//Homo sapiens mRNA for EIB-55 kDa-associated protein//2.3e-44:228:97//Hs.155218:AJ007509

[16828] F-HEMBA1000592//ESTs, Weakly similar to sorting nexin I [H. sapiens]//1.7e-27:463:65//Hs.13794:AA203241

[16829] F-HEMBA1000594//Human clone 230971 defective mariner transposon Hsmar2 mRNA sequence//4.0e-68:574:79//Hs.159176:U92019

[16830] F-HEMBA1000604//ESTs//3.3e-21:158:74//Hs.142924:AI092535

[16831] F-HEMBA1000608//Homo sapiens mRNA for KIAA0456 protein, partial cds//3.7e-120:561:99//Hs.5003:AB007925

[16832] F-HEMBA1000622//Homo sapiens DEC-205 mRNA, complete cds//5.2e-34:592:68//Hs.153563:AF011333

[16833] F-HEMBA1000636//ESTs, Weakly similar to 50S RIBOSOMAL PROTEIN L20 [E. coli]//7.4e-22:166:84//Hs.26252:AA643235

[16834] F-HEMBA1000637//Homo sapiens mRNA for KIAA0690 protein, partial cds//2.1e-138:639:99//Hs.60103:AB014590

[16835] F-HEMBA1000655//ESTs//1.2e-54:503:77//Hs.140864:AA176174

[16836] F-HEMBA1000657//Mucin 1, transmembrane//0.99:219:61//Hs.89603:J05582

[16837] F-HEMBA1000662//ESTs//2.2e-52:257:99//Hs.63243:AI123912

[16838] F-HEMBA1000673//H. sapiens mRNA for translin associated protein X1/1.7e-47:366:79//Hs.96247:X95073

[16839] F-HEMBA1000682//Oxytocin receptor//4.7e-59:673:72//Hs.2820:X64878

[16840] F-HEMBA1000686

[16841] F-HEMBA1000702

[16842] F-HEMBA1000705//EST//0.047:363:60//Hs.136379:AA521309

[16843] F-HEMBA1000719//ESTs//2.7e-68:333:98//Hs.146195:AI039850

[16844] F-HEMBA1000722//ESTs//0.49:283:60//Hs.21108:N92630

[16845] F-HEMBA1000726//EST//1.1e-45:183:87//Hs.149580:AI281881

[16846] F-HEMBA1000727//ESTs//4.8e-95:442:100//Hs.22119:AA885491

[16847] F-HEMBA1000747

[16848] F-HEMBA1000749//ESTs//8.0e-14:108:77//Hs.154892:AI091568

[16849] F-HEMBA1000752//EST//1.3e-25:344:69//Hs.160992:H52716

[16850] F-HEMBA1000769//ESTs//0.0018:206:63//Hs.153268:AA887239

[16851] F-HEMBA1000773//ESTs//0.56:336:58//Hs.105964:N35803

[16852] F-HEMBA1000774//EST//4.0e-38:312:79//Hs.162197:AA535216

[16853] F-HEMBA1000791//ESTs//2.8e-87:413:99//Hs.112050:AA431300

[16854] F-HEMBA1000817//ESTs//5.6e-124:617:96//Hs.101366:AA167536

[16855] F-HEMBA1000822//ESTs//0.94:347:58//Hs.23905:AA928542

[16856] F-HEMBA1000827//EST//0.064:133:60//Hs.138738:N58367

[16857] F-HEMBA1000843

[16858] F-HEMBA1000851//Fragile X mental retardation 1//0.014:219:62//Hs.89764:X69962

[16859] F-HEMBA1000852//Arylsulfatase D//6.7e-38:244:75//Hs.43887:X83572

[16860] F-HEMBA1000867

[16861] F-HEMBA1000869//ESTs//5.1e-33:166:77//Hs.141186:R99609

[16862] F-HEMBA1000870//EST//0.032:130:66//Hs.157351:AI367237

[16863] F-HEMBA1000872//ESTs//2.4e-20:134:92//Hs.155982:AA406047

[16864] F-HEMBA1000876//EST//5.3e-20:233:72//Hs.124339:AA829660

[16865] F-HEMBA1000908//ESTs//5.4e-28:219:84//Hs.12247:AI203154

[16866] F-HEMBA1000910//Human DNA sequence from clone 1409 on chromosome Xp11.1-11.4. Contains a Inter-Alpha-Trypsin Inhibitor Heavy Chain LIKE gene, a alternatively spliced Melanoma-Associated Antigen MAGE LIKE gene and a 6-Phosphofructo-2-kinase (Fructose-2,6-bisphosphatase) LIKE pseudogene. Contains ESTs, STSs and genomic marker DXS8032//2.8e-11:309:65//Hs.4943:Z98046

[16867] F-HEMBA1000918//ESTs//0.11:234:59//Hs.96499:AA252537

[16868] F-HEMBA1000919//Human mRNA for histone H1x, complete cds//0.18:221:64//Hs.109804:D64142

[16869] F-HEMBA1000934//Homo sapiens mRNA for KIAA0547 protein, complete cds//3.8e-09:360:62//Hs.36850:AB011119

[16870] F-HEMBA1000942//ESTs, Highly similar to PMS4 homolog mismatch repair protein [H. sapiens]//9.4e-10:77:9311Hs.111445:H00596

[16871] F-HEMBA1000943//ESTs, Highly similar to ZINC FINGER PROTEIN 10 [Homo sapiens]//0.0039:54:92//Hs.58338:AA609476

[16872] F-HEMBA1000946//Phosphoribosylglycinamide formyltransferase, phosphoribosylglycinamide synthetase, phosphoribosylaminoimidazole synthetase//0.93:132:66//Hs.82285:X54199

[16873] F-HEMBA1000960//ESTs, Moderately similar to !!!! ALU SUBFAMILY SX WARNING ENTRY !!!! [H. sapiens]//0.080:128:71//Hs.118972:AA761369

[16874] F-HEMBA1000968//Human transposon-like element mRNA//2.8e-95:352:87//Hs.84775:M23161

[16875] F-HEMBA1000971//ESTs//8 .4e-88:417:9811Hs.128631:AI127903

[16876] F-HEMBA1000972//EST//0.75:134:64//Hs.117228:AA682775

[16877] F-HEMBA1000974//ESTs//1.3e-103:497:98//Hs.126786:U74314

[16878] F-HEMBA1000975//Homo sapiens diacylglycerol kinase iota (DGK1) mRNA, complete cds//1.3e-05:424:59//Hs.159564:AF061936

[16879] F-HEMBA1000985//Homo sapiens mRNA, chromosome 1 specific transcript KIAA0492//0.0036:389:60//Hs.127338:AB007961

[16880] F-HEMBA1000986//ESTs//0.00025:272:64//Hs.12364:H09132

[16881] F-HEMBA1000991//Homo sapiens mRNA for Hrs, complete cds//3.9e-24:193:84//Hs.24756:U43895

[16882] F-HEMBA1001007//EST//0.96:70:71//Hs.163258:AA828835

[16883] F-HEMBA1001008//Human G protein-coupled receptor (STRL22) mRNA, complete cds//4.9e-43:472:74//Hs.46468:U45984

[16884] F-HEMBA1001009//Immunoglobulin mu//0.18:367:59//Hs.75758:X58529

[16885] F-HEMBA1001017//Homo sapiens mRNA for KIAA0468 protein, complete cds//1.4e-140:661:98//Hs.158287:AB007937

[16886] F-HEMBA1001019//EST//4.1e-14:251:68//Hs.148769:AI239572

[16887] F-HEMBA1001020//Von Hippel-Lindau syndrome//2.2e-28:253:691//Fs.78160:AF010238

[16888] F-HEMBA1001022

[16889] F-HEMBA1001024//Homo sapiens mRNA, chromosome 1 specific transcript KIAA0501//6.8e-28:376:72//Hs.159897:AB007970

[16890] F-HEMBA1001026//Homo sapiens klotho mRNA, complete cds//1.3e-05:745:57//Hs.94592:AB005142

[16891] F-HEMBA1001043//ESTs//2.1e-28:448:67//Hs.112469:AA598515

[16892] F-HEMBA1001051//EST//3.1e-48:310:87//Hs.149580:AI281881

[16893] F-HEMBA1001052//EST//0.94:149:67//Hs.131216:AI017971

[16894] F-HEMBA1001059//N-ACETYLGALACTOSAMINE-6-SULFATASE PRECURSOR//4.6e-165:777:98//Hs.159479:U06088

[16895] F-HEMBA1001060//ESTs//6.8e-14:150:78//Hs.24821:AA044813

[16896] F-HEMBA1001071//Alpha-1 type 3 collagen//3.5e-32:181:96//Hs.119571:X14420

[16897] F-HEMBA1001077//ESTs, Moderately similar to transcription intermediary factor 1 [H. sapiens]//10.1e-98:487:97//Hs.147802:R71297

[16898] F-HEMBA1001080//Human N-type calcium channel alpha-1 subunit mRNA, complete cds//0.013:385:58//Hs.69949:M94172

[16899] F-HEMBA1001085//Human hSIAH2 mRNA, complete cds//0.55:338:59//Hs.20191:U76248

[16900] F-HEMBA1001088//Human PINCH protein mRNA, complete cds//7.3e-73:303:78//Hs.83987:U09284

[16901] F-HEMBA1001094//Interleukin 8//0.092:530:58//Hs.624:MI 7017

[16902] F-HEMBA1001099

[16903] F-HEMBA1001109//Homo sapiens tapasin (NGS-17) mRNA, complete cds//2.4e-61:341:85//Hs.5247:AF029750

[16904] F-HEMBA1001121//EST//7.3e-13:265:64//Hs.142423:AA412497

[16905] F-HEMBA1001122//Homo sapiens mRNA for KIAA0471 protein, complete cds//0.066:649:56//Hs.5347:AB007940

[16906] F-HEMBA1001123//Homo sapiens mRNA for KIAA0448 protein, complete cds//1.5e-10:231:68//Hs.27349:AB007917

[16907] F-HEMBA1001133//EST//0.50:222:63//Hs.131018:AI015747

[16908] F-HEMBA1001137//Homo sapiens mRNA for KIAA0798 protein, complete cds//2.2e-73:527:77//Hs.159277:AB018341

[16909] F-HEMBA1001140//Homo sapiens mRNA for KIAA0682 protein, complete cds//0.020:141:65//Hs.7482:AB014582

[16910] F-HEMBA101172//EST//0.77:158:60//Hs.158894:AI378457

[16911] F-HEMBA1001174//ESTs//1.4e-63:363:92//Hs.132798:AA922226

[16912] F-HEMBA1001197//ESTs, Weakly similar to Rap2 interacting protein 8 [M. musculus]//5.0e-54:555:71//Hs.55165:AA573499

[16913] F-HEMBA1001208//EST//6.2e-26:213:77//Hs.146964:A1183463

[16914] F-HEMBA1001213//Human mRNA for KIAA0013 gene, complete cds//0.026:569:57//Hs.48824:D87717

[16915] F-HEMBA1001226//ESTs//1.9e-11:407:65//Hs.157977:A1369694

[16916] F-HEMBA1001235//ESTs//0.0042:161:63//Hs.155170:AA167748

[16917] F-HEMBA1001247//ESTs//1.2e-91:429:99//Hs.143304:A1084058

[16918] F-HEMBA1001257//Human zinc finger protein (MAZ) mRNA//0.017:330:62//Hs.7647:M94046

[16919] F-HEMBA1001265

[16920] F-HEMBA1001281

[16921] F-HEMBA1001286//Natriuretic peptide precursor B//0.76:163:63//Hs.937:AL021155

[16922] F-HEMBA1001289//Homo sapiens Chromosome 16 BAC clone CIT987SK-A-69G12//5.1e-30:530:64//Hs.154050:AC004131

[16923] F-HEMBA1001294//Homo sapiens mRNA for matrilin-3//0.00023:657:56//Hs.119534:AJ224741

[16924] F-HEMBA1001299//Small inducible cytokine A5 (RANTES)//2.2e-27:271:77//Hs.155464:AF088219

[16925] F-HEMBA1001302//ESTs, Moderately similar to Cab45a [M. musculus]//3.3e-53:272:97//Hs.154563:A1129590

[16926] F-HEMBA1001303//ESTs, Weakly similar to RNA splicing-related protein [R. norvegicus]//2.6e-66:241:99//Hs.120847:AA731201

[16927] F-HEMBA1001310//ESTs//2.0e-21:133:93//Hs.159116:W55873

[16928] F-HEMBA1001319//Homo sapiens mRNA for KIAA0758 protein, partial cds//0.23:562:58//Hs.22039:AB018301

[16929] F-HEMBA1001323//Wingless-type MMTV integration site 5A, human homolog//2.5e-31:165:99//Hs.152213:L20861

[16930] F-HEMBA1001326//ESTs, Highly similar to HYPOTHETICAL 55.1 KD PROTEIN IN FAB1-PES4 INTERGENIC REGION [Saccharomyces cerevisiae]//8.9e-08:185:68//Hs.108734:AI073427

[16931] F-HEMBA1001327//ESTs//0.085:337:60//Hs.114157:AA703013

[16932] F-HEMBA1001330//EST//0.0018:225:63//Hs.127987:AA970569

[16933] F-HEMBA1001351//Homo sapiens VAMP-associated protein of 33 kDa (VAP-33) mRNA, complete cds//3.6e-105:516:97//Hs.9006:AF057358

[16934] F-HEMBA1001361//ESTs//1.2e-62:317:97//Hs.6639:R39794

[16935] F-HEMBA1001375//ESTs//0.93:180:60//Hs.148425:AI198074

[16936] F-HEMBA1001377//ESTs//9.2e-87:414:99//Hs.48469:N62156

[16937] F-HEMBA1001383//ESTs//0.0023:336:60//Hs.140622:AA844353

[16938] F-HEMBA1001387//ESTs, Highly similar to RAS-LIKE PROTEIN TC10 [Homo sapiens]//1.0e-132:643:97//Hs.124217:AA020848

[16939] F-HEMBA1001388

[16940] F-HEMBA1001391//ESTs//5.6e-32:191:93//Hs.71628:N41660

[16941] F-HEMBA1001398

[16942] F-HEMBA1001405//EST//1.0:135:63//Hs.146833:AI151117

[16943] F-HEMBA1001407//ESTs//0.53:390:57//Hs.150447:AI017798

[16944] F-HEMBA1001411//EST//8.8e-06:270:62//Hs.145386:AI253108

[16945] F-HEMBA1001413

[16946] F-HEMBA1001415//EST//1.3e-12:176:75//Hs.133172:AI051605

[16947] F-HEMBA1001432//RING3 PROTEIN//0.57:345:59//Hs.75243:D42040

[16948] F-HEMBA1001433//ESTs//1.3e-21:333:69//Hs.131648:AI025726

[16949] F-HEMBA1001435//Cytochrome P450, subfamily I (aromatic compound-inducible), polypeptide 2//1.2e-74:469:80//Hs.1361:M55053

[16950] F-HEMBA1001442//EST//0.29:181:64//Hs.116883:AA663031

[16951] F-HEMBA1001446//ESTs, Weakly similar to Rap2 interacting protein 8 [M. musculus]//6.8e-47:550:71//Hs.55165:AA573499

[16952] F-HEMBA1001450//Homo sapiens GTPase-activating protein (SIPA1) mRNA, complete cds//0.82:312:58//Hs.7019:AB005666

[16953] F-HEMBA1001454//ESTs//10.2e-46:297:80//Hs.152395:AA533107

[16954] F-HEMBA1001455//ESTs//7.3e-103:502:97//Hs.112860:AA442412

[16955] F-HEMBA1001463//Human mRNA for KIAA0392 gene, partial cds//8.7e-51:323:88//Hs.40100:AB002390

[16956] F-HEMBA1001476//Homo sapiens mRNA for KIAA0572 protein, partial cds//6.2e-104:489:99//Hs.14409:AB011144

[16957] F-HEMBA1001478//EST//0.013:205:61//Hs.157309:AI365451

[16958] F-HEMBA1001497//Small inducible cytokine A5 (RANTES)//5.9e-45:307:84//Hs.155464:AF088219

[16959] F-HEMBA1001510//H. sapiens mRNA for G13 protein//2.1e-71:405:92//Hs.42853:X98054

[16960] F-HEMBA1001515//Human Line-1 repeat mRNA with 2 open reading frames//4.5e-105:773:82//Hs.23094:M19503

[16961] F-HEMBA1001517//EST//3.6e-09:271:65//Hs.162347:AA564902

[16962] F-HEMBA1001522//ESTs//4.3e-13:85:95//Hs.126707:AI376869

[16963] F-HEMBA1001526

[16964] F-HEMBA1001533//EST//1.0:75:73//Hs.145360:AI252476

[16965] F-HEMBA1001557//EST//3.5e-13:261:64//Hs.161496:N66580

[16966] F-HEMBA1001566//EST//3.7e-07:354:64//Hs.43830:N26652

[16967] F-HEMBA1001569//Homo sapiens mRNA for vesicle associated membrane protein 2 (VAMP2)//8.0e-68:338:97//Hs.91589:M36205

[16968] F-HEMBA1001570//ESTs//10.5e-47:369:82//Hs.107657:AA126814

[16969] F-HEMBA1001579//Homo sapiens mRNA for NS 1-binding protein (NSI-BP)//7.0e-175:678:99//Hs.159597:AJ012449

[16970] F-HEMBA1001581//ESTs//4.4e-07:237:67//Hs.152304:AA605184

[16971] F-HEMBA1001585//ESTs//1.1e-11:81:100//Hs.16364:AI357228

[16972] F-HEMBA1001589//Human mRNA for KIAA0166 gene, complete cds//0.82:210:64//Hs.115778:D79988

[16973] F-HEMBA1001595//Human mRNA for KIAA0128 gene, partial cds//2.6e-110:855:78//Hs.90998:D50918

[16974] F-HEMBA1001608//EST//1.0:201:60//H s.136747:AA749210

[16975] F-HEMBAI100620//ESTs//1.5e-39:211:98//Hs.131063: AI016400

[16976] F-HEMBA1001635//ESTs//4.0e-33:168:100//Hs.122655: A1361870

[16977] F-HEMBA1100636//ESTs, Moderately similar to !!!! ALU SUBFAMILY SP WARNING ENTRY !!!! [H. sapiens]//0.038:198:64//Hs.34579:AI338536

[16978] F-HEMBA1001640//ESTs//1.1e-24:315:71//Hs.34114:AA776899

[16979] F-HEMBA1001647//Human plectin (PLEC1) mRNA, complete cds//0.00049:629:61//Hs.79706:U53204

[16980] F-HEMBA1001651//EST//3.6e-07:285:63//Hs.132558:AA948560

[16981] F-HEMBA1001655//ESTs//1.4e-95:497:96//Hs.59563:AA203283

[16982] F-HEMBA1100658//EST//0.18:251:59//Hs.117724:H47121

[16983] F-HEMBA1001661

[16984] F-HEMBA1100672//Homo sapiens methyl-CpG binding protein MBD3 (MBD3) mRNA, complete cds//7.9e-146:669:99//Hs.107254:AC005943

[16985] F-HEMBA1100675//Homo sapiens mRNA, chromosome 1 specific transcript KIAA0484//2.0e-57:447:79//Hs.158095:AB007953

[16986] F-HEMBA1001678//ESTs//4.0e-50:360:83//Hs.146811:AA410788

[16987] F-HEMBA1001681//EST//1.0:165:58//Hs.136790:AA776060

[16988] F-HEMBA1001702//EST//0.015:312:61//Hs.162839:AA648760

[16989] F-HEMBA1001709//EST//0.85:131:65//Hs.131451:AI023995

[16990] F-HEMBA1001711//ESTs//0.084:425:56//Hs.125346:AI302836

[16991] F-HEMBA1001712//EST//0.26:214:59//Hs.159088:AI383114

[16992] F-HEMBA1001714//ESTs, Highly similar to ATPASE INHIBITOR, MITOCHONDRIAL PRECURSOR [Rattus norvegicus]//3.0e-30:195:92//Hs.132948:AA194452

[16993] F-HEMBA1001718//EST//0.0044:275:60//Hs.125969:AA889554

[16994] F-HEMBA1001723//INTERLEUKIN ENHANCER-BINDING FACTOR//0.24:501:57//Hs.101524:U58197

[16995] F-HEMBA1001731//EST//1.2e-06:261:63//Hs.132331:AI028363

[16996] F-HEMBA1001734//ESTs//0.018:177:63//Hs.129631:AI000415

[16997] F-HEMBA1001744//EST//8.7e-77:420:92//Hs.133226:AI052250

[16998] F-HEMBA1001745//Homo sapiens mRNA for TSC403 protein, complete cds//0.37:300:62//Hs.10887:AB013924

[16999] F-HEMBA1001746//ESTs//0.31:168:66//Hs.27237:N68328

[17000] F-HEMBA1001761//ESTs, Weakly similar to ZINC FINGER PROTEIN 91 [H. sapiens]//0.76:218:60//Hs.135553:N41598

[17001] F-HEMBA1001781//Homo sapiens chromosome 19, cosmid R30953//0.98:219:60//Hs.98776:AC005622

[17002] F-HEMBA1001784//Homo sapiens mRNA for KIAA0474 protein, complete cds//6.4e-09:265:67//Hs.158232:AB007943

[17003] F-HEMBA1001791

[17004] F-HEMBA1001800//EST//3.1e-41:331:81//Hs.127142:AA937570

[17005] F-HEMBA1001803//EST//0.0062:269:59//Hs.49075:N64817

[17006] F-HEMBA1001804//Human POU domain protein (Bm-3b) mRNA, complete cds//1.8e-07:439:59//Hs.266:U06233

[17007] F-HEMBA1001808//Homo sapiens mRNA, chromosome I specific transcript KIAA0500//2.5e-175:809:98//Hs.118164:AB007969

[17008] F-HEMBA1001809//ESTs//6.0e-101:497:97//Hs.155127:AA625305

[17009] F-HEMBA1001815

[17010] F-HEMBA1001819//Human kruppel-related zinc finger protein (ZNF 184) mRNA, partial cds//4.9e-80:842:70//Hs.158174:U66561

[17011] F-HEMBA1001820//EST//0.057:214:62//Hs.148715:AI223845

[17012] F-HEMBA1001822//Homo sapiens intersectin short form mRNA, complete cds//6.7e-42:510:65//Hs.66392:AF064244

[17013] F-HEMBA1001824//Homo sapiens OPA-containing protein mRNA, complete cds//5.2e-13:253:68//Hs.85313:AF071309

[17014] F-HEMBA1001835//Human mRNA for KIAA0235 gene, partial cds//0.96:288:60//Hs.6151:D87078

[17015] F-HEMBA1001844//ESTs//1.1e-29:197:80//Hs.155243:N70293

[17016] F-HEMBA1001847//Human mRNA for KIAA0326 gene, partial cds//2.0e-23:379:68//Hs.6833:AB002324

[17017] F-HEMBA1001861//Homo sapiens mRNA for KIAA0617 protein, complete cds//2.8e-185:865:98//Hs.78946:AB014517

[17018] F-HEMBA1001864//EST//10.27:145:63//Hs.162585:AA593121

[17019] F-HEMBA1001866//ESTs, Weakly similar to UDP-GLUCOSE: GLYCOPROTEIN GLUCOSYLTRANSFERASE PRECURSOR [D. melanogaster]//3.2e-39:293:84//Hs.152332:AI141922

[17020] F-HEMBA1001869//ESTs, Weakly similar to ASHI [D. melanogaster]//8.1e-70:367:95//Hs.15423:T84036

[17021] F-HEMBA1001888//Homo sapiens mRNA, chromosome I specific transcript KIAA0484//5.4e-86:835:76//Hs.158095:AB007953

[17022] F-HEMBA1001896

[17023] F-HEMBA1001910//Human calpain-like protease (htra-3) mRNA, complete cds//0.43:114:71//Hs.6133:U94346

[17024] F-HEMBA1001912//ESTs//4.1e-79:398:97//Hs.26660:AI312633

[17025] F-HEMBA1100913//Homo sapiens TNF-alpha stimulated ABC protein (ABC50) mRNA, complete cds//0.00031:200:62//Hs.9573:AF027302

[17026] F-HEMBA1001915//EST//0.082:128:64//Hs.126542:AA916511

[17027] F-HEMBA1001918//Homo sapiens SEC63 (SEC63) mRNA, complete cds//0.46:374:59//Hs.31575:AF100141

[17028] F-HEMBA1001921//Homo sapiens germinal center kinase related protein kinase mRNA, complete cds//6.7e-186:855:99//Hs.154934:AF000145

[17029] F-HEMBA1001939//ESTs//4.9e-34:342:77//Hs.132711:AI377295

[17030] F-HEMBA1001940//ESTs//8.6e-15:149:81//Hs.141129:R86221

[17031] F-HEMBA1001942//ESTs//0.0014:271:62//Hs.124514:AI219882

[17032] F-HEMBA1001945//EST//0.98:142:64//Hs.161540:N85943

[17033] F-HEMBA1001950//ESTs//0.99:188:64//Hs.28639:R78360

[17034] F-HEMBA1001960//Homo sapiens methyl-CpG binding protein MBD2 (MBD2) mRNA, complete cds//0.30:85:69//Hs.25674:AF072242

[17035] F-HEMBA1001962//ESTs//0.0012:289:59//Hs.125492:AA938930

[17036] F-HEMBA1001964EST//0.73:153:64//Hs.112161:AA477708

[17037] F-HEMBA1001967//Human DNA sequence from clone 341E18 on chromosome 6 p11.2-12.3. Contains a Serine/Threonine Protein Kinase gene (presumptive isolog of a Rat gene) and a novel alternatively spliced gene. Contains a putative CpG island, ESTs and GSSs//4.6e-156:720:99//Hs.11050:AL031178

[17038] F-HEMBA1001979//ESTs//0.86:184:67//Hs.77208:AA044732

[17039] F-HEMBA1001987//ESTs, Moderately similar to hTAFII68 [H. sapiens]//2.8e-29:151:100//Hs.124106:AA948100

[17040] F-HEMBA1001991//Homo sapiens clone 24540 mRNA sequence//0.049:121:70//Hs.153529:AF070581

[17041] F-HEMBA1002003//Keratin 10 (epidermolytic hyperkeratosis; keratosis palmaris et plantaris)//9.8e-09:294:63//Hs.99936:X 14487

[17042] F-HEMBA1002008//ESTs//1.12:299:59//Hs.132803:W63582

[17043] F-HEMBA1002018//PROTEIN-TYROSINE PHOSPHATASE ZETA PRECURSOR//0.98:212:64//Hs.78867:M93426

[17044] F-HEMBA1002022//Human p37NB mRNA, complete cds//0.00044:58:96//Hs.155545:U32907

[17045] F-HEMBA1002035//EST//6.4e-07:145:68//Hs.135336:AI049827

[17046] F-HEMBA1002039//EST//0.99:79:67//Hs.98451:AA426057

[17047] F-HEMBA1002049//ESTs, Weakly similar to !!!! ALU SUBFAMILY J WARNING ENTRY !!!! [H. sapiens]//4.5e-26:223:81//Hs.105292:AA504776

[17048] F-HEMBA1002084

[17049] F-HEMBA1002092

[17050] F-HEMBA1002100//Homo sapiens zinc finger homeodomain protein (ATBF 1-A) mRNA, complete cds//5.6e-21:124:96//Hs.101842:L32832

[17051] F-HEMBA1002102//ESTs, Highly similar to ANKYRIN [Mus musculus]//5.9e-09:434:62//Hs.135102:AI190276

[17052] F-HEMBA1002113//ESTs//0.049:255:63//Hs.106137:AI129973

[17053] F-HEMBA1002119

[17054] F-HEMBA1002125//H. sapiens ERF-2 mRNA//0.026:341:59//Hs.78909:U07802

[17055] F-HEMBA1002139//ESTs//0.082:309:60//Hs.36383:W52393

[17056] F-HEMBA1002144//Human mRNA for KIAA0227 gene, partial cds//5.6e-06:601:60//Hs.79170:D86980

[17057] F-HEMBA1002150//Homo sapiens mRNA for KIAA0720 protein, partial cds//5.6e-06:353:62//Hs.23741 AB018263

[17058] F-HEMBA1002151

[17059] F-HEMBA1002153//EST//0.014:328:60//Hs.149115:AI244695

[17060] F-HEMBA1002160//Homo sapiens mRNA, chromosome 1 specific transcript KIAA0507//5.6e-49:303:79//Hs.158241:AB007976

[17061] F-HEMBA1002161//Myosin, heavy polypeptide 7, cardiac muscle, beta//1.2e-40:616:67//Hs.929:M57965

[17062] F-HEMBA1002162//Homo sapiens mRNA for XPR2 protein//3.4e-48:749:67//Hs.44766:AJ007590

[17063] F-HEMBA1002166//Small inducible cytokine A5 (RANTES)//2.1e-60:485:79//Hs.155464:AF088219

[17064] F-HEMBA1002177//Homo sapiens yotiao mRNA, complete cds//2.4e-19:151:86//Hs.114808:AF026245

[17065] F-HEMBA1002185//EST//0.00011:233:65//Hs.125552:AA884141

[17066] F-HEMBA1002189//EST//5.1e-24:193:81//Hs.163161:AA778363

[17067] F-HEMBA1002191//Homo sapiens mRNA for KIAA0689 protein, partial cds//0.27:382:59//Hs.21992:AB014589

[17068] F-HEMBA1002199//Homo sapiens mRNA, chromosome I specific transcript KIAA0501//1.2e-14:199:72//Hs.159897:AB007970

[17069] F-HEMBA1002204//ESTs//0.46:312:59//Hs.61210:AA024696

[17070] F-HEMBA1002212//ESTs//1.0:191:63//Hs.149752:AI285767

[17071] F-HEMBA1002215//ESTs, Highly similar to TESTIN 2 PRECURSOR [Mus musculus]//1.6e-47:251:96//Hs.59906:AA001281

[17072] F-HEMBA1002226//Homo sapiens mRNA, chromosome I specific transcript KIAA0488//2.4e-57:375:71//Hs.67619:AB007957

[17073] F-HEMBA1002229//Homo sapiens KIAA0395 mRNA, partial cds//7.9e-47:377:80//Hs.43681:AL022394

[17074] F-HEMBA1002237//EST//0.044:137:66//Hs.144448:AA812455

[17075] F-HEMBA1002241

[17076] F-HEMBA1002253//EST//2.2e-41:219:96//Hs.137065:AA888887

[17077] F-HEMBA1002257//Homo sapiens diacylglycerol kinase iota (DGKi) mRNA, complete cds//1.1e-152:731:97//Hs.159564:AF061936

[17078] F-HEMBA1002265//ESTs//5.4e-11:337:65//Hs.112639:AI125420

[17079] F-HEMBA1002267//Homo sapiens GDP-L-fucose pyrophosphorylase (GFPP) mRNA, complete cds//1.0:395:60//Hs.150926:AF017445

[17080] F-HEMBA1002270//ESTs//2.5e-87:504:89//Hs.124440:H95404

[17081] F-HEMBA1002321//Homo sapiens oxidized low-density lipoprotein receptor mRNA, complete cds//0.17:338:60//Hs.77729:AB010710

[17082] F-HEMBA1002328//ESTs//7.9e-103:480:99//Hs.123318:AI201982

[17083] F-HEMBA1002337//Human mRNA for KIAA0118 gene, partial cds//0.93:220:61//Hs.154326:D42087

[17084] F-HEMBA1002341//Homo sapiens mRNA for KIAA0771 protein, partial cds//7.8e-187:872:98//Hs.6162:AB018314

[17085] F-HEMBA1002348//EST//1.0e-19:285:70//Hs.121860:AA776692

[17086] F-HEMBA1002349//EST//0.011:385:59//Hs.148533:AI200996

[17087] F-HEMBA1002363//Homo sapiens chromosome-associated protein-E (hCAP-E) mRNA, complete cds//2.4e-189:872:9911Hs.119023:AF092563

[17088] F-HEMBA1002381//EST//7.9e-34:236:77//Hs.162197:AA535216

[17089] F-HEMBA1002389//ESTs//4.3e-59:342:92//Hs.133391:AA535144

[17090] F-HEMBA1002417//Homo sapiens chromosome 19, cosmid R28784//2.2e-159:775:97//Hs.25527:AC005954

[17091] F-HEMBA1002419//EST, Moderately similar to ROD CGMP-SPECIFIC 3′,5′-CYCLIC PHOSPHODIESTERASE BETA-SUBUNIT [H. sapiens]//1.0:144:65//Hs.136096:W27141

[17092] F-HEMBA1002430//Human clone 23695 mRNA sequence//2.7e-06:563:59//Hs.90798:U79289

[17093] F-HEMBA1002439//EST, Weakly similar to LINE-1 REVERSE TRANSCRIPTASE HOMOLOG [H. sapiens]//0.11:111:67//Hs.162154:AA528561

[17094] F-HEMBA1002458//ESTs, Weakly similar to hypothetical protein B, 6.8K [H. sapiens]//1.3e-71:346:98//Hs.136121:W26490

[17095] F-HEMBA1002460//ESTs//2.1e-94:484:96//Hs.106441:R53160

[17096] F-HEMBA1002462//Homo sapiens N-methyl-D-aspartate receptor 2D subunit precursor (NMDAR2D) mRNA, complete cds//0.00024:240:64//Hs.113286:U77783

[17097] F-HEMBA1002469//Human mRNA for KIAA0122 gene, partial cds//1.3e-109:603:92//Hs.154583:D50912

[17098] F-HEMBA1002475//RYANODINE RECEPTOR, SKELETAL MUSCLE//0.025:261:631//Hs.89631:U48508

[17099] F-HEMBA1002477//Homo sapiens mRNA for KIAA0561 protein, partial cds//2.8e-45:331:83//Hs.6189:AB011133

[17100] F-HEMBA1002486//EST//0.00039:174:67//Hs.96680:AA303235

[17101] F-HEMBA1002495

[17102] F-HEMBA1002498//ESTs//1.2e-91:460:97//Hs.118327:W79161

[17103] F-HEMBA1002503//H. sapiens mRNA for MACH-alpha-2 protein//4.8e-13:164:74//Hs.19949:X98173

[17104] F-HEMBA1002508//Homo sapiens PYRIN (MEFV) mRNA, complete cds//6.1e-79:460:83//Hs.113283:AF018080

[17105] F-HEMBA1002513//Homo sapiens mRNA for histone deacetylase-like protein (JM21)//9.0e-159:738:98//Hs.6764:AJ011972

[17106] F-HEMBA1002515//ESTs//3.6e-08:185:69//Hs.118701:AA420795

[17107] F-HEMBA1002538//ESTs//0.97:68:73//Hs.134672:AI087951

[17108] F-HEMBA1002542//Homo sapiens mRNA for chemokine LEC precursor, complete cds//6.1e-46:238:87//Hs.10458:AF088219

[17109] F-HEMBA1002547//Homo sapiens agrin precursor mRNA, partial cds//1.1e-138:655:98//Hs.68900:AF016903

[17110] F-HEMBA1002552//Human Hep27 protein mRNA, complete cds//2.8e-08:173:68//Hs.102137:U31875

[17111] F-HEMBA1002555//Homo sapiens mRNA for APC 2 protein, complete cds//0.00020:603:57//Hs.20912:AB012162

[17112] F-HEMBA1002558//ESTs//6.0e-25:262:77//Hs.136304:AA431205

[17113] F-HEMBA1002561//Human clone 23574 mRNA sequence//4.7e-17:268:72//Hs.79385:U90905

[17114] F-HEMBA1002569//Homo sapiens protein associated with Myc mRNA, complete cds//4.3e-142:457:99//Hs.151411:AF075587

[17115] F-HEMBA1002583//Homo sapiens UKLF mRNA for ubiquitous Kruppel like factor, complete cds//2.8e-30:156:100//Hs.32170:AB015132

[17116] F-HEMBA1002590//ESTs//1.0e-30:277:77//Hs.139158:AA226159

[17117] F-HEMBA1002592//ESTs//2.4e-20:233:75//Hs.159329:AI378363

[17118] F-HEMBA1002609//Homo sapiens mRNA for KIAA0597 protein, partial cds//1.4e-176:820:99//Hs.20141:AB011169

[17119] F-HEMBA1002621//EST//0.99:208:60//Hs.159127:AI384013

[17120] F-HEMBA1002624//Homo sapiens mRNA for KIAA0808 protein, complete cds//9.2e-189:632:97//Hs.91338:AB018351

[17121] F-HEMBA1002628//Human mRNA for KIAA0336 gene, complete cds//0.079:231:65//Hs.125129:AB002334

[17122] F-HEMBA1002629//Human density enhanced phosphatase-1 mRNA, complete cds//1.3e-07:473:61//Hs.1177:U10886

[17123] F-HEMBA1002645//ESTs//2.6e-32:209:88//Hs.141323:N80390

[17124] F-HEMBA1002651

[17125] F-HEMBA1002659//Human vascular endothelial growth factor related protein VRP mRNA, complete cds//0.74:223:60//Hs.79141:U43142

[17126] F-HEMBA1002661//Human Line-1 repeat mRNA with 2 open reading frames//1.4e-122:781:85//Hs.23094:M19503

[17127] F-HEMBA1002666//ESTs//0.39:117:65//Hs.3794:T08497

[17128] F-HEMBA1002678//EST//0.0081:148:64//Hs.156768:AI351368

[17129] F-HEMBA1002679//Cyclic nucleotide gated channel (photoreceptor), cGMP gated 1 (alpha)//0.00096:418:61//Hs.1323:S42457

[17130] F-HEMBA1002688//Homo sapiens hyperpolarization-activated channel 1 (IH1) mRNA, partial cds//1.8e-11:541:60//Hs.124161:AF065164

[17131] F-HEMBA1002696//Homo sapiens DNA from chromosome 19, cosmid R29144//1.9e-06:345:61//Hs.155647:AC004221

[17132] F-HEMBA1002703//Homo sapiens mRNA for KIAA0455 protein, complete cds//6.0e-12:327:62//Hs.13245:AB007924

[17133] F-HEMBA1002712

[17134] F-HEMBA1002716//EST//1.2e-56:284:97//Hs.131329:AA922800

[17135] F-HEMBA1002728//Homo sapiens mRNA for KIAA0621 protein, partial cds//3.7e-127:614:97//Hs.132942:AB014521

[17136] F-HEMBA1002730//Homo sapiens microsomal glutathione S-transferase 3 (MGST3) mRNA, complete cds//0.21:157:66//Hs.111811:AB007867

[17137] F-HEMBA1002742//EST//0.97:138:60//Hs.160545:AI271596

[17138] F-HEMBA1002746//Human HOX4C mRNA for a homeobox protein//0.72:347:58//Hs.74061:X59372

[17139] F-HEMBA1002748//ESTs, Weakly similar to C27H6.5 [C. elegans]//0.24:83:74//Hs.40806:AA018786

[17140] F-HEMBA1002750//ESTs//5.8e-37:185:76//Hs.140577:AA827817

[17141] F-HEMBA1002768//Homo sapiens mRNA for KIAA0554 protein, partial cds//2.9e-178:834:98//Hs.74750:AB011126

[17142] F-HEMBA1002770//ESTs, Highly similar to TIP120 [R. norvegicus]//8.0e-98:492:96//Hs.11833:AI299947

[17143] F-HEMBA1002777//Homo sapiens prostate apoptosis response protein par-4 mRNA, complete cds113 .9e-05:528:59//Hs.128208:U63809

[17144] F-HEMBA1002779//ESTs//8.1e-134:662:96//Hs.107295:W80392

[17145] F-HEMBA1002780//ESTs//3.8e-41:421:74//Hs.141576:N90326

[17146] F-HEMBA1002794//Protein kinase C, mu//4.8e-06:244:67//Hs.2891:X75756

[17147] F-HEMBA1002801//ESTs//2.1e-24:182:87//Hs.124633:AA856938

[17148] F-HEMBA1002810//Homo sapiens formin binding protein 21 mRNA, complete cds//3.4e-169:820:97//Hs.28307:AF071185

[17149] F-HEMBA1002816//ESTs//2.5e-91:387:94//Hs.8008:R52744

[17150] F-HEMBA1002818//Homo sapiens UPH1 (UPH1) mRNA, complete cds//7.0e-122:733:89//Hs.6059:AF093119

[17151] F-HEMBA1002826//ESTs//0.00015:235:62//Hs.119383:AI279904

[17152] F-HEMBA1002833

[17153] F-HEMBA1002850//EST//0.0014:201:65//Hs.156235:AA770550

[17154] F-HEMBA1002863//ESTs//1.2e-50:295:91//Hs.57980:W68823

[17155] F-HEMBA1002876//ESTs, Weakly similar to HYPOTHETICAL 26.4 KD PROTE1N EEED8.8 IN CHROMOSOME II [C. elegans]//4.9e-18:110:94//Hs.13322:AA151730

[17156] F-HEMBA1002886//EST//0.99:184:65//Hs.160684:AI279429

[17157] F-HEMBA1002896//ESTs//2.1e-11:72:100//Hs.149215:AI051679

[17158] F-HEMBA1002921

[17159] F-HEMBA1002924//EST//3.7e-05:291:64//Hs.134677:AI088001

[17160] F-HEMBA1002934//ESTs//2.3e-42:324:80//Hs.141658:N77915

[17161] F-HEMBA1002935//Homo sapiens mRNA for KIAA0576 protein, partial cds//1.6e-174:803:99//Hs.14687:AB011148

[17162] F-HEMBA1002937//ESTs, Weakly similar to homologous to mouse gene PC326:GenBank Accession Number M95564 [H. sapiens]//8.1e-36:256:85//Hs.36899:AA130053

[17163] F-HEMBA1002939//H. sapiens mRNA for cytokine inducible nuclear protein//1.1e-05:479:59//Hs.74019:X83703

[17164] F-HEMBA1002944//Human putative endothelin receptor type B-like protein mRNA, complete cds//0.83:326:58//Hs.27747:U87460

[17165] F-HEMBA1002951//ESTs//6.1e-08:137:70//Hs.126762:AA913925

[17166] F-HEMBA1002954//ESTs//9.3e-39:249:89//Hs.146185:R 19099

[17167] F-HEMBA1002968//ESTs//0.73:142:64//Hs.136371:AA506092

[17168] F-HEMBA1002970//EST//2.9e-10:103:82//Hs.162580:AA593828

[17169] F-HEMBA1002971//ESTs//3.5e-21:190:81//Hs.61170:AA454219

[17170] F-HEMBA1002973//Phosphodiesterase 4B, cAMP-specific (dunce (Drosophila)-homolog phosphodiesterase E4)//1.5e-37:247:89//Hs.188:L20971

[17171] F-HEMBA1002997//Homo sapiens chromosome-associated protein-C (hCAP-C) mRNA, partial cds//1.7e-05:797:58//Hs.50758:AF092564

[17172] F-HEMBA1002999//EST//9.9e-38:453:70//Hs.161635:W22525

[17173] F-HEMBA1003021//Small inducible cytokine A5 (RANTES)//4.6e-49:373:81//Hs.155464:AF088219

[17174] F-HEMBA1003033//ESTs//5.0e-64:340:95//Hs.154270:N26486

[17175] F-HEMBA1003034//Homo sapiens PYRIN (MEFV) mRNA, complete cds//7.4e-70:330:78//Hs.113283:AF018080

[17176] F-HEMBA1003035//Homo sapiens mRNA for testican-3//0.041:623:57//Hs.159425:AJ001454

[17177] F-HEMBA1003037//EST//0.53:59:74//Hs.148011:AI268003

[17178] F-HEMBA1003041//ESTs, Weakly similar to F58G 11.6 [C. elegans]//1.7e-64:337:95//Hs.105907:AA186514

[17179] F-HEMBA1003046//Homo sapiens mitochondrial processing peptidase beta-subunit mRNA, complete cds//3.2e-166:777:98//Hs.44097:AF054182

[17180] F-HEMBA1003064//ESTs//3.2e-07:320:65//Hs.23466:AI223438

[17181] F-HEMBA1003067

[17182] F-HEMBA1003071//Homo sapiens hyperpolarization-activated channel 1 (IH1) mRNA, partial cds//1.5e-15:611:59//Hs.124161:AF065164

[17183] F-HEMBA1003077//Homo sapiens KIAA0405 mRNA, complete cds//2.2e-29:542:62//Hs.48998:AB007865

[17184] F-HEMBA1003078//CYTOCHROME P450 fVF3//2.0e-29:452:67//Hs.106242:AB002454

[17185] F-HEMBA1003079//EST//2.0e-20:273:73//Hs.138001:AI034461

[17186] F-HEMBA1003083//EST//2.0e-48:314:86//Hs.149580:AI281881

[17187] F-HEMBA1003086//ESTs//2.6e-20:237:73//Hs.129331:AI090721

[17188] F-HEMBA1003096//ESTs, Weakly similar to HMG-box transcription factor [M. musculus]//0.98:216:61//Hs.97865:AA405872

[17189] F-HEMBA1003098//EST//2.9e-19:239:73//Hs.152366:AA486721

[17190] F-HEMBA1003117//H. sapiens ERF-2 mRNA//0.0048:447:59//Hs.78909:U07802

[17191] F-HEMBA1003129//Homo sapiens clone 24407 mRNA sequence//1.9e-06:507:58//Hs.12432:AF070575

[17192] F-HEMBA1003133//Homo sapiens mRNA for KIAA0771 protein, partial cds//0.038:288:63//Hs.6162:AB018314

[17193] F-HEMBA1003136

[17194] F-HEMBA1003142//ESTs//3.6e-112:526:99//Hs.55982:AA284279

[17195] F-HEMBA1003148//Homo sapiens mRNA for dachshund protein//2.2e-184:850:99//Hs.63931:AJ005670

[17196] F-HEMBA1003166//Homo sapiens mRNA for KIAA0688 protein, complete cds//1.1e-24:171:83//Hs.141874:AB014588

[17197] F-HEMBA1003175//EST//0.91:168:60//Hs.123335:AA810740

[17198] F-HEMBA1003179//EST, Weakly similar to hypothetical protein in purB 5′ region [E. coli]//4.7e-20:118:97//Hs.118831:AA211895

[17199] F-HEMBA1003197//ESTs//0.049:265:5811Hs.153718:AI215523

[17200] F-HEMBA1003199//SOX-3 PROTEIN//0.00034:383:60//Hs.157429:X71135

[17201] F-HEMBA1003202//ESTs//7.1e-84:408:98//Hs.130134:AA905412

[17202] F-HEMBA1003204//Homo sapiens PYRIN (MEFV) mRNA, complete cds//4.6e-33:154:85//Hs.113283:AF018080

[17203] F-HEMBA1003212//ESTs//1.0e-31:159:84//Hs.134067:AI076765

[17204] F-HEMBA1003220//EST//8.6e-29:317:73//Hs.150552:AI053784

[17205] F-HEMBA1003222//ESTs//0.77:208:62//Hs.85451:AA181310

[17206] F-HEMBA1003229//EST//0.084:233:60//Hs.98176:AA417012

[17207] F-HEMBA1003235//Homo sapiens antigen NY-CO-16 mRNA, complete cds//0.00054:432:58//Hs.132206:AF039694

[17208] F-HEMBA1003250

[17209] F-HEMBA1003257//Homo sapiens fibroblast growth factor 18 (FGF18) mRNA, complete cds//4.3e-08:426:64//Hs.49585:AF075292

[17210] F-HEMBA1003273//EST//0.00078:195:65//Hs.158019:AA867991

[17211] F-HEMBA1003276//EST//6.6e-09:159:74//Hs.162664:AA605020

[17212] F-HEMBA1003278//ESTs//0.89:257:63//Hs.23207:R42864

[17213] F-HEMBA1003281//ESTs//2.6e-33:175:98//Hs.122278:AA781867

[17214] F-HEMBA1003286//Homo sapiens chromosome 3q13 beta-11,4-galactosyltransferase mRNA, complete cds//2.9e-146:539:97//Hs.13225:AF038662

[17215] F-HEMBA1003291//Homo sapiens mRNA for KIAA0537 protein, complete cds//1.6e-167:799:98//Hs.12836:AB011109

[17216] F-HEMBA1003296//EST//0.0013:49:97//Hs.137157:R44912

[17217] F-HEMBA1003304//ESTs//0.047:164:64//Hs.94448:AA770160

[17218] F-HEMBA1003309//ESTs//7.8e-123:589:98//Hs.105486:AA521012

[17219] F-HEMBA1003314//Homo sapiens mRNA for leucine zipper bearing kinase, complete cds//1.5e-189:865:99//Hs.124224:AB001872

[17220] F-HEMBA1003322//H. sapiens mRNA for sigma 3B protein//4.5e-49:399:80//Hs.154782:X99459

[17221] F-HEMBA1003327//EST//7.7e-10:165:72//Hs.114826:AA056254

[17222] F-HEMBA1003328//EST//0.00023:128:67//Hs.126467:AA913328

[17223] F-HEMBA1003330

[17224] F-HEMBA1003348//Human mRNA for KIAA0331 gene, complete cds//4.8e-26:256:78//Hs.146395:AB002329

[17225] F-HEMBA1003369//Homo sapiens DNA from chromosome 19 p13.2 cosmids R31240, R30272 and R28549 containing the EKLF, GCDH, CRTC, and RAD23A genes, genomic sequence//0.37:187:65//Hs.80265:AD000092

[17226] F-HEMBA1003370//ESTs//8.2e-36:196:79//Hs.139158:AA226159

[17227] F-HEMBA1003373//ESTs//1.0:195:61//Hs.127307:AI263819

[17228] F-HEMBA1003376//Clathrin, light polypeptide (Lcb)//2.3e-29:606:64//Hs.73919:X81637

[17229] F-HEMBA1003380//ESTs//2.5e-21:303:70//Hs.37528:H58017

[17230] F-HEMBA1003384//ESTs//0.14:281:61//Hs.159650:N95552

[17231] F-HEMBA1003395//ESTs//0.53:121:70//Hs.144873:AI202488

[17232] F-HEMBA1003402//EST//0.029:148:66//Hs.116798:AA633813

[17233] F-HEMBA1003403//Adducin 2 (beta) {alternative products}//5.0e-05:445:61//Hs.90951:U43959

[17234] F-HEMBA1003408//ESTs//9.0e-12:87:98//Hs.70266:Z78309

[17235] F-HEMBA1003417//Glutamate-cysteine ligase (gamma-glutamylcysteine synthetase), regulatory (30.8 kD)//9.5e-05:541:58//Hs.89709:L35546

[17236] F-HEMBA1003418//ESTs//3.5e-85:399:100//Hs.154489:AA564962

[17237] F-HEMBA1003433//Homo sapiens nibrin (NBS) mRNA, complete cds//2.0e-149:686:99//Hs.25812:AF058696

[17238] F-HEMBA1003447//Human mRNA for KIAA0380 gene, complete cds//0.43:271:60//Hs.47822:AB002378

[17239] F-HEMBA1003461//Glycoprotein lb (platelet), beta polypeptide//4.8e-08:775:58//Hs.3847:U59632

[17240] F-HEMBA1003463//ESTs//3.3e-22:121:99//Hs.130847:AA058578

[17241] F-HEMBA1003480//Homo sapiens mRNA for KIAA0700 protein, partial cds//0.16:321:60//Hs.13999:AB014600

[17242] F-HEMBA1003528//ESTs//3.8e-53:315:91//Hs.129688:AA057443

[17243] F-HEMBA1003531//Human mRNA for KIAA0033 gene, partial cds//4.9e-51:451:78//Hs.22271:D26067

[17244] F-HEMBA1003538//ESTs//1.2e-82:415:96//Hs.162075:AI392811

[17245] F-HEMBA1003545//ISL1 transcription factor, LIM/homeodomain, (islet-1)//5.0e-75:736:73//Hs.505:U07559

[17246] F-HEMBA1003548//ESTs//8.7e-77:411:95//Hs.163443:R23311

[17247] F-HEMBA1003555//Human nucleotide-binding protein mRNA, complete cds//3.6e-33:562:64//Hs.81469:U01833

[17248] F-HEMBA1003556

[17249] F-HEMBA1003560//EST//3.7e-29:202:86//Hs.136858:AA767122

[17250] F-HEMBA1003568//ESTs//2.4e-06:214:65//Hs.143371:AI342327

[17251] F-HEMBA1003569//Human metastasis-associated mtal mRNA, complete cds//2.0e-58:455:66//Hs.101448:U35113

[17252] F-HEMBA1003571//ESTs//0.0025:198:63//Hs.116448:AA648972

[17253] F-HEMBA1003579//ESTs//6.0e-10:513:99//Hs.97372:AA398546

[17254] F-HEMBA1003581//ESTs, Highly similar to TALIN [Mus musculus]//3.6e-19:108:99//Hs.18420:AA599232

[17255] F-HEMBA1003591//ESTs, Weakly similar to R74.5 [C. elegans]//5.2e-85:487:92//Hs.57937:W68285

[17256] F-HEMBA1003595//Membrane cofactor protein (CD46, trophoblast-lymphocyte cross-reactive antigen)//2.8e-06:439:62//Hs.83532:X59405

[17257] F-HEMBA1003597//ESTs//0.0025:200:64//Hs.8473:T40827

[17258] F-HEMBA1003598//ESTs//0.18:187:63//Hs.98641:AA429916

[17259] F-HEMBA1003615//ESTs, Highly similar to phosphorylation regulatory protein HP-10 [H. sapiens]//2.4e-133:644:97//Hs.3566:AA314782

[17260] F-HEMBA1003617//Homa sapiens mRNA for HRIHFB2157, partial cds//7.9e-171:501:97//Hs.124956:AB015344

[17261] F-HEMBA1003621//Homo sapiens protein inhibitor of activated STAT protein PIASx-alpha mRNA, complete cds//4.4e-16:161:78//Hs.111323:AF077954

[17262] F-HEMBA1003622//EST//0.0085:251:62//Hs.97343:AA401750

[17263] F-HEMBA1003630//ESTs//7.5e-05:304:61//Hs.87131:AA233159

[17264] F-HEMBA1003637//Homo sapiens homolog of the Aspergillus nidulans sudD gene product mRNA, complete cds//7.9e-26:546:63//Hs.109901:AF013591

[17265] F-HEMBA1003640//ESTs//1 .1e-11:267:66//Hs.34359:AI122791

[17266] F-HEMBA1003645

[17267] F-HEMBA1003646

[17268] F-HEMBA1003656

[17269] F-HEMBA1003662

[17270] F-HEMBA1003667//ESTs//1.5e-27:235:81//Hs.55855:AA621381

[17271] F-HEMBA1003679//ESTs//4.3e-49:251:97//Hs.152811:AA630906

[17272] F-HEMBA1003680//Human plectin (PLEC1) mRNA, complete cds//3.4e-06:464:61//Hs.79706:U53204

[17273] F-HEMBA1003684//ESTs, Weakly similar to zinc finger protein C2H2-171 [H. sapiens]//1.6e-100:478:98//Hs.118866:AI017072

[17274] F-HEMBA1003690//Homo sapiens mRNA for KIAA0600 protein, partial cds//9.5e-74:606:77//Hs.9028:AF039691

[17275] F-HEMBA1003692//ESTs//4.2e-43:252:92//Hs.39748:AA487187

[17276] F-HEMBA1003711//Homo sapiens mRNA for KIAA0544 protein, partial cds//0.81:254:62//Hs.32316:AB011116

[17277] F-HEMBA1003714//ESTs//6.4e-98:495:95//Hs.43846:N49995

[17278] F-HEMBA1003715//ESTs//1.3e-11:228:69//Hs.101237:AA708760

[17279] F-HEMBA1003720//Homo sapiens clone 23892 mRNA sequence//5.5e-45:692:68//Hs.91916:AF035317

[17280] F-HEMBA1003725//EST//2.5e-46:228:100//Hs.160069:AA926921

[17281] F-HEMBA1003729//ESTs//4.1e-48:253:96//Hs.26270:AA258839

[17282] F-HEMBA1003733//Human Line-1 repeat mRNA with 2 open reading frames//8.6e-102:753:81//Hs.23094:M19503

[17283] F-HEMBA1003742//Homo sapiens chromosome 19, cosmid R31180//0.16:242:62//Hs.153325:AC005390

[17284] F-HEMBA1003758//ESTs//9.3e-12:408:61//Hs.148459:AI198946

[17285] F-HEMBA1003760//Homo sapiens clone 23698 mRNA sequence//9.7e-35:430:69//Hs.8136:U81984

[17286] F-HEMBA1003773//EST//0.76:191:61//Hs.127020:AA934920

[17287] F-HEMBA1003783//ESTs, Weakly similar to COIH6.7 [C. elegans]I/1.7e-24:224:81//Hs.18171:AA524327

[17288] F-HEMBA1003784//ESTs//0.13:120:67//Hs.161993:AA503172

[17289] F-HEMBA1003799//Interleukin 9 receptor//2.0e-17:263:70//Hs.1702:L39064

[17290] F-HEMBA1003803//Homo sapiens calcium-activated potassium channel (KCNN3) mRNA, complete cds//0.13:222:61//Hs.89230:AF031815

[17291] F-HEMBA1003804//ESTs//1.4e-112:275:98//Hs.72132:AF039239

[17292] F-HEMBA1003805//Human p62 MRNA, complete cds//1.1e-11:523:60//Hs.119537:M88108

[17293] F-HEMBA1003807//ESTs//4.1e-08:279:68//Hs.115679:AI379721

[17294] F-HEMBA1003827//Homo sapiens mRNA for KIAA0616 protein, partial cds//3.3e-85:586:87//Hs.6051:AB014516

[17295] F-HEMBA1003836//EST//6.8e-06:98:74//Hs.145447:AI204220

[17296] F-HEMBA1003838//ESTs, Moderately similar to !!!! ALU SUBFAMILY SC WARNING ENTRY !!!! [H. sapiens]//3.8e-40:151:88//Hs.139007:H74314

[17297] F-HEMBA1003856//ESTs//8.6e-53:286:95//Hs.116645:AI005167

[17298] F-HEMBA1003864//Human mRNA for KIAA0369 gene, complete cds//0.11:144:66//Hs.21355:AB002367

[17299] F-HEMBA1003866//Homo sapiens semaphorin F homolog mRNA, complete cds//4.3e-30:580:63//Hs.27621:U52840

[17300] F-HEMBAI1003879//Nuclear cap binding protein, 80 kD//6.7e-10:87:95//Hs.89563:D32002

[17301] F-HEMBA1003880

[17302] F-HEMBA1003885//Homo sapiens mRNA for KIAA0752 protein, partial cds//4.2e-18:302:67//Hs.23711:AB018295

[17303] F-HEMBA1003893//ESTs, Weakly similar to HYPOTHETICAL 27.8 KD PROTEIN IN VMA7-RPS31 A INTERGENIC REGION [S. cerevisiae]//1.2e-49:295:92//Hs.114673:W72675

[17304] F-HEMBA1003902//ESTs//1.1e-11:165:74//Hs.54632:AA976236

[17305] F-HEMBA1003908//Homo sapiens mRNA for KIAA0525 protein, partial cds//0.081:345:58//Hs.78494:AB011097

[17306] F-HEMBA1003926//EST//2.5e-32:253:83//Hs.132635:AI032875

[17307] F-HEMBA1003937//Human mRNA for KIAA0391 gene, complete cds//2.9e-38:313:69//Hs.154668:AB002389

[17308] F-HEMBA1003939//ESTs//3.4e-07:150:71//Hs.148926:R59562

[17309] F-HEMBA1003942//EST, Weakly similar to 24 KD PROTEIN [Xenopus laevis]//0.0029:222:61//Hs.144236:W52380

[17310] F-HEMBA1003950//ESTs//0.98:200:62//Hs.163912:W20055

[17311] F-HEMBA1003953//Zinc finger protein 7 (KOX4, clone HF.16)//0.00014:271:66//Hs.2076:M29580

[17312] F-HEMBA1003958//ESTs, Moderately similar to !!!! ALU SUBFAMILY J WARNING ENTRY !!!! [H. sapiens]//2.1e-44:243:76//Hs.91146:N73230

[17313] F-HEMBA1003959//ESTs//0.067:251:59//Hs.39915:H78567

[17314] F-HEMBA1003976//EST//6.7e-09:109:81//Hs.154635:AI138965

[17315] F-HEMBA1003978

[17316] F-HEMBA1003985//EST//0.32:115:69//Hs.102617:N47009

[17317] F-HEMBA1003987//ESTs//7.8e-07:60:100//Hs.66058:AA424456

[17318] F-HEMBA1003989//Homo sapiens HIV- I inducer of short transcripts binding protein (FBI 1) mRNA, complete cds//0.022:349:58//Hs.104640:AF000561

[17319] F-HEMBA1004000//EST//7.2e-07:200:66//Hs.119082:AA358468

[17320] F-HEMBA1004011//EST//0.019:241:62//Hs.16989:AA676493

[17321] F-HEMBA1004012//ESTs//3.6e-09:177:68//Hs.106132:AA812573

[17322] F-HEMBA1004015//ESTs//3.0e-86:407:99//Hs.115679:AI379721

[17323] F-HEMBA1004024//Homo sapiens mRNA for KIAA0772 protein, complete cds//5.2e-51:359:84//Hs.15519:AB018315

[17324] F-HEMBA1004038//ESTs//1 .2e-58:324:94//Hs.61658:AI239930

[17325] F-HEMBA1004042//EST//0.00088:272:61//Hs.155763:AI312281

[17326] F-HEMBA1004045//EST//2.7e-20:408:66//Hs.162529:AA584160

[17327] F-HEMBA1004048//Transforming growth factor beta//0.026:462:57//Hs.6101: M60315

[17328] F-HEMBA1004049//ESTs//8.1e-68:430:86//Hs.146307:AA584638

[17329] F-HEMBA1004055//Human chromosome 3p21.1 gene sequence//1.5e-10:457:58//Hs.82837:L13435

[17330] F-HEMBA1004056//Homo sapiens mRNA for alpha(1,2)fucosyltransferase, complete cds//1.5e-46:199:80//Hs.46328:D87942

[17331] F-HEMBA1004074//ESTs//3.0e-23:219:74//Hs.70279:AA757426

[17332] F-HEMBA1004086//EST//0.36:189:62//Hs.156218:AA770107

[17333] F-HEMBA1004097//NADH-CYTOCHROME B5 REDUCTASE//1.0:302:57//Hs.75666:M28713

[17334] F-HEMBA1004111//Human G protein-coupled receptor (STRL22) mRNA, complete cds//4.3e-39:335:79//Hs.46468:U45984

[17335] F-HEMBA1004131//Human mRNA for KIAA0202 gene, partial cds//1.9e-24:610:61//Hs.80712:D86957

[17336] F-HEMBA1004132//EST//3 .5e-06:143:70//Hs.136799:AA780064

[17337] F-HEMBA1004133//ESTs//1.0:157:68//Hs.161226:AI419759

[17338] F-HEMBA1004138//H. sapiens mRNA for RanGTPase activating protein 1//0.00055:343:62//Hs.5923:X82260

[17339] F-HEMBA1004143

[17340] F-HEMBA1004146

[17341] F-HEMBA1004150//EST//0.0046:402:57//Hs.147027:Al 186056

[17342] F-HEMBA1004164//Homo sapiens mRNA for KIAA0798 protein, complete cds//1.8e-15:591:60//Hs.159277:AB018341

[17343] F-HEMBA1004168//Homo sapiens geminin mRNA, complete cds//1.5e-134:649:97//Hs.59988:AF067855

[17344] F-HEMBA1004199

[17345] F-HEMBA1004200//ESTs//0.0083:150:66//Hs.116424:AI375427

[17346] F-HEMBA1004202//ESTs, Weakly similar to GTP-BINDING PROTEIN YPTM1 [Zea mays]//1 .2e-35:205:94//Hs.10092:AI189282

[17347] F-HEMBA1004203//ESTs//3.9e-14:237:70//Hs.118273:AA626040

[17348] F-HEMBA1004207//Leptin receptor//1.1e-167:791:98//Hs.54515:U50748

[17349] F-HEMBA1004225//ESTs//0.00087:231:64//Hs.13109:AA192514

[17350] F-HEMBA1004227//ESTs, Weakly similar to F55A11.4 [C. elegans]//0.012:156:67//Hs.163588:AI073878

[17351] F-HEMBA1004238 45 F-HEMBA1004241//ESTs//8.7e-05:51:96//Hs.162826:AA679571

[17352] F-HEMBA1004246//EST//1 .2e-36:198:96//Hs.121343:AA758522

[17353] F-HEMBA1004248//Homo sapiens insulin induced protein 1 (INSIG1) gene, complete cds//1.1e-28:295:72//Hs.56205:U96876

[17354] F-HEMBA1004264//Human HCF1 gene related mRNA sequence//3.1e-5007:553:60//Hs.83634:U52112

[17355] F-HEMBA1004267//Homo sapiens mRNA for KIAA0688 protein, complete cds//4.9e-73:490:77//Hs.141874:AB014588

[17356] F-HEMBA1004272

[17357] F-HEMBA1004274//EST//0.43:154:61//Hs.125347:AA876444

[17358] F-HEMBA1004275//Human mRNA for KIAA0333 gene, partial cds//0.71:118:65//Hs.155313:AB002331

[17359] F-HEMBA1004276//Homo sapiens mRNA for KIAA0800 protein, complete cds//1.0:364:56//Hs.118738:AB018343

[17360] F-HEMBA1004286//Homo sapiens TGF beta receptor associated protein-1 mRNA, complete cds//6.9e-187:868:99//Hs.101766:AF022795

[17361] F-HEMBA1004289

[17362] F-HEMBA1004295//EST//0.20:149:62//Hs.162415:AA573484

[17363] F-HEMBA1004306//ESTs//0.041:177:64//Hs.158234:AI270047

[17364] F-HEMBA1004312//ESTs//0.83:253:59//Hs.121898:AI336314

[17365] F-HEMBA1004321I/Zinc finger protein 136 (clone pHZ-20)//2.3e-40:452:65//Hs.69740:U09367

[17366] F-HEMBA1004323//EST//0.44:134:64//Hs.145464:AI204532

[17367] F-HEMBA1004327//Homo sapiens SOX22 protein (SOX22) mRNA, complete cds//0.017:209:64//Hs.43627:U35612

[17368] F-HEMBA1004330//ESTs//4.5e-27:171:91//Hs.112838:AA614062

[17369] F-HEMBA1004334//EST//12.4e-53:556:75//Hs.139093:AA166888

[17370] F-HEMBA1004335//Homo sapiens mRNA for KIAA0706 protein, complete cds//0.49:80:73//Hs.139648: AB014606

[17371] F-HEMBA1004341

[17372] F-HEMBA1004353//Homo sapiens mRNA for c-myc binding protein, complete cds//2.7e-39:270:86//Hs.80686:D89667

[17373] F-HEMBA1004354//Human CHL1 potential helicase (CHLR1), complete cds//1.3e-46:190:92//Hs.27424:U75968

[17374] F-HEMBA1004356//Thyrotropin-releasing hormone receptor//0.15:296:62//Hs.3022:D85376

[17375] F-HEMBA1004366//ESTs, Weakly similar to transposon LRE2 reverse transcriptase homolog [H. sapiens]//7.8e-10:396:61//Hs.33688:AA020928

[17376] F-HEMBA1004372//ESTs//0.90:172:62//Hs.145611:R68800

[17377] F-HEMBA1004389//Zinc finger protein 148 (pHZ-52)//8.0e-28:359:67//Hs.112180:AF039019

[17378] F-HEMBA1004394//ESTs//0.023:357:58//Hs.47212:N51250

[17379] F-HEMBA1004396//EST//3.4e-22:244:74//Hs.162554:AA584818

[17380] F-HEMBA1004405//EST//4.0e-43:214:100//Hs.33100:H42199

[17381] F-HEMBA1004408//ESTs, Weakly similar to The hal 539 protein is related to cyclophilin. [H. sapiens]//1.4e-20:144:88//Hs.121076:AI246426

[17382] F-HEMBA1004429//Fucosyltransferase I (galactoside 2-alpha-L-fucosyltransferase, Bombay phenotype included)//4.8e-18:248:72//Hs.69747:M35531

[17383] F-HEMBA1004433//Small inducible cytokine A5 (RANTES)//8.2e-39:248:81//Hs.155464:AF088219

[17384] F-HEMBA1004460//Homo sapiens PYRIN (MEFV) mRNA, complete cds//5.6e-87:650:81//Hs.113283:AF018080

[17385] F-HEMBA1004461//ESTs//0.057:217:61//Hs.26989:Z41606

[17386] F-HEMBA1004479//Homo sapiens clone 23698 mRNA sequence//4.9e-17:223:71//Hs.8136:U81984

[17387] F-HEMBA1004482//EST//0.0056:261:59//Hs.45012:N39450

[17388] F-HEMBA1004499//ESTs//4.1e-68:340:97//Hs.134266:AA992600

[17389] F-HEMBA1004502//ESTs//7.7e-32:195:91//Hs.134906:H93431

[17390] F-HEMBA1004506//Human Line-1 repeat mRNA with 2 open reading frames//9.0e-89:758:76//Hs.23094:M19503

[17391] F-HEMBA1004507//ESTs, Weakly similar to T19B10.6 [C. elegans]//1.4e-61:296:99//Hs.114622:AA693492

[17392] F-HEMBA1004509//Homo sapiens suppressor of white apricot homolog 2 (SWAP2) mRNA, complete cds//0.014:265:61 l/Hs.43543:AF042800

[17393] F-HEMBA1004534//Filamin 1 (actin-binding protein-280)//5.0e-74:678:74//Hs.76279:X53416

[17394] F-HEMBA1004538//EST//0.00047:268:58//Hs.136870:AA805381

[17395] F-HEMBA1004542//Human butyrophilin protein (BT3.3) mRNA, partial cds//0.74:74:75//Hs.87497:U90552

[17396] F-HEMBA1004554

[17397] F-HEMBA1004560//ESTs//3.1e-19:240:73//Hs.112637:AA805331

[17398] F-HEMBA1004573//EST//2.4e-59:290:99//Hs.112908:AA620802

[17399] F-HEMBA1004577//ESTs, Weakly similar to UTR1 PROTEIN [S. cerevisiae]//1.2e-17:334:67//Hs.24536:AA479825

[17400] F-HEMBA1004586//Von Hippel-Lindau syndrome//5.1e-35:337:78//Hs.78160:AF010238

[17401] F-HEMBA1004596//ESTs//3.3e-32:189:94//Hs.42530:N41661

[17402] F-HEMBA1004604//Human hindlimb expressed homeobox protein backfoot (Bft) mRNA, complete cds//0.42:186:66//Hs.84136:U70370

[17403] F-HEMBA1004610//ESTs, Moderately similar to !!!! ALU SUBFAMILY J WARNING ENTRY !!!! [H. sapiens]//2.3e-16:297:68//Hs.106008:AA147606

[17404] F-HEMBA1004617//EST//0.027:188:61//Hs.159094:AI383198

[17405] F-HEMBA1004629//ESTs//7.8e-09:348:63//Hs.138358:T66178

[17406] F-HEMBA1004631//EST//0.0012:268:60//Hs.150685:AA923416

[17407] F-HEMBA1004632//ESTs//0.82:125:67//Hs.143619:AI360891

[17408] F-HEMBA1004637//ESTs//0.0034:229:64//Hs.157178:AI346780

[17409] F-HEMBA1004638//ESTs//2.0e-11:166:71//Hs.128657:AI017522

[17410] F-HEMBA1004666//EST//0.44:294:58//Hs.44780:N36083

[17411] F-HEMBA1004669//ESTs//1.7e-28:200:86//Hs.8084:W22796

[17412] F-HEMBA1004670//Mucin 1, transmembrane//0.060:416:57//Hs.89603:J05582

[17413] F-HEMBA1004672//ESTs//0.27:44:95//Hs.86237:AA206141

[17414] F-HEMBA1004693//ESTs//5.3e-55:301:95//Hs.159066:AI093252

[17415] F-HEMBA1004697//H. sapiens mRNA for ribosomal protein LI 8a homologue//0.64:313:61//Hs.118578:X80821

[17416] F-HEMBA1004705//Homo sapiens KIAA0432 mRNA, complete cds//4.5e-19:230:73//Hs.155174:AB007892

[17417] F-HEMBA1004709//ESTs//3.1e-31:176:88//Hs.152413:AA780515

[17418] F-HEMBA1004711//Cholinergic receptor, nicotinic, delta polypeptide//1.0:244:57//Hs.99975:X55019

[17419] F-HEMBA1004725//Homo sapiens agrin precursor mRNA, partial cds//0.24:328:60//Hs.68900:AF016903

[17420] F-HEMBA1004730//ESTs, Weakly similar to ORF2-like protein [H. sapiens]//5.9e-32:476:70//Hs.116874:AA524909

[17421] F-HEMBA1004733//ESTs//3.8e-16:96:79//Hs.152413:AA780515

[17422] F-HEMBA1004734//Human epiderrnoid carcinoma mRNA for ubiquitin-conjugating enzyme E2 similar to Drosophila bendless gene product, complete cds//0.16:329:58//Hs.75355:D83004

[17423] F-HEMBA1004736//Human Line-1 repeat mRNA with 2 open reading frames//2.0e-61:663:71//Hs.23094:M19503

[17424] F-HEMBA1004748//ESTs//1.5e-05:343:63//Hs.42241:H96813

[17425] F-HEMBA1004751//ESTs//3.7e-32:147:80//Hs.138788:N54504

[17426] F-HEMBA1004752//Homo sapiens mRNA for KIAA0288 gene, complete cds//0.00020:521:59//Hs.91400:AB006626

[17427] F-HEMBA1004753//Homo sapiens DEC-205 mRNA, complete cds//5.1e-46:337:84//Hs.153563:AF011333

[17428] F-HEMBA1004756//Human transporter protein (g17) mRNA, complete cds//3 .1e-24:416:65//Hs.76460:U49082

[17429] F-HEMBA1004758//Homo sapiens transcription factor SLI mRNA, complete cds//1 .2e-136:769:91//Hs.153088:L39060

[17430] F-HEMBA1004763//Loricrin//0.0018:227:62//Hs.155657:M61120

[17431] F-HEMBA1004768//Human Line-1 repeat mRNA with 2 open reading frames//4.5e-115:909:78//Hs.23094:M19503

[17432] F-HEMBA1004770//Human Rad50 (Rad50) mRNA, complete cds//0.020:728:57//Hs.41587:U63139

[17433] F-HEMBA1004771

[17434] F-HEMBA1004776//ESTs, Weakly similar to progesterone receptor-related protein p23 [H. sapiens]//1.0:158:63//Hs.62004:AF039235

[17435] F-HEMBA1004778//ESTs//1.2e-70:336:99//Hs.113052:AI222106

[17436] F-HEMBA1004795

[17437] F-HEMBA1004803//ESTs//5.0e-75:454:88//Hs.138632:H97952

[17438] F-HEMBA1004806//EST//0.080:142:65//Hs.160268:AI148971

[17439] F-HEMBA1004807//Human HIVI tata element modulatory factor mRNA sequence from chromosome 3//4.5e-48:171:92//Hs.134510:L01042

[17440] F-HEMBA1004816//EST//1.0e-17:175:71//Hs.140680:AA873646

[17441] F-HEMBA1004820//ESTs//1.3e-136:629:99//Hs.160726:AI300481

[17442] F-HEMBA1004847//ESTs//2.1e-09:66:98//Hs.158161:AA312511

[17443] F-HEMBA1004850//EST//0.033:253:64//Hs.158782:AI376601

[17444] F-HEMBA1004863//Homo sapiens mRNA for KIAA0578 protein, partial cds//0.83:179:62//Hs.22998:AB011150

[17445] F-HEMBA1004864//ESTs, Weakly similar to ANON-66 Db [D. melanogaster]//1.7e-13:81:100//Hs.75884:AA446987

[17446] F-HEMBA1004865//ESTs//0.92:148:65//Hs.126980:AA934077

[17447] F-HEMBA1004880//H. sapiens mRNA for retrotransposon//1.2e-30:264:79//Hs.6940:Z48633

[17448] F-HEMBA1004889//Growth arrest-specific I//0.20:146:68//Hs.65029:L13698

[17449] F-HEMBA1004900//ESTs//1.6e-32:196:93//Hs.132032:R85304

[17450] F-HEMBA1004909//ESTs//3.4e-13:154:75//Hs.151467:N51106

[17451] F-HEMBA1004918//EST//0.78:122:61//Hs.145491:AI254348

[17452] F-HEMBA1004923//ELK1, member of ETS oncogene family//1.6e-40:340:79//Hs.116549:AL009172

[17453] F-HEMBA1004929//Cardiac gap junction protein//0.0048:588:57//Hs.74471:X52947

[17454] F-HEMBA1004930//ESTs//1.5e-17:227:74//Hs.148739:AI224959

[17455] F-HEMBA1004933//Human pseudoautosomal homeodomain-containing protein (PHOG) mRNA, complete cds//0.11:182:65//Hs.105932:U89331

[17456] F-HEMBA1004934

[17457] F-HEMBA1004944//EST//1.2e-67:349:96//Hs.162281:AA553981

[17458] F-HEMBA1004954//ESTs//0.014:404:60//Hs.11177:AA417813

[17459] F-HEMBA1004956//EST//2.3e-05:208:64//Hs.146958:AI174478

[17460] F-HEMBA1004960//ESTs//0.79:169:62//Hs.11637:WO3274

[17461] F-HEMBA1004972

[17462] F-HEMBA1004973//Homo sapiens mRNA for KIAA0445 protein, complete cds//0.073:574:58//Hs.154139:AB007914

[17463] F-HEMBA1004977//EST//4.4e-12:86:94//Hs.157819:AI361946

[17464] F-HEMBA1004978//ESTs//0.097:337:60//Hs.114157:AA703013

[17465] F-HEMBA1004980//EST//3.2e-10:169:65//Hs.149123:AI244750

[17466] F-HEMBA1004983//EST//0.93:85:71//Hs.162267:AA553589

[17467] F-HEMBA1004995//ESTs//0.46:296:61//Hs.135168:AI394026

[17468] F-HEMBA1005008//ESTs//1.5e-20:156:85//Hs.114140:U35429

[17469] F-HEMBA1005009//Homo sapiens chromosome 7q22 sequence//1.5e-52:379:72//Hs.151887:AF053356

[17470] F-HEMBA1005019//Homo sapiens mRNA for KIAA0648 protein, partial cds//4.5e-148:693:98//Hs.31921:AB014548

[17471] F-HEMBA1005029//Homo sapiens mRNA for KIAA0660 protein, complete cds//1.0:215:65//Hs.6727:AB014560

[17472] F-HEMBA1005035//ESTs, Weakly similar to HYPOTHETICAL 82.8 KD PROTEIN B0303.4 IN CHROMOSOME III [C. elegans]//9.4e-106:503:98//Hs.21362:AF039237

[17473] F-HEMBA1005039//Human kpni repeat mrna (cdna clone pcd-kpni-8), 3′ end//5.8e-60:272:89//Hs.103948:K00627

[17474] F-HEMBA1005047//Homo sapiens MAD-related gene SMAD7 (SMAD7) mRNA, complete cds//0.078:442:59//Hs.100602:AF010193

[17475] F-HEMBA1005050//H. sapiens ERF-2 mRNA//0.0025:251:63//Hs.78909:U07802

[17476] F-HEMBA1005062//ESTs//0.020:268:59//Hs.146181:AI264462

[17477] F-HEMBA1005066//Homo sapiens X-ray repair cross-complementing protein 2 (XRCC2) mRNA, complete cds//1.5e-59:411:85//Hs.129727:AF035587

[17478] F-HEMBA1005075//Human mRNA for KIAA0383 gene, partial cds//0.00010:395:57//Hs.27590:AB002381

[17479] F-HEMBA1005079//Dihydrolipoamide branched chain transacylase (E2 component of branched chain keto acid dehydrogenase complex)//3.5e-26:344:72//Hs.89479:X66785

[17480] F-HEMBA1005083//Homo sapiens centrosomal Nek2-associated protein 1 (C-NAP1) mRNA, complete cds//0.59:631:59//Hs.27910:AF049105

[17481] F-HEMBA1005101//Homo sapiens SYT interacting protein SIP mRNA, complete cds//4.1e-163:762:98//Hs.11170:AF080561

[17482] F-HEMBA1005113//ESTs//0.52:109:68//Hs.106330:AI031916

[17483] F-HEMBA1005123//Homo sapiens mRNA for KIAA0761 protein, partial cds//1.3e-52:468:78//Hs.93121:AB018304

[17484] F-HEMBA1005133//ESTs//1.6e-27:366:73//Hs.151467:N51106

[17485] F-HEMBA1005149//EST113.3e-37:304:80//Hs.132635:AI032875

[17486] F-HEMBA1005152//ESTs//3.9e-09:285:62//Hs.155876:AA593021

[17487] F-HEMBA1005159//EST//8.4e-05:289:64//Hs.125563:AA884216

[17488] F-HEMBAI1005185//ESTs//1.4e-22:129:96//Hs.14920:AA910914

[17489] F-HEMBA1005201//EST//4.0e-16:96:98//Hs.89002:AA282197

[17490] F-HEMBA1005202

[17491] F-HEMBA1005206//Homo sapiens sox 1 gene//0.0079:431:58//Hs.144029:Y 13436

[17492] F-HEMBA1005219//ESTs//4.3e-47:299:88//Hs.5019:W26547

[17493] F-HEMBA1005223//ESTs//0.00030:168:66//Hs.76487:N37081

[17494] F-HEMBA1005232//EST//0.0078:209:61//Hs.46852:N48302

[17495] F-HEMBA1005241//Homo sapiens neuronal thread protein AD7c-NTP mRNA, complete cds//6.0e-54:399:79//Hs.129735:AF010144

[17496] F-HEMBA1005244//ESTs//2.5e-14:85:100//Hs.128744:AI191922

[17497] F-HEMBA1005251//ESTs//0.012:49:95//Hs.161554:AA393896

[17498] F-HEMBA1005252//Homo sapiens mRNA for KIAA0585 protein, partial cds//4.7e-151:705:98//Hs.72660:AB011157

[17499] F-HEMBA1005274//ESTs//7.1e-09:298:64//Hs.145522:AI261380

[17500] F-HEMBA1005275//ESTs//7.9e-13:375:63//Hs.148974:AA001777

[17501] F-HEMBA1005293//Homo sapiens clone 23662 mRNA sequence//7.7e-22:338:65//Hs.12451:U97018

[17502] F-HEMBA1005296//ESTs//0.055:299:60//Hs.86320:AI149232

[17503] F-HEMBA1005304//Small inducible cytokine A5 (RANTES)//1.7e-45:322:85//Hs.155464:AF088219

[17504] F-HEMBA1005311

[17505] F-HEMBA1005314//ESTs//8.1e-39:199:98//Hs.119974:AI279516

[17506] F-HEMBA1005315//ESTs//1.9e-07:266:64//Hs.141440:N21615

[17507] F-HEMBA1005318//ESTs//5.3e-06:161:72//Hs.119411:AA937117

[17508] F-HEMBA1005331//Human checkpoint suppressor I mRNA, complete cds//0.00075:310:63//Hs.111597:U68723

[17509] F-HEMBA1005338//Homo sapiens mRNA for matrilin-4, partial//4.4e-153:740:97//Hs.129361:AJ007581

[17510] F-HEMBA1005353//EST//5.4e-09:222:68//Hs.119508:AA485732

[17511] F-HEMBA1005359//Zinc finger protein 137 (clone pHZ-30)//5.7e-100:500:88//Hs.151689:U09414

[17512] F-HEMBA1005367//Homo sapiens melastatin I (MLSNI) mRNA, complete cds//2.5e-70:572:73//Hs.43265:AF071787

[17513] F-HEMBA1005372//ESTs//0.00045:163:66//Hs.164058:AI417905

[17514] F-HEMBA1005374//Human melanoma antigen recognized by T-cells (MART-1) mRNA//6.1e-43:341:81//Hs.154069:U06452

[17515] F-HEMBA1005382//EST//2.4e-32:167:99//Hs.147186:AI193053

[17516] F-HEMBA1005389//ESTs//0.0021:245:59//Hs.104463:AA804448

[17517] F-HEMBA1005394//ESTs, Weakly similar to No definition line found [C. elegans]//1.0e-130:620:98//Hs.108990:N25951

[17518] F-HEMBA1005403//ESTs, Weakly similar to No definition line found [C. elegans]//7.7e-151:727:97//Hs.17118:AI033807

[17519] F-HEMBA1005408//ESTs//3 .2e-70:426:89//Hs.158078:H24513

[17520] F-HEMBA1005410//EST//2.5e-25:460:67//Hs.138765:N70347

[17521] F-HEMBA1005411

[17522] F-HEMBA1005423//Homo sapiens cyclin-dependent kinase inhibitor (CDKN2C) mRNA, complete cds//3.3e-171:537:99//Hs.4854:AF041248

[17523] F-HEMBA1005426//EST//1.0:148:64//Hs.44469:N33323

[17524] F-HEMBA1005443//Zinc finger protein 157 (HZF22)//9.0e-34:259:72//Hs.89897:U28687

[17525] F-HEMBA1005447//EST//3 .9e- 10:211:70//Hs.145960:AI276783

[17526] F-HEMBA1005468//ESTs//8.4e-53:390:8 I //Hs.152395:AA533107

[17527] F-HEMBA1005469//Human (clone E5.1) RNA-binding protein mRNA, complete cds//3.1e-29:155:9911Hs.75104:L37368

[17528] F-HEMBA1005472//Human Line-1 repeat mRNA with 2 open reading frames//1.4e-88:481:92//Hs.23094:M19503

[17529] F-HEMBA1005474//Small inducible cytokine A5 (RANTES)//4.2e-29:257:78//Hs.155464:AF088219

[17530] F-HEMBA1005475//Homo sapiens antigen NY-CO-16 mRNA, complete cds//5.3e-09:414:60//Hs.132206:AF039694

[17531] F-HEMBA1005497//Glucocorticoid receptor alpha {alternative products}//8.7e-41:588:69//Hs.102761:U25029

[17532] F-HEMBA1005500//Homo sapiens PAC clone DJ1093017 from 7q11.23-q21//1.1e-28:318:73//Hs.159530:AC004957

[17533] F-HEMBA1005506//Human mRNA for KIAA0010 gene, complete cds//0.67:351:58//Hs.155287:D13635

[17534] F-HEMBA1005508//ESTs//0.45:326:59//Hs.102756:AA526911

[17535] F-HEMBA1S00551//Human mRNA for KIAA0355 gene, complete cds//4.2e-49:400:79//Hs.153014:AB002353

[17536] F-HEMBA1005513//ESTs, Weakly similar to males-absent on the first [D. melanogaster]//5.3e-76:378:97//Hs.22767:N99220

[17537] F-HEMBA1005517//Homo sapiens transcription factor forkhead-like 7 (FKHL7) gene, complete cds//0.54:623:56//Hs.143551:AF048693

[17538] F-HEMBA1005518//ESTs//0.10:207:60//Hs.72447:AA160575

[17539] F-HEMBA1005520//Human mRNA for tryptophan hydroxylase (EC 1.14.16.4)//3.1e-55:288:85//Hs.144563:AF057280

[17540] F-HEMBA1005526//Small inducible cytokine A5 (RANTES)//5.4e-48:176:76//Hs.155464:AF088219

[17541] F-HEMBA1005528//ESTs, Highly similar to POP2 PROTEIN [Saccharomyces cerevisiae]//1.2e-30:166:96//Hs.17035:AI080471

[17542] F-HEMBA1005530

[17543] F-HEMBA1005548//Homo sapiens short form transcription factor C-MAF (c-maf) mRNA, complete cds//4.6e-18:391:64//Hs.30250:AF055376

[17544] F-HEMBA1005552//ESTs//1.8e-46:238:88//Hs.138856:H47461

[17545] F-HEMBA1005558//Human involucrin mRNA//3.0e-07:501:60//Hs.157091:M 13903

[17546] F-HEMBA1005568//ESTs//0.013:259:63//Hs.13669:H47257

[17547] F-HEMBA1005570//ESTs//0.0084:442:59//Hs.125384:AI346507

[17548] F-HEMBA1005576//Homo sapiens mRNA for KIAA0463 protein, partial cds//1.9e-128:610:98//Hs.77738:AB007932

[17549] F-HEMBA1005577//ESTs//0.98:199:61//Hs.146226:AI312873

[17550] F-HEMBA1005581//Homo sapiens mRNA for MEGF5, partial cds//9.1e-53:830:64//Hs.57929:AB011538

[17551] F-HEMBA1005582

[17552] F-HEMBA1005583

[17553] F-HEMBA1005588//ESTs//1.3e-35:386:70//Hs.55855:AA621381

[17554] F-HEMBA1005593//S-ADENOSYLMETHIONINE SYNTHETASE ALPHA AND BETA FORMS//0.54:439:59//Hs.2137:D49357

[17555] F-HEMBA1005595//Human mRNA for KIAA0325 gene, partial cds//5.5e-06:378:57//Hs.7720:AB002323

[17556] F-HEMBA1005606//EST//2.0e-60:324:94//Hs.5062:D 19609

[17557] F-HEMBA1005609//ESTs//6.0e-39:378:76//Hs.142242:H06982

[17558] F-HEMBA1005616//Human mRNA for tryptophan hydroxylase (EC 1.14.16.4)//8.2e-22:721:61//Hs.144563:AF057280

[17559] F-HEMBA1005621//ESTs, Weakly similar to MITOTIC MAD2 PROTEIN [S. cerevisiae]//1.8e-89:454:96//Hs.19400:AA662845

[17560] F-HEMBA1005627//EST//1.0:161:60//Hs.162765:AA622535

[17561] F-HEMBA1005631//EST//0.74:124:62//Hs.156185:AA723734

[17562] F-HEMBA1005632//ESTs//1.0:96:70//Hs.141321:N70199

[17563] F-HEMBA1005634//EST//6.6e-10:105:73//Hs.159692:AI416956

[17564] F-HEMBA1005666

[17565] F-HEMBA1005670//Homo sapiens mRNA for KIAA0570 protein, complete cds//2.7e-45:255:79//Hs.114293:AB011142

[17566] F-HEMBA1005679//Human kpni repeat mma (cdna clone pcd-kpni-4), 3′ end//1.2e-37:356:77//Hs.139107:K00629

[17567] F-HEMBA1005680

[17568] F-HEMBA1005685

[17569] F-HEMBA1005699//Human putative EPH-related PTK receptor ligand LERK-8 (Eplg8) mRNA, complete cds//3.3e-71:497:85//Hs.26988:U66406

[17570] F-HEMBA1005705//ESTs//0.00093:149:65//Hs.163564:R43678

[17571] F-HEMBA1005717//EST//0.018:115:66//Hs.160541:AI270143

[17572] F-HEMBA1005732//Farnesyl diphosphate synthase (farnesyl pyrophosphate synthetase, dimethylallyltranstransferase, geranyltranstransferase)//2.6e-20:151:88//Hs.77393: DI 4697

[17573] F-HEMBA1005737//ESTs//9.5e-34:235:88//Hs.160197:AA393754

[17574] F-HEMBA1005746//ESTs//0.20:260:59//Hs.112451:AI264024

[17575] F-HEMBA1005755//Human kpni repeat mrna (cdna clone pcd-kpni-8), 3′ end//1.8e-48:425:78//Hs.103948:K00627

[17576] F-HEMBA1005765//Small inducible cytokine A5 (RANTES)//1.3e-36:280:81//Hs.155464:AF088219

[17577] F-HEMBA1005780//ESTs//1.0:139:67//Hs.88684:AA885141

[17578] F-HEMBA1005813//ESTs//0.012:209:63//Hs.13365:R77747

[17579] F-HEMBA1005815//Human calpain-like protease (htra-3) mRNA, complete cds//2.0e-07:439:62//Hs.6133:U94346

[17580] F-HEMBA1005822//ESTs//9.3e-06:444:59//Hs.124344:T10577

[17581] F-HEMBA1005829//ESTs//1.1e-47:394:80//Hs.146811:AA410788

[17582] F-HEMBA1005834//Human Line-1 repeat mRNA with 2 open reading frames//7.9e-42:690:66//Hs.23094:M19503

[17583] F-HEMBA1005852//Human plectin (PLEC1) mRNA, complete cds//0.17:470:56//Hs.79706:U53204

[17584] F-HEMBA1005853//EST//0.013:211:60//Hs.162604:AA595150

[17585] F-HEMBA1005884//Homo sapiens mRNA, chromosome 1 specific transcript KIAA0484//1.4e-53:332:83//Hs.158095:AB007953

[17586] F-HEMBA1005891//ESTs//1.1e-77:393:97//Hs.28545:A1268097

[17587] F-HEMBA1005894//Human G protein-coupled receptor (STRL22) mRNA, complete cds//7.2e-45:411:77//Hs.46468:U45984

[17588] F-HEMBA1005909//Human neuropeptide y2 receptor mRNA, complete cds//0.00054:477:59//Hs.37125:U42766

[17589] F-HEMBA1005911//Thromboxane A2 receptor//4.1e-45:419:75//Hs.89887:D38081

[17590] F-HEMBA1005921//Homo sapiens haemopoietic progenitor homeobox HPX42B (HPX42B) mRNA, complete cds//2.0e-46:434:78//Hs.125231:AF068006

[17591] F-HEMBA1005931//ESTs, Weakly similar to kruppel-related zinc finger protein [H. sapiens]//1.2e-46:228:100//Hs.152178:AI224880

[17592] F-HEMBA1005934//EST//3.1e-14:121:85//Hs.150003:AI291588

[17593] F-HEMBA1005962//EST//0.0010:212:62//Hs.163197:AA767883

[17594] F-HEMBA1005963

[17595] F-HEMBA1005990//Homo sapiens I-1 receptor candidate protein mRNA, complete cds//4.2e-151:697:99//Hs.26285:AF082516

[17596] F-HEMBA1005991//EST//3.0e-07:361:59//Hs.146442:AI127530

[17597] F-HEMBA1005999//EST//1.2e-14:350:66//Hs.122326:AA782526

[17598] F-HEMBA1006002

[17599] F-HEMBA1006005//ESTs, Weakly similar to TH1 protein [D. melanogaster]//0.98:197:61//Hs.5184:AA709151

[17600] F-HEMBA1006031

[17601] F-HEMBA1006035

[17602] F-HEMBA1006036//Homo sapiens PYRIN (MEFV) mRNA, complete cds//5.4e-92:617:84//Hs.113283:AF018080

[17603] F-HEMBA1006042//ESTs//6.3e-41:161:81//Hs.141186:R99609

[17604] F-HEMBA1006067//ESTs//2.0e-74:354:99//Hs.143321:Al 139422

[17605] F-HEMBA1006081

[17606] F-HEMBA1006090//EST//1.2e-12:340:62//Hs.161195:AI418788

[17607] F-HEMBA1006091//ESTs//4.7e-98:473:98//Hs.9658:AA506313

[17608] F-HEMBA1006100//ESTs//7.1e-22:273:73//Hs.144407:AA737799

[17609] F-HEMBA1006108//ESTs, Weakly similar to ZK792.1 [C. elegans]//2.1e-26:273:66//Hs.8763:W30741

[17610] F-HEMBA1006121//EST//0.00012:232:59//Hs.117096:AA677968

[17611] F-HEMBA1006124//EST//0.047:251:62//Hs.132257:AI027222

[17612] F-HEMBA1006130//Human HOX4C mRNA for a homeobox protein//1.0:150:62//Hs.74061:X59372

[17613] F-HEMBA1006138//ESTs//1.8e-27:132:84//Hs.141575:AA211734

[17614] F-HEMBA1006142//EST//2.5e-47:310:87//Hs.149580:AI281881

[17615] F-HEMBA1006155

[17616] F-HEMBA1006158//ESTs//5.1e-105:506:98//Hs.93468:N40575

[17617] F-HEMBA1006173//ESTs//2.5e-24:195:84//Hs.79092:H29627

[17618] F-HEMBA1006182//ESTs//2.5e-19:237:72//Hs.141840:AA028117

[17619] F-HEMBA1006198//ESTs//0.017:133:67//Hs.142168:AA292540

[17620] F-HEMBA1006235//Homo sapiens clone 24422 mRNA sequence//8.6e-177:836:98//Hs.109268:AF070557

[17621] F-HEMBA1006248//Human zinc finger protein (MAZ) mRNA//0.0014:221:67//Hs.7647:M94046

[17622] F-HEMBA1006252

[17623] F-HEMBA1006253//EST//1.3e-100:467:100//Hs.146619:A 140706

[17624] F-HEMBA1006259//Homo sapiens mRNA for KIAA0798 protein, complete cds//0.00037:158:69//Hs.159277:AB018341

[17625] F-HEMBA1006268//ESTs//1.1e-20:376:67//Hs.72814:AA706631

[17626] F-HEMBA1006272//EST//4.8e-20:252:69//Hs.162992:AA688140

[17627] F-HEMBA1006278//H. sapiens PAP mRNA//6.5e-57:610:71//Hs.49007:X76770

[17628] F-HEMBA1006283

[17629] F-HEMBA1006284//ESTs//0.00017:248:63//Hs.143840:AI189964

[17630] F-HEMBA1006291

[17631] F-HEMBA1006293

[17632] F-HEMBA1006309//Homo sapiens T cell immune response cDNA7 (TIRC7) mRNA, complete cds//0.76:416:58//Hs.46465:U45285

[17633] F-HEMBA1006310//Homo sapiens mRNA for KIAA0602 protein, partial cds//9.3e-49:637:68//Hs.37656:AB011174

[17634] F-HEMBA1006328//ESTs//1.8e-71:429:88//Hs.139922:AA281350

[17635] F-HEMBA1006334//EST//0.082:267:57//Hs.136449:AA572789

[17636] F-HEMBA1006344//ESTs//6.2e-08:67:94//Hs.42302:AI032142

[17637] F-HEMBA1006347//ESTs, Weakly similar to males-absent on the first [D. melanogaster]//5.3e-76:378:97//Hs.22767:N99220

[17638] F-HEMBA1006349//ESTs//0.87:276:60//Hs.23628:H03287

[17639] F-HEMBA1006359//Zinc finger protein 43 (HTF6)//4.4e-117:823:81//Hs.74107:X59244

[17640] F-HEMBA1006364//EST//0.0012:168:66//Hs.156756:AI351026

[17641] F-HEMBA1006377//Homo sapiens RalBP1-interacting protein (POB1) mRNA, complete cds//0.0028:422:59//Hs.80667:AF010233

[17642] F-HEMBAI1006380//Homo sapiens syntaxin 4 binding protein UNC-18c (UNC-18c) mRNA, complete cds//0.41:265:61//Hs.8813:AF032922

[17643] F-HEMBA1006381//ESTs//3.8e-78:382:98//Hs.132171:AI042531

[17644] F-HEMBA1006398//Human Line-1 repeat mRNA with 2 open reading frames//2.1e-49:395:80//Hs.23094:M19503

[17645] F-HEMBA1006416//EST//7.3e-12:154:77//Hs.134086:AI077477

[17646] F-HEMBA1006419//EST//4.6e-51:179:86//Hs.149580:AI281881

[17647] F-HEMBA1006421//ISLET AMYLOID POLYPEPTIDE PRECURSOR//4.9e-46:517:72//Hs.51048:X68830

[17648] F-HEMBA1006424//ESTs//2.7e-08:380:60//Hs.44369:AI206835

[17649] F-HEMBA1006426//ESTs//3.0e-98:465:99//Hs.129251:AA993264

[17650] F-HEMBA1006438//EST//1.3e-29:183:93//Hs.147412:AI209194

[17651] F-HEMBA1006445

[17652] F-HEMBA1006446//EST//0.14:200:59//Hs.160695:AI282889

[17653] F-HEMBA1006461//Thiopurine S-methyltransferase//1 .4e-29:210:72//Hs.51124:AF019369

[17654] F-HEMBA1006467

[17655] F-HEMBA1006471//ESTs//1.4e-05:391:60//Hs.121282:AI091453

[17656] F-HEMBA1006474//ESTs, Highly similar to 40 KD PROTEIN [Borna disease virus]//1.1e-13:346:63//Hs.31257:AA875998

[17657] F-HEMBA1006483//Thromboxane A2 receptor//2.2e-51:386:82//Hs.89887:D38081

[17658] F-HEMBA1006485//EST//5.4e-111:516:99//Hs.61925:AA039532

[17659] F-HEMBA1006486//EST//4.7e-23:286:72//Hs.137800:AA886897

[17660] F-HEMBA1006489//ESTs//2.5e-06:137:71//Hs.128621:AA910431

[17661] F-HEMBA1006492

[17662] F-HEMBA1006494//ESTs//8.5e-24:299:72//Hs.153413:A1248625

[17663] F-HEMBA1006497//EST//0.00034:431:61//Hs.130057:AA903389

[17664] F-HEMBA1006502//ESTs//2.6e-11:131:80//Hs.141267:H22072

[17665] F-HEMBA1006507//Homo sapiens mRNA for KIAA0666 protein, partial cds//7.3e-141:470:98//Hs.153858:AB014566

[17666] F-HEMBA1006521//ESTs, Weakly similar to 3-oxoacyl-[acyl-carrier protein] reductase [E. coli]//3.9e-98:483:97//Hs.94811:AA011185

[17667] F-HEMBA1006530//EST//1.7e-42:530:71//Hs.163207:AA808002

[17668] F-HEMBA1006535//ESTs//2.9e-84:404:98//Hs.128679:A1160081

[17669] F-HEMBA1006540//Homo sapiens multi PDZ domain protein MUPP 1 (MUPP 1) mRNA, complete cds//4.4e-173:654:98//Hs.21301:AF093419

[17670] F-HEMBA1006546//ESTs//2.8e-45:391:78//Hs.146307:AA584638

[17671] F-HEMBA1006559//Homo sapiens KIAA0438 mRNA, complete cds//2.1e-47:363:79//Hs.21490:AB007898

[17672] F-HEMBA1006562//ESTs//4.5e-09:116:75//Hs.142368:AI198425

[17673] F-HEMBA1006566//EST//0.85:100:68//Hs.13052:T67136

[17674] F-HEMBA1006569//ESTs//2.7e-06:213:64//Hs.144372:AI346522

[17675] F-HEMBA1006579//EST//0.064:160:62//Hs.126244:AA873479

[17676] F-HEMBA1006583//Homo sapiens Jagged 2 mRNA, complete cds//1.7e-07:533:60//Hs.106387:AF029778

[17677] F-HEMBA1006595//Small inducible cytokine A5 (RANTES)//6.8e-69:328:81//Hs.155464:AF088219

[17678] F-HEMBA1006597//Homo sapiens mRNA for KIAA0752 protein, partial cds//2.6e-38:441:69//Hs.23711:AB018295

[17679] F-HEMBA1006612//ESTs//8.8e-135:668:97//Hs.7942:AA205862

[17680] F-HEMBA1006617EST//4.6e-31:254:81//Hs.132635:AI032875

[17681] F-HEMBA1006624//ESTs, Weakly similar to HYPOTHETICAL 41.9 KD PROTEIN IN SDS3-THS1 INTERGENIC REGION [S. cerevisiae]//2.5e-75:379:97//Hs.40911:AI391502

[17682] F-HEMBA100663//ESTs//1.4e-126:612:98//Hs.131737:AI343331

[17683] F-HEMBA1006635//EST//0.65:145:63//Hs.104560:AA340589

[17684] F-HEMBA1006639//ESTs, Highly similar to POLYADENYLATE-BINDING PROTEIN [Homo sapiens]//9.1e-27:170:92//Hs.109818:AA411185

[17685] F-HEMBA1006643//ESTs, Moderately similar to putative p150 [H. sapiens]//9.7e-05:259:65//Hs.105747:AA505003

[17686] F-HEMBA1006648//Homo sapiens integrin-linked kinase (ILK) mRNA, complete cds//3.9e-28:108:93//Hs.6196:U40282

[17687] F-HEMBA1006652//ESTs, Highly similar to 60S RIBOSOMAL PROTEIN L7 [Drosophila melanogaster]//3.0e-87:452:96//Hs.159574:AA190615

[17688] F-HEMBA1006653

[17689] F-HEMBA1006659//Homo sapiens PAC clone DJ0905J08 from 7 p12-p14//2.9e-92:438:98//Hs.8173:AC005189

[17690] F-HEMBA1006665//Homo sapiens clone 23892 mRNA sequence//2.8e-18:180:80//Hs.91916:AF035317

[17691] F-HEMBA1006674//Homo sapiens mRNA for nucleolar protein hNopS6//1.6e-16:122:90//Hs.5092:Y12065

[17692] F-HEMBA1006676

[17693] F-HEMBA1006682//EST//0.12:193:61//Hs.128367:AA974575

[17694] F-HEMBA1006695//ESTs//5.6e-27:110:80//Hs.159510:AA297145

[17695] F-HEMBA1006696//EST//3.2e-12:160:75//Hs.146472:AI128198

[17696] F-HEMBA1006708

[17697] F-HEMBA1006709//ESTs//0.69:60:80//Hs.152752:AA643545

[17698] F-HEMBA1006717//ESTs//2.6e-31:286:78//Hs.55573:W37226

[17699] F-HEMBA1006737//ESTs//1.6e-37:189:99//Hs.97490:AA394105

[17700] F-HEMBA1006744//Human mRNA for KIAA0118 gene, partial cds//1.9e-52:360:84//Hs.154326:D42087

[17701] F-HEMBA1006754//Homo sapiens X-ray repair cross-complementing protein 2 (XRCC2) mRNA, complete cds//2.0e-92:817:78//Hs.129727:AF035587

[17702] F-HEMBA1006758//Human mRNA for KIAA0327 protein, complete cds//4.0e-10:576:56//Hs.149323:AB002325

[17703] F-HEMBA1006767//ESTs//1.7e-18:252:72//Hs.141073:W72720

[17704] F-HEMBA1006779//EST//9.1e-26:395:69//Hs.145366:AI252657

[17705] F-HEMBA1006780//EST//1.0:93:69//Hs.116946:AA680250

[17706] F-HEMBA1006789//ESTs//0.0060:276:59//Hs.144121:AI369798

[17707] F-HEMBA1006795//Human Line-1 repeat mRNA with 2 open reading frames//4.1e-37:781:64//Hs.23094:M19503

[17708] F-HEMBA1006796//Human clone 23803 mRNA, partial cds//1.4e-07:202:68//Hs.34054:U79298

[17709] F-HEMBA1006807//ESTs, Moderately similar to HYPOTHETICAL 46.4 KD PROTEIN T16H12.5 IN CHROMOSOME III [C. elegans]//4.8e-110:523:98//Hs.125790:AA287723

[17710] F-HEMBA1006821//EST//5.1e-1 I :246:66//Hs.150542:AI051551

[17711] F-HEMBA1006824//ESTs//1.4e-29:158:98//Hs.127712:AA961624

[17712] F-HEMBA1006832//EST//3.1e-24:277:74//Hs.139357:AA420970

[17713] F-HEMBA1006849//ESTs//0.99:332:57//Hs.128993:AA985327

[17714] F-HEMBA1006865

[17715] F-HEMBA1006877//ESTs, Highly similar to HYPOTHETICAL 113.8 KD PROTEIN IN ERG7-NMD2 INTERGENIC REGION [Saccharomyces cerevisiae]//2.4e-61:311:97//Hs.127793:W25938

[17716] F-HEMBA1006885//ESTs, Highly similar to HYPOTHETICAL 29.1 KD PROTEIN IN URA7-POL12 INTERGENIC REGION [Saccharomyces cerevisiae]//9.1e-128:805:87//Hs.32376:AA758214

[17717] F-HEMBA1006900//EST//6.8e-05:255:63//Hs.163173:AA781592

[17718] F-HEMBA1006914//EST//0.065:366:62//Hs.162914:AA666199

[17719] F-HEMBAI1006921//ESTs//2.9e-42:347:82//Hs.159266:AI376989

[17720] F-HEMBA1006926//Human I kappa BR mRNA, complete cds//0.90:545:59//Hs.154764:U 16258

[17721] F-HEMBA1006929//EST//0.00013:403:61//Hs.162642:AA602539

[17722] F-HEMBA1006936//ESTs//0.00014:60:93//Hs.8737:W22712

[17723] F-HEMBA1006938//ESTs//4.7e-51:256:98//Hs.143651:AI150382

[17724] F-HEMBA1006941//Homo sapiens mRNA for putative thioredoxin-like protein//4.4e-92:437:98//Hs.42644:AJ010841

[17725] F-HEMBA1006949//H. sapiens mRNA for retrotransposon//6.9e-43:385:76//Hs.6940:Z48633

[17726] F-HEMBA1006973//Homo sapiens rab3-GAP regulatory domain mRNA, complete cds//1 .8e-144:740:94//Hs.14934:AF004828

[17727] F-HEMBA1006976//H. sapiens mRNA for Gal-beta(11-3/1-4)GlcNAc alpha-2.3-sialyltransferase//1.9e-79:447:89//Hs.75268:X74570

[17728] F-HEMBA1006993//ESTs//5.4e-19:380:66//Hs.152635:AA600968

[17729] F-HEMBA1006996//ESTs//0.17:242:59//Hs.106879:AA054723

[17730] F-HEMBA1007002

[17731] F-HEMBA1007017//EST//1.0:59:72//Hs.113400:R39282

[17732] F-HEMBA1007018//Homo sapiens dynein light intermediate chain 2 (LIC2) mRNA, complete cds//2.5e-78:827:70//Hs.43003:AF035812

[17733] F-HEMBA1007045

[17734] F-HEMBA1007051//EST//0.85:65:73//Hs.158641:AI370659

[17735] F-HEMBA1007052

[17736] F-HEMBA1007062

[17737] F-HEMBA1007066//ESTs//0.94:160:63//Hs.56071:W52212

[17738] F-HEMBA1007073//ESTs//3.6e-50:246:80//Hs.142678:H37845

[17739] F-HEMBA1007078//Human arginine-rich nuclear protein mRNA, complete cds//6.7e-75:417:91//Hs.80510:M74002

[17740] F-HEMBA1007080

[17741] F-HEMBA1007085//Guanylate cyclase 2D, membrane (retina-specific)//1.3e-06:568:61//Hs.1974:M92432

[17742] F-HEMBA1007087//Human mevalonate pyrophosphate decarboxylase (MPD) mRNA, complete cds//0.95:541:57//Hs.3828:U49260

[17743] F-HEMBA1007112//ESTs//3.4e-104:494:98//Hs.19207:AA039595

[17744] F-HEMBA1007113//ESTs//0.71:246:62//Hs.96235:AA196354

[17745] F-HEMBA1007121//ESTs//3.5e-69:335:98//Hs.140519:AA643182

[17746] F-HEMBA1007129

[17747] F-HEMBA1007147//ESTs//3.2e-07:235:64//Hs.124813:W46172

[17748] F-HEMBA1007149//ESTs//7.2e-08:161:68//Hs.121179:AA757136

[17749] F-HEMBA1007151

[17750] F-HEMBA1007174//Homo sapiens epsin 2b mRNA, complete cds//6.6e-64:318:97//Hs.22396:AF062085

[17751] F-HEMBA1007178//ESTs, Moderately similar to !!!! ALU SUBFAMILY J WARNING ENTRY !!!! [H. sapiens]//4.2e-39:248:90//Hs.157148:AA311921

[17752] F-HEMBA1007194//ESTs//2.3e-107:503:99//Hs.100605:AA305965

[17753] F-HEMBA1007203//Homo sapiens mRNA for KIAA0214 protein, complete cds//5.6e-158:478:98//Hs.3363:D86987

[17754] F-HEMBA1007206//EST//0.23:119:66//Hs.144402:AA609252

[17755] F-HEMBA1007224//Homo sapiens mRNA for KIAA0797 protein, partial cds//1.6e-177:839:98//Hs.27197:AB018340

[17756] F-HEMBA1007243//Hypoxanthine phosphoribosyltransferase I (Lesch-Nyhan syndrome)//2.7e-56:647:69//Hs.82314:M31642

[17757] F-HEMBA1007251//Human plectin (PLECI) mRNA, complete cds//0.19:210:67//Hs.79706:U53204

[17758] F-HEMBA1007256//Homo sapiens clone 24407 mRNA sequence//1.0:144:64//Hs.12432:AF070575

[17759] F-HEMBA1007267//Human homolog of yeast mutL (hPMS1) gene, complete cds//0.99:239:60//Hs.111749:U13695

[17760] F-HEMBA1007273//ESTs//5.6e-24:271:73//Hs.144951:N34836

[17761] F-HEMBA1007279//ESTs//6.1e-36:185:78//Hs.141022:H06475

[17762] F-HEMBA1007281//ESTs//0.74:94:65//Hs.162533:AA584529

[17763] F-HEMBA1007288//EST//0.83:99:67//Hs.127878:AA968637

[17764] F-HEMBA1007300//EST//3.6e-62:355:91//Hs.150139:AI300062

[17765] F-HEMBA1007301//Collagen, type I, alpha 1//1.5e-09:406:61//Hs.111913:Z74615

[17766] F-HEMBA1007319//EST//0.0068:50:96//Hs.163362:AA890506

[17767] F-HEMBA1007320//ESTs//1.0:133:66//Hs.38032:N63634

[17768] F-HEMBA1007322//ESTs//0.0077:187:66//Hs.4852:R84241

[17769] F-HEMBA1007327//ESTs, Weakly similar to HOST CELL FACTOR C1 [H. sapiens]//3.5e-09:144:76//Hs.20597:W58370

[17770] F-HEMBA1007341//ESTs//7.5e-61:302:98//Hs.154944:AA494130

[17771] F-HEMBA1007342//ESTs//2.9e-12:289:64//Hs.135555:AA911006

[17772] F-HEMBA1007347//EST//0.44:89:70//Hs.65949:Z40561

[17773] F-HEMBB1000005//ESTs//1.6e-07:337:60//Hs.126718:AA916568

[17774] F-HEMBB1000008//H. sapiens mRNA for translin associated protein X//1.1e-43:370:78//Hs.96247:X95073

[17775] F-HEMBB1000018//Nuclear factor of kappa light polypeptide gene enhancer in B-cells 1 (p 105)//1.0:108:70//Hs.83428:M58603

[17776] F-HEMBB1000024//EST//5.4e:07:137:70//Hs.125389:AA878307

[17777] F-HEMBB1000025//EST//0.99:362:58//Hs.121221:AA757392

[17778] F-HEMBB1000030//H. sapiens mRNA for cylicin II//1.3e-10:525:62//Hs.3232:Z46788

[17779] F-HEMBB1000036

[17780] F-HEMBB1000037//Homo sapiens erythroblast macrophage protein EMP mRNA, complete cds//6.2e-102:450:98//Hs.20815:AF084928

[17781] F-HEMBB1000039//EST//0.0034:97:73//Hs.141684:W35358

[17782] F-HEMBB1000044//ESTs//0.0048:218:63//Hs.123161:AA807319

[17783] F-HEMBB1000048//EST//0.00025:222:62//Hs.122474:AA765131

[17784] F-HEMBB1000050//ESTs//5.6e-28:293:75//Hs.136839:H93717

[17785] F-HEMBB1000054//Human Line-1 repeat mRNA with 2 open reading frames//3.3e-54:259:88//Hs.23094:M19503

[17786] F-HEMBB1000055//ESTs//0.0017:289:62//Hs.125755:AA286923

[17787] F-HEMBB1000059//Homo sapiens mRNA for KIAA0761 protein, partial cds//5.9e-59:286:8411Hs.93121:AB018304

[17788] F-HEMBB1000083

[17789] F-HEMBB1000089//EST//0.0016:192:66//Hs.137093:AA917621

[17790] F-HEMBB1000099//ESTs//5.7e-20:213:76//Hs.57883:AA218645

[17791] F-HEMBB1000103//Human kpni repeat mrna (cdna clone pcd-kpni-8), 3′ end//4.9e-43:418:74//Hs.103948:K00627

[17792] F-HEMBB1000113//EST//4.6e-23:221:76//Hs.142065:AA173763

[17793] F-HEMBB1000119//Homo sapiens ASMTL gene//2.5e-132:621:98//Hs.6315:Y15521

[17794] F-HEMBB1000136//ESTs//2.3e-101:507:96//Hs.12659:AA195207

[17795] F-HEMBB1000141//ESTs//2.1e-15:283:69//Hs.126257:AI279044

[17796] F-HEMBB1000144//EST//4.5e-52:298:91//Hs.149580:AI281881

[17797] F-HEMBB1000173//Zinc finger protein 74 (Cos52)//2.4e-63:285:82//Hs.3057:X92715

[17798] F-HEMBB1000175//EST//1H.0:101:65//Hs.162898:AA659646

[17799] F-HEMBB1000198//EST//0.99:179:56//Hs.116880:AA662457

[17800] F-HEMBB1000215//Homo sapiens mRNA for KIAA0557 protein, partial cds//1.4e-15:139:82//Hs.101414:AB011129

[17801] F-HEMBB1000217//ESTs//3.4e-06:81:88//Hs.121151:T66277

[17802] F-HEMBB1000218//EST//0.11:136:63//Hs.134683:AI092013

[17803] F-HEMBB1000226//Fragile X mental retardation 1//0.99:126:65//Hs.89764:X69962

[17804] F-HEMBB1000240//H. sapiens mRNA for Nup88 protein//1.0:334:57//Hs.90734:Y08612

[17805] F-HEMBB1000244//ESTs//3.2e-15:139:81//Hs.134549:AI078483

[17806] F-HEMBB1000250//Homo sapiens protein associated with Myc mRNA, complete cds//2.1e-156:735:98//Hs.151411:AF075587

[17807] F-HEMBB1000258//EST//0.0091:325:60//Hs.97533:AA435884

[17808] F-HEMBB1000264//Human CHL1 potential helicase (CHLR1), complete cds//1.4e-33:100:100//Hs.27424:U75968

[17809] F-HEMBB1000266//Homo sapiens mRNA for myosin phosphatase target subunit I (MYPT1)//0.0019:373:60//Hs.16533:D87930

[17810] F-HEMBB1000272//ESTs//1.3e-93:440:99//Hs.109224:N46684

[17811] F-HEMBB1000274//ESTs//0.41:221:65//Hs.71990:AA151796

[17812] F-HEMBB1000284//EST//0.00024:108:73//Hs.100725:F 13689

[17813] F-HEMBB1000307//EST//3.6e-10:149:73//Hs.140415:AA778574

[17814] F-HEMBB1000312//Homo sapiens mRNA for KIAA0783 protein, complete cds//0.00092:252:65//Hs.41153:AB018326

[17815] F-HEMBB1000317//Thrombospondin 117.1e-05:342:59//Hs.87409:X14787

[17816] F-HEMBB1000318//EST//0.014:184:61//Hs.155758:AI311870

[17817] F-HEMBB1000335//EST//0.99:187:63//Hs.137424:AA243729

[17818] F-HEMBB1000336//EST//1.0:209:63//Hs.150410:AI003611

[17819] F-HEMBB1000337//EST//0.086:133:66//Hs.128207:AA972330

[17820] F-HEMBB1000338//EST//7.1e-07:129:72//Hs.140488:AA767127

[17821] F-HEMBB1000339//Small inducible cytokine A5 (RANTES)I/1.2e-36:336:76//Hs.155464:AF088219

[17822] F-HEMBB1000341

[17823] F-HEMBB1000343//EST//0.66:163:63//Hs.150822:AI302729

[17824] F-HEMBB1000354//ESTs//7.1e-61:292:100//Hs.152266:AA926874

[17825] F-HEMBB1000369//ESTs, Highly similar to t-BOP [M. musculus]//0.013:157:64//Hs.129982:AI420970

[17826] F-HEMBB1000374//ESTs//8 .7e-53:454:79//Hs.133518:R69934

[17827] F-HEMBB1000376//ESTs//5.9e-14:87:97//Hs.163973:AA744348

[17828] F-HEMBB1000391//ESTs//0.033:237:64//Hs.135289:AI092963

[17829] F-HEMBB1000399//Homo sapiens mRNA for cell cycle checkpoint protein//9.4e-165:762:9811Hs.16184:AJ001642

[17830] F-HEMBB1000402//EST//0.013:291:59//Hs.149191:AI246155

[17831] F-HEMBB1000404//ESTs//3.0e-69:353:96//Hs.135857:AA947194

[17832] F-HEMBB1000420//EST//6.3e-52:258:98//Hs.136434:AA557925

[17833] F-HEMBB1000434//Homo sapiens neuronal thread protein AD7c-NTP mRNA, complete cds//9.4e-73:364:83//Hs.129735:AF010144

[17834] F-HEMBB1000438//ESTs//0.073:446:58//Hs.134632:AI223429

[17835] F-HEMBB1000441//Interleukin 10//1.7e-38:336:77//Hs.2180:M57627

[17836] F-HEMBB1000449//EST//5.5e-21:356:67//Hs.157848:AI362501

[17837] F-HEMBB1000455//ESTs//0.092:147:65//Hs.106446:N93227

[17838] F-HEMBB1000472

[17839] F-HEMBB1000480//EST//0.98:83:71//Hs.146462:AI124898

[17840] F-HEMBB1000487//ESTs//1.4e-59:341:92//Hs.48561:N79206

[17841] F-HEMBB1000490//ESTs//2.5e-27:200:79//Hs.56825:AI057560

[17842] F-HEMBB1000491

[17843] F-HEMBB1000493//ESTs//0.019:103:69//Hs.138358:T66178

[17844] F-HEMBB1000510//Glucocorticoid receptor alpha {alternative products)/1.6e-46:409:77//Hs.102761:U25029

[17845] F-HEMBB1000518//ESTs//3 .7e-06:187:64//Hs.140989:R68413

[17846] F-HEMBB1000523//ESTs//0.69:332:59//Hs.106845:W 19543

[17847] F-HEMBB1000530//H. sapiens mRNA for extracellular matrix protein collagen type XIV, C-terminus//2.1e-38:138:96//Hs.36131:Y11710

[17848] F-HEMBB1000550//ESTs, Weakly similar to !!!! ALU SUBFAMILY SC WARNING ENTRY !!!! [H. sapiens]//7.7e-31:554:67//Hs.157142:U85996

[17849] F-HEMBB1000554//Homo sapiens mRNA, chromosome 1 specific transcript KIAA0484//4.0e-27:282:75//Hs.158095:AB007953

[17850] F-HEMBB1000556//Homo sapiens mRNA for KIAA0750 protein, complete cds//2.0e-33:537:65//Hs.5444:AB018293

[17851] F-HEMBB1000564

[17852] F-HEMBB1000573//H. sapiens HCG II mRNA//7.5e-27:197:76//Hs.146333:X81001

[17853] F-HEMBB1000575/Non Hippel-Lindau syndrome//2.7e-72:255:79//Hs.78160:AF010238

[17854] F-HEMBB1000586//Dystrophin (muscular dystrophy, Duchenne and Becker types), includes DXS142, DXS164, DXS206, DXS230, DXS239, DXS268, DXS269, DXS270, DXS272//0.011:338:59//Hs.79012:M18533

[17855] F-HEMBB1000589//PLATELET GLYCOPROTEIN V PRECURSOR//2.4e-22:228:79//Hs.73734:Z23091

[17856] F-HEMBB1000591//ESTs//1.0e-17:370:64//Hs.58156:W71990

[17857] F-HEMBB1000592//EST//0.0038:51:88//Hs.148022:AI269323

[17858] F-HEMBB1000593//Homo sapiens chromosome 7q22 sequence//4.7e-109:503:99//Hs.3386:AF053356

[17859] F-HEMBB1000598//Ribosomal protein L5//3.5e-29:537:66//Hs.118781:U66589

[17860] F-HEMBB1000623//H. sapiens mRNA for GAIP protein//0.89:376:59//Hs.22698:X91809

[17861] F-HEMBB1000630//Homo sapiens KIAA0404 mRNA, partial cds//0.074:168:61//Hs.105850:AB007864

[17862] F-HEMBB1000631//ESTs//1.7e-06:247:64//Hs.156864:AI346481

[17863] F-HEMBB1000632//Human mRNA for KIAA0351 gene, complete cds//5.1e-50:811:65//Hs.29963:AB002349

[17864] F-HEMBB1000637//Sialophorin (gpL 115, leukosialin, CD43)//2.4e-79:304:85//Hs.80738:X52075

[17865] F-HEMBB1000638//EST//0.0076:92:75//Hs.125496:AA883735

[17866] F-HEMBB1000643//ISLET AMYLOID POLYPEPTIDE PRECURSOR//3.5e-45:477:74//Hs.51048:X68830

[17867] F-HEMBB1000649//Homo sapiens histone H2A.1b mRNA, complete cds//7.4e-52:533:75//Hs.51011:L19778

[17868] F-HEMBB1000652//ESTs//1.6e-49:345:84//Hs.132722:AA618531

[17869] F-HEMBB1000665//EST//0.44:152:63//Hs.149534:AI280924

[17870] F-HEMBB1000671//Human Line-1 repeat mRNA with 2 open reading frames//2.2e-79:280:85//Hs.23094:M19503

[17871] F-HEMBB1000673//ESTs//0.99:177:59//Hs.149864:N80474

[17872] F-HEMBB1000684//Protein kinase, interferon-inducible double stranded RNA dependent//2.6e-31:220:871//Hs.73821:M35663

[17873] F-HEMBB1000693//Homo sapiens neuroanl mRNA, complete cds//5.3e-120:575:9711Hs.158300:AF040723

[17874] F-HEMBB1000705//ESTs//4.7e-65:350:94//Hs.24610:R33125

[17875] F-HEMBB1000706//EST//8.6e-14:373:61//Hs.138281:R55703

[17876] F-HEMBB1000709//EST//0.99:110:65//Hs.162437:AA577510

[17877] F-HEMBB1000725//RAS-RELATED PROTEIN RAB-8//1.7e-77:635:77//Hs.123109:X56741

[17878] F-HEMBB1000726//EST//1.3e-43:257:84//Hs.162197:AA535216

[17879] F-HEMBB1000738//EST//5.9e-13:259:64//Hs.159699:AI417328

[17880] F-HEMBB1000749//EST//3.1e-42:271:87//Hs.162197:AA535216

[17881] F-HEMBB1000763

[17882] F-HEMBB1000770//ESTs, Weakly similar to MOESIN/EZRIN/RADIXIN HOMOLOG [D. melanogaster]//0.021:111:72//Hs.38178:AA921830

[17883] F-HEMBB1000774//ESTs, Weakly similar to mTERF [H. sapiens]//2.5e-116:580:97//Hs.5009:AA081390

[17884] F-HEMBB1000781//Human MEK kinase 3 mRNA, complete cds//5.3e-47:426:74//Hs.86201:U78876

[17885] F-HEMBB1000789//Homo sapiens mRNA for KIAA0677 protein, complete cds//3.0e-65:672:71//Hs.155983:AB014577

[17886] F-HEMBB1000790//ESTs//1.2e-52:344:86//Hs.35254:AI133727

[17887] F-HEMBB1000794//ESTs//0.00098:289:59//Hs.138782:N73572

[17888] F-HEMBB1000807//ESTs//2.1e-91:434:99//Hs.61334:AI298375

[17889] F-HEMBB1000810//ESTs//0.038:92:71//Hs.148763:AA668871

[17890] F-HEMBB1000821//EST//0.94:129:62//Hs.162299:AA555154

[17891] F-HEMBB1000822//ESTs//7.5e-05:199:63//Hs.117018:AA832421

[17892] F-HEMBB1000826//ESTs//4.8e-113:343:65//Hs.153429:AI283069

[17893] F-HEMBB1000827

[17894] F-HEMBB1000831

[17895] F-HEMBB1000835//EST//4.3e-27:201:85//Hs.141451:N29915

[17896] F-HEMBB1000840//EST//6.3e-75:380:96//Hs.142557:AA464948

[17897] F-HEMBB1000848//Human Line-1 repeat mRNA with 2 open reading frames/11.4e-135:875:85//Hs.23094:M19503

[17898] F-HEMBB1000852//Phosphoribosyl pyrophosphate amidotransferase//0.12:292:61//Hs.311:U00238

[17899] F-HEMBB1000870//EST//0.00091:246:62//Hs.126502:AA913831

[17900] F-HEMBB1000876//Homo sapiens ELISC-1 mRNA, partial cds//4.9e-34:200:94//Hs.128434:AF085351

[17901] F-HEMBB1000883//ESTs//0.42:107:67//Hs.154173:AI379823

[17902] F-HEMBB1000887

[17903] F-HEMBB1000888//ESTs//1.0:137:67//Hs.8121:AA521290

[17904] F-HEMBB1000890//ESTs//1.0:116:65//Hs.7105:T23433

[17905] F-HEMBB1000893//EST//0.0079:408:58//Hs.146504:AI129834

[17906] F-HEMBB1000908//EST//9.2e-21:205:79//Hs.132635:AI032875

[17907] F-HEMBB1000910//Human mRNA for KIAA0231 gene, partial cds//0.16:327:60//Hs.7938:D86984

[17908] F-HEMBB1000913//ESTs//1.0e-12:233:68//Hs.137545:AA487049

[17909] F-HEMBB1000915//ESTs//2.5e-90:423:99//Hs.135254:AI095468

[17910] F-HEMBB1000917//EST//2.8e-49:241:100//Hs.162216:AA548089

[17911] F-HEMBB1000927//Hippocalcin//1.2e-31:528:65//Hs.89692:D16593

[17912] F-HEMBB1000947

[17913] F-HEMBB1000959//Cytochrome P450, 51 (lanosterol 14-alpha-demethylase)//9.3e-48:572:72//Hs.2379:U23942

[17914] F-HEMBB1000973//ESTs//4.5e-26:286:76//Hs.137393:AA142938

[17915] F-HEMBB1000975//ESTs//0.78:180:66//Hs.104789:AA417124

[17916] F-HEMBB1000981

[17917] F-HEMBB1000985//Homo sapiens actin binding protein MAYVEN mRNA, complete cds//6.7e-07:308:62//Hs.122967:AF059569

[17918] F-HEMBB1000991//EST//0.12:125:66//Hs.22945:R43713

[17919] F-HEMBB1000996//ESTs//6.9e-05:273:63//Hs.133116:AI054055

[17920] F-HEMBB1001004//Homo sapiens mRNA for KIAA0665 protein, complete cds//0.62:193:62//Hs.119004:AB014565

[17921] F-HEMBB1001008//EST//4.7e-09:203:65//Hs.105221:AA489025

[17922] F-HEMBB1001011//Human Chromosome 16 BAC clone CIT987SK-A-635H12//2.4e-17:384:67//Hs.108604:AC002310

[17923] F-HEMBB1001014//EST, Weakly similar to putative p150 [H. sapiens]//0.21:284:60//Hs.161547:WO4991

[17924] F-HEMBB1001020//ESTs//9.7e-37:186:76//Hs.138852:AA284247

[17925] F-HEMBB1001024//ESTs, Highly similar to t-BOP [M. musculus]//0.11:242:61//Hs.129982:AI420970

[17926] F-HEMBB1001037//EST//0.0057:192:66//Hs.149987:AI291177

[17927] F-HEMBB1100047//ESTs//1.6e-22:360:70//Hs.120734:W58721

[17928] F-HEMBB1001051//H. sapiens mRNA for FAN protein//3.8e-29:160:98//Hs.78687:X96586

[17929] F-HEMBB1001056//Homo sapiens mRNA for KIAA0618 protein, complete cds//1.0e-42:149:96//Hs.15832:AB014518

[17930] F-HEMBB1001058//Small inducible cytokine A5 (RANTES)//1.1e-45:349:82//Hs.155464:AF088219

[17931] F-HEMBB1001060//ESTs//1.6e-62:464:81//Hs.138663:N24942

[17932] F-HEMBB1001063

[17933] F-HEMBB1001068//Homo sapiens liprin-beta2 mRNA, partial cds//9.9e-148:736:95//Hs.12953:AF034803

[17934] F-HEMBB1001096//EST//0.017:154:66//Hs.130403:AA909272

[17935] F-HEMBB1001102//ESTs//2.1e-18:120:95//Hs.163767:R06293

[17936] F-HEMBB1001105//Human BRCA2 region, mRNA sequence CGOI6//0.30:84:75//Hs.112434:U50529

[17937] F-HEMBB1001112//ESTs, Highly similar to PROTEIN TRANSPORT PROTEIN SEC61 ALPHA SUBUNIT [Canis familiaris]//9.3e-38:341:77//Hs.14038:R06800

[17938] F-HEMBB1001114//EST//6.4e-07:296:62//Hs.128420:AA975062

[17939] F-HEMBB1001117//EST//1.6e-99:464:99//Hs.130493:AA928139

[17940] F-HEMBB1001119

[17941] F-HEMBB1001126

[17942] F-HEMBB1001133//H. sapiens mRNA for translin associated protein X//1.2e-28:739:61//Hs.96247:X95073

[17943] F-HEMBB1001137

[17944] F-HEMBB1001142//Human mRNA for KIAA0331 gene, complete cds/2.1e-23:340:69//Hs.146395:AB002329

[17945] F-HEMBB1001151//ESTs//2.6e-30:252:79//Hs.6880:W26854

[17946] F-HEMBB1001153//ESTs//7.6e-16:97:96//Hs.113307:H16716

[17947] F-HEMBB1001169//ESTs//1.4e-32:374:71//Hs.161682:AA206863

[17948] F-HEMBB1001175//Human mRNA for ankyrin motif, complete cds//7.1e-36:509:66//Hs.73073:D78334

[17949] F-HEMBB1001177//ESTs, Weakly similar to HYPOTHETICAL TRP-ASP REPEATS CONTAINING PROTEIN IN HXT14-PHA2 INTERGENIC REGION [S. cerevisiae]//1.5e-65:312:100//Hs.86878:AA599183

[17950] F-HEMBB1001182//Electron-transfer-flavoprotein, beta polypeptide//0.94:199:64//Hs.74047:X71129

[17951] F-HEMBB1100199

[17952] F-HEMBB1001208//ESTs//0.12:120:69//Hs.130093:AA928802

[17953] F-HEMBB1001209//EST//0.00028:215:65//Hs.118276:W15258

[17954] F-HEMBB1001210//EST//2.9e-05:297:60//Hs.88840:AA281452

[17955] F-HEMBB1001218//Homo sapiens mRNA for KIAA0585 protein, partial cds//8.5e-37:260:76//Hs.72660:AB011157

[17956] F-HEMBB1001221//Homo sapiens mRNA, chromosome I specific transcript KIAA0507//0.00046:650:58//Hs.158241:AB007976

[17957] F-HEMBB1001234//ESTs, Highly similar to 65 KD YES-ASSOCIATED PROTEIN [Mus musculus]//6.7e-103:477:100//Hs.127835:AI378790

[17958] F-HEMBB1001242//Homo sapiens mRNA for LAK-1, complete cds//1.2e-31:458:67//Hs.129918:AB005754

[17959] F-HEMBB1001249//EST//0.26:203:63//Hs.140791:AA935909

[17960] F-HEMBB1001253//ESTs//4.0e-91:433:98//Hs.120636:AA325219

[17961] F-HEMBB1001254//ESTs//2.0e-24:180:85//Hs.136391:H04977

[17962] F-HEMBB1001267//Ataxia telangiectasia mutated (includes complementation groups A, C and D)//6.1e-24:146:78//Hs.51187:U82828

[17963] F-HEMBB1001271//ESTs//2.5e-05:686:58//Hs.115423:AI359248

[17964] F-HEMBB1001282//GA-binding protein transcription factor, beta subunit 2 (47 kD)//0.39:531:57//Hs.78915:U13045

[17965] F-HEMBB1001288//ESTs, Highly similar to HYPOTHETICAL 27.3 KD PROTEIN ZK353.7 IN CHROMOSOME III [Caenorhabditis elegans]//4.9e-10:91:89//Hs.16606:W81021

[17966] F-HEMBB1001289//ESTs//6.4e-100:467:99//Hs.151720:A1287890

[17967] F-HEMBB1001294//ESTs, Highly similar to RAS-LIKE PROTEIN TCIO [Homo sapiens]//1.3e-135:654:98//Hs.124217:AA020848

[17968] F-HEMBB1001302

[17969] F-HEMBB1001304//ESTs//0.98:109:68//Hs.138972:AA047725

[17970] F-HEMBB1001314//ESTs//7.4e-39:285:77//Hs.144749:AI217339

[17971] F-HEMBB1001315//Small inducible cytokine A5 (RANTES)//1.9e-40:355:78//Hs.155464:AF088219

[17972] F-HEMBB1001317//Human Line-1 repeat mRNA with 2 open reading frames//4.7e-98:625:85//Hs.23094:M19503

[17973] F-HEMBB1001326//ESTs//0.00030:257:63//Hs.62208:H 12380

[17974] F-HEMBB1001331//ESTs, Weakly similar to DFS70 [H. sapiens]//1.0e-48:332:87//Hs.43071:AA206222

[17975] F-HEMBB1001335

[17976] F-HEMBB1001337//Homo sapiens mRNA for KIAA0563 protein, complete cds//8.5e-56:282:87//Hs.15731:AB011135

[17977] F-HEMBB1001339//Homo sapiens antigen NY-CO-16 mRNA, complete cds//0.039:161:65//Hs.132206:AF039694

[17978] F-HEMBB1001346//Oxytocin receptor//4.2e-42:456:73//Hs.2820:X64878

[17979] F-HEMBB1001348//Homo sapiens mRNA for KIAA0570 protein, complete cds//1.2e-45:176:77//Hs.114293:AB011142

[17980] F-HEMBB1001356//EST//0.32:292:5911Hs.135771:AI005648

[17981] F-HEMBB1001364

[17982] F-HEMBB1001366//EST//7.8e-24:367:69//Hs.138765:N70347

[17983] F-HEMBB1001367//Small inducible cytokine A5 (RANTES)//8.7e-50:326:86//Hs.155464:AF088219

[17984] F-HEMBB1001369//EST//0.17:211:63//Hs.120066:AA707973

[17985] F-HEMBB1001380//Homo sapiens mRNA for KIAA0527 protein, partial cds//8.2e-36:225:79//Hs.129748:AB011099

[17986] F-HEMBB1001384

[17987] F-HEMBB1001387//ESTs//0.61:215:60//Hs.145915: AI342230

[17988] F-HEMBB1001394//Human Line-1 repeat mRNA with 2 open reading frames//3.8e-94:568:83//Hs.23094:M19503

[17989] F-HEMBB1001410//Homo sapiens keratan sulfate proteoglycan mRNA, complete cds//0.021:373:58//Hs.125750:AF065988

[17990] F-HEMBB1001424//EST//0.20:307:58//Hs.135336:AI049827

[17991] F-HEMBB1001426//Homo sapiens clone 23579 mRNA sequence//8.3e-17:205:72//Hs.83466:AF038174

[17992] F-HEMBB1001429//ESTs, Highly similar to CYTOSOL AMINOPEPTIDASE [Bos taurus]115.5e-153:729:96//Hs.21679:AF034175

[17993] F-HEMBB1001436//Human mRNA for KIAA0347 gene, complete cds//1.2e-44:316:85//Hs.101996:AB002345

[17994] F-HEMBB1001443

[17995] F-HEMBB1001449//Homo sapiens sodium bicarbonate cotransporter (HNBC1) mRNA, complete cds//0.033:478:58//Hs.5462:AF007216

[17996] F-HEMBB1001454//ESTs//1.4e-46:279:93//Hs.104866:AA426038

[17997] F-HEMBB1001458//EST//1.7e-09:106:83//Hs.141422:N20920

[17998] F-HEMBB1001463//Homo sapiens mRNA for semaphorin E, complete cds//0.18:387:59//Hs.62705:AB000220

[17999] F-HEMBB1001464//Homo sapiens Coch-5B2 mRNA, complete cds//0.26:189:67//Hs.21016:AF006740

[18000] F-HEMBB1001482//Homo sapiens mRNA for KIAA0760 protein, partial cds//1.2e-27:292:74//Hs.137168:AB018303

[18001] F-HEMBB1001500//ESTs//8.1e-28:312:741//Hs.18498:N52088

[18002] F-HEMBB1001521//Homo sapiens mRNA for alpha(1,2)fucosyltransferase, complete cds118.8e-54:359:74//Hs.46328:D87942

[18003] F-HEMBB1001527//Protein tyrosine phosphatase, receptor type, f polypeptide//1.0:198:63//Hs.75216:Y00815

[18004] F-HEMBB1001531//ESTs//4.3e-33:403:75//Hs.44862:N38735

[18005] F-HEMBB1001535//ESTs//0.0029:47:93//Hs.124864:AA663093

[18006] F-HEMBB1001536//ESTs//0.0047:120:68//Hs.144858:R67748

[18007] F-HEMBB1001537//ESTs, Weakly similar to eukaryotic initiation factor eIF-2 alpha kinase [D. melanogaster]//3 .7e-20:297:73//Hs.42457:AA523306

[18008] F-HEMBB1001555//Human ring zinc-finger protein (ZNFI27-Xp) gene and 5′ flanking sequence//1.1e-35:188:77//Hs.102877:U41315

[18009] F-HEMBB1001562//ESTs//0.95:161:61//Hs.145075:AI208240

[18010] F-HEMBB1001564//Homo sapiens mRNA, chromosome 1 specific transcript KIAA0484//3.4e-49:526:73//Hs.158095:AB007953

[18011] F-HEMBB1001565//Homo sapiens PYRIN (MEFV) mRNA, complete cds//1.9e-44:324:84//Hs.113283:AF018080

[18012] F-HEMBB1001585

[18013] F-HEMBB1001586//EST//0.84:132:64//Hs.145264:AI218708

[18014] F-HEMBB1001588//Human clone 23695 mRNA sequence//6.6e-20:327:67//Hs.90798:U79289

[18015] F-HEMBB1001603//ESTs//1.3e-12:84:96//Hs.13380:R60414

[18016] F-HEMBB1001618//ESTs//4.4e-11:349:63//Hs.132046:AA693680

[18017] F-HEMBB1001619//ESTs//2.1e-06:246:63//Hs.63428:AA058314

[18018] F-HEMBB1001630//EST//1 .4e-07:334:62//Hs.145698:AI266713

[18019] F-HEMBB1001635//ESTs//0.92:282:60//Hs.126980:AA934077

[18020] F-HEMBB1001637//ELK1, member of ETS oncogene family//1.1e-27:395:64//Hs.16549:AL009172

[18021] F-HEMBB1001641//EST//0.11:53:81//Hs.112445:AA594279

[18022] F-HEMBB1001653EST//0.91:124:6411Hs.144213:T40480

[18023] F-HEMBB1001665//Human mRNA for apolipoprotein E receptor 2, complete cds//7.0e-13:473:63//Hs.54481:D86407

[18024] F-HEMBB1001668//ESTs//0.94:83:6911Hs.146202:AI252519

[18025] F-HEMBB1001673//Homo sapiens mRNA for KIAA0646 protein, complete cds1/2.3e-172:803:98//Hs.24439:AB014546

[18026] F-HEMBB1001684//ESTs, Highly similar to Thc1 [M. musculus]//5.4e-20:110:100//Hs.106104:AA599496

[18027] F-HEMBB1001685EST//12.2e-05:112:73//Hs.130984:AI015430

[18028] F-HEMBB1100695//Human novel homeobox mRNA for a DNA binding protein//1.6e-08:425:62//Hs.37035:U07664

[18029] F-HEMBB1001704//EST//5.8e-20:295:69//Hs.140231:AI054398

[18030] F-HEMBB1001706

[18031] F-HEMBB1001707//EST//0.091:241:60//Hs.136830:AA769219

[18032] F-HEMBB1001717//ESTs//2.9e-06:325:60//Hs.150063:AI298064

[18033] F-HEMBB1001735//Small inducible cytokine A5 (RANTES)//3.2e-46:326:831//Hs.155464:AF088219

[18034] F-HEMBB1001736//ESTs, Weakly similar to E04D5.1 [C. elegans]//5.4e-99:485:97//Hs.120581:W25578

[18035] F-HEMBB1001747//ESTs//8.3e-87:421:9811Hs.137051:AA884244

[18036] F-HEMBB1001749//Homo sapiens neuronal thread protein AD7c-NTP mRNA, complete cds//3.5e-75:315:83//Hs.129735:AF010144

[18037] F-HEMBB1001753//ESTs//0.00013:35:100//Hs.139643:H06263

[18038] F-HEMBB1001756//ESTs//2.3e-89:433:98//Hs.128868:AA931077

[18039] F-HEMBB1001760//ESTs//6.5e-06:503:58//Hs.21766:AI357639

[18040] F-HEMBB1100762//Homo sapiens mRNA, chromosome I specific transcript KIAA0507//2.9e-13:498:60//Hs.158241:AB007976

[18041] F-HEMBB1001785//EST//1.16:262:60//Hs.162526:AA584102

[18042] F-HEMBB1001797//ESTs//0.37:201:63//Hs.91559:AA806370

[18043] F-HEMBB1001802//ESTs//1.6e-06:447:58//Hs.134672:AI087951

[18044] F-HEMBB1001812//Homo sapiens mRNA, chromosome I specific transcript KIAA0487//1.3e-54:311:81//Hs.92381:AB007956

[18045] F-HEMBB1001816//ESTs//2.2e-39:302:84//Hs.35985:AA783017

[18046] F-HEMBB1001831//Homo sapiens PAM COOH-terminal interactor protein 1 (PCIP1) mRNA, complete cds//7.6e-164:763:98//Hs.159396:AF056209

[18047] F-HEMBB1001834//TRICHOHYALIN//7.1e-05:548:60//Hs.82276:L09190

[18048] F-HEMBB1001836//Human mRNA for KIAA0033 gene, partial cds//4.0e-34:272:86//Hs.22271:D26067

[18049] F-HEMBB1001839//Pyruvate carboxylase//0.050:686:59//Hs.89890:S72370

[18050] F-HEMBB1001850//EST//0.0035:204:61//Hs.7311:T23858

[18051] F-HEMBB1001863//Small inducible cytokine A5 (RANTES)//3.0e-48:357:82//Hs.155464:AF088219

[18052] F-HEMBB1001867//ESTs//2.2e-40:265:88//Hs.146323:AI251752

[18053] F-HEMBB1001868//ESTs//5.2e-06:131:73//Hs.123362:AA811371

[18054] F-HEMBB1001869//ESTs//1.0e-86:429:96//Hs.141208:AA825503

[18055] F-HEMBB1001872

[18056] F-HEMBB1001874//H. sapiens mRNA for CHD5 protein//0.0033:388:60//Hs.19923:Y12478

[18057] F-HEMBB1001875//H. sapiens mRNA for RNA helicase (Myc-regulated dead box protein)//0.32:346:60//Hs.100555:X98743

[18058] F-HEMBB1001880//EST//4.0e-28:171:92//Hs.151194:A1125868

[18059] F-HEMBB1001899//ESTs//0.17:242:62//Hs.136969:AA830918

[18060] F-HEMBB1001905

[18061] F-HEMBB1001906//ESTs//5.6e-49:290:92//Hs.127298:H09155

[18062] F-HEMBB1001908//Human monocytic leukaemia zinc finger protein (MOZ) mRNA, complete cds//1.2e-83:672:81//Hs.82210:U47742

[18063] F-HEMBB1001910//EST, Weakly similar to albumin [H. sapiens]//0.047:206:62//Hs.159777:Z 19955

[18064] F-HEMBB1001911

[18065] F-HEMBB1100915//ESTs//0.92:136:71//Hs.144465:R68882

[18066] F-HEMBB1001921//EST//2.0e-19:398:67//Hs.44789:N36113

[18067] F-HEMBB1001922//ESTs//4.3e-05:370:59//Hs.123669:AA805245

[18068] F-HEMBB1001925//ESTs//5.7e-27:329:71//Hs.141071H 16398

[18069] F-HEMBB1001930//EST//0.043:157:63//Hs.161927:AA483904

[18070] F-HEMBB1001944//Human mRNA for KIAA0118 gene, partial cds//5.7e-55:444:80//Hs.154326:D42087

[18071] F-HEMBB1001945//ESTs//1.1e-19:142:88//Hs.7341:N57875

[18072] F-HEMBB1001947//Human mRNA for KIAA0392 gene, partial cds//1.8e-21:333:66//Hs.40100:AB002390

[18073] F-HEMBB1001950//Homo sapiens Notch3 (NOTCH3) mRNA, complete cds//0.020:384:60//Hs.8546:U97669

[18074] F-HEMBB1001952//EST//7.0e-13:302:63//Hs.120089:AA708101

[18075] F-HEMBB1001953//ATL-derived PMA-responsive (APR) peptide//0.97:252:60//Hs.96:D90070

[18076] F-HEMBB1001957//ESTs//6.1e-32:446:67//Hs.51305:T47418

[18077] F-HEMBB1001962//Cytochrome P450, subfamily I (aromatic compound-inducible), polypeptide 2112.3e-31:390:70//Hs.1361:M55053

[18078] F-HEMBB1001967//H. sapiens mRNA for urea transporter//9.7e-52:322:88//Hs.66710:X96969

[18079] F-HEMBB1001973//Myelin oligodendrocyte glycoprotein {alternative products}//2.1e-48:426:78//Hs.53217:Z48051

[18080] F-HEMBB1001983

[18081] F-HEMBB1001988//ESTs//6.5e-05:237:63//Hs.49760:AA741051

[18082] F-HEMBB1001990//ESTs//0.25:171:64//Hs.7961: AA401205

[18083] F-HEMBB1001996//ESTs//1.8e-19:436:65//Hs.125539:AI339103

[18084] F-HEMBB1001997//EST//5.3e-33:294:76//Hs.161041:H82636

[18085] F-HEMBB1002002//ESTs//1.9e-06:224:67//Hs.110915:AA132964

[18086] F-HEMBB1002005//ESTs//5.8e-17:170:78//Hs.141825:AA017093

[18087] F-HEMBB1002009//ESTs//0.066:441:58//Hs.125313:AI201685

[18088] F-HEMBB1002015//EST//2.3e-18:310:68//Hs.145899:AI274951

[18089] F-HEMBB1002042//CYTOCHROME P450 IVB1//2.9e-11:446:62//Hs.687:X16699

[18090] F-HEMBB1002043//ESTs, Weakly similar to T06E6.d [C. elegans]//1.0:217:60//Hs.3487:AA425553

[18091] F-HEMBB1002044

[18092] F-HEMBB1002045

[18093] F-HEMBB1002049//Homo sapiens mRNA for KIAA0713 protein, partial cds//0.082:201:61//Hs.88756:AB018256

[18094] F-HEMBB1002050//Breakpoint cluster region protein BCR//0.84:267:59//Hs.2557:Y00661

[18095] F-HEMBB1002068//Homo sapiens mRNA for KIAA0612 protein, partial cds//8.1e-07:402:61//Hs.112499:AB014512

[18096] F-HEMBB1002069

[18097] F-HEMBB1002092//EST//5.1e-15:180:75//Hs.127928:AA969239

[18098] F-HEMBB1002094//EST//2.0e-52:264:98//Hs.71763:AA146625

[18099] F-HEMBB1002115//EST//0.0083:244:64//Hs.125353:AA877080

[18100] F-HEMBB1002134//ESTs//1.7e-69:398:91//Hs.157492:AI361027

[18101] F-HEMBB1002139//ESTs//0.64:145:71//Hs.157821:AI362013

[18102] F-HEMBB1002142//ESTs//0.013:311:59//Hs.150037:AI292214

[18103] F-HEMBB1002152//ESTs//8.4e-12:121:82//Hs.119540:T95254

[18104] F-HEMBB1002189//EST//0.26:81:70//Hs.147726:AI220208

[18105] F-HEMBB1002190//Alcohol dehydrogenase 2 (class I), beta polypeptide/0.16:608:58//Hs.4:X03350

[18106] F-HEMBB1002193//Human sky mRNA for Sky, complete cds//6.6e-35:179:100//Hs.301:U18934

[18107] F-HEMBB1002217//Homo sapiens mRNA for zinc finger protein 10//3.7e-25:405:67//Hs.104115:X52332

[18108] F-HEMBB1002218//EST//0.015:241:61//Hs.105298:AA489813

[18109] F-HEMBB1002232//Small inducible cytokine A5 (RANTES)//9.0e-31:365:71//Hs.155464:AF088219

[18110] F-HEMBB1002247

[18111] F-HEMBB1002249//Homo sapiens haemopoietic progenitor homeobox HPX42B (HPX42B) mRNA, complete cds//6.8e-47:418:77//Hs.125231:AF068006

[18112] F-HEMBB1002254//Homo sapiens mRNA for KIAA0594 protein, partial cds//5.0e-47:437:77//Hs.154872:AB011166

[18113] F-HEMBB1002255//ESTs//0.017:255:61//Hs.126786:U74314

[18114] F-HEMBB1002266//Homo sapiens retinoblastoma-associated protein HEC mRNA, complete cds//0.17:511:57//Hs.58169:AF017790

[18115] F-HEMBB1002280//EST//4.0e-35:182:98//Hs.127701:AA864998

[18116] F-HEMBB1002300

[18117] F-HEMBB1002306//Human G protein-coupled receptor (STRL22) mRNA, complete cds//6.3e-14:228:72//Hs.46468:U45984

[18118] F-HEMBB1002327//EST//4.3e-21:242:75//Hs.72377:AA161083

[18119] F-HEMBB1002329//ESTs, Weakly similar to C17G10.1 [C. elegans]//1.7e-77:399:96//Hs.105837:AA536054

[18120] F-HEMBB1002340//INSULIN-DEGRADING ENZYME//1.0:319:60//Hs.1508:M21188

[18121] F-HEMBB1002342//Homo sapiens mRNA for putative thioredoxin-like protein//1.4e-155:724:98//Hs.42644:AJ010841

[18122] F-HEMBB1002358//Deoxythymidylate kinase//1.1e-37:192:98//Hs.79006:L16991

[18123] F-HEMBB1002359//Human Rev interacting protein R1p-1 mRNA, complete cds//1.7e-06:66:96//Hs.154762:U00943

[18124] F-HEMBB1002364//EST//4.7e-16:201:73//Hs.149925:AI288838

[18125] F-HEMBB1002371//EST//2.4e-07:319:61//Hs.136459:AA577796

[18126] F-HEMBB1002381

[18127] F-HEMBB1002383//vasoactive intestinal peptide receptor 2//0.98:190:63//Hs.2126:L36566

[18128] F-HEMBB1002387//EST//2.1e-07:253:61//Hs.145993:AI277784

[18129] F-HEMBB1002409//ESTs//1.4e-11:94:91//Hs.125958:AI206456

[18130] F-HEMBB1002415//Homo sapiens mRNA, chromosome I specific transcript KIAA0501//2.0e-32:371:73//Hs.159897:AB007970

[18131] F-HEMBB1002425//Fc fragment of IgA, receptor for//2.7e-32:156:82//Hs.54486:X54150

[18132] F-HEMBB1002442

[18133] F-HEMBB1002453//Human mRNA for KIAA0118 gene, partial cds//5.6e-53:461:77//Hs.154326:D42087

[18134] F-HEMBB1002457//ESTs//3.4e-25:184:70//Hs.140225:AA704101

[18135] F-HEMBB1002458//ESTs//7.0e-10:343:62//Hs.163816:N76274

[18136] F-HEMBB1002477//Human Grb2-associated binder-1 mRNA, complete cds//6.0e-89:493:92//Hs.159605:U43885

[18137] F-HEMBB1002489//Homo sapiens 195 kDa comified envelope precursor mRNA, complete cds//0.019:228:63//Hs.74304:AF001691

[18138] F-HEMBB1002492//EST//0.24:149:62//Hs.146790:AI149051

[18139] F-HEMBB1002495//Fc fragment of IgE, high affinity I, receptor for; beta polypeptide//1.3e-22:331:71//Hs.30:M89796

[18140] F-HEMBB1002502//ESTs//1.3e-41:380:78//Hs.61199:AA024494

[18141] F-HEMBB1002509//ESTs//0.017:220:63//Hs.155263:AI273725

[18142] F-HEMBB1002510//ESTs//6.4e-102:476:99//Hs.152289:AI247354

[18143] F-HEMBB1002520//Human Line-1 repeat mRNA with 2 open reading frames//2.4e-50:580:72//Hs.23094:M 19503

[18144] F-HEMBB1002522//EST//0.010:172:62//Hs.147224:AI205719

[18145] F-HEMBB1002531

[18146] F-HEMBB1002534//Small inducible cytokine A5 (RANTES)//3.7e-59:258:88//Hs.155464:AF088219

[18147] F-HEMBB1002545//ESTs//3.9e-24:181:86//Hs.13753:AI088102

[18148] F-HEMBB1002550//Syntaxin 5A//0.27:354:59//Hs.154546:U26648

[18149] F-HEMBB1002556//ESTs//1.7e-33:286:79//Hs.146173:AA906191

[18150] F-HEMBB1002579//EST//1.0:77:68//Hs.147935:AI250286

[18151] F-HEMBB1002582//ESTs//0.00032:178:68//Hs.139163:AA226095

[18152] F-HEMBB1002590//ESTs//0.64:132:63//Hs.155688:AI003657

[18153] F-HEMBB1002596//ESTs//3.4e-19:462:64//Hs.124399:AA832336

[18154] F-HEMBB1002600//Homo sapiens tetraspan NET-5 mRNA, complete cds//3.0e-152:710:98//Hs.129826:AF089749

[18155] F-HEMBB1002601//EST//9.6e-13:368:62//Hs.137080:AA894817

[18156] F-HEMBB1002603//EST//0.10:144:63//Hs.158180:AI367945

[18157] F-HEMBB1002607//ESTs//0.024:345:62//Hs.143304:AI084058

[18158] F-HEMBB1002610//EST//2.1e-14:291:64//Hs.140573:AA826323

[18159] F-HEMBB1002613//ESTs//1.9e-17:192:75//Hs.141161:AA210711

[18160] F-HEMBB1002614//ESTs//0.0048:136:71//Hs.106280:R13901

[18161] F-HEMBB1002617//EST//0.034:320:59//Hs.41223:H89127

[18162] F-HEMBB1002623//ESTs//1.88:222:60//Hs.129920:AA167217

[18163] F-HEMBB1002635//Human MAP kinase mRNA, complete cds//3.1e-23:127:100//Hs.151051:U07620

[18164] F-HEMBB1002664//EST//0.00013:203:61//Hs.117141:AA678811

[18165] F-HEMBB1002677//ESTs//2.4e-22:439:66//Hs.132046:AA693680

[18166] F-HEMBB1002683//ESTs//0.23:224:61//Hs.128883:AI026679

[18167] F-HEMBB1002684//ESTs//7.2e-09:82:87//Hs.140457:H05124

[18168] F-HEMBB1002686//EST//0.25:189:62//Hs.132431:AA909674

[18169] F-HEMBB1002692//ESTs//0.00020:162:66//Hs.118180:N68504

[18170] F-HEMBB1002697//EST//7.2e-17:219:74//Hs.100459:T61992

[18171] F-HEMBB1002699//Homo sapiens transmembrane activator and CAML interactor (TACI) mRNA, complete cds//0.059:297:62//Hs.158341:AF023614

[18172] F-HEMBB1002702//ESTs//0.26:284:6 I //Hs.41250:H89588

[18173] F-HEMBB1002705//ESTs, Weakly similar to HYPOTHETICAL 38.5 KD PROTEIN IN SUI2-TDH2 INTERGENIC REGION [Saccharomyces cerevisiae]//0.0048:84:83//Hs.20814:AI242922

[18174] F-HEMBB1002712//ESTs//0.0025:317:58//Hs.7344:AA972729

[18175] F-MAMMA1000009//Human c-yes-1 mRNA//1.0e-48:447:77//Hs.75680:M 15990

[18176] F-MAMMA1000019

[18177] F-MAMMA1000020//EST//2.6e-84:431:95//Hs.143333:H51750

[18178] F-MAMMA1000025//EST//1.0:169:59//Hs.130165:AA906945

[18179] F-MAMMA1000043//Human NSCL-1 mRNA sequence//0.94:262:60//Hs.30956:M96739

[18180] F-MAMMA1000045//ESTs//1.7e-48:499:75//Hs.158469:AA897461

[18181] F-MAMMA1000055//ESTs, Highly similar to TESTIN 2 PRECURSOR [Mus musculus]//2.7e-18:330:63//Hs.59906:AA001281

[18182] F-MAMMA1000057//Homo sapiens DNA fragmentation factor 40 kDa subunit (DFF40) mRNA, complete cds//1.2e-50:367:75//Hs.133089:AF064019

[18183] F-MAMMA1000069//ESTs//0.58:286:60//Hs.134417:AI336840

[18184] F-MAMMA1000084//Human mRNA for KIAA0033 gene, partial cds//1.1e-48:641:70//Hs.22271:D26067

[18185] F-MAMMA1000085//Homo sapiens mRNA for KIAA0602 protein, partial cds//0.00013:199:69//Hs.37656:AB011174

[18186] F-MAMMA1000092//Homo sapiens telomeric repeat binding factor (TRF1) mRNA, complete cds//1.2e-52:346:77//Hs.90357:U40705

[18187] F-MAMMA1000103//Homo sapiens mRNA for extracellular matrix protein, complete cds//1H.0:151:64//Hs.35094:AB011792

[18188] F-MAMMA1000117

[18189] F-MAMMA1000129//RYANODINE RECEPTOR, SKELETAL MUSCLE//0.0015:492:60//Hs.89631:U48508

[18190] F-MAMMA1000133//ESTs//1.0:125:671//Hs.118309:AA653402

[18191] F-MAMMA10001334//EST//1.2e-08:75:92//Hs.160674:AI248319

[18192] F-MAMMA1000139//EST//5.5e-10:139:76//Hs.159121:AI383843

[18193] F-MAMMA1000143//Homo sapiens mRNA for KIAA0685 protein, complete cds//2.2e-26:148:97//Hs.153121:AB014585

[18194] F-MAMMA1000155//Homo sapiens homeobox transcription factor barx2 (BARX2) mRNA, complete cds//3.3e-31:219:87//Hs.129724:AF031924

[18195] F-MAMMA10001631//ESTs//1.2e-59:317:94//Hs.49559:AA401050

[18196] F-MAMMA1000171//ESTs//1.7e-09:161:69//Hs.119070:AA629695

[18197] F-MAMMA1000173//Human drebrin E2 mRNA (DBN1), complete cds//9.2e-40:686:65//Hs.89434:D 17530

[18198] F-MAMMA1000175//ESTs//0.65:141:68//Hs.133152:H91657

[18199] F-MAMMA1000183//Human mRNA for KIAA0065 gene, partial cds//1.0e-92:904:72//Hs.70617:D31763

[18200] F-MAMMA1000198//ESTs//0.0092:235:62//Hs.98783:AI091739

[18201] F-MAMMA1000221//EST//3.3e-16:95:98//Hs.128271:AA973035

[18202] F-MAMMA1000227//ESTs//0.010:268:60//Hs.116412:AA506926

[18203] F-MAMMA1000241//ESTs//0.13:140:67//Hs.12328:AI377913

[18204] F-MAMMA1000251//EST//3.7e-07:118:73//Hs.153116:AA856873

[18205] F-MAMMA1000254//ESTs//0.00023:245:59//Hs.150513:AI247587

[18206] F-MAMMA1000257//EST//4.2e-10:155:74//Hs.150409:AI003543

[18207] F-MAMMA1000264//ESTs//2.0e-18:217:75//Hs.152748:N53015

[18208] F-MAMMA1000266//EST//0.14:270:60//Hs.132593:AI031874

[18209] F-MAMMA1000270//Human mRNA for KIAA0118 gene, partial cds//2.5e-54:354:87//Hs.154326:D42087

[18210] F-MAMMA1000277//Hydroxysteroid (II-beta) dehydrogenase 2//1.0e-07:306:65//Hs.1376:U26726

[18211] F-MAMMA1000278//ESTs//4.0e-09:197:67//Hs.157034:AI347361

[18212] F-MAMMA1000279//Complement component 5 receptor 1 (C5a ligand)//8.4e-34:341:68//Hs.2161:M62505

[18213] F-MAMMA1000284

[18214] F-MAMMA1000287//Human mRNA for KIAA0118 gene, partial cds//5.4e-50:245:84//Hs.154326:D42087

[18215] F-MAMMA1000302//EST//5.3e-40:213:98//Hs.122363:AA788641

[18216] F-MAMMA1000307//Polycystic kidney disease 1 (autosomal dominant)//0.55:510:57//Hs.75813:L33243

[18217] F-MAMMA1000309//Apolipoprotein E//9.7e-06:691:58//Hs.76260:M 12529

[18218] F-MAMMA1000312//EST//0.042:183:63//Hs.158928:AI379519

[18219] F-MAMMA1000313

[18220] F-MAMMA1000331

[18221] F-MAMMA1000339

[18222] F-MAMMA1000340//ESTs, Highly similar to HYPOTHETICAL 29.4 KD PROTEIN IN STE6-LOS1 INTERGENIC REGION [Saccharomyces cerevisiae]//2.9e-11:87:93//Hs.13096:AA180963

[18223] F-MAMMA1000348//Homo sapiens KIAA0432 mRNA, complete cds//3.6e-23:270:72//Hs.155174:AB007892

[18224] F-MAMMA1000356//Homo sapiens mRNA, chromosome I specific transcript KIAA0484//3.7e-24:233:72//Hs.158095:AB007953

[18225] F-MAMMA1000360//Human Line-1 repeat mRNA with 2 open reading frames//9.0e-75:498:85//Hs.23094:M19503

[18226] F-MAMMA1000361//Human mRNA for KIAA0118 gene, partial cds//9.1e-50:304:85//Hs.154326:D42087

[18227] F-MAMMA1000372//EST//1.2e-53:376:86//Hs.144295:AA136569

[18228] F-MAMMA1000385//ESTs//1.4e-22:220:76//Hs.142552:AA235344

[18229] F-MAMMA1000388//Homo sapiens UKLF mRNA for ubiquitous Kruppel like factor, complete cds//1.2e-149:710:98//Hs.32170:AB015132

[18230] F-MAMMA1000395//Acyl-Coenzyme A dehydrogenase, very long chain//0.74:330:60//Hs.82208:L46590

[18231] F-MAMMA1000402//Human Line-1 repeat mRNA with 2 open reading frames//2.4e-58:834:68//Hs.23094:M19503

[18232] F-MAMMA1000410//Human NADH:ubiquinone oxidoreductase subunit B13 (B13) mRNA, complete cds//1.2e-08:117:84//Hs.83916:U53468

[18233] F-MAMMA1000413//ESTs//3.3e-31:209:88//Hs.146154:AI200725

[18234] F-MAMMA1000414//ESTs//0.82:132:62//Hs.124857:AA687092

[18235] F-MAMMA1000416//ESTs, Weakly similar to HYPOTHETICAL 32.0 KD PROTEIN C09F5.2 IN CHROMOSOME III [C. elegans]//9.8e-33:267:81//Hs.32370:AA521111

[18236] F-MAMMA1000421//ESTs//7.3e-33:320:75//Hs.121659:H02532

[18237] F-MAMMA1000422//Homo sapiens protocadherin (PCDH8) mRNA, complete cds//0.98:553:56//Hs.19492:AF061573

[18238] F-MAMMA1000423//EST//0.0075:179:63//Hs.162974:AA678459

[18239] F-MAMMA1000424//ESTs//1.3e-17:313:67//Hs.139858:AI377641

[18240] F-MAMMA1000429//Homo sapiens sorting nexin 3 (SNX3) mRNA, complete cds//5.1e-48:491:72//Hs.12102:AF034546

[18241] F-MAMMA1000431//ISLET AMYLOID POLYPEPTIDE PRECURSOR//5.1e-39:320:81//Hs.51048:X68830

[18242] F-MAMMA1000444//Homo sapiens mRNA for KIAA0594 protein, partial cds//9.1e-39:342:78//Hs.154872:AB011166

[18243] F-MAMMA1000446

[18244] F-MAMMA1000458//ESTs, Weakly similar to similar to CCAAT/enhancer-binding protein [C. elegans]//5.1e-08:58:93//Hs.9043:W21827

[18245] F-MAMMA1000468//Homo sapiens mRNA for 6-phosphofructo-2-kinase/fructose-2,6-bisphosphatase, complete cds//0.58:311:63//Hs.66721:D49818

[18246] F-MAMMA1000472//ISLET AMYLOID POLYPEPTIDE PRECURSOR//2.1e-44:346:80//Hs.51048:X68830

[18247] F-MAMMA1000478//Homo sapiens PYRIN (MEFV) mRNA, complete cds//0.0017:157:731//Hs.113283:AF018080

[18248] F-MAMMA1000483//ISLET AMYLOID POLYPEPTIDE PRECURSOR//4.5e-39:400:75//Hs.51048:X68830

[18249] F-MAMMA1000490//ESTs//3.6e-52:331:88//Hs.163686:AA291948

[18250] F-MAMMA1000500//EST//9.7e-73:346:99//Hs.98812:AA434482

[18251] F-MAMMA1000501I/Small inducible cytokine A5 (RANTES)//2.3e-50:325:86//Hs.155464:AF088219

[18252] F-MAMMA1000516//Oxytocin receptor//1.6e-29:660:64//Hs.2820:X64878

[18253] F-MAMMA1000522//ESTs//2.9e-23:328:70//Hs.125142:AA421352

[18254] F-MAMMA1000524//ESTs//1.1e-08:211:65//Hs.33467:R85497

[18255] F-MAMMA1000559//EST//4.7e-17:207:71//Hs.162733:AA614352

[18256] F-MAMMA1000565

[18257] F-MAMMA1000567//Homo sapiens haemopoietic progenitor homeobox HPX42B (HPX42B) mRNA, complete cds//5.8e-51:404:80//Hs.125231:AF068006

[18258] F-MAMMA1000576//ESTs//3.8e-32:236:74//Hs.140039:AA047045

[18259] F-MAMMA1000583//ESTs//0.00099:123:70//Hs.135173:AI276780

[18260] F-MAMMA1000585//Homo sapiens class-1 MHC-restricted T cell associated molecule (CRTAM) mRNA, complete cds//8.8e-45:390:78//Hs.159523:AF001622

[18261] F-MAMMA1000594//ESTs//8.3e-42:322:81//Hs.161660:AA167744

[18262] F-MAMMA1000597//Homo sapiens KIAA0426 mRNA, complete cds//2.6e-37:592:68//Hs.97476:AB007886

[18263] F-MAMMA1000605//Homo sapiens 4F5S mRNA, complete cds//5.1e-26:228:73//Hs.32567:AF073519

[18264] F-MAMMA1000612//Homo sapiens Gx protein (GX) mRNA, complete cds//0.00091:300:60//Hs.29207:AF071494

[18265] F-MAMMA1000616//ESTs//0.41:373:59//Hs.130699:AA621478

[18266] F-MAMMA1000621//EST//0.027:146:62//Hs.148305:AA909605

[18267] F-MAMMA1000623

[18268] F-MAMMA1000625//Homo sapiens ES/130 mRNA, complete cds//0.89:428:56//Hs.98614:AF006751

[18269] F-MAMMA1000643//Homo sapiens nephrocystin (NPHP1) mRNA, partial cds//0.092:365:59//Hs.75474:AF023674

[18270] F-MAMMA1000664//ESTs//7.6e-07:259:64//Hs.140622:AA844353

[18271] F-MAMMA1000669//Human kpni repeat mma (cdna clone pcd-kpni-4), 3′ end//9.0e-30:531:64//Hs.139107:K00629

[18272] F-MAMMA1000670//ESTs//6.6e-83:389:100//Hs.148595:AI244490

[18273] F-MAMMA1000672//Homo sapiens CAGH32 mRNA, partial cds//0.17:109:73//Hs.4316:U80743

[18274] F-MAMMA1000684//Homo sapiens forkhead protein FREAC-2 mRNA, complete cds//3.3e-07:249:62//Hs.44481:U13220

[18275] F-MAMMA1000696//Interleukin 10//5.6e-47:355:82//Hs.2180:M57627

[18276] F-MAMMA1000707//ESTs//1.4e-09:225:65//Hs.138722:N51081

[18277] F-MAMMA1000713//Acetylcholinesterase {14-E5 doman} [human, tumor cell lines, Genomic, 847 nt]//0.16:84:72//Hs.157124:S71129

[18278] F-MAMMA1000714//Human clone 23947 mRNA, partial cds//0.97:263:61//Hs.27414:U79275

[18279] F-MAMMA1000718//ESTs, Weakly similar to putative p150 [H. sapiens]//5.0e-07:210:66//Hs.71148:AA854648

[18280] F-MAMMA1000720//ESTs//1 .4e-50:301:83//Hs.138852:AA284247

[18281] F-MAMMA1000723//ESTs, Weakly similar to ORF2-like protein [H. sapiens]//8.1e-22:288:72//Hs.114685:AA700024

[18282] F-MAMMA1000731//Homo sapiens CHDI mRNA, complete cds//1.5e-23:292:66//Hs.22670:AF006513

[18283] F-MAMMA1000732//Homo sapiens mRNA, chromosome 1 specific transcript KIAA0484//4.8e-40:288:78//Hs.158095:AB007953

[18284] F-MAMMA1000733//RAS GTPASE-ACTIVATING-LIKE PROTEIN IQGAPI//0.25:467:58//Hs.1742:L33075

[18285] F-MAMMA1000734//Homo sapiens SEC63 (SEC63) mRNA, complete cds//2.3e-169:802:98//Hs.31575:AF100141

[18286] F-MAMMA1000738//EST//1.0:149:63//Hs.136928:AA812580

[18287] F-MAMMA1000744//Homo sapiens mRNA for KIAA0575 protein, complete cds//3.3e-51:323:88//Hs.153468:AB011147

[18288] F-MAMMA1000746//ESTs//2.3e-42:409:76//Hs.61199:AA024494

[18289] F-MAMMA1000752//EST, Weakly similar to putative p150 [H. sapiens]//1.1e-14:285:68//Hs.162011:AA513663

[18290] F-MAMMA1000760//Myelin oligodendrocyte glycoprotein {alternative products}//6.2e-47:341:82//Hs.53217:Z48051

[18291] F-MAMMA1000761//ESTs, Moderately similar to !!!! ALU SUBFAMILY SX WARNING ENTRY !!!! [H. sapiens]//9.8e-19:131:76//Hs.118972:AA761369

[18292] F-MAMMA1000775//EST//6.9e-32:424:69//Hs.44554:N34288

[18293] F-MAMMA1000776//ESTs//5.5e-43:154:84//Hs.141581:AA315361

[18294] F-MAMMA1000778//EST//4.4e-28:226:80//Hs.128952:AA984114

[18295] F-MAMMA1000782//ESTs//0.35:270:60//Hs.29153:AA551137

[18296] F-MAMMA1000798//Homo sapiens clone 24407 mRNA sequence//1.6e-23:531:65//Hs.12432:AF070575

[18297] F-MAMMA1000802//ESTs//3.1e-67:340:97//Hs.126081:AA459849

[18298] F-MAMMA1000824//ESTs//0.98:44:90//Hs.42802:N20130

[18299] F-MAMMA1000831//ESTs//0.0081:194:60//Hs.150400:AI298089

[18300] F-MAMMA1000839//Small inducible cytokine A5 (RANTES)//4.7e-48:241:74//Hs.155464:AF088219

[18301] F-MAMMA1000841

[18302] F-MAMMA1000842//Human monocytic leukaemia zinc finger protein (MOZ) mRNA, complete cds//0.18:483:59//Hs.82210:U47742

[18303] F-MAMMA1000843//EST//0.34:113:68//Hs.58415:W74696

[18304] F-MAMMA1000845//EST//2.9e-06:56:80//Hs.123243:AA804877

[18305] F-MAMMA1000851//EST//0.78:103:65//Hs.135656:AA907022

[18306] F-MAMMA1000855

[18307] F-MAMMA1000856//Homo sapiens preprocathepsin P mRNA, partial cds//0.14:320:59//Hs.71388:AF032906

[18308] F-MAMMA1000859//SOX-3 PROTEIN//0.014:474:57//Hs.157429:X71135

[18309] F-MAMMA1000862//EST//1.0:92:66//Hs.157599:AI357342

[18310] F-MAMMA1000863//ELK1, member of ETS oncogene family//1.2e-30:214:75//Hs.116549:AL009172

[18311] F-MAMMA1000865//ESTs//0.99:127:66//Hs.125230:AA873812

[18312] F-MAMMA1000867//EST//0.027:236:60//Hs.147156:AI191777

[18313] F-MAMMA1000875//Human mRNA for KIAA0269 gene, complete cds//0.96:245:59//Hs.75850:D87459

[18314] F-MAMMA1000876//ESTs//1.5e-39:192:90//Hs.132020:AA704147

[18315] F-MAMMA1000877//ESTs, Weakly similar to !!!! ALU SUBFAMILY J WARNING ENTRY!!!! [H. sapiens]//1.4e-91:484:94//Hs.138938:AA012894

[18316] F-MAMMA1000880//EST//0.014:142:66//Hs.137044:AA878812

[18317] F-MAMMA1000883//EST//1.0:166:62//Hs.126352:AA894465

[18318] F-MAMMA1000897//H. sapiens mRNA for inter-alpha-trypsin inhibitor heavy chain H3//2.6e-06:211:63//Hs.76716:X67055

[18319] F-MAMMA1000905//Cartilage matrix protein//0.97:190:64//Hs.150366:M55683

[18320] F-MAMMA1000906//ESTs//3.0e-07:145:72//Hs.133556:AA702506

[18321] F-MAMMA1000908//ESTs//1.1e-70:484:84//Hs.142497:AA189081

[18322] F-MAMMA1000914//Angiopoietin 1//0.14:450:59//Hs.2463:D 13628

[18323] F-MAMMA1000921//ESTs//6.8e-96:448:99//Hs.135721 Al 125239

[18324] F-MAMMA1000931//CD4 receptor {exons 1 and 2} [human, T-lymphocyte, mRNA, 3429 nt]//1.0e-25:312:6611Hs.116007: S79267

[18325] F-MAMMA1000940//EST//2.9e-42:209:76//Hs.140567:AA825968

[18326] F-MAMMA10009411/Dihydrolipoamide branched chain transacylase (E2 component of branched chain keto acid dehydrogenase complex)//1.8e-38:395:71//Hs.89479:X66785

[18327] F-MAMMA1000942//ESTs//1.9e-19:252:71//Hs.141575:AA211734

[18328] F-MAMMA1000943//Human mRNA for KIAA0305 gene, complete cds//0.077:236:63//Hs.83790:AB002303

[18329] F-MAMMA1000956//Homo sapiens hRVP1 mRNA for RVP1, complete cds//8.8e-33:566:64//Hs.25640:AB000714

[18330] F-MAMMA1000957//ESTs//1.0:177:59//Hs.149864:N80474

[18331] F-MAMMA1000962//Homo sapiens neuronal thread protein AD7c-NTP mRNA, complete cds//1.1e-56:310:85//Hs.129735:AF010144

[18332] F-MAMMA1000968//ESTs//9.2e-18:128:89//Hs.163980:AA715814

[18333] F-MAMMA1000975//ESTs//3.8e-08:219:66//Hs.110937:AA137096

[18334] F-MAMMA1000979//EST//0.00022:155:65//Hs.101379:Z39802

[18335] F-MAMMA1000987//EST//1.1e-48:373:81//Hs.139034:W27062

[18336] F-MAMMA1000998//EST//2.0e-07:356:62//Hs.132467:AA922007

[18337] F-MAMMA1001003//ESTs//0.47:129:67//Hs.164016:AI003724

[18338] F-MAMMA1001008//ESTs//1.9e-17:153:82//Hs.141161:AA210711

[18339] F-MAMMA11001021//Homo sapiens beta-dystrobrevin (BDTN) mRNA, complete cds//4.7e-17:100:100//Hs.13451:Y15718

[18340] F-MAMMA1001024//ESTs//0.97:251:62//Hs.59389:R93968

[18341] F-MAMMA1001030//Homo sapiens orphan G protein-coupled receptor HG38 mRNA, complete cds//3.6e-32:753:61//Hs.98384:AF062006

[18342] F-MAMMA1001035//ESTs//6.9e-28:268:77//Hs.139536:AA180857

[18343] F-MAMMA1001038

[18344] F-MAMMA1001041//ALPHA-ACTININ 1, CYTOSKELETAL ISOFORM//2.7e-10:357:65//Hs.119000:M95178

[18345] F-MAMMA1001050//EST//1.8e-29:321:74//Hs.161240:AI419882

[18346] F-MAMMA1001059//ESTs, Weakly similar to protein synthesis initiation factor 4A-II homolog//7.9e-87:415:99//Hs.135623:AA134719

[18347] F-MAMMA1001067//EST//0.30:166:60//Hs.148441:AI198503

[18348] F-MAMMA1001073//ESTs//1.0e-98:476:98//Hs.98321:AA455585

[18349] F-MAMMA1001074//ESTs//1.6e-82:396:98//Hs.118923:AA252116

[18350] F-MAMMA1001075//Homo sapiens (clone F4) transmembrane protein mRNA sequence//3.7e-29:559:65//Hs.135251:L09749

[18351] F-MAMMA1001078//Human Line-1 repeat mRNA with 2 open reading frames//2.7e-99:689:83//Hs.23094:M19503

[18352] F-MAMMA1001080/HIG ALPHA-2 CHAIN C REGION//5.8e-43:319:81//Hs.32225:AF067420

[18353] F-MAMMA1001082//ESTs//6.2e-28:275:77//Hs.152685:AA613896

[18354] F-MAMMA1001091//Homo sapiens mRNA for KIAA0711 protein, complete cds//0.0081:586:57//Hs.5333:AB018254

[18355] F-MAMMA1001092//Human kpni repeat mrna (cdna clone pcd-kpni-8), 3′ end//5.1e-24:328:72//Hs.103948:K00627

[18356] F-MAMMA1001105//Homo sapiens OVO-like 1 binding protein (OVOL1) mRNA, complete cds//2.1e-24:507:66//Hs.97905 AF0116045

[18357] F-MAMMA1001110//Human mRNA for KIAA0125 gene, complete cds//0.94:448:57//Hs.38365:D50915

[18358] F-MAMMA1001126//Small inducible cytokine A5 (RANTES)//4.6e-18:123:85//Hs.155464:AF088219

[18359] F-MAMMA1001133

[18360] F-MAMMA1001139

[18361] F-MAMMA1001143//ESTs//2.6e-18:121:82//Hs.135117:AI091534

[18362] F-MAMMA1001145//ESTs//1.5e-36:442:69//Hs.124712:H90217

[18363] F-MAMMA1001154//EST//0.054:208:61//Hs.162088:AA505741

[18364] F-MAMMA1001161//Homo sapiens mRNA for KIAA0575 protein, complete cds//6.6e-38:337:7711Hs.153468:AB01147

[18365] F-MAMMA1001162//EST//4.7e-16:117:90//Hs.130894:AI014299

[18366] F-MAMMA1001181

[18367] F-MAMMA1001186//Human macrophage-derived chemokine precursor (MDC) mRNA, complete cds//6.5e-47:313:81//Hs.97203:U83171

[18368] F-MAMMA1001191//ESTs//5.8e-34:197:94//Hs.121575:AA758083

[18369] F-MAMMA1001198

[18370] F-MAMMA1001202//ESTs//1.5e-37:210:83//Hs.79788:AA527348

[18371] F-MAMMA1001203//ESTs//1.2e-29:199:76//Hs.141605:H92974

[18372] F-MAMMA1001206//ESTs, Weakly similar to !!!! ALU SUBFAMILY J WARNING ENTRY !!!! [H. sapiens]//5.5e-25:275:75//Hs.105292:AA504776

[18373] F-MAMMA1001215//ESTs//1.9e-06:300:63//Hs.113566:T03200

[18374] F-MAMMA1001220//Human mRNA for KIAA0118 gene, partial cds//2.7e-53:367:84//Hs.154326:D42087

[18375] F-MAMMA1001222//Homo sapiens mRNA for KIAA0634 protein, partial cds//1.8e-05:435:59//Hs.30898:AB014534

[18376] F-MAMMA1001243//ESTs//5.2e-19:118:94//Hs.122830:AA765587

[18377] F-MAMMA1001244

[18378] F-MAMMA1001249//ESTs//1.3e-89:420:99//Hs.147744:AI220476

[18379] F-MAMMA1001256//ESTs//2.1e-34:282:80//Hs.46158:AI160121

[18380] F-MAMMA1001259//ESTs//2.9e-07:68:95//Hs.6193:AA045149

[18381] F-MAMMA1001260//Homo sapiens mRNA for KIAA0661 protein, complete cds//2.8e-41:659:64//Hs.65238:AB014561

[18382] F-MAMMA1001268//Human Line-1 repeat mRNA with 2 open reading frames//1.7e-33:336:74//Hs.23094:M19503

[18383] F-MAMMA1001271//Homo sapiens CAGH3 mRNA, complete cds//3.4e-06:487:59//Hs.21858:U80747

[18384] F-MAMMA1001274//Human mRNA for KIAA0080 gene, partial cds//5.1e-62:396:76//Hs.74554:D38522

[18385] F-MAMMA1001280//ESTs//7.3e-14:273:67//Hs.126503:AA913832

[18386] F-MAMMA1001292//Human mRNA for KIAA0176 gene, partial cds//5.6e-54:616:71//Hs.4935:D79998

[18387] F-MAMMA1001296//ESTs//4.8e-34:136:85//Hs.70279:AA757426

[18388] F-MAMMA1001298//ESTs//0.021:73:80//Hs.114233:N91305

[18389] F-MAMMA1001305//Human DNA sequence from PAC 127B20 on chromosome 22q11.2-qter, contains gene for GTPase-activating protein similar to rhoGAP protein ribosomal protein L6 pseudogene, ESTs and CA repeat//1.9e-58:295:97//Hs.102336:Z83838

[18390] F-MAMMA1001322//ESTs//9.4e-18:221:741//Hs.139132:AA211087

[18391] F-MAMMA1001324//Human endogenous retrovirus pHE.1 (ERV9)//6.7e-75:745:73//Hs.93174:X57147

[18392] F-MAMMA1001330//ESTs//2.6e-26:169:91//Hs.4209:AA205806

[18393] F-MAMMA1001341//ESTs//0.10:267:62//Hs.155922:A1147197

[18394] F-MAMMA1001343//ESTs//0.0024:323:62//Hs.119238:AA476267

[18395] F-MAMMA1001346//Homo sapiens mRNA for KIAA0715 protein, partial cds//0.94:89:75//Hs.109358:AB018258

[18396] F-MAMMA1001383//Putative mismatch repair/binding protein hMSH3//7.3e-49:273:80//Hs.42674:U61981

[18397] F-MAMMA1001388//INSULIN-LIKE GROWTH FACTOR BINDING PROTEIN COMPLEX ACID LABILE CHAIN PRECURSOR//4.6e-09:415:58//Hs.839:M86826

[18398] F-MAMMA1001397//Prostaglandin 12 (prostacyclin) synthase //1.3e-26:358:67//Hs.61333:D83402

[18399] F-MAMMA1001408//ESTs//7.2e-06:123:72//Hs.26753:R60763

[18400] F-MAMMA1001411//Autosomal dominant polycystic kidney disease type II//1.0:176:64//Hs.82001:U50928

[18401] F-MAMMA1001419//Homo sapiens KIAA0395 mRNA, partial cds//4.1e-45:409:80//Hs.43681:AL022394

[18402] F-MAMMA1001420//Homo sapiens mRNA for alpha(1,2)fucosyltransferase, complete cds//0.00042:125:75//Hs.46328:D87942

[18403] F-MAMMA1001435//Human HsLIM15 mRNA for HsLim15, complete cds//8.2e-43:543:71//Hs.37181:D64108

[18404] F-MAMMA1001442//ESTs//7.9e-15:103:92//Hs.25780:R51321

[18405] F-MAMMA10014461//ESTs//3 .5e-44:292:73//Hs.111583:AA463590

[18406] F-MAMMA1001452//ESTs//0.73:152:65//Hs.163766:AI424040

[18407] F-MAMMA1001465//ESTs//1.0e-15:201:75//Hs.8836:AA181053

[18408] F-MAMMA1001476//Human mRNA for 5′-terminal region of UMK, complete cds//2.0e-24:273:72//Hs.75939:D78335

[18409] F-MAMMA1100487//ESTs, Weakly similar to ORF2-like protein [H. sapiens]//3.2e-25:397:68//Hs.116874:AA524909

[18410] F-MAMMA1001501//CALPAIN 1, LARGE//3.1e-53:438:81//Hs.2575:X04366

[18411] F-MAMMA1001502//Human p120E4F transcription factor mRNA, complete cds/10.99:258:61//Hs.154196:U87269

[18412] F-MAMMA1001510//ESTs//8.7e-09:380:61//Hs.118701:AA420795

[18413] F-MAMMA1001522//ESTs//7.1e-44:321:80//Hs.120170:AI0018506

[18414] F-MAMMA1001547

[18415] F-MAMMA1001551//Homo sapiens mRNA for KIAA0462 protein, partial cds//7.5e-130:614:98//Hs.129937:AB007931

[18416] F-MAMMA11001575//ESTs, Weakly similar to zinc finger protein C2H2-171 [H. sapiens]//0.71:181:62//Hs.118866:AI017072

[18417] F-MAMMA1001576//Tubulin, gamma polypeptide//5 .7e-97:529:91//Hs.150785:M61764

[18418] F-MAMMA1001590//EST//1.7e-13:94:92//Hs.95900:AA160339

[18419] F-MAMMA1001600//EST//1.0e-08:81:87//Hs.149220:AI247132

[18420] F-MAMMA1001604//EST//0.0070:157:62//Hs.162516:AA583375

[18421] F-MAMMA1001606//Human clone 23627 mRNA, complete cds//0.64:336:58//Hs.23642:U79266

[18422] F-MAMMA1001620//ESTs//6.8e-16:99:79//Hs.164052:AA836152

[18423] F-MAMMA1001627//Pregnancy-associated plasma protein A//0.27:379:58//Hs.158229:U28727

[18424] F-MAMMA1001630//Human DNA sequence from clone 71L16 on chromosome Xp11. Contains a probable Zinc Finger protein (pseudo)gene, an unknown putative gene, a pseudogene with high similarity to part of antigen KI-67, a putative Chondroitin 6-Sulfotransferase LIKE gene and a KIAA0267 LIKE putative Na(+)/H(+) exchanger protein gene. Contains a predicted CpG island, ESTs, STSs and GSSs and genomic markers DXS1003 and DXS1055//1.4e-40:447:73//Hs.154353:AL022165

[18425] F-MAMMA1001633//Human zinc finger protein (LD5-1) mRNA, complete cds//3.6e-44:611:67//Hs.57679:U57796

[18426] F-MAMMA1001635

[18427] F-MAMMA1001649//ESTs//1 .4e-47:238:99//Hs.124063:T75524

[18428] F-MAMMA1100654//Homo sapiens retinal rod Na-Ca+K exchanger (NCKX1) mRNA, complete cds//0.00069:140:68//Hs.59829:AB014602

[18429] F-MAMMA1001663//Homo sapiens mRNA for KIAA0448 protein, complete cds//0.015:135:71//Hs.27349:AB007917

[18430] F-MAMMA1001670//ESTs, Highly similar to 52 KD RO PROTEIN [Homo sapiens]//0.064:472:60//Hs.110819:AI027548

[18431] F-MAMMA1001671

[18432] F-MAMMA1001679//ESTs//0.94:55:831//Hs.152506:AA573317

[18433] F-MAMMA1001683//ESTs//1.6e-92:480:96//Hs.118496:AA036889

[18434] F-MAMMA1001686//ESTs//0.00019:171:66//Hs.140402:A1138765

[18435] F-MAMMA1001692//ESTs//0.97:104:70//Hs.27596:AI188549

[18436] F-MAMMA1001711//Human G protein-coupled receptor (STRL22) mRNA, complete cds//8.0e-45:323:83//Hs.46468:U45984

[18437] F-MAMMA1001715//ESTs//1.3e-14:188:72//Hs.130815:AA936548

[18438] F-MAMMA1001730//ESTs//0.048:198:65//Hs.116412:AA506926

[18439] F-MAMMA1001735//Human beta-tubulin class III isotype (beta-3) mRNA, complete cds//1.5e-111:725:84//Hs.159154:U47634

[18440] F-MAMMA1001740//EST//0.77:119:65//Hs.148140:AA887098

[18441] F-MAMMA1001743//ESTs//6.5e-27:195:72//Hs.163688:H48768

[18442] F-MAMMA1001744//EST//0.00019:134:70//Hs.146863:AI161245

[18443] F-MAMMA1001745//Human Line-1 repeat mRNA with 2 open reading frames//4.7e-67:822:69//Hs.23094:M19503

[18444] F-MAMMA1001751//Homo sapiens two P domain potassium channel subunit (HOHOI) mRNA, complete cds//1.0e-36:583:65//Hs.79351:U33632

[18445] F-MAMMA1001754//ESTs//5.1e-97:456:99//Hs.157928:AA775822

[18446] F-MAMMA1001757//EST//0.042:177:63//Hs.144436:R07109

[18447] F-MAMMA1001760//Homo sapiens RET finger protein-like I antisense transcript, partial//6.6e-41:309:84//Hs.102576:AJ010230

[18448] F-MAMMA1001764//ESTs//0.057:290:60//Hs.68647:AA524072

[18449] F-MAMMA1001768//Human transcription factor, forkhead related activator 4 (FREAC-4) mRNA, complete cds//2.2e-05:504:60//Hs.96028:AF042832

[18450] F-MAMMA1001769//Homo sapiens PYRIN (MEFV) mRNA, complete cds//1.1e-85:686:79//Hs.113283:AF018080

[18451] F-MAMMA1001771//Human semaphorin III family homolog mRNA, complete cds//0.00071:392:60//Hs.32981:U38276

[18452] F-MAMMA1001783//ESTs//8.8e-23:206:79//Hs.142524:H02940

[18453] F-MAMMA1001785//ESTs//1.3e-52:270:97//Hs.61809:AA503549

[18454] F-MAMMA1001788//Human kpni repeat mrna (cdna clone pcd-kpni-8), 3′ end//6.7e-21:212:77//Hs.103948:K00627

[18455] F-MAMMA1001790//Homo sapiens KIAA0409 mRNA, partial cds//2.2e-06:139:72//Hs.5158:AB007869

[18456] F-MAMMA1001806//ESTs//6.4e-44:373:79//Hs.105665:H78987

[18457] F-MAMMA1001812//ESTs//4.8e-83:407:97//Hs.98613: D83884

[18458] F-MAMMA1001815//EST//2.1e-56:374:85//Hs.141488:N47096

[18459] F-MAMMA100181711EST//8.6e-39:336:78//Hs.162236:AA551582

[18460] F-MAMMA1001818//EST//0.32:375:58//Hs.72729:AA167589

[18461] F-MAMMA1001820//Homo sapiens cytokine-like factor-1 precursor (CLF-1) mRNA, complete cds//0.082:153:66//Hs.114948:AF059293

[18462] F-MAMMA1001824//EST//0.0013:195:63//Hs.129275:AA992742

[18463] F-MAMMA1001836//ESTs//7.4e-52:283:95//Hs.92290:R78691

[18464] F-MAMMA1001837//Homo sapiens mRNA for zinc finger protein FPM315, complete cds//2.0e-29:641:62//Hs.56808:D88827

[18465] F-MAMMA1001848//ESTs//3.5e-53:264:99//Hs.116430:AA644665

[18466] F-MAMMA1001851//ESTs//0.00050:251:64//Hs.163776:AI393028

[18467] F-MAMMA1001854

[18468] F-MAMMA1001858//EST//1.0:113:68//Hs.132482:AA922218

[18469] F-MAMMA1001864//EST//1.3e-06:399:60//Hs.161500:N68060

[18470] F-MAMMA1001868//Homo sapiens nuclear receptor co-repressor N-CoR mRNA, complete cds//0.084:672:58//Hs.152455:AF044209

[18471] F-MAMMA11001874//ESTs//0.97:292:58//Hs.24553:A150687

[18472] F-MAMMA1001878

[18473] F-MAMMA1001880//ESTs//9.2e-09:277:62//Hs.15776:T91944

[18474] F-MAMMA1001890//EST//1.7e-85:440:97//Hs.128842:AA977576

[18475] F-MAMMA1001907//EST//2.7e-26:294:74//Hs.98794:AA434078

[18476] F-MAMMA1001908//ESTs//3.2e-109:505:100//Hs.146145:AI391521

[18477] F-MAMMA1001931//ESTs//1.0:108:67//Hs.126624:AA768874

[18478] F-MAMMA1001956//Apolipoprotein E//1.0:322:59//Hs.76260:M12529

[18479] F-MAMMA1001963//ESTs//0.84:320:60//Hs.6523:AA218859

[18480] F-MAMMA1001969//Homo sapiens clone 23892 mRNA sequence//3.6e-79:423:81//Hs.91916:AF035317

[18481] F-MAMMA1001970//Oxytocin receptor//9.7e-31:626:64//Hs.2820:X64878

[18482] F-MAMMA1100992//EST, Weakly similar to reverse transcriptase [H. sapiens]//7.9e-09:150:72//Hs.118222:N91115

[18483] F-MAMMA1002009//ESTs//2.2e-18:234:69//Hs.21978:AA009633

[18484] F-MAMMA1002011//ESTs//0.91:276:59//Hs.141196:AA704826

[18485] F-MAMMA1002032//ESTs//7.8e-40:344:77//Hs.141658:N77915

[18486] F-MAMMA1002033//ESTs//2.5e-30:293:761//Hs.139158:AA226159

[18487] F-MAMMA1002041//Homo sapiens mRNA, chromosome 1 specific transcript KIAA0484//1 .2e-54:455:70//Hs.158095:AB007953

[18488] F-MAMMA1002042//ESTs//1.4e-20:199:79//Hs.140913:R44580

[18489] F-MAMMA1002047//EST//4.2e-14:170:75//Hs.124348:AA830225

[18490] F-MAMMA1002056//EST//2.1e-49:414:80//Hs.162335:AA564256

[18491] F-MAMMA1002058//EST//4.7e-26:268:78//Hs.140520:AA809305

[18492] F-MAMMA1002068//Human Line-1 repeat mRNA with 2 open reading frames//8.5e-36:382:75//Hs.23094:M19503

[18493] F-MAMMA1002078

[18494] F-MAMMA1002082

[18495] F-MAMMA1002084//EST//0.37:351:59//Hs.46576:N46012

[18496] F-MAMMA1002093//Homo sapiens mRNA for ATP-dependent RNA helicase, partial//0.54:388:57//Hs.99423:AJ010840

[18497] F-MAMMA1002108//Loricrin//0.00066:410:56//Hs.155657:M61120

[18498] F-MAMMA1002118//EST//0.50:202:64//Hs.126872:AA932932

[18499] F-MAMMA1002125//Small inducible cytokine A5 (RANTES)//2.4e-39:272:86//Hs.155464:AF088219

[18500] F-MAMMA1002132//EST//6.4e-05:245:60//Hs.149361:AI272963

[18501] F-MAMMA1002140//ESTs//5.8e-33:212:77//Hs.141203:H52638

[18502] F-MAMMA1002143//SERUM PROTEIN MSE55//1.9e-12:192:70//Hs.148101:M88338

[18503] F-MAMMA100214511EST//0.12:204:60//Hs.160983:AI392837

[18504] F-MAMMA1002153

[18505] F-MAMMA1002155//ESTs, Weakly similar to p40 [H. sapiens]//3.6e-67:335:97//Hs.88424:AA281385

[18506] F-MAMMA1002156//Integrin, beta 3 (platelet glycoprotein Ila, antigen CD61)//0.99:310:58//Hs.87149:M35999

[18507] F-MAMMA1002158//EST//0.015:278:58//Hs.162666:AA605196

[18508] F-MAMMA1002170//40S RIBOSOMAL PROTEIN S2//6.9e-82:573:82//Hs.119389:X17206

[18509] F-MAMMA1002174//Human NOF 1 mRNA, complete cds//2.2e-42:375:78//Hs.75859:U39400

[18510] F-MAMMA1002198//H. sapiens mRNA for thiol-specific antioxidant//3.3e-36:121:98//Hs.146354:Z22548

[18511] F-MAMMA1002209//ESTs//1.1e-84:409:98//Hs.139235:AA278362

[18512] F-MAMMA1002215//Loricrin//0.0024:369:57//Hs.155657:M61120

[18513] F-MAMMA1002219//ESTs, Weakly similar to coded for by C. elegans cDNA yk52b10.3 [C. elegans]//9.5e-41:202:100//Hs.118849:AA215645

[18514] F-MAMMA1002230//ESTs//0.92:253:60//Hs.4222:AI024063

[18515] F-MAMMA1002236//ESTs, Moderately similar to initiation factor eIF-2B gamma subunit [R. norvegicus]//4.6e-69:344:90//Hs.76822:AI359536

[18516] F-MAMMA1002243//Homo sapiens serine threonine kinase 11 (STK11) mRNA, complete cds//0.99:454:56//Hs.122755:AF032986

[18517] F-MAMMA1002250//Human involucrin mRNA//0.0037:396:62//Hs.157091:M 13903

[18518] F-MAMMA1002267//ESTs//2.0e-12:296:62//Hs.155686:AI308841

[18519] F-MAMMA1002268//Human N-type calcium channel alpha-1 subunit mRNA, complete cds//1.2e-06:427:61//Hs.69949:M94172

[18520] F-MAMMA1002269

[18521] F-MAMMA1002282//ESTs//5.9e-65:342:95//Hs.13962:T72715

[18522] F-MAMMA1002292//EST//0.0050:346:58//Hs.97639:AA398440

[18523] F-MAMMA1002293//Homo sapiens DNA fragmentation factor 40 kDa subunit (DFF40) mRNA, complete cds//2.8e-60:387:75//Hs.133089:AF064019

[18524] F-MAMMA1002294//Human growth/differentiation factor 1 (GDF-1) mRNA, complete cds//4.3e-07:349:64//Hs.92614:M62302

[18525] F-MAMMA1002297//EST//0.98:98:68//Hs.148207:AA897460

[18526] F-MAMMA1002298//Paired basic amino acid cleaving system 4//0.0061:471:57//Hs.77234:AB001914

[18527] F-MAMMA1002299//ESTs//1.0:162:68//Hs.134132:AA205935

[18528] F-MAMMA1002308//ESTs, Weakly similar to !!!! ALU SUBFAMILY J WARNING ENTRY !!!! [H. sapiens]//6.9e-41:293:83//Hs.105292:AA504776

[18529] F-MAMMA1002310//Homo sapiens serine protease-like protease (nes 1) mRNA, complete cds//0.0037:173:67//Hs.69423:AF055481

[18530] F-MAMMA1002311//Homo sapiens mRNA, chromosome I specific transcript KIAA0487///H.8e-41:473:65//Hs.92381:AB007956

[18531] F-MAMMA1002312//ESTs//0.0017:279:60//Hs.163773:AA806291

[18532] F-MAMMA1002317//ESTs//1.0:131:64//Hs.66075:F08908

[18533] F-MAMMA1002319//Homo sapiens clone 24566 mRNA sequence//1.2e-28:410:68//Hs.133342:AF070536

[18534] F-MAMMA1002322//ESTs//1.2e-47:356:82//Hs.152413:AA780515

[18535] F-MAMMA1002329//Homo sapiens clone 24444 RaP2 interacting protein 8 (RPIP8) mRNA, complete cds//0.0079:143:67//Hs.6755:AF055026

[18536] F-MAMMA1002332//Human kpni repeat mma (cdna clone pcd-kpni-8), 3′ end//1.2e-26:342:72//Hs.103948:K00627

[18537] F-MAMMA1002333//Homo sapiens mRNA for KIAA0711 protein, complete cds//6.8e-07:669:58//Hs.5333:AB018254

[18538] F-MAMMA1002339//H. sapiens mRNA for retrotransposon//3 .2e-40:348:73//Hs.6940:Z48633

[18539] F-MAMMA1002347//EST, Moderately similar to !!!! ALU SUBFAMILY J WARNING ENTRY !!!! [H. sapiens]//3.9e-14:146:81//Hs.163073:R02591

[18540] F-MAMMA1002351//ESTs//1.2e-74:371:96//Hs.111429:W28907

[18541] F-MAMMA1002352//EST//1.7e-09:198:68//Hs.149218:AI247086

[18542] F-MAMMA1002353//ESTs//7.4e-15:163:77//Hs.157253:AI357539

[18543] F-MAMMA1002355//Homo sapiens KIAA0441 mRNA, complete cds//7.7e-47:307:78//Hs.32511:AB007901

[18544] F-MAMMA1002356//ESTs//0.012:380:58//Hs.105349:AA779733

[18545] F-MAMMA1002359//EST//1.1e-44:264:77//Hs.141095:H23818

[18546] F-MAMMA1002360//ESTs//7.6e-15:200:70//Hs.19770:AA447830

[18547] F-MAMMA1002361//ESTs//2.5e-29:277:79//Hs.155115:AA669923

[18548] F-MAMMA1002362//EST//0.25:304:58//Hs.162427:AA576345

[18549] F-MAMMA1002380//FACTOR VIII INTRON 22 PROTEIN//0.29:485:59//Hs.83363:M34677

[18550] F-MAMMA1002384//ESTs//1.1e-05:220:65//Hs.141388:R52022

[18551] F-MAMMA1002385//ESTs, Moderately similar to Ti 1G6.8 [C. elegans]l/8.4e-118:578:97//Hs.25516:AI086362

[18552] F-MAMMA1002392//EST //0.85:319:57//Hs.126484:AA913624

[18553] F-MAMMA1002411//ESTs//0.00044:89:76//Hs.141685:AI142632

[18554] F-MAMMA1002413//ESTs//0.0020:303:61//Hs.94903:W85737

[18555] F-MAMMA1002417//ESTs//1.4e-06:223:65//Hs.143695:AA662745

[18556] F-MAMMA1002427//ESTs//5.4e-48:356:82//Hs.146811:AA410788

[18557] F-MAMMA1002428//EST//1 .0:96:71//Hs.105130:AA482030

[18558] F-MAMMA1002434//Human mRNA for KIAA0118 gene, partial cds//2.2e-52:370:8311Hs.154326:D42087

[18559] F-MAMMA1002446

[18560] F-MAMMA1002454//ESTs//9.1e-50:163:100//Hs.80162:AA534809

[18561] F-MAMMA1002461//Human diacylglycerol kinase (DAGK) mRNA, complete cds//6.3e-06:595:59//Hs.99932:L38707

[18562] F-MAMMA1002470

[18563] F-MAMMA1002475//Human MAP kinase activated protein kinase 2 mRNA, complete cds//0.018:417:58//Hs.75074:U12779

[18564] F-MAMMA1002480//ESTs//0.0015:258:62//Hs.132082:N67059

[18565] F-MAMMA1002485//Homo sapiens stanniocalcin-2 (STC-2) mRNA, complete cds//9.4e-120:560:98//Hs.155223:AF055460

[18566] F-MAMMA1002494//ESTs//2.4e-68:359:95//Hs.124652:AA857628

[18567] F-MAMMA1002498//ESTs, Weakly similar to hypothetical protein [H. sapiens]//4.0e-07:257:63//Hs.133013:AA604920

[18568] F-MAMMA1002524//Huntingtin (Huntington disease)//0.0085:215:65//Hs.79391: LI 2392

[18569] F-MAMMA1002530//Homo sapiens cytosolic phospholipase A2 gamma (cPLA2 gamma) mRNA, complete cds//4.5e-162:775:97//Hs.18858:AF065214

[18570] F-MAMMA1002545//ESTs//6.4e-46:351:81//Hs.146811:AA410788

[18571] F-MAMMA1002554

[18572] F-MAMMA1002556//Human beige-like protein (BGL) mRNA, partial cds//0.96:187:62//Hs.62354:M83822

[18573] F-MAMMA1002566//ESTs//0.0033:130:68//Hs.117018:AA832421

[18574] F-MAMMA1002571//EST//0.28:115:66//Hs.156768:AI351368

[18575] F-MAMMA1002573//ESTs//2.1e-48:265:94//Hs.155128:AI224516

[18576] F-MAMMA1002585

[18577] F-MAMMA1002590//ESTs//3.2e-11:280:63//Hs.36049:AA436831

[18578] F-MAMMA1002597//ESTs//4.8e-10:118:77//Hs.156166:AI334107

[18579] F-MAMMA1002598//Ribosomal protein L7//3.6e-23:123:100//Hs.153:X57958

[18580] F-MAMMA1002603//EST//0.070:99:71//Hs.122387:AA789220

[18581] F-MAMMA1002612//ESTs, Moderately similar to hCDC10 protein [H. sapiens]//8.3e-18:353:65//Hs.60895:AA428463

[18582] F-MAMMA1002617//B94 PROTEIN//0.0097:229:62//Hs.75522:M92357

[18583] F-MAMMA1002618

[18584] F-MAMMA1002619

[18585] F-MAMMA1002622//Homo sapiens advillin mRNA, complete cds//4.7e-22:157:90//Hs.47344:AF041449

[18586] F-MAMMA1002623//EST//1.5e-33:168:81//Hs.141526:N52300

[18587] F-MAMMA1002625

[18588] F-MAMMA1002629//Homo sapiens mRNA, chromosome I specific transcript KIAA0507/11.1e-35:355:76//Hs.158241:AB007976

[18589] F-MAMMA1002636//Homo sapiens mRNA for KIAA0288 gene, complete cds1/1.9e-05:439:61//Hs.91400:AB006626

[18590] F-MAMMA1002637//KINESIN LIGHT CHAIN//2.0e-47:367:72//Hs.117977:L04733

[18591] F-MAMMA1002646//EST//1.2e-32:302:78//Hs.112540:AA601385

[18592] F-MAMMA1002650//TRICHOHYALIN//1.2e-08:570:63//Hs.82276:L09190

[18593] F-MAMMA1002655//EST//8.8e-40:198:100//Hs.159724:AI393335

[18594] F-MAMMA1002662//EST//0.99:95:63//Hs.144074:AI005489

[18595] F-MAMMA1002665//Lysosomal-associated membrane protein 2//1.8e-35:722:64//Hs.8262:U36336

[18596] F-MAMMA1002671//Cyclin-dependent kinase inhibitor IC (p57, Kip2)//8.6e-06:272:64//Hs.106070:U22398

[18597] F-MAMMA1002673

[18598] F-MAMMA1002684//Homo sapiens mRNA for KIAA0214 protein, complete cds//1.2e-162:752:99//Hs.3363:D86987

[18599] F-MAMMA1002685//ESTs//7.5e-40:373:78//Hs.163937:N69915

[18600] F-MAMMA1002698//ESTs//2.5e-09:190:68//Hs.138292:AI220397

[18601] F-MAMMA1002699//Homo sapiens epsin 2b mRNA, complete cds//4.7e-56:398:81//Hs.22396:AF062085

[18602] F-MAMMA1002701//ESTs//4.3e-10:110:80//Hs.156041:AI274697

[18603] F-MAMMA1002708//Homo sapiens mRNA for alpha(1,2)fucosyltransferase, complete cds//1.1e-51:307:79//Hs.46328:D87942

[18604] F-MAMMA1002711//EST//3.6e-38:186:77//Hs.139715:N25041

[18605] F-MAMMA1002721//EST//3.9e-06:110:71//Hs.136758:AA714692

[18606] F-MAMMA1002727//EST//0.97:137:63//Hs.145153:AI150165

[18607] F-MAMMA1002728//ESTs, Highly similar to PAB-DEPENDENT POLY(A)-SPECIFIC RIBONUCLEASE [Saccharomyces cerevisiae]//2.6e-12:129:81//Hs.154181:AA193502

[18608] F-MAMMA1002744//ESTs//0.0026:420:58//Hs.95793:AA617853

[18609] F-MAMMA1002746//ESTs//0.28:117:69//Hs.12925:T66312

[18610] F-MAMMA1002748

[18611] F-MAMMA1002754//ESTs//1.1e-34:340:77//Hs.163641:R61848

[18612] F-MAMMA1002758//Homo sapiens KIAA0442 mRNA, partial cds//1.1e-27:151:98//Hs.32168:AB007902

[18613] F-MAMMA1002764//ESTs//1.7e-45:323:84//Hs.155243:N70293

[18614] F-MAMMA1002765//EST//3.2e-11:145:73//Hs.162551:AA584782

[18615] F-MAMMA1002769

[18616] F-MAMMA1002775//Human ABL gene, exon lb and intron lb, and putative M8604 Met protein (M8604 Met) gene//7.6e-84:417:97//Hs.77705:U07563

[18617] F-MAMMA1002780//EST//0.78:210:63//Hs.149413:AI273988

[18618] F-MAMMA1002782

[18619] F-MAMMA1002796//ESTs//0.021:122:65//Hs.132221:AI380710

[18620] F-MAMMA1002807//EST//1.0e-31:184:71//Hs.161497:N66919

[18621] F-MAMMA1002820//ESTs//0.21:292:59//Hs.132513:AI378514

[18622] F-MAMMA1002830//Homo sapiens mRNA for KIAA0563 protein, complete cds//2.4e-57:286:88//Hs.15731 AB011135

[18623] F-MAMMA1002833//Human mRNA for KIAA0033 gene, partial cds//9.1e-52:583:72//Hs.22271:D26067

[18624] F-MAMMA1002835

[18625] F-MAMMA1002838//ESTs, Weakly similar to NADH-UBIQUINONE OXIDOREDUCTASE CHAIN 1 [Locusta migratoria]//7.7e-38:179:78//Hs.141344:H29951

[18626] F-MAMMA1002842//ESTs//1.7e-19:134:89//Hs.111583:AA463590

[18627] F-MAMMA1002843//Homo sapiens mRNA for KIAA0810 protein, partial cds//5.4e-137:635:99//Hs.7531 AB018353

[18628] F-MAMMA1002844//ESTs, Weakly similar to Y53C12A.3 [C. elegans]//1.6e-07:329:58//Hs.107747:AI357868

[18629] F-MAMMA1002858

[18630] F-MAMMA1002868//EST//4.1e-23:180:77//Hs.163196:AA767643

[18631] F-MAMMA1002869//Human PINCH protein mRNA, complete cds//7.0e-88:696:78//Hs.83987:U09284

[18632] F-MAMMA1002871//ESTs//3 .4e-93:466:96//Hs.11873:T68423

[18633] F-MAMMA1002880//EST//2.0e-09:364:59//Hs.145181 Al 183632

[18634] F-MAMMA1002881//Homo sapiens mRNA for 25 kDa trypsin inhibitor, complete cds//3.8e-30:680:61//Hs.129732:D45027

[18635] F-MAMMA1002886//Long (electrocardiographic) QT syndrome 2//0.00075:504:60//Hs.19944:U04270

[18636] F-MAMMA1002887//ESTs//0.044:144:68//Hs.133152:H91657

[18637] F-MAMMA1002890//EST//1.7e-05:74:86//Hs.116013:AA612666

[18638] F-MAMMA1002892//EST//2.1e-67:383:93//Hs.22815:R44265

[18639] F-MAMMA1002895//Human transcription factor ERF-1 mRNA, complete cds//0.00053:382:57//Hs.61796:U85658

[18640] F-MAMMA1002908//EST//0.0022:132:68//Hs.161697:AA224952

[18641] F-MAMMA1002909//ESTs//9.1e-21:343:70//Hs.142068:AA176125

[18642] F-MAMMA1002930//ESTs//0.55:72:72//Hs.132440:AA923730

[18643] F-MAMMA1002937//ESTs, Weakly similar to ZINC FINGER PROTEIN 84 [H. sapiens]//7.9e-103:485:99//Hs.102928:AI346344

[18644] F-MAMMA1002938//Homo sapiens mRNA for KIAA0698 protein, complete cds//1.6e-194:910:98//Hs.31720:AB014598

[18645] F-MAMMA1002941//ESTs//9.5e-19:196:67//Hs.137945:A1423389

[18646] F-MAMMA1002947//ESTs//1.2e-96:460:99//Hs.156001:AI313418

[18647] F-MAMMA1002964//Homo sapiens KIAA0424 mRNA, partial cds//0.48:250:60//Hs.54697:AB007884

[18648] F-MAMMA1002970//EST//2.0e-16:132:84//Hs.136518:AA601400

[18649] F-MAMMA1002972

[18650] F-MAMMA1002973//ESTs//3.2e-43:225:74//Hs.155179:AA223932

[18651] F-MAMMA1002982//ESTs//0.0017:162:66//Hs.152669:AA604944

[18652] F-MAMMA1002987//EST//0.044:254:59//Hs.135014:AI095645

[18653] F-MAMMA1003003//Coagulation factor III (thromboplastin, tissue factor)//3.9e-22:185:83//Hs.62192:J02931

[18654] F-MAMMA1003004//Homo sapiens mRNA, chromosome I specific transcript KIAA0501//1.0e-16:343:61//Hs.159897:AB007970

[18655] F-MAMMA1003007//EST//6.6e-10:265:66//Hs.144389:AA530979

[18656] F-MAMMA1003011//Homo sapiens histone macroH2A1.2 mRNA, complete cds//6.2e-51:620:69//Hs.75258:AF054174

[18657] F-MAMMA1003013//Human HOX4C mRNA for a homeobox protein//0.73:347:58//Hs.74061:X59372

[18658] F-MAMMA1003015//EST//2.5e-111:137:77//Hs.141312:H73062

[18659] F-MAMMA1003019//ESTs//0.0099:182:65//Hs.60787:AI374951

[18660] F-MAMMA1003026//EST//1.0:136:67//Hs.9123:T50137

[18661] F-MAMMA10003031//EST//1.3e-11:244:67//Hs.136611:AA669549

[18662] F-MAMMA1003035

[18663] F-MAMMA1003039//ESTs//1.4e-23:265:74//Hs.33393:R83391

[18664] F-MAMMA1003040//Homo sapiens tapasin (NGS-17) mRNA, complete cds//1.5e-93:339:85//Hs.5247:AF029750

[18665] F-MAMMA1003044//Cyclin D2//1.0:234:61//Hs.75586:DI 3639

[18666] F-MAMMA1003047//H. sapiens mRNA for F25B3.3 kinase like protein from C. elegans//1.0:209:60//Hs.99491:Y12336

[18667] F-MAMMA1003049//EST//0.99:126:67//Hs.162634:AA601742

[18668] F-MAMMA1003055//ESTs//0.00011:130:70//Hs.130539:R68518

[18669] F-MAMMA1003056

[18670] F-MAMMA1003057//ESTs, Moderately similar to hypothetical protein MD6 [M. musculus]//1.3e-88:334:97//Hs.96500:AI206781

[18671] F-MAMMA1003066//ESTs//0.77:88:71//Hs.143618:AI022618

[18672] F-MAMMA1003089//Homo sapiens mRNA for KIAA0631 protein, partial cds//4.5e-51:329:71//Hs.75154:AB014531

[18673] F-MAMMA1003099//Homo sapiens actin-binding protein homolog ABP-278 mRNA, complete cds//8.5e-44:288:88//Hs.81008:AF043045

[18674] F-MAMMA1003104//H. sapiens mRNA for ASM-like phosphodiesterase 3a//1.0:213:60//Hs.42945:Y08136

[18675] F-MAMMA1003113//Homo sapiens mRNA for hair keratin acidic 3-II//0.99:200:64//Hs.32950:X82634

[18676] F-MAMMA1003127//Homo sapiens brush border myosin I (BBMI) mRNA, complete cds//5.4e-27:421:66//Hs.5394:AF105424

[18677] F-MAMMA1003135//Envoplakin//0.56:250:62//Hs.25482:U53786

[18678] F-MAMMA1003140

[18679] F-MAMMA1003146//Homo sapiens mRNA for GalT3 protein//7.2e-82:397:97//Hs.151344:Y15062

[18680] F-MAMMA1003150//Homo sapiens mRNA for KIAA0515 protein, partial cds//0.00019:297:61//Hs.108945:AB011087

[18681] F-MAMMA1003166//Glycoprotein lb (platelet), beta polypeptide//1.2e-31:487:65//Hs.3847:U59632

[18682] F-NT2RM1000001//Human plectin (PLECI) mRNA, complete cds//0.16:244:63//Hs.79706:U53204

[18683] F-NT2RM1000018//Human mRNA for KIAA0066 gene, partial cds//1.5e-66:385:92//Hs.82510:D31886

[18684] F-NT2RM1000032

[18685] F-NT2RM1000035//Human mRNA for KIAA0199 gene, partial cds//4.1e-110:849:81//Hs.78442:D83782

[18686] F-NT2RM1000037//Homo sapiens mRNA for KIAA0690 protein, partial cds//3.5e-108:542:95//Hs.60103:AB014590

[18687] F-NT2RM1000039//Human plectin (PLEC1) mRNA, complete cds//0.11:545:57//Hs.79706:U53204

[18688] F-NT2RM1000055//ESTs, Highly similar to TIP120 [R. norvegicus]//3.2e-69:353:96//Hs.154980:AA948067

[18689] F-NT2RM1000059//Homo sapiens T cell immune response cDNA7 (TIRC7) mRNA, complete cds//0.029:281:59//Hs.46465:U45285

[18690] F-NT2RM1000062//ESTs//0.30:368:59//Hs.131675:AA843210

[18691] F-NT2RM1000080//Homo sapiens chromosome 9, P1 clone 11659//2.8e-102:493:97//Hs.3439:AC004472

[18692] F-NT2RM1000086//Homo sapiens mRNA for KIAA0661 protein, complete cds//5.8e-116:550:97//Hs.65238:AB014561

[18693] F-NT2RM1000092//Murine leukemia viral (bmi-1) oncogene homolog//0.42:190:63//Hs.431:L 3689

[18694] F-NT2RM1000118//Homo sapiens clone 23763 unknown mRNA, partial cds//0.00086:126:70//Hs.92693:AF007155

[18695] F-NT2RM1000119//Peroxisome receptor 1//0.00055:458:58//Hs.158084:Z48054

[18696] F-NT2RM1000127

[18697] F-NT2RM1000131

[18698] F-NT2RM1000132//Homo sapiens NADH:ubiquinone oxidoreductase NDUFS6 subunit mRNA, nuclear gene encoding mitochondrial protein, complete cds//3.7e-92:448:97//Hs.49767:AF044959

[18699] F-NT2RM1000153//Homo sapiens mRNA for MTG8-related protein MTG16a, complete cds//1.0:546:58//Hs.110099:AB010419.F-NT2RM1000186//Homo sapiens clone 23763 unknown mRNA, partial cds//0.00081:126:70//Hs.92693:AF007155

[18700] F-NT2RM1000187//ESTs//3.4e-79:400:96//Hs.54971:AI424382

[18701] F-NT2RM1000199//Homo sapiens mRNA for KIAA0722 protein, complete cds//0.87:454:59//Hs.47061:AF045458

[18702] F-NT2RM1000242

[18703] F-NT2RM1000244//Homo sapiens centrosomal Nek2-associated protein I (C-NAP 1) mRNA, complete cds//0.97:135:66//Hs.27910:AF049105

[18704] F-NT2RM1000252//TRICHOHYALIN//0.030:273:58//Hs.82276:L09190

[18705] F-NT2RM1000256//Glutamine-fructose-6-phosphate transaminase//1.5e-13:248:69//Hs.1674:M90516

[18706] F-NT2RM1000257//ESTs, Highly similar to similar to mago nashi [H. sapiens]//2.9e-98:530:93//Hs.104650:AI037879

[18707] F-NT2RM1000260//Human mRNA for KIAA0130 gene, complete cds//2.1e-58:460:80//Hs.23106:D50920

[18708] F-NT2RM1000271//ESTs//0.93:224:60//Hs.91226:AA649047

[18709] F-NT2RM1000272

[18710] F-NT2RM1000280//ESTs, Highly similar to VACUOLAR ATP SYNTHASE SUBUNIT D [Bos taurus]//1.3e-21:308:73//Hs.15071:AA781144

[18711] F-NT2RM1000300

[18712] F-NT2RM1000314//Human mRNA for KIAA0159 gene, complete cds//2.6e-128:708:92//Hs.5719:D63880

[18713] F-NT2RM1000318//Human mRNA for ribosomal protein L39, complete cds//1.8e-35:182:99//Hs.9837:D79205

[18714] F-NT2RM1000341//ESTs//2.3e-72:381:95//Hs.23070:AA631976

[18715] F-NT2RM1000354//EST//5.2e-27:202:84//Hs.151186:A1125798

[18716] F-NT2RM1000355//ESTs, Weakly similar to putative [M. musculus]//7.7e-75:387:95//Hs.108619:W28608

[18717] F-NT2RM1000365//ESTs//1.7e-99:495:97//Hs.103926:AA165691

[18718] F-NT2RM1000377//ESTs, Weakly similar to protein-tyrosine-phosphatase [H. sapiens]//7.4e-91:481:95//Hs.163707:AA137181

[18719] F-NT2RM1000388//65 KD YES-ASSOCIATED PROTEIN//0.36:340:57//Hs.8939:X80507

[18720] F-NT2RM1000394//HISTONE H3.3//8.5e-91:474:93//Hs.118838:Ml 1353

[18721] F-NT2RM1000399

[18722] F-NT2RM1000421

[18723] F-NT2RM1000430//Homo sapiens erythroblast macrophage protein EMP mRNA, complete cds//1.2e-85:418:97//Hs.20815:AF084928

[18724] F-NT2RM1000499//ESTs, Weakly similar to KIAA0167 protein [H. sapiens]//1.6e-38:201:97//Hs.106262:A1052382

[18725] F-NT2RM1000539//EST//0.070:145:62//Hs.149711:AI284660

[18726] F-NT2RM1000553//EST//2.2e-48:265:95//Hs.99230:AA449847

[18727] F-NT2RM1000555//ESTs//0.82:193:61//Hs.96944:A1359957

[18728] F-NT2RM1000563//Human plectin (PLECI) mRNA, complete cds//1.0:336:58//Hs.79706:U53204

[18729] F-NT2RM1000623//Homio sapiens mRNA for KIAA0287 gene, partial cds//0.98:226:61//Hs.17931:AB006625

[18730] F-NT2RM1000648//ESTs, Weakly similar to similar to M. musculus MER5 and other AHPC/TSA proteins [C. elegans]//6.2e-51:254:98//Hs.132096:AA314601

[18731] F-NT2RM1000661//Homo sapiens translation initiation factor 4e mRNA, complete cds//8.5e-55:276:97//Hs.19122:AF038957

[18732] F-NT2RM1000666//Homo sapiens BA11 mRNA, complete cds//0.87:274:60//Hs.113936:AB005297

[18733] F-NT2RM1000669//ESTs//5.5e-63:481:85//Hs.90527 Al 188279

[18734] F-NT2RM1000672

[18735] F-NT2RM1000691//Homa sapiens mRNA for HRIHFB2060, partial cds//7.0e-121:582:98//Hs.146282:AB015348

[18736] F-NT2RM1000699//ESTs//1.1e-89:435:97//Hs.28964:AA715101

[18737] F-NT2RM1000702//ESTs//5.4e-90:429:99//Hs.151001:AA564706

[18738] F-NT2RM1000725//Homo sapiens mRNA for neuropathy target esterase//1.5e-66:435:85//Hs.5038:AJ004832

[18739] F-NT2RM1000741//Homo sapiens mRNA for KIAA0567 protein, partial cds//2.6e-127:690:92//Hs.147946:AB011139

[18740] F-NT2RM1000742//Homo sapiens AC133 antigen mRNA, complete cds//8.2e-68:524:83//Hs.112360:AF027208

[18741] F-NT2RM1000746//ESTs//2.6e-37:231:89//Hs.94446:AA845465

[18742] F-NT2RM1000770//Homo sapiens KIAA0425 mRNA, complete cds//3.3e-09:321:63//Hs.150390:AB007885

[18743] F-NT2RM1000772//Eukaryotic translation initiation factor 3 (eIF-3) p36 subunit//0.053:271:60//Hs.139745:U39067

[18744] F-NT2RM1000780//Human Line-1 repeat mRNA with 2 open reading frames//6.9e-20:128:94//Hs.23094:M19503

[18745] F-NT2RM1000781//ESTs//4.4e-60:346:92//Hs.35089:N50845

[18746] F-NT2RM1000800

[18747] F-NT2RM1000802

[18748] F-NT2RM1000811//Homo sapiens AC133 antigen mRNA, complete cds//1.2e-64:490:84//Hs.112360:AF027208

[18749] F-NT2RM1000826//ESTs//0.82:193:61//Hs.96944:AI359957

[18750] F-NT2RM1000829//Mannose-binding lectin, soluble (opsonic defect)//0.92:283:58//Hs.2314:X15422

[18751] F-NT2RM1000833//Hydroxysteroid (11-beta) dehydrogenase 2//0.022:178:67//Hs.1376:U26726

[18752] F-NT2RM1000850//Human protein tyrosine kinase related mRNA sequence//3.8e-06:384:59//Hs.90314:L05148

[18753] F-NT2RM1000852//Homo sapiens mRNA for ATP-dependent RNA helicase, partial//3.0e-149:726:97//Hs.99423:AJ010840

[18754] F-NT2RM1000857//ESTs//0.52:274:60//Hs.112095:AA447643

[18755] F-NT2RM1000867//ESTs, Highly similar to signal peptidase:SUBUNIT//5.3e-54:277:96//Hs.11125:AI015619

[18756] F-NT2RM1000874//ESTs//0.032:185:64//Hs.97713:AA442239

[18757] F-NT2RM1000882//Homo sapiens chromosome 11, BAC CIT-HSP-311e8 (BC269730) containing the hFEN1 gene//4.0e-155:750:97//Hs.132898:AC004770

[18758] F-NT2RM1000883//Homo sapiens I-1 receptor candidate protein mRNA, complete cds//8.8e-158:762:97//Hs.26285:AF082516

[18759] F-NT2RM1000885//Homo sapiens mRNA for KIAA0661 protein, complete cds//6.3e-19:310:67//Hs.65238:AB014561

[18760] F-NT2RM1000894

[18761] F-NT2RM1000898

[18762] F-NT2RM1000905//EST//4.8e-07:77:84//Hs.148017:AI268701

[18763] F-NT2RM1000924//HOMEOBOX PROTEIN HOX-A5//0.00051:458:59//Hs.37034:M26679

[18764] F-NT2RM1000927//Homo sapiens mRNA for KIAA0807 protein, partial cds//0.084:386:58//Hs.101474:AB018350

[18765] F-NT2RM1000962//Human mRNA for KIAA0252 gene, partial cds//0.98:299:59//Hs.83419:D87440

[18766] F-NT2RM1000978

[18767] F-NT2RM1001003//Homo sapiens alpha-catenin related protein (ACRP) mRNA, complete cds//1.3e-161:760:98//Hs.58488:U97067

[18768] F-NT2RM1001008//ESTs//1.3e-12:144:75//Hs.133122:AI025200

[18769] F-NT2RM1001043//EST//0.24:117:64//Hs.161536:N80395

[18770] F-NT2RM1001044//ESTs, Weakly similar to C43EI11.9 [C. elegans]//3.0e-98:491:96//Hs.102173:AA045270

[18771] F-NT2RM1001059//Human plectin (PLEC1) mRNA, complete cds//0.52:533:57//Hs.79706:U53204

[18772] F-NT2RM1001066//ESTs//1.2e-114:538:99//Hs.129020:AI380703

[18773] F-NT2RM1001072//Human beige-like protein (BGL) mRNA, partial cds//0.69:586:56//Hs.62354:M83822

[18774] F-NT2RM1001074//Macrophage stimulating 1 (hepatocyte growth factor-like)//0.0019:294:64//Hs.30223:X90846

[18775] F-NT2RM1001082//Archain//3.9e-37:290:81//Hs.33642:X81198

[18776] F-NT2RM1001085

[18777] F-NT2RM1001092//Zinc finger protein 43 (HTF6)//1.9e-57:770:68//Hs.74107:X59244

[18778] F-NT2RM1001102//ESTs//1.2e-35:638:63//Hs.131737:AI343331

[18779] F-NT2RM1001105//WEE1-LIKE PROTEIN KINASE//0.0024:246:63//Hs.75188:U10564

[18780] F-NT2RM1001112//ESTs//8.9e-82:437:93//Hs.6330:H38495

[18781] F-NT2RM1001115

[18782] F-NT2RM1001139//Keratin 9//1.5e-05:518:59//Hs.2783:Z29074

[18783] F-NT2RM2000006//ESTs//3.9e-16:96:98//Hs.101117:AA576113

[18784] F-NT2RM2000013//RNA polymerase II polypeptide B (140 kD)//6.3e-13:640:59//Hs.148027:X63563

[18785] F-NT2RM2000030

[18786] F-NT2RM2000032//ESTs//7.1e-18:138:68//Hs.114031:AA700958

[18787] F-NT2RM2000042//ESTs//0.0091:241:61//Hs.147895:AI286243

[18788] F-NT2RM2000092

[18789] F-NT2RM2000093//ESTs//2.6e-40:226:94//Hs.163521:H42085

[18790] F-NT2RM2000101//ESTs//1.0:235:61//Hs.48860:N27428

[18791] F-NT2RM2000124//Protein kinase, cAMP-dependent, catalytic, alpha//5.8e-46:287:88//Hs.77271:X07767

[18792] F-NT2RM2000191//Homo sapiens cGMP phosphodiesterase AI (PDE9A) mRNA, complete cds//3.0e-139:566:97//Hs.18953:AF067223

[18793] F-NT2RM2000192//EST//3.5e-07:168:65//Hs.163122:AA756999

[18794] F-NT2RM2000239//ESTs, Weakly similar to K04G2.6 [C. elegans]//3.6e-93:489:95//Hs.143499:R72672

[18795] F-nnnnnnnnnnnn//ESTs//1.0e-70:269:97//Hs.156175:AI334328

[18796] F-NT2RM2000250//Homo sapiens mRNA for KIAA0590 protein, complete cds//1.0e-129:615:98//Hs.111862:AB011162

[18797] F-NT2RM2000259//ESTs//6.1e-30:172:85//Hs.116406:AA209520

[18798] F-NT2RM2000260//ESTs//2.5e-25:133:93//Hs.14169:AA203500

[18799] F-NT2RM2000287//ESTs//6.2e-13:97:83//Hs.118523:H98981

[18800] F-NT2RM2000322//Interferon regulatory factor 5//0.84:208:61//Hs.54434:U51127

[18801] F-NT2RM2000359//Homo sapiens mRNA for KIAA0560 protein, complete cds//2.8e-176:805:99//Hs.129952:AB011132

[18802] F-NT2RM2000363//ESTs//1.2e-24:139:96//Hs.48818:N63543

[18803] F-NT2RM2000368//Homo sapiens protein kinase C-binding protein RACK7 mRNA, partial cds//3.7e-96:599:86//Hs.75871:U48251

[18804] F-NT2RM2000371

[18805] F-NT2RM2000374//ESTs//3.2e-13:98:91//Hs.65853:AI050866

[18806] F-NT2RM2000395//Growth arrest-specific 1//0.80:129:67//Hs.65029:L13698

[18807] F-NT2RM2000402//Human p76 mRNA, complete cds//7.2e-23:714:59//Hs.28757:U81006

[18808] F-NT2RM2000407//ESTs//9.4e-92:458:96//Hs.148873:T33582

[18809] F-NT2RM2000420//EST//1.8e-61:296:99//Hs.147186:AI193053

[18810] F-NT2RM2000422//Solute carrier family 6 (neurotransmitter transporter, serotonin), member 4//1.5e-06:260:61//Hs.553:L05568

[18811] F-NT2RM2000452//ESTs//1H.0:132:62//Hs.110004:AI097379

[18812] F-NT2RM2000469//ESTs//0.34:249:60//Hs.149575:AI281807

[18813] F-NT2RM2000490//Homo sapiens mRNA for KIAA0747 protein, partial cds//2.4e-16:386:63//Hs.8309:AB018290

[18814] F-NT2RM2000502//Human nicotinamide N-methyltransferase (NNMT) mRNA, complete cds//0.99:272:61//Hs.76669:U08021

[18815] F-NT2RM2000504//Homo sapiens metalloprotease I (MPI) mRNA, complete cds//1.6e-172:824:97//Hs.4812:AF061243

[18816] F-NT2RM2000522//Homo sapiens Nck-2 (NCK2) mRNA, complete cds//0.18:313:60//Hs.129725:AF047487

[18817] F-NT2RM2000540//ESTs, Weakly similar to C27F2.7 gene product [C. elegans]//2.7e-41:231:94//Hs.7049:AI141736

[18818] F-NT2RM2000556//ESTs//3 .1e-33:183:96//Hs.136990:AA769220

[18819] F-NT2RM2000566//Integrin, alpha 7B//2.0e-155:751:97//Hs.74369:AF032108

[18820] F-NT2RM2000567//RYANODINE RECEPTOR, SKELETAL MUSCLE//6.3e-09:689:59//Hs.89631:U48508

[18821] F-NT2RM2000569//ESTs//5.4e-117:170:77//Hs.158277:H09128

[18822] F-NT2RM2000577//ESTs, Highly similar to ISOLEUCYL-TRNA SYNTHETASE, MITOCHONDRIAL [Saccharomyces cerevisiae]//1.4e-33:214:92//Hs.55609:W37993

[18823] F-NT2RM2000581//Homo sapiens mRNA for KIAA0214 protein, complete cds//1.8e-175:820:98//Hs.3363:D86987

[18824] F-NT2RM2000588//ESTs//1.5e-33:183:97//Hs.136990:AA769220

[18825] F-NT2RM2000594

[18826] F-NT2RM2000599//Homo sapiens Mad4 homolog (Mad4) mRNA, complete cds//0.017:253:65//Hs.102402:AF040963

[18827] F-NT2RM2000609//ESTs//1.0:220:59//Hs.110155:AA007313

[18828] F-NT2RM2000612//ESTs//0.97:208:59//Hs.73217:AA846548

[18829] F-NT2RM2000623//Homo sapiens mRNA for KIAA0521 protein, partial cds//0.024:326:59//Hs.6150:AB011093

[18830] F-NT2RM2000624//ESTs//2.3e-118:557:99//Hs.145904:AA203258

[18831] F-NT2RM2000635//Homo sapiens mRNA for KIAA0729 protein, partial cds//2.0e-143:664:98//Hs.19542:AB018272

[18832] F-NT2RM2000636//Homo sapiens mRNA for KIAA0658 protein, partial cds//2.4e-139:664:98//Hs.7278:AB014558

[18833] F-NT2RM2000639//ESTs//0.98:144:65//Hs.154364:AI189702

[18834] F-NT2RM2000649//Homo sapiens mRNA for KIAA0676 protein, partial cds//3.4e-169:518:99//Hs.115763:AB014576

[18835] F-NT2RM2000669//ESTs//1.3e-56:283:98//Hs.156342:AI337371

[18836] F-NT2RM2000691//Homo sapiens actin-related protein Arp3 (ARP3) mRNA, complete cds//6.7e-86:746:74//Hs.5321:AF006083

[18837] F-NT2RM2000714//Human mRNA for KIAA0231 gene, partial cds//2.2e-50:748:64//Hs.7938:D86984

[18838] F-NT2RM2000718//Homa sapiens mRNA for HRIHFB2436, partial cds//7.6e-126:594:98//Hs.136058:AB015342

[18839] F-NT2RM2000735//Zinc finger protein 43 (HTF6)//2.7e-112:756:82//Hs.74107:X59244

[18840] F-NT2RM2000740//ESTs, Highly similar to HYPOTHETICAL 132.7 KD HELICASE IN ALG7-ENP1 INTERGENIC REGION [Saccharomyces cerevisiae]//4.2e-85:464:91//Hs.161551:W24286

[18841] F-NT2RM2000795//Homo sapiens tapasin (NGS-17) mRNA, complete cds//1.0e-82:640:81//Hs.5247:AF029750

[18842] F-NT2RM2000821//Human mRNA for KIAA0340 gene, partial cds//0.32:679:59//Hs.105919:AB002338

[18843] F-NT2RM2000837//ESTs//2.3e-105:501:98//Hs.101514:AI346701

[18844] F-NT2RM2000951//Homo sapiens XYLB mRNA for xylulokinase, complete cds//2.8e-185:847:99//Hs.137580:AB015046

[18845] F-NT2RM2000952//ESTs, Weakly similar to lethal(2)denticleless [D. melanogaster]//6.2e-94:441:99//Hs.59075:AI023761

[18846] F-NT2RM2000984//Human mRNA for KIAA0246 gene, partial cds//0.94:351:62//Hs.84753:D87433

[18847] F-NT2RM2001004//ESTs//5.0e-10:247:64//Hs.36049:AA436831

[18848] F-NT2RM2001035//ESTs, Highly similar to POP2 PROTEIN [Saccharomyces cerevisiae)//2.9e-48:282:93//Hs.17035:AI080471

[18849] F-NT2RM2001065

[18850] F-NT2RM2001100//Homo sapiens mRNA for serin protease with IGF-binding motif, complete cds//1.7e-08:449:62//Hs.75111:D87258

[18851] F-NT2RM2001105//Homo sapiens proline and glutamic acid rich nuclear protein isoform mRNA, partial cds//0.00079:274:59//Hs.102732:U88153

[18852] F-NT2RM2001131//TRICHOHYALIN//2.5e-20:684:62//Hs.82276:L09190

[18853] F-NT2RM2001141

[18854] F-NT2RM2001152//ESTs//0.53:333:58//Hs.153087:AA649042

[18855] F-NT2RM2001177

[18856] F-NT2RM2001194//ESTs, Weakly similar to T28H 10.2 [C. elegans]//2.4e-23:149:93//Hs.10618:AI288739

[18857] F-NT2RM2001196//ESTs//4.0e-98:486:97//Hs.59628:W91959

[18858] F-NT2RM2001201//Human mRNA for KIAA0005 gene, complete cds//2.8e-44:554:69//Hs.155291:D13630

[18859] F-NT2RM2001221//Homo sapiens mRNA for KIAA0806 protein, complete cds//0.97:165:64//Hs.24279:AB018349

[18860] F-NT2RM2001238//EST//6.8e-67:420:89//Hs.130586:AI004766

[18861] F-NT2RM2001243/V-jun avian sarcoma virus 17 oncogene homolog//0.87:125:64//Hs.75889:U65928

[18862] F-NT2RM2001247//Homo sapiens antigen NY-CO-16 mRNA, complete cds//0.0066:321:61//Hs.132206:AF039694

[18863] F-NT2RM2001256

[18864] F-NT2RM2001291//ESTs//1.1e-86:459:93//Hs.10267:W27845

[18865] F-NT2RM2001306//Homo sapiens paraoxonase (PON2) mRNA, complete cds//1.0:182:65//Hs.75221:AF001601

[18866] F-NT2RM2001312//ESTs//2.0e-35:338:70//Hs.141440:N21615

[18867] F-NT2RM2001319//ESTs, Weakly similar to No definition line found [C. elegans]//5.2e-30:277:77//Hs.25347:AI138605

[18868] F-NT2RM2001324//Homo sapiens mRNA for beta-spectrin III, complete cds//0.031:245:62//Hs.26915:AB008567

[18869] F-NT2RM2001345//ESTs//9.2e-91:428:99//Hs.151001:AA564706

[18870] F-NT2RM2001360//ESTs//0.98:45:80//Hs.133520:AA878905

[18871] F-NT2RM2001370//Human transportin (TRN) mRNA, complete cds//0.72:224:61//Hs.82925:U70322

[18872] F-NT2RM2001393//Mannosidase, alpha B, lysosomal//0.42:383:57//Hs.108969:U68382

[18873] F-NT2RM2001420//EST//1.0:287:62//Hs.125285:AA830378

[18874] F-NT2RM2001424//Homo sapiens mRNA for El B-55 kDa-associated protein//2.3e-97:453:99//Hs.155218:AJ007509

[18875] F-NT2RM2001499//Ecotropic retroviral receptor//5.4e-47:589:68//Hs.2928:X57303

[18876] F-NT2RM2001504//Homo sapiens agrin precursor mRNA, partial cds//0.25:328:60//Hs.68900:AF016903

[18877] F-NT2RM2001524//ESTs//1.0e-11:93:90//Hs.33687:R85969

[18878] F-NT2RM20015441//ESTs//1.0e-25:157:92//Hs.137451:AA351459

[18879] F-NT2RM2001547//ESTs//2.0e-29:168:96//Hs.116392:AA936262

[18880] F-NT2RM2001575//Sjogren syndrome antigen Al (52 kD, ribonucleoprotein autoantigen SS-A/Ro)//6.9e-28:582:64//Hs.1042:M62800

[18881] F-NT2RM2001582//ESTs, Moderately similar to red-1 [M. musculus]//0.0032:57:89//Hs.114722:AA448077

[18882] F-NT2RM2001588//Homo sapiens KIAA0442 mRNA, partial cds//2.3e-11:282:65//Hs.32168:AB007902

[18883] F-NT2RM2001592//ESTs//4.8e-73:372:95//Hs.163801:AI391729

[18884] F-NT2RM2001605//Homo sapiens clone 23592 mRNA sequence//7.3e-87:749:75//Hs.76272:S66431

[18885] F-NT2RM2001613//ESTs, Highly similar to PROTEIN TRANSPORT PROTEIN SEC61 ALPHA SUBUNIT [Canis familiaris]//1.3e-17:181:75//Hs.131840:AI016073

[18886] F-NT2RM2001632//EST//8.7e-18:222:76//Hs.160402:AI393918

[18887] F-NT2RM2001635//Homo sapiens mRNA for KIAA0618 protein, complete cds//3.0e-154:740:98//Hs.15832:AB014518

[18888] F-NT2RM2001637//ESTs//2.2e-06:386:61//Hs.145198:AI276952

[18889] F-NT2RM2001641//ESTs, Highly similar to NADH-CYTOCHROME B5 REDUCTASE [Bos taurus]/13.5e-13:94:92//Hs.22142:AA814725

[18890] F-NT2RM2001648//ESTs, Highly similar to PROTEIN TRANSPORT PROTEIN SEC61 ALPHA SUBUNIT [Canis familiaris]//1.3e-17:181:75//Hs.131840:AI016073

[18891] F-NT2RM2001652//ESTs//2.5e-06:82:80//Hs.128203:AA972301

[18892] F-NT2RM2001659//ESTs//2.8e-15:92:98//Hs.123321:AA810287

[18893] F-NT2RM2001664//Homo sapiens IkappaB kinase complex associated protein (IKAP) mRNA, complete cds//1.2e-173:802:99//Hs.31323:AF044195

[18894] F-NT2RM2001668//ESTs, Weakly similar to DNA MISMATSCH REPAIR PROTEIN MSH6 [H. sapiens]//1.1e-136:671:97//Hs.27721:Ul 7907

[18895] F-NT2RM2001670//Homo sapiens mRNA for KIAA0557 protein, partial cds//1.1e-25:352:70//Hs.101414:AB011129

[18896] F-NT2RM2001671//ESTs//1.8e-08:63:98//Hs.158069:AI365356

[18897] F-NT2RM2001675

[18898] F-NT2RM2001681//ESTs//0.16:197:63//Hs.20585:R10305

[18899] F-NT2RM2001688//ESTs//1.8e-24:130:100//Hs.162504:AA668211

[18900] F-NT2RM2001695//EST//5.6e-51:189:8911Hs.162197:AA535216

[18901] F-NT2RM2001696//ESTs, Highly similar to gene ERCC5 protein [H. sapiens]//5.8e-16:144:84//Hs.14671:T79937

[18902] F-NT2RM2001698//ESTs//1.14:184:63//Hs.148080:AI277415

[18903] F-NT2RM2001699//ESTs//6.5e-14:136:79//Hs.127790:AI003817

[18904] F-NT2RM2001700//Homo sapiens putative seven pass transmembrane protein (TM7SF1) mRNA, complete cds//0.95:270:61//Hs.15791:AF027826

[18905] F-NT2RM2001706//ESTs//2.8e-47:304:86//Hs.146811:AA410788

[18906] F-NT2RM2001716//Semenogelin I//0.98:153:641//Hs.1968:M81650

[18907] F-NT2RM2001718

[18908] F-NT2RM2001723//Homo sapiens clone 23770 mRNA sequence//4.4e-28:163:95//Hs.12457:AF052123

[18909] F-NT2RM2001727//Homo sapiens mRNA for KIAA0462 protein, partial cds//2.0e-112:530:98//Hs.129937:AB007931

[18910] F-NT2RM2001730//Homo sapiens mRNA for KIAA0560 protein, complete cds//0.95:269:58//Hs.129952:AB011132

[18911] F-NT2RM2001743

[18912] F-NT2RM2001753//Human AF-6 mRNA, complete cds//0.095:350:59//Hs.100469:AB011399

[18913] F-NT2RM2001760//ESTs, Highly similar to PROTEIN TRANSPORT PROTEIN SEC61 ALPHA SUBUNIT [Canis familiaris]//1.3e-17:181:75//Hs.131840:AI016073

[18914] F-NT2RM2001768//ESTs//0.61:189:62//Hs.144847:AI222742

[18915] F-NT2RM2001771I/Zinc finger protein 10 (KOX 1)//1.1e-66:669:71//Hs.2479:X78933

[18916] F-NT2RM2001782//Y1 transcription factor//0.094:149:65//Hs.97496:M77698

[18917] F-NT2RM2001784//ESTs//8.2e-31:190:92//Hs.144587:AI193595

[18918] F-NT2RM2001785//Homo sapiens chromosome 11, BAC CIT-HSP-311e8 (BC269730) containing the hFEN I gene//1.6e-48:476:74//Hs.132898:AC004770

[18919] F-NT2RM2001797//Human mRNA for KIAA0065 gene, partial cds//6.1e-66:481:72//Hs.70617:D31763

[18920] F-NT2RM2001800//Human mRNA for transcriptional activator hSNF2b, complete cds//0.49:142:66//Hs.78202:U29175

[18921] F-NT2RM2001803//Homo sapiens IkappaB kinase complex associated protein (IKAP) mRNA, complete cds//2.7e-179:827:99//Hs.31323:AF044195

[18922] F-NT2RM2001805//EST//1.0:45:80//Hs.159007:AI381341

[18923] F-NT2RM2001813//EST//0.41:268:58//Hs.150031:AI292068

[18924] F-NT2RM2001823//H. sapiens mRNA for 218 kD M1-2 protein//9.7e-21:554:60//Hs.74441:X86691

[18925] F-NT2RM2001839//Homo sapiens calumein (Calu) mRNA, complete cds//1.2e-132:738:90//Hs.7753:AF013759

[18926] F-NT2RM2001840//Homo sapiens PYRIN (MEFV) mRNA, complete cdsl/5.8e-58:329:86//Hs.113283:AF018080

[18927] F-NT2RM2001855//ADP-ribosylation factor 5//1.0:301:60//Hs.77541:M57567

[18928] F-NT2RM2001867//ESTs, Weakly similar to ZK792.1 [C. elegans]//3.0e-28:421:66//Hs.8763:W30741

[18929] F-NT2RM2001879//ESTs//6.3e-43:234:94//Hs.122546:AA186723

[18930] F-NT2RM2001886//Homo sapiens mRNA for KIAA0710 protein, complete cds//6.1e-189:866:97//Hs.4198:AB014610

[18931] F-NT2RM2001896//Homo sapiens mRNA for JM23 protein, complete coding sequence (clone IMAGE 34581 and IMAGE 45355 and LLNLc1101133Q7 (RZPD Berlin))//3.0e-13:606:57//Hs.23170:AJ005892

[18932] F-NT2RM2001903//Homo sapiens mRNA for KIAA0462 protein, partial cds//9.4e-178:859:97//Hs.129937:AB007931

[18933] F-NT2RM2001930//Homo sapiens semaphorin F homolog mRNA, complete cds//4.2e-08:481:59//Hs.27621:U52840

[18934] F-NT2RM2001935//ESTs, Highly similar to MULTIDRUG RESISTANCE PROTEIN HOMOLOG 50 [Drosophila melanogaster]//0.37:424:60//Hs.118634:U66688

[18935] F-NT2RM2001936//Homo sapiens clone 614 unknown mRNA, complete sequence//2.2e-139:653:98//Hs.21811:AF091080

[18936] F-NT2RM2001950//ESTs//1.12:91:76//Hs.107295:W80392

[18937] F-NT2RM2001982

[18938] F-NT2RM2001983//Homo sapiens Tax interaction protein 2 mRNA, partial cds//1.2e-21:123:98//Hs.6454:AF089816

[18939] F-NT2RM2001989//Homo sapiens mRNA for DRIM protein//0.71:319:59//Hs.104135:AJ006778

[18940] F-NT2RM2001997//ESTs//1.7e-25:135:100//Hs.126894:AA932538

[18941] F-NT2RM2001998//ESTs, Weakly similar to M1-2 protein [H. sapiens]//0.99:271:60//Hs.63888:AA203398

[18942] F-NT2RM2002004//Homo sapiens mRNA for KIAA0731 protein, partial cds//3.5e-37:509:65//Hs.6214:AB018274

[18943] F-NT2RM2002014//Homo sapiens mRNA for CRM1 protein, complete cds//0.79:429:58//Hs.79090:D89729

[18944] F-NT2RM2002030//Glutamine-fructose-6-phosphate transaminase//9.0e-89:822:73//Hs.1674:M90516

[18945] F-NT2RM2002049//ESTs//0.99:109:711//Hs.19303:AA928427

[18946] F-NT2RM2002055//ESTs//1.1e-91:453:98//Hs.158370:AI382154

[18947] F-NT2RM2002088//ESTs//6.1e-75:302:96//Hs.153471 AI198377

[18948] F-NT2RM2002091//RYANODINE RECEPTOR, SKELETAL MUSCLE//0.69:293:58//Hs.89631:U48508

[18949] F-NT2RM2002100//Homo sapiens mRNA for ATP-dependent RNA helicase, partial//2.5e-165:776:98//Hs.99423:AJ010840

[18950] F-NT2RM2002109//Homo sapiens glioma amplified on chromosome 1 protein (GAC1) mRNA, complete cds//7.6e-145:684:98/FHs.26312:AF030435

[18951] F-NT2RM2002128

[18952] F-NT2RM2002142//ESTs//0.0031:183:66//Hs.144505:AA757274

[18953] F-NT2RM2002145//Homo sapiens erythroblast macrophage protein EMP mRNA, complete cds//1.4e-144:800:92//Hs.20815:AF084928

[18954] F-NT2RM2002178//Homo sapiens mRNA for KIAA0467 protein, partial cds//1.7e-165:787:97//Hs.11147:AB007936

[18955] F-NT2RM2002580//Keratin 10 (epidermolytic hyperkeratosis; keratosis palmaris et plantaris)//0.064:291:61//Hs.99936:X14487

[18956] F-NT2RM4000024//RNA polymerase II polypeptide B (140 kD)//8.0e-10:610:59//Hs.148027:X63563

[18957] F-NT2RM4000027//ESTs//1.6e-64:352:94//Hs.21331:H93074

[18958] F-NT2RM4000030//ESTs//1.0:115:63//Hs.131055:AI391464

[18959] F-NT2RM4000046//ESTs//2.6e-09:207:65//Hs.143533:A1094674

[18960] F-NT2RM4000061//ESTs//10.89:207:60//Hs.98445:AI038511

[18961] F-NT2RM4000085//ESTs, Weakly similar to The KIAA0134 gene product is related to human RNA helicase A. [H. sapiens]//1.6e-30:369:70//Hs.114623:AI204280

[18962] F-NT2RM4000086

[18963] F-NT2RM4000104//Homo sapiens chromosome 16 zinc finger protein ZNF210 (ZNF210) mRNA, complete cds//1.3e-24:345:69//Hs.13128:AF060865

[18964] F-NT2RM4000139

[18965] F-NT2RM4000155

[18966] F-NT2RM4000156//ESTs//5.9e-73:345:100//Hs.155958:AA573632

[18967] F-NT2RM4000167//Homo sapiens kinesin family member protein KIF3A mRNA, complete cds//9.8e-30:676:61//Hs.159228:AF041853

[18968] F-NT2RM4000169//ESTs//2.0e-103:483:99//Hs.43729:AA497044

[18969] F-NT2RM4000191//TRICHOHYALIN//0.011:324:60//Hs.82276:L09190

[18970] F-NT2RM4000197//ESTs//1.5e-48:311:88//Hs.136144:W27744

[18971] F-NT2RM4000199//ESTs, Weakly similar to !!!! ALU SUBFAMILY J WARNING ENTRY!!!! [H. sapiens]//0.13:322:61//Hs.145088:AI221147

[18972] F-NT2RM4000200

[18973] F-NT2RM4000202//Homo sapiens mRNA for KIAA0288 gene, complete cds//0.0027:424:60//Hs.91400:AB006626

[18974] F-NT2RM4000210//Homo sapiens mRNA for KIAA0712 protein, complete cds//4.4e-184:856:98//Hs.111138:AB018255

[18975] F-NT2RM4000215//SET translocation (myeloid leukemia-associated)//0.0013:358:60//Hs.75055:M93651

[18976] F-NT2RM4000229//Homo sapiens mRNA for KIAA0722 protein, complete cds//0.65:572:60//Hs.47061:AF045458

[18977] F-NT2RM4000233//ESTs//2.0e-37:269:85//Hs.148873:T33582

[18978] F-NT2RM4000244//EST//0.83:319:57//Hs.162412:AA573439

[18979] F-NT2RM4000251//ESTs, Weakly similar to CUTI PROTEIN [Schizosaccharomyces pombe]//1.1e-16:112:92//Hs.93841:AA442297

[18980] F-NT2RM4000265//Homo sapiens mRNA for alpha(1,2)fucosyltransferase, complete cds//1.8e-48:229:83//Hs.46328:D87942

[18981] F-NT2RM4000290//Human transducin-like enhancer protein (TLE3) mRNA, complete cds//2.5e-154:609:93//Hs.31305:M99438

[18982] F-NT2RM4000324//Homo sapiens hCPE-R mRNA for CPE-receptor, complete cds//0.070:460:59//Hs.5372:AB000712

[18983] F-NT2RM4000327//ESTs//0.019:269:60//Hs.153697:AI240707

[18984] F-NT2RM4000344//ESTs, Highly similar to YME1 PROTEIN [Saccharomyces cerevisiae]//2.7e-83:432:95//Hs.12796:W27884

[18985] F-NT2RM4000349//Human mRNA for KIAA0005 gene, complete cds//5.2e-53:666:68//Hs.155291:D13630

[18986] F-NT2RM4000354//ESTs, Weakly similar to lethal(2)denticleless [D. melanogaster]//0.0078:55:92//Hs.59075:AI023761

[18987] F-NT2RM4000356//ESTs//1.0:225:60//Hs.161175:AI418425

[18988] F-NT2RM4000366//Homo sapiens mRNA for KIAA0642 protein, partial cds//5.3e-135:628:99//Hs.8152:AB014542

[18989] F-NT2RM4000368//ESTs//4.9e-13:323:63//Hs.143695:AA662745

[18990] F-NT2RM4000386//Human DNA sequence from clone 1052M9 on chromosome Xq25. Contains the SH2D 1A gene for SH2 domain protein 1A, Duncan's disease (lymphoproliferative syndrome) (DSHP), part of a 60S Acidic Ribosomal protein 1 (RPLP1) LIKE gene and part of a mouse DOC4 LIKE gene. Contains ESTs and GSSs//2.0e-72:843:68//Hs.23796:AL022718

[18991] F-NT2RM4000395//Nitric oxide synthase 2A (inducible, hepatocytes)//0.63:166:65//Hs.946:X73029

[18992] F-NT2RM4000414//Homo sapiens XYLB mRNA for xylulokinase, complete cds//4.9e-17:114:94//Hs.137580:AB015046

[18993] F-NT2RM4000421

[18994] F-NT2RM4000425//Homo sapiens mRNA for KIAA0594 protein, partial cds//1.1e-42:432:74//Hs.154872:AB011166

[18995] F-NT2RM4000433//Colony stimulating factor 3 receptor (granulocyte)//0.023:543:58//Hs.2175:M59820

[18996] F-NT2RM4000457

[18997] F-NT2RM4000471//Human transcriptional corepressor hKAP1/TIF1B mRNA, complete cds//0.060:178:63//Hs.66369:U95040

[18998] F-NT2RM4000486//ESTs//9.2e-48:237:99//Hs.160685:AI280004

[18999] F-NT2RM4000496//ESTs//0.069:252:61//Hs.155958:AA573632

[19000] F-NT2RM4000511//EST//0.92:191:58//Hs.61517:AA028915

[19001] F-NT2RM4000514

[19002] F-NT2RM4000515//ESTs//7.3e-93:450:98//Hs.120975:AA034409

[19003] F-NT2RM4000520//ESTs//0.13:183:65//Hs.144828:AI221305

[19004] F-NT2RM4000531//ESTs, Highly similar to ZINC FINGER PROTEIN MLZ-4 [Mus musculus]//1.8e-153:756:96//Hs.125870:AI364967

[19005] F-NT2RM4000532//ESTs//7.7e-43:388:78//Hs.105665:H78987

[19006] F-NT2RM4000534

[19007] F-NT2RM4000585

[19008] F-NT2RM4000590//Homo sapiens mRNA for KIAA0469 protein, complete cds//1.2e-19:593:62//Hs.7764:AB007938

[19009] F-NT2RM4000595//ESTs, Highly similar to HYPOTHETICAL 54.9 KD PROTEIN C02F5.7 IN CHROMOSOME III [Caenorhabditis elegans]//3.1e-104:532:96//Hs.6092:T75227

[19010] F-NT2RM4000603//Human mRNA for KIAA0392 gene, partial cds//1.7e-15:305:68//Hs.40100:AB002390

[19011] F-NT2RM4000611//EST//0.76:268:58//Hs.150031:AI292068

[19012] F-NT2RM4000616

[19013] F-NT2RM4000674

[19014] F-NT2RM4000689

[19015] F-NT2RM4000698//Apolipoprotein E//1.0:290:59//Hs.76260:M 12529

[19016] F-NT2RM4000700

[19017] F-NT2RM4000712//Homo sapiens ubiquitin hydrolyzing enzyme 1 (UBH1) mRNA, partial cds//3.5e-91:744:77//Hs.42400:AF022789

[19018] F-NT2RM4000717//ESTs, Highly similar to BONE MORPHOGENETIC PROTEIN 1 PRECURSOR [Mus musculus)//2.6e-163:771:97//Hs.6823:W 18181

[19019] F-NT2RM4000733//PUTATIVE TACHYKININ RECEPTOR//0.70:257:60//Hs.957:M84605

[19020] F-NT2RM4000734//Homo sapiens mRNA for KIAA0760 protein, partial cds//1.2e-159:743:98//Hs.137168:AB018303

[19021] F-NT2RM4000741

[19022] F-NT2RM4000751//ESTs, Highly similar to ZINC FINGER PROTEIN MLZ-4 [Mus musculus]//1.1e-75:388:96//Hs.112361:R99396

[19023] F-NT2RM4000764//ESTs//3.8e-104:539:95//Hs.24739:H67815

[19024] F-NT2RM4000778//ESTs//1.5e-85:419:97//Hs.99838:AA204731

[19025] F-NT2RM4000779//Homo sapiens mRNA for KIAA0451 protein, complete cds//1.8e-173:810:98//Hs.18586:AB007920

[19026] F-NT2RM4000787//EST//0.011:182:65//Hs.159928:AA969186

[19027] F-NT2RM4000790//Homo sapiens chromosome 19, cosmid R27216//4.5e-156:736:98//Hs.25817:AC005306

[19028] F-NT2RM4000795//ESTs, Highly similar to LIVER CARBOXYLESTERASE PRECURSOR [Homo sapiens]//6.7e-19:160:80//Hs.124902:AI337820 t

[19029] F-NT2RM4000796//Human K+channel subunit gene, complete cds//0.96:292:62//Hs.124212:M64676

[19030] F-NT2RM4000798//ESTs//1.9e-34:271:82//Hs.128203:AA972301

[19031] F-NT2RM4000813//Homo sapiens snRNA activating protein complex 190 kD subunit (SNAP190) mRNA, complete cds//0.052:238:64//Hs.113265:AF032387

[19032] F-NT2RM4000820//ESTs//0.053:274:61//Hs.23748:H 16568

[19033] F-NT2RM4000833

[19034] F-NT2RM4000848//Human mRNA for KIAA0324 gene, partial cds//0.97:374:61//Hs.7841:AB002322

[19035] F-NT2RM4000852//EST//1.0:222:60//Hs.120354:AA718934

[19036] F-NT2RM4000855//ESTs, Highly similar to RAS-RELATED C3 BOTULINUM TOXIN SUBSTRATE 2 [Homo sapiens]//4.4e-29:164:95//Hs.115095:AI392943

[19037] F-NT2RM4000887

[19038] F-NT2RM4000895//Homo sapiens HuUAP I mRNA for UDP-N-acetylglucosamine pyrophosphorylase, complete cds//6.8e-22:407:64//Hs.21293 AB011004

[19039] F-NT2RM4000950

[19040] F-NT2RM4000971//ESTs//3.6e-27:142:100//Hs.130912:AI014546

[19041] F-NT2RM4000979//Homo sapiens KIAA0415 mRNA, complete cds//3.7e-63:571:77//Hs.7289:AB007875

[19042] F-NT2RM4000996//Zinc finger protein 3 (A8-51)//8.7e-34:381:67//Hs.2481:X78926

[19043] F-NT2RM4001002//Homo sapiens mRNA for KIAA0729 protein, partial cds//1.6e-171:803:98//Hs.19542:AB018272

[19044] F-NT2RM4001016//Homo sapiens mRNA for KIAA0639 protein, partial cds//1.1e-126:584:99//Hs.15711:AB014539

[19045] F-NT2RM4001032//Homo sapiens mRNA for KIAA0711 protein, complete cds//4.8e-05:469:58//Hs.5333 AB018254

[19046] F-NT2RM4001047//ESTs, Moderately similar to M025 PROTEIN [M. musculus]//7.0e-56:340:92//Hs.87310:AI247543

[19047] F-NT2RM4001054//HIGH AFFINITY IMMUNOGLOBULIN GAMMA FC RECEPTOR I “A FORM” PRECURSOR//0.79:142:69//Hs.77424:M63835

[19048] F-NT2RM4001084

[19049] F-NT2RM4001092//Human mRNA for KIAA0050 gene, complete cds//0.045:235:62//Hs.108947:D30758

[19050] F-NT2RM4001116

[19051] F-NT2RM4001140//Human engrailed protein (EN2) gene, 5′ end//0.00029:225:61//Hs.134989:L12701

[19052] F-NT2RM4001151//ESTs//1.1e-07:190:65//Hs.151691:AA443730

[19053] F-NT2RM4001155//EST//2.2e-12:181:74//Hs.128826:AI004145

[19054] F-NT2RM4001160//EST//0.83:166:61//Hs.117051:AA677351

[19055] F-NT2RM4001187

[19056] F-NT2RM4001191//ESTs//1.3e-42:248:93//Hs.13475:R18220

[19057] F-NT2RM4001200//Zinc finger protein 10 (KOX I)/14.0e-68:799:69//Hs.2479:X78933

[19058] F-NT2RM4001203//Homo sapiens rab3-GAP regulatory domain mRNA, complete cds//1.4e-153:707:99//Hs.14934:AF004828

[19059] F-NT2RM4001204//ESTs, Moderately similar to HYPOTHETICAL 59.1 KD PROTEIN ZK637.1 IN CHROMOSOME III [Caenorhabditis elegans]//0.19:291:62//Hs.31582:AA877205

[19060] F-NT2RM4001217//Homo sapiens nuclear matrix protein NRP/B (NRPB) mRNA, complete cds//7.0e-63:715:70//Hs.104925:AF059611

[19061] F-NT2RM4001256//ESTs, Weakly similar to probable CBP3 protein homolog [C. elegans]//1.1e-67:208:96//Hs.26676:AA033997

[19062] F-NT2RM4001258//Homo sapiens mRNA for KIAA0481 protein, complete cds//0.0019:435:59//Hs.6360:AB007950

[19063] F-NT2RM4001309//Human Chromosome 16 BAC clone CIT987SK-254P9//0.019:356:59//Hs.26971:AC003003

[19064] F-NT2RM4001313//H. sapiens mRNA for phosphatidylinositol 3-kinase//8.0e-79:474:89//Hs.32971:Z46973

[19065] F-NT2RM4001316//ESTs//1.2e-14:126:84//Hs.154344:AA258335

[19066] F-NT2RM4001320//Human mRNA for Neuroblastoma, complete cds//3.6e-43:642:66//Hs.87435:D89016

[19067] F-NT2RM4001340//EST//0.40:135:70//Hs.161198:AI418988

[19068] F-NT2RM4001344//ESTs, Highly similar to HYPOTHETICAL GTP-BINDING PROTEIN IN PMI40-PAC2 INTERGENIC REGION [Saccharomyces cerevisiae]//0.0096:284:58//Hs.120997:R56714

[19069] F-NT2RM4001347//ESTs, Weakly similar to weakly similar to ANK repeat region of Fowlpox virus BamHI-orf7 protein [C. elegans]//3.7e-52:252:100//Hs.15301:AA167818

[19070] F-NT2RM4001371//EST//0.52:262:59//Hs.145991:AI277656

[19071] F-NT2RM4001382//Homo sapiens RanBP7/importin 7 mRNA, complete cds//7.2e-169:790:98//Hs.5151:AF098799

[19072] F-NT2RM4001384

[19073] F-NT2RM4001410//ESTs//1.1e-47:290:91//Hs.72447:AA160575

[19074] F-NT2RM4001411//Homo sapiens mRNA for APS, complete cds//2.5e-23:475:64//Hs.105052:AB000520

[19075] F-NT2RM4001412

[19076] F-NT2RM4001414//ESTs, Moderately similar to F18547_{—}1 [H. sapiens]//5.2e-18:133:87//Hs.28209:AI073817

[19077] F-NT2RM4001437//Human mRNA for KIAA0118 gene, partial cds//2.5e-42:611:70//Hs.154326:D42087

[19078] F-NT2RM4001444

[19079] F-NT2RM4001454//ESTs//3 .9e-31:169:96//Hs.117982:AA644658

[19080] F-NT2RM4001455//ESTs//0.0054:48:100//Hs.14920:AA910914

[19081] F-NT2RM4001483//ESTs, Weakly similar to ZINC FINGER PROTEIN ZFP-36 [H. sapiens]//1.1e-71:313:99//Hs.163754:AA587784

[19082] F-NT2RM4001489//Homo sapiens mRNA for KIAA0685 protein, complete cds//3.9e-157:724:99//Hs.153121:AB014585

[19083] F-NT2RM4001519//ESTs//0.66:264:59//Hs.139891:AA553619

[19084] F-NT2RM4001522//ESTs, Weakly similar to D9481.12 gene product [S. cerevisiae]//1.3e-114:536:99//Hs.88820:AA456247

[19085] F-NT2RM4001557

[19086] F-NT2RM4001565//ESTs//1.7e-107:509:99//Hs.146139:AA731487

[19087] F-NT2RM4001566//Human phosphatidylinositol 3-kinase catalytic subunit p110delta mRNA, complete cds//1.0:255:60//Hs.14207:U86453

[19088] F-NT2RM4001569//ESTs//1.4e-86:417:98//Hs.153044:A1198859

[19089] F-NT2RM4001582

[19090] F-NT2RM4001592//EST//0.61:142:64//Hs.162900:AA664566

[19091] F-NT2RM4001594//Homo sapiens mRNA for KIAA0522 protein, partial cds//0.0072:484:60//Hs.129892:AB011094

[19092] F-NT2RM4001597//ESTs, Moderately similar to red-1 [M. musculus]//2.3e-72:387:95//Hs.114722:AA448077

[19093] F-NT2RM4001605//Homo sapiens mRNA for KIAA0791 protein, complete cds//1 le-163:750:99//Hs.23255:AB018334

[19094] F-NT2RM4001611//ESTs, Weakly similar to F25H9.6 [C. elegans]//8.6e-05:91:79//Hs.24647:W19739

[19095] F-NT2RM4001629//ESTs, Moderately similar to 55 KD ERYTHROCYTE MEMBRANE PROTEIN [Homo sapiens]//0.0042:153:68//Hs.114832:Al 147946

[19096] F-NT2RM4001650//Human mRNA for KIAA0341 gene, partial cds//0.95:328:60//Hs.101761:AB002339

[19097] F-NT2RM4001662//Human mRNA for KIAA0322 gene, partial cds//8.3e-83:449:93//Hs.153685:AB002320

[19098] F-NT2RM4001666//ESTs//2.1e-11:78:96//Hs.152446:AA555323

[19099] F-NT2RM4001682//EST//0.027:145:70//Hs.133253:AI052638

[19100] F-NT2RM4001710//ESTs//0.098:140:62//Hs.5796:AA767384

[19101] F-NT2RM4001714//Human mRNA for KIAA0202 gene, partial cds//2.2e-86:748:74//Hs.80712:D86957

[19102] F-NT2RM4001715//ESTs//1.3e-104:490:99//Hs.127336:AI332905

[19103] F-NT2RM4001731//Human involucrin mRNA//0.23:432:59//Hs.157091:M13903

[19104] F-NT2RM4001741//Human mRNA for KIAA0320 gene, partial cds//6.9e-80:737:73//Hs.150443:AB002318

[19105] F-NT2RM4001746//H. sapiens NF-H gene, exon I (and joined CDS)//2.1e-07:418:61//Hs.75735:X15306

[19106] F-NT2RM4001754//ESTs, Weakly similar to RETROVIRUS-RELATED POL POLYPROTEIN [Mus musculus]//2.0e-27:205:83//Hs.110601:AA206719

[19107] F-NT2RM4001758//H. sapiens mRNA for serine/threohine protein kinase EMK//2.1e-86:729:75//Hs.157199:X97630

[19108] F-NT2RM4001776//Homo sapiens mRNA for KIAA0727 protein, partial cds//7.4e-175:803:99//Hs.39871:AB018270

[19109] F-NT2RM4001783//ESTs, Weakly similar to TI 2D8.i [C. elegans]//3.1e-71:376:95//Hs.108396:AA160677

[19110] F-NT2RM4001810//Homo sapiens centrosomal Nek2-associated protein 1 (C-NAP 1) mRNA, complete cds//0.99:446:58//Hs.27910:AF049105

[19111] F-NT2RM4001813//Homo sapiens clone 24820 mRNA sequence//6.6e-14:249:70//Hs.146312:AF070547

[19112] F-NT2RM4001819//Cell division cycle 2-like 1 (PITSLRE proteins)//1.4e-35:195:95//Hs.963:M37712

[19113] F-NT2RM4001823//ESTs, Weakly similar to ZINC FINGER PROTEIN 91 [H. sapiens]//2.3e-40:252:90//Hs.119294:AI379442

[19114] F-NT2RM4001828//Zinc finger protein 157 (HZF22)//1.8e-75:688:72//Hs.89897:U28687

[19115] F-NT2RM4001836//NUCLEOBINDIN PRECURSOR//0.0022:588:59//Hs.953:M96824

[19116] F-NT2RM4001841//ESTs//0.86:156:67//Hs.146276:AI214204

[19117] F-NT2RM4001842//ESTs//0.20:191:62//Hs.107657:AA126814

[19118] F-NT2RM4001856

[19119] F-NT2RM4001858//Human putative cerebral cortex transcriptional regulator T-Brain-1 (Thr-1) mRNA, complete cds//8.0e-10:244:66//Hs.22138:U49250

[19120] F-NT2RM4001865//Homo sapiens mRNA for atopy related autoantigen CALC//2.3e-150:704:98//Hs.61628:Y17711

[19121] F-NT2RM4001876//Human mRNA for KIAA0231 gene, partial cds//9.1e-44:621:66//Hs.7938:D86984

[19122] F-NT2RM4001880

[19123] F-NT2RM4001905//ESTs//7.5e-11:137:75//Hs.86950:AI204212

[19124] F-NT2RM4001922//ESTs//2. Se-51:291:93//Hs.26660:AI312633

[19125] F-NT2RM4001930//Homo sapiens mRNA for putative glucosyltransferase, partial cds//0.98:359:57//Hs.155356:AJ224875

[19126] F-NT2RM4001938

[19127] F-NT2RM4001940//Homo sapiens timeless homolog mRNA, complete cds//3.6e-172:808:98//Hs.118631:AF098162

[19128] F-NT2RM4001953//Human mRNA for KIAA0118 gene, partial cds//5.0e-54:362:83//Hs.154326:D42087

[19129] F-NT2RM4001965//ESTs, Weakly similar to KIAA0157 gene product is novel. [H. sapiens]//1.8e-65:337:96//Hs.130135:AA905493

[19130] F-NT2RM4001969//ESTs//0.00024:261:63//Hs.157579:AI312862

[19131] F-NT2RM4001979//Homo sapiens mRNA for KIAA0798 protein, complete cds//3.2e-63:527:76//Hs.159277:AB018341

[19132] F-NT2RM4001984//EST//7.1e-05:235:61//Hs.105444:AA508082

[19133] F-NT2RM4001987//Homo sapiens mRNA for KIAA0467 protein, partial cds//0.73:181:65//Hs.1147:AB007936

[19134] F-NT2RM4002013//ESTs//0.97:185:63//Hs.103345:A1302271

[19135] F-NT2RM4002018//ESTs//2.5e-76:398:94//Hs.119544:T95601

[19136] F-NT2RM4002034

[19137] F-NT2RM4002044//ESTs//9.6e-83:410:97//Hs.128162:AA815048

[19138] F-NT2RM4002054//EST//8.5e-12:176:71//Hs.137181:R56912

[19139] F-NT2RM4002055//Homo sapiens mRNA for KIAA0640 protein, partial cds//3.3e-173:803:98//Hs.153026:AB014540

[19140] F-NT2RM4002062//ESTs, Weakly similar to ASPARTYL-TRNA SYNTHETASE [Thermus aquaticus thermophilus]//7.0e-94:396:94//Hs.59346:AI126802

[19141] F-NT2RM4002063

[19142] F-NT2RM4002066//Homo sapiens OPA-containing protein mRNA, complete cds//1.1e-74:889:69//Hs.85313:AF071309

[19143] F-NT2RM4002067//ESTs//2.3e-34:455:69//Hs.118273:AA626040

[19144] F-NT2RM4002073//Insulin-like growth factor binding protein 2//3.2e-10:470:61//Hs.162:X16302

[19145] F-NT2RM4002075//Homo sapiens actin binding protein MAYVEN mRNA, complete cds//2.9e-24:588:61//Hs.122967:AF059569

[19146] F-NT2RM4002093//Polypyrimidine tract binding protein (hnRNP I) {alternative products}//9.2e-34:532:65//Hs.146459:X66975

[19147] F-NT2RM4002109//Homo sapiens mitotic centromere-associated kinesin mRNA, complete cds//0.99:408:62//Hs.69360:U63743

[19148] F-NT2RM4002128//Homo sapiens mRNA for KIAA0642 protein, partial cds//0.93:202:63//Hs.8152:AB014542

[19149] F-NT2RM4002140//Human p300 protein mRNA, complete cds//0.99:320:59//Hs.25272:U01877

[19150] F-NT2RM4002145//CARBOXYPEPTIDASE N 83 KD CHAIN//2.7e-06:388:59//Hs.73858:J05158

[19151] F-NT2RM4002146//ESTs, Highly similar to similar to mago nashi [H. sapiens]//1.6e-135:646:97//Hs.104650:AI037879

[19152] F-NT2RM4002161//Homo sapiens laforin (EPM2A) mRNA, partial cds//1.4e-150:763:95//Hs.22464:AF084535

[19153] F-NT2RM4002174

[19154] F-NT2RM4002189//Mucin 2, intestinal/tracheal//0.087:298:61//Hs.315:L21998

[19155] F-NT2RM4002194//Human semaphorin III family homolog mRNA, complete cds//7.3e-11:454:60//Hs.32981:U38276

[19156] F-NT2RM4002205//EST//2.6e-21:270:71//Hs.120013:AA707454

[19157] F-NT2RM4002213//Homo sapiens mRNA for KIAA0610 protein, partial cds//0.52:313:61//Hs.118087:AB011182

[19158] F-NT2RM4002226//ESTs, Highly similar to GTPASE ACTIVATING PROTEIN ROTUND [Drosophila melanogaster]//8.4e-125:588:98//Hs.23900:U82984

[19159] F-NT2RM4002251//ESTs//1.0:77:74//Hs.155135:AA910966

[19160] F-NT2RM4002256//ESTs//7.5e-28:358:74//Hs.13356:AI205764

[19161] F-NT2RM4002266//Human kinase Mytl (Mytl) mRNA, complete cds//0.73:502:57//Hs.77783:AF014118

[19162] F-NT2RM4002278//EST//0.33:138:63//Hs.144096:AI032180

[19163] F-NT2RM4002281

[19164] F-NT2RM4002287//ESTs//0.00037:55:98//Hs.11134:T62979

[19165] F-NT2RM4002294//Human mRNA for KIAA0281 gene, complete cds//6.7e-50:511:72//Hs.31463:D87457

[19166] F-NT2RM4002301

[19167] F-NT2RM4002323//ESTs//3.6e-09:105:87//Hs.131737:AI343331

[19168] F-NT2RM4002339

[19169] F-NT2RM4002344//EST//0.16:166:64//Hs.128600:AA906454

[19170] F-NT2RM4002373//Homo sapiens mRNA for KIAA0649 protein, complete cds//9.1e-151:708:98//Hs.26163:AB014549

[19171] F-NT2RM4002374//Homo sapiens mRNA for KIAA0720 protein, partial cds//0.0040:303:63//Hs.23741:AB018263

[19172] F-NT2RM4002383//ESTs//8.0e-16:153:78//Hs.155243:N70293

[19173] F-NT2RM4002390

[19174] F-NT2RM4002398

[19175] F-NT2RM4002409

[19176] F-NT2RM4002438//ESTs, Weakly similar to probable CBP3 protein homolog [C. elegans]//1.1e-55:282:96//Hs.26676:AA033997

[19177] F-NT2RM4002446//Homo sapiens clone 24574 mRNA sequence//0.59:339:60//Hs.18686:AF052151

[19178] F-NT2RM4002452

[19179] F-NT2RM4002457//Homo sapiens mRNA for epiregulin, complete cds//3.2e-25:228:81//Hs.115263:D30783

[19180] F-NT2RM4002460//EST//1.0:142:65//Hs.145370:AI252780

[19181] F-NT2RM4002479//Homo sapiens RNA helicase-related protein mRNA, complete cds//8.9e-165:777:98//Hs.8765:AF083255

[19182] F-NT2RM4002482//Homo sapiens mRNA for KIAA0691 protein, complete cds//7.3e-95:464:97//Hs.94781:AB014591

[19183] F-NT2RM4002493

[19184] F-NT2RM4002499//ESTs//1.3e-44:653:67//Hs.23790:N99347

[19185] F-NT2RM4002504//Small inducible cytokine A5 (RANTES)//4.3e-30:225:83//Hs.155464:AF088219

[19186] F-NT2RM4002527//Human pre-B cell enhancing factor (PBEF) mRNA, complete cds//0.99:290:60//Hs.154968:U02020

[19187] F-NT2RM4002532//Human mRNA for KIAA0238 gene, partial cds//1.0:232:61//Hs.82042:D87075

[19188] F-NT2RM4002534//Homo sapiens angiotensin/vasopressin receptor AII/AVP mRNA, complete cds/1.0:100:70//Hs.159483:AF054176

[19189] F-NT2RM4002558//Homo sapiens amphiphysin II mRNA, complete cds//0.17:393:61//Hs.6619:U84004

[19190] F-NT2RM4002565//Homo sapiens mRNA for Asparaginyl tRNA Synthetase, complete cds//1.0:226:60//Hs.84043:D84273

[19191] F-NT2RM4002567//ESTs, Weakly similar to C17G10.1 [C. elegans]//3.3e-88:484:93//Hs.105837:AA536054

[19192] F-NT2RM4002571//ESTs, Weakly similar to UDP-GalNAc:polypeptide N-acetylgalactosaminyltransferase [H. sapiens]//0.059:121:70//Hs.155413:AA429394

[19193] F-NT2RM4002593//ESTs//1.0e-115:103:95//Hs.108920:W28151

[19194] F-NT2RM4002594//Homo sapiens 26S proteasome regulatory subunit (SUG2) mRNA, complete cds//1.0e-06:499:59//Hs.79357:D78275

[19195] F-NT2RM4002623//ESTs//1.2e-11:92:92//Hs.164046:T97402

[19196] F-NT2RP1000018//Homo sapiens mRNA for KIAA0687 protein, partial cds//2.0e-102:746:81//Hs.3628:AB014587

[19197] F-NT2RP1000035//Homo sapiens mRNA for NS1-binding protein (NS1-BP)//3.7e-155:747:96//Hs.159597:AJ012449

[19198] F-NT2RP1000040//ESTs//1.3e-58:338:92//Hs.17534:H 16907

[19199] F-NT2RP1000063//ESTs//0.0013:72:83//Hs.108196:W81647

[19200] F-NT2RP1000086//Human mRNA for KIAA0360 gene, partial cds//5.4e-185:548:91//Hs.79971:X98834

[19201] F-NT2RP1000111//Homo sapiens hook2 protein (HOOK2) mRNA, complete cds//0.33:247:61//Hs.30792:AF044924

[19202] F-NT2RP1000111

[19203] F-NT2RP1000112//TTK protein kinase//3.2e-40:324:81//Hs.2052:M86699

[19204] F-NT2RP1000124//ESTs//2.4e-42:268:89//Hs.146078:AI084025

[19205] F-NT2RP1000130//ESTs, Moderately similar to HEPATOMA-DERIVED GROWTH FACTOR [H. sapiens]//1.4e-71:382:94//Hs.127842:W38901

[19206] F-NT2RP1000163//Homo sapiens cell cycle progression 2 protein (CPR2) mRNA, complete cds//2.1e-06:77:90//Hs.3760:AF011792

[19207] F-NT2RP1000170//EST//0.68:130:63//Hs.146994:A1184430

[19208] F-NT2RP1000174//Homo sapiens clone 24432 mRNA sequence//8.3e-140:679:97//Hs.78019:AF070535

[19209] F-NT2RP1000191//ESTs//1.3e-71:405:93//Hs.24054:N46499

[19210] F-NT2RP1000202//H. sapiens mRNA for cytokine inducible nuclear protein//2.0e-05:591:58//Hs.74019:X83703

[19211] F-NT2RP1000243

[19212] F-NT2RP1000259

[19213] F-NT2RP1000272//Homo sapiens TLS-associated protein TASR-2 mRNA, complete cds//5.4e-109:528:97//Hs.4214:AF067730

[19214] F-NT2RP1000324//ESTs//3.4e-98:499:96//Hs.42530:N41661

[19215] F-NT2RP1000326//Homo sapiens metaxin 2 (MTX2) mRNA, nuclear gene encoding mitochondrial protein, complete cds//1.3e-148:693:98//Hs.31584:AF053551

[19216] F-NT2RP1000333//Homo sapiens monocyte/macrophage Ig-related receptor MIR-10 (MIR cl-10) mRNA, complete cds//0.28:328:60//Hs.22405:AF004231

[19217] F-NT2RP1000348//Human plectin (PLEC1) mRNA, complete cds//0.018:337:62//Hs.79706:U53204

[19218] F-NT2RP1000357

[19219] F-NT2RP1000358//DYNAMIN-1//0.96:273:59//Hs.126:L07807

[19220] F-NT2RP1000363//Homo sapiens mRNA for KIAA0638 protein, partial cds//3.2e-126:497:86//Hs.77864:AB014538

[19221] F-NT2RP1000376//Homo sapiens calcium-independent phospholipase A2 mRNA, complete cds//5.9e-178:877:96//Hs.120360:AF064594

[19222] F-NT2RP1000409//ESTs//5.4e-59:415:83//Hs.140578:AA828031

[19223] F-NT2RP1000413//Homo sapiens mRNA for KIAA0587 protein, complete cds//3.0e-179:710:98//Hs.21862:AB011159

[19224] F-NT2RP1000416//ESTs, Highly similar to BONE MORPHOGENETIC PROTEIN I PRECURSOR [Mus musculus]//7.3e-177:857:97//Hs.6823:W 18181

[19225] F-NT2RP1000418//Homo sapiens calcium-activated potassium channel (KCNN3) mRNA, complete cds//0.46:222:60//Hs.89230:AF031815

[19226] F-NT2RP1000439//EST//0.98:339:56//Hs.137377:AA101603

[19227] F-NT2RP1000443//Human SLP-76 associated protein mRNA, complete cds//1.0:356:59//Hs.58435:AF001862

[19228] F-NT2RP1000460

[19229] F-NT2RP1000470//Human DNA from chromosome 19-specific cosmid R27090, genomic sequence//3.7e-134:665:96//Hs.143187:AC002985

[19230] F-NT2RP1000478//Human beta-tubulin class III isotype (beta-3) mRNA, complete cds//6.2e-57:440:80//Hs.159154:U47634

[19231] F-NT2RP1000481//ESTs//4.8e-21:154:87//Hs.17392:AA535102

[19232] F-NT2RP1000493

[19233] F-NT2RP1000513//ESTs//2.2e-71:409:91//Hs.121029:AA480977

[19234] F-NT2RP1000522//Homo sapiens clone DTIPIA11 mRNA, CAG repeat region//0.21:255:62//Hs.98834:U92992

[19235] F-NT2RP1000547//H. sapiens mRNA for transmembrane protein rnp24//1.9e-06:337:63//Hs.75914:X92098

[19236] F-NT2RP1000574//Homo sapiens homeobox protein MEIS2 (MEIS2) mRNA, partial cds//1.4e-82:295:92//Hs.104105:AF017418

[19237] F-NT2RP1000577//Human sialoprotein mRNA, complete cds//0.014:235:65//Hs.121552:J05213

[19238] F-NT2RP1000581//VON WILLEBRAND FACTOR PRECURSOR//1.6e-33:223:89//Hs.110802:X04385

[19239] F-NT2RP1000609//Homo sapiens chromosome 11, BAC CIT-HSP-31 e8 (BC269730) containing the hFEN1 gene//2.2e-49:506:73//Hs.132898:AC004770

[19240] F-NT2RP1000629//Human clathrin assembly protein 50 (AP50) mRNA, complete cds//3.6e-19:556:62//Hs.152936:D63475

[19241] F-NT2RP1000630

[19242] F-NT2RP1000677//Human breast tumor autoantigen mRNA, complete sequence//2.4e-05:389:59//Hs.3844:U24576

[19243] F-NT2RP1000688//ESTs, Weakly similar to T06E6.d [C. elegans]//2.5e-43:232:95//Hs.3487:AA425553

[19244] F-NT2RP1000695//ESTs, Weakly similar to C27F2.7 gene product [C. elegans]//9.2e-53:312:90//Hs.7049:AI141736

[19245] F-NT2RP1000701//Myogenic factor 3//0.81:186:63//Hs.2834:AF027148

[19246] F-NT2RP1000721//Homo sapiens mRNA for repressor protein, partial cds//4.0e-33:278:78//Hs.58167:D30612

[19247] F-NT2RP1000730//ESTs, Weakly similar to putative p150 [H. sapiens]//6.2e-40:297:84//Hs.18122:AI338045

[19248] F-NT2RP1000733//GI to S phase transition 1//1.4e-31:286:78//Hs.2707:X17644

[19249] F-NT2RP1000738//Homo sapiens Wolf-Hirschhom syndrome candidate 2 protein (WHSC2) mRNA, complete cds//2.6e-123:604:96//Hs.21771:AF 101434

[19250] F-NT2RP1000746

[19251] F-NT2RP1000767

[19252] F-NT2RP1000782//Human globin gene//3.6e-21:140:91//Hs.100090:M69023

[19253] F-NT2RP1000796//H. sapiens mRNA for ROX protein//1.17:404:57//Hs.25497:X96401

[19254] F-NT2RP1000825//Human DNA sequence from PAC 127B20 on chromosome 22q11.2-qter, contains gene for GTPase-activating protein similar to rhoGAP protein ribosomal protein L6 pseudogene, ESTs and CA repeat//2.7e-23:147:91//Hs.102336:Z83838

[19255] F-NT2RP1000833//Homo sapiens cGMP phosphodiesterase Al (PDE9A) mRNA, complete cds//5.4e-143:424:96//Hs.18953:AF067223

[19256] F-NT2RP1000834//ESTs//0.18:280:60//Hs.157215:AI332903

[19257] F-NT2RP1000836//EST//0.60:103:66//Hs.145708:AI267990

[19258] F-NT2RP1000846//EST//1.2e-15:322:65//Hs.149925:AI288838

[19259] F-NT2RP1000851//ESTs//6.1e-96:459:98//Hs.121586:AA423875

[19260] F-NT2RP1000856//Human globin gene//6.7e-22:140:91//Hs.100090:M69023

[19261] F-NT2RP1000860//Homo sapiens KL04P mRNA, complete cds//2.2e-107:551:95//Hs.125156:AF064094

[19262] F-NT2RP1000902//EST//1.8e-28:218:85//Hs.145258:AI218683

[19263] F-NT2RP1000915//ESTs//8.8e-11:102:81//Hs.163740:AI248847

[19264] F-NT2RP1000916//ESTs, Weakly similar to coded for by C. elegans cDNA cm04e9 [C. elegans]//2.2e-27:159:94//Hs.122153:AA780270

[19265] F-NT2RP1000943//Human hSIAH2 mRNA, complete cds//0.45:130:68//Hs.20191:U76248

[19266] F-NT2RP1000944//EST//0.99:116:63//Hs.116633:AA668400

[19267] F-NT2RP1000947//Human E2 ubiquitin conjugating enzyme UbCH5B (UBCH5B) mRNA, complete cds//2.7e-26:185:87//Hs.108332:U39317

[19268] F-NT2RP1000954//Homo sapiens BACHI mRNA, complete cds//0.81:329:56//Hs.154276:AB002803

[19269] F-NT2RP1000958//ESTs//1.3e-20:129:92//Hs.163740:AI248847

[19270] F-NT2RP1000959//Ribosomal protein, large, PO//0.36:76:73//Hs.73742:M 17885

[19271] F-NT2RP1000966//NUCLEOLIN//1.2e-72:353:98//Hs.79110:M60858

[19272] F-NT2RP1000980//ESTs//1.6e-109:555:96//Hs.84429:N28866

[19273] F-NT2RP1000988//Human chromosome 3p21.1 gene sequence//2.6e-73:665:80//Hs.82837:L13435

[19274] F-NT2RP1001011

[19275] F-NT2RP1001013//ESTs//3.4e-40:393:74//Hs.120206:AI089163

[19276] F-NT2RP101014

[19277] F-NT2RP1001033//Tubulin, gamma polypeptide//0.00041:313:59//Hs.150785:M61764

[19278] F-NT2RP1001073//Glucocorticoid receptor//1.0:204:61//Hs.75772:M 10901

[19279] F-NT2RP1001079//ESTs//1.0:174:62//Hs.158209:AI360531

[19280] F-NT2RP1001080//Homo sapiens forkhead protein (FKHRLI) mRNA, complete cds//0.57:215:64//Hs.14845:AF032886

[19281] F-NT2RP001113//ESTs, Weakly similar to coded for by C. elegans cDNA CEESB82F [C. elegans]//1.4e-65:293:95//Hs.32751:H38087

[19282] F-NT2RP1001173

[19283] F-NT2RP1001177//Homo sapiens histone macroH2A1.2 mRNA, complete cds//6.1e-26:259:74//Hs.75258:AF054174

[19284] F-NT2RP1001185//EST//1.4e-27:266:77//Hs.122245:AA781524

[19285] F-NT2RP1100199//ESTs//0.97:75:73//Hs.131498:AI022150

[19286] F-NT2RP1001247//Human endometrial bleeding associated factor mRNA, complete cds//1.6e-19:120:95//Hs.25195:U81523

[19287] F-NT2RP1001248//ESTs//3.0e-21:143:93//Hs.157243:A1337094

[19288] F-NT2RP1001253//PUTATIVE GLUCOSAMINE-6-PHOSPHATE ISOMERASE//1.2e-89:344:93//Hs.3090:AJ002231

[19289] F-NT2RP1001286//H. sapiens mRNA for adenosine triphosphatase, calcium//0.026:392:57//Hs.5541:Y 15724

[19290] F-NT2RP1001294

[19291] F-NT2RP1001302

[19292] F-NT2RP1001310//Homo sapiens creatine transporter mRNA, complete cds//3.6e-07:379:61//Hs.154503:U36341

[19293] F-NT2RP1001311//ESTs//9.5e-73:403:93//Hs.24739:H67815

[19294] F-NT2RP1001313//Homo sapiens chromosome 11, BAC CIT-HSP-31 Ie8 (BC269730) containing the hFEN1 gene//3.1e-87:437:97//Hs.132898:AC004770

[19295] F-NT2RP1001361//ESTs, Highly similar to NADH-UBIQUINONE OXIDOREDUCTASE SUBUNIT B14.5B [Bos taurus]//6.8e-101:480:94//Hs.75017:AA166853

[19296] F-NT2RP10013851//EST//10.86:127:65//Hs.156304:AI336859

[19297] F-NT2RP1001395//Homo sapiens stannin mRNA, complete cds//0.75:355:58//Hs.76691:AF070673

[19298] F-NT2RP1001410//Thromboxane A2 receptor//1.0:157:63//Hs.89887:D38081

[19299] F-NT2RP1001424//ESTs//5.3e-20:118:95//Hs.159792:R60700

[19300] F-NT2RP1001432//ESTs//5.3e-20:118:95//Hs.159792:R60700

[19301] F-NT2RP1001449//Homo sapiens clone 24733 mRNA sequence//5.7e-86:422:97//Hs.21970:AF052149

[19302] F-NT2RP1001457//H. sapiens DAP-kinase mRNA//0.40:231:61//Hs.153924:X76104

[19303] F-NT2RP1001466

[19304] F-NT2RP1001475//ESTs//1 .2e-98:495:97//Hs.14347:AA287742

[19305] F-NT2RP1001482

[19306] F-NT2RP1001494

[19307] F-NT2RP1001543//ESTs//1.2e-38:207:98//Hs.131063:AI016400

[19308] F-NT2RP1001546//Homo sapiens mRNA for DAP-1 beta, complete cds//0.00077:254:64//Hs.75814:AB000277

[19309] F-NT2RP1001569

[19310] F-NT2RP1001616//Homo sapiens Tax interaction protein 1 mRNA, partial cds//2.5e-41:496:74//Hs.12956:U90913

[19311] F-NT2RP1001665//ESTs//9.4e-58:311:96//Hs.127391:AA954420

[19312] F-NT2RP2000001//Homo sapiens clone 617 unknown mRNA, complete sequence//4.7e-137:685:96//Hs.93677:AF091081

[19313] F-NT2RP2000006//ESTs, Weakly similar to B0035.14 [C. elegans]//8.2e-47:300:89//Hs.6473:AA853955

[19314] F-NT2RP2000007//Human mRNA for KIAA0392 gene, partial cds//1.1e-15:241:68//Hs.40100:AB002390

[19315] F-NT2RP2000008//Human mRNA for KIAA0065 gene, partial cds//1.5e-29:526:66//Hs.70617:D31763

[19316] F-NT2RP2000027//ESTs, Highly similar to LINE-1 REVERSE TRANSCRIPTASE HOMOLOG [Homo sapiens]//2.0e-26:214:82//Hs.140385:AA773359

[19317] F-NT2RP2000032//ESTs//0.91:368:57//Hs.131209:AI038867

[19318] F-NT2RP2000040//Homo sapiens mRNA for KIAA0747 protein, partial cds//6.1e-78:383:97//Hs.8309:AB018290

[19319] F-NT2RP2000045//Homo sapiens tumorous imaginal discs protein Tid56 homolog (TIDI) mRNA, complete cds//7.8e-97:467:97//Hs.6216:AF061749

[19320] F-NT2RP2000054//HOMEOBOX/POU DOMAIN PROTEIN RDC-1//1.0:110:70//Hs.74095:L20433

[19321] F-NT2RP2000056//Human HPTP epsilon mRNA for protein tyrosine phosphatase epsilon//1.2e-27:146:100//Hs.155991:X54134

[19322] F-NT2RP2000067//Human DNA sequence from clone 1052M9 on chromosome Xq25. Contains the SH2D1A gene for SH2 domain protein IA, Duncan's disease (lymphoproliferative syndrome) (DSHP), part of a 60S Acidic Ribosomal protein 1 (RPLP1) LIKE gene and part of a mouse DOC4 LIKE gene. Contains ESTs and GSSs118.1e-41:767:61//Hs.23796:AL022718

[19323] F-NT2RP2000070//Homo sapiens chromosome 5, BAC clone 203013 (LBNL H155), complete sequence//6.5e-08:344:58//Hs.159402:AC005609

[19324] F-NT2RP2000076//H. sapiens mRNA for TFIIA//0.00023:356:62//Hs.121686:D 14887

[19325] F-NT2RP2000077//Homo sapiens growth arrest specific 11 (GASI 1) mRNA, complete cds//6.8e-79:278:971//Hs.54877:AF050078

[19326] F-NT2RP2000079//ESTs//1.2e-36:202:94//Hs.17606:AI279879

[19327] F-NT2RP2000088//Homo sapiens mRNA for KIAA0795 protein, partial cds//7.1e-160:752:98//Hs.22926:AB018338

[19328] F-NT2RP2000091

[19329] F-NT2RP2000097

[19330] F-NT2RP2000098//ESTs//0.086:92:69//Hs.159389:AI371963

[19331] F-NT2RP2000108//Human mRNA for KIAA0392 gene, partial cds//1.4e-18:200:77//Hs.40100:AB002390

[19332] F-NT2RP2000114//Homo sapiens mRNA for GM3 synthase, complete cds//1.6e-115:551:97//Hs.17706:AB018356

[19333] F-NT2RP2000120//ESTs, Weakly similar to HYPOTHETICAL 68.7 KD PROTEIN ZK757.1 IN CHROMOSOME III [C. elegans]//0.019:72:81//Hs.5268:W22670

[19334] F-NT2RP2000126//Homo sapiens chromodomain-helicase-DNA-binding protein mRNA, complete cds//1.4e-120:607:96//Hs.159273:AF054177

[19335] F-NT2RP2000133//Neuronal pentraxin II//0.00014:401:61//Hs.3281:U29195

[19336] F-NT2RP2000147//Human clathrin assembly protein 50 (AP50) mRNA, complete cds//2.2e-18:559:60//Hs.152936:D63475

[19337] F-NT2RP2000153//Homo sapiens splicing factor (CC1.3) mRNA, complete cds//0.33:85:70//Hs.256:L10910

[19338] F-NT2RP2000157//ESTs//0.53:75:81//Hs.24885:R49291

[19339] F-NT2RP2000161//ESTs//2.6e-06:89:8411Hs.21738:AI188190

[19340] F-NT2RP2000173

[19341] F-NT2RP2000175

[19342] F-NT2RP2000183//Homo sapiens mRNA for dihydropyrimidinase related protein 4, complete cds//0.0018:324:58//Hs.100058:AB006713

[19343] F-NT2RP2000195//ESTs, Weakly similar to C37E2.2 [C. elegans]//3.6e-37:233:90//Hs.56750:AI148761

[19344] F-NT2RP2000205//ESTs//5.6e-58:317:93//Hs.49559:AA401050

[19345] F-NT2RP2000208

[19346] F-NT2RP2000224//Homo sapiens hLRp105 mRNA for LDL receptor related protein 105, complete cds//0.0071:243:61//Hs.143641:AB009462

[19347] F-NT2RP2000232//EST//0.0087:187:62//Hs.151024:Z39990

[19348] F-NT2RP2000233//Homo sapiens Notch3 (NOTCH3) mRNA, complete cds//0.17:342:59//Hs.8546:U97669

[19349] F-NT2RP2000239//Human mRNA for KIAA0380 gene, complete cds//1.0:227:60//Hs.47822:AB002378

[19350] F-NT2RP2000248//EST//0.49:117:70//Hs.61016:AA019719

[19351] F-NT2RP2000257//Macrophage stimulating I (hepatocyte growth factor-like)//0.51:227:60//Hs.30223:X90846

[19352] F-NT2RP2000258//ESTs//3.1e-48:261:94//Hs.128230:AA972691

[19353] F-NT2RP2000270//ESTs//2.9e-38:357:75//Hs.140329:AA714011

[19354] F-NT2RP2000274//ESTs//1.1e-106:508:98//Hs.47646:AA307599

[19355] F-NT2RP2000283//EST//1.0:139:63//Hs.128256:AA972910

[19356] F-NT2RP2000288

[19357] F-NT2RP2000289

[19358] F-NT2RP2000297//Human repressor transcriptional factor (ZNF85) mRNA, complete cds//4.2e-60:744:70//Hs.37138:U35376

[19359] F-NT2RP2000298//ESTs//6.1e-46:322:85//Hs.159490:AI123467

[19360] F-NT2RP20003110//Human proline dehydrogenase/proline oxidase (PRODH) mRNA, complete cds//4.3e-13:140:80//Hs.58218:U82381

[19361] F-NT2RP2000327//ESTs//4.3e-18:108:98//Hs.126212:AI417006

[19362] F-NT2RP2000328//ESTs//6.3e-88:437:96//Hs.127336:AI332905

[19363] F-NT2RP2000329//GTP:AMP PHOSPHOTRANSFERASE MITOCHONDRIAL//6.6e-41:607:66//Hs.101642:X60673

[19364] F-NT2RP2000337//Homo sapiens neurocan (CSPG3) mRNA, complete cds//0.96:126:69//Hs.153706:AF026547

[19365] F-NT2RP2000346//Homo sapiens apoptosis associated protein (GADD34) mRNA, complete cds//1.2e-130:627:97//Hs.76556:U83981

[19366] F-NT2RP2000369//Homo sapiens mRNA for KIAA0630 protein, partial cds//0.56:464:57//Hs.12259:AB014530

[19367] F-NT2RP2000412//ESTs//1.0:214:60//Hs.91226:AA649047

[19368] F-NT2RP2000414//Homo sapiens HnRNP F protein mRNA, complete cds//1.6e-67:375:93//Hs.808:L28010

[19369] F-NT2RP2000420//ESTs, Moderately similar to zinc finger protein [H. sapiens]//3.9e-75:413:92//Hs.36779:AA626790

[19370] F-NT2RP2000422//Homo sapiens N-acetylglucosamine-phosphate mutase mRNA, complete cds//6.7e-128:609:96//Hs.5819:AF102265

[19371] F-NT2RP2000438//ESTs//1.3e-05:50:98//Hs.156532:AA913381

[19372] F-NT2RP2000448//EST//1.1e-24:136:98//Hs.160402:AI393918

[19373] F-NT2RP2000459//H. sapiens mRNA for imogen 38//1.9e-22:158:87//Hs.154655:Z68747

[19374] F-NT2RP2000498//ESTs//1.0e-17:181:79//Hs.155243:N70293

[19375] F-NT2RP2000503//ESTs//4.5e-41:205:100//Hs.62751:AA765702

[19376] F-NT2RP2000510

[19377] F-NT2RP2000516

[19378] F-NT2RP2000523//ESTs, Highly similar to APOLIPOPROTEIN B MRNA EDITING PROTEIN [Rattus norvegicus]//3.2e-15:167:75//Hs.10984:AA806768

[19379] F-NT2RP2000603//Homo sapiens mRNA for KIAA0572 protein, partial cds//5.6e-38:196:98//Hs.14409:AB011144

[19380] F-NT2RP2000617//Myosin, heavy polypeptide 6, cardiac muscle, alpha (cardiomyopathy, hypertrophic 1)//1.0:242:57//Hs.114001:Z20656

[19381] F-NT2RP2000634//Homo sapiens mRNA for KIAA0614 protein, partial cds//4.2e-151:732:97//Hs.7314:AB014514

[19382] F-NT2RP2000644//ESTs//0.035:276:60//Hs.43660:N33174

[19383] F-NT2RP2000656

[19384] F-NT2RP2000658//ESTs//0.032:281:59//Hs.124853:AA420602

[19385] F-NT2RP2000668

[19386] F-NT2RP2000678//ESTs//2.9e-16:310:65//Hs.126867:AI093453

[19387] F-NT2RP2000704//ESTs, Highly similar to PUTATIVE SERINE/THREONINE-PROTEIN KINASE C41C4.4 IN CHROMOSOME II PRECURSOR [Caenorhabditis elegans]//2.4e-31:233:78//Hs.114905:AA088442

[19388] F-NT2RP2000710

[19389] F-NT2RP2000715

[19390] F-NT2RP2000731

[19391] F-NT2RP2000758//EST//1.0e-14:199:71//Hs.162409:AA573242

[19392] F-NT2RP2000764//ESTs, Weakly similar to NIFS-LIKE 54.5 KD PROTEIN [Saccharomyces cerevisiae]//1.6e-74:445:89//Hs.21421:AA911739

[19393] F-NT2RP2000809//ESTs//1.2e-36:235:89//Hs.154580:N34101

[19394] F-NT2RP2000812//Homo sapiens pendrin (PDS) mRNA, complete cds//0.22:351:58//Hs.159275:AF030880

[19395] F-NT2RP2000814

[19396] F-NT2RP2000816//Homo sapiens mRNA for KIAA0610 protein, partial cds//1.0:311:61//Hs.118087:AB011182

[19397] F-NT2RP2000819

[19398] F-NT2RP2000841//Human mRNA for KIAA0294 gene, complete cds//3.4e-28:390:70//Hs.20695:AB002292

[19399] F-NT2RP2000842//Human lysophosphatidic acid receptor homolog mRNA, complete cds//9.5e-29:167:94//Hs.75794:U80811

[19400] F-NT2RP2000845//ESTs//1.0e-83:403:98//Hs.156828:AI336850

[19401] F-NT2RP2000863//ESTs, Highly similar to HYPOTHETICAL 36.7 KD PROTEIN C2F7.02C IN CHROMOSOME I [Schizosaccharomyces pombe]//6.4e-34:207:92//Hs.135235:AI081880

[19402] F-NT2RP2000880//Homo sapiens mRNA for KIAA0741 protein, complete cds//7.7e-142:732:94//Hs.3615:AB018284

[19403] F-NT2RP2000892//ESTs, Weakly similar to mitogen-activated kinase kinase kinase 5 [H. sapiens]//0.50:189:65//Hs.46146:AA418097

[19404] F-NT2RP2000931//MATRIN 3//1.1e-130:610:98//Hs.78825:AB018266

[19405] F-NT2RP2000932//Homo sapiens BAC clone GS166A23 from 7p21//5.5e-66:326:97//Hs.15144:AC005014

[19406] F-NT2RP2000938//ESTs//1.8e-28:296:75//Hs.22822:H06408

[19407] F-NT2RP2000943//Homo sapiens mRNA for KIAA0755 protein, complete cds//1.9e-113:533:98//Hs.19822:AB018298

[19408] F-NT2RP2000965//ESTs//5.3e-59:328:94//Hs.35575:R96494

[19409] F-NT2RP2000970

[19410] F-NT2RP2000985//ESTs, Weakly similar to HYPOTHETICAL 96.8 KD PROTEIN IN SIS2-MTD1 NTERGENIC REGION [Saccharomyces cerevisiae]//7.3e-76:385:96//Hs.21875:AA243700

[19411] F-NT2RP2000987//ESTs//5.6e-11:177:72//Hs.15776:T91944

[19412] F-NT2RP2001036//ESTs//2.0e-55:352:88//Hs.122131:AA789292

[19413] F-NT2RP2001044//EST//0.069:267:60//Hs.102808:N67117

[19414] F-NT2RP2001056//Homo sapiens mRNA, chromosome 1 specific transcript KIAA0488//1.0e-145:696:97//Hs.67619:AB007957

[19415] F-NT2RP2001065

[19416] F-NT2RP2001070//Human mRNA for KIAA0315 gene, partial cds//1.0:310:60//Hs.3989:AB002313

[19417] F-NT2RP2001081

[19418] F-NT2RP2001094//ESTs//0.0071:262:64//Hs.128115:AI356560

[19419] F-NT2RP2001119//Small inducible cytokine A5 (RANTES)//2.2e-34:311:78//Hs.155464:AF088219

[19420] F-NT2RP2001127//Human mRNA for KIAA0234 gene, complete cds//3.5e-33:519:63//Hs.80358:U52191

[19421] F-NT2RP2001137//ESTs, Highly similar to RAB GDP DISSOCIATION INHIBITOR ALPHA [Bos taurus]//6.4e-34:201:91//Hs.118470:AI336362

[19422] F-NT2RP2001149//EST//3.9e-27:244:78//Hs.162236:AA551582

[19423] F-NT2RP2001168//ESTs//0.0023:216:62//Hs.134938:AI091361

[19424] F-NT2RP2001173//Homo sapiens mRNA for KIAA0480 protein, complete cds//7.4e-114:567:96//Hs.26247:AB007949

[19425] F-NT2RP2001174//H. sapiens ZNF81 gene//0.21:256:59//Hs.104020:X68011

[19426] F-NT2RP2001196

[19427] F-NT2RP2001218//ESTs//1.1e-65:337:96//Hs.115710:AA524598

[19428] F-NT2RP2001226//Guanylate cyclase 1, soluble, alpha 2//0.030:395:59//Hs.2685:Z50053

[19429] F-NT2RP2001233//Zinc finger protein 136 (clone pHZ-20)//4.4e-58:656:70//Hs.69740:U09367

[19430] F-NT2RP2001245//EST//0.018:228:62//Hs.116798:AA633813

[19431] F-NT2RP2001268//Homo sapiens mRNA for KIAA0810 protein, partial cds//8.1e-108:514:97//Hs.7531:AB018353

[19432] F-NT2RP2001277//EST//0.42:127:66//Hs.42834:N20277

[19433] F-NT2RP2001290//Homo sapiens alpha SNAP mRNA, complete cds//1.8e-62:527:76//Hs.75848:U39412

[19434] F-NT2RP2001295//ESTs//3.4e-29:90:100//Hs.123321:AA810287

[19435] F-NT2RP2001312//ESTs//1.0:121:61//Hs.160261:A1146387

[19436] F-NT2RP2001327//Human B 12 protein mRNA, complete cds//1.9e-30:359:71//Hs.76090:M80783

[19437] F-NT2RP2001328//ESTs//5.2e-103:532:94//Hs.69476:AA628522

[19438] F-NT2RP2001347//ESTs//4.3e-28:217:82//Hs.31775:H41883

[19439] F-NT2RP2001366//ESTs, Weakly similar to ZK1058.5 [C. elegans]//1.8e-72:418:91//Hs.107039:W27244

[19440] F-NT2RP2001378

[19441] F-NT2RP2001381//ESTs//0.59:235:62//Hs.118569:AI377558

[19442] F-NT2RP2001392//Homo sapiens chromosome 5, BAC clone 203013 (LBNL H155), complete sequence//0.28:225:62//Hs.159402:AC005609

[19443] F-NT2RP2001394//ESTs//8.3e-22:133:78//Hs.109655:AI189767

[19444] F-NT2RP2001397//ESTs//0.090:265:60//Hs.152775:AA633088

[19445] F-NT2RP2001420

[19446] F-NT2RP2001423//ESTs, Weakly similar to hypothetical protein [H. sapiens]//0.030:443:59//Hs.140506:AA308018

[19447] F-NT2RP2001427//EST//1.9e-19:174:79//Hs.132635:AI032875

[19448] F-NT2RP2001436//EST//0.16:132:66//Hs.128265:AA972966

[19449] F-NT2RP2001440//Tyrosine 3-monooxygenase/tryptophan 5-monooxygenase activation protein, eta polypeptide//9.8e-56:603:72//Hs.75544:Z82248

[19450] F-NT2RP2001445//ESTs//2.2e-26:193:86//Hs.128610:AA504218

[19451] F-NT2RP2001449

[19452] F-NT2RP2001450

[19453] F-NT2RP2001467

[19454] F-NT2RP2001506

[19455] F-NT2RP2001511//ESTs, Weakly similar to F48F7.1 [C. elegans]//3.2e-83:409:98//Hs.156161:AI333779

[19456] F-NT2RP2001520//Homo sapiens mRNA for mitochondrial carrier protein ARALAR1//6.4e-138:657:97//Hs.4277:Y14494

[19457] F-NT2RP2001526//EST//1.0:180:61//Hs.136311:AA437134

[19458] F-NT2RP2001536//Homo sapiens X-ray repair cross-complementing protein 3 (XRCC3) mRNA, complete cds//5.2e-105:384:94//Hs.99742:AF035586

[19459] F-NT2RP2001560

[19460] F-NT2RP2001569//Homo sapiens mRNA, chromosome I specific transcript KIAA0488//1.4e-124:590:98//Hs.67619:AB007957

[19461] F-NT2RP2001576//Erythrocyte membrane protein band 4.9 (dematin)//0.046:521:60//Hs.75936:U28389

[19462] F-NT2RP2001581//EST//1.0:28:96//Hs.148002:AI264876

[19463] F-NT2RP2001597//Casein kinase 2, alpha prime polypeptide//0.069:165:65//Hs.82201:M55268

[19464] F-NT2RP2001601//Homo sapiens mRNA for KIAA0797 protein, partial cds//2.3e-138:647:98//Hs.27197:AB018340

[19465] F-NT2RP2001613

[19466] F-NT2RP2001628//ESTs//4.9e-45:238:96//Hs.135222:A1082229

[19467] F-NT2RP2001634//Homo sapiens alpha-catenin related protein (ACRP) mRNA, complete cds//4.9e-124:604:96//Hs.58488:U97067

[19468] F-NT2RP2001660//Homo sapiens putative 13 S Golgi transport complex 90 kD subunit brain-specific isoform mRNA, complete cds//1.3e-145:687:97//Hs.159558:AF058718

[19469] F-NT2RP2001663//Enolase 1, (alpha)//4.2e-38:372:74//Hs.675:M14328

[19470] F-NT2RP2001675//X-LINKED HELICASE IV//0.040:454:58//Hs.96264:U72936

[19471] F-NT2RP2001677//Homo sapiens mRNA for KIAA0771 protein, partial cds//0.028:285:63//Hs.6162:AB018314

[19472] F-NT2RP2001678//Homo sapiens semaphorin F homolog mRNA, complete cds//1.7e-34:328:76//Hs.27621:U52840

[19473] F-NT2RP2001699//EST//0.029-94:68//Hs.125936:AA889091

[19474] F-NT2RP2001720//ESTs, Highly similar to Rap2 interacting protein 8 [M. musculus]//1.0:173:62//Hs.107361:All 97870

[19475] F-NT2RP2001721

[19476] F-NT2RP2001740//Homo sapiens Rigui (RIGUI) mRNA, complete cds//0.58:403:57//Hs.8114:AF022991

[19477] F-NT2RP2001748//Farnesyl diphosphate synthase (farnesyl pyrophosphate synthetase, dimethylallyltranstransferase, geranyltranstransferase)//1.2e-19:151:86//Hs.77393:D 14697

[19478] F-NT2RP2001762//Homo sapiens exonuclease 1a (EXO1a) mRNA, complete cds//5.2e-34:191:96//Hs.47504:AF091754

[19479] F-NT2RP200181311EST//0.46:183:57//Hs.144096:AI032180

[19480] F-NT2RP2001839//EST//2.5e-12:86:94//Hs.133226:AI052250

[19481] F-NT2RP2001861//Homo sapiens mRNA for paraplegin//0.068:146:71//Hs.78497:Y16610

[19482] F-NT2RP2001869//Homo sapiens ZNF202 alpha (ZNF202) mRNA, complete cds//0.0013:174:62//Hs.9443:AF027219

[19483] F-NT2RP2001876//Allograft inflammatory factor 1//2.2e-08:162:671//Hs.76364:Y 14768

[19484] F-NT2RP2001883

[19485] F-NT2RP2001898//75 KD INOSITOL-1,4,5-TRISPHOSPHATE 5-PHOSPHATASE PRECURSOR//3.0e-113:633:90//Hs.142189:M74161

[19486] F-NT2RP2001900//EST//1.9e-14:132:84//Hs.130049:AA902650

[19487] F-NT2RP2001907//ESTs, Weakly similar to ankyrin 3, long form [H. sapiens]//0.37:263:62//Hs.106377:H29757

[19488] F-NT2RP2001926//ESTs//1.1e-87:430:97//Hs.133487:AI393754

[19489] F-NT2RP2001936

[19490] F-NT2RP2001943

[19491] F-NT2RP2001946//ESTs//1.0:110:69//Hs.7941:AA894797

[19492] F-NT2RP2001947

[19493] F-NT2RP2001969//ESTs//3.3e-93:433:93//Hs.9622:W44489

[19494] F-NT2RP2001976//Homo sapiens KIAA0432 mRNA, complete cds//0.20:238:63//Hs.155174:AB007892

[19495] F-NT2RP2001985//Homo sapiens mRNA for KIAA0545 protein, partial cds//7.4e-05:235:62//Hs.129943:AB011117

[19496] F-NT2RP2001991//EST//0.0027:163:68//Hs.162458:AA579196

[19497] F-NT2RP2002025//Homo sapiens mRNA for KIAA0756 protein, partial cds//3.2e-62:314:97//Hs.116604:AB018299

[19498] F-NT2RP2002032

[19499] F-NT2RP2002033//EST//1.2e-16:224:74//Hs.150409:AI003543

[19500] F-NT2RP2002041//EST//0.022:139:69//Hs.127219:AA939336

[19501] F-NT2RP2002046//ESTs//1.1e-35:218:92//Hs.130678:R51509

[19502] F-NT2RP2002047//ESTs//0.43:131:64//Hs.153939:AI284198

[19503] F-NT2RP2002058//Homo sapiens mRNA for KIAA0741 protein, complete cds//0.96:137:71//Hs.3615:AB018284

[19504] F-NT2RP2002066//Homo sapiens transmembrane receptor UNC5C (UNC5C) mRNA, complete cds//3.1e-36:509:66//Hs.44553:AF055634

[19505] F-NT2RP2002070//ESTs//0.00027:107:72//Hs.4852:R84241

[19506] F-NT2RP2002076//Homo sapiens clone 24804 mRNA sequence//3.4e-129:643:96//Hs.11039:AF052183

[19507] F-NT2RP2002078//EST//1.0:83:65//Hs.115996:AA609014

[19508] F-NT2RP2002079//ESTs//6.2e-06:326:60//Hs.134202:AI313156

[19509] F-NT2RP2002099//Homo sapiens mRNA for El B-55 kDa-associated protein//3.2e-112:533:97//Hs.155218:AJ007509

[19510] F-NT2RP2002105//Homo sapiens serine threonine kinase 11 (STK11) mRNA, complete cds//6.1e-07:408:60//Hs.122755:AF032986

[19511] F-NT2RP2002124//ESTs//1.3e-90:459:96//Hs.142053:AA224286

[19512] F-NT2RP2002137//ATPase, Ca++transporting, plasma membrane 4//0.0032:319:59//Hs.995:M83363

[19513] F-NT2RP2002154//Homo sapiens mRNA for CI7orf1 protein//1.0:149:65//Hs.100217:AJ008112

[19514] F-NT2RP2002172//EST//4.4e-14:276:67//Hs.148392:AI085314

[19515] F-NT2RP2002185//ESTs, Weakly similar to ubiquitin S6(1) [D. melanogaster]//6.8e-61:354:91//Hs.109966:C06057

[19516] F-NT2RP2002192//Human 75-kD autoantigen (PM-Sc1) mRNA, complete cds//3.7e-37:194:97//Hs.91728:M58460

[19517] F-NT2RP2002193//Homo sapiens protein inhibitor of activated STAT protein PIASx-alpha mRNA, complete cds//6.8e-15:228:67//Hs.111323:AF077954

[19518] F-NT2RP2002208

[19519] F-NT2RP2002219//ESTs//0.0059:247:61//Hs.36495:AA151628

[19520] F-NT2RP2002231//ESTs//0.29:167:6311Hs.112013:AI394318

[19521] F-NT2RP2002235//H. sapiens mRNA for PHAPI2b protein//0.86:67:82//Hs.84264:U70439

[19522] F-NT2RP2002252//Homo sapiens mRNA for KIAA0527 protein, partial cds//0.79:264:59//Hs.129748:AB011099

[19523] F-NT2RP2002256//Homo sapiens retinoic acid hydroxylase mRNA, complete cds/2.1e-51:315:89//Hs.150595:AF005418

[19524] F-NT2RP2002259//Human L-myc protein gene, complete cds//1.2e-26:343:71//Hs.92137:M19720

[19525] F-NT2RP2002270//ESTs, Weakly similar to AF-9 PROTEIN [H. sapiens]//1.3e-31:206:88//Hs.4029:Z78373

[19526] F-NT2RP2002292//ESTs//1.3e-07:153:67//Hs.13533:H23079

[19527] F-NT2RP2002312//Homo sapiens CDP-diacylglycerol synthase 2 (CDS2) mRNA, partial cds//5.0e-95:467:96//Hs.24812:AF069532

[19528] F-NT2RP2002316//ESTs//0.95:194:63//Hs.157214:AA805445

[19529] F-NT2RP2002325//Homo sapiens peroxisomal biogenesis factor (PEX11a) mRNA, complete cds//1.3e-124:640:95//Hs.31034:AB015594

[19530] F-NT2RP2002333//Protein-tyrosine kinase tyk2 (non-receptor)//1.0:257:60//Hs.75516:X54637

[19531] F-NT2RP2002373

[19532] F-NT2RP2002385//Homo sapiens synaptic glycoprotein SC2 spliced variant mRNA, complete cds//3.l e-139:673:97//Hs.109051:AF038958

[19533] F-NT2RP2002394//Human clone 23695 mRNA sequence//0.16:456:59//Hs.90798:U79289

[19534] F-NT2RP2002408//HOMEOBOX/POU DOMAIN PROTEIN RDC-1//0.00069:265:65//Hs.74095:L20433

[19535] F-NT2RP2002426//EST//4.3e-33:271:79//Hs.145743:AI269098

[19536] F-NT2RP2002439//ESTs//0.0041:129:68//Hs.146064:AA714326

[19537] F-NT2RP2002442//ESTs, Weakly similar to similar to molybdoterin biosynthesis MOEB proteins [C. elegans]//5.6e-26:169:89//Hs.25198:AA904265

[19538] F-NT2RP2002457//ESTs//0.00031:121:71//Hs.134860:AI091436

[19539] F-NT2RP2002464//Human mRNA for KIAA0086 gene, complete cds//0.0013:207:63//Hs.1560:D42045

[19540] F-NT2RP2002475//ESTs//1.0:85:75//Hs.155371 Al 139929

[19541] F-NT2RP2002479//Homo sapiens mRNA for ABC transporter 7 protein, complete cds//7.6e-125:607:96//Hs.125856:AB005289

[19542] F-NT2RP2002498

[19543] F-NT2RP2002503//Human zinc finger protein (FDZF2) mRNA, complete cds//2.2e-89:314:87//Hs.102681:U95044

[19544] F-NT2RP2002504//Homo sapiens mRNA for KIAA0791 protein, complete cds//3.8e-159:761:97//Hs.23255:AB018334

[19545] F-NT2RP2002520//RAB6, member RAS oncogene family//0.99:216:59//Hs.107563:M28212

[19546] F-NT2RP2002537

[19547] F-NT2RP2002546//EST//0.81:161:65//Hs.120562:AA741096

[19548] F-NT2RP2002549//ESTs//0.76:228:61//Hs.146313:AA594979

[19549] F-NT2RP2002591//Homo sapiens mRNA for KIAA0798 protein, complete cds//2.9e-33:285:78//Hs.159277:AB018341

[19550] F-NT2RP2002595//Adenylate cyclase 8 (brain)//0.39:377:59//Hs.2522:Z35309

[19551] F-NT2RP2002606//Human Line-1 repeat mRNA with 2 open reading frames//6.4e-24:144:95//Hs.23094:M19503

[19552] F-NT2RP2002609//Human guanine nucleotide regulatory protein (tim I) mRNA, complete cds//1.0:120:68//Hs.334:U02082

[19553] F-NT2RP2002618//H. sapiens mRNA for arginine methyltransferase, splice variant, 1262 bp//4.3e-28:460:63//Hs.20521:Y10805

[19554] F-NT2RP2002621

[19555] F-NT2RP2002643//Human p300/CBP-associated factor (P/CAF) mRNA, complete cds//0.0022:210:64//Hs.155302:U57317

[19556] F-NT2RP2002672//ESTs//7.4e-30:226:84//Hs.94694:W52493

[19557] F-NT2RP2002701//ESTs, Highly similar to HYPOTHETICAL 68.7 KD PROTEIN ZK757.1 IN CHROMOSOME III [Caenorhabditis elegans]//8.3e-56:278:97//Hs.109857:AA088385

[19558] F-NT2RP2002706//CEREBELLIN I PRECURSOR//0.00042:367:61//Hs.662:M58583

[19559] F-NT2RP2002710//Homo sapiens mRNA for KIAA0672 protein, complete cds//8.0e-42:631:65//Hs.6336:AB014572

[19560] F-NT2RP2002727

[19561] F-NT2RP2002736//ESTs//3.2e-67:336:97//Hs.86583:AA761217

[19562] F-NT2RP2002740//EST//1.0e-70:352:97//Hs.145168:AI150297

[19563] F-NT2RP2002741//Human mRNA for Neuroblastoma, complete cds//2.4e-30:628:62//Hs.87435:D89016

[19564] F-NT2RP2002750//Human mRNA for KIAA0331 gene, complete cds//2.1e-29:285:75//Hs.146395:AB002329

[19565] F-NT2RP2002752//EST//2.2e-06:126:74//Hs.159913:AA862709

[19566] F-NT2RP2002753//ESTs//4.3e-14:137:81//Hs.133478:T79705

[19567] F-NT2RP2002769//Human plectin (PLECI) mRNA, complete cds//0.017:507:57//Hs.79706:U53204

[19568] F-NT2RP2002778//EST//1.6e-57:319:93//Hs.147519:AI216407

[19569] F-NT2RP2002800

[19570] F-NT2RP2002839//ESTs//0.075:177:62//Hs.132445:AA921763

[19571] F-NT2RP2002857//ESTs//0.99:88:69//Hs.132104:AI382142

[19572] F-NT2RP2002862

[19573] F-NT2RP2002880

[19574] F-NT2RP2002891//Homo sapiens mRNA for KIAA0673 protein, partial cds//1.0:237:62//Hs.106487:AB014573

[19575] F-NT2RP2002925//ESTs//1.6e-33:318:77//Hs.16808:W22606

[19576] F-NT2RP2002928//Homo sapiens pre-mRNA splicing factor (PRP17) mRNA, complete cds//3.9e-136:623:99//Hs.116674:AF038392

[19577] F-NT2RP2002929//Homo sapiens ataxin-7 (SCA7) mRNA, complete cds//0.24:158:65//Hs.108447:AJ000517

[19578] F-NT2RP2002939

[19579] F-NT2RP2002954

[19580] F-NT2RP2002959//Human E2 ubiquitin conjugating enzyme UbCH5B (UBCH5B) mRNA, complete cds//6.4e-21:135:91//Hs.108332:U39317

[19581] F-NT2RP2002979

[19582] F-NT2RP2002980

[19583] F-NT2RP2002986//Homo sapiens actin binding protein MAYVEN mRNA, complete cds//7.8e-11:272:61//Hs.122967:AF059569

[19584] F-NT2RP2002987//ESTs//8.2e-20:99:82//Hs.138965:AI004740

[19585] F-NT2RP2002993

[19586] F-NT2RP2003000//Small inducible cytokine A5 (RANTES)//2.1e-46:353:81//Hs.155464:AF088219

[19587] F-NT2RP2003034//ESTs//1.6e-08:263:66//Hs.164048:AA811741

[19588] F-NT2RP2003073//Human clone 230971 defective mariner transposon Hsmar2 mRNA sequence//4.6e-43:381:78//Hs.159176:U92019

[19589] F-NT2RP2003099//TRICHOHYALIN//0.98:183:62//Hs.82276:L09190

[19590] F-NT2RP2003108//H. sapiens nek2 mRNA for protein kinase//0.025:185:67//Hs.153704:U 11050

[19591] F-NT2RP2003117//ESTs//7.6e-30:219:88//Hs.153408:AA416633

[19592] F-NT2RP2003121//ESTs//1.9e-13:158:73//Hs.129998:AI291379

[19593] F-NT2RP2003125//Serum response factor (c-fos serum response element-binding transcription factor)//4.5e-06:556:57//Hs.155321:J03161

[19594] F-NT2RP2003129//ESTs//0.095:218:63//Hs.70836:AA121544

[19595] F-NT2RP2003137

[19596] F-NT2RP2003157//Homo sapiens mRNA for KIAA0620 protein, partial cds//0.40:227:61//Hs.105958:AB0014520

[19597] F-NT2RP2003158//Homo sapiens mRNA for proteasome subunit p58, complete cds//5.7e-113:581:93//Hs.9736:D67025

[19598] F-NT2RP2003161//ESTs//0.0095:120:65//Hs.163532:AI424170

[19599] F-NT2RP2003164//EST//1.11:179:63//Hs.163299:AA853944

[19600] F-NT2RP2003165//Human mRNA for KIAA0355 gene, complete cds//1.0e-39:342:79//Hs.153014:AB002353

[19601] F-NT2RP2003177//ESTs//3.6e-80:414:96//Hs.4767:N91123

[19602] F-NT2RP2003194//ESTs//5.4e-20:119:95//Hs.149531:AI393223

[19603] F-NT2RP2003206//EST//0.095:182:60//Hs.88461:AA278594

[19604] F-NT2RP2003228//CDC21 HOMOLOG//9.3e-138:726:93//Hs.154443:X74794

[19605] F-NT2RP2003230//ESTs//3.0e-10:239:62//Hs.163720:AA526947

[19606] F-NT2RP2003237//Human 53K isoform of Type II phosphatidylinositol-4-phosphate 5-kinase (PIPK) mRNA, complete cds//1.3e-62:543:77//Hs.108966:U48696

[19607] F-NT2RP2003243//Homo sapiens proline and glutamic acid rich nuclear protein isoform mRNA, partial cds//0.52:200:62//Hs.102732:U88153

[19608] F-NT2RP2003265

[19609] F-NT2RP2003272//ESTs, Weakly similar to ubiquitin S6(1) [D. melanogaster]//5.8e-57:313:93//Hs.109966:C06057

[19610] F-NT2RP2003277//Homo sapiens mRNA for KIAA0625 protein, partial cds//4.9e-147:714:96//Hs.154919:AB014525

[19611] F-NT2RP2003280

[19612] F-NT2RP2003286//Homo sapiens mRNA for KIAA0587 protein, complete cds//0.0097:243:65//Hs.21862:AB011159

[19613] F-NT2RP2003293//ESTs//5.5e-28:418:70//Hs.146227:AI269334

[19614] F-NT2RP2003295//Homo sapiens RMP mRNA for RPB5 meidating protein, complete cds//2.0e-86:416:97//Hs.7943:AB006572

[19615] F-NT2RP2003297//EST//0.99:240:60//Hs.133228:AI052312

[19616] F-NT2RP2003307//ESTs//5.6e-15:137:81//Hs.90020:AA442752

[19617] F-NT2RP2003308

[19618] F-NT2RP2003329//ESTs, Highly similar to HYPOTHETICAL 54.9 KD PROTEIN C02F5.7 IN CHROMOSOME III [Caenorhabditis elegans]//1.8e-102:532:95//Hs.6092:T75227

[19619] F-NT2RP2003339//ESTs//0.13:166:63//Hs.149649:AI346765

[19620] F-NT2RP2003347//ESTs//0.96:185:59//Hs.125003:H85963

[19621] F-NT2RP2003367//Human HsLIM15 mRNA for HsLim15, complete cds//0.99:243:60//Hs.37181:D64108

[19622] F-NT2RP2003391

[19623] F-NT2RP2003393

[19624] F-NT2RP2003394//Homo sapiens Ran-GTP binding protein mRNA, partial cds//0.86:416:57//Hs.4976:AF039023

[19625] F-NT2RP2003401

[19626] F-NT2RP2003433//ESTs, Highly similar to PROTEIN TRANSPORT PROTEIN SEC61 ALPHA SUBUNIT [Canis familiaris]//3.7e-33:303:77//Hs.14038:R06800

[19627] F-NT2RP2003445//EST//1.7e-06:154:65//Hs.142843:R36893

[19628] F-NT2RP2003446//Prostaglandin receptor, ep1 subtype//0.81:273:61//Hs.159360:L22647

[19629] F-NT2RP2003456//EST//0.17:95:65//Hs.147190:A193320

[19630] F-NT2RP2003466//Homo sapiens chromosome 11, BAC CIT-HSP-311 e8 (BC269730) containing the hFEN1 gene//4.3e-53:339:78//Hs.132874:AC004770

[19631] F-NT2RP2003480//Calpain, small polypeptide//1.1e-06:154:66//Hs.74451:X04106

[19632] F-NT2RP2003499//Homo sapiens delta-catenin mRNA, complete cds//3.1e-10:481:60//Hs.80220:U96136

[19633] F-NT2RP2003506

[19634] F-NT2RP2003511//Spectrin, beta, non-erythrocytic 1110.76:189:62//Hs.107164:M96803

[19635] F-NT2RP2003513//Human mRNA for KIAA0270 gene, partial cds//8.3e-78:403:94//Hs.78482:Y16270

[19636] F-NT2RP2003517//Platelet-derived growth factor beta polypeptide (simian sarcoma viral (v-sis) oncogene homolog)//1.3e-24:151:95//Hs.1976:M12783

[19637] F-NT2RP2003522//Zinc finger protein 148 (pHZ-52)//1 .1e-17:512:60//Hs.112180:AF039019

[19638] F-NT2RP2003533//ESTs//1.8e-76:373:98//Hs.140402 Al 138765

[19639] F-NT2RP2003543//ESTs//9.3e-65:363:92//Hs.70643:AA030010

[19640] F-NT2RP2003559//ESTs//0.00037:93:77//Hs.157564:AI356513

[19641] F-NT2RP2003564//Sjogren syndrome antigen Al (52 kD, ribonucleoprotein autoantigen SS-A/Ro)//2.9e-28:664:63//Hs.1042:M62800

[19642] F-NT2RP2003567//Homo sapiens mRNA for KIAA0462 protein, partial cds//1.3e-114:541:98//Hs.129937:AB007931

[19643] F-NT2RP2003581//EST//1.0:59:76//Hs.158575:AI368947

[19644] F-NT2RP2003596//ESTs, Weakly similar to No definition line found [C. elegans]//1.3e-63:224:95//Hs.34627:AA126463

[19645] F-NT2RP2003604//Homo sapiens alpha-catenin related protein (ACRP) mRNA, complete cds//1.7e-124:585:98//Hs.58488:U97067

[19646] F-NT2RP2003629//ESTs//2.0e-103:535:95//Hs.105633:AA479166

[19647] F-NT2RP2003643//Kallmann syndrome 1 sequence//0.85:216:61//Hs.89591:M97252

[19648] F-NT2RP2003668//Homo sapiens haemopoietic progenitor homeobox HPX42B (HPX42B) mRNA, complete cds//9.4e-47:371:80//Hs.125231:AF068006

[19649] F-NT2RP2003687//EST//2.9e-14:134:80//Hs.132635:AI032875

[19650] F-NT2RP2003691//ESTs//8.2e-47:296:83//Hs.138852:AA284247

[19651] F-NT2RP2003702//DNA POLYMERASE EPSILON, CATALYTIC SUBUNIT A//0.85:190:61//Hs.18366:L09561

[19652] F-NT2RP2003704//ESTs, Weakly similar to putative p150 [H. sapiens]//5.1e-44:269:91//Hs.139757:N95271

[19653] F-NT2RP2003706//Homo sapiens mRNA for KIAA0525 protein, partial cds//8.3e-110:518:98//Hs.78494:AB011097

[19654] F-NT2RP2003713

[19655] F-NT2RP2003714//Homo sapiens hematopoietic cell derived zinc finger protein mRNA, complete cds//2.7e-56:252:83//Hs.86371:AF054180

[19656] F-NT2RP2003727//EST//0.52:277:59//Hs.69507:AA111879

[19657] F-NT2RP2003737//Human E2 ubiquitin conjugating enzyme UbCH5C (UBCH5C) mRNA, complete cds//4.0e-55:584:71//Hs.118797:U39318

[19658] F-NT2RP2003751

[19659] F-NT2RP2003760

[19660] F-NT2RP2003764

[19661] F-NT2RP2003769

[19662] F-NT2RP2003770//RETINOBLASTOMA BINDING PROTEIN 3//0.58:247:59//Hs.96055:U47677

[19663] F-NT2RP2003777

[19664] F-NT2RP2003781//ESTs, Weakly similar to C47D12.3 [C. elegans]//3.7e-63:356:92//Hs.16131:AA568689

[19665] F-NT2RP2003793//ESTs//4.8e-68:392:92//Hs.93949:AA782955

[19666] F-NT2RP2003825//ESTs//7.6e-79:232:98//Hs.14347:AA287742

[19667] F-NT2RP2003840//DNAJ PROTEIN HOMOLOG HSJ 1//0.95:300:59//Hs.77768:X63368

[19668] F-NT2RP2003857//EST//1.0:112:62//Hs.139216:AA244425

[19669] F-NT2RP2003859

[19670] F-NT2RP2003871//ESTs//2.5e-44:222:99//Hs.146295:AA935780

[19671] F-NT2RP2003885

[19672] F-NT2RP2003912//ESTs, Weakly similar to G2-SPECIFIC PROTEIN KINASE NIMA [Emericella nidulans]//2.2e-113:632:92//Hs.50072:AI378221

[19673] F-NT2RP2003952//ESTs, Moderately similar to 60S RIBOSOMAL PROTEIN L32 [H. sapiens]//1.0:146:67//Hs.156920:AA489296

[19674] F-NT2RP2003968//Homo sapiens hUBP mRNA for ubiquitin specific protease, complete cds//6.8e-30:165:96//Hs.35086:AB014458

[19675] F-NT2RP2003976//Homo sapiens mRNA for KIAA0447 protein, complete cds//7.9e-116:610:94//Hs.7302:AB007916

[19676] F-NT2RP2003981//Homo sapiens mRNA for KIAA0804 protein, partial cds//3.2e-161:783:96//Hs.7316:AB018347

[19677] F-NT2RP2003984

[19678] F-NT2RP2003986//ESTs//1.3e-39:296:83//Hs.152482:AI050036

[19679] F-NT2RP2003988//Thiopurine S-methyltransferase//7.1e-44:532:70//Hs.51124:AF019369

[19680] F-NT2RP2004013//ESTs, Highly similar to TRANSCRIPTION FACTOR BTF3 [Homo sapiens]//7.0e-104:556:93//Hs.111081:AI380378

[19681] F-NT2RP2004014

[19682] F-NT2RP2004041//Homo sapiens chromosome 19, cosmid F17127//6.0e-11:120:80//Hs.10116:AC004780

[19683] F-NT2RP2004042

[19684] F-NT2RP2004066//Homo sapiens zinc finger protein (ZnF20) mRNA, complete cds//0.80:292:61//Hs.1147:AF011573

[19685] F-NT2RP2004081//ESTs//5.7e-87:427:96//Hs.102296:AI217942

[19686] F-NT2RP2004098//Homo sapiens leucine-rich repeat protein SHOC-2 (SHOC-2) mRNA, complete cds//0.15:199:60//Hs.104315:AF054828

[19687] F-NT2RP2004124//Homo sapiens mRNA for ephrin-A2//0.98:233:59//Hs.158306:AJ007292

[19688] F-NT2RP2004142

[19689] F-NT2RP2004152//ESTs//5.7e-35:187:96//Hs.98977:AA625872

[19690] F-NT2RP2004165//Homo sapiens serine kinase SRPK2 mRNA, complete cds//0.69:176:63//Hs.78353:U88666

[19691] F-NT2RP2004170//ESTs//3.9e-05:380:61//Hs.143748:AI419966

[19692] F-NT2RP2004172//ESTs//5.8e-18:104:99//Hs.157031:AI343501

[19693] F-NT2RP2004187//ESTs, Moderately similar to zinc finger protein [H. sapiens]//1.7e-16:276:67//Hs.36779:AA626790

[19694] F-NT2RP2004194//Human p300/CBP-associated factor (P/CAF) mRNA, complete cds//1.0:124:69//Hs.155302:U57317

[19695] F-NT2RP2004196

[19696] F-NT2RP2004207//ESTs//3.8e-11:92:88//Hs.22678:AA604756

[19697] F-NT2RP2004226//ESTs, Weakly similar to teg292 protein [M. musculus]//1.8e-80:386:98//Hs.68791:AA527270

[19698] F-NT2RP2004232//Protein kinase C, mu//3.9e-36:448:67//Hs.2891:X75756

[19699] F-NT2RP2004239//ESTs//0.12:196:61//Hs.127209:AA976680

[19700] F-NT2RP2004240//EST//1 .0:134:63//Hs.104466:AA282536

[19701] F-NT2RP2004242//Homo sapiens Nck-2 (NCK2) mRNA, complete cds//0.27:313:59//Hs.129725:AF047487

[19702] F-NT2RP2004245//ESTs, Weakly similar to No definition line found [C. elegans]//8.2e-51:474:74//Hs.108990:N25951

[19703] F-NT2RP2004270//MUELLERIAN INHIBITING FACTOR PRECURSOR//1.6e-06:490:60//Hs.112432:AC005263

[19704] F-NT2RP2004300H11-PHOSPHATIDYLINOSITOL-4,5-BISPHOSPHATE PHOSPHODIESTERASE BETA 3//0.35:157:671//Hs.37121:Z37544

[19705] F-NT2RP2004316//Homo sapiens EXT-like protein 2 (EXTL2) mRNA, complete cds//1.5e-151:735:97//Hs.61152:AF000416

[19706] F-NT2RP2004321//ESTs//2.6e-64:385:881//Hs.133128:W27735

[19707] F-NT2RP2004339//ESTs//3.3e-46:338:831//Hs.145091:AA814510

[19708] F-NT2RP2004347//ESTs//1.0:184:61//Hs.134469:AA731632

[19709] F-NT2RP2004364//ESTs//2.9e-70:366:95//Hs.14928:AA256202

[19710] F-NT2RP2004365

[19711] F-NT2RP2004366//Homo sapiens mRNA for DFFRY protein, abundant transcript//0.60:295:57//Hs.39163:AF000986

[19712] F-NT2RP2004373

[19713] F-NT2RP2004389//ESTs, Highly similar to HYPOTHETICAL 70.7 KD PROTEIN F09G8.3 IN CHROMOSOME III [Caenorhabditis elegans]//3.3e-97:477:98//Hs.30490:AA146916

[19714] F-NT2RP2004392//ESTs//2.6e-61:305:98//Hs.43100:AA186588

[19715] F-NT2RP2004396//Homo sapiens BAC clone RG135C18 from 7q21/11.4e-174:875:95//Hs.152759:AC005164

[19716] F-NT2RP2004399//ESTs, Weakly similar to K01H12.1 [C. elegans]//1.2e-92:519:91//Hs.13275:AI341468

[19717] F-NT2RP2004400//EST//0.018:150:65//Hs.158739:AI375367

[19718] F-NT2RP2004412

[19719] F-NT2RP2004425//EST//0.049:145:64//Hs.160759:R36944

[19720] F-NT2RP2004463//ESTs//1.5e-40:207:98//Hs.98057:C 15687

[19721] F-NT2RP2004476//Homo sapiens TWIK-related acid-sensitive K+channel (TASK) mRNA, complete cds//0.45:208:611//Hs.24040:AF006823

[19722] F-NT2RP2004490

[19723] F-NT2RP2004512//ESTs//0.0012:330:61//Hs.70258:AI091203

[19724] F-NT2RP2004523//Human high-affinity copper uptake protein (hCTR1) mRNA, complete cds//1.3e-29:270:79//Hs.73614:U83460

[19725] F-NT2RP2004538//Homo sapiens mRNA for KIAA0591 protein, partial cds//4.6e-139:687:96//Hs.129908:AB011163

[19726] F-NT2RP2004551//ESTs//0.0075:285:62//Hs.149442:AI346891

[19727] F-NT2RP2004568//Homo sapiens antigen NY-CO-16 mRNA, complete cds//8.8e-06:291:61//Hs.132206:AF039694

[19728] F-NT2RP2004580//Small inducible cytokine A5 (RANTES)I/1.2e-45:334:82//Hs.155464:AF088219

[19729] F-NT2RP2004587//Homo sapiens mRNA for KIAA0766 protein, complete cds//0.98:136:64//Hs.28020:AB018309

[19730] F-NT2RP2004594//ESTs, Highly similar to MKR2 PROTEIN [Mus musculus]//1.0:104:68//Hs.125729:N99898

[19731] F-NT2RP2004600//Homo sapiens mRNA for Hrs, complete cds//0.20:260:60//Hs.24756:U43895

[19732] F-NT2RP2004602//ESTs, Weakly similar to !!!! ALU SUBFAMILY J WARNING ENTRY!!!! [H. sapiens]//3.0e-59:273:93//Hs.12845:N28835

[19733] F-NT2RP2004614//EST//0.99:103:68//Hs.148738:AI224908

[19734] F-NT2RP2004655//Homo sapiens mRNA for leucine rich protein//8.4e-104:496:98//Hs.5198:AJ006291

[19735] F-NT2RP2004664//Homo sapiens mRNA for KIAA0460 protein, partial cds//5.2e-155:728:98//Hs.29956:AB007929

[19736] F-NT2RP2004675//EST//0.65:151:62//Hs.130504:AI003839

[19737] F-NT2RP2004681

[19738] F-NT2RP2004689//Homo sapiens mRNA for KIAA0625 protein, partial cds//4.1e-61:327:94//Hs.154919:AB014525

[19739] F-NT2RP2004709//ESTs//2.2e-05:98:77//Hs.161898:AA286942

[19740] F-NT2RP2004710//ESTs//0.0035:76:82//Hs.108470:R93780

[19741] F-NT2RP2004736//Homo sapiens mRNA for KIAA0478 protein, complete cds//2.1e-118:582:96//Hs.4236:AB007947

[19742] F-NT2RP2004743//EST//0.11:170:64//Hs.112670:AA609242

[19743] F-NT2RP2004767//EST//1.5e-09:303:65//Hs.148374:AA948183

[19744] F-NT2RP2004768//ESTs, Highly similar to SERINE/THREONINE-PROTEIN KINASE PAK [Rattus norvegicus]//3.7e-110:548:96//Hs.85768:WI 6504

[19745] F-NT2RP2004775//Homo sapiens transcriptional regulatory protein p54 mRNA, complete cds//0.025:547:57//Hs.107474:AF045451

[19746] F-NT2RP2004791//Human endosome-associated protein (EEA 1) mRNA, complete cds//0.99:121:64//Hs.2864:L40157

[19747] F-NT2RP2004799//Homo sapiens ATP-specific succinyl-CoA synthetase beta subunit (SCS) mRNA, partial cds//4.9e-118:594:95//Hs.40820:AF058953

[19748] F-NT2RP2004802//ESTs//5.6e-16:116:91//Hs.153841:N36043

[19749] F-NT2RP2004816//Homo sapiens H beta 58 homolog mRNA, complete cds//6.8e-103:495:97//Hs.67052:AF054179

[19750] F-NT2RP2004841//Human transposon-like element mRNA//3.0e-70:519:83//Hs.84775:M23161

[19751] F-NT2RP2004861//ESTs//6.7e-89:427:98//Hs.132980:AI290258

[19752] F-NT2RP2004897//ESTs//6.4e-81:431:94//Hs.130961:N79111

[19753] F-NT2RP2004933//Homo sapiens mRNA for ZIP-kinase, complete cds//6.5e-84:418:95//Hs.25619:AB007144

[19754] F-NT2RP2004936

[19755] F-NT2RP2004959

[19756] F-NT2RP2004961//Human mRNA for KIAA0065 gene, partial cds//7.2e-26:456:66//Hs.70617:D31763

[19757] F-NT2RP2004962//EST//2.8e-15:242:69//Hs.146794:AI149478

[19758] F-NT2RP2004967//ESTs//0.0022:218:63//Hs.131987:AI239735

[19759] F-NT2RP2004978//Homo sapiens mRNA for KIAA0458 protein, complete cds//1.0:218:61//Hs.7414:AB007927

[19760] F-NT2RP2004982//Human kinesin-like spindle protein HKSP (HKSP) mRNA, complete cds//0.13:260:60//Hs.41723:U37426

[19761] F-NT2RP2004985//Human mRNA for KIAA0144 gene, complete cds//4.8e-22:431:65//Hs.8127:D63478

[19762] F-NT2RP2004999

[19763] F-NT2RP2005000//Homo sapiens hyperpolarization-activated channel I (IHI) mRNA, partial cds//0.99:269:58//Hs.124161:AF065164

[19764] F-NT2RP2005001//Homo sapiens mRNA for KIAA0615 protein, complete cds//1.9e-160:782:97//Hs.155972:AB014515

[19765] F-NT2RP2005003//H. sapiens Staf50 mRNA//9.9e-44:430:75//Hs.68054:X82200

[19766] F-NT2RP2005012//Homo sapiens SEC63 (SEC63) mRNA, complete cds//4.5e-100:501:96//Hs.31575:AF100141

[19767] F-NT2RP2005018//Arachidonate 5-lipoxygenase//1.0:232:58//Hs.89499:J03600

[19768] F-NT2RP2005020//ESTs//1.2e-06:61:100//Hs.106160:AA527433

[19769] F-NT2RP2005022//Eukaryotic translation initiation factor 3 (eIF-3) p36 subunit//0.095:271:60//Hs.139745:U39067

[19770] F-NT2RP2005031//Homo sapiens mRNA for SCP-1, complete cds//0.99:338:61//Hs.112743:D67035

[19771] F-NT2RP2005037//Homo sapiens mRNA for repressor protein, partial cds//0.098:217:60//Hs.58167:D30612

[19772] F-NT2RP2005038//Homo sapiens protease-activated receptor 4 mRNA, complete cds//0.22:498:59//Hs.137574:AF055917

[19773] F-NT2RP2005108//ESTs//0.74:145:63//Hs.116557:AA657838

[19774] F-NT2RP2005116//Homo sapiens mRNA for KIAA0664 protein, partial cds//6.4e-105:495:98//Hs.22616:AB014564

[19775] F-NT2RP2005126//H. sapiens mRNA for RNA helicase (Myc-regulated dead box protein)//9.2e-29:157:98//Hs.100555:X98743

[19776] F-NT2RP2005139//ESTs//2.6e-91:479:95//Hs.125037:W42803

[19777] F-NT2RP2005140//ESTs//0.81:308:59//Hs.27308:AA534947

[19778] F-NT2RP2005144//Homo sapiens tubby like protein 3 (TULP3) mRNA, complete cds//8.3e-91:447:96//Hs.132226:AF045583

[19779] F-NT2RP2005147

[19780] F-NT2RP2005159//ESTs//1.5e-44:242:94//Hs.109819:AI357582

[19781] F-NT2RP2005162//ESTs, Weakly similar to Y53C12A.3 [C. elegans]//0.97:80:73//Hs.107747:AI357868

[19782] F-NT2RP2005168//Homo sapiens mRNA for El B-55 kDa-associated protein//4.4e-127:633:96//Hs.155218:AJ007509

[19783] F-NT2RP2005204//H. sapiens 5T4 gene for 5T4 Oncofetal antigen//0.0034:187:66//Hs.82128:AJ012159

[19784] F-NT2RP2005227//Homo sapiens PAC clone DJ0905J08 from 7 p12-p14//1.3e-66:340:95//Hs.8173:AC005189

[19785] F-NT2RP2005239//EST//1.3e-05:215:66//Hs.129528:AA994783

[19786] F-NT2RP2005254//H. sapiens mRNA for PHAPI2b protein//1.0:101:71//Hs.84264:U70439

[19787] F-NT2RP2005270//Homo sapiens creatine transporter mRNA, complete cds//0.56:114:68//Hs.154503:U36341

[19788] F-NT2RP2005276//Homo sapiens acyl-CoA synthetase 4 (ACS4) mRNA, complete cds//1.2e-40:594:65//Hs.81452:AF030555

[19789] F-NT2RP2005287//ESTs//8.2e-07:175:70//Hs.117134:AI383932

[19790] F-NT2RP2005288//Homo sapiens RCC1-like G exchanging factor RLG mRNA, complete cds//2.3e-123:604:96//Hs.27007:AF060219

[19791] F-NT2RP2005289//Homo sapiens mRNA for XPR2 protein//1.3e-141:670:98//Hs.44766:AJ007590

[19792] F-NT2RP2005293//EST//1.9e-50:254:98//Hs.162017:AA505833

[19793] F-NT2RP2005315//Homo sapiens mRNA for KIAA0676 protein, partial cds//3.6e-97:483:96//Hs.115763:AB014576

[19794] F-NT2RP2005325//Human LIM-homeobox domain protein (hLH-2) mRNA, complete cds//2.6e-23:166:90//Hs.1569:U11701

[19795] F-NT2RP2005336//Homo sapiens snRNA activating protein complex 190 kD subunit (SNAP190) mRNA, complete cds//0.016:353:62//Hs.113265:AF032387

[19796] F-NT2RP2005344//Homo sapiens mRNA for KIAA0566 protein, partial cds//2.8e-30:456:66//Hs.44697:AB011138

[19797] F-NT2RP2005354//ESTs//0.71:192:60//Hs.39063:AA708958

[19798] F-NT2RP2005358//Homo sapiens methyl-CpG binding protein MBD3 (MBD3) mRNA, complete cds//1.4e-100:489:96//Hs.107254:AC005943

[19799] F-NT2RP2005360//ESTs//8.2e-35:190:95//Hs.163038:AA700122

[19800] F-NT2RP2005393//Homo sapiens CTG26 alternate open reading frame mRNA, complete cds//0.87:244:59//Hs.113252:U80761

[19801] F-NT2RP2005407

[19802] F-NT2RP2005436//Homo sapiens mRNA for KIAA0561 protein, partial cds//0.28:338:57//Hs.6189:AB011133

[19803] F-NT2RP2005441//ESTs//3.3e-45:238:96//Hs.5209:AA780068

[19804] F-NT2RP2005453//ESTs//2.1e-20:115:99//Hs.133087:AI091164

[19805] F-NT2RP2005457//ESTs, Highly similar to NADH-UBIQUINONE OXIDOREDUCTASE SUBUNIT B14.5B [Bos taurus]//8.5e-48:295:90//Hs.75017:AA166853

[19806] F-NT2RP2005464//ESTs//2.0e-99:495:96//Hs.3530:AA808243

[19807] F-NT2RP2005465//V-crk avian sarcoma virus CT10 oncogene homolog//0.032:176:64//Hs.16:D10656

[19808] F-NT2RP2005472//ESTs//1.4e-34:180:98//Hs.158892:AI378412

[19809] F-NT2RP2005476//Homo sapiens mRNA for KIAA0772 protein, complete cds//9.9e-48:432:77//Hs.15519:AB018315

[19810] F-NT2RP2005490//ESTs//4.5e-19:165:84//Hs.134382:AA083573

[19811] F-NT2RP2005491

[19812] F-NT2RP2005495//ESTs//5.6e-96:452:99//Hs.145417:AI084164

[19813] F-NT2RP2005496//Human mRNA for KIAA0326 gene, partial cds//4.4e-48:621:68//Hs.6833:AB002324

[19814] F-NT2RP2005498//Human protein phosphatase 2A beta subunit mRNA, complete cds//1.6e-63:503:78//Hs.7688:M64930

[19815] F-NT2RP2005501//Homo sapiens Notch3 (NOTCH3) mRNA, complete cds//0.56:139:66//Hs.8546:U97669

[19816] F-NT2RP2005509//Glutamate-cysteine ligase (gamma-glutamylcysteine synthetase), regulatory (30.8 kD)//1.0:291:59//Hs.89709:L35546

[19817] F-NT2RP2005520//Homo sapiens chromosome-associated protein-E (hCAP-E) mRNA, complete cds//1.2e-82:444:92//Hs.119023:AF092563

[19818] F-NT2RP2005525//Homo sapiens mRNA for KIAA0764 protein, complete cds//2.2e-19:112:99//Hs.6232:AB018307

[19819] F-NT2RP2005531//ESTs, Weakly similar to erythrocyte membrane protein 4.1 [H. sapiens]//3.5e-50:366:83//Hs.61833:AA036735

[19820] F-NT2RP2005539//Homo sapiens mRNA for NS l-binding protein (NS 1-BP)//9.4e-155:747:97//Hs.159597:AJ012449

[19821] F-NT2RP2005540//Homo sapiens mRNA for KIAA0494 protein, complete cds//1.9e-131:618:98//Hs.62515:AB007963

[19822] F-NT2RP2005549//ESTs, Weakly similar to HYPOTHETICAL 32.0 KD PROTEIN C16C10.10 IN CHROMOSOME III [C. elegans]//2.5e-51:292:93//Hs.105684:H24407

[19823] F-NT2RP2005555//EST//0.046:308:57//Hs.145962:AI276822

[19824] F-NT2RP2005557//ESTs//4.6e-48:382:79//Hs.125014:AI422839

[19825] F-NT2RP2005581//ESTs//6.3e-28:166:93//Hs.87803:AA034436

[19826] F-NT2RP2005600//ESTs//1.6e-40:228:93//Hs.160085:AI218627

[19827] F-NT2RP2005605//ESTs//5.7e-13:115:86//Hs.37718:H60071

[19828] F-NT2RP2005620//Homo sapiens epsin 2b mRNA, complete cds//3.1e-92:447:97//Hs.22396:AF062085

[19829] F-NT2RP2005622//ESTs//0.16:242:63//Hs.136395:AA523702

[19830] F-NT2RP2005635

[19831] F-NT2RP2005637//ESTs//0.055:96:69//Hs.105998:R90905

[19832] F-NT2RP2005640//ESTs//4.5e-16:107:92//Hs.150823:AI292145

[19833] F-NT2RP2005645//ESTs//2.7e-29:181:90//Hs.121653:AI375440

[19834] F-NT2RP20056511/Oxysterol binding protein//0.00011:122:69//Hs.143065:M86917

[19835] F-NT2RP2005654//Homo sapiens mRNA for KIAA0288 gene, complete cds//1.5e-08:351:62//Hs.91400:AB006626

[19836] F-NT2RP2005669//ESTs//0.016:185:64//Hs.97713:AA442239

[19837] F-NT2RP2005675//Homo sapiens growth suppressor related (DOC-IR) mRNA, complete cds//7.7e-96:462:98//Hs.25664:AF089814

[19838] F-NT2RP2005683//ESTs//0.83:242:62//Hs.136395:AA523702

[19839] F-NT2RP2005690//PYRROLINE-5-CARBOXYLATE REDUCTASE//2.5e-11:328:61//Hs.79217:M77836

[19840] F-NT2RP2005694

[19841] F-NT2RP2005701//Homo sapiens protein phosphatase 2A B56-epsilon (PP2A) mRNA, complete cds//0.15:496:55//Hs.79326:L76703

[19842] F-NT2RP2005712//Homo sapiens mRNA for KIAA0799 protein, partial cds//5.1e-126:599:97//Hs.61638:AB018342

[19843] F-NT2RP2005719//ESTs//0.58:326:60//Hs.157209:N57527

[19844] F-NT2RP2005722//Zinc finger protein 136 (clone pHZ-20)//8.2e-46:415:77//Hs.69740:U09367

[19845] F-NT2RP2005723//ESTs//1.0e-15:141:81//Hs.163747:AA174017

[19846] F-NT2RP2005726//EST//3.4e-15:96:95//Hs.156170:AI334191

[19847] F-NT2RP2005732//ESTs//0.99:162:62//Hs.154914:AA721086

[19848] F-NT2RP2005741//Homo sapiens chondroadherin gene, 5′flanking region and//0.80:362:58//Hs.97220:U96769

[19849] F-NT2RP2005748//H. sapiens ZNF33B gene//0.47:99:65//Hs.72991:X68688

[19850] F-NT2RP2005752//Homo sapiens TNFR-related death receptor-6 (DR6) mRNA, complete cds//2.5e-23:134:96//Hs.159651:AF068868

[19851] F-NT2RP2005753//Homo sapiens 1-1 receptor candidate protein mRNA, complete cds//4.0e-102:486:98//Hs.26285:AF082516

[19852] F-NT2RP2005763//EUKARYOTIC INITIATION FACTOR 4A-LIKE NUK-34//2.3e-05:425:56//Hs.79768:D21853

[19853] F-NT2RP2005767//Homolog 2 of Drosophila large discs//0.085:262:61//Hs.23205:X82895

[19854] F-NT2RP2005773//PYRROLINE-5-CARBOXYLATE REDUCTASE//2.0e-16:153:82//Hs.79217:M77836

[19855] F-NT2RP2005775//Human thimet oligopeptidase (THOPI) mRNA, complete cds//1.7e-42:645:64//Hs.78769:Z50115

[19856] F-NT2RP2005781//ESTs//1.1e-19:132:90//Hs.13550:AI378556

[19857] F-NT2RP2005784//Inhibitor of DNA binding 4, dominant negative helix-loop-helix protein//2.9e-06:201:67//Hs.34853:U28368

[19858] F-NT2RP2005804//ESTs//1.2e-07:62:93//Hs.125509:AA883820

[19859] F-NT2RP2005812

[19860] F-NT2RP2005815//ESTs//1.9e-32:173:97//Hs.144587:AI193595

[19861] F-NT2RP2005835

[19862] F-NT2RP2005841//Homo sapiens retinal rod Na-Ca+K exchanger (NCKXI) mRNA, complete cds//0.94:148:65//Hs.59829:AB014602

[19863] F-NT2RP2005853

[19864] F-NT2RP2005857//Homo sapiens chromosome-associated protein-C (hCAP-C) mRNA, partial cds//5.4e-176:829:98//Hs.50758:AF092564

[19865] F-NT2RP2005859//ESTs//2.1e-97:537:92//Hs.131915:W22567

[19866] F-NT2RP2005868

[19867] F-NT2RP2005886//Human putative M phase phosphoprotein 1 (MPP1) mRNA, partial cds//0.26:728:57//Hs.240:LI 6782

[19868] F-NT2RP2005890//ESTs//2.0e-97:453:100//Hs.88671:AA279943

[19869] F-NT2RP2005901//ESTs//1.99:188:64//Hs.28639:R78360

[19870] F-NT2RP2005908//ESTs//2.5e-43:325:82//Hs.152340:AA521399

[19871] F-NT2RP2005933//ESTs, Highly similar to nucleoporin p54 [R. norvegicus]//7.9e-90:326:98//Hs.156882:AA292186

[19872] F-NT2RP2005942//H. sapiens PAP mRNA//5 .1e-48:618:67//Hs.49007:X76770

[19873] F-NT2RP2005980//ESTs//2.8e-22:358:68//Hs.125446:AA883339

[19874] F-NT2RP2006023

[19875] F-NT2RP2006038//ESTs//8.0e-37:351:74//Hs.128787:AA418382

[19876] F-NT2RP2006043//Human novel homeobox mRNA for a DNA binding protein//0.51:271:59//Hs.37035:U07664

[19877] F-NT2RP2006052//ESTs//4.0e-05:233:63//Hs.124864:AA663093

[19878] F-NT2RP2006069//Human mRNA for KIAA0279 gene, partial cds//0.0082:770:58//Hs.57652:D87469

[19879] F-NT2RP2006071//ESTs//2.1e-24:396:65//Hs.104404:AI337416

[19880] F-NT2RP2006098//ESTs//0.97:125:67//Hs.97996:AA405970

[19881] F-NT2RP2006100

[19882] F-NT2RP2006103//ESTs//5.2e-11:102:83//Hs.125656:AA883135

[19883] F-NT2RP2006106//ESTs//1.6e-78:456:90//Hs.133496:AA315349

[19884] F-NT2RP2006141//ESTs//1.7e-20:262:72//Hs.128677:AA649240

[19885] F-NT2RP2006166

[19886] F-NT2RP2006184//H. sapiens p63 mRNA for transmembrane protein//1.0:94:73//Hs.74368:X69910

[19887] F-NT2RP2006186//Homo sapiens mRNA for KIAA0654 protein, partial cds//2.5e-114:567:96//Hs.109299:AB014554

[19888] F-NT2RP2006196//Homo sapiens mRNA for KIAA0772 protein, complete cds//2.0e-23:187:85//Hs.15519:AB018315

[19889] F-NT2RP2006200//ESTs//1.0:224:62//Hs.144100:AI205503

[19890] F-NT2RP2006219//H. sapiens mRNA for DGCR6 protein//4.4e-118:618:93//Hs.153910:X96484

[19891] F-NT2RP2006237

[19892] F-NT2RP2006238

[19893] F-NT2RP2006258//ESTs//0.0034:143:69//Hs.145798:AI269970

[19894] F-NT2RP2006261//H. sapiens mRNA for serine/threonine protein kinase EMK//0.019:111:71//Hs.157199:X97630

[19895] F-NT2RP2006275//Homo sapiens mRNA for serin protease with IGF-binding motif, complete cds//2.4e-05:388:60//Hs.75111:D87258

[19896] F-NT2RP2006312//Homo sapiens BAF57 (BAF57) gene, complete cds/2.1e-121:598:97//Hs.3404:AF035262

[19897] F-NT2RP2006320//ESTs, Moderately similar to maternal transcript Maid [M. musculus]//1.9e-29:151:100//Hs.36794:AI038407

[19898] F-NT2RP2006321//ESTs//7.0e-15:141:82//Hs.71241:H09371

[19899] F-NT2RP2006323//Homo sapiens mRNA for NBPhox, complete cds//4.7e-06:170:70//Hs.87202:D82344

[19900] F-NT2RP2006333//Homo sapiens TRRAP protein (TRRAP) mRNA, complete cds//0.11:43:100//Hs.6892:AF076974

[19901] F-NT2RP2006334//Homo sapiens mRNA for KIAA0602 protein, partial cds//3.1e-05:233:65//Hs.37656:AB011174

[19902] F-NT2RP2006365//ESTs//8.9e-46:268:93//Hs.58403:AA058501

[19903] F-NT2RP2006393//ESTs//1.2e-20:159:86//Hs.146018:AA280341

[19904] F-NT2RP2006436//Human homeodomain-containing protein (HANF) mRNA, complete cds//0.59:133:64//Hs.95838:AF059734

[19905] F-NT2RP2006441//ESTs//1.6e-82:400:98//Hs.143514:AI221934

[19906] F-NT2RP2006454//EST//5.2e-07:172:68//Hs.157742:AI360509

[19907] F-NT2RP2006456

[19908] F-NT2RP2006464//Homo sapiens mRNA for AND-1 protein//1.1e-149:545:98//Hs.72160:AJ006266

[19909] F-NT2RP2006467

[19910] F-NT2RP2006472

[19911] F-NT2RP2006534//ESTs//5.6e-05:192:66//Hs.135750:AA160048

[19912] F-NT2RP2006554//EST//0.60:116:65//Hs.160110:AA922134

[19913] F-NT2RP2006565//Homo sapiens secretory carrier-associated membrane protein (SCAMP) mRNA, complete cds//2.1e-115:669:90//Hs.31218:AF038966

[19914] F-NT2RP2006571//Cytochrome P450, subfamily IIA (phenobarbital-inducible), polypeptide 6/12.1e-24:476:64//Hs.73864:U22029

[19915] F-NT2RP2006573

[19916] F-NT2RP2006598//ESTs//1.3e-16:137:85//Hs.131350:AA805223

[19917] F-NT2RP3000002//ESTs//3.6e-32:215:86//Hs.155446:AA188180

[19918] F-NT2RP3000031//Homo sapiens mRNA for histone deacetylase-like protein (JM21)//1.9e-137:637:98//Hs.6764:AJ011972

[19919] F-NT2RP3000046//Homo sapiens TTF-1 interacting peptide 20 mRNA, partial cds//9.1e-07:568:61//Hs.79531:AF000560

[19920] F-NT2RP3000047

[19921] F-NT2RP3000050//Human repressor transcriptional factor (ZNF85) mRNA, complete cds//1.2e-58:633:69//Hs.37138:U35376

[19922] F-NT2RP3000055//ESTs//1.2e-07:200:66//Hs.127362:AA954961

[19923] F-NT2RP3000068

[19924] F-NT2RP3000072//EST//0.99:199:63//Hs.8469:T40769

[19925] F-NT2RP3000080//Landsteiner-Wiener blood group glycoprotein//4.8e-41:353:78//Hs.108287:L27670

[19926] F-NT2RP3000085//Propionyl-coA carboxylase alpha chain//7.9e-30:665:60//Hs.80741:X 14608

[19927] F-NT2RP3000092//EST//2.0e-15:94:97//Hs.145389:AI253140

[19928] F-NT2RP3000109//ESTs//6.8e-11:77:96//Hs.153931:AI243595 45 F-NT2RP3000134//Homo sapiens PAC clone DJO905JO8 from 7 p12-p14//5.0e-94:438:100//Hs.8173:AC005189

[19929] F-NT2RP3000142//Homo sapiens mRNA for KIAA0592 protein, partial cds//2.9e-182:849:98//Hs.13273:AB011164

[19930] F-NT2RP3000149//Human Line-1 repeat mRNA with 2 open reading frames//4.1e-5020:133:94//Hs.23094:M19503

[19931] F-NT2RP3000186//Homo sapiens mRNA, chromosome I specific transcript KIAA0492//6.6e-08:152:71//Hs.127338:AB007961

[19932] F-NT2RP3000197//ESTs//1.1e-58:301:96//Hs.87461:AA292779

[19933] F-NT2RP3000207

[19934] F-NT2RP3000220

[19935] F-NT2RP3000233//Homo sapiens actin binding protein MAYVEN mRNA, complete cds//6.6e-20:509:58//Hs.122967:AF059569

[19936] F-NT2RP3000235//ESTs//1.7e-06:220:62//Hs.42771:N26740

[19937] F-NT2RP3000247//Human mRNA for KIAA0218 gene, complete cds//6.7e-111:691:86//Hs.75863:D86972

[19938] F-NT2RP3000251//ESTs//6.7e-48:245:97//Hs.28249:AA203733

[19939] F-NT2RP3000252

[19940] F-NT2RP3000255

[19941] F-NT2RP3000267//ESTs//0.14:53:92//Hs.151586:W45568

[19942] F-NT2RP3000299//Homo sapiens enhancer of filamentation (HEFI) mRNA, complete cds//1.7e-13:214:67//Hs.80261:L43821

[19943] F-NT2RP3000312//ESTs//2.6e-50:255:97//Hs.146263:AA255863

[19944] F-NT2RP3000320//Homo sapiens proline and glutamic acid rich nuclear protein isoform mRNA, partial cds//0.0088:236:63//Hs.102732:U88153

[19945] F-NT2RP3000324//ESTs//3.8e-10:102:83//Hs.55495:AI091242

[19946] F-NT2RP3000333//ESTs, Weakly similar to mitogen-activated kinase kinase kinase 5 [H. sapiens]//0.57:189:65//Hs.46146:AA418097

[19947] F-NT2RP3000341//Human mRNA for KIAA0392 gene, partial cds//1.1e-49:442:78//Hs.40100:AB002390

[19948] F-NT2RP3000348

[19949] F-NT2RP3000350//H. sapiens mRNA for GTP-binding protein//0.93:164:59//Hs.78582:X80754

[19950] F-NT2RP3000359//GTP :AMP PHOSPHOTRANSFERASE MITOCHONDRIAL//1.8e-43:649:66//Hs.101642:X60673

[19951] F-NT2RP3000361//ESTs//2.6e-12:531:98//Hs.17672:AA305921

[19952] F-NT2RP3000366//ESTs, Highly similar to RAS-RELATED PROTEIN RAB-18A [Lymnaea stagnalis]//4.0e-116:596:95//Hs.21094:AI337016

[19953] F-NT2RP3000393//ESTs//2.6e-18:137:89//Hs.115600:AA351639

[19954] F-NT2RP3000397//ESTs//8.7e-44:355:73//Hs.121961:AA777873

[19955] F-NT2RP3000403//Homo sapiens formin binding protein 21 mRNA, complete cds//1.6e-175:841:97//Hs.28307:AF071185

[19956] F-NT2RP3000418//Human Line-1 repeat mRNA with 2 open reading frames//2.7e-33:610:65//Hs.23094:M19503

[19957] F-NT2RP3000433//ESTs//1.5e-32:246:69//Hs.120892:AA724948

[19958] F-NT2RP3000439//Adenosine A2b receptor//0.44:210:62//Hs.45743:X68487

[19959] F-NT2RP3000441

[19960] F-NT2RP3000449//ESTs//0.60:177:64//Hs.132605:AI051562

[19961] F-NT2RP3000451//Receptor protein-tyrosine kinase EDDR1 l/0.95:315:581//Hs.75562:U48705

[19962] F-NT2RP3000456//ESTs//7.5e-23:140:92//Hs.5209:AA780068

[19963] F-NT2RP3000484//EST//2.5e-06:166:67//Hs.149950:AI289822

[19964] F-NT2RP3000487//ESTs//1.2e-63:311:98//Hs.143304:AI084058

[19965] F-NT2RP3000512//Homeobox B3//3.1e-18:109:97//Hs.49931:X16667

[19966] F-NT2RP3000526//ESTs//3.7e-74:424:93//Hs.42991:N21379

[19967] F-NT2RP3000527//Human mRNA for KIAA0211 gene, complete cds//8.0e-36:706:63//Hs.79347:D86966

[19968] F-NT2RP3000531//ESTs//9.6e-75:392:95//Hs.144148:H08308

[19969] F-NT2RP3000542//ESTs//3.2e-88:448:96//Hs.30622:AA486412

[19970] F-NT2RP3000561//EST//0.88:92:64//Hs.148290:AA908404

[19971] F-NT2RP3000562//ESTs//1.1e-112:522:99//Hs.125153:AA453723

[19972] F-NT2RP3000578

[19973] F-NT2RP3000582//ESTs//2.1e-82:413:97//Hs.118544:R17277

[19974] F-NT2RP3000584

[19975] F-NT2RP3000590//ESTs//1.0:134:64//Hs.12969:N56904

[19976] F-NT2RP3000592//Paired basic amino acid cleaving system 41/3.4e-05:502:57//Hs.77234:AB001914

[19977] F-NT2RP3000596//ESTs//6.8e-71:361:95//Hs.118741:AA179811

[19978] F-NT2RP3000599//ESTs, Weakly similar to T19B10.6 [C. elegans]//9.3e-61:355:92//Hs.14622:AA693492

[19979] F-NT2RP3000603//Human mRNA for KIAA0227 gene, partial cds//6.3e-10:553:59//Hs.79170:D86980

[19980] F-NT2RP3000605//ESTs//5.8e-51:283:94//Hs.127152:AI421203

[19981] F-NT2RP3000622//ESTs//1 .7e-10:72:98//Hs.155360:AA984683

[19982] F-NT2RP3000624//64 KD AUTOANTIGEN DI /10.99:194:61//Hs.79386:X54162

[19983] F-NT2RP3000628//ESTs//0.96:221:61//Hs.131161:AI017333

[19984] F-NT2RP3000632//ESTs//4.4e-53:244:77//Hs.143010:AA767904

[19985] F-NT2RP3000644//Small inducible cytokine A5 (RANTES)I/3.0e-49:343:84//Hs.155464:AF088219

[19986] F-NT2RP3000661

[19987] F-NT2RP3000665//Homo sapiens putative transcription factor CAI50 mRNA, complete cds//0.62:305:59//Hs.13063:AF017789

[19988] F-NT2RP3000685

[19989] F-NT2RP3000690//EST//1.0:149:64//Hs.140263:AA709001

[19990] F-NT2RP3000736//ESTs//5 .3e-26:146:97//Hs.98613:D83884

[19991] F-NT2RP3000739//ESTs//0.0046:66:87//Hs.6880:W26854

[19992] F-NT2RP3000742//ESTs//5.5e-08:311:61//Hs.152224:AI369426

[19993] F-NT2RP3000753//ESTs//2.6e-63:318:97//Hs.153000:AA777765

[19994] F-NT2RP3000759//Homo sapiens mRNA for follistain-related protein (FRP), complete cds//1.6e-38:245:91//Hs.2427:D89937

[19995] F-NT2RP3000815

[19996] F-NT2RP3000825//EST//1.0:220:61//Hs.135944:N45132

[19997] F-NT2RP3000826//Homo sapiens deltex (Dx) mRNA, complete cds//0.00040:263:65//Hs.124024:AF053700

[19998] F-NT2RP3000836//ESTs, Highly similar to CLATHRIN COAT ASSEMBLY PROTEIN AP47 HOMOLOG 2 [H. sapiens]//1.1e-71:363:96//Hs.23803:AA126476

[19999] F-NT2RP3000841//EST//0.36:224:60//Hs.162094:AA524012

[20000] F-NT2RP3000845//H. sapiens mRNA for serine/threonine protein kinase EMK//6.5e-48:593:68//Hs.157199:X97630

[20001] F-NT2RP3000847//ESTs//0.0028:56:92//Hs.116406:AA209520

[20002] F-NT2RP3000850//Small inducible cytokine A5 (RANTES)//2.0e-49:323:86//Hs.155464:AF088219

[20003] F-NT2RP3000852

[20004] F-NT2RP3000859//ESTs//0.39:169:62//Hs.148948:AA699918

[20005] F-NT2RP3000865//EST//0.15:236:62//Hs.123366:AA811476

[20006] F-NT2RP3000868//Human ovarian cancer downregulated myosin heavy chain homolog (Doc1) mRNA, complete cds//6.4e-31:766:60//Hs.15432:U53445

[20007] F-NT2RP3000869//Human plectin (PLEC1) mRNA, complete cds//1.1e-13:701:60//Hs.79706:U53204

[20008] F-NT2RP3000875

[20009] F-NT2RP3000901//ESTs//8.2e-26:191:87//Hs.18793:R99101

[20010] F-NT2RP3000904//EST//2.4e-49:240:100//Hs.160842:AI348374

[20011] F-NT2RP3000917

[20012] F-NT2RP3000919//MAP KINASE PHOSPHATASE-1//0.19:340:60//Hs.109895:X68277

[20013] F-NT2RP3000968//40S RIBOSOMAL PROTEIN SI 5A//7.7e-44:351:83//Hs.2953:X84407

[20014] F-NT2RP3000980//ESTs//6.5e-10:102:81//Hs.86950:AI204212

[20015] F-NT2RP3000994//ESTs//4.1e-120:571:98//Hs.127295:AA918411

[20016] F-NT2RP3001004//ESTs//1.1e-76:438:88//Hs.144554:N92198

[20017] F-NT2RP3001007

[20018] F-NT2RP3001055//ESTs, Weakly similar to weak similarity to procollagen alpha chain 1(V) chain [C. elegans]//2.9e-121:588:98//Hs.128781:AA160707

[20019] F-NT2RP3001057//ESTs, Highly similar to ZINC FINGER PROTEIN 45 [Homo sapiens]//9.8e-54:282:97//Hs.30303:AI244662

[20020] F-NT2RP3001081//Homo sapiens RCCl-like G exchanging factor RLG mRNA, complete cds//2.7e-51:534:74//Hs.27007:AF060219

[20021] F-NT2RP3001084//Homo sapiens mRNA for KIAA0782 protein, partial cds//3.7e-16:474:60//Hs.21264:AB018325

[20022] F-NT2RP3001096//Homo sapiens mRNA for cartilage-associated protein (CASP)//4.4e-16:428:60//Hs.155481:AJ006470

[20023] F-NT2RP3001107//Human mRNA for KIAA0215 gene, complete cds//2.8e-34:712:64//Hs.82292:D86969

[20024] F-NT2RP3001109//ESTs//1.2e-67:323:99//Hs.134734:AI337050

[20025] F-NT2RP3001111

[20026] F-NT2RP30011131//EST//1.1e-33:173:99//Hs.112640:AA609088

[20027] F-NT2RP3001115//EST//1.3e-22:122:100//Hs.162990:AA688023

[20028] F-NT2RP30011116//ESTs//1.1e-15:93:98//Hs.58412:W74779

[20029] F-NT2RP3001119//Homo sapiens BC-2 protein mRNA, complete cds//0.96:258:61//Hs.12107:AF042384

[20030] F-NT2RP3001120//Zinc finger protein 136 (clone pHZ-20)//2.4e-77:687:75//Hs.69740:U09367

[20031] F-NT2RP3001126//Homo sapiens mRNA for KIAA0775 protein, complete cds//0.00018:341:60//Hs.94790:AB018318

[20032] F-NT2RP3001133//Homeo box A4//0.00011:484:59//Hs.77637:M74297

[20033] F-NT2RP3001140//Homo sapiens mRNA for KIAA0762 protein, partial cds//1.1e-180:851:98//Hs.5378:AB018305

[20034] F-NT2RP3001147

[20035] F-NT2RP3001150//PUTATIVE TACHYKININ RECEPTOR//0.97:257:59//Hs.957:M84605

[20036] F-NT2RP3001155//Homo sapiens mRNA for AND-1 protein//1.7e-191:891:981//Hs.72160:AJ006266

[20037] F-NT2RP3001176

[20038] F-NT2RP3001214//EST//0.88:218:60//Hs.161147:AI417859

[20039] F-NT2RP3001216//ESTs//1.5e-66:340:96//Hs.105994:W19981

[20040] F-NT2RP3001221//ESTs, Weakly similar to M05D6.7 [C. elegans]//1.7e-97:512:95//Hs.103816:AA130866

[20041] F-NT2RP3001232//EST//0.0016:116:71//Hs.136498:AA594010

[20042] F-NT2RP3001236//ESTs//3.7e-97:455:99//Hs.157488:AI362756

[20043] F-NT2RP3001239//MICROTUBULE-ASSOCIATED PROTEIN 1 B//1.7e-20:501:62//Hs.103042:L06237

[20044] F-NT2RP3001245//ESTs//7.1e-80:434:93//Hs.22587:AA743132 45 F-NT2RP3001253//Human prepromultimerin mRNA, complete cds//0.99:293:60//Hs.32934:U27109

[20045] F-NT2RP3001260//Homo sapiens mRNA for KIAA0726 protein, complete cds//1.2e-48:761:64//Hs.107809:AB018269

[20046] F-NT2RP3001268//Zinc finger protein 45 (a Kruppel-associated box (KRAB) domain 50 polypeptide)//1.2e-42:454:72//Hs.41728:L75847

[20047] F-NT2RP3001272//ESTs//5.0e-21:162:87//Hs.69149:AA102566

[20048] F-NT2RP3001274

[20049] F-NT2RP3001281//ESTs//2.1e-39:186:73//Hs.161662:AA836811

[20050] F-NT2RP3001297//Human mRNA for KIAA0281 gene, complete cds//2.4e-48:544:69//Hs.31463:D87457

[20051] F-NT2RP3001307//Human homeodomain protein (Prox1) mRNA, complete cds//0.72:151:68//Hs.159437:U44060

[20052] F-NT2RP3001318//Amylo-1,6-glucosidase, 4-alpha-glucanotransferase (glycogen debranching enzyme, glycogen storage disease type III)//0.012:522:56//Hs.904:U84010

[20053] F-NT2RP3001325//ESTs//2.9e-80:396:97//Hs.99838:AA204731

[20054] F-NT2RP3001338//Human mRNA for KIAA0211 gene, complete cds//1.6e-30:345:73//Hs.79347:D86966

[20055] F-NT2RP3001339//Homo sapiens mRNA for KIAA0451 protein, complete cds//6.3e-67:559:80//Hs.18586:AB007920

[20056] F-NT2RP3001340//Homo sapiens hyperpolarization-activated channel I (IHI) mRNA, partial cds//0.00019:473:61//Hs.124161:AF065164

[20057] F-NT2RP3001355//ESTs, Weakly similar to ADP, ATP CARRIER PROTEIN, LIVER ISOFORM T2 [H. sapiens]//1.1e-81:421:96//Hs.32508:H29831

[20058] F-NT2RP3001356//Homo sapiens Nck-2 (NCK2) mRNA, complete cds//0.15:313:60//Hs.129725:AF047487

[20059] F-NT2RP3001374//ESTs//0.98:269:59//Hs.125303:AA873022

[20060] F-NT2RP3001383//Homo sapiens mRNA for Sck, partial cds//0.73:173:65//Hs.30965:AB001451

[20061] F-NT2RP3001384//Homa sapiens mRNA for HRIHFB2018, partial cds//2.1e-158:743:98//Hs.146214:AB015332

[20062] F-NT2RP3001392//ESTs//0.013:246:63//Hs.95111:AA514595

[20063] F-NT2RP3001396//ESTs//5.6e-116:141:85//Hs.97664:H110783

[20064] F-NT2RP3001398//Zinc finger protein 45 (a Kruppel-associated box (KRAB) domain polypeptide)//1.0e-05:189:66//Hs.41728:L75847

[20065] F-NT2RP3001399//Homo sapiens mitochondrial citrate transport protein (CTP) mRNA, 3′ end//0.77:132:66//Hs.11024:L77567

[20066] F-NT2RP3001407//EST//0.015:167:65//Hs.42217:H96658

[20067] F-NT2RP3001420//ESTs//1.0:214:60//Hs.91226:AA649047

[20068] F-NT2RP3001426

[20069] F-NT2RP3001427

[20070] F-NT2RP3001428//Neurotrophic tyrosine kinase, receptor, type 1//1.8e-73:431:91//Hs.85844:X66397

[20071] F-NT2RP3001432//ESTs, Moderately similar to !!!! ALU SUBFAMILY SX WARNING ENTRY !!!! [H. sapiens]//6.9e-05:195:65//Hs.115868:AA568393

[20072] F-NT2RP3001447

[20073] F-NT2RP3001449//RYANODINE RECEPTOR, SKELETAL MUSCLE//0.00033:187:68//Hs.89631:U48508

[20074] F-NT2RP3001453//ESTs//0.020:260:60//Hs.97882:AA203212

[20075] F-NT2RP3001457//ESTs//9.4e-29:165:94//Hs.71749:AA988323

[20076] F-NT2RP3001459

[20077] F-NT2RP3001472//Homo sapiens Sox-like transcriptional factor mRNA, complete cds//4.2e-10:168:70//Hs.32317:AF072836

[20078] F-NT2RP3001490//ESTs//3.1e-35:198:94//Hs.163665:AA250877

[20079] F-NT2RP3001495//ESTs//2.5e-47:239:98//Hs.128045:AA970231

[20080] F-NT2RP3001497//Homo sapiens multiple membrane spanning receptor TRC8 (TRC8) mRNA, complete cds//2.8e-172:804:98//Hs.28285:AF064801

[20081] F-NT2RP3001527//Human lymphoid-specific SP100 homolog (LYSP100-B) mRNA, complete cds//9.4e-139:743:91//Hs.85283:U36500

[20082] F-NT2RP3001529//ESTs, Moderately similar to topoisomerase I C-terminal fragment [H. sapiens]//0.28:224:65//Hs.105912:AI431328

[20083] F-NT2RP3001538//ESTs//4.1e-05:139:71//Hs.148425:A1198074

[20084] F-NT2RP3001554//Microtubule-associated protein 1 A//9.8e-16:327:64//Hs.147918:U38291

[20085] F-NT2RP3001580//Insulin-like growth factor binding protein 2//1.9e-06:426:59//Hs.162:X16302

[20086] F-NT2RP3001587//Guanine nucleotide binding protein (G protein), alpha 11 (Gq class)//0.049:185:65//Hs.1686:M69013

[20087] F-NT2RP3001589//Human mRNA for tryptophan hydroxylase (EC 1.14.16.4)//9.6e-51:345:82//Hs.144563:AF057280

[20088] F-NT2RP3001607//ESTs//1.3e-07:299:63//Hs.43231:N22688

[20089] F-NT2RP3001608//ESTs//5.7e-14:85:98//Hs.161133:AI091349

[20090] F-NT2RP3001621//ESTs//1.6e-106:310:96//Hs.128505:AA306435

[20091] F-NT2RP3001629

[20092] F-NT2RP3001634//Homo sapiens TRIADI type I mRNA, complete cds//1.4e-62:276:97//Hs.9899:AF099149

[20093] F-NT2RP3001642//ESTs//1.0:148:63//Hs.159495:T70173

[20094] F-NT2RP3001646

[20095] F-NT2RP3001671//Homo sapiens mRNA for NS1-binding protein (NS1-BP)//1.1e-172:816:98//Hs.159597:AJ012449

[20096] F-NT2RP3001672//ESTs//5.0e-116:138:82//Hs.151864:T69027

[20097] F-NT2RP3001676//ESTs, Highly similar to GTP-BINDING PROTEIN LEPA [Pseudomonas fluorescens]//9.0e-53:375:85//Hs.41127:AA555184

[20098] F-NT2RP3001678//Human mRNA for KIAA0233 gene, complete cds//0.21:321:65//Hs.79077:D87071

[20099] F-NT2RP3001679//ESTs, Highly similar to HYPOTHETICAL 68.7 KD PROTEIN ZK757.1 IN CHROMOSOME III [Caenorhabditis elegans]//4.0e-111:518:99//Hs.20364:AI420022

[20100] F-NT2RP3001688//Homo sapiens mRNA expressed in thyroid gland//1.0:230:63//Hs.7486:D83198

[20101] F-NT2RP3001690//EST//0.15:291:59//Hs.162336:AA564329

[20102] F-NT2RP3001698//ESTs//0.24:134:69//Hs.129551:AA885219

[20103] F-NT2RP3001708//ESTs, Weakly similar to TWISTED GASTRULATION PROTEIN PRECURSOR [D. melanogaster]//1.4e-31:191:94//Hs.131279:AA486291

[20104] F-NT2RP3001712//Human SLP-76 associated protein mRNA, complete cds//0.41:259:59//Hs.58435:AF001862

[20105] F-NT2RP3001716//ESTs, Highly similar to BONE MORPHOGENETIC PROTEIN 1 PRECURSOR [Mus musculus]//7.6e-159:747:98//Hs.6823:W 18181

[20106] F-NT2RP3001724//Homo sapiens chromodomain-helicase-DNA-binding protein mRNA, complete cds//4.4e-161:565:97//Hs.159273:AF054177

[20107] F-NT2RP3001727//ESTs, Highly similar to HYPOTHETICAL 37.7 KD PROTEIN ZK686.3 IN CHROMOSOME III [Caenorhabditis elegans]//3.5e-116:554:98//Hs.144332:AA046836

[20108] F-NT2RP3001730//Human mRNA for KIAA0128 gene, partial cds//1.3e-105:811:78//Hs.90998:D50918

[20109] F-NT2RP3001739

[20110] F-NT2RP3001752//ELK1, member of ETS oncogene family//7.2e-35:299:80//Hs.116549:AL009172

[20111] F-NT2RP3001753//Human putative cerebral cortex transcriptional regulator T-Brain-1 (Thr-1) mRNA, complete cds//0.10:528:56//Hs.22138:U49250

[20112] F-NT2RP3001764//Human protein-tyrosine phosphatase mRNA, complete cds//2.4e-47:725:64//Hs.41688:U27193

[20113] F-NT2RP3001777//Human eukaryotic translation initiation factor (eIF3) mRNA, complete cds//0.42:198:61//Hs.57783:U78525

[20114] F-NT2RP3001782//Homo sapiens mRNA for KIAA0459 protein, partial cds//9.1e-153:710:98//Hs.28169:AB007928

[20115] F-NT2RP3001792//Human M4 protein mRNA, complete cds//5.6e-27:358:69//Hs.79024:L03532

[20116] F-NT2RP3001799//ESTs//0.0088:178:64//Hs.134938:AI091361

[20117] F-NT2RP3001819//Collagen, type IX, alpha 3//0.026:530:58//Hs.53563:L41162

[20118] F-NT2RP3001844//Homo sapiens mRNA for hair keratin acidic 3-II//0.90:379:58//Hs.32950:X82634

[20119] F-NT2RP3001854//ESTs//1.5e-100:501:96//Hs.72217:AA166729

[20120] F-NT2RP3001855//Human homeobox-containing protein mRNA, complete cds//7.8e-35:481:67//Hs.158225:U68727

[20121] F-NT2RP3001857//ESTs//2.7e-85:414:98//Hs.151001:AA564706

[20122] F-NT2RP3001896//ESTs, Weakly similar to F20D12.3 gene product [C. elegans]//2.9e-94:452:98//Hs.54952:AA872675

[20123] F-NT2RP3001898//Homo sapiens mRNA for synaptogyrin 1a//0.65:245:61//Hs.6139:AL022326

[20124] F-NT2RP3001915//ESTs//1.1e-83:397:99//Hs.157125:AA723896

[20125] F-NT2RP3001926//EST//0.53:362:57//Hs.127917:AA969185

[20126] F-NT2RP3001929//ESTs//7.4e-16:141:82//Hs.138852:AA284247

[20127] F-NT2RP3001931

[20128] F-NT2RP3001938//Cyclin-dependent kinase inhibitor IC (p57, Kip2)//0.0022:268:61//Hs.106070:U22398

[20129] F-NT2RP3001943//Homo sapiens mRNA for KIAA0675 protein, complete cds//5.8e-167:815:96//Hs.15869:AB014575

[20130] F-NT2RP3001944//ESTs//0.00052:60:91//Hs.131731:AI339335

[20131] F-NT2RP3001969

[20132] F-NT2RP3001989//EST//0.00016:263:63//Hs.144096:AI032180

[20133] F-NT2RP3002002//Small inducible cytokine A5 (RANTES)//4.0e-61:293:83//Hs.155464:AF088219

[20134] F-NT2RP3002004//H. sapiens mRNA for FAST kinase//5.2e-28:104:100//Hs.75087:X86779

[20135] F-NT2RP3002007//ESTs//0.025:88:69//Hs.163310:AA856946

[20136] F-NT2RP3002014//ESTs//4.8e-70:291:98//Hs.123693:AA283821

[20137] F-NT2RP3002033//Homo sapiens mRNA for HYA22, complete cds//0.021:175:67//Hs.147189:D88153

[20138] F-NT2RP3002045//ESTs, Highly similar to ALPHA-ADAPTIN [M. musculus]//3.8e-48:353:81//Hs.127507:AA993745

[20139] F-NT2RP3002054//ESTs, Weakly similar to KIAA0319 [H. sapiens]//3.0e-25:212:83//Hs.71622:AA195155

[20140] F-NT2RP3002056//ESTs, Highly similar to RETINOBLASTOMA BINDING PROTEIN 1 [Homo sapiens]//4.2e-82:407:97//Hs.131888:AI091806

[20141] F-NT2RP3002057//Human Line-1 repeat mRNA with 2 open reading frames//3.7e-21:168:85//Hs.23094:M19503

[20142] F-NT2RP3002062//EST//0.46:198:62//Hs.157711:AI359710

[20143] F-NT2RP3002063//Membrane metallo-endopeptidase (neutral endopeptidase, enkephalinase, CALLA, CD10)//0.91:194:65//Hs.1298:J03779

[20144] F-NT2RP3002081

[20145] F-NT2RP3002097//Homo sapiens proline and glutamic acid rich nuclear protein isoform mRNA, partial cds//0.073:297:61//Hs.102732:U88153

[20146] F-NT2RP3002102//EST//2.8e-16:237:67//Hs.136255:T70256

[20147] F-NT2RP3002108

[20148] F-NT2RP3002142//ESTs//4.3e-138:654:98//Hs.5729:AA306018

[20149] F-NT2RP3002146//H. sapiens mRNA for RanGTPase activating protein 1110.27:276:62//Hs.5923:X82260

[20150] F-NT2RP3002147//Human DNA sequence from clone 431H6 on chromosome 16. Contains a novel gene with some homology to mouse HNI (Hematological and Neurological expressed sequence 1) downstream of a putative CpG island. Contains ESTs and GSSs//6.0e-51:204:99//Hs.107256:AL031009

[20151] F-NT2RP3002151//G1 to S phase transition 1//2.6e-37:292:81//Hs.2707:X17644

[20152] F-NT2RP3002163//Human DNA fragmentation factor-45 mRNA, complete cds//0.46:224:60//Hs.155344:U91985

[20153] F-NT2RP3002165//ESTs, Highly similar to TRANSCRIPTIONAL REGULATOR PROTEIN HCNGP [Mus musculus]//3.0e-61:340:93//Hs.11379:AA594140

[20154] F-NT2RP3002166//EST//0.039:114:69//Hs.140335:AA737046

[20155] F-NT2RP3002173//ESTs, Weakly similar to HYPOTHETICAL 92.1 KD PROTEIN ZK1098.3 IN CHROMOSOME III [Caenorhabditis elegans]//4.0e-39:255:72//Hs.141429:AA631915

[20156] F-NT2RP3002181//ESTs//3.6e-11:518:99//Hs.128505:AA306435

[20157] F-NT2RP3002244//Myosin, heavy polypeptide 6, cardiac muscle, alpha (cardiomyopathy, hypertrophic 1)110.98:242:57//Hs.114001:Z20656

[20158] F-NT2RP3002248

[20159] F-NT2RP3002255//ESTs//8.4e-19:227:75//Hs.122817:AA772261

[20160] F-NT2RP3002273//Homo sapiens homeobox protein A10 (HOXA10) gene, complete cds//0.42:189:62//Hs.110637:AC004080

[20161] F-NT2RP3002276//ESTs//8.2e-97:463:98//Hs.45120:AA225139

[20162] F-NT2RP3002303//ESTs//7.1e-10:96:87//Hs.135700:AA989386

[20163] F-NT2RP3002304//Protein phosphatase 1, catalytic subunit, beta isoform//1.3e-05:496:60//Hs.21537:X80910

[20164] F-NT2RP3002330//ESTs//1.3e-81:482:90//Hs.121460:AA744871

[20165] F-NT2RP3002343//Homo sapiens potassium channel mRNA, complete cds//0.30:462:56//Hs.143624:AF033383

[20166] F-NT2RP3002351//NAD-DEPENDENT METHYLENETETRAHYDROFOLATE DEHYDROGENASE//1.6e-65:588:75//Hs.154672:X16396

[20167] F-NT2RP3002352//Homo sapiens mRNA for protein encoded by cxorf5 (71-7A) gene//4.2e-166:770:98//Hs.6483:Y16355

[20168] F-NT2RP3002377//Homo sapiens mRNA for KIAA0788 protein, partial cds//7.5e-161:911:89//Hs.2397:Z70200

[20169] F-NT2RP3002399

[20170] F-NT2RP3002402//ESTs, Weakly similar to F02E9.6 [C. elegans]//4.3e-41:233:94//Hs.22880:AA056274

[20171] F-NT2RP3002455//Homo sapiens mRNA for KIAA0678 protein, partial cds//3.9e-140:649:99//Hs.12707:AB014578

[20172] F-NT2RP3002484//ESTs//0.95:166:63//Hs.149993:AI291310

[20173] F-NT2RP3002501//ESTs//0.92:43:90//Hs.119314:AA432108

[20174] F-NT2RP3002512//Homo sapiens mRNA for KIAA0466 protein, partial cds//1.0:173:61//Hs.81234:AB007935

[20175] F-NT2RP3002529//Human vacuolar protein sorting homolog h-vps45 mRNA, complete cds//4.4e-146:763:93//Hs.57738:U35246

[20176] F-NT2RP3002545//Homo sapiens mRNA for KIAA0729 protein, partial cds//5.9e-180:833:98//Hs.19542:AB018272

[20177] F-NT2RP3002549//ESTs, Weakly similar to POLYPOSIS LOCUS PROTEIN 1 [H. sapiens]//1.3e-42:510:70//Hs.96759:AA469984

[20178] F-NT2RP3002566//Carnitine acetyltransferase//0.032:226:62//Hs.12068:X78706

[20179] F-NT2RP3002587//EST//4.8e-31:330:74//Hs.139415:AA426054

[20180] F-NT2RP3002590//EST//1.3e-40:202:100//Hs.144716:AI187919

[20181] F-NT2RP3002602//RYANODINE RECEPTOR, SKELETAL MUSCLE/11.3e-06:280:63//Hs.89631:U48508

[20182] F-NT2RP3002603

[20183] F-NT2RP3002628//Homo sapiens mRNA for MSJ-1, complete cds//1.5e-05:264:61//Hs.3845:AB014888

[20184] F-NT2RP3002631//Homo sapiens ADAM 21 mRNA, partial cds//0.97:320:58//Hs.121287:AF029900

[20185] F-NT2RP3002650//Homo sapiens mRNA for cartilage-associated protein (CASP)//2.6e-13:441:63//Hs.155481:AJ006470

[20186] F-NT2RP3002659//Human TAR RNA loop binding protein (TRP-185) mRNA, complete cds//1.7e-05:615:58//Hs.151518:U38847

[20187] F-NT2RP3002660//ESTs//2.9e-32:164:100//Hs.152982:AA584308

[20188] F-NT2RP3002663//ESTs, Highly similar to OXYSTEROL-BINDING PROTEIN [Homo sapiens]//4.1e-38:493:70//Hs.41086:AI337400

[20189] F-NT2RP3002671//ESTs//3.7e-05:288:59//Hs.161359:AI421991

[20190] F-NT2RP3002682//ESTs, Weakly similar to F17C11.8 [C. elegans]//1.6e-61:294:100//Hs.128750:AI367584

[20191] F-NT2RP3002687

[20192] F-NT2RP3002688//EST//1.0:312:58//Hs.156800:AI352200

[20193] F-NT2RP3002701//EST//0.00083:55:87//Hs.159750:AI393657

[20194] F-NT2RP3002713//ESTs//0.93:229:61//Hs.150459:AI279514

[20195] F-NT2RP3002763//ESTs//1.7e-97:419:96//Hs.121593:W86291

[20196] F-NT2RP3002770//Homo sapiens G protein-coupled receptor kinase 6 (GRK6) gene, partial cds//0.91:161:62//Hs.129736:AF040753

[20197] F-NT2RP3002785

[20198] F-NT2RP3002799//EST//1.7e-17:199:73//Hs.118694:AA148713

[20199] F-NT2RP3002810//ESTs, Weakly similar to KIAA0062 [H. sapiens]//1.4e-76:423:93//Hs.41068:AA844350

[20200] F-NT2RP3002818//Homo sapiens jerky gene product homolog mRNA, complete cds//2.2e-55:615:70//Hs.105940:AF004715

[20201] F-NT2RP3002861//ESTs//1.1e-88:468:94//Hs.159821:AA524070

[20202] F-NT2RP3002869//ESTs//3.4e-23:132:97//Hs.148873:T33582

[20203] F-NT2RP3002876//Homo sapiens mRNA for B120, complete cds//2.7e-90:557:88//Hs.123090:AB001895

[20204] F-NT2RP3002877//ESTs//1.1e-19:160:84//Hs.118273:AA626040

[20205] F-NT2RP3002909//Homo sapiens mRNA for KIAA0771 protein, partial cds//1.8e-181:853:98//Hs.6162:AB018314

[20206] F-NT2RP3002911//ESTs//2.8e-07:160:70//Hs.140402:AI138765

[20207] F-NT2RP3002948//ESTs, Highly similar to RING CANAL PROTEIN [Drosophila melanogaster]//1.4e-133:645:97//Hs.3826:U69560

[20208] F-NT2RP3002953//Homo sapiens mRNA for KIAA0588 protein, complete cds//5.2e-13:594:57//Hs.74599:AB011160

[20209] F-NT2RP3002955//Homo sapiens mRNA for KIAA0719 protein, complete cds//0.76:412:57//Hs.21198:AB018262

[20210] F-NT2RP3002969//EST//3.7e-50:272:94//Hs.162331:AA563870

[20211] F-NT2RP3002972//Homo sapiens PAC clone DJ130HI6 from 22q12.1-qter//5.1e-35:361:75//Hs.8003:AC004997

[20212] F-NT2RP3002978//ESTs//2.8e-46:253:95//Hs.151924:AI287703

[20213] F-NT2RP3002985//Human TFIIB related factor hBRF (HBRF) mRNA, complete cds//0.071:550:58//Hs.32935:U28838

[20214] F-NT2RP3002988//EST//0.0016:180:63//Hs.147632:AI218308

[20215] F-NT2RP3003008//Human DNA-binding protein (HRCI) mRNA, complete cds//0.59:201:63//Hs.72925:M91083

[20216] F-NT2RP3003032//ESTs//9.1e-40:241:92//Hs.113363:C06446

[20217] F-NT2RP3003059//ESTs//0.0015:399:58//Hs.136895:AA897749

[20218] F-NT2RP3003061//Ankyrin 1, erythrocytic//4.5e-14:633:59//Hs.1242:X 16609

[20219] F-NT2RP3003068//EST//0.00014:80:83//Hs.121993:AA777928

[20220] F-NT2RP3003071//ESTs//1.1e-62:315:98//Hs.16141:W56079

[20221] F-NT2RP3003078

[20222] F-NT2RP3003101

[20223] F-NT2RP3003121//EST, Moderately similar to !!!! ALU SUBFAMILY SC WARNING ENTRY !!!! [H. sapiens]//0.98:88:68//Hs.99715:AA292700

[20224] F-NT2RP3003133//EST//8.0e-17:218:68//Hs.134815:AI090740

[20225] F-NT2RP3003138//Homo sapiens vasopressin-activated calcium mobilizing putative receptor protein (VACM-1) mRNA, complete cds//0.013:438:57//Hs.101299 AF017061

[20226] F-NT2RP3003139//ESTs//0.020:260:61//Hs.59142:W88975

[20227] F-NT2RP3003145//Homo sapiens aortic carboxypeptidase-like protein ACLP mRNA, complete cds//2.2e-20:430:63//Hs.118397:AF053944

[20228] F-NT2RP3003150

[20229] F-NT2RP3003157//Human repressor transcriptional factor (ZNF85) mRNA, complete cds//2.0e-72:894:68//Hs.37138:U35376

[20230] F-NT2RP3003185//Homo sapiens mRNA for KIAA0521 protein, partial cds//0.045:410:59//Hs.6150:AB011093

[20231] F-NT2RP3003193//Zinc finger protein 10 (KOX I)//2.4e-74:737:71//Hs.2479:X78933

[20232] F-NT2RP3003197//ESTs//1.8e-24:130:100//Hs.162504:AA668211

[20233] F-NT2RP3003203//ESTs//3.5e-30:232:82//Hs.6880:W26854

[20234] F-NT2RP3003204//ESTs//3.1e-109:524:98//Hs.152982:AA584308

[20235] F-NT2RP3003210//ESTs//3.6e-16:113:91//Hs.121030:AA625325

[20236] F-NT2RP3003212//EST//1.0e-52:500:74//Hs.161635:W22525

[20237] F-NT2RP3003230//Human mRNA for actin binding protein p57, complete cds//6.0e-55:587:70//Hs.109606:D44497

[20238] F-NT2RP3003242//Homo sapiens stanniocalcin-2 (STC-2) mRNA, complete cds//1.2e-129:617:98//Hs.155223:AF055460

[20239] F-NT2RP3003251//H. sapiens Staf50 mRNA//1.1e-68:651:76//Hs.68054:X82200

[20240] F-NT2RP3003264//Human bullous 230 kDa pemphigoid antigen (BPAG1) mRNA, complete cds//0.069:382:59//Hs.620:M69225

[20241] F-NT2RP3003278//Homo sapiens hook2 protein (HOOK2) mRNA, complete cds//0.98:261:59//Hs.30792:AF044924

[20242] F-NT2RP3003282//Homo sapiens dynamin (DNM) mRNA, complete cds//4.2e-133:694:93//Hs.11702:L36983

[20243] F-NT2RP3003290//Human mRNA for RTP, complete cds//6.3e-66:662:71//Hs.75789:D87953

[20244] F-NT2RP3003301//EST//1.0:58:74//Hs.158575:A1368947

[20245] F-NT2RP3003302//Human Line-1 repeat mRNA with 2 open reading frames//3.1e-91:681:80//Hs.23094:M19503

[20246] F-NT2RP300331//ESTs//0.95:308:59//Hs.27308:AA534947

[20247] F-NT2RP3003313//ESTs//0.0016:345:61//Hs.143304:AI084058

[20248] F-NT2RP3003327//H. sapiens Staf50 mRNA//8.0e-31:253:67//Hs.68054:X82200

[20249] F-NT2RP3003330

[20250] F-NT2RP3003344

[20251] F-NT2RP3003346//H. sapiens mRNA for delta 4-3-oxosteroid 5 beta-reductase/1.2e-42:644:66//Hs.2638:Z28339

[20252] F-NT2RP3003353//Breast cancer 1, early onset//0.30:145:67//Hs.66746:L78833

[20253] F-NT2RP3003377//Human mRNA for cadherin-15, complete cds//0.019:416:60//Hs.148090:D83542

[20254] F-NT2RP3003384//ESTs//1.1e-65:346:96//Hs.35012:R92791

[20255] F-NT2RP3003385//ESTs, Highly similar to SKD3 [M. musculus]//7.0e-74:384:96//Hs.21263:H16363

[20256] F-NT2RP3003403//ESTs//4.9e-12:335:63//Hs.87258:AA463850

[20257] F-NT2RP3003409//Human DHHC-domain-containing cysteine-rich protein mRNA, complete cds//3.2e-22:430:63//Hs.113272:U90653

[20258] F-NT2RP3003411//Human metallothionein-le gene (hMT-1e)//0.99:116:62//Hs.74170:M10942

[20259] F-NT2RP3003427//ESTs//0.24:447:61//Hs.160907:AI422830

[20260] F-NT2RP3003433//Protein tyrosine phosphatase, non-receptor type 12//1.0:243:61//Hs.62:M93425

[20261] F-NT2RP3003464//Homo sapiens rab3-GAP regulatory domain mRNA, complete cds//1.7e-182:853:98//Hs.14934:AF004828

[20262] F-NT2RP3003490//Homo sapiens mRNA for KIAA0725 protein, partial cds//5.2e-175:826:98//Hs.26450:AB018268

[20263] F-NT2RP3003491//Ryanodine receptor 2 (cardiac)//1.0:148:66//Hs.90821:X98330

[20264] F-NT2RP3003500//ESTs//0.86:211:62//Hs.136037:AA013302

[20265] F-NT2RP3003543//Homo sapiens clone 23790 unknown protein mRNA, complete cds//0.64:626:58//Hs.150828:AF038169

[20266] F-NT2RP3003552

[20267] F-NT2RP3003555//ESTs//1.4e-12:81:98//Hs.144487:AI418322

[20268] F-NT2RP3003564//EST//4.5e-08:186:69//Hs.116769:AA630365

[20269] F-NT2RP3003572//EST//0.27:105:69//Hs.162134:AA526311

[20270] F-NT2RP3003576//ESTs//1.2e-57:277:84//Hs.138852:AA284247

[20271] F-NT2RP3003589//RAS-RELATED PROTEIN RAB-8//6.3e-38:373:73//Hs.123109:X56741

[20272] F-NT2RP3003621//HEPATOCYTE GROWTH FACTOR ACTIVATOR PRECURSOR//8.0e-09:564:61//Hs.104:D14012

[20273] F-NT2RP3003625

[20274] F-NT2RP3003656

[20275] F-NT2RP3003659

[20276] F-NT2RP3003665//ESTs//0.015:221:62//Hs.153705:AA527586

[20277] F-NT2RP3003672//ESTs//0.70:351:5711Hs.27633:N76184

[20278] F-NT2RP3003680//Human Bcl2, p53 binding protein Bbp/53BP2 (BBP/53BP2) mRNA, complete cds//0.013:190:63//Hs.44585:U58334

[20279] F-NT2RP3003686//Homo sapiens clone 24519 unknown mRNA, partial cds//0.69:246:62//Hs.118463:AF055000

[20280] F-NT2RP3003701//EST//0.93:79:69//Hs.145285:AI249848

[20281] F-NT2RP3003716//Homo sapiens KIAA0405 mRNA, complete cds//8.3e-24:478:61//Hs.48998:AB007865

[20282] F-NT2RP3003726//Homo sapiens mRNA for KIAA0757 protein, complete cds//7.4e-150:700:98//Hs.48513:AB018300

[20283] F-NT2RP3003746

[20284] F-NT2RP3003795//ESTs//7.1e-20:228:74//Hs.159571:AA454230

[20285] F-NT2RP3003799

[20286] F-NT2RP3003800//Gardner-Rasheed feline sarcoma viral (v-fgr) oncogene homolog//4.7e-41:432:73//Hs.1422:M19722

[20287] F-NT2RP3003805//Myosin, heavy polypeptide 6, cardiac muscle, alpha (cardiomyopathy, hypertrophic l)//0.98:242:57//Hs.114001:Z20656

[20288] F-NT2RP3003809//Human transcription factor, forkhead related activator 4 (FREAC-4) mRNA, complete cds//5.1e-07:624:59//Hs.96028:AF042832

[20289] F-NT2RP3003819//Human ring zinc-finger protein (ZNF127-Xp) gene and 5′ flanking sequence//0.84:171:63//Hs.102877:U41315

[20290] F-NT2RP3003825

[20291] F-NT2RP3003828//ESTs//2.1e-12:434:61//Hs.156864:AI346481

[20292] F-NT2RP3003831

[20293] F-NT2RP3003833//Homo sapiens clones 24718 and 24825 mRNA sequence//2.6e-48:242:98//Hs.25300:AF070611

[20294] F-NT2RP3003842//Integrin, beta 8//1.0:345:60//Hs.832:M73780

[20295] F-NT2RP3003846//Homo sapiens mRNA for KIAA0725 protein, partial cds//1.3e-37:335:68//Hs.26450:AB018268

[20296] F-NT2RP3003870//Homo sapiens mRNA for KIAA0800 protein, complete cds//1.3e-175:805:99//Hs.118738:AB018343

[20297] F-NT2RP3003876//ESTs, Highly similar to Rabin3 [R. norvegicus]//6.8e-39:243:90//Hs.124832:AA846576

[20298] F-NT2RP3003914//ESTs, Weakly similar to UDP-GLUCOSE:GLYCOPROTEIN GLUCOSYLTRANSFERASE PRECURSOR [D. melanogaster]//1.1e-107:499:99//Hs.105794:AA701659

[20299] F-NT2RP3003918//Homo sapiens VAMP-associated protein of 33 kDa (VAP-33) mRNA, complete cds//8.3e-49:404:77//Hs.9006:AF057358

[20300] F-NT2RP3003932//ESTs//0.94:278:58//Hs.15661:WO2396

[20301] F-NT2RP3003989//ESTs//1.0:174:64//Hs.8095:AI359006

[20302] F-NT2RP3003992//Cyclic nucleotide gated channel (photoreceptor), cGMP gated 2 (beta)//0.00070:433:58//Hs.93909:AF042498

[20303] F-NT2RP3004013//ESTs, Moderately similar to M-phase phosphoprotein 4 [H. sapiens]//2.8e-127:617:97//Hs.142151:AA984061

[20304] F-NT2RP3004016//Human p300/CBP-associated factor (P/CAF) mRNA, complete cds//0.0086:283:62//Hs.155302:U57317

[20305] F-NT2RP3004041//EST//0.98:264:58//Hs.127552:AA953234

[20306] F-NT2RP3004051//Human mRNA for KIAA0319 gene, complete cds//7.0e-63:774:67//Hs.26441:AB002317

[20307] F-NT2RP3004070//EST//6.8e-22:163:85//Hs.132635:AI032875

[20308] F-NT2RP3004078//Regulatory factor (trans-acting) 2 (influences HLA class II expression)//5.3e-90:520:90//Hs.100007:X76091

[20309] F-NT2RP3004093

[20310] F-NT2RP3004095//Human clone 23732 mRNA, partial cds//3.3e-27:372:69//Hs.81281:U79258

[20311] F-NT2RP3004110//Human mRNA for KIAA0392 gene, partial cds//1.2e-20:211:77//Hs.40100:AB002390

[20312] F-NT2RP3004125//ESTs, Highly similar to OOCYTE ZINC FINGER PROTEIN XLCOF7.1 [Xenopus laevis]//1.0e-126:590:99//Hs.129888:AI096509

[20313] F-NT2RP3004145

[20314] F-NT2RP3004148

[20315] F-NT2RP3004155//Homo sapiens timing protein CLK-1 mRNA, complete cds//2.1e-121:578:98//Hs.157113:AF032900

[20316] F-NT2RP3004189//ESTs//1.3e-80:409:97//Hs.151001:AA564706

[20317] F-NT2RP3004206//Human mRNA for stac, complete cds//1.0:245:60//Hs.56045:D86640

[20318] F-NT2RP3004207//Transcription factor 3 (E2A immunoglobulin enhancer binding factors E12/E47)//0.095:281:62//Hs.101047:M31523

[20319] F-NT2RP3004209//ESTs//5.8e-87:458:94//Hs.155303:AI221835

[20320] F-NT2RP3004215//ESTs//0.074:56:80//Hs.163590:H43361

[20321] F-NT2RP3004242

[20322] F-NT2RP3004246//EST//0.20:219:63//Hs.161920:AA483240

[20323] F-NT2RP3004253//ESTs//1.2e-36:204:96//Hs.143588:A1149140

[20324] F-NT2RP3004258//Human gene for neurofilament subunit M (NF-M)//7.2e-07:369:59//Hs.71346:Y00067

[20325] F-NT2RP3004262//Homo sapiens heat shock protein hsp40-3 mRNA, complete cds//1.0e-154:733:98//Hs.158471:AF088982

[20326] F-NT2RP3004282//Homo sapiens torsinA (DYTI) mRNA, complete cds//4.2e-26:597:61//Hs.19261:AF007871

[20327] F-NT2RP3004332

[20328] F-NT2RP3004334//ESTs//8.8e-27:142:99//Hs.28068:H06285

[20329] F-NT2RP3004341//EST//0.0068:213:64//Hs.153208:X98426

[20330] F-NT2RP3004348//ESTs//1.2e-18:126:93//Hs.58595:AA830999

[20331] F-NT2RP3004349//ESTs, Weakly similar to HYPOTHETICAL 92.1 KD PROTEIN ZK1098.3 IN CHROMOSOME III [Caenorhabditis elegans]//3.9e-45:337:83//Hs.141429:AA631915

[20332] F-NT2RP3004378//ESTs, Weakly similar to weak similarity to procollagen alpha chain 1(V) chain [C. elegans]//4.3e-125:608:98//Hs.128781:AA160707

[20333] F-NT2RP3004399//H. sapiens mRNA for leucine-rich primary response protein 1//2.3e-141:804:90//Hs.123122:X97249

[20334] F-NT2RP3004424//ESTs, Weakly similar to JTV-1 [H. sapiens]//3.2e-122:609:96//Hs.20132:AA203113

[20335] F-NT2RP3004428//Homo sapiens ALR mRNA, complete cds//0.00044:458:60//Hs.153638:AF010403

[20336] F-NT2RP3004451//Bone morphogenetic protein 8 (osteogenic protein 2)//0.00023:357:59//Hs.99948:M97016

[20337] F-NT2RP3004454//Homo sapiens mRNA for KIAA0448 protein, complete cds//2.0e-124:583:99//Hs.27349:AB007917

[20338] F-NT2RP3004466//Homo sapiens mRNA for KIAA0664 protein, partial cds//0.48:399:58//Hs.22616:AB014564

[20339] F-NT2RP3004470//EST//1.3e-56:331:91//Hs.136830:AA769219

[20340] F-NT2RP3004472

[20341] F-NT2RP3004475//Homo sapiens mRNA for KIAA0456 protein, partial cds//9.8e-152:715:98//Hs.5003:AB007925

[20342] F-NT2RP3004480//ESTs, Highly similar to VACUOLAR SORTING PROTEIN 35 [Saccharomyces cerevisiae]//4.6e-118:547:99//Hs.124768:AA307735

[20343] F-NT2RP3004490//Homo sapiens mRNA for Musashi, complete cds//2.3e-156:752:97//Hs.158311:AB012851

[20344] F-NT2RP3004498//ESTs, Moderately similar to ROSA26AS [M. musculus]//3.5e-89:425:99//Hs.126082:AI077718

[20345] F-NT2RP3004503//EST//5.3e-49:399:81//Hs.162335:AA564256

[20346] F-NT2RP3004504//Homo sapiens mRNA for KIAA0479 protein, partial cds//1.0:370:59//Hs.158244:AB007948

[20347] F-NT2RP3004507//Human zinc finger protein (MAZ) mRNA//0.86:129:66//Hs.7647:M94046

[20348] F-NT2RP3004527//EST//0.053:260:62//Hs.123314:AA810110

[20349] F-NT2RP3004534//ESTs//3.5e-78:370:99//Hs.132808:AI031571

[20350] F-NT2RP3004539//Homo sapiens mRNA for KIAA0632 protein, partial cds//2.7e-146:679:98//Hs.75970:AB014532

[20351] F-NT2RP3004544//Homo sapiens mRNA for KIAA0554 protein, partial cds//9.1e-171:793:98//Hs.74750:AB011126

[20352] F-NT2RP3004566//ESTs, Highly similar to ZINC FINGER PROTEIN MLZ-4 [Mus musculus]//2.2e-66:362:94//Hs.125870:AI364967

[20353] F-NT2RP3004569

[20354] F-NT2RP3004572//Homo sapiens cofactor of initiator function (CIF150) mRNA, complete cds//3.3e-181:860:97//Hs.122752:AF026445

[20355] F-NT2RP3004578//Homo sapiens mRNA for KIAA0454 protein, partial cds//4.0e-85:422:97//Hs.129928:AB007923

[20356] F-NT2RP3004594//Homo sapiens mRNA for AND-1 protein//3.7e-160:796:95//Hs.72160:AJ006266

[20357] F-NT2RP3004617//ESTs, Weakly similar to estrogen-responsive finger protein, efp [H. sapiens]//6.4e-13:356:64//Hs.124138:AI266336

[20358] F-NT2RP3004618//ESTs//1.5e-42:481:70//Hs.130768:AA909232

[20359] F-NT2RP3004669//Human plectin (PLECI) mRNA, complete cds//0.0099:538:56//Hs.79706:U53204

[20360] F-NT2RP3004670//Homo sapiens sox 1 gene//1.11:311:58//Hs.144029:Y 13436

[20361] F-NT2RP4000008//ESTs, Highly similar to CHLORINE CHANNEL PROTEIN P64 [Bos taurus]//8.0e-177:827:98//Hs.118991:AA675919

[20362] F-NT2RP4000023//ESTs//1.4e-33:182:96//Hs.122722:AA455668

[20363] F-NT2RP4000035//ESTs//1.1e-23:283:72//Hs.142147:AA706495

[20364] F-NT2RP4000049//Homo sapiens decoy receptor 2 mRNA, complete cds//6.8e-83:556:85//Hs.129844:AF029761

[20365] F-NT2RP4000051//Homo sapiens mRNA for cartilage-associated protein (CASP)//4.9e-13:441:62//Hs.155481:AJ006470

[20366] F-NT2RP4000078//Homo sapiens mRNA for NS 1-binding protein (NS 1-BP)//8.0e-151:720:97//Hs.159597:AJ012449

[20367] F-NT2RP4000102//ESTs//8.8e-33:184:82//Hs.93054:H47743

[20368] F-NT2RP4000109//Homo sapiens mRNA for MEGF5, partial cds//1.4e-167:774:99//Hs.57929:AB011538

[20369] F-NT2RP4000111

[20370] F-NT2RP4000129//Homo sapiens mRNA for KIAA0483 protein, partial cds//1.1e-115:548:98//Hs.64691:AB007952

[20371] F-NT2RP4000147//Human mRNA for KIAA0041 gene, partial cds//0.00045:212:63//Hs.75520:D26069

[20372] F-NT2RP4000150

[20373] F-NT2RP4000151//Homo sapiens chromosome 7q22 sequence//0.98:431:59//Hs.3386:AF053356

[20374] F-NT2RP4000159

[20375] F-NT2RP4000167

[20376] F-NT2RP4000185//ESTs//1.1e-51:240:68//Hs.33020:N31946

[20377] F-NT2RP4000210//Homo sapiens mRNA for KIAA0700 protein, partial cds//1.6e-175:825:98//Hs.13999:AB014600

[20378] F-NT2RP40002121//ESTs//1.6e-10:74:95//Hs.111885:AA422006

[20379] F-NT2RP4000214//ESTs//3.9e-11:225:68//Hs.59793:AA451731

[20380] F-NT2RP4000218//Human G protein-coupled receptor (STRL22) mRNA, complete cds//6.2e-34:425:71//Hs.46468:U45984

[20381] F-NT2RP4000243//Homo sapiens mRNA for cartilage-associated protein (CASP)//8.6e-158:771:97//Hs.155481:AJ006470

[20382] F-NT2RP4000246//ESTs, Highly similar to NPC DERIVED PROLINE RICH PROTEIN 1 [M. musculus]//1.9e-62:384:89//Hs.115498:AA436298

[20383] F-NT2RP4000259//Homo sapiens clone 683 unknown mRNA, complete sequence//9.4e-130:604:99//Hs.43728:AF091092

[20384] F-NT2RP4000263

[20385] F-NT2RP4000290//EST//1.0:149:63//Hs.136928:AA812580

[20386] F-NT2RP4000312//Human mRNA for KIAA0147 gene, partial cds//1.5e-42:685:63//Hs.158132:D63481

[20387] F-NT2RP4000321//Homo sapiens gene for insulin receptor substrate-2, complete cds//8.6e-05:547:57//Hs.143648:AB000732

[20388] F-NT2RP4000323//Human HCF1 gene related mRNA sequence//0.48:589:58//Hs.83634:U52112

[20389] F-NT2RP4000355

[20390] F-NT2RP4000360//Homo sapiens mRNA for KIAA0738 protein, complete cds//6.4e-142:654:99//Hs.107479:AB018281

[20391] F-NT2RP4000367//Homo sapiens IkappaB kinase complex associated protein (IKAP) mRNA, complete cds//8.5e-137:649:97//Hs.31323:AF044195

[20392] F-NT2RP4000370//ESTs, Weakly similar to MITOCHONDRIAL PEPTIDE CHAIN RELEASE FACTOR 1 PRECURSOR [S. cerevisiae]//1.2e-09:157:76//Hs.97950:AI382073

[20393] F-NT2RP4000376//1-PHOSPHATIDYLINOSITOL-4,5-BISPHOSPHATE PHOSPHODIESTERASE BETA 2//0.098:291:59//Hs.994:M95678

[20394] F-NT2RP4000381//Myosin, heavy polypeptide 7, cardiac muscle, beta//0.00025:509:59//Hs.929:M57965

[20395] F-NT2RP4000398//Zinc finger protein 140 (clone pHZ-39)//4.9e-60:469:68//Hs.154205:U09368

[20396] F-NT2RP4000415//ESTs//0.85:89:67//Hs.152312:AA485688

[20397] F-NT2RP4000417//Homo sapiens alpha 1,2-mannosidase IB mRNA, complete cds//0.014:178:66//Hs.125315:AF027156

[20398] F-NT2RP4000424//Human G protein-coupled receptor (STRL22) mRNA, complete cds//2.0e-34:431:73//Hs.46468:U45984

[20399] F-NT2RP4000448//Human mRNA for KIAA0118 gene, partial cds//1.9e-37:360:75//Hs.154326:D42087

[20400] F-NT2RP4000449//EST//0.84:113:65//Hs.145274:AI249468

[20401] F-NT2RP4000455//ALPHA-2C-1 ADRENERGIC RECEPTOR//0.063:221:61//Hs.123022:J03853

[20402] F-NT2RP4000457//H. sapiens mRNA for herpesvirus associated ubiquitin-specific protease (HAUSP)//1 .1e-05:532:57//Hs.78683:Z72499

[20403] F-NT2RP4000480//Homo sapiens mRNA, complete cds//0.056:655:60//Hs.133151:AB001535

[20404] F-NT2RP4000481//Human mRNA for KIAA0268 gene, partial cds//0.46:272:58//Hs.78862:D87742

[20405] F-NT2RP4000498//Human DNA binding protein FKHL15 (FKHL15) mRNA, complete cds//0.94:133:69//Hs.159234:U89995

[20406] F-NT2RP4000500//V-myb avian myeloblastosis viral oncogene homolog-like 2//0.60:335:61//Hs.74605:X13293

[20407] F-NT2RP4000515//ESTs//2.9e-45:253:95//Hs.104898:AA429594

[20408] F-NT2RP4000517//EST//0.043:131:64//Hs.99030:AA443904

[20409] F-NT2RP4000518//Homo sapiens mRNA for ATP-dependent RNA helicase, partial//2.0e-34:203:93//Hs.99423:AJ010840

[20410] F-NT2RP4000519//Human mRNA for KIAA0374 gene, complete cds//0.33:154:66//Hs.100837:AB002372

[20411] F-NT2RP4000524

[20412] F-NT2RP4000528

[20413] F-NT2RP4000541//ESTs//2.1e-51:251:99//Hs.157240:AI348154

[20414] F-NT2RP4000556//ESTs, Highly similar to 60S RIBOSOMAL PROTEIN L11 [R. norvegicus]//1.1e-27:162:93//Hs.25597:H93026

[20415] F-NT2RP4000560//ESTs//2.5e-09:181:66//Hs.122609:AA778351

[20416] F-NT2RP4000588//ESTs//1.4e-46:533:70//Hs.8836:AA181053

[20417] F-NT2RP4000614//Homo sapiens TLS-associated protein TASR-2 mRNA, complete cds//1.0e-139:666:98//Hs.4214:AF067730

[20418] F-NT2RP4000638//Fibroblast growth factor 2 (basic)//1.0:226:61//Hs.56066:J04513

[20419] F-NT2RP4000648//ESTs//2.5e-1:116:80//Hs.115449:AA418396

[20420] F-NT2RP4000657//Homo sapiens bone morphogenetic protein II (BMP11) mRNA, complete cds//0.00056:367:60//Hs.144626:AF100907

[20421] F-NT2RP4000704//Homo sapiens mRNA expressed in 19 week fetal lung, clone IMAGE: 300856//8.0e-167:676:98//Hs.50748:AB004848

[20422] F-NT2RP4000713//Homo sapiens N-methyl-D-aspartate receptor 2D subunit precursor (NMDAR2D) mRNA, complete cds//6.9e-07:494:61//Hs.113286:U77783

[20423] F-NT2RP4000724//ESTs, Weakly similar to pol/env ORF [H. sapiens]//2.8e-46:411:78//Hs.111817:T80622

[20424] F-NT2RP4000728//Homo sapiens mRNA for KIAA0606 protein, partial cds//9.9e-43:350:71//Hs.38176:AB011178

[20425] F-NT2RP4000737//Human mRNA for KIAA0252 gene, partial cds//0.97:409:60//Hs.83419:D87440

[20426] F-NT2RP4000739//DESMOPLAKIN I AND VI//0.99:192:63//Hs.74316:AL031058

[20427] F-NT2RP4000781//Homo sapiens mRNA for APC 2 protein, complete cds//0.023:351:60//Hs.20912:AB012162

[20428] F-NT2RP4000787//Human mRNA for ESP1/CRP2, complete cds//0.0051:276:58//Hs.70327:D42123

[20429] F-NT2RP4000817//Homo sapiens mRNA for KIAA0470 protein, complete cds//4.8e-176:816:98//Hs.25132:AB007939

[20430] F-NT2RP4000833//Homo sapiens PAC clone DJ0905J08 from 7 p12-p14//1.3e-93:438:99//Hs.8173:AC005189

[20431] F-NT2RP4000837//Homo sapiens SALLI gene, partial//5.9e-05:470:59//Hs.123094:X98833

[20432] F-NT2RP4000839//ESTs//5.7e-11:133:82//Hs.103852:W27603

[20433] F-NT2RP4000855//Homo sapiens DNA-binding protein (CROC-IB) mRNA, complete cds//1.4e-37:680:63//Hs.75875:U49278

[20434] F-NT2RP4000865//Zinc finger protein 136 (clone pHZ-20)//2.0e-96:415:78//Hs.69740:U09367

[20435] F-NT2RP4000878//ESTs//2.7e-16:390:63//Hs.163451:AI206803

[20436] F-NT2RP4000879//ESTs//0.89:184:64//Hs.122333:AA782843

[20437] F-NT2RP4000907//Homo sapiens BAC clone RG 118D07 from 7q31//4.5e-52:933:61//Hs.3781:AC004142

[20438] F-NT2RP4000915//Homo sapiens mRNA for ZNF 198 protein//3.0e-80:584:78//Hs.109526:AJ224901

[20439] F-NT2RP4000918

[20440] F-NT2RP4000925//Homo sapiens KIAA0405 mRNA, complete cds//1.9e-47:861:61//Hs.48998:AB007865

[20441] F-NT2RP4000927//ESTs//0.37:159:63//Hs.147949:AI341503

[20442] F-NT2RP4000928//Homo sapiens CDP-diacylglycerol synthase 2 (CDS2) mRNA, partial cds//1.1e-164:781:97//Hs.24812:AF069532

[20443] F-NT2RP4000929//ESTs//0.88:284:60//Hs.141317:AI281371

[20444] F-NT2RP4000955//Human mRNA for cadherin-15, complete cds//0.0019:495:5811Hs.148090:D83542

[20445] F-NT2RP4000973//Homo sapiens mRNA for MSJ-1, complete cds//1.2e-05:318:60//Hs.3845:AB014888

[20446] F-NT2RP4000975//ESTs//0.0051:345:61//Hs.143304:AI084058

[20447] F-NT2RP4000979

[20448] F-NT2RP4000984

[20449] F-NT2RP4000989//Homo sapiens Tax interaction protein 1 mRNA, partial cds//0.85:257:63//Hs.12956:U90913

[20450] F-NT2RP4000996//ESTs//4.3e-10:329:62//Hs.33085:AA258068

[20451] F-NT2RP4000997//Human plectin (PLECI) mRNA, complete cds/11.0:218:58//Hs.79706:U53204

[20452] F-NT2RP4001004

[20453] F-NT2RP4001006//ESTs, Moderately similar to ROSA26AS [M. musculus]//7.4e-90:425:99//Hs.126082:AI077718

[20454] F-NT2RP4001010//Homo sapiens PSD-95/SAP90-associated protein-2 mRNA, partial cds//2.8e-19:689:61//Hs.113287:AF009204

[20455] F-NT2RP4001029//Human transcription factor LSF mRNA, complete cds//9.6e-84:778:74//Hs.154970:U03494

[20456] F-NT2RP4001041//Human endosome-associated protein (EEAI) mRNA, complete cds//0.95:170:64//Hs.2864:L40157

[20457] F-NT2RP4001057//EST//9.6e-05:122:72//Hs.132518:AA928157

[20458] F-NT2RP4001064//Homo sapiens mRNA for cartilage-associated protein (CASP)//7.2e-13:441:63//Hs.155481:AJ006470

[20459] F-NT2RP4001078//ESTs//1.3e-29:165:95//Hs.113817:AA702497

[20460] F-NT2RP4001079//Homo sapiens mRNA for putative Ca2+-transporting ATPase, partial/1.4e-131:634:98//Hs.106778:AJ010953

[20461] F-NT2RP4001080//Polypyrimidine tract binding protein (hnRNP I) {alternative products}//0.025:166:66//Hs.146459:X66975

[20462] F-NT2RP4001086//Homo sapiens mRNA for KIAA0592 protein, partial cds//1.5e-85:604:86//Hs.13273:AB011164

[20463] F-NT2RP4001095

[20464] F-NT2RP4001100//ESTs, Weakly similar to C17G10.1 [C. elegans]//1.4e-93:448:98//Hs.105837:AA536054

[20465] F-NT2RP4001117//ESTs, Highly similar to PROTEIN TRANSPORT PROTEIN SEC61 ALPHA SUBUNIT [Canis familiaris]//2.2e-26:171:92//Hs.14038:R06800

[20466] F-NT2RP4001122//Human mRNA for histone HIx, complete cds//0.99:185:66//Hs.109804:D64142

[20467] F-NT2RP4001126//ESTs, Moderately similar to The KIAA0138 gene product is novel. [H. sapiens]//5.8e-37:185:100//Hs.126925:AA931237

[20468] F-NT2RP4001138//ESTs//3 .4e-09:125:77//Hs.143382:AA476266

[20469] F-NT2RP4001143//ESTs//1.0:282:57//Hs.157423:AI358261

[20470] F-NT2RP4001148//ESTs//0.82:206:62//Hs.129259:AA992207

[20471] F-NT2RP4001149//EST//1.3e-17:140:88//Hs.101727:H16171

[20472] F-NT2RP4001150//AXONIN-1 PRECURSOR//7.7e-07:562:59//Hs.2998:X67734

[20473] F-NT2RP400115911EST//0.26:125:66//Hs.152092:AA377324

[20474] F-NT2RP4001174//ESTs//2.9e-103:502:98//Hs.125886:AA884264

[20475] F-NT2RP4001206//EST//0.33:125:66//Hs.152092:AA377324

[20476] F-NT2RP4001207

[20477] F-NT2RP4001210//ESTs//3.l e-95:460:97//Hs.46913:AI017636

[20478] F-NT2RP4001213//KRAB zinc finger protein {alternative products}//1.1e-45:187:74//Hs.22556:U37251

[20479] F-NT2RP4001219//ESTs//1.4e-69:352:96//Hs.116392:AA936262

[20480] F-NT2RP4001228//Homo sapiens actin binding protein MAYVEN mRNA, complete cds//7.2e-28:855:60//Hs.122967:AF059569

[20481] F-NT2RP4001235//Homo sapiens Jagged 2 mRNA, complete cds//1.0:257:59//Hs.106387:AF029778

[20482] F-NT2RP4001256//Human mRNA for KIAA0273 gene, complete cds//0.96:247:62//Hs.75899:D87463

[20483] F-NT2RP4001260//Syntrophin, alpha (dystrophin-associated protein Al, 59 kD, acidic component)//0.015:246:62//Hs.31121:U40571

[20484] F-NT2RP4001274//Homo sapiens clone 24674 mRNA sequence//1.2e-06:259:64//Hs.71168:AF070578

[20485] F-NT2RP4001276//Homo sapiens CAGF9 mRNA, partial cds//7.6e-06:266:62//Hs.110826:U80736

[20486] F-NT2RP4001313//Homo sapiens mitochondrial outer membrane protein (TOM40) mRNA, nuclear gene encoding mitochondrial protein, complete cds//2.3e-31:535:65//Hs.30928:AF043250

[20487] F-NT2RP4001315//EST//9.5e-20:146:88//Hs.158755:AI375917

[20488] F-NT2RP4001336//ESTs//1.0:128:67//Hs.99598:AA603110

[20489] F-NT2RP4001339

[20490] F-NT2RP4001343

[20491] F-NT2RP4001345//Lecithin-cholesterol acyltransferase//8.0e-39:686:64//Hs.12125: MI 2625

[20492] F-NT2RP4001351//Human ovarian cancer downregulated myosin heavy chain homolog (Doc 1) mRNA, complete cds//2.0e-31:784:62//Hs.15432:U53445

[20493] F-NT2RP4001353//Homo sapiens chromosome 7q22 sequence//0.0034:497:57//Hs.125742:AF053356

[20494] F-NT2RP4001372

[20495] F-NT2RP4001373//Homo sapiens clone Dt1P1b11 mRNA, CAG repeat region//0.43:290:58//Hs.82101:Z50194

[20496] F-NT2RP4001375

[20497] F-NT2RP4001379//TRICHOHYALIN//8 .2e-05:591:58//Hs.82276:L09190

[20498] F-NT2RP4001389//EST//5.3e-27:212:84//Hs.160402: AI393918

[20499] F-NT2RP4001407//Homo sapiens mRNA for RGS5, complete cds//0.93:218:58//Hs.24950:AB008109

[20500] F-NT2RP4001414//Human mRNA for KIAA0202 gene, partial cds//6.3e-78:818:71//Hs.80712:D86957

[20501] F-NT2RP4001433//Zinc finger protein 10 (KOX1)//1.1e-88:839:73//Hs.2479:X78933

[20502] F-NT2RP4001442

[20503] F-NT2RP4001447//Homo sapiens mRNA for KIAA0783 protein, complete cds//0.0075:218:63//Hs.41153:AB018326

[20504] F-NT2RP4001474//ESTs, Weakly similar to probable CBP3 protein homolog [C. elegans]//2.1e-90:460:96//Hs.26676:AA033997

[20505] F-NT2RP4001483//Oxoglutarate dehydrogenase (lipoamide)//8.1e-61:480:75//Hs.75533:D 10523

[20506] F-NT2RP4001498//ESTs, Weakly similar to GA BINDING PROTEIN BETA-2 CHAIN [H. sapiens]//0.25:216:60//Hs.63220:AA522707

[20507] F-NT2RP4001502//ESTs//2.6e-41:206:99//Hs.159257:N40395

[20508] F-NT2RP4001507//H. sapiens mRNA for RanGTPase activating protein 1//0.51:281:61//Hs.5923:X82260

[20509] F-NT2RP4001524//ESTs, Weakly similar to F 13B 12.1 [C. elegans]//9.4e-30:173:94//Hs.5570:AI377863

[20510] F-NT2RP4001529//Human transcription factor LSF mRNA, complete cds//1.3e-35:329:76//Hs.154970:U03494

[20511] F-NT2RP4001547//Homo sapiens forkhead protein FREAC-2 mRNA, complete cds//0.0015:221:65//Hs.44481:U13220

[20512] F-NT2RP4001551//Human BRCA2 region, mRNA sequence CGO03//0.56:428:59//Hs.30649:U50534

[20513] F-NT2RP4001555//EST//0.99:225:64//Hs.96863:AA347174

[20514] F-NT2RP4001567

[20515] F-NT2RP4001568//ESTs, Weakly similar to HYPOTHETICAL 32.6 KD PROTEIN IN MET30-CBR5 INTERGENIC REGION [Saccharomyces cerevisiae]//1.1e-54:252:83//Hs.158208:AA167836

[20516] F-NT2RP4001571//ESTs//3.0e-94:475:96//Hs.65322:AA019410

[20517] F-NT2RP4001574

[20518] F-NT2RP4001575//Homo sapiens mRNA for AREI1-like protein//1.8e-169:796:98//Hs.108826:AL031228

[20519] F-NT2RP4001592

[20520] F-NT2RP4001610//Human involucrin mRNA//0.94:462:59//Hs.157091:M 13903

[20521] F-NT2RP4001614//ESTs//0.71:331:58//Hs.116533:AI343952

[20522] F-NT2RP4001634

[20523] F-NT2RP4001638//ESTs, Weakly similar to HYPOTHETICAL 117.9 KD PROTEIN IN FKH1-STH1 INTERGENIC REGION [S. cerevisiae]//8.6e-57:287:97//Hs.117439:CI8436

[20524] F-NT2RP4001644//Human mRNA for MNK1, complete cds//1.7e-53:415:80//Hs.5591:AB000409

[20525] F-NT2RP4001656//ESTs, Highly similar to PHENYLALANYL-TRNA SYNTHETASE MITOCHONDRIAL PRECURSOR [Saccharomyces cerevisiae]//1.0:311:59//Hs.57969:AA203629

[20526] F-NT2RP4001677//Homo sapiens short form transcription factor C-MAF (c-maf) mRNA, complete cds//0.19:162:67//Hs.30250:AF055376

[20527] F-NT2RP4001679//Homo sapiens PYRIN (MEFV) mRNA, complete cds//2.2e-50:332:86//Hs.113283:AF018080

[20528] F-NT2RP4001696

[20529] F-NT2RP4001725//Galactokinase 1//1.0:202:63//Hs.92357:L76927

[20530] F-NT2RP4001730//Human growth/differentiation factor 1 (GDF-1) mRNA, complete cds//0.0035:247:62//Hs.92614:M62302

[20531] F-NT2RP4001739//Complement component 8, gamma polypeptide//0.74:654:56//Hs.1285:U08198

[20532] F-NT2RP4001753//Zinc finger protein 84 (HPF2)//4.5e-29:476:67//Hs.9450:M27878

[20533] F-NT2RP4001760//ESTs//1.0:411:60//Hs.108548:AA081656

[20534] F-NT2RP4001790//Homo sapiens PAC clone DJ0604G05 from 7q22-q31.1 //9.1e-34:400:68//Hs.154212:AC004522

[20535] F-NT2RP4001803//Human high conductance inward rectifier potassium channel alpha subunit mRNA, complete cds//0.028:580:58//Hs.2363:L36069

[20536] F-NT2RP4001822//ESTs//3.4e-50:307:90//Hs.113509:AA132131

[20537] F-NT2RP4001823//Human faciogenital dysplasia (FGD1) mRNA, complete cds//3.1e-07:509:59//Hs.1572:U11690

[20538] F-NT2RP4001828

[20539] F-NT2RP4001838//Human mRNA for KIAA0071 gene, partial cds//6.9e-55:555:73//Hs.78398:D31888

[20540] F-NT2RP4001841//ESTs//0.99:215:60//Hs.136895:AA897749

[20541] F-NT2RP4001849//Homo sapiens mRNA for KIAA0672 protein, complete cds//5.6e-57:813:65//Hs.6336:AB014572

[20542] F-NT2RP4001861//ESTs, Weakly similar to !!!! ALU SUBFAMILY J WARNING ENTRY!!!! [H. sapiens]//4.8e-12:84:94//Hs.140232:AA705170

[20543] F-NT2RP4001889

[20544] F-NT2RP4001893//Homo sapiens BAC clone GS166A23 from 7p21//4.4e-108:535:97//Hs.15144:AC005014

[20545] F-NT2RP4001896

[20546] F-NT2RP4001901//ESTs//1.4e-50:291:93//Hs.67991:AA147848

[20547] F-NT2RP4001927

[20548] F-NT2RP4001938//ESTs, Weakly similar to ZINC FINGER PROTEIN 91 [H. sapiens]//2.8e-54:375:84//Hs.119294:AI379442

[20549] F-NT2RP4001946//EST//0.050:268:60//Hs.148341:AA921894

[20550] F-NT2RP4001950//EST//7.9e-114:336:63//Hs.112810:AA610063

[20551] F-NT2RP4001953//ESTs//0.018:206:65//Hs.130105:AA904868

[20552] F-NT2RP4001966//Human DNA sequence from clone 1052M9 on chromosome Xq25. Contains the SH2DIA gene for SH2 domain protein IA, Duncan's disease (lymphoproliferative syndrome) (DSHP), part of a 60S Acidic Ribosomal protein I (RPLPI) LIKE gene and part of a mouse DOC4 LIKE gene. Contains ESTs and GSSs//1.7e-54:788:65//Hs.23796:AL022718

[20553] F-NT2RP4001975//Homo sapiens homeobox protein Six3 (SIX3) gene, complete cds//0.0019:279:65//Hs.159439:AF092047

[20554] F-NT2RP4002018//ESTs, Highly similar to RING CANAL PROTEIN [Drosophila melanogaster]//0.58:463:55//Hs.3826:U69560

[20555] F-NT2RP4002047//EST//2.5e-13:102:90//Hs.148997:AI243139

[20556] F-NT2RP4002052

[20557] F-NT2RP4002058//ESTs//5.2e-41:347:72//Hs.121961:AA777873

[20558] F-NT2RP4002071//Homo sapiens TTAGGG repeat binding factor 2 (hTRF2) mRNA, complete cds//0.97:227:60//Hs.100030:AF002999

[20559] F-NT2RP4002075

[20560] F-NT2RP4002078//ESTs, Moderately similar to zinc finger protein [H. sapiens]//1.0e-38:243:90//Hs.139115:AA325104

[20561] F-NT2RP4002081//TATA box binding protein//0.0059:310:60//Hs.1100:M55654

[20562] F-NT2RP4002083//H. sapiens Pur (pur-alpha) mRNA, complete cds//0.0015:152:70//Hs.25180:M96684

[20563] F-NT2RP4002408//Human protein kinase C-L (PRKCL) mRNA, complete cds//8.0e-10:401:59//Hs.89616:M55284

[20564] F-NT2RP4002791//Ataxin 1//1.0:215:61//Hs.74520:X79204

[20565] F-NT2RP4002888

[20566] F-NT2RP4002905//ESTs//3.4e-50:280:94//Hs.131697:H 14960

[20567] F-NT2RP5003459//Glyceraldehyde-3-phosphate dehydrogenase//1.3e-35:193:96//Hs.74456:U34995

[20568] F-NT2RP5003461//ESTs//3.6e-104:513:98//Hs.88088:AA521071

[20569] F-NT2RP5003477//Eukaryotic translation initiation factor 3 (eIF-3) p36 subunit//0.18:271:60//Hs.139745:U39067

[20570] F-NT2RP5003492

[20571] F-NT2RP5003500//Homo sapiens mRNA for heparan-sulfate 6-sulfotransferase, complete cds//6.1e-56:750:69//Hs.132884:AB006179

[20572] F-NT2RP5003506//Homo sapiens Chromosome 16 BAC clone CIT987SK-A-69G12//5.1e-14:348:62//Hs.154050:AC004131

[20573] F-NT2RP5003512//Homo sapiens mRNA for KIAA0642 protein, partial cds//0.94:202:63//Hs.8152:AB014542

[20574] F-NT2RP5003522

[20575] F-NT2RP5003524//ESTs//8.7e-08:340:62//Hs.152730:AI308943

[20576] F-NT2RP5003534

[20577] F-OVARC1000001//Homo sapiens mRNA for KIAA0465 protein, partial cds//4.0e-69:373:94//Hs.108258:AB007934

[20578] F-OVARC1000004//ESTs//6.0e-38:216:93//Hs.163801:AI391729

[20579] F-OVARC1000006//ESTs, Highly similar to HISTONE H2A [Cairina moschata]//4.4e-75:355:99//Hs.36727:AI051983

[20580] F-OVARC1000013//ESTs//0.65:331:58//Hs.146326:AA534304

[20581] F-OVARC1000014//Homo sapiens GLE1 (GLE1) mRNA, complete cds//1.8e-171:815:98//Hs.81449:AF058922

[20582] F-OVARC1000017//Homo sapiens mRNA for NTAK, complete cds//0.50:482:58//Hs.113264:AB005060

[20583] F-OVARC1000035//Homo sapiens GA17 protein mRNA, complete cds//2.2e-37:238:89//Hs.69469:AF064603

[20584] F-OVARC1000058//ESTs//1.1e-23:132:97//Hs.61809:AA503549

[20585] F-OVARC1000060//ESTs, Highly similar to ribonuclease 6 precursor [H. sapiens]//6.7e-60:305:97//Hs.31696:H50008

[20586] F-OVARC1000068//ESTs//3.8e-10:69:100//Hs.89048:AA282798

[20587] F-OVARC1000071//ESTs//1.9e-36:202:95//Hs.125013:AA400543

[20588] F-OVARC1000085

[20589] F-OVARC10000087//EST//1.0:199:58//Hs.122919:AA768442

[20590] F-OVARC1000091//Homo sapiens Jagged 2 mRNA, complete cds//0.00017:414:591//Hs.106387:AF029778

[20591] F-OVARC1000092//ESTs//4.6e-06:410:60//Hs.152250:AA203600

[20592] F-OVARC1000106//ESTs, Weakly similar to C25A1.1 [C. elegans]//2.9e-73:406:92//Hs.109463:AI205174

[20593] F-OVARC1000109

[20594] F-OVARC1000113//Homo sapiens okadaic acid-inducible phosphoprotein (OA48-18) mRNA, complete cds//5.3e-135:663:96//Hs.3688:AF069250

[20595] F-OVARC1000114//Homo sapiens mRNA for KIAA0562 protein, complete cds//3.4e-43:532:72//Hs.118401:AB011134

[20596] F-OVARC1000133//ESTs//9.4e-50:249:98//Hs.159146:AI384010

[20597] F-OVARC1000139

[20598] F-OVARC1000145//ESTs//1.6e-09:87:90//Hs.25219:AA291293

[20599] F-OVARC1000148//ESTs//4.4e-28:146:100//Hs.133223:AA677414

[20600] F-OVARC1000151

[20601] F-OVARC1000168//ESTs//2.3e-48:264:95//Hs.14539:H67305

[20602] F-OVARC1000191//Thrombopoietin (myeloproliferative leukemia virus oncogene ligand, megakaryocyte growth and development factor)//0.10:504:59//Hs.154083:U70136

[20603] F-OVARC1000198//ESTs//1.3e-103:505:97//Hs.149341:AI249131

[20604] F-OVARC1000209//EST//1.0:73:72//Hs.162600:AA594840

[20605] F-OVARC1000212//ESTs//1.7e-17:121:91//Hs.50473:W68834

[20606] F-OVARC1000240//ESTs, Highly similar to THREONYL-TRNA SYNTHETASE, CYTOPLASMIC [Homo sapiens]//2.7e-31:264:79//Hs.151895:AA196379

[20607] F-OVARC1000241//Homo sapiens clone 23698 mRNA sequence//3.4e-35:466:68//Hs.8136:U81984

[20608] F-OVARC1000288//ESTs, Weakly similar to Y53C12A.3 [C. elegans]//0.00084:170:65//Hs.107747:AI357868

[20609] F-OVARC1000302//EST//4.1e-05:249:60//Hs.136432:AA555306

[20610] F-OVARC1000304//ESTs//1.0:252:64//Hs.12126:AA203287

[20611] F-OVARC1000309//ESTs, Highly similar to BRAIN ENRICHED HYALURONAN BINDING PROTEIN PRECURSOR [Felis catus]//0.51:193:66//Hs.6194:AI378579

[20612] F-OVARC1000321

[20613] F-OVARC1000326//Homo sapiens T-type calcium channel alpha-1 subunit mRNA, complete cds//0.0018:507:60//Hs.122359:AF051946

[20614] F-OVARC1000335//ESTs//9.3e-39:202:98//Hs.132849:AA779444

[20615] F-OVARC1000347

[20616] F-OVARC1000384//Homo sapiens (clone PEBP2aA 1) core-binding factor, runt domain, alpha subunit 1 (CBFA1) mRNA, 3′ end of cds//3.4e-06:353:62//Hs.121895:AF001450

[20617] F-OVARC1000408//Human mRNA for KIAA0140 gene, complete cds//0.94:231:641//Hs.156016:D50930

[20618] F-OVARC1000411//EST//0.43:234:59//Hs.124673:AA858162

[20619] F-OVARC1000414//EST//5 .2e-05:105:72//Hs.98827:AA435682

[20620] F-OVARC1000420//Human mRNA for KIAA0140 gene, complete cds//0.86:231:581//Hs.156016:D50930

[20621] F-OVARC1000427//ESTs, Moderately similar to ORF1 [H. sapiens]//1.7e-25:190:84//Hs.139513:AA259082

[20622] F-OVARC1000431//ESTs//0.041:356:57//Hs.139907:AA621615

[20623] F-OVARC1000437//Filamin 1 (actin-binding protein-280)//0.93:281:60//Hs.76279:X53416

[20624] F-OVARC1000440//Human PINCH protein mRNA, complete cdsl/8.8e-21:116:99//Hs.83987:U09284

[20625] F-OVARC1000442//ESTs//2.0e-19:207:78//Hs.134071:AI377423

[20626] F-OVARC1000443//Homo sapiens mRNA for KIAA0683 protein, complete cds//3.2e-140:566:99//Hs.12334:AB014583

[20627] F-OVARC1000461//ESTs//1.0e-39:215:95//Hs.131532:A1024524

[20628] F-OVARC1000465//Homo sapiens clone 24781 mRNA sequence//1.0:252:58//Hs.108112:AF070640

[20629] F-OVARC1000466//ESTs//3.6e-14:189:711//Hs.164041:R51854

[20630] F-OVARC1000473//ESTs//0.00012:77:8511Hs.29173:AA134926

[20631] F-OVARC1000479

[20632] F-OVARC1000486//ESTs//4.2e-07:409:60//Hs.99280:AA453036

[20633] F-OVARC1000496//ESTs//6.0e-14:240:69//Hs.131900:AI023327

[20634] F-OVARC1000520//Homo sapiens supervillin mRNA, complete cds//6.9e-115:539:99//Hs.111285:AF051850

[20635] F-OVARC1000526//ESTs//2.9e-08:368:61//Hs.42771:N26740

[20636] F-OVARC1000533//EST//3 .4e-14:137:82//Hs.123405:AA813492

[20637] F-OVARC1000543//ESTs//0.13:278:61//Hs.54894:N98475

[20638] F-OVARC1000556//ESTs//1.4e-31:217:90//Hs.106385:W26667

[20639] F-OVARC1000557//ESTs//3.8e-20:208:76//Hs.138919:AA827410

[20640] F-OVARC1000564//Human dsRNA adenosine deaminase DRADA2b (DRADA2b) mRNA, complete cds//0.87:135:66//Hs.85302:U76421

[20641] F-OVARC1000573//ESTs//2.1e-22:268:76//Hs.121852:AA776358

[20642] F-OVARC1000576//ESTs//9.4e-22:124:98//Hs.24220:W22200

[20643] F-OVARC1000578//EST//4.7e-31:335:74//Hs.162881:AA652729

[20644] F-OVARC1000588//Human BMK1 alpha kinase mRNA, complete cds//0.67:263:63//Hs.3080:U29725

[20645] F-OVARC1000605//EST//1.0:148:62//Hs.163346:AA883722

[20646] F-OVARC1000622//EST//4.3e-50:313:88//Hs.149580:AI281881

[20647] F-OVARC1000640//ESTs//2.6e-55:441:80//Hs.105319:AA470097

[20648] F-OVARC1000649//Human squamous cell carcinama of esophagus mRNA for GRB-7 SH2 domain protein, complete cds//1.6e-78:424:93//Hs.86859:D43772

[20649] F-OVARC1000661//Homo sapiens mRNA for KIAA0590 protein, complete cds//1.6e-100:536:94//Hs.111862:AB011162

[20650] F-OVARC1000678//EST//1.3e-08:131:77//Hs.145970:AI277106

[20651] F-OVARC1000679//ESTs//0.66:223:61//Hs.134782:H74279

[20652] F-OVARC1000681//EST//0.017:315:61//Hs.147799:AI221639

[20653] F-OVARC1000682//Homo sapiens alpha 1,2-mannosidase IB mRNA, complete cds//4.8e-153:549:99//Hs.125315:AF027156

[20654] F-OVARC1000689//Homo sapiens clone 24640 mRNA sequence//0.030:479:57//Hs.4764:AB018306

[20655] F-OVARC1000700

[20656] F-OVARC1000703//ESTs//0.41:100:68//Hs.160699:AI284320

[20657] F-OVARC1000722//Homo sapiens chromosome 1q21-1q23 beta-1,4-galactosyltransferase mRNA, complete cdsl/1.2e-110:451:91//Hs.13476:AF038661

[20658] F-OVARC1000730//ESTs, Weakly similar to C27F2.7 gene product [C. elegans]//2.9e-53:318:91//Hs.7049:AI141736

[20659] F-OVARC1000746//ESTs//3.2e-123:570:99//Hs.127295:AA918411

[20660] F-OVARC1000769//ESTs//0.072:177:67//Hs.142573:AA601196

[20661] F-OVARC1000771//ESTs, Moderately similar to RAS-RELATED PROTEIN RAB-2 [H. sapiens]//1.2e-38:194:99//Hs.157059:W28130

[20662] F-OVARC1000781//ESTs//4.0e-14:113:89//Hs.41972:AA626793

[20663] F-OVARC1000787//EST//0.92:91:64//Hs.163258:AA828835

[20664] F-OVARC1000800//ESTs//1.6e-44:193:81//Hs.163971:N27584

[20665] F-OVARC1000802//ESTs//4.6e-43:395:80//Hs.115401:AA400032

[20666] F-OVARC1000834//ESTs//1.9e-91:431:99//Hs.154450:AA069390

[20667] F-OVARC1000846//Homo sapiens mRNA for KIAA0643 protein, partial cds//1.9e-151:432:100//Hs.155995:AB014543

[20668] F-OVARC1000850//Homo sapiens PB39 mRNA, complete cds//3.3e-137:632:99//Hs.18910:AF045584

[20669] F-OVARC1000862//ESTs, Highly similar to gene Fif protein [M. musculus]//6.1e-31:183:93//Hs.108620:AA418155

[20670] F-OVARC1000876//Human DNA binding protein FKHL15 (FKHL15) mRNA, complete cds//0.54:133:69//Hs.159234:U89995

[20671] F-OVARC1000883//ESTs//0.44:154:63//Hs.98183:AA417143

[20672] F-OVARC1000885//EST//0.91:152:63//Hs.160765:AI313323

[20673] F-OVARC1000886//ESTs//4.6e-08:375:61//Hs.131653:AI025777

[20674] F-OVARC1000890

[20675] F-OVARC1000891

[20676] F-OVARC1000897//ESTs//1.1e-07:145:69//Hs.119878:AA706818

[20677] F-OVARC1000912//EST//3.6e-08:376:61//Hs.158782:AI376601

[20678] F-OVARC1000915//Homo sapiens mRNA for KIAA0600 protein, partial cds//2.3e-85:419:97//Hs.9028:AF039691

[20679] F-OVARC1000924//ESTs//3.6e-113:540:98//Hs.66058:AA424456

[20680] F-OVARC1000936//Human endogenous retrovirus envelope region mRNA (PL1)//4.3e-64:623:72//Hs.114440:M11119

[20681] F-OVARC1000937//EST//2.4e-39:170:96//Hs.129138:AA988078

[20682] F-OVARC1000945//ESTs, Weakly similar to protein tyrosine phosphatase [H. sapiens]//2.4e-29:157:97//Hs.136243:AA307843

[20683] F-OVARC1000948

[20684] F-OVARC1000959//EST//0.65:293:55//Hs.134725:AI088986

[20685] F-OVARC1000960//Ley I-L//1.4e-41:425:72//Hs.37062:AC005952

[20686] F-OVARC1000964//ESTs//1.4e-95:486:96//Hs.57079:D45288

[20687] F-OVARC1000971//ESTs//0.19:198:62//Hs.153429:AI283069

[20688] F-OVARC1000984//Breakpoint cluster region protein BCR//0.26:365:56//Hs.2557:Y00661

[20689] F-OVARC1000996//Human p300/CBP-associated factor (P/CAF) mRNA, complete cds//6.8e-10:312:65//Hs.155302:U57317

[20690] F-OVARC1000999//Homo sapiens mRNA for chemokine LEC precursor, complete cds//0.0056:209:62//Hs.10458:AF088219

[20691] F-OVARC001000//EST//4.2e-24:242:77//Hs.128952:AA984114

[20692] F-OVARC1001004

[20693] F-OVARC1001010

[20694] F-OVARC1001011//ESTs, Moderately similar to Tera [M. musculus]//3.8e-47:234:99//Hs.110327:AA205866

[20695] F-OVARC1001032//HUMAN IMMUNODEFICIENCY VIRUS TYPE I ENHANCER-BINDING PROTEIN 2//0.0076:624:57//Hs.75063:AL023584

[20696] F-OVARC1001034//ESTs, Highly similar to mitogen-induced [M. musculus]//3.9e-97:578:89//Hs.111974:AI050735

[20697] F-OVARC1001038//Homo sapiens TRIADI type I mRNA, complete cds//8.6e-152:733:97//Hs.9899:AF099149

[20698] F-OVARC1001040//ESTs//2.2e-38:204:96//Hs.128927:AI168074

[20699] F-OVARC1001044//EST//0.036:304:61//Hs.137342:AA017385

[20700] F-OVARC1001051

[20701] F-OVARC1001055//Human pre-B cell enhancing factor (PBEF) mRNA, complete cds//1.1e-46:381:81//Hs.154968:U02020

[20702] F-OVARC1001062//ESTs//0.020:265:60//Hs.146226:AI312873

[20703] F-OVARC1001065//ESTs, Weakly similar to C50F4.12 [C. elegans]//1.4e-21:183:84//Hs.46680:AA809451

[20704] F-OVARC1001068//Homo sapiens Era GTPase A protein (HERA-A) mRNA, partial cds//6.6e-132:620:98//Hs.3426:AF082657

[20705] F-OVARC1001072//ESTs//1.1e-24:289:74//Hs.139614:AA709013

[20706] F-OVARC1001074//ESTs//0.059:198:63//Hs.59974:AA001937

[20707] F-OVARC1001085//H. sapiens mRNA for sortilin//0.99:142:67//Hs.104247:X98248

[20708] F-OVARC1001092//Homo sapiens mRNA for JM5 protein, complete CDS (clone IMAGE 53337, LLNLc110F1857Q7 (RZPD Berlin) and LLNLc110GO913Q7 (RZPD Berlin))//1.3e-75:289:95//Hs.21753:AJ005897

[20709] F-OVARC1001107//Homo sapiens SKBIHs mRNA, complete cds//1.2e-73:351:86//Hs.12912:AF015913

[20710] F-OVARC1001113//Homo sapiens diaphanous 1 (HDIA1) mRNA, complete cds//2.1e-151:710:98//Hs.26584:AF051782

[20711] F-OVARC1001117//ESTs//3.8e-73:347:99//Hs.116029:AA813102

[20712] F-OVARC1001118

[20713] F-OVARC1001129

[20714] F-OVARC1001154//Granulin//2.4e-94:686:83//Hs.75451:AF055008

[20715] F-OVARC1001161//ESTs//2.2e-40:208:97//Hs.113006:AA621725

[20716] F-OVARC1001162

[20717] F-OVARC1001167

[20718] F-OVARC1001169//ESTs//0.81:158:63//Hs.48527:AI078279

[20719] F-OVARC1001170//ESTs//9.0e-87:412:99//Hs.116550:AA813287

[20720] F-OVARC1001171//ESTs//4.9e-26:167:79//Hs.139158:AA226159

[20721] F-OVARC1001173//ESTs, Moderately similar to GLUTAMATE DEHYDROGENASE 1 PRECURSOR [Homo sapiens]//1.8e-11:192:69//Hs.130020:AA887581

[20722] F-OVARC1001176//Homo sapiens chromosome 19, cosmid R26529//0.61:387:58//Hs.91103:AC005551

[20723] F-OVARC1001180//ESTs, Weakly similar to ubiquitin S6(1) [D. melanogaster]//1.5e-13:199:71//Hs.109966:C06057

[20724] F-OVARC1001188//ESTs, Weakly similar to HYPOTHETICAL 27.8 KD PROTEIN IN VMA7-RPS31 A INTERGENIC REGION [S .cerevisiae]//1.4e-52:324:90//Hs.114673:W72675

[20725] F-OVARC1001200//ESTs//3.9e-16:104:94//Hs.125520:AA883889

[20726] F-OVARC1001232//Cyclin A//0.95:124:67//Hs.85137:X51688

[20727] F-OVARC1001240//EST//0.017:351:60//Hs.120655:AA745676

[20728] F-OVARC1001243//ESTs//0.78:291:59//Hs.132458:AI424825

[20729] F-OVARC1001244//RING3 PROTEIN//2.8e-19:118:95//Hs.75243:D42040

[20730] F-OVARC1001261//EST//1.9e-42:225:96//Hs.158854:AI377837

[20731] F-OVARC1001268//ESTs//0.66:239:61//Hs.132525:AA576821

[20732] F-OVARC1001270//ESTs//0.99:204:60//Hs.144647:AA625224

[20733] F-OVARC1001271//Homo sapiens mRNA for KIAA0643 protein, partial cds//6.8e-144:644:96//Hs.155995:AB014543

[20734] F-OVARC1001282//ESTs, Weakly similar to Ydr438wp [S. cerevisiae]//0.11:355:60//Hs.108812:AA044835

[20735] F-OVARC1001296//ESTs//1.1e-46:237:98//Hs.33746:N78172

[20736] F-OVARC1001306//Homo sapiens nuclear receptor co-repressor N-CoR mRNA, complete cds//0.20:188:64//Hs.152455:AF044209

[20737] F-OVARC1001329//ESTs//1.4e-97:486:97//Hs.125886:AA884264

[20738] F-OVARC1001330

[20739] F-OVARC1001339//Solute carrier family 4, anion exchanger, member 2 (erythrocyte membrane protein band 3-like 1)//0.021:232:62//Hs.79410:U62531

[20740] F-OVARC1001341//ESTs, Weakly similar to C17G 10.1 [C. elegans]//2.5e-76:363:99//Hs.105837:AA536054

[20741] F-OVARC1001342//EST//10.98:97:65//Hs.148210:AA897493

[20742] F-OVARC1001344//EST//5.3e-10:241:64//Hs.138777:N67251

[20743] F-OVARC11001357//Homo sapiens jerky gene product homolog mRNA, complete cds//0.64:198:61//Hs.105940:AF004715

[20744] F-OVARC1001360//ESTs//4.9e-87:429:97//Hs.130145:AI264633

[20745] F-OVARC1001369//ESTs//6.3e-07:371:62//Hs.131653:AI025777

[20746] F-OVARC1001372//Homo sapiens mRNA for KIAA0654 protein, partial cds//1.4e-69:533:74//Hs.109299:AB014554

[20747] F-OVARC1001376//Homo sapiens neuronal thread protein AD7c-NTP mRNA, complete cds//2.5e-49:365:73//Hs.129735:AF010144

[20748] F-OVARC1001381//Homo sapiens mRNA for candidate tumor suppressor involved in B-CLL//4.1e-149:683:99//Hs.151428:AJ224819

[20749] F-OVARC1001391//Homo sapiens methyl-CpG binding protein MBD2 (MBD2) mRNA, complete cds//0.097:235:65//Hs.25674:AF072242

[20750] F-OVARC1001399//ESTs//1.1e-35:264:83//Hs.59379:W28225

[20751] F-OVARC1001417//Homo sapiens EXLM1 mRNA, complete cds//1.3e-150:707:98//Hs.21586:AB006651

[20752] F-OVARC1001419//Homo sapiens GOK (STIM1) mRNA, complete cds//1.6e-49:586:69//Hs.74597:U52426

[20753] F-OVARC1001425//ESTs//2.4e-111:258:67//Hs.119197:T83651

[20754] F-OVARC1001436

[20755] F-OVARC1001442

[20756] F-OVARC1001453

[20757] F-OVARC1001476//ESTs, Weakly similar to HYPOTHETICAL 38.6 KD PROTEIN IN TIF4631-KRE11 INTERGENIC REGION [S. cerevisiae]//1.9e-125:581:99//Hs.110950:AI041823

[20758] F-OVARC1001480//ESTs//0.95:125:72//Hs.152584:AA584568

[20759] F-OVARC1001489//EST//4.9e-72:341:100//Hs.148191:AA897343

[20760] F-OVARC1001496//Homo sapiens C-terminal binding protein 2 mRNA, complete cds//2.6e-86:479:92//Hs.6534:AF016507

[20761] F-OVARC1001506//Polycystic kidney disease 1 (autosomal dominant)//1.1e-97:538:92//Hs.75813:L33243

[20762] F-OVARC1001525

[20763] F-OVARC1001542//Envoplakin//0.34:258:60//Hs.25482:U53786

[20764] F-OVARC1001547//EST//0.0046:237:62//Hs.54638:N90595

[20765] F-OVARC1001555

[20766] F-OVARC1001577//Homo sapiens SRp46 splicing factor retropseudogene mRNA//6.8e-57:275:98//Hs.155160:AF031166

[20767] F-OVARC1001600//ESTs, Weakly similar to !!!! ALU SUBFAMILY J WARNING ENTRY!!!! [H. sapiens]//0.0035:271:60//Hs.108465:A1144299

[20768] F-OVARC1001610//ESTs, Weakly similar to F22E10.5 [C. elegans]//1.4e-43:216:99//Hs.120002:AI038398

[20769] F-OVARC1001611

[20770] F-OVARC100161511EST//0.99:135:68//Hs.129410:AA993500

[20771] F-OVARC1001668//Homo sapiens mRNA for KIAA0572 protein, partial cds//3.3e-37:217:94//Hs.14409:AB011144

[20772] F-OVARC1001702//Homo sapiens mRNA for hSOX20 protein, complete cds//5.9e-49:393:81//Hs.95582:AB006867

[20773] F-OVARC1001703//EST//1.7e-24:172:88//Hs.121198:AA757229

[20774] F-OVARC1001711//Fms-related tyrosine kinase 3 ligand//0.049:353:61//Hs.428:U03858

[20775] F-OVARC1001713//ESTs//8.9e-37:263:86//Hs.110298:AA621807

[20776] F-OVARC1001726//ESTs//2.0e-12:121:82//Hs.153332:AA236863

[20777] F-OVARC1001731//Tropomyosin beta chain (skeletal muscle)//1.7e-83:617:80//Hs.155652:X06825

[20778] F-OVARC1001745//EST//0.75:174:64//Hs.146778:AI148588

[20779] F-OVARC1001762

[20780] F-OVARC1001766//Homo sapiens eukaryotic translation initiation factor eIF3, p35 subunit mRNA, complete cds//1.4e-150:706:98//Hs.155377:U97670

[20781] F-OVARC1001767//Homo sapiens mRNA for KIAA0675 protein, complete cds//9.8e-117:580:96//Hs.15869:AB014575

[20782] F-OVARC1001768//ESTs//0.035:179:64//Hs.87279:AI218697

[20783] F-OVARC1001791

[20784] F-OVARC1001795//ESTs//1.19:68:76//Hs.37699:AA062830

[20785] F-OVARC1001802//EST//3.7e-45:254:92//Hs.130620:AI005102

[20786] F-OVARC1001805//Homo sapiens mRNA for KIAA0744 protein, complete cds/10.77:362:58//Hs.116753:AB018287

[20787] F-OVARC1001809//Human N-type calcium channel alpha-1 subunit mRNA, complete cds//2.2e-07:435:62//Hs.69949:M94172

[20788] F-OVARC1001812//ESTs//3.0e-47:360:83//Hs.141756:AA700825

[20789] F-OVARC1001813//EST//1.8e-57:277:100//Hs.162414:AA573453

[20790] F-OVARC1001820//ESTs//1.4e-64:310:99//Hs.137398:AA164567

[20791] F-OVARC1001828//EST//1.0e-09:184:66//Hs.130435:AA923537

[20792] F-OVARC1001846//ESTs//1 .8e-80:410:97//Hs.114539:N54973

[20793] F-OVARC1001861

[20794] F-OVARC1001873//Homo sapiens clones 24718 and 24825 mRNA sequence//3.9e-20:122:95//Hs.25300:AF070611

[20795] F-OVARC1001879//Homo sapiens putative tumor suppressor gene 26 protein alpha 2 delta calcium channel subunit mRNA, complete cds//0.042:199:67//Hs.127436:AF040709

[20796] F-OVARC1001880//Interferon regulatory factor 5//1.1e-06:489:60//Hs.54434:U51127

[20797] F-OVARC1001883//Homo sapiens mRNA, chromosome 1 specific transcript KIAA0484//9.5e-33:509:68//Hs.158095:AB007953

[20798] F-OVARC1001900//Homo sapiens tumorous imaginal discs protein Tid56 homolog (TID1) mRNA, complete cds//2.6e-57:300:96//Hs.6216:AF061749

[20799] F-OVARC1001901//ESTs//2.3e-07:185:69//Hs.145630:AI263834

[20800] F-OVARC1001911//EST//0.88:101:66//Hs.162622:AA601261

[20801] F-OVARC1001916//H. sapiens mRNA for prepronociceptin//1.0:540:58//Hs.89040:U48263

[20802] F-OVARC1001928

[20803] F-OVARC1100942//Human plectin (PLEC1) mRNA, complete cds//0.038:290:62//Hs.79706:U53204

[20804] F-OVARC1001943//ESTs, Weakly similar to HYPOTHETICAL 62.2 KD PROTEIN ZK652.6 IN CHROMOSOME III [C. elegans]//2.3e-119:565:98//Hs.5392:AA313794

[20805] F-OVARC1100949//KRAB zinc finger protein {alternative products}//1.8e-17:294:67//Hs.22556:U37251

[20806] F-OVARC1001950//ESTs//1.5e-15:300:65//Hs.138501:AI0551228

[20807] F-OVARC1001987//ESTs//6.7e-34:202:92//Hs.115600:AA351639

[20808] F-OVARC1001989//ESTs, Weakly similar to !!!! ALU SUBFAMILY J WARNING ENTRY !!!! [H. sapiens]//1.2e-23:213:78//Hs.105292:AA504776

[20809] F-OVARC1002044//EST//0.26:164:66//Hs.161094:N30417

[20810] F-OVARC1002050//Homo sapiens mRNA for KIAA0465 protein, partial cds//6.6e-160:739:98//Hs.108258:AB007934

[20811] F-OVARC1002066//ESTs//1.8e-103:482:99//Hs.124923:AI375865

[20812] F-OVARC1002082//EST//2.5e-09:213:67//Hs.112810:AA610063

[20813] F-OVARC1002107

[20814] F-OVARC1002112//Homo sapiens histone macroH2A1.2 mRNA, complete cds//2.7e-101:498:96//Hs.75258:AF054174

[20815] F-OVARC1002127//ESTs//1.6e-76:397:96//Hs.33432:R83913

[20816] F-OVARC1002138//Homo sapiens p60 katanin mRNA, complete cds//3.5e-20:399:62//Hs.112725:AF056022

[20817] F-OVARC1002143//EST//4.2e-09:240:65//Hs.140547:AA812795

[20818] F-OVARC1002156//EST//0.35:112:66//Hs.136761:AA738097

[20819] F-OVARC1002158//ESTs, Weakly similar to Y53C12A.3 [C. elegans]//7.4e-07:329:58//Hs.107747:AI357868

[20820] F-OVARC1002165//H. sapiens BDPI mRNA for protein-tyrosine-phosphatase//0.00010:300:64//Hs.118929:X79568

[20821] F-OVARC1002182//Homo sapiens ataxin-7 (SCA7) mRNA, complete cds//0.19:178:64//Hs.108447:AJ000517

[20822] F-PLACE1000004//ESTs//0.79:332:59//Hs.120221:AA731230

[20823] F-PLACE1000005//ESTs//1.8e-10:89:87//Hs.158913 AI3:78928

[20824] F-PLACE1000007//Homo sapiens ubiquitin hydrolyzing enzyme I (UBHI) mRNA, partial cds//1.2e-52:550:72//Hs.42400:AF022789

[20825] F-PLACE1000014

[20826] F-PLACE1000031

[20827] F-PLACE1000040//ESTs//3.1e-18:123:91//Hs.138387:AA873088

[20828] F-PLACE1000048//ESTs//1.2e-43:387:78//Hs.61199:AA024494

[20829] F-PLACE1000050//ESTs//1.8e-84:421:96//Hs.128632:AI076755

[20830] F-PLACE1000061//Ribosomal protein L37a//5.5e-29:177:93//Hs.1946:L06499

[20831] F-PLACE1000066//ESTs, Weakly similar to coded for by C. elegans cDNA yk10c10.3 [C. elegans]//1.4e-47:266:93//Hs.30026:AI356771

[20832] F-PLACE1000078//ESTs, Weakly similar to !!!! ALU SUBFAMILY SB1 WARNING ENTRY !!!! [H. sapiens]//6.4e-15:203:70//Hs.157422:R85366

[20833] F-PLACE1000081//Human transporter protein (g17) mRNA, complete cds//0.30:324:60//Hs.76460:U49082

[20834] F-PLACE1000094

[20835] F-PLACE1000133//ESTs, Highly similar to TRANSCRIPTION FACTOR BTF3 [Homo sapiens]//6.2e-82:476:92//Hs.111081:AI380378

[20836] F-PLACE1000142//ESTs, Weakly similar to enoyl-CoA hydratase [H. sapiens]//7.7e-27:205:85//Hs.9670:AA632135

[20837] F-PLACE1000184//Homo sapiens estrogen-related receptor gamma mRNA, complete cds//2.5e-151:737:97//Hs.151017:AF058291

[20838] F-PLACE1000185

[20839] F-PLACE1000213

[20840] F-PLACE1000214//ESTs//0.00059:335:59//Hs.143849:AI167255

[20841] F-PLACE1000236//Fanconi anemia, complementation group A//0.44:306:61//Hs.86297:X99226

[20842] F-PLACE1000246//ESTs//7.3e-80:457:89//Hs.57209:W22022

[20843] F-PLACE1000292//ESTs//1.8e-05:323:60//Hs.59962:AI278202

[20844] F-PLACE1000308//EST//0.0024:253:62//Hs.144238:W52294

[20845] F-PLACE1000332//EST//5.6e-18:223:74//Hs.99532:AA461047

[20846] F-PLACE1000347//ESTs//6.4e-33:169:99//Hs.122975:AA428675

[20847] F-PLACE1000374//Human CCAAT-box-binding factor (CBF) mRNA, complete cds//0.26:45:95//Hs.147991:M37197

[20848] F-PLACE1000380//Homo sapiens proline and glutamic acid rich nuclear protein isoform mRNA, partial cds//1.0:262:58//Hs.102732:U88153

[20849] F-PLACE1000383//Myotubular myopathy 1//1.1e-50:669:67//Hs.75302:U46024

[20850] F-PLACE1000401//Homo sapiens mRNA for KIAA0616 protein, partial cds//0.036:471:58//Hs.6051:AB014516

[20851] F-PLACE1000406//ESTs, Highly similar to PTB-ASSOCIATED SPLICING FACTOR [Homo sapiens]//8.7e-63:346:93//Hs.19501:AA742260

[20852] F-PLACE1000420//Homo sapiens mRNA for KIAA0602 protein, partial cds//0.0023:216:65//Hs.37656:AB011174

[20853] F-PLACE1000421//Human lipid-activated protein kinase PRK1 mRNA, complete cds//0.55:212:63//Hs.2499:U33053

[20854] F-PLACE1000424

[20855] F-PLACE1000435//Homo sapiens mRNA for XPR2 protein//0.58:674:55//Hs.44766:AJ007590

[20856] F-PLACE1000444//Fucosyltransferase I (galactoside 2-alpha-L-fucosyltransferase, Bombay phenotype included)//2.7e-52:421:80//Hs.69747:M35531

[20857] F-PLACE1000453//Human mRNA for MTG8a protein, complete cds//0.026:240:60//Hs.31551:D43638

[20858] F-PLACE1000481//Oxytocin receptor//1.6e-25:347:71//Hs.2820:X64878

[20859] F-PLACE1000492//Human mRNA for KIAA0355 gene, complete cds//0.58:302:60//Hs.153014:AB002353

[20860] F-PLACE1000540//EST//0.32:229:59//Hs.163011:AA700573

[20861] F-PLACE1000547//Human heparan sulfate proteoglycan (HSPG2) mRNA, complete cds//0.0046:223:65//Hs.75578:M85289

[20862] F-PLACE1000562

[20863] F-PLACE1000564//ESTs//8.0e-35:247:89//Hs.12999:AA278538

[20864] F-PLACE1000583//Homo sapiens clone 23939 mRNA sequence//6.6e-47:525:72//Hs.21838:AF038179

[20865] F-PLACE1000588//Guanylate binding protein 1, interferon-inducible, 67 kD//2.3e-85:503:88//Hs.62661:M55542

[20866] F-PLACE1000596//Homo sapiens mRNA for NS1-binding protein (NS1-BP)//1.2e-165:798:97//Hs.159597:AJ012449

[20867] F-PLACE1000599//ESTs//0.65:201:58//Hs.98216:AA758751

[20868] F-PLACE1000610//Homo sapiens mRNA for KIAA0642 protein, partial cds//0.98:215:60//Hs.8152:AB014542

[20869] F-PLACE1000611//ESTs//7.2e-20:406:64//Hs.128966:AA620986

[20870] F-PLACE1000636

[20871] F-PLACE1000653//Homo sapiens N-acetylglucosamine-phosphate mutase mRNA, complete cds//5.0e-154:747:96//Hs.5819:AF102265

[20872] F-PLACE1000656//Homo sapiens mRNA for JM4 protein, complete CDS (clone IMAGE 546750 and LLNLc110F1857Q7 (RZPD Berlin))//7.5e-158:775:97//Hs.29595:AJ005896

[20873] F-PLACE1000706//Homo sapiens transcription intermediary factor 1 (TIF1) mRNA, complete cds//1.0e-57:675:69//Hs.128763:AF009353

[20874] F-PLACE1000712//EST//0.56:171:61//Hs.112790:AA609949

[20875] F-PLACE1000716//Human mRNA for KIAA0258 gene, complete cds//6.1e-38:426:70//Hs.47313:D87447

[20876] F-PLACE1000748//ESTs//2.6e-43:233:95//Hs.110754:AA112288

[20877] F-PLACE1000749//Human MAGE-9 antigen (MAGE9) gene, complete cds//0.72:331:57//Hs.37110:U10694

[20878] F-PLACE1000755//NUCLEOLIN//0.0038:186:66//Hs.79110:M60858

[20879] F-PLACE1000769

[20880] F-PLACE1000785//Homo sapiens mRNA for KIAA0648 protein, partial cds//1.1e-139:663:98//Hs.31921:AB014548

[20881] F-PLACE1000786//Myosin, heavy polypeptide 9, non-muscle//8.5e-06:362:59//Hs.44782:Z82215

[20882] F-PLACE1000793//ESTs//2.7e-62:315:97//Hs.16141:W56079

[20883] F-PLACE1000798//ESTs//1.4e-55:316:93//Hs.139119:N32189

[20884] F-PLACE1000841//EST//0.47:143:61//Hs.144096:AI032180

[20885] F-PLACE1000849//Homo sapiens CAGF9 mRNA, partial cds//1.6e-06:266:63//Hs.110826:U80736

[20886] F-PLACE1000856//ESTs//2.6e-60:319:96//Hs.25994:AA470000

[20887] F-PLACE1000863//EST//9.4e-29:249:78//Hs.121919:AA777428

[20888] F-PLACE1000909//ESTs//0.97:214:60//Hs.128601:AA906455

[20889] F-PLACE1000931//ESTs//2.1e-46:592:70//Hs.154244:AA195201

[20890] F-PLACE1000948

[20891] F-PLACE1000972//Homo sapiens enhancer of filamentation (HEFI) mRNA, complete cds//7.9e-10:294:66//Hs.80261:L43821

[20892] F-PLACE1000977//ESTs, Weakly similar to coded for by C. elegans cDNA yk28h2.5 [C. elegans]//9.3e-45:309:88//Hs.13531:R61789

[20893] F-PLACE1000979//Zinc finger protein 91 (HPF7, HTF10)//0.0034:229:62//Hs.8597:LI 1672

[20894] F-PLACE1000987//Homo sapiens mRNA for KIAA0724 protein, complete cds//2.6e-141:694:96//Hs.158497:AB018267

[20895] F-PLACE1001000//ESTs//0.0035:116:73//Hs.144532:H39913

[20896] F-PLACE1001007//Guanylate cyclase 2D, membrane (retina-specific)//0.050:338:61//Hs.1974:M92432

[20897] F-PLACE1001010//H. sapiens mRNA for retrotransposon//1.6e-45:371:80//Hs.6940:Z48633

[20898] F-PLACE1001015//ESTs//8.6e-27:211:71//Hs.88040:AA256876

[20899] F-PLACE1001024

[20900] F-PLACE1001036//EST//1.0:133:65//Hs.161424:AI424741

[20901] F-PLACE1001054//Human plectin (PLEC1) mRNA, complete cds//0.98:284:59//Hs.79706:U53204

[20902] F-PLACE1001062

[20903] F-PLACE1001076//EST//0.84:223:59//Hs.161147:AI417859

[20904] F-PLACE1001088

[20905] F-PLACE1001092//Homo sapiens sorting nexin 4 mRNA, complete cds//1.0e-96:489:96//Hs.95448:AF065485

[20906] F-PLACE1001104//ESTs//0.19:249:64//Hs.152627:AA595817

[20907] F-PLACE1001118//Homo sapiens KRAB domain zinc finger protein (ZFP37) mRNA, complete cds//8.2e-66:676:71//Hs.150406:AF022158

[20908] F-PLACE1001136//Amphiregulin (schwannoma-derived growth factor)//1.5e-16:122:91//Hs.1257:M30704

[20909] F-PLACE1001168

[20910] F-PLACE1001171//ESTs//4.3e-12:214:72//Hs.141392:R95135

[20911] F-PLACE1001185//ESTs, Weakly similar to ZK792.1 [C. elegans]//1.6e-28:421:66//Hs.8763:W30741

[20912] F-PLACE1001238

[20913] F-PLACE1001241//ESTs//1.1e-22:225:79//Hs.159786:R49494

[20914] F-PLACE1001257//ESTs//1.9e-23:165:89//Hs.126518:AA913929

[20915] F-PLACE1001272//COATOMER BETA SUBUNIT//0.012:50:96//Hs.75724:X70476

[20916] F-PLACE1001279//ESTs//0.97:377:59//Hs.152628:N51283

[20917] F-PLACE1001280//Homo sapiens hyperpolarization-activated channel 1 (IHI) mRNA, partial cds//1.2e-08:586:58//Hs.124161:AF065164

[20918] F-PLACE1100294//Homo sapiens mRNA for myosin phosphatase target subunit 1 (MYPTI)//0.91:221:61//Hs.16533:D87930

[20919] F-PLACE1001304//Human zinc finger protein mRNA, complete cds//8.6e-08:370:60//Hs.42672:AF016052

[20920] F-PLACE1001311//ESTs//1.7e-44:480:73//Hs.155384:Z78385

[20921] F-PLACE1001323//ESTs//1.1e-25:151:95//Hs.134120:AA699591

[20922] F-PLACE1001351

[20923] F-PLACE1001366//Homo sapiens mRNA for KIAA0799 protein, partial cds//2.8e-26:155:95//Hs.61638:AB018342

[20924] F-PLACE1001377//Homo sapiens ADAM 10 (ADAM 10) mRNA, complete cds//3.4e-44:393:79//Hs.152005:AF009615

[20925] F-PLACE1001383//ESTs//1.0:159:65//Hs.128501:AA973748

[20926] F-PLACE1001384//Homo sapiens multi PDZ domain protein MUPP1 (MUPP1) mRNA, complete cds//2.6e-09:117:84//Hs.21301:AF093419

[20927] F-PLACE1001387//ESTs, Weakly similar to EPIDERMAL GROWTH FACTOR RECEPTOR KINASE SUBSTRATE EPS8 [H. sapiens]//0.00083:187:64//Hs.5399:N30646

[20928] F-PLACE1001395//Homo sapiens mRNA for putative DNA methyltransferase, complete CDS//0.0038:496:57//Hs.97681:AJ223333

[20929] F-PLACE1001399//Human melanoma antigen recognized by T-cells (MART-1) mRNA//7.0e-45:456:75//Hs.154069:U06452

[20930] F-PLACE1001412//Homo sapiens clone 643 unknown mRNA, complete sequence//6.5e-71:365:96//Hs.110404:AF091087

[20931] F-PLACE1001414//EST//1.2e-75:364:98//Hs.136622:AA633232

[20932] F-PLACE1001440//ESTs//2.8e-05:163:66//Hs.141082:H 18987

[20933] F-PLACE1001456//EST//0.95:132:61//Hs.20373:R09510

[20934] F-PLACE1001468//ESTs//0.00019:184:66//Hs.126536:AI379455

[20935] F-PLACE1001484//EST//8.6e-18:190:76//Hs.160992:H52716

[20936] F-PLACE1001502//Apolipoprotein E//2.5e-05:306:60//Hs.76260:M 12529

[20937] F-PLACE1001503

[20938] F-PLACE1001517//ESTs//1.9e-12:138:78//Hs.120352:AA718914

[20939] F-PLACE1001534//EST//0.015:121:65//Hs.144156:R85753

[20940] F-PLACE1001545

[20941] F-PLACE1001551

[20942] F-PLACE1001570//EST//0.58:286:59//Hs.120202:AA728835

[20943] F-PLACE1001602//Human POU domain protein (Brn-3b) mRNA, complete cds//0.013:159:66//Hs.266:U06233

[20944] F-PLACE1001603//Homo sapiens nitrilase I (NIT1) mRNA, complete cds//1.1e-10:133:77//Hs.146406:AF069987

[20945] F-PLACE1001608//ESTs//0.022:187:60//Hs.145915:AI342230

[20946] F-PLACE1001610//ESTs//1.4e-77:377:97//Hs.115700:AA808005

[20947] F-PLACE1001611//Human faciogenital dysplasia (FGD1) mRNA, complete cds//0.96:141:66//Hs.1572:U11690

[20948] F-PLACE1100632//Homo sapiens mRNA for KIAA0798 protein, complete cds//3.4e-76:702:75//Hs.159277:AB018341

[20949] F-PLACE1001634//ESTs//1.2e-43:260:92//Hs.134064:AI276198

[20950] F-PLACE1001640

[20951] F-PLACE1001672//EST//2.8e-21:201:82//Hs.123341:AA810927

[20952] F-PLACE1001691//Homo sapiens okadaic acid-inducible phosphoprotein (OA48-18) mRNA, complete cds//2.8e-148:726:96//Hs.3688:AF069250

[20953] F-PLACE1001692//ESTs, Highly similar to S-ACYL FATTY ACID SYNTHASE THIOESTERASE, MEDIUM CHAIN [Rattus norvegicus]//1.1e-95:481:92//Hs.24309:AI125696

[20954] F-PLACE1001705//Human RNA polymerase III subunit (RPC39) mRNA, complete cds//6.0e-30:347:76//Hs.101555:U93869

[20955] F-PLACE1100716//Human mRNA for KIAA0191 gene, partial cds//2.1e-69:369:73//Hs.12413:D83776

[20956] F-PLACE1001720//ESTs//1.2e-27:146:99//Hs.106432:AI391686

[20957] F-PLACE1001729//Homo sapiens mRNA for KIAA0522 protein, partial cds//0.0084:484:60//Hs.129892:AB011094

[20958] F-PLACE1001739//Histidine-rich calcium binding protein//1.14:240:64//Hs.1480:M60052

[20959] F-PLACE001740//ESTs//4.9e-32:343:74//Hs.139158:AA226159

[20960] F-PLACE1001745

[20961] F-PLACE1001746//ESTs//7.0e-15:168:80//Hs.46601:N78361

[20962] F-PLACE1100748//Homo sapiens metalloprotease 1 (MP1) mRNA, complete cds//2.8e-160:773:97//Hs.4812:AF061243

[20963] F-PLACE1001756//Homo sapiens tapasin (NGS-17) mRNA, complete cds//2.7e-35:269:83//Hs.5247:AF029750

[20964] F-PLACE1001761//ESTs//6.9e-27:159:93//Hs.78277:AA131283

[20965] F-PLACE1001771//Human putative calcium influx channel (htrp3) mRNA, complete cds//3.4e-52:548:72//Hs.150981:U47050

[20966] F-PLACE1001781

[20967] F-PLACE1001799//EST//5.4e-07:145:70//Hs.121840:AA776115

[20968] F-PLACE1001810//ESTs//0.024:134:67//Hs.43134:AA766138

[20969] F-PLACE1001817//Homo sapiens ATP-specific succinyl-CoA synthetase beta subunit (SCS) mRNA, partial cds//3.6e-110:546:96//Hs.40820:AF058953

[20970] F-PLACE1001821

[20971] F-PLACE1001844//ESTs//5 .4e-45:387:79//Hs.61199:AA024494

[20972] F-PLACE1001845//ESTs//2.5e-47:232:100//Hs.120809:AA150214

[20973] F-PLACE1001869//EST//1.0:139:59//Hs.122285:AA781906

[20974] F-PLACE1001897//ESTs//0.29:348:57//Hs.139993:AI343257

[20975] F-PLACE1001912//ESTs//4.0e-10:95:89//Hs.13475:R18220

[20976] F-PLACE1001920//Homo sapiens TNF-induced protein GG2-1 mRNA, complete cds//4.0e-153:685:95//Hs.17839:AF099936

[20977] F-PLACE1001928//H. sapiens HUMM9 mRNA//0.063:196:66//Hs.2750:X74837

[20978] F-PLACE1001983//Homo sapiens Jagged 2 mRNA, complete cds//9.8e-06:431:58//Hs.106387:AF029778

[20979] F-PLACE1001989

[20980] F-PLACE1002004

[20981] F-PLACE1002046

[20982] F-PLACE1002052//Human mRNA for phospholipase C, complete cds//0.0092:465:58//Hs.153322:D42108

[20983] F-PLACE1002066//EST//0.49:307:61//Hs.150652:AA908555

[20984] F-PLACE1002072//EST//1.0:103:65//Hs.116488:F13707

[20985] F-PLACE1002073//Homo sapiens mRNA for KIAA0606 protein, partial cdsll4.2e-39:635:64//Hs.38176:AB011178

[20986] F-PLACE1002090//Homo sapiens signal recognition particle 72 (SRP72) mRNA, complete cds//4.3e-83:388:99//Hs.5171:AF069765

[20987] F-PLACE1002115EST//10.18:215:62//Hs.135747:AI002637

[20988] F-PLACE1002119//Human transcription factor ETR101 mRNA, complete cds//6.2e-13:384:61//Hs.737:M62831

[20989] F-PLACE1002140//EST, Moderately similar to ALPHA-1-ANTITRYPSIN PRECURSOR [Homo sapiens]//0.89:60:75//Hs.144290:T61747

[20990] F-PLACE1002150//ESTs//0.56:245:641//Hs.24119:AA115631

[20991] F-PLACE1002157//Human mRNA for KIAA0392 gene, partial cds//2.8e-51:440:79//Hs.40100:AB002390

[20992] F-PLACE1002163//ESTs//0.76:212:61//Hs.112494:AI366891

[20993] F-PLACE1002170//ESTs//6.5e-09:108:761//Hs.41418:H90627

[20994] F-PLACE1002171//ESTs//3.5e-81:493:89//Hs.122553:H66674

[20995] F-PLACE1002205//Human clone 23695 mRNA sequence//0.00080:472:60//Hs.90798:U79289

[20996] F-PLACE1002213//ESTs//0.041:146:67//Hs.119162:AA399989

[20997] F-PLACE1002227//ESTs//9.4e-06:173:66//Hs.127882:AI024442

[20998] F-PLACE1002256//ESTs//1.8e-93:440:99//Hs.128700:AA970935

[20999] F-PLACE1002259//Human Line-1 repeat mRNA with 2 open reading frames//2.3e-75:434:83//Hs.23094:M19503

[21000] F-PLACE1002319//ESTs//0.82:188:62//Hs.50918:AA036675

[21001] F-PLACE1002342//EST//0.61:148:66//Hs.144319:AA280279

[21002] F-PLACE1002395//ESTs//1.2e-18:168:83//Hs.3853:AA034291

[21003] F-PLACE1002399//EST//0.0011:166:65//Hs.137500:AA436710

[21004] F-PLACE1002433//ESTs//1.2e-14:151:80//Hs.161837:AA421067

[21005] F-PLACE1002437//Human ATP binding cassette transporter (ABCR) mRNA, complete cds//2.6e-23:458:66//Hs.40993:AF000148

[21006] F-PLACE1002438//EST//0.81:48:77//Hs.158575:AI368947

[21007] F-PLACE1002450//Homo sapiens KRAB domain zinc finger protein (ZFP37) mRNA, complete cds//7.1e-07:270:66//Hs.150406:AF022158

[21008] F-PLACE1002465

[21009] F-PLACE1002474//Homo sapiens mRNA for matrilin-4, partial//1.3e-14:369:63//Hs.129361:AJ007581

[21010] F-PLACE1002477//ESTs//3.5e-13:125:71//Hs.145032:AA343523

[21011] F-PLACE1002493

[21012] F-PLACE1002499

[21013] F-PLACE1002500//Human putative zinc transporter ZnT-3 (ZnT-3) mRNA, complete cds//4.3e-19:708:59//Hs.111967:U76010

[21014] F-PLACE1002514//ESTs//3.1e-07:178:66//Hs.70932:AA126482

[21015] F-PLACE1002529//Homo sapiens mRNA for KIAA0713 protein, partial cds//2.9e-144:583:95//Hs.88756:AB018256

[21016] F-PLACE1002532//Homo sapiens BAC clone RG300E22 from 7q21-q31.1//3.1e-115:566:96//Hs.99348:AC004774

[21017] F-PLACE1002537//Thiopurine S-methyltransferase//1.9e-28:198:86//Hs.51124:AF019369

[21018] F-PLACE1002571//Homo sapiens mRNA for TP55, complete cds//0.99:274:59//Hs.138202:AF027866

[21019] F-PLACE1002578//ESTs//7.3e-10:185:73//Hs.41418:H90627

[21020] F-PLACE1002583//EST//0.0028:348:61//Hs.160396:AI393725

[21021] F-PLACE1002591//Human mRNA for actin binding protein p57, complete cds//2.8e-27:279:74//Hs.109606:D44497

[21022] F-PLACE1002598//EST//0.011:209:62//Hs.131470:AI024187

[21023] F-PLACE1002604//EST//0.47:220:61//Hs.145434:AI198915

[21024] F-PLACE1002625

[21025] F-PLACE1002655//GELSOLIN PRECURSOR, PLASMA//1.7e-36:693:62//Hs.80562:X04412

[21026] F-PLACE1002665//EST//0.15:156:65//Hs.161793:AA380706

[21027] F-PLACE1002685//Homo sapiens B cell linker protein BLNK mRNA, alternatively spliced, complete cds//1.1e-187:804:97//Hs.124903:AF068180

[21028] F-PLACE1002714//Human involucrin mRNA//3.6e-08:509:60//Hs.157091:M13903

[21029] F-PLACE1002722//Human protease-activated receptor 3 (PAR3) mRNA, complete cds//0.34:230:58//Hs.159196:U92971

[21030] F-PLACE1002768//EST//0.37:126:69//Hs.125353:AA877080

[21031] F-PLACE1002772//ESTs//0.0017:147:69//Hs.132439:AA923728

[21032] F-PLACE1002775//EST//5.5e-09:129:75//Hs.135336:AI049827

[21033] F-PLACE1002782//Homo sapiens I-1 receptor candidate protein mRNA, complete cds//0.0031:298:62//Hs.26285:AF082516

[21034] F-PLACE1002794//ESTs//0.71:125:66//Hs.97441:AI368926

[21035] F-PLACE1002811//Human mRNA for KIAA0172 gene, partial cds//5.8e-46:567:70//Hs.77546:D79994

[21036] F-PLACE1002815

[21037] F-PLACE1002816//Homo sapiens mRNA for KIAA0600 protein, partial cds//4.3e-70:687:73//Hs.9028:AF039691

[21038] F-PLACE1002834//ESTs//2.6e-41:393:74//Hs.120206:AI089163

[21039] F-PLACE1002839//ESTs//0.26:177:63//Hs.149013:AI334167

[21040] F-PLACE1002851//EST//0.0034:102:72//Hs.129630:AI000405

[21041] F-PLACE1002853//ESTs//1.1e-20:136:90//Hs.125895:AA889024

[21042] F-PLACE1002881//Interleukin 10//1.1e-41:454:72//Hs.2180:M57627

[21043] F-PLACE1002908//ESTs//3.8e-48:325:88//Hs.54702:AI040029

[21044] F-PLACE1002941//ESTs//5.0e-18:128:88//Hs.17376:AA855056

[21045] F-PLACE1002962

[21046] F-PLACE1002968//ESTs, Highly similar to trg gene product [R. norvegicus]//0.031:372:59//Hs.8021:AI041815

[21047] F-PLACE1002991

[21048] F-PLACE1002993

[21049] F-PLACE1002996//ESTs, Weakly similar to T20D3.3 [C. elegans]//1.3e-12:104:86//Hs.124808:T86959

[21050] F-PLACE1003025//Homo sapiens mRNA, chromosome I specific transcript KIAA0510//0.99:192:64//Hs.92660:AB007979

[21051] F-PLACE1003027//Homo sapiens mRNA for KIAA0516 protein, partial cds//2.0e-131:632:97//Hs.129872:AB011088

[21052] F-PLACE1003044//Homo sapiens mRNA for KIAA0667 protein, partial cds//2.7e-14:555:58//Hs.154740:AB014567

[21053] F-PLACE1003045

[21054] F-PLACE1003092//ESTs//1.1e-108:506:99//Hs.22119:AA885491

[21055] F-PLACE1003100//Human Hep27 protein mRNA, complete cds//2.9e-66:650:73//Hs.102137:U31875

[21056] F-PLACE1003108//EST//0.016:181:65//Hs.119762:AA703419

[21057] F-PLACE1003136

[21058] F-PLACE1003145

[21059] F-PLACE1003153//ESTs//3.1e-09:209:65//Hs.111583:AA463590

[21060] F-PLACE1003174//ESTs//0.073:97:69//Hs.12992:WO1997

[21061] F-PLACE1003176//ESTs//3.3e-60:296:90//Hs.58239:AA215797

[21062] F-PLACE1003190//Homo sapiens C19steroid specific UDP-glucuronosyltransferase mRNA, complete cds//0.98:221:60//Hs.139756:U59209

[21063] F-PLACE1003200//EST//0.0021:309:60//Hs.140561:AA765532

[21064] F-PLACE1003205//EST//1.2e-07:204:65//Hs.147372:AI208770

[21065] F-PLACE1003238//ESTs//7.4e-62:343:94//Hs.121302:AA758208

[21066] F-PLACE1003249//Insulin-like growth factor 1 (somatomedia C)//0.99:175:62//Hs.85112:X57025

[21067] F-PLACE1003256

[21068] F-PLACE1003258//H. sapiens mRNA for ZYG homologue//0.00020:217:64//Hs.29285:X99802

[21069] F-PLACE1003296//ESTs//2.6e-14:80:86//Hs.155441:AA533106

[21070] F-PLACE1003302//Human repressor transcriptional factor (ZNF85) mRNA, complete cds//4.3e-51:700:67//Hs.37138:U35376

[21071] F-PLACE1003334

[21072] F-PLACE1003342//ESTs//0.94:310:57//Hs.131502:AI023308

[21073] F-PLACE1003343//EST//1.2e-09:114:77//Hs.103418:AA035568

[21074] F-PLACE1003353//Homo sapiens breast cancer antiestrogen resistance 3 protein (BCAR3) mRNA, complete cds//2.6e-144:773:92//Hs.6564:U92715

[21075] F-PLACE1003361//ESTs, Weakly similar to ATP SYNTHASE A CHAIN [Trypanosoma brucei brucei]//8.9e-35:332:78//Hs.163820:H71277

[21076] F-PLACE1003366//Homo sapiens dysferlin mRNA, complete cds//7.9e-06:502:57//Hs.143897:AF075575

[21077] F-PLACE1003369//NUCLEOLIN//0.00037:282:60//Hs.79110:M60858

[21078] F-PLACE1003373//EST//1.1e-11:420:63//Hs.156592:AI343009

[21079] F-PLACE1003375//EST//0.75:119:68//Hs.160270:A1149069

[21080] F-PLACE1003383

[21081] F-PLACE1003394//ESTs, Highly similar to RAS-RELATED PROTEIN RAB-14 [Rattus norvegicus]//8.9e-113:590:94//Hs.125175:AI142546

[21082] F-PLACE1003401//ESTs//0.55:176:66//Hs.154292:AA886178

[21083] F-PLACE1003420//Macrophage stimulating I (hepatocyte growth factor-like)//0.40:206:62//Hs.30223:X90846

[21084] F-PLACE1003454//ESTs//0.98:74:72//Hs.127131:AA150912

[21085] F-PLACE1003478//EST//5.0e-06:183:69//Hs.127524:AA952874

[21086] F-PLACE1003493//Protein-tyrosine kinase 7//0.98:232:63//Hs.90572:U33635

[21087] F-PLACE1003516//Human kpni repeat mrna (cdna clone pcd-kpni-8), 3′ end//3.4e-85:357:86//Hs.103948:K00627

[21088] F-PLACE1003519//ESTs//1.6e-33:288:72//Hs.159510:AA297145

[21089] F-PLACE1003521//H. sapiens mRNA for retrotransposon//1.4e-45:269:76//Hs.6940:Z48633

[21090] F-PLACE1003528//ESTs//0.65:120:68//Hs.162376:AA570248

[21091] F-PLACE1003537//ESTs, Weakly similar to ZK858.6 [C. elegans]//3.6e-110:543:97//Hs.120416:AA057428

[21092] F-PLACE1003553

[21093] F-PLACE1003566//ESTs//0.0015:508:59//Hs.5724:AA156780

[21094] F-PLACE1003575//Homo sapiens cdcl4 homolog mRNA, complete cds//4.4e-05:499:58//Hs.65993:AF000367

[21095] F-PLACE1003583//ESTs//5.5e-19:448:63//Hs.161701:AA225932

[21096] F-PLACE1003584//EST//1.6e-46:263:94//Hs.147412:AI209194

[21097] F-PLACE1003592//ESTs, Moderately similar to !!!! ALU CLASS B WARNING ENTRY!!!! [H. sapiens]//1.4e-50:287:93//Hs.154799:AA130620

[21098] F-PLACE1003593//ESTs//0.0025:318:61//Hs.106771:AA806965

[21099] F-PLACE1003596//Integral transmembrane protein 1//1.9e-54:685:68//Hs.89650:L38961

[21100] F-PLACE1003602//Homo sapiens mRNA expressed in placenta//3.4e-140:679:97//Hs.56851: D83200

[21101] F-PLACE1003605//Homo sapiens Cdcl4B2 phosphatase mRNA, partial cds//0.00065:236:64//Hs.22116:AF064104

[21102] F-PLACE1003611//EST//0.00015:318:59//Hs.28788:R66896

[21103] F-PLACE1003618//Human Line-1 repeat mRNA with 2 open reading frames//1.3e-122:737:87//Hs.23094:M19503

[21104] F-PLACE1003625//ESTs//1.6e-16:103:96//Hs.111223:N51105

[21105] F-PLACE1003638//ESTs//0.60:305:57//Hs.19104:WO7762

[21106] F-PLACE1003669//ESTs, Weakly similar to 3-7 gene product [H. sapiens]//0.021:445:58//Hs.158275:AI365413

[21107] F-PLACE1003704//Human mRNA for KIAA0301 gene, partial cds//0.014:622:56//Hs.76730:AB002299

[21108] F-PLACE1003709//Homo sapiens protein kinase (BUBI) mRNA, complete cds//1.4e-133:669:95//Hs.98658:AF053305

[21109] F-PLACE1003711//ESTs//2.2e-14:178:771//Hs.114831:T57101

[21110] F-PLACE1003723//Homo sapiens mRNA for T lymophocyte specific adaptor protein//8.5e-09:393:60//Hs.103527:AJ000553

[21111] F-PLACE1003738//ESTs, Weakly similar to ZINC FINGER PROTEIN 84 [H. sapiens]//1.8e-53:260:99//Hs.102928:AI346344

[21112] F-PLACE1003760//ESTs//5.1e-08:334:63//Hs.43675:AA805648

[21113] F-PLACE1003762//ESTs//1.0:59:83//Hs.29863:W28983

[21114] F-PLACE1003768//Human kpni repeat mrna (cdna clone pcd-kpni-4), 3′ end//2.7e-40:608:68//Hs.139107:K00629

[21115] F-PLACE1003771//ESTs//6.6e-10:226:65//Hs.15776:T91944

[21116] F-PLACE1003783

[21117] F-PLACE1003784//Homo sapiens mRNA for KIAA0765 protein, partial cds//1.0:457:57//Hs.62318:AB018308

[21118] F-PLACE1003795//Human homologue of yeast sec7 mRNA, complete cds//0.85:314:60//Hs.1050:M85169

[21119] F-PLACE1003833//ESTs, Weakly similar to C27H6.5 [C. elegans]//0.00059:201:68//Hs.40806:AA018786

[21120] F-PLACE1003850//ESTs//0.0088:220:61//Hs.145504:AI254165

[21121] F-PLACE1003858//EST//0.77:137:61//Hs.146935:A1168124

[21122] F-PLACE1003864//ESTs//1.1:225:59//Hs.160910:AI370359

[21123] F-PLACE1003870//EST//7.2e-18:283:69//Hs.135497:AI091257

[21124] F-PLACE1003885//H. sapiens PAP mRNA//2.4e-75:759:72//Hs.49007:X76770

[21125] F-PLACE1003886

[21126] F-PLACE1003888//Human mRNA for phospholipase C, complete cds//8.4e-55:702:67//Hs.153322:D42108

[21127] F-PLACE1003892//ESTs//2.4e-13:258:67//Hs.28039:H24050

[21128] F-PLACE1003900//ESTs//3.5e-14:271:66//Hs.28589:AI004944

[21129] F-PLACE1003903//CTP synthetase//1.6e-49:528:71//Hs.84112:X52142

[21130] F-PLACE1003915//ESTs, Highly similar to ARGINYL-TRNA SYNTHETASE, MITOCHONDRIAL PRECURSOR [Saccharomyces cerevisiae]//1.2e-49:251:98//Hs.65831:F03069

[21131] F-PLACE1003923//Interferon, alpha 16//0.48:278:60//Hs.56303:M28585

[21132] F-PLACE1003932//EST//0.00060:221:63//Hs.163044:AA707537

[21133] F-PLACE1003936//ESTs//0.86:211:62//Hs.150751:AI123536

[21134] F-PLACE1003968//Human 5′-AMP-activated protein kinase, gamma-1 subunit mRNA, complete cds//2.0e-47:522:71//Hs.3136:U42412

[21135] F-PLACE1004103//ESTs//8.6e-35:226:89//Hs.78973:AI026812

[21136] F-PLACE1004104//ESTs//1.0:179:61//Hs.163935:AA506940

[21137] F-PLACE1004114//ESTs//1.3e-52:323:89//Hs.35156:AA148516

[21138] F-PLACE1004118//Spleen focus forming virus (SFFV) proviral integration oncogene sp11//0.85:164:64//Hs.153045:X52056

[21139] F-PLACE1004128//Guanine nucleotide binding protein (G protein), beta polypeptide 1//3.1e-41:422:74//Hs.3620:X04526

[21140] F-PLACE1004149//ESTs, Weakly similar to F48F7.1 [C. elegans]//8.2e-82:418:96//Hs.156161:AI333779

[21141] F-PLACE1004156//ESTs//0.10:166:63//Hs.133279:AI053552

[21142] F-PLACE1004161//Human mRNA for KIAA0200 gene, complete cds//0.85:269:64//Hs.76986:D83785

[21143] F-PLACE1004183EST//1.3e-40:224:94//Hs.156603:A1343666

[21144] F-PLACE1004197//ESTs//2.8e-91:441:98//Hs.97269:AA292201

[21145] F-PLACE1004203//Homo sapiens GPI-anchored membrane protein CDw 108 precursor, mRNA, complete cds//1.3e-145:695:98//Hs.24640:AF069493

[21146] F-PLACE1004242//ESTs//0.99:213:60//Hs.117311:AA699722

[21147] F-PLACE1004256//EST//0.019:364:58//Hs.122395:AA789273

[21148] F-PLACE1004257//ESTs//0.77:154:64//Hs.112582:AA608689

[21149] F-PLACE1004258//ESTs, Weakly similar to vanilloid receptor subtype I [R. norvegicus]//1.1e-98:479:97//Hs.31718:N29128

[21150] F-PLACE1004270//Homo sapiens CAGF9 mRNA, partial cds//0.00010:369:63//Hs.110826:U80736

[21151] F-PLACE1004274//Homo sapiens mRNA for KIAA0445 protein, complete cds//0.085:573:56//Hs.154139:AB007914

[21152] F-PLACE1004277//Homo sapiens two pore domain K+channel (TASK-2) mRNA, complete cds//2.0e-157:756:97//Hs.127007:AF084830

[21153] F-PLACE1004284//ESTs//3.6e-71:344:99//Hs.145870:AI271884

[21154] F-PLACE1004289//ESTs//2.6e-57:370:85//Hs.16740:AA586576

[21155] F-PLACE1004302//FACTOR VIII INTRON 22 PROTEIN//0.032:513:59//Hs.83363:M34677

[21156] F-PLACE1004316//H. sapiens mRNA for apoptosis specific protein//9.3e-152:797:94//Hs.11171:Y11588

[21157] F-PLACE1004336

[21158] F-PLACE1004358//Homo sapiens connector enhancer of KSR-like protein CNK1 mRNA, complete cds//1.9e-140:688:97//Hs.16232:AF100153

[21159] F-PLACE1004376//ESTs, Weakly similar to F27D4.4 [C. elegans]//3.9e-109:521:98//Hs.14079:AA306552

[21160] F-PLACE1004384//Human HsLIM 15 mRNA for HsLim 15, complete cds//2.0e-49:466:76//Hs.37181:D64108

[21161] F-PLACE1004388

[21162] F-PLACE1004405//EST//0.010:191:64//Hs.147600:AI217871

[21163] F-PLACE1004425//ESTs//2.1e-20:124:80//Hs.94195:WO3579

[21164] F-PLACE1004428//H. sapiens mRNA for Branched chain Acyl-CoA Oxidase//1.0:552:58//Hs.9795:X95190

[21165] F-PLACE1004437//Human NAD+-specific isocitrate dehydrogenase beta subunit precursor, mRNA, nuclear gene encoding mitochondrial protein, complete cds//9.9e-131:536:99//Hs.155410:U49283

[21166] F-PLACE1004451//ESTs//5.9e-18:203:73//Hs.156097:AI348867

[21167] F-PLACE1004460

[21168] F-PLACE1004467//ESTs//8.0e-17:345:66//Hs.112993:AA824363

[21169] F-PLACE1004471//EST//9.3e-69:463:84//Hs.116391:AA644085

[21170] F-PLACE1004473//ESTs//0.93:358:58//Hs.33263:AA724416

[21171] F-PLACE1004491//EST//2.5e-58:285:99//Hs.97603:AA398163

[21172] F-PLACE1004506//CD81 ANTIGEN//7.2e-06:228:63//Hs.54457:M33680

[21173] F-PLACE1004510//Homo sapiens cofactor of initiator function (CIF 150) mRNA, complete cds//2.5e-147:699:97//Hs.122752:AF026445

[21174] F-PLACE1004516//EST//1.0e-26:343:71//Hs.142595:N24150

[21175] F-PLACE1004518

[21176] F-PLACE1004548//EST//0.84:193:62//Hs.99583:AA461314

[21177] F-PLACE1004550//ESTs, Weakly similar to No definition line found [C. elegans]//4.0e-120:627:94//Hs.107387:AA058854

[21178] F-PLACE1004564//EST//1.0:240:62//Hs.16824:T91371

[21179] F-PLACE1004629//Centromere protein B (80 kD)//0.0015:242:64//Hs.85004:X05299

[21180] F-PLACE1004645

[21181] F-PLACE1004646//Retinal pigment epithelium-specific protein (65 kD)//1.4e-12:386:63//Hs.2133:U18991

[21182] F-PLACE1004658//ESTs//0.52:273:61//Hs.97252:AA291590

[21183] F-PLACE1004664

[21184] F-PLACE1004672//Human ABL gene, exon lb and intron lb, and putative M8604 Met protein (M8604 Met) gene//1.5e-66:357:95//Hs.77705:U07563

[21185] F-PLACE1004674//Homo sapiens calcium binding protein (ALG-2) mRNA, complete cds//1.4e-110:625:91//Hs.80019:AF035606

[21186] F-PLACE1004681//EST//0.00092:303:61//Hs.149560:AI281589

[21187] F-PLACE1004686//ESTs//3.0e-31:186:76//Hs.139130:AA704561

[21188] F-PLACE1004691//Homo sapiens clone 23963 mRNA sequence//0.54:242:61//Hs.48483:AF007131

[21189] F-PLACE1004693//ESTs, Weakly similar to pot. ORF III [H. sapiens]//0.56:96:71//Hs.125740:AA884845

[21190] F-PLACE1004716//ESTs//2.0e-79:388:98//Hs.150999:AI306542

[21191] F-PLACE1004722//ESTs//7.5e-06:105:72//Hs.128796:AA485891

[21192] F-PLACE1004736//ESTs//1.7e-27:203:86//Hs.119593:AA700148

[21193] F-PLACE1004740//ESTs//1.0e-25:174:89//Hs.29696:AA910680

[21194] F-PLACE1004743

[21195] F-PLACE1004751//ESTs, Highly similar to CMP-N-ACETYLNEURAMINATE-BETA-1,4-GALACTOSIDE ALPHA-2,3-SIALYLTRANSFERASE [Rattus norvegicus]//2.0e-41:260:90//Hs.6863:W52470

[21196] F-PLACE1004773//Homo sapiens inversin protein mRNA, complete cds//1.7e-172:828:97//Hs.104715:AF084367

[21197] F-PLACE1004777//Human myosin-IXb mRNA, complete cds//1.0e-29:556:63//Hs.159629:U42391

[21198] F-PLACE1004793

[21199] F-PLACE1004804

[21200] F-PLACE1004813//EST//2.8e-42:296:83//Hs.155725:AI310340

[21201] F-PLACE1004814//ESTs, Weakly similar to U1 SMALL NUCLEAR RIBONUCLEOPROTEIN 70 KD [Xenopus laevis]//2.4e-78:415:95//Hs.80965:AA493284

[21202] F-PLACE1004815//Human mRNA for KIAA0364 gene, complete cds//4.3e-14:294:69//Hs.22111:AB002362

[21203] F-PLACE1004824//ESTs//0.0072:128:69//Hs.164062:AA934047

[21204] F-PLACE1004827//ESTs//0.78:38:100//Hs.18925:W30943

[21205] F-PLACE1004836//Homo sapiens Notch3 (NOTCH3) mRNA, complete cds//0.78:338:57//Hs.8546:U97669

[21206] F-PLACE1004838

[21207] F-PLACE1004840//Protein phosphatase 1, catalytic subunit, beta isoform//0.89:200:66//Hs.21537:X80910

[21208] F-PLACE1004868

[21209] F-PLACE1004885//ESTs//0.41:181:61//Hs.116796:AA633772

[21210] F-PLACE1004900

[21211] F-PLACE1004902//ESTs//4.7e-72:367:96//Hs.54971:AI424382

[21212] F-PLACE1004913//ESTs//0.031:166:63//Hs.130110:AA904929

[21213] F-PLACE1004918//Human tumor susceptiblity protein (TSG 101) mRNA, complete cds//4.1e-24:402:64//Hs.118910:U82130

[21214] F-PLACE1004930//Homo sapiens TNF-induced protein GG2-1 mRNA, complete cds//9.7e-86:519:88//Hs.17839:AF099936

[21215] F-PLACE1004934//ESTs//7.2e-43:231:78//Hs.133503:AA628592

[21216] F-PLACE1004937//ESTs//0.97:80:68//Hs.144264:C00851

[21217] F-PLACE1004969

[21218] F-PLACE1004972//Human retinoic acid- and interferon-inducible 58K protein R1158 mRNA, complete cds//0.031:235:60//Hs.27610:U34605

[21219] F-PLACE1004979//Homo sapiens mRNA for KIAA0575 protein, complete cds//4.9e-43:331:83//Hs.153468:AB011147

[21220] F-PLACE1004982//ESTs//0.020:148:63//Hs.129377:AI218520

[21221] F-PLACE1004985//ESTs//7.9e-05:372:61//Hs.87606:AA242831

[21222] F-PLACE1005026//ESTs//4.6e-29:212:89//Hs.137451:AA351459

[21223] F-PLACE1005027//ESTs//6.5e-91:455:97//Hs.30890:H 15159

[21224] F-PLACE1005046//ESTs//3.7e-56:250:96//Hs.152730:AI308943

[21225] F-PLACE1005052//EST//1 .8e-36:370:73//Hs.123424:AA813594

[21226] F-PLACE1005055//Homo sapiens mRNA for KIAA0576 protein, partial cds//6.2e-161:761:98//Hs.14687:AB011148

[21227] F-PLACE1005066//Homo sapiens actin binding protein MAYVEN mRNA, complete cds//3.0e-11:757:56//Hs.122967:AF059569

[21228] F-PLACE1005077//EST//0.79:283:59//Hs.89276:AA283899

[21229] F-PLACE1005085//ESTs//3 .5e-18:231:72//Hs.142654:AA324740

[21230] F-PLACE1005086//Homo sapiens mRNA for KIAA0575 protein, complete cdsl/1.9e-49:401:80//Hs.153468:AB011147

[21231] F-PLACE1005101//Homo sapiens (clone zap128) mRNA, 3′ end of cds//8.2e-20:194:80//Hs.75437:L40401

[21232] F-PLACE1005102//Homo sapiens HIV-1 inducer of short transcripts binding protein (FBI 1) mRNA, complete cds//8 .9e-18:538:62//Hs.104640:AF000561

[21233] F-PLACE1005108//Treacher Collins syndrome susceptibility protein//0.73:405:57//Hs.73166:U76366

[21234] F-PLACE1005111//ESTs//0.66:191:63//Hs.106446:N93227

[21235] F-PLACE1005128//Breakpoint cluster region protein BCR//5.6e-08:291:63//Hs.2557:Y00661

[21236] F-PLACE1005146//ESTs, Weakly similar to hypothetical protein II [H. sapiens]//4.8e-12:360:63//Hs.142177:H11741

[21237] F-PLACE1005162//Human mRNA for KIAA0118 gene, partial cds//3.9e-49:563:72//Hs.154326:D42087

[21238] F-PLACE1005176//Homo sapiens mRNA for KIAA0641 protein, complete cds//0.82:259:60//Hs.128316:AB014541

[21239] F-PLACE1005181//ESTs, Weakly similar to No definition line found [C. elegans]//4.4e-126:583:99//Hs.25347:AI138605

[21240] F-PLACE1005187//ESTs//6.2e-34:222:90//Hs.124265:N70417

[21241] F-PLACE1005206//EST//0.089:167:62//Hs.140487:AA767009

[21242] F-PLACE1005232//ESTs, Weakly similar to synapse-associated protein sap47-1 [D. melanogaster]//0.56:192:60//Hs.47334:W72370

[21243] F-PLACE1005243

[21244] F-PLACE1005261//ESTs//0.52:245:58//Hs.6682:T76941

[21245] F-PLACE1005266//Kallmann syndrome 1 sequence//7.8e-06:484:60//Hs.89591:M97252

[21246] F-PLACE1005277//Homo sapiens mRNA for KIAA0610 protein, partial cds//5.1e-150:706:98//Hs.118087:AB011182

[21247] F-PLACE1005287//ESTs//8.1e-107:501:9911Hs.145703:AA447947

[21248] F-PLACE1005305//GTP :AMP PHOSPHOTRANSFERASE MITOCHONDRIAL//4.4e-37:597:66//Hs.101642:X60673

[21249] F-PLACE1005308//High-mobility group (nonhistone chromosomal) protein 2110.83:239:62//Hs.80684:X62534

[21250] F-PLACE1005313

[21251] F-PLACE1005327//ESTs, Weakly similar to No definition line found [C. elegans]//6.0e-81:459:91//Hs.146177:R51650

[21252] F-PLACE1005331//Homo sapiens chromosome 19, cosmid F20569//3.7e-66:412:88//Hs.134031:AC004794

[21253] F-PLACE1005335//Homo sapiens mRNA for KIAA0754 protein, partial cds//0.96:510:56//Hs.159183:AB018297

[21254] F-PLACE1005373

[21255] F-PLACE1005374//ESTs//7.5e-77:437:91//Hs.143266:AI141348

[21256] F-PLACE1005409//ESTs//2 .4e-05:267:63//Hs.163307:AA856751

[21257] F-PLACE1005453//ESTs//1.12:333:58//Hs.134672:AI087951

[21258] F-PLACE1005467//HOMEOBOX/POU DOMAIN PROTEIN RDC-1//0.0043:148:67//Hs.74095:L20433

[21259] F-PLACE1005471//ESTs//3.4e-24:135:97//Hs.49275:N66925

[21260] F-PLACE1005477//Human Line-1 repeat mRNA with 2 open reading frames//3.5e-126:744:87//Hs.23094:M19503

[21261] F-PLACE1005480//ESTs//3.7e-26:184:70//Hs.113198:N39323

[21262] F-PLACE1005481//EST//0.27:153:64//Hs.120066:AA707973

[21263] F-PLACE1005494//ESTs//2.4e-50:257:98//Hs.159003:AA633029

[21264] F-PLACE1005502//ESTs//0.15:408:57//Hs.45106:AA504105

[21265] F-PLACE1005526//ESTs//3.2e-61:305:98//Hs.122574:AA776747

[21266] F-PLACE1005528//ESTs//9.9e-32:249:78//Hs.142531:N91572

[21267] F-PLACE1005530//ESTs//1.0e-94:491:95//Hs.131731:AI339335

[21268] F-PLACE1005550//ESTs//0.084:290:58//Hs.157775:AI359385

[21269] F-PLACE1005554//EST//0.38:213:58//Hs.102749:N64144

[21270] F-PLACE1005557//ESTs, Highly similar to MITOCHONDRIAL 60S RIBOSOMAL PROTEIN L2 PRECURSOR [Saccharomyces cerevisiae]//4.5e-51:258:97//Hs.7736:W81261

[21271] F-PLACE1005574//ESTs//3.2e-09:236:66//Hs.146884:AI160278

[21272] F-PLACE1005584//Fragile X mental retardation 2//1.2e-05:151:69//Hs.54472:U48436

[21273] F-PLACE1005595//ESTs//2.1e-98:512:95//Hs.118552:W74594

[21274] F-PLACE1005603//EST//1.0:90:66//Hs.111204:AA211851

[21275] F-PLACE100561 I/ESTs, Weakly similar to B0035.14 [C. elegans]//3.5e-32:197:92//Hs.8241:AA283057

[21276] F-PLACE1005623//ESTs//3.0e-30:191:92//Hs.77570:N48234

[21277] F-PLACE1005630//ESTs//2.3e-32:175:97//Hs.122278:AA781867

[21278] F-PLACE1005639//ESTs//0.88:218:581//Hs.117389:AA701991

[21279] F-PLACE1005646//Homo sapiens RNA helicase-related protein mRNA, complete cds//2.1e-25, 151:721:98//Hs.8765:AF083255

[21280] F-PLACE1005656//Ribonucleotide reductase M2 polypeptide//3.9e-53:480:74//Hs.75319:X59618

[21281] F-PLACE1005666//Homo sapiens mRNA for KIAA0448 protein, complete cds//0.086:223:59//Hs.27349:AB007917

[21282] F-PLACE1005698//Human membrane-associated lectin type-C mRNA//6.1e-65:374:85//Hs.23759:M98457

[21283] F-PLACE1005727//ESTs//8.7e-65:330:96//Hs.127027:AA935437

[21284] F-PLACE1005730//ESTs//2.9e-14:270:67//Hs.28589:AI004944

[21285] F-PLACE1005739//Homo sapiens mRNA for serin protease with IGF-binding motif, complete cds//0.75:289:59//Hs.75111:D87258

[21286] F-PLACE1005755//Insulin-like growth factor binding protein 2//3.6e-05:377:62//Hs.162:X16302

[21287] F-PLACE1005763//ESTs, Highly similar to S-ACYL FATTY ACID SYNTHASE THIOESTERASE, MEDIUM CHAIN [Rattus norvegicus]//5.7e-49:252:88//Hs.24309:AI125696

[21288] F-PLACE1005799//ESTs//5.2e-113:392:58//Hs.110530:AA191493

[21289] F-PLACE1005802

[21290] F-PLACE1005803

[21291] F-PLACE1005804//Homo sapiens alpha 1,2-mannosidase IB mRNA, complete cds//4.5e-128:636:96//Hs.125315:AF027156 45 F-PLACE1005813//Homo sapiens sorting nexin 2 (SNX2) mRNA, complete cds//8.4e-156:739:98//Hs.11183:AF065482

[21292] F-PLACE1005828//ESTs, Weakly similar to !!!! ALU SUBFAMILY J WARNING ENTRY !!!! [H. sapiens]//4.1e-42:327:81//Hs.138404:R70986

[21293] F-PLACE1005834//Retinoblastoma I (including 50 osteosarcoma)//0.038:436:58//Hs.75770:L41870

[21294] F-PLACE1005845//ESTs//4.8e-50:309:89//Hs.107149:AI379497

[21295] F-PLACE1005850//ESTs//7.1e-40:253:79//Hs.158096:AA186905

[21296] F-PLACE1005851//ESTs//7.6e-93:483:95//Hs.135608:AA732242

[21297] F-PLACE1005876//ESTs//0.97:282:60//Hs.98664:AI381487

[21298] F-PLACE1005884//ESTs//0.070:276:60//Hs.106057:AI031552

[21299] F-PLACE1005890//ESTs//1.5e-91:500:93//Hs.136993:AA843300

[21300] F-PLACE1005898

[21301] F-PLACE1005921

[21302] F-PLACE1005923//ESTs//0.50:308:58//Hs.52489:R61504

[21303] F-PLACE1005925//ESTs//0.024:93:68//Hs.149868:AI288274

[21304] F-PLACE1005932//TYROSINE-PROTEIN KINASE RECEPTOR EPH PRECURSOR//0.97:342:57//Hs.89839:Ml 8391

[21305] F-PLACE1005934//ESTs//8.6e-10:74:93//Hs.25092:AA922142

[21306] F-PLACE1005936//DNA excision repair protein ERCC5//1.0:144:63//Hs.48576:X69978

[21307] F-PLACE1005951/11B94 PROTEIN//0.00025:371:61//Hs.75522:M92357

[21308] F-PLACE1005953//ESTs//2.8e-06:290:61//Hs.140996:R73468

[21309] F-PLACE1005955//ESTs, Weakly similar to Y53C12A.3 [C. elegans]//0.15:136:66//Hs.107747:AI357868

[21310] F-PLACE1005966//Human zinc finger/leucine zipper protein (AF10) mRNA, complete cds//1.0:215:63//Hs.7885:U13948

[21311] F-PLACE1005968

[21312] F-PLACE1005990

[21313] F-PLACE1006002//Putative mismatch repair/binding protein hMSH3//1.9e-48:312:77//Hs.42674:U61981

[21314] F-PLACE1006003//EST//0.00018:171:67//Hs.138882:W73256

[21315] F-PLACE1006011

[21316] F-PLACE1006017//ESTs//3.1e-21:159:88//Hs.142173:AA757743

[21317] F-PLACE1006037//Homo sapiens mRNA for KIAA0789 protein, complete cds//0.021:202:64//Hs.158319:AB018332

[21318] F-PLACE1006040//Homo sapiens mRNA for alpha endosulfine//1.1e-148:719:97//Hs.98782:X99906

[21319] F-PLACE1006076//EST//0.29:92:64//Hs.161536:N80395

[21320] F-PLACE1006119//Homo sapiens Ran-GTP binding protein mRNA, partial cds//4.1e-147:679:99//Hs.4976:AF039023

[21321] F-PLACE1006129

[21322] F-PLACE1006139

[21323] F-PLACE1006143//Human mRNA for KIAA0355 gene, complete cds//9.3e-43:357:79//Hs.153014:AB002353

[21324] F-PLACE1006157//ESTs, Weakly similar to ETXI {alternatively spliced} [H. sapiens]//2.9e-12:119:84//Hs.23153:R92857

[21325] F-PLACE1006159//ESTs//2.3e-87:443:96//Hs.23740:HI7868

[21326] F-PLACE1006164//ESTs//0.099:223:60//Hs.8108:AA902721

[21327] F-PLACE1006167//Homo sapiens chromosome 19, cosmid F23149//1.1e-68:333:92//Hs.152894:AC005239

[21328] F-PLACE1006170//ESTs//0.081:171:67//Hs.135187:AI074005

[21329] F-PLACE1006187//Homo sapiens cyclin E2 mRNA, complete cds//1.2e-150:694:99//Hs.30464:AF091433

[21330] F-PLACE1006195//ESTs//8.9e- 14:229:70//Hs.141470:N49608

[21331] F-PLACE1006196//ESTs, Weakly similar to protein synthesis initiation factor 4A-II homolog//3.5e-59:369:88//Hs.135623:AA134719

[21332] F-PLACE1006205

[21333] F-PLACE1006223//ESTs, Weakly similar to TERATOCARCINOMA-DERIVED GROWTH FACTOR 1 [H. sapiens]//0.0089:166:63//Hs.127179:AI279486

[21334] F-PLACE1006225

[21335] F-PLACE1006236//EST//0.060:89:69//Hs.136977:AA830668

[21336] F-PLACE1006239//ESTs//0.028:105:66//Hs.142336:AA358185

[21337] F-PLACE1006246//ESTs//0.060:330:60//Hs.105695:AI085802

[21338] F-PLACE1006248//Homo sapiens mRNA for KIAA0648 protein, partial cds//7.3e-168:791:98//Hs.31921:AB014548

[21339] F-PLACE1006262

[21340] F-PLACE1006288//Homo sapiens mRNA for Pex3 protein//4.8e-37:186:100//Hs.7277:AJ001625

[21341] F-PLACE1006318

[21342] F-PLACE1006325//ESTs//3.7e-25:206:83//Hs.102319:AI246503

[21343] F-PLACE1006335//ESTs//2.0e-27:161:95//Hs.163529:AI361492

[21344] F-PLACE1006357//ESTs//0.013:268:61//Hs.105775:AA526249

[21345] F-PLACE1006360//ESTs//4.8e-27:146:98//Hs.100739:Z98481

[21346] F-PLACE1006368//Homo sapiens clone 24540 mRNA sequence//0.65:272:59//Hs.153529:AF070581

[21347] F-PLACE1006371//Homo sapiens jerky gene product homolog mRNA, complete cds//2.6e-07:403:61//Hs.105940:AF004715

[21348] F-PLACE1006382//EST//0.98:77:68/1//Hs.136933:AA814693

[21349] F-PLACE1006385//Homo sapiens epsin 2b mRNA, complete cds//1.6e-111:539:97//Hs.22396:AF062085

[21350] F-PLACE1006412//Human mRNA for KIAA0298 gene, complete cds//1.0e-36:424:74//Hs.21560:AB002296

[21351] F-PLACE1006414//Homo sapiens PCAF associated factor 65 alpha mRNA, complete cds//4.3e-111:525:98//Hs.131846:AF069735

[21352] F-PLACE1006438//Homo sapiens mRNA for KIAA0557 protein, partial cds//2.2e-24:531:65//Hs.101414:AB011129

[21353] F-PLACE1006445//Homo sapiens chromosome 16 zinc finger protein ZNF200 (ZNF200) mRNA, complete cds//1.0:248:60//Hs.88219:AF060866

[21354] F-PLACE1006469//Human SA mRNA for SA gene product, complete cds//0.24:210:62//Hs.89659:AC004381

[21355] F-PLACE1006470

[21356] F-PLACE1006482//Homo sapiens basic-leucine zipper transcription factor MafK (MAFK) mRNA, complete cds//5.0e-46:520:71//Hs.131953:AF059194

[21357] F-PLACE1006488//ESTs//6.2e-47:239:97//Hs.158161:AA312511

[21358] F-PLACE1006492//ESTs//0.82:37:100//Hs.160417:AA488493

[21359] F-PLACE1006506//HUMAN IMMUNODEFICIENCY VIRUS TYPE I ENHANCER-BINDING PROTEIN 2//0.98:505:56//Hs.75063:AL023584

[21360] F-PLACE1006521//ESTs//0.032:222:63//Hs.23171:AA706542

[21361] F-PLACE1006531//EST//2.1e-53:258:100//Hs.117316:AA699358

[21362] F-PLACE1006534//EST//1.8e-07:78:89//Hs.157551:AI356219

[21363] F-PLACE1006540//Homo sapiens mRNA for cadherin-6, complete cds//0.96:383:58//Hs.32963:D31784

[21364] F-PLACE1006552//Human (clone N5-4) protein p84 mRNA, complete cds//0.058:464:57//Hs.1540:L36529

[21365] F-PLACE1006598//Homo sapiens mRNA for KIAA0737 protein, complete cds//4.1e-17:372:65//Hs.17630:AB018280

[21366] F-PLACE1006615//Homo sapiens eukaryotic translation initiation factor eIF3, p35 subunit mRNA, complete cds//2.2e-168:781:99//Hs.155377:U97670

[21367] F-PLACE1006617//ESTs//6.0e-08:354:60//Hs.42624:H99088

[21368] F-PLACE1006626//NUCLEOLIN//0.0044:186:66//Hs.79110:M60858

[21369] F-PLACE1006629//Homo sapiens (clone s22i71) mRNA fragment//0.097:229:63//Hs.26956:L40396

[21370] F-PLACE1006640//ESTs//0.00019:380:59//Hs.13672:AI131473

[21371] F-PLACE1006673//ESTs, Weakly similar to T14B4.2 gene product [C. elegans]//1.6e-12:113:83//Hs.3385:N25917

[21372] F-PLACE1006678

[21373] F-PLACE1006704//Homo sapiens ALR mRNA, complete cds//0.16:284:60//Hs.153638:AF010403

[21374] F-PLACE1006731//Homo sapiens SOX22 protein (SOX22) mRNA, complete cds//1.6e-05:382:63//Hs.43627:U35612

[21375] F-PLACE1006754//Biliary glycoprotein//8.9e-27:305:72//Hs.50964:X 16354

[21376] F-PLACE1006760//ESTs//0.10:207:62//Hs.152589:AA954152

[21377] F-PLACE1006779//Kallmann syndrome 1 sequence//0.00025:251:64//Hs.89591:M97252

[21378] F-PLACE1006782//ESTs//1.2e-90:423:100//Hs.132826:AI075783

[21379] F-PLACE1006792//ESTs//1.5e-10:439:58//Hs.138501:AI051228

[21380] F-PLACE1006795//TYROSINE-PROTEIN KINASE RECEPTOR ETKI PRECURSOR//4.5e-10:84:95//Hs.123642:M83941

[21381] F-PLACE1006800//ESTs//0.00068:360:61//Hs.157876:AI422017

[21382] F-PLACE1006805//ESTs//4.6e-103:491:98//Hs.140465:AA769892

[21383] F-PLACE1006815//Homo sapiens mRNA for KIAA0618 protein, complete cds//0.47:403:56//Hs.15832:AB014518

[21384] F-PLACE1006819//Human Line-1 repeat mRNA with 2 open reading frames//3.7e-103:619:87//Hs.23094:M19503

[21385] F-PLACE1006829//ESTs//1.5e-22:141:94//Hs.142988:AA142876

[21386] F-PLACE1006860//EST//0.0062:206:65//Hs.158793:AI376773

[21387] F-PLACE1006867//ESTs//0.068:218:62//Hs.91166:AA551273

[21388] F-PLACE1006878//Homo sapiens mRNA for KIAA0711 protein, complete cds//1.0:268:58//Hs.5333:AB018254

[21389] F-PLACE1006883//ESTs//1.6e-75:398:94//Hs.119544:T95601

[21390] F-PLACE1006901//ESTs//1.9e-13:87:96//Hs.134737:AI089187

[21391] F-PLACE1006904//EST//1.0:91:70//Hs.148270:AA906443

[21392] F-PLACE1006917

[21393] F-PLACE1006932//ESTs//0.98:110:70//Hs.100855:AI423913

[21394] F-PLACE1006935//EST//1.0:92:65//Hs.124554:AA847211

[21395] F-PLACE1006956//PERIPHERIN//1.13:443:57//Hs.37044:L14565

[21396] F-PLACE1006958//Heat shock 70 kD protein 4//6.4e-40:456:70//Hs.127:L12723

[21397] F-PLACE1006961//ESTs, Highly similar to RSP5 PROTEIN [Saccharomyces cerevisiae]//3.2e-07:67:98//Hs.21806:AA630312

[21398] F-PLACE1006962//H. sapiens irlB mRNA//2.3e-16:202:71//Hs.135202:X63417

[21399] F-PLACE1006966//Homo sapiens syntaxin 4 binding protein UNC-18c (UNC-18c) mRNA, complete cds//0.14:191:67//Hs.8813:AF032922

[21400] F-PLACE1006989//Cyclin B 1//0.99:224:59//Hs.23960:M25753

[21401] F-PLACE1007014//Homo sapiens NBMPR-insensitive nucleoside transporter e1 (ENT2) mRNA, complete cds/13.1e-05:594:58//Hs.32951:AF034102

[21402] F-PLACE1007021//ESTs//7.2e-89:446:96//Hs.71 I :U55971

[21403] F-PLACE1007045//Human Line-1 repeat mRNA with 2 open reading frames//1.0e-117:775:84//Hs.23094:M19503

[21404] F-PLACE1007053//Homo sapiens mRNA for ARNO3 protein//0.35:63:82//Hs.129811:AJ223957

[21405] F-PLACE1007068//Polycystic kidney disease I (autosomal dominant)//0.22:361:60//Hs.75813:L33243

[21406] F-PLACE1007097//ESTs//2.9e-25:197:83//Hs.105665:H78987

[21407] F-PLACE1007105//Amylo-1,6-glucosidase, 4-alpha-glucanotransferase (glycogen debranching enzyme, glycogen storage disease type III)//0.18:268:63//Hs.904:U84010

[21408] F-PLACE1007111//EST//0.0066:260:60//Hs.147903:AI223385

[21409] F-PLACE1007112

[21410] F-PLACE1007132//ESTs//3.1e-30:195:76//Hs.46158:AI160121

[21411] F-PLACE1007140//TRANSCRIPTION ELONGATION FACTOR S-II//0.13:302:60//Hs.78869:M81601

[21412] F-PLACE1007178//ESTs//9.6e-54:289:95//Hs.12251:H 12965

[21413] F-PLACE1007226//Homo sapiens Notch3 (NOTCH3) mRNA, complete cds//0.00090:412:59//Hs.8546:U97669

[21414] F-PLACE1007238//Human plectin (PLECI) mRNA, complete cds//1.4e-07:492:64//Hs.79706:U53204

[21415] F-PLACE1007239//Human mRNA for transcription elongation factor S-II, hS-II-TI, complete cds//2.0e-58:405:87//Hs.80598:D50495

[21416] F-PLACE1007242//EST//0.014:55:89//Hs.88432:AA262141

[21417] F-PLACE1007243//ESTs//2.0e-43:227:97//Hs.124775:AA648467

[21418] F-PLACE1007257//Homo sapiens mRNA for dia-156 protein//3.7e-144:677:98//Hs.121556:Y15909

[21419] F-PLACE1007274

[21420] F-PLACE1007276//ATPase, Cu++ transporting, alpha polypeptide (Menkes syndrome)//0.94:167:64//Hs.606:L06133

[21421] F-PLACE1007282

[21422] F-PLACE1007286//ESTs//1.0e-25:333:71//Hs.134860:AI091436

[21423] F-PLACE1007301//EST//0.78:171:61//Hs.160990:H52412

[21424] F-PLACE1007317//Homo sapiens oxysterol 7alpha-hydroxylase (CYP7bl) mRNA, complete cds//0.88:298:58//Hs.144877:AF029403

[21425] F-PLACE1007342

[21426] F-PLACE1007346//Homo sapiens estrogen-responsive B box protein (EBBP) mRNA, complete cds//1.7e-121:567:98//Hs.76596:AF096870

[21427] F-PLACE1007367//H. sapiens mRNA for MACH-alpha-2 protein//2.2e-55:532:77//Hs.19949:X98173

[21428] F-PLACE1007375

[21429] F-PLACE1007386//ESTs//0.00066:61:91//Hs.149318:AI248642

[21430] F-PLACE1007402//EST//1.7e-06:193:65//Hs.132124:AI041287

[21431] F-PLACE1007409//Homo sapiens mitoxantrone resistance protein I mRNA, partial sequence//3.8e-118:128:92//Hs.14387:AF093771

[21432] F-PLACE1007416

[21433] F-PLACE1007450//ESTs//2.6e-36:194:97//Hs.22359:AI024436

[21434] F-PLACE1007452//EST//1.8e-34:197:94//Hs.134795:AI090359

[21435] F-PLACE1007454//Homo sapiens (clone s153) mRNA fragment//2.6e-53:317:93//Hs.6445:L40391

[21436] F-PLACE1007460//ESTs//0.0012:168:64//Hs.151708:AA554714

[21437] F-PLACE1007478//ESTs//1.0e-42:440:74//Hs.141722:AA769103

[21438] F-PLACE1007484//ESTs//7.1e-18:127:91//Hs.100251:AA535975

[21439] F-PLACE1007488

[21440] F-PLACE1007507//ESTs//1.2e-99:274:98//Hs.123462:AA903385

[21441] F-PLACE1007511//Keratin 19//4.2e-31:586:64//Hs.23761:Y00503

[21442] F-PLACE1007524//ESTs//6.8e-71:356:97//Hs.163067:AA897296

[21443] F-PLACE1007525//ESTs//0.073:242:59//Hs.128711:AA856979

[21444] F-PLACE1007537//Homo sapiens PYRIN (MEFV) mRNA, complete cds//0.93:468:57//Hs.113283:AF018080

[21445] F-PLACE1007544//ESTs//1.7e-74:360:98//Hs.128632:AI076755

[21446] F-PLACE1007547//Homo sapiens mRNA for KIAA0661 protein, complete cds//1.0e-70:733:71//Hs.65238:AB014561

[21447] F-PLACE1007557//EST//0.58:80:72//Hs.130267:AI0011863

[21448] F-PLACE1007583//ESTs//1.8e-46:234:98//Hs.155071:AA584257

[21449] F-PLACE1007598//ESTs//1.7e-83:400:99//Hs.120206:AI089163

[21450] F-PLACE1007618//Homo sapiens mRNA for KIAA0633 protein, partial cds//7.2e-12:778:56//Hs.33010:AB014533

[21451] F-PLACE1007621

[21452] F-PLACE1007632//ESTs//1 .7e-32:175:97//Hs.122278:AA781867

[21453] F-PLACE1007645

[21454] F-PLACE1007649

[21455] F-PLACE1007677//ESTs//3.0e-13:125:82//Hs.143382:AA476266

[21456] F-PLACE1007688//ESTs//6.8e-06:311:61//Hs.132926:AI027055

[21457] F-PLACE1007690//ESTs//1.9e-13:83:98//Hs.150088:AI348503

[21458] F-PLACE1007697//TRANSFORMING GROWTH FACTOR BETA 1 PRECURSOR//0.99:216:6311Hs.1103:X02812

[21459] F-PLACE1007705//Human mRNA for RTP, complete cds//4.8e-58:637:70//Hs.75789:D87953

[21460] F-PLACE1007706//Homo sapiens metalloprotease 1 (MP 1) mRNA, complete cds//4.1e-149:709:97//Hs.4812:AF061243

[21461] F-PLACE1007725//ESTs, Weakly similar to No definition line found [C. elegans]//4.5e-36:233:89//Hs.108797:AA476815

[21462] F-PLACE1007729//ESTs, Moderately similar to RETROVIRUS-RELATED PROTEASE [H. sapiens]//0.00033:270:64//Hs.104129:AA923278

[21463] F-PLACE1007730//Homo sapiens mRNA for KIAA0685 protein, complete cds//2.6e-156:728:98//Hs.153121:AB014585

[21464] F-PLACE1007737//Coagulation factor II (thrombin) receptor//1.1e-18:364:68//Hs.159347:M62424

[21465] F-PLACE1007743//ESTs//0.029:421:58//Hs.106090:AA457030

[21466] F-PLACE1007746//ESTs//6.7e-55:330:89//Hs.153392:AI089469

[21467] F-PLACE1007791//EST//0.39:261:621//Hs.145991:AI277656

[21468] F-PLACE1007807//ESTs//2.0e-54:385:83//Hs.163930:AA640504

[21469] F-PLACE1007810//ESTs//6.1e-53:416:81//Hs.152395:AA533107

[21470] F-PLACE1007829//EST//0.28:271:61//Hs.125514:AA883841

[21471] F-PLACE1007843//EST//0.020:307:59//Hs.145535:AI261635

[21472] F-PLACE1007846//Human Line-1 repeat mRNA with 2 open reading frames//6.3e-38:396:77//Hs.23094:M19503

[21473] F-PLACE1007852

[21474] F-PLACE1007858//Homo sapiens mRNA for KIAA0766 protein, complete cds//1.3e-190:894:98//Hs.28020:AB018309

[21475] F-PLACE1007866//ESTs//3.0e-50:333:86//Hs.15792:AI038387

[21476] F-PLACE1007877

[21477] F-PLACE1007897//EST//1 .0:59:72//Hs.138770:N70943

[21478] F-PLACE1007908//Homo sapiens mRNA, chromosome I specific transcript KIAA0487//7.3e-156:755:97//Hs.92381:AB007956

[21479] F-PLACE1007946//ESTs//8.9e-16:250:68//Hs.88527:N24002

[21480] F-PLACE1007954//ESTs//1 .6e-05:76:90//Hs.63314:AA056538

[21481] F-PLACE1007955//Homo sapiens cyclin-D binding Myb-like protein mRNA, complete cds//8.9e-173:813:98//Hs.5671:AF084530

[21482] F-PLACE1007958//Homo sapiens cAMP-specific phosphodiesterase 8B (PDE8B) mRNA, partial cds//8.2e-155:730:98//Hs.78106:AF079529

[21483] F-PLACE1007969//ESTs, Weakly similar to hnRNA-binding protein M4 [H. sapiens]//5.1e-45:264:92//Hs.42222:W28567

[21484] F-PLACE1007990//ESTs//1 .2e-104:493:99//Hs.118445:AI097043

[21485] F-PLACE1008000//Homo sapiens veli 1 mRNA, complete cds//5.7e-63:578:74//Hs.150380:AF087693

[21486] F-PLACE1008002//ESTs//0.52:236:59//Hs.134292:AA603031

[21487] F-PLACE1008044

[21488] F-PLACE1008045//COL10A1//0.29:221:58//Hs.37075:X60382

[21489] F-PLACE1008080//Human homeodomain protein (Prox 1) mRNA, complete cds//0.00037:151:71//Hs.159437:U44060

[21490] F-PLACE1008095//Human hybrid receptor gp250 precursor mRNA, complete cds//1.0:461:58//Hs.155494:U60975

[21491] F-PLACE1008111//Homo sapiens B lymphocyte chemoattractant BLC mRNA, complete cds//0.034:497:58//Hs.100431:AF044197

[21492] F-PLACE1008122//ESTs//0.95:198:60//Hs.126776:N28769

[21493] F-PLACE1008129//ESTs//1.1e-99:499:96//Hs.131807:AA778874

[21494] F-PLACE1008132//EST//3.3e-27:218:83//Hs.145258:AI218683

[21495] F-PLACE1008177//ESTs, Moderately similar to meiosis-specific nuclear structural protein 1 [M. musculus]//5 .1e-20:124:95//Hs.146238:AI263135

[21496] F-PLACE1008181//ESTs//0.018:285:61//Hs.88843:AA281427

[21497] F-PLACE1008198//ESTs//5.9e-07:410:60//Hs.63348:AA643524

[21498] F-PLACE1008201

[21499] F-PLACE1008209

[21500] F-PLACE1008231//ESTs//0.40:188:61//Hs.130266:AI001856

[21501] F-PLACE1008244//Miller-Dieker syndrome chromosome region//0.22:247:61//Hs.77318:L13385

[21502] F-PLACE1008273

[21503] F-PLACE1008275//EST//0.77:74:71//Hs.145907:AI275113

[21504] F-PLACE1008280//Homo sapiens mRNA, chromosome 1 specific transcript KIAA0501//2.6e-25:389:70//Hs.159897:AB007970

[21505] F-PLACE1008309//Homo sapiens serine phosphatase FCP1a (FCP1) mRNA, complete cds//0.16:263:63//Hs.4076:AF081287

[21506] F-PLACE1008329//EST//1.3e-09:94:85//Hs.144135:R82071

[21507] F-PLACE1008330//Homo sapiens mRNA for KIAA0557 protein, partial cds//1.5e-45:291:83//Hs.101414:AB011129

[21508] F-PLACE1008331//ESTs, Weakly similar to ORF2-like protein [H. sapiens]//5.4e-74:356:98//Hs.105382:AA496362

[21509] F-PLACE1008356//Homo sapiens mRNA for KIAA0679 protein, partial cds//3.4e-139:659:98//Hs.5734:AB014579

[21510] F-PLACE1008368//Homo sapiens actin binding protein MAYVEN mRNA, complete cds//0.011:355:60//Hs.122967:AF059569

[21511] F-PLACE1008369//ESTs//0.00074:443:61//Hs.102756:AA526911

[21512] F-PLACE1008392//EST//7.4e-08:324:60//Hs.149930:AI289171

[21513] F-PLACE1008398

[21514] F-PLACE1008401//Homo sapiens methyl-CpG binding protein MBD2 (MBD2) mRNA, complete cds//2.5e-09:461:62//Hs.25674:AF072242

[21515] F-PLACE1008402//Homo sapiens mRNA for p115, complete cds//1.4e-149:711:98//Hs.7763:D86326

[21516] F-PLACE1008405//ESTs//2.8e-102:529:95//Hs.116278:AA628943

[21517] F-PLACE1008424//Human DNA sequence from clone 753P9 on chromosome Xq25-26.1. Contains the gene coding for Aminopeptidase P (EC 3.4.11.9, XAA-Pro/X-Pro/Proline/Aminoacylproline Aminopeptidase) and a novel gene. Contains ESTs, STSs, GSSs and a gaaa repeat polymorphism//0.98:113:67//Hs.57922:AL023653

[21518] F-PLACE1008426//ESTs//3.2e-77:393:95//Hs.37585:W28499

[21519] F-PLACE1008429//Orf15′ to PD-ECGF/TP . . . orf25′ to PD-ECGF/TP [human, epidermoid carcinoma cell line A431, mRNA, 3 genes, 1718 nt]//0.019:530:58//Hs.72248:S72487

[21520] F-PLACE1008437

[21521] F-PLACE1008455//ESTs//0.51:279:61//Hs.122319:AA782335

[21522] F-PLACE1008457//ESTs//3.0e-30:229:75//Hs.60740:AA053901

[21523] F-PLACE1008465//Human mRNA for KIAA0383 gene, partial cds//0.0084:210:63//Hs.27590:AB002381

[21524] F-PLACE1008488//Human density enhanced phosphatase-1 mRNA, complete cds//6.8e-07:469:60//Hs.1177:U10886

[21525] F-PLACE1008524//Homo sapiens TWIK-related acid-sensitive K+channel (TASK) mRNA, complete cds//1.0:304:60//Hs.24040:AF006823

[21526] F-PLACE1008531//ESTs//1.1e-17:190:76//Hs.156041:AI274697

[21527] F-PLACE1008532//Thromboxane A2 receptor//5.6e-17:231:71//Hs.89887:D38081

[21528] F-PLACE1008533//Homo sapiens PAC clone DJ130H16 from 22q12.1-qter//1.1e-45:507:71//Hs.8003:AC004997

[21529] F-PLACE1008568//Homo sapiens mRNA for neuronatin alpha, complete cds//1.0:95:71//Hs.117546:U31767

[21530] F-PLACE1008584//ESTs//1.4e-13:252:68//Hs.153429:AI283069

[21531] F-PLACE1008603//Homo sapiens mRNA for KIAA0791 protein, complete cds//3.9e-175:812:98//Hs.23255:AB018334

[21532] F-PLACE1008621//ESTs, Weakly similar to reverse transcriptase [H. sapiens]//1.2e-15:350:66//Hs.151087:AA649326

[21533] F-PLACE1008625//ESTs//0.86:269:57//Hs.94998:N26794

[21534] F-PLACE1008626//ESTs//0.55:69:71//Hs.92096:F 10560

[21535] F-PLACE1008627//ESTs//3.0e-62:302:99//Hs.120766:H82458

[21536] F-PLACE1008629//EST//0.0012:174:67//Hs.121195:AA757211

[21537] F-PLACE1008630//ESTs//4.5e-77:371:99//Hs.132960:AA252394

[21538] F-PLACE1008643//Human mRNA for PK-120//4.7e-25:299:64//Hs.76415:D38535

[21539] F-PLACE1008650//Homo sapiens pleiotropic regulator I (PLRGI) mRNA, complete cds//3.5e-135:622:99//Hs.147967:AF044333

[21540] F-PLACE1008693//EST//0.19:36:94//Hs.138817:N93728

[21541] F-PLACE1008696//Human mitochondrial NADH dehydrogenase-ubiquinone Fe-S protein 8, 23 kDa subunit precursor (NDUFS8) nuclear mRNA encoding mitochondrial protein, complete cds//8.3e-25:137:97//Hs.90443:AF038406

[21542] F-PLACE1008715//Homo sapiens mRNA for matrilin-3//0.99:183:63//Hs.119534:AJ224741

[21543] F-PLACE1008748//ESTs//0.88:204:63//Hs.15139:AA527080

[21544] F-PLACE1008757//ESTs, Weakly similar to unknown protein [R. norvegicus]//4.3e-17:285:69//Hs.35460:H65503

[21545] F-PLACE1008790//Homo sapiens importin alpha 7 subunit mRNA, complete cds//1.4e-121:503:97//Hs.6458:AF060543

[21546] F-PLACE1008798//ESTs, Weakly similar to putative p150 [H. sapiens]//0.30:127:68//Hs.111380:AA258772

[21547] F-PLACE1008807//ESTs//0.81:346:58//Hs.116901:AA663542

[21548] F-PLACE1008808//Homo sapiens putative checkpoint control protein HRADI mRNA, complete cds//6.7e-104:376:98//Hs.7179:AF011905

[21549] F-PLACE1008813//Glutamate decarboxylase I (brain, 67 kD)//0.17:318:61//Hs.75668:M81883

[21550] F-PLACE1008851//ESTs, Highly similar to CELL DIVISION CONTROL PROTEIN 2 HOMOLOG [Plasmodium falciparum (isolate kl/thailand)]//0.73:354:59//Hs.26322:AA156858

[21551] F-PLACE1008854//ESTs//3.0e-26:391:66//Hs.133260:AI052728

[21552] F-PLACE1008867//ESTs//5.9e-08:64:93//Hs.91115:AI221563

[21553] F-PLACE1008887//Human Line-1 repeat mRNA with 2 open reading frames//5.5e-51:701:68//Hs.23094:M19503

[21554] F-PLACE1008902//EST//0.85:425:60//Hs.140573:AA826323

[21555] F-PLACE1008920//Homo sapiens mRNA for KIAA0765 protein, partial cds//2.1e-159:753:98//Hs.62318:AB018308

[21556] F-PLACE1008925//ESTs//0.025:133:67//Hs.103218:W84771

[21557] F-PLACE1008934//ESTs//0.27:307:59//Hs.135168:AI394026

[21558] F-PLACE1008941//ESTs//3.3e-53:266:98//Hs.108677:AA488937

[21559] F-PLACE1008947//Human TBP-associated factor (hTAFII130) mRNA, partial cds//2.4e-13:625:58//Hs.24644:U75308

[21560] F-PLACE1009020//ESTs//3.3e-11:122:81//Hs.131777:AI024950

[21561] F-PLACE1009027//Homo sapiens mRNA for doublecortin//1.2e-151:763:96//Hs.34780:AJ003112

[21562] F-PLACE1009039//EST//0.76:111:63//Hs.160997:H55762

[21563] F-PLACE1009045//ESTs//2.2e-76:399:95//Hs.114919:AA457689

[21564] F-PLACE1009048//GLYCOPROTEIN HORMONES ALPHA CHAIN PRECURSOR//2.6e-16:93:100//Hs.119689:S70585

[21565] F-PLACE1009050//ESTs//1.4e-92:451:98//Hs.66373:AI239698

[21566] F-PLACE1009060//ESTs//1.4e-14:86:100//Hs.131725:AI090525

[21567] F-PLACE1009090//ESTs//2.7e-20:198:78//Hs.110044:AA181800

[21568] F-PLACE1009091//ESTs//0.99:342:57//Hs.46903:AI093091

[21569] F-PLACE1009094//ESTs//1.0:225:63//Hs.120374:AI337031

[21570] F-PLACE1009099//H. sapiens ZNF81 gene//2.2e-79:733:74//Hs.104020:X68011

[21571] F-PLACE1009110//ESTs//2.6e-91:453:96//Hs.143756:AI040890

[21572] F-PLACE1009111//ESTs//2.7e-15:159:77//Hs.146811:AA410788

[21573] F-PLACE1009113//Homo sapiens X-ray repair cross-complementing protein 3 (XRCC3) mRNA, complete cds//1.1e-139:671:97//Hs.99742:AF035586

[21574] F-PLACE1009130//Human mRNA for KIAA0032 gene, complete cds//1.1e-24:718:59//Hs.35804:D25215

[21575] F-PLACE1009150//Human HsLIM15 mRNA for HsLim15, complete cds//1.7e-50:440:78//Hs.37181:D64108

[21576] F-PLACE1009155//Homo sapiens mRNA, chromosome 1 specific transcript KIAA0484//4.0e-46:440:69//Hs.158095:AB007953

[21577] F-PLACE1009158//Human growth/differentiation factor 1 (GDF-1) mRNA, complete cds//0.28:245:61//Hs.92614:M62302

[21578] F-PLACE1009166//EST//0.98:114:67//Hs.137706:AA977250

[21579] F-PLACE1009172//EST//16.2e-34:257:84//Hs.161081:N22770

[21580] F-PLACE1009174//ESTs//6.0e-24:234:77//Hs.155196:AI282821

[21581] F-PLACE1009183//EST//0.021:261:62//Hs.144222:N90100

[21582] F-PLACE1009186//ESTs, Weakly similar to No definition line found [C. elegans]//3.6e-117:588:95//Hs.54943:Z78396

[21583] F-PLACE1009190//EST//0.046:95:70//Hs.131646:AI025689

[21584] F-PLACE1009200//EST//2.5e-41:195:78//Hs.162404:AA573131

[21585] F-PLACE1009230//CARCINOEMBRYONIC ANTIGEN PRECURSOR//5.3e-29:157:77//Hs.146403:M29540

[21586] F-PLACE1009246//EST//0.13:178:62//Hs.23298:R22575

[21587] F-PLACE1009298//ESTs, Highly similar to VACUOLAR SORTING PROTEIN 35 [Saccharomyces cerevisiae]//1.9e-21:121:98//Hs.124768:AA307735

[21588] F-PLACE1009308//SERUM PROTEIN MSE55//0.44:195:62//Hs.148101:M88338

[21589] F-PLACE1009319//Homo sapiens post-synaptic density protein 95 (PSD95) mRNA, complete cds//9.7e-08:411:59//Hs.23731:U83192

[21590] F-PLACE1009328//Human Line-1 repeat mRNA with 2 open reading frames//2.3e-91:594:86//Hs.23094:M19503

[21591] F-PLACE1009335//EST//0.037:169:63//Hs.148875:AI240767

[21592] F-PLACE1009338//ESTs//5.7e-22:123:98//Hs.66783:AA059473

[21593] F-PLACE1009368

[21594] F-PLACE1009375

[21595] F-PLACE1009388//Homo sapiens KIAA0395 mRNA, partial cds//1.7e-41:317:81//Hs.43681:AL022394

[21596] F-PLACE1009398//Zinc finger protein 84 (HPF2)//1.4e-79:730:74//Hs.9450:M27878

[21597] F-PLACE1009404//MICROTUBULE-ASSOCIATED PROTEIN TAU//0.099:207:61//Hs.101174:AF047863

[21598] F-PLACE1009410//Homo sapiens BAF57 (BAF57) gene, complete cds//1.4e-27:210:86//Hs.3404:AF035262

[21599] F-PLACE1009434//Human mRNA for KIAA0005 gene, complete cds//2.8e-45:599:68//Hs.155291:D13630

[21600] F-PLACE1009443//H. sapiens 5T4 gene for 5T4 Oncofetal antigen//0.11:350:58//Hs.82128:AJ012159

[21601] F-PLACE1009444//PHOSPHATIDYLINOSITOL 4-KINASE ALPHA//1.5e-22:146:93//Hs.76987:AF012872

[21602] F-PLACE1009459//H. sapiens garp gene mRNA, complete CDS//1.0:241:60//Hs.151641:Z24680

[21603] F-PLACE1009468//1-PHOSPHATIDYLINOSITOL-4,5-BISPHOSPHATE PHOSPHODIESTERASE BETA 2//0.00039:347:60//Hs.994:M95678

[21604] F-PLACE1009476//Homo sapiens Chromosome 16 BAC clone CIT987SK-A-67A //4.1e-91:464:96//Hs.155049:AC004531

[21605] F-PLACE1009477//ESTs//0.30:221:61//Hs.107287:AI308839

[21606] F-PLACE1009493//Homo sapiens mRNA for LAK-4p, complete cds//1.6e-30:608:63//Hs.16165:AB002405

[21607] F-PLACE1009524//Human Sec7p-like protein mRNA, partial cds//2.3e-68:526:78//Hs.8517:U70728

[21608] F-PLACE1009539//ESTs//3.3e-18:186:83//Hs.71922:AA148417

[21609] F-PLACE1009542//EST//7.8e-11:265:65//Hs.159692:AI416956

[21610] F-PLACE1009571//ESTs//6.1e-15:94:97//Hs.151458:AA600866

[21611] F-PLACE1009581//Microtubule-associated protein I A//1.0:196:59//Hs.147918:U38291

[21612] F-PLACE1009595//EST//1.8e-28:179:92//Hs.60090:AA004806

[21613] F-PLACE1009596//ESTs, Weakly similar to LIS-1 protein [H. sapiens]//4.1e-16:281:66//Hs.13889:AI341394

[21614] F-PLACE1009607//Homo sapiens PYRIN (MEFV) mRNA, complete cds//4.9e-52:313:79//Hs.113283:AF018080

[21615] F-PLACE1009613//ESTs//0.50:297:60//Hs.25114:AI074011

[21616] F-PLACE1009621//ESTs//1.4e-98:470:98//Hs.124695:AI094085

[21617] F-PLACE1009622//ESTs//9.8e- 14:94:93//Hs.117227:AA682773

[21618] F-PLACE1009637//ESTs//4.9e-92:440:98//Hs.126587:AA917087

[21619] F-PLACE1009639

[21620] F-PLACE1009659//Homo sapiens mRNA for KIAA0587 protein, complete cds//4.4e-173:816:98//Hs.21862:AB011159

[21621] F-PLACE1009665//ESTs//9.1e-45:383:79//Hs.61199:AA024494

[21622] F-PLACE1009670//Homo sapiens genethonin 1 mRNA, complete cds//8.1e-149:701:98//Hs.109590:AF062534

[21623] F-PLACE1009708//ESTs, Weakly similar to HYPOTHETICAL TRP-ASP REPEATS CONTAINING PROTEIN IN HXT14-PHA2 INTERGENIC REGION [S. cerevisiae]//7.5e-51:295:92//Hs.48541:AA827926

[21624] F-PLACE1009721//EST//0.18:467:58//Hs.124358:AA830650

[21625] F-PLACE1009731//ESTs//1.0:207:63//Hs.60440:AA195789

[21626] F-PLACE1009763//Homo sapiens UBA3 (UBA3) mRNA, complete cds//1.3e-126:602:98//Hs.154320:AF046024

[21627] F-PLACE1009794//ESTs//4.0e-41:252:91//Hs.42927:N20989

[21628] F-PLACE1009798//Human DNA sequence from clone 1189B24 on chromosome Xq25-26.3. Contains NADH-Ubiquinone Oxidoreductase MLRQ subunit (EC 1.6.5.3, EC 1.6.99.3, CI-MLRQ), Tubulin Beta and Proto-oncogene Tyrosine-protein Kinase FER (EC 2.7.1.112, P94-FER, C-FER, TYK3) pseudogenes, and part of a novel gene similar to hypothetical proteins S. pombe C22F3.14C and C. elegans C16A3.8. Contains ESTs and GSSs//5.5e-130:600:95//Hs.16411:AL030996

[21629] F-PLACE1009845

[21630] F-PLACE1009861

[21631] F-PLACE1009879//ESTs//6.3e-12:293:66//Hs.147071:AI200021

[21632] F-PLACE1009886

[21633] F-PLACE1009888//EST//0.044:255:58//Hs.160695:AI282889

[21634] F-PLACE1009908

[21635] F-PLACE1009921//Apoptosis (APO-1) antigen 1//0.62:407:57//Hs.82359:X63717

[21636] F-PLACE1009924//EST//2.9e-29:155:99//Hs.162937:AA634379

[21637] F-PLACE1009925

[21638] F-PLACE1009935//CATHEPSIN K PRECURSOR//0.43:153:66//Hs.83942:X82153

[21639] F-PLACE1009947//ESTs//1.8e-07:56:100//Hs.149940:AI306446

[21640] F-PLACE1009971//Acyl-Coenzyme A dehydrogenase, C-2 to C-3 short chain//0.89:243:61//Hs.127610:Z80345

[21641] F-PLACE1009992//ESTs//0.99:123:68//Hs.91202:AI139114

[21642] F-PLACE1009995//ESTs, Weakly similar to COIA2.4 [C. elegans]//3.3e-24:174:88/11Hs.11449:AI201540

[21643] F-PLACE1009997//Homo sapiens mRNA for KIAA0629 protein, partial cds//3.7e-36:196:96//Hs.153545:AB014529

[21644] F-PLACE1010023

[21645] F-PLACE1010031//ESTs//1.3e-16:132:87//Hs.46847:WO2878

[21646] F-PLACE1010053//ESTs, Moderately similar to M-phase phosphoprotein 4 [H. sapiens]//5.2e-63:312:98//Hs.142151:AA984061

[21647] F-PLACE1010069//ESTs//6.6e-33:171:98//Hs.128844:AA977596

[21648] F-PLACE1010074//Homo sapiens sorting nexin 2 (SNX2) mRNA, complete cds//5.9e-168:792:98//Hs.11183:AF065482

[21649] F-PLACE1010076//ESTs//0.88:379:55//Hs1.5884:N21424

[21650] F-PLACE1010083//Homo sapiens mRNA for KIAA0456 protein, partial cds//9.6e-154:727:98//Hs.5003:AB007925

[21651] F-PLACE1010089//ESTs, Highly similar to PROBABLE UBIQUITIN CARBOXYL-TERMINAL HYDROLASE [Mus musculus]//1.8e-38:212:95//Hs.98067:AA236822

[21652] F-PLACE1010096//ESTs, Highly similar to hypothetical protein, 100K [R. norvegicus]//1.8e-08:100:89//Hs.11469:U69567

[21653] F-PLACE1010102//Homo sapiens stimulator of Fe transport mRNA, complete cds//0.0035:339:60//Hs.129683:AF020761

[21654] F-PLACE1010105//Homo sapiens actin binding protein MAYVEN mRNA, complete cds//1.2e-26:728:60//Hs.122967:AF059569

[21655] F-PLACE1010106//EST//8.5e-28:394:70//Hs.142044:AA166682

[21656] F-PLACE1010134//H. sapiens hbrm mRNA//1.2e-14:380:64//Hs.77590:X72889

[21657] F-PLACE1010148//Human trans-Golgi p230 mRNA, complete cds//0.26:708:57//Hs.158245:U41740

[21658] F-PLACE1010152

[21659] F-PLACE1010181//EST//1.3e-21:312:71//Hs.141501:N50792

[21660] F-PLACE1010194//ESTs//2.6e-55:284:97//Hs.155940:AA459582

[21661] F-PLACE1010202//ESTs, Weakly similar to No definition line found [C. elegans]//2.3e-72:391:94//Hs.35225:H69637

[21662] F-PLACE1010231

[21663] F-PLACE1010261//Homo sapiens mRNA for KIAA0448 protein, complete cds//1.9e-146:693:97//Hs.27349:AB007917

[21664] F-PLACE1010270//ESTs//2.0e-104:514:98//Hs.124062:H04590

[21665] F-PLACE1010274//ESTs, Weakly similar to COIA2.4 [C. elegans]//6.8e-25:149:93//Hs.11449:AI201540

[21666] F-PLACE1110293//EST//4.5e-36:358:74//Hs.162398:AA572813

[21667] F-PL-A-CE 1010310//HOMEOBOX/POU DOMAIN PROTEIN RDC-1//2.1e-10:352:62//Hs.74095:L20433

[21668] F-PLACE1010321//Human hSIAH2 mRNA, complete cds//0.071:604:58//Hs.20191:U76248

[21669] F-PLACE1010324//ESTs//0.22:286:58//Hs.130853:A1367875

[21670] F-PLACE1010329//EST//5.7e-05:351:60//Hs.120644:AA742659

[21671] F-PLACE1010341//EST//4.5e-16:255:72//Hs.141206:H53117

[21672] F-PLACE1010362//ESTs//1.9e-41:246:92//Hs.128771:AA236855

[21673] F-PLACE1010364//EST//1.11:292:58//Hs.135771:AI005648

[21674] F-PLACE1010383//EST//6.1e-08:107:76//Hs.136441:AA564986

[21675] F-PLACE1010401

[21676] F-PLACE1010481//Human BLu protein (BLu) mRNA, complete cds//0.94:254:61//Hs.125257:U70824

[21677] F-PLACE1010491//Homo sapiens Cre binding protein-like 2 mRNA, complete cds//7.2e-152:702:99//Hs.13313:AF039081

[21678] F-PLACE1010492//ESTs//1.0:201:60//Hs.146036:AI038500

[21679] F-PLACE1010522//ESTs//3.9e-52:263:97//Hs.125149:AI302100

[21680] F-PLACE1010529//Homo sapiens chromodomain-helicase-DNA-binding protein mRNA, complete cds//1.0:175:6411Hs.159273:AF054177

[21681] F-PLACE1010547//ESTs//0.96:288:57//Hs.87156:AA233472

[21682] F-PLACE1010562//EST//1.0:164:66//Hs.147868:AI222979

[21683] F-PLACE010579//EST//0.39:279:58//Hs.158960:AI380148

[21684] F-PLACE1010580//ESTs, Moderately similar to PUTATIVE ATP-DEPENDENT RNA HELICASE C12C2.06 [Schizosaccharomyces pombe]//3.8e-31:193:91//Hs.145229:N44661

[21685] F-PLACE1010599//Homo sapiens peroxisomal membrane anchor protein HsPex14p (PEX14) mRNA, complete cds//9.9e-148:707:97//Hs.19851:AF045186

[21686] F-PLACE1010616//EST//3.1e-43:213:100//Hs.128215:AA972394

[21687] F-PLACE1010622//NUCLEOLIN//0.00040:282:60//Hs.79110:M60858

[21688] F-PLACE1010624//Homo sapiens Jagged 2 mRNA, complete cds//1.2e-05:516:61//Hs.106387:AF029778

[21689] F-PLACE1010628//EST, Weakly similar to line-1 protein ORF2 [H. sapiens]//0.012:258:62//Hs.144375:AA484200

[21690] F-PLACE1010629//EST//8.3e-23:218:79//Hs.161975:AA501461

[21691] F-PLACE1010630//EST//0.29:319:58//Hs.137277:N62225

[21692] F-PLACE1010631//Homo sapiens mRNA for KIAA0530 protein, partial cds//9.5e-66:363:95//Hs.10801:AB011102

[21693] F-PLACE1010661//ESTs//3.9e-89:504:92//Hs.122666:W27076

[21694] F-PLACE1010662

[21695] F-PLACE1010702//Human repressor transcriptional factor (ZNF85) mRNA, complete cds//1.1e-74:697:74//Hs.37138:U35376

[21696] F-PLACE1010714//EST//0.018:253:59//Hs.148028:AI270027

[21697] F-PLACE1010720//Homo sapiens chromosome-associated protein-C (hCAP-C) mRNA, partial cds//6.1e-77:393:96//Hs.50758:AF092564

[21698] F-PLACE1010739//Homo sapiens mRNA for Sec24 protein (Sec24A isoform), partial//0.97:314:59//Hs.14574:AJ131244

[21699] F-PLACE1010743//Human myosin-IXb mRNA, complete cds//2.4e-56:409:86//Hs.159629:U42391

[21700] F-PLACE1010761//ESTs, Weakly similar to U1 SMALL NUCLEAR RIBONUCLEOPROTEIN 70 KD [Xenopus laevis]//5.1e-80:407:96//Hs.80965:AA493284

[21701] F-PLACE1010771//ESTs, Highly similar to TRANSCRIPTIONAL REGULATOR PROTEIN HCNGP [Mus musculus]//6.0e-45:251:94//Hs.11379:AA594140

[21702] F-PLACE1010786

[21703] F-PLACE1010800

[21704] F-PLACE1010802//EST//0.94:128:64//Hs.120366:AA719157

[21705] F-PLACE1010811//ESTs//0.89:339:59//Hs.127314:N48085

[21706] F-PLACE1010833//ESTs, Weakly similar to allograft inflammatory factor-1 [H. sapiens]//2.9e-28:245:79//Hs.132736:AA583494

[21707] F-PLACE1010856//ESTs//1.5e-06:95:87//Hs.17401:W81048

[21708] F-PLACE1010857//ESTs, Weakly similar to KIAA0157 gene product is novel. [H. sapiens]//5.8e-67:336:97//Hs.130135:AA905493

[21709] F-PLACE1010870//Zinc finger protein 43 (HTF6)//9.7e-40:498:69//Hs.74107:X59244

[21710] F-PLACE1010877//Homo sapiens mRNA for KIAA0610 protein, partial cds//3.7e-149:694:98//Hs.118087:AB011182

[21711] F-PLACE1010891//ESTs//6.9e-54:377:87//Hs.24453:R31671

[21712] F-PLACE1010896//Human homologue of yeast sec7 mRNA, complete cds//0.64:167:65//Hs.1050:M85169

[21713] F-PLACE1010900

[21714] F-PLACE1010916//EST//0.55:151:66//Hs.145800:AI269981

[21715] F-PLACE1010917

[21716] F-PLACE1010925//ESTs//2.6e-81:437:94//Hs.5876:H26537

[21717] F-PLACE1010926//Homo sapiens mRNA for KIAA0554 protein, partial cds//3.1e-139:653:98//Hs.74750:AB011126

[21718] F-PLACE1010942//Homo sapiens intersectin short form mRNA, complete cds//2.9e-91:437:98//Hs.66392:AF064244

[21719] F-PLACE1010944//ESTs//1.3e-17:117:91//Hs.29444:W30985

[21720] F-PLACE1010947//EST//0.97:93:72//Hs.162299:AA555154

[21721] F-PLACE1010954//Apolipoprotein B (including Ag(x) antigen)//0.28:444:59//Hs.585:X04506

[21722] F-PLACE1010960//ESTs//0.98:238:60//Hs.163674:AA506632

[21723] F-PLACE1010965//ESTs//3.1e-74:376:96//Hs.115679:AI379721

[21724] F-PLACE1011026//EST//0.022:222:60//Hs.47154:N50931

[21725] F-PLACE1011032//EST//1.1e-05:88:79//Hs.118024:N34032

[21726] F-PLACE1011041//Human density enhanced phosphatase-1 mRNA, complete cds//0.28:179:67//Hs.1177:U10886

[21727] F-PLACE1011046//1-PHOSPHATIDYLINOSITOL-4,5-BISPHOSPHATE PHOSPHODIESTERASE BETA 2//6.2e-11:207:68//Hs.994:M95678

[21728] F-PLACE1001054//H. sapiens OBF-1 mRNA for octamer binding factor 1//6.1e-35:310:78//Hs.2407:Z49194

[21729] F-PLACE1011056//Human putative serine/threonine protein kinase PRK (prk) mRNA, complete cds//0.74:228:61//Hs.153640:U56998

[21730] F-PLACE1011057//EST//2.5e-80:388:98//Hs.126466:AA913320

[21731] F-PLACE101090//ESTs//1.4e-94:469:97//Hs.106448:R76663

[21732] F-PLACE1011109//ESTs//0.13:303:62//Hs.49294:AA418037

[21733] F-PLACE1011114//ESTs//5.8e-12:75:100//Hs.147422:AI214317

[21734] F-PLACE101133//ESTs//0.17:225:62//Hs.132853:AI370857

[21735] F-PLACE1011143//ESTs//0.013:264:63//Hs.115368:AA629949

[21736] F-PLACE1011160

[21737] F-PLACE1011165//Galactokinase 2//2.7e-32:194:92//Hs.129228:M84443

[21738] F-PLACE1011185//EST//1.4e-34:261:83//Hs.140250:AA708114

[21739] F-PLACE1011203//Homo sapiens chromosome 18q11 beta-1,4-galactosyltransferase mRNA, complete cds//6.9e-124:576:99//Hs.159140:AF038664

[21740] F-PLACE1111214//ESTs, Weakly similar to B0035.14 [C. elegans]//9.7e-101:469:99//Hs.8241:AA283057

[21741] F-PLACE1011219//ESTs, Weakly similar to coded for by C. elegans cDNA CEESL70F [C. elegans]//2.6e-62:221:88//Hs.101821:W27452

[21742] F-PLACE0111221//EST//0.46:238:62//Hs.32853:AA015751

[21743] F-PLACE1011229//Homo sapiens mRNA for KIAA0529 protein, partial cds//1.4e-147:675:99//Hs.23168:AB011101

[21744] F-PLACE1011263//Homo sapiens BAC clone GS166A23 from 7p21//5.9e-71:350:98//Hs.15144:AC005014

[21745] F-PLACE1011273//ESTs//1.0:222:59//Hs.35274:AA495803

[21746] F-PLACE1011291//Homo sapiens clone 24712 unknown mRNA, partial cds//3.4e-09:191:65//Hs.140950:AF070637

[21747] F-PLACE1011296//ESTs//0.019:137:63//Hs.140654:AA865915

[21748] F-PLACE1011310//EST//0.066:336:58//Hs.162529:AA584160

[21749] F-PLACE1011325//ESTs//7.4e-43:229:96//Hs.21081:H08310

[21750] F-PLACE1011332//Homo sapiens N-acetylglucosamine-phosphate mutase mRNA, complete cds//4.8e-151:696:99//Hs.5819:AF102265

[21751] F-PLACE1011340//Homo sapiens mRNA, chromosome 1 specific transcript KIAA0501//1 .5e-20:120:81//HFs.159897:AB007970

[21752] F-PLACE1011371//Human mRNA for PK-120//9.5e-35:684:63//Hs.76415:D38535

[21753] F-PLACE1011375//ESTs, Moderately similar to potassium channel protein Raw3 [R. norvegicus]//6.7e-68:325:99//Hs.107245:AA627053

[21754] F-PLACE1011399//ESTs//8.6e-05:285:61//Hs.130105:AA904868

[21755] F-PLACE011419//ESTs//0.70:240:62//Hs.159650:N95552

[21756] F-PLACE1011433//Homo sapiens mRNA for KIAA0530 protein, partial cds//1.5e-158:743:98//Hs.10801:AB011102

[21757] F-PLACE1011452//Human Line-1 repeat mRNA with 2 open reading frames//1.9e-53:557:72//Hs.23094:M19503

[21758] F-PLACE1011465//EST//3.1e-58:380:85//Hs.131605:AI025204

[21759] F-PLACE1011472//Homo sapiens mRNA for KIAA0712 protein, complete cds//1.5e-152:703:99//Hs.111138:AB018255

[21760] F-PLACE1011477//Homo sapiens sorting nexin 2 (SNX2) mRNA, complete cds//1.7e-146:675:99//Hs.11183:AF065482

[21761] F-PLACE1001492//ESTs//2.0e-35:186:98//Hs.125886:AA884264

[21762] F-PLACE1011503//EST//0.67:149:65//Hs.149774:AI285997

[21763] F-PLACE1011520//ESTs//0.00014:213:64//Hs.119889:AA705319

[21764] F-PLACE1011563//ESTs//2.2e-61:394:8611Hs.117718:AA883476

[21765] F-PLACE1011567//Homo sapiens DEC-205 mRNA, complete cds//3.1e-46:325:84//Hs.153563:AF011333

[21766] F-PLACE1011576//Homo sapiens hematopoietic cell derived zinc finger protein mRNA, complete cds//4.3e-67:268:86//Hs.86371:AF054180

[21767] F-PLACE1011586//Homo sapiens hLRp105 mRNA for LDL receptor related protein 105, complete cds//0.98:153:65//Hs.143641:AB009462

[21768] F-PLACE1011635//Homo sapiens Jagged 2 mRNA, complete cds//0.00029:585:57//Hs.106387:AF029778

[21769] F-PLACE1011641

[21770] F-PLACE1011643//Homo sapiens mRNA for KIAA0293 gene, partial cds//0.00058:499:58//Hs.12784:AB006631

[21771] F-PLACE1011646EST//3.2e-26:201:68//Hs.140349:AA757661

[21772] F-PLACE1011649//ESTs//0.25:145:64//Hs.23033:R46086

[21773] F-PLACE1011650//ESTs//0.041:96:77//Hs.119351:AA447745

[21774] F-PLACE1011664//Human mRNA for stac, complete cds//1.0:245:60//Hs.56045:D86640

[21775] F-PLACE1011675//Cell division cycle 27//0.098:448:57//Hs.73151:S78234

[21776] F-PLACE1101682//EST//9.6e-06:119:72//Hs.93664:N23366

[21777] F-PLACE1011719//Human mRNA for KIAA0352 gene, complete cds//0.92:365:60//Hs.17262:AB002350

[21778] F-PLACE1011725

[21779] F-PLACE1011729//EST//0.56:304:58//Hs.86378:AA210853

[21780] F-PLACE1011749//ESTs//4.3e-88:443:96//Hs.132850:AA779891

[21781] F-PLACE1011762//ESTs//0.012:149:68//Hs.145075:AI208240

[21782] F-PLACE1011778//ESTs//0.00016:199:64//Hs.160395:AI393693

[21783] F-PLACE1011783//EST//1.0:119:66//Hs.162191:AA534660

[21784] F-PLACE1011858//Human novel homeobox mRNA for a DNA binding protein//8.9e-05:477:59//Hs.37035:U07664

[21785] F-PLACE1011874//EST//0.20:118:66//Hs.127351:AA954775

[21786] F-PLACE1011875//Homo sapiens mRNA for KIAA0580 protein, partial cds//5.3e-110:526:98//Hs.22572:AB011152

[21787] F-PLACE1011891//ESTs//1.8e-58:397:88//Hs.84698:AA725913

[21788] F-PLACE1011896//ESTs, Weakly similar to Y53C12A.3 [C. elegans]//9.4e-09:478:56//Hs.107747:AI357868

[21789] F-PLACE1011922//ESTs//0.49:249:62//Hs.152627:AA595817

[21790] F-PLACE1011923//Homo sapiens serum-inducible kinase mRNA, complete cds//3.7e-140:664:98//Hs.3838:AF059617

[21791] F-PLACE1011962//EST//1.7e-07:81:85//Hs.104333:AA250763

[21792] F-PLACE1011964EST//6.6e-38:412:74//Hs.140562:AA826514

[21793] F-PLACE1011982//ESTs//0.40:405:60//Hs.127743:AI261591

[21794] F-PLACE1011995//ESTs//1.7e-22:486:64//Hs.105157:AA527514

[21795] F-PLACE1012031//Homo sapiens mRNA for KIAA0713 protein, partial cds//4.0e-148:690:98//Hs.88756:AB018256

[21796] F-PLACE2000003//Homo sapiens mRNA, chromosome 1 specific transcript KIAA0487//6.5e-54:290:81//Hs.92381:AB007956

[21797] F-PLACE2000006//ESTs//0.067:224:62//Hs.144100:AI205503

[21798] F-PLACE2000007//ESTs//8.1e-23:147:91//Hs.128530:AA325330

[21799] F-PLACE2000011//Interleukin 10//4.2e-42:362:78//Hs.2180:M57627

[21800] F-PLACE2000014//EST//0.10:214:61//Hs.160247:AII 38831

[21801] F-PLACE2000015//Interleukin 10//1.4e-44:393:78//Hs.2180:M57627

[21802] F-PLACE2000017

[21803] F-PLACE2000021//Homo sapiens TRF1-interacting ankyrin-related ADP-ribose polymerase mRNA, partial cds//5.7e-85:844:72//Hs.7928:AF082557

[21804] F-PLACE2000030

[21805] F-PLACE2000033//Human adhesion molecule ninjurin mRNA, complete cds//0.85:234:66//Hs.11342:U91512

[21806] F-PLACE2000034//Homo sapiens mRNA for KIAA0607 protein, partial cds//0.058:348:62//Hs.94653:AB011179

[21807] F-PLACE2000039//Human plectin (PLECI) mRNA, complete cds//0.0058:473:59//Hs.79706:U53204

[21808] F-PLACE2000047//ESTs//4.9e-32:328:75//Hs.141024:H07128

[21809] F-PLACE2000050//ESTs//3.0e-36:270:83//Hs.155512:AA663966

[21810] F-PLACE2000061

[21811] F-PLACE2000062//Human membrane-associated lectin type-C mRNA//2.9e-114:662:86//Hs.23759:M98457

[21812] F-PLACE2000072//Homo sapiens ZNF202 alpha (ZNF202) mRNA, complete cds//7.1e-135:631:98//Hs.9443:AF027219

[21813] F-PLACE2000097//ESTs//0.021:117:70//Hs.132811:AI034333

[21814] F-PLACE2000100

[21815] F-PLACE2000103//ESTs//1.1e-56:284:98//Hs.144786:AI219219

[21816] F-PLACE2000111//H. sapiens mRNA for 1-acylglycerol-3-phosphate O-acyltransferase//0.76:215:65//Hs.6587:U56417

[21817] F-PLACE2000115

[21818] F-PLACE2000124//Human mRNA for KIAA0355 gene, complete cds//2.8e-49:400:79//Hs.153014:AB002353

[21819] F-PLACE2000132

[21820] F-PLACE2000136//ESTs, Moderately similar to hypothetical protein [H. sapiens]//1.2e-08:245:64//Hs.140343:AA718911

[21821] F-PLACE2000140//Adenylate kinase 2 (adk2)//3.7e-24:162:90//Hs.83833:U54645

[21822] F-PLACE2000164

[21823] F-PLACE2000170

[21824] F-PLACE2000172//ESTs//0.64:239:62//Hs.31175:AI219179

[21825] F-PLACE2000176

[21826] F-PLACE2000187

[21827] F-PLACE2000216

[21828] F-PLACE2000223//EST//0.0092:171:60//Hs.162830:AA643933

[21829] F-PLACE2000235//Human mRNA for KIAA0298 gene, complete cds//1.6e-38:792:63//Hs.21560:AB002296,

[21830] F-PLACE2000246//Homo sapiens mRNA for KIAA0795 protein, partial cds//1.5e-74:367:98//Hs.22926:AB018338

[21831] F-PLACE2000264//Homo sapiens mRNA for KIAA0792 protein, complete cds//2.0e-29:366:73//Hs.119387:AB007958

[21832] F-PLACE2000274//Homo sapiens mRNA for dynein heavy chain//1.0e-23:650:62//Hs.144672:AJ000522

[21833] F-PLACE2000302//ESTs//1.7e-05:66:89//Hs.55572:W37560

[21834] F-PLACE2000305//ESTs//1.6e-78:382:98//Hs.136731:AA745869

[21835] F-PLACE2000317

[21836] F-PLACE2000335//Fc fragment of IgE, high affinity I, receptor for; beta polypeptide//6.1e-24:295:76//Hs.30:M89796

[21837] F-PLACE2000341//Human sodium iodide symporter mRNA, complete cds//6.8e-21:593:61//Hs.103983:U66088

[21838] F-PLACE2000342//Centromere protein B (80 kD)//1.4e-06:326:61//Hs.85004:X05299

[21839] F-PLACE2000347//ESTs, Moderately similar to F18547_{—}1 [H. sapiens]//3.7e-16:139:82//Hs.28209:AI073817

[21840] F-PLACE2000359//ESTs//5.0e-19:251:71//Hs.58272:W76645

[21841] F-PLACE2000366//ESTs//1.7e-37:399:75//Hs.136646:AA748045

[21842] F-PLACE2000371//EST//0.65:107:65//Hs.157677:AI358861

[21843] F-PLACE2000373//ESTs//0.30:207:59//Hs.143902:AI131032

[21844] F-PLACE2000379//ESTs//1.3e-64:402:87//Hs.146307:AA584638

[21845] F-PLACE2000394//Homo sapiens mRNA, chromosome I specific transcript KIAA0484//1.0e-87:694:80//Hs.158095:AB007953

[21846] F-PLACE2000398

[21847] F-PLACE2000399

[21848] F-PLACE2000404

[21849] F-PLACE2000411

[21850] F-PLACE2000419//Homo sapiens PYRIN (MEFV) mRNA, complete cds//8.0e-52:463:74//Hs.113283:AF018080

[21851] F-PLACE2000425//EST//0.44:168:62//Hs.44677:N34966

[21852] F-PLACE2000427

[21853] F-PLACE2000433//ESTs//4.7e-18:213:74//Hs.110187:AA699719

[21854] F-PLACE2000435//EST//4.7e-05:159:64//Hs.123604:AA815257

[21855] F-PLACE2000438//H. sapiens mRNA for UDP-GalNAc:polypeptide N-acetylgalactosaminyltransferase (T2)//1.9e-20:418:64//Hs.130181:X85019

[21856] F-PLACE2000450//Homo sapiens PYRIN (MEFV) mRNA, complete cds//4.0e-83:324:81//Hs.113283:AF018080

[21857] F-PLACE2000455//ESTs, Moderately similar to !!!! ALU SUBFAMILY SC WARNING ENTRY!!!! [H. sapiens]//4.0e-05:100:73//Hs.104239:AA488082

[21858] F-PLACE2000458//H. sapiens mRNA for hFat protein//0.0010:545:57//Hs.91107:X87241

[21859] F-PLACE2000465//ESTs//4.4e-38:377:75//Hs.55855:AA621381

[21860] F-PLACE2000477//Homo sapiens PYRIN (MEFV) mRNA, complete cds//1.8e-68:520:81//Hs.113283:AF018080

[21861] F-PLACE3000004//Human EYA3 homolog (EYA3) mRNA, complete cds//3.9e-14:204:73//Hs.46925:Y10262

[21862] F-PLACE3000009//Human mRNA for KIAA0386 gene, complete cds//4.8e-59:696:69//Hs.101359:AB002384

[21863] F-PLACE3000020/MProstaglandin 12 (prostacyclin) receptor (IP)//0.00081:500:61//Hs.393:D38128

[21864] F-PLACE3000029

[21865] F-PLACE3000059//ESTs//0.0026:49:100//Hs.42913:AI082248

[21866] F-PLACE3000070//ESTs//5.6e-15:202:74//Hs.154993:AA142842

[21867] F-PLACE3000103//Homo sapiens cofactor of initiator function (CIF150) mRNA, complete cds//1.0:186:62//Hs.122752:AF026445

[21868] F-PLACE3000119//Homo sapiens mRNA for KIAA0752 protein, partial cds//2.8e-48:283:83//Hs.23711:AB018295

[21869] F-PLACE3000121

[21870] F-PLACE3000124//Thromboxane A2 receptor//1.1e-55:195:83//Hs.89887:D38081

[21871] F-PLACE3000136//Homo sapiens mRNA for KIAA0703 protein, complete cds//1.0:194:59//Hs.6168:AB014603

[21872] F-PLACE3000142EST//0.41:179:59//Hs.137438:AA282243

[21873] F-PLACE3000145//ESTs//3.5e-25:145:96//Hs.163950:AA683016

[21874] F-PLACE3000147//EST//5.0e-43:285:86//Hs.160895:AI365871

[21875] F-PLACE3000148

[21876] F-PLACE3000155//Homo sapiens mRNA for KIAA0672 protein, complete cds//5.6e-80:382:99//Hs.6336:AB014572

[21877] F-PLACE3000156//ESTs//0.00015:277:62//Hs.156834:AI336023

[21878] F-PLACE3000157//Calcium channel, voltage-dependent, P/Q type, alpha 1 A subunit//0.54:320:60//Hs.96253:U79666

[21879] F-PLACE3000158//Homo sapiens mRNA for KIAA0575 protein, complete cds//4.9e-66:319:88//Hs.153468:AB011147

[21880] F-PLACE3000160

[21881] F-PLACE3000169//Small inducible cytokine A5 (RANTES)//1.3e-64:501:80//Hs.155464:AF088219

[21882] F-PLACE3000194

[21883] F-PLACE3000197

[21884] F-PLACE3000199//EST//1.0:108:68//Hs.98488:AA426546

[21885] F-PLACE3000207//EST//1.0e-32:184:75//Hs.160146:AI049975

[21886] F-PLACE3000208//CLASS II HISTOCOMPATIBILITY ANTIGEN, M ALPHA CHAIN PRECURSOR//1.0:271:61//Hs.77522:X62744

[21887] F-PLACE3000218EST//1.3e-46:317:84//Hs.162197:AA535216

[21888] F-PLACE3000220//EST//9.3e-95:443:99//Hs.112702:AA609377

[21889] F-PLACE3000221//Homo sapiens DNA fragmentation factor 40 kDa subunit (DFF40) mRNA, complete cds//9.2e-56:200:85//Hs.133089:AF064019

[21890] F-PLACE3000226

[21891] F-PLACE3000230//EST//6.1e-16:173:72//Hs.148578:AI201568

[21892] F-PLACE3000242//Human DNA sequence from clone 1409 on chromosome Xp11.1-11.4. Contains a Inter-Alpha-Trypsin Inhibitor Heavy Chain LIKE gene, a alternatively spliced Melanoma-Associated Antigen MAGE LIKE gene and a 6-Phosphofructo-2-kinase (Fructose-2,6-bisphosphatase) LIKE pseudogene. Contains ESTs, STSs and genomic marker DXS8032//1.2e-54:434:80//Hs.4943:Z98046

[21893] F-PLACE3000244

[21894] F-PLACE3000254//NUCLEOLIN//2.6e-05:445:60//Hs.79110:M60858

[21895] F-PLACE3000271//ESTs//1.6e-25:195:72//Hs.108452:H78650

[21896] F-PLACE3000276//ESTs//1.0e-13:274:66//Hs.28589:AI004944

[21897] F-PLACE3000304//EST//0.043:210:61//Hs.132378:AI026770

[21898] F-PLACE3000310

[21899] F-PLACE3000320//EST//1.2e-12:188:70//Hs.145771:AI269586

[21900] F-PLACE3000322//Small inducible cytokine A5 (RANTES)//4.7e-29:252:80//Hs.155464:AF088219

[21901] F-PLACE3000331

[21902] F-PLACE3000339//Homo sapiens mRNA for KIAA0645 protein, complete cds//0.91:222:61//Hs.155987:AB014545

[21903] F-PLACE3000341//EST//1.8e-05:394:58//Hs.112894:AA620741

[21904] F-PLACE3000350//ESTs, Highly similar to SERINE/THREONINE-PROTEIN KINASE SULU [Caenorhabditis elegans]//2.9e-59:474:77//Hs.125850:AA885355

[21905] F-PLACE3000352//H. sapiens OBF-1 mRNA for octamer binding factor 1//2.5e-48:442:78//Hs.2407:Z49194

[21906] F-PLACE3000353//H. sapiens mRNA for UDP-GalNAc:polypeptide N-acetylgalactosaminyltransferase (T1)//0.78:234:63//Hs.7498:U41514

[21907] F-PLACE3000362//EST//6.5e-25:302:73//Hs.140504:AA810441

[21908] F-PLACE3000363

[21909] F-PLACE3000365//ESTs//0.81:200:60//Hs.141556:N49928

[21910] F-PLACE3000373//ESTs//0.0071:82:73//Hs.136310:AA442641

[21911] F-PLACE3000388//ESTs//7.9e-16:235:71//Hs.44701:AA830432

[21912] F-PLACE3000399//Clathrin, light polypeptide (Lcb)//5.2e-70:391:81//Hs.73919:X81637

[21913] F-PLACE3000400//ESTs//0.53:162:66//Hs.49303:AA810785

[21914] F-PLACE3000401//EST//2.3e-35:178:100//Hs.162851:AA632270

[21915] F-PLACE3000402//ESTs//2.4e-84:425:96//Hs.148962:AI219715

[21916] F-PLACE3000405//EST//2.1e-39:452:73//Hs.140414:AA778541

[21917] F-PLACE3000406//Homo sapiens apoptotic protease activating factor 1 (Apaf-1) mRNA, complete cds//1.9e-07:116:78//Hs.77579:AF013263

[21918] F-PLACE3000413//ESTs, Weakly similar to methyl sterol oxidase [H. sapiens]//1.6e-51:260:98//Hs.122512:H61502

[21919] F-PLACE3000416//Homo sapiens mRNA for KIAA0801 protein, complete cds//0.00020:630:57//Hs.17585:AB018344

[21920] F-PLACE3000425//EST//3.8e-34:286:79//Hs.135301:AI039161

[21921] F-PLACE3000455//Homo sapiens mRNA for cytochrome b small subunit of complex II, complete cds//3.6e-32:183:93//Hs.108326:AB006202

[21922] F-PLACE3000475//ESTs//1.9e-09:422:61//Hs.145783:AA081874

[21923] F-PLACE3000477//H. sapiens mRNA for chemokine receptor D6//1.0:426:54//Hs.117572:U94888

[21924] F-PLACE4000009//TRICHOHYALIN//3.l e-09:692:60//Hs.82276:L09190

[21925] F-PLACE4000014//Homo sapiens mRNA for KIAA0809 protein, partial cds//3.6e-118:331:100//Hs.105399:AB018352

[21926] F-PLACE4000034//Homo sapiens Chromosome 16 BAC clone CIT987SK-A-69G12//1.1e-06:244:63//Hs.154050:AC004131

[21927] F-PLACE4000049//Homo sapiens clone 24619 mRNA sequence//4.3e-45:371:79//Hs.139088:AF070533

[21928] F-PLACE4000052//Human ATP binding cassette transporter (ABCR) mRNA, complete cds//1.4e-53:669:67//Hs.40993:AF000148

[21929] F-PLACE4000063

[21930] F-PLACE4000089//ESTs//2.2e-110:121:85//Hs.49391:WO0713

[21931] F-PLACE4000093//ESTs//0.0053:273:60//Hs.136952:AA825819

[21932] F-PLACE4000100//ESTs//8.0e-21:246:73//Hs.140207:N32058

[21933] F-PLACE4000106//Homo sapiens mRNA for KIAA0462 protein, partial cds//3.8e-147:684:99//Hs.129937:AB007931

[21934] F-PLACE4000128//Homo sapiens ES/130 mRNA, complete cds//0.23:398:60//Hs.98614:AF006751

[21935] F-PLACE4000129

[21936] F-PLACE4000131//ESTs//2.4e-13:194:72//Hs.41418:H90627

[21937] F-PLACE4000147//ESTs//0.0060:324:60//Hs.85640:AA535856

[21938] F-PLACE4000156//Zinc finger protein 136 (clone pHZ-20)//2.3e-89:764:76//Hs.69740:U09367

[21939] F-PLACE4000192

[21940] F-PLACE4000211

[21941] F-PLACE4000222//EST//1.9e-15:317:66//Hs.149206:AI246594

[21942] F-PLACE4000230//Human mRNA for KIAA0331 gene, complete cds//0.0048:258:60//Hs.146395:AB002329

[21943] F-PLACE4000233//ESTs//4.4e-38:240:80//Hs.114605:AI304317

[21944] F-PLACE4000247//Homo sapiens mitochondrial outer membrane protein (TOM40) mRNA, nuclear gene encoding mitochondrial protein, complete cds//0.0095:156:69//Hs.30928:AF043250

[21945] F-PLACE4000250//ESTs//3.8e-72:377:94//Hs.124234:T89609

[21946] F-PLACE4000252//ESTs//1.0:196:64//Hs.144869:AA493886

[21947] F-PLACE4000259//Homo sapiens mRNA for KIAA0788 protein, partial cds//6.2e-27:191:87//Hs.2397:Z70200

[21948] F-PLACE4000261

[21949] F-PLACE4000269//ESTs, Weakly similar to coded for by C. elegans cDNA yk52b10.3 [C. elegans]//9.5e-41:202:100//Hs.118849:AA215645

[21950] F-PLACE4000270

[21951] F-PLACE4000300

[21952] F-PLACE4000320//FKBP-RAPAMYCIN ASSOCIATED PROTEIN//4.5e-23:135:96//Hs.155952:U88966

[21953] F-PLACE4000323//EST//6.7e-09:180:68//Hs.116769:AA630365

[21954] F-PLACE4000326//ESTs//2.1e-94:453:98//Hs.103177:W72798

[21955] F-PLACE4000344//EST//6.4e-05:135:67//Hs.146729:AI147292

[21956] F-PLACE4000367

[21957] F-PLACE4000369

[21958] F-PLACE4000379//EST//3 .9e-42:381:79//Hs.162335:AA564256

[21959] F-PLACE4000387//ESTs//1.19:93:69//Hs.154173:AI379823

[21960] F-PLACE4000392//ESTs//0.0015:381:59//Hs.120172:AA709046

[21961] F-PLACE4000401//Homo sapiens mRNA for KIAA0640 protein, partial cds//3.1e-47:605:71//Hs.153026:AB014540

[21962] F-PLACE4000411//ESTs, Moderately similar to plakophilin 2b [H. sapiens]//4.7e-33:159:81//Hs.154257:AI275982

[21963] F-PLACE4000431//Homo sapiens mRNA for KIAA0788 protein, partial cds//1.3e-45:263:92//Hs.2397:Z70200

[21964] F-PLACE4000445

[21965] F-PLACE4000450

[21966] F-PLACE4000465//ESTs//1.5e-111:273:65//Hs.145783:AA081874

[21967] F-PLACE4000487//Sialophorin (gpL 115, leukosialin, CD43)//3.0e-14:189:71//Hs.80738:X52075

[21968] F-PLACE4000489//ESTs//0.94:104:68//Hs.125119:R38951

[21969] F-PLACE4000494//ESTs//1H.0:185:60//Hs.143053:AI126289

[21970] F-PLACE4000521//ESTs//0.0027:161:70//Hs.135740:AA651731

[21971] F-PLACE4000522//ESTs, Highly similar to NEUROGENIC LOCUS NOTCH PROTEIN HOMOLOG I PRECURSOR [Homo sapiens]//0.047:119:65//Hs.129053:AA767022

[21972] F-PLACE4000548

[21973] F-PLACE4000558//Homo sapiens mRNA for DFFRY protein, abundant transcript//0.0035:510:59//Hs.39163:AF000986

[21974] F-PLACE4000581

[21975] F-PLACE4000590//ESTs, Highly similar to POL POLYPROTEIN [Friend murine leukemia virus (isolate 57)]//3.4e-13:275:68//Hs.113980:AI034080

[21976] F-PLACE4000593//ESTs, Weakly similar to F25D7.1 [C. elegans]//5.2e-28:239:79//Hs.109084:AI004675

[21977] F-PLACE4000612//Keratin 9//0.27:207:64//Hs.2783:Z29074

[21978] F-PLACE4000638//Homo sapiens mRNA from chromosome 5q21-22, clone:sF2//3.5e-47:562:69//Hs.129685:AB002446

[21979] F-PLACE4000650

[21980] F-PLACE4000654

[21981] F-PLACE4000670//ESTs//6.1e-88:411:100//Hs.130688:AI028132

[21982] F-SKNMC1000011//Centromere protein B (80 kD)//0.0013:243:62//Hs.85004:X05299

[21983] F-SKNMC1000013I/ESTs, Highly similar to MULTIDRUG RESISTANCE PROTEIN HOMOLOG 50 [Drosophila melanogaster]//2.5e-36:197:96//Hs.118634:U66688

[21984] F-SKNMC1000046//Homo sapiens mRNA for KIAA0654 protein, partial cds//2.5e-148:706:98//Hs.109299:AB014554

[21985] F-SKNMC1000050//Calpain, large polypeptide L2//4.1e-53:330:90//Hs.76288:M23254

[21986] F-SKNMC1000091//ESTs//3.3e-64:420:88//Hs.90997:AA946877

[21987] F-THYRO1000017//Human mRNA for KIAA0315 gene, partial cds//1.0:310:60//Hs.3989:AB002313

[21988] F-THYRO1000026//H. sapiens OBF-1 mRNA for octamer binding factor 1//2.9e-35:299:81//Hs.2407:Z49194

[21989] F-THYRO1000034

[21990] F-THYRO1000035//ESTs//4.1e-37:317:79//Hs.141254:A1334099

[21991] F-THYRO1000040//ESTs//0.30:331:59//Hs.87176:AI148326

[21992] F-THYRO1000070//Human mRNA for KIAA0347 gene, complete cds//0.069:278:63//Hs.101996:AB002345

[21993] F-THYRO1000072//Homo sapiens clone 23584 mRNA sequence//8.7e-86:722:77//Hs.6654:AB014557

[21994] F-THYRO1000085

[21995] F-THYRO1000092//ESTs//3.l e-100:469:99//Hs.132207:AI148065

[21996] F-THYRO1000107

[21997] F-THYRO1000111//Human Line-1 repeat mRNA with 2 open reading frames//6.8e-106:690:86//Hs.23094:M19503

[21998] F-THYRO1000121

[21999] F-THYRO1000124//Human mRNA for alanine aminotransferase//0.0026:420:58//Hs.103502:U70732

[22000] F-THYRO1000129//Homo sapiens TED protein (TED) mRNA, complete cds//2.8e-155:732:98//Hs.87619:AF087142

[22001] F-THYRO1000132//ESTs//1.9e-35:164:79//Hs.139179:AA650203

[22002] F-THYRO10001561//EST//0.32:102:68//Hs.139634:AA478416

[22003] F-THYRO1000163//Small inducible cytokine A5 (RANTES)//5.2e-50:331:85//Hs.155464:AF088219

[22004] F-THYRO1000173//Human clathrin assembly protein 50 (AP50) mRNA, complete cds//1.1e-05:261:61//Hs.152936:D63475

[22005] F-THYRO11000186//H. sapiens mRNA for phosphoinositide 3-kinase//3.7e-41:270:87//Hs.101238:Y11312

[22006] F-THYRO1000187//EST//0.11:227:62//Hs.101773:H23270

[22007] F-THYRO1000190//ESTs//0.82:194:63//Hs.128818:AA976883

[22008] F-THYRO1000197//Homo sapiens mRNA for poly(A)-specific ribonuclease//2.4e-175:805:99//Hs.43445:AJ005698

[22009] F-THYRO1000199//Homo sapiens mRNA for KIAA0652 protein, complete cds//4.0e-88:616:84//Hs.79672:AB014552

[22010] F-THYRO1000206//EST//0.96:291:61//Hs.104962:AA443848

[22011] F-THYRO1000221//Human clone 23589 mRNA sequence//0.035:242:62//Hs.11506:U79297

[22012] F-THYRO1000241//EST//0.48:102:69//Hs.160764:AI313322

[22013] F-THYRO1000242//Zinc finger protein 84 (HPF2)//1.2e-42:534:64//Hs.9450:M27878

[22014] F-THYRO1000253//Homo sapiens mRNA for KIAA0690 protein, partial cds//0.61:211:64//Hs.60103:AB014590

[22015] F-THYRO1000270

[22016] F-THYRO1000279//ESTs//0.0020:104:72//Hs.121476:AI215500

[22017] F-THYRO1000288//Homo sapiens mRNA for Hs Ste24p, complete cds//1.3e-180:848:98//Hs.25846:AB016068

[22018] F-THYRO1000320//ESTs, Weakly similar to Similar to glutamate decarboxylase [C. elegans]//7.6e-92:431:99//Hs.122719:AA777803

[22019] F-THYRO1000327//Autocrine motility factor receptor//2.8e-52:290:93//Hs.80731:M63175

[22020] F-THYRO1000343//Homo sapiens mRNA for KIAA0790 protein, partial cds//7.2e-164:763:98//Hs.12002:AB018333

[22021] F-THYRO1000358//Human selenium-binding protein (hSBP) mRNA, complete cds//6.9e-34:177:84//Hs.7833:U29091

[22022] F-THYRO1000368//ESTs//0.0011:55:96//Hs.34994:AA252919

[22023] F-THYRO1000381//Homo sapiens mRNA for KIAA0562 protein, complete cds//0.081:240:62//Hs.118401:AB011134

[22024] F-THYRO1000387//EST//3.6e-14:197:71//Hs.139399:AA416855

[22025] F-THYRO1000394//ESTs, Weakly similar to No definition line found [C. elegans]//5.8e-39:245:91//Hs.119095:T79413

[22026] F-THYRO1000395//EST//5.8e-69:333:99//Hs.156524:AA724572

[22027] F-THYRO1000401//ESTs//1.8e-24:132:98//Hs.54852:W26238

[22028] F-THYRO1000438//EST//1.9e-05:217:63//Hs.115930:AA579773

[22029] F-THYRO1000452//B cell lymphoma protein 6 (zinc finger protein 51)//0.096:306:60//Hs.155024:U00115

[22030] F-THYRO1000471//Tyrosine aminotransferase//5.6e-44:403:77//Hs.2999:X52520

[22031] F-THYRO1000484//EST, Weakly similar to putative p150 [H. sapiens]//8.9e-22:248:76//Hs.162011:AA513663

[22032] F-THYRO1000488

[22033] F-THYRO1000501//H. sapiens StafSO mRNA//3.2e-75:615:77//Hs.68054:X82200

[22034] F-THYRO1000502//ESTs//1.0:350:57//Hs.119749:AA689298

[22035] F-THYRO1000505//Interleukin 13//0.95:245:60//Hs.845:U31120

[22036] F-THYRO1000558//EST//1.3e-24:351:64//Hs.142326:AA351877

[22037] F-THYRO1000569//Homo sapiens mRNA for dihydropyrimidinase related protein 4, complete cds//0.28:229:61//Hs.100058:AB006713

[22038] F-THYRO1000570//EST//0.80:171:61//Hs.112790:AA609949

[22039] F-THYRO1000585//Homo sapiens protein associated with Myc mRNA, complete cds//2.4e-168:808:97//Hs.151411:AF075587

[22040] F-THYRO1000596//EST//9.5e-94:461:96//Hs.135397:AI056322

[22041] F-THYRO1000602//EST//4.9e-06:80:80//Hs.162135:AA526331

[22042] F-THYRO1000605//Guanylate cyclase 1, soluble, alpha 2//0.44:182:62//Hs.2685:Z50053

[22043] F-THYRO1000625//Thromboxane A2 receptor//4.5e-45:323:82//Hs.89887:D38081

[22044] F-THYRO1000637//ESTs//4.4e-24:255:75//Hs.101014:AA194941

[22045] F-THYRO1000641//ESTs//0.00017:375:58//Hs.32703:AA054125

[22046] F-THYRO1000658//CD4 receptor {exons 1 and 2} [human, T-lymphocyte, mRNA, 3429 nt]//1.8e-09:127:77//Hs.116007:S79267

[22047] F-THYRO1000662

[22048] F-THYRO1000666//ESTs//1.9e-28:149:99//Hs.105187:AI394157

[22049] F-THYRO1000676//CD4 receptor {exons 1 and 2} [human, T-lymphocyte, mRNA, 3429 nt]//5.7e-49:281:77//Hs.116007:S79267

[22050] F-THYRO1000684//ESTs, Weakly similar to band-6-protein [H. sapiens]//0.46:368:57//Hs.26557:AA480380

[22051] F-THYRO1000699//ESTs//1.6e-110:314:65//Hs.139212:AA243452

[22052] F-THYRO1000712//ESTs//3.3e-42:211:99//Hs.69330:AI056324

[22053] F-THYRO1000715//Human plectin (PLECI) mRNA, complete cds//2.9e-06:631:59//Hs.79706:U53204

[22054] F-THYRO1000734//ESTs//8.4e-08:226:64//Hs.125754:AA806085

[22055] F-THYRO1000748//Homio sapiens KIAA0411 mRNA, complete cds//3.1e-35:339:74//Hs.7977:AB007871

[22056] F-THYRO1000756//Homo sapiens protocadherin (PCDH8) mRNA, complete cds//1.0:209:62//Hs.19492:AF061573

[22057] F-THYRO1000777//Human mRNA for KIAA0147 gene, partial cds//0.00069:636:57//Hs.158132:D63481

[22058] F-THYRO1000783//Homo sapiens Arp2/3 protein complex subunit p41-Arc (ARC41) mRNA, complete cds//0.70:452:58//Hs.11538:AF006084

[22059] F-THYRO1000787

[22060] F-THYRO1000793

[22061] F-THYRO1000796

[22062] F-THYRO1000805//Homo sapiens mRNA from chromosome 5q21-22, clone:sF2//9.4e-36:561:68//Hs.129685:AB002446

[22063] F-THYRO1000815//Human mRNA for KIAA0118 gene, partial cds//1.2e-45:465:75//Hs.154326:D42087

[22064] F-THYRO1000829//ESTs//1.7e-66:361:95//Hs.7906:H 16339

[22065] F-THYRO1000843

[22066] F-THYRO1000852//ESTs//6.2e-23:204:81//Hs.144452:AA838788

[22067] F-THYRO1000855//ESTs//0.049:159:64//Hs.163532:AI424170

[22068] F-THYRO1000865//ESTs, Weakly similar to !!!! ALU SUBFAMILY J WARNING ENTRY!!!! [H. sapiens]//3.0e-33:190:75//Hs.133526:N21103

[22069] F-THYRO1000895//ESTs//3.8e-24:191:84//Hs.132722:AA618531

[22070] F-THYRO1000916//Homo sapiens mRNA, chromosome I specific transcript KIAA0487//1.8e-43:318:79//Hs.92381:AB007956

[22071] F-THYRO1000926//Homo sapiens cAMP-specific phosphodiesterase 8B (PDE8B) mRNA, partial cds//3.0e-179:839:98//Hs.78106:AF079529

[22072] F-THYRO1000934//PYRROLINE-5-CARBOXYLATE REDUCTASE//1.1e-33:759:63//Hs.79217:M77836

[22073] F-THYRO1000951//MUELLERIAN INHIBITING FACTOR PRECURSOR//0.055:662:56//Hs.112432:AC005263

[22074] F-THYRO1000952//Human mRNA for KIAA0208 gene, complete cds//0.98:177:65//Hs.83558:D86963

[22075] F-THYRO1000974//Homo sapiens putative ATP-dependent mitochondrial RNA helicase (SUV3) mRNA, nuclear gene encoding mitochondrial protein, complete cds//2.7e-15:123:90//Hs.106469:AF042169

[22076] F-THYRO1000975//EST//0.45:172:62//Hs.105449:AA513907

[22077] F-THYRO1000983

[22078] F-THYRO1000984//EST//0.0075:119:65//Hs.150347:AA984646

[22079] F-THYRO1000988//ESTs//0.056:99:71//Hs.153409:AI224307

[22080] F-THYRO1001003

[22081] F-THYRO1001031//Thiopurine S-methyltransferase//3.8e-44:568:71//Hs.51124:AF019369

[22082] F-THYRO1001033//H. sapiens mRNA for cylicin II//0.0061:287:60//Hs.3232:Z46788

[22083] F-THYRO1001062//ISLET AMYLOID POLYPEPTIDE PRECURSOR//3.2e-45:394:79//Hs.51048:X68830

[22084] F-THYRO1100093//Human mRNA for KIAA0355 gene, complete cds//3.4e-33:421:72//Hs.153014:AB002353

[22085] F-THYRO1001100//Human DNA-binding protein mRNA, 3′end//2.1e-74:741:74//Hs.159249:Z99130

[22086] F-THYRO1001120//Homo sapiens deltex (Dx) mRNA, complete cds//4.5e-18:447:62//Hs.124024:AF053700

[22087] F-THYRO1001121//ESTs//0.92:257:61//Hs.118246:N95416

[22088] F-THYRO1001133//EST//1.1e-38:367:75//Hs.144175:H70425

[22089] F-THYRO1001134//ESTs//1.4e-28:186:91//Hs.109468:W52074

[22090] F-THYRO1001142//ESTs//1.8e-44:332:82//Hs.146811:AA410788

[22091] F-THYRO101173

[22092] F-THYRO1001177//ESTs//7.7e-40:240:84//Hs.155384:Z78385

[22093] F-THYRO1001189//ESTs//2.1e-36:323:76//Hs.120206:AI089163

[22094] F-THYRO1001204

[22095] F-THYRO1001213//Small inducible cytokine A5 (RANTES)//3.1e-43:256:81//Hs.155464:AF088219

[22096] F-THYRO1001262//ESTs//7.9e-44:279:87//Hs.138856:H47461

[22097] F-THYRO10012711//Homo sapiens mRNA for synaptogyrin 3//0.0045:273:60//Hs.6467:AJ002309

[22098] F-THYRO1001287//Homo sapiens alpha 1,2-mannosidase IB mRNA, complete cds//0.014:178:66//Hs.125315:AF027156

[22099] F-THYRO1001290//ESTs//3.9e-43:145:99//Hs.147797:AA069836

[22100] F-THYRO1001313//ESTs//1.0:244:61//Hs.127488:AA528182

[22101] F-THYRO1001320//ESTs//0.062:126:67//Hs.133296:AI311872

[22102] F-THYRO1001321//Homo sapiens DEC-205 mRNA, complete cds//2.5e-35:560:68//Hs.153563:AF011333

[22103] F-THYRO1001322//ESTs//0.12:238:61//Hs.29169:N66545

[22104] F-THYRO1001347//ESTs//7.5e-61:293:99//Hs.129962:AA927207

[22105] F-THYRO1001363//ESTs//1.0e-16:178:78//Hs.163954:N57939

[22106] F-THYRO1001365//Homo sapiens KIAA0417 mRNA, complete cds//3.6e-18:187:79//Hs.12385:AB007877

[22107] F-THYRO1001374//Homo sapiens mRNA for KIAA0707 protein, partial cds//7.4e-157:740:97//Hs.138488:AB014607

[22108] F-THYRO1001401//EST//4.6e-14:171:76//Hs.157587:AI356993

[22109] F-THYRO1001403//ESTs//2.2e-50:464:79//Hs.118046:N49946

[22110] F-THYRO1001405//ESTs//1.7e-44:226:98//Hs.156667:AI347694

[22111] F-THYRO1001406//Hydroxysteroid (I 7-beta) dehydrogenase 3//2.8e-20:459:62//Hs.477:U05659

[22112] F-THYRO100141//ESTs//1.9e-41:342:78//Hs.146811:AA410788

[22113] F-THYRO1001426//Human ring zinc-finger protein (ZNF127-Xp) gene and 5′ flanking sequence//4.6e-33:153:81//Hs.102877:U41315

[22114] F-THYRO1001434//ESTs//1.1e-07:274:60//Hs.151093:AI224099

[22115] F-THYRO1001458//Myosin, heavy polypeptide 9, non-muscle//6.2e-60:653:71//Hs.44782:Z82215

[22116] F-THYRO1001480//ISLET AMYLOID POLYPEPTIDE PRECURSOR//1.3e-42:370:78//Hs.51048:X68830

[22117] F-THYRO1001487//EST//1.0:88:71//Hs.160760:AI311943

[22118] F-THYRO1001534//ESTs//1.2e-94:457:98//Hs.125523:AA883904

[22119] F-THYRO1001537//ESTs//3.5e-94:469:97//Hs.106448:R76663

[22120] F-THYRO100154111EST//1.4e-10:158:65//Hs.145159:A1150211

[22121] F-THYRO1001559//ESTs//1.4e-07:91:81//Hs.43507:N24046

[22122] F-THYRO1001570//ESTs//2.3e-41:280:80//Hs.119752:AA703335

[22123] F-THYRO1001573//Homo sapiens clone 24778 unknown mRNA//2.7e-105:546:95//Hs.25306:AF070572

[22124] F-THYRO1001584//Human RGP3 mRNA, complete cds1/0.14:335:58//Hs.82294:U27655

[22125] F-THYRO1001595//Human RSU-1/RSP- I mRNA, complete cds//3.6e-35:165:84//Hs.75551:L12535

[22126] F-THYRO10016021//ESTs//3.1e-42:350:80//Hs.138384:R72849

[22127] F-THYRO1001605//EST//1.1:426:57//Hs.151206:AI126071

[22128] F-THYRO1001617//ESTs//1.2e-43:345:81//Hs.8710:WO7046

[22129] F-THYRO1001637//ESTs, Weakly similar to anion exchanger [H. sapiens]//5.2e-13:108:86//Hs.141045:AA191659

[22130] F-THYRO1001656//Solute carrier family 2 (facilitated glucose transporter), member 4//0.099:540:55//Hs.95958:M91463

[22131] F-THYRO1001661//ESTs//0.12:53:92//Hs.151586:W45568

[22132] F-THYRO1001671//Homo sapiens mRNA for 2′-5′ oligoadenylate synthetase 59 kDa isoform//8.0e-166:780:98//Hs.118633:AJ225089

[22133] F-THYRO1001673/Von Hippel-Lindau syndrome//4.6e-25:212:73//Hs.78160:AF010238

[22134] F-THYRO1001703//Homo sapiens clone 24767 mRNA sequence//0.27:421:57//Hs.122908:AF070552

[22135] F-THYRO11001706//ESTs//1.8e-24:142:95//Hs.112536:A1147691

[22136] F-THYRO1001721//ESTs, Highly similar to RING CANAL PROTEIN [Drosophila melanogaster]//2. Se-51:296:92//Hs.3826:U69560

[22137] F-THYRO1001738//EST//6.9e-30:180:94//Hs.58641:W81229

[22138] F-THYRO1001745//ESTs//6.1e-49:244:98//Hs.97534:AA398813

[22139] F-THYRO1001746//EST//10.96:119:6311Hs.144107:AI053590

[22140] F-THYRO1001772//ESTs, Weakly similar to !!!! ALU SUBFAMILY J WARNING ENTRY!!!! [H. sapiens]//2.2e-21:182:81//Hs.118053:N75725

[22141] F-THYRO1001793//ESTs//1.9e-93:439:99//Hs.150116:AI299324

[22142] F-THYRO1001809//Human mRNA for KIAA0297 gene, partial cds//0.47:168:67//Hs.11711:AB002295

[22143] F-THYRO1001828

[22144] F-THYRO100185411EST//1.038:128:6711Hs.160649:AI241823

[22145] F-THYRO1001895//Intercellular adhesion molecule I (CD54), human rhinovirus receptor//9.6e-13:288:65//Hs.51061:M24283

[22146] F-THYRO10019071//EST//1.9e-12:126:801//Hs.-139296:AA350198

[22147] F-VESEN1000122

[22148] F-Y79AA1000013//ESTs//1.7e-72:369:961//Hs.97176:AA447885

[22149] F-Y79AA1000033

[22150] F-Y79AA1000037//Murine leukemia viral (bmi-1) oncogene homolog//7.8e-21:230:66//Hs.431:L 3689

[22151] F-Y79AA1000059//Homo sapiens immunophilin homolog ARA9 mRNA, complete cds//7.3e-40:629:64//Hs.75305:U78521

[22152] F-Y79AA1000065//CD81 ANTIGEN//0.0050:241:60//Hs.54457:M33680

[22153] F-Y79AA1000131//Guanylate cyclase 1, soluble, alpha 2//0.078:477:58//Hs.2685:Z50053

[22154] F-Y79AA1000181//Fatty acid synthase {3′ region} [human, breast and HepG2 cells, mRNA Partial, 2237 nt]//0.0022:684:58//Hs.83190:U29344

[22155] F-Y79AA1000202//ESTs//2.5e-17:143:86//Hs.76925:AA211860

[22156] F-Y79AA1000214//Homo sapiens histone H2A.F/Z variant (H2AV) mRNA, complete cds//3.9e-73:345:100//Hs.9242:AF081192

[22157] F-Y79AA1000230//Polymeric immunoglobulin receptor//0.98:335:59//Hs.842:X73079

[22158] F-Y79AA1000231//ESTs//0.11:209:66//Hs.132184:AI278623

[22159] F-Y79AA1000258//Homo sapiens metase (MET-1) mRNA, complete cds//0.30:444:61//Hs.99941:L23134

[22160] F-Y79AA1000268//Human mRNA for KIAA0367 gene, partial cds//9.1e-11:300:64//Hs.23311:AB002365

[22161] F-Y79AA1000313//Human mRNA for KIAA0129 gene, complete cds//0.89:744:56//Hs.44361:D50919

[22162] F-Y79AA1000328

[22163] F-Y79AA1000342//Homo sapiens OPA-containing protein mRNA, complete cds//8.4e-15:223:75//Hs.85313:AF071309

[22164] F-Y79AA1000346

[22165] F-Y79AA1000349//ALPHA-2C-1 ADRENERGIC RECEPTOR//8.3e-06:180:73//Hs.123022:J03853

[22166] F-Y79AA1000355

[22167] F-Y79AA1000368//ESTs//0.0062:235:64//Hs.114777:AA782908

[22168] F-Y79AA1000405//ESTs//0.76:244:62//Hs.153027:AA648897

[22169] F-Y79AA1000410//Small inducible cytokine A5 (RANTES)//8.1e-31:229:83//Hs.155464:AF088219

[22170] F-Y79AA1000420//ESTs//1.1e-53:271:87//Hs.13056:AA181018

[22171] F-Y79AA1000469//Homo sapiens 1-1 receptor candidate protein mRNA, complete cds//0.0047:315:66//Hs.26285:AF082516

[22172] F-Y79AA1000480

[22173] F-Y79AA1000538//ESTs//5.7e-09:110:77//Hs.98790:AA284871

[22174] F-Y79AA1000539//ESTs//2.6e-52:412:77//Hs.81648:W26521

[22175] F-Y79AA1000540//Homo sapiens chromosome 7q22 sequence//0.70:133:69//Hs.151555:AF053356

[22176] F-Y79AA1000560//Homo sapiens gamma2-adaptin (G2AD) mRNA, complete cds//1.2e-07:371:63//Hs.8991:AF068706

[22177] F-Y79AA1000574//Human mRNA for GC box bindig protein, complete cds//0.95:258:62//Hs.150557:D31716

[22178] F-Y79AA1000589//Homo sapiens clone 614 unknown mRNA, complete sequence//2.8e-154:755:97//Hs.21811:AF091080

[22179] F-Y79AA1000627//Homo sapiens zinc finger protein (ZF5128) mRNA, complete cds//1.7e-136:644:98//Hs.60580:AF060503

[22180] F-Y79AA1000705//Homo sapiens CHDI mRNA, complete cds//0.0023:523:59//Hs.22670:AF006513

[22181] F-Y79AA1000734//Homo sapiens peroxisomal biogenesis factor (PEX11b) mRNA, complete cds//1.6e-181:850:98//Hs.83023:AF093670

[22182] F-Y79AA1000748//ESTs//4.2e-12:95:90//Hs.33687:R85969

[22183] F-Y79AA1000752//ESTs//8.1e-114:551:97//Hs.153471:AI198377

[22184] F-Y79AA1000774//ESTs//2.9e-59:296:98//Hs.150536:W20067

[22185] F-Y79AA1000782//EST//0.97:78:69//Hs.147351:AI208468

[22186] F-Y79AA1000784//Homo sapiens RanBP7/importin 7 mRNA, complete cds//1.1e-178:847:97//Hs.5151:AF098799

[22187] F-Y79AA1000794//G-rich RNA sequence binding factor 1//0.83:228:61//Hs.79295:U07231

[22188] F-Y79AA1000800//Homo sapiens GABA-B receptor mRNA, complete cds//0.12:244:60//Hs.12307:AF056085

[22189] F-Y79AA1000802//Homo sapiens actin binding protein MAYVEN mRNA, complete cds//0.87:466:59//Hs.122967:AF059569

[22190] F-Y79AA1000805

[22191] F-Y79AA1000824//Titin//1.0:437:58//Hs.83049:X90568

[22192] F-Y79AA1000827//Fatty acid synthase {3′ region} [human, breast and HepG2 cells, mRNA Partial, 2237 nt]//0.0048:630:57//Hs.83190:U29344

[22193] F-Y79AA1000833//TUBULIN ALPHA-4 CHAIN//6.9e-107:603:90//Hs.75318:X06956

[22194] F-Y79AA1000850//ESTs, Weakly similar to T22C1.7 [C. elegans]//6.0e-77:368:99//Hs.86660:AA398644

[22195] F-Y79AA1000962//Homo sapiens orphan nuclear hormone receptor BD73 mRNA, 3′ end//0.14:499:58//Hs.37288:D16815

[22196] F-Y79AA1000966//ESTs//0.80:52:86//Hs.6671:AI341699

[22197] F-Y79AA1000968//ESTs, Moderately similar to initiation factor eIF-2B gamma subunit [R. norvegicus]//6.9e-69:310:94//Hs.76822:AI359536

[22198] F-Y79AA1000969/HLYMPHOTOXIN-BETA RECEPTOR PRECURSOR//1.0:150:64//Hs.1116:L04270

[22199] F-Y79AA1000976//Arachidonate 15-lipoxygenase//0.87:174:66//Hs.73809:M23892

[22200] F-Y79AA1000985//Human plectin (PLECI) mRNA, complete cds//0.091:385:58//Hs.79706:U53204

[22201] F-Y79AA1001023

[22202] F-Y79AA1001041//Human mutY homolog (hMYH) gene, complete cds//0.99:37:100//Hs.78489:U63329

[22203] F-Y79AA1001048//Acyl-Coenzyme A dehydrogenase, very long chain//8.7e-30:772:60//Hs.82208:L46590

[22204] F-Y79AA1001061//ESTs//6.3e-41:303:84//Hs.55855:AA621381

[22205] F-Y79AA1001068//EST//3.0e-23:165:90//Hs.157607:A1357511

[22206] F-Y79AA1001077//ESTs//4.9e-40:237:94//Hs.11197:AA309047

[22207] F-Y79AA1001078

[22208] F-Y79AA1001105//Homo sapiens homeodomain protein (OG12) mRNA, complete cds//6.5e-11:247:66//Hs.55967:AF022654

[22209] F-Y79AA1001145//ESTs//1.3e-20:234:75//Hs.55855:AA621381

[22210] F-Y79AA1001167//Homo sapiens mRNA for KIAA0750 protein, complete cds//1 .0:155:63//Hs.5444:AB018293

[22211] F-Y79AA1001177//Human hSIAH2 mRNA, complete cds//6.5e-09:299:65//Hs.20191:U76248

[22212] F-Y79AA1001185//ESTs//1.7e-56:318:93//Hs.102991:AA639646

[22213] F-Y79AA1001211//ESTs//9.1e-108:503:99//Hs.100605:AA305965

[22214] F-Y79AA1001216//Peroxisome receptor 1//0.00028:458:57//Hs.158084:Z48054

[22215] F-Y79AA1001228//Fragile X mental retardation 2//0.040:207:64//Hs.54472:U48436

[22216] F-Y79AA1001233//ESTRADIOL 17 BETA-DEHYDROGENASE 1//6.5e-25:731:60//Hs.85279:U34879

[22217] F-Y79AA1001236//Homo sapiens mRNA for JM23 protein, complete coding sequence (clone IMAGE 34581 and IMAGE 45355 and LLNLc1101133Q7 (RZPD Berlin))//4.0e-135:441:97//Hs.23170:AJ005892

[22218] F-Y79AA1001281//ESTs//2.7e-21:157:88//Hs.163825:AI393240

[22219] F-Y79AA1001299//Human Ini mRNA, complete cds//2.2e-116:323:93//Hs.155626:U04847

[22220] F-Y79AA10013121//ESTs//3.7e-95:448:99//Hs.104469:W38395

[22221] F-Y79AA1001323//ESTs//8.9e-50:340:86//Hs.144198:AI017555

[22222] F-Y79AA1001384

[22223] F-Y79AA1001391//Human Hoxb-13 mRNA, complete cds//8.6e-42:505:70//Hs.66731:U81599

[22224] F-Y79AA1001394//ESTs, Weakly similar to F54B3.3 [C. elegans]//1.5e-90:424:96//Hs.154221:H23167

[22225] F-Y79AA1001402//ESTs//1.0:245:62//Hs.134695:AI088489

[22226] F-Y79AA1001493//SRY (sex determining region Y)-box 4//0.38:311:61//Hs.83484:X70683

[22227] F-Y79AA1001511//ESTs//9.9e-105:487:99//Hs.153581:AA630465

[22228] F-Y79AA1001533//ESTs, Highly similar to RETROVIRUS-RELATED POL POLYPROTEIN [Homo sapiens]//0.95:256:63//Hs.29974:AI360447

[22229] F-Y79AA1001541//EST//0.96:202:61//Hs.99141:AA447744

[22230] F-Y79AA10015481//ESTs//2.6e-25:166:90//Hs.164036:AA845659

[22231] F-Y79AA1001555//ESTs//1.6e-35:191:97//Hs.52885:H29851

[22232] F-Y79AA1001581//Cyclin-dependent kinase inhibitor IC (p57, Kip2)//2.5e-05:272:64//Hs.106070:U22398

[22233] F-Y79AA1001585//ESTs//1.1e-84:473:93//Hs.42547:AA210783

[22234] F-Y79AA1001594//ESTs//1.7e-08:169:71//Hs.97366:AA393109

[22235] F-Y79AA1001603//ESTs//4.6e-07:429:59//Hs.160422:AI363426

[22236] F-Y79AA1001613//Homo sapiens mRNA for KIAA0683 protein, complete cds//0.00078:520:57//Hs.12334:AB014583

[22237] F-Y79AA1001647//ESTs, Weakly similar to ZK1058.5 [C. elegans]//9.4e-79:421:94//Hs.107039:W27244

[22238] F-Y79AA1001665//VON WILLEBRAND FACTOR PRECURSOR//1.0:386:60//Hs.110802:X04385

[22239] F-Y79AA1001679//Guanine nucleotide binding protein (G protein), beta polypeptide 1//0.88:243:61//Hs.3620:X04526

[22240] F-Y79AA1001692//Insulin-like growth factor binding protein 2//1.9e-06:426:59//Hs.162:X16302

[22241] F-Y79AA1001696//ESTs//2.3e-44:249:94//Hs.163665:AA250877

[22242] F-Y79AA1001705//Homo sapiens interleukin-1 receptor-associated kinase (IRAK) mRNA, complete cds//0.19:609:58//Hs.77297:L76191

[22243] F-Y79AA1001711//ESTs//5.2e-29:224:83//Hs.100461 AI018620

[22244] F-Y79AA1001781//Homo sapiens KIAA0443 mRNA, complete cds//0.49:183:66//Hs.113082:AB007903

[22245] F-Y79AA1001805//ESTs//1.1e-62:315:9811Hs.16141:W56079

[22246] F-Y79AA1001827//ESTs, Weakly similar to Similar to S. cerevisiae YD9335.03c protein [H. sapiens]//2.9e-62:313:98//Hs.15709:W81213

[22247] F-Y79AA1001846//ESTs//9.4e-16:146:82//Hs.140588:H60533

[22248] F-Y79AA1001848//ESTs, Weakly similar to KIAA0390 [H. sapiens]//1.6e-19:142:90//Hs.103349:AI141124

[22249] F-Y79AA1001866//Homo sapiens mRNA for zinc finger protein 10//5.1e-09:215:67//Hs.104115:X52332

[22250] F-Y79AA1001874//Homo sapiens Jagged 2 mRNA, complete cds//5.4e-06:412:62//Hs.106387:AF029778

[22251] F-Y79AA1001875//ESTs//16.8e-09:198:67//Hs.138036:AI343173

[22252] F-Y79AA1001923//Homo sapiens growth-arrest-specific protein (gas) mRNA, complete cds//0.98:430:58//Hs.78501 L13720

[22253] F-Y79AA1001963//ESTs//8.1e-131:642:97//Hs.54971:AI424382

[22254] F-Y79AA1002027//ESTs//0.00042:58:91//Hs.5375:AA620611

[22255] F-Y79AA1002083//ESTs//2.5e-51:285:95//Hs.117205:W88943

[22256] F-Y79AA1002089//ESTs, Weakly similar to putative p150 [H. sapiens]//8.3e-53:348:88//Hs.18122:AI338045

[22257] F-Y79AA1002093

[22258] F-Y79AA1002103//ESTs//1.5e-15:223:71//Hs.97427:AA411865

[22259] F-Y79AA1002115

[22260] F-Y79AA1002125//ESTs//6.5e-41:206:99//Hs.159257:N40395

[22261] F-Y79AA1002139//ESTs, Weakly similar to B0035.14 [C. elegans]//1.2e-24:165:90//Hs.6473:AA853955

[22262] F-Y79AA1002204//Homo sapiens mRNA for KIAA0638 protein, partial cds//9.5e-05:393:62//Hs.77864:AB014538

[22263] F-Y79AA1002208//ESTs//2.7e-13:211:69//Hs.112469:AA598515

[22264] F-Y79AA1002209//ESTs, Weakly similar to TYROSYL-TRNA SYNTHETASE [Bacillus caldotenax]//2.3e-113:568:96//Hs.111637:AA305890

[22265] F-Y79AA1002210//ESTs, Weakly similar to D2045.8 [C. elegans]//8.6e-33:338:73//Hs.26662:U55984

[22266] F-Y79AA1002211//ESTs//2.6e-15:121:75//Hs.159584:AA524477

[22267] F-Y79AA1002220//EST//0.010:360:60//Hs.136341:AA482508

[22268] F-Y79AA1002229//Human mRNA for KIAA0086 gene, complete cds//0.0041:203:63//Hs.1560:D42045

[22269] F-Y79AA1002234//Homo sapiens mRNA for KIAA0692 protein, partial cds//4.1e-176:821:98//Hs.100729:AB014592

[22270] F-Y79AA1002246//Human involucrin mRNA//5.6e-05:525:59//Hs.157091:M 13903

[22271] F-Y79AA1002258//Homo sapiens mRNA for KIAA0655 protein, partial cds//2.2e-160:748:98//Hs.96731:AB014555

[22272] F-Y79AA1002298//ESTs//2.5e-05:115:77//Hs.87164:T84489

[22273] F-Y79AA1002307//Homo sapiens mRNA for KIAA0634 protein, partial cds//2.1e-130:622:97//Hs.30898:AB014534

[22274] F-Y79AA1002311//ESTs//4.9e-19:126:94//Hs.58595:AA830999

[22275] F-Y79AA1002351//Human high conductance inward rectifier potassium channel alpha subunit mRNA, complete cds//0.028:587:58//Hs.2363:L36069

[22276] F-Y79AA1002361//ESTs//8.7e-29:149:100//Hs.156074:AA824377

[22277] F-Y79AA1002399

[22278] F-Y79AA1002407//ESTs//1.5e-25:183:89//Hs.110031:T52569

[22279] F-Y79AA1002416//CTP synthetase//9.1e-51:489:72//Hs.84112:X52142

[22280] F-Y79AA1002431

[22281] F-Y79AA1002433//EST//0.0037:94:71//Hs.136780:AA772318

[22282] F-Y79AA1002472//Homo sapiens DNA from chromosome 19, BAC 33152//1.1e-37:263:69//Hs.55452:AC003973

[22283] F-Y79AA1002482//ESTs//1.4e-49:313:80//Hs.132590:AI160765

[22284] F-Y79AA1002487//Insulin-like growth factor binding protein 2//0.43:249:61//Hs.162:X16302

[22285] Homology Search Result Data 5.

[22286] The result of the homology search of the Human Unigene using the clone sequence of 3′-end.
[22287] Data include

[22288] the name of clone,

[22289] title of the top hit data,

[22290] the P-value: the length of the compared sequence: identity (%), and

[22291] the Accession No. of the top hit data, as in the order separated by //.

[22292] Blank indicates that the 3′-end sequence corresponding to the 5′-end was not determined in the clone.

[22293] Data are not shown for the clones in which the P-value was higher than 1.

[22294] R-HEMBA1000005//ESTs, Highly similar to HYPOTHETICAL 31.6 KD PROTEIN F54F2.9 IN CHROMOSOME III [Caenorhabditis elegans]//5.6e-93:501:93//Hs.13015:AA628434

[22295] R-HEMBA1000030//Human POU domain protein (Brn-3b) mRNA, complete cds//0.83:314:61//Hs.266:U06233

[22296] R-HEMBA1000042//Archain//1.4e-45:282:89//Hs.33642:X81198

[22297] R-HEMBA1000046//Human mRNA for KIAA0118 gene, partial cds//8.3e-52:528:72//Hs.154326:D42087

[22298] R-HEMBA1000050//EST//0.043:155:63//Hs.149031:AI243340

[22299] R-HEMBA1000076//ESTs//3.1e-77:394:97//Hs.111742:R39329

[22300] R-HEMBA1000111//ESTs//1.7e-33:228:85//Hs.146811:AA410788

[22301] R-HEMBA1000129//ESTs, Weakly similar to contains similarity to helicases [C. elegans]//4.4e-90:502:90//Hs.55918:AA151667

[22302] R-HEMBA1000141//Homo sapiens mRNA for KIAA0197 protein, partial cds//2 .1e-100:514:94//Hs.27197:AB018340

[22303] R-HEMBA1000150//Homo sapiens mRNA for KIAA0640 protein, partial cds//3 .1e-45:435:77//Hs.153026:AB014540

[22304] R-nnnnnnnnnnnn//ESTs, Moderately similar to The KIAA0138 gene product is novel. [H. sapiens]//7.7e-92:428:100//Hs.126925:AA931237

[22305] R-HEMBA1000158

[22306] R-nnnnnnnnnnnn//ESTs, Weakly similar to F13B12.1 [C. elegans]//1.3e-05:58:91//Hs.5570:AI377863

[22307] R-HEMBA1000180//ESTs//7.7e-90:461:95//Hs.159200:N50545

[22308] R-HEMBA1000185//ESTs//1.3e-72:371:96//Hs.134506:AA308366

[22309] R-HEMBA1000193//ESTs//4.2e-103:481:99//Hs.143251:AA769927

[22310] R-HEMBA1000201//Human In11 mRNA, complete cds//3.0e-25:137:99//Hs.155626:U04847

[22311] R-HEMBA1000213//ESTs//5.4e-85:465:94//Hs.23412:AA133311

[22312] R-HEMBA1000216//ESTs//3.0e-37:311:79//Hs.137875:AA993532

[22313] R-nnnnnnnnnnnn//EST//2.2e-100:498:96//Hs.161570:W80404

[22314] R-HEMBA1000231//Homo sapiens KIAA0414 mRNA, partial cds//2.7e-34:287:70//Hs.127649:AB007874

[22315] R-HEMBA1000243//Homo sapiens mRNA for KIAA0475 protein, complete cds//1.3e-23:276:75//Hs.5737:AB007944

[22316] R-HEMBA1000244//ESTs//2.3e-88:455:96//Hs.8929:AA719019

[22317] R-HEMBA1000251//ESTs//0.96:411:56//Hs.120277:AI243808

[22318] R-HEMBA1000264//ESTs//3.7e-97:487:96//Hs.29258:W37424

[22319] R-nnnnnnnnnnnn//ESTs, Moderately similar to ovarian-specific protein [R. norvegicus]//4.9e-14:208:73//Hs.93332:AA811920

[22320] R-HEMBA1000282//ESTs//2.5e-38:216:94//Hs.120757:R92485

[22321] R-HEMBA1000288//ESTs//2.6e-43:289:86//Hs.151365:AA643962

[22322] R-HEMBA1000290//ESTs//5.1e-110:543:96//Hs.139068:AA516409

[22323] R-HEMBA1000302//Homo sapiens mRNA for KIAA0527 protein, partial cds//1.0:122:67//Hs.129748:AB011099

[22324] R-nnnnnnnnnnnn//ESTs//7.4e-76:386:97//Hs.22276:AA191323

[22325] R-nnnnnnnnnnnn//Human Ca2+-dependent activator protein for secretion mRNA, complete cds//8.8e-30:160:98//Hs.151301:U36448

[22326] R-HEMBA1000307//ESTs, Highly similar to 8A-2V protein [M. musculus]//1.1e-103:489:99//Hs.108881:AI018024

[22327] R-nnnnnnnnnnnn//ESTs//9.3e-99:472:98//Hs.163512:AA903238

[22328] R-HEMBA1000338//EST//5.1e-49:278:92//Hs.150815:AI302560

[22329] R-HEMBA1000351//Human high-affinity copper uptake protein (hCTR1) mRNA, complete cds//1.1e-42:270:88//Hs.73614:U83460

[22330] R-HEMBA1000355//ESTs//1.0e-105:531:96//Hs.61762:AI422243

[22331] R-HEMBA1000357//Human kpni repeat mrna (cdna clone pcd-kpni-4), 3′ end//9.4e-89:432:87//Hs.139107:K00629

[22332] R-HEMBA1000366//ESTs//1.1e-99:524:95//Hs.11785:T65857

[22333] R-HEMBA1000369//ESTs//6.5e-70:355:96//Hs.124847:AA843938

[22334] R-HEMBA1000376//Human mRNA for KIAA0205 gene, complete cds//3.6e-44:388:77//Hs.3610:D86960

[22335] R-HEMBA1000387//Human high-affinity copper uptake protein (hCTR1) mRNA, complete cds//5.5e-47:337:83//Hs.73614:U83460

[22336] R-HEMBA1000390//Oxytocin receptor//2.4e-16:428:62//Hs.2820:X64878

[22337] R-HEMBA1000392//ESTs//3.9e-105:531:96//Hs.130661:AI340248

[22338] R-HEMBA1000396//ESTs, Weakly similar to line-1 protein ORF2 [H. sapiens]//1.1e-44:447:75//Hs.42849:N31920

[22339] R-HEMBA1000411//ESTs, Weakly similar to ankyrin 3, long form [H. sapiens]//6.1e-92:373:99//Hs.48675:AI005282

[22340] R-HEMBA1000418//ESTs//3.1e-66:315:100//Hs.94133:A1270700

[22341] R-HEMBA1000422//ESTs//1.6e-99:464:99//Hs.33024:AA002140

[22342] R-HEMBA1000428//Homo sapiens mRNA for oligophrenin 1//4.9e-85:535:87//Hs.158122:AJ001189

[22343] R-HEMBA1000434//ESTs//3.7e-53:266:99//Hs.22782:Z38143

[22344] R-HEMBA1000442//ESTs//0.93:322:57//Hs.144763:AI218014

[22345] R-HEMBA1000456//ESTs//4.1e-48:277:93//Hs.6937:AA524349

[22346] R-HEMBA1000459//ESTs//0.010:184:63//Hs.128797:AI246316

[22347] R-HEMBA1000460

[22348] R-HEMBA1000464//EST//0.082:87:70//Hs.147977:AI262370

[22349] R-HEMBA1000469//Small inducible cytokine A5 (RANTES)//1.4e-65:494:81//Hs.155464:AF088219

[22350] R-HEMBA1000488//ESTs, Weakly similar to The KIAA0132 gene product is related to Drosophila melanogaster ring canel protein. [H. sapiens]//1.1e-31:181:94//Hs.61454:AA312449

[22351] R-HEMBA1000490//ESTs//6.4e-17:132:86//Hs.32855:N25528

[22352] R-HEMBA1000491//ESTs//2.2e-22:171:85//Hs.8035:AA195087

[22353] R-HEMBA1000504//ESTs//0.016:282:5811Hs.130778:AI077571

[22354] R-HEMBA1000505//EST//6.1e-15:116:87//Hs.162783:AA627318

[22355] R-HEMBA1000508//ESTs//1.1e-28:244:81//Hs.132722:AA618531

[22356] R-HEMBA1000518//EST//0.60:141:60//Hs.97831:AA400885

[22357] R-HEMBA1000519//ESTs//2.8e-64:334:96//Hs.97885:AA402414

[22358] R-HEMBA1000520//ESTs//6.9e-104:503:97//Hs.18370:AA947280

[22359] R-HEMBA1000523//Cleavage stimulation factor, 3′ pre-RNA, subunit 3, 77 kD//4.0e-55:203:92//Hs.155510:U15782

[22360] R-HEMBA1000531//ESTs, Weakly similar to HEAT SHOCK 70 KD PROTEIN 1 [H. sapiens]//1.3e-117:550:99//Hs.99722:AI422277

[22361] R-HEMBA1000540//ESTs//4.7e-72:350:98//Hs.109755:AA180809

[22362] R-HEMBA1000545//Homo sapiens clone 23892 mRNA sequence//3.7e-68:549:80//Hs.91916:AF035317

[22363] R-nnnnnnnnnnnn//ESTs//2.3e-66:342:97//Hs.71916:AA219699

[22364] R-HEMBA1000557//EST//1.5e-49:297:90//Hs.149580:AI281881

[22365] R-HEMBA1000561//ESTs, Moderately similar to zinc finger protein [R. norvegicus]//1.8e-108:550:96//Hs.26799:W74481

[22366] R-HEMBA1000563//Adenosine kinase//0.16:367:58//Hs.94382:U50196

[22367] R-HEMBA1000568//ESTs//5.1e-42:321:82//Hs.141024:H07128

[22368] R-nnnnnnnnnnnn

[22369] R-HEMBA1000575//ESTs//3.8e-45:352:80//Hs.146811:AA410788

[22370] R-HEMBA1000588//ESTs//1.18:122:67//Hs.140507:AA761944

[22371] R-HEMBA1000591//Homo sapiens mRNA for El B-55 kDa-associated protein//3.9e-113:591:94//Hs.155218:AJ007509

[22372] R-HEMBA1000592//TIYROSINE-PROTEIN KINASE ITK/TSK//0.024:309:61//Hs.89519:L10717

[22373] R-HEMBA1000594//ESTs//8.6e-07:172:68//Hs.160289:AI168041

[22374] R-HEMBA1000604//Human telomerase-associated protein TP-1 mRNA, complete cds//1.5e-19:129:93//Hs.158334:U86136

[22375] R-HEMBA1000608//ESTs//2.2e-95:506:94//Hs.6103: AA496424

[22376] R-HEMBA1000622//ESTs//3.8e-10:440:61//Hs.137538:AA769438

[22377] R-HEMBA1000636//ESTs, Weakly similar to 50S RIBOSOMAL PROTEIN L20 [E. coli]//1.4e-86:422:97//Hs.26252:AA643235

[22378] R-HEMBA1000637//Homo sapiens mRNA for KIAA0690 protein, partial cds//3.7e-99:443:97//Hs.60103:AB014590

[22379] R-HEMBA1000655//Human mRNA for KIAA0392 gene, partial cds//1.3e-50:426:79//Hs.40100:AB002390

[22380] R-HEMBA1000657//ESTs//3.0e-74:419:93//Hs.109477:AA477929

[22381] R-HEMBAI1000662//EST//1.1e-90:425:99//Hs.122144:AA780136

[22382] R-HEMBA1000673//ESTs//1.2e- 101:473:99//Hs.138215:A1123922

[22383] R-HEMBA1000682//ESTs, Weakly similar to putative p150 [H. sapiens]//3.5e-114:553:97//Hs.11730:AA604403

[22384] R-HEMBA1000686//ESTs, Weakly similar to C27F2.7 gene product [C. elegans]//6.8e-18:137:86//Hs.7049:AI141736

[22385] R-HEMBA1000702//Human mRNA for tryptophan hydroxylase (EC 1.14.16.4)//7.4e-52:345:8411Hs.144563:AF057280

[22386] R-HEMBA1000705EST//0.21:139:63//Hs.132687:AI033672

[22387] R-HEMBA1000719//ESTs//8.4e-90:484:94//Hs.29005:AA477213

[22388] R-HEMBA1000722//ESTs, Weakly similar to similar to enoyl-COA hydratases/isomerases [C. elegans]//7.2e-113:572:95//Hs.28644:AI018612

[22389] R-HEMBA1000726//ERYTHROCYTE BAND 7 INTEGRAL MEMBRANE PROTEIN//2.8e-40:449:75//Hs.74478:U33931

[22390] R-HEMBA1000727//ESTs//0.0047:267:60//Hs.133095:AA927777

[22391] R-HEMBA1000747//EST//3.9e-20:160:85//Hs.99048:AA446110

[22392] R-HEMBA1000749//Small inducible cytokine A5 (RANTES)//4.7e-37:286:82//Hs.155464:AF088219

[22393] R-HEMBA1000752//EST//0.041:39:94//Hs.127772:AA961131

[22394] R-HEMBA1000769//Homo sapiens mRNA for chemokine LEC precursor, complete cds//1.6e-32:309:75//Hs.10458:AF088219

[22395] R-HEMBA1000773//EST//7.5e-05:201:63//Hs.122887:AA767612

[22396] R-HEMBA1000774//Kangai 1 (suppression of tumorigenicity 6, prostate; CD82 antigen (R2 leukocyte antigen, antigen detected by monoclonal and antibody IA4))//1.3e-48:284:90//Hs.103458:X53795

[22397] R-HEMBA1000791//Human mRNA for KIAA018 gene, partial cds//1.2e-45:291:87//Hs.154326:D42087

[22398] R-HEMBAI1000817//ESTs//8.3e-95:445:99//Hs.107357:AA983939

[22399] R-HEMBA1000822//ESTs//1.1e-107:522:97//Hs.92832:AA631027

[22400] R-HEMBA1000827//Homo sapiens Ser/Arg-related nuclear matrix protein (SRM160) mRNA, complete cds//2.2e-44:228:98//Hs.18192:AF048977

[22401] R-HEMBA1000843//Homo sapiens LIM protein mRNA, complete cds//6.6e-46:410:77//Hs.154103:AF061258

[22402] R-HEMBA1000851

[22403] R-HEMBA1000852//Aldehyde dehydrogenase 10 (fatty aldehyde dehydrogenase)//3.7e-33:284:80//Hs.159608:U46689

[22404] R-HEMBA1000867//EST//2.0e-17:211:74//Hs.145670:AI265794

[22405] R-HEMBA1000869//ESTs//3.1e-16:237:71//Hs.116518:AA653202

[22406] R-HEMBA1000870//ESTs//1 .6e43:222:98//Hs.69564:AA203608

[22407] R-HEMBA1000872//ESTs//1.9e-93:453:98//Hs.152622:AA594951

[22408] R-HEMBA1000876//Small inducible cytokine A5 (RANTES)//3.0e-41:329:79//Hs.155464:AF088219

[22409] R-HEMBA1000908//ESTs//1.6e-51:291:92//Hs.12247:AI203154

[22410] R-HEMBA1000910//EST//0.98:139:64//Hs.132687:AI033672

[22411] R-HEMBA1000918//EST//9.6e-30:152:84//Hs.162136:AA526508

[22412] R-HEMBA1000919

[22413] R-HEMBA1000934//ESTs//4.1e-38:254:89//Hs.87784:AA460597

[22414] R-HEMBA1000942//ESTs//3 .5e-20:172:69//Hs.160065 AI018619

[22415] R-HEMBA1000943//Homo sapiens mRNA for KIAA0748 protein, complete cds//1.3e-44:281:78//Hs.33187:AB018291

[22416] R-HEMBA1000946//ESTs//1.6e-68:352:96//Hs.21331:H93074

[22417] R-HEMBA1000960//Homo sapiens tapasin (NGS-17) mRNA, complete cds//4.0e-61:347:81//Hs.5247:AF029750

[22418] R-HEMBA1000968//Homo sapiens mRNA, chromosome 1 specific transcript KIAA0508//6.8e-51:362:84//Hs.159187:AB007977

[22419] R-HEMBA1000971//ESTs//2.8e-41:246:91 I/Hs.104287:AI363498

[22420] R-HEMBA1000972//Homo sapiens mRNA for XPR2 protein//7.3e-44:341:81//Hs.44766:AJ007590

[22421] R-HEMBA1000974//ESTs//1 .4e-32:166:100//Hs.149274:AI018170

[22422] R-HEMBA1000975//Oxytocin receptor//2.7e-46:563:73//Hs.2820:X64878

[22423] R-HEMBA1000985//ESTs//4.4e-05:125:69//Hs.147434:AI214464

[22424] R-HEMBA1000986//ESTs//7.8e-44:266:84//Hs.163784:N54902

[22425] R-HEMBA1000991//EST//1 .4e-42:162:86//Hs.149580:AI281881

[22426] R-HEMBA1001007

[22427] R-HEMBAI1001008//ESTs//2.3e-82:463:92//Hs.10339:AA058764

[22428] R-HEMBA1001009//ESTs, Weakly similar to non-lens beta gamma-crystallin like protein [H. sapiens]//2.6e-58:280:100//Hs.128738:AA970836

[22429] R-HEMBA1001017//Homo sapiens mRNA for KIAA0468 protein, complete cds//3.3e-115:587:9511Hs.158287:AB007937

[22430] R-HEMBA1100119//Cell division cycle 2, G1 to S and G2 to M//1.1e-24:140:95//Hs.58393:X05360

[22431] R-HEMBA1001020//ESTs//0.52:86:72//Hs.69683:AA115292

[22432] R-HEMBA1001022//ESTs//3.4e-18:102:100//Hs.63243: AI123912

[22433] R-HEMBA1001024//ESTs//1.9e-07:262:61//Hs.124399:AA832336

[22434] R-HEMBA1001026//ESTs//0.0017:142:67//Hs.144109:AI345543

[22435] R-nnnnnnnnnnnn//Ankyrin G110.23:244:60//Hs.75893:U13616

[22436] R-HEMBA1001051//Homo sapiens mRNA for KIAA0621 protein, partial cds//6.4e-21:186:79//Hs.132942:AB014521

[22437] R-HEMBA1001052//ESTs//5 .4e-107:497:99//Hs.121773:A1357886

[22438] R-HEMBA1001060//ESTs//1.1e-31:298:80//Hs.24821:AA044813 45 R-HEMBA1001071//Alpha-1 type 3 collagen//9.1e-34:179:98//Hs.119571:X14420

[22439] R-HEMBA1100077//Homo sapiens mRNA, chromosome 1 specific transcript KIAA0492//2.7e-21:417:64//Hs.127338:AB007961

[22440] R-HEMBA1001080

[22441] R-HEMBA1001085//ESTs//1.9e-47:385:79//Hs.146811:AA410788 50 R-HEMBA1001088//ESTs//2.8e-102:548:93//Hs.127273:AA522674

[22442] R-HEMBA1001094

[22443] R-HEMBA1001099//ESTs//0.24:41:97//Hs.18612:T99245

[22444] R-HEMBA1001109//Small inducible cytokine A5 (RANTES)//2.4e-46:396:80//Hs.155464:AF088219

[22445] R-HEMBA1001121//ESTs//1.7e-15:216:71//Hs.141605:H92974

[22446] R-HEMBA1001122//ESTs//2.0e-90:474:94//Hs.107884:AA131320

[22447] R-HEMBA1001123//B-CELL GROWTH FACTOR PRECURSOR//2.7e-45:319:84//Hs.99879:M15530

[22448] R-HEMBA1001133//ESTs//1.2e-92:443:99//Hs.99626:AA632341

[22449] R-HEMBA1001137//ESTs//2.0e-86:426:97//Hs.157103:W60265

[22450] R-HEMBA1100140//Small inducible cytokine A5 (RANTES)//2.9e-45:323:83//Hs.155464:AF088219

[22451] R-HEMBA1001172//ESTs, Moderately similar to !!!! ALU SUBFAMILY J WARNING ENTRY !!!! [H. sapiens]//1.1e-39:309:82//Hs.96337:AA225358

[22452] R-HEMBA1001174//Homo sapiens mRNA, chromosome I specific transcript KIAA0492//0.21:238:60//Hs.127338:AB007961

[22453] R-HEMBA1001197//ESTs//0.010:388:61//Hs.14881:R91896

[22454] R-HEMBA1001208//ESTs, Highly similar to Similar to S. cerevisiae hypothetical protein 5 [H. sapiens]//0.27:305:62//Hs.100238:U69194

[22455] R-HEMBA1001226//Homo sapiens PYRIN (MEFV) mRNA, complete cds//5.0e-54:333:81//Hs.113283:AF018080

[22456] R-HEMBA1001235//EST//2.3e-07:42:92//Hs.141620:N63316

[22457] R-HEMBA1001247//ESTs, Weakly similar to WWP2 [H. sapiens]//2.9e-20:160:87//Hs.103102:W55932

[22458] R-HEMBA1001257//ESTs//3.3e-112:544:97//Hs.128749:AA779728

[22459] R-HEMBA1001265//ESTs//8.7e-116:564:98//Hs.155150:AI061435

[22460] R-nnnnnnnnnnnn//ESTs, Weakly similar to Lpa8p [S. cerevisiae]//2.4e-35:239:87//Hs.103919:AA159181

[22461] R-HEMBA1001286//ESTs//1.4e-97:507:95//Hs.26244:AI352674

[22462] R-HEMBA1001289//ESTs//8.2e-44:122:96//Hs.76267:AA877534

[22463] R-HEMBA1001294//ESTs//1.0:140:65//Hs.149638:AI298324

[22464] R-HEMBA1001299//Small inducible cytokine A5 (RANTES)//1.1e-45:307:84//Hs.155464:AF088219

[22465] R-HEMBA1001302//Homo sapiens mRNA for APC 2 protein, complete cds//0.53:89:68//Hs.20912:AB012162

[22466] R-HEMBA1001303//EST//0.00053:271:60//Hs.156148:AI333214

[22467] R-HEMBAI1001310//ESTs//1.4e-91:486:93//Hs.86228:AA206019

[22468] R-HEMBA1001319//ESTs//0.051:228:61//Hs.99404:AA953977

[22469] R-HEMBA1001323//ESTs//6.2e-83:401:98//Hs.47343:AI282950

[22470] R-HEMBA1001326//ESTs, Weakly similar to HYPOTHETICAL 55.1 KD PROTEIN IN FAB1-PES4 INTERGENIC REGION [S. cerevisiae]//1.3e-77:458:92//Hs.9398:N41838

[22471] R-HEMBA1001327//ESTs//0.60:251:58//Hs.117162:AA701259

[22472] R-HEMBA1001330//Homo sapiens PYRIN (MEFV) mRNA, complete cds//1.1e-46:249:78//Hs.113283:AF018080

[22473] R-HEMBA1001351//ESTs//0.13:230:57//Hs.138510:R94816

[22474] R-HEMBA1001361//ESTs//3.5e-107:570:94//Hs.7727:AA142837

[22475] R-HEMBA1001375//ESTs//1.1e-96:454:99//Hs.59584:AA587334

[22476] R-HEMBA1001377//ESTs//8.5e-91:459:95//Hs.61859:AA628550

[22477] R-HEMBA1001383//ESTs//0.077:381:58//Hs.163093: AA745458

[22478] R-HEMBA1001387//ESTs//2.0e-85:405:99//Hs.152127:A1246482

[22479] R-HEMBA1001388//ESTs//1.5e-83:395:99//Hs.105191: AA133439

[22480] R-HEMBA1001391//ESTs//7.7e-90:4S5:96//Hs.120905:R22204

[22481] R-HEMBA1001398//Thromboxane A2 receptor//4.0e-46:279:89//Hs.89887:D38081

[22482] R-HEMBA1001405//ESTs//1.2e-98:485:97//Hs.73287:W16714

[22483] R-HEMBA1001407//ESTs//2.2e-76:365:99//Hs.110128:AA584364

[22484] R-HEMBA1001411//ESTs//1.2e′-102:476:100//Hs.143162:AI380343

[22485] R-HEMBA1001413//ESTs//3.7e-66:321:98//Hs.152472:AA041199

[22486] R-HEMBA1001415

[22487] R-HEMBA1001432//Putative mismatch repairibinding protein hMSH3//7.9e-42:183:82//Hs.42674:U61981

[22488] R-HEMBA1001433//ESTs//1 .4e-34:240:77//Hs.9561 I :U51704

[22489] R-HEMBA1001435//ESTs//5 .6e-23:292:70//Hs.116315:AA629263

[22490] R-HEMBA1001442//ESTs//0.76:414:58//Hs.156189:AI419982

[22491] R-HEMBA1001446//ESTs//2.2e-95:447:99//Hs.154091:AA767546

[22492] R-HEMBA1001450//ESTs//1.0e-93:491:94//Hs.16130:AA195077

[22493] R-HEMBA1001454//Human Line-1 repeat mRNA with 2 open reading frames//1.7e-47:304:88//Hs.23094:MI 9503

[22494] R-HEMBA1001455//ESTs//7.1e-103:482:99//Hs.97407:AI417220

[22495] R-HEMBA1001463

[22496] R-HEMBA1001476//Human mRNA for KIAA0186 gene, complete cds//2.0e-25:409:66//Hs.36232:D80008

[22497] R-HEMBA1001478

[22498] R-HEMBA1001497

[22499] R-HEMBA1001510//ESTs//3.3e-44:381:78//Hs.139882:AA864426

[22500] R-HEMBA1001515//Human Line-1 repeat mRNA with 2 open reading frames//5.9e-79:528:84//Hs.23094:M19503

[22501] R-HEMBA1001517//ESTs//5.8e-32:272:81//Hs.119512:AA487269

[22502] R-HEMBA1001522//ESTs//1.7e-84:364:95//Hs.117858:AA702493

[22503] R-HEMBA1001526//ESTs//1.8e-93:527:93//Hs.10624:N64723

[22504] R-HEMBA1001533//ESTs//1.9e-42:211:100//Hs.55830:AA580270

[22505] R-HEMBA1001557//ESTs//4.2e-83:413:97//Hs.47546:AA181348

[22506] R-HEMBA1001566//Small inducible cytokine A5 (RANTES)//3.4e-50:304:88//Hs.155464:AF088219

[22507] R-HEMBA1001569//POU domain, class 3, transcription factor 4//2.3e-06:259:62//Hs.2229:X82324

[22508] R-HEMBA1001570//Homo sapiens pendrin (PDS) mRNA, complete cds//3.5e-47:456:77//Hs.159275:AF030880

[22509] R-HEMBA1001579//ESTs//1.11:299:60//Hs.106090:AA457030

[22510] R-HEMBA1001581//ESTs//0.016:350:61//Hs.124664:AI0015652

[22511] R-HEMBA0011585//Human mRNA for KIAA0331 gene, complete cds//0.30:251:63//Hs.146395:AB002329

[22512] R-HEMBA1001589

[22513] R-HEMBA1001595//ESTs, Weakly similar to SEPTIN 2 [D. melanogaster]//6.9e-71:431:88//Hs.26625:W25874

[22514] R-HEMBA1001608//Human kpni repeat mrna (cdna clone pcd-kpni-8), 3′ end//1.3e-73:533:82//Hs.103948:K00627

[22515] R-HEMBA1001620//ESTs, Highly similar to MYO-INOSITOL-1-PHOSPHATE SYNTHASE [Arabidopsis thaliana]//4.5e-93:537:90//Hs.20218:AA628530

[22516] R-nnnnnnnnnnnn//Homo sapiens antigen NY-CO-16 mRNA, complete cds//0.054:362:60//Hs.132206:AF039694

[22517] R-HEMBA1001636//ESTs//4.9e-53:267:97//Hs.47459:AA700158

[22518] R-HEMBA1001640//ESTs//2 .9e-27:299:72//Hs.65236:AA927623

[22519] R-nnnnnnnnnnnn/ESTs, Weakly similar to M1-2 protein [H. sapiens]//1.2e-86:442:95//Hs.63888:AA203398

[22520] R-HEMBA1001655//ESTs//1.5e-101:516:95//Hs.86541:AA214554

[22521] R-HEMBA1001658

[22522] R-HEMBA1001661//Homo sapiens protocadherin 68 (PCH68) mRNA, complete cds//1.3e-16:427:61//Hs.106511:AF029343

[22523] R-HEMBA1001672//Homo sapiens methyl-CpG binding protein MBD3 (MBD3) mRNA, complete cds//1.4e-93:493:92//Hs.107254:AC005943

[22524] R-HEMBA1001675

[22525] R-HEMBA1001678//Homo sapiens voltage dependent anion channel protein mRNA, complete cds//4.2e-103:534:94//Hs.7381:AF038962

[22526] R-HEMBA1001681//ESTs//6.0e-49:292:92//Hs.65588: AA523424

[22527] R-HEMBA1001702//ESTs//9.0e-98:478:97//Hs.28661:AA805916

[22528] R-HEMBA1001709//Homo sapiens mRNA for KIAA0698 protein, complete cds//6.3e-98:483:96//Hs.31720:AB014598

[22529] R-HEMBA1001711//ESTs//5.8e-83:398:98//Hs.34804:AA514960

[22530] R-HEMBA1001712//ESTs//0.028:202:63//Hs.105790:AA528095

[22531] R-HEMBA1001714//ESTs, Highly similar to ATPASE INHIBITOR, MITOCHONDRIAL PRECURSOR [Rattus norvegicus]//1.8e-46:236:98//Hs.132948:AA194452

[22532] R-HEMBA1001718//Small inducible cytokine A5 (RANTES)//8.6e-43:166:88//Hs.155464:AF088219

[22533] R-HEMBA1001723//ESTs, Highly similar to HYPOTHETICAL TRP-ASP REPEATS CONTAINING PROTEIN IN SISI-MRPL2 INTERGENIC REGION [Saccharomyces cerevisiae]//7.1e-88:431:96//Hs.29203:AI344105

[22534] R-HEMBA1001731//EST//0.25:100:68//Hs.149171:AI245712

[22535] R-HEMBA1001734//Human mRNA for KIAA0355 gene, complete cds//2.6e-39:366:77//Hs.153014:AB002353

[22536] R-HEMBA1001744

[22537] R-HEMBA1001745//ESTs//6.6e-05:244:62//Hs.157663:AI358623

[22538] R-HEMBA1001746//EST//4.9e-65:409:88//Hs.124673:AA858162

[22539] R-HEMBA1001761//ESTs//1.9e-44:315:84//Hs.159510:AA297145

[22540] R-HEMBA1001781//ESTs//3.0e-98:462:99//Hs.60059:AI057306

[22541] R-HEMBA1001784//EST//1.0e-12:250:68//Hs.152366:AA486721

[22542] R-HEMBA1001791//EST//1.4e-47:292:89//Hs.163333:AA879053

[22543] R-HEMBA1001800//ESTs//8.4e-37:314:79//Hs.105151:AA970243

[22544] R-HEMBA1001803//ESTs//4.5e-99:465:99//Hs.135159:AI095823

[22545] R-nnnnnnnnnnnnn/Zinc finger protein 148 (pHZ-52)//0.78:232:57//Hs.112180:AF039019

[22546] R-HEMBA1001808//Homo sapiens mRNA, chromosome 1 specific transcript KIAA0500//9.0e-114:548:98//Hs.118164:AB007969

[22547] R-HEMBA1001809EST//3.8e-63:292:89//Hs.158591:AI369334

[22548] R-HEMBA1001815//Calcium modulating ligand//1.1e-47:299:87//Hs.13572:AF068179

[22549] R-HEMBA1001819//ZINC FINGER PROTEIN HF.12//1.2e-16:259:69//Hs.155470:X07290

[22550] R-HEMBA1001820//ESTs//2.6e-86:404:100//Hs.112881:AA620707

[22551] R-nnnnnnnnnnnn//ESTs//2.2e-1:480:99//Hs.159940:AA971578

[22552] R-HEMBA1001824//ESTs, Weakly similar to MATRIN 3 [H. sapiens]//6.2e-27:147:97//Hs.23476:AA401210

[22553] R-HEMBA1001835//EST//0.79:216:64//Hs.47437:N52250

[22554] R-HEMBA1001844//ESTs//4.7e-62:319:95//Hs.55200:N98513

[22555] R-HEMBA1001847//ESTs//2.3e-102:522:95//Hs.20879:AA845446

[22556] R-HEMBA1001861//Homo sapiens mRNA for KIAA0617 protein, complete cds//1.1e-109:553:96//Hs.78946:AB014517

[22557] R-HEMBA1001864//ESTs//7.4e-94:449:99//Hs.132776:AI142853

[22558] R-HEMBA1001866//Myelin oligodendrocyte glycoprotein {alternative products}//1.9e-37:357:76//Hs.53217:Z48051

[22559] R-nnnnnnnnnnnn//ESTs, Weakly similar to trithorax homolog HTX, version 2 [H. sapiens]//2.3e-32:193:94//Hs.9489:R84329

[22560] R-HEMBA1001888//H. sapiens mRNA for urea transporter//2.0e-47:425:78//Hs.667110:X96969

[22561] R-HEMBA1001896//ESTs//3.5e-56:274:99//Hs.129018:H03128

[22562] R-HEMBA1001910

[22563] R-HEMBA1001912//ESTs, Weakly similar to !!!! ALU SUBFAMILY J WARNING ENTRY!!!! [H. sapiens]//1.5e-73:347:100//Hs.30991:AA994438

[22564] R-HEMBA1001913//ESTs, Highly similar to GCN20 PROTEIN [Saccharomyces cerevisiae]//5.1e-57:320:91//Hs.91251:U66685

[22565] R-HEMBA1001915//ESTs//4.9e-88:459:95//Hs.122810:AI273706

[22566] R-HEMBA1001918//ESTs//1.2e-106:505:99//Hs.98518:AI027125

[22567] R-HEMBAI1001921//Homo sapiens germinal center kinase related protein kinase mRNA, complete cds//5.5e-107:534:96//Hs.154934:AF000145

[22568] R-HEMBA1001939//ESTs, Moderately similar to !!!! ALU SUBFAMILY J WARNING ENTRY !!!! [H. sapiens]//2.9e-99:482:98//Hs.96849:AA879470

[22569] R-HEMBAI100940//Human mRNA for KIAA0392 gene, partial cds//5.6e-45:336:82//Hs.40100:AB002390

[22570] R-HEMBA1001942//EST//2 .6e-84:397:99//Hs.145444:AI203668

[22571] R-HEMBA1001945//ESTs//1.4e-92:437:99//Hs.144565:AI192452

[22572] R-HEMBA1001950//ESTs//3.9e-43:280:88//Hs.84429:N28866

[22573] R-HEMBAI1001960//ESTs//0.040:243:62//Hs.29567:AA640421

[22574] R-HEMBAI1001962//ESTs//0.0071:113:69//Hs.49792:N70048

[22575] R-HEMBA1001964//ESTs//3.0e-38:239:87//Hs.158126:W26825

[22576] R-HEMBA1001967//Human DNA sequence from clone 341E18 on chromosome 6 p11.2-12.3. Contains a Serine/Threonine Protein Kinase gene (presumptive isolog of a Rat gene) and a novel alternatively spliced gene. Contains a putative CpG island, ESTs and GSSs//1.8e-106:517:97//Hs.11050:AL031178

[22577] R-HEMBA1001979//EST//0.039:167:63//Hs.129451:AA993932

[22578] R-HEMBA1001987//ESTs//3.1e-44:320:83//Hs.136839:H93717

[22579] R-HEMBA1001991//Human mRNA for KIAA0355 gene, complete cds//9.5e-47:303:88//Hs.153014:AB002353

[22580] R-HEMBA1002003//Homo sapiens mRNA for protein phosphatase 2C (beta)//1.6e-91:448:97//Hs.5687:AJ005801

[22581] R-HEMBA1002008//ESTs//9.2e-47:297:87//Hs.142314:AA347930

[22582] R-HEMBA1002018//ESTs//9.4e-21:118:97//Hs.7871:AI041837

[22583] R-HEMBA1002022//Human mRNA for KIAA0075 gene, partial cds//0.25:196:63//Hs.1189:D38550

[22584] R-HEMBA1002035//ESTs//7.7e-101:475:99//Hs.8858:A1131538

[22585] R-HEMBA1002039//H. sapiens mRNA for phosphoinositide 3-kinase//0.68:256:64//Hs.101238:Y11312

[22586] R-HEMBA1002049//Homo sapiens mRNA for KIAA0563 protein, complete cds//2.4e-51:254:85//Hs.15731:AB011135

[22587] R-HEMBA1002084//EST//0.31:219:60//Hs.162396:AA572764

[22588] R-HEMBA1002092//EST//6.4e-72:342:99//Hs.148533:AI200996

[22589] R-HEMBA1002100//EST//5.6e-38:258:85//Hs.103094:W52354

[22590] R-HEMBA1002102//Thiopurine S-methyltransferase//1.4e-46:403:79//Hs.51124:AF019369

[22591] R-HEMBA1002113//Prostaglandin 12 (prostacyclin) synthase //1.4e-76:280:90//Hs.61333:D83402

[22592] R-HEMBA1002119//Homo sapiens OR7E12P pseudogene, complete sequence//1.4e-87:362:94//Hs.103443:AF065854

[22593] R-HEMBA1002125//ESTs, Weakly similar to Y53C12A.3 [C. elegans]//1.7e-16:94:100//Hs.107747:AI357868

[22594] R-HEMBA1002139//H. sapiens mRNA for nebulin//0.0019:68:88//Hs.83870:X83957

[22595] R-HEMBA1002144//ESTs//3.1e-30:259:72//Hs.141575:AA211734

[22596] R-HEMBA1002150//ESTs//7.1e-105:543:95//Hs.32275:AA595199

[22597] R-HEMBA1002151//ESTs//2.2e-35:178:100//Hs.77703:W19642

[22598] R-HEMBA1002153//EST//4.5e-49:458:77//Hs.141708:W44337

[22599] R-HEMBA1002160//Homo sapiens nephrocystin (NPHP1) mRNA, partial cds//1 .4e-36:400:75//Hs.75474:AF023674

[22600] R-HEMBA1002161//Homo sapiens EV15 homolog mRNA, complete cds//1.9e-33:294:77//Hs.26929:AF008915

[22601] R-HEMBA1002162//ESTs//1.0e-47:317:85//Hs.48919:N64043

[22602] R-HEMBA1002166//Thromboxane A2 receptor//6.8e-46:296:81//Hs.89887:D38081

[22603] R-HEMBA1002177//EST//2.6e-42:215:99//Hs.116880:AA662457

[22604] R-HEMBA1002185//Homo sapiens class-1 MHC-restricted T cell associated molecule (CRTAM) mRNA, complete cds//6.0e-42:419:73//Hs.159523:AF001622

[22605] R-HEMBA1002189//Homo sapiens mRNA for KIAA0792 protein, complete cds//1 .4e-29:244:72//Hs.119387:AB007958

[22606] R-HEMBA1002191//ESTs//2.6e-31:275:66//Hs.133852:AI076357

[22607] R-HEMBA1002199//Human Line-1 repeat mRNA with 2 open reading frames//4.3e-84:557:84//Hs.23094:M19503

[22608] R-HEMBA1002204//EST//0.00057:113:71//Hs.144868:A1202342

[22609] R-HEMBA1002212//ESTs//1 .5e-48:277:93//Hs.104741:A1393315

[22610] R-HEMBA1002215//ESTs//1.1e-23:158:90//Hs.152529:AA897151

[22611] R-HEMBA1002226//Homo sapiens mRNA for KIAA0706 protein, complete cds//5.1e-21:230:75//Hs.139648:AB014606

[22612] R-HEMBA1002229//Homo sapiens growth suppressor related (DOC-IR) mRNA, complete cds//1 .5e-47:238:98//Hs.25664:AF089814

[22613] R-HEMBA1002237//ESTs//6.9e-35:357:76//Hs.116518:AA653202

[22614] R-HEMBA1002253//EST//6.0e-19:125:81//Hs.140596:AA829426

[22615] R-HEMBA1002257

[22616] R-HEMBA1002267//ESTs, Weakly similar to HYPOTHETICAL 27.8 KD PROTEIN IN VMA7-RPS31A INTERGENIC REGION [S. cerevisiae]//1.3e-31:201:91//Hs.114673:W72675

[22617] R-HEMBA1002270//ESTs//4.6e-100:483:97//Hs.34940:AI264314

[22618] R-HEMBA1002321//ESTs//2.3e-85:403:99//Hs.120388:AA723595

[22619] R-HEMBA1002328//ESTs//1.3e-90:423:100//Hs.117936:AI280818

[22620] R-HEMBA1002337//ESTs//8.7e-24:147:93//Hs.9893:AA007679

[22621] R-HEMBA1002341//Homo sapiens mRNA for KIAA0771 protein, partial cds//7.8e-130:642:96//Hs.6162:AB018314

[22622] R-HEMBA1002348//ESTs//5.0e-71:387:93//Hs.30494:H04822

[22623] R-HEMBA1002349//ESTs//9.7e-88:420:98//Hs.132972:AA543094

[22624] R- nnnnnnnnnnnn//Homo sapiens chromosome-associated protein-E (hCAP-E) mRNA, complete cds//3.9e-1123:661:9311Hs.19023:AF092563

[22625] R-HEMBA1002381//ESTs//1.3e-73:352:99//Hs.56121:AA781435

[22626] R-HEMBA1002389//EST//2.3e-05:132:69//Hs.37558:H58237

[22627] R-HEMBA1002417//Homo sapiens chromosome 19, cosmid R28784//3.9e-63:358:91//Hs.25527:AC005954

[22628] R-HEMBA1002419//ESTs, Weakly similar to APKI antigen [H. sapiens]//5.6e-87:429:96//Hs.13209:AI417849

[22629] R-HEMBA1002430//ESTs//1.10:388:57//Hs.119238:AA476267

[22630] R-HEMBA1002439//Human mRNA for KIAA0080 gene, partial cds//2.0e-22:181:80//Hs.74554:D38522

[22631] R-HEMBA1002458//ESTs//1.8e-88:448:95//Hs.97914:AA769069

[22632] R-HEMBA1002460//Catalase//0.67:314:60//Hs.76359:X04085

[22633] R-HEMBA1002462//EST//0.032:44:88//Hs.161536:N80395

[22634] R-nnnnnnnnnnnn//ESTs, Weakly similar to F08G12.1 [C. elegans]//5.4e-95:488:95//Hs.108115:AA582193

[22635] R-HEMBA1002477//Homo sapiens KIAA0395 mRNA, partial cds//2.5e-37:281:80//Hs.43681:AL022394

[22636] R-HEMBA1002486//Small inducible cytokine A5 (RANTES)//1.1e-49:311:88//Hs.155464:AF088219

[22637] R-HEMBA1002495//ESTs//1.2e-94:457:98//Hs.42140:AI188995

[22638] R-HEMBA1002498//ESTs//1.7e-35:240:78//Hs.119871:AA705133

[22639] R-HEMBA1002503//ESTs//2.3e-14:64:85//Hs.140190:AA701449

[22640] R-HEMBA1002508//ESTs//0.00057:160:62//Hs.149661:AA872990

[22641] R-nnnnnnnnnnnn//Homo sapiens mRNA for histone deacetylase-like protein (JM21)//2.3e-113:456:92//Hs.6764:AJ011972

[22642] R-HEMBA1002515//EST//1.0:153:63//Hs.118045:N51715

[22643] R-HEMBA1002538//Homo sapiens mRNA for KIAA0454 protein, partial cds//5.1e-106:564:93//Hs.129928:AB007923

[22644] R-HEMBA1002542//ESTs//1.0e-101:539:93//Hs.93872:AA524700

[22645] R-HEMBA1002547//EST//8.7e-27:151:96//Hs.132145:AI041804

[22646] R-HEMBAI1002552//EST//5.9e-49:335:85//Hs.149580:AI281881

[22647] R-HEMBA1002555//ESTs//1.1e-77:461:91//Hs.38750:N30012

[22648] R-HEMBA1002558//Homo sapiens 4F5S mRNA, complete cds//1.3e-42:264:89//Hs.32567:AF073519

[22649] R-HEMBA1002561//Small inducible cytokine A5 (RANTES)//6.4e-40:196:78//Hs.155464:AF088219

[22650] R-nnnnnnnnnnnn//Homo sapiens protein associated with Myc mRNA, complete cds//1.4e-120:587:97//Hs.151411:AF075587

[22651] R-HEMBA1002583//ESTs//7.1e-79:410:95//Hs.21599:AA478904

[22652] R-HEMBA1002590//EST//3.3e-54:278:97//Hs.138637:N20838

[22653] R-HEMBA1002592//ESTs//2.6e-44:500:74//Hs.110934:N26055

[22654] R-HEMBA1002621

[22655] R-HEMBA1002624//Homo sapiens mRNA for KIAA0808 protein, complete cds//2.2e-77:380:97//Hs.91338:AB018351

[22656] R-HEMBA1002628//ESTs//0.0020:167:66//Hs.140605:AA830881

[22657] R-HEMBA1002629//ESTs//0.00014:50:100//Hs.119132:AA398715

[22658] R-HEMBA1002645//EST//2.1e-37:285:82//Hs.141728:W73041

[22659] R-HEMBA1002651//EST//2.2e-23:374:69//Hs.139357:AA420970

[22660] R-HEMBA1002659//Human 53K isoform of Type II phosphatidylinositol-4-phosphate 5-kinase (PIPK) mRNA, complete cds//1.5e-53:406:81//Hs.108966:U48696

[22661] R-HEMBA1002661//Homo sapiens mRNA for KIAA0764 protein, complete cds//1.1e-41:296:84//Hs.6232:AB018307

[22662] R-HEMBA1002666//EST//4.4e-09:79:88//Hs.72015:AA151945

[22663] R-HEMBA1002678//EST, Moderately similar to !!!! ALU SUBFAMILY J WARNING ENTRY !!!! [H. sapiens]//7.6e-104:560:92//Hs.161748:T64896

[22664] R-nnnnnnnnnnnn//EST//0.15:1536:69//Hs.129570:AA995396

[22665] R-HEMBA1002688//T-CELL SURFACE PROTEIN TACTILE PRECURSOR//.16:247:62//Hs.142023:M88282

[22666] R-HEMBA1002696//ESTs//3.5e-94:529:92//Hs.16725:AA196477

[22667] R-HEMBA1002712//Homo sapiens mRNA for KIAA0772 protein, complete cds//6.0e-46:302:86//Hs.15519:AB018315

[22668] R-HEMBA1002716//ESTs//1.3e-109:555:96//Hs.9812:AA147884

[22669] R-HEMBA1002728//Homo sapiens mRNA for KIAA0621 protein, partial cds//3.8e-37:287:81//Hs.132942:AB014521

[22670] R-HEMBA1002730//ESTs//1.2e-95:488:95//Hs.22030:AA521168

[22671] R-HEMBA1002742//ESTs//1.0e-91:437:99//Hs.139987:AA652163

[22672] R-HEMBA1002746//ESTs//4.4e-97:468:98//Hs.129903:AA576526

[22673] R-HEMBA1002748//ESTs//5.0e-98:475:98//Hs.125461:AI375792

[22674] R-HEMBA1002750//ESTs//1 .6e-42:223:97//Hs.40460:N36090

[22675] R-HEMBA1002768//Homo sapiens mRNA for KIAA0554 protein, partial cds//4.0e-106:545:95//Hs.74750:AB011126

[22676] R-HEMBA1002770//EST//0.34:294:59//Hs.43091:N22127

[22677] R-HEMBA1002777//ESTs//3.0e-85:316:98//Hs.17537:C06491

[22678] R-HEMBA1002779//Human mRNA for KIAA0013 gene, complete cds//0.25:342:58//Hs.48824:D87717

[22679] R-HEMBA1002780//Homo sapiens DEC-205 mRNA, complete cds//4.2e-46:449:75//Hs.153563:AF011333

[22680] R-HEMBA1002794//ESTs//1.2e-115:559:97//Hs.79741:AI279709

[22681] R-HEMBA1002801//EST//0.00049:287:60//Hs.126466:AA913320

[22682] R-HEMBA1002810//Homo sapiens formin binding protein 21 mRNA, complete cds//1 .4e-116:559:97//Hs.28307:AF071185

[22683] R-HEMBA1002816//Human plectin (PLECI) mRNA, complete cds//0.28:281:62//Hs.79706:U53204

[22684] R-HEMBA1002826//EST//6.7e-25:134:99//Hs.134683:AI092013

[22685] R-HEMBA1002833//ESTs, Highly similar to ribosome-binding protein p34 [R. norvegicus]//4.3e-25:137:98//Hs.5337:AA243757

[22686] R-HEMBA1002850//ESTs//0.010:323:57//Hs.18282:W67514

[22687] R-HEMBA1002863//ESTs//1.1e-67:359:94//Hs.124699:W27830

[22688] R-HEMBA1002876//ESTs//0.72:202:62//Hs.144816:AI220827

[22689] R-HEMBA1002886//EST//3 .2e-85:401:99//Hs.96580:AA405670

[22690] R-HEMBA1002896//Homo sapiens SH3-containing adaptor molecule-1 mRNA, complete cds//1.2e-107:541:95//Hs.33787:AF037261

[22691] R-HEMBA1002921//Human mRNA for KIAA0089 gene, complete cds//0.84:103:71//Hs.95140:D80011

[22692] R-HEMBA1002924//ESTs//3 .5e-86:423:98//Hs.27513:N34820

[22693] R-HEMBA1002934//Human mRNA for KIAA0118 gene, partial cds//2.1e-50:308:88//Hs.154326:D42087

[22694] R-HEMBA1002935//ESTs//1.0e-73:384:95//Hs.118193:N74481

[22695] R-HEMBA1002937//ESTs//0.052:167:65//Hs.145504:AI254165

[22696] R-HEMBA1002939//ESTs//1 .6e-94:467:97//Hs.9893:AA007679

[22697] R-HEMBA1002944//ESTs//2.7e-17:176:80//Hs.143768:AA229732

[22698] R-HEMBA1002951//ESTs//3.7e-119:565:98//Hs.16218:AI190892

[22699] R-HEMBA1002954//EST//0.076:285:58//Hs.98706:AA431085

[22700] R-HEMBA1002968//Thiopurine S-methyltransferase//1.9e-46:314:85//Hs.51124:AF019369

[22701] R-HEMBA1002970//EST//0.00050:164:64//Hs.129630:AI000405

[22702] R-HEMBA1002971//Homo sapiens mRNA for KIAA0679 protein, partial cds//2.3e-30:162:99//Hs.5734:AB014579

[22703] R-HEMBA1002973//Small inducible cytokine A5 (RANTES)//5.7e-42:318:81//Hs.155464:AF088219

[22704] R-nnnnnnnnnnnn//ESTs3.2e-18:02:100//Hs.146255:AA197064

[22705] R-HEMBA1002999//ESTs, Moderately similar to lamina associated polypeptide IC [R. norvegicus]//7.9e-113:560:96//Hs.125749:AI377682

[22706] R-HEMBA1003021//Homo sapiens PYRIN (MEFV) mRNA, complete cds//3.3e-42:290:85//Hs.113283:AF018080 50 R-HEMBA1003033//ESTs//2.8e-77:417:94//Hs.138860:W47480

[22707] R-HEMBA1003034//ESTs//3 .7e-42:429:74//Hs.132818:AI038577

[22708] R-HEMBA1003035//ESTs//0.025:156:64//Hs.8473:T40827

[22709] R-HEMBA1003037//ESTs//0.69:381:57//Hs.47312:AI240366

[22710] R-HEMBA1003041//ESTs, Highly similar to PUTATIVE SERINE/THREONINE-PROTEIN KINASE C41C4.4 IN CHROMOSOME II PRECURSOR [Caenorhabditis elegans]//5.6e-34:280:79//Hs.114905:AA088442

[22711] R-HEMBA1003046//Homo sapiens mitochondrial processing peptidase beta-subunit mRNA, complete cds//1.3e-119:578:97//Hs.44097:AF054182

[22712] R-HEMBA1003064//ESTs//7.8e-85:419:96//Hs.87020:AA706627

[22713] R-HEMBA1003067//Von Hippel-Lindau syndrome//2.0e-30:299:75//Hs.78160:AF010238

[22714] R-HEMBA1003071//ESTs//2.3e-74:360:98//Hs.17270:AA701903

[22715] R-HEMBA1003077//ESTs, Weakly similar to KIAA0405 [H. sapiens]//1.1e-90:434:99//Hs.14146:W92235

[22716] R-HEMBA1003078//ESTs//5.9e-16:156:77//Hs.142684:AA902402

[22717] R-HEMBA1003079//ESTs//0.16:341:58//Hs.95923:AI075249

[22718] R-HEMBA1003083//Small inducible cytokine A5 (RANTES)//1.9e-39:284:83//Hs.155464:AF088219

[22719] R-HEMBA1003086//EST//1.0e-48:372:82//Hs.161917:AA483223

[22720] R-HEMBA1003096//ESTs, Weakly similar to Mouse 19.5 mRNA, complete cds [M. musculus]//4.2e-1100:531:94//Hs.104800:AA709155

[22721] R-HEMBA1003098//ESTs//4.2e-107:537:96//Hs.107213:AA121624

[22722] R-HEMBA1003117//ESTs//2.4e-67:331:97//Hs.157158:AI150058

[22723] R-HEMBA1003129//Human nucleolar fibrillar center protein (ASE-1) mRNA, complete cds//2.1e-13:109:88//Hs.118717:U86751

[22724] R-HEMBA1003133//ESTs//1.1e-34:180:98//Hs.159387:AI370845

[22725] R-HEMBA1003136//ESTs, Weakly similar to MANNOSE-1-PHOSPHATE GUANYLTRANSFERASE [Saccharomyces cerevisiae]//9.2e-114:577:95//Hs.27059:AI088615

[22726] R-HEMBA1003142//Small inducible cytokine A5 (RANTES)//1.1e-45:285:88//Hs.155464:AF088219

[22727] R-HEMBA1003148//Homo sapiens mRNA for dachshund protein//3.6e-118:586:96//Hs.63931:AJ005670

[22728] R-HEMBA1003166//ESTs//1.6e-96:479:96//Hs.119940:AA705933

[22729] R-HEMBA1003175//ESTs//2.7e-74:407:92//Hs.139167:AA715389

[22730] R-HEMBA1003197//ESTs//1.6e-68:384:94//Hs.120969:W92000

[22731] R-HEMBA1003199//Sjogren syndrome antigen B (autoantigen La)//0.19:328:57//Hs.83715:X69804

[22732] R-HEMBA1003202//Homo sapiens mRNA for KIAA0640 protein, partial cds//1.3e-40:290:83//Hs.153026:AB014540

[22733] R-HEMBA1003204//ESTs//1 .1e-34:215:91//Hs.108090:AA424943

[22734] R-HEMBA1003212//ESTs//1.9e-81:441:93//Hs.28471:W20265

[22735] R-HEMBA1003220//ESTs, Weakly similar to MITOCHONDRIAL 40S RIBOSOMAL PROTEIN S28 PRECURSOR [S. cerevisiae]//1.6e-40:232:93//Hs.107707:N32817

[22736] R-HEMBA1003222//ESTs, Weakly similar to weak similarity to HSP90 [C. elegans]//1.1e-42:310:85//Hs.23294:W27666

[22737] R-HEMBA1003229//ESTs//4.8e-18:133:90//Hs.61763:AA035305

[22738] R-HEMBA1003235//ESTs//7.7e-35:201:78//Hs.163979:AA828834

[22739] R-HEMBA1003250//Homo sapiens p21-activated kinase 3 (PAK3) mRNA, complete cds//7.4e-05:534:58//Hs.152663:AF068864

[22740] R-HEMBA1003257//EST//1.4e-95:473:97//Hs.32443:H28929

[22741] R-HEMBA1003273//Small inducible cytokine A5 (RANTES)//2.6e-38:253:86//Hs.155464:AF088219

[22742] R-HEMBA1003276//ESTs//7.6e-55:269:99//Hs.23817:AA526392

[22743] R-HEMBA1003278//ESTs//2.6e-45:301:71//Hs.51652:AI084785

[22744] R-HEMBA1003281

[22745] R-HEMBA1003291//Homo sapiens mRNA for KIAA0537 protein, complete cds//9.7e-117:551:99//Hs.12836:AB011109

[22746] R-HEMBA1003296//ESTs//4.8e-17:210:72//Hs.44451:AA203266

[22747] R-HEMBA1003304//ESTs//2.8e-98:468:98//Hs.120849:AI148353

[22748] R-HEMBA1003309//ESTs//1.8e-97:455:99//Hs.11571:AA713504

[22749] R-HEMBA1003314//Homo sapiens mRNA for leucine zipper bearing kinase, complete cds//8.9e-113:545:97//Hs.124224:AB001872

[22750] R-HEMBA1003322//ESTs//4.9e-79:419:95//Hs.138760:N66869

[22751] R-HEMBA1003327//Homo sapiens clone 23622 mRNA sequence//1.4e-16:177:78//Hs.151608:AF052119

[22752] R-HEMBAI1003328//H. sapiens mRNA for MACH-alpha-2 protein//2.1e-43:269:88//Hs.19949:X98173

[22753] R-HEMBA1003330//Homo sapiens poly(A) binding protein II (PABP2) gene, complete cds//0.66:64:76//Hs.117176:AF026029

[22754] R-HEMBA1003348//ESTs//1.4e-35:185:78//Hs.117879:H77357

[22755] R-HEMBA1003369//ESTs, Weakly similar to F59C6.9 [C. elegans]//3.2e-113:553:97//Hs.65539:AI148540

[22756] R-HEMBA1003370//ESTs//2.0e-46:319:86//Hs.37573:H59651

[22757] R-HEMBA1003373//ESTs//1.6e-31:136:81//Hs.114849:AI139588

[22758] R-HEMBA1003376//ESTs//3.0e-47:383:80//Hs.138852:AA284247

[22759] R-HEMBA1003380//ESTs, Moderately similar to !!!! ALU SUBFAMILY J WARNING ENTRY !!!! [H. sapiens]//1.8e-11:261:65//Hs.87578:AI125363

[22760] R-HEMBA1003384//EST//0.00013:82:75//Hs.141237:H57847

[22761] R-HEMBA1003395//ESTs//5.2e-78:379:98//Hs.162208:AA536127

[22762] R-HEMBA1003402//ESTs//8.6e-14:108:89//Hs.55424:AA774204

[22763] R-nnnnnnnnnnnn//ESTs 1.7e-24:188:85//Hs.70266:Z78309

[22764] R-HEMBA1003417//ESTs//4.2e-74:396:94//Hs.55220:D11563

[22765] R-HEMBA1003418//ESTs//3.1e-107:545:95//Hs.3494:AI421013

[22766] R-HEMBA1003433//Homo sapiens nibrin (NBS) mRNA, complete cds//3.2e-115:544:98//Hs.25812:AF058696

[22767] R-HEMBA1003461//ESTs//2.8e-62:304:99//Hs.148747:AI225121

[22768] R-HEMBA1003463//ESTs//2.3e-112:549:97//Hs.104627:AA885516

[22769] R-HEMBA1003480//Homo sapiens PYRIN (MEFV) mRNA, complete cds//7.7e-76:529:84//Hs.113283:AF018080

[22770] R-HEMBA1003528//ESTs//2.1e-59:312:96//Hs.22505:R41688

[22771] R-HEMBA1003531//ESTs//2.2e-17:116:93//Hs.140217:AA702760

[22772] R-HEMBA1003538//Complement component C1r//4.7e-25:333:68//Hs.1279:M 14058

[22773] R-HEMBA1003545//ESTs//8.7e-89:432:98//Hs.99497:AA776817

[22774] R-HEMBA1003548//EST//0.0091:274:60//Hs.148336:AA911673

[22775] R-HEMBA1003555//ESTs, Weakly similar to NUCLEOTIDE-BINDING PROTEIN [H. sapiens]//2.8e-93:495:93//Hs.91619:AA552351

[22776] R-HEMBA1003556//ESTs//7.1e-44:406:77//Hs.141575:AA211734

[22777] R-HEMBA1003560//ESTs//4.0e-34:182:97//Hs.14811:AA434522

[22778] R-HEMBA1003568//ESTs//2.0e-1:486:98//Hs.118570:AI342058

[22779] R-HEMBA1003569//ESTs, Moderately similar to metastasis-associated gene [H. sapiens]//4.0e-63:343:93//Hs.58598:AA625440

[22780] R-HEMBA1003571//Homo sapiens clone 23632 mRNA sequence//3.7e-47:338:84//Hs.46918:AF052099

[22781] R-HEMBA1003579//EST//0.00057:239:60//Hs.162828:AA643892

[22782] R-HEMBA1003581//ESTs//2.6e-10:l 18:79//Hs.44856:N37065

[22783] R-HEMBA1003591//ESTs//2.4e-96:460:98//Hs.128741:AI244212

[22784] R-HEMBA1003595//Human mRNA for KIAA0118 gene, partial cds//1.7e-48:421:78//Hs.154326:D42087

[22785] R-HEMBA1003597//EST//1.6e-38:313:80//Hs.160911:AI371042

[22786] R-HEMBA1003598//ESTs//0.0085:273:61//Hs.145333:AI251374

[22787] R-HEMBA1003615

[22788] R-HEMBA1003617//ESTs//1.0e-11:574:95//Hs.4552:W68167

[22789] R-HEMBA1003621//EST//1.7e-31:288:78//Hs.140909:R49387

[22790] R-HEMBA1003622//EST//1.1e-46:468:75//Hs.139093:AA166888

[22791] R-HEMBA1003630//ESTs//1.4e-21:411:69//Hs.128729:AA973021

[22792] R-HEMBA1003637//ESTs, Weakly similar to !!!! ALU SUBFAMILY SB WARNING ENTRY !!!! [H. sapiens]//9.3e-24:189:84//Hs.142208:AA209438

[22793] R-HEMBA1003640//ISLET AMYLOID POLYPEPTIDE PRECURSOR//2.5e-42:332:81//Hs.51048:X68830

[22794] R-HEMBA1003645//ESTs//2.4e-77:423:94//Hs.99539:R59010

[22795] R-HEMBA1003646//ESTs//2.6e-98:549:91//Hs.96427:AA151783

[22796] R-HEMBA1003656//Homo sapiens mRNA, chromosome I specific transcript KIAA0488//5.6e-44:245:77//Hs.67619:AB007957

[22797] R-HEMBA1003662//Human TBX2 (TXB2) mRNA, complete cds//2.6e-17:144:84//Hs.32931:U28049

[22798] R-HEMBA1003667//Farnesyltransferase, CAAX box, beta//1.3e-22:170:88//Hs.117596:L00635

[22799] R-HEMBA1003679//ESTs, Weakly similar to trithorax homolog HTX, version 2 [H. sapiens]//4.1e-87:434:97//Hs.9489:R84329

[22800] R-HEMBA1003680//Human DNA-binding protein (HRC1) mRNA, complete cds//0.86:315:61//Hs.72925:M91083

[22801] R-HEMBA1003684//ESTs, Highly similar to ZINC FINGER PROTEIN 7 [Homo sapiens]//1.1e-101:528:95//Hs.22934:AA581379

[22802] R-HEMBA1003690//ESTs//0.0021:119:69//Hs.98641:AA429916

[22803] R-HEMBA1003692//Human cytochrome P450-IIB (hIIB3) mRNA, complete cds//2.0e-43:360:80//Hs.110194:M29873

[22804] R-HEMBA1003711//ESTs//1.0e-70:375:94//Hs.150407:AI279064

[22805] R-HEMBA1003714//VASOACTIVE INTESTINAL POLYPEPTIDE RECEPTOR 1 PRECURSOR//0.94:367:62//Hs.1139:X77777

[22806] R-HEMBA1003715//Homo sapiens PYRIN (MEFV) mRNA, complete cds//5.1e-77:299:85//Hs.113283:AF018080

[22807] R-HEMBA1003720//Homo sapiens TWIK-related acid-sensitive K+channel (TASK) mRNA, complete cds//1.2e-33:377:74//Hs.24040:AF006823

[22808] R-HEMBA1003725//ESTs//3.8e-103:481:99//Hs.122518:AA778847

[22809] R-HEMBA1003729//ESTs//2.5e-51:277:95//Hs.26270:AA258839

[22810] R-HEMBA1003733//ESTs//1.9e-69:350:96//Hs.139278:AA702592

[22811] R-HEMBA1003742//ESTs, Moderately similar to T13H5.2 [C. elegans]//4.6e-70:348:96//Hs.11282:AI147040

[22812] R-HEMBA1003758//ESTs//1.7e-52:306:85//Hs.138852:AA284247

[22813] R-HEMBA1003760//ESTs//7.4e-76:420:93//Hs.26501:H05089

[22814] R-HEMBA1003773//ESTs, Highly similar to SIGNAL RECOGNITION PARTICLE RECEPTOR BETA SUBUNIT [Mus musculus]//1.9e-77:364:100//Hs.12152:AA156214

[22815] R-HEMBA1003783//ESTs, Weakly similar to COIH6.7 [C. elegans]//2.1e-101:558:93//Hs.18171:AA524327

[22816] R-HEMBA1003784//EST//0.83:127:62//Hs.144002:FO1600

[22817] R-HEMBA1003799//EST//9.7e-30:362:71//Hs.156577:AA860236

[22818] R-HEMBA1003803//ESTs, Weakly similar to Y53C12A.3 [C. elegans]//2.8e-16:93:100//Hs.107747:AI357868

[22819] R-HEMBA1003804//Interleukin 15//0.13:227:62//Hs.111867:AB007295

[22820] R-HEMBA1003805//ESTs//0.029:199:65//Hs.91582:T25344

[22821] R-HEMBA1003807//EST//2.4e-13:137:81//Hs.145645:AI264163

[22822] R-HEMBA1003836//Small inducible cytokine A5 (RANTES)//3.2e-39:284:83//Hs.155464:AF088219

[22823] R-HEMBA1003838//ESTs, Weakly similar to NADH-UBIQUINONE OXIDOREDUCTASE CHAIN 2 [Paramecium tetraurelia]//6.5e-71:357:96//Hs.107573:AA524333

[22824] R-HEMBA1003856//ESTs//8.2e-20:266:71//Hs.48312:N68161

[22825] R-HEMBA1003864//ESTs//1.6e-99:528:93//Hs.26890:AA449033

[22826] R-HEMBA1003866//POLYPOSIS LOCUS PROTEIN 1//0.30:146:64//Hs.74648:M73547

[22827] R-HEMBA1003879//EST, Weakly similar to DNA-REPAIR PROTEIN COMPLEMENTING XP-A CELLS [Homo sapiens]//2.1e-59:295:98//Hs.161661:AA166911

[22828] R-HEMBA1003880//Homo sapiens clone 24760 mRNA sequence//3.8e-34:286:79//Hs.61408:AF070621

[22829] R-HEMBA1003885//ESTs//4.6e-50:293:90//Hs.142314:AA347930

[22830] R-HEMBA1003893//Calcium modulating ligand//2.l e-43:294:86//Hs.13572:AF068179

[22831] R-HEMBA1003902//ESTs//1.8e-43:300:85//Hs.146811:AA410788

[22832] R-HEMBA1003908//ESTs//3.5e-91:477:94//Hs.6638:AA536187

[22833] R-HEMBA1003926//ESTs//7.9e-44:294:87//Hs.164036:AA845659

[22834] R-HEMBA1003937//Homo sapiens mRNA for KIAA0585 protein, partial-cds//3.5e-48:276:81//Hs.72660:AB011157

[22835] R-HEMBA1003939

[22836] R-HEMBA1003942//ESTs//1.6e-81:428:94//Hs.50418:AA524669

[22837] R-HEMBA1003950//ESTs//8.1e-54:283:95//Hs.145528:AI261545

[22838] R-HEMBA1003953//ESTs//3.8e-30:194:89//Hs.99681:AA504591

[22839] R-HEMBA1003958//ESTs//4.0e-45:394:77//Hs.141602:N63562

[22840] R-HEMBA1003959//ESTs//5.2e-28:197:86//Hs.9951:W56253

[22841] R-HEMBA1003976//ESTs//2.0e-29:232:84//Hs.133947:AI074525

[22842] R-HEMBA1003978//ESTs//3.2e-115:549:98//Hs.76798:AI050882

[22843] R-HEMBA1003985//ESTs, Weakly similar to !!!! ALU SUBFAMILY J WARNING ENTRY !!!! [H. sapiens]//2.2e-91:448:97//Hs.117834:AA766771

[22844] R-HEMBA1003987//ESTs//8.1e-36:193:88//Hs.151844:N92756

[22845] R-HEMBA1003989//Human mRNA for KIAA0241 gene, partial cds//3.6e-43:360:81//Hs.150275:D87682

[22846] R-HEMBA1004000//EST//5.5e-62:308:97//Hs.50438:N74105

[22847] R-HEMBA1004010//ESTs//8.6e-85:431:96//Hs.36185:R99899

[22848] R-HEMBA1004012//ESTs//1.3e-40:309:83//Hs.140329:AA714011

[22849] R-HEMBA1004015//ESTs//5.1e-97:453:99//Hs.111446:AI333774

[22850] R-HEMBA1004024//ESTs//5.2e-19:159:79//Hs.138856:H47461

[22851] R-HEMBA1004038//ESTs//1.3e-41:346:79//Hs.146173:AA906191

[22852] R-HEMBA1004042//ESTs//0.0012:201:69//Hs.24248:AA528253

[22853] R-HEMBA1004045//ESTs, Weakly similar to putative p150 [H. sapiens]//1.5e-22:365:70//Hs.99692:AA811804

[22854] R-HEMBA1004048//ESTs//9.5e-104:497:98//Hs.77735:AI125469

[22855] R-HEMBA1004049//HEAT SHOCK 70 KD PROTEIN 1//6.3e-31:176:96//Hs.8997:M11717

[22856] R-HEMBA1004055//ESTs//1.7e-115:577:96//Hs.59503:W63754

[22857] R-HEMBA1004056//Homo sapiens PYRIN (MEFV) mRNA, complete cds//5.2e-78:577:82//Hs.113283:AF018080

[22858] R-HEMBA1004074//EST//1.0:152:61//Hs.149093:AI243988

[22859] R-HEMBA1004086//ESTs//4.0e-53:266:98//Hs.34658:N98652

[22860] R-HEMBA1004097//ESTs//4.4e-46:279:91//Hs.110533:H 16251

[22861] R-HEMBA1004131//Human mRNA for KIAA0128 gene, partial cds//3.0e-43:534:69//Hs.90998:D50918

[22862] R-HEMBA1004132//ESTs//4.6e-47:316:86//Hs.141602:N63562

[22863] R-HEMBA1004133

[22864] R-HEMBA1004138//EST//1.7e-08:211:64//Hs.129189:AA988736

[22865] R-HEMBA1004143//ESTs//4.0e-25:137:97//Hs.21307:AA203320

[22866] R-HEMBA1004146//Small inducible cytokine A5 (RANTES)//4.1e-27:191:86//Hs.155464:AF088219

[22867] R-HEMBA1004150//GRANCALCIN//0.99:357:59//Hs.79381:M81637

[22868] R-HEMBA1004164//Human mRNA for KIAA0118 gene, partial cds//9.5e-47:313:84//Hs.154326:D42087

[22869] R-HEMBA1004168//Homo sapiens geminin mRNA, complete cds//7.7e-112:563:96//Hs.59988:AF067855

[22870] R-HEMBA1004199

[22871] R-HEMBA1004200//EST//3 .1e-89:441:97//Hs.141173:R97701

[22872] R-HEMBA1004202//ESTs, Weakly similar to GTP-BINDING PROTEIN YPTMI [Zea mays]//1.7e-107:552:94//Hs.10092:AI189282

[22873] R-HEMBA1004203//Homo sapiens mRNA for KIAA0618 protein, complete cds//1.5e-96:275:98//Hs.15832:AB014518

[22874] R-HEMBA1004207//Leptin receptor//1.1e-117:573:97//Hs.54515:U50748

[22875] R-HEMBA1004225//EST//9.7e-34:186:95//Hs.137567:R20617

[22876] R-HEMBA1004227//ESTs, Moderately similar to !!!! ALU SUBFAMILY SQ WARNING ENTRY !!!! [H. sapiens]//4.0e-16:117:91//Hs.92033:AA255832

[22877] R-HEMBA1004238//Human mRNA for KIAA0355 gene, complete cds//3.0e-46:338:83//Hs.153014:AB002353

[22878] R-HEMBA1004241//ESTs//1.3e-10:93:87//Hs.137511:AA456389

[22879] R-HEMBA1004246//Homo sapiens LIM protein mRNA, complete cds//2.7e-43:511:72//Hs.154103:AF061258

[22880] R-HEMBA1004248//ESTs, Highly similar to INSULIN-INDUCED GROWTH RESPONSE PROTEIN CL-6 [Rattus norvegicus]//2.1e-61:221:86//Hs.7089:W37284

[22881] R-HEMBA1004264//ESTs//1.5e-80:425:95//Hs.107206:AA234962

[22882] R-HEMBA1004267//ESTs, Moderately similar to !!!! ALU SUBFAMILY SP WARNING ENTRY!!!! [H. sapiens]//1.4e-89:465:95//Hs.113660:D20018

[22883] R-HEMBA1004272//ESTs//4.5e-111:577:94//Hs.115696:N57931

[22884] R-nnnnnnnnnnnn//Homo sapiens clone 617 unknown mRNA, complete sequence//1.4e-111:553:96//Hs.93677:AF091081

[22885] R-HEMBA1004276//ESTs, Highly similar to BETA-ADAPTIN [Homo sapiens; Rattus norvegicus; Bos taurus]//4.4e-92:559:89//Hs.28298:AA203228

[22886] R-HEMBA1004286//Homo sapiens TGF beta receptor associated protein-1 mRNA, complete cds//6.2e-108:538:97//Hs.101766:AF022795

[22887] R-HEMBA1004289//Sulfotransferase, dehydroepiandrosterone (DHEA)-preferring//1.7e-34:223:75//Hs.81884:U13061

[22888] R-HEMBA1004295//ESTs, Weakly similar to weakly similar to ANK repeat region of Fowlpox virus BamHI-orf7 protein [C. elegans]//3.6e-93:496:94//Hs.14337:AA534961

[22889] R-HEMBA1004306//ESTs//3.4e-26:363:68//Hs.70279:AA757426

[22890] R-HEMBA1004312//ESTs//4.8e-64:351:94//Hs.138611:H82679

[22891] R-HEMBA1004321//Zinc finger protein 44 (KOX 7)//2.6e-37:415:64//Hs.51199:X16281

[22892] R-HEMBA1004323//ESTs//2.1e-40:280:70//Hs.153300:AA928904

[22893] R-HEMBA1004327//ESTs//3.8e-72:343:99//Hs.151708:AA554714

[22894] R-HEMBA1004330//ESTs//4.0e-52:270:97//Hs.24654:AA456561

[22895] R-HEMBA1004334//ESTs//1.6e-46:234:98//Hs.47159:AI310231

[22896] R-HEMBA1004335//ESTs//1.9e-25:250:76//Hs.155880:AA703336

[22897] R-HEMBA1004341//ESTs//3 .7e-101:480:98//Hs.69321:AA633240

[22898] R-HEMBA1004353//Homo sapiens mRNA for c-myc binding protein, complete cds//1.3e-75:444:90//Hs.80686:D89667

[22899] R-HEMBA1004354//Human mRNA for KIAA0355 gene, complete cds//5.9e-39:286:831//Hs.153014:AB002353

[22900] R-HEMBA1004356//SINGLE-STRANDED DNA-BINDING PROTEIN MSSP-1//1.3e-107:576:93//Hs.55458:X77494

[22901] R-HEMBA1004366//ESTs//2.3e-94:524:91//Hs.111496:AA652869

[22902] R-HEMBA1004372//EST//0.27:198:60//Hs.162665:AA605057

[22903] R-HEMBA1004389//ESTs//4.1e-102:490:98//Hs.153708:AA687264

[22904] R-HEMBA1004394//ESTs//1 .5e-94:471:96//Hs.151647:AA002084

[22905] R-HEMBA1004396//Small inducible cytokine A5 (RANTES)//6.2e-41:285:83//Hs.155464:AF088219

[22906] R-HEMBA1004405//ESTs//2.0e-44:329:83//Hs.136839:H93717

[22907] R-HEMBA1004408//ESTs, Weakly similar to homologous to mouse Rsu-1 [H. sapiens]//6.1e-89:420:99//Hs.88365:AA648933

[22908] R-HEMBA1004429//ESTs, Weakly similar to homeotic protein protein zhx-1 [M. musculus]//3.0e-112:552:96//Hs.12940:AI123518

[22909] R-HEMBA1004433//Human Line-1 repeat mRNA with 2 open reading frames//2.9e-32:463:68//Hs.23094:M19503

[22910] R-HEMBA1004460//ESTs//2.0e-104:574:93//Hs.46848:AA195829

[22911] R-HEMBA1004461//ESTs//2.9e-102:503:981//Hs.16370:AA017033

[22912] R-HEMBA1004479//ELK 1, member of ETS oncogene family//1.1e-45:310:75//Hs.116549:AL009172

[22913] R-HEMBA1004482//ESTs//9.1e-05:322:62//Hs.34489:AA759306

[22914] R-HEMBA1004502//ESTs//6.9e-112:566:96//Hs.93985:N50034

[22915] R-HEMBA1004506//EST//5.3e-59:456:80//Hs.72412:AA160941

[22916] R-HEMBA1004507

[22917] R-HEMBA1004509//ESTs, Moderately similar to HYPOTHETICAL 52.2 KD PROTEIN IN MPR1-GCN20 INTERGENIC REGION [Saccharomyces cerevisiae]//2.9e-82:262:99//Hs.12820:AA004271

[22918] R-HEMBA1004534//ESTs, Highly similar to ENDOTHELIAL ACTIN-BINDING PROTEIN [Homo sapiens]//1.1e-43:281:89//Hs.58414:AA196947

[22919] R-HEMBA1004538//EST//3.3e-15:270:71//Hs.136667:AA707972

[22920] R-HEMBA1004554

[22921] R-HEMBA1004560//ESTs//8 .2e-25:179:88//Hs.96560:W22924

[22922] R-HEMBA1004573//ESTs, Moderately similar to ALR [H. sapiens]//1.0:305:60//Hs.30272:AA134913

[22923] R-HEMBA1004577//ESTs//7.9e-50:319:89//Hs.22660:AA582243

[22924] R-HEMBA1004586//ESTs//2.6e-73:384:96//Hs.9582:R39769

[22925] R-nnnnnnnnnnnn//ESTs//6.0e-22:190:82//Hs.42530:N41661

[22926] R-HEMBA1004610//ESTs//1.2e-91:438:98//Hs.47823:AA780767

[22927] R-HEMBA1004617//Homo sapiens mRNA, chromosome I specific transcript KIAA0501//4.6e-52:327:85//Hs.159897:AB007970

[22928] R-HEMBA1004629//ESTs//2.3e- 19:215:76//Hs.111995:AI375915

[22929] R-HEMBA1004631//ESTs//3.6e-99:470:98//Hs.49303:AA810785

[22930] R-HEMBA1004632//ESTs//1.0:128:66//Hs.159182:AA831152

[22931] R-HEMBA1004637//ESTs, Highly similar to HYPOTHETICAL 83.6 KD PROTEIN R05D3.2 IN CHROMOSOME III [Caenorhabditis elegans]//4.8e- 11:532:98//Hs.12263:AA282393

[22932] R-HEMBA1004638//ESTs//1.2e-66:341:95//Hs.122687:AI278454

[22933] R-HEMBA1004666//ESTs//2.1e-65:333:96//Hs.98873:AA625442

[22934] R-HEMBA1004669//ESTs//0.00039:116:74//Hs.138725:N76348

[22935] R-HEMBA1004670//ESTs//1.7e-16:16:89//Hs.56825:AI057560

[22936] R-HEMBA1004672//EST//6.7e-76:315:97//Hs.20821:R19368

[22937] R-HEMBA1004693//ESTs//6.4e-68:327:99//Hs.159066:AI093252

[22938] R-HEMBA1004697//ESTs//9.3e-98:467:98//Hs.62637:AA043562

[22939] R-HEMBA1004705//EST//0.0034:271:58//Hs.112503:AA599042

[22940] R-HEMBA1004709//EST//1.3e-55:392:85//Hs.149580:AI281881

[22941] R-HEMBA1004711//Small inducible cytokine A5 (RANTES)//1.9e-47:449:76//Hs.155464:AF088219

[22942] R-HEMBA1004725//EST//1.8e-71:424:88//Hs.155712:AI309235

[22943] R-HEMBA1004730//Homo sapiens clone 23892 mRNA sequence//2.1e-44:467:73//Hs.91916:AF035317

[22944] R-HEMBA1004733//EST//0.99:84:65//Hs.161372:AI423151

[22945] R-HEMBA1004734//ESTs//1.8e-82:421:96//Hs.21275:N73275

[22946] R-HEMBA1004736//Ataxia telangiectasia mutated (includes complementation groups A, C and D)//9.5e-39:296:82//Hs.51187:U82828

[22947] R-HEMBA1004748//ESTs//1.7e-43:166:861//Hs.37573:H59651

[22948] R-HEMBA1004751//ESTs//8.0e-23:155:88//Hs.149464:AI279428

[22949] R-HEMBA1004752//Thromboxane A2 receptor//2.7e-45:281:89//Hs.89887:D38081

[22950] R-HEMBA1004753//40S RIBOSOMAL PROTEIN S201/8.3e-67:475:84//Hs.8102:L06498

[22951] R-HEMBA1004756//ESTs//2.0e-81:384:99//Hs.129545:N68679

[22952] R-HEMBA1004758//EST//2.0e-43:367:80//Hs.133006:AI049504

[22953] R-HEMBA1004763//ESTs//2.0e-108:567:94//Hs.3757:W87380

[22954] R-HEMBA1004768//ESTs, Weakly similar to RETROVIRUS-RELATED POL POLYPROTEIN [Mus musculus]//1.4e-47:379:81//Hs.141273:H66705

[22955] R-HEMBA1004770//ESTs//0.0014:246:61//Hs.124857:AA687092

[22956] R-HEMBA1004771//ESTs//1.1e-12:323:63//Hs.124146:AA699633

[22957] R-HEMBA1004776//ESTs//2.5e-112:567:95//Hs.12680:W74476

[22958] R-HEMBA1004778//ESTs//1.4e-33:272:75//Hs.141123:AA848167

[22959] R-nnnnnnnnnnnn

[22960] R-HEMBA1004803//ESTs//1.0e-48:319:86//Hs.139231:W87732

[22961] R-HEMBA1004806

[22962] R-HEMBA1004807//ESTs//6.2e-77:362:100//Hs.140945:N47676

[22963] R-HEMBA1004816//EST//4.3e-18:246:72//Hs.150552:AI053784

[22964] R-HEMBA1004820//Human arginine-rich nuclear protein mRNA, complete cds//5.0e-14:141:85//Hs.80510:M74002

[22965] R-HEMBA1004847

[22966] R-HEMBA1004850//ESTs//1.2e-83:395:99//Hs.30925:AA577120

[22967] R-HEMBA1004863//ESTs//7.5e-21:204:79//Hs.35036:H95267

[22968] R-HEMBA1004864

[22969] R-HEMBA1004865//EST//6.7e-18:191:75//Hs.129944:AA429362

[22970] R-HEMBA1004880//EST//4.4e-70:346:98//Hs.145094:AA452409

[22971] R-HEMBA1004889//ESTs//4.8e-117:496:97//Hs.15641:W63676

[22972] R-HEMBA1004900//ESTs//1.2e-115:283:68//Hs.157606:AI357470

[22973] R-HEMBA1004909//ESTs//7.3e-44:366:79//Hs.140329:AA714011

[22974] R-HEMBA1004918//Human mRNA for KIAA0392 gene, partial cds//4.6e-50:313:89//Hs.40100:AB002390

[22975] R-HEMBA1004923//ESTs//0.013:162:64//Hs.143655:AI128388

[22976] R-HEMBA1004929//EST//2.3e-48:250:97//Hs.131589:AI025053

[22977] R-HEMBA1004930//Cytochrome P450, subfamily I (aromatic compound-inducible), polypeptide 2//1.2e-70:547:80//Hs.1361:M55053

[22978] R-HEMBA1004933//ESTs, Weakly similar to R06C7.6 [C. elegans]//5.3e-110:530:98//Hs.18029:AI422883

[22979] R-HEMBA1004934//ESTs//1.3e-103:522:96//Hs.40415:AA037215

[22980] R-HEMBA1004944//ESTs//6.0e-21:97:84//Hs.141973:N21434

[22981] R-HEMBA1004954//ESTs//7.9e-112:596:93//Hs.6226:W61007

[22982] R-HEMBA1004956//ESTs//3.1e-58:280:100//Hs.120750:AA741074

[22983] R-HEMBA1004960//ESTs//6.9e-89:476:93//Hs.163738:AA601040

[22984] R-HEMBA1004972//ESTs//3.0e-72:381:95//Hs.55014:AA934035

[22985] R-HEMBA1004973//ESTs//2.7e-91:441:98//Hs.28144:AI292065

[22986] R-HEMBA1004977//ESTs//2.0e-95:446:99//Hs.29690:AI168404

[22987] R-HEMBA1004978//Homo sapiens natural killer cell group 2-F (NKG2-F) mRNA, complete cds//0.43:187:67//Hs.129734:AJ001683

[22988] R-HEMBA1004980//Human mRNA for KIAA0331 gene, complete cds//6.4e-53:305:91//Hs.146395:AB002329

[22989] R-HEMBA1004983//ESTs//0.16:482:57//Hs.131929:AI021894

[22990] R-HEMBA1004995

[22991] R-HEMBA1005008//EST, Weakly similar to mariner transposase [H. sapiens]//6.9e-51:482:78//Hs.141601:N63520

[22992] R-HEMBA1005009//ESTs, Highly similar to ACTIN I [Naegleria fowleri]//3.8e-109:551:96//Hs.103180:AI365212

[22993] R-HEMBA1005019//Homo sapiens mRNA for KIAA0648 protein, partial cds//2.0e-105:542:94//Hs.31921:AB014548

[22994] R-HEMBA1005029//ESTs, Weakly similar to LINE-1 REVERSE TRANSCRIPTASE HOMOLOG [Homo sapiens]//8.4e-95:491:94//Hs.16085:AI261382

[22995] R-HEMBA1005035//Human mRNA for KIAA0033 gene, partial cds//2.3e-64:312:85//Hs.22271:D26067

[22996] R-HEMBA1005039//ESTs, Weakly similar to zinc finger protein [H. sapiens]//2.6e-48:443:78//Hs.139019:N99348

[22997] R-HEMBA1005047//ESTs, Highly similar to RAS-RELATED PROTEIN RAB-5A [Canis familiaris]//1 .2e-87:542:87//Hs.16258:AI376436

[22998] R-HEMBA1005050//ESTs//6.3e-46:311:86//Hs.159510:AA297145

[22999] R-HEMBA1005062//ESTs//1.1e-14:216:68//Hs.129935:AA994451

[23000] R-HEMBA1005066//Human clone 23574 mRNA sequence//2.2e-24:303:73//Hs.79385:U90905

[23001] R-HEMBA1005075//EST//0.65:214:62//Hs.133991:AI075789

[23002] R-HEMBA1005079//Human BENE mRNA, partial cds//1.9e-44:304:83//Hs.85889:U 17077

[23003] R-HEMBA1005083//ESTs//2.8e-74:356:98//Hs.132272:AI393958

[23004] R-HEMBA1005101//Homo sapiens SYT interacting protein SIP mRNA, complete cds//1.7e-111:545:96//Hs.11170:AF080561

[23005] R-HEMBA1005113//ESTs//1.1e-101:512:95//Hs.7972:AI052739

[23006] R-HEMBA1005123//Ley I-L//3.6e-58:519:77//Hs.37062:AC005952

[23007] R-HEMBA1005133//H. sapiens mRNA for MACH-alpha-2 protein//8.3e-46:309:85//Hs.19949:X98173

[23008] R-HEMBA1005149//Homo sapiens mRNA, chromosome 1 specific transcript KIAA0488//4.7e-36:394:75//Hs.67619:AB007957

[23009] R-HEMBA1005152//Homo sapiens antigen NY-CO-16 mRNA, complete cds//3.6e-32:362:77//Hs.132206:AF039694

[23010] R-HEMBAI1005159//EST//7.4e-47:252:94//Hs.134930:AI093397

[23011] R-HEMBA1005185//ESTs//5.2e-48:305:89//Hs.14920:AA910914

[23012] R-HEMBA1005201//ESTs//4.7e-58:293:97//Hs.23752:C05766

[23013] R-HEMBA1005202//ESTs//1.0:169:59//Hs.153423:All 98239

[23014] R-HEMBA1005219//Homo sapiens putative tumor suppressor protein (123F2) mRNA, complete cds//0.84:191:61//Hs.26931:AF061836

[23015] R-HEMBA1005223//ESTs//0.75:90:70//Hs.127446:AA167284

[23016] R-HEMBA1005232//EST//0.056:162:67//Hs.65649:F13687

[23017] R-HEMBA1005241//ESTs//3.6e-113:564:96//Hs.12770:W84331

[23018] R-HEMBA1005244//ESTs//6.4e-22:118:100//Hs.21396:AA114834

[23019] R-HEMBA1005251//ESTs//8.5e-36:213:92//Hs.161554:AA393896

[23020] R-HEMBA1005252//Homo sapiens mRNA for KIAA0585 protein, partial cds//6.1e-49:277:93//Hs.72660:AB011157

[23021] R-HEMBA1005274//ESTs//3.7e-65:322:98//Hs.105166:AA668862

[23022] R-HEMBA1005275//ESTs//2.1e-29:298:73//Hs.33393:R83391

[23023] R-HEMBA1005293//ESTs//3.5e-93:448:98//Hs.12066:AI208611

[23024] R-HEMBA1005296//ESTs//4.3e-33:168:100//Hs.13916:AI025750

[23025] R-HEMBA1005304//Small inducible cytokine A5 (RANTES)//2.8e-50:315:82//Hs.155464:AF088219

[23026] R-HEMBA1005311//Homo sapiens 4F5S mRNA, complete cds//1.3e-44:318:83//Hs.32567:AF073519

[23027] R-HEMBA1005314//ESTs//3.0e-103:491:98//Hs.41606:AI095046

[23028] R-HEMBA1005315//EST//1.9e-29:370:72//Hs.161483:N59169

[23029] R-HEMBA1005318//ESTs//3.9e-110:535:97//Hs.26771:AA126472

[23030] R-HEMBA1005331//Intercellular adhesion molecule 2//7.6e-39:256:87//Hs.83733:X15606

[23031] R-HEMBA1005353//ESTs//1.7e-81:406:96//Hs.155374:AI341467

[23032] R-HEMBA1005359//Homo sapiens neuronal thread protein AD7c-NTP mRNA, complete cds//4.7e-46:294:81//Hs.129735:AF010144

[23033] R-HEMBA1005367//Alcohol dehydrogenase 2 (class I), beta polypeptide//1.0:210:62//Hs.4:X03350

[23034] R-HEMBA1005372//ESTs//6.2e-95:451:99//Hs.135219:AI091653

[23035] R-HEMBA1005374//ESTs//1.5e-107:502:99//Hs.118208:AA947305

[23036] R-HEMBA1005389//Fc fragment of IgA, receptor for//1.0e-39:311:80//Hs.54486:X54150

[23037] R-HEMBA1005394//ESTs, Weakly similar to coded for by C. elegans cDNA yk30b3.5 [C. elegans]//4.0e-88:489:92//Hs.43864:AA131568

[23038] R-HEMBA1005403//EST//0.0011:78:75//Hs.127061:AA863278

[23039] R-HEMBA1005408//ESTs//3.2e-29:395:71//Hs.117532:AA676725

[23040] R-HEMBA1005410//ESTs//1.5e-18:271:70//Hs.144604:AI052059

[23041] R-HEMBA1005411//ESTs//1.1e-35:335:77//Hs.141181:R98757

[23042] R-HEMBA1005423//Homo sapiens cyclin-dependent kinase inhibitor (CDKN2C) mRNA, complete cds//1.8e-118:453:99//Hs.4854:AF041248

[23043] R-HEMBA1005426//Chromosome 1 specific transcript KIAA0491//0.25:264:61//Hs.136309:AB007960

[23044] R-HEMBA1005443//Homo sapiens (clone s153) mRNA fragment//1.7e-47:305:87//Hs.6445:L40391

[23045] R-HEMBA1005447//ESTs//5.7e-83:529:86//Hs.114253:AA745961

[23046] R-HEMBA1005468//ESTs//7.3e-23:249:73//Hs.61199:AA024494

[23047] R-HEMBA1005469//Human mRNA for KIAA0355 gene, complete cds//4.5e-45:320:85//Hs.153014:AB002353

[23048] R-HEMBA1005472//Human kpni repeat mma (cdna clone pcd-kpni-8), 3′ end//8.4e-73:464:87//Hs.103948:K00627

[23049] R-HEMBA1005475//ESTs//0.32:192:59//Hs.62694:AA100445

[23050] R-HEMBA1005497

[23051] R-HEMBA1005500//ESTs//2.2e-43:307:85//Hs.146811:AA410788

[23052] R-HEMBA1005506//75 kda infertility-related sperm protein [human, testis, mRNA Partial, 2427 nt]//0.11:295:60//Hs.62608:S58544

[23053] R-HEMBA1005508//ESTs//2.8e-55:319:93//Hs.50150:N90870

[23054] R-HEMBA1005511//ESTs, Weakly similar to similar to mouse MMR1 [C. elegans]//2.6e-82:387:99//Hs.67466:AI219740

[23055] R-HEMBA1005517//ESTs//4.6e-77:469:90//Hs.126787:AA203322

[23056] R-HEMBA1005518//ESTs//1.5e-108:561:94//Hs.123167:AA601045

[23057] R-HEMBA1005520//Putative mismatch repair/binding protein hMSH3//7.5e-44:179:84//Hs.42674:U61981

[23058] R-HEMBA1005526//ESTs//8.7e-46:308:86//Hs.146811:AA410788

[23059] R-HEMBA1005528//ESTs, Highly similar to POP2 PROTEIN [Saccharomyces cerevisiae]//8.6e-1115:578:95//Hs.17035:A1080471

[23060] R-HEMBA1005530//ESTs//1.5e-10:551:96//Hs.107294:W72350

[23061] R-HEMBA1005548//ESTs//1.7e-100:510:96//Hs.9115:N90926

[23062] R-HEMBA1005552//Interleukin 10//2.4e-38:306:80//Hs.2180:M57627

[23063] R-HEMBA1005558//ESTs, Weakly similar to unknown [S. cerevisiae]//5.3e-77:439:91//Hs.22897:R43193

[23064] R-HEMBA1005568//ESTs, Weakly similar to !!!! ALU SUBFAMILY J WARNING ENTRY !!!! [H. sapiens]//3.4e-31:182:76//Hs.133526:N21103

[23065] R-HEMBA1005570//ESTs//3 .3e-67:411:88//Hs.142245:AA489709

[23066] R-HEMBA1005576//EST//0.91:52:73//Hs.149518:AI280497

[23067] R-HEMBA1005577

[23068] R-HEMBA1005581//Homo sapiens mRNA for MEGF5, partial cds//3.1e-28:561:64//Hs.57929:AB011538

[23069] R-HEMBA1005582//ESTs//6.0e-73:371:97//Hs.103758:C06392

[23070] R-HEMBA1005583//ESTs//8.3e-79:413:95//Hs.62348:AA419539

[23071] R-HEMBA1005588//Human c-yes-1 mRNA//2.6e-52:403:83//Hs.75680:M15990

[23072] R-HEMBA1005593//ESTs//3.3e-30:139:80//Hs.142273:W37905

[23073] R-HEMBA1005595//ESTs//1.1e-97:454:100//Hs.27497:AI274820

[23074] R-HEMBA1005606//EST//1.0e-12:313:64//Hs.162402:AA573125

[23075] R-HEMBA1005609//ESTs//0.49:278:58//Hs.76235:W56390

[23076] R-HEMBA1005616//EST//1.3e-98:470:99//Hs.122230:AA781422

[23077] R-HEMBA1005621//ESTs, Weakly similar to MITOTIC MAD2 PROTEIN [S. cerevisiae]//2.8e-95:539:92//Hs.19400:AA662845

[23078] R-HEMBA1005627//Human mRNa for adipogenesis inhibitory factor//5.5e-38:317:78//Hs.1721:X58377

[23079] R-HEMBA1005631//Human mRNA for KIAA0393 gene, complete cds//2.3e-1:279:65//Hs.15245:AF041081

[23080] R-HEMBA1005632//EST//1.5e-10:181:70//Hs.120259:AA731522

[23081] R-HEMBA1005634//Homo sapiens mRNA for chemokine LEC precursor, complete cds//1.4e-25:234:80//Hs.10458:AF088219

[23082] R-HEMBA1005666//ESTs//2.3e-103:534:95//Hs.14512:AA205973

[23083] R-HEMBA1005670//ESTs//2.6e-39:166:81//Hs.139414:AI279477

[23084] R-HEMBA1005679//Esterase D/formylglutathione hydrolase//1.3e-50:322:88//Hs.82193:M13450

[23085] R-HEMBA1005680//Homo sapiens LIM protein mRNA, complete cds//3.3e-43:343:81//Hs.154103:AF061258

[23086] R-HEMBA1005685//Human homeodomain protein (Prox1) mRNA, complete cds//0.0050:235:64//Hs.159437:U44060

[23087] R-HEMBA1005699//Human putative EPH-related PTK receptor ligand LERK-8 (Eplg8) mRNA, complete cds//1.7e-47:376:84//Hs.26988:U66406

[23088] R-HEMBA1005705//ESTs//3.0e-53:259:99//Hs.55314:AA772055

[23089] R-HEMBA1005717//EST//2.5e-59:287:99//Hs.146870:AI159943

[23090] R-HEMBA1005732//Homo sapiens mRNA for cartilage-associated protein (CASP)//1.2e-45:398:79//Hs.155481:AJ006470

[23091] R-HEMBA1005737//ESTs//2.5e-57:416:83//Hs.23245:AA053815

[23092] R-nnnnnnnnnnnn//EST//0.098:125:68//Hs.136945:AA765672

[23093] R-HEMBA1005755//EST//2.2e-22:180:84//Hs.141488:N47096

[23094] R-HEMBA1005765//Human peptide transporter (HPEPT1) mRNA, complete cds//3.9e-47:404:80//Hs.2217:U21936

[23095] R-HEMBA1005780//ESTs//1.3e-106:512:97//Hs.11901:AA173974

[23096] R-HEMBA1005813//Homo sapiens mRNA for chemokine LEC precursor, complete cds//2.0e-33:195:84//Hs.10458:AF088219

[23097] R-HEMBA1005815//ESTs//7.6e-19:290:71//Hs.112218:AI038601

[23098] R-HEMBA1005822//ESTs//5.4e-49:246:98//Hs.34804:AA514960

[23099] R-HEMBA1005829//ESTs//2.7e-72:344:99//Hs.54548:AI039201

[23100] R-HEMBA1005834//ESTs//1.6e-44:317:82//Hs.157029:AI080618

[23101] R-HEMBA1005852//ESTs//1.6e-102:544:93//Hs.9911:AA098911

[23102] R-HEMBA1005853//ESTs//1.8e-78:398:95//Hs.140248:AA757917

[23103] R-HEMBA1005884//EST//2.6e-18:275:67//Hs.139357:AA420970

[23104] R-HEMBA1005891//ESTs//2.1e-89:427:98//Hs.67317:AI022252

[23105] R-HEMBA1005894

[23106] R-HEMBA1005909//ESTs//2.6e-91:436:99//Hs.147492:AI215686

[23107] R-HEMBA1005911//ESTs//1.1e-85:446:95//Hs.134494:AI076363

[23108] R-HEMBA1005921//ESTs//1.4e-84:428:95//Hs.127993:AA970632

[23109] R-HEMBA1005931//Homo sapiens mRNA for KIAA0526 protein, complete cds//9.5e-45:446:75//Hs.59403:AB011098

[23110] R-HEMBA1005934//ESTs//0.20:142:65//Hs.97079:AA370867

[23111] R-HEMBA1005962//ESTs//1.8e-87:409:100//Hs.161292:A1199418

[23112] R-HEMBA1005963

[23113] R-HEMBA1005990//Homo sapiens I-1 receptor candidate protein mRNA, complete cds//2.2e-113:580:95//Hs.26285:AF082516

[23114] R-HEMBA1005991//Human antisecretory factor-1 mRNA, complete cds//2.0e-45:551:70//Hs.148495:AF050199

[23115] R-HEMBA1005999//ESTs//7.5e-24:201:69//Hs.157029:AI080618

[23116] R-HEMBA1006002//ESTs//3.1e-112:573:95//Hs.61233:AI379875

[23117] R-HEMBA1006005//EST//1.0:105:63//Hs.145273:AI249436

[23118] R-nnnnnnnnnnnn//Homo sapiens mRNA for KIAA0725 protein, partial cds//2.4e-28:444:67//Hs.26450:AB018268

[23119] R-HEMBA1006035//ESTs//4.5e-94:465:97//Hs.44625:N49951

[23120] R-HEMBA1006036//ESTs//6.1e-90:420:100//Hs.126771:AA916508

[23121] R-HEMBA1006042//EST//1.5e-88:424:98//Hs.132551:AA948490

[23122] R-nnnnnnnnnnnn

[23123] R-HEMBA1006081//ESTs//7.8e-68:356:9511Hs.27410:N25612

[23124] R-HEMBA1006090//EST//5.1e-66:320:99//Hs.99551:AA461517

[23125] R-HEMBA1006091//ESTs//2.0e-84:441:94//Hs.9658:AA506313

[23126] R-HEMBA1006100//Human high-affinity copper uptake protein (hCTR1) mRNA, complete cds//3.4e-43:328:82//Hs.73614:U83460

[23127] R-HEMBA1006108//ESTs//1.5e-44:228:98//Hs.26368:AA789297

[23128] R-HEMBA1006121//ESTs//1.6e-116:547:99//Hs.34151:AI279293

[23129] R-HEMBA1006124//EST//1.6e-20:286:64//Hs.148457:A198931

[23130] R-HEMBA1006130//ESTs//8.8e-47:231:99//Hs.16470:AA121635

[23131] R-nnnnnnnnnnnn//Homo sapiens mRNA for KIAA0792 protein, complete cds//8.7e-27:296:73//Hs.119387:AB007958

[23132] R-HEMBA1006142/ESTs//1.5e-27:255:70//Hs.139507:T77542

[23133] R-HEMBA1006155//ESTs//4.9e-64:353:94//Hs.84560:R41212

[23134] R-HEMBA1006158//Deoxyuridine triphosphatase//0.99:162:62//Hs.82113:U31930

[23135] R-HEMBA1006173//ESTs//7.5e-85:462:92//Hs.79092:H29627

[23136] R-HEMBA1006182//ESTs//5.5e-29:218:72//Hs.141466:H96906

[23137] R-HEMBA1006198//ESTs//2.1e-34:282:82//Hs.142068:AA176125

[23138] R-HEMBA1006235//Homo sapiens clone 24422 mRNA sequence//6.9e-112:545:97//Hs.109268:AF070557

[23139] R-HEMBA1006248//ESTs, Highly similar to ZINC FINGER PROTEIN MFGI [Mus musculus]//3.3e-114:581:95//Hs.23617:AA928683

[23140] R-HEMBA1006252//Human mRNA for KIAA0080 gene, partial cds//7.0e-48:284:76//Hs.74554:D38522

[23141] R-HEMBA1006253//Homo sapiens 45 kDa splicing factor mRNA, complete cds//5.7e-30:179:91//Hs.15836:AF083384

[23142] R-HEMBA1006259//Homo sapiens KIAA0421 mRNA, partial cds//1.5e-45:326:84//Hs.41742:AB007881

[23143] R-HEMBA1006268//ESTs, Highly similar to c-Jun leucine zipper interactive [M. musculus]//1.2e-97:529:93//Hs.10552:AA524401

[23144] R-HEMBA1006272//ESTs, Moderately similar to RETROVIRUS-RELATED PROTEASE [H. sapiens]//2.7e-88:484:92//Hs.104129:AA923278

[23145] R-nnnnnnnnnnnn//H. sapiens PAP mRNA//5.2e-56:585:71//Hs.49007:X76770

[23146] R-HEMBA1006283//ESTs, Weakly similar to NUCLEAR POLYADENYLATED RNA-BINDING PROTEIN NAB2 [S. cerevisiae]//1.6e-66:377:91//Hs.108674:W25821

[23147] R-HEMBA1006284//ESTs//3.7e-110:544:96//Hs.55296:AI084735

[23148] R-HEMBA1006291//ESTs//2.2e-91:457:96//Hs.114611:N37019

[23149] R-HEMBA1006293//ESTs//5.4e-78:370:99//Hs.155111:AI202037

[23150] R-HEMBA1006309//ERYTHROCYTE BAND 7 INTEGRAL MEMBRANE PROTEIN//3.7e-40:167:86//Hs.74478:U33931

[23151] R-HEMBA1006310//ESTs, Weakly similar to reverse transcriptase [M. musculus]//5.6e-76:417:94//Hs.111754:AI204587

[23152] R-HEMBA1006328//Small inducible cytokine A5 (RANTES)//2.8e-60:397:78//Hs.155464:AF088219

[23153] R-HEMBA1006334//Human occludin mRNA, complete cds//0.72:369:59//Hs.93518:U49184

[23154] R-HEMBA1006344//Human plectin (PLEC1) mRNA, complete cds//0.016:217:64//Hs.79706:U53204

[23155] R-HEMBA1006347//ESTs, Highly similar to HYPOTHETICAL 97.6 KD PROTEIN IN SHP1-SEC17 INTERGENIC REGION [Saccharomyces cerevisiae]//3.6e-119:582:97//Hs.42343:AI417075

[23156] R-HEMBA1006349//ESTs//5.2e-57:305:94//Hs.6338:AA411382

[23157] R-HEMBA1006359//ESTs//8.2e-90:426:99//Hs.100873:AA678008

[23158] R-HEMBA1006364//ESTs//2.2e-98:582:91//Hs.23837:AA541787

[23159] R-HEMBA1006377//EST//0.0097:145:62//Hs.133027:AI049830

[23160] R-HEMBA1006380//Homo sapiens mRNA for KIAA0594 protein, partial cds//1.0e-41:349:79//Hs.154872:AB011166

[23161] R-HEMBA1006381//ESTs//5.1e-46:320:85//Hs.37573:H59651

[23162] R-HEMBA1006398//Human Line-1 repeat mRNA with 2 open reading frames//9.0e-87:582:84//Hs.23094:M19503

[23163] R-HEMBA1006416//ESTs//1.5e-17:251:73//Hs.33950:AI218923

[23164] R-HEMBA1006419//EST//8.5e-65:353:94//Hs.141309:H72778

[23165] R-HEMBA1006421//Oxytocin receptor//1.2e-12:249:68//Hs.2820:X64878

[23166] R-HEMBA1006424//ESTs, Weakly similar to pot. ORF II [H. sapiens]//6.3e-13:263:66//Hs.43127:AA258004

[23167] R-HEMBA1006426//ESTs//6.5e-84:401:99//Hs.37303:C 16964

[23168] R-HEMBA1006438//EST//0.87:266:57//Hs.99456:AA457380

[23169] R-HEMBA1006445//ESTs//2.0e-81:414:96//Hs.58153:W72033

[23170] R-HEMBA1006446//Homo sapiens mRNA for cadherin-6, complete cds//1.6e-05:487:58//Hs.32963:D31784

[23171] R-HEMBA1006461//ESTs//5.1e-78:393:97//Hs.142677:R95895

[23172] R-HEMBA1006467//ESTs, Weakly similar to putative p150 [H. sapiens]//3.0e-17:342:63//Hs.111730:AA604403

[23173] R-HEMBA1006471//ESTs//3.8e-66:370:92//Hs.14063:T77441

[23174] R-HEMBA1006474

[23175] R-HEMBA1006483//Human G protein-coupled receptor (STRL22) mRNA, complete cds//4.2e-40:365:78//Hs.46468:U45984

[23176] R-HEMBA1006485//H. sapiens mRNA for aminopeptidase//2.5e-92:517:91//Hs.132243:Y07701

[23177] R-HEMBA1006486//EST//7.0e-47:240:76//Hs.161917:AA483223

[23178] R-HEMBA1006489//ESTs//2.1e-93:440:99//Hs.125264:AA873350

[23179] R-HEMBA1006492//ESTs//0.00034:52:90//Hs.163219:AA810720

[23180] R-HEMBA1006494//EST//1.8e-06:192:67//Hs.141401:H93387

[23181] R-HEMBA1006497//ESTs//6.2e-45:232:97//Hs.118015:N33117

[23182] R-HEMBA1006502//Complement component 5 receptor I (C5a ligand)//8.7e-16:135:72//Hs.2161:M62505

[23183] R-HEMBA1006507//Homo sapiens mRNA for KIAA0666 protein, partial cds//3.9e-117:570:96//Hs.153858:AB014566

[23184] R-HEMBA1006521//ESTs//9.9e-99:496:96//Hs.64906:AA677300

[23185] R-HEMBA1006530//ESTs//0.18:260:60//Hs.24970:AI057628

[23186] R-HEMBA1006535//GS I PROTEIN//0.52:267:62//Hs.78991:M86934

[23187] R-HEMBA1006540//EST//0.016:143:66//Hs.148189:AA897331

[23188] R-HEMBA1006546//Homo sapiens mRNA for KIAA0582 protein, partial cds//2.2e-48:287:91//Hs.79507:AB011154

[23189] R-HEMBA1006559//ESTs, Moderately similar to neurodegeneration-associated protein I [R. norvegicus]//1.8e-109:547:96//Hs.21122:AA191594

[23190] R-HEMBA1006562//EST//1.1e-13:327:63//Hs.149641:AI283064

[23191] R-HEMBA1006566//ESTs//2.6e-59:311:97//Hs.146014:R51876

[23192] R-HEMBA1006569//ESTs//4.7e-89:458:96//Hs.42861:W74725

[23193] R-HEMBA1006579//ESTs//2.9e-19:110:99//Hs.126191:AA873876

[23194] R-HEMBA1006583//Human mRNA for tryptophan hydroxylase (EC 1.14.16.4)//9.5e-29:276:76//Hs.144563:AF057280

[23195] R-HEMBA1006595//ESTs//1.3e-96:487:96//Hs.43228:N67390

[23196] R-HEMBA1006597//Small inducible cytokine A5 (RANTES)//9.8e-44:291:85//Hs.155464:AF088219

[23197] R-HEMBA1006612

[23198] R-nnnnnnnnnnnn//ESTs//1 .2e-25:225:80//Hs.138852:AA284247

[23199] R-HEMBA1006624//ESTs//1.9e-93:454:98//Hs.72531:AA773630

[23200] R-HEMBA1006631//Human mRNA for KIAA0033 gene, partial cds//7.5e-60:286:90//Hs.22271:D26067

[23201] R-HEMBA1006635//ESTs, Moderately similar to !!!! ALU SUBFAMILY SP WARNING ENTRY !!!! [H. sapiens]//2.7e-91:426:100//Hs.139469:AI299889

[23202] R-HEMBA1006639//ESTs, Highly similar to POLYADENYLATE-BINDING PROTEIN [Homo sapiens]//3.4e-37:186:100//Hs.109818:AA411185

[23203] R-HEMBA1006643//ESTs//1.8e-35:189:97//Hs.139640:AA846777

[23204] R-HEMBA1006648//Homo sapiens integrin-linked kinase (ILK) mRNA, complete cds//8.1e-108:567:94//Hs.6196:U40282

[23205] R-HEMBA1006652//ESTs//7.6e-100:536:93//Hs.142613:AA129427

[23206] R-HEMBA1006653//ESTs//2.0e-33:181:87//Hs.153599:AI282511

[23207] R-HEMBA1006665//EST//1.2e-13:141:72//Hs.145596:AI263102

[23208] R-HEMBA1006674//ESTs//3.1e-32:212:83//Hs.95115:AA206594

[23209] R-HEMBA1006676//ESTs//2.6e-95:510:93//Hs.39140:AI041842

[23210] R-HEMBA1006682//EST//1.4e-05:277:62//Hs.145762:AI269435

[23211] R-HEMBA1006695//Homo sapiens apoptotic protease activating factor 1 (Apaf-1) mRNA, complete cds//1.9e-32:261:79//Hs.77579:AF013263

[23212] R-HEMBA1006696//ESTs//4.5e-95:448:99//Hs.155694:AI032695

[23213] R-HEMBA1006708//ESTs, Weakly similar to Miller-Dieker lissencephaly gene [H. sapiens]//1.1e-92:483:94//Hs.6525:AI205313

[23214] R-HEMBA1006709//ESTs//3.4e-25:207:80//Hs.88617:AA872062

[23215] R-HEMBA1006717

[23216] R-HEMBA1006737//EST//5 .9e-30:317:75//Hs.140568:AA826002

[23217] R-HEMBA1006744//Interleukin 10//3.7e-41:419:74//Hs.2180:M57627

[23218] R-HEMBA1006754//ESTs//1.2e-46:276:83//Hs.141254:AI334099

[23219] R-HEMBA1006758//ESTs//0.00043:48:100//Hs.157265:AA489646

[23220] R-HEMBA1006767//EST//0.094:120:65//Hs.159873:R92763

[23221] R-HEMBA1006779//EST//9.3e-45:298:85//Hs.149580:AI281881

[23222] R-HEMBA1006780//ESTs//1.6e-46:423:77//Hs.141602:N63562

[23223] R-HEMBA1006789//ESTs//7.6e-55:245:95//Hs.6459:AI092936

[23224] R-HEMBA1006795//ESTs//8.6e-47:315:78//Hs.140491:W52705

[23225] R-HEMBA1006796//ESTs//0.26:175:65//Hs.103280:AI334978

[23226] R-HEMBA1006807//Homo sapiens DEC-205 mRNA, complete cds//5.7e-47:461:75//Hs.153563:AF011333

[23227] R-HEMBA1006821//ESTs//3.5e-12:222:68//Hs.150439:AI016305

[23228] R-HEMBA1006824//Homo sapiens mRNA, clone:RES4-16//6.7e-51:298:90//Hs.121493:D25272

[23229] R-HEMBA1006832//ESTs//0.0050:108:70//Hs.12853:T65556

[23230] R-HEMBA1006849//Human mRNA for KIAA0118 gene, partial cds//2.1e-49:367:83//Hs.154326:D42087

[23231] R-HEMBA1006865//ESTs//0.85:112:63//Hs.116430:AA644665

[23232] R-nnnnnnnnnnnn//Homo sapiens mRNA for KIAA0772 protein, complete cds//1.8e-67:611:74//Hs.15519:AB018315

[23233] R-HEMBA1006885//ESTs//2.4e-66:347:96//Hs.100624:N95453

[23234] R-HEMBA1006900//ESTs//2.7e-91:466:96//Hs.32984:R89739

[23235] R-HEMBA1006921//ESTs//2.2e-33:170:100//Hs.152277:AA593117

[23236] R-HEMBA1006926//ESTs, Weakly similar to ZK1053.6 [C. elegans]//2.9e-28:213:84//Hs.9096:AA029400

[23237] R-HEMBA1006929//ESTs//4.0e-13:210:66//Hs.100895:AA479308

[23238] R-HEMBA1006936//ESTs//3.9e-05:60:93//Hs.8737:W22712

[23239] R-HEMBA1006938//EST//0.0021:244:62//Hs.144237:W52382

[23240] R-HEMBA1006941//Homo sapiens mRNA for putative thioredoxin-like protein//6.5e-77:371:98//Hs.42644:AJ010841

[23241] R-HEMBA1006949//ESTs//1.2e-67:335:98//Hs.25780:R51321

[23242] R-HEMBA1006973//ESTs//0.029:242:61//Hs.146074:N34457

[23243] R-HEMBA1006976//EST//0.70:206:61//Hs.147092:AI189827

[23244] R-HEMBA1006993//Human mRNA for KIAA0327 protein, complete cds//2.6e-47:368:80//Hs.149323:AB002325

[23245] R-HEMBA1006996//ESTs//0.027:326:58//Hs.105008:AA451679

[23246] R-HEMBA1007002//ESTs//0.13:116:66//Hs.26928:Z41440

[23247] R-HEMBA1007017//ESTs//4.3e-47:208:87//Hs.155243:N70293

[23248] R-HEMBA1007018//ESTs, Moderately similar to LIC-2 [R. norvegicus]//2.8e-112:558:96//Hs.107905:AI248363

[23249] R-HEMBA1007045

[23250] R-HEMBA1007051//ESTs//2.5e-39:321:80//Hs.146811:AA410788

[23251] R-HEMBA1007052//EST//3.4e-41:377:74//Hs.44634:N34839

[23252] R-HEMBA1007062//ESTs//1.2e-92:439:99//Hs.162882:AA807140

[23253] R-HEMBA1007066//ESTs//0.85:204:61//Hs.22795:AI208272

[23254] R-HEMBA1007073//ESTs//6.6e-52:362:85//Hs.3082 I :AI096866

[23255] R-HEMBA1007078//EST, Moderately similar to !!!! ALU SUBFAMILY SQ WARNING ENTRY !!!! [H. sapiens]//7.2e-40:163:83//Hs.152369:AA504818

[23256] R-HEMBA1007085//ESTs//8.1e-103:519:96//Hs.90638:AI348087

[23257] R-HEMBA1007087//ESTs//3.1e-51:354:86//Hs.6449:W95025

[23258] R-HEMBA1007112//EST//0.090:328:59//Hs.136623:AA633597

[23259] R-HEMBA1007113//Homo sapiens mRNA, clone:RES4-16//1.1e-47:427:76//Hs.121493:D25272

[23260] R-HEMBA1007129//ESTs//6.1e-3:314:65//Hs.137538:AA769438

[23261] R-HEMBA1007147

[23262] R-HEMBA1007149//ESTs//9.7e-103:540:94//Hs.127240:AA149818

[23263] R-HEMBA1007151//ESTs//8.2e-102:505:96//Hs.24948:AA977674

[23264] R-nnnnnnnnnnnn//Homo sapiens epsin 2b mRNA, complete cds//1.6e-104:529:94//Hs.22396:AF062085

[23265] R-HEMBA1007178//ESTs//2.2e-57:366:90//Hs.21648:AI302954

[23266] R-HEMBA1007194//ESTs//9.0e-68:336:98//Hs.49760:AA741051

[23267] R-HEMBA1007203//Homo sapiens mRNA for KIAA0214 protein, complete cds//1.7e-62:332:95//Hs.3363:D86987

[23268] R-HEMBA1007206//Human c-yes-1 mRNA//4.5e-49:390:80//Hs.75680:M 15990

[23269] R-HEMBA1007224//Homo sapiens mRNA for KIAA0797 protein, partial cds//7.4e-98:471:97//Hs.27197:AB018340

[23270] R-HEMBA1007251//ESTs//1.6e-78:377:99//Hs.98912:AA436864

[23271] R-HEMBA1007256//ESTs//3.5e-20:127:79//Hs.137352:AA024934

[23272] R-HEMBA1007267//Homo sapiens KIAA0395 mRNA, partial cds//8.8e-48:343:83//Hs.43681:AL022394

[23273] R-HEMBA1007273//ESTs//1.0e-98:472:98//Hs.122610:AA807062

[23274] R-HEMBA1007279//ESTs//3 .3e-107:558:94//Hs.126480:AI221207

[23275] R-HEMBA1007281//EST//0.074:244:63//Hs.29304:R73543

[23276] R-HEMBA1007288//EST//9.4e-43:344:81//Hs.162112:AA524804

[23277] R-HEMBA1007300//ESTs//0.096:371:57//Hs.102680:N52990

[23278] R-HEMBA1007301

[23279] R-HEMBA1007319//ESTs//7.7e-113:570:96//Hs.29263:AI337917

[23280] R-HEMBA1007320//ESTs, Moderately similar to hypothetical protein 2 [H. sapiens]//5.5e-15:311:64//Hs.142764:AA205569

[23281] R-HEMBA1007322//Human kpni repeat mrna (cdna clone pcd-kpni-4), 3′ end//5.7e-49:383:83//Hs.139107:K00629

[23282] R-HEMBA1007327//Human melanoma antigen recognized by T-cells (MART-1) mRNA//1.9e-42:371:79//Hs.154069:U06452

[23283] R-HEMBA1007341//EST//3.0e-17:291:68//Hs.150788:AI301848

[23284] R-HEMBA1007342//EST//2.7e-11:263:67//Hs.145259:AI218684

[23285] R-HEMBA1007347//Homo sapiens DEC-205 mRNA, complete cds//9.7e-47:368:82//Hs.153563:AF011333

[23286] R-HEMBB1000005//ESTs, Weakly similar to putative p150 [H. sapiens]//3.3e-44:341:71//Hs.111730:AA604403

[23287] R-HEMBB1000008//Homo sapiens tumor necrosis factor superfamily member LIGHT mRNA, complete cds//3 .2e-40:292:83//Hs.129708:AF064090

[23288] R-HEMBB1000018//H. sapiens mRNA for urea transporter//5.0e-49:311:87//Hs.66710:X96969

[23289] R-HEMBB1000024//ESTs//7.5e-21:234:76//Hs.157049:AI345418

[23290] R-HEMBB1000025//ESTs//2 .2e-36:371:78//Hs.56562:AA056332

[23291] R-HEMBB1000030//ESTs//3.2e-76:373:97//Hs.140190:AA701449

[23292] R-HEMBB1000036//ESTs, Highly similar to HYPOTHETICAL 43.2 KD PROTEIN C34E10.1 IN CHROMOSOME III [Caenorhabditis elegans]//6.0e-92:477:95//Hs.4877:AA418465

[23293] R-HEMBB1000037//Homo sapiens erythroblast macrophage protein EMP mRNA, complete cds//2.5e-92:467:97//Hs.20815:AF084928

[23294] R-HEMBB1000039//ESTs//1.8e-43:361:71//Hs.108206:N64702

[23295] R-HEMBB1000044//EST//7.6e-70:367:95//Hs.140860:R42954

[23296] R-HEMBB1000048//EST//1.5e-45:262:91//Hs.157627:AI357802

[23297] R-HEMBB1000050//ESTs//0.039:91:74//Hs.163189:AA236903

[23298] R-HEMBB1000054//ESTs//3.0e-104:550:94//Hs.152395:AA533107

[23299] R-HEMBB1000055//ESTs, Moderately similar to UBIQUINOL-CYTOCHROME C REDUCTASE COMPLEX SUBUNIT VI REQUIRING PROTEIN [H. sapiens]//1.1e-72:350:99//Hs.116490:AA659584

[23300] R-HEMBB1000059//ESTs//1.7e-10:200:70//Hs.163954:N57939

[23301] R-HEMBB1000083//Homo sapiens mRNA for GCP 170, complete cds//6.0e-41:337:80//Hs.4953:D63997

[23302] R-HEMBB1000089//Human mRNA for KIAA0355 gene, complete cds//3.5e-39:487:70//Hs.153014:AB002353

[23303] R-HEMBB1000099//ESTs//5.7e-37:353:75//Hs.22910:W18193

[23304] R-HEMBB1000103//Homo sapiens mRNA for KIAA0640 protein, partial cds//6.5e-18:298:69//Hs.153026:AB014540

[23305] R-HEMBB1000113//EST//8.2e-94:437:100//Hs.136893:AA805239

[23306] R-HEMBB1000119//Homo sapiens ASMTL gene//1.2e-84:428:95//Hs.6315:Y15521

[23307] R-HEMBB1000136//ESTs//0.043:262:59//Hs.61304:AA025692

[23308] R-HEMBB1000141//ESTs//5.0e-38:254:79//Hs.141658:N77915

[23309] R-HEMBB1000144//ESTs//9.6e-05:235:60//Hs.61700:AA033951

[23310] R-HEMBB1000173//EST//9.6e-44:258:76//Hs.161917:AA483223

[23311] R-HEMBB1000175//ESTs//4.8e-98:475:97//Hs.149740:AI199558

[23312] R-HEMBB1000198//ESTs//1.0:123:62//Hs.116602:AA665965

[23313] R-HEMBB1000215//Human mRNA for KIAA0355 gene, complete cds//2.2e-46:302:86//Hs.153014:AB002353

[23314] R-HEMBB1000217//ESTs//2.2e-105:496:99//Hs.65973:AI339364

[23315] R-HEMBB1000218//Homo sapiens DNA fragmentation factor 40 kD a subunit (DFF40) mRNA, complete cds//1.1e-48:292:79//Hs.133089:AF064019

[23316] R-HEMBB1000226//ESTs, Weakly similar to HYPOTHETICAL 37.0 KD PROTEIN B0495.8 IN CHROMOSOME II [C. elegans]//5.1e-73:449:89//Hs.16803:AA843214

[23317] R-HEMBB1000240//ESTs//1.1e-109:536:97//Hs.13528:AA523106

[23318] R-HEMBB1000244//Small inducible cytokine A5 (RANTES)//9.5e-42:323:83//Hs.155464:AF088219

[23319] R-HEMBB1000250//EST//8.8e-12:284:64//Hs.145960:AI276783

[23320] R-HEMBB1000258//EST//4.5e-14:315:66//Hs.162551:AA584782

[23321] R-HEMBB1000264

[23322] R-HEMBB1000266//ESTs, Weakly similar to similar to the beta transducin family [C. elegans]//2.7e-102:556:93//Hs.16079:AA083522

[23323] R-HEMBB1000272//ESTs//4.3e-91:480:94//Hs.107467:H 11385

[23324] R-HEMBB1000274//Homo sapiens mRNA for KIAA0557 protein, partial cds//7.9e-24:198:72//Hs.101414:AB011129

[23325] R-HEMBB1000284//ESTs//4.8e-64:389:91//Hs.118043:N50458

[23326] R-HEMBB1000307//Human mRNA for KIAA0355 gene, complete cds//3.6e-43:288:87//Hs.153014:AB002353

[23327] R-HEMBB1000312//ESTs//6.0e-23:272:73//Hs.121354:AA758601

[23328] R-HEMBB1000317//ESTs//7.5e-90:424:99//Hs.150042:AI298034

[23329] R-HEMBB1000318//Small inducible cytokine A5 (RANTES)//3.3e-41:318:80//Hs.155464:AF088219

[23330] R-HEMBB1000335//ESTs//3.7e-15:324:65//Hs.85077:AA968576

[23331] R-HEMBB1000336//ESTs//6.4e-76:402:95//Hs.17207:H92480

[23332] R-HEMBB1000337//ESTs//2.1e-80:391:97//Hs.118990:AI378084

[23333] R-HEMBB1000338//Small inducible cytokine A5 (RANTES)//4.0e-39:274:85//Hs.155464:AF088219

[23334] R-HEMBB1000339//EST//5.8e-41:336:79//Hs.151873:AA205736

[23335] R-HEMBB1000341//ESTs//3.8e-19:310:68//Hs.37573:H59651

[23336] R-HEMBB1000343//EST//1.1e-77:396:95//Hs.162664:AA605020

[23337] R-HEMBB1000354//Human mRNA for KIAA0186 gene, complete cds//1.7e-15:293:65//Hs.36232:D80008

[23338] R-HEMBB1000369//ESTs//1.6e-21:234:73//Hs.111583:AA463590

[23339] R-HEMBB1000374//Homo sapiens mRNA, chromosome I specific transcript KIAA0487//2.3e-56:335:77//Hs.92381:AB007956

[23340] R-HEMBB1000376//H. sapiens mRNA for urea transporter//2.7e-50:525:74//Hs.66710:X96969

[23341] R-HEMBB1000391//ESTs//6.6e-50:316:88//Hs.142259:AA828840

[23342] R-HEMBB1000399//Homo sapiens mRNA for cell cycle checkpoint protein//3.8e-109:531:97//Hs.16184:AJ001642

[23343] R-HEMBB1000402//H. sapiens mRNA for MACH-alpha-2 protein//2.7e-35:369:72//Hs.19949:X98173

[23344] R-HEMBB1000404//ESTs//0.088:298:59//Hs.61607:AA032026

[23345] R-HEMBB1000420//EST//2.2e-78:376:98//Hs.160787:AI336591

[23346] R-HEMBB1000434//Human mRNA for KIAA0118 gene, partial cds//3.9e-50:302:89//Hs.154326:D42087

[23347] R-HEMBB1000438//ESTs, Weakly similar to !!!! ALU CLASS B WARNING ENTRY!!!! [H. sapiens]//0.30:214:63//Hs.142209:AA873303

[23348] R-HEMBB1000441//Human c-yes-1 mRNA//2.2e-46:280:90//Hs.75680:M 15990

[23349] R-HEMBB1000449//ESTs//7.8e-59:332:92//Hs.87013:AA130221

[23350] R-HEMBB1000455//EST//4.8e-14:421:65//Hs.68832:AA088438

[23351] R-HEMBB1000472//ESTs//1.1e-104:505:98//Hs.132824:AI033396

[23352] R-HEMBB1000480//Human mRNA for KIAA0392 gene, partial cds//2.5e-49:295:90//Hs.40100:AB002390

[23353] R-HEMBB1000487//EST//0.78:87:68//Hs.134601:AI081506

[23354] R-HEMBB1000490//Small inducible cytokine A5 (RANTES)//4.0e-39:320:80//Hs.155464:AF088219

[23355] R-HEMBB1000491//Homo sapiens PYRIN (MEFV) mRNA, complete cds//3.7e-50:312:76//Hs.113283:AF018080

[23356] R-HEMBB1000493//ESTs//7.1e-18:150:82//Hs.142068:AA176125

[23357] R-HEMBB1000510//EST//1.4e-45:139:97//Hs.152260:AA489703

[23358] R-HEMBB1000518//Human mRNA for KIAA0118 gene, partial cds//4.8e-50:415:78//Hs.154326:D42087

[23359] R-HEMBB1000523//Homo sapiens PYRIN (MEFV) mRNA, complete cds//2.7e-57:497:78//Hs.113283:AF018080

[23360] R-HEMBB1000530//ESTs//2.7e-73:425:90//Hs.141254:AI334099

[23361] R-HEMBB1000550//EST//2.9e-11:113:79//Hs.161503:N68662

[23362] R-HEMBB1000554//Human huntingtin interacting protein (HIP 1) mRNA, complete cds//8.2e-13:92:81//Hs.97206:AF052288

[23363] R-HEMBB1000556//ESTs//1 .1e-94:529:92//Hs.33476:N36986

[23364] R-HEMBB1000564//ESTs//1.3e-19:128:91//Hs.142058:N34258

[23365] R-HEMBB1000573//ESTs//1.6e-86:494:90//Hs.120979:AI160709

[23366] R-HEMBB1000575//ESTs//1.6e-45:232:74//Hs.141019:AA287618

[23367] R-HEMBB1000586//ESTs//5.1e-42:281:83//Hs.138852:AA284247

[23368] R-HEMBB1000589//ESTs//1.0e-110:184:71//Hs.142677:R95895

[23369] R-HEMBB1000591//ESTs//3.2e-40:406:75//Hs.138787:H73704

[23370] R-HEMBB1000592//ESTs//1.8e-97:455:99//Hs.94229:W65391

[23371] R-HEMBB1000598//Human antisecretory factor-1 mRNA, complete cds//1.8e-46:305:85//Hs.148495:AF050199

[23372] R-HEMBB1000623//ESTs//8.3e-47:277:92//Hs.6045:W67125

[23373] R-HEMBB1000630//ESTs//5.1e-106:538:96//Hs.13422:AI082249

[23374] R-HEMBB1000631//ESTs//5.1e-100:508:96//Hs.110379:N58152

[23375] R-HEMBB1000632//ESTs//6.2e-44:371:80//Hs.132722:AA618531

[23376] R-HEMBB1000637//Human mRNA for KIAA0080 gene, partial cds//6.4e-49:254:86//Hs.74554:D38522

[23377] R-HEMBB1000638//EST//2.2e-38:371:76//Hs.162236:AA551582

[23378] R-HEMBB1000643//ESTs//0.0049:191:62//Hs.55445:W31963

[23379] R-HEMBB1000649//ESTs, Moderately similar to hTAFII68 [H. sapiens]//4.0e-76:399:95//Hs.124106:AA948100

[23380] R-HEMBB1000652//ESTs//1.5e-14:271:64//Hs.163954:N57939

[23381] R-HEMBB1000665//ESTs//4.2e-12:109:87//Hs.41407:W94988

[23382] R-HEMBB1000671//ESTs//2.8e-68:439:87//Hs.140491:W52705

[23383] R-HEMBB1000673//EST//0.58:46:82//Hs.142286:AA338293

[23384] R-HEMBB1000684//ESTs//8.5e-20:307:72//Hs.122825:AA765454

[23385] R-nnnnnnnnnnnn//Homo sapiens neuroanl mRNA, complete cds//6.5e-52:287:93//Hs.158300:AF040723

[23386] R-HEMBB1000705//Small inducible cytokine A5 (RANTES)//4.6e-24:165:78//Hs.155464:AF088219

[23387] R-HEMBB1000706//EST//1.2e-10:211:65//Hs.105524:AA521412

[23388] R-HEMBB1000709//ESTs, Weakly similar to putative p150 [H. sapiens]//3.9e-50:245:99//Hs.11730:AA604403

[23389] R-HEMBB1000725//Human mRNA for KIAA0308 gene, partial cds//0.11:350:59//Hs.10351:AB002306

[23390] R-HEMBB1000726//EST//5.3e-49:303:88//Hs.149580:AI281881

[23391] R-HEMBB1000738//Homo sapiens mRNA, clone:RES4-16//2.5e-49:302:89//Hs.121493:D25272

[23392] R-HEMBB1000749//ESTs//1.6e-49:331:86//Hs.152788:AA630925

[23393] R-HEMBB1000763//ESTs//9.7e-104:474:95//Hs.77480:AA100522

[23394] R-HEMBB1000770//EST//1.0e-75:359:99//Hs.136564:AA642445

[23395] R-HEMBB1000781//ESTs//1.3e-66:317:99//Hs.28827:Al 1125541

[23396] R-HEMBB1000789//ESTs//5.9e-83:394:99//Hs.120842:AA435771

[23397] R-HEMBB1000790//PLATELET GLYCOPROTEIN V PRECURSOR//1.3e-37:193:75//Hs.73734:Z23091

[23398] R-HEMBB1000794//ESTs//7.1e-98:490:96//Hs.105743:AA532718

[23399] R-HEMBB1000807//ESTs//2.6e-22:145:92//Hs.53913:AA908961

[23400] R-HEMBB1000810//Small inducible cytokine A5 (RANTES)//1.8e-34:206:79//Hs.155464:AF088219

[23401] R-HEMBB1000821//ESTs//2.4e-90:425:99//Hs.118659:AI052447

[23402] R-HEMBB1000822//ESTs//1.7e-45:288:89//Hs.24130:R27124

[23403] R-HEMBB1000826//Small inducible cytokine A5 (RANTES)//2.9e-51:245:82//Hs.155464:AF088219

[23404] R-HEMBB1000827//EST//2.8e-40:295:84//Hs.149580:AI281881

[23405] R-HEMBB1000831//ESTs//4.0e-59:291:98//Hs.62675:AA044176

[23406] R-HEMBB1000835//ESTs//7.3e-21:124:82//Hs.102671:N52545

[23407] R-HEMBB1000840//ATPase, Na+/K+transporting, beta 2 polypeptide//1.3e-43:163:84//Hs.78854:AF007876

[23408] R-HEMBB1000848//Homo sapiens mRNA for KIAA0565 protein, complete cds//9.5e-41:367:78//Hs.129740:AB011137

[23409] R-HEMBB1000852//EST//1.2e-09:188:70//Hs.127869:AA968599

[23410] R-HEMBB1000870//Cytochrome P450, 51 (lanosterol 14-alpha-demethylase)//1.0e-41:483:73//Hs.2379:U23942

[23411] R-HEMBB1000876//EST//0.0022:211:63//Hs.125552:AA884141

[23412] R-HEMBB1000883//ESTs//1.4e-65:343:95//Hs.98269:H27247

[23413] R-HEMBB1000887//ESTs//4.0e-22:212:79//Hs.138965:AI004740

[23414] R-HEMBB1000888//EST//8.2e-07:196:64//Hs.118276:W15258

[23415] R-HEMBB1000890//ISLET AMYLOID POLYPEPTIDE PRECURSOR//1.1e-46:327:83//Hs.51048:X68830

[23416] R-HEMBB1000893//EST//4.7e-34:242:85//Hs.149580:AI281881

[23417] R-HEMBB1000908//EST//0.95:27:100//Hs.142568:AA285066

[23418] R-HEMBB1000910//ESTs//1.9e-36:318:78//Hs.141140:AA715983

[23419] R-HEMBB1000913//Human mRNA for KIAA0327 protein, complete cds//2.5e-33:367:73//Hs.149323:AB002325

[23420] R-HEMBB1000915//ESTs//0.00018:188:61//Hs.144847:AI222742

[23421] R-HEMBB1000917//Homo sapiens KIAA0414 mRNA, partial cds//3.7e-41:228:84//Hs.127649:AB007874

[23422] R-HEMBB1009271//ESTs//2.2e-62:307:98//Hs.97044:AA365784

[23423] R-HEMBB1000947//ESTs, Weakly similar to F26E4.13 [C. elegans]//3.3e-60:350:91//Hs.49163:AA532881

[23424] R-HEMBB1000959//Human Line-1 repeat mRNA with 2 open reading frames//8.1e-84:546:86//Hs.23094:M19503

[23425] R-HEMBB1000973//ESTs//6.8e-95:445:99//Hs.105859:AI419354

[23426] R-HEMBB1000975//ESTs//1.2e-39:197:100//Hs.26176:AI032007

[23427] R-HEMBB1000981//EST//7.7e-58:284:98//Hs.60179:AA007242

[23428] R-HEMBB1009851//ESTs//1.2e-103:524:95//Hs.43102:AA131369

[23429] R-HEMBB1000991//EST//0.99:58:72//Hs.100246:T23625

[23430] R-HEMBB1000996//Homo sapiens LIM protein mRNA, complete cds//1.3e-41:482:70//Hs.154103:AF061258

[23431] R-HEMBB1001004//ESTs//5.7e-70:362:95//Hs.6434:W27112

[23432] R-HEMBB1001008//ESTs, Weakly similar to hypothetical LI protein [H. sapiens]//2.3e-25:339:71//Hs.129992:H58762

[23433] R-HEMBB1011010//ESTs//4.0e-53:325:92//Hs.33268:AI191214

[23434] R-HEMBB1001014//ESTs//1.3e-46:323:83//Hs.163980:AA715814

[23435] R-HEMBB1001020//Homo sapiens PYRIN (MEFV) mRNA, complete cds//3.0e-46:305:76//Hs.113283:AF018080

[23436] R-HEMBB1001024//ESTs//8.5e-47:374:80//Hs.141602:N63562

[23437] R-HEMBB1001037//ESTs//2.6e-47:282:91//Hs.155384:Z78385

[23438] R-HEMBB1001047//EST//6.2e-33:232:74//Hs.160146:AI049975

[23439] R-HEMBB1001051//ESTs//3.7e-79:385:98//Hs.95290:AA046107

[23440] R-HEMBB1001056//Homo sapiens mRNA for KIAA0618 protein, complete cds//1.1e-87:497:91//Hs.15832:AB014518

[23441] R-HEMBB1001058//Homo sapiens mRNA for KIAA0475 protein, complete cds//2.2e-26:125:81//Hs.5737:AB007944

[23442] R-HEMBB1001060//ESTs//1.9e-37:541:69//Hs.141534:N64785

[23443] R-HEMBB1001063//ESTs//4.7e-42:269:88//Hs.55855:AA621381

[23444] R-HEMBB1001068//Homo sapiens liprin-beta2 mRNA, partial cds//9.1e-107:512:97//Hs.12953:AF034803

[23445] R-HEMBB1001096//Human HsLIM15 mRNA for HsLim15, complete cds//1.2e-20:233:70//Hs.37181:D64108

[23446] R-HEMBB1001102//Human mRNA for KIAA0355 gene, complete cds//9.1e-40:299:82//Hs.153014:AB002353

[23447] R-HEMBB1001105//Homo sapiens PYRIN (MEFV) mRNA, complete cds//4.8e-46:296:87//Hs.113283:AF018080

[23448] R-HEMBB1001114//ESTs//6.2e-44:293:86//Hs.70279:AA757426

[23449] R-HEMBB1001117//ESTs//1.1e-80:471:90//Hs.61935:T75092

[23450] R-HEMBB1001119//ESTs//4.0e-38:213:84//Hs.109140:AI289942

[23451] R-HEMBB1001126 I

[23452] R-HEMBB1001133//Human SS-A/Ro ribonucleoprotein autoantigen 60 kd subunit mRNA, complete cds//1.6e-24:285:73//Hs.554:M25077

[23453] R-HEMBB1001137//ESTs//4.6e-10:66:100//Hs.74924:AI332962

[23454] R-HEMBB001142//EST//6.4e-48:315:85//Hs.149580:AI281881

[23455] R-HEMBB1001151

[23456] R-HEMBB1001153//ESTs, Moderately similar to !!!! ALU SUBFAMILY J WARNING ENTRY !!!! [H. sapiens]//1.3e-65:331:96//Hs.154179:AA579197

[23457] R-HEMBB1001169//Oxytocin receptor//1.5e-25:165:73//Hs.2820:X64878

[23458] R-nnnnnnnnnnnn//ESTs//3.5e-41:233:93//Hs.129218:AA991162

[23459] R-HEMBB1001177

[23460] R-HEMBB1001182//ESTs//1.9e-86:455:9511Hs.6937:AA524349

[23461] R-HEMBB1001199

[23462] R-HEMBB1001208//ESTs//3.3e-43:216:99//Hs.121806:N71183

[23463] R-HEMBB1001209//ESTs//6.7e-80:409:96//Hs.141185:R99549

[23464] R-HEMBB1001210//ESTs//2.2e-46:290:88//Hs.103329:D11573

[23465] R-HEMBB1001218//Kangai I (suppression of tumorigenicity 6, prostate; CD82 antigen (R2 leukocyte antigen, antigen detected by monoclonal and antibody IA4))//3.1e-44:298:87//Hs.103458:X53795

[23466] R-HEMBB1001221//ESTs//9.4e-75:353:100//Hs.151504:AA550817

[23467] R-HEMBB1001234//ESTs, Highly similar to 65 KD YES-ASSOCIATED PROTEIN [Gallus gallus]//3.8e-80:400:96//Hs.71873:AA148213

[23468] R-HEMBB1001242//ESTs//1.6e-63:404:87//Hs.25534:AA149560

[23469] R-HEMBB1001249//ESTs//3 .8e-34:360:70//Hs.150727:AI292236

[23470] R-HEMBB1001253//EST//0.0011:84:77//Hs.124579:AA853987

[23471] R-HEMBB1001254//ESTs//4.5e-95:444:9911Hs.161059:A1431268

[23472] R-HEMBB1001267//Homo sapiens mRNA, chromosome 1 specific transcript KIAA0501//1.3e-50:524:73//Hs.159897:AB007970

[23473] R-HEMBB1001271//Human mRNA for KIAA0118 gene, partial cds//4.0e-45:323:84//Hs.154326:D42087

[23474] R-HEMBB1001282//EST//2.9e-78:401:96//Hs.72871:AA169412

[23475] R-HEMBB1001288//ESTs, Highly similar to HYPOTHETICAL 27.3 KD PROTEIN ZK353.7 IN CHROMOSOME III [Caenorhabditis elegans]//2.6e-104:515:97//Hs.16606:W81021

[23476] R-HEMBB1001289//ESTs//7.8e-45:440:75//Hs.44702:AI148840

[23477] R-HEMBB1001294//ESTs//1.9e-100:476:99//Hs.109017:AI057112

[23478] R-HEMBB1001302

[23479] R-HEMBB1001304//ESTs//4.0e-92:431:99//Hs.113750:AI091154

[23480] R-HEMBB1001314//Interleukin 10//6.3e-41:334:79//Hs.2180:M57627

[23481] R-HEMBB1001315//Interleukin 10//1.9e-43:285:87//Hs.2180:M57627

[23482] R-HEMBB1001317//Human cytochrome P450-IIB (hIIB3) mRNA, complete cds//8.4e-45:357:81//Hs.110194:M29873

[23483] R-HEMBB1001326//ESTs//0.85:174:62//Hs.133487:A1393754

[23484] R-HEMBB1001331//ESTs, Weakly similar to DFS70 [H. sapiens]//6.5e-61:313:96//Hs.43071:AA206222

[23485] R-HEMBB001335//EST//5.2e-80:381:99//Hs.116769:AA630365

[23486] R-HEMBB1001337//ESTs//2.7e-84:404:99//Hs.148966:AI242639

[23487] R-HEMBB1001339//ESTs//2.1e-97:485:96//Hs.88357:AA262470

[23488] R-HEMBB1001346

[23489] R-HEMBB1001348//ESTs//1.1e-43:295:85//Hs.163604:R94354

[23490] R-HEMBB1001356//EST//6.0e-1:89:88//Hs.152366:AA486721

[23491] R-HEMBB1001364//ESTs, Moderately similar to !!!! ALU SUBFAMILY J WARNING ENTRY!!!! [H. sapiens]//3.0e-12:129:79//Hs.9792:AA027055

[23492] R-HEMBB1001366//Human mRNA for KIAA0118 gene, partial cds//1.2e-50:550:72//Hs.154326:D42087

[23493] R-HEMBB1001367//ESTs//1.2e-19:165:82//Hs.146314:R99617

[23494] R-HEMBB1001369//Small inducible cytokine A5 (RANTES)//1.9e-25:217:80//Hs.155464:AF088219

[23495] R-HEMBB1001380//ESTs//4.0e-08:216:63//Hs.143763:AI174205

[23496] R-HEMBB1001384//ESTs//6.6e-110:547:96//Hs.6671:AI341699

[23497] R-HEMBB1001387//ESTs//1.1e-104:497:98//Hs.87654:AA853970

[23498] R-HEMBB1001394//ESTs//6.4e-73:428:89//Hs.139922:AA281350

[23499] R-HEMBB1001410//Alcohol dehydrogenase 7 sigma subunit (class IV)//0.88:365:58//Hs.389:X76342

[23500] R-HEMBB1001424//ESTs//1.3e-88:466:94//Hs.42174:AA194644

[23501] R-HEMBB1001426//ESTs//2.2e-45:337:82//Hs.37573:H59651

[23502] R-HEMBB1001429//EST//3 .8e-59:543:76//Hs.158803:AI376846

[23503] R-HEMBB1001436//ESTs//3.7e-69:332:99//Hs.156518: AA724317

[23504] R-HEMBB1001443//ESTs//4.8e-54:270:98//Hs.21898:AI088201

[23505] R-HEMBB1001449//ESTs//3.2e-43:170:84//Hs.150727:A1292236

[23506] R-HEMBB1001454//ESTs//9.1e-46:304:86//Hs.139190:N55515

[23507] R-HEMBB1001458//ESTs//3 .2e-98:478:97//Hs.50144:N67293

[23508] R-HEMBB1001463//Homo sapiens KIAA0421 mRNA, partial cds//4.3e-50:440:78//Hs.41742:AB007881

[23509] R-HEMBB1001464//ESTs, Weakly similar to KO I H 12.1 [C. elegans]//0.25:222:61//Hs.13275:AI341468

[23510] R-HEMBB1001482//ESTs, Moderately similar to zinc finger protein [R. norvegicus]//0.80:53:83//Hs.26799:W74481

[23511] R-HEMBB1001500//EST//1 .4e-13:310:67//Hs.162663:AA604515

[23512] R-HEMBB1001521//Homo sapiens mRNA for KIAA0737 protein, complete cds//2.5e-29:186:92//Hs.17630:AB018280

[23513] R-HEMBB1001527//ESTs, Weakly similar to HYPOTHETICAL 92.1 KD PROTEIN ZK1098.3 IN CHROMOSOME III [Caenorhabditis elegans]//4.7e-51:404:81//Hs.141429:AA631915

[23514] R-HEMBB1001531//ESTs//3.3e-13:250:67//Hs.139158:AA226159

[23515] R-HEMBB1001535//H. sapiens mRNA for sigma 3B protein//1.9e-39:291:82//Hs.154782:X99459

[23516] R-HEMBB1001536//Human mRNA for KIAA0355 gene, complete cds//5.0e-4544:318:83//Hs.153014:AB002353

[23517] R-HEMBB1001537//Homo sapiens KIAA0409 mRNA, partial cds//3.2e-47:318:80//Hs.5158:AB007869

[23518] R-HEMBB1001555//ESTs//2.6e-13:182:71//Hs.112671:AI377274

[23519] R-HEMBB1001562//ESTs//1.7e-43:316:83//Hs.151365:AA643962 50 R-HEMBB1001564//EST//1.3e-35:141:81//Hs.162197:AA535216

[23520] R-HEMBB1001565//Human mRNA for KIAA0331 gene, complete cds//5.1e-18:152:85//Hs.146395:AB002329

[23521] R-HEMBB1001585//ESTs//1.1e-32:190:84//Hs.33354:AA179944

[23522] R-HEMBB1001586//ESTs//4.9e-94:447:99//Hs.124084:AA843219

[23523] R-HEMBB1001588//EST//8.3e-27:363:69//Hs.141603:N66015

[23524] R-HEMBB1001603//ESTs//1 .2e-101:482:99//Hs.12403:AI090184

[23525] R-HEMBB1001618//ESTs//5 .8e-35:437:70//Hs.136868:AA805044

[23526] R-HEMBB1001619//EST//1.7e-38:476:70//Hs.139093:AA166888

[23527] R-HEMBB1001630//Homo sapiens mRNA, clone:RES4-16//5 .7e-41:193:90//Hs.121493:D25272

[23528] R-HEMBB1001635//ESTs//9.5e-34:304:82//Hs.140444:AI002082

[23529] R-HEMBB1001637//ESTs//1.0e-42:443:74//Hs.21978:AA009633

[23530] R-HEMBB1001641//EST//2.4e-06:67:86//Hs.162398:AA572813

[23531] R-HEMBB1001653//ESTs//4.8e-80:381:99//Hs.140502:AA806438

[23532] R-HEMBB1100665//ESTs//2.3e-44:372:79//Hs.132818:AI038577

[23533] R-HEMBB1001668//ESTs//0.73:212:62//Hs.8928:N32572

[23534] R-HEMBB1100673//Homo sapiens mRNA for KIAA0646 protein, complete cds//5.9e-117:573:97//Hs.24439:AB014546

[23535] R-HEMBB1001684//ESTs, Moderately similar to Tbcl [M. musculus]//5.4e-106:523:97//Hs.26939:AA804534

[23536] R-HEMBB1001685//ESTs, Moderately similar to !!!! ALU SUBFAMILY J WARNING ENTRY!!!! [H. sapiens]//1.9e-43:292:86//Hs.96337:AA225358

[23537] R-HEMBB1001695//ESTs//3 .7e-101:539:94//Hs.78289:R60867

[23538] R-HEMBB1001704//EST//0.96:248:5711Hs.163025:AA703038

[23539] R-HEMBB1001706//ESTs//1.3e-39:308:81//Hs.141318:N71080

[23540] R-HEMBB1001707//ESTs, Moderately similar to hypothetical protein 2 [H. sapiens]//4.9e-32:277:73//Hs.142764:AA205569

[23541] R-HEMBB1001717//ESTs//1.6e-34:225:87//Hs.57883:AA218645

[23542] R-HEMBB1001735//ESTs, Highly similar to LINE-1 REVERSE TRANSCRIPTASE HOMOLOG [Homo sapiens]l/8.6e-11:158:71//Hs.141263:H64113

[23543] R-HEMBB1001736//ESTs//0.0035:223:60//Hs.21354:AA203403

[23544] R-HEMBB1001747//EST//9.9e-55:293:81//Hs.112866:AA620488

[23545] R-HEMBB1001749//ESTs//2.5e-13:95:91//Hs.139888:N25287

[23546] R-HEMBB1001753//ESTs//2.6e-07:141:70//Hs.144604:AI052059

[23547] R-HEMBB1001756//EST//2.6e-06:165:64//Hs.121195:AA757211

[23548] R-HEMBB1001760//LOW-DENSITY LIPOPROTEIN RECEPTOR PRECURSOR//1.3e-24:264:74//Hs.70008:L00352

[23549] R-HEMBB1001762//ESTs//2.1e-81:447:93//Hs.152766:AA211369

[23550] R-HEMBB1001785//ESTs//0.040:390:58//Hs.116651:AA993406

[23551] R-HEMBB1001797//ESTs//2.1e-90:428:99//Hs.8958:AA169253

[23552] R-HEMBB1001802//Desmin//9.9e-95:497:93//Hs.119104:M63391

[23553] R-HEMBB1001812//ESTs//1.2e-12:91:78//Hs.138852:AA284247

[23554] R-HEMBB1001816//Human Line-1 repeat mRNA with 2 open reading frames//5.9e-13:143:76//Hs.23094:M19503

[23555] R-HEMBB1001831//Homo sapiens PAM COOH-terminal interactor protein I (PCIP 1) mRNA, complete cds//5.5e-106:498:98//Hs.159396:AF056209

[23556] R-HEMBB1001836//Homo sapiens mRNA, chromosome 1 specific transcript KIAA0488//9.6e-39:288:73//Hs.67619:AB007957

[23557] R-HEMBB1001839

[23558] R-HEMBB1001850//EST//0.020:119:68//Hs.32767:H38125

[23559] R-HEMBB1001863//ESTs//4.5e-17:226:72//Hs.157253:AI357539

[23560] R-HEMBB1001867//ESTs//2.3e-16:254:68//Hs.123664:AA806106

[23561] R-HEMBB1001868//EST//9.8e-30:155:100//Hs.160572:AA888397

[23562] R-HEMBB1001869//ESTs//2.8e-42:376:78//Hs.141973:N21434

[23563] R-HEMBB1001872//EST//0.85:156:64//Hs.119501:AA487980

[23564] R-HEMBB1001874//EST//0.64:107:70//Hs.147482:AI215572

[23565] R-HEMBB1001875//EST//0.079:199:59//Hs.121810:AA775240

[23566] R-HEMBB1001880//Thromboxane A2 receptor//9.0e-47:297:88//Hs.89887:D38081

[23567] R-HEMBB1001899//ESTs//6.3e-68:323:100//Hs.121538:AA609310

[23568] R-HEMBB1001905//ESTs//4.4e-19:227:73//Hs.146173:AA906191

[23569] R-HEMBB1001906//ESTs//1.6e-90:463:95//Hs.28266:H46725

[23570] R-HEMBB1001908//Homo sapiens EVI5 homolog mRNA, complete cds//3.7e-27:557:64//Hs.26929:AF008915

[23571] R-HEMBB1001910//EST//6.0e-37:308:78//Hs.162197:AA535216

[23572] R-HEMBB1001911//Homo sapiens tapasin (NGS-17) mRNA, complete cds//8.0e-58:367:79//Hs.5247:AF029750

[23573] R-HEMBB1001915//ESTs//3.1e-73:395:93//Hs.17054:AI139897

[23574] R-HEMBB1001921//Human mRNA for KIAA0392 gene, partial cds//2.7e-50:323:88//Hs.40100:AB002390

[23575] R-HEMBB1001922//H. sapiens mRNA for novel member of serine-arginine domain protein, SRrp129//7.4e-38:531:70//Hs.153086:Y11251

[23576] R-HEMBB1001925//Human mRNA for KIAA0327 protein, complete cds//9.5e-19:199:77//Hs.149323:AB002325

[23577] R-HEMBB1001930//EST//1.9e-18:136:78//Hs.132635:AI032875

[23578] R-HEMBB1001944//EST//0.034:228:57//Hs.93664:N23366

[23579] R-HEMBB1001945//ESTs//1 .8e-83:439:95//Hs.7341:N57875

[23580] R-HEMBB1001947//ESTs//5.6e-109:533:97//Hs.48855:AA134589

[23581] R-HEMBB1001950//ESTs//1.5e-107:583:93//Hs.8033:N94998

[23582] R-HEMBB1001952//ESTs//3.1e-40:283:85//Hs.146811:AA410788

[23583] R-HEMBB1001953//Human mRNA for KIAA0080 gene, partial cds//6.2e-50:284:83//Hs.74554:D38522

[23584] R-HEMBB1001957EST114.8e-50:382:81//Hs.149580:AI281881

[23585] R-HEMBB1001962//ESTs//1.5e-20:143:88//Hs.11924:W26972

[23586] R-HEMBB1001967//Homo sapiens mRNA for KIAA0575 protein, complete cds//2.3e-61:296:88//Hs.153468:AB011147

[23587] R-HEMBB1001973//ESTs//1.4e-48:303:88//Hs.132722:AA618531

[23588] R-HEMBB1001983//ESTs//2.6e-72:374:95//Hs.141022:H06475

[23589] R-HEMBB1001988//ESTs//2.0e-31:204:88//Hs.142531:N91572

[23590] R-HEMBB1001990//ESTs//9.4e-115:574:96//Hs.44426:AA173223

[23591] R-HEMBB1001996

[23592] R-HEMBB1001997//ESTs//7.6e-78:380:98//Hs.32682:H37798

[23593] R-HEMBB1002002//Human kpni repeat mrna (cdna clone pcd-kpni-8), 3′ end//3.0e-18:222:71//Hs.103948:K00627

[23594] R-HEMBB1002005//EST//2.2e-41:339:80//Hs.160833:AI345334

[23595] R-HEMBB1002009//EST//2.9e-44:245:94//Hs.28788:R66896

[23596] R-HEMBB1002015//EST//0.0027:198:63//Hs.160868:AI359052

[23597] R-HEMBB1002042//ESTs//1.11e-75:529:84//Hs.106919:AA523900

[23598] R-HEMBB1002043//ESTs//7.9e-40:292:83//Hs.70279:AA757426 45 R-HEMBB1002044//ESTs//2.1e-92:460:94//Hs.115897:AA156638

[23599] R-HEMBB1002045//Homo sapiens PYRIN (MEFV) mRNA, complete cds//5.6e-75:301:85//Hs.113283:AF018080

[23600] R-HEMBB1002049//ESTs//3.8e-77:409:94//Hs.122624:R82638

[23601] R-HEMBB1002050//ESTs//8.7e-45:330:82//Hs.44702:AI148840 50 R-HEMBB1002068//ESTs//8.3e-70:333:99//Hs.134807:AI090671

[23602] R-HEMBB1002069//Homo sapiens neuronal thread protein AD7c-NTP mRNA, complete cds//1.5e-75:486:81//Hs.129735:AF010144

[23603] R-HEMBB1002092//ESTs//6.5e-46:331:83//Hs.22910:W 18193

[23604] R-HEMBB1002094//EST//3.6e-45:280:88//Hs.149580:AI281881

[23605] R-HEMBB1002115

[23606] R-HEMBB1002139//ESTs//4.2e-45:318:85//Hs.107657:AA126814

[23607] R-HEMBB1002142//Homo sapiens haemopoietic progenitor homeobox HPX42B (HPX42B) mRNA, complete cds//1.4e-45:281:88//Hs.125231:AF068006

[23608] R-HEMBB1002152//EST//4.3e-39:250:89//Hs.156552:AA833553

[23609] R-HEMBB1002189//H. sapiens mRNA for translin associated protein X//1.4e-47:328:85//Hs.96247:X95073

[23610] R-HEMBB1002190//ESTs//8.3e-05:122:70//Hs.41974:AF039185

[23611] R-HEMBB1002193//Human sky mRNA for Sky, complete cds//8.9e-24:398:69//Hs.301:U 18934

[23612] R-HEMBB1002217//EST//6.6e-50:303:89//Hs.149580:AI281881

[23613] R-HEMBB1002218//ESTs//2.3e-19:150:86//Hs.136031:W95841

[23614] R-HEMBB1002232//ESTs//8.9e-47:445:77//Hs.163971:N27584

[23615] R-HEMBB1002247//EST//6.6e-09:236:65//Hs.130578:AI004631

[23616] R-HEMBB1002249//ESTs//5.2e-16:325:64//Hs.156253:AI334807

[23617] R-HEMBB1002254//Human Line-1 repeat mRNA with 2 open reading frames//3.8e-99:590:88//Hs.23094:M19503

[23618] R-HEMBB1002255//Human mRNA for KIAA0365 gene, partial cds//5.6e-45:342:83//Hs.84123:AB002363

[23619] R-HEMBB1002266//ESTs//4.4e-98:472:98//Hs.65366:AI189112

[23620] R-HEMBB1002280//EST//2.9e-41:247:90//Hs.161917:AA483223

[23621] R-HEMBB1002300//ESTs//8.4e-19:229:75//Hs.138463:N72305

[23622] R-HEMBB1002306//Homo sapiens KIAA0432 mRNA, complete cds//0.0021:138:67//Hs.155174:AB007892

[23623] R-HEMBB1002327//EST//0.042:249:61//Hs.121097:AA714637

[23624] R-HEMBB1002329//ESTs//1.7e-94:453:99//Hs.7114:R24312

[23625] R-HEMBB1002340//ESTs//5.8e-15:163:77//Hs.26378:H10228

[23626] R-HEMBB1002342//Homo sapiens mRNA for putative thioredoxin-like protein//0.85:46:84//Hs.42644:AJ010841

[23627] R-HEMBB1002358//ESTs//2.0e-52:319:81//Hs.140255:AA708322

[23628] R-HEMBB1002359//ESTs//2.7e-106:517:97//Hs.13634:AI051613

[23629] R-HEMBB1002364//Human mRNA for KIAA0080 gene, partial cds//5.3e-37:360:65//Hs.74554:D38522

[23630] R-HEMBB1002371//Catalase//3.3e-22:235:77//Hs.76359:X04085

[23631] R-HEMBB1002381//Homo sapiens (JH8) mRNA, partial cds//1.0e-08:120:78//Hs.142296:AF072467

[23632] R-HEMBB1002383//ESTs//3.5e-108:520:98//Hs.45140:D80055

[23633] R-HEMBB1002387

[23634] R-HEMBB1002415//ESTs, Weakly similar to !!!! ALU SUBFAMILY J WARNING ENTRY !!!! [H. sapiens]//2.3e-23:168:77//Hs.133526:N21103

[23635] R-HEMBB1002425//Human mRNA for tryptophan hydroxylase (EC 1.14.16.4)//3.2e-57:304:90//Hs.144563:AF057280

[23636] R-HEMBB1002442//ESTs//2.7e-48:289:87//Hs.155243:N70293

[23637] R-HEMBB1002453//Human mRNA for KIAA0355 gene, complete cds//6.2e-45:292:87//Hs.153014:AB002353

[23638] R-HEMBB1002457//Human mRNA for KIAA0118 gene, partial cds//2.7e-46:546:71//Hs.154326:D42087

[23639] R-HEMBB1002458//EST//1.8e-72:343:100//Hs.162006:AA508089

[23640] R-HEMBB1002477//ESTs//1.6e-38:215:93//Hs.18240:AA460083

[23641] R-HEMBB1002489//ESTs//1.2e-101:534:94//Hs.7981:H15176

[23642] R-HEMBB1002492//ESTs//5.0e-14:350:62//Hs.99205:AA204969

[23643] R-HEMBB1002495//ESTs//2.1e-19:147:86//Hs.163747:AA174017

[23644] R-HEMBB1002502//ESTs, Weakly similar to p40 [H. sapiens]//1.2e-68:336:98//Hs.141515:T41142

[23645] R-HEMBB1002509//ESTs//2.7e-97:459:99//Hs.127638:AI0114615

[23646] R-HEMBB1002510//ESTs, Weakly similar to located at OATLI [H. sapiens]//2.2e-48:265:95//Hs.48827:AA873278

[23647] R-HEMBB1002520//EST//7.2e-40:198:84//Hs.140493:AA804538

[23648] R-HEMBB1002522//Human putative transmembrane receptor IL-1 Rrp mRNA, complete cds//0.50:142:69//Hs.159301:U43672

[23649] R-HEMBB1002531//EST//0.024:147:61//Hs.148305:AA909605

[23650] R-HEMBB1002534//EST//3.1e-22:168:84//Hs.146794:AI149478

[23651] R-HEMBB1002545//ESTs//9.2e-90:421:99//Hs.118317:AI033259

[23652] R-HEMBB1002550//ESTs, Weakly similar to similar to S. cerevisiae LAGI [C. elegans]//5.1e-22:210:81//Hs.11896:T68813

[23653] R-HEMBB1002556//ISLET AMYLOID POLYPEPTIDE PRECURSOR//1.9e-45:344:82//Hs.51048:X68830

[23654] R-HEMBB1002579//ESTs//4.6e-47:326:85//Hs.155184:AA573189

[23655] R-HEMBB1002582//ESTs//0.00036:91:76//Hs.140039:AA047045

[23656] R-HEMBB1002590//ESTs//1.0e-37:210:84//Hs.36658:N91138

[23657] R-HEMBB1002596//Human mRNA for KIAA0118 gene, partial cds//2.2e-46:297:87//Hs.154326:D42087

[23658] R-HEMBB1002600//EST//2.5e-17:147:84//Hs.121918:AA777424

[23659] R-HEMBB1002601//ESTs//7.8e-68:358:95//Hs.101489:R66923

[23660] R-HEMBB1002603//EST//1.1e-47:281:90//Hs.149580:AI281881

[23661] R-HEMBB1002607//ESTs//5.4e-75:379:97//Hs.29438:H42896

[23662] R-HEMBB1002610//ESTs, Weakly similar to !!!! ALU SUBFAMILY J WARNING ENTRY !!!! [H. sapiens]//6.2e-07:140:70//Hs.155456:AA707265

[23663] R-HEMBB1002613//Homo sapiens mRNA, chromosome I specific transcript KIAA0508//8.5e-47:278:83//Hs.159187:AB007977

[23664] R-HEMBB1002614//ESTs//3.4e-81:383:99//Hs.13012:AI094150

[23665] R-HEMBB1002617//Homo sapiens protease-activated receptor 4 mRNA, complete cds//7.4e-19:151:80//Hs.137574:AF055917

[23666] R-HEMBB1002623//ESTs//1.6e-45:288:87//Hs.138852:AA284247

[23667] R-HEMBB1002635//Small inducible cytokine A5 (RANTES)//5.5e-39:278:81//Hs.155464:AF088219

[23668] R-HEMBB1002664//EST//8.9e-49:315:87//Hs.149580:AI281881

[23669] R-HEMBB1002677//ESTs//0.65:159:62//Hs.163517:AI419775

[23670] R-HEMBB1002683//H. sapiens mRNA for delta 4-3-oxosteroid 5 beta-reductase//8.6e-54:543:75//Hs.2638:Z28339

[23671] R-HEMBB1002684//ESTs//3.0e-18:148:87//Hs.158270:AA776646

[23672] R-HEMBB1002686//ESTs//6.1e-80:419:96//Hs.103002:WO2753

[23673] R-HEMBB1002692//ESTs//3.3e-58:451:82//Hs.141254:AI334099

[23674] R-HEMBB1002697//ESTs//6.2e-86:423:98//Hs.129812:AA769487

[23675] R-HEMBB1002699//EST//5.6e-46:322:84//Hs.140231:AI054398

[23676] R-HEMBB1002702//ESTs//5.6e-36:412:72//Hs.154993:AA142842

[23677] R-HEMBB1002705//POLYPOSIS LOCUS PROTEIN 1//0.024:412:58//Hs.74648:M73547

[23678] R-HEMBB1002712//ESTs//9.0e-96:451:99//Hs.136806:AA805682

[23679] R-MAMMA10000009//ESTs//3.0e-78:392:96//Hs.163947:AA678701

[23680] R-MAMMA1000019//Small inducible cytokine A5 (RANTES)//1.5e-47:247:87//Hs.155464:AF088219

[23681] R-MAMMA1000020//Zinc finger protein 2 (Al -5)//4.9e-49:384:80//Hs.155533:X60152

[23682] R-MAMMA1000025//Homo sapiens KIAA0441 mRNA, complete cds//4.7e-11:154:71//Hs.32511:AB007901

[23683] R-MAMMA1000043//Homo sapiens mRNA for KIAA0761 protein, partial cds//2.0e-58:277:84//Hs.93121 AB018304

[23684] R-MAMMA1000045//ESTs//1.0e-38:225:92//Hs.142567:AA287165

[23685] R-MAMMA1000055//EST//0.14:91:67//Hs.144061:AA996350

[23686] R-MAMMA1000057//Fucosyltransferase 1 (galactoside 2-alpha-L-fucosyltransferase, Bombay phenotype included)//3 .8e-77:545:83//Hs.69747:M35531

[23687] R-MAMMA1000069//ESTs//8.0e-108:546:96//Hs.44856:N37065

[23688] R-MAMMA1000084//Homo sapiens clone 23632 mRNA sequence//7.3e-43:313:83//Hs.46918:AF052099

[23689] R-MAMMA1000085//ESTs, Highly similar to PUTATIVE CYSTEINYL-TRNA SYNTHETASE C29E6.06C [Schizosaccharomyces pombe]//7.7e-104:546:94//Hs.7779:AA045241

[23690] R-MAMMA1000092//EST, Moderately similar to !!!! ALU SUBFAMILY J WARNING ENTRY!!!! [H. sapiens]//4.2e-22:287:71//Hs.136063:U51713

[23691] R-MAMMA1000103//LOW-DENSITY LIPOPROTEIN RECEPTOR PRECURSOR//8.4e-49:334:86//Hs.70008:L00352

[23692] R-MAMMA1000117//ESTs, Weakly similar to !!!! ALU SUBFAMILY J WARNING ENTRY !!!! [H. sapiens]//3.1e-08:96:80//Hs.115088:AA230172

[23693] R-MAMMA1000129//EST//2.8e-64:310:99//Hs.136394:AA523577

[23694] R-MAMMA1000133

[23695] R-MAMMA1000134//ESTs//1.1e-21:152:87//Hs.163747:AA174017

[23696] R-MAMMA1000139//Homo sapiens mRNA, chromosome 1 specific transcript KIAA0501//6.3e-40:288:78//Hs.159897:AB007970

[23697] R-MAMMA100014311EST115.0e-52:314:89//Hs.149580:AI281881

[23698] R-MAMMA1000155//Homo sapiens apoptotic protease activating factor 1 (Apaf-1) mRNA, complete cds//1.5e-59:562:75//Hs.77579:AF013263

[23699] R-MAMMA1100163//ESTs//2.8e-92:457:96//Hs.114413:AA884787

[23700] R-MAMMA1000171//Homo sapiens mRNA for putative lipoic acid synthetase, partial//2.5e-39:173:83//Hs.53531:AJ224162

[23701] R-MAMMA1000173//ESTs, Highly similar to SRC SUBSTRATE P80/85 PROTEINS [Gallus gallus]//2.4e-07:63:90//Hs.90367:AI357069

[23702] R-MAMMA1000175//EST//0.66:217:58//Hs.146444:A1127611

[23703] R-MAMMA1000183//ESTs//6.7e-30:341:73//Hs.125254:AA872054

[23704] R-MAMMA100019811EST//2.8e-45:185:88//Hs.149580:AI281881

[23705] R-MAMMA1000221//ESTs, Weakly similar to circadian clock protein [M. musculus]//1.4e-41:272:90//Hs.68398:AA421103

[23706] R-MAMMA1000227//EST//2.4e-39:388:76//Hs.144175:H70425

[23707] R-MAMMA1000241//EST//0.0027:263:61//Hs.37532:H57946

[23708] R-MAMMA1000251//Homo sapiens mRNA for KIAA0772 protein, complete cds//5.3e-47:322:86//Hs.15519:AB018315

[23709] R-MAMMA1000254//Homo sapiens tumor necrosis factor superfamily member LIGHT mRNA, complete cds//2.2e-43:315:83//Hs.129708:AF064090

[23710] R-MAMMA1000257//EST//1.6e-62:330:93//Hs.141728:W73041

[23711] R-MAMMA1000264//Von Hippel-Lindau syndrome//2.3e-31:141:81//Hs.78160:AF010238

[23712] R-MAMMA1000266//ESTs//3.4e-34:150:81//Hs.163980:AA715814

[23713] R-MAMMA1000270//Homo sapiens mRNA, chromosome 1 specific transcript KIAA0508//2.7e-57:304:78//Hs.159187:AB007977

[23714] R-MAMMA1000277//Thiopurine S-methyltransferase//3.7e-27:380:71//Hs.51124:AF019369

[23715] R-MAMMA1000278//ESTs//5.2e-99:504:95//Hs.8494:W72694

[23716] R-MAMMA1000279//Homo sapiens mRNA, chromosome I specific transcript KIAA0487//3.1e-58:295:83//Hs.92381:AB007956

[23717] R-MAMMA1000284//EST//4.1e-10:151:73//Hs.60742:AA017066

[23718] R-MAMMA1000287

[23719] R-MAMMA1000302//Homo sapiens KIAA0432 mRNA, complete cds//1.0:50:84//Hs.155174:AB007892

[23720] R-MAMMA1000307//Human mRNA for KIAA0033 gene, partial cds//1.8e-48:468:76//Hs.22271:D26067

[23721] R-MAMMA1000309//ESTs//1.7e-94:491:94//Hs.135106:AI335251

[23722] R-MAMMA1000312//ESTs//8.9e-74:377:96//Hs.133163:AI051434

[23723] R-MAMMA1000313//EST//8.3e- 19:294:62//Hs.127400:AA954491

[23724] R-MAMMA1000331//ESTs, Moderately similar to envelope protein [H. sapiens]//8.6e-54:278:97//Hs.139170:AA662998

[23725] R-MAMMA1000339//EST//6.8e-44:169:89//Hs.149580:AI281881

[23726] R-MAMMA1000340//Homo sapiens mRNA for KIAA0625 protein, partial cds//0.82:204:61//Hs.154919:AB014525

[23727] R-MAMMA1000348//ESTs//3.3e-34:320:75//Hs.139158:AA226159

[23728] R-MAMMA1000356//ESTs, Highly similar to URIDYLATE KINASE [Saccharomyces cerevisiae]//0.42:172:61//Hs.11463:AA535912

[23729] R-MAMMA1000360//Human mRNA for KIAA0118 gene, partial cds//3.8e-43:212:82//Hs.154326:D42087

[23730] R-MAMMA1000361//ESTs//3.1e-17:188:68//Hs.164036:AA845659

[23731] R-MAMMA1000372//ESTs//1.0e-46:307:85//Hs.145032:AA343523

[23732] R-MAMMA1000385//ESTs//8.2e-97:467:98//Hs.152282:AA412065

[23733] R-MAMMA1000388//Homo sapiens UKLF mRNA for ubiquitous Kruppel like factor, complete cds//8.6e-14:106:92//Hs.32170:AB015132

[23734] R-MAMMA1000395//ESTs//1.9e-57:292:96//Hs.11365:AI301060

[23735] R-MAMMA1000402//ESTs, Moderately similar to RETROVIRUS-RELATED POL POLYPROTEIN [Mus musculus]//9.1e-47:316:81//Hs.138698:N38973

[23736] R-MAMMA1000410//Archain//1.8e-40:443:74//Hs.33642:X81198

[23737] R-MAMMA1000413//Homo sapiens mRNA for KIAA0792 protein, complete cds//1.3e-27:304:72//Hs.119387:AB007958

[23738] R-MAMMA1000414//ESTs//2.9e-27:181:87//Hs.141254:AI334099

[23739] R-MAMMA1000416//Human macrophage-derived chemokine precursor (MDC) mRNA, complete cds//1.5e-58:282:82//Hs.97203:U83171

[23740] R-MAMMA1000421//Thromboxane A2 receptor//4.9e-48:372:80//Hs.89887:D38081

[23741] R-MAMMA1000422//ESTs//0.077:240:62//Hs.123136:AA631067

[23742] R-MAMMA1000423//Human mRNA for KIAA0392 gene, partial cds//1.3e-48:375:81//Hs.40100:AB002390

[23743] R-MAMMA1000424//Human melanoma antigen recognized by T-cells (MART-1) mRNA//1.4e-44:418:75//Hs.154069:U06452

[23744] R-MAMMA1000429//ESTs//3.9e-113:565:96//Hs.5076:N53461

[23745] R-MAMMA1000431//Human macrophage-derived chemokine precursor (MDC) mRNA, complete cds//8.6e-68:302:85//Hs.97203:U83171

[23746] R-MAMMA1000444//Calcium modulating ligand//5.5e-44:344:81//Hs.13572:AF068179

[23747] R-MAMMA1000446//ESTs//1.0:236:60//Hs.126958:AI147447

[23748] R-MAMMA1000458

[23749] R-MAMMA1000468//ESTs//4.4e-51:271:96//Hs.6839:AA055176

[23750] R-MAMMA1000472//ESTs//5.4e-39:146:86//Hs.141581:AA315361

[23751] R-MAMMA1000478//ESTs//2.3e-74:365:98//Hs.140591:AA828959

[23752] R-MAMMA1000483//ESTs//9.9e-23:235:75//Hs.163592:AA280886

[23753] R-MAMMA1000490//EST//2.1e-80:500:87//Hs.142137:AA213759

[23754] R-MAMMA1000500//Small inducible cytokine A5 (RANTES)//4.7e-43:283:86//Hs.155464:AF088219

[23755] R-MAMMA1000501//ESTs//4.2e-37:250:86//Hs.141323:N80390

[23756] R-MAMMA1000516//Human mRNA for KIAA0392 gene, partial cds//5.1e-46:459:75//Hs.40100:AB002390

[23757] R-MAMMA1000522//ESTs//9.5e- 16:226:70//Hs.116673:AA669267

[23758] R-MAMMA1000559//ESTs//5.2e-34:244:84//Hs.150727:AI292236

[23759] R-MAMMA1000565//EST//2.7e-38:386:76//Hs.162404:AA573131

[23760] R-MAMMA1000567//EST//0.33:49:79//Hs.147754:AI220561

[23761] R-MAMMA1000576//ESTs//4.9e-57:348:89//Hs.108921:N31211

[23762] R-MAMMA1000583//Homo sapiens KIAA0412 mRNA, partial cds//1.3e-52:373:77//Hs.6200:AB007872

[23763] R-MAMMA1000585//ESTs//5.1e-40:337:78//Hs.130815:AA936548

[23764] R-MAMMA1000594//Small inducible cytokine A5 (RANTES)//3.0e-45:225:80//Hs.155464:AF088219

[23765] R-MAMMA1000597//ESTs//2.0e-98:461:99//Hs.43212:AA993042

[23766] R-MAMMA1000605//CD4 receptor {exons 1 and 2} [human, T-lymphocyte, mRNA, 3429 nt]//1.5e-50:500:73//Hs.116007:S79267

[23767] R-MAMMA1000612//ESTs, Highly similar to HYPOTHETICAL TRP-ASP REPEATS CONTAINING PROTEIN IN SIS1-MRPL2 INTERGENIC REGION [Saccharomyces cerevisiae]//8.6e-108:559:94//Hs.29203:AI344105

[23768] R-MAMMA1000616//EST//0.071:169:60//Hs.144096:AI032180

[23769] R-MAMMA1000621//ESTs//1.0e-90:477:94//Hs.26073:R96361

[23770] R-MAMMA1000623

[23771] R-MAMMA1000625//ESTs//3.4e-98:556:91//Hs.119482:AI361002

[23772] R-MAMMA1000643//EST//4.9e-74:379:96//Hs.137447:AA342203

[23773] R-MAMMA1000664//Homo sapiens mRNA for putative lipoic acid synthetase, partial//3.2e-43:400:76//Hs.53531:AJ224162

[23774] R-MAMMA1000669//EST//6.9e-53:368:84//Hs.149580:AI281881

[23775] R-MAMMA1000670//ESTs, Highly similar to HYPOTHETICAL PROTEIN IN TONB 3′REGION [Klebsiella pneumoniae]//8.4e-98:464:98//Hs.31431:AI022065

[23776] R-MAMMA1000672//ESTs//2.0e-80:382:99//Hs.106747:AI080476

[23777] R-MAMMA1000684//ESTs//6.2e-72:357:98//Hs.67896:AA865212

[23778] R-MAMMA1000696//Human mRNA for KIAA0345 gene, complete cds//3.3e-52:216:75//Hs.98938:AB002343

[23779] R-MAMMA1000707//EST//7.0e-11:195:68//Hs.147002:All 84644

[23780] R-MAMMA1000713//Homo sapiens DEC-205 mRNA, complete cds//1.5e-45:485:74//Hs.153563:AF011333

[23781] R-MAMMA1000714//ESTs, Moderately similar to hypothetical protein 2 [H. sapiens]//1.2e-29:158:79//Hs.142764:AA205569

[23782] R-MAMMA1000718//ESTs//3.1e-45:264:88//Hs.152413:AA780515

[23783] R-MAMMA1000720//ESTs//7.4e-44:244:87//Hs.111742:R39329

[23784] R-MAMMA1000723//Homo sapiens mRNA for alpha(1,2)fucosyltransferase, complete cds//5.6e-52:350:82//Hs.46328:D87942

[23785] R-MAMMA1000731//ESTs//1.1e-19:420:66//Hs.35036:H95267

[23786] R-MAMMA1000732//EST//2.9e-20:229:74//Hs.135400:AI056893

[23787] R-MAMMA1000733//ESTs, Weakly similar to HYPOTHETICAL 92.1 KD PROTEIN ZK1098.3 IN CHROMOSOME III [Caenorhabditis elegans]//1.2e-35:371:74//Hs.141429:AA631915

[23788] R-MAMMA1000734//Homo sapiens SEC63 (SEC63) mRNA, complete cds//2.1e-58:253:98//Hs.31575:AF100141

[23789] R-MAMMA1000738//ESTs, Weakly similar to similar to Achlya ambisexualis antheridiol steroid receptor [C. elegans]//2.3e-116:557:98//Hs.71472:AA632288

[23790] R-MAMMA1000744//ESTs//0.015:143:67//Hs.135382:AI224205

[23791] R-MAMMA1000746//Human Line-1 repeat mRNA with 2 open reading frames//2.3e-90:568:86//Hs.23094:M19503

[23792] R-MAMMA1000752//Interleukin 10//2.8e-43:339:80//Hs.2180:M57627

[23793] R-MAMMA1000760//EST//5.0e-44:306:86//Hs.162404:AA573131

[23794] R-MAMMA1000761//EST//5.0e-41:187:85//Hs.162335:AA564256

[23795] R-MAMMA1000775//Human mRNA for KIAA0355 gene, complete cds//3.0e-46:465:76//Hs.153014:AB002353

[23796] R-MAMMA1000776//ESTs//1.9e-43:429:73//Hs.141742:W22204

[23797] R-MAMMA1000778//ESTs//1.8e-31:445:70//Hs.11723:H57439

[23798] R-MAMMA1000782//EST//0.0019:102:68//Hs.120686:AA747150

[23799] R-MAMMA1000798//ESTs//1.4e-13:267:69//Hs.140156:AA704163

[23800] R-MAMMA1000802//Clathrin, light polypeptide (Lcb)//1.5e-45:358:76//Hs.73919:X81637

[23801] R-MAMMA1000831//ESTs//1.3e-104:510:97//Hs.17494:AA572675

[23802] R-MAMMA1000839//EST//2.9e-51:307:89//Hs.149580:AI281881

[23803] R-MAMMA1000841//ESTs//1.3e-34:412:72//Hs.121256:AA757902

[23804] R-MAMMA1000842//ESTs, Moderately similar to !!!! ALU SUBFAMILY J WARNING ENTRY !!!! [H. sapiens]//9.4e-44:363:79//Hs.96337:AA225358

[23805] R-MAMMA1000843//ESTs//2.2e-106:525:97//Hs.152016:AA603097

[23806] R-MAMMA1000845//ESTs//1.6e-66:327:98//Hs.156900:AA468955

[23807] R-MAMMA1000851//ESTs//3.7e-14:115:86//Hs.140590:R76251

[23808] R-MAMMA1000855//Human mRNA for KIAA0392 gene, partial cds//5.7e-47:281:91//Hs.40100:AB002390

[23809] R-MAMMA1000856//EST//1.8e-16:150:79//Hs.136811:AA789212

[23810] R-MAMMA1000862//EST//3 .2e-05:93:73//Hs.161205:AI419311

[23811] R-MAMMA1000863//ESTs//1.0e-46:446:73//Hs.153432:AA098922

[23812] R-MAMMA1000865//Homo sapiens clone 23632 mRNA sequence//3.0e-39:324:80//Hs.46918:AF052099

[23813] R-MAMMA1000867//ESTs//9.8e-16:193:76//Hs.152340:AA521399

[23814] R-MAMMA1000875//EST//3.1e-24:301:72//Hs.132635:AI032875

[23815] R-MAMMA1000876//ESTs//9.9e-48:246:97//Hs.112165:AA621243

[23816] R-MAMMA1000877//ESTs//1 .4e-38:324:79//Hs.141024:H07128

[23817] R-MAMMA1000880//Homo sapiens mRNA for KIAA0594 protein, partial cds//3.2e-40:542:68//Hs.154872:AB011166

[23818] R-MAMMA1000883//ESTs//1 .0:207:60//Hs.47199:N51107

[23819] R-MAMMA1000897//ESTs//2.6e-78:383:97//Hs.41067:AI310215

[23820] R-MAMMA1000905//Human mRNA for KIAA0331 gene, complete cds//9.7e-53:307:91//Hs.146395:AB002329

[23821] R-MAMMA1000906//ESTs//8.0e-25:206:83//Hs.141825:AA0117093

[23822] R-MAMMA1000908//ESTs//4.4e-32:176:96//Hs.38559:AA701634

[23823] R-MAMMA1000914//ESTs//0.032:150:63//Hs.19162:AA399989

[23824] R-MAMMA1000921//Human 53K isoform of Type II phosphatidylinositol-4-phosphate 5-kinase (PIPK) mRNA, complete cds//7.7e-38:269:74//Hs.108966:U48696

[23825] R-MAMMA100093//ESTs//1.2e-80:457:91//Hs.122319:AA782335

[23826] R-MAMMA1000940//ESTs//3.3e-43:329:8211Hs.35254:A1133727

[23827] R-MAMMA1000941//ESTs//7.5e-55:306:84//Hs.163936:AA632281

[23828] R-MAMMA1000942//ESTs//2.5e-83:405:98//Hs.116491:AA650428

[23829] R-MAMMA1000943//Cytochrome P450, subfamily I (aromatic compound-inducible), polypeptide 2//9.3e-79:567:80//Hs.1361:M55053

[23830] R-MAMMA1000956//EST//5.7e-53:256:100//Hs.162209:AA536178

[23831] R-MAMMA1000957//Kangai I (suppression of tumorigenicity 6, prostate; CD82 antigen (R2 leukocyte antigen, antigen detected by monoclonal and antibody IA4))//7.5e-49:340:85//Hs.103458:X53795

[23832] R-MAMMA1000962//Homo sapiens mRNA for KIAA0575 protein, complete cds//2.0e-48:216:85//Hs.153468:AB011147

[23833] R-MAMMA1000968//EST//6.2e-46:302:86//Hs.149580:AI281881

[23834] R-MAMMA1000975//ESTs//1.4e-85:428:96//Hs.141742:W22204

[23835] R-MAMMA1000979//Homo sapiens mRNA for KIAA0761 protein, partial cds//8.0e-39:338:79//Hs.93121:AB018304

[23836] R-MAMMA1000987//EST//2.8e-41:249:90//Hs.149580:AI281881

[23837] R-MAMMA1000998//Homo sapiens apoptotic protease activating factor 1 (Apaf-1) mRNA, complete cds//3.9e-50:445:77//Hs.77579:AF013263

[23838] R-MAMMA1001003//Sialophorin (gpL 115, leukosialin, CD43)//4.1e-51:282:82//Hs.80738:X52075

[23839] R-MAMMA1001008//ESTs, Weakly similar to renin [H. sapiens]//1.9e-82:405:97//Hs.25863:AA630313

[23840] R-MAMMA1001021//Homo sapiens DEC-205 mRNA, complete cds//3.0e-44:309:86//Hs.153563:AF011333

[23841] R-MAMMA1001024//ESTs//6.8e-35:333:78//Hs.107657:AA126814

[23842] R-MAMMA1001030//ESTs//1.6e-10:552:96//Hs.59483:AA524536

[23843] R-MAMMA1001035//ESTs//1.0e-45:273:85//Hs.138856:H47461

[23844] R-MAMMA1001038//Human mRNA for KIAA0392 gene, partial cds//3.0e-50:298:91//Hs.40100:AB002390

[23845] R-nnnnnnnnnnnn//ESTs//3.6e-86:445:95//Hs.122625:R68650

[23846] R-MAMMA11001050//EST//2.2e-54:387:85//Hs.149580:AI281881

[23847] R-MAMMA1001059//ESTs, Moderately similar to RNA helicase [M. musculus]//1.7e-13:273:65//Hs.98738:AI015487

[23848] R-MAMMA1001067//ESTs//1.3e-38:324:78//Hs.20190:AA525532

[23849] R-MAMMA1001073//ESTs//5.2e-106:554:94//Hs.12336:W63748

[23850] R-MAMMA1001074//Human mRNA for KIAA0355 gene, complete cds//1.2e-38:544:68//Hs.153014:AB002353

[23851] R-MAMMA1001075//ESTs//2.0e-98:463:99//Hs.18341:N38944

[23852] R-MAMMA1001078//Human Line-1 repeat mRNA with 2 open reading frames//1.7e-84:556:85//Hs.23094:M19503

[23853] R-MAMMA1001082//ESTs//2.4e-71:356:97//Hs.152302:T90222

[23854] R-MAMMA11001091//ESTs//4.7e-83:429:95//Hs.154412:AA310926

[23855] R-MAMMA100092//Homo sapiens X-ray repair cross-complementing protein 2 (XRCC2) mRNA, complete cds//6.4e-34:262:82//Hs.129727:AF035587

[23856] R-MAMMA1001105//Human putative RNA binding protein RNPL mRNA, complete cds//4.2e-27:232:76//Hs.61840:U28686

[23857] R-MAMMA1100110//ESTs//1.6e-17:128:87//Hs.161314:AI421576

[23858] R-MAMMA1001126//CD4 receptor {exons 1 and 2} [human, T-lymphocyte, mRNA, 3429 nt]//8.8e-53:462:78//Hs.116007:S79267

[23859] R-MAMMA1001133//Homo sapiens tapasin (NGS-17) mRNA, complete cds//1.8e-59:460:81//Hs.5247:AF029750

[23860] R-MAMMA1001139//ESTs//1.3e-62:341:94//Hs.18819:R01029

[23861] R-MAMMA1001143//ESTs//3.0e-48:383:80//Hs.152340:AA521399

[23862] R-MAMMA11001145//Calcium modulating ligand//5.1e-48:403:79//Hs.13572:AF068179

[23863] R-MAMMA1001154//EST//6.8e-35:313:75//Hs.162404:AA573131

[23864] R-MAMMA1001161//Homo sapiens tapasin (NGS-17) mRNA, complete cds//1.1e-58:409:84//Hs.5247:AF029750

[23865] R-MAMMA1001162//ESTs, Highly similar to t-BOP [M. musculus]//2.1e-91:430:99//Hs.129982:AI420970

[23866] R-MAMMA10181//ESTs//5.0e-112:557:96//Hs.118181:WO2251

[23867] R-MAMMA1001186//ESTs//3.8e-85:410:99//Hs.163811:W44959

[23868] R-MAMMA1001191//ESTs//0.018:57:87//Hs.141253:AA226519

[23869] R-MAMMA1001198//ESTs, Weakly similar to involved in signaling by the epidermal growth factor receptor [M. musculus]//2.6e-80:358:96//Hs.163827:AA074202

[23870] R-MAMMA1001202//ESTs//7.0e-43:230:95//Hs.79788:AA527348

[23871] R-MAMMA1001203//Clathrin, light polypeptide (Lcb)//2.8e-65:348:79//Hs.73919:X81637

[23872] R-MAMMA1001206//EST//0.098:84:72//Hs.162941:AA635148

[23873] R-MAMMA1001215//ESTs//1.3e-43:156:86//Hs.155243:N70293

[23874] R-MAMMA1001220//ESTs//8.9e-17:276:68//Hs.116518:AA653202

[23875] R-MAMMA1001222//ESTs//0.49:112:66//Hs.24668:AA897315

[23876] R-MAMMA1001243//EST//0.99:143:62//Hs.68522:C20701

[23877] R-MAMMA1001244//ESTs//2.2e-06:79:83//Hs.123163:AA809619

[23878] R-MAMMA1001249//ESTs//4.2e-68:343:97//Hs.147139:AI191307

[23879] R-MAMMA1001256//ESTs, Moderately similar to hypothetical protein 2 [H. sapiens]//4.7e-31:221:77//Hs.142764:AA205569

[23880] R-MAMMA11001259//ESTs//1.3e-43:266:90//Hs.6193:AA045149

[23881] R-MAMMA1001260//Homo sapiens mRNA for KIAA0661 protein, complete cds//2.0e-21:226:75//Hs.65238:AB014561

[23882] R-MAMMA1001268//H. sapiens HCG II mRNA//2.4e-53:181:85//Hs.146333:X81001

[23883] R-MAMMA1001271//ESTs, Highly similar to PUTATIVE SERINE/THREONINE-PROTEIN KINASE EMK [Mus musculus]//1.1e-108:546:95//Hs.18999:N30643

[23884] R-MAMMA1001274//Homo sapiens mRNA for KIAA0572 protein, partial cds//4.4e-32:188:94//Hs.14409:AB011144

[23885] R-MAMMA1001280//EST//0.0015:170:62//Hs.116770:AA630371

[23886] R-MAMMA1001292//ESTs//5.6e-102:481:99//Hs.94810:AA811876

[23887] R-MAMMA1001296//Homo sapiens mRNA for KIAA0563 protein, complete cds//2.2e-27:348:70//Hs.15731:AB011135

[23888] R-MAMMA1001298//ESTs//1.4e-44:375:79//Hs.70279:AA757426

[23889] R-MAMMA1001305//Human G protein-coupled receptor (STRL22) mRNA, complete cds//4.0e-43:300:85//Hs.46468:U45984

[23890] R-MAMMA1001322//Homo sapiens stress-activated protein kinase 4 mRNA, complete cds//8.8e-12:188:70//Hs.55771:AF004709

[23891] R-MAMMA1001324//ESTs//5.3e-68:297:88//Hs.121228:AA709471

[23892] R-MAMMA1001330//ESTs//1.6e-57:429:83//Hs.70279:AA757426

[23893] R-MAMMA1001341//Homo sapiens 4F5S mRNA, complete cds//4.8e-27:285:75//Hs.32567:AF073519

[23894] R-MAMMA1001343//ESTs//8.1e-51:273:93//Hs.162208:AA536127

[23895] R-MAMMA1001346//ESTs//1.0:122:65//Hs.33028:AA482478

[23896] R-MAMMA1001383//ESTs//1.4e-45:377:80//Hs.114671:N39322

[23897] R-MAMMA100138811EST//7.7e-47:361:80//Hs.162197:AA535216

[23898] R-MAMMA1001397//EST//8.7e-48:337:83//Hs.149580:AI281881

[23899] R-MAMMA1001408//EST//1.2e-38:251:87//Hs.162677:AA604831

[23900] R-MAMMA1001411//ESTs//4.3e-93:435:99//Hs.105460:AA780275

[23901] R-MAMMA1001419//Homo sapiens translation initiation factor 4e mRNA, complete cds//1.6e-19:117:96//Hs.19122:AF038957

[23902] R-MAMMA1001420//ESTs//7.3e-96:507:95//Hs.55299:AI335267

[23903] R-MAMMA1001435//ESTs//5.0e-97:459:99//Hs.144843:AI222168

[23904] R-MAMMA1001442//ESTs//7.1e-28:167:83//Hs.141019:AA287618

[23905] R-MAMMA1001446//Homo sapiens KIAA0432 mRNA, complete cds//6.2e-19:328:67//Hs.155174:AB007892

[23906] R-MAMMA1001452//EST//5.6e-44:487:75//Hs.161476:N57542

[23907] R-MAMMA1001465

[23908] R-MAMMA1001476//Homo sapiens yolk sac permease-like molecule 3 (YSPL3) mRNA, complete cds//0.79:182:66//Hs.136529:AF058317

[23909] R-MAMMA1001487//Homo sapiens KIAA0395 mRNA, partial cds//1.1e-35:328:78//Hs.43681:AL022394

[23910] R-MAMMA100101//ESTs//4.6e-100:472:98//Hs.123660:AA813065

[23911] R-MAMMA1001502//Human mRNA for KIAA0080 gene, partial cds//5.6e-15:220:69//Hs.74554:D38522

[23912] R-MAMMA1001510

[23913] R-MAMMA1001522//ESTs//3.2e-16:214:75//Hs.152816:AA634242

[23914] R-MAMMA1001547//H. sapiens mRNA for urea transporter//2.3e-45:282:89//Hs.66710:X96969

[23915] R-MAMMA1001551//Human 53K isoform of Type II phosphatidylinositol-4-phosphate 5-kinase (PIPK) mRNA, complete cds//1.9e-56:489:76//Hs.108966:U48696

[23916] R-MAMMA1001575//ESTs//4.3e-92:440:98//Hs.162882:AA807140

[23917] R-MAMMA1001576//ESTs, Highly similar to TUBULIN GAMMA CHAIN [Homo sapiens]//1.9e-11I :549:96//Hs.21635:AI417305

[23918] R-MAMMA1001590//ESTs//1.1e-63:324:96//Hs.142217:AA278441

[23919] R-MAMMA1001600//ESTs//5.6e-15:159:78//Hs.138633:H98792

[23920] R-MAMMA1001604

[23921] R-MAMMA1001606//ESTs, Weakly similar to finger protein koxl [H. sapiens]//1.9e-97:488:96//Hs.143263:AI057616

[23922] R-MAMMA1001620//Homo sapiens mRNA, clone:RES4-16//5.4e-43:408:76//Hs.121493:D25272

[23923] R-MAMMA1001627//Homo sapiens mRNA for KIAA0772 protein, complete cds//2.0e-49:472:76//Hs.15519:AB018315

[23924] R-MAMMA1001630//ESTs, Weakly similar to putative p150 [H. sapiens]//6.8e-15:168:73//Hs.115216:AA291074

[23925] R-MAMMA1001633//EST//5.1e-14:228:68//Hs.141456:N36377

[23926] R-MAMMA1001635//ESTs//3.4e-37:368:75//Hs.164033:AA769606

[23927] R-MAMMA1001649

[23928] R-MAMMA1001663//Homo sapiens neuronal thread protein AD7c-NTP mRNA, complete cds//1.7e-54:272:81//Hs.129735:AF010144

[23929] R-MAMMA1001670//Small inducible cytokine A5 (RANTES)//5.7e-50:304:89//Hs.155464:AF088219

[23930] R-MAMMA1001671//EST//1.9e-14:312:65//Hs.137153:R46248

[23931] R-MAMMA1100679//H. sapiens mRNA for rho GDP-dissociation Inhibitor 1//0.066:196:62//Hs.159161:X69550

[23932] R-MAMMA1001683//ESTs//4.9e-94:447:98//Hs.134464:AI151081

[23933] R-MAMMA1001686//Homo sapiens mRNA, chromosome I specific transcript KIAA0488//1.0e-17:246:73//Hs.67619:AB007957

[23934] R-MAMMA1001692//Human mRNA for KIAA0063 gene, complete cds//2.1e-47:294:89//Hs.3094:D31884

[23935] R-MAMMA1001711//ESTs//2.4e-86:439:96//Hs.18498:N52088

[23936] R-MAMMA1001715//ESTs//1.2e-73:399:93//Hs.124620:AI082338

[23937] R-MAMMA1001730//ESTs//1.1e-85:403:99//Hs.125464:AI084596

[23938] R-MAMMA1001735//ESTs, Highly similar to TUBULIN BETA-5 CHAIN [Gallus gallus]//3.7e-110:552:96//Hs.6923:AI161158

[23939] R-MAMMA1001740//ESTs//4.6e-45:342:82//Hs.37573:H59651

[23940] R-MAMMA1001743//EST//2.7e-58:412:85//Hs.149742:AI285666

[23941] R-MAMMA1001744

[23942] R-MAMMA1001745//EST//5.6e-54:374:84//Hs.137041:AA877817

[23943] R-MAMMA1001751//EST//3.5e-36:375:73//Hs.139715:N25041

[23944] R-MAMMA1001754//EST//0.18:144:66//Hs.71957:AA151413

[23945] R-MAMMA1001757//ESTs//1.0e-98:488:96//Hs.45184:C14904

[23946] R-MAMMA1001760//ESTs//8.7e-29:206:86//Hs.143310:AI142276

[23947] R-MAMMA1001764//ESTs//0.00012:434:58//Hs.120051:AA707847

[23948] R-MAMMA1001768//Human mRNA for KIAA0327 protein, complete cds//2.3e-41:299:85//Hs.149323:AB002325

[23949] R-MAMMA1001769//EST//1.7e-15:139:81//Hs.162399:AA572825

[23950] R-MAMMA1001771//ESTs, Moderately similar to semaphorin B [M. musculus]//7.6e-43:257:91//Hs.7634:AA481246

[23951] R-MAMMA1001783//Human high-affinity copper uptake protein (hCTR1) mRNA, complete cds//5.6e-42:272:86//Hs.73614:U83460

[23952] R-MAMMA10017851//ESTs//1.5e-87:431:98//Hs.131065:AA972238

[23953] R-MAMMA1001788//EST//0.95:108:62//Hs.145881:AI274644

[23954] R-MAMMA1001790//ESTs//4.0e-41:340:80//Hs.158045:AA425744

[23955] R-MAMMA1001806//EST//1.4e-40:297:84//Hs.141240:H60313

[23956] R-MAMMA10018121//ESTs//2.4e-93:446:98//Hs.129034:AA776892

[23957] R-MAMMA1100815//EST//0.00053:371:59//Hs.133255:AI052659

[23958] R-MAMMA1001817//Human mRNA for KIAA0226 gene, complete cds//2 .1e-46:325:87//Hs.44106:D86979

[23959] R-MAMMA1001818

[23960] R-MAMMA1001820//EST//1.9e-49:303:89//Hs.149580:AI281881

[23961] R-MAMMA1001824//Homo sapiens 4F5S mRNA, complete cds//4.3e-48:438:75//Hs.32567:AF073519

[23962] R-MAMMA1001836//ESTs//3.8e-06:128:71//Hs.143611:M78140

[23963] R-MAMMA1001837//Homo sapiens KIAA0395 mRNA, partial cds//3.8e-47:339:83//Hs.43681:AL022394

[23964] R-MAMMA1001848//ESTs//2.1e-16:125:85//Hs.161662:AA836811

[23965] R-MAMMA100185//ESTs//4.5e-48:344:84//Hs.138856:H47461

[23966] R-MAMMA1001854//Small inducible cytokine A5 (RANTES)//2.6e-38:280:83//Hs.155464:AF088219

[23967] R-MAMMA1001858//ESTs//1.1e-44:331:83//Hs.44702:A148840

[23968] R-MAMMA1001864//Homo sapiens mRNA for KIAA0475 protein, complete cds//7.8e-31:262:77//Hs.5737:AB007944

[23969] R-nnnnnnnnnnnn//Homo sapiens antigen NY-CO-16 mRNA, complete cds//9.2e-06:450:58//Hs.132206:AF039694

[23970] R-MAMMA1001874//Human high-affinity copper uptake protein (hCTR1) mRNA, complete cds//4.9e-46:332:83//Hs.73614:U83460

[23971] R-MAMMA1001878//Cytochrome P450, 51 (lanosterol 14-alpha-demethylase)//1.2e-46:429:78//Hs.2379:U23942

[23972] R-MAMMA1001880//ESTs, Moderately similar to !!!! ALU SUBFAMILY J WARNING ENTRY!!!! [H. sapiens]//7.6e-26:230:79//Hs.106008:AA147606

[23973] R-MAMMA1001890//ESTs//1.1e-39:338:79//Hs.146811:AA410788

[23974] R-MAMMA1001907//Kangai I (suppression of tumorigenicity 6, prostate; CD82 antigen (R2 leukocyte antigen, antigen detected by monoclonal and antibody IA4))//6.7e-47:283:89//Hs.103458:X53795

[23975] R-nnnnnnnnnnnn//ESTs//0.043:134:65//Hs.145333:AI251374

[23976] R-MAMMA1001931//ESTs//1.8e-75:361:99//Hs.148125:AA693801

[23977] R-MAMMA1001956//Homo sapiens mRNA for KIAA0706 protein, complete cds//1.4e-18:174:77//Hs.139648:AB014606

[23978] R-MAMMA1001963//ESTs//6.7e-28:206:84//Hs.163254:AA828790

[23979] R-MAMMA1001969//ESTs, Weakly similar to hypothetical protein [H. sapiens]//6.7e-24:331:71//Hs.140506:AA308018

[23980] R-MAMMA1001970//ESTs//8.9e-61:286:84//Hs.141575:AA211734

[23981] R-MAMMA1001992//ESTs//4.4e-43:339:82//Hs.155498:W27084

[23982] R-MAMMA1002009//Small inducible cytokine A5 (RANTES)//4.6e-24:330:70//Hs.155464:AF088219

[23983] R-MAMMA1002011//ESTs//9.5e-72:360:97//Hs.13525:R39054

[23984] R-MAMMA1002032//Human melanoma antigen recognized by T-cells (MART-1) mRNA//3.7e-45:370:80//Hs.154069:U06452

[23985] R-MAMMA1002033//EST//4.6e-23:264:74//Hs.161917:AA483223

[23986] R-MAMMA1002041//ESTs//3.8e-100:465:100//Hs.141361:AI206412

[23987] R-MAMMA1002042//Homo sapiens 4F5S mRNA, complete cds//1.1e-43:407:76//Hs.32567:AF073519

[23988] R-MAMMA1002047//Homo sapiens mRNA for chemokine LEC precursor, complete cds//1.9e-37:316:74//Hs.10458:AF088219

[23989] R-MAMMA1002056//EST//1.3e-51:310:90//Hs.149580:AI281881

[23990] R-MAMMA1002058//ESTs//5.9e-16:135:84//Hs.95807:AA146979

[23991] R-MAMMA1002068//ESTs, Weakly similar to HYPOTHETICAL 43.3 KD PROTEIN IN QOXD-VPR INTERGENIC REGION [Bacillus subtilis]//4.0e-45:404:78//Hs.138596:N38806

[23992] R-MAMMA1002078//EST//2.2e-15:207:71//Hs.132635:AI032875

[23993] R-MAMMA1002082//Homo sapiens mRNA for TSC403 protein, complete cds//1.7e-42:314:83//Hs.10887:AB013924

[23994] R-MAMMA1002084//Human mRNA for KIAA0392 gene, partial cds//3.7e-46:308:87//Hs.40100:AB002390

[23995] R-MAMMA1002093//EST//0.89:213:60//Hs.151201:AI125907

[23996] R-MAMMA1002108//ESTs//1.0e-95:515:93//Hs.29002:H 1347

[23997] R-MAMMA1002118

[23998] R-MAMMA1002125//Thromboxane A2 receptor//7.2e-43:335:83//Hs.89887:D38081

[23999] R-MAMMA1002132//Homo sapiens neuronal thread protein AD7c-NTP mRNA, complete cds//1.4e-58:396:78//Hs.129735:AF010144

[24000] R-MAMMA1002140//Homo sapiens nephrin (NPHS1) mRNA, complete cds//1.4e-37:422:75//Hs.128834:AF035835

[24001] R-MAMMA1002143//ESTs//0.050:123:69//Hs.8231:AA152276

[24002] R-MAMMA1002145//Homo sapiens KIAA0426 mRNA, complete cds//5.0e-21:371:69//Hs.97476:AB007886

[24003] R-MAMMA1002153//ESTs//2.0e-31:159:77//Hs.130815:AA936548

[24004] R-MAMMA1002155//Human Line-1 repeat mRNA with 2 open reading frames//8.7e-39:506:69//Hs.23094:M 19503

[24005] R-MAMMA1002156//Homo sapiens mRNA for putative lipoic acid synthetase, partial//2.9e-44:336:82//Hs.53531:AJ224162

[24006] R-MAMMA1002158//ESTs//3.0e-40:313:83//Hs.118273:AA626040

[24007] R-MAMMA1002170//Homo sapiens mRNA for TRAF5, complete cds//7.7e-37:370:77//Hs.29736:AB000509

[24008] R-MAMMA1002174//ESTs//2.5e-16:186:75//Hs.141203:H52638

[24009] R-MAMMA1002198//Homo sapiens mRNA, chromosome I specific transcript KIAA0487//6.2e-51:318:82//Hs.92381:AB007956

[24010] R-MAMMA1002209//ESTs//9.2e-34:111:88//Hs.141575:AA211734

[24011] R-MAMMA1002215//ESTs//3.6e-101:530:94//Hs.26780:N50038

[24012] R-MAMMA1002219//Homo sapiens mRNA for KIAA0640 protein, partial cds//5.2e-45:283:88//Hs.153026:AB014540

[24013] R-MAMMA1002230//Human 53K isoform of Type II phosphatidylinositol-4-phosphate 5-kinase (PIPK) mRNA, complete cds//9.1e-50:330:77//Hs.108966:U48696

[24014] R-MAMMA1002236

[24015] R-MAMMA1002243

[24016] R-MAMMA1002250//Homo sapiens PYRIN (MEFV) mRNA, complete cds//1.2e-44:299:87//Hs.113283:AAF018080

[24017] R-MAMMA1002267//Homo sapiens mRNA, chromosome 1 specific transcript KIAA0487//1.6e-54:207:81//Hs.92381:AB007956

[24018] R-MAMMA1002268//ESTs//2.9e-94:439:100//Hs.68061:AI042283

[24019] R-MAMMA1002269//ESTs//7.4e-05:170:65//Hs.140466:AA766772

[24020] R-MAMMA1002282//ESTs//7.8e-09:69:78//Hs.159502:AA225141

[24021] R-MAMMA1002292//ESTs//5.3e-64:334:94//Hs.113606:AI138751

[24022] R-MAMMA1002293//ESTs, Moderately similar to plakophilin 2b [H. sapiens]//1.7e-39:203:81//Hs.154257:AI275982

[24023] R-MAMMA1002294//EST//8.1e-43:326:82//Hs.149580:A1281881

[24024] R-MAMMA1002297//ESTs//6.5e-45:323:83//Hs.155475:AA761454

[24025] R-MAMMA1002298//ESTs//1.7e-68:355:96//Hs.52683:H87153

[24026] R-MAMMA1002299//ESTs, Highly similar to LINE-1 REVERSE TRANSCRIPTASE HOMOLOG [Homo sapiens]//2.3e-58:346:91//Hs.140385:AA773359

[24027] R-MAMMA1002308

[24028] R-MAMMA1002310//Human melanoma antigen recognized by T-cells (MART-1) mRNA//2.2e-44:280:87//Hs.154069:U06452

[24029] R-MAMMA1002311//Human Line-1 repeat mRNA with 2 open reading frames//2.3e-70:503:81//Hs.23094:M19503

[24030] R-MAMMA1002312//EST//1.7e-31:144:80//Hs.135936:N36094

[24031] R-MAMMA1002317//Human mRNA for tryptophan hydroxylase (EC 1.14.16.4)//4.3e-49:457:76//Hs.144563:AF057280

[24032] R-MAMMA1002319//ESTs//3.9e-38:297:70//Hs.140326:AA827183

[24033] R-MAMMA1002322//ESTs//1.1e-46:301:86//Hs.155498:W27084

[24034] R-MAMMA1002329//EST//2.6e-09:146:72//Hs.132366:AI026658

[24035] R-MAMMA1002332//Homo sapiens clone 23892 mRNA sequence//2.6e-45:387:70//Hs.91916:AF035317

[24036] R-MAMMA1002333//EST//1.8e-09:139:74//Hs.137800:AA886897

[24037] R-MAMMA1002339//ESTs//4.2e-47:310:76//Hs.138865:W57618

[24038] R-MAMMA1002347//ESTs//1 .5e-44:326:83//Hs.111723:H57439

[24039] R-MAMMA1002351//ESTs//3.0e-112:545:97//Hs.26209:AI143127

[24040] R-MAMMA1002352//Homo sapiens mRNA for leukemia associated gene 2//1.5e-58:259:92//Hs.43628:Y15228

[24041] R-MAMMA1002353//Human mRNA for KIAA0392 gene, partial cds//4.5e-40:360:77//Hs.40100:AB002390

[24042] R-MAMMA1002355//ESTs//1.4e-29:307:75//Hs.3769:AI085367

[24043] R-MAMMA1002356//Clathrin, light polypeptide (Lcb)//4.9e-31:217:88//Hs.73919:X81637

[24044] R-MAMMA1002359//Homo sapiens PYRIN (MEFV) mRNA, complete cds//1.1e-70:483:84//Hs.113283:AF018080

[24045] R-MAMMA1002360//ESTs//3.5e-19:301:69//Hs.124701:AA701475

[24046] R-MAMMA1002361//Homo sapiens X-ray repair cross-complementing protein 2 (XRCC2) mRNA, complete cds//2.6e-30:244:81//Hs.129727:AF035587

[24047] R-MAMMA1002362//ESTs//2.3e-43:241:88//Hs.150727:AI292236-R-MAMMA1002380//ESTs//5.1e-36:322:79//Hs.136994:AA843542

[24048] R-MAMMA1002384//Small inducible cytokine A5 (RANTES)//1.8e-42:298:84//Hs.155464:AF088219

[24049] R-MAMMA1002385//ESTs//0.57:203:63//Hs.146303:AA579061

[24050] R-MAMMA1002392//Human mRNA for platelet-activating factor acetylhydrolase 2, complete cds//5.8e-41:305:83//Hs.86188:D87845

[24051] R-MAMMA1002411//ESTs//4.4e-68:385:92//Hs.53478:N92294

[24052] R-MAMMA1002413//Homo sapiens mRNA for small GTP-binding protein, complete cds//3.3e-14:138:75//Hs.115325:D84488

[24053] R-MAMMA1002417//ESTs//1.6e-98:475:98//Hs.96345:N22588

[24054] R-MAMMA1002427//ESTs//3.1e-39:274:79//Hs.141130:H28477

[24055] R-MAMMA1002428//ESTs//8.4e-11:215:66//Hs.141022:H06475

[24056] R-MAMMA1002434//ESTs, Moderately similar to !!!! ALU SUBFAMILY SP WARNING ENTRY !!!! [H. sapiens]//2.5e-106:521:98//Hs.112152:AA487348

[24057] R-MAMMA1002446//ESTs, Weakly similar to !!!! ALU SUBFAMILY SC WARNING ENTRY!!!! [H. sapiens]//4.7e-37:374:68//Hs.157142:U85996

[24058] R-MAMMA1002454//Homo sapiens mRNA, chromosome 1 specific transcript KIAA0485//2.0e-60:323:81//Hs.89121:AB007954

[24059] R-MAMMA1002461//ESTs//4.7e-111:548:97//Hs.104281:AA147076

[24060] R-MAMMA1002470//ESTs, Highly similar to HYPOTHETICAL 80.7 KD PROTEIN IN ERG7-NMD2 INTERGENIC REGION [Saccharomyces cerevisiae]//8.5e-104:544:93//Hs.94570:AI192106

[24061] R-MAMMA1002475//ESTs, Weakly similar to !!!! ALU SUBFAMILY J WARNING ENTRY!!!! [H. sapiens]//3.4e-31:263:79//Hs.38687:AA744496

[24062] R-MAMMA1002480//ESTs, Weakly similar to !!!! ALU SUBFAMILY J WARNING ENTRY !!!! [H. sapiens]//1.0e-34:159:79//Hs.133526:N21103

[24063] R-MAMMA1002485//Homo sapiens stanniocalcin-2 (STC-2) mRNA, complete cds//8.9e-116:560:97//Hs.155223:AF055460

[24064] R-MAMMA1002494//ESTs//3.2e-47:303:88//Hs.155243:N70293

[24065] R-MAMMA1002498//Human novel homeobox mRNA for a DNA binding protein//0.0043:331:58//Hs.37035:U07664

[24066] R-MAMMA1002524//ESTs//0.0039:354:61//Hs.125797:AA806277

[24067] R-MAMMA1002530//Homo sapiens cytosolic phospholipase A2 gamma (cPLA2 gamma) mRNA, complete cds//3.9e-103:529:95//Hs.18858:AF065214

[24068] R-MAMMA1002545//Homo sapiens mRNA for KIAA0575 protein, complete cds//9.5e-50:317:88//Hs.153468:AB011147

[24069] R-MAMMA1002554//ESTs//2.3e-85:445:95//Hs.139140:AA218851

[24070] R-MAMMA1002556//ESTs, Weakly similar to !!!! ALU SUBFAMILY J WARNING ENTRY !!!! [H. sapiens]//1.0e-12:280:65//Hs.12725:T65058

[24071] R-MAMMA1002566//ESTs//2.3e-88:421:99//Hs.17602:AA705681

[24072] R-MAMMA1002571//ESTs//5.1e-97:456:99//Hs.152834:AA595693

[24073] R-MAMMA1002573//ESTs//3.1e-38:258:87//Hs.163989:R74433

[24074] R-MAMMA1002585//ESTs//7.8e-96:533:91//Hs.26009:H49371

[24075] R-MAMMA1002590//ESTs//0.61:202:62//Hs.161190:AI419258

[24076] R-MAMMA1002597//Cytochrome P450, subfamily IIB (phenobarbital-inducible), polypeptide 6//2.9e-21:177:75//Hs.1360:M29874

[24077] R-MAMMA1002598//ESTs//3.4e-113:544:97//Hs.20263:AA573737

[24078] R-MAMMA1002603//Thiopurine S-methyltransferase//7.6e-35:225:80//Hs.51124:AF019369

[24079] R-MAMMA1002612//Cytochrome P450, subfamily I (aromatic compound-inducible), polypeptide 2//4.2e-46:424:75//Hs.1361:M55053

[24080] R-MAMMA1002617//ESTs//1.1e-38:229:92//Hs.96987:W27389

[24081] R-MAMMA1002618//Landsteiner-Wiener blood group glycoprotein//1.3e-27:185:73//Hs.108287:L27670

[24082] R-MAMMA1002619//ESTs//1.7e-95:480:96//Hs.54873:AA526306

[24083] R-MAMMA1002622//Thromboxane A2 receptor//3.2e-46:298:87//Hs.89887:D38081

[24084] R-MAMMA1002623//EST//4.3e-49:336:85//Hs.149580:AI281881

[24085] R-MAMMA1002625//ESTs, Moderately similar to ovarian-specific protein [R. norvegicus]//2.3e-35:308:79//Hs.93332:AA811920

[24086] R-MAMMA1002629//Homo sapiens mRNA for small GTP-binding protein, complete cds//9.7e-57:283:86//Hs.115325:D84488

[24087] R-MAMMA1002636//Human mRNA for KIAA0392 gene, partial cds//1.2e-49:303:89//Hs.40100:AB002390

[24088] R-MAMMA10002637//ESTs//1.3e-55:391:85//Hs.95074:A1144421

[24089] R-MAMMA1002646//ESTs//7.4e-36:182:80//Hs.163937:N69915

[24090] R-MAMMA1002650//ESTs//1.6e-102:547:94//Hs.57841:W63776

[24091] R-MAMMA1002655

[24092] R-MAMMA1002662//Homo sapiens KIAA0426 mRNA, complete cds//2.2e-46:462:75//Hs.97476:AB007886

[24093] R-MAMMA1002665//Human mRNA for KIAA0118 gene, partial cds//9.1e-51:376:82//Hs.154326:D42087

[24094] R-MAMMA1002671//ESTs, Weakly similar to coded for by C. elegans cDNA yk52e10.5 [C. elegans]//5.3e-1108:544:96//Hs.16464:W19606

[24095] R-MAMMA1002673//EST//3 .3e-35:169:79//Hs.140046:AA668213

[24096] R-MAMMA1002684//Homo sapiens mRNA for KIAA0214 protein, complete cds//4.6e-109:544:96//Hs.3363:D86987

[24097] R-MAMMA1002685//EST//1.9e-31:223:86//Hs.112540:AA601385

[24098] R-MAMMA1002698//ESTs//5.9e-43:292:85//Hs.144660:AA652675

[24099] R-MAMMA1002699//ESTs//3.2e-25:134:100//Hs.126049:F22510

[24100] R-MAMMA1002701//ESTs, Weakly similar to !!!! ALU SUBFAMILY J WARNING ENTRY!!!! [H. sapiens]//6.9e-70:353:96//Hs.138404:R70986

[24101] R-MAMMA1002708//ESTs//2.1e-76:413:94//Hs.57932:W69234

[24102] R-MAMMA100271//ESTs//1.9e-44:236:96//Hs.138575:H67858

[24103] R-MAMMA1002721//Homo sapiens DEC-205 mRNA, complete cds//2.7e-43:273:89//Hs.153563:AF011333

[24104] R-MAMMA1002727//ESTs//2.9e-84:395:100//Hs.162826:AA679571

[24105] R-MAMMA1002728//Small inducible cytokine A5 (RANTES)//3.4e-42:266:88//Hs.155464:AF088219

[24106] R-MAMMA1002744//ESTs//4.2e-18:473:63//Hs.42826:AA846757

[24107] R-MAMMA1002746//ESTs//1.8e-100:473:99//Hs.117558:AA779907

[24108] R-MAMMA1002748//Human melanoma antigen recognized by T-cells (MART-1) mRNA//5.8e-40:330:80//Hs.154069:U06452

[24109] R-MAMMA1002754//ESTs, Weakly similar to !!!! ALU SUBFAMILY J WARNING ENTRY !!!! [H. sapiens]//4.5e-40:369:77//Hs.105292:AA504776

[24110] R-MAMMA1002758

[24111] R-MAMMA1002764//ESTs//4.2e-103:486:99//Hs.159909:AI393281

[24112] R-MAMMA1002765//ESTs//1.6e-37:338:76//Hs.37573:H59651

[24113] R-MAMMA1002769//ESTs//0.72:409:57//Hs.141376:AI301272

[24114] R-MAMMA1002780//ESTs//1.6e-52:292:92//Hs.135985:AA342750

[24115] R-MAMMA1002782//ESTs//1.0e-31:157:80//Hs.159510:AA297145

[24116] R-MAMMA1002796//ESTs//3.8e-49:284:92//Hs.156479:AA513812

[24117] R-MAMMA1002807//Archain//1.4e-39:315:80//Hs.33642:X81198

[24118] R-MAMMA1002820//ESTs//5.0e-14:192:74//Hs.134635:AA226260

[24119] R-MAMMA1002830//EST//4.0e-50:255:97//Hs.160674:AI248319

[24120] R-MAMMA1002833//EST//1.2e-48:306:88//Hs.149580:AI281881

[24121] R-MAMMA1002835

[24122] R-MAMMA1002838//EST//2.7e-12:161:76//Hs.163252:AA828723

[24123] R-MAMMA1002842//ESTs//1.7e-41:366:78//Hs.141899:N22395

[24124] R-MAMMA1002843/Non Hippel-Lindau syndrome//8.8e-38:258:79//Hs.78160:AF010238

[24125] R-MAMMA1002844//ESTs//3.5e-51:250:99//Hs.151445:AA351081

[24126] R-MAMMA1002858//H. sapiens ERF-1 mRNA 3′ end//9.0e-101:361:91//Hs.85155:X79067

[24127] R-MAMMA1002868//ESTs//2.1e-38:301:80//Hs.132717:AA171941

[24128] R-MAMMA1002871//EST//6.0e-88:413:99//Hs.149057:AI243592

[24129] R-MAMMA1002880//ESTs//6.5e-100:506:96//Hs.163533:N52194

[24130] R-MAMMA1002881//EST//1.1e-40:335:80//Hs.160895:AI365871

[24131] R-MAMMA1002886//Small inducible cytokine A5 (RANTES)//3.4e-36:228:88//Hs.155464:AF088219

[24132] R-MAMMA1002887//ESTs//4.7e-87:409:99//Hs.152155:AA424811

[24133] R-MAMMA1002890//ESTs, Weakly similar to coded for by C. elegans cDNA CEESB82F [C. elegans]//4.2e-92:438:99//Hs.155871:AA533783

[24134] R-MAMMA1002892//Homo sapiens EVI5 homolog mRNA, complete cds//4.9e-62:322:80//Hs.26929:AF008915

[24135] R-MAMMA1002895//ESTs//2.7e-32:330:76//Hs.139132:AA211087

[24136] R-MAMMA1002908//Calcium modulating ligand//4.6e-48:313:86//Hs.13572:AF068179

[24137] R-MAMMA1002909//Human mRNA for KIAAO 180 gene, partial cds//3.4e-09:132:76//Hs.90981:D80002

[24138] R-MAMMA1002930//EST//4.9e-44:260:91//Hs.149580:AI281881

[24139] R-MAMMA1002938

[24140] R-MAMMA1002941//Human Line-1 repeat mRNA with 2 open reading frames//1.1e-83:556:85//Hs.23094:M19503

[24141] R-MAMMA1002947//ESTs//7.0e-22:222:80//Hs.103395:T79243

[24142] R-MAMMA1002964//Human mRNA for KIAA0355 gene, complete cds//1.6e-44:427:77//Hs.153014:AB002353

[24143] R-MAMMA1002970//Thromboxane A2 receptor//7.9e-48:300:84//Hs.89887:D38081

[24144] R-MAMMA1002972//ESTs, Weakly similar to KIAA0371 [H. sapiens]//9.6e-104:525:95//Hs.94396:AA399630

[24145] R-MAMMA1002973//ESTs//4.4e-40:257:87//Hs.163580:HI 5835

[24146] R-MAMMA1002982//ESTs//2.5e-28:115:87//Hs.141694:W15279

[24147] R-MAMMA1002987//Homo sapiens DNA fragmentation factor 40 kDa subunit (DFF40) mRNA, complete cds//2.1e-41:402:67//Hs.133089:AF064019

[24148] R-MAMMA1003003//Calcium modulating ligand//1.9e-45:380:79//Hs.13572:AF068179

[24149] R-MAMMA1003004//ESTs//3.0e-07:378:60//Hs.61885:A1127857

[24150] R-MAMMA1003007//ESTs//2.0e-47:404:80//Hs.146314:R99617

[24151] R-MAMMA1003011//ESTs, Highly similar to HISTONE MACR0-H2A.1 [Rattus norvegicus]//1.4e-53:320:90//Hs.92023:AI022248

[24152] R-MAMMA1003015//ESTs//1.5e-42:363:79//Hs.155184:AA573189

[24153] R-MAMMA1003019//ESTs//4.8e-10:232:66//Hs.111341:AA251268

[24154] R-MAMMA1003026//ESTs//2.3e-83:394:99//Hs.24668:AA897315

[24155] R-MAMMA1003031//ESTs, Moderately similar to !!!! ALU SUBFAMILY J WARNING ENTRY !!!! [H. sapiens]//3.5e-27:257:77//Hs.96337:AA225358

[24156] R-MAMMA1003035//ESTs//1.3e-94:481:94//Hs.92411:AA603321

[24157] R-MAMMA1003039//EST//0.56:210:61//Hs.162248:AA552160

[24158] R-MAMMA1003040//ESTs//2.1e-17:261:70//Hs.46980:W55940

[24159] R-MAMMA1003044//EST//2.4e-18:124:91//Hs.130321:AI002941

[24160] R-MAMMA1003047//ESTs//1.0e-20:209:78//Hs.15916:H12862

[24161] R-MAMMA1003049//i4-3-3 PROTEIN SIGMA//0.94:184:60//Hs.2510:X57348

[24162] R-MAMMA1003055//EST//1.0e-49:281:92//Hs.149580:AI281881

[24163] R-MAMMA1003056//ESTs//0.99:107:66//Hs.30348:AI038559

[24164] R-MAMMA1003057//ESTs, Highly similar to hypothetical protein MD6 [M. musculus]//1.1e-102:545:93//Hs.13755:AA878911

[24165] R-MAMMA1003066//H. sapiens mRNA for urea transporter//8.1e-45:322:83//Hs.66710:X96969

[24166] R-MAMMA1003089//ESTs, Weakly similar to !!!! ALU SUBFAMILY SQ WARNING ENTRY !!!! [H. sapiens]//1.4e-34:421:70//Hs.161959:AA493652

[24167] R-MAMMA1003099//ESTs//1.1e-43:379:79//Hs.37573:H59651

[24168] R-MAMMA1003104//ESTs//2.1e-97:498:96//Hs.9299:T51283

[24169] R-MAMMA1003113//EST//3.7e-29:457:70//Hs.123616:AA815366

[24170] R-MAMMA1003127//ESTs//2.6e-41:283:86//Hs.146811:AA410788

[24171] R-MAMMA1003135//ESTs//7.2e-101:504:97//Hs.87729:AA863125

[24172] R-MAMMA1003140//ESTs//4.3e-44:200:89//Hs.152093:AI149537

[24173] R-MAMMA1003146//Wingless-type MMTV integration site 5A, human homolog//0.020:413:61//Hs.152213:L20861

[24174] R-nnnnnnnnnnnn

[24175] R-MAMMA1003166//ESTs, Moderately similar to PEANUT PROTEIN [Drosophila melanogaster]//2.0e-87:524:89//Hs.6884:W30736

[24176] R-NT2RM2002580//Homo sapiens clone 24781 mRNA sequence//1.6e-111:587:94//Hs.108112:AF070640

[24177] R-NT2RM4000024//ESTs//2.9e-98:523:94//Hs.26641:R59312

[24178] R-NT2RM4000027

[24179] R-NT2RM4000030//ESTs//1.6e-96:482:96//Hs.90625:T03663

[24180] R-NT2RM4000046//ESTs//1.6e-91:461:97//Hs.151237:AI186169

[24181] R-NT2RM4000061//ESTs//4.3e-31:167:97//Hs.110821:Z78379

[24182] R-NT2RM4000085//Homo sapiens clone 24700 unknown mRNA, partial cds//4.0e-113:549:97//Hs.95665:AF070639

[24183] R-NT2RM4000086//EST//2.7e-17:212:76//Hs.137041:AA877817

[24184] R-NT2RM4000104//ESTs//3.0e-85:452:94//Hs.101750:H 19708

[24185] R-NT2RM4000139//EST//3.3e-05:156:66//Hs.133228:AI052312

[24186] R-NT2RM4000155//ESTs, Moderately similar to THREONYL-TRNA SYNTHETASE, CYTOPLASMIC [H. sapiens]//1.9e-99:536:92//Hs.127810:AI246301

[24187] R-NT2RM4000156//EST//0.89:169:62//Hs.162967:AA676397

[24188] R-nnnnnnnnnnnn//ESTs//0.0:214:61//Hs.119370:W52962

[24189] R-NT2RM4000169//ESTs//5.4e-82:440:93//Hs.159379:AI382160

[24190] R-NT2RM4000191//ESTs, Weakly similar to P68 PROTEIN [H. sapiens]//4.1e-99:542:93//Hs.6366:AA614113

[24191] R-NT2RM4000197//ESTs//5.4e-113:567:96//Hs.22975:AA156723

[24192] R-NT2RM4000199//ESTs//0.020:95:65//Hs.146203:AI254528

[24193] R-NT2RM4000200//ESTs//1.4e-100:488:97//Hs.126538:AA931876

[24194] R-NT2RM4000202//Small inducible cytokine A5 (RANTES)//4.3e-37:330:77//Hs.155464:AF088219

[24195] R-NT2RM4000210//Homo sapiens mRNA for KIAA0712 protein, complete cds//1.7e-103:546:94//Hs.111138:AB018255

[24196] R-NT2RM4000215

[24197] R-nnnnnnnnnnnn/ESTs//7.1e-92:457:97//Hs.162074:AA477760

[24198] R-NT2RM4000233//Fms-related tyrosine kinase I (vascular endothelial growth factor/vascular permeability factor receptor)//0.00020:174:66//Hs.235:X51602

[24199] R-NT2RM4000244//ESTs//6.6e-61:320:95//Hs.108646:AA613031

[24200] R-NT2RM4000251//Homo sapiens mRNA for TRIP6 (thyroid receptor interacting protein)//0.63:219:62//Hs.119498:AF000974

[24201] R-NT2RM4000265//ESTs//8.8e-105:489:99//Hs.131001:AI378742

[24202] R-NT2RM4000290//ESTs//4.0e-87:435:96//Hs.162592:AA594128

[24203] R-NT2RM4000324//ESTs//2.2e-80:413:96//Hs.12313:R43673

[24204] R-NT2RM4000327//Small inducible cytokine A5 (RANTES)//3.2e-45:286:87//Hs.155464:AF088219

[24205] R-NT2RM4000344//Clathrin, light polypeptide (Lcb)//8.6e-60:452:84//Hs.73919:X81637

[24206] R-NT2RM4000349//ESTs, Weakly similar to KIAA0005 [H. sapiens]//2.5e-117:579:96//Hs.5216:AA534881

[24207] R-NT2RM4000354//ESTs//2.1e-85:406:99//Hs.126774:AI224479

[24208] R-NT2RM4000356//ESTs//7.9e-109:548:96//Hs.44278:AA418063

[24209] R-NT2RM4000366//Homo sapiens mRNA for KIAA0642 protein, partial cds//2.8e-113:577:95//Hs.8152:AB014542

[24210] R-NT2RM4000368//ESTs//2.2e-61:310:97//Hs.143611:M78140

[24211] R-NT2RM4000386//ESTs, Weakly similar to tenascin-like protein [D. melanogaster]//1.0e-93:521:92//Hs.41793:AA775879

[24212] R-NT2RM4000395//ESTs, Highly similar to HYPOTHETICAL 52.9 KD PROTEIN IN SAPI55-YMR31 INTERGENIC REGION [Saccharomyces cerevisiae]//1.9e-99:524:94//Hs.5249:U55977

[24213] R-NT2RM4000414//EST//2.7e-06:196:64//Hs.136648:AA688285

[24214] R-NT2RM4000421//ESTs, Weakly similar to No definition line found [C. elegans]//5.4e-75:470:90//Hs.69235:AA1192359

[24215] R-NT2RM4000425//H. sapiens mRNA for MACH-alpha-2 protein//0.17:112:69//Hs.19949:X98173

[24216] R-NT2RM4000433//ESTs//2.7e-100:479:98//Hs.24553 AI150687

[24217] R-NT2RM4000457//ESTs//5.1e-107:535:95//Hs.7579:AA775865

[24218] R-NT2RM4000471//ESTs, Highly similar to NIFS-LIKE 54.5 KD PROTEIN [Saccharomyces cerevisiae]//6.0e-99:492:96//Hs.21090:AA418587

[24219] R-NT2RM4000486//ESTs, Moderately similar to unnamed protein product [H. sapiens]//2.2e-102:493:97//Hs.111279:W84558

[24220] R-NT2RM4000496

[24221] R-NT2RM4000511//EST//5.1e-43:326:81//Hs.157658:AI358465

[24222] R-NT2RM4000514//ESTs//1.7e-112:552:96//Hs.6686:AA205496

[24223] R-nnnnnnnnnnnn//ESTs, Weakly similar to HYPOTHETICAL 85.0 KD PROTEIN IN CPA2-ATP2 INTERGENIC REGION [Saccharomyces cerevisiae]//1.4e-60:343:93//Hs.16014:AA074879

[24224] R-NT2RM4000520//ESTs//2.7e-55:266:100//Hs.99838:AA204731

[24225] R-NT2RM4000531//ESTs//2.0e-88:502:91//Hs.13110:T67461

[24226] R-NT2RM4000532//ESTs//0.47:290:58//Hs.148753:T91777

[24227] R-NT2RM4000534//EST//0.00025:303:60//Hs.162809:AA632198

[24228] R-NT2RM4000585//EST//0.28:63:77//Hs.150024:AI291981

[24229] R-NT2RM4000590//ESTs//5.8e-65:320:98//Hs.116017:AA613437

[24230] R-NT2RM4000595//Homo sapiens KIAA0431 mRNA, partial cds//0.99:189:64//Hs.16349:AB007891

[24231] R-NT2RM4000603//ESTs//4.6e-68:356:96//Hs.48855:AA134589

[24232] R-nnnnnnnnnnnn//ESTs//1.5e-89:431:97//Hs.26117:W16697

[24233] R-NT2RM4000616//ESTs, Highly similar to ACETYL-COENZYME A SYNTHETASE [Escherichia coli]//1.4e-102:519:96//Hs.14779:N64822

[24234] R-NT2RM4000674//ESTs//5.1e-78:398:97//Hs.8268:N70144

[24235] R-NT2RM4000689//ESTs, Weakly similar to T01G9.4 [C. elegans]//2.9e-115:550:98//Hs.11820:AA205531

[24236] R-NT2RM4000698//ESTs//2.0e-17:130:87//Hs.86420:AA927510

[24237] R-nnnnnnnnnnnn

[24238] R-NT2RM4000712//EST//0.99:103:65//Hs.114039:AA701128

[24239] R-NT2RM4000717//ESTs, Highly similar to BONE MORPHOGENETIC PROTEIN 1 PRECURSOR [Mus musculus]//2.2e-103:519:95//Hs.6823:W18181

[24240] R-NT2RM4000733//ESTs//8.7e-88:429:98//Hs.72185:AA465311

[24241] R-NT2RM4000734//Homo sapiens mRNA for KIAA0760 protein, partial cds//3.6e-105:536:95//Hs.137168:AB018303

[24242] R-NT2RM4000741//ESTs//0.99:266:58//Hs.142718:AA034046

[24243] R-NT2RM400075 I //ESTs//1.6e-20:351:66//Hs.43145:AA776988

[24244] R-NT2RM4000764

[24245] R-NT2RM4000778//EST//0.066:254:61//Hs.148232:AA904174

[24246] R-NT2RM4000779//Homo sapiens mRNA for KIAA0451 protein, complete cds//9.3e-106:546:94//Hs.18586:AB007920

[24247] R-NT2RM4000787//Human melanoma antigen recognized by T-cells (MART-1) mRNA//6.5e-40:424:73//Hs.154069:U06452

[24248] R-NT2RM4000790//EST//9.0e-48:259:94//Hs.159694:AI417008

[24249] R-NT2RM4000795//Human mRNA for KIAA0067 gene, complete cds//1.0:203:63//Hs.20991:D31891

[24250] R-NT2RM4000796//ESTs//7.0e-106:506:98//Hs.43559:A1003520

[24251] R-NT2RM4000798//Human polymorphic epithelial mucin core protein mRNA, 3′ end//2.5e-28:158:96//Hs.118249:M21868

[24252] R-NT2RM4000813

[24253] R-NT2RM4000820//ESTs, Weakly similar to hypothetical protein [H. sapiens]//1.3e-109:539:97//Hs.99636:AI219667

[24254] R-NT2RM4000833//ESTs, Moderately similar to ZK863.3 [C. elegans]//4.0e-112:448:99//Hs.20223:AA482031

[24255] R-NT2RM4000848//ESTs//8.1e-97:476:97//Hs.16036:AA883864

[24256] R-NT2RM4000852//ESTs//6.4e-94:467:97//Hs.11556:AI309597

[24257] R-NT2RM4000855//ESTs//2.9e-95:544:90//Hs.106525:AI283343

[24258] R-nnnnnnnnnnnn

[24259] R-NT2RM4000895//ESTs, Moderately similar to !!!! ALU SUBFAMILY SQ WARNING ENTRY!!!! [H. sapiens]//9.3e-96:450:99//Hs.142076:AA604514

[24260] R-NT2RM4000950//ESTs//2.6e-91:438:98//Hs.43827:AA455262

[24261] R-NT2RM4000971//EST//2.9e-96:461:99//Hs.139709:AA227887

[24262] R-NT2RM4000979//EST//1 .6e-67:329:98//Hs.96927:AA349647

[24263] R-NT2RM4000996//ESTs, Weakly similar to ZINC FINGER PROTEIN 91 [H. sapiens]//1.7e-82:414:96//Hs.115342:AA650126

[24264] R-NT2RM4001002//Homo sapiens mRNA for KIAA0729 protein, partial cds//3.8e-114:545:97//Hs.19542:AB018272

[24265] R-NT2RM4001016//Homo sapiens mRNA for KIAA0639 protein, partial cds//2.5e-114:556:97//Hs.15711:AB014539

[24266] R-NT2RM4001032//ESTs//7.8e-17:132:84//Hs.138720:N53352

[24267] R-NT2RM4001047//Homo sapiens UKLF mRNA for ubiquitous Kruppel like factor, complete cds//0.42:133:67//Hs.32170:AB015132

[24268] R-NT2RM4001054//ESTs//1.7e-84:404:99//Hs.116407:AA815300

[24269] R-nnnnnnnnnnnn//ESTs//3.4e-91:439:99//Hs.103177:W72798

[24270] R-NT2RM4001092//ESTs//1.4e-86:517:89//Hs.132969:Z78324

[24271] R-NT2RM4001116//EST//5.2e-57:275:100//Hs.131115:AI016962

[24272] R-NT2RM4001140//ESTs//5.5e-96:461:98//Hs.86965:AA252276

[24273] R-NT2RM4001151//ESTs//0.40:263:58//Hs.113189:R08311

[24274] R-NT2RM4001155//ESTs//8.3e-105:544:94//Hs.29647:W60848

[24275] R-NT2RM4001160//EST//7.6e-25:380:68//Hs.147405:AI209085

[24276] R-NT2RM4001187//ESTs, Moderately similar to !!!! ALU SUBFAMILY SC WARNING ENTRY !!!! [H. sapiens]//9.2e-43:273:91//Hs.109005:N31174

[24277] R-NT2RM4001191//Cytochrome P450, 51 (lanosterol 14-alpha-demethylase)//3.1e-32:274:70//Hs.2379:U23942

[24278] R-NT2RM4001200//ESTs//4.5e-102:494:97//Hs.31844:N32849

[24279] R-NT2RM4001203

[24280] R-NT2RM4001204//ESTs//9.8e-88:468:93//Hs.4990:T65307

[24281] R-NT2RM4001217//ESTs//1.2e-75:396:94//Hs.25042:R72410

[24282] R-NT2RM4001256//ESTs//1.0:157:62//Hs.65377:AA994677

[24283] R-NT2RM4001258//ESTs//9.6e-41:260:88//Hs.27633:N76184

[24284] R-NT2RM4001309

[24285] R-NT2RM4001313//EST//0.0022:150:66//Hs.161573:W84857

[24286] R-NT2RM4001316//ESTs//3.5e-26:139:99//Hs.23100:AI128899

[24287] R-NT2RM4001320//ESTs//1.6e-97:308:99//Hs.112024:AI042352

[24288] R-NT2RM4001340//ESTs, Highly similar to UTR4 PROTEIN [Saccharomyces cerevisiae]//1.9e-105:522:97//Hs.18442:AI129307

[24289] R-NT2RM4001344//EST//1.1e-90:436:99//Hs.95900:AA160339

[24290] R-NT2RM4001347//EST//0.17::186:61//Hs.16751:T90476

[24291] R-NT2RM4001371//EST//0.0069:270:62//Hs.99239:AA450211

[24292] R-NT2RM4001382

[24293] R-NT2RM4001384//ESTs//9.6e-91:445:98//Hs.55000:AA805507

[24294] R-NT2RM4001410//EST//0.13:50:82//Hs.157675:AI358790

[24295] R-NT2RM4001411//ESTs, Weakly similar to lymphocyte specific adaptor protein Lnk [M. musculus]//4.0e-102:539:94//Hs.15744:AI055859

[24296] R-NT2RM4001412

[24297] R-NT2RM4001414//ESTs//6.5e-35:226:88//Hs.121727:AA775895

[24298] R-NT2RM4001437//EST//0.017:169:67//Hs.13207:F10054

[24299] R-NT2RM4001444//ESTs, Weakly similar to ISOLEUCYL-TRNA SYNTHETASE, MITOCHONDRIAL [S. cerevisiae]//7.4e-108:544:94//Hs.7558:AA526812

[24300] R-NT2RM4001454//ESTs//4.7e-108:517:98//Hs.32295:N32277

[24301] R-NT2RM4001455//EST//9.6e-81:395:97//Hs.127978:AA969739

[24302] R-NT2RM4001483//Human mRNA for KIAA0033 gene, partial cds//1.8e-58:324:85//Hs.22271:D26067

[24303] R-NT2RM4001489//Homo sapiens mRNA for KIAA0685 protein, complete cds//7.0e-104:547:93//Hs.153121:AB014585

[24304] R-NT2RM4001519//Histatin 1//0.53:340:59//Hs.119101:M26664

[24305] R-NT2RM4001522//Small inducible cytokine A5 (RANTES)//8.4e-55:306:80//Hs.155464:AF088219

[24306] R-NT2RM4001557//ESTs, Weakly similar to F11A10.4 [C. elegans]//6.1e-21:165:83//Hs.29134:H43072

[24307] R-NT2RM4001565//ESTs//2.0e-103:483:99//Hs.121273:AA758027

[24308] R-NT2RM4001566//Human DNA sequence from clone 1409 on chromosome Xp11.1-11.4. Contains a Inter-Alpha-Trypsin Inhibitor Heavy Chain LIKE gene, a alternatively spliced Melanoma-Associated Antigen MAGE LIKE gene and a 6-Phosphofructo-2-kinase (Fructose-2,6-bisphosphatase) LIKE pseudogene. Contains ESTs, STSs and genomic marker DXS8032//2.7e-43:446:72//Hs.4943:Z98046

[24309] R-NT2RM4001569//ESTs//3.6e-37:186:100//Hs.86959:AA888009

[24310] R-NT2RM4001582//ESTs//1.2e-96:459:98//Hs.114432:N52946

[24311] R-nnnnnnnnnnnn

[24312] R-NT2RM4001594//ESTs//1.6e-83:404:98//Hs.134740:AA282171

[24313] R-NT2RM4001597//ESTs//6.9e-11:558:96//Hs.11408:AI358871

[24314] R-NT2RM4001605//Homo sapiens mRNA for KIAA0791 protein, complete cds//2.1e-112:565:95//Hs.23255:AB018334

[24315] R-NT2RM4001611//EST//5.9e-74:353:99//Hs.125318:AA837079

[24316] R-NT2RM4001629//ESTs//6.1e-95:453:99//Hs.115765:AA485957

[24317] R-NT2RM4001650

[24318] R-NT2RM4001662

[24319] R-NT2RM4001666//Homo sapiens mRNA for KIAA0469 protein, complete cds//3.6e-36:230:70//Hs.7764:AB007938

[24320] R-NT2RM4001682//EST//4.3e-68:393:90//Hs.157362:AI367496

[24321] R-NT2RM4001710//ESTs//4.3e-48:235:99//Hs.7299:AA203440

[24322] R-NT2RM4001714//ESTs//0.0014:568:58//Hs.50458:AA868686

[24323] R-nnnnnnnnnnnn//ESTs//6.5e-104:487:99//Hs.153581:AA630465

[24324] R-NT2RM4001731//ESTs, Weakly similar to No definition line found [C. elegans]//3.1e-108:563:94//Hs.18510:AA522887

[24325] R-NT2RM4001741//T3 receptor-associating cofactor-1 [human, fetal liver, mRNA, 2930 nt]//0.083:124:68//Hs.120980:S83390

[24326] R-NT2RM4001746//ESTs//6.1e-90:420:100//Hs.139003:AA948200

[24327] R-NT2RM4001754//Human kpni repeat mrna (cdna clone pcd-kpni-4), 3′ end//5.4e-59:504:78//Hs.139107:K00629

[24328] R-NT2RM4001758//ESTs//8.9e-27:140:100//Hs.149973:AI290740

[24329] R-NT2RM4001776//Homo sapiens mRNA for KIAA0727 protein, partial cds//6.4e-24:236:80//Hs.39871:AB018270

[24330] R-NT2RM4001783//ESTs//9.9e-30:156:99//Hs.115260:AA314956

[24331] R-NT2RM4001810//ESTs//1.3e-65:346:95//Hs.131915:W22567

[24332] R-NT2RM4001813//ESTs//5.7e-102:473:100//Hs.87574:AI089920

[24333] R-NT2RM4001823//ESTs//3.8e-62:324:95//Hs.124109:AA888839

[24334] R-NT2RM4001828//ESTs//1.3e-119:563:98//Hs.102397:AA706551

[24335] R-NT2RM4001836//ESTs//5.5e-16:92:100//Hs.26996:AA551070

[24336] R-NT2RM4001841//ESTs//1.3e-99:540:94//Hs.42322:AA082619

[24337] R-NT2RM4001842//ESTs, Weakly similar to !!!! ALU SUBFAMILY SQ WARNING ENTRY!!!! [H. sapiens]//4.1e-10:274:62//Hs.161959:AA493652

[24338] R-NT2RM4001856//ESTs, Weakly similar to contains similarity to ATP/GTP-binding site motif [C. elegans]//3.0e-43:292:86//Hs.14202:N46000

[24339] R-nnnnnnnnnnnn//ESTs//6.2e-104:495:98//Hs.118686:AA682280

[24340] R-NT2RM4001865//Homo sapiens mRNA for atopy related autoantigen CALC//1.6e-120:592:97//Hs.61628:Y17711

[24341] R-NT2RM4001876//ESTs//2.9e-98:532:92//Hs.100734:AA158252

[24342] R-NT2RM4001880//ESTs//2.5e-29:224:86//Hs.6193:AA045149

[24343] R-NT2RM4001905//ESTs//5.6e-109:565:95//Hs.9536:AA114178

[24344] R-NT2RM4001922//ESTs, Weakly similar to !!!! ALU SUBFAMILY J WARNING ENTRY !!!! [H. sapiens]//1.2e-105:535:95//Hs.30991:AA994438

[24345] R-NT2RM4001930//ESTs//4.1e-84:425:96//Hs.80042:N63143

[24346] R-NT2RM4001938//EST//0.00040:241:60//Hs.147235:AI205893

[24347] R-NT2RM4001940//Homo sapiens timeless homolog mRNA, complete cds//2.0e-110:556:95//Hs.118631:AF098162

[24348] R-NT2RM4001953//ESTs//5.3e-65:338:96//Hs.33718:AA453268

[24349] R-NT2RM4001965//ESTs, Weakly similar to T14B4.2 gene product [C. elegans]//5.7e-62:326:95//Hs.3385:N25917

[24350] R-nnnnnnnnnnnn//ESTs, Weakly similar to IP63 protein [R. norvegicus]//1.9e-21:121:98//Hs.8772:AA521097

[24351] R-NT2RM4001979//ESTs//1.4e-96:465:98//Hs.157103:W60265

[24352] R-NT2RM4001984

[24353] R-NT2RM4001987

[24354] R-NT2RM4002013//EST//2.2e-14:110:90//Hs.160835:AI345528

[24355] R-NT2RM4002018

[24356] R-NT2RM4002034//Human mRNA for KIAA0118 gene, partial cds//9.4e-46:293:87//Hs.154326:D42087

[24357] R-NT2RM4002044//ESTs//2.8e-107:537:96//Hs.24078:W44435

[24358] R-NT2RM4002054//ESTs//3.7e-88:482:94//Hs.4243:T78226

[24359] R-NT2RM4002062//ESTs//1.4e-55:377:85//Hs.152592:AA587887

[24360] R-NT2RM4002063//Calcium modulating ligand//1.8e-43:385:78//Hs.13572:AF068179

[24361] R-nnnnnnnnnnnn//Homo sapiens OPA-containing protein mRNA, complete cds//5.5e-42:554:68//Hs.85313:AF071309

[24362] R-NT2RM4002067//Human kpni repeat mma (cdna clone pcd-kpni-4), 3′ end//2.3e-43:468:73//Hs.139107:K00629

[24363] R-NT2RM4002073//ESTs, Weakly similar to very-long-chain acyl-CoA synthetase [H. sapiens]//6.8e-57:290:96//Hs.109274:AA193416

[24364] R-NT2RM4002075//ESTs//0.078:267:61//Hs.163563:AA641655

[24365] R-NT2RM4002093//ESTs//1 .2e-64:316:99//Hs.34956:AI052528

[24366] R-nnnnnnnnnnnn//ESTs//1.0:95:69//Hs.25897:W65409

[24367] R-NT2RM4002128//Homo sapiens mRNA for BCL9 gene//0.51:258:60//Hs.122607:Y13620

[24368] R-NT2RM4002140//ESTs//5.5e-46:187:94//Hs.8737:W22712

[24369] R-NT2RM4002145//ESTs//4.6e-70:374:94//Hs.141082:H18987

[24370] R-NT2RM4002146//ESTs//1.9e-93:439:99//Hs.119295:AA442090

[24371] R-NT2RM4002161//Homo sapiens laforin (EPM2A) mRNA, partial cds//1.5e-111:560:96//Hs.22464:AF084535

[24372] R-NT2RM4002174//Homo sapiens LIM protein mRNA, complete cds//3.2e-46:552:72//Hs.154103:AF061258

[24373] R-NT2RM4002189//ESTs//9.6e-75:352:100//Hs.98350:H 15400

[24374] R-NT2RM4002194//EST//0.22:68:72//Hs.149104:AI244343

[24375] R-NT2RM4002205//EST//0.00028:103:72//Hs.130032:AA897678

[24376] R-NT2RM4002213//ESTs//3 .3e-15:160:78//Hs.63304:W22079

[24377] R-NT2RM4002226//ESTs, Highly similar to GTPASE ACTIVATING PROTEIN ROTUND [Drosophila melanogaster]//5.1e-1112:569:95//Hs.23900:U82984

[24378] R-NT2RM4002251//ESTs, Weakly similar to similar to alpha-1,3-mannosyl-glycoprotein beta-1, 2-N-acetylglucosaminyltransferase [C. elegans]//1H.1e-100:544:93//Hs.27567:W72190

[24379] R-NT2RM4002256//Small inducible cytokine A5 (RANTES)//1.0e-44:341:81//Hs.155464:AF088219

[24380] R-NT2RM4002266//ESTs//2.6e-100:539:93//Hs.57976:AA535864

[24381] R-NT2RM4002278//ESTs//1.8e-112:569:9511Hs.87281:AA128263

[24382] R-NT2RM4002281//ESTs//4.9e-20:187:80//Hs.141203:H52638

[24383] R-NT2RM4002287//ESTs//7.9e-84:388:94//Hs.33977:N52461

[24384] R-NT2RM4002294

[24385] R-NT2RM4002301//ESTs//4.5e-111:556:96//Hs.85916:AA194164

[24386] R-NT2RM4002323//ESTs//4.5e-102:498:97//Hs.85782:AA191498

[24387] R-nnnnnnnnnnnn/ESTs//5.0e-59:283:100//Hs.125048:AA682913

[24388] R-NT2RM4002344//V-akt murine thymoma viral oncogene homolog 2//0.29:153:66//Hs.155129:M77198

[24389] R-NT2RM4002373//Homo sapiens mRNA for KIAA0649 protein, complete cds//2.8e-122:593:97//Hs.26163:AB0114549

[24390] R-NT2RM4002374//ESTs//3 .3e-40:505:70//Hs.95115:AA206594

[24391] R-NT2RM4002383//ESTs//2.7e-93:455:97//Hs.134278:AA648884

[24392] R-NT2RM4002390//ESTs//3.3e-93:481:95//Hs.48764:AA613328

[24393] R-NT2RM4002409//ESTs, Weakly similar to coded for by C. elegans cDNA yk52e10.5 [C. elegans]//1.3e-97:473:98//Hs.16464:W119606

[24394] R-NT2RM4002438//ESTs//0.74:162:61//Hs.65377:AA994677

[24395] R-NT2RM4002446

[24396] R-NT2RM4002452//EST//1.0:164:60//Hs.116619:AA668142

[24397] R-NT2RM4002457

[24398] R-NT2RM4002460//ESTs//3.0e-74:385:96//Hs.6933:R07890

[24399] R-NT2RM4002479//Homo sapiens RNA helicase-related protein mRNA, complete cds//1.6e-103:507:97//Hs.8765:AF083255

[24400] R-NT2RM4002482//Homo sapiens mRNA for KIAA0691 protein, complete cds//2.3e-32:172:98//Hs.94781:AB014591

[24401] R-NT2RM4002493//ESTs//6.4e-73:366:97//Hs.157114:T58884

[24402] R-NT2RM4002499//ESTs//3.5e-61:307:97//Hs.117737:AI088029

[24403] R-NT2RM4002504//ESTs//2.1e-55:306:94//Hs.10949:AA464464

[24404] R-nnnnnnnnnnnn/ESTs, Weakly similar to peroxisome targeting signal 2 receptor [H. sapiens]//1.4e-73:360:91//Hs.31030:H50467

[24405] R-NT2RM4002532//ESTs//1.3e-21:191:78//Hs.146811:AA410788

[24406] R-NT2RM4002534//ESTs//1.8e-99:512:95//Hs.13526:AI417057

[24407] R-NT2RM4002567//ESTs//7.6e-41:272:87//Hs.7114:R24312

[24408] R-NT2RM4002571//ESTs, Highly similar to POLYPEPTIDE N-ACETYLGALACTOSAMINYLTRANSFERASE [Bos taurus]//2.3e-89:435:97//Hs.15830:AA165698

[24409] R-NT2RM4002593//ESTs//2.3e-109:552:96//Hs.17424:AA190569

[24410] R-NT2RM4002623//ESTs, Weakly similar to ASPARTYL-TRNA SYNTHETASE [Thermus aquaticus thermophilus]//9.6e-28:194:87//Hs.59346:AI126802

[24411] R-NT2RP2000001//ESTs//2.6e-80:386:99//Hs.105061:N45096

[24412] R-NT2RP2000006//Thromboxane A2 receptor//7.2e-37:253:84//Hs.89887: D38081

[24413] R-NT2RP2000008//Zinc finger protein 37a (KOX 21)//5.2e-25:366:67//Hs.54488:X69115

[24414] R-NT2RP2000027//ESTs//9.5e-74:377:96//Hs.96557:AA286713

[24415] R-NT2RP2000040//Homo sapiens mRNA for KIAA0747 protein, partial cds//2.7e-42:223:96//Hs.8309:AB018290

[24416] R-NT2RP2000045//Homo sapiens tumorous imaginal discs protein Tid56 homolog (TID1) mRNA, complete cds//4.3e-64:309:98//Hs.6216:AF061749

[24417] R-NT2RP2000054//EST//1.2e-71:375:96//Hs.98835:AA435798

[24418] R-NT2RP2000056//EST//2.8e-28:342:69//Hs.135526:AI094910

[24419] R-NT2RP2000067//ESTs, Weakly similar to tenascin-like protein [D. melanogaster]//2.3e-35:199:94//Hs.41793:AA775879

[24420] R-NT2RP2000070//ESTs, Weakly similar to proto-cadherin 3 [R. norvegicus]//1.4e-78:383:98//Hs.58254:W72881

[24421] R-NT2RP2000076//EST//0.0014:227:63//Hs.136761:AA738097

[24422] R-NT2RP2000077//Homo sapiens growth arrest specific 11 (GAS 11) mRNA, complete cds//1.1e-78:379:97//Hs.54877:AF050078

[24423] R-NT2RP2000079//Homo sapiens RET finger protein-like 1 antisense transcript, partial//2.9e-21:232:75//Hs.102576:AJ010230

[24424] R-NT2RP2000088//Homo sapiens mRNA for KIAA0795 protein, partial cds//1.8e-75:378:96//Hs.22926:AB018338

[24425] R-NT2RP2000091//Carcinoembryonic antigen gene family member 6//0.030:236:63//Hs.41:D90064

[24426] R-NT2RP2000097//ESTs//4.2e-15:92:97//Hs.7432:AA281757

[24427] R-NT2RP2000098//ESTs//9.0e-53:279:94//Hs.87807:AA813827

[24428] R-NT2RP2000108//EST//1.5e-75:378:96//Hs.162105:AA524419

[24429] R-NT2RP2000114//Homo sapiens mRNA for GM3 synthase, complete cds//5.8e-76:386:95//Hs.17706:AB018356

[24430] R-NT2RP2000120//ESTs, Weakly similar to HYPOTHETICAL 68.7 KD PROTEIN ZK757.1 IN CHROMOSOME III [C. elegans]//1.9e-19:153:86//Hs.5268:W22670

[24431] R-nnnnnnnnnnnnn//ESTs//1.0e-55:293:95//Hs.14570:AI422099

[24432] R-nnnnnnnnnnnn//ESTs//0 .24:354:59//Hs.157564:AI356513

[24433] R-NT2RP2000147//ESTs, Highly similar to CLATHRIN COAT ASSEMBLY PROTEIN AP47 [Mus musculus]//3.0e-89:457:95//Hs.3832:AI208601

[24434] R-NT2RP2000153//EST//0.0039:93:68//Hs.140386:AA773548

[24435] R-NT2RP2000157//ESTs//1.1e-53:322:91//Hs.6877:AA040820

[24436] R-NT2RP2000161//ESTs//1.6e-99:492:97//Hs.21738:AI188190

[24437] R-NT2RP2000175//ESTs//1.4e-98:489:96//Hs.4849:AI143741

[24438] R-NT2RP2000183//ESTs//9.0e-72:358:96//Hs.4856:N51373

[24439] R-NT2RP2000195//ESTs//3.9e-92:439:98//Hs.145091:AA814510

[24440] R-NT2RP2000205//ESTs, Moderately similar to !!!! ALU SUBFAMILY J WARNING ENTRY !!!! [H. sapiens]//1.4e-80:415:95//Hs.11807:T86897

[24441] R-NT2RP2000224//RNA polymerase II, polypeptide C (33 kD)//11.1e-57:306:94//Hs.79402:AC004382

[24442] R-NT2RP2000232

[24443] R-NT2RP2000233//ESTs//1.1e-08:63:96//Hs.124861:AI090683

[24444] R-NT2RP2000239//ESTs//5.3e-87:427:96//Hs.86211:AA604379

[24445] R-NT2RP2000248//ESTs, Weakly similar to O-linked GlcNAc transferase [H. sapiens]//1.3e-95:454:99//Hs.102057:AA649005

[24446] R-NT2RP2000257//ESTs//5.1e-58:282:99//Hs.122565:AI126840

[24447] R-NT2RP2000258//EST//1.0:67:68//Hs.61812:AA035649

[24448] R-NT2RP2000270//ESTs, Weakly similar to LINE-1 REVERSE TRANSCRIPTASE HOMOLOG [Homo sapiens]//8.4e-59:298:96//Hs.16085:AI261382

[24449] R-NT2RP2000274//ESTs//7.5e-61:296:98//Hs.86081:AA196635

[24450] R-NT2RP2000288//ESTs//1.8e-56:305:93//Hs.7579:AA775865

[24451] R-NT2RP2000289

[24452] R-NT2RP2000297//ESTs, Highly similar to MKR2 PROTEIN [Mus musculus]//9.8e-106:494:99//Hs.102951:AA574249

[24453] R-NT2RP2000298//ESTs//2.1e-62:256:90//Hs.8737:W22712

[24454] R-NT2RP2000310//Human proline dehydrogenase/proline oxidase (PRODH) mRNA, complete cds//2.8e-39:222:93//Hs.58218:U82381

[24455] R-NT2RP2000327//Homo sapiens DNA sequence from PAC 434014 on chromosome 1q32.3.-41. Contains the HSD11B gene for Hydroxysteroid (11-beta) Dehydrogenase 1, the ADORA2BP adenosine A2b receptor LIKE pseudogene, the IRF6 gene for Interferon Regulatory Factor 6 and two unknown genes. Contains ESTs and GSSs//2.9e-71:342:98//Hs.87684:AL022398

[24456] R-NT2RP2000329//ESTs, Highly similar to GTP:AMP PHOSPHOTRANSFERASE MITOCHONDRIAL [Bos taurus]//3.4e-69:371:94//Hs.43436:N32441

[24457] R-NT2RP2000337//ESTs//5.2e-79:411:95//Hs.101799:AI276062

[24458] R-NT2RP2000346//Homo sapiens apoptosis associated protein (GADD34) mRNA, complete cds//1.1e-47:262:94//Hs.76556:U83981

[24459] R-NT2RP2000369//ESTs//4.3e-102:531:94//Hs.15855:H98103

[24460] R-NT2RP2000414//Homo sapiens HnRNP F protein mRNA, complete cds//8.4e-09:93:83//Hs.808:L28010

[24461] R-NT2RP2000420//ESTs//8.2e-24:142:94//Hs.144893:AI222324

[24462] R-NT2RP2000422//Homo sapiens N-acetylglucosamine-phosphate mutase mRNA, complete cds//4.2e-20:140:90//Hs.5819:AF102265

[24463] R-NT2RP2000438//ESTs, Weakly similar to misato [D. melanogaster]//1.3e-65:362:93//Hs.22197:AI151425

[24464] R-NT2RP2000448//ESTs, Highly similar to HYPOTHETICAL 51.6 KD PROTEIN IN PAPI-MRPL13 INTERGENIC REGION [Saccharomyces cerevisiae]//3.6e-75:435:92//Hs.21938:W81045

[24465] R-NT2RP2000459//ESTs//2.8e-95:527:93//Hs.103422:AI352013

[24466] R-NT2RP2000498//ESTs//2.3e-17:119:79//Hs.161714:AA229078

[24467] R-NT2RP2000503//ESTs//5.2e-91:438:98//Hs.152335:AI290215

[24468] R-NT2RP2000510//Homo sapiens KIAA0436 mRNA, partial cds//0.13:455:58//Hs.110:AB007896

[24469] R-nnnnnnnnnnnn/ESTs//9.9e-63:376:89//Hs.47546:AA181348

[24470] R-NT2RP2000523

[24471] R-NT2RP2000603//Homo sapiens mRNA for KIAA0572 protein, partial cds//3.5e-30:167:97//Hs.14409:AB011144

[24472] R-NT2RP2000617//ESTs//9.5e-103:493:98//Hs.9412:W72446

[24473] R-NT2RP2000634//Homo sapiens mRNA for KIAA0614 protein, partial cds//8.1e-66:335:96//Hs.7314:AB014514

[24474] R-NT2RP2000644//ESTs//1.1e-18:372:63//Hs.82419:AA789222

[24475] R-NT2RP2000656//ESTs//1.0e-10:128:80//Hs.23977:AA115275

[24476] R-NT2RP2000658//ESTs//0.31:278:59//Hs.15661:WO2396

[24477] R-NT2RP2000668//ESTs//8.2e-40:255:88//Hs.113310:R116767

[24478] R-NT2RP2000678//ESTs//2.6e-53:271:96//Hs.23790:N99347

[24479] R-NT2RP2000710//ESTs//0.49:190:63//Hs.145521:AI261368

[24480] R-NT2RP2000715//EST//1.2e-87:418:99//Hs.139425:AA429279

[24481] R-NT2RP2000731//EST//5.3e-65:322:97//Hs.136754:AA713965

[24482] R-NT2RP2000758//ESTs//1H.0:187:61//Hs.10545:N62642

[24483] R-NT2RP2000764//ESTs//5.8e-84:485:91//Hs.121816:AA775419

[24484] R-NT2RP2000809

[24485] R-NT2RP2000812//ESTs//1.2e-45:231:97//Hs.121028:AA902745

[24486] R-nnnnnnnnnnnn/ESTs//6.3e-87:433:97//Hs.145479:AA969404

[24487] R-NT2RP2000816//ESTs//0.45:100:69//Hs.147529:AA458918

[24488] R-NT2RP2000819

[24489] R-NT2RP2000841//ESTs//1.9e-73:351:99//Hs.116385:AI224511

[24490] R-NT2RP2000842//TUMOR NECROSIS FACTOR-INDUCIBLE PROTEIN TSG-6 PRECURSOR//4.6e-10:247:66//Hs.29352:M31165

[24491] R-NT2RP2000845//ESTs//2.8e-91:443:97//Hs.66810:AI206552

[24492] R-NT2RP2000863//ESTs//4.3e-49:310:88//Hs.104336:WO7345

[24493] R-NT2RP2000880//Homo sapiens mRNA for KIAA0741 protein, complete cds//2.8e-43:277:89//Hs.3615:AB018284

[24494] R-NT2RP2000892//ESTs//2.8e-50:258:96//Hs.119238:AA476267

[24495] R-NT2RP2000931//MATRIN 3//7.2e-57:290:96//Hs.78825:AB018266

[24496] R-NT2RP2000938//ESTs, Highly similar to HYPOTHETICAL 6.3 KD PROTEIN ZK652.2 IN CHROMOSOME III [Caenorhabditis elegans]//3.9e-37:199:95//Hs.112318:AA186477

[24497] R-NT2RP2000943//Homo sapiens mRNA for KIAA0755 protein, complete cds//9.8e-98:494:96//Hs.19822:AB018298

[24498] R-NT2RP2000965//EST//0.22:223:60//Hs.105703:AA487021

[24499] R-NT2RP2000970//EST//8.7e-06:255:62//Hs.149202:AI246481

[24500] R-NT2RP2000985//ESTs, Weakly similar to HYPOTHETICAL 96.8 KD PROTEIN IN SIS2-MTD 1 INTERGENIC REGION [S. cerevisiae]//7.8e-92:468:95//Hs.12124:AA522537

[24501] R-NT2RP2000987//ESTs//4.5e-78:419:93//Hs.21968:H97521

[24502] R-NT2RP2001036//EST//2.0e-33:148:82//Hs.163196:AA767643

[24503] R-NT2RP2001044//ESTs//5.6e-95:493:95//Hs.21958:AA453660

[24504] R-NT2RP2001065//ESTs//3.6e-28:153:96//Hs.119314:AA432108

[24505] R-NT2RP2001070//EST//0.30:94:67//Hs.94289:N73665

[24506] R-NT2RP2001094//EST//0.75:101:69//Hs.161040:H82068

[24507] R-NT2RP2001119

[24508] R-NT2RP2001127//Homa sapiens mRNA for HRIHFB2060, partial cds//1.5e-56:304:94//Hs.146282:AB015348

[24509] R-NT2RP2001137

[24510] R-NT2RP2001149//ESTs//5.1e-66:324:97//Hs.27475:AA704512

[24511] R-NT2RP2001168//ESTs//2.0e-98:539:92//Hs.77870:AII 88145

[24512] R-NT2RP2001173//Homo sapiens mRNA for KIAA0480 protein, complete cds//1.5e-96:490:96//Hs.26247:AB007949

[24513] R-NT2RP2001174//ESTs//2.2e-63:354:93//Hs.24266:R28287

[24514] R-NT2RP2001196//ESTs//1 .4e-83:463:93//Hs.124304:AA825510

[24515] R-NT2RP2001218//ESTs//1 .4e-100:506:96//Hs.93391 All 88402

[24516] R-NT2RP2001226//EST//0.0074:154:63//Hs.128612:AA909358

[24517] R-NT2RP2001233//ESTs, Highly similar to ZINC FINGER PROTEIN ZFP-36 [Homo sapiens]//3 .7e-65:538:80//Hs.44014:AA632298

[24518] R-NT2RP2001245//ESTs//5.2e-90:447:97//Hs.14559:H92996

[24519] R-NT2RP2001268//Homo sapiens mRNA for KIAA0810 protein, partial cds//1.5e-112:544:97//Hs.7531:AB018353

[24520] R-NT2RP2001277//ESTs//2.0e-81:387:99//Hs.13751:AA908229

[24521] R-NT2RP2001290//ESTs//2.4e-91:501:92//Hs.12600:AA044775

[24522] R-NT2RP2001295//ESTs//1 .4e-70:337:99//Hs.123854:AA412665

[24523] R-NT2RP2001312//ESTs//4.6e-53:276:95//Hs.7961:AA401205

[24524] R-NT2RP2001327//ESTs, Moderately similar to tumor necrosis factor-alpha-induced protein B12 [H. sapiens]//2.3e-43:238:93//Hs.106632:N25679

[24525] R-NT2RP2001328//ESTs//5.1e-99:499:96//Hs.34868:AI341138

[24526] R-NT2RP2001347//ESTs//6.7e-05:100:77//Hs.9536:AA114178

[24527] R-NT2RP2001378//ESTs//4.2e-83:456:93//Hs.10554:N50028

[24528] R-NT2RP2001381//ESTs//.1e-26:148:96//Hs.161859:AA444038

[24529] R-NT2RP2001392//ESTs, Weakly similar to MITOCHONDRIAL LON PROTEASE HOMOLOG PRECURSOR [H. sapiens]//3.9e-74:411:93//Hs.47305:AA195153

[24530] R-NT2RP2001394//ESTs//9.5e-54:305:93//Hs.70256:R07875

[24531] R-NT2RP2001397//ESTs, Highly similar to G2/MITOTIC-SPECIFIC CYCLIN B2 [Mesocricetus auratus]//5.2e-97:469:97//Hs.20483:AA522505

[24532] R-NT2RP2001420//ESTs//1.6e-49:228:88//Hs.163602:N32030

[24533] R-NT2RP2001423//ESTs//2.0e-37:190:99//Hs.101565:R35431

[24534] R-NT2RP2001427//EST//1.7e-11:107:84//Hs.148584:AI201728

[24535] R-NT2RP2001436//ESTs, Weakly similar to F02D8.3 [C. elegans]//2.9e-114:558:97//Hs.7627:AI341556

[24536] R-NT2RP2001440//EST//0.17:192:58//Hs.133442:AI061394

[24537] R-NT2RP2001445//ESTs//1.1e-43:215:100//Hs.145497:AA501453

[24538] R-NT2RP2001449//ESTs//4.1e-08:234:61 I/Hs.134067:AI076765

[24539] R-NT2RP2001450//ESTs//9.5e-65:356:94//Hs.61829:AI079539

[24540] R-NT2RP2001467//Small inducible cytokine A5 (RANTES)//1.2e-34:255:83//Hs.155464:AF088219

[24541] R-NT2RP2001506//ESTs//2.9e-23:170:88//Hs.7147:T23513

[24542] R-NT2RP2001511//ESTs//2.0e-08:59:100//Hs.57660:AA251146

[24543] R-NT2RP2001520//Homo sapiens mRNA for mitochondrial carrier protein ARALAR1//6.7e-106:545:95//Hs.4277:Y14494

[24544] R-NT2RP2001526//ESTs//3.7e-23:295:72//Hs.8514:AF039240

[24545] R-NT2RP2001536//Homo sapiens X-ray repair cross-complementing protein 3 (XRCC3) mRNA, complete cds//1.9e-15:99:95//Hs.99742:AF035586

[24546] R-NT2RP2001560//ESTs//2.2e-58:310:94//Hs.87454:AA732816

[24547] R-NT2RP2001569//Homo sapiens mRNA, chromosome I specific transcript KIAA0488//2.0e-76:387:96//Hs.67619:AB007957

[24548] R-NT2RP2001576//Human mRNA for KIAA0105 gene, complete cds//0.17:193:60//Hs.119:D14661

[24549] R-NT2RP2001581//ESTs//1.1e-08:107:78//Hs.157114:T58884

[24550] R-NT2RP2001597//EST//5.2e-22:151:88//Hs.158613:AI369995

[24551] R-NT2RP2001601//ESTs//1.5e-78:373:99//Hs.137558:AI393767

[24552] R-NT2RP2001613

[24553] R-NT2RP2001628//EST110.99:195:60//Hs.144238:W52294

[24554] R-NT2RP2001663//ESTs//14.0e-37:282:84//Hs.12319:W56090

[24555] R-NT2RP2001677//ESTs//1.4e-44:232:96//Hs.159387:AI370845

[24556] R-NT2RP2001678//ESTs//0.91:124:60//Hs.10593:AI201336

[24557] R-NT2RP2001699//EST//0.0033:230:61//Hs.146544:AI125323

[24558] R-NT2RP20011720//ESTs//1.8e-52:255:99//Hs.101064:AA290579

[24559] R-NT2RP2001721//ESTs//7.0e-101:479:99//Hs.129750:AA987538

[24560] R-NT2RP2001740//ESTs//3 .3e-76:379:96//Hs.144704:AI147100

[24561] R-NT2RP2001748//ESTs//1.4e-44:352:81//Hs.142259:AA828840

[24562] R-NT2RP2001762//Homo sapiens exonuclease la (EXOla) mRNA, complete cds//2.1e-105:519:96//Hs.47504:AF091754

[24563] R-NT2RP2001813//ESTs//6.3e-78:406:95//Hs.21902:R44037

[24564] R-NT2RP2001861

[24565] R-NT2RP2001869//EST//2.8e-21:173:82//Hs.130321:AI002941

[24566] R-NT2RP2001876//ESTs//6.1e-102:526:95//Hs.4944:AA533088

[24567] R-NT2RP2001883//ESTs, Weakly similar to No definition line found [C. elegans]//6.9e-110:556:95//Hs.23159:AA113849

[24568] R-NT2RP2001900//ESTs//6.9e-85:442:95//Hs.154220:AA171724

[24569] R-NT2RP2001907//ESTs//2.1e-82:432:94//Hs.142257:AA188423

[24570] R-NT2RP200192611EST112.3e-24:299:71//Hs.135085:AI097268

[24571] R-NT2RP2001936//ESTs//1.1e-45:265:92//Hs.112482:T66087

[24572] R-NT2RP2001943//EST//1.4e-05:246:61//Hs.144096:AI032180

[24573] R-NT2RP2001946//ESTs//3 .6e-87:410:99//Hs.20242:W72594

[24574] R-NT2RP20019471//ESTs//1.9e-55:338:88//Hs.58582:T72588

[24575] R-NT2RP2001969

[24576] R-NT2RP2001976//ESTs//1.2e-98:499:95//Hs.121028:AA902745

[24577] R-NT2RP2001985//ESTs, Weakly similar to GTPASE-ACTIVATFNG PROTEIN SPA-1 [M. musculus]//8.3e-15:118:89//Hs.18760:AA166678

[24578] R-NT2RP2002025//ESTs//2.1e-82:393:98//Hs.159488:AI378233

[24579] R-NT2RP2002032//ESTs//4.4e-98:531:91//Hs.93836:AA813332

[24580] R-NT2RP2002033//ESTs//3 .5e-43:229:96//Hs.30563:AA102627

[24581] R-NT2RP2002041

[24582] R-NT2RP2002046//ESTs//1.6e-101:476:99//Hs.101107:AA825938

[24583] R-NT2RP2002047//ESTs//9.1e-85:431:95//Hs.116750:AA629895

[24584] R-NT2RP2002058//ESTs//1.3e-31:163:99//Hs.33085:AA258068

[24585] R-NT2RP2002066//ESTs//1.9e-87:459:93//Hs.118871:AA846091

[24586] R-NT2RP2002070//ESTs//4.1e-63:332:96//Hs.156446:T92265

[24587] R-NT2RP2002076//Homo sapiens clone 24804 mRNA sequence//1.7e-26:178:87//Hs.11039:AF052183

[24588] R-NT2RP2002079//ESTs//1 .2e-79:389:97//Hs.135214:AI350524

[24589] R-NT2RP2002099//Homo sapiens mRNA for El B-55 kDa-associated protein//1.5e-60:376:89//Hs.155218:AJ007509

[24590] R-NT2RP2002105//ESTs//8.4e-54:313:90//Hs.98702:A123000

[24591] R-NT2RP2002124//ESTs//6.6e-81:431:93//Hs.127326:AA525134

[24592] R-NT2RP2002137//Deoxycytidine kinase//0.29:183:62//Hs.709:M60527

[24593] R-NT2RP2002154//ESTs//9.6e-97:539:91//Hs.18624:AA523268

[24594] R-NT2RP2002172//EST//0.69:53:75//Hs.156238:AI334495

[24595] R-NT2RP2002185//ESTs, Weakly similar to F15C11.2 [C. elegans]//1.4e-54:269:98//Hs.107201:W52859

[24596] R-NT2RP2002192//ESTs, Moderately similar to !!!! ALU SUBFAMILY J WARNING ENTRY !!!! [H. sapiens]//3.9e-15:245:71//Hs.87578:AI125363

[24597] R-NT2RP2002193//ESTs//3 .5e-79:453:90//Hs.76578:AI290672

[24598] R-NT2RP2002208//ESTs//2.0e-72:347:99//Hs.164028:AI003946

[24599] R-NT2RP2002219//EST//0.039:229:63//Hs.149830:AI287499

[24600] R-NT2RP2002231//ESTs//3.3e-64:337:94//Hs.79828:AA642341

[24601] R-nnnnnnnnnnnn/ESTs, Highly similar to co-repressor protein [M. musculus]//5.4e-48:238:99//Hs.22583:AA188168

[24602] R-NT2RP2002256//Homo sapiens retinoic acid hydroxylase mRNA, complete cds//1.6e-15:131:83//Hs.150595:AF005418

[24603] R-NT2RP2002259//Human L-myc protein gene, complete cds//5.3e-99:548:91//Hs.92137:M19720

[24604] R-NT2RP2002270//ESTs, Weakly similar to AF-9 PROTEIN [H. sapiens]//4.8e-100:550:91//Hs.4029:Z78373

[24605] R-NT2RP2002292//ESTs, Weakly similar to F13B12.1 [C. elegans]//3.2e-92:482:93//Hs.5570:AI377863

[24606] R-NT2RP2002312//Homo sapiens CDP-diacylglycerol synthase 2 (CDS2) mRNA, partial cds//4.1e-103:527:94//Hs.24812:AF069532

[24607] R-NT2RP2002316//ESTs//4.2e-91:425:100//Hs.3350:AI368015

[24608] R-NT2RP2002325//Homo sapiens peroxisomal biogenesis factor (PEX11a) mRNA, complete cds//1.2e-112:567:95//Hs.31034:AB015594

[24609] R-NT2RP2002333//ESTs//1.9e-86:483:91//Hs.155198:AA767372

[24610] R-NT2RP2002385//Homo sapiens synaptic glycoprotein SC2 spliced variant mRNA, complete cds//1.2e-103:600:89//Hs.109051:AF038958

[24611] R-NT2RP2002394//ESTs//0.11:158:65//Hs.28792:AI343467

[24612] R-NT2RP2002408//ESTs//1.5e-51:278:93//Hs.6044:W22815

[24613] R-NT2RP2002426//Homo sapiens mRNA for KIAA0563 protein, complete cds//1.7e-33:285:80//Hs.15731:AB011135

[24614] R-NT2RP2002439//ESTs//3.2e-12:134:76//Hs.32246:AA464020

[24615] R-NT2RP2002457//ESTs//4.7e-52:282:94//Hs.21968:H97521

[24616] R-NT2RP2002464//ESTs//5.3e-27:148:98//Hs.115660:AI362230

[24617] R-NT2RP2002475//ESTs//3.9e-85:439:94//Hs.9873:W27233

[24618] R-nnnnnnnnnnnn//Homo sapiens mRNA for ABC transporter 7 protein, complete cds//9.9e-115:605:92//Hs.125856:AB005289

[24619] R-NT2RP2002498//ESTs//6.3e-37:227:93//Hs.108779:N73180

[24620] R-NT2RP2002503//ESTs//1.9e-54:358:86//Hs.57800:W60838

[24621] R-NT2RP2002504//Homo sapiens mRNA for KIAA0791 protein, complete cds//8.5e-107:583:91//Hs.23255:AB018334

[24622] R-NT2RP2002520//ESTs//4.2e-99:509:94//Hs.32368:AA205305

[24623] R-NT2RP2002537//ESTs//4.2e-105:552:93//Hs.154363:AA533090

[24624] R-NT2RP2002546//Homo sapiens clone TUA8 Cri-du-chat region mRNA//2.6e-109:570:93//Hs.49476:AF009314

[24625] R-NT2RP2002549//DNA polymerase gamma//1.1e-35:189:86//Hs.80961:U60325

[24626] R-NT2RP2002591//ESTs, Weakly similar to ZINC FINGER PROTEIN 84 [H. sapiens]//7.5e-118:564:97//Hs.94549:AA149547

[24627] R-NT2RP2002595//EST//1.4e-15:101:95//Hs.129528:AA994783

[24628] R-NT2RP2002606//ESTs//4.5e-99:475:98//Hs.45046:N40170

[24629] R-NT2RP2002609//ESTs//1.9e-104:568:92//Hs.9175AA//84220

[24630] R-NT2RP2002618//ESTs//0.014:493:57//Hs.96322:AA541615

[24631] R-NT2RP2002621//EST//4.4e-36:252:84//Hs.149580:AI281881

[24632] R-NT2RP2002643//ESTs//6.9e-32:247:74//Hs.33354:AA179944

[24633] R-NT2RP2002672

[24634] R-NT2RP2002701//N-acetylglucosaminidase, alpha- (Sanfilippo disease IIIB//0.99:184:63//Hs.50727:U43572

[24635] R-NT2RP2002706//EST//2.8e-41:148:86//Hs.161917:AA483223

[24636] R-NT2RP2002710//EST//0.34:105:71//Hs.136747:AA749210

[24637] R-NT2RP2002727//ESTs//8 .7e-68:368:94//Hs.14366:T78626

[24638] R-NT2RP2002736//ESTs//9.7e-98:457:99//Hs.74899:AA993300

[24639] R-NT2RP2002740//Homo sapiens mRNA for KIAA0536 protein, partial cds//0.66:360:59//Hs.119139:AB011108

[24640] R-NT2RP2002741//ESTs//3.1e-102:489:98//Hs.12024:AI042352

[24641] R-NT2RP2002750//EST//3 .6e-43:166:86//Hs.162404:AA573131

[24642] R-NT2RP2002752//ESTs//5.0e-56:355:89//Hs.95867:M62042

[24643] R-NT2RP2002753//ESTs//1 .7e-49:262:96//Hs.49005:W89124

[24644] R-NT2RP2002769//ESTs//1.3e-59:376:88//Hs.4046:H03587

[24645] R-NT2RP2002778//Homo sapiens clone 24606 mRNA sequence//4.0e-65:341:94//Hs.17481:AF070537

[24646] R-NT2RP2002800//ESTs//6.5e-08:79:84//Hs.153262:AA551124

[24647] R-NT2RP2002839//ESTs, Moderately similar to !!!! ALU SUBFAMILY J WARNING ENTRY !!!! [H. sapiens]//1 .6e-100:501:97//Hs.136202:AA206578

[24648] R-NT2RP2002857//ESTs//4.3e-94:463:97//Hs.134292:AA603031

[24649] R-NT2RP2002862//ESTs//2.3e-42:302:82//Hs.117969:H94870

[24650] R-NT2RP2002880

[24651] R-NT2RP2002891

[24652] R-NT2RP2002925//ESTs//1.3e-103:564:92//Hs.142079:AA182894

[24653] R-NT2RP2002928//ESTs//3.9e-1108:502:99//Hs.29105:AA574143

[24654] R-NT2RP2002929//ESTs//4.1e-106:499:99//Hs.44743:AA837096

[24655] R-NT2RP2002954//ESTs//2.6e-88:417:99//Hs.100824:AI308771

[24656] R-NT2RP2002959//ESTs//7.5e-101:489:97//Hs.32690:N57480

[24657] R-NT2RP2002979//ESTs//5 .4e-06:197:65//Hs.146726:AI147060

[24658] R-NT2RP2002980//ESTs//1.0e-110:562:96//Hs.28444:AA083213

[24659] R-NT2RP2002986//ESTs, Highly similar to RING CANAL PROTEIN [Drosophila melanogaster]//3.1e-119:578:97//Hs.106290:A1125291

[24660] R-NT2RP2002987//Human mRNA for KIAA0331 gene, complete cds//1.0:78:74//Hs.146395:AB002329

[24661] R-NT2RP2002993//ESTs, Weakly similar to DNA-DIRECTED RNA POLYMERASE 11140 KD POLYPEPTIDE [H. sapiens]//2.4e-98:467:98//Hs.86337:AA149311

[24662] R-NT2RP2003000//ESTs//0.0070:400:61I/Hs.138506:U85642

[24663] R-NT2RP2003034//ESTs//9.3e-87:408:96//Hs.164042:H12594

[24664] R-NT2RP2003073//Human transporter protein (g17) mRNA, complete cds//0.95:259:61//Hs.76460:U49082

[24665] R-NT2RP2003099//Thromboxane A2 receptor//2.6e-42:328:81//Hs.89887:D38081

[24666] R-NT2RP2003108//ESTs//2.3e-82:398:9811Hs.5105:AA115512

[24667] R-NT2RP2003117//Human mRNA for KIAA0347 gene, complete cds//2.4e-49:336:86//Hs.101996:AB002345

[24668] R-NT2RP2003121//ESTs//2.0e-75:380:96//Hs.133127:AA133355

[24669] R-NT2RP2003125

[24670] R-NT2RP2003129//EST//0.68:115:69//Hs.122196:AA780986

[24671] R-NT2RP2003137//ESTs//2.1e-37:259:85//Hs.63169:N78506

[24672] R-NT2RP2003161//ESTs//2.5e-88:451:96//Hs.29041:W37379

[24673] R-NT2RP2003164//ESTs//4.3e-113:543:97//Hs.8980:AA629067

[24674] R-NT2RP2003165//ESTs//6.9e-83:486:89//Hs.138632:H97952

[24675] R-NT2RP2003177//ESTs//0.47:38:100//Hs.61790:AA421156

[24676] R-NT2RP2003194//ESTs//4.7e-118:582:96//Hs.27266:AA053816

[24677] R-NT2RP2003206//ESTs//0.032:388:58//Hs.122148:AA442074

[24678] R-NT2RP2003230//ESTs//8.8e-103:478:99//Hs.40140:AI079253

[24679] R-NT2RP2003237//ESTs//2.7e-76:392:96//Hs.106278:R37661

[24680] R-NT2RP2003243//ESTs//3 .6e-53:300:92//Hs.18793:AA192438

[24681] R-NT2RP2003265//ESTs, Highly similar to protein NGD5 [M. musculus]//3.3e-110:557:96//Hs.24994:AA236937

[24682] R-NT2RP2003272//ESTs, Weakly similar to Fl SCI 1.2 [C. elegans]//1.2e-34:228:89//Hs.107201:W52859

[24683] R-NT2RP2003277//Homo sapiens mRNA for KIAA0625 protein, partial cds//1.4e-111:565:95//Hs.154919:AB014525

[24684] R-NT2RP2003280//ESTs//2.6e-101:541:94//Hs.6982:AA622427

[24685] R-NT2RP2003286//ESTs//1.2e-104:497:98//Hs.113052:AI222106

[24686] R-NT2RP2003293//Human mRNA for KIAA0118 gene, partial cds//9.1e-44:458:74//Hs.154326:D42087

[24687] R-NT2RP2003295//Protein serine/threonine kinase stk2//0.31:321:57//Hs.1087:L20321

[24688] R-NT2RP2003297//ESTs//3.0e-15:118:87//Hs.16621:AA098874

[24689] R-NT2RP2003308//ESTs, Moderately similar to CROOKED NECK PROTEIN [Drosophila melanogaster]//4.8e-109:553:96//Hs.26089:AA195126

[24690] R-NT2RP2003329//ESTs//0.99:208:62//Hs.143607:AI424948

[24691] R-NT2RP2003339//ESTs//1.3e-85:441:96//Hs.24115:N32618

[24692] R-NT2RP2003347//ESTs//1.5e-70:365:96//Hs.155773:AI312825

[24693] R-NT2RP2003367//EST//5.8e-80:376:100//Hs.112500:AA599014

[24694] R-NT2RP2003391//ESTs//2.8e-98:484:97//Hs.5842:AA534476

[24695] R-NT2RP2003393//ESTs//2.0e-96:510:93//Hs.75844:AA115502

[24696] R-NT2RP2003394//EST//5.2e-06:264:63//Hs.144234:W52249

[24697] R-NT2RP2003401//ESTs//6.1e-25:161:90//Hs.155360:AA984683

[24698] R-NT2RP2003433//ESTs, Highly similar to PROTEIN TRANSPORT PROTEIN SEC61 ALPHA SUBUNIT [Canis familiaris]//1.2e-106:508:98//Hs.131840:AI016073

[24699] R-NT2RP2003445//ESTs, Moderately similar to !!!! ALU SUBFAMILY J WARNING ENTRY !!!! [H. sapiens]//5.6e-21:161:70//Hs.43153:N22360

[24700] R-NT2RP2003446//ESTs, Weakly similar to C27H6.4 [C. elegans]//6.0e-105:529:96//Hs.8055:W60903

[24701] R-NT2RP2003456//ESTs//7.5e-96:449:99//Hs.25362:AI277332

[24702] R-NT2RP2003480//ESTs//1.6e-116:583:96//Hs.59757:AA176121

[24703] R-NT2RP2003499//ESTs, Weakly similar to elastin like protein [D. melanogaster]//7.0e-71:365:95//Hs.101056:R52777

[24704] R-NT2RP2003506//ESTs, Weakly similar to ORF YPL207w [S. cerevisiae]//2.3e-115:577:96//Hs.16277:N36831

[24705] R-NT2RP2003511//ESTs//1.6e-22:182:85//Hs.28249:AA203733

[24706] R-NT2RP2003513//Human mRNA for KIAA0270 gene, partial cds//1.3e-108:566:94//Hs.78482:Y16270

[24707] R-NT2RP2003517//Platelet-derived growth factor beta polypeptide (simian sarcoma viral (v-sis) oncogene homolog)//4.9e-62:518:79//Hs.1976:M 12783

[24708] R-NT2RP2003522//ESTs//2.0e-97:462:99//Hs.24512:D60170

[24709] R-NT2RP2003533//ESTs//4.4e-45:273:78//Hs.140225:AA704101

[24710] R-NT2RP2003543//EST//1.0:80:68//Hs.65646:F 13684

[24711] R-NT2RP2003559//ESTs, Moderately similar to !!!! ALU SUBFAMILY J WARNING ENTRY !!!! [H. sapiens]//1.8e-58:316:94//Hs.28891:W72439

[24712] R-NT2RP2003564//ESTs//3 .2e-112:528:99//Hs.53940:N46696

[24713] R-NT2RP2003581//ESTs//1.3e-88:506:93//Hs.16157:AA203719

[24714] R-NT2RP2003596//ESTs, Weakly similar to No definition line found [C. elegans]//4.7e-101:495:98//Hs.34627:AA126463

[24715] R-NT2RP2003604//Homo sapiens alpha-catenin related protein (ACRP) mRNA, complete cds//1.7e-103:501:97//Hs.58488:U97067

[24716] R-NT2RP2003629//EST//0.032:440:59//Hs.135297:AI038981

[24717] R-NT2RP2003643//ESTs, Weakly similar to HYPOTHETICAL 14.1 KD PROTEIN IN MURZ-RPON INTERGENIC REGION [E. coli]//9.1e-62:359:92//Hs.12492:AA203188

[24718] R-NT2RP2003668//EST//9.4e-110:535:97//Hs.116279:AA628951

[24719] R-NT2RP2003687//EST//5.9e-05:196:65//Hs.139064:AA135523

[24720] R-NT2RP2003691//ESTs, Weakly similar to F59C6.9 [C. elegans]//1.0:202:62//Hs.65539:AI148540

[24721] R-NT2RP2003702//ESTs, Moderately similar to ovarian-specific protein [R. norvegicus]//4.3e-99:492:96//Hs.93332:AA811920

[24722] R-NT2RP2003704//ESTs//1.0:155:63//Hs.104166:AA740246

[24723] R-NT2RP2003706//Homo sapiens mRNA for KIAA0525 protein, partial cds//8.4e-47:265:93//Hs.78494:AB011097

[24724] R-NT2RP2003713//EST//0.81:210:59//Hs.14551:T79401

[24725] R-NT2RP2003714//ESTs//1.7e-99:495:96//Hs.158101:AI365003

[24726] R-nnnnnnnnnnnn//Human 19.8 kDa protein mRNA, complete cds//0.84:221:60//Hs.2384:U18914

[24727] R-NT2RP2003737//ESTs, Highly similar to UBIQUITIN-CONJUGATING ENZYME E2-17 KD [Caenorhabditis elegans]//2.4e-50:302:90//Hs.19196:W74577

[24728] R-NT2RP2003751

[24729] R-NT2RP2003760//ESTs//2.6e-101:548:93//Hs.115987:AA483808

[24730] R-NT2RP2003764//ESTs//8.2e-25:134:98//Hs.64036:AA127709

[24731] R-NT2RP2003769//ESTs//1.7e-108:545:95//Hs.56847:AA541606

[24732] R-NT2RP2003770//Homo sapiens sperm acrosomal protein mRNA, complete cds//6.0e-106:531:96//Hs.90436:AF047437

[24733] R-NT2RP2003777//ESTs//2.6e-59:323:94//Hs.10101:AI381811

[24734] R-NT2RP2003781//ESTs//2.0e-25:269:75//Hs.144951:N34836

[24735] R-NT2RP2003793//ESTs//8.7e-94:466:97//Hs.93949:AA782955

[24736] R-NT2RP2003840//ESTs//3.4e-97:533:93//Hs.16130:AA195077

[24737] R-NT2RP2003857//H. sapiens mRNA for G9a//2.8e-23:351:65//Hs.75196:X69838

[24738] R-NT2RP2003859//ESTs//3.0e-07:96:81//Hs.153262:AA551124

[24739] R-NT2RP2003871//ESTs//1.9e-102:509:97//Hs.25726:AA430167

[24740] R-NT2RP2003885//ESTs//1.0e-102:502:97//Hs.36353:AA702341

[24741] R-NT2RP2003912//EST//1.2e-38:336:76//Hs.134975:AI094611

[24742] R-NT2RP2003952//Homo sapiens DNA-binding protein (CROC-IB) mRNA, complete cds//0.90:190:60//Hs.75875:U49278

[24743] R-NT2RP2003968//Homo sapiens hUBP mRNA for ubiquitin specific protease, complete cds//7.6e-116:568:97//Hs.35086:AB014458

[24744] R-NT2RP2003976//Homo sapiens mRNA for KIAA0447 protein, complete cds//3.6e-109:540:97//Hs.7302:AB007916

[24745] R-NT2RP2003981//Homo sapiens mRNA for KIAA0804 protein, partial cds//2.5e-115:568:96//Hs.7316:AB018347

[24746] R-NT2RP2003984

[24747] R-NT2RP2003986//ESTs//4.9e-36:272:82//Hs.158268:AA738087

[24748] R-NT2RP2003988//ESTs, Weakly similar to reverse transcriptase [H. sapiens]//3.2e-110:519:99//Hs.36093:AI149968

[24749] R-NT2RP20040141//ESTs//8.4e-102:483:99//Hs.22867:AI417478

[24750] R-NT2RP2004041

[24751] R-NT2RP2004042//ESTs//1.5e-105:466:97//Hs.7296:N29706

[24752] R-nnnnnnnnnnnn//ESTs//1.4e-10:559:96//Hs.71916:AA219699

[24753] R-NT2RP2004081//ESTs//3.7e-105:503:98//Hs.27542:AA977204

[24754] R-NT2RP2004098//EST//7.3e-26:203:87//Hs.21897:R41461

[24755] R-NT2RP2004124//ESTs//1.1e-83:435:95//Hs.43299:N23036

[24756] R-NT2RP2004142//EST//1.3e-06:165:65//Hs.146742:AI147500

[24757] R-NT2RP2004152//ESTs//7.0e-98:455:100//Hs.17731:AI342241

[24758] R-NT2RP2004165//ESTs, Highly similar to DYNEIN BETA CHAIN, CILIARY [Anthocidaris crassispina]//1.0e-118:583:97//Hs.16520:AI224533

[24759] R-NT2RP2004170//ESTs//6.7e-66:407:88//Hs.157138:AI348544

[24760] R-NT2RP2004172//ESTs//1.5e-109:567:95//Hs.159091:AA033974

[24761] R-NT2RP2004187//ESTs//3.6e-92:488:93//Hs.22954:W26589

[24762] R-NT2RP2004194//ESTs//6.2e-114:585:95//Hs.18778:AA203167

[24763] R-NT2RP2004196

[24764] R-NT2RP2004207//ESTs//6.3e-102:488:98//Hs.22678:AA604756

[24765] R-NT2RP2004226//ESTs//8.8e-18:252:71//Hs.11924:W26972

[24766] R-NT2RP2004232//ESTs, Highly similar to protein kinase C mu [H. sapiens]//5.2e-105:499:98//Hs.143460:AA483305

[24767] R-NT2RP2004239//ESTs//1.2e-16:171:80//Hs.16134:AA203116

[24768] R-NT2RP2004240//Homo sapiens antigen NY-CO-1 (NY-CO-1) mRNA, complete cds//3.4e-103:530:93//Hs.54900:AF039687

[24769] R-NT2RP2004242//ESTs//1.3e-85:460:93//Hs.104535:AA211483

[24770] R-NT2RP2004245//ESTs//6.4e-117:575:97//Hs.23744:AA035744

[24771] R-NT2RP2004270//ESTs//1.0:95:69//Hs.141371:H92187

[24772] R-NT2RP2004300//ESTs//4.4e-80:379:99//Hs.130874:AA905056

[24773] R-NT2RP2004316//Homo sapiens EXT-like protein 2 (EXTL2) mRNA, complete cds//4.7e-110:544:96//Hs.61152:AF000416

[24774] R-NT2RP2004321//ESTs//2.1e-18:104:99//Hs.107207:AA044788

[24775] R-NT2RP2004339//EST//1.4e-47:309:86//Hs.161917:AA483223

[24776] R-NT2RP2004347

[24777] R-NT2RP2004364//ESTs//1.1e-113:566:96//Hs.25880:AI268173

[24778] R-NT2RP2004365//ESTs//0.022:271:62//Hs.38897:AI129310

[24779] R-NT2RP2004366//ESTs//9.5e-71:335:100//Hs.91867:AI218624

[24780] R-NT2RP2004373//ESTs//4.2e-25:172:87//Hs.83243:N32192

[24781] R-NT2RP2004389//ESTs, Highly similar to HYPOTHETICAL 70.7 KD PROTEIN F09G8.3 IN CHROMOSOME III [Caenorhabditis elegans]//1.4e-11:108:82//Hs.30490:AA146916

[24782] R-NT2RP2004392//ESTs//3.4e-81:427:94//Hs.5827:AA581646

[24783] R-NT2RP2004396//EST//5.6e-06:100:77//Hs.138623:H92473

[24784] R-NT2RP2004399//EST//0.98:337:59//Hs.118446:N67900

[24785] R-NT2RP2004400//ESTs//2.1e-90:422:100//Hs.152460:AA602921

[24786] R-NT2RP2004412//ESTs//1.4e-105:503:98//Hs.15929:AA403121

[24787] R-NT2RP2004425//EST//0.00017:225:60//Hs.146935:A1168124

[24788] R-NT2RP2004476//ESTs//1.4e-88:477:94//Hs.4859:N29695

[24789] R-NT2RP2004490//Homo sapiens 3-phosphoinositide dependent protein kinase-1 (PDK1) mRNA, complete cds//8.6e-34:143:98//Hs.154729:AF017995

[24790] R-NT2RP2004512//ESTs//2.6e-91:426:100//Hs.94133:AI270700

[24791] R-NT2RP2004523//ESTs//1.6e-74:377:97//Hs.14217:R61320

[24792] R-NT2RP2004538//Thromboxane A2 receptor//1.4e-45:279:89//Hs.89887:D38081

[24793] R-NT2RP2004551//ESTs//0.47:147:66//Hs.131519:AI024347

[24794] R-NT2RP2004568//ESTs//1.3e-107:567:94//Hs.65234:AA195470

[24795] R-NT2RP2004580//ESTs//5.9e-29:156:98//Hs.147801:AI221661

[24796] R-NT2RP2004587//ESTs//1.0e-102:495:97//Hs.91662:AA781126

[24797] R-NT2RP2004594//ESTs//4.1e-56:298:95//Hs.24641:AA954666

[24798] R-NT2RP2004600//ESTs//4.8e-67:374:93//Hs.49762:N69862

[24799] R-NT2RP2004602//ESTs, Weakly similar to !!!! ALU SUBFAMILY J WARNING ENTRY!!!! [H. sapiens]//4.5e-07:149:76//Hs.12845:N28835

[24800] R-NT2RP2004614//ESTs//1.0e-111:557:96//Hs.37892:N53497

[24801] R-NT2RP2004655//Homo sapiens mRNA for leucine rich protein//2.4e-118:587:96//Hs.5198:AJ006291

[24802] R-NT2RP2004664//Homo sapiens mRNA for KIAA0460 protein, partial cds//5.9e-107:520:96//Hs.29956:AB007929

[24803] R-NT2RP2004675//ESTs//2.7e-82:407:97//Hs.116113:F18930

[24804] R-NT2RP2004681//NUCLEOLIN//0.34:387:58//Hs.79110:M60858

[24805] R-NT2RP2004689//Homo sapiens mRNA for KIAA0625 protein, partial cds//5.0e-120:600:96//Hs.154919:AB014525

[24806] R-NT2RP2004709//ESTs//1.1e-106:511:98//Hs.38034:A1149793

[24807] R-NT2RP2004710//ESTs//9.9e-87:477:93//Hs.6834:AA203433

[24808] R-NT2RP2004736//Homo sapiens mRNA for KIAA0478 protein, complete cds//1.3e-118:594:96//Hs.4236:AB007947

[24809] R-NT2RP2004743//ESTs//2.1e-48:327:88//Hs.43635:AA447015

[24810] R-NT2RP2004767//EST//4.0e-57:328:811//Hs.142796:N51423.R-NT2RP2004775//ESTs//9.4e-60:326:94//Hs.115339:AA1136774

[24811] R-NT2RP2004791//ESTs//3.2e-82:367:96//Hs.141911:N64013

[24812] R-NT2RP2004799//Homo sapiens ATP-specific succinyl-CoA synthetase beta subunit (SCS) mRNA, partial cds//8.0e-116:564:96//Hs.40820:AF058953

[24813] R-NT2RP2004802//ESTs//6.5e-111:586:94//Hs.90375:W74579

[24814] R-NT2RP2004816//Homo sapiens H beta 58 homolog mRNA, complete cds//8.7e-120:584:97//Hs.67052:AF054179

[24815] R-NT2RP2004841//EST//3.8e-31:323:741//Hs.147714:AI219906

[24816] R-NT2RP2004861//EST//0.92:147:63//Hs.23064:R20803

[24817] R-NT2RP2004897//ESTs//1.7e-46:390:80//Hs.139225:H96567

[24818] R-NT2RP2004936//EST//0.97:176:63//Hs.137436:AA280529

[24819] R-nnnnnnnnnnnn//ESTs//0.059:137:64//Hs.144109:AI345543

[24820] R-NT2RP2004961//ESTs//1.8e-87:409:100//Hs.138297:AA781941

[24821] R-NT2RP2004962//ESTs//0.0021:292:59//Hs.145917:AI275458

[24822] R-NT2RP2004967//Human mRNA for KIAA0118 gene, partial cds//7.4e-51:506:75//Hs.154326:D42087

[24823] R-NT2RP2004978//ESTs//0.95:138:63//Hs.13619:W93496

[24824] R-NT2RP2004982//ESTs//7.8e-95:468:97//Hs.22545:R43910

[24825] R-NT2RP2004985

[24826] R-NT2RP2004999//ESTs//2.9e-94:450:98//Hs.128766:AI419902

[24827] R-NT2RP2005000

[24828] R-NT2RP2005001//Homo sapiens mRNA for KIAA0615 protein, complete cds//9.6e-113:577:95//Hs.155972:AB014515

[24829] R-NT2RP2005003//EST//1.3e-75:387:96//Hs.140843:R42235

[24830] R-nnnnnnnnnnnn//Homo sapiens SEC63 (SEC63) mRNA, complete cds//3.1e-116:568:97//Hs.31575:AF100141

[24831] R-NT2RP2005018//ESTs//7.5e-46:280:90//Hs.126857:AA932161

[24832] R-NT2RP2005020//ESTs//1.6e-105:554:94//Hs.14846:AA148507

[24833] R-NT2RP2005031//EST//3.1e-79:379:99//Hs.139709:AA227887

[24834] R-NT2RP2005037//ESTs//5.3e-102:551:93//Hs.26516:AA195220

[24835] R-NT2RP2005038//ESTs//5.8e-101:566:92//Hs.46964:N49757

[24836] R-NT2RP2005108

[24837] R-NT2RP2005116//Homo sapiens mRNA for KIAA0664 protein, partial cds//2.7e-105:518:97//Hs.22616:AB014564

[24838] R-NT2RP2005126//H. sapiens mRNA for RNA helicase (Myc-regulated dead box protein)//4.6e-69:464:85//Hs.100555:X98743

[24839] R-NT2RP20051391//ESTs//1.0e-108:545:95//Hs.21006:AA523383

[24840] R-NT2RP2005140//ESTs//4.3e-90:422:99//Hs.62180:AI341261

[24841] R-NT2RP2005144//ESTs//0.91:162:62//Hs.52399:AI075744

[24842] R-NT2RP2005147//ESTs//4.6e-100:502:9611Hs.2793 I:AA633438

[24843] R-NT2RP2005159//ESTs//7.5e-105:533:95//Hs.109819:AI357582

[24844] R-NT2RP2005162//ESTs//6.6e-83:419:96//Hs.113998:H50648

[24845] R-NT2RP2005168//Homo sapiens mRNA for El B-55 kDa-associated protein//2.4e-101:513:95//Hs.155218:AJ007509

[24846] R-NT2RP2005204//ESTs, Weakly similar to UBIQUITIN-ACTIVATING ENZYME El HOMOLOG [H. sapiens]//1.9e-115:577:96//Hs.7600:H98166

[24847] R-NT2RP2005227//Homo sapiens LIM protein mRNA, complete cds//1.0e-45:359:82//Hs.154103:AF061258

[24848] R-NT2RP2005239//ESTs, Highly similar to NIFS-LIKE 54.5 KD PROTEIN [Saccharomyces cerevisiae]//1.0e-47:245:97//Hs.21090:AA418587

[24849] R-NT2RP2005254//ESTs//3.3e-111:581:94//Hs.22549:AA524503

[24850] R-NT2RP2005270//ESTs, Highly similar to HYPOTHETICAL 67.6 KD PROTEIN ZK637.3 IN CHROMOSOME III [Caenorhabditis elegans]//1.1e-79:412:95//Hs.23047:N66596

[24851] R-NT2RP2005276//ESTs//4.6e-85:426:96//Hs.24550:AA316272

[24852] R-NT2RP2005287//ESTs//1.7e-109:565:94//Hs.61976:AI279001

[24853] R-NT2RP2005288//Homo sapiens RCC1-like G exchanging factor RLG mRNA, complete cds//2.4e-125:594:98//Hs.27007:AF060219

[24854] R-NT2RP2005289//Homo sapiens mRNA for XPR2 protein//4.9e-112:545:96//Hs.44766:AJ007590

[24855] R-NT2RP2005293//ESTs//5.1e-116:538:99//Hs.62180:AI341261

[24856] R-NT2RP2005315//ESTs//1.4e-82:415:97//Hs.155829:AA018338

[24857] R-NT2RP2005325//Human LIM-homeobox domain protein (hLH-2) mRNA, complete cds//2.5e-45:272:91//Hs.1569:U11701

[24858] R-NT2RP2005336//ESTs//1.9e-93:444:99//Hs.110966:AA151699

[24859] R-NT2RP2005344//Homo sapiens GDP-L-fucose pyrophosphorylase (GFPP) mRNA, complete cds//0.011:463:58//Hs.150926:AF017445

[24860] R-NT2RP2005354//ESTs//7.2e-22:148:91//Hs.153783:H 14544

[24861] R-NT2RP2005360//ESTs//0.048:225:60//Hs.7602:AA099247

[24862] R-NT2RP2005393//Homo sapiens mRNA for KIAA0761 protein, partial cds//2.9e-41:248:82//Hs.93121 AB018304

[24863] R-NT2RP2005407//ESTs, Weakly similar to OSHI PROTEIN [Saccharomyces cerevisiae]//2.5e-75:461:88//Hs.70849:AA121697

[24864] R-NT2RP2005436//ESTs, Weakly similar to HYPOTHETICAL 37.0 KD PROTEIN B0495.8 IN CHROMOSOME II [C. elegans]//8.1e-96:491:95//Hs.7194:AI185631

[24865] R-NT2RP2005441//ESTs//1.1e-110:548:96//Hs.5209:AA780068

[24866] R-NT2RP2005453//ESTs//0.94:352:58//Hs.25870:H 14423

[24867] R-NT2RP2005457//ESTs//2.1e-46:236:97//Hs.19522:AA975096

[24868] R-NT2RP2005464//ESTs//1.8e-72:349:99//Hs.44045:N51307

[24869] R-NT2RP2005465//ESTs//0.0058:322:58//Hs.127009:AI378936

[24870] R-NT2RP2005472//ESTs//0.47:309:60//Hs.144838:AI222019

[24871] R-NT2RP2005476//ESTs//5.1e-40:205:98//Hs.101577:AI168526

[24872] R-NT2RP2005490//ESTs//1.3e-70:364:96//Hs.134382:AA083573

[24873] R-NT2RP2005491//EST//0.012:220:60//Hs.144448:AA812455

[24874] R-NT2RP2005495//ESTs//1.2e-86:501:91//Hs.99445:R93540

[24875] R-NT2RP2005496//ESTs//3.2e-34:263:81//Hs.70279:AA757426

[24876] R-NT2RP2005498//ESTs, Highly similar to PROTEIN PHOSPHATASE PP2A, 55 KD REGULATORY SUBUNIT, NEURONAL ISOFORM [Oryctolagus cuniculus]//2.3e-45:284:88//Hs.85752:AI138993

[24877] R-NT2RP2005501//ESTs//2.5e-84:404:98//Hs.143812:AI141755

[24878] R-NT2RP2005509//ESTs, Highly similar to HYPOTHETICAL 37.2 KD PROTEIN C12C2.09C IN CHROMOSOME I [Schizosaccharomyces pombe]//8.2e-36:215:92//Hs.5298:AA725071

[24879] R-NT2RP2005520//Homo sapiens chromosome-associated protein-E (hCAP-E) mRNA, complete cds//3.2e-110:570:94//Hs.119023:AF092563

[24880] R-NT2RP2005525//ESTs, Weakly similar to !!!! ALU SUBFAMILY SQ WARNING ENTRY !!!! [H. sapiens]//1.3e-84:433:95//Hs.36942:AA524535

[24881] R-NT2RP2005531//EST//0.98:64:70//Hs.146573:AI139856

[24882] R-NT2RP2005539//Homo sapiens mRNA for NS1-binding protein (NSI-BP)//8.8e-108:560:94//Hs.159597:AJ012449

[24883] R-NT2RP2005540//Homo sapiens mRNA for KIAA0494 protein, complete cds//1.7e-115:583:96//Hs.62515:AB007963

[24884] R-NT2RP2005549//EST//0.61:111:62//Hs.147482:AI215572

[24885] R-NT2RP2005555//ESTs//6.6e-108:507:99//Hs.68613:AI357567

[24886] R-NT2RP2005557//ESTs//3.1e-105:495:99//Hs.105985:AA885169

[24887] R-NT2RP2005581//ESTs//1.7e-79:445:92//Hs.138152:H03240

[24888] R-NT2RP2005600//ESTs//1.3e-38:192:100//Hs.48329:W92733

[24889] R-NT2RP2005605//ESTs//7.6e-87:409:99//Hs.45005:AA975060

[24890] R-NT2RP2005620//ESTs//2.9e-96:463:97//Hs.7407:AI376788

[24891] R-NT2RP2005622//ESTs//1.8e-104:497:98//Hs.22595:AA394229

[24892] R-NT2RP2005637//EST//2.5e-20:163:71//Hs.161164:AI418211

[24893] R-NT2RP2005640//ESTs//5.0e-99:473:98//Hs.23467:AA708740

[24894] R-NT2RP2005645//ESTs//9.5e-23:231:77//Hs.5534:AA195173

[24895] R-NT2RP2005651//ESTs, Highly similar to XFIN PROTEIN [Xenopus laevis]//2.9e-103:525:96//Hs.70589:AA868470

[24896] R-NT2RP2005654//Insulin-like growth factor binding protein 2//0.94:223:60//Hs.162:X16302

[24897] R-NT2RP2005669//Homo sapiens nitrilase 1 (NIT1) mRNA, complete cds//2.7e-14:87:100//Hs.146406:AF069987

[24898] R-NT2RP2005675//Homo sapiens growth suppressor related (DOC-1 R) mRNA, complete cds//5.8e-91:434:98//Hs.25664:AF089814

[24899] R-NT2RP2005683//ESTs//1.5e-98:494:96//Hs.22595:AA394229

[24900] R-NT2RP2005690//ESTs//4.8e-43:286:86//Hs.150727:AI292236

[24901] R-NT2RP2005694//EST//3.1e-82:386:100//Hs.149391:AI273643

[24902] R-NT2RP2005701//ESTs, Highly similar to BUTYROPHILIN PRECURSOR [Bos taurus]//2.8e-68:376:93//Hs.9095:AA532630

[24903] R-NT2RP2005712//Homo sapiens mRNA for KIAA0799 protein, partial cds//1.3e-105:503:98//Hs.61638:AB018342

[24904] R-NT2RP2005719//ESTs, Weakly similar to GPI-anchored protein p137 precursor [H. sapiens]//5.4e-105:500:98//Hs.14298:AI417523

[24905] R-NT2RP2005722//EST//6.5e-76:395:94//Hs.142150:AA223982

[24906] R-NT2RP2005723//ESTs//1.5e-84:452:93//Hs.91753:R44455

[24907] R-NT2RP2005726//ESTs//3.5e-64:500:82//Hs.100526:AI223153

[24908] R-NT2RP2005741//ESTs//4.7e-60:333:93//Hs.107242:R40258

[24909] R-NT2RP2005748//ESTs//3.4e-102:498:97//Hs.82660:N78064

[24910] R-NT2RP2005752//Homo sapiens TNFR-related death receptor-6 (DR6) mRNA, complete cds//4.3e-42:223:96//Hs.159651:AF068868

[24911] R-NT2RP2005753//Homo sapiens I-1 receptor candidate protein mRNA, complete cds//1.2e-104:494:98//Hs.26285:AF082516

[24912] R-NT2RP2005763//ESTs//1.1e-97:456:99//Hs.65412:AI362163

[24913] R-NT2RP2005767//ESTs//8.0e-38:204:96//Hs.18460:AA193463

[24914] R-NT2RP2005773//ESTs, Highly similar to PYRROLINE-5-CARBOXYLATE REDUCTASE [Homo sapiens]//5.4e-112:559:96//Hs.14214:AI189379

[24915] R-NT2RP2005775//ESTs, Highly similar to NEUROLYSIN PRECURSOR [Sus scrofa]//3.0e-108:544:96//Hs.22151:AI214321

[24916] R-NT2RP2005781//ESTs//1.7e-43:217:99//Hs.144391:AA365664

[24917] R-NT2RP2005784//EST//0.0071:217:60//Hs.117332:AA699724

[24918] R-NT2RP2005804//ESTs//8.8e-1107:512:98//Hs.15496:W44398

[24919] R-NT2RP2005812//ESTs//9.0e-76:359:99//Hs.113937:AI298746

[24920] R-NT2RP2005815//ESTs//5.5e-76:363:99//Hs.136230:AA594981

[24921] R-NT2RP2005835//ESTs//1.5e-100:541:94//Hs.86813:N25122

[24922] R-NT2RP2005841//ESTs//2.8e-105:556:92//Hs.69993:AA628403

[24923] R-NT2RP2005853//EST//2.0e-13:219:70//Hs.134016:AI076062

[24924] R-NT2RP2005857//ESTs//1.0e-115:576:96//Hs.30663:AI338462

[24925] R-NT2RP2005859//ESTs//7.3e-116:571:97//Hs.85986:AA195105

[24926] R-NT2RP2005868//EST//0.00023:320:61//Hs.149689:AI284133

[24927] R-NT2RP2005890//ESTs//1.0e-96:466:98//Hs.122579:AA766315

[24928] R-NT2RP2005901//ESTs//8.3e-116:548:98//Hs.66296:AI125268

[24929] R-NT2RP2005908//ESTs, Weakly similar to weakly similar to gastrula zinc finger protein [C. elegans]//2.4e-73:397:94//Hs.16667:T92427

[24930] R-NT2RP2005933//ESTs, Highly similar to nucleoporin p54 [R. norvegicus]//2.8e-114:560:97//Hs.9082:AA873170

[24931] R-NT2RP2005942//ESTs//5.6e-117:582:96//Hs.146123:AI338419

[24932] R-NT2RP2005980//ESTs//6.9e-101:478:98//Hs.43145:AA776988

[24933] R-NT2RP2006023//Homo sapiens PYRIN (MEFV) mRNA, complete cds//8.5e-51:398:80//Hs.113283:AF018080

[24934] R-NT2RP2006038//ESTs//0.025:284:59//Hs.97852:AA404347

[24935] R-NT2RP2006043//ESTs, Weakly similar to HYPOTHETICAL 37.0 KD PROTEIN B0495.8 IN CHROMOSOME II [C. elegans]//1.2e-50:278:94//Hs.7194:AI185631

[24936] R-NT2RP2006052//ESTs//5.0e-52:272:95//Hs.99545:AA461492

[24937] R-NT2RP2006069//ESTs//1.8e-90:495:93//Hs.43654:AA522714

[24938] R-NT2RP2006071//ESTs//1.5e-38:218:94//Hs.107882:W72093

[24939] R-NT2RP2006098//ESTs//2.9e-105:540:95//Hs.26860:N56918

[24940] R-NT2RP2006100//Human organic anion transporting polypeptide (OATP) mRNA, complete cds//0.031:254:62//Hs.46440:U21943

[24941] R-NT2RP20061031//ESTs//1.5e-86:416:98//Hs.152114:AA401365

[24942] R-NT2RP2006141//ESTs//5.3e-88:432:98//Hs.77480:AA100522

[24943] R-NT2RP2006166//Homo sapiens LIM protein mRNA, complete cds//2.8e-17:255:72//Hs.154103:AF061258

[24944] R-NT2RP2006184//ESTs//8.4e-101:487:98//Hs.58009:W69435

[24945] R-NT2RP2006186//Homo sapiens mRNA for KIAA0654 protein, partial cds//6.1e-110:553:95//Hs.109299:AB014554

[24946] R-NT2RP2006196//Human clone 23960 mRNA sequence//0.0037:48:100//Hs.151293:U79276

[24947] R-NT2RP2006200//ESTs//6.5e-77:398:96//Hs.163953:R01398

[24948] R-NT2RP2006219//H. sapiens mRNA for DGCR6 protein//1.2e-94:532:90//Hs.153910:X96484

[24949] R-NT2RP2006237//ESTs//1.2e-57:305:95//Hs.86149:AI341312

[24950] R-NT2RP2006238//ESTs, Highly similar to rA8 [R. norvegicus]//1.5e-29:183:91//Hs.4048:AA404253

[24951] R-NT2RP2006258//ESTs//3.2e-87:462:94//Hs.141556:N49928

[24952] R-NT2RP2006261//ESTs//3.4e-57:326:92//Hs.22523:WO2999

[24953] R-NT2RP2006312//Homo sapiens BAF57 (BAF57) gene, complete cds//4.7e-96:481:97//Hs.3404:AF035262

[24954] R-NT2RP2006320//EST//3.4e-21:335:65//Hs.141603:N66015

[24955] R-NT2RP2006321//ESTs, Moderately similar to karyopherin beta 3 [H. sapiens]//1.9e-89:460:96//Hs.21889:N78664

[24956] R-NT2RP2006323//ESTs//3.5e-91:439:98//Hs.61697:AI081771

[24957] R-NT2RP2006333//ESTs//4.9e-38:301:82//Hs.155999:AA196412

[24958] R-NT2RP2006334//EST//3.1e-45:264:91//Hs.149599:AI282321

[24959] R-NT2RP2006365//ESTs//2.9e-81:417:95//Hs.11814:W44411

[24960] R-NT2RP2006393//Cytochrome P450, subfamily I (aromatic compound-inducible), polypeptide 2//3.9e-48:403:77//Hs.1361:M55053

[24961] R-NT2RP2006436//Homo sapiens mRNA for small GTP-binding protein, complete cds//1.4e-27:155:76//Hs.115325:D84488

[24962] R-NT2RP2006441//ESTs//6.0e-108:529:97//Hs.101282:N45092

[24963] R-NT2RP2006454//ESTs//9.2e-20:110:99//Hs.144687:AI341146

[24964] R-NT2RP2006456//ESTs//7.1e-91:508:92//Hs.12488:W63595

[24965] R-NT2RP2006464//Homo sapiens mRNA for AND-1 protein//2.1e-109:524:97//Hs.72160:AJ006266

[24966] R-NT2RP2006467//EST//0.99:140:61//Hs.146958:AI174478

[24967] R-NT2RP2006472//ESTs//3.3e-92:473:95//Hs.29216:AA916679

[24968] R-NT2RP2006534//ESTs//1.2e-83:394:99//Hs.162116:AA524947

[24969] R-NT2RP2006554//ESTs//1.0e-87:460:95//Hs.47095:AA181474

[24970] R-NT2RP2006565//ESTs//3.2e-24:129:100//Hs.13499:AI299886

[24971] R-NT2RP2006571//ESTs//2.6e-56:306:94//Hs.98370:AA316622

[24972] R-nnnnnnnnnnnn//ESTs//2.0e-112:533:98//Hs.18685:AI393829

[24973] R-NT2RP2006598//ESTs, Weakly similar to retinoid X receptor interacting protein [M. musculus]//4.1e-109:542:97//Hs.7889:AI337112

[24974] R-NT2RP3000002//ESTs//1.3e-08:399:59//Hs.126044:AI301598

[24975] R-NT2RP3000031//Homo sapiens mRNA for histone deacetylase-like protein (JM21)//1.9e-116:560:97//Hs.6764:AJ011972

[24976] R-NT2RP3000046//Small inducible cytokine A5 (RANTES)//1.9e-57:312:85//Hs.155464:AF088219

[24977] R-NT2RP3000047//EST//0.91:130:66//Hs.140208:AA702213

[24978] R-NT2RP3000050//ESTs, Weakly similar to putative p150 [H. sapiens]//3.1e-41:249:90//Hs.156155:AI222202

[24979] R-NT2RP3000055//EST//2.4e-19:146:86//Hs.160497:AI255095

[24980] R-NT2RP3000072//ESTs//2.2e-82:424:96///Hs.21542:N49574

[24981] R-NT2RP3000080//ESTs//2.1e-29:186:89//Hs.153372:AA424029

[24982] R-NT2RP3000085//ESTs//4.5e-101:482:98//Hs.47649:AA838715

[24983] R-NT2RP3000109//ESTs//9.5e-97:455:99//Hs.17731:AI342241

[24984] R-NT2RP3000134//EST//4.7e-106:497:99//Hs.125531:AA884000

[24985] R-NT2RP3000142//Homo sapiens mRNA for KIAA0592 protein, partial cds//1.2e-116:578:96//Hs.13273:AB011164

[24986] R-NT2RP3000149//ESTs//7.7e-62:361:90//Hs.6649:N93418

[24987] R-NT2RP3000186

[24988] R-NT2RP3000197//ESTs//1.5e-75:436:91//Hs.140931:R51882

[24989] R-NT2RP3000207//ESTs//1.3e-98:468:98//Hs.126908:AA933091

[24990] R-NT2RP3000220//ESTs//2.2e-27:144:99//Hs.106861:R61306

[24991] R-NT2RP3000233//EST//7.8e-77:368:99//Hs.49075:N64817

[24992] R-NT2RP3000235//ESTs//0.43:82:74//Hs.132828:AI032819

[24993] R-NT2RP3000247//EST//2.2e-97:459:99//Hs.127928:AA969239

[24994] R-NT2RP3000251

[24995] R-NT2RP3000252//ESTs, Weakly similar to Lpg15p [S. cerevisiae]//2.0e-108:532:97//Hs.111086:AI379177

[24996] R-NT2RP3000255//EST//0.67:93:67//Hs.120579:AA743073

[24997] R-NT2RP3000267//ESTs//8.5e-108:542:95//Hs.24984:AA534446

[24998] R-NT2RP3000299//ESTs, Weakly similar to enhancer of filmentation I [H. sapiens]//3.6e-103:516:96//Hs.4894:AI191323

[24999] R-NT2RP3000312//ESTs//1.3e-100:493:97//Hs.29379:AI094117

[25000] R-NT2RP3000320//ESTs//3.2e-95:538:91//Hs.118793:AA192438

[25001] R-NT2RP3000324

[25002] R-NT2RP3000333//ESTs//6.0e-39:194:100//Hs.119238:AA476267

[25003] R-NT2RP3000341//ESTs//0.51:251:61//Hs.94090:AA777689

[25004] R-NT2RP3000348//EST//1.8e-80:389:98//Hs.145944:AI276225

[25005] R-NT2RP3000350//ESTs, Weakly similar to Lpg15p [S. cerevisiae]//3.1e-110:556:96//Hs.111086:AI379177

[25006] R-NT2RP3000359//EST//4.9e-61:340:92//Hs.126495:AA913741

[25007] R-NT2RP3000361//ESTs, Weakly similar to PRE-MRNA SPLICING FACTOR PRP6 [S. cerevisiae]//4.8e-91:439:97//Hs.31334:AI144423

[25008] R-NT2RP3000366//EST//0.20:392:57//Hs.149652:AI283303

[25009] R-NT2RP3000397//EST//8.7e-26:150:94//Hs.124617:AA855106

[25010] R-NT2RP3000403//Homo sapiens formin binding protein 21 mRNA, complete cds//4.2e-111:529:98//Hs.28307:AF071185

[25011] R-NT2RP3000418//EST//3.3e-09:202:67//Hs.117189:AA682947

[25012] R-NT2RP3000433

[25013] R-NT2RP3000439//ESTs//3.1e-79:426:92//Hs.26548:W26340

[25014] R-NT2RP3000441//ESTs//6.3e-84:420:97//Hs.137482:AA421254

[25015] R-NT2RP3000449//ESTs//4.9e-93:435:99//Hs.54617:AI379102

[25016] R-NT2RP3000451//ESTs//2.3e-89:439:97//Hs.9196:AA748492

[25017] R-NT2RP3000456//Homo Sapiens (clone B3B3E13) chromosome 4 p16.3 DNA fragment//1.8e-23:347:70//Hs.114963:L34408

[25018] R-NT2RP3000484//Heparin cofactor IV/0.98:166:62//Hs.1478:M58600

[25019] R-NT2RP3000487//ESTs//0.012:384:60//Hs.88684:AA885141

[25020] R-NT2RP3000512//Homeo box B3//2.0e-69:377:93//Hs.49931:X16667

[25021] R-NT2RP3000526//ESTs//1.6e-91:432:99//Hs.38042:AA187151

[25022] R-NT2RP3000527//ESTs//1.2e-100:518:94//Hs.104557:AI078161

[25023] R-NT2RP3000531//ESTs, Weakly similar to TH1 protein [D. melanogaster]//0.95:85:71//Hs.5184:AA709151

[25024] R-NT2RP3000542//ESTs//2.6e-53:375:84//Hs.44158:N30180

[25025] R-NT2RP3000561//EST//1.1e-13:170:75//Hs.148421:A1198036

[25026] R-NT2RP3000562//Human mRNA for KIAA0233 gene, complete cds//0.97:141:68//Hs.79077:D87071

[25027] R-NT2RP3000578//ESTs//2.6e-68:324:100//Hs.5445:AA779447

[25028] R-NT2RP3000582//ESTs//2.1e-25:131:80//Hs.152465:AA563785

[25029] R-NT2RP3000584//ESTs//1.8e-97:460:99//Hs.120698:AI241511

[25030] R-NT2RP3000590//ESTs//2.0e-97:453:100//Hs.105355:AA953817

[25031] R-NT2RP3000592//ESTs//2.8e-91:432:99//Hs.144304:AI190916

[25032] R-nnnnnnnnnnnn//Human mRNA for KIAA0314 gene, partial cds//1.5e-09:447:58//Hs.155045:AB002312

[25033] R-NT2RP3000599//ESTs//3.8e-93:437:99//Hs.23971:AA829880

[25034] R-NT2RP3000605//ESTs//4.2e-111:554:96//Hs.40780:AA422049

[25035] R-NT2RP3000622//ESTs//2.0e-100:473:99//Hs.11387:AI127394

[25036] R-NT2RP3000624//ESTs, Weakly similar to KIAA0256 [H. sapiens]//5.4e-115:545:98//Hs.4857:AI090739

[25037] R-NT2RP3000628//Homo sapiens mRNA for KIAA0772 protein, complete cds//4.3e-49:397:80//Hs.15519:AB018315

[25038] R-NT2RP3000632//ESTs, Moderately similar to cyclin-selective ubiquitin carrier protein [H. sapiens]//6.3e-92:434:99//Hs.152517:AA719022

[25039] R-NT2RP3000644//ESTs//1.0e-44:306:84//Hs.155498:W27084

[25040] R-NT2RP3000661//ESTs//3.1e-95:470:97//Hs.126069:W76185

[25041] R-NT2RP3000665//ESTs//3.3e-95:503:94//Hs.34313:W81185

[25042] R-NT2RP3000685//ESTs//2.7e-99:515:94//Hs.9711:R60873

[25043] R-NT2RP3000690//ESTs//3.3e-88:414:99//Hs.146589:AI085578

[25044] R-NT2RP3000736

[25045] R-NT2RP3000742//ESTs, Highly similar to I-PHOSPHATIDYLINOSITOL-4,5-BISPHOSPHATE PHOSPHODIESTERASE DELTA 1 [Rattus norvegicus]//1.8e-07:114:75//Hs.136065:W21960

[25046] R-NT2RP3000753//ESTs//3.1e-99:461:100//Hs.150901:AI310447

[25047] R-NT2RP3000759//ESTs//2.0e-74:384:95//Hs.104222:AA207243

[25048] R-NT2RP3000815//ESTs//8.5e-97:455:99//Hs.158897:AI378583

[25049] R-NT2RP3000825//EST//0.0089:343:59//Hs.42897:N20810

[25050] R-NT2RP3000826//EST//3.4e-33:342:74//Hs.162236:AA551582

[25051] R-NT2RP3000836//ESTs//6.8e-24:181:84//Hs.134464:A1151081

[25052] R-NT2RP3000841//ESTs//4.5e-93:491:93//Hs.23618:H98082

[25053] R-NT2RP3000845//ESTs//2.4e-88:473:93//Hs.8312:AA813022

[25054] R-NT2RP3000847//ESTs//9.3e-89:460:95//Hs.154106:AI051657

[25055] R-NT2RP3000850

[25056] R-NT2RP3000852//Fibrillin 2//0.55:237:63//Hs.79432:U03272

[25057] R-NT2RP3000859//ESTs//1.4e-96:509:94//Hs.7187:AA576895

[25058] R-NT2RP3000865//EST//4.8e-23:461:66//Hs.162088:AA505741

[25059] R-NT2RP3000868//ESTs//5.4e-78:430:93//Hs.102796:N70837

[25060] R-NT2RP3000869//ESTs//8.5e-77:397:94//Hs.84484:AI014673

[25061] R-NT2RP3000875//Mevalonate kinase//3.8e-78:531:84//Hs.75138:M88468

[25062] R-NT2RP3000901//ESTs//2.1e-95:466:97//Hs.10647:AA428217

[25063] R-NT2RP3000904//ESTs//1.6e-79:380:99//Hs.100850:AA479385

[25064] R-NT2RP3000917//ESTs, Highly similar to mouse Dhm1 protein [M. musculus]//9.5e-113:566:96//Hs.5900:AA035728

[25065] R-NT2RP3000919

[25066] R-NT2RP3000968//40S RIBOSOMAL PROTEIN SI 5A//1.5e-25:375:71//Hs.2953:X84407

[25067] R-NT2RP3000980//ESTs//3.3e-72:364:96//Hs.9536:AA114178

[25068] R-NT2RP3000994//ESTs//3.5e-111:537:97//Hs.21146:AA683542

[25069] R-NT2RP3001004//ESTs//9.6e-91:456:96//Hs.58974:W87405

[25070] R-NT2RP3001007//ESTs//6.7e-99:482:97//Hs.117737:AI088029

[25071] R-NT2RP3001055//ESTs//0.0012:294:60//Hs.66479:AA863044

[25072] R-NT2RP3001057//ESTs, Highly similar to ZINC FINGER PROTEIN HF.12 [Homo sapiens]//5.6e-102:486:99//Hs.145956:AA007349

[25073] R-NT2RP3001081//Retinal pigment epithelium-specific protein (65 kD)//0.0012:447:58//Hs.2133:U18991

[25074] R-NT2RP3001084//ESTs//4.3e-102:528:96//Hs.25277:W87874

[25075] R-NT2RP3001096//ESTs//1.1e-110:540:96//Hs.42824:AA873182

[25076] R-NT2RP3001107//ESTs//7.6e-100:478:98//Hs.99669:AA287832

[25077] R-nnnnnnnnnnnn//DNA polymerase gamma//0.0014:50:100//Hs.80961:U60325

[25078] R-NT2RP30011111//ESTs, Weakly similar to Trf-proximal protein [D. melanogaster]//3.2e-104:543:95//Hs.93796:C06063

[25079] R-NT2RP3001113//ESTs//3.3e-100:467:99//Hs.97757:AA401575

[25080] R-NT2RP3001115//Oxytocin receptor//7.9e-30:505:67//Hs.2820:X64878

[25081] R-NT2RP3001116//ESTs//4.6e-41:229:96//Hs.58412:W74779

[25082] R-NT2RP3001119//ESTs//6.9e-88:478:92//Hs.19469:AA203180

[25083] R-NT2RP3001120//ESTs//3.1e-82:430:93//Hs.110956:AI190166

[25084] R-NT2RP3001126//ESTs//4.4e-52:264:96//Hs.25264:R78188

[25085] R-NT2RP3001133//ESTs//4.7e- 105:541:94//Hs.73239:AA573761

[25086] R-NT2RP3001140//Homo sapiens mRNA for KIAA0762 protein, partial cds//2.6e-115:549:97//Hs.5378:AB018305

[25087] R-NT2RP3001147//ESTs, Highly similar to GTPASE ACTIVATING PROTEIN ROTUND [Drosophila melanogaster]//9.6e-113:552:97//Hs.23900:U82984

[25088] R-NT2RP3001150//ESTs//2.9e-90:444:97//Hs.99601:AA760717

[25089] R-NT2RP3001155//Homo sapiens mRNA for AND-1 protein//9.4e-118:563:98//Hs.72160:AJ006266

[25090] R-NT2RP3001176//ESTs//1.8e-110:534:98//Hs.58650:AI074460

[25091] R-NT2RP3001214//ESTs//1.7e-109:545:96//Hs.24481:AA573139

[25092] R-NT2RP3001216//EST//0.00098:128:66//Hs.160493:AI254963

[25093] R-NT2RP300122//EST//0.010:106:66//Hs.147774:AI221196

[25094] R-NT2RP3001232//ESTs//1.5e-101:518:94//Hs.21630:AA778399

[25095] R-NT2RP3001236//ESTs, Highly similar to KIAA0377 [H. sapiens]//2.8e-89:462:95//Hs.116793:AA779588

[25096] R-NT2RP3001239//ESTs, Moderately similar to NEURAXIN [Rattus norvegicus]//5.2e-82:466:91//Hs.66048:AA524416

[25097] R-NT2RP300124511EST//0.53:237:62//Hs.161131:AI417631

[25098] R-NT2RP3001253//ESTs//1 .7e-105:535:96//Hs.42315:AI222997

[25099] R-NT2RP3001260//EST//0.16:144:62//Hs.126856:AA932135

[25100] R-NT2RP3001268//Human Aac11 (aac11) mRNA, complete cds//0.12:494:59//Hs.151031:U83857

[25101] R-NT2RP3001272//ESTs//1.4e-92:436:99//Hs.149831:AI383965

[25102] R-NT2RP3001274//ESTs//3.9e-81:424:95//Hs.113184:N25651

[25103] R-NT2RP3001281//EST1/3.1e-60:298:98//Hs.149230:AI247332

[25104] R-NT2RP3001307//EST//0.42:215:6211Hs.126165:AA868691

[25105] R-NT2RP3001318//ESTs//4.1e-74:363:97//Hs.130832:H92571

[25106] R-NT2RP3001325//ESTs//1.7e-106:534:96//Hs.21214:H98989

[25107] R-NT2RP3001338//Human protein tyrosine phosphatase sigma mRNA, complete cds//0.22:199:63//Hs.159534:U35234

[25108] R-NT2RP3001339//Homo sapiens mRNA for KIAA0451 protein, complete cds//3.9e-114:566:96//Hs.18586:AB007920

[25109] R-NT2RP3001340//ESTs//1.1e-72:411:92//Hs.21135:W81653

[25110] R-NT2RP3001355//ESTs//9.0e-103:521:95//Hs.99486:AA776798

[25111] R-NT2RP3001374//ESTs//2.7e-82:395:98//Hs.117102:AA993090

[25112] R-NT2RP3001383//ESTs//3.6e-10:I 18:78//Hs.111055:AA169778

[25113] R-NT2RP3001384//ESTs, Weakly similar to A-kinase anchor protein 95, AKAP95 [R. norvegicus]//5 .7e-92:522:90//Hs.96200:AA218942

[25114] R-NT2RP3001392//ESTs//5.9e-62:296:100//Hs.125034:AA907375

[25115] R-NT2RP3001396//ESTs//13.7e-111:528:98//Hs.22612:AA1152232

[25116] R-NT2RP3001398//ESTs//2.6e-94:449:99//Hs.146332:AI276628

[25117] R-NT2RP3001399//ESTs//2.6e-82:401:97//Hs.7932:AI041186

[25118] R-NT2RP3001407//ESTs//2.2e-101:488:97//Hs.71573:AA496898

[25119] R-NT2RP3001420//EST//7.4e-44:394:79//Hs.137041:AA877817

[25120] R-NT2RP3001426//Homo sapiens clone 24616 mRNA sequence//3.6e-106:550:94//Hs.6957:AF052158

[25121] R-NT2RP3001427//ESTs//1.3e-87:374:97//Hs.5457:H05692

[25122] R-nnnnnnnnnnnn//Neurotrophic tyrosine kinase, receptor, type 1//4.7e-96:533:91//Hs.85844:X66397

[25123] R-NT2RP3001432//ESTs//1.9e-102:523:95//Hs.132978:AI041374

[25124] R-NT2RP3001447//ESTs, Moderately similar to !!!! ALU SUBFAMILY J WARNING ENTRY !!!! [H. sapiens]//5.1e-101:482:98//Hs.124135:AA910560

[25125] R-NT2RP3001449//ESTs//2.2e-99:502:96//Hs.7834:N45994

[25126] R-NT2RP3001453//Small inducible cytokine A5 (RANTES)//8 .1e-45:295:85//Hs.155464:AF088219

[25127] R-NT2RP3001457//ESTs//1.5e-52:256:99//Hs.117982:AA644658

[25128] R-NT2RP3001459//ESTs//3.4e-62:299:99//Hs.146098:AA167280

[25129] R-NT2RP3001472//ESTs//4.8e-108:540:96//Hs.69594:N37009

[25130] R-NT2RP3001490//ESTs//3.5e-91:549:88//Hs.6606:AA211783

[25131] R-NT2RP3001495//Human oxidoreductase (HHCMA56) mRNA, complete cds//1.4e-61:338:93//Hs.519:U13395

[25132] R-NT2RP3001497//Homo sapiens multiple membrane spanning receptor TRC8 (TRC8) mRNA, complete cds//6.8e-112:549:97//Hs.28285:AF064801

[25133] R-NT2RP3001527//ESTs//4.4e-105:543:95//Hs.158761:AA631047

[25134] R-NT2RP3001529//Homo sapiens tapasin (NGS-17) mRNA, complete cds//7.9e-59:427:83//Hs.5247:AF029750

[25135] R-NT2RP3001538//ESTs//1.6e-94:521:92//Hs.6846:AA209463

[25136] R-NT2RP3001554//ESTs, Moderately similar to NEURAXIN [Rattus norvegicus]//2.8e-76:392:95//Hs.66048:AA524416

[25137] R-NT2RP3001580//ESTs//3 .7e-82:398:98//Hs.23490:N49477

[25138] R-NT2RP3001587//Homa sapiens mRNA for HRIHFB2115, partial cds//1.8e-09:86:88//Hs.4311:AB015337

[25139] R-NT2RP3001589//ESTs//0.0029:243:62//Hs.158924:AA605194

[25140] R-NT2RP3001607//EST//0.00096:76:78//Hs.140319:AA748328

[25141] R-NT2RP3001608//ESTs//13.8e-105:525:96//Hs.144655:AI279798

[25142] R-NT2RP3001621//ESTs//3.3e-108:535:97//Hs.47378:AI193598

[25143] R-NT2RP3001629

[25144] R-NT2RP3001634//Homo sapiens TRIADI type I mRNA, complete cds//2.7e-109:541:96//Hs.9899:AF099149

[25145] R-NT2RP3001642//ESTs//6.0e-105:525:96//Hs.3376:AA915989

[25146] R-NT2RP3001646//ESTs//4.8e-95:523:92//Hs.64036:AA127709

[25147] R-NT2RP3001671//ESTs//0.0013:367:60//Hs.106090:AA457030

[25148] R-NT2RP3001672//ESTs//3 .4e-37:191:98//Hs.57475:AI382189

[25149] R-NT2RP3001676//ESTs//1.5e-81:408:97//Hs.142547:N67648

[25150] R-NT2RP3001678//ESTs//4.3e-85:405:99//Hs.121915:AI268225

[25151] R-NT2RP3001679//ESTs//3 .4e-100:545:93//Hs.5943:AI222558

[25152] R-NT2RP3001688//Human mRNA for KIAA0392 gene, partial cds//8.6e-46:301:87//Hs.40100:AB002390

[25153] R-NT2RP3001690//ESTs//3.3e-111:542:97//Hs.86149:AI341312

[25154] R-NT2RP3001708//ESTs//1.4e-96:349:95//Hs.17975:AA868618

[25155] R-NT2RP3001712//ESTs//9.3e-14:102:92//Hs.78041:N29669

[25156] R-NT2RP3001716//ESTs, Highly similar to BONE MORPHOGENETIC PROTEIN 1 PRECURSOR [Mus musculus]//4.1e-80:444:91//Hs.6823:W 18181

[25157] R-NT2RP3001724//ESTs//1.8e-109:547:96//Hs.14570:AI422099

[25158] R-NT2RP3001730//ESTs//4.1e-98:528:92//Hs.1551155:AA669923

[25159] R-NT2RP3001739//ESTs//4.4e-87:444:94//Hs.27239:W27810

[25160] R-NT2RP3001752//ESTs//6.1e-93:490:94//Hs.42110:AA740440

[25161] R-NT2RP3001753//ESTs//2.5e-82:395:99//Hs.126435:AA912968

[25162] R-NT2RP3001764//ESTs, Weakly similar to protein-tyrosine phosphatase [H. sapiens]//1.2e-87:450:96//Hs.20281:N92517

[25163] R-NT2RP3001777//ESTs//1.1e-86:360:97//Hs.100530:H06725

[25164] R-NT2RP3001782//Homo sapiens mRNA for KIAA0459 protein, partial cds//4.2e-113:549:97//Hs.28169:AB007928

[25165] R-NT2RP3001792//ESTs, Weakly similar to F35C12.2 [C. elegans]//1.1e-21:119:99//Hs.44268:AA455900

[25166] R-NT2RP3001799//OX40L RECEPTOR PRECURSOR//2.8e-45:374:79//Hs.129780:X75962

[25167] R-NT2RP3001819//ESTs//2.6e-87:432:96//Hs.10414:AI291292

[25168] R-NT2RP3001844//ESTs//0.024:128:67//Hs.25131:N50117

[25169] R-NT2RP3001854//ESTs//1.4e-92:490:92//Hs.15165:N52900

[25170] R-NT2RP3001855//ESTs//1.9e-66:361:93//Hs.10043:D81792

[25171] R-NT2RP3001896//ESTs//1.4e-96:343:97//Hs.24809:N73642

[25172] R-NT2RP3001898//ESTs//4.1e-90:515:91//Hs.4867:AA521180

[25173] R-NT2RP3001915//ESTs//4.4e-32:175:95//Hs.24641:AA954666

[25174] R-NT2RP3001926//ESTs, Highly similar to NUCLEOLYSIN TIA-1 [Homo sapiens]//1.0e-40:202:100//Hs.24709:AI123300

[25175] R-NT2RP30019291//ESTs//6.6e-84:449:94//Hs.26962:AA682781

[25176] R-NT2RP3001931//ESTs//1.0e-41:214:99//Hs.32360:AA534737

[25177] R-NT2RP3001938//ESTs, Highly similar to SPORULATION-SPECIFIC PROTEIN I [Saccharomyces cerevisiae]//1.3e-95:483:96//Hs.5771:W74591

[25178] R-NT2RP3001943//ESTs//1.2e-23:169:88//Hs.103930:AA160990

[25179] R-NT2RP3001944//ESTs//2.0e-90:439:97//Hs.103380:AI291325

[25180] R-NT2RP3001969//ESTs//0.95:133:65//Hs.131669:AI025889

[25181] R-NT2RP3001989//ESTs, Weakly similar to COIA2.4 [C. elegans]//8.9e-64:310:99//Hs.11449:AI201540

[25182] R-NT2RP3002002//ESTs//2.1e-95:562:89//Hs.5997:AA897088

[25183] R-NT2RP3002004//H. sapiens mRNA for FAST kinase//1.6e-42:335:82//Hs.75087:X86779

[25184] R-NT2RP3002007//ESTs//0.12:184:66//Hs.94030:AA846729

[25185] R-NT2RP3002014//Small inducible cytokine A5 (RANTES)//6.8e-47:291:89//Hs.155464:AF088219

[25186] R-NT2RP3002033

[25187] R-NT2RP3002045//ESTs//1.0e-92:555:88//Hs.106411:W29081

[25188] R-NT2RP3002054//EST//0.45:155:63//Hs.5656:D20426

[25189] R-NT2RP3002056//ESTs//1.4e-95:504:93//Hs.17428:AI365221

[25190] R-NT2RP3002057//Human mRNA for KIAA0152 gene, complete cds//0.69:127:66//Hs.90438:D63486

[25191] R-NT2RP3002062

[25192] R-nnnnnnnnnnnn//ESTs//2.1e-13:552:97//Hs.9591:AA069657

[25193] R-NT2RP3002081//ESTs//5.5e-43:212:100//Hs.124852:AA969139

[25194] R-NT2RP3002097//EST//2.3e-10:80:91//Hs.102717:N59148

[25195] R-NT2RP3002102

[25196] R-NT2RP3002108

[25197] R-NT2RP3002146//ESTs//5.5e-58:296:97//Hs.65328:AA625385

[25198] R-NT2RP300214711EST//2.5e-53:387:81//Hs.147928:AI249703

[25199] R-NT2RP3002151//ESTs, Highly similar to GI TO S PHASE TRANSITION PROTEIN 1 HOMOLOG [Homo sapiens]//6.2e-107:534:96//Hs.59523:AA602837

[25200] R-NT2RP3002163//ESTs//2.7e-106:520:97//Hs.21258:AA412293

[25201] R-NT2RP3002165//ESTs//7.4e-93:479:95//Hs.27299:AI074024

[25202] R-NT2RP3002166//ESTs//1.0:261:59//Hs.132817:AA593713

[25203] R-NT2RP3002173//ESTs//2.7e-93:512:92//Hs.23648:H07120

[25204] R-NT2RP3002181//ESTs//1.0e-84:435:96//Hs.47378:AI193598

[25205] R-NT2RP3002244//ESTs//2.7e-11:97:89//Hs.9412:W72446

[25206] R-NT2RP3002248//ESTs//4.3e-90:459:95//Hs.9848:AA130588

[25207] R-NT2RP3002255//ESTs//1.3e-45:289:88//Hs.9100:AA431672

[25208] R-NT2RP3002273//ESTs//2.3e-100:489:97//Hs.8258:AA744743

[25209] R-NT2RP3002276//ESTs//1.2e-50:306:91//Hs.16160:AA778171

[25210] R-NT2RP3002303//ESTs//1.1e-67:323:99//Hs.129761:AA836898

[25211] R-NT2RP3002304//ESTs//2.8e-86:405:99//Hs.29643:AA418500

[25212] R-NT2RP3002330//ESTs, Weakly similar to GI TO S PHASE TRANSITION PROTEIN 1 HOMOLOG [H. sapiens]//1.8e-19:136:87//Hs.106928:AI041737

[25213] R-NT2RP3002343//ESTs//1.0e-42:260:93//Hs.7797:W25667

[25214] R-NT2RP3002351//Homo sapiens 9G8 splicing factor mRNA, complete cds//0.0048:221:64//Hs.556:L41887

[25215] R-NT2RP3002352//Homo sapiens mRNA for protein encoded by cxorf5 (71-7A) gene//5.8e-105:516:94//Hs.6483:Y16355

[25216] R-NT2RP3002455//Homo sapiens mRNA for KIAA0678 protein, partial cds//1.5e-103:524:95//Hs.12707:AB014578

[25217] R-NT2RP3002484//Human APRT gene for adenine phosphoribosyltransferase//0.54:108:71//Hs.28914:Y00486

[25218] R-NT2RP3002501//ESTs//2.7e-96:489:95//Hs.27335:N74185

[25219] R-NT2RP3002512//ESTs, Weakly similar to HYPOTHETICAL 31.0 KD PROTEIN R107.2 IN CHROMOSOME III [C. elegans]//3.2e-90:526:90//Hs.8083:AA521436

[25220] R-NT2RP3002529//ESTs, Highly similar to PUTATIVE VACUOLAR PROTEIN SORTING-ASSOCIATED PROTEIN C2G 11.03C [Schizosaccharomyces pombe]//3.8e-101:497:96//Hs.6650:AA843246

[25221] R-NT2RP3002545//Homo sapiens mRNA for KIAA0729 protein, partial cds//1.1e-83:438:94//Hs.19542:AB018272

[25222] R-NT2RP3002549//ESTs//3.8e-98:493:96//Hs.7358:AA191673

[25223] R-NT2RP3002566//Homo sapiens calcium-activated potassium channel (KCNN3) mRNA, complete cds//0.14:184:63//Hs.89230:AF031815

[25224] R-NT2RP3002587//Homo sapiens KIAA0420 mRNA, complete cds//2.0e-18:138:78//Hs.129883:AB007880

[25225] R-NT2RP3002590//ESTs//2.9e-51:290:93//Hs.162942:AI243850

[25226] R-NT2RP3002602//Homo sapiens stannin mRNA, complete cds//5.5e-06:58:100//Hs.76691:AF070673

[25227] R-NT2RP3002603

[25228] R-NT2RP3002631//ESTs//4.8e-54:367:85//Hs.13109:AA192514

[25229] R-NT2RP3002659//ESTs//5.3e-30:229:85//Hs.152114:AA401365

[25230] R-NT2RP3002660//ESTs//1.9e-88:452:95//Hs.120146:AA708573

[25231] R-NT2RP3002663//EST//3.2e-89:469:95//Hs.105767:AA525172

[25232] R-NT2RP3002671//ESTs, Highly similar to ELONGATION FACTOR 2 [Drosophila melanogaster]//5.9e-109:537:97//Hs.19348:AA151678

[25233] R-NT2RP3002682//ESTs//2.3e-98:541:91//Hs.75844:AA15502

[25234] R-NT2RP3002687//ESTs//5.5e-103:498:97//Hs.72782:AA910871

[25235] R-NT2RP3002688//ESTs, Weakly similar to !!!! ALU SUBFAMILY J WARNING ENTRY!!!! [H. sapiens]//5.0e-101:524:95//Hs.32580:AI123601

[25236] R-NT2RP3002701//EST//0.87:131:63//Hs.161916:AA483169

[25237] R-NT2RP3002713//ESTs//4.7e-106:542:95//Hs.14479:AA160945

[25238] R-NT2RP3002763//ESTs//1.3e-54:290:94//Hs.142031:AA809159

[25239] R-NT2RP3002770//ESTs//0.047:275:61//Hs.122984:AA526973

[25240] R-NT2RP3002785//ESTs//2.4e-52:255:99//Hs.132959:AI376958

[25241] R-NT2RP3002799//EST//8.2e-61:321:94//Hs.140992:R71377

[25242] R-NT2RP3002810//EST//0.19:116:68//Hs.121810:AA775240

[25243] R-NT2RP3002818//ESTs//1.3e-109:531:98//Hs.58924:AI348080

[25244] R-NT2RP3002861//ESTs//2. Se-84:429:95//Hs.23920:AA909678

[25245] R-NT2RP3002869//EST//0.00011:116:71//Hs.161606:AA019641

[25246] R-NT2RP3002876//ESTs//0.0024:182:63//Hs.117306:AA687262

[25247] R-NT2RP3002877//Homo sapiens X-ray repair cross-complementing protein 2 (XRCC2) mRNA, complete cds//8.1e-14:146:72//Hs.129727:AF035587

[25248] R-NT2RP3002909//Homo sapiens mRNA for KIAA0771 protein, partial cds//1.5e-110:570:95//Hs.6162:AB018314

[25249] R-NT2RP3002911//ESTs//3.6e-92:436:99//Hs.143917:AI206286

[25250] R-NT2RP3002948//EST//1.0:102:65//Hs.144730:AI191975

[25251] R-NT2RP3002953//ESTs//1.8e-107:513:98//Hs.119693:AI201698

[25252] R-NT2RP3002955//Homo sapiens mRNA, chromosome 1 specific transcript KIAA0492//0.23:563:56//Hs.127338:AB007961

[25253] R-NT2RP3002969//ESTs, Weakly similar to LONG-CHAIN-FATTY-ACID-COA LIGASE I [Saccharomyces cerevisiae]//2.0e-56:387:86//Hs.144597:W20143

[25254] R-NT2RP3002972//ESTs//1.7e-97:502:96//Hs.7274:AA476850

[25255] R-NT2RP3002978//ESTs//8.6e-104:498:98//Hs.118923:AA252116

[25256] R-NT2RP3002988//EST//1.2e-59:315:94//Hs.157743:AI360553

[25257] R-NT2RP3003008//ESTs//1.4e-97:515:94//Hs.6544:AA524423

[25258] R-NT2RP3003032//ESTs, Weakly similar to RETROVIRUS-RELATED POL POLYPROTEIN [Mus musculus]//3.0e-100:528:94//Hs.90353:N98551

[25259] R-NT2RP3003059//ESTs//1.7e-76:398:95//Hs.102971:WO5355

[25260] R-NT2RP3003061//ESTs//4.9e-82:414:96//Hs.99603 AI41912

[25261] R-NT2RP3003068//ESTs, Weakly similar to MI 8.3 [C. elegans]//5.9e-83:392:99//Hs.101364:AA534439

[25262] R-NT2RP3003071//ESTs//6.3e-85:399:99//Hs.109755:AA180809

[25263] R-NT2RP3003078//ESTs//1.0e-98:471:99//Hs.7995:AI359466

[25264] R-NT2RP3003101//EST//0.032:235:60//Hs.147920:AI202441

[25265] R-NT2RP3003121//ESTs//3.0e-47:238:97//Hs.43559:AI003520

[25266] R-NT2RP300313311EST//1.5e-77:395:96//Hs.142150:AA223982

[25267] R-NT2RP3003138//ESTs, Highly similar to KINESIN-LIKE PROTEIN KIF4 [Mus musculus]//3.3e-107:535:96//Hs.27437:AA004208

[25268] R-NT2RP3003139//ESTs//2.5e-106:504:98//Hs.106795:AI271632

[25269] R-NT2RP3003150//ESTs//1.6e-99:539:91//Hs.46500:AA129774

[25270] R-NT2RP3003157//ESTs//1.5e-114:563:97//Hs.58608:AA081007

[25271] R-NT2RP3003185//ESTs//3.9e-93:443:98//Hs.9741:AI131226

[25272] R-NT2RP3003193//ESTs//2.0e-37:428:71//Hs.33354:AA179944

[25273] R-NT2RP3003197//ESTs//5.8e-56:312:94//Hs.7016:AA215796

[25274] R-NT2RP3003203//EST//0.0073:212:63//Hs.161355:AI422634

[25275] R-NT2RP3003204//ESTs//7.4e-52:253:99//Hs.120146:AA708573

[25276] R-NT2RP3003212//ESTs//1.8e-76:401:95//Hs.29067:N26107

[25277] R-NT2RP3003230//ESTs, Highly similar to CORONIN [Dictyostelium discoideum]//2.0e-40:229:93//Hs.17377:AI078151

[25278] R-NT2RP3003242//ESTs//8.3e-97:458:99//Hs.23057:AI290343

[25279] R-NT2RP3003251//ESTs//1.5e-60:320:95//Hs.36495:AA151628

[25280] R-NT2RP3003264//ESTs//2.1e-103:521:95//Hs.4094:AA1173960

[25281] R-NT2RP3003278//ESTs//8.2e-109:536:96//Hs.23788:AA524061

[25282] R-NT2RP3003282//Homo sapiens dynamin (DNM) mRNA, complete cds//2.4e-102:550:93//Hs.11702:L36983

[25283] R-NT2RP3003290//EST//4.3e-27:372:70//Hs.159131:AI384035

[25284] R-NT2RP3003301//ESTs//4.4e-56:285:97//Hs.95370:AA601055

[25285] R-NT2RP3003302//EST//7.2e-10:395:63//Hs.162554:AA584818

[25286] R-NT2RP300331//ESTs//4.2e-110:538:97//Hs.62180:AI341261

[25287] R-NT2RP3003313//ESTs//2.1e-106:531:96//Hs.22630:C05931

[25288] R-NT2RP3003327//ESTs//4.3e-102:518:95//Hs.120355:AA625445

[25289] R-NT2RP3003330//ESTs//8.6e-104:497:97//Hs.72071:AI25289

[25290] R-NT2RP3003344//ESTs//2.5e-105:494:99//Hs.112188:AA872993

[25291] R-NT2RP3003346//ESTs//1.0:123:69//Hs.116029:AA813102

[25292] R-NT2RP3003353//EST//0.0014:162:68//Hs.149191:AI246155

[25293] R-NT2RP3003377//EST//4.5e- 15:119:85//Hs.148129:AA885567

[25294] R-NT2RP3003384//EST//0.0057:86:74//Hs.127735:AA962272

[25295] R-NT2RP3003385//ESTs//0.64:347:59//Hs.5646:W72721

[25296] R-NT2RP3003403//ESTs, Weakly similar to LINE-1 REVERSE TRANSCRIPTASE HOMOLOG [H. sapiens]//2.2e-24:418:67//Hs.139488:AI124095

[25297] R-NT2RP3003409//ESTs//5.3e-98:479:97//Hs.155198:AA767372

[25298] R-NT2RP3003411//ESTs//4.8e-86:416:97//Hs.129059:AA126041

[25299] R-NT2RP3003427//ESTs//7.4e-103:510:96//Hs.25303:AA641023

[25300] R-NT2RP3003433//ESTs//3.5e-85:405:99//Hs.63131:AA664156

[25301] R-NT2RP3003464//Homo sapiens rab3-GAP regulatory domain mRNA, complete cds//3.6e-97:479:96//Hs.14934:AF004828

[25302] R-NT2RP3003490//Homo sapiens mRNA for KIAA0725 protein, partial cds//4.1e-102:527:93//Hs.26450:AB018268

[25303] R-NT2RP3003491//ESTs, Weakly similar to No definition line found [C. elegans]//4.0e-106:549:94//Hs.7886:AI057529

[25304] R-NT2RP3003500//Human RP3 mRNA, complete cds//0.66:401:60//Hs.75307:U02556

[25305] R-NT2RP3003543//Human clone A9A2BRB7 (CAC)n/(GTG)n repeat-containing mRNA//4.1e-33:217:88//Hs.8068:U00952

[25306] R-NT2RP3003552//ESTs//3.1e-106:546:94//Hs.101754:A1123430

[25307] R-NT2RP3003555//ESTs//3.4e-106:537:95//Hs.85550:AA187681

[25308] R-NT2RP3003564

[25309] R-NT2RP3003572//ESTs//1.2e-20:122:88//Hs.8253:N48721

[25310] R-NT2RP3003576//ESTs//2.7e-71:394:94//Hs.151136:R99944

[25311] R-NT2RP3003589//EST//0.58:242:59//Hs.130804:AA894759

[25312] R-NT2RP3003625//ESTs//7.6e-41:349:80//Hs.140608:N53448

[25313] R-NT2RP3003656//Human LIM protein (LPP) mRNA, partial cds//0.26:222:60//Hs.17217:U49957

[25314] R-NT2RP3003659//ESTs//2.0e-13:547:97//Hs.23389:AA769310

[25315] R-NT2RP3003665//ESTs//1.6e-80:415:95//Hs.141084:H11714

[25316] R-NT2RP3003672

[25317] R-NT2RP3003686//ESTs//6.8e-114:552:97//Hs.43299:N23036

[25318] R-NT2RP3003701//ESTs//2.1e-16:282:66//Hs.115512:AI208768

[25319] R-NT2RP3003716//ESTs//2.1e-45:195:91//Hs.41296:N71923

[25320] R-NT2RP3003726//Homo sapiens mRNA for KIAA0757 protein, complete cds//5.6e-103:492:97//Hs.48513:AB018300

[25321] R-NT2RP3003746//ESTs//1.9e-85:411:98//Hs.54835:AI050863

[25322] R-NT2RP3003795//EST//6.2e-97:459:99//Hs.134769:AI089747

[25323] R-NT2RP3003799//ESTs//2.8e-62:337:94//Hs.124023:H 18913

[25324] R-NT2RP3003800//PROTO-ONCOGENE TYROSINE-PROTEIN KINASE SRC//8.9e-108:551:95//Hs.115742:AF077754

[25325] R-NT2RP3003805//ESTs//2.2e-103:490:99//Hs.9412:W72446

[25326] R-NT2RP3003809//ESTs, Highly similar to SAV PROTEIN [Sulfolobus acidocaldarius]//3.4e-89:456:95//Hs.5555:AI285198

[25327] R-NT2RP3003819//Interleukin 10//3.3e-43:173:89//Hs.2180:M57627

[25328] R-NT2RP3003825//ESTs//1.6e-66:485:80//Hs.7405:W27761

[25329] R-NT2RP3003828//ESTs, Weakly similar to unknown [H. sapiens]//9.6e-98:511:95//Hs.26955:AI333224

[25330] R-NT2RP3003831//ESTs//2.2e-38:317:79//Hs.142173:AA757743

[25331] R-NT2RP3003833//Homo sapiens clones 24718 and 24825 mRNA sequence//5.2e-110:541:97//Hs.25300:AF070611

[25332] R-NT2RP3003842//EST//9.9e-44:506:70//Hs.139093:AA166888

[25333] R-NT2RP3003846//ESTs//4.6e-10:66:100//Hs.74924:AI332962

[25334] R-NT2RP3003870//ESTs//3.4e-82:449:92//Hs.122691:AA152298

[25335] R-NT2RP3003876//ESTs//1.9e-89:449:96//Hs.45046:N40170

[25336] R-NT2RP30039141//ESTs//1.3e-99:470:98//Hs.118966:AA926726

[25337] R-NT2RP3003918//ESTs//1.3e-79:417:94//Hs.5005:W25933

[25338] R-NT2RP3003932//ESTs//6.0e-83:427:94//Hs.93581:H50221

[25339] R-NT2RP3003989//ESTs//4.8e-76:403:93//Hs.127243:W80409

[25340] R-NT2RP3003992//ESTs//2.4e-88:508:90//Hs.134200:D 19593

[25341] R-NT2RP3004013//ESTs//3.7e-111:551:97//Hs.105108:AA781142

[25342] R-NT2RP3004016//ESTs//1.7e-81:394:98//Hs.63368:AA613714

[25343] R-NT2RP3004041

[25344] R-NT2RP3004051//ESTs//3.5e-69:386:93//Hs.51347:T72820

[25345] R-NT2RP3004070//ESTs//5.5e-108:552:95//Hs.23392:AI310139

[25346] R-NT2RP3004078//ESTs//3.3e-82:443:93//Hs.26407:W45387

[25347] R-NT2RP3004093//ESTs//4.4e-83:426:94//Hs.140932:AI262104

[25348] R-NT2RP3004095//ESTs//0.00013:93:78//Hs.36567:AA262045

[25349] R-NT2RP3004110//ESTs, Weakly similar to similar to oxysterol-binding proteins: partial CDS [C. elegans]//3.5e-76:402:95//Hs.55847:W31092

[25350] R-NT2RP3004125//ESTs//9.3e-74:363:97//Hs.32988:C01696

[25351] R-NT2RP3004145//ESTs//2.6e-96:451:99//Hs.59584:AA587334

[25352] R-NT2RP3004148//ESTs//1.3e-10:77:92//Hs.135890:A1183425

[25353] R-NT2RP3004155//ESTs//1.7e-110:558:96//Hs.27003:AI279093

[25354] R-NT2RP3004206//ESTs, Moderately similar to CROOKED NECK PROTEIN [Drosophila melanogaster]//1.8e-40:200:100//Hs.26089:AA195126

[25355] R-NT2RP3004207//ESTs, Weakly similar to gene SEZ-6 [M. musculus]//1.1e-41:266:89//Hs.6314:AA522619

[25356] R-NT2RP3004209//ESTs, Highly similar to PUTATIVE UBIQUITIN CARBOXYL-TERMINAL HYDROLASE C13A 11.04C [Schizosaccharomyces pombe]//3.7e-112:547:97//Hs.99819:A1346680

[25357] R-NT2RP3004215//ESTs//1.11e-103:541:95//Hs.124918:N64794

[25358] R-NT2RP3004242//ESTs//4.5e-05:524:96//Hs.29724:N46252

[25359] R-NT2RP3004246//EST//1.9e-07:67:91//Hs.125687:AA884827

[25360] R-NT2RP3004253//EST//2.9e-88:454:94//Hs.127713:AA961628

[25361] R-NT2RP3004258//ESTs, Weakly similar to PRE-MRNA SPLICING FACTOR SRP75 [Homo sapiens]//1.6e-89:468:95//Hs.5117:AA831530

[25362] R-NT2RP3004262//ESTs//4.1e-86:443:96//Hs.101393:T87623

[25363] R-NT2RP3004334//EST//0.00057:206:63//Hs.149388:AI273630

[25364] R-NT2RP3004341//EST//0.00042:151:68//Hs.148498:AI200264

[25365] R-NT2RP3004348//Homo sapiens LIM protein mRNA, complete cds//5.9e-61:299:85//Hs.154103:AF061258

[25366] R-NT2RP3004349//EST//3.6e-42:175:88//Hs.161917:AA483223

[25367] R-NT2RP3004378//ESTs//0.27:294:60//Hs.66479:AA863044

[25368] R-NT2RP3004399//ESTs//5.8e-99:479:98//Hs.120234:AA732224

[25369] R-NT2RP3004424//EST, Highly similar to F21G4.6 [C. elegans]//0.30:253:58//Hs.97184:AA385934

[25370] R-NT2RP3004428//ESTs//2.8e-48:279:91//Hs.106826:W25985

[25371] R-NT2RP3004451//ESTs//4.8e-101:509:96//Hs.29725:W74621

[25372] R-NT2RP3004454//Homo sapiens mRNA for KIAA0448 protein, complete cds//9.3e-108:526:98//Hs.27349:AB007917

[25373] R-NT2RP3004466//ESTs//0.25:51:90//Hs.7778:AA195616

[25374] R-NT2RP3004470//EST//0.032:70:71//Hs.147925:AI249332

[25375] R-NT2RP3004472//ESTs//0.0069:430:59//Hs.116651:AA993406

[25376] R-NT2RP3004475//Homo sapiens mRNA for KIAA0456 protein, partial cds//5.0e-107:521:97//Hs.5003:AB007925

[25377] R-NT2RP3004480

[25378] R-NT2RP3004490//ESTs//4.7e-68:354:95//Hs.163721:H42504

[25379] R-NT2RP3004498//ESTs, Moderately similar to ORF2: function unknown [H. sapiens]//3.4e-100:508:95//Hs.47393:AA218858

[25380] R-NT2RP3004503//ESTs//4.6e-90:478:93//Hs.133998:AA994735

[25381] R-NT2RP3004504//ESTs, Highly similar to cytoplasmic polyadenylation element-binding protein [M. musculus]//1.8e-83:465:92//Hs.137064:AA318257

[25382] R-NT2RP3004507//ESTs//1.5e-98:495:96//Hs.128905:AI051971

[25383] R-NT2RP3004527//EST//1.6e-109:535:97//Hs.149481:AI279865

[25384] R-nnnnnnnnnnnn

[25385] R-NT2RP3004544//EST//0.035:226:60//Hs.99195:AA449232

[25386] R-NT2RP3004566//ESTs//4.1e-86:455:95//Hs.13110:T67461

[25387] R-NT2RP3004569//ESTs//2.9e-94:493:94//Hs.24948:AA977674

[25388] R-NT2RP3004572//ESTs//1.1e-92:437:99//Hs.24846:AI420493

[25389] R-NT2RP3004578//ESTs//0.98:166:64//Hs.124593:AA854456

[25390] R-NT2RP3004594//EST//5.8e-89:426:98//Hs.134213:AI080213

[25391] R-NT2RP3004617//ESTs//1.4e-40:226:85//Hs.15921:R71157

[25392] R-NT2RP3004618//ESTs//1.8e-38:229:90//Hs.125153:AA453723

[25393] R-NT2RP3004670//Homo sapiens GN6ST mRNA for long form of N-acetylglucosamine-6-O-sulfotransferase (GlcNAc6ST), complete cds//7.2e-57:291:95//Hs.8786:AB014680

[25394] R-NT2RP4000008//ESTs//8.9e-119:561:98//Hs.25035:AI123335

[25395] R-NT2RP4000023//EST//1.2e-34:271:80//Hs.98300:AA418560

[25396] R-NT2RP4000035//Small inducible cytokine A5 (RANTES)//2.1e-68:320:82//Hs.155464:AF088219

[25397] R-NT2RP4000049//Homo sapiens TRAIL receptor 2 mRNA, complete cds//6.7e-60:289:82//Hs.51233:AF016266

[25398] R-NT2RP4000051//ESTs, Weakly similar to protein B [H. sapiens]//8.3e-98:462:99//Hs.10114:AI345945

[25399] R-NT2RP4000078//ESTs//0.00068:367:60//Hs.106090:AA457030

[25400] R-NT2RP4000102//ESTs//9.7e-50:256:97//Hs.24266:R28287

[25401] R-NT2RP4000109//Homo sapiens mRNA for MEGF5, partial cds//1.1e-107:536:96//Hs.57929:AB011538

[25402] R-NT2RP4000129//Homo sapiens mRNA for KIAA0483 protein, partial cds//3.5e-112:554:97//Hs.64691:AB007952

[25403] R-NT2RP4000147//ESTs//3.9e-11:122:80//Hs.25584:AA632014

[25404] R-NT2RP4000150//EST//4.4e-84:510:88//Hs.144238:W52294

[25405] R-NT2RP4000151//ESTs, Weakly similar to HYPOTHETICAL 31.0 KD PROTEIN R107.2 IN CHROMOSOME III [C. elegans]//5.7e-93:515:92//Hs.8083:AA521436

[25406] R-NT2RP4000159//ESTs//0.0019:209:65//Hs.161816:AA400295

[25407] R-NT2RP4000167//ESTs//2.1e-113:549:97//Hs.109441:N66569

[25408] R-NT2RP4000185//ESTs//0.65:232:59//Hs.144445:AA807257

[25409] R-NT2RP4000210//Homo sapiens mRNA for KIAA0700 protein, partial cds//1.5e-100:505:96//Hs.13999:AB014600

[25410] R-NT2RP4000212//ESTs//8.5e-14:169:75//Hs.8520:AA081788

[25411] R-NT2RP4000214//Human mRNA for KIAA0392 gene, partial cds//6.2e-43:272:90//Hs.40100:AB002390

[25412] R-NT2RP4000218//ESTs//6.1e-10:335:64//Hs.105658:AA978185

[25413] R-NT2RP4000243//Homo sapiens mRNA for cartilage-associated protein (CASP)//2.9e-70:354:96//Hs.155481:AJ006470

[25414] R-NT2RP4000246//ESTs//7.1e-26:154:94//Hs.14838:AA502757

[25415] R-NT2RP4000259//Homo sapiens clone 683 unknown mRNA, complete sequence//9.3e-79:379:99//Hs.43728:AF091092

[25416] R-NT2RP4000263

[25417] R-nnnnnnnnnnnn//ESTs, Weakly similar to similar to Achlya ambisexualis antheridiol steroid receptor [C. elegans]//4.7e-104:525:96//Hs.152069:AA548972

[25418] R-NT2RP4000312//ESTs//8.2e-66:319:99//Hs.35091:AI271631

[25419] R-NT2RP4000321//Homo sapiens clone 24453 mRNA sequence//1.3e-109:513:99//Hs.13410:AF070524

[25420] R-NT2RP4000323//ESTs//7.7e-109:534:97//Hs.34790:AA192760

[25421] R-NT2RP4000355//ESTs//3.1e-44:320:83//Hs.141323:N80390

[25422] R-NT2RP4000360//Homo sapiens mRNA for KIAA0738 protein, complete cds//7.6e-111:520:99//Hs.107479:AB018281

[25423] R-NT2RP4000367//Homo sapiens IkappaB kinase complex associated protein (IKAP) mRNA, complete cds//2.8e-110:527:98//Hs.31323:AF044195

[25424] R-NT2RP4000370//ESTs//8.9e-32:166:98//Hs.70488:AI301130

[25425] R-NT2RP40003761//ESTs//6.8e-99:465:99//Hs.27182:AA604498

[25426] R-NT2RP4000381//ESTs//3.0e-50:280:93//Hs.8395:W27376

[25427] R-NT2RP4000415//ESTs, Weakly similar to coded for by C. elegans cDNA yk30b3.5 [C. elegans]//3.9e-87:499:91//Hs.26156:AA630975

[25428] R-NT2RP4000417//ESTs, Moderately similar to HYPOTHETICAL 91.2 KD PROTEIN IN RPS7A-SCH9 INTERGENIC REGION [Saccharomyces cerevisiae]//8.9e-95:468:96//Hs.93871:AI191318

[25429] R-NT2RP4000424//ESTs//3.7e-98:473:98//Hs.24945 Al 189011

[25430] R-NT2RP4000448//ESTs//2.6e-79:446:91//Hs.25159:R60955

[25431] R-NT2RP4000449//ESTs//3.6e-98:468:981//Hs.31176:AI037953

[25432] R-NT2RP4000455//Homo sapiens N-methyl-D-aspartate receptor 2D subunit precursor (NMDAR2D) mRNA, complete cds//0.35:153:63//Hs.113286:U77783

[25433] R-nnnnnnnnnnnnn//ESTs//4.5e-89:455:96//Hs.62638:AA127740

[25434] R-NT2RP4000480//ESTs//4.9e-92:431:99//Hs.121072:AI204167

[25435] R-nnnnnnnnnnnn

[25436] R-NT2RP4000500//ESTs, Weakly similar to HYPOTHETICAL 83.6 KD PROTEIN R05D3.2 IN CHROMOSOME III [C. elegans]//1.2e-40:125:97//Hs.56124:AI424792

[25437] R-NT2RP4000515//EST//6.7e-30:183:90//Hs.150710:A1122713

[25438] R-NT2RP4000517//Aldehyde dehydrogenase 7//7.5e-28:183:7611Hs.83155:U10868

[25439] R-NT2RP4000518//EST//0.091:178:58//Hs.133031:AI049874

[25440] R-NT2RP4000519

[25441] R-NT2RP4000524//ESTs, Highly similar to rsec8 [R. norvegicus]//3.4e-93:496:93//Hs.107394:H07126

[25442] R-NT2RP4000528//EST//0.84:130:66//Hs.140208:AA702213

[25443] R-NT2RP4000541//EST//5.2e-63:337:94//Hs.156337:AI337328

[25444] R-NT2RP4000556//ESTs, Highly similar to 60S RIBOSOMAL PROTEIN L11 [R. norvegicus]//8.2e-92:448:98//Hs.25597:H93026

[25445] R-NT2RP4000588//ESTs//3.8e-94:445:98//Hs.44077:N28840

[25446] R-NT2RP4000614//ESTs//6.5e-18:159:83//Hs.24549:N57263

[25447] R-NT2RP4000638//ESTs//2.5e-46:296:87//Hs.132722:AA618531

[25448] R-NT2RP4000648//ESTs//2.6e-103:559:93//Hs.23794:W80393

[25449] R-NT2RP4000657//ESTs//1.0:189:60//Hs.87073:AA972704

[25450] R-NT2RP4000704//ESTs//2.8e-101:509:96//Hs.84824:AA935651

[25451] R-NT2RP4000724//ESTs//1.5e-83:442:94//Hs.142114:AA205615

[25452] R-NT2RP4000728//ESTs//0.84:61:75//Hs.145334:AI251399

[25453] R-NT2RP4000739//ESTs//8.8e-80:418:94//Hs.42959:N21211

[25454] R-NT2RP4000781//ESTs//1.4e-79:376:99//Hs.135458:AI081312

[25455] R-NT2RP4000817//Homo sapiens mRNA for KIAA0470 protein, complete cds//3.1e-106:550:94//Hs.25132:AB007939

[25456] R-NT2RP4000833//ESTs//5.8e-46:309:85//Hs.163979:AA828834

[25457] R-NT2RP4000837//ESTs//1.7e-112:539:97//Hs.97718:AI334028

[25458] R-NT2RP4000855//ESTs//1.1e-95:486:95//Hs.5345:AA988104

[25459] R-NT2RP4000865//EST//6.2e-68:412:89//Hs.142196:AA258356

[25460] R-NT2RP4000878//ESTs//1.9e-80:417:95//Hs.104716:AI023185

[25461] R-NT2RP4000879//ESTs//1.8e-42:211:99//Hs.89991:AI374617

[25462] R-nnnnnnnnnnnn//ESTs//1.2e-89:453:97//Hs.100182:N92594

[25463] R-nnnnnnnnnnnn//EST//9.4e-06:197:63//Hs.145970:AI277106

[25464] R-NT2RP4000925//ESTs, Weakly similar to KIAA0405 [H. sapiens]//5.9e-17:134:85//Hs.14146:W92235

[25465] R-nnnnnnnnnnnn//ESTs//4.3e-14:84:100//Hs.155360:AA984683

[25466] R-NT2RP4000928//Homo sapiens CDP-diacylglycerol synthase 2 (CDS2) mRNA, partial cds//8.2e-108:548:95//Hs.24812:AF069532

[25467] R-NT2RP4000929//ESTs//1.3e-119:567:98//Hs.62717:AA044905

[25468] R-NT2RP4000955//ESTs//3.5e-10:119:78//Hs.42946:N21111

[25469] R-NT2RP4000973//ESTs//2.8e-05:93:69//Hs.155126:AA563986

[25470] R-NT2RP4000975//ESTs//4.4e-58:324:95//Hs.126070:AA045179

[25471] R-NT2RP4000979//ESTs//3.5e-42:468:73//Hs.106210:AI193017

[25472] R-NT2RP4000984//Homo sapiens clone 23770 mRNA sequence//8.7e-120:570:98//Hs.12457:AF052123

[25473] R-NT2RP4000989//ESTs//1.3e-122:581:98//Hs.10499:AA528018

[25474] R-NT2RP4000996//ESTs//9.2e-113:579:94//Hs.23762:N26620

[25475] R-NT2RP4000997//Homo sapiens neuronal thread protein AD7c-NTP mRNA, complete cds//1.1e-28:439:68//Hs.129735:AF010144

[25476] R-NT2RP4001004//ESTs//3.6e-78:389:98//Hs.156290:AI016769

[25477] R-NT2RP4001006//ESTs, Moderately similar to ORF2: function unknown [H. sapiens]//6.6e-124:574:99//Hs.47393:AA218858

[25478] R-NT2RP4001010//EST//2.8e-31:194:90//Hs.161186:AI418635

[25479] R-NT2RP4001029//ESTs//4.4e-111:523:99//Hs.28423:AI336292

[25480] R-NT2RP4001041//ESTs, Highly similar to LEUCYL-TRNA SYNTHETASE, CYTOPLASMIC [Saccharomyces cerevisiae]//3.6e-114:569:96//Hs.6762:AA088424

[25481] R-NT2RP4001057//Homo sapiens KIAA0399 mRNA, partial cds//2.0e-51:282:94//Hs.100955:AB007859

[25482] R-NT2RP4001064//ESTs, Weakly similar to protein B [H. sapiens]//2.1e-103:485:99//Hs.10114:AI345945

[25483] R-NT2RP4001078

[25484] R-NT2RP4001079//Homo sapiens mRNA for putative Ca2+-transporting ATPase, partial//1.7e-119:569:98//Hs.106778:AJ010953

[25485] R-NT2RP4001080//ESTs//7.6e-110:65:100//Hs.131694:AA927668

[25486] R-nnnnnnnnnnnn//Homo sapiens mRNA for KIAA0592 protein, partial cds//5.9e-121:548:95//Hs.13273:AB011164

[25487] R-NT2RP4001095//ESTs//1.5e-113:563:96//Hs.118732:AI344055

[25488] R-NT2RP4001100//ESTs//2.0e-46:413:79//Hs.146314:R99617

[25489] R-NT2RP40011171//EST//7.4e-51:294:92//Hs.7260:T23737

[25490] R-NT2RP4001122//ESTs//5.4e-109:509:99//Hs.16390:AI052357

[25491] R-NT2RP4001126//EST//0.97:169:61//Hs.148107:AA693476

[25492] R-NT2RP4001138//ESTs//3.0e-110:543:97//Hs.57655:AI056890

[25493] R-NT2RP4001143//ESTs, Highly similar to HYPOTHETICAL 52.9 KD PROTEIN IN SAP155-YMR31 INTERGENIC REGION [Saccharomyces cerevisiae]//5.4e-113:573:96//Hs.5249:U55977

[25494] R-NT2RP4001148//ESTs//3.1e-103:490:98//Hs.121282:AI091453

[25495] R-NT2RP4001149//EST//1.7e-50:281:93//Hs.101727:H 16171

[25496] R-NT2RP4001150//ESTs//1.9e-90:422:100//Hs.125490:AI138884

[25497] R-NT2RP4001159

[25498] R-NT2RP4001174//ESTs//2.5e-110:526:98//Hs.116555:AA639278

[25499] R-nnnnnnnnnnnn//ESTs//1.1e-25:140:97//Hs.83756:AI002822

[25500] R-NT2RP4001207//ESTs//4.4e-70:432:89//Hs.13109:AA192514

[25501] R-NT2RP4001210//ESTs//1.4e-108:509:99//Hs.27021:AI359495

[25502] R-NT2RP4001213//ESTs, Highly similar to ZINC FINGER PROTEIN 8 [Homo sapiens]//4.4e-123:624:95//Hs.22744:AI379892

[25503] R-NT2RP4001219//ESTs//0.0043:142:65//Hs.6733:Al 160750

[25504] R-NT2RP4001228//ESTs//4.9e-101:482:98//Hs.62684:AA806103

[25505] R-NT2RP4001235//ESTs//3.7e-1105:571:93//Hs.37706:AA005120

[25506] R-NT2RP4001256//ESTs//1.1e-112:189:74//Hs.20621:W28255

[25507] R-NT2RP4001260//EST//6.9e-05:313:61//Hs.116438:AA648430

[25508] R-NT2RP4001274//EST//0.0020:246:63//Hs.149955:AI289933

[25509] R-nnnnnnnnnnnn//ESTs//2.9e-34:213:91//Hs.43100:AA186588

[25510] R-NT2RP4001313

[25511] R-NT2RP4001315//EST//6.1e-38:217:93//Hs.97832:AA400892

[25512] R-NT2RP4001339//ESTs//3.8e-91:430:99//Hs.34840:AI279612

[25513] R-NT2RP4001345//ESTs//5.3e-89:443:96//Hs.6770:AA972732

[25514] R-NT2RP4001351//ESTs//6.0e-78:394:97//Hs.102796:N70837

[25515] R-NT2RP4001353//ESTs//4.8e-06:90:82//Hs.7778:AA195616

[25516] R-NT2RP4001372

[25517] R-NT2RP4001373//ESTs, Weakly similar to HYPOTHETICAL 48.8 KD PROTEIN IN TRK2-MRS4 INTERGENIC REGION [Saccharomyces cerevisiae]//1.7e-108:546:96//Hs.32271:AA203680

[25518] R-NT2RP4001375//ESTs//2.4e-19:155:87//Hs.62119:AA043299

[25519] R-NT2RP4001379//EST//4.4e-29:288:72//Hs.157848:AI362501

[25520] R-NT2RP4001389//ESTs, Highly similar to HYPOTHETICAL 51.6 KD PROTEIN IN PAP1-MRPL13 INTERGENIC REGION [Saccharomyces cerevisiae]//3.8e-79:438:93//Hs.21938:W81045

[25521] R-NT2RP4001407//ESTs//8.3e-112:541:97//Hs.22587:AA743132

[25522] R-NT2RP4001414//ESTs//8.6e-18:117:90//Hs.90789:W27649

[25523] R-NT2RP4001433//ESTs, Moderately similar to PROHIBITIN [H. sapiens]//1.6e-102:498:97//Hs.62386:AA512948

[25524] R-NT2RP4001442//ESTs//8.8e-104:489:99//Hs.101619:AI339433

[25525] R-NT2RP4001447

[25526] R-NT2RP4001474

[25527] R-NT2RP4001483//ESTs//2.1e-100:528:92//Hs.17860:AA706655

[25528] R-NT2RP4001498//ESTs//1.1e-97:470:98//Hs.95744:AI392846

[25529] R-NT2RP4001502//ESTs//6.7e-73:382:96//Hs.11874:N93511

[25530] R-NT2RP4001507//ESTs//2.6e-57:302:96//Hs.65328:AA625385

[25531] R-NT2RP4001524//ESTs, Weakly similar to F13B12.1 [C. elegans]//2.9e-107:546:96//Hs.5570:AI377863

[25532] R-NT2RP4001529//ESTs//3.3e-112:524:99//Hs.28423:AI336292

[25533] R-NT2RP4001547//ESTs, Weakly similar to NADH-UBIQUINONE OXIDOREDUCTASE CHAIN 5 [Paramecium tetraurelia]//2.8e-120:566:98//Hs.108530:AA523928

[25534] R-nnnnnnnnnnnn//ESTs, Weakly similar to CELL DIVISION CONTROL PROTEIN 68 [S. cerevisiae]//1.4e-26:184:88//Hs.136189:AA133224

[25535] R-NT2RP4001555//ESTs//1.1e-95:445:100//Hs.134403:AA677552

[25536] R-NT2RP4001567//ESTs//2.8e-1106:506:98//Hs.102708:AA292285

[25537] R-NT2RP4001568//ESTs//6.4e-55:300:94//Hs.57442:N63437

[25538] R-NT2RP4001571//ESTs//1.3e-114:556:97//Hs.30340:AA521251

[25539] R-NT2RP4001574//ESTs//0.0035:120:67//Hs.96339:AA225906

[25540] R-NT2RP4001575

[25541] R-NT2RP4001592//ESTs, Weakly similar to ISOLEUCYL-TRNA SYNTHETASE, MITOCHONDRIAL [S. cerevisiae]//8.7e-112:557:97//Hs.7558:AA526812

[25542] R-NT2RP4001610//ESTs//6.2e-77:382:96//Hs.21543:AA166776

[25543] R-NT2RP4001614//ESTs//2.8e-117:565:98//Hs.9591:AA069657

[25544] R-NT2RP4001634//ESTs//2.0e-39:213:96//Hs.32360:AA534737

[25545] R-NT2RP4001638//Homo sapiens clone 23967 unknown mRNA, partial cds//1.7e-116:559:97//Hs.5332:AF007151

[25546] R-NT2RP4001644//ESTs, Moderately similar to MNK1 [H. sapiens]//5.3e-36:192:97//Hs.5662:AA868361

[25547] R-NT2RP4001656//ESTs, Highly similar to HYPOTHETICAL 108.5 KD PROTEIN R06F6.2 IN CHROMOSOME II [Caenorhabditis elegans]//1.1e-104:525:96//Hs.20472:W28734

[25548] R-NT2RP4001677//ESTs//1.8e-106:522:97//Hs.106390:AA156805

[25549] R-NT2RP4001696//Human chromosome 8 BAC clone C1T987SK-2A8 complete sequence//5.7e-118:583:96//Hs.15562:U96629

[25550] R-NT2RP4001725//ESTs//2.0e-11:141:74//Hs.117589:N25941

[25551] R-nnnnnnnnnnnn/ESTs, Weakly similar to UDP-GLUCOSE:GLYCOPROTEIN GLUCOSYLTRANSFERASE PRECURSOR [D. melanogaster]//3.4e-73:362:97//Hs.152332:AI141922

[25552] R-NT2RP4001739//ESTs//6.6e-59:340:91//Hs.122293:AA843692

[25553] R-NT2RP4001753//Zinc finger protein 3 (A8-51)//5.6e-113:552:96//Hs.248//X78926

[25554] R-NT2RP4001760//ESTs//2.5e-94:453:98//Hs.122579:AA766315

[25555] R-NT2RP4001790//ESTs, Weakly similar to ZINC FINGER PROTEIN 84 [H. sapiens]//2.0e-62:326:94//Hs.110839:W28098

[25556] R-NT2RP4001803

[25557] R-NT2RP4001822//ESTs//4.4e-98:526:92//Hs.96908:All 61133

[25558] R-NT2RP4001823//ESTs//1.7e-72:357:97//Hs.144900:AI218434

[25559] R-NT2RP4001828//ESTs//3.3e-101:536:92//Hs.18851:AA857826

[25560] R-NT2RP4001838//ESTs//4.2e-58:344:90//Hs.48723:N66663

[25561] R-NT2RP40018491//EST//0.24:105:71//Hs.136747:AA749210

[25562] R-NT2RP4001889//Human mRNA for KIAA0118 gene, partial cds//3.4e-34:212:88//Hs.154326:D42087

[25563] R-NT2RP4001893//ESTs//3.0e-58:321:95//Hs.158787:W79602

[25564] R-NT2RP4001896//EST//3.8e-115:108:92//Hs.160835:AI345528

[25565] R-NT2RP4001901//ESTs//1.2e-110:536:97//Hs.31443:AI018606

[25566] R-NT2RP4001927//ESTs//2.1e-105:546:93//Hs.73291:AI417099

[25567] R-NT2RP4001938//ESTs//2.8e-40:235:78//Hs.163641:R61848

[25568] R-NT2RP4001946//ESTs//1.3e-29:175:93//Hs.43703:AA088436

[25569] R-NT2RP4001950//ESTs//4.6e-95:458:98//Hs.150890:AI341793

[25570] R-NT2RP4001953//Clathrin, light polypeptide (Lcb)//2.3e-62:310:82//Hs.73919:X81637

[25571] R-NT2RP4001966//ESTs, Weakly similar to tenascin-like protein [D. melanogaster]//8.3e-87:457:94//Hs.41793:AA775879

[25572] R-NT2RP4001975//ESTs//1.9e-52:281:94//Hs.7704:W58252

[25573] R-NT2RP4002018

[25574] R-NT2RP4002047//ESTs, Highly similar to GTP-BINDING PROTEIN LEPA [Pseudomonas fluorescens]//4.7e-09:90:86//Hs.41127:AA555184

[25575] R-NT2RP4002052//ESTs//0.054:353:60//Hs.117510:AA903738

[25576] R-NT2RP4002058//EST//7.8e-26:151:94//Hs.124617:AA855106

[25577] R-NT2RP4002071//ESTs//6.9e-99:475:98//Hs.29216:AA916679

[25578] R-NT2RP4002075//ESTs//0.67:121:65//Hs.153939:AI284198

[25579] R-NT2RP4002078//ESTs, Highly similar to ZINC FINGER PROTEIN 35 [Homo sapiens]//1.6e-61:464:82//Hs.144228:N99507

[25580] R-nnnnnnnnnnnn/ESTs, Weakly similar to HYPOTHETICAL 139.1 KD PROTEIN C08B11.3 IN CHROMOSOME II [C. elegans]//2.3e-56:271:100//Hs.6185:AA428565

[25581] R-NT2RP4002083//ESTs//2.0e-108:548:96//Hs.6120:W80407

[25582] R-NT2RP4002408//ESTs//2.6e-77:391:96//Hs.14014:AA745592

[25583] R-NT2RP4002791//ESTs//7.9e-101:527:93//Hs.22394:N32555

[25584] R-NT2RP4002888//ESTs, Highly similar to ENV POLYPROTEIN [Avian spleen necrosis virus]//1.9e-65:373:92//Hs.31532:H118272

[25585] R-NT2RP4002905//ESTs//1.5e-107:517:98//Hs.40460:N36090

[25586] R-OVARC1000001//Homo sapiens mRNA for KIAA0465 protein, partial cds//2.8e-115:605:94//Hs.108258:AB007934

[25587] R-OVARC1000004

[25588] R-OVARC1000006//ESTs//1.5e-19:139:89//Hs.143034:AI126929

[25589] R-OVARC1000013//ESTs//5.9e-98:531:93//Hs.16470:AA121635

[25590] R-OVARC10000014//ESTs//0.24:243:60//Hs.19569:AA464273

[25591] R-OVARC1000017

[25592] R-OVARC1000035//ESTs//0.035:252:63//Hs.134123:AI078286

[25593] R-OVARC1000058//H. sapiens mRNA for translin associated protein X//3.8e-46:331:83//Hs.96247:X95073

[25594] R-OVARC1000060//EST//2.8e-28:348:71//Hs.141728:W73041

[25595] R-OVARC1000068//ESTs//3.0e-83:491:90//Hs.29397:N51367

[25596] R-OVARC1000071//ESTs//2.5e-60:321:96//Hs.25010:R67871

[25597] R-OVARC1000085//Proteasome component C5//8.6e-67:366:92//Hs.75748:AL031259

[25598] R-nnnnnnnnnnnn//ESTs//1.0e-111:526:98//Hs.129020:AI380703

[25599] R-OVARC1000091//ESTs, Weakly similar to HOST CELL FACTOR C1 [H. sapiens]//3.9e-112:596:94//Hs.20597:W58370

[25600] R-OVARC1000092//ESTs//5.1e-18:144:82//Hs.109140:AI289942

[25601] R-OVARC1000106

[25602] R-OVARC1000113//Homo sapiens okadaic acid-inducible phosphoprotein (OA48-18) mRNA, complete cds//8.3e-102:495:97//Hs.3688:AF069250

[25603] R-OVARC1000114//H. sapiens mRNA for phosphoinositide 3-kinase//1.7e-45:489:74//Hs.101238:Y11312

[25604] R-OVARC1000133//EST//0.00028:284:61//Hs.30547:H05482

[25605] R-OVARC100014511EST//3.9e-40:201:99//Hs.156148:AI333214

[25606] R-OVARC1000148//EST//0.79:150:62//Hs.100078:T05090

[25607] R-OVARC1000151

[25608] R-OVARC1000168//EST//1.7e-19:142:90//Hs.38441:H66023

[25609] R-OVARC1000191//EST//0.0072:292:63//Hs.132492:AA922629

[25610] R-OVARC1000198//Homo sapiens LIM protein mRNA, complete cds//6.1e-44:339:81//Hs.154103:AF061258

[25611] R-OVARC1000209//ESTs, Moderately similar to ZINC FINGER PROTEIN 93 [H. sapiens]//1.1e-32:196:92//Hs.64322:AA142864

[25612] R-OVARC1000212//EST//0.20:178:61//Hs.133031:AI049874

[25613] R-OVARC1000240//ESTs//9.0e-64:314:98//Hs.42300:AA204958

[25614] R-OVARC1000241//EST//0.00018:115:68//Hs.150728:A1123130

[25615] R-OVARC1000288//ESTs, Highly similar to HYPOTHETICAL 54.2 KD PROTEIN IN CDC12-ORC6 INTERGENIC REGION [Saccharomyces cerevisiae]//3.3e-74:403:93//Hs.108117:AI097079

[25616] R-OVARC1000302//EST//4.0e-14:102:90//Hs.136617:AA630476

[25617] R-OVARC1000304//ESTs, Highly similar to PUTATIVE GTP-BINDING PROTEIN MOV10 [Mus musculus]//2.9e-37:191:98//Hs.20725:AI027777

[25618] R-OVARC1000309//ESTs//3 .6e-66:348:94//Hs.9547:AA532449

[25619] R-OVARC1000321//ESTs//3 .6e-87:454:95//Hs.110445:AA044743

[25620] R-OVARC1000326//ESTs, Moderately similar to lamina associated polypeptide IC 10 [R. norvegicus]//1.3e-98:488:96//Hs.125749:AI377682

[25621] R-OVARC1000335//ESTs//3.0e-115:565:97//Hs.54835:AI050863

[25622] R-OVARC1000347//EST//0.0018:145:65//Hs.136945:AA765672

[25623] R-OVARC1000384//ESTs//2.8e-38:253:89//Hs.15093:AA203423

[25624] R-OVARC1000408//ESTs//2.6e-98:515:94//Hs.119808:C05928

[25625] R-OVARC100041//ESTs//3.2e-82:395:98//Hs.104747:AA406219

[25626] R-OVARC1000414//Landsteiner-Wiener blood group glycoprotein//1.5e-27:211:79//Hs.108287:L27670

[25627] R-OVARC1000420//EST//2.8e-38:255:74//Hs.138525:R99237

[25628] R-OVARC1000427//EST//2.6e-58:302:96//Hs.122914:AA767034

[25629] R-OVARC00043//ESTs//4.9e-108:551:96//Hs.11668:All 23426

[25630] R-OVARC1000437

[25631] R-OVARC1000440//ESTs//2.9e-91:456:96//Hs.93701:AI018671

[25632] R-OVARC1000442//Human high-affinity copper uptake protein (hCTR1) mRNA, complete cds//4.3e-45:320:84//Hs.73614:U83460

[25633] R-OVARC1000443//Homo sapiens mRNA for KIAA0683 protein, complete cds//3.6e-79:418:94//Hs.12334:AB014583

[25634] R-OVARC1000461//ESTs//3.1e-62:342:93//Hs.23241:R46582

[25635] R-OVARC1000465//ESTs//1.7e-67:349:951//Hs.127238:AA477576

[25636] R-OVARC1000466//ESTs//1.9e-66:337:95//Hs.5212:AI421211

[25637] R-OVARC1000473//ESTs//5.4e-89:320:99//Hs.29173:AA134926

[25638] R-OVARC1000479//ESTs, Highly similar to TIP 120 [R. norvegicus]//1.1e-102:514:96//Hs.11833:AI299947

[25639] R-OVARC1000486//ESTs//3 .9e-78:405:95//Hs.98312:AA424983

[25640] R-OVARC1000496

[25641] R-OVARC1000520//ESTs//1.2e-20:145:88//Hs.87456:AA434484

[25642] R-OVARC1000526//Small inducible cytokine A5 (RANTES)//8.9e-47:217:87//Hs.155464:AF088219

[25643] R-OVARC1000533//ESTs, Moderately similar to integrase [H. sapiens]//8.5e-48:264:92//Hs.49860:AA702248

[25644] R-OVARC1000543//ESTs//5.7e-74:410:94//Hs.62817:AA047021

[25645] R-OVARC1000556//H. sapiens mRNA for ribosomal S6 kinase//9.5e-27:202:85//Hs.90859:X85106

[25646] R-OVARC1000557//EST//2.8e- 18:169:79//Hs.149101:AI244285

[25647] R-OVARC1000564//EST//2.3e-34:199:92//Hs.146637:AI141587 45 R-OVARC1000573//Interleukin 10//4.7e-42:300:83//Hs.2180:M57627

[25648] R-OVARC1000578//Small inducible cytokine A5 (RANTES)//5.2e-58:392:84//Hs.155464:AF088219

[25649] R-OVARC1000588//EST//1.8e-41:174:85//Hs.163333:AA879053

[25650] R-OVARC1000605

[25651] R-OVARC1000622//Homo sapiens mRNA, chromosome I specific transcript KIAA0501//6.4e-47:417:77//Hs.159897:AB007970

[25652] R-OVARC1000640//H. sapiens mRNA for translin associated protein X//1.9e-28:366:72//Hs.96247:X95073

[25653] R-OVARC1000661//Homo sapiens mRNA for KIAA0590 protein, complete cds//5.1e-31:162:100//Hs.11862:AB011162

[25654] R-OVARC1000678//EST//0.92:199:60//Hs.122025:AA778480

[25655] R-nnnnnnnnnnnn//ESTs//0.94:416:59//Hs.130754:AA279522

[25656] R-OVARC1000681//EST//9.2e-21:179:80//Hs.132635:AI032875

[25657] R-OVARC1000689//Homo sapiens ataxin-7 (SCA7) mRNA, complete cds//0.053:160:64//Hs.108447:AJ000517

[25658] R-OVARC1000700//Homo sapiens KIAA0441 mRNA, complete cds//7.1e-09:141:73//Hs.32511:AB007901

[25659] R-OVARC1000703//ESTs//1.7e-46:298:87//Hs.138856:H47461

[25660] R-OVARC1000730//ESTs, Weakly similar to C27F2.7 gene product [C. elegans]//1.7e-17:137:86//Hs.7049:AI141736

[25661] R-OVARC1000746//ESTs//0.16:366:60//Hs.136969:AA830918

[25662] R-OVARC1000769//ESTs, Weakly similar to eukaryotic initiation factor eIF-2 alpha kinase [D. melanogaster]//4.6e-28:430:69//Hs.42457:AA523306

[25663] R-OVARC1000771//ESTs//1.3e-87:461:94//Hs.22399:AA531016

[25664] R-OVARC1000781//ESTs//8.3e-119:572:97//Hs.41972:AA626793

[25665] R-OVARC1000787//ESTs//7.4e-18:115:93//Hs.164036:AA845659

[25666] R-OVARC1000800//MITOCHONDRIAL STRESS-70 PROTEIN PRECURSOR//4.9e-19:119:95//Hs.3069:L11066

[25667] R-OVARC1000802//ESTs//2.2e-41:383:78//Hs.161228:AI419764

[25668] R-OVARC1000834//Homo sapiens mRNA for atopy related autoantigen CALC//0.2e-106:536:95//Hs.61628:Y17711

[25669] R-OVARC1000846//Clathrin, light polypeptide (Lcb)//1.6e-66:282:87//Hs.73919:X81637

[25670] R-OVARC1000850//Homo sapiens PB39 mRNA, complete cds//1.2e-115:579:96//Hs.18910:AF045584

[25671] R-OVARC1000862//EST//4.3e-14:129:81//Hs.150663:AA923096

[25672] R-OVARC1000876//ESTs//1.0e-115:573:96//Hs.87287:AI150674

[25673] R-OVARC1000883//ESTs//3.5e-109:523:98//Hs.28423:AI336292

[25674] R-OVARC1000885//ESTs, Highly similar to HYPOTHETICAL OXIDOREDUCTASE IN ROCC-PTA INTERGENIC REGION [Bacillus subtilis]//7.9e-98:525:93//Hs.10366:W21953

[25675] R-OVARC1000886//ESTs//8.2e-79:417:94//Hs.7729:AA830777

[25676] R-OVARC1000891//ESTs//6.8e-75:401:94//Hs.5833:H15401

[25677] R-OVARC1000897//ESTs//3.5e-91:440:98//Hs.125264:AA873350

[25678] R-OVARC1000912

[25679] R-OVARC1000915//ESTs//1.0e-45:328:82//Hs.163980:AA715814

[25680] R-OVARC1000924//ESTs//1.0e-100:501:96//Hs.30204:AA497127

[25681] R-OVARC1000936//EST//3.0e-74:367:98//Hs.145098:AA421696

[25682] R-OVARC1000937//EST//1.1e-53:290:95//Hs.162846:AA631215

[25683] R-OVARC1000945//ESTs//4.9e-51:301:89//Hs.20100:W25794

[25684] R-OVARC1000948//ESTs//3.7e-67:332:98//Hs.112570:AA621971

[25685] R-OVARC1000959//Small inducible cytokine A5 (RANTES)//7.2e-44:283:86//Hs.155464:AF088219

[25686] R-OVARC1000960//Homo sapiens KIAA0395 mRNA, partial cds//1.1e-41:348:80//Hs.43681:AL022394

[25687] R-OVARC1000971//EST//6.2e-05:126:70//Hs.160491:AI254909

[25688] R-OVARC1000984//ESTs, Weakly similar to No definition line found [C. elegans]//3.5e-68:346:96//Hs.25544:AA532784

[25689] R-OVARC1000996//EST//0.12:92:71//Hs.117141:AA678811

[25690] R-OVARC1000999//Homo sapiens KIAA0414 mRNA, partial cds//1.5e-44:513:73//Hs.127649:AB007874

[25691] R-OVARC1001000//ESTs//1.8e-22:198:80//Hs.140608:N53448

[25692] R-OVARC1001004//Human kpni repeat mrna (cdna clone pcd-kpni-4), 3′ end//1.7e-28:181:77//Hs.139107:K00629

[25693] R-OVARC11001010//EST//2.1e-09:92:85//Hs.147893:AI223270

[25694] R-OVARC1001011//EST//2.4e-14:200:75//Hs.149290:AI248117

[25695] R-OVARC1001032//EST//2.7e-29:304:73//Hs.141733:W80630

[25696] R-OVARC1100034//Homo sapiens apoptotic protease activating factor 1 (Apaf-1) mRNA, complete cds//2.1e-09:137:74//Hs.77579:AF013263

[25697] R-OVARC1001038//Homo sapiens TRIAD1 type I mRNA, complete cds//4.1e-101:501:96//Hs.9899:AF099149

[25698] R-OVARC1001040//ESTs//2.9e-87:415:99//Hs.132812:AI032046

[25699] R-OVARC1001044//ESTs//1 .1e-83:432:96//Hs.55043:N94384

[25700] R-OVARC1001051/H60S RIBOSOMAL PROTEIN L41//1 .2e-16:124:88//Hs.108124:Z 12962

[25701] R-OVARC1001055//ESTs//2.4e-23:238:76//Hs.141421:H99231

[25702] R-OVARC1001062//ESTs//3.4e-92:469:96//Hs.34658:N98652

[25703] R-OVARC1001068//Homo sapiens Era GTPase A protein (HERA-A) mRNA, partial cds//7.3e-97:463:98//Hs.3426:AF082657

[25704] R-OVARC1001072//ESTs//1.3e-34:227:89//Hs.126704:W95844

[25705] R-OVARC1001074

[25706] R-OVARC1001085//Human T-cell leukemia virus enhancer factor//1.0:94:69//Hs.103126:U57029

[25707] R-OVARC1001092//Homo sapiens mRNA for JM5 protein, complete CDS (clone IMAGE 53337, LLNLc110F1857Q7 (RZPD Berlin) and LLNLc110G0913Q7 (RZPD Berlin))//1.4e-96:325:98//Hs.21753:AJ005897

[25708] R-OVARC1001113//Homo sapiens diaphanous 1 (HDIA1) mRNA, complete cds//3.3e-75:386:95//Hs.26584:AF051782

[25709] R-OVARC11001117//Human G protein-coupled receptor (STRL22) mRNA, complete cds//3.9e-37:283:84//Hs.46468:U45984

[25710] R-OVARC1001118//ESTs//5.3e-99:485:97//Hs.130815:AA936548

[25711] R-OVARC1001129//ESTs//9.8e-66:351:95//Hs.18616:T99312

[25712] R-OVARC1001161//ESTs, Moderately similar to !!!! ALU SUBFAMILY SX WARNING ENTRY!!!! [H. sapiens]//2.2e-66:346:95//Hs.53263:AA173226

[25713] R-OVARC100116211EST//1.5e-44:376:80//Hs.161917:AA483223

[25714] R-OVARC1001167//ESTs//4.7e-110:548:96//Hs.35254:AI133727

[25715] R-OVARC1001169//ESTs//0.22:152:68//Hs.149424:AI274200

[25716] R-OVARC1001170//Small inducible cytokine A5 (RANTES)//1.8e-42:305:84//Hs.155464:AF088219

[25717] R-OVARC1001173//EST//2.5e-35:182:84//Hs.161917:AA483223

[25718] R-OVARC1001180//Human macrophage-derived chemokine precursor (MDC) mRNA, complete cds//6.6e-64:247:80//Hs.97203:U83171

[25719] R-OVARC1001188//ESTs//4.1e-18:296:69//Hs.139197:AA228343

[25720] R-OVARC1001200//ESTs//2.0e-28:207:85//Hs.35121:AA877826

[25721] R-OVARC1001232//ESTs//3.2e-61:358:91//Hs.6449:W95025

[25722] R-OVARC1001240//ESTs//6.7e-45:316:85//Hs.121675:AA629668

[25723] R-OVARC1001243//ESTs//2.3e-86:409:9911Hs.163091:AA742361

[25724] R-OVARC1001261//ESTs//0.63:125:64//Hs.155743:AI344166

[25725] R-OVARC1001268//ESTs//8.1e-20:113:98//Hs.109477:AA477929

[25726] R-OVARC1001270//ESTs//1.5e-107:530:97//Hs.62905:AA460708

[25727] R-OVARC1001271//ESTs//4.5e-36:401:72//Hs.20190:AA525532

[25728] R-OVARC1001282//EST//4.0e-91:428:99//Hs.145599:AI263113

[25729] R-OVARC1001296//ESTs//2.6e-63:301:100//Hs.125753:AA740885

[25730] R-nnnnnnnnnnnn//Homo sapiens mRNA for KIAA0518 protein, partial cds//3.8e-70:334:100//Hs.23763:AB011090

[25731] R-OVARC1001329//Clathrin, light polypeptide (Lcb)//1.3e-68:304:83//Hs.73919:X81637

[25732] R-OVARC11001330//Proline arginine-rich end leucine-rich repeat protein//1.0:147:63//Hs.76494:U41344

[25733] R-OVARC1001339//Small inducible cytokine A5 (RANTES)//5.0e-48:452:76//Hs.155464:AF088219

[25734] R-OVARC1001341//ESTs, Moderately similar to !!!! ALU SUBFAMILY SQ WARNING ENTRY !!!! [H. sapiens]//6.9e-85:464:93//Hs.23651:AA650356

[25735] R-OVARC1001342//40S RIBOSOMAL PROTEIN S8//4.9e-110:568:95//Hs.118690:X67247

[25736] R-OVARC1001344//EST//3.6e-44:341:81//Hs.162197:AA535216

[25737] R-OVARC1001357//TUMOR-ASSOCIATED ANTIGEN L6//9.8e-44:250:93//Hs.3337:M90657

[25738] R-OVARC1001360//ESTs//5 .2e-110:534:98//Hs.24743:AA843844

[25739] R-OVARC10013691//ESTs//1 .7e-98:478:97//Hs.7729:AA830777

[25740] R-OVARC1001372//ESTs//2.6e-97:456:99//Hs.153648:AI341415

[25741] R-OVARC1001376//Homo sapiens mRNA for KIAA0575 protein, complete cds//1.1e-53:344:72//Hs.153468:AB011147

[25742] R-OVARC1001381//ESTs//5.1e-19:200:66//Hs.114031:AA700958

[25743] R-OVARC1001391

[25744] R-nnnnnnnnnnnn//ESTs//0.0039:48:95//Hs.117964:N20913

[25745] R-OVARC1001417//Homo sapiens EXLM1 mRNA, complete cds//3.2e-111:561:95//Hs.21586:AB006651

[25746] R-OVARC1001419

[25747] R-OVARC1001425//EST//5.7e-20:395:66//Hs.159707:AI393136

[25748] R-OVARC1001436//ESTs//9.6e-90:427:99//Hs.6982:AA622427

[25749] R-OVARC1001442//ESTs//1.1e-66:317:100//Hs.18437:AI206345

[25750] R-OVARC1001453//ESTs//2.0e-20:163:84//Hs.133503:AA628592

[25751] R-OVARC1001476//EST//0.23:125:66//Hs.71444:AA131700

[25752] R-OVARC1001480//ESTs//3.1e-56:181:97//Hs.40109:AA928694

[25753] R-OVARC10014891//ESTs//1.0:297:58//Hs.86723:AA393089

[25754] R-OVARC1001496//Homo sapiens C-terminal binding protein 2 mRNA, complete cds//3.0e-117:585:96//Hs.6534:AF016507

[25755] R-OVARC1001506//Small inducible cytokine A5 (RANTES)//1.8e-48:283:90//Hs.155464:AF088219

[25756] R-OVARC1001525//EST//0.80:170:60//Hs.157398:AI364539

[25757] R-OVARC1001542//Homo sapiens hJTB mRNA, complete cds//1.6e-111:566:95//Hs.6396:AB016492

[25758] R-OVARC1001547//ESTs//5.7e-105:564:93//Hs.68835:AA088388

[25759] R-OVARC1001577//Homo sapiens SRp46 splicing factor retropseudogene mRNA//4.4e-20:150:89//Hs.155160:AF031166

[25760] R-OVARC1001600//Human mRNA for KIAA0118 gene, partial cds//8.6e-21:282:72//Hs.154326:D42087

[25761] R-OVARC1001610//ESTs//4.6e-108:555:95//Hs.44295:N32019

[25762] R-OVARC1001611//ESTs//0.0021:117:71//Hs.135568:AA972965

[25763] R-OVARC1001615//Homo sapiens KIAA0409 mRNA, partial cds//9.2e-19:114:78//Hs.5158:AB007869

[25764] R-OVARC1001668//ESTs//1.0:127:69//Hs.153290:AI022659

[25765] R-OVARC1001702//ESTs//4.8e-44:225:97//Hs.96855:AA346854

[25766] R-OVARC1001703//ESTs//2.3e-89:426:99//Hs.27099:W60080

[25767] R-OVARC1001711//ESTs//1.9e-57:251:99//Hs.9732:AA527784

[25768] R-OVARC1001726//ESTs, Highly similar to APICAL PROTEIN [Xenopus laevis]//1.2e-27:236:81//Hs.15485:AA046954

[25769] R-OVARC1001731//Tropomyosin 4 (fibroblast)//7.9e-74:422:90//Hs.102824:X05276

[25770] R-OVARC1001745//Human mRNA for tryptophan hydroxylase (EC 1.14.16.4)//1.7e-62:300:83//Hs.144563:AF057280

[25771] R-nnnnnnnnnnnn//ESTs, Weakly similar to N-TERMINAL ACETYLTRANSFERASE 1 [S. cerevisiae]//6.8e-1100:540:92//Hs.117741:AA903456

[25772] R-OVARC1001766//Homo sapiens eukaryotic translation initiation factor eIF3, p35 subunit mRNA, complete cds1//1.1e-109:567:94//Hs.155377:U97670

[25773] R-nnnnnnnnnnnn//Homo sapiens mRNA for KIAA0675 protein, complete cds//2.0e-109:529:97//Hs.15869:AB014575

[25774] R-OVARC1001768//ESTs//3.5e-59:327:94//Hs.107923:H66127

[25775] R-OVARC1001791//ESTs//1.3e-11:565:96//Hs.6107:AA160604

[25776] R-OVARC1001795//ESTs//2.8e-97:526:93//Hs.72158:AA156978

[25777] R-OVARC1001802//Homo sapiens DEC-205 mRNA, complete cds//4.8e-36:276:81//Hs.153563:AF011333

[25778] R-OVARC1001805//ESTs//4.1e-78:375:98//Hs.126902:AI374688

[25779] R-OVARC1001812//EST//4.8e-45:349:80//Hs.162677:AA604831

[25780] R-OVARC1001813//Homo sapiens mRNA for KIAA0538 protein, partial cds//2.1e-15:519:63//Hs.25639:AB011110

[25781] R-OVARC1001820//ESTs//9.5e-50:314:80//Hs.140491:W52705

[25782] R-OVARC1001828//ESTs//0.11:186:63//Hs.29055:AI374621

[25783] R-OVARC1001846//ESTs//0.34:134:66//Hs.152992:AI242160

[25784] R-OVARC11001861//ESTs//2.3e-19:120:92//Hs.42225:N31809

[25785] R-OVARC1001873//Homo sapiens clones 24718 and 24825 mRNA sequence//1.9e-105:571:91//Hs.25300:AF070611

[25786] R-OVARC1001879//EST//1.3e-24:185:85//Hs.136617:AA630476

[25787] R-OVARC1001880//Homo sapiens mRNA for KIAA0575 protein, complete cds//2.2e-49:302:90//Hs.153468:AB01147

[25788] R-OVARC1001883//ESTs//1.0e-51:295:93//Hs.164059:AA447310

[25789] R-OVARC1001900//Homo sapiens tumorous imaginal discs protein Tid56 homolog (TID1) mRNA, complete cds//1.6e-87:346:90//Hs.6216:AF061749

[25790] R-OVARC1001901//ESTs//6.8e-24:132:98//Hs.130797:AA904435

[25791] R-OVARC100191//ESTs//1.1e-88:491:92//Hs.32343:W73855

[25792] R-OVARC1001916//ESTs//7.9e-97:491:95//Hs.24989:H97842

[25793] R-OVARC1001928

[25794] R-OVARC1001942//ESTs, Weakly similar to N-TERMINAL ACETYLTRANSFERASE I [S. cerevisiae]//2.5e-39:253:88//Hs.117741:AA903456

[25795] R-OVARC1001943//ESTs//9.3e-13:78:100//Hs.143680:W38637

[25796] R-OVARC1001949//ESTs, Highly similar to ZINC FINGER PROTEIN 8 [Homo sapiens]//8.3e-96:498:94//Hs.22744:AI379892

[25797] R-OVARC1001950//EST//1.3e-35:236:81//Hs.132635:AI032875

[25798] R-OVARC1100987//ESTs//5.6e-94:514:92//Hs.21148:AI1183729

[25799] R-OVARC1001989//ESTs//9.7e-46:228:99//Hs.127046:AA935887

[25800] R-OVARC1002044//ESTs//3.4e-45:303:85//Hs.132722:AA618531

[25801] R-OVARC1002050//Homo sapiens mRNA for KIAA0465 protein, partial cds//4.4e-109:542:96//Hs.108258:AB007934

[25802] R-OVARC1002066//ESTs//8.5e-97:455:99//Hs.135477:AI088556

[25803] R-OVARC1002082//Homo sapiens mRNA for KIAA0772 protein, complete cds//8.1e-47:340:82//Hs.15519:AB018315

[25804] R-OVARC1002107//ESTs//5.9e-103:498:98//Hs.157207:AA629860

[25805] R-OVARC1002127//ESTs//3.0e-87:419:98//Hs.127833:AI347130

[25806] R-OVARC1002138//ESTs, Weakly similar to HYPOTHETICAL 54.7 KD PROTEIN C07A9.1 IN CHROMOSOME III [Caenorhabditis elegans]//1.7e-102:485:98//Hs.137516:AA805691

[25807] R-OVARC1002143//ESTs//1.3e-79:428:92//Hs.158126:W26825

[25808] R-OVARC1002156//ESTs//1.6e-38:198:98//Hs.22957:AA478923

[25809] R-OVARC11002158//ESTs//7.3e-81:412:96//Hs.12211:AA908631

[25810] R-OVARC1002165//ESTs//1.8e-09:154:72//Hs.49354:AA424160

[25811] R-OVARC1002182//EST//4.3e-80:465:91//Hs.77067:AA040478

[25812] R-PLACE1000004//ESTs, Weakly similar to TEICHOIC ACID BIOSYNTHESIS PROTEIN A [Bacillus subtilis]//7.5e-32:164:99//Hs.144194:AA706337

[25813] R-PLACE1000005//EST//0.37:212:60//Hs.127020:AA934920

[25814] R-PLACE1000007//Homo sapiens clone 24422 mRNA sequence//3.8e-16:100:97//Hs.109268:AF070557

[25815] R-PLACE1000014//EST//9.6e-44:344:77//Hs.161917:AA483223

[25816] R-PLACE1000031//ESTs//2.2e-32:374:70//Hs.117969:H94870

[25817] R-PLACE1000040//ESTs//0.00017:316:59//Hs.23342:AI310440

[25818] R-PLACE1000048//Human Line-1 repeat mRNA with 2 open reading frames//4.8e-79:519:86//Hs.23094:M19503

[25819] R-PLACE1000050//ESTs//9.7e-90:453:96//Hs.27410:N25612

[25820] R-PLACE1000061//Ribosomal protein L37a//5.5e-22:126:97//Hs.1946:L06499

[25821] R-PLACE1000066//ESTs, Weakly similar to coded for by C. elegans cDNA yk10c10.3 [C. elegans]//1.4e-61:331:94//Hs.30026:AI356771

[25822] R-PLACE1000078//ESTs//2.6e-30:212:85//Hs.89312:AA167659

[25823] R-PLACE1000081

[25824] R-PLACE1000094

[25825] R-PLACE1000133//ESTs//4.4e-87:448:94//Hs.93748:AA884505

[25826] R-PLACE1000142//ESTs, Weakly similar to enoyl-CoA hydratase [H. sapiens]//5.5e-103:538:94//Hs.9670:AA632135

[25827] R-PLACE1000184//Homo sapiens estrogen-related receptor gamma mRNA, complete cds//4.1e-114:594:94//Hs.151017:AF058291

[25828] R-PLACE1000185//ESTs, Weakly similar to No definition line found [C. elegans]//2.0e-19:114:95//Hs.7036:W22072

[25829] R-PLACE1000213//ESTs//9.4e-99:494:96//Hs.24398:AI262946

[25830] R-PLACE1000214//ESTs//5.3e-98:466:98//Hs.28661:AA805916

[25831] R-PLACE1000236//Human BENE mRNA, partial cds//1.7e-19:162:84//Hs.85889:U 17077

[25832] R-PLACE1000246//EST//0.026:134:66//Hs.135611:Z21545

[25833] R-PLACE1000292//ESTs//2.5e-80:418:96//Hs.138233:N57912

[25834] R-PLACE1000332//EST//1.7e-82:422:96//Hs.118637:T61940

[25835] R-PLACE1000347//ESTs//8.5e-36:180:100//Hs.6377:AA632424

[25836] R-PLACE1000374//ESTs//2.8e-90:434:98//Hs.161785:AI423126

[25837] R-PLACE1000380//ESTs//1.0e-81:399:971//Hs.47105:AI334994

[25838] R-PLACE1000383//ESTs//3 .7e-75:405:94//Hs.23200:AA203708

[25839] R-PLACE1000401//ESTs//1.4e-16:212:7211Hs.151665:AA020959

[25840] R-PLACE1000406//ESTs//2.1e-51:259:97//Hs.129651:N53089

[25841] R-PLACE1000420//ESTs//7.7e-92:471:95//Hs.144407:AA737799

[25842] R-PLACE1000421//ESTs//2.9e-14:282:67//Hs.142068:AA176125

[25843] R-PLACE1000424//EST//2.9e-35:453:70//Hs.162404:AA573131

[25844] R-PLACE1000435//Homo sapiens protein phosphatase with EF-hands-2 long form (PPEF-2) mRNA, complete cds//0.6e-47:472:77//Hs.113259:AF023456

[25845] R-PLACE1000444//ESTs, Moderately similar to platelet glycoprotein IIb precursor [H. sapiens]//2.0e-58:410:81//Hs.97579:AA398118

[25846] R-PLACE1000453//ESTs//2.3e-85:442:95//Hs.9725:AA039793

[25847] R-PLACE1000481//ESTs, Weakly similar to Ndr protein kinase [H. sapiens]//3.2e-109:549:95//Hs.19074:U69566

[25848] R-PLACE1000492//ESTs, Highly similar to vacuolar protein sorting homolog r-vps33b [R. norvegicus]//3.5e-83:435:94//Hs.265110:AA700425

[25849] R-PLACE1000540//ESTs//3.2e-58:281:99//Hs.118270:AA844729

[25850] R-PLACE1000547//Homo sapiens mRNA for KIAA0640 protein, partial cds//2.2e-32:208:88//Hs.153026:AB014540

[25851] R-PLACE1000562//ESTs, Weakly similar to HYPOTHETICAL 23.0 KD PROTEIN IN IXR1-TFA1 INTERGENIC REGION [Saccharomyces cerevisiae]//1.9e-26:220:81//Hs.163791:W25348

[25852] R-PLACE1000564//ESTs//1.1e-54:302:92//Hs.158520:AI380485

[25853] R-PLACE1000583//Human mRNA for KIAA0355 gene, complete cds//5.5e-43:404:75//Hs.153014:AB002353

[25854] R-nnnnnnnnnnnn/Guanylate binding protein 1, interferon-inducible, 67 kD//6.1e-79:542:82//Hs.62661:M55542

[25855] R-PLACE1000596//ESTs//0.0028:364:59//Hs.106090:AA457030

[25856] R-PLACE1000599//Human mRNA for KIAA0118 gene, partial cds//4.3e-49:295:90//Hs.154326:D42087

[25857] R-PLACE1000610//ESTs//0.0010:104:74//Hs.17413:N45301

[25858] R-PLACE1000636//ESTs//1.8e-64:340:95//Hs.100895:AA479308

[25859] R-PLACE1000653//Homo sapiens N-acetylglucosamine-phosphate mutase mRNA, complete cds//5.3e-101:506:96//Hs.5819:AF102265

[25860] R-PLACE1000656//Homo sapiens mRNA for JM4 protein, complete CDS (clone IMAGE 546750 and LLNLc110F1857Q7 (RZPD Berlin))//1.4e-102:559:92//Hs.29595:AJ005896

[25861] R-PLACE1000706//Homo sapiens transcription intermediary factor 1 (TIF1) mRNA, complete cds//2.8e-10:281:64//Hs.128763:AF009353

[25862] R-PLACE1000712//ESTs//7.8e-60:317:95//Hs.8245:AA115485

[25863] R-PLACE1000716

[25864] R-PLACE1000748//ESTs//8.9e-87:466:93//Hs.25245:AA176701

[25865] R-PLACE1000749//EST//0.019:186:61//Hs.135443:AI077396

[25866] R-PLACE1000755//ESTs, Weakly similar to HYPOTHETICAL HELICASE K12H4.8 IN CHROMOSOME III [C. elegans]//3.9e-40:224:94//Hs.87889:AA262008

[25867] R-PLACE1000769//Homo sapiens clone 24566 mRNA sequence//6.5e-27:531:66//Hs.133342:AF070536

[25868] R-PLACE1000785//Homo sapiens mRNA for KIAA0648 protein, partial cds//8.5e-103:513:96//Hs.31921:AB014548

[25869] R-PLACE1000786//ESTs//5.2e-93:449:97//Hs.58389:W74482

[25870] R-nnnnnnnnnnnn//H. sapiens mRNA for chemokine HCC-1//0.88:201:60//Hs.20144:AF088219

[25871] R-PLACE1000798//ESTs//1.1e-97:508:94//Hs.139119:N32189

[25872] R-PLACE1000841//ESTs, Highly similar to guanine nucleotide regulatory protein [H. sapiens]//7.7e-31:220:86//Hs.117576:R33135

[25873] R-nnnnnnnnnnnn//ESTs//1.8e-87:459:94//Hs.43100:AA186588

[25874] R-PLACE1000856//ESTs//0.0084:224:59//Hs.145906:AI275039

[25875] R-PLACE1000863//ESTs, Highly similar to PUTATIVE 40S RIBOSOMAL PROTEIN YHR148W [Saccharomyces cerevisiae]//2.2e-92:467:95//Hs.6118:AI141558

[25876] R-PLACE1000909//ESTs//4.7e-89:435:97//Hs.95744:AI392846

[25877] R-PLACE1000931//EST//1.9e-28:261:73//Hs.135545:AI097091

[25878] R-PLACE1000948//ESTs//0.034:329:58//Hs.114851:AA608697

[25879] R-PLACE1000972//EST//3.3e-24:264:74//Hs.130321:AI002941

[25880] R-PLACE1000977//EST//0.085:153:65//Hs.131646:AI025689

[25881] R-PLACE1000979

[25882] R-PLACE1001000//ESTs//4.7e-56:284:96//Hs.117978:AA810725

[25883] R-PLACE1001007//ESTs, Moderately similar to MNK1 [H. sapiens]//5.2e-63:343:93//Hs.5662:AA868361

[25884] R-PLACE1001010//EST//0.96:53:71//Hs.96973:AA351146

[25885] R-PLACE1001015//Oxytocin receptor//2.8e-25:308:71//Hs.2820:X64878

[25886] R-PLACE1001024//ESTs//5.0e-12:79:96//Hs.97910:AA404736

[25887] R-PLACE1001036//ESTs//4.0e-15:301:65//Hs.137947:AI025762

[25888] R-PLACE1001062//ESTs//5.2e-15:199:73//Hs.138982:AA056120

[25889] R-PLACE1001076//ESTs//3.9e-84:406:98//Hs.115455:AA678124

[25890] R-PLACE1001088//ESTs//3.0e-106:518:97//Hs.158964:AA639580

[25891] R-PLACE1001092//Homo sapiens SEC63 (SEC63) mRNA, complete cds//0.035:259:59//Hs.31575:AF100141

[25892] R-PLACE1001104//ESTs//6.1e-115:582:95//Hs.10972:AA164268

[25893] R-PLACE100118//ESTs//6.9e-81:440:93//Hs.5383:AA913610

[25894] R-PLACE1001136//ESTs//7.4e-41:168:83//Hs.95115:AA206594

[25895] R-PLACE1001168//ESTs//3.9e-21:116:99//Hs.5897:AA148834

[25896] R-PLACE1001171//ESTs, Highly similar to CYTOCHROME B-245 LIGHT CHAIN [H. sapiens]//0.91:77:71//Hs.115211:AA287527

[25897] R-PLACE1001185//ESTs//1.5e-65:330:96//Hs.26368:AA789297

[25898] R-PLACE1001238//ESTs, Moderately similar to RNA polymerase I associated factor [M. musculus]//1.9e-99:512:94//Hs.24884:AA176812

[25899] R-PLACE001241//ESTs//0.1e-81:446:93//Hs.42278:AI073464

[25900] R-PLACE1001257//EST//6.4e-46:298:87//Hs.162404:AA573131

[25901] R-PLACE1001272//ESTs//0.31:158:61//Hs.42960:N95371

[25902] R-PLACE1001279//ESTs//1.8e-77:376:97//Hs.29276:AA427780

[25903] R-PLACE1001280//ESTs//1.1e-30:134:89//Hs.163492:AI334460

[25904] R-PLACE1001294//ESTs, Moderately similar to GAMETOGENESIS EXPRESSED PROTEIN GEG-154 [M. musculus]//2.7e-22:181:84//Hs.48320:AA149548

[25905] R-PLACE1001304//ESTs, Weakly similar to ZINC FINGER PROTEIN 135 [H. sapiens]//4.2e-34:195:92//Hs.86276:W27601

[25906] R-PLACE1001311//ESTs//9.1e-91:438:97//Hs.41055:AI339056

[25907] R-PLACE1001323//Human transmembrane 4 superfamily protein (SAS) mRNA, complete cds//5.5e-44:215:86//Hs.50984:U01160

[25908] R-PLACE1001351//ESTs//2.4e-101:494:97//Hs.23944:AI097077

[25909] R-PLACE1001366//Small inducible cytokine A5 (RANTES)//8.7e-43:284:85//Hs.155464:AF088219

[25910] R-PLACE1001377//Homo sapiens ADAM 10 (ADAM 10) mRNA, complete cds//2.3e-81:431:93//Hs.152005:AF009615

[25911] R-PLACE1001383//Homo sapiens clone 24538 mRNA sequence//1.0e-36:192:97//Hs.12342:AF055030

[25912] R-PLACE1001384//Homo sapiens multi PDZ domain protein MUPP1 (MUPP1) mRNA, complete cds//1.0e-86:456:94//Hs.21301:AF093419

[25913] R-PLACE1001387//ESTs//6.0e-74:383:94//Hs.55016:AI298280

[25914] R-PLACE1001395//ESTs//2.3e-94:473:95//Hs.22394:N32555

[25915] R-PLACE1001399//ESTs//2.6e-41:204:100//Hs.24462:N36348

[25916] R-PLACE1001412//Homo sapiens clone 643 unknown mRNA, complete sequence//2.6e-45:242:95//Hs.110404:AF091087

[25917] R-PLACE1100414//ESTs//0.0013:77:75//Hs.144614:AA291800

[25918] R-PLACE1001440

[25919] R-PLACE1001456//EST//0.76:120:62//Hs.34011:H48115

[25920] R-PLACE1001468//ESTs//4.0e-80:403:96//Hs.131832:AI017547

[25921] R-PLACE1001484//ESTs//3.0e-16:201:72//Hs.153413:AI248625

[25922] R-PLACE1001502//ESTs//8.1e-31:161:99//Hs.126264:AA455617

[25923] R-PLACE1001503//ESTs//2.4e-37:176:81//Hs.141581:AA315361

[25924] R-PLACE1001517//Homo sapiens hGAA1 mRNA, complete cds//2.1e-57:339:90//Hs.4742:AB006969

[25925] R-PLACE1001534//ESTs//3 .6e-61:304:97//Hs.45207:AI042153

[25926] R-PLACE1001545//ESTs, Weakly similar to !!!! ALU SUBFAMILY J WARNING ENTRY!!!! [H. sapiens]//1.6e-22:170:85//Hs.155456:AA707265

[25927] R-PLACE1001551//ESTs//1.5e-39:202:98//Hs.139269:AA894431

[25928] R-PLACE1001570//EST//0.1e-70:495:82//Hs.144234:W52249

[25929] R-PLACE1001602//EST//0.33:297:57//Hs.149839:AI287601

[25930] R-PLACE1001603//ESTs//2.0e-17:181:76//Hs.155334:AA827904

[25931] R-PLACE1001610//EST//1.1e-86:442:95//Hs.112580:AA608683

[25932] R-PLACE1001611//Homo sapiens histone macroH2A1.2 mRNA, complete cds//1.1e-42:217:97//Hs.75258:AF054174

[25933] R-PLACE1001632//ESTs, Highly similar to ZINC FINGER PROTEIN 91 [Homo sapiens]//1.5e-78:458:91//Hs.114547:AA167095

[25934] R-PLACE1001634//ESTs//0.0035:40:97//Hs.101577:A1168526

[25935] R-PLACE1001640//ESTs//0.0028:377:57//Hs.131044:D61640

[25936] R-PLACE1001672//ESTs, Moderately similar to !!!! ALU SUBFAMILY J WARNING ENTRY!!!! [H. sapiens]//0.98:141:62//Hs.153060:AA195804

[25937] R-PLACE1001691//Homo sapiens okadaic acid-inducible phosphoprotein (OA48-18) mRNA, complete cds//4.7e-113:545:97//Hs.3688:AF069250

[25938] R-PLACE1001692//EST//3.0e-43:430:75//Hs.162975:AA679124

[25939] R-PLACE1001705//ESTs//3.0e-81:418:94//Hs.22646:AI374903

[25940] R-PLACE1001716//EST//0.76:150:62//Hs.128906:AA983667

[25941] R-PLACE1001720//ESTs//2.4e-64:385:90//Hs.60455:AA010993

[25942] R-PLACE1001729//ESTs//2.9e-84:418:9611Hs.134740:AA282171

[25943] R-PLACE1001739//ESTs, Weakly similar to P68 PROTEIN [H. sapiens]//9.1e-32:206:89//Hs.6366:AA614113

[25944] R-PLACE1001740//EST//6.5e-05:113:68//Hs.139949:AA644266

[25945] R-PLACE1001745//ESTs//3.3e-92:473:95//Hs.104270:AA236479

[25946] R-PLACE1001746//ESTs//8.8e-93:443:98//Hs.112198:AI423937

[25947] R-PLACE1001748//Homo sapiens metalloprotease I (MP1) mRNA, complete cds//4.1e-93:540:89//Hs.4812:AF061243

[25948] R-PLACE1001756//ESTs//0.17:157:66//Hs.141565:N64662

[25949] R-PLACE1001761

[25950] R-PLACE1001771//ESTs//0.92:165:62//Hs.47387:N51980

[25951] R-PLACE1001781//ESTs//5.7e-84:437:95//Hs.23363:AA081236

[25952] R-PLACE1001799//EST//0.00039:126:65//Hs.123267:AA807352

[25953] R-PLACE1001817//Homo sapiens ATP-specific succinyl-CoA synthetase beta subunit (SCS) mRNA, partial cds//1.3e-93:463:95//Hs.40820:AF058953

[25954] R-PLACE1001821//Small inducible cytokine A5 (RANTES)//2.7e-35:328:75//Hs.155464:AF088219

[25955] R-PLACE1001845

[25956] R-PLACE1001869//EST//1.0:207:62//Hs.137298:W32868

[25957] R-PLACE1001897//ESTs//2.4e-23:219:80//Hs.7503:H50009

[25958] R-PLACE1001912//ESTs//1.5e-32:162:7811Hs.136810:AA789098

[25959] R-PLACE1100920//Homo sapiens TNF-induced protein GG2-1 mRNA, complete cds//3.9e-74:363:97//Hs.17839:AF099936

[25960] R-PLACE1001928//Homo sapiens mRNA for KIAA0623 protein, complete cds//0.85:130:66//Hs.151406:AB014523

[25961] R-PLACE1001983//ESTs//2.8e-66:334:96//Hs.110155:AA007313

[25962] R-PLACE1001989//ESTs//1.3e-88:453:95//Hs.132717:AA171941

[25963] R-PLACE1002046

[25964] R-PLACE1002052//ESTs//1.7e-79:428:94//Hs.6737:N32595

[25965] R-PLACE1002066//ESTs//2.8e-82:427:94//Hs.132972:AA543094

[25966] R-PLACE1002072//ESTs//0.27:108:66//Hs.123163:AA809619

[25967] R-PLACE1002073//EST//5.5e-70:369:95//Hs.132339:AI028552

[25968] R-PLACE1002090//ESTs//6.3e-73:361:96//Hs.134469:AA731632

[25969] R-PLACE1002115//ESTs//4.6e-34:233:88//Hs.163443:R23311

[25970] R-PLACE1002119//ESTs//1.2e-88:444:96//Hs.15725:AA521293

[25971] R-PLACE1002140//ESTs//6.6e-22:118:100//Hs.22793:W91937

[25972] R-PLACE1002150//ESTs//4.0e-96:465:98//Hs.7312:AI1167614

[25973] R-PLACE1002157//EST, Weakly similar to LINE-1 REVERSE TRANSCRIPTASE HOMOLOG [H. sapiens]//3.6e-39:400:76//Hs.162172:AA534189

[25974] R-PLACE1002163//ESTs//3.2e-83:428:95//Hs.137011:AI185965

[25975] R-PLACE1002171//ESTs//5.3e-68:392:90//Hs.62273:AA143745

[25976] R-PLACE1002205//ESTs//1.5e-39:211:95//Hs.28338:N48793

[25977] R-PLACE1002213//ESTs//5.1e-38:290:83//Hs.146811:AA410788

[25978] R-PLACE1002227//EST//1.3e-114:214:72//Hs.46979:N49892

[25979] R-PLACE1002256//ESTs//2.4e-100:484:98//Hs.9343:AI004257

[25980] R-PLACE1002259//Human Line-1 repeat mRNA with 2 open reading frames//5.8e-67:501:81//Hs.23094:M19503

[25981] R-PLACE1002319//ESTs//1.4e-28:178:92//Hs.7353:AA209308

[25982] R-PLACE1002342//Homo sapiens mRNA for KIAA0728 protein, partial cds//1.6e-95:501:93//Hs.18277:AB018271

[25983] R-PLACE1002395//ESTs//3.6e-25:248:77//Hs.3853:AA034291

[25984] R-PLACE1002399//ESTs//1.5e-27:238:78//Hs.13014:W26381

[25985] R-PLACE1002433//ESTs//4.3e-108:511:98//Hs.98324:AA621959

[25986] R-PLACE1002437//EST//1.2e-06:158:61//Hs.159833:T24110

[25987] R-PLACE1002438//Sjogren syndrome antigen B (autoantigen La)//0.93:176:60//Hs.83715:X69804

[25988] R-PLACE1002450//ESTs//1.5e-89:432:98//Hs.47371:AA136333

[25989] R-PLACE1002465//ESTs//1.6e-92:488:93//Hs.78110:AA741320

[25990] R-PLACE1002474//Human matrilin-2 precursor mRNA, partial cds//4.9e-23:166:85//Hs.19368:U69263

[25991] R-PLACE1002477//ESTs//2.5e-62:305:98//Hs.88605:AA421132

[25992] R-PLACE1002493//Homo sapiens signal transducing adaptor molecule 2A (STAM2) mRNA, complete cds//3.6e-55:307:91//Hs.17200:AF042273

[25993] R-PLACE1002499//ESTs//7.4e-72:373:96//Hs.128221:AA972429

[25994] R-PLACE1002500//Homo sapiens KIAA0409 mRNA, partial cds//1.2e-40:296:83//Hs.5158:AB007869

[25995] R-PLACE1002514//ESTs, Weakly similar to !!!! ALU SUBFAMILY SB1 WARNING ENTRY !!!! [H. sapiens]//6.4e-14:217:69//Hs.152230:A1140609

[25996] R-PLACE1002529//Homo sapiens mRNA for KIAA0713 protein, partial cds//5.1e-88:582:85//Hs.88756:AB018256

[25997] R-PLACE1002532//Homo sapiens BAC clone RG300E22 from 7q21-q31.1//2.7e-19:116:93//Hs.99348:AC004774

[25998] R-PLACE1002537//ESTs//4.8e-93:440:99//Hs.164005:AA766491

[25999] R-PLACE1002571//ESTs, Highly similar to ACTIN-LIKE PROTEIN 13E [Drosophila melanogaster]//1.3e-108:555:95//Hs.23259:AA532437

[26000] R-PLACE1002578//EST//1.9e-40:337:81//Hs.162404:AA573131

[26001] R-PLACE1002583//EST//11.2e-07:264:65//Hs.156414:AI339738

[26002] R-PLACE1002591//ESTs//2.3e-67:372:94//Hs.143046:N73778

[26003] R-PLACE1002598//ESTs, Highly similar to PROTEIN HI1715 [Haemophilus influenzae]//1.2e-44:228:97//Hs.7527:AA843208

[26004] R-PLACE1002604//ESTs//3.3e-106:532:96//Hs.86828:AA632147

[26005] R-PLACE1002625//EST//3.8e-13:173:74//Hs.138597:H77749

[26006] R-PLACE1002665//Small inducible cytokine A4 (homologous to mouse Mip-1b)//1.0:189:58//Hs.75703:J04130

[26007] R-PLACE1002685//Homo sapiens B cell linker protein BLNK mRNA, alternatively spliced, complete cds//3.8e-79:390:97//Hs.124903:AF068180

[26008] R-PLACE1002714//ESTs//8.2e-63:340:93//Hs.7973:H 19830

[26009] R-PLACE1002722//ESTs, Weakly similar to putative G-protein-coupled receptor [H. sapiens]//6.8e-75:445:90//Hs.29202:R71586

[26010] R-PLACE1002768//ESTs//1.2e-70:359:95//Hs.132600:H 12865

[26011] R-PLACE1002772//ESTs//8.1e-49:362:82//Hs.141254:AI334099

[26012] R-PLACE1002782//ESTs//2.4e-58:284:98//Hs.143545:A 149014

[26013] R-PLACE1002794//ESTs//5.4e-21:114:100//Hs.77365:W93593

[26014] R-PLACE1002811//ESTs//6.7e-68:329:98//Hs.78026:AA456955

[26015] R-PLACE1002815//ESTs//6.8e-103:537:93//Hs.5459:AI304392

[26016] R-PLACE1002816//ESTs//3.9e-05:118:68//Hs.98641:AA429916

[26017] R-PLACE1002834//ESTs, Highly similar to ZINC FINGER PROTEIN 91 [Homo sapiens]//2.1e-42:233:94//Hs.61518:AA167094

[26018] R-PLACE1002839//ESTs//1.7e-10:292:64//Hs.93012:R96142

[26019] R-PLACE1002851//ESTs//1.7e-73:381:95//Hs.135021:AI096756

[26020] R-PLACE1002853//ESTs//1.2e-89:453:96//Hs.23630:N57539

[26021] R-PLACE1002881//ESTs//1.1e-71:360:96//Hs.34392:AI066762

[26022] R-PLACE1002908//EST//2.7e-31:177:94//Hs.147925:AI249332

[26023] R-PLACE1002941//ESTs//4.0e-96:519:92//Hs.125139:AA523995

[26024] R-PLACE1002962

[26025] R-PLACE1002968//ESTs//4.7e-31:420:69//Hs.116518:AA653202

[26026] R-PLACE1002991//ESTs//9.0e-81:418:95//Hs.132717:AA171941

[26027] R-PLACE1002993//ESTs, Weakly similar to !!!! ALU SUBFAMILY SB WARNING ENTRY !!!! [H. sapiens]//1.3e-86:502:89//Hs.32232:AA604268

[26028] R-PLACE1002996//ESTs//1.9e-44:218:100//Hs.63657 AI144268

[26029] R-PLACE1003025//ESTs//8.4e-104:517:96//Hs.10711:AI151499

[26030] R-PLACE1003027//Human mRNA for KIAA0238 gene, partial cds//0.97:156:60//Hs.82042:D87075

[26031] R-PLACE1003044//Human onconeural ventral antigen-1 (Nova-1) mRNA, complete cds//1.0:200:63//Hs.214:U04840

[26032] R-PLACE1003092//ESTs//0.0046:267:60//Hs.133095:AA927777

[26033] R-PLACE1003100//ESTs, Highly similar to NODULATION PROTEIN G [Rhizobium meliloti]//9.5e-94:491:93//Hs.6318:AI131178

[26034] R-PLACE1003108//ESTs//0.00065:184:66//Hs.154366:AA527359

[26035] R-PLACE1003136//Signal recognition particle 54 kD protein//0.057:317:59//Hs.49346:U51920

[26036] R-PLACE1003145//ESTs//1.9e-98:534:92//Hs.61929:AA044757

[26037] R-PLACE1003153//ESTs//5.8e-76:367:98//Hs.105196:AA483467

[26038] R-PLACE1003174//ESTs//1.7e-44:226:98//Hs.59688:AA453924

[26039] R-PLACE1003176

[26040] R-PLACE1003190//ESTs//1.6e-74:356:99//Hs.121282:AI091453

[26041] R-PLACE1003200//ESTs//4.6e-93:461:96//Hs.24321:AA971017

[26042] R-PLACE1003205//ESTs//0.037:171:61//Hs.157077:H44802

[26043] R-PLACE1003238//ESTs, Weakly similar to KIAA0001 [H. sapiens]//2.5e-82:436:94//Hs.58561:W79123

[26044] R-PLACE1003249//Human high-affinity copper uptake protein (hCTR1) mRNA, complete cds//7.9e-44:313:84//Hs.73614:U83460

[26045] R-PLACE1003256//EST//9.6e-46:284:88//Hs.162404:AA573131

[26046] R-PLACE1003258//ESTs, Weakly similar to !!!! ALU SUBFAMILY J WARNING ENTRY!!!! [H. sapiens]//8.3e-102:551:92//Hs.52431:AA625326

[26047] R-PLACE1003296//ESTs//1.9e-88:451:96//Hs.57749:W92986

[26048] R-PLACE1003302//ESTs, Highly similar to ZINC FINGER PROTEIN 43 [Homo sapiens]//8.2e-93:458:96//Hs.29147:AA883993

[26049] R-PLACE1003334//ESTs, Weakly similar to !!!! ALU CLASS B WARNING ENTRY!!!! [H. sapiens]//3 .3e-94:463:97//Hs.155050:AA908765

[26050] R-PLACE1003342//ESTs//6.0e-88:447:96//Hs.107527:R66438

[26051] R-PLACE1003343//EST//0.0087:412:58//Hs.159963:AA977701

[26052] R-PLACE1003353//Homo sapiens breast cancer antiestrogen resistance 3 protein (BCAR3) mRNA, complete cds//1.1e-99:469:98//Hs.6564:U92715

[26053] R-PLACE1003361//ESTs//3.5e-64:332:95//Hs.163861:A1199636

[26054] R-PLACE1003366//ESTs//1.0e-87:492:92//Hs.72222:AA158234

[26055] R-PLACE1003369//ESTs, Weakly similar to ZK1058.4 [C. elegans]//3.5e-18:109:95//Hs.27670:AI051591

[26056] R-PLACE1003373//Homo-sapiens mRNA for KIAA0472 protein, partial cds//2.6e-54:279:80//Hs.6874:AB007941

[26057] R-PLACE1003375//ESTs//1.7e-88:431:97//Hs.41327:AI039909

[26058] R-PLACE1003383//ESTs//0.00084:177:64//Hs.120695:AI377755

[26059] R-PLACE1003401//ESTs//1.1e-16:147:80//Hs.132187:AI039020

[26060] R-PLACE1003420//ESTs//1.4e-93:481:94//Hs.122565 AI126840

[26061] R-PLACE1003454//ESTs//4.0e-57:310:93//Hs.121688:AA743697

[26062] R-PLACE1003478//EST//1.0:162:63//Hs.147003:AI184671

[26063] R-PLACE1003493//ESTs//1.2e-73:383:95//Hs.28852:R64270

[26064] R-PLACE1003516//ESTs//3 .2e-23:206:80//Hs.138632:H97952

[26065] R-PLACE1003519//H. sapiens hnRNP-E 1 mRNA//1 .7e-22:236:79//Hs.2853:Z29505

[26066] R-PLACE1003521//ESTs//5.8e-74:371:96//Hs.30818:AA194980

[26067] R-PLACE1003528//ESTs//1.1e-40:219:82//Hs.138856:H47461

[26068] R-PLACE1003537//ESTs, Weakly similar to multispanning membrane protein [H. sapiens]//7.4e-69:338:98//Hs.110439:N93209

[26069] R-PLACE1003553//ESTs//2.2e-87:438:97//Hs.132022:AI040321

[26070] R-PLACE1003566//ESTs//1.2e-62:298:92//Hs.30799:AI052591

[26071] R-PLACE1003575//Homo sapiens mRNA, chromosome 1 specific transcript KIAA0487//2.4e-22:145:80//Hs.92381:AB007956

[26072] R-PLACE1003583//ESTs, Weakly similar to hypothetical L1 protein [H. sapiens]//1.5e-14:264:65//Hs.158253:R86178

[26073] R-PLACE1003584

[26074] R-PLACE1003592//ESTs//1.3e-15:213:69//Hs.139507:T77542

[26075] R-PLACE1003593//ESTs, Highly similar to FRGI gene product [H. sapiens]//5.8e-75:459:89//Hs.23884:AI377106

[26076] R-PLACE1003596//ESTs//0.011:273:61//Hs.71719:AA142875

[26077] R-PLACE1003602//Homo sapiens mRNA expressed in placenta//7.8e-97:576:88//Hs.56851:D83200

[26078] R-PLACE1003605//ESTs//3 .7e-86:407:99//Hs.136057:AA988299

[26079] R-nnnnnnnnnnnn//ESTs//1.0:78:71//Hs.101248:T26446

[26080] R-PLACE1003618//ESTs//6.8e-30:281:79//Hs.114455:AA411943

[26081] R-PLACE1003625//ESTs//7.2e-78:377:98//Hs.102708:AA292285

[26082] R-PLACE1003638//ESTs//6.7e-38:274:82//Hs.138852:AA284247

[26083] R-PLACE1003669//ESTs//9.7e-83:418:95//Hs.4842:AI342607

[26084] R-PLACE1003704//ESTs//3.0e-13:99:89//Hs.81648:W26521

[26085] R-PLACE1003709//ESTs//0.019:178:60//Hs.32100:N59866

[26086] R-PLACE1003711//ESTs//0.99:126:63//Hs.47005:N98639

[26087] R-PLACE1003723//ESTs//1.7e-89:448:96//Hs.157222:AA766987

[26088] R-PLACE1003738//ESTs//2.5e-36:182:100//Hs.122162:AI057087

[26089] R-PLACE1003760//Human globin gene//1.9e-98:538:91//Hs.100090:M69023

[26090] R-PLACE1003762//EST//2.9e-15:125:85//Hs.162083:AA487512

[26091] R-PLACE1003768//Human P042 gene, complete cds//3.1e-18:300:69//Hs.158302:U88965

[26092] R-PLACE1003771//ESTs//1.2e-09:64:100//Hs.23799:AI003798

[26093] R-PLACE1003783//ESTs, Weakly similar to D2085.5 [C. elegans]//3.8e-38:199:97//Hs.115197:AA215757

[26094] R-PLACE1003784//ESTs//3 .7e-87:428:97//Hs.157985:AI366909

[26095] R-PLACE1003795//Homo sapiens mRNA for KIAA0575 protein, complete cds//3.2e-36:236:88//Hs.153468:AB001147

[26096] R-PLACE1003833//ESTs, Moderately similar to !!!! ALU SUBFAMILY SC WARNING ENTRY!!!! [H. sapiens]//8.5e-62:313:96//Hs.121020:AA526092

[26097] R-PLACE1003850//ESTs//4.0e-67:351:96//Hs.159303:T91059

[26098] R-PLACE1003858//ESTs//0.96:87:66//Hs.107112:AA679058

[26099] R-nnnnnnnnnnnn

[26100] R-PLACE1003870//EST//2.9e-34:281:79//Hs.160895:AI365871

[26101] R-nnnnnnnnnnnn

[26102] R-PLACE1003886//ESTs//6.7e-85:410:97//Hs.25129:W93595

[26103] R-PLACE1003888//ESTs//0.0085:165:64//Hs.96739:AA441915

[26104] R-PLACE1003900//EST//2.4e-05:129:69//Hs.127931:AA969259

[26105] R-PLACE1003903//ESTs, Highly similar to CTP SYNTHASE [Homo sapiens]//1.5e-54:282:96//Hs.58553:AA100804

[26106] R-PLACE1003915//EST//0.87:55:76//Hs.145930:AI275760

[26107] R-PLACE1003923//ESTs//1.7e-89:456:95//Hs.14125:AA156236

[26108] R-PLACE1003932//ESTs//3.0e-50:340:84//Hs.151208:AI126110

[26109] R-PLACE1003936EST//1.8e-08:208:65//Hs.162656:AA603567

[26110] R-PLACE1003968//ESTs//7.4e-49:301:90//Hs.93850:AA115330

[26111] R-PLACE1004104//ESTs//1.9e-46:254:94//Hs.96802:AA443231

[26112] R-PLACE1004114//ESTs//1.2e-64:322:97//Hs.28928:AI052052

[26113] R-PLACE1004118//ESTs//1.0e-83:404:98//Hs.112764:AA609770

[26114] R-PLACE1004128//ESTs//5.3e-80:415:95//Hs.11835:AA040244

[26115] R-PLACE1004149//ESTs//7.2e-25:331:72//Hs.141084:H11714

[26116] R-PLACE1004156//Homo sapiens PYRIN (MEFV) mRNA, complete cds//2.0e-56:491:76//Hs.113283:AF018080

[26117] R-PLACE1004161//ESTs//2.0e-59:355:88//Hs.13830:AA918601

[26118] R-PLACE1004183//Homo sapiens cytochrome c oxidase assembly protein COX11 (COX11) mRNA, complete cds//4.7e-78:434:91//Hs.153504:AF044321

[26119] R-PLACE1004197

[26120] R-PLACE1004203//Homo sapiens GPI-anchored membrane protein CDw108 precursor, mRNA, complete cds//1 .5e-105:501:98//Hs.24640:AF069493

[26121] R-PLACE1004242//ESTs//1.0e-71:364:87//Hs.138632:H97952

[26122] R-PLACE1004256//EST//0.0011:347:61//Hs.131385:AI022630

[26123] R-PLACE1004257//EST//0.027:99:71//Hs.97587:AA398209

[26124] R-PLACE1004258//KERATIN, TYPE I CYTOSKELETAL 14//0.72:180:63//Hs.117729:J001124

[26125] R-PLACE1004270//ESTs//0.01:264:59//Hs.110044:AA181800

[26126] R-PLACE1004274//Human retinoic acid receptor-beta associated open reading frame, complete sequence//0.28:121:66//Hs.1938:S82362

[26127] R-PLACE1004277//Homo sapiens two pore domain K+channel (TASK-2) mRNA, complete cds//1.4e-107:581:91//Hs.127007:AF084830

[26128] R-PLACE1004284//ESTs//5.0e-22:187:82//Hs.23141:W92114

[26129] R-PLACE1004289//ESTs, Weakly similar to !!!! ALU SUBFAMILY J WARNING ENTRY !!!! [H. sapiens]//2.9e-28:279:77//Hs.38687:AA744496

[26130] R-PLACE1004302//ESTs, Weakly similar to SOFI PROTEIN [Saccharomyces cerevisiae]//8.2e-61:313:95//Hs.71435:AI253099

[26131] R-PLACE1004316//H. sapiens mRNA for apoptosis specific protein//6.0e-115:590:94//Hs.11171:Y11588

[26132] R-PLACE1004336//Cytochrome P450, subfamily I (aromatic compound-inducible), polypeptide 2//6.7e-69:572:77//Hs.1361:M55053

[26133] R-PLACE1004358//Homo sapiens connector enhancer of KSR-like protein CNK1 mRNA, complete cds//7.7e-72:379:93//Hs.16232:AF100153

[26134] R-PLACE1004376//ESTs//0.49:362:59//Hs.138086:AI056309

[26135] R-PLACE1004384//EST//1.0:47:76//Hs.128546:AA905556

[26136] R-PLACE1004388//ESTs, Weakly similar to contains similarity to ATP/GTP-binding site motif [C. elegans]//1.3e-98:572:90//Hs.14202:N46000

[26137] R-PLACE1004405//ESTs//3.4e-99:507:95//Hs.28792:AI343467

[26138] R-PLACE1004425//ESTs//2.7e-85:442:95//Hs.12544:N53665

[26139] R-PLACE1004428//ESTs//1.0e-07:114:78//Hs.140225:AA704101

[26140] R-PLACE1004437//Human NAD+-specific isocitrate dehydrogenase beta subunit precursor, mRNA, nuclear gene encoding mitochondrial protein, complete cds//9.4e-90:516:88//Hs.155410:U49283

[26141] R-PLACE1004451

[26142] R-PLACE1004460//ESTs//5.4e-14:338:64//Hs.97464:AA662980

[26143] R-PLACE1004467//ESTs//3.3e-85:467:9211Hs.9527:W52721

[26144] R-PLACE1004471//ESTs//3.0e-73:389:94//Hs.23240:R46578

[26145] R-PLACE1004473//ESTs, Weakly similar to F20D1.2 [C. elegans]//3.8e-101:510:95//Hs.16986:W89194

[26146] R-PLACE1004491//Human mitochondrial 1,25-dihydroxyvitamin D324-hydroxylase mRNA, complete cds//0.23:278:61//Hs.89663:L13286

[26147] R-PLACE1004506//ESTs//2.5e-98:559:90//Hs.19447:AI057117

[26148] R-PLACE1004510//ESTs//1.5e-91:436:98//Hs.24846:AI420493

[26149] R-PLACE1004516//EST//1.7e-66:344:96//Hs.99303:AA453164

[26150] R-PLACE1004518//ESTs//5.2e-79:410:94//Hs.27091:AA436553

[26151] R-PLACE1004548//Homo sapiens mRNA for small GTP-binding protein, complete cds//1.8e-40:332:72//Hs.115325:D84488

[26152] R-PLACE1004550

[26153] R-PLACE1004564//ESTs//5.5e-76:367:981//Hs.49683:AA564742

[26154] R-PLACE1004629//ESTs, Weakly similar to OS-9 precurosor [H. sapiens]//8.1e-40:272:87//Hs.7100:W07181

[26155] R-PLACE1004645//ESTs//6.3e-14:83:100//Hs.17270:AA701903

[26156] R-PLACE1004646//ESTs//3.7e-22:231:761//Hs.141250:N29734

[26157] R-PLACE1004658//ESTs//2.0e-12:109:84//Hs.23508:AA01113

[26158] R-nnnnnnnnnnnn//Homo sapiens mRNA for KIAA0714 protein, partial cds//7.8e-23:129:99//Hs.123129:AB018257

[26159] R-PLACE1004672//ESTs//2.0e-50:256:98//Hs.136367:Al 144254

[26160] R-PLACE1004674//Homo sapiens calcium binding protein (ALG-2) mRNA, complete cds//1.8e-90:510:91//Hs.80019:AF035606

[26161] R-PLACE1004681//EST//2.1e-08:283:62//Hs.99543:AA461482

[26162] R-PLACE1004686

[26163] R-PLACE1004691EST//7.3e-42:305:82//Hs.141833:AA021552

[26164] R-PLACE1004693//ESTs//0.014:135:64//Hs.145333:AI251374

[26165] R-PLACE1004716//ESTs, Weakly similar to No definition line found [C. elegans]//3.4e-80:413:94//Hs.23528:AI279571

[26166] R-PLACE1004722//EST//0.14:165:63//Hs.18213:T97997

[26167] R-PLACE1004736//ESTs//1.0e-72:385:94//Hs.10657:N63911

[26168] R-PLACE1004740//ESTs//1.0:267:58//Hs.101661:AA416619

[26169] R-nnnnnnnnnnnn//EST//0.45:94:69//Hs.147174:AI192195

[26170] R-PLACE1004751//EST//9.8e-32:174:83//Hs.147901:AI223374

[26171] R-PLACE1004773//Homo sapiens inversin protein mRNA, complete cds//2.7e-89:437:96//Hs.104715:AF084367

[26172] R-PLACE1004777//ESTs//7.4e-68:351:94//Hs.23395:AA398548

[26173] R-PLACE1004793//ESTs//1.3e-53:290:78//Hs.142375:AA398619

[26174] R-nnnnnnnnnnnn//Homo sapiens mRNA for KIAA0606 protein, partial cds//1.9e-99:580:88//Hs.38176:AB011178

[26175] R-PLACE1004813//ESTs//7.6e-86:433:96//Hs.85640:AA535856

[26176] R-PLACE1004814//Homo sapiens okadaic acid-inducible phosphoprotein (OA48-18) mRNA, complete cds//1.1e-108:358:99//Hs.3688:AF069250

[26177] R-PLACE1004815//EST//4.7e-50:333:84//Hs.142196:AA258356

[26178] R-PLACE1004824//Protein kinase, interferon-inducible double stranded RNA dependent//4.8e-46:450:76//Hs.73821:M35663

[26179] R-PLACE1004827//ESTs//2.3e-48:250:96//Hs.138766:AA342185

[26180] R-PLACE1004836//ESTs//2.7e-39:222:94//Hs.78661:AA195299

[26181] R-PLACE1004838//EST//0.056:198:60//Hs.129589:AA995901

[26182] R-PLACE1004840//ESTs, Highly similar to TRANSCRIPTIONAL ACTIVATOR GCN5 [Saccharomyces cerevisiae]//6.5e-71:381:93//Hs.8383:AA013272

[26183] R-PLACE1004868//ESTs//4.9e-70:367:94//Hs.100895:AA479308

[26184] R-PLACE1004885//Homo sapiens protein phosphatase with EF-hands-2 long form (PPEF-2) mRNA, complete cds//1.8e-37:330:78//Hs.113259:AF023456

[26185] R-PLACE1004900//EST//1.2e-46:306:86//Hs.149580:AI281881

[26186] R-PLACE1004902//Sucrase-isomaltase//0.87:254:61//Hs.2996:X63597

[26187] R-nnnnnnnnnnnn//ESTs//4.5e-75:375:96//Hs.91115:AI221563

[26188] R-PLACE1004918//ESTs//2.6e-103:519:95//Hs.143607:AI424948

[26189] R-PLACE1004930//Homo sapiens TNF-induced protein GG2-1 mRNA, complete cds//6.6e-102:532:93//Hs.17839:AF099936

[26190] R-PLACE1004934//EST//0.035:156:67//Hs.162071:AA478980

[26191] R-PLACE1004937//ESTs, Weakly similar to F55B12.3 [C. elegans]//6.4e-80:409:95//Hs.31945:AA702166

[26192] R-PLACE1004969//ESTs//9.8e-18:101:99//Hs.112837:N78013

[26193] R-PLACE1004972//ESTs//1.3e-65:337:95//Hs.75798:H29106

[26194] R-PLACE1004979//EST//1.2e-96:475:96//Hs.120158:AA708789

[26195] R-PLACE1004982//ESTs//1.0e-98:471:98//Hs.106496:AI291776

[26196] R-PLACE1004985//ESTs//2.1e-88:456:93//Hs.135050:AI420335

[26197] R-PLACE1005026

[26198] R-PLACE1005027//ESTs, Weakly similar to N-methyl-D-aspartate receptor glutamate-binding chain [R. norvegicus]//0.72:145:66//Hs.11215:N56719

[26199] R-PLACE1005046//Homo sapiens mRNA for KIAA0575 protein, complete cds//5.3e-66:297:88//Hs.153468:AB011147

[26200] R-PLACE1005052//ESTs, Weakly similar to weak similarity to rat cytosolic acyl coenzyme A thioester hydrolase [C. elegans]//1.2e-106:543:95//Hs.18625:AI074605

[26201] R-PLACE1005066//ESTs//3.9e-92:459:96//Hs.62684:AA806103

[26202] R-PLACE1005077//Human triadin mRNA, complete cds//1.8e-05:121:69//Hs.68731:U 18985

[26203] R-PLACE1005085//Homo sapiens PYRIN (MEFV) mRNA, complete cds//6.6e-49:314:74//Hs.113283:AF018080

[26204] R-PLACE1005086//ESTs//1.2e-73:379:94//Hs.110128:AA584364

[26205] R-PLACE1005101//Homo sapiens (clone zap128) mRNA, 3′ end of cds//8.0e-99:531:92//Hs.75437:L40401

[26206] R-PLACE1005102//ESTs//7.2e-68:493:84//Hs.10593:AI201336

[26207] R-PLACE1005108//Human DNA fragmentation factor-45 mRNA, complete cds//9.2e-40:232:82//Hs.155344:U91985

[26208] R-PLACE1005111//EST//8.1e-10:189:68//Hs.136356:AA493225

[26209] R-PLACE1005128//ESTs//1.4e-78:501:87//Hs.15093:AA203423

[26210] R-PLACE1005146//ESTs//4.8e-93:460:97//Hs.37896:AA777349

[26211] R-PLACE1005162//ESTs//7.5e-51:277:95//Hs.28838:AI089013

[26212] R-nnnnnnnnnnnn//ESTs//5.4e-75:366:97//Hs.4819:AA454227

[26213] R-PLACE1005181//EST//0.012:172:66//Hs.147107:A1190589

[26214] R-PLACE1005187//ESTs//5.6e-72:363:95//Hs.16577:AI022830

[26215] R-PLACE1005206//ESTs//5.3e-48:203:88//Hs.31792:H45211

[26216] R-PLACE1005232//ESTs//5.1e-41:287:84//Hs.138552:R99532

[26217] R-PLACE1005243//ESTs//1.1e-48:348:83//Hs.113310:R16767

[26218] R-PLACE1005261//ESTs//0.19:175:62//Hs.124337:AA829524

[26219] R-PLACE1005266//ESTs//1.9e-22:388:66//Hs.124146:AA699633

[26220] R-PLACE1005277//ESTs//1.5e-29:314:72//Hs.163710:AA024516

[26221] R-PLACE1005287//ESTs//3.6e-95:456:98//Hs.49282:AA970322

[26222] R-PLACE1005305//ESTs//9.9e-71:428:88//Hs.144855 Al 197937

[26223] R-PLACE1005308//ESTs//3.8e-32:173:96//Hs.58239:AA215797

[26224] R-PLACE1005313//ESTs//5 .2e-74:409:93//Hs.33368:AA206614

[26225] R-PLACE1005327//Chromosome 1 specific transcript KIAA0491//1.7e-104:537:94//Hs.136309:AB007960

[26226] R-PLACE1005331//ESTs//2.1e-91:487:93//Hs.9291:AI189343

[26227] R-PLACE1005335//ESTs, Weakly similar to F23B2.4 [C. elegans]//3.8e-90:442:97//Hs.70202:AA732975

[26228] R-PLACE1005373//ESTs//8.0e-93:526:91//Hs.98541:N38901

[26229] R-PLACE1005374//Homo sapiens KIAA0395 mRNA, partial cds//3.3e-44:344:80//Hs.43681:AL022394

[26230] R-PLACE1005409//EST//0.43:174:59//Hs.162077:AA479978

[26231] R-PLACE1005453//EST//7.9e-57:330:90//Hs.162306:AA555304

[26232] R-PLACE1005467//ESTs//2.2e-42:294:84//Hs.142257:AA188423

[26233] R-PLACE1005471//Human Line-1 repeat mRNA with 2 open reading frames//2.3e-88:561:86//Hs.23094:M19503

[26234] R-PLACE1005477//Human methionine aminopeptidase mRNA, complete cds//6.9e-80:549:83//Hs.78935:U29607

[26235] R-PLACE1005480//EST//0.99:39:82//Hs.157275:AI364046

[26236] R-PLACE1005481//EST//1.5e-31:281:79//Hs.132635:A1032875

[26237] R-PLACE1005494//Homo sapiens mRNA for semaphorin E, complete cds//0.036:319:59//Hs.62705:AB000220

[26238] R-PLACE1005502//Homo sapiens formin binding protein 21 mRNA, complete cds//5.4e-57:277:98//Hs.28307:AF071185

[26239] R-PLACE1005526//ESTs//2.5e-30:233:83//Hs.119304:AA443325

[26240] R-PLACE1005528//Homo sapiens mRNA for cartilage-associated protein (CASP)//8.9e-20:321:69//Hs.155481:AJ006470

[26241] R-PLACE1005530//ESTs//3.7e-81:438:92//Hs.103380:AI291325

[26242] R-PLACE1005550//ESTs, Highly similar to HYPOTHETICAL 40.2 KD PROTEIN K12H4.3 IN CHROMOSOME III [Caenorhabditis elegans]//5.2e-95:458:98//Hs.38114:N62927

[26243] R-PLACE1005554//ESTs//8.8e-36:267:86//Hs.98288:AA203555

[26244] R-PLACE1005557//ESTs, Highly similar to MITOCHONDRIAL 60S RIBOSOMAL PROTEIN L2 PRECURSOR [Saccharomyces cerevisiae]//2.2e-64:345:94//Hs.7736:W81261

[26245] R-PLACE1005574//ESTs//2.3e-27:231:83//Hs.117771:R99835

[26246] R-PLACE1005584//ESTs//1.6e-36:188:98//Hs.152050:AA724612

[26247] R-PLACE1005595//ESTs//1.6e-91:453:96//Hs.85079:AI276023

[26248] R-PLACE1005603//ESTs//8.2e-99:533:93//Hs.96357:AI026927

[26249] R-PLACE100561//ESTs//5.2e-28:183:89//Hs.24941:AA261857

[26250] R-PLACE1005623//ESTs//1.4e-102:505:96//Hs.58382:AA808964

[26251] R-PLACE1005630

[26252] R-PLACE1005639//ESTs//1.4e-51:256:98//Hs.1975:W72452

[26253] R-PLACE1005646//Homo sapiens RNA helicase-related protein mRNA, complete cds//1.0e-111:585:93//Hs.8765:AF083255

[26254] R-PLACE1005656//ESTs//2.7e-88:469:92//Hs.164054:AA528169

[26255] R-PLACE1005666//Homo sapiens X-ray repair cross-complementing protein 2 (XRCC2) mRNA, complete cds//3.3e-24:401:66//Hs.129727:AF035587

[26256] R-PLACE1005698//ESTs//0.00013:82:79//Hs.116331:AA629355

[26257] R-PLACE1005727//EST//0.15:206:63//Hs.105002:AA449332

[26258] R-PLACE1005730//EST//0.0014:129:70//Hs.127931:AA969259

[26259] R-PLACE1005739//ESTs, Moderately similar to unknown intracellular protein [M. musculus]//1.3e-42:236:94//Hs.23889:AI341137

[26260] R-PLACE1005755//ESTs//2.8e-32:308:80//Hs.159821:AA524070

[26261] R-PLACE1005763//Human mRNA for KIAA0118 gene, partial cds//3.3e-47:268:87//Hs.154326:D42087

[26262] R-PLACE1005799//ESTs, Highly similar to HYPOTHETICAL 68.7 KD PROTEIN ZK757.1 IN CHROMOSOME III [Caenorhabditis elegans]//7.7e-15:88:98//Hs.109857:AA088385

[26263] R-PLACE1005802//ESTs//2.8e-19:208:76//Hs.9271:W30941

[26264] R-PLACE1005803//ESTs//2.6e-75:417:92//Hs.71414:AA131327

[26265] R-PLACE1005804//EST//6.5e-20:182:70//Hs.149844:AI287693

[26266] R-PLACE1005828//ESTs//3.0e-15:194:77//Hs.106236:N50058

[26267] R-PLACE1005834//Retinoblastoma 1 (including osteosarcoma)//0.040:435:58//Hs.75770:L41870

[26268] R-PLACE1005845//EST//5.0e-61:294:99//Hs.133202:AI050965

[26269] R-PLACE1005850//ESTs//3.4e-82:425:96//Hs.7966:AI203471

[26270] R-PLACE1005851//ESTs//2.9e-21:165:84//Hs.23607:N98305

[26271] R-PLACE1005876//ESTs//0.48:296:57//Hs.39140:AI041842

[26272] R-PLACE1005884//ESTs//0.0027:177:66//Hs.150295:AA570558

[26273] R-PLACE1005898//ESTs//1.7e-98:467:98//Hs.159475:AI339981

[26274] R-PLACE1005921//ESTs//5.8e-96:480:95//Hs.30822:AA885501

[26275] R-PLACE1005923//ESTs//1.8e-66:333:96//Hs.150890:AI341793

[26276] R-PLACE1005925//Human Line-1 repeat mRNA with 2 open reading frames//2.8e-27:382:70//Hs.23094:M19503

[26277] R-PLACE1005932//ESTs, Moderately similar to MNK1 [H. sapiens]//1.1e-70:377:93//Hs.5662:AA868361

[26278] R-PLACE1005934//ESTs//1.0e-42:251:91//Hs.25092:AA922142

[26279] R-PLACE1005936//ESTs//1.2e-88:461:94//Hs.94125:N62913

[26280] R-PLACE1005950//ESTs//1.4e-83:533:86//Hs.21148:AI183729

[26281] R-PLACE1005953

[26282] R-PLACE1005955//ESTs, Highly similar to HYPOTHETICAL 54.2 KD PROTEIN IN CDCl2-ORC6 INTERGENIC REGION [Saccharomyces cerevisiae]//2.2e-83:494:88//Hs.108117:AI097079

[26283] R-PLACE1005966//ESTs//1.1e-95:465:97//Hs.98510:AI06239

[26284] R-PLACE1005968//EST//0.26:103:66//Hs.161300:AI420897

[26285] R-PLACE1005990

[26286] R-PLACE1006002//Human mRNA for KIAA0355 gene, complete cds//2.0e-45:481:74//Hs.153014:AB002353

[26287] R-PLACE1006003//ESTs, Highly similar to HYPOTHETICAL 30.3 KD PROTEIN IN APE1/LAP4-CWP1 INTERGENIC REGION [Saccharomyces cerevisiae]//3 .1e-112:593:93//Hs.111449:AI192946

[26288] R-PLACE1006011//ESTs, Moderately similar to NAD(+) ADP-RIBOSYLTRANSFERASE [D. melanogaster]//5.7e-100:596:88//Hs.24284:AA595596

[26289] R-PLACE1006017//ESTs//4.2e-18:296:68//Hs.133350:AI056276

[26290] R-PLACE1006037//ESTs, Weakly similar to T23D8.3 [C. elegans]//4.1e-102:491:98//Hs.61164:AI096332

[26291] R-PLACE1006040//ESTs//1.2e-92:443:98//Hs.111680:N93765

[26292] R-PLACE1006076//ESTs, Moderately similar to !!!! ALU SUBFAMILY SC WARNING ENTRY !!!! [H. sapiens]//2.0e-26:213:77//Hs.139007:H74314

[26293] R-PLACE1006119//ESTs//0.14:257:61//Hs.113149:AA908904

[26294] R-PLACE1006129//ESTs//3.8e-54:285:97//Hs.18827:W68002

[26295] R-PLACE1006139//ESTs, Highly similar to HYPOTHETICAL 52.9 KD PROTEIN IN SAP155-YMR31 INTERGENIC REGION [Saccharomyces cerevisiae]//2.6e-99:560:91//Hs.5249:U55977

[26296] R-PLACE1006143//Amylo-1,6-glucosidase, 4-alpha-glucanotransferase (glycogen debranching enzyme, glycogen storage disease type III)//0.038:463:59//Hs.904:U84010

[26297] R-PLACE1006157//ESTs//0.014:341:58//Hs.121773:AI357886

[26298] R-PLACE1006159//EST//0.00036:247:61//Hs.140054:AA668925

[26299] R-PLACE1006164//ESTs//2.6e-31:362:73//Hs.141024:H07128

[26300] R-PLACE1006167//Homo sapiens chromosome 19, cosmid F23149//5.8e-54:286:94//Hs.152894:AC005239

[26301] R-nnnnnnnnnnnn//ESTs, Highly similar to ALPHA-ADAPTIN [Rattus norvegicus]//2.7e-79:393:96//Hs.19121 All 25280

[26302] R-PLACE1006187//Homo sapiens cyclin E2 mRNA, complete cds//5.1e-118:597:95//Hs.30464:AF091433

[26303] R-PLACE1006195//ESTs, Weakly similar to !!!! ALU SUBFAMILY J WARNING ENTRY!!!! [H. sapiens]//6.8e-94:532:91//Hs.105216:AI361807

[26304] R-PLACE1006196//ESTs//3.2e-66:382:90//Hs.18665:T99507

[26305] R-PLACE1006205//EST//1.7e-89:448:96//Hs.116665:AA669114

[26306] R-PLACE1006223//Human RNaseP protein p38 (RPP38) mRNA, complete cds//0.90:304:58//Hs.94986:U77664

[26307] R-PLACE1006225//ESTs//7.2e-96:474:97//Hs.91165:AI079555

[26308] R-PLACE1006236//ESTs//8.8e-105:535:95//Hs.7919:AI341472

[26309] R-nnnnnnnnnnnn//Homo sapiens BAC clone RG118D07 from 7q31//3.2e-99:497:95//Hs.3781:AC004142

[26310] R-PLACE1006246//ESTs, Weakly similar to CMP-sialic acid transporter [M. musculus]//1.3e-104:532:95//Hs.41151:AI301961

[26311] R-PLACE1006248//Homo sapiens mRNA for KIAA0648 protein, partial cds//3.0e-97:499:95//Hs.31921:AB014548

[26312] R-PLACE1006262//ESTs, Moderately similar to !!!! ALU SUBFAMILY SC WARNING ENTRY !!!! [H. sapiens]//1.6e-07:321:62//Hs.53057:W67839

[26313] R-PLACE1006288//Voltage-dependent anion channel I//3.8e-100:605:88//Hs.2060:L06132

[26314] R-PLACE1006318//ESTs//2.4e-102:536:94//Hs.8109:AA005265

[26315] R-PLACE1006325//ESTs//5.2e-105:518:96//Hs.102319:AI246503

[26316] R-PLACE1006335//ESTs//5.l e-45:254:93//Hs.153585:R70900

[26317] R-PLACE1006357//EST//6.5e-09:309:62//Hs.132493:AA923168

[26318] R-PLACE1006360//Human mRNA for KIAA0090 gene, partial cds//0.0097:381:58//Hs.154797:D42044

[26319] R-PLACE1006368//ESTs//7.9e-85:412:97//Hs.150587:AI079284

[26320] R-PLACE1006370//ESTs//7.7e-74:442:88//Hs.143671:W61053

[26321] R-PLACE1006382

[26322] R-PLACE1006385//ESTs//5.3e-06:346:61//Hs.163706:AA515748

[26323] R-PLACE1006412//EST//7.7e-46:306:86//Hs.149580:AI281881

[26324] R-PLACE1006414//Homo sapiens LIM protein mRNA, complete cds//4.1e-43:551:69//Hs.154103:AF061258

[26325] R-PLACE1006438//ESTs//1.1e-77:284:86//Hs.24545:AI278629

[26326] R-PLACE1006445//ESTs//4.4e-53:259:99//Hs.24481:AA573139

[26327] R-PLACE1006469//ESTs//9.4e-102:482:98//Hs.7218:AA936961

[26328] R-PLACE1006470//ESTs//1.0:271:57//Hs.144517:AA938297

[26329] R-PLACE1006482//ESTs//4.0e-61:354:92//Hs.51305:T47418

[26330] R-PLACE1006492//EST//1.8e-09:48:91//Hs.144451:AA827722

[26331] R-PLACE1006506//ESTs//0.012:161:61//Hs.145333:AI251374

[26332] R-PLACE1006521//Human mRNA for KIAA0013 gene, complete cds//2.1e-15:415:63//Hs.48824:D87717

[26333] R-PLACE1006531//ESTs//5.6e-31:213:87//Hs.125153:AA453723

[26334] R-PLACE1006534//ESTs//6.5e-101:512:95//Hs.27763:W46368

[26335] R-PLACE1006540//ESTs//7.3e-40:320:79//Hs.121659:H02532

[26336] R-PLACE1006552//EST//0.38:418:56//Hs.140470:AA765214

[26337] R-PLACE1006598//ESTs//4.0e-80:409:95//Hs.142868:All 28443

[26338] R-PLACE1006615//Homo sapiens eukaryotic translation initiation factor eIF3, p35 subunit mRNA, complete cds//9.3e-118:590:95//Hs.155377:U97670

[26339] R-PLACE1006617//ESTs//8.1e-31:246:83//Hs.139128:AA205322

[26340] R-PLACE1006626//ESTs//0.90:98:68//Hs.96322:AA541615

[26341] R-PLACE1006629//Human mRNA for KIAA0386 gene, complete cds//5.3e-33:315:78//Hs.101359:AB002384

[26342] R-PLACE1006640//ESTs//3.7e-26:137:100//Hs.32672:W16522

[26343] R-PLACE1006673//Interleukin 10//8.4e-47:330:83//Hs.2180:M57627

[26344] R-PLACE1006678//ESTs//1.1e-13:87:98//Hs.34035:D87736

[26345] R-PLACE1006704//ESTs//2.6e-65:394:89//Hs.30582:D 12214

[26346] R-PLACE1006731//Homo sapiens clone 23923 mRNA sequence//1.9e-102:486:98//Hs.12472:AF038172

[26347] R-PLACE1006754//EST//1.0e-61:381:89//Hs.14727:T83861

[26348] R-PLACE1006760//Homo sapiens clone 24800 mRNA sequence//3.8e-73:394:93//Hs.7252:AF070622

[26349] R-PLACE1006779//ESTs//1.4e-69:405:90//Hs.136235:AA262658

[26350] R-PLACE1006782//EST//1.8e-25:197:86//Hs.137257:N33234

[26351] R-PLACE1006792//ESTs//1.8e-43:317:84//Hs.139190:N55515

[26352] R-PLACE1006795//ESTs//6.4e-68:350:95//Hs.11092:AA916335

[26353] R-PLACE1006800//ESTs//1.9e-55:268:100//Hs.126695:AA917989

[26354] R-PLACE1006805//ESTs//6.6e-91:484:93//Hs.94262:AA768847

[26355] R-PLACE1006815//ESTs//2.1e-49:364:83//Hs.142031:AA809159

[26356] R-PLACE1006819//ESTs, Highly similar to LINE-1 REVERSE TRANSCRIPTASE HOMOLOG [Homo sapiens]//1.0e-87:481:92//Hs.141263:H64113

[26357] R-PLACE1006829//ESTs//5.7e-43:332:83//Hs.19906:AA456933

[26358] R-PLACE1006860//ESTs//0.96:138:63//Hs.136649:AA828359

[26359] R-PLACE1006867//ESTs//1.4e-98:478:97//Hs.10299:N35008

[26360] R-PLACE1006878//EST//8.4e-48:243:97//Hs.54970:N93536

[26361] R-PLACE1006883//EST//3.1e-46:300:88//Hs.162404:AA573131

[26362] R-nnnnnnnnnnnn//ESTs//3.0e-95:496:94//Hs.47546:AA181348

[26363] R-PLACE1006904//ESTs//5.8e-18:304:68//Hs.125816:AA806089

[26364] R-PLACE1006917//Endothelin receptor type B//0.00012:451:60//Hs.82002:D 13168

[26365] R-PLACE1006932//ESTs//4.6e-56:285:96//Hs.114727:AI379514

[26366] R-PLACE1006935//ESTs//3.6e-12:157:73//Hs.161714:AA229078

[26367] R-nnnnnnnnnnnn//Human mRNA for KIAA0201 gene, complete cds//3.2e-25:494:63//Hs.36927:D86956

[26368] R-PLACE1006961//Tyrosine aminotransferase//2.5e-46:471:74//Hs.2999:X52520

[26369] R-PLACE1006962//ESTs, Moderately similar to plakophilin 2b [H. sapiens]//9.0e-29:324:68//Hs.154257:AI275982

[26370] R-PLACE1006966//ESTs//4.5e-99:470:99//Hs.46913:AI0017636

[26371] R-PLACE1006989//ESTs//2.2e-68:353:97//Hs.14394:R61257

[26372] R-PLACE1007014//ESTs//3 .4e-86:457:94//Hs.129819:AA838366

[26373] R-PLACE1007021//ESTs//1.6e-93:539:90//Hs.7111:U55971

[26374] R-PLACE1007045//Human Line-1 repeat mRNA with 2 open reading frames//6.6e-83:584:82//Hs.23094:M19503

[26375] R-PLACE1007053//ESTs//4.2e-85:550:88//Hs.7984:AI202575

[26376] R-PLACE1007097//ESTs//6.4e-78:493:86//Hs.56406:N91027

[26377] R-PLACE1007105//ESTs//5.3e-70:381:91//Hs.22605:N74202

[26378] R-PLACE1007111//ESTs//8.6e-75:358:99//Hs.145629:AA398646

[26379] R-PLACE1007112//ESTs//6.9e-69:371:94//Hs.71922:AA148417

[26380] R-PLACE1007132//ESTs//1.2e-36:373:69//Hs.10762:W28948

[26381] R-PLACE1007140//ESTs//1.7e-70:360:96//Hs.56179:W56794

[26382] R-PLACE1007178//EST//0.68:85:65//Hs.147010:AI184765

[26383] R-PLACE1007226//ESTs//3.1e-78:452:90//Hs.8033:N94998

[26384] R-PLACE1007238//ESTs//5.2e-70:362:95//Hs.85636:AA740619

[26385] R-PLACE1007239//Human mRNA for transcription elongation factor S-II, hS-II-T1, complete cds//6.3e-93:534:89//Hs.80598:D50495

[26386] R-PLACE1007242//ESTs//1.2e-80:390:98//Hs.117325:AA699450

[26387] R-PLACE1007243//ESTs, Weakly similar to transporter protein [H. sapiens]//3.7e-73:357:98//Hs.18272:N78499

[26388] R-PLACE1007257//Homo sapiens mRNA for dia-156 protein//4.3e-85:487:91//Hs.121556:Y15909

[26389] R-PLACE1007274//ESTs//4.3e-79:430:93//Hs.146023:AI275071

[26390] R-PLACE1007276//ESTs//1.5e-33:338:7411Hs.142850:R38419

[26391] R-PLACE1007282//ESTs//4.8e-98:532:93//Hs.10071:AA100812

[26392] R-PLACE1007286//Human mRNA for KIAA0118 gene, partial cds//2.9e-50:518:74//Hs.154326:D42087

[26393] R-PLACE1007301

[26394] R-PLACE1007317

[26395] R-PLACE1007342

[26396] R-PLACE1007346//Homo sapiens estrogen-responsive B box protein (EBBP) mRNA, complete cds//1.2e-66:367:91//Hs.76596:AF096870

[26397] R-PLACE1007367//ESTs, Weakly similar to !!!! ALU SUBFAMILY J WARNING ENTRY!!!! [H. sapiens]//2.2e-98:488:96//Hs.24359:AA699594

[26398] R-PLACE1007375//ESTs//2.3e-67:375:92//Hs.33368:AA206614

[26399] R-PLACE1007386//ESTs//0.020:242:62//Hs.42768:AI129945

[26400] R-PLACE1007402//ESTs//1.6e-91:441:97//Hs.26243:AA455877

[26401] R-PLACE1007409//Homo sapiens mitoxantrone resistance protein 1 mRNA, partial sequence//2.4e- 113:590:94//Hs.14387:AF093771

[26402] R-PLACE1007416//ESTs, Weakly similar to DIPEPTIDYL PEPTIDASE IV [H. sapiens]//3.8e-115:579:95//Hs.72165:AI243857

[26403] R-PLACE1007450//Human macrophage-derived chemokine precursor (MDC) mRNA, complete cds//2.7e-38:311:80//Hs.97203:U83171

[26404] R-PLACE1007452//EST//2.5e-42:386:77//Hs.140562:AA826514

[26405] R-PLACE1007460//ESTs//4.9e-87:434:95//Hs.28472:AI028230

[26406] R-PLACE1007478

[26407] R-PLACE1007484//ESTs//6.8e-08:64:92//Hs.100251:AA535975

[26408] R-PLACE1007488//Dystrophin (muscular dystrophy, Duchenne and Becker types), includes DXS142, DXS164, DXS206, DXS230, DXS239, DXS268, DXS269, DXS270, DXS272//0.26:411:60//Hs.79012:M18533

[26409] R-PLACE1007507//ESTs//2.2e-11:136:76//Hs.128815:AA678072

[26410] R-PLACE1007511//ESTs, Highly similar to KERATIN, TYPE I CYTOSKELETAL 14 [Homo sapiens]//1.5e-41:261:89//Hs.9029:W57657

[26411] R-PLACE1007524//ESTs//5.8e-45:297:87//Hs.154923:AA491377

[26412] R-PLACE1007525//Human mRNA for KIAA0118 gene, partial cds//1.9e-44:422:75//Hs.154326:D42087

[26413] R-PLACE1007544//ESTs//8.4e-59:327:93//Hs.27410:N25612

[26414] R-PLACE1007547//EST//0.00010:107:71//Hs.146867:A 161404

[26415] R-PLACE1007557//ESTs//1.6e-43:356:79//Hs.44702 All 48840

[26416] R-PLACE1007583//ESTs//1.7e-41:214:97//Hs.155071:AA584257

[26417] R-PLACE1007598//Homo sapiens clone 23939 mRNA sequence//4.8e-104:554:93//Hs.21838:AF038179

[26418] R-PLACE1007618//Lymphocyte cytosolic protein I (L-plastin)//0.54:161:65//Hs.76506:J02923

[26419] R-PLACE1007621//Homo sapiens clone 23859 mRNA sequence//4.8e-105:537:94//Hs.151046:AF038176

[26420] R-PLACE1007632

[26421] R-PLACE1007645//ESTs//0.99:187:62//Hs.163453:AI344106

[26422] R-PLACE1007649//ESTs//2.2e-108:561:94//Hs.24398:AI262946

[26423] R-PLACE1007677//ESTs, Moderately similar to !!!! ALU SUBFAMILY SB2 WARNING ENTRY !!!! [H. sapiens]//9.0e-37:190:97//Hs.23437:AA707331

[26424] R-PLACE1007688//ESTs//7.5e-79:409:95//Hs.6166:AI376944

[26425] R-PLACE1007690//ESTs, Weakly similar to NADH-UBIQUINONE OXIDOREDUCTASE CHAIN 5 [Ascaris suum]//3.4e-61:384:89//Hs.92918:AA133274

[26426] R-PLACE1007697//ESTs, Highly similar to GCN20 PROTEIN [Saccharomyces cerevisiae]//1.8e-84:501:88//Hs.91251:U66685

[26427] R-PLACE1007705//Human mRNA for apolipoprotein E receptor 2, complete cds//0.43:307:59//Hs.54481:D86407

[26428] R-PLACE1007706//Homo sapiens metalloprotease 1 (MP1) mRNA, complete cds//5.7e-75:374:96//Hs.4812:AF061243

[26429] R-PLACE1007725//ESTs, Weakly similar to No definition line found [C. elegans]//3.1e-39:253:88//Hs.108797:AA476815

[26430] R-PLACE1007729//ESTs//2.7e-44:392:79//Hs.142375:AA398619

[26431] R-PLACE1007730//Homo sapiens mRNA for KIAA0685 protein, complete cds//6.7e-94:556:89//Hs.153121:AB014585

[26432] R-PLACE1007737//ESTs//1.1e-41:345:80//Hs.114671:N39322

[26433] R-PLACE1007743//ESTs//2.8e-17:98:100//Hs.124258:AA976778

[26434] R-PLACE1007746//ESTs//5.3e-69:413:90//Hs.5297:AA156903

[26435] R-PLACE1007791//ESTs, Weakly similar to TEICHOIC ACID BIOSYNTHESIS PROTEIN A [Bacillus subtilis]//8.6e-27:143:98//Hs.144194:AA706337

[26436] R-PLACE1007807//Human Line-1 repeat mRNA with 2 open reading frames//9.9e-45:428:76//Hs.23094:M 19503

[26437] R-PLACE1007810//ESTs//5.9e-15:143:82//Hs.126257:AI279044

[26438] R-PLACE1007829//ESTs//2.2e-22:190:84//Hs.142707:W24050

[26439] R-PLACE1007843//ESTs//5.3e-110:556:95//Hs.107287:AI308839

[26440] R-PLACE1007846//Human Line-1 repeat mRNA with 2 open reading frames//1.7e-95:525:91//Hs.23094:M19503

[26441] R-PLACE1007852//ESTs//4.5e-14:174:75//Hs.153419:N52017

[26442] R-PLACE1007858//Homo sapiens mRNA for KIAA0766 protein, complete cds//2.1e-111:574:94//Hs.28020:AB018309

[26443] R-PLACE1007866//EST//1.8e-48:262:96//Hs.141009:HO 178

[26444] R-PLACE1007877//ESTs//1.2e-94:478:96//Hs.5999:AI207832

[26445] R-PLACE1007897//ESTs//2.3e-92:437:99//Hs.122843:AI189060

[26446] R-PLACE1007908//Homo sapiens mRNA, chromosome I specific transcript KIAA0487//2.8e-89:460:95//Hs.92381:AB007956

[26447] R-PLACE1007946//ESTs//2.8e-28:172:78//Hs.126784:AA521510

[26448] R-PLACE1007954//ESTs//6.1e-72:366:95//Hs.27842:AI217966

[26449] R-PLACE1007955//Homo sapiens cyclin-D binding Myb-like protein mRNA, complete cds//3.9e-103:509:96//Hs.5671:AF084530

[26450] R-PLACE1007958//Homo sapiens cAMP-specific phosphodiesterase 8B (PDE8B) mRNA, partial cds//7.2e-89:465:93//Hs.78106:AF079529

[26451] R-PLACE1007969//ESTs, Weakly similar to F35C12.2 [C. elegans]//1.4e-113:534:99//Hs.44268:AA455900

[26452] R-PLACE1007990//ESTs, Highly similar to DOSAGE COMPENSATION REGULATOR [Drosophila melanogaster]//3.8e-97:493:95//Hs.6141:U69564

[26453] R-PLACE1008000//ESTs//0.00013:241:65//Hs.44369:AI206835

[26454] R-PLACE1008002//ESTs//2.2e-83:397:98//Hs.28780:AI263612

[26455] R-PLACE1008044//ESTs, Moderately similar to NUCLEAR PORE COMPLEX PROTEIN NUP 107 [R. norvegicus]//2.0e-115:575:95//Hs.92395:AA779854

[26456] R-PLACE1008045//EST//2.6e-89:465:94//Hs.47374:N51935

[26457] R-PLACE1008080//EST//0.27:118:65//Hs.144110:AI054269

[26458] R-PLACE1008095//ESTs//5.5e-23:268:73//Hs.152525:AA516469

[26459] R-PLACE1008111//ESTs, Weakly similar to oxidoreductase [H. sapiens]//4.4e-108:537:96//Hs.28877:AI309334

[26460] R-PLACE1008122//ESTs//6.5e-103:531:94//Hs.34737:A1028617

[26461] R-PLACE1008129//ESTs//0.76:96:66//Hs.65373:AA883511

[26462] R-PLACE1008132//ESTs//5.9e-05:113:72//Hs.13014:W26381

[26463] R-PLACE1008177//ESTs//7.2e-107:557:93//Hs.132851:A1028266

[26464] R-PLACE1008181//ESTs//5.3e-97:473:97//Hs.57483:AA776267

[26465] R-PLACE1008198//ESTs//3.9e-16:120:85//Hs.9142:AA662107

[26466] R-nnnnnnnnnnnn//Homo sapiens mRNA for KIAA0530 protein, partial cds//1.6e-104:551:93//Hs.10801 AB011102

[26467] R-PLACE1008209//ESTs//1.2e-72:366:96//Hs.92308:AI052701

[26468] R-PLACE1008231//ESTs//1.2e-70:363:94//Hs.25094:R80871

[26469] R-PLACE1008244//ESTs//1.3e-98:543:92//Hs.25130:AA218990

[26470] R-PLACE1008273//ESTs//6.1e-16:153:79//Hs.115987:AA483808

[26471] R-nnnnnnnnnnnn

[26472] R-PLACE1008280//ESTs//1.3e-66:353:94//Hs.156376:AI338705

[26473] R-PLACE1008309//ESTs//2.8e-100:511:95//Hs.45080:N49852

[26474] R-PLACE1008329//V-myc avian myelocytomatosis viral oncogene homolog//0.53:206:62//Hs.79070:K02276

[26475] R-PLACE1008330//ESTs, Weakly similar to EOSINOPHIL LYSOPHOSPHOLIPASE [H. sapiens]//8.6e-79:297:91//Hs.146477:AI128445

[26476] R-PLACE1008331//ESTs//0.98:156:62//Hs.108548:AA081656

[26477] R-PLACE1008356//Homo sapiens mRNA for KIAA0679 protein, partial cds//2.1e-99:556:90//Hs.5734:AB014579

[26478] R-PLACE1008368//EST//0.0027:198:63//Hs.160868:AI359052

[26479] R-PLACE1008369//ESTs//5.4e-28:167:92//Hs.19530:AA480009

[26480] R-PLACE1008392//ESTs, Moderately similar to !!!! ALU SUBFAMILY SC WARNING ENTRY !!!! [H. sapiens]//2.0e-41:448:72//Hs.139007:H74314

[26481] R-PLACE1008398//ESTs, Highly similar to Mig-6//1.4e-103:529:94//Hs.11169:AA156242

[26482] R-PLACE1008401//ESTs, Weakly similar to !!!! ALU SUBFAMILY J WARNING ENTRY!!!! [H. sapiens]//1.2e-81:536:87//Hs.7570:W31010

[26483] R-nnnnnnnnnnnn//Homo sapiens mRNA for p115, complete cds//5.1e-103:521:95//Hs.7763:D86326

[26484] R-PLACE1008405//ESTs//1.2e-89:485:92//Hs.138241:AA767440

[26485] R-PLACE1008424//ESTs//6.7e-97:508:93//Hs.6709:AI379778

[26486] R-PLACE1008426//ESTs//5.5e-30:174:92//Hs.7946:AA651757

[26487] R-PLACE1008429//ESTs//2.1e-12:188:71//Hs.140769:AA931562

[26488] R-PLACE1008437//ESTs//7.1e-54:266:98//Hs.13068:AA001928

[26489] R-PLACE1008455//ESTs//4.7e-69:471:85//Hs.28337:AA210761

[26490] R-PLACE1008457//EST//8.6e-14:202:71//Hs.149887:AI289387

[26491] R-PLACE1008465//ESTs//3.8e-80:426:93//Hs.153146:AI299636

[26492] R-PLACE1008488//ESTs//7.9e-73:388:94//Hs.97268:AA292180

[26493] R-PLACE1008524//ESTs//7.4e-107:545:95//Hs.10441:N62816

[26494] R-PLACE1008531//ESTs//3.8e-68:427:87//Hs.56607:H23560

[26495] R-PLACE1008532

[26496] R-PLACE1008533//ESTs//2.5e-52:318:88//Hs.7274:AA476850

[26497] R-PLACE1008568//ESTs//3.2e-99:486:97//Hs.84414:AI423223

[26498] R-PLACE1008584//EST//2.2e-18:154:68//Hs.141498:N50064

[26499] R-PLACE1008621//ESTs, Weakly similar to line-1 protein ORF1 [H. sapiens]//8.6e-67:483:82//Hs.140416:AA778649

[26500] R-nnnnnnnnnnnn

[26501] R-PLACE1008626//ESTs//4.7e-73:372:95//Hs.23491:AA642454

[26502] R-PLACE1008627//ESTs//1.6e-90:475:93//Hs.102401:AI004972

[26503] R-PLACE1008629//ESTs//8.0e-93:492:93//Hs.20843:AA699512

[26504] R-PLACE1008630//ESTs//1.0e-94:453:98//Hs.34840:AI279612

[26505] R-PLACE1008643//Human mRNA for KIAA0355 gene, complete cds//2.8e-49:422:79//Hs.153014:AB002353

[26506] R-PLACE1008650//Homo sapiens pleiotropic regulator 1 (PLRG1) mRNA, complete cds//7.9e-90:434:97//Hs.147967:AF044333

[26507] R-PLACE1008693//ISLET AMYLOID POLYPEPTIDE PRECURSOR//1.8e-41:505:71//Hs.51048:X68830

[26508] R-PLACE1008696//Cytochrome P450, subfamily I (aromatic compound-inducible), polypeptide 2//1.7e-51:316:76//Hs.1361:M55053

[26509] R-PLACE1008715EST//0.63:114:64//Hs.121353:AA758600

[26510] R-PLACE1008748//ESTs, Weakly similar to !!!! ALU CLASS B WARNING ENTRY!!!! [H. sapiens]//2.3e-40:281:83//Hs.142209:AA873303

[26511] R-PLACE1008757//ESTs//1.4e-45:226:99//Hs.22822:H06408

[26512] R-PLACE1008790//ESTs//0.035:67:76//Hs.153554:AI286313

[26513] R-PLACE1008798//ESTs//4.9e-59:285:99//Hs.49018:N79930

[26514] R-PLACE1008807//ESTs//1.7e-82:413:96//Hs.130745:AA573217

[26515] R-PLACE1008808//Homo sapiens putative checkpoint control protein HRADI mRNA, complete cds//1.1e-98:499:95//Hs.7179:AF011905

[26516] R-PLACE1008813//ESTs, Weakly similar to coded for by C. elegans cDNA cm10e3 [C. elegans]//4.2e-92:490:93//Hs.110454:H11810

[26517] R-PLACE1008851//ESTs//2.4e-84:421:95//Hs.158893:AI378428

[26518] R-nnnnnnnnnnnn

[26519] R-PLACE1008867//ESTs//1.1e-77:400:95//Hs.44198:A1093502

[26520] R-PLACE1008887//Oxytocin receptor//1.1e-43:601:67//Hs.2820:X64878

[26521] R-PLACE1008902//ESTs//0.023:208:61//Hs.154164:AI246893

[26522] R-PLACE1008920//Homo sapiens mRNA for KIAA0765 protein, partial cds//2.6e-56:344:89//Hs.62318:AB018308

[26523] R-PLACE1008925//ESTs//0.17:294:57//Hs.105113:AA457018

[26524] R-PLACE1008934//ESTs//2.0e-61:339:92//Hs.100448:AA622653

[26525] R-PLACE1008941//ESTs, Moderately similar to ATP-BINDING CASSETTE TRANSPORTER 2 [Mus musculus]//1.3e-119:488:63//Hs.15780:U66680

[26526] R-PLACE1008947//ESTs//1.3e-81:385:99//Hs.71574:AI376573

[26527] R-PLACE1009020//ESTs//2.9e-79:419:94//Hs.121816:AA775419

[26528] R-PLACE1009027//Homo sapiens mRNA for doublecortin//3.1e-82:434:94//Hs.34780:AJ003112

[26529] R-PLACE1009039//ESTs//2.8e-83:448:92//Hs.129179:AA988520

[26530] R-PLACE1009045//ESTs//1.6e-64:318:97//Hs.103423:AA814195

[26531] R-PLACE1009048//ESTs//2.7e-17:403:63//Hs.149343:AI249139

[26532] R-PLACE1009050//ESTs//2.0e-88:475:92//Hs.122925:AA909008

[26533] R-PLACE1009060//ESTs, Highly similar to HYPOTHETICAL 98.3 KD PROTEIN R10E12.1 IN CHROMOSOME III [Caenorhabditis elegans]//1.2e-112:555:96//Hs.9663:AA527142

[26534] R-PLACE1009090//ESTs//5.0e-13:175:75//Hs.140608:N53448

[26535] R-PLACE1009094//Human splicing factor SRp30c mRNA, complete cds//0.98:161:63//Hs.77608:AL021546

[26536] R-PLACE1009099//ESTs, Highly similar to MKR2 PROTEIN [Mus musculus]//0.037:63:84//Hs.39943:AA203136

[26537] R-PLACE1009110//EST//5.8e-17:307:65//Hs.117264:AA682549

[26538] R-PLACE1009111//ESTs//1.9e-57:349:90//Hs.11260:N98983

[26539] R-PLACE1009130//ESTs, Weakly similar to hypothetical protein 2 [H. sapiens]//6.5e-97:501:94//Hs.1123:AA703945

[26540] R-PLACE1009150//LAMIN B1//0.064:393:60//Hs.89497:L37747

[26541] R-PLACE1009155//ESTs, Moderately similar to ovarian-specific protein [R. norvegicus]//2.5e-36:163:82//Hs.93332:AA811920

[26542] R-PLACE1009158//ESTs//0.30:149:65//Hs.155796:R80005

[26543] R-PLACE1009166//ESTs//3.3e-34:292:77//Hs.140255:AA708322

[26544] R-PLACE1009172//EST//8.9e-21:364:67//Hs.142557:AA464948

[26545] R-PLACE1009174//ESTs//2.9e-18:274:70//Hs.139241:AA283707

[26546] R-PLACE1009183//ESTs//2.3e-44:297:87//Hs.136839:H93717

[26547] R-PLACE1009186//ESTs, Weakly similar to No definition line found [C. elegans]//1.5e-109:572:94//Hs.54943:Z78396

[26548] R-PLACE1009190//ESTs//2.6e-53:318:90//Hs.25245:AA176701

[26549] R-PLACE1009200//H. sapiens mRNA for sortilin//3.2e-33:195:92//Hs.104247:X98248

[26550] R-PLACE1009230//ESTs//3.0e-31:153:92//Hs.124116:AA772680

[26551] R-PLACE1009246//ESTs//2.7e-90:488:92//Hs.10706:AA909018

[26552] R-PLACE1009308//ESTs//0.022:46:97//Hs.36545:AA075423

[26553] R-PLACE1009319//ESTs//7.7e-99:533:92//Hs.109654:N91279

[26554] R-PLACE1009328//Human Line-1 repeat mRNA with 2 open reading frames//7.3e-82:578:82//Hs.23094:M19503

[26555] R-PLACE1009335//EST//1.3e-64:311:99//Hs.130558:AI004397

[26556] R-PLACE1009338//ESTs//6.0e-70:386:93//Hs.3542:AI015782

[26557] R-PLACE1009368//ESTs//1.4e-18:107:98//Hs.133303:WO4760

[26558] R-PLACE1009375//ESTs//8.9e-36:313:76//Hs.24608:AA161260

[26559] R-PLACE1009388//EST//4.4e-11:101:83//Hs.147074:AI188883

[26560] R-PLACE1009398//ESTs//5.7e-63:335:93//Hs.149003:A1243186

[26561] R-nnnnnnnnnnnn//ESTs//3.6e-94:452:98//Hs.103177:W72798

[26562] R-PLACE1009410//ESTs//2.2e-112:553:96//Hs.61779:AA195255

[26563] R-PLACE1009434//EST//3.4e-15:109:74//Hs.103742:U48632

[26564] R-PLACE1009443//EST//7.5e-61:302:98//Hs.157787:AI361269

[26565] R-PLACE1009444//PHOSPHATIDYLINOSITOL 4-KINASE ALPHA//6.6e-85:479:90//Hs.76987:AF012872

[26566] R-PLACE1009459//ESTs//9.3e-86:437:95//Hs.104871:AI161427

[26567] R-PLACE1009476//Homo sapiens Chromosome 16 BAC clone CIT987SK-A-67A1//1.3e-42:266:89//Hs.155049:AC004531

[26568] R-PLACE1009477//ESTs//2.0e-50:367:82//Hs.152788:AA630925

[26569] R-PLACE1009493//ESTs//4.5e-14:150:78//Hs.143918:AA699596

[26570] R-PLACE1009524//ESTs//2.9e-97:454:99//Hs.7189:AA767698

[26571] R-PLACE1009539//ESTs//9.1e-94:454:97//Hs.154706:AI262131

[26572] R-PLACE1009542//Homo sapiens apoptotic protease activating factor 1 (Apaf-1) mRNA, complete cds//1.4e-10:289:63//Hs.77579:AF013263

[26573] R-PLACE1009571//ESTs//2.1e-23:125:100//Hs.41767:AA732326

[26574] R-PLACE1009581//ESTs, Weakly similar to FIBRINOGEN ALPHA AND ALPHA-E CHAIN PRECURSORS [H. sapiens]//0.0012:56:91//Hs.12151:AA001818

[26575] R-PLACE1009595//Homo sapiens mRNA for KIAA0635 protein, complete cds//6.0e-42:547:70//Hs.69157:AB014535

[26576] R-PLACE1009596//ESTs//1.9e-102:588:90//Hs.142395:A1374735

[26577] R-PLACE1009607//ESTs//0.0093:107:70//Hs.70932:AA126482

[26578] R-PLACE1009613//ESTs//7.5e-101:488:97//Hs.5905:AA946680

[26579] R-PLACE1009621//EST//0.99:261:60//Hs.149030:AI243338

[26580] R-PLACE1009622//ESTs//8.0e-93:508:92//Hs.20967:AI422858

[26581] R-PLACE1009637//EST//8.7e-90:442:97//Hs.121372:AA758701

[26582] R-PLACE1009639//EST//8.5e-49:279:93//Hs.117447:R27213

[26583] R-PLACE1009659//Homo sapiens mRNA for KIAA0587 protein, complete cds//3.3e-109:589:92//Hs.21862:AB011159

[26584] R-PLACE1009665//ESTs, Weakly similar to line-1 protein ORF1 [H. sapiens]//9.9e-62:483:79//Hs.140416:AA778649

[26585] R-PLACE1009670//Homo sapiens genethonin 1 mRNA, complete cds//6.6e-63:310:97//Hs.109590:AF062534

[26586] R-PLACE1009708//ESTs//3.0e-94:471:96//Hs.40091:N48582

[26587] R-PLACE1009721//ESTs, Weakly similar to MSF1 PROTEIN [S. cerevisiae]//4.2e-98:529:92//Hs.3945:AA004210

[26588] R-PLACE1009731//ESTs, Weakly similar to immune associated protein 38 [M. musculus]//6.8e-85:489:89//Hs.26194:AA033989

[26589] R-PLACE1009763//Homo sapiens UBA3 (UBA3) mRNA, complete cds//2.0e-117:598:95//Hs.154320:AF046024

[26590] R-PLACE1009794//ESTs//7.9e-102:529:95//Hs.42927:N20989

[26591] R-nnnnnnnnnnnn//Human DNA sequence from clone 1189B24 on chromosome Xq25-26.3. Contains NADH-Ubiquinone Oxidoreductase MLRQ subunit (EC 1.6.5.3, EC 1.6.99.3, CI-MLRQ), Tubulin Beta and Proto-oncogene Tyrosine-protein Kinase FER (EC 2.7.1.112, P94-FER, C-FER, TYK3) pseudogenes, and part of a novel gene similar to hypothetical proteins S. pombe C22F3.14C and C. elegans C16A3.8. Contains ESTs and GSSs//1.1e-113:549:97//Hs.16411:AL030996

[26592] R-PLACE1009845//ESTs//9.5e-106:560:93//Hs.117751:AI056868

[26593] R-PLACE1009879//ESTs//1.8e-61:399:86//Hs.141012:R68748

[26594] R-PLACE1009886//EST//0.54:153:64//Hs.144281:AA081328

[26595] R-PLACE1009888//ESTs//2.7e-105:520:97//Hs.108646:AA613031

[26596] R-nnnnnnnnnnnn//ESTs, Weakly similar to similar to mouse MMR1 [C. elegans]//1.6e-114:594:94//Hs.67466:AI219740

[26597] R-PLACE1009921//ESTs//7.6e-05:291:60//Hs.124786:AA825563

[26598] R-PLACE1009924//EST//1.2e-42:216:98//Hs.31742:H20276

[26599] R-PLACE1009925//ESTs//5.4e-30:154:100//Hs.114605:AI304317

[26600] R-PLACE1009935//ESTs//1.4e-83:417:97//Hs.131755:AA496543

[26601] R-PLACE1009947//Keratin 9//1.0:273:61//Hs.2783:Z29074

[26602] R-PLACE1009971//ESTs//1.5e-87:424:98//Hs.13781:AI160540

[26603] R-PLACE1009992//ESTs//1.3e-87:531:87//Hs.55044:AA460698

[26604] R-PLACE1009995//ESTs//1.3e-103:575:91//Hs.71218:C75347

[26605] R-PLACE1009997//Small inducible cytokine A5 (RANTES)//1.1e-42:286:86//Hs.155464:AF088219

[26606] R-PLACE1010023//ESTs, Weakly similar to C27F2.7 gene product [C. elegans]//1.7e-17:137:86//Hs.7049:AI141736

[26607] R-PLACE1010031//ESTs//0.22:191:62//Hs.127787:AA832204

[26608] R-PLACE1010053//ESTs, Moderately similar to spermatid perinuclear RNA-binding protein Spnr [M. musculus]//7.6e-104:546:94//Hs.8215:AA521150

[26609] R-PLACE1010069//ESTs//0.99:173:59//Hs.21415:AI150905

[26610] R-PLACE1010074//Homo sapiens sorting nexin 2 (SNX2) mRNA, complete cds//1.5e-88:543:88//Hs.11183:AF065482

[26611] R-PLACE1010076//ESTs//3.4e-106:530:95//Hs.28005:AA604375

[26612] R-PLACE1010083//ESTs//4.1e-65:395:88//Hs.6103:AA496424

[26613] R-PLACE1010089//ESTs//1.6e-70:348:97//Hs.9011:AA418615

[26614] R-PLACE1010096//ESTs, Highly similar to hypothetical protein, 100K [R. norvegicus]//2.8e-104:565:92//Hs.11469:U69567

[26615] R-PLACE1010102//ESTs//7.7e-50:311:89//Hs.5518:AI052015

[26616] R-PLACE1010105//ESTs//6.0e-94:483:94//Hs.62684:AA806103

[26617] R-PLACE1010106//ESTs, Weakly similar to putative p150 [H. sapiens]//1.6e-107:575:93//Hs.48301:AA122270

[26618] R-PLACE1010134//EST//8.5e-59:314:94//Hs.135005:AI095130

[26619] R-PLACE1010148//A-KINASE ANCHOR PROTEIN 79//0.52:351:56//Hs.48714:M90359

[26620] R-PLACE1010152//ESTs//1.9e-40:240:90//Hs.17054:AI139897

[26621] R-PLACE1010181//ESTs//3.6e-64:307:99//Hs.154163:AJ003313

[26622] R-PLACE1010194//ESTs//2.7e-70:366:96//Hs.5301:T58466

[26623] R-PLACE1010202//ESTs//0.57:120:67//Hs.58873:W95037

[26624] R-PLACE1010231

[26625] R-PLACE1010261//EST//6.9e-50:251:98//Hs.148208:AA897478

[26626] R-PLACE1010270//ESTs//1.9e-87:430:96//Hs.25252:AI079545

[26627] R-PLACE1010274//ESTs//1.9e-57:439:81//Hs.30078:H04535

[26628] R-PLACE1010293//ESTs//8.1e-41:310:81//Hs.146811:AA410788

[26629] R-PLACE1010321//ESTs//5.7e-50:246:99//Hs.151445:AA351081

[26630] R-PLACE1010324//ESTs//0.00025:377:60//Hs.97430:AA398568

[26631] R-PLACE1010329//Small inducible cytokine A5 (RANTES)//2.4e-40:300:82//Hs.155464:AF088219

[26632] R-PLACE1010341//EST, Moderately similar to !!!! ALU SUBFAMILY SQ WARNING ENTRY !!!! [H. sapiens]//9.9e-32:190:77//Hs.152369:AA504818

[26633] R-PLACE1010362//ESTs//8.2e-86:404:99//Hs.25625:AA669327

[26634] R-PLACE1010364//ESTs//1.5e-105:556:93//Hs.12229:AA149594

[26635] R-PLACE1010383//Homo sapiens mRNA for putative lipoic acid synthetase, partial//4.9e-35:166:86//Hs.53531:AJ224162

[26636] R-PLACE1010401//ESTs//2.3e-85:450:93//Hs.23193:AA418152

[26637] R-PLACE1010481//ESTs//0.012:280:59//Hs.5579:AI392816

[26638] R-PLACE1010491//Homo sapiens Cre binding protein-like 2 mRNA, complete cds//2.4e-89:438:96//Hs.13313:AF039081

[26639] R-PLACE1010492

[26640] R-PLACE1010522//EST//0.43:82:68//Hs.89303:AA284031

[26641] R-nnnnnnnnnnnn//ESTs//3 .4e-36:228:89//Hs.128724:AA215455

[26642] R-PLACE1010562//ESTs//4.8e-68:408:90//Hs.17244:W86306

[26643] R-PLACE1010579//EST//0.015:193:63//Hs.67093:C14033

[26644] R-PLACE1010580//ESTs//2.4e-93:445:98//Hs.127325:AA234116

[26645] R-PLACE1010599

[26646] R-PLACE1010616//ESTs//2.9e-101:497:97//Hs.142197:AA573418

[26647] R-PLACE1010622//ESTs//7.1e-23:157:91//Hs.159877:N57895

[26648] R-PLACE1010624//ESTs//1.4e-89:428:98//Hs.116561:AA658475

[26649] R-PLACE1010628//ESTs, Weakly similar to !!!! ALU SUBFAMILY J WARNING ENTRY!!!! [H. sapiens]//6.4e-74:391:95//Hs.163495:W57637

[26650] R-PLACE1010629//ESTs//5.8e-75:359:99//Hs.123630:AI250805

[26651] R-PLACE1010630//ESTs//9.5e-101:519:94//Hs.77873:AA731719

[26652] R-PLACE1010631//Homo sapiens mRNA for KIAA0530 protein, partial cds//8.3e-94:497:93//Hs.10801:AB011102

[26653] R-PLACE1010661//ESTs, Highly similar to TESTIS-SPECIFIC PROTEIN PBS13 [Mus musculus]//4.8e-83:467:91//Hs.22383:R51067

[26654] R-PLACE1010662//ESTs, Weakly similar to UDP-GLUCOSE:GLYCOPROTEIN GLUCOSYLTRANSFERASE PRECURSOR [D. melanogaster]//8.3e-103:538:94//Hs.105794:AA701659

[26655] R-PLACE1010702//Homo sapiens DNA from chromosome 19, BAC 33152//4.8e-46:531:71//Hs.55452:AC003973

[26656] R-PLACE1010714//Human organic anion transporting polypeptide (OATP) mRNA, complete cds//0.0074:351:60//Hs.46440:U21943

[26657] R-PLACE1010720//Homo sapiens chromosome-associated protein-C (hCAP-C) mRNA, partial cds//1.2e-56:300:95//Hs.50758:AF092564

[26658] R-PLACE1010739//Homo sapiens mRNA for oligophrenin 1//2.6e-84:501:88//Hs.158122:AJ001189

[26659] R-PLACE1010743

[26660] R-PLACE1010761//Homo sapiens okadaic acid-inducible phosphoprotein (OA48-18) mRNA, complete cds//5.2e-94:442:96//Hs.3688:AF069250

[26661] R-PLACE1010771//ESTs//3.8e-54:264:99//Hs.27299:AI074024

[26662] R-PLACE1010786//ESTs, Highly similar to MYOSIN HEAVY CHAIN IB [Acanthamoeba castellanii]//7.6e-111:575:94//Hs.10260:AI126627

[26663] R-PLACE1010800//ESTs//1.9e-109:557:95//Hs.11460:AA057558

[26664] R-PLACE1010802//ESTs//0.00021:428:58//Hs.70258:AI091203

[26665] R-PLACE1010811//ESTs//7.4e-73:394:93//Hs.48499:AA428896

[26666] R-PLACE1010833//ESTs//9.0e-33:274:78//Hs.24391:W27472

[26667] R-PLACE1010856//ESTs//5.8e-41:351:81//Hs.17401:W81048

[26668] R-PLACE1010857//ESTs, Weakly similar to T14B4.2 gene product [C. elegans]//1.4e-71:326:92//Hs.3385:N25917

[26669] R-PLACE1010870//ESTs//5.8e-57:303:96//Hs.30503:H05090

[26670] R-PLACE1010877//Homo sapiens mRNA for KIAA0610 protein, partial cds//2.3e-0.101:501:96//Hs.118087:AB011182

[26671] R-PLACE1010891

[26672] R-PLACE1010896//EST//0.0039:249:57//Hs.126090:AA867983

[26673] R-PLACE1010900//Human Xq28 mRNA, complete cds//3.3e-07:106:76//Hs.20136:U46023

[26674] R-PLACE1010916//Plasminogen activator inhibitor, type II (arginine-serpin)//0.25:190:61//Hs.75716:Y00630

[26675] R-PLACE1010917//ESTs//1.3e-82:452:92//Hs.68055:AA081093

[26676] R-PLACE1010925//ESTs//1.1e-92:471:95//Hs.17448:AI125479

[26677] R-PLACE1010926//Homo sapiens mRNA for KIAA0554 protein, partial cds//1.3e-66:402:89//Hs.74750:AB011126

[26678] R-nnnnnnnnnnnn//Homo sapiens intersectin short form mRNA, complete cds//8.9e-82:441:93//Hs.66392:AF064244

[26679] R-PLACE1010944

[26680] R-PLACE1010947//ESTs//6.7e-115:102:91//Hs.116808:AA211519

[26681] R-PLACE1010954//Small inducible cytokine A5 (RANTES)//8.8e-51:278:93//Hs.155464:AF088219

[26682] R-PLACE1010960//ESTs, Highly similar to ACTIN-LIKE PROTEIN 13E [Drosophila melanogaster]//1.0e-103:565:92//Hs.23259:AA532437

[26683] R-PLACE1010965//EST//6.3e-80:447:91//Hs.139529:AA219580

[26684] R-PLACE1011026//ESTs//4.6e-99:463:99//Hs.149732:AI199846

[26685] R-PLACE1011032//ESTs//6.3e-56:295:94//Hs.143576:AI147867

[26686] R-PLACE1011041//ESTs//5.3e-27:168:91//Hs.7936:AA923249

[26687] R-nnnnnnnnnnnn//Homo sapiens mRNA for KIAA0581 protein, partial cds//9.4e-102:563:91//Hs.41143:AB011153

[26688] R-PLACE1011054//EST//1.1e-15:245:69//Hs.112648:AA609135

[26689] R-PLACE1011056//Small inducible cytokine A5 (RANTES)//3.5e-38:285:82//Hs.155464:AF088219

[26690] R-PLACE1011057//ESTs//3.5e-81:410:96//Hs.96499:AA252537

[26691] R-PLACE1011090//ESTs, Weakly similar to !!!! ALU SUBFAMILY J WARNING ENTRY!!!! [H. sapiens]//1.6e-54:398:84//Hs.108740:W20094

[26692] R-PLACE1011109//EST//1.3e-48:321:85//Hs.146794:A1149478

[26693] R-PLACE1011114//ESTs//5.4e-90:475:94//Hs.69331:AA099587

[26694] R-PLACE1011133//ESTs, Highly similar to 40 KD PROTEIN [Boma disease virus]//3.0e-105:552:93//Hs.31257:AA875998

[26695] R-PLACE1011143//ESTs//0.40:127:65//Hs.118701:AA420795

[26696] R-PLACE1011160//Homo sapiens mRNA for HRIHFB2038, partial cds//7.7e-97:534:91//Hs.28719:AB015333

[26697] R-PLACE1011165//ESTs//1.0:135:69//Hs.32163:A1374673

[26698] R-PLACE1011185//ESTs, Weakly similar to !!!! ALU CLASS B WARNING ENTRY!!!! [H. sapiens]//3.4e-85:442:95//Hs.136910:AA810782

[26699] R-PLACE1011203//EST//0.0047:268:60//Hs.68832:AA088438

[26700] R-PLACE1011219//ESTs//7.6e-96:504:93//Hs.124834:AI138671

[26701] R-PLACE1011221//ESTs//5.2e-23:241:78//Hs.26761:AA203299

[26702] R-PLACE1011229//ESTs//1.9e-90:461:95//Hs.132288:AI027693

[26703] R-PLACE1011263//ESTs//6.6e-56:321:93//Hs.158787:W79602

[26704] R-PLACE1011273//ESTs//0.016:131:65//Hs.140466:AA766772

[26705] R-PLACE1011291//EST//8.7e-47:267:91//Hs.158806:AI376913

[26706] R-PLACE1011296//EST//2.7e-38:225:92//Hs.160934:AI376849

[26707] R-PLACE1011310//ESTs//9.1e-37:196:96//Hs.39328:H71807

[26708] R-PLACE1011325//Human clone 23721 mRNA sequence//0.0012:486:58//Hs.83572:U79291

[26709] R-PLACE1011332//ESTs//8.4e-44:217:99//Hs.101365:R60578

[26710] R-PLACE1011340//ESTs, Weakly similar to TEICHOIC ACID BIOSYNTHESIS PROTEIN A [Bacillus subtilis]//3.4e-92:452:97//Hs.144194:AA706337

[26711] R-PLACE1011375//ESTs//2.2e-35:195:96//Hs.106486:H11376

[26712] R-PLACE1011399//ESTs//0.00096:224:67//Hs.151643:AA001194

[26713] R-PLACE1011419//ESTs//4.9e-50:267:95//Hs.7045:AA167337

[26714] R-nnnnnnnnnnnn//Homo sapiens mRNA for KIAA0530 protein, partial cds//4.8e-114:600:94//Hs.10801:AB011102

[26715] R-PLACE1111452//Homo sapiens mRNA for KIAA0707 protein, partial cds//3.7e-32:310:76//Hs.138488:AB014607

[26716] R-PLACE1001465//ESTs//4.5e-86:471:93//Hs.144519:R70887

[26717] R-PLACE1011472//Homo sapiens mRNA for KIAA0712 protein, complete cds//2.6e-104:515:96//Hs.111138:AB018255

[26718] R-PLACE1011492//ESTs//1.7e-96:488:95//Hs.116555:AA639278

[26719] R-PLACE0111503//Homo sapiens clone 23597 mRNA sequence//11.0:193:60//Hs.28197:AF035294

[26720] R-PLACE1011520//ESTs//6.8e-99:477:97//Hs.85077:AA968576

[26721] R-PLACE1011563//ESTs//1.4e-94:514:92//Hs.16471:AA206421

[26722] R-PLACE1011567//EST//2.8e-89:417:100//Hs.149770:AI285985

[26723] R-PLACE1001576//Zinc finger protein 91 (HPF7, HTF10)//4.7e-55:267:81//Hs.8597:L11672

[26724] R-PLACE1011586//Myosin, heavy polypeptide 11, smooth muscle//0.98:168:61//Hs.78344:AF001548

[26725] R-PLACE1011635//ESTs//2.5e-67:332:98//Hs.108194:AA780067

[26726] R-PLACE1011641//ESTs//2.5e-71:338:100//Hs.153085:AA993965

[26727] R-PLACE1011643//EST//1.9e-18:181:78//Hs.160879:AI361900

[26728] R-PLACE1011649//Homo sapiens clone 24432 mRNA sequence//2.5e-73:414:91//Hs.78019:AF070535

[26729] R-PLACE1011650//EST//5.8e-18:118:92//Hs.124486:AA846036

[26730] R-PLACE1011664//Restin (Reed-Steinberg cell-expressed intermediate filament-associated protein)//0.50:178:62//Hs.31638:X64838

[26731] R-PLACE1011675

[26732] R-PLACE1011682//ESTs//2.4e-90:465:94//Hs.57830:AI312025

[26733] R-PLACE1011719//Human Line-1 repeat mRNA with 2 open reading frames//8.5e-57:410:83//Hs.23094:M19503

[26734] R-PLACE1011725//ESTs//2.0e-70:340:98//Hs.161725:AA251392

[26735] R-PLACE1011729//ESTs//7.5e-19:180:79//Hs.119516:AA443426

[26736] R-PLACE1011749//Myelin oligodendrocyte glycoprotein {alternative products}//7.3e-40:361:77//Hs.53217:Z48051

[26737] R-PLACE1011762//Human kpni repeat mrna (cdna clone pcd-kpni-8), 3′ end//3.0e-60:319:76//Hs.103948:K00627

[26738] R-PLACE1011778//ESTs//8.0e-70:372:94//Hs.46765:AA521080

[26739] R-PLACE1011783//Calcium modulating ligand//8.4e-41:279:85//Hs.13572:AF068179

[26740] R-PLACE1011858//ESTs//2.6e-69:396:91//Hs.55220:D11563

[26741] R-PLACE1011874//Human mRNA for KIAA0033 gene, partial cds//1.2e-53:439:80//Hs.22271:D26067

[26742] R-PLACE1011875//ESTs//9.0e-88:420:98//Hs.70897:AA987648

[26743] R-PLACE1011891//ESTs//3.9e-17:97:100//Hs.84698:AA725913

[26744] R-PLACE1011896//ESTs//2.8e-23:176:84//Hs.121540:AI275497

[26745] R-PLACE1011922//ESTs//6.6e-35:415:73//Hs.10972:AA164268

[26746] R-PLACE1011923//Homo sapiens serum-inducible kinase mRNA, complete cds//2.3e-99:546:92//Hs.3838:AF059617

[26747] R-PLACE1011962//ESTs//3.3e-49:294:90//Hs.106800:AI031969

[26748] R-PLACE1011964//ESTs, Weakly similar to LINE-1 REVERSE TRANSCRIPTASE HOMOLOG [H. sapiens]//2.6e-06:284:63//Hs.124102:AA701285

[26749] R-PLACE1011982//ESTs//2.9e-51:291:93//Hs.20792:R14890

[26750] R-PLACE1011995//ESTs//4.5e-39:304:81//Hs.138852:AA284247

[26751] R-PLACE1012031//Homo sapiens mRNA for KIAA0713 protein, partial cds//8.0e-106:540:95//Hs.88756:AB018256

[26752] R-PLACE2000003//ESTs//2.0e-103:488:98//Hs.8341:AA490069

[26753] R-PLACE2000007//ESTs//2.4e-110:564:95//Hs.65135:W89120

[26754] R-PLACE200001//Homo sapiens clone 614 unknown mRNA, complete sequence//4.8e-105:524:95//Hs.21811:AF091080

[26755] R-PLACE2000015//ESTs//7.1e-111:543:96//Hs.32178:AA083211

[26756] R-PLACE2000017//EST//8.2e-46:404:79//Hs.133006:AI049504

[26757] R-PLACE2000021//EST//4.5e-19:221:71//Hs.150830:AI302868

[26758] R-PLACE2000033//Human melanoma antigen recognized by T-cells (MART-1) mRNA//1.6e-43:355:79//Hs.154069:U06452

[26759] R-PLACE2000034//ESTs//2.2e-21:314:70//Hs.107697:W29013

[26760] R-PLACE2000039//H. sapiens mRNA for translin associated protein X//2.9e-45:514:72//Hs.96247:X95073

[26761] R-PLACE2000047//Homo sapiens class-1 MHC-restricted T cell associated molecule (CRTAM) mRNA, complete cds//4.1e-45:358:81//Hs.159523:AF001622

[26762] R-PLACE2000050//ESTs//4.5e-65:322:98//Hs.155820:N67652

[26763] R-PLACE2000061//Homo sapiens mRNA for KIAA0575 protein, complete cds//9.2e-41:429:72//Hs.153468:AB011147

[26764] R-PLACE2000062//Human mRNA for KIAA0392 gene, partial cds//2.0e-43:296:86//Hs.40100:AB002390

[26765] R-PLACE2000072//Homo sapiens ZNF202 alpha (ZNF202) mRNA, complete cds//6.2e-111:550:95//Hs.9443:AF027219

[26766] R-PLACE2000097//Calcium modulating ligand//6.2e-47:372:80//Hs.13572:AF068179

[26767] R-PLACE2000100//ESTs//8.8e-42:281:86//Hs.150727:AI292236

[26768] R-PLACE2000103//ESTs//4.7e-97:518:93//Hs.118727:W26941

[26769] R-PLACE2000110//Homo sapiens ubiquitin hydrolyzing enzyme I (UBH1) mRNA, partial cds//0.00043:127:71//Hs.42400:AF022789

[26770] R-PLACE2000115//ESTs//7.8e-93:458:96//Hs.104520:AA481662

[26771] R-PLACE2000132//ESTs//3.8e-69:409:91//Hs.98502:AA433988

[26772] R-PLACE2000136//ESTs//6.2e-05:274:61//Hs.114067:AA701558

[26773] R-PLACE2000140//Homo sapiens mRNA for KIAA0562 protein, complete cds//4.7e-44:302:85//Hs.118401:AB011134

[26774] R-PLACE2000164//ESTs//6.3e-106:506:98//Hs.16390:AI052357

[26775] R-PLACE2000170//Small inducible cytokine A5 (RANTES)//3.7e-42:326:79//Hs.155464:AF088219

[26776] R-PLACE2000172//ESTs//9.6e-43:232:94//1.6709:AI379778

[26777] R-PLACE2000176EST//1.6e-24:154:91//Hs.157734:AI360292

[26778] R-PLACE2000187//Human mRNA for KIAA0033 gene, partial cds//2.0e-49:292:90//Hs.22271:D26067

[26779] R-PLACE2000216//ESTs//0.0041:166:64//Hs.159476:AI382378

[26780] R-PLACE2000223//ESTs//0.49:171:60//Hs.86154:AA207191

[26781] R-PLACE2000235//ESTs//2.9e-39:264:85//Hs.136839:H93717

[26782] R-PLACE2000246//NAD(P)H:menadione oxidoreductase//4.0e-44:331:82//Hs.80706:M81600

[26783] R-PLACE2000264//Human mRNA for KIAA0365 gene, partial cds//4.0e-38:311:81//Hs.84123:AB002363

[26784] R-PLACE2000274//ESTs, Weakly similar to dynein-related protein [H. sapiens]//1.9e-87:422:98//Hs.9740:AI004779

[26785] R-PLACE2000302//ESTs, Highly similar to THREONYL-TRNA SYNTHETASE, CYTOPLASMIC [Homo sapiens]//4.8e-68:380:92//Hs.107365:AA720664

[26786] R-PLACE2000305//ESTs//2.6e-43:413:75//Hs.118732:AI344055

[26787] R-PLACE2000317//ESTs//2.8e-92:501:92//Hs.28432:R83380

[26788] R-PLACE2000335//ESTs//4.3e-32:300:77//Hs.163035:AA748058

[26789] R-PLACE2000342//Homo sapiens ubiquitin hydrolyzing enzyme I (UBH1) mRNA, partial cds//0.00071:117:73//Hs.42400:AF022789

[26790] R-PLACE2000347//ESTs//1.6e-30:214:86//Hs.135272:AI347618

[26791] R-PLACE2000359//Zinc finger protein 139 (clone pHZ-37)//5.5e-42:288:86//Hs.140090:U09848

[26792] R-PLACE2000366//Thromboxane A2 receptor//6.7e-53:392:82//Hs.89887:D38081

[26793] R-PLACE2000371//ESTs//3.6e-81:409:97//Hs.155138:AA158731

[26794] R-PLACE2000373//Homo sapiens mRNA for KIAA0734 protein, partial cds//0.89:186:62//Hs.101516:AB018277

[26795] R-PLACE2000379//ESTs//3.4e-10:228:64//Hs.57842:W63781

[26796] R-PLACE2000394//ESTs//6.7e-41:462:74//Hs.107657:AA126814

[26797] R-PLACE2000398//ESTs//4.2e-33:373:74//Hs.155184:AA573189

[26798] R-PLACE2000399

[26799] R-PLACE2000404//ESTs, Highly similar to LEUCYL-TRNA SYNTHETASE, CYTOPLASMIC [Saccharomyces cerevisiae]//4.2e-109:540:96//Hs.6762:AA088424

[26800] R-PLACE2000410//ESTs//1.6e-89:459:95//Hs.117589:N25941

[26801] R-PLACE2000419//ESTs, Weakly similar to F25H9.6 [C. elegans]//1.6e-97:436:95//Hs.24647:W19739

[26802] R-PLACE2000425//Homo sapiens DEC-205 mRNA, complete cds//2.2e-44:287:88//Hs.153563:AF011333

[26803] R-PLACE2000427//ESTs, Weakly similar to coded for by C. elegans cDNA CEES142F [C. elegans]//3.0e-113:543:97//Hs.16933:AA976002

[26804] R-PLACE2000433//ESTs//1.8e-46:311:85//Hs.145032:AA343523

[26805] R-PLACE2000435//ESTs//2.9e-33:243:87//Hs.90964:AA393986

[26806] R-PLACE2000438//ESTs//2.8e-09:66:96//Hs.59548:AI279887

[26807] R-PLACE2000450//Human mRNA for KIAA0392 gene, partial cds//3.3e-39:394:74//Hs.40100:AB002390

[26808] R-PLACE2000455//ESTs//1.2e-62:301:99//Hs.151708:AA554714

[26809] R-PLACE2000458//ESTs//6.8e-92:473:96//Hs.115897:AA156638

[26810] R-PLACE2000465//ESTs//1.3e-45:435:76//Hs.141635:N79228

[26811] R-PLACE2000477//ESTs//2.6e-100:536:94//Hs.77822:AA532642

[26812] R-PLACE3000004//ESTs//9.1e-114:558:97//Hs.13035:AA151838

[26813] R-PLACE3000029//Homo sapiens mRNA for KIAA0575 protein, complete cds//6.3e-64:350:86//Hs.153468:AB011147

[26814] R-PLACE3000059//EST//0.028:175:61//Hs.159873:R92763

[26815] R-PLACE3000070//ESTs//3.8e-16:200:74//Hs.138771:N70979

[26816] R-PLACE3000103//ISLET AMYLOID POLYPEPTIDE PRECURSOR//3.7e-48:468:75//Hs.51048:X68830

[26817] R-PLACE3000119//ESTs//1.2e-45:330:83//Hs.35254:AI133727

[26818] R-PLACE3000124//EST//3.1e-75:391:96//Hs.161515:N71739

[26819] R-PLACE3000136//ESTs//8.3e-18:152:84//Hs.10043:D81792

[26820] R-PLACE3000142//ESTs//0.047:183:62//Hs.43102:AA131369

[26821] R-PLACE3000147//ESTs//6.6e-53:310:90//Hs.8230:WO7142

[26822] R-PLACE3000148//EST//1.9e-16:184:76//Hs.146570:A1139815

[26823] R-PLACE3000155//ESTs//1.2e-19:192:79//Hs.131350:AA805223

[26824] R-PLACE3000156//ESTs, Highly similar to ENV POLYPROTEIN [Avian spleen necrosis virus]//4.8e-36:262:88//Hs.31532:H18272

[26825] R-PLACE3000157

[26826] R-PLACE3000158//Small inducible cytokine A5 (RANTES)//8.2e-39:296:81//Hs.155464:AF088219

[26827] R-PLACE3000160

[26828] R-PLACE3000169//ESTs//1.5e-64:329:97//Hs.129864:R20798

[26829] R-PLACE3000194

[26830] R-PLACE3000197//ESTs//1.4e-38:197:98//Hs.146341:AI269930

[26831] R-PLACE3000199//ESTs, Highly similar to APOLIPOPROTEIN E PRECURSOR [Sus scrofa]//0.018:261:61//Hs.131370:AA927516

[26832] R-PLACE3000207//EST//1.3e-15:154:78//Hs.136617:AA630476

[26833] R-PLACE3000208//ESTs//1.6e-18:151:82//Hs.155498:W27084

[26834] R-PLACE3000218//ESTs//1.8e-85:463:93//Hs.7849:AI129964

[26835] R-PLACE3000220//ESTs//6.4e-44:308:84//Hs.136839:H93717

[26836] R-PLACE3000226//ESTs//1.3e-49:269:95//Hs.9059:AI359014

[26837] R-PLACE3000230//EST//2.3e-34:258:83//Hs.4382:T02878

[26838] R-PLACE3000242//Human trophinin mRNA, complete cds//1.1e-63:546:78//Hs.76313:U04811

[26839] R-PLACE3000244//ESTs, Highly similar to NEGATIVE REGULATOR OF MITOSIS [Emericella nidulans]//7.5e-110:549:95//Hs.13692:AA632002

[26840] R-PLACE3000254//Human mRNA for KIAA0309 gene, partial cds//2.4e-29:174:94//Hs.87908:AB002307

[26841] R-PLACE3000271//Human macrophage-derived chemokine precursor (MDC) mRNA, complete cds//2.3e-62:287:82//Hs.97203:U83171

[26842] R-PLACE3000276//ESTs//7.5e-07:187:64//Hs.80720:AA031782

[26843] R-PLACE3000304//Human 53K isoform of Type II phosphatidylinositol-4-phosphate 5-kinase (PIPK) mRNA, complete cds//4.0e-59:456:80//Hs.108966:U48696

[26844] R-PLACE3000310//ISLET AMYLOID POLYPEPTIDE PRECURSOR//6.0e-45:302:86//Hs.51048:X68830

[26845] R-PLACE3000320//Interleukin 10//9.6e-42:288:85//Hs.2180:M57627

[26846] R-PLACE3000322//ESTs, Highly similar to ARGININOSUCCINATE LYASE [Homo sapiens]//5.8e-34:190:95//Hs.114531:N74103

[26847] R-PLACE3000331//Homo sapiens mRNA for KIAA0772 protein, complete cds//3.7e-32:239:84//Hs.15519:AB018315

[26848] R-PLACE3000339//ESTs//1.3e-109:548:96//Hs.7871:AI041837

[26849] R-PLACE3000341//EST//1.1e-11:231:68//Hs.131328:AA922688

[26850] R-PLACE3000350//Human mRNa for adipogenesis inhibitory factor//8.0e-40:291:76//Hs.1721:X58377

[26851] R-PLACE3000352//EST//1.8e-72:343:100//Hs.144871:AI202380

[26852] R-PLACE3000353//ESTs//2.0e-75:395:95//Hs.107260:W52683

[26853] R-PLACE3000362//EST//2.8e-80:381:99//Hs.136233:AA261888

[26854] R-PLACE3000363

[26855] R-PLACE3000365//EST//4.8e-50:307:88//Hs.149580:AI281881

[26856] R-PLACE3000373//ESTs//5.8e-60:422:83//Hs.142826:W87430

[26857] R-PLACE3000388//ESTs, Moderately similar to !!!! ALU SUBFAMILY J WARNING ENTRY!!!! [H. sapiens]//1.0e-35:427:73//Hs.138795:R98534

[26858] R-PLACE3000399//ESTs//6. Se-05:162:66//Hs.149440:AI274570

[26859] R-PLACE3000400//ESTs//8.3e-05:310:63//Hs.17697:AA287528

[26860] R-PLACE3000401//ESTs//4.6e-60:326:80//Hs.139555:N48230

[26861] R-PLACE3000402//Homo sapiens clone 24629 mRNA sequence//0.50:227:62//Hs.142570:AF052160

[26862] R-PLACE3000405//Human HsLIM15 mRNA for HsLim15, complete cds//5.3e-43:315:82//Hs.37181:D64108

[26863] R-PLACE3000406//Human high-affinity copper uptake protein (hCTR1) mRNA, complete cds//4.4e-47:302:87//Hs.73614:U83460

[26864] R-PLACE3000413//ESTs//1.6e-116:571:97//Hs.10235:H93077

[26865] R-PLACE3000416//Small inducible cytokine A5 (RANTES)//1.8e-41:300:85//Hs.155464:AF088219

[26866] R-PLACE3000425//Homo sapiens 4F5S mRNA, complete cds//1.6e-46:307:85//Hs.32567:AF073519

[26867] R-PLACE3000455//ESTs//1.0:160:64//Hs.156045:AA884461

[26868] R-PLACE3000475//Human signal transducing adaptor molecule STAM mRNA, complete cds//6.1e-84:440:92//Hs.153487:U43899

[26869] R-PLACE3000477//ESTs//2.4e-113:568:96//Hs.24557:AA142980

[26870] R-PLACE4000009//ESTs//1.5e-72:361:96//Hs.10119:AA700227

[26871] R-PLACE4000014//Homo sapiens mRNA for KIAA0809 protein, partial cds//8.8e-85:433:95//Hs.105399:AB018352

[26872] R-PLACE4000034//ESTs//7.0e-110:550:96//Hs.76607:AA156240

[26873] R-PLACE4000049//EST//0.028:87:75//Hs.89303:AA284031

[26874] R-PLACE4000052//ESTs//5.6e-116:553:98//Hs.19067:AA521292

[26875] R-PLACE4000063//ESTs//5.0e-80:388:98//Hs.135028:AI096444

[26876] R-PLACE4000089//ESTs//2.3e-97:479:97//Hs.102425:AA807547

[26877] R-PLACE4000093//ESTs//1.5e-82:391:99//Hs.160730:AI142739

[26878] R-PLACE4000100

[26879] R-PLACE4000106//Homo sapiens mRNA for KIAA0462 protein, partial cds//2.7e-98:419:91//Hs.129937:AB007931

[26880] R-PLACE4000128//ESTs, Moderately similar to !!!! ALU SUBFAMILY J WARNING ENTRY!!!! [H. sapiens]//3.8e-11:184:71//Hs.154278:N45985

[26881] R-PLACE4000129//Homo sapiens mRNA, chromosome 1 specific transcript KIAA0500//5.2e-21:118:100//Hs.118164:AB007969

[26882] R-PLACE4000147//EST//1.6e-23:175:79//Hs.162236:AA551582

[26883] R-PLACE4000156//Homo sapiens mRNA for KIAA0575 protein, complete cds//3.0e-47:306:88//Hs.153468:AB011147

[26884] R-PLACE4000192//ESTs, Weakly similar to similar to Human zinc finger protein(ZNF142) [H. sapiens]//6.7e-31:232:82//Hs.16493:T92186

[26885] R-PLACE4000222//ESTs//2.2e-53:195:85//Hs.141575:AA211734

[26886] R-PLACE4000233//ESTs//2.9e-81:456:93//Hs.124964:R81949

[26887] R-PLACE4000247//Homo sapiens PYRIN (MEFV) mRNA, complete cds//5.5e-72:307:85//Hs.113283:AF018080

[26888] R-PLACE4000250//Small inducible cytokine A5 (RANTES)//7.1e-43:301:83//Hs.155464:AF088219

[26889] R-PLACE4000252//EST//1.6e-40:275:85//Hs.162197:AA535216

[26890] R-PLACE4000261//EST//0.0063:384:58//Hs.136284:AA400442

[26891] R-PLACE4000269//ESTs//7.3e-67:345:97//Hs.5000:R44586

[26892] R-PLACE4000270//Homo sapiens apoptotic protease activating factor 1 (Apaf-1) mRNA, complete cds//2.1e-37:352:77//Hs.77579:AF013263

[26893] R-PLACE4000300//EST//0.26:103:6811Hs.144438:AA780782

[26894] R-PLACE4000320//EST//2.7e-44:298:85//Hs.162404:AA573131

[26895] R-PLACE4000323//ESTs//8.8e-38:178:79//Hs.155475:AA761454

[26896] R-PLACE4000326//ESTs//7.4e-103:516:96//Hs.55042:AA150460

[26897] R-PLACE4000344//ESTs//9.9e-94:463:96//Hs.100057:AA0011414

[26898] R-PLACE4000367//ESTs//0.81:102:73//Hs.107692:H38478

[26899] R-PLACE4000369//ESTs//1.5e-69:390:92//Hs.13733:AA418656

[26900] R-PLACE4000379//ESTs//1.3e-67:373:91//Hs.48569:AA905425

[26901] R-PLACE4000387//EST, Moderately similar to !!!! ALU SUBFAMILY SQ WARNING ENTRY !!!! [H. sapiens]//1.9e-44:379:78//Hs.152369:AA504818

[26902] R-PLACE4000392//ESTs, Weakly similar to line-1 protein ORF1 [H. sapiens]//2.3e-70:482:83//Hs.140416:AA778649

[26903] R-PLACE4000401//ESTs//1.3e-18:151:841//Hs.150355:AI273502

[26904] R-PLACE4000411//ESTs//1.1e-108:543:96//Hs.23901:AA169780

[26905] R-PLACE4000445//ESTs, Weakly similar to C05D9.6 gene product [C. elegans]l/2.6e-111:530:98//Hs.12003:AA643063

[26906] R-PLACE4000465//Cytochrome P450, subfamily I (aromatic compound-inducible), polypeptide 21/8.5e-58:409:72//Hs.1361:M55053

[26907] R-PLACE4000489//ESTs//5.0e-70:342:98//Hs.72865:AI380932

[26908] R-PLACE4000494//ESTs//1 .4e-109:525:98//Hs.22539:AI334210

[26909] R-PLACE4000522//ESTs//6.3e-88:471:93//Hs.8121:AA521290

[26910] R-PLACE4000548//ESTs//3 .3e-86:441:96//Hs.5070:AA149527

[26911] R-PLACE4000558//Human putative monocarboxylate transporter (MCT) mRNA, complete cds//5.7e-46:425:76//Hs.23590:U59185

[26912] R-THYRO1000026//ESTs//2.6e-42:331:82//Hs.137875:AA993532

[26913] R-THYRO1000034//ESTs//2.1e-43:214:100//Hs.153018:AI243524

[26914] R-THYRO1000035//ESTs//7.6e-52:325:90//Hs.49817:AA001249

[26915] R-THYRO1000040//ESTs//1 .7e-94:459:98//Hs.48712:AI027889

[26916] R-THYRO1000070//ESTs//6.7e-43:283:86//Hs.37573:H59651

[26917] R-THYRO1000072//ESTs//1.3e-57:313:96//Hs.127827:H13438

[26918] R-THYRO1000085//ESTs//1.1e-90:439:98//Hs.150539:AA908435

[26919] R-THYRO1000092//Human mRNA for KIAA0355 gene, complete cds//1.3e-41:344:79//Hs.153014:AB002353

[26920] R-THYRO1000107//Interleukin 10//2.8e-43:292:84//Hs.2180:M57627

[26921] R-THYRO1000110//ESTs, Highly similar to LINE-1 REVERSE TRANSCRIPTASE HOMOLOG [Homo sapiens]//1.0e-52:413:80//Hs.140385:AA773359

[26922] R-THYRO1000121//EST//0.24:78:74//Hs.156632:AI345108

[26923] R-THYRO1000124//ESTs//2.8e-86:428:96//Hs.141634:AI122764

[26924] R-THYRO1000129//Homo sapiens TED protein (TED) mRNA, complete cds//6.8e-90:449:96//Hs.87619:AF087142

[26925] R-THYRO1000132//ESTs, Moderately similar to !!!! ALU SUBFAMILY SC WARNING ENTRY !!!! [H. sapiens]//5.2e-49:486:77//Hs.24164:N95217

[26926] R-THYRO1000156//ESTs//6.1e-36:344:75//Hs.70279:AA757426

[26927] R-THYRO1000163//Homo sapiens LIM protein mRNA, complete cds//4.8e-38:278:84//Hs.154103:AF061258

[26928] R-THYRO1000173//ESTs, Highly similar to CLATHRIN COAT ASSEMBLY PROTEIN AP47 [Mus musculus]//1.1e-111:554:96//Hs.18894:AA910946

[26929] R-THYRO1000186//ESTs//1.0e-44:339:83//Hs.155184:AA573189

[26930] R-THYRO1000187//Small inducible cytokine A5 (RANTES)//1.1e-41:305:81//Hs.155464:AF088219

[26931] R-THYRO1000190//Small inducible cytokine A5 (RANTES)//2.3e-44:301:85//Hs.155464:AF088219

[26932] R-THYRO1000197//Homo sapiens mRNA for poly(A)-specific ribonuclease//3.6e-110:535:97//Hs.43445:AJ005698

[26933] R-THYRO1000199//Homo sapiens mRNA for KIAA0652 protein, complete cds//4.3e-115:559:97//Hs.79672:AB014552

[26934] R-THYRO1000206//ESTs//3 .1e-90:507:90//Hs.32456:W29063

[26935] R-THYRO1000221//ESTs, Weakly similar to !!!! ALU SUBFAMILY J WARNING ENTRY !!!! [H. sapiens]//1.1e-72:357:98//Hs.140002:AA635349

[26936] R-THYRO1000241//Homo sapiens mRNA for KIAA0688 protein, complete cds//7.8e-69:524:82//Hs.141874:AB014588

[26937] R-THYRO1000242//ESTs//4.2e-27:222:85//Hs.77554:W87927

[26938] R-THYRO1000253//Sialophorin (gpL15, leukosialin, CD43)//7.3e-40:318:80//Hs.80738:X52075

[26939] R-THYRO1000270//ESTs//1.9e-99:531:94//Hs.17767:N62925

[26940] R-THYRO1000279//EST//2.7e-54:266:99//Hs.149527:AI280674

[26941] R-THYRO1000288//Homo sapiens mRNA for Hs Ste24p, complete cds//3.5e-100:566:91//Hs.25846:AB016068

[26942] R-THYRO1000320//POLYPOSIS LOCUS PROTEIN 1//1.0:321:58//Hs.74648:M73547

[26943] R-THYRO1000327//Autocrine motility factor receptor//9.2e-54:289:93//Hs.80731:M63175

[26944] R-THYRO1000343//Homo sapiens mRNA for KIAA0790 protein, partial cds//3.4e-113:559:96//Hs.12002:AB018333

[26945] R-THYRO1000358//Human selenium-binding protein (hSBP) mRNA, complete cds//1.5e-48:317:87//Hs.7833:U29091

[26946] R-THYRO1000368//ESTs//4.7e-88:430:98//Hs.146085:AA021064

[26947] R-nnnnnnnnnnnn//ESTs//1.0:253:57//Hs.128783:AA436250

[26948] R-THYRO1000387//Homo sapiens ubiquitin conjugating enzyme G2 (UBE2G2) mRNA, complete cds//4.6e-69:294:84//Hs.151614:AF032456

[26949] R-THYRO1000394//Thromboxane A2 receptor//4.1e-40:232:87//Hs.89887:D38081

[26950] R-THYRO1000395//ESTs//3.3e-20:160:83//Hs.101570:AA505429

[26951] R-THYRO1000401//ESTs//.3e-109:516:99//Hs.78524:A1140601

[26952] R-THYRO1000438//ESTs//2.1e-48:360:83//Hs.141203:H52638

[26953] R-THYRO1000452//ESTs, Weakly similar to No definition line found [C. elegans]//8.5e-40:239:90//Hs.84009:AI309761

[26954] R-THYRO1000471//ESTs//3 .3e-36:302:80//Hs.70279:AA757426

[26955] R-THYRO1000484//Homo sapiens mRNA for KIAA0737 protein, complete cds//2.2e-49:479:75//Hs.17630:AB018280

[26956] R-THYRO1000488//Homo sapiens mRNA for HRIHFB2038, partial cds//4.1e-89:471:94//Hs.28719:AB015333

[26957] R-THYRO1000501//ESTs//1.5e-46:287:89//Hs.125300:R62360

[26958] R-THYRO1000502//ESTs//1.7e-08:63:96//Hs.116319:AI208005

[26959] R-THYRO1000505//ESTs, Weakly similar to KIAA0281 [H. sapiens]//3.9e-57:286:96//Hs.105861:AI206965

[26960] R-THYRO1000558//ESTs//1.7e-95:454:99//Hs.125063:AA648511

[26961] R-THYRO1000569//ESTs//3.2e-89:463:94//Hs.20555:W22193

[26962] R-THYRO1000570//ESTs//2.8e-97:471:97//Hs.8245:AA115485

[26963] R-nnnnnnnnnnnn//Homo sapiens protein associated with Myc mRNA, complete cds//2.6e-108:533:97//Hs.151411:AF075587

[26964] R-THYRO1000596//ESTs//3 .1e-99:527:94//Hs.6084:AA045247

[26965] R-THYRO1000602//EST//6.9e-50:381:83//Hs.161917:AA483223

[26966] R-THYRO1000605//ESTs, Weakly similar to monocytic leukaemia zinc finger protein [H. sapiens]//1 .2e-96:483:96//Hs.21907:N24415

[26967] R-THYRO1000625//ESTs//5.6e-36:257:84//Hs.139657:AA191742

[26968] R-THYRO1000637

[26969] R-THYRO1000641//ESTs, Weakly similar to ERYTHROCYTE BAND 7 INTEGRAL MEMBRANE PROTEIN [H. sapiens]//4.9e-46:245:95//Hs.97398:AA398634

[26970] R-THYRO1000658//ESTs//5 .8e-48:281:90//Hs.142259:AA828840

[26971] R-nnnnnnnnnnnn//ESTs//1.5e-82:389:99//Hs.155573:AA487384

[26972] R-THYRO1000666//ESTs//1.4e-26:179:88//Hs.98382:AA779866

[26973] R-THYRO1000676//EST//6.4e-05:88:77//Hs.133424:AI061063

[26974] R-THYRO1000684//ESTs//1.9e-69:374:94//Hs.144617:R77109

[26975] R-THYRO1000699//ESTs//1.7e-58:394:86//Hs.26373:AA700713

[26976] R-THYRO1000712

[26977] R-THYRO1000734//EST//2.0e-06:95:73//Hs.156201:AA724287

[26978] R-THYRO1000748//EST//4.1e-12:155:74//Hs.118694:AA148713

[26979] R-THYRO1000756//ESTs, Weakly similar to CMP-N-ACETYLNEURAMINATE-BETA-GALACTOSAMIDE-ALPHA-2,3-SIALYLTRANSFERASE [H. sapiens]//8.1e-82:497:87//Hs.109672:W22624

[26980] R-THYRO1000777

[26981] R-THYRO1000783//EST//5.6e-100:470:99//Hs.123515:AA812932

[26982] R-THYRO1000787//EST//8.0e-34:175:99//Hs.99607:AA463897

[26983] R-THYRO1000793//ESTs//2.2e-106:505:99//Hs.50929:AA443144

[26984] R-THYRO1000796//ESTs//4.3e-44:445:75//Hs.55855:AA621381

[26985] R-THYRO1000805//EST//2.6e-32:407:67//Hs.123424:AA813594

[26986] R-THYRO1000815//Human mRNA for KIAA0033 gene, partial cds//2.0e-56:307:87//Hs.22271:D26067

[26987] R-THYRO1000829

[26988] R-THYRO1000843//Interleukin 10//1.1e-44:285:87//Hs.2180:M57627

[26989] R-THYRO1000852//EST//2.3e-20:157:85//Hs.149580:AI281881

[26990] R-THYRO1000855//ESTs//2.6e-44:359:81//Hs.140329:AA714011

[26991] R-THYRO1000865//Protein kinase, interferon-inducible double stranded RNA dependent//2.8e-44:374:79//Hs.73821:M35663

[26992] R-THYRO1000895//ESTs//1.0e-32:196:85//Hs.138630:H97871

[26993] R-THYRO1000916//ESTs//4.6e-99:492:96//Hs.152442:AA528234

[26994] R-THYRO1000926//Homo sapiens cAMP-specific phosphodiesterase 8B (PDE8B) mRNA, partial cds//3.1e-110:566:94//Hs.78106:AF079529

[26995] R-THYRO1000934//ESTs//7.4e-102:535:95//Hs.58194:W72182

[26996] R-THYRO1000951//ESTs//4.2e-11:91:89//Hs.6278:T15859

[26997] R-THYRO1000952//ESTs//3 .9e-93:489:94//Hs.48928:AA211761

[26998] R-THYRO1000974//Homo sapiens ribosomal protein L33-like protein mRNA, complete cds//1 .1e-60:321:95//Hs.14454:AF047440

[26999] R-THYRO1000975//EST//9.8e-49:303:89//Hs.149580:AI281881

[27000] R-THYRO1000983I/ESTs, Highly similar to UBIQUITIN-CONJUGATING ENZYME E2-17 KD 11 [Arabidopsis thaliana]//1 .6e-90:474:93//Hs.106616:AI027524

[27001] R-THYRO1000984//ESTs//5 .9e-97:481:96//Hs.142457:AI202777

[27002] R-THYRO1000988//EST//3.5e-42:241:83//Hs.162404:AA573131

[27003] R-THYRO1001003//ESTs, Weakly similar to ubiquitin-conjugating enzyme [H. sapiens]//3.0e-57:341:91//Hs.44049:AA521489

[27004] R-THYRO1001031//ESTs//5.5e-47:322:85//Hs.136839:H93717

[27005] R-THYRO1001033//ESTs//5.7e-89:427:98//Hs.71508:AA809070

[27006] R-THYRO1001062//EST//1 .5e-46:291:89//Hs.161917:AA483223

[27007] R-THYRO1001093//ESTs//2.7e-80:468:90//Hs.124601:AA203497

[27008] R-THYRO110000

[27009] R-THYRO1001120//ESTs, Moderately similar to fractionated X-irradiation-induced 29 thymoma [M. musculus]//6.6e-86:491:89//Hs.89135:AI138834

[27010] R-THYRO1001121//Homo sapiens mRNA for beta-tubulin folding cofactor D//2.6e-82:429:94//Hs.12570:AJ006417

[27011] R-THYRO1001133//ESTs//2.9e-39:242:90+L//HS.152340:AA521399

[27012] R-THYRO1001134//ESTs//1.8e-102:521:95//Hs.108408:N31922

[27013] R-THYRO1001142//ESTs//0.26:84:69//Hs.153434:AI287853

[27014] R-THYRO1001173//Human mRNA for KIAA0238 gene, partial cds//0.0012:305:62//Hs.82042:D87075

[27015] R-THYRO1001177

[27016] R-THYRO1011189//H. sapiens Fl 1 mRNA//1.5e-59:260:83//Hs.159639:X77744

[27017] R-THYRO1001204//ESTs, Weakly similar to TH1 protein [D. melanogaster]//1.0e-75:431:91//Hs.5184:AA709151

[27018] R-THYRO1001213//ESTs//1.3e-75:409:92//Hs.140213:AA828932

[27019] R-THYRO1001262//Human kpni repeat mrna (cdna clone pcd-kpni-4), 3′ end//1.3e-48:349:83//Hs.139107:K00629

[27020] R-THYRO1001271//PUTATIVE PROTEIN PHOSPHATASE 2C//1.0:128:64//Hs.18728:D 13640

[27021] R-THYRO1001290//ESTs//2.1e-89:424:99//Hs.18152:AA702561

[27022] R-THYRO1001313//ESTs//3.5e-17:139:87//Hs.15827:H16269

[27023] R-THYRO1001320//ESTs//1.4e-61:403:79//Hs.139555:N48230

[27024] R-THYRO1001321//Hypoxanthine phosphoribosyltransferase 1 (Lesch-Nyhan syndrome)//8.5e-05:326:60//Hs.82314:M31642

[27025] R-nnnnnnnnnnnn//ESTs//0.6:422:59//Hs.23876:AA082935

[27026] R-THYRO1001347//ESTs, Weakly similar to C35A5.8 [C. elegans]//1.1e-106:562:94//Hs.15032:AA774250

[27027] R-THYRO1001363//ESTs//1.4e-99:508:95//Hs.5028:D51033

[27028] R-THYRO1001365

[27029] R-THYRO1001374

[27030] R-THYRO1001401//Human HsLIM15 mRNA for HsLim15, complete cds//2.5e-48:467:75//Hs.37181:D64108

[27031] R-THYRO1001403//Interleukin 10//2.1e-46:305:85//Hs.2180:M57627

[27032] R-THYRO1001405//ESTs//4.8e-25:197:84//Hs.6907:W72733

[27033] R-THYRO1001406//EST//0.0023:117:66//Hs.162931:AA633197

[27034] R-THYRO1001411//ESTs//6.1e-77:421:93//Hs.22973:R40979

[27035] R-THYRO1001426//Homo sapiens mRNA, chromosome 1 specific transcript KIAA0508//9.1e-49:305:86//Hs.159187:AB007977

[27036] R-THYRO1001434//ESTs//0.40:161:61//Hs.161993:AA503172

[27037] R-THYRO1001458//ESTs, Moderately similar to !!!! ALU SUBFAMILY SC WARNING ENTRY !!!! [H. sapiens]//1.7e-05:159:66//Hs.104239:AA488082

[27038] R-THYRO1001480//Small inducible cytokine A5 (RANTES)//1.3e-40:331:79//Hs.155464:AF088219

[27039] R-THYRO1001487//Homo sapiens mRNA for KIAA0563 protein, complete cds//2.1e-17:134:76//Hs.15731:AB0011135

[27040] R-THYRO1001534//ESTs//4.6e-96:447:100//Hs.135204:AI093110

[27041] R-THYRO1001537//ESTs, Weakly similar to !!!! ALU SUBFAMILY J WARNING ENTRY!!!! [H. sapiens]//5.0e-33:304:80//Hs.108740:W20094

[27042] R-THYRO1001541//Human peptide transporter (HPEPT1) mRNA, complete cds//9.0e-49:427:76//Hs.2217:U21936

[27043] R-THYRO1001559//ESTs//0.99:210:62//Hs.33619:AA021594

[27044] R-THYRO1001570//ESTs//4.9e-48:287:91//Hs.27131:AA442413

[27045] R-THYRO1001573//ESTs//2.1e-87:446:95//Hs.143669:AA621958

[27046] R-THYRO1001584//ESTs//1.5e-64:354:95//Hs.146222:AA397741

[27047] R-THYRO1001595//ESTs//5.7e-39:366:78//Hs.22562:R54247

[27048] R-THYRO1001602//Insulin-like growth factor 1 (somatomedia C)117.4e-12:288:67//Hs.85112:X57025

[27049] R-THYRO1001605//Human GS2 mRNA, complete cds//6.9e-49:359:83//Hs.264:U03886

[27050] R-THYRO1001617//Homo sapiens peroxisomal acyl-CoA:dihydroxyacetonephosphate acyltransferase (DHAPAT) mRNA, complete cds//1.3e-82:434:93//Hs.12482:AJ002190

[27051] R-THYRO1001637//Homo sapiens KIAA0414 mRNA, partial cds//7.1e-58:331:83//Hs.127649:AB007874

[27052] R-THYRO1001656//ESTs//3.8e-19:209:75//Hs.92186:AI080282

[27053] R-THYRO1001661//ESTs//1.4e-56:323:91//Hs.24984:AA534446

[27054] R-THYRO1001671//Homo sapiens mRNA for 2′-5′ oligoadenylate synthetase 59 kDa isoform//1.6e-111:562:95//Hs.118633:AJ225089

[27055] R-THYRO1001673//Homo sapiens mRNA, chromosome 1 specific transcript KIAA0488//1.0e-17:246:73//Hs.67619:AB007957

[27056] R-THYRO1001703//ESTs//1.1e-39:142:97//Hs.110748:A1341726

[27057] R-THYRO1001706//ESTs//2.2e-42:214:99//Hs.112536:AI147691

[27058] R-THYRO1001721

[27059] R-nnnnnnnnnnnn/ESTs, Weakly similar to ZKI 128.6 [C. elegans]//1.7e-10:147:77//Hs.158196:R53184

[27060] R-THYRO1001745//ELK1, member of ETS oncogene family//1.8e-12:282:65//Hs.116549:AL009172

[27061] R-THYRO1001746//EST//0.0073:226:61//Hs.146544:A125323

[27062] R-THYRO1001772//ESTs//8.2e-100:495:97//Hs.144993:AA243474

[27063] R-THYRO1001793//ESTs//2.5e-89:430:97//Hs.58127:AA534224

[27064] R-THYRO1001809//ESTs//1.0e-41:327:80//Hs.146811:AA410788

[27065] R-THYRO1001854//Homo sapiens mRNA, chromosome 1 specific transcript KIAA0487//5.7e-38:242:83//Hs.92381:AB007956

[27066] R-THYRO1001895//ESTs//1.7e-08:213:64//Hs.156056:AI352123

[27067] R-THYRO1001907//ESTs, Moderately similar to !!!! ALU SUBFAMILY SC WARNING ENTRY !!!! [H. sapiens]//3.7e-41:362:79//Hs.139007:H74314

[27068] R-VESEN1000122

[27069] R-Y79AA1000013//ESTs//0.99:233:57//Hs.132216:AA923289

[27070] R-Y79AA1000033//EST//1.9e-62:324:95//Hs.157692:AI359321

[27071] R-Y79AA1000037//ESTs//6.1e-47:234:98//Hs.30773:AA557178

[27072] R-Y79AA1000059//Homo sapiens mRNA for KIAA0640 protein, partial cds//2.8e-51:330:89//Hs.153026:AB014540

[27073] R-Y79AA1000065//ESTs//2.0e-91:497:94//Hs.37759:H59629

[27074] R-Y79AA1000131//EST//2.3e-16:184:75//Hs.141501:N50792

[27075] R-Y79AA1000181//ESTs, Weakly similar to No definition line found [C. elegans]//2.4e-110:553:95//Hs.23159:AA113849

[27076] R-Y79AA1000202//Human mRNA for KIAA0169 gene, partial cds//0.094:185:62//Hs.79414:D79991

[27077] R-Y79AA1000214//ESTs//1.7e-93:495:94//Hs.11673:W68103

[27078] R-Y79AA1000230//ESTs//3.5e-1114:553:98//Hs.47125:AI421812

[27079] R-Y79AA10002311//ESTs//1.1e-106:526:97//Hs.82856:AI246624

[27080] R-Y79AA1000258//ESTs//1.5e-99:490:97//Hs.6459:AI092936

[27081] R-Y79AA1000268//Human mRNA for KIAA0365 gene, partial cds//1.3e-44:320:84//Hs.84123:AB002363

[27082] R-Y79AA1000313//ESTs//1.7e-105:558:93//Hs.18851:AA857826

[27083] R-Y79AA1000328//ESTs//1.9e-76:448:91//Hs.16470:AA121635

[27084] R-Y79AA1000342//ESTs, Weakly similar to MATRIN 3 [H. sapiens]//2.0e-37:239:88//Hs.23476:AA401210

[27085] R-Y79AA1000346//ESTs//7.9e-12:139:76//Hs.115987:AA483808

[27086] R-Y79AA1000349//ESTs, Moderately similar to spermatid perinuclear RNA-binding protein Spnr [M. musculus]//4.4e-66:339:97//Hs.8215:AA521150

[27087] R-Y79AA1000355//ESTs, Moderately similar to !!!! ALU SUBFAMILY SC WARNING ENTRY!!!! [H. sapiens]//3.2e-44:279:88//Hs.139007:H74314

[27088] R-Y79AA1000368//ESTs//3.8e-97:513:94//Hs.68090:AA641018

[27089] R-Y79AA1000405//ESTs//4.4e-47:267:94//Hs.125304:R51613

[27090] R-Y79AA1000410//ESTs//7.4e-49:359:82//Hs.158107:AA707758

[27091] R-Y79AA1000420//EST//0.17:99:69//Hs.160859:AI352292

[27092] R-Y79AA1000469//ESTs, Highly similar to ancient ubiquitous 46 kDa protein AUP46 precursor [M. musculus]//3.1e-60:362:88//Hs.6381:AI188509

[27093] R-Y79AA1000480//ESTs//1.0e-75:433:91//Hs.78110:AA741320

[27094] R-Y79AA1000538//EST//7.9e-48:307:87//Hs.149580:AI281881

[27095] R-Y79AA1000539//Human kinesin-like spindle protein HKSP (HKSP) mRNA, complete cds//0.95:172:62//Hs.41723:U37426

[27096] R-Y79AA1000540//ESTs//1.5e-97:534:93//Hs.67991:AA147848

[27097] R-Y79AA1000560//ESTs, Highly similar to ALPHA-ADAPTIN [Rattus norvegicus]//8.2e-97:482:97//Hs.19121:AI125280

[27098] R-Y79AA1000574//ESTs, Weakly similar to M04B2.4 [C. elegans]//1.3e-107:564:93//Hs.16361:AI147455

[27099] R-Y79AA1000627//Homo sapiens zinc finger protein (ZF5128) mRNA, complete cds//3.4e-99:517:94//Hs.60580:AF060503

[27100] R-Y79AA1000705//ESTs, Weakly similar to HYPOTHETICAL 128.5 KD HELICASE IN ATS1-TPD3 INTERGENIC REGION [Saccharomyces cerevisiae]//8.1e-27:140:100//Hs.129049:H28818

[27101] R-Y79AA1000734//Homo sapiens peroxisomal biogenesis factor (PEX11b) mRNA, complete cds//8.7e-114:586:95//Hs.83023:AF093670

[27102] R-Y79AA1000748//ESTs, Weakly similar to HYPOTHETICAL 61.3 KD PROTEIN F25B5.5 IN CHROMOSOME III [C. elegans]//9.8e-111:563:95//Hs.19845:AI005330

[27103] R-Y79AA1000752//Homo sapiens (huc) mRNA, complete cds//0.97:235:59//Hs.1701:L26405

[27104] R-Y79AA1000774//ESTs//5.9e-109:559:95//Hs.17138:N91463

[27105] R-Y79AA1000782//Human mRNA for KIAA0246 gene, partial cds//1.6e-18:107:100//Hs.84753:D87433

[27106] R-Y79AA1000784//EST//0.80:87:67//Hs.158558:AI368359

[27107] R-Y79AA1000794//ESTs//2.7e-99:498:96//Hs.25441:AA580512

[27108] R-Y79AA1000800//ESTs//1.2e-97:532:9311Hs.77822:AA532642

[27109] R-nnnnnnnnnnnn//Carboxypeptidase E//0.018:354:59//Hs.75360:X51405

[27110] R-Y79AA1000805

[27111] R-Y79AA1000824//ESTs//0.99:276:61//Hs.153992:AA280227

[27112] R-Y79AA1000827//ESTs//1.2e-55:326:92//Hs.158127:AI334650

[27113] R-Y79AA1000850//Homo sapiens small optic lobes homolog (SOLH) mRNA, complete cds//0.016:386:59//Hs.55836:U85647

[27114] R-Y79AA1000962//EST//0.024:177:63//Hs.25214:R37079

[27115] R-Y79AA1000968

[27116] R-Y79AA1000969//ESTs//2.9e-70:251:98//Hs.120858:AA417181

[27117] R-Y79AA1000976//ESTs//7.8e-56:299:95//Hs.120125:M86049

[27118] R-Y79AA1000985

[27119] R-Y79AA001023//ESTs//5.7e-66:379:90//Hs.64616:W22851

[27120] R-Y79AA1001041//ESTs//8.6e-06:54:100//Hs.8980:AA629067

[27121] R-Y79AA1001048//ESTs//4.4e-97:461:99//Hs.7010:AA837407

[27122] R-Y79AA1001061//ESTs//3.8e-105:493:99//Hs.128419:AI271325

[27123] R-Y79AA1001068//Homo sapiens mRNA for KIAA0563 protein, complete cds//4.8e-53:279:83//Hs.15731:AB011135

[27124] R-Y79AA1001077//ESTs//1.9e-51:339:87//Hs.11197:AA309047

[27125] R-Y79AA1001078//ESTs//8.3e-98:528:92//Hs.24608:AA161260

[27126] R-Y79AA1001105//ESTs//6.0e-77:393:96//Hs.30837:H08155

[27127] R-Y79AA1001145//ESTs//1.7e-13:285:64//Hs.128259:AA343015

[27128] R-Y79AA1001167

[27129] R-Y79AA1001177//EST//1.2e-05:92:76//Hs.65277:T15884

[27130] R-Y79AA1001185

[27131] R-Y79AA1001211//ESTs//1.3e-70:344:97//Hs.49760:AA741051

[27132] R-Y79AA10012161//ESTs//5.8e-63:416:88//Hs.8595:W60933

[27133] R-Y79AA1001228//ESTs//9.3e-101:483:98//Hs.13916:AI025750

[27134] R-Y79AA1001233//EST//0.00027:232:62//Hs.132431:AA909674

[27135] R-Y79AA1001236//Homo sapiens mRNA for JM23 protein, complete coding sequence (clone IMAGE 34581 and IMAGE 45355 and LLNLc101133Q7 (RZPD Berlin))//1.1e-110:549:95//Hs.23170:AJ005892

[27136] R-Y79AA1001281//ESTs//3.6e-98:466:99//Hs.104442:AA481271

[27137] R-Y79AA1001299//Human Ini1 mRNA, complete cds//9.6e-25:133:100//Hs.155626:U04847

[27138] R-Y79AA1001312//ESTs//3.4e-92:454:97//Hs.127319:A191149

[27139] R-Y79AA1001323//ESTs//1.6e-67:422:89//Hs.118559:AA887084

[27140] R-Y79AA1001384//ESTs//3.1e-104:496:98//Hs.153692:AA604143

[27141] R-Y79AA1001391//ESTs//2.2e-77:418:94//Hs.118608:AA101819

[27142] R-Y79AA1001394//ESTs//2.1e-78:409:95//Hs.23413:AA579859

[27143] R-Y79AA1001402//EST//9.3e-08:128:75//Hs.141607:N63891

[27144] R-Y79AA1001493//ESTs, Highly similar to UBIQUITIN-CONJUGATING ENZYME E2-17 KD II [Arabidopsis thaliana]//4.4e-109:553:95//Hs.106616:AI027524

[27145] R-Y79AA1001511//ESTs//4.9e-49:271:92//Hs.109045:AA523704

[27146] R-Y79AA1001533//ESTs, Moderately similar to RNA polymerase I associated factor [M. musculus]//6.2e-46:260:94//Hs.24884:AA176812

[27147] R-nnnnnnnnnnnn//EST//0.62:126:67//Hs.137020:AA868563

[27148] R-Y79AA1001548//PHOSPHATIDYLINOSITOL 4-KINASE ALPHA//3.5e-95:517:91//Hs.76987:AF012872

[27149] R-Y79AA1001555//Collagen, type XI, alpha 1//1.0:157:64//Hs.82772:J04177

[27150] R-Y79AA1001585//ESTs//1.9e-90:430:98//Hs.48333:AA704508

[27151] R-Y79AA1001594//ESTs//9.6e-23:122:100//Hs.63795:AI126237

[27152] R-Y79AA1001603//ESTs//1.0e-50:193:100//Hs.25635:AI336204

[27153] R-Y79AA1001613//ESTs, Weakly similar to zinc finger protein [H. sapiens]//7.2e-81:400:97//Hs.13323:AA897542

[27154] R-Y79AA1001647//ESTs//6.8e-92:479:95//Hs.154270:N26486

[27155] R-Y79AA1001665//ESTs, Weakly similar to 50S RIBOSOMAL PROTEIN L20 [E. coli]//2.5e-19:112:97//Hs.26252:AA643235

[27156] R-Y79AA1001679//ESTs, Highly similar to LAMBDA-CRYSTALLIN [Oryctolagus cuniculus]//9.7e-99:553:92//Hs.108896:R54040

[27157] R-nnnnnnnnnnnn

[27158] R-Y79AA1001696//ESTs//1.4e-84:478:91//Hs.6606:AA211783

[27159] R-Y79AA1001705//ESTs//6.7e-107:546:95//Hs.106805:AA418490

[27160] R-Y79AA1001711//Human DNA sequence from clone 1119D9 on chromosome 20 p12. Contains part of a gene for a PAK1 LIKE Serine/Threonine-Protein Kinase and part of the PLCB4 gene for Phopholipase C, beta (1-Phosphatidylinositol -4,5-Bisphosphate Phosphodiesterase Beta 4). Contains ESTs, STSs and GSSs//0.0085:251:63//Hs.21864:AL031652

[27161] R-Y79AA1001781//ESTs, Weakly similar to partial CDS [C. elegans]//9.4e-87:427:97//Hs.18645:AI023798

[27162] R-nnnnnnnnnnnn//ESTs//1.1e-112:558:97//Hs.109755:AA180809

[27163] R-Y79AA1001827//ESTs, Weakly similar to Similar to S. cerevisiae YD9335.03c protein [H. sapiens]//8.1e-95:530:91//Hs.72444:W23217

[27164] R-Y79AA1001846//EST//2.8e-41:312:81//Hs.162236:AA551582

[27165] R-Y79AA1001848//Human adhalin (DAG2) mRNA, complete cds//0.54:221:58//Hs.99931:L34355

[27166] R-Y79AA1001866//ESTs//2.2e-102:498:97//Hs.130683:AI278630

[27167] R-Y79AA1001874//ESTs//1.9e-76:377:98//Hs.79707:AA354094

[27168] R-Y79AA1001875//ESTs//0.64:152:63//Hs.156159:AI333652

[27169] R-Y79AA1001923//EST//0.19:180:58//Hs.148290:AA908404

[27170] R-Y79AA1002027//ESTs//1.6e-104:497:98//Hs.21275:N73275

[27171] R-Y79AA1002083//Homo sapiens mRNA for KIAA0563 protein, complete cds//0.69:93:73//Hs.15731:AB011135

[27172] R-Y79AA1002089//Homo sapiens PYRIN (MEFV) mRNA, complete cds//1.1e-46:392:80//Hs.113283:AF018080

[27173] R-Y79AA1002093//Homo sapiens GT198 mRNA, complete ORF//1.2e-12:80:100//Hs.78185:L38933

[27174] R-Y79AA1002103//ESTs//1.3e-52:535:7611Hs.142167:AI417785

[27175] R-Y79AA1002115//ESTs//4.2e-101:519:96//Hs.23977:AA115275

[27176] R-Y79AA1002125//ESTs//9.8e-68:363:94//Hs.72085:AA193399

[27177] R-Y79AA1002139//ESTs//1.2e-100:498:96//Hs.72020:AA149858

[27178] R-Y79AA1002204//ESTs//2.1e-83:434:95//Hs.22979:R43725

[27179] R-nnnnnnnnnnnn//ESTs//1.7e-55:478:76//Hs.154554:AA552715

[27180] R-Y79AA1002209//ESTs, Weakly similar to similar to tyrosyl-tRNA synthetase. [C. elegans]//3.5e-108:553:95//Hs.50441:AA747428

[27181] R-Y79AA1002210//ESTs//4.2e-16:92:100//Hs.54862:AA248349

[27182] R-Y79AA1002211//ESTs, Weakly similar to PHOSPHATIDYLETHANOLAMINE-BINDING PROTEIN [H. sapiens]//6.5e-86:518:90//Hs.25682:AA857843

[27183] R-Y79AA1002220//EST//1.3e-68:326:100//Hs.131052:AI016274

[27184] R-Y79AA1002229//ESTs//1.9e-98:467:98//Hs.132002:AI039977

[27185] R-Y79AA1002234//Homo sapiens mRNA for KIAA0692 protein, partial cds//2.0e-118:564:98//Hs.100729:AB014592

[27186] R-Y79AA1002246//ESTs, Weakly similar to PROTEIN KINASE C, BRAIN ISOZYME [D. melanogaster]//9.0e-102:507:96//Hs.25895:AI341537

[27187] R-Y79AA1002258//Homo sapiens mRNA for KIAA0655 protein, partial cds//2.4e-93:453:97//Hs.96731:AB014555

[27188] R-Y79AA1002298//ESTs//0.022:241:62//Hs.118272:N90288

[27189] R-Y79AA1002307//Homo sapiens mRNA for KIAA0634 protein, partial cds//8.1e-110:403:99//Hs.30898:AB014534

[27190] R-Y79AA1002311//EST//2.6e-27:214:85//Hs.144721:AI187985

[27191] R-Y79AA1002351//ESTs//5.6e-100:489:97//Hs.30318:AA913371

[27192] R-Y79AA1002361

[27193] R-Y79AA1002399//ESTs//0.029:149:65//Hs.43872:N26908

[27194] R-Y79AA1002407//ESTs//2.8e-117:552:99//Hs.99519:AI042000

[27195] R-Y79AA10024161//ESTs//2.6e-107:531:96//Hs.6716:AA502753

[27196] R-Y79AA1002431//EST//6.6e-23:128:98//Hs.128417:AA975026

[27197] R-nnnnnnnnnnnn//ESTs, Highly similar to CELL DIVISION CONTROL PROTEIN 68 [Saccharomyces cerevisiae]//4.4e-62:390:88//Hs.143930:AI207821

[27198] R-Y79AA1002472//ESTs//1.1e-39:234:78//Hs.117969:H94870

[27199] R-Y79AA1002482//ESTs//3.4e-45:312:85//Hs.146811:AA410788

[27200] R-Y79AA1002487//ESTs//1.7e-80:427:94//Hs.49210:N66499

[27201] Homology Search Result Data 6

[27202] Data obtained by the homology search for full-length nucleotide sequences and deduced amino acid sequences. In the result of the search shown below, both units, aa and bp, are used as length units for the sequences to be compared. Each data includes Clone name, Definition in hit data, P value, Length of sequence to be compared, Homology, and Accession number (No.) of hit data. These items are shown in this order and separated by a double-slash mark, //.

[27203] C-HEMBA1000005//DNAJ PROTEIN HOMOLOG MTJ1.//1.9E-250//554aa//85%//Q61712

[27204] C-HEMBA1000030

[27205] C-HEMBA1000046

[27206] C-HEMBA1000050

[27207] C-HEMBA1000076

[27208] C-HEMBA1100056//NEUROFILAMENT TRIPLET M PROTEIN (160 KD NEUROFILAMENT PROTEIN) (NF-M).//1.9E-12//368aa//24%//P08553

[27209] C-HEMBA1000158//HEPATOCYTE NUCLEAR FACTOR 3-GAMMA (HNF-3G).//SE-16//166aa//36%//P35584

[27210] C-HEMBA1000168//CYLICIN I (MULTIPLE-BAND POLYPEPTIDE I).//2.9E-14//303aa//25%//P35662

[27211] C-HEMBA1000185//RAS-RELATED PROTEIN RAL-A.//3.4E-12//125aa//31%//P48555

[27212] C-HEMBA1000193

[27213] C-HEMBA1000227

[27214] C-HEMBA1000288

[27215] C-HEMBA1000302

[27216] C-HEMBA1000304

[27217] C-HEMBA1000307//CARNITINE DEFICIENCY-ASSOCIATED PROTEIN EXPRESSED IN VENTRICLE 1//5.2E-49//107aa//91%//O35594

[27218] C-HEMBA1000369//Novel human mRNA similar to mouse gene PICK1 (TR:Q62083).//0//1950bp//98%//AL049654

[27219] C-HEMBA1000387

[27220] C-HEMBA1000392

[27221] C-HEMBA1000460

[27222] C-HEMBA1000488//RING CANAL PROTEIN (KELCH PROTEIN).//3.3E-45//481aa//29%//Q04652

[27223] C-HEMBA1000491//RAS-LIKE PROTEIN 2./12E-22//188aa//31%//P22279

[27224] C-HEMBA1000501

[27225] C-HEMBA1000508

[27226] C-HEMBA1000520

[27227] C-HEMBA1000531//HEAT SHOCK 70 KD PROTEIN COGNATE 1 (HEAT SHOCK 70 KD PROTEIN 70C) (FRAGMENTS).//2.6E-121/73aa//41%//P02826

[27228] C-HEMBA1000534

[27229] C-HEMBA1000555

[27230] C-HEMBA1000568

[27231] C-HEMBA1000588

[27232] C-HEMBA1000608//HYPOTHETICAL PROTEIN KIAA0411 (FRAGMENT).//1.8E-55//179aa//61%//O43295

[27233] C-HEMBA1000636

[27234] C-HEMBA1000682

[27235] C-HEMBA1000686

[27236] C-HEMBA1000719

[27237] C-HEMBA1000727

[27238] C-HEMBA1000752

[27239] C-HEMBA1000817

[27240] C-HEMBA1000851

[27241] C-HEMBA1000867

[27242] C-HEMBA1000869

[27243] C-HEMBA1000872

[27244] C-HEMBA1000910//MELANOMA-ASSOCIATED ANTIGEN B1 (MAGE-B1 ANTIGEN) (MAGE-XP ANTIGEN)//1.6E-30//127aa//40%//P43366

[27245] C-HEMBA1000918

[27246] C-HEMBA1000919//HYPOTHETICAL 65.5 KD TRP-ASP REPEATS CONTAINING PROTEIN F02E8.5 IN CHROMOSOME X.//1E-10//288aa//23%//Q19124

[27247] C-HEMBA1000946

[27248] C-HEMBA1000968

[27249] C-HEMBA1000971

[27250] C-HEMBA1000975

[27251] C-HEMBA1001009

[27252] C-HEMBA1001022

[27253] C-HEMBA1001043//ANKYRIN, BRAIN VARIANT 2 (ANKYRIN B) (ANKYRIN, NONERYTHROID)(FRAGMENT).//1.4E-12//131aa//38%//Q01485

[27254] C-HEMBA1001052

[27255] C-HEMBA1001080

[27256] C-HEMBA1001085

[27257] C-HEMBA1001088//PINCH PROTEIN (PARTICULARY INTERESTING NEW CYS-HIS PROTEIN).//3.5E-50/176aa//57%//P48059

[27258] C-HEMBA1001109

[27259] C-HEMBA1001122

[27260] C-HEMBA1001133

[27261] C-HEMBA1001137//ZINC FINGER PROTEIN 33A (ZINC FINGER PROTEIN KOX31) (KIAA0065) (HA0946) (FRAGMENT).//1.5E-116//97aa//58%//Q06730

[27262] C-HEMBA1001140

[27263] C-HEMBA1001174//ADP-RIBOSYLATION FACTOR-LIKE PROTEIN 5.//6.8E-79//179aa//80%//P51646

[27264] C-HEMBA1001197//Homo sapiens mRNA for KIAA0871 protein, complete cds.//9.5E-257//1307bp//94%//AB020678

[27265] C-HEMBA1001235

[27266] C-HEMBA1001257//Homo sapiens mRNA 2-methylacyl-CoA racemase.//0//1672bp//99%//AJ130733

[27267] C-HEMBA1001281

[27268] C-HEMBA1001286//COMPLEMENT DECAY-ACCELERATING FACTOR PRECURSOR.//0.00000002//198aa//29%//Q60401

[27269] C-HEMBA1001303

[27270] C-HEMBA1001310

[27271] C-HEMBA1001326

[27272] C-HEMBA1001351//Homo sapiens VAMP-associated protein of 33 kDa (VAP-33) mRNA, complete cds.//1.4E-133//614bp//99%//AF057358

[27273] C-HEMBA1001387//GTP-BINDING PROTEIN TC10.//2.9E-64//104aa//82%//P 17081

[27274] C-HEMBA1001388

[27275] C-HEMBA1001398

[27276] C-HEMBA1001405

[27277] C-HEMBA1001407

[27278] C-HEMBA1001413

[27279] C-HEMBA1001415

[27280] C-HEMBA1001446

[27281] C-HEMBA1001450

[27282] C-HEMBA1001455

[27283] C-HEMBA1001510//CYCLIC-AMP-DEPENDENT TRANSCRIPTION FACTOR ATF-6 (FRAGMENT).//1.7E-16//63aa//61%//P18850

[27284] C-HEMBA1001526//PERIPLASMIC [FE] HYDROGENASE 1 (EC 1.18.99.1).//4.9E-37//399aa//29%//P29166

[27285] C-HEMBA1001533

[27286] C-HEMBA1001579//Homo sapiens mRNA for KIAA0850 protein, complete cds.//0//1662bp//99%//AB020657

[27287] C-HEMBA1001581

[27288] C-HEMBA1001595//SEPTIN 2 HOMOLOG (FRAGMENT).//4.9E-156//348aa//83%//Q14141

[27289] C-HEMBA1001635//TESTIS SPECIFIC PROTEIN A (ZINC FINGER PROTEIN TSGA).//1.6E-10//155aa//28%//Q63679

[27290] C-HEMBA1001661//CADHERIN-RELATED TUMOR SUPPRESSOR PRECURSOR (FAT PROTEIN).//4.6E-36//365aa//33%//P33450

[27291] C-HEMBA1001702

[27292] C-HEMBA1001714//Homo sapiens mRNA; cDNA DKFZp564G0422 (from clone DKFZp564G0422).//0//1845bp//99%//AL050386

[27293] C-HEMBA1001731

[27294] C-HEMBA1001744//SCY1 PROTEIN.//9.9E-32//481aa//25%//P53009

[27295] C-HEMBA1001809//IMMEDIATE-EARLY PROTEIN IE180.//3.8E-11 //206aa//36%//P11675

[27296] C-HEMBA1001815

[27297] C-HEMBA1001819//ZINC FINGER PROTEIN 184 (FRAGMENT).//2.9E-135//459aa//52%//Q99676

[27298] C-HEMBA1001847//ZINC FINGER PROTEIN 29 (ZFP-29).//7.6E-64//221aa//55%//Q07230

[27299] C-HEMBA1001864

[27300] C-HEMBA1001869//TRITHORAX PROTEIN.//0.000096//166aa//27%//P20659

[27301] C-HEMBA1001896//DIMETHYLGLYCINE DEHYDROGENASE PRECURSOR (EC 1.5.99.2) (ME2GLYDH).//9.3E-36//395aa//26%//Q63342

[27302] C-HEMBA1001987

[27303] C-HEMBA1002018

[27304] C-HEMBA1002049

[27305] C-HEMBA1002084

[27306] C-HEMBA1002125

[27307] C-HEMBA1002161//MYOSIN HEAVY CHAIN, CARDIAC MUSCLE BETA ISOFORM.//1.4E-51//180aa//56%//P79293

[27308] C-HEMBA1002177//TRANSCRIPTION FACTOR GATA-4 (GATA BINDING FACTOR-4).//6E-13//190aa//36%//P43694

[27309] C-HEMBA1002191

[27310] C-HEMBA1002199

[27311] C-HEMBA1002212//TYROSINE-PROTEIN KINASE 2 (EC 2.7.1.112) (FRAGMENT).//3E-17//267aa//29%//P18161

[27312] C-HEMBA1002237

[27313] C-HEMBA1002265

[27314] C-HEMBA1002267//Sus scrofa decorin mRNA, complete cds.//1.1E-46/302bp//90%//AF125537

[27315] C-HEMBA1002349

[27316] C-HEMBA1002363//Homo sapiens chromosome-associated protein-E (hCAP-E) mRNA, complete cds.//0//1847bp//99%//AF092563

[27317] C-HEMBA1002419//TRICHOHYALIN.//1.9E-09//299aa//24%//P22793

[27318] C-HEMBA1002430

[27319] C-HEMBA1002439

[27320] C-HEMBA1002458//OVARIAN GRANULOSA CELL 13.0 KD PROTEIN HGR74.//4.2E-24//109aa//55%//Q00994

[27321] C-HEMBA1002460

[27322] C-HEMBA1002462

[27323] C-HEMBA1002469//DXS8237E PROTEIN (FRAGMENT).//3.5E-50//199aa//61%//P98175

[27324] C-HEMBA1002475//SKIN SECRETORY PROTEIN XP2 PRECURSOR (APEG PROTEIN).//1.1E-12//285aa//31%//P17437

[27325] C-HEMBA1002477

[27326] C-HEMBA1002495//LIGHT-MEDIATED DEVELOPMENT PROTEIN DET1.//6.8E-53//257aa//36%//P48732

[27327] C-HEMBA1002515

[27328] C-HEMBA1002542

[27329] C-HEMBA1002569//Homo sapiens protein associated with Myc mRNA, complete cds.//6.8E-305//951bp//99%//AF075587

[27330] C-HEMBA1002583

[27331] C-HEMBA1002609//Homo sapiens mRNA for KIAA0597 protein, partial cds.//1.4E-253//149bp//99%//AB011169

[27332] C-HEMBA1002624//Homo sapiens mRNA for KIAA0808 protein, complete cds.//0//1539bp//99% //AB018351

[27333] C-HEMBA1002688

[27334] C-HEMBA1002696

[27335] C-HEMBA1002750

[27336] C-HEMBA1002768//Homo sapiens mRNA for Cdc42-interacting protein 4 (CIP4).//1E-80//882bp//61%//AJ000414

[27337] C-HEMBA1002770//Homo sapiens mRNA for KIAA0829 protein, partial cds.//0/1532bp//99% //AB020636

[27338] C-HEMBA1002777

[27339] C-HEMBA1002794

[27340] C-HEMBA1002810//Homo sapiens formin binding protein 21 mRNA, complete cds.//8.2e-314//437bp//99%//AF071185

[27341] C-HEMBA1002818//Homo sapiens mRNA for fibulin-4.//2E-304//1383bp//99%//AJ132819

[27342] C-HEMBA1002850

[27343] C-HEMBA1002863

[27344] C-HEMBA1002876//HYPOTHETICAL 26.4 KD PROTEIN EEED8.8 IN CHROMOSOME II.//10.5E-44//188aa//52%//Q09297

[27345] C-HEMBA1002935//Homo sapiens mRNA for KIAA0576 protein, partial cds.//0//1483bp//100%//AB011148

[27346] C-HEMBA1002937

[27347] C-HEMBA1002939//ANKYRIN R (ANKYRINS 2.1 AND 2.2) (ERYTHROCYTE ANKYRIN).//2E-34//300aa//34%//P16157

[27348] C-HEMBA1002951//Homo sapiens mRNA for KIAA0903 protein, partial cds.//0//1752bp//99%//AB020710

[27349] C-HEMBA1002954

[27350] C-HEMBA1002971

[27351] C-HEMBA1002973//CAMP-DEPENDENT 3′,5′-CYCLIC PHOSPHODIESTERASE 4B (EC 3.1.4.17) (DPDE4).//1 .2E-27//63aa//100%//P14646

[27352] C-HEMBA1002997//CENTROMERIC PROTEIN E (CENP-E PROTEIN).//3.8E-25//534aa//24%//Q02224

[27353] C-HEMBA1003033

[27354] C-HEMBA1003035

[27355] C-HEMBA1003041

[27356] C-HEMBA1003046//MITOCHONDRIAL PROCESSING PROTEASE BETA SUBUNIT PRECURSOR (EC 3.4.24.64) (BETA-MPP) (P-52).//2.5E-263//489aa//99%//O75439

[27357] C-HEMBA1003067

[27358] C-HEMBA1003096

[27359] C-HEMBA1003117

[27360] C-HEMBA1003129

[27361] C-HEMBA1003136//MANNOSE-1-PHOSPHATE GUANYLTRANSFERASE (EC 2.7.7.13) (ATP-MANNOSE-1-PHOSPHATE GUANYLYLTRANSFERASE) (NDP-HEXOSE PYROPHOSPHORYLASE).//8.5E-51//221aa//33%//P41940

[27362] C-HEMBA1003148//Homo sapiens mRNA fill-length insert cDNA clone EUROIMAGE 381801.//0//1583bp//99%//AL079278

[27363] C-HEMBA1003175

[27364] C-HEMBA1003179//PROBABLE TRNA (5-METHYLAMINOMETHYL-2-THIOURIDYLATE)-METHYLTRANSFERASE (EC 2.1.1.61).115.9E-74//34aa//53%//P44551

[27365] C-HEMBA1003199

[27366] C-HEMBA1003222

[27367] C-HEMBA1003235//TROPOMYOSIN.//0.0000023//109aa//33%//Q02088

[27368] C-HEMBA1003250//PROTEIN KINASE APK1A (EC 2.7.1.-).//7.2E-41//245aa//42%//Q06548

[27369] C-HEMBA1003257

[27370] C-HEMBA1003281//POLIOVIRUS RECEPTOR PRECURSOR.//6E-11//239aa//32%//P32506

[27371] C-HEMBA1003286//Homo sapiens mRNA for beta-11,4-galactosyltransferase IV, complete cds.//5.4E-229//1043bp//99%//AB024436

[27372] C-HEMBA1003291//Homo sapiens mRNA for KIAA0537 protein, complete cds.//0//791bp//99%//AB011109

[27373] C-HEMBA1003322

[27374] C-HEMBA1003327

[27375] C-HEMBA1003369//CENTROMERIC PROTEIN E (CENP-E PROTEIN).//0.00000002//248aa//23%//Q02224

[27376] C-HEMBA1003370

[27377] C-HEMBA1003380

[27378] C-HEMBA1003395

[27379] C-HEMBA1003402

[27380] C-HEMBA1003408//Homo sapiens mRNA for KIAA0905 protein, complete cds.//0//1732bp//98% I/AB020712

[27381] C-HEMBA1003417//Homo sapiens mRNA; cDNA DKFZp586C021 (from clone DKFZp586C021).//1.6e-312//1414bp//99%//AL050287

[27382] C-HEMBA1003418//TRICHOHYALIN.//8.7E-19//281aa//31%//P37709

[27383] C-HEMBA1003433//Homo sapiens gene for NBS1, complete cds.//0//511bp//94%//AB013139

[27384] C-HEMBA1003447

[27385] C-HEMBA1003461

[27386] C-HEMBA1003463

[27387] C-HEMBA1003528

[27388] C-HEMBA1003545//INSULIN GENE ENHANCER PROTEIN ISL-2 (ISLET-2).//8.8E-189//360aa//96%//P50480

[27389] C-HEMBA1003555//NUCLEOTIDE-BINDING PROTEIN (NBP).//2.1E-68//251aa//52%//P53384

[27390] C-HEMBA1003560//GUANINE NUCLEOTIDE-BINDING PROTEIN G(I)/G(S)/G(O) GAMMA-2 SUBUNIT (G GAMMA-1).//1.2E-31//71aa//100%//P16874

[27391] C-HEMBA1003568//52 KD RO PROTEIN (SJOGREN SYNDROME TYPE A ANTIGEN (SS-A)) (RO(SS-A)).//7.9E-49//279aa//32%//P19474

[27392] C-HEMBA1003569//METASTASIS-ASSOCIATED PROTEIN MTA 1.//6.9E-206//445aa//74%//Q13330

[27393] C-HEMBA1003581//TALIN.//4.4E-45//52aa//98%//P26039

[27394] C-HEMBA1003591//CHLOROPLAST 28 KD RIBONUCLEOPROTEIN PRECURSOR (28RNP).//4.4E-10//18aa//35%//P19682

[27395] C-HEMBA1003615

[27396] C-HEMBA1003617//Homo sapiens HRIHFB2157 mRNA, partial cds.//8.2E-178//501bp//97%//AB015344

[27397] C-HEMBA1003621

[27398] C-HEMBA1003662//TBX2 PROTEIN (T-BOX PROTEIN 2).//1.2E-75//151aa//99%//Q13207

[27399] C-HEMBA1003690//HISTONE DEACETYLASE HDA 1.//2.1E-59//249aa//47%//P53973

[27400] C-HEMBA1003711

[27401] C-HEMBA1003807

[27402] C-HEMBA1003864

[27403] C-HEMBA1003953//ZINC FINGER PROTEIN MFG-1 (ZINC FINGER PROTEIN 58) (FRAGMENT).//3.8E-16//89aa//46%//P16372

[27404] C-HEMBA1003959

[27405] C-HEMBA1003989

[27406] C-HEMBA1004074

[27407] C-HEMBA1004097//Mus musculus putative transcription factor mRNA, complete cds.//8.5E-221//188bp//78%//AF091234

[27408] C-HEMBA1004146

[27409] C-HEMBA1004199//Homo sapiens mRNA for KIAA0928 protein, partial cds.//0//1893bp//98%//AB023145

[27410] C-HEMBA1004207//Homo sapiens leptin receptor short form (db) mRNA, complete cds.//0//892bp//99%//U50748

[27411] C-HEMBA1004227//Rattus norvegicus protein phosphatase 2C mRNA, complete cds.//5.7E-217//1217bp//88%//AF095927

[27412] C-HEMBA1004246

[27413] C-HEMBA1004276//Homo sapiens AP-4 adaptor complex beta4 subunit mRNA, complete cds.//4.8E-257//738bp//99%//AF092094

[27414] C-HEMBA1004289

[27415] C-HEMBA1004509//Homo sapiens CGI-21 protein mRNA, complete cds.//0//1512bp//96%//AF132955

[27416] C-HEMBA1004534//Homo sapiens gamma-filamin (ABPL) mRNA, complete cds.//1.2e-316//1445bp//99% //AF089841

[27417] C-HEMBA1004596

[27418] C-HEMBA1004693

[27419] C-HEMBA1004736

[27420] C-HEMBA1004753

[27421] C-HEMBA1004756//Human transporter protein (g17) mRNA, complete cds.//9.1E-34//515bp//66%//U49082

[27422] C-HEMBA1004758//Homo sapiens transcription factor SL1 mRNA, complete cds.//2.6E-246//1249bp//94%//L39060

[27423] C-HEMBA1004763

[27424] C-HEMBA1004768//LINE-1 REVERSE TRANSCRIPTASE HOMOLOG.//5.4E-111//314aa//58%//P08547

[27425] C-HEMBA1004771

[27426] C-HEMBA1004776

[27427] C-HEMBA1004795//CDC4-LIKE PROTEIN (FRAGMENT).//3.8E-69//198aa//66%//P50851

[27428] C-HEMBA1004806

[27429] C-HEMBA1004847//SIGNAL RECOGNITION PARTICLE 68 KD PROTEIN (SRP68).//8.2E-154//317aa//94%//Q00004

[27430] C-HEMBA1004850

[27431] C-HEMBA1004863//Homo sapiens mRNA; cDNA DKFZp586M2022 (from clone DKFZp586M2022).//0//1443bp//100%//AL080114

[27432] C-HEMBA1004923

[27433] C-HEMBA1004929

[27434] C-HEMBA1004930//26S PROTEASOME SUBUNIT SSB (KIAA0072) (HA1357).//3.3E-27//65aa//100%//Q16401

[27435] C-HEMBA1004933

[27436] C-HEMBA1004954

[27437] C-HEMBA1004972//NEUROFILAMENT TRIPLET H PROTEIN (200 KD NEUROFILAMENT PROTEIN) (NF-H).//0.00000096//286aa//23%//P12036

[27438] C-HEMBA1005475

[27439] C-HEMBA1005581//Homo sapiens SLIT2 (SLIL2) mRNA, complete cds.//0//1721bp//100%//AF133270

[27440] C-HEMBA1006248//ZINC FINGER PROTEIN MFG-1 (ZINC FINGER PROTEIN 58) (FRAGMENT).//8.6E-23//151aa//37%//P116372

[27441] C-HEMBA1006310//Rattus norvegicus cytosolic sorting protein PACS-1a (PACS-1) mRNA, complete cds.//3.7E-225//1189bp//88%//AF076183

[27442] C-HEMBA1006344//RADIXIN.//1.5E-31//333aa//28%//P26043

[27443] C-HEMBA1006377

[27444] C-HEMBA1006467

[27445] C-HEMBA1006474//40 KD PROTEIN.//1.4E-39//292aa//34%//Q01552

[27446] C-HEMBA1006530

[27447] C-HEMBA1006737//ANKYRIN, BRAIN VARIANT 2 (ANKYRIN B) (ANKYRIN, NONERYTHROID) (FRAGMENT).//0.000000043//111aa//40%//Q01485

[27448] C-HEMBA1006795

[27449] C-HEMBA1006877//OXYSTEROL-BINDING PROTEIN.//2E-59//378aa//39%//P16258

[27450] C-HEMBA1006936

[27451] C-HEMBA1007018//Homo sapiens dynein light chain-A mRNA, complete cds.//1.5E-267//1215bp//99%//AF078849

[27452] C-HEMBA1007342

[27453] C-HEMBB1000008

[27454] C-HEMBB1000018

[27455] C-HEMBB1000024

[27456] C-HEMBB1000025

[27457] C-HEMBB1000036

[27458] C-HEMBB1000037//Homo sapiens erythroblast macrophage protein EMP mRNA, complete cds.//2.8E-187//1582bp//80%//AF084928

[27459] C-HEMBB1000083//MYOSIN LIGHT CHAIN KINASE, SMOOTH MUSCLE AND NON-MUSCLE ISOZYMES (EC 2.7.1.117) (MLCK) [CONTAINS:TELOKIN].//1.9E-22//426aa//25%//PI 1799

[27460] C-HEMBB1000103

[27461] C-HEMBB1000119//Homo sapiens ASMTL gene.//10/11891bp//99%//Y15521

[27462] C-HEMBB1000136

[27463] C-HEMBB1000215

[27464] C-HEMBB1000226//PUTATIVE PRE-MRNA SPLICING FACTOR ATP-DEPENDENT RNA HELICASE EEED8.5.//2.7E-12//112aa//47%//Q09530

[27465] C-HEMBB1000244

[27466] C-HEMBB1000266//HYPOTHETICAL 54.5 KD TRP-ASP REPEATS CONTAINING PROTEIN ZC302.2 IN CHROMOSOME V.//6.1E-09//242aa//26%//Q23256

[27467] C-HEMBB1000338

[27468] C-HEMBB1000339

[27469] C-HEMBB1000391

[27470] C-HEMBB1000438

[27471] C-HEMBB1000449

[27472] C-HEMBB1000589

[27473] C-HEMBB1000591

[27474] C-HEMBB1000623

[27475] C-HEMBB1000630

[27476] C-HEMBB1000631//LONGEVITY-ASSURANCE PROTEIN 1 (LONGEVITY ASSURANCE FACTOR 1).//4.1E-19//232aa//28%//P78970

[27477] C-HEMBB1000632//GUANINE NUCLEOTIDE RELEASING PROTEIN (GNRP).//2.2E-28//273aa//31%//P27671

[27478] C-HEMBB1000671

[27479] C-HEMBB1000673

[27480] C-HEMBB1000705

[27481] C-HEMBB1000706

[27482] C-HEMBB1000725//Rattus norvegicus GTPase Rab8b (Rab8b) mRNA, complete cds.//6.2E-1301//692bp//93%//U53475

[27483] C-HEMBB1000763//Homo sapiens CGI-89 protein mRNA, complete cds.//0//1676bp//96%//AF151847

[27484] C-HEMBB1000781//Homo sapiens mitogen-activated protein kinase kinase kinase MEKK2 mRNA, complete cds.//1.2E-126//613bp//97%//AF11105

[27485] C-HEMBB1000789//PUTATIVE 90.2 KD ZINC FINGER PROTEIN IN CCA1-ADK2 INTERGENIC REGION.//5.1E-54//232aa//43%//P39956

[27486] C-HEMBB1000807

[27487] C-HEMBB1000810

[27488] C-HEMBB1000848

[27489] C-HEMBB1000852

[27490] C-HEMBB1000870

[27491] C-HEMBB1000887

[27492] C-HEMBB1000908

[27493] C-HEMBB1000927//Homo sapiens calsenilin mRNA, complete cds.//1.1E-70//595bp//76%//AF1220102

[27494] C-HEMBB1000947//Homo sapiens clone HAW 100 putative ribonuclease III mRNA, complete cds.//0//2292bp//99%//AF116910

[27495] C-HEMBB1000973//Mus musculus schlafen3 (Slfn3) mRNA, complete cds.//3.4E-120//580bp//67%//AF099974

[27496] C-HEMBB1000975

[27497] C-HEMBB1000985//MIPP PROTEIN (MURINE IAP-PROMOTED PLACENTA-EXPRESSED PROTEIN).//8.6E-18//178aa//30%//P28575

[27498] C-HEMBB1000991

[27499] C-HEMBB1001011//ZINC FINGER PROTEIN 84 (ZINC FINGER PROTEIN HPF2).//1.4E-73//230aa//45%//P51523

[27500] C-HEMBB1001014

[27501] C-HEMBB1001024

[27502] C-HEMBB1001056//PROLIFERATING-CELL NUCLEOLAR ANTIGEN P120 (PROLIFERATION-ASSOCIATED NUCLEOLAR PROTEIN P120).//2.9E-19//264aa//34%//P46087

[27503] C-HEMBB1001058//Homo sapiens neuronal thread protein AD7c-NTP mRNA, complete cds//3 .6E-52//331bp//80%//AF010144

[27504] C-HEMBB1001068//Homo sapiens liprin-beta2 mRNA, partial cds.//2.4E-307//1447bp//97%//AF034803

[27505] C-HEMBB1001096

[27506] C-HEMBB101105

[27507] C-HEMBB1001117

[27508] C-HEMBB1001126

[27509] C-HEMBB1001137//Homo sapiens mRNA for putative phospholipase, complete cds.//0//3069bp//99%//AB019435

[27510] C-HEMBB1001151//Rattus norvegicus golgi stacking protein homolog GRASP55 mRNA, complete cds.//4.2E-210//1835bp//76%//AF110267

[27511] C-HEMBB1001153

[27512] C-HEMBB1001169

[27513] C-HEMBB1001175//ANKYRIN.//6.9E-11//169aa//3%//Q02357

[27514] C-HEMBB1001182

[27515] C-HEMBB1001199

[27516] C-HEMBB1001210//Homo sapiens mRNA for KIAA0970 protein, complete cds.//0//1816bp//99%//AB023187

[27517] C-HEMBB1001242//Homo sapiens topoisomerase-related function protein (TRF4-2) mRNA, partial cds.//1.8E-284//713bp//100%//AF089897

[27518] C-HEMBB1001288//Homo sapiens CGI-32 protein mRNA, complete cds.//1.8E-274//642bp//99%//AF132966

[27519] C-HEMBB1001289

[27520] C-HEMBB1001294//GTP-BINDING PROTEIN TC10.//1.2E-79//196aa//80%//P17081

[27521] C-HEMBB1001314//Mus musculus Olf-1/EBF-like-3 transcription factor (O/E-3) mRNA, complete cds.//1.3E-129//724bp//86%//U92703

[27522] C-HEMBB1001331

[27523] C-HEMBB1001339//DXS8237E PROTEIN (FRAGMENT).//0.0000046//124aa//37%//P98175

[27524] C-HEMBB1001346//Homo sapiens phenylalanine-tRNA synthetase (FARS1) mRNA, nuclear gene encoding mitochondrial protein, complete cds.//1.1E-58//292bp//99%//AF097441

[27525] C-HEMBB1001369

[27526] C-HEMBB1001384//Homo sapiens COP9 complex subunit 4 mRNA, complete cds.//0//1586bp//99%//AF100757

[27527] C-HEMBB1001387

[27528] C-MAMMA1002317

[27529] C-MAMMA1002319

[27530] C-MAMMA1002385//RIBONUCLEOPROTEIN RB97D.//0.00000015//206aa//29%//Q02926

[27531] C-NT2RM1000080//UNC-1 PROTEIN.//5.9E-25//211aa//31%//Q21190

[27532] C-NT2RM1000242

[27533] C-NT2RM1000257//MAGO NASHI PROTEIN.//7.9E-69//H143aa//91%//P49028

[27534] C-NT2RM1000280//VACUOLAR ATP SYNTHASE SUBUNIT D (EC 3.6.1.34) (V-ATPASE D SUBUNIT) (V-ATPASE 28 KD ACCESSORY PROTEIN).//1.5E-106//118aa//97%//P39942

[27535] C-NT2RM1000669

[27536] C-NT2RM1000781

[27537] C-NT2RM1000867//Homo sapiens HSPCO33 mRNA, complete cds.//6.3E-172//798bp//99%//AF092138

[27538] C-NT2RM1001008

[27539] C-NT2RM1001044//Homo sapiens HSPCO31 mRNA, complete cds.//0.000000002//980bp//95%//AF085360

[27540] C-NT2RM1001074

[27541] C-NT2RM1001115//ENDOCHITINASE 2 PRECURSOR (EC 3.2.1.14).//0.0000056//239aa//27%//C-NT2RM2000006//Human DNA sequence from clone 796F18 on chromosome I p36.11-36.33 Contains a pseudogene similar to MMS2, ESTs and GSSs, complete sequence.//0//1740bp//99%//AL031291

[27542] C-NT2RM2000013//DNA-DIRECTED RNA POLYMERASE III 128 KD POLYPEPTIDE (EC 2.7.7.6) (RNA POLYMERASE III SUBUNIT 2).112.2E-144//362aa//71%//P25167

[27543] C-NT2RM2000030//DYNEIN INTERMEDIATE CHAIN, CYTOSOLIC (DH 1C) (CYTOPLASMIC DYNEIN INTERMEDIATE CHAIN).//0.00000043//136aa//31%//P54703

[27544] C-NT2RM2000032

[27545] C-NT2RM2000042

[27546] C-NT2RM2000092//UBIQUITIN CARBOXYL-TERMINAL HYDROLASE 8 (EC 3.1.2.15) (UBIQUITIN THIOLESTERASE 8) (UBIQUITIN-SPECIFIC PROCESSING PROTEASE 8) (DEUBIQUITINATING ENZYME 8).//1.3E-36//160aa//40%//P50102

[27547] C-NT2RM2000093

[27548] C-NT2RM2000101

[27549] C-NT2RM2000191//Homo sapiens cGMP phosphodiesterase AI (PDE9A) mRNA, complete cds.//0//1574bp//99%//AF067223

[27550] C-NT2RM2000192

[27551] C-NT2RM2000239

[27552] C-NT2RM2000250//Homo sapiens mRNA; cDNA DKFZp564L232 (from clone DKFZp564L232).//4.2e-314//1416bp//100%//AL080069

[27553] C-NT2RM2000259

[27554] C-NT2RM2000260//EXTENSIN PRECURSOR (PROLINE-RICH GLYCOPROTEIN).//3.6E-19//181aa//34%//P14918

[27555] C-NT2RM2000287

[27556] C-NT2RM2000322//Homo sapiens mRNA for KIAA0859 protein, complete cds.//3.4E-294//863bp//99%//AB020666

[27557] C-NT2RM2000359//Homo sapiens mRNA for KIAA0560 protein, complete cds.//0//1637bp//99%//AB011132

[27558] C-NT2RM2000363//BREAKPOINT CLUSTER REGION PROTEIN.//1.8E-14//245aa//29%//P11274

[27559] C-NT2RM2000368//Homo sapiens protein kinase C-binding protein RACK7 mRNA, partial cds.//0//1506bp//99%//U48251

[27560] C-NT2RM2000371//POLYRIBONUCLEOTIDE NUCLEOTIDYLTRANSFERASE (EC 2.7.7.8) (POLYNUCLEOTIDE//1.7E-68//419aa//36%//P50849

[27561] C-NT2RM2000374

[27562] C-NT2RM2000395

[27563] C-NT2RM2000402//ENDOSOMAL P24A PROTEIN PRECURSOR (70 KD ENDOMEMBRANE PROTEIN) (PHEROMONE ALPHA-FACTOR TRANSPORTER) (ACIDIC 24 KD LATE ENDOCYTIC INTERMEDIATE COMPONENT).//1.6E-54//344aa//33%//P32802

[27564] C-NT2RM2000407

[27565] C-NT2RM2000422//SODIUM- AND CHLORIDE-DEPENDENT TRANSPORTER NTT73.//1.1E-222//237aa//89%//Q08469

[27566] C-NT2RM2000452//HYPOTHETICAL 63.6 KD PROTEIN IN YPT52-GCN3 INTERGENIC REGION.//0.0000001//157aa//28%//P36113

[27567] C-NT2RM2000469//NITROGEN PERMEASE REACTIVATOR PROTEIN (EC 2.7.1.-).//0.0000089//377aa//24%//P22211

[27568] C-NT2RM2000490//SYNAPTOTAGMIN (P65).//1.8E-13//166aa//34%//P41823

[27569] C-NT2RM2000502

[27570] C-NT2RM2000504//Homo sapiens metalloprotease 1 (MP 1) mRNA, complete cds.//0//1673bp//99%//AF061243

[27571] C-NT2RM2000522//SKIN SECRETORY PROTEIN XP2 PRECURSOR (APEG PROTEIN).//1.3E-12//282aa/132%//P17437

[27572] C-NT2RM2000540

[27573] C-NT2RM2000567

[27574] C-NT2RM2000569

[27575] C-NT2RM2000577//ISOLEUCYL-TRNA SYNTHETASE (EC 6.1.1.5) (ISOLEUCINE-TRNA LIGASE) (ILERS).//1.7E-187//741aa//46%//P73505

[27576] C-NT2RM2000581//Homo sapiens mRNA for KIAA0214 protein, complete cds.//0//3001bp//99%//D86987

[27577] C-NT2RM2000588//HISTONE DEACETYLASE HDA1.//2.8E-60//384aa//40%//P53973

[27578] C-NT2RM2000594//Homo sapiens DNA cytosine-5 methyltransferase 3 beta 3 (DNMT3B) mRNA, complete cds.//0//2712bp//99%//AF156487

[27579] C-NT2RM2000599//Homo sapiens F-box protein Lilina (LILINA) mRNA, complete cds.//4.9E-70//838bp//69% //AF179221

[27580] C-NT2RM2000624//SPLICING FACTOR, ARGININE/SERINE-RICH 4 (PRE-MRNA SPLICING FACTOR SRP75).//4.4E-32//319aa//35%//Q08170

[27581] C-NT2RM2000635//Homo sapiens mRNA for KIAA0729 protein, partial cds.//0//3791bp//99%//AB018272

[27582] C-NT2RM2000636//Homo sapiens mRNA for KIAA0658 protein, partial cds.//0//2530bp//99%//AB014558

[27583] C-NT2RM2000639

[27584] C-NT2RM2000649//Homo sapiens mRNA for KIAA0676 protein, partial cds.//0//1543bp//99%//AB014576

[27585] C-NT2RM2000669

[27586] C-NT2RM2000691//ACTIN-LIKE PROTEIN 3 (ACTIN-2).//3.7E-142//285aa/190%//P32391

[27587] C-NT2RM2000714//RAS SUPPRESSOR PROTEIN 1 (RSU-1) (RSP-1 PROTEIN) (RSP-1).//3.8E-23//184aa//36%//Q15404

[27588] C-NT2RM2000718//Homo sapiens HRIHFB2436 mRNA, partial cds.//4.4E-231//1065bp//99%//AB015342

[27589] C-NT2RM2000740//POSSIBLE GLOBAL TRANSCRIPTION ACTIVATOR SNF2L.//5.7E-53//266aa//43%//P41877

[27590] C-NT2RM2000795

[27591] C-NT2RM2000821//COATOMER BETA SUBUNIT (BETA-COAT PROTEIN) (BETA-COP).//9.5E-279//545aa//98%//P23514

[27592] C-NT2RM2000837

[27593] C-NT2RM2000951//Homo sapiens XYLB mRNA for xylulokinase, complete cds.//1.7E-200//927bp//99% //AB015046

[27594] C-NT2RM2000952

[27595] C-NT2RM2000984

[27596] C-NT2RM2001004

[27597] C-NT2RM2001035//CCR4-ASSOCIATED FACTOR 1 (CAF1).//8.2E-154//285aa//99%//Q60809

[27598] C-NT2RM2001065

[27599] C-NT2RM2001100//HYPOTHETICAL 39.7 KD PROTEIN C34E10.2 IN CHROMOSOME III.//2.4E-15//266aa//26%//P46577

[27600] C-NT2RM2001131

[27601] C-NT2RM2001141

[27602] C-NT2RM2001152

[27603] C-NT2RM2001177//Homo sapiens mRNA; cDNA DKFZp586G1822 (from clone DKFZp586G1822).//2.1E-293//1335bp//99%//AL080109

[27604] C-NT2RM2001194

[27605] C-NT2RM2001196//PROLINE-RICH PROTEIN MP-3 (FRAGMENT).//1.3E-20//267aa//35%//P05143

[27606] C-NT2RM2001201//EUKARYOTIC TRANSLATION INITIATION FACTOR 5 (EIF-5).//0.00000015//95aa//35%//P48724

[27607] C-NT2RM2001221//KALIRIN (PAM COOH-TERMINAL INTERACTOR PROTEIN 10) (P-CIP10).//3.6E-10//177aa//32%//P97924

[27608] C-NT2RM2001238//GLUTAMINASE, KIDNEY ISOFORM PRECURSOR (EC 3.5.1.2) (GLS) (L-GLUTAMINE AMIDOHYDROLASE).//1.3E-180//328aa//99%//P 13264

[27609] C-NT2RM2001243

[27610] C-NT2RM2001247

[27611] C-NT2RM2001256//PROTEIN TSG24 (MEIOTIC CHECK POINT REGULATOR).//1.6E-166//312aa//98%//P53995

[27612] C-NT2RM2001291

[27613] C-NT2RM2001306//Homo sapiens mRNA; cDNA DKFZp5641052 (from clone DKFZp5641052).//0//694bp//99%//AL080063

[27614] C-NT2RM2001312

[27615] C-NT2RM2001319

[27616] C-NT2RM2001324//ZYXIN.//6.8E-55//200aa//41%//Q04584

[27617] C-NT2RM2001345//VEGETATIBLE INCOMPATIBILITY PROTEIN HET-E-1.//0.000000029//334aa//22%//Q00808

[27618] C-NT2RM2001370

[27619] C-NT2RM2001393

[27620] C-NT2RM2001420

[27621] C-NT2RM2001424//Homo sapiens mRNA; cDNA DKFZp586D0920 (from clone DKFZp586D0920).//0//1621bp//100%//AL050146

[27622] C-NT2RM2001499//LOW-AFFINITY CATIONIC AMINO ACID TRANSPORTER-2 (CAT-2) (CAT2).//7.4E-121//437aa//57%//P52569

[27623] C-NT2RM2001504

[27624] C-NT2RM2001524

[27625] C-NT2RM2001544

[27626] C-NT2RM2001547//PROBABLE PROTEIN DISULFIDE ISOMERASE P5 PRECURSOR (EC 5.3.4.1).//6.9E-27//90aa//42%//P38660

[27627] C-NT2RM2001575//52 KD RO PROTEIN (SJOGREN SYNDROME TYPE A ANTIGEN (SS-A)) (RO(SS-A)).//4.3E-61//312aa//44%//P19474

[27628] C-NT2RM2001582

[27629] C-NT2RM2001886//Homo sapiens mRNA for KIAA0710 protein, complete cds.//0//1000bp//100%//AB014610

[27630] C-NT2RM2001896//CELL DIVISION PROTEIN FTSJ.//5.1E-26//204aa//34%//P28692

[27631] C-NT2RM2001903//Homo sapiens mRNA for KIAA0462 protein, partial cds.//0//2390bp//99%//AB007931

[27632] C-NT2RM2001930

[27633] C-NT2RM2001935

[27634] C-NT2RM2001936//32.3 KD PROTEIN IN CWP1-MBR1 INTERGENIC REGION.//2.7E-27//216aa//34%//P28320

[27635] C-NT2RM2001950//HYPOTHETICAL 105.9 KD PROTEIN IN AAC3-RFC5 INTERGENIC REGION.//0.0000001//212aa//23%//P38250

[27636] C-NT2RM2001982

[27637] C-NT2RM2001989//NUCLEOLAR PROTEIN NOP4 (NUCLEOLAR PROTEIN NOP77).//1.9E-39//253aa//35%//P37838

[27638] C-NT2RM2001997//PROTEIN DISULFIDE ISOMERASE PRECURSOR (PDI) (EC 5.3.4.1).//1.3E-10//232aa//28%//Q12730

[27639] C-NT2RM2001998//HYPOTHETICAL 85.7 KD PROTEIN C13G6.03 IN CHROMOSOME 1.1//3.1E-12//206aa//30%//Q09782

[27640] C-NT2RM2002004//LA PROTEIN HOMOLOG (LA RIBONUCLEOPROTEIN) (LA AUTOANTIGEN HOMOLOG).//0.000000029//83aa//44%//P40796

[27641] C-NT2RM2002014//HYPOTHETICAL 81.4 KD PROTEIN IN GREB-FEOA INTERGENIC REGION.//1.1E-89//425aa//41%//P46837

[27642] C-NT2RM2002030//Homo sapiens mRNA for Glutamine:fructose-6-phosphate amidotransferase, complete cds.//0//1959bp//99%//AB016789

[27643] C-NT2RM2002049

[27644] C-NT2RM2002055//VACUOLAR PROTEIN SORTING-ASSOCIATED PROTEIN VPS 13.//0.00000099//338aa//24%//Q07878

[27645] C-NT2RM2002088//PUTATIVE HETEROGENEOUS NUCLEAR RIBONUCLEOPROTEIN X (HNRNP X) (CBP).//5E-62//104aa//57%//Q61990

[27646] C-NT2RM2002091

[27647] C-NT2RM2002100//Homo sapiens mRNA for ATP-dependent RNA helicase, partial.//0//807bp//99%//AJ010840

[27648] C-NT2RM2002109//Homo sapiens glioma amplified on chromosome I protein (GACI) mRNA, complete cds.//0//1868bp//99%//AF030435

[27649] C-NT2RM2002128//PUTATIVE SERINE/THREONINE-PROTEIN KINASE PKWA (EC 2.7.1.-).//4.9E-13//487aa//26%//P49695

[27650] C-NT2RM2002142//GASTRULATION SPECIFIC PROTEIN G 12./8E-31//105aa//47%//P47805

[27651] C-NT2RM2002178//Homo sapiens mRNA; cDNA DKFZp434E0335 (from clone DKFZp434E0335).//0//1683bp//99%//ALI 17402

[27652] C-NT2RM4000024//DNA-DIRECTED RNA POLYMERASE III 128 KD POLYPEPTIDE (EC 2.7.7.6) (RNA POLYMERASE III SUBUNIT 2).//7.1E-155//381aa//72%//P25167

[27653] C-NT2RM4000061

[27654] C-NT2RM4000104//ZINC FINGER PROTEIN 135.//1.5E-81//251aa//53%//P52742

[27655] C-NT2RM4000139//R. norvegicus trg mRNA.//2.3E-1114/1161bp//72%//X68101

[27656] C-NT2RM4000169//INTRACELLULAR PROTEIN TRANSPORT PROTEIN USO1.//4.8E-13//686aa//23%//P25386

[27657] C-NT2RM4000191//PUTATIVE ATP-DEPENDENT RNA HELICASE PL 10./9.2E-751//439aa//41%//P16381

[27658] C-NT2RM4000197

[27659] C-NT2RM4000210//Homo sapiens mRNA for KIAA0712 protein, complete cds.//0//1926bp//100%//AB018255

[27660] C-NT2RM4000229//Gallus gallus actin filament-associated protein (AFAP-110) mRNA, complete cds.//1.1E-27//633bp//64% //L20303

[27661] C-NT2RM4000290//Human transducin-like enhancer protein (TLE3) mRNA, complete cds.//2.2E-276//24bp//97%//M99438

[27662] C-NT2RM4000344//Homo sapiens mRNA for ATP-dependent metalloprotease YMEI L.1//012030bp//99%//AJ132637

[27663] C-NT2RM4000349//Homo sapiens HSPCO28 mRNA, complete cds.//0//1827bp//99%//AF083246

[27664] C-NT2RM4000354//LETHAL(2)DENTICLELESS PROTEIN (DTL83 PROTEIN).I/1.5E-21//208aa//35% H1Q24371

[27665] C-NT2RM4000386//Mus musculus mRNA for Ten-m3, complete cds.//0//2156bp//86% //AB025412

[27666] C-NT2RM4000395

[27667] C-NT2RM4000421//Homo sapiens mRNA for nuclear transport receptor.//0I/1730bp//99% //AJ133769

[27668] C-NT2RM4000457//HYPOTHETICAL 111.9 KD PROTEIN C22H10.03C IN CHROMOSOME I.//8E-20//393aa//24%//Q10297

[27669] C-NT2RM4000471//Homo sapiens cysteine desulfurase (nifS) mRNA, complete cds.//0//2092bp//99%//AF097025

[27670] C-NT2RM4000486//SALIVARY PROLINE-RICH PROTEIN PRECURSOR (CLONES CP3, CP4 AND CP5) [CONTAINS: BASIC PEPTIDE IB-6; PEPTIDE P-H].//4.8E-11//242aa/131%//P04280

[27671] C-NT2RM4000496//SAPI PROTEIN.//8.3E-53//434aa//29%//P39955

[27672] C-NT2RM4000511

[27673] C-NT2RM4000515//NEUROFILAMENT TRIPLET H PROTEIN (200 KD NEUROFILAMENT PROTEIN) (NF-H) (FRAGMENT).I/1.1E-111/394aa//24%//P 16884

[27674] C-NT2RM4000520

[27675] C-NT2RM4000585

[27676] C-NT2RM4000595//Homo sapiens leucine-rich repeats containing F-box protein FBL3 mRNA, complete cds.//11.1E-285//1293bp//99%//AF186273

[27677] C-NT2RP1000018//Homo sapiens mRNA for KIAA0687 protein, partial cds.//0//1940bp//95% //AB014587

[27678] C-NT2RP1000035//Homo sapiens mRNA for KIAA0850 protein, complete cds.//0//1652bp//99%//AB020657

[27679] C-NT2RP1000040

[27680] C-NT2RP1000063

[27681] C-NT2RP1000086//H. sapiens mRNA for zinc finger protein, Hsal2.//0//1162bp//99%//X98834

[27682] C-NT2RP1000101

[27683] C-NT2RP1000111//COP 1 REGULATORY PROTEIN.//4E-116//296aa//51%//P93471

[27684] C-NT2RP1000112

[27685] C-NT2RP1000124

[27686] C-NT2RP1000130//HEPATOMA-DERIVED GROWTH FACTOR (HDGF).//4.5E-50//181aa//60%//P51859

[27687] C-NT2RP1000163//Homo sapiens mRNA for KIAA0948 protein, complete cds.//0//1889bp//198%//AB023165

[27688] C-NT2RP1000170

[27689] C-NT2RP11000191

[27690] C-NT2RP1000202//ANKYRIN.//1E-251302aa//34%//Q02357

[27691] C-NT2RP1000243

[27692] C-NT2RP1000259

[27693] C-NT2RP1000272//Homo sapiens TLS-associated protein TASR-2 mRNA, complete cds.//5.8E-114//616bp//93%//AF067730

[27694] C-NT2RP1000326//Homo sapiens metaxin 2 (MTX2) mRNA, nuclear gene encoding mitochondrial protein, complete cds.//1.3E-275//1249bp//99%//AF053551

[27695] C-NT2RP1000333//ANTI-SILENCING PROTEIN 1.//8.7E-47//155aa//58%//P32447

[27696] C-NT2RP1000348//REDUCED VIABILITY UPON STARVATION PROTEIN 161.//1.7E-15//162aa//30%//P25343

[27697] C-NT2RP1000357

[27698] C-NT2RP1000376//Homo sapiens mRNA; cDNA DKFZp434A102 (from clone DKFZp434A102).//0//2265bp//95%//AL080187

[27699] C-NT2RP1000413//Homo sapiens mRNA for KIAA0587 protein, complete cds.//0//1056bp//99%//AB011159

[27700] C-NT2RP1000416

[27701] C-NT2RP1000439//Xenopus laevis chromosome condensation protein XCAP-G mRNA, complete cds.//1 .8E-94//H1019bp//63%//AF111423

[27702] C-NT2RP1000443//QUINONE OXIDOREDUCTASE (EC 1.6.5.5) (NADPH:QUINONE REDUCTASE) (ZETA- CRYSTALLIN).//2.4E- 10//227aa//25%//Q08257

[27703] C-NT2RP1000470//PUTATIVE ATP-DEPENDENT RNA HELICASE T26G 10.1 IN CHROMOSOME III.//2.6E-94//254aa//47%//P34580

[27704] C-NT2RP1000478//TUBULIN BETA-5 CHAIN (CLASS-V).//4.5E-240//445aa//97%//P09653

[27705] C-NT2RP1000481

[27706] C-NT2RP1000493//Homo sapiens mRNA for KIAA0017 protein, complete cds.//0//2728bp//199%//D87686

[27707] C-NT2RP1000547//COP-COATED VESICLE MEMBRANE PROTEIN P24 PRECURSOR (FRAGMENT).//1.1E-27//193aa//35%//P49020

[27708] C-NT2RP1000574//HOMEOBOX PROTEIN MEIS2 (MEIS1-RELATED PROTEIN 1).//3.5E-75//151aa//94%//P97367

[27709] C-NT2RP1000581 45 C-NT2RP1000630//NECDIN.//2.4E-44//227aa//41%//P25233

[27710] C-NT2RP1000688

[27711] C-NT2RP1000695

[27712] C-NT2RP1000733//Human mRNA for GSPT1-TK protein complete cds.//0//2057bp//99%//E14379 50 C-NT2RP1000738//Homo sapiens Wolf-Hirschhom syndrome candidate 2 protein (WHSC2) mRNA, complete cds.//1012186bp//99%//AF101434

[27713] C-NT2RP1000782//PLATELET-ENDOTHELIAL TETRASPAN ANTIGEN 3 (PETA-3) (GP27) (MEMBRANE GLYCOPROTEIN SFA-1) (CD151 ANTIGEN).//1.2E-30//232aa//30%//O35566

[27714] C-NT2RP1000825//GTPASE-ACTIVATING PROTEIN RHOGAP (RHO-RELATED SMALL GTPASE PROTEIN ACTIVATOR) (CDC42 GTPASE-ACTIVATING PROTEIN) (P50-RHOGAP).//8.2E-83//334aa//50%//Q07960

[27715] C-NT2RP1000833//Homo sapiens cGMP phosphodiesterase Al (PDE9A) mRNA, complete cds.//0//1494bp//99%//AF067223

[27716] C-NT2RP1000846

[27717] C-NT2RP1000851

[27718] C-NT2RP1000856//PLATELET-ENDOTHELIAL TETRASPAN ANTIGEN 3 (PETA-3) (GP27) (MEMBRANE GLYCOPROTEIN SFA-1) (CD151 ANTIGEN).//1.2E-30//232aa/130%//O35566

[27719] C-NT2RP1000915//AUTOANTIGEN NGP-1.//1.7E-19//343aa//25%//Q13823

[27720] C-NT2RP1000947//Human E2 ubiquitin conjugating enzyme UbCH5B (UBCH5B) mRNA, complete cds.//4.6E-105//504bp//99%//U39317

[27721] C-NT2RP1000954//RING CANAL PROTEIN (KELCH PROTEIN).//1.4E-23//370aa//28%//Q04652

[27722] C-NT2RP1000958//AUTOANTIGEN NGP-1.//1 .4E-19//343aa//25%//Q13823

[27723] C-NT2RP1000959//Human acidic ribosomal phosphoprotein P0 mRNA, complete cds.//2.5E-236//966bp//99%//M17885

[27724] C-NT2RP1000966//NUCLEOLIN (PROTEIN C23).//8.9E-299//554aa//99%//P19338

[27725] C-NT2RP1000980

[27726] C-NT2RP1000988

[27727] C-NT2RP1100011//Drosophila melanogaster putative 43 kDa protein (TH1) mRNA, complete cds.//2.2E-78//1529bp//61%//O1790

[27728] C-NT2RP1001004

[27729] C-NT2RP1001395

[27730] C-NT2RP1001410//PUTATIVE GTP-BINDING PROTEIN WO8E3.3.//8.9E-141//396aa//67%//P91917

[27731] C-NT2RP1001424

[27732] C-NT2RP1001449

[27733] C-NT2RP1001457//Homo sapiens partial mRNA for beta-transducin family protein (putative).//1 .2E-137//629bp//100%//AJ005257

[27734] C-NT2RP1001466

[27735] C-NT2RP1001475

[27736] C-NT2RP1001482

[27737] C-NT2RP1001494//MALE STERILITY PROTEIN 2.//7.2E-4011261aa//27%//Q08891

[27738] C-NT2RP1001543//MYO-INOSITOL-1-PHOSPHATE SYNTHASE (EC 5.5.1.4) (IPS).//1 .6E-166//506aa//60%//P42803

[27739] C-NT2RP1001546//PLATELET-ENDOTHELIAL TETRASPAN ANTIGEN 3 (PETA-3) (GP27) (MEMBRANE GLYCOPROTEIN SFA-1) (CD151 ANTIGEN).//1.6E-30//232aa//30%//O35566

[27740] C-NT2RP1001569//SIGNAL RECOGNITION PARTICLE RECEPTOR BETA SUBUNIT (SR-BETA).//5.8E-121//271aa//89%//P47758

[27741] C-NT2RP1001616

[27742] C-NT2RP1001665//CALMODULIN.//0.000000511183aa//30%//P02594

[27743] C-NT2RP2000006//DNAJ PROTEIN (40 KD HEAT SHOCK CHAPERONE PROTEIN) (HSP40).//9.8E-17//79aa//55%//O34136

[27744] C-NT2RP2000007

[27745] C-NT2RP2000008//ZINC FINGER PROTEIN 84 (ZINC FINGER PROTEIN HPF2).//2.4E-177//726aa//47%//P51523

[27746] C-NT2RP2000032//RAS SUPPRESSOR PROTEIN 1 (RSU-1) (RSP-1 PROTEIN) (RSP-1).//1 .8E-22//184aa/134%//Q01730

[27747] C-NT2RP2000045//Homo sapiens tumorous imaginal discs protein Tid56 homolog (TIDI) mRNA, complete cds.//0//H1390bp//98%//AF061749

[27748] C-NT2RP2000054

[27749] C-NT2RP2000056//PROTEIN-TYROSINE PHOSPHATASE EPSILON PRECURSOR (EC 3.1.3.48) (R-PTP- EPSILON).//9.4E-16//45aa//100%//P49446

[27750] C-NT2RP2000067

[27751] C-NT2RP2000070//CADHERIN-RELATED TUMOR SUPPRESSOR PRECURSOR (FAT PROTEIN).//3.4E-51//383aa//32%//P33450

[27752] C-NT2RP2000079

[27753] C-NT2RP2000088//Homo sapiens mRNA for KIAA0795 protein, partial cds.//0//2286bp//100%//AB018338

[27754] C-NT2RP2000091

[27755] C-NT2RP2000097

[27756] C-NT2RP2000114//Homo sapiens mRNA for GM3 synthase, complete cds.//0//2244bp//99%//AB018356

[27757] C-NT2RP2000120

[27758] C-NT2RP2000126//POSSIBLE GLOBAL TRANSCRIPTION ACTIVATOR SNF2L.//2.5E-117//541aa//42%//P41877

[27759] C-NT2RP2000133//Homo sapiens mRNA for KIAA0989 protein, partial cds.//0//2286bp//99%//AB023206

[27760] C-NT2RP2000147//CLATHRIN COAT ASSEMBLY PROTEIN AP47 (CLATHRIN COAT ASSOCIATED PROTEIN AP47) (GOLGI ADAPTOR AP-147 KD PROTEIN) (HA147 KD SUBUNIT) (CLATHRIN ASSEMBLY PROTEIN ASSEMBLY PROTEIN COMPLEX 1 MEDIUM CHAIN).//4.4E-226//423aa//99%//P35585

[27761] C-NT2RP2000153//GAR2 PROTEIN.//9.8E-23//311aa//28%//P41891

[27762] C-NT2RP2000157//MLO2 PROTEIN.//2.6E-11//62aa//40%//Q09329

[27763] C-NT2RP2000161//Homo sapiens mRNA for KIAA1008 protein, complete cds.//3.4e-315//1430bp//99%//AB023225

[27764] C-NT2RP2000173

[27765] C-NT2RP2000175

[27766] C-NT2RP2000195

[27767] C-NT2RP2000205

[27768] C-NT2RP2000208//Homo sapiens mRNA for KIAA0892 protein, partial cds.//0//2898bp//99%//AB020699

[27769] C-NT2RP2000224//INSULIN RECEPTOR SUBSTRATE-1 (IRS-1).//0.000043//103aa//28%//P35568

[27770] C-NT2RP2000232

[27771] C-NT2RP2000233

[27772] C-NT2RP2000239

[27773] C-NT2RP2000248//UDP-N-ACETYLGLUCOSAMINE-PEPTIDE N-ACETYLGLUCOSAMINYLTRANSFERASE 110 KD SUBUNIT (EC 2.4.1.-) (O-GLCNAC TRANSFERASE P 110 SUBUNIT).//3.4E-21/210aa//33%//P56558

[27774] C-NT2RP2000270

[27775] C-NT2RP2000274

[27776] C-NT2RP2000283

[27777] C-NT2RP2000288//HYPOTHETICAL 111.9 KD PROTEIN C22H10.03C IN CHROMOSOME I.//1.6E-27//576aa/125%//Q10297

[27778] C-NT2RP2000297//ZINC FINGER PROTEIN 184 (FRAGMENT).//3.3E-186//256aa//60%//Q99676

[27779] C-NT2RP2000298

[27780] C-NT2RP20003110//Human proline dehydrogenase/proline oxidase (PRODH) mRNA, complete cds.//4.3E-279//1193bp//99%//U82381

[27781] C-NT2RP2000328

[27782] C-NT2RP2000329//GTP:AMP PHOSPHOTRANSFERASE MITOCHONDRIAL (EC 2.7.4.10) (AK3).//2E-111//226aa//92%//P08760

[27783] C-NT2RP2000346//MYELOID DIFFERENTIATION PRIMARY RESPONSE PROTEIN MYDI 16.//6.3E-115//674aa//46%//P17564

[27784] C-NT2RP2000369

[27785] C-NT2RP2000412

[27786] C-NT2RP2000414//HETEROGENEOUS NUCLEAR RIBONUCLEOPROTEIN F (HNRNP F).//4.3E-22811415aa/1100%//P52597

[27787] C-NT2RP2000422//Homo sapiens N-acetylglucosamine-phosphate mutase mRNA, complete cds.//0//1757bp//99%//AF102265

[27788] C-NT2RP2000438

[27789] C-NT2RP2000448//KES1 PROTEIN.//8.7E-5411392aa//38%//P35844

[27790] C-NT2RP2000503

[27791] C-NT2RP2000510

[27792] C-NT2RP2000516

[27793] C-NT2RP2000603

[27794] C-NT2RP2000617

[27795] C-NT2RP2000634//Homo sapiens mRNA for KIAA0614 protein, partial cds.//0//2482bp//99%//AB014514

[27796] C-NT2RP2000656

[27797] C-NT2RP2000658

[27798] C-NT2RP2000668//SERINE/THREONINE PROTEIN KINASE PKPA (EC 2.7.1.-).//1.3E-27//349aa//32%//Q01577

[27799] C-NT2RP2000704

[27800] C-NT2RP2000710//ASPARTYL-TRNA SYNTHETASE (EC 6.1.1.12) (ASPARTATE-TRNA LIGASE)//2.7E-100//488aa//44%//O32038

[27801] C-NT2RP2000764//NIFS PROTEIN.116.6E-36//252aa//42%//P12623

[27802] C-NT2RP2000809//Homo sapiens mRNA for KIAA0873 protein, partial cds.110113347bp//99%//AB020680

[27803] C-NT2RP2000812//DILUTE MYOSIN HEAVY CHAIN, NON-MUSCLE (MYOSIN 5A).//0.000000056//179aa//29%//Q99104

[27804] C-NT2RP2000814//GELATION FACTOR (ACTIN BINDING PROTEIN 120) (ABP-120).//0.00000011//96aa//29%//P113466

[27805] C-NT2RP2000816//MAGNESIUM-CHELATASE 30 KD SUBUNIT.//0.000000079//172aa/128%//P26174

[27806] C-NT2RP2000819

[27807] C-NT2RP2000841

[27808] C-NT2RP2000845

[27809] C-NT2RP2000863

[27810] C-NT2RP2000880//PROBABLE TRANSLATION INITIATION FACTOR IF-2 .110//694aa//99%//O60841

[27811] C-NT2RP2000892

[27812] C-NT2RP2000931//MATRIN 3.1/2.4E-289//467aa/195%//P43244

[27813] C-NT2RP2000932//Homo sapiens mRNA; cDNA DKFZp5640043 (from clone DKFZp5640043).//0//2487bp//99%//AL050390

[27814] C-NT2RP2000938

[27815] C-NT2RP2000943//Homo sapiens mRNA for KIAA0755 protein, complete cds.//0//3458bp//99%//AB018298

[27816] C-NT2RP2000965//Homo sapiens mRNA for fls353, complete cds.//0//1989bp//96%//AB024704

[27817] C-NT2RP2000985

[27818] C-NT2RP2001036

[27819] C-NT2RP2001044

[27820] C-NT2RP2001056//Homo sapiens mRNA, chromosome I specific transcript KIAA0488.//0//2749bp//99%//AB007957

[27821] C-NT2RP2001065

[27822] C-NT2RP2001070//PUTATIVE PYRIDOXAMINE 5′-PHOSPHATE OXIDASE (EC 1.4.3.5) (PNP/PMP OXIDASE).//5.8E-46//222aa//45%//Q20939

[27823] C-NT2RP2001081//SYNAPTOTAGMIN IV.//4.2E-118//430aa//54%//P50232

[27824] C-NT2RP2001094

[27825] C-NT2RP2001119

[27826] C-NT2RP2001127//Homo sapiens mRNA for PLU-1 protein.//0//2514bp//99%//AJ132440

[27827] C-NT2RP2001218

[27828] C-NT2RP2001245//MYOSIN HEAVY CHAIN, NONMUSCLE (CELLULAR MYOSIN HEAVY CHAIN) (NMMHC).//2.2E-101/366aa//28%//P14105

[27829] C-NT2RP2001381

[27830] C-NT2RP2001397//Homo sapiens mRNA; cDNA DKFZp434B174 (from clone DKFZp434B174).//0//1495bp//100%//AL080146

[27831] C-NT2RP2001427

[27832] C-NT2RP2001601//Homo sapiens mRNA for KIAA0797 protein, partial cds.//0//1748bp//99%//AB018340

[27833] C-NT2RP2001675

[27834] C-NT2RP2001721

[27835] C-NT2RP2001907

[27836] C-NT2RP2001969

[27837] C-NT2RP2001976//Mus musculus calmodulin-binding protein SHA1 (Sha1) mRNA, complete cds.//4.7E-177//1538bp//74%//AF062378

[27838] C-NT2RP2002046

[27839] C-NT2RP2002154

[27840] C-NT2RP2002208

[27841] C-NT2RP2002270//AF-9 PROTEIN.//0.00000012//74aa//36%//P42568

[27842] C-NT2RP2002312//Homo sapiens mRNA for CDS2 protein.//0//2333bp//99%//Y16521

[27843] C-NT2RP2002325//Homo sapiens mRNA for Pex11p, complete cds.//8.4E-254//158bp//99%//AB015594

[27844] C-NT2RP2002385//Homo sapiens synaptic glycoprotein SC2 spliced variant mRNA, complete cds.//4.3E-240//1105bp//99%//AF038958

[27845] C-NT2RP2002426

[27846] C-NT2RP2002479//Homo sapiens mRNA for ABC transporter 7 protein, complete cds.11//02180bp//99%//AB005289

[27847] C-NT2RP2002537//HYPOTHETICAL 55.1 KD PROTEIN B0416.5 IN CHROMOSOME X.//6.2E-19//288aa//26%//Q11073

[27848] C-NT2RP2002595//PROBABLE CALCIUM-BINDING PROTEIN ALG-2 (PMP41) (ALG-257).//7.5E-35//181aa//42%//P12815

[27849] C-NT2RP2002618//PROTEIN ARGININE N-METHYLTRANSFERASE 2 (EC 2.1.1.-).//1.7E-51//326aa//38%//P55345

[27850] C-NT2RP2002621

[27851] C-NT2RP2002672

[27852] C-NT2RP2002701//HYPOTHETICAL 38.1 KD PROTEIN C2F12.15C IN CHROMOSOME II.//1.9E-14//210aa//30%//O14345

[27853] C-NT2RP2002769

[27854] C-NT2RP2002862//60S ACIDIC RIBOSOMAL PROTEIN P0 (LIGHT-INDUCED 34 KD PROTEIN).//8.8E-10//203aa//27%//P29764

[27855] C-NT2RP2002928//Homo sapiens pre-mRNA splicing factor (PRP17) mRNA, complete cds.//1.9E-136//623bp//100%//AF038392

[27856] C-NT2RP2002954

[27857] C-NT2RP2002959//UBIQUITIN-CONJUGATING ENZYME E2-17 KD 2 (EC 6.3.2.19) (UBIQUITIN- PROTEIN LIGASE) (UBIQUITIN CARRIER PROTEIN) (E2(17)KB 2).//4.6E-80//147aa//100%//PS1669

[27858] C-NT2RP2002980//30S RIBOSOMAL PROTEIN SI 0.//0.00000001//98aa//36%//P10129

[27859] C-NT2RP2002986//Homo sapiens mRNA for Kelch motif containing protein, complete cds.//0//2209bp//99%//AB026190

[27860] C-NT2RP2003108

[27861] C-NT2RP2003117

[27862] C-NT2RP2003121//Mus musculus enhancer of polycomb (Epc1) mRNA, complete cds.//2.3E-82//642bp//68%//AF079765

[27863] C-NT2RP2003125//RING CANAL PROTEIN (KELCH PROTEIN).//2.4E-38/539aa//25%//Q04652

[27864] C-NT2RP2003177

[27865] C-NT2RP2003194

[27866] C-NT2RP2003265//Homo sapiens CGI-53 protein mRNA, complete cds.//0//1580bp//99%//AF151811

[27867] C-NT2RP2003295//Homo sapiens RMP mRNA for RPB5 meidating protein, complete cds.//0//1526bp//99%//AB006572

[27868] C-NT2RP2003329//PUTATIVE ADENYLATE CYCLASE REGULATORY PROTEIN.//3.6E-14//332aa//32%//P26337

[27869] C-NT2RP2003367

[27870] C-NT2RP2003433//PROTEIN TRANSPORT PROTEIN SEC61 ALPHA SUBUNIT.//5E-131//269aa//91%//P38378

[27871] C-NT2RP2003446

[27872] C-NT2RP2003533

[27873] C-NT2RP2003543//HYPOTHETICAL TRNA/RRNA METHYLTRANSFERASE SLR1673 (EC 2.1.1.-).//1.7E-17//148aa//34%//P74261

[27874] C-NT2RP2003596

[27875] C-NT2RP2003629

[27876] C-NT2RP2003687

[27877] C-NT2RP2003714//ZINC FINGER PROTEIN 91 (ZINC FINGER PROTEIN HTF10) (HPF7).151.4E-29//85aa//72%//Q05481

[27878] C-NT2RP2003737//UBIQUITIN-CONJUGATING ENZYME E2-17 KD 2 (EC 6.3.2.19) (UBIQUITIN-PROTEIN LIGASE) (UBIQUITIN CARRIER PROTEIN) (E2(17)KB 2).//1.7E-75//147aa//93%//P51669

[27879] C-NT2RP2003793

[27880] C-NT2RP2003952//AMINOPEPTIDASE B (EC 3.4.11.6) (ARGINYL AMINOPEPTIDASE) (ARGININE AMINOPEPTIDASE) (CYTOSOL AMINOPEPTIDASE IV) (AP-B).//1.5E-23//200aa//30%//O09175

[27881] C-NT2RP2003986

[27882] C-NT2RP2004042

[27883] C-NT2RP2004316//Homo sapiens chromosome 1 clone J549L20, WORKING DRAFT SEQUENCE, in unordered pieces.//8.2E-202//926bp//100%//AL096820

[27884] C-NT2RP2004389//PROBABLE MITOCHONDRIAL 40S RIBOSOMAL PROTEIN S9 PRECURSOR.//9.3E-15//126aa//39%//P38120

[27885] C-NT2RP2004392//MNN4 PROTEIN.//1.4E-1//43aa//27%//P36044

[27886] C-NT2RP2004463

[27887] C-NT2RP2004602

[27888] C-NT2RP2004614//Homo sapiens mRNA for KIAA0922 protein, partial cds.//0//2040bp//99%//AB023139

[27889] C-NT2RP2004655//Homo sapiens mRNA for leucine rich protein.//8.5E-233//1061bp//99%//AJ006291

[27890] C-NT2RP2004689//HYPOTHETICAL 192.5 KD PROTEIN C6G9.1C IN CHROMOSOME I.//5.6E-64//616aa//33%//Q92355

[27891] C-NT2RP2004791//PUTATIVE LEUCYL-TRNA SYNTHETASE, CYTOPLASMIC (EC 6.1.1.4) (LEUCINE-TRNA LIGASE) (LEURS).//9.5E-73//153aa//59%//Q10490

[27892] C-NT2RP2004799//PROBABLE SUCCINYL-COA LIGASE [GDP-FORMING], BETA-CHAIN PRECURSOR (EC 6.2.1.4) (SUCCINYL-COA SYNTHETASE, BETA CHAIN) (SCS-BETA).//3.7E-135//414aa//62%//P53588

[27893] C-NT2RP2004802

[27894] C-NT2RP2004841

[27895] C-NT2RP2004936

[27896] C-NT2RP2004959//P54 PROTEIN PRECURSOR.//0.00000095//297aa//20%//P13692

[27897] C-NT2RP2004999

[27898] C-NT2RP2005000

[27899] C-NT2RP2005001//Homo sapiens mRNA for KIAA0615 protein, complete cds.//0/11694bp//99%//AB014515

[27900] C-NT2RP2005012//Homo sapiens mRNA for SEC63 protein.//0//1693bp//99%//AJ011779

[27901] C-NT2RP2005037//ANTI-SILENCING PROTEIN 1.//3.3E-47//155aa//59%//P32447

[27902] C-NT2RP2005126//H. sapiens mRNA for RNA helicase (Myc-regulated dead box protein).//0//2388bp//98%//X98743

[27903] C-NT2RP2005140

[27904] C-NT2RP2005147

[27905] C-NT2RP2005159

[27906] C-NT2RP2005239//Homo sapiens cysteine desulfurase (nifS) mRNA, complete cds.//0//2087bp//99%//AF097025

[27907] C-NT2RP2005270

[27908] C-NT2RP2005276//Homo sapiens mRNA for Acyl-CoA synthetase 3, complete cds.//0//2122bp//99%//D89053

[27909] C-NT2RP2005293

[27910] C-NT2RP2005315//Homo sapiens mRNA for KIAA0676 protein, partial cds.//0//1515bp//99%//AB014576

[27911] C-NT2RP2005358//Homo sapiens methyl-CpG binding domain-containing protein MBD3 (MBD3) mRNA, complete cds.//0//2199bp//99%//AF072247

[27912] C-NT2RP2005393//AUTOANTIGEN NGP-1.//7.2E-39//224aa//35%//Q13823

[27913] C-NT2RP2005436//SPLICING FACTOR, ARGININE/SERINE-RICH 4 (PRE-MRNA SPLICING FACTOR SRP75).//1.2E-13//185aa//38%//Q08170

[27914] C-NT2RP2005441

[27915] C-NT2RP2005453

[27916] C-NT2RP2005464

[27917] C-NT2RP2005465//MITOCHONDRIAL CARRIER PROTEIN RIM2.I/3E-44//252aa//41%//P38127

[27918] C-NT2RP2005472

[27919] C-NT2RP2005495

[27920] C-NT2RP2005498//PROTEIN PHOSPHATASE PP2A, 55 KD REGULATORY SUBUNIT, ALPHA ISOFORM (PROTEIN PHOSPHATASE PP2A B SUBUNIT ALPHA ISOFORM) (ALPHA-PR55).//5.2E-81//166aa//88%//P36876

[27921] C-NT2RP2005509//Homo sapiens CGI-45 protein mRNA, complete cds.//101//825bp//99%//AF151803

[27922] C-NT2RP2005520//Homo sapiens chromosome-associated protein-E (hCAP-E) mRNA, complete cds.//0/13994bp//99%//AF092563

[27923] C-NT2RP2005525//Mus musculus kanadaptin mRNA, complete cds.//2.4E-304//1687bp//85%//AF035526

[27924] C-NT2RP2005540//Homo sapiens mRNA for KIAA0494 protein, complete cds.//0//2856bp//99%//AB007963

[27925] C-NT2RP2005549//PUTATIVE LACTOYLGLUTATHIONE LYASE (EC 4.4.1.5) (METHYLGLYOXALASE) (ALDOKETOMUTASE) (GLYOXALASE I) (GLX I) (KETONE-ALDEHYDE MUTASE) (S-D-LACTOYLGLUTATHIONE METHYLGLYOXAL LYASE).//2E-20//181aa//36%//Q39366

[27926] C-NT2RP2005555

[27927] C-NT2RP2005557//Homo sapiens clone 486790 diphosphoinositol polyphosphate phosphohydrolase mRNA, complete cds.//1E-46//576bp//70%//AF062529

[27928] C-NT2RP2005620//Homo sapiens epsin 2a mRNA, complete cds.//8.9e-313//455bp//98%//AF062085

[27929] C-NT2RP2005622

[27930] C-NT2RP2005635//PROBABLE NH(3)-DEPENDENT NAD(+) SYNTHETASE (EC 6.3.5.1).//1E-11//1128aa//36%//P47623

[27931] C-NT2RP2005637

[27932] C-NT2RP2005640

[27933] C-NT2RP2005654//CYSTEINE STRING PROTEIN (CCCS I).//1.2E-13//74aa//45%//P56101

[27934] C-NT2RP2005669//Homo sapiens mRNA for DEDD protein.//3.9E-209//957bp//99%//AJ010973

[27935] C-NT2RP2005675//Homo sapiens growth suppressor related (DOC-IR) mRNA, complete cds.//4.4E-200//908bp//99%//AF089814

[27936] C-NT2RP2005683

[27937] C-NT2RP2005690

[27938] C-NT2RP2005712//Homo sapiens mRNA for KIAA0799 protein, partial cds.//0//1684bp//99%//AB018342

[27939] C-NT2RP2005723//HNRNP ARGININE N-METHYLTRANSFERASE (EC 2.1.1.-) (ODPI PROTEIN).//0.000000003//169aa//28%//P38074

[27940] C-NT2RP2005748

[27941] C-NT2RP2005752//Homo sapiens TNFR-related death receptor-6 (DR6) mRNA, complete cds.//0//1968bp//99%//AF068868

[27942] C-NT2RP2005753//Homo sapiens I-1 receptor candidate protein mRNA, complete cds.//0//1966bp//99%//AF082516

[27943] C-NT2RP2005763//EUKARYOTIC INITIATION FACTOR 4A (EIF-4A).//1.7E-61//374aa//38%//P47943

[27944] C-NT2RP2005767//G. gallus PB1 gene.//5E-163//1158bp//81%//X90849

[27945] C-NT2RP2005773//Homo sapiens pyrroline 5-carboxylate reductase isoform (P5CR2) mRNA, complete cds.//2.7E-180//656bp//99%//AF151351

[27946] C-NT2RP2005775//NEUROLYSIN PRECURSOR (EC 3.4.24.16) (NEUROTENSIN ENDOPEPTIDASE) (MITOCHONDRIAL OLIGOPEPTIDASE M) (MICROSOMAL ENDOPEPTIDASE) (MEP) (SOLUBLE ANGIOTENSIN-BINDING PROTEIN) (SABP).//2.1E-213//249aa//85%//Q02038

[27947] C-NT2RP2005781

[27948] C-NT2RP2005804

[27949] C-NT2RP2005835//SHP1 PROTEIN.//1 .8E-28//208aa//32%//P34223

[27950] C-NT2RP2005853

[27951] C-NT2RP2005868

[27952] C-NT2RP2005886

[27953] C-NT2RP2005890

[27954] C-NT2RP2005901//Homo sapiens mRNA for KIAA0971 protein, complete cds.//0//1977bp//99%//AB023188

[27955] C-NT2RP2005933//NUCLEOPORIN NUP57 (NUCLEAR PORE PROTEIN NUP57).//5E-11//155aa//34%//P48837

[27956] C-NT2RP2006038

[27957] C-NT2RP2006043//SPLICING FACTOR, ARGININE/SERINE-RICH 4 (PRE-MRNA SPLICING FACTOR SRP75).//1.5E-13//185aa//38%//Q08170

[27958] C-NT2RP2006052

[27959] C-NT2RP2006069

[27960] C-NT2RP2006071

[27961] C-NT2RP2006100//Homo sapiens mRNA; cDNA DKFZp564B102 (from clone DKFZp564B 102).//0//1759bp//99%//AL049970

[27962] C-NT2RP2006106

[27963] C-NT2RP2006141

[27964] C-NT2RP2006186//Homo sapiens mRNA for KIAA0654 protein, partial cds.//3.3E-189//899bp//97%//AB014554

[27965] C-NT2RP2006196

[27966] C-NT2RP2006200

[27967] C-NT2RP2006219//H. sapiens mRNA for DGCR6 protein.//1.1E-214//1026bp//97%//X96484

[27968] C-NT2RP2006237

[27969] C-NT2RP2006238

[27970] C-NT2RP2006275//MICROTUBULE-ASSOCIATED PROTEIN 1B [CONTAINS: LIGHT CHAIN LC 1]1.112E-5911388aa//32%//P46821

[27971] C-NT2RP2006312//Homo sapiens BAF57 (BAF57) gene, complete cds.//2.8E-274//1236bp//99%//AF035262

[27972] C-NT2RP2006333

[27973] C-NT2RP2006365

[27974] C-NT2RP2006393

[27975] C-NT2RP2006436//ANTERIOR-RESTRICTED HOMEOBOX PROTEIN (RATHKE POUCH HOMEO BOX).//0.00000034//50aa//50%//Q61658

[27976] C-NT2RP2006456

[27977] C-NT2RP2006464//Homo sapiens mRNA for AND-1 protein.//0//2181bp//99%//AJ006266

[27978] C-NT2RP2006467

[27979] C-NT2RP2006472

[27980] C-NT2RP2006565//Sus scrofa mRNA for SCAMP1 protein.//0//1276bp//84%//O15710

[27981] C-NT2RP2006571//CYTOCHROME P4502G1 (EC 1.14.14.1) (CYPIIGI) (P450-NMB) (OLFACTIVE).//4.2E- 134//486aa//50%//P24461

[27982] C-NT2RP2006573//2′,3′-CYCLIC NUCLEOTIDE 3′-PHOSPHODIESTERASE (EC 3.1.4.37) (CNP).//0.0000055//169aa//25%//P09543

[27983] C-NT2RP3000031//Homo sapiens mRNA for KIAA0901 protein, complete cds.//0//2547bp//99%//AB020708

[27984] C-NT2RP3000072

[27985] C-NT2RP3000142//Homo sapiens mRNA for KIAA0592 protein, partial cds.//0//404bp//97%//AB011164

[27986] C-NT2RP3000220

[27987] C-NT2RP3000251

[27988] C-NT2RP3000252//Homo sapiens GTP-binding protein NGB mRNA, complete cds.//0//2388bp//99%//AF120334

[27989] C-NT2RP3000312

[27990] C-NT2RP3000320//Homo sapiens partial mRNA for putative p621 protein which interacts with transcription factor Sp1.//0//1544bp//100%//AJ242978

[27991] C-NT2RP3000333

[27992] C-NT2RP3000348

[27993] C-NT2RP3000350//PROBABLE GTP-BINDING PROTEIN HP0303.//0.000000028//185aa//31%//O25074

[27994] C-NT2RP3000359//GTP:AMP PHOSPHOTRANSFERASE MITOCHONDRIAL (EC 2.7.4.10) (AK3).//2E-111//226aa//92%//P08760

[27995] C-NT2RP3000361//Homo sapiens mRNA, complete cds, similar to yeast pre-mRNA splicing factors, Prp1/Zer1 and Prp6.//0//2072bp//98%//AB019219

[27996] C-NT2RP3000366//RAS-RELATED PROTEIN RAB-18.//2.1E-107//206aa//99%//P35293

[27997] C-NT2RP3000397//PUTATIVE PRE-MRNA SPLICING FACTOR RNA HELICASE (DEAH BOX PROTEIN 13)/1.7E-139//679aa//41%//O43143

[27998] C-NT2RP3000403//Homo sapiens formin binding protein 21 mRNA, complete cds.//0//2364bp//99%//AF071185

[27999] C-NT2RP3000484

[28000] C-NT2RP3000527//ZINC FINGER PROTEIN 43 (ZINC PROTEIN HTF6).//4.8E-28//536aa//27%//P28160

[28001] C-NT2RP3000531//POLIOVIRUS RECEPTOR PRECURSOR (CD 155 ANTIGEN).//1.9E-12//192aa//30%//P15151

[28002] C-NT2RP3000596//TRICHOHYALIN.//2.5E-17//304aa//28%//Q07283

[28003] C-NT2RP3000599

[28004] C-NT2RP3000632//ZINC FINGER PROTEIN 84 (ZINC FINGER PROTEIN HPF2).//3E-140//499aa//46%//P51523

[28005] C-NT2RP3000644

[28006] C-NT2RP3000661

[28007] C-NT2RP3000665

[28008] C-NT2RP3000690

[28009] C-NT2RP3000759//ADP-RIBOSYLATION FACTOR.//7E-28//176aa//34%//Q94650

[28010] C-NT2RP3000825//NEUROGENIC LOCUS NOTCH 3 PROTEIN.//2.5E-36//417aa//31%//Q61982

[28011] C-NT2RP3000836

[28012] C-NT2RP3000841

[28013] C-NT2RP3000850

[28014] C-NT2RP3000852

[28015] C-NT2RP3000859

[28016] C-NT2RP3000868//Human ovarian cancer downregulated myosin heavy chain homolog (Doc1) mRNA, complete cds.//6.9E-69//1611bp//61%//U53445

[28017] C-NT2RP3000869

[28018] C-NT2RP3000901

[28019] C-NT2RP3000917//Homo sapiens Dhm1-like protein mRNA, complete cds.110113199bp//99%//AF064257

[28020] C-NT2RP3000919//Rattus norvegicus golgi peripheral membrane protein p65 (GRASP65) mRNA, complete cds.//2.7E-185//585bp//88%//AF015264

[28021] C-NT2RP3000980

[28022] C-NT2RP3000994//MATERNAL EFFECT PROTEIN STAUFEN.//0.00000006//78aa//48%//P25159

[28023] C-NT2RP3001004

[28024] C-NT2RP3001081

[28025] C-NT2RP3001084

[28026] C-NT2RP3001096//Rattus norvegicus leprecan (leprel) mRNA, complete cds.//1.7E-94//787bp//66%//AF087433

[28027] C-NT2RP3001107//PEREGRIN (BR140 PROTEIN).//3E-44//260aa//40%//P55201

[28028] C-NT2RP3001109

[28029] C-NT2RP3001116

[28030] C-NT2RP3001119

[28031] C-NT2RP3001133

[28032] C-NT2RP3001140//Homo sapiens mRNA for KIAA0762 protein, partial cds.//0//2802bp//99%//AB018305

[28033] C-NT2RP3001155//Homo sapiens mRNA for AND-1 protein.//0//2732bp//99%//AJ006266

[28034] C-NT2RP3001176//HYPOTHETICAL 65.3 KD PROTEIN IN MAD1-SCY1 INTERGENIC REGION.//1.7E-10//196aa//27%//P53154

[28035] C-NT2RP3001214

[28036] C-NT2RP3001216//CYLICIN I (MULTIPLE-BAND POLYPEPTIDE I) (FRAGMENT).//0.0000023//137aa//33%//P35663

[28037] C-NT2RP3001221//GAMMA-BUTYROBETAINE, 2-OXOGLUTARATE DIOXYGENASE (EC 1.14.11.1) (GAMMA-BUTYROBETAINE HYDROXYLASE).//1.9E-31//353aa//30%//P80193

[28038] C-NT2RP3001236

[28039] C-NT2RP3001239//MICROTUBULE-ASSOCIATED PROTEIN 1B (MAP1.2) (MAP1(X)) [CONTAINS: LIGHT CHAIN LC1].//1.2E-166//395aa//51%//P14873

[28040] C-NT2RP3001260//Homo sapiens mRNA for KIAA0911 protein, complete cds.//0//2497bp//99%//AB020718

[28041] C-NT2RP3001307

[28042] C-NT2RP3001325

[28043] C-NT2RP3001384//Homo sapiens NAKAP95 mRNA for neighbor of A-kinase anchoring protein 95, complete cds.//0//1213bp//99%//AB025905

[28044] C-NT2RP3001392

[28045] C-NT2RP3001396

[28046] C-NT2RP3001398//TRANSCRIPTIONAL REPRESSOR CTCF.//1.3E-61//374aa//36%//P49711

[28047] C-NT2RP3001407//SCY1 PROTEIN.//0.00000033//143aa//25%//P53009

[28048] C-NT2RP3001420

[28049] C-NT2RP3001426//DNAJ PROTEIN (FRAGMENT).//1E-16//77aa//46%//O33529

[28050] C-NT2RP3001427//WERNER SYNDROME HELICASE HOMOLOG.//2.7E-10//159aa//33%//O09053

[28051] C-NT2RP3001457

[28052] C-NT2RP3001472//NONHISTONE CHROMOSOMAL PROTEIN 6A.//9. E-13//87aa//43%//P11632

[28053] C-NT2RP3001495//Human oxidoreductase (HHCMA56) mRNA, complete cds.//0//1475bp//99%//U13395

[28054] C-NT2RP3001497//Homo sapiens multiple membrane spanning receptor TRC8 (TRC8) mRNA, complete cds.//0//2295bp//99%//AF064801

[28055] C-NT2RP3001529//SPOOB-ASSOCIATED GTP-BINDING PROTEIN.//1E-61//345aa//42%//P20964

[28056] C-NT2RP3001621

[28057] C-NT2RP3001629

[28058] C-NT2RP3001642//HYPOTHETICAL PROTEIN KIAA0210.//6.8E-18//91aa//38%//Q92609

[28059] C-NT2RP3001646/[WD-40 REPEAT PROTEIN MS12.//8.8E-09//132aa//31%//O22468

[28060] C-NT2RP3001676

[28061] C-NT2RP3001679

[28062] C-NT2RP3001799//MYOSIN HEAVY CHAIN, STRIATED MUSCLE.//1.6E-11//348aa//27%//P24733

[28063] C-NT2RP3001819//RING CANAL PROTEIN (KELCH PROTEIN).//7.4E-18//249aa//30%//Q04652

[28064] C-NT2RP3001896

[28065] C-NT2RP3001915

[28066] C-NT2RP3001929

[28067] C-NT2RP3003193//ZINC FINGER PROTEIN 135./17.3E-98//269aa/162% M/P52742

[28068] C-NT2RP3004466

[28069] C-NT2RP3004480//VACUOLAR PROTEIN SORTING-ASSOCIATED PROTEIN VPS35.//3.3E-113//466aa//42%//P34110

[28070] C-NT2RP3004539//Homo sapiens mRNA for KIAA0632 protein, partial cds.//0/1520bp//99%//AB014532

[28071] C-NT2RP3004544//Homo sapiens mRNA for KIAA0554 protein, partial cds.//0//974bp//95%//AB011126

[28072] C-NT2RP3004569//ANKYRIN, BRAIN VARIANT 1 (ANKYRIN B) (ANKYRIN, NONERYTHROID).//0.000000038//150aa//28%//Q01484

[28073] C-NT2RP3004572//Homo sapiens cofactor of initiator function (CIF 150) mRNA, complete cds.//0//1770bp//99%//AF026445

[28074] C-NT2RP3004578//Homo sapiens mRNA for KIAA0477 protein, complete cds.//0//639bp//99%//AB007946

[28075] C-NT2RP3004594//Homo sapiens mRNA for AND-1 protein.//0//1807bp//99%//AJ006266

[28076] C-NT2RP3004617//ZINC-BINDING PROTEIN A33 .//7.2E-75//464aa//35%//Q02084

[28077] C-NT2RP3004618//Homo sapiens putative RNA-binding protein Q99 mRNA, complete cds.//01/3972bp//98%//AF093097

[28078] C-NT2RP3004669//ETHANOLAMINE KINASE (EC 2.7.1.82) (EASILY SHOCKED PROTEIN).//1.7E-72//254aa//45%//P54352

[28079] C-NT2RP4000008//CHLORINE CHANNEL PROTEIN P64.//2.6E-98//239aa//64%//P35526

[28080] C-NT2RP4000051//SYNAPTONEMAL COMPLEX PROTEIN SC65.//4.9E-51//335aa//37%//Q64375

[28081] C-NT2RP4000078//Homo sapiens mRNA for KIAA0850 protein, complete cds.//0//3013bp//99%//AB020657

[28082] C-NT2RP4000109//Homo sapiens mRNA for MEGF5, partial cds.//0//2161bp//99%//AB011538

[28083] C-NT2RP4000111//CLEAVAGE AND POLYADENYLATION SPECIFICITY FACTOR, 100 KD SUBUNIT (CPSF 100 KD SUBUNIT).//0//728aa//99%//Q10568

[28084] C-NT2RP4000129

[28085] C-NT2RP4000147//Drosophila melanogaster putative ARFI GTPase activating protein (ARFI -GAP) mRNA, complete cds.//3.8E-28//528bp//67%//AF011427

[28086] C-NT2RP4000150

[28087] C-NT2RP4000151

[28088] C-NT2RP4000159

[28089] C-NT2RP4000185

[28090] C-NT2RP4000210//Homo sapiens mRNA for KIAA0700 protein, partial cds.//0//4149bp//99%//AB014600

[28091] C-NT2RP4000212//ATRIAL GLAND-SPECIFIC ANTIGEN PRECURSOR (AGSA).//5.9E-15//104aa//40%//P15287

[28092] C-NT2RP4000243//Homo sapiens mRNA for cartilage-associated protein (CASP).//0//1932bp//99%//AJ006470

[28093] C-NT2RP4000246//NPC DERIVED PROLINE RICH PROTEIN 1 (NDPP-1).//2.7E-84//208aa//76%//Q03173

[28094] C-NT2RP4000259//GLUTATHIONE PEROXIDASE 2 (EC 1.11.1.9).//5.5E-29//153aa//43%//O23968

[28095] C-NT2RP4000290//HYPOTHETICAL 116.5 KD PROTEIN C20G8.09C IN CHROMOSOME I.//3.5E-297//024aa//55%//P87115

[28096] C-NT2RP4000312//ADENYLATE CYCLASE (EC 4.6.1.1) (ATP PYROPHOSPHATE-LYASE) (ADENYLYL CYCLASE).//1.5E-26//237aa//28%//Q01631

[28097] C-NT2RP4000323//KERATIN, ULTRA HIGH-SULFUR MATRIX PROTEIN (UHS KERATIN).//0.0000003//101aa//32%//P26372

[28098] C-NT2RP4000355

[28099] C-NT2RP4000360//Homo sapiens mRNA for KIAA0738 protein, complete cds.//0//4074bp//99%//AB018281

[28100] C-NT2RP4000367//Homo sapiens IkappaB kinase complex associated protein (IKAP) mRNA, complete cds.//0//4782bp//99%//AF044195

[28101] C-NT2RP4000370//MITOCHONDRIAL PEPTIDE CHAIN RELEASE FACTOR I PRECURSOR (MRF-1).//2.6E-77//262aa//54%//O75570

[28102] C-NT2RP4000376//Homo sapiens mRNA for phospholipase A2 activating protein.//0//2412bp//99%//AJ238243

[28103] C-NT2RP4000381

[28104] C-NT2RP4000398//ZINC FINGER PROTEIN 140.//2.9E-110//435aa//50%//P52738

[28105] C-NT2RP4000415

[28106] C-NT2RP4000417//MANNOSYL-OLIGOSACCHARIDE ALPHA-1,2-MANNOSIDASE (EC 3.2.1.113)(MAN(9)-ALPHA-MANNOSIDASE) (FRAGMENT).//2.6E-51//438aa//33%//P45701

[28107] C-NT2RP4000448//Homo sapiens mRNA; cDNA DKFZp566G0746 (from clone DKFZp566G0746).//0//3991bp//99%//AL050078

[28108] C-NT2RP4000449

[28109] C-NT2RP4000455//TRANS-ACTING TRANSCRIPTIONAL PROTEIN ICPO.//0.0000003//175aa//27%//P09309

[28110] C-NT2RP4000457//UBIQUITIN CARBOXYL-TERMINAL HYDROLASE 15 (EC 3.1.2.15) (UBIQUITIN THIOLESTERASE 15) (UBIQUITIN-SPECIFIC PROCESSING PROTEASE 15)(DEUBIQUITINATING ENZYME 15).//2.5E-37//291aa//38%//P50101

[28111] C-NT2RP4000480

[28112] C-NT2RP4000481//ATP-DEPENDENT RNA HELICASE DOBI (MRNA TRANSPORT REGULATOR MTR4).//1.9E-67//721aa//29%//Q09475

[28113] C-NT2RP4000498//MOB1 PROTEIN (MPS1 BINDER 1).//8.8E-50//214aa//50%//P40484

[28114] C-NT2RP4000500

[28115] C-NT2RP4000518//ATP-DEPENDENT RNA HELICASE ROKI1/1.H5E-106//495aa//45%//P45818

[28116] C-NT2RP4000524

[28117] C-NT2RP4000541

[28118] C-NT2RP4000556//SUR4 PROTEIN (SRE 1 PROTEIN).//7.4E-14//233aa//31%//P40319

[28119] C-NT2RP4000560

[28120] C-NT2RP4000588

[28121] C-NT2RP4000614//Homo sapiens TLS-associated protein TASR-2 mRNA, complete cds.//2.9E-188//863bp//99%//AF067730

[28122] C-NT2RP4000638

[28123] C-NT2RP4000648//TRANS-ACTING TRANSCRIPTIONAL PROTEIN ICPO.//0.00000037//175aa//27%//P09309

[28124] C-NT2RP4000657//SPORE COAT POLYSACCHARIDE BIOSYNTHESIS PROTEIN SPSE.//1.1E-32//350aa//30%//P39625

[28125] C-NT2RP4000704

[28126] C-NT2RP4000713//HYPOTHETICAL 55.1 KD PROTEIN B0416.5 IN CHROMOSOME X.//1.1E-13//295aa//27%//Q11073

[28127] C-NT2RP4000724//RETROVIRUS-RELATED ENV POLYPROTEIN.//3.2E-191//199aa//78%//P10267

[28128] C-NT2RP4000728//Homo sapiens mRNA for KIAA0931 protein, partial cds.//10//3392bp//95%//AB023148

[28129] C-NT2RP4000737

[28130] C-NT2RP4000739//Homo sapiens mRNA for KIAA1012 protein, complete cds.//0//3574bp//99%//AB023229

[28131] C-NT2RP4000781//HYPOTHETICAL 27.7 KD PROTEIN IN CPT1-SPC98 INTERGENIC REGION.//0.000000032//67aa//31%//P53915

[28132] C-NT2RP4000817//Homo sapiens mRNA for KIAA0470 protein, complete cds.//0//927bp//99%//AB007939

[28133] C-NT2RP4000833

[28134] C-NT2RP4000837//Homo sapiens mRNA for zinc finger protein SALLI.//4.3E-94//810bp//65%//Y18265

[28135] C-NT2RP4000839//VEGETATIBLE INCOMPATIBILITY PROTEIN HET-E-1./8.5E-21//271aa//28%//Q00808

[28136] C-NT2RP4000855//AMINOPEPTIDASE B (EC 3.4.11.6) (ARGINYL AMINOPEPTIDASE)(ARGININE AMINOPEPTIDASE) (CYTOSOL AMINOPEPTIDASE IV) (AP-B).115.7E-82//324aa//48%//O09175

[28137] C-NT2RP4000865//ZINC FINGER PROTEIN ZFP-36 (FRAGMENT).//4.1E-85//174aa//55%//P16415

[28138] C-NT2RP4000878//MYELOID UPREGULATED PROTEIN.//6.2E-91//173aa//87%//O35682

[28139] C-NT2RP4000879//UBIQUITIN-ACTIVATING ENZYME El (Al S9 PROTEIN).//9.6E-96//513aa//42%//P22314

[28140] C-NT2RP4000925//FIBROMODULIN PRECURSOR (FM) (COLLAGEN-BINDING 59 KD PROTEIN).//2.6E-26//227aa//36%//Q06828

[28141] C-NT2RP4000927//UBIQUITIN CARBOXYL-TERMINAL HYDROLASE DUB-1 (EC 3.1.2.15) (UBIQUITIN THIOLESTERASE DUB-1) (UBIQUITIN-SPECIFIC PROCESSING PROTEASE DUB-1) (DEUBIQUITINATING ENZYME 1).//1.5E-76//346aa//43%//Q61068

[28142] C-NT2RP4000928//Homo sapiens mRNA for CDS2 protein.//0//2487bp//99%//Y16521

[28143] C-NT2RP4000929//PUTATIVE ATP-DEPENDENT RNA HELICASE MJ1505.//0.00000014//185aa//25%//Q58900

[28144] C-NT2RP4000955

[28145] C-NT2RP4000973//PROBABLE PROTEIN DISULFIDE ISOMERASE P5 PRECURSOR (EC 5.3.4.1).//1 .4E-26//90aa//42%//P38660

[28146] C-NT2RP4000975

[28147] C-NT2RP4000979

[28148] C-NT2RP4000984

[28149] C-NT2RP4000989//UNC-47 PROTEIN.//0.0000082//173aa//25%//P34579

[28150] C-NT2RP4000997//DNA-DIRECTED RNA POLYMERASE 1135 KD POLYPEPTIDE (EC 2.7.7.6) (RNA POLYMERASE I SUBUNIT 2) (RPA135).//0//838aa//87%//P70700

[28151] C-NT2RP4001004//VACUOLAR PROTEIN 8.//3.7E-16//401aa//26%//P39968

[28152] C-NT2RP4001006

[28153] C-NT2RP4001010//Homo sapiens mRNA for KIAA0964 protein, complete cds.110112482bp//99%//AB023181

[28154] C-NT2RP4001041//PROBABLE LEUCYL-TRNA SYNTHETASE (EC 6.1.1.4) (LEUCINE-TRNA LIGASE)//1.5E-92//443aa//44%//Q09996

[28155] C-NT2RP4001057

[28156] C-NT2RP4001064//SYNAPTONEMAL COMPLEX PROTEIN SC65.//6.7E-51//335aa//37%//Q64375

[28157] C-NT2RP4001079//CALCIUM-TRANSPORTING ATPASE 1 (EC 3.6.1.38) (GOLGI CA2+-ATPASE).//1.3E-123//563aa//46%//P13586

[28158] C-NT2RP4001080//Homo sapiens mRNA for Rod1, complete cds.//0//1439bp//99%//AB023967

[28159] C-NT2RP4001086

[28160] C-NT2RP4001095//DOUBLE-STRANDED RNA-SPECIFIC EDITASE 1 (EC 3.5.-.-) (DSRNA ADENOSINE DEAMINASE) (RNA EDITING ENZYME 1).//2.6E-17//121aa//36%//P51400

[28161] C-NT2RP4001100

[28162] C-NT2RP4001117//PROTEIN TRANSPORT PROTEIN SEC61 ALPHA SUBUNIT.//1.9E-115//224aa//100%//P38378

[28163] C-NT2RP4001122//TIPD PROTEIN.//1 .4E-65//253aa//41%//O15736

[28164] C-NT2RP4001126//TRICHOHYALIN.//2 .9E-18//380aa//26%//Q07283

[28165] C-NT2RP4001138

[28166] C-NT2RP4001143//SUCCINYL-DIAMINOPIMELATE DESUCCINYLASE (EC 3.5.1.18) (SDAP).//0.00000021//93aa//33%//P44514

[28167] C-NT2RP4001148//SOF1 PROTEIN.//1.3E-104//236aa//52%//P33750

[28168] C-NT2RP4001149

[28169] C-NT2RP4001150//NG-CAM RELATED CELL ADHESION MOLECULE PRECURSOR (NR-CAM) (BRAVO).//3 .4E-2911385aa//29%//P35331

[28170] C-NT2RP4001174//NON-GREEN PLASTID TRIOSE PHOSPHATE TRANSLOCATOR PRECURSOR (CTPT).//4.7E-29//227aa//35%//P52178

[28171] C-NT2RP4001206//Drosophila melanogaster strawberry notch (sno) mRNA, complete cds.//4.4E-104//460bp//65%//U95760

[28172] C-NT2RP4001207

[28173] C-NT2RP4001210

[28174] C-NT2RP4001219//PROBABLE PROTEIN DISULFIDE ISOMERASE P5 PRECURSOR (EC 5.3.4.1).116.2E-27//90aa//42%//P38660

[28175] C-NT2RP4001228//RING CANAL PROTEIN (KELCH PROTEIN).//1.8E-103//508aa//43%//Q04652

[28176] C-NT2RP4001235

[28177] C-NT2RP4001256

[28178] C-NT2RP4001260//Homo sapiens mRNA for KIAA0875 protein, partial cds.//0//2876bp//99%//AB020682

[28179] C-NT2RP4001274//Human transporter protein (g17) mRNA, complete cds.//4.4E-58//196bp//61%//U49082

[28180] C-NT2RP4001276//TRICHOHYALIN.//7.9E-09//126aa//32%//Q07283

[28181] C-NT2RP4001313//MITOCHONDRIAL IMPORT RECEPTOR SUBUNIT TOM40 (MOM38 PROTEIN) (TRANSLOCASE OF OUTER MEMBRANE 40 KD SUBUNIT).//5.9E-17//296aa//29%//P24391

[28182] C-NT2RP4001315//Bos taurus mRNA for Rab5 GDP/GTP exchange factor, Rabex5.//8.5E-213//129bp//92%//AJ001119

[28183] C-NT2RP4001339//Homo sapiens mRNA for AMMERCI protein.//9.2E-160//736bp//99%//AJ007014

[28184] C-NT2RP4001343

[28185] C-NT2RP4001345//Homo sapiens mRNA for LCAT-like lysophospholipase (LLPL), complete cds.//2.7e-310//1400bp//100%//AB017494

[28186] C-NT2RP4001351//Human ovarian cancer downregulated myosin heavy chain homolog (Doc1) mRNA, complete cds.//1.4E-58//2425bp//59%//U53445

[28187] C-NT2RP4001353

[28188] C-NT2RP4001372//IRREGULAR CHIASM C-ROUGHEST PROTEIN PRECURSOR (IRREC PROTEIN).//1.6E-19//222aa//30%//Q08180

[28189] C-NT2RP4001373

[28190] C-NT2RP4001375//NON-RECEPTOR TYROSINE KINASE SPORE LYSIS A (EC 2.7.1.112) (TYROSINE- PROTEIN KINASE 1).//9.2E-17//146aa//35%//P18160

[28191] C-NT2RP4001379//HYPOTHETICAL 49.1 KD PROTEIN C11D3.06 IN CHROMOSOME 1.112E-53//436aa//30%//Q10085

[28192] C-NT2RP4001407//Homo sapiens mRNA for KIAA0923 protein, complete cds.110112716bp//99%//AB023140

[28193] C-NT2RP4001414//SEPTIN 2 HOMOLOG (FRAGMENT).//7.7E-190//422aa//82%//Q14141

[28194] C-NT2RP4001433//ZINC FINGER PROTEIN 184 (FRAGMENT).//1.2E-138//419aa//54%//Q99676

[28195] C-NT2RP4001474//Xenopus laevis putative Zic3 binding protein mRNA, complete cds.//2.7E-66//738bp//71%//AF12913

[28196] C-NT2RP4001483//2-OXOGLUTARATE DEHYDROGENASE El COMPONENT PRECURSOR (EC 1.2.4.2) (ALPHA-KETOGLUTARATE DEHYDROGENASE).//0//962aa//78%//Q02218

[28197] C-NT2RP4001498//ANKYRIN REPEAT-CONTAINING PROTEIN AKR1.//1.1E-27//374aa//29%//P39010

[28198] C-NT2RP4001502

[28199] C-NT2RP4001507

[28200] C-NT2RP4001524

[28201] C-NT2RP4001547//HYPOTHETICAL 45.0 KD PROTEIN IN NOT1/CDC39-HMR INTERGENIC REGION.//5.7E-54//242aa//38%//P25656

[28202] C-NT2RP4001551//Homo sapiens chromatin-specific transcription elongation factor FACT 140 kDa subunit mRNA, complete cds.//0//3202bp//99%//AF152961

[28203] C-NT2RP4001555//PUTATIVE ENDONUCLEASE VIII (EC 3.2.-.-).//4.7E-09//216aa//24%//P96902

[28204] C-NT2RP4001567//ARMADILLO SEGMENT POLARITY PROTEIN.//0.00000054//213aa//26%//Q02453

[28205] C-NT2RP4001568//ZINC FINGER PROTEIN GCS 1./1.8E-10//109aa//36%//P35197

[28206] C-NT2RP4001571

[28207] C-NT2RP4001574//Homo sapiens coat protein gamma-cop mRNA, complete cds.//10//3046bp//99%//AF100756

[28208] C-NT2RP4001575//Rattus norvegicus mRNA for AREI protein.//0//1087bp//87%//AJ223830

[28209] C-NT2RP4001592//ISOLEUCYL-TRNA SYNTHETASE (EC 6.1.1.5) (ISOLEUCINE-TRNA LIGASE) (ILERS).//1.7E-141//373aa//47%//P73505

[28210] C-NT2RP4001610//Homo sapiens mRNA for KIAA0869 protein, partial cds.//0/11897bp//99%//AB020676

[28211] C-NT2RP4001614

[28212] C-NT2RP4001634

[28213] C-NT2RP4001638//DNA REPAIR/TRANSCRIPTION PROTEIN MET18/MMS19.//5.1E-46//234aa//32%//P40469

[28214] C-NT2RP4001644//MYOSIN LIGHT CHAIN KINASE (EC 2.7.1.117) (MLCK).//6.4E-19//111aa//45%//P25323

[28215] C-NT2RP4001677

[28216] C-NT2RP4001679

[28217] C-NT2RP4001696//CLEAVAGE AND POLYADENYLATION SPECIFICITY FACTOR, 100 KD SUBUNIT (CPSF 100 KD SUBUNIT).//4E-10//243aa//25%//Q10568

[28218] C-NT2RP4001725//GUANINE NUCLEOTIDE-BINDING PROTEIN BETA SUBUNIT.//3E-10//128aa//32%//Q10282

[28219] C-NT2RP4001730//UDP-GLUCOSE:GLYCOPROTEIN GLUCOSYLTRANSFERASE PRECURSOR (EC 2.4.1.-) (DUGT).//6.4E-170//168aa//33%//Q09332

[28220] C-NT2RP4001739

[28221] C-NT2RP4001753//ZINC FINGER PROTEIN 84 (ZINC FINGER PROTEIN HPF2).//3.9E-236//665aa//58%//P51523

[28222] C-NT2RP4001760//PUTATIVE RHO/RAC GUANINE NUCLEOTIDE EXCHANGE FACTOR (RHO/RAC GEF) (FACIOGENITAL DYSPLASIA PROTEIN).//4.1E-16//263aa//27%//P98174

[28223] C-NT2RP4001790//Homo sapiens mRNA for KIAA1015 protein, complete cds.//1013//144bp//99%//AB023232

[28224] C-NT2RP4001803

[28225] C-NT2RP4001822//PLATELET-ENDOTHELIAL TETRASPAN ANTIGEN 3 (PETA-3) (GP27) (MEMBRANE GLYCOPROTEIN SFA-1) (CD151 ANTIGEN).//1.2E-30//241aa//30%//O35566

[28226] C-NT2RP4001823//MICROFIBRIL-ASSOCIATED GLYCOPROTEIN 4./ 1.1E-19//77aa//54%//P55083

[28227] C-NT2RP4001828

[28228] C-NT2RP4001838//Homo sapiens CoREST protein (COREST) mRNA, complete cds.//6.3E-99//555bp//73%//AF155595

[28229] C-NT2RP4001861//TRICHOHYALIN.//1E-35//307aa//34%//P37709

[28230] C-NT2RP4001893//Homo sapiens mRNA; cDNA DKFZp5640043 (from clone DKFZp5640043).//0//1306bp//98%//AL050390

[28231] C-NT2RP4001896//VEGETATIBLE INCOMPATIBILITY PROTEIN HET-E-1 .//0.000000014//345aa//25%//Q00808

[28232] C-NT2RP4001901

[28233] C-NT2RP4001927//MICROTUBULE-ASSOCIATED PROTEIN YTM1.//1.3E-38//258aa//32%//Q12024

[28234] C-NT2RP4001938//TRANSCRIPTIONAL REPRESSOR CTCF.//9.8E-60//303aa//38%//P49711

[28235] C-NT2RP4001946//PROTEIN-L-ISOASPARTATE O-METHYLTRANSFERASE (EC 2.1.1.77) (PROTEIN- BETA-ASPARTATE METHYLTRANSFERASE) (PIMT) (PROTEIN L-ISOASPARTYL METHYLTRANSFERASE) (L-ISOASPARTYL PROTEIN CARBOXYL METHYLTRANSFERASE).//1.5E-13//211aa//28%//Q43209

[28236] C-NT2RP4001950//GLUTAMIC ACID-RICH PROTEIN PRECURSOR.//1.2E-13//356aa//27%//P13816

[28237] C-NT2RP4001953

[28238] C-NT2RP4001966

[28239] C-NT2RP4001975

[28240] C-NT2RP4002018//RING CANAL PROTEIN (KELCH PROTEIN).//6.9E-24//370aa//27%//Q04652

[28241] C-NT2RP4002052

[28242] C-NT2RP4002058//PUTATIVE PRE-MRNA SPLICING FACTOR RNA HELICASE (DEAH BOX PROTEIN 13)//1E-137//679aa//40%//O43143

[28243] C-NT2RP4002071

[28244] C-NT2RP4002078//ZINC FINGER PROTEIN 91 (ZINC FINGER PROTEIN HTFIO) (HPF7).//3E-150//722aa//39%//Q05481

[28245] C-NT2RP4002081//TRANSCRIPTION INITIATION FACTOR IIA ALPHA AND BETA CHAINS (TFIIA P35 AND P19 SUBUNITS) (TFIIA-42) (TFIIAL).//0.0000067//250aa//31%//P52655

[28246] C-NT2RP4002298

[28247] C-NT2RP4002408//PROTEIN KINASE CEKI (EC 2.7.1.-).//1.5E-63//159aa//53%//P38938

[28248] C-NT2RP4002791

[28249] C-NT2RP4002888//Homo sapiens mRNA; cDNA DKFZp434F172 (from clone DKFZp434F 172).//0//2557bp//99%//AL080202

[28250] C-NT2RP4002905

[28251] C-NT2RP5003461//RLR1 PROTEIN.//9.7E-22//177aa//27%//P53552

[28252] C-NT2RP5003477//VEGETATIBLE INCOMPATIBILITY PROTEIN HET-E-1.//5.5E-15//280aa//27% H1Q00808

[28253] C-NT2RP5003492

[28254] C-NT2RP5003500

[28255] C-NT2RP5003506

[28256] C-NT2RP5003522//NADPH-CYTOCHROME P450 REDUCTASE (EC 1.6.2.4) (CPR).//3.3E-23//219aa//40%//P37116

[28257] C-NT2RP5003524

[28258] C-NT2RP5003534

[28259] C-OVARC1000006//HISTONE H2A.1./1.1E-55//117aa//99%//P02262

[28260] C-OVARC1000013//APOPTOTIC PROTEASE ACTIVATING FACTOR 1 (APAF-1).//0.0000042//102aa//32%//O14727

[28261] C-OVARC1000014//Homo sapiens GLE1 (GLE1) mRNA, complete cds.//2.6E-295//393bp//97%//AF058922

[28262] C-OVARC1000035

[28263] C-OVARC1000060//EXTRACELLULAR RIBONUCLEASE LE PRECURSOR (EC 3.1.27.1) (RNASE LE).//0.00000032//60aa//45%//P80022

[28264] C-OVARC1000087//HISTONE MACR0-H2A.1.//1 .6E-12//174aa//26%//Q02874

[28265] C-OVARC1000091//HOST CELL FACTOR C1 (HCF) (VP16 ACCESSORY PROTEIN) (HFC1) (VCAF) (CFF).//8.4E-14//259aa//30%//P51610

[28266] C-OVARC1000113

[28267] C-OVARC1000139//Homo sapiens CGI-21 protein mRNA, complete cds.//0//1562bp//99%//AF132955

[28268] C-OVARC1000148

[28269] C-OVARC1000151//Homo sapiens partial mRNA for putative protein p38 interacting with transcription factor Sp 1.//2.5E-95//461bp//98%//AJ242975

[28270] C-OVARC1000168

[28271] C-OVARC1000209//Oryza sativa submergence induced protein 2A mRNA, complete cds.//1.8E-32//511bp//65%//AF068332

[28272] C-OVARC1000212

[28273] C-OVARC1000241//HYPOXIA-INDUCIBLE FACTOR 1 ALPHA (HIF-1 ALPHA) (ARNT INTERACTING PROTEIN) (MEMBER OF PAS PROTEIN 1) (MOP 1) (HIF1 ALPHA).//8.2E-120//351aa//54%//Q16665

[28274] C-OVARC1000288//VACUOLAR AMINOPEPTIDASE I PRECURSOR (EC 3.4.11.22) (POLYPEPTIDASE)(LEUCINE AMINOPEPTIDASE IV) (LAPIV) (AMINOPEPTIDASE III)(AMINOPEPTIDASE YSCI).//5 .4E-5311384aa//30%//P14904

[28275] C-OVARC1000304//PROTEIN MOV-10.//1.1E-24911519aa//87%//P23249

[28276] C-OVARC1000309//THREONINE SYNTHASE (EC 4.2.99.2).//2.7E-40//154aa//38%//P29363

[28277] C-OVARC1000321

[28278] C-OVARC1000326

[28279] C-OVARC1000335//HYPOTHETICAL 39.3 KD PROTEIN IN GCN4-WBP1 INTERGENIC REGION.115.9E-14//200aa//27%//P40004

[28280] C-OVARC1000347

[28281] C-OVARC1000384

[28282] C-OVARC1000411

[28283] C-OVARC1000420

[28284] C-OVARC1000437//TENS IN.//7.9E-181 //340aa//84%//Q04205

[28285] C-OVARC1000443//Homo sapiens mRNA; cDNA DKFZp434A073 (from clone DKFZp434AO73).//0//1216bp//99%//AL080126

[28286] C-OVARC1000461

[28287] C-OVARC1000465//PROTEIN TRANSPORT PROTEIN SEC7.//1.2E-25//227aa//25%//P11075

[28288] C-OVARC1000466

[28289] C-OVARC1000473//DUAL SPECIFICITY PROTEIN PHOSPHATASE 3 (EC 3.1.3.48) (EC 3.1.3.16) (DUAL SPECIFICITY PROTEIN PHOSPHATASE VHR).//3.1E-10//125aa//35%//P51452

[28290] C-OVARC1000479//Homo sapiens mRNA for KIAA0829 protein, partial cds.//0//11919bp//99%//AB020636

[28291] C-OVARC1000520//Homo sapiens supervillin mRNA, complete cds.//2.2E-157//892bp//91%//AF051850

[28292] C-OVARC1000564

[28293] C-OVARC1000576

[28294] C-OVARC1000588

[28295] C-OVARC1000605

[28296] C-OVARC1000640

[28297] C-OVARC1000649//Human squamous cell carcinama of esophagus mRNA for GRB-7 SH2 domain protein, complete cds.//0//1812bp//98%//D43772

[28298] C-OVARC1000661

[28299] C-OVARC1000771//RAS-RELATED PROTEIN RAB-2.//1.1E-46//121aa/179%//P08886

[28300] C-OVARC1000959//HYPOTHETICAL PROTEIN MJ0933.//1.2E-17//127aa//33%//Q58343

[28301] C-OVARC1001034//Mus musculus Fn54 mRNA, partial cds.//1.5E-178//1113bp//86%//AF001533

[28302] C-OVARC1001038//Homo sapiens mRNA for Ariadne-2 protein.//0//172bp//97%//AJ130978

[28303] C-OVARC1100065//Homo sapiens CGI-12 protein mRNA, complete cds.//1E-215//127bp//98%//AF132946

[28304] C-OVARC1001162

[28305] C-OVARC1001243

[28306] C-OVARC1001296

[28307] C-OVARC1001360

[28308] C-OVARC1001381//Homo sapiens mRNA for candidate tumor suppressor involved in B-CLL.//6E-148//683bp/199%//AJ224819

[28309] C-OVARC1001425

[28310] C-PLACE1000005

[28311] C-PLACE1000066//SSU72 PROTEIN.//1.1E-39//206aa//43%//P53538

[28312] C-PLACE1000142//3-HYDROXYBUTYRYL-COA DEHYDRATASE (EC 4.2.1.55) (CROTONASE).//2.8E-29//134aa//43%//P52046

[28313] C-PLACE1000184//Homo sapiens mRNA for KIAA0832 protein, complete cds.//5.5e-312//1411bp//99%//AB020639

[28314] C-PLACE1000185

[28315] C-PLACE1000213//Homo sapiens mRNA for KIAA0977 protein, complete cds.//0//1904bp//99%//AB023194

[28316] C-PLACE1000347

[28317] C-PLACE1000374

[28318] C-PLACE1000380//Homo sapiens mRNA for KIAA0853 protein, partial cds.//0//2208bp//99%//AB020660

[28319] C-PLACE1000383//Homo sapiens mRNA for MTMR1 protein.//0//753bp//99%//AJ224979

[28320] C-PLACE1000401//POLIOVIRUS RECEPTOR PRECURSOR (CDI155 ANTIGEN).//2.7E-30//352aa//31%//P15151

[28321] C-PLACE1000406//PTB-ASSOCIATED SPLICING FACTOR (PSF).//1.2E-132//334aa/172%//P23246

[28322] C-PLACE1000420//7,8-DIHYDRO-8-OXOGUANINE TRIPHOSPHATASE (EC 3.1.6.-) (8-OXO-DGTPASE).//0.0000028//134aa//29%//P53368

[28323] C-PLACE1000435

[28324] C-PLACE1000444

[28325] C-PLACE1000562

[28326] C-PLACE1000564

[28327] C-PLACE1000588//INTERFERON-INDUCED GUANYLATE-BINDING PROTEIN 1 (GUANINE NUCLEOTIDE- BINDING PROTEIN 1).//1.6E-270//437aa//86%//P32455

[28328] C-PLACE1000596//Homo sapiens mRNA for KIAA0850 protein, complete cds.//0//2393bp//99%//AB020657

[28329] C-PLACE1000611//Rattus norvegicus neural membrane protein 35 mRNA, complete cds.//2E-55//779bp//67%//AF044201

[28330] C-PLACE1000636//MALE STERILITY PROTEIN 2.//1.2E-39//261aa//27%//Q08891

[28331] C-PLACE1000716

[28332] C-PLACE1000748

[28333] C-PLACE1000755//Homo sapiens mRNA for Helicase-MOI, complete cds.//4.6E-250//1189bp//97%//AB028449

[28334] C-PLACE1000785//Homo sapiens mRNA for KIAA0648 protein, partial cds.//0/12002bp//99%//AB014548

[28335] C-PLACE1000798

[28336] C-PLACE1000863//PUTATIVE MITOCHONDRIAL 40S RIBOSOMAL PROTEIN YHR148W.//2.5E-49//181aa//54%//P32899

[28337] C-PLACE1000909//ANKYRIN REPEAT-CONTAINING PROTEIN AKR1.//2.6E-19//404aa//26%//P39010

[28338] C-PLACE1000948

[28339] C-PLACE1000972

[28340] C-PLACE1000977//BETA-CHIMAERIN (BETA-CHIMERIN).//4.4E-22//129aa//35%//Q03070

[28341] C-PLACE1001000

[28342] C-PLACE1001092//Homo sapiens sorting nexin 4 mRNA, complete cds.//0//1500bp//99%//AF065485

[28343] C-PLACE1001257//RING CANAL PROTEIN (KELCH PROTEIN).//4.3E-54//257aa//46%//Q04652

[28344] C-PLACE1001383//ZINC-FINGER PROTEIN UB1-D4 (APOPTOSIS RESPONSE ZINC FINGER PROTEIN REQUIEM).//3E-33//138aa//42%//Q61103

[28345] C-PLACE1001387//EPIDERMAL GROWTH FACTOR RECEPTOR KINASE SUBSTRATE EPS8.//2.3E-61//132aa//46%//Q12929

[28346] C-PLACE1001399//Homo sapiens chromosome 17, clone hRPK.22_N_{—}12, complete sequence.//0//2118bp//99%//AC005412

[28347] C-PLACE1001412

[28348] C-PLACE1001484//Homo sapiens chromosome 20 clone 387E22, WORKING DRAFT SEQUENCE, in unordered pieces.//0//1440bp//99%//AL031660

[28349] C-PLACE1001503

[28350] C-PLACE1001570

[28351] C-PLACE1001610

[28352] C-PLACE1001692//S-ACYL FATTY ACID SYNTHASE THIOESTERASE, MEDIUM CHAIN (EC 3.1.2.14) (THIOESTERASE II).//4E-81//263aa//56%//P08635

[28353] C-PLACE1001729

[28354] C-PLACE1001739//PUTATIVE ATP-DEPENDENT RNA HELICASE PL10.//3.5E-75//439aa//41%//P16381

[28355] C-PLACE1001781//PROBABLE PHOSPHOMANNOMUTASE (EC 5.4.2.8) (PMM).//5.4E-63//427aa//35%//Q57290

[28356] C-PLACE1001810

[28357] C-PLACE1001817//Homo sapiens ATP-specific succinyl-CoA synthetase beta subunit (SCS) mRNA, partial cds.//0//1995bp//99%//AF058953

[28358] C-PLACE1001869//L-RIBULOKINASE (EC 2.7.1.16).112E-27//270aa//31%//P94524

[28359] C-PLACE1001912//Homo sapiens clone 24963 mRNA sequence, complete cds.//0//1196bp//99%//AF131737

[28360] C-PLACE1001920//Homo sapiens MDC-3.13 isoform 2 mRNA, complete cds.//0//1729bp//99%//AF099935

[28361] C-PLACE1001928

[28362] C-PLACE1001989//PUTATIVE AMIDASE (EC 3.5.1.4).//1.4E-78//496aa//37%//Q49091

[28363] C-PLACE1002046//LIGATIN (FRAGMENT).//1.7E-240//560aa//80%//Q61211

[28364] C-PLACE1002072

[28365] C-PLACE1002073//ADENYLATE CYCLASE (EC 4.6.1.1) (ATP PYROPHOSPHATE-LYASE) (ADENYLYL CYCLASE).//0.00000053//188aa//29%//P49606

[28366] C-PLACE1002140

[28367] C-PLACE1002163

[28368] C-PLACE1002170

[28369] C-PLACE1002433

[28370] C-PLACE1002438//ZINC FINGER PROTEIN 151 (MIZ-1 PROTEIN).//0.0000042//133aa//29%//Q13105

[28371] C-PLACE1002465

[28372] C-PLACE1002529//Homo sapiens mRNA for KIAA0713 protein, partial cds.//6.7E-214//956bp//94%//AB018256

[28373] C-PLACE1002685//Homo sapiens B cell linker protein BLNK mRNA, alternatively spliced, complete cds.//0//1750bp//99%//AF068180

[28374] C-PLACE1002722//PROBABLE G PROTEIN-COUPLED RECEPTOR KIAA0001.//9E-45//305aa//33%//Q15391

[28375] C-PLACE1002794

[28376] C-PLACE1002815

[28377] C-PLACE1002839

[28378] C-PLACE1002851

[28379] C-PLACE1002941

[28380] C-PLACE1002996

[28381] C-PLACE1003045

[28382] C-PLACE1003092

[28383] C-PLACE1003100//HEP27 PROTEIN (PROTEIN D).//2.6E-79//253aa//60%//Q13268

[28384] C-PLACE1003108

[28385] C-PLACE1003145

[28386] C-PLACE1003174//UBIQUITIN-CONJUGATING ENZYME E2-18 KD (EC 6.3.2.19) (UBIQUITIN- PROTEIN LIGASE) (UBIQUITIN CARRIER PROTEIN) (PM42).//3.8E-37//143aa//51%//P42743

[28387] C-PLACE1003190//SOF1 PROTEIN.//1.9E-110//325aa//48%//P33750

[28388] C-PLACE1003200

[28389] C-PLACE1003296//Homo sapiens mRNA; cDNA DKFZp434G173 (from clone DKFZp434GI 73).//0//706bp//99%//AL080133

[28390] C-PLACE1003302//ZINC FINGER PROTEIN 83 (ZINC FINGER PROTEIN HPF1).//6.9E-206//396aa//86%//P51522

[28391] C-PLACE1003334

[28392] C-PLACE1003342

[28393] C-PLACE1003353//Homo sapiens breast cancer antiestrogen resistance 3 protein (BCAR3) mRNA, complete cds.//0//2435bp//99%//U92715

[28394] C-PLACE1003369

[28395] C-PLACE1003602//Homo sapiens mRNA expressed in placenta.//5.9E-278//275bp//99%//D83200

[28396] C-PLACE1003611

[28397] C-PLACE1003625//ARMADILLO SEGMENT POLARITY PROTEIN.//3.2E-10//380aa//25%//P18824

[28398] C-PLACE1003704//SPLICING FACTOR, ARGININE/SERINE-RICH 4 (PRE-MRNA SPLICING FACTOR SRP75).//8E-19//209aa//34%//Q08170

[28399] C-PLACE1003711

[28400] C-PLACE1003723

[28401] C-PLACE1003762

[28402] C-PLACE1003771

[28403] C-PLACE1003784

[28404] C-PLACE1003923

[28405] C-PLACE1003936

[28406] C-PLACE1003968//5′-AMP-ACTIVATED PROTEIN KINASE, GAMMA-1 SUBUNIT (AMPK GAMMA-1 CHAIN).//2.4E-124//326aa//73%//P80385

[28407] C-PLACE1004104

[28408] C-PLACE1004114

[28409] C-PLACE1004128//GUANINE NUCLEOTIDE-BINDING PROTEIN BETA SUBUNIT 4 (TRANSDUCIN BETA CHAIN 4).16.1E-181//340aa//96%//P29387

[28410] C-PLACE1004149

[28411] C-PLACE1004156

[28412] C-PLACE1004161

[28413] C-PLACE1004183//Homo sapiens for TOM 1-like protein.//0//279bp//97%//AJ0010071

[28414] C-PLACE1004197//BUTYROPHILIN PRECURSOR (BT).//4.5E-10//208aa//27%//Q62556

[28415] C-PLACE1004203//Homo sapiens GPI-anchored membrane protein CDw108 precursor, mRNA, complete cds.110111882bp//99%//AF069493

[28416] C-PLACE1004258

[28417] C-PLACE1004270//TRANSMEMBRANE PROTEASE, SERINE 2 (EC 3.4.21.-).//9.7E-36//389aa//31%//O15393

[28418] C-PLACE1004277//Homo sapiens two pore domain K+channel (TASK-2) mRNA, complete cds.0//1/1498bp//99%//AF084830

[28419] C-PLACE1004289

[28420] C-PLACE1004302//SOF1 PROTEIN.//1.9E-110//325aa//48%//P33750

[28421] C-PLACE1004316//H. sapiens mRNA for apoptosis specific protein.//0//1767bp//99%//Y 11588

[28422] C-PLACE1004358//Homo sapiens connector enhancer of KSR-like protein CNK1 mRNA, complete cds.//0//2512bp//99%//AF100153

[28423] C-PLACE1004376

[28424] C-PLACE1004388

[28425] C-PLACE1004405

[28426] C-PLACE1004428//PRISTANOYL-COA OXIDASE (EC 1.3.3.-).//1.2E-391/385aa//33%//Q63448

[28427] C-PLACE1004437//Human NAD+-specific isocitrate dehydrogenase beta subunit precursor, mRNA, nuclear gene encoding mitochondrial protein, complete cds.11011985bp//199%//U49283

[28428] C-PLACE1004451

[28429] C-PLACE1004460//MATERNAL TUDOR PROTEIN.//0.0000002//218aa//23%//P25823

[28430] C-PLACE1004473

[28431] C-PLACE1004510//Homo sapiens cofactor of initiator function (CIF 150) mRNA, complete//1.3E-209//954bp//99%//AF026445

[28432] C-PLACE1004516

[28433] C-PLACE1004548

[28434] C-PLACE1004564//CLEAVAGE AND POLYADENYLATION SPECIFICITY FACTOR, 100 KD SUBUNIT (CPSF 100 KD SUBUNIT).//0//525aa//99%//Q10568

[28435] C-PLACE1004629//PROTEIN OS-9 PRECURSOR.//7.7E-18//264aa//32%//Q13438

[28436] C-PLACE1004645

[28437] C-PLACE1004646//B. taurus mRNA for retinal pigment epithelial membrane receptor p63 .114.4E-4211985bp//59%//X66277

[28438] C-PLACE1004664

[28439] C-PLACE1004672

[28440] C-PLACE1004674//PROBABLE CALCIUM-BINDING PROTEIN ALG-2 (PMP41) (ALG-257).//1.6E-95//191aa//96%//P12815

[28441] C-PLACE1004691

[28442] C-PLACE1004722

[28443] C-PLACE1004736

[28444] C-PLACE1004740

[28445] C-PLACE1004743//PROBABLE N-END-RECOGNIZING PROTEIN (UBIQUITIN-PROTEIN LIGASE E3 COMPONENT) (N- RECOGNIN).//4.4E-35//578aa//27%//O60152

[28446] C-PLACE1100475//Homo sapiens mRNA for alpha2,3-sialyltransferase ST3Gal VI, complete cds.//7.1E-224//790bp//98%//AB022918

[28447] C-PLACE1004777//N-CHIMAERIN (NC) (N-CHIMERIN) (ALPHA CHIMERIN) (A-CHIMAERIN).//1.9E-32//259aa//320//P30337

[28448] C-PLACE1004804//ADENYLATE CYCLASE (EC 4.6.1.1) (ATP PYROPHOSPHATE-LYASE) (ADENYLYL CYCLASE).//4.7E-65//695aa//29%//Q01631

[28449] C-PLACE1004814//SPLICING FACTOR, ARGININE/SERINE-RICH 4 (PRE-MRNA SPLICING FACTOR SRP75).//5.9E-19//196aa//36%//Q08170

[28450] C-PLACE1004824

[28451] C-PLACE1004868//MALE STERILITY PROTEIN 2.//3 .9E-3911261aa//27%//Q08891

[28452] C-PLACE1004885

[28453] C-PLACE1004902//PUTATIVE PRE-MRNA SPLICING FACTOR ATP-DEPENDENT RNA HELICASE SPAC 10F6.02C.//9.3E-//94aa//47%//O42643

[28454] C-PLACE1004918//L-LACTATE DEHYDROGENASE M CHAIN (EC 1.1.1.27) (LDH-A).//4.9E-48//198aa//44%//P06151

[28455] C-PLACE1004930//Homo sapiens MDC-3.13 isoform 2 mRNA, complete cds/0//1853bp//98%//AF099936

[28456] C-PLACE1004934

[28457] C-PLACE1004937//SEL-10 PROTEIN.//6.3E-125//357aa//58%//Q93794

[28458] C-PLACE1004969//HYPOTHETICAL 55.1 KD PROTEIN B0416.5 IN CHROMOSOME X.112E-14//205aa//26%//Q11073

[28459] C-PLACE1004982

[28460] C-PLACE1005026

[28461] C-PLACE1005027

[28462] C-PLACE1005046

[28463] C-PLACE1005077

[28464] C-PLACE1005101//Homo sapiens (clone zap128) mRNA, 3′ end of cds.//1E-209//1031bp//96%//L40401

[28465] C-PLACE1005102//RING CANAL PROTEIN (KELCH PROTEIN).//2.6E-56//565aa//30%//Q04652

[28466] C-PLACE1005111

[28467] C-PLACE1005181

[28468] C-PLACE1005187//APAG PROTEIN.//3.8E-13//122aa//36%//P05636

[28469] C-PLACE1005206

[28470] C-PLACE1005232

[28471] C-PLACE1005243//SERINE/THREONINE PROTEIN KINASE PKPA (EC 2.7.1.-).//1.3E-27//349aa//320//Q011577

[28472] C-PLACE1005261

[28473] C-PLACE1005266

[28474] C-PLACE1005277//Homo sapiens mRNA for KIAA0610 protein, partial cds.//3.2E-297//1341bp//100%//AB011182

[28475] C-PLACE1005287//INNER CENTROMERE PROTEIN (INCENP).//2.3E-13//269aa//28%//P53352

[28476] C-PLACE1005305//GTP:AMP PHOSPHOTRANSFERASE MITOCHONDRIAL (EC 2.7.4.10) (AK3).//2E-111//226aa//92%//P08760

[28477] C-PLACE1005308

[28478] C-PLACE1005313

[28479] C-PLACE1005327

[28480] C-PLACE1005335

[28481] C-PLACE1005373//TRNA PSEUDOURIDINE SYNTHASE B (EC 4.2.1.70) (TRNA PSEUDOURIDINE 55 SYNTHASE) (PSI55 SYNTHASE) (PSEUDOURIDYLATE SYNTHASE) (URACIL HYDROLYASE).//8.6E-09//194aa//27%//O33335

[28482] C-PLACE1005374

[28483] C-PLACE1005480

[28484] C-PLACE1005481

[28485] C-PLACE1005494//Homo sapiens mRNA for transient receptor potential protein TRP6.//0//1649bp//99%//AJ006276

[28486] C-PLACE1005530//HYPOTHETICAL 47.6 KD PROTEIN C16C10.5 IN CHROMOSOME III.//5.6E-52//173aa//57%//Q09251

[28487] C-PLACE1005550

[28488] C-PLACE1005554

[28489] C-PLACE1005623

[28490] C-PLACE1005646//Homo sapiens RNA helicase-related protein mRNA, complete cds.//0//2130bp//99%//AF083255

[28491] C-PLACE1005656//RIBONUCLEOSIDE-DIPHOSPHATE REDUCTASE M2 CHAIN (EC 1.17.4.1) (RIBONUCLEOTIDE REDUCTASE).//2.1E-148//321aa//83%//P31350

[28492] C-PLACE1005730

[28493] C-PLACE1005755

[28494] C-PLACE1005763//S-ACYL FATTY ACID SYNTHASE THIOESTERASE, MEDIUM CHAIN (EC 3.1.2.14) (THIOESTERASE II).//2.5E-79//209aa//53%//P08635

[28495] C-PLACE1005803

[28496] C-PLACE1005804//Homo sapiens alpha 1,2-mannosidase IB mRNA, complete cds.//1.1E-217//994bp//99%//AF027156

[28497] C-PLACE1005851

[28498] C-PLACE1005921//AIG1 PROTEIN.//3E-31//284aa//31%//P54120

[28499] C-PLACE1005923

[28500] C-PLACE1005925

[28501] C-PLACE1005934

[28502] C-PLACE1005936

[28503] C-PLACE1005951

[28504] C-PLACE1005953//GLYCOSYLTRANSFERASE ALG2 (EC 2.4.1.-).//6.7E-30//198aa//37%//P43636

[28505] C-PLACE1005955//VACUOLAR AMINOPEPTIDASE I PRECURSOR (EC 3.4.11.22) (POLYPEPTIDASE)//5.4E-54//455aa//32%//P14904

[28506] C-PLACE1005966//TRANSCRIPTION INITIATION FACTOR TFIID 90 KD SUBUNIT (TAFII-90).//0.00000014//254aa//25%//P38129

[28507] C-PLACE1005990

[28508] C-PLACE1006011//Homo sapiens mRNA for poly(ADP-ribose) polymerase-2.11011564bp//99%//AJ236876

[28509] C-PLACE1006040//Homo sapiens mRNA for alpha endosulfine.//4.7E-161H744bp//99%//X99906

[28510] C-PLACE1006119//Homo sapiens Ran-GTP binding protein mRNA, partial cds.//1.5E-148//681bp//99%//AF039023

[28511] C-PLACE1006139

[28512] C-PLACE1006159

[28513] C-PLACE1006167

[28514] C-PLACE1006170//Homo sapiens mRNA for KIAA0899 protein, partial cds.//4.5E-293//953bp//99%//AB020706

[28515] C-PLACE1006195

[28516] C-PLACE1006196//PUTATIVE ATP-DEPENDENT RNA HELICASE C12C2.06.//2.7E-116//496aa//48%//Q09747

[28517] C-PLACE1006225

[28518] C-PLACE1006236

[28519] C-PLACE1006239//BONE PROTEOGLYCAN II PRECURSOR (PG-S2) (DECORIN).//2E-16//244aa//31%//P28675

[28520] C-PLACE1006246

[28521] C-PLACE1006325//Homo sapiens mRNA; cDNA DKFZp564J142 (from clone DKFZpS64J 142).//3.8E-278//1271bp//99%//AL080066

[28522] C-PLACE1006335

[28523] C-PLACE1006357

[28524] C-PLACE1006385//Homo sapiens epsin 2a mRNA, complete cds.//0//1168bp//99%//AF062085

[28525] C-PLACE1006412

[28526] C-PLACE1006414

[28527] C-PLACE1006438//ZINC FINGER PROTEIN 165.//2.5E-45//122aa//43%//P49910

[28528] C-PLACE1006445

[28529] C-PLACE1006470

[28530] C-PLACE1006482//TRANSCRIPTION FACTOR MAFF.//7.7E-55//142aa//85%//Q90595

[28531] C-PLACE1006488//SIGNAL RECOGNITION PARTICLE 68 KD PROTEIN (SRP68).//1.1E-229//367aa//96%//Q00004

[28532] C-PLACE1006492

[28533] C-PLACE1006531

[28534] C-PLACE1006552

[28535] C-PLACE1006598//Homo sapiens clone NHO31 OKI 5, WORKING DRAFT SEQUENCE, 4 unordered pieces.//0//2182bp//99%//AC007383

[28536] C-PLACE1006615

[28537] C-PLACE1006626//Homo sapiens mRNA for KIAA0928 protein, partial cds.//0//1760bp//99%//AB023145

[28538] C-PLACE1006673

[28539] C-PLACE1006678//Homo sapiens mRNA for type II membrane protein, complete cds, clone:HP10328.//5.8E-24//734bp//62% //AB015630

[28540] C-PLACE1006704

[28541] C-PLACE1006731//RIBOFLAVIN KINASE (EC 2.7.1.26) (FLAVOKINASE)/FMN ADENYLYLTRANSFERASE (EC 2.7.7.2) (FAD PYROPHOSPHORYLASE) (FAD SYNTHETASE).//6.9E-13//177aa//33%//Q59263

[28542] C-PLACE1006782

[28543] C-PLACE1006819//LINE-1 REVERSE TRANSCRIPTASE HOMOLOG.//9.8E-213//232aa//80%//P08547

[28544] C-PLACE1006829//UBIQUITIN CARBOXYL-TERMINAL HYDROLASE 4 (EC 3.1.2.15) (UBIQUITIN THIOLESTERASE 4) (UBIQUITIN-SPECIFIC PROCESSING PROTEASE 4) (DEUBIQUITINATING ENZYME 4) (UBIQUITOUS NUCLEAR PROTEIN).//2E-15//188aa//29%//P35123

[28545] C-PLACE1006883

[28546] C-PLACE1006901

[28547] C-PLACE1006917//HSH49 PROTEIN.//5.5E-12//97aa//35%//Q99181

[28548] C-PLACE1006932

[28549] C-PLACE1006935//HYPOTHETICAL 95.2 KD PROTEIN R144.6 IN CHROMOSOME III.//6.7E-48//278aa//41%//Q10000

[28550] C-PLACE1006956//ATP-DEPENDENT PERMEASE MDLI.//1.3E-86//522aa//36%//P97998

[28551] C-PLACE1006958//Homo sapiens mRNA for heat shock protein apg-1, complete cds.//0//1770bp//99%//AB023421

[28552] C-PLACE1006961

[28553] C-PLACE1006962

[28554] C-PLACE1006966

[28555] C-PLACE1007014//36 KD NUCLEOLAR PROTEIN HNP36 (DELAYED-EARLY RESPONSE PROTEIN 12) (DER12).//3.2E-35//180aa//33%//Q14542

[28556] C-PLACE1007021

[28557] C-PLACE1007105

[28558] C-PLACE1007178

[28559] C-PLACE1007226//PROBABLE OXYGEN-INDEPENDENT COPROPORPHYRINOGEN III OXIDASE (EC 1.-.-.-) (COPROPORPHYRINOGENASE) (COPROGEN OXIDASE).//1E-42//370aa//31%//P54304

[28560] C-PLACE1007238

[28561] C-PLACE1007239//Homo sapiens mRNA for transcription elongation factor S-II, hS-II-TI, complete cds.//6.5E-216//1068bp//96%//D50495

[28562] C-PLACE1007242

[28563] C-PLACE1007243//UNC-47 PROTEIN.//0.00000017/211aa//27%//P34579

[28564] C-PLACE1007257//Homo sapiens mRNA for dia-12c protein.//0//2052bp//99%//Y15908

[28565] C-PLACE1007274

[28566] C-PLACE1007282

[28567] C-PLACE1007301

[28568] C-PLACE1007317//Drosophila melanogaster Adrift (adrift) mRNA, complete cds.//4.1E-17//1037bp//56%//AF117649

[28569] C-PLACE1007342

[28570] C-PLACE1007346//Homo sapiens estrogen-responsive B box protein (EBBP) mRNA, complete cds.//0//2366bp//99%//AF096870

[28571] C-PLACE1007367

[28572] C-PLACE1007375//PHORBOL ESTER/DIACYLGLYCEROL-BINDING PROTEIN UNC-13.//0.00000044//127aa//30%//P27715

[28573] C-PLACE1007386

[28574] C-PLACE1007402

[28575] C-PLACE1007409//WHITE PROTEIN.//1.1E-64//428aa//32%//Q17320

[28576] C-PLACE1007416//DIPEPTIDYL PEPTIDASE IV (EC 3.4.14.5) (DPP IV) (T-CELL ACTIVATION ANTIGEN CD26) (TP103) (ADENOSINE DEAMINASE COMPLEXING PROTEIN-2) (ADABP).//8.8E-25//140aa//35%//P27487

[28577] C-PLACE1007450

[28578] C-PLACE1007452

[28579] C-PLACE1007460

[28580] C-PLACE1007484

[28581] C-PLACE1007488//PUTATIVE RHO/RAC GUANINE NUCLEOTIDE EXCHANGE FACTOR (RHO/RAC GEF) (FACIOGENITAL DYSPLASIA PROTEIN HOMOLOG).//5.4E-53//426aa//33%//P52734

[28582] C-PLACE1007507

[28583] C-PLACE1007511//KERATIN, TYPE I CYTOSKELETAL 19 (CYTOKERATIN 19) (K19) (CK19).//1.4E-85//385aa//45%//P08728

[28584] C-PLACE1007524

[28585] C-PLACE1007537//Homo sapiens ankyrin repeat-containing protein ASB-2 mRNA, complete cds.//8.9e-316//1485bp//98%//AF159164

[28586] C-PLACE1007544

[28587] C-PLACE1007547//HYPOTHETICAL 97.1 KD PROTEIN R05D3.4 IN CHROMOSOME III.//1E-49//361aa//36%//P34537

[28588] C-PLACE1007583

[28589] C-PLACE1007598//ZINC FINGER PROTEIN 184 (FRAGMENT).//1.6E-143//666aa//44%//Q99676

[28590] C-PLACE1007618//Homo sapiens mRNA for KIAA0977 protein, complete cds.//0//713bp//99%//AB023194

[28591] C-PLACE1007621

[28592] C-PLACE1007632//POLIOVIRUS RECEPTOR PRECURSOR.//0.0000001//228aa//31%//P32506

[28593] C-PLACE1007645

[28594] C-PLACE1007649//Homo sapiens mRNA for KIAA0977 protein, complete cds.//0//1952bp//99%//AB023194

[28595] C-PLACE1007688//LA PROTEIN HOMOLOG (LA RIBONUCLEOPROTEIN) (LA AUTOANTIGEN HOMOLOG).//8.7E-09//279aa//28%//Q26457

[28596] C-PLACE1007690

[28597] C-PLACE1007697//GCN20 PROTEIN.//7.6E-119//717aa//38%//P43535

[28598] C-PLACE1007706//Homo sapiens metalloprotease 1 (MPI) mRNA, complete cds.//0//3431bp//99%//AF061243

[28599] C-PLACE1007725

[28600] C-PLACE1007729//RETROVIRUS-RELATED PROTEASE (EC 3.4.23.-).//1.5E-44//231aa//42%//P10265

[28601] C-PLACE1007730//Homo sapiens mRNA for KIAA0685 protein, complete cds.//9.2E-294//1504bp//94%//AB014585

[28602] C-PLACE1007746

[28603] C-PLACE1007791//Homo sapiens IDN3-B mRNA, complete cds.//0//1836bp//99%//AB019602

[28604] C-PLACE1007810

[28605] C-PLACE1007843

[28606] C-PLACE1007846//Homo sapiens genomic DNA of 21q22.2 Down Syndrome region, segment 3/13.//0//1751bp//99%//AP000010

[28607] C-PLACE1007858//Homo sapiens mRNA for KIAA0766 protein, complete cds.//0//3112bp//99%//AB018309

[28608] C-PLACE1007897

[28609] C-PLACE1007946//MYOSIN HEAVY CHAIN, NON-MUSCLE (ZIPPER PROTEIN) (MYOSIN II).//2.6E-14//370aa//25%//Q99323

[28610] C-PLACE1007954

[28611] C-PLACE1007955//Homo sapiens cyclin-D binding Myb-like protein mRNA, complete cds.//0//2252bp//99%//AF084530

[28612] C-PLACE1007958//Homo sapiens cAMP-specific phosphodiesterase 8B (PDE8B) mRNA, partial cds.//0//2300bp//99%//AF079529

[28613] C-PLACE1007969//HETEROGENEOUS NUCLEAR RIBONUCLEOPROTEIN M (HNRNP M).//1.1E-36//202aa//48%//P52272

[28614] C-PLACE1007990

[28615] C-PLACE1008000//CHANNEL ASSOCIATED PROTEIN OF SYNAPSE-110 (CHAPSYN-110) (SYNAPTIC DENSITY PROTEIN PSD-93).//6.1E-14//128aa//39%//Q63622

[28616] C-PLACE1008002//Homo sapiens clone DJ0613C23, WORKING DRAFT SEQUENCE, 4 unordered pieces.//0//1833bp//99%//AC005628

[28617] C-PLACE1008044//NUCLEAR PORE COMPLEX PROTEIN NUP107 (NUCLEOPORIN NUP107) (107 KD NUCLEOPORIN) (P105).//4.6e-318//613aa//94%//P52590

[28618] C-PLACE1008095

[28619] C-PLACE1008122

[28620] C-PLACE1008129

[28621] C-PLACE1008132//HYPOTHETICAL 127.4 KD PROTEIN F07F6.4 IN CHROMOSOME III.//1.3E-24//395aa//31%//Q09531

[28622] C-PLACE1008177//TRICHOHYALIN.//2.3E-29//487aa//26%//P37709

[28623] C-PLACE1008209

[28624] C-PLACE1008273//COATOMER GAMMA SUBUNIT (GAMMA-COAT PROTEIN) (GAMMA-COP).//1.3E-283//671aa//77%//P53620

[28625] C-PLACE1008275//DNA REPAIR PROTEIN REVI (EC 2.7.7.-).//2.3E-18//162aa//37%//P12689

[28626] C-PLACE1008280

[28627] C-PLACE1008309

[28628] C-PLACE1008329

[28629] C-PLACE1008356//Homo sapiens mRNA for KIAA0679 protein, partial cds.//0//1853bp//100%//AB014579

[28630] C-PLACE1008398//GENE 33 POLYPEPTIDE.//7.3E-114//243aa//87%//P05432

[28631] C-PLACE1008401

[28632] C-PLACE1008402//GENERAL VESICULAR TRANSPORT FACTOR P115 (TRANSCYTOSIS ASSOCIATED PROTEIN) (TAP).110//698aa//95%//P41541

[28633] C-PLACE1008429//ANKYRIN HOMOLOG PRECURSOR.//3.1E-11//189aa//32%//Q06527

[28634] C-PLACE1008457

[28635] C-PLACE1008465

[28636] C-PLACE1008488

[28637] C-PLACE1008524//Human DNA sequence from clone 34B21 on chromosome 6p12.1-21.1. Contains part of a gene for a novel protein with ZU5 domain similar to part of Tight Junction Protein ZO1 (TJP1) and UNC5 Homologs, the gene for a novel BZRP (peripheral benzodiazapine recepto//0//1980bp//99%//AL031778

[28638] C-PLACE1008531

[28639] C-PLACE1008532

[28640] C-PLACE1008533//101 KD MALARIA ANTIGEN (P101) (ACIDIC BASIC REPEAT ANTIGEN).//1.1E-09/162aa//48%//P22620

[28641] C-PLACE1008568

[28642] C-PLACE1008603//NUCLEAR PORE COMPLEX PROTEIN NUP155 (NUCLEOPORIN NUP155) (155 KD NUCLEOPORIN) (P140).1/7.8E-236//453aa//96%//P37199

[28643] C-PLACE1008621

[28644] C-PLACE1008626

[28645] C-PLACE1008627//Homo sapiens mRNA for cysteine-rich protein.//0//1850bp//99%//AJ006591

[28646] C-PLACE1008629

[28647] C-PLACE1008650//Homo sapiens pleiotropic regulator 1 (PLRG1) mRNA, complete cds.//0//1548bp//100%//AF044333

[28648] C-PLACE1008693

[28649] C-PLACE1008696//Homo sapiens NADH dehydrogenase-ubiquinone Fe-S protein 823 kDa subunit (NDUFS8) gene, nuclear gene encoding mitochondrial protein, complete cds.11//03002bp//99%//AF038406

[28650] C-PLACE1008790//IMPORTIN ALPHA-6 SUBUNIT (KARYOPHERIN ALPHA-6 SUBUNIT) (IMPORTIN ALPHA S2).//3.1E-280//533aa//98%//O35345

[28651] C-PLACE1008808//Homo sapiens mRNA for cell cycle checkpoint protein rad1A.//2.3E-269//225bp//99%//AJ004974

[28652] C-PLACE1008813

[28653] C-PLACE1008854

[28654] C-PLACE1008867

[28655] C-PLACE1008887

[28656] C-PLACE1008902

[28657] C-PLACE1008925

[28658] C-PLACE1009020//NIFS PROTEIN.//3 .9E-55//279aa//41%//P12623

[28659] C-PLACE1009027//Homo sapiens mRNA for doublecortin.//0//1919bp//99%//AJ003112

[28660] C-PLACE1009045

[28661] C-PLACE1009060//BRO1 PROTEIN.//6.7E-19//567aa//24%//P48582

[28662] C-PLACE1009090

[28663] C-PLACE1009091

[28664] C-PLACE1009094//FURIN-LIKE PROTEASE 2 PRECURSOR (EC 3.4.21.75) (FURIN 2).1/1.9E-44//480aa//30%//P30432

[28665] C-PLACE1009099//ZINC FINGER PROTEIN 41 (FRAGMENT).//1.1E-179//452aa//67%//P51814

[28666] C-PLACE1009110

[28667] C-PLACE1009111

[28668] C-PLACE1009130//UBIQUITIN-PROTEIN LIGASE E3A (EC 6.3.2.-) (ONCOGENIC PROTEIN-ASSOCIATED PROTEIN E6-AP).//2E-68//181aa//43%//Q05086

[28669] C-PLACE1009158

[28670] C-PLACE1009166

[28671] C-PLACE1009174

[28672] C-PLACE1009186

[28673] C-PLACE1009190

[28674] C-PLACE1009230

[28675] C-PLACE1009319//Rattus norvegicus outer membrane protein (OMP25) mRNA, complete cds; nuclear gene for mitochondrial product.//2.1E-132//229bp//75%//AF107295

[28676] C-PLACE1009328

[28677] C-PLACE1009335

[28678] C-PLACE1009338

[28679] C-PLACE1009368//METAL HOMEOSTASIS FACTOR ATX2.//2.5E-10//151aa//29%//Q12067

[28680] C-PLACE1009375

[28681] C-PLACE1009388

[28682] C-PLACE1009404//HYPOTHETICAL 105.6 KD PROTEIN C16C9.06C IN CHROMOSOME I.//0.000000047//165aa//33%//Q09820

[28683] C-PLACE1009434

[28684] C-PLACE1009443

[28685] C-PLACE1009444//PHOSPHATIDYLINOSITOL 4-KINASE ALPHA (EC 2.7.1.67) (PI4-KINASE) (PTDINS-4-KINASE) (PI4K-ALPHA).//7.8E-71//82aa//89%//P42356

[28686] C-PLACE1009459

[28687] C-PLACE1009468//PHOSPHOLIPASE A-2-ACTIVATING PROTEIN (PLAP).//3.1E-289//550aa//93%//P54319

[28688] C-PLACE1009476//PUTATIVE ATP-DEPENDENT RNA HELICASE T26G10.1 IN CHROMOSOME III.//3.9E-40//179aa//37%//P34580

[28689] C-PLACE1009524//ARF NUCLEOTIDE-BINDING SITE OPENER (ARNO PROTEIN) (ARF EXCHANGE FACTOR).//8.1E-99//228aa//75%//Q99418

[28690] C-PLACE1009542

[28691] C-PLACE1009571

[28692] C-PLACE1009581

[28693] C-PLACE1009596//VEGETATIBLE INCOMPATIBILITY PROTEIN HET-E-1.//5.1E-54//291aa//40%//Q00808

[28694] C-PLACE1009607

[28695] C-PLACE1009621

[28696] C-PLACE1009622//MATERNAL EFFECT PROTEIN STAUFEN.//1.3E-60//209aa//41%//P25159

[28697] C-PLACE1009659//MEMBRANE-ASSOCIATED PROTEIN HEM-2 (NAP1 PROTEIN).//1.5E-285//538aa//99%//P55161

[28698] C-PLACE1009665

[28699] C-PLACE1009670//Homo sapiens genethonin I mRNA, complete cds.//0//1854bp//100%//AF062534

[28700] C-PLACE1009708//HYPOTHETICAL 143.3 KD TRP-ASP REPEATS CONTAINING PROTEIN C12G12.13C IN CHROMOSOME I.//7E-33//166aa//43%//Q09876

[28701] C-PLACE1009721//MSF1 PROTEIN.//1.7E-22//176aa//33%//P35200

[28702] C-PLACE1009731//AIG1 PROTEIN.//1.6E-22//274aa//28%//P54120

[28703] C-PLACE1009763//Homo sapiens mRNA for Nedd8-activating enzyme hUba3, complete cds.//4.3E-294//1329bp//100%//AB012190

[28704] C-PLACE1009794

[28705] C-PLACE1009845//Homo sapiens mRNA for KIAA0905 protein, complete cds.//0/2685bp//99%//AB020712

[28706] C-PLACE1009886

[28707] C-PLACE1009908//HYPOTHETICAL GTP-BINDING PROTEIN IN SEH1-PRP20 INTERGENIC REGION.//1.9E-108//277aa//43%//P53145

[28708] C-PLACE1009971

[28709] C-PLACE1009992//LIMULUS CLOTTING FACTOR C PRECURSOR (EC 3.4.21.84).//4.6E-59//450aa//34%//P28175

[28710] C-PLACE1009995//Homo sapiens mRNA; cDNA DKFZp5640123 (from clone DKFZp5640123).110/11962bp//99%//AL080122

[28711] C-PLACE1009997//Rattus norvegicus A-kinase anchoring protein AKAP 220 mRNA, complete cds.115.2E-7011736bp//73%//U48288

[28712] C-PLACE1010023

[28713] C-PLACE1010031

[28714] C-PLACE1010053//M. musculus Spnr mRNA for RNA binding protein.//6E-279//1402bp//94%//X84692

[28715] C-PLACE1010074//Homo sapiens sorting nexin 2 (SNX2) mRNA, complete cds.//0//2019bp//99%//AF065482

[28716] C-PLACE1010076

[28717] C-PLACE1010096//100 KD PROTEIN (EC 6.3.2.-).//1.4E-268//506aa//98%//Q62671

[28718] C-PLACE1010102

[28719] C-PLACE1010105//RING CANAL PROTEIN (KELCH PROTEIN).//7.3E-114//537aa//44%//Q04652

[28720] C-PLACE1010106//Homo sapiens mRNA; cDNA DKFZp586M1418 (from clone DKFZp586M 1418).10/11974bp//99%//AL049385

[28721] C-PLACE1010134//TRANSCRIPTION REGULATORY PROTEIN SNF2 (SWI/SNF COMPLEX COMPONENT SNF2) (REGULATORY PROTEIN SWI2) (REGULATORY PROTEIN GAM1) (TRANSCRIPTION FACTOR TYE3).//1.7E-20//156aa//42%//P22082

[28722] C-PLACE1010148//CYLICIN I (MULTIPLE-BAND POLYPEPTIDE I).//0.00000046//431aa//23%//P35662

[28723] C-PLACE1010194//SPLICING FACTOR, ARGININE/SERINE-RICH 2 (SPLICING FACTOR SC35) (SC-35) (SPLICING COMPONENT, 35 KD) (PR264 PROTEIN).//9.8E-1//195aa//49%//Q01130

[28724] C-PLACE1010202

[28725] C-PLACE1010261I/SEGREGATION DISTORTER PROTEIN.//1.6E-77//214aa//62%//P25722

[28726] C-PLACE1010274//Homo sapiens mRNA; cDNA DKFZp5640123 (from clone DKFZp5640123).110/11964bp//99%//AL080122

[28727] C-PLACE1010293

[28728] C-PLACE1010321//NON-GREEN PLASTID TRIOSE PHOSPHATE TRANSLOCATOR PRECURSOR (CTPT).//1.1E-09//350aa//22%//P52178

[28729] C-PLACE1010324

[28730] C-PLACE1010329

[28731] C-PLACE1010362//1-PHOSPHATIDYLINOSITOL PHOSPHODIESTERASE PRECURSOR (EC 3.1.4.10) (PHOSPHATIDYLINOSITOL-SPECIFIC PHOSPHOLIPASE C) (PI-PLC).//0.000000002//126aa//29%//P34024

[28732] C-PLACE1010364

[28733] C-PLACE1010383

[28734] C-PLACE1010481//Homo sapiens mRNA for KIAA0836 protein, partial cds.10/2121bp//99%//AB020643

[28735] C-PLACE1010491

[28736] C-PLACE1010492

[28737] C-PLACE1010522//Homo sapiens mRNA for DEPP (decidual protein induced by progesterone), complete cds.//0//1981bp//99%//AB022718

[28738] C-PLACE1010529

[28739] C-PLACE1010547//INTRACELLULAR PROTEIN TRANSPORT PROTEIN US01.//0.00000012//616aa//24% I/P25386

[28740] C-PLACE1010599//Homo sapiens Pex14 mRNA for peroxisomal membrane anchor protein, complete cds.//0//1904bp//99%//AB017546

[28741] C-PLACE1010616

[28742] C-PLACE1010622//TROPONIN T, CARDIAC MUSCLE ISOFORMS (TNTC).//0.00000016//20aa//28%//P02642

[28743] C-PLACE1010629

[28744] C-PLACE1010630

[28745] C-PLACE1010661//TESTIS-SPECIFIC PROTEIN PBS 13.//5.7E-75//423aa/139%//Q01755

[28746] C-PLACE1010714

[28747] C-PLACE1010720//Homo sapiens mRNA for chromosome-associated polypeptide-C, complete cds.//4E-299//1091bp//99%//AB019987

[28748] C-PLACE1010743//Homo sapiens myosin-IXb splice variant (Myo9b) mRNA, partial cds.//8.9E-9I l/668bp//82%//AF020267

[28749] C-PLACE1010771//M. musculus HCNGP mRNA.//7.4E-168//966bp//89%//X68061

[28750] C-PLACE1010786

[28751] C-PLACE1010800

[28752] C-PLACE1010811

[28753] C-PLACE1010870//ZINC FINGER PROTEIN 91 (ZINC FINGER PROTEIN HTF10) (HPF7).//1.3E-143//407aa//58%//Q05481

[28754] C-PLACE1010877//Homo sapiens mRNA for KIAA0610 protein, partial cds.//0//1885bp//99%//AB011182

[28755] C-PLACE1010900

[28756] C-PLACE2000050

[28757] C-PLACE4000522//NEUROGENIC LOCUS NOTCH PROTEIN HOMOLOG PRECURSOR (XOTCH PROTEIN).I/2.4E-191//828aa//48%//P21783

[28758] C-PLACE4000590

[28759] C-PLACE4000638

[28760] C-PLACE4000650//TUBERIN (TUBEROUS SCLEROSIS 2 HOMOLOG PROTEIN).//7.9E-17//201aa//34%//P49816

[28761] C-Y79AA1001647

[28762] Homology Search Result Data 7.

[28763] The result of the homology search of the SwissProt using the 5′-end sequence (54 clones selected in EXAMPLE 16).

[28764] Data include

[28765] the name of clone,

[28766] definition of the top hit data,

[28767] the P-value: the length of the compared sequence: identity (%), and

[28768] the organism and the Accession No. of the top hit data, as in the order separated by //.

[28769] Data are not shown for the clones in which the P-value was higher than 1.

[28770] F-HEMBA1000497//METALLOTHIONEIN-LIKE PROTEIN 2A (MT-2A) (MT-K) (MT-1G).//0.13//52//381//P25860

[28771] F-HEMBA1001750//UBIQUITIN CARBOXYL-TERMINAL HYDROLASE 64E (EC 3.1.2.15) (UBIQUITIN THIOLESTERASE 64E) (UBIQUITIN-SPECIFIC PROCESSING PROTEASE 64E) (DEUBIQUITINATING ENZYME 64E).//2.2e-28//104//59//Q24574

[28772] F-HEMBA1003854//VERPROLIN.//0.012//138//31//P37370

[28773] F-HEMBA1004193//NADH-UBIQUINONE OXIDOREDUCTASE CHAIN 4L (EC 1.6.5.3) (FRAGMENT).//0.93//39//33//Q37131

[28774] F-HEMBA1004860//HIGH POTENTIAL IRON-SULFUR PROTEIN, ISOZYME 2 (HIPIP 2).//0.90/1201150//P38524

[28775] F-HEMBA1005572//ZINC FINGER PROTEIN 124 (HZF-16).//7.6e-46//14//158//Q15973

[28776] F-HEMBA1006038//COLLAGEN ALPHA 1 (XII) CHAIN (FRAGMENT).//0.0033//32//46//P70560

[28777] F-HEMBA1006092//VERPROLIN.//1.0//62//35//P37370

[28778] F-HEMBA1006406//MATING PHEROMONE ER-10 PRECURSOR (EUPLOMONE R10).//0.30//41//36//P12350

[28779] F-HEMBA1006650//MATING-TYPE PHEROMONE BAP 1 (2) PRECURSOR.//0.089//211/52//Q02593

[28780] F-HEMBA1006812//HEAT SHOCK PROTEIN HTGA (HEAT SHOCK PROTEIN HTPY).//0.38//156/130//P28697

[28781] F-HEMBB1000672

[28782] F-HEMBB1001197//DNA-BINDING PROTEIN 65 (PROTEIN GP65).//1.0//30//36//P16012

[28783] F-HEMBB1001871//BONE/CARTILAGE PROTEOGLYCAN I PRECURSOR (BIGLYCAN) (PG-S 1).113.7e-54//2411147//P47853

[28784] F-MAMMA1001252//HYPOTHETICAL 9.1 KD PROTEIN IN NIRQ 3′REGION (ORF3).110.591/481/391//Q51483

[28785] F-MAMMA1002094

[28786] F-NT2RM4000634//T-CELL RECEPTOR BETA CHAIN PRECURSOR (ANA 11).//0.2611581127//P06333

[28787] F-NT2RM4000657//1-PHOSPHATIDYLINOSITOL-4,5-BISPHOSPHATE PHOSPHODIESTERASE DELTA 1 (EC 3.1.4.11) (PLC-DELTA-1) (PHOSPHOLIPASE C-DELTA-1) (PLC-III) (FRAGMENT).//8.9e-201183/1481//P10895

[28788] F-NT2RM4000783//ZINC FINGER PROTEIN (FRAGMENT).//1.0//42//40//P19326

[28789] F-NT2RM4000857//INSULIN-LIKE GROWTH FACTOR BINDING PROTEIN COMPLEX ACID LABILE CHAIN PRECURSOR (ALS).//6.0e-23//207//32//002833

[28790] F-NT2RM4001178//HOMEOBOX PROTEIN OTX3 (ZOTX3).//0.012//156//28//Q90267

[28791] F-NT2RM4002420//GLUTAMIC ACID-RICH PROTEIN PRECURSOR.//0.0012//81//37//P13816

[28792] F-NT2RP2000198//CREB-BINDING PROTEIN.//0.291/98//3711Q92793

[28793] F-NT2RP2000551//PROTEIN Q300.//0.000171/23//60//Q02722

[28794] F-NT2RP2000660//HYPOTHETICAL PROTEIN MJ401.//1H.0//411129//Q57844

[28795] F-NT2RP2001214//MALE SPECIFIC SPERM PROTEIN MST84DC.//0.27//13//61//Q01644

[28796] F-NT2RP2001460//PROTEIN KINASE C-LIKE (EC 2.7.1.-).//0.089119911291//Q99014

[28797] F-NT2RP2001756//ZINC FINGER PROTEIN MFG-1 (ZINC FINGER PROTEIN 58) (FRAGMENT).//4.0e-13//77/128//P16372

[28798] F-NT2RP2002056//HYPOTHETICAL 6.0 KD PROTEIN IN THI12 5′REGION.//0.37//12//75//P53820

[28799] F-NT2RP2002677//NONSPECIFIC LIPID-TRANSFER PROTEIN 3 PRECURSOR (LTP 3).//0.99/16//132//Q42616

[28800] F-NT2RP2002755//OCTAPEPTIDE-REPEAT PROTEIN T2.//3.3e-10//90//35//Q06666

[28801] F-NT2RP2002843//CYTOCHROME B.110.7811103/126//P48884

[28802] F-NT2RP2003101//ATPASE INHIBITOR, MITOCHONDRIAL HOMOLOG.//0.40//28//46//P37209

[28803] F-NT2RP2003799//HYPOTHETICAL PROTEIN MJO 116.1.//0.80//55//32//P81303

[28804] F-NT2RP2004095

[28805] F-NT2RP2004732

[28806] F-NT2RP2004920//HISTIDINE-RICH, METAL BINDING POLYPEPTIDE.//0.18//18//55//Q48251

[28807] F-NT2RP2005454

[28808] F-NT2RP2005776//POLY(A) POLYMERASE (EC 2.7.7.19) (PAP) (POLYNUCLEOTIDE ADENYLYLTRANSFERASE) (FRAGMENT).//7.4e-38//136/141I/P51003

[28809] F-NT2RP2005806//A-AGGLUTININ ATTACHMENT SUBUNIT PRECURSOR.//4.0e-08//180//28//P32323

[28810] F-NT2RP2005882

[28811] F-NT2RP3001282//METHYL-ACCEPTING CHEMOTAXIS PROTEIN TLPB.//0.0022//69//39//P39217

[28812] F-NT2RP3001723//TRANSCRIPTIONAL REGULATORY PROTEIN ALGP (ALGINATE REGULATORY PROTEIN ALGR3).I/0.00035//127//31//P15276

[28813] F-NT2RP3002099//NONHISTONE CHROMOSOMAL PROTEIN HMG-1 7.//0.971171//28//P05204

[28814] F-NT2RP3003155//CCAAT DISPLACEMENT PROTEIN (HOMEOBOX PROTEIN CLOX) (CLOX-1) (FRAGMENT).//0.064//101/34//P39881

[28815] F-NT2RP3004028//NADH-UBIQUINONE OXIDOREDUCTASE CHAIN 5 (EC 1.6.5.3) (FRAGMENT).//0.020//95//29//P15583

[28816] F-OVARC1000008//SKIN SECRETORY PROTEIN XP2 PRECURSOR (APEG PROTEIN).//2.8e-05//165H129//P17437

[28817] F-OVARC1000724//SALIVARY PROLINE-RICH PROTEIN PO (ALLELE K) [CONTAINS: PEPTIDE P-D] (FRAGMENT).//0.035S//521/30//P10162

[28818] F-OVARC1000751//TRANS-ACTING TRANSCRIPTIONAL PROTEIN ICPO (VMW118 PROTEIN).//0.38//124//31//P28284

[28819] F-OVARC100i 029

[28820] F-PLACE1000814//EC PROTEIN HOMOLOG 2 (FRAGMENT).//0.45//61//24//Q42377

[28821] F-PLACE1003030//GALECTIN-3 (GALACTOSE-SPECIFIC LECTIN 3) (MAC-2 ANTIGEN) (IGE-BINDING PROTEIN) (35 KD LECTIN) (CARBOHYDRATE BINDING PROTEIN 35) (CBP 35) (LAMININ-BINDING PROTEIN) (LECTIN L-29).//0.70//12132//P47845

[28822] F-PLACE1005549//RHO1 GDP-GTP EXCHANGE PROTEIN I (PROTEIN KINASE C SUPPRESSOR SKC1).//3.2e-08//205/24//P53046

[28823] F-PLACE1007218//IG KAPPA CHAIN V-III REGION (PC 7210).110.991152138//P0i668

[28824] Homology Search Result Data 8.

[28825] The result of the homology search of the GenBank using the clone sequence of 5′-end (54 clones selected in EXAMPLE 16.) except EST and STS.

[28826] Data include

[28827] the name of clone,

[28828] definition of the top hit data,

[28829] the P-value: the length of the compared sequence: identity (%), and

[28830] the Accession No. of the top hit data, as in the order separated by //.

[28831] Data are not shown for the clones in which the P-value was higher than 1.

[28832] F-HEMBA1000497

[28833] F-HEMBA1001750//Human mitochondrial genes for several tRNAs (Phe, Val, Leu) and 12S and 16S ribosomal RNAs.//6.6e-101//473//99//V00710

[28834] F-HEMBA1003854//Homo sapiens clone RG270D13, *** SEQUENCING IN PROGRESS ***, 18 unordered pieces.//1.7e-05//412//61//AC005081

[28835] F-HEMBA1004193//Human BAC clone RG343H22 from 7q31, complete sequence.//0.77//466//59//AC002386

[28836] F-HEMBA1004860//Human pigment epithelium-derived factor gene, complete cds.//6.7e-0711492//57//U29953

[28837] F-HEMBA1005572//HZF-16=Kruppel-related zinc finger gene homolog {alternatively spliced} [human, hepatoblastoma cell line, HEP-G2, mRNA, 2080 nt].112.9e-4711341117711S54641

[28838] F-HEMBA1006038//Human DNA sequence from clone 989H 11 on chromosome 22q13.1-13.2, complete sequence.//0.28//436//59//Z83851

[28839] F-HEMBA1006092//Human chromosome 16 p13.11 BAC clone CIT987SK-29B12 complete sequence.//0.28//309//60//U95738

[28840] F-HEMBA1006406//HS_{—}2268_B2_C07_MR CIT Approved Human Genomic Sperm Library D Homo sapiens genomic clone Plate=2268 Col=14 Row=F, genomic survey sequence.//3.7e-6911340119911AQ070566

[28841] F-HEMBA1006650//H. sapiens CpG island DNA genomic Mse1 fragment, clone 5h5, forward read cpg5h5.f1a.//9.4e-24//143//96//Z55730

[28842] F-HEMBA1006812//X. laevis xUBFalpha1 mRNA for upstream binding factor 2.//0.96112341164//X59863

[28843] F-HEMBB1000672//CIT-HSP-2350H6.TF CIT-HSP Homo sapiens genomic clone 2350H6, genomic survey sequence.//1.1e-68113751194//AQ059158

[28844] F-HEMBB1001197//Drosophila melanogaster strawberry notch (sno) mRNA, complete cds.//2.8e-10112291166//U95760

[28845] F-HEMBB1001871//Equus caballus dermatan sulfate proteoglycan II mRNA, complete cds.//1.2e-27//619/162//AF038127

[28846] F-MAMMA1001252

[28847] F-MAMMA1002094//H. sapiens CpG island DNA genomic Mse1 fragment, clone 184g7, forward read cpg184g7.ft1a.//3.4e-29//167/197//Z59993

[28848] F-NT2RM4000634//Chionoecetes opilio (clone COP41) DNA microsatellite repeat regions.//1.4e-21//230//73//L49136

[28849] F-NT2RM4000657//Human mRNA for phospholipase C, complete cds.//0.029//245//61//D42108

[28850] F-NT2RM4000783//Homo sapiens chromosome 16, cosmid clone 330D11 (LANL), complete sequence.//3.7e-36//324//70//AC005199

[28851] F-NT2RM4000857//RPCI11-49P19.TJ RPCI-11 Homo sapiens genomic clone RPCI-11-49P19, genomic survey sequence.//1.5e-62113221197//AQ051961

[28852] F-NT2RM4001178//Streptomyces coelicolor cosmid 7H1 .//0.0025//296//62//AL021411

[28853] F-NT2RM4002420//Homo sapiens chromosome 17, clone hRPK.63_A_{—}1, complete sequence.//0.00013//121 //76//AC005670

[28854] F-NT2RP2000198//Human platelet glycoprotein IX mRNA, 3′ end.//0.016//246//62//M25827

[28855] F-NT2RP2000551//Rattus norvegicus microsatellite sequence clone 82G9.//2.0e-0811223116911AJ233812

[28856] F-NT2RP2000660//Homo sapiens chromosome 19, cosmid R30953, complete sequence.//0.0073//209//66//AC005622

[28857] F-NT2RP2001214

[28858] F-NT2RP2001460//Homo sapiens PAC clone DJ0905J08 from 7 p12-p14, complete sequence.//1.0//80//76//AC005189

[28859] F-NT2RP2001756//CIT-HSP-2373P1.TR CIT-HSP Homo sapiens genomic clone 2373P1, genomic survey sequence.//3 .0e-38//220//94//AQ110589

[28860] F-NT2RP2002056//Genomic sequence from Human 17, complete sequence.//1.2e-80//317//91//AC002094

[28861] F-NT2RP2002677//Homo sapiens chromosome 10 clone CIT987SK-1031G15 map 10q25,*** SEQUENCING IN PROGRESS ***, I ordered pieces.//0.032//141/70//AC006097

[28862] F-NT2RP2002755//Homo sapiens genomic DNA of 21q22.2 Down Syndrome region, segment 9/13.//1.8e-22//377//69//AP000018

[28863] F-NT2RP2002843//Homo sapiens BAC clone RG030L05 from 7q22, complete sequence.//6.5e-16/311 //63//AC005050

[28864] F-NT2RP2003101//Human FMRI gene, 5′ end.//0.32//105//67//L19476

[28865] F-NT2RP2003799//Human DNA for 5′ terminal region of LINE-1 transposable element clone CGLI-4.//1.6e-33//19//96//X52233

[28866] F-NT2RP2004095//HS_{—}3083_A1_A02_MF CIT Approved Human Genomic Sperm Library D Homo sapiens genomic clone Plate=3083 Col=3 Row=A, genomic survey sequence.//1.0e-14//154//79//AQ106698

[28867] F-NT2RP2004732//CIT-HSP-631P16.TP CIT-HSP Homo sapiens genomic clone 631P16, genomic survey sequence.//2.3e-20//120//99//B79035

[28868] F-NT2RP2004920//Plasmodium falciparum MAL3P4, complete sequence.//0.030//397//59//AL008970

[28869] F-NT2RP2005454//Plasmodium falciparum chromosome 2, section 47 of 73 of the complete sequence.//0.97//455//56//AE001410

[28870] F-NT2RP2005776//H. sapiens PAP mRNA.//1.0e-33//451//68//X76770

[28871] F-NT2RP2005806//Mus musculus musculus sex determining protein (Sry) gene, complete cds.//0.029//412//60//U70652

[28872] F-NT2RP2005882//Human DNA sequence from PAC 389A20 on chromosome X contains ESTs STS, CpG islands and polymorphic CA repeat.//9.4e-25//155/90//Z93242

[28873] F-NT2RP3001282//RPCII 1-52L16.TJ RPCI-11 Homo sapiens genomic clone RPCI-11-52L16, genomic survey sequence.//3.2e-21/1122//100//AQ052775

[28874] F-NT2RP3001723//H. sapiens CpG island DNA genomic Mse1 fragment, clone 13g5, reverse read cpg13g5.rt1a.//2.2e-18//63//85//Z56771

[28875] F-NT2RP3002099//Homo sapiens chromosome 17, clone hCIT.296_K_I, complete sequence.//1.3e-76//351//86//AC005180

[28876] F-NT2RP3003155

[28877] F-NT2RP3004028//Sequence 1 from patent U.S. Pat. No. 5,618,695.//3.3e-13//217//70//I40055

[28878] F-OVARC1000008//0.0040//674//57//M82836

[28879] F-OVARC1000724//Herpes simplex virus type I immediate early (1E) gene 3 for transcriptional activator IE175 (=ICP 4).//1.1e-07//519//59//X06461

[28880] F-OVARC1000751//Homo sapiens DNA from chromosome 19, cosmid R29144, complete sequence.//7.2e-111509H1621HAC004221

[28881] F-OVARC1001029//Human DNA sequence from clone 19408 on chromosome 6q24.1-25.3 Contains STS and GSSs, complete sequence.//1.1e-05/388//61 I/AL031769

[28882] F-PLACE1000814//Homo sapiens BAC clone GS011E15 from 5q31, complete sequence.//1.4e-84//717//78//AC002427

[28883] F-PLACE1003030

[28884] F-PLACE1005549//Human guanine nucleotide regulatory protein (NET1) mRNA, complete cds.//4.9e-56//709//68//U02081

[28885] F-PLACE1007218//Homo sapiens chromosome 20 clone RP3-387E22, *** SEQUENCING IN PROGRESS ***, in unordered pieces.//3.1e-39//214//98//AL031660

[28886] Homology Search Result Data 9.

[28887] The result of the homology search of the GenBank using the clone sequence of 3′-end (54 clones selected in EXAMPLE 16.) except EST and STS.

[28888] Data include

[28889] the name of clone,

[28890] definition of the top hit data,

[28891] the P-value: the length of the compared sequence: identity (%), and

[28892] the Accession No. of the top hit data, as in the order separated by //.

[28893] Blank indicates that the 3′-end sequence corresponding to the 5′-end was not determined in the clone.

[28894] Data are not shown for the clones in which the P-value was higher than 1.

[28895] R-HEMBA1000497//***ALU WARNING: Human Alu-J subfamily consensus sequence.//1.4e-38//185/184//U14567

[28896] R-HEMBA1001750//Hansenula wingei mitochondrial DNA, complete sequence.//1.7e-07//399//59//D31785

[28897] R-HEMBA1003854//Human DNA sequence from clone 224A6 on chromosome 1p35.1-36.23 Contains part of a gene similar to Mouse Wnt-4 protein, the gene for CDC42 (cell division cycle 42 (GTP-binding protein, 25 kD)), ESTs, STSs, GSSs and a CpG Island, complete sequence.//1.4e-75//309//85//AL031281

[28898] R-HEMBA1004193//***ALU WARNING: Human Alu-J subfamily consensus sequence.//1.1e-34//88//81//U14567

[28899] R-HEMBA1004860//Homo sapiens 12q13.1 PAC RPCI3-197B17 (Roswell Park Cancer Institute Human PAC library) complete sequence.//1.3e-06//239//66//AC004241

[28900] R-HEMBA1005572//Homo sapiens chromosome 21 PAC RPCIP704E14135Q2, complete sequence.//3.1e-21//341H67//AJ010598

[28901] R-HEMBA1006038//Homo sapiens chromosome 19, cosmid R34094, complete sequence.//1.7e-24/13071H71//AC004678

[28902] R-HEMBA1006092//H. Sapiens mRNA for alpha2-subunit of soluble guanylyl cyclase.//0.76//246//62//X63282

[28903] R-HEMBA1006406//Human DNA sequence from clone 113J7 on chromosome Xp11.22-11.4. Contains part of a putative Homeobox (pseudo?) gene, ESTs and an STS, complete sequence.//1.3e-31//297//77//AL023574

[28904] R-HEMBA1006650//Homo sapiens BAC clone BKO85EO5 from 22q12.1-qter, complete sequence.//1.8e-15//350//65//AC003071

[28905] R-HEMBA1006812//Homo sapiens chromosome X clone RP3-424J12, *** SEQUENCING IN PROGRESS ***, in unordered pieces.//1.8e-55//430//81//Z82207

[28906] R-HEMBB1000672//Homo sapiens clone UWGC:y54c283 from 6p21, complete sequence.//9.1e-39//437//71//AC006166

[28907] R-HEMBB1001197//Homo sapiens PAC clone DJ0964C11 from 7p14-p15, complete sequence.//1.5e-37/12751/85//AC004593

[28908] R-HEMBB1001871//Plasmodium falciparum chromosome 12 clone 3D7, *** SEQUENCING IN PROGRESS ***, 5 unordered pieces.//0.00097//410//59//AC004688

[28909] R-MAMMA1001252//Homo sapiens clone 201104, *** SEQUENCING IN PROGRESS ***, 4 unordered pieces.//2.9e-13/364//64//AC004529

[28910] R-MAMMA1002094//HS_{—}3163_A1_A09_MR CIT Approved Human Genomic Sperm Library D Homo sapiens genomic clone Plate=3163 Col=17 Row=A, genomic survey sequence.//5.9e-41//256//91//AQ141441

[28911] R-NT2RM4000634//Homo sapiens chromosome 19, cosmid R30783, complete sequence.//1.6e-2111283117311AC005258

[28912] R-NT2RM4000657

[28913] R-NT2RM4000783

[28914] R-NT2RM4000857//RPCI11-63K2.TK RPCI-11 Homo sapiens genomic clone RPCI-11-63K2, genomic survey sequence.//4.0e-07//62//98//AQ203073

[28915] R-NT2RM4001178

[28916] R-NT2RM4002420

[28917] R-NT2RP2000198//Homo sapiens Chromosome 16 BAC clone CIT987-SK37914-complete genomic sequence, complete sequence.//0.58//108//67//AC002307

[28918] R-NT2RP2000551//Homo sapiens DNA, pseudoautosomal boundary-like sequence PABL2.//6.2e-72//391 //87//D30043

[28919] R-NT2RP2000660//Homo sapiens chromosome 17, clone hRPK.640_I_{—}15, complete sequence.//0.0058//661/69//AC005324

[28920] R-NT2RP2001214//Saccharomyces douglasii mitochondrial tRNA-Ser and tRNA-Phe genes, partial sequence, and Varlp (varl) gene, mitochondrial gene encoding mitochondrial protein, complete cds.//0.93//117165//U49822

[28921] R-NT2RP2001460

[28922] R-NT2RP2001756//CIT-HSP-2382021.TR CIT-HSP Homo sapiens genomic clone 2382021, genomic survey sequence.//3.4e-91//507//92//AQ114228

[28923] R-NT2RP2002056//Homo sapiens DNA sequence from PAC 95C20 on chromosome Xp11.3-11.4. Contains STSs and the DXS7 locus with GT and GTG repeat polymorphisms, complete sequence.//0.00022//225//69//Z97181

[28924] R-NT2RP2002677//CIT-HSP-2349K20.TF CIT-HSP Homo sapiens genomic clone 2349K20, genomic survey sequence.//3.1e-29//1781/9411AQ062168

[28925] R-NT2RP2002755//Human DNA sequence from cosmid U65A4, between markers DXS366 and DXS87 on chromosome X *.//5.3e-39/14491172//Z81014

[28926] R-NT2RP2002843//Homo sapiens chromosome 17, clone hRPK.22_N_{—}12, complete sequence.//0.0097//498//59//AC005412

[28927] R-NT2RP2003101//CIT-HSP-238301.TR CIT-HSP Homo sapiens genomic clone 238301, genomic survey sequence.//1.2e-32//344//75//AQ196754

[28928] R-NT2RP2003799//3.6e-05//408//60//AL010237

[28929] R-NT2RP2004095//Plasmodium falciparum chromosome 4 strain 3D7, *** SEQUENCING IN PROGRESS ***, in unordered pieces.//2.1e-10/14551H61//AL034557

[28930] R-NT2RP2004732//Human DNA sequence from clone 703H14 on chromosome 1q23.2-24.3 Contains 3′ end of a novel gene, ESTs, CA repeat(Dl S445), STS, GSSs, complete sequence.//5.1e-51//3831174//AL031287

[28931] R-NT2RP2004920//Homo sapiens chromosome 5, P1 clone 878Hl 1 (LBNL H45), complete sequence.//0.062//315//61//AC005219

[28932] R-NT2RP2005454//Human DNA sequence from PAC 121 GI 3 on chromosome 6 contains flow sorted chromosome 6 HindIII fragment ESTs. polymorphic CA repeat, CpG island, CpG island genomic fragments.//10.751/246//63//Z86062

[28933] R-NT2RP2005776//Homo sapiens PAC clone DJ1189D06 from 7 p15.3-p14, complete sequence.//0.91//232//61//AC005232

[28934] R-NT2RP2005806//Human neurofibromatosis type 1 (NF1) gene, intron 19a, complete sequence.//1.3e-19//405//66//U37368

[28935] R-NT2RP2005882//Plasmodium falciparum MAL3P1, complete sequence.//1.1e-0911533116011Z97348

[28936] R-NT2RP3001282//Plasmodium falciparum MAL3P8, complete sequence.//0.00026//499//58//AL034560

[28937] R-NT2RP3001723//Human BAC clone RG354L07 from 7q31, complete sequence.//0.00035//337//61//AC002466

[28938] R-NT2RP3002099//Homo sapiens chromosome 17, clone hCIT.296_K_{—}1, complete sequence.//1.8e-44//307//86//AC005180

[28939] R-NT2RP3003155

[28940] R-NT2RP3004028//F14A6-Sp6 IGF Arabidopsis thaliana genomic clone F14A6, genomic survey sequence.//0.95//95//65//B21351

[28941] R-OVARC1000008

[28942] R-OVARC1000724//Homo sapiens BAC clone RGO17K18 from 7q31, complete sequence.//0.91//83//71//AC005161

[28943] R-OVARC1000751//HS_{—}2222_A2_C09_MR CIT Approved Human Genomic Sperm Library D Homo sapiens genomic clone Plate=2222 Col=18 Row=E, genomic survey sequence.//2.8e-12//176//72//AQ033143

[28944] R-OVARC1001029//Homo sapiens Xp22 Cosmid U151GI (from Lawrence Livermore X library) and PAC RPCII-93D11 (from Roswell Park Cancer Center) complete sequence.//1.2e-09//65//75//AC002357

[28945] R-PLACE1000814//Homo sapiens BAC clone GS465N 13 from 7p 15-p21, complete sequence.//6.2e-52//H514//75//AC004744

[28946] R-PLACE1003030//Homo sapiens snRNA activating protein complex 190 kD subunit (SNAP190) mRNA, complete cds.//19.6e-33//225//90//AF032387

[28947] R-PLACE1005549//Arabidopsis thaliana genomic DNA, chromosome 5, TAC clone: K19PI7, complete sequence.//0.097//323//61//AB007644

[28948] R-PLACE1007218//Homo sapiens chromosome 20 clone RP3-387E22, *** SEQUENCING IN PROGRESS ***, in unordered pieces.//1.1e-88//497//91//AL031660

[28949] Homology Search Result Data 10.

[28950] The result of the homology search of the Human Unigene using the clone sequence of 5′-end (54 clones selected in EXAMPLE 16.).

[28951] Data include

[28952] the name of clone,

[28953] title of the top hit data,

[28954] the P-value: the length of the compared sequence: identity (%), and

[28955] the Accession No. of the top hit data, as in the order separated by //.

[28956] Data are not shown for the clones in which the P-value was higher than 1.

[28957] F-HEMBA1000497//ou15a11.x1 Soares_NFL_T_GBC_S1 Homo sapiens cDNA clone IMAGE: 16263323′, mRNA sequence.//1.0//186//65//AI018130

[28958] F-HEMBA1001750//Human mRNA for TI-227H.//2.5e-101//473//99//D50525

[28959] F-HEMBA1003854//Homo sapiens mRNA for KIAA1031 protein, partial cds.//7.2e-06//103//80//AB028954

[28960] F-HEMBA1004193//Homo sapiens mRNA for TL 132.//0.75//334//591AJ012755

[28961] F-HEMBA1004860//ny07e01.s1 NCl_CGAP_GCB 1 Homo sapiens cDNA clone IMAGE:1271064 3′ similar to contains Alu repetitive element; mRNA sequence.//3.7e-061/140117011AA749151

[28962] F-HEMBA1005572//HZF-16=Kruppel-related zinc finger gene homolog {alternatively spliced) [human, hepatoblastoma cell line, HEP-G2, mRNA, 2080 nt].1.1e-48//341/177//S54641

[28963] F-HEMBA1006038//Homo sapiens gene for insulin receptor substrate-2, complete cds.//0.036//297//60//AB000732

[28964] F-HEMBA1006092//ab80f12.s1 Stratagene fetal retina 937202 Homo sapiens cDNA clone IMAGE:853295 3′ similar to contains Alu repetitive element; mRNA sequence.//0.65//50/163//AA663266

[28965] F-HEMBA1006406//ws26e11.x1 NCl_CGAP_GC6 Homo sapiens cDNA clone IMAGE:2498348 3′ similar to TR:002710002710 GAG POLYPROTEIN. mRNA sequence.//1.4e-32//518/1671//A1989639

[28966] F-HEMBA1006650//Homo sapiens Arp2/3 protein complex subunit p20-Arc (ARC20) mRNA, complete cds.//1.3e-19//136//90//AF006087

[28967] F-HEMBA1006812//zh49f01.s1 Soares_fetal_liver_spleen_NFLS_SI Homo sapiens cDNA clone IMAGE:415417 3′, mRNA sequence.//1.3e-120//579//98//W80404

[28968] F-HEMBB1000672//Homo sapiens mRNA for KIAA1040 protein, partial cds.//0.00047//706//57//AB028963

[28969] F-HEMBB1001197//q45e03.x1 NCl_CGAP_Ut1 Homo sapiens cDNA clone IMAGE:2211772 3′ similar to TR:001940001940 STRAWBERRY NOTCH; mRNA sequence.//1.2e-16//117//92//A1580023

[28970] F-HEMBB1001871//Human chondroitin/dermatan sulfate proteoglycan (PG40) core protein mRNA, complete cds.//4.6e-261152711621//I4219

[28971] F-MAMMA1001252

[28972] F-MAMMA1002094

[28973] F-NT2RM4000634//DKFZp434D1813_r1434 (synonym: htes3) Homo sapiens cDNA clone DKFZp434D 18135′, mRNA sequence.//9.7e-1611226/16911AL040136

[28974] F-NT2RM4000657//Homo sapiens mRNA for KIAA1069 protein, partial cds.//7.6e-179//817H199//AB028992

[28975] F-NT2RM4000783//wd82f06.x1 NCl_CGAP_Lu24 Homo sapiens cDNA clone IMAGE:2338115 3′, mRNA sequence.//1.8e-20//470//65//AI703299

[28976] F-NT2RM4000857//Homo sapiens KIAA0416 mRNA, partial cds.//1.9e-46//749//65//AB007876

[28977] F-NT2RM4001178//Homo sapiens protein tyrosine phosphatase (PAC-1) mRNA, complete cds.//0.0024//254//63//L11329

[28978] F-NT2RM4002420//wg39f11.x1 Soares_NSF_F8_{—}9W_OT_PA_P_S1 Homo sapiens cDNA clone IMAGE:23675013′ similar to contains element L1 L1 repetitive element; mRNA sequence.//1.4e-13//27//84//A1742251

[28979] F-NT2RP2000198//Human mRNA for platelet glycoprotein IX.//0.0033//241//62//X52997

[28980] F-NT2RP2000551//ze37d12.s1 Soares retina N2b4HR Homo sapiens cDNA clone IMAGE:361175 3′, mRNA sequence.//5.0e-07//16//71//AA017066

[28981] F-NT2RP20006600//qx01g11.x1NCl_CGAP_Br14 Homo sapiens cDNA clone IMAGE:1999364 3′, mRNA sequence.//0.027//120//65//A1225283

[28982] F-NT2RP2001214

[28983] F-NT2RP2001460//wb50h10.x1 NCl_CGAP_GC6 Homo sapiens cDNA clone IMAGE:2309155 3′, mRNA sequence.//0.0013//89//78//A1651878

[28984] F-NT2RP2001756//zw54e12.s1 Soares_total_fetus_Nb2HF8_{—}9w Homo sapiens cDNA clone IMAGE:773902 3′ similar to TR:G456660 G456660 ZINC FINGER PROTEIN ZFP-1; mRNA sequence.//2.3e-18//120//93H1AA427992

[28985] F-NT2RP2002056//tw44g09.x1 NCl_CGAP_Ut1 Homo sapiens cDNA clone IMAGE:2262592 3′ similar to contains Alu repetitive element; mRNA sequence.//2.4e-07//99//79//A1811687

[28986] F-NT2RP2002677

[28987] F-NT2RP2002755//zj83d10.s1 Soares_fetal_liver_spleen-INFLS_S1 Homo sapiens cDNA clone IMAGE:4614913′ similar to contains element TAR1 repetitive element; mRNA sequence.//1.9e-19//229//76//AA705059

[28988] F-NT2RP2002843//wt88d12.x1 NCl_CGAP_GC6 Homo sapiens cDNA clone IMAGE:2514551 3′ similar to TR:P79522 P79522 MHC CLASS I REGION PROLINE RICH PROTEIN; mRNA sequence.//8.2e-15//314//67//A1964055

[28989] F-NT2RP2003101//wi65a03.x1 NCl_CGAP_Kid12 Homo sapiens cDNA clone IMAGE:2398156 3′, mRNA sequence.//0.38//106//68//A1763133

[28990] F-NT2RP2003799//Homo sapiens mRNA; cDNA DKFZp564C142 (from clone DKFZp564C 142).1/2.5e-29/1124//91//AL049979

[28991] F-NT2RP2004095

[28992] F-NT2RP2004732//Homo sapiens mRNA for KIAA0884 protein, partial cds.//2.6e-109//533//96//AB020691

[28993] F-NT2RP2004920//wz68d10.x1 NCl_CGAP_Mel15 Homo sapiens cDNA clone IMAGE:2563219 3′ similar to TR:000172 000172 LINE-1 REVERSE TRANSCRIPTASE; mRNA sequence.//0.0020//220//61//AI969546

[28994] F-NT2RP2005454//Homo sapiens mRNA for KIAA0977 protein, complete cds.//0.058//43//69//AB023194

[28995] F-NT2RP2005776//H. sapiens PAP mRNA.//4.3e-35//451I/68//X76770

[28996] F-NT2RP2005806//HSZ78328 Human fetal brain S. Meier-Ewert Homo sapiens cDNA clone 2.48 (CEPH) 3′, mRNA sequence.//2.0e-05//385//62//Z78328

[28997] F-NT2RP2005882//Human mRNA for KIAA0364 gene, complete cds.//7.3e-23//141 //94//AB002362

[28998] F-NT2RP3001282

[28999] F-NT2RP3001723//ws73d05.x1 NCl_CGAP_Co3 Homo sapiens cDNA clone IMAGE:2503593 3′ similar to contains MSR1+L.T1TAR1 TAR1 repetitive element; mRNA sequence.//2.6e-07//245//66//AW008782

[29000] F-NT2RP3002099//yg49d01.s1 Soares infant brain INIB Homo sapiens cDNA clone IMAGE:36239 3′, mRNA sequence.//0.58//64//64//R46086

[29001] F-NT2RP3003155

[29002] F-NT2RP3004028//Homo sapiens mRNA for KIAA1074 protein, complete cds.//1.3e-29//488//6611AB028997

[29003] F-OVARC1000008//Homo sapiens mRNA for KIAA0665 protein, complete cds.//0.00032//430//59//AB014565

[29004] F-OVARC1000724//Homo sapiens mRNA for KIAA0641 protein, complete cds.//0.0054//426//58//AB014541

[29005] F-OVARC1000751//Human Tis 11d gene, complete cds.//4.6e-12/5271162//U07802

[29006] F-OVARC1001029//qv29c05.x1 NCl_CGAP_{—}0v31 Homo sapiens cDNA clone IMAGE:1982984 3′ similar to contains element LI repetitive element; mRNA sequence.//0.0012//45//68//AI252422

[29007] F-PLACE1000814//ak42f05.s1 Soares_testis_NHT Homo sapiens cDNA clone IMAGE: 14086413′, mRNA sequence.//7.1e-311275117611AA868469

[29008] F-PLACE1003030

[29009] F-PLACE1005549//Homo sapiens mRNA for Rho guanine nucleotide-exchange factor, splice variant NETI A.//1.2e-57//737//67//AJ010046

[29010] F-PLACE1007218//yo34a08.s1 Soares adult brain N2b4HB55Y Homo sapiens cDNA clone IMAGE: 179798 3′, mRNA sequence.//2.2e-21//216//76//H52716

[29011] Homology Search Result Data 11.

[29012] The result of the homology search of the Human Unigene using the clone sequence of 3′-end (54 clones selected in EXAMPLE 16.).

[29013] Data include

[29014] the name of clone,

[29015] title of the top hit data,

[29016] the P-value: the length of the compared sequence: identity (%), and

[29017] the Accession No. of the top hit data, as in the order separated by //.

[29018] Blank indicates that the 3′-end sequence corresponding to the 5′-end was not determined in the clone.

[29019] Data are not shown for the clones in which the P-value was higher than 1.

[29020] R-HEMBA1000497//np09h02.s1 NCI_CGAP_Pr3 Homo sapiens cDNA clone IMAGE:1115859 similar to contains Alu repetitive element; contains element MER22 repetitive element; mRNA sequence.//6.2e-38//185//83//AA614254

[29021] R-HEMBA1001750//yy71b1.s1 Soares_multiple-sclerosis_{—}2NbHMSP Homo sapiens cDNA clone IMAGE:2789713′, mRNA sequence.//0.0045//193//63//N63303

[29022] R-HEMBA1003854//Homo sapiens mRNA; cDNA DKFZp564F133 (from clone DKFZp564F 133).//3 .4e-72//310//80//AL049263

[29023] R-HEMBA1004193//tr01e08.x1 NCl_CGAP_Ov23 Homo sapiens cDNA clone IMAGE:2217062 3′ similar to contains Alu repetitive element contains element MER4 repetitive element; mRNA sequence.//1.5e-33//86//81//AI914747

[29024] R-HEMBA1004860//qh16b06.x1 Soares_NFL_T_GBC_Si Homo sapiens cDNA clone IMAGE: 1844819 3′, mRNA sequence.//0.017//18//69//A1218308

[29025] R-HEMBA1005572//wj16h05.x1 NCl_CGAP_Kidl2 Homo sapiens cDNA clone IMAGE:24030333′, mRNA sequence.//4.6e-111//522//99//A1861830

[29026] R-HEMBA1006038//DKFZp434E1117_r1434 (synonym: htes3) Homo sapiens cDNA clone DKFZp434EI11175′, mRNA sequence.//1.2e-22//295//72//AL041450

[29027] R-HEMBA1006092//qt30d09.x1 Soares_pregnant uterus_NbHPU Homo sapiens cDNA clone IMAGE: 1949489 3′ similar to contains element PTR5 repetitive element; mRNA sequence.//1.4e-87/14221198//AI337963

[29028] R-HEMBA1006406//Homo sapiens mRNA for KIAA0752 protein, partial cds.//4.1e-30/12911176//AB00 8295

[29029] R-HEMBA1006650//H. sapiens mRNA for serine/threonine protein kinase EMK.//3.6e-09//319//62//X97630

[29030] R-HEMBA1006812//Human mRNA for KIAAO 118 gene, partial cds.//3.1e-52113371187//D42087

[29031] R-HEMBB1000672//Homo sapiens mRNA; cDNA DKFZp434MOI1 (from clone DKFZp434MOI1).//3.2e-48/127611741//AL096734

[29032] R-HEMBB1100197//zt35b11.r1 Soares ovary tumor NbHOT Homo sapiens cDNA clone IMAGE:724317 5′ similar to contains Alu repetitive element; mRNA sequence.//9.9e-44/1275118811AA410788

[29033] R-HEMBB1001871//wg20c02.x1 Soares_NSF_F8_{—}9W_OT_PA_P_SI Homo sapiens cDNA clone IMAGE:2365634 3′, mRNA sequence.//6.3e-104//501//98//A1741321

[29034] R-MAMMA1001252//aa61h04.s1 NCl_CGAP_GCB1 Homo sapiens cDNA clone IMAGE:8254633′ similar to contains Alu repetitive element; contains element XTR repetitive element; mRNA sequence.//9.0e-19//27//91//AA504355

[29035] R-MAMMA1002094//wd28h12.x1 Soares_NFL_T_GBC_SI Homo sapiens cDNA clone IMAGE:23295113′, mRNA sequence.//2.5e-68//328//99//A1936520

[29036] R-NT2RM4000634//DKFZp434F2016_s1434 (synonym: htes3) Homo sapiens cDNA clone DKFZp434F2016 3′, mRNA sequence.//8.2e-20//185//81//AL041146

[29037] R-NT2RM4000657//Homo sapiens mRNA for KIAA1069 protein, partial cds.//5.7e-62/1335//94//AB028992

[29038] R-NT2RM4000783

[29039] R-NT2RM4000857//Human megakaryocyte stimulating factor mRNA, complete cds.//0.00074//360//61//U70136

[29040] R-NT2RM4001178//tk08e03.x1 NCl_CGAP_Lu24 Homo sapiens cDNA clone IMAGE:2150428 3′, mRNA sequence.//0.77//96//62//A1457506

[29041] R-NT2RM4002420//w158b04.x1 NCl_CGAP_Brn25 Homo sapiens cDNA clone IMAGE:24290713′, mRNA sequence.//2.4e-85//438//94//AI857508

[29042] R-NT2RP2000198//nx19b11.s1 NCl_CGAP_GC3 Homo sapiens cDNA clone IMAGE:1256541 3′, mRNA sequence.//1.9e-45//270//91//AA738352

[29043] R-NT2RP2000551//tg80h11.x1 Soares_NhHMPu_SI Homo sapiens cDNA clone IMAGE:21151413′, mRNA sequence.//3.3e-53//31 //85//AI417680

[29044] R-NT2RP2000660//ns42a06.s1 NCl_CGAP_GCB1 Homo sapiens cDNA clone IMAGE: 1186258 3′, mRNA sequence.//4.3e-26//42//97//AA805691

[29045] R-NT2RP2001214//tw65g08.x1 NCl_CGAP_Ut3 Homo sapiens cDNA clone IMAGE:2264606 3′ similar to contains element MSR1 repetitive element; mRNA sequence.//1.5e-57//289/19711A1680174

[29046] R-NT2RP2001460

[29047] R-NT2RP2001756//zw54e12.s1 Soares_total_fetus_Nb2HF8_{—}9w Homo sapiens cDNA clone IMAGE:773902 3′ similar to TR:G456660 G456660 ZINC FINGER PROTEIN ZFP-1; mRNA sequence.//6.0e-13//8511961//AA427992

[29048] R-NT2RP2002056//yh26a12.s1 Soares placenta Nb2HP Homo sapiens cDNA clone IMAGE:130846 3′, mRNA sequence.//0.0016//208//65//R22302

[29049] R-NT2RP2002677//Homo sapiens mRNA for KIAA0524 protein, partial cds.//3.4e-26//3391171//AB011096

[29050] R-NT2RP2002755//qd50d10.x1 Soares_fetal_heart_NbHHI9W Homo sapiens cDNA clone IMAGE: 1732915 3′, mRNA sequence.//1 .5e-26//419/166//AI190698

[29051] R-NT2RP2002843//at31f08.x1 Barstead colon HPLRB7 Homo sapiens cDNA clone IMAGE:2373639 3′ similar to contains L1.t1 L1 repetitive element; mRNA sequence.//1.8e-4511463117411A1749673

[29052] R-NT2RP2003101//ty24h05.x1 NCl_CGAP_Ut3 Homo sapiens cDNA clone IMAGE:2280057 3′, mRNA sequence.//7.5e-73//347//99//AI758824

[29053] R-NT2RP2003799//Homo sapiens mRNA for KIAA0751 protein, complete cds.//0.0026//247//65//AB018294

[29054] R-NT2RP2004095//zv08c02.s1 Soares_NhHMPu_S1 Homo sapiens cDNA clone IMAGE:753026 3′ similar to contains element MER32 repetitive element; mRNA sequence.//9.6e-07//18 8//66//AA436455

[29055] R-NT2RP2004732//tu60a07.x1 NCl_CGAP_Gas4 Homo sapiens cDNA clone IMAGE:2255412 3′ similar to contains Alu repetitive element; contains element L1 repetitive element; mRNA sequence.//4.3e-25//414/16811A1678956

[29056] R-NT2RP2004920//wd13h02.x1 NCI CGAP_Co3 Homo sapiens cDNA clone IMAGE:2328051 3′, mRNA sequence.//6.8e-91 l/48311931//A1694022

[29057] R-NT2RP2005454//yy77g09.s1 Soares_multiple sclerosis_{—}2NbHMSP Homo sapiens cDNA clone IMAGE:279616 3′, mRNA sequence.//0.0070//325//59//N48302

[29058] R-NT2RP2005776//qq97d06.x1 Soares_total_fetus_Nb2HF8_{—}9w Homo sapiens cDNA clone IMAGE: 1939307 3′, mRNA sequence.//7.5e-08//89//82//A1338419

[29059] R-NT2RP2005806//wc29h01.x1 NCl_CGAP Kid11 Homo sapiens cDNA clone IMAGE:2316625 3′ similar to contains MER2.b3 MER2 repetitive element; mRNA sequence.//3.2e-16//235//71//A1671398

[29060] R-NT2RP2005882//wo31f09.x1 NCl_CGAP_Gas4 Homo sapiens cDNA clone IMAGE:2456969 3′, mRNA sequence.//0.00095//352//59//A1925528

[29061] R-NT2RP3001282//wg35b03.x1 Soares_NSF_F8_{—}9W_OT_PA_P_S1 Homo sapiens cDNA clone IMAGE:23670533′, mRNA sequence.//1.7e-11311555H197//AI769199

[29062] R-NT2RP3001723//wo48e06.x1 NCl_CGAP_Gas4 Homo sapiens cDNA clone IMAGE:2458594 3′, mRNA sequence.//4.2e-9811471//98//A1926617

[29063] R-NT2RP3002099//DKFZp564L227_s1564 (synonym: hfbr2) Homo sapiens cDNA clone DKFZp564L227 3′, mRNA sequence.//9.2e-50//329//87//AL037910

[29064] R-NT2RP3003155//zp07a07.s1 Stratagene ovarian cancer (#937219) Homo sapiens cDNA clone IMAGE:595668 3′, mRNA sequence.//1.4e-30//159119911AA173172

[29065] R-NT2RP3004028//Homo sapiens protein kinase C-alpha mRNA, partial 3′ UTR.//0.431166//75//AF035594

[29066] R-OVARC1000008//wa69e12.x1 Soares_NFL_T_GBC_Si Homo sapiens cDNA clone IMAGE:2301454 3′, mRNA sequence.//1.0e-77//3761198//A1699393

[29067] R-OVARC1000724//tf94b10.x1 NCl_CGAP_CLL1 Homo sapiens cDNA clone IMAGE:2106907 3′, mRNA sequence.//0.71//27/1100//AI380236

[29068] R-OVARC1000751//og93d04.s1 NCl_CGAP_Kid5 Homo sapiens cDNA clone IMAGE: 1455847 3′, mRNA sequence.//3.5e-1311274116311AA863306

[29069] R-OVARC1000129//yz96e02.r1 Soares melanocyte 2NbHM Homo sapiens cDNA clone IMAGE:290906 5′ similar to contains Alu repetitive element; contains element PTR5 repetitive element; mRNA sequence.//3.5e-13//75//174//N99464

[29070] R-PLACE1000814//tg49a08.x1 Soares_NFL_T_GBC_S1 Homo sapiens cDNA clone IMAGE:2112086 3′ similar to contains L1.t2 L1 L1 repetitive element; mRNA sequence.//2.2e-1811285//69//AI424789

[29071] R-PLACE1003030//Homo sapiens snRNA activating protein complex 190 kD subunit (SNAP 190) mRNA, complete cds.//4.0e-34//225//90//AF032387

[29072] R-PLACE1005549//tm26b11.x1 Soares_NFL_T_GBC_S 1 Homo sapiens cDNA clone IMAGE:21576933′, mRNA sequence.//0.91//27//66//AI480253

[29073] R-PLACE1007218//yq06e01.r1 Soares fetal liver spleen INFLS Homo sapiens cDNA clone IMAGE: 1961525′ similar to contains Alu repetitive element; contains LTR4 repetitive element; mRNA sequence.//2.4e-36//245//87//R92256

[29074] Homology Search Result Data 12.

[29075] Data obtained by the homology search for full-length nucleotide sequences and deduced amino acid sequences. Each data includes Clone name, Definition in hit data, P value, Length of sequence to be compared, Homology, and Accession number (No.) of hit data. These items are shown in this order and separated by a double-slash mark, //.

[29076] C-HEMBA1000012//PROBABLE LEUCYL-TRNA SYNTHETASE (EC 6.1.1.4) (LEUCINE-TRNA LIGASE) (LEURS).//6.4E-99//457aa//45%//Q09996

[29077] C-HEMBA1000020//Homo sapiens beta 2 gene.//7.5E-264//194bp//95%//X02344

[29078] C-HEMBA1000129//HYPOTHETICAL HELICASE C8A4.08C IN CHROMOSOME I.//3.8E-25//166aa//36%//Q09884

[29079] C-HEMBA1000201//Homo sapiens mRNA for integrase interactor lb protein (INI1B).//0//1612bp//99% //AJ011738

[29080] C-HEMBA1000216//HYPOXIA-INDUCIBLE FACTOR 1 ALPHA (HIF-1 ALPHA) (ARNT INTERACTING PROTEIN).//1E-86//146aa//56%//Q61221

[29081] C-HEMBA1000231

[29082] C-HEMBA1000264

[29083] C-HEMBA1000280

[29084] C-HEMBA1000282

[29085] C-HEMBA1000303//&quot; Mus musculus Plenty of SH3s (POSH) mRNA, complete cds.&quot;//7.1E-254//1440bp//87%//AF030131

[29086] C-HEMBA1000333//&quot; Homo sapiens mRNA for KIAA0874 protein, partial cds.&quot;//4.8E-253//1148bp//99%//AB020681

[29087] C-HEMBA1000351

[29088] C-HEMBA1000356//Homo sapiens mRNA; cDNA DKFZp566C243 (from clone DKFZp566C243).//3.3E-287//815bp//98%//AL050274

[29089] C-HEMBA1000396

[29090] C-HEMBA1000411//ANKYRIN.//5.7E-12//27aa//38%//Q02357

[29091] C-HEMBA1000442

[29092] C-HEMBA1000456

[29093] C-HEMBA1000504

[29094] C-HEMBA1000518//PECANEX PROTEIN.//2.1E-19/227aa//38%//P18490

[29095] C-HEMBA1000519

[29096] C-HEMBA1000523//TESTIS-SPECIFIC PROTEIN PBS 13.//2.4E-44//292aa//36%//Q01755

[29097] C-HEMBA1000542//&quot; Rattus norvegicus mRNA for dipeptidyl peptidase III, complete cds.&quot;//2.2E-19411663bp//83%//D89340

[29098] C-HEMBA1000545

[29099] C-HEMBA1000557

[29100] C-HEMBA1000592//&quot; Homo sapiens sorting nexin 6 (SNX6) mRNA, complete cds.&quot;//0//1465bp//99%//AF121856

[29101] C-HEMBA1000594

[29102] C-HEMBA1000604

[29103] C-HEMBA1000622

[29104] C-HEMBA1000637

[29105] C-HEMBA1000655

[29106] C-HEMBA1000657//&quot; Rattus norvegicus ADP-ribosylation factor-directed GTPase activating protein mRNA, complete cds.&quot;//7.2E-156//1366bp//76%//U35776

[29107] C-HEMBA1000749

[29108] C-HEMBA1000769

[29109] C-HEMBA1000773

[29110] C-HEMBA1000774

[29111] C-HEMBA1000822

[29112] C-HEMBA1000843

[29113] C-HEMBA1000852//ARYLSULFATASE D PRECURSOR (EC 3.1.6.-) (ASD).//1E-78//19aa//87%//P51689

[29114] C-HEMBA1000870

[29115] C-HEMBA1000908

[29116] C-HEMBA1000934

[29117] C-HEMBA1000972

[29118] C-HEMBA1000986

[29119] C-HEMBA1000991

[29120] C-HEMBA1001008

[29121] C-HEMBA1001059//&quot; Human N-acetylgalactosamine 6-sulphatase (GALNS) gene, exon 14.&quot;//4.8E-169//786bp//99%//U06088

[29122] C-HEMBA1001094

[29123] C-HEMBA1001302//&quot; Homo sapiens calcium binding protein precursor, mRNA, complete cds.&quot;//9.6E-258//682bp//94%//AF153686

[29124] C-HEMBA1001330

[29125] C-HEMBA1001497

[29126] C-HEMBA1001569//SYNAPTOBREVIN 2 (VESICLE ASSOCIATED MEMBRANE PROTEIN 2) (VAMP-2).//2.3E-53//110aa//100%//P 19065

[29127] C-HEMBA1001570

[29128] C-HEMBA1001620//MYO-INOSITOL-1-PHOSPHATE SYNTHASE (EC 5.5.1.4) (IPS).//1.6E-166//506aa//60%//P42803

[29129] C-HEMBA1001640

[29130] C-HEMBA1001655

[29131] C-HEMBA1001672//&quot; Homo sapiens methyl-CpG binding domain-containing protein MBD3 (MBD3) mRNA, complete cds.&quot;//0//1707bp//98%//AF072247

[29132] C-HEMBA1001711

[29133] C-HEMBA1001723//&quot; Rattus norvegicus G beta-like protein GBL mRNA, complete cds.&quot;//4.7E-172//H 240bp//81%//AF051155

[29134] C-HEMBA1001746//&quot; Homo sapiens squamous cell carcinoma antigen recognized by T cell (SART-2) mRNA, complete cds.&quot;//7.6E-59//998bp//64%//AF098066

[29135] C-HEMBA1001781

[29136] C-HEMBA1001804//&quot; Homo sapiens zinc finger DNA binding protein 99 (ZNF281) mRNA, complete cds.&quot;//0//1637bp//99%//AF125158

[29137] C-HEMBA1001822//&quot; Mus musculus Ese2L protein mRNA, complete cds.&quot;//1.9E-235//1329bp//89%//AF132479

[29138] C-HEMBA1001824

[29139] C-HEMBA1001866//UDP-GLUCOSE:GLYCOPROTEIN GLUCOSYLTRANSFERASE PRECURSOR (EC 2.4.1.-) (DUGT).l/5.7E-51//234aa//41%//Q09332

[29140] C-HEMBA1001910

[29141] C-HEMBA1001913//GCN20 PROTEIN.//2.3E-81//158aa//50%//P43535

[29142] C-HEMBA1001921//&quot; Homo sapiens germinal center kinase related protein kinase mRNA, complete cds.&quot;//0//1850bp//99%//AF000145

[29143] C-HEMBA1001939

[29144] C-HEMBA1100950//&quot; Homo sapiens mRNA for KIAA0971 protein, complete cds.&quot;//0//1974bp//99%//AB023188

[29145] C-HEMBAI100967//&quot; Homo sapiens NY-REN-57 antigen mRNA, partial cds.&quot;//0//1721bp//99%//AF155114

[29146] C-HEMBA1002035//Homo sapiens mRNA; cDNA DKFZp586EO518 (from clone DKFZp586E0518).//0//2149bp//99%//AL050089

[29147] C-HEMBA1002092//&quot; Mus musculus Olf-1/EBF-like-3 transcription factor (O/E-3) mRNA, complete cds.&quot;//1.3E-271/1583bp//88%//U92703

[29148] C-HEMBA1002102//ANKYRIN.//4.40E-10//106aa//35%//Q02357

[29149] C-HEMBA1002150

[29150] C-HEMBA1002151//&quot; Rattus norvegicus p34 mRNA, complete cds.&quot;//1.1E-153//1059bp//82%//AF178669

[29151] C-HEMBA1002189

[29152] C-HEMBA1002215//TESTIN 2 (TES2) [CONTAINS: TESTIN 1 (TES1)].//2.2E-1991/392aa//89%//P47226

[29153] C-HEMBA1002229

[29154] C-HEMBA1002241//PROLIFERATING-CELL NUCLEOLAR ANTIGEN P120 (PROLIFERATION-AS SOCIATED NUCLEOLAR PROTEIN P120).//3.70E-06//95aa//33%//P46087

[29155] C-HEMBA1002341//&quot; Homo sapiens mRNA for KIAA0771 protein, partial cds.&quot;//0//1514bp//99%//AB018314

[29156] C-HEMBA1002417//&quot; Homo sapiens chromosome 19, cosmid R28784, complete sequence.&quot;/11.4E-299/1294bp//100%//AC005954

[29157] C-HEMBA1002547//&quot; Homo sapiens agrin precursor mRNA, partial cds.&quot;//0//1605bp//97%//AF016903

[29158] C-HEMBA1002703

[29159] C-HEMBA1002779

[29160] C-HEMBA1002816

[29161] C-HEMBA1002970

[29162] C-HEMBA1002999//&quot; Rattus norvegicus lamina associated polypeptide IC (LAP 1 C) mRNA, complete cds.&quot;/11.4E-171/ /1552bp//75%//U20286

[29163] C-HEMBA1003021

[29164] C-HEMBA1003077//SLIT PROTEIN PRECURSOR.//2.6E-15//199aa/131%//P24014

[29165] C-HEMBA1003079

[29166] C-HEMBA1003273

[29167] C-HEMBA1003304

[29168] C-HEMBA1003309

[29169] C-HEMBA1003376

[29170] C-HEMBA1003384

[29171] C-HEMBA1003531

[29172] C-HEMBA1003548

[29173] C-HEMBA1003556

[29174] C-HEMBA1003571

[29175] C-HEMBA1003579

[29176] C-HEMBA1003684//ZINC FINGER PROTEIN 151 (MIZ-1 PROTEIN).//2E-73//526aa//32%//Q13105

[29177] C-HEMBA1003692

[29178] C-HEMBA1003720

[29179] C-HEMBA1003725

[29180] C-HEMBA1003729

[29181] C-HEMBA1003758

[29182] C-HEMBA1003773//&quot; Mus musculus signal recognition particle receptor beta subunit mRNA, complete cds.&quot;//5.8E-81//511bp//86%//U17343

[29183] C-HEMBA1003783//&quot; Mus musculus bromodomain-containing protein BP75 mRNA, complete cds.&quot;//1.1E-190//1204bp//84%//AF084259

[29184] C-HEMBA1003799

[29185] C-HEMBA1003804

[29186] C-HEMBA1003805//&quot; Mus musculus KH domain RNA binding protein QK1-5A mRNA, complete cds.&quot;//0//988bp//95%//AF090402

[29187] C-HEMBA1003836//MOB 1 PROTEIN (MPS1 BINDER 1).//8.10E-31//134aa//52%//P40484

[29188] C-HEMBA1003856

[29189] C-HEMBA1003866//&quot; Mus musculus semaphorin VIa mRNA, complete cds.&quot;//1.2E-105//1192bp//70%//AF030430

[29190] C-HEMBA1003879

[29191] C-HEMBA1003880

[29192] C-HEMBA1003893

[29193] C-HEMBA1003908

[29194] C-HEMBA1003937

[29195] C-HEMBA1003942

[29196] C-HEMBA1003958

[29197] C-HEMBA1003976

[29198] C-HEMBA1003978//&quot; Homo sapiens mRNA for KIAA0840 protein, partial cds.&quot;//0//1530bp//100%//AB020647

[29199] C-HEMBA1003985

[29200] C-HEMBA1004011

[29201] C-HEMBA1004024

[29202] C-HEMBA1004038

[29203] C-HEMBA1004045

[29204] C-HEMBA1004048

[29205] C-HEMBA1004111//&quot; Homo sapiens mRNA for KIAA1276 protein, partial cds.&quot;//1.00E-163//751bp//99%//AB033102

[29206] C-HEMBA1004131//SEPTIN 2 HOMOLOG (FRAGMENT).//1.6E-166//416aa//72%//Q14141

[29207] C-HEMBA1004138

[29208] C-HEMBA1004143

[29209] C-HEMBA1004150

[29210] C-HEMBA1004168//&quot; Homo sapiens geminin mRNA, complete cds.&quot;//3.9E-208//951bp//99%//AF067855

[29211] C-HEMBA1004200

[29212] C-HEMBA1004202//RAS-RELATED PROTEIN RAB-13 .116.2E-30//208aa//37%//P51153

[29213] C-HEMBA1004203//NUCLEOLAR PROTEIN NOP2.//11.5E-12//258aa/129%//P40991

[29214] C-HEMBA1004238

[29215] C-HEMBA1004248//&quot; Homo sapiens insulin induced protein 2 mRNA, complete cds.&quot;//8.20E-175//552bp//97%//AF125392

[29216] C-HEMBA1004272

[29217] C-HEMBA1004274

[29218] C-HEMBA1004275//&quot; Homo sapiens mRNA for KIAA1111 protein, partial cds.&quot;//0//1341bp//99%//AB029034

[29219] C-HEMBA1004286//&quot; Homo sapiens TGF beta receptor associated protein-1 mRNA, complete cds.&quot;//0//1982bp//99%//AF022795

[29220] C-HEMBA1004312

[29221] C-HEMBA1004321//ZINC FINGER PROTEIN 184 (FRAGMENT).//2.3E-93//357aa//42%//Q99676

[29222] C-HEMBA1004323

[29223] C-HEMBA1004327

[29224] C-HEMBA1004330

[29225] C-HEMBA1004341

[29226] C-HEMBA1004366

[29227] C-HEMBA1004372

[29228] C-HEMBA1004389//&quot; Homo sapiens zinc finger DNA binding protein 99 (ZNF281) mRNA, complete cds.&quot;//0//H1437bp//99%//AF125158

[29229] C-HEMBA1004394

[29230] C-HEMBA1004408//PEPTIDYL-PROLYL CIS-TRANS ISOMERASE 10 (EC 5.2.1.8) (PPIASE) (ROTAMASE) (CYCLOPHILIN-10).//3.2E-32//148aa//52%//P52017

[29231] C-HEMBA1004429

[29232] C-HEMBA1004460

[29233] C-HEMBA1004461

[29234] C-HEMBA1004502

[29235] C-HEMBA1004554

[29236] C-HEMBA1004560

[29237] C-HEMBA1004610

[29238] C-HEMBA1004629

[29239] C-HEMBA1004632

[29240] C-HEMBA1004637

[29241] C-HEMBA1004670

[29242] C-HEMBA1004672

[29243] C-HEMBA1004697

[29244] C-HEMBA1004711

[29245] C-HEMBA1004725

[29246] C-HEMBA1004730

[29247] C-HEMBA1004734//UBIQUITIN-CONJUGATING ENZYME E2-18 KD (EC 6.3.2.19) (UBIQUITIN- PROTEIN LIGASE) (UBIQUITIN CARRIER PROTEIN) (PM42).//9.9E-39//143aa//52%//P42743

[29248] C-HEMBA1004751

[29249] C-HEMBA1004752

[29250] C-HEMBA1004889//&quot; Human C3f mRNA, complete cds.&quot;//6.70E-24//341aa//26%//U72515

[29251] C-HEMBA1004934

[29252] C-HEMBA1004944

[29253] C-HEMBA1004973

[29254] C-HEMBA1004977

[29255] C-HEMBA1005009//&quot; Homo sapiens BAF53a (BAF53a) mRNA, complete cds.&quot;/0//1813bp//99%//AF041474

[29256] C-HEMBA1005083

[29257] C-HEMBA1005113

[29258] C-HEMBA1005133

[29259] C-HEMBA1005185

[29260] C-HEMBA1005219//NUCLEAR PROTEIN SNF7.//5.3E-10//189aa//25%//P39929

[29261] C-HEMBA1005252//&quot; Homo sapiens mRNA for KIAA0585 protein, partial cds.&quot;//1.2E-268//1215bp//99%//AB011157

[29262] C-HEMBA1005296

[29263] C-HEMBA1005314

[29264] C-HEMBA1005331

[29265] C-HEMBA1005394

[29266] C-HEMBA1005403

[29267] C-HEMBA1005423//&quot; Homo sapiens cyclin-dependent kinase inhibitor (CDKN2C) mRNA, complete cds.&quot;//2E-213//537bp//99%//AF041248

[29268] C-HEMBA1005468

[29269] C-HEMBA1005469

[29270] C-HEMBA1005474

[29271] C-HEMBA1005517

[29272] C-HEMBA1005518

[29273] C-HEMBA1005528//CCR4-ASSOCIATED FACTOR 1 (CAF1).//3.1E-154//285aa//99%//Q60809

[29274] C-HEMBA1005558//NUCLEAR PROTEIN SNF7.//6.40E-16//170aa//31%//P39929

[29275] C-HEMBA1005576//&quot; Homo sapiens mRNA for KIAA0463 protein, partial cds.&quot;//1.1E-181//835bp//99%//AB007932

[29276] C-HEMBA1005582//&quot; TROPOMYOSIN 1, NON-MUSCLE ISOFORM (TROPOMYOSIN II) (CYTOSKELETAL TROPOMYOSIN).&quot;//0.00000009//213aa//27%//P09492

[29277] C-HEMBA1005583

[29278] C-HEMBA1005595//&quot; DYNEIN HEAVY CHAIN, CYTOSOLIC (DYHC).&quot;//2.3E-54//562aa//29%//P34036

[29279] C-HEMBA1005609//Homo sapiens mRNA; cDNA DKFZp564K133 (from clone DKFZp564K133).//2.2e-315//1448bp//99%//AL050012

[29280] C-HEMBA1005621//&quot; Homo sapiens Mad2B protein (MAD2B) mRNA, complete cds.&quot;//2.9E-224//1031bp//99%//AF139365

[29281] C-HEMBA1005666

[29282] C-HEMBA1005680

[29283] C-HEMBA1005685

[29284] C-HEMBA1005737//CALCINEURIN B SUBUNIT (PROTEIN PHOSPHATASE 2B REGULATORY SUBUNIT).//4.4E-17//67aa//34%//P25296

[29285] C-HEMBA1005746

[29286] C-HEMBA1005755

[29287] C-HEMBA1005813

[29288] C-HEMBA1005822

[29289] C-HEMBA1005834

[29290] C-HEMBA1005884

[29291] C-HEMBA1005891

[29292] C-HEMBA1005909

[29293] C-HEMBA1005911

[29294] C-HEMBA1005931

[29295] C-HEMBA1005963

[29296] C-HEMBA1005991

[29297] C-HEMBA1006005

[29298] C-HEMBA1006031//&quot; Homo sapiens mRNA for putative phospholipase, complete cds.&quot;//0//1413bp//99%//AB019435

[29299] C-HEMBA1006067

[29300] C-HEMBA1006081

[29301] C-HEMBA1006091

[29302] C-HEMBA1006100

[29303] C-HEMBA1006108//&quot; Homo sapiens mRNA for KIAA0943 protein, partial cds.&quot;//4.8E-245//764bp//99%//AB023160

[29304] C-HEMBA1006121

[29305] C-HEMBA1006130//SEL-10 PROTEIN.//0.000000043//219aa//25%//Q93794

[29306] C-HEMBA1006155

[29307] C-HEMBA1006158//&quot; Homo sapiens transcription factor forkhead-like 7 (FKHL7) gene, complete cds.&quot;//0//1551bp//99%//AF048693

[29308] C-HEMBA1006182

[29309] C-HEMBA1006198//PROLINE-RICH PROTEIN MP-2 PRECURSOR.//1.9E-19//215aa//39%//P05142

[29310] C-HEMBA1006235//Homo sapiens clone 24422 mRNA sequence.//0//1615bp//99%//AF070557

[29311] C-HEMBA1006253//DNA-DAMAGE-REPAIR/TOLERATION PROTEIN DRTI11 PRECURSOR.//0.00000002//62aa//53%//P42698

[29312] C-HEMBA1006259

[29313] C-HEMBA1006272//RETROVIRUS-RELATED PROTEASE (EC 3.4.23.-).//1.3E-123//200aa//73%//P10265

[29314] C-HEMBA1006278//POLY(A) POLYMERASE (EC 2.7.7.19) (PAP) (POLYNUCLEOTIDE ADENYLYLTRANSFERASE).//1E-210//490aa//77%//P25500

[29315] C-HEMBA1006283//NUCLEAR POLYADENYLATED RNA-BINDING PROTEIN NAB2.//0.000000012//176aa//30%//P32505

[29316] C-HEMBA1006284

[29317] C-HEMBA1006291//2-ARYLPROPIONYL-COA EPIMERASE (EC 5.-.-.-).//4.2E-12//215aa//23%//P70473

[29318] C-HEMBA1006293

[29319] C-HEMBA1006309//HYPOTHETICAL 54.2 KD PROTEIN IN ERP5-ORC6 INTERGENIC REGION.//1.4E-48//248aa//43%//P38821

[29320] C-HEMBA1006349

[29321] C-HEMBA1006364

[29322] C-HEMBA1006381

[29323] C-HEMBA1006398//&quot; Human LI element L1.6 putative p150 gene, complete cds.&quot;//2E-277//1729bp//85%//U93563

[29324] C-HEMBA1006445//&quot; Homo sapiens putative tumor supressor NOEY2 mRNA, complete cds.&quot;//1.4E-270//1224bp//100%//U96750

[29325] C-HEMBA1006483

[29326] C-HEMBA1006492

[29327] C-HEMBA1006497

[29328] C-HEMBA1006502

[29329] C-HEMBA1006507//&quot; Homo sapiens mRNA for KIAA0666 protein, partial cds.&quot;//0//2334bp//99%//AB014566

[29330] C-HEMBA1006535

[29331] C-HEMBA1006559//&quot; Mus musculus PRAJA1 (Praja1) mRNA, complete cds.&quot;//2.8E-206//1107bp//83%//U06944

[29332] C-HEMBA1006566

[29333] C-HEMBA1006579

[29334] C-HEMBA1006583

[29335] C-HEMBA1006612

[29336] C-HEMBA1006624//DNA/PANTOTHENATE METABOLISM FLAVOPROTEIN HOMOLOG.//0.00000069//109aa//38%//Q58323

[29337] C-HEMBA1006643

[29338] C-HEMBA1006674

[29339] C-HEMBA1006682

[29340] C-HEMBA1006708//HYPOTHETICAL 46.4 KD TRP-ASP REPEATS CONTAINING PROTEIN IN PMC1-TFG2 INTERGENIC REGION.//3.3E-22//241aa//31%//P53196

[29341] C-HEMBA1006717

[29342] C-HEMBA1006744

[29343] C-HEMBA1006754

[29344] C-HEMBA1006767

[29345] C-HEMBA1006789

[29346] C-HEMBA1006832

[29347] C-HEMBA1006885//&quot; Homo sapiens gene for Proline synthetase associated, complete cds.&quot;//0//1467bp//96%//AB018566

[29348] C-HEMBA1006900

[29349] C-HEMBA1006926

[29350] C-HEMBA1006941//Homo sapiens mRNA for putative thioredoxin-like protein.//1.8E-226//1039bp//99%//AJ010841

[29351] C-HEMBA1006973//&quot; Homo sapiens rab3-GAP regulatory domain mRNA, complete cds.&quot;//5.6E-143//740bp//94%//AF004828

[29352] C-HEMBA1006993

[29353] C-HEMBA1007002

[29354] C-HEMBA1007062

[29355] C-HEMBA1007080

[29356] C-HEMBA1007087//HYPOTHETICAL PROTEIN MJO162.//2E-45//304aa//32%//Q57626

[29357] C-HEMBA1007112//Homo sapiens mRNA; cDNA DKFZp586C 1817 (from clone DKFZp586CI 817).//0//1619bp//99%//AL117450

[29358] C-HEMBA1007194//&quot; Homo sapiens origin recognition complex subunit 6 (ORC6) mRNA, complete cds.&quot;//0//1588bp//99%//AF139658

[29359] C-HEMBA1007206

[29360] C-HEMBA1007256

[29361] C-HEMBA1007267

[29362] C-HEMBA1007281

[29363] C-HEMBA1007300//&quot; Homo sapiens 3′,5′-cyclic nucleotide phosphodiesterase 10A1 (PDE10A) mRNA, splice variant 1, complete cds.&quot;//0//1519bp//99%//AF127479

[29364] C-HEMBA1007301

[29365] C-HEMBA1007319

[29366] C-HEMBA1007320

[29367] C-HEMBA1007327

[29368] C-HEMBA1007347

[29369] C-HEMBB1000005

[29370] C-HEMBB1000030

[29371] C-HEMBB1000048

[29372] C-HEMBB1000099

[29373] C-HEMBB1000141

[29374] C-HEMBB1000198

[29375] C-HEMBB1000217//&quot; Homo sapiens SUMO-1-activating enzyme E1N subunit (SUA1) mRNA, complete cds.&quot;//0//1038bp//99%//AF090385

[29376] C-HEMBB1000218

[29377] C-HEMBB1000274

[29378] C-HEMBB1000312

[29379] C-HEMBB1000402

[29380] C-HEMBB1000420

[29381] C-HEMBB1000480

[29382] C-HEMBB1000530

[29383] C-HEMBB1000550

[29384] C-HEMBB1000556//&quot; Homo sapiens mRNA for KIAA0750 protein, complete cds.&quot;//6.3E-74//1213bp//64%//AB018293

[29385] C-HEMBB1000586

[29386] C-HEMBB1000592

[29387] C-HEMBB1000593//&quot; Homo sapiens transferrin receptor 2 alpha (TFR2) mRNA, complete cds.&quot;//1.3E-107//503bp//99%//AF067864

[29388] C-HEMBB1000649

[29389] C-HEMBB1000693//&quot; Homo sapiens neuroanl mRNA, complete cds.&quot;//0//2952bp//94% //AF040723

[29390] C-HEMBB1000822

[29391] C-HEMBB1000826

[29392] C-HEMBB1000890

[29393] C-HEMBB1000915//SUBTILISIN-LIKE PROTEASE PACE4 PRECURSOR (EC 3.4.21.-).//1 .10E-08//129aa/131%//P29122

[29394] C-HEMBB1001008

[29395] C-HEMBB1001020//&quot; Homo sapiens mRNA for KIAA0889 protein, complete cds.&quot;//0//1812bp//98%//AB020696

[29396] C-HEMBB1001051

[29397] C-HEMBB1001112//&quot; Homo sapiens sec61 homolog mRNA, complete cds.&quot;//6E-145//961bp//83%//AF077032

[29398] C-HEMBB1001221

[29399] C-HEMBB1001234//65 KD YES-ASSOCIATED PROTEIN (YAP65).//5.4E-93//196aa//54%//P46938

[29400] C-HEMBB1001282//ANKYRIN R (ANKYRINS 2.1 AND 2.2) (ERYTHROCYTE ANKYRIN).117E-43//394aa//34%//P16157

[29401] C-HEMBB1001302

[29402] C-HEMBB1001335

[29403] C-HEMBB1001337

[29404] C-HEMBB1001356

[29405] C-HEMBB1001364

[29406] C-HEMBB1001366

[29407] C-HEMBB1001367

[29408] C-HEMBB1001527

[29409] C-HEMBB1001537

[29410] C-HEMBB1002359

[29411] C-HEMBB1002415

[29412] C-HEMBB1002457

[29413] C-HEMBB1002492

[29414] C-HEMBB1002495

[29415] C-HEMBB1002502

[29416] C-HEMBB1002550//HYPOTHETICAL UOG-1 PROTEIN.//SE-28//266aa//33%//P27544

[29417] C-HEMBB1002600//&quot; Homo sapiens tetraspan NET-5 mRNA, complete cds.&quot;//0//1417bp//99%//AF089749

[29418] C-HEMBB1002607//&quot; Homo sapiens vitamin D3 receptor interacting protein (DRIP80) mRNA, complete cds.&quot;//2E-136//660bp//98%//AF105421

[29419] C-HEMBB1002684

[29420] C-HEMBB1002692

[29421] C-HEMBB1002697

[29422] C-HEMBB1002705//&quot; Homo sapiens CGI-27 protein mRNA, complete cds.&quot;//7.80E-285//841bp//96%//AF132961

[29423] C-MAMMA1000019

[29424] C-MAMMA1000020//H. sapiens mRNA for flavin-containing monooxygenase 5 (FMO5).//8.2E-19811868bp//99%//Z47553

[29425] C-MAMMA1000025

[29426] C-MAMMA1000055//TESTIN 2 (TES2) [CONTAINS: TESTIN 1 (TES1)].//1.5E-90//323aa//48%//P47226

[29427] C-MAMMA1000069

[29428] C-MAMMA1000084

[29429] C-MAMMA1000139

[29430] C-MAMMA1000163

[29431] C-MAMMA1000171

[29432] C-MAMMA1000173//&quot; Homo sapiens src homology 3 domain-containing protein HIP-55 mRNA, complete cds.&quot;//2.6E-164//1044bp//87%//AF197060

[29433] C-MAMMA1000277

[29434] C-MAMMA1000278

[29435] C-MAMMA1000284//P. walti mRNA for mp associated protein 55.//2.2E-10911864bp//76%//X99836

[29436] C-MAMMA1000309

[29437] C-MAMMA1000312

[29438] C-MAMMA1000313

[29439] C-MAMMA1000361

[29440] C-MAMMA1000388//&quot; Homo sapiens UKLF mRNA for ubiquitous Kruppel like factor, complete cds.&quot;//0//1466bp//99%//AB015132

[29441] C-MAMMA1000395

[29442] C-MAMMA1000410

[29443] C-MAMMA1000416//HYPOTHETICAL 32.0 KD PROTEIN C09F5.2 IN CHROMOSOME III.//2.00E-30//119aa//53%//Q09232

[29444] C-MAMMA1000421

[29445] C-MAMMA1000422

[29446] C-MAMMA1000468

[29447] C-MAMMA1000472

[29448] C-MAMMA1000490

[29449] C-MAMMA1000524

[29450] C-MAMMA1000567

[29451] C-MAMMA1000612//&quot; Rattus norvegicus G beta-like protein GBL mRNA, complete cds.&quot;//1E-95//1115bp//72%//AF051155

[29452] C-MAMMA1000623

[29453] C-MAMMA1000625//GYP7 PROTEIN.//2.1E-41//98aa//40%//P48365

[29454] C-MAMMA1000664

[29455] C-MAMMA1000670

[29456] C-MAMMA1000672//VITELLOGENIC CARBOXYPEPTIDASE PRECURSOR (EC 3.4.16.-).//4.4E-33//250aa//33%//P42660

[29457] C-MAMMA1000713//L-RIBULOKINASE (EC 2.7.1.16).//7.70E-17//246aa//29%//P94524

[29458] C-MAMMA1000731//CHROMODOMAIN-HELICASE-DNA-BINDING PROTEIN 1 (CHD-1).//1E-77//395aa//45%//O14646

[29459] C-MAMMA1000734//Homo sapiens mRNA for SEC63 protein.//0//587bp//99%//AJ011779

[29460] C-MAMMA1000738//HYPOTHETICAL 116.5 KD PROTEIN C20G8.09C IN CHROMOSOME I.//9E-299//1033aa//55%//P87115

[29461] C-MAMMA1000746

[29462] C-MAMMA1000775

[29463] C-MAMMA1000824//ACTIN.//6.2E-20//284aa//28%//P53500

[29464] C-MAMMA1000831

[29465] C-MAMMA1000841//PUTATIVE AMIDASE (EC 3.5.1.4).117.8E-40//101aa//54%//O27540

[29466] C-MAMMA1000842

[29467] C-MAMMA1000843

[29468] C-MAMMA1000856

[29469] C-MAMMA1000865

[29470] C-MAMMA1000875

[29471] C-MAMMA1000906

[29472] C-MAMMA1000908

[29473] C-MAMMA1000914

[29474] C-MAMMA1000956//Homo sapiens CLDN8 gene for claudin-8.//0//767bp//99%//AJ250711

[29475] C-MAMMA1000968

[29476] C-MAMMA1000979

[29477] C-MAMMA1001008//&quot; Homo sapiens aspartic-like protease mRNA, complete cds.&quot;//2.50E-276//1263bp//99%//AF117892

[29478] C-MAMMA1001021

[29479] C-MAMMA11001041//&quot; SPECTRIN BETA CHAIN, BRAIN (SPECTRIN, NON-ERYTHROID BETA CHAIN) (FODRIN BETA CHAIN) (SPTBNI).&quot;//1.6E-16//13aa//41%//Q01082

[29480] C-MAMMA1001059//Homo sapiens mRNA for DEAD Box Protein 5.//0//440bp//99%//AJ237946

[29481] C-MAMMA1001075//&quot; Homo sapiens CGI-72 protein mRNA, complete cds.&quot;/11.3E-181//397bp//98%//AF151830

[29482] C-MAMMA1001078

[29483] C-MAMMA1001091

[29484] C-MAMMA1001105//OVO PROTEIN (SHAVEN BABY PROTEIN).//4E-49//125aa/168%//P51521

[29485] C-MAMMA1001110

[29486] C-MAMMA1001126

[29487] C-MAMMA1001139//SRE-2 PROTEIN.//5.80E-35//239aa//38%//Q09273

[29488] C-MAMMA1001143

[29489] C-MAMMA1001154

[29490] C-MAMMA1001181//ABC1 PROTEIN HOMOLOG PRECURSOR.//1.30E-07//81aa/145%//Q92338

[29491] C-MAMMA1001215

[29492] C-MAMMA1001244

[29493] C-MAMMA1001259//&quot; Mus musculus F-box protein FBXI8 mRNA, partial cds.&quot;//2.3E-271//1414bp//89%//AF184275

[29494] C-MAMMA1001260//HYPOTHETICAL 97.1 KD PROTEIN ROSD3.4 IN CHROMOSOME III.//2.1E-52//630aa//30%//P34537

[29495] C-MAMMA1001343

[29496] C-MAMMA1001411//Homo sapiens mRNA; cDNA DKFZp56400823 (from clone DKFZp56400823).//0//2131bp//99%//AL080121

[29497] C-MAMMA1001419

[29498] C-MAMMA1001476//URIDINE KINASE (EC 2.7.1.48) (URIDINE MONOPHOSPHOKINASE) (FRAGMENT).//6.5E-129//260aa/192%//P52623

[29499] C-MAMMA1001510

[29500] C-MAMMA1001522

[29501] C-MAMMA1001576//&quot; Human gamma-tubulin mRNA, complete cds.&quot;//7.5E-276//1561bp//90%//M61764

[29502] C-MAMMA1001604

[29503] C-MAMMA1001620

[29504] C-MAMMA1001635

[29505] C-MAMMA1001649

[29506] C-MAMMA1001686

[29507] C-MAMMA1001692

[29508] C-MAMMA1001743//Y BOX BINDING PROTEIN-1 (Y-BOX TRANSCRIPTION FACTOR).//8.5E-32//171aa//36%//P21573

[29509] C-MAMMA1001754//&quot; Homo sapiens CGI-11 protein mRNA, complete cds.&quot;//0//1837bp//98%//AF132945

[29510] C-MAMMA1001757

[29511] C-MAMMA1001764

[29512] C-MAMMA10011768//CELL DIVISION CYCLE PROTEIN 48 HOMOLOG MJ1156.I/3.8E-45//351aa//38%//Q58556

[29513] C-MAMMA1001771//M. musculus mRNA for semaphorin B.//2.60E-200/1272bp//79%//X85991

[29514] C-MAMMA1001790

[29515] C-MAMMA1001837//ZINC FINGER PROTEIN 29 (ZFP-29).//2.6E-77//507aa//38%//Q07230

[29516] C-MAMMA1001858

[29517] C-MAMMA1001868//TRICHOHYALIN.//2.7E-19/359aa//25%//P22793

[29518] C-MAMMA1001970

[29519] C-MAMMA1002042

[29520] C-MAMMA1002068

[29521] C-MAMMA1002153

[29522] C-MAMMA1002156

[29523] C-MAMMA1002170//40S RIBOSOMAL PROTEIN S2 (S4) (LLREP3 PROTEIN).//6E-66//157aa//70%//P15880

[29524] C-MAMMA1002174

[29525] C-MAMMA1002209

[29526] C-MAMMA1002219//&quot; Homo sapiens mRNA for KIAA1067 protein, partial cds.&quot;//1.1E-181//861bp//98%//AB028990

[29527] C-MAMMA1002236//TRANSLATION INITIATION FACTOR EIF-2B GAMMA SUBUNIT (EIF-2B GDP-GTP EXCHANGE FACTOR).//8.8E-217//310aa//86%//P70541

[29528] C-MAMMA1002243

[29529] C-MAMMA1002268//&quot; Mus musculus sphingosine kinase (SPHK1a) mRNA, partial cds.&quot;//1E-190//H 624bp//76%//AF068748

[29530] C-MAMMA1002269

[29531] C-MAMMA1002292

[29532] C-MAMMA1002294

[29533] C-MAMMA1002297//Homo sapiens mRNA for Rab6 GTPase activating protein.//1.l E-214//881bp//97%//AJ011679

[29534] C-MAMMA1002312

[29535] C-MAMMA1002329//M. musculus mRNA for semaphorin B.//3.80E-45//332bp//84%//X85991

[29536] C-MAMMA1002333

[29537] C-MAMMA1002351//FERRIPYOCHELIN BINDING PROTEIN.//0.000078//127aa//26%//P40882

[29538] C-MAMMA1002353

[29539] C-MAMMA1002355

[29540] C-MAMMA1002356

[29541] C-MAMMA1002362

[29542] C-MAMMA1002380

[29543] C-MAMMA1002384

[29544] C-MAMMA1002427

[29545] C-MAMMA1002470//PROBABLE NH(3)-DEPENDENT NAD(+) SYNTHETASE (EC 6.3.5.1).//1E-11//28aa//36%//P47623

[29546] C-MAMMA1002485//&quot; Homo sapiens stanniocalcin-related protein mRNA, complete cds.&quot;//822bp//99%//AF098462

[29547] C-MAMMA1002494

[29548] C-MAMMA1002524//HYPOTHETICAL 117.8 KD PROTEIN IN STE2-FRS2 INTERGENIC REGION.//1 .2E-34//337aa//31%//P43571

[29549] C-MAMMA1002530//&quot; Homo sapiens cytosolic phospholipase A2 gamma (cPLA2 gamma) mRNA, complete cds.&quot;//0//1910bp//99%//AF065214

[29550] C-MAMMA1002554

[29551] C-MAMMA1002585//&quot; Homo sapiens mRNA for KIAA0860 protein, complete cds.&quot;//0//1405bp//99%//AB020667

[29552] C-MAMMA1002598

[29553] C-MAMMA1002619//PROBABLE UBIQUITIN CARBOXYL-TERMINAL HYDROLASE K02C4.3 (EC 3.1.2.15) (UBIQUITIN THIOLESTERASE) (UBIQUITIN-SPECIFIC PROCESSING PROTEASE) (DEUBIQUITINATING ENZYME).//9.5E-16//59aa//37%//Q09931

[29554] C-MAMMA1002655//&quot; Homo sapiens mRNA for ganglioside sialidase, complete cds.&quot;//0//1515bp//99%//AB008185

[29555] C-MAMMA1002671//ACETYL-COENZYME A SYNTHETASE (EC 6.2.1.1) (ACETATE-COA LIGASE) (ACYL- ACTIVATING ENZYME).//1.1E-45//618aa//26%//P27550

[29556] C-MAMMA1002673

[29557] C-MAMMA1002684//&quot; Homo sapiens mRNA for KIAA0214 protein, complete cds.&quot;//0//3174bp//99%//D86987

[29558] C-MAMMA1002711

[29559] C-MAMMA1002769//&quot; Homo sapiens cell cycle progression restoration 8 protein (CPR8) mRNA, complete cds.&quot;//2.2E-25//330bp//77%//AF011794

[29560] C-MAMMA1002775

[29561] C-MAMMA1002782

[29562] C-MAMMA1002796

[29563] C-MAMMA1002807

[29564] C-MAMMA1002838

[29565] C-MAMMA1002842//&quot; Mus musculus c-Cb1 associated protein CAP mRNA, complete cds.&quot;//2.6E-58//373bp//81%//U58883

[29566] C-MAMMA1002869//PINCH PROTEIN (PARTICULARY INTERESTING NEW CYS-HIS PROTEIN).//1.4E-160//305aa//85%//P48059

[29567] C-MAMMA1002881//GLIOMA PATHOGENESIS-RELATED PROTEIN (RTVP-1 PROTEIN).//5.7E-30//214aa//35%//P48060

[29568] C-MAMMA1002886

[29569] C-MAMMA1002890

[29570] C-MAMMA1002938//&quot; Homo sapiens mRNA for KIAA0698 protein, complete cds.&quot;//8.4E-252//1139bp//100%//AB014598

[29571] C-MAMMA1002964

[29572] C-MAMMA1003011//HISTONE MACR0-H2A. I.//2.7E-123//370aa//66%//Q02874

[29573] C-MAMMA1003013//DNA POLYMERASE BETA (EC 2.7.7.7).//7.4E-46//332aa//36%//P06746

[29574] C-MAMMA1003015

[29575] C-MAMMA1003019

[29576] C-MAMMA1003035//RIBOSOMAL LARGE SUBUNIT PSEUDOURIDINE SYNTHASE C (EC 4.2.1.70) (PSEUDOURIDYLATE SYNTHASE) (URACIL HYDROLYASE).//1.9E-13//108aa//33%//P23851

[29577] C-MAMMA1003039

[29578] C-MAMMA1003044

[29579] C-MAMMA1003049

[29580] C-MAMMA1003056

[29581] C-MAMMA1003057//MD6 PROTEIN.//3.1E-225//419aa//97%//Q60584

[29582] C-MAMMA1003066

[29583] C-MAMMA1003099

[29584] C-MAMMA1003104

[29585] C-MAMMA1003113//&quot; Mus musculus COP9 complex subunit 7a (COPS7a) mRNA, complete cds.&quot;//1.1E-234//178bp//86%//AF071316

[29586] C-MAMMA1003127//MYOSIN I ALPHA (MMI-ALPHA).//2.2E-105//217aa//89%//P46735

[29587] C-MAMMA1003135

[29588] C-MAMMA1003146//Homo sapiens mRNA for GalT3 protein.//4.3E-218//996bp//99%//Y15062

[29589] C-MAMMA1003150//&quot; Homo sapiens mRNA for KIAA1096 protein, partial cds.&quot;//0//1342bp//99%//AB029019

[29590] C-MAMMA1003166//&quot; Homo sapiens MLL septin-like fusion protein (MSF) mRNA, complete cds.&quot;//3.10E-158//592bp//97%//AF123052

[29591] C-NT2RM1000032

[29592] C-NT2RM1000035//&quot; Human mRNA for KIAA0199 gene, partial cds.&quot;//0//2948bp//99%//D83782

[29593] C-NT2RM1000039//HYPOTHETICAL 41.4 KD PROTEIN IN SRLQ-HYPF INTERGENIC REGION (EC 1.18.1.-) (ORF4) (ORF2).//2.90E-14//299aa//25%//P37596

[29594] C-NT2RM1000055//&quot; Homo sapiens mRNA for KIAA0829 protein, partial cds.&quot;//0//3111bp//99%//AB020636

[29595] C-NT2RM1000059

[29596] C-NT2RM1000062

[29597] C-NT2RM1000118//CALCINEURIN B SUBUNIT (PROTEIN PHOSPHATASE 2B REGULATORY SUBUNIT) (CALCINEURIN REGULATORY SUBUNIT).//1.2E-10//50aa//28%//P87072

[29598] C-NT2RM1000119

[29599] C-NT2RM1000127

[29600] C-NT2RM1000131//&quot; Homo sapiens mRNA for KIAA0792 protein, complete cds.&quot;//0//2980bp//99%//AB018335

[29601] C-NT2RM1000132//&quot; Homo sapiens NADH:ubiquinone oxidoreductase NDUFS6 subunit mRNA, nuclear gene encoding mitochondrial protein, complete cds.&quot;//7.8E-110//516bp//99%//AF044959

[29602] C-NT2RM1000153//CYTOSOLIC PURINE 5′-NUCLEOTIDASE (EC 3.1.3.5).//3.3E-38//469aa//27%//P49902

[29603] C-NT2RM1000186//CALCINEURIN B SUBUNIT (PROTEIN PHOSPHATASE 2B REGULATORY SUBUNIT) (CALCINEURIN REGULATORY SUBUNIT).//1.2E-10//50aa//28%//P87072

[29604] C-NT2RM1000187//PUTATIVE PRE-MRNA SPLICING FACTOR ATP-DEPENDENT RNA HELICASE SPAC 10F6.02C.//1.1E-10//94aa//47%//O42643

[29605] C-NT2RM1000199//Homo sapiens mRNA for type I transmembrane receptor (psk-1 gene).//0//2476bp//99%//AJ245820

[29606] C-NT2RM1000244//&quot; Homo sapiens TRAF4 associated factor 1 mRNA, partial cds.&quot;//2E- 126//592bp//99%//U81002

[29607] C-NT2RM1000252//H. sapiens E-MAP-115 mRNA.//9.7E-3511569bp//64%//X73882

[29608] C-NT2RM1000256//&quot; Homo sapiens mRNA for Glutamine:fructose-6-phosphate amidotransferase, complete cds.&quot;//0//3012bp//99%//AB016789

[29609] C-NT2RM1000260//&quot; Human mRNA for KIAA0130 gene, complete cds.&quot;//0//3139bp//98%//D50920

[29610] C-NT2RM1000271

[29611] C-NT2RM1000300

[29612] C-NT2RM1000314//&quot; Human mRNA for KIAAO 159 gene, complete cds.&quot;//0//4349bp//99%//D63880

[29613] C-NT2RM1000354//&quot; Xenopus laevis chromosome condensation protein XCAP-G mRNA, complete cds.&quot;//7.4E-245//2101bp//68%//AF111423

[29614] C-NT2RM1000355//&quot; Homo sapiens transmembrane protein BR1 (BR1) mRNA, complete cds.&quot;//0//1599bp//99%//AF152462

[29615] C-NT2RM1000365

[29616] C-NT2RM1000377//&quot; Homo sapiens dual specificity phosphatase MKP5 (MKP5) mRNA, complete cds.&quot;//3.2E-196//1016bp//94%//AF179212

[29617] C-NT2RM1000388//HYPOTHETICAL 27.7 KD PROTEIN IN CPT1-SPC98 INTERGENIC REGION.//0.000000019//67aa//31%//P53915

[29618] C-NT2RM1000399

[29619] C-NT2RM1000430//&quot; Homo sapiens erythroblast macrophage protein EMP mRNA, complete cds.&quot;//1.4E-185//1486bp//81%//AF084928

[29620] C-NT2RM1000555//&quot; Homo sapiens mRNA for KIAA0885 protein, complete cds.&quot;//0//2885bp//99%//AB020692

[29621] C-NT2RM1000563//TRANSMISSION-BLOCKING TARGET ANTIGEN S230 PRECURSOR.//0.0000068//199aa//30%//Q08372

[29622] C-NT2RM1000648//GLYCOSYLTRANSFERASE ALG2 (EC 2.4.1.-).//8.5E-75//301aa//39%//P43636

[29623] C-NT2RM1000661//&quot; Homo sapiens translation initiation factor 4e mRNA, complete cds.&quot;//4.3E-210//960bp//99%//AF038957

[29624] C-NT2RM1000666//DNA-BINDING PROTEIN A.//2.2E-0911165aa//34%//P16989

[29625] C-NT2RM1000672

[29626] C-NT2RM1000691//Homo sapiens mRNA for PLU-1 protein.//0//3104bp//99%//AJ132440

[29627] C-NT2RM1000699

[29628] C-NT2RM1000741//&quot; Homo sapiens mRNA for KIAA0567 protein, partial cds.&quot;//1 .1E-295//1338bp//99%//AB011139

[29629] C-NT2RM1000742//&quot; Homo sapiens AC 133 antigen mRNA, complete cds.&quot;//0//3524bp//99%//AF027208

[29630] C-NT2RM1000746//&quot; Homo sapiens polyamine modulated factor-1 (PMF1) mRNA, complete cds.&quot;//6.70E-227//1043bp//99%//AF141310

[29631] C-NT2RM1000770//DXS6673 E PROTEIN.//1.4E-39//194aa//48%//Q14202

[29632] C-NT2RM1000772//VEGETATIBLE INCOMPATIBILITY PROTEIN HET-E-1.//7.3E-15//280aa//27%//Q00808

[29633] C-NT2RM1000780

[29634] C-NT2RM1000800//Mus musculus partial mRNA for B-IND1 protein (B-ind1 gene).//1.1E-98//571bp//89%//Z97207

[29635] C-NT2RM1000802

[29636] C-NT2RM1000811//&quot; Homo sapiens AC133 antigen mRNA, complete cds.&quot;//0//3524bp//99%//AF027208

[29637] C-NT2RM1000826//&quot; Homo sapiens mRNA for KIAA0885 protein, complete cds.&quot;//0//2885bp//99%//AB020692

[29638] C-NT2RM1000829

[29639] C-NT2RM1000850//ANKYRIN R (ANKYRINS 2.1 AND 2.2) (ERYTHROCYTE ANKYRIN).//9.7E-42//333aa//36%//P16157

[29640] C-NT2RM1000852//&quot; Homo sapiens putative ATP-dependent RNA helicase ROK1 mRNA, complete cds.&quot;//0//2206bp//99%//AF077033

[29641] C-NT2RM1000857//&quot; Homo sapiens mRNA for KIAA0962 protein, partial cds.&quot;//0//3716bp//99%//AB023179

[29642] C-NT2RM1000874//&quot; Homo sapiens death effector domain-containing testicular molecule mRNA, complete cds.&quot;//1.4E-244//1113bp//99%//AF043733

[29643] C-NT2RM1000882//&quot; Homo sapiens delta-6 fatty acid desaturase mRNA, complete cds.&quot;//4.30E-122//394bp//69%//AF126799

[29644] C-NT2RM1000885//HYPOTHETICAL 97.1 KD PROTEIN R05D3.4 IN CHROMOSOME III.//1.8E-56//630aa//30%//P34537

[29645] C-NT2RM1000894//DNA-DIRECTED RNA POLYMERASE 1135 KD POLYPEPTIDE (EC 2.7.7.6) (RNA POLYMERASE I SUBUNIT 2) (RPA135).//0//120aa//89%//P70700

[29646] C-NT2RM1000898//&quot; ACTIN, CYTOPLASMIC (ACTIN, MICRONUCLEAR).&quot;//8.9E-26//229aa//29%//P02583

[29647] C-NT2RM1000905//&quot; Homo sapiens HSPCO21 mRNA, complete cds.&quot;//0//480bp//99%//AF077207

[29648] C-NT2RM1000924//HYPOTHETICAL 39.7 KD PROTEIN C34E10.2 IN CHROMOSOME III.//1E-15//266aa//26%//P46577

[29649] C-NT2RM1000927

[29650] C-NT2RM1000962

[29651] C-NT2RM1000978

[29652] C-NT2RM1001003//&quot; Homo sapiens alpha-catenin-like protein (CTNNAL1) mRNA, complete cds.&quot;//0//2230bp//99%//AF030233

[29653] C-NT2RM1001043

[29654] C-NT2RM1001066

[29655] C-NT2RM1001072//&quot; 1-PHOSPHATIDYLINOSITOL-4,5-BISPHOSPHATE PHOSPHODIESTERASE GAMMA 1 (EC 3.1.4.11) (PLC-GAMMA-1) (PHOSPHOLIPASE C-GAMMA-1) (PLC-II) (PLC-148).&quot;//8.3E-47//259aa//35%//P08487

[29656] C-NT2RM1001085//&quot; Rattus norvegicus brain specific cortactin-binding protein CBP90 mRNA, partial cds.&quot;//3.7E-32//460bp//64%//AF053768

[29657] C-NT2RM1001102//&quot; Human HEM45 mRNA, complete cds.&quot;//2.3E-2711482bp//63%//U88964

[29658] C-NT2RM1001105

[29659] C-NT2RM1001139//Homo sapiens mRNA; cDNA DKFZp564F0522 (from clone DKFZp564F0522).//0//756bp//99%//AL049943

[29660] C-NT2RM2000420

[29661] C-NT2RM2000566//&quot; Homo sapiens integrin alpha-7 mRNA, complete cds.&quot;//0//2519bp//96%//AF032108

[29662] C-NT2RM2000609

[29663] C-NT2RM2000612//&quot; Rattus norvegicus ADP-ribosylation factor-directed GTPase activating protein mRNA, complete cds.&quot;//2.6E-106//H 069bp//74%//U35776

[29664] C-NT2RM2000735//ZINC FINGER PROTEIN 43 (ZINC PROTEIN HTF6).//2.9E-103//249aa//73%//P28160

[29665] C-NT2RM2001588

[29666] C-NT2RM2001605//Homo sapiens mRNA for PLU-1 protein.//0//3114bp//99%//AJ132440

[29667] C-NT2RM2001613//&quot; Homo sapiens sec61 homolog mRNA, complete cds.&quot;//0//2601bp//99%//AF084458

[29668] C-NT2RM2001632//KES1 PROTEIN.//1.40E-31//342aa//34%//P35844

[29669] C-NT2RM2001648//&quot; Homo sapiens sec61 homolog mRNA, complete cds.&quot;//0//2421bp//99%//AF084458

[29670] C-NT2RM2001652//&quot; Homo sapiens guanine nucleotide exchange factor mRNA, complete cds.&quot;//0//2608bp//99%//AF1111162

[29671] C-NT2RM2001659//ZINC/CADMIUM RESISTANCE PROTEIN.//3.4E-39//161aa//34%//P20107

[29672] C-NT2RM2001664//&quot; Homo sapiens IkappaB kinase complex associated protein (IKAP) mRNA, complete cds.&quot;//0//2471bp//99%//AF044195

[29673] C-NT2RM2001668//&quot; Homo sapiens putative WHSCI protein (WHSCI) mRNA, alternative splice product ending in intron 11, complete cds.&quot;//6.2E-16//464bp//62%//AF083391

[29674] C-NT2RM2001671//&quot; Oryctolagus cuniculus sarcolemmal associated protein (SLAPI) mRNA, complete cds.&quot;//0/1843bp//94%//U21155

[29675] C-NT2RM2001675

[29676] C-NT2RM2001681

[29677] C-NT2RM2001688//HYPOTHETICAL 33.8 KD PROTEIN C5HI0.01 IN CHROMOSOME I.//4.60E-20//253aa//30%//Q09674

[29678] C-NT2RM2001695//Homo sapiens clone H63 unknown mRNA.//0//2016bp//99%//AF103804

[29679] C-NT2RM2001696

[29680] C-NT2RM2001698//&quot; Homo sapiens XGalT-1 mRNA for galactosyltransferase I, complete cds.&quot;//6.2E-253//1170bp//99%//AB028600

[29681] C-NT2RM2001700//&quot; ACYL-COA DEHYDROGENASE, VERY-LONG-CHAIN SPECIFIC (EC 1.3.99.-) (VLCAD) (FRAGMENT).&quot;//5.7E-130//536aa//49%//P50544

[29682] C-NT2RM2001716

[29683] C-NT2RM2001723

[29684] C-NT2RM2001730//PROBABLE UBIQUITIN CARBOXYL-TERMINAL HYDROLASE K02C4.3 (EC 3.1.2.15) (UBIQUITIN THIOLESTERASE) (UBIQUITIN-SPECIFIC PROCESSING PROTEASE) (DEUBIQUITINATING ENZYME).//7.2E-16//381aa//27%//Q09931

[29685] C-NT2RM2001743//&quot; Homo sapiens cell cycle progression 2 protein (CPR2) mRNA, complete cds.&quot;//0//1498bp//99%//AF011792

[29686] C-NT2RM2001753//HYPOTHETICAL PROTEIN KIAA0210.//8.8E-11//119aa//36%//Q92609

[29687] C-NT2RM2001760//&quot; Homo sapiens sec61 homolog mRNA, complete cds.&quot;//0//2379bp//99%//AF084458

[29688] C-NT2RM2001768

[29689] C-NT2RM2001771//ZINC FINGER PROTEIN 135.//6.4E-154//394aa//64%//P52742

[29690] C-NT2RM2001782//&quot; Homo sapiens GDP-mannose pyrophosphorylase A (GMPPA) mRNA, complete cds.&quot;//0//1470bp//99%//AF135422

[29691] C-NT2RM2001784

[29692] C-NT2RM2001785//Homo sapiens mRNA; cDNA DKFZp586C201 (from clone DKFZp586C201).//0//2146bp//99%//AL050118

[29693] C-NT2RM2001813

[29694] C-NT2RM2001823//CHD I PROTEIN.//1.8E-106//631aa//39%//P32657

[29695] C-NT2RM2001839//&quot; Homo sapiens calumein (Calu) mRNA, complete cds.&quot;//0//2415bp//97%//AF013759

[29696] C-NT2RM2001840

[29697] C-NT2RM2001855

[29698] C-NT2RM2001867//&quot; Homo sapiens mRNA for KIAA0943 protein, partial cds.&quot;//0//967bp//99%//AB023160

[29699] C-NT2RM2001879

[29700] C-NT2RM2001983//&quot; Homo sapiens RGS-GAIP interacting protein GIPC mRNA, complete cds.&quot;//0//1658bp//98%//AF089816

[29701] C-NT2RM2002145//&quot; Homo sapiens erythroblast macrophage protein EMP mRNA, complete cds.&quot;//8.5E-191//1524bp//81%//AF084928

[29702] C-NT2RM4000027

[29703] C-NT2RM4000030//LAS 1 PROTEIN.//5.6E-12//84aa//32%//P36146

[29704] C-NT2RM4000046//GOLIATH PROTEIN (GI PROTEIN).//0.000008//112aa//31%//Q06003

[29705] C-NT2RM4000155//&quot; THREONYL-TRNA SYNTHETASE, CYTOPLASMIC (EC 6.1.1.3) (THREONINE-TRNA LIGASE) (THRRS).&quot;//1.2E-157//321aa//61%//P26639

[29706] C-NT2RM4000156//H. sapiens HPBR11-7 gene.//3.6E-21//785bp//60%//X67336

[29707] C-NT2RM4000167//&quot; Homo sapiens kinesin superfamily motor KIF4 mRNA, complete cds.&quot;//0//1946bp//99%//AF071592

[29708] C-NT2RM4000199

[29709] C-NT2RM4000200

[29710] C-NT2RM4000202//ZINC FINGER PROTEIN MOK-2 (HOK-2).//4.9E-32//170aa//41%//Q16600

[29711] C-NT2RM4000233//&quot; Mus musculus semaphorin VIa mRNA, complete cds.&quot;//3.4E-231//395bp//86%//AF030430

[29712] C-NT2RM4000244

[29713] C-NT2RM4000251

[29714] C-NT2RM4000265

[29715] C-NT2RM4000324

[29716] C-NT2RM4000327

[29717] C-NT2RM4000356//RAS-RELATED PROTEIN RAB-17.//5.9E-80//213aa//75%//P35292

[29718] C-NT2RM4000425

[29719] C-NT2RM4000433//&quot; Mus musculus retinoic acid-responsive protein (Stra6) mRNA, complete cds.&quot;//4.1E-271 //2085bp//77%//AF062476

[29720] C-NT2RM4000514

[29721] C-NT2RM4000531I/ZINC FINGER PROTEIN 29 (ZFP-29).112.4E-89//389aa//43%//Q07230

[29722] C-NT2RM4000532

[29723] C-NT2RM4000534

[29724] C-NT2RM4000603

[29725] C-NT2RM4000611//VEGETATIBLE INCOMPATIBILITY PROTEIN HET-E-1.//2.9E-09//108aa//31%//Q00808

[29726] C-NT2RM4000616//ACETYL-COENZYME A SYNTHETASE (EC 6.2.1.1) (ACETATE-COA LIGASE) (ACYL- ACTIVATING ENZYME).//2.7E-146//420aa//60%//P27550

[29727] C-NT2RM4000674//HYPOTHETICAL SYMPORTER SLL1374.//1.2E-28//80aa//30%//P74168

[29728] C-NT2RM4000689

[29729] C-NT2RM4000698

[29730] C-NT2RM4000700

[29731] C-NT2RM4000712//&quot; Homo sapiens ubiquitin hydrolyzing enzyme I (UBH1) mRNA, partial cds.&quot;//1E-136//104bp//77%//AF022789

[29732] C-NT2RM4000717

[29733] C-NT2RM4000733//TRANSCRIPTION TERMINATION FACTOR RHO.//0.00000041//207aa//29%//P52154

[29734] C-NT2RM4000734//&quot; Homo sapiens mRNA for KIAA0760 protein, partial cds.&quot;//0//2273bp//99%//AB018303

[29735] C-NT2RM4000741//&quot; Homo sapiens hSGT1 mRNA for hSgt1p, complete cds.&quot;//0//2184bp//99%//D88208

[29736] C-NT2RM4000751//ZINC FINGER PROTEIN 184 (FRAGMENT).//3.9E-125//301aa//53%//Q99676

[29737] C-NT2RM4000764

[29738] C-NT2RM4000778

[29739] C-NT2RM4000787

[29740] C-NT2RM4000790

[29741] C-NT2RM4000795//&quot; Homo sapiens mRNA for KIAA0951 protein, complete cds.&quot;/10//1847bp//96%//AB023168

[29742] C-NT2RM4000796

[29743] C-NT2RM4000798//&quot; Homo sapiens brefeldin A-inhibited guanine nucleotide-exchange protein 2 mRNA, complete cds.&quot;//0//2603bp//99%//AF084521

[29744] C-NT2RM4000813

[29745] C-NT2RM4000820//VACUOLAR ATP SYNTHASE SUBUNIT AC45 PRECURSOR (EC 3.6.1.34) (V-ATPASE AC45 SUBUNIT).//1.10E-24//138aa//44%//P40682

[29746] C-NT2RM4000833

[29747] C-NT2RM4000848

[29748] C-NT2RM4000852

[29749] C-NT2RM4000855

[29750] C-NT2RM4000887

[29751] C-NT2RM4000895

[29752] C-NT2RM4000950

[29753] C-NT2RM4000979

[29754] C-NT2RM4001002//Homo sapiens mRNA; cDNA DKFZp586GO518 (from clone DKFZp586GO518).110112259bp//100%//AL050092

[29755] C-NT2RM4001032

[29756] C-NT2RM4001047//MO25 PROTEIN.//8E-140/333aa//80%//Q06138

[29757] C-NT2RM4001054//&quot; Homo sapiens sec61 homolog mRNA, complete cds.&quot;//3.1E-190/1315bp//81%//AF077032

[29758] C-NT2RM4001084//HYPOTHETICAL 105.6 KD PROTEIN C16C9.06C IN CHROMOSOME I.//0.000000032//65aa//33%//Q09820

[29759] C-NT2RM4001116//HYPOTHETICAL 216.3 KD PROTEIN R06F6.8 IN CHROMOSOME II.//5.9E-86//292aa//48%//Q09417

[29760] C-NT2RM4001140//HOMEOBOX PROTEIN MSH-D.//1E-11//103aa//38%//Q01704

[29761] C-NT2RM4001151

[29762] C-NT2RM4001155//ADRENAL MEDULLA 50 KD PROTEIN.//4.1E-197//445aa//78%//Q27969

[29763] C-NT2RM4001160

[29764] C-NT2RM4001187

[29765] C-NT2RM4001191//&quot; Homo sapiens clone 24963 mRNA sequence, complete cds.&quot;//0//1950bp//99%//AF131737

[29766] C-NT2RM4001200//ZINC FINGER PROTEIN 135.//9.5E-135//375aa//60%//P52742

[29767] C-NT2RM4001203//&quot; Homo sapiens mRNA for KIAA0839 protein, partial cds.&quot;//0//3047bp//99%//AB020646

[29768] C-NT2RM4001204//&quot; Homo sapiens mRNA for KIAA1089 protein, partial cds.&quot;//0//2349bp//99%//AB029012

[29769] C-NT2RM4001217//&quot; Homo sapiens nuclear matrix protein NRP/B (NRPB) mRNA, complete cds.&quot;//7.3E-148//409bp//72%//AF059611

[29770] C-NT2RM4001256//&quot; Xenopus laevis putative Zic3 binding protein mRNA, complete cds.&quot;//4.30E-55//289bp//77%//AF129131

[29771] C-NT2RM4001258

[29772] C-NT2RM4001309

[29773] C-NT2RM4001313//PHOSPHATIDYLINOSITOL 3-KINASE VPS34-LIKE (EC 2.7.1.137) (PI3-KINASE) (PTDINS-3-KINASE) (PI3K).//3.50E-35//124aa//65%//P54676

[29774] C-NT2RM4001316//&quot; ACYL-COA DEHYDROGENASE, MEDIUM-CHAIN SPECIFIC PRECURSOR (EC 1.3.99.3) (MCAD).&quot;//2.3E-31/334aa//30%//P08503

[29775] C-NT2RM4001320//&quot; Homo sapiens mRNA for Neuroblastoma, complete cds.&quot;//1.8E-39//728bp//64%//D89016

[29776] C-NT2RM4001340//UTR4 PROTEIN (UNKNOWN TRANSCRIPT 4 PROTEIN).//1E-28//171aa//37%//P32626

[29777] C-NT2RM4001344//HYPOTHETICAL GTP-BINDING PROTEIN IN POP2-HOL1 INTERGENIC REGION.//8.1E-30//265aa//33%//P53742

[29778] C-NT2RM4001347//&quot; Homo sapiens NY-REN-25 antigen mRNA, partial cds.&quot;//0//2300bp//99%//AF155103

[29779] C-NT2RM4001371//&quot; Homo sapiens IDN3 mRNA, partial cds.&quot;//0//2524bp//99%//AB019494

[29780] C-NT2RM4001382//&quot; Homo sapiens RanBP7/importin 7 mRNA, complete cds.&quot;//2.2E-237//1079bp//99%//AF098799

[29781] C-NT2RM4001384

[29782] C-NT2RM4001410

[29783] C-NT2RM4001411//&quot; Mus musculus Pro-rich, PH, SH2 domain-containing signaling mediator (PSM) mRNA, complete cds.&quot;//0//1962bp//87%//AF020526

[29784] C-NT2RM4001412//&quot; Homo sapiens nGAP mRNA, complete cds.&quot;//0//1918bp//99%//AF047711

[29785] C-NT2RM4001414

[29786] C-NT2RM4001437

[29787] C-NT2RM4001444//ISOLEUCYL-TRNA SYNTHETASE (EC 6.1.1.5) (ISOLEUCINE-TRNA LIGASE) (ILERS).//1.4E-118//444aa//46%//P73505

[29788] C-NT2RM4001454

[29789] C-NT2RM4001455

[29790] C-NT2RM4001483//ZINC FINGER PROTEIN 136.//5.1E-106//357aa//55%//P52737

[29791] C-NT2RM4001489//&quot; Homo sapiens mRNA for KIAA0685 protein, complete cds.&quot;//0//10810bp//99%//AB014585

[29792] C-NT2RM4001522

[29793] C-NT2RM4001557//&quot; Homo sapiens mRNA for KIAA1040 protein, partial cds.&quot;//0//1547bp//97%//AB028963

[29794] C-NT2RM4001565

[29795] C-NT2RM4001566//&quot; Homo sapiens mRNA for KIAA1114 protein, complete cds.&quot;//0//1900bp//99%//AB029037

[29796] C-NT2RM4001582//&quot; Mus musculus COP9 complex subunit 7b (COPS7b) mRNA, complete cds.&quot;//1.5E-284//1082bp//90%//AF071317

[29797] C-NT2RM4001592//&quot; Homo sapiens mRNA for KIAA1122 protein, partial cds.&quot;//0//2170bp//99%//AB032948

[29798] C-NT2RM4001594

[29799] C-NT2RM4001597//M. musculus red-1 gene.//2.1E-171//1414bp//78%//X92750

[29800] C-NT2RM4001611//SIS2 PROTEIN (HALOTOLERANCE PROTEIN HAL3).//2.6E-32//203aa//39%//Q12600

[29801] C-NT2RM4001629//&quot; MAGUK P55 SUBFAMILY MEMBER 3 (MPP3 PROTEIN) (DISCS, LARGE HOMOLOG 3).&quot;//1.5E-93//278aa//38%//Q13368

[29802] C-NT2RM4001650

[29803] C-NT2RM4001662

[29804] C-NT2RM4001666//HYPOTHETICAL 48.6 KD PROTEIN IN ALPA-GABP INTERGENIC REGION.//2.7E-84//410aa//42%//P37339

[29805] C-NT2RM4001682

[29806] C-NT2RM4001710

[29807] C-NT2RM4001714//SEPTIN 2 HOMOLOG (FRAGMENT).//8.9E-141//354aa//72%//Q14141

[29808] C-NT2RM4001715

[29809] C-NT2RM4001731//&quot; Homo sapiens mRNA for KIAA1004 protein, partial cds.&quot;//0//922bp//100%//AB023221

[29810] C-NT2RM4001746

[29811] C-NT2RM4001754

[29812] C-NT2RM4001758//PUTATWE SERINE/THREONINE-PROTEIN KINASE EMK (EC 2.7.1.-).14.1E-186//639aa//58%//Q05512

[29813] C-NT2RM4001783//ZINC FINGER PROTEIN HRX (ALL-1).//7.9E-66//311aa//35%//Q03164

[29814] C-NT2RM4001810//&quot; Homo sapiens mRNA for KIAA0863 protein, complete cds.&quot;//0//2377bp//99%//AB020670

[29815] C-NT2RM4001813//LECTIN BRA-2.//0.00000048//114aa//30%//P17346

[29816] C-NT2RM4001823//ZINC FINGER PROTEIN 43 (ZINC PROTEIN HTF6).//2.9E-55//325aa//37%//P28160

[29817] C-NT2RM4001828//ZINC FINGER PROTEIN 84 (ZINC FINGER PROTEIN HPF2).//5.9E-161//481aa//56%//P51523

[29818] C-NT2RM4001836

[29819] C-NT2RM4001841//&quot; Homo sapiens mRNA for KIAA0920 protein, complete cds.&quot;//0//1861bp//98%//AB023137

[29820] C-NT2RM4001842

[29821] C-NT2RM4001856

[29822] C-NT2RM4001858//T-BOX CONTAINING PROTEIN TBX6L (FRAGMENT).//6.5E-22//26aa//46%//P79779

[29823] C-NT2RM4001865//Homo sapiens mRNA for atopy related autoantigen CALC.//4.3E-244//1248bp//94%//Y17711

[29824] C-NT2RM4001876//RAS SUPPRESSOR PROTEIN 1 (RSU-1) (RSP-1 PROTEIN) (RSP-1).//6.5E-23//84aa//36%//Q15404

[29825] C-NT2RM4001880//PUTATIVE DNA HELICASE II HOMOLOG (EC 3.6.1.-).//5.9E-09//268aa//26%//P47486

[29826] C-NT2RM4001922//&quot; Homo sapiens mRNA for KIAA0957 protein, complete cds.&quot;//0//2165bp//99%//AB023174

[29827] C-NT2RM4001930//&quot; Homo sapiens dolichyl-P-Glc:Man9GlcNAc2-PP-dolichyl glucosyltransferase (ALG6) mRNA, complete cds.&quot;//0//1930bp//99%//AF102851

[29828] C-NT2RM4001940//&quot; Homo sapiens timeless homolog mRNA, complete cds.&quot;//0//2087bp//99%//AF098162

[29829] C-NT2RM4001953

[29830] C-NT2RM4001965

[29831] C-NT2RM4001969//R. norvegicus mRNA for IP63 protein.//2.6E-2611//563bp//84%//X99330

[29832] C-NT2RM4001979//ZINC FINGER PROTEIN 84 (ZINC FINGER PROTEIN HPF2).//1.8E-112//457aa//47%//P51523

[29833] C-NT2RM4001984

[29834] C-NT2RM4001987//&quot; NEURAL CELL ADHESION MOLECULE 1, LARGE ISOFORM PRECURSOR (N-CAM 180) [CONTAINS: N-CAM 140].&quot;//3.2E-17//281aa//30%//P16170

[29835] C-NT2RM4002013//HYPOTHETICAL 89.4 KD TRP-ASP REPEATS CONTAINING PROTEIN IN PMT6-PCT I NTERGENIC REGION.//6.9E-94//589aa//35%//P42935

[29836] C-NT2RM4002018

[29837] C-NT2RM4002034//&quot; Homo sapiens hiwi mRNA, partial cds.&quot;//1.9E-53//585bp//60%//AF104260

[29838] C-NT2RM4002044

[29839] C-NT2RM4002054

[29840] C-NT2RM4002063//&quot; Oryctolagus cuniculus sarcosine oxidase (SOX) mRNA, complete cds.&quot;//0//1865bp//99%//U82267

[29841] C-NT2RM4002066//&quot; Homo sapiens thyroid hormone receptor-associated protein complex component TRAP230 mRNA, complete cds.&quot;//1.50E-211//1123bp//71%//AF117755

[29842] C-NT2RM4002075//RING CANAL PROTEIN (KELCH PROTEIN).//2.8E-105//556aa//41%//Q04652

[29843] C-NT2RM4002128

[29844] C-NT2RM4002140

[29845] C-NT2RM4002145//SLIT PROTEIN PRECURSOR.//1.40E-09//127aa//33%//P24014

[29846] C-NT2RM4002161//&quot; Homo sapiens laforin (EPM2A) mRNA, complete cds.&quot;//0//2671bp//99%//AF084535

[29847] C-NT2RM4002174//MRP PROTEIN.//9.1E-68//264aa//51%//P21590

[29848] C-NT2RM4002189//&quot; GLUCOAMYLASE S1/S2 PRECURSOR (EC 3.2.1.3) (GLUCAN 1,4-ALPHA- GLUCOSIDASE) (1,4-ALPHA-D-GLUCAN GLUCOHYDROLASE).&quot;//6.2E-33//688aa//27%//P08640

[29849] C-NT2RM4002205//&quot; ELONGATION FACTOR G, MITOCHONDRIAL PRECURSOR (MEF-G).&quot;//3E-37//122aa//72%//Q07803

[29850] C-NT2RM4002213//&quot; Homo sapiens protein phosphatase methylesterase-1 (PME-1) mRNA, complete cds.&quot;//0//2452bp//100%//AF157028

[29851] C-NT2RM4002226//GTPASE ACTIVATING PROTEIN ROTUND.//3.7E-19//47aa//41%//P40809

[29852] C-NT2RM4002251//&quot; ALPHA-1,3-MANNOSYL-GLYCOPROTEIN BETA-1,2-N-ACETYLGLUCOSAMINYLTRANSFERASE (EC 2.4.1.101) (N-GLYCOSYL-OLIGOSACCHARIDE-GLYCOPROTEIN N-ACETYLGLUCOSAMINYLTRANSFERASE I) (GNT-1) (GLCNAC-T1).&quot;//2.2E-36//320aa//38%//P27808

[29853] C-NT2RM4002256

[29854] C-NT2RM4002266

[29855] C-NT2RM4002281

[29856] C-NT2RM4002287

[29857] C-NT2RM4002294

[29858] C-NT2RM4002301

[29859] C-NT2RM4002323//ANTIGEN GOR (FRAGMENT).//0.000000001//54aa//33%//P48778

[29860] C-NT2RM4002339

[29861] C-NT2RM4002344

[29862] C-NT2RM4002373//&quot; Homo sapiens mRNA for KIAA0649 protein, complete cds.&quot;//0//2666bp//99%//AB014549

[29863] C-NT2RM4002374

[29864] C-NT2RM4002383

[29865] C-NT2RM4002409//ACETYL-COENZYME A SYNTHETASE (EC 6.2.1.1) (ACETATE-COA LIGASE) (ACYL- ACTIVATING ENZYME).//1.3E-29//275aa//30%//P27095

[29866] C-NT2RM4002438//&quot; Xenopus laevis putative Zic3 binding protein mRNA, complete cds.&quot;//1.1E-49//61bp//70%//AF129131

[29867] C-NT2RM4002446

[29868] C-NT2RM4002452

[29869] C-NT2RM4002457

[29870] C-NT2RM4002460//&quot; ENV POLYPROTEIN (COAT POLYPROTEIN) [CONTAINS: COAT PROTEINS GP70, GP20].&quot;//0.0000016//226aa//24%//P51515

[29871] C-NT2RM4002493

[29872] C-NT2RM4002527//VEGETATIBLE INCOMPATIBILITY PROTEIN HET-E-1.//8.9E-15//366aa//27%//Q00808

[29873] C-NT2RM4002532//PROTEIN HOM1.//2E-16//276aa//28%//P55137

[29874] C-NT2RM4002558//&quot; Homo sapiens fatty acid transport protein (FATP) mRNA, complete cds.&quot;//0//1797bp//99%//AF055899

[29875] C-NT2RM4002567

[29876] C-NT2RM4002593

[29877] C-NT2RM4002594//MSP1 PROTEIN HOMOLOG.//2.7E-68//236aa//58%//P54815

[29878] C-NT2RM4002623//ASPARTYL-TRNA SYNTHETASE (EC 6.1.1.12) (ASPARTATE-TRNA LIGASE) (ASPRS).//2.3E-101//488aa//45%//O32038

[29879] C-NT2RP1000324

[29880] C-NT2RP1000363//&quot; Homo sapiens mRNA for KIAA0638 protein, partial cds.&quot;//0//1345bp//99%//AB014538

[29881] C-NT2RP1000418

[29882] C-NT2RP1000513//&quot; Human NifU-like protein (hNifU) mRNA, partial cds.&quot;//6.50E-171//516bp//99%//U47101

[29883] C-NT2RP1000721

[29884] C-NT2RP1000730

[29885] C-NT2RP1000767

[29886] C-NT2RP1000836

[29887] C-NT2RP1000902//HYPOTHETICAL 127.4 KD PROTEIN F07F6.4 IN CHROMOSOME III.//5.2E-20//306aa//33%//Q09531

[29888] C-NT2RP1000943

[29889] C-NT2RP1001033//&quot; Homo sapiens delta-tubulin mRNA, complete cds.&quot;//2.10E-285//1290bp//100%//AF201333

[29890] C-NT2RP1001073//&quot; Homo sapiens U6 snRNA-associated Sm-like protein LSmS mRNA, complete cds.&quot;//8 .1E-1071/504bp//99%//AF182291

[29891] C-NT2RP1001199

[29892] C-NT2RP1001248

[29893] C-NT2RP1001253//&quot; Homo sapiens oscillin (hLn) mRNA, complete cds.&quot;//0//2020bp//99%//AF029914

[29894] C-NT2RP1001286

[29895] C-NT2RP1001294//MICROTUBULE-ASSOCIATED PROTEIN YTM 1.//1.80E-38//258aa//32%//Q12024

[29896] C-NT2RP1001302//MICROTUBULE-ASSOCIATED PROTEIN YTM1.//1.80E-38//258aa//32%//Q12024

[29897] C-NT2RP1001310//&quot; Homo sapiens mitochondrial carrier homolog 1 isoform a mRNA, partial cds; nuclear gene for mitochondrial product.&quot;//0//1732bp//99%//AF176006

[29898] C-NT2RP1001361//&quot; Homo sapiens NADH-ubiquinone oxidoreductase subunit B 14.5B homolog mRNA, complete cds.&quot;//6.5E-116/541bp//100%//AF070652

[29899] C-NT2RP1001385//HYPOTHETICAL 48.8 KD PROTEIN IN SSU81-SCS2 INTERGENIC REGION.//2.7E-22//284aa//25%//P40074

[29900] C-NT2RP1001432

[29901] C-NT2RP2000040//&quot; Homo sapiens mRNA for KIAA0747 protein, partial cds.&quot;//0//2648bp//99%//AB018290

[29902] C-NT2RP2000076//Homo sapiens partial mRNA for polyhomeotic 2 protein (PH2 gene).//7.9E-20//265bp//73%//AJ242730

[29903] C-NT2RP2000098

[29904] C-NT2RP2000108

[29905] C-NT2RP2000257//PUTATIVE MITOCHONDRIAL CARRIER YIL006W.//9.7E-41//278aa//36%//P40556

[29906] C-NT2RP2000258//ACTIVATOR 1140 KD SUBUNIT (REPLICATION FACTOR C LARGE SUBUNIT) (Al 140 KD SUBUNIT) (RF-C 140 KD SUBUNIT) (ACTIVATOR 1 LARGE SUBUNIT) (DNA-BINDING PROTEIN PO-GA).//7.1E-12//213aa//23%//P35251

[29907] C-NT2RP2000289

[29908] C-NT2RP2000327

[29909] C-NT2RP2000337

[29910] C-NT2RP2000420//ZINC FINGER PROTEIN 165.//8.5E-33//155aa//52%//P49910

[29911] C-NT2RP2000459

[29912] C-NT2RP2000498

[29913] C-NT2RP2000758

[29914] C-NT2RP2001137

[29915] C-NT2RP2001149

[29916] C-NT2RP2001168//VERPROLIN.//1.5E-09//143aa//33%//P37370

[29917] C-NT2RP2001173//&quot; Homo sapiens mRNA for KIAA0480 protein, complete cds.&quot;//0//1780bp//99%//AB007949

[29918] C-NT2RP2001174//GASTRULA ZINC FINGER PROTEIN XLCGF46.1 (FRAGMENT).//6E-10//88aa//38%//P18722

[29919] C-NT2RP2001196

[29920] C-NT2RP2001226

[29921] C-NT2RP2001268//&quot; Homo sapiens mRNA for KIAA0810 protein, partial cds.&quot;//0//3301bp//98%//AB018353

[29922] C-NT2RP2001290//BETA-SOLUBLE NSF ATTACHMENT PROTEIN (SNAP-BETA) (SNAP-ALPHA HOMOLOG) (BRAIN PROTEIN 147) (FRAGMENT).//4.4E-91//179aa//99%//P28663

[29923] C-NT2RP2001295//ZINC/CADMIUM RESISTANCE PROTEIN.//8.3E-39//161aa//34%//P20107

[29924] C-NT2RP2001312

[29925] C-NT2RP2001327//&quot; TUMOR NECROSIS FACTOR, ALPHA-INDUCED PROTEIN 1, ENDOTHELIAL (B12 PROTEIN).&quot;//5.5E-116//311aa//71%//Q13829

[29926] C-NT2RP2001328

[29927] C-NT2RP2001366

[29928] C-NT2RP2001378//MUCIN 2 PRECURSOR (INTESTINAL MUCIN 2).//2E-11//403aa//25%//Q02817

[29929] C-NT2RP2001392//MITOCHONDRIAL LON PROTEASE HOMOLOG I PRECURSOR (EC 3.4.21.-).//8.4E-192//581aa//54%//P93647

[29930] C-NT2RP2001394//Homo sapiens mRNA for SCML2 protein.//0//2068bp//99%//Y18004

[29931] C-NT2RP2001420//&quot; Mus musculus nuclear protein NIP45 mRNA, complete cds.&quot;//9E-11211742bp//82%//U76759

[29932] C-NT2RP2001450

[29933] C-NT2RP2001467

[29934] C-NT2RP2001506

[29935] C-NT2RP2001511//&quot; Homo sapiens putative RNA-binding protein Q99 mRNA, complete cds.&quot;//3.2E-297//2206bp//75%//AF093097

[29936] C-NT2RP2001520//Homo sapiens mRNA for mitochondrial carrier protein ARALAR1.//0//2502bp//99%//Y14494

[29937] C-NT2RP2001536//&quot; Homo sapiens X-ray repair cross-complementing protein 3 (XRCC3) mRNA, complete cds.&quot;//0//2326bp//99%//AF035586

[29938] C-NT2RP2001560//VAV2 PROTEIN.//0.00000015/219aa//27%//Q60992

[29939] C-NT2RP2001576//HYPOTHETICAL 62.2 KD PROTEIN C4G8.12C IN CHROMOSOME I.//8.2E-29//294aa//31%//Q09837

[29940] C-NT2RP2001581

[29941] C-NT2RP2001597//&quot; RYANODINE RECEPTOR, CARDIAC MUSCLE.&quot;//0.000000036//27aa//36%//P30957

[29942] C-NT2RP2001628

[29943] C-NT2RP2001663//ENOLASE (EC 4.2.1.11) (2-PHOSPHOGLYCERATE DEHYDRATASE) (2-PHOSPHO-D- GLYCERATE HYDRO-LYASE) (FRAGMENT).//11.1E-47//126aa//53%//P42897

[29944] C-NT2RP2001748//FARNESYL PYROPHOSPHATE SYNTHETASE (FPP SYNTHETASE) (FPS) (FARNESYL DIPHOSPHATE SYNTHETASE) (DIMETHYLALLYLTRANSFERASE (EC 2.5.1.1)/GERANYLTRANSTRANSFERASE (EC 2.5.1.10)) (KIAA0032).//5.40E-47//96aa//97%//P14324

[29945] C-NT2RP2001813

[29946] C-NT2RP2001883//&quot; Homo sapiens CGI-01 protein mRNA, complete cds.&quot;//0//2306bp//99%//AF132936

[29947] C-NT2RP2001900//ACTIN-LIKE PROTEIN ARP5.//2.3E-38//395aa//30%//P53946

[29948] C-NT2RP2001947

[29949] C-NT2RP2001985//&quot; Homo sapiens high-risk human papilloma viruses E6 oncoproteins targeted protein E6TP1 alpha mRNA, complete cds.&quot;//2.00E-38//435bp//67%//AF090989

[29950] C-NT2RP2001991//SODIUM- AND CHLORIDE-DEPENDENT TRANSPORTER NTT73.//6.5E-129//279aa//85%//Q08469

[29951] C-NT2RP2002025//NG-CAM RELATED CELL ADHESION MOLECULE PRECURSOR (NR-CAM) (BRAVO).//H1.7E-47//247aa//52%//P35331

[29952] C-NT2RP2002058//&quot; Homo sapiens WD repeat protein WDR3 (WDR3) mRNA, complete cds.&quot;//0//2510bp//99%//AF083217

[29953] C-NT2RP2002076//Homo sapiens clone 24804 mRNA sequence.//1.5E-294//334bp//99%//AF052183

[29954] C-NT2RP2002078//PECANEX PROTEIN.//1.8E-09//195aa//32%//P18490

[29955] C-NT2RP2002079//&quot; HISTONE HI, GONADAL.&quot;//4.4E-11/214aa//34%//P02256

[29956] C-NT2RP2002099//Homo sapiens mRNA for El B-SSkDa-associated protein.//0//3389bp//990%//AJ007509

[29957] C-NT2RP2002185//&quot; Homo sapiens ubiquilin mRNA, complete cds.&quot;//0//1789bp//99%//AF176069

[29958] C-NT2RP2002193//&quot; Homo sapiens PIAS3 mRNA for protein inhibitor of activated STAT3, complete cds.&quot;//0//2809bp//99%//AB021868

[29959] C-NT2RP2002231

[29960] C-NT2RP2002235

[29961] C-NT2RP2002252//&quot; Mus musculus (clone pVZmSin3A9) mSin3A9 mRNA, complete cds.&quot;//0//3118bp//91%//L38621

[29962] C-NT2RP2002292

[29963] C-NT2RP2002408

[29964] C-NT2RP2002442//HESA PROTEIN.//2.8E-14//163aa//30%//P46037

[29965] C-NT2RP2002464//DNA CROSS-LINK REPAIR PROTEIN PS02//NM1.//6.50E-07//171aa//27%//P30620

[29966] C-NT2RP2002498

[29967] C-NT2RP2002503//ZINC FINGER PROTEIN 45 (BRC 1744).//4.6E-144//537aa//49%//Q02386

[29968] C-NT2RP2002520//&quot; Homo sapiens transcription factor RFX-B (RFXB) mRNA, complete cds.&quot;//3 .70E-34//668bp//61%//AF105427

[29969] C-NT2RP2002549

[29970] C-NT2RP2002609//2-HYDROXYMUCONIC SEMIALDEHYDE HYDROLASE (EC 3.1.1.-) (HMSH).//2.80E-08//109aa//37%//P19076

[29971] C-NT2RP2002706

[29972] C-NT2RP2002710//SH3-BINDING PROTEIN 3BP-1 .114.9E-85//489aa//43%//P55194

[29973] C-NT2RP2002800

[29974] C-NT2RP2002880//GLUCOSE REPRESSION MEDIATOR PROTEIN.//0.000039//206aa//23%//P14922

[29975] C-NT2RP2002891

[29976] C-NT2RP2002929//HYPOTHETICAL 46.2 KD TRP-ASP REPEATS CONTAINING PROTEIN D2013.2 IN CHROMOSOME II.//4.1E-87//395aa//40%//Q18964

[29977] C-NT2RP2002939//ZINC FINGER PROTEIN 136.//5.4E-70//282aa//42%//P52737

[29978] C-NT2RP2002993//DNA-DIRECTED RNA POLYMERASE 1135 KD POLYPEPTIDE (EC 2.7.7.6) (RNA POLYMERASE I SUBUNIT 2) (RPA135).//0//716aa//91%//P70700

[29979] C-NT2RP2003034

[29980] C-NT2RP2003099

[29981] C-NT2RP2003137//UBIQUITIN.//0.000026//70aa//30%//P13117

[29982] C-NT2RP2003157//&quot; Homo sapiens CGI-74 protein mRNA, complete cds.&quot;//0//2037bp//99%//AF151832

[29983] C-NT2RP2003158//&quot; Homo sapiens mRNA for proteasome subunit p58, complete cds.&quot;//0//2091bp//99%//D67025

[29984] C-NT2RP2003165

[29985] C-NT2RP2003243//Homo sapiens partial mRNA for putative p621 protein which interacts with transcription factor Sp1/0//1544bp//99%//AJ242978

[29986] C-NT2RP2003277//&quot; Homo sapiens mRNA for KIAA0625 protein, partial cds.&quot;//0//3788bp//99%//AB014525

[29987] C-NT2RP2003286//PROBABLE RNA 3′-TERMINAL PHOSPHATE CYCLASE (EC 6.5.1.4) (RNA-3′- PHOSPHATE CYCLASE) (RNA CYCLASE).I/4.1E-88//374aa//47%//Q23400

[29988] C-NT2RP2003297

[29989] C-NT2RP2003307//KINESIN LIGHT CHAIN (KLC).//2.2E-199//550aa//70%//Q07866

[29990] C-NT2RP2003308//CROOKED NECK PROTEIN.//5.4E-244//622aa//67%//P17886

[29991] C-NT2RP2003347//BREAST CANCER TYPE 1 SUSCEPTIBILITY PROTEIN HOMOLOG.//0.000022//261aa//24%//P48754

[29992] C-NT2RP2003391//Homo sapiens mRNA for nuclear transport receptor.//0//1509bp//99%//AJ133769

[29993] C-NT2RP2003393

[29994] C-NT2RP2003445

[29995] C-NT2RP2003466//&quot; Homo sapiens delta-6 fatty acid desaturase mRNA, complete cds.&quot;//0//2194bp//99%//AF126799

[29996] C-NT2RP2003480//&quot; Homo sapiens zinc finger DNA binding protein 99 (ZNF281) mRNA, complete cds.&quot;//0//3012bp//99%//AF125158

[29997] C-NT2RP2003506//NADPH-CYTOCHROME P450 REDUCTASE (EC 1.6.2.4) (CPR).//5.4E-14//106aa//46%//P04175

[29998] C-NT2RP2003511

[29999] C-NT2RP2003513//&quot; Human mRNA for KIAA0270 gene, partial cds.&quot;//0//2137bp//97%//D87460

[30000] C-NT2RP2003567//&quot; Homo sapiens mRNA for KIAA0462 protein, partial cds.&quot;//0//2343bp//99%//AB007931

[30001] C-NT2RP2003604//&quot; Homo sapiens alpha-catenin-like protein (CTNNAL1) mRNA, complete cds.&quot;//0//2442bp//990%//AF030233

[30002] C-NT2RP2003691

[30003] C-NT2RP2003713//&quot; Homo sapiens ubiquitin-specific protease 3 (USP3) mRNA, complete cds.&quot;//0//2018bp//99%//AF073344

[30004] C-NT2RP2003760//COATOMER GAMMA SUBUNIT (GAMMA-COAT PROTEIN) (GAMMA-COP).//0//869aa//80%//P53620

[30005] C-NT2RP2003764

[30006] C-NT2RP2003769

[30007] C-NT2RP2003777

[30008] C-NT2RP2003840//HYPOTHETICAL 48.1 KD PROTEIN B0403.2 IN CHROMOSOME X.113.7E-21//137aa//43%//Q11076

[30009] C-NT2RP2003857//MYOTROPHIN (V-1 PROTEIN) (GRANULE CELL DIFFERENTIATION PROTEIN).//0.00000016//17aa//29%//Q91955

[30010] C-NT2RP2003981//&quot; Homo sapiens mRNA for KIAA0804 protein, partial cds.&quot;//0//3046bp//99%//AB018347

[30011] C-NT2RP2003984//Homo sapiens mRNA; cDNA DKFZp564A026 (from clone DKFZp564AO26).//0//2514bp/199%//AL050367

[30012] C-NT2RP2004041 I/SYNAPSINS IA AND IB.//0.00000074//159aa//32%//P17599

[30013] C-NT2RP2004066//&quot; Human DNA sequence from clone 134019 on chromosome 1p36.11-36.33, complete sequence.&quot;//0//2410bp//99%//AL034555

[30014] C-NT2RP2004081

[30015] C-NT2RP2004124

[30016] C-NT2RP2004152

[30017] C-NT2RP2004165

[30018] C-NT2RP2004187//ZINC FINGER PROTEIN 38 (ZFP-38) (CTFIN51) (TRANSCRIPTION FACTOR RU49).//5.6E-31//424aa//28%//Q07231

[30019] C-NT2RP2004239//&quot; Homo sapiens lok mRNA for protein kinase, complete cds.&quot;//0//3044bp//99%//AB015718

[30020] C-NT2RP2004245

[30021] C-NT2RP2004364

[30022] C-NT2RP2004365

[30023] C-NT2RP2004366//&quot; Homo sapiens mRNA for KIAA0986 protein, partial cds.&quot;//0//2790bp//97%//AB023203

[30024] C-NT2RP2004373

[30025] C-NT2RP2004476//&quot; Homo sapiens cyclin L ania-6a mRNA, complete cds.&quot;//0//2075bp//99%//AF180920

[30026] C-NT2RP2004551

[30027] C-NT2RP2004568//PUTATIVE ATP-DEPENDENT RNA HELICASE C30D11.03.//3E-117//625aa//40%//Q09903

[30028] C-NT2RP2004600

[30029] C-NT2RP2004664//&quot; Homo sapiens mRNA for KIAA0460 protein, partial cds.&quot;//0//2368bp//99%//AB007929

[30030] C-NT2RP2004743

[30031] C-NT2RP2004768//SERINE/THREONINE-PROTEIN KINASE NRK1 (EC 2.7.1.-) (N-RICH KINASE 1).//1.3E-26//190aa//41%//P38692

[30032] C-NT2RP2004816//&quot; Homo sapiens H beta 58 homolog mRNA, complete cds.&quot;//0//2144bp//96%//AF054179

[30033] C-NT2RP2004861

[30034] C-NT2RP2004897

[30035] C-NT2RP2004933//&quot; Homo sapiens mRNA for ZIP-kinase, complete cds.&quot;//0//2103bp//99%//AB007144

[30036] C-NT2RP2004978//ACTIN-LIKE PROTEIN ARP8.//3.3E-47//353aa//30%//Q12386

[30037] C-NT2RP2005038//DNA NUCLEOTIDYLEXOTRANSFERASE (EC 2.7.7.31) (TERMINAL ADDITION ENZYME) (TERMINAL DEOXYNUCLEOTIDYLTRANSFERASE) (TERMINAL TRANSFERASE).//4E-91//218aa//44%//Q92089

[30038] C-NT2RP2005162//&quot; Homo sapiens aspartyl aminopeptidase mRNA, complete cds.&quot;//0//161 Sbp//99%//AF005050

[30039] C-NT2RP2005204//&quot; Homo sapiens SUMO-1-activating enzyme El N subunit (SUA 1) mRNA, complete cds.&quot;//0//1262bp//99%//AF090385

[30040] C-NT2RP2005227

[30041] C-NT2RP2005287

[30042] C-NT2RP2005288//&quot; Homo sapiens RCCl-like G exchanging factor RLG mRNA, complete cds.&quot;//0//2992bp//99%//AF060219

[30043] C-NT2RP2005490//&quot; Mus musculus D3Mm3e (D3Mm3e) mRNA, complete cds.&quot;//1.8E-175//102bp//83%//AF053628

[30044] C-NT2RP2005539//&quot; Homo sapiens mRNA for KIAA0850 protein, complete cds.&quot;//0//15 60bp//99%//AB020657

[30045] C-NT2RP2005605//QUEUINE TRNA-RIBOSYLTRANSFERASE (EC 2.4.2.29) (TRNA-GUANINE TRANSGLYCOSYLASE) (GUANINE INSERTION ENZYME).//8.2E-23//64aa//28%//O32053

[30046] C-NT2RP2005722//&quot; Homo sapiens ZKI mRNA for Kruppel-type zinc finger protein, complete cds.&quot;//0//2545bp//99%//AB011414

[30047] C-NT2RP2005732

[30048] C-NT2RP2005784//&quot; Homo sapiens ubiquitin-conjugating enzyme variant Kua (UBE2V) mRNA, complete cds.&quot;//0//2191bp//92%//AF155120

[30049] C-NT2RP2005812//HYPOTHETICAL 39.3 KD PROTEIN IN GCN4-WBP1 INTERGENIC REGION.//2.3E-39//318aa//31%//P40004

[30050] C-NT2RP2005859//&quot; Homo sapiens mRNA for KIAA0863 protein, complete cds.&quot;//0//1649bp//99%//AB020670

[30051] C-NT2RP2006023

[30052] C-NT2RP2006334//Homo sapiens mRNA; cDNA DKFZp434J154 (from clone DKFZp434J 154).//0//2318bp//99%//AL080155

[30053] C-NT2RP2006441

[30054] C-NT2RP3000002

[30055] C-NT2RP3000050//ZINC FINGER PROTEIN 91 (ZINC FINGER PROTEIN HTF10) (HPF7).//2.2E-150//490aa//53%//Q05481

[30056] C-NT2RP3000055

[30057] C-NT2RP3000068

[30058] C-NT2RP3000080

[30059] C-NT2RP3000085//ACETYL-/PROPIONYL-COENZYME A CARBOXYLASE ALPHA CHAIN [CONTAINS: BIOTIN CARBOXYLASE (EC 6.3.4.14); BIOTIN CARBOXYL CARRIER PROTEIN (BCCP)].//1.9E-123//436aa//50%//P46401

[30060] C-NT2RP3000092

[30061] C-NT2RP3000109//P54 PROTEIN PRECURSOR.//0.0000065//358aa//22%//P13692

[30062] C-NT2RP3000134

[30063] C-NT2RP3000149

[30064] C-NT2RP3000197

[30065] C-NT2RP3000207//&quot; GLUCOAMYLASE S1/S2 PRECURSOR (EC 3.2.1.3) (GLUCAN 1,4-ALPHA- GLUCOSIDASE) (1,4-ALPHA-D-GLUCAN GLUCOHYDROLASE). &quot;//2.9E-11//721aa//23%//P08640

[30066] C-NT2RP3000233//&quot; Human DNA sequence from clone 22D12 on chromosome Xq21.1-21.33. Contains a novel protein similar to Drosophila Kelch (Ring Canal protein, KEL) and a heterogenous set of other types of proteins. Contains ESTs and GSSs, complete sequence.&quot;//0//1462bp//99%//AL035424

[30067] C-NT2RP3000235

[30068] C-NT2RP3000247

[30069] C-NT2RP3000267

[30070] C-NT2RP3000299//&quot; Rattus norvegicus mRNA for Crk-associated substrate, p130, complete cds.&quot;//1012730bp//82%//D29766

[30071] C-NT2RP3000324

[30072] C-NT2RP3000341//&quot; Homo sapiens mitochondrial inner membrane preprotein translocase Tim 17a mRNA, nuclear gene encoding mitochondrial protein, complete cds.&quot;//1.5E-246//124bp//99%//AF106622

[30073] C-NT2RP3000393//&quot; Rattus norvegicus DNA-binding protein PREB (Preb) mRNA, complete cds.&quot;//5.8E-266//1373bp//86%//AF061817

[30074] C-NT2RP3000441//&quot; Homo sapiens squamous cell carcinoma antigen recognized by T cell (SART-2) mRNA, complete cds.&quot;//3.40E-42//645bp//67%//AF098066

[30075] C-NT2RP3000449

[30076] C-NT2RP3000451

[30077] C-NT2RP3000456

[30078] C-NT2RP3000542

[30079] C-NT2RP3000561

[30080] C-NT2RP3000562//&quot; Homo sapiens putative RNA-binding protein Q99 mRNA, complete cds.&quot;//0//2165bp//99%//AF093097

[30081] C-NT2RP3000578//HES1 PROTEIN.//1.3E-22//229aa//27%//P35843

[30082] C-NT2RP3000590//UVS-2 PROTEIN.//1.3E-22//458aa//24%//P33288

[30083] C-NT2RP3000592

[30084] C-NT2RP3000622

[30085] C-NT2RP3000624

[30086] C-NT2RP3000685

[30087] C-NT2RP3000736//HYPOTHETICAL PROTEIN KIAA0140.//1.2E-166//305aa//99%//Q14153

[30088] C-NT2RP3000742//&quot; 1-PHOSPHATIDYLINOSITOL-4,5-BISPHOSPHATE PHOSPHODIESTERASE DELTA I (EC 3.1.4.11) (PLC-DELTA-1) (PHOSPHOLIPASE C-DELTA-1) (PLC-III) (FRAGMENT).&quot;//4.1E-165//371aa//49%//P10895

[30089] C-NT2RP3000753

[30090] C-NT2RP3000826

[30091] C-NT2RP3000865

[30092] C-NT2RP3000875//MEVALONATE KINASE (EC 2.7.1.36) (MK).//7.7E-87//175aa//98%//Q03426

[30093] C-NT2RP3001007

[30094] C-NT2RP3001055

[30095] C-NT2RP3001111//&quot; Homo sapiens TRF-proximal protein mRNA, complete cds.&quot;//1.50E-149//731bp//97%//AF097725

[30096] C-NT2RP3001120//ZINC FINGER PROTEIN 136.//7.8E-170//512aa//58%//P52737

[30097] C-NT2RP3001126

[30098] C-NT2RP3001150//TRANSCRIPTION TERMINATION FACTOR RHO.//0.00000031 //207aa//29%//P52154

[30099] C-NT2RP3001232

[30100] C-NT2RP3001268//&quot; Homo sapiens zinc finger protein ZNF228 (ZNF228) mRNA, complete cds.&quot;//0//3606bp//99%//AF198358

[30101] C-NT2RP3001272//Mus musculus mRNA for macrophage actin-associated-tyrosine-phosphorylated protein.//1.3E-99//669bp//83%//Y 18101

[30102] C-NT2RP3001274//&quot; Homo sapiens mRNA for KIAA1037 protein, partial cds.&quot;//0//2254bp//99%//AB028960

[30103] C-NT2RP3001281

[30104] C-NT2RP3001297

[30105] C-NT2RP3001318

[30106] C-NT2RP3001338//ZINC FINGER PROTEIN 81 (FRAGMENT).//2.4E-16//175aa//28%//P51508

[30107] C-NT2RP3001355//TRICARBOXYLATE TRANSPORT PROTEIN PRECURSOR (CITRATE TRANSPORT PROTEIN) (CTP) (TRICARBOXYLATE CARRIER PROTEIN).//3.6E-25//129aa//34%//P32089

[30108] C-NT2RP3001374

[30109] C-NT2RP3001428//NUCLEOPROTEIN TPR.//1.4E-128//152aa//99%//P12270

[30110] C-NT2RP3001432

[30111] C-NT2RP3001447

[30112] C-NT2RP3001449//&quot; Human DNA sequence from clone 283E3 on chromosome 1p36.21-36.33. Contains the alternatively spliced gene for Matrix Metalloproteinase in the Female Reproductive tract MIFR 1, -2, MMP21/22A, -B and -C, a novel gene, the alternatively spliced CDC2L2 gene for Cell Division Cycle 2-Like 2 (PITSLRE, p58/GTA, Galactosyltransferase Associated Protein Kinase) beta 1, beta 2-1, beta 2-2 and alpha 2-4, a 40S Ribosomal Protein S7 pseudogene, part of the KIAA0447 gene, a novel alternatively spliced gene similar to many (archae)bacterial, worm and yeast hypothetical genes, and the GNBI gene for Guanine Nucleotide Binding Protein (G protein), Beta polypeptide 1 (Transducin Beta chain 1). Contains putative CpG islands, ESTs, STSs and GSSs, complete sequence.&quot;//0//1827bp//99%//AL031282

[30113] C-NT2RP3001453//ANTIGEN PEPTIDE TRANSPORTER 2 (APT2) (HISTOCOMPATIBILITY ANTIGEN MODIFIER 2).//3.2E-90//157aa//59%//P36371

[30114] C-NT2RP3001459

[30115] C-NT2RP3001527//&quot; Human Sp140 protein (Sp140) mRNA, complete cds.&quot;//4.3E-290//793bp//93%//U63420

[30116] C-NT2RP3001538//HYPOTHETICAL 39.0 KD PROTEIN T28D9.3 IN CHROMOSOME II.//9.10E-10//158aa//31% I/Q10022

[30117] C-NT2RP3001580//&quot; Mus musculus strain C57BL/J germ cell-less protein (Gc1) mRNA, complete cds.&quot;//0//1730bp//85%//AF163665

[30118] C-NT2RP3001587//&quot; Human anthracycline-associated resistance ARX mRNA, complete cds.&quot;//0//2617bp//99%//U35832

[30119] C-NT2RP3001589

[30120] C-NT2RP3001607

[30121] C-NT2RP3001608

[30122] C-NT2RP3001671//&quot; Homo sapiens mRNA for KIAA0850 protein, complete cds.&quot;//0//2310bp//99%//AB020657

[30123] C-NT2RP3001672//&quot; Homo sapiens Sex comb on midleg homolog 1 isoform 2 (SCMH1) mRNA, complete cds.&quot;//0//2836bp//99%//AF149046

[30124] C-NT2RP3001678

[30125] C-NT2RP3001688//&quot; Homo sapiens glucocorticoid modulatory element binding protein-1 (GMEB1) mRNA, complete cds.&quot;//0//1695bp//99%//AF099013

[30126] C-NT2RP3001690//INTRACELLULAR PROTEIN TRANSPORT PROTEIN US01.//0.00000024//481aa//21%//P25386

[30127] C-NT2RP3001698

[30128] C-NT2RP3001708//TWISTED GASTRULATION PROTEIN PRECURSOR.//3.4E-33//161aa//32%//P54356

[30129] C-NT2RP3001716

[30130] C-NT2RP3001752

[30131] C-NT2RP3001792//HETEROGENEOUS NUCLEAR RIBONUCLEOPROTEIN M (HNRNP M).//1.8E-117//462aa//55%//P52272

[30132] C-NT2RP3001844

[30133] C-NT2RP3001854//Homo sapiens mRNA; cDNA DKFZp564GO13 (from clone DKFZp564GO13).//0//1528bp//99%//AL050011

[30134] C-NT2RP3001855//HOMEOBOX PROTEIN PKNOX1 (HOMEOBOX PROTEIN PREP-1).//8.1E-125//302aa//60%//P55347

[30135] C-NT2RP3001898//&quot; Homo sapiens mRNA for UDP-N-acetylglucosamine: alpha-1,3-D-mannoside beta-1,4-N-acetylglucosaminyltransferase IV, complete cds.&quot;//0//1587bp//100%//AB000624

[30136] C-NT2RP3001931

[30137] C-NT2RP3001969//TRICHOHYALIN.//2.7E-11 //442aa//23%//P37709

[30138] C-NT2RP3002002

[30139] C-NT2RP3002004//H. sapiens mRNA for FAST kinase.//1.50E-192//475bp//94%//X86779

[30140] C-NT2RP3002007//SAP 1 PROTEIN.//1.1E-68//474aa//32%//P39955

[30141] C-NT2RP3002014//HYPOTHETICAL 32.0 KD PROTEIN C09F5.2 IN CHROMOSOME III.//5.30E-25//39aa//48%//Q09232

[30142] C-NT2RP3002045//&quot; Homo sapiens mRNA for KIAA0899 protein, partial cds.&quot;//0//3385bp//99%//AB020706

[30143] C-NT2RP3002056//&quot; Homo sapiens Rb binding protein homolog mRNA, partial cds.&quot;//0//2374bp//99%//AF083249

[30144] C-NT2RP3002062//&quot; Homo sapiens mRNA for KIAA0873 protein, partial cds.&quot;//0//3764bp//99%//AB020680

[30145] C-NT2RP3002081//&quot; Xenopus laevis chromosome condensation protein XCAP-G mRNA, complete cds.&quot;//4.1E-233//896bp//69%//AF111423

[30146] C-NT2RP3002097

[30147] C-NT2RP3002108//DEC1 PROTEIN (MDM20 PROTEIN).//7.90E-09//181aa//22%//Q12387

[30148] C-NT2RP3002142

[30149] C-NT2RP3002146

[30150] C-NT2RP3002151//G1 TO S PHASE TRANSITION PROTEIN I HOMOLOG (GTP-BINDING PROTEIN GSTI -HS).//2.8E-253//474aa//93%//P15170

[30151] C-NT2RP3002165//TRANSCRIPTIONAL REGULATOR PROTEIN HCNGP.//1.9E-151//223aa//91%//Q02614

[30152] C-NT2RP3002166

[30153] C-NT2RP3002181

[30154] C-NT2RP3002244

[30155] C-NT2RP3002248

[30156] C-NT2RP3002273//SCD6 PROTEIN.//1.30E-09//295aa//28%//P45978

[30157] C-NT2RP3002276

[30158] C-NT2RP3002304

[30159] C-NT2RP3002501//THREONINE DEHYDRATASE CATABOLIC (EC 4.2.1.16) (THREONINE DEAMINASE).//3.70E-43//318aa//37%//P05792

[30160] C-NT2RP3002529//Homo sapiens mRNA for leucocyte vacuolar protein sorting.//0//2276bp//99%//AJ133421

[30161] C-NT2RP3002566

[30162] C-NT2RP3002587

[30163] C-NT2RP3002590

[30164] C-NT2RP3002631

[30165] C-NT2RP3002650//&quot; Mus musculus growth suppressor IL (Gros1) mRNA, complete cds.&quot;//0//2109bp//87%//AF165163

[30166] C-NT2RP3002663//&quot; Homo sapiens putative glycolipid transfer protein mRNA, complete cds.&quot;//8.10E-263//1243bp/197%//AF103731

[30167] C-NT2RP3002671//ELONGATION FACTOR 2 (EF-2).//2.50E-73//179aa//36%//P13060

[30168] C-NT2RP3002763

[30169] C-NT2RP3002861

[30170] C-NT2RP3002911

[30171] C-NT2RP3002948//RING CANAL PROTEIN (KELCH PROTEIN).//2E-111//551aa//42%//Q04652

[30172] C-NT2RP3002953//&quot; Homo sapiens protocadherin beta 5 (PCDH-beta5) mRNA, complete cds.&quot;//0//2388bp//99%//AF152498

[30173] C-NT2RP3002988//&quot; Homo sapiens IkB kinase-b (IKK-beta) mRNA, complete cds.&quot;//1.8E-292//1325bp//99%//AF080158

[30174] C-NT2RP3003008

[30175] C-NT2RP3003101//&quot; Mouse mRNA for tetracycline transporter-like protein, complete cds.&quot;//3.6E-8311807bp//72%//D88315

[30176] C-NT2RP3003204

[30177] C-NT2RP3003278

[30178] C-NT2RP3003282//&quot; Homo sapiens dynamin (DNM) mRNA, complete cds.&quot;//0//2596bp//98%//L36983

[30179] C-NT2RP3003290//&quot; Mus musculus mRNA for Ndr1 related protein Ndr3, complete cds.&quot;//1.5e-310//468bp//82%//AB033922

[30180] C-NT2RP3003302

[30181] C-NT2RP3003313//&quot; Homo sapiens thyroid hormone receptor-associated protein complex component TRAP80 mRNA, complete cds.&quot;//0//2476bp//99%//AF117657

[30182] C-NT2RP3003327//52 KD RO PROTEIN (SJOGREN SYNDROME TYPE A ANTIGEN (SS-A)) (RO(SS-A)) (RO52).//1.3E-35//178aa//44%//Q62191

[30183] C-NT2RP3003344

[30184] C-NT2RP3003353//HYPOTHETICAL 26.2 KD PROTEIN IN GDI1-COX15 INTERGENIC REGION.//2.80E-07//161aa//28%//P40084

[30185] C-NT2RP3003377

[30186] C-NT2RP3003385//&quot; Mus musculus SKD3 mRNA, complete cds.&quot;//0//2133bp//85%//U09874

[30187] C-NT2RP3003433

[30188] C-NT2RP3003490//&quot; Homo sapiens mRNA for KIAA0725 protein, partial cds.&quot;//0//2437bp//990%//AB0118268

[30189] C-NT2RP3003491//&quot; Drosophila melanogaster Pelle associated protein Pellino (Pli) mRNA, complete cds.&quot;//5.6E-361/842bp//62%//AF091624

[30190] C-NT2RP3004206//CROOKED NECK PROTEIN.//1.4E-220//567aa//67%//P17886

[30191] C-NT2RP3004207//Homo sapiens mRNA for type I transmembrane receptor (psk-1 gene).//0//2445bp//100%//AJ245820

[30192] C-NT2RP3004209//&quot; Homo sapiens ubiquitin processing protease (Ubp-M) mRNA, complete cds.&quot;//0//2320bp//99%//AF126736

[30193] C-NT2RP3004242//PUTATIVE RHO/RAC GUANINE NUCLEOTIDE EXCHANGE FACTOR (RHO/RAC GEF) (FACIOGENITAL DYSPLASIA PROTEIN HOMOLOG).//4.7E-13//18aa//33%//P52734

[30194] C-NT2RP3004246

[30195] C-NT2RP3004258//&quot; Homo sapiens ZISI mRNA, complete cds.&quot;//0//1861bp//99%//AF065391

[30196] C-NT2RP3004262//&quot; Homo sapiens heat shock protein hsp40-3 mRNA, complete cds.&quot;//2.4E-248//26bp//100%//AF088982

[30197] C-NT2RP3004341

[30198] C-NT2RP3004378

[30199] C-NT2RP3004424//Homo sapiens mRNA for stromal antigen 3 (STAG3 gene).//1E-66//364bp//93%//AJ007798

[30200] C-NT2RP3004428

[30201] C-NT2RP3004451

[30202] C-NT2RP3004454//&quot; Homo sapiens mRNA for KIAA0448 protein, complete cds.&quot;//0//2875bp//99%//AB007917

[30203] C-NT2RP3004472//GERM CELL-LESS PROTEIN.//1.6E-61//170aa//40%//Q01820

[30204] C-NT2RP3004498//&quot; Mus musculus ROSA 26 transcription AS ROSA26AS mRNA, complete cds.&quot;//2E-249//1777bp//80%//U83176

[30205] C-NT2RP3004504//M. musculus mRNA for CPEB protein.//1.9E-295//893bp//92%//Y08260

[30206] C-NT2RP3004507//MOB 1 PROTEIN (MPS 1 BINDER 1).//3.7E-37//90aa//39%//P40484

[30207] C-NT2RP3004534//&quot; Mouse oncogene (ect2) mRNA, complete cds.&quot;//0//2075bp//87%//L11316

[30208] C-NT2RP4000528//NPL4 PROTEIN.//9.8E-86//515aa//37%//P33755

[30209] C-NT2RP4000907//&quot; Mouse NLRR-1 mRNA for leucine-rich-repeat protein, complete cds.&quot;//0//2127bp//86%//D45913

[30210] C-NT2RP4001029//&quot; Mus domesticus nuclear binding factor NF2d9 mRNA, complete cds.&quot;//0//1711bp//90%//U20086

[30211] C-NT2RP4001336//GUANINE NUCLEOTIDE-BINDING PROTEIN BETA SUBUNIT-LIKE PROTEIN.//0.000016//86aa//29%//O24076

[30212] C-NT2RP4001389//KES 1 PROTEIN.//1.70E-31//342aa//34%//P35844

[30213] C-NT2RP4001442

[30214] C-NT2RP4001529//&quot; Mus domesticus nuclear binding factor NF2d9 mRNA, complete cds.&quot;//1.70E-255//148bp//90%//U20086

[30215] C-NT2RP4001656//VACUOLAR BIOGENESIS PROTEIN ENDI (PEP5 PROTEIN).//1.10E-45//310aa//27%//P12868

[30216] C-OVARC1000106//&quot; TROPOMYOSIN 1, FUSION PROTEIN 33.&quot;//0.000032//165aa//27%//P49455

[30217] C-OVARC1000198

[30218] C-OVARC1000682//&quot; PROCESSING ALPHA-1,2-MANNOSIDASE (EC 3.2.1.-) (ALPHA-1,2-MANNOSIDASE 1B).&quot;//1.1E-209//293aa//95%//P39098

[30219] C-OVARC1000703

[30220] C-OVARC1000722//&quot; Homo sapiens chromosome 1q21-1 q23 beta-1,4-galactosyltransferase mRNA, complete cds.&quot;//0//759bp//98%//AF038661

[30221] C-OVARC1000730

[30222] C-OVARC1000746//MATERNAL EFFECT PROTEIN STAUFEN.//0.0000000//778aa//48%//P25159

[30223] C-OVARC1000781

[30224] C-OVARC1000787

[30225] C-OVARC1000834//Homo sapiens mRNA for atopy related autoantigen CALC.//2.8E-258//183bp//99%//Y17711

[30226] C-OVARC1000846//NUCLEOLIN (PROTEIN C23).//0.0000097//109aa//30%//P08199

[30227] C-OVARC1000850//&quot; Homo sapiens PB39 mRNA, complete cds.&quot;//0//2095bp//99%//AF045584

[30228] C-OVARC1000862//M. musculus mRNA for FT1.//5.9E-226//1498bp//81%//Z67963

[30229] C-OVARC1000876//MOB 1 PROTEIN (MPS 1 BINDER 1).//2.2E-50//206aa//52%//P40484

[30230] C-OVARC1000883

[30231] C-OVARC1000886

[30232] C-OVARC1000912

[30233] C-OVARC1000915//&quot; Homo sapiens histone deacetylase 5 mRNA, complete cds.&quot;//1.60E-121//591bp//97%//AF132608

[30234] C-OVARC1000924

[30235] C-OVARC1000964

[30236] C-OVARC1000984

[30237] C-OVARC1001004

[30238] C-OVARC1001010

[30239] C-OVARC1001011

[30240] C-OVARC1001032

[30241] C-OVARC1001044

[30242] C-OVARC1001055//PRE-B CELL ENHANCING FACTOR PRECURSOR.//1.9E-35//76aa//98%//P43490

[30243] C-OVARC1001068//&quot; Homo sapiens Era GTPase A protein (HERA-A) mRNA, partial cds.&quot;//0//1819bp//99%//AF082657

[30244] C-OVARC1001074

[30245] C-OVARC1100092//&quot; Homo sapiens mRNA for JM5 protein, complete CDS (clone IMAGE 53337, LLNLc110F1857Q7 (RZPD Berlin) and LLNLc110G0913Q7 (RZPD Berlin)).&quot;//2E-214//769bp//97%//AJ005897

[30246] C-OVARC1001107//&quot; Homo sapiens protein methyltransferase (JBP1) mRNA, complete cds.&quot;//6.1E-276//594bp//98%//AF167572

[30247] C-OVARC1001154//&quot; Homo sapiens clone 24720 epithelin 1 and 2 mRNA, complete cds.&quot;//2.3E-296//1561bp//93%//AF055008

[30248] C-OVARC1001161

[30249] C-OVARC1001167

[30250] C-OVARC1001170

[30251] C-OVARC1001171//&quot; Homo sapiens translation initiation factor 347 kDa subunit mRNA, complete cds.&quot;//5.7E-151 //436bp//92%//U94855

[30252] C-OVARC1001173

[30253] C-OVARC1001176

[30254] C-OVARC1001180//UBIQUITIN-LIKE PROTEIN DSK2.//1.1E-11//221aa//25%//P48510

[30255] C-OVARC1001188

[30256] C-OVARC1001232//&quot; CLEAVAGE AND POLYADENYLATION SPECIFICITY FACTOR, 100 KD SUBUNIT (CPSF 100 KD SUBUNIT).&quot;//5.10E-22//83aa//37%//Q10568

[30257] C-OVARC1001270

[30258] C-OVARC1001271//NUCLEOLAR TRANSCRIPTION FACTOR 1 (UPSTREAM BINDING FACTOR 1) (UBF-1).//0.0000014//224aa//26%//P25976

[30259] C-OVARC1001306//N-MYC PROTO-ONCOGENE PROTEIN.//0.00000073//247aa//27%//P18444

[30260] C-OVARC1001344

[30261] C-OVARC1001369

[30262] C-OVARC11001372//&quot; Homo sapiens mRNA for KIAA0897 protein, partial cds.&quot;//0//840bp//97%//AB020704

[30263] C-OVARC1001391

[30264] C-OVARC1001399

[30265] C-OVARC1001417//&quot; Homo sapiens thyroid hormone receptor-associated protein complex component TRAP170 mRNA, complete cds.&quot;//0//1715bp//99%//AF135802

[30266] C-OVARC1001419//&quot; Homo sapiens GOK (STIM1) mRNA, complete cds.&quot;//4.9E-4811586bp//69%//U52426

[30267] C-OVARC1001436//ENL PROTEIN.//0.00000009//81aa//39%//Q03111

[30268] C-OVARC1001453

[30269] C-OVARC1001476//&quot; Mus musculus YGR163w mRNA homologue, complete cds.&quot;//1 .80E-187//510bp//89%//AB017616

[30270] C-OVARC1001480

[30271] C-OVARC1001489

[30272] C-OVARC1001506//POLYCYSTIN PRECURSOR (AUTOSOMAL DOMINANT POLYCYSTIC KIDNEY DISEASE PROTEIN 1).11//0777aa//91%//P98161

[30273] C-OVARC1001525

[30274] C-OVARC1001555//NGG 1-INTERACTING FACTOR 3 .//4.4E-19//130aa//40%//P53081

[30275] C-OVARC1001577//Homo sapiens SRp46 splicing factor transcribed retropseudogene.//0//1167bp//100%//AF031165

[30276] C-OVARC1001600

[30277] C-OVARC1001610//&quot; Homo sapiens choline/ethanolaminephosphotransferase (CEPT 1) mRNA, complete cds.&quot;//0//1870bp//99%//AF068302

[30278] C-OVARC1001702

[30279] C-OVARC1001703//&quot; Mus musculus ARL-6 interacting protein-2 (Aip-2) mRNA, complete cds.&quot;//3 .5E-16/1399bp//61%//AF133670

[30280] C-OVARC1001711//CORNIFIN B (SMALL PROLINE-RICH PROTEIN IB) (SPRIB) (SPR1 B).//2.80E-10//106aa//38%//Q62267

[30281] C-OVARC1001713//ENDOZEPINE-RELATED PROTEIN PRECURSOR (MEMBRANE-ASSOCIATED DIAZEPAM BINDING INHIBITOR) (MA-DBI).//4.4E-40//95aa//41%//P07106

[30282] C-OVARC1001726//APICAL-LIKE PROTEIN (APXL PROTEIN).//4.3E-16//16aa//43%//Q13796

[30283] C-OVARC1001731//&quot; TROPOMYOSIN ALPHA CHAIN, FIBROBLAST ISOFORM F2.&quot;//4E-122//282aa//85%//P08942

[30284] C-OVARC1001745

[30285] C-OVARC1001762//&quot; N-TERMINAL ACETYLTRANSFERASE 1 (EC 2.3.1.88) (AMINO-TERMINAL, ALPHA- AMINO, ACETYLTRANSFERASE l).&quot;//6.4E-85//514aa//34%//P12945

[30286] C-OVARC1001766//&quot; Homo sapiens eukaryotic translation initiation factor eIF3, p35 subunit mRNA, complete cds.&quot;//0//963bp//99%//U97670

[30287] C-OVARC1001767//&quot; Homo sapiens mRNA for KIAA0675 protein, complete cds.&quot;//0//2083bp//99%//AB014575

[30288] C-OVARC1001768

[30289] C-OVARC1001791

[30290] C-OVARC1001795

[30291] C-OVARC1001802

[30292] C-OVARC1001809//&quot; Mus musculus sphingosine kinase (SPHK1a) mRNA, partial cds.&quot;//2.7E-190//1624bp//76%//AF068748

[30293] C-OVARC1001828

[30294] C-OVARC11001846

[30295] C-OVARC1001861

[30296] C-OVARC1001879

[30297] C-OVARC1001880

[30298] C-OVARC1001883

[30299] C-OVARC1001916

[30300] C-OVARC1001928

[30301] C-OVARC1001942//&quot; N-TERMINAL ACETYLTRANSFERASE 1 (EC 2.3.1.88) (AMINO-TERMINAL, ALPHA- AMINO, ACETYLTRANSFERASE 1).&quot;//3.1E-81//497aa//35%//P12945

[30302] C-OVARC1001943//&quot; Mus musculus DEBT-91 mRNA, complete cds.&quot;//0//2035bp//87%//AF143859

[30303] C-OVARC1001950

[30304] C-OVARC1100987//&quot; Rattus norvegicus DNA-binding protein PREB (Preb) mRNA, complete cds.&quot;//2.3E-220//652bp//84%//AF061817

[30305] C-OVARC1002050//&quot; Homo sapiens mRNA for actin binding protein ABP620, complete cds.&quot;//0//1019bp//99%//AB029290

[30306] C-OVARC1002082

[30307] C-OVARC1002107

[30308] C-OVARC1002127//SODIUM-INDEPENDENT ORGANIC ANION TRANSPORTER 2 (BRAIN DIGOXIN CARRIER PROTEIN) (BRAIN-SPECIFIC ORGANIC ANION TRANSPORTER) (OATP-B 1).115.4E-52//306aa//35%//O35913

[30309] C-OVARC1002138//SAP 1 PROTEIN.//7.6E-60//128aa//59%//P39955

[30310] C-OVARC1002156

[30311] C-OVARC1002158

[30312] C-PLACE1000004//&quot; Homo sapiens IDN3-B mRNA, complete cds.&quot;//0//2365bp//99%//AB019602

[30313] C-PLACE1000040//TRANSFORMING PROTEIN P21/K-RAS 2B.//1.4E-17//85aa//32%//P08643

[30314] C-PLACE1000048

[30315] C-PLACE1000050

[30316] C-PLACE1000061//Human ribosomal protein L37a mRNA sequence.//7.9E-54//90bp//94%//L22154

[30317] C-PLACE1000081//&quot; Human SEC7 homolog Tic (TIC) mRNA, complete cds.&quot;//0//2077bp//99%//U63127

[30318] C-PLACE1000094

[30319] C-PLACE1000133//TRANSCRIPTION FACTOR BTF3 (RNA POLYMERASE B TRANSCRIPTION FACTOR 3).//1.8E-62//158aa//81%//P20290

[30320] C-PLACE1000214

[30321] C-PLACE1000236

[30322] C-PLACE1000246

[30323] C-PLACE1000292

[30324] C-PLACE1000308

[30325] C-PLACE1000332

[30326] C-PLACE1000453

[30327] C-PLACE1000583//ZINC FINGER PROTEIN 83 (ZINC FINGER PROTEIN HPF1).//1.60E-47//207aa//46%//P51522

[30328] C-PLACE1000599

[30329] C-PLACE1000610//MSN5 PROTEIN.//0.0000026//136aa//26%//P52918

[30330] C-PLACE1000653//&quot; Homo sapiens N-acetylglucosamine-phosphate mutase mRNA, complete cds.&quot;//0//1992bp//99%//AF180371

[30331] C-PLACE1000656//&quot; Homo sapiens mRNA for JM4 protein, complete CDS (clone IMAGE 546750 and LLNLc110F1857Q7 (RZPD Berlin)).&quot;//2.1E-277//260bp//99%//AJ005896

[30332] C-PLACE1000706//&quot; Homo sapiens transcriptional intermediary factor 1 gamma mRNA, complete cds.&quot;//0//1366bp//99%//AF119043

[30333] C-PLACE1000712

[30334] C-PLACE1000749

[30335] C-PLACE1000769//&quot; Homo sapiens CGI-18 protein mRNA, complete cds.&quot;//0//1985bp//98%//AF132952

[30336] C-PLACE1000786//PUTATIVE RHO/RAC GUANINE NUCLEOTIDE EXCHANGE FACTOR (RHO/RAC GEF) (FACIOGENITAL DYSPLASIA PROTEIN HOMOLOG).//7.10E-09//59aa//47%//P52734

[30337] C-PLACE1000849

[30338] C-PLACE1000856//&quot; Homo sapiens mRNA for KIAA0974 protein, partial cds.&quot;//0//1310bp//100%//AB023191

[30339] C-PLACE1000931

[30340] C-PLACE1000987//&quot; Homo sapiens mRNA for KIAA0724 protein, complete cds.&quot;//0//1749bp//99%//AB0018267

[30341] C-PLACE1001010

[30342] C-PLACE101015

[30343] C-PLACE1001024

[30344] C-PLACE1001062//&quot; Homo sapiens PAC clone DJ1049N15 from 7q31.2-7q32, complete sequence.&quot;//2.7E-32//470bp//71%//AC006020

[30345] C-PLACE1001104

[30346] C-PLACE1001168

[30347] C-PLACE1001171//MYOTUBULARIN.//7.1E-84//198aa//73%//Q13496

[30348] C-PLACE1001185//&quot; Homo sapiens mRNA for KIAA0943 protein, partial cds.&quot;//0//1668bp//99%//AB023160

[30349] C-PLACE1001238//&quot; Mouse mRNA for RNA polymerase I associated factor (PAF53), complete cds.&quot;//2E-202//1333bp//80%//D 14336

[30350] C-PLACE1001280

[30351] C-PLACE1001294//M. musculus GEG-154 mRNA.//4.3E-221//057bp//78%//X71642

[30352] C-PLACE1001304//&quot; Homo sapiens zinc finger protein dp mRNA, complete cds.&quot;//0//2421bp//99%//AF153201

[30353] C-PLACE1001311

[30354] C-PLACE1001323

[30355] C-PLACE1001351

[30356] C-PLACE1001414

[30357] C-PLACE1001440

[30358] C-PLACE1001456

[30359] C-PLACE1001517//&quot; Homo sapiens gene for glycosylphosphatidylinositol anchor attachment I (GPAAI), complete cds.&quot;//4.60E-112//392bp//87%//AB002137

[30360] C-PLACE1001602//CCR4-ASSOCIATED FACTOR 1 (CAF1).//5.7E-130//244aa//99%//Q60809

[30361] C-PLACE1001632//ZINC FINGER PROTEIN 84 (ZINC FINGER PROTEIN HPF2).//1.4E-118//429aa//48%//P51523

[30362] C-PLACE1001634

[30363] C-PLACE1001640

[30364] C-PLACE1001672//PROBABLE AMINOTRANSFERASE TOIBI 1.2 (EC 2.6.1.-).//4.3E-66//74aa//45%//P91408

[30365] C-PLACE1001705

[30366] C-PLACE1001716

[30367] C-PLACE1001720

[30368] C-PLACE1001745

[30369] C-PLACE1001748//&quot; Homo sapiens metalloprotease I (MP 1) mRNA, complete cds.&quot;//0//2602bp//99%//AF061243

[30370] C-PLACE1001771//Homo sapiens mRNA for transient receptor potential protein TRP6.110112900bp//99%//AJ006276

[30371] C-PLACE1001799

[30372] C-PLACE1001845//&quot; Mus musculus cyclin ania-6a mRNA, complete cds.&quot;//3.30E-311925bp//62%//AF159159

[30373] C-PLACE1001897

[30374] C-PLACE1002090//SIGNAL RECOGNITION PARTICLE 72 KD PROTEIN (SRP72).//6.5E-58//12aa//100%//O76094

[30375] C-PLACE1002157

[30376] C-PLACE1002171//TRANSCRIPTION REGULATORY PROTEIN SWI3 (SWI/SNF COMPLEX COMPONENT SWI3) (TRANSCRIPTION FACTOR TYE2).//0.00005//179aa//23%//P32591

[30377] C-PLACE1002227

[30378] C-PLACE1002259

[30379] C-PLACE1002319

[30380] C-PLACE1002395//&quot; Mus musculus mRNA for UBE-Ic1, UBE-Ic2, UBE-Ic3, complete cds.&quot;//7.9E-100//966bp//75%//AB030505

[30381] C-PLACE1002477

[30382] C-PLACE1002493//&quot; Homo sapiens signal transducing adaptor molecule 2A (STAM2) mRNA, complete cds.&quot;//1.7E-13//545bp//98%//AF042273

[30383] C-PLACE1002500

[30384] C-PLACE1002514

[30385] C-PLACE1002532//HOMEOBOX PROTEIN DLX-5 .//1 .2E- 152//289aa//96%//P70396

[30386] C-PLACE1002537

[30387] C-PLACE1002571//ACTIN-LIKE PROTEIN 13E.//5E-99//386aa//48%//P45890

[30388] C-PLACE1002583//&quot; GLUTAMATE RECEPTOR, IONOTROPIC KAINATE 2 PRECURSOR (GLUTAMATE RECEPTOR 6) (GLUR-6) (GLUTAMATE RECEPTOR BETA-2) (GLUR BETA-2) (FRAGMENT).&quot;//5.6E-34//76aa//98%//P39087

[30389] C-PLACE1002598//OLIGORIBONUCLEASE (EC 3.1.-.-).//5 .5E- 17//76aa//56%//P45340

[30390] C-PLACE1002625

[30391] C-PLACE1002655//ADSEVERIN (SCINDERIN) (SC).//2.5E-278//543aa//92%//Q28046

[30392] C-PLACE1002768

[30393] C-PLACE1002782//&quot; Rattus norvegicus zinc transporter (ZnT-2) mRNA, complete cds.&quot;//3.8E-4311385bp//77%//U50927

[30394] C-PLACE1002816//HISTONE DEACETYLASE HDAI .//2.20E-48//217aa//46%//P53973

[30395] C-PLACE1002853

[30396] C-PLACE1002908//&quot; Homo sapiens XGalT-1 mRNA for galactosyltransferase I, complete cds.&quot;//0//1654bp//99%//AB028600

[30397] C-PLACE1002962

[30398] C-PLACE1002968

[30399] C-PLACE1002991//PUTATIVE AMIDASE (EC 3.5.1.4).l/1 .4E-78//496aa//37%//Q49091

[30400] C-PLACE1003025

[30401] C-PLACE1003027//&quot; Homo sapiens mRNA for KIAA0516 protein, partial cds.&quot;//2.1e-314//417bp//100%//AB011088

[30402] C-PLACE1003044//&quot; Homo sapiens mRNA for KIAA0829 protein, partial cds.&quot;//0//1382bp//96%//AB020636

[30403] C-PLACE1003176

[30404] C-PLACE1003238//PROBABLE G PROTEIN-COUPLED RECEPTOR KIAA0001.//4.9E-76//309aa//47%//Q15391

[30405] C-PLACE1003256

[30406] C-PLACE1003258//EARLY EMBRYOGENESIS ZYG-11 PROTEIN.//7.9E-22//70aa//47%//P21541

[30407] C-PLACE1003343

[30408] C-PLACE1003361

[30409] C-PLACE1003366//&quot; Homo sapiens otoferlin (OTOF) mRNA, complete cds.&quot;//1.4E-7811542bp//67%//AF107403

[30410] C-PLACE1003373

[30411] C-PLACE1003375

[30412] C-PLACE1003394//&quot; Sprague-Dawley (clone LRB13) RAB14 mRNA, complete cds.&quot;//2.30E-150//774bp//94%//M83680

[30413] C-PLACE1003420//PUTATIVE MITOCHONDRIAL CARRIER YIL006W.//1.3E-40//278aa//36%//P40556

[30414] C-PLACE1003454

[30415] C-PLACE1003478

[30416] C-PLACE1003516

[30417] C-PLACE1003519//H. sapiens hnRNP-E2 mRNA.//5.1E-218//905bp//99%//X78136

[30418] C-PLACE1003521//HYPOTHETICAL HELICASE C28H8.3 IN CHROMOSOME III.//0.0000011//101aa//32%//Q09475

[30419] C-PLACE1003528

[30420] C-PLACE1003537//ENDOSOMAL P24A PROTEIN PRECURSOR (70 KD ENDOMEMBRANE PROTEIN) (PHEROMONE ALPHA-FACTOR TRANSPORTER) (ACIDIC 24 KD LATE ENDOCYTIC INTERMEDIATE COMPONENT).//7.7E-68//404aa//33%//P32802

[30421] C-PLACE1003566

[30422] C-PLACE1003584

[30423] C-PLACE1003593

[30424] C-PLACE1003605//HAP5 TRANSCRIPTIONAL ACTIVATOR.//0.00000023//82aa//35%//Q02516

[30425] C-PLACE1003618

[30426] C-PLACE1003638

[30427] C-PLACE1003738//ZINC FINGER PROTEIN 135.//9.6E-1181350aa//46%//P52742

[30428] C-PLACE1003760//&quot; Homo sapiens tetraspanin TM4-A mRNA, complete cds.&quot;//5.2E-289//1313bp//97%//AF133423

[30429] C-PLACE1003768

[30430] C-PLACE1003795

[30431] C-PLACE1003886

[30432] C-PLACE1003888//&quot; Homo sapiens mRNA for KIAA1092 protein, partial cds.&quot;//0//2057bp//99%//AB029015

[30433] C-PLACE1003903//CTP SYNTHASE (EC 6.3.4.2) (UTP-AMMONIA LIGASE) (CTP SYNTHETASE).//1.4E-243//584aa//74%//P17812

[30434] C-PLACE1003915//&quot; PROBABLE ARGINYL-TRNA SYNTHETASE, CYTOPLASMIC (EC 6.1.1.19) (ARGININE- -TRNA LIGASE) (ARGRS).&quot;//2.4E-108//581aa//40%//Q05506

[30435] C-PLACE1004118

[30436] C-PLACE1004256//&quot; Mus musculus short coiled coil protein SCOCO (Scoc) mRNA, complete cds.&quot;//2E-93//960bp//76%//AFI 15778

[30437] C-PLACE1004274

[30438] C-PLACE1004284

[30439] C-PLACE1005331

[30440] C-PLACE1005739//Homo sapiens mRNA; cDNA DKFZp564AO32 (from clone DKFZp564AO32).//0//2190bp//99%//AL050267

[30441] C-PLACE1005828

[30442] C-PLACE1005876//&quot; CLEAVAGE AND POLYADENYLATION SPECIFICITY FACTOR, 100 KD SUBUNIT (CPSF 100 KD SUBUNIT).&quot;//0//730aa//99%//Q10568

[30443] C-PLACE1005890//BEM46 PROTEIN (FRAGMENT).I/9.9E-42//224aa//43%//P54069

[30444] C-PLACE1006157//E-SELECTIN PRECURSOR (ENDOTHELIAL LEUKOCYTE ADHESION MOLECULE 1) (ELAM-1) (LEUKOCYTE-ENDOTHELIAL CELL ADHESION MOLECULE 2) (LECAM2) (CD62E).//2E-28//236aa//30%//P98110

[30445] C-PLACE1007053

[30446] C-PLACE1007068

[30447] C-PLACE1008368//RING CANAL PROTEIN (KELCH PROTEIN).//5.3E-26//309aa/130%//Q04652

[30448] C-PLACE1009921

[30449] C-PLACE1010401

[30450] C-PLACE1010856

[30451] C-PLACE1010857

[30452] C-PLACE1010917

[30453] C-PLACE1010925

[30454] C-PLACE1010926//&quot; Homo sapiens mRNA for KIAA0554 protein, partial cds.&quot;//0//1160bp//100%//AB011126

[30455] C-PLACE1010942//&quot; Homo sapiens intersectin long isoform (ITSN) mRNA, complete cds.&quot;//0//1440bp//99%//AF114487

[30456] C-PLACE1010944

[30457] C-PLACE1010954

[30458] C-PLACE1010960//ACTIN-LIKE PROTEIN 13E.//5.3E-98//297aa//48%//P45890

[30459] C-PLACE1011026

[30460] C-PLACE1011046//&quot; 1-PHOSPHATIDYLINOSITOL-4,5-BISPHOSPHATE PHOSPHODIESTERASE BETA I (EC 3.1.4.11) (PLC-BETA-1) (PHOSPHOLIPASE C-BETA-1) (PLC-1) (PLC-154). &quot;//0//646aa//97%//P10894

[30461] C-PLACE1011054

[30462] C-PLACE1011057

[30463] C-PLACE1011109//&quot; ELONGATION FACTOR G, MITOCHONDRIAL PRECURSOR (MEF-G).&quot;//1.50E-22//63aa//88%//Q07803

[30464] C-PLACE1011114//PROBABLE ATP-DEPENDENT RNA HELICASE HAS1.//2.9E-71//90aa//44%//Q03532

[30465] C-PLACEIOIII33

[30466] C-PLACE1011143

[30467] C-PLACE1011165

[30468] C-PLACE1011185//INSERTION ELEMENT IS1 PROTEIN INSB.//1.3E-89//167aa//100%//P03830

[30469] C-PLACE1011219//PROBABLE OXIDOREDUCTASE (EC 1.-.-.-).//3.2E-12//212aa//29%//Q03326

[30470] C-PLACE1011221

[30471] C-PLACE1011263//Homo sapiens mRNA; cDNA DKFZp5640043 (from clone DKFZp5640043).//0//2487bp//99%//AL050390

[30472] C-PLACE1011325

[30473] C-PLACE1011332//&quot; Homo sapiens N-acetylglucosamine-phosphate mutase mRNA, complete cds.&quot;//7.2E-151 //697bp//99%//AF102265

[30474] C-PLACE1011340//&quot; Homo sapiens IDN3-B mRNA, complete cds.&quot;//1.20E-74//380bp//97%//AB019602

[30475] C-PLACE1011399//&quot; Homo sapiens CGI-72 protein mRNA, complete cds.&quot;//3.2E-90//427bp//99%//AF151830

[30476] C-PLACE1011433//&quot; Homo sapiens mRNA for KIAA0530 protein, partial cds.&quot;//0//1946bp//99%//AB011102

[30477] C-PLACE1011452

[30478] C-PLACE1011465

[30479] C-PLACE1011472//&quot; Homo sapiens mRNA for KIAA0712 protein, complete cds.&quot;//0//2022bp//99%//AB018255

[30480] C-PLACE1011477//&quot; Homo sapiens sorting nexin 2 (SNX2) mRNA, complete cds.&quot;//0//2040bp//99%//AF065482

[30481] C-PLACE1011492//NON-GREEN PLASTID TRIOSE PHOSPHATE TRANSLOCATOR PRECURSOR (CTPT).//4.90E-11//47aa//32%//P52178

[30482] C-PLACE1011520

[30483] C-PLACE1011563

[30484] C-PLACE1011567

[30485] C-PLACE1011576//&quot; Human Kruppel related zinc finger protein (HTF10) mRNA, complete cds.&quot;//0//179 lbp//82%//L1672

[30486] C-PLACE1011586

[30487] C-PLACE1011643

[30488] C-PLACE1011649

[30489] C-PLACE1011664//CROOKED NECK PROTEIN.//1.6E- 1871H505aa//64%//P17886

[30490] C-PLACE1011682

[30491] C-PLACE1011719

[30492] C-PLACE1011729

[30493] C-PLACE1011858//Homo sapiens mRNA; cDNA DKFZp586CO21 (from clone DKFZp586C021).//0//1490bp//99%//AL050287

[30494] C-PLACE1011874

[30495] C-PLACE1011875//&quot; Homo sapiens mRNA for KIAA0580 protein, partial cds.&quot;//4.1E-12//524bp//100%//AB01152

[30496] C-PLACE1011923//&quot; Homo sapiens serum-inducible kinase mRNA, complete cds.&quot;//0//2782bp//99%//AF059617

[30497] C-PLACE1011982

[30498] C-PLACE2000014//HYPOTHETICAL HELICASE C28H8.3 IN CHROMOSOME III.//2.6E-42//104aa//49%//Q09475

[30499] C-PLACE2000015//EPIDERMAL GROWTH FACTOR RECEPTOR SUBSTRATE SUBSTRATE 15 (PROTEIN EPS15) (AF-IP PROTEIN).//1.1E-116//364aa//45%//P42566

[30500] C-PLACE2000017

[30501] C-PLACE2000021//&quot; Homo sapiens TRFI-interacting ankyrin-related ADP-ribose polymerase mRNA, complete cds.&quot;//2.7E-107//981bp//74%//AF082556

[30502] C-PLACE2000047

[30503] C-PLACE2000062//&quot; Homo sapiens mRNA for type II membrane protein similar to HIV gp120-binding C-type lectin, complete cds, clone:HP01347.&quot;//6.3E-16611656bp//94%//AB015629

[30504] C-PLACE2000100

[30505] C-PLACE2000111

[30506] C-PLACE2000172

[30507] C-PLACE2000187

[30508] C-PLACE2000216//&quot; Dog nonerythroid beta-spectrin mRNA, 3′ end.&quot;//3.2E-253//799bp/183%//L02897

[30509] C-PLACE2000246//&quot; Homo sapiens mRNA for KIAA0795 protein, partial cds.&quot;//4.60E-17211796bp//99%//AB018338

[30510] C-PLACE2000317

[30511] C-PLACE2000341//&quot; Homo sapiens sodium-dependent multivitamin transporter (SMVT) mRNA, complete cds.&quot;//0//1554bp//99%//AF069307

[30512] C-PLACE2000366

[30513] C-PLACE2000373//F-SPONDIN PRECURSOR.//8.6E-16//371aa//28%//P35446

[30514] C-PLACE2000394

[30515] C-PLACE2000398I/LAR PROTEIN PRECURSOR (LEUKOCYTE ANTIGEN RELATED) (EC 3.1.3.48).116.3E-37//90aa/198%//P10586

[30516] C-PLACE2000411//&quot; Homo sapiens mRNA for KIAA1037 protein, partial cds.&quot;//0//2515bp//99%//AB028960

[30517] C-PLACE2000425

[30518] C-PLACE2000427//PROBABLE HELICASE MOT 1.//1 .2E-26//200aa//27%//P32333

[30519] C-PLACE2000433

[30520] C-PLACE2000438//&quot; POLYPEPTIDE N-ACETYLGALACTOSAMINYLTRANSFERASE (EC 2.4.1.41) (PROTEIN- UDP ACETYLGALACTOSAMINYLTRANSFERASE) (UDP-GALNAC:POLYPEPTIDE, N-ACETYLGALACTOSAMINYLTRANSFERASE) (GALNAC-Tl ).&quot;//2.1E-86//348aa//41% //Q10472

[30521] C-PLACE2000458//CADHERIN-RELATED TUMOR SUPPRESSOR PRECURSOR (FAT PROTEIN).//2.5E-25//165aa//40%//P33450

[30522] C-PLACE2000477//&quot; Homo sapiens putative secreted protein (ZSIG11) mRNA, complete cds.&quot;//6.7E-127//67 lbp//94%//AF072733

[30523] C-PLACE3000009

[30524] C-PLACE3000020//&quot; Homo sapiens type III adenylyl cyclase (AC-III) mRNA, complete cds.&quot;//0//2253bp//99%//AF033861

[30525] C-PLACE3000103

[30526] C-PLACE3000142

[30527] C-PLACE3000145//TENSIN.//1E-108//277aa/175%//Q04205

[30528] C-PLACE3000156

[30529] C-PLACE3000157

[30530] C-PLACE3000197

[30531] C-PLACE3000208

[30532] C-PLACE3000226//&quot; Homo sapiens mRNA for KIAA0962 protein, partial cds.&quot;//0//4805bp//99%//AB023179

[30533] C-PLACE3000242//&quot; Homo sapiens mRNA for KIAA1114 protein, complete cds.&quot;//0//2786bp//96%//AB029037

[30534] C-PLACE3000363

[30535] C-PLACE3000405

[30536] C-PLACE3000416//&quot; Homo sapiens mRNA for actin binding protein ABP620, complete cds.&quot;//1.80E-141//565bp//98%//AB029290

[30537] C-PLACE3000477

[30538] C-PLACE4000106//&quot; Homo sapiens mRNA for KIAA0462 protein, partial cds.&quot;//0//6702bp//99%//AB007931

[30539] C-PLACE4000323

[30540] C-PLACE4000326//NAM7 PROTEIN (NONSENSE-MEDIATED MRNA DECAY PROTEIN 1) (UP-FRAMESHIFT SUPPRESSOR 1).//8.10E-24//319aa//31%//P30771

[30541] C-PLACE4000369//&quot; Homo sapiens mRNA for KIAA1025 protein, partial cds.&quot;//0//4830bp//99%//AB028948

[30542] C-PLACE4000445//Homo sapiens mRNA; cDNA DKFZp434C212 (from clone DKFZp434C212).//0//2565bp//99%//AL080196

[30543] C-PLACE4000558//&quot; Homo sapiens mRNA for KIAA0729 protein, partial cds.&quot;//0//1051bp//97%//AB018272

[30544] C-PLACE4000581//FIBROPELLIN I PRECURSOR (EPIDERMAL GROWTH FACTOR-RELATED PROTEIN 1) (UEGF-1).//9.3E-70//226aa//52%//P10079

[30545] C-PLACE4000593

[30546] C-PLACE4000612//POL POLYPROTEIN [CONTAINS: PROTEASE (EC 3.4.23.-); REVERSE TRANSCRIPTASE (EC 2.7.7.49); ENDONUCLEASE].//7.1E-154//340aa//40%//P21414

[30547] C-PLACE4000670

[30548] C-THYRO1000026

[30549] C-THYRO1000085//&quot; PAIRED BOX PROTEIN PAX-8, ISOFORMS 8A/8B.&quot;//2E-72//155aa//92%//Q06710

[30550] C-THYRO1000107

[30551] C-THYRO1000111

[30552] C-THYRO1000132//&quot; Homo sapiens echinoderm microtubule-associated protein homolog HuEMAP mRNA, complete cds.&quot;//1.1E-159//824bp//95%//U97018

[30553] C-THYRO1000156

[30554] C-THYRO1000173//&quot; Homo sapiens AP-mu chain family member mulB (HSMU1B) mRNA, complete cds.&quot;//0//1713bp//99%//AF020797

[30555] C-THYRO1000186

[30556] C-THYRO1000187

[30557] C-THYRO1000241

[30558] C-THYRO1000279

[30559] C-THYROI 000327//&quot; Homo sapiens autocrine motility factor receptor (AMFR) mRNA, complete cds.&quot;//0//1567bp//99%//AF124145

[30560] C-THYRO1000452

[30561] C-THYRO1000471

[30562] C-THYRO1000484

[30563] C-THYRO1000502

[30564] C-THYRO1000505

[30565] C-THYRO1000585//&quot; Homo sapiens protein associated with Myc mRNA, complete cds.&quot;//0//1901bp//99%//AF075587

[30566] C-THYRO1000596

[30567] C-THYRO1000662//&quot; Homo sapiens XPV mRNA for DNA polymerase eta, complete cds.&quot;//0//2341bp//99%//AB024313

[30568] C-THYRO1000666//Mus musculus mRNA for kinesin like protein 9.//0//2001bp//86%//AJ132889

[30569] C-THYRO1000715

[30570] C-THYRO1000734

[30571] C-THYRO1000748//RHO-GAP HEMATOPOIETIC PROTEIN C I (P 115) (KIAA0131).//3.30E-96//335aa//52%//P98171

[30572] C-THYRO1000756//&quot; ALPHA-N-ACETYLGALACTOSAMINIDE ALPHA-2,6-SIALYLTRANSFERASE (EC 2.4.99.-) (ST6GALNACIII) (STY).&quot;//1.8E-55//243aa//42%//Q64686

[30573] C-THYRO1000777

[30574] C-THYRO1000783//&quot; Xenopus laevis tail-specific thyroid hormone up-regulated (gene 5) mRNA, complete cds.&quot;//2.4E-157//1656bp//70%//U37373

[30575] C-THYRO1000787

[30576] C-THYRO1000793

[30577] C-THYRO1000796

[30578] C-THYRO1000843

[30579] C-THYRO1000852//&quot; Human branched chain aminotransferase precursor (BCATm) mRNA, nuclear gene encoding mitochondrial protein, complete cds.&quot;//3.3E-147//790bp//93%//U68418

[30580] C-THYRO1000865

[30581] C-THYRO1000895

[30582] C-THYRO1000926//&quot; Homo sapiens cAMP-specific phosphodiesterase 8B (PDE8B) mRNA, partial cds.&quot;//0//2387bp//99%//AF079529

[30583] C-THYRO1000951//DIHYDROXYACETONE KINASE 2 (EC 2.7.1.29) (GLYCERONE KINASE).//5E-83//566aa//37%//P43550

[30584] C-THYRO1000952

[30585] C-THYRO1000983//UBIQUITIN-CONJUGATING ENZYME E2-17 KD 9 (EC 6.3.2.19) (UBIQUITIN-PROTEIN LIGASE 9) (UBIQUITIN CARRIER PROTEIN 9) (UBCAT4B).//6.30E-17//143aa//39%//P35132

[30586] C-THYRO1001003//UBIQUITIN-CONJUGATING ENZYME E2-21.2 KD (EC 6.3.2.19) (UBIQUITIN-PROTEIN LIGASE) (UBIQUITIN CARRIER PROTEIN).//5.90E-14//84aa//41%//P52491

[30587] C-THYRO1001031

[30588] C-THYRO1001062

[30589] C-THYRO1001100//ZINC FINGER X-LINKED PROTEIN ZXDA (FRAGMENT).//1.2E-67//245aa//62%//P98168

[30590] C-THYRO1001133

[30591] C-THYRO1001134//&quot; Homo sapiens CGI-78 protein mRNA, complete cds.&quot;//0//1898bp//99%//AF151835

[30592] C-THYRO1001173

[30593] C-THYRO1001213

[30594] C-THYRO1001321

[30595] C-THYRO1001322

[30596] C-THYRO1001365

[30597] C-THYRO1001401

[30598] C-THYRO1001411

[30599] C-THYRO1001434

[30600] C-THYRO1001534

[30601] C-THYRO1001541

[30602] C-THYRO1001559

[30603] C-THYRO1001570

[30604] C-THYRO1001595

[30605] C-THYRO11001605

[30606] C-THYRO1001617//Homo sapiens cDNA for dihydroxyacetone phosphate acyltransferase (DAP-AT).//0//1784bp/199%//AJ002190

[30607] C-THYRO1001656//&quot; Homo sapiens Leman coiled-coil protein (LCCP) mRNA, complete cds.&quot;//4.1E-273//1947bp//82%//AF175968

[30608] C-THYRO1001671//Homo sapiens mRNA for 2′-5′ oligoadenylate synthetase 59 kDa isoform.//0//1820bp//99%//AJ225089

[30609] C-THYRO1001673

[30610] C-THYRO1001703//NIFR3-LIKE PROTEIN.//2.90E-32//282aa//32%//P45672

[30611] C-THYRO1001706

[30612] C-THYRO1001738//TUBULIN-TYROSINE LIGASE (EC 6.3.2.25) (TTL).//2.4E-20//217aa//30%//P38584

[30613] C-THYRO1001745

[30614] C-THYRO1001793

[30615] C-THYRO1001809//MYOCYTE NUCLEAR FACTOR (MNF).//1.4E-74//158aa//89%//P42128

[30616] C-THYRO1001895

[30617] C-THYRO1001907

[30618] C-VESEN1000122

[30619] C-Y79AA1000037//DNA-BINDING PROTEIN BMI-1.//2.4E-30//80aa//60%//P25916

[30620] C-Y79AA1000059//&quot; Homo sapiens immunophilin homolog ARA9 mRNA, complete cds.&quot;//2.9E-70//1040bp//65%//U78521

[30621] C-Y79AA1000065

[30622] C-Y79AA1000131

[30623] C-Y79AA1000181//&quot; Homo sapiens CGI-01 protein mRNA, complete cds.&quot;//0//1858bp//99%//AF132936

[30624] C-Y79AA1000202

[30625] C-Y79AA1000214//&quot; Homo sapiens histone H2A.F/Z variant (H2AV) mRNA, complete cds.&quot;//7.1E-71 //345bp//100%//AF081192

[30626] C-Y79AA1000230

[30627] C-Y79AA1000258

[30628] C-Y79AA1000268//&quot; Mus musculus Nip21 mRNA, complete cds.&quot;//2.10E-50//648bp//64%//AF035207

[30629] C-Y79AA1000313//CALPHOTIN.//0.00001111336aa//23%//Q02910

[30630] C-Y79AA1000328//SEL-10 PROTEIN.//0.000000067//219aa//25%//Q93794

[30631] C-Y79AA1000355

[30632] C-Y79AA1000368//REDUCED VIABILITY UPON STARVATION PROTEIN 161.//4E-20//261aa//27%//P25343

[30633] C-Y79AA1000420

[30634] C-Y79AA1000469//&quot; Mus musculus ancient ubiquitous 46 kDa protein AUPI precursor (Aupl) mRNA, complete cds.&quot;//8.30E-252//1207bp//85%//U41736

[30635] C-Y79AA1000480

[30636] C-Y79AA1000540

[30637] C-Y79AA1000560//ALPHA-ADAPTIN C (CLATHRIN ASSEMBLY PROTEIN COMPLEX 2 ALPHA-C LARGE CHAIN) (100 KD COATED VESICLE PROTEIN C) (PLASMA MEMBRANE ADAPTOR HA2/AP2 ADAPTIN ALPHA C SUBUNIT).//0//652aa//98%//P17427

[30638] C-Y79AA1000574//Homo sapiens clone H17 unknown mRNA.//0//1932bp//99%//AF103801

[30639] C-Y79AA1000627//&quot; Homo sapiens zinc finger protein (ZF5128) mRNA, complete cds.&quot;//2E-287//2031bp//82%//AF060503

[30640] C-Y79AA1000705//M. musculus mRNA of enhancer-trap-locus 1.//5.80E-254//477bp//84%//X69942

[30641] C-Y79AA1000734//&quot; Homo sapiens peroxisomal biogenesis factor (PEXI lb) mRNA, complete cds.&quot;//0//1594bp//99%//AF093670

[30642] C-Y79AA1000748//&quot; Homo sapiens CGI-05 protein mRNA, complete cds.&quot;//1.9E-239//367bp//91%//AF152097

[30643] C-Y79AA1000752//PUTATIVE HETEROGENEOUS NUCLEAR RIBONUCLEOPROTEIN X (HNRNP X) (CBP).//4.9E-91 //200aa//64%//Q61990

[30644] C-Y79AA1000774

[30645] C-Y79AA1000782//CYTOSOLIC PURINE 5′-NUCLEOTIDASE (EC 3.1.3.5).//3E-37//469aa//27%//P49902

[30646] C-Y79AA1000784//&quot; Homo sapiens RanBP7/importin7 mRNA, complete cds.&quot;//1.0E-236//1076bp//99%//AF098799

[30647] C-Y79AA1000794//&quot; Homo sapiens actin-associated protein 2E4/kaptin (2E4) mRNA, 2E4-1 allele, complete cds.&quot;//0//1610bp//99%//AF105369

[30648] C-Y79AA1000800//&quot; Homo sapiens putative secreted protein (ZSIGI 1) mRNA, complete cds.&quot;//1.6E-284//1288bp//99%//AF072733

[30649] C-Y79AA1000805

[30650] C-Y79AA1000824

[30651] C-Y79AA1000833//TUBULIN ALPHA-1 CHAIN.//SE-173//220aa//79%//P05209

[30652] C-Y79AA1000850

[30653] C-Y79AA1000962//&quot; MYOSIN HEAVY CHAIN, NON-MUSCLE (ZIPPER PROTEIN) (MYOSIN II).&quot;//4.2E-17//430aa//27%//Q99323

[30654] C-Y79AA1000968//&quot; Rattus norvegicus initiation factor eIF-2B gamma subunit (eIF-2B gamma) mRNA, complete cds.&quot;//3.9E-248//1468bp//87%//U38253

[30655] C-Y79AA1000976

[30656] C-Y79AA1001023

[30657] C-Y79AA1001041

[30658] C-Y79AA1001048//&quot; ACYL-COA DEHYDROGENASE, VERY-LONG-CHAIN SPECIFIC PRECURSOR (EC 1.3.99.-) (VLCAD).&quot;//3.1E-138//583aa//47%//P45953

[30659] C-Y79AA1001077

[30660] C-Y79AA1001078

[30661] C-Y79AA1001145

[30662] C-Y79AA1001177

[30663] C-Y79AA1001185

[30664] C-Y79AA1001211//&quot; Homo sapiens origin recognition complex subunit 6 (ORC6) mRNA, complete cds.&quot;//0//1435bp//99%//AF139658

[30665] C-Y79AA1001228

[30666] C-Y79AA1001233//ESTRADIOL 17 BETA-DEHYDROGENASE 1 (EC 1.1.1.62) (17-BETA-HSD 1) (17-BETA-HYDROXYSTEROID DEHYDROGENASE 1).//7.7E-50//228aa//42%//P51657

[30667] C-Y79AA1001236//&quot; Homo sapiens mRNA for JM23 protein, complete coding sequence (clone IMAGE 34581 and IMAGE 45355 and LLNLc1101133Q7 (RZPD Berlin)).&quot;//0//1653bp//99%//AJ005892

[30668] C-Y79AA1001281

[30669] C-Y79AA1001312//ZINC FINGER PROTEIN MLZ-4 (ZINC FINGER PROTEIN 46).//0.000000023//H193aa//30%//Q03309

[30670] C-Y79AA1001323//&quot; Mus musculus mRNA for GSG 1, complete cds.&quot;//3.3E-172//17 lbp//83%//D87325

[30671] C-Y79AA1001391//HOMEOBOX PROTEIN HOX-A13 (HOX-IJ).//1.2E-58//78aa//66%//P31271

[30672] C-Y79AA1001394//CELL DIVISION PROTEIN FTSH HOMOLOG (EC 3.4.24.-).//1.2E-13//230aa//32%//O83746

[30673] C-Y79AA1001402//&quot; Homo sapiens paraneoplastic cancer-testis-brain antigen (MA4) mRNA, partial cds.&quot;//8.50E-65//784bp//62%//AF083115

[30674] C-Y79AA1001493//UBIQUITIN-CONJUGATING ENZYME E2-17 KD 9 (EC 6.3.2.19) (UBIQUITIN-PROTEIN LIGASE 9) (UBIQUITIN CARRIER PROTEIN 9) (UBCAT4B).//3.80E-18//151aa//38%//P35132

[30675] C-Y79AAI001533//&quot; Mouse mRNA for RNA polymerase I associated factor (PAF53), complete cds.&quot;//4.5E-193//333bp//80%//D 14336

[30676] C-Y79AA1001541

[30677] C-Y79AA1001548//PHOSPHATIDYLINOSITOL 4-KINASE ALPHA (EC 2.7.1.67) (PI4-KINASE) (PTDINS-4-KINASE) (PI4K-ALPHA).//7.5E-76//85aa//90%//P42356

[30678] C-Y79AA1001555

[30679] C-Y79AA1001581//ACETYL-COENZYME A SYNTHETASE (EC 6.2.1.1) (ACETATE-COA LIGASE) (ACYL- ACTIVATING ENZYME).//1.9E-40//482aa//27%//P27550

[30680] C-Y79AA1001585

[30681] C-Y79AA1001603//&quot; POLYPEPTIDE N-ACETYLGALACTOSAMINYLTRANSFERASE (EC 2.4.1.41) (PROTEIN- UDP ACETYLGALACTOSAMINYLTRANSFERASE) (UDP-GALNAC:POLYPEPTIDE, N-ACETYLGALACTOSAMINYLTRANSFERASE) (GALNAC-Tl).&quot;//1.7E-84//313aa//48%//Q07537

[30682] C-Y79AA1001613//ZINC FINGER PROTEIN 132.//3.8E-91//209aa//41%//P52740

[30683] C-Y79AA1001665

[30684] C-Y79AA1001679//&quot; Homo sapiens lambda-crystallin mRNA, complete cds.&quot;//3.4e-310//1430bp//98%//AF077049

[30685] C-Y79AA1001696//&quot; Homo sapiens mRNA for KIAA1109 protein, partial cds.&quot;//0//1669bp//100%//AB029032

[30686] C-Y79AA1001705//&quot; Homo sapiens p53 regulated PA26-T2 nuclear protein (PA26) mRNA, complete cds.&quot;//3 .4E-47//626bp//68% //AF033120

[30687] C-Y79AA1001711//&quot; Human 60-kdal ribonucleoprotein (Ro) mRNA, complete cds.&quot;//1.2E-258//1185bp//99%//J04137

[30688] C-Y79AA1001781

[30689] C-Y79AA1001805

[30690] C-Y79AA1001827//&quot; Homo sapiens mammalian inositol hexakisphosphate kinase 2 (IP6K2) mRNA, complete cds.&quot;//0//1689bp//98%//AF177145

[30691] C-Y79AA1001846

[30692] C-Y79AA1001923

[30693] C-Y79AA1001963//PUTATIVE PRE-MRNA SPLICING FACTOR ATP-DEPENDENT RNA HELICASE SPAC 10F6.02C.//1E-10//94aa//47%//O42643

[30694] C-Y79AA1002027//UBIQUITIN-CONJUGATING ENZYME E2-18 KD (EC 6.3.2.19) (UBIQUITIN- PROTEIN LIGASE) (UBIQUITIN CARRIER PROTEIN) (PM42).//9.9E-39//143aa//52%//P42743

[30695] C-Y79AA1002083//H. sapiens mRNA for MUF1 protein.//5E-163//752bp//99%//X86018

[30696] C-Y79AA1002089

[30697] C-Y79AA1002115

[30698] C-Y79AA1002125

[30699] C-Y79AA1002204

[30700] C-Y79AA1002208//ANKYRIN.//8.1E-34//188aa//38%//Q02357

[30701] C-Y79AA1002209//&quot; Homo sapiens CGI-04 protein mRNA, complete cds.&quot;//0//1617bp//99%//AF132939

[30702] C-Y79AA1002229//DNA CROSS-LINK REPAIR PROTEIN PSO2/SNM1.//7.10E-17//213aa//31%//P30620

[30703] C-Y79AA1002246//SYNAPTOTAGMIN V.111.6E-28//286aa//32%//O00445

[30704] C-Y79AA1002298

[30705] C-Y79AA1002307//&quot; Homo sapiens astrotactin2 (ASTN2) mRNA, complete cds.&quot;//0//1209bp//99%//AFI 16574

[30706] C-Y79AA1002311//R. norvegicus mRNA for cytosolic resiniferatoxin-binding protein.//2.9E-186//1130bp//82%//X67877

[30707] C-Y79AA1002351

[30708] C-Y79AA1002407

[30709] C-Y79AA1002433//&quot; Homo sapiens chromatin-specific transcription elongation factor FACT 140 kDa subunit mRNA, complete cds.&quot;//0//1545bp//96%//AF152961

[30710] C-Y79AA1002472//ZINC FINGER PROTEIN 91 (ZINC FINGER PROTEIN HTF10) (HPF7).//1.5E-136//472aa//49%//Q05481

[30711] Homology Search Result Data 13.

[30712] Data obtained by the homology search for full-length nucleotide sequences and deduced amino acid sequences. Each data includes Clone name, Definition in hit data, P value, Length of sequence to be compared, Homology, and Accession number (No.) of hit data. These items are shown in this order and separated by a double-slash mark, //.

[30713] C-HEMBA1000042

[30714] C-HEMBA1000141//Homo sapiens SUMO-1-specific protease (SSP 1) mRNA, complete cds.//0//1135bp//100%//AF196304

[30715] C-HEMBA1000150//H. sapiens gene for U5 snRNP-specific 200 kD protein.//2.50E-153//525bp//91%//Z70200

[30716] C-HEMBA1000213

[30717] C-HEMBA1000243

[30718] C-HEMBA1000244

[30719] C-HEMBA1000251

[30720] C-HEMBA1000338

[30721] C-HEMBA1000357

[30722] C-HEMBA1000376

[30723] C-HEMBA1000428

[30724] C-HEMBA1000469

[30725] C-HEMBA1000497

[30726] C-HEMBA1000561//ZINC FINGER PROTEIN 91 (ZINC FINGER PROTEIN HTFIO) (HPF7)/13.40E-37//674aa//25%//Q05481

[30727] C-HEMBA1000569//GPI-ANCHORED PROTEIN P137.//6.50E-19//265aa//32%//Q60865

[30728] C-HEMBA1000575

[30729] C-HEMBA1000591//PTB-ASSOCIATED SPLICING FACTOR (PSF).//2.20E-17//198aa//40%//P23246

[30730] C-HEMBA1000673

[30731] C-HEMBA1000702

[30732] C-HEMBA1000722

[30733] C-HEMBA1000726

[30734] C-HEMBA1000876

[30735] C-HEMBA1000942

[30736] C-HEMBA1000943

[30737] C-HEMBA1000960

[30738] C-HEMBA1000985

[30739] C-HEMBA1100019//CELL DIVISION CONTROL PROTEIN 2 HOMOLOG (EC 2.7.1.-) (P34 PROTEIN KINASE) (CYCLIN-DEPENDENT KINASE 1) (CDK1).//3.10E-10//70aa//58%//P06493

[30740] C-HEMBA1001020

[30741] C-HEMBA1001024

[30742] C-HEMBA1001026

[30743] C-HEMBA1001051

[30744] C-HEMBA1001060

[30745] C-HEMBA1001071//PROCOLLAGEN ALPHA 1(III) CHAIN PRECURSOR.//1.50E-92/182aa//100%//P02461

[30746] C-HEMBAI100077//Homo sapiens transcriptional intermediary factor 1 gamma mRNA, complete cds.//2.00E-80//432bp//94%//AF119043

[30747] C-HEMBA1001099

[30748] C-HEMBA1001121

[30749] C-HEMBA1001123

[30750] C-HEMBA1001208

[30751] C-HEMBA1001213

[30752] C-HEMBA1001226

[30753] C-HEMBA1001247

[30754] C-HEMBA1001299

[30755] C-HEMBA1001319

[30756] C-HEMBA1001323

[30757] C-HEMBA1001327

[30758] C-HEMBA1001361

[30759] C-HEMBA1001375

[30760] C-HEMBA1001377

[30761] C-HEMBA1001383

[30762] C-HEMBA1001391

[30763] C-HEMBA1001411

[30764] C-HEMBA1001432

[30765] C-HEMBA1001433

[30766] C-HEMBA1001435

[30767] C-HEMBA1001442

[30768] C-HEMBA1001463

[30769] C-HEMBA1001515

[30770] C-HEMBA1001522

[30771] C-HEMBA1001557

[30772] C-HEMBA1001566

[30773] C-HEMBA1001589

[30774] C-HEMBA1001608

[30775] C-HEMBA1001636

[30776] C-HEMBA1001647

[30777] C-HEMBA1001651

[30778] C-HEMBA1001658

[30779] C-HEMBA1001675//VACUOLAR PROTEIN SORTING-ASSOCIATED PROTEIN VPS9.//5.40E-09//101aa//35%//P54787

[30780] C-HEMBA1001712

[30781] C-HEMBA1001734//CADHERIN- I IPRECURSOR (OSTEOBLAST-CADHERIN) (OB-CADHERIN) (OSF-4).//1.10E-38//87aa//96%//P55288

[30782] C-HEMBA1001745

[30783] C-HEMBA1001750

[30784] C-HEMBA1001784

[30785] C-HEMBA1001791

[30786] C-HEMBA1001803

[30787] C-HEMBA1001820

[30788] C-HEMBA1001835

[30789] C-HEMBA1001888

[30790] C-HEMBA1001912

[30791] C-HEMBA1001915

[30792] C-HEMBA1001918

[30793] C-HEMBA1001940

[30794] C-HEMBA1001942

[30795] C-HEMBA1001964

[30796] C-HEMBA1002022

[30797] C-HEMBA1002039

[30798] C-HEMBA1002100

[30799] C-HEMBA1002113

[30800] C-HEMBA1002119

[30801] C-HEMBA1002139//LIM AND SH3 DOMAIN PROTEIN LASP-1 (MLN 50).//7.10E-05//51aa//49%//Q14847

[30802] C-HEMBA1002160

[30803] C-HEMBA1002162

[30804] C-HEMBA1002166

[30805] C-HEMBA1002185

[30806] C-HEMBA1002204

[30807] C-HEMBA1002328

[30808] C-HEMBA1002337

[30809] C-HEMBA1002348

[30810] C-HEMBA1002381

[30811] C-HEMBA1002486

[30812] C-HEMBA1002498

[30813] C-HEMBA1002538

[30814] C-HEMBA1002552

[30815] C-HEMBA1002555//Homo sapiens mSin3A associated polypeptide p30 mRNA, complete cds.//5.30E-51//768bp//68%//AF055993

[30816] C-HEMBA1002558

[30817] C-HEMBA1002621

[30818] C-HEMBA1002629

[30819] C-HEMBA1002645

[30820] C-HEMBA1002659

[30821] C-HEMBA1002661

[30822] C-HEMBA1002666

[30823] C-HEMBA1002678

[30824] C-HEMBA1002679

[30825] C-HEMBA1002712

[30826] C-HEMBA1002716

[30827] C-HEMBA1002742

[30828] C-HEMBA1002746//DNA POLYMERASE BETA (EC 2.7.7.7).//5.00E-37//268aa//34%//P06746

[30829] C-HEMBA1002748

[30830] C-HEMBA1002780

[30831] C-HEMBA1002801

[30832] C-HEMBA1002826

[30833] C-HEMBA1002833

[30834] C-HEMBA1002921

[30835] C-HEMBA1002934

[30836] C-HEMBA1002944

[30837] C-HEMBA1002968

[30838] C-HEMBA1003034

[30839] C-HEMBA1003037

[30840] C-HEMBA1003071I/INSULIN-LIKE GROWTH FACTOR BINDING PROTEIN COMPLEX ACID LABILE CHAIN PRECURSOR (ALS).//1.30E-09//121aa//40%//P35858

[30841] C-HEMBA1003078

[30842] C-HEMBA1003083

[30843] C-HEMBA1003086

[30844] C-HEMBA1003098//Homo sapiens NY-REN-6 antigen mRNA, partial cds.//6.20E-273//1253bp//99%//AF155096

[30845] C-HEMBA1003133

[30846] C-HEMBA1003142

[30847] C-HEMBA1003166

[30848] C-HEMBA1003197

[30849] C-HEMBA1003202

[30850] C-HEMBA1003220

[30851] C-HEMBA1003229

[30852] C-HEMBA1003276

[30853] C-HEMBA1003278

[30854] C-HEMBA1003328

[30855] C-HEMBA1003373

[30856] C-HEMBA1003597

[30857] C-HEMBA1003598

[30858] C-HEMBA1003656

[30859] C-HEMBA1003680//PUTATIVE AMINOPEPTIDASE ZK353.6 IN CHROMOSOME III (EC 3.4.1 I.-).112.40E-92//423aa//47%//P34629

[30860] C-HEMBA1003733

[30861] C-HEMBA1003742

[30862] C-HEMBA1003760//HYPOXIA-INDUCIBLE FACTOR 1 ALPHA (HIF-1 ALPHA) (ARNT INTERACTING PROTEIN) (MEMBER OF PAS PROTEIN 1) (MOP 1) (HIFI ALPHA).//3.70E-124//347aa//55%//Q16665

[30863] C-HEMBA1003803

[30864] C-HEMBA1003854

[30865] C-HEMBA1003926

[30866] C-HEMBA1003939

[30867] C-HEMBA1003987

[30868] C-HEMBA1004012

[30869] C-HEMBA1004015

[30870] C-HEMBA1004193

[30871] C-HEMBA1004225

[30872] C-HEMBA1004241

[30873] C-HEMBA1004267

[30874] C-HEMBA1004295//Homo sapiens NY-REN-25 antigen mRNA, partial cds.//9.40E-31//381bp//65%//AF155103

[30875] C-HEMBA1004354//CHL1 PROTEIN.//9.90E-26//130aa//42%//P22516

[30876] C-HEMBA1004356//H. sapiens MSSP-2 mRNA.//3.00E-243//573bp//98%//X77494

[30877] C-HEMBA1004396

[30878] C-HEMBA1004405

[30879] C-HEMBA1004433

[30880] C-HEMBA1004538

[30881] C-HEMBA1004542

[30882] C-HEMBA1004573

[30883] C-HEMBA1004577

[30884] C-HEMBA1004604//Homo sapiens COP9 complex subunit 7a mRNA, complete cds.//0//1612bp//99%//AF193844

[30885] C-HEMBA1004617

[30886] C-HEMBA1004631

[30887] C-HEMBA1004705

[30888] C-HEMBA1004733

[30889] C-HEMBA1004748

[30890] C-HEMBA1004778

[30891] C-HEMBA1004803

[30892] C-HEMBA1004807

[30893] C-HEMBA1004820

[30894] C-HEMBA1004865

[30895] C-HEMBA1004880

[30896] C-HEMBA1004900

[30897] C-HEMBA1004909

[30898] C-HEMBA1004960

[30899] C-HEMBA1004978

[30900] C-HEMBA1004980

[30901] C-HEMBA1004983

[30902] C-HEMBA1004995

[30903] C-HEMBA1005019//Homo sapiens mRNA for KIAA0648 protein, partial cds.//0/12212bp//99%//AB014548

[30904] C-HEMBA1005029//Homo sapiens CGI-13 protein mRNA, complete cds.//0//1487bp//99%//AF132947

[30905] C-HEMBA1005035

[30906] C-HEMBA1005039

[30907] C-HEMBA1005047//RAS-RELATED PROTEIN RAB-24 (RAB-16).//3.40E-101//106aa//98%//P35290

[30908] C-HEMBA1005050

[30909] C-HEMBA1005062

[30910] C-HEMBA1005066

[30911] C-HEMBA1005075

[30912] C-HEMBA1005079

[30913] C-HEMBA1005101/Homo sapiens SYT interacting protein SIP mRNA, complete cds.//0//2762bp//99%//AF080561

[30914] C-HEMBA1005123

[30915] C-HEMBA1005149

[30916] C-HEMBA1005152

[30917] C-HEMBA1005201//Homo sapiens CGI-07 protein mRNA, complete cds.//0//1608bp//99%//AF132941

[30918] C-HEMBA1005202//SIGNAL RECOGNITION PARTICLE 68 KD PROTEIN (SRP68).//1.90E-179//361aa//95%//Q00004

[30919] C-HEMBA1005223

[30920] C-HEMBA1005232

[30921] C-HEMBA1005241

[30922] C-HEMBA1005275

[30923] C-HEMBA1005293

[30924] C-HEMBA1005311

[30925] C-HEMBA1005338//Homo sapiens mRNA for matrilin-4, partial.//3.90E-241//1095bp//99%//AJ007581

[30926] C-HEMBA1005359//ZINC FINGER PROTEIN 137.//3.90E-85//206aa//69%//P52743

[30927] C-HEMBA1005367//Homo sapiens melastatin 1 (MLSNI) mRNA, complete cds.//9.00E-77//620bp//74%//AF071787

[30928] C-HEMBA1005374

[30929] C-HEMBA1005382

[30930] C-HEMBA1005411

[30931] C-HEMBA1005426

[30932] C-HEMBA1005443

[30933] C-HEMBA1005447

[30934] C-HEMBA1005497

[30935] C-HEMBA1005500

[30936] C-HEMBA1005506

[30937] C-HEMBA1005508

[30938] C-HEMBA1005526

[30939] C-HEMBA1005530//Homo sapiens anaphase-promoting complex subunit 7 (APC7) mRNA, complete cds.//0//1578bp//98%//AF191340

[30940] C-HEMBA1005548//Homo sapiens MAFB/Kreisler basic region/leucine zipper transcription factor (MAFB) mRNA, complete cds.//1.00E-220//1014bp//99%//AF134157

[30941] C-HEMBA1005552

[30942] C-HEMBA1005568

[30943] C-HEMBA1005588

[30944] C-HEMBA1005593

[30945] C-HEMBA1005606

[30946] C-HEMBA1005616

[30947] C-HEMBA1005627

[30948] C-HEMBA1005670

[30949] C-HEMBA1005679

[30950] C-HEMBA1005699

[30951] C-HEMBA1005705

[30952] C-HEMBA1005 732//Human mRNA for KIAA1293 gene, complete cds.//5.50E-102//317bp//98%//D 14697

[30953] C-HEMBA1005815//CALPAIN, LARGE [CATALYTIC] SUBUNIT (EC 3.4.22.17) (CALCIUM- ACTIVATED NEUTRAL PROTEINASE) (CANP) (MU/M-TYPE).//2.00E-36//342aa//33%//P00789

[30954] C-HEMBA1005852

[30955] C-HEMBA1005894

[30956] C-HEMBA1005921

[30957] C-HEMBA1006035

[30958] C-HEMBA1006036

[30959] C-HEMBA1006090

[30960] C-HEMBA1006138

[30961] C-HEMBA1006173

[30962] C-HEMBA1006252

[30963] C-HEMBA1006268//Homo sapiens HQOO24c mRNA, complete cds.//3.50E-15711845bp//92%//AF073836

[30964] C-HEMBA1006347//MALES-ABSENT ON THE FIRST PROTEIN (EC 2.3.1.-).//1.60E-130//332aa//62%//O02193

[30965] C-HEMBA1006359//ZINC FINGER PROTEIN 43 (ZINC PROTEIN HTF6).//3.50E-105//381aa/154%//P28160

[30966] C-HEMBA1006380

[30967] C-HEMBA1006416

[30968] C-HEMBA1006421

[30969] C-HEMBA1006424

[30970] C-HEMBA1006426

[30971] C-HEMBA1006446

[30972] C-HEMBA1006485//PUROMYCIN-SENSITIVE AMINOPEPTIDASE (EC 3.4.11.-) (PSA).//1.90E-81//153aa//97%//P55786

[30973] C-HEMBA1006486

[30974] C-HEMBA1006494

[30975] C-HEMBA1006546

[30976] C-HEMBA1006562

[30977] C-HEMBA1006595

[30978] C-HEMBA1006597

[30979] C-HEMBA1006631

[30980] C-HEMBA1006639

[30981] C-HEMBA1006652//60S RIBOSOMAL PROTEIN L7.1/2.40E-44//206aa//47%//P14148

[30982] C-HEMBA1006659

[30983] C-HEMBA1006665

[30984] C-HEMBA1006676

[30985] C-HEMBA1006695

[30986] C-HEMBA1006709

[30987] C-HEMBA1006758//Homo sapiens protocadherin beta 13 (PCDH-betal3) mRNA, complete cds.//0//1832bp//91%//AF152492

[30988] C-HEMBA1006780

[30989] C-HEMBA1006807//Homo sapiens mRNA for SPOP.//5.70E-125//1109bp//75%//AJ000644

[30990] C-HEMBA1006824

[30991] C-HEMBA1006865

[30992] C-HEMBA1006921

[30993] C-HEMBA1006949

[30994] C-HEMBA1006976//H. sapiens mRNA for Gal-beta(1-3/1-4)GlcNAc alpha-2.3-sialyltransferase.//1.90E-80//447bp//89%//X74570

[30995] C-HEMBA1007051

[30996] C-HEMBA1007052

[30997] C-HEMBA1007066

[30998] C-HEMBA1007073

[30999] C-HEMBA1007078

[31000] C-HEMBA1007085

[31001] C-HEMBA1007113

[31002] C-HEMBA1007121//Homo sapiens bisphosphate 3′-nucleotidase mRNA, complete cds.//1.70E-252//118bp//92%//AF125042

[31003] C-HEMBA1007129

[31004] C-HEMBA1007147

[31005] C-HEMBA1007151//Homo sapiens synphilin 1 mRNA, complete cds.//0/1900bp//99%//AF076929

[31006] C-HEMBA1007178

[31007] C-HEMBA1007203//Homo sapiens mRNA for KIAA0214 protein, complete cds.//0//1212bp//98%//D86987

[31008] C-HEMBA1007224//Homo sapiens SUMO-1-specific protease (SSP1) mRNA, complete cds.//0//1590bp//99%//AF196304

[31009] C-HEMBA1007243//Chinese hamster hprt mRNA, complete cds.//2.00E-58//650bp//70%//J00060

[31010] C-HEMBA1007251

[31011] C-HEMBA1007288

[31012] C-HEMBA1007322

[31013] C-HEMBA1007341

[31014] C-HEMBB1000050

[31015] C-HEMBB1000054

[31016] C-HEMBB1000059

[31017] C-HEMBB1000089

[31018] C-HEMBB1000113

[31019] C-HEMBB1000144//GUANYLATE CYCLASE ACTIVATING PROTEIN 2 (GCAP 2) (RETINAL GUANYLYL CYCLASE ACTIVATOR PROTEIN P24).//1.40E-24//71aa//77%//P51177

[31020] C-HEMBB1000173

[31021] C-HEMBB1000175

[31022] C-HEMBB1000272

[31023] C-HEMBB1000317//FIBULIN-1, ISOFORM D PRECURSOR.//7.10E-62//458aa//35%//P37888

[31024] C-HEMBB1000318

[31025] C-HEMBB1000336

[31026] C-HEMBB1000341

[31027] C-HEMBB1000343

[31028] C-HEMBB1000354

[31029] C-HEMBB1000374

[31030] C-HEMBB1000434

[31031] C-HEMBB1000441

[31032] C-HEMBB1000491

[31033] C-HEMBB1000493

[31034] C-HEMBB1000510

[31035] C-HEMBB1000652

[31036] C-HEMBB1000672

[31037] C-HEMBB1000684

[31038] C-HEMBB1000709

[31039] C-HEMBB1000726

[31040] C-HEMBB1000770

[31041] C-HEMBB1000827

[31042] C-HEMBB1000831

[31043] C-HEMBB1000883

[31044] C-HEMBB1000888

[31045] C-HEMBB1000893

[31046] C-HEMBB1000913

[31047] C-HEMBB1000996

[31048] C-HEMBB1001004

[31049] C-HEMBB1001047

[31050] C-HEMBB1001060

[31051] C-HEMBB1001114

[31052] C-HEMBB1001119

[31053] C-HEMBB1001133

[31054] C-HEMBB1001142

[31055] C-HEMBB1001177

[31056] C-HEMBB1001208

[31057] C-HEMBB1001209

[31058] C-HEMBB1001249

[31059] C-HEMBB1001253

[31060] C-HEMBB1001254

[31061] C-HEMBB1001271

[31062] C-HEMBB1001304

[31063] C-HEMBB1001317

[31064] C-HEMBB1001348

[31065] C-HEMBB1001394

[31066] C-HEMBB1001410

[31067] C-HEMBB1001424

[31068] C-HEMBB1001426

[31069] C-HEMBB1001429//Homo sapiens leucine aminopeptidase mRNA, complete cds.//0//1933bp//99%//AF061738

[31070] C-HEMBB1001436

[31071] C-HEMBB1100443//Rattus norvegicus pyruvate dehydrogenase phosphatase isoenzyme 1 mRNA, complete cds.//3.00E-130//553bp//86%//AF062740

[31072] C-HEMBB1001449

[31073] C-HEMBB1001458

[31074] C-HEMBB1001521

[31075] C-HEMBB1001531

[31076] C-HEMBB1001535

[31077] C-HEMBB1001536

[31078] C-HEMBB1001564

[31079] C-HEMBB1001565

[31080] C-HEMBB1001585

[31081] C-HEMBB1001588

[31082] C-HEMBB1001603

[31083] C-HEMBB1001618

[31084] C-HEMBB1001635

[31085] C-HEMBB1001653

[31086] C-HEMBB1001668

[31087] C-HEMBB1001673//Homo sapiens mRNA for KIAA0646 protein, complete cds.//0//2035bp//99%//AB014546

[31088] C-HEMBB1001685

[31089] C-HEMBB1001695

[31090] C-HEMBB1001707

[31091] C-HEMBB1001735

[31092] C-HEMBB1001736//EUKARYOTIC TRANSLATION INITIATION FACTOR 3 SUBUNIT 9 (EIF3 P116) (EIF3 P110).//4.60E-15//391aa//25%//P55884

[31093] C-HEMBB1001747

[31094] C-HEMBB1001749//TRANSCRIPTIONAL ACTIVATOR GCN5.//1.70E-16//84aa//47%//Q03330

[31095] C-HEMBB1001753

[31096] C-HEMBB1001756

[31097] C-HEMBB1001760

[31098] C-HEMBB1001785

[31099] C-HEMBB1001797

[31100] C-HEMBB1001802//Human desmin mRNA, complete cds.//0//1523bp//98%//U59167

[31101] C-HEMBB1001816

[31102] C-HEMBB1001831//Homo sapiens PAM COOH-terminal interactor protein I (PCIP 1) mRNA, complete cds.//0//1514bp//99%//AF056209

[31103] C-HEMBB1001839//GASTRULA ZINC FINGER PROTEIN XLCGF42.1 (FRAGMENT).//6.90E-1187aa//35%//P18720

[31104] C-HEMBB1001850

[31105] C-HEMBB1001863

[31106] C-HEMBB1001868

[31107] C-HEMBB1001874

[31108] C-HEMBB1001880

[31109] C-HEMBB1001899

[31110] C-HEMBB1001906

[31111] C-HEMBB1001910

[31112] C-HEMBB1001911

[31113] C-HEMBB1001921

[31114] C-HEMBB1001922

[31115] C-HEMBB1001930

[31116] C-HEMBB1001944

[31117] C-HEMBB1001945

[31118] C-HEMBB1001947

[31119] C-HEMBB1001950//PROBABLE OXYGEN-INDEPENDENT COPROPORPHYRINOGEN III OXIDASE (EC 1.-.-.-) (COPROPORPHYRINOGENASE) (COPROGEN OXIDASE).//1.60E-41//370aa//31%//P54304

[31120] C-HEMBB1001952

[31121] C-HEMBB1001957

[31122] C-HEMBB1001962

[31123] C-HEMBB1001983

[31124] C-HEMBB1001990

[31125] C-HEMBB1001996

[31126] C-HEMBB1002002

[31127] C-HEMBB1002005

[31128] C-HEMBB1002042//CYTOCHROME P450 4C I (EC 1.14.14.1) (CYPIVC 1).//2.70E-49//139aa//55%//P29981

[31129] C-HEMBB1002043

[31130] C-HEMBB1002045

[31131] C-HEMBB1002049

[31132] C-HEMBB1002050

[31133] C-HEMBB1002068

[31134] C-HEMBB1002092

[31135] C-HEMBB1002139

[31136] C-HEMBB1002142

[31137] C-HEMBB1002190

[31138] C-HEMBB1002193

[31139] C-HEMBB1002217//ZINC FINGER PROTEIN 91 (ZINC FINGER PROTEIN HTF10) (HPF7).//2.10E-132//399aa//44%//Q05481

[31140] C-HEMBB1002218

[31141] C-HEMBB1002232

[31142] C-HEMBB1002247

[31143] C-HEMBB1002249

[31144] C-HEMBB1002266//NEURONAL PROTEIN.//2.10E-46//121aa//76%//P41737

[31145] C-HEMBB1002327

[31146] C-HEMBB1002329

[31147] C-HEMBB1002342//Homo sapiens mRNA for putative thioredoxin-like protein.//1.0E-274//249bp//99%//AJ010841

[31148] C-HEMBB1002358

[31149] C-HEMBB1002371

[31150] C-HEMBB1002387

[31151] C-HEMBB1002409

[31152] C-HEMBB1002425

[31153] C-HEMBB1002442//LIN-10 PROTEIN.//9.70E-14//121aa//31%//P34692

[31154] C-HEMBB1002453

[31155] C-HEMBB1002458

[31156] C-HEMBB1002477//Human Grb2-associated binder-1 mRNA, complete cds.//7.70E-258//774bp//99%//U43885

[31157] C-HEMBB1002489

[31158] C-HEMBB1002510//GYP7 PROTEIN.//3.10E-50//192aa//42%//P48365

[31159] C-HEMBB1002520

[31160] C-HEMBB1002522

[31161] C-HEMBB1002545

[31162] C-HEMBB1002579

[31163] C-HEMBB1002582

[31164] C-HEMBB1002596

[31165] C-HEMBB1002603

[31166] C-HEMBB1002610

[31167] C-HEMBB1002613

[31168] C-HEMBB1002617

[31169] C-HEMBB1002623

[31170] C-HEMBB1002635

[31171] C-HEMBB1002677

[31172] C-HEMBB1002683

[31173] C-HEMBB1002699

[31174] C-HEMBB1002702

[31175] C-MAMMA1000009

[31176] C-MAMMA1000043

[31177] C-MAMMA1000045//ENV POLYPROTEIN [CONTAINS: SURFACE PROTEIN GP85; MEMBRANE PROTEIN GP37].//1.90E-07//249aa//27%//P03396

[31178] C-MAMMA1000057

[31179] C-MAMMA1000085//PUTATIVE CYSTEINYL-TRNA SYNTHETASE C29E6.06C (EC 6.1.1.16) (CYSTEINE-TRNA LIGASE) (CYSRS).//2.10E-90//427aa//39%//Q09860

[31180] C-MAMMA1000092

[31181] C-MAMMA1000103

[31182] C-MAMMA1000117

[31183] C-MAMMA1000129

[31184] C-MAMMA1000133

[31185] C-MAMMA1000155

[31186] C-MAMMA1000175

[31187] C-MAMMA1000198

[31188] C-MAMMA1000241

[31189] C-MAMMA1000251

[31190] C-MAMMA1000254

[31191] C-MAMMA1000287

[31192] C-MAMMA1000307

[31193] C-MAMMA1000331

[31194] C-MAMMA1000339

[31195] C-MAMMA1000340

[31196] C-MAMMA1000348

[31197] C-MAMMA1000356

[31198] C-MAMMA1000360

[31199] C-MAMMA1000402

[31200] C-MAMMA1000414

[31201] C-MAMMA1000431

[31202] C-MAMMA1000444

[31203] C-MAMMA1000458

[31204] C-MAMMA1000500

[31205] C-MAMMA1000522

[31206] C-MAMMA1000576

[31207] C-MAMMA1000583

[31208] C-MAMMA1000594

[31209] C-MAMMA1000605

[31210] C-MAMMA1000616

[31211] C-MAMMA1000643

[31212] C-MAMMA1000684//Homo sapiens 7-60 mRNA, complete cds.//0//2402bp//99%//AF109134

[31213] C-MAMMA1000696

[31214] C-MAMMA1000707

[31215] C-MAMMA1000714

[31216] C-MAMMA1000720

[31217] C-MAMMA1000744

[31218] C-MAMMA1000761

[31219] C-MAMMA1000776

[31220] C-MAMMA1000798

[31221] C-MAMMA1000839

[31222] C-MAMMA1000851

[31223] C-MAMMA1000863

[31224] C-MAMMA1000867

[31225] C-MAMMA1000876

[31226] C-MAMMA1000880

[31227] C-MAMMA1000883

[31228] C-MAMMA1000921

[31229] C-MAMMA1000931

[31230] C-MAMMA1000941

[31231] C-MAMMA1000957

[31232] C-MAMMA1000962

[31233] C-MAMMA1000975

[31234] C-MAMMA1000987

[31235] C-MAMMA1001003

[31236] C-MAMMA1001030//LUTROPIN-CHORIOGONADOTROPIC HORMONE RECEPTOR (LH/CG-R) (LSH-R) (LUTEINIZING HOROMINE RECEPTOR) (FRAGMENT).//1.20E-26//276aa//28%//Q90674

[31237] C-MAMMA1001038//MYOSIN LIGHT CHAIN KINASE, SMOOTH MUSCLE AND NON-MUSCLE ISOZYMES (EC 2.7.1.117) (MLCK) [CONTAINS: TELOKIN].//2.60E-107//190aa//95%//Q15746

[31238] C-MAMMA1001082

[31239] C-MAMMA1001162

[31240] C-MAMMA1001186

[31241] C-MAMMA1001191

[31242] C-MAMMA1001206

[31243] C-MAMMA1001220

[31244] C-MAMMA1001243

[31245] C-MAMMA1001249

[31246] C-MAMMA1001256

[31247] C-MAMMA1001268

[31248] C-MAMMA1001271

[31249] C-MAMMA1001274

[31250] C-MAMMA1001292

[31251] C-MAMMA1001305//RHO-GTPASE-ACTIVATING PROTEIN 1 (GTPASE-ACTIVATING PROTEIN RHOGAP) (RHO-RELATED SMALL GTPASE PROTEIN ACTIVATOR) (CDC42 GTPASE-ACTIVATING PROTEIN) (P50-RHOGAP).112.20E-98//283aa//63%//Q07960

[31252] C-MAMMA1001324

[31253] C-MAMMA1001341

[31254] C-MAMMA1001388//LEUCINE-RICH ALPHA-2-GLYCOPROTEIN (LRG).//1.40E-165//312aa//99%//P02750

[31255] C-MAMMA1001397

[31256] C-MAMMA1001408

[31257] C-MAMMA1001420

[31258] C-MAMMA1001442

[31259] C-MAMMA1001452

[31260] C-MAMMA1001465

[31261] C-MAMMA1001487

[31262] C-MAMMA1001501//CALPAIN 1, LARGE [CATALYTIC] SUBUNIT (EC 3.4.22.17) (CALCIUM-ACTIVATED NEUTRAL PROTEINASE) (CANP) (MU-TYPE).//5.70E-55//86aa//97%//P07384

[31263] C-MAMMA1001547

[31264] C-MAMMA1001551

[31265] C-MAMMA1001575

[31266] C-MAMMA1001590

[31267] C-MAMMA1001600

[31268] C-MAMMA1001606

[31269] C-MAMMA1001627//Homo sapiens mRNA for transcription factor TBX6.//5.20E-18911871bp//99%//AJ007989

[31270] C-MAMMA1001663

[31271] C-MAMMA1001670

[31272] C-MAMMA1001671

[31273] C-MAMMA1001679//F-ACTIN CAPPING PROTEIN BETA SUBUNIT (CAPZ).//0.00000058//29aa//100%//P47756

[31274] C-MAMMA1001711

[31275] C-MAMMA1001735//TUBULIN BETA-5 CHAIN (BETA-TUBULIN CLASS-V).//5.90E-240//445aa//97%//P09653

[31276] C-MAMMA1001744

[31277] C-MAMMA1001745

[31278] C-MAMMA11001751//Homo sapiens tandem pore domain potassium channel TWIK-2 (KCNK6) mRNA, complete cds.//0//233 2bp//99%//AF117708

[31279] C-MAMMA1001783

[31280] C-MAMMA1001788

[31281] C-MAMMA1001806

[31282] C-MAMMA1001812

[31283] C-MAMMA1001815

[31284] C-MAMMA1001817

[31285] C-MAMMA1001818

[31286] C-MAMMA1001820//Rattus norvegicus mRNA for PAG608 gene.//1.30E-198//1157bp//80%//Y 13148

[31287] C-MAMMA1001824

[31288] C-MAMMA1001851

[31289] C-MAMMA1001854

[31290] C-MAMMA1001864

[31291] C-MAMMA1001878

[31292] C-MAMMA1001890

[31293] C-MAMMA1001907

[31294] C-MAMMA1001908

[31295] C-MAMMA1001931

[31296] C-MAMMA1001969

[31297] C-MAMMA1002011

[31298] C-MAMMA1002032

[31299] C-MAMMA1002041

[31300] C-MAMMA1002047

[31301] C-MAMMA1002056

[31302] C-MAMMA1002058

[31303] C-MAMMA1002078

[31304] C-MAMMA1002082

[31305] C-MAMMA1002084

[31306] C-MAMMA1002093

[31307] C-MAMMA1002094

[31308] C-MAMMA1002118

[31309] C-MAMMA1002125

[31310] C-MAMMA1002132

[31311] C-MAMMA1002140

[31312] C-MAMMA1002143//Homo sapiens Cdc42 effector protein 4 mRNA, complete cds.//1.70E-252//170bp//99%//AF099664

[31313] C-MAMMA1002145

[31314] C-MAMMA1002198//THIOREDOXIN PEROXIDASE I (THIOREDOXIN-DEPENDENT PEROXIDE REDUCTASE 1) (THIOL-SPECIFIC ANTIOXIDANT PROTEIN) (TSA) (PRP) (NATURAL KILLER CELL ENHANCING FACTOR B) (NKEF-B).//5.20E-6//160aa//90%//P32119

[31315] C-MAMMA1002230

[31316] C-MAMMA1002250

[31317] C-MAMMA1002282

[31318] C-MAMMA1002293

[31319] C-MAMMA1002298

[31320] C-MAMMA1002299

[31321] C-MAMMA1002308

[31322] C-MAMMA1002310

[31323] C-MAMMA1002311

[31324] C-MAMMA1002322

[31325] C-MAMMA1002339

[31326] C-MAMMA1002352

[31327] C-MAMMA1002359

[31328] C-MAMMA1002360

[31329] C-MAMMA1002392

[31330] C-MAMMA1002411

[31331] C-MAMMA1002413

[31332] C-MAMMA1002417

[31333] C-MAMMA1002428//LYSOSOME MEMBRANE PROTEIN II (LIMP II) (85 KD LYSOSOMAL MEMBRANE SIALOGLYCOPROTEIN) (LGP85) (CD36 ANTIGEN-LIKE 2).11.10E-24//96aa//68%//Q14108

[31334] C-MAMMA1002434

[31335] C-MAMMA1002446

[31336] C-MAMMA1002454

[31337] C-MAMMA1002461

[31338] C-MAMMA1002475

[31339] C-MAMMA1002556

[31340] C-MAMMA1002566

[31341] C-MAMMA1002612

[31342] C-MAMMA1002622//VILLIN.//7.20E-35//53aa//64%//P02640

[31343] C-MAMMA1002637//KINESIN LIGHT CHAIN (KLC).//1.30E-198//550aa//70%//Q07866

[31344] C-MAMMA1002650//Mus musculus ODA-8S protein mRNA, complete cds.//5.40E-57//480bp//68%//AF194030

[31345] C-MAMMA1002699//Rattus norvegicus EH domain binding protein Epsin mRNA, complete cds.//4.3e-317//1942bp//85%//AF018261

[31346] C-MAMMA1002727

[31347] C-MAMMA1002748

[31348] C-MAMMA1002758

[31349] C-MAMMA1002780

[31350] C-MAMMA1002820

[31351] C-MAMMA1002833

[31352] C-MAMMA1002843

[31353] C-MAMMA1002895

[31354] C-MAMMA1002937//ZINC FINGER PROTEIN 135.18.30E-99//393aa//43%//P52742

[31355] C-MAMMA1003004

[31356] C-MAMMA1003047//Homo sapiens protein inhibitor of activated STAT protein PIASy mRNA, complete cds.//0//1533bp//99%//AF077952

[31357] C-NT2RM1000001//D. melanogaster sap47-2 mRNA.//H1.50E-10//417bp//62%//X80110

[31358] C-NT2RM1000018//Human mRNA for KIAA0066 gene, partial cds.110113376bp//99%//D31886

[31359] C-NT2RM1000037//Homo sapiens mRNA for KIAA0690 protein, partial cds.//1013551bp//99%//AB014590

[31360] C-NT2RM1000086//Homo sapiens mRNA for KIAA0661 protein, complete cds.//0//3035bp//96%//AB014561

[31361] C-NT2RM1000421//RIBONUCLEASE INHIBITOR.//4.40E-21//372aa//30%//P10775

[31362] C-NT2RM1000499

[31363] C-NT2RM1001059//NUCLEAR POLYADENYLATED RNA-BINDING PROTEIN NAB4.//3.60E-11//80aa//28%//Q99383

[31364] C-NT2RM1001092//ZINC FINGER PROTEIN 91 (ZINC FINGER PROTEIN HTFI0) (HPF7).//3.60E-115//332aa//52%//Q05481

[31365] C-NT2RM2001592//Homo sapiens mRNA for KIAA1067 protein, partial cds.11011347 lbp//99%//AB028990

[31366] C-NT2RM2001635//Homo sapiens mRNA for KIAA0618 protein, complete cds.//0//1632bp//99%//AB014518

[31367] C-NT2RM2001637

[31368] C-NT2RM2001641

[31369] C-NT2RM2001670//ZINC FINGER PROTEIN 29 (ZFP-29).//6.50E-104//407aa//43%//Q07230

[31370] C-NT2RM2001699

[31371] C-NT2RM2001706

[31372] C-NT2RM2001718

[31373] C-NT2RM2001727//Homo sapiens mRNA for KIAA0462 protein, partial cds.110//2892bp//99%//AB007931

[31374] C-NT2RM2001805

[31375] C-NT2RM4000086

[31376] C-NT2RM4000215//MAK16 PROTEIN.//1.30E-68//295aa//49%//P10962

[31377] C-NT2RM4000414

[31378] C-NT2RM4000590//RING CANAL PROTEIN (KELCH PROTEIN).//1.00E-59//595aa//28%//Q04652

[31379] C-NT2RM4000634

[31380] C-NT2RM4000657//Homo sapiens mRNA for KIAA1069 protein, partial cds.//0//1412bp//100%//AB028992

[31381] C-NT2RM4000783

[31382] C-NT2RM4000857//LEUCINE-RICH ALPHA-2-GLYCOPROTEIN (LRG).//6.70E-22//250aa//290%//P02750

[31383] C-NT2RM4000971

[31384] C-NT2RM4000996//ZINC FINGER PROTEIN 91 (ZINC FINGER PROTEIN HTFIO) (HPF7).//8.00E-211//738aa//50%//Q05481

[31385] C-NT2RM4001092//ZINC FINGER PROTEIN GLO3.13.10E-24//265aa//33%//P38682

[31386] C-NT2RM4001178//PROBABLE ATP-DEPENDENT RNA HELICASE HASI.//1.10E-48//218aa//43%//Q03532

[31387] C-NT2RM4001569

[31388] C-NT2RM4001819//Human p58/GTA (galactosyltransferase associated protein kinase) mRNA, complete cds.//8.10E-300//1395bp//98%//M37712

[31389] C-NT2RM4001905

[31390] C-NT2RM4001938//Homo sapiens mRNA for KIAA0898 protein, partial cds.//0//2234bp//99%//AB020705

[31391] C-NT2RM4002062//ASPARTYL-TRNA SYNTHETASE (EC 6.1.1.12) (ASPARTATE-TRNA LIGASE) (ASPRS).//1.90E-31//80aa//52%//P36419

[31392] C-NT2RM4002073//Mus musculus fatty acid transport protein 3 mRNA, partial cds.//9.30E-293//175 lbp//83%//AF072758

[31393] C-NT2RM4002093//Homo sapiens neural polypyrimidine tract binding protein (PTB) mRNA, complete cds.//0//2550bp//99%//AF176085

[31394] C-NT2RM4002109//Homo sapiens kinesin superfamily motor KIF4 mRNA, complete cds.//0//2572bp//99%//AF071592

[31395] C-NT2RM4002146//Homo sapiens MAGOH mRNA, complete cds.//6.90E-70//454bp//85%//AF035940

[31396] C-NT2RM4002194//Mus musculus semaphorin VIa mRNA, complete cds.//5.20E-297//753bp//87%//AF030430

[31397] C-NT2RM4002390

[31398] C-NT2RM4002398

[31399] C-NT2RM4002420

[31400] C-NT2RM4002534

[31401] C-NT2RM4002565//Mus musculus Sec8 mRNA, complete cds.//0//191Sbp//87%//AF022962

[31402] C-NT2RM4002571//H. sapiens mRNA for UDP-GaINAc:polypeptide N-acetylgalactosaminyltransferase (T2).//4.60E-781/921bp//69%//X85019

[31403] C-NT2RP1000358//Homo sapiens mRNA; cDNA DKFZp564C 186 (from clone DKFZp564C 186).//0//1938bp//88%//AL050019

[31404] C-NT2RP1000522//UBIQUITIN CARBOXYL-TERMINAL HYDROLASE DUB-1 (EC 3.1.2.15) (UBIQUITIN THIOLESTERASE DUB-1) (UBIQUITIN-SPECIFIC PROCESSING PROTEASE DUB-1) (DEUBIQUITINATING ENZYME 1).118.20E-83//345aa//47%//Q61068

[31405] C-NT2RP1000609//Homo sapiens mRNA; cDNA DKFZp586C201 (from clone DKFZp586C201).//0//2165bp//99%//AL050118

[31406] C-NT2RP1000677//SODIUM-INDEPENDENT ORGANIC ANION TRANSPORTER (ORGANIC ANION TRANSPORTING POLYPEPTIDE).//1.20E-78//483aa//31%//P46721

[31407] C-NT2RP1000701//Homo sapiens phospholipase A2 activating protein (PLA2P) mRNA, complete cds.//0//H1687bp//99%//AF145020

[31408] C-NT2RP1000834//Homo sapiens alpha-methylacyl-CoA racemase mRNA, complete cds.//1.80E-176//829bp//98%//AF047020

[31409] C-NT2RP1000860//Homo sapiens KL04P mRNA, complete cds.//0//iSSSbp//99%//AF064094

[31410] C-NT2RP1000916

[31411] C-NT2RP1000944

[31412] C-NT2RP1001079//Oryctolagus cuniculus sarcosine oxidase (SOX) mRNA, complete cds.//0//2085bp//99%//U82267

[31413] C-NT2RP1001080//PROBABLE ATP-DEPENDENT RNA HELICASE DBP9.//2.30E-116/319aa//46%//Q06218

[31414] C-NT2RP1001113

[31415] C-NT2RP1001173//Homo sapiens mRNA; cDNA DKFZpS66D1146 (from clone DKFZp566DI 146).//0//2333bp//99%//AL080222

[31416] C-NT2RP1001177//Rattus norvegicus histone macroH2A1.2 mRNA, complete cds.//5.20E-108//1278bp//69%//U79139

[31417] C-NT2RP1001185//Human isovaleryl-coA dehydrogenase (IVD) mRNA, complete cds.//1.90E-15811729bp//99%//M34192

[31418] C-NT2RP1001247//Homo sapiens TGF-beta type secreted signaling protein LEFTYA mRNA, complete cds.//0//2006bp//100%//AF081513

[31419] C-NT2RP1001311

[31420] C-NT2RP1001313//Homo sapiens delta-6 fatty acid desaturase mRNA, complete cds.//7.50E-121//1394bp//69%//AF126799

[31421] C-NT2RP2000001//Homo sapiens mRNA for KIAAI111 protein, partial cds.//0//3188bp//99%//AB029034

[31422] C-NT2RP2000027

[31423] C-NT2RP2000183//DIHYDROPYRIMIDINASE RELATED PROTEIN-2 (DRP-2) (NEURAL SPECIFIC PROTEIN NSP60).//3.30E-16//114aa//44%//O02675

[31424] C-NT2RP2000198

[31425] C-NT2RP2000523//APOLIPOPROTEIN B MRNA EDITING PROTEIN (HEPR) (APOBEC-1).//6.00E-16//124aa//34%//P41238

[31426] C-NT2RP2000551

[31427] C-NT2RP2000644

[31428] C-NT2RP2000660//SAP1 PROTEIN.//5.20E-68//474aa//32%//P39955

[31429] C-NT2RP2000678

[31430] C-NT2RP2000715

[31431] C-NT2RP2000842//Human lysophosphatidic acid receptor homolog mRNA, complete cds.//0//562bp//99%//U80811

[31432] C-NT2RP2000970

[31433] C-NT2RP2001347

[31434] C-NT2RP2001460//TRICHOHYALIN.//1.00E-14//521aa//24%//P37709

[31435] C-NT2RP2001613//MITOCHONDRIAL IMPORT RECEPTOR SUBUNIT TOM40 (MOM38 PROTEIN) (TRANSLOCASE OF OUTER MEMBRANE 40 KD SUBUNIT).//6.10E-12//84aa/131%//P24391

[31436] C-NT2RP2001634//Homo sapiens alpha-catenin-like protein mRNA, complete cds.//0//2445bp//99%//U97067

[31437] C-NT2RP2001660//Homo sapiens putative 13 S Golgi transport complex 90 kD subunit brain-specific isoform mRNA, complete cds.//0//1287bp//99%//AF058718

[31438] C-NT2RP2001677

[31439] C-NT2RP2001678

[31440] C-NT2RP2001720

[31441] C-NT2RP2001740//UBIQUITIN CARBOXYL-TERMINAL HYDROLASE DUB-1 (EC 3.1.2.15) (UBIQUITIN THIOLESTERASE DUB-1) (UBIQUITIN-SPECIFIC PROCESSING PROTEASE DUB-1) (DEUBIQUITINATING ENZYME 1).//7.90E-52//220aa//44%//Q61068

[31442] C-NT2RP2001756//ZINC FINGER PROTEIN 84 (ZINC FINGER PROTEIN HPF2).//1.70E-49//41 laa//32%//P51523

[31443] C-NT2RP2001839//SCY1 PROTEIN.//5.40E-32//621aa//24%//P53009

[31444] C-NT2RP2001861

[31445] C-NT2RP2001869//ZINC FINGER PROTEIN 191.//7.10E-26//126aa//52%//O14754

[31446] C-NT2RP2001876//ALLOGRAFT INFLAMMATORY FACTOR-1 (AIF-1) (IONIZED CALCIUM BINDING ADAPTER MOLECULE 1).//1.20E-45//141aa//65%//P55008

[31447] C-NT2RP2001898//Human inositol polyphosphate 5-phosphatase (5ptase) mRNA, 3′ end.//0//2518bp//98%//M74161

[31448] C-NT2RP2001936

[31449] C-NT2RP2001943

[31450] C-NT2RP2001946

[31451] C-NT2RP2002032

[31452] C-NT2RP2002033

[31453] C-NT2RP2002041

[31454] C-NT2RP2002047

[31455] C-NT2RP2002066//Rattus norvegicus transmembrane receptor Unc5H2 mRNA, complete cds.//1.60E-226//1301bp//88%//U87306

[31456] C-NT2RP2002124//Homo sapiens mRNA for KIAA1097 protein, partial cds.//0//1772bp//95%//AB029020

[31457] C-NT2RP2002172

[31458] C-NT2RP2002219

[31459] C-NT2RP2002256//Homo sapiens retinoic acid hydroxylase mRNA, complete cds.//0//1528bp//98%//AF005418

[31460] C-NT2RP2002316

[31461] C-NT2RP2002373

[31462] C-NT2RP2002439

[31463] C-NT2RP2002475

[31464] C-NT2RP2002546

[31465] C-NT2RP2002591//ZINC FINGER PROTEIN 84 (ZINC FINGER PROTEIN HPF2).//1.20E-155//562aa//50%//P51523

[31466] C-NT2RP2002606//Rattus norvegicus Rabin3 mRNA, complete cds.//9.20E-147//874bp//87%//U 19181

[31467] C-NT2RP2002643

[31468] C-NT2RP2002727//Rattus norvegicus tulip 2 mRNA, complete cds.//3.50E-7411727bp//72%//AF041107

[31469] C-NT2RP2002736

[31470] C-NT2RP2002740

[31471] C-NT2RP2002741//Homo sapiens mRNA for Neuroblastoma, complete cds.//9.90E-5411964bp//64%//D89016

[31472] C-NT2RP2002752

[31473] C-NT2RP2002753

[31474] C-NT2RP2002857

[31475] C-NT2RP2003000//TUMOR NECROSIS FACTOR, ALPHA-INDUCED PROTEIN 1, ENDOTHELIAL (B12 PROTEIN).//1.90E-11//32aa//38%//Q13829

[31476] C-NT2RP2003073

[31477] C-NT2RP2003164//Homo sapiens mRNA for protein kinase.//0//2313bp//99%//AJ132545

[31478] C-NT2RP2003206

[31479] C-NT2RP2003228//H. sapiens P1-Cdc21 mRNA.110112870bp//98%//X74794

[31480] C-NT2RP2003230//Rattus norvegicus endo-alpha-D-mannosidase (Enman) mRNA, complete cds.//2.60E-186//155 lbp//77%//AF023657

[31481] C-NT2RP2003237

[31482] C-NT2RP2003272//Homo sapiens ubiquilin mRNA, complete cds.//0//1789bp//99%//AF176069

[31483] C-NT2RP2003280

[31484] C-NT2RP2003293

[31485] C-NT2RP2003394//INTRACELLULAR PROTEIN TRANSPORT PROTEIN USO1.//5.50E-13//302aa//26%//P25386

[31486] C-NT2RP2003401//UBIQUITIN CARBOXYL-TERMINAL HYDROLASE DUB-1 (EC 3.1.2.15) (UBIQUITIN THIOLESTERASE DUB-1) (UBIQUITIN-SPECIFIC PROCESSING PROTEASE DUB-1) (DEUBIQUITINATING ENZYME 1).1/9.60E-78//346aa//43%//Q61068

[31487] C-NT2RP2003456

[31488] C-NT2RP2003517//Human c-sis/platelet-derived growth factor 2 (SIS/PDGF2) mRNA, complete cds.//0//1746bp//95%//M12783

[31489] C-NT2RP2003522//Homo sapiens zinc finger DNA binding protein 99 (ZNF281) mRNA, complete cds.//0//1764bp//99%//AF125158

[31490] C-NT2RP2003559

[31491] C-NT2RP2003564//52 KD RO PROTEIN (SJOGREN SYNDROME TYPE A ANTIGEN (SS-A)) (RO(SS-A)).//2.10E-59//270aa//46%//P19474

[31492] C-NT2RP2003581

[31493] C-NT2RP2003643//Mus musculus mRNA for CMP-N-acetylneuraminic acid synthetase.//9.40E-243//624bp//82%//AJ006215

[31494] C-NT2RP2003702//Homo sapiens 17 beta-hydroxysteroid dehydrogenase type VII (HSDI 7B7) mRNA, complete cds.//2.1e-3131/978bp//99%//AF098786

[31495] C-NT2RP2003704//Homo sapiens mRNA for ATP-dependent metalloprotease YMEI L.//1 .80E-72//350bp//100%//AJ132637

[31496] C-NT2RP2003727

[31497] C-NT2RP2003751

[31498] C-NT2RP2003781//HYPOTHETICAL 36.7 KD PROTEIN AH6.2 IN CHROMOSOME

[31499] II.//5.50E-63//253aa//50%//Q09201

[31500] C-NT2RP2003825

[31501] C-NT2RP2003871

[31502] C-NT2RP2003885

[31503] C-NT2RP2003912//SERINE/THREONINE-PROTEIN KINASE NEK1 (EC 2.7.1.-) (NIMA-RELATED PROTEIN KINASE 1).16.10E-1831387aa//87%//P51954

[31504] C-NT2RP2003976//Homo sapiens mRNA for KIAA0447 protein, complete cds.110112866bp//98%//AB007916

[31505] C-NT2RP2003988

[31506] C-NT2RP2004013//TRANSCRIPTION FACTOR BTF3 (RNA POLYMERASE B TRANSCRIPTION FACTOR 3).//2.30E-531/141aa//78%//P20290

[31507] C-NT2RP2004098//ADENYLATE CYCLASE (EC 4.6.1.1) (ATP PYROPHOSPHATE-LYASE) (ADENYLYL CYCLASE).//5.40E-3H0//319aa//31%//Q01513

[31508] C-NT2RP2004142

[31509] C-NT2RP2004170//Homo sapiens mRNA for transducin (beta) like 1 protein.//1.10E-138//11236bp//74%//YI 2781

[31510] C-NT2RP2004194//Rattus norvegicus Golgi SNARE GS15 mRNA, complete cds.//3.80E-52//397bp//82%//AF003998

[31511] C-NT2RP2004207

[31512] C-NT2RP2004226

[31513] C-NT2RP2004232//Homo sapiens EPK2 mRNA for serine/threonine kinase, complete cds.110112272bp//99%//AB015982

[31514] C-NT2RP2004242//NEUROFILAMENT TRIPLET H PROTEIN (200 KD NEUROFILAMENT PROTEIN) (NF-H).//9.90E-12//427aa//26%//P19246

[31515] C-NT2RP2004270//PROTEIN PTM1 PRECURSOR.//1.40E-16//334aa//24%//P32857

[31516] C-NT2RP2004321

[31517] C-NT2RP2004339

[31518] C-NT2RP2004347

[31519] C-NT2RP2004396//Homo sapiens mRNA for activator of S phase Kinase, complete cds.//5.40E-243//1108bp//99%//AB028069

[31520] C-NT2RP2004399

[31521] C-NT2RP2004400

[31522] C-NT2RP2004412

[31523] C-NT2RP2004425//Mus musculus axotrophin mRNA, complete cds.//1012321bp//86%//AFI 55739

[31524] C-NT2RP2004490

[31525] C-NT2RP2004523

[31526] C-NT2RP2004538//Mus musculus kinesin-like protein KIFIB (Kiflb) mRNA, complete cds.//0//1387bp//86%//AF090190

[31527] C-NT2RP2004580

[31528] C-NT2RP2004587//Homo sapiens mRNA for KIAA0888 protein, partial cds.//0//2886bp//100%//AB020695

[31529] C-NT2RP2004594

[31530] C-NT2RP2004681

[31531] C-NT2RP2004709

[31532] C-NT2RP2004710//Homo sapiens mRNA for KIAAI014 protein, partial cds.//0//2587bp//100%//AB023231

[31533] C-NT2RP2004732//Homo sapiens mRNA for KIAA0884 protein, partial cds.//0//1774bp//99%//AB020691

[31534] C-NT2RP2004767

[31535] C-NT2RP2004775

[31536] C-NT2RP2004961//Rattus norvegicus KRAB/zinc finger suppressor protein I (KS I) mRNA, complete cds.//1.00E-228//666bp//75%//U56732

[31537] C-NT2RP2004962

[31538] C-NT2RP2004982

[31539] C-NT2RP2005003//52 KD RO PROTEIN (SJOGREN SYNDROME TYPE A ANTIGEN (SS-A)) (RO(SS-A)).//1.80E-991/376aa//43%//P19474

[31540] C-NT2RP2005018

[31541] C-NT2RP2005020

[31542] C-NT2RP2005022

[31543] C-NT2RP2005031

[31544] C-NT2RP2005116//Homo sapiens mRNA for KIAA0664 protein, partial cds.//0//4069bp//99% //AB014564

[31545] C-NT2RP2005139//2-5A-DEPENDENT RIBONUCLEASE (EC 3.1.26.-) (2-5A-DEPENDENT RNAASE) (RNASE L) (RIBONUCLEASE 4) (FRAGMENT).//0.000000022//139aa//35%//Q05921

[31546] C-NT2RP2005168//Homo sapiens mRNA for El B-55 kDa-associated protein.//0//2769bp//98%//AJ007509

[31547] C-NT2RP2005254

[31548] C-NT2RP2005325//Homo sapiens LIM-homeodomain protein HLHX2 (LHX2) mRNA, complete cds.//0//11643bp//99%//AF124735

[31549] C-NT2RP2005336//TRICHOHYALIN.//5.40E-10//545aa/122%//P37709

[31550] C-NT2RP2005344//PROBABLE CALCIUM-TRANSPORTING ATPASE 5 (EC 3.6.1.38).//2.10E-124//636aa//38%//P32660

[31551] C-NT2RP2005360

[31552] C-NT2RP2005407//OXYSTEROL-BINDING PROTEIN.//5.30E-63//41 Oaa//40%//P22059

[31553] C-NT2RP2005454

[31554] C-NT2RP2005457//Homo sapiens NADH-ubiquinone oxidoreductase subunit B14.5B homolog mRNA, complete cds.//1.20E-130//608bp//99%//AF070652

[31555] C-NT2RP2005476//Human p190-B (pl90-B) mRNA, complete cds.//3.40E-10811668bp//88%//U 17032

[31556] C-NT2RP2005491//PARAMYOSIN (PMY) (ANTIGEN B).//0.00000015//279aa//26%//P35418

[31557] C-NT2RP2005496//ZINC FINGER PROTEIN 135.//2.90E-146//398aa/159%//P52742

[31558] C-NT2RP2005501

[31559] C-NT2RP200553 I //PROTEIN 4.1 (BAND 4.1) (P4.1).//5.50E-70//393aa//39% M/P 11171

[31560] C-NT2RP2005600//Homo sapiens mRNA for KIAA1020 protein, partial cds.//0//2554bp//99%//AB028943

[31561] C-NT2RP2005645

[31562] C-NT2RP2005694//X-LINKED RETINITIS PIGMENTOSA GTPASE REGULATOR.//2.60E-10//175aa/127%//Q92834

[31563] C-NT2RP2005701//ZINC-FINGER PROTEIN RFP (RET FINGER PROTEIN).//3.00E-63//323aa//39%//Q62158

[31564] C-NT2RP2005741

[31565] C-NT2RP2005806

[31566] C-NT2RP2005815

[31567] C-NT2RP2005841

[31568] C-NT2RP2005882

[31569] C-NT2RP2005942//POLY(A) POLYMERASE (EC 2.7.7.19) (PAP) (POLYNUCLEOTIDE ADENYLYLTRANSFERASE).//1.50E-67//388aa//44%//P25500

[31570] C-NT2RP2006103

[31571] C-NT2RP2006166

[31572] C-NT2RP2006258

[31573] C-NT2RP2006261

[31574] C-NT2RP2006321

[31575] C-NT2RP2006454

[31576] C-NT2RP2006598//Homo sapiens retinoid x receptor interacting protein mRNA, complete cds.//3.10E-295//1193bp//99%//AF113538

[31577] C-NT2RP3000046//MITOCHONDRIAL GTPASE MSSI PRECURSOR.//4.60E-78//421aa//37%//P32559

[31578] C-NT2RP3000047//NPL4 PROTEIN.//1.10E-85//526aa//36%//P33755

[31579] C-NT2RP3000418

[31580] C-NT2RP3000439//HYPOTHETICAL 46.4 KD PROTEIN IN FFH-GRPE INTERGENIC REGION.//2.90E-15//319aa//26%//P37908

[31581] C-NT2RP3000487

[31582] C-NT2RP3000512//Human HOX2G mRNA from the Hox2 locus.//0//1934bp//99%//X16667

[31583] C-NT2RP3000526

[31584] C-NT2RP3000603//NEUROGENIC DIFFERENTIATION FACTOR 1.//3.70E-1//190aa//42%//Q13562

[31585] C-NT2RP3000605//Mus musculus mRNA for wizL, complete cds.//0//2232bp//82%//AB012265

[31586] C-NT2RP3000628

[31587] C-NT2RP3000739//ATROPHIN-1 (DENTATORUBRAL-PALLIDOLUYSIAN ATROPHY PROTEIN).//1.40E-24//155aa//37%//Q10149

[31588] C-NT2RP3000845//PUTATIVE SERINE/THREONINE-PROTEIN KINASE P78 (EC 2.7.1.-).//8.30E-108//331aa//50%//P27448

[31589] C-NT2RP3000968//40S RIBOSOMAL PROTEIN SI 5A.//1.90E-46//73aa//98%//P39027

[31590] C-NT2RP3001057//ZINC FINGER PROTEIN 91 (ZINC FINGER PROTEIN HTF10) (HPF7).//9.00E-201//584aa//54%//Q05481

[31591] C-NT2RP3001113//INTRACELLULAR PROTEIN TRANSPORT PROTEIN USO1.//2.90E-11//631aa//23%//P25386

[31592] C-NT2RP3001245//Homo sapiens mRNA for KIAA0923 protein, complete cds.//0//2659bp//99%//AB023140

[31593] C-NT2RP3001253//NUF1 PROTEIN (SPINDLE POLY BODY SPACER PROTEIN SPC 110).//1.70E-10//540aa//23%//P32380

[31594] C-NT2RP3001356

[31595] C-NT2RP3001383

[31596] C-NT2RP3001399//SSU72 PROTEIN.//1.30E-16/184aa//52%//P53538

[31597] C-NT2RP3001554//MICROTUBULE-ASSOCIATED PROTEIN I B [CONTAINS: LIGHT CHAIN LC 1].//1.40E-76//388aa//32%//P46821

[31598] C-NT2RP3001712//Homo sapiens HP1-BP74 protein mRNA, complete cds.//0//1788bp//99%//AFI 13534

[31599] C-NT2RP3001724//Homo sapiens chromodomain-helicase-DNA-binding protein mRNA, complete cds.//1.10E-240//902bp//99%//AF054177

[31600] C-NT2RP3001727//Rattus norvegicus implantation-associated protein (IAG2) mRNA, partial cds.//6.90E-132//774bp//88%//AF008554

[31601] C-NT2RP3001730//SEPTIN 2 HOMOLOG (FRAGMENT).//7.10E-132//294aa//84%//Q14141

[31602] C-NT2RP3001739

[31603] C-NT2RP3001777

[31604] C-NT2RP3001857//VEGETATIBLE INCOMPATIBILITY PROTEIN HET-E-1.//1.20E-14//242aa//24%//Q00808

[31605] C-NT2RP3001943//Homo sapiens mRNA for KIAA0675 protein, complete cds.//0//3747bp//99%//AB014575

[31606] C-NT2RP3001944

[31607] C-NT2RP3002033

[31608] C-NT2RP3002054

[31609] C-NT2RP3002063//Homo sapiens mRNA for KIAA1033 protein, partial cds.//0//2830bp//99%//AB028956

[31610] C-NT2RP3002099

[31611] C-NT2RP3002102

[31612] C-NT2RP3002147

[31613] C-NT2RP3002163

[31614] C-NT2RP3002173

[31615] C-NT2RP3002255

[31616] C-NT2RP3002303//PROBABLE UNDECAPRENYL PYROPHOSPHATE SYNTHETASE (EC 2.5.1.31) (UPP SYNTHETASE) (DI-TRANS-POLY-CIS-DECAPRENYLCISTRANSFERASE).//8.60E-49//243aa//43%//Q58767

[31617] C-NT2RP3002343

[31618] C-NT2RP3002351//Human mRNA for NAD-dependent methylene tetrahydrofolate dehydrogenase cyclohydrolase (EC 1.5.1.15).//4.20E-70//590bp//76%//X16396

[31619] C-NT2RP3002399//DNA REPLICATION LICENSING FACTOR MCM4 (CDC21 HOMOLOG) (P I-CDC21).//8.60E-79//416aa//34%//P33991

[31620] C-NT2RP3002455//Homo sapiens mRNA for KIAA0678 protein, partial cds.//0//381 Ibp//99%//AB014578

[31621] C-NT2RP3002545//Homo sapiens mRNA; cDNA DKFZp586GO518 (from clone DKFZp586GO518).//0//2499bp//99%//AL050092

[31622] C-NT2RP3002549//HYPOTHETICAL 26.6 KD PROTEIN T19C3.4 IN CHROMOSOME III.//5.80E-40//161aa//52%//Q100

[31623] C-NT2RP3002602//PROBABLE PROTEIN DISULFIDE ISOMERASE ER-60 PRECURSOR (EC 5.3.4.1) (ERP60) (58 KD MICROSOMAL PROTEIN) (P58) (HIP-70) (Q-2).//2.90E-19//173aa//28%//P11598

[31624] C-NT2RP3002603

[31625] C-NT2RP3002628//PROBABLE PROTEIN DISULFIDE ISOMERASE P5 PRECURSOR (EC 5.3.4.1).//2.50E-26//90aa//42%//P38660

[31626] C-NT2RP3002659

[31627] C-NT2RP3002660

[31628] C-NT2RP3002682//Homo sapiens CGI-145 protein mRNA, complete cds.//0//1596bp/198%//AF151903

[31629] C-NT2RP3002687

[31630] C-NT2RP3002688//Mouse mRNA for kinesin-like protein (Kiflb), complete cds.//1.10E-93//205bp//69%//D17577

[31631] C-NT2RP3002701

[31632] C-NT2RP3002785//LETHAL(2)DENTICLELESS PROTEIN (DTL83 PROTEIN).//2.50E-55//187aa//39%//Q24371

[31633] C-NT2RP3002869//Mus musculus semaphorin VIa mRNA, complete cds.//2.50E-232//1282bp//85%//AF030430

[31634] C-NT2RP3002876

[31635] C-NT2RP3002877

[31636] C-NT2RP3002909//Homo sapiens mRNA for KIAA0771 protein, partial cds.//0//2085bp//94%//AB018314

[31637] C-NT2RP3002969//Homo sapiens mRNA for Acyl-CoA synthetase 3, complete cds.//0//2722bp//99%//D89053

[31638] C-NT2RP3002972//Halocynthia roretzi mRNA for HrPET-1, complete cds.//3.90E-52H1899bp//64%//AB029333

[31639] C-NT2RP3003032//Homo sapiens okadaic acid-inducible and cAMP-regulated phosphoprotein 19 (ARPP-19) mRNA, complete cds.//0//2656bp//99%//AF084555

[31640] C-NT2RP3003061//ANKYRIN.//1.40E-20//200aa//37%//Q02357

[31641] C-NT2RP3003071//NEUROGENIC PROTEIN BIG BRAIN.//1.10E-05//258aa//24%//P23645

[31642] C-NT2RP3003078

[31643] C-NT2RP3003139

[31644] C-NT2RP3003145//Mus musculus metallocarboxypeptidase CPX-1 mRNA, complete cds.//0//2251bp//81%//AF077738

[31645] C-NT2RP3003150

[31646] C-NT2RP3003197//HYPOTHETICAL 33.8 KD PROTEIN C5HI0.01 IN CHROMOSOME I.//5.70E-09//169aa//31%//Q09674

[31647] C-NT2RP3003203//Rattus norvegicus golgi stacking protein homolog GRASP55 mRNA, complete cds.//2.00E-210//1851bp//76%//AF110267

[31648] C-NT2RP3003210

[31649] C-NT2RP3003212//Rattus norvegicus lamina associated polypeptide IC (LAPIC) mRNA, complete cds.//4.30E-187//1750bp//75%//U20286

[31650] C-NT2RP3003230//Homo sapiens mRNA for hCRNN4, complete cds.//0//2350bp//99%//AB030656

[31651] C-NT2RP3003242//Homo sapiens stanniocalcin-related protein mRNA, complete cds.//0//2366bp//99%//AF098462

[31652] C-NT2RP3003251//52 KD RO PROTEIN (SJOGREN SYNDROME TYPE A ANTIGEN (SS-A)) (RO(SS-A)).//4.20E-86//366aa//48%//P19474

[31653] C-NT2RP3003301//MITOCHONDRIAL LON PROTEASE HOMOLOG I PRECURSOR (EC 3.4.21.-).//1.10E-170//585aa//54%//O64948

[31654] C-NT2RP3003311

[31655] C-NT2RP3003409//Human DHHC-domain-containing cysteine-rich protein mRNA, complete cds.//9.20E-45//782bp//65%//U90653

[31656] C-NT2RP3003427

[31657] C-NT2RP3003543

[31658] C-NT2RP3003552

[31659] C-NT2RP3003555//HYPOTHETICAL 32.6 KD PROTEIN IN MET30-PIG2 INTERGENIC REGION.//4.50E-30//191aa//40%//P40529

[31660] C-NT2RP3003564

[31661] C-NT2RP3003589//Homo sapiens ras-related GTP-binding protein mRNA, complete cds.//0//313 lbp//94%//AF106681

[31662] C-NT2RP3003621

[31663] C-NT2RP3003625

[31664] C-NT2RP3003656

[31665] C-NT2RP3003659//HES I PROTEIN.//5.90E-22//229aa//27%//P35843

[31666] C-NT2RP3003686

[31667] C-NT2RP3003701//F-SPONDIN PRECURSOR.//1.80E-17//324aa//26%//P35446

[31668] C-NT2RP3003716//SLIT PROTEIN PRECURSOR.//6.60E-10//150aa//34%//P24014

[31669] C-NT2RP3003726//Homo sapiens spermatogenesis associated PDI mRNA, complete cds.//0//2568bp//99%//U28164

[31670] C-NT2RP3003795

[31671] C-NT2RP3003805

[31672] C-NT2RP3003809//SAV PROTEIN.//1.10E-131//576aa/141%//Q07590

[31673] C-NT2RP3003819

[31674] C-NT2RP3003825//PHOSPHATIDYLCHOLINE TRANSFER PROTEIN (PC-TP).//9.60E-19//74aa/131%//P02720

[31675] C-NT2RP3003831//Homo sapiens ENDOGL-1 (alias ENGL-a) mRNA for endonuclease G-like protein-1, complete cds.//2.2e-316//436bp//99%//AB020523

[31676] C-NT2RP3003833

[31677] C-NT2RP3003842

[31678] C-NT2RP3003846//Homo sapiens mRNA for putative phospholipase, complete cds.//4.80E-277//1255bp//99%//AB019435

[31679] C-NT2RP3003870//Homo sapiens mRNA for KIAA0800 protein, complete cds.//0//2557bp//99%//AB018343

[31680] C-NT2RP3003876

[31681] C-NT2RP3003914//UDP-GLUCOSE:GLYCOPROTEIN GLUCOSYLTRANSFERASE PRECURSOR (EC 2.4.1.-) (DUGT).1/2.20E-20//176aa//64%//Q09332

[31682] C-NT2RP3003918//Homo sapiens VAMP-associated protein B (VAP-B) mRNA, complete cds.//0//2191bp//99%//AF086628

[31683] C-NT2RP3003989

[31684] C-NT2RP3004016//TRANSCRIPTION INTERMEDIARY FACTOR 1-BETA (NUCLEAR COREPRESSOR KAP-1) (KRAB-ASSOCIATED PROTEIN 1).//1.50E-17//226aa//26%//QI 3263

[31685] C-NT2RP3004070

[31686] C-NT2RP3004145

[31687] C-NT2RP3004215

[31688] C-NT2RP3004253

[31689] C-NT2RP3004282//Homo sapiens torsinA (DYTI) mRNA, complete cds.//5.l OE-24//597bp//61%//AF007871

[31690] C-NT2RP3004348//R. norvegicus mRNA for cytosolic resiniferatoxin-binding protein.//1.10E-185//1130bp//82%//X67877

[31691] C-NT2RP3004490//Homo sapiens PAC clone 166HI from 12q, complete sequence.//0//778bp//99%//AC003982

[31692] C-NT2RP3004503

[31693] C-NT2RP3004566//ZINC FINGER PROTEIN 84 (ZINC FINGER PROTEIN HPF2).//1.20E-95//434aa//43%//P51523

[31694] C-NT2RP3004670//Homo sapiens GN6ST mRNA for N-acetylglucosamine-6-O-sulfotransferas e (GlcNAc6ST), complete cds.110112393bp//99%//AB014679

[31695] C-NT2RP4000023

[31696] C-NT2RP4000218

[31697] C-NT2RP4000424

[31698] C-NT2RP4001213//ZINC FINGER PROTEIN 184 (FRAGMENT).//5.70E-141/151 laa//43%//Q99676

[31699] C-NT2RP4001447

[31700] C-NT2RP4001841

[31701] C-NT2RP4001849//SH3-BINDING PROTEIN 3BP-1.//1.40E-85//489aa//43%//P55194

[31702] C-NT2RP4002047//GTP-BINDING PROTEIN LEPA.//H1.50E-168//601aa//52%//O67618

[31703] C-NT2RP4002075

[31704] C-NT2RP4002083

[31705] C-OVARC1000001//Homo sapiens mRNA for actin binding protein ABP620, complete cds.//7.00E-217//683bp//99%//AB029290

[31706] C-OVARC1000008

[31707] C-OVARC1000017

[31708] C-OVARC1000058

[31709] C-OVARC1000068

[31710] C-OVARC1000071//Homo sapiens NTF2-related export protein NXT1 (NXT1) mRNA, complete cds.//1.50E-47/1727bp/167%//AF156957

[31711] C-OVARC1000085//Human mRNA for proteasome subunit HC5.//1.00E-151//699bp//100%//D00761

[31712] C-OVARC1000109

[31713] C-OVARC1000114

[31714] C-OVARC1000145

[31715] C-OVARC1000240

[31716] C-OVARC1000302

[31717] C-OVARC1000408

[31718] C-OVARC1000414

[31719] C-OVARC1000440

[31720] C-OVARC1000442

[31721] C-OVARC1000496

[31722] C-OVARC1000556//RIBOSOMAL PROTEIN S6 KINASE II ALPHA 2 (EC 2.7.1.-) (S6KII-ALPHA 2) (P90-RSK 2) (RIBOSOMAL S6 KINASE 3) (RSK3) (PP90RSK3).//3.30E-67//132aa//95%//Q15349

[31723] C-OVARC1000557

[31724] C-OVARC1000578

[31725] C-OVARC1000622

[31726] C-OVARC1000679//Homo sapiens myosin-IXa mRNA, complete cds.11011808bp//99%//AF17888

[31727] C-OVARC1000681

[31728] C-OVARC1000700

[31729] C-OVARC1000724

[31730] C-OVARC1000751//PROBABLE PROTEIN PHOSPHATASE 2C T23Fl 1.1 (EC 3.1.3.16) (PP2C).//5.60E-1//174aa//37%//P49596

[31731] C-OVARC1000800//MITOCHONDRIAL STRESS-70 PROTEIN PRECURSOR (75 KD GLUCOSE REGULATED PROTEIN) (GRP75).//3.90E-46H178aa//98%//O35501

[31732] C-OVARC1000885//OXIDOREDUCTASE UCPA (EC 1.-.-.-).//1.30E-32//170aa//34%//P37440

[31733] C-OVARC1000936//COAT PROTEIN GP37 (ENV PROTEIN GP37).//0.0000054//135aa//28%//P03398

[31734] C-OVARC1000937//S-PHASE ENTRY CYCLIN 6.//4.90E-10//61aaaa//49%//P32943

[31735] C-OVARC1000960

[31736] C-OVARC1000971

[31737] C-OVARC1000999//ANKYRIN HOMOLOG PRECURSOR.//4.10E-11189aa//3 2%//Q06527

[31738] C-OVARC1001000

[31739] C-OVARC1001029

[31740] C-OVARC1001040

[31741] C-OVARC1001051//EPIDERMAL GROWTH FACTOR RECEPTOR SUBSTRATE SUBSTRATE 15 (PROTEIN EPS15) (AF-IP PROTEIN).//1.10E-08//216aa//23%//P42566

[31742] C-OVARC1001113//Homo sapiens diaphanous 1 (HDIA1) mRNA, complete cds.//5.1e-310//588bp//93%//AF051782

[31743] C-OVARC1100118

[31744] C-OVARC1001129

[31745] C-OVARC1001169

[31746] C-OVARC1001240

[31747] C-OVARC1001261

[31748] C-OVARC1001339

[31749] C-OVARC1001342//40S RIBOSOMAL PROTEIN S8.//1.40E-110//207aa//99%//P09058

[31750] C-OVARC1001357

[31751] C-OVARC1001442

[31752] C-OVARC1001611

[31753] C-OVARC1001813

[31754] C-OVARC1002112//Homo sapiens histone macroH2A1.2 mRNA, complete cds.//0//1760bp//99%//AF054174

[31755] C-OVARC1002143

[31756] C-OVARC1002165//3-OXO-5-ALPHA-STEROID 4-DEHYDROGENASE 2 (EC 1.3.99.5) (STEROID 5-ALPHA-REDUCTASE 2) (SR TYPE 2).//7.60E-08//14aa//37%//P31213

[31757] C-OVARC1002182//BETA-TRCP (BETA-TRANSDUCIN REPEAT-CONTAINING PROTEIN) (BTRCP).//1.70E-09//207aa//30%//Q91854

[31758] C-PLACE1000014

[31759] C-PLACE1000078

[31760] C-PLACE1000492//Rat vacuolar protein sorting homolog r-vps33b mRNA, complete cds.//1012041bp//87%//U35245

[31761] C-PLACE1000793//NEUROGENIC PROTEIN BIG BRAIN.//1.70E-07//251aa//24%//P23645

[31762] C-PLACE1000814

[31763] C-PLACE1000979//ZINC FINGER PROTEIN 135.//2.50E-153//326aa//64%//P52742

[31764] C-PLACE1001007

[31765] C-PLACE1001054//Homo sapiens mRNA for RuvB-like DNA helicase TIP49b, complete cds.//4.00E-300//1355bp//100%//AB024301

[31766] C-PLACE1001088

[31767] C-PLACE1001136

[31768] C-PLACE1001241

[31769] C-PLACE1001377//Homo sapiens ADAM10 (ADAM10) mRNA, complete cds.//5.90E-22811827bp//99%//AF009615

[31770] C-PLACE1001395

[31771] C-PLACE1001740

[31772] C-PLACE1001746

[31773] C-PLACE1001983//HYPOTHETICAL 46.4 KD PROTEIN IN FFH-GRPE INTERGENIC REGION.//7.50E-16//319aa//26%//P37908

[31774] C-PLACE1002066

[31775] C-PLACE1002115

[31776] C-PLACE1002213

[31777] C-PLACE1002342//Homo sapiens mRNA for KIAA0728 protein, partial cds.//1011657bp//98%//AB018271

[31778] C-PLACE1002450//Human zinc finger protein mRNA, complete cds.//0//2565bp//99%//U69274

[31779] C-PLACE1002474//Mus musculus matrilin-2 precursor mRNA, complete cds.110112092bp//84%//U69262

[31780] C-PLACE1002499

[31781] C-PLACE1002578

[31782] C-PLACE1002714

[31783] C-PLACE1002772

[31784] C-PLACE1002775//PEREGRIN (BR1 +L40 PROTEIN).//3 .80E-13//272aa//28%//P55201

[31785] C-PLACE1002834//ZINC FINGER PROTEIN 83 (ZINC FINGER PROTEIN HPF1).//5.50E-203//396aa//86%//P51522

[31786] C-PLACE1002993

[31787] C-PLACE1003030//Homo sapiens snRNA activating protein complex 190 kD subunit (SNAP 190) mRNA, complete cds.//8.50E-44//225bp//100%//AF032387

[31788] C-PLACE1003205

[31789] C-PLACE1003249

[31790] C-PLACE1003493//ENDOTHELIAL CELL MULTIMERIN PRECURSOR.//1.70E-23//594aa//33%//P28481

[31791] C-PLACE1003553

[31792] C-PLACE1003592

[31793] C-PLACE1003596//OLIGOSACCHARYL TRANSFERASE STT3 SUBUNIT HOMOLOG.//2.60E-93//270aa//66%//P46975

[31794] C-PLACE1003669//TRICHOHYALIN.//5.60E-09//219aa//30%//P22793

[31795] C-PLACE1003709//Homo sapiens mitotic checkpoint kinase Bub1 (BUB1) mRNA, complete cds.//6.20E-282//1316bp//98%//AF053305

[31796] C-PLACE1003870

[31797] C-PLACE1003885//POLY(A) POLYMERASE (EC 2.7.7.19) (PAP) (POLYNUCLEOTIDE ADENYLYLTRANSFERASE).//3 .70E-222//65 I aa//66%//P25500

[31798] C-PLACE1003892

[31799] C-PLACE1003900

[31800] C-PLACE1004336

[31801] C-PLACE1004384

[31802] C-PLACE1004425

[31803] C-PLACE1004471//ZINC FINGER PROTEIN 83 (ZINC FINGER PROTEIN HPF1).//2.90E-56//276aa//41%//P51522

[31804] C-PLACE1004506//Homo sapiens carboxyl terminal LIM domain protein (CLIMI) mRNA, complete cds.//2.10E-1611402bp//62%//U90878

[31805] C-PLACE1004518

[31806] C-PLACE1004550//Homo sapiens CGI-20 protein mRNA, complete cds.//3.50E-274//305bp//97%//AF132954

[31807] C-PLACE1004681

[31808] C-PLACE1004693

[31809] C-PLACE1004716//Homo sapiens HSPCO38 protein mRNA, complete cds.//2.70E-10311586bp//91% IIAF125099

[31810] C-PLACE1004815

[31811] C-PLACE1004836

[31812] C-PLACE1004838

[31813] C-PLACE1004840

[31814] C-PLACE1004900

[31815] C-PLACE1004985

[31816] C-PLACE1005085

[31817] C-PLACE1005086

[31818] C-PLACE1005108

[31819] C-PLACE1005146

[31820] C-PLACE1005409

[31821] C-PLACE1005453

[31822] C-PLACE1005477

[31823] C-PLACE1005557//60S RIBOSOMAL PROTEIN L27.//1.90E-11//60aa//48%//P46288

[31824] C-PLACE1005595

[31825] C-PLACE1005603

[31826] C-PLACE1005639

[31827] C-PLACE1005727//Homo sapiens STRIN protein (STRIN) mRNA, complete cds.//2.00E-118//378bp//98%//AF162680

[31828] C-PLACE1005799

[31829] C-PLACE1005813//Homo sapiens sorting nexin 2 (SNX2) mRNA, complete cds.//01/2040bp//99%//AF065482

[31830] C-PLACE1005884

[31831] C-PLACE1005968

[31832] C-PLACE1006002

[31833] C-PLACE1006003//Homo sapiens CGI-94 protein mRNA, complete cds.//2.40E-17711829bp//99%//AF151852

[31834] C-PLACE1006017

[31835] C-PLACE1006037

[31836] C-PLACE1006076

[31837] C-PLACE1006143

[31838] C-PLACE1006248//Homo sapiens mRNA for KIAA0648 protein, partial cds.//10/11489bp//100%//AB014548

[31839] C-PLACE1006288//VOLTAGE-DEPENDENT ANION-SELECTIVE CHANNEL PROTEIN 1 (VDAC1) (PLASMALEMMAL PORIN) (OUTER MITOCHONDRIAL MEMBRANE PROTEIN PORIN) (PORIN 31HL) (PORIN 31HM).//4.60E-117//147aa//80%//P21796

[31840] C-PLACE1006318//Mus musculus skm-BOP2 (Bop) mRNA, complete cds.//3.00E-07//376bp//59%//U76374

[31841] C-PLACE1006368//HYALURONAN-MEDIATED MOTILITY RECEPTOR (HYALURONIC ACID RECEPTOR).//1.30E-18//460aa//24%//Q00547

[31842] C-PLACE1006371

[31843] C-PLACE1006469//ACETYL-COENZYME A SYNTHETASE (EC 6.2.1.1) (ACETATE-COA LIGASE) (ACYL- ACTIVATING ENZYME).//1.20E-83//313aa//49%//P27550

[31844] C-PLACE1006506//Homo sapiens anaphase-promoting complex subunit 4 (APC4) mRNA, complete cds.//0//2170bp//99%//AF191338

[31845] C-PLACE1006521

[31846] C-PLACE1006534//Homo sapiens mRNA; cDNA DKFZp564G1964 (from clone DKFZp564G 1964).//1.70E-19211883bp//99%//AL110144

[31847] C-PLACE1006617

[31848] C-PLACE1006640

[31849] C-PLACE1006754//BILIARY GLYCOPROTEIN 1 PRECURSOR (BGP-1) (ANTIGEN CD66) (CD66A ANTIGEN).//6.20E-63//191aa//43%//P 13688

[31850] C-PLACE1006760

[31851] C-PLACE1006779

[31852] C-PLACE1006805

[31853] C-PLACE1006815

[31854] C-PLACE1006867

[31855] C-PLACE1007045

[31856] C-PLACE1007097

[31857] C-PLACE1007111

[31858] C-PLACE1007112

[31859] C-PLACE1007140//Homo sapiens mRNA for KIAA1009 protein, complete cds.//0//3492bp//99%//AB023226

[31860] C-PLACE1007218

[31861] C-PLACE1007454

[31862] C-PLACE1007478

[31863] C-PLACE1007677

[31864] C-PLACE1007705//Mus musculus mRNA for Ndr1 related protein Ndr3, complete cds.//1.10E-184//1096bp//82%//AB033922

[31865] C-PLACE1007737

[31866] C-PLACE1007743

[31867] C-PLACE1007852//Homo sapiens mRNA for KIAA0878 protein, complete cds.//1.00E-232//174bp//94%//AB020685

[31868] C-PLACE1007877

[31869] C-PLACE1008045

[31870] C-PLACE1008080//Homo sapiens mRNA for HEXIMI protein, complete cds.//0//2152bp//99%//AB021179

[31871] C-PLACE1008111//PROBABLE OXIDOREDUCTASE (EC 1.-.-.-).//3.00E-25//208aa/137%//Q03326

[31872] C-PLACE1008201//Rattus rattus zinc finger protein, complete cds.11//02265bp//83%//L23077

[31873] C-PLACE1008231

[31874] C-PLACE1008244//VEGETATIBLE INCOMPATIBILITY PROTEIN HET-E-1.//9.50E-21//48aa//38%//Q00808

[31875] C-PLACE1008330//EOSINOPHIL LYSOPHOSPHOLIPASE (EC 3.1.1.5) (CHARCOT-LEYDEN CRYSTAL PROTEIN) (LYSOLECITHIN ACYLHYDROLASE) (CLC) (GALACTIN-10).112.20E-23/194aa//47%//Q05315

[31876] C-PLACE1008331

[31877] C-PLACE1008369

[31878] C-PLACE1008392

[31879] C-PLACE1008405

[31880] C-PLACE1008424

[31881] C-PLACE1008584

[31882] C-PLACE1008625

[31883] C-PLACE1008630

[31884] C-PLACE1008643//INTER-ALPHA-TRYPSIN INHIBITOR HEAVY CHAIN H2 PRECURSOR (ITI HEAVY CHAIN H2).//5.20E-90//483aa//38%//O02668

[31885] C-PLACE1008715

[31886] C-PLACE1008748

[31887] C-PLACE1008757

[31888] C-PLACE1008798

[31889] C-PLACE1008851

[31890] C-PLACE1008947

[31891] C-PLACE1009039

[31892] C-PLACE1009048

[31893] C-PLACE1009050

[31894] C-PLACE1009113//Homo sapiens X-ray repair cross-complementing protein 3 (XRCC3) mRNA, complete cds.//0//2529bp//99%//AF035586

[31895] C-PLACE1009150

[31896] C-PLACE1009200

[31897] C-PLACE1009246//POLLEN SPECIFIC PROTEIN SF3.//4.40E-16//82aa//43%//P29675

[31898] C-PLACE1009298//Homo sapiens vacuolar sorting protein 35 (VPS35) mRNA, complete cds.//0//2262bp//99%//AF191298

[31899] C-PLACE1009308//GLUCOSE REPRESSION MEDIATOR PROTEIN.//4.00E-06//439aa//23%//P14922

[31900] C-PLACE1009398//ZINC FINGER PROTEIN 135.//6.20E-97//361aa//51%//P52742

[31901] C-PLACE1009410

[31902] C-PLACE1009477//Homo sapiens mRNA for KIAA0684 protein, partial cds.//6.50E-14811592bp//99%//AB014584

[31903] C-PLACE1009493

[31904] C-PLACE1009539

[31905] C-PLACE1009595 45 C-PLACE1009637

[31906] C-PLACE1009639

[31907] C-PLACE1009798//RLR I PROTEIN.//1 .60E-18//270aa//23%//P53552

[31908] C-PLACE1009861//CATHEPSIN B-LIKE CYSTEINE PROTEINASE 6 PRECURSOR (EC 3.4.22.-).116.50E-28//209aa//38%//P43510

[31909] C-PLACE1009888

[31910] C-PLACE1009925//Homo sapiens RNA helicase (RIG-1) mRNA, complete cds.110111730bp//99%//AF038963

[31911] C-PLACE1009947

[31912] C-PLACE1010069

[31913] C-PLACE1010089//Homo sapiens mRNA for KIAA1097 protein, partial cds.//0//1554bp//100%//AB029020

[31914] C-PLACE1010231//CELL SURFACE GLYCOPROTEIN EMR1 PRECURSOR (EMR1 HORMONE RECEPTOR).//5.10E-27//371aa//28%//Q14246

[31915] C-PLACE1010270

[31916] C-PLACE1010562

[31917] C-PLACE1010579//Homo sapiens PTB domain adaptor protein CED-6 mRNA, complete cds.//9.30E-299//1362bp//99%//AF200715

[31918] C-PLACE1010624

[31919] C-PLACE1010628//Homo sapiens S164 gene, partial cds; PSI and hypothetical protein genes, complete cds; and S171 gene, partial cds.//7.50E-08//324bp//64%//AF109907

[31920] C-PLACE1010662//UDP-GLUCOSE:GLYCOPROTEIN GLUCOSYLTRANSFERASE PRECURSOR (EC 2.4.1.-) (DUGT).//1.80E-222//808aa//52%//Q09332

[31921] C-PLACE1010702//ZINC FINGER PROTEIN 43 (ZINC PROTEIN HTF6).//5.20E-151//427aa//55%//P28160

[31922] C-PLACE1010761

[31923] C-PLACE1010802

[31924] C-PLACE1010833//CALTRACTIN (CENTRIN).//0.0000001//54aa//28%//P41209

[31925] C-PLACE1010896//NUF1 PROTEIN (SPINDLE POLY BODY SPACER PROTEIN SPCI 10).//1.50E-25//583aa//23%//P35580

[31926] C-PLACE1010916

[31927] C-PLACE1010947

[31928] C-PLACE1010965

[31929] C-PLACE1011032

[31930] C-PLACE1011041//Homo sapiens mRNA for BAP2-alpha protein, complete cds.//0//1701bp//97%//AB015019

[31931] C-PLACE1011056//HISTONE HI, GONADAL.//6.80E-13//54aa//37%//P02256

[31932] C-PLACE1011090//Homo sapiens mRNA; cDNA DKFZp586AO522 (from clone DKFZp586A0522).//0//880bp//99%//AL050159

[31933] C-PLACE1011160//Homo sapiens HFB30 mRNA, complete cds.//0//1691bp//99%//AB022663

[31934] C-PLACE1011214

[31935] C-PLACE1011229//Homo sapiens ubiquitin-specific protease homolog (UPH) mRNA, complete cds.//2.30E-152//701bp//99%//AF153604

[31936] C-PLACE1011273

[31937] C-PLACE1011291

[31938] C-PLACE1011310//MYOSIN HEAVY CHAIN, GIZZARD SMOOTH MUSCLE.//3.50E-20//496aa//25%//P10587

[31939] C-PLACE1011371//INTER-ALPHA-TRYPSIN INHIBITOR HEAVY CHAIN H2 PRECURSOR (ITI HEAVY CHAIN H2).//1.70E-78//383aa//39%//Q61703

[31940] C-PLACE1011503

[31941] C-PLACE1011635//Homo sapiens heparan sulfate D-glucosaminyl 3-O-sulfotransferase-3B (30ST3B 1) mRNA, complete cds.//0//1559bp//99%//AF105377

[31942] C-PLACE1011646//Homo sapiens clone 25059 mRNA sequence.//5.00E-223//1035bp//99%//AF131752

[31943] C-PLACE1011650

[31944] C-PLACE1011675

[31945] C-PLACE1011725

[31946] C-PLACE1011749

[31947] C-PLACE1011922//MYOSIN HEAVY CHAIN, NONMUSCLE TYPE B (CELLULAR MYOSIN HEAVY CHAIN, TYPE B) (NMMHC-B).//1.30E-15//409aa//27%//P35580

[31948] C-PLACE1012031//Homo sapiens mRNA for KIAA0713 protein, partial cds.//10//163bp//100%//AB018256

[31949] C-PLACE2000006

[31950] C-PLACE2000007//Homo sapiens MRNA for KIAA0913 protein, partial cds.//0//1968bp//97%//AB020720

[31951] C-PLACE2000034//LAR PROTEIN PRECURSOR (LEUKOCYTE ANTIGEN RELATED) (EC 3.1.3.48).112.20E-29//212aa//35%//P10586

[31952] C-PLACE2000039//Rattus norvegicus cytoplasmic dynein heavy chain (MAP 1 C), mRNA, complete cds.//4.60E-291//1167bp//89%//L08505

[31953] C-PLACE2000061

[31954] C-PLACE2000072//Homo sapiens ZNF202 beta (ZNF202) mRNA, complete cds.//0//3174bp//99%//AF027219

[31955] C-PLACE2000097

[31956] C-PLACE2000103

[31957] C-PLACE2000115

[31958] C-PLACE2000124

[31959] C-PLACE2000140

[31960] C-PLACE2000164//TIPD PROTEIN.//2.10E-59//481aa//33%//O15736

[31961] C-PLACE2000176

[31962] C-PLACE2000223

[31963] C-PLACE2000235

[31964] C-PLACE2000274//DYNEIN BETA CHAIN, CILIARY.//2.20E-167//880aa//37%//P23098

[31965] C-PLACE2000302

[31966] C-PLACE2000347

[31967] C-PLACE2000359

[31968] C-PLACE2000371//TENSIN.//2.90E-78//561aa//37%//Q04205

[31969] C-PLACE2000379

[31970] C-PLACE2000399//T-CELL SURFACE GLYCOPROTEIN E2 PRECURSOR (E2 ANTIGEN) (CD99) (MIC2 PROTEIN) (12E7).//1.60E-14//180aa//39%//P14209

[31971] C-PLACE2000404//PROBABLE LEUCYL-TRNA SYNTHETASE (EC 6.1.1.4) (LEUCINE-TRNA LIGASE) (LEURS).//9.90E-229//821aa//54%//Q09996

[31972] C-PLACE2000450

[31973] C-PLACE2000455

[31974] C-PLACE3000059//Mus musculus mRNA for ubiquitin conjugating enzyme.//0//1979bp//90%//Y 17267

[31975] C-PLACE3000070

[31976] C-PLACE3000119

[31977] C-PLACE3000121//VESICULAR TRAFFIC CONTROL PROTEIN SEC 15.//1.90E-08//281aa//22%//P22224

[31978] C-PLACE3000136

[31979] C-PLACE3000147//Homo sapiens metalloproteinase with thrombospondin type 1 motifs ADAMTS 1 (ADAMTS 1) mRNA, complete cds.//0//2043bp/H99%//AF170084

[31980] C-PLACE3000148

[31981] C-PLACE3000155//Homo sapiens mRNA for KIAA0672 protein, complete cds.//2.10E-75/1382bp//99%//AB014572

[31982] C-PLACE3000160

[31983] C-PLACE3000169//ZINC FINGER PROTEIN 135.//2.50E-90//358aa//47%//P52742

[31984] C-PLACE3000194

[31985] C-PLACE3000199

[31986] C-PLACE3000218//Homo sapiens putative protein O-mannosyltransferase (POMT2) mRNA, complete cds.//10/1862bp//98%//AF105020

[31987] C-PLACE3000230

[31988] C-PLACE3000244//PROTEIN TSG24 (MEIOTIC CHECK POINT REGULATOR).//0//435aa//92%//P53995

[31989] C-PLACE3000254//Homo sapiens transcriptional activator SRCAP (SRCAP) mRNA, complete cds.//0//4583bp//83%//AF143946

[31990] C-PLACE3000276

[31991] C-PLACE3000310

[31992] C-PLACE3000320

[31993] C-PLACE3000331

[31994] C-PLACE3000339//GLUCOAMYLASE Si/S2 PRECURSOR (EC 3.2.1.3) (GLUCAN 1,4-ALPHA- GLUCOSIDASE) (1,4-ALPHA-D-GLUCAN GLUCOHYDROLASE).//9.60E-081/359aa//23%//P08640

[31995] C-PLACE3000352

[31996] C-PLACE3000353//Homo sapiens mRNA; cDNA DKFZp586H0623 (from clone DKFZp586H0623).//0//2456bp//99%//AL096739

[31997] C-PLACE3000362

[31998] C-PLACE3000365

[31999] C-PLACE3000388

[32000] C-PLACE3000413

[32001] C-PLACE3000425

[32002] C-PLACE4000009//MYOSIN HEAVY CHAIN, NONMUSCLE TYPE B (CELLULAR MYOSIN HEAVY CHAIN, TYPE B) (NMMHC-B).//2.90E-54//626aa//29%//P35580

[32003] C-PLACE4000014//X-LINKED HELICASE II (X-LINKED NUCLEAR PROTEIN) (XNP).//3.10E- 111//348aa//41%//P46100

[32004] C-PLACE4000052//Homo sapiens ATP cassette binding transporter I (ABC I) mRNA, complete cds.//0//4661bp//99%//AF165281

[32005] C-PLACE4000089

[32006] C-PLACE4000128//Mus musculus putative transcription factor mRNA, complete cds.//1.60E-86//90aa//88%//AF091234

[32007] C-PLACE4000129

[32008] C-PLACE4000147

[32009] C-PLACE4000192//ZINC FINGER PROTEIN 142 (KIAA0236) (HA4654).//7.00E-22//369aa//25%//P52746

[32010] C-PLACE4000211//Homo sapiens TTF-1 interacting peptide 5 mRNA, partial cds.//1.70E-262//1217bp//98%//AF000422

[32011] C-PLACE4000222

[32012] C-PLACE4000269//Homo sapiens mRNA for KIAA1067 protein, partial cds.//0//3787bp//99%//AB028990

[32013] C-PLACE4000270

[32014] C-PLACE4000300

[32015] C-PLACE4000387

[32016] C-PLACE4000392

[32017] C-PLACE4000431//H. sapiens gene for U5 snRNP-specific 200 kD protein.//0//5142bp//90%//Z70200

[32018] C-PLACE4000450//Homo sapiens TTF-1 interacting peptide 5 mRNA, partial cds.//2.70E-261//1217bp//98%//AF000422

[32019] C-PLACE4000465

[32020] C-PLACE4000489//PROTEIN GRAINY-HEAD (DNA-BINDING PROTEIN ELF-1) (ELEMENT I-BINDING ACTIVITY) (TRANSCRIPTION FACTOR NTF-1).//5.70E-60//254aa//44%//P13002

[32021] C-PLACE4000654//Mus musculus mRNA for ubiquitin conjugating enzyme.//0//6340bp//87%//Y 17267

[32022] C-SKNMC1000011//PUTATIVE IMPORTIN BETA-4 SUBUNIT (KARYOPHERIN BETA-4 SUBUNIT).//5.50E-35/431aa//29%//O60100

[32023] C-SKNMC1000046//Homo sapiens liprin-alpha3 mRNA, partial cds.//1.90E-162/1749bp//99%//AF034800

[32024] C-SKNMC1000050//CALPAIN 2, LARGE [CATALYTIC] SUBUNIT (EC 3.4.22.17) (CALCIUM-ACTIVATED NEUTRAL PROTEINASE) (CANP) (M-TYPE).//3.20E-411/87aa//98%//P17655

[32025] C-THYRO1000034//TRICHOHYALIN.//9.40E-10//176aa//30%//P37709

[32026] C-THYRO1000070

[32027] C-THYRO1000072//MYOSIN LIGHT CHAIN KINASE, SMOOTH MUSCLE AND NON-MUSCLE ISOZYMES (EC 2.7.1.117) (MLCK) [CONTAINS: TELOKIN].//3.40E-16//201aa//29%//P11799

[32028] C-THYRO1000092

[32029] C-THYRO1000121//Homo sapiens mRNA for KIAA1116 protein, complete cds.11//02159bp//99%//AB029039

[32030] C-THYRO1000124

[32031] C-THYRO1000197//Homo sapiens mRNA for poly(A)-specific ribonuclease.//0//2362bp//99%//AJ005698

[32032] C-THYRO1000199//Homo sapiens mRNA for KIAA0652 protein, complete cds.//0//1409bp//98%//AB014552

[32033] C-THYRO1000206

[32034] C-THYRO1000242//ZINC FINGER PROTEIN 84 (ZINC FINGER PROTEIN HPF2).//5.00E-118//239aa//66%//P51523

[32035] C-THYRO1000253

[32036] C-THYRO1000270

[32037] C-THYRO1000288//Homo sapiens mRNA for Hs Ste24p, complete cds.//0//2161bp//99%//AB016068

[32038] C-THYRO1000320

[32039] C-THYRO1000358//SELENIUM-BINDING LIVER PROTEIN.//2.30E-229//237aa//79%//P17563

[32040] C-THYRO1000368

[32041] C-THYRO1000381

[32042] C-THYRO1000387

[32043] C-THYRO1000394//Homo sapiens peroxisomal membrane protein PMP 24 mRNA, complete cds.//1.20E-299//325bp//99%//AF072864

[32044] C-THYRO1000395//Homo sapiens actin-binding protein (IPP) mRNA, complete cds.//1012092bp//99%//AF156857

[32045] C-THYRO1000401

[32046] C-THYRO1000488//Homo sapiens HFB30 mRNA, complete cds.//0//2254bp//100%//AB022663

[32047] C-THYRO1000501//52 KD RO PROTEIN (SJOGREN SYNDROME TYPE A ANTIGEN (SS-A)) (RO(SS-A)).114.20E-98//408aa//42%//P19474

[32048] C-THYRO1000558

[32049] C-THYRO1000570

[32050] C-THYRO1000605//Homo sapiens histone acetyltransferase (HBOa) mRNA, complete cds.//0//3080bp//99%//AF140360

[32051] C-THYRO1000625

[32052] C-THYRO1000637

[32053] C-THYRO1000676

[32054] C-THYRO1000684//Homo sapiens mRNA for KIAA0872 protein, complete cds.//10//2131bp//99%//AB020679

[32055] C-THYRO1000712

[32056] C-THYRO1000805

[32057] C-THYRO1000815

[32058] C-THYRO1000855

[32059] C-THYRO1000934//PYRROLINE-5-CARBOXYLATE REDUCTASE (EC 1.5.1.2) (P5CR) (P5C REDUCTASE).//7.50E-57//315aa//43%//P32322

[32060] C-THYRO1000988

[32061] C-THYRO1001033//TRANSFORMATION-SENSITIVE PROTEIN IEF SSP 3521.//8.40E-12//67aa//29%//P31948

[32062] C-THYRO1001120//Mus musculus FX-induced thymoma transcript (FX1-T1) mRNA, complete cds.//1.90E-92//1479bp//66%//U38252

[32063] C-THYRO1001204//Homo sapiens cathepsin Z precursor (CTSZ) gene, exons 4, 5, and 6 and complete cds; and TH1 gene partial sequence.//3.80E-100//478bp//99%//AF136276

[32064] C-THYRO1001262

[32065] C-THYRO1001271

[32066] C-THYRO1001287//MANNOSYL-OLIGOSACCHARIDE ALPHA-1,2-MANNOSIDASE (EC 3.2.1.113) (MAN(9)-ALPHA-MANNOSIDASE) (FRAGMENT).//3.40E-51//429aa//33%//P45701

[32067] C-THYRO1001313//Homo sapiens sorting nexin 11 (SNX11) mRNA, complete cds.//0//2330bp//94%//AF121861

[32068] C-THYRO1001347

[32069] C-THYRO1001363//Homo sapiens mRNA; cDNA DKFZp56400423 (from clone DKFZp56400423).//0//2173bp//99%//AL080120

[32070] C-THYRO1001374//Homo sapiens mRNA for KIAA0707 protein, partial cds.//0//1700bp//99%//AB014607

[32071] C-THYRO1001403

[32072] C-THYRO1001405//PLECTIN.//6.90E-19//450aa//27%//P30427

[32073] C-THYRO1001406//Homo sapiens steroid dehydrogenase homolog mRNA, complete cds.//0//1676bp//98%//AF078850

[32074] C-THYRO1001426

[32075] C-THYRO1001458//MYOSIN HEAVY CHAIN, NONMUSCLE TYPE B (CELLULAR MYOSIN HEAVY CHAIN, TYPE B) (NMMHC-B).//2.70E-171//559aa//59%//P35580

[32076] C-THYRO1001480

[32077] C-THYR01001487

[32078] C-THYRO1001584

[32079] C-THYRO1001661

[32080] C-THYR01001746

[32081] C-THYRO1001772

[32082] C-THYRO1001854

[32083] C-Y79AA1000013//Mus musculus RING finger protein A07 mRNA, complete cds.//8.90E-205//1435bp//81%//AF171060

[32084] C-Y79AA1000033//Homo sapiens CARD4 mRNA, complete cds.//0//2929bp//96%//AF126484

[32085] C-Y79AA1000231//Homo sapiens nucleolar protein NOP5//VOP58 mRNA, complete cds.//0//151 Sbp//99%//AF123534

[32086] C-Y79AA1000342//Homo sapiens Cizl mRNA, complete cds.//0//2644bp//81%//AB030835

[32087] C-Y79AA1000349//M. musculus Spnr mRNA for RNA binding protein.//0//2048bp//93%//X84692

[32088] C-Y79AA1000410

[32089] C-Y79AA1000539

[32090] C-Y79AA1000589//Homo sapiens clone 614 unknown mRNA, complete sequence.//1.00E-302//375bp//99%//AF091080

[32091] C-Y79AA1000802

[32092] C-Y79AA1000827

[32093] C-Y79AA1000966//Homo sapiens COP9 complex subunit 4 mRNA, complete cds.//0//1586bp//99%//AF100757

[32094] C-Y79AA1000969

[32095] C-Y79AA1000985//Human centrosomal protein kendrin mRNA, complete cds.//4.70E-15111985bp//87%//U52962

[32096] C-Y79AA1001061

[32097] C-Y79AA1001068

[32098] C-Y79AA1001216

[32099] C-Y79AA1001299//Homo sapiens mRNA for integrase interactor 1b protein (INI1B).//0//996bp//99%//AJ011738

[32100] C-Y79AA1001511

[32101] C-Y79AA1001594//HYALURONAN-MEDIATED MOTILITY RECEPTOR (HYALURONIC ACID RECEPTOR).//2.50E-14//410aa//24%//Q00547

[32102] C-Y79AA1001692//Mus musculus strain C57BL/J germ cell-less protein (Gcl) mRNA, complete cds.//1.40E-78//227aa//40%//Q01820

[32103] C-Y79AA1001866//Homo sapiens zinc finger protein ZNF 180 (ZNF180) mRNA, complete cds.110112927bp//97%//AF192913

[32104] C-Y79AA1001874//OX40L RECEPTOR PRECURSOR (ACT35 ANTIGEN) (TAX-TRANSCRIPTIONALLY ACTIVATED GLYCOPROTEIN 1 RECEPTOR) (CD134 ANTIGEN).//4.50E-08//H135aa//31%//P43489

[32105] C-Y79AA1002139//DNAJ PROTEIN HOMOLOG 1 (DROJ1).//9.00E-17//120aa//45%//Q24133

[32106] C-Y79AA1002210//TUMOR NECROSIS FACTOR, ALPHA-INDUCED PROTEIN 1, ENDOTHELIAL (B 12 PROTEIN).//0.0000018//40aa//25%//Q13829

[32107] C-Y79AA1002211//PHOSPHATIDYLETHANOLAMINE-BINDING PROTEIN HOMOLOG F40A3.3.//1 .70E-17//146aa//35%//O16264

[32108] C-Y79AA1002220

[32109] C-Y79AA1002234//Homo sapiens mRNA for KIAA0692 protein, partial cds.//0//3168bp//99%//AB014592

[32110] C-Y79AA1002258//Homo sapiens mRNA for HIP1R, complete cds.//0//2106bp//99%//AB013384

[32111] C-Y79AA1002361//Rattus norvegicus mRNA for protein phosphatase 1 (GL-subunit).//6.90E-14011966bp//82%//Y 18208

[32112] C-Y79AA1002399//Homo sapiens mRNA for sperm protein.//0//1163bp//95%//O91879

[32113] C-Y79AA1002416//Mus musculus CTP synthetase homolog (CTPsH) mRNA, complete cds.//3.9e-317//902bp//86%//U49385

[32114] C-Y79AA1002431//TRANSDUCIN-LIKE ENHANCER PROTEIN 2 (ESG2).//9.80E-62//318aa//35%//Q04725

[32115] C-Y79AA1002482//ZINC FINGER PROTEIN 91 (ZINC FINGER PROTEIN HTF10) (HPF7).//2.70E-137//340aa//51%//Q05481

[32116] C-Y79AA1002487//Homo sapiens chromosome 5 F-box protein Fbx4 (FBX4) mRNA, complete cds.//7.3e-311//1444bp//98%//AF129534

[32117] C-HEMBA1000290

[32118] C-HEMBA1000459

[32119] C-HEMBA1000505

[32120] C-HEMBA1001196//Human DNA topoisomerase II (top2) mRNA, complete cds.//1.60E-268//1213bp//100%//J04088

[32121] C-HEMBA1002503

[32122] C-HEMBA1002508

[32123] C-HEMBA1002513//Homo sapiens mRNA for histone deacetylase-like protein (JM21).//0//2432bp//99%//AJ011972

[32124] C-HEMBA1003480

[32125] C-HEMBA1003538//COMPLEMENT CIR COMPONENT PRECURSOR (EC 3.4.21.41).//2.40E-110//242aa//58%//P00736

[32126] C-HEMBA1003645//TIPD PROTEIN.//2.40E-10//289aa//23%//O15736

[32127] C-HEMBA1003646//Homo sapiens mRNA for KIAA1013 protein, partial cds.110113049bp//99%//AB023230

[32128] C-HEMBA1003667

[32129] C-HEMBA1003679//SIALIDASE (EC 3.2.1.18) (NEURAMINIDASE) (NA) (MAJOR SURFACE ANTIGEN).//1.00E-09//61aa//22%//P23253

[32130] C-HEMBA1003827

[32131] C-HEMBA1003838

[32132] C-HEMBA1004055

[32133] C-HEMBA1004056

[32134] C-HEMBA1004086

[32135] C-HEMBA1004335

[32136] C-HEMBA1004353//C-MYC BINDING PROTEIN MM-1.//3.00E-71//189aa//96%//Q99471

[32137] C-HEMBA1004479//HYPOXIA-INDUCIBLE FACTOR 1 ALPHA (HIF-1 ALPHA) (ARNT INTERACTING PROTEIN).//3.10E-51//152aa//40%//Q61221

[32138] C-HEMBA1004499//Homo sapiens delta-tubulin mRNA, complete cds.//3.40E-92//483bp//95%//AF201333

[32139] C-HEMBA1004507

[32140] C-HEMBA1004638

[32141] C-HEMBA1004669//SON PROTEIN (SON3).//7.30E-17//288aa//36%//P18583

[32142] C-HEMBA1004709

[32143] C-HEMBA1004860

[32144] C-HEMBA1005206//Drosophila simulans anon73BI gene and Su(P) gene.//1.90E-111376bp//63%//AJ250308

[32145] C-HEMBA1005472

[32146] C-HEMBA1005513//MALES-ABSENT ON THE FIRST PROTEIN (EC 2.3.1.-).//1.90E-129//332aa//61%//O02193

[32147] C-HEMBA1005572

[32148] C-HEMBA1005780

[32149] C-HEMBA1005990//Homo sapiens I-1 receptor candidate protein mRNA, complete cds.//0//2371bp//100%//AF082516

[32150] C-HEMBA1006038//LAMININ ALPHA-S CHAIN (FRAGMENT).//3.10E-33//81aa//64%//Q61001

[32151] C-HEMBA1006124

[32152] C-HEMBA1006461

[32153] C-HEMBA1006521//3-OXOACYL-[ACYL-CARRIER PROTEIN] REDUCTASE (EC 1.1.1.100) (3-KETOACYL- ACYL CARRIER PROTEIN REDUCTASE).//4.00E-33//177aa//42%//P25716

[32154] C-HEMBA1006617

[32155] C-HEMBA1006650//ARP2/3 COMPLEX 20 KD SUBUNIT (P20-ARC).//9.00E-40//113aa//82%//I15509

[32156] C-HEMBA1006779

[32157] C-HEMBA1006796

[32158] C-HEMBA1006812

[32159] C-HEMBA1006914//Human anthracycline-associated resistance ARX mRNA, complete cds.//0//1837bp//99%//U35832

[32160] C-HEMBA1007174//Homo sapiens mRNA for KIAA1065 protein, complete cds.//0//1079bp//97%//AB028988

[32161] C-HEMBB1000240

[32162] C-HEMBB1000264//CHLI PROTEIN.//9.50E-19//104aa//45%//P22516

[32163] C-HEMBB1000335

[32164] C-HEMBB1000337

[32165] C-HEMBB1000554

[32166] C-HEMBB1000573

[32167] C-HEMBB1000749

[32168] C-HEMBB1000774

[32169] C-HEMBB1000835

[32170] C-HEMBB1001197

[32171] C-HEMBB1001315

[32172] C-HEMBB1001482//ZINC FINGER PROTEIN 91 (ZINC FINGER PROTEIN HTFIO) (HPF7).//2.10E-57//941aa//27%//Q05481

[32173] C-HEMBB1001500

[32174] C-HEMBB1001562//CYLICIN II (MULTIPLE-BAND POLYPEPTIDE II).//1.40E-06//373aa//21%//Q28092

[32175] C-HEMBB1001619

[32176] C-HEMBB1001630

[32177] C-HEMBB1001665

[32178] C-HEMBB1001684//Homo sapiens mRNA for KIAA1108 protein, partial cds.//0//2348bp//99%//AB029031

[32179] C-HEMBB1001812

[32180] C-HEMBB1001834

[32181] C-HEMBB1001869

[32182] C-HEMBB1001871//BONE/CARTILAGE PROTEOGLYCAN I PRECURSOR (BIGLYCAN) (PG-S 1).//5.40E-75//241aa//48%//P47853

[32183] C-HEMBB1001872//CELL SURFACE GLYCOPROTEIN EMR1 PRECURSOR (EMR1 HORMONE RECEPTOR) (CELL SURFACE GLYCOPROTEIN F4/80).//1.90E-22//210aa//27%//Q61549

[32184] C-HEMBB1001905//TRICHOHYALIN.//2.10E-10//268aa//27%//P37709

[32185] C-HEMBB1001908//Human monocytic leukaemia zinc finger protein (MOZ) mRNA, complete cds.//1 .60E-1311/874bp//86%//U47742

[32186] C-HEMBB1001915//UBIQUITIN CARBOXYL-TERMINAL HYDROLASE 64E (EC 3.1.2.15) (UBIQUITIN THIOLESTERASE 64E) (UBIQUITIN-SPECIFIC PROCESSING PROTEASE 64E) (DEUBIQUITINATING ENZYME 64E).//6.90E-132//561aa//50%//Q24574

[32187] C-HEMBB1001925

[32188] C-HEMBB1002044//Mus musculus mRNA for vascular cadherin-2.//0//3562bp//81%//Y08715

[32189] C-HEMBB1002134//ZINC-FINGER PROTEIN NEUR0-D4.//8.10E-56//176aa//67%//P56163

[32190] C-HEMBB1002152

[32191] C-HEMBB1002300

[32192] C-HEMBB1002381

[32193] C-HEMBB1002383

[32194] C-HEMBB1002534

[32195] C-MAMMA1000143

[32196] C-MAMMA1000183//ZINC FINGER PROTEIN 84 (ZINC FINGER PROTEIN HPF2).//3.40E-134//359aa//63%//P51523

[32197] C-MAMMA1000227

[32198] C-MAMMA1000257

[32199] C-MAMMA1000264

[32200] C-MAMMA1000270

[32201] C-MAMMA1000279

[32202] C-MAMMA1000372

[32203] C-MAMMA1000559

[32204] C-MAMMA1000752

[32205] C-MAMMA1000760

[32206] C-MAMMA1000778

[32207] C-MAMMA1000855

[32208] C-MAMMA1000859

[32209] C-MAMMA1000897//INTER-ALPHA-TRYPSIN INHIBITOR HEAVY CHAIN H3 PRECURSOR (ITI HEAVY CHAIN H3) (SERUM-DERIVED HYALURONAN-ASSOCIATED PROTEIN) (SHAP).//1.00E-141//576aa//37%//Q06033

[32210] C-MAMMA1000940

[32211] C-MAMMA1001073

[32212] C-MAMMA1001080//Homo sapiens SNC73 protein (SNC73) mRNA, complete cds.//1.6e-312//596bp//94%//AF067420

[32213] C-MAMMA1001198//Homo sapiens eps15R mRNA, partial cds.//0//2253bp//99%//AB015346

[32214] C-MAMMA1001202

[32215] C-MAMMA1001222//EBNA-2 NUCLEAR PROTEIN.//6.60E-09//255aa//29%//P12978

[32216] C-MAMMA1001252

[32217] C-MAMMA1001296

[32218] C-MAMMA1001502

[32219] C-MAMMA1001630

[32220] C-MAMMA1001633//ZINC FINGER PROTEIN 165.1//6.30E-39//60aa/155%//P49910

[32221] C-MAMMA1001683

[32222] C-MAMMA1001715

[32223] C-MAMMA1001730//Homo sapiens brain and nasopharyngeal carcinoma susceptibility protein NSG-x mRNA, partial cds.//10/11603bp/199%//AF095687

[32224] C-MAMMA1001760

[32225] C-MAMMA1001769

[32226] C-MAMMA1001785

[32227] C-MAMMA1001848

[32228] C-MAMMA1001874

[32229] C-MAMMA1001956

[32230] C-MAMMA1002009

[32231] C-MAMMA1002033

[32232] C-MAMMA1002155

[32233] C-MAMMA1002498

[32234] C-MAMMA1002545

[32235] C-MAMMA1002571

[32236] C-MAMMA1002573//GLUCOAMYLASE SI/S2 PRECURSOR (EC 3.2.1.3) (GLUCAN 1,4-ALPHA- GLUCOSIDASE) (1,4-ALPHA-D-GLUCAN GLUCOHYDROLASE).//2.60E-19//666aa/123%//P08640

[32237] C-MAMMA1002590

[32238] C-MAMMA1002617//ZINC FINGER PROTEIN 135.//7.60E-89//252aa//57%//P52742

[32239] C-MAMMA1002618

[32240] C-MAMMA1002636

[32241] C-MAMMA1002646

[32242] C-MAMMA1002665

[32243] C-MAMMA1002708

[32244] C-MAMMA1002728

[32245] C-MAMMA1002744

[32246] C-MAMMA1002764

[32247] C-MAMMA1002765

[32248] C-MAMMA1002830

[32249] C-MAMMA1002844//TRIOSE PHOSPHATE/PHOSPHATE TRANSLOCATOR, NON-GREEN PLASTID PRECURSOR (CTPT).//4.90E-10/1/334aa//22%//P52178

[32250] C-MAMMA1002858//Rat cMG I mRNA.//3.70E-238//1147bp//92%//X52590

[32251] C-MAMMA1002880

[32252] C-MAMMA1002892

[32253] C-MAMMA1002909

[32254] C-MAMMA1002941

[32255] C-MAMMA1002947

[32256] C-MAMMA1002972//VACUOLAR PROTEIN SORTING-ASSOCIATED PROTEIN VPS27.//1.10E-05//69aa//42%//P40343

[32257] C-MAMMA1002973

[32258] C-MAMMA1002987

[32259] C-MAMMA1003003

[32260] C-MAMMA1003026//Homo sapiens HSPCO57 mRNA, complete cds.//0//773bp//98%//AF161542

[32261] C-MAMMA1003031

[32262] C-MAMMA1003089

[32263] C-NT2RM1000092//MULTIDRUG RESISTANCE PROTEIN 2 (MULTIDRUG-EFFLUX TRANSPORTER 2).//1.00E-07//362aa//23%//P39843

[32264] C-NT2RM1000272

[32265] C-NT2RM1000341

[32266] C-NT2RM1000539//Homo sapiens mRNA for Lsm5 protein.//3.00E-158/1733bp//99%//AJ238097

[32267] C-NT2RM1000553//Homo sapiens putative glycolipid transfer protein mRNA, complete cds.//3.40E-1771/814bp//99%//AF103731

[32268] C-NT2RM1000623//RIBONUCLEASE INHIBITOR.//4.40E-21//372aa//30%//P10775

[32269] C-NT2RM1000702//PUTATIVE SERINE/THREONINE-PROTEIN KINASE PKWA (EC 2.7.1.-).//5.60E-08//187aa//27%//P49695

[32270] C-NT2RM1000833//Homo sapiens sec61 homolog mRNA, complete cds.//0//3541bp//99%//AF084458

[32271] C-NT2RM1000883//Homo sapiens I-1 receptor candidate protein mRNA, complete cds.110115107bp//99%//AF082516

[32272] C-NT2RM1001082

[32273] C-NT2RM1001112

[32274] C-NT2RM2001105//Drosophila melanogaster eyelid (eld) mRNA, complete cds.//1.20E-28//805bp//61%//AF053091

[32275] C-NT2RM2001360//Homo sapiens clone C40 unknown mRNA.//1.00E-250//136bp//100%//AF103798

[32276] C-NT2RM2001797//Homo sapiens mRNA; cDNA DKFZp572C163 (from clone DKFZp572CI63); partial cds.//0//2300bp//100%//AL110217

[32277] C-NT2RM2001803//Homo sapiens IkappaB kinase complex associated protein (IKAP) mRNA, complete cds.//0//2249bp//99%//AF044195

[32278] C-NT2RM4002504

[32279] C-NT2RP1000409

[32280] C-NT2RP1000460//Homo sapiens mRNA for KIAA1068 protein, partial cds.//0//3199bp//99%//AB028991

[32281] C-NT2RP1000746//Homo sapiens 60S acidic ribosomal protein PO mRNA, complete cds.//9.70E-196//90bp//99%//AF173378

[32282] C-NT2RP1000796

[32283] C-NT2RP100113//ZINC FINGER PROTEIN 83 (ZINC FINGER PROTEIN HPF1).//7.70E-253//425aa//98%//P51522

[32284] C-NT2RP2001214

[32285] C-NT2RP2001233//ZINC FINGER PROTEIN 91 (ZINC FINGER PROTEIN HTFIO) (HPF7).//2.00E-128//409aa//45%//Q05481

[32286] C-NT2RP2001440//Homo sapiens mRNA for 14-3-3gamma, complete cds.//0//3712bp//99%//AB024334

[32287] C-NT2RP2002056

[32288] C-NT2RP2002105//H. sapiens MSH-R gene for melanocyte stimulating hormone receptor.//0//1644bp//98%//X65634

[32289] C-NT2RP2002333

[32290] C-NT2RP2002677

[32291] C-NT2RP2002755

[32292] C-NT2RP2002843

[32293] C-NT2RP2003101

[32294] C-NT2RP2003668

[32295] C-NT2RP2003799

[32296] C-NT2RP2004095

[32297] C-NT2RP2004300

[32298] C-NT2RP2004675

[32299] C-NT2RP2004920//TRANSCRIPTIONAL REGULATOR ATRX (X-LINKED NUCLEAR PROTEIN) (HETEROCHROMATIN PROTEIN 2) (HP1 ALPHA-INTERACTING PROTEIN) (HP 1-BP38 PROTEIN).//4.20E-09//804aa//22%//Q61687

[32300] C-NT2RP2005144//Homo sapiens tubby like protein 3 (TULP3) mRNA, complete cds.//2.10E-308//1437bp//98%//AF045583

[32301] C-NT2RP2005719//GPI-ANCHORED PROTEIN P137.//4.00E-14//99aa//43%//Q14444

[32302] C-NT2RP2005726

[32303] C-NT2RP2005776//POLY(A) POLYMERASE TYPE 2 (EC 2.7.7.19) (PAP) (POLYNUCLEOTIDE ADENYLYLTRANSFERASE).//4.40E-55//358aa//42%//P51005

[32304] C-NT2RP2005980

[32305] C-NT2RP2006184//Homo sapiens mRNA for KIAA0918 protein, partial cds.//0//4235bp//99%//AB020725

[32306] C-NT2RP2006534//5′-AMP-ACTIVATED PROTEIN KINASE, CATALYTIC ALPHA-1 CHAIN (EC 2.7.1.-) (AMPK ALPHA-1 CHAIN) (FRAGMENT).//3.20E-1//132aa//96%//Q13131

[32307] C-NT2RP2006554

[32308] C-NT2RP3000584

[32309] C-NT2RP3001115

[32310] C-NT2RP3001723//Homo sapiens cell recognition molecule Caspr2 (CASPR2) mRNA, complete cds.//1.40E-58//1138bp//63%//AF193613

[32311] C-NT2RP3001938//SPORULATION-SPECIFIC PROTEIN 1 (EC 2.7.1.-).//1.30E-22//227aa//33%//P08458

[32312] C-NT2RP3002330//Homo sapiens eRFS mRNA, complete cds.//0//2443bp//99%//U87791

[32313] C-NT2RP3002402

[32314] C-NT2RP3002484//Homo sapiens mRNA for KIAA0998 protein, partial cds.//1.20E-12411597bp/198% H1AB023215

[32315] C-NT2RP3002512

[32316] C-NT2RP3002713

[32317] C-NT2RP3002770//MYELOID DIFFERENTIATION PRIMARY RESPONSE PROTEIN 45 MYDI 16.//1.00E-07//70aa//41%//P17564

[32318] C-NT2RP3002799

[32319] C-NT2RP3002810//HISTIDINE-RICH PROTEIN KE4.//2.20E-10//260aa//26% H1Q31125

[32320] C-NT2RP3002818//INSERTION ELEMENT IS2A HYPOTHETICAL 48.2 KD PROTEIN.//5.70E-226//303aa//97%//P51026 50 C-NT2RP3002955

[32321] C-NT2RP3002985

[32322] C-NT2RP3003059//Rattus norvegicus potassium channel regulator I mRNA, complete cds.//3 .80E-152//1007bp//82%//U78090

[32323] C-NT2RP3003121

[32324] C-NT2RP3003133//Homo sapiens ZK1 mRNA for Kruppel-type zinc finger protein, complete cds.//0I/1998bp//91%//AB011414

[32325] C-NT2RP3003138//Homo sapiens kinesin superfamily motor KIF4 mRNA, complete cds.//0//2159bp//98%//AF071592

[32326] C-NT2RP3003155

[32327] C-NT2RP3003157

[32328] C-NT2RP3003185//TROPOMYOSIN 1, FUSION PROTEIN 33.//2.80E-06//402aa/123%//P49455

[32329] C-NT2RP3003264

[32330] C-NT2RP3003346

[32331] C-NT2RP3003403

[32332] C-NT2RP3003411//Mus musculus COP9 complex subunit 7b (COPS7b) mRNA, complete cds.//6.30E-270//743bp//90%//AF071317

[32333] C-NT2RP3003500//SCY1 PROTEIN.//9.20E-27//601aa//23%//P53009

[32334] C-NT2RP3003572

[32335] C-NT2RP3003576

[32336] C-NT2RP3003665//Homo sapiens mRNA for beta-ureidopropionase, complete cds.//10//1690bp//99%//AB013885

[32337] C-NT2RP3003672//T-CELL SURFACE GLYCOPROTEIN E2 PRECURSOR (E2 ANTIGEN) (CD99) (MIC2 PROTEIN) (12E7).//2.20E-13//146aa//42%//P14209

[32338] C-NT2RP3003680//Homo sapiens mRNA; cDNA DKFZp434J154 (from clone DKFZp434J154); complete cds.//0//2047bp//95%//AL080155

[32339] C-NT2RP3003799//Rattus norvegicus Srg1 (Sytr1) mRNA, complete cds.//9.00E-238//529bp//84%//U71294

[32340] C-NT2RP3003800//Rattus norvegicus tyrosine protein kinase pp60-c-src mRNA, complete cds.//1.90E-163//924bp//89%//AF130457

[32341] C-NT2RP3003828

[32342] C-NT2RP3003932

[32343] C-NT2RP3003992//Homo sapiens mRNA; cDNA DKFZp564C186 (from clone DKFZp564C 186).11//02739bp//99%//AL050019

[32344] C-NT2RP3004013//M. musculus Spnr mRNA for RNA binding protein.//6.50E-240//1215bp//94%//X84692

[32345] C-NT2RP3004028

[32346] C-NT2RP3004041

[32347] C-NT2RP3004051

[32348] C-NT2RP3004078//H. sapiens HRFX2 mRNA.//0//1806bp//99%//X76091

[32349] C-NT2RP3004093

[32350] C-NT2RP3004095

[32351] C-NT2RP3004125//Mus musculus zinc finger protein splice variant FIZI-B (Fiz1) mRNA, complete cds.//4.60E-229//1560bp//78%//AF126747

[32352] C-NT2RP3004148//GLUCOAMYLASE S1/S2 PRECURSOR (EC 3.2.1.3) (GLUCAN 1,4-ALPHA- GLUCOSIDASE) (1,4-ALPHA-D-GLUCAN GLUCOHYDROLASE).//7.90E-05//271aa//22%//P08640

[32353] C-NT2RP3004155//Homo sapiens COQ7 protein mRNA, complete cds.//1.0E-179//823bp/ll 00%//AF098948

[32354] C-NT2RP3004189//VEGETATIBLE INCOMPATIBILITY PROTEIN HET-E-1.//1.30E-14//242aa//24%//Q00808

[32355] C-NT2RP3004332

[32356] C-NT2RP3004349

[32357] C-NT2RP3004470

[32358] C-NT2RP4000035

[32359] C-NT2RP4000049

[32360] C-NT2RP4000102

[32361] C-NT2RP4000167

[32362] C-NT2RP4000515

[32363] C-NT2RP4000517

[32364] C-NT2RP4000519

[32365] C-NT2RP5003512//Homo sapiens mRNA for KIAA1291 protein, partial cds.//0//1980bp//99%//AB033117

[32366] C-OVARC1000092

[32367] C-OVARC1000533

[32368] C-OVARC1000678

[32369] C-OVARC1000689//Homo sapiens mRNA; cDNA DKFZp434C1415 (from clone DKFZp434CI415); partial cds.//0//2032bp//99%//AL133014

[32370] C-OVARC1000802

[32371] C-OVARC1000890

[32372] C-OVARC1000891

[32373] C-OVARC1000945//Rattus norvegicus mRNA for atypical PKC specific binding protein, complete cds.//0//1961bp//82%//AB005549

[32374] C-OVARC1001072

[32375] C-OVARC1001117

[32376] C-OVARC1001200//Mus musculus mRNA for HS1 binding protein 3.//5.80E-88//658bp//80%//AJ132192

[32377] C-OVARC1001244//H. sapiens mRNA for Drosophila female sterile homeotic (FSH) homologue.//0//1467bp//99%//X62083

[32378] C-OVARC1001329

[32379] C-OVARC1001341

[32380] C-OVARC1001376

[32381] C-OVARC1001496//Homo sapiens C-terminal binding protein 2 mRNA, complete cds.//0//1876bp//98%//AF016507

[32382] C-OVARC1001873

[32383] C-PLACE1000007//PROBABLE UBIQUITIN CARBOXYL-TERMINAL HYDROLASE R10E11.3 (EC 3.1.2.15) (UBIQUITIN THIOLESTERASE) (UBIQUITIN-SPECIFIC PROCESSING PROTEASE) (DEUBIQUITINATING ENZYME).//1.60E-81//212aa//70%//P34547

[32384] C-PLACE1000547//Homo sapiens GDP-mannose pyrophosphorylase B (GMPPB) mRNA, complete cds.//3.70E-241//124bp//98%//AF135421

[32385] C-PLACE1001036//Homo sapiens mRNA for KIAAI017 protein, complete cds.//0//2117bp//99%//AB023234

[32386] C-PLACE1001076

[32387] C-PLACE1001118//ZINC FINGER PROTEIN 135.//5.40E-147//443aa//57%//P52742

[32388] C-PLACE1001366

[32389] C-PLACE1001545

[32390] C-PLACE1001608

[32391] C-PLACE1002004

[32392] C-PLACE1002256

[32393] C-PLACE1002437//ATP-BINDING CASSETTE TRANSPORTER I.//4.50E-76//180aa//83%//P41233

[32394] C-PLACE1002591//CORONIN-LIKE PROTEIN P57.//4.40E-70//208aa//66%//P31146

[32395] C-PLACE1002665//Mus musculus enhancer of polycomb (Epc1) mRNA, complete cds.//0//2462bp//89%//AF079765

[32396] C-PLACE1003383

[32397] C-PLACE1003864

[32398] C-PLACE1004793//RETROVIRUS-RELATED ENV POLYPROTEIN.//5.20E-47//577aa//25%//P10267

[32399] C-PLACE1004913

[32400] C-PLACE1004979

[32401] C-PLACE1005052//Homo sapiens CGI-16 protein mRNA, complete cds.//6.6e-313//1413bp//99%//AF132950

[32402] C-PLACE1005055//Homo sapiens mRNA for KIAA0576 protein, partial cds.//0//2431bp//99%//AB011148

[32403] C-PLACE1005128

[32404] C-PLACE1005162

[32405] C-PLACE1005176//Homo sapiens hypothalamus protein HT001 mRNA, complete cds.//3.90E-212//40bp//96%//AF113539

[32406] C-PLACE1005467//PENICILLIN-BINDING PROTEIN 4* (PBP 4*) (PBP 4A).//1.10E-09//93aa//31%//P32959

[32407] C-PLACE1005549//Homo sapiens mRNA for Rho guanine nucleotide-exchange factor, splice variant NET1A.//7.60E-97//1287bp//67%//AJ010046

[32408] C-PLACE1005584//TRANS-ACTING TRANSCRIPTIONAL PROTEIN ICPO (P135 PROTEIN) (IER 2.9/ER2.6).//6.80E-09//267aa//30%//P29128

[32409] C-PLACE1005611//Mus musculus mRNA for mDj10, complete cds.//2.00E-3311379bp//66%//AB028860

[32410] C-PLACE1005802

[32411] C-PLACE1005850

[32412] C-PLACE1005898

[32413] C-PLACE1005932

[32414] C-PLACE1006129//Homo sapiens HSPCO57 mRNA, complete cds.//0//2849bp//98%//AF161542

[32415] C-PLACE1006360

[32416] C-PLACE1006795

[32417] C-PLACE1006878//TRNA-SPLICING ENDONUCLEASE SUBUNIT SEN2 (EC 3.1.27.9) (TRNA-INTRON ENDONUCLEASE).//1.90E-08//122aa//36%//P 16658

[32418] C-PLACE1007557

[32419] C-PLACE1007807

[32420] C-PLACE1008181

[32421] C-PLACE1008426//Homo sapiens mRNA for KIAA1288 protein, partial cds.//0//331bp//99%//AB033114

[32422] C-PLACE1008455

[32423] C-PLACE1008941

[32424] C-PLACE1009935

[32425] C-PLACE1010310//SPIDROIN 2 (DRAGLINE SILK FIBROIN 2) (FRAGMENT).//1.20E-18//467aa//30%//P46804

[32426] C-PLACE1011891

[32427] C-PLACE101896//Mus musculus Wnt10a mRNA, complete cds.//2.60E-287//820bp//85%//U61969

[32428] C-PLACE2000003

[32429] C-PLACE2000132

[32430] C-PLACE2000170

[32431] C-PLACE2000335

[32432] C-PLACE3000124

[32433] C-PLACE3000158

[32434] C-PLACE3000207

[32435] C-PLACE3000221

[32436] C-PLACE3000271

[32437] C-PLACE3000304

[32438] C-PLACE3000322

[32439] C-PLACE3000341

[32440] C-PLACE3000373

[32441] C-PLACE3000399

[32442] C-PLACE3000401

[32443] C-PLACE3000402

[32444] C-PLACE3000406

[32445] C-PLACE3000475

[32446] C-PLACE4000063//GLUCOAMYLASE SI/S2 PRECURSOR (EC 3.2.1.3) (GLUCAN 1,4-ALPHA- GLUCOSIDASE) (1,4-ALPHA-D-GLUCAN GLUCOHYDROLASE).//1.70E-15//740aa//23%//P08640

[32447] C-PLACE4000093

[32448] C-PLACE4000100//Homo sapiens hydroxypyruvate reductase (GRHPR) gene, complete cds.//1014199bp//97%//AF146689

[32449] C-PLACE4000131//Homo sapiens mRNA; cDNA DKFZp586JO917 (from clone DKFZp586JO917); partial cds.//0//1612bp//97%//AL117455

[32450] C-PLACE4000247

[32451] C-PLACE4000250

[32452] C-PLACE4000252

[32453] C-PLACE4000259//H. sapiens gene for U5 snRNP-specific 200 kD protein.//0//5143bp//90%//Z70200

[32454] C-PLACE4000261//PEREGRIN (BR140 PROTEIN).//9.50E-10//128aa//34%//P55201

[32455] C-PLACE4000320

[32456] C-PLACE4000344

[32457] C-PLACE4000367

[32458] C-PLACE4000401//ACETYL-COENZYME A SYNTHETASE (EC 6.2.1.1) (ACETATE-COA LIGASE) (ACYL- ACTIVATING ENZYME).//7.20E-22//54aa//62%//Q01576

[32459] C-PLACE4000410//Homo sapiens mRNA; cDNA DKFZp586D0624 (from clone DKFZp586D0624); partial cds.110112159bp//98%//AL117654

[32460] C-PLACE4000487

[32461] C-PLACE4000494

[32462] C-PLACE4000521

[32463] C-PLACE4000548//Homo sapiens mRNA for KIAA0947 protein, partial cds.//0//4864bp//99%//AB023164

[32464] C-SKNMC1000013//Homo sapiens ATP-binding cassette protein M-ABCI mRNA, nuclear gene encoding mitochondrial protein, complete cds.//0//2384bp//99%//AF047690

[32465] C-SKNMC1000091//Homo sapiens mRNA for leucine-zipper protein, complete cds.//6.10E-19011872bp//99%//AB021663

[32466] C-THYRO1000343//Homo sapiens mRNA for KIAA0790 protein, partial cds.//0//371bp//99%//AB018333

[32467] C-THYRO1000569//Mus musculus hematopoietic zinc finger protein mRNA, complete cds.//0//1557bp//91%//AF118566

[32468] C-THYRO1001142

[32469] C-THYRO1001189//ZINC FINGER PROTEIN 91 (ZINC FFNGER PROTEIN HTF10) (HPF7).//1.10E-200//546aa//62%//Q05481

[32470] C-THYRO1001320

[32471] C-THYRO1001537//Homo sapiens mRNA; cDNA DKFZp586A0522 (from clone DKFZp586AO522); partial cds.//0//1010bp//98%//AL050159

[32472] C-THYRO1001602

[32473] C-THYRO1001721//RING CANAL PROTEIN (KELCH PROTEIN).//9.30E-34//220aa//38%//Q04652

[32474] C-THYRO1001828

[32475] C-Y79AA1000346//Homo sapiens nonclathrin coat protein gamma2-COP mRNA, complete cds.110112520bp/199%//AF157833

[32476] C-Y79AA1001167

[32477] C-Y79AA1001384//Homo sapiens very large G-protein coupled receptor-1 (VLGR1) mRNA, complete cds.//0//4708bp//99%//AF055084

[32478] C-Y79AA1001875//RAS-RELATED PROTEIN RAB-7.//9.40E-12//34aa//97%//P51149

[32479] C-Y79AA1002103//ZINC FINGER PROTEIN ZFP-36 (FRAGMENT).//3.00E-257//549aa//76%//P16415

[32480] C-HEMBA1006092

[32481] C-HEMBA1006406

[32482] C-HEMBB1000790

[32483] C-HEMBB1000917

[32484] C-HEMBB1002280

[32485] C-MAMMA1000802

[32486] C-MAMMA1001322//B-CELL GROWTH FACTOR PRECURSOR (BCGF-12 KD).//0.000000017//46aa/160%//P20931

[32487] C-MAMMA1002597

[32488] C-MAMMA1002868

[32489] C-NT2RP2003161

[32490] C-NT2RP2003339

[32491] C-NT2RP3001282

[32492] C-PLACE1001761

[32493] C-PLACE1004491

[32494] C-PLACE1004686

[32495] C-PLACE1005574

[32496] C-PLACE1006382

[32497] C-PLACE1006792

[32498] C-PLACE3000455

[32499] C-PLACE4000230//Mus musculus semaphorin VIa mRNA, complete cds.//0//2567bp//88%//AF030430

[32500] C-THYRO1000916

[32501] C-HEMBA1000327

[32502] C-HEMBB1000637

[32503] C-HEMBB1001967

[32504] C-MAMMA1000266

[32505] C-NT2RP2002979

[32506] C-PLACE1007866

[32507] C-PLACE3000350//SERINE/THREONINE-PROTEIN KINASE PAK-GAMMA (EC 2.7.1.-) (GAMMA-PAK) (P21-ACTIVATED KINASE 2) (PAK-2) (PAK65) (S6/H4 KINASE).//9.80E-25//55aa//45%//Q13177

[32508] C-PLACE4000156//ZINC FINGER PROTEIN 132.//7.10E-15//476aa//46%//P52740

[32509] C-THYRO1001637

[32510] C-MAMMA1002215

[32511] C-MAMMA1002721

[32512] C-NT2RP2002070

[32513] Homology Search Result 14.

[32514] Data obtained by the homology search for full-length nucleotide sequences and deduced amino acid sequences. In the result of the search shown below, both units, aa and bp, are used as length units for the sequences to be compared. Each data includes Clone name, Definition in matching data, P value, Length of sequence to be compared, Homology, and Accession number (No.) of matching data. These items are shown in this order, separated by a double-slash mark, //.

[32515] C-HEMBA1000005//DNAJ PROTEIN HOMOLOG MTJ1.//1.90E-250//554aa//85%//Q61712

[32516] C-HEMBA1000012//PROBABLE LEUCYL-TRNA SYNTHETASE (EC 6.1.1.4) (LEUCINE-TRNA LIGASE) (LEURS).116.40E-99//457aa//45%//Q09996

[32517] C-HEMBA1000020//Homo sapiens beta 2 gene.//7.50E-264//194bp//95%//X02344

[32518] C-HEMBA1000030//Homo sapiens ARF GTPase-activating protein GIT1 mRNA, complete cds.//0//1759bp//99%//AF124490

[32519] C-HEMBA1000129//HYPOTHETICAL HELICASE C8A4.08C IN CHROMOSOME I.//3.80E-25//166aa//36%//Q09884

[32520] C-HEMBA1000141//Homo sapiens SUMO-1-specific protease (SSP1.) mRNA, complete cds.//0//0//135bp//100%//AF196304

[32521] C-HEMBA1000150//Homo sapiens putative RNA helicase mRNA, complete cds.//5.20E-213//525bp//99%//AF085356

[32522] C-HEMBA1000156//NEUROFILAMENT TRIPLET M PROTEIN (160 KD NEUROFILAMENT PROTEIN) (NF-M).//1.90E-12//368aa//24%//P08553

[32523] C-HEMBA1000158//HEPATOCYTE NUCLEAR FACTOR 3-GAMMA (HNF-3G).//5.00E-16//66aa//36%//P35584

[32524] C-HEMBA1000168//CYLICIN I (MULTIPLE-BAND POLYPEPTIDE I).//2.90E-14//303aa//25%//P35662

[32525] C-HEMBA1000185//RAS-RELATED PROTEIN RAL-A.//3.40E-12//25aa//31%//P48555

[32526] C-HEMBA1000201//Homo sapiens mRNA for integrase interactor lb protein (IN11B).11011612bp//99%//AJ011738

[32527] C-HEMBA1000216//HYPOXIA-INDUCIBLE FACTOR 1 ALPHA (HIF-1 ALPHA) (ARNT INTERACTING PROTEIN).//1.00E-86//146aa//56%//Q61221

[32528] C-HEMBA1000303//Mus musculus Plenty of SH3s (POSH) mRNA, complete cds.//7.10E-254//1440bp//87%//AF030131

[32529] C-HEMBA1000304//Rattus norvegicus Ca2+-dependent activator protein (CAPS) mRNA, complete cds.//5.10E-131//712bp//91%//U 16802

[32530] C-HEMBA1000307//CARNITINE DEFICIENCY-ASSOCIATED PROTEIN EXPRESSED IN VENTRICLE 1//5.20E-49//107aa//91%//O35594

[32531] C-HEMBA1000333//Homo sapiens F-box protein Fbx21 (FBX21) mRNA, complete cds.//0//866bp//100%//AF174601

[32532] C-HEMBA1000369//Homo sapiens mRNA for PICK1, complete cds.//0//1949bp//98%//AB026491

[32533] C-HEMBA1000411//ANKYRIN.//5.70E-12//27aa//38%//Q02357

[32534] C-HEMBA1000488//RING CANAL PROTEIN (KELCH PROTEIN).//3.30E-45//481aa//29%//Q04652

[32535] C-HEMBA1000491//RAS-LIKE PROTEIN 2.//2.00E-22//188aa//31%//P22279

[32536] C-HEMBA1000518//PECANEX PROTEIN .112.10E- 19//227aa//38%//P 18490

[32537] C-HEMBA1000523//TESTIS-SPECIFIC PROTEIN PBS 13 .112.40E-44//292aa//36%//QO 1755

[32538] C-HEMBA1000531//HEAT SHOCK 70 KD PROTEIN COGNATE 1 (HEAT SHOCK 70 KD PROTEIN 70C) (FRAGMENTS).//2.60E-12/173aa//41%//P02826

[32539] C-HEMBA1000542//Rattus norvegicus mRNA for dipeptidyl peptidase III, complete cds.//2.20E-19411663bp//83%//D89340

[32540] C-HEMBA1000555//Mus musculus Msx2 interacting nuclear target protein mRNA, complete cds.//7.90E-226//1501bp//83%//AF156529

[32541] C-HEMBA1000561//ZINC FINGER PROTEIN 91 (ZINC FINGER PROTEIN HTFIO) (HPF7).//3.40E-37//674aa//25%//Q05481

[32542] C-HEMBA1000569//GPI-ANCHORED PROTEIN P137.//6.50E-19//265aabp//32%//Q60865

[32543] C-HEMBA1000588//Mus musculus FLI-LRR associated protein-1 mRNA, complete cds.//2.10E-144//602bp//77%//AF045573

[32544] C-HEMBA1000591//PTB-ASSOCIATED SPLICING FACTOR (PSF).//2.20E-17//98aa//40%//P23246

[32545] C-HEMBA1000592//Homo sapiens sorting nexin 6 (SNX6) mRNA, complete cds.//0//1465bp//99%//AF121856

[32546] C-HEMBAI1000608//HYPOTHETICAL PROTEIN KIAA0411 (FRAGMENT).//1.80E-55//79aa//61%//O43295

[32547] C-HEMBA1000657//Rattus norvegicus ADP-ribosylation factor-directed GTPase activating protein mRNA, complete cds.//7.20E-156//366bp//76%//U35776

[32548] C-HEMBA1000851//Homo sapiens DNA binding protein p96PIF mRNA, complete cds.//0//1862bp//99%//AF173868

[32549] C-HEMBA1000852//ARYLSULFATASE D PRECURSOR (EC 3.1.6.-) (ASD).//1.00E-78//119aa//87%//P51689

[32550] C-HEMBA1000910//MELANOMA-ASSOCIATED ANTIGEN B1 (MAGE-B1 ANTIGEN) (MAGE-XP ANTIGEN)//1.60E-30//127aa//40%//P43366

[32551] C-HEMBA1000919//HYPOTHETICAL 65.5 KD TRP-ASP REPEATS CONTAINING PROTEIN F02E8.5 IN CHROMOSOME X.//1.00E-10//288aa//23%//Q19124

[32552] C-HEMBA100109//CELL DIVISION CONTROL PROTEIN 2 HOMOLOG (EC 2.7.1.-) (P34 PROTEIN KINASE) (CYCLIN-DEPENDENT KINASE 1) (CDK1).//3.10E-10//70aa//58%//P06493

[32553] C-HEMBA1001043//ANKYRIN, BRAIN VARIANT 2 (ANKYRIN B) (ANKYRIN, NONERYTHROID)(FRAGMENT).//1 .40E-12//131aa//38%//Q01485

[32554] C-HEMBA1001059//Human N-acetylgalactosamine 6-sulphatase (GALNS) gene, exon 14.//4.80E-169//786bp//99%//U06088

[32555] C-HEMBA1001071//PROCOLLAGEN ALPHA 1(III) CHAIN PRECURSOR.//1.50E-92//182aa//100%//P02461

[32556] C-HEMBA1001077//Homo sapiens transcriptional intermediary factor 1 gamma mRNA, complete cds.//2.00E-80//432bp/194%//AF119043

[32557] C-HEMBA1001088//PINCH PROTEIN (PARTICULARY INTERESTING NEW CYS-HIS PROTEIN).//3.50E-50//76aa//57%//P48059

[32558] C-HEMBA1001137//ZINC FINGER PROTEIN 33A (ZINC FINGER PROTEIN KOX31) (KIAA0065) (HA0946) (FRAGMENT).//1.50E-1161i197aa//58%//Q06730

[32559] C-HEMBA1001174//ADP-RIBOSYLATION FACTOR-LIKE PROTEIN 5.//6.80E-79//179aa//80%//P51646

[32560] C-HEMBA1001197//Homo sapiens rap2 interacting protein x mRNA, complete cds.//0//1511bp//99%//AF112221

[32561] C-HEMBA1001257//Homo sapiens mRNA 2-methylacyl-CoA racemase.//0//672bp/199%//AJ130733

[32562] C-HEMBA1001286//COMPLEMENT DECAY-ACCELERATING FACTOR PRECURSOR.//0.00000002//198aa//29%//Q60401

[32563] C-HEMBA1001302//Homo sapiens calcium binding protein precursor, mRNA, complete cds.119.60E-2581/682bp//94%//AF153686

[32564] C-HEMBA1001351//Homo sapiens VAMP-associated protein of 33 kDa (VAP-33) mRNA, complete cds.//1.40E-133//614bp//99%//AF057358

[32565] C-HEMBA1001387//GTP-BINDING PROTEIN TC10.//2.90E-64//104aa//82%//P17081

[32566] C-HEMBA1001405//Drosophila melanogaster eyelid (eld) mRNA, complete cds.//5.60E-25//863bp//60%//AF053091

[32567] C-HEMBA1001446//Homo sapiens rap2 interacting protein x mRNA, complete cds.//9.20E-55//719bp//68%//AF112221

[32568] C-HEMBAI1001455//Mus musculus transposon-derived Buster2 transposase-like protein gene, partial cds.//4.20E-290//2008bp//81%//AF205599

[32569] C-HEMBA1001476//Human DNA topoisomerase II (top2) mRNA, complete cds.//1.60E-268//1213bp//100%//J04088

[32570] C-HEMBA1001510//CYCLIC-AMP-DEPENDENT TRANSCRIPTION FACTOR ATF-6 (FRAGMENT).//1.70E-16//63aa//61%//P18850

[32571] C-HEMBA1001526//PERIPLASMIC [FE] HYDROGENASE 1 (EC 1.18.99.1).//4.90E-37//399aa//29%//P29166

[32572] C-HEMBA1001569//SYNAPTOBREVIN 2 (VESICLE ASSOCIATED MEMBRANE PROTEIN 2) (VAMP-2).//2.30E-53//110aa//100%//P19065

[32573] C-HEMBA1100579//Homo sapiens mRNA for NS1-binding protein (NS1-BP).l/01/808bp//97%//AJ012449

[32574] C-HEMBA1001595//SEPTIN 2 HOMOLOG (FRAGMENT).//4.90E-156//348aa//83%//Q14141

[32575] C-HEMBA1001620//MYO-INOSITOL-1-PHOSPHATE SYNTHASE (EC 5.5.1.4) (IPS).//1.60E-166//506aa//60%//P42803

[32576] C-HEMBA1001635//TESTIS SPECIFIC PROTEIN A (ZINC FINGER PROTEIN TSGA).//1.60E-10//55aa//28%//Q63679

[32577] C-HEMBA1001651//CYTADHERENCE HIGH MOLECULAR WEIGHT PROTEIN 1 (CYTADHERENCE ACCESSORY PROTEIN 1).//6.20E-07//362aa//24%//Q50365

[32578] C-HEMBA1001661//CADHERIN-RELATED TUMOR SUPPRESSOR PRECURSOR (FAT PROTEIN).//4.60E-36//365aa//33%//P33450

[32579] C-HEMBA1001672//Homo sapiens methyl-CpG binding domain-containing protein MBD3 (MBD3) mRNA, complete cds.//0//1707bp//98%//AF072247

[32580] C-HEMBA1001675//VACUOLAR PROTEIN SORTING-ASSOCIATED PROTEIN VPS9.//5.40E-09//110aa//35%//P54787

[32581] C-HEMBA1001714//Homo sapiens mRNA for ATPase inhibitor precursor, complete cds.//3.70E-78//200bp//100%//AB029042

[32582] C-HEMBA1001723//Homo sapiens G protein beta subunit mRNA, partial cds.//3.10E-267//1212bp//99%//AF195883

[32583] C-HEMBA1001734//CADHERIN-1 PRECURSOR (OSTEOBLAST-CADHERIN) (OB-CADHERIN) (OSF-4).//1.10E-381/87aa//96%//P55288

[32584] C-HEMBA1001744//SCY1 PROTEIN.//9.90E-32//481aa//25%//P53009

[32585] C-HEMBA1001746//Homo sapiens squamous cell carcinoma antigen recognized by T cell (SART-2) mRNA, complete cds.//7.60E-59//998bp//64%//AF098066

[32586] C-HEMBA1001804//Homo sapiens zinc finger DNA binding protein 99 (ZNF281) mRNA, complete cds.//0//1637bp//99%//AF125158

[32587] C-HEMBA1001809//IMMEDIATE-EARLY PROTEIN IE 180.//3.80E-11 //206aa//36%//P11675

[32588] C-HEMBA1001819//ZINC FINGER PROTEIN 184 (FRAGMENT).//2.90E-135//459aa//52%//Q99676

[32589] C-HEMBA1001822//Mus musculus Ese2L protein mRNA, complete cds.//1.90E-235//329bp//89%//AF132479

[32590] C-HEMBA1001824//Homo sapiens nuclear protein NP94 mRNA, complete cds.//1.40E-199//1180bp//89%//AF159025

[32591] C-HEMBA1001847//ZINC FINGER PROTEIN 29 (ZFP-29).//7.60E-64//221aa//55%//Q07230

[32592] C-HEMBA1001866//UDP-GLUCOSE:GLYCOPROTEIN GLUCOSYLTRANSFERASE PRECURSOR (EC 2.4.1.-) (DUGT).//5.70E-51//234aa//41%//Q09332

[32593] C-HEMBA1001869//TRITHORAX PROTEIN.//9.60E-05//166aa//27%//P20659

[32594] C-HEMBA1001896//DIMETHYLGLYCINE DEHYDROGENASE PRECURSOR (EC 1.5.99.2) (ME2GLYDH).//9.30E-36//395aa//26%//Q63342

[32595] C-HEMBA1001913//GCN20 PROTEIN.//2.30E-81//158aa//50%//P43535

[32596] C-HEMBAI1001921//Homo sapiens germinal center kinase related protein kinase mRNA, complete cds.//0//850bp//99%//AF000145

[32597] C-HEMBA1001967//Homo sapiens NY-REN-57 antigen mRNA, partial cds.//0//1721bp//99%//AF155114

[32598] C-HEMBA1002035//Homo sapiens BAZIA mRNA for bromodomain adjacent to zinc finger domain 1A, complete cds.//0//2149bp//99%//AB032252

[32599] C-HEMBA1002092//Mus musculus Olf-1/EBF-like-3 transcription factor (O/E-3) mRNA, complete cds.//1.30E-271//583bp//88%//U92703

[32600] C-HEMBA1002102//ANKYRIN.//4.40E-10//106aa//35%//Q02357

[32601] C-HEMBA1002139//LIM AND SH3 DOMAIN PROTEIN LASP-1 (MLN 50).//7.10E-05//51aa//49%//Q14847

[32602] C-HEMBA1002151//Rattus norvegicus p34 mRNA, complete cds.//1.0E-153//1059bp//82%//AF178669

[32603] C-HEMBA1002161//MYOSIN HEAVY CHAIN, CARDIAC MUSCLE BETA ISOFORM.//1.40E-51H11 +L80aa//56%//P79293

[32604] C-HEMBA1002177//TRANSCRIPTION FACTOR GATA-4 (GATA BINDING FACTOR-4).//6.00E-13//90aa//36%//P43694

[32605] C-HEMBA1002212//TYROSINE-PROTEIN KINASE 2 (EC 2.7.1.112) (FRAGMENT).//3.00E-17//267aa//29%//P18161

[32606] C-HEMBA1002215//TESTIN 2 (TES2) [CONTAINS: TESTIN 1 (TES1)].//2.20E-199//392aa//89%//P47226

[32607] C-HEMBA1002241//PROLIFERATING-CELL NUCLEOLAR ANTIGEN P120 (PROLIFERATION-ASSOCIATED NUCLEOLAR PROTEIN P120).//3.70E-06//95aa//33%//P46087

[32608] C-HEMBA1002267//Sus scrofa decorin mRNA, complete cds.//1.l OE-46//302bp//90%//AF125537

[32609] C-HEMBA1002341//P53-BINDING PROTEIN 2 (53BP2) (FRAGMENT).//3.80E-55//109aa//96%//Q62415

[32610] C-HEMBA1002363//Homo sapiens chromosome-associated protein-E (hCAP-E) mRNA, complete cds.//0//847bp//99%//AF092563

[32611] C-HEMBA1002417//TIGHT JUNCTION PROTEIN ZO-1 (TIGHT JUNCTION PROTEIN 1).//1.00E-121//489aa//52%//P39447

[32612] C-HEMBA1002419//TRICHOHYALIN.//1.90E-09//299aa//24%//P22793

[32613] C-HEMBA1002458//OVARIAN GRANULOSA CELL 13.0 KD PROTEIN HGR74.//4.20E-24//109aa//55%//Q00994

[32614] C-HEMBA1002469//DXS8237E PROTEIN (FRAGMENT).//3.50E-50//199aa//61%//P98175

[32615] C-HEMBA1002475//SKIN SECRETORY PROTEIN XP2 PRECURSOR (APEG PROTEIN).//1.0E-12//285aa//31%//P17437

[32616] C-HEMBA1002495//LIGHT-MEDIATED DEVELOPMENT PROTEIN DET1.//6.80E-53//257aa//36%//P48732

[32617] C-HEMBA1002513//Homo sapiens mRNA for histone deacetylase-like protein (JM21).//0//2432bp//99% //AJ011972

[32618] C-HEMBA1002547//Homo sapiens agrin precursor mRNA, partial cds.//0//605bp//97%//AF016903

[32619] C-HEMBA1002555//Homo sapiens mSin3A associated polypeptide p30 mRNA, complete cds.//5.30E-511//768bp//68%//AF055993

[32620] C-HEMBA1002569//Homo sapiens protein associated with Myc mRNA, complete cds.//6.80E-305//951bp//99%//AF075587

[32621] C-HEMBA1002746//DNA POLYMERASE BETA (EC 2.7.7.7).//5.00E-37//268aa//34%//P06746

[32622] C-HEMBA1002768//Mus musculus formin binding protein 17 mRNA, partial cds.//7.80E-237//1522bp//85%//AB011126

[32623] C-HEMBA1002770//Rattus norvegicus mRNA for TIP120, complete cds.//2.90E-176//1024bp//88%//D87671

[32624] C-HEMBA1002777//Fugu rubripes BAW (BAW) mRNA, complete cds.//3.40E-54//319bp//76%//AF153879

[32625] C-HEMBA1002810//Homo sapiens formin binding protein 21 mRNA, complete cds.//8.2e-314//1437bp//99%//AF071185

[32626] C-HEMBAI1002818//Homo sapiens mRNA for fibulin-4.//2.00E-304//1383bp//99%//AJ132819

[32627] C-HEMBA1002876//HYPOTHETICAL 26.4 KD PROTEIN EEED8.8 IN CHROMOSOME II.//1050E-44//188aa//52%//Q09297

[32628] C-HEMBA1002935//ZINC FINGER PROTEIN 91 (ZINC FINGER PROTEIN HTFIO) (HPF7).//1.30E-15//371aa//25%//Q05481

[32629] C-HEMBA1002939//ANKYRIN R (ANKYRINS 2.1 AND 2.2) (ERYTHROCYTE ANKYRIN).//2.00E-34//300aa//34%//P16157

[32630] C-HEMBA1002951//NUFI PROTEIN (SPINDLE POLY BODY SPACER PROTEIN SPC110).114.40E-06//324aa//24%//P32380

[32631] C-HEMBA1002973//CAMP-DEPENDENT 3′,5′-CYCLIC PHOSPHODIESTERASE 4B (EC 3.1.4.17) (DPDE4).//1.20E-27//63aa//100%//P14646

[32632] C-HEMBA1002997//CENTROMERIC PROTEIN E (CENP-E PROTEIN).//3.80E-25//534aa//24%//Q02224

[32633] C-HEMBA1002999//Rattus norvegicus lamina associated polypeptide IC (LAP IC) mRNA, complete cds.//1.40E-171//552bp//75%//U20286

[32634] C-HEMBA1003046//Homo sapiens mitochondrial processing peptidase beta-subunit mRNA.//0//1558bp//99%//AF054182

[32635] C-HEMBA1003071//INSULIN-LIKE GROWTH FACTOR BINDING PROTEIN COMPLEX ACID LABILE CHAIN PRECURSOR (ALS).//1.30E-09//121aa//40%//P35858

[32636] C-HEMBA1003077//SLIT PROTEIN PRECURSOR.//2.60E-15//199aa//31%//P24014

[32637] C-HEMBA1003096//Mouse 19.5 mRNA, complete cds.//5.60E-117//1139bp//72%//M32486

[32638] C-HEMBA1003098//Homo sapiens NY-REN-6 antigen mRNA, partial cds.//6.20E-273//1253bp//99%//AF155096

[32639] C-HEMBA1003136//MANNOSE-1-PHOSPHATE GUANYLTRANSFERASE (EC 2.7.7.13) (ATP-MANNOSE-1-PHOSPHATE GUANYLYLTRANSFERASE) (NDP-HEXOSE PYROPHOSPHORYLASE).//8.50E-51//221aa//33%//P41940

[32640] C-HEMBA1003148//Homo sapiens mRNA for dachshund protein.//0//583bp//99%//AJ005670

[32641] C-HEMBA1003179//PROBABLE TRNA (5-METHYLAMINOMETHYL-2-THIOURIDYLATE)-METHYLTRANSFERASE (EC 2.1.1.61).//5.90E-74//134aa//53%//P44551

[32642] C-HEMBA1003199//Homo sapiens chromosome 5 F-box protein Fbx4 (FBX4) mRNA, complete cds.//8.50E-87//285bp//90%//AF129534

[32643] C-HEMBA1003235//TROPOMYOSIN.//2.30E-06//109aa//33%//Q02088

[32644] C-HEMBA1003250//PROTEIN KINASE APK1 A (EC 2.7.1.-).//7.20E-41//245aa//42%//Q06548

[32645] C-HEMBA1003281//POLIOVIRUS RECEPTOR PRECURSOR.//6.00E-11//239aa//32%//P32506

[32646] C-HEMBA1003286//Homo sapiens mRNA for beta-1,4-galactosyltransferase IV, complete cds.//5.40E-229//1043bp//99%//AB024436

[32647] C-HEMBA1003291//SNF1-RELATED PROTEIN KINASE KINIO (EC 2.7.1.-) (AKIN 10).//6.20E-28//126aa//51%//Q38997

[32648] C-HEMBA1003369//CENTROMERIC PROTEIN E (CENP-E PROTEIN).//2.00E-08//248aa//23%//Q02224

[32649] C-HEMBA1003408//DNA-DIRECTED RNA POLYMERASE II LARGEST SUBUNIT (EC 2.7.7.6) (VERSION 1).//7.80E-131/297aa//30%//P18616

[32650] C-HEMBA1003417//Homo sapiens BAG-family molecular chaperone regulator-2 mRNA, complete cds.//1.50E-255//179bp//99%//AF095192

[32651] C-HEMBA1003418//TRICHOHYALIN.//8.70E-19//281aa//31%//P37709

[32652] C-HEMBA1003433//Homo sapiens gene for NBS 1, complete cds.//0//51 lbp//94%//AB013139

[32653] C-HEMBA1003538//COMPLEMENT C1R COMPONENT PRECURSOR (EC 3.4.21.41).//2.40E-110//242aa//58%//P00736

[32654] C-HEMBA1003545//INSULIN GENE ENHANCER PROTEIN ISL-2 (ISLET-2).//8.80E-189//360aa//96%//P50480

[32655] C-HEMBA1003555//NUCLEOTIDE-BINDING PROTEIN (NBP).//2.10E-68//251aa//52%//P53384

[32656] C-HEMBA1003560//GUANINE NUCLEOTIDE-BINDING PROTEIN G(I)/G(S)/G(O) GAMMA-2 SUBUNIT (G GAMMA-1).//1.20E-31//71aa//100%//P16874

[32657] C-HEMBA1003568//52 KD RO PROTEIN (SJOGREN SYNDROME TYPE A ANTIGEN (SS-A)) (RO(SS-A)).//7.90E-49//279aa//32%//P19474

[32658] C-HEMBA1003569//METASTASIS-ASSOCIATED PROTEIN MTA 1.//6.90E-206//445aa//74%//Q13330

[32659] C-HEMBA1003581//TALIN.//4.40E-45/152aa//98%//P26039

[32660] C-HEMBA1003591//CHLOROPLAST 28 KD RIBONUCLEOPROTEIN PRECURSOR (28RNP).//4.40E-10//18aa//35%//P19682

[32661] C-HEMBA1003615//Homo sapiens ART-4 mRNA, complete cds.//0//1713bp//99%//AB026125

[32662] C-HEMBA1003617//Homo sapiens ubiquitin-like product Chap1/Dsk2 mRNA, complete cds.//6.90E-178//501bp//97%//AB015344

[32663] C-HEMBA1003645//TIPD PROTEIN.//2.40E-10//289aa//23%//O15736

[32664] C-HEMBA1003662//TBX2 PROTEIN (T-BOX PROTEIN 2).111 .20E-75//151aa//99%//Q13207

[32665] C-HEMBA1003679//SIALIDASE (EC 3.2.1.18) (NEURAMINIDASE) (NA) (MAJOR SURFACE ANTIGEN).//1.00E-09//611aa//22%//P23253

[32666] C-HEMBA1003680//PUTATIVE AMINOPEPTIDASE ZK353.6 IN CHROMOSOME III (EC 3.4.11.-).112.40E-92//423aa//47%//P34629

[32667] C-HEMBA1003684//ZINC FINGER PROTEIN 151 (MIZ-1 PROTEIN).//2.00E-73//526aa//32%//Q13105

[32668] C-HEMBA1003690//HISTONE DEACETYLASE HDA1.1/2.10E-59//249aa//47%//P53973

[32669] C-HEMBA1003742//Homo sapiens cleft lip and palate transmembrane protein 1 (CLPTM1) mRNA, complete cds.//1.70E-44//501bp//67%//AF037339

[32670] C-HEMBA1003760//HYPOXIA-INDUCIBLE FACTOR 1 ALPHA (HIF-1 ALPHA) (ARNT INTERACTING PROTEIN) (MEMBER OF PAS PROTEIN 1) (MOP 1) (HIFI ALPHA).//3 .70E-124//347aa//55%//Q16665

[32671] C-HEMBA1003773//Mus musculus signal recognition particle receptor beta subunit mRNA, complete cds.//5.80E-81/511bp//86%//U17343

[32672] C-HEMBA1003783//Mus musculus bromodomain-containing protein BP75 mRNA, complete cds.//1H.10E-190//1204bp//84%//AF084259

[32673] C-HEMBA1003805//Mus musculus KH domain RNA binding protein QKI-5A mRNA, complete cds.//0//988bp//95%//AF090402

[32674] C-HEMBA1003836//MOB1 PROTEIN (MPS1 BINDER 1).//8.10E-31//134aa//52%//P40484

[32675] C-HEMBA1003866//Mus musculus semaphorin VIa mRNA, complete cds.//1.20E-105//192bp//70%//AF030430

[32676] C-HEMBA1003953//ZINC FINGER PROTEIN MFG-1 (ZINC FINGER PROTEIN 58) (FRAGMENT).113 . 80E-16//89aa//46%//P16372

[32677] C-HEMBA1004097//Mus musculus putative transcription factor mRNA, complete cds.//8.50E-221//188bp//78%//AF091234

[32678] C-HEMBA1004131I/SEPTIN 2 HOMOLOG (FRAGMENT).//1.60E-166//416aa//72%//Q14141

[32679] C-HEMBA1004168//Homo sapiens geminin mRNA, complete cds.//3.90E-208//951bp//99%//AF067855

[32680] C-HEMBA1004199//HYPOTHETICAL HELICASE K12H4.8 IN CHROMOSOME III.//8.40E-60//243aa//39%//P34529

[32681] C-HEMBA1004202//RAS-RELATED PROTEIN RAB-13.//6.20E-30//208aa//37%//P51153

[32682] C-HEMBA1004203//NUCLEOLAR PROTEIN NOP2.//1.50E-121/258aa//29%//P40991

[32683] C-HEMBA1004207//Homo sapiens leptin receptor short form (db) mRNA, complete cds.//0//892bp//99%//U50748

[32684] C-HEMBA1004227//Rattus norvegicus protein phosphatase 2C mRNA, complete cds.//5.70E-217//1217bp//88%//AF095927

[32685] C-HEMBA1004248//INSULIN-INDUCED GROWTH RESPONSE PROTEIN CL-6 (IMMEDIATE-EARLY PROTEIN CL-6).//2.00E-43//98aa//84%//Q08755

[32686] C-HEMBA1004275//Homo sapiens PHD-finger protein (GRC5) mRNA, complete cds.//1.0E-152//403bp//69%//AF043725

[32687] C-HEMBA1004276//Homo sapiens AP-4 adaptor complex beta4 subunit mRNA, complete cds.//4.80E-257//738bp//99%//AF092094

[32688] C-HEMBA1004286//Homo sapiens TGF beta receptor associated protein-1 mRNA, complete cds.//0//1982bp//99%//AF022795

[32689] C-HEMBA1004295//Homo sapiens NY-REN-25 antigen mRNA, partial cds.//9.40E-31//381bp//65%//AF155103

[32690] C-HEMBA1004321//ZINC FINGER PROTEIN 184 (FRAGMENT).//2.30E-93//357aa//42%//Q99676

[32691] C-HEMBA1004353//C-MYC BINDING PROTEIN MM-1.//3.00E-71//89aa//96%//Q99471

[32692] C-HEMBA1004354//CHLI PROTEIN.//9.90E-26//130aa//42%//P22516

[32693] C-HEMBA1004356//H. sapiens MSSP-2 mRNA.//3.00E-243//573bp//98%//X77494

[32694] C-HEMBA1004389//Homo sapiens zinc finger DNA binding protein 99 (ZNF281) mRNA, complete cds.//0//1437bp//99%//AF125158

[32695] C-HEMBAI1004408//PEPTIDYL-PROLYL CIS-TRANS ISOMERASE 10 (EC 5.2.1.8) (PPIASE) (ROTAMASE) (CYCLOPHILIN-10).//3.20E-32//148aa//52%//P52017

[32696] C-HEMBA1004479//HYPOXIA-INDUCIBLE FACTOR 1 ALPHA (HIF-1 ALPHA) (ARNT INTERACTING PROTEIN).//3.10E-51//52aa//40%//Q61221

[32697] C-HEMBA1004499//Homo sapiens delta-tubulin mRNA, complete cds.//3.40E-92//483bp//95%//AF201333

[32698] C-HEMBA1004509//UBIQUITIN CARBOXYL-TERMINAL HYDROLASE 4 (EC 3.1.2.15) (UBIQUITIN THIOLESTERASE 4) (UBIQUITIN-SPECIFIC PROCESSING PROTEASE 4) (DEUBIQUITINATING ENZYME 4) (UBIQUITOUS NUCLEAR PROTEIN HOMOLOG).//2.70E-12//200aa//28%//QI 3107

[32699] C-HEMBA1004534//Homo sapiens gamma-filamin (ABPL) mRNA, complete cds.//1.2e-316//1445bp//99%//AF089841

[32700] C-HEMBA1004573//Homo sapiens mRNA for HELG protein.//2.00E-59//483bp//68%//AJ277291

[32701] C-HEMBA1004604//Homo sapiens COP9 complex subunit 7a mRNA, complete cds.//0//1612bp//99%//AF193844

[32702] C-HEMBA1004669//SON PROTEIN (SON3).//7.30E- 17//288aa//36%//P18583

[32703] C-HEMBA1004697//MYOSIN HEAVY CHAIN, SMOOTH MUSCLE ISOFORM (SMMHC) (FRAGMENT).//2.90E-05//303aa//21%//P35749

[32704] C-HEMBA1004734//UBIQUITIN-CONJUGATING ENZYME E2-18 KD (EC 6.3.2.19) (UBIQUITIN- PROTEIN LIGASE) (UBIQUITIN CARRIER PROTEIN) (PM42).//9.90E-39//143aa//52%//P42743

[32705] C-HEMBA1004752//Homo sapiens mRNA for LAK-4p, complete cds.//4.60E-109//650bp//89%//AB002405

[32706] C-HEMBA1004756//Human transporter protein (g17) mRNA, complete cds.//9.10E-34//515bp//66%//U49082

[32707] C-HEMBA1004758//Homo sapiens transcription factor SL1 mRNA, complete cds.//2.60E-246//249bp//94%//L39060

[32708] C-HEMBA1004768//LINE-1 REVERSE TRANSCRIPTASE HOMOLOG.//5.40E-111//314aa//58%//P08547

[32709] C-HEMBA1004795//CDC4-LIKE PROTEIN (FRAGMENT).//3.80E-69//198aa//66%//P50851

[32710] C-HEMBA1004847//SIGNAL RECOGNITION PARTICLE 68 KD PROTEIN (SRP68).//8.20E-154//317aa//94%//Q00004

[32711] C-HEMBA1004889//Human C3f mRNA, complete cds.l/6.70E-24//341aabp//26%//U72515

[32712] C-HEMBA1004929//INTRACELLULAR PROTEIN TRANSPORT PROTEIN USOI.//2.50E-05//148aa//24%//P25386

[32713] C-HEMBA1004930//26S PROTEASOME SUBUNIT S5B (KIAA0072) (HA1357).//3.30E-27//65aa/1100%//Q16401

[32714] C-HEMBA1004972//NEUROFILAMENT TRIPLET H PROTEIN (200 KD NEUROFILAMENT PROTEIN) (NF-H).//0.00000096//286aa//23%//P12036

[32715] C-HEMBA1004973//ZINC-BINDING PROTEIN A33.//4.10E-08//121aa//33%//Q02084

[32716] C-HEMBA1005009//Homo sapiens BAF53a (BAF53a) mRNA, complete cds.//0//1813bp//99%//AF041474

[32717] C-HEMBA1005029//Homo sapiens CGI-13 protein mRNA, complete cds.//0//1487bp//99%//AF132947

[32718] C-HEMBA1005047//RAS-RELATED PROTEIN RAB-24 (RAB-16).//3.40E-1011/106aa//98%//P35290

[32719] C-HEMBA1005101//Homo sapiens SYT interacting protein SIP mRNA, complete cds.//0//2762bp//99%//AF080561

[32720] C-HEMBA1005201//Homo sapiens CGI-07 protein mRNA, complete cds.l/01/1608bp//99%//AF132941

[32721] C-HEMBA1005202//SIGNAL RECOGNITION PARTICLE 68 KD PROTEIN (SRP68).//1.90E-179//361aa//95%//Q00004

[32722] C-HEMBA1005206//Drosophila simulans anon73Bl gene and Su(P) gene.//1.90E-11//376bp//63%//AJ250308

[32723] C-HEMBA1005219//NUCLEAR PROTEIN SNF7.//5.30E-10//189aa//25%//P39929

[32724] C-HEMBA1005338//Homo sapiens mRNA for matrilin-4, partial.//3.90E-241//1095bp//99%//AJ007581

[32725] C-HEMBA1005359//ZINC FINGER PROTEIN 137.//3.90E-85//206aa//69%//P52743

[32726] C-HEMBA1005367//Homo sapiens melastatin 1 (MLSN1) mRNA, complete cds.//9.00E-77//620bp//74%//AF071787

[32727] C-HEMBA1005394//Mus musculus pantothenate kinase 1 beta (panKlbeta) mRNA, complete cds.//3.90E-126//1097bp//75%//AF200357

[32728] C-HEMBA1005423//Homo sapiens cyclin-dependent kinase inhibitor (CDKN2C) mRNA, complete cds.//2.00E-213//537bp//99%//AF041248

[32729] C-HEMBA1005513//MALES-ABSENT ON THE FIRST PROTEIN (EC 2.3.1.-).//1.90E-129//332aa//61%//O02193

[32730] C-HEMBA1005528//CCR4-ASSOCIATED FACTOR 1 (CAF1).//3.10E-154//285aa//99%//Q60809

[32731] C-HEMBA1005530//Homo sapiens anaphase-promoting complex subunit 7 (APC7) mRNA, complete cds.//0//1578bp//98%//AF191340

[32732] C-HEMBA1005548//Homo sapiens MAFB/Kreisler basic region/leucine zipper transcription factor (MAFB) mRNA, complete cds.//1.00E-220//1014bp//99%//AF134157

[32733] C-HEMBA1005558//NUCLEAR PROTEIN SNF7.//6.40E-16//170aa//31%//P39929

[32734] C-HEMBA1005576//Mus musculus mRNA for plexin 2, complete cds.//1.20E-12211870bp//82%//D86949

[32735] C-HEMBA1005581//Homo sapiens SLIT2 (SLIL2) mRNA, complete cds.//10/11721bp//100%//AF133270

[32736] C-HEMBA1005582//TROPOMYOSIN 1, NON-MUSCLE ISOFORM (TROPOMYOSIN II) (CYTOSKELETAL TROPOMYOSIN).//0.00000009//213aa//27%//P09492

[32737] C-HEMBA1005595//DYNEIN HEAVY CHAIN, CYTOSOLIC (DYHC).//2.30E-54//562aa//29%//P34036

[32738] C-HEMBA1005621//Homo sapiens Mad2-like protein mRNA, complete cds.//8.00E-2111/962bp//99%//AF072933

[32739] C-HEMBA1005666//Homo sapiens mRNA for DIPB protein.//8.60E-14711685bp//99%//AJ249128

[32740] C-HEMBA1005699//EPHRIN-B3 PRECURSOR (EPH-RELATED RECEPTOR TYROSINE KINASE LIGAND 8) (LERK-8) (EPH-RELATED RECEPTOR TRANSMEMBRANE LIGAND ELK-L3).//2.10E-37//98aa//81%//Q15768

[32741] C-HEMBA1005737//CALCINEURIN B SUBUNIT (PROTEIN PHOSPHATASE 2B REGULATORY SUBUNIT).//4.40E-17//167aa//34%//P25296

[32742] C-HEMBA1005815//CALPAIN, LARGE [CATALYTIC] SUBUNIT (EC 3.4.22.17) (CALCIUM- ACTIVATED NEUTRAL PROTEINASE) (CANP) (MU/M-TYPE).//2.00E-36//342aa//33%//P00789

[32743] C-HEMBA1005931//ZINC FINGER PROTEIN 83 (ZINC FINGER PROTEIN HPF1).//5.60E-15//76aa//51%//P51522

[32744] C-HEMBA1005990//Homo sapiens I-1 receptor candidate protein mRNA, complete cds.//0//2371bp//100%//AF082516

[32745] C-HEMBA1006031//Homo sapiens mRNA for putative phospholipase, complete cds.//0//1413bp//99%//AB019435

[32746] C-HEMBA1006038//LAMININ ALPHA-5 CHAIN (FRAGMENT).//3.10E-33//81aa//64%//Q61001

[32747] C-HEMBA1006067//Homo sapiens squamous cell carcinoma antigen recognized by T cell (SART-2) mRNA, complete cds.//8.20E-12//297bp//64%//AF098066

[32748] C-HEMBA1006130//SEL-10 PROTEIN.//0.000000043//219aa//25%//Q93794

[32749] C-HEMBA1006158//Homo sapiens transcription factor forkhead-like 7 (FKHL7) gene, complete cds.//0//155bp//99%//AF048693

[32750] C-HEMBA1006198//PROLINE-RICH PROTEIN MP-2 PRECURSOR.//1.90E-19//215aa//39%//P05142

[32751] C-HEMBA1006248//ZINC FINGER PROTEIN MFG-1 (ZINC FINGER PROTEIN 58) (FRAGMENT).//8.60E-23//151aa//37%//P16372

[32752] C-HEMBA1006253//DNA-DAMAGE-REPAIR/TOLERATION PROTEIN DRT111 PRECURSOR.//0.00000002//62aa//53%//P42698

[32753] C-HEMBA1006268//Homo sapiens HQOO24c mRNA, complete cds.//3.50E-157//845bp//92%//AF073836

[32754] C-HEMBA1006272//RETROVIRUS-RELATED PROTEASE (EC 3.4.23.-).//1.30E-123//200aa//73%//P10265

[32755] C-HEMBA1006278//POLY(A) POLYMERASE (EC 2.7.7.19) (PAP) (POLYNUCLEOTIDE ADENYLYLTRANSFERASE).//1.00E-210//490aa//77%//P25500

[32756] C-HEMBA1006283//NUCLEAR POLYADENYLATED RNA-BINDING PROTEIN NAB2.//0.000000012//76aa//30%//P32505

[32757] C-HEMBA1006291//2-ARYLPROPIONYL-COA EPIMERASE (EC 5.-.-.-).//4.20E-12//215aa//23%//P70473

[32758] C-HEMBA1006309//Homo sapiens aspartyl aminopeptidase mRNA, complete cds.//5.30E-169//774bp//100%//AF005050

[32759] C-HEMBA1006310//Rattus norvegicus cytosolic sorting protein PACS-la (PACS-1) mRNA, complete cds.//3.70E-225//1189bp//88%//AF076183

[32760] C-HEMBA1006344//RADIXIN.//1.50E-31//333aa//28%//P26043

[32761] C-HEMBA1006347//MALES-ABSENT ON THE FIRST PROTEIN (EC 2.3.1.-).//1.60E-130//332aa//62%//O02193

[32762] C-HEMBA1006359//ZINC FINGER PROTEIN 43 (ZINC PROTEIN HTF6).I/3.50E-105//381aa//54%//P28160

[32763] C-HEMBA1006398//Human L1 element L1.6 putative p150 gene, complete cds.//2.00E-277//729bp//85%//U93563

[32764] C-HEMBA1006445//Homo sapiens putative tumor supressor NOEY2 mRNA, complete cds.//1.40E-270//224bp//100%//U96750

[32765] C-HEMBA1006474//40 KD PROTEIN.//1.40E-39//292aa//34%//Q01552

[32766] C-HEMBA1006485//PUROMYCIN-SENSITIVE AMINOPEPTIDASE (EC 3.4.11.-) (PSA).//1.90E-81//153aa//97%//P55786

[32767] C-HEMBA1006507//DIAPHANOUS PROTEIN HOMOLOG 2.//1.40E-46//316aa//32%//O060879

[32768] C-HEMBA1006521//3-OXOACYL-[ACYL-CARRIER PROTEIN] REDUCTASE (EC 1.1.1.100) (3-KETOACYL- ACYL CARRIER PROTEIN REDUCTASE).//4.00E-331i 77aa//42%//P25716

[32769] C-HEMBA1006559//Mus musculus PRAJAI (Prajal) mRNA, complete cds.//2.80E-206//107bp//83%//U06944

[32770] C-HEMBA1006583//Drosophila melanogaster Scribble (scrib) mRNA, complete cds.//1.70E-63//1002bp//65%//AF190774

[32771] C-HEMBA1006624//DNA/PANTOTHENATE METABOLISM FLAVOPROTEIN HOMOLOG.//0.00000069//109aa//38%//Q58323

[32772] C-HEMBA1006650//ARP2/3 COMPLEX 20 KD SUBUNIT (P20-ARC).//9.00E-40//113aa//82%//O15509

[32773] C-HEMBA1006652//60S RIBOSOMAL PROTEIN L7.//2.40E-44//206aa//47%//P14148

[32774] C-HEMBA1006708//HYPOTHETICAL 46.4 KD TRP-ASP REPEATS CONTAINING PROTEIN IN PMC1-TFG2 INTERGENIC REGION.//3.30E-22//241aa//31%//P53196

[32775] C-HEMBA1006737//ANKYRIN, BRAIN VARIANT 2 (ANKYRIN B) (ANKYRIN, NONERYTHROID) (FRAGMENT).//0.000000043//1aa//40%//Q01485

[32776] C-HEMBA1006758//Homo sapiens protocadherin beta 13 (PCDH-betal3) mRNA, complete cds.//0//1832bp//91%//AF152492

[32777] C-HEMBA1006807//Homo sapiens mRNA for SPOP.//5.70E-125//109bp//75%//AJ000644

[32778] C-HEMBA1006877//OXYSTEROL-BINDING PROTEIN.//2.00E-59//378aa//39%//P16258

[32779] C-HEMBA1006885//Homo sapiens gene for Proline synthetase associated, complete cds.//0/11467bp//96%//AB018566

[32780] C-HEMBA1006914//Human anthracycline-associated resistance ARX mRNA, complete cds.//0//837bp//99%//U35832

[32781] C-HEMBA1006941//Homo sapiens PKCq-interacting protein PICOT (PICOT) mRNA, complete cds.//2.10E-27 I/1234bp//99%//AF118649

[32782] C-HEMBA1006973//Homo sapiens rab3-GAP regulatory domain mRNA, complete cds.//5.60E-14311740bp//94%//AF004828

[32783] C-HEMBA1006976//H. sapiens mRNA for Gal-beta(1-3/1-4)GlcNAc alpha-2.3-sialyltransferase.//1.90E-80//447bp//89%//X74570

[32784] C-HEMBA1007018//DYNEIN LIGHT INTERMEDIATE CHAIN 1, CYTOSOLIC (LIC57/59) (DYNEIN LIGHT CHAIN A) (DLC-A).//2.40E-188//391aa//89%//Q90828

[32785] C-HEMBA1007087//CLEAVAGE AND POLYADENYLATION SPECIFICITY FACTOR, 100 KD SUBUNIT (CPSF 100 KD SUBUNIT).//8.30E-27//253aa//30%//Q10568

[32786] C-HEMBA1007121//Homo sapiens bisphosphate 3′-nucleotidase mRNA, complete cds.//1.70E-252//118bp//92%//AF125042

[32787] C-HEMBA1007151//Homo sapiens synphilin I mRNA, complete cds.//0//900bp//99%//AF076929

[32788] C-HEMBA1007174//Homo sapiens epsin 2b mRNA, complete cds.//3.80E-271 //642bp//99%//AF062085

[32789] C-HEMBA1007194//Homo sapiens origin recognition complex subunit 6 (ORC6) mRNA, complete cds.//0//1588bp//99%//AF1139658

[32790] C-HEMBA1007224//Homo sapiens SUMO-1-specific protease (SSP1) mRNA, complete cds.//0//1590bp//99%//AF196304

[32791] C-HEMBA1007243//Chinese hamster hprt mRNA, complete cds.//2.00E-58//650bp//70%//J00060

[32792] C-HEMBA1007251//Homo sapiens F-box protein FBX29 (FBX29) mRNA, partial cds.//5.00E-58//330bp//95%//AF176707

[32793] C-HEMBA1007300//Homo sapiens 3′,5′-cyclic nucleotide phosphodiesterase 10A1 (PDE10A) mRNA, splice variant 1, complete cds.//0/ 1519bp//99%//AF127479

[32794] C-HEMBA1007301//COLLAGEN ALPHA 1(III) CHAIN (FRAGMENT).//6.20E-18//115aa//33%//P13941

[32795] C-HEMBB1000036//Homo sapiens CGI-51 protein mRNA, complete cds.//0//1665bp//99%//AF151809

[32796] C-HEMBB1000037//Homo sapiens erythroblast macrophage protein EMP mRNA, complete cds.//2.80E-187//1582bp//80%//AF084928

[32797] C-HEMBB1000083//MYOSIN LIGHT CHAIN KINASE, SMOOTH MUSCLE AND NON-MUSCLE ISOZYMES (EC 2.7.1.117) (MLCK) [CONTAINS: TELOKIN].I/1.90E-22//426aa/125%//P 11799

[32798] C-HEMBB1000119//Homo sapiens ASMTL gene.//0//1891bp//99%//Y15521

[32799] C-HEMBB1000144//GUANYLATE CYCLASE ACTIVATING PROTEIN 2 (GCAP 2) (RETINAL GUANYLYL CYCLASE ACTIVATOR PROTEIN P24).//1.40E-24//71aa//77%//P51177

[32800] C-HEMBB1000217//Homo sapiens SUMO-1-activating enzyme E1 N subunit (SUA1) mRNA, complete cds.//0//1038bp//99%//AF090385

[32801] C-HEMBB1000226//PUTATIVE PRE-MRNA SPLICING FACTOR ATP-DEPENDENT RNA HELICASE EEED8.5.//2.70E-12//112aa//47%//Q09530

[32802] C-HEMBB1000264//CHL1 PROTEIN.//9.50E-19//104aa//45%//P22516

[32803] C-HEMBB1000266//HYPOTHETICAL 54.5 KD TRP-ASP REPEATS CONTAINING PROTEIN ZC302.2 IN CHROMOSOME V.1/6.10E-09//242aa//26%//Q23256

[32804] C-HEMBB1000317//FIBULIN-1, ISOFORM D PRECURSOR.//7.10E-62//458aa//35%//P37888

[32805] C-HEMBB1000593//Homo sapiens transferrin receptor 2 alpha (TFR2) mRNA, complete cds.//1.30E-10711503bp//99%//AF067864

[32806] C-HEMBB1000631//LONGEVITY-AS SURANCE PROTEIN 1 (LONGEVITY ASSURANCE FACTOR 1).//4.0E-19//232aa//28%//P78970

[32807] C-HEMBB1000632//GUANINE NUCLEOTIDE RELEASING PROTEIN (GNRP).//2.20E-28//273aa//31%//P27671

[32808] C-HEMBB1000693//Homo sapiens neuroanl mRNA, complete cds.//0//2952bp//94%//AF040723

[32809] C-HEMBB1000725//Rattus norvegicus GTPase Rab8b (Rab8b) mRNA, complete cds.//6.20E-130/1692bp//93%//U53475

[32810] C-HEMBB1000763//Homo sapiens CGI-89 protein mRNA, complete cds.//10//1676bp//96%//AF151847

[32811] C-HEMBB1000781//Homo sapiens mitogen-activated protein kinase kinase kinase MEKK2 mRNA, complete cds.//1.20E-126//613bp//97%//AF111105

[32812] C-HEMBB1000789//PUTATIVE 90.2 KD ZINC FINGER PROTEIN IN CCA1-ADK2 INTERGENIC REGION.//5.10E-54//232aa//43%//P39956

[32813] C-HEMBB1000831//Homo sapiens breast cancer nuclear receptor-binding auxiliary protein (BRX) mRNA, complete cds.//5.80E-60//301bp//99%//AF126008

[32814] C-HEMBB1000915//SUBTILISIN-LIKE PROTEASE PACE4 PRECURSOR (EC 3.4.21.-).//1.10E-08//129aa//31%//P29122

[32815] C-HEMBB1000927//Homo sapiens A-type potassium channel modulatory protein 2 (KCHIP2) mRNA, complete cds.//1.30E-126/1592bp//99%//AF199598

[32816] C-HEMBB1000947//Homo sapiens clone HAW 100 putative ribonuclease III mRNA, complete cds.//0//2292bp//99%//AF116910

[32817] C-HEMBB1000973//Mus musculus schlafen3 (Slfn3) mRNA, complete cds.//3.40E-120//580bp//67%//AF099974

[32818] C-HEMBB1000985//MIPP PROTEIN (MURINE IAP-PROMOTED PLACENTA-EXPRESSED PROTEIN).//8.60E-18//78aa//30%//P28575

[32819] C-HEMBB1001011//ZINC FINGER PROTEIN 84 (ZINC FINGER PROTEIN HPF2).//1.40E-73//230aa//45%//P51523

[32820] C-HEMBB1001056//PROLIFERATING-CELL NUCLEOLAR ANTIGEN P120 (PROLIFERATION-ASSOCIATED NUCLEOLAR PROTEIN P120).//2.90E-19//264aa//34%//P46087

[32821] C-HEMBB1001058//Homo sapiens neuronal thread protein AD7c-NTP mRNA, complete cds//3.60E-52//331bp//80%//AF010144

[32822] C-HEMBB1001068//Homo sapiens liprin-beta2 mRNA, partial cds.//2.40E-307//447bp//97%//AF034803

[32823] C-HEMBB1001112//Homo sapiens sec61 homolog mRNA, complete cds.//6.00E-145//961bp//83%//AF077032

[32824] C-HEMBB1001137//Homo sapiens mRNA for putative phospholipase, complete cds.//0//3069bp//99%//AB019435

[32825] C-HEMBB1001151//Rattus norvegicus golgi stacking protein homolog GRASP55 mRNA, complete cds.//4.20E-210//1835bp//76%//AF110267

[32826] C-HEMBB1001175//ANKYRIN.//7.00E-11//69aa//31%//Q02357

[32827] C-HEMBB1001234//65 KD YES-ASSOCIATED PROTEIN (YAP65).//5.40E-93//96aa//54%//P46938

[32828] C-HEMBB1001242//Homo sapiens topoisomerase-related function protein (TRF4-2) mRNA, partial cds.//1.80E-284//713bp//100%//AF089897

[32829] C-HEMBB1001282//ANKYRIN R (ANKYRINS 2.1 AND 2.2) (ERYTHROCYTE ANKYRIN).//7.00E-43//394aa//34%//P16157

[32830] C-HEMBB1001288//COPPER HOMEOSTASIS PROTEIN CUTC.//7.80E-46//63aa//51%//P46719

[32831] C-HEMBB1001294//GTP-BINDING PROTEIN TC 10.//1.20E-79//196aa//80%//P17081

[32832] C-HEMBB1001314//Mus musculus Olf-1/EBF-like-3 transcription factor (O/E-3) mRNA, complete cds.//1.30E-12911724bp//86%//U92703

[32833] C-HEMBB1001331//Mus musculus mRNA for hepatoma-derived growth factor, complete cds, strain:BALB/c.//2.I OE-65//458bp//79%//D63850

[32834] C-HEMBB1001339//DXS8237E PROTEIN (FRAGMENT).//4.60E-06//124aa//37%//P98175

[32835] C-HEMBB1001346//Homo sapiens phenylalanine-tRNA synthetase (FARS 1) mRNA, nuclear gene encoding mitochondrial protein, complete cds.//1H.10E-58//292bp//99%//AF097441

[32836] C-HEMBB1001384//Homo sapiens COP9 complex subunit 4 mRNA, complete cds.//0//1586bp//99%//AF100757

[32837] C-HEMBB1001429//Homo sapiens leucine aminopeptidase mRNA, complete cds.//0//933bp//99%//AF061738

[32838] C-HEMBB1001443//Rattus norvegicus pyruvate dehydrogenase phosphatase isoenzyme I mRNA, complete cds.//3.00E-130//553bp//86%//AF062740

[32839] C-HEMBB1001482//ZINC FINGER PROTEIN 91 (ZINC FINGER PROTEIN HTFI0) (HPF7).//2.10E-57//941aa//27%//Q05481

[32840] C-HEMBB1001562//CYLICIN II (MULTIPLE-BAND POLYPEPTIDE II).//1.40E-06//373aa//21%//Q28092

[32841] C-HEMBB1100564//VACUOLAR ATP SYNTHASE SUBUNIT H (EC 3.6.1.34) (V-ATPASE H SUBUNIT) (V-ATPASE M9.2 SUBUNIT) (9.2 KD MEMBRANE ACCESSORY PROTEIN).l/9.60E-32//80aa//78%//O15342

[32842] C-HEMBB1100673//Homo sapiens gene for new zinc finger protein, complete cds.//0//1919bp//99% //AB012770

[32843] C-HEMBB1001736//EUKARYOTIC TRANSLATION INITIATION FACTOR 3 SUBUNIT 9 (EIF3 P116) (EIF3 P110).//4.60E-15//391aa//25%//P55884

[32844] C-HEMBB1001749//TRANSCRIPTIONAL ACTIVATOR GCN5.l 1.70E-16//84aa//47%//Q03330

[32845] C-HEMBB1001802//Human desmin mRNA, complete cds.//0/1523bp//98%//U59167

[32846] C-HEMBB1001831//Homo sapiens PAM COOH-terminal interactor protein I (PCIP 1) mRNA, complete cds.//10//1514bp//99%//AF056209

[32847] C-HEMBB1001839I/GASTRULA ZINC FINGER PROTEIN XLCGF42.1 (FRAGMENT).//6.90E-1//87aa/135%//P18720

[32848] C-HEMBB1001871//BONE/CARTILAGE PROTEOGLYCAN I PRECURSOR (BIGLYCAN) (PG-S 1).//5.40E-75//241aa//48%//P47853

[32849] C-HEMBB1001872//CELL SURFACE GLYCOPROTEIN EMR1 PRECURSOR (EMR1 HORMONE RECEPTOR) (CELL SURFACE GLYCOPROTEIN F4/80).//1.90E-221/210aa/127%//Q61549

[32850] C-HEMBB1001905//TRICHOHYALIN.//2.10E-10//268aa//27%//P37709

[32851] C-HEMBB1001908//Human monocytic leukaemia zinc finger protein (MOZ) mRNA, complete cds.//1.60E-13//874bp//186%//U47742

[32852] C-HEMBB1100915//UBIQUITIN CARBOXYL-TERMINAL HYDROLASE 64E (EC 3.1.2.15) (UBIQUITIN THIOLESTERASE 64E) (UBIQUITIN-SPECIFIC PROCESSING PROTEASE 64E) (DEUBIQUITINATING ENZYME 64E).//6.90E-132//561aa/150%//Q24574

[32853] C-HEMBB1001950//PROBABLE OXYGEN-INDEPENDENT COPROPORPHYRINOGEN III OXIDASE (EC 1.-.-.-) (COPROPORPHYRINOGENASE) (COPROGEN OXIDASE).//1.60E-41//370aa/131%//P54304

[32854] C-HEMBB1002042//CYTOCHROME P450 4C 1 (EC 1.14.14.1) (CYPIVC 1).//2.70E-49//39aa//55%//P29981

[32855] C-HEMBB1002044//Mus musculus mRNA for vascular cadherin-2.//H0/3562bp/81%//Y08715

[32856] C-HEMBB1002134//ZINC-FINGER PROTEIN NEUR0-D4.//8.10E-56//176aa//67%//P56163

[32857] C-HEMBB1002193//TYROSINE-PROTEIN KINASE RECEPTOR TYRO3 PRECURSOR (TYROSINE-PROTEIN KINASE RSE) (TYROSINE-PROTEIN KINASE DTK) (TK19-2).//8.70E-6//177aa//74%//P55144

[32858] C-HEMBB1002217//ZINC FINGER PROTEIN 91 (ZINC FINGER PROTEIN HTF10) (HPF7).//2.10E-132//399aa/144%//Q05481

[32859] C-HEMBB1002266//NEURONAL PROTEIN.//2.10E-46//121aa//76% //P41737

[32860] C-HEMBB1002342//Homo sapiens PKCq-interacting protein PICOT (PICOT) mRNA, complete cds.//1.50E-229//1045bp//99%//AF118649

[32861] C-HEMBB1002442//LIN-10 PROTEIN.//9.70E-14//21aa/131% I/P34692

[32862] C-HEMBB1002477//Human Grb2-associated binder- I mRNA, complete cds.//7.70E-25811774bp//99%//U43885

[32863] C-HEMBB1002510//GYP7 PROTEIN.//3.10E-50//192aa//42%//P48365

[32864] C-HEMBB1002550//HYPOTHETICAL UOG-1 PROTEIN.//5.00E-28//266aa//33%//P27544

[32865] C-HEMBB1002600//Homo sapiens tetraspan NET-5 mRNA, complete cds.//0//1417bp//99%//AF089749

[32866] C-HEMBB1002607//Homo sapiens vitamin D3 receptor interacting protein (DRIP80) mRNA, complete cds.//2.00E-13611660bp/H98%//AF105421

[32867] C-HEMBB1002705//Homo sapiens CGI-27 protein mRNA, complete cds.//7.80E-285//841bp//96%//AF132961

[32868] C-MAMMA1000020//H. sapiens mRNA for flavin-containing monooxygenase 5 FMO5).//8.20E-198/1868bp//99%//Z47553

[32869] C-MAMMA1000045//ENV POLYPROTEIN [CONTAINS: SURFACE PROTEIN GP85; EMBRANE PROTEIN GP37].//1.90E-07//249aa//27%//P03396

[32870] C-MAMMA1000055//TESTIN 2 (TES2) [CONTAINS: TESTIN I (TES1)].//1.50E-90//323aa//48%//P47226

[32871] C-MAMMA1000085//PUTATIVE CYSTEINYL-TRNA SYNTHETASE C29E6.06C (EC 6.1.1.16) (CYSTEINE-TRNA LIGASE) (CYSRS).//2.10E-90//427aa//39%//Q09860

[32872] C-MAMMA1000173//Homo sapiens src homology 3 domain-containing protein HIP-55 mRNA, complete cds.//2.60E-164//1044bp//87%//AF197060

[32873] C-MAMMA1000183//ZINC FINGER PROTEIN 84 (ZINC FINGER PROTEIN HPF2).//3.40E-134//359aa//63%//P51523

[32874] C-MAMMA1000284//P. walti mRNA for rnp associated protein 55.//2.20E-109/1864bp//76%//X99836

[32875] C-MAMMA1000388//Homo sapiens UKLF mRNA for ubiquitous Kruppel like factor, complete cds.//0//466bp//99%//AB015132

[32876] C-MAMMA1000416//HYPOTHETICAL 32.0 KD PROTEIN C09F5.2 IN CHROMOSOME III.//2.00E-30//119aa//53%//Q09232

[32877] C-MAMMA1000612//Homo sapiens G protein beta subunit mRNA, partial cds.//8.30E-178//1992bp//84%//AF195883

[32878] C-MAMMA1000625//GYP7 PROTEIN.//2.10E-41//98aa//40%//P48365

[32879] C-MAMMA1000672//VITELLOGENIC CARBOXYPEPTIDASE PRECURSOR (EC 3.4.16.-).//4.40E-33//250aa//33%//P42660

[32880] C-MAMMA1000684//Homo sapiens opioid growth factor receptor mRNA, complete cds.//0//2391bp//99%//AF172451

[32881] C-MAMMA1000713//L-RIBULOKINASE (EC 2.7.1.16).//7.70E-17//246aa//29%//P94524

[32882] C-MAMMA1000731//CHROMODOMAIN-HELICASE-DNA-BINDING PROTEIN 1 (CHD-1).//1.00E-77//395aa//45%//O14646

[32883] C-MAMMA1000734//Homo sapiens mRNA for SEC63 protein.//0//1587bp//99%//AJ011779

[32884] C-MAMMA1000738//HYPOTHETICAL 116.5 KD PROTEIN C20G8.09C IN CHROMOSOME I.//9.00E-299//1033aa//55%//P87115

[32885] C-MAMMA1000824//ACTIN.//6.20E-20//284aa//28%//P53500

[32886] C-MAMMA1000841//PUTATIVE AMIDASE (EC 3.5.1.4).//7.80E-40//101aa//54%//O27540

[32887] C-MAMMA1000897//INTER-ALPHA-TRYPSIN INHIBITOR HEAVY CHAIN H3 PRECURSOR (ITI HEAVY CHAIN H3) (SERUM-DERIVED HYALURONAN-ASSOCIATED PROTEIN) (SHAP).//1.00E-141//576aa//37%//Q06033

[32888] C-MAMMA1000956//Homo sapiens CLDN8 gene for claudin-8.//0//1767bp//99%//AJ250711

[32889] C-MAMMA1001008//Homo sapiens aspartic-like protease mRNA, complete cds.//2.50E-276//263bp//99%//AF117892

[32890] C-MAMMA1001030//LUTROPIN-CHORIOGONADOTROPIC HORMONE RECEPTOR (LH/CG-R) (LSH-R) (LUTEINIZING HOROMINE RECEPTOR) (FRAGMENT).//1.20E-26//276aa//28%//Q90674

[32891] C-MAMMA1001038//MYOSIN LIGHT CHAIN KINASE, SMOOTH MUSCLE AND NON-MUSCLE ISOZYMES (EC 2.7.1.117) (MLCK) [CONTAINS: TELOKIN].//2.60E-107//190aa//95%//Q15746

[32892] C-MAMMA1001041//SPECTRIN BETA CHAIN, BRAIN (SPECTRIN, NON-ERYTHROID BETA CHAIN) (FODRIN BETA CHAIN) (SPTBN1).//1.60E-16//113aa//41%//Q01082

[32893] C-MAMMA100059//Homo sapiens mRNA for DEAD Box Protein 5./0//1440bp//99%//AJ237946

[32894] C-MAMMA1001075//Homo sapiens CGI-72 protein mRNA, complete cds.//1.30E-181//397bp//98%//AF151830

[32895] C-MAMMA1001080//Homo sapiens SNC73 protein (SNC73) mRNA, complete cds.//1.6e-312//596bp//94%//AF067420

[32896] C-MAMMA1001105//OVO PROTEIN (SHAVEN BABY PROTEIN).//4.00E-49//125aa//68%//P51521

[32897] C-MAMMA1001139//SRE-2 PROTEIN.//5.80E-35//239aa//38%//Q09273

[32898] C-MAMMA1001181//ABCI PROTEIN HOMOLOG PRECURSOR.//1.30E-07//81aa//45%//Q92338

[32899] C-MAMMA1001198//Homo sapiens eps1SR mRNA, partial cds.//0//2253bp//99%//AB015346

[32900] C-MAMMA1001222//EBNA-2 NUCLEAR PROTEIN.//6.60E-09//255aa//29%//P12978

[32901] C-MAMMA1001259//Mus musculus F-box protein FBX18 mRNA, partial cds.//2.30E-271//1414bp//89%//AF184275

[32902] C-MAMMA1001260//HYPOTHETICAL 97.1 KD PROTEIN R05D3.4 IN CHROMOSOME III.//2.10E-52//630aa//30%//P34537

[32903] C-MAMMA1001305//RHO-GTPASE-ACTIVATING PROTEIN 1 (GTPASE-ACTIVATING PROTEIN RHOGAP) (RHO-RELATED SMALL GTPASE PROTEIN ACTIVATOR) (CDC42 GTPASE-ACTIVATING PROTEIN) (P50-RHOGAP).//2.20E-98//283aa//63%//Q07960

[32904] C-MAMMA10013 22//B-CELL GROWTH FACTOR PRECURSOR (BCGF-12 KD).//0.000000017//46aa//60%//P20931

[32905] C-MAMMA1001388//LEUCINE-RICH ALPHA-2-GLYCOPROTEIN (LRG).//1.40E-165//312aa//99%//P02750

[32906] C-MAMMA1001476//URIDINE KINASE (EC 2.7.1.48) (URIDINE MONOPHOSPHOKINASE) (FRAGMENT).//6.50E-129//260aa//92%//P52623

[32907] C-MAMMA10015011//CALPAIN 1, LARGE [CATALYTIC] SUBUNIT (EC 3.4.22.17) (CALCIUM-ACTIVATED NEUTRAL PROTEINASE) (CANP) (MU-TYPE).//5.70E-55//186aa//97%//P07384

[32908] C-MAMMA1001576//Human gamma-tubulin mRNA, complete cds.//7.50E-276//561bp//90%//M61764

[32909] C-MAMMA1001627//Homo sapiens mRNA for transcription factor TBX6.//5.20E-18911871bp//99%//AJ007989

[32910] C-MAMMA1001633//ZINC FINGER PROTEIN 165.//6.30E-3911160aa//55%//P49910

[32911] C-MAMMA1001679//F-ACTIN CAPPING PROTEIN BETA SUBUNIT (CAPZ).//0.00000058//29aa//100%//P47756

[32912] C-MAMMA1001730//Homo sapiens brain and nasopharyngeal carcinoma susceptibility protein NSG-x mRNA, partial cds.//0//1603bp//99%//AF095687

[32913] C-MAMMA1001735//TUBULIN BETA-5 CHAIN (BETA-TUBULIN CLASS-V).//5.90E-240//445aa//97%//P09653

[32914] C-MAMMA1001743//Y BOX BINDING PROTEIN-1 (Y-BOX TRANSCRIPTION FACTOR).//8.50E-32//171aa//36%//P21573

[32915] C-MAMMA1001751//Homo sapiens tandem pore domain potassium channel TWIK-2 (KCNK6) mRNA, complete cds.//0//2332bp/199%//AF17708

[32916] C-MAMMA1001754//Homo sapiens Vacuolar proton pump subunit SFD alpha isoform mRNA, complete cds.//0//1987bp//99%//AF112204

[32917] C-MAMMA1001768//CELL DIVISION CYCLE PROTEIN 48 HOMOLOG MJI 156.//3.80E-45//351aa//38%//Q58556

[32918] C-MAMMA1001771//M. musculus mRNA for semaphorin B.//2.60E-200//272bp//79%//X85991

[32919] C-MAMMA1001820//Rattus norvegicus mRNA for PAG608 gene.//1.30E-198//157bp//80%//Y13148

[32920] C-MAMMA1001837//ZINC FINGER PROTEIN 29 (ZFP-29).112.60E-77//507aa//38%//Q07230

[32921] C-MAMMA1001868//TRICHOHYALIN.//2.70E-19//359aa//25%//P22793

[32922] C-MAMMA1002143//Homo sapiens Cdc42 effector protein 4 mRNA, complete cds.//1.70E-252//1170bp//99%//AF099664

[32923] C-MAMMA1002170//40S RIBOSOMAL PROTEIN S2 (S4) (LLREP3 PROTEIN).//6.00E-66//157aa//70%//P15880

[32924] C-MAMMA1002198//THIOREDOXIN PEROXIDASE 1 (THIOREDOXIN-DEPENDENT PEROXIDE REDUCTASE 1) (THIOL-SPECIFIC ANTIOXIDANT PROTEIN) (TSA) (PRP) (NATURAL KILLER CELL ENHANCING FACTOR B) (NKEF-B).//5.20E-61//60aa//90%//P32119

[32925] C-MAMMA1002219//Rattus norvegicus rexo70 mRNA, complete cds.//1.30E-181//861bp//98%//AF032667

[32926] C-MAMMA1002236//TRANSLATION INITIATION FACTOR EIF-2B GAMMA SUBUNIT (EIF-2B GDP-GTP EXCHANGE FACTOR).//8.80E-217//310aa//86%//P70541

[32927] C-MAMMA1002268//Mus musculus sphingosine kinase (SPHKla) mRNA, partial cds.//1.00E-190//624bp//76%//AF068748

[32928] C-MAMMA1002297//Homo sapiens mRNA for Rab6 GTPase activating protein.//1.10E-214//881bp//97%//AJ01679

[32929] C-MAMMA1002329//M. musculus mRNA for semaphorin B.//3.80E-451/332bp//84%//X85991

[32930] C-MAMMA1002351//Mus musculus dynactin subunit p25 (p25) mRNA, complete cds.//4.30E-11911773bp//86%//AF190795

[32931] C-MAMMA1002385//RIBONUCLEOPROTEIN RB97D.//H1.50E-07//206aa//29%//Q02926

[32932] C-MAMMA1002428//LYSOSOME MEMBRANE PROTEIN II (LIMP II) (85 KD LYSOSOMAL MEMBRANE SIALOGLYCOPROTEIN) (LGP85) (CD36 ANTIGEN-LIKE 2).//1.10E-24//96aa//68%//Q14108

[32933] C-MAMMA1002470//PROBABLE NH(3)-DEPENDENT NAD(+) SYNTHETASE (EC 6.3.5.1).//1.00E-111/128aa//36%//P47623

[32934] C-MAMMA1002485//Homo sapiens stanniocalcin-related protein mRNA, complete cds.//0//1822bp//99%//AF098462

[32935] C-MAMMA1002524//HYPOTHETICAL 117.8 KD PROTEIN IN STE2-FRS2 INTERGENIC REGION.//1.20E-34//337aa//31%//P43571

[32936] C-MAMMA1002530//Homo sapiens cytosolic phospholipase A2 gamma (cPLA2 gamma) mRNA, complete cds.//0//H1910bp//99%//AF065214

[32937] C-MAMMA1002573//GLUCOAMYLASE S1/S2 PRECURSOR (EC 3.2.1.3) (GLUCAN 1,4-ALPHA- GLUCOSIDASE) (1,4-ALPHA-D-GLUCAN GLUCOHYDROLASE).//2.60E-19//666aa//23%//P08640

[32938] C-MAMMA1002617//ZINC FINGER PROTEIN 135.//7.60E-89//252aa//57%//P52742

[32939] C-MAMMA1002619//PROBABLE UBIQUITIN CARBOXYL-TERMINAL HYDROLASE K02C4.3 (EC 3.1.2.15) (UBIQUITIN THIOLESTERASE) (UBIQUITIN-SPECIFIC PROCESSING PROTEASE) (DEUBIQUITINATING ENZYME).//9.50E-16//159aa//37%//Q09931

[32940] C-MAMMA1002622//VILLIN.//7.20E-35//53aa//64%//P02640

[32941] C-MAMMA1002637//KINESIN LIGHT CHAIN (KLC).//1.30E-198//550aa//70%//Q07866

[32942] C-MAMMA1002650//Mus musculus ODA-8S protein mRNA, complete cds.//5.40E-5711480bp//68%//AF194030

[32943] C-MAMMA1002655//Homo sapiens mRNA for ganglioside sialidase, complete cds.//0//1515bp//99%//AB008185

[32944] C-MAMMA10026711//ACETYL-COENZYME A SYNTHETASE (EC 6.2.1.1) (ACETATE-COA LIGASE) (ACYL- ACTIVATING ENZYME).//1.I OE-45//618aa//26%//P27550

[32945] C-MAMMA1002699//Rattus norvegicus EH domain binding protein Epsin mRNA, complete cds.//4.3e-317//942bp//85%//AF018261

[32946] C-MAMMA1002769//Homo sapiens cell cycle progression restoration 8 protein (CPR8) mRNA, complete cds.//2.20E-25//330bp//77%//AF01794

[32947] C-MAMMA1002842//Mus musculus c-Cb1 associated protein CAP mRNA, complete cds.//2.60E-58//373bp//81%//U58883

[32948] C-MAMMA1002844//TRIOSE PHOSPHATE/PHOSPHATE TRANSLOCATOR, NON-GREEN PLASTID PRECURSOR (CTPT).//4.90E-10//334aa//22%//P52178

[32949] C-MAMMA1002858//Rat cMG 1 mRNA.//3.70E-238//1147bp//92%//X52590

[32950] C-MAMMA1002869//PINCH PROTEIN (PARTICULARY INTERESTING NEW CYS-HIS PROTEIN).//1.40E-160//305aa//851%//P48059

[32951] C-MAMMA1002881//GLIOMA PATHOGENESIS-RELATED PROTEIN (RTVP-1 PROTEIN).//5.70E-30//214aa//35%//P48060

[32952] C-MAMMA1002937//ZINC FINGER PROTEIN 135.//8.30E-99//393aa//43%//P52742

[32953] C-MAMMA1002972//VACUOLAR PROTEIN SORTING-ASSOCIATED PROTEIN VPS27.//1.10E-05//69aa//42%//P40343

[32954] C-MAMMA1003011//HISTONE MACR0-H2A.1.//2.70E-123//370aa//66%//Q02874

[32955] C-MAMMA1003013//DNA POLYMERASE BETA (EC 2.7.7.7).//7.40E-46//332aa//36%//P06746

[32956] C-MAMMA1003035//RIBOSOMAL LARGE SUBUNIT PSEUDOURIDINE SYNTHASE C (EC 4.2.1.70) (PSEUDOURIDYLATE SYNTHASE) (URACIL HYDROLYASE).//1.90E-13//108aa//33%//P23851

[32957] C-MAMMA1003047//Homo sapiens protein inhibitor of activated STAT protein PIASy mRNA, complete cds.//0//533bp//99%//AF077952

[32958] C-MAMMA1003057//MD6 PROTEIN.//3.10E-225//419aa//97%//Q60584

[32959] C-MAMMA1003113//Mus musculus COP9 complex subunit 7a (COPS7a) mRNA, complete cds.//1.10E-234//1178bp//86%//AF071316

[32960] C-MAMMA1003127//MYOSIN I ALPHA (MMI-ALPHA).//2.20E-105//217aa//89%//P46735

[32961] C-MAMMA1003146//Homo sapiens mRNA for GalT3 protein.//4.30E-218//996bp//99%//Y15062

[32962] C-MAMMA1003150//HYPOTHETICAL 118.4 KD PROTEIN IN BAT2-DAL5 INTERGENIC REGION PRECURSOR.//5.00E-13//592aa//24%//P47179

[32963] C-MAMMA1003166//Homo sapiens MLL septin-like fusion protein (MSF) mRNA, complete cds.//3.I OE-15811592bp//97%//AF123052

[32964] C-NT2RM1000001//D. melanogaster sap47-2 mRNA.//1.50E-10//417bp//62%//X80110

[32965] C-NT2RM1000039//HYPOTHETICAL 41.4 KD PROTEIN IN SRLQ-HYPF INTERGENIC REGION (EC 1.18.1.-) (ORF4) (ORF2).//2.90E-14//299aa//25%//P37596

[32966] C-NT2RM1000055//Rattus norvegicus mRNA for TIP120, complete cds.//0//3106bp//89%//D87671

[32967] C-NT2RM1000080//UNC-1 PROTEIN.//5.90E-25//211aa//31%//Q21190

[32968] C-NT2RM1000086//HYPOTHETICAL 97.1 KD PROTEIN R05D3.4 IN CHROMOSOME III.118.40E-52//364aa//32%//P34537

[32969] C-NT2RM1000092//MULTIDRUG RESISTANCE PROTEIN 2 (MULTIDRUG-EFFLUX TRANSPORTER 2).//1.00E-07//362aa//23%//P39843

[32970] C-NT2RM1000118//CALCINEURIN B SUBUNIT (PROTEIN PHOSPHATASE 2B REGULATORY SUBUNIT) (CALCINEURIN REGULATORY SUBUNIT).//1.20E-10//50aa//28%//P87072

[32971] C-NT2RM1000132//Homo sapiens NADH:ubiquinone oxidoreductase NDUFS6 subunit mRNA, nuclear gene encoding mitochondrial protein, complete cds.//7.80E-110//516bp//99%//AF044959

[32972] C-NT2RM1000153//CYTOSOLIC PURINE 5′-NUCLEOTIDASE (EC 3.1.3.5).//3.30E-38//469aa//27%//P49902

[32973] C-NT2RM1000186//CALCINEURIN B SUBUNIT (PROTEIN PHOSPHATASE 2B REGULATORY SUBUNIT) (CALCINEURIN REGULATORY SUBUNIT).//1.20E-10//50aa//28%//P87072

[32974] C-NT2RM1000187//PUTATIVE PRE-MRNA SPLICING FACTOR ATP-DEPENDENT RNA HELICASE SPAC10F6.02C.//1.10E-10//94aa//47%//O42643

[32975] C-NT2RM1000199//Homo sapiens mRNA for type I transmembrane receptor (psk- I gene).//0//2476bp//99%//AJ245820

[32976] C-NT2RM1000244//Homo sapiens TRAF4 associated factor 1 mRNA, partial cds.//2.00E-12611592bp//99%//U81002

[32977] C-NT2RM1000252//H. sapiens E-MAP-115 mRNA.//9.70E-35//569bp//64%//X73882

[32978] C-NT2RM1000256//Homo sapiens mRNA for Glutamine:fructose-6-phosphate amidotransferase, complete cds.//0//3012bp//99%//AB016789

[32979] C-NT2RM1000257//MAGO NASHI PROTEIN.//7.90E-69//143aa//91%//P49028

[32980] C-NT2RM1000260//Homo sapiens thyroid hormone receptor-associated protein complex component TRAP100 mRNA, complete cds.//0//2766bp//99%//AF055995

[32981] C-NT2RM1000280//VACUOLAR ATP SYNTHASE SUBUNIT D (EC 3.6.1.34) (V-ATPASE D SUBUNIT) (V- ATPASE 28 KD ACCESSORY PROTEIN).//1.50E-106//118aa//97%//P39942

[32982] C-NT2RM1000354//Xenopus laevis chromosome condensation protein XCAP-G mRNA, complete cds.//7.40E-245//2101bp//68%//AF111423

[32983] C-NT2RM1000355//Homo sapiens transmembrane protein BR1 (BR1) mRNA, complete cds.//0//1599bp//99%//AF152462

[32984] C-NT2RM1000377//Homo sapiens dual specificity phosphatase MKP5 (MKP5) mRNA, complete cds.//3.20E-196//1016bp//94%//AF179212

[32985] C-NT2RM1000388//HYPOTHETICAL 27.7 KD PROTEIN IN CPTI-SPC98 INTERGENIC REGION.//0.000000019//67aa//31%//P53915

[32986] C-NT2RM1000421//RIBONUCLEASE INHIBITOR.//4.40E-21//372aa//30%//P10775

[32987] C-NT2RM1000430//Homo sapiens erythroblast macrophage protein EMP mRNA, complete cds.//1.40E-185//1486bp//81%//AF084928

[32988] C-NT2RM1000499//Caenorhabditis elegans mRNA for centaurin gamma IA.//3.00E-17//927bp//58%//AJ132700

[32989] C-NT2RM1000539//Homo sapiens mRNA for Lsm5 protein.//3.00E-15811733bp//99%//AJ238097

[32990] C-NT2RM1000553//Homo sapiens putative glycolipid transfer protein mRNA, complete cds.//3.40E-177//814bp//99%//AF103731

[32991] C-NT2RM1000555//UNR PROTEIN.//0//678aa//98%//P18395

[32992] C-NT2RM1000563//TRANSMISSION-BLOCKING TARGET ANTIGEN S230 PRECURSOR.//0.0000068//199aa//30%//Q08372

[32993] C-NT2RM1000623//RIBONUCLEASE INHIBITOR.//4.40E-21//372aa//30%//P10775

[32994] C-NT2RM1000648//GLYCOSYLTRANSFERASE ALG2 (EC 2.4.1.-).//8.50E-75//301aa//39%//P43636

[32995] C-NT2RM1000661//Homo sapiens translation initiation factor 4e mRNA, complete cds.//5.70E-210//960bp//99%//AF038957

[32996] C-NT2RM1000666//DNA-BINDING PROTEIN A.//2.20E-09//165aa//34%//P16989

[32997] C-NT2RM1000691//Homo sapiens mRNA for PLU-1 protein.//0//3104bp//99%//AJ132440

[32998] C-NT2RM1000702//PUTATIVE SERINE/THREONINE-PROTEIN KINASE PKWA (EC 2.7.1.-).//5.60E-08//87aa//27%//P49695

[32999] C-NT2RM1000742//Homo sapiens AC133 antigen mRNA, complete cds.//0//3524bp//99%//AF027208

[33000] C-NT2RM1000746//Homo sapiens polyamine modulated factor-1 (PMF 1) mRNA, complete cds.//6.70E-227//1043bp//99%//AF141310

[33001] C-NT2RM1000770//DXS6673E PROTEIN.//1.40E-39//194aa//48%//Q14202

[33002] C-NT2RM1000772//VEGETATIBLE INCOMPATIBILITY PROTEIN HET-E- I.//7.30E-15//280aa//27%//Q00808

[33003] C-NT2RM1000800//Mus musculus partial mRNA for B-IND 1 protein (B-ind1 gene).//1.10E-98//571bp//89%//Z97207

[33004] C-NT2RM1000811//Homo sapiens AC133 antigen mRNA, complete cds.//0//3524bp//99%//AF027208

[33005] C-NT2RM1000826//UNR PROTEIN.//0//678aa//98%//P18395

[33006] C-NT2RM1000833//Homo sapiens sec61 homolog mRNA, complete cds.//0//3541bp//99%//AF084458

[33007] C-NT2RM1000850//ANKYRIN R (ANKYRINS 2.1 AND 2.2) (ERYTHROCYTE ANKYRIN).//9.70E-42//3333aa//36%//P16157

[33008] C-NT2RM1000852//Homo sapiens putative ATP-dependent RNA helicase ROK1 mRNA, complete cds.//0//2206bp//99%//AF077033

[33009] C-NT2RM1000874//Homo sapiens death effector domain-containing testicular molecule mRNA, complete cds.//1.40E-244//1113bp//99%//AF043733

[33010] C-NT2RM1000882//Homo sapiens delta-6 fatty acid desaturase mRNA, complete cds.//4.30E-122//1394bp//69%//AF126799

[33011] C-NT2RM1000883//Homo sapiens I-1 receptor candidate protein mRNA, complete cds.//0//5107bp//99%//AF082516

[33012] C-NT2RM1000885//HYPOTHETICAL 97.1 KD PROTEIN R05D3.4 IN CHROMOSOME III.//1.80E-56//630aa//30%//P34537

[33013] C-NT2RM1000894//DNA-DIRECTED RNA POLYMERASE 1135 KD POLYPEPTIDE (EC 2.7.7.6) (RNA POLYMERASE I SUBUNIT 2) (RPA135).//0//1020aa//89%//P70700

[33014] C-NT2RM1000898//ACTIN, CYTOPLASMIC (ACTIN, MICRONUCLEAR).//8.90E-26//229aa//29%//P02583

[33015] C-NT2RM1000924//HYPOTHETICAL 39.7 KD PROTEIN C34E10.2 IN CHROMOSOME III.//1.00E-15//266aa//26%//P46577

[33016] C-NT2RM1001003//Homo sapiens alpha-catenin-like protein (CTNNAL1) mRNA, complete cds.//0//2230bp//99%//AF030233

[33017] C-NT2RM1001008//HYPOTHETICAL 72.5 KD PROTEIN C2F7.10 IN CHROMOSOME I.//1.60E-13//19aa//36%//Q09701

[33018] C-NT2RM1001059//NUCLEAR POLYADENYLATED RNA-BINDING PROTEIN NAB4.//3.60E-11//180aa//28%//Q99383

[33019] C-NT2RM1001072//1-PHOSPHATIDYLINOSITOL-4,5-BISPHOSPHATE PHOSPHODIESTERASE GAMMA 1 (EC 3.1.4.11) (PLC-GAMMA-1) (PHOSPHOLIPASE C-GAMMA-1) (PLC-II) (PLC-148).//8.30E-47//259aa//35%//P08487

[33020] C-NT2RM1001092//ZINC FINGER PROTEIN 91 (ZINC FINGER PROTEIN HTFIO) (HPF7).//3.60E-1115//332aa//52%//Q05481

[33021] C-NT2RM1001102//Human HEM45 mRNA, complete cds.//2.30E-27//482bp//63%//U88964

[33022] C-NT2RM100115//ENDOCHITINASE 2 PRECURSOR (EC 3.2.1.14).//5.60E-06//239aa//27%//P54197

[33023] C-NT2RM2000013//DNA-DIRECTED RNA POLYMERASE III 128 KD POLYPEPTIDE (EC 2.7.7.6) (RNA POLYMERASE III SUBUNIT 2).//2.20E-1441/362aa//71%//P25167

[33024] C-NT2RM2000030//DYNEIN INTERMEDIATE CHAIN, CYTOSOLIC (DH IC) (CYTOPLASMIC DYNEIN INTERMEDIATE CHAIN).//0.00000043//136aa//31%//P54703

[33025] C-NT2RM2000092//UBIQUITIN CARBOXYL-TERMINAL HYDROLASE 8 (EC 3.1.2.15) (UBIQUITIN THIOLESTERASE 8) (UBIQUITIN-SPECIFIC PROCESSING PROTEASE 8) (DEUBIQUITINATING ENZYME 8).//1.30E-36//160aa//40%//P50102

[33026] C-NT2RM2000191//Homo sapiens cGMP phosphodiesterase Al (PDE9A) mRNA, complete cds.//0//574bp//99%//AF067223

[33027] C-NT2RM2000260//EXTENSIN PRECURSOR (PROLINE-RICH GLYCOPROTEIN).//3.60E-19//181aa//34%//P14918

[33028] C-NT2RM2000322//SPERMIDINE SYNTHASE (EC 2.5.1.16) (PUTRESCINE AMINOPROPYLTRANSFERASE) (AMINOPROPYLTRANSFERASE).//8.I OE-06//167aa//29%//O48660

[33029] C-NT2RM2000363//BREAKPOINT CLUSTER REGION PROTEIN.//1.80E-14//245aa//29%//P11274

[33030] C-NT2RM2000368//Homo sapiens protein kinase C-binding protein RACK7 mRNA, partial cds.//0//1506bp//99%//U48251

[33031] C-NT2RM2000371//POLYRIBONUCLEOTIDE NUCLEOTIDYLTRANSFERASE (EC 2.7.7.8) (POLYNUCLEOTIDE//1.70E-68//419aa//360%//P50849

[33032] C-NT2RM2000402//ENDOSOMAL P24A PROTEIN PRECURSOR (70 KD ENDOMEMBRANE PROTEIN) (PHEROMONE ALPHA-FACTOR TRANSPORTER) (ACIDIC 24 KD LATE ENDOCYTIC INTERMEDIATE COMPONENT).//1.60E-54//344aa/133%//P32802

[33033] C-NT2RM2000407//Mus musculus semaphorin VIa mRNA, complete cds.//9.70E-201//826bp//84%//AF030430

[33034] C-NT2RM2000422//SODIUM- AND CHLORIDE-DEPENDENT TRANSPORTER NTT73.//1.00E-222//237aa//89%//Q08469

[33035] C-NT2RM2000452//HYPOTHETICAL 63.6 KD PROTEIN IN YPT52-GCN3 INTERGENIC REGION.//1.00E-07/157aa//28%//P36113

[33036] C-NT2RM2000469//NITROGEN PERMEASE REACTIVATOR PROTEIN (EC 2.7.1.-).118.90E-06//377aa/124%//P22211

[33037] C-NT2RM2000490//SYNAPTOTAGMIN (P65).//1.80E-13//66aa//34%//P41823

[33038] C-NT2RM2000502//Rattus norvegicus W307 mRNA, complete cds.//1.70E-5811381bp//86%//U78304

[33039] C-NT2RM2000504//Homo sapiens metalloprotease 1 (MP 1) mRNA, complete cds.//0//1673bp/199%//AF061243

[33040] C-NT2RM2000522//SKIN SECRETORY PROTEIN XP2 PRECURSOR (APEG PROTEIN).//1.30E-12//282aa//32%//P17437

[33041] C-NT2RM2000566//Homo sapiens integrin alpha-7 mRNA, complete cds.11//02519bp//96%//AF032108

[33042] C-NT2RM2000577//ISOLEUCYL-TRNA SYNTHETASE (EC 6.1.1.5) (ISOLEUCINE-TRNA LIGASE) (ILERS).//1.70E-187//741aa//46%//P73505

[33043] C-NT2RM2000588//HISTONE DEACETYLASE HDA 1.//2.80E-60//384aa//40%//P53973

[33044] C-NT2RM2000594//Homo sapiens DNA cytosine-5 methyltransferase 3 beta 3 (DNMT3B) mRNA, complete cds.//0//2712bp//99%//AF156487

[33045] C-NT2RM2000599//Homo sapiens F-box protein Lilina (LILINA) mRNA, complete cds.//4.90E-70//838bp//69%//AF179221

[33046] C-NT2RM2000609//Homo sapiens CTL1 gene.//0//1559bp//99%//AJ245620

[33047] C-NT2RM2000612//Rattus norvegicus ADP-ribosylation factor-directed GTPase activating protein mRNA, complete cds.//2.60E-106//1069bp//74%//U35776

[33048] C-NT2RM2000624//SPLICING FACTOR, ARGININE/SERINE-RICH 4 (PRE-MRNA SPLICING FACTOR SRP75).//4.40E-32//319aa//35%//Q08170

[33049] C-NT2RM2000691//ACTIN-LIKE PROTEIN 3 (ACTIN-2).//3.70E-142//285aa//90%//P32391

[33050] C-NT2RM2000714//RAS SUPPRESSOR PROTEIN 1 (RSU-1) (RSP-1 PROTEIN) (RSP-1).//3.80E-23//184aa//36%//Q15404

[33051] C-NT2RM2000718//Homo sapiens endocrine regulator mRNA, complete cds.//0//1731bp//99%//AF121141

[33052] C-NT2RM2000735//ZINC FINGER PROTEIN 43 (ZINC PROTEIN HTF6).I/2.90E-103//249aa/173%//P28160

[33053] C-NT2RM2000740//POSSIBLE GLOBAL TRANSCRIPTION ACTIVATOR SNF2L.//5.70E-53//266aa//43%//P41877

[33054] C-NT2RM2000821//COATOMER BETA SUBUNIT (BETA-COAT PROTEIN) (BETA-COP).//9.50E-279//545aa//98%//P23514

[33055] C-NT2RM2000951//Homo sapiens XYLB mRNA for xylulokinase, complete cds.//1.70E-200//927bp//99%//AB015046

[33056] C-NT2RM2001035//CCR4-ASSOCIATED FACTOR 1 (CAF1).//8.20E-154//285aa//99%//Q60809

[33057] C-NT2RM2001065//Homo sapiens COP9 complex subunit 4 mRNA, complete cds.//0//1554bp//99%//AF100757

[33058] C-NT2RM2001100//HYPOTHETICAL 39.7 KD PROTEIN C34E10.2 IN CHROMOSOME III.//2.40E-15//266aa//26%//P46577

[33059] C-NT2RM2001105//Drosophila melanogaster eyelid (eld) mRNA, complete cds.//1.20E-28//805bp//61%//AF053091

[33060] C-NT2RM2001196//PROLINE-RICH PROTEIN MP-3 (FRAGMENT).//1.30E-20//267aa//35%//P05143

[33061] C-NT2RM2001201//EUKARYOTIC TRANSLATION INITIATION FACTOR 5 (EIF-5).//1.50E-07//95aa//35%//P48724

[33062] C-NT2RM2001221//KALIRIN (PAM COOH-TERMINAL INTERACTOR PROTEIN 10) (P-CIPI 0).//3.60E-10//177aa//32%//P97924

[33063] C-NT2RM2001238//GLUTAMINASE, KIDNEY ISOFORM PRECURSOR (EC 3.5.1.2) (GLS) (L-GLUTAMINE AMIDOHYDROLASE).//1.30E-180//328aa//99%//P13264

[33064] C-NT2RM2001256//PROTEIN TSG24 (MEIOTIC CHECK POINT REGULATOR).//1.60E-166//312aa//98%//P53995

[33065] C-NT2RM2001324//ZYXIN.//6.80E-55//200aa//41%//Q04584

[33066] C-NT2RM2001345//VEGETATIBLE INCOMPATIBILITY PROTEIN HET-E-1.//2.90E-08//334aa//22%//Q00808

[33067] C-NT2RM2001424//Homo sapiens mRNA for El B-55 kDa-associated protein.//0//1621bp//99%//AJ007509

[33068] C-NT2RM2001499//LOW-AFFINITY CATIONIC AMINO ACID TRANSPORTER-2 (CAT-2) (CAT2).//7.40E-121//437aa//57%//P52569

[33069] C-NT2RM2001547//PROBABLE PROTEIN DISULFIDE ISOMERASE P5 PRECURSOR (EC 5.3.4.1).//6.90E-27//90aa//42%//P38660

[33070] C-NT2RM2001575//52 KD RO PROTEIN (SJOGREN SYNDROME TYPE A ANTIGEN (SS-A)) (RO(SS-A)).//4.30E-61//312aa//44%//P19474

[33071] C-NT2RM2001592//Rattus norvegicus rexo70 mRNA, complete cds.//3.10E-15611909bp//88%//AF032667

[33072] C-NT2RM2001605//Homo sapiens mRNA for PLU- I protein.//0//3114bp//99%//AJ132440

[33073] C-NT2RM2001613//Homo sapiens sec61 homolog mRNA, complete cds.//0//2601bp/H99%//AF084458

[33074] C-NT2RM2001632//KES1 PROTEIN.//1.40E-31//342aa//34%//P35844

[33075] C-NT2RM2001635//NUCLEAR ENVELOPE PORE MEMBRANE PROTEIN POM 121 (PORE MEMBRANE PROTEIN OF 121 KD) (P145).//1.20E-142//566aa//56%//P52591

[33076] C-NT2RM2001648//Homo sapiens sec61 homolog mRNA, complete cds.//0//12421bp//99%//AF084458

[33077] C-NT2RM2001652//Homo sapiens guanine nucleotide exchange factor mRNA, complete cds.//0//2608bp//99%//AF111162

[33078] C-NT2RM2001659//ZINC/CADMIUM RESISTANCE PROTEIN.//3.40E-39//161aa//34%//P20107

[33079] C-NT2RM2001664//Homo sapiens IkappaB kinase complex associated protein (IKAP) mRNA, complete cds.110012471bp//99%//AF044195

[33080] C-NT2RM2001668//Homo sapiens putative WHSCI protein (WHSCI) mRNA, alternative splice product ending in intron 11, complete cds.//6.20E-16//464bp//62%//AF083391

[33081] C-NT2RM2001670//ZINC FINGER PROTEIN 29 (ZFP-29).//6.50E-104//407aa//43%//Q07230

[33082] C-NT2RM2001671//Oryctolagus cuniculus sarcolemmal associated protein (SLAPI) mRNA, complete cds.//0//1843bp//94%//U21155

[33083] C-NT2RM2001688//HYPOTHETICAL 33.8 KD PROTEIN C5HI0.01 IN CHROMOSOME I.//4.60E-20//253aa//30%//Q09674

[33084] C-NT2RM2001698//Homo sapiens XGalT-1 mRNA for galactosyltransferase I, complete cds.//6.20E-253//1170bp//99%//AB028600

[33085] C-NT2RM2001700//ACYL-COA DEHYDROGENASE, VERY-LONG-CHAIN SPECIFIC (EC 1.3.99.-) (VLCAD) (FRAGMENT).//5.70E-130//536aa//49%//P50544

[33086] C-NT2RM2001716//Homo sapiens BPTF mRNA for bromodomain PHD finger transcription factor, complete cds.//0//1774bp//98%//AB032251

[33087] C-NT2RM2001730//PROBABLE UBIQUITIN CARBOXYL-TERMINAL HYDROLASE K02C4.3 (EC 3.1.2.15) (UBIQUITIN THIOLESTERASE) (UBIQUITIN-SPECIFIC PROCESSING PROTEASE) (DEUBIQUITINATING ENZYME).//7.20E-16//381aa//27%//Q09931

[33088] C-NT2RM2001743//Homo sapiens cell cycle progression 2 protein (CPR2) mRNA, complete cds.//0//1498bp//99%//AF011792

[33089] C-NT2RM2001753//HYPOTHETICAL PROTEIN KIAA0210./8.80E-11//19aa/136%//Q92609

[33090] C-NT2RM2001760//Homo sapiens sec61 homolog mRNA, complete cds.//0//2379bp//99%//AF084458

[33091] C-NT2RM2001771//ZINC FINGER PROTEIN 135.//6.40E-154//394aa//64%//P52742

[33092] C-NT2RM2001782//Homo sapiens GDP-mannose pyrophosphorylase A (GMPPA) mRNA, complete cds.//0//1470bp//99%//AF135422

[33093] C-NT2RM2001785//Homo sapiens delta-6 fatty acid desaturase mRNA, complete cds.//0//2150bp//99%//AF126799

[33094] C-NT2RM2001803//Homo sapiens IkappaB kinase complex associated protein (IKAP) mRNA, complete cds.//10112249bp//99%//AF044195

[33095] C-NT2RM2001823//CHD 1 PROTEIN.//1.80E-106//631aa//39%//P32657

[33096] C-NT2RM2001839//Homo sapiens calumein (Calu) mRNA, complete cds.//0//2415bp//97%//AF013759

[33097] C-NT2RM2001886//PAB-DEPENDENT POLY(A)-SPECIFIC RIBONUCLEASE SUBUNIT PAN2 (EC 3.1.13.4) (PAB I P-DEPENDENT POLY(A)-NUCLEASE).//3.00E-54//337aa//39%//P53010

[33098] C-NT2RM2001896//CELL DIVISION PROTEIN FTSJ.//5.10E-26//204aa//34%//P28692

[33099] C-NT2RM2001930//M. musculus mRNA for semaphorin G.15.20E-135/1894bp//83%//X97818

[33100] C-NT2RM2001935//Homo sapiens single-strand selective monofunctional uracil DNA glycosylase mRNA, complete cds.10//1454bp//99%//AF125182

[33101] C-NT2RM2001936//32.3 KD PROTEIN IN CWP1-MBR1 INTERGENIC REGION.//2.70E-27//216aa//34%//P28320

[33102] C-NT2RM2001950//HYPOTHETICAL 105.9 KD PROTEIN IN AAC3-RFC5 INTERGENIC REGION.//0.0000001//212aa//23%//P38250

[33103] C-NT2RM2001983//Homo sapiens RGS-GAIP interacting protein GIPC mRNA, complete cds.//0//1658bp//98%//AF089816

[33104] C-NT2RM2001989//NUCLEOLAR PROTEIN NOP4 (NUCLEOLAR PROTEIN NOP77).//1.90E-39//253aa//35%//P37838

[33105] C-NT2RM2001997//PROTEIN DISULFIDE ISOMERASE PRECURSOR (PDI) (EC 5.3.4.1).//1.30E-10//232aa//28%//Q12730

[33106] C-NT2RM2001998//HYPOTHETICAL 85.7 KD PROTEIN C13G6.03 IN CHROMOSOME 1.1/3.10E-12//206aa//30%//Q09782

[33107] C-NT2RM2002004//LA PROTEIN HOMOLOG (LA RIBONUCLEOPROTEIN) (LA AUTOANTIGEN HOMOLOG).//2.90E-08//83aa//44%//P40796

[33108] C-NT2RM2002014//HYPOTHETICAL 81.4 KD PROTEIN IN GREB-FEOA INTERGENIC REGION.//1H.10E-89//425aa//41%//P46837

[33109] C-NT2RM2002030//Homo sapiens mRNA for Glutamine:fructose-6-phosphate amidotransferase, complete cds.//0//1959bp//99%//AB016789

[33110] C-NT2RM2002055//VACUOLAR PROTEIN SORTING-ASSOCIATED PROTEIN VPSI 3.//0.00000099//338aa//24%//Q07878

[33111] C-NT2RM2002088//PUTATIVE HETEROGENEOUS NUCLEAR RIBONUCLEOPROTEIN X (HNRNP X) (CBP).//5.00E-62//104aa//57%//Q61990

[33112] C-NT2RM2002091//Drosophila melanogaster eyelid (eld) mRNA, complete cds.//7.10E-29//805bp//61%//AF053091

[33113] C-NT2RM2002100//Homo sapiens mRNA for ATP-dependent RNA helicase, partial.//0//1807bp//99%//AJ010840

[33114] C-NT2RM2002109//Homo sapiens glioma amplified on chromosome I protein (GAC 1) mRNA, complete cds.//0//1868bp//99%//AF030435

[33115] C-NT2RM2002128//PUTATIVE SERINE/THREONINE-PROTEIN KINASE PKWA (EC 2.7.1.-).//4.90E-13//487aa//26%//P49695

[33116] C-NT2RM2002142//GASTRULATION SPECIFIC PROTEIN G 12.//8.00E-31//105aa//47%//P47805

[33117] C-NT2RM2002145//Homo sapiens erythroblast macrophage protein EMP mRNA, complete cds.//8.50E-91//1524bp//81%//AF084928

[33118] C-NT2RM4000024//DNA-DIRECTED RNA POLYMERASE III 128 KD POLYPEPTIDE (EC 2.7.7.6) (RNA POLYMERASE III SUBUNIT 2).17.110E-155/1381aa//72%//P25167

[33119] C-NT2RM4000030//LAS 1 PROTEIN.//5.60E-12//84aa//32%//P36146

[33120] C-NT2RM4000046//GOLIATH PROTEIN (G 1 PROTEIN).//0.000008//112aa//31%//Q06003

[33121] C-NT2RM4000104//ZINC FINGER PROTEIN 135.//1.50E-81//251aa//53%//P52742

[33122] C-NT2RM4000139//R. norvegicus trg mRNA.//2.30E-114//1161bp//72%//X68101

[33123] C-NT2RM4000155//THREONYL-TRNA SYNTHETASE, CYTOPLASMIC (EC 6.1.1.3) (THREONINE-TRNA LIGASE) (THRRS).//1.20E-157//321aa//61%//P26639

[33124] C-NT2RM4000156//H. sapiens HPBR11-7 gene.//3 .60E-2111785bp//60%//X67336

[33125] C-NT2RM4000167//Homo sapiens mRNA for Chromokinesin (KIF 4 gene).1//011946bp//99%//AJ271784

[33126] C-NT2RM4000169//INTRACELLULAR PROTEIN TRANSPORT PROTEIN USO1.//4.80E-13//686aa//23%//P25386

[33127] C-NT2RM4000191//PUTATIVE ATP-DEPENDENT RNA HELICASE PL10.//9.20E-75//439aa//41%//P16381

[33128] C-NT2RM4000202//ZINC FINGER PROTEIN MOK-2 (HOK-2).//4.90E-32//70aa//41%//Q16600

[33129] C-NT2RM4000215//MAK16 PROTEIN.//1.30E-68//295aa//49%//P10962

[33130] C-NT2RM4000229//Gallus gallus actin filament-associated protein (AFAP-110) mRNA, complete cds.//1.10E-27//633bp//64%//L20303

[33131] C-NT2RM4000233//Mus musculus semaphorin VIa mRNA, complete cds.//3.40E-231//395bp//86%//AF030430

[33132] C-NT2RM4000290//Human transducin-like enhancer protein (TLE3) mRNA, complete cds.//2.20E-276//1124bp/197%//M99438

[33133] C-NT2RM4000344//Homo sapiens mRNA for ATP-dependent metalloprotease YME1 L.//10/2030bp//99%//AJ132637

[33134] C-NT2RM4000354//LETHAL(2)DENTICLELESS PROTEIN (DTL83 PROTEIN).//1.50E-21//208aa//35%//Q24371

[33135] C-NT2RM4000356//RAS-RELATED PROTEIN RAB-17.//5 .90E-80//213aa//75%//P35292

[33136] C-NT2RM4000386//Mus musculus ODZ3 (Odz3) mRNA, partial cds.//0//2156bp//87%//AF195418

[33137] C-NT2RM4000421//Homo sapiens mRNA for nuclear transport receptor.//0//H1730bp//99%//AJ133769

[33138] C-NT2RM4000433//Mus musculus retinoic acid-responsive protein (Stra6) mRNA, complete cds.//4.10E-271112085bp//77%//AF062476

[33139] C-NT2RM4000457//HYPOTHETICAL 111.9 KD PROTEIN C22H10.03C IN CHROMOSOME 1.1/8.00E-20//393aa//24%//Q10297

[33140] C-NT2RM4000471//Homo sapiens cysteine desulfurase (nifS) mRNA, complete cds.//0//2092bp//99%//AF097025

[33141] C-NT2RM4000486//SALIVARY PROLINE-RICH PROTEIN PRECURSOR (CLONES CP3, CP4 AND CP5) [CONTAINS: BASIC PEPTIDE IB-6; PEPTIDE P-H].//4.80E-11//242aa//31%//P04280

[33142] C-NT2RM4000496//SAPI PROTEIN.//8.30E-53//434aa//29%//P39955

[33143] C-NT2RM4000515//NEUROFILAMENT TRIPLET H PROTEIN (200 KD NEUROFILAMENT PROTEIN) (NF-H) (FRAGMENT).//1.10E-11//394aa//24%//P16884

[33144] C-NT2RM4000531//ZINC FINGER PROTEIN 29 (ZFP-29).//2.40E-89//389aa//43%//Q07230

[33145] C-NT2RM4000590//RING CANAL PROTEIN (KELCH PROTEIN).//1.00E-59//595aa//28%//Q04652

[33146] C-NT2RM4000595//PUTATIVE ADENYLATE CYCLASE REGULATORY PROTEIN.//8.70E-15//403aa//30%//P26337

[33147] C-NT2RM4000611//VEGETATIBLE INCOMPATIBILITY PROTEIN HET-E-1.//2.90E-09//108aa//31%//Q00808

[33148] C-NT2RM4000616//ACETYL-COENZYME A SYNTHETASE (EC 6.2.1.1) (ACETATE-COA LIGASE) (ACYL- ACTIVATING ENZYME).//2.70E-146//420aa//60%//P27550

[33149] C-NT2RM4000657//1-PHOSPHATIDYLINOSITOL-4,5-BISPHOSPHATE PHOSPHODIESTERASE DELTA 1 (EC 3.1.4.11) (PLC-DELTA-1) (PHOSPHOLIPASE C-DELTA-1) (PLC-III).//3.00E-68//297aa//40%//P51178

[33150] C-NT2RM4000674//HYPOTHETICAL SYMPORTER SLL1374.//1.20E-28//180aa//30%//P74168

[33151] C-NT2RM4000712//Homo sapiens ubiquitin hydrolyzing enzyme I (UBH 1) mRNA, partial cds.//1.00E-136//104bp//77%//AF022789

[33152] C-NT2RM4000733//TRANSCRIPTION TERMINATION FACTOR RHO.//0.00000041//207aa//29%//P52154

[33153] C-NT2RM4000734//Homo sapiens Smad- and Olf-interacting zinc finger protein mRNA, partial cds.//0//2071bp//99%//AF221712

[33154] C-NT2RM4000741//Homo sapiens hSGT1 mRNA for hSgt1p, complete cds.//0//2184bp//99%//D88208

[33155] C-NT2RM4000751//ZINC FINGER PROTEIN 184 (FRAGMENT).//3.90E-12511301aa//53%//Q99676

[33156] C-NT2RM4000798//Homo sapiens brefeldin A-inhibited guanine nucleotide-exchange protein 2 mRNA, complete cds.//0//2603bp//99%//AF084521

[33157] C-NT2RM4000820//VACUOLAR ATP SYNTHASE SUBUNIT AC45 PRECURSOR (EC 3.6.1.34) (V-ATPASE AC45 SUBUNIT).//1.10E-24//138aa//44%//P40682

[33158] C-NT2RM4000857//LEUCINE-RICH ALPHA-2-GLYCOPROTEIN (LRG).//6.70E-22//250aa//29%//P02750

[33159] C-NT2RM4000996//ZINC FINGER PROTEIN 91 (ZINC FINGER PROTEIN HTF10) (HPF7).//8.00E-2111/738aa//50%//Q05481

[33160] C-NT2RM4001047//MO25 PROTEIN.//8.00E-140/3333aa//80%//Q06138

[33161] C-NT2RM4001054//Homo sapiens sec61 homolog mRNA, complete cds.//3.0E-190//1315bp//81%//AF077032

[33162] C-NT2RM4001084//HYPOTHETICAL 105.6 KD PROTEIN C16C9.06C IN CHROMOSOME I.//0.000000032//165aa//33%//Q09820

[33163] C-NT2RM4001092//ZINC FINGER PROTEIN GLO3.//3.10E-24//265aa//33%//P38682

[33164] C-NT2RM4001116//HYPOTHETICAL 216.3 KD PROTEIN R06F6.8 IN CHROMOSOME II.//5 .90E-86//292aa//48%//Q09417

[33165] C-NT2RM4001140//HOMEOBOX PROTEIN MSH-D.//1.00E-1//1/03aa//38%//Q01704

[33166] C-NT2RM4001155//ADRENAL MEDULLA 50 KD PROTEIN.//4.10E-197//445aa//78%//Q27969

[33167] C-NT2RM4001178//PROBABLE ATP-DEPENDENT RNA HELICASE HAS 1./1.l OE-48//218aa//43%//Q03532

[33168] C-NT2RM4001200//ZINC FINGER PROTEIN 135.//9.50E-135//375aa//60%//P52742

[33169] C-NT2RM4001203//Homo sapiens rab3-GAP regulatory domain mRNA, complete cds.//01/2310bp//99%//AF004828

[33170] C-NT2RM4001217//Mus musculus actin-binding protein (ENC-1) mRNA, complete cds.//3.10E-148//1445bp//72%//U65079

[33171] C-NT2RM4001256//Xenopus laevis putative Zic3 binding protein mRNA, complete cds.//4.30E-55//289bp//77%//AF129131

[33172] C-NT2RM4001313//PHOSPHATIDYLINOSITOL 3-KINASE VPS34-LIKE (EC 2.7.1.137) (PI3-KINASE) (PTDINS-3-KINASE) (PI3K).//3.50E-35//124aa//65%//P54676

[33173] C-NT2RM4001316//ACYL-COA DEHYDROGENASE, MEDIUM-CHAIN SPECIFIC PRECURSOR (EC 1.3.99.3) (MCAD).//2.30E-31//334aa//30%//P08503

[33174] C-NT2RM4001320//Homo sapiens mRNA for Neuroblastoma, complete cds.//1.80E-39//728bp//64%//D89016

[33175] C-NT2RM4001340//UTR4 PROTEIN (UNKNOWN TRANSCRIPT 4 PROTEIN).//1.00E-28//171aa//37%//P32626

[33176] C-NT2RM4001344//HYPOTHETICAL GTP-BINDING PROTEIN IN POP2-HOL1 INTERGENIC REGION.//8.10E-30//265aa//33%//P53742

[33177] C-NT2RM4001347//Homo sapiens NY-REN-25 antigen mRNA, partial cds.//0//2300bp//99%//AF155103

[33178] C-NT2RM4001371//Homo sapiens IDN3 mRNA, partial cds.//0//2524bp//99%//AB019494

[33179] C-NT2RM4001382//Homo sapiens RanBP7/importin 7 mRNA, complete cds.//2.20E-237//1079bp//99%//AF098799

[33180] C-NT2RM4001411//Mus musculus Pro-rich, PH, SH2 domain-containing signaling mediator (PSM) mRNA, complete cds.//0//1962bp//87%//AF020526

[33181] C-NT2RM4001412//Homo sapiens nGAP mRNA, complete cds.//0//1918bp//99%//AF047711

[33182] C-NT2RM4001444//ISOLEUCYL-TRNA SYNTHETASE (EC 6.1.1.5) (ISOLEUCINE-TRNA LIGASE) (ILERS).//1.40E-118//444aa//46%//P73505

[33183] C-NT2RM4001483//ZINC FINGER PROTEIN 136.//5.10E-106//357aa//55%//P52737

[33184] C-NT2RM4001566//NECDIN.//9.80E-44//227aa//41%//P25233

[33185] C-NT2RM4001582//Mus musculus COP9 complex subunit 7b (COPS7b) mRNA, complete cds.//1.50E-284//1082bp//90%//AF071317

[33186] C-NT2RM4001592//HYPOTHETICAL 128.5 KD HELICASE IN ATSI-TPD3 INTERGENIC REGION.//7.60E-56//213aa//49%//P31380

[33187] C-NT2RM4001597//M. musculus red-1 gene.//2.10E-171//414bp//78%//X92750

[33188] C-NT2RM4001611//SIS2 PROTEIN (HALOTOLERANCE PROTEIN HAL3).//2.60E-32//203aa//39%//Q12600

[33189] C-NT2RM4001629//MAGUK P55 SUBFAMILY MEMBER 3 (MPP3 PROTEIN) (DISCS, LARGE HOMOLOG 3).//1.50E-93//278aa//38%//Q13368

[33190] C-NT2RM4001666//HYPOTHETICAL 48.6 KD PROTEIN IN ALPA-GABP INTERGENIC REGION.//2.70E-84//410aa//42%//P37339

[33191] C-NT2RM4001714//SEPTIN 2 HOMOLOG (FRAGMENT).//8.90E-141//354aa//72%//Q14141

[33192] C-NT2RM4001731//Homo sapiens F-box protein Lilina (LILINA) mRNA, complete cds.//0//1922bp//100%//AF179221

[33193] C-NT2RM4001758//PUTATIVE SERINE/THREONINE-PROTEIN KINASE EMK (EC 2.7.1.-).//4.10E-186//639aa//58%//Q05512

[33194] C-NT2RM4001783//ZINC FINGER PROTEIN HRX (ALL-1).//7.90E-66//311aa//35%//Q03164

[33195] C-NT2RM4001810//AGGRECAN CORE PROTEIN PRECURSOR (CARTILAGE-SPECIFIC PROTEOGLYCAN CORE PROTEIN) (CSPCP) (CHONDROITIN SULFATE PROTEOGLYCAN CORE PROTEIN 1).//5.10E-07//263aa//30%//P16112

[33196] C-NT2RM4001813//LECTIN BRA-2.//0.00000048//114aa//30%//P17346

[33197] C-NT2RM4001819//Human p58/GTA (galactosyltransferase associated protein kinase) mRNA, complete cds.//8.10E-300//1395bp//98%//M37712

[33198] C-NT2RM4001823//ZINC FINGER PROTEIN 43 (ZINC PROTEIN HTF6).//2.90E-55//325aa//37%//P28160

[33199] C-NT2RM4001828//ZINC FINGER PROTEIN 84 (ZINC FINGER PROTEIN HPF2).//5.90E-161//481aa//56%//P51523

[33200] C-NT2RM4001858//T-BOX CONTAINING PROTEIN TBX6L (FRAGMENT).//6.50E-22//26aa//46%//P79779

[33201] C-NT2RM4001865//Homo sapiens mRNA for atopy related autoantigen CALC.//4.30E-244//248bp//94%//Y17711

[33202] C-NT2RM4001876//RAS SUPPRESSOR PROTEIN 1 (RSU-1) (RSP-1 PROTEIN) (RSP-1).//6.50E-23//184aa//36%//Q15404

[33203] C-NT2RM4001880//PUTATIVE DNA HELICASE II HOMOLOG (EC 3.6.1.-).//5.90E-09//268aa//26%//P47486

[33204] C-NT2RM4001930//Homo sapiens dolichyl-P-Glc:Man9GlcNAc2-PP-dolichyl glucosyltransferase (ALG6) mRNA, complete cds.//0//1930bp//99%//AF102851

[33205] C-NT2RM4001940//Homo sapiens timeless homolog mRNA, complete cds.//0//2087bp//99%//AF098162

[33206] C-NT2RM4001969//R. norvegicus mRNA for IP63 protein.//2.60E-261//563bp//84%//X99330

[33207] C-NT2RM4001979//ZINC FINGER PROTEIN 84 (ZINC FINGER PROTEIN HPF2).//1.80E-112//457aa//47%//P51523

[33208] C-NT2RM4001987//NEURAL CELL ADHESION MOLECULE 1, LARGE ISOFORM PRECURSOR (N-CAM 180) [CONTAINS: N-CAM 140].//3.20E-17//281aa//30%//P16170

[33209] C-NT2RM4002013//HYPOTHETICAL 89.4 KD TRP-ASP REPEATS CONTAINING PROTEIN IN PMT6-PCT1 INTERGENIC REGION.//6.90E-94//589aa//35%//P42935

[33210] C-NT2RM4002034//Homo sapiens hiwi mRNA, partial cds.//1.90E-53//1585bp//60%//AF104260

[33211] C-NT2RM4002062//ASPARTYL-TRNA SYNTHETASE (EC 6.1.1.12) (ASPARTATE-TRNA LIGASE) (ASPRS).//1.90E-31//80aa//52%//P36419

[33212] C-NT2RM4002063//Oryctolagus cuniculus sarcosine oxidase (SOX) mRNA, complete cds.//0//865bp//99%//U82267

[33213] C-NT2RM4002066//Homo sapiens thyroid hormone receptor-associated protein complex component TRAP230 mRNA, complete cds.//1.50E-211//123bp//71%//AF117755

[33214] C-NT2RM4002073//Mus musculus fatty acid transport protein 3 mRNA, partial cds.//9.30E-293//1751bp//83%//AF072758

[33215] C-NT2RM4002075//RING CANAL PROTEIN (KELCH PROTEIN).//2.80E-105//556aa//41%//Q04652

[33216] C-NT2RM4002093//Homo sapiens neural polypyrimidine tract binding protein (PTB) mRNA, complete cds.//0//2550bp//99%//AF176085

[33217] C-NT2RM4002109//Homo sapiens mRNA for Chromokinesin (KIF 4 gene).//0//2572bp//99%//AJ271784

[33218] C-NT2RM4002145//SLIT PROTEIN PRECURSOR.//1.40E-09//127aa//33%//P24014

[33219] C-NT2RM4002146//Homo sapiens MAGOH mRNA, complete cds.//6.90E-70//454bp//85%//AF035940

[33220] C-NT2RM4002161//Homo sapiens laforin (EPM2A) mRNA, complete cds.//10/2671bp//99%//AF084535

[33221] C-NT2RM4002174//MRP PROTEIN.//9.10E-68//264aa//51%//P21590

[33222] C-NT2RM4002189//GLUCOAMYLASE SI/S2 PRECURSOR (EC 3.2.1.3) (GLUCAN 1,4-ALPHA- GLUCOSIDASE) (1,4-ALPHA-D-GLUCAN GLUCOHYDROLASE).//6.20E-33//688aa//27%//P08640

[33223] C-NT2RM4002194//Mus musculus semaphorin VIa mRNA, complete cds.//5.20E-297//753bp//87%//AF030430

[33224] C-NT2RM4002205//ELONGATION FACTOR G, MITOCHONDRIAL PRECURSOR (MEF-G).//3.00E-37//22aa//72%//Q07803

[33225] C-NT2RM4002213//Homo sapiens protein phosphatase methylesterase- I (PME-1) mRNA, complete cds.//0//2452bp//100%//AF157028

[33226] C-NT2RM4002226//GTPASE ACTIVATING PROTEIN ROTUND.//3.70E-19//47aa//41%//P40809

[33227] C-NT2RM4002251//ALPHA-1,3-MANNOSYL-GLYCOPROTEIN BETA-1,2-N-ACETYLGLUCOSAMINYLTRANSFERASE (EC 2.4.1.101) (N-GLYCOSYL-OLIGOSACCHARIDE-GLYCOPROTEIN N-ACETYLGLUCOSAMINYLTRANSFERASE 1) (GNT-1) (GLCNAC-T1).//2.20E-36//320aa//38%//P27808

[33228] C-NT2RM4002323//ANTIGEN GOR (FRAGMENT).//0.000000001//154aa//33%//P48778

[33229] C-NT2RM4002409//ACETYL-COENZYME A SYNTHETASE (EC 6.2.1.1) (ACETATE—COA LIGASE) (ACYL- ACTIVATING ENZYME).//1.30E-29//275aa//30%//P27095

[33230] C-NT2RM4002438//Xenopus laevis putative Zic3 binding protein mRNA, complete cds.//1.0E-49//611bp//70%//AF129131

[33231] C-NT2RM4002460//ENV POLYPROTEIN (COAT POLYPROTEIN) [CONTAINS: COAT PROTEINS GP70, GP20].//0.0000016//226aa//24%//P51515

[33232] C-NT2RM4002527//VEGETATIBLE INCOMPATIBILITY PROTEIN HET-E-1.//8.90E-15//366aa//27%//Q00808

[33233] C-NT2RM4002532//PROTEIN HOM I.//2.00E- 16//276aa//28%//P55137

[33234] C-NT2RM4002558//Homo sapiens fatty acid transport protein (FATP) mRNA, complete cds.110//1797bp//99%//AF055899

[33235] C-NT2RM4002565//Mus musculus Sec8 mRNA, complete cds.//0//1915bp//87%//AF022962

[33236] C-NT2RM4002571//H. sapiens mRNA for UDP-GaINAc:polypeptide N-acetylgalactosaminyltransferase (T2).//4.60E-7811921bp//69%//X85019

[33237] C-NT2RM4002594//MSP1 PROTEIN HOMOLOG.//2.70E-68//236aa//58%//P54815

[33238] C-NT2RM4002623//ASPARTYL-TRNA SYNTHETASE (EC 6.1.1.12) (ASPARTATE-TRNA LIGASE) (ASPRS).//2.30E-101//488aa//45%//O32038

[33239] C-NT2RP1000018//Homo sapiens mRNA for NIK, partial cds.//0//1747bp//99%//AB013385

[33240] C-NT2RP1000035//Homo sapiens mRNA for NS 1-binding protein (NSI-BP).11011652bp//99%//AJ012449

[33241] C-NT2RP1000040//Mus musculus donson protein (Donson) mRNA, partial cds.//5.90E-150//1025bp//82%//AF193608

[33242] C-NT2RP1000086//H. sapiens mRNA for zinc finger protein, Hsal2.//0//1162bp//99%//X98834

[33243] C-NT2RP1000111//COP I REGULATORY PROTEIN.//4.00E-116//296aa//51%//P93471

[33244] C-NT2RP1000130//HEPATOMA-DERIVED GROWTH FACTOR (HDGF).//4.50E-50//181aa//60%//P51859

[33245] C-NT2RP1000163//Homo sapiens cell cycle progression 2 protein (CPR2) mRNA, complete cds.//3.40E-270//951bp//98%//AF011792

[33246] C-NT2RP1000202//ANKYRIN.//1.00E-25//302aa//34%//Q02357

[33247] C-NT2RP1000272//Mus musculus mRNA for neural specific sr protein NSSR 2, complete cds.//1.40E-267//1155bp//87%//AB015895

[33248] C-NT2RP1000326//Homo sapiens metaxin 2 (MTX2) mRNA, nuclear gene encoding mitochondrial protein, complete cds.//1.30E-275//1249bp//99%//AF053551

[33249] C-NT2RP1000333//ANTI-SILENCING PROTEIN 1.//8.70E-47//H155aa//58%//P32447

[33250] C-NT2RP1000348//REDUCED VIABILITY UPON STARVATION PROTEIN 161.//1.70E-15//162aa//30%//P25343

[33251] C-NT2RP1000363//R. norvegicus LL5 mRNA.//7.90E-262//175bp//83%//X74226

[33252] C-NT2RP1000376//Homo sapiens Ca2+-independent phospholipase A2 long isoform (iPLA2) mRNA, complete cds.//0//2252bp//96%//AF102989

[33253] C-NT2RP1000413//MEMBRANE-ASSOCIATED PROTEIN HEM-2 (NAPI PROTEIN).//1.90E-153//230aa//99%//P55161

[33254] C-NT2RP1000439//Xenopus laevis chromosome condensation protein XCAP-G mRNA, complete cds.//1.80E-94//H1019bp//63%//AF111423

[33255] C-NT2RP1000443//QUINONE OXIDOREDUCTASE (EC 1.6.5.5) (NADPH:QUINONE REDUCTASE) (ZETA- CRYSTALLIN).//2.40E- 101/227aa//25%//Q08257

[33256] C-NT2RP1000460//NUCLEAR MOVEMENT PROTEIN NUDC.//3.80E-19//49aa//36%//P17624

[33257] C-NT2RP1000470//PUTATIVE ATP-DEPENDENT RNA HELICASE T26G10.1 IN CHROMOSOME III.//2.60E-94//254aa//47%//P34580

[33258] C-NT2RP1000478//TUBULIN BETA-5 CHAIN (CLASS-V).//4.50E-240//445aa//97%//P09653

[33259] C-NT2RP1000481//Homo sapiens antigen NY-CO-3 (NY-CO-3) mRNA, partial cds.//7.5e-315//445bp//99%//AF039688

[33260] C-NT2RP1000493//POSSIBLE DNA-REPAIR PROTEIN XP-E (POSSIBLE XERODERMA PIGMENTOSUM GROUP E PROTEIN) (UV-DAMAGED DNA-BINDING PROTEIN) (UV-DDB).//3.60E-30//534aa//23%//P33194

[33261] C-NT2RP1000513//Human NiflJ-like protein (hNifU) mRNA, partial cds.//6.50E-171//516bp//99%//U47101

[33262] C-NT2RP1000522//UBIQUITIN CARBOXYL-TERMINAL HYDROLASE DUB-1 (EC 3.1.2.15) (UBIQUITIN THIOLESTERASE DUB-1) (UBIQUITIN-SPECIFIC PROCESSING PROTEASE DUB-1) (DEUBIQUITINATING ENZYME 1).//8.20E-83//345aa//47%//Q61068

[33263] C-NT2RP1000547//COP-COATED VESICLE MEMBRANE PROTEIN P24 PRECURSOR (FRAGMENT).//1.10E-27//193aa//35%//P49020

[33264] C-NT2RP1000574//HOMEOBOX PROTEIN MEIS2 (MEIS 1-RELATED PROTEIN 1).//3.50E-75//151aa//94%//P97367

[33265] C-NT2RP1000630//NECDIN.//2.40E-44//227aa//41%//P25233

[33266] C-NT2RP1000677//SODIUM-INDEPENDENT ORGANIC ANION TRANSPORTER (ORGANIC ANION TRANSPORTING POLYPEPTIDE).//1.20E-78//483aa//31%//P46721

[33267] C-NT2RP1000701//Homo sapiens phospholipase A2 activating protein (PLA2P) mRNA, complete cds.//0//1687bp//99%//AF145020

[33268] C-NT2RP1000733//Human mRNA for GSPT1-TK protein,complete cds.//0//2057bp//99%//E14379

[33269] C-NT2RP1000738//Homo sapiens Wolf-Hirschhom syndrome candidate 2 protein (WHSC2) mRNA, complete cds.//0//2186bp//99%//AF101434

[33270] C-NT2RP1000746//Homo sapiens 60S acidic ribosomal protein PO mRNA, complete cds.//9.70E-196//901bp//99%//AF173378

[33271] C-NT2RP1000782//PLATELET-ENDOTHELIAL TETRASPAN ANTIGEN 3 (PETA-3) (GP27) (MEMBRANE GLYCOPROTEIN SFA-1) (CD151 ANTIGEN).//1.20E-30//232aa//30%//O35566

[33272] C-NT2RP1000825//GTPASE-ACTIVATING PROTEIN RHOGAP (RHO-RELATED SMALL GTPASE PROTEIN ACTIVATOR) (CDC42 GTPASE-ACTIVATING PROTEIN) (P50-RHOGAP).//8.20E-83//334aa//50%//Q07960

[33273] C-NT2RP1000833//Homo sapiens cGMP phosphodiesterase Al (PDE9A) mRNA, complete cds.//0//1494bp//99%//AF067223

[33274] C-NT2RP1000834//Homo sapiens alpha-methylacyl-CoA racemase mRNA, complete cds.//1.80E-176//829bp//98%//AF047020

[33275] C-NT2RP1000856//PLATELET-ENDOTHELIAL TETRASPAN ANTIGEN 3 (PETA-3) (GP27) (MEMBRANE GLYCOPROTEIN SFA-1) (CD151 ANTIGEN).//1.20E-30//232aa//30%//O35566

[33276] C-NT2RP1000860//Homo sapiens KL04P mRNA, complete cds.//0//1555bp//99%//AF064094

[33277] C-NT2RP1000902//HYPOTHETICAL 127.4 KD PROTEIN F07F6.4 IN CHROMOSOME III.//5.20E-20//306aa//33%//Q09531

[33278] C-NT2RP1000915//AUTOANTIGEN NGP-1.//1.70E-19//343aa//25%//Q13823

[33279] C-NT2RP1000947//Human E2 ubiquitin conjugating enzyme UbCH5B (UBCH5B) mRNA, complete cds.//4.60E-105//504bp//99%//U39317

[33280] C-NT2RP1000954//RING CANAL PROTEIN (KELCH PROTEIN).//1.40E-23//370aa//28%//Q04652

[33281] C-NT2RP1000958//AUTOANTIGEN NGP- I.//1.40E-19//343aa//25%//Q13823

[33282] C-NT2RP1000959//Human acidic ribosomal phosphoprotein P0 mRNA, complete cds.//2.50E-23611966bp//99% l/M 17885

[33283] C-NT2RP1000966//NUCLEOLIN (PROTEIN C23).118.90E-299//554aa//99%//P19338

[33284] C-NT2RP1001011//Drosophila melanogaster putative 43 kDa protein (TH 1) mRNA, complete cds.//2.20E-78//1529bp//61%//L01790

[33285] C-NT2RP101013//ZINC FINGER PROTEIN 83 (ZINC FINGER PROTEIN HPF1).//7.70E-253//425aa//98%//P51522

[33286] C-NT2RP1001033//Homo sapiens delta-tubulin mRNA, complete cds.//2.10E-285//290bp//100%//AF201333

[33287] C-NT2RP1001073//Homo sapiens U6 snRNA-associated Sm-like protein LSm5 mRNA, complete cds.//8 .10E-107//504bp//99%//AF182291

[33288] C-NT2RP1100079//Oryctolagus cuniculus sarcosine oxidase (SOX) mRNA, complete cds.1//012085bp//99%//U82267

[33289] C-NT2RP1001080//PROBABLE ATP-DEPENDENT RNA HELICASE DBP9.//2.30E-116//319aa//46%//Q06218

[33290] C-NT2RP1001113//Homo sapiens CTL2 gene.//0/12790bp//98%//AJ245621

[33291] C-NT2RP1001177//Rattus norvegicus histone macroH2A1.2 mRNA, complete cds.//5.20E-108//278bp//69%//U79139

[33292] C-NT2RP1001185//Human isovaleryl-coA dehydrogenase (IVD) mRNA, complete cds.//1.90E-15811729bp//99%//M34192

[33293] C-NT2RP1001247//Homo sapiens TGF-beta type secreted signaling protein LEFTYA mRNA, complete cds.//0//2006bp//100%//AF081513

[33294] C-NT2RP1001253//Homo sapiens oscillin (hLn) mRNA, complete cds.//0//2020bp//99%//AF029914

[33295] C-NT2RP1001294//MICROTUBULE-ASSOCIATED PROTEIN YTM 1.//1.80E-38//258aa//32%//Q12024

[33296] C-NT2RP1001302//MICROTUBULE-ASSOCIATED PROTEIN YTM 1.//1.80E-38//258aa//32%//Q12024

[33297] C-NT2RP1001310//Homo sapiens mitochondrial carrier homolog I isoform a mRNA, partial cds; nuclear gene for mitochondrial product.//0//1732bp//99%//AF176006

[33298] C-NT2RP1001313//Homo sapiens delta-6 fatty acid desaturase mRNA, complete cds.//7.50E-121/11394bp/H69%//AF126799

[33299] C-NT2RP1001361//Homo sapiens NADH-ubiquinone oxidoreductase subunit B14.5B homolog mRNA, complete cds.//6.50E-116//541bp//100%//AF070652

[33300] C-NT2RP1001385//HYPOTHETICAL 48.8 KD PROTEIN IN SSU81-SCS2 INTERGENIC REGION.//2.70E-22//284aa//25%//P40074

[33301] C-NT2RP1001395//Homo sapiens COP9 complex subunit 7a mRNA, complete cds.//0//1782bp/199%//AF210052

[33302] C-NT2RP1001410//PUTATIVE GTP-BINDING PROTEIN WO8E3.3.//8.90E-141//396aa//67%//P91917

[33303] C-NT2RP1001449//Mus musculus Gng31g mRNA, complete cds.//7.20E-165//800bp//87%//AF069954

[33304] C-NT2RP1001457//Homo sapiens partial mRNA for beta-transducin family protein (putative).//1.20E-13711629bp//100%//AJ005257

[33305] C-NT2RP1001482//Mouse oncogene (ect2) mRNA, complete cds.//2.10E-158/1755bp//86%//L11316

[33306] C-NT2RP1001494//MALE STERILITY PROTEIN 2.//7.20E-40//261aa//27%//Q08891

[33307] C-NT2RP1001543//MYO-INOSITOL-1-PHOSPHATE SYNTHASE (EC 5.5.1.4) (IPS).//1.60E-166//506aa//60%//P42803

[33308] C-NT2RP1001546//PLATELET-ENDOTHELIAL TETRASPAN ANTIGEN 3 (PETA-3) (GP27) (MEMBRANE GLYCOPROTEIN SFA-1) (CD151 ANTIGEN).//1.60E-30//232aa//30%//O35566

[33309] C-NT2RP1001569//SIGNAL RECOGNITION PARTICLE RECEPTOR BETA SUBUNIT (SR-BETA).//5.80E-121//271aa//89%//P47758

[33310] C-NT2RP1001665//CALMODULIN.//0.00000051 //83aa//30%//P02594

[33311] C-NT2RP2000006//DNAJ PROTEIN (40 KD HEAT SHOCK CHAPERONE PROTEIN) (HSP40).//9.80E-17//79aa//55%//O34136

[33312] C-NT2RP2000008//ZINC FINGER PROTEIN 84 (ZINC FINGER PROTEIN HPF2).//2.40E-177//726aa//47%//P51523

[33313] C-NT2RP2000032//RAS SUPPRESSOR PROTEIN 1 (RSU-1) (RSP-1 PROTEIN) (RSP-1).//1.80E-22//184aa//34%//Q01730

[33314] C-NT2RP2000045//Homo sapiens tumorous imaginal discs protein TidS6 homolog (TIDI) mRNA, complete cds.//0//1390bp//98%//AF061749

[33315] C-NT2RP2000054//Homo sapiens putative ring zinc finger protein NY-REN-43 antigen mRNA, complete cds.//0//2245bp//99%//AF155109

[33316] C-NT2RP2000056//PROTEIN-TYROSINE PHOSPHATASE EPSILON PRECURSOR (EC 3.1.3.48) (R-PTP- EPSILON).//9.40E-16//45aa//100%//P49446

[33317] C-NT2RP2000067//Mus musculus ODZ3 (Odz3) mRNA, partial cds.//0//3546bp//99%//AF195418

[33318] C-NT2RP2000070//CADHERIN-RELATED TUMOR SUPPRESSOR PRECURSOR (FAT PROTEIN).//3.40E-51//383aa//32%//P33450

[33319] C-NT2RP2000076//Homo sapiens partial mRNA for polyhomeotic 2 protein (PH2 gene).//7.90E-20//265bp//73%//AJ242730

[33320] C-NT2RP2000114//Homo sapiens mRNA for GM3 synthase, complete cds.//0//2244bp//99%//AB018356

[33321] C-NT2RP2000126//POSSIBLE GLOBAL TRANSCRIPTION ACTIVATOR SNF2L.//2.50E-117//541aa//42%//P41877

[33322] C-NT2RP2000133//Homo sapiens Leman coiled-coil protein (LCCP) mRNA, complete cds.//0//1490bp//99%//AF175966

[33323] C-NT2RP2000147//CLATHRIN COAT ASSEMBLY PROTEIN AP47 (CLATHRIN COAT ASSOCIATED PROTEIN AP47) (GOLGI ADAPTOR AP-147 KD PROTEIN) (HAI47 KD SUBUNIT) (CLATHRIN ASSEMBLY PROTEIN ASSEMBLY PROTEIN COMPLEX 1 MEDIUM CHAIN).114.40E-226//423aa//99%//P35585

[33324] C-NT2RP2000153//GAR2 PROTEIN.//9.80E-23//311aa//28%//P41891

[33325] C-NT2RP2000157//ML02 PROTEIN.//2.60E-11 //62aa//40%//Q09329

[33326] C-NT2RP2000161//DIS3 PROTEIN HOMOLOG.//4.10E-35//184aa//44%//Q17632

[33327] C-NT2RP2000183//DIHYDROPYRIMIDINASE RELATED PROTEIN-2 (DRP-2) (NEURAL SPECIFIC PROTEIN NSP60).//3.30E-16//114aa//44%//O02675

[33328] C-NT2RP2000195//Homo sapiens androgen induced protein (AIG-1) mRNA, complete cds.//7.80E-152//704bp//99%//AF153605

[33329] C-NT2RP2000224//INSULIN RECEPTOR SUBSTRATE-1 (IRS-1).//0.000043//103aa//28%//P35568

[33330] C-NT2RP2000248//UDP-N-ACETYLGLUCOSAMINE-PEPTIDE N-ACETYLGLUCOSAMINYLTRANSFERASE 110 KD SUBUNIT (EC 2.4.1.-) (O-GLCNAC TRANSFERASE P110 SUBUNIT).//3.40E-211/210aa//33%//P56558

[33331] C-NT2RP2000257//PUTATIVE MITOCHONDRIAL CARRIER YIL006W.I/9.70E-41//278aa//36%//P40556

[33332] C-NT2RP2000258//ACTIVATOR 1140 KD SUBUNIT (REPLICATION FACTOR C LARGE SUBUNIT) (Al 140 KD SUBUNIT) (RF-C 140 KD SUBUNIT) (ACTIVATOR 1 LARGE SUBUNIT) (DNA-BINDING PROTEIN PO-GA).//7.10E-12//213aa//23%//P35251

[33333] C-NT2RP2000270//Human putative G-protein coupled receptor (SH 120) mRNA, complete cds.//1.30E-242//1043bp//99%//U78723

[33334] C-NT2RP2000288//HYPOTHETICAL 111.9 KD PROTEIN C22H10.03C IN CHROMOSOME I.//1 .60E-27//576aa/125%//Q10297

[33335] C-NT2RP2000297//ZINC FINGER PROTEIN 184 (FRAGMENT).//3.30E-186//256aa//60%//Q99676

[33336] C-NT2RP2000310//Human proline dehydrogenase/proline oxidase (PRODH) mRNA, complete cds.//4.30E-279//1193bp//99%//U82381

[33337] C-NT2RP2000329//GTP:AMP PHOSPHOTRANSFERASE MITOCHONDRIAL (EC 2.7.4.10) (AK3).//2.00E-111//226aa//92%//P008760

[33338] C-NT2RP2000346//Homo sapiens apoptosis associated protein (GADD34) mRNA, complete cds.11//02331bp//99%//U83981

[33339] C-NT2RP2000414//Homo sapiens HnRNP F protein mRNA, complete cds.//10//1886bp//99%//L28010

[33340] C-NT2RP2000420//ZINC FINGER PROTEIN 165.//8.50E-33//155aa//52%//P49910

[33341] C-NT2RP2000422//Homo sapiens N-acetylglucosamine-phosphate mutase mRNA, complete cds.//0//1757bp//99%//AF102265

[33342] C-NT2RP2000448//KES 1 PROTEIN.//8.70E-54//392aa//38%//P35844

[33343] C-NT2RP2000523//APOLIPOPROTEIN B MRNA EDITING PROTEIN (HEPR) (APOBEC-1).//6.00E-16//124aa//34%//P41238

[33344] C-NT2RP2000660//SAPI PROTEIN.//5.20E-68//474aa//32%//P39955

[33345] C-NT2RP2000668//SERINE/THREONINE PROTEIN KINASE PKPA (EC 2.7.1.-).//1.30E-27//349aa//32%//Q01577

[33346] C-NT2RP2000710//ASPARTYL-TRNA SYNTHETASE (EC 6.1.1.12) (ASPARTATE-TRNA LIGASE)//2.70E-100//488aa//44%//O32038

[33347] C-NT2RP2000764//NIFS PROTEIN.//6.60E-36//252aa//42%//P12623

[33348] C-NT2RP2000809//Homo sapiens BAG-family molecular chaperone regulator-5 mRNA, complete cds.//0//3347bp//99%//AF095195

[33349] C-NT2RP2000812//DILUTE MYOSIN HEAVY CHAIN, NON-MUSCLE (MYOSIN 5A).//5.60E-08//79aa//29%//Q99104

[33350] C-NT2RP2000814//GELATION FACTOR (ACTIN BINDING PROTEIN 120) (ABP-120).//1.10E-07//96aa//29%//P13466

[33351] C-NT2RP2000816//MAGNESIUM-CHELATASE 30 KD SUBUNIT.//7.90E-08//172aa//28%//P26174

[33352] C-NT2RP2000842//Human lysophosphatidic acid receptor homolog mRNA, complete cds.//0//1562bp//99%//U80811

[33353] C-NT2RP2000880//PROBABLE TRANSLATION INITIATION FACTOR IF-2.//0//694aa//99%//O60841

[33354] C-NT2RP2000892//Rattus norvegicus db83 mRNA, complete cds.//2.90E-191//1094bp//85%//AB006135

[33355] C-NT2RP2000931//MATRIN 3.//2.40E-2891/467aa//95%//P43244

[33356] C-NT2RP2000943//Homo sapiens sec24D protein mRNA, complete cds.//0//2767bp//99%//AF130464

[33357] C-NT2RP2000965//Homo sapiens mRNA for fls353, complete cds.//0//989bp//96%//AB024704

[33358] C-NT2RP2001070//PUTATIVE PYRIDOXAMINE 5′-PHOSPHATE OXIDASE (EC 1.4.3.5) (PNP/PMP OXIDASE).//5.80E-46//222aa//45%//Q20939

[33359] C-NT2RP2001081//SYNAPTOTAGMIN IV.//4.20E-118//430aa//54%//P50232

[33360] C-NT2RP2001127//Homo sapiens mRNA for PLU-1 protein.//0//2514bp//99%//AJ132440

[33361] C-NT2RP2001168//VERPROLIN.//1.50E-09//143aa//33%//P37370

[33362] C-NT2RP2001174//GASTRULA ZINC FINGER PROTEIN XLCGF46.1 (FRAGMENT).//6.00E-10//88aa//38% M/P 18722

[33363] C-NT2RP2001233//ZINC FINGER PROTEIN 91 (ZINC FINGER PROTEIN HTF10) (HPF7).//2.00E- 128//409aa//45%//Q05481

[33364] C-NT2RP2001245//MYOSIN HEAVY CHAIN, NONMUSCLE (CELLULAR MYOSIN HEAVY CHAIN) (NMMHC).//2.20E-10//366aa//28%//P14105

[33365] C-NT2RP2001290//BETA-SOLUBLE NSF ATTACHMENT PROTEIN (SNAP-BETA) (SNAP-ALPHA HOMOLOG) (BRAIN PROTEIN 147) (FRAGMENT).//4.40E-91//179aa//99%//P28663

[33366] C-NT2RP2001295//ZINC/CADMIUM RESISTANCE PROTEIN.//8.30E-39//161aa//34%//P20107

[33367] C-NT2RP2001327//TUMOR NECROSIS FACTOR, ALPHA-INDUCED PROTEIN 1, ENDOTHELIAL (B 12 PROTEIN).//5.50E- 116//311aa//71%//Q13829

[33368] C-NT2RP2001378//MUCIN 2 PRECURSOR (INTESTINAL MUCIN 2).//2.00E-11I/403aa//25%//Q02817

[33369] C-NT2RP2001392//MITOCHONDRIAL LON PROTEASE HOMOLOG 1 PRECURSOR (EC 3.4.21.-).//8.40E-192//581aa//54%//P93647

[33370] C-NT2RP2001394//Homo sapiens mRNA for SCML2 protein.//0//2068bp//99%//Y18004

[33371] C-NT2RP2001397//Homo sapiens mRNA for cyclin B2, complete cds.//1.9e-316//1428bp//100%//AB020981

[33372] C-NT2RP2001420//Mus musculus nuclear protein NIP45 mRNA, complete cds.//9.00E-112//742bp//82%//U76759

[33373] C-NT2RP2001440//Homo sapiens mRNA for 14-3-3gamma, complete cds.//0//3712bp//99%//AB024334

[33374] C-NT2RP2001460//TRICHOHYALIN.//1.00E-14//521aa//24%//P37709

[33375] C-NT2RP2001511//Homo sapiens putative RNA-binding protein Q99 mRNA, complete cds.//3 .20E-297//2206bp//75%//AF093097

[33376] C-NT2RP2001520//Homo sapiens mRNA for mitochondrial carrier protein ARALAR1.//0//2502bp//99%//Y14494

[33377] C-NT2RP2001536//Homo sapiens X-ray repair cross-complementing protein 3 (XRCC3) mRNA, complete cds.//0//2326bp//99%//AF035586

[33378] C-NT2RP2001560//VAV2 PROTEIN.//0.00000015//219aa//27%//Q60992

[33379] C-NT2RP2001576//HYPOTHETICAL 62.2 KD PROTEIN C4G8.12C IN CHROMOSOME I.//8.20E-29//294aa//31%//Q09837

[33380] C-NT2RP2001597//RYANODINE RECEPTOR, CARDIAC MUSCLE.//0.000000036//127aa//36%//P30957

[33381] C-NT2RP2001601//Homo sapiens SUMO-1-specific protease (S SP 1) mRNA, complete cds.//0//1748bp//99%//AF196304

[33382] C-NT2RP2001613//MITOCHONDRIAL IMPORT RECEPTOR SUBUNIT TOM40 (MOM38 PROTEIN) (TRANSLOCASE OF OUTER MEMBRANE 40 KD SUBUNIT).//6.10E-12//184aa//31%//P24391

[33383] C-NT2RP2001634//Homo sapiens alpha-catenin-like protein mRNA, complete cds.110112445bp//99%//U97067

[33384] C-NT2RP2001660//Homo sapiens putative 13 S Golgi transport complex 90 kD subunit brain-specific isoform mRNA, complete cds.//0//1287bp//99%//AF058718

[33385] C-NT2RP2001663//ENOLASE (EC 4.2.1.11) (2-PHOSPHOGLYCERATE DEHYDRATASE) (2-PHOSPHO-D- GLYCERATE HYDRO-LYASE) (FRAGMENT).//1.10E-47//126aa//53%//P42897

[33386] C-NT2RP2001740//UBIQUITIN CARBOXYL-TERMINAL HYDROLASE DUB-1 (EC 3.1.2.15) (UBIQUITIN THIOLESTERASE DUB-1) (UBIQUITIN-SPECIFIC PROCESSING PROTEASE DUB-1) (DEUBIQUITINATING ENZYME 1).//7.90E-52//220aa//44%//Q61068

[33387] C-NT2RP2001748//FARNESYL PYROPHOSPHATE SYNTHETASE (FPP SYNTHETASE) (FPS) (FARNESYL DIPHOSPHATE SYNTHETASE) (DIMETHYLALLYLTRANSFERASE (EC 2.5.1.1)/GERANYLTRANSTRANSFERASE (EC 2.5.1.10)) (KIAA0032).//5.40E-47//96aa//97%//P14324

[33388] C-NT2RP2001756//ZINC FINGER PROTEIN 84 (ZINC FINGER PROTEIN HPF2).//1.70E-49//411aa//32%//P51523

[33389] C-NT2RP2001839//SCY1 PROTEIN.//5.40E-32//621aa//24%//P53009

[33390] C-NT2RP2001869//ZINC FINGER PROTEIN 191.//7.10E-26//126aa//52%//O14754

[33391] C-NT2RP2001876//ALLOGRAFT INFLAMMATORY FACTOR-1 (AIF-1) (IONIZED CALCIUM BINDING ADAPTER MOLECULE 1).//1.20E-45//141aa//65%//P55008

[33392] C-NT2RP2001883//Homo sapiens CGI-01 protein mRNA, complete cds.//0//2306bp//99%//AF132936

[33393] C-NT2RP2001898//Human inositol polyphosphate 5-phosphatase (Sptase) mRNA, 3′ end.//0//2518bp//98%//M74161

[33394] C-NT2RP2001900//ACTIN-LIKE PROTEIN ARP5.//2.30E-38//395aa//30%//P53946

[33395] C-NT2RP2001976//Mus musculus calmodulin-binding protein SHA1 (Sha1) mRNA, complete cds.//4.70E-177//1538bp//74%//AF062378

[33396] C-NT2RP2001985//Homo sapiens high-risk human papilloma viruses E6 oncoproteins targeted protein E6TP1 alpha mRNA, complete cds.//2.00E-38//435bp//67%//AF090989

[33397] C-NT2RP2001991//SODIUM- AND CHLORIDE-DEPENDENT TRANSPORTER NTT73.//6.50E-129//279aa//85%//Q08469

[33398] C-NT2RP2002025//NG-CAM RELATED CELL ADHESION MOLECULE PRECURSOR (NR-CAM) (BRAVO).//1.70E-47//247aa//52%//P35331

[33399] C-NT2RP2002046//Homo sapiens mRNA for transcription factor.//0//1664bp//99%//AJ130894

[33400] C-NT2RP2002058//Homo sapiens WD repeat protein WDR3 (WDR3) mRNA, complete cds.//0//2510bp//99%//AF083217

[33401] C-NT2RP2002066//Rattus norvegicus transmembrane receptor UncSH2 mRNA, complete cds.//1.60E-226//1301bp//88%//U87306

[33402] C-NT2RP2002078//PECANEX PROTEIN.//1.80E-09//195aa//32%//P18490

[33403] C-NT2RP2002079//HISTONE HI, GONADAL.//4.40E-11//214aa//34%//P02256

[33404] C-NT2RP2002099//Homo sapiens mRNA for El B-SSkDa-associated protein.//0//3389bp//99%//AJ007509

[33405] C-NT2RP2002105//H. sapiens MSH-R gene for melanocyte stimulating hormone receptor.//0//1644bp//98%//X65634

[33406] C-NT2RP2002124//UBIQUITIN CARBOXYL-TERMINAL HYDROLASE 4 (EC 3.1.2.15) (UBIQUITIN THIOLESTERASE 4) (UBIQUITIN-SPECIFIC PROCESSING PROTEASE 4) (DEUBIQUITINATING ENZYME 4) (UBIQUITOUS NUCLEAR PROTEIN HOMOLOG).//4.30E-44//155aa//37%//Q13107

[33407] C-NT2RP2002185//Homo sapiens ubiquilin mRNA, complete cds.//0//1789bp//99%//AF176069

[33408] C-NT2RP2002193//Homo sapiens PIAS3 mRNA for protein inhibitor of activatied STAT3, complete cds.//0//2809bp//99%//AB021868

[33409] C-NT2RP2002252//Mus musculus (clone pVZmSin3A9) mSin3A9 mRNA, complete cds.10/31138bp//91%//L38621

[33410] C-NT2RP2002256//Homo sapiens retinoic acid hydroxylase mRNA, complete cds.//0//528bp//98%//AF005418

[33411] C-NT2RP2002270//AF-9 PROTEIN.//1.20E-07//74aa//36%//P42568

[33412] C-NT2RP2002312//Homo sapiens mRNA for CDS2 protein.//0//2333bp//99%//Y16521

[33413] C-NT2RP2002325//Homo sapiens mRNA for Pex11p, complete cds.//8.40E-254//1158bp//99%//AB015594

[33414] C-NT2RP2002385//Homo sapiens synaptic glycoprotein SC2 spliced variant mRNA, complete cds.//4.30E-240//1105bp//99%//AF038958

[33415] C-NT2RP2002408//Homo sapiens MRNA for TOLLIP protein.//3.20E-210//1136bp//93%//AJ242972

[33416] C-NT2RP2002442//HESA PROTEIN.//2.80E-14//163aa//30%//P46037

[33417] C-NT2RP2002464//DNA CROSS-LINK REPAIR PROTEIN PS02//NM1.//6.50E-07//171aa//27%//P30620

[33418] C-NT2RP2002479//Homo sapiens mRNA for ABC transporter 7 protein, complete cds.//0//2180bp//99%//AB005289

[33419] C-NT2RP2002503//ZINC FINGER PROTEIN 45 (BRC1744).//4.60E-144//537aa//49%//Q02386

[33420] C-NT2RP2002520//Homo sapiens transcription factor RFX-B (RFXB) mRNA, complete cds.//3.70E-34//668bp//61%//AF105427

[33421] C-NT2RP2002537//HYPOTHETICAL 55.1 KD PROTEIN B0416.5 IN CHROMOSOME X.116.20E-19//288aa/126%//Q11073

[33422] C-NT2RP2002591//ZINC FINGER PROTEIN 84 (ZINC FINGER PROTEIN HPF2).//1.20E-155//562aa//50%//P51523

[33423] C-NT2RP2002595//PROBABLE CALCIUM-BINDING PROTEIN ALG-2 (PMP41) (ALG-257).//7.50E-35//181aa//42%//P12815

[33424] C-NT2RP2002606//Rattus norvegicus Rabin3 mRNA, complete cds.//9.20E-147//874bp//87%//U 19181

[33425] C-NT2RP2002609//2-HYDROXYMUCONIC SEMIALDEHYDE HYDROLASE (EC 3.1.1.-) (HMSH).//2.80E-08//109aa//37%//P19076

[33426] C-NT2RP2002618//PROTEIN ARGININE N-METHYLTRANSFERASE 2 (EC 2.1.1.-).//1.70E-511/326aa//38%//P55345

[33427] C-NT2RP2002701//HYPOTHETICAL 38.1 KD PROTEIN C2F12.15C IN CHROMOSOME II.//1.90E-14//210aa//30%//O14345

[33428] C-NT2RP2002710//SH3-BINDING PROTEIN 3BP-1.//4.90E-85//489aa//43%//P55194

[33429] C-NT2RP2002727//Rattus norvegicus tulip 2 mRNA, complete cds.//3.50E-7411727bp//72%//AF041107

[33430] C-NT2RP2002741//Homo sapiens mRNA for Neuroblastoma, complete cds.//9.90E-54//964bp//64%//D89016

[33431] C-NT2RP2002862//60S ACIDIC RIBOSOMAL PROTEIN P0 (LIGHT-INDUCED 34 KD PROTEIN).//8.80E-101/203aa//27%//P29764

[33432] C-NT2RP2002880//GLUCOSE REPRESSION MEDIATOR PROTEIN.//0.000039//206aa//23%//P14922

[33433] C-NT2RP2002928//Homo sapiens pre-mRNA splicing factor (PRP17) mRNA, complete cds.//1.90E-13611623bp//100%//AF038392

[33434] C-NT2RP2002929//HYPOTHETICAL 46.2 KD TRP-ASP REPEATS CONTAINING PROTEIN D2013.2 IN CHROMOSOME II.114.10E-87//395aa//40%//Q18964

[33435] C-NT2RP2002939//ZINC FINGER PROTEIN 136.//15.40E-70//282aa//42%//P52737

[33436] C-NT2RP2002959//UBIQUITIN-CONJUGATING ENZYME E2-17 KD 2 (EC 6.3.2.19) (UBIQUITIN- PROTEIN LIGASE) (UBIQUITIN CARRIER PROTEIN) (E2(17)KB 2).//4.60E-80//147aa//100%//P51669

[33437] C-NT2RP2002980//30S RIBOSOMAL PROTEIN S10.//1.00E-08/198aa//36%//P 10129

[33438] C-NT2RP2002986//Homo sapiens mRNA for Kelch motif containing protein, complete cds.//0//2209bp//99%//AB026190

[33439] C-NT2RP2002993//DNA-DIRECTED RNA POLYMERASE 1135 KD POLYPEPTIDE (EC 2.7.7.6) (RNA POLYMERASE I SUBUNIT 2) (RPA135).//0//716aa//91%//P70700

[33440] C-NT2RP2003000//TUMOR NECROSIS FACTOR, ALPHA-INDUCED PROTEIN 1, ENDOTHELIAL (B 12 PROTEIN).//1.90E-11/1132aa/138%//Q13829

[33441] C-NT2RP2003121//Mus musculus enhancer of polycomb (Epc1) mRNA, complete cds.//2.30E-821/642bp//68%//AF079765

[33442] C-NT2RP2003125//RING CANAL PROTEIN (KELCH PROTEIN).//2.40E-381/539aa//25%//Q04652

[33443] C-NT2RP2003137//UBIQUITIN.//0.000026//70aa//30%//P13117

[33444] C-NT2RP2003157//SPLICING FACTOR, ARGININE/SERINE-RICH 4 (PRE-MRNA SPLICING FACTOR SRP75).//1.30E-13//185aa//38%//Q08170

[33445] C-NT2RP2003158//Homo sapiens mRNA for proteasome subunit p58, complete cds.//0//2091bp//99%//D67025

[33446] C-NT2RP2003164//Homo sapiens mRNA for protein kinase.//0//2313bp//99%//AJ132545

[33447] C-NT2RP2003177//Homo sapiens recombination and sister chromatid cohesion protein homolog (hrec8) mRNA, partial cds.//0//1641bp//99%//AF006264

[33448] C-NT2RP2003228//H. sapiens P1-Cdc21 mRNA.//0//2870bp//98%//X74794

[33449] C-NT2RP2003230//Rattus norvegicus endo-alpha-D-mannosidase (Enman) mRNA, complete cds.//2.60E-186//1551bp//77%//AF023657

[33450] C-NT2RP2003243//Homo sapiens partial mRNA for putative p621 protein which interacts with transcription factor Sp .//0//544bp//99%//AJ242978

[33451] C-NT2RP2003265//Homo sapiens CGI-53 protein mRNA, complete cds.//0//1580bp//99%//AF151811

[33452] C-NT2RP2003272//Homo sapiens ubiquilin mRNA, complete cds.//0//789bp//99%//AF176069

[33453] C-NT2RP2003277//NAM7 PROTEIN (NONSENSE-MEDIATED MRNA DECAY PROTEIN 1) (UP-FRAMESHIFT SUPPRESSOR 1).//1.90E-16//145aa//43%//P30771

[33454] C-NT2RP2003286//PROBABLE RNA 3′-TERMINAL PHOSPHATE CYCLASE (EC 6.5.1.4) (RNA-3′- PHOSPHATE CYCLASE) (RNA CYCLASE).//4.20E-88//374aa//47%//Q23400

[33455] C-NT2RP2003295//Homo sapiens RMP mRNA for RPB5 meidating protein, complete cds.110111526bp//99%//AB006572

[33456] C-NT2RP2003307//KINESIN LIGHT CHAIN (KLC).//2.20E-199//550aa//70%//Q07866

[33457] C-NT2RP2003308//CROOKED NECK PROTEIN.//5.40E-244//622aa//67%//P17886

[33458] C-NT2RP2003329//PUTATIVE ADENYLATE CYCLASE REGULATORY PROTEIN.//3 .60E-14//332aa//32%//P26337

[33459] C-NT2RP2003347//BREAST CANCER TYPE I SUSCEPTIBILITY PROTEIN HOMOLOG.//0.000022//261aa//24%//P48754

[33460] C-NT2RP2003391//Homo sapiens mRNA for nuclear transport receptor.//0//1509bp//99%//AJ133769

[33461] C-NT2RP2003394//INTRACELLULAR PROTEIN TRANSPORT PROTEIN USO1.//5.50E-13//302aa//26%//P25386

[33462] C-NT2RP2003401//UBIQUITIN CARBOXYL-TERMINAL HYDROLASE DUB-1 (EC 3.1.2.15) (UBIQUITIN THIOLESTERASE DUB-1) (UBIQUITIN-SPECIFIC PROCESSING PROTEASE DUB-1) (DEUBIQUITINATING ENZYME 1).119.60E-78//346aa//43%//Q61068

[33463] C-NT2RP2003433//PROTEIN TRANSPORT PROTEIN SEC61 ALPHA SUBUNIT.//5.00E-131//269aa//91%//P38378

[33464] C-NT2RP2003466//Homo sapiens delta-6 fatty acid desaturase mRNA, complete cds.11//02194bp//99%//AF126799

[33465] C-NT2RP2003480//Homo sapiens zinc finger DNA binding protein 99 (ZNF281) mRNA, complete cds.//0//3012bp//99%//AF125158

[33466] C-NT2RP2003506//NADPH-CYTOCHROME P450 REDUCTASE (EC 1.6.2.4) (CPR).//5.40E-14//106aa//46%//P04175

[33467] C-NT2RP2003513//Homo sapiens mRNA for paralemmin.//0//2137bp//97%//Y14770

[33468] C-NT2RP2003517//Human c-sis/platelet-derived growth factor 2 (SIS/PDGF2) mRNA, complete cds.//0//1746bp//95%//M12783

[33469] C-NT2RP2003522//Homo sapiens zinc finger DNA binding protein 99 (ZNF281) mRNA, complete cds.11011i 764bp//99%//AF125158

[33470] C-NT2RP2003543//HYPOTHETICAL TRNA/RRNA METHYLTRANSFERASE SLR1673 (EC 2.1.1.-).//1 .70E-17//148aa//34%//P74261

[33471] C-NT2RP2003564//52 KD RO PROTEIN (SJOGREN SYNDROME TYPE A ANTIGEN (SS-A)) (RO(SS-A)).//2.10E-591/270aa//46%//P19474

[33472] C-NT2RP2003596//Mus musculus Fas-apoptosis inhibitory molecule (Faim) mRNA, complete cds.//4.80E-82//530bp//85%//AF130367

[33473] C-NT2RP2003604//Homo sapiens alpha-catenin-like protein (CTNNALi) mRNA, complete cds.//0//2442bp//99%//AF030233

[33474] C-NT2RP2003643//Mus musculus mRNA for CMP-N-acetylneuraminic acid synthetase.//9.40E-243//1624bp//82%//AJ006215

[33475] C-NT2RP2003702//Homo sapiens 17 beta-hydroxysteroid dehydrogenase type VII (HSD 17B7) mRNA, complete cds.//2.1e-313//978bp//99%//AF098786

[33476] C-NT2RP2003704//Homo sapiens mRNA for ATP-dependent metalloprotease YMEI L.//1.80E-72//350bp//100%//AJ132637

[33477] C-NT2RP2003713//Homo sapiens ubiquitin-specific protease 3 (USP3) mRNA, complete cds.//0//2018bp//99%//AF073344

[33478] C-NT2RP2003714//ZINC FINGER PROTEIN 91 (ZINC FINGER PROTEIN HTFI0) (HPF7).//5.40E-29//85aa//72%//Q05481

[33479] C-NT2RP2003737//UBIQUITIN-CONJUGATING ENZYME E2-17 KD 2 (EC 6.3.2.19) (UBIQUITIN-PROTEIN LIGASE) (UBIQUITIN CARRIER PROTEIN) (E2(17)KB 2).//1.70E-75//147aa//93%//P51669

[33480] C-NT2RP2003760//COATOMER GAMMA SUBUNIT (GAMMA-COAT PROTEIN) (GAMMA-COP).//0//869aa//80%//P53620

[33481] C-NT2RP2003781//HYPOTHETICAL 36.7 KD PROTEIN AH6.2 IN CHROMOSOME II.//5.50E-63//253aa//50%//Q09201

[33482] C-NT2RP2003840//HYPOTHETICAL 48.1 KD PROTEIN B0403.2 IN CHROMOSOME X.//3.70E-21//137aa//43%//Q1076

[33483] C-NT2RP2003857//MYOTROPHIN (V-I PROTEIN) (GRANULE CELL DIFFERENTIATION PROTEIN).//0.00000016//117aa//29%//Q91955

[33484] C-NT2RP2003871//Homo sapiens transposon-derived Buster1 transposase-like protein gene, complete cds.//0//2807bp//99%//AF205601

[33485] C-NT2RP2003912//SERINE/THREONINE-PROTEIN KINASE NEK1 (EC 2.7.1.-) (NIMA-RELATED PROTEIN KINASE 1).//6.110E-183/387aa//87%//P51954

[33486] C-NT2RP2003952//AMINOPEPTIDASE B (EC 3.4.11.6) (ARGINYL AMINOPEPTIDASE) (ARGININE AMINOPEPTIDASE) (CYTOSOL AMINOPEPTIDASE IV) (AP-B).//1.50E-23//200aa//30%//O09175

[33487] C-NT2RP2003981//VACUOLAR PROTEIN SORTING-ASSOCIATED PROTEIN VPS8.//1.40E-16//664aa//20%//P39702

[33488] C-NT2RP2004013//TRANSCRIPTION FACTOR BTF3 (RNA POLYMERASE B TRANSCRIPTION FACTOR 3).//2.30E-53//141aa//78%//P20290

[33489] C-NT2RP2004041//SYNAPSINS IA AND IB.//0.00000074//159aa//32%//P17599

[33490] C-NT2RP2004066//Mus musculus Msx2 interacting nuclear target protein mRNA, complete cds.//2.70E-288//1994bp//81%//AF156529

[33491] C-NT2RP2004098//ADENYLATE CYCLASE (EC 4.6.1.1) (ATP PYROPHOSPHATE-LYASE) (ADENYLYL CYCLASE).//5.40E-30//319aa//31%//Q01513

[33492] C-NT2RP2004170//Homo sapiens mRNA for transducin (beta) like 1 protein.//1.0E-138//1236bp//74%//Y12781

[33493] C-NT2RP2004187//ZINC FINGER PROTEIN 38 (ZFP-38) (CTFfN51) (TRANSCRIPTION FACTOR RU49).//5.60E-31 //424aa//28%//Q07231

[33494] C-NT2RP2004194//Rattus norvegicus Golgi SNARE GS15 mRNA, complete cds.//3.80E-52//397bp//82%//AF003998

[33495] C-NT2RP2004232//Homo sapiens EPK2 mRNA for serine/threonine kinase, complete cds.//0//2272bp//99%//AB015982

[33496] C-NT2RP2004239//Homo sapiens lok mRNA for protein kinase, complete cds.//0//3044bp//99%//AB015718

[33497] C-NT2RP2004242//NEUROFILAMENT TRIPLET H PROTEIN (200 KD NEUROFILAMENT PROTEIN) (NF-H).//9.90E-12//427aa//26%//P19246

[33498] C-NT2RP2004245//Mus musculus pantothenate kinase 1 beta (panK1beta) mRNA, complete cds.//6.40E-117//122bp//72%//AF200357

[33499] C-NT2RP2004270//PROTEIN PTM I PRECURSOR.//1.40E-16//334aa//24%//P32857

[33500] C-NT2RP2004366//VACUOLAR PROTEIN SORTING-ASSOCIATED PROTEIN VPS13.//1.30E-51//505aa//29%//Q07878

[33501] C-NT2RP2004389//PROBABLE MITOCHONDRIAL 40S RIBOSOMAL PROTEIN S9 PRECURSOR.//9.30E-15//26aa//39%//P38120

[33502] C-NT2RP2004392//MNN4 PROTEIN.//1.40E-11//143aa//27%//P36044

[33503] C-NT2RP2004396//Homo sapiens mRNA for activator of S phase Kinase, complete cds.//5.40E-243//108bp//99%//AB028069

[33504] C-NT2RP2004425//Mus musculus axotrophin mRNA, complete cds.//0//2321bp//86%//AF155739

[33505] C-NT2RP2004476//Homo sapiens cyclin L ania-6a mRNA, complete cds.//0//2075bp//99%//AF180920

[33506] C-NT2RP2004538//Mus musculus kinesin-like protein KIFIB (Kiflb) mRNA, complete cds.//0//1387bp//86%//AF090190

[33507] C-NT2RP2004568//PUTATIVE ATP-DEPENDENT RNA HELICASE C30DI 1.03.//3.00E-117//625aa//40%//Q09903

[33508] C-NT2RP2004587//NEUROFILAMENT TRIPLET M PROTEIN (160 KD NEUROFILAMENT PROTEIN) (NF-M).//7.30E-07//352aa//23%//P07197

[33509] C-NT2RP2004655//Homo sapiens mRNA for leucine rich protein.//8.50E-233//1061bp//99%//AJ006291

[33510] C-NT2RP2004681//NEUROFILAMENT TRIPLET H PROTEIN (200 KD NEUROFILAMENT PROTEIN) (NF-H).//2.60E-07//426aa//23%//P19246

[33511] C-NT2RP2004689//HYPOTHETICAL 192.5 KD PROTEIN C6G9.1C IN CHROMOSOME I.//5.60E-64//616aa//33%//Q92355

[33512] C-NT2RP2004710//Mus musculus formin binding protein 30 mRNA, complete cds.//1.50E-280//464bp//85%//U40750

[33513] C-NT2RP2004732//NEUROFILAMENT TRIPLET M PROTEIN (160 KD NEUROFILAMENT PROTEIN) (NF-M).//7.30E-07//352aa//23%//P07197

[33514] C-NT2RP2004768//SERINE/THREONINE-PROTEIN KINASE NRK1 (EC 2.7.1.-) (N-RICH KINASE 1).//1.30E-26//190aa//41%//P38692

[33515] C-NT2RP2004791//PUTATIVE LEUCYL-TRNA SYNTHETASE, CYTOPLASMIC (EC 6.1.1.4) (LEUCINE-TRNA LIGASE) (LEURS).//9.50E-73//153aa//59%//Q10490

[33516] C-NT2RP2004799//PROBABLE SUCCINYL-COA LIGASE [GDP-FORMING], BETA-CHAIN PRECURSOR (EC 6.2.1.4) (SUCClNYL-COA SYNTHETASE, BETA CHAIN) (SCS-BETA).//3.70E-135//414aa//62%//P53588

[33517] C-NT2RP2004816//H58 PROTEIN.//9.00E-173//327aa//98%//P40336

[33518] C-NT2RP2004920//TRANSCRIPTIONAL REGULATOR ATRX (X-LINKED NUCLEAR PROTEIN) (HETEROCHROMATIN PROTEIN 2) (HP1 ALPHA-INTERACTING PROTEIN) (HP1-BP38 PROTEIN).//4.20E-09//804aa//22%//Q61687

[33519] C-NT2RP2004933//Homo sapiens mRNA for ZIP-kinase, complete cds.//0//2103bp//99%//AB007144

[33520] C-NT2RP2004959//P54 PROTEIN PRECURSOR.//0.00000095//297aa//20%//P13692

[33521] C-NT2RP2004961//Rattus norvegicus KRAB/zinc finger suppressor protein 1 (KS 1) mRNA, complete cds.//1.00E-228//1666bp//75%//U56732

[33522] C-NT2RP2004978//ACTIN-LIKE PROTEIN ARP8 .//3 .30E-47//353aa//30%//Q12386

[33523] C-NT2RP2005003//52 KD RO PROTEIN (SJOGREN SYNDROME TYPE A ANTIGEN (SS-A)) (RO(SS-A)).//H1.80E-99//376aa//43%//P19474

[33524] C-NT2RP2005012//Homo sapiens mRNA for SEC63 protein.//0//693bp//99%//AJ011779

[33525] C-NT2RP2005037//ANTI-SILENCING PROTEIN I.//3 .30E-47//155aa//59%//P32447

[33526] C-NT2RP2005038//DNA NUCLEOTIDYLEXOTRANSFERASE (EC 2.7.7.31) (TERMINAL ADDITION ENZYME) (TERMINAL DEOXYNUCLEOTIDYLTRANSFERASE) (TERMINAL TRANSFERASE).//4.00E-9 I //218aa//44%//Q92089

[33527] C-NT2RP2005116//PUTATIVE EUKARYOTIC TRANSLATION INITIATION FACTOR 3 ALPHA SUBUNIT (EIF-3 ALPHA).//2.00E-173//273aa//57%//P34466

[33528] C-NT2RP2005126//H. sapiens mRNA for RNA helicase (Myc-regulated dead box protein).//0//2388bp//98%//X98743

[33529] C-NT2RP2005139//2-5A-DEPENDENT RIBONUCLEASE (EC 3.1.26.-) (2-5A-DEPENDENT RNAASE) (RNASE L) (RIBONUCLEASE 4) (FRAGMENT).//0.000000022//139aa//35%//Q05921

[33530] C-NT2RP2005144//Homo sapiens tubby like protein 3 (TULP3) mRNA, complete cds.//0.00E-01//1437bp//98%//AF045583

[33531] C-NT2RP2005162//Homo sapiens aspartyl aminopeptidase mRNA, complete cds.//0//15615bp//99%//AF005050

[33532] C-NT2RP2005168//Homo sapiens mRNA for E1 B-55 kDa-associated protein.//0//2769bp//980%//AJ007509

[33533] C-NT2RP2005204//Homo sapiens SUMO-1-activating enzyme El N subunit (SUAI) mRNA, complete cds.//0//1262bp//99%//AF090385

[33534] C-NT2RP2005239//Homo sapiens cysteine desulfurase (nifS) mRNA, complete cds.//0//2087bp//99%//AF097025

[33535] C-NT2RP2005276//Homo sapiens mRNA for Acyl-CoA synthetase 3, complete cds.//0//2122bp//99%//D89053

[33536] C-NT2RP2005288//Homo sapiens RCC-like G exchanging factor RLG mRNA, complete cds.//0//2992bp//99%//AF060219

[33537] C-NT2RP2005315//Homo sapiens meningioma-expressed antigen 5 (MEA5) mRNA, partial cds.//1.90E-170//780bp//100%//AF036144

[33538] C-NT2RP2005325//Homo sapiens LIM-homeodomain protein HLHX2 (LHX2) mRNA, complete cds.//0//1643bp//99%//AF124735

[33539] C-NT2RP2005336//TRICHOHYALIN.//5.40E-10//545aa//22%//P37709

[33540] C-NT2RP2005344//PROBABLE CALCIUM-TRANSPORTING ATPASE 5 (EC 3.6.1.38).//2.10E-124//636aa//38%//P32660

[33541] C-NT2RP2005358//Homo sapiens methyl-CpG binding domain-containing protein MBD3 (MBD3) mRNA, complete cds.//0//2199bp//99%//AF072247

[33542] C-NT2RP2005360//Homo sapiens sentrin/SUMO-specific protease (SENP1) mRNA, complete cds.//1.30E-52//753bp//67%//AF149770

[33543] C-NT2RP2005393//AUTOANTIGEN NGP-1 .117.20E-39//224aa//35%//Q13823

[33544] C-NT2RP2005407//OXYSTEROL-BINDING PROTEIN.//5 .30E-63//410aa//40%//P22059

[33545] C-NT2RP2005436//SPLICING FACTOR, ARGININE/SERINE-RICH 4 (PRE-MRNA PLICING FACTOR SRP75).//1.20E-13//185aa//38%//Q08170

[33546] C-NT2RP2005441//Homo sapiens hypothalamus protein HT002 mRNA, complete cds.//4.10E-202//962bp//98%//AF113540

[33547] C-NT2RP2005457//Homo sapiens NADH-ubiquinone oxidoreductase subunit B14.5B homolog mRNA, complete cds.//1.20E-130//608bp//99%//AF070652

[33548] C-NT2RP2005465//MITOCHONDRIAL CARRIER PROTEIN RIM2.//3.00E-44//252aa//41%//P38127

[33549] C-NT2RP2005476//Human p190-B (p 90-B) mRNA, complete cds.//3.40E-108/1668bp//88%//U17032

[33550] C-NT2RP2005490//Mus musculus D3Mm3e (D3Mm3e) mRNA, complete cds.//1.80E-175//102bp//83%//AF053628 45 C-NT2RP2005491//PARAMYOSIN (PMY) (ANTIGEN B).//0.00000015//279aa//26%//P35418

[33551] C-NT2RP2005496//ZINC FINGER PROTEIN 135.//2.90E-146//398aa//59%//P52742

[33552] C-NT2RP2005498//PROTEIN PHOSPHATASE PP2A, 55 KD REGULATORY SUBUNIT, ALPHA ISOFORM (PROTEIN PHOSPHATASE PP2A B SUBUNIT ALPHA ISOFORM) (ALPHA-PR55).//5.20E-81//166aa//88%//P36876 50 C-NT2RP2005509//Homo sapiens CGI-45 protein mRNA, complete cds.//0//1825bp//99%//AF151803

[33553] C-NT2RP2005520//Homo sapiens chromosome-associated protein-E (hCAP-E) mRNA, complete cds.//10/13994bp//99%//AF092563

[33554] C-NT2RP2005525//Mus musculus kanadaptin mRNA, complete cds.//2.40E-304//1687bp//85%//AF035526

[33555] C-NT2RP2005531//PROTEIN 4.1 (BAND 4.1) (P4.1).//5.50E-70//393aa//39% M/P11171

[33556] C-NT2RP2005539//Homo sapiens mRNA for NSI-binding protein (NS1-BP).//0//1560bp//98%//AJ012449

[33557] C-NT2RP2005549//PUTATIVE LACTOYLGLUTATHIONE LYASE (EC 4.4.1.5) (METHYLGLYOXALASE) (ALDOKETOMUTASE) (GLYOXALASE I) (GLX I) (KETONE-ALDEHYDE MUTASE) (S-D-LACTOYLGLUTATHIONE METHYLGLYOXAL LYASE).//2.00E-20//81aa//36%//Q39366

[33558] C-NT2RP2005557//Homo sapiens clone 486790 diphosphoinositol polyphosphate phosphohydrolase mRNA, complete cds.//1.00E-46//576bp//70%//AF062529

[33559] C-NT2RP2005605//QUEUINE TRNA-RIBOSYLTRANSFERASE (EC 2.4.2.29) (TRNA-GUANINE TRANSGLYCOSYLASE) (GUANINE INSERTION ENZYME).//8.20E-23//64aa//28%//O32053

[33560] C-NT2RP2005620//Homo sapiens epsin 2a mRNA, complete cds.//8.9e-313//455bp//98%//AF062085

[33561] C-NT2RP2005635//PROBABLE NH(3)-DEPENDENT NAD(+) SYNTHETASE (EC 6.3.5.1).//1.00E-11//128aa//36%//P47623

[33562] C-NT2RP2005654//CYSTEINE STRING PROTEIN (CCCS 1).//1.20E-13//74aa//45%//P56101

[33563] C-NT2RP2005669//Homo sapiens death effector domain-containing testicular molecule mRNA, complete cds.//1.60E-248//1129bp//99%//AF043733

[33564] C-NT2RP2005675//Homo sapiens growth suppressor related (DOC-IR) mRNA, complete cds.//4.40E-200//908bp//99%//AF089814

[33565] C-NT2RP2005694//X-LINKED RETINITIS PIGMENTOSA GTPASE REGULATOR.//2.60E-10//175aa//27%//Q92834

[33566] C-NT2RP2005701//ZINC-FINGER PROTEIN RFP (RET FINGER PROTEIN).//3.00E-63//323aa//39%//Q62158

[33567] C-NT2RP2005712//Homo sapiens myosin X (MYO10) mRNA, partial cds.//0//2681bp//99%//AF132022

[33568] C-NT2RP2005719//GPI-ANCHORED PROTEIN P137.//4.00E-14//99aa//43%//Q14444

[33569] C-NT2RP2005722//Homo sapiens ZK1 mRNA for Kruppel-type zinc finger protein, complete cds.//0//2545bp//99%//AB011414

[33570] C-NT2RP2005723//HNRNP ARGININE N-METHYLTRANSFERASE (EC 2.1.1.-) (ODP1 PROTEIN).//3.00E-09//169aa//28%//P38074

[33571] C-NT2RP2005752//Homo sapiens TNFR-related death receptor-6 (DR6) mRNA, complete cds.//0//1968bp//99%//AF068868

[33572] C-NT2RP2005753//Homo sapiens I-1 receptor candidate protein mRNA, complete cds.//0//966bp//99%//AF082516

[33573] C-NT2RP2005763//EUKARYOTIC INITIATION FACTOR 4A (EIF-4A).//1.70E-61//374aa//38%//P47943

[33574] C-NT2RP2005767//G. gallus PB1 gene.//5.00E-163//1158bp//81%//X90849

[33575] C-NT2RP2005773//Homo sapiens pyrroline 5-carboxylate reductase isoform (P5CR2) mRNA, complete cds.//2.70E-180//656bp//99%//AF151351

[33576] C-NT2RP2005775//NEUROLYSIN PRECURSOR (EC 3.4.24.16) (NEUROTENSIN ENDOPEPTIDASE) (MITOCHONDRIAL OLIGOPEPTIDASE M) (MICROSOMAL ENDOPEPTIDASE) (MEP) (SOLUBLE ANGIOTENSIN-BINDING PROTEIN) (SABP).//2.10E-213//249aa//85%//Q02038

[33577] C-NT2RP2005776//POLY(A) POLYMERASE TYPE 2 (EC 2.7.7.19) (PAP) (POLYNUCLEOTIDE ADENYLYLTRANSFERASE).//4.40E-55//358aa//42%//P51005

[33578] C-NT2RP2005784//Homo sapiens ubiquitin-conjugating enzyme variant Kua (UBE2V) mRNA, complete cds.//0//2191bp//92%//AF155120

[33579] C-NT2RP2005812//HYPOTHETICAL 39.3 KD PROTEIN IN GCN4-WBPI INTERGENIC REGION.//2.30E-39//318aa//31%//P40004

[33580] C-NT2RP2005835//SHP1 PROTEIN.//1.80E-28//208aa//32%//P34223

[33581] C-NT2RP2005841//Homo sapiens mRNA for ALEX3, complete cds.//3.50E-52//1091bp//59%//AB039669

[33582] C-NT2RP2005933//NUCLEOPORIN NUP57 (NUCLEAR PORE PROTEIN NUP57).//5.00E-1//55aa//34%//P48837

[33583] C-NT2RP2005942//POLY(A) POLYMERASE (EC 2.7.7.19) (PAP) (POLYNUCLEOTIDE ADENYLYLTRANSFERASE).//1.50E-67//388aa//44%//P25500

[33584] C-NT2RP2006043//SPLICING FACTOR, ARGININE/SERINE-RICH 4 (PRE-MRNA SPLICING FACTOR SRP75).//1.50E-13//85aa//38%//Q08170

[33585] C-NT2RP2006071//Homo sapiens adaptor protein APPL mRNA, complete cds.//5.80E-120//1257bp//64%//AF169797

[33586] C-NT2RP2006219//H. sapiens mRNA for DGCR6 protein.//1.10E-214//026bp//97%//X96484

[33587] C-NT2RP2006238//Rattus norvegicus CTD-binding SR-like protein rA8 mRNA, complete cds.//10//669bp//88%//U49055

[33588] C-NT2RP2006275//MICROTUBULE-ASSOCIATED PROTEIN I B [CONTAINS: LIGHT CHAIN LCI].//2.00E-59//388aa//32%//P46821

[33589] C-NT2RP2006312//Homo sapiens BAF57 (BAF57) gene, complete cds.//2.80E-274//236bp//99%//AF035262

[33590] C-NT2RP2006436//ANTERIOR-RESTRICTED HOMEOBOX PROTEIN (RATHKE POUCH HOMEO BOX).//3.40E-07//50aa//50%//Q61658

[33591] C-NT2RP2006456//Homo sapiens leucine-rich glioma-inactivated protein precursor (LGII) mRNA, complete cds.//1.30E-37//484bp//65%//AF055636

[33592] C-NT2RP2006464//Homo sapiens mRNA for AND-1 protein.//0//2181bp//99%//AJ006266

[33593] C-NT2RP2006534//5′-AMP-ACTIVATED PROTEIN KINASE, CATALYTIC ALPHA-1 CHAIN (EC 2.7.1.-) (AMPK ALPHA-1 CHAIN) (FRAGMENT).//3.20E-11//32aa//96%//Q13131

[33594] C-NT2RP2006565//Homo sapiens secretory carrier-associated membrane protein (SCAMP) mRNA, complete cds.//3.I OE-272//1220bp//95%//AF038966

[33595] C-NT2RP2006571//CYTOCHROME P4502G1 (EC 1.14.14.1) (CYPIIGI) (P450-NMB) (OLFACTIVE).//4.20E-134//486aa//50%//P24461

[33596] C-NT2RP2006573//2′,3′-CYCLIC NUCLEOTIDE 3′-PHOSPHODIESTERASE (EC 3.1.4.37) (CNP).//0.0000055//69aa//25%//P09543

[33597] C-NT2RP2006598//Homo sapiens retinoid x receptor interacting protein mRNA, complete cds.//3.10E-295//H 193bp//99%//AF113538

[33598] C-NT2RP3000031//HISTONE DEACETYLASE HDA1.//1.10E-71//350aa//42%//P53973

[33599] C-NT2RP3000046//MITOCHONDRIAL GTPASE MSS1 PRECURSOR.//4.60E-78//421aa//37%//P32559

[33600] C-NT2RP3000047//NPL4 PROTEIN.//1.10E-85//526aa//36%//P33755

[33601] C-NT2RP3000050//ZINC FINGER PROTEIN 91 (ZINC FINGER PROTEIN HTFIO) (HPF7).//2.20E-150//490aa//53%//Q05481

[33602] C-NT2RP3000068//SON OF SEVENLESS PROTEIN HOMOLOG 1 (SOS-1) (MSOS-1).//2.20E-06//65aa//27%//Q62245

[33603] C-NT2RP3000085//ACETYL-/PROPIONYL-COENZYME A CARBOXYLASE ALPHA CHAIN [CONTAINS: BIOTIN CARBOXYLASE (EC 6.3.4.14); BIOTIN CARBOXYL CARRIER PROTEIN (BCCP)].//1.90E-123//436aa//50%//P46401

[33604] C-NT2RP3000109//P54 PROTEIN PRECURSOR.//0.0000065//358aa//22%//P13692

[33605] C-NT2RP3000207//GLUCOAMYLASE S1/S2 PRECURSOR (EC 3.2.1.3) (GLUCAN 1,4-ALPHA- GLUCOSIDASE) (1,4-ALPHA-D-GLUCAN GLUCOHYDROLASE).//2.90E-11/721aa//23%//P08640

[33606] C-NT2RP3000233//RING CANAL PROTEIN (KELCH PROTEIN).//9.30E-84//453aa/142%//Q04652

[33607] C-NT2RP3000252//Homo sapiens GTP-binding protein NGB mRNA, complete cds.11//02388bp//99%//AF120334

[33608] C-NT2RP3000299//Rattus norvegicus mRNA for Crk-associated substrate, p130, complete cds.//0//2730bp//82%//D29766

[33609] C-NT2RP3000320//Homo sapiens partial mRNA for putative p621 protein which interacts with transcription factor Sp1.//0//1544bp//100%//AJ242978

[33610] C-NT2RP3000333//Rattus norvegicus db83 mRNA, complete cds.//2.90E-191//1094bp//85%//AB006135

[33611] C-NT2RP3000341//Homo sapiens mitochondrial inner membrane preprotein translocase Tim17a mRNA, nuclear gene encoding mitochondrial protein, complete cds.//1.50E-246//1124bp//99%//AF106622

[33612] C-NT2RP3000350//Homo sapiens GTP-binding protein NGB mRNA, complete cds.//0//2392bp//99%//AF120334

[33613] C-NT2RP3000359//GTP:AMP PHOSPHOTRANSFERASE MITOCHONDRIAL (EC 2.7.4.10) (AK3).//2.00E-11 //226aa//92%//P08760

[33614] C-NT2RP3000361//Homo sapiens mRNA, complete cds, similar to yeast pre-mRNA splicing factors, Prp1/Zer1 and Prp6.//01/2072bp//98%//AB019219

[33615] C-NT2RP3000366//RAS-RELATED PROTEIN RAB-18.//2.10E-107//206aa//99%//P35293

[33616] C-NT2RP3000393//Rattus norvegicus DNA-binding protein PREB (Preb) mRNA, complete cds.//5.80E-266//1373bp//86%//AF061817

[33617] C-NT2RP3000397//PUTATIVE PRE-MRNA SPLICING FACTOR RNA HELICASE (DEAH BOX PROTEIN 13)/11.70E-139//679aa//41%//O43143

[33618] C-NT2RP3000403//Homo sapiens formin binding protein 21 mRNA, complete cds.//0//12364bp//99%//AF071185

[33619] C-NT2RP3000439//HYPOTHETICAL 46.4 KD PROTEIN IN FFH-GRPE INTERGENIC REGION.//2.90E-15//319aa//26%//P37908

[33620] C-NT2RP3000441//Homo sapiens squamous cell carcinoma antigen recognized by T cell (SART-2) mRNA, complete cds.//3.40E-42/1645bp//67%//AF098066

[33621] C-NT2RP3000512//Human HOX2G mRNA from the Hox2 locus.//0//1934bp//99%//X16667

[33622] C-NT2RP3000527//ZINC FINGER PROTEIN 43 (ZINC PROTEIN HTF6).//4.80E-28//536aa/127%//P28160

[33623] C-NT2RP3000531//POLIOVIRUS RECEPTOR PRECURSOR (CD155 ANTIGEN).//1.90E-12//192aa//30%//P15151

[33624] C-NT2RP3000562//Homo sapiens putative RNA-binding protein Q99 mRNA, complete cds.11//02165bp//99%//AF093097

[33625] C-NT2RP3000578//HES1 PROTEIN.//1.30E-22//229aa//27%//P35843

[33626] C-NT2RP3000590//UVS-2 PROTEIN.//1.30E-22//458aa//24%//P33288

[33627] C-NT2RP3000596//TRICHOHYALIN.//2.50E-17//304aa//28%//Q07283

[33628] C-NT2RP3000603//NEUROGENIC DIFFERENTIATION FACTOR 1.//3.70E-11//90aa//42%//Q13562

[33629] C-NT2RP3000605//Mus musculus mRNA for wizL, complete cds.//0//2232bp//82%//AB012265

[33630] C-NT2RP3000624//Rattus norvegicus mRNA for SECIS binding protein 2 (sbp2 gene).//5.80E-234//562bp//81%//AJ251245

[33631] C-NT2RP3000632//ZINC FINGER PROTEIN 84 (ZINC FINGER PROTEIN HPF2).//3.00E-140//499aa//46%//P51523

[33632] C-NT2RP3000739//ATROPHIN- I (DENTATORUBRAL-PALLIDOLUYSIAN ATROPHY PROTEIN).//1.40E-24//155aa/137%//Q10149

[33633] C-NT2RP3000742//1-PHOSPHATIDYLINOSITOL-4,5-BISPHOSPHATE PHOSPHODIESTERASE DELTA 1 (EC 3.1.4.11) (PLC-DELTA-1) (PHOSPHOLIPASE C-DELTA-1) (PLC-III) (FRAGMENT).//4.10E-165//371aa//49%//P10895

[33634] C-NT2RP3000753//NEUROFILAMENT TRIPLET H PROTEIN (200 KD NEUROFILAMENT PROTEIN) (NF-H).//2.00E-10//565aa//24%//P12036

[33635] C-NT2RP3000759//ADP-RIBOSYLATION FACTOR.//7.00E-28//176aa//34%//Q94650

[33636] C-NT2RP3000825//NEUROGENIC LOCUS NOTCH 3 PROTEIN.//2.50E-36//417aa//31%//Q61982

[33637] C-NT2RP3000826//Homo sapiens mRNA for seven transmembrane protein TM7SF3, complete cds.//0//2522bp//99%//AB032470

[33638] C-NT2RP3000845//PUTATIVE SERINE/THREONINE-PROTEIN KINASE P78 (EC 2.7.1.-).//8.30E-108//331aa//50%//P27448

[33639] C-NT2RP3000868//Human ovarian cancer downregulated myosin heavy chain homolog (Doc1) mRNA, complete cds.//6.90E-69//1611bp//61%//U53445

[33640] C-NT2RP3000869//Drosophila melanogaster AAA family protein Bor (bor) mRNA, complete cds.//2.60E-138//673bp//67%//AF227209

[33641] C-NT2RP3000875//MEVALONATE KINASE (EC 2.7.1.36) (MK).//7.70E-87//175aa//98%//Q03426

[33642] C-NT2RP3000917//DHP 1 PROTEIN.//1.00E-193//428aa//55%//P40848

[33643] C-NT2RP3000919//Rattus norvegicus golgi peripheral membrane protein p65 (GRASP65) mRNA, complete cds.//2.70E-185//585bp//88%//AF015264

[33644] C-NT2RP3000968//40S RIBOSOMAL PROTEIN S15A.//1.90E-46//73aa//98%//P39027

[33645] C-NT2RP3000994//MATERNAL EFFECT PROTEIN STAUFEN.//0.00000006//78aa//48%//P25159

[33646] C-NT2RP3001055//Drosophila melanogaster separation anxiety protein (san) mRNA, complete cds.//3.80E-38//462bp//70%//AF225902

[33647] C-NT2RP3001057//ZINC FINGER PROTEIN 91 (ZINC FINGER PROTEIN HTF10) (HPF7).//9.00E-201//584aa//54%//Q05481

[33648] C-NT2RP3001081//Homo sapiens RCC 1-like G exchanging factor RLG mRNA, complete cds.//7.10E-47//537bp//74%//AF060219

[33649] C-NT2RP3001096//Rattus norvegicus leprecan (leprel) mRNA, complete cds.//1.70E-9411787bp//66%//AF087433

[33650] C-NT2RP3001107//PEREGRIN (BR140 PROTEIN).//3.00E-44//260aa//40%//P55201

[33651] C-NT2RP3001111//Homo sapiens TRF-proximal protein mRNA, complete cds.//1.50E-149//731bp//97%//AF097725

[33652] C-NT2RP3001113//INTRACELLULAR PROTEIN TRANSPORT PROTEIN USO1.//2.90E-1//631aa//23%//P25386

[33653] C-NT2RP3001120//ZINC FINGER PROTEIN 136.//7.80E-170//512aa//58%//P52737

[33654] C-NT2RP3001140//F-SPONDIN PRECURSOR.//9.90E-238//419aa//96%//P35446

[33655] C-NT2RP3001150//TRANSCRIPTION TERMINATION FACTOR RHO.//0.000000311/207aa//29%//P52154

[33656] C-NT2RP3001155//Homo sapiens mRNA for AND-1 protein.//0//2732bp//99%//AJ006266

[33657] C-NT2RP3001176//HYPOTHETICAL 65.3 KD PROTEIN IN MADI-SCY1 INTERGENIC REGION.//1.70E-10//96aa//27%//P53154

[33658] C-NT2RP3001216//CYLICIN I (MULTIPLE-BAND POLYPEPTIDE I) (FRAGMENT).//0.0000023//137aa//33%//P35663

[33659] C-NT2RP3001221//GAMMA-BUTYROBETAINE, 2-OXOGLUTARATE DIOXYGENASE (EC 1.14.11.1) (GAMMA-BUTYROBETAINE HYDROXYLASE).//1.90E-31i/353aa//30%//P80193

[33660] C-NT2RP3001239//MICROTUBULE-ASSOCIATED PROTEIN IB (MAP1.2) (MAP1(X)) [CONTAINS: LIGHT CHAIN LCl].//1.20E-166//395aa//51%//P14873

[33661] C-NT2RP3001253//NUF1 PROTEIN (SPINDLE POLY BODY SPACER PROTEIN SPCI 10).//1.70E-10//540aa//23%//P32380

[33662] C-NT2RP3001268//Homo sapiens zinc finger protein ZNF228 (ZNF228) mRNA, complete cds.//0//3606bp//99%//AF198358

[33663] C-NT2RP3001272//Mus musculus mRNA for macrophage actin-associated-tyrosine-phosphorylated protein.//1.30E-99//669bp//83%//Y 18101

[33664] C-NT2RP3001307//Gallus gallus RPE65 mRNA, complete cds.//4.20E-29//530bp//63%//AB017594

[33665] C-NT2RP3001338//ZINC FINGER PROTEIN 81 (FRAGMENT).//2.40E-16//175aa//28%//P51508

[33666] C-NT2RP3001355//TRICARBOXYLATE TRANSPORT PROTEIN PRECURSOR (CITRATE TRANSPORT PROTEIN) (CTP) (TRICARBOXYLATE CARRIER PROTEIN).//3.60E-25//129aa//34%//P32089

[33667] C-NT2RP3001383//Mus musculus ARL-6 interacting protein-6 (Aip-6) mRNA, partial cds.//3.40E-40//355bp//79%//AF133913

[33668] C-NT2RP3001384//Homo sapiens mRNA for LA95 protein.//0//1214bp//99%//AJ243467

[33669] C-NT2RP3001398//TRANSCRIPTIONAL REPRESSOR CTCF.//1.30E-61//374aa//36%//P49711

[33670] C-NT2RP3001399//SSU72 PROTEIN.//1.30E-16//84aa//52%//P53538

[33671] C-NT2RP3001407//SCY1 PROTEIN.//0.00000033//143aa//25%//P53009

[33672] C-NT2RP3001426//DNAJ PROTEIN (FRAGMENT).//1.00E-16/177aa//46%//O33529

[33673] C-NT2RP3001427//WERNER SYNDROME HELICASE HOMOLOG.//2.70E-10//159aa//33%//O09053

[33674] C-NT2RP3001428//NUCLEOPROTEIN TPR.//1.40E-128//152aa//99%//P12270

[33675] C-NT2RP3001453//ANTIGEN PEPTIDE TRANSPORTER 2 (APT2) (HISTOCOMPATIBILITY ANTIGEN MODIFIER 2).//3.20E-90//57aa//59%//P36371

[33676] C-NT2RP3001457//Drosophila melanogaster Melted (melt) mRNA, partial cds.//4.60E-20//792bp//59%//AF205831

[33677] C-NT2RP3001472//NONHISTONE CHROMOSOMAL PROTEIN 6A.//9.10E-13//87aa//43%//PI 1632

[33678] C-NT2RP3001495//Human oxidoreductase (HHCMA56) mRNA, complete cds.//0//475bp//99%//Ul 3395

[33679] C-NT2RP3001497//Homo sapiens multiple membrane spanning receptor TRC8 (TRC8) mRNA, complete cds.//0//2295bp//99%//AF064801

[33680] C-NT2RP3001527//Human Spl40 protein (Spl40) mRNA, complete cds.//4.30E-290//793bp//93%//U63420

[33681] C-NT2RP3001529//SPOOB-ASSOCIATED GTP-BINDING PROTEIN.//1.00E-61//345aa//42%//P20964

[33682] C-NT2RP3001538//HYPOTHETICAL 39.0 KD PROTEIN T28D9.3 IN CHROMOSOME II.//9.10E-10//158aa//31%//Q10022

[33683] C-NT2RP3001554//MICROTUBULE-ASSOCIATED PROTEIN 1B [CONTAINS: LIGHT CHAIN LC 1].//1.40E-76//388aa//32%//P46821

[33684] C-NT2RP3001580//Mus musculus strain C57BL/J germ cell-less protein (Gcl) mRNA, complete cds.//0//1730bp//85%//AF163665

[33685] C-NT2RP3001587//Human anthracycline-associated resistance ARX mRNA, complete cds.//0//2617bp//99%//U35832

[33686] C-NT2RP3001642//HYPOTHETICAL PROTEIN KIAA0210.I/6.80E-18//91aa//38%//Q92609

[33687] C-NT2RP3001646//WD-40 REPEAT PROTEIN MSI2.//8.80E-09//32aa//31%//O22468

[33688] C-NT2RP3001671//Homo sapiens mRNA for NS 1-binding protein (NS 1-BP).//0//1557bp//98%//AJ012449

[33689] C-NT2RP3001672//Homo sapiens Sex comb on midleg homolog I isoform 2 (SCMHI) mRNA, complete cds.//0//2836bp//99%//AF149046

[33690] C-NT2RP3001679//Homo sapiens rec mRNA, complete cds.//0//2495bp//99%//AB023584

[33691] C-NT2RP3001688//Homo sapiens DNA binding protein p96PIF mRNA, complete cds.//0//1869bp//99%//AF173868

[33692] C-NT2RP3001690//INTRACELLULAR PROTEIN TRANSPORT PROTEIN USOI.//0.00000024//481aa//21%//P25386

[33693] C-NT2RP3001708//TWISTED GASTRULATION PROTEIN PRECURSOR.//3.40E-33//161aa//32%//P54356

[33694] C-NT2RP3001712//Homo sapiens HP1-BP74 protein mRNA, complete cds.//0//1788bp//99%//AF113534

[33695] C-NT2RP3001723//Homo sapiens cell recognition molecule Caspr2 (CASPR2) mRNA, complete cds.//1.40E-58//1138bp/163%//AF193613

[33696] C-NT2RP3001724//Homo sapiens chromodomain-helicase-DNA-binding protein mRNA, complete cds.//1.10E-240//902bp//99%//AF054177

[33697] C-NT2RP3001727//Rattus norvegicus implantation-associated protein (IAG2) mRNA, partial cds.//6.90E-132//774bp//88%//AF008554

[33698] C-NT2RP3001730//SEPTIN 2 HOMOLOG (FRAGMENT).//7.10E-132//294aa//84%//Q14141

[33699] C-NT2RP3001739//HYPOTHETICAL 72.5 KD PROTEIN C2F7.10 IN CHROMOSOME I.//1.40E-15//190aa//32%//Q09701

[33700] C-NT2RP3001792//HETEROGENEOUS NUCLEAR RIBONUCLEOPROTEIN M (HNRNP M).//1.80E-117//462aa//55%//P52272

[33701] C-NT2RP3001799//MYOSIN HEAVY CHAIN, STRIATED MUSCLE.//1.60E-11//348aa//27%//P24733

[33702] C-NT2RP3001819//RING CANAL PROTEIN (KELCH PROTEIN).//7.40E-18//249aa//30%//Q04652

[33703] C-NT2RP3001854//Homo sapiens novel retinal pigment epithelial cell protein (NORPEG) mRNA, complete cds.//0//2742bp//99%//AF155135

[33704] C-NT2RP3001855//HOMEOBOX PROTEIN PKNOX1 (HOMEOBOX PROTEIN PREP-1).//8.10E-125//302aa//60%//P55347

[33705] C-NT2RP3001857//VEGETATIBLE INCOMPATIBILITY PROTEIN HET-E-1.//1.20E-14//242aa//24%//Q00808

[33706] C-NT2RP3001898//Homo sapiens mRNA for UDP-N-acetylglucosamine: alpha-1,3-D-mannoside beta-1,4-N-acetylglucosaminyltransferase IV, complete cds.//0//1587bp//100%//AB000624

[33707] C-NT2RP3001931//Rattus norvegicus clone C48 CDK5 activator-binding protein mRNA, complete cds.//4.30E-9111656bp//81%//AF177478

[33708] C-NT2RP3001938//SPORULATION-SPECIFIC PROTEIN 1 (EC 2.7.1.-).//1.30E-22//227aa//33%//P08458

[33709] C-NT2RP3001944//HYPOTHETICAL 47.6 KD PROTEIN C16C10.5 IN CHROMOSOME III.//3.10E-92//314aa//51%//Q09251

[33710] C-NT2RP3001969//TRICHOHYALIN.//2.70E-11//442aa//23%//P37709

[33711] C-NT2RP3002004//H. sapiens mRNA for FAST kinase.//1.50E-192//475bp//94%//X86779

[33712] C-NT2RP3002007//SAP 1 PROTEIN.//1.10E-68//474aa//32%//P39955

[33713] C-NT2RP3002014//HYPOTHETICAL 32.0 KD PROTEIN C09F5.2 IN CHROMOSOME III.//5.30E-25//39aa//48%//Q09232

[33714] C-NT2RP3002045//ALPHA-ADAPTIN C (CLATHRIN ASSEMBLY PROTEIN COMPLEX 2 ALPHA-C LARGE CHAIN) (100 KD COATED VESICLE PROTEIN C) (PLASMA MEMBRANE ADAPTOR HA2/AP2 ADAPTIN ALPHA C SUBUNIT).//1.00E-299//397aa//94%//P18484

[33715] C-NT2RP3002056//RETINOBLASTOMA BINDING PROTEIN 1 (RBBP-1).//2.00E-48//475aa//35%//P29374

[33716] C-NT2RP3002062//Homo sapiens BAG-family molecular chaperone regulator-S mRNA, complete cds.//0//3764bp//99%//AF095195

[33717] C-NT2RP3002081//Xenopus laevis chromosome condensation protein XCAP-G mRNA, complete cds.//4.10E-233//896bp//69%//AF111423

[33718] C-NT2RP3002108//DEC 1 PROTEIN (MDM20 PROTEIN).//7.90E-09//181aa//22%//Q12387

[33719] C-NT2RP3002151//G1 TO S PHASE TRANSITION PROTEIN I HOMOLOG (GTP-BINDING PROTEIN GST1-HS).//2.80E-253//474aa//93%//P15170

[33720] C-NT2RP3002165//TRANSCRIPTIONAL REGULATOR PROTEIN HCNGP.//1.90E-151//223aa//91%//Q02614

[33721] C-NT2RP3002273//SCD6 PROTEIN.//1.30E-09//295aa//28%//P45978

[33722] C-NT2RP3002303//PROBABLE UNDECAPRENYL PYROPHOSPHATE SYNTHETASE (EC 2.5.1.31) (UPP SYNTHETASE) (DI-TRANS-POLY-CIS-DECAPRENYLCISTRANSFERASE).//8.60E-49//243aa//43%//Q58767

[33723] C-NT2RP3002330//Homo sapiens eRFS mRNA, complete cds.//0//2443bp//99%//U87791

[33724] C-NT2RP3002351//Human mRNA for NAD-dependent methylene tetrahydrofolate dehydrogenase cyclohydrolase (EC 1.5.1.15).//4.20E-70//590bp//76%//X16396

[33725] C-NT2RP3002399//DNA REPLICATION LICENSING FACTOR MCM4 (CDC21 HOMOLOG) (P1-CDC21).//8.60E-79//416aa//34%//P33991

[33726] C-NT2RP3002501//THREONINE DEHYDRATASE CATABOLIC (EC 4.2.1.16) (THREONINE DEAMINASE).//3.70E-43//318aa//37%//P05792

[33727] C-NT2RP3002529//VACUOLAR PROTEIN SORTING-ASSOCIATED PROTEIN VPS45.//8 .90E-95//542aa//38%//P38932

[33728] C-NT2RP3002549//HYPOTHETICAL 26.6 KD PROTEIN T19C3.4 IN CHROMOSOME III.//5.80E-40//161aa//52%//Q10010

[33729] C-NT2RP3002602//PROBABLE PROTEIN DISULFIDE ISOMERASE ER-60 PRECURSOR (EC 5.3.4.1) (ERP60) (58 KD MICROSOMAL PROTEIN) (P58) (HIP-70) (Q-2).//2.90E-19//173aa//28%//P11598

[33730] C-NT2RP3002628//PROBABLE PROTEIN DISULFIDE ISOMERASE P5 PRECURSOR (EC 5.3.4.1).//2.50E-26//90aa//42%//P38660

[33731] C-NT2RP3002631//Homo sapiens Ran binding protein 11 mRNA, complete cds.//0//1703bp//99%//AF111109

[33732] C-NT2RP3002650//Mus musculus growth suppressor IL (Gros1) mRNA, complete cds.//0//2109bp//87%//AF165163

[33733] C-NT2RP3002663//Homo sapiens putative glycolipid transfer protein mRNA, complete cds.//8.10E-263//H 243bp//97%//AF103731

[33734] C-NT2RP3002671//ELONGATION FACTOR 2 (EF-2).//2.50E-73//179aa//36%//P13060

[33735] C-NT2RP3002682//Homo sapiens CGI-145 protein mRNA, complete cds.//0//1596bp//98%//AF151903

[33736] C-NT2RP3002688//Mouse mRNA for kinesin-like protein (Kiflb), complete cds.//.OE-93//1205bp//69%//D17577

[33737] C-NT2RP3002770//MYELOID DIFFERENTIATION PRIMARY RESPONSE PROTEIN MYD116.//1.00E-07//70aa//41%//P17564

[33738] C-NT2RP3002785//LETHAL(2)DENTICLELESS PROTEIN (DTL83 PROTEIN).//2.50E-55//87aa//39%//Q24371

[33739] C-NT2RP3002810//HISTIDINE-RICH PROTEIN KE4.//2.20E-10//260aa//26%//Q31125

[33740] C-NT2RP3002818//INSERTION ELEMENT IS2A HYPOTHETICAL 48.2 KD PROTEIN.//5.70E-226//303aa//97%//P51026

[33741] C-NT2RP3002869//Mus musculus semaphorin VIa mRNA, complete cds.//2.50E-232//282bp//85%//AF030430

[33742] C-NT2RP3002876//Drosophila melanogaster eyelid (eld) mRNA, complete cds.//1.30E-29//805bp//61%//AF053091

[33743] C-NT2RP3002909//P53-BINDING PROTEIN 2 (53BP2) (BCL2-BINDING PROTEIN) (BBP).//1.50E-125//512aa//47%//Q13625

[33744] C-NT2RP3002948//RING CANAL PROTEIN (KELCH PROTEIN).//2.00E-11 //551aa//42%//Q04652

[33745] C-NT2RP3002953//Homo sapiens protocadherin beta 5 (PCDH-beta5) mRNA, complete cds.//0//2388bp//99%//AF152498

[33746] C-NT2RP3002969//Homo sapiens mRNA for Acyl-CoA synthetase 3, complete cds.//0//2722bp//99%//D89053

[33747] C-NT2RP3002972//Halocynthia roretzi mRNA for HrPET-1, complete cds.//3.90E-52//899bp//64%//AB029333

[33748] C-NT2RP3002988//Homo sapiens IkB kinase-b (IKK-beta) mRNA, complete cds.//1.80E-292//325bp//99%//AF080158

[33749] C-NT2RP3003032//Homo sapiens okadaic acid-inducible and cAMP-regulated phosphoprotein 19 (ARPP-19) mRNA, complete cds.//0//2656bp//99%//AF084555

[33750] C-NT2RP3003059//Rattus norvegicus potassium channel regulator 1 mRNA, complete cds.//3.80E-152//1007bp//82%//U78090

[33751] C-NT2RP3003061//ANKYRIN.//1.40E-20//200aa//37%//Q02357

[33752] C-NT2RP3003071//NEUROGENIC PROTEIN BIG BRAIN.//1.10E-05//258aa//24%//P23645

[33753] C-NT2RP3003078//Rattus norvegicus mRNA for ischemia related factor NYW-1, complete cds.//2.60E-112/1633bp//88%//AB027149

[33754] C-NT2RP3003101//Mouse mRNA for tetracycline transporter-like protein, complete cds.//3.60E-83//807bp//72%//D88315

[33755] C-NT2RP3003133//Homo sapiens ZKI mRNA for Kruppel-type zinc finger protein, complete cds.//0//998bp//91%//AB001414

[33756] C-NT2RP3003138//Homo sapiens kinesin superfamily motor KIF4 mRNA, complete cds.//0//2159bp//98%//AF071592

[33757] C-NT2RP3003145//Mus musculus metallocarboxypeptidase CPX-1 mRNA, complete cds.//0//2251bp//81%//AF077738

[33758] C-NT2RP3003185//TROPOMYOSIN 1, FUSION PROTEIN 33.//2.80E-06//402aa//23%//P49455

[33759] C-NT2RP3003193//ZINC FINGER PROTEIN 135.//7.30E-98//269aa//62%//P52742

[33760] C-NT2RP3003197//HYPOTHETICAL 33.8 KD PROTEIN C5HI0.01 IN CHROMOSOME I.//5.70E-09//169aa//31%// Q09674

[33761] C-NT2RP3003203//Rattus norvegicus golgi stacking protein homolog GRASP55 mRNA, complete cds.//2.00E-210//1851bp//76%//AF110267

[33762] C-NT2RP3003212//Rattus norvegicus lamina associated polypeptide IC (LAPIC) mRNA, complete cds.//4.30E-187//750bp//75%//U20286

[33763] C-NT2RP3003230//Homo sapiens mRNA for hCRNN4, complete cds.//0//2350bp//99%//AB030656

[33764] C-NT2RP3003242//Homo sapiens stanniocalcin-related protein mRNA, complete cds.110112366bp/199%//AF098462

[33765] C-NT2RP3003251//52 KD RO PROTEIN (SJOGREN SYNDROME TYPE A ANTIGEN (SS-A)) (RO(SS-A)).114.20E-86//366aa//48%//P19474

[33766] C-NT2RP3003282//Homo sapiens dynamin (DNM) mRNA, complete cds.110112596bp//98%//L36983

[33767] C-NT2RP3003290//Mus musculus mRNA for Ndr1 related protein Ndr3, complete cds.//1.5e-310//1468bp//82%//AB033922

[33768] C-NT2RP3003301//MITOCHONDRIAL LON PROTEASE HOMOLOG 1 PRECURSOR (EC 3.4.21.-).//1.10E-170//585aa//54%//O64948

[33769] C-NT2RP3003313//Homo sapiens thyroid hormone receptor-associated protein complex component TRAP80 mRNA, complete cds.//0//2476bp//99%//AF117657

[33770] C-NT2RP3003327//52 KD RO PROTEIN (SJOGREN SYNDROME TYPE A ANTIGEN (SS-A)) (RO(SS-A)) (RO52).//1.30E-35//178aa//44%//Q62191

[33771] C-NT2RP3003353//HYPOTHETICAL 26.2 KD PROTEIN IN GDI1-COX15 INTERGENIC REGION.//2.80E-07//61aa//28%//P40084

[33772] C-NT2RP3003385//Mus musculus SKD3 mRNA, complete cds.110/12133bp//85%//U09874

[33773] C-NT2RP3003409//Human DHHC-domain-containing cysteine-rich protein mRNA, complete cds.119.20E-4511782bp//65%//U90653

[33774] C-NT2RP3003411//Mus musculus COP9 complex subunit 7b (COPS7b) mRNA, complete cds.//16.30E-27011743bp//90%//AF071317

[33775] C-NT2RP3003490//Homo sapiens mRNA for putative phospholipase, complete cds.//4.50E-81 //649bp//67%//AB019435

[33776] C-NT2RP3003491//Drosophila melanogaster Pelle associated protein Pellino (Pli) mRNA, complete cds.//5.60E-36//842bp//62%//AF091624

[33777] C-NT2RP3003500//SCY1 PROTEIN.I/9.20E-27//601aa//23%//P53009

[33778] C-NT2RP3003555//HYPOTHETICAL 32.6 KD PROTEIN IN MET30-PIG2 INTERGENIC REGION.//4.50E-30//191aa//40%//P40529

[33779] C-NT2RP3003589//Homo sapiens ras-related GTP-binding protein mRNA, complete cds.//0//3131bp//94%//AF106681

[33780] C-NT2RP3003659//HES1 PROTEIN.//5.90E-22//229aa//27%//P35843

[33781] C-NT2RP3003665//Homo sapiens mRNA for beta-ureidopropionase, complete cds.//10111690bp//99%//AB013885

[33782] C-NT2RP3003672//T-CELL SURFACE GLYCOPROTEIN E2 PRECURSOR (E2 ANTIGEN) (CD99) (MIC2 PROTEIN) (12E7).//2.20E-13//46aa//42%//P14209

[33783] C-NT2RP3003701//F-SPONDIN PRECURSOR.//1.80E-17//324aa/126%//P35446

[33784] C-NT2RP3003716//SLIT PROTEIN PRECURSOR.//6.60E-10//150aa/134%//P24014

[33785] C-NT2RP3003726//Homo sapiens spermatogenesis associated PDI mRNA, complete cds.//0/12568bp//99%//U28164

[33786] C-NT2RP3003799//Rattus norvegicus Srg1 (Sytr1) mRNA, complete cds.//9.00E-238//1529bp//84%//U71294

[33787] C-NT2RP3003800//Rattus norvegicus tyrosine protein kinase pp60-c-src mRNA, complete cds.//1.90E-163//924bp//89%//AF130457

[33788] C-NT2RP3003809//SAV PROTEIN.//1.10E-131 /576aa//41%//Q07590

[33789] C-NT2RP3003825//PHOSPHATIDYLCHOLINE TRANSFER PROTEIN (PC-TP).//9.60E-19//174aa/131%//P02720

[33790] C-NT2RP30038311//Homo sapiens ENDOGL-1 (alias ENGL-a) mRNA for endonuclease G-like protein-1, complete cds.//2.2e-316//1436bp//99%//AB020523

[33791] C-NT2RP3003846//Homo sapiens mRNA for putative phospholipase, complete cds.//4.80E-277//1255bp//99%//AB019435

[33792] C-NT2RP3003876//Rattus norvegicus Rabin3 mRNA, complete cds.//4.50E-147//874bp//87%//U 19181

[33793] C-NT2RP3003914//UDP-GLUCOSE:GLYCOPROTEIN GLUCOSYLTRANSFERASE PRECURSOR (EC 2.4.1.-) (DUGT).112.20E-20//76aa//64%//Q09332

[33794] C-NT2RP3003918//Homo sapiens VAMP-associated protein B (VAP-B) mRNA, complete cds.//0//2191bp//99%//AF086628

[33795] C-NT2RP3004013//M. musculus Spnr mRNA for RNA binding protein.//6.50E-240//1215bp//94%//X84692

[33796] C-NT2RP3004016//TRANSCRIPTION INTERMEDIARY FACTOR I-BETA (NUCLEAR COREPRESSOR KAP-1) (KRAB-ASSOCIATED PROTEIN 1).//1.50E-17//226aa//26%//Q13263

[33797] C-NT2RP3004078//H. sapiens HRFX2 mRNA.//0//806bp//99%//X76091

[33798] C-NT2RP3004125//Mus musculus zinc finger protein splice variant FIZI-B (Fizl) mRNA, complete cds.//4.60E-229//560bp//78%//AF126747

[33799] C-NT2RP3004148//GLUCOAMYLASE SI/S2 PRECURSOR (EC 3.2.1.3) (GLUCAN 1,4-ALPHA- GLUCOSIDASE) (1,4-ALPHA-D-GLUCAN GLUCOHYDROLASE).//7.90E-05//271aa//22%//P08640

[33800] C-NT2RP3004155//Homo sapiens COQ7 protein mRNA, complete cds.//1.10E-179//823bp//100%//AF098948

[33801] C-NT2RP3004189//VEGETATIBLE INCOMPATIBILITY PROTEIN HET-E-1.//1.30E-141/242aa//24%//Q00808

[33802] C-NT2RP3004206//CROOKED NECK PROTEIN.//1.40E-220//567aa//67%//P 17886

[33803] C-NT2RP3004207//Homo sapiens mRNA for type I transmembrane receptor (psk-1 gene).//0//2445bp//100%//AJ245820

[33804] C-NT2RP3004209//Homo sapiens ubiquitin processing protease (Ubp-M) mRNA, complete cds.//0//2320bp//99%//AF126736

[33805] C-NT2RP3004242//PUTATIVE RHO/RAC GUANINE NUCLEOTIDE EXCHANGE FACTOR (RHO/RAC GEF) (FACIOGENITAL DYSPLASIA PROTEIN HOMOLOG).//4.70E-13//118aa//33%//P52734

[33806] C-NT2RP3004258//Homo sapiens ZISI mRNA, complete cds.//0//1861bp//99%//AF065391

[33807] C-NT2RP3004262//Homo sapiens heat shock protein hsp40-3 mRNA, complete cds.//2.40E-248//1126bp//100%//AF088982

[33808] C-NT2RP3004282//Homo sapiens torsinA (DYTI) mRNA, complete cds.//5.10E-24//597bp//61%//AF007871

[33809] C-NT2RP3004348//R. norvegicus mRNA for cytosolic resiniferatoxin-binding protein.//1.10E-185//130bp//82%//X67877

[33810] C-NT2RP3004378//Drosophila melanogaster separation anxiety protein (san) mRNA, complete cds.//3.90E-3811462bp//70%//AF225902

[33811] C-NT2RP3004424//Homo sapiens mRNA for stromal antigen 3 (STAG3 gene).//1.00E-6611364bp//93%//AJ007798

[33812] C-NT2RP3004428//CHROMODOMAIN HELICASE-DNA-BINDING PROTEIN 4 (CHD-4) (MI-2 AUTOANTIGEN 218 KD PROTEIN) (MI2-BETA).//5.20E-09//212aa//25%//Q14839

[33813] C-NT2RP3004472//GERM CELL-LESS PROTEIN.//1.60E-61//170aa//40%//Q01820

[33814] C-NT2RP3004480//VACUOLAR PROTEIN SORTING-ASSOCIATED PROTEIN VPS35.//3.30E-113//466aa//42%//P34110

[33815] C-NT2RP3004490//Homo sapiens mRNA for Musashi, complete cds.//4.00E-303//1385bp//99%//AB012851

[33816] C-NT2RP3004498//Mus musculus ROSA 26 transcription AS ROSA26AS mRNA, complete cds.//2.00E-249//777bp//80%//U83176

[33817] C-NT2RP3004504//M. musculus mRNA for CPEB protein.//1.90E-295//893bp//92%//Y08260

[33818] C-NT2RP3004507//MOB I PROTEIN (MPS I BINDER 1).//3.70E-37//190aa//39%//P40484

[33819] C-NT2RP3004534//Mouse oncogene (ect2) mRNA, complete cds.//0//2075bp//87%//L11316

[33820] C-NT2RP3004544//THYROID RECEPTOR INTERACTING PROTEIN 10 (TRIPIO) (FRAGMENT).//1.00E-22//H1.3aa//53%//Q115642

[33821] C-NT2RP3004566//ZINC FINGER PROTEIN 84 (ZINC FINGER PROTEIN HPF2).//1.20E-95//434aa//43%//P51523

[33822] C-NT2RP3004569//ANKYRIN, BRAIN VARIANT I (ANKYRIN B) (ANKYRIN, NONERYTHROID).//3.80E-08//150aa//28%//Q01484

[33823] C-NT2RP3004572//Homo sapiens TATA binding protein associated factor (TAFII150) mRNA, complete cds.//0//853bp//99%//AF040701

[33824] C-NT2RP3004578//MYOSIN HEAVY CHAIN, CLONE 203 (FRAGMENT).//5.50E-12//396aa//23%//P39922

[33825] C-NT2RP3004594//Homo sapiens mRNA for AND-1 protein.//0//807bp//99%//AJ006266

[33826] C-NT2RP3004617//ZINC-BINDING PROTEIN A33.//7.20E-75//464aa//35%//Q02084

[33827] C-NT2RP3004618//Homo sapiens putative RNA-binding protein Q99 mRNA, complete cds.//0/13972bp//98%//AF093097

[33828] C-NT2RP3004669//ETHANOLAMINE KINASE (EC 2.7.1.82) (EASILY SHOCKED PROTEIN).//1.70E-72//254aa//450%//P54352

[33829] C-NT2RP3004670//Homo sapiens GN6ST mRNA for N-acetylglucosamine-6-O-sulfotransferas e (GlcNAc6ST), complete cds.//0//2393bp//99%//AB014679

[33830] C-NT2RP4000008//CHLORINE CHANNEL PROTEIN P64.//2.60E-98//239aa//64%//P35526

[33831] C-NT2RP400005 I //SYNAPTONEMAL COMPLEX PROTEIN SC65.//4.90E-51//335aa//37%//Q64375

[33832] C-NT2RP4000078//Homo sapiens mRNA for NS 1-binding protein (NS 1-BP).11//02160bp//99%//AJ012449

[33833] C-NT2RP4000109//Homo sapiens mRNA for MEGF5, partial cds.//0//2161bp//99%//AB011538

[33834] C-NT2RP4000111//CLEAVAGE AND POLYADENYLATION SPECIFICITY FACTOR, 100 KD SUBUNIT (CPSF 100 KD SUBUNIT).//0//728aa//99%//Q10568

[33835] C-NT2RP4000129//Xenopus laevis F-box protein 28 (Fbx28) mRNA, partial cds.//1.40E-28//296bp//75%//AF176667

[33836] C-NT2RP4000147//Rattus norvegicus ADP-ribosylation factor-directed GTPase activating protein mRNA, complete cds.//4.30E- 188//543bp//78%//U35776

[33837] C-NT2RP4000210//PAIRED AMPHIPATHIC HELIX PROTEIN.//1.00E-71//396aa//36%//P22579

[33838] C-NT2RP4000212//ATRIAL GLAND-SPECIFIC ANTIGEN PRECURSOR (AGSA).//5.90E-15//104aa//40%//P15287

[33839] C-NT2RP4000243//Homo sapiens mRNA for cartilage-associated protein (CASP).//0//1932bp//99%//AJ006470

[33840] C-NT2RP4000246//NPC DERIVED PROLINE RICH PROTEIN 1 (NDPP-1).//2.70E-84//208aa//76%//Q03173

[33841] C-NT2RP4000259//GLUTATHIONE PEROXIDASE 2 (EC 1.11.1.9).//5.50E-29//53aa//43%//O23968

[33842] C-NT2RP4000290//HYPOTHETICAL 116.5 KD PROTEIN C20G8.09C IN CHROMOSOME I.//3.50E-297//1024aa//55%//P87115

[33843] C-NT2RP4000312//ADENYLATE CYCLASE (EC 4.6.1.1) (ATP PYROPHOSPHATE-LYASE) (ADENYLYL CYCLASE).//1.50E-26//237aa//28%//Q01631

[33844] C-NT2RP4000323//KERATIN, ULTRA HIGH-SULFUR MATRIX PROTEIN (UHS KERATIN).//3.00E-07//101aa//32%//P26372

[33845] C-NT2RP4000367//Homo sapiens IkappaB kinase complex associated protein (IKAP) mRNA, complete cds.//0//4782bp//99%//AF044195

[33846] C-NT2RP4000370//MITOCHONDRIAL PEPTIDE CHAIN RELEASE FACTOR 1 PRECURSOR (MRF-1).//2.60E-77//262aa//54%//O75570

[33847] C-NT2RP4000376//Homo sapiens mRNA for phospholipase A2 activating protein.//0//2412bp//99%//AJ238243

[33848] C-NT2RP4000398//ZINC FINGER PROTEIN 140.//2.90E-11011435aa//50%//P52738

[33849] C-NT2RP4000415//Drosophila melanogaster fumble (fumble) mRNA, complete cds.//6.20E-191/902bp//57%//AF221546

[33850] C-NT2RP4000417//MANNOSYL-OLIGOSACCHARIDE ALPHA-1,2-MANNOSIDASE (EC 3.2.1.113)(MAN(9)-ALPHA-MANNOSIDASE) (FRAGMENT).//2.60E-51//438aa//33%//P45701

[33851] C-NT2RP4000449//Homo sapiens sirtuin type 1 (SIRTI) mRNA, complete cds.//0//3143bp//99%//AF083106

[33852] C-NT2RP4000455//TRANS-ACTING TRANSCRIPTIONAL PROTEIN ICPO.//3.00E-07//75aa//27%//P09309

[33853] C-NT2RP4000457//UBIQUITIN CARBOXYL-TERMINAL HYDROLASE 15 (EC 3.1.2.15) (UBIQUITIN THIOLESTERASE 15) (UBIQUITIN-SPECIFIC PROCESSING PROTEASE 15)(DEUBIQUITINATING ENZYME 15).//2.50E-37//291aa//38%//P50101

[33854] C-NT2RP4000481//ATP-DEPENDENT RNA HELICASE DOB1 (MRNA TRANSPORT REGULATOR MTR4).//1.90E-67//721aa//29%//Q09475

[33855] C-NT2RP4000498//MOB I PROTEIN (MPS I BINDER 1).118.80E-5011214aa//50%//P40484

[33856] C-NT2RP4000518//ATP-DEPENDENT RNA HELICASE ROK1.//1.50E-1061/495aa//45%//P45818

[33857] C-NT2RP4000524//Mus musculus Sec8 mRNA, complete cds.//0//3131bp//87%//AF022962

[33858] C-NT2RP4000528//NPL4 PROTEIN.//9.80E-86//515aa//37%//P33755

[33859] C-NT2RP4000556//SUR4 PROTEIN (SRE1 PROTEIN).//7.40E-14//233aa//31%//P40319

[33860] C-NT2RP4000614//Homo sapiens TLS-associated protein TASR-2 mRNA, complete cds.//2.90E-188//863bp//99%//AF067730

[33861] C-NT2RP4000648//TRANS-ACTING TRANSCRIPTIONAL PROTEIN ICPO.//3.70E-07//75aa//27%//P09309

[33862] C-NT2RP4000657//SPORE COAT POLYSACCHARIDE BIOSYNTHESIS PROTEIN SPSE.//1 .10E-32//350aa//30%//P39625

[33863] C-NT2RP4000713//HYPOTHETICAL 55.1 KD PROTEIN B0416.5 IN CHROMOSOME X.//1H.10E-13//295aa//27%//Q1073

[33864] C-NT2RP4000724//RETROVIRUS-RELATED ENV POLYPROTEIN.//3.20E-191//199aa//78%//P10267

[33865] C-NT2RP4000737//Mus musculus F-box protein FBL10 mRNA, partial cds.//4.60E-250//462bp//84%//AF176524

[33866] C-NT2RP4000781//HYPOTHETICAL 27.7 KD PROTEIN IN CPT1-SPC98 INTERGENIC REGION.//0.000000032//67aa//31%//P53915

[33867] C-NT2RP4000817//GLUCOAMYLASE S1/S2 PRECURSOR (EC 3.2.1.3) (GLUCAN1,4-ALPHA- GLUCOSIDASE) (1,4-ALPHA-D-GLUCAN GLUCOHYDROLASE).//9.80E-11//503aa//23%//P08640

[33868] C-NT2RP4000837//Homo sapiens mRNA for zinc finger protein SALLI .//4.30E-94/1810bp//65%//Y18265

[33869] C-NT2RP4000839//VEGETATIBLE INCOMPATIBILITY PROTEIN HET-E-1./8.50E-21//271aa//28%//Q00808

[33870] C-NT2RP4000855//AMINOPEPTIDASE B (EC 3.4.11.6) (ARGINYL AMINOPEPTIDASE)(ARGININE AMINOPEPTIDASE) (CYTOSOL AMINOPEPTIDASE IV) (AP-B).//5.70E-82//324aa//48%//O09175

[33871] C-NT2RP4000865//ZINC FINGER PROTEIN ZFP-36 (FRAGMENT).//4.10E-85//174aa//55%//P16415

[33872] C-NT2RP4000878//MYELOID UPREGULATED PROTEIN.//6.20E-91//173aa//87%//O35682

[33873] C-NT2RP4000879//UBIQUITIN-ACTIVATING ENZYME El (Al S9 PROTEIN).//9.60E-96//513aa//42%//P22314

[33874] C-NT2RP4000907//Mouse NLRR-1 mRNA for leucine-rich-repeat protein, complete cds.//0//2127bp//86%//D45913

[33875] C-NT2RP4000925//FIBROMODULIN PRECURSOR (FM) (COLLAGEN-BINDING 59 KD PROTEIN).//2.60E-26//227aa//36%//Q06828

[33876] C-NT2RP4000927//UBIQUITIN CARBOXYL-TERMINAL HYDROLASE DUB-1 (EC 3.1.2.15) (UBIQUITIN THIOLESTERASE DUB-1) (UBIQUITIN-SPECIFIC PROCESSING PROTEASE DUB-1) (DEUBIQUITINATING ENZYME 1).//1.50E-76//346aa//43%//Q61068

[33877] C-NT2RP4000928//Homo sapiens mRNA for CDS2 protein.//0//2487bp//99%//Y16521

[33878] C-NT2RP4000929//PUTATIVE ATP-DEPENDENT RNA HELICASE MJ 1505.//1.40E-07//85aa//25%//Q58900

[33879] C-NT2RP4000973//PROBABLE PROTEIN DISULFIDE ISOMERASE P5 PRECURSOR (EC 5.3.4.1).//1 .40E-26//90aa//42%//P38660

[33880] C-NT2RP4000979//Homo sapiens putative HIV-1 infection related protein mRNA, partial cds.//2.30E-81//389bp//100%//AF094583

[33881] C-NT2RP4000989//UNC-47 PROTEIN.//8.20E-06//173aa//25%//P34579

[33882] C-NT2RP4000997//DNA-DIRECTED RNA POLYMERASE 1135 KD POLYPEPTIDE (EC 2.7.7.6) (RNA POLYMERASE I SUBUNIT 2) (RPA135).//0//838aa//87%//P70700

[33883] C-NT2RP4001004//VACUOLAR PROTEIN 8.//3.70E-16//401aa//26%//P39968

[33884] C-NT2RP4001010//Rattus norvegicus PSD-95/SAP90-associated protein-4 mRNA, complete cds.//3 .50E-257//1377bp//91%//U67140

[33885] C-NT2RP4001029//Homo sapiens transcription factor LBP-lb (LBP-1) mRNA, complete cds.//0//2002bp//98%//AF198487

[33886] C-NT2RP4001041//PROBABLE LEUCYL-TRNA SYNTHETASE (EC 6.1.1.4) (LEUCINE-TRNA LIGASE)//1.50E-92//443aa//44%//Q09996

[33887] C-NT2RP4001064//SYNAPTONEMAL COMPLEX PROTEIN SC65.//6.70E-51//335aa//37%//Q64375

[33888] C-NT2RP4001079//CALCIUM-TRANSPORTING ATPASE 1 (EC 3.6.1.38) (GOLGI CA2+-ATPASE).//1.30E-123//563aa//46%//P13586

[33889] C-NT2RP4001080//Homo sapiens mRNA for Rod1, complete cds.//0//1439bp//99%//AB023967

[33890] C-NT2RP4001086//NEUROFILAMENT TRIPLET H PROTEIN (200 KD NEUROFILAMENT PROTEIN) (NF-H).112.30E-07//474aa//22%//P12036

[33891] C-NT2RP4001095//DOUBLE-STRANDED RNA-SPECIFIC EDITASE I (EC 3.5.-.-) (DSRNA ADENOSINE DEAMINASE) (RNA EDITING ENZYME 1).//2.60E-17//121aa//36%//P51400

[33892] C-NT2RP4001117//PROTEIN TRANSPORT PROTEIN SEC61 ALPHA SUBUNIT.//1.90E-115//224aa//100%//P38378

[33893] C-NT2RP4001122//TIPD PROTEIN.//1 .40E-65//253aa/141%//O15736

[33894] C-NT2RP4001126//TRICHOHYALIN.//2.90E-18//380aa//26%//Q07283

[33895] C-NT2RP4001143//SUCClNYL-DIAMINOPIMELATE DESUCClNYLASE (EC 3.5.1.18) (SDAP).//2.10E-07//93aa//33%//P44514

[33896] C-NT2RP4001148//SOF1 PROTEIN.//1.30E-104//236aa//52%//P33750

[33897] C-NT2RP4001149//Homo sapiens cleft lip and palate transmembrane protein 1 (CLPTM1) mRNA, complete cds.//4.40E-187//731bp//100%//AF037339

[33898] C-NT2RP4001150//NG-CAM RELATED CELL ADHESION MOLECULE PRECURSOR (NR-CAM) (BRAVO).//3 .40E-29//385aa//29%//P35331

[33899] C-NT2RP4001174//NON-GREEN PLASTID TRIOSE PHOSPHATE TRANSLOCATOR PRECURSOR (CTPT).//4.70E-29//227aa//35%//P52178

[33900] C-NT2RP4001206//Drosophila melanogaster strawberry notch (sno) mRNA, complete cds.//4.40E-104//460bp//65%//U95760

[33901] C-NT2RP4001207//Homo sapiens Ran binding protein 11 mRNA, complete cds.//0//2940bp//99%//AF111109

[33902] C-NT2RP4001213//ZINC FINGER PROTEIN 184 (FRAGMENT).//5.70E-141//51aa//43%//Q99676

[33903] C-NT2RP4001219//PROBABLE PROTEIN DISULFIDE ISOMERASE P5 PRECURSOR (EC 5.3.4.1).116.20E-27//90aa//42%//P38660

[33904] C-NT2RP4001228//RING CANAL PROTEIN (KELCH PROTEIN).//1.80E-103//508aa//43%//Q04652

[33905] C-NT2RP4001256//Homo sapiens mRNA for gamma tubulin ring complex protein (76p gene).//0//2006bp//100%//AJ249677

[33906] C-NT2RP4001260//Homo sapiens F-box protein Fbx21 (FBX21) mRNA, complete cds.//10//1866bp//100%//AF174601

[33907] C-NT2RP4001274//Human transporter protein (g17) mRNA, complete cds.//4.40E-58//196bp//61%//U49082

[33908] C-NT2RP4001276//TRICHOHYALIN.//7.90E-09//126aa//32%//Q07283

[33909] C-NT2RP4001313//MITOCHONDRIAL IMPORT RECEPTOR SUBUNIT TOM40 (MOM38 PROTEIN) (TRANSLOCASE OF OUTER MEMBRANE 40 KD SUBUNIT).I/5.90E-17//296aa//29%//P24391

[33910] C-NT2RP4001315//Bos taurus mRNA for Rab5 GDP/GTP exchange factor, Rabex5.//8.50E-213//129bp//92%//AJ001119

[33911] C-NT2RP4001336//GUANINE NUCLEOTIDE-BINDING PROTEIN BETA SUBUNIT-LIKE PROTEIN.//0.000016//86aa//29%//O24076

[33912] C-NT2RP4001339//Homo sapiens mRNA for AMMERCI protein.//9.20E-160//736bp//99%//AJ007014

[33913] C-NT2RP4001345//Homo sapiens mRNA for LCAT-like lysophospholipase (LLPL), complete cds.//2.7e-310//400bp//100%//AB017494

[33914] C-NT2RP4001351//Human ovarian cancer downregulated myosin heavy chain homolog (Doc1) mRNA, complete cds.//1.40E-58//2425bp//59%//U53445

[33915] C-NT2RP4001372//IRREGULAR CHIASM C-ROUGHEST PROTEIN PRECURSOR (IRREC PROTEIN).//1 .60E-19//222aa//30%//Q08180

[33916] C-NT2RP4001375//NON-RECEPTOR TYROSINE KINASE SPORE LYSIS A (EC 2.7.1.112) (TYROSINE- PROTEIN KINASE 1).//9.20E-17//146aa//35%//P18160

[33917] C-NT2RP4001379//HYPOTHETICAL 49.1 KD PROTEIN C11D3.06 IN CHROMOSOME I.//2.00E-53//436aa//30%//Q10085

[33918] C-NT2RP4001389//KES 1 PROTEIN.//1 .70E-31//342aa//34%//P35844

[33919] C-NT2RP4001407//TRICHOHYALIN.//1.90E-05//298aa//21%//P22793

[33920] C-NT2RP4001414//SEPTIN 2 HOMOLOG (FRAGMENT).//7.70E-190//422aa//82%//Q14141

[33921] C-NT2RP4001433//ZINC FINGER PROTEIN 184 (FRAGMENT).//1.20E-138//419aa//54%//Q99676

[33922] C-NT2RP4001474//Xenopus laevis putative Zic3 binding protein mRNA, complete cds.//2.70E-66//738bp//71%//AF129131

[33923] C-NT2RP4001483//2-OXOGLUTARATE DEHYDROGENASE El COMPONENT PRECURSOR (EC 1.2.4.2) (ALPHA-KETOGLUTARATE DEHYDROGENASE).//0//962aa//78%//Q02218

[33924] C-NT2RP4001498//ANKYRIN REPEAT-CONTAINING PROTEIN AKR1.//1.00E-27//374aa//29%//P39010

[33925] C-NT2RP4001529//Homo sapiens transcription factor LBP-lb (LBP-1) mRNA, complete cds.//0//2002bp//98%//AF198487

[33926] C-NT2RP4001547//HYPOTHETICAL 45.0 KD PROTEIN IN NOT1/CDC39-HMR INTERGENIC REGION.//5.70E-54//242aa//38%//P25656

[33927] C-NT2RP4001551//Homo sapiens chromatin-specific transcription elongation factor FACT 140 kDa subunit mRNA, complete cds.//0//3202bp//99%//AF152961

[33928] C-NT2RP4001555//PUTATIVE ENDONUCLEASE VIII (EC 3.2.-.-).//4.70E-09//216aa//24%//P96902

[33929] C-NT2RP4001567//ARMADILLO SEGMENT POLARITY PROTEIN.//5.40E-07//213aa//26%//Q02453

[33930] C-NT2RP4001568//ZINC FINGER PROTEIN GCS 1.//1 .80E-10//109aa//36%//P35197

[33931] C-NT2RP4001574//COATOMER GAMMA SUBUNIT (GAMMA-COAT PROTEIN) (GAMMA-COP).//0//874aa//96%//P53620

[33932] C-NT2RP4001575//Rattus norvegicus mRNA for ARE1 protein.//0//1087bp//87%//AJ223830

[33933] C-NT2RP4001592//ISOLEUCYL-TRNA SYNTHETASE (EC 6.1.1.5) (ISOLEUCINE-TRNA LIGASE) (ILERS).//1.70E-141//373aa//47%//P73505

[33934] C-NT2RP4001634//CENTROMERIC PROTEIN E (CENP-E PROTEIN).//2.80E-14//652aa//22%//Q02224

[33935] C-NT2RP4001638//DNA REPAIR/TRANSCRIPTION PROTEIN MET 18/MMS 19./5 .10E-46//234aa//32%//P40469

[33936] C-NT2RP4001644//MYOSIN LIGHT CHAIN KINASE (EC 2.7.1.117) (MLCK).//6.40E-19//111aa//45%//P25323

[33937] C-NT2RP4001656//VACUOLAR BIOGENESIS PROTEIN ENDI (PEP5 PROTEIN).//1.10E-45//310aa//27%//P 12868

[33938] C-NT2RP4001696//CLEAVAGE AND POLYADENYLATION SPECIFICITY FACTOR, 100 KD SUBUNIT (CPSF 100 KD SUBUNIT).//4.00E-10//243aa//25%//Q10568

[33939] C-NT2RP4001725//GUANINE NUCLEOTIDE-BINDING PROTEIN BETA SUBUNIT.//3.00E-10//28aa//32%//Q10282

[33940] C-NT2RP4001730//UDP-GLUCOSE:GLYCOPROTEIN GLUCOSYLTRANSFERASE PRECURSOR (EC 2.4.1.-) (DUGT).//6.40E-170//1168aa//33%//Q09332

[33941] C-NT2RP4001753//ZINC FINGER PROTEIN 84 (ZINC FINGER PROTEIN HPF2).//3.90E-236//665aa//58%//P51523

[33942] C-NT2RP4001760//PUTATIVE RHO/RAC GUANINE NUCLEOTIDE EXCHANGE FACTOR (RHO/RAC GEF) (FACIOGENITAL DYSPLASIA PROTEIN).//4.10E-16//263aa//27%//P98174

[33943] C-NT2RP4001790//Homo sapiens zinc finger protein ZFP-95 (ZFP95) mRNA, alternatively spliced, complete cds.//0//3053bp//99%//AF170025

[33944] C-NT2RP4001822//PLATELET-ENDOTHELIAL TETRASPAN ANTIGEN 3 (PETA-3) (GP27) (MEMBRANE GLYCOPROTEIN SFA-1) (CD151 ANTIGEN).//1.20E-30//241aa/130%//O35566

[33945] C-NT2RP4001823//MICROFIBRIL-ASSOCIATED GLYCOPROTEIN 4.11.10E-19//77aa//54%//P55083

[33946] C-NT2RP4001838//Homo sapiens CoREST protein (COREST) mRNA, complete cds.//6.30E-99//555bp//73%//AF155595

[33947] C-NT2RP4001849//SH3-BINDING PROTEIN 3BP-1.//1.40E-85//489aa//43%//P55194

[33948] C-NT2RP4001861//TRICHOHYALIN.//1.00E-35//307aa//34%//P37709

[33949] C-NT2RP4001896//VEGETATIBLE INCOMPATIBILITY PROTEIN HET-E-1.//1.40E-08//345aa//25%//Q00808

[33950] C-NT2RP4001927//MICROTUBULE-ASSOCIATED PROTEIN YTM 1.1//1.30E-38//258aa//32%//Q12024

[33951] C-NT2RP4001938//TRANSCRIPTIONAL REPRESSOR CTCF.//9.80E-60//303aa//38%//P49711

[33952] C-NT2RP4001946//PROTEIN-L-ISOASPARTATE O-METHYLTRANSFERASE (EC 2.1.1.77) (PROTEIN- BETA-ASPARTATE METHYLTRANSFERASE) (PIMT) (PROTEIN L-ISOASPARTYL METHYLTRANSFERASE) (L-ISOASPARTYL PROTEIN CARBOXYL METHYLTRANSFERASE).//1 .50E-13//211aa//28%//Q43209

[33953] C-NT2RP4001950//GLUTAMIC ACID-RICH PROTEIN PRECURSOR.//1.20E-13//356aa//27%//P13816

[33954] C-NT2RP4001966//Mus musculus ODZ3 (Odz3) mRNA, partial cds.//0//3203bp//87%//AF195418

[33955] C-NT2RP4001975//Homo sapiens golgi membrane protein GP73 mRNA, complete cds.//0//3024bp//99%//AF236056

[33956] C-NT2RP4002018//RING CANAL PROTEIN (KELCH PROTEIN).//6.90E-24//370aa//27%//Q04652

[33957] C-NT2RP4002047//GTP-BINDING PROTEIN LEPA.//1 .50E-168//601aa//52%//O67618

[33958] C-NT2RP4002058//PUTATIVE PRE-MRNA SPLICING FACTOR RNA HELICASE (DEAH BOX PROTEIN 13)/11.00E-137//679aa//40%//O43143

[33959] C-NT2RP4002078//ZINC FINGER PROTEIN 91 (ZINC FINGER PROTEIN HTF10) (HPF7).//3.00E-150//722aa//39%//Q05481

[33960] C-NT2RP4002081//TRANSCRIPTION INITIATION FACTOR IIA ALPHA AND BETA CHAINS (TFIIA P35 AND P19 SUBUNITS) (TFIIA-42) (TFIIAL).//6.70E-06//250aa//31%//P52655

[33961] C-NT2RP4002408//PROTEIN KINASE CEKI (EC 2.7.1.-).//1.50E-631159aa//53%//P38938

[33962] C-NT2RP4002791//NUCLEOPROTEIN TPR.//6.50E-051/659aa//23%//P12270

[33963] C-NT2RP5003461//RLR 1 PROTEIN.//9.70E-22//177aa//27%//P53552

[33964] C-NT2RP5003477//VEGETATIBLE INCOMPATIBILITY PROTEIN HET-E-1.//5.50E-15//280aa//27%//Q00808

[33965] C-NT2RP5003500//Mus musculus mRNA for heparan sulfate 6-sulfotransferase 2, complete cds.//1.30E-237//820bp//87%//AB024565

[33966] C-NT2RP5003506//Homo sapiens putative G protein-coupled receptor (RAIGI) mRNA, complete cds.//0//2289bp//99%//AF095448

[33967] C-NT2RP5003522//NADPH-CYTOCHROME P450 REDUCTASE (EC 1.6.2.4) (CPR).//3.30E-23//219aa/140%//P37116

[33968] C-OVARC1000001//Homo sapiens mRNA for actin binding protein ABP620, complete cds.//7.00E-21711683bp//99%//AB029290

[33969] C-OVARC1000006//HISTONE H2A.1.//1.10E-55//117aa//99%//P02262

[33970] C-OVARC1000013//APOPTOTIC PROTEASE ACTIVATING FACTOR 1 (APAF-1).//4.20E-06//102aa//32%//O14727

[33971] C-OVARC1000014//Homo sapiens GLEI (GLEI) mRNA, complete cds.//2.60E-295//H 393bp//97%//AF058922

[33972] C-OVARC1000060//EXTRACELLULAR RIBONUCLEASE LE PRECURSOR (EC 3.1.27.1) (RNASE LE).//3.20E-07//60aa//45%//P80022

[33973] C-OVARC1000071//Homo sapiens NTF2-related export protein NXTI (NXTI) mRNA, complete cds.//1.50E-47//727bp//67%//AF156957

[33974] C-OVARC1000085//Human mRNA for proteasome subunit HC5.//1.00E-151 //699bp//100%//D00761

[33975] C-OVARC1000087//HISTONE MACR0-H2A.1.//1.60E-12//74aa//26%//Q02874

[33976] C-OVARC1000091//HOST CELL FACTOR C1 (HCF) (VP16 ACCESSORY PROTEIN) (HFC1) (VCAF) (CFF).//8.40E-14//259aa//30%//P51610

[33977] C-OVARC1000106//TROPOMYOSIN 1, FUSION PROTEIN 33.//0.000032//165aa//27%//P49455

[33978] C-OVARC1000139//UBIQUITIN CARBOXYL-TERMINAL HYDROLASE 4 (EC 3.1.2.15) (UBIQUITIN THIOLESTERASE 4) (UBIQUITIN-SPECIFIC PROCESSING PROTEASE 4) (DEUBIQUITINATING ENZYME 4) (UBIQUITOUS NUCLEAR PROTEIN HOMOLOG).//2.70E-12//120aa//32%//Q13107

[33979] C-OVARC1000151//Homo sapiens partial mRNA for putative protein p38 interacting with transcription factor Sp1.//2.50E-95//461bp//98%//AJ242975

[33980] C-OVARC1000209//Oryza sativa submergence induced protein 2A mRNA, complete cds.//1.80E-32//511bp//65%//AF068332

[33981] C-OVARC1000241//HYPOXIA-INDUCIBLE FACTOR 1 ALPHA (HIF-1 ALPHA) (ARNT INTERACTING PROTEIN) (MEMBER OF PAS PROTEIN 1) (MOP I) (HIFI ALPHA).//8.20E-120//351aa//54%//Q16665

[33982] C-OVARC1000288//VACUOLAR AMINOPEPTIDASE I PRECURSOR (EC 3.4.11.22) (POLYPEPTIDASE)(LEUCINE AMINOPEPTIDASE IV) (LAPIV) (AMINOPEPTIDASE III)(AMINOPEPTIDASE YSCI).//5.40E-53//384aa//30%//P14904

[33983] C-OVARC1000304//PROTEIN MOV-10.//1.10E-249//519aa//87%//P23249

[33984] C-OVARC1000309//THREONINE SYNTHASE (EC 4.2.99.2).//2.70E-40//154aa//38%//P29363

[33985] C-OVARC1000326//Rattus norvegicus lamina-associated polypeptide IC (LAPIC) mRNA, complete cds.//9.20E-148//787bp//76%//U 19614

[33986] C-OVARC1000335//HYPOTHETICAL 39.3 KD PROTEIN IN GCN4-WBP1 INTERGENIC REGION.//5.90E-14//200aa//27%//P40004

[33987] C-OVARC1000437//TENSIN.//7.90E-181 //340aa//84%//Q04205

[33988] C-OVARC1000465//PROTEIN TRANSPORT PROTEIN SEC7.//1.20E-25//227aa//25%//P11075

[33989] C-OVARC1000473//DUAL SPECIFICITY PROTEIN PHOSPHATASE 3 (EC 3.1.3.48) (EC 3.1.3.16) (DUAL SPECIFICITY PROTEIN PHOSPHATASE VHR).//3.10E-10//125aa//35%//P51452

[33990] C-OVARC1000479//Rattus norvegicus mRNA for TIP120, complete cds.//10//1872bp//89%//D87671

[33991] C-OVARC1000520//Homo sapiens supervillin mRNA, complete cds.//2.20E-157//892bp//91%//AF051850

[33992] C-OVARC1000S56//RIBOSOMAL PROTEIN S6 KINASE II ALPHA 2 (EC 2.7.1.-) (S6KII-ALPHA 2) (P90-RSK 2) (RIBOSOMAL S6 KINASE 3) (RSK3) (PP90RSK3).//3.30E-67//132aa//95%//Q15349

[33993] C-OVARC1000564//Homo sapiens sorting nexin 5 (SNX5) mRNA, complete cds.//1.0e-310//1440bp//98%//AF121855

[33994] C-OVARC1000649//Human squamous cell carcinama of esophagus mRNA for GRB-7 SH2 domain protein, complete cds.10/11812bp//98%//D43772

[33995] C-OVARC1000679//Homo sapiens myosin-IXa mRNA, complete cds.110//808bp//99%//AF117888

[33996] C-OVARC1000682//PROCESSING ALPHA-1,2-MANNOSIDASE (EC 3.2.1.-) (ALPHA-1,2-MANNOSIDASE I B).//1.10E-209//293aa//95%//P39098

[33997] C-OVARC1000722//Homo sapiens chromosome 1q21-1q23 beta-1,4-galactosyltransferase mRNA, complete cds.//0//759bp//98%//AF038661

[33998] C-OVARC1000746//MATERNAL EFFECT PROTEIN STAUFEN.//0.0000000117//778aa//48%//P25159

[33999] C-OVARC1000751//PROBABLE PROTEIN PHOSPHATASE 2C T23F11.1 (EC 3.1.3.16) (PP2C).//5.60E-1//174aa//37%//P49596

[34000] C-OVARC1000771//RAS-RELATED PROTEIN RAB-2.//1H.10E-46//121aa//79%//P08886

[34001] C-OVARC1000800//MITOCHONDRIAL STRESS-70 PROTEIN PRECURSOR (75 KD GLUCOSE REGULATED PROTEIN) (GRP75).//3.90E-46//78aa//98%//O35501

[34002] C-OVARC1000834//Homo sapiens mRNA for atopy related autoantigen CALC.//2.80E-258//1183bp//99%//Y17711

[34003] C-OVARC1000846//NUCLEOLIN (PROTEIN C23).//0.0000097//109aa//30%//P08199

[34004] C-OVARC1000850//Homo sapiens PB39 mRNA, complete cds.//0//2095bp//99%//AF045584

[34005] C-OVARC1000862//M. musculus mRNA for FT1./115.90E-226111498bp//81%//Z67963

[34006] C-OVARC1000876//MOB1 PROTEIN (MPS1 BINDER 1).//2.20E-50//206aa//52%//P40484

[34007] C-OVARC1000885//OXIDOREDUCTASE UCPA (EC 1.-.-.-).//1.30E-32//170aa//34%//P37440

[34008] C-OVARC1000915//Homo sapiens histone deacetylase 5 mRNA, complete cds.//1.60E-121//591bp//97%//AF132608

[34009] C-OVARC1000936//COAT PROTEIN GP37 (ENV PROTEIN GP37).//0.0000054//135aa//28%//P03398

[34010] C-OVARC1000937//S-PHASE ENTRY CYCLIN 6.//4.90E-10//61aabp//49%//P32943

[34011] C-OVARC1000945//Rattus norvegicus mRNA for atypical PKC specific binding protein, complete cds.//0//1961bp//82%//AB005549

[34012] C-OVARC1000959//HYPOTHETICAL PROTEIN MJ0933 .//1 .20E-17//127aa//33%//Q58343

[34013] C-OVARC1000999//ANKYRIN HOMOLOG PRECURSOR.//4.10E-11//89aa//32%//Q06527

[34014] C-OVARC1001034//Mus musculus Fn54 mRNA, partial cds.//1.50E-178//1113bp//86%//AF001533

[34015] C-OVARC1001038//Homo sapiens mRNA for Ariadne-2 protein.//0//172bp//97%//AJ130978

[34016] C-OVARC1001051//EPIDERMAL GROWTH FACTOR RECEPTOR SUBSTRATE SUBSTRATE 15 (PROTEIN EPS15) (AF-IP PROTEIN).//1.10E-08//216aa//23%//P42566

[34017] C-OVARC1001055//PRE-B CELL ENHANCING FACTOR PRECURSOR.//1.90E-35//176aa//98%//P43490

[34018] C-OVARC1001065//Homo sapiens CGI-12 protein mRNA, complete cds.//1.00E-215//1027bp//98%//AF132946

[34019] C-OVARC1100068//Homo sapiens Era GTPase A protein (HERA-A) mRNA, partial cds.//0//10819bp//99%//AF082657

[34020] C-OVARC1001092//Homo sapiens mRNA for JM5 protein, complete CDS (clone IMAGE 53337, LLNLc110F1857Q7 (RZPD Berlin) and LLNLc110G0913Q7 (RZPD Berlin)).//2.00E-214//769bp//97%//AJ005897

[34021] C-OVARC1001107//Homo sapiens protein methyltransferase (JBP1) mRNA, complete cds.//6.10E-276//594bp//98%//AF167572

[34022] C-OVARC1001113//Homo sapiens diaphanous 1 (HDIA1) mRNA, complete cds.//5.1e-310//1588bp//93%//AF051782

[34023] C-OVARC1001154//Homo sapiens clone 24720 epithelin 1 and 2 mRNA, complete cds.//2.30E-296//1561bp//93%//AF055008

[34024] C-OVARC1001171//Homo sapiens translation initiation factor 347 kDa subunit mRNA, complete cds.//5.70E-1511436bp//92%//U94855

[34025] C-OVARC1001180//UBIQUITIN-LIKE PROTEIN DSK2.//1.10E-11/221aa//25%//P48510

[34026] C-OVARC1001200//Mus musculus mRNA for HSI binding protein 3.//5.80E-8811658bp//80%//AJ132192

[34027] C-OVARC1001232//CLEAVAGE AND POLYADENYLATION SPECIFICITY FACTOR, 100 KD SUBUNIT (CPSF 100 KD SUBUNIT).//5.10E-22//83aa//37%//Q10568

[34028] C-OVARC1100244//H. sapiens mRNA for Drosophila female sterile homeotic (FSH) homologue.//0//1467bp//99%//X62083

[34029] C-OVARC1001271//NUCLEOLAR TRANSCRIPTION FACTOR 1 (UPSTREAM BINDING FACTOR 1) (UBF-1).//0.0000014//224aa//26%//P25976

[34030] C-OVARC1001306//N-MYC PROTO-ONCOGENE PROTEIN.//0.00000073//247aa//27%//P18444

[34031] C-OVARC10013421140S RIBOSOMAL PROTEIN S8.//1 .40E-110//207aa//99%//P09058

[34032] C-OVARC1001372//Homo sapiens liprin-alpha4 mRNA, partial cds.//2.00E-252//1146bp//99%//AF034801

[34033] C-OVARC1001381//Homo sapiens mRNA for candidate tumor suppressor involved in B-CLL.//6.00E-148//683bp//99%//AJ224819

[34034] C-OVARC1001417//Homo sapiens thyroid hormone receptor-associated protein complex component TRAP 170 mRNA, complete cds.//0//11715bp//99%//AF135802

[34035] C-OVARC1100419//Homo sapiens GOK (STIM1) mRNA, complete cds.//4.90E-48//586bp//69%//U52426

[34036] C-OVARC1001436//ENL PROTEIN.//0.00000009//81aa//39%//Q03111

[34037] C-OVARC1001476//Mus musculus YGR1 +L63w mRNA homologue, complete cds.//1.80E-187//510bp//89%//AB017616

[34038] C-OVARC1001496//Homo sapiens C-terminal binding protein 2 mRNA, complete cds.//0//1876bp//98%//AF016507

[34039] C-OVARC1001506//POLYCYSTIN PRECURSOR (AUTOSOMAL DOMINANT POLYCYSTIC KIDNEY DISEASE PROTEIN 1).//0//777aa//91%//P98161

[34040] C-OVARC1001555//NGG 1-INTERACTING FACTOR 3 .//4.40E-19//130aa//40%//P53081

[34041] C-OVARC1001577//Homo sapiens SRp46 splicing factor transcribed retropseudogene.//0//1167bp//100%//AF031165

[34042] C-OVARC1001610//Homo sapiens choline/ethanolaminephosphotransferase (CEPT 1) mRNA, complete cds.//0//1870bp//99%//AF068302

[34043] C-OVARC1001703//Mus musculus ARL-6 interacting protein-2 (Aip-2) mRNA, complete cds.//3.50E-1611399bp//61%//AF133670

[34044] C-OVARC1001711//CORNIFIN B (SMALL PROLINE-RICH PROTEIN 1B) (SPR1B) (SPR1B).//2.80E-10//106aa//38%//Q62267

[34045] C-OVARC1001713//ENDOZEPINE-RELATED PROTEIN PRECURSOR (MEMBRANE-ASSOCIATED DIAZEPAM BINDING INHIBITOR) (MA-DBI).//4.40E-40//195aa//41%//P07106

[34046] C-OVARC1001726//APICAL-LIKE PROTEIN (APXL PROTEIN).//4.30E-16//16aa//43%//Q13796

[34047] C-OVARC1001731//TROPOMYOSIN ALPHA CHAIN, FIBROBLAST ISOFORM F2.//4.00E-122//282aa//85%//P08942

[34048] C-OVARC1001762//N-TERMINAL ACETYLTRANSFERASE I (EC 2.3.1.88) (AMINO-TERMINAL, ALPHA- AMINO, ACETYLTRANSFERASE 1).I/6.40E-85//514aa//34%//P12945

[34049] C-OVARC1001766//Homo sapiens eukaryotic translation initiation factor eIF3, p35 subunit mRNA, complete cds.//0//963bp//99%//U97670

[34050] C-OVARC1001809//Mus musculus sphingosine kinase (SPHK1a) mRNA, partial cds.//2.70E-190//1624bp//76%//AF068748

[34051] C-OVARC1001942//N-TERMINAL ACETYLTRANSFERASE 1 (EC 2.3.1.88) (AMINO-TERMINAL, ALPHA- AMINO, ACETYLTRANSFERASE 1).//3.10E-81 //497aa//35%//P12945

[34052] C-OVARC1001943//Mus musculus DEBT-91 mRNA, complete cds.//0//2035bp//87%//AF143859

[34053] C-OVARC1100987//Homo sapiens prolactin regulatory element-binding protein (PREB) mRNA, complete cds.//0//1083bp//99%//AF203687

[34054] C-OVARC1002050//Homo sapiens mRNA for actin binding protein ABP620, complete cds.//0//1019bp//99%//AB029290

[34055] C-OVARC1002112//HISTONE MACR0-H2A.1.//3.00E-174//371aa//90%//Q02874

[34056] C-OVARC1002127//SODIUM-INDEPENDENT ORGANIC ANION TRANSPORTER 2 (BRAIN DIGOXIN CARRIER PROTEIN) (BRAIN-SPECIFIC ORGANIC ANION TRANSPORTER) (OATP-B 1).//5.40E-52//306aa//35%//O35913

[34057] C-OVARC1002138//SAPI PROTEIN.//7.60E-60//128aa//59%//P39955

[34058] C-OVARC1002156//Danio rerio uridine kinase mRNA, complete cds.//6.00E-1611262bp//64%//AF195851

[34059] C-OVARC1002165//3-OXO-5-ALPHA-STEROID 4-DEHYDROGENASE 2 (EC 1.3.99.5) (STEROID 5-ALPHA-REDUCTASE 2) (SR TYPE 2).//7.60E-08//14aa//37%//P31213

[34060] C-OVARC1002182//BETA-TRCP (BETA-TRANSDUCIN REPEAT-CONTAINING PROTEIN) (BTRCP).//1.70E-09//207aa//30%//Q91854

[34061] C-PLACE1000004//Homo sapiens IDN3-B mRNA, complete cds.//0//2365bp//99%//AB019602

[34062] C-PLACE1000007//PROBABLE UBIQUITIN CARBOXYL-TERMINAL HYDROLASE R10E11.3 (EC 3.1.2.15) (UBIQUITIN THIOLESTERASE) (UBIQUITIN-SPECIFIC PROCESSING PROTEASE) (DEUBIQUITINATING ENZYME).//1.60E-81//212aa//70%//P34547

[34063] C-PLACE1000040//TRANSFORMING PROTEIN P21/K-RAS 2B.//1.40E-17//85aa//32%//P08643

[34064] C-PLACE1000061//Human ribosomal protein L37a mRNA sequence.//7.90E-54//190bp//94%//L22154

[34065] C-PLACE1000066//SSU72 PROTEIN.//1.10E-39//206aa//43%//P53538

[34066] C-PLACE1000081//Human SEC7 homolog Tic (TIC) mRNA, complete cds.110112077bp//99%//U63127

[34067] C-PLACE1000133//TRANSCRIPTION FACTOR BTF3 (RNA POLYMERASE B TRANSCRIPTION FACTOR 3).111 .80E-62//158aa//81%//P20290

[34068] C-PLACE1000142//3-HYDROXYBUTYRYL-COA DEHYDRATASE (EC 4.2.1.55) (CROTONASE).//2.80E-29//134aa//43%//P52046

[34069] C-PLACE1000184//Homo sapiens estrogen-related receptor gamma mRNA, complete cds.//1.30E-305//1417bp//98%//AF058291

[34070] C-PLACE1000185//Homo sapiens mRNA for N-Acetylglucosamine kinase.//4.90E-258//1183bp//99%//AJ242910

[34071] C-PLACE1000213//GLUCOAMYLASE SI/S2 PRECURSOR (EC 3.2.1.3) (GLUCAN 1,4-ALPHA-GLUCOSIDASE) (1,4-ALPHA-D-GLUCAN GLUCOHYDROLASE).//4.50E-05//H 97aa//26%//P08640

[34072] C-PLACE1000383//Homo sapiens mRNA for MTMRI protein.//0//753bp//99%//AJ224979

[34073] C-PLACE1000401//POLIOVIRUS RECEPTOR PRECURSOR (CD155 ANTIGEN).//2.70E-30//352aa//31%//P15151

[34074] C-PLACE1000406//PTB-ASSOCIATED SPLICING FACTOR (PSF).//1.20E-132//334aa//72%//P23246

[34075] C-PLACE1000420//7,8-DIHYDRO-8-OXOGUANINE TRIPHOSPHATASE (EC 3.1.6.-) (8-OXO-DGTPASE).//2.80E-06//134aa//29%//P53368

[34076] C-PLACE1000492//Rat vacuolar protein sorting homolog r-vps33b mRNA, complete cds.//0//2041bp//87%//U35245

[34077] C-PLACE1000547//Homo sapiens GDP-mannose pyrophosphorylase B (GMPPB) mRNA, complete cds.//3.70E-241//124bp//98%//AF135421

[34078] C-PLACE1000583//ZINC FINGER PROTEIN 83 (ZINC FINGER PROTEIN HPF1).//1.60E-47//207aa//46%//P51522

[34079] C-PLACE1000588//INTERFERON-INDUCED GUANYLATE-BINDING PROTEIN 1 (GUANINE NUCLEOTIDE- BINDING PROTEIN 1).//1.60E-270//437aa//86%//P32455

[34080] C-PLACE1000596//Homo sapiens mRNA for NS1-binding protein (NS 1-BP).//540bp//99%//AJ012449

[34081] C-PLACE1000610//MSN5 PROTEIN.//0.0000026//136aa//26%//P52918

[34082] C-PLACE1000611//Rattus norvegicus neural membrane protein 35 mRNA, complete cds.//2.00E-55//779bp//67%//AF044201

[34083] C-PLACE1000636//MALE STERILITY PROTEIN 2.//1.20E-39//261aa//27%//Q08891

[34084] C-PLACE1000653//Homo sapiens N-acetylglucosamine-phosphate mutase mRNA, complete cds.//0//1992bp//99%//AF180371

[34085] C-PLACE1000656//Homo sapiens mRNA for JM4 protein, complete CDS (clone IMAGE 546750 and LLNLc110F 1857Q7 (RZPD Berlin)).//2.10E-277//260bp//99%//AJ005896

[34086] C-PLACE1000706//Homo sapiens transcriptional intermediary factor 1 gamma mRNA, complete cds.//0//1366bp//99%//AF119043

[34087] C-PLACE1000755//Homo sapiens mRNA for Helicase-MOI, complete cds.//4.60E-250//1189bp//97%//AB028449

[34088] C-PLACE1000769//Homo sapiens CGI-18 protein mRNA, complete cds.//0//1985bp//98%//AF132952

[34089] C-PLACE1000786//PUTATIVE RHO/RAC GUANINE NUCLEOTIDE EXCHANGE FACTOR (RHO/RAC GEF) (FACIOGENITAL DYSPLASIA PROTEIN HOMOLOG).//7.10E-09//159aa//47%//P52734

[34090] C-PLACE1000793//NEUROGENIC PROTEIN BIG BRAIN.//1.70E-07//251aa//24%//P23645

[34091] C-PLACE1000863//PUTATIVE MITOCHONDRIAL 40S RIBOSOMAL PROTEIN YHR148W.//2.50E-49//181aa//54%//P32899

[34092] C-PLACE1000909//ANKYRIN REPEAT-CONTAINING PROTEIN AKR1.//2.60E-19//404aa//26%//P39010

[34093] C-PLACE1000977//BETA-CHIMAERIN (BETA-CHIMERIN).//4.40E-22//29aa//35%//Q03070

[34094] C-PLACE1000979//ZINC FINGER PROTEIN 135.//2.50E-153//326aa//64%//P52742

[34095] C-PLACE1000987//Rattus norvegicus late gestation lung 2 protein (Lg12) mRNA, complete cds.//5.90E-278//476bp//92%//AF110195

[34096] C-PLACE1001036//Homo sapiens mRNA for alpha integrin binding protein 63, partial.//0//1988bp//99%//AJ131721

[34097] C-PLACE1001054//Homo sapiens mRNA for RuvB-like DNA helicase TIP49b, complete cds.//4.00E-300//355bp//100%//AB024301

[34098] C-PLACE1100062//Homo sapiens mRNA for lysine-ketoglutarate reductase/saccharopine dehydrogenase, partial CDS.//1.60E-207//742bp//99%//AJ007714

[34099] C-PLACE1001092//Homo sapiens sorting nexin 4 mRNA, complete cds.//0//1500bp//99%//AF065485

[34100] C-PLACE1001104//MYOSIN HEAVY CHAIN, NON-MUSCLE (ZIPPER PROTEIN) (MYOSIN II).//6.80E- 18//529aa//23%//Q99323

[34101] C-PLACE1001118//ZINC FINGER PROTEIN 135.//5 .40E-147//443aa//57%//P52742

[34102] C-PLACE1001171//MYOTUBULARIN.//7.10E-84//198aa/173%//Q13496

[34103] C-PLACE1001238//Mouse mRNA for RNA polymerase I associated factor (PAF53), complete cds.//2.00E-202//1333bp//80%//D14336

[34104] C-PLACE1001257//RING CANAL PROTEIN (KELCH PROTEIN).//4.30E-54//257aa//46%//Q04652

[34105] C-PLACE1001294//Mus musculus XY body protein (Xybp) mRNA, complete cds.//6.20E-223//1092bp/178%//AF120207

[34106] C-PLACE1001304//Homo sapiens C2H2 (Kruppel-type) zinc finger protein mRNA, complete cds.11//02145bp//99%//AF159567

[34107] C-PLACE1001377//Homo sapiens ADAMI0 (ADAMI0) mRNA, complete cds.//5.90E-22811827bp//99%//AF009615

[34108] C-PLACE1001383//ZINC-FINGER PROTEIN UB1-D4 (APOPTOSIS RESPONSE ZINC FINGER PROTEIN REQUIEM).//3.00E-33//138aa//42%//Q61103

[34109] C-PLACE1001387//EPIDERMAL GROWTH FACTOR RECEPTOR KINASE SUBSTRATE EPS8.//2.30E-61//132aa//46%//Q12929

[34110] C-PLACE1001517//Homo sapiens gene for glycosylphosphatidylinositol anchor attachment 1 (GPAA1), complete cds.//4.60E-112//392bp//87%//AB002137

[34111] C-PLACE1001602//CCR4-ASSOCIATED FACTOR 1 (CAF1).//5.70E-130//244aa//99%//Q60809

[34112] C-PLACE1001632//ZINC FINGER PROTEIN 84 (ZINC FINGER PROTEIN HPF2).//1.40E-118//429aa//48%//P51523

[34113] C-PLACE1001672//PROBABLE AMINOTRANSFERASE T01B11.2 (EC 2.6.1.-).//4.30E-66//74aa//45%//P91408

[34114] C-PLACE1001692//S-ACYL FATTY ACID SYNTHASE THIOESTERASE, MEDIUM CHAIN (EC 3.1.2.14) (THIOESTERASE II).//4.00E-81//263aa//56%//P08635

[34115] C-PLACE1001739//PUTATIVE ATP-DEPENDENT RNA HELICASE PL10.//3.50E-75//439aa//41%//P16381

[34116] C-PLACE1001748//Homo sapiens metalloprotease 1 (MP1) mRNA, complete cds.//0//2602bp//99%//AF061243

[34117] C-PLACE1001771//Homo sapiens mRNA for transient receptor potential protein TRP6.//0//2900bp//99%//AJ006276

[34118] C-PLACE1001781//PROBABLE PHOSPHOMANNOMUTASE (EC 5.4.2.8) (PMM).//5.40E-63//427aa//35%//Q57290

[34119] C-PLACE1001817//Homo sapiens ATP-specific succinyl-CoA synthetase beta subunit (SCS) mRNA, partial cds.110//1995bp//99%//AF058953

[34120] C-PLACE1001845//Mus musculus cyclin ania-6a mRNA, complete cds.//3.30E-3111925bp//62%//AF159159

[34121] C-PLACE1001869//L-RIBULOKINASE (EC 2.7.1.16).112.00E-27//270aa//31%//P94524

[34122] C-PLACE1001920//Homo sapiens MDC-3.13 isoform 2 mRNA, complete cds.110//1729bp//99%//AF099935

[34123] C-PLACE1001983//HYPOTHETICAL 46.4 KD PROTEIN IN FFH-GRPE INTERGENIC REGION.//7.50E-16//319aa//26%//P37908

[34124] C-PLACE1001989//PUTATIVE AMIDASE (EC 3.5.1 .4).//1 .40E-78//496aa//37%//Q49091

[34125] C-PLACE1002046//LIGATIN (FRAGMENT).//1.70E-240//560aa//80%//Q61211

[34126] C-PLACE1002073//ADENYLATE CYCLASE (EC 4.6.1.1) (ATP PYROPHOSPHATE-LYASE) (ADENYLYL CYCLASE).//5.30E-07//188aa//29%//P49606

[34127] C-PLACE1002090//SIGNAL RECOGNITION PARTICLE 72 KD PROTEIN (SRP72).//6.50E-58//112aa//100%//O76094

[34128] C-PLACE1002140//Rattus norvegicus apelin mRNA, complete cds.//1.40E-43//425bp//74%//AF179679

[34129] C-PLACE1002171//TRANSCRIPTION REGULATORY PROTEIN SWI3 (SWV/SNF COMPLEX COMPONENT SWI3) (TRANSCRIPTION FACTOR TYE2).//0.00005//179aa//23%//P32591

[34130] C-PLACE1002395//Mus musculus mRNA for UBE-1 cl, UBE-1c2, UBE-1c3, complete cds.//7.90E-100//966bp//75%//AB030505

[34131] C-PLACE1002433//CHROMOSOME ASSEMBLY PROTEIN XCAP-E.//5.10E-05//278aa//24%//P50533

[34132] C-PLACE1002437//ATP-BINDING CASSETTE TRANSPORTER 1.//4.50E-76//180aa//83%//P41233

[34133] C-PLACE1002438//ZINC FINGER PROTEIN 151 (MIZ-1 PROTEIN).//4.20E-06//33aa//29%//Q13105

[34134] C-PLACE1002450//Human zinc finger protein mRNA, complete cds.11//02565bp//99%//U69274

[34135] C-PLACE1002474//Mus musculus matrilin-2 precursor mRNA, complete cds.110112092bp//84%//U69262

[34136] C-PLACE1002493//Homo sapiens signal transducing adaptor molecule 2A (STAM2) mRNA, complete cds.//1 .70E-113//545bp//98%//AF042273

[34137] C-PLACE1002500//Rattus norvegicus zinc transporter (ZnT-2) mRNA, complete cds.//2.90E-581/465bp/180%//U50927

[34138] C-PLACE1002532//HOMEOBOX PROTEIN DLX-5 .//1 .20E-152//289aa//96%//P70396

[34139] C-PLACE1002571//ACTIN-LIKE PROTEIN 13E.//5.00E-99//386aa//48%//P45890

[34140] C-PLACE1002583//GLUTAMATE RECEPTOR, IONOTROPIC KAINATE 2 PRECURSOR (GLUTAMATE RECEPTOR 6) (GLUR-6) (GLUTAMATE RECEPTOR BETA-2) (GLUR BETA-2) (FRAGMENT).//5.60E-34//76aa//98%//P39087

[34141] C-PLACE1002591//CORONIN-LIKE PROTEIN P57.//4.40E-70//208aa//66%//P31146

[34142] C-PLACE1002598//OLIGORIBONUCLEASE (EC 3.1.-.-).//5.50E-17//76aa//56%//P45340

[34143] C-PLACE1002655//ADSEVERIN (SCINDERIN) (SC).//2.50E-278//543aa//92%//Q28046

[34144] C-PLACE1002665//Mus musculus enhancer of polycomb (Epc1) mRNA, complete cds.//1012462bp//89%//AF079765

[34145] C-PLACE1002685//Homo sapiens B cell linker protein BLNK mRNA, alternatively spliced, complete cds.//0//1750bp//99%//AF068180

[34146] C-PLACE1002714//MYOSIN HEAVY CHAIN, NON-MUSCLE (ZIPPER PROTEIN) (MYOSIN II).//9.40E-13//500aa//21%//Q99323

[34147] C-PLACE1002722//PROBABLE G PROTEIN-COUPLED RECEPTOR KIAA0001.//9.00E-45//305aa//33%//Q15391

[34148] C-PLACE1002775//PEREGRIN (BR1 +L40 PROTEIN).//3 .80E-13//272aa//28%//P55201

[34149] C-PLACE1002782//Rattus norvegicus zinc transporter (ZnT-2) mRNA, complete cds.//3.80E-43//385bp//77%//U50927

[34150] C-PLACE1002816//HISTONE DEACETYLASE HDA1 .//2.20E-48//217aa//46%//P53973

[34151] C-PLACE1002834//ZINC FINGER PROTEIN 83 (ZINC FINGER PROTEIN HPF1).//5.50E-2031/396aa//86%//P51522

[34152] C-PLACE1002908//Homo sapiens XGalT- I mRNA for galactosyltransferase I, complete cds.//0//1654bp//99%//AB028600

[34153] C-PLACE1002991//PUTATIVE AMIDASE (EC 3.5.1.4).//1 .40E-781/496aa//37%//Q49091

[34154] C-PLACE1003030//Homo sapiens snRNA activating protein complex 190 kD subunit (SNAP190) mRNA, complete cds.//8.50E-44//225bp//100%//AF032387

[34155] C-PLACE1003045//POLYCYSTIN 2 (AUTOSOMAL DOMINANT POLYCYSTIC KIDNEY DISEASE TYPE II PROTEIN) (POLYCYSTWIN) (R48321).//1.70E-05//150aa//24%//Q13563

[34156] C-PLACE1003100//HEP27 PROTEIN (PROTEIN D).112.60E-79//253aa//60%//Q13268

[34157] C-PLACE1003174//UBIQUITIN-CONJUGATING ENZYME E2-18 KD (EC 6.3.2.19) (UBIQUITIN- PROTEIN LIGASE) (UBIQUITIN CARRIER PROTEIN) (PM42).//3.80E-37//143aa//51%//P42743

[34158] C-PLACE1003176//Homo sapiens clone pHNI 868 tyrosyl-DNA phosphodiesterase protein (TDP1) mRNA, partial cds.//1.70E-148//687bp//99%//AF182003

[34159] C-PLACE1003190//SOF1 PROTEIN.//1.90E-110//325aa//48%//P33750

[34160] C-PLACE1003238//PROBABLE G PROTEIN-COUPLED RECEPTOR KIAA0001.//4.90E-76//309aa//47%//Q15391

[34161] C-PLACE1003258//EARLY EMBRYOGENESIS ZYG-1 I PROTEIN.//7.90E-22/170aa//47%//P21541

[34162] C-PLACE1003302//ZINC FINGER PROTEIN 83 (ZINC FINGER PROTEIN HPF1).//6.90E-206//396aa//86%//P51522

[34163] C-PLACE1003353//Homo sapiens breast cancer antiestrogen resistance 3 protein (BCAR3) mRNA, complete cds.//0//2435bp//99%//U92715

[34164] C-PLACE1003366//Homo sapiens otoferlin (OTOF) mRNA, complete cds.//1.40E-78//542bp//67%//AF107403

[34165] C-PLACE1003394//Homo sapiens RAB14 protein (RAB14) mRNA, complete cds.//2.60E-139//648bp//99%//AF152463

[34166] C-PLACE1003420//PUTATIVE MITOCHONDRIAL CARRIER YIL006W.//1.30E-40//278aa//36%//P40556

[34167] C-PLACE1003493//ENDOTHELIAL CELL MULTIMERIN PRECURSOR.//1.70E-23//322aa//26%//Q13201

[34168] C-PLACE1003519//H. sapiens hnRNP-E2 mRNA.//5.10E-218//905bp//99%//X78136

[34169] C-PLACE1003521//HYPOTHETICAL HELICASE C28H8.3 IN CHROMOSOME III.//0.000001//101aa//32%//Q09475

[34170] C-PLACE1003537//ENDOSOMAL P24A PROTEIN PRECURSOR (70 KD ENDOMEMBRANE PROTEIN) (PHEROMONE ALPHA-FACTOR TRANSPORTER) (ACIDIC 24 KD LATE ENDOCYTIC INTERMEDIATE COMPONENT).//7.70E-68//404aa//331%//P32802

[34171] C-PLACE1003596//OLIGOSACCHARYL TRANSFERASE STT3 SUBUNIT HOMOLOG.//2 .60E-93//270aa//66%//P46975

[34172] C-PLACE1003602//Homo sapiens mRNA expressed in placenta.//5.90E-278//1275bp//99%//D83200

[34173] C-PLACE1003605//HAP5 TRANSCRIPTIONAL ACTIVATOR.//0.00000023//82aa//35%//Q02516

[34174] C-PLACE1003611//Homo sapiens anaphase-promoting complex subunit 4 (APC4) mRNA, complete cds.//6.20E-169/1683bp//99%//AF191338

[34175] C-PLACE1003625//ARMADILLO SEGMENT POLARITY PROTEIN.//3.20E-10//380aa//25%//P18824

[34176] C-PLACE1003669//TRICHOHYALIN.//5.60E-09//219aa//30%//P22793

[34177] C-PLACE1003704//SPLICING FACTOR, ARGININE/SERINE-RICH 4 (PRE-MRNA SPLICING FACTOR SRP75).//8.00E-19//209aa//34%//Q08170

[34178] C-PLACE1003709//Homo sapiens mitotic checkpoint kinase Bub1 (BUB1) mRNA, complete cds.//6.20E-282//316bp//98%//AF053305

[34179] C-PLACE1003738//ZINC FINGER PROTEIN 135.//9.60E-118//350aa//46%//P52742

[34180] C-PLACE1003760//Homo sapiens tetraspanin TM4-A mRNA, complete cds.//5.20E-289//313bp//97%//AF133423

[34181] C-PLACE1003885//POLY(A) POLYMERASE (EC 2.7.7.19) (PAP) (POLYNUCLEOTIDE ADENYLYLTRANSFERASE).//3.70E-222//651aa//66%//P25500

[34182] C-PLACE1003888//1-PHOSPHATIDYLINOSITOL-4,5-BISPHOSPHATE PHOSPHODIESTERASE DELTA I (EC 3.1.4.11) (PLC-DELTA-1) (PHOSPHOLIPASE C-DELTA-1) (PLC-III) (FRAGMENT).//6.70E-113//501aa//46%//P10895

[34183] C-PLACE1003903//CTP SYNTHASE (EC 6.3.4.2) (UTP-AMMONIA LIGASE) (CTP SYNTHETASE).//1.40E-243//584aa//74%//P17812

[34184] C-PLACE1003915//PROBABLE ARGINYL-TRNA SYNTHETASE, CYTOPLASMIC (EC 6.1.1.19) (ARGININE- -TRNA LIGASE) (ARGRS).//2.40E-108//581aa//40%//Q05506

[34185] C-PLACE1003923//Homo sapiens p53 regulated PA26-T2 nuclear protein (PA26) mRNA, complete cds.//0//1670bp//99%//AF033120

[34186] C-PLACE1003968//5′-AMP-ACTIVATED PROTEIN KINASE, GAMMA-1 SUBUNIT (AMPK GAMMA-1 CHAIN).//2.40E-124//326aa//73%//P80385

[34187] C-PLACE1004104//Rattus norvegicus rsec5 mRNA, complete cds.110112384bp//86%//AF032666

[34188] C-PLACE1004128//GUANINE NUCLEOTIDE-BINDING PROTEIN BETA SUBUNIT 4 (TRANSDUCIN BETA CHAIN 4).//6.10E-181//340aa//96%//P29387

[34189] C-PLACE1004149//Rattus norvegicus GERp95 mRNA, complete cds.//3.30E-41//452bp//65%//AF195534

[34190] C-PLACE1004183//Homo sapiens for TOM1-like protein.//0//1279bp//97%//AJ010071

[34191] C-PLACE1004197//BUTYROPHILIN PRECURSOR (BT).//4.50E-10//208aa//27%//Q62556

[34192] C-PLACE1004203//Homo sapiens GPI-anchored membrane protein CDw108 precursor, mRNA, complete cds.//18 82bp//99%//AF069493

[34193] C-PLACE1004256//Mus musculus short coiled coil protein SCOCO (Scoc) mRNA, complete cds.//2.00E-93//960bp//76%//AF115778

[34194] C-PLACE1004258//Homo sapiens vanilloid receptor-like protein 1 (VRL-1) mRNA, //0//1144bp//98%//AF129112

[34195] C-PLACE1004270//TRANSMEMBRANE PROTEASE, SERINE 2 (EC 3.4.21.-).//9.70E-36//389aa//31%//O15393

[34196] C-PLACE1004277//Homo sapiens two pore domain K+channel (TASK-2) mRNA, complete cds.//0//1498bp//99%//AF084830

[34197] C-PLACE1004302//SOF1 PROTEIN.//1.90E-110//325aa//48%//P33750

[34198] C-PLACE1004316//H. sapiens mRNA for apoptosis specific protein.//0//1767bp//99%//Y11588

[34199] C-PLACE1004358//Homo sapiens connector enhancer of KSR-like protein CNK1 mRNA, complete cds.//0//2512bp//99%//AF100153

[34200] C-PLACE1004428//PRISTANOYL-COA OXIDASE (EC 1.3.3.-).//1.20E-39//385aa//33%//Q63448

[34201] C-PLACE1004437//Human NAD+-specific isocitrate dehydrogenase beta subunit precursor, mRNA, nuclear gene encoding mitochondrial protein, complete cds.//0//985bp//99%//U49283

[34202] C-PLACE1004460//MATERNAL TUDOR PROTEIN.//0.0000002//218aa//23%//P25823

[34203] C-PLACE1004471//ZINC FINGER PROTEIN 83 (ZINC FINGER PROTEIN HPF1).//2.90E-56//276aa//41%//P51522

[34204] C-PLACE1004506//Homo sapiens carboxyl terminal LIM domain protein (CLIMI) mRNA, complete cds.//2.10E- 16//402bp//62%//U90878

[34205] C-PLACE1004510//Homo sapiens TATA binding protein associated factor (TAFII150) mRNA, complete cds.//3 .40E-227//H1037bp//99%//AF040701

[34206] C-PLACE1004550//Homo sapiens CGI-20 protein mRNA, complete cds.//3.50E-274//1305bp//97%//AF132954

[34207] C-PLACE1004564//CLEAVAGE AND POLYADENYLATION SPECIFICITY FACTOR, 100 KD SUBUNIT (CPSF 100 KD SUBUNIT).//0//525aa//99%//Q10568

[34208] C-PLACE1004629//PROTEIN OS-9 PRECURSOR.//7.70E-18//264aa//32%//Q13438

[34209] C-PLACE1004646//B. taurus mRNA for retinal pigment epithelial membrane receptor p63 .//4.40E-42//985bp//59%//X66277

[34210] C-PLACE1004674//Homo sapiens calcium binding protein (ALG-2) mRNA, complete cds.//1.30E-195//982bp//96%//AF035606

[34211] C-PLACE1004743//PROBABLE N-END-RECOGNIZING PROTEIN (UBIQUITIN-PROTEIN LIGASE E3 COMPONENT) (N- RECOGNIN).//4.40E-35//578aa//27%//O60152

[34212] C-PLACE1004751//Homo sapiens mRNA for alpha2,3-sialyltransferase ST3Gal VI, complete cds.//7.10E-224//790bp//98%//AB022918

[34213] C-PLACE1004777//N-CHIMAERIN (NC) (N-CHIMERIN) (ALPHA CHIMERIN) (A-CHIMAERIN).//1.90E-32//259aa//32%//P30337

[34214] C-PLACE1004793//RETROVIRUS-RELATED ENV POLYPROTEIN.//5.20E-47//577aa//25%//P10267

[34215] C-PLACE1004804//ADENYLATE CYCLASE (EC 4.6.1.1) (ATP PYROPHOSPHATE-LYASE) (ADENYLYL CYCLASE).//4.70E-65//695aa//29%//Q01631

[34216] C-PLACE1004814//SPLICING FACTOR, ARGININE/SERINE-RICH 4 (PRE-MRNA SPLICING FACTOR SRP75).//5.90E-19//196aa//36%//Q08170

[34217] C-PLACE1004868//MALE STERILITY PROTEIN 2.//3.90E-39//261aa//27%//Q08891

[34218] C-PLACE1004902//PUTATIVE PRE-MRNA SPLICING FACTOR ATP-DEPENDENT RNA HELICASE SPAC 10F6.02C.//9.30E-1//194aa//47%//O42643

[34219] C-PLACE1004918//L-LACTATE DEHYDROGENASE M CHAIN (EC 1.1.1.27) (LDH-A).114.90E-48/1198aa//44%//P06151

[34220] C-PLACE1004930//Homo sapiens MDC-3.13 isoform 2 mRNA, complete cds//0//1853bp//98%//AF099936

[34221] C-PLACE1004937//SEL-10 PROTEIN.//6.30E-125//357aa//58%//Q93794

[34222] C-PLACE1004969//HYPOTHETICAL 55.1 KD PROTEIN B0416.5 IN CHROMOSOME X.112.00E-14//205aa//26%//Q11073

[34223] C-PLACE1005052//Homo sapiens CGI-16 protein mRNA, complete cds.//6.6e-313//1413bp//99%//AF132950

[34224] C-PLACE1005102//RING CANAL PROTEIN (KELCH PROTEIN).//2.60E-56//565aa//30%//Q04652

[34225] C-PLACE1005176//Homo sapiens hypothalamus protein HT001 mRNA, complete cds.//3.90E-212//1040bp//96%//AF113539

[34226] C-PLACE1005187//APAG PROTEIN.//3.80E-13//122aa//36%//P05636

[34227] C-PLACE1005243//SERINE/THREONINE PROTEIN KINASE PKPA (EC 2.7.1.-).//1.30E-27//349aa//32%//Q01577

[34228] C-PLACE1005287//INNER CENTROMERE PROTEIN (INCENP).//2.30E-13//269aa//28%//P53352

[34229] C-PLACE1005305//GTP:AMP PHOSPHOTRANSFERASE MITOCHONDRIAL (EC 2.7.4.10) (AK3).//2.00E-111//226aa//92%//P08760

[34230] C-PLACE1005331//Homo sapiens 7h3 protein mRNA, partial cds.//1.20E-226//748bp//95%//AF209931

[34231] C-PLACE1005373//TRNA PSEUDOURIDINE SYNTHASE B (EC 4.2.1.70) (TRNA PSEUDOURIDINE 55 SYNTHASE) (PSI55 SYNTHASE) (PSEUDOURIDYLATE SYNTHASE) (URACIL HYDROLYASE).//8.60E-09//194aa//27%//O33335

[34232] C-PLACE1005467//PENICILLIN-BINDING PROTEIN 4* (PBP 4*) (PBP 4A).//1.10E-09//193aa//31%//P32959

[34233] C-PLACE1005494//Homo sapiens mRNA for transient receptor potential protein TRP6.//0//1649bp//99%//AJ006276

[34234] C-PLACE1005530//HYPOTHETICAL 47.6 KD PROTEIN C16C10.5 IN CHROMOSOME III.//5.60E-52//73aa//57%//Q09251

[34235] C-PLACE1005549//Homo sapiens mRNA for Rho guanine nucleotide-exchange factor, splice variant NET IA.//7.60E-97//1287bp//67%//AJ010046

[34236] C-PLACE1005557//60S RIBOSOMAL PROTEIN L27.//1.90E-11 l/60aa//48%//P46288

[34237] C-PLACE1005584//TRANS-ACTING TRANSCRIPTIONAL PROTEIN ICPO (P135 PROTEIN) (IER 2.9/ER2.6).//6.80E-09//267aa//30%//P29128

[34238] C-PLACE1005611//Mus musculus mRNA for mDj10, complete cds.//2.00E-33//379bp//66%//AB028860

[34239] C-PLACE1005646//Homo sapiens RNA helicase-related protein mRNA, complete cds.//0//2130bp//99%//AF083255

[34240] C-PLACE1005656//RIBONUCLEOSIDE-DIPHOSPHATE REDUCTASE M2 CHAIN (EC 1.17.4.1) (RIBONUCLEOTIDE REDUCTASE).//2.10E-148//321aa//83%//P31350

[34241] C-PLACE1005727//Homo sapiens STRIN protein (STRIN) mRNA, complete cds.//2.00E-118H1378bp//98%//AF162680

[34242] C-PLACE1005739//INTERFERON-GAMMA INDUCIBLE PROTEIN MG11.//1.30E-237//585aa//72%//Q60710

[34243] C-PLACE1005763//S-ACYL FATTY ACID SYNTHASE THIOESTERASE, MEDIUM CHAIN (EC 3.1.2.14) (THIOESTERASE II).//2.50E-79//209aa//53%//P08635

[34244] C-PLACE1005803//Homo sapiens mRNA for transcription factor (SMIF gene).//0//1985bp//99%//AJ275986

[34245] C-PLACE1005804//Homo sapiens alpha 1,2-mannosidase IB mRNA, complete cds.//1.10E-217//994bp//99%//AF027156

[34246] C-PLACE1005813//Homo sapiens sorting nexin 2 (SNX2) mRNA, complete cds.//0//2040bp//99%//AF065482

[34247] C-PLACE1005876//CLEAVAGE AND POLYADENYLATION SPECIFICITY FACTOR, 100 KD SUBUNIT (CPSF 100 KD SUBUNIT).//0//730aa//99%//Q10568

[34248] C-PLACE1005890//BEM46 PROTEIN (FRAGMENT).//9.90E-42//224aa//43%//P54069

[34249] C-PLACE1005921//AIG 1 PROTEIN.//3.00E-31//284aa//31%//P54120

[34250] C-PLACE1005951//Homo sapiens prolactin regulatory element-binding protein (PREB) mRNA, complete cds.//1.10E-264//661bp//99%//AF203687

[34251] C-PLACE1005953//GLYCOSYLTRANSFERASE ALG2 (EC 2.4.1.-).//6.70E-30//198aa//37%//P43636

[34252] C-PLACE1005955//VACUOLAR AMINOPEPTIDASE I PRECURSOR (EC 3.4.11.22) (POLYPEPTIDASE)//5 .40E-54//455aa//32%//P14904

[34253] C-PLACE1005966//TRANSCRIPTION INITIATION FACTOR TFIID 90 KD SUBUNIT (TAFII-90).//1.40E-07//254aa//25%//P38129

[34254] C-PLACE1006003//Homo sapiens CGI-94 protein mRNA, complete cds.//2.40E-17711829bp//99%//AF151852

[34255] C-PLACE1006011//Homo sapiens mRNA for poly(ADP-ribose) polymerase-2.11011564bp//99%//AJ236876

[34256] C-PLACE1006040//Homo sapiens mRNA for alpha endosulfine.//4.70E-16111744bp//99%//X99906

[34257] C-PLACE1006119//Homo sapiens Ran-GTP binding protein mRNA, partial cds.//1.50E-148//681bp//99%//AF039023

[34258] C-PLACE1006157//E-SELECTIN PRECURSOR (ENDOTHELIAL LEUKOCYTE ADHESION MOLECULE 1) (ELAM-1) (LEUKOCYTE-ENDOTHELIAL CELL ADHESION MOLECULE 2) (LECAM2) (CD62E).//2.00E-28//236aa//30%//P98110

[34259] C-PLACE1006167//PAF I PROTEIN.//7.30E-151/437aa//24%//P38351

[34260] C-PLACE1006170//ALPHA-ADAPTIN C (CLATHRIN ASSEMBLY PROTEIN COMPLEX 2 ALPHA-C LARGE CHAIN) (100 KD COATED VESICLE PROTEIN C) (PLASMA MEMBRANE ADAPTOR HA2/AP2 ADAPTIN ALPHA C SUBUNIT).//1.70E-169//373aa//88%//P17427

[34261] C-PLACE1006196//PUTATIVE ATP-DEPENDENT RNA HELICASE C12C2.06.//2.70E-116//496aa//48%//Q09747

[34262] C-PLACE1006239//BONE PROTEOGLYCAN II PRECURSOR (PG-S2) (DECORIN).//2.00E-16//244aa//31%//P28675

[34263] C-PLACE1006288//VOLTAGE-DEPENDENT ANION-SELECTIVE CHANNEL PROTEIN I (VDAC1) (PLASMALEMMAL PORIN) (OUTER MITOCHONDRIAL MEMBRANE PROTEIN PORIN) (PORIN 31HL) (PORIN 31HM).//4.60E-117//147aa//80%//P21796

[34264] C-PLACE1006318//Mus musculus skm-BOP2 (Bop) mRNA, complete cds.//3.00E-0711376bp//59%//U76374

[34265] C-PLACE1006335//Homo sapiens NY-REN-50 antigen mRNA, partial cds.//0//649bp//99%//AF155112

[34266] C-PLACE1006368//HYALURONAN-MEDIATED MOTILITY RECEPTOR (HYALURONIC ACID RECEPTOR).//1.30E-18//460aa//24%//Q00547

[34267] C-PLACE1006385//Homo sapiens epsin 2a mRNA, complete cds.//0//1168bp//99%//AF062085

[34268] C-PLACE1006438//ZINC FINGER PROTEIN 165.//2.50E-45//122aa//43%//P49910

[34269] C-PLACE1006469//ACETYL-COENZYME A SYNTHETASE (EC 6.2.1.1) (ACETATE-COA LIGASE) (ACYL- ACTIVATING ENZYME).//1.20E-83//313aa//49%//P27550

[34270] C-PLACE1006482//TRANSCRIPTION FACTOR MAFF.//7.70E-55//142aa//85%//Q90595

[34271] C-PLACE1006488//SIGNAL RECOGNITION PARTICLE 68 KD PROTEIN (SRP68).//1.0E-229//367aa//96%//Q00004

[34272] C-PLACE1006492//Homo sapiens transmembrane protein 2 (TMEM2) mRNA, complete cds.//10/2618bp//99%//AF137030

[34273] C-PLACE1006506//Homo sapiens anaphase-promoting complex subunit 4 (APC4) mRNA, complete cds.//0//2170bp//99%//AF191338

[34274] C-PLACE1006531//Homo sapiens putative RNA-binding protein Q99 mRNA, complete cds.//0//967bp//99%//AF093097

[34275] C-PLACE1006534//POLYPEPTIDE N-ACETYLGALACTOSAMINYLTRANSFERASE (EC 2.4.1.41) (PROTEIN-UDP ACETYLGALACTOSAMINYLTRANSFERASE) (UDP-GALNAC:POLYPEPTIDE, N-ACETYLGALACTOSAMINYLTRANSFERASE) (GALNAC-T1).//8.30E-08//100aa//41%//Q10472

[34276] C-PLACE1006552//MYOSIN HEAVY CHAIN, CLONE 203 (FRAGMENT).//1.20E-09//426aa//21%//P39922

[34277] C-PLACE1006615//Homo sapiens eukaryotic translation initiation factor eIF3, p35 subunit mRNA, complete cds.//0//464bp//99%//U97670

[34278] C-PLACE1006626//Homo sapiens mRNA for Helicase-MOI, complete cds.//0//760bp//99%//AB028449

[34279] C-PLACE1006678//Homo sapiens mRNA for type II membrane protein, complete cds, clone:HP 10328.//5.80E-24//734bp//62%//AB015630

[34280] C-PLACE1006731//RIBOFLAVIN KINASE (EC 2.7.1.26) (FLAVOKINASE)/FMN ADENYLYLTRANSFERASE (EC 2.7.7.2) (FAD PYROPHOSPHORYLASE) (FAD SYNTHETASE).//6.90E-13//77aa//33%//Q59263

[34281] C-PLACE1006754//BILIARY GLYCOPROTEIN 1 PRECURSOR (BGP-1) (ANTIGEN CD66) (CD66A ANTIGEN).//6.20E-63//191aa//43%//P13688

[34282] C-PLACE1006819//LINE-1 REVERSE TRANSCRIPTASE HOMOLOG.//9.80E-213//232aa//80%//P08547

[34283] C-PLACE1006829//UBIQUITIN CARBOXYL-TERMINAL HYDROLASE 4 (EC 3.1.2.15) (UBIQUITIN THIOLESTERASE 4) (UBIQUITIN-SPECIFIC PROCESSING PROTEASE 4) (DEUBIQUITINATING ENZYME 4) (UBIQUITOUS NUCLEAR PROTEIN).//2.00E-15//188aa//29%//P35123

[34284] C-PLACE1006878//TRNA-SPLICING ENDONUCLEASE SUBUNIT SEN2 (EC 3.1.27.9) (TRNA-INTRON ENDONUCLEASE).//1.90E-08//122aa//36%//P16658

[34285] C-PLACE1006917//HSH49 PROTEIN.//5 .50E-12//97aa//35%//Q99181

[34286] C-PLACE1006935//HYPOTHETICAL 95.2 KD PROTEIN R144.6 IN CHROMOSOME III.//6.70E-48//278aa//41%//Q10000

[34287] C-PLACE1006956//ATP-DEPENDENT PERMEASE MDLI.//1.30E-86//522aa//36%//P97998

[34288] C-PLACE1006958//Homo sapiens mRNA for heat shock protein apg-1, complete cds.//0//770bp//99%//AB023421

[34289] C-PLACE1007014//36 KD NUCLEOLAR PROTEIN HNP36 (DELAYED-EARLY RESPONSE PROTEIN 12) (DER12).//3 .20E-351//80aa//33%//Q14542

[34290] C-PLACE1007105//Homo sapiens muskelin (MKLN1) mRNA, complete cds.//0//2449bp//98%//AF047489

[34291] C-PLACE1007140//TRICHOHYALIN.//1.30E-25//816aa//22%//P37709

[34292] C-PLACE1007226//PROBABLE OXYGEN-INDEPENDENT COPROPORPHYRINOGEN III OXIDASE (EC 1.-.-.-) (COPROPORPHYRINOGENASE) (COPROGEN OXIDASE).//1.00E-42//370aa//31%//P54304

[34293] C-PLACE1007239//Homo sapiens mRNA for transcription elongation factor S-II, hS-II-TI, complete cds.//6.50E-216//1068bp//96%//D50495

[34294] C-PLACE1007243/[UNC-47 PROTEIN.//1.70E-07//211aa//27%//P34579

[34295] C-PLACE1007257//Homo sapiens mRNA for dia-12c protein.//0//2052bp//99%//Y 15908

[34296] C-PLACE1007317//Drosophila melanogaster Adrift (adrift) mRNA, complete cds.//4.10E-17//1037bp//56%//AF117649

[34297] C-PLACE1007346//Homo sapiens estrogen-responsive B box protein (EBBP) mRNA, complete cds.//0//2366bp//99%//AF096870

[34298] C-PLACE1007375//PHORBOL ESTER/DIACYLGLYCEROL-BINDING PROTEIN UNC-13.//0.00000044//127aa//30%//P27715

[34299] C-PLACE1007409//WHITE PROTEIN.//1.10E-64//428aa//32%//Q17320

[34300] C-PLACE1007416//DIPEPTIDYL PEPTIDASE IV (EC 3.4.14.5) (DPP IV) (T-CELL ACTIVATION ANTIGEN CD26) (TP103) (ADENOSINE DEAMINASE COMPLEXING PROTEIN-2) (ADABP).//8.80E-25//140aa//35%//P27487

[34301] C-PLACE1007488//PUTATIVE RHO/RAC GUANINE NUCLEOTIDE EXCHANGE FACTOR (RHO/RAC GEF) (FACIOGENITAL DYSPLASIA PROTEIN HOMOLOG).//5.40E-53//426aa//33%//P52734

[34302] C-PLACE1007511//KERATIN, TYPE I CYTOSKELETAL 19 (CYTOKERATIN 19) (Kl9) (CK 19).//1.40E-85//385aa//45%//P08728

[34303] C-PLACE1007537//Homo sapiens ankyrin repeat-containing protein ASB-2 mRNA, complete cds.//8.9e-316//1485bp//98%//AF159164

[34304] C-PLACE1007547//HYPOTHETICAL 97.1 KD PROTEIN R05D3.4 IN CHROMOSOME III.//1.00E-49//361aa//36%//P34537

[34305] C-PLACE1007598//ZINC FINGER PROTEIN 184 (FRAGMENT).//1.60E-143//666aa//44%//Q99676

[34306] C-PLACE1007632//POLIOVIRUS RECEPTOR PRECURSOR.//1.00E-07//228aa//31%//P32506

[34307] C-PLACE1007649//GLUCOAMYLASE S1/S2 PRECURSOR (EC 3.2.1.3) (GLUCAN 1,4-ALPHA-GLUCOSIDASE) (1,4-ALPHA-D-GLUCAN GLUCOHYDROLASE).//4.50E-05//197aa//26%//P08640

[34308] C-PLACE1007688//LA PROTEIN HOMOLOG (LA RIBONUCLEOPROTEIN) (LA AUTOANTIGEN HOMOLOG).//8.70E-09//279aa//28%//Q26457

[34309] C-PLACE1007697//GCN20 PROTEIN.//7.60E-119//717aa//38%//P43535

[34310] C-PLACE1007705//Mus musculus mRNA for Ndr1 related protein Ndr3, complete cds.//1H. OE-184//1096bp//82%//AB033922

[34311] C-PLACE1007706//Homo sapiens metalloprotease I (MP1) mRNA, complete cds.//0//3431bp//99%//AF061243

[34312] C-PLACE1007729//RETROVIRUS-RELATED PROTEASE (EC 3.4.23.-).//1.50E-44//231aa//42%//P10265

[34313] C-PLACE1007791//Homo sapiens IDN3-B mRNA, complete cds.//0//1836bp//99%//AB019602

[34314] C-PLACE1007897//Homo sapiens FLASH mRNA, complete cds.//0//2145bp//99%//AF154415

[34315] C-PLACE1007946//MYOSIN HEAVY CHAIN, NON-MUSCLE (ZIPPER PROTEIN) (MYOSIN II).//2.60E-14//370aa//25%//Q99323

[34316] C-PLACE1007954//HYPOTHETICAL 45.5 KD PROTEIN IN FIG1-GIP1 INTERGENIC REGION.//6.70E-13//68aa//31%//P38226

[34317] C-PLACE1007955//Homo sapiens cyclin-D binding Myb-like protein mRNA, complete cds.//0/12252bp/199%//AF084530

[34318] C-PLACE1007958//Homo sapiens cAMP-specific phosphodiesterase 8B (PDE8B) mRNA, partial cds.//0//2300bp//99%//AF079529

[34319] C-PLACE1007969//HETEROGENEOUS NUCLEAR RIBONUCLEOPROTEIN M (HNRNP M).//1.10E-36//202aa//48%//P52272

[34320] C-PLACE1008000//CHANNEL ASSOCIATED PROTEIN OF SYNAPSE-110 (CHAPSYN-110) (SYNAPTIC DENSITY PROTEIN PSD-93).//6.10E-14//128aa//39%//Q63622

[34321] C-PLACE1008044//NUCLEAR PORE COMPLEX PROTEIN NUP107 (NUCLEOPORIN NUP107) (107 KD NUCLEOPORIN) (P105).//4.6e-318//613aa//94%//P52590

[34322] C-PLACE1008080//Homo sapiens mRNA for HEXIM1 protein, complete cds.//0//2152bp//99%//AB021179

[34323] C-PLACE1008111//PROBABLE OXIDOREDUCTASE (EC 1.-.-.-).//3.00E-25//208aa//37%//Q03326

[34324] C-PLACE1008132//HYPOTHETICAL 127.4 KD PROTEIN F07F6.4 IN CHROMOSOME III.//1.30E-24//395aa//31%//Q09531

[34325] C-PLACE1008177//TRICHOHYALIN.//2.30E-29//487aa//26%//P37709

[34326] C-PLACE1008201//Rattus rattus zinc finger protein, complete cds.//0//2265bp//83%//L23077

[34327] C-PLACE1008244//VEGETATIBLE INCOMPATIBILITY PROTEIN HET-E-1.//9.50E-21//148aa//38%//Q00808

[34328] C-PLACE1008273//COATOMER GAMMA SUBUNIT (GAMMA-COAT PROTEIN) (GAMMA-COP).//1.30E-283//671aa//77%//P53620

[34329] C-PLACE1008275//DNA REPAIR PROTEIN REVI (EC 2.7.7.-).//2.30E-18//62aa//37%//P12689

[34330] C-PLACE1008309//Rattus norvegicus putative four repeat ion channel mRNA, complete cds.//5.20E-13711672bp//77%//AF078779

[34331] C-PLACE1008330//EOSINOPHIL LYSOPHOSPHOLIPASE (EC 3.1.1.5) (CHARCOT-LEYDEN CRYSTAL PROTEIN) (LYSOLECITHIN ACYLHYDROLASE) (CLC) (GALACTIN-10).//2.20E-23//194aa//47%//Q05315

[34332] C-PLACE1008356//Homo sapiens meningioma-expressed antigen 5 (MEA5) mRNA, partial cds.//1.90E-170//780bp//100%//AF036144

[34333] C-PLACE1008368//RING CANAL PROTEIN (KELCH PROTEIN).//5.30E-26//309aa//30%//Q04652

[34334] C-PLACE1008398//GENE 33 POLYPEPTIDE.//7.30E-114//243aa//87%//P05432

[34335] C-PLACE1008402//GENERAL VESICULAR TRANSPORT FACTOR P115 (TRANSCYTOSIS ASSOCIATED PROTEIN) (TAP).//0//698aa//95%//P41541

[34336] C-PLACE1008426//RESTIN (CYTOPLASMIC LINKER PROTEIN-170) (CLIP-170).//1.80E-11//365aa//25%//O42184

[34337] C-PLACE1008429//ANKYRIN HOMOLOG PRECURSOR.//3.10E-11//89aa//32%//Q06527

[34338] C-PLACE1008465//Homo sapiens mRNA for rapa-1 (rapa gene).//6.60E-243//1102bp//99%//AJ277275

[34339] C-PLACE1008533//101 KD MALARIA ANTIGEN (P101) (ACIDIC BASIC REPEAT ANTIGEN).//1.10E-09//62aa//48%//P22620

[34340] C-PLACE1008603//NUCLEAR PORE COMPLEX PROTEIN NUP 155 (NUCLEOPORIN NUP155) (155 KD NUCLEOPORIN) (P140).//7.80E-236//453aa//96%//P37199

[34341] C-PLACE1008627//Homo sapiens mRNA for cysteine-rich protein.//0//850bp//99%//AJ006591

[34342] C-PLACE1008643//INTER-ALPHA-TRYPSIN INHIBITOR HEAVY CHAIN H2 PRECURSOR (ITI HEAVY CHAIN H2).//5.20E-90//483aa//38%//O02668

[34343] C-PLACE1008650//PRL1/PRL2-LIKE PROTEIN.//2.00E-127//354aa//62%//O113615

[34344] C-PLACE1008696//Homo sapiens NADH dehydrogenase-ubiquinone Fe-S protein 823 kDa subunit (NDUFS8) gene, nuclear gene encoding mitochondrial protein, complete cds.//0//3002bp//99%//AF038406

[34345] C-PLACE1008790//Homo sapiens importin alpha 7 subunit mRNA, complete cds.//0//1670bp//99%//AF060543

[34346] C-PLACE1008808//Homo sapiens mRNA for cell cycle checkpoint protein rad1 A.//2.30E-269//225bp//99%//AJ004974

[34347] C-PLACE1008813//Rattus norvegicus rsec15 mRNA, complete cds.//8.80E-268//17bp//90%//AF032668

[34348] C-PLACE1009020//NIFS PROTEIN.//3.90E-55//279aa//41%//P12623

[34349] C-PLACE1009027//Homo sapiens mRNA for doublecortin.//0//919bp//99%//AJ003112

[34350] C-PLACE1009060//BR01 PROTEIN.//6.70E-19//567aa/124%//P48582

[34351] C-PLACE1009094//FURIN-LIKE PROTEASE 2 PRECURSOR (EC 3.4.21.75) (FURIN 2).111.90E-44//480aa//30%//P30432

[34352] C-PLACE1009099//ZINC FINGER PROTEIN 41 (FRAGMENT).//1.10E-179//452aa//67%//P51814

[34353] C-PLACE1009113//Homo sapiens X-ray repair cross-complementing protein 3 (XRCC3) mRNA, complete cds.//0//2529bp//99%//AF035586

[34354] C-PLACE1009130//UBIQUITIN-PROTEIN LIGASE E3A (EC 6.3.2.-) (ONCOGENIC PROTEIN-ASSOCIATED PROTEIN E6-AP).//2.00E-68//181aa//43%//Q05086

[34355] C-PLACE1009158//Mus musculus mRNA for death inducer-obliterator-1 (Dio-1).//5.40E-200//1790bp//75%//AJ238332

[34356] C-PLACE1009186//Homo sapiens small zinc finger-like protein (TIM9b) mRNA, complete cds.//9.60E-255//1179bp//98%//AF150105

[34357] C-PLACE1009246//POLLEN SPECIFIC PROTEIN SF3.//4.40E-16//82aa//43%//P29675

[34358] C-PLACE1009298//VACUOLAR PROTEIN SORTING-ASSOCIATED PROTEIN VPS35.//2.00E-78//262aa//43%//P34110

[34359] C-PLACE1009308//GLUCOSE REPRESSION MEDIATOR PROTEIN.//4.00E-06//439aa//23%//P14922

[34360] C-PLACE1009319//Rattus norvegicus outer membrane protein (OMP25) mRNA, complete cds; nuclear gene for mitochondrial product.//2.10E-132//229bp//75%//AF107295

[34361] C-PLACE1009368//METAL HOMEOSTASIS FACTOR ATX2.//2.50E-10//151aa//29%//Q12067

[34362] C-PLACE1009398//ZINC FINGER PROTEIN 135.//6.20E-97//361aa//51%//P52742

[34363] C-PLACE1009404//HYPOTHETICAL 105.6 KD PROTEIN C16C9.06C IN CHROMOSOME I.//4.70E-08//165aa//33%//Q09820

[34364] C-PLACE1009443//Mus musculus F-box protein FBL8 mRNA, complete cds.//1.00E-173//367bp//77%//AF176523

[34365] C-PLACE1009444//PHOSPHATIDYLINOSITOL 4-KINASE ALPHA (EC 2.7.1.67) (PI4-KINASE) (PTDINS-4-KINASE) (PI4K-ALPHA).//7.80E-71 //82aa//89%//P42356

[34366] C-PLACE1009468//PHOSPHOLIPASE A-2-ACTIVATING PROTEIN (PLAP).//3.10E-289//550aa//93%//P54319

[34367] C-PLACE1009476//PUTATIVE ATP-DEPENDENT RNA HELICASE T26G10.1 IN CHROMOSOME III.//3.90E-40//179aa//370%//P34580

[34368] C-PLACE1009477//Homo sapiens ubiquitin-fusion degradation protein 2 (UFD2) mRNA, complete cds.//6.60E-147//592bp//99%//AF043117

[34369] C-PLACE1009524//ARF NUCLEOTIDE-BINDING SITE OPENER (ARNO PROTEIN) (ARF EXCHANGE FACTOR).//8.10E-99//228aa//75%//Q99418

[34370] C-PLACE1009571//Homo sapiens PTD002 mRNA, complete cds.//5.90E-185//857bp//99%//AF078857

[34371] C-PLACE1009596//VEGETATIBLE INCOMPATIBILITY PROTEIN HET-E-1.//5.10E-54//291aa//40%//Q00808

[34372] C-PLACE1009622//MATERNAL EFFECT PROTEIN STAUFEN.//1.30E-601/209aa/141%//P25159

[34373] C-PLACE1009659//MEMBRANE-ASSOCIATED PROTEIN HEM-2 (NAP I PROTEIN).//1.50E-285//538aa//990%//P55161

[34374] C-PLACE1009670//Homo sapiens genethonin 1 mRNA, complete cds.//0//1854bp//100%//AF062534

[34375] C-PLACE1009708//HYPOTHETICAL 143.3 KD TRP-ASP REPEATS CONTAINING PROTEIN C12G12.13C IN CHROMOSOME I.//7.00E-33//166aa//43%//Q09876

[34376] C-PLACE1009721//MSFI PROTEIN.//1.70E-22//176aa//33%//P35200

[34377] C-PLACE1009731 HAIG 1 PROTEIN.//1H.60E-22//274aa//28%//P54120

[34378] C-PLACE1009763//Homo sapiens mRNA for Nedd8-activating enzyme hUba3, complete cds.//4.30E-294//1329bp//100%//AB012190

[34379] C-PLACE1009798//RLR I PROTEIN.//1.60E-18//270aa//23%//P53552

[34380] C-PLACE1009845//WEB I PROTEIN (PROTEIN TRANSPORT PROTEIN SEC31).//2.30E-59//405aa//33%//P38968

[34381] C-PLACE1009861//CATHEPSIN B-LIKE CYSTEINE PROTEINASE 6 PRECURSOR (EC 3.4.22.-).//6.50E-28//209aa//38%//P43510

[34382] C-PLACE1009908//HYPOTHETICAL GTP-BINDING PROTEIN IN SEH1-PRP20 INTERGENIC REGION.//1.90E-108//277aa//43%//P53145

[34383] C-PLACE1009925//Homo sapiens RNA helicase (RIG-1) mRNA, complete cds.//0//1730bp//99%//AF038963

[34384] C-PLACE1009992//LIMULUS CLOTTING FACTOR C PRECURSOR (EC 3.4.21.84).//4.60E-59//450aa//34%//P28175

[34385] C-PLACE1009997//Rattus norvegicus A-kinase anchoring protein AKAP 220 mRNA, complete cds.//5.20E-70//736bp//73%//U48288

[34386] C-PLACE1010053//M. musculus Spnr mRNA for RNA binding protein.//6.00E-279//1402bp//94%//X84692

[34387] C-PLACE1010074//Homo sapiens sorting nexin 2 (SNX2) mRNA, complete cds.//0//2019bp//99%//AF065482

[34388] C-PLACE1010096//100 KD PROTEIN (EC 6.3.2.-).//1.40E-268//506aa//98%//Q62671

[34389] C-PLACE1010105//RING CANAL PROTEIN (KELCH PROTEIN).//7.30E-114//537aa//44%//Q04652

[34390] C-PLACE1010134//TRANSCRIPTION REGULATORY PROTEIN SNF2 (SWI/SNF COMPLEX COMPONENT SNF2) (REGULATORY PROTEIN SWI2) (REGULATORY PROTEIN GAMI) (TRANSCRIPTION FACTOR TYE3).//1.70E-20//156aa//42%//P22082

[34391] C-PLACE1010148//CYLICIN I (MULTIPLE-BAND POLYPEPTIDE I).//4.60E-07//431aa//23%//P35662

[34392] C-PLACE1010194//SPLICING FACTOR, ARGININE/SERINE-RICH 2 (SPLICING FACTOR SC35) (SC-35) (SPLICING COMPONENT, 35 KD) (PR264 PROTEIN).//9.80E-11//95aa//49%//Q01130

[34393] C-PLACE1010231I/CELL SURFACE GLYCOPROTEIN EMR1 PRECURSOR (EMR1 HORMONE RECEPTOR).//5.10E-27//371aa//28%//Q14246

[34394] C-PLACE1010261//SEGREGATION DISTORTER PROTEIN.//1.60E-77//214aa//62%//P25722

[34395] C-PLACE1010310//SPIDROIN 2 (DRAGLINE SILK FIBROIN 2) (FRAGMENT).//1.20E-18//467aa//30%//P46804

[34396] C-PLACE1010321//NON-GREEN PLASTID TRIOSE PHOSPHATE TRANSLOCATOR PRECURSOR (CTPT).//1.10E-09//350aa//22%//P52178

[34397] C-PLACE1010362//1-PHOSPHATIDYLINOSITOL PHOSPHODIESTERASE PRECURSOR (EC 3.1.4.10) (PHOSPHATIDYLINOSITOL-SPECIFIC PHOSPHOLIPASE C) (PI-PLC).//2.00E-09//126aa//29%//P34024

[34398] C-PLACE1010481//Bos taurus C5-glucuronyl epimerase mRNA, partial cds//0//2082bp//91%//AF003927

[34399] C-PLACE1010522//Homo sapiens mRNA for DEPP (decidual protein induced by progesterone), complete cds.//0//1981bp//99%//AB022718

[34400] C-PLACE1010529//Homo sapiens TANK binding kinase TBK1 (TBK1) mRNA, complete cds.//0//750bp//99%//AF191838

[34401] C-PLACE1010547//INTRACELLULAR PROTEIN TRANSPORT PROTEIN USO1.//1.20E-07//616aa//24%//P25386

[34402] C-PLACE1010579//Homo sapiens CED-6 protein (CED-6) mRNA, complete cds.//8.80E-300//1359bp//99%//AF191771

[34403] C-PLACE1010599//Homo sapiens Pex14 mRNA for peroxisomal membrane anchor protein, complete cds.//0//1904bp//99%//AB017546

[34404] C-PLACE1010622//TROPONIN T, CARDIAC MUSCLE ISOFORMS (TNTC).//0.00000016//120aa//28%//P02642

[34405] C-PLACE1010628//Homo sapiens S164 gene, partial cds; PS1 and hypothetical protein genes, complete cds; and S171 gene, partial cds.//7.50E-08//324bp//64%//AF109907

[34406] C-PLACE1010661//TESTIS-SPECIFIC PROTEIN PBS 13.//5.70E-75//423aa//39%//Q01755

[34407] C-PLACE1010662//UDP-GLUCOSE:GLYCOPROTEIN GLUCOSYLTRANSFERASE PRECURSOR (EC 2.4.1.-) (DUGT).//1.80E-222//808aa//52%//Q09332

[34408] C-PLACE1010702//ZINC FINGER PROTEIN 43 (ZINC PROTEIN HTF6).//5.20E-151//427aa//55%//P28160

[34409] C-PLACE1010720//Homo sapiens mRNA for chromosome-associated polypeptide-C, complete cds.//4.00E-299//1091bp//99%//AB019987

[34410] C-PLACE1010743//Homo sapiens myosin-IXb splice variant (Myo9b) mRNA, partial cds.118 .90E-9111668bp//82%//AF020267

[34411] C-PLACE1010761//Homo sapiens mRNA for cisplatin resistance-associated overexpressed protein, complete cds.//0//1448bp//99%//AB034205

[34412] C-PLACE1010771//M. musculus HCNGP mRNA.//7.40E-16811966bp//89%//X68061

[34413] C-PLACE1001081//Rattus norvegicus mRNA for protein encoded by bdeight gene, partial.//1.60E-217/1858bp//87%//AJ010392

[34414] C-PLACE1010833//CALTRACTIN (CENTRIN).//0.00000011//154aa//28%//P41209

[34415] C-PLACE1010870//ZINC FINGER PROTEIN 91 (ZINC FINGER PROTEIN HTFIO) (HPF7).//1.30E-143//407aa//58%//Q05481

[34416] C-PLACE1010896//NUF1 PROTEIN (SPINDLE POLY BODY SPACER PROTEIN SPC110).//1.50E-25//583aa//23%//P35580

[34417] C-PLACE1010926//HYPOTHETICAL 72.2 KD PROTEIN C12C2.05C IN CHROMOSOME II.//7.60E-23//103aa//53%//Q09746

[34418] C-PLACE1010942//Homo sapiens intersectin long isoform (ITSN) mRNA, complete cds.//0//1440bp//99%//AF114487

[34419] C-PLACE1010960//ACTIN-LIKE PROTEIN 13E.//5.30E-98//297aa//48%//P45890

[34420] C-PLACE1011041//Homo sapiens mRNA for BAP2-alpha protein, complete cds.//0//1701bp//97%//AB015019

[34421] C-PLACE1011046//1-PHOSPHATIDYLINOSITOL-4,5-BISPHOSPHATE PHOSPHODIESTERASE BETA I (EC 3.1.4.11) (PLC-BETA-1) (PHOSPHOLIPASE C-BETA-1) (PLC-1) (PLC-154).110//646aa//97%//P10894

[34422] C-PLACE1011056//HISTONE HI, GONADAL.//6.80E-13//54aa//37%//P02256

[34423] C-PLACE1011109//ELONGATION FACTOR G, MITOCHONDRIAL PRECURSOR (MEF-G).//1 .50E-22//63aa//88%//Q07803

[34424] C-PLACE1011114//PROBABLE ATP-DEPENDENT RNA HELICASE HAS1.//2.90E-71//190aa//44%//Q03532

[34425] C-PLACE1011160//Homo sapiens HFB30 mRNA, complete cds.//0//1691bp//99%//AB022663

[34426] C-PLACE1011185//INSERTION ELEMENT ISI PROTEIN INSB.//1.30E-89//67aa//100%//P03830

[34427] C-PLACE1011219//PROBABLE OXIDOREDUCTASE (EC I.-.-.-).//3.20E-12//212aa//29%//Q03326

[34428] C-PLACE1011229//Homo sapiens ubiquitin-specific protease homolog (UPH) mRNA, complete cds.//2.30E-152//701bp//99%//AF153604

[34429] C-PLACE1011310//MYOSIN HEAVY CHAIN, GIZZARD SMOOTH MUSCLE.//3.50E-20//496aa//25%//P10587

[34430] C-PLACE1011332//Homo sapiens N-acetylglucosamine-phosphate mutase mRNA, complete cds.//7.20E-151//697bp//99%//AF102265

[34431] C-PLACE1011340//Homo sapiens IDN3-B mRNA, complete cds.//1.20E-74/380bp//97%//AB019602

[34432] C-PLACE1011371//INTER-ALPHA-TRYPSIN INHIBITOR HEAVY CHAIN H2 PRECURSOR (ITI HEAVY CHAIN H2).//1.70E-78//383aa//39%//Q61703

[34433] C-PLACE1011399//Homo sapiens CGI-72 protein mRNA, complete cds.//3.20E-90//427bp//99%//AF151830

[34434] C-PLACE1011433//TRANSCRIPTION FACTOR IIIA (FACTOR A) (TFIIIA).//3.00E-10//236aa/125%//P34695

[34435] C-PLACE1011477//Homo sapiens sorting nexin 2 (SNX2) mRNA, complete cds.//0//2040bp//99%//AF065482

[34436] C-PLACE1011492//NON-GREEN PLASTID TRIOSE PHOSPHATE TRANSLOCATOR PRECURSOR (CTPT).//4.90E-11//147aa//32%//P52178

[34437] C-PLACE1011576//Human Kruppel related zinc finger protein (HTF 10) mRNA, complete cds.//0//1791bp//82%//L11672

[34438] C-PLACE1011586//Rattus norvegicus clone C53 CDK5 activator-binding protein mRNA, complete cds.//4.10E-259//1538bp//87%//AF177476

[34439] C-PLACE1011635//Homo sapiens heparan sulfate D-glucosaminyl 3-O-sulfotransferase-3B (30ST3B1) mRNA, complete cds.//0//1559bp//99%//AF105377

[34440] C-PLACE1011664//CROOKED NECK PROTEIN.//1.60E-187//505aa//64%//P17886

[34441] C-PLACE1011858//Homo sapiens BAG-family molecular chaperone regulator-2 mRNA, complete cds.//1.30E-255//179bp//99%//AF095192

[34442] C-PLACE1011896//Mus musculus Wnt10a mRNA, complete cds.//2.60E-287//1820bp//85%//U61969

[34443] C-PLACE1011922//MYOSIN HEAVY CHAIN, NONMUSCLE TYPE B (CELLULAR MYOSIN HEAVY CHAIN, TYPE B) (NMMHC-B).//1.30E-15//409aa//27%//P35580

[34444] C-PLACE1011923//Homo sapiens serum-inducible kinase mRNA, complete cds.//0//2782bp//99%//AF059617

[34445] C-PLACE1012031//Homo sapiens sorting nexin 13 (SNX13) mRNA, partial cds.//0//1701bp//100%//AF121862

[34446] C-PLACE2000014//HYPOTHETICAL HELICASE C28H8.3 IN CHROMOSOME III.//2.60E-42//104aa//49%//Q09475

[34447] C-PLACE2000015//EPIDERMAL GROWTH FACTOR RECEPTOR SUBSTRATE SUBSTRATE 15 (PROTEIN EPS 15) (AF-1 P PROTEIN).//1.10E-116//364aa//45%//P42566

[34448] C-PLACE2000021//Homo sapiens TRF1-interacting ankyrin-related ADP-ribose polymerase mRNA, complete cds.//2.70E-107//981bp//74%//AF082556

[34449] C-PLACE2000034//LAR PROTEIN PRECURSOR (LEUKOCYTE ANTIGEN RELATED) (EC 3.1.3.48).//2.20E-29//212aa//35%//P 10586

[34450] C-PLACE2000039//DYNEIN HEAVY CHAIN, CYTOSOLIC (DYHC) (MAP 1C).//6.10E-293//388aa//99%//P38650

[34451] C-PLACE2000062//Homo sapiens mRNA for type II membrane protein similar to HIV gp120-binding C-type lectin, complete cds, clone:HP01347.//6.30E-166//656bp//94%//AB015629

[34452] C-PLACE2000072//Homo sapiens ZNF202 beta (ZNF202) mRNA, complete cds.//0//3174bp//99%//AF027219

[34453] C-PLACE2000164//TIPD PROTEIN.//2.10E-59//481aa//33% O115736

[34454] C-PLACE2000216//SPECTRIN BETA CHAIN, BRAIN (SPECTRIN, NON-ERYTHROID BETA CHAIN) (FODRIN BETA CHAIN) (SPTBN 1).//6.60E-115//226aa//99%//Q01082

[34455] C-PLACE2000246//RING CANAL PROTEIN (KELCH PROTEIN).//6.00E-57//239aa/134%//Q04652

[34456] C-PLACE2000274//DYNEIN BETA CHAIN, CILIARY.//2 .20E-167//880aa//37%//P23098

[34457] C-PLACE2000341//Homo sapiens sodium-dependent multivitamin transporter (SMVT) mRNA, complete cds.//0//1554bp//99%//AF069307

[34458] C-PLACE2000371//TENSIN.//2 .90E-78//561aa//37%//Q04205

[34459] C-PLACE2000373//F-SPONDIN PRECURSOR.//8.60E-16//371aa//28%//P35446

[34460] C-PLACE2000398//LAR PROTEIN PRECURSOR (LEUKOCYTE ANTIGEN RELATED) (EC 3.1.3 .48).116.30E-37//190aa//98%//P10586

[34461] C-PLACE2000399//T-CELL SURFACE GLYCOPROTEIN E2 PRECURSOR (E2 ANTIGEN) (CD99) (MIC2 PROTEIN) (12E7).//1.60E-14//180aa//39%//P14209

[34462] C-PLACE2000404//PROBABLE LEUCYL-TRNA SYNTHETASE (EC 6.1.1.4) (LEUCINE-TRNA LIGASE) (LEURS).//9.90E-229//821aa//54%//Q09996

[34463] C-PLACE2000411//Homo sapiens epsin 2b mRNA, complete cds.//3.80E-271/1642bp/199%//AF062085

[34464] C-PLACE2000427//PROBABLE HELICASE MOT1.11.20E-26//200aa//27%//P32333

[34465] C-PLACE2000438//POLYPEPTIDE N-ACETYLGALACTOSAMINYLTRANSFERASE (EC 2.4.1.41) (PROTEIN- UDP ACETYLGALACTOSAMINYLTRANSFERASE) (UDP-GALNAC:POLYPEPTIDE, N- ACETYLGALACTOSAMINYLTRANSFERASE) (GALNAC-T1).//2.10E-86//348aa//41%//Q10472

[34466] C-PLACE2000458//CADHERIN-RELATED TUMOR SUPPRESSOR PRECURSOR (FAT PROTEIN).//2.50E-25//165aa//40%//P33450

[34467] C-PLACE2000477//Homo sapiens putative secreted protein (ZSIG11) mRNA, complete cds.//6.70E-127//671bp//94%//AF072733

[34468] C-PLACE3000009//DNA-DIRECTED RNA POLYMERASE II LARGEST SUBUNIT (EC 2.7.7.6) (RPB1)(FRAGMENT).//3 .50E-30//400aa//30%//P11414

[34469] C-PLACE3000020//Homo sapiens type III adenylyl cyclase (AC-III) mRNA, complete cds.110//2253bp//99%//AF033861

[34470] C-PLACE3000059//Mus musculus mRNA for ubiquitin conjugating enzyme.//0//1979bp//90%//Y 17267

[34471] C-PLACE3000121//VESICULAR TRAFFIC CONTROL PROTEIN SEC 15.//1.90E-08//281aa//22%//P22224

[34472] C-PLACE3000145//TENSIN.//1.00E-108//277aa//75%//Q04205

[34473] C-PLACE3000147//Homo sapiens metalloproteinase with thrombospondin type 1 motifs ADAMTS 1 (ADAMTS 1) mRNA, complete cds.//0//2043bp//99%//AF170084

[34474] C-PLACE3000169//ZINC FINGER PROTEIN 135.//2.50E-90//358aa//47%//P52742

[34475] C-PLACE3000218//Homo sapiens putative protein O-mannosyltransferase (POMT2) mRNA, complete cds.//01/1862bp/198%//AF105020

[34476] C-PLACE3000242//Human trophinin mRNA, complete cds.110112290bp//99%//U04811

[34477] C-PLACE3000244//PROTEIN TSG24 (MEIOTIC CHECK POINT REGULATOR).//0//435aa//92%//P53995

[34478] C-PLACE3000254//Homo sapiens transcriptional activator SRCAP (SRCAP) mRNA, complete cds.//0//4583bp//83%//AF143946

[34479] C-PLACE3000339//GLUCOAMYLASE SI/S2 PRECURSOR (EC 3.2.1.3) (GLUCAN 1,4-45 ALPHA- GLUCOSIDASE) (1,4-ALPHA-D-GLUCAN GLUCOHYDROLASE).//9.60E-08//359aa//23%//P08640

[34480] C-PLACE3000350//SERINE/THREONINE-PROTEIN KINASE SULU (EC 2.7.1.-).//1.00E-54//418aa//38%//P46549

[34481] C-PLACE3000416//Homo sapiens mRNA for actin binding protein ABP620, complete 50 cds.//1H.80E-1411/565bp//98%//AB029290

[34482] C-PLACE3000477//Homo sapiens phosphoprotein pp75 mRNA, partial cds.//0//3012bp//98%//AF153085

[34483] C-PLACE4000009//MYOSIN HEAVY CHAIN, NONMUSCLE TYPE B (CELLULAR MYOSIN HEAVY CHAIN, TYPE B) (NMMHC-B).//2.90E-54//626aa//29%//P35580

[34484] C-PLACE4000014//X-LINKED HELICASE II (X-LINKED NUCLEAR PROTEIN) (XNP).//3.1E-111//348aa//41%//P46100

[34485] C-PLACE4000052//Homo sapiens ATP cassette binding transporter I (ABCI) mRNA, complete cds.110114661bp//99%//AF165281

[34486] C-PLACE4000063//GLUCOAMYLASE SI/S2 PRECURSOR (EC 3.2.1.3) (GLUCAN 1,4-ALPHA- GLUCOSIDASE) (1,4-ALPHA-D-GLUCAN GLUCOHYDROLASE).//1.70E-15//740aa//23%//P08640

[34487] C-PLACE4000100//Homo sapiens hydroxypyruvate reductase (GRHPR) gene, complete cds.110/14199bp//97%//AF146689

[34488] C-PLACE4000128//Mus musculus putative transcription factor mRNA, complete cds.//1.60E-86//190aabp//88%//AF091234

[34489] C-PLACE4000156//ZINC FINGER PROTEIN 91 (ZINC FINGER PROTEIN HTF10) (HPF7).//1.40E-235//516aa//51%//Q05481

[34490] C-PLACE4000192//ZINC FINGER PROTEIN 142 (KIAA0236) (HA4654).//7.00E-22//369aa//25%//P52746

[34491] C-PLACE4000211//Homo sapiens BAZ2A mRNA for bromodomain adjacent to zinc finger domain 2A, complete cds.//0//5709bp//96%//AB032254

[34492] C-PLACE4000230//Mus musculus semaphorin VIa mRNA, complete cds.//0//2567bp//88%//AF030430

[34493] C-PLACE4000259//H. sapiens gene for U5 snRNP-specific 200 kD protein.//0//5143bp//90%//Z70200

[34494] C-PLACE4000261//PEREGRIN (BR1 +L40 PROTEIN).//9.50E-10//128aa//34%//P55201

[34495] C-PLACE4000269//Rattus norvegicus rexo70 mRNA, complete cds.//0//2034bp//89%//AF032667

[34496] C-PLACE4000326//NAM7 PROTEIN (NONSENSE-MEDIATED MRNA DECAY PROTEIN 1) (UP-FRAMESHIFT SUPPRESSOR 1).//8.10E-24//319aa//31%//P30771

[34497] C-PLACE4000369//Homo sapiens thyroid hormone receptor-associated protein complex component TRAP240 mRNA, complete cds.//1.40E-185//1135bp//67%//AF117754

[34498] C-PLACE4000401//ACETYL-COENZYME A SYNTHETASE (EC 6.2.1.1) (ACETATE-COA LIGASE) (ACYL- ACTIVATING ENZYME).//7.20E-22//54aa//62%//Q01576

[34499] C-PLACE4000431//H. sapiens gene for U5 snRNP-specific 200 kD protein.//0//5142bp//90%//Z70200

[34500] C-PLACE4000450//Homo sapiens BAZ2A mRNA for bromodomain adjacent to zinc finger domain 2A, complete cds.//0//5709bp//96%//AB032254

[34501] C-PLACE4000489//PROTEIN GRAINY-HEAD (DNA-BINDING PROTEIN ELF-1) (ELEMENT I-BINDING ACTIVITY) (TRANSCRIPTION FACTOR NTF-1).//5.70E-60//254aa//44%//P13002

[34502] C-PLACE4000522//NEUROGENIC LOCUS NOTCH PROTEIN HOMOLOG PRECURSOR (XOTCH PROTEIN).//2.40E-191//828aa//48%//P21783

[34503] C-PLACE4000548//GLUCOAMYLASE S1/S2 PRECURSOR (EC 3.2.1.3) (GLUCAN 1,4-ALPHA-GLUCOSIDASE) (1,4-ALPHA-D-GLUCAN GLUCOHYDROLASE).//8.70E-13//784aa//21%//P08640

[34504] C-PLACE4000558//PROBABLE UBIQUITIN CARBOXYL-TERMINAL HYDROLASE FAF (EC 3.1.2.15) (UBIQUITIN THIOLESTERASE FAF) (UBIQUITIN-SPECIFIC PROCESSING PROTEASE FAF) (DEUBIQUITINATING ENZYME FAF) (FAT FACETS PROTEIN).//1 .50E-26//252aa//35%//P55824

[34505] C-PLACE4000581//FIBROPELLIN I PRECURSOR (EPIDERMAL GROWTH FACTOR-RELATED PROTEIN 1) (UEGF-1).//9.30E-70//226aa//52%//P10079

[34506] C-PLACE4000650//TUBERIN (TUBEROUS SCLEROSIS 2 HOMOLOG PROTEIN).//7.90E-17//201aa//34%//P49816

[34507] C-PLACE4000654//Mus musculus mRNA for ubiquitin conjugating enzyme.//0//6340bp//87%//Y 17267

[34508] C-SKNMC1000011//PUTATIVE IMPORTIN BETA-4 SUBUNIT (KARYOPHERIN BETA-4 SUBUNIT).//5 . 50E-35//431aa//29%//O060100

[34509] C-SKNMC11000013//Homo sapiens ATP-binding cassette protein M-ABC1 mRNA, nuclear gene encoding mitochondrial protein, complete cds.//0//2384bp//99%//AF047690

[34510] C-SKNMC1000046//Homo sapiens liprin-alpha3 mRNA, partial cds.//1.90E-162/1749bp//99%//AF034800

[34511] C-SKNMC1000050//CALPAIN 2, LARGE [CATALYTIC] SUBUNIT (EC 3.4.22.17) (CALCIUM-ACTIVATED NEUTRAL PROTEINASE) (CANP) (M-TYPE).//3.20E-4//187aa//98%//P17655

[34512] C-SKNMC1000091//Homo sapiens mRNA for leucine-zipper protein, complete cds.//6.10E-190//872bp//99%//AB021663

[34513] C-THYRO1000034//TRICHOHYALIN.//9.40E-10//76aa//30%//P37709

[34514] C-THYRO1000072//MYOSIN LIGHT CHAIN KINASE, SMOOTH MUSCLE AND NON-MUSCLE ISOZYMES (EC 2.7.1.117) (MLCK) [CONTAINS: TELOKIN].//3.40E-1611201aa//29%//P11799

[34515] C-THYRO1000085//PAIRED BOX PROTEIN PAX-8, ISOFORMS 8A/8B.//2.00E-72//55aa//92%//Q06710

[34516] C-THYRO1000121//Rattus norvegicus CTD-binding SR-like protein rA8 mRNA, complete cds.//0//1737bp//87%//U49055

[34517] C-THYRO1100132//Homo sapiens echinoderm microtubule-associated protein homolog HuEMAP mRNA, complete cds.//1.10E-159//824bp//95%//U97018

[34518] C-THYRO1000173//Homo sapiens AP-mu chain family member mulB (HSMUIB) mRNA, complete cds.//0//1713bp//99%//AF020797

[34519] C-THYRO1000197//Homo sapiens mRNA for poly(A)-specific ribonuclease.//0//2362bp//99%//AJ005698

[34520] C-THYRO1000242//ZINC FINGER PROTEIN 84 (ZINC FINGER PROTEIN HPF2).//5.00E-118//239aa//66%//P51523

[34521] C-THYRO1000288//Homo sapiens mRNA for Hs Ste24p, complete cds.110112161bp//99%//AB016068

[34522] C-THYRO1000327//Homo sapiens autocrine motility factor receptor (AMFR) mRNA, complete cds.110//1567bp//99%//AF124145

[34523] C-THYRO1000343//ATROPHIN-1 (DENTATORUBRAL-PALLIDOLUYSIAN ATROPHY PROTEIN).//4.90E-06//280aa//31%//P54259

[34524] C-THYRO1000358//SELENIUM-BINDING LIVER PROTEIN.//2.30E-229//237aa//79%//P17563

[34525] C-THYRO1000394//Homo sapiens peroxisomal membrane protein PMP 24 mRNA, complete cds.//1 .20E-299//1325bp//99%//AF072864

[34526] C-THYRO1000395//Homo sapiens actin-binding protein (IPP) mRNA, complete cds.//0//2092bp//99%//AF156857

[34527] C-THYRO1000401//Human TcD37 homolog (HTcD37) mRNA, partial cds.//1.0E-9011430bp//99%//U67085

[34528] C-THYRO1000488//Homo sapiens HFB30 mRNA, complete cds.//0//2254bp//100%//AB022663

[34529] C-THYRO1000500//52 KD RO PROTEIN (SJOGREN SYNDROME TYPE A ANTIGEN (SS-A)) (RO(SS-A)).114.20E-98//408aa//42%//P19474

[34530] C-THYRO1000569//Mus musculus hematopoietic zinc finger protein mRNA, complete cds.//0//1557bp//91%//AF118566

[34531] C-THYRO1000585//Homo sapiens protein associated with Myc mRNA, complete cds.//0//1901bp//99%//AF075587

[34532] C-THYRO1000605//Homo sapiens histone acetyltransferase (HBOa) mRNA, complete cds.110113080bp//99%//AF140360

[34533] C-THYRO1000662//Homo sapiens XPV mRNA for DNA polymerase eta, complete cds.//0//2341bp//99%//AB024313

[34534] C-THYRO1000666//Mus musculus mRNA for kinesin like protein 9.//0//2001bp//86%//AJ132889

[34535] C-THYRO1000684//Homo sapiens BAG-family molecular chaperone regulator-S mRNA, complete cds.//0//3347bp//99%//AF095195

[34536] C-THYRO1000748//RHO-GAP HEMATOPOIETIC PROTEIN C1 (P115) (KIAA0131).//3.30E-96//335aa//52%//P98171

[34537] C-THYRO1000756//ALPHA-N-ACETYLGALACTOSAMINIDE ALPHA-2,6-SIALYLTRANSFERASE (EC 2.4.99.-) (ST6GALNACIII) (STY).//1.80E-55//243aa//42%//Q64686

[34538] C-THYRO1000783//Xenopus laevis tail-specific thyroid hormone up-regulated (gene 5) mRNA, complete cds.//2.40E-157//1656bp//70%//U37373

[34539] C-THYRO1000852//Human branched-chain amino acid aminotransferase (ECA40) mRNA, complete cds.//1.40E-137//689bp//96%//U62739

[34540] C-THYRO1000926//Homo sapiens cAMP-specific phosphodiesterase 8B (PDE8B) mRNA, partial cds.//0//2387bp//99%//AF079529

[34541] C-THYRO1000934//PYRROLINE-5-CARBOXYLATE REDUCTASE (EC 1.5.1.2) (P5CR) (P5C REDUCTASE).//7.50E-57//315aa//43% M/P32322

[34542] C-THYRO1000951//DIHYDROXYACETONE KINASE 2 (EC 2.7.1.29) (GLYCERONE KINASE).//5.00E-83//566aa//37%//P43550

[34543] C-THYRO1000983//UBIQUITIN-CONJUGATING ENZYME E2-17 KD 9 (EC 6.3.2.19) (UBIQUITIN-PROTEIN LIGASE 9) (UBIQUITIN CARRIER PROTEIN 9) (UBCAT4B).//6.30E-17//143aa/139%//P35132

[34544] C-THYRO1001003//UBIQUITIN-CONJUGATING ENZYME E2-21.2 KD (EC 6.3.2.19) (UBIQUITIN-PROTEIN LIGASE) (UBIQUITIN CARRIER PROTEIN).//5.90E-14//84aa//41%//P 52491

[34545] C-THYRO1001033//TRANSFORMATION-SENSITIVE PROTEIN IEF SSP 3521.//8.40E-12//67aa//29%//P31948

[34546] C-THYRO1001100//ZINC FINGER X-LINKED PROTEIN ZXDA (FRAGMENT).//1.20E-67//245aa//62%//P98168

[34547] C-THYRO1001120//Homo sapiens deltex (Dx) mRNA, complete cds.//1.30E-110//1947bp//65%//AF053700

[34548] C-THYRO1001134//Homo sapiens CGI-78 protein mRNA, complete cds.//0//1898bp//99%//AF151835

[34549] C-THYRO1001189//ZINC FINGER PROTEIN 91 (ZINC FFNGER PROTEIN HTF10) (HPF7).//1 .10E-200//546aa//62%//Q05481

[34550] C-THYRO1001204//Homo sapiens cathepsin Z precursor (CTSZ) gene, exons 4, 5, and 6 and complete cds; and TH1 gene partial sequence.//3.80E-100//478bp//99%//AF136276

[34551] C-THYRO1001287//MANNOSYL-OLIGOSACCHARIDE ALPHA-1,2-MANNOSIDASE (EC 3.2.1.113) (MAN(9)-ALPHA-MANNOSIDASE) (FRAGMENT).//3.40E-51//429aa//33%//P45701

[34552] C-THYRO1001313//Homo sapiens sorting nexin 11 (SNX11) mRNA, complete cds.//0//2330bp//94%//AF121861

[34553] C-THYRO1001347//Homo sapiens RAN binding protein 16 mRNA, complete cds.//2.00E-263//3101bp//68%//AF064729

[34554] C-THYRO1001374//CYTOSOLIC ACYL COENZYME A THIOESTER HYDROLASE (EC 3.1.2.2) (LONG CHAIN ACYL-COA THIOESTER HYDROLASE) (CTE-II).//1.80E-13//361aa//22%//O0154

[34555] C-THYRO1001405//PLECTIN.//6.90E-19//450aa//27%//P30427

[34556] C-THYRO1001406//PUTATIVE STEROID DEHYDROGENASE KIK-1 (EC 1.1.1.-).//1.10E-1311/219aa/181%//O70503

[34557] C-THYRO1001458//MYOSIN HEAVY CHAIN, NONMUSCLE TYPE B (CELLULAR MYOSIN HEAVY CHAIN, TYPE B) (NMMHC-B).//2.70E-171//559aa//59%//P35580

[34558] C-THYRO1100617//Homo sapiens cDNA for dihydroxyacetone phosphate acyltransferase (DAP-AT).//0//1784bp//99%//AJ002190

[34559] C-THYRO1001656//Homo sapiens Leman coiled-coil protein (LCCP) mRNA, complete cds.//4.10E-273//1947bp//82%//AF175968

[34560] C-THYRO1001671//Homo sapiens mRNA for 2′-5′ oligoadenylate synthetase 59 kDa isoform.//0//1820bp//99%//AJ225089

[34561] C-THYRO1001703//NIFR3-LIKE PROTEIN.//2.90E-32//282aa//32%//P45672

[34562] C-THYRO1001721//RING CANAL PROTEIN (KELCH PROTEIN).//9.30E-34//220aa//38%//Q04652

[34563] C-THYRO1001738//TUBULIN-TYROSINE LIGASE (EC 6.3.2.25) (TTL).//2.40E-20//217aa//30%//P38584

[34564] C-THYRO1001809//MYOCYTE NUCLEAR FACTOR (MNF).//1.40E-74//158aa//89%//P42128

[34565] C-Y79AA1000013//Mus musculus RING finger protein AO7 mRNA, complete cds.//8.90E-205//1435bp//81% AF 171060

[34566] C-Y79AA1000033//Homo sapiens CARD4 mRNA, complete cds.//0//2929bp//96%//AF126484

[34567] C-Y79AA1000037//DNA-BINDING PROTEIN BMI-1.11/2.40E-30//180aa//60%//P25916

[34568] C-Y79AA1000059//Homo sapiens aryl-hydrocarbon interacting protein-like 1 (AIPLI) gene, complete cds.11011980bp//96%//AF180472

[34569] C-Y79AA1000181//Homo sapiens CGI-01 protein mRNA, complete cds.//0//1858bp//99%//AF132936

[34570] C-Y79AA1000214//Homo sapiens histone H2A.F/Z variant (H2AV) mRNA, complete cds.//7.10E-7 I //345bp//100%//AF081192

[34571] C-Y79AA1000231//Homo sapiens nucleolar protein NOP5/NOP58 mRNA, complete cds.//1011515bp//99%//AF123534

[34572] C-Y79AA1000268//Mus musculus Nip21 mRNA, complete cds.//2.10E-5011648bp//64%//AF035207

[34573] C-Y79AA1000313//CALPHOTIN.//0.000011//336aa//23%//Q02910

[34574] C-Y79AA1000328//SEL-10 PROTEIN.//0.000000067//219aa//25%//Q93794

[34575] C-Y79AA1000342//Homo sapiens Ciz1 mRNA, complete cds.//0//2644bp//81%//AB030835

[34576] C-Y79AA1000346//Homo sapiens nonclathrin coat protein gamma2-COP mRNA, complete cds.//0//2520bp//99%//AF157833

[34577] C-Y79AA1000349//M. musculus Spnr mRNA for RNA binding protein.//0//2048bp//93%//X84692

[34578] C-Y79AA1000368//REDUCED VIABILITY UPON STARVATION PROTEIN 161.//4.00E-20//261aa//27%//P25343

[34579] C-Y79AA1000469//Mus musculus ancient ubiquitous 46 kDa protein AUP1 precursor (Aup1) mRNA, complete cds.//8.30E-252//1207bp//85%//U41736

[34580] C-Y79AA1000540//CELL POLARITY PROTEIN TEA1.//2.10E-12//211aa//33%//P87061

[34581] C-Y79AA1000560//ALPHA-ADAPTIN C (CLATHRIN ASSEMBLY PROTEIN COMPLEX 2 ALPHA-C LARGE CHAIN) (100 KD COATED VESICLE PROTEIN C) (PLASMA MEMBRANE ADAPTOR HA2/AP2 ADAPTIN ALPHA C SUBUNIT).//0//652aa//98%//P17427

[34582] C-Y79AA1000589//32.3 KD PROTEIN IN CWP1-MBR1 INTERGENIC REGION.//2.40E-27//216aa//34%//P28320

[34583] C-Y79AA1000627//Homo sapiens zinc finger protein (ZF5128) mRNA, complete cds.//2.00E-287//2031bp//82%//AF060503

[34584] C-Y79AA1000705//M. musculus mRNA of enhancer-trap-locus 1 .//5.80E-25411477bp//84%//X69942

[34585] C-Y79AA1000734//Homo sapiens peroxisomal biogenesis factor (PEX11b) mRNA, complete cds.//0//1594bp//99%//AF093670

[34586] C-Y79AA1000748//Rattus norvegicus clone C42 CDK5 activator-binding protein mRNA, complete cds.//6.60E-286//1832bp//84%//AF177477

[34587] C-Y79AA1000752//PUTATIVE HETEROGENEOUS NUCLEAR RIBONUCLEOPROTEIN X (HNRNP X) (CBP).//4.90E-91//200aa//64%//Q61990

[34588] C-Y79AA1000782//CYTOSOLIC PURINE 5′-NUCLEOTIDASE (EC 3.1.3.5).//3.00E-371/469aa//27%//P49902

[34589] C-Y79AA1000784//Homo sapiens RanBP7/importin 7 mRNA, complete cds.//1.10E-236//1076bp//99%//AF098799

[34590] C-Y79AA1000794//Homo sapiens actin-associated protein 2E4/kaptin (2E4) mRNA, 2E4-1 allele, complete cds.//0//1610bp//99%//AF105369

[34591] C-Y79AA1000800//Homo sapiens putative secreted protein (ZSIG11) mRNA, complete cds.//1.60E-284//288bp//99%//AF072733

[34592] C-Y79AA1000833//TUBULIN ALPHA-1 CHAIN.//5.00E-173//220aa//79%//P05209

[34593] C-Y79AA1000962//MYOSIN HEAVY CHAIN, NON-MUSCLE (ZIPPER PROTEIN) (MYOSIN II).//4.20E-17//430aa//27%//Q99323

[34594] C-Y79AA1000966//Homo sapiens COP9 complex subunit 4 mRNA, complete cds.//0//1586bp//99%//AF100757

[34595] C-Y79AA1000968//Rattus norvegicus initiation factor eIF-2B gamma subunit (eIF-2B gamma) mRNA, complete cds.//3.90E-248//1468bp//87%//U38253

[34596] C-Y79AA1000985//Human centrosomal protein kendrin mRNA, complete cds.//4.70E-151//985bp//87%//U52962

[34597] C-Y79AA1001048//ACYL-COA DEHYDROGENASE, VERY-LONG-CHAIN SPECIFIC PRECURSOR (EC 1.3.99.-) (VLCAD).//3.10E-138//583aa//47%//P45953

[34598] C-Y79AA1001211//Homo sapiens origin recognition complex subunit 6 (ORC6) mRNA, complete cds.//0//1435bp//99%//AF139658

[34599] C-Y79AA1001233//ESTRADIOL 17 BETA-DEHYDROGENASE I (EC 1.1.1.62) (17-BETA-HSD 1) (17-BETA-HYDROXYSTEROID DEHYDROGENASE 1).//7.70E-50//228aa//42%//P51657

[34600] C-Y79AA1001236//Homo sapiens cell division protein mRNA, complete cds.//0//1612bp//99%//AF063015

[34601] C-Y79AA1001299//Homo sapiens mRNA for integrase interactor lb protein (INII B).//0//996bp//99%//AJ011738

[34602] C-Y79AA1001312//ZINC FINGER PROTEIN MLZ-4 (ZINC FINGER PROTEIN 46).//0.000000023//193aa//30%//Q03309

[34603] C-Y79AA1001323//Mus musculus mRNA for GSG1, complete cds.//3.30E-172//1171bp//83%//D87325

[34604] C-Y79AA1001384//Homo sapiens very large G-protein coupled receptor-1 (VLGR1) mRNA, complete cds.//0//4708bp//99%//AF055084

[34605] C-Y79AA1001391//HOMEOBOX PROTEIN HOX-A13 (HOX-1J).//1.20E-58//178aa//66%//P31271

[34606] C-Y79AA1001394//CELL DIVISION PROTEIN FTSH HOMOLOG (EC 3.4.24.-).//1.20E-13//230aa//32%//O83746

[34607] C-Y79AA1001402//Homo sapiens paraneoplastic cancer-testis-brain antigen (MA4) mRNA, partial cds.//8.50E-65//784bp//62%//AF083115

[34608] C-Y79AA1001493//UBIQUITIN-CONJUGATING ENZYME E2-17 KD 9 (EC 6.3.2.19) (UBIQUITIN-PROTEIN LIGASE 9) (UBIQUITIN CARRIER PROTEIN 9) (UBCAT4B).//3.80E-18//151aa//38%//P35132

[34609] C-Y79AA1001533//Mouse mRNA for RNA polymerase I associated factor (PAF53), complete cds.//4.50E-193//1333bp//80%//D14336

[34610] C-Y79AA1001548//PHOSPHATIDYLINOSITOL 4-KINASE ALPHA (EC 2.7.1.67) (PI4-KINASE) (PTDINS-4-KINASE) (PI4K-ALPHA).//7.50E-76//85aa//90%//P42356

[34611] C-Y79AA1001581//ACETYL-COENZYME A SYNTHETASE (EC 6.2.1.1) (ACETATE-COA LIGASE) (ACYL- ACTIVATING ENZYME).//1.90E-40//482aa//27%//P27550

[34612] C-Y79AA1001594//HYALURONAN-MEDIATED MOTILITY RECEPTOR (HYALURONIC ACID RECEPTOR).//2 .50E-14//410aa//24%//Q00547

[34613] C-Y79AA1001603//POLYPEPTIDE N-ACETYLGALACTOSAMINYLTRANSFERASE (EC 2.4.1.41) (PROTEIN- UDP ACETYLGALACTOSAMINYLTRANSFERASE) (UDP-GALNAC:POLYPEPTIDE, N- ACETYLGALACTOSAMINYLTRANSFERASE) (GALNAC-TI).111 .70E-84//313aa//48%//Q07537

[34614] C-Y79AA1001613//ZINC FINGER PROTEIN 132.//3.80E-91 /209aa//41%//P52740

[34615] C-Y79AA1001679//Homo sapiens lambda-crystallin mRNA, complete cds.//3.4e-310//430bp//98%//AF077049

[34616] C-Y79AA1001692//Mus musculus strain C57BL/J germ cell-less protein (Gcd) mRNA, complete cds.//1 .40E-78//227aa//40%//Q01820

[34617] C-Y79AA1001705//Homo sapiens p53 regulated PA26-T2 nuclear protein (PA26) mRNA, complete cds.//3.40E-47//626bp//68%//AF033120

[34618] C-Y79AA1001711//Human 60-kdal ribonucleoprotein (Ro) mRNA, complete cds.//1.20E-258//1185bp//99%//J04137

[34619] C-Y79AA1001827//Homo sapiens mammalian inositol hexakisphosphate kinase 2 (IP6K2) mRNA, complete cds.//0//1689bp//98%//AF177145

[34620] C-Y79AA1001866//Homo sapiens zinc finger protein ZNF180 (ZNF180) mRNA, complete cds.110112927bp//97%//AF192913

[34621] C-Y79AA1001874//OX40L RECEPTOR PRECURSOR (ACT35 ANTIGEN) (TAX-TRANSCRIPTIONALLY ACTIVATED GLYCOPROTEIN 1 RECEPTOR) (CD134 ANTIGEN).//4.50E-08//135aa//31%//P43489

[34622] C-Y79AA1001875//RAS-RELATED PROTEIN RAB-7.//9.40E-12//134aa//97%//P51149

[34623] C-Y79AA1001923//Homo sapiens F-box protein Fbx22 (FBX22) gene, partial cds.//7.10E-5211279bp//97%//AF174602

[34624] C-Y79AA1001963//PUTATIVE PRE-MRNA SPLICING FACTOR ATP-DEPENDENT RNA HELICASE SPAC 10F6.02C.//1.00E-10//194aa//47%//O42643

[34625] C-Y79AA1002027//UBIQUITIN-CONJUGATING ENZYME E2-18 KD (EC 6.3.2.19) (UBIQUITIN- PROTEIN LIGASE) (UBIQUITIN CARRIER PROTEIN) (PM42).//9.90E-39//43aa//52%//P42743

[34626] C-Y79AA1002083//H. sapiens mRNA for MUF1 protein.//5.00E-163//752bp//99%//X86018

[34627] C-Y79AA1002103//ZINC FINGER PROTEIN ZFP-36 (FRAGMENT).//3.00E-257//549aa//76%//P 16415

[34628] C-Y79AA1002139//DNAJ PROTEIN HOMOLOG 1 (DROJ1).//9.00E-17//20aa//45%//Q24133

[34629] C-Y79AA1002204//COMPLEXIN 2 (SYNAPHIN 1) (921-L).//7.50E-09//1131aa//35%//Q13329

[34630] C-Y79AA1002208//ANKYRIN.//8.10E-34//188aa//38%//Q02357

[34631] C-Y79AA1002209//TYROSYL-TRNA SYNTHETASE (EC 6.1.1.1) (TYROSINE-TRNA LIGASE) (TYRRS).//1.60E-72//437aa//39%//P00952

[34632] C-Y79AA1002210//TUMOR NECROSIS FACTOR, ALPHA-INDUCED PROTEIN 1, ENDOTHELIAL (B 12 PROTEIN).//0.0000018//40aa//25%//Q13829

[34633] C-Y79AA1002211//PHOSPHATIDYLETHANOLAMINE-BINDING PROTEIN HOMOLOG F40A3.3./11 .70E-17//146aa//35%//O16264

[34634] C-Y79AA1002229//DNA CROSS-LINK REPAIR PROTEIN PS02/SNM1.//7.10E-17//213aa//31%//P30620

[34635] C-Y79AA1002246//SYNAPTOTAGMIN V.//1.60E-28//286aa//32%//O00445

[34636] C-Y79AA1002258//Homo sapiens mRNA for HIPIR, complete cds.11//02106bp//99%//AB013384

[34637] C-Y79AA1002307//Homo sapiens astrotactin2 (ASTN2) mRNA, complete cds.//0//1209bp//99%//AF116574

[34638] C-Y79AA1002311//R. norvegicus mRNA for cytosolic resiniferatoxin-binding protein.//2.90E-186//130bp//82%//X67877

[34639] C-Y79AA1002361//Rattus norvegicus mRNA for protein phosphatase 1 (GL-subunit).//6.90E-140//966bp//82%//Y18208

[34640] C-Y79AA1002399//Homo sapiens mRNA for sperm protein.//0//1163bp//95%//X91879

[34641] C-Y79AA1002416//Mus musculus CTP synthetase homolog (CTPSH) mRNA, complete cds.//3.9e-317//902bp//86%//U49385

[34642] C-Y79AA1002431//TRANSDUCIN-LIKE ENHANCER PROTEIN 2 (ESG2).//9.80E-62//318aa//35%//Q04725

[34643] C-Y79AA1002433//Homo sapiens chromatin-specific transcription elongation factor FACT 140 kDa subunit mRNA, complete cds.//0//1545bp//96%//AF152961

[34644] C-Y79AA1002472//ZINC FINGER PROTEIN 91 (ZINC FINGER PROTEIN HTFI0) (HPF7).//1.50E-136//472aa//49%//Q05481

[34645] C-Y79AA1002482//ZINC FINGER PROTEIN 91 (ZINC FINGER PROTEIN HTF 10) (HPF7).//2.70E-137//340aa//51%//Q05481

[34646] C-Y79AA1002487//Homo sapiens chromosome 5 F-box protein Fbx4 (FBX4) mRNA, complete cds.//7.3e-311//444bp//98%//AF129534

LENGTHY TABLE
The patent application contains a lengthy table section. A copy of the table is available in electronic form from the USPTO web site (http://seqdata.uspto.gov/?pageRequest=docDetail&DocID=US20070105122A1). An electronic copy of the table will also be available from the USPTO upon request and payment of the fee set forth in 37 CFR 1.19(b)(3).

What is claimed is:

1. Use of an oligonucleotide as a primer for synthesizing the polynucleotide comprising the nucleotide sequence set forth in any one of SEQ ID NOs: 1-5547 and SEQ ID NOs: 16111-16164, or the complementary strand thereof, wherein said oligonucleotide is complementary to said polynucleotide or the complementary strand thereof and comprises at least 15 nucleotides.

2. A primer set for synthesizing polynucleotides, the primer set comprising an oligo-dT primer and an oligonucleotide complementary to the complementary strand of the polynucleotide comprising the nucleotide sequence set forth in any one of SEQ ID NOs: 1-5547 and SEQ ID NOs: 16111-16164, wherein said oligonucleotide comprises at least 15 nucleotides.

3. A primer set for synthesizing polynucleotides, the primer set comprising a combination of an oligonucleotide comprising a nucleotide sequence complementary to the complementary strand of the polynucleotide comprising a 5′-end nucleotide sequence and an oligonucleotide comprising a nucleotide sequence complementary to the polynucleotide comprising a 3′-end nucleotide sequence, wherein said oligonucleotides comprise at least 15 nucleotides and wherein said combination of 5′-end nucleotide sequence/3′-end nucleotide sequence is selected from the group consisting of:
SEQ ID NO: 1/SEQ ID NO: 5548, SEQ ID NO: 4/SEQ ID NO: 5549, SEQ ID NO: 5/SEQ ID NO: 5550, SEQ ID NO: 6/SEQ ID NO: 5551, SEQ ID NO: 7/SEQ ID NO: 5552, SEQ ID NO: 8/SEQ ID NO: 5553, SEQ ID NO: 9/SEQ ID NO: 5554, SEQ ID NO: 10/SEQ ID NO: 5555, SEQ ID NO: 11/SEQ ID NO: 5556, SEQ ID NO: 12/SEQ ID NO: 5557, SEQ ID NO: 13/SEQ ID NO: 5558, SEQ ID NO: 14/SEQ ID NO: 5559, SEQ ID NO: 15/SEQ ID NO: 5560, SEQ ID NO: 16/SEQ ID NO: 5561, SEQ ID NO: 17/SEQ ID NO: 5562, SEQ ID NO: 18/SEQ ID NO: 5563, SEQ ID NO: 19/SEQ ID NO: 5564, SEQ ID NO: 20/SEQ ID NO: 5565, SEQ ID NO: 21/SEQ ID NO: 5566, SEQ ID NO: 22/SEQ ID NO: 5567, SEQ ID NO: 23/SEQ ID NO: 5568, SEQ ID NO: 24/SEQ ID NO: 5569, SEQ ID NO: 25/SEQ ID NO: 5570, SEQ ID NO: 26/SEQ ID NO: 5571, SEQ ID NO: 27/SEQ ID NO: 5572, SEQ ID NO: 28/SEQ ID NO: 5573, SEQ ID NO: 29/SEQ ID NO: 5574, SEQ ID NO: 30/SEQ ID NO: 5575, SEQ ID NO: 31/SEQ ID NO: 5576, SEQ ID NO: 32/SEQ ID NO: 5577, SEQ ID NO: 33/SEQ ID NO: 5578, SEQ ID NO: 34/SEQ ID NO: 5579, SEQ ID NO: 35/SEQ ID NO: 5580, SEQ ID NO: 37/SEQ ID NO: 5581, SEQ ID NO: 38/SEQ ID NO: 5582, SEQ ID NO: 39/SEQ ID NO: 5583, SEQ ID NO: 40/SEQ ID NO: 5584, SEQ ID NO: 42/SEQ ID NO: 5585, SEQ ID NO: 43/SEQ ID NO: 5586, SEQ ID NO: 44/SEQ ID NO: 5587, SEQ ID NO: 45/SEQ ID NO: 5588, SEQ ID NO: 46/SEQ ID NO: 5589, SEQ ID NO: 47/SEQ ID NO: 5590, SEQ ID NO: 48/SEQ ID NO: 5591, SEQ ID NO: 49/SEQ ID NO: 5592, SEQ ID NO: 50/SEQ ID NO: 5593, SEQ ID NO: 51/SEQ ID NO: 5594, SEQ ID NO: 52/SEQ ID NO: 5595, SEQ ID NO: 53/SEQ ID NO: 5596, SEQ ID NO: 54/SEQ ID NO: 5597, SEQ ID NO: 55/SEQ ID NO: 5598, SEQ ID NO: 56/SEQ ID NO: 5599, SEQ ID NO: 57/SEQ ID NO: 5600, SEQ ID NO: 58/SEQ ID NO: 5601, SEQ ID NO: 59/SEQ ID NO: 5602, SEQ ID NO: 60/SEQ ID NO: 5603, SEQ ID NO: 61/SEQ ID NO: 5604, SEQ ID NO: 62/SEQ ID NO: 5605, SEQ ID NO: 63/SEQ ID NO: 5606, SEQ ID NO: 65/SEQ ID NO: 5607, SEQ ID NO: 66/SEQ ID NO: 5608, SEQ ID NO: 67/SEQ ID NO: 5609, SEQ ID NO: 68/SEQ ID NO: 5610, SEQ ID NO: 69/SEQ ID NO: 5611, SEQ ID NO: 70/SEQ ID NO: 5612, SEQ ID NO: 71/SEQ ID NO: 5613, SEQ ID NO: 72/SEQ ID NO: 5614, SEQ ID NO: 74/SEQ ID NO: 5615, SEQ ID NO: 76/SEQ ID NO: 5616, SEQ ID NO: 77/SEQ ID NO: 5617, SEQ ID NO: 78/SEQ ID NO: 5618, SEQ ID NO: 79/SEQ ID NO: 5619, SEQ ID NO: 80/SEQ ID NO: 5620, SEQ ID NO: 81/SEQ ID NO: 5621, SEQ ID NO: 82/SEQ ID NO: 5622, SEQ ID NO: 83/SEQ ID NO: 5623, SEQ ID NO: 84/SEQ ID NO: 5624, SEQ ID NO: 85/SEQ ID NO: 5625, SEQ ID NO: 86/SEQ ID NO: 5626, SEQ ID NO: 87/SEQ ID NO: 5627, SEQ ID NO: 88/SEQ ID NO: 5628, SEQ ID NO: 89/SEQ ID NO: 5629, SEQ ID NO: 90/SEQ ID NO: 5630, SEQ ID NO: 91/SEQ ID NO: 5631, SEQ ID NO: 92/SEQ ID NO: 5632, SEQ ID NO: 93/SEQ ID NO: 5633, SEQ ID NO: 94/SEQ ID NO: 5634, SEQ ID NO: 95/SEQ ID NO: 5635, SEQ ID NO: 96/SEQ ID NO: 5636, SEQ ID NO: 97/SEQ ID NO: 5637, SEQ ID NO: 98/SEQ ID NO: 5638, SEQ ID NO: 99/SEQ ID NO: 5639, SEQ ID NO: 100/SEQ ID NO: 5640, SEQ ID NO: 101/SEQ ID NO: 5641, SEQ ID NO: 102/SEQ ID NO: 5642, SEQ ID NO: 103/SEQ ID NO: 5643, SEQ ID NO: 104/SEQ ID NO: 5644, SEQ ID NO: 105/SEQ ID NO: 5645, SEQ ID NO: 106/SEQ ID NO: 5646, SEQ ID NO: 107/SEQ ID NO: 5647,
SEQ ID NO: 108/SEQ ID NO: 5648, SEQ ID NO: 109/SEQ ID NO: 5649, SEQ ID NO: 110/SEQ ID NO: 5650, SEQ ID NO: 111/SEQ ID NO: 5651, SEQ ID NO: 112/SEQ ID NO: 5652, SEQ ID NO: 113/SEQ ID NO: 5653, SEQ ID NO: 114/SEQ ID NO: 5654, SEQ ID NO: 115/SEQ ID NO: 5655, SEQ ID NO: 116/SEQ ID NO: 5656, SEQ ID NO: 117/SEQ ID NO: 5657, SEQ ID NO: 118/SEQ ID NO: 5658, SEQ ID NO: 119/SEQ ID NO: 5659, SEQ ID NO: 120/SEQ ID NO: 5660, SEQ ID NO: 121/SEQ ID NO: 5661, SEQ ID NO: 122/SEQ ID NO: 5662, SEQ ID NO: 123/SEQ ID NO: 5663, SEQ ID NO: 124/SEQ ID NO: 5664, SEQ ID NO: 125/SEQ ID NO: 5665, SEQ ID NO: 126/SEQ ID NO: 5666, SEQ ID NO: 127/SEQ ID NO: 5667, SEQ ID NO: 128/SEQ ID NO: 5668, SEQ ID NO: 129/SEQ ID NO: 5669, SEQ ID NO: 130/SEQ ID NO: 5670, SEQ ID NO: 131/SEQ ID NO: 5671, SEQ ID NO: 132/SEQ ID NO: 5672, SEQ ID NO: 133/SEQ ID NO: 5673, SEQ ID NO: 134/SEQ ID NO: 5674, SEQ ID NO: 135/SEQ ID NO: 5675, SEQ ID NO: 136/SEQ ID NO: 5676, SEQ ID NO: 137/SEQ ID NO: 5677, SEQ ID NO: 138/SEQ ID NO: 5678, SEQ ID NO: 139/SEQ ID NO: 5679, SEQ ID NO: 140/SEQ ID NO: 5680, SEQ ID NO: 141/SEQ ID NO: 5681, SEQ ID NO: 142/SEQ ID NO: 5682, SEQ ID NO: 143/SEQ ID NO: 5683, SEQ ID NO: 144/SEQ ID NO: 5684, SEQ ID NO: 145/SEQ ID NO: 5685, SEQ ID NO: 146/SEQ ID NO: 5686, SEQ ID NO: 147/SEQ ID NO: 5687, SEQ ID NO: 148/SEQ ID NO: 5688, SEQ ID NO: 149/SEQ ID NO: 5689, SEQ ID NO: 150/SEQ ID NO: 5690, SEQ ID NO: 151/SEQ ID NO: 5691, SEQ ID NO: 153/SEQ ID NO: 5692, SEQ ID NO: 154/SEQ ID NO: 5693, SEQ ID NO: 155/SEQ ID NO: 5694, SEQ ID NO: 156/SEQ ID NO: 5695, SEQ ID NO: 157/SEQ ID NO: 5696, SEQ ID NO: 158/SEQ ID NO: 5697, SEQ ID NO: 159/SEQ ID NO: 5698, SEQ ID NO: 160/SEQ ID NO: 5699, SEQ ID NO: 161/SEQ ID NO: 5700, SEQ ID NO: 162/SEQ ID NO: 5701, SEQ ID NO: 163/SEQ ID NO: 5702, SEQ ID NO: 164/SEQ ID NO: 5703, SEQ ID NO: 165/SEQ ID NO: 5704, SEQ ID NO: 166/SEQ ID NO: 5705, SEQ ID NO: 167/SEQ ID NO: 5706, SEQ ID NO: 168/SEQ ID NO: 5707, SEQ ID NO: 169/SEQ ID NO: 5708, SEQ ID NO: 170/SEQ ID NO: 5709, SEQ ID NO: 171/SEQ ID NO: 5710, SEQ ID NO: 173/SEQ ID NO: 5711,SEQ ID NO: 174/SEQ ID NO: 5712, SEQ ID NO: 175/SEQ ID NO: 5713, SEQ ID NO: 176/SEQ ID NO: 5714, SEQ ID NO: 177/SEQ ID NO: 5715, SEQ ID NO: 178/SEQ ID NO: 5716, SEQ ID NO: 179/SEQ ID NO: 5717, SEQ ID NO: 180/SEQ ID NO: 5718, SEQ ID NO: 181/SEQ ID NO: 5719, SEQ ID NO: 182/SEQ ID NO: 5720, SEQ ID NO: 183/SEQ ID NO: 5721, SEQ ID NO: 184/SEQ ID NO: 5722, SEQ ID NO: 185/SEQ ID NO: 5723, SEQ ID NO: 186/SEQ ID NO: 5724, SEQ ID NO: 187/SEQ ID NO: 5725, SEQ ID NO: 188/SEQ ID NO: 5726, SEQ ID NO: 189/SEQ ID NO: 5727, SEQ ID NO: 190/SEQ ID NO: 5728, SEQ ID NO: 191/SEQ ID NO: 5729, SEQ ID NO: 192/SEQ ID NO: 5730, SEQ ID NO: 193/SEQ ID NO: 5731, SEQ ID NO: 194/SEQ ID NO: 5732, SEQ ID NO: 195/SEQ ID NO: 5733, SEQ ID NO: 196/SEQ ID NO: 5734, SEQ ID NO: 197/SEQ ID NO: 5735, SEQ ID NO: 198/SEQ ID NO: 5736, SEQ ID NO: 199/SEQ ID NO: 5737, SEQ ID NO: 200/SEQ ID NO: 5738, SEQ ID NO: 201/SEQ ID NO: 5739, SEQ ID NO: 202/SEQ ID NO: 5740, SEQ ID NO: 203/SEQ ID NO: 5741, SEQ ID NO: 204/SEQ ID NO: 5742, SEQ ID NO: 205/SEQ ID NO: 5743, SEQ ID NO: 206/SEQ ID NO: 5744, SEQ ID NO: 207/SEQ ID NO: 5745, SEQ ID NO: 208/SEQ ID NO: 5746, SEQ ID NO: 209/SEQ ID NO: 5747, SEQ ID NO: 210/SEQ ID NO: 5748, SEQ ID NO: 211/SEQ ID NO: 5749, SEQ ID NO: 212/SEQ ID NO: 5750, SEQ ID NO: 213/SEQ ID NO: 5751, SEQ ID NO: 214/SEQ ID NO: 5752, SEQ ID NO: 215/SEQ ID NO: 5753, SEQ ID NO: 216/SEQ ID NO: 5754, SEQ ID NO: 217/SEQ ID NO: 5755, SEQ ID NO: 218/SEQ ID NO: 5756, SEQ ID NO: 219/SEQ ID NO: 5757, SEQ ID NO: 220/SEQ ID NO: 5758, SEQ ID NO: 221/SEQ ID NO: 5759, SEQ ID NO: 222/SEQ ID NO: 5760, SEQ ID NO: 223/SEQ ID NO: 5761, SEQ ID NO: 224/SEQ ID NO: 5762, SEQ ID NO: 225/SEQ ID NO: 5763, SEQ ID NO: 226/SEQ ID NO: 5764, SEQ ID NO: 227/SEQ ID NO: 5765, SEQ ID NO: 228/SEQ ID NO: 5766, SEQ ID NO: 229/SEQ ID NO: 5767, SEQ ID NO: 230/SEQ ID NO: 5768, SEQ ID NO: 231/SEQ ID NO: 5769, SEQ ID NO: 232/SEQ ID NO: 5770, SEQ ID NO: 233/SEQ ID NO: 5771, SEQ ID NO: 234/SEQ ID NO: 5772, SEQ ID NO: 235/SEQ ID NO: 5773, SEQ ID NO: 236/SEQ ID NO: 5774, SEQ ID NO: 238/SEQ ID NO: 5775, SEQ ID NO: 239/SEQ ID NO: 5776, SEQ ID NO: 240/SEQ ID NO: 5777, SEQ ID NO: 241/SEQ ID NO: 5778, SEQ ID NO: 242/SEQ ID NO: 5779, SEQ ID NO: 243/SEQ ID NO: 5780, SEQ ID NO: 244/SEQ ID NO: 5781, SEQ ID NO: 245/SEQ ID NO: 5782, SEQ ID NO: 246/SEQ ID NO: 5783, SEQ ID NO: 247/SEQ ID NO: 5784, SEQ ID NO: 248/SEQ ID NO: 5785, SEQ ID NO: 249/SEQ ID NO: 5786, SEQ ID NO: 250/SEQ ID NO: 5787, SEQ ID NO: 251/SEQ ID NO: 5788, SEQ ID NO: 252/SEQ ID NO: 5789, SEQ ID NO: 253/SEQ ID NO: 5790, SEQ ID NO: 254/SEQ ID NO: 5791, SEQ ID NO: 255/SEQ ID NO: 5792, SEQ ID NO: 256/SEQ ID NO: 5793, SEQ ID NO: 257/SEQ ID NO: 5794, SEQ ID NO: 258/SEQ ID NO: 5795, SEQ ID NO: 259/SEQ ID NO: 5796, SEQ ID NO: 260/SEQ ID NO: 5797, SEQ ID NO: 261/SEQ ID NO: 5798, SEQ ID NO: 262/SEQ ID NO: 5799, SEQ ID NO: 263/SEQ ID NO: 5800, SEQ ID NO: 264/SEQ ID NO: 5801, SEQ ID NO: 265/SEQ ID NO: 5802, SEQ ID NO: 266/SEQ ID NO: 5803, SEQ ID NO: 267/SEQ ID NO: 5804, SEQ ID NO: 268/SEQ ID NO: 5805, SEQ ID NO: 269/SEQ ID NO: 5806, SEQ ID NO: 270/SEQ ID NO: 5807, SEQ ID NO: 271/SEQ ID NO: 5808, SEQ ID NO: 272/SEQ ID NO: 5809, SEQ ID NO: 273/SEQ ID NO: 5810, SEQ ID NO: 274/SEQ ID NO: 5811, SEQ ID NO: 275/SEQ ID NO: 5812, SEQ ID NO: 276/SEQ ID NO: 5813, SEQ ID NO: 277/SEQ ID NO: 5814, SEQ ID NO: 278/SEQ ID NO: 5815, SEQ ID NO: 279/SEQ ID NO: 5816, SEQ ID NO: 280/SEQ ID NO: 5817, SEQ ID NO: 281/SEQ ID NO: 5818, SEQ ID NO: 282/SEQ ID NO: 5819, SEQ ID NO: 283/SEQ ID NO: 5820, SEQ ID NO: 284/SEQ ID NO: 5821, SEQ ID NO: 285/SEQ ID NO: 5822, SEQ ID NO: 286/SEQ ID NO: 5823, SEQ ID NO: 287/SEQ ID NO: 5824, SEQ ID NO: 288/SEQ ID NO: 5825, SEQ ID NO: 289/SEQ ID NO: 5826, SEQ ID NO: 290/SEQ ID NO: 5827, SEQ ID NO: 291/SEQ ID NO: 5828, SEQ ID NO: 292/SEQ ID NO: 5829, SEQ ID NO: 293/SEQ ID NO: 5830, SEQ ID NO: 294/SEQ ID NO: 5831, SEQ ID NO: 295/SEQ ID NO: 5832, SEQ ID NO: 296/SEQ ID NO: 5833, SEQ ID NO: 297/SEQ ID NO: 5834, SEQ ID NO: 298/SEQ ID NO: 5835, SEQ ID NO: 299/SEQ ID NO: 5836, SEQ ID NO: 300/SEQ ID NO: 5837, SEQ ID NO: 301/SEQ ID NO: 5838, SEQ ID NO: 302/SEQ ID NO: 5839, SEQ ID NO: 303/SEQ ID NO: 5840, SEQ ID NO: 304/SEQ ID NO: 5841, SEQ ID NO: 305/SEQ ID NO: 5842, SEQ ID NO: 306/SEQ ID NO: 5843, SEQ ID NO: 307/SEQ ID NO: 5844, SEQ ID NO: 308/SEQ ID NO: 5845, SEQ ID NO: 309/SEQ ID NO: 5846, SEQ ID NO: 310/SEQ ID NO: 5847, SEQ ID NO: 311/SEQ ID NO: 5848, SEQ ID NO: 312/SEQ ID NO: 5849, SEQ ID NO: 313/SEQ ID NO: 5850, SEQ ID NO: 314/SEQ ID NO: 5851, SEQ ID NO: 315/SEQ ID NO: 5852, SEQ ID NO: 316/SEQ ID NO: 5853, SEQ ID NO: 317/SEQ ID NO: 5854, SEQ ID NO: 318/SEQ ID NO: 5855, SEQ ID NO: 319/SEQ ID NO: 5856, SEQ ID NO: 320/SEQ ID NO: 5857, SEQ ID NO: 321/SEQ ID NO: 5858, SEQ ID NO: 322/SEQ ID NO: 5859, SEQ ID NO: 323/SEQ ID NO: 5860, SEQ ID NO: 324/SEQ ID NO: 5861, SEQ ID NO: 325/SEQ ID NO: 5862, SEQ ID NO: 326 t SEQ ID NO: 5863, SEQ ID NO: 327/SEQ ID NO: 5864, SEQ ID NO: 328/SEQ ID NO: 5865, SEQ ID NO: 329/SEQ ID NO: 5866, SEQ ID NO: 330/SEQ ID NO: 5867, SEQ ID NO: 331/SEQ ID NO: 5868, SEQ ID NO: 332/SEQ ID NO: 5869, SEQ ID NO: 334/SEQ ID NO: 5870, SEQ ID NO: 335/SEQ ID NO: 5871, SEQ ID NO: 337/SEQ ID NO: 5872, SEQ ID NO: 338/SEQ ID NO: 5873, SEQ ID NO: 339/SEQ ID NO: 5874, SEQ ID NO: 340/SEQ ID NO: 5875, SEQ ID NO: 341/SEQ ID NO: 5876, SEQ ID NO: 342/SEQ ID NO: 5877, SEQ ID NO: 343/SEQ ID NO: 5878, SEQ ID NO: 344/SEQ ID NO: 5879, SEQ ID NO: 345/SEQ ID NO: 5880, SEQ ID NO: 346/SEQ ID NO: 5881, SEQ ID NO: 347/SEQ ID NO: 5882, SEQ ID NO: 348/SEQ ID NO: 5883, SEQ ID NO: 349/SEQ ID NO: 5884, SEQ ID NO: 350/SEQ ID NO: 5885, SEQ ID NO: 351/SEQ ID NO: 5886, SEQ ID NO: 352/SEQ ID NO: 5887, SEQ ID NO: 353/SEQ ID NO: 5888, SEQ ID NO: 354/SEQ ID NO: 5889, SEQ ID NO: 356/SEQ ID NO: 5890, SEQ ID NO: 357/SEQ ID NO: 5891, SEQ ID NO: 358/SEQ ID NO: 5892, SEQ ID NO: 359/SEQ ID NO: 5893, SEQ ID NO: 360/SEQ ID NO: 5894, SEQ ID NO: 361/SEQ ID NO: 5895, SEQ ID NO: 362/SEQ ID NO: 5896, SEQ ID NO: 363/SEQ ID NO: 5897, SEQ ID NO: 364/SEQ ID NO: 5898, SEQ ID NO: 365/SEQ ID NO: 5899, SEQ ID NO: 366/SEQ ID NO: 5900, SEQ ID NO: 367/SEQ ID NO: 5901, SEQ ID NO: 368/SEQ ID NO: 5902, SEQ ID NO: 369/SEQ ID NO: 5903, SEQ ID NO: 370/SEQ ID NO: 5904, SEQ ID NO: 371/SEQ ID NO: 5905, SEQ ID NO: 372/SEQ ID NO: 5906, SEQ ID NO: 373/SEQ ID NO: 5907, SEQ ID NO: 374/SEQ ID NO: 5908, SEQ ID NO: 375/SEQ ID NO: 5909, SEQ ID NO: 377/SEQ ID NO: 5910, SEQ ID NO: 378/SEQ ID NO: 5911, SEQ ID NO: 379/SEQ ID NO: 5912, SEQ ID NO: 380/SEQ ID NO: 5913, SEQ ID NO: 381/SEQ ID NO: 5914, SEQ ID NO: 382/SEQ ID NO: 5915, SEQ ID NO: 383/SEQ ID NO: 5916, SEQ ID NO: 384/SEQ ID NO: 5917, SEQ ID NO: 385/SEQ ID NO: 5918, SEQ ID NO: 386/SEQ ID NO: 5919, SEQ ID NO: 387/SEQ ID NO: 5920, SEQ ID NO: 388/SEQ ID NO: 5921, SEQ ID NO: 389/SEQ ID NO: 5922, SEQ ID NO: 391/SEQ ID NO: 5923, SEQ ID NO: 392/SEQ ID NO: 5924, SEQ ID NO: 393/SEQ ID NO: 5925, SEQ ID NO: 394/SEQ ID NO: 5926, SEQ ID NO: 395/SEQ ID NO: 5927, SEQ ID NO: 396/SEQ ID NO: 5928, SEQ ID NO: 397/SEQ ID NO: 5929, SEQ ID NO: 398/SEQ ID NO: 5930, SEQ ID NO: 399/SEQ ID NO: 5931, SEQ ID NO: 400/SEQ ID NO: 5932, SEQ ID NO: 401/SEQ ID NO: 5933, SEQ ID NO: 402/SEQ ID NO: 5934, SEQ ID NO: 403/SEQ ID NO: 5935, SEQ ID NO: 404/SEQ ID NO: 5936, SEQ ID NO: 405/SEQ ID NO: 5937, SEQ ID NO: 406/SEQ ID NO: 5938, SEQ ID NO: 407/SEQ ID NO: 5939, SEQ ID NO: 409/SEQ ID NO: 5940, SEQ ID NO: 410/SEQ ID NO: 5941, SEQ ID NO: 411/SEQ ID NO: 5942, SEQ ID NO: 412/SEQ ID NO: 5943, SEQ ID NO: 413/SEQ ID NO: 5944, SEQ ID NO: 414/SEQ ID NO: 5945, SEQ ID NO: 415/SEQ ID NO: 5946, SEQ ID NO: 416/SEQ ID NO: 5947, SEQ ID NO: 417/SEQ ID NO: 5948, SEQ ID NO: 418/SEQ ID NO: 5949, SEQ ID NO: 419/SEQ ID NO: 5950, SEQ ID NO: 420/SEQ ID NO: 5951, SEQ ID NO: 421/SEQ ID NO: 5952, SEQ ID NO: 422/SEQ ID NO: 5953, SEQ ID NO: 423/SEQ ID NO: 5954, SEQ ID NO: 424/SEQ ID NO: 5955, SEQ ID NO: 425/SEQ ID NO: 5956, SEQ ID NO: 426/SEQ ID NO: 5957, SEQ ID NO: 427/SEQ ID NO: 5958, SEQ ID NO: 428/SEQ ID NO: 5959, SEQ ID NO: 429/SEQ ID NO: 5960, SEQ ID NO: 430/SEQ ID NO: 5961, SEQ ID NO: 431/SEQ ID NO: 5962, SEQ ID NO: 432/SEQ ID NO: 5963, SEQ ID NO: 433/SEQ ID NO: 5964, SEQ ID NO: 434/SEQ ID NO: 5965, SEQ ID NO: 435/SEQ ID NO: 5966, SEQ ID NO: 436/SEQ ID NO: 5967, SEQ ID NO: 437/SEQ ID NO: 5968, SEQ ID NO: 438/SEQ ID NO: 5969, SEQ ID NO: 439/SEQ ID NO: 5970, SEQ ID NO: 440/SEQ ID NO: 5971, SEQ ID NO: 441/SEQ ID NO: 5972, SEQ ID NO: 442/SEQ ID NO: 5973, SEQ ID NO: 443/SEQ ID NO: 5974, SEQ ID NO: 444/SEQ ID NO: 5975, SEQ ID NO: 445/SEQ ID NO: 5976, SEQ ID NO: 446/SEQ ID NO: 5977, SEQ ID NO: 447/SEQ ID NO: 5978, SEQ ID NO: 448/SEQ ID NO: 5979, SEQ ID NO: 449/SEQ ID NO: 5980, SEQ ID NO: 450/SEQ ID NO: 5981, SEQ ID NO: 451/SEQ ID NO: 5982, SEQ ID NO: 452/SEQ ID NO: 5983, SEQ ID NO: 453/SEQ ID NO: 5984, SEQ ID NO: 454/SEQ ID NO: 5985, SEQ ID NO: 455/SEQ ID NO: 5986, SEQ ID NO: 457/SEQ ID NO: 5987, SEQ ID NO: 458/SEQ ID NO: 5988, SEQ ID NO: 459/SEQ ID NO: 5989, SEQ ID NO: 460/SEQ ID NO: 5990, SEQ ID NO: 461/SEQ ID NO: 5991, SEQ ID NO: 462/SEQ ID NO: 5992, SEQ ID NO: 463/SEQ ID NO: 5993, SEQ ID NO: 464/SEQ ID NO: 5994, SEQ ID NO: 465/SEQ ID NO: 5995, SEQ ID NO: 466/SEQ ID NO: 5996, SEQ ID NO: 467/SEQ ID NO: 5997, SEQ ID NO: 468/SEQ ID NO: 5998, SEQ ID NO: 469/SEQ ID NO: 5999, SEQ ID NO: 470/SEQ ID NO: 6000, SEQ ID NO: 471/SEQ ID NO: 6001, SEQ ID NO: 473/SEQ ID NO: 6002, SEQ ID NO: 474/SEQ ID NO: 6003, SEQ ID NO: 475/SEQ ID NO: 6004, SEQ ID NO: 476/SEQ ID NO: 6005, SEQ ID NO: 477/SEQ ID NO: 6006, SEQ ID NO: 478/SEQ ID NO: 6007, SEQ ID NO: 479/SEQ ID NO: 6008, SEQ ID NO: 480/SEQ ID NO: 6009, SEQ ID NO: 481/SEQ ID NO: 6010, SEQ ID NO: 482/SEQ ID NO: 6011, SEQ ID NO: 483/SEQ ID NO: 6012, SEQ ID NO: 484/SEQ ID NO: 6013, SEQ ID NO: 485/SEQ ID NO: 6014, SEQ ID NO: 486/SEQ ID NO: 6015, SEQ ID NO: 487/SEQ ID NO: 6016, SEQ ID NO: 488/SEQ ID NO: 6017, SEQ ID NO: 489/SEQ ID NO: 6018, SEQ ID NO: 490/SEQ ID NO: 6019, SEQ ID NO: 492/SEQ ID NO: 6020, SEQ ID NO: 493/SEQ ID NO: 6021, SEQ ID NO: 494/SEQ ID NO: 6022, SEQ ID NO: 495/SEQ ID NO: 6023, SEQ ID NO: 497/SEQ ID NO: 6024, SEQ ID NO: 498/SEQ ID NO: 6025, SEQ ID NO: 499/SEQ ID NO: 6026, SEQ ID NO: 500/SEQ ID NO: 6027, SEQ ID NO: 501/SEQ ID NO: 6028, SEQ ID NO: 502/SEQ ID NO: 6029, SEQ ID NO: 503/SEQ ID NO: 6030, SEQ ID NO: 504/SEQ ID NO: 6031, SEQ ID NO: 505/SEQ ID NO: 6032, SEQ ID NO: 506/SEQ ID NO: 6033, SEQ ID NO: 507/SEQ ID NO: 6034, SEQ ID NO: 508/SEQ ID NO: 6035, SEQ ID NO: 509/SEQ ID NO: 6036, SEQ ID NO: 510/SEQ ID NO: 6037, SEQ ID NO: 511/SEQ ID NO: 6038, SEQ ID NO: 512/SEQ ID NO: 6039, SEQ ID NO: 513/SEQ ID NO: 6040, SEQ ID NO: 514/SEQ ID NO: 6041, SEQ ID NO: 515/SEQ ID NO: 6042, SEQ ID NO: 516/SEQ ID NO: 6043, SEQ ID NO: 517/SEQ ID NO: 6044, SEQ ID NO: 518/SEQ ID NO: 6045, SEQ ID NO: 519/SEQ ID NO: 6046, SEQ ID NO: 520/SEQ ID NO: 6047, SEQ ID NO: 521/SEQ ID NO: 6048, SEQ ID NO: 522/SEQ ID NO: 6049, SEQ ID NO: 523/SEQ ID NO: 6050, SEQ ID NO: 524/SEQ ID NO: 6051, SEQ ID NO: 525/SEQ ID NO: 6052, SEQ ID NO: 526/SEQ ID NO: 6053, SEQ ID NO: 527/SEQ ID NO: 6054, SEQ ID NO: 528/SEQ ID NO: 6055, SEQ ID NO: 529/SEQ ID NO: 6056, SEQ ID NO: 530/SEQ ID NO: 6057, SEQ ID NO: 531/SEQ ID NO: 6058, SEQ ID NO: 532/SEQ ID NO: 6059, SEQ ID NO: 533/SEQ ID NO: 6060, SEQ ID NO: 534/SEQ ID NO: 6061, SEQ ID NO: 535/SEQ ID NO: 6062, SEQ ID NO: 536/SEQ ID NO: 6063, SEQ ID NO: 537/SEQ ID NO: 6064, SEQ ID NO: 538/SEQ ID NO: 6065, SEQ ID NO: 539/SEQ ID NO: 6066, SEQ ID NO: 540/SEQ ID NO: 6067, SEQ ID NO: 541/SEQ ID NO: 6068, SEQ ID NO: 542/SEQ ID NO: 6069, SEQ ID NO: 543/SEQ ID NO: 6070, SEQ ID NO: 544/SEQ ID NO: 6071, SEQ ID NO: 545/SEQ ID NO: 6072, SEQ ID NO: 546/SEQ ID NO: 6073, SEQ ID NO: 547/SEQ ID NO: 6074, SEQ ID NO: 548/SEQ ID NO: 6075, SEQ ID NO: 549/SEQ ID NO: 6076, SEQ ID NO: 550/SEQ ID NO: 6077, SEQ ID NO: 551/SEQ ID NO: 6078, SEQ ID NO: 553/SEQ ID NO: 6079, SEQ ID NO: 554/SEQ ID NO: 6080, SEQ ID NO: 555/SEQ ID NO: 6081, SEQ ID NO: 556/SEQ ID NO: 6082, SEQ ID NO: 557/SEQ ID NO: 6083, SEQ ID NO: 558/SEQ ID NO: 6084, SEQ ID NO: 559/SEQ ID NO: 6085, SEQ ID NO: 560/SEQ ID NO: 6086, SEQ ID NO: 561/SEQ ID NO: 6087, SEQ ID NO: 562/SEQ ID NO: 6088, SEQ ID NO: 563/SEQ ID NO: 6089, SEQ ID NO: 564/SEQ ID NO: 6090, SEQ ID NO: 565/SEQ ID NO: 6091, SEQ ID NO: 566/SEQ ID NO: 6092, SEQ ID NO: 567/SEQ ID NO: 6093, SEQ ID NO: 568/SEQ ID NO: 6094, SEQ ID NO: 569/SEQ ID NO: 6095, SEQ ID NO: 570/SEQ ID NO: 6096, SEQ ID NO: 571/SEQ ID NO: 6097, SEQ ID NO: 572/SEQ ID NO: 6098, SEQ ID NO: 573/SEQ ID NO: 6099, SEQ ID NO: 574/SEQ ID NO: 6100, SEQ ID NO: 575/SEQ ID NO: 6101, SEQ ID NO: 576/SEQ ID NO: 6102, SEQ ID NO: 577/SEQ ID NO: 6103, SEQ ID NO: 578/SEQ ID NO: 6104, SEQ ID NO: 579/SEQ ID NO: 6105, SEQ ID NO: 580/SEQ ID NO: 6106, SEQ ID NO: 581/SEQ ID NO: 6107, SEQ ID NO: 582/SEQ ID NO: 6108, SEQ ID NO: 583/SEQ ID NO: 6109, SEQ ID NO: 584/SEQ ID NO: 6110, SEQ ID NO: 585/SEQ ID NO: 6111, SEQ ID NO: 586/SEQ ID NO: 6112, SEQ ID NO: 587/SEQ ID NO: 6113, SEQ ID NO: 588/SEQ ID NO: 6114, SEQ ID NO: 589/SEQ ID NO: 6115, SEQ ID NO: 590/SEQ ID NO: 6116, SEQ ID NO: 591/SEQ ID NO: 6117, SEQ ID NO: 593/SEQ ID NO: 6118, SEQ ID NO: 594/SEQ ID NO: 6119, SEQ ID NO: 595/SEQ ID NO: 6120, SEQ ID NO: 596/SEQ ID NO: 6121, SEQ ID NO: 597/SEQ ID NO: 6122, SEQ ID NO: 598/SEQ ID NO: 6123, SEQ ID NO: 599/SEQ ID NO: 6124, SEQ ID NO: 600/SEQ ID NO: 6125, SEQ ID NO: 601/SEQ ID NO: 6126, SEQ ID NO: 602/SEQ ID NO: 6127, SEQ ID NO: 603/SEQ ID NO: 6128, SEQ ID NO: 604/SEQ ID NO: 6129, SEQ ID NO: 605/SEQ ID NO: 6130, SEQ ID NO: 606/SEQ ID NO: 6131, SEQ ID NO: 607/SEQ ID NO: 6132, SEQ ID NO: 608/SEQ ID NO: 6133, SEQ ID NO: 609/SEQ ID NO: 6134, SEQ ID NO: 610/SEQ ID NO: 6135, SEQ ID NO: 611/SEQ ID NO: 6136, SEQ ID NO: 612/SEQ ID NO: 6137, SEQ ID NO: 613/SEQ ID NO: 6138, SEQ ID NO: 614/SEQ ID NO: 6139, SEQ ID NO: 615/SEQ ID NO: 6140, SEQ ID NO: 617/SEQ ID NO: 6141, SEQ ID NO: 618/SEQ ID NO: 6142, SEQ ID NO: 619/SEQ ID NO: 6143, SEQ ID NO: 620/SEQ ID NO: 6144, SEQ ID NO: 621/SEQ ID NO: 6145, SEQ ID NO: 622/SEQ ID NO: 6146, SEQ ID NO: 623/SEQ ID NO: 6147, SEQ ID NO: 624/SEQ ID NO: 6148, SEQ ID NO: 625/SEQ ID NO: 6149, SEQ ID NO: 626/SEQ ID NO: 6150, SEQ ID NO: 627/SEQ ID NO: 6151, SEQ ID NO: 628/SEQ ID NO: 6152, SEQ ID NO: 629/SEQ ID NO: 6153, SEQ ID NO: 630/SEQ ID NO: 6154, SEQ ID NO: 631/SEQ ID NO: 6155, SEQ ID NO: 632/SEQ ID NO: 6156, SEQ ID NO: 633/SEQ ID NO: 6157, SEQ ID NO: 634/SEQ ID NO: 6158, SEQ ID NO: 635/SEQ ID NO: 6159, SEQ ID NO: 636/SEQ ID NO: 6160, SEQ ID NO: 637/SEQ ID NO: 6161, SEQ ID NO: 638/SEQ ID NO: 6162, SEQ ID NO: 639/SEQ ID NO: 6163, SEQ ID NO: 640/SEQ ID NO: 6164, SEQ ID NO: 641/SEQ ID NO: 6165, SEQ ID NO: 642/SEQ ID NO: 6166, SEQ ID NO: 643/SEQ ID NO: 6167, SEQ ID NO: 644/SEQ ID NO: 6168, SEQ ID NO: 645/SEQ ID NO: 6169, SEQ ID NO: 646/SEQ ID NO: 6170, SEQ ID NO: 648/SEQ ID NO: 6171, SEQ ID NO: 649/SEQ ID NO: 6172, SEQ ID NO: 650/SEQ ID NO: 6173, SEQ ID NO: 651/SEQ ID NO: 6174, SEQ ID NO: 652/SEQ ID NO: 6175, SEQ ID NO: 653/SEQ ID NO: 6176, SEQ ID NO: 655/SEQ ID NO: 6177, SEQ ID NO: 656/SEQ ID NO: 6178, SEQ ID NO: 657/SEQ ID NO: 6179, SEQ ID NO: 658/SEQ ID NO: 6180, SEQ ID NO: 659/SEQ ID NO: 6181, SEQ ID NO: 660/SEQ ID NO: 6182, SEQ ID NO: 662/SEQ ID NO: 6183, SEQ ID NO: 663/SEQ ID NO: 6184, SEQ ID NO: 664/SEQ ID NO: 6185, SEQ ID NO: 665/SEQ ID NO: 6186, SEQ ID NO: 666/SEQ ID NO: 6187, SEQ ID NO: 667/SEQ ID NO: 6188, SEQ ID NO: 668/SEQ ID NO: 6189, SEQ ID NO: 669/SEQ ID NO: 6190, SEQ ID NO: 670/SEQ ID NO: 6191, SEQ ID NO: 671/SEQ ID NO: 6192, SEQ ID NO: 672/SEQ ID NO: 6193, SEQ ID NO: 673/SEQ ID NO: 6194, SEQ ID NO: 674/SEQ ID NO: 6195, SEQ ID NO: 675/SEQ ID NO: 6196, SEQ ID NO: 676/SEQ ID NO: 6197, SEQ ID NO: 677/SEQ ID NO: 6198, SEQ ID NO: 678/SEQ ID NO: 6199, SEQ ID NO: 679/SEQ ID NO: 6200, SEQ ID NO: 680/SEQ ID NO: 6201, SEQ ID NO: 681/SEQ ID NO: 6202, SEQ ID NO: 682/SEQ ID NO: 6203, SEQ ID NO: 683/SEQ ID NO: 6204, SEQ ID NO: 684/SEQ ID NO: 6205, SEQ ID NO: 685/SEQ ID NO: 6206, SEQ ID NO: 686/SEQ ID NO: 6207, SEQ ID NO: 687/SEQ ID NO: 6208, SEQ ID NO: 688/SEQ ID NO: 6209, SEQ ID NO: 689/SEQ ID NO: 6210, SEQ ID NO: 690/SEQ ID NO: 6211, SEQ ID NO: 691/SEQ ID NO: 6212, SEQ ID NO: 692/SEQ ID NO: 6213, SEQ ID NO: 693/SEQ ID NO: 6214, SEQ ID NO: 694/SEQ ID NO: 6215, SEQ ID NO: 695/SEQ ID NO: 6216, SEQ ID NO: 696/SEQ ID NO: 6217, SEQ ID NO: 697/SEQ ID NO: 6218, SEQ ID NO: 698/SEQ ID NO: 6219, SEQ ID NO: 699/SEQ ID NO: 6220, SEQ ID NO: 700/SEQ ID NO: 6221, SEQ ID NO: 701/SEQ ID NO: 6222, SEQ ID NO: 702/SEQ ID NO: 6223, SEQ ID NO: 703/SEQ ID NO: 6224, SEQ ID NO: 704/SEQ ID NO: 6225, SEQ ID NO: 705/SEQ ID NO: 6226, SEQ ID NO: 706/SEQ ID NO: 6227, SEQ ID NO: 707/SEQ ID NO: 6228, SEQ ID NO: 708/SEQ ID NO: 6229, SEQ ID NO: 709/SEQ ID NO: 6230, SEQ ID NO: 710/SEQ ID NO: 6231, SEQ ID NO: 711/SEQ ID NO: 6232, SEQ ID NO: 712/SEQ ID NO: 6233, SEQ ID NO: 713/SEQ ID NO: 6234, SEQ ID NO: 714/SEQ ID NO: 6235, SEQ ID NO: 715/SEQ ID NO: 6236, SEQ ID NO: 716/SEQ ID NO: 6237, SEQ ID NO: 717/SEQ ID NO: 6238, SEQ ID NO: 718/SEQ ID NO: 6239, SEQ ID NO: 719/SEQ ID NO: 6240, SEQ ID NO: 720/SEQ ID NO: 6241, SEQ ID NO: 721/SEQ ID NO: 6242, SEQ ID NO: 722/SEQ ID NO: 6243, SEQ ID NO: 723/SEQ ID NO: 6244, SEQ ID NO: 724/SEQ ID NO: 6245, SEQ ID NO: 725/SEQ ID NO: 6246, SEQ ID NO: 726/SEQ ID NO: 6247, SEQ ID NO: 727/SEQ ID NO: 6248, SEQ ID NO: 728/SEQ ID NO: 6249, SEQ ID NO: 729/SEQ ID NO: 6250, SEQ ID NO: 730/SEQ ID NO: 6251, SEQ ID NO: 731/SEQ ID NO: 6252, SEQ ID NO: 732/SEQ ID NO: 6253, SEQ ID NO: 733/SEQ ID NO: 6254, SEQ ID NO: 734/SEQ ID NO: 6255, SEQ ID NO: 735/SEQ ID NO: 6256, SEQ ID NO: 736/SEQ ID NO: 6257, SEQ ID NO: 737/SEQ ID NO: 6258, SEQ ID NO: 738/SEQ ID NO: 6259, SEQ ID NO: 739/SEQ ID NO: 6260, SEQ ID NO: 740/SEQ ID NO: 6261, SEQ ID NO: 741/SEQ ID NO: 6262, SEQ ID NO: 742/SEQ ID NO: 6263, SEQ ID NO: 743/SEQ ID NO: 6264, SEQ ID NO: 744/SEQ ID NO: 6265, SEQ ID NO: 745/SEQ ID NO: 6266, SEQ ID NO: 746/SEQ ID NO: 6267, SEQ ID NO: 747/SEQ ID NO: 6268, SEQ ID NO: 748/SEQ ID NO: 6269, SEQ ID NO: 749/SEQ ID NO: 6270, SEQ ID NO: 751/SEQ ID NO: 6271, SEQ ID NO: 752/SEQ ID NO: 6272, SEQ ID NO: 753/SEQ ID NO: 6273, SEQ ID NO: 754/SEQ ID NO: 6274, SEQ ID NO: 755/SEQ ID NO: 6275, SEQ ID NO: 756/SEQ ID NO: 6276, SEQ ID NO: 757/SEQ ID NO: 6277, SEQ ID NO: 758/SEQ ID NO: 6278, SEQ ID NO: 759/SEQ ID NO: 6279, SEQ ID NO: 760/SEQ ID NO: 6280, SEQ ID NO: 761/SEQ ID NO: 6281, SEQ ID NO: 762/SEQ ID NO: 6282, SEQ ID NO: 763/SEQ ID NO: 6283, SEQ ID NO: 764/SEQ ID NO: 6284, SEQ ID NO: 765/SEQ ID NO: 6285, SEQ ID NO: 766/SEQ ID NO: 6286, SEQ ID NO: 767/SEQ ID NO: 6287, SEQ ID NO: 769/SEQ ID NO: 6288, SEQ ID NO: 770/SEQ ID NO: 6289, SEQ ID NO: 771/SEQ ID NO: 6290, SEQ ID NO: 772/SEQ ID NO: 6291, SEQ ID NO: 773/SEQ ID NO: 6292, SEQ ID NO: 775/SEQ ID NO: 6293, SEQ ID NO: 776/SEQ ID NO: 6294, SEQ ID NO: 777/SEQ ID NO: 6295, SEQ ID NO: 778/SEQ ID NO: 6296, SEQ ID NO: 779/SEQ ID NO: 6297, SEQ ID NO: 780/SEQ ID NO: 6298, SEQ ID NO: 781/SEQ ID NO: 6299, SEQ ID NO: 782/SEQ ID NO: 6300, SEQ ID NO: 783/SEQ ID NO: 6301, SEQ ID NO: 784/SEQ ID NO: 6302, SEQ ID NO: 785/SEQ ID NO: 6303, SEQ ID NO: 786/SEQ ID NO: 6304, SEQ ID NO: 787/SEQ ID NO: 6305, SEQ ID NO: 789/SEQ ID NO: 6306, SEQ ID NO: 790/SEQ ID NO: 6307, SEQ ID NO: 791/SEQ ID NO: 6308, SEQ ID NO: 792/SEQ ID NO: 6309, SEQ ID NO: 793/SEQ ID NO: 6310, SEQ ID NO: 794/SEQ ID NO: 6311, SEQ ID NO: 796/SEQ ID NO: 6312, SEQ ID NO: 797/SEQ ID NO: 6313, SEQ ID NO: 798/SEQ ID NO: 6314, SEQ ID NO: 799/SEQ ID NO: 6315, SEQ ID NO: 800/SEQ ID NO: 6316, SEQ ID NO: 801/SEQ ID NO: 6317, SEQ ID NO: 802/SEQ ID NO: 6318, SEQ ID NO: 803/SEQ ID NO: 6319, SEQ ID NO: 804/SEQ ID NO: 6320, SEQ ID NO: 805/SEQ ID NO: 6321, SEQ ID NO: 806/SEQ ID NO: 6322, SEQ ID NO: 807/SEQ ID NO: 6323, SEQ ID NO: 808/SEQ ID NO: 6324, SEQ ID NO: 809/SEQ ID NO: 6325, SEQ ID NO: 810/SEQ ID NO: 6326, SEQ ID NO: 811/SEQ ID NO: 6327, SEQ ID NO: 812/SEQ ID NO: 6328, SEQ ID NO: 813/SEQ ID NO: 6329, SEQ ID NO: 814/SEQ ID NO: 6330, SEQ ID NO: 815/SEQ ID NO: 6331, SEQ ID NO: 816/SEQ ID NO: 6332, SEQ ID NO: 817/SEQ ID NO: 6333, SEQ ID NO: 818/SEQ ID NO: 6334, SEQ ID NO: 819/SEQ ID NO: 6335, SEQ ID NO: 820/SEQ ID NO: 6336, SEQ ID NO: 821/SEQ ID NO: 6337, SEQ ID NO: 822/SEQ ID NO: 6338, SEQ ID NO: 823/SEQ ID NO: 6339, SEQ ID NO: 824/SEQ ID NO: 6340, SEQ ID NO: 825/SEQ ID NO: 6341, SEQ ID NO: 826/SEQ ID NO: 6342, SEQ ID NO: 827/SEQ ID NO: 6343, SEQ ID NO: 828/SEQ ID NO: 6344, SEQ ID NO: 829/SEQ ID NO: 6345, SEQ ID NO: 830/SEQ ID NO: 6346, SEQ ID NO: 831/SEQ ID NO: 6347, SEQ ID NO: 832/SEQ ID NO: 6348, SEQ ID NO: 833/SEQ ID NO: 6349, SEQ ID NO: 834/SEQ ID NO: 6350, SEQ ID NO: 835/SEQ ID NO: 6351, SEQ ID NO: 836/SEQ ID NO: 6352, SEQ ID NO: 837/SEQ ID NO: 6353, SEQ ID NO: 838/SEQ ID NO: 6354, SEQ ID NO: 839/SEQ ID NO: 6355, SEQ ID NO: 840/SEQ ID NO: 6356, SEQ ID NO: 841/SEQ ID NO: 6357, SEQ ID NO: 842/SEQ ID NO: 6358, SEQ ID NO: 843/SEQ ID NO: 6359, SEQ ID NO: 844/SEQ ID NO: 6360, SEQ ID NO: 845/SEQ ID NO: 6361, SEQ ID NO: 846/SEQ ID NO: 6362, SEQ ID NO: 847/SEQ ID NO: 6363, SEQ ID NO: 848/SEQ ID NO: 6364, SEQ ID NO: 849/SEQ ID NO: 6365, SEQ ID NO: 850/SEQ ID NO: 6366, SEQ ID NO: 851/SEQ ID NO: 6367, SEQ ID NO: 852/SEQ ID NO: 6368, SEQ ID NO: 853/SEQ ID NO: 6369, SEQ ID NO: 854/SEQ ID NO: 6370, SEQ ID NO: 855/SEQ ID NO: 6371, SEQ ID NO: 856/SEQ ID NO: 6372, SEQ ID NO: 857/SEQ ID NO: 6373, SEQ ID NO: 858/SEQ ID NO: 6374, SEQ ID NO: 859/SEQ ID NO: 6375, SEQ ID NO: 860/SEQ ID NO: 6376, SEQ ID NO: 861/SEQ ID NO: 6377, SEQ ID NO: 862/SEQ ID NO: 6378, SEQ ID NO: 863/SEQ ID NO: 6379, SEQ ID NO: 864/SEQ ID NO: 6380, SEQ ID NO: 865/SEQ ID NO: 6381, SEQ ID NO: 866/SEQ ID NO: 6382, SEQ ID NO: 867/SEQ ID NO: 6383, SEQ ID NO: 868/SEQ ID NO: 6384, SEQ ID NO: 869/SEQ ID NO: 6385, SEQ ID NO: 870/SEQ ID NO: 6386, SEQ ID NO: 871/SEQ ID NO: 6387, SEQ ID NO: 872/SEQ ID NO: 6388, SEQ ID NO: 873/SEQ ID NO: 6389, SEQ ID NO: 874/SEQ ID NO: 6390, SEQ ID NO: 875/SEQ ID NO: 6391, SEQ ID NO: 876/SEQ ID NO: 6392, SEQ ID NO: 877/SEQ ID NO: 6393, SEQ ID NO: 878/SEQ ID NO: 6394, SEQ ID NO: 879/SEQ ID NO: 6395, SEQ ID NO: 880/SEQ ID NO: 6396, SEQ ID NO: 881/SEQ ID NO: 6397, SEQ ID NO: 882/SEQ ID NO: 6398, SEQ ID NO: 883/SEQ ID NO: 6399, SEQ ID NO: 884/SEQ ID NO: 6400, SEQ ID NO: 885/SEQ ID NO: 6401, SEQ ID NO: 886/SEQ ID NO: 6402, SEQ ID NO: 887/SEQ ID NO: 6403, SEQ ID NO: 888/SEQ ID NO: 6404, SEQ ID NO: 889/SEQ ID NO: 6405, SEQ ID NO: 890/SEQ ID NO: 6406, SEQ ID NO: 891/SEQ ID NO: 6407, SEQ ID NO: 892/SEQ ID NO: 6408, SEQ ID NO: 893/SEQ ID NO: 6409, SEQ ID NO: 894/SEQ ID NO: 6410, SEQ ID NO: 895/SEQ ID NO: 6411, SEQ ID NO: 896/SEQ ID NO: 6412, SEQ ID NO: 897/SEQ ID NO: 6413, SEQ ID NO: 898/SEQ ID NO: 6414, SEQ ID NO: 899/SEQ ID NO: 6415, SEQ ID NO: 900/SEQ ID NO: 6416, SEQ ID NO: 901/SEQ ID NO: 6417, SEQ ID NO: 902/SEQ ID NO: 6418, SEQ ID NO: 903/SEQ ID NO: 6419, SEQ ID NO: 904/SEQ ID NO: 6420, SEQ ID NO: 905/SEQ ID NO: 6421, SEQ ID NO: 906/SEQ ID NO: 6422, SEQ ID NO: 907/SEQ ID NO: 6423, SEQ ID NO: 908/SEQ ID NO: 6424, SEQ ID NO: 909/SEQ ID NO: 6425, SEQ ID NO: 910/SEQ ID NO: 6426, SEQ ID NO: 911/SEQ ID NO: 6427, SEQ ID NO: 912/SEQ ID NO: 6428, SEQ ID NO: 913/SEQ ID NO: 6429, SEQ ID NO: 914/SEQ ID NO: 6430, SEQ ID NO: 915/SEQ ID NO: 6431, SEQ ID NO: 916/SEQ ID NO: 6432, SEQ ID NO: 917/SEQ ID NO: 6433, SEQ ID NO: 918/SEQ ID NO: 6434, SEQ ID NO: 919/SEQ ID NO: 6435, SEQ ID NO: 920/SEQ ID NO: 6436, SEQ ID NO: 921/SEQ ID NO: 6437, SEQ ID NO: 922/SEQ ID NO: 6438, SEQ ID NO: 923/SEQ ID NO: 6439, SEQ ID NO: 924/SEQ ID NO: 6440, SEQ ID NO: 925/SEQ ID NO: 6441, SEQ ID NO: 926/SEQ ID NO: 6442, SEQ ID NO: 927/SEQ ID NO: 6443, SEQ ID NO: 928/SEQ ID NO: 6444, SEQ ID NO: 929/SEQ ID NO: 6445, SEQ ID NO: 930/SEQ ID NO: 6446, SEQ ID NO: 931/SEQ ID NO: 6447, SEQ ID NO: 932/SEQ ID NO: 6448, SEQ ID NO: 933/SEQ ID NO: 6449, SEQ ID NO: 934/SEQ ID NO: 6450, SEQ ID NO: 935/SEQ ID NO: 6451, SEQ ID NO: 936/SEQ ID NO: 6452, SEQ ID NO: 937/SEQ ID NO: 6453, SEQ ID NO: 938/SEQ ID NO: 6454, SEQ ID NO: 939/SEQ ID NO: 6455, SEQ ID NO: 940/SEQ ID NO: 6456, SEQ ID NO: 941/SEQ ID NO: 6457, SEQ ID NO: 942/SEQ ID NO: 6458, SEQ ID NO: 943/SEQ ID NO: 6459, SEQ ID NO: 944/SEQ ID NO: 6460, SEQ ID NO: 945/SEQ ID NO: 6461, SEQ ID NO: 946/SEQ ID NO: 6462, SEQ ID NO: 947/SEQ ID NO: 6463, SEQ ID NO: 949/SEQ ID NO: 6464, SEQ ID NO: 950/SEQ ID NO: 6465, SEQ ID NO: 951/SEQ ID NO: 6466, SEQ ID NO: 952/SEQ ID NO: 6467, SEQ ID NO: 953/SEQ ID NO: 6468, SEQ ID NO: 954/SEQ ID NO: 6469, SEQ ID NO: 955/SEQ ID NO: 6470, SEQ ID NO: 956/SEQ ID NO: 6471, SEQ ID NO: 957/SEQ ID NO: 6472, SEQ ID NO: 958/SEQ ID NO: 6473, SEQ ID NO: 959/SEQ ID NO: 6474, SEQ ID NO: 960/SEQ ID NO: 6475, SEQ ID NO: 961/SEQ ID NO: 6476, SEQ ID NO: 962/SEQ ID NO: 6477, SEQ ID NO: 963/SEQ ID NO: 6478, SEQ ID NO: 964/SEQ ID NO: 6479, SEQ ID NO: 965/SEQ ID NO: 6480, SEQ ID NO: 966/SEQ ID NO: 6481, SEQ ID NO: 967/SEQ ID NO: 6482, SEQ ID NO: 968/SEQ ID NO: 6483, SEQ ID NO: 969/SEQ ID NO: 6484, SEQ ID NO: 970/SEQ ID NO: 6485, SEQ ID NO: 971/SEQ ID NO: 6486, SEQ ID NO: 972/SEQ ID NO: 6487, SEQ ID NO: 973/SEQ ID NO: 6488, SEQ ID NO: 974/SEQ ID NO: 6489, SEQ ID NO: 975/SEQ ID NO: 6490, SEQ ID NO: 976/SEQ ID NO: 6491, SEQ ID NO: 978/SEQ ID NO: 6492, SEQ ID NO: 979/SEQ ID NO: 6493, SEQ ID NO: 980/SEQ ID NO: 6494, SEQ ID NO: 981/SEQ ID NO: 6495, SEQ ID NO: 982/SEQ ID NO: 6496, SEQ ID NO: 983/SEQ ID NO: 6497, SEQ ID NO: 984/SEQ ID NO: 6498, SEQ ID NO: 985/SEQ ID NO: 6499, SEQ ID NO: 986/SEQ ID NO: 6500, SEQ ID NO: 987/SEQ ID NO: 6501, SEQ ID NO: 988/SEQ ID NO: 6502, SEQ ID NO: 989/SEQ ID NO: 6503, SEQ ID NO: 990/SEQ ID NO: 6504, SEQ ID NO: 991/SEQ ID NO: 6505, SEQ ID NO: 992/SEQ ID NO: 6506, SEQ ID NO: 993/SEQ ID NO: 6507, SEQ ID NO: 994/SEQ ID NO: 6508, SEQ ID NO: 995/SEQ ID NO: 6509, SEQ ID NO: 996/SEQ ID NO: 6510, SEQ ID NO: 997/SEQ ID NO: 6511, SEQ ID NO: 998/SEQ ID NO: 6512, SEQ ID NO: 1000/SEQ ID NO: 6513, SEQ ID NO: 100I/ SEQ ID NO: 6514, SEQ ID NO: 1002/SEQ ID NO: 6515, SEQ ID NO: 1003/SEQ ID NO: 6516, SEQ ID NO: 1005/SEQ ID NO: 6517, SEQ ID NO: 1006/SEQ ID NO: 6518, SEQ ID NO: 1007/SEQ ID NO: 6519, SEQ ID NO: 1008/SEQ ID NO: 6520, SEQ ID NO: 1009/SEQ ID NO: 6521, SEQ ID NO: 1010/SEQ ID NO: 6522, SEQ ID NO: 1011/SEQ ID NO: 6523, SEQ ID NO: 1012/SEQ ID NO: 6524, SEQ ID NO: 1013/SEQ ID NO: 6525, SEQ ID NO: 1014/SEQ ID NO: 6526, SEQ ID NO: 1016/SEQ ID NO: 6527, SEQ ID NO: 1017/SEQ ID NO: 6528, SEQ ID NO: 1018/SEQ ID NO: 6529, SEQ ID NO: 1019/SEQ ID NO: 6530, SEQ ID NO: 1020/SEQ ID NO: 6531, SEQ ID NO: 1021/SEQ ID NO: 6532, SEQ ID NO: 1022/SEQ ID NO: 6533, SEQ ID NO: 1023/SEQ ID NO: 6534, SEQ ID NO: 1024/SEQ ID NO: 6535, SEQ ID NO: 1025/SEQ ID NO: 6536, SEQ ID NO: 1026/SEQ ID NO: 6537, SEQ ID NO: 1027/SEQ ID NO: 6538, SEQ ID NO: 1028/SEQ ID NO: 6539, SEQ ID NO: 1029/SEQ ID NO: 6540, SEQ ID NO: 1030/SEQ ID NO: 6541, SEQ ID NO: 1031/SEQ ID NO: 6542, SEQ ID NO: 1032/SEQ ID NO: 6543, SEQ ID NO: 1033/SEQ ID NO: 6544, SEQ ID NO: 1034/SEQ ID NO: 6545, SEQ ID NO: 1035/SEQ ID NO: 6546, SEQ ID NO: 1036/SEQ ID NO: 6547,
SEQ ID NO: 1037/SEQ ID NO: 6548, SEQ ID NO: 1038/SEQ ID NO: 6549, SEQ ID NO: 1039/SEQ ID NO: 6550, SEQ ID NO: 1040/SEQ ID NO: 6551, SEQ ID NO: 1041/SEQ ID NO: 6552, SEQ ID NO: 1042/SEQ ID NO: 6553, SEQ ID NO: 1043/SEQ ID NO: 6554, SEQ ID NO: 1044/SEQ ID NO: 6555, SEQ ID NO: 1045/SEQ ID NO: 6556, SEQ ID NO: 1046/SEQ ID NO: 6557, SEQ ID NO: 1047/SEQ ID NO: 6558, SEQ ID NO: 1048/SEQ ID NO: 6559, SEQ ID NO: 1049/SEQ ID NO: 6560, SEQ ID NO: 1050/SEQ ID NO: 6561, SEQ ID NO: 1051/SEQ ID NO: 6562, SEQ ID NO: 1052/SEQ ID NO: 6563, SEQ ID NO: 1053/SEQ ID NO: 6564, SEQ ID NO: 1054/SEQ ID NO: 6565, SEQ ID NO: 1055/SEQ ID NO: 6566, SEQ ID NO: 1056/SEQ ID NO: 6567, SEQ ID NO: 1057/SEQ ID NO: 6568, SEQ ID NO: 1058/SEQ ID NO: 6569, SEQ ID NO: 1059/SEQ ID NO: 6570, SEQ ID NO: 1060/SEQ ID NO: 6571, SEQ ID NO: 1061/SEQ ID NO: 6572, SEQ ID NO: 1062/SEQ ID NO: 6573, SEQ ID NO: 1063/SEQ ID NO: 6574, SEQ ID NO: 1064/SEQ ID NO: 6575, SEQ ID NO: 1065/SEQ ID NO: 6576, SEQ ID NO: 1066/SEQ ID NO: 6577, SEQ ID NO: 1067/SEQ ID NO: 6578, SEQ ID NO: 1068/SEQ ID NO: 6579, SEQ ID NO: 1069/SEQ ID NO: 6580, SEQ ID NO: 1070/SEQ ID NO: 6581, SEQ ID NO: 1071/SEQ ID NO: 6582, SEQ ID NO: 1072/SEQ ID NO: 6583, SEQ ID NO: 1073/SEQ ID NO: 6584, SEQ ID NO: 1074/SEQ ID NO: 6585, SEQ ID NO: 1075/SEQ ID NO: 6586, SEQ ID NO: 1076/SEQ ID NO: 6587, SEQ ID NO: 1077/SEQ ID NO: 6588, SEQ ID NO: 1078/SEQ ID NO: 6589, SEQ ID NO: 1079/SEQ ID NO: 6590, SEQ ID NO: 1080/SEQ ID NO: 6591, SEQ ID NO: 1081/SEQ ID NO: 6592, SEQ ID NO: 1082/SEQ ID NO: 6593, SEQ ID NO: 1083/SEQ ID NO: 6594, SEQ ID NO: 1084/SEQ ID NO: 6595, SEQ ID NO: 1085/SEQ ID NO: 6596, SEQ ID NO: 1086/SEQ ID NO: 6597, SEQ ID NO: 1087/SEQ ID NO: 6598, SEQ ID NO: 1088/SEQ ID NO: 6599, SEQ ID NO: 1089/SEQ ID NO: 6600, SEQ ID NO: 1090/SEQ ID NO: 6601, SEQ ID NO: 1091/SEQ ID NO: 6602, SEQ ID NO: 1092/SEQ ID NO: 6603, SEQ ID NO: 1093/SEQ ID NO: 6604, SEQ ID NO: 1094/SEQ ID NO: 6605, SEQ ID NO: 1095/SEQ ID NO: 6606, SEQ ID NO: 1096/SEQ ID NO: 6607, SEQ ID NO: 1097/SEQ ID NO: 6608, SEQ ID NO: 1098/SEQ ID NO: 6609, SEQ ID NO: 1099/SEQ ID NO: 6610, SEQ ID NO: 1100/SEQ ID NO: 6611, SEQ ID NO: 1101/SEQ ID NO: 6612, SEQ ID NO: 1102/SEQ ID NO: 6613, SEQ ID NO: 1103/SEQ ID NO: 6614, SEQ ID NO: 1104/SEQ ID NO: 6615, SEQ ID NO: 1105/SEQ ID NO: 6616, SEQ ID NO: 1106/SEQ ID NO: 6617, SEQ ID NO: 1107/SEQ ID NO: 6618, SEQ ID NO: 1108/SEQ ID NO: 6619, SEQ ID NO: 1109/SEQ ID NO: 6620, SEQ ID NO: 1110/SEQ ID NO: 6621, SEQ ID NO: 1111/SEQ ID NO: 6622, SEQ ID NO: 1112/SEQ ID NO: 6623, SEQ ID NO: 1113/SEQ ID NO: 6624, SEQ ID NO: 1114/SEQ ID NO: 6625, SEQ ID NO: 1115/SEQ ID NO: 6626, SEQ ID NO: 1116/SEQ ID NO: 6627, SEQ ID NO: 1118/SEQ ID NO: 6628, SEQ ID NO: 1119/SEQ ID NO: 6629, SEQ ID NO: 1120/SEQ ID NO: 6630, SEQ ID NO: 1121/SEQ ID NO: 6631, SEQ ID NO: 1122/SEQ ID NO: 6632, SEQ ID NO: 1123/SEQ ID NO: 6633, SEQ ID NO: 1124/SEQ ID NO: 6634, SEQ ID NO: 1125/SEQ ID NO: 6635, SEQ ID NO: 1126/SEQ ID NO: 6636, SEQ ID NO: 1127/SEQ ID NO: 6637, SEQ ID NO: 1128/SEQ ID NO: 6638, SEQ ID NO: 1129/SEQ ID NO: 6639,SEQ ID NO: 1130/SEQ ID NO: 6640,SEQ ID NO: 1131/SEQ ID NO: 6641,SEQ ID NO: 1132/SEQ ID NO: 6642,SEQ ID NO: 1133/SEQ ID NO: 6643, SEQ ID NO: 1134/SEQ ID NO: 6644, SEQ ID NO: 1135/SEQ ID NO: 6645, SEQ ID NO: 1136/SEQ ID NO: 6646, SEQ ID NO: 1137/SEQ ID NO: 6647,
SEQ ID NO: 1138/SEQ ID NO: 6648, SEQ ID NO: 1139/SEQ ID NO: 6649, SEQ ID NO: 1140/SEQ ID NO: 6650,SEQ ID NO: 1141/SEQ ID NO: 6651,SEQ ID NO: 1143/SEQ ID NO: 6652, SEQ ID NO: 1144/SEQ ID NO: 6653, SEQ ID NO: 1145/SEQ ID NO: 6654, SEQ ID NO: 1146/SEQ ID NO: 6655, SEQ ID NO: 1147/SEQ ID NO: 6656, SEQ ID NO: 1148/SEQ ID NO: 6657, SEQ ID NO: 1149/SEQ ID NO: 6658, SEQ ID NO: 1150/SEQ ID NO: 6659, SEQ ID NO: 1151/SEQ ID NO: 6660,SEQ ID NO: 1152/SEQ ID NO: 6661,SEQ ID NO: 1153/SEQ ID NO: 6662,SEQ ID NO: 1154/SEQ ID NO: 6663,SEQ ID NO: 1155/SEQ ID NO: 6664, SEQ ID NO: 1156/SEQ ID NO: 6665, SEQ ID NO: 1157/SEQ ID NO: 6666, SEQ ID NO: 1158/SEQ ID NO: 6667, SEQ ID NO: 1159/SEQ ID NO: 6668, SEQ ID NO: 1160/SEQ ID NO: 6669, SEQ ID NO: 1161/SEQ ID NO: 6670, SEQ ID NO: 1162/SEQ ID NO: 6671, SEQ ID NO: 1163/SEQ ID NO: 6672, SEQ ID NO: 1164/SEQ ID NO: 6673, SEQ ID NO: 1165/SEQ ID NO: 6674, SEQ ID NO: 1166/SEQ ID NO: 6675, SEQ ID NO: 1167/SEQ ID NO: 6676,SEQ ID NO: 1168/SEQ ID NO: 6677,SEQ ID NO: 1169/SEQ ID NO: 6678, SEQ ID NO: 1170/SEQ ID NO: 6679, SEQ ID NO: 1171/SEQ ID NO: 6680, SEQ ID NO: 1172/SEQ ID NO: 6681, SEQ ID NO: 1173/SEQ ID NO: 6682, SEQ ID NO: 1174/SEQ ID NO: 6683, SEQ ID NO: 1175/SEQ ID NO: 6684, SEQ ID NO: 1176/SEQ ID NO: 6685, SEQ ID NO: 1177/SEQ ID NO: 6686, SEQ ID NO: 1178/SEQ ID NO: 6687, SEQ ID NO: 1179/SEQ ID NO: 6688, SEQ ID NO: 1180/SEQ ID NO: 6689, SEQ ID NO: 1181/SEQ ID NO: 6690,SEQ ID NO: 1182/SEQ ID NO: 6691,SEQ ID NO: 1183/SEQ ID NO: 6692, SEQ ID NO: 1184/SEQ ID NO: 6693, SEQ ID NO: 1185/SEQ ID NO: 6694, SEQ ID NO: 1186/SEQ ID NO: 6695, SEQ ID NO: 1187/SEQ ID NO: 6696, SEQ ID NO: 1188/SEQ ID NO: 6697, SEQ ID NO: 1189/SEQ ID NO: 6698, SEQ ID NO: 1190/SEQ ID NO: 6699, SEQ ID NO: 1191/SEQ ID NO: 6700, SEQ ID NO: 1192/SEQ ID NO: 6701, SEQ ID NO: 1193/SEQ ID NO: 6702, SEQ ID NO: 1194/SEQ ID NO: 6703, SEQ ID NO: 1195/SEQ ID NO: 6704, SEQ ID NO: 1197/SEQ ID NO: 6705, SEQ ID NO: 1198/SEQ ID NO: 6706, SEQ ID NO: 1199/SEQ ID NO: 6707, SEQ ID NO: 1200/SEQ ID NO: 6708, SEQ ID NO: 1201/SEQ ID NO: 6709, SEQ ID NO: 1202/SEQ ID NO: 6710, SEQ ID NO: 1203/SEQ ID NO: 6711, SEQ ID NO: 1204/SEQ ID NO: 6712, SEQ ID NO: 1205/SEQ ID NO: 6713, SEQ ID NO: 1206/SEQ ID NO: 6714, SEQ ID NO: 1207/SEQ ID NO: 6715,SEQ ID NO: 1208/SEQ ID NO: 6716, SEQ ID NO: 1209/SEQ ID NO: 6717, SEQ ID NO: 1210/SEQ ID NO: 6718,SEQ ID NO: 1211/SEQ ID NO: 6719,SEQ ID NO: 1212/SEQ ID NO: 6720, SEQ ID NO: 1213/SEQ ID NO: 6721, SEQ ID NO: 1214/SEQ ID NO: 6722, SEQ ID NO: 1215/SEQ ID NO: 6723, SEQ ID NO: 1216/SEQ ID NO: 6724, SEQ ID NO: 1217/SEQ ID NO: 6725, SEQ ID NO: 1218/SEQ ID NO: 6726, SEQ ID NO: 1219/SEQ ID NO: 6727, SEQ ID NO: 1220/SEQ ID NO: 6728, SEQ ID NO: 1221/SEQ ID NO: 6729, SEQ ID NO: 1222/SEQ ID NO: 6730, SEQ ID NO: 1223/SEQ ID NO: 6731, SEQ ID NO: 1224/SEQ ID NO: 6732, SEQ ID NO: 1225/SEQ ID NO: 6733, SEQ ID NO: 1226/SEQ ID NO: 6734, SEQ ID NO: 1227/SEQ ID NO: 6735, SEQ ID NO: 1228/SEQ ID NO: 6736, SEQ ID NO: 1229/SEQ ID NO: 6737, SEQ ID NO: 1230/SEQ ID NO: 6738, SEQ ID NO: 1231/SEQ ID NO: 6739, SEQ ID NO: 1232/SEQ ID NO: 6740, SEQ ID NO: 1233/SEQ ID NO: 6741, SEQ ID NO: 1234/SEQ ID NO: 6742, SEQ ID NO: 1235/SEQ ID NO: 6743, SEQ ID NO: 1236/SEQ ID NO: 6744, SEQ ID NO: 1237/SEQ ID NO: 6745, SEQ ID NO: 1238/SEQ ID NO: 6746, SEQ ID NO: 1239/SEQ ID NO: 6747,
SEQ ID NO: 1240/SEQ ID NO: 6748, SEQ ID NO: 1241/SEQ ID NO: 6749, SEQ ID NO: 1242/SEQ ID NO: 6750, SEQ ID NO: 1243/SEQ ID NO: 6751, SEQ ID NO: 1244/SEQ ID NO: 6752, SEQ ID NO: 1245/SEQ ID NO: 6753, SEQ ID NO: 1246/SEQ ID NO: 6754, SEQ ID NO: 1247/SEQ ID NO: 6755, SEQ ID NO: 1248/SEQ ID NO: 6756, SEQ ID NO: 1249/SEQ ID NO: 6757, SEQ ID NO: 1250/SEQ ID NO: 6758, SEQ ID NO: 1251/SEQ ID NO: 6759, SEQ ID NO: 1252/SEQ ID NO: 6760, SEQ ID NO: 1253/SEQ ID NO: 6761, SEQ ID NO: 1254/SEQ ID NO: 6762, SEQ ID NO: 1255/SEQ ID NO: 6763, SEQ ID NO: 1256/SEQ ID NO: 6764, SEQ ID NO: 1257/SEQ ID NO: 6765, SEQ ID NO: 1258/SEQ ID NO: 6766, SEQ ID NO: 1259/SEQ ID NO: 6767, SEQ ID NO: 1260/SEQ ID NO: 6768, SEQ ID NO: 1261/SEQ ID NO: 6769, SEQ ID NO: 1262/SEQ ID NO: 6770, SEQ ID NO: 1263/SEQ ID NO: 6771, SEQ ID NO: 1264/SEQ ID NO: 6772, SEQ ID NO: 1265/SEQ ID NO: 6773, SEQ ID NO: 1266/SEQ ID NO: 6774, SEQ ID NO: 1267/SEQ ID NO: 6775, SEQ ID NO: 1268/SEQ ID NO: 6776, SEQ ID NO: 1269/SEQ ID NO: 6777, SEQ ID NO: 1270/SEQ ID NO: 6778, SEQ ID NO: 1271/SEQ ID NO: 6779, SEQ ID NO: 1272/SEQ ID NO: 6780, SEQ ID NO: 1273/SEQ ID NO: 6781, SEQ ID NO: 1274/SEQ ID NO: 6782, SEQ ID NO: 1275/SEQ ID NO: 6783, SEQ ID NO: 1276/SEQ ID NO: 6784, SEQ ID NO: 1277/SEQ ID NO: 6785, SEQ ID NO: 1278/SEQ ID NO: 6786, SEQ ID NO: 1279/SEQ ID NO: 6787, SEQ ID NO: 1280/SEQ ID NO: 6788, SEQ ID NO: 1281/SEQ ID NO: 6789, SEQ ID NO: 1282/SEQ ID NO: 6790, SEQ ID NO: 1283/SEQ ID NO: 6791, SEQ ID NO: 1284/SEQ ID NO: 6792, SEQ ID NO: 1285/SEQ ID NO: 6793, SEQ ID NO: 1286/SEQ ID NO: 6794, SEQ ID NO: 1287/SEQ ID NO: 6795, SEQ ID NO: 1288/SEQ ID NO: 6796, SEQ ID NO: 1289/SEQ ID NO: 6797, SEQ ID NO: 1290/SEQ ID NO: 6798, SEQ ID NO: 1291/SEQ ID NO: 6799, SEQ ID NO: 1292/SEQ ID NO: 6800, SEQ ID NO: 1293/SEQ ID NO: 6801, SEQ ID NO: 1294/SEQ ID NO: 6802, SEQ ID NO: 1295/SEQ ID NO: 6803, SEQ ID NO: 1296/SEQ ID NO: 6804, SEQ ID NO: 1297/SEQ ID NO: 6805, SEQ ID NO: 1298/SEQ ID NO: 6806, SEQ ID NO: 1299/SEQ ID NO: 6807, SEQ ID NO: 1300/SEQ ID NO: 6808, SEQ ID NO: 1301/SEQ ID NO: 6809, SEQ ID NO: 1302/SEQ ID NO: 6810, SEQ ID NO: 1303/SEQ ID NO: 6811, SEQ ID NO: 1304/SEQ ID NO: 6812, SEQ ID NO: 1305/SEQ ID NO: 6813, SEQ ID NO: 1307/SEQ ID NO: 6814, SEQ ID NO: 1308/SEQ ID NO: 6815, SEQ ID NO: 1309/SEQ ID NO: 6816, SEQ ID NO: 1310/SEQ ID NO: 6817, SEQ ID NO: 1311/SEQ ID NO: 6818, SEQ ID NO: 1312/SEQ ID NO: 6819, SEQ ID NO: 1313/SEQ ID NO: 6820, SEQ ID NO: 1314/SEQ ID NO: 6821, SEQ ID NO: 1315/SEQ ID NO: 6822, SEQ ID NO: 1316/SEQ ID NO: 6823, SEQ ID NO: 1317/SEQ ID NO: 6824, SEQ ID NO: 1318/SEQ ID NO: 6825, SEQ ID NO: 1319/SEQ ID NO: 6826, SEQ ID NO: 1320/SEQ ID NO: 6827, SEQ ID NO: 1321/SEQ ID NO: 6828, SEQ ID NO: 1322/SEQ ID NO: 6829, SEQ ID NO: 1323/SEQ ID NO: 6830, SEQ ID NO: 1324/SEQ ID NO: 6831, SEQ ID NO: 1325/SEQ ID NO: 6832, SEQ ID NO: 1326/SEQ ID NO: 6833, SEQ ID NO: 1327/SEQ ID NO: 6834, SEQ ID NO: 1328/SEQ ID NO: 6835, SEQ ID NO: 1329/SEQ ID NO: 6836, SEQ ID NO: 1330/SEQ ID NO: 6837, SEQ ID NO: 1331/SEQ ID NO: 6838, SEQ ID NO: 1332/SEQ ID NO: 6839, SEQ ID NO: 1333/SEQ ID NO: 6840, SEQ ID NO: 1334/SEQ ID NO: 6841, SEQ ID NO: 1335/SEQ ID NO: 6842, SEQ ID NO: 1336/SEQ ID NO: 6843, SEQ ID NO: 1337/SEQ ID NO: 6844, SEQ ID NO: 1338/SEQ ID NO: 6845, SEQ ID NO: 1339/SEQ ID NO: 6846, SEQ ID NO: 1340/SEQ ID NO: 6847,
SEQ ID NO: 1341/SEQ ID NO: 6848, SEQ ID NO: 1342/SEQ ID NO: 6849, SEQ ID NO: 1343/SEQ ID NO: 6850, SEQ ID NO: 1344/SEQ ID NO: 6851, SEQ ID NO: 1345/SEQ ID NO: 6852, SEQ ID NO: 1346/SEQ ID NO: 6853, SEQ ID NO: 1347/SEQ ID NO: 6854, SEQ ID NO: 1348/SEQ ID NO: 6855, SEQ ID NO: 1349/SEQ ID NO: 6856, SEQ ID NO: 1350/SEQ ID NO: 6857, SEQ ID NO: 1351/SEQ ID NO: 6858, SEQ ID NO: 1352/SEQ ID NO: 6859, SEQ ID NO: 1353/SEQ ID NO: 6860, SEQ ID NO: 1354/SEQ ID NO: 6861, SEQ ID NO: 1355/SEQ ID NO: 6862, SEQ ID NO: 1356/SEQ ID NO: 6863, SEQ ID NO: 1357/SEQ ID NO: 6864, SEQ ID NO: 1358/SEQ ID NO: 6865, SEQ ID NO: 1360/SEQ ID NO: 6866, SEQ ID NO: 1361/SEQ ID NO: 6867, SEQ ID NO: 1362/SEQ ID NO: 6868, SEQ ID NO: 1363/SEQ ID NO: 6869, SEQ ID NO: 1364/SEQ ID NO: 6870, SEQ ID NO: 1365/SEQ ID NO: 6871, SEQ ID NO: 1366/SEQ ID NO: 6872, SEQ ID NO: 1367/SEQ ID NO: 6873, SEQ ID NO: 1368/SEQ ID NO: 6874, SEQ ID NO: 1369/SEQ ID NO: 6875, SEQ ID NO: 1370/SEQ ID NO: 6876, SEQ ID NO: 1371/SEQ ID NO: 6877, SEQ ID NO: 1372/SEQ ID NO: 6878, SEQ ID NO: 1373/SEQ ID NO: 6879, SEQ ID NO: 1374/SEQ ID NO: 6880, SEQ ID NO: 1375/SEQ ID NO: 6881, SEQ ID NO: 1376/SEQ ID NO: 6882, SEQ ID NO: 1377/SEQ ID NO: 6883, SEQ ID NO: 1378/SEQ ID NO: 6884, SEQ ID NO: 1379/SEQ ID NO: 6885, SEQ ID NO: 1380/SEQ ID NO: 6886, SEQ ID NO: 1381/SEQ ID NO: 6887, SEQ ID NO: 1382/SEQ ID NO: 6888, SEQ ID NO: 1383/SEQ ID NO: 6889, SEQ ID NO: 1384/SEQ ID NO: 6890, SEQ ID NO: 1385/SEQ ID NO: 6891, SEQ ID NO: 1386/SEQ ID NO: 6892, SEQ ID NO: 1387/SEQ ID NO: 6893, SEQ ID NO: 1389/SEQ ID NO: 6894, SEQ ID NO: 1390/SEQ ID NO: 6895, SEQ ID NO: 1391/SEQ ID NO: 6896, SEQ ID NO: 1392/SEQ ID NO: 6897, SEQ ID NO: 1393/SEQ ID NO: 6898, SEQ ID NO: 1394/SEQ ID NO: 6899, SEQ ID NO: 1395/SEQ ID NO: 6900, SEQ ID NO: 1396/SEQ ID NO: 6901, SEQ ID NO: 1397/SEQ ID NO: 6902, SEQ ID NO: 1398/SEQ ID NO: 6903, SEQ ID NO: 1399/SEQ ID NO: 6904, SEQ ID NO: 1400/SEQ ID NO: 6905, SEQ ID NO: 1401/SEQ ID NO: 6906, SEQ ID NO: 1402/SEQ ID NO: 6907, SEQ ID NO: 1403/SEQ ID NO: 6908, SEQ ID NO: 1404/SEQ ID NO: 6909, SEQ ID NO: 1405/SEQ ID NO: 6910, SEQ ID NO: 1406/SEQ ID NO: 6911, SEQ ID NO: 1407/SEQ ID NO: 6912, SEQ ID NO: 1408/SEQ ID NO: 6913, SEQ ID NO: 1409/SEQ ID NO: 6914, SEQ ID NO: 1410/SEQ ID NO: 6915, SEQ ID NO: 1411/SEQ ID NO: 6916, SEQ ID NO: 1412/SEQ ID NO: 6917, SEQ ID NO: 1413/SEQ ID NO: 6918, SEQ ID NO: 1414/SEQ ID NO: 6919,SEQ ID NO: 1415/SEQ ID NO: 6920, SEQ ID NO: 1416/SEQ ID NO: 6921, SEQ ID NO: 1417/SEQ ID NO: 6922, SEQ ID NO: 1418/SEQ ID NO: 6923, SEQ ID NO: 1419/SEQ ID NO: 6924, SEQ ID NO: 1420/SEQ ID NO: 6925, SEQ ID NO: 1421/SEQ ID NO: 6926, SEQ ID NO: 1422/SEQ ID NO: 6927, SEQ ID NO: 1423/SEQ ID NO: 6928, SEQ ID NO: 1424/SEQ ID NO: 6929, SEQ ID NO: 1425/SEQ ID NO: 6930, SEQ ID NO: 1426/SEQ ID NO: 6931, SEQ ID NO: 1427/SEQ ID NO: 6932, SEQ ID NO: 1428/SEQ ID NO: 6933, SEQ ID NO: 1429/SEQ ID NO: 6934, SEQ ID NO: 1430/SEQ ID NO: 6935, SEQ ID NO: 1431/SEQ ID NO: 6936, SEQ ID NO: 1432/SEQ ID NO: 6937, SEQ ID NO: 1433/SEQ ID NO: 6938, SEQ ID NO: 1434/SEQ ID NO: 6939, SEQ ID NO: 1435/SEQ ID NO: 6940, SEQ ID NO: 1436/SEQ ID NO: 6941, SEQ ID NO: 1437/SEQ ID NO: 6942, SEQ ID NO: 1438/SEQ ID NO: 6943, SEQ ID NO: 1439/SEQ ID NO: 6944, SEQ ID NO: 1440/SEQ ID NO: 6945, SEQ ID NO: 1441/SEQ ID NO: 6946, SEQ ID NO: 1442/SEQ ID NO: 6947,
SEQ ID NO: 1443/SEQ ID NO: 6948, SEQ ID NO: 1444/SEQ ID NO: 6949, SEQ ID NO: 1445/SEQ ID NO: 6950, SEQ ID NO: 1446/SEQ ID NO: 6951, SEQ ID NO: 1447/SEQ ID NO: 6952, SEQ ID NO: 1448/SEQ ID NO: 6953, SEQ ID NO: 1449/SEQ ID NO: 6954, SEQ ID NO: 1450/SEQ ID NO: 6955, SEQ ID NO: 1451/SEQ ID NO: 6956, SEQ ID NO: 1452/SEQ ID NO: 6957, SEQ ID NO: 1453/SEQ ID NO: 6958, SEQ ID NO: 1454/SEQ ID NO: 6959, SEQ ID NO: 1455/SEQ ID NO: 6960, SEQ ID NO: 1456/SEQ ID NO: 6961, SEQ ID NO: 1457/SEQ ID NO: 6962, SEQ ID NO: 1458/SEQ ID NO: 6963, SEQ ID NO: 1459/SEQ ID NO: 6964, SEQ ID NO: 1460/SEQ ID NO: 6965, SEQ ID NO: 1461/SEQ ID NO: 6966, SEQ ID NO: 1462/SEQ ID NO: 6967, SEQ ID NO: 1463/SEQ ID NO: 6968, SEQ ID NO: 1464/SEQ ID NO: 6969, SEQ ID NO: 1465/SEQ ID NO: 6970, SEQ ID NO: 1466/SEQ ID NO: 6971, SEQ ID NO: 1467/SEQ ID NO: 6972, SEQ ID NO: 1468/SEQ ID NO: 6973, SEQ ID NO: 1469/SEQ ID NO: 6974, SEQ ID NO: 1470/SEQ ID NO: 6975, SEQ ID NO: 1471/SEQ ID NO: 6976, SEQ ID NO: 1472/SEQ ID NO: 6977, SEQ ID NO: 1473/SEQ ID NO: 6978, SEQ ID NO: 1474/SEQ ID NO: 6979, SEQ ID NO: 1475/SEQ ID NO: 6980, SEQ ID NO: 1476/SEQ ID NO: 6981, SEQ ID NO: 1477/SEQ ID NO: 6982, SEQ ID NO: 1478/SEQ ID NO: 6983, SEQ ID NO: 1479/SEQ ID NO: 6984, SEQ ID NO: 1480/SEQ ID NO: 6985, SEQ ID NO: 1481/SEQ ID NO: 6986, SEQ ID NO: 1482/SEQ ID NO: 6987, SEQ ID NO: 1483/SEQ ID NO: 6988, SEQ ID NO: 1484/SEQ ID NO: 6989, SEQ ID NO: 1485/SEQ ID NO: 6990, SEQ ID NO: 1486/SEQ ID NO: 6991, SEQ ID NO: 1487/SEQ ID NO: 6992, SEQ ID NO: 1488/SEQ ID NO: 6993, SEQ ID NO: 1489/SEQ ID NO: 6994, SEQ ID NO: 1490/SEQ ID NO: 6995, SEQ ID NO: 1491/SEQ ID NO: 6996, SEQ ID NO: 1492/SEQ ID NO: 6997, SEQ ID NO: 1493/SEQ ID NO: 6998, SEQ ID NO: 1494/SEQ ID NO: 6999, SEQ ID NO: 1495/SEQ ID NO: 7000, SEQ ID NO: 1496/SEQ ID NO: 7001, SEQ ID NO: 1497/SEQ ID NO: 7002, SEQ ID NO: 1498/SEQ ID NO: 7003, SEQ ID NO: 1499/SEQ ID NO: 7004, SEQ ID NO: 1500/SEQ ID NO: 7005, SEQ ID NO: 1501/SEQ ID NO: 7006, SEQ ID NO: 1502/SEQ ID NO: 7007, SEQ ID NO: 1503/SEQ ID NO: 7008, SEQ ID NO: 1504/SEQ ID NO: 7009, SEQ ID NO: 1505/SEQ ID NO: 7010, SEQ ID NO: 1506/SEQ ID NO: 7011,SEQ ID NO: 1507/SEQ ID NO: 7012, SEQ ID NO: 1508/SEQ ID NO: 7013, SEQ ID NO: 1509/SEQ ID NO: 7014, SEQ ID NO: 1510/SEQ ID NO: 7015, SEQ ID NO: 1511/SEQ ID NO: 7016, SEQ ID NO: 1512/SEQ ID NO: 7017, SEQ ID NO: 1514/SEQ ID NO: 7018, SEQ ID NO: 1515/SEQ ID NO: 7019, SEQ ID NO: 1516/SEQ ID NO: 7020, SEQ ID NO: 1517/SEQ ID NO: 7021, SEQ ID NO: 1518/SEQ ID NO: 7022, SEQ ID NO: 1519/SEQ ID NO: 7023, SEQ ID NO: 1520/SEQ ID NO: 7024, SEQ ID NO: 1521/SEQ ID NO: 7025, SEQ ID NO: 1522/SEQ ID NO: 7026, SEQ ID NO: 1523/SEQ ID NO: 7027, SEQ ID NO: 1524/SEQ ID NO: 7028, SEQ ID NO: 1525/SEQ ID NO: 7029, SEQ ID NO: 1526/SEQ ID NO: 7030, SEQ ID NO: 1527/SEQ ID NO: 7031, SEQ ID NO: 1528/SEQ ID NO: 7032, SEQ ID NO: 1529/SEQ ID NO: 7033, SEQ ID NO: 1530/SEQ ID NO: 7034, SEQ ID NO: 1531/SEQ ID NO: 7035, SEQ ID NO: 1532/SEQ ID NO: 7036, SEQ ID NO: 1533/SEQ ID NO: 7037, SEQ ID NO: 1534/SEQ ID NO: 7038, SEQ ID NO: 1535/SEQ ID NO: 7039, SEQ ID NO: 1536/SEQ ID NO: 7040, SEQ ID NO: 1537/SEQ ID NO: 7041, SEQ ID NO: 1538/SEQ ID NO: 7042, SEQ ID NO: 1539/SEQ ID NO: 7043, SEQ ID NO: 1540/SEQ ID NO: 7044, SEQ ID NO: 1541/SEQ ID NO: 7045, SEQ ID NO: 1542/SEQ ID NO: 7046, SEQ ID NO: 1543/SEQ ID NO: 7047,
SEQ ID NO: 1544/SEQ ID NO: 7048, SEQ ID NO: 1545/SEQ ID NO: 7049, SEQ ID NO: 1546/SEQ ID NO: 7050, SEQ ID NO: 1547/SEQ ID NO: 7051, SEQ ID NO: 1548/SEQ ID NO: 7052, SEQ ID NO: 1549/SEQ ID NO: 7053, SEQ ID NO: 1550/SEQ ID NO: 7054, SEQ ID NO: 1551/SEQ ID NO: 7055, SEQ ID NO: 1552/SEQ ID NO: 7056, SEQ ID NO: 1553/SEQ ID NO: 7057, SEQ ID NO: 1554/SEQ ID NO: 7058, SEQ ID NO: 1555/SEQ ID NO: 7059, SEQ ID NO: 1556/SEQ ID NO: 7060, SEQ ID NO: 1558/SEQ ID NO: 7061, SEQ ID NO: 1559/SEQ ID NO: 7062, SEQ ID NO: 1560/SEQ ID NO: 7063, SEQ ID NO: 1561/SEQ ID NO: 7064, SEQ ID NO: 1562/SEQ ID NO: 7065, SEQ ID NO: 1563/SEQ ID NO: 7066, SEQ ID NO: 1564/SEQ ID NO: 7067, SEQ ID NO: 1565/SEQ ID NO: 7068, SEQ ID NO: 1566/SEQ ID NO: 7069, SEQ ID NO: 1568/SEQ ID NO: 7070, SEQ ID NO: 1569/SEQ ID NO: 7071, SEQ ID NO: 1570/SEQ ID NO: 7072, SEQ ID NO: 1571/SEQ ID NO: 7073, SEQ ID NO: 1572/SEQ ID NO: 7074, SEQ ID NO: 1573/SEQ ID NO: 7075, SEQ ID NO: 1574/SEQ ID NO: 7076, SEQ ID NO: 1575/SEQ ID NO: 7077, SEQ ID NO: 1576/SEQ ID NO: 7078, SEQ ID NO: 1577/SEQ ID NO: 7079, SEQ ID NO: 1578/SEQ ID NO: 7080, SEQ ID NO: 1579/SEQ ID NO: 7081, SEQ ID NO: 1580/SEQ ID NO: 7082, SEQ ID NO: 1581/SEQ ID NO: 7083, SEQ ID NO: 1582/SEQ ID NO: 7084, SEQ ID NO: 1583/SEQ ID NO: 7085, SEQ ID NO: 1584/SEQ ID NO: 7086, SEQ ID NO: 1585/SEQ ID NO: 7087, SEQ ID NO: 1586/SEQ ID NO: 7088, SEQ ID NO: 1587/SEQ ID NO: 7089, SEQ ID NO: 1588/SEQ ID NO: 7090, SEQ ID NO: 1589/SEQ ID NO: 7091, SEQ ID NO: 1590/SEQ ID NO: 7092, SEQ ID NO: 1591/SEQ ID NO: 7093, SEQ ID NO: 1592/SEQ ID NO: 7094, SEQ ID NO: 1593/SEQ ID NO: 7095, SEQ ID NO: 1594/SEQ ID NO: 7096, SEQ ID NO: 1595/SEQ ID NO: 7097, SEQ ID NO: 1596/SEQ ID NO: 7098, SEQ ID NO: 1597/SEQ ID NO: 7099, SEQ ID NO: 1598/SEQ ID NO: 7100, SEQ ID NO: 1599/SEQ ID NO: 7101,SEQ ID NO: 1600/SEQ ID NO: 7102, SEQ ID NO: 1601/SEQ ID NO: 7103, SEQ ID NO: 1602/SEQ ID NO: 7104, SEQ ID NO: 1603/SEQ ID NO: 7105, SEQ ID NO: 1604/SEQ ID NO: 7106, SEQ ID NO: 1605/SEQ ID NO: 7107, SEQ ID NO: 1606/SEQ ID NO: 7108, SEQ ID NO: 1607/SEQ ID NO: 7109, SEQ ID NO: 1608/SEQ ID NO: 7110, SEQ ID NO: 1609/SEQ ID NO: 7111, SEQ ID NO: 1610/SEQ ID NO: 7112, SEQ ID NO: 1612/SEQ ID NO: 7113, SEQ ID NO: 1613/SEQ ID NO: 7114, SEQ ID NO: 1614/SEQ ID NO: 7115, SEQ ID NO: 1615/SEQ ID NO: 7116, SEQ ID NO: 1616/SEQ ID NO: 7117, SEQ ID NO: 1617/SEQ ID NO: 7118, SEQ ID NO: 1618/SEQ ID NO: 7119, SEQ ID NO: 1619/SEQ ID NO: 7120, SEQ ID NO: 1620/SEQ ID NO: 7121, SEQ ID NO: 1621/SEQ ID NO: 7122, SEQ ID NO: 1622/SEQ ID NO: 7123, SEQ ID NO: 1623/SEQ ID NO: 7124, SEQ ID NO: 1624/SEQ ID NO: 7125, SEQ ID NO: 1625/SEQ ID NO: 7126, SEQ ID NO: 1626/SEQ ID NO: 7127, SEQ ID NO: 1627/SEQ ID NO: 7128, SEQ ID NO: 1628/SEQ ID NO: 7129, SEQ ID NO: 1629/SEQ ID NO: 7130, SEQ ID NO: 1630/SEQ ID NO: 7131, SEQ ID NO: 1631/SEQ ID NO: 7132, SEQ ID NO: 1632/SEQ ID NO: 7133, SEQ ID NO: 1633/SEQ ID NO: 7134, SEQ ID NO: 1634/SEQ ID NO: 7135, SEQ ID NO: 1635/SEQ ID NO: 7136, SEQ ID NO: 1636/SEQ ID NO: 7137, SEQ ID NO: 1637/SEQ ID NO: 7138, SEQ ID NO: 1638/SEQ ID NO: 7139, SEQ ID NO: 1639/SEQ ID NO: 7140, SEQ ID NO: 1640/SEQ ID NO: 7141, SEQ ID NO: 1641/SEQ ID NO: 7142, SEQ ID NO: 1642/SEQ ID NO: 7143, SEQ ID NO: 1643/SEQ ID NO: 7144, SEQ ID NO: 1644/SEQ ID NO: 7145, SEQ ID NO: 1645/SEQ ID NO: 7146, SEQ ID NO: 1646/SEQ ID NO: 7147,
SEQ ID NO: 1647/SEQ ID NO: 7148, SEQ ID NO: 1648/SEQ ID NO: 7149, SEQ ID NO: 1649/SEQ ID NO: 7150, SEQ ID NO: 1650/SEQ ID NO: 7151, SEQ ID NO: 1651/SEQ ID NO: 7152, SEQ ID NO: 1652/SEQ ID NO: 7153, SEQ ID NO: 1653/SEQ ID NO: 7154, SEQ ID NO: 1654/SEQ ID NO: 7155, SEQ ID NO: 1655/SEQ ID NO: 7156, SEQ ID NO: 1656/SEQ ID NO: 7157, SEQ ID NO: 1657/SEQ ID NO: 7158, SEQ ID NO: 1658/SEQ ID NO: 7159, SEQ ID NO: 1659/SEQ ID NO: 7160, SEQ ID NO: 1660/SEQ ID NO: 7161, SEQ ID NO: 1661/SEQ ID NO: 7162, SEQ ID NO: 1662/SEQ ID NO: 7163, SEQ ID NO: 1663/SEQ ID NO: 7164, SEQ ID NO: 1664/SEQ ID NO: 7165, SEQ ID NO: 1665/SEQ ID NO: 7166, SEQ ID NO: 1666/SEQ ID NO: 7167, SEQ ID NO: 1667/SEQ ID NO: 7168, SEQ ID NO: 1668/SEQ ID NO: 7169, SEQ ID NO: 1669/SEQ ID NO: 7170, SEQ ID NO: 1670/SEQ ID NO: 7171, SEQ ID NO: 1671/SEQ ID NO: 7172, SEQ ID NO: 1672/SEQ ID NO: 7173, SEQ ID NO: 1673/SEQ ID NO: 7174, SEQ ID NO: 1674/SEQ ID NO: 7175, SEQ ID NO: 1675/SEQ ID NO: 7176, SEQ ID NO: 1676/SEQ ID NO: 7177, SEQ ID NO: 1677/SEQ ID NO: 7178, SEQ ID NO: 1678/SEQ ID NO: 7179, SEQ ID NO: 1679/SEQ ID NO: 7180, SEQ ID NO: 1680/SEQ ID NO: 7181, SEQ ID NO: 1681/SEQ ID NO: 7182, SEQ ID NO: 1682/SEQ ID NO: 7183, SEQ ID NO: 1683/SEQ ID NO: 7184, SEQ ID NO: 1684/SEQ ID NO: 7185, SEQ ID NO: 1685/SEQ ID NO: 7186, SEQ ID NO: 1686/SEQ ID NO: 7187, SEQ ID NO: 1688/SEQ ID NO: 7188, SEQ ID NO: 1689/SEQ ID NO: 7189, SEQ ID NO: 1690/SEQ ID NO: 7190, SEQ ID NO: 1691/SEQ ID NO: 7191, SEQ ID NO: 1692/SEQ ID NO: 7192, SEQ ID NO: 1693/SEQ ID NO: 7193, SEQ ID NO: 1694/SEQ ID NO: 7194, SEQ ID NO: 1695/SEQ ID NO: 7195, SEQ ID NO: 1696/SEQ ID NO: 7196, SEQ ID NO: 1697/SEQ ID NO: 7197, SEQ ID NO: 1698/SEQ ID NO: 7198, SEQ ID NO: 1699/SEQ ID NO: 7199, SEQ ID NO: 1700/SEQ ID NO: 7200, SEQ ID NO: 1701/SEQ ID NO: 7201, SEQ ID NO: 1702/SEQ ID NO: 7202, SEQ ID NO: 1703/SEQ ID NO: 7203, SEQ ID NO: 1704/SEQ ID NO: 7204, SEQ ID NO: 1705/SEQ ID NO: 7205, SEQ ID NO: 1706/SEQ ID NO: 7206, SEQ ID NO: 1707/SEQ ID NO: 7207, SEQ ID NO: 1708/SEQ ID NO: 7208, SEQ ID NO: 1709/SEQ ID NO: 7209, SEQ ID NO: 1710/SEQ ID NO: 7210, SEQ ID NO: 1711/SEQ ID NO: 7211, SEQ ID NO: 1712/SEQ ID NO: 7212, SEQ ID NO: 1713/SEQ ID NO: 7213, SEQ ID NO: 1714/SEQ ID NO: 7214, SEQ ID NO: 1715/SEQ ID NO: 7215, SEQ ID NO: 1716/SEQ ID NO: 7216, SEQ ID NO: 1717/SEQ ID NO: 7217, SEQ ID NO: 1718/SEQ ID NO: 7218, SEQ ID NO: 1719/SEQ ID NO: 7219, SEQ ID NO: 1720/SEQ ID NO: 7220, SEQ ID NO: 1721/SEQ ID NO: 7221, SEQ ID NO: 1722/SEQ ID NO: 7222, SEQ ID NO: 1723/SEQ ID NO: 7223, SEQ ID NO: 1724/SEQ ID NO: 7224, SEQ ID NO: 1725/SEQ ID NO: 7225, SEQ ID NO: 1726/SEQ ID NO: 7226, SEQ ID NO: 1727/SEQ ID NO: 7227, SEQ ID NO: 1728/SEQ ID NO: 7228, SEQ ID NO: 1729/SEQ ID NO: 7229, SEQ ID NO: 1730/SEQ ID NO: 7230, SEQ ID NO: 1731/SEQ ID NO: 7231, SEQ ID NO: 1732/SEQ ID NO: 7232, SEQ ID NO: 1733/SEQ ID NO: 7233, SEQ ID NO: 1734/SEQ ID NO: 7234, SEQ ID NO: 1735/SEQ ID NO: 7235, SEQ ID NO: 1736/SEQ ID NO: 7236, SEQ ID NO: 1737/SEQ ID NO: 7237, SEQ ID NO: 1738/SEQ ID NO: 7238, SEQ ID NO: 1739/SEQ ID NO: 7239, SEQ ID NO: 1740/SEQ ID NO: 7240, SEQ ID NO: 1741/SEQ ID NO: 7241, SEQ ID NO: 1742/SEQ ID NO: 7242, SEQ ID NO: 1743/SEQ ID NO: 7243, SEQ ID NO: 1744/SEQ ID NO: 7244, SEQ ID NO: 1745/SEQ ID NO: 7245, SEQ ID NO: 1746/SEQ ID NO: 7246, SEQ ID NO: 1747/SEQ ID NO: 7247,
SEQ ID NO: 1748/SEQ ID NO: 7248, SEQ ID NO: 1749/SEQ ID NO: 7249, SEQ ID NO: 1750/SEQ ID NO: 7250, SEQ ID NO: 1751/SEQ ID NO: 7251, SEQ ID NO: 1752/SEQ ID NO: 7252, SEQ ID NO: 1753/SEQ ID NO: 7253, SEQ ID NO: 1754/SEQ ID NO: 7254, SEQ ID NO: 1755/SEQ ID NO: 7255, SEQ ID NO: 1756/SEQ ID NO: 7256, SEQ ID NO: 1757/SEQ ID NO: 7257, SEQ ID NO: 1758/SEQ ID NO: 7258, SEQ ID NO: 1759/SEQ ID NO: 7259, SEQ ID NO: 1760/SEQ ID NO: 7260, SEQ ID NO: 1761/SEQ ID NO: 7261, SEQ ID NO: 1762/SEQ ID NO: 7262, SEQ ID NO: 1763/SEQ ID NO: 7263, SEQ ID NO: 1764/SEQ ID NO: 7264, SEQ ID NO: 1765/SEQ ID NO: 7265, SEQ ID NO: 1766/SEQ ID NO: 7266, SEQ ID NO: 1767/SEQ ID NO: 7267, SEQ ID NO: 1768/SEQ ID NO: 7268, SEQ ID NO: 1769/SEQ ID NO: 7269, SEQ ID NO: 1770/SEQ ID NO: 7270, SEQ ID NO: 1771/SEQ ID NO: 7271, SEQ ID NO: 1772/SEQ ID NO: 7272, SEQ ID NO: 1773/SEQ ID NO: 7273, SEQ ID NO: 1774/SEQ ID NO: 7274, SEQ ID NO: 1775/SEQ ID NO: 7275, SEQ ID NO: 1776/SEQ ID NO: 7276, SEQ ID NO: 1777/SEQ ID NO: 7277, SEQ ID NO: 1778/SEQ ID NO: 7278, SEQ ID NO: 1779/SEQ ID NO: 7279, SEQ ID NO: 1780/SEQ ID NO: 7280, SEQ ID NO: 1781/SEQ ID NO: 7281, SEQ ID NO: 1782/SEQ ID NO: 7282, SEQ ID NO: 1783/SEQ ID NO: 7283, SEQ ID NO: 1784/SEQ ID NO: 7284, SEQ ID NO: 1785/SEQ ID NO: 7285, SEQ ID NO: 1786/SEQ ID NO: 7286, SEQ ID NO: 1787/SEQ ID NO: 7287, SEQ ID NO: 1788/SEQ ID NO: 7288, SEQ ID NO: 1789/SEQ ID NO: 7289, SEQ ID NO: 1790/SEQ ID NO: 7290, SEQ ID NO: 1791/SEQ ID NO: 7291, SEQ ID NO: 1792/SEQ ID NO: 7292, SEQ ID NO: 1793/SEQ ID NO: 7293, SEQ ID NO: 1794/SEQ ID NO: 7294, SEQ ID NO: 1795/SEQ ID NO: 7295, SEQ ID NO: 1796/SEQ ID NO: 7296, SEQ ID NO: 1797/SEQ ID NO: 7297, SEQ ID NO: 1798/SEQ ID NO: 7298, SEQ ID NO: 1799/SEQ ID NO: 7299, SEQ ID NO: 1800/SEQ ID NO: 7300, SEQ ID NO: 1801/SEQ ID NO: 7301, SEQ ID NO: 1802/SEQ ID NO: 7302, SEQ ID NO: 1803/SEQ ID NO: 7303, SEQ ID NO: 1804/SEQ ID NO: 7304, SEQ ID NO: 1805/SEQ ID NO: 7305, SEQ ID NO: 1806/SEQ ID NO: 7306, SEQ ID NO: 1807/SEQ ID NO: 7307, SEQ ID NO: 1808/SEQ ID NO: 7308, SEQ ID NO: 1809/SEQ ID NO: 7309, SEQ ID NO: 1810/SEQ ID NO: 7310, SEQ ID NO: 1811/SEQ ID NO: 7311,SEQ ID NO: 1812/SEQ ID NO: 7312,SEQ ID NO: 1813/SEQ ID NO: 7313,SEQ ID NO: 1814/SEQ ID NO: 7314,SEQ ID NO: 1815/SEQ ID NO: 7315,SEQ ID NO: 1816/SEQ ID NO: 7316,SEQ ID NO: 1817/SEQ ID NO: 7317,SEQ ID NO: 1818/SEQ ID NO: 7318,SEQ ID NO: 1819/SEQ ID NO: 7319,SEQ ID NO: 1820/SEQ ID NO: 7320, SEQ ID NO: 1821/SEQ ID NO: 7321, SEQ ID NO: 1822/SEQ ID NO: 7322, SEQ ID NO: 1823/SEQ ID NO: 7323, SEQ ID NO: 1824/SEQ ID NO: 7324, SEQ ID NO: 1825/SEQ ID NO: 7325, SEQ ID NO: 1826/SEQ ID NO: 7326, SEQ ID NO: 1827/SEQ ID NO: 7327, SEQ ID NO: 1828/SEQ ID NO: 7328, SEQ ID NO: 1829/SEQ ID NO: 7329, SEQ ID NO: 1830/SEQ ID NO: 7330, SEQ ID NO: 1831/SEQ ID NO: 7331, SEQ ID NO: 1832/SEQ ID NO: 7332, SEQ ID NO: 1833/SEQ ID NO: 7333, SEQ ID NO: 1834/SEQ ID NO: 7334, SEQ ID NO: 1835/SEQ ID NO: 7335, SEQ ID NO: 1836/SEQ ID NO: 7336, SEQ ID NO: 1837/SEQ ID NO: 7337, SEQ ID NO: 1838/SEQ ID NO: 7338, SEQ ID NO: 1839/SEQ ID NO: 7339, SEQ ID NO: 1840/SEQ ID NO: 7340, SEQ ID NO: 1841/SEQ ID NO: 7341, SEQ ID NO: 1842/SEQ ID NO: 7342, SEQ ID NO: 1843/SEQ ID NO: 7343, SEQ ID NO: 1844/SEQ ID NO: 7344, SEQ ID NO: 1845/SEQ ID NO: 7345, SEQ ID NO: 1846/SEQ ID NO: 7346, SEQ ID NO: 1847/SEQ ID NO: 7347,
SEQ ID NO: 1848/SEQ ID NO: 7348, SEQ ID NO: 1849/SEQ ID NO: 7349, SEQ ID NO: 1850/SEQ ID NO: 7350, SEQ ID NO: 1851/SEQ ID NO: 7351, SEQ ID NO: 1852/SEQ ID NO: 7352, SEQ ID NO: 1853/SEQ ID NO: 7353, SEQ ID NO: 1854/SEQ ID NO: 7354, SEQ ID NO: 1855/SEQ ID NO: 7355, SEQ ID NO: 1856/SEQ ID NO: 7356, SEQ ID NO: 1857/SEQ ID NO: 7357, SEQ ID NO: 1858/SEQ ID NO: 7358, SEQ ID NO: 1859/SEQ ID NO: 7359, SEQ ID NO: 1860/SEQ ID NO: 7360, SEQ ID NO: 1861/SEQ ID NO: 7361, SEQ ID NO: 1862/SEQ ID NO: 7362, SEQ ID NO: 1863/SEQ ID NO: 7363, SEQ ID NO: 1864/SEQ ID NO: 7364, SEQ ID NO: 1865/SEQ ID NO: 7365, SEQ ID NO: 1866/SEQ ID NO: 7366, SEQ ID NO: 1867/SEQ ID NO: 7367, SEQ ID NO: 1868/SEQ ID NO: 7368, SEQ ID NO: 1869/SEQ ID NO: 7369, SEQ ID NO: 1870/SEQ ID NO: 7370, SEQ ID NO: 1871/SEQ ID NO: 7371, SEQ ID NO: 1872/SEQ ID NO: 7372, SEQ ID NO: 1873/SEQ ID NO: 7373, SEQ ID NO: 1874/SEQ ID NO: 7374, SEQ ID NO: 1876/SEQ ID NO: 7375, SEQ ID NO: 1877/SEQ ID NO: 7376, SEQ ID NO: 1878/SEQ ID NO: 7377, SEQ ID NO: 1879/SEQ ID NO: 7378, SEQ ID NO: 1880/SEQ ID NO: 7379, SEQ ID NO: 1881/SEQ ID NO: 7380, SEQ ID NO: 1882/SEQ ID NO: 7381, SEQ ID NO: 1883/SEQ ID NO: 7382, SEQ ID NO: 1884/SEQ ID NO: 7383, SEQ ID NO: 1885/SEQ ID NO: 7384, SEQ ID NO: 1886/SEQ ID NO: 7385, SEQ ID NO: 1887/SEQ ID NO: 7386, SEQ ID NO: 1888/SEQ ID NO: 7387, SEQ ID NO: 1889/SEQ ID NO: 7388, SEQ ID NO: 1891/SEQ ID NO: 7389, SEQ ID NO: 1892/SEQ ID NO: 7390, SEQ ID NO: 1893/SEQ ID NO: 7391, SEQ ID NO: 1894/SEQ ID NO: 7392, SEQ ID NO: 1895/SEQ ID NO: 7393, SEQ ID NO: 1896/SEQ ID NO: 7394, SEQ ID NO: 1897/SEQ ID NO: 7395, SEQ ID NO: 1898/SEQ ID NO: 7396, SEQ ID NO: 1899/SEQ ID NO: 7397, SEQ ID NO: 1900/SEQ ID NO: 7398, SEQ ID NO: 1901/SEQ ID NO: 7399, SEQ ID NO: 1903/SEQ ID NO: 7400, SEQ ID NO: 1904/SEQ ID NO: 7401, SEQ ID NO: 1905/SEQ ID NO: 7402, SEQ ID NO: 1906/SEQ ID NO: 7403, SEQ ID NO: 1907/SEQ ID NO: 7404, SEQ ID NO: 1908/SEQ ID NO: 7405, SEQ ID NO: 1909/SEQ ID NO: 7406, SEQ ID NO: 1910/SEQ ID NO: 7407, SEQ ID NO: 1911/SEQ ID NO: 7408, SEQ ID NO: 1912/SEQ ID NO: 7409, SEQ ID NO: 1913/SEQ ID NO: 7410, SEQ ID NO: 1914/SEQ ID NO: 7411, SEQ ID NO: 1915/SEQ ID NO: 7412, SEQ ID NO: 1917/SEQ ID NO: 7413, SEQ ID NO: 1918/SEQ ID NO: 7414, SEQ ID NO: 1919/SEQ ID NO: 7415, SEQ ID NO: 1920/SEQ ID NO: 7416, SEQ ID NO: 1921/SEQ ID NO: 7417, SEQ ID NO: 1922/SEQ ID NO: 7418, SEQ ID NO: 1923/SEQ ID NO: 7419, SEQ ID NO: 1924/SEQ ID NO: 7420, SEQ ID NO: 1925/SEQ ID NO: 7421, SEQ ID NO: 1926/SEQ ID NO: 7422, SEQ ID NO: 1927/SEQ ID NO: 7423, SEQ ID NO: 1928/SEQ ID NO: 7424, SEQ ID NO: 1929/SEQ ID NO: 7425, SEQ ID NO: 1930/SEQ ID NO: 7426, SEQ ID NO: 1931/SEQ ID NO: 7427, SEQ ID NO: 1932/SEQ ID NO: 7428, SEQ ID NO: 1933/SEQ ID NO: 7429, SEQ ID NO: 1934/SEQ ID NO: 7430, SEQ ID NO: 1935/SEQ ID NO: 7431, SEQ ID NO: 1936/SEQ ID NO: 7432, SEQ ID NO: 1937/SEQ ID NO: 7433, SEQ ID NO: 1938/SEQ ID NO: 7434, SEQ ID NO: 1939/SEQ ID NO: 7435, SEQ ID NO: 1940/SEQ ID NO: 7436, SEQ ID NO: 2215/SEQ ID NO: 7437, SEQ ID NO: 2216/SEQ ID NO: 7438, SEQ ID NO: 2217/SEQ ID NO: 7439, SEQ ID NO: 2218/SEQ ID NO: 7440, SEQ ID NO: 2219/SEQ ID NO: 7441, SEQ ID NO: 2220/SEQ ID NO: 7442, SEQ ID NO: 2221/SEQ ID NO: 7443, SEQ ID NO: 2222/SEQ ID NO: 7444, SEQ ID NO: 2223/SEQ ID NO: 7445, SEQ ID NO: 2224/SEQ ID NO: 7446, SEQ ID NO: 2225/SEQ ID NO: 7447,
SEQ ID NO: 2226/SEQ ID NO: 7448, SEQ ID NO: 2227/SEQ ID NO: 7449, SEQ ID NO: 2228/SEQ ID NO: 7450, SEQ ID NO: 2229/SEQ ID NO: 7451, SEQ ID NO: 2230/SEQ ID NO: 7452, SEQ ID NO: 2231/SEQ ID NO: 7453, SEQ ID NO: 2232/SEQ ID NO: 7454, SEQ ID NO: 2233/SEQ ID NO: 7455, SEQ ID NO: 2234/SEQ ID NO: 7456, SEQ ID NO: 2235/SEQ ID NO: 7457, SEQ ID NO: 2236/SEQ ID NO: 7458, SEQ ID NO: 2237/SEQ ID NO: 7459, SEQ ID NO: 2238/SEQ ID NO: 7460, SEQ ID NO: 2239/SEQ ID NO: 7461, SEQ ID NO: 2240/SEQ ID NO: 7462, SEQ ID NO: 2241/SEQ ID NO: 7463, SEQ ID NO: 2242/SEQ ID NO: 7464, SEQ ID NO: 2243/SEQ ID NO: 7465, SEQ ID NO: 2244/SEQ ID NO: 7466, SEQ ID NO: 2245/SEQ ID NO: 7467, SEQ ID NO: 2246/SEQ ID NO: 7468, SEQ ID NO: 2247/SEQ ID NO: 7469, SEQ ID NO: 2248/SEQ ID NO: 7470, SEQ ID NO: 2249/SEQ ID NO: 7471, SEQ ID NO: 2250/SEQ ID NO: 7472, SEQ ID NO: 2251/SEQ ID NO: 7473, SEQ ID NO: 2252/SEQ ID NO: 7474, SEQ ID NO: 2253/SEQ ID NO: 7475, SEQ ID NO: 2254/SEQ ID NO: 7476, SEQ ID NO: 2255/SEQ ID NO: 7477, SEQ ID NO: 2256/SEQ ID NO: 7478, SEQ ID NO: 2257/SEQ ID NO: 7479, SEQ ID NO: 2258/SEQ ID NO: 7480, SEQ ID NO: 2259/SEQ ID NO: 7481, SEQ ID NO: 2260/SEQ ID NO: 7482, SEQ ID NO: 2261/SEQ ID NO: 7483, SEQ ID NO: 2262/SEQ ID NO: 7484, SEQ ID NO: 2263/SEQ ID NO: 7485, SEQ ID NO: 2264/SEQ ID NO: 7486, SEQ ID NO: 2265/SEQ ID NO: 7487, SEQ ID NO: 2266/SEQ ID NO: 7488, SEQ ID NO: 2267/SEQ ID NO: 7489, SEQ ID NO: 2268/SEQ ID NO: 7490, SEQ ID NO: 2269/SEQ ID NO: 7491, SEQ ID NO: 2270/SEQ ID NO: 7492, SEQ ID NO: 2271/SEQ ID NO: 7493, SEQ ID NO: 2272/SEQ ID NO: 7494, SEQ ID NO: 2273/SEQ ID NO: 7495, SEQ ID NO: 2274/SEQ ID NO: 7496, SEQ ID NO: 2275/SEQ ID NO: 7497, SEQ ID NO: 2276/SEQ ID NO: 7498, SEQ ID NO: 2277/SEQ ID NO: 7499, SEQ ID NO: 2278/SEQ ID NO: 7500, SEQ ID NO: 2279/SEQ ID NO: 7501, SEQ ID NO: 2280/SEQ ID NO: 7502, SEQ ID NO: 2281/SEQ ID NO: 7503, SEQ ID NO: 2282/SEQ ID NO: 7504, SEQ ID NO: 2283/SEQ ID NO: 7505, SEQ ID NO: 2284/SEQ ID NO: 7506, SEQ ID NO: 2285/SEQ ID NO: 7507, SEQ ID NO: 2286/SEQ ID NO: 7508, SEQ ID NO: 2287/SEQ ID NO: 7509, SEQ ID NO: 2288/SEQ ID NO: 7510, SEQ ID NO: 2289/SEQ ID NO: 7511, SEQ ID NO: 2290/SEQ ID NO: 7512, SEQ ID NO: 2291/SEQ ID NO: 7513, SEQ ID NO: 2292/SEQ ID NO: 7514, SEQ ID NO: 2293/SEQ ID NO: 7515, SEQ ID NO: 2294/SEQ ID NO: 7516, SEQ ID NO: 2295/SEQ ID NO: 7517, SEQ ID NO: 2296/SEQ ID NO: 7518, SEQ ID NO: 2297/SEQ ID NO: 7519, SEQ ID NO: 2298/SEQ ID NO: 7520, SEQ ID NO: 2299/SEQ ID NO: 7521, SEQ ID NO: 2300/SEQ ID NO: 7522, SEQ ID NO: 2301/SEQ ID NO: 7523, SEQ ID NO: 2302/SEQ ID NO: 7524, SEQ ID NO: 2303/SEQ ID NO: 7525, SEQ ID NO: 2304/SEQ ID NO: 7526, SEQ ID NO: 2305/SEQ ID NO: 7527, SEQ ID NO: 2306/SEQ ID NO: 7528, SEQ ID NO: 2307/SEQ ID NO: 7529, SEQ ID NO: 2308/SEQ ID NO: 7530, SEQ ID NO: 2309/SEQ ID NO: 7531, SEQ ID NO: 2310/SEQ ID NO: 7532, SEQ ID NO: 2311/SEQ ID NO: 7533, SEQ ID NO: 2312/SEQ ID NO: 7534, SEQ ID NO: 2313/SEQ ID NO: 7535, SEQ ID NO: 2314/SEQ ID NO: 7536, SEQ ID NO: 2315/SEQ ID NO: 7537, SEQ ID NO: 2316/SEQ ID NO: 7538, SEQ ID NO: 2317/SEQ ID NO: 7539, SEQ ID NO: 2318/SEQ ID NO: 7540, SEQ ID NO: 2319/SEQ ID NO: 7541, SEQ ID NO: 2320/SEQ ID NO: 7542, SEQ ID NO: 2321/SEQ ID NO: 7543, SEQ ID NO: 2322/SEQ ID NO: 7544, SEQ ID NO: 2323/SEQ ID NO: 7545, SEQ ID NO: 2324/SEQ ID NO: 7546, SEQ ID NO: 2325/SEQ ID NO: 7547,
SEQ ID NO: 2326/SEQ ID NO: 7548, SEQ ID NO: 2327/SEQ ID NO: 7549, SEQ ID NO: 2328/SEQ ID NO: 7550, SEQ ID NO: 2329/SEQ ID NO: 7551, SEQ ID NO: 2330/SEQ ID NO: 7552, SEQ ID NO: 2331/SEQ ID NO: 7553, SEQ ID NO: 2332/SEQ ID NO: 7554, SEQ ID NO: 2333/SEQ ID NO: 7555, SEQ ID NO: 2334/SEQ ID NO: 7556, SEQ ID NO: 2335/SEQ ID NO: 7557, SEQ ID NO: 2336/SEQ ID NO: 7558, SEQ ID NO: 2337/SEQ ID NO: 7559, SEQ ID NO: 2338/SEQ ID NO: 7560, SEQ ID NO: 2339/SEQ ID NO: 7561, SEQ ID NO: 2340/SEQ ID NO: 7562, SEQ ID NO: 2341/SEQ ID NO: 7563, SEQ ID NO: 2342/SEQ ID NO: 7564, SEQ ID NO: 2343/SEQ ID NO: 7565, SEQ ID NO: 2344/SEQ ID NO: 7566, SEQ ID NO: 2345/SEQ ID NO: 7567, SEQ ID NO: 2346/SEQ ID NO: 7568, SEQ ID NO: 2347/SEQ ID NO: 7569, SEQ ID NO: 2348/SEQ ID NO: 7570, SEQ ID NO: 2349/SEQ ID NO: 7571, SEQ ID NO: 2350/SEQ ID NO: 7572, SEQ ID NO: 2351/SEQ ID NO: 7573, SEQ ID NO: 2352/SEQ ID NO: 7574, SEQ ID NO: 2353/SEQ ID NO: 7575, SEQ ID NO: 2354/SEQ ID NO: 7576, SEQ ID NO: 2355/SEQ ID NO: 7577, SEQ ID NO: 2356/SEQ ID NO: 7578, SEQ ID NO: 2357/SEQ ID NO: 7579, SEQ ID NO: 2358/SEQ ID NO: 7580, SEQ ID NO: 2359/SEQ ID NO: 7581, SEQ ID NO: 2360/SEQ ID NO: 7582, SEQ ID NO: 2361/SEQ ID NO: 7583, SEQ ID NO: 2362/SEQ ID NO: 7584, SEQ ID NO: 2363/SEQ ID NO: 7585, SEQ ID NO: 2364/SEQ ID NO: 7586, SEQ ID NO: 2365/SEQ ID NO: 7587, SEQ ID NO: 2366/SEQ ID NO: 7588, SEQ ID NO: 2367/SEQ ID NO: 7589, SEQ ID NO: 2368/SEQ ID NO: 7590, SEQ ID NO: 2369/SEQ ID NO: 7591, SEQ ID NO: 2370/SEQ ID NO: 7592, SEQ ID NO: 2371/SEQ ID NO: 7593, SEQ ID NO: 2373/SEQ ID NO: 7594, SEQ ID NO: 2374/SEQ ID NO: 7595, SEQ ID NO: 2375/SEQ ID NO: 7596, SEQ ID NO: 2376/SEQ ID NO: 7597, SEQ ID NO: 2377/SEQ ID NO: 7598, SEQ ID NO: 2378/SEQ ID NO: 7599, SEQ ID NO: 2379/SEQ ID NO: 7600, SEQ ID NO: 2380/SEQ ID NO: 7601, SEQ ID NO: 2381/SEQ ID NO: 7602, SEQ ID NO: 2382/SEQ ID NO: 7603, SEQ ID NO: 2383/SEQ ID NO: 7604, SEQ ID NO: 2384/SEQ ID NO: 7605, SEQ ID NO: 2385/SEQ ID NO: 7606, SEQ ID NO: 2386/SEQ ID NO: 7607, SEQ ID NO: 2387/SEQ ID NO: 7608, SEQ ID NO: 2388/SEQ ID NO: 7609, SEQ ID NO: 2389/SEQ ID NO: 7610, SEQ ID NO: 2390/SEQ ID NO: 7611, SEQ ID NO: 2391/SEQ ID NO: 7612, SEQ ID NO: 2392/SEQ ID NO: 7613, SEQ ID NO: 2393/SEQ ID NO: 7614, SEQ ID NO: 2394/SEQ ID NO: 7615, SEQ ID NO: 2395/SEQ ID NO: 7616, SEQ ID NO: 2396/SEQ ID NO: 7617, SEQ ID NO: 2397/SEQ ID NO: 7618, SEQ ID NO: 2398/SEQ ID NO: 7619, SEQ ID NO: 2400/SEQ ID NO: 7620, SEQ ID NO: 2401/SEQ ID NO: 7621, SEQ ID NO: 2402/SEQ ID NO: 7622, SEQ ID NO: 2403/SEQ ID NO: 7623, SEQ ID NO: 2404/SEQ ID NO: 7624, SEQ ID NO: 2405/SEQ ID NO: 7625, SEQ ID NO: 2406/SEQ ID NO: 7626, SEQ ID NO: 2407/SEQ ID NO: 7627, SEQ ID NO: 2408/SEQ ID NO: 7628, SEQ ID NO: 2409/SEQ ID NO: 7629, SEQ ID NO: 2410/SEQ ID NO: 7630, SEQ ID NO: 2411/SEQ ID NO: 7631, SEQ ID NO: 2412/SEQ ID NO: 7632, SEQ ID NO: 2413/SEQ ID NO: 7633, SEQ ID NO: 2414/SEQ ID NO: 7634, SEQ ID NO: 2415/SEQ ID NO: 7635, SEQ ID NO: 2416/SEQ ID NO: 7636, SEQ ID NO: 2417/SEQ ID NO: 7637, SEQ ID NO: 2418/SEQ ID NO: 7638, SEQ ID NO: 2419/SEQ ID NO: 7639, SEQ ID NO: 2420/SEQ ID NO: 7640, SEQ ID NO: 2421/SEQ ID NO: 7641, SEQ ID NO: 2422/SEQ ID NO: 7642, SEQ ID NO: 2423/SEQ ID NO: 7643, SEQ ID NO: 2424/SEQ ID NO: 7644, SEQ ID NO: 2425/SEQ ID NO: 7645, SEQ ID NO: 2426/SEQ ID NO: 7646, SEQ ID NO: 2427/SEQ ID NO: 7647,
SEQ ID NO: 2428/SEQ ID NO: 7648, SEQ ID NO: 2429/SEQ ID NO: 7649, SEQ ID NO: 2430/SEQ ID NO: 7650, SEQ ID NO: 2431/SEQ ID NO: 7651, SEQ ID NO: 2432/SEQ ID NO: 7652, SEQ ID NO: 2433/SEQ ID NO: 7653, SEQ ID NO: 2435/SEQ ID NO: 7654, SEQ ID NO: 2436/SEQ ID NO: 7655, SEQ ID NO: 2437/SEQ ID NO: 7656, SEQ ID NO: 2438/SEQ ID NO: 7657, SEQ ID NO: 2439/SEQ ID NO: 7658, SEQ ID NO: 2440/SEQ ID NO: 7659, SEQ ID NO: 2441/SEQ ID NO: 7660, SEQ ID NO: 2442/SEQ ID NO: 7661, SEQ ID NO: 2443/SEQ ID NO: 7662, SEQ ID NO: 2444/SEQ ID NO: 7663, SEQ ID NO: 2445/SEQ ID NO: 7664, SEQ ID NO: 2446/SEQ ID NO: 7665, SEQ ID NO: 2447/SEQ ID NO: 7666, SEQ ID NO: 2448/SEQ ID NO: 7667, SEQ ID NO: 2451/SEQ ID NO: 7668, SEQ ID NO: 2452/SEQ ID NO: 7669, SEQ ID NO: 2453/SEQ ID NO: 7670, SEQ ID NO: 2455/SEQ ID NO: 7671, SEQ ID NO: 2572/SEQ ID NO: 7672, SEQ ID NO: 2573/SEQ ID NO: 7673, SEQ ID NO: 2575/SEQ ID NO: 7674, SEQ ID NO: 2576/SEQ ID NO: 7675, SEQ ID NO: 2578/SEQ ID NO: 7676, SEQ ID NO: 2579/SEQ ID NO: 7677, SEQ ID NO: 2580/SEQ ID NO: 7678, SEQ ID NO: 2581/SEQ ID NO: 7679, SEQ ID NO: 2582/SEQ ID NO: 7680, SEQ ID NO: 2583/SEQ ID NO: 7681, SEQ ID NO: 2584/SEQ ID NO: 7682, SEQ ID NO: 2585/SEQ ID NO: 7683, SEQ ID NO: 2586/SEQ ID NO: 7684, SEQ ID NO: 2587/SEQ ID NO: 7685, SEQ ID NO: 2588/SEQ ID NO: 7686, SEQ ID NO: 2589/SEQ ID NO: 7687, SEQ ID NO: 2590/SEQ ID NO: 7688, SEQ ID NO: 2591/SEQ ID NO: 7689, SEQ ID NO: 2592/SEQ ID NO: 7690, SEQ ID NO: 2593/SEQ ID NO: 7691, SEQ ID NO: 2594/SEQ ID NO: 7692, SEQ ID NO: 2595/SEQ ID NO: 7693, SEQ ID NO: 2596/SEQ ID NO: 7694, SEQ ID NO: 2597/SEQ ID NO: 7695, SEQ ID NO: 2598/SEQ ID NO: 7696, SEQ ID NO: 2599/SEQ ID NO: 7697, SEQ ID NO: 2601/SEQ ID NO: 7698, SEQ ID NO: 2602/SEQ ID NO: 7699, SEQ ID NO: 2603/SEQ ID NO: 7700, SEQ ID NO: 2604/SEQ ID NO: 7701, SEQ ID NO: 2606/SEQ ID NO: 7702, SEQ ID NO: 2607/SEQ ID NO: 7703, SEQ ID NO: 2608/SEQ ID NO: 7704, SEQ ID NO: 2609/SEQ ID NO: 7705, SEQ ID NO: 2610/SEQ ID NO: 7706, SEQ ID NO: 2611/SEQ ID NO: 7707, SEQ ID NO: 2612/SEQ ID NO: 7708, SEQ ID NO: 2613/SEQ ID NO: 7709, SEQ ID NO: 2614/SEQ ID NO: 7710, SEQ ID NO: 2616/SEQ ID NO: 7711, SEQ ID NO: 2617/SEQ ID NO: 7712, SEQ ID NO: 2618/SEQ ID NO: 7713, SEQ ID NO: 2619/SEQ ID NO: 7714, SEQ ID NO: 2620/SEQ ID NO: 7715, SEQ ID NO: 2621/SEQ ID NO: 7716, SEQ ID NO: 2623/SEQ ID NO: 7717, SEQ ID NO: 2624/SEQ ID NO: 7718, SEQ ID NO: 2625/SEQ ID NO: 7719, SEQ ID NO: 2626/SEQ ID NO: 7720, SEQ ID NO: 2628/SEQ ID NO: 7721, SEQ ID NO: 2629/SEQ ID NO: 7722, SEQ ID NO: 2630/SEQ ID NO: 7723, SEQ ID NO: 2631/SEQ ID NO: 7724, SEQ ID NO: 2632/SEQ ID NO: 7725, SEQ ID NO: 2633/SEQ ID NO: 7726, SEQ ID NO: 2634/SEQ ID NO: 7727, SEQ ID NO: 2635/SEQ ID NO: 7728, SEQ ID NO: 2636/SEQ ID NO: 7729, SEQ ID NO: 2637/SEQ ID NO: 7730, SEQ ID NO: 2638/SEQ ID NO: 7731, SEQ ID NO: 2639/SEQ ID NO: 7732, SEQ ID NO: 2640/SEQ ID NO: 7733, SEQ ID NO: 2641/SEQ ID NO: 7734, SEQ ID NO: 2642/SEQ ID NO: 7735, SEQ ID NO: 2643/SEQ ID NO: 7736, SEQ ID NO: 2644/SEQ ID NO: 7737, SEQ ID NO: 2645/SEQ ID NO: 7738, SEQ ID NO: 2646/SEQ ID NO: 7739, SEQ ID NO: 2648/SEQ ID NO: 7740, SEQ ID NO: 2649/SEQ ID NO: 7741, SEQ ID NO: 2650/SEQ ID NO: 7742, SEQ ID NO: 2651/SEQ ID NO: 7743, SEQ ID NO: 2652/SEQ ID NO: 7744, SEQ ID NO: 2653/SEQ ID NO: 7745, SEQ ID NO: 2654/SEQ ID NO: 7746, SEQ ID NO: 2655/SEQ ID NO: 7747,
SEQ ID NO: 2656/SEQ ID NO: 7748, SEQ ID NO: 2657/SEQ ID NO: 7749, SEQ ID NO: 2658/SEQ ID NO: 7750, SEQ ID NO: 2659/SEQ ID NO: 7751, SEQ ID NO: 2660/SEQ ID NO: 7752, SEQ ID NO: 2661/SEQ ID NO: 7753, SEQ ID NO: 2662/SEQ ID NO: 7754, SEQ ID NO: 2663/SEQ ID NO: 7755, SEQ ID NO: 2664/SEQ ID NO: 7756, SEQ ID NO: 2666/SEQ ID NO: 7757, SEQ ID NO: 2667/SEQ ID NO: 7758, SEQ ID NO: 2668/SEQ ID NO: 7759, SEQ ID NO: 2669/SEQ ID NO: 7760, SEQ ID NO: 2670/SEQ ID NO: 7761, SEQ ID NO: 2671/SEQ ID NO: 7762, SEQ ID NO: 2672/SEQ ID NO: 7763, SEQ ID NO: 2673/SEQ ID NO: 7764, SEQ ID NO: 2675/SEQ ID NO: 7765, SEQ ID NO: 2676/SEQ ID NO: 7766, SEQ ID NO: 2678/SEQ ID NO: 7767, SEQ ID NO: 2679/SEQ ID NO: 7768, SEQ ID NO: 2680/SEQ ID NO: 7769, SEQ ID NO: 2681/SEQ ID NO: 7770, SEQ ID NO: 2682/SEQ ID NO: 7771, SEQ ID NO: 2683/SEQ ID NO: 7772, SEQ ID NO: 2684/SEQ ID NO: 7773, SEQ ID NO: 2685/SEQ ID NO: 7774, SEQ ID NO: 2686/SEQ ID NO: 7775, SEQ ID NO: 2687/SEQ ID NO: 7776, SEQ ID NO: 2688/SEQ ID NO: 7777, SEQ ID NO: 2689/SEQ ID NO: 7778, SEQ ID NO: 2690/SEQ ID NO: 7779, SEQ ID NO: 2691/SEQ ID NO: 7780, SEQ ID NO: 2692/SEQ ID NO: 7781, SEQ ID NO: 2693/SEQ ID NO: 7782, SEQ ID NO: 2694/SEQ ID NO: 7783, SEQ ID NO: 2695/SEQ ID NO: 7784, SEQ ID NO: 2696/SEQ ID NO: 7785, SEQ ID NO: 2697/SEQ ID NO: 7786, SEQ ID NO: 2698/SEQ ID NO: 7787, SEQ ID NO: 2700/SEQ ID NO: 7788, SEQ ID NO: 2701/SEQ ID NO: 7789, SEQ ID NO: 2702/SEQ ID NO: 7790, SEQ ID NO: 2703/SEQ ID NO: 7791, SEQ ID NO: 2704/SEQ ID NO: 7792, SEQ ID NO: 2705/SEQ ID NO: 7793, SEQ ID NO: 2706/SEQ ID NO: 7794, SEQ ID NO: 2707/SEQ ID NO: 7795, SEQ ID NO: 2708/SEQ ID NO: 7796, SEQ ID NO: 2709/SEQ ID NO: 7797, SEQ ID NO: 2710/SEQ ID NO: 7798, SEQ ID NO: 2711/SEQ ID NO: 7799, SEQ ID NO: 2712/SEQ ID NO: 7800, SEQ ID NO: 2713/SEQ ID NO: 7801, SEQ ID NO: 2714/SEQ ID NO: 7802, SEQ ID NO: 2715/SEQ ID NO: 7803, SEQ ID NO: 2716/SEQ ID NO: 7804, SEQ ID NO: 2717/SEQ ID NO: 7805, SEQ ID NO: 2718/SEQ ID NO: 7806, SEQ ID NO: 2719/SEQ ID NO: 7807, SEQ ID NO: 2720/SEQ ID NO: 7808, SEQ ID NO: 2721/SEQ ID NO: 7809, SEQ ID NO: 2722/SEQ ID NO: 7810, SEQ ID NO: 2723/SEQ ID NO: 7811, SEQ ID NO: 2724/SEQ ID NO: 7812, SEQ ID NO: 2725/SEQ ID NO: 7813, SEQ ID NO: 2726/SEQ ID NO: 7814, SEQ ID NO: 2729/SEQ ID NO: 7815, SEQ ID NO: 2731/SEQ ID NO: 7816, SEQ ID NO: 2732/SEQ ID NO: 7817, SEQ ID NO: 2733/SEQ ID NO: 7818, SEQ ID NO: 2734/SEQ ID NO: 7819, SEQ ID NO: 2735/SEQ ID NO: 7820, SEQ ID NO: 2736/SEQ ID NO: 7821, SEQ ID NO: 2737/SEQ ID NO: 7822, SEQ ID NO: 2738/SEQ ID NO: 7823, SEQ ID NO: 2739/SEQ ID NO: 7824, SEQ ID NO: 2741/SEQ ID NO: 7825, SEQ ID NO: 2742/SEQ ID NO: 7826, SEQ ID NO: 2743/SEQ ID NO: 7827, SEQ ID NO: 2744/SEQ ID NO: 7828, SEQ ID NO: 2746/SEQ ID NO: 7829, SEQ ID NO: 2747/SEQ ID NO: 7830, SEQ ID NO: 2748/SEQ ID NO: 7831, SEQ ID NO: 2749/SEQ ID NO: 7832, SEQ ID NO: 2750/SEQ ID NO: 7833, SEQ ID NO: 2751/SEQ ID NO: 7834, SEQ ID NO: 2752/SEQ ID NO: 7835, SEQ ID NO: 2753/SEQ ID NO: 7836, SEQ ID NO: 2754/SEQ ID NO: 7837, SEQ ID NO: 2755/SEQ ID NO: 7838, SEQ ID NO: 2757/SEQ ID NO: 7839, SEQ ID NO: 2758/SEQ ID NO: 7840, SEQ ID NO: 2759/SEQ ID NO: 7841, SEQ ID NO: 2760/SEQ ID NO: 7842, SEQ ID NO: 2761/SEQ ID NO: 7843, SEQ ID NO: 2762/SEQ ID NO: 7844, SEQ ID NO: 2763/SEQ ID NO: 7845, SEQ ID NO: 2764/SEQ ID NO: 7846, SEQ ID NO: 2765/SEQ ID NO: 7847,
SEQ ID NO: 2766/SEQ ID NO: 7848, SEQ ID NO: 2768/SEQ ID NO: 7849, SEQ ID NO: 2769/SEQ ID NO: 7850, SEQ ID NO: 2770/SEQ ID NO: 7851, SEQ ID NO: 2771/SEQ ID NO: 7852, SEQ ID NO: 2772/SEQ ID NO: 7853, SEQ ID NO: 2773/SEQ ID NO: 7854, SEQ ID NO: 2774/SEQ ID NO: 7855, SEQ ID NO: 2775/SEQ ID NO: 7856, SEQ ID NO: 2776/SEQ ID NO: 7857, SEQ ID NO: 2777/SEQ ID NO: 7858, SEQ ID NO: 2778/SEQ ID NO: 7859, SEQ ID NO: 2779/SEQ ID NO: 7860, SEQ ID NO: 2780/SEQ ID NO: 7861, SEQ ID NO: 2782/SEQ ID NO: 7862, SEQ ID NO: 2783/SEQ ID NO: 7863, SEQ ID NO: 2784/SEQ ID NO: 7864, SEQ ID NO: 2785/SEQ ID NO: 7865, SEQ ID NO: 2786/SEQ ID NO: 7866, SEQ ID NO: 2787/SEQ ID NO: 7867, SEQ ID NO: 2788/SEQ ID NO: 7868, SEQ ID NO: 2789/SEQ ID NO: 7869, SEQ ID NO: 2790/SEQ ID NO: 7870, SEQ ID NO: 2792/SEQ ID NO: 7871, SEQ ID NO: 2793/SEQ ID NO: 7872, SEQ ID NO: 2794/SEQ ID NO-7873, SEQ ID NO: 2795/SEQ ID NO: 7874, SEQ ID NO: 2796/SEQ ID NO: 7875, SEQ ID NO: 2798/SEQ ID NO: 7876, SEQ ID NO: 2799/SEQ ID NO: 7877, SEQ ID NO: 2800/SEQ ID NO: 7878, SEQ ID NO: 2801/SEQ ID NO: 7879, SEQ ID NO: 2802/SEQ ID NO: 7880, SEQ ID NO: 2803/SEQ ID NO: 7881, SEQ ID NO: 2804/SEQ ID NO: 7882, SEQ ID NO: 2805/SEQ ID NO: 7883, SEQ ID NO: 2806/SEQ ID NO: 7884, SEQ ID NO: 2807/SEQ ID NO: 7885, SEQ ID NO: 2808/SEQ ID NO: 7886, SEQ ID NO: 2809/SEQ ID NO: 7887, SEQ ID NO: 2810/SEQ ID NO: 7888, SEQ ID NO: 2811/SEQ ID NO: 7889, SEQ ID NO: 2812/SEQ ID NO: 7890, SEQ ID NO: 2813/SEQ ID NO: 7891, SEQ ID NO: 2814/SEQ ID NO: 7892, SEQ ID NO: 2815/SEQ ID NO: 7893, SEQ ID NO: 2816/SEQ ID NO: 7894, SEQ ID NO: 2817/SEQ ID NO: 7895, SEQ ID NO: 2818/SEQ ID NO: 7896, SEQ ID NO: 2819/SEQ ID NO: 7897, SEQ ID NO: 2820/SEQ ID NO: 7898, SEQ ID NO: 2821/SEQ ID NO: 7899, SEQ ID NO: 2822/SEQ ID NO: 7900, SEQ ID NO: 2823/SEQ ID NO: 7901, SEQ ID NO: 2824/SEQ ID NO: 7902, SEQ ID NO: 2825/SEQ ID NO: 7903, SEQ ID NO: 2826/SEQ ID NO: 7904, SEQ ID NO: 2827/SEQ ID NO: 7905, SEQ ID NO: 2828/SEQ ID NO: 7906, SEQ ID NO: 2829/SEQ ID NO: 7907, SEQ ID NO: 2830/SEQ ID NO: 7908, SEQ ID NO: 2831/SEQ ID NO: 7909, SEQ ID NO: 2832/SEQ ID NO: 7910, SEQ ID NO: 2833/SEQ ID NO: 7911, SEQ ID NO: 2834/SEQ ID NO: 7912, SEQ ID NO: 2835/SEQ ID NO: 7913, SEQ ID NO: 2836/SEQ ID NO: 7914, SEQ ID NO: 2837/SEQ ID NO: 7915, SEQ ID NO: 2839/SEQ ID NO: 7916, SEQ ID NO: 2840/SEQ ID NO: 7917, SEQ ID NO: 2841/SEQ ID NO: 7918, SEQ ID NO: 2842/SEQ ID NO: 7919, SEQ ID NO: 2843/SEQ ID NO: 7920, SEQ ID NO: 2844/SEQ ID NO: 7921, SEQ ID NO: 2845/SEQ ID NO: 7922, SEQ ID NO: 2846/SEQ ID NO: 7923, SEQ ID NO: 2847/SEQ ID NO: 7924, SEQ ID NO: 2848/SEQ ID NO: 7925, SEQ ID NO: 2849/SEQ ID NO: 7926, SEQ ID NO: 2850/SEQ ID NO: 7927, SEQ ID NO: 2851/SEQ ID NO: 7928, SEQ ID NO: 2852/SEQ ID NO: 7929, SEQ ID NO: 2853/SEQ ID NO: 7930, SEQ ID NO: 2854/SEQ ID NO: 7931, SEQ ID NO: 2855/SEQ ID NO: 7932, SEQ ID NO: 2858/SEQ ID NO: 7933, SEQ ID NO: 2859/SEQ ID NO: 7934, SEQ ID NO: 2860/SEQ ID NO: 7935, SEQ ID NO: 2861/SEQ ID NO: 7936, SEQ ID NO: 2862/SEQ ID NO: 7937, SEQ ID NO: 2863/SEQ ID NO: 7938, SEQ ID NO: 2865/SEQ ID NO: 7939, SEQ ID NO: 2866/SEQ ID NO: 7940, SEQ ID NO: 2867/SEQ ID NO: 7941, SEQ ID NO: 2868/SEQ ID NO: 7942, SEQ ID NO: 2869/SEQ ID NO: 7943, SEQ ID NO: 2870/SEQ ID NO: 7944, SEQ ID NO: 2871/SEQ ID NO: 7945, SEQ ID NO: 2872/SEQ ID NO: 7946, SEQ ID NO: 2873/SEQ ID NO: 7947,
SEQ ID NO: 2874/SEQ ID NO: 7948, SEQ ID NO: 2875/SEQ ID NO: 7949, SEQ ID NO: 2877/SEQ ID NO: 7950, SEQ ID NO: 2878/SEQ ID NO: 7951, SEQ ID NO: 2879/SEQ ID NO: 7952, SEQ ID NO: 2880/SEQ ID NO: 7953, SEQ ID NO: 2881/SEQ ID NO: 7954, SEQ ID NO: 2882/SEQ ID NO: 7955, SEQ ID NO: 2883/SEQ ID NO: 7956, SEQ ID NO: 2884/SEQ ID NO: 7957, SEQ ID NO: 2885/SEQ ID NO: 7958, SEQ ID NO: 2886/SEQ ID NO: 7959, SEQ ID NO: 2887/SEQ ID NO: 7960, SEQ ID NO: 2888/SEQ ID NO: 7961, SEQ ID NO: 2889/SEQ ID NO: 7962, SEQ ID NO: 2891/SEQ ID NO: 7963, SEQ ID NO: 2892/SEQ ID NO: 7964, SEQ ID NO: 2893/SEQ ID NO: 7965, SEQ ID NO: 2894/SEQ ID NO: 7966, SEQ ID NO: 2895/SEQ ID NO: 7967, SEQ ID NO: 2896/SEQ ID NO: 7968, SEQ ID NO: 2897/SEQ ID NO: 7969, SEQ ID NO: 2898/SEQ ID NO: 7970, SEQ ID NO: 2899/SEQ ID NO: 7971, SEQ ID NO: 2900/SEQ ID NO: 7972, SEQ ID NO: 2901/SEQ ID NO: 7973, SEQ ID NO: 2903/SEQ ID NO: 7974, SEQ ID NO: 2904/SEQ ID NO: 7975, SEQ ID NO: 2905/SEQ ID NO: 7976, SEQ ID NO: 2906/SEQ ID NO: 7977, SEQ ID NO: 2907/SEQ ID NO: 7978, SEQ ID NO: 2908/SEQ ID NO: 7979, SEQ ID NO: 2909/SEQ ID NO: 7980, SEQ ID NO: 2910/SEQ ID NO: 7981, SEQ ID NO: 2911/SEQ ID NO: 7982, SEQ ID NO: 2912/SEQ ID NO: 7983, SEQ ID NO: 2913/SEQ ID NO: 7984, SEQ ID NO: 2914/SEQ ID NO: 7985, SEQ ID NO: 2915/SEQ ID NO: 7986, SEQ ID NO: 2916/SEQ ID NO: 7987, SEQ ID NO: 2917/SEQ ID NO: 7988, SEQ ID NO: 2918/SEQ ID NO: 7989, SEQ ID NO: 2919/SEQ ID NO: 7990, SEQ ID NO: 2920/SEQ ID NO: 7991, SEQ ID NO: 2921/SEQ ID NO: 7992, SEQ ID NO: 2922/SEQ ID NO: 7993, SEQ ID NO: 2923/SEQ ID NO: 7994, SEQ ID NO: 2924/SEQ ID NO: 7995, SEQ ID NO: 2925/SEQ ID NO: 7996, SEQ ID NO: 2927/SEQ ID NO: 7997, SEQ ID NO: 2928/SEQ ID NO: 7998, SEQ ID NO: 2929/SEQ ID NO: 7999, SEQ ID NO: 2930/SEQ ID NO: 8000, SEQ ID NO: 2931/SEQ ID NO: 8001, SEQ ID NO: 2932/SEQ ID NO: 8002, SEQ ID NO: 2933/SEQ ID NO: 8003, SEQ ID NO: 2934/SEQ ID NO: 8004, SEQ ID NO: 2935/SEQ ID NO: 8005, SEQ ID NO: 2936/SEQ ID NO: 8006, SEQ ID NO: 2937/SEQ ID NO: 8007, SEQ ID NO: 2938/SEQ ID NO: 8008, SEQ ID NO: 2939/SEQ ID NO: 8009, SEQ ID NO: 2941/SEQ ID NO: 8010, SEQ ID NO: 2942/SEQ ID NO: 8011, SEQ ID NO: 2943/SEQ ID NO: 8012, SEQ ID NO: 2944/SEQ ID NO: 8013, SEQ ID NO: 2945/SEQ ID NO: 8014, SEQ ID NO: 2946/SEQ ID NO: 8015, SEQ ID NO: 2947/SEQ ID NO: 8016, SEQ ID NO: 2948/SEQ ID NO: 8017, SEQ ID NO: 2949/SEQ ID NO: 8018, SEQ ID NO: 2950/SEQ ID NO: 8019, SEQ ID NO: 2951/SEQ ID NO: 8020, SEQ ID NO: 2952/SEQ ID NO: 8021, SEQ ID NO: 2953/SEQ ID NO: 8022, SEQ ID NO: 2954/SEQ ID NO: 8023, SEQ ID NO: 2955/SEQ ID NO: 8024, SEQ ID NO: 2956/SEQ ID NO: 8025, SEQ ID NO: 2957/SEQ ID NO: 8026, SEQ ID NO: 2958/SEQ ID NO: 8027, SEQ ID NO: 2959/SEQ ID NO: 8028, SEQ ID NO: 2960/SEQ ID NO: 8029, SEQ ID NO: 2961/SEQ ID NO: 8030, SEQ ID NO: 2962/SEQ ID NO: 8031, SEQ ID NO: 2963/SEQ ID NO: 8032, SEQ ID NO: 2964/SEQ ID NO: 8033, SEQ ID NO: 2965/SEQ ID NO: 8034, SEQ ID NO: 2966/SEQ ID NO: 8035, SEQ ID NO: 2967/SEQ ID NO: 8036, SEQ ID NO: 2968/SEQ ID NO: 8037, SEQ ID NO: 2969/SEQ ID NO: 8038, SEQ ID NO: 2970/SEQ ID NO: 8039, SEQ ID NO: 2971/SEQ ID NO: 8040, SEQ ID NO: 2972/SEQ ID NO: 8041, SEQ ID NO: 2973/SEQ ID NO: 8042, SEQ ID NO: 2974/SEQ ID NO: 8043; SEQ ID NO: 2975/SEQ ID NO: 8044, SEQ ID NO: 2976/SEQ ID NO: 8045, SEQ ID NO: 2977/SEQ ID NO: 8046, SEQ ID NO: 2978/SEQ ID NO: 8047,
SEQ ID NO: 2979/SEQ ID NO: 8048, SEQ ID NO: 2981/SEQ ID NO: 8049, SEQ ID NO: 2982/SEQ ID NO: 8050, SEQ ID NO: 2983/SEQ ID NO: 8051, SEQ ID NO: 2984/SEQ ID NO: 8052, SEQ ID NO: 2985/SEQ ID NO: 8053, SEQ ID NO: 2986/SEQ ID NO: 8054, SEQ ID NO: 2987/SEQ ID NO: 8055, SEQ ID NO: 2988/SEQ ID NO: 8056, SEQ ID NO: 2989/SEQ ID NO: 8057, SEQ ID NO: 2990/SEQ ID NO: 8058, SEQ ID NO: 2991/SEQ ID NO: 8059, SEQ ID NO: 2992/SEQ ID NO: 8060, SEQ ID NO: 2993/SEQ ID NO: 8061, SEQ ID NO: 2994/SEQ ID NO: 8062, SEQ ID NO: 2995/SEQ ID NO: 8063, SEQ ID NO: 2996/SEQ ID NO: 8064, SEQ ID NO: 2997/SEQ ID NO: 8065, SEQ ID NO: 2998/SEQ ID NO: 8066, SEQ ID NO: 2999/SEQ ID NO: 8067, SEQ ID NO: 3000/SEQ ID NO: 8068, SEQ ID NO: 3001/SEQ ID NO: 8069, SEQ ID NO: 3002/SEQ ID NO: 8070, SEQ ID NO: 3003/SEQ ID NO: 8071, SEQ ID NO: 3005/SEQ ID NO: 8072, SEQ ID NO: 3006/SEQ ID NO: 8073, SEQ ID NO: 3007/SEQ ID NO: 8074, SEQ ID NO: 3008/SEQ ID NO: 8075, SEQ ID NO: 3009/SEQ ID NO: 8076, SEQ ID NO: 3010/SEQ ID NO: 8077, SEQ ID NO: 3011/SEQ ID NO: 8078, SEQ ID NO: 3012/SEQ ID NO: 8079, SEQ ID NO: 3014/SEQ ID NO: 8080, SEQ ID NO: 3015/SEQ ID NO: 8081, SEQ ID NO: 3016/SEQ ID NO: 8082, SEQ ID NO: 3017/SEQ ID NO: 8083, SEQ ID NO: 3018/SEQ ID NO: 8084, SEQ ID NO: 3019/SEQ ID NO: 8085, SEQ ID NO: 3020/SEQ ID NO: 8086, SEQ ID NO: 3021/SEQ ID NO: 8087, SEQ ID NO: 3022/SEQ ID NO: 8088, SEQ ID NO: 3023/SEQ ID NO: 8089, SEQ ID NO: 3024/SEQ ID NO: 8090, SEQ ID NO: 3025/SEQ ID NO: 8091, SEQ ID NO: 3026/SEQ ID NO: 8092, SEQ ID NO: 3027/SEQ ID NO: 8093, SEQ ID NO: 3028/SEQ ID NO: 8094, SEQ ID NO: 3030/SEQ ID NO: 8095, SEQ ID NO: 3031/SEQ ID NO: 8096, SEQ ID NO: 3032/SEQ ID NO: 8097, SEQ ID NO: 3033/SEQ ID NO: 8098, SEQ ID NO: 3034/SEQ ID NO: 8099, SEQ ID NO: 3035/SEQ ID NO: 8100, SEQ ID NO: 3036/SEQ ID NO: 8101, SEQ ID NO: 3037/SEQ ID NO: 8102, SEQ ID NO: 3038/SEQ ID NO: 8103, SEQ ID NO: 3039/SEQ ID NO: 8104, SEQ ID NO: 3040/SEQ ID NO: 8105, SEQ ID NO: 3041/SEQ ID NO: 8106, SEQ ID NO: 3042/SEQ ID NO: 8107, SEQ ID NO: 3043/SEQ ID NO: 8108, SEQ ID NO: 3044/SEQ ID NO: 8109, SEQ ID NO: 3045/SEQ ID NO: 8110, SEQ ID NO: 3046/SEQ ID NO: 8111, SEQ ID NO: 3047/SEQ ID NO: 8112, SEQ ID NO: 3048/SEQ ID NO: 8113, SEQ ID NO: 3049/SEQ ID NO: 8114, SEQ ID NO: 3050/SEQ ID NO: 8115, SEQ ID NO: 3051/SEQ ID NO: 8116, SEQ ID NO: 3052/SEQ ID NO: 8117, SEQ ID NO: 3053/SEQ ID NO: 8118, SEQ ID NO: 3054/SEQ ID NO: 8119, SEQ ID NO: 3055/SEQ ID NO: 8120, SEQ ID NO: 3056/SEQ ID NO: 8121, SEQ ID NO: 3057/SEQ ID NO: 8122, SEQ ID NO: 3059/SEQ ID NO: 8123, SEQ ID NO: 3060/SEQ ID NO: 8124, SEQ ID NO: 3061/SEQ ID NO: 8125, SEQ ID NO: 3062/SEQ ID NO: 8126, SEQ ID NO: 3063/SEQ ID NO: 8127, SEQ ID NO: 3064/SEQ ID NO: 8128, SEQ ID NO: 3065/SEQ ID NO: 8129, SEQ ID NO: 3066/SEQ ID NO: 8130, SEQ ID NO: 3067/SEQ ID NO: 8131, SEQ ID NO: 3068/SEQ ID NO: 8132, SEQ ID NO: 3069/SEQ ID NO: 8133, SEQ ID NO: 3070/SEQ ID NO: 8134, SEQ ID NO: 3071/SEQ ID NO: 8135, SEQ ID NO: 3072/SEQ ID NO: 8136, SEQ ID NO: 3073/SEQ ID NO: 8137, SEQ ID NO: 3074/SEQ ID NO: 8138, SEQ ID NO: 3075/SEQ ID NO: 8139, SEQ ID NO: 3076/SEQ ID NO: 8140, SEQ ID NO: 3077/SEQ ID NO: 8141, SEQ ID NO: 3078/SEQ ID NO: 8142, SEQ ID NO: 3079/SEQ ID NO: 8143, SEQ ID NO: 3080/SEQ ID NO: 8144, SEQ ID NO: 3081/SEQ ID NO: 8145, SEQ ID NO: 3082/SEQ ID NO: 8146, SEQ ID NO: 3083/SEQ ID NO: 8147,
SEQ ID NO: 3084/SEQ ID NO: 8148, SEQ ID NO: 3085/SEQ ID NO: 8149, SEQ ID NO: 3086/SEQ ID NO: 8150, SEQ ID NO: 3087/SEQ ID NO: 8151, SEQ ID NO: 3088/SEQ ID NO: 8152, SEQ ID NO: 3089/SEQ ID NO: 8153, SEQ ID NO: 3091/SEQ ID NO: 8154, SEQ ID NO: 3092/SEQ ID NO: 8155, SEQ ID NO: 3093/SEQ ID NO: 8156, SEQ ID NO: 3094/SEQ ID NO: 8157, SEQ ID NO: 3095/SEQ ID NO: 8158, SEQ ID NO: 3096/SEQ ID NO: 8159, SEQ ID NO: 3097/SEQ ID NO: 8160, SEQ ID NO: 3098/SEQ ID NO: 8161, SEQ ID NO: 3099/SEQ ID NO: 8162, SEQ ID NO: 3100/SEQ ID NO: 8163, SEQ ID NO: 3101/SEQ ID NO: 8164, SEQ ID NO: 3102/SEQ ID NO: 8165, SEQ ID NO: 3103/SEQ ID NO: 8166, SEQ ID NO: 3104/SEQ ID NO: 8167, SEQ ID NO: 3105/SEQ ID NO: 8168, SEQ ID NO: 3106/SEQ ID NO: 8169, SEQ ID NO: 3108/SEQ ID NO: 8170, SEQ ID NO: 3109/SEQ ID NO: 8171, SEQ ID NO: 3110/SEQ ID NO: 8172, SEQ ID NO: 3111/SEQ ID NO: 8173, SEQ ID NO: 3112/SEQ ID NO: 8174, SEQ ID NO: 3113/SEQ ID NO: 8175, SEQ ID NO: 3114/SEQ ID NO: 8176, SEQ ID NO: 3115/SEQ ID NO: 8177, SEQ ID NO: 3116/SEQ ID NO: 8178, SEQ ID NO: 3117/SEQ ID NO: 8179, SEQ ID NO: 3118/SEQ ID NO: 8180, SEQ ID NO: 3119/SEQ ID NO: 8181, SEQ ID NO: 3120/SEQ ID NO: 8182, SEQ ID NO: 3121/SEQ ID NO: 8183, SEQ ID NO: 3122/SEQ ID NO: 8184, SEQ ID NO: 3123/SEQ ID NO: 8185, SEQ ID NO: 3124/SEQ ID NO: 8186, SEQ ID NO: 3125/SEQ ID NO: 8187, SEQ ID NO: 3126/SEQ ID NO: 8188, SEQ ID NO: 3128/SEQ ID NO: 8189, SEQ ID NO: 3129/SEQ ID NO: 8190, SEQ ID NO: 3130/SEQ ID NO: 8191, SEQ ID NO: 3131/SEQ ID NO: 8192, SEQ ID NO: 3132/SEQ ID NO: 8193, SEQ ID NO: 3133/SEQ ID NO: 8194, SEQ ID NO: 3134/SEQ ID NO: 8195, SEQ ID NO: 3135/SEQ ID NO: 8196, SEQ ID NO: 3136/SEQ ID NO: 8197, SEQ ID NO: 3137/SEQ ID NO: 8198, SEQ ID NO: 3138/SEQ ID NO: 8199, SEQ ID NO: 3139/SEQ ID NO: 8200, SEQ ID NO: 3140/SEQ ID NO: 8201, SEQ ID NO: 3141/SEQ ID NO: 8202, SEQ ID NO: 3142/SEQ ID NO: 8203, SEQ ID NO: 3144/SEQ ID NO: 8204, SEQ ID NO: 3145/SEQ ID NO: 8205, SEQ ID NO: 3146/SEQ ID NO: 8206, SEQ ID NO: 3147/SEQ ID NO: 8207, SEQ ID NO: 3148/SEQ ID NO: 8208, SEQ ID NO: 3149/SEQ ID NO: 8209, SEQ ID NO: 3150/SEQ ID NO: 8210, SEQ ID NO: 3151/SEQ ID NO: 8211, SEQ ID NO: 3152/SEQ ID NO: 8212, SEQ ID NO: 3153/SEQ ID NO: 8213, SEQ ID NO: 3154/SEQ ID NO: 8214, SEQ ID NO: 3156/SEQ ID NO: 8215, SEQ ID NO: 3157/SEQ ID NO: 8216, SEQ ID NO: 3158/SEQ ID NO: 8217, SEQ ID NO: 3159/SEQ ID NO: 8218, SEQ ID NO: 3160/SEQ ID NO: 8219, SEQ ID NO: 3161/SEQ ID NO: 8220, SEQ ID NO: 3162/SEQ ID NO: 8221, SEQ ID NO: 3163/SEQ ID NO: 8222, SEQ ID NO: 3164/SEQ ID NO: 8223, SEQ ID NO: 3165/SEQ ID NO: 8224, SEQ ID NO: 3166/SEQ ID NO: 8225, SEQ ID NO: 3167/SEQ ID NO: 8226, SEQ ID NO: 3168/SEQ ID NO: 8227, SEQ ID NO: 3169/SEQ ID NO: 8228, SEQ ID NO: 3170/SEQ ID NO: 8229, SEQ ID NO: 3171/SEQ ID NO: 8230, SEQ ID NO: 3172/SEQ ID NO: 8231, SEQ ID NO: 3173/SEQ ID NO: 8232, SEQ ID NO: 3174/SEQ ID NO: 8233, SEQ ID NO: 3175/SEQ ID NO: 8234, SEQ ID NO: 3176/SEQ ID NO: 8235, SEQ ID NO: 3177/SEQ ID NO: 8236, SEQ ID NO: 3178/SEQ ID NO: 8237, SEQ ID NO: 3179/SEQ ID NO: 8238, SEQ ID NO: 3180/SEQ ID NO: 8239, SEQ ID NO: 3181/SEQ ID NO: 8240, SEQ ID NO: 3182/SEQ ID NO: 8241, SEQ ID NO: 3184/SEQ ID NO: 8242, SEQ ID NO: 3185/SEQ ID NO: 8243, SEQ ID NO: 3186/SEQ ID NO: 8244, SEQ ID NO: 3188/SEQ ID NO: 8245, SEQ ID NO: 3189/SEQ ID NO: 8246, SEQ ID NO: 3190/SEQ ID NO: 8247,
SEQ ID NO: 3191/SEQ ID NO: 8248, SEQ ID NO: 3192/SEQ ID NO: 8249, SEQ ID NO: 3193/SEQ ID NO: 8250, SEQ ID NO: 3194/SEQ ID NO: 8251, SEQ ID NO: 3195/SEQ ID NO: 8252, SEQ ID NO: 3196/SEQ ID NO: 8253, SEQ ID NO: 3197/SEQ ID NO: 8254, SEQ ID NO: 3198/SEQ ID NO: 8255, SEQ ID NO: 3199/SEQ ID NO: 8256, SEQ ID NO: 3200/SEQ ID NO: 8257, SEQ ID NO: 3201/SEQ ID NO: 8258, SEQ ID NO: 3202/SEQ ID NO: 8259, SEQ ID NO: 3203/SEQ ID NO: 8260, SEQ ID NO: 3204/SEQ ID NO: 8261, SEQ ID NO: 3205/SEQ ID NO: 8262, SEQ ID NO: 3206/SEQ ID NO: 8263, SEQ ID NO: 3207/SEQ ID NO: 8264, SEQ ID NO: 3208/SEQ ID NO: 8265, SEQ ID NO: 3209/SEQ ID NO: 8266, SEQ ID NO: 3210/SEQ ID NO: 8267, SEQ ID NO: 3211/SEQ ID NO: 8268, SEQ ID NO: 3212/SEQ ID NO: 8269, SEQ ID NO: 3213/SEQ ID NO: 8270, SEQ ID NO: 3215/SEQ ID NO: 8271, SEQ ID NO: 3216/SEQ ID NO: 8272, SEQ ID NO: 3217/SEQ ID NO: 8273, SEQ ID NO: 3218/SEQ ID NO: 8274, SEQ ID NO: 3219/SEQ ID NO: 8275, SEQ ID NO: 3220/SEQ ID NO: 8276, SEQ ID NO: 3221/SEQ ID NO: 8277, SEQ ID NO: 3222/SEQ ID NO: 8278, SEQ ID NO: 3223/SEQ ID NO: 8279, SEQ ID NO: 3224/SEQ ID NO: 8280, SEQ ID NO: 3225/SEQ ID NO: 8281, SEQ ID NO: 3226/SEQ ID NO: 8282, SEQ ID NO: 3227/SEQ ID NO: 8283, SEQ ID NO: 3228/SEQ ID NO: 8284, SEQ ID NO: 3229/SEQ ID NO: 8285, SEQ ID NO: 3230/SEQ ID NO: 8286, SEQ ID NO: 3231/SEQ ID NO: 8287, SEQ ID NO: 3232/SEQ ID NO: 8288, SEQ ID NO: 3233/SEQ ID NO: 8289, SEQ ID NO: 3234/SEQ ID NO: 8290, SEQ ID NO: 3235/SEQ ID NO: 8291, SEQ ID NO: 3236/SEQ ID NO: 8292, SEQ ID NO: 3237/SEQ ID NO: 8293, SEQ ID NO: 3238/SEQ ID NO: 8294, SEQ ID NO: 3239/SEQ ID NO: 8295, SEQ ID NO: 3241/SEQ ID NO: 8296, SEQ ID NO: 3242/SEQ ID NO: 8297, SEQ ID NO: 3243/SEQ ID NO: 8298, SEQ ID NO: 3244/SEQ ID NO: 8299, SEQ ID NO: 3245/SEQ ID NO: 8300, SEQ ID NO: 3246/SEQ ID NO: 8301, SEQ ID NO: 3247/SEQ ID NO: 8302, SEQ ID NO: 3248/SEQ ID NO: 8303, SEQ ID NO: 3249/SEQ ID NO: 8304, SEQ ID NO: 3250/SEQ ID NO: 8305, SEQ ID NO: 3251/SEQ ID NO: 8306, SEQ ID NO: 3253/SEQ ID NO: 8307, SEQ ID NO: 3254/SEQ ID NO: 8308, SEQ ID NO: 3255/SEQ ID NO: 8309, SEQ ID NO: 3256/SEQ ID NO: 8310, SEQ ID NO: 3257/SEQ ID NO: 8311, SEQ ID NO: 3258/SEQ ID NO: 8312, SEQ ID NO: 3259/SEQ ID NO: 8313, SEQ ID NO: 3260/SEQ ID NO: 8314, SEQ ID NO: 3261/SEQ ID NO: 8315, SEQ ID NO: 3262/SEQ ID NO: 8316, SEQ ID NO: 3263/SEQ ID NO: 8317, SEQ ID NO: 3264/SEQ ID NO: 8318, SEQ ID NO: 3265/SEQ ID NO: 8319, SEQ ID NO: 3266/SEQ ID NO: 8320, SEQ ID NO: 3267/SEQ ID NO: 8321, SEQ ID NO: 3268/SEQ ID NO: 8322, SEQ ID NO: 3269/SEQ ID NO: 8323, SEQ ID NO: 3270/SEQ ID NO: 8324, SEQ ID NO: 3271/SEQ ID NO: 8325, SEQ ID NO: 3272/SEQ ID NO: 8326, SEQ ID NO: 3273/SEQ ID NO: 8327, SEQ ID NO: 3274/SEQ ID NO: 8328, SEQ ID NO: 3275/SEQ ID NO: 8329, SEQ ID NO: 3276/SEQ ID NO: 8330, SEQ ID NO: 3277/SEQ ID NO: 8331, SEQ ID NO: 3278/SEQ ID NO: 8332, SEQ ID NO: 3279/SEQ ID NO: 8333, SEQ ID NO: 3280/SEQ ID NO: 8334, SEQ ID NO: 3281/SEQ ID NO: 8335, SEQ ID NO: 3282/SEQ ID NO: 8336, SEQ ID NO: 3283/SEQ ID NO: 8337, SEQ ID NO: 3284/SEQ ID NO: 8338, SEQ ID NO: 3285/SEQ ID NO: 8339, SEQ ID NO: 3286/SEQ ID NO: 8340, SEQ ID NO: 3287/SEQ ID NO: 8341, SEQ ID NO: 3288/SEQ ID NO: 8342, SEQ ID NO: 3289/SEQ ID NO: 8343, SEQ ID NO: 3290/SEQ ID NO: 8344, SEQ ID NO: 3291/SEQ ID NO: 8345, SEQ ID NO: 3292/SEQ ID NO: 8346, SEQ ID NO: 3293/SEQ ID NO: 8347,
SEQ ID NO: 3294/SEQ ID NO: 8348, SEQ ID NO: 3295/SEQ ID NO: 8349, SEQ ID NO: 3296/SEQ ID NO: 8350, SEQ ID NO: 3297/SEQ ID NO: 8351, SEQ ID NO: 3298/SEQ ID NO: 8352, SEQ ID NO: 3299/SEQ ID NO: 8353, SEQ ID NO: 3300/SEQ ID NO: 8354, SEQ ID NO: 3301/SEQ ID NO: 8355, SEQ ID NO: 3302/SEQ ID NO: 8356, SEQ ID NO: 3303/SEQ ID NO: 8357, SEQ ID NO: 3304/SEQ ID NO: 8358, SEQ ID NO: 3305/SEQ ID NO: 8359, SEQ ID NO: 3306/SEQ ID NO: 8360, SEQ ID NO: 3307/SEQ ID NO: 8361, SEQ ID NO: 3308/SEQ ID NO: 8362, SEQ ID NO: 3309/SEQ ID NO: 8363, SEQ ID NO: 3310/SEQ ID NO: 8364, SEQ ID NO: 3311/SEQ ID NO: 8365, SEQ ID NO: 3313/SEQ ID NO: 8366, SEQ ID NO: 3314/SEQ ID NO: 8367, SEQ ID NO: 3315/SEQ ID NO: 8368, SEQ ID NO: 3316/SEQ ID NO: 8369, SEQ ID NO: 3317/SEQ ID NO: 8370, SEQ ID NO: 3318/SEQ ID NO: 8371, SEQ ID NO: 3319/SEQ ID NO: 8372, SEQ ID NO: 3321/SEQ ID NO: 8373, SEQ ID NO: 3322/SEQ ID NO: 8374, SEQ ID NO: 3323/SEQ ID NO: 8375, SEQ ID NO: 3324/SEQ ID NO: 8376, SEQ ID NO: 3325/SEQ ID NO: 8377, SEQ ID NO: 3326/SEQ ID NO: 8378, SEQ ID NO: 3327/SEQ ID NO: 8379, SEQ ID NO: 3328/SEQ ID NO: 8380, SEQ ID NO: 3329/SEQ ID NO: 8381, SEQ ID NO: 3330/SEQ ID NO: 8382, SEQ ID NO: 3331/SEQ ID NO: 8383, SEQ ID NO: 3332/SEQ ID NO: 8384, SEQ ID NO: 3333/SEQ ID NO: 8385, SEQ ID NO: 3334/SEQ ID NO: 8386, SEQ ID NO: 3335/SEQ ID NO: 8387, SEQ ID NO: 3336/SEQ ID NO: 8388, SEQ ID NO: 3337/SEQ ID NO: 8389, SEQ ID NO: 3338/SEQ ID NO: 8390, SEQ ID NO: 3339/SEQ ID NO: 8391, SEQ ID NO: 3340/SEQ ID NO: 8392, SEQ ID NO: 3341/SEQ ID NO: 8393, SEQ ID NO: 3342/SEQ ID NO: 8394, SEQ ID NO: 3343/SEQ ID NO: 8395, SEQ ID NO: 3344/SEQ ID NO: 8396, SEQ ID NO: 3345/SEQ ID NO: 8397, SEQ ID NO: 3346/SEQ ID NO: 8398, SEQ ID NO: 3347/SEQ ID NO: 8399, SEQ ID NO: 3348/SEQ ID NO: 8400, SEQ ID NO: 3349/SEQ ID NO: 8401, SEQ ID NO: 3350/SEQ ID NO: 8402, SEQ ID NO: 3351/SEQ ID NO: 8403, SEQ ID NO: 3352/SEQ ID NO: 8404, SEQ ID NO: 3353/SEQ ID NO: 8405, SEQ ID NO: 3354/SEQ ID NO: 8406, SEQ ID NO: 3355/SEQ ID NO: 8407, SEQ ID NO: 3356/SEQ ID NO: 8408, SEQ ID NO: 3357/SEQ ID NO: 8409, SEQ ID NO: 3358/SEQ ID NO: 8410, SEQ ID NO: 3359/SEQ ID NO: 8411, SEQ ID NO: 3360/SEQ ID NO: 8412, SEQ ID NO: 3361/SEQ ID NO: 8413, SEQ ID NO: 3362/SEQ ID NO: 8414, SEQ ID NO: 3363/SEQ ID NO: 8415, SEQ ID NO: 3365/SEQ ID NO: 8416, SEQ ID NO: 3366/SEQ ID NO: 8417, SEQ ID NO: 3367/SEQ ID NO: 8418, SEQ ID NO: 3368/SEQ ID NO: 8419, SEQ ID NO: 3370/SEQ ID NO: 8420, SEQ ID NO: 3371/SEQ ID NO: 8421, SEQ ID NO: 3372/SEQ ID NO: 8422, SEQ ID NO: 3373/SEQ ID NO: 8423, SEQ ID NO: 3374/SEQ ID NO: 8424, SEQ ID NO: 3375/SEQ ID NO: 8425, SEQ ID NO: 3376/SEQ ID NO: 8426, SEQ ID NO: 3377/SEQ ID NO: 8427, SEQ ID NO: 3378/SEQ ID NO: 8428, SEQ ID NO: 3379/SEQ ID NO: 8429, SEQ ID NO: 3380/SEQ ID NO: 8430, SEQ ID NO: 3381/SEQ ID NO: 8431, SEQ ID NO: 3382/SEQ ID NO: 8432, SEQ ID NO: 3384/SEQ ID NO: 8433, SEQ ID NO: 3385/SEQ ID NO: 8434, SEQ ID NO: 3386/SEQ ID NO: 8435, SEQ ID NO: 3387/SEQ ID NO: 8436, SEQ ID NO: 3388/SEQ ID NO: 8437, SEQ ID NO: 3389/SEQ ID NO: 8438, SEQ ID NO: 3390/SEQ ID NO: 8439, SEQ ID NO: 3391/SEQ ID NO: 8440, SEQ ID NO: 3392/SEQ ID NO: 8441, SEQ ID NO: 3393/SEQ ID NO: 8442, SEQ ID NO: 3394/SEQ ID NO: 8443, SEQ ID NO: 3395/SEQ ID NO: 8444, SEQ ID NO: 3396/SEQ ID NO: 8445, SEQ ID NO: 3397/SEQ ID NO: 8446, SEQ ID NO: 3398/SEQ ID NO: 8447,
SEQ ID NO: 3399/SEQ ID NO: 8448, SEQ ID NO: 3400/SEQ ID NO: 8449, SEQ ID NO: 3401/SEQ ID NO: 8450, SEQ ID NO: 3402/SEQ ID NO: 8451, SEQ ID NO: 3403/SEQ ID NO: 8452, SEQ ID NO: 3404/SEQ ID NO: 8453, SEQ ID NO: 3405/SEQ ID NO: 8454, SEQ ID NO: 3406/SEQ ID NO: 8455, SEQ ID NO: 3407/SEQ ID NO: 8456, SEQ ID NO: 3408/SEQ ID NO: 8457, SEQ ID NO: 3409/SEQ ID NO: 8458, SEQ ID NO: 3411/SEQ ID NO: 8459, SEQ ID NO: 3412/SEQ ID NO: 8460, SEQ ID NO: 3413/SEQ ID NO: 8461, SEQ ID NO: 3414/SEQ ID NO: 8462, SEQ ID NO: 3415/SEQ ID NO: 8463, SEQ ID NO: 3416/SEQ ID NO: 8464, SEQ ID NO: 3417/SEQ ID NO: 8465, SEQ ID NO: 3418/SEQ ID NO: 8466, SEQ ID NO: 3419/SEQ ID NO: 8467, SEQ ID NO: 3420/SEQ ID NO: 8468, SEQ ID NO: 3421/SEQ ID NO: 8469, SEQ ID NO: 3422/SEQ ID NO: 8470, SEQ ID NO: 3423/SEQ ID NO: 8471, SEQ ID NO: 3424/SEQ ID NO: 8472, SEQ ID NO: 3425/SEQ ID NO: 8473, SEQ ID NO: 3426/SEQ ID NO: 8474, SEQ ID NO: 3427/SEQ ID NO: 8475, SEQ ID NO: 3428/SEQ ID NO: 8476, SEQ ID NO: 3429/SEQ ID NO: 8477, SEQ ID NO: 3433/SEQ ID NO: 8478, SEQ ID NO: 3434/SEQ ID NO: 8479, SEQ ID NO: 3435/SEQ ID NO: 8480, SEQ ID NO: 3436/SEQ ID NO: 8481, SEQ ID NO: 3437/SEQ ID NO: 8482, SEQ ID NO: 3438/SEQ ID NO: 8483, SEQ ID NO: 3439/SEQ ID NO: 8484, SEQ ID NO: 3440/SEQ ID NO: 8485, SEQ ID NO: 3441/SEQ ID NO: 8486, SEQ ID NO: 3442/SEQ ID NO: 8487, SEQ ID NO: 3443/SEQ ID NO: 8488, SEQ ID NO: 3444/SEQ ID NO: 8489, SEQ ID NO: 3446/SEQ ID NO: 8490, SEQ ID NO: 3448/SEQ ID NO: 8491, SEQ ID NO: 3449/SEQ ID NO: 8492, SEQ ID NO: 3450/SEQ ID NO: 8493, SEQ ID NO: 3451/SEQ ID NO: 8494, SEQ ID NO: 3452/SEQ ID NO: 8495, SEQ ID NO: 3453/SEQ ID NO: 8496, SEQ ID NO: 3454/SEQ ID NO: 8497, SEQ ID NO: 3455/SEQ ID NO: 8498, SEQ ID NO: 3456/SEQ ID NO: 8499, SEQ ID NO: 3457/SEQ ID NO: 8500, SEQ ID NO: 3458/SEQ ID NO: 8501, SEQ ID NO: 3459/SEQ ID NO: 8502, SEQ ID NO: 3460/SEQ ID NO: 8503, SEQ ID NO: 3461/SEQ ID NO: 8504, SEQ ID NO: 3462/SEQ ID NO: 8505, SEQ ID NO: 3463/SEQ ID NO: 8506, SEQ ID NO: 3464/SEQ ID NO: 8507, SEQ ID NO: 3465/SEQ ID NO: 8508, SEQ ID NO: 3466/SEQ ID NO: 8509, SEQ ID NO: 3467/SEQ ID NO: 8510, SEQ ID NO: 3468/SEQ ID NO: 8511, SEQ ID NO: 3469/SEQ ID NO: 8512, SEQ ID NO: 3470/SEQ ID NO: 8513, SEQ ID NO: 3471/SEQ ID NO: 8514, SEQ ID NO: 3472/SEQ ID NO: 8515, SEQ ID NO: 3473/SEQ ID NO: 8516, SEQ ID NO: 3474/SEQ ID NO: 8517, SEQ ID NO: 3476/SEQ ID NO: 8518, SEQ ID NO: 3477/SEQ ID NO: 8519, SEQ ID NO: 3478/SEQ ID NO: 8520, SEQ ID NO: 3479/SEQ ID NO: 8521, SEQ ID NO: 3480/SEQ ID NO: 8522, SEQ ID NO: 3481/SEQ ID NO: 8523, SEQ ID NO: 3482/SEQ ID NO: 8524, SEQ ID NO: 3483/SEQ ID NO: 8525, SEQ ID NO: 3484/SEQ ID NO: 8526, SEQ ID NO: 3485/SEQ ID NO: 8527, SEQ ID NO: 3486/SEQ ID NO: 8528, SEQ ID NO: 3487/SEQ ID NO: 8529, SEQ ID NO: 3488/SEQ ID NO: 8530, SEQ ID NO: 3490/SEQ ID NO: 8531, SEQ ID NO: 3491/SEQ ID NO: 8532, SEQ ID NO: 3492/SEQ ID NO: 8533, SEQ ID NO: 3493/SEQ ID NO: 8534, SEQ ID NO: 3494/SEQ ID NO: 8535, SEQ ID NO: 3495/SEQ ID NO: 8536, SEQ ID NO: 3496/SEQ ID NO: 8537, SEQ ID NO: 3498/SEQ ID NO: 8538, SEQ ID NO: 3499/SEQ ID NO: 8539, SEQ ID NO: 3500/SEQ ID NO: 8540, SEQ ID NO: 3501/SEQ ID NO: 8541, SEQ ID NO: 3502/SEQ ID NO: 8542, SEQ ID NO: 3503/SEQ ID NO: 8543, SEQ ID NO: 3504/SEQ ID NO: 8544, SEQ ID NO: 3505/SEQ ID NO: 8545, SEQ ID NO: 3506/SEQ ID NO: 8546, SEQ ID NO: 3507/SEQ ID NO: 8547,
SEQ ID NO: 3508/SEQ ID NO: 8548, SEQ ID NO: 3509/SEQ ID NO: 8549, SEQ ID NO: 3510/SEQ ID NO: 8550, SEQ ID NO: 3511/SEQ ID NO: 8551, SEQ ID NO: 3512/SEQ ID NO: 8552, SEQ ID NO: 3513/SEQ ID NO: 8553, SEQ ID NO: 3514/SEQ ID NO: 8554, SEQ ID NO: 3515/SEQ ID NO: 8555, SEQ ID NO: 3516/SEQ ID NO: 8556, SEQ ID NO: 3517/SEQ ID NO: 8557, SEQ ID NO: 3518/SEQ ID NO: 8558, SEQ ID NO: 3519/SEQ ID NO: 8559, SEQ ID NO: 3520/SEQ ID NO: 8560, SEQ ID NO: 3521/SEQ ID NO: 8561, SEQ ID NO: 3522/SEQ ID NO: 8562, SEQ ID NO: 3523/SEQ ID NO: 8563, SEQ ID NO: 3524/SEQ ID NO: 8564, SEQ ID NO: 3525/SEQ ID NO: 8565, SEQ ID NO: 3526/SEQ ID NO: 8566, SEQ ID NO: 3527/SEQ ID NO: 8567, SEQ ID NO: 3528/SEQ ID NO: 8568, SEQ ID NO: 3529/SEQ ID NO: 8569, SEQ ID NO: 3530/SEQ ID NO: 8570, SEQ ID NO: 3531/SEQ ID NO: 8571, SEQ ID NO: 3532/SEQ ID NO: 8572, SEQ ID NO: 3533/SEQ ID NO: 8573, SEQ ID NO: 3535/SEQ ID NO: 8574, SEQ ID NO: 3536/SEQ ID NO: 8575, SEQ ID NO: 3537/SEQ ID NO: 8576, SEQ ID NO: 3538/SEQ ID NO: 8577, SEQ ID NO: 3539/SEQ ID NO: 8578, SEQ ID NO: 3541/SEQ ID NO: 8579, SEQ ID NO: 3542/SEQ ID NO: 8580, SEQ ID NO: 3543/SEQ ID NO: 8581, SEQ ID NO: 3544/SEQ ID NO: 8582, SEQ ID NO: 3545/SEQ ID NO: 8583, SEQ ID NO: 3546/SEQ ID NO: 8584, SEQ ID NO: 3547/SEQ ID NO: 8585, SEQ ID NO: 3548/SEQ ID NO: 8586, SEQ ID NO: 3549/SEQ ID NO: 8587, SEQ ID NO: 3550/SEQ ID NO: 8588, SEQ ID NO: 3551/SEQ ID NO: 8589, SEQ ID NO: 3552/SEQ ID NO: 8590, SEQ ID NO: 3553/SEQ ID NO: 8591, SEQ ID NO: 3554/SEQ ID NO: 8592, SEQ ID NO: 3555/SEQ ID NO: 8593, SEQ ID NO: 3556/SEQ ID NO: 8594, SEQ ID NO: 3557/SEQ ID NO: 8595, SEQ ID NO: 3558/SEQ ID NO: 8596, SEQ ID NO: 3559/SEQ ID NO: 8597, SEQ ID NO: 3560/SEQ ID NO: 8598, SEQ ID NO: 3561/SEQ ID NO: 8599, SEQ ID NO: 3562/SEQ ID NO: 8600, SEQ ID NO: 3563/SEQ ID NO: 8601, SEQ ID NO: 3564/SEQ ID NO: 8602, SEQ ID NO: 3565/SEQ ID NO: 8603, SEQ ID NO: 3566/SEQ ID NO: 8604, SEQ ID NO: 3567/SEQ ID NO: 8605, SEQ ID NO: 3568/SEQ ID NO: 8606, SEQ ID NO: 3569/SEQ ID NO: 8607, SEQ ID NO: 3570/SEQ ID NO: 8608, SEQ ID NO: 3571/SEQ ID NO: 8609, SEQ ID NO: 3572/SEQ ID NO: 8610, SEQ ID NO: 3573/SEQ ID NO: 8611, SEQ ID NO: 3574/SEQ ID NO: 8612, SEQ ID NO: 3575/SEQ ID NO: 8613, SEQ ID NO: 3576/SEQ ID NO: 8614, SEQ ID NO: 3577/SEQ ID NO: 8615, SEQ ID NO: 3579/SEQ ID NO: 8616, SEQ ID NO: 3580/SEQ ID NO: 8617, SEQ ID NO: 3581/SEQ ID NO: 8618, SEQ ID NO: 3582/SEQ ID NO: 8619, SEQ ID NO: 3583/SEQ ID NO: 8620, SEQ ID NO: 3584/SEQ ID NO: 8621, SEQ ID NO: 3585/SEQ ID NO: 8622, SEQ ID NO: 3586/SEQ ID NO: 8623, SEQ ID NO: 3587/SEQ ID NO: 8624, SEQ ID NO: 3590/SEQ ID NO: 8625, SEQ ID NO: 3591/SEQ ID NO: 8626, SEQ ID NO: 3592/SEQ ID NO: 8627, SEQ ID NO: 3593/SEQ ID NO: 8628, SEQ ID NO: 3594/SEQ ID NO: 8629, SEQ ID NO: 3595/SEQ ID NO: 8630, SEQ ID NO: 3596/SEQ ID NO: 8631, SEQ ID NO: 3597/SEQ ID NO: 8632, SEQ ID NO: 3598/SEQ ID NO: 8633, SEQ ID NO: 3599/SEQ ID NO: 8634, SEQ ID NO: 3600/SEQ ID NO: 8635, SEQ ID NO: 3601/SEQ ID NO: 8636, SEQ ID NO: 3602/SEQ ID NO: 8637, SEQ ID NO: 3603/SEQ ID NO: 8638, SEQ ID NO: 3604/SEQ ID NO: 8639, SEQ ID NO: 3605/SEQ ID NO: 8640, SEQ ID NO: 3606/SEQ ID NO: 8641, SEQ ID NO: 3607/SEQ ID NO: 8642, SEQ ID NO: 3608/SEQ ID NO: 8643, SEQ ID NO: 3609/SEQ ID NO: 8644, SEQ ID NO: 3610/SEQ ID NO: 8645, SEQ ID NO: 3611/SEQ ID NO: 8646, SEQ ID NO: 3613/SEQ ID NO: 8647,
SEQ ID NO: 3614/SEQ ID NO: 8648, SEQ ID NO: 3615/SEQ ID NO: 8649, SEQ ID NO: 3616/SEQ ID NO: 8650, SEQ ID NO: 3617/SEQ ID NO: 8651, SEQ ID NO: 3618/SEQ ID NO: 8652, SEQ ID NO: 3619/SEQ ID NO: 8653, SEQ ID NO: 3620/SEQ ID NO: 8654, SEQ ID NO: 3622/SEQ ID NO: 8655, SEQ ID NO: 3623/SEQ ID NO: 8656, SEQ ID NO: 3624/SEQ ID NO: 8657, SEQ ID NO: 3625/SEQ ID NO: 8658, SEQ ID NO: 3626/SEQ ID NO: 8659, SEQ ID NO: 3627/SEQ ID NO: 8660, SEQ ID NO: 3628/SEQ ID NO: 8661, SEQ ID NO: 3629/SEQ ID NO: 8662, SEQ ID NO: 3630/SEQ ID NO: 8663, SEQ ID NO: 3632/SEQ ID NO: 8664, SEQ ID NO: 3633/SEQ ID NO: 8665, SEQ ID NO: 3634/SEQ ID NO: 8666, SEQ ID NO: 3635/SEQ ID NO: 8667, SEQ ID NO: 3636/SEQ ID NO: 8668, SEQ ID NO: 3637/SEQ ID NO: 8669, SEQ ID NO: 3638/SEQ ID NO: 8670, SEQ ID NO: 3639/SEQ ID NO: 8671, SEQ ID NO: 3640/SEQ ID NO: 8672, SEQ ID NO: 3641/SEQ ID NO: 8673, SEQ ID NO: 3642/SEQ ID NO: 8674, SEQ ID NO: 3643/SEQ ID NO: 8675, SEQ ID NO: 3644/SEQ ID NO: 8676, SEQ ID NO: 3645/SEQ ID NO: 8677, SEQ ID NO: 3646/SEQ ID NO: 8678, SEQ ID NO: 3647/SEQ ID NO: 8679, SEQ ID NO: 3648/SEQ ID NO: 8680, SEQ ID NO: 3649/SEQ ID NO: 8681, SEQ ID NO: 3650/SEQ ID NO: 8682, SEQ ID NO: 3651/SEQ ID NO: 8683, SEQ ID NO: 3652/SEQ ID NO: 8684, SEQ ID NO: 3653/SEQ ID NO: 8685, SEQ ID NO: 3654/SEQ ID NO: 8686, SEQ ID NO: 3655/SEQ ID NO: 8687, SEQ ID NO: 3656/SEQ ID NO: 8688, SEQ ID NO: 3658/SEQ ID NO: 8689, SEQ ID NO: 3659/SEQ ID NO: 8690, SEQ ID NO: 3660/SEQ ID NO: 8691, SEQ ID NO: 3661/SEQ ID NO: 8692, SEQ ID NO: 3662/SEQ ID NO: 8693, SEQ ID NO: 3663/SEQ ID NO: 8694, SEQ ID NO: 3664/SEQ ID NO: 8695, SEQ ID NO: 3665/SEQ ID NO: 8696, SEQ ID NO: 3666/SEQ ID NO: 8697, SEQ ID NO: 3668/SEQ ID NO: 8698, SEQ ID NO: 3669/SEQ ID NO: 8699, SEQ ID NO: 3670/SEQ ID NO: 8700, SEQ ID NO: 3671/SEQ ID NO: 8701, SEQ ID NO: 3672/SEQ ID NO: 8702, SEQ ID NO: 3673/SEQ ID NO: 8703, SEQ ID NO: 3674/SEQ ID NO: 8704, SEQ ID NO: 3675/SEQ ID NO: 8705, SEQ ID NO: 3676/SEQ ID NO: 8706, SEQ ID NO: 3678/SEQ ID NO: 8707, SEQ ID NO: 3679/SEQ ID NO: 8708, SEQ ID NO: 3680/SEQ ID NO: 8709, SEQ ID NO: 3681/SEQ ID NO: 8710, SEQ ID NO: 3682/SEQ ID NO: 8711, SEQ ID NO: 3683/SEQ ID NO: 8712, SEQ ID NO: 3685/SEQ ID NO: 8713, SEQ ID NO: 3686/SEQ ID NO: 8714, SEQ ID NO: 3688/SEQ ID NO: 8715, SEQ ID NO: 3689/SEQ ID NO: 8716, SEQ ID NO: 3691/SEQ ID NO: 8717, SEQ ID NO: 3692/SEQ ID NO: 8718, SEQ ID NO: 3693/SEQ ID NO: 8719, SEQ ID NO: 3695/SEQ ID NO: 8720, SEQ ID NO: 3696/SEQ ID NO: 8721, SEQ ID NO: 3697/SEQ ID NO: 8722, SEQ ID NO: 3698/SEQ ID NO: 8723, SEQ ID NO: 3699/SEQ ID NO: 8724, SEQ ID NO: 3700/SEQ ID NO: 8725, SEQ ID NO: 3702/SEQ ID NO: 8726, SEQ ID NO: 3703/SEQ ID NO: 8727, SEQ ID NO: 3704/SEQ ID NO: 8728, SEQ ID NO: 3705/SEQ ID NO: 8729, SEQ ID NO: 3706/SEQ ID NO: 8730, SEQ ID NO: 3707/SEQ ID NO: 8731, SEQ ID NO: 3708/SEQ ID NO: 8732, SEQ ID NO: 3709/SEQ ID NO: 8733, SEQ ID NO: 3710/SEQ ID NO: 8734, SEQ ID NO: 3711/SEQ ID NO: 8735, SEQ ID NO: 3712/SEQ ID NO: 8736, SEQ ID NO: 3713/SEQ ID NO: 8737, SEQ ID NO: 3714/SEQ ID NO: 8738, SEQ ID NO: 3715/SEQ ID NO: 8739, SEQ ID NO: 3716/SEQ ID NO: 8740, SEQ ID NO: 3717/SEQ ID NO: 8741, SEQ ID NO: 3718/SEQ ID NO: 8742, SEQ ID NO: 3719/SEQ ID NO: 8743, SEQ ID NO: 3720/SEQ ID NO: 8744, SEQ ID NO: 3721/SEQ ID NO: 8745, SEQ ID NO: 3722/SEQ ID NO: 8746, SEQ ID NO: 3723/SEQ ID NO: 8747,
SEQ ID NO: 3724/SEQ ID NO: 8748, SEQ ID NO: 3725/SEQ ID NO: 8749, SEQ ID NO: 3726/SEQ ID NO: 8750, SEQ ID NO: 3727/SEQ ID NO: 8751, SEQ ID NO: 3728/SEQ ID NO: 8752, SEQ ID NO: 3729/SEQ ID NO: 8753, SEQ ID NO: 3730/SEQ ID NO: 8754, SEQ ID NO: 3731/SEQ ID NO: 8755, SEQ ID NO: 3732/SEQ ID NO: 8756, SEQ ID NO: 3733/SEQ ID NO: 8757, SEQ ID NO: 3734/SEQ ID NO: 8758, SEQ ID NO: 3735/SEQ ID NO: 8759, SEQ ID NO: 3736/SEQ ID NO: 8760, SEQ ID NO: 3737/SEQ ID NO: 8761, SEQ ID NO: 3738/SEQ ID NO: 8762, SEQ ID NO: 3739/SEQ ID NO: 8763, SEQ ID NO: 3740/SEQ ID NO: 8764, SEQ ID NO: 3741/SEQ ID NO: 8765, SEQ ID NO: 3742/SEQ ID NO: 8766, SEQ ID NO: 3743/SEQ ID NO: 8767, SEQ ID NO: 3744/SEQ ID NO: 8768, SEQ ID NO: 3745/SEQ ID NO: 8769, SEQ ID NO: 3746/SEQ ID NO: 8770, SEQ ID NO: 3747/SEQ ID NO: 8771, SEQ ID NO: 3748/SEQ ID NO: 8772, SEQ ID NO: 3749/SEQ ID NO: 8773, SEQ ID NO: 3751/SEQ ID NO: 8774, SEQ ID NO: 3753/SEQ ID NO: 8775, SEQ ID NO: 3754/SEQ ID NO: 8776, SEQ ID NO: 3755/SEQ ID NO: 8777, SEQ ID NO: 3756/SEQ ID NO: 8778, SEQ ID NO: 3757/SEQ ID NO: 8779, SEQ ID NO: 3758/SEQ ID NO: 8780, SEQ ID NO: 3759/SEQ ID NO: 8781, SEQ ID NO: 3760/SEQ ID NO: 8782, SEQ ID NO: 3761/SEQ ID NO: 8783, SEQ ID NO: 3762/SEQ ID NO: 8784, SEQ ID NO: 3763/SEQ ID NO: 8785, SEQ ID NO: 3764/SEQ ID NO: 8786, SEQ ID NO: 3765/SEQ ID NO: 8787, SEQ ID NO: 3766/SEQ ID NO: 8788, SEQ ID NO: 3767/SEQ ID NO: 8789, SEQ ID NO: 3768/SEQ ID NO: 8790, SEQ ID NO: 3769/SEQ ID NO: 8791, SEQ ID NO: 3770/SEQ ID NO: 8792, SEQ ID NO: 3771/SEQ ID NO: 8793, SEQ ID NO: 3772/SEQ ID NO: 8794, SEQ ID NO: 3773/SEQ ID NO: 8795, SEQ ID NO: 3774/SEQ ID NO: 8796, SEQ ID NO: 3775/SEQ ID NO: 8797, SEQ ID NO: 3776/SEQ ID NO: 8798, SEQ ID NO: 3777/SEQ ID NO: 8799, SEQ ID NO: 3778/SEQ ID NO: 8800, SEQ ID NO: 3779/SEQ ID NO: 8801, SEQ ID NO: 3780/SEQ ID NO: 8802, SEQ ID NO: 3781/SEQ ID NO: 8803, SEQ ID NO: 3782/SEQ ID NO: 8804, SEQ ID NO: 3783/SEQ ID NO: 8805, SEQ ID NO: 3784/SEQ ID NO: 8806, SEQ ID NO: 3785 t SEQ ID NO: 8807, SEQ ID NO: 3786/SEQ ID NO: 8808, SEQ ID NO: 3787/SEQ ID NO: 8809, SEQ ID NO: 3788/SEQ ID NO: 8810, SEQ ID NO: 3790/SEQ ID NO: 8811, SEQ ID NO: 3791/SEQ ID NO: 8812, SEQ ID NO: 3792/SEQ ID NO: 8813, SEQ ID NO: 3793/SEQ ID NO: 8814, SEQ ID NO: 3794/SEQ ID NO: 8815, SEQ ID NO: 3795/SEQ ID NO: 8816, SEQ ID NO: 3796/SEQ ID NO: 8817, SEQ ID NO: 3797/SEQ ID NO: 8818, SEQ ID NO: 3798/SEQ ID NO: 8819, SEQ ID NO: 3799/SEQ ID NO: 8820, SEQ ID NO: 3800/SEQ ID NO: 8821, SEQ ID NO: 3801/SEQ ID NO: 8822, SEQ ID NO: 3803/SEQ ID NO: 8823, SEQ ID NO: 3805/SEQ ID NO: 8824, SEQ ID NO: 3806/SEQ ID NO: 8825, SEQ ID NO: 3807/SEQ ID NO: 8826, SEQ ID NO: 3808/SEQ ID NO: 8827, SEQ ID NO: 3809/SEQ ID NO: 8828, SEQ ID NO: 3810/SEQ ID NO: 8829, SEQ ID NO: 3811/SEQ ID NO: 8830, SEQ ID NO: 3812/SEQ ID NO: 8831, SEQ ID NO: 3813/SEQ ID NO: 8832, SEQ ID NO: 3814/SEQ ID NO: 8833, SEQ ID NO: 3815/SEQ ID NO: 8834, SEQ ID NO: 3816/SEQ ID NO: 8835, SEQ ID NO: 3817/SEQ ID NO: 8836, SEQ ID NO: 3818/SEQ ID NO: 8837, SEQ ID NO: 3819/SEQ ID NO: 8838, SEQ ID NO: 3820/SEQ ID NO: 8839, SEQ ID NO: 3821/SEQ ID NO: 8840, SEQ ID NO: 3822/SEQ ID NO: 8841, SEQ ID NO: 3823/SEQ ID NO: 8842, SEQ ID NO: 3824/SEQ ID NO: 8843, SEQ ID NO: 3825/SEQ ID NO: 8844, SEQ ID NO: 3826/SEQ ID NO: 8845, SEQ ID NO: 3827/SEQ ID NO: 8846, SEQ ID NO: 3828/SEQ ID NO: 8847,
SEQ ID NO: 3839/SEQ ID NO: 8848, SEQ ID NO: 3840/SEQ ID NO: 8849, SEQ ID NO: 3841/SEQ ID NO: 8850, SEQ ID NO: 3842/SEQ ID NO: 8851, SEQ ID NO: 3843/SEQ ID NO: 8852, SEQ ID NO: 3844/SEQ ID NO: 8853, SEQ ID NO: 3845/SEQ ID NO: 8854, SEQ ID NO: 3846/SEQ ID NO: 8855, SEQ ID NO: 3847/SEQ ID NO: 8856, SEQ ID NO: 3848/SEQ ID NO: 8857, SEQ ID NO: 3849/SEQ ID NO: 8858, SEQ ID NO: 3850/SEQ ID NO: 8859, SEQ ID NO: 3851/SEQ ID NO: 8860, SEQ ID NO: 3852/SEQ ID NO: 8861, SEQ ID NO: 3853/SEQ ID NO: 8862, SEQ ID NO: 3854/SEQ ID NO: 8863, SEQ ID NO: 3856/SEQ ID NO: 8864, SEQ ID NO: 3857/SEQ ID NO: 8865, SEQ ID NO: 3858/SEQ ID NO: 8866, SEQ ID NO: 3860/SEQ ID NO: 8867, SEQ ID NO: 3861/SEQ ID NO: 8868, SEQ ID NO: 3862/SEQ ID NO: 8869, SEQ ID NO: 3863/SEQ ID NO: 8870, SEQ ID NO: 3864/SEQ ID NO: 8871, SEQ ID NO: 3865/SEQ ID NO: 8872, SEQ ID NO: 3866/SEQ ID NO: 8873, SEQ ID NO: 3867/SEQ ID NO: 8874, SEQ ID NO: 3868/SEQ ID NO: 8875, SEQ ID NO: 3869/SEQ ID NO: 8876, SEQ ID NO: 3870/SEQ ID NO: 8877, SEQ ID NO: 3871/SEQ ID NO: 8878, SEQ ID NO: 3872/SEQ ID NO: 8879, SEQ ID NO: 3873/SEQ ID NO: 8880, SEQ ID NO: 3874/SEQ ID NO: 8881, SEQ ID NO: 3875/SEQ ID NO: 8882, SEQ ID NO: 3876/SEQ ID NO: 8883, SEQ ID NO: 3877/SEQ ID NO: 8884, SEQ ID NO: 3878/SEQ ID NO: 8885, SEQ ID NO: 3879/SEQ ID NO: 8886, SEQ ID NO: 3880/SEQ ID NO: 8887, SEQ ID NO: 3881/SEQ ID NO: 8888, SEQ ID NO: 3882/SEQ ID NO: 8889, SEQ ID NO: 3883/SEQ ID NO: 8890, SEQ ID NO: 3884/SEQ ID NO: 8891, SEQ ID NO: 3885/SEQ ID NO: 8892, SEQ ID NO: 3886/SEQ ID NO: 8893, SEQ ID NO: 3887/SEQ ID NO: 8894, SEQ ID NO: 3888/SEQ ID NO: 8895, SEQ ID NO: 3889/SEQ ID NO: 8896, SEQ ID NO: 3890/SEQ ID NO: 8897, SEQ ID NO: 3891/SEQ ID NO: 8898, SEQ ID NO: 3892/SEQ ID NO: 8899, SEQ ID NO: 3893/SEQ ID NO: 8900, SEQ ID NO: 3894/SEQ ID NO: 8901, SEQ ID NO: 3895/SEQ ID NO: 8902, SEQ ID NO: 3896/SEQ ID NO: 8903, SEQ ID NO: 3897/SEQ ID NO: 8904, SEQ ID NO: 3898/SEQ ID NO: 8905, SEQ ID NO: 3899/SEQ ID NO: 8906, SEQ ID NO: 3900/SEQ ID NO: 8907, SEQ ID NO: 3901/SEQ ID NO: 8908, SEQ ID NO: 3902/SEQ ID NO: 8909, SEQ ID NO: 3903/SEQ ID NO: 8910, SEQ ID NO: 3905/SEQ ID NO: 8911, SEQ ID NO: 3906/SEQ ID NO: 8912, SEQ ID NO: 3907/SEQ ID NO: 8913, SEQ ID NO: 3908/SEQ ID NO: 8914, SEQ ID NO: 3909/SEQ ID NO: 8915, SEQ ID NO: 3911/SEQ ID NO: 8916, SEQ ID NO: 3912/SEQ ID NO: 8917, SEQ ID NO: 3913/SEQ ID NO: 8918, SEQ ID NO: 3914/SEQ ID NO: 8919, SEQ ID NO: 3916/SEQ ID NO: 8920, SEQ ID NO: 3917/SEQ ID NO: 8921, SEQ ID NO: 3918/SEQ ID NO: 8922, SEQ ID NO: 3920/SEQ ID NO: 8923, SEQ ID NO: 3921/SEQ ID NO: 8924, SEQ ID NO: 3922/SEQ ID NO: 8925, SEQ ID NO: 3923/SEQ ID NO: 8926, SEQ ID NO: 3924/SEQ ID NO: 8927, SEQ ID NO: 3925/SEQ ID NO: 8928, SEQ ID NO: 3926/SEQ ID NO: 8929, SEQ ID NO: 3927/SEQ ID NO: 8930, SEQ ID NO: 3928/SEQ ID NO: 8931, SEQ ID NO: 3929/SEQ ID NO: 8932, SEQ ID NO: 3930/SEQ ID NO: 8933, SEQ ID NO: 3931/SEQ ID NO: 8934, SEQ ID NO: 3932/SEQ ID NO: 8935, SEQ ID NO: 3933/SEQ ID NO: 8936, SEQ ID NO: 3934/SEQ ID NO: 8937, SEQ ID NO: 3935/SEQ ID NO: 8938, SEQ ID NO: 3937/SEQ ID NO: 8939, SEQ ID NO: 3938/SEQ ID NO: 8940, SEQ ID NO: 3939/SEQ ID NO: 8941, SEQ ID NO: 3940/SEQ ID NO: 8942, SEQ ID NO: 3941/SEQ ID NO: 8943, SEQ ID NO: 3942/SEQ ID NO: 8944, SEQ ID NO: 3943/SEQ ID NO: 8945, SEQ ID NO: 3944/SEQ ID NO: 8946, SEQ ID NO: 3945/SEQ ID NO: 8947,
SEQ ID NO: 3946/SEQ ID NO: 8948, SEQ ID NO: 3947/SEQ ID NO: 8949, SEQ ID NO: 3949/SEQ ID NO: 8950, SEQ ID NO: 3950/SEQ ID NO: 8951, SEQ ID NO: 3951/SEQ ID NO: 8952, SEQ ID NO: 3952/SEQ ID NO: 8953, SEQ ID NO: 3953/SEQ ID NO: 8954, SEQ ID NO: 3954/SEQ ID NO: 8955, SEQ ID NO: 3955/SEQ ID NO: 8956, SEQ ID NO: 3956/SEQ ID NO: 8957, SEQ ID NO: 3957/SEQ ID NO: 8958, SEQ ID NO: 3958/SEQ ID NO: 8959, SEQ ID NO: 3959/SEQ ID NO: 8960, SEQ ID NO: 3960/SEQ ID NO: 8961, SEQ ID NO: 3961/SEQ ID NO: 8962, SEQ ID NO: 3962/SEQ ID NO: 8963, SEQ ID NO: 3963/SEQ ID NO: 8964, SEQ ID NO: 3964/SEQ ID NO: 8965, SEQ ID NO: 3966/SEQ ID NO: 8966, SEQ ID NO: 3967/SEQ ID NO: 8967, SEQ ID NO: 3968/SEQ ID NO: 8968, SEQ ID NO: 3969/SEQ ID NO: 8969, SEQ ID NO: 3970/SEQ ID NO: 8970, SEQ ID NO: 3972/SEQ ID NO: 8971, SEQ ID NO: 3973/SEQ ID NO: 8972, SEQ ID NO: 3974/SEQ ID NO: 8973, SEQ ID NO: 3975/SEQ ID NO: 8974, SEQ ID NO: 3977/SEQ ID NO: 8975, SEQ ID NO: 3978/SEQ ID NO: 8976, SEQ ID NO: 3979/SEQ ID NO: 8977, SEQ ID NO: 3980/SEQ ID NO: 8978, SEQ ID NO: 3981/SEQ ID NO: 8979, SEQ ID NO: 3983/SEQ ID NO: 8980, SEQ ID NO: 3985/SEQ ID NO: 8981, SEQ ID NO: 3986/SEQ ID NO: 8982, SEQ ID NO: 3987/SEQ ID NO: 8983, SEQ ID NO: 3988/SEQ ID NO: 8984, SEQ ID NO: 3989/SEQ ID NO: 8985, SEQ ID NO: 3990/SEQ ID NO: 8986, SEQ ID NO: 3992/SEQ ID NO: 8987, SEQ ID NO: 3993/SEQ ID NO: 8988, SEQ ID NO: 3994/SEQ ID NO: 8989, SEQ ID NO: 3995/SEQ ID NO: 8990, SEQ ID NO: 3996/SEQ ID NO: 8991, SEQ ID NO: 3997/SEQ ID NO: 8992, SEQ ID NO: 3998/SEQ ID NO: 8993, SEQ ID NO: 3999/SEQ ID NO: 8994, SEQ ID NO: 4000/SEQ ID NO: 8995, SEQ ID NO: 4001/SEQ ID NO: 8996, SEQ ID NO: 4002/SEQ ID NO: 8997, SEQ ID NO: 4003/SEQ ID NO: 8998, SEQ ID NO: 4004/SEQ ID NO: 8999, SEQ ID NO: 4005/SEQ ID NO: 9000, SEQ ID NO: 4006/SEQ ID NO: 9001, SEQ ID NO: 4007/SEQ ID NO: 9002, SEQ ID NO: 4008/SEQ ID NO: 9003, SEQ ID NO: 4009/SEQ ID NO: 9004, SEQ ID NO: 4010/SEQ ID NO: 9005, SEQ ID NO: 4011/SEQ ID NO: 9006, SEQ ID NO: 4012/SEQ ID NO: 9007, SEQ ID NO: 4013/SEQ ID NO: 9008, SEQ ID NO: 4014/SEQ ID NO: 9009, SEQ ID NO: 4015/SEQ ID NO: 9010, SEQ ID NO: 4016/SEQ ID NO: 9011, SEQ ID NO: 4017/SEQ ID NO: 9012, SEQ ID NO: 4018/SEQ ID NO: 9013, SEQ ID NO: 4019/SEQ ID NO: 9014, SEQ ID NO: 4020/SEQ ID NO: 9015, SEQ ID NO: 4021/SEQ ID NO: 9016, SEQ ID NO: 4022/SEQ ID NO: 9017, SEQ ID NO: 4023/SEQ ID NO: 9018, SEQ ID NO: 4024/SEQ ID NO: 9019, SEQ ID NO: 4025/SEQ ID NO: 9020, SEQ ID NO: 4026/SEQ ID NO: 9021, SEQ ID NO: 4028/SEQ ID NO: 9022, SEQ ID NO: 4029/SEQ ID NO: 9023, SEQ ID NO: 4030/SEQ ID NO: 9024, SEQ ID NO: 4031/SEQ ID NO: 9025, SEQ ID NO: 4032/SEQ ID NO: 9026, SEQ ID NO: 4033/SEQ ID NO: 9027, SEQ ID NO: 4034/SEQ ID NO: 9028, SEQ ID NO: 4035/SEQ ID NO: 9029, SEQ ID NO: 4036/SEQ ID NO: 9030, SEQ ID NO: 4038/SEQ ID NO: 9031, SEQ ID NO: 4039/SEQ ID NO: 9032, SEQ ID NO: 4040/SEQ ID NO: 9033, SEQ ID NO: 4041/SEQ ID NO: 9034, SEQ ID NO: 4042/SEQ ID NO: 9035, SEQ ID NO: 4043/SEQ ID NO: 9036, SEQ ID NO: 4044/SEQ ID NO: 9037, SEQ ID NO: 4045/SEQ ID NO: 9038, SEQ ID NO: 4046/SEQ ID NO: 9039, SEQ ID NO: 4047/SEQ ID NO: 9040, SEQ ID NO: 4048/SEQ ID NO: 9041, SEQ ID NO: 4050/SEQ ID NO: 9042, SEQ ID NO: 4051/SEQ ID NO: 9043, SEQ ID NO: 4052/SEQ ID NO: 9044, SEQ ID NO: 4053/SEQ ID NO: 9045, SEQ ID NO: 4054/SEQ ID NO: 9046, SEQ ID NO: 4055/SEQ ID NO: 9047,
SEQ ID NO: 4056/SEQ ID NO: 9048, SEQ ID NO: 4057/SEQ ID NO: 9049, SEQ ID NO: 4058/SEQ ID NO: 9050, SEQ ID NO: 4059/SEQ ID NO: 9051, SEQ ID NO: 4060/SEQ ID NO: 9052, SEQ ID NO: 4061/SEQ ID NO: 9053, SEQ ID NO: 4062/SEQ ID NO: 9054, SEQ ID NO: 4063/SEQ ID NO: 9055, SEQ ID NO: 4064/SEQ ID NO: 9056, SEQ ID NO: 4065/SEQ ID NO: 9057, SEQ ID NO: 4066/SEQ ID NO: 9058, SEQ ID NO: 4067/SEQ ID NO: 9059, SEQ ID NO: 4068/SEQ ID NO: 9060, SEQ ID NO: 4069/SEQ ID NO: 9061, SEQ ID NO: 4070/SEQ ID NO: 9062, SEQ ID NO: 4071/SEQ ID NO: 9063, SEQ ID NO: 4072/SEQ ID NO: 9064, SEQ ID NO: 4073/SEQ ID NO: 9065, SEQ ID NO: 4074/SEQ ID NO: 9066, SEQ ID NO: 4075/SEQ ID NO: 9067, SEQ ID NO: 4077/SEQ ID NO: 9068, SEQ ID NO: 4078/SEQ ID NO: 9069, SEQ ID NO: 4079/SEQ ID NO: 9070, SEQ ID NO: 4080/SEQ ID NO: 9071, SEQ ID NO: 4081/SEQ ID NO: 9072, SEQ ID NO: 4082/SEQ ID NO: 9073, SEQ ID NO: 4083/SEQ ID NO: 9074, SEQ ID NO: 4084/SEQ ID NO: 9075, SEQ ID NO: 4085/SEQ ID NO: 9076, SEQ ID NO: 4086/SEQ ID NO: 9077, SEQ ID NO: 4087/SEQ ID NO: 9078, SEQ ID NO: 4088/SEQ ID NO: 9079, SEQ ID NO: 4089/SEQ ID NO: 9080, SEQ ID NO: 4090/SEQ ID NO: 9081, SEQ ID NO: 4091/SEQ ID NO: 9082, SEQ ID NO: 4092/SEQ ID NO: 9083, SEQ ID NO: 4093/SEQ ID NO: 9084, SEQ ID NO: 4094/SEQ ID NO: 9085, SEQ ID NO: 4095/SEQ ID NO: 9086, SEQ ID NO: 4096/SEQ ID NO: 9087, SEQ ID NO: 4097/SEQ ID NO: 9088, SEQ ID NO: 4098/SEQ ID NO: 9089, SEQ ID NO: 4099/SEQ ID NO: 9090, SEQ ID NO: 4100/SEQ ID NO: 9091, SEQ ID NO: 4101/SEQ ID NO: 9092, SEQ ID NO: 4102/SEQ ID NO: 9093, SEQ ID NO: 4103/SEQ ID NO: 9094, SEQ ID NO: 4104/SEQ ID NO: 9095, SEQ ID NO: 4105/SEQ ID NO: 9096, SEQ ID NO: 4107/SEQ ID NO: 9097, SEQ ID NO: 4108/SEQ ID NO: 9098, SEQ ID NO: 4109/SEQID NO: 9099, SEQ ID NO: 4110/SEQ ID NO: 9100, SEQ ID NO: 4111/SEQ ID NO: 9101, SEQ ID NO: 4112/SEQ ID NO: 9102, SEQ ID NO: 4113/SEQ ID NO: 9103, SEQ ID NO: 4114/SEQ ID NO: 9104, SEQ ID NO: 4115/SEQ ID NO: 9105, SEQ ID NO: 4116/SEQ ID NO: 9106, SEQ ID NO: 4117/SEQ ID NO: 9107, SEQ ID NO: 4118/SEQ ID NO: 9108, SEQ ID NO: 4119/SEQ ID NO: 9109, SEQ ID NO: 4120/SEQ ID NO: 9110, SEQ ID NO: 4121/SEQ ID NO: 9111, SEQ ID NO: 4122/SEQ ID NO: 9112,SEQ ID NO: 4123/SEQ ID NO: 9113, SEQ ID NO: 4124/SEQ ID NO: 9114, SEQ ID NO: 4125/SEQ ID NO: 9115, SEQ ID NO: 4126/SEQ ID NO: 9116, SEQ ID NO: 4127/SEQ ID NO: 9117, SEQ ID NO: 4128/SEQ ID NO: 9118, SEQ ID NO: 4129/SEQ ID NO: 9119, SEQ ID NO: 4130/SEQ ID NO: 9120, SEQ ID NO: 4132/SEQ ID NO: 9121, SEQ ID NO: 4133/SEQ ID NO: 9122, SEQ ID NO: 4134/SEQ ID NO: 9123, SEQ ID NO: 4135/SEQ ID NO: 9124, SEQ ID NO: 4136/SEQ ID NO: 9125, SEQ ID NO: 4137/SEQ ID NO: 9126, SEQ ID NO: 4138/SEQ ID NO: 9127, SEQ ID NO: 4139/SEQ ID NO: 9128, SEQ ID NO: 4140/SEQ ID NO: 9129, SEQ ID NO: 4141/SEQ ID NO: 9130, SEQ ID NO: 4142/SEQ ID NO: 9131, SEQ ID NO: 4143/SEQ ID NO: 9132, SEQ ID NO: 4144/SEQ ID NO: 9133, SEQ ID NO: 4145/SEQ ID NO: 9134, SEQ ID NO: 4146/SEQ ID NO: 9135, SEQ ID NO: 4147/SEQ ID NO: 9136, SEQ ID NO: 4148/SEQ ID NO: 9137, SEQ ID NO: 4149/SEQ ID NO: 9138, SEQ ID NO: 4150/SEQ ID NO: 9139, SEQ ID NO: 4151/SEQ ID NO: 9140, SEQ ID NO: 4152/SEQ ID NO: 9141, SEQ ID NO: 4153/SEQ ID NO: 9142, SEQ ID NO: 4154/SEQ ID NO: 9143, SEQ ID NO: 4155/SEQ ID NO: 9144, SEQ ID NO: 4157/SEQ ID NO: 9145, SEQ ID NO: 4158/SEQ ID NO: 9146, SEQ ID NO: 4159/SEQ ID NO: 9147,
SEQ ID NO: 4160/SEQ ID NO: 9148, SEQ ID NO: 4161/SEQ ID NO: 9149, SEQ ID NO: 4162/SEQ ID NO: 9150, SEQ ID NO: 4164/SEQ ID NO: 9151, SEQ ID NO: 4165/SEQ ID NO: 9152, SEQ ID NO: 4166/SEQ ID NO: 9153, SEQ ID NO: 4167/SEQ ID NO: 9154, SEQ ID NO: 4168/SEQ ID NO: 9155, SEQ ID NO: 4169/SEQ ID NO: 9156, SEQ ID NO: 4170/SEQ ID NO: 9157, SEQ ID NO: 4171/SEQ ID NO: 9158, SEQ ID NO: 4172/SEQ ID NO: 9159, SEQ ID NO: 4173/SEQ ID NO: 9160, SEQ ID NO: 4174/SEQ ID NO: 9161, SEQ ID NO: 4175/SEQ ID NO: 9162, SEQ ID NO: 4176/SEQ ID NO: 9163, SEQ ID NO: 4177/SEQ ID NO: 9164, SEQ ID NO: 4178/SEQ ID NO: 9165, SEQ ID NO: 4179/SEQ ID NO: 9166, SEQ ID NO: 4180/SEQ ID NO: 9167, SEQ ID NO: 4181/SEQ ID NO: 9168, SEQ ID NO: 4182/SEQ ID NO: 9169, SEQ ID NO: 4183/SEQ ID NO: 9170, SEQ ID NO: 4184/SEQ ID NO: 9171, SEQ ID NO: 4185/SEQ ID NO: 9172, SEQ ID NO: 4186/SEQ ID NO: 9173, SEQ ID NO: 4187/SEQ ID NO: 9174, SEQ ID NO: 4188/SEQ ID NO: 9175, SEQ ID NO: 4189/SEQ ID NO: 9176, SEQ ID NO: 4190/SEQ ID NO: 9177, SEQ ID NO: 4191/SEQ ID NO: 9178, SEQ ID NO: 4192/SEQ ID NO: 9179, SEQ ID NO: 4193/SEQ ID NO: 9180, SEQ ID NO: 4194/SEQ ID NO: 9181, SEQ ID NO: 4195/SEQ ID NO: 9182, SEQ ID NO: 4196/SEQ ID NO: 9183, SEQ ID NO: 4197/SEQ ID NO: 9184, SEQ ID NO: 4198/SEQ ID NO: 9185, SEQ ID NO: 4199/SEQ ID NO: 9186, SEQ ID NO: 4200/SEQ ID NO: 9187, SEQ ID NO: 4201/SEQ ID NO: 9188, SEQ ID NO: 4202/SEQ ID NO: 9189, SEQ ID NO: 4203/SEQ ID NO: 9190, SEQ ID NO: 4204/SEQ ID NO: 9191, SEQ ID NO: 4205/SEQ ID NO: 9192, SEQ ID NO: 4206/SEQ ID NO: 9193, SEQ ID NO: 4208/SEQ ID NO: 9194, SEQ ID NO: 4209/SEQ ID NO: 9195, SEQ ID NO: 4210/SEQ ID NO: 9196, SEQ ID NO: 4211/SEQ ID NO: 9197, SEQ ID NO: 4212/SEQ ID NO: 9198, SEQ ID NO: 4213/SEQ ID NO: 9199, SEQ ID NO: 4214/SEQ ID NO: 9200, SEQ ID NO: 4215/SEQ ID NO: 9201, SEQ ID NO: 4216/SEQ ID NO: 9202, SEQ ID NO: 4217/SEQ ID NO: 9203, SEQ ID NO: 4218/SEQ ID NO: 9204, SEQ ID NO: 4219/SEQ ID NO: 9205, SEQ ID NO: 4220/SEQ ID NO: 9206, SEQ ID NO: 4221/SEQ ID NO: 9207, SEQ ID NO: 4222/SEQ ID NO: 9208, SEQ ID NO: 4223/SEQ ID NO: 9209, SEQ ID NO: 4224/SEQ ID NO: 9210, SEQ ID NO: 4225/SEQ ID NO: 9211, SEQ ID NO: 4226/SEQ ID NO: 9212, SEQ ID NO: 4227/SEQ ID NO: 9213, SEQ ID NO: 4228/SEQ ID NO: 9214, SEQ ID NO: 4229/SEQ ID NO: 9215, SEQ ID NO: 4231/SEQ ID NO: 9216, SEQ ID NO: 4232/SEQ ID NO: 9217, SEQ ID NO: 4234/SEQ ID NO: 9218, SEQ ID NO: 4235/SEQ ID NO: 9219, SEQ ID NO: 4236/SEQ ID NO: 9220, SEQ ID NO: 4237/SEQ ID NO: 9221, SEQ ID NO: 4238/SEQ ID NO: 9222, SEQ ID NO: 4239/SEQ ID NO: 9223, SEQ ID NO: 4240/SEQ ID NO: 9224, SEQ ID NO: 4241/SEQ ID NO: 9225, SEQ ID NO: 4243/SEQ ID NO: 9226, SEQ ID NO: 4244/SEQ ID NO: 9227, SEQ ID NO: 4245/SEQ ID NO: 9228, SEQ ID NO: 4246/SEQ ID NO: 9229, SEQ ID NO: 4247/SEQ ID NO: 9230, SEQ ID NO: 4248/SEQ ID NO: 9231, SEQ ID NO: 4249/SEQ ID NO: 9232, SEQ ID NO: 4250/SEQ ID NO: 9233, SEQ ID NO: 4251/SEQ ID NO: 9234, SEQ ID NO: 4252/SEQ ID NO: 9235, SEQ ID NO: 4253/SEQ ID NO: 9236, SEQ ID NO: 4254/SEQ ID NO: 9237, SEQ ID NO: 4256/SEQ ID NO: 9238, SEQ ID NO: 4257/SEQ ID NO: 9239, SEQ ID NO: 4258/SEQ ID NO: 9240, SEQ ID NO: 4259/SEQ ID NO: 9241, SEQ ID NO: 4260/SEQ ID NO: 9242, SEQ ID NO: 4261/SEQ ID NO: 9243, SEQ ID NO: 4262/SEQ ID NO: 9244, SEQ ID NO: 4263/SEQ ID NO: 9245, SEQ ID NO: 4264/SEQ ID NO: 9246, SEQ ID NO: 4265/SEQ ID NO: 9247,
SEQ ID NO: 4266/SEQ ID NO: 9248, SEQ ID NO: 4267/SEQ ID NO: 9249, SEQ ID NO: 4268/SEQ ID NO: 9250, SEQ ID NO: 4269/SEQ ID NO: 9251, SEQ ID NO: 4270/SEQ ID NO: 9252, SEQ ID NO: 4271/SEQ ID NO: 9253, SEQ ID NO: 4272/SEQ ID NO: 9254, SEQ ID NO: 4273/SEQ ID NO: 9255, SEQ ID NO: 4274/SEQ ID NO: 9256, SEQ ID NO: 4275/SEQ ID NO: 9257, SEQ ID NO: 4276/SEQ ID NO: 9258, SEQ ID NO: 4277/SEQ ID NO: 9259, SEQ ID NO: 4278/SEQ ID NO: 9260, SEQ ID NO: 4279/SEQ ID NO: 9261, SEQ ID NO: 4280/SEQ ID NO: 9262, SEQ ID NO: 4281/SEQ ID NO: 9263, SEQ ID NO: 4282/SEQ ID NO: 9264, SEQ ID NO: 4283/SEQ ID NO: 9265, SEQ ID NO: 4284/SEQ ID NO: 9266, SEQ ID NO: 4285/SEQ ID NO: 9267, SEQ ID NO: 4286/SEQ ID NO: 9268, SEQ ID NO: 4288/SEQ ID NO: 9269, SEQ ID NO: 4289/SEQ ID NO: 9270, SEQ ID NO: 4290/SEQ ID NO: 9271, SEQ ID NO: 4291/SEQ ID NO: 9272, SEQ ID NO: 4292/SEQ ID NO: 9273, SEQ ID NO: 4293/SEQ ID NO: 9274, SEQ ID NO: 4295/SEQ ID NO: 9275, SEQ ID NO: 4296/SEQ ID NO: 9276, SEQ ID NO: 4297/SEQ ID NO: 9277, SEQ ID NO: 4298/SEQ ID NO: 9278, SEQ ID NO: 4299/SEQ ID NO: 9279, SEQ ID NO: 4300/SEQ ID NO: 9280, SEQ ID NO: 4301/SEQ ID NO: 9281, SEQ ID NO: 4302/SEQ ID NO: 9282, SEQ ID NO: 4303/SEQ ID NO: 9283, SEQ ID NO: 4304/SEQ ID NO: 9284, SEQ ID NO: 4305/SEQ ID NO: 9285, SEQ ID NO: 4306/SEQ ID NO: 9286, SEQ ID NO: 4307/SEQ ID NO: 9287, SEQ ID NO: 4308/SEQ ID NO: 9288, SEQ ID NO: 4309/SEQ ID NO: 9289, SEQ ID NO: 4310/SEQ ID NO: 9290, SEQ ID NO: 4311/SEQ ID NO: 9291, SEQ ID NO: 4312/SEQ ID NO: 9292, SEQ ID NO: 4313/SEQ ID NO: 9293, SEQ ID NO: 4314/SEQ ID NO: 9294, SEQ ID NO: 4316/SEQ ID NO: 9295, SEQ ID NO: 4317/SEQ ID NO: 9296, SEQ ID NO: 4318/SEQ ID NO: 9297, SEQ ID NO: 4319/SEQ ID NO: 9298, SEQ ID NO: 4320/SEQ ID NO: 9299, SEQ ID NO: 4321/SEQ ID NO: 9300, SEQ ID NO: 4322/SEQ ID NO: 9301, SEQ ID NO: 4323/SEQ ID NO: 9302, SEQ ID NO: 4324/SEQ ID NO: 9303, SEQ ID NO: 4325/SEQ ID NO: 9304, SEQ ID NO: 4326/SEQ ID NO: 9305, SEQ ID NO: 4327/SEQ ID NO: 9306, SEQ ID NO: 4328/SEQ ID NO: 9307, SEQ ID NO: 4329/SEQ ID NO: 9308, SEQ ID NO: 4330/SEQ ID NO: 9309, SEQ ID NO: 4331/SEQ ID NO: 9310, SEQ ID NO: 4332/SEQ ID NO: 9311, SEQ ID NO: 4333/SEQ ID NO: 9312, SEQ ID NO: 4334/SEQ ID NO: 9313, SEQ ID NO: 4335/SEQ ID NO: 9314, SEQ ID NO: 4336/SEQ ID NO: 9315, SEQ ID NO: 4337/SEQ ID NO: 9316, SEQ ID NO: 4338/SEQ ID NO: 9317, SEQ ID NO: 4339/SEQ ID NO: 9318, SEQ ID NO: 4340/SEQ ID NO: 9319, SEQ ID NO: 4341/SEQ ID NO: 9320, SEQ ID NO: 4342/SEQ ID NO: 9321, SEQ ID NO: 4344/SEQ ID NO: 9322, SEQ ID NO: 4345/SEQ ID NO: 9323, SEQ ID NO: 4346/SEQ ID NO: 9324, SEQ ID NO: 4347/SEQ ID NO: 9325, SEQ ID NO: 4348/SEQ ID NO: 9326, SEQ ID NO: 4349/SEQ ID NO: 9327, SEQ ID NO: 4350/SEQ ID NO: 9328, SEQ ID NO: 4351/SEQ ID NO: 9329, SEQ ID NO: 4352/SEQ ID NO: 9330, SEQ ID NO: 4353/SEQ ID NO: 9331, SEQ ID NO: 4354/SEQ ID NO: 9332, SEQ ID NO: 4355/SEQ ID NO: 9333, SEQ ID NO: 4356/SEQ ID NO: 9334, SEQ ID NO: 4357/SEQ ID NO: 9335, SEQ ID NO: 4358/SEQ ID NO: 9336, SEQ ID NO: 4359/SEQ ID NO: 9337, SEQ ID NO: 4360/SEQ ID NO: 9338, SEQ ID NO: 4361/SEQ ID NO: 9339, SEQ ID NO: 4362/SEQ ID NO: 9340, SEQ ID NO: 4363/SEQ ID NO: 9341, SEQ ID NO: 4364/SEQ ID NO: 9342, SEQ ID NO: 4365/SEQ ID NO: 9343, SEQ ID NO: 4366/SEQ ID NO: 9344, SEQ ID NO: 4367/SEQ ID NO: 9345, SEQ ID NO: 4368/SEQ ID NO: 9346, SEQ ID NO: 4369/SEQ ID NO: 9347,
SEQ ID NO: 4370/SEQ ID NO: 9348, SEQ ID NO: 4371/SEQ ID NO: 9349, SEQ ID NO: 4372/SEQ ID NO: 9350, SEQ ID NO: 4373/SEQ ID NO: 9351, SEQ ID NO: 4374/SEQ ID NO: 9352, SEQ ID NO: 4375/SEQ ID NO: 9353, SEQ ID NO: 4376/SEQ ID NO: 9354, SEQ ID NO: 4377/SEQ ID NO: 9355, SEQ ID NO: 4378/SEQ ID NO: 9356, SEQ ID NO: 4379/SEQ ID NO: 9357, SEQ ID NO: 4380/SEQ ID NO: 9358, SEQ ID NO: 4381/SEQ ID NO: 9359, SEQ ID NO: 4382/SEQ ID NO: 9360, SEQ ID NO: 4383/SEQ ID NO: 9361, SEQ ID NO: 4384/SEQ ID NO: 9362, SEQ ID NO: 4385/SEQ ID NO: 9363, SEQ ID NO: 4386/SEQ ID NO: 9364, SEQ ID NO: 4387/SEQ ID NO: 9365, SEQ ID NO: 4388/SEQ ID NO: 9366, SEQ ID NO: 4390/SEQ ID NO: 9367, SEQ ID NO: 4391/SEQ ID NO: 9368, SEQ ID NO: 4392/SEQ ID NO: 9369, SEQ ID NO: 4393/SEQ ID NO: 9370, SEQ ID NO: 4394/SEQ ID NO: 9371, SEQ ID NO: 4395/SEQ ID NO: 9372, SEQ ID NO: 4396/SEQ ID NO: 9373, SEQ ID NO: 4398/SEQ ID NO: 9374, SEQ ID NO: 4399/SEQ ID NO: 9375, SEQ ID NO: 4400/SEQ ID NO: 9376, SEQ ID NO: 4401/SEQ ID NO: 9377, SEQ ID NO: 4402/SEQ ID NO: 9378, SEQ ID NO: 4403/SEQ ID NO: 9379, SEQ ID NO: 4404/SEQ ID NO: 9380, SEQ ID NO: 4405/SEQ ID NO: 9381, SEQ ID NO: 4406/SEQ ID NO: 9382, SEQ ID NO: 4407/SEQ ID NO: 9383, SEQ ID NO: 4408/SEQ ID NO: 9384, SEQ ID NO: 4409/SEQ ID NO: 9385, SEQ ID NO: 4410/SEQ ID NO: 9386, SEQ ID NO: 4411/SEQ ID NO: 9387, SEQ ID NO: 4412/SEQ ID NO: 9388, SEQ ID NO: 4413/SEQ ID NO: 9389, SEQ ID NO: 4414/SEQ ID NO: 9390, SEQ ID NO: 4415/SEQ ID NO: 9391, SEQ ID NO: 4416/SEQ ID NO: 9392, SEQ ID NO: 4417/SEQ ID NO: 9393, SEQ ID NO: 4418/SEQ ID NO: 9394, SEQ ID NO: 4419/SEQ ID NO: 9395, SEQ ID NO: 4420/SEQ ID NO: 9396, SEQ ID NO: 4421/SEQ ID NO: 9397, SEQ ID NO: 4422/SEQ ID NO: 9398, SEQ ID NO: 4423/SEQ ID NO: 9399, SEQ ID NO: 4424/SEQ ID NO: 9400, SEQ ID NO: 4425/SEQ ID NO: 9401, SEQ ID NO: 4426/SEQ ID NO: 9402, SEQ ID NO: 4427/SEQ ID NO: 9403, SEQ ID NO: 4428/SEQ ID NO: 9404, SEQ ID NO: 4429/SEQ ID NO: 9405, SEQ ID NO: 4430/SEQ ID NO: 9406, SEQ ID NO: 4431/SEQ ID NO: 9407, SEQ ID NO: 4432/SEQ ID NO: 9408, SEQ ID NO: 4433/SEQ ID NO: 9409, SEQ ID NO: 4434/SEQ ID NO: 9410, SEQ ID NO: 4435/SEQ ID NO: 9411, SEQ ID NO: 4436/SEQ ID NO: 9412, SEQ ID NO: 4437/SEQ ID NO: 9413, SEQ ID NO: 4438/SEQ ID NO: 9414, SEQ ID NO: 4439/SEQ ID NO: 9415, SEQ ID NO: 4440/SEQ ID NO: 9416, SEQ ID NO: 4441/SEQ ID NO: 9417, SEQ ID NO: 4442/SEQ ID NO: 9418, SEQ ID NO: 4443/SEQ ID NO: 9419, SEQ ID NO: 4444/SEQ ID NO: 9420, SEQ ID NO: 4445/SEQ ID NO: 9421, SEQ ID NO: 4446/SEQ ID NO: 9422, SEQ ID NO: 4447/SEQ ID NO: 9423, SEQ ID NO: 4448/SEQ ID NO: 9424, SEQ ID NO: 4449/SEQ ID NO: 9425, SEQ ID NO: 4450/SEQ ID NO: 9426, SEQ ID NO: 4451/SEQ ID NO: 9427, SEQ ID NO: 4452/SEQ ID NO: 9428, SEQ ID NO: 4453/SEQ ID NO: 9429, SEQ ID NO: 4454/SEQ ID NO: 9430, SEQ ID NO: 4455/SEQ ID NO: 9431, SEQ ID NO: 4456/SEQ ID NO: 9432, SEQ ID NO: 4457/SEQ ID NO: 9433, SEQ ID NO: 4458/SEQ ID NO: 9434, SEQ ID NO: 4459/SEQ ID NO: 9435, SEQ ID NO: 4460/SEQ ID NO: 9436, SEQ ID NO: 4461/SEQ ID NO: 9437, SEQ ID NO: 4462/SEQ ID NO: 9438, SEQ ID NO: 4463/SEQ ID NO: 9439, SEQ ID NO: 4464/SEQ ID NO: 9440, SEQ ID NO: 4465/SEQ ID NO: 9441, SEQ ID NO: 4466/SEQ ID NO: 9442, SEQ ID NO: 4467/SEQ ID NO: 9443, SEQ ID NO: 4468/SEQ ID NO: 9444, SEQ ID NO: 4469/SEQ ID NO: 9445, SEQ ID NO: 4470/SEQ ID NO: 9446, SEQ ID NO: 4471/SEQ ID NO: 9447,
SEQ ID NO: 4472/SEQ ID NO: 9448, SEQ ID NO: 4473/SEQ ID NO: 9449, SEQ ID NO: 4474/SEQ ID NO: 9450, SEQ ID NO: 4475/SEQ ID NO: 9451, SEQ ID NO: 4476/SEQ ID NO: 9452, SEQ ID NO: 4477/SEQ ID NO: 9453, SEQ ID NO: 4478/SEQ ID NO: 9454, SEQ ID NO: 4479/SEQ ID NO: 9455, SEQ ID NO: 4480/SEQ ID NO: 9456, SEQ ID NO: 4481/SEQ ID NO: 9457, SEQ ID NO: 4482/SEQ ID NO: 9458, SEQ ID NO: 4483/SEQ ID NO: 9459, SEQ ID NO: 4484/SEQ ID NO: 9460, SEQ ID NO: 4485/SEQ ID NO: 9461, SEQ ID NO: 4486/SEQ ID NO: 9462, SEQ ID NO: 4487/SEQ ID NO: 9463, SEQ ID NO: 4489/SEQ ID NO: 9464, SEQ ID NO: 4490/SEQ ID NO: 9465, SEQ ID NO: 4491/SEQ ID NO: 9466, SEQ ID NO: 4492/SEQ ID NO: 9467, SEQ ID NO: 4493/SEQ ID NO: 9468, SEQ ID NO: 4494/SEQ ID NO: 9469, SEQ ID NO: 4495/SEQ ID NO: 9470, SEQ ID NO: 4496/SEQ ID NO: 9471, SEQ ID NO: 4497/SEQ ID NO: 9472, SEQ ID NO: 4498/SEQ ID NO: 9473, SEQ ID NO: 4499/SEQ ID NO: 9474, SEQ ID NO: 4500/SEQ ID NO: 9475, SEQ ID NO: 4501/SEQ ID NO: 9476, SEQ ID NO: 4502/SEQ ID NO: 9477, SEQ ID NO: 4503/SEQ ID NO: 9478, SEQ ID NO: 4504/SEQ ID NO: 9479, SEQ ID NO: 4505/SEQ ID NO: 9480, SEQ ID NO: 4506/SEQ ID NO: 9481, SEQ ID NO: 4507/SEQ ID NO: 9482, SEQ ID NO: 4508/SEQ ID NO: 9483, SEQ ID NO: 4509/SEQ ID NO: 9484, SEQ ID NO: 4510/SEQ ID NO: 9485, SEQ ID NO: 4511/SEQ ID NO: 9486, SEQ ID NO: 4512/SEQ ID NO: 9487, SEQ ID NO: 4513/SEQ ID NO: 9488, SEQ ID NO: 4514/SEQ ID NO: 9489, SEQ ID NO: 4515/SEQ ID NO: 9490, SEQ ID NO: 4516/SEQ ID NO: 9491, SEQ ID NO: 4517/SEQ ID NO: 9492, SEQ ID NO: 4518/SEQ ID NO: 9493, SEQ ID NO: 4519/SEQ ID NO: 9494, SEQ ID NO: 4520/SEQ ID NO: 9495, SEQ ID NO: 4521/SEQ ID NO: 9496, SEQ ID NO: 4522/SEQ ID NO: 9497, SEQ ID NO: 4523/SEQ ID NO: 9498, SEQ ID NO: 4524/SEQ ID NO: 9499, SEQ ID NO: 4525/SEQ ID NO: 9500, SEQ ID NO: 4526/SEQ ID NO: 9501, SEQ ID NO: 4527/SEQ ID NO: 9502, SEQ ID NO: 4528/SEQ ID NO: 9503, SEQ ID NO: 4529/SEQ ID NO: 9504, SEQ ID NO: 4530/SEQ ID NO: 9505, SEQ ID NO: 4531/SEQ ID NO: 9506, SEQ ID NO: 4532/SEQ ID NO: 9507, SEQ ID NO: 4533/SEQ ID NO: 9508, SEQ ID NO: 4534/SEQ ID NO: 9509, SEQ ID NO: 4535/SEQ ID NO: 9510, SEQ ID NO: 4536/SEQ ID NO: 9511, SEQ ID NO: 4537/SEQ ID NO: 9512, SEQ ID NO: 4538/SEQ ID NO: 9513, SEQ ID NO: 4539/SEQ ID NO: 9514, SEQ ID NO: 4540/SEQ ID NO: 9515, SEQ ID NO: 4541/SEQ ID NO: 9516, SEQ ID NO: 4542/SEQ ID NO: 9517, SEQ ID NO: 4543/SEQ ID NO: 9518, SEQ ID NO: 4544/SEQ ID NO: 9519, SEQ ID NO: 4545/SEQ ID NO: 9520, SEQ ID NO: 4546/SEQ ID NO: 9521, SEQ ID NO: 4547/SEQ ID NO: 9522, SEQ ID NO: 4548/SEQ ID NO: 9523, SEQ ID NO: 4549/SEQ ID NO: 9524, SEQ ID NO: 4550/SEQ ID NO: 9525, SEQ ID NO: 4551/SEQ ID NO: 9526, SEQ ID NO: 4552/SEQ ID NO: 9527, SEQ ID NO: 4553/SEQ ID NO: 9528, SEQ ID NO: 4555/SEQ ID NO: 9529, SEQ ID NO: 4556/SEQ ID NO: 9530, SEQ ID NO: 4557/SEQ ID NO: 9531, SEQ ID NO: 4558/SEQ ID NO: 9532, SEQ ID NO: 4559/SEQ ID NO: 9533, SEQ ID NO: 4560/SEQ ID NO: 9534, SEQ ID NO: 4561/SEQ ID NO: 9535, SEQ ID NO: 4563/SEQ ID NO: 9536, SEQ ID NO: 4564/SEQ ID NO: 9537, SEQ ID NO: 4565/SEQ ID NO: 9538, SEQ ID NO: 4566/SEQ ID NO: 9539, SEQ ID NO: 4567/SEQ ID NO: 9540, SEQ ID NO: 4568/SEQ ID NO: 9541, SEQ ID NO: 4569/SEQ ID NO: 9542, SEQ ID NO: 4570/SEQ ID NO: 9543, SEQ ID NO: 4571/SEQ ID NO: 9544, SEQ ID NO: 4572/SEQ ID NO: 9545, SEQ ID NO: 4573/SEQ ID NO: 9546, SEQ ID NO: 4574/SEQ ID NO: 9547,
SEQ ID NO: 4575/SEQ ID NO: 9548, SEQ ID NO: 4576/SEQ ID NO: 9549, SEQ ID NO: 4577/SEQ ID NO: 9550, SEQ ID NO: 4578/SEQ ID NO: 9551, SEQ ID NO: 4579/SEQ ID NO: 9552, SEQ ID NO: 4580/SEQ ID NO: 9553, SEQ ID NO: 4581/SEQ ID NO: 9554, SEQ ID NO: 4582/SEQ ID NO: 9555, SEQ ID NO: 4583/SEQ ID NO: 9556, SEQ ID NO: 4584/SEQ ID NO: 9557, SEQ ID NO: 4585/SEQ ID NO: 9558, SEQ ID NO: 4586/SEQ ID NO: 9559, SEQ ID NO: 4587/SEQ ID NO: 9560, SEQ ID NO: 4588/SEQ ID NO: 9561, SEQ ID NO: 4589/SEQ ID NO: 9562, SEQ ID NO: 4590/SEQ ID NO: 9563, SEQ ID NO: 4591/SEQ ID NO: 9564, SEQ ID NO: 4592/SEQ ID NO: 9565, SEQ ID NO: 4593/SEQ ID NO: 9566, SEQ ID NO: 4594/SEQ ID NO: 9567, SEQ ID NO: 4595/SEQ ID NO: 9568, SEQ ID NO: 4596/SEQ ID NO: 9569, SEQ ID NO: 4597/SEQ ID NO: 9570, SEQ ID NO: 4598/SEQ ID NO: 9571, SEQ ID NO: 4599/SEQ ID NO: 9572, SEQ ID NO: 4600/SEQ ID NO: 9573, SEQ ID NO: 4601/SEQ ID NO: 9574, SEQ ID NO: 4602/SEQ ID NO: 9575, SEQ ID NO: 4603/SEQ ID NO: 9576, SEQ ID NO: 4604/SEQ ID NO: 9577, SEQ ID NO: 4605/SEQ ID NO: 9578, SEQ ID NO: 4606/SEQ ID NO: 9579, SEQ ID NO: 4607/SEQ ID NO: 9580, SEQ ID NO: 4608/SEQ ID NO: 9581, SEQ ID NO: 4609/SEQ ID NO: 9582, SEQ ID NO: 4610/SEQ ID NO: 9583, SEQ ID NO: 4611/SEQ ID NO: 9584, SEQ ID NO: 4612/SEQ ID NO: 9585, SEQ ID NO: 4613/SEQ ID NO: 9586, SEQ ID NO: 4614/SEQ ID NO: 9587, SEQ ID NO: 4615/SEQ ID NO: 9588, SEQ ID NO: 4616/SEQ ID NO: 9589, SEQ ID NO: 4617/SEQ ID NO: 9590, SEQ ID NO: 4618/SEQ ID NO: 9591, SEQ ID NO: 4619/SEQ ID NO: 9592, SEQ ID NO: 4621/SEQ ID NO: 9593, SEQ ID NO: 4622/SEQ ID NO: 9594, SEQ ID NO: 4623/SEQ ID NO: 9595, SEQ ID NO: 4624/SEQ ID NO: 9596, SEQ ID NO: 4625/SEQ ID NO: 9597, SEQ ID NO: 4626/SEQ ID NO: 9598, SEQ ID NO: 4627/SEQ ID NO: 9599, SEQ ID NO: 4628/SEQ ID NO: 9600, SEQ ID NO: 4629/SEQ ID NO: 9601, SEQ ID NO: 4630/SEQ ID NO: 9602, SEQ ID NO: 4631/SEQ ID NO: 9603, SEQ ID NO: 4632/SEQ ID NO: 9604, SEQ ID NO: 4633/SEQ ID NO: 9605, SEQ ID NO: 4634/SEQ ID NO: 9606, SEQ ID NO: 4635/SEQ ID NO: 9607, SEQ ID NO: 4636/SEQ ID NO: 9608, SEQ ID NO: 4637/SEQ ID NO: 9609, SEQ ID NO: 4638/SEQ ID NO: 9610, SEQ ID NO: 4639/SEQ ID NO: 9611, SEQ ID NO: 4640/SEQ ID NO: 9612, SEQ ID NO: 4641/SEQ ID NO: 9613, SEQ ID NO: 4642/SEQ ID NO: 9614, SEQ ID NO: 4643/SEQ ID NO: 9615, SEQ ID NO: 4644/SEQ ID NO: 9616, SEQ ID NO: 4645/SEQ ID NO: 9617, SEQ ID NO: 4646/SEQ ID NO: 9618, SEQ ID NO: 4647/SEQ ID NO: 9619, SEQ ID NO: 4648/SEQ ID NO: 9620, SEQ ID NO: 4649/SEQ ID NO: 9621, SEQ ID NO: 4650/SEQ ID NO: 9622, SEQ ID NO: 4651/SEQ ID NO: 9623, SEQ ID NO: 4652/SEQ ID NO: 9624, SEQ ID NO: 4653/SEQ ID NO: 9625, SEQ ID NO: 4654/SEQ ID NO: 9626, SEQ ID NO: 4655/SEQ ID NO: 9627, SEQ ID NO: 4656/SEQ ID NO: 9628, SEQ ID NO: 4657/SEQ ID NO: 9629, SEQ ID NO: 4659/SEQ ID NO: 9630, SEQ ID NO: 4660/SEQ ID NO: 9631, SEQ ID NO: 4661/SEQ ID NO: 9632, SEQ ID NO: 4662/SEQ ID NO: 9633, SEQ ID NO: 4663/SEQ ID NO: 9634, SEQ ID NO: 4664/SEQ ID NO: 9635, SEQ ID NO: 4665/SEQ ID NO: 9636, SEQ ID NO: 4666/SEQ ID NO: 9637, SEQ ID NO: 4667/SEQ ID NO: 9638, SEQ ID NO: 4669/SEQ ID NO: 9639, SEQ ID NO: 4670/SEQ ID NO: 9640, SEQ ID NO: 4671/SEQ ID NO: 9641, SEQ ID NO: 4672/SEQ ID NO: 9642, SEQ ID NO: 4673/SEQ ID NO: 9643, SEQ ID NO: 4674/SEQ ID NO: 9644, SEQ ID NO: 4675/SEQ ID NO: 9645, SEQ ID NO: 4676/SEQ ID NO: 9646, SEQ ID NO: 4677/SEQ ID NO: 9647,
SEQ ID NO: 4678/SEQ ID NO: 9648, SEQ ID NO: 4679/SEQ ID NO: 9649, SEQ ID NO: 4680/SEQ ID NO: 9650, SEQ ID NO: 4681/SEQ ID NO: 9651, SEQ ID NO: 4682/SEQ ID NO: 9652, SEQ ID NO: 4683/SEQ ID NO: 9653, SEQ ID NO: 4684/SEQ ID NO: 9654, SEQ ID NO: 4685/SEQ ID NO: 9655, SEQ ID NO: 4686/SEQ ID NO: 9656, SEQ ID NO: 4687/SEQ ID NO: 9657, SEQ ID NO: 4688/SEQ ID NO: 9658, SEQ ID NO: 4689/SEQ ID NO: 9659, SEQ ID NO: 4690/SEQ ID NO: 9660, SEQ ID NO: 4691/SEQ ID NO: 9661, SEQ ID NO: 4692/SEQ ID NO: 9662, SEQ ID NO: 4693/SEQ ID NO: 9663, SEQ ID NO: 4694/SEQ ID NO: 9664, SEQ ID NO: 4695/SEQ ID NO: 9665, SEQ ID NO: 4696/SEQ ID NO: 9666, SEQ ID NO: 4697/SEQ ID NO: 9667, SEQ ID NO: 4699/SEQ ID NO: 9668, SEQ ID NO: 4700/SEQ ID NO: 9669, SEQ ID NO: 4701/SEQ ID NO: 9670, SEQ ID NO: 4702/SEQ ID NO: 9671, SEQ ID NO: 4703/SEQ ID NO: 9672, SEQ ID NO: 4704/SEQ ID NO: 9673, SEQ ID NO: 4705/SEQ ID NO: 9674, SEQ ID NO: 4706/SEQ ID NO: 9675, SEQ ID NO: 4708/SEQ ID NO: 9676, SEQ ID NO: 4709/SEQ ID NO: 9677, SEQ ID NO: 4710/SEQ ID NO: 9678, SEQ ID NO: 4711/SEQ ID NO: 9679, SEQ ID NO: 4712/SEQ ID NO: 9680, SEQ ID NO: 4713/SEQ ID NO: 9681, SEQ ID NO: 4714/SEQ ID NO: 9682, SEQ ID NO: 4715/SEQ ID NO: 9683, SEQ ID NO: 4716/SEQ ID NO: 9684, SEQ ID NO: 4717/SEQ ID NO: 9685, SEQ ID NO: 4718/SEQ ID NO: 9686, SEQ ID NO: 4719/SEQ ID NO: 9687, SEQ ID NO: 4720/SEQ ID NO: 9688, SEQ ID NO: 4721/SEQ ID NO: 9689, SEQ ID NO: 4722/SEQ ID NO: 9690, SEQ ID NO: 4723/SEQ ID NO: 9691, SEQ ID NO: 4724/SEQ ID NO: 9692, SEQ ID NO: 4725/SEQ ID NO: 9693, SEQ ID NO: 4726/SEQ ID NO: 9694, SEQ ID NO: 4727/SEQ ID NO: 9695, SEQ ID NO: 4728/SEQ ID NO: 9696, SEQ ID NO: 4729/SEQ ID NO: 9697, SEQ ID NO: 4730/SEQ ID NO: 9698, SEQ ID NO: 4731/SEQ ID NO: 9699, SEQ ID NO: 4732/SEQ ID NO: 9700, SEQ ID NO: 4733/SEQ ID NO: 9701, SEQ ID NO: 4734/SEQ ID NO: 9702, SEQ ID NO: 4735/SEQ ID NO: 9703, SEQ ID NO: 4736/SEQ ID NO: 9704, SEQ ID NO: 4737/SEQ ID NO: 9705, SEQ ID NO: 4738/SEQ ID NO: 9706, SEQ ID NO: 4739/SEQ ID NO: 9707, SEQ ID NO: 4740/SEQ ID NO: 9708, SEQ ID NO: 4741/SEQ ID NO: 9709, SEQ ID NO: 4742/SEQ ID NO: 9710, SEQ ID NO: 4743/SEQ ID NO: 9711, SEQ ID NO: 4744/SEQ ID NO: 9712, SEQ ID NO: 4745/SEQ ID NO: 9713, SEQ ID NO: 4746/SEQ ID NO: 9714, SEQ ID NO: 4747/SEQ ID NO: 9715, SEQ ID NO: 4748/SEQ ID NO: 9716, SEQ ID NO: 4749/SEQ ID NO: 9717, SEQ ID NO: 4750/SEQ ID NO: 9718, SEQ ID NO: 4751/SEQ ID NO: 9719, SEQ ID NO: 4752/SEQ ID NO: 9720, SEQ ID NO: 4753/SEQ ID NO: 9721, SEQ ID NO: 4754/SEQ ID NO: 9722, SEQ ID NO: 4755/SEQ ID NO: 9723, SEQ ID NO: 4756/SEQ ID NO: 9724, SEQ ID NO: 4757/SEQ ID NO: 9725, SEQ ID NO: 4758/SEQ ID NO: 9726, SEQ ID NO: 4759/SEQ ID NO: 9727, SEQ ID NO: 4760/SEQ ID NO: 9728, SEQ ID NO: 4761/SEQ ID NO: 9729, SEQ ID NO: 4762/SEQ ID NO: 9730, SEQ ID NO: 4763/SEQ ID NO: 9731, SEQ ID NO: 4764/SEQ ID NO: 9732, SEQ ID NO: 4765/SEQ ID NO: 9733, SEQ ID NO: 4766/SEQ ID NO: 9734, SEQ ID NO: 4767/SEQ ID NO: 9735, SEQ ID NO: 4768/SEQ ID NO: 9736, SEQ ID NO: 4769/SEQ ID NO: 9737, SEQ ID NO: 4770/SEQ ID NO: 9738, SEQ ID NO: 4771/SEQ ID NO: 9739, SEQ ID NO: 4772/SEQ ID NO: 9740, SEQ ID NO: 4773/SEQ ID NO: 9741, SEQ ID NO: 4774/SEQ ID NO: 9742, SEQ ID NO: 4775/SEQ ID NO: 9743, SEQ ID NO: 4776/SEQ ID NO: 9744, SEQ ID NO: 4777/SEQ ID NO: 9745, SEQ ID NO: 4778/SEQ ID NO: 9746, SEQ ID NO: 4779/SEQ ID NO: 9747,
SEQ ID NO: 4780/SEQ ID NO: 9748, SEQ ID NO: 4781/SEQ ID NO: 9749, SEQ ID NO: 4782/SEQ ID NO: 9750, SEQ ID NO: 4783/SEQ ID NO: 9751, SEQ ID NO: 84784/SEQ ID NO: 9752, SEQ ID NO: 4785/SEQ ID NO: 9753, SEQ ID NO: 4786/SEQ ID NO: 9754, SEQ ID NO: 4787/SEQ ID NO: 9755, SEQ ID NO: 4788/SEQ ID NO: 9756, SEQ ID NO: 4789/SEQ ID NO: 9757, SEQ ID NO: 4790/SEQ ID NO: 9758, SEQ ID NO: 4791/SEQ ID NO: 9759, SEQ ID NO: 4792/SEQ ID NO: 9760, SEQ ID NO: 4793/SEQ ID NO: 9761, SEQ ID NO: 4795/SEQ ID NO: 9762, SEQ ID NO: 4796/SEQ ID NO: 9763, SEQ ID NO: 4797/SEQ ID NO: 9764, SEQ ID NO: 4798/SEQ ID NO: 9765, SEQ ID NO: 4799/SEQ ID NO: 9766, SEQ ID NO: 4800/SEQ ID NO: 9767, SEQ ID NO: 4801/SEQ ID NO: 9768, SEQ ID NO: 4802/SEQ ID NO: 9769, SEQ ID NO: 4803/SEQ ID NO: 9770, SEQ ID NO: 4804/SEQ ID NO: 9771, SEQ ID NO: 4805/SEQ ID NO: 9772, SEQ ID NO: 4806/SEQ ID NO: 9773, SEQ ID NO: 4807/SEQ ID NO: 9774, SEQ ID NO: 4808/SEQ ID NO: 9775, SEQ ID NO: 4809/SEQ ID NO: 9776, SEQ ID NO: 4810/SEQ ID NO: 9777, SEQ ID NO: 4811/SEQ ID NO: 9778, SEQ ID NO: 4812/SEQ ID NO: 9779, SEQ ID NO: 4813/SEQ ID NO: 9780, SEQ ID NO: 4814/SEQ ID NO: 9781, SEQ ID NO: 4815/SEQ ID NO: 9782, SEQ ID NO: 4816/SEQ ID NO: 9783, SEQ ID NO: 4817/SEQ ID NO: 9784, SEQ ID NO: 4818/SEQ ID NO: 9785, SEQ ID NO: 4819/SEQ ID NO: 9786, SEQ ID NO: 4820/SEQ ID NO: 9787, SEQ ID NO: 4821/SEQ ID NO: 9788, SEQ ID NO: 4822/SEQ ID NO: 9789, SEQ ID NO: 4823/SEQ ID NO: 9790, SEQ ID NO: 4824/SEQ ID NO: 9791, SEQ ID NO: 4825/SEQ ID NO: 9792, SEQ ID NO: 4826/SEQ ID NO: 9793, SEQ ID NO: 4827/SEQ ID NO: 9794, SEQ ID NO: 4828/SEQ ID NO: 9795, SEQ ID NO: 4829/SEQ ID NO: 9796, SEQ ID NO: 4830/SEQ ID NO: 9797, SEQ ID NO: 4832/SEQ ID NO: 9798, SEQ ID NO: 4833/SEQ ID NO: 9799, SEQ ID NO: 4834/SEQ ID NO: 9800, SEQ ID NO: 4835/SEQ ID NO: 9801, SEQ ID NO: 4837/SEQ ID NO: 9802, SEQ ID NO: 4838/SEQ ID NO: 9803, SEQ ID NO: 4839/SEQ ID NO: 9804, SEQ ID NO: 4840/SEQ ID NO: 9805, SEQ ID NO: 4841/SEQ ID NO: 9806, SEQ ID NO: 4842/SEQ ID NO: 9807, SEQ ID NO: 4843/SEQ ID NO: 9808, SEQ ID NO: 4844/SEQ ID NO: 9809, SEQ ID NO: 4845/SEQ ID NO: 9810, SEQ ID NO: 4846/SEQ ID NO: 9811, SEQ ID NO: 4847/SEQ ID NO: 9812, SEQ ID NO: 4848/SEQ ID NO: 9813, SEQ ID NO: 4849/SEQ ID NO: 9814, SEQ ID NO: 4851/SEQ ID NO: 9815, SEQ ID NO: 4852/SEQ ID NO: 9816, SEQ ID NO: 4853/SEQ ID NO: 9817, SEQ ID NO: 4854/SEQ ID NO: 9818, SEQ ID NO: 4855/SEQ ID NO: 9819, SEQ ID NO: 4856/SEQ ID NO: 9820, SEQ ID NO: 4857/SEQ ID NO: 9821, SEQ ID NO: 4858/SEQ ID NO: 9822, SEQ ID NO: 4859/SEQ ID NO: 9823, SEQ ID NO: 4860/SEQ ID NO: 9824, SEQ ID NO: 4861/SEQ ID NO: 9825, SEQ ID NO: 4862/SEQ ID NO: 9826, SEQ ID NO: 4863/SEQ ID NO: 9827, SEQ ID NO: 4864/SEQ ID NO: 9828, SEQ ID NO: 4865/SEQ ID NO: 9829, SEQ ID NO: 4867/SEQ ID NO: 9830, SEQ ID NO: 4868/SEQ ID NO: 9831, SEQ ID NO: 4869/SEQ ID NO: 9832, SEQ ID NO: 4870/SEQ ID NO: 9833, SEQ ID NO: 4871/SEQ ID NO: 9834, SEQ ID NO: 4872/SEQ ID NO: 9835, SEQ ID NO: 4873/SEQ ID NO: 9836, SEQ ID NO: 4874/SEQ ID NO: 9837, SEQ ID NO: 4875/SEQ ID NO: 9838, SEQ ID NO: 4876/SEQ ID NO: 9839, SEQ ID NO: 4877/SEQ ID NO: 9840, SEQ ID NO: 4878/SEQ ID NO: 9841, SEQ ID NO: 4879/SEQ ID NO: 9842, SEQ ID NO: 4880/SEQ ID NO: 9843, SEQ ID NO: 4881/SEQ ID NO: 9844, SEQ ID NO: 4882/SEQ ID NO: 9845, SEQ ID NO: 4883/SEQ ID NO: 9846, SEQ ID NO: 4884/SEQ ID NO: 9847,
SEQ ID NO: 4885/SEQ ID NO: 9848, SEQ ID NO: 4886/SEQ ID NO: 9849, SEQ ID NO: 4887/SEQ ID NO: 9850, SEQ ID NO: 4888/SEQ ID NO: 9851, SEQ ID NO: 4889/SEQ ID NO: 9852, SEQ ID NO: 4890/SEQ ID NO: 9853, SEQ ID NO: 4891/SEQ ID NO: 9854, SEQ ID NO: 4892/SEQ ID NO: 9855, SEQ ID NO: 4894/SEQ ID NO: 9856, SEQ ID NO: 4895/SEQ ID NO: 9857, SEQ ID NO: 4896/SEQ ID NO: 9858, SEQ ID NO: 4897/SEQ ID NO: 9859, SEQ ID NO: 4898/SEQ ID NO: 9860, SEQ ID NO: 4899/SEQ ID NO: 9861, SEQ ID NO: 4900/SEQ ID NO: 9862, SEQ ID NO: 4901/SEQ ID NO: 9863, SEQ ID NO: 4902/SEQ ID NO: 9864, SEQ ID NO: 4903/SEQ ID NO: 9865, SEQ ID NO: 4904/SEQ ID NO: 9866, SEQ ID NO: 4905/SEQ ID NO: 9867, SEQ ID NO: 4906/SEQ ID NO: 9868, SEQ ID NO: 4907/SEQ ID NO: 9869, SEQ ID NO: 4908/SEQ ID NO: 9870, SEQ ID NO: 4909/SEQ ID NO: 9871, SEQ ID NO: 4910/SEQ ID NO: 9872, SEQ ID NO: 4911/SEQ ID NO: 9873, SEQ ID NO: 4912/SEQ ID NO: 9874, SEQ ID NO: 4913/SEQ ID NO: 9875, SEQ ID NO: 4914/SEQ ID NO: 9876, SEQ ID NO: 4915/SEQ ID NO: 9877, SEQ ID NO: 4916/SEQ ID NO: 9878, SEQ ID NO: 4917/SEQ ID NO: 9879, SEQ ID NO: 4918/SEQ ID NO: 9880, SEQ ID NO: 4919/SEQ ID NO: 9881, SEQ ID NO: 4920/SEQ ID NO: 9882, SEQ ID NO: 4921/SEQ ID NO: 9883, SEQ ID NO: 4922/SEQ ID NO: 9884, SEQ ID NO: 4923/SEQ ID NO: 9885, SEQ ID NO: 4924/SEQ ID NO: 9886, SEQ ID NO: 4925/SEQ ID NO: 9887, SEQ ID NO: 4926/SEQ ID NO: 9888, SEQ ID NO: 4927/SEQ ID NO: 9889, SEQ ID NO: 4928/SEQ ID NO: 9890, SEQ ID NO: 4929/SEQ ID NO: 9891, SEQ ID NO: 4931/SEQ ID NO: 9892, SEQ ID NO: 4932/SEQ ID NO: 9893, SEQ ID NO: 4933/SEQ ID NO: 9894, SEQ ID NO: 4934/SEQ ID NO: 9895, SEQ ID NO: 4935/SEQ ID NO: 9896, SEQ ID NO: 4936/SEQ ID NO: 9897, SEQ ID NO: 4937/SEQ ID NO: 9898, SEQ ID NO: 4938/SEQ ID NO: 9899, SEQ ID NO: 4939/SEQ ID NO: 9900, SEQ ID NO: 4940/SEQ ID NO: 9901, SEQ ID NO: 4941/SEQ ID NO: 9902, SEQ ID NO: 4942/SEQ ID NO: 9903, SEQ ID NO: 4944/SEQ ID NO: 9904, SEQ ID NO: 4945/SEQ ID NO: 9905, SEQ ID NO: 4946/SEQ ID NO: 9906, SEQ ID NO: 4947/SEQ ID NO: 9907, SEQ ID NO: 4948/SEQ ID NO: 9908, SEQ ID NO: 4949/SEQ ID NO: 9909, SEQ ID NO: 4950/SEQ ID NO: 9910, SEQ ID NO: 4951/SEQ ID NO: 9911, SEQ ID NO: 4952/SEQ ID NO: 9912, SEQ ID NO: 4953/SEQ ID NO: 9913, SEQ ID NO: 4954/SEQ ID NO: 9914, SEQ ID NO: 4955/SEQ ID NO: 9915, SEQ ID NO: 4956/SEQ ID NO: 9916, SEQ ID NO: 4957/SEQ ID NO: 9917, SEQ ID NO: 4958/SEQ ID NO: 9918, SEQ ID NO: 4959/SEQ ID NO: 9919, SEQ ID NO: 4960/SEQ ID NO: 9920, SEQ ID NO: 4961/SEQ ID NO: 9921, SEQ ID NO: 4962/SEQ ID NO: 9922, SEQ ID NO: 4963/SEQ ID NO: 9923, SEQ ID NO: 4964/SEQ ID NO: 9924, SEQ ID NO: 4965/SEQ ID NO: 9925, SEQ ID NO: 4966/SEQ ID NO: 9926, SEQ ID NO: 4967/SEQ ID NO: 9927, SEQ ID NO: 4968/SEQ ID NO: 9928, SEQ ID NO: 4969/SEQ ID NO: 9929, SEQ ID NO: 4970/SEQ ID NO: 9930, SEQ ID NO: 4971/SEQ ID NO: 9931, SEQ ID NO: 4972/SEQ ID NO: 9932, SEQ ID NO: 4973/SEQ ID NO: 9933, SEQ ID NO: 4974/SEQ ID NO: 9934, SEQ ID NO: 4975/SEQ ID NO: 9935, SEQ ID NO: 4976/SEQ ID NO: 9936, SEQ ID NO: 4977/SEQ ID NO: 9937, SEQ ID NO: 4978/SEQ ID NO: 9938, SEQ ID NO: 4979/SEQ ID NO: 9939, SEQ ID NO: 4980/SEQ ID NO: 9940, SEQ ID NO: 4981/SEQ ID NO: 9941, SEQ ID NO: 4982/SEQ ID NO: 9942, SEQ ID NO: 4983/SEQ ID NO: 9943, SEQ ID NO: 4984/SEQ ID NO: 9944, SEQ ID NO: 4985/SEQ ID NO: 9945, SEQ ID NO: 4986/SEQ ID NO: 9946, SEQ ID NO: 4987/SEQ ID NO: 9947,
SEQ ID NO: 4988/SEQ ID NO: 9948, SEQ ID NO: 4989/SEQ ID NO: 9949, SEQ ID NO: 4990/SEQ ID NO: 9950, SEQ ID NO: 4991/SEQ ID NO: 9951, SEQ ID NO: 4992/SEQ ID NO: 9952, SEQ ID NO: 4993/SEQ ID NO: 9953, SEQ ID NO: 4994/SEQ ID NO: 9954, SEQ ID NO: 4995/SEQ ID NO: 9955, SEQ ID NO: 4996/SEQ ID NO: 9956, SEQ ID NO: 4997/SEQ ID NO: 9957, SEQ ID NO: 4998/SEQ ID NO: 9958, SEQ ID NO: 4999/SEQ ID NO: 9959, SEQ ID NO: 5000/SEQ ID NO: 9960, SEQ ID NO: 5001/SEQ ID NO: 9961, SEQ ID NO: 5002/SEQ ID NO: 9962, SEQ ID NO: 5004/SEQ ID NO: 9963, SEQ ID NO: 5005/SEQ ID NO: 9964, SEQ ID NO: 5006/SEQ ID NO: 9965, SEQ ID NO: 5007/SEQ ID NO: 9966, SEQ ID NO: 5008/SEQ ID NO: 9967, SEQ ID NO: 5009/SEQ ID NO: 9968, SEQ ID NO: 5010/SEQ ID NO: 9969, SEQ ID NO: 5011/SEQ ID NO: 9970, SEQ ID NO: 5012/SEQ ID NO: 9971, SEQ ID NO: 5013/SEQ ID NO: 9972, SEQ ID NO: 5014/SEQ ID NO: 9973, SEQ ID NO: 5016/SEQ ID NO: 9974, SEQ ID NO: 5017/SEQ ID NO: 9975, SEQ ID NO: 5018/SEQ ID NO: 9976, SEQ ID NO: 5019/SEQ ID NO: 9977, SEQ ID NO: 5020/SEQ ID NO: 9978, SEQ ID NO: 5021/SEQ ID NO: 9979, SEQ ID NO: 5022/SEQ ID NO: 9980, SEQ ID NO: 5024/SEQ ID NO: 9981, SEQ ID NO: 5025/SEQ ID NO: 9982, SEQ ID NO: 5026/SEQ ID NO: 9983, SEQ ID NO: 5027/SEQ ID NO: 9984, SEQ ID NO: 5028/SEQ ID NO: 9985, SEQ ID NO: 5029/SEQ ID NO: 9986, SEQ ID NO: 5030/SEQ ID NO: 9987, SEQ ID NO: 5031/SEQ ID NO: 9988, SEQ ID NO: 5032/SEQ ID NO: 9989, SEQ ID NO: 5033/SEQ ID NO: 9990, SEQ ID NO: 5035/SEQ ID NO: 9991, SEQ ID NO: 5036/SEQ ID NO: 9992, SEQ ID NO: 5037/SEQ ID NO: 9993, SEQ ID NO: 5038/SEQ ID NO: 9994, SEQ ID NO: 5039/SEQ ID NO: 9995, SEQ ID NO: 5040/SEQ ID NO: 9996, SEQ ID NO: 5041/SEQ ID NO: 9997, SEQ ID NO: 5042/SEQ ID NO: 9998, SEQ ID NO: 5043/SEQ ID NO: 9999, SEQ ID NO: 5044/SEQ ID NO: 10000, SEQ ID NO: 5045/SEQ ID NO: 10001, SEQ ID NO: 5046/SEQ ID NO: 10002, SEQ ID NO: 5047/SEQ ID NO: 10003, SEQ ID NO: 5048/SEQ ID NO: 10004, SEQ ID NO: 5049/SEQ ID NO: 10005, SEQ ID NO: 5050/SEQ ID NO: 10006, SEQ ID NO: 5051/SEQ ID NO: 10007, SEQ ID NO: 5052/SEQ ID NO: 10008, SEQ ID NO: 5053/SEQ ID NO: 10009, SEQ ID NO: 5054/SEQ ID NO: 10010, SEQ ID NO: 5055/SEQ ID NO: 10011, SEQ ID NO: 5056/SEQ ID NO: 10012, SEQ ID NO: 5057/SEQ ID NO: 10013, SEQ ID NO: 5058/SEQ ID NO: 10014, SEQ ID NO: 5059/SEQ ID NO: 10015, SEQ ID NO: 5061/SEQ ID NO: 10016, SEQ ID NO: 5062/SEQ ID NO: 10017, SEQ ID NO: 5064/SEQ ID NO: 10018, SEQ ID NO: 5065/SEQ ID NO: 10019, SEQ ID NO: 5066/SEQ ID NO: 10020, SEQ ID NO: 5068/SEQ ID NO: 10021, SEQ ID NO: 5069/SEQ ID NO: 10022, SEQ ID NO: 5070/SEQ ID NO: 10023, SEQ ID NO: 5071/SEQ ID NO: 10024, SEQ ID NO: 5072/SEQ ID NO: 10025, SEQ ID NO: 5073/SEQ ID NO: 10026, SEQ ID NO: 5074/SEQ ID NO: 10027, SEQ ID NO: 5075/SEQ ID NO: 10028, SEQ ID NO: 5076/SEQ ID NO: 10029, SEQ ID NO: 5077/SEQ ID NO: 10030, SEQ ID NO: 5078/SEQ ID NO: 10031, SEQ ID NO: 5079/SEQ ID NO: 10032, SEQ ID NO: 5080/SEQ ID NO: 10033, SEQ ID NO: 5082/SEQ ID NO: 10034, SEQ ID NO: 5083/SEQ ID NO: 10035, SEQ ID NO: 5084/SEQ ID NO: 10036, SEQ ID NO: 5085/SEQ ID NO: 10037, SEQ ID NO: 5086/SEQ ID NO: 10038, SEQ ID NO: 5087/SEQ ID NO: 10039, SEQ ID NO: 5088/SEQ ID NO: 10040, SEQ ID NO: 5089/SEQ ID NO: 10041, SEQ ID NO: 5090/SEQ ID NO: 10042, SEQ ID NO: 5091/SEQ ID NO: 10043, SEQ ID NO: 5092/SEQ ID NO: 10044, SEQ ID NO: 5093/SEQ ID NO: 10045, SEQ ID NO: 5094/.SEQ ID NO: 10046, SEQ ID NO: 5095/SEQ ID NO: 10047,
SEQ ID NO: 5096/SEQ ID NO: 10048, SEQ ID NO: 5097/SEQ ID NO: 10049, SEQ ID NO: 5098/SEQ ID NO: 10050, SEQ ID NO: 5099/SEQ ID NO: 10051, SEQ ID NO: 5101/SEQ ID NO: 10052, SEQ ID NO: 5102/SEQ ID NO: 10053,SEQ ID NO: 5103/SEQ ID NO: 10054, SEQ ID NO: 5104/SEQ ID NO: 10055, SEQ ID NO: 5105/SEQ ID NO: 10056, SEQ ID NO: 5106/SEQ ID NO: 10057, SEQ ID NO: 5107/SEQ ID NO: 10058, SEQ ID NO: 5108/SEQ ID NO: 10059, SEQ ID NO: 5109/SEQ ID NO: 10060, SEQ ID NO: 5110/SEQ ID NO: 10061, SEQ ID NO: 5111/SEQ ID NO: 10062, SEQ ID NO: 5112/SEQ ID NO: 10063, SEQ ID NO: 5113/SEQ ID NO: 10064, SEQ ID NO: 5114/SEQ ID NO: 10065, SEQ ID NO: 5115/SEQ ID NO: 10066, SEQ ID NO: 5116/SEQID NO: 10067, SEQ ID NO: 5117/SEQ ID NO: 10068,SEQ ID NO: 5118/SEQ ID NO: 10069,SEQ ID NO: 5119/SEQID NO: 10070, SEQ ID NO: 5120/SEQ ID NO: 10071, SEQ ID NO: 5121/SEQ ID NO: 10072, SEQ ID NO: 5122/SEQ ID NO: 10073, SEQ ID NO: 5123/SEQ ID NO: 10074, SEQ ID NO: 5124/SEQ ID NO: 10075, SEQ ID NO: 5127/SEQ ID NO: 10076, SEQ ID NO: 5128/SEQ ID NO: 10077, SEQ ID NO: 5129/SEQ ID NO: 10078, SEQ ID NO: 5130/SEQ ID NO: 10079, SEQ ID NO: 5131/SEQ ID NO: 10080, SEQ ID NO: 5133/SEQ ID NO: 10081, SEQ ID NO: 5134/SEQ ID NO: 10082, SEQ ID NO: 5135/SEQ ID NO: 10083, SEQ ID NO: 5137/SEQ ID NO: 10084, SEQ ID NO: 5138/SEQ ID NO: 10085, SEQ ID NO: 5139/SEQ ID NO: 10086, SEQ ID NO: 5140/SEQ ID NO: 10087, SEQ ID NO: 5141/SEQ ID NO: 10088, SEQ ID NO: 5142/SEQ ID NO: 10089, SEQ ID NO: 5143/SEQ ID NO: 10090, SEQ ID NO: 5144/SEQ ID NO: 10091, SEQ ID NO: 5145/SEQ ID NO: 10092, SEQ ID NO: 5146/SEQ ID NO: 10093, SEQ ID NO: 5147/SEQ ID NO: 10094, SEQ ID NO: 5148/SEQ ID NO: 10095, SEQ ID NO: 5149/SEQ ID NO: 10096, SEQ ID NO: 5150/SEQ ID NO: 10097, SEQ ID NO: 5151/SEQ ID NO: 10098,SEQ ID NO: 5153/SEQ ID NO: 10099, SEQ ID NO: 5154/SEQ ID NO: 10100, SEQ ID NO: 5155/SEQ ID NO: 10101, SEQ ID NO: 5156/SEQ ID NO: 10102, SEQ ID NO: 5157/SEQ ID NO: 10103, SEQ ID NO: 5158/SEQ ID NO: 10104, SEQ ID NO: 5159/SEQ ID NO: 10105, SEQ ID NO: 5160/SEQ ID NO: 10106, SEQ ID NO: 5161/SEQ ID NO: 10107, SEQ ID NO: 5162/SEQ ID NO: 10108, SEQ ID NO: 5163/SEQ ID NO: 10109, SEQ ID NO: 5164/SEQ ID NO: 10110, SEQID NO: 5165/SEQID NO: 10111, SEQID NO: 5166/SEQ ID NO: 10112,SEQID NO: 5167/SEQ ID NO: 10113,SEQ ID NO: 5168/SEQ ID NO: 10114, SEQ ID NO: 5169/SEQ ID NO: 10115, SEQ ID NO: 5170/SEQ ID NO: 10116, SEQ ID NO: 5171/SEQ ID NO: 10117, SEQ ID NO: 5172/SEQ ID NO: 10118,SEQ ID NO: 5173/SEQ ID NO: 10119, SEQ ID NO: 5174/SEQ ID NO: 10120, SEQ ID NO: 5175/SEQ ID NO: 10121, SEQ ID NO: 5176/SEQ ID NO: 10122, SEQ ID NO: 5177/SEQ ID NO: 10123, SEQ ID NO: 5178/SEQ ID NO: 10124, SEQ ID NO: 5179/SEQ ID NO: 10125, SEQ ID NO: 5180/SEQ ID NO: 10126, SEQ ID NO: 5181/SEQ ID NO: 10127, SEQ ID NO: 5182/SEQ ID NO: 10128, SEQ ID NO: 5183/SEQ ID NO: 10129, SEQ ID NO: 5184/SEQ ID NO: 10130, SEQ ID NO: 5185/SEQ ID NO: 10131, SEQ ID NO: 5186/SEQ ID NO: 10132, SEQ ID NO: 5187/SEQ ID NO: 10133, SEQ ID NO: 5188/SEQ ID NO: 10134, SEQ ID NO: 5189/SEQ ID NO: 10135, SEQ ID NO: 5190/SEQ ID NO: 10136, SEQ ID NO: 5191/SEQ ID NO: 10137, SEQ ID NO: 5192/SEQ ID NO: 10138, SEQ ID NO: 5193/SEQ ID NO: 10139, SEQ ID NO: 5194/SEQ ID NO: 10140, SEQ ID NO: 5195/SEQ ID NO: 10141, SEQ ID NO: 5196/SEQ ID NO: 10142, SEQ ID NO: 5197/SEQ ID NO: 10143, SEQ ID NO: 5198/SEQ ID NO: 10144, SEQ ID NO: 5200/SEQ ID NO: 10145, SEQ ID NO: 5201/SEQ ID NO: 10146, SEQ ID NO: 5202/SEQ ID NO: 10147,
SEQ ID NO: 5204/SEQ ID NO: 10148, SEQ ID NO: 5206/SEQ ID NO: 10149, SEQ ID NO: 5207/SEQ ID NO: 10150, SEQ ID NO: 5208/SEQ ID NO: 10151, SEQ ID NO: 5209/SEQ ID NO: 10152, SEQ ID NO: 5211/SEQ ID NO: 10153, SEQ ID NO: 5212/SEQ ID NO: 10154, SEQ ID NO: 5213/SEQ ID NO: 10155, SEQ ID NO: 5214/SEQ ID NO: 10156, SEQ ID NO: 5215/SEQ ID NO: 10157, SEQ ID NO: 5216/SEQ ID NO: 10158, SEQ ID NO: 5217/SEQ ID NO: 10159, SEQ ID NO: 5218/SEQ ID NO: 10160, SEQ ID NO: 5219/SEQ ID NO: 10161, SEQ ID NO: 5220/SEQ ID NO: 10162, SEQ ID NO: 5221/SEQ ID NO: 10163, SEQ ID NO: 5222/SEQ ID NO: 10164, SEQ ID NO: 5223/SEQ ID NO: 10165, SEQ ID NO: 5224/SEQ ID NO: 10166, SEQ ID NO: 5225/SEQ ID NO: 10167, SEQ ID NO: 5227/SEQ ID NO: 10168, SEQ ID NO: 5229/SEQ ID NO: 10169, SEQ ID NO: 5231/SEQ ID NO: 10170, SEQ ID NO: 5232/SEQ ID NO: 10171, SEQ ID NO: 5234/SEQ ID NO: 10172, SEQ ID NO: 5235/SEQ ID NO: 10173, SEQ ID NO: 5236/SEQ ID NO: 10174, SEQ ID NO: 5251/SEQ ID NO: 10175, SEQ ID NO: 5252/SEQ ID NO: 10176, SEQ ID NO: 5253/SEQ ID NO: 10177, SEQ ID NO: 5254/SEQ ID NO: 10178, SEQ ID NO: 5255/SEQ ID NO: 10179, SEQ ID NO: 5256/SEQ ID NO: 10180, SEQ ID NO: 5257/SEQ ID NO: 10181, SEQ ID NO: 5258/SEQ ID NO: 10182, SEQ ID NO: 5259/SEQ ID NO: 10183, SEQ ID NO: 5260/SEQ ID NO: 10184, SEQ ID NO: 5261/SEQ ID NO: 10185, SEQ ID NO: 5262/SEQ ID NO: 10186, SEQ ID NO: 5263/SEQ ID NO: 10187, SEQ ID NO: 5264/SEQ ID NO: 10188, SEQ ID NO: 5265/SEQ ID NO: 10189, SEQ ID NO: 5266/SEQ ID NO: 10190, SEQ ID NO: 5267/SEQ ID NO: 10191, SEQ ID NO: 5268/SEQ ID NO: 10192, SEQ ID NO: 5269/SEQ ID NO: 10193, SEQ ID NO: 5270/SEQ ID NO: 10194, SEQ ID NO: 5271/SEQ ID NO: 10195, SEQ ID NO: 5272/SEQ ID NO: 10196, SEQ ID NO: 5273/SEQ ID NO: 10197, SEQ ID NO: 5274/SEQ ID NO: 10198, SEQ ID NO: 5275/SEQ ID NO: 10199, SEQ ID NO: 5276/SEQ ID NO: 10200, SEQ ID NO: 5277/SEQ ID NO: 10201, SEQ ID NO: 5278/SEQ ID NO: 10202, SEQ ID NO: 5279/SEQ ID NO: 10203, SEQ ID NO: 5280/SEQ ID NO: 10204, SEQ ID NO: 5281/SEQ ID NO: 10205, SEQ ID NO: 5282/SEQ ID NO: 10206, SEQ ID NO: 5283/SEQ ID NO: 10207, SEQ ID NO: 5284/SEQ ID NO: 10208, SEQ ID NO: 5285/SEQ ID NO: 10209, SEQ ID NO: 5286/SEQ ID NO: 10210, SEQ ID NO: 5287/SEQ ID NO: 10211, SEQ ID NO: 5288/SEQ ID NO: 10212, SEQ ID NO: 5289/SEQ ID NO: 10213, SEQ ID NO: 5290/SEQ ID NO: 10214, SEQ ID NO: 5291/SEQ ID NO: 10215, SEQ ID NO: 5292/SEQ ID NO: 10216, SEQ ID NO: 5293/SEQ ID NO: 10217, SEQ ID NO: 5294/SEQ ID NO: 10218, SEQ ID NO: 5295/SEQ ID NO: 10219, SEQ ID NO: 5296/SEQ ID NO: 10220, SEQ ID NO: 5297/SEQ ID NO: 10221, SEQ ID NO: 5298/SEQ ID NO: 10222, SEQ ID NO: 5299/SEQ ID NO: 10223, SEQ ID NO: 5300/SEQ ID NO: 10224, SEQ ID NO: 5301/SEQ ID NO: 10225, SEQ ID NO: 5302/SEQ ID NO: 10226, SEQ ID NO: 5303/SEQ ID NO: 10227, SEQ ID NO: 5304/SEQ ID NO: 10228, SEQ ID NO: 5305/SEQ ID NO: 10229, SEQ ID NO: 5306/SEQ ID NO: 10230, SEQ ID NO: 5307/SEQ ID NO: 10231, SEQ ID NO: 5308/SEQ ID NO: 10232, SEQ ID NO: 5309/SEQ ID NO: 10233, SEQ ID NO: 5310/SEQ ID NO: 10234, SEQ ID NO: 5311/SEQ ID NO: 10235, SEQ ID NO: 5312/SEQ ID NO: 10236, SEQ ID NO: 5313/SEQ ID NO: 10237, SEQ ID NO: 5314/SEQ ID NO: 10238, SEQ ID NO: 5315/SEQ ID NO: 10239, SEQ ID NO: 5317/SEQ ID NO: 10240, SEQ ID NO: 5318/SEQ ID NO: 10241, SEQ ID NO: 5319/SEQ ID NO: 10242, SEQ ID NO: 5320/SEQ ID NO: 10243, SEQ ID NO: 5321/SEQ ID NO: 10244, SEQ ID NO: 5322/SEQ ID NO: 10245, SEQ ID NO: 5323/SEQ ID NO: 10246, SEQ ID NO: 5324/SEQ ID NO: 10247,
SEQ ID NO: 5325/SEQ ID NO: 10248, SEQ ID NO: 5326/SEQ ID NO: 10249, SEQ ID NO: 5327/SEQ ID NO: 10250, SEQ ID NO: 5328/SEQ ID NO: 10251, SEQ ID NO: 5329/SEQ ID NO: 10252, SEQ ID NO: 5330/SEQ ID NO: 10253, SEQ ID NO: 5331/SEQ ID NO: 10254, SEQ ID NO: 5332/SEQ ID NO: 10255, SEQ ID NO: 5333/SEQ ID NO: 10256, SEQ ID NO: 5334/SEQ ID NO: 10257, SEQ ID NO: 5335/SEQ ID NO: 10258, SEQ ID NO: 5336/SEQ ID NO: 10259, SEQ ID NO: 5337/SEQ ID NO: 10260, SEQ ID NO: 5338/SEQ ID NO: 10261, SEQ ID NO: 5339/SEQ ID NO: 10262, SEQ ID NO: 5340/SEQ ID NO: 10263, SEQ ID NO: 5341/SEQ ID NO: 10264, SEQ ID NO: 5342/SEQ ID NO: 10265, SEQ ID NO: 5343/SEQ ID NO: 10266, SEQ ID NO: 5344/SEQ ID NO: 10267, SEQ ID NO: 5345/SEQ ID NO: 10268, SEQ ID NO: 5346/SEQ ID NO: 10269, SEQ ID NO: 5347/SEQ ID NO: 10270, SEQ ID NO: 5348/SEQ ID NO: 10271, SEQ ID NO: 5349/SEQ ID NO: 10272, SEQ ID NO: 5350/SEQ ID NO: 10273, SEQ ID NO: 5351/SEQ ID NO: 10274, SEQ ID NO: 5352/SEQ ID NO: 10275, SEQ ID NO: 5353/SEQ ID NO: 10276, SEQ ID NO: 5354/SEQ ID NO: 10277, SEQ ID NO: 5355/SEQ ID NO: 10278, SEQ ID NO: 5356/SEQ ID NO: 10279, SEQ ID NO: 5357/SEQ ID NO: 10280, SEQ ID NO: 5358/SEQ ID NO: 10281, SEQ ID NO: 5359/SEQ ID NO: 10282, SEQ ID NO: 5360/SEQ ID NO: 10283, SEQ ID NO: 5362/SEQ ID NO: 10284, SEQ ID NO: 5363/SEQ ID NO: 10285, SEQ ID NO: 5364/SEQ ID NO: 10286, SEQ ID NO: 5365/SEQ ID NO: 10287, SEQ ID NO: 5366/SEQ ID NO: 10288, SEQ ID NO: 5367/SEQ ID NO: 10289, SEQ ID NO: 5368/SEQ ID NO: 10290, SEQ ID NO: 5369/SEQ ID NO: 10291, SEQ ID NO: 5370/SEQ ID NO: 10292, SEQ ID NO: 5371/SEQ ID NO: 10293, SEQ ID NO: 5372/SEQ ID NO: 10294, SEQ ID NO: 5373/SEQ ID NO: 10295, SEQ ID NO: 5374/SEQ ID NO: 10296, SEQ ID NO: 5375/SEQ ID NO: 10297, SEQ ID NO: 5376/SEQ ID NO: 10298, SEQ ID NO: 5377/SEQ ID NO: 10299, SEQ ID NO: 5378/SEQ ID NO: 10300, SEQ ID NO: 5379/SEQ ID NO: 10301, SEQ ID NO: 5380/SEQ ID NO: 10302, SEQ ID NO: 5381/SEQ ID NO: 10303, SEQ ID NO: 5382/SEQ ID NO: 10304, SEQ ID NO: 5383/SEQ ID NO: 10305, SEQ ID NO: 5384/SEQ ID NO: 10306, SEQ ID NO: 5385/SEQ ID NO: 10307, SEQ ID NO: 5386/SEQ ID NO: 10308, SEQ ID NO: 5387/SEQ ID NO: 10309, SEQ ID NO: 5388/SEQ ID NO: 10310, SEQ ID NO: 5389/SEQ ID NO: 10311, SEQ ID NO: 5390/SEQ ID NO: 10312, SEQ ID NO: 5391/SEQ ID NO: 10313, SEQ ID NO: 5392/SEQ ID NO: 10314, SEQ ID NO: 5393/SEQ ID NO: 10315, SEQ ID NO: 5394/SEQ ID NO: 10316, SEQ ID NO: 5395/SEQ ID NO: 10317, SEQ ID NO: 5396/SEQ ID NO: 10318, SEQ ID NO: 5397/SEQ ID NO: 10319, SEQ ID NO: 5398/SEQ ID NO: 10320, SEQ ID NO: 5399/SEQ ID NO: 10321, SEQ ID NO: 5400/SEQ ID NO: 10322, SEQ ID NO: 5401/SEQ ID NO: 10323, SEQ ID NO: 5402/SEQ ID NO: 10324, SEQ ID NO: 5403/SEQ ID NO: 10325, SEQ ID NO: 5404/SEQ ID NO: 10326, SEQ ID NO: 5405/SEQ ID NO: 10327, SEQ ID NO: 5407/SEQ ID NO: 10328, SEQ ID NO: 5408/SEQ ID NO: 10329, SEQ ID NO: 5409/SEQ ID NO: 10330, SEQ ID NO: 5410/SEQ ID NO: 10331, SEQ ID NO: 5411/SEQ ID NO: 10332, SEQ ID NO: 5412/SEQ ID NO: 10333, SEQ ID NO: 5413/SEQ ID NO: 10334, SEQ ID NO: 5414/SEQ ID NO: 10335, SEQ ID NO: 5415/SEQ ID NO: 10336, SEQ ID NO: 5416/SEQ ID NO: 10337, SEQ ID NO: 5417/SEQ ID NO: 10338, SEQ ID NO: 5418/SEQ ID NO: 10339, SEQ ID NO: 5419/SEQ ID NO: 10340, SEQ ID NO: 5420/SEQ ID NO: 10341, SEQ ID NO: 5421/SEQ ID NO: 10342, SEQ ID NO: 5422/SEQ ID NO: 10343, SEQ ID NO: 5423/SEQ ID NO: 10344, SEQ ID NO: 5424/SEQ ID NO: 10345, SEQ ID NO: 5425/SEQ ID NO: 10346, SEQ ID NO: 5426/SEQ ID NO: 10347,
SEQ ID NO: 5427/SEQ ID NO: 10348, SEQ ID NO: 5428/SEQ ID NO: 10349, SEQ ID NO: 5429/SEQ ID NO: 10350, SEQ ID NO: 5430/SEQ ID NO: 10351, SEQ ID NO: 5431/SEQ ID NO: 10352, SEQ ID NO: 5432/SEQ ID NO: 10353, SEQ ID NO: 5433/SEQ ID NO: 10354, SEQ ID NO: 5434/SEQ ID NO: 10355, SEQ ID NO: 5435/SEQ ID NO: 10356, SEQ ID NO: 5436/SEQ ID NO: 10357, SEQ ID NO: 5437/SEQ ID NO: 10358, SEQ ID NO: 5438/SEQ ID NO: 10359, SEQ ID NO: 5439/SEQ ID NO: 10360, SEQ ID NO: 5440/SEQ ID NO: 10361, SEQ ID NO: 5442/SEQ ID NO: 10362, SEQ ID NO: 5443/SEQ ID NO: 10363, SEQ ID NO: 5444/SEQ ID NO: 10364, SEQ ID NO: 5445/SEQ ID NO: 10365, SEQ ID NO: 5446/SEQ ID NO: 10366, SEQ ID NO: 5447/SEQ ID NO: 10367, SEQ ID NO: 5448/SEQ ID NO: 10368, SEQ ID NO: 5449/SEQ ID NO: 10369, SEQ ID NO: 5450/SEQ ID NO: 10370, SEQ ID NO: 5451/SEQ ID NO: 10371, SEQ ID NO: 5452/SEQ ID NO: 10372, SEQ ID NO: 5453/SEQ ID NO: 10373, SEQ ID NO: 5454/SEQ ID NO: 10374, SEQ ID NO: 5455/SEQ ID NO: 10375, SEQ ID NO: 5457/SEQ ID NO: 10376, SEQ ID NO: 5458/SEQ ID NO: 10377, SEQ ID NO: 5460/SEQ ID NO: 10378, SEQ ID NO: 5461/SEQ ID NO: 10379, SEQ ID NO: 5462/SEQ ID NO: 10380, SEQ ID NO: 5463/SEQ ID NO: 10381, SEQ ID NO: 5464/SEQ ID NO: 10382, SEQ ID NO: 5465/SEQ ID NO: 10383, SEQ ID NO: 5466/SEQ ID NO: 10384, SEQ ID NO: 5467/SEQ ID NO: 10385, SEQ ID NO: 5468/SEQ ID NO: 10386, SEQ ID NO: 5469/SEQ ID NO: 10387, SEQ ID NO: 5470/SEQ ID NO: 10388, SEQ ID NO: 5471/SEQ ID NO: 10389, SEQ ID NO: 5472/SEQ ID NO: 10390, SEQ ID NO: 5473/SEQ ID NO: 10391, SEQ ID NO: 5474/SEQ ID NO: 10392, SEQ ID NO: 5475/SEQ ID NO: 10393, SEQ ID NO: 5476/SEQ ID NO: 10394, SEQ ID NO: 5477/SEQ ID NO: 10395, SEQ ID NO: 5478/SEQ ID NO: 10396, SEQ ID NO: 5479/SEQ ID NO: 10397, SEQ ID NO: 5480/SEQ ID NO: 10398, SEQ ID NO: 5481/SEQ ID NO: 10399, SEQ ID NO: 5482/SEQ ID NO: 10400, SEQ ID NO: 5483/SEQ ID NO: 10401, SEQ ID NO: 5484/SEQ ID NO: 10402, SEQ ID NO: 5485/SEQ ID NO: 10403, SEQ ID NO: 5486/SEQ ID NO: 10404, SEQ ID NO: 5487/SEQ ID NO: 10405, SEQ ID NO: 5488/SEQ ID NO: 10406, SEQ ID NO: 5489/SEQ ID NO: 10407, SEQ ID NO: 5490/SEQ ID NO: 10408, SEQ ID NO: 5491/SEQ ID NO: 10409, SEQ ID NO: 5492/SEQ ID NO: 10410, SEQ ID NO: 5493/SEQ ID NO: 10411, SEQ ID NO: 5494/SEQ ID NO: 10412, SEQ ID NO: 5496/SEQ ID NO: 10413, SEQ ID NO: 5497/SEQ ID NO: 10414, SEQ ID NO: 5498/SEQ ID NO: 10415, SEQ ID NO: 5499/SEQ ID NO: 10416, SEQ ID NO: 5500/SEQ ID NO: 10417, SEQ ID NO: 5501/SEQ ID NO: 10418, SEQ ID NO: 5502/SEQ ID NO: 10419, SEQ ID NO: 5503/SEQ ID NO: 10420, SEQ ID NO: 5504/SEQ ID NO: 10421, SEQ ID NO: 5505/SEQ ID NO: 10422, SEQ ID NO: 5506/SEQ ID NO: 10423, SEQ ID NO: 5507/SEQ ID NO: 10424, SEQ ID NO: 5508/SEQ ID NO: 10425, SEQ ID NO: 5509/SEQ ID NO: 10426, SEQ ID NO: 5510/SEQ ID NO: 10427, SEQ ID NO: 5511/SEQ ID NO: 10428, SEQ ID NO: 5512/SEQ ID NO: 10429, SEQ ID NO: 5513/SEQ ID NO: 10430, SEQ ID NO: 5514/SEQ ID NO: 10431, SEQ ID NO: 5515/SEQ ID NO: 10432, SEQ ID NO: 5517/SEQ ID NO: 10433, SEQ ID NO: 5518/SEQ ID NO: 10434, SEQ ID NO: 5519/SEQ ID NO: 10435, SEQ ID NO: 5520/SEQ ID NO: 10436, SEQ ID NO: 5521/SEQ ID NO: 10437, SEQ ID NO: 5522/SEQ ID NO: 10438, SEQ ID NO: 5523/SEQ ID NO: 10439, SEQ ID NO: 5524/SEQ ID NO: 10440, SEQ ID NO: 5525/SEQ ID NO: 10441, SEQ ID NO: 5526/SEQ ID NO: 10442, SEQ ID NO: 5527/SEQ ID NO: 10443, SEQ ID NO: 5528/SEQ ID NO: 10444, SEQ ID NO: 5529/SEQ ID NO: 10445, SEQ ID NO: 5530/SEQ ID NO: 10446, SEQ ID NO: 5531/SEQ ID NO: 10447,
SEQ ID NO: 5532/SEQ ID NO: 10448, SEQ ID NO: 5533/SEQ ID NO: 10449, SEQ ID NO: 5534/SEQ ID NO: 10450, SEQ ID NO: 5535/SEQ ID NO: 10451, SEQ ID NO: 5536/SEQ ID NO: 10452, SEQ ID NO: 5537/SEQ ID NO: 10453, SEQ ID NO: 5538/SEQ ID NO: 10454, SEQ ID NO: 5539/SEQ ID NO: 10455, SEQ ID NO: 5540/SEQ ID NO: 10456, SEQ ID NO: 5541/SEQ ID NO: 10457, SEQ ID NO: 5542/SEQ ID NO: 10458, SEQ ID NO: 5543/SEQ ID NO: 10459, SEQ ID NO: 5544/SEQ ID NO: 10460, SEQ ID NO: 5545/SEQ ID NO: 10461, SEQ ID NO: 5546/SEQ ID NO: 10462, SEQ ID NO: 5547/SEQ ID NO: 10463 SEQ ID NO: 16111/SEQ ID NO: 16165, SEQ ID NO: 16112/SEQ ID NO: 16166, SEQ ID NO: 16113/SEQ ID NO: 16167, SEQ ID NO: 16114/SEQ ID NO: 16168, SEQ ID NO: 16115/SEQ ID NO: 16169, SEQ ID NO: 16116/SEQ ID NO: 16170, SEQ ID NO: 16117/SEQ ID NO: 16171, SEQ ID NO: 16118/SEQ ID NO: 16172, SEQ ID NO: 16119/SEQ ID NO: 16173, SEQ ID NO: 16120/SEQ ID NO: 16174, SEQ ID NO: 16121/SEQ ID NO: 16175, SEQ ID NO: 16122/SEQ ID NO: 16176, SEQ ID NO: 16123/SEQ ID NO: 16177, SEQ ID NO: 16124/SEQ ID NO: 16178, SEQ ID NO: 16125/SEQ ID NO: 16179, SEQ ID NO: 16126/SEQ ID NO: 16180, SEQ ID NO: 16127/SEQ ID NO: 16181, SEQ ID NO: 16128/SEQ ID NO: 16182, SEQ ID NO: 16129/SEQ ID NO: 16183, SEQ ID NO: 16130/SEQ ID NO: 16184, SEQ ID NO: 16131/SEQ ID NO: 16185, SEQ ID NO: 16132/SEQ ID NO: 16186, SEQ ID NO: 16133/SEQ ID NO: 16187, SEQ ID NO: 16134/SEQ ID NO: 16188, SEQ ID NO: 16135/SEQ ID NO: 16189, SEQ ID NO: 16136/SEQ ID NO: 16190, SEQ ID NO: 16137/SEQ ID NO: 16191, SEQ ID NO: 16138/SEQ ID NO: 16192, SEQ ID NO: 16139/SEQ ID NO: 16193, SEQ ID NO: 16140/SEQ ID NO: 16194, SEQ ID NO: 16141/SEQ ID NO: 16195, SEQ ID NO: 16142/SEQ ID NO: 16196, SEQ ID NO: 16143/SEQ ID NO: 16197, SEQ ID NO: 16144/SEQ ID NO: 16198, SEQ ID NO: 16145/SEQ ID NO: 16199, SEQ ID NO: 16146/SEQ ID NO: 16200, SEQ ID NO: 16147/SEQ ID NO: 16201, SEQ ID NO: 16148/SEQ ID NO: 16202, SEQ ID NO: 16149/SEQ ID NO: 16203, SEQ ID NO: 16150/SEQ ID NO: 16204, SEQ ID NO: 16151/SEQ ID NO: 16205, SEQ ID NO: 16152/SEQ ID NO: 16206, SEQ ID NO: 16153/SEQ ID NO: 16207, SEQ ID NO: 16154/SEQ ID NO: 16208, SEQ ID NO: 16155/SEQ ID NO: 16209, SEQ ID NO: 16156/SEQ ID NO: 16210, SEQ ID NO: 16157/SEQ ID NO: 16211, SEQ ID NO: 16158/SEQ ID NO: 16212, SEQ ID NO: 16159/SEQ ID NO: 16213, SEQ ID NO: 16160/SEQ ID NO: 16214, SEQ ID NO: 16161/SEQ ID NO: 16215, SEQ ID NO: 16162/SEQ ID NO: 16216, SEQ ID NO: 16163/SEQ ID NO: 16217, and SEQ ID NO: 16164/SEQ ID NO: 16218

4. A polynucleotide which can be synthesized with the primer set of claim 2 or 3.

5. A polynucleotide comprising a coding region in the polynucleotide of claim 4.

6. A substantially pure protein encoded by polynucleotide of claim 4.

7. A partial peptide of the protein of claim 6.

8. An isolated polynucleotide selected from the group consisting of
(a) a polynucleotide comprising a coding region of the nucleotide sequence set forth in any one of the following SEQ ID NOs:
SEQ ID NO: 10468, SEQ ID NO: 10470, SEQ ID NO: 10471, SEQ ID NO: 10472, SEQ ID NO: 10473, SEQ ID NO: 10475, SEQ ID NO: 10477, SEQ ID NO: 10479, SEQ ID NO: 10481, SEQ ID NO: 10483, SEQ ID NO: 10485, SEQ ID NO: 10487, SEQ ID NO: 10488, SEQ ID NO: 10489, SEQ ID NO: 10491, SEQ ID NO: 10493, SEQ ID NO: 10495, SEQ ID NO: 10496, SEQ ID NO: 10497, SEQ ID NO: 10498, SEQ ID NO: 10500, SEQ ID NO: 10502, SEQ ID NO: 10503, SEQ ID NO: 10504, SEQ ID NO: 10505, SEQ ID NO: 10507, SEQ ID NO: 10508, SEQ ID NO: 10510, SEQ ID NO: 10511, SEQ ID NO: 10512, SEQ ID NO: 10514, SEQ ID NO: 10516, SEQ ID NO: 10517, SEQ ID NO: 10519, SEQ ID NO: 10521, SEQ ID NO: 10523, SEQ ID NO: 10524, SEQ ID NO: 10526, SEQ ID NO: 10528, SEQ ID NO: 10529, SEQ ID NO: 10530, SEQ ID NO: 10532, SEQ ID NO: 10534, SEQ ID NO: 10535, SEQ ID NO: 10537, SEQ ID NO: 10539, SEQ ID NO: 10540, SEQ ID NO: 10542, SEQ ID NO: 10543, SEQ ID NO: 10545, SEQ ID NO: 10546, SEQ ID NO: 10548, SEQ ID NO: 10550, SEQ ID NO: 10551, SEQ ID NO: 10553, SEQ ID NO: 10555, SEQ ID NO: 10556, SEQ ID NO: 10557, SEQ ID NO: 10558, SEQ ID NO: 10560, SEQ ID NO: 10562, SEQ ID NO: 10564, SEQ ID NO: 10566, SEQ ID NO: 10567, SEQ ID NO: 10569, SEQ ID NO: 10571, SEQ ID NO: 10573, SEQ ID NO: 10574, SEQ ID NO: 10576, SEQ ID NO: 10578, SEQ ID NO: 10580, SEQ ID NO: 10582, SEQ ID NO: 10584, SEQ ID NO: 10586, SEQ ID NO: 10588, SEQ ID NO: 10590, SEQ ID NO: 10592, SEQ ID NO: 10594, SEQ ID NO: 10596, SEQ ID NO: 10597, SEQ ID NO: 10599, SEQ ID NO: 10601, SEQ ID NO: 10603, SEQ ID NO: 10604, SEQ ID NO: 10606, SEQ ID NO: 10607, SEQ ID NO: 10609, SEQ ID NO: 10611, SEQ ID NO: 10613, SEQ ID NO: 10614, SEQ ID NO: 10615, SEQ ID NO: 10616, SEQ ID NO: 10618, SEQ ID NO: 10619, SEQ ID NO: 10620, SEQ ID NO: 10622, SEQ ID NO: 10624, SEQ ID NO: 10625, SEQ ID NO: 10627, SEQ ID NO: 10629,
SEQ ID NO: 10630, SEQ ID NO: 10632, SEQ ID NO: 10633, SEQ ID NO: 10635, SEQ ID NO: 10637, SEQ ID NO: 10639, SEQ ID NO: 10641, SEQ ID NO: 10642, SEQ ID NO: 10644, SEQ ID NO: 10646, SEQ ID NO: 10647, SEQ ID NO: 10648, SEQ ID NO: 10649, SEQ ID NO: 10650, SEQ ID NO: 10652, SEQ ID NO: 10654, SEQ ID NO: 10655, SEQ ID NO: 10656, SEQ ID NO: 10658, SEQ ID NO: 10659, SEQ ID NO: 10661, SEQ ID NO: 10663, SEQ ID NO: 10665, SEQ ID NO: 10667, SEQ ID NO: 10669, SEQ ID NO: 10670, SEQ ID NO: 10671, SEQ ID NO: 10673, SEQ ID NO: 10674, SEQ ID NO: 10676, SEQ ID NO: 10678, SEQ ID NO: 10680, SEQ ID NO: 10682, SEQ ID NO: 10683, SEQ ID NO: 10685, SEQ ID NO: 10687, SEQ ID NO: 10689, SEQ ID NO: 10691, SEQ ID NO: 10693, SEQ ID NO: 10695, SEQ ID NO: 10696, SEQ ID NO: 10698, SEQ ID NO: 10700, SEQ ID NO: 10702, SEQ ID NO: 10704, SEQ ID NO: 10706, SEQ ID NO: 10708, SEQ ID NO: 10710, SEQ ID NO: 10711, SEQ ID NO: 10713,SEQ ID NO: 10715,SEQ ID NO: 10717,SEQ ID NO: 10718, SEQ ID NO: 10720, SEQ ID NO: 10722, SEQ ID NO: 10723, SEQ ID NO: 10725, SEQ ID NO: 10727, SEQ ID NO: 10728, SEQ ID NO: 10730, SEQ ID NO: 10732, SEQ ID NO: 10734, SEQ ID NO: 10736, SEQ ID NO: 10738, SEQ ID NO: 10740, SEQ ID NO: 10742, SEQ ID NO: 10744, SEQ ID NO: 10746, SEQ ID NO: 10748, SEQ ID NO: 10750, SEQ ID NO: 10752, SEQ ID NO: 10753, SEQ ID NO: 10754, SEQ ID NO: 10756, SEQ ID NO: 10757, SEQ ID NO: 10758, SEQ ID NO: 10760, SEQ ID NO: 10761, SEQ ID NO: 10763, SEQ ID NO: 10765, SEQ ID NO: 10767, SEQ ID NO: 10769, SEQ ID NO: 10771, SEQ ID NO: 10773, SEQ ID NO: 10774, SEQ ID NO: 10776, SEQ ID NO: 10778, SEQ ID NO: 10780, SEQ ID NO: 10781, SEQ ID NO: 10783, SEQ ID NO: 10785, SEQ ID NO: 10786, SEQ ID NO: 10788, SEQ ID NO: 10790, SEQ ID NO: 10792, SEQ ID NO: 10793, SEQ ID NO: 10795, SEQ ID NO: 10797, SEQ ID NO: 10799, SEQ ID NO: 10800,
SEQ ID NO: 10802, SEQ ID NO: 10804, SEQ ID NO: 10805, SEQ ID NO: 10807, SEQ ID NO: 10808, SEQ ID NO: 10810, SEQ ID NO: 10812, SEQ ID NO: 10814, SEQ ID NO: 10815, SEQ ID NO: 10817, SEQ ID NO: 10818, SEQ ID NO: 10820, SEQ ID NO: 10822, SEQ ID NO: 10824, SEQ ID NO: 10826, SEQ ID NO: 10828, SEQ ID NO: 10830, SEQ ID NO: 10831, SEQ ID NO: 10832, SEQ ID NO: 10834, SEQ ID NO: 10836, SEQ ID NO: 10838, SEQ ID NO: 10840, SEQ ID NO: 10841, SEQ ID NO: 10842, SEQ ID NO: 10844, SEQ ID NO: 10845, SEQ ID NO: 10847, SEQ ID NO: 10849, SEQ ID NO: 10850, SEQ ID NO: 10852, SEQ ID NO: 10854, SEQ ID NO: 10856, SEQ ID NO: 10858, SEQ ID NO: 10859, SEQ ID NO: 10861, SEQ ID NO: 10862, SEQ ID NO: 10864, SEQ ID NO: 10866, SEQ ID NO: 10868, SEQ ID NO: 10870, SEQ ID NO: 10872, SEQ ID NO: 10873, SEQ ID NO: 10875, SEQ ID NO: 10876, SEQ ID NO: 10878, SEQ ID NO: 10879, SEQ ID NO: 10881, SEQ ID NO: 10883, SEQ ID NO: 10885, SEQ ID NO: 10886, SEQ ID NO: 10888, SEQ ID NO: 10889, SEQ ID NO: 10890, SEQ ID NO: 10891, SEQ ID NO: 10893, SEQ ID NO: 10895, SEQ ID NO: 10897, SEQ ID NO: 10898, SEQ ID NO: 10900, SEQ ID NO: 10901, SEQ ID NO: 10902, SEQ ID NO: 10904, SEQ ID NO: 10906, SEQ ID NO: 10908, SEQ ID NO: 10909, SEQ ID NO: 10910, SEQ ID NO: 10912, SEQ ID NO: 10913, SEQ ID NO: 10914, SEQ ID NO: 10915, SEQ ID NO: 10916, SEQ ID NO: 10918, SEQ ID NO: 10920, SEQ ID NO: 10922, SEQ ID NO: 10924, SEQ ID NO: 10925, SEQ ID NO: 10927, SEQ ID NO: 10928, SEQ ID NO: 10929, SEQ ID NO: 10931, SEQ ID NO: 10933, SEQ ID NO: 10935, SEQ ID NO: 10937, SEQ ID NO: 10939, SEQ ID NO: 10940, SEQ ID NO: 10942, SEQ ID NO: 10943, SEQ ID NO: 10944, SEQ ID NO: 10945, SEQ ID NO: 10946, SEQ ID NO: 10948, SEQ ID NO: 10950, SEQ ID NO: 10952, SEQ ID NO: 10954, SEQ ID NO: 10956, SEQ ID NO: 10957, SEQ ID NO: 10958, SEQ ID NO: 10959, SEQ ID NO: 10960,
SEQ ID NO: 10962, SEQ ID NO: 10964, SEQ ID NO: 10966, SEQ ID NO: 10967, SEQ ID NO: 10968, SEQ ID NO: 10969, SEQ ID NO: 10971, SEQ ID NO: 10973, SEQ ID NO: 10975, SEQ ID NO: 10977, SEQ ID NO: 10978, SEQ ID NO: 10980, SEQ ID NO: 10982, SEQ ID NO: 10983, SEQ ID NO: 10984, SEQ ID NO: 10986, SEQ ID NO: 10988, SEQ ID NO: 10990, SEQ ID NO: 10992, SEQ ID NO: 10994, SEQ ID NO: 10996, SEQ ID NO: 10998, SEQ ID NO: 11000, SEQ ID NO: 11001, SEQ ID NO: 11003, SEQ ID NO: 11005, SEQ ID NO: 11006, SEQ ID NO: 11007, SEQ ID NO: 11009, SEQ ID NO: 11011, SEQ ID NO: 11012, SEQ ID NO: 11014, SEQ ID NO: 11016, SEQ ID NO: 11018, SEQ ID NO: 11019, SEQ ID NO: 11021, SEQ ID NO: 11023, SEQ ID NO: 11025, SEQ ID NO: 11027, SEQ ID NO: 11029, SEQ ID NO: 11030, SEQ ID NO: 11032, SEQ ID NO: 11034, SEQ ID NO: 11035, SEQ ID NO: 11036, SEQ ID NO: 11038, SEQ ID NO: 11040, SEQ ID NO: 11042, SEQ ID NO: 11044, SEQ ID NO: 11046, SEQ ID NO: 11048, SEQ ID NO: 11050, SEQ ID NO: 11052, SEQ ID NO: 11054, SEQ ID NO: 11056, SEQ ID NO: 11058, SEQ ID NO: 11060, SEQ ID NO: 11062, SEQ ID NO: 11064, SEQ ID NO: 11066, SEQ ID NO: 11068, SEQ ID NO: 11070, SEQ ID NO: 11072, SEQ ID NO: 11074, SEQ ID NO: 11076, SEQ ID NO: 11078, SEQ ID NO: 11080, SEQ ID NO: 11082, SEQ ID NO: 11084, SEQ ID NO: 11086, SEQ ID NO: 11088, SEQ ID NO: 11090, SEQ ID NO: 11092, SEQ ID NO: 11093, SEQ ID NO: 11095, SEQ ID NO: 11097, SEQ ID NO: 11099, SEQ ID NO: 11101, SEQ ID NO: 11103, SEQ ID NO: 11105, SEQ ID NO: 11107, SEQ ID NO: 11108, SEQ ID NO: 11110, SEQ ID NO: 11112, SEQ ID NO: 11114, SEQ ID NO: 11116, SEQ ID NO: 11118, SEQ ID NO: 11120, SEQ ID NO: 11122, SEQ ID NO: 11123, SEQ ID NO: 11125, SEQ ID NO: 11127, SEQ ID NO: 11129, SEQ ID NO: 11131, SEQ ID NO: 11133, SEQ ID NO: 11135, SEQ ID NO: 11137, SEQ ID NO: 11139, SEQ ID NO: 11141, SEQ ID NO: 11143,
SEQ ID NO: 11145, SEQ ID NO: 11147, SEQ ID NO: 11148, SEQ ID NO: 11150, SEQ ID NO: 11152, SEQ ID NO: 11154, SEQ ID NO: 11156, SEQ ID NO: 11158, SEQ ID NO: 11160, SEQ ID NO: 11162, SEQ ID NO: 11164, SEQ ID NO: 11165, SEQ ID NO: 11167, SEQ ID NO: 11168, SEQ ID NO: 11170, SEQ ID NO: 11172, SEQ ID NO: 11174, SEQ ID NO: 11176, SEQ ID NO: 11178,SEQ ID NO: 11179,SEQ ID NO: 11181,SEQ ID NO: 11183,SEQ ID NO: 11185,SEQ ID NO: 11187,SEQ ID NO: 11189,SEQ ID NO: 11191,SEQ ID NO: 11193, SEQ ID NO: 11195, SEQ ID NO: 11197, SEQ ID NO: 11199, SEQ ID NO: 11201, SEQ ID NO: 11203, SEQ ID NO: 11205, SEQ ID NO: 11207, SEQ ID NO: 11209, SEQ ID NO: 11211, SEQ ID NO: 11213,SEQ ID NO: 11215, SEQ ID NO: 11217,SEQ ID NO: 11219, SEQ ID NO: 11221, SEQ ID NO: 11223, SEQ ID NO: 11225, SEQ ID NO: 11227, SEQ ID NO: 11229, SEQ ID NO: 11231, SEQ ID NO: 11233, SEQ ID NO: 11235, SEQ ID NO: 11237, SEQ ID NO: 11239, SEQ ID NO: 11241, SEQ ID NO: 11243, SEQ ID NO: 11244, SEQ ID NO: 11246, SEQ ID NO: 11248, SEQ ID NO: 11250, SEQ ID NO: 11252, SEQ ID NO: 11253, SEQ ID NO: 11255, SEQ ID NO: 11257, SEQ ID NO: 11259, SEQ ID NO: 11261, SEQ ID NO: 11263, SEQ ID NO: 11265, SEQ ID NO: 11267, SEQ ID NO: 11269, SEQ ID NO: 11271, SEQ ID NO: 11273, SEQ ID NO: 11275, SEQ ID NO: 11277, SEQ ID NO: 11279, SEQ ID NO: 11281, SEQ ID NO: 11283, SEQ ID NO: 11285, SEQ ID NO: 11287, SEQ ID NO: 11289, SEQ ID NO: 11291, SEQ ID NO: 11293, SEQ ID NO: 11295, SEQ ID NO: 11297, SEQ ID NO: 11299, SEQ ID NO: 11301, SEQ ID NO: 11303, SEQ ID NO: 11304, SEQ ID NO: 11306, SEQ ID NO: 11308, SEQ ID NO: 11310, SEQ ID NO: 11312, SEQ ID NO: 11314, SEQ ID NO: 11316, SEQ ID NO: 11318, SEQ ID NO: 11319, SEQ ID NO: 11321, SEQ ID NO: 11323, SEQ ID NO: 11325, SEQ ID NO: 11327, SEQ ID NO: 11329, SEQ ID NO: 11331, SEQ ID NO: 11333, SEQ ID NO: 11335,
SEQ ID NO: 11337, SEQ ID NO: 11339, SEQ ID NO: 11341, SEQ ID NO: 11343, SEQ ID NO: 11345, SEQ ID NO: 11347, SEQ ID NO: 11349, SEQ ID NO: 11351, SEQ ID NO: 11352, SEQ ID NO: 11354, SEQ ID NO: 11356, SEQ ID NO: 11358, SEQ ID NO: 11360, SEQ ID NO: 11362, SEQ ID NO: 11364, SEQ ID NO: 11366, SEQ ID NO: 11368, SEQ ID NO: 11369, SEQ ID NO: 11370, SEQ ID NO: 11372, SEQ ID NO: 11374, SEQ ID NO: 11376, SEQ ID NO: 11378, SEQ ID NO: 11380, SEQ ID NO: 11382, SEQ ID NO: 11384, SEQ ID NO: 11386, SEQ ID NO: 11388, SEQ ID NO: 11390, SEQ ID NO: 11392, SEQ ID NO: 11394, SEQ ID NO: 11396, SEQ ID NO: 11397, SEQ ID NO: 11399, SEQ ID NO: 11401, SEQ ID NO: 11403, SEQ ID NO: 11405, SEQ ID NO: 11407, SEQ ID NO: 11409, SEQ ID NO: 11411, SEQ ID NO: 11413, SEQ ID NO: 11415, SEQ ID NO: 11416, SEQ ID NO: 11418, SEQ ID NO: 11419, SEQ ID NO: 11421, SEQ ID NO: 11423, SEQ ID NO: 11425, SEQ ID NO: 11427, SEQ ID NO: 11429, SEQ ID NO: 11430, SEQ ID NO: 11432, SEQ ID NO: 11434, SEQ ID NO: 11436, SEQ ID NO: 11437, SEQ ID NO: 11439, SEQ ID NO: 11441, SEQ ID NO: 11443, SEQ ID NO: 11445, SEQ ID NO: 11447, SEQ ID NO: 11449, SEQ ID NO: 11451, SEQ ID NO: 11453, SEQ ID NO: 11455, SEQ ID NO: 11457, SEQ ID NO: 11459, SEQ ID NO: 11461, SEQ ID NO: 11463, SEQ ID NO: 11465, SEQ ID NO: 11467, SEQ ID NO: 11469, SEQ ID NO: 11470, SEQ ID NO: 11472, SEQ ID NO: 11474, SEQ ID NO: 11476, SEQ ID NO: 11478, SEQ ID NO: 11480, SEQ ID NO: 11482, SEQ ID NO: 11484, SEQ ID NO: 11485, SEQ ID NO: 11487, SEQ ID NO: 11489, SEQ ID NO: 11491, SEQ ID NO: 11493, SEQ ID NO: 11495, SEQ ID NO: 11496, SEQ ID NO: 11498, SEQ ID NO: 11500, SEQ ID NO: 11502, SEQ ID NO: 11504, SEQ ID NO: 11506, SEQ ID NO: 11507, SEQ ID NO: 11509, SEQ ID NO: 11511, SEQ ID NO: 11513, SEQ ID NO: 11515, SEQ ID NO: 11517, SEQ ID NO: 11519, SEQ ID NO: 11521, SEQ ID NO: 11523,
SEQ ID NO: 11524, SEQ ID NO: 11526, SEQ ID NO: 11528, SEQ ID NO: 11530, SEQ ID NO: 11532, SEQ ID NO: 11534, SEQ ID NO: 11536, SEQ ID NO: 11538, SEQ ID NO: 11540, SEQ ID NO: 11541, SEQ ID NO: 11543, SEQ ID NO: 11545, SEQ ID NO: 11547, SEQ ID NO: 11549, SEQ ID NO: 11551, SEQ ID NO: 11553, SEQ ID NO: 11555, SEQ ID NO: 11557, SEQ ID NO: 11559, SEQ ID NO: 11560, SEQ ID NO: 11561, SEQ ID NO: 11562, SEQ ID NO: 11564, SEQ ID NO: 11566, SEQ ID NO: 11568, SEQ ID NO: 11569, SEQ ID NO: 11571, SEQ ID NO: 11573, SEQ ID NO: 11575, SEQ ID NO: 11577, SEQ ID NO: 11579, SEQ ID NO: 11581, SEQ ID NO: 11582, SEQ ID NO: 11584, SEQ ID NO: 11586, SEQ ID NO: 11588, SEQ ID NO: 11590, SEQ ID NO: 11592, SEQ ID NO: 11594, SEQ ID NO: 11596, SEQ ID NO: 11598, SEQ ID NO: 11600, SEQ ID NO: 11602, SEQ ID NO: 11604, SEQ ID NO: 11606, SEQ ID NO: 11608, SEQ ID NO: 11609, SEQ ID NO: 11611, SEQ ID NO: 11613, SEQ ID NO: 11615,SEQ ID NO: 11617,SEQ ID NO: 11619,SEQ ID NO: 11620,SEQ ID NO: 11622, SEQ ID NO: 11624, SEQ ID NO: 11626, SEQ ID NO: 11628, SEQ ID NO: 11630, SEQ ID NO: 11632, SEQ ID NO: 11634, SEQ ID NO: 11636, SEQ ID NO: 11638, SEQ ID NO: 11639, SEQ ID NO: 11641, SEQ ID NO: 11643, SEQ ID NO: 11645, SEQ ID NO: 11647, SEQ ID NO: 11649, SEQ ID NO: 11651, SEQ ID NO: 11653, SEQ ID NO: 11654, SEQ ID NO: 11656, SEQ ID NO: 11658, SEQ ID NO: 11659, SEQ ID NO: 11661, SEQ ID NO: 11663, SEQ ID NO: 11665, SEQ ID NO: 11666, SEQ ID NO: 11668, SEQ ID NO: 11670, SEQ ID NO: 11672, SEQ ID NO: 11674, SEQ ID NO: 11675, SEQ ID NO: 11677, SEQ ID NO: 11678, SEQ ID NO: 11680, SEQ ID NO: 11682, SEQ ID NO: 11684, SEQ ID NO: 11685, SEQ ID NO: 11687, SEQ ID NO: 11689, SEQ ID NO: 11691, SEQ ID NO: 11693, SEQ ID NO: 11695, SEQ ID NO: 11697,SEQ ID NO: 11699,SEQ ID NO: 11701,SEQ ID NO: 11703, SEQ ID NO: 11705, SEQ ID NO: 11707,
SEQ ID NO: 11709, SEQ ID NO: 11711, SEQ ID NO: 11713, SEQ ID NO: 11715, SEQ ID NO: 11717,SEQ ID NO: 11718,SEQ ID NO: 11720,SEQ ID NO: 11722, SEQ ID NO: 11724, SEQ ID NO: 11726, SEQ ID NO: 11728, SEQ ID NO: 11730, SEQ ID NO: 11732, SEQ ID NO: 11734, SEQ ID NO: 11736, SEQ ID NO: 11738, SEQ ID NO: 11739, SEQ ID NO: 11740, SEQ ID NO: 11742, SEQ ID NO: 11744, SEQ ID NO: 11746, SEQ ID NO: 11748, SEQ ID NO: 11750, SEQ ID NO: 11752, SEQ ID NO: 11754, SEQ ID NO: 11756, SEQ ID NO: 11758, SEQ ID NO: 11759, SEQ ID NO: 11761, SEQ ID NO: 11763, SEQ ID NO: 11765, SEQ ID NO: 11767, SEQ ID NO: 11768, SEQ ID NO: 11770, SEQ ID NO: 11772, SEQ ID NO: 11774, SEQ ID NO: 11776, SEQ ID NO: 11778, SEQ ID NO: 11780, SEQ ID NO: 11782, SEQ ID NO: 11784, SEQ ID NO: 11786, SEQ ID NO: 11788, SEQ ID NO: 11790, SEQ ID NO: 11792, SEQ ID NO: 11794, SEQ ID NO: 11796, SEQ ID NO: 11798, SEQ ID NO: 11800, SEQ ID NO: 11802, SEQ ID NO: 11804, SEQ ID NO: 11806, SEQ ID NO: 11808, SEQ ID NO: 11810, SEQ ID NO: 11811,SEQ ID NO: 11813,SEQ ID NO: 11815,SEQ ID NO: 11817, SEQ ID NO: 11819, SEQ ID NO: 11820, SEQ ID NO: 11822, SEQ ID NO: 11824, SEQ ID NO: 11826, SEQ ID NO: 11828, SEQ ID NO: 11830, SEQ ID NO: 11832, SEQ ID NO: 11833, SEQ ID NO: 11835, SEQ ID NO: 11837, SEQ ID NO: 11839, SEQ ID NO: 11841, SEQ ID NO: 11843, SEQ ID NO: 11845, SEQ ID NO: 11847, SEQ ID NO: 11849, SEQ ID NO: 11850, SEQ ID NO: 11851, SEQ ID NO: 11853, SEQ ID NO: 11855, SEQ ID NO: 11856, SEQ ID NO: 11858, SEQ ID NO: 11859, SEQ ID NO: 11861, SEQ ID NO: 11863, SEQ ID NO: 11865, SEQ ID NO: 11867, SEQ ID NO: 11869, SEQ ID NO: 11870, SEQ ID NO: 11871, SEQ ID NO: 11873, SEQ ID NO: 11875, SEQ ID NO: 11877, SEQ ID NO: 11879, SEQ ID NO: 11880, SEQ ID NO: 11882, SEQ ID NO: 11884, SEQ ID NO: 11886, SEQ ID NO: 11888, SEQ ID NO: 11890, SEQ ID NO: 11892,
SEQ ID NO: 11893, SEQ ID NO: 11895, SEQ ID NO: 11897, SEQ ID NO: 11899, SEQ ID NO: 11901, SEQ ID NO: 11903, SEQ ID NO: 11905, SEQ ID NO: 11907, SEQ ID NO: 11909, SEQ ID NO: 11911, SEQ ID NO: 11913, SEQ ID NO: 11915, SEQ ID NO: 11916, SEQ ID NO: 11918,SEQ ID NO: 11919, SEQ ID NO: 11921,SEQ ID NO: 11923, SEQ ID NO: 11925, SEQ ID NO: 11927, SEQ ID NO: 11928, SEQ ID NO: 11930, SEQ ID NO: 11932, SEQ ID NO: 11934, SEQ ID NO: 11936, SEQ ID NO: 11938, SEQ ID NO: 11940, SEQ ID NO: 11942, SEQ ID NO: 11944, SEQ ID NO: 11946, SEQ ID NO: 11948, SEQ ID NO: 11949, SEQ ID NO: 11951, SEQ ID NO: 11953, SEQ ID NO: 11955, SEQ ID NO: 11957, SEQ ID NO: 11959, SEQ ID NO: 11961, SEQ ID NO: 11963, SEQ ID NO: 11965, SEQ ID NO: 11967, SEQ ID NO: 11969, SEQ ID NO: 11971, SEQ ID NO: 11973, SEQ ID NO: 11975, SEQ ID NO: 11977, SEQ ID NO: 11978, SEQ ID NO: 11980, SEQ ID NO: 11982, SEQ ID NO: 11984, SEQ ID NO: 11986, SEQ ID NO: 11988, SEQ ID NO: 11990, SEQ ID NO: 11992, SEQ ID NO: 11994, SEQ ID NO: 11996, SEQ ID NO: 11998, SEQ ID NO: 12000, SEQ ID NO: 12002, SEQ ID NO: 12003, SEQ ID NO: 12005, SEQ ID NO: 12007, SEQ ID NO: 12008, SEQ ID NO: 12010, SEQ ID NO: 12012, SEQ ID NO: 12014, SEQ ID NO: 12016, SEQ ID NO: 12018, SEQ ID NO: 12019, SEQ ID NO: 12020, SEQ ID NO: 12022, SEQ ID NO: 12024, SEQ ID NO: 12026, SEQ ID NO: 12028, SEQ ID NO: 12030, SEQ ID NO: 12032, SEQ ID NO: 12034, SEQ ID NO: 12036, SEQ ID NO: 12038, SEQ ID NO: 12040, SEQ ID NO: 12042, SEQ ID NO: 12044, SEQ ID NO: 12046, SEQ ID NO: 12048, SEQ ID NO: 12049, SEQ ID NO: 12051, SEQ ID NO: 12053, SEQ ID NO: 12055, SEQ ID NO: 12056, SEQ ID NO: 12058, SEQ ID NO: 12060, SEQ ID NO: 12062, SEQ ID NO: 12064, SEQ ID NO: 12066, SEQ ID NO: 12068, SEQ ID NO: 12070, SEQ ID NO: 12072, SEQ ID NO: 12074, SEQ ID NO: 12076, SEQ ID NO: 12078, SEQ ID NO: 12080,
SEQ ID NO: 12082, SEQ ID NO: 12084, SEQ ID NO: 12086, SEQ ID NO: 12088, SEQ ID NO: 12090, SEQ ID NO: 12092, SEQ ID NO: 12094, SEQ ID NO: 12096, SEQ ID NO: 12097, SEQ ID NO: 12099, SEQ ID NO: 12101, SEQ ID NO: 12103, SEQ ID NO: 12105, SEQ ID NO: 12107, SEQ ID NO: 12109, SEQ ID NO: 12111, SEQ ID NO: 12113, SEQ ID NO: 12115, SEQ ID NO: 12117, SEQ ID NO: 12119, SEQ ID NO: 12121, SEQ ID NO: 12123, SEQ ID NO: 12125, SEQ ID NO: 12127, SEQ ID NO: 12129, SEQ ID NO: 12131, SEQ ID NO: 12133, SEQ ID NO: 12135, SEQ ID NO: 12137, SEQ ID NO: 12139, SEQ ID NO: 12141, SEQ ID NO: 12143, SEQ ID NO: 12145, SEQ ID NO: 12147, SEQ ID NO: 12149, SEQ ID NO: 12151, SEQ ID NO: 12153, SEQ ID NO: 12155, SEQ ID NO: 12157, SEQ ID NO: 12159, SEQ ID NO: 12161, SEQ ID NO: 12163, SEQ ID NO: 12165, SEQ ID NO: 12167, SEQ ID NO: 12169, SEQ ID NO: 12171, SEQ ID NO: 12173, SEQ ID NO: 12175, SEQ ID NO: 12177, SEQ ID NO: 12179, SEQ ID NO: 12181, SEQ ID NO: 12183, SEQ ID NO: 12185, SEQ ID NO: 12187, SEQ ID NO: 12189, SEQ ID NO: 12191, SEQ ID NO: 12193, SEQ ID NO: 12195, SEQ ID NO: 12197, SEQ ID NO: 12199, SEQ ID NO: 12201, SEQ ID NO: 12203, SEQ ID NO: 12205, SEQ ID NO: 12207, SEQ ID NO: 12209, SEQ ID NO: 12211, SEQ ID NO: 12213, SEQ ID NO: 12215, SEQ ID NO: 12216, SEQ ID NO: 12218, SEQ ID NO: 12220, SEQ ID NO: 12222, SEQ ID NO: 12224, SEQ ID NO: 12226, SEQ ID NO: 12228, SEQ ID NO: 12230, SEQ ID NO: 12232, SEQ ID NO: 12234, SEQ ID NO: 12236, SEQ ID NO: 12238, SEQ ID NO: 12240, SEQ ID NO: 12242, SEQ ID NO: 12244, SEQ ID NO: 12246, SEQ ID NO: 12248, SEQ ID NO: 12250, SEQ ID NO: 12252, SEQ ID NO: 12254, SEQ ID NO: 12256, SEQ ID NO: 12258, SEQ ID NO: 12260, SEQ ID NO: 12262, SEQ ID NO: 12264, SEQ ID NO: 12266, SEQ ID NO: 12268, SEQ ID NO: 12270, SEQ ID NO: 12272, SEQ ID NO: 12274, SEQ ID NO: 12276, SEQ ID NO: 12278,
SEQ ID NO: 12279, SEQ ID NO: 12281, SEQ ID NO: 12283, SEQ ID NO: 12285, SEQ ID NO: 12287, SEQ ID NO: 12289, SEQ ID NO: 12291, SEQ ID NO: 12293, SEQ ID NO: 12295, SEQ ID NO: 12297, SEQ ID NO: 12299, SEQ ID NO: 12301, SEQ ID NO: 12303, SEQ ID NO: 12305, SEQ ID NO: 12307,SEQ ID NO: 12309, SEQ ID NO: 12311,SEQ ID NO: 12313, SEQ ID NO: 12315, SEQ ID NO: 12317, SEQ ID NO: 12319, SEQ ID NO: 12321, SEQ ID NO: 12323, SEQ ID NO: 12325, SEQ ID NO: 12327, SEQ ID NO: 12329, SEQ ID NO: 12331, SEQ ID NO: 12333, SEQ ID NO: 12335, SEQ ID NO: 12337, SEQ ID NO: 12339, SEQ ID NO: 12341, SEQ ID NO: 12343, SEQ ID NO: 12345, SEQ ID NO: 12347, SEQ ID NO: 12349, SEQ ID NO: 12351, SEQ ID NO: 12353, SEQ ID NO: 12354, SEQ ID NO: 12356, SEQ ID NO: 12358, SEQ ID NO: 12360, SEQ ID NO: 12362, SEQ ID NO: 12364, SEQ ID NO: 12366, SEQ ID NO: 12368, SEQ ID NO: 12370, SEQ ID NO: 12372, SEQ ID NO: 12374, SEQ ID NO: 12376, SEQ ID NO: 12378, SEQ ID NO: 12380, SEQ ID NO: 12382, SEQ ID NO: 12384, SEQ ID NO: 12386, SEQ ID NO: 12388, SEQ ID NO: 12390, SEQ ID NO: 12392, SEQ ID NO: 12394, SEQ ID NO: 12396, SEQ ID NO: 12398, SEQ ID NO: 12400, SEQ ID NO: 12402, SEQ ID NO: 12403, SEQ ID NO: 12405, SEQ ID NO: 12407, SEQ ID NO: 12409, SEQ ID NO: 12410, SEQ ID NO: 12412, SEQ ID NO: 12414, SEQ ID NO: 12416, SEQ ID NO: 12417, SEQ ID NO: 12419, SEQ ID NO: 12421, SEQ ID NO: 12423, SEQ ID NO: 12425, SEQ ID NO: 12427, SEQ ID NO: 12429, SEQ ID NO: 12431, SEQ ID NO: 12433, SEQ ID NO: 12435, SEQ ID NO: 12436, SEQ ID NO: 12438, SEQ ID NO: 12440, SEQ ID NO: 12442, SEQ ID NO: 12444, SEQ ID NO: 12446, SEQ ID NO: 12448, SEQ ID NO: 12450, SEQ ID NO: 12452, SEQ ID NO: 12454, SEQ ID NO: 12456, SEQ ID NO: 12458, SEQ ID NO: 12460, SEQ ID NO: 12461, SEQ ID NO: 12463, SEQ ID NO: 12465, SEQ ID NO: 12467, SEQ ID NO: 12469, SEQ ID NO: 12471,
SEQ ID NO: 12473, SEQ ID NO: 12475, SEQ ID NO: 12477, SEQ ID NO: 12479, SEQ ID NO: 12481, SEQ ID NO: 12482, SEQ ID NO: 12483, SEQ ID NO: 12485, SEQ ID NO: 12486, SEQ ID NO: 12488, SEQ ID NO: 12490, SEQ ID NO: 12491, SEQ ID NO: 12493, SEQ ID NO: 12495, SEQ ID NO: 12496, SEQ ID NO: 12498, SEQ ID NO: 12500, SEQ ID NO: 12502, SEQ ID NO: 12503, SEQ ID NO: 12505, SEQ ID NO: 12507, SEQ ID NO: 12509, SEQ ID NO: 12511, SEQ ID NO: 12513, SEQ ID NO: 12514,SEQ ID NO: 12516,SEQ ID NO: 12518, SEQ ID NO: 12520, SEQ ID NO: 12522, SEQ ID NO: 12524, SEQ ID NO: 12526, SEQ ID NO: 12528, SEQ ID NO: 12529, SEQ ID NO: 12531, SEQ ID NO: 12533, SEQ ID NO: 12534, SEQ ID NO: 12535, SEQ ID NO: 12537, SEQ ID NO: 12539, SEQ ID NO: 12541, SEQ ID NO: 12543, SEQ ID NO: 12545, SEQ ID NO: 12546, SEQ ID NO: 12548, SEQ ID NO: 12550, SEQ ID NO: 12552, SEQ ID NO: 12554, SEQ ID NO: 12555, SEQ ID NO: 12556, SEQ ID NO: 12557, SEQ ID NO: 12559, SEQ ID NO: 12561, SEQ ID NO: 12563, SEQ ID NO: 12565, SEQ ID NO: 12567, SEQ ID NO: 12569, SEQ ID NO: 12571, SEQ ID NO: 12572, SEQ ID NO: 12574, SEQ ID NO: 12576, SEQ ID NO: 12578, SEQ ID NO: 12580, SEQ ID NO: 12581, SEQ ID NO: 12583, SEQ ID NO: 12585, SEQ ID NO: 12587, SEQ ID NO: 12589, SEQ ID NO: 12591, SEQ ID NO: 12592, SEQ ID NO: 12593, SEQ ID NO: 12595, SEQ ID NO: 12597, SEQ ID NO: 12599, SEQ ID NO: 12601, SEQ ID NO: 12603, SEQ ID NO: 12605, SEQ ID NO: 12607, SEQ ID NO: 12608, SEQ ID NO: 12609, SEQ ID NO: 12611, SEQ ID NO: 12613, SEQ ID NO: 12615, SEQ ID NO: 12617, SEQ ID NO: 12619, SEQ ID NO: 12621, SEQ ID NO: 12622, SEQ ID NO: 12623, SEQ ID NO: 12625, SEQ ID NO: 12627, SEQ ID NO: 12628, SEQ ID NO: 12630, SEQ ID NO: 12632, SEQ ID NO: 12634, SEQ ID NO: 12636, SEQ ID NO: 12638, SEQ ID NO: 12640, SEQ ID NO: 12642, SEQ ID NO: 12644, SEQ ID NO: 12646, SEQ ID NO: 12648,
SEQ ID NO: 12649, SEQ ID NO: 12651, SEQ ID NO: 12653, SEQ ID NO: 12655, SEQ ID NO: 12657, SEQ ID NO: 12659, SEQ ID NO: 12660, SEQ ID NO: 12662, SEQ ID NO: 12664, SEQ ID NO: 12665, SEQ ID NO: 12667, SEQ ID NO: 12669, SEQ ID NO: 12671, SEQ ID NO: 12673, SEQ ID NO: 12675, SEQ ID NO: 12677, SEQ ID NO: 12679, SEQ ID NO: 12681, SEQ ID NO: 12683, SEQ ID NO: 12685, SEQ ID NO: 12687, SEQ ID NO: 12689, SEQ ID NO: 12691, SEQ ID NO: 12693, SEQ ID NO: 12695, SEQ ID NO: 12697, SEQ ID NO: 12698, SEQ ID NO: 12700, SEQ ID NO: 12702, SEQ ID NO: 12703, SEQ ID NO: 12705, SEQ ID NO: 12707, SEQ ID NO: 12709, SEQ ID NO: 12710, SEQ ID NO: 12711, SEQ ID NO: 12713, SEQ ID NO: 12715, SEQ ID NO: 12717, SEQ ID NO: 12719, SEQ ID NO: 12721, SEQ ID NO: 12723, SEQ ID NO: 12725, SEQ ID NO: 12726, SEQ ID NO: 12728, SEQ ID NO: 12730, SEQ ID NO: 12731, SEQ ID NO: 12733, SEQ ID NO: 12735, SEQ ID NO: 12737, SEQ ID NO: 12739, SEQ ID NO: 12741, SEQ ID NO: 12743, SEQ ID NO: 12745, SEQ ID NO: 12747, SEQ ID NO: 12749, SEQ ID NO: 12751, SEQ ID NO: 12753, SEQ ID NO: 12754, SEQ ID NO: 12756, SEQ ID NO: 12758, SEQ ID NO: 12760, SEQ ID NO: 12762, SEQ ID NO: 12763, SEQ ID NO: 12764, SEQ ID NO: 12765, SEQ ID NO: 12767, SEQ ID NO: 12769, SEQ ID NO: 12770, SEQ ID NO: 12771, SEQ ID NO: 12773, SEQ ID NO: 12775, SEQ ID NO: 12776, SEQ ID NO: 12778, SEQ ID NO: 12780, SEQ ID NO: 12781, SEQ ID NO: 12783, SEQ ID NO: 12785, SEQ ID NO: 12787, SEQ ID NO: 12789, SEQ ID NO: 12791, SEQ ID NO: 12793, SEQ ID NO: 12795, SEQ ID NO: 12797, SEQ ID NO: 12798, SEQ ID NO: 12799, SEQ ID NO: 12800, SEQ ID NO: 12801, SEQ ID NO: 12803, SEQ ID NO: 12805, SEQ ID NO: 12806, SEQ ID NO: 12808, SEQ ID NO: 12810, SEQ ID NO: 12812, SEQ ID NO: 12813, SEQ ID NO: 12815, SEQ ID NO: 12817, SEQ ID NO: 12819, SEQ ID NO: 12821, SEQ ID NO: 12823, SEQ ID NO: 12825,
SEQ ID NO: 12827, SEQ ID NO: 12829, SEQ ID NO: 12831, SEQ ID NO: 12833, SEQ ID NO: 12835, SEQ ID NO: 12837, SEQ ID NO: 12839, SEQ ID NO: 12841, SEQ ID NO: 12843, SEQ ID NO: 12845, SEQ ID NO: 12847, SEQ ID NO: 12848, SEQ ID NO: 12850, SEQ ID NO: 12852, SEQ ID NO: 12854, SEQ ID NO: 12856, SEQ ID NO: 12858, SEQ ID NO: 12860, SEQ ID NO: 12862, SEQ ID NO: 12864, SEQ ID NO: 12866, SEQ ID NO: 12867, SEQ ID NO: 12868, SEQ ID NO: 12870, SEQ ID NO: 12871, SEQ ID NO: 12873, SEQ ID NO: 12874, SEQ ID NO: 12876, SEQ ID NO: 12878, SEQ ID NO: 12880, SEQ ID NO: 12881, SEQ ID NO: 12883, SEQ ID NO: 12885, SEQ ID NO: 12887, SEQ ID NO: 12889, SEQ ID NO: 12891, SEQ ID NO: 12892, SEQ ID NO: 12894, SEQ ID NO: 12896, SEQ ID NO: 12897, SEQ ID NO: 12899, SEQ ID NO: 12901, SEQ ID NO: 12903, SEQ ID NO: 12905, SEQ ID NO: 12907, SEQ ID NO: 12909, SEQ ID NO: 12911, SEQ ID NO: 12913, SEQ ID NO: 12915, SEQ ID NO: 12916, SEQ ID NO: 12918, SEQ ID NO: 12920, SEQ ID NO: 12922, SEQ ID NO: 12923, SEQ ID NO: 12925, SEQ ID NO: 12927, SEQ ID NO: 12929, SEQ ID NO: 12931, SEQ ID NO: 12933, SEQ ID NO: 12934, SEQ ID NO: 12936, SEQ ID NO: 12938, SEQ ID NO: 12940, SEQ ID NO: 12941, SEQ ID NO: 12943, SEQ ID NO: 12945, SEQ ID NO: 12947, SEQ ID NO: 12949, SEQ ID NO: 12950, SEQ ID NO: 12952, SEQ ID NO: 12953, SEQ ID NO: 12955, SEQ ID NO: 12956, SEQ ID NO: 12958, SEQ ID NO: 12960, SEQ ID NO: 12961, SEQ ID NO: 12963, SEQ ID NO: 12965, SEQ ID NO: 12966, SEQ ID NO: 12967, SEQ ID NO: 12969, SEQ ID NO: 12971, SEQ ID NO: 12973, SEQ ID NO: 12975, SEQ ID NO: 12977, SEQ ID NO: 12979, SEQ ID NO: 12981, SEQ ID NO: 12983, SEQ ID NO: 12985, SEQ ID NO: 12987, SEQ ID NO: 12989, SEQ ID NO: 12991, SEQ ID NO: 12993, SEQ ID NO: 12995, SEQ ID NO: 12997, SEQ ID NO: 12999, SEQ ID NO: 13001, SEQ ID NO: 13003, SEQ ID NO: 13005, SEQ ID NO: 13007,
SEQ ID NO: 13009, SEQ ID NO: 13011, SEQ ID NO: 13013, SEQ ID NO: 13015, SEQ ID NO: 13017, SEQ ID NO: 13018, SEQ ID NO: 13020, SEQ ID NO: 13021, SEQ ID NO: 13023, SEQ ID NO: 13025, SEQ ID NO: 13027, SEQ ID NO: 13029, SEQ ID NO: 13031, SEQ ID NO: 13033, SEQ ID NO: 13035, SEQ ID NO: 13037, SEQ ID NO: 13039, SEQ ID NO: 13040, SEQ ID NO: 13042, SEQ ID NO: 13044, SEQ ID NO: 13046, SEQ ID NO: 13048, SEQ ID NO: 13050, SEQ ID NO: 13052, SEQ ID NO: 13053, SEQ ID NO: 13055, SEQ ID NO: 13057, SEQ ID NO: 13058, SEQ ID NO: 13060, SEQ ID NO: 13061, SEQ ID NO: 13063, SEQ ID NO: 13065, SEQ ID NO: 13067, SEQ ID NO: 13069, SEQ ID NO: 13071, SEQ ID NO: 13072, SEQ ID NO: 13074, SEQ ID NO: 13076, SEQ ID NO: 13077, SEQ ID NO: 13079, SEQ ID NO: 13081, SEQ ID NO: 13083, SEQ ID NO: 13085, SEQ ID NO: 13087, SEQ ID NO: 13088, SEQ ID NO: 13089, SEQ ID NO: 13091, SEQ ID NO: 13092, SEQ ID NO: 13094, SEQ ID NO: 13096, SEQ ID NO: 13097, SEQ ID NO: 13099, SEQ ID NO: 13101, SEQ ID NO: 13103, SEQ ID NO: 13105, SEQ ID NO: 13107, SEQ ID NO: 13108, SEQ ID NO: 13109, SEQ ID NO: 13110,SEQ ID NO: 13112,SEQ ID NO: 13114,SEQ ID NO: 13116,SEQ ID NO: 13118, SEQ ID NO: 13119, SEQ ID NO: 13120, SEQ ID NO: 13122, SEQ ID NO: 13124, SEQ ID NO: 13125, SEQ ID NO: 13127, SEQ ID NO: 13129, SEQ ID NO: 13131, SEQ ID NO: 13133, SEQ ID NO: 13135, SEQ ID NO: 13137, SEQ ID NO: 13139, SEQ ID NO: 13141, SEQ ID NO: 13143, SEQ ID NO: 13144, SEQ ID NO: 13145, SEQ ID NO: 13147, SEQ ID NO: 13149, SEQ ID NO: 13151, SEQ ID NO: 13152, SEQ ID NO: 13154, SEQ ID NO: 13156, SEQ ID NO: 13158, SEQ ID NO: 13160, SEQ ID NO: 13162, SEQ ID NO: 13164, SEQ ID NO: 13166, SEQ ID NO: 13168, SEQ ID NO: 13170, SEQ ID NO: 13172, SEQ ID NO: 13174, SEQ ID NO: 13176, SEQ ID NO: 13177, SEQ ID NO: 13178, SEQ ID NO: 13180, SEQ ID NO: 13181, SEQ ID NO: 13183,
SEQ ID NO: 13185, SEQ ID NO: 13187, SEQ ID NO: 13189, SEQ ID NO: 13191, SEQ ID NO: 13193, SEQ ID NO: 13195, SEQ ID NO: 13197, SEQ ID NO: 13198, SEQ ID NO: 13200, SEQ ID NO: 13201, SEQ ID NO: 13203, SEQ ID NO: 13205, SEQ ID NO: 13207, SEQ ID NO: 13209, SEQ ID NO: 13211, SEQ ID NO: 13213, SEQ ID NO: 13215, SEQ ID NO: 13216, SEQ ID NO: 13218, SEQ ID NO: 13219, SEQ ID NO: 13221, SEQ ID NO: 13222, SEQ ID NO: 13224, SEQ ID NO: 13226, SEQ ID NO: 13228, SEQ ID NO: 13230, SEQ ID NO: 13232, SEQ ID NO: 13234, SEQ ID NO: 13235, SEQ ID NO: 13237, SEQ ID NO: 13238, SEQ ID NO: 13239, SEQ ID NO: 13241, SEQ ID NO: 13242, SEQ ID NO: 13243, SEQ ID NO: 13245, SEQ ID NO: 13246, SEQ ID NO: 13248, SEQ ID NO: 13250, SEQ ID NO: 13252, SEQ ID NO: 13254, SEQ ID NO: 13256, SEQ ID NO: 13257, SEQ ID NO: 13259, SEQ ID NO: 13260, SEQ ID NO: 13261, SEQ ID NO: 13263, SEQ ID NO: 13264, SEQ ID NO: 13266, SEQ ID NO: 13268, SEQ ID NO: 13270, SEQ ID NO: 13271, SEQ ID NO: 13273, SEQ ID NO: 13275, SEQ ID NO: 13276, SEQ ID NO: 13278, SEQ ID NO: 13279, SEQ ID NO: 13280, SEQ ID NO: 13282, SEQ ID NO: 13284, SEQ ID NO: 13286, SEQ ID NO: 13288
SEQ ID NO: 13294, SEQ ID NO: 13296, SEQ ID NO: 13298, SEQ ID NO: 13300, SEQ ID NO: 13302, SEQ ID NO: 13304, SEQ ID NO: 13306, SEQ ID NO: 13307, SEQ ID NO: 13309, SEQ ID NO: 13310, SEQ ID NO: 13312, SEQ ID NO: 13314, SEQ ID NO: 13316, SEQ ID NO: 13318, SEQ ID NO: 13319, SEQ ID NO: 13321, SEQ ID NO: 13322, SEQ ID NO: 13324, SEQ ID NO: 13325, SEQ ID NO: 13327, SEQ ID NO: 13328, SEQ ID NO: 13330, SEQ ID NO: 13332, SEQ ID NO: 13333, SEQ ID NO: 13334, SEQ ID NO: 13336, SEQ ID NO: 13337, SEQ ID NO: 13338, SEQ ID NO: 13339, SEQ ID NO: 13341, SEQ ID NO: 13342, SEQ ID NO: 13344, SEQ ID NO: 13345, SEQ ID NO: 13346, SEQ ID NO: 13347, SEQ ID NO: 13348, SEQ ID NO: 13350, SEQ ID NO: 13351, SEQ ID NO: 13352, SEQ ID NO: 13354, SEQ ID NO: 13356, SEQ ID NO: 13357, SEQ ID NO: 13359, SEQ ID NO: 13360, SEQ ID NO: 13362, SEQ ID NO: 13363, SEQ ID NO: 13365, SEQ ID NO: 13366, SEQ ID NO: 13368, SEQ ID NO: 13369, SEQ ID NO: 13370, SEQ ID NO: 13371, SEQ ID NO: 13372, SEQ ID NO: 13374, SEQ ID NO: 13375, SEQ ID NO: 13376, SEQ ID NO: 13378, SEQ ID NO: 13379, SEQ ID NO: 13381, SEQ ID NO: 13383, SEQ ID NO: 13385, SEQ ID NO: 13387, SEQ ID NO: 13389, SEQ ID NO: 13391, SEQ ID NO: 13393, SEQ ID NO: 13394, SEQ ID NO: 13396, SEQ ID NO: 13398, SEQ ID NO: 13400, SEQ ID NO: 13402, SEQ ID NO: 13404, SEQ ID NO: 13406, SEQ ID NO: 13408, SEQ ID NO: 13410, SEQ ID NO: 13412, SEQ ID NO: 13414, SEQ ID NO: 13415, SEQ ID NO: 13417, SEQ ID NO: 13418, SEQ ID NO: 13420, SEQ ID NO: 13421, SEQ ID NO: 13423, SEQ ID NO: 13425, SEQ ID NO: 13427, SEQ ID NO: 13428, SEQ ID NO: 13430, SEQ ID NO: 13431, SEQ ID NO: 13433, SEQ ID NO: 13434, SEQ ID NO: 13436, SEQ ID NO: 13438, SEQ ID NO: 13439, SEQ ID NO: 13440, SEQ ID NO: 13441, SEQ ID NO: 13442, SEQ ID NO: 13443, SEQ ID NO: 13444, SEQ ID NO: 13445, SEQ ID NO: 13447, SEQ ID NO: 13448,
SEQ ID NO: 13449, SEQ ID NO: 13451, SEQ ID NO: 13453, SEQ ID NO: 13454, SEQ ID NO: 13455, SEQ ID NO: 13457, SEQ ID NO: 13458, SEQ ID NO: 13460, SEQ ID NO: 13462, SEQ ID NO: 13463, SEQ ID NO: 13465, SEQ ID NO: 13467, SEQ ID NO: 13469, SEQ ID NO: 13470, SEQ ID NO: 13472, SEQ ID NO: 13473, SEQ ID NO: 13474, SEQ ID NO: 13476, SEQ ID NO: 13477, SEQ ID NO: 13478, SEQ ID NO: 13479, SEQ ID NO: 13480, SEQ ID NO: 13482, SEQ ID NO: 13483, SEQ ID NO: 13484, SEQ ID NO: 13485, SEQ ID NO: 13486, SEQ ID NO: 13488, SEQ ID NO: 13489, SEQ ID NO: 13491, SEQ ID NO: 13492, SEQ ID NO: 13494, SEQ ID NO: 13495, SEQ ID NO: 13497, SEQ ID NO: 13498, SEQ ID NO: 13500, SEQ ID NO: 13501, SEQ ID NO: 13503, SEQ ID NO: 13505, SEQ ID NO: 13506, SEQ ID NO: 13507, SEQ ID NO: 13508, SEQ ID NO: 13510, SEQ ID NO: 13512, SEQ ID NO: 13514, SEQ ID NO: 13515, SEQ ID NO: 13517, SEQ ID NO: 13518, SEQ ID NO: 13519, SEQ ID NO: 13520, SEQ ID NO: 13522, SEQ ID NO: 13523, SEQ ID NO: 13524, SEQ ID NO: 13526, SEQ ID NO: 13527, SEQ ID NO: 13529, SEQ ID NO: 13531, SEQ ID NO: 13532, SEQ ID NO: 13534, SEQ ID NO: 13535, SEQ ID NO: 13536, SEQ ID NO: 13538, SEQ ID NO: 13539, SEQ ID NO: 13540, SEQ ID NO: 13542, SEQ ID NO: 13544, SEQ ID NO: 13546, SEQ ID NO: 13547, SEQ ID NO: 13549, SEQ ID NO: 13551, SEQ ID NO: 13553, SEQ ID NO: 13554, SEQ ID NO: 13556, SEQ ID NO: 13557, SEQ ID NO: 13559, SEQ ID NO: 13561, SEQ ID NO: 13562, SEQ ID NO: 13563, SEQ ID NO: 13565, SEQ ID NO: 13566, SEQ ID NO: 13568, SEQ ID NO: 13570, SEQ ID NO: 13571, SEQ ID NO: 13572, SEQ ID NO: 13574, SEQ ID NO: 13576, SEQ ID NO: 13578, SEQ ID NO: 13580, SEQ ID NO: 13581, SEQ ID NO: 13582, SEQ ID NO: 13584, SEQ ID NO: 13586, SEQ ID NO: 13588, SEQ ID NO: 13590, SEQ ID NO: 13591, SEQ ID NO: 13592, SEQ ID NO: 13594, SEQ ID NO: 13595, SEQ ID NO: 13597, SEQ ID NO: 13599,
SEQ ID NO: 13601, SEQ ID NO: 13603, SEQ ID NO: 13605, SEQ ID NO: 13607, SEQ ID NO: 13608, SEQ ID NO: 13610, SEQ ID NO: 13612, SEQ ID NO: 13613, SEQ ID NO: 13615, SEQ ID NO: 13617, SEQ ID NO: 13619, SEQ ID NO: 13620, SEQ ID NO: 13621, SEQ ID NO: 13622, SEQ ID NO: 13623, SEQ ID NO: 13624, SEQ ID NO: 13625, SEQ ID NO: 13626, SEQ ID NO: 13627, SEQ ID NO: 13629, SEQ ID NO: 13631, SEQ ID NO: 13633, SEQ ID NO: 13635, SEQ ID NO: 13637, SEQ ID NO: 13639, SEQ ID NO: 13640, SEQ ID NO: 13642, SEQ ID NO: 13643, SEQ ID NO: 13645, SEQ ID NO: 13647, SEQ ID NO: 13649, SEQ ID NO: 13651, SEQ ID NO: 13652, SEQ ID NO: 13653, SEQ ID NO: 13655, SEQ ID NO: 13656, SEQ ID NO: 13657, SEQ ID NO: 13658, SEQ ID NO: 13660, SEQ ID NO: 13662, SEQ ID NO: 13664, SEQ ID NO: 13666, SEQ ID NO: 13668, SEQ ID NO: 13670, SEQ ID NO: 13672, SEQ ID NO: 13674, SEQ ID NO: 13675, SEQ ID NO: 13676, SEQ ID NO: 13678, SEQ ID NO: 13680, SEQ ID NO: 13682, SEQ ID NO: 13684, SEQ ID NO: 13685, SEQ ID NO: 13687, SEQ ID NO: 13689, SEQ ID NO: 13690, SEQ ID NO: 13692, SEQ ID NO: 13693, SEQ ID NO: 13694, SEQ ID NO: 13696, SEQ ID NO: 13698, SEQ ID NO: 13700, SEQ ID NO: 13701, SEQ ID NO: 13703, SEQ ID NO: 13704, SEQ ID NO: 13706, SEQ ID NO: 13708, SEQ ID NO: 13709, SEQ ID NO: 13710, SEQ ID NO: 13711, SEQ ID NO: 13713, SEQ ID NO: 13715, SEQ ID NO: 13717, SEQ ID NO: 13718, SEQ ID NO: 13720, SEQ ID NO: 13722, SEQ ID NO: 13724, SEQ ID NO: 13725, SEQ ID NO: 13727, SEQ ID NO: 13728, SEQ ID NO: 13729, SEQ ID NO: 13731, SEQ ID NO: 13732, SEQ ID NO: 13734, SEQ ID NO: 13735, SEQ ID NO: 13736, SEQ ID NO: 13738, SEQ ID NO: 13740, SEQ ID NO: 13742, SEQ ID NO: 13744, SEQ ID NO: 13746, SEQ ID NO: 13748, SEQ ID NO: 13749, SEQ ID NO: 13750, SEQ ID NO: 13751, SEQ ID NO: 13753, SEQ ID NO: 13754, SEQ ID NO: 13755, SEQ ID NO: 13756, SEQ ID NO: 13757,
SEQ ID NO: 13759, SEQ ID NO: 13760, SEQ ID NO: 13761, SEQ ID NO: 13762, SEQ ID NO: 13763, SEQ ID NO: 13764, SEQ ID NO: 13765, SEQ ID NO: 13766, SEQ ID NO: 13767, SEQ ID NO: 13769, SEQ ID NO: 13770, SEQ ID NO: 13772, SEQ ID NO: 13774, SEQ ID NO: 13775, SEQ ID NO: 13777, SEQ ID NO: 13778, SEQ ID NO: 13779, SEQ ID NO: 13780, SEQ ID NO: 13782, SEQ ID NO: 13783, SEQ ID NO: 13785, SEQ ID NO: 13786, SEQ ID NO: 13788, SEQ ID NO: 13789, SEQ ID NO: 13791, SEQ ID NO: 13793, SEQ ID NO: 13795, SEQ ID NO: 13796, SEQ ID NO: 13797, SEQ ID NO: 13798, SEQ ID NO: 13799, SEQ ID NO: 13800, SEQ ID NO: 13802, SEQ ID NO: 13803, SEQ ID NO: 13804, SEQ ID NO: 13805, SEQ ID NO: 13806, SEQ ID NO: 13808, SEQ ID NO: 13809, SEQ ID NO: 13810, SEQ ID NO: 13812, SEQ ID NO: 13814, SEQ ID NO: 13816, SEQ ID NO: 13818, SEQ ID NO: 13819, SEQ ID NO: 13821, SEQ ID NO: 13823, SEQ ID NO: 13824, SEQ ID NO: 13826, SEQ ID NO: 13828, SEQ ID NO: 13829, SEQ ID NO: 13831, SEQ ID NO: 13833, SEQ ID NO: 13834, SEQ ID NO: 13836, SEQ ID NO: 13838, SEQ ID NO: 13839, SEQ ID NO: 13841, SEQ ID NO: 13843, SEQ ID NO: 13845, SEQ ID NO: 13847, SEQ ID NO: 13849, SEQ ID NO: 13850, SEQ ID NO: 13851, SEQ ID NO: 13852, SEQ ID NO: 13854, SEQ ID NO: 13856, SEQ ID NO: 13858, SEQ ID NO: 13860, SEQ ID NO: 13861, SEQ ID NO: 13863, SEQ ID NO: 13865, SEQ ID NO: 13867, SEQ ID NO: 13869, SEQ ID NO: 13870, SEQ ID NO: 13872, SEQ ID NO: 13874, SEQ ID NO: 13876, SEQ ID NO: 13878, SEQ ID NO: 13879, SEQ ID NO: 13881, SEQ ID NO: 13883, SEQ ID NO: 13885, SEQ ID NO: 13887, SEQ ID NO: 13889, SEQ ID NO: 13891, SEQ ID NO: 13892, SEQ ID NO: 13893, SEQ ID NO: 13895, SEQID NO: 13896, SEQ ID NO: 13898, SEQ ID NO: 13900, SEQ ID NO: 13901, SEQ ID NO: 13903, SEQ ID NO: 13904, SEQ ID NO: 13905, SEQ ID NO: 13906, SEQ ID NO: 13908, SEQ ID NO: 13909, SEQ ID NO: 13911,
SEQ ID NO: 13912, SEQ ID NO: 13914, SEQ ID NO: 13916, SEQ ID NO: 13918, SEQ ID NO: 13920, SEQ ID NO: 13922, SEQ ID NO: 13924, SEQ ID NO: 13926, SEQ ID NO: 13928, SEQ ID NO: 13930, SEQ ID NO: 13932, SEQ ID NO: 13933, SEQ ID NO: 13935, SEQ ID NO: 13936, SEQ ID NO: 13938, SEQ ID NO: 13940, SEQ ID NO: 13941, SEQ ID NO: 13942, SEQ ID NO: 13944, SEQ ID NO: 13946, SEQ ID NO: 13948, SEQ ID NO: 13950, SEQ ID NO: 13951, SEQ ID NO: 13953, SEQ ID NO: 13954, SEQ ID NO: 13956, SEQ ID NO: 13958, SEQ ID NO: 13959, SEQ ID NO: 13961, SEQ ID NO: 13962, SEQ ID NO: 13964, SEQ ID NO: 13965, SEQ ID NO: 13966, SEQ ID NO: 13967, SEQ ID NO: 13969, SEQ ID NO: 13970, SEQ ID NO: 13971, SEQ ID NO: 13973, SEQ ID NO: 13975, SEQ ID NO: 13976, SEQ ID NO: 13978, SEQ ID NO: 13979, SEQ ID NO: 13981, SEQ ID NO: 13982, SEQ ID NO: 13983, SEQ ID NO: 13984, SEQ ID NO: 13985, SEQ ID NO: 13986, SEQ ID NO: 13988, SEQ ID NO: 13989, SEQ ID NO: 13990, SEQ ID NO: 13992, SEQ ID NO: 13994, SEQ ID NO: 13996, SEQ ID NO: 13998, SEQ ID NO: 13999, SEQ ID NO: 14001, SEQ ID NO: 14003, SEQ ID NO: 14005, SEQ ID NO: 14006, SEQ ID NO: 14008, SEQ ID NO: 14010, SEQ ID NO: 14012, SEQ ID NO: 14013, SEQ ID NO: 14014, SEQ ID NO: 14015, SEQ ID NO: 14016, SEQ ID NO: 14018, SEQ ID NO: 14019, SEQ ID NO: 14021, SEQ ID NO: 14023, SEQ ID NO: 14025, SEQ ID NO: 14026, SEQ ID NO: 14028, SEQ ID NO: 14030, SEQ ID NO: 14031, SEQ ID NO: 14033, SEQ ID NO: 14035, SEQ ID NO: 14037, SEQ ID NO: 14039, SEQ ID NO: 14041, SEQ ID NO: 14042, SEQ ID NO: 14044, SEQ ID NO: 14045, SEQ ID NO: 14047, SEQ ID NO: 14049, SEQ ID NO: 14050, SEQ ID NO: 14052, SEQ ID NO: 14053, SEQ ID NO: 14054, SEQ ID NO: 14056, SEQ ID NO: 14058, SEQ ID NO: 14060, SEQ ID NO: 14062, SEQ ID NO: 14064, SEQ ID NO: 14066, SEQ ID NO: 14067, SEQ ID NO: 14069, SEQ ID NO: 14071, SEQ ID NO: 14072,
SEQ ID NO: 14073, SEQ ID NO: 14075, SEQ ID NO: 14076, SEQ ID NO: 14077, SEQ ID NO: 14079, SEQ ID NO: 14081, SEQ ID NO: 14083, SEQ ID NO: 14084, SEQ ID NO: 14085, SEQ ID NO: 14086, SEQ ID NO: 14088, SEQ ID NO: 14090, SEQ ID NO: 14092, SEQ ID NO: 14094, SEQ ID NO: 14096, SEQ ID NO: 14098, SEQ ID NO: 14100, SEQ ID NO: 14102, SEQ ID NO: 14104, SEQ ID NO: 14106, SEQ ID NO: 14108, SEQ ID NO: 14110, SEQ ID NO: 14112, SEQ ID NO: 14114, SEQ ID NO: 14116, SEQ ID NO: 14118, SEQ ID NO: 14120, SEQ ID NO: 14122, SEQ ID NO: 14124, SEQ ID NO: 14126, SEQ ID NO: 14128, SEQ ID NO: 14129, SEQ ID NO: 14131, SEQ ID NO: 14133, SEQ ID NO: 14135, SEQ ID NO: 14137, SEQ ID NO: 14139, SEQ ID NO: 14141, SEQ ID NO: 14143, SEQ ID NO: 14145, SEQ ID NO: 14146, SEQ ID NO: 14148, SEQ ID NO: 14150, SEQ ID NO: 14152, SEQ ID NO: 14154, SEQ ID NO: 14156, SEQ ID NO: 14158, SEQ ID NO: 14160, SEQ ID NO: 14162, SEQ ID NO: 14164, SEQ ID NO: 14165, SEQ ID NO: 14167, SEQ ID NO: 14168, SEQ ID NO: 14169, SEQ ID NO: 14171, SEQ ID NO: 14173, SEQ ID NO: 14175, SEQ ID NO: 14177, SEQ ID NO: 14179, SEQ ID NO: 14181, SEQ ID NO: 14183, SEQ ID NO: 14185, SEQ ID NO: 14187, SEQ ID NO: 14188, SEQ ID NO: 14190, SEQ ID NO: 14192, SEQ ID NO: 14194, SEQ ID NO: 14196, SEQ ID NO: 14198, SEQ ID NO: 14200, SEQ ID NO: 14202, SEQ ID NO: 14204, SEQ ID NO: 14206, SEQ ID NO: 14208, SEQ ID NO: 14210, SEQ ID NO: 14212, SEQ ID NO: 14214, SEQ ID NO: 14216, SEQ ID NO: 14217, SEQ ID NO: 14219, SEQ ID NO: 14221, SEQ ID NO: 14223, SEQ ID NO: 14225, SEQ ID NO: 14227, SEQ ID NO: 14229, SEQ ID NO: 14231, SEQ ID NO: 14233, SEQ ID NO: 14235, SEQ ID NO: 14237, SEQ ID NO: 14239, SEQ ID NO: 14241, SEQ ID NO: 14243, SEQ ID NO: 14245, SEQ ID NO: 14247, SEQ ID NO: 14249, SEQ ID NO: 14251, SEQ ID NO: 14253, SEQ ID NO: 14255, SEQ ID NO: 14257, SEQ ID NO: 14259,
SEQ ID NO: 14261, SEQ ID NO: 14263, SEQ ID NO: 14265, SEQ ID NO: 14266, SEQ ID NO: 14268, SEQ ID NO: 14270, SEQ ID NO: 14272, SEQ ID NO: 14274, SEQ ID NO: 14276, SEQ ID NO: 14278, SEQ ID NO: 14280, SEQ ID NO: 14282, SEQ ID NO: 14284, SEQ ID NO: 14286, SEQ ID NO: 14287, SEQ ID NO: 14289, SEQ ID NO: 14291, SEQ ID NO: 14293, SEQ ID NO: 14295, SEQ ID NO: 14297, SEQ ID NO: 14299, SEQ ID NO: 14300, SEQ ID NO: 14302, SEQ ID NO: 14304, SEQ ID NO: 14305, SEQ ID NO: 14307, SEQ ID NO: 14309, SEQ ID NO: 14311, SEQ ID NO: 14313, SEQ ID NO: 14315, SEQ ID NO: 14317, SEQ ID NO: 14319, SEQ ID NO: 14321, SEQ ID NO: 14323, SEQ ID NO: 14325, SEQ ID NO: 14327, SEQ ID NO: 14329, SEQ ID NO: 14330, SEQ ID NO: 14332, SEQ ID NO: 14333, SEQ ID NO: 14335, SEQ ID NO: 14336, SEQ ID NO: 14338, SEQ ID NO: 14339, SEQ ID NO: 14341, SEQ ID NO: 14343, SEQ ID NO: 14344, SEQ ID NO: 14345, SEQ ID NO: 14347, SEQ ID NO: 14349, SEQ ID NO: 14351, SEQ ID NO: 14353, SEQ ID NO: 14355, SEQ ID NO: 14357, SEQ ID NO: 14359, SEQ ID NO: 14361, SEQ ID NO: 14363, SEQ ID NO: 14365, SEQ ID NO: 14367, SEQ ID NO: 14369, SEQ ID NO: 14371, SEQ ID NO: 14373, SEQ ID NO: 14375, SEQ ID NO: 14377, SEQ ID NO: 14378, SEQ ID NO: 14380, SEQ ID NO: 14382, SEQ ID NO: 14384, SEQ ID NO: 14386, SEQ ID NO: 14388, SEQ ID NO: 14390, SEQ ID NO: 14392, SEQ ID NO: 14394, SEQ ID NO: 14395, SEQ ID NO: 14397, SEQ ID NO: 14399, SEQ ID NO: 14400, SEQ ID NO: 14402, SEQ ID NO: 14403, SEQ ID NO: 14405, SEQ ID NO: 14407, SEQ ID NO: 14409, SEQ ID NO: 14411, SEQ ID NO: 14413, SEQ ID NO: 14415, SEQ ID NO: 14417, SEQ ID NO: 14419, SEQ ID NO: 14421, SEQ ID NO: 14422, SEQ ID NO: 14424, SEQ ID NO: 14426, SEQ ID NO: 14428, SEQ ID NO: 14430, SEQ ID NO: 14432, SEQ ID NO: 14434, SEQ ID NO: 14436, SEQ ID NO: 14438, SEQ ID NO: 14439, SEQ ID NO: 14441, SEQ ID NO: 14443,
SEQ ID NO: 14445, SEQ ID NO: 14447, SEQ ID NO: 14449, SEQ ID NO: 14451, SEQ ID NO: 14453, SEQ ID NO: 14455, SEQ ID NO: 14457, SEQ ID NO: 14459, SEQ ID NO: 14461, SEQ ID NO: 14463, SEQ ID NO: 14464, SEQ ID NO: 14465, SEQ ID NO: 14467, SEQ ID NO: 14469, SEQ ID NO: 14471, SEQ ID NO: 14473, SEQ ID NO: 14475, SEQ ID NO: 14477, SEQ ID NO: 14479, SEQ ID NO: 14481, SEQ ID NO: 14483, SEQ ID NO: 14485, SEQ ID NO: 14487, SEQ ID NO: 14489, SEQ ID NO: 14491, SEQ ID NO: 14493, SEQ ID NO: 14495, SEQ ID NO: 14497, SEQ ID NO: 14499, SEQ ID NO: 14501, SEQ ID NO: 14503, SEQ ID NO: 14504, SEQ ID NO: 14506, SEQ ID NO: 14508, SEQ ID NO: 14510, SEQ ID NO: 14512, SEQ ID NO: 14513, SEQ ID NO: 14515, SEQ ID NO: 14517, SEQ ID NO: 14519, SEQ ID NO: 14521, SEQ ID NO: 14523, SEQ ID NO: 14525, SEQ ID NO: 14527, SEQ ID NO: 14528, SEQ ID NO: 14529, SEQ ID NO: 14531, SEQ ID NO: 14533, SEQ ID NO: 14535, SEQ ID NO: 14537, SEQ ID NO: 14539, SEQ ID NO: 14540, SEQ ID NO: 14542, SEQ ID NO: 14544, SEQ ID NO: 14545, SEQ ID NO: 14547, SEQ ID NO: 14549, SEQ ID NO: 14551, SEQ ID NO: 14552, SEQ ID NO: 14554, SEQ ID NO: 14556, SEQ ID NO: 14558, SEQ ID NO: 14560, SEQ ID NO: 14562, SEQ ID NO: 14564, SEQ ID NO: 14566, SEQ ID NO: 14568, SEQ ID NO: 14570, SEQ ID NO: 14572, SEQ ID NO: 14574, SEQ ID NO: 14576, SEQ ID NO: 14578, SEQ ID NO: 14580, SEQ ID NO: 14582, SEQ ID NO: 14584, SEQ ID NO: 14586, SEQ ID NO: 14588, SEQ ID NO: 14590, SEQ ID NO: 14592, SEQ ID NO: 14594, SEQ ID NO: 14595, SEQ ID NO: 14597, SEQ ID NO: 14599, SEQ ID NO: 14601, SEQ ID NO: 14603, SEQ ID NO: 14605, SEQ ID NO: 14607, SEQ ID NO: 14609, SEQ ID NO: 14610, SEQ ID NO: 14611, SEQ ID NO: 14613, SEQ ID NO: 14615, SEQ ID NO: 14617, SEQ ID NO: 14619, SEQ ID NO: 14620, SEQ ID NO: 14622, SEQ ID NO: 14624, SEQ ID NO: 14626, SEQ ID NO: 14628, SEQ ID NO: 14630,
SEQ ID NO: 14632, SEQ ID NO: 14633, SEQ ID NO: 14635, SEQ ID NO: 14637, SEQ ID NO: 14639, SEQ ID NO: 14641, SEQ ID NO: 14643, SEQ ID NO: 14644, SEQ ID NO: 14646, SEQ ID NO: 14648, SEQ ID NO: 14650, SEQ ID NO: 14652, SEQ ID NO: 14654, SEQ ID NO: 14656, SEQ ID NO: 14658, SEQ ID NO: 14660, SEQ ID NO: 14662, SEQ ID NO: 14664, SEQ ID NO: 14666, SEQ ID NO: 14668, SEQ ID NO: 14670, SEQ ID NO: 14672, SEQ ID NO: 14674, SEQ ID NO: 14676, SEQ ID NO: 14678, SEQ ID NO: 14679, SEQ ID NO: 14681, SEQ ID NO: 14683, SEQ ID NO: 14685, SEQ ID NO: 14686, SEQ ID NO: 14688, SEQ ID NO: 14690, SEQ ID NO: 14692, SEQ ID NO: 14693, SEQ ID NO: 14695, SEQ ID NO: 14697, SEQ ID NO: 14699, SEQ ID NO: 14700, SEQ ID NO: 14702, SEQ ID NO: 14704, SEQ ID NO: 14706, SEQ ID NO: 14708, SEQ ID NO: 14710, SEQ ID NO: 14712, SEQ ID NO: 14713, SEQ ID NO: 14715, SEQ ID NO: 14717, SEQ ID NO: 14719, SEQ ID NO: 14721, SEQ ID NO: 14722, SEQ ID NO: 14724, SEQ ID NO: 14725, SEQ ID NO: 14727, SEQ ID NO: 14729, SEQ ID NO: 14731, SEQ ID NO: 14732, SEQ ID NO: 14734, SEQ ID NO: 14735, SEQ ID NO: 14737, SEQ ID NO: 14738, SEQ ID NO: 14740, SEQ ID NO: 14742, SEQ ID NO: 14744, SEQ ID NO: 14746, SEQ ID NO: 14748, SEQ ID NO: 14750, SEQ ID NO: 14752, SEQ ID NO: 14754, SEQ ID NO: 14755, SEQ ID NO: 14757, SEQ ID NO: 14758, SEQ ID NO: 14760, SEQ ID NO: 14762, SEQ ID NO: 14764, SEQ ID NO: 14766, SEQ ID NO: 14768, SEQ ID NO: 14770, SEQ ID NO: 14772, SEQ ID NO: 14774, SEQ ID NO: 14776, SEQ ID NO: 14778, SEQ ID NO: 14780, SEQ ID NO: 14782, SEQ ID NO: 14784, SEQ ID NO: 14786, SEQ ID NO: 14788, SEQ ID NO: 14790, SEQ ID NO: 14792, SEQ ID NO: 14794, SEQ ID NO: 14796, SEQ ID NO: 14798, SEQ ID NO: 14800, SEQ ID NO: 14802, SEQ ID NO: 14804, SEQ ID NO: 14806, SEQ ID NO: 14808, SEQ ID NO: 14809, SEQ ID NO: 14811, SEQ ID NO: 14812, SEQ ID NO: 14814,
SEQ ID NO: 14816, SEQ ID NO: 14818, SEQ ID NO: 14820, SEQ ID NO: 14822, SEQ ID NO: 14823, SEQ ID NO: 14824, SEQ ID NO: 14826, SEQ ID NO: 14828, SEQ ID NO: 14830, SEQ ID NO: 14831, SEQ ID NO: 14833, SEQ ID NO: 14835, SEQ ID NO: 14837, SEQ ID NO: 14839, SEQ ID NO: 14841, SEQ ID NO: 14843, SEQ ID NO: 14845, SEQ ID NO: 14847, SEQ ID NO: 14849, SEQ ID NO: 14850, SEQ ID NO: 14852, SEQ ID NO: 14854, SEQ ID NO: 14856, SEQ ID NO: 14858, SEQ ID NO: 14860, SEQ ID NO: 14862, SEQ ID NO: 14864, SEQ ID NO: 14865, SEQ ID NO: 14867, SEQ ID NO: 14869, SEQ ID NO: 14871, SEQ ID NO: 14872, SEQ ID NO: 14874, SEQ ID NO: 14876, SEQ ID NO: 14878, SEQ ID NO: 14880, SEQ ID NO: 14882, SEQ ID NO: 14884, SEQ ID NO: 14886, SEQ ID NO: 14888, SEQ ID NO: 14890, SEQ ID NO: 14892, SEQ ID NO: 14894, SEQ ID NO: 14896, SEQ ID NO: 14898, SEQ ID NO: 14900, SEQ ID NO: 14902, SEQ ID NO: 14904, SEQ ID NO: 14906, SEQ ID NO: 14908, SEQ ID NO: 14910, SEQ ID NO: 14912, SEQ ID NO: 14914, SEQ ID NO: 14916, SEQ ID NO: 14918, SEQ ID NO: 14919, SEQ ID NO: 14921, SEQ ID NO: 14923, SEQ ID NO: 14924, SEQ ID NO: 14925, SEQ ID NO: 14927, SEQ ID NO: 14929, SEQ ID NO: 14931, SEQ ID NO: 14933, SEQ ID NO: 14935, SEQ ID NO: 14937, SEQ ID NO: 14938, SEQ ID NO: 14940, SEQ ID NO: 14942, SEQ ID NO: 14944, SEQ ID NO: 14946, SEQ ID NO: 14948, SEQ ID NO: 14950, SEQ ID NO: 14952, SEQ ID NO: 14954, SEQ ID NO: 14956, SEQ ID NO: 14958, SEQ ID NO: 14960, SEQ ID NO: 14961, SEQ ID NO: 14963, SEQ ID NO: 14965, SEQ ID NO: 14967, SEQ ID NO: 14969, SEQ ID NO: 14971, SEQ ID NO: 14973, SEQ ID NO: 14975, SEQ ID NO: 14977, SEQ ID NO: 14979, SEQ ID NO: 14981, SEQ ID NO: 14982, SEQ ID NO: 14984, SEQ ID NO: 14986, SEQ ID NO: 14987, SEQ ID NO: 14988, SEQ ID NO: 14990, SEQ ID NO: 14992, SEQ ID NO: 14993, SEQ ID NO: 14994, SEQ ID NO: 14996, SEQ ID NO: 14998,
SEQ ID NO: 15000, SEQ ID NO: 15002, SEQ ID NO: 15004, SEQ ID NO: 15005, SEQ ID NO: 15006, SEQ ID NO: 15007, SEQ ID NO: 15009, SEQ ID NO: 15011, SEQ ID NO: 15012, SEQ ID NO: 15013, SEQ ID NO: 15015, SEQ ID NO: 15017, SEQ ID NO: 15019, SEQ ID NO: 15021, SEQ ID NO: 15023, SEQ ID NO: 15025, SEQ ID NO: 15026, SEQ ID NO: 15028, SEQ ID NO: 15029, SEQ ID NO: 15031, SEQ ID NO: 15033, SEQ ID NO: 15035, SEQ ID NO: 15037, SEQ ID NO: 15039, SEQ ID NO: 15040, SEQ ID NO: 15042, SEQ ID NO: 15044, SEQ ID NO: 15046, SEQ ID NO: 15048, SEQ ID NO: 15050, SEQ ID NO: 15051, SEQ ID NO: 15053, SEQ ID NO: 15055, SEQ ID NO: 15057, SEQ ID NO: 15059, SEQ ID NO: 15060, SEQ ID NO: 15062, SEQ ID NO: 15064, SEQ ID NO: 15066, SEQ ID NO: 15067, SEQ ID NO: 15069, SEQ ID NO: 15071, SEQ ID NO: 15073, SEQ ID NO: 15075, SEQ ID NO: 15077, SEQ ID NO: 15078, SEQ ID NO: 15080, SEQ ID NO: 15082, SEQ ID NO: 15084, SEQ ID NO: 15086, SEQ ID NO: 15088, SEQ ID NO: 15090, SEQ ID NO: 15091, SEQ ID NO: 15093, SEQ ID NO: 15095, SEQ ID NO: 15096, SEQ ID NO: 15098, SEQ ID NO: 15099, SEQ ID NO: 15101, SEQ ID NO: 15103, SEQ ID NO: 15105, SEQ ID NO: 15107, SEQ ID NO: 15109, SEQ ID NO: 15111, SEQ ID NO: 15113, SEQ ID NO: 15115, SEQ ID NO: 15117, SEQ ID NO: 15119, SEQ ID NO: 15121, SEQ ID NO: 15123, SEQ ID NO: 15125, SEQ ID NO: 15127, SEQ ID NO: 15129, SEQ ID NO: 15130, SEQ ID NO: 15132, SEQ ID NO: 15134, SEQ ID NO: 15136, SEQ ID NO: 15138, SEQ ID NO: 15140, SEQ ID NO: 15142, SEQ ID NO: 15144, SEQ ID NO: 15146, SEQ ID NO: 15147, SEQ ID NO: 15148, SEQ ID NO: 15150, SEQ ID NO: 15152,SEQ ID NO: 15154,SEQ ID NO: 15155,SEQ ID NO: 15157,SEQ ID NO: 15159, SEQ ID NO: 15161, SEQ ID NO: 15163, SEQ ID NO: 15165, SEQ ID NO: 15167, SEQ ID NO: 15168, SEQ ID NO: 15169, SEQ ID NO: 15171, SEQ ID NO: 15173, SEQ ID NO: 15175, SEQ ID NO: 15177,
SEQ ID NO: 15179, SEQ ID NO: 15181, SEQ ID NO: 15183, SEQ ID NO: 15185, SEQ ID NO: 15187, SEQ ID NO: 15189, SEQ ID NO: 15191, SEQ ID NO: 15192, SEQ ID NO: 15194, SEQ ID NO: 15196, SEQ ID NO: 15198, SEQ ID NO: 15200, SEQ ID NO: 15201, SEQ ID NO: 15203, SEQ ID NO: 15205, SEQ ID NO: 15207, SEQ ID NO: 15209, SEQ ID NO: 15211, SEQ ID NO: 15213, SEQ ID NO: 15215, SEQ ID NO: 15217, SEQ ID NO: 15219, SEQ ID NO: 15220, SEQ ID NO: 15222, SEQ ID NO: 15224, SEQ ID NO: 15226, SEQ ID NO: 15228, SEQ ID NO: 15230, SEQ ID NO: 15232, SEQ ID NO: 15234, SEQ ID NO: 15236, SEQ ID NO: 15238, SEQ ID NO: 15240, SEQ ID NO: 15242, SEQ ID NO: 15244, SEQ ID NO: 15246, SEQ ID NO: 15248, SEQ ID NO: 15250, SEQ ID NO: 15252, SEQ ID NO: 15254, SEQ ID NO: 15256, SEQ ID NO: 15258, SEQ ID NO: 15259, SEQ ID NO: 15261, SEQ ID NO: 15263, SEQ ID NO: 15265, SEQ ID NO: 15267, SEQ ID NO: 15269, SEQ ID NO: 15271, SEQ ID NO: 15272, SEQ ID NO: 15274, SEQ ID NO: 15276, SEQ ID NO: 15278, SEQ ID NO: 15280, SEQ ID NO: 15282, SEQ ID NO: 15283, SEQ ID NO: 15285, SEQ ID NO: 15287, SEQ ID NO: 15289, SEQ ID NO: 15291, SEQ ID NO: 15292, SEQ ID NO: 15294, SEQ ID NO: 15295, SEQ ID NO: 15297, SEQ ID NO: 15298, SEQ ID NO: 15300, SEQ ID NO: 15301, SEQ ID NO: 15302, SEQ ID NO: 15304, SEQ ID NO: 15305, SEQ ID NO: 15307, SEQ ID NO: 15309, SEQ ID NO: 15311, SEQ ID NO: 15313, SEQ ID NO: 15315, SEQ ID NO: 15316, SEQ ID NO: 15318, SEQ ID NO: 15319, SEQ ID NO: 15321, SEQ ID NO: 15323, SEQ ID NO: 15325, SEQ ID NO: 15327, SEQ ID NO: 15329, SEQ ID NO: 15331, SEQ ID NO: 15333, SEQ ID NO: 15334, SEQ ID NO: 15336, SEQ ID NO: 15338, SEQ ID NO: 15340, SEQ ID NO: 15342, SEQ ID NO: 15344, SEQ ID NO: 15346, SEQ ID NO: 15348, SEQ ID NO: 15350, SEQ ID NO: 15352, SEQ ID NO: 15354, SEQ ID NO: 15355, SEQ ID NO: 15357, SEQ ID NO: 15359, SEQ ID NO: 15361,
SEQ ID NO: 15363, SEQ ID NO: 15364, SEQ ID NO: 15366, SEQ ID NO: 15368, SEQ ID NO: 15370, SEQ ID NO: 15372, SEQ ID NO: 15374, SEQ ID NO: 15376, SEQ ID NO: 15378, SEQ ID NO: 15380, SEQ ID NO: 15382, SEQ ID NO: 15384, SEQ ID NO: 15386, SEQ ID NO: 15388, SEQ ID NO: 15390, SEQ ID NO: 15391, SEQ ID NO: 15393, SEQ ID NO: 15395, SEQ ID NO: 15396, SEQ ID NO: 15397, SEQ ID NO: 15399, SEQ ID NO: 15401, SEQ ID NO: 15403, SEQ ID NO: 15404, SEQ ID NO: 15406, SEQ ID NO: 15407, SEQ ID NO: 15409, SEQ ID NO: 15411, SEQ ID NO: 15412, SEQ ID NO: 15414, SEQ ID NO: 15416, SEQ ID NO: 15417, SEQ ID NO: 15419, SEQ ID NO: 15421, SEQ ID NO: 15423, SEQ ID NO: 15425, SEQ ID NO: 15427, SEQ ID NO: 15429, SEQ ID NO: 15431, SEQ ID NO: 15433, SEQ ID NO: 15435, SEQ ID NO: 15436, SEQ ID NO: 15438, SEQ ID NO: 15439, SEQ ID NO: 15441, SEQ ID NO: 15442, SEQ ID NO: 15443, SEQ ID NO: 15445, SEQ ID NO: 15446, SEQ ID NO: 15447, SEQ ID NO: 15448, SEQ ID NO: 15449, SEQ ID NO: 15450, SEQ ID NO: 15451, SEQ ID NO: 15453, SEQ ID NO: 15455, SEQ ID NO: 15457, SEQ ID NO: 15459, SEQ ID NO: 15461, SEQ ID NO: 15463, SEQ ID NO: 15465, SEQ ID NO: 15467, SEQ ID NO: 15469, SEQ ID NO: 15471, SEQ ID NO: 15473, SEQ ID NO: 15475, SEQ ID NO: 15477, SEQ ID NO: 15478, SEQ ID NO: 15480, SEQ ID NO: 15482, SEQ ID NO: 15484, SEQ ID NO: 15485, SEQ ID NO: 15487, SEQ ID NO: 15489, SEQ ID NO: 15491, SEQ ID NO: 15492, SEQ ID NO: 15494, SEQ ID NO: 15496, SEQ ID NO: 15497, SEQ ID NO: 15498, SEQ ID NO: 15500, SEQ ID NO: 15501, SEQ ID NO: 15502, SEQ ID NO: 15503, SEQ ID NO: 15505, SEQ ID NO: 15507, SEQ ID NO: 15509, SEQ ID NO: 15510, SEQ ID NO: 15511, SEQ ID NO: 15513, SEQ ID NO: 15514, SEQ ID NO: 15516, SEQ ID NO: 15518, SEQ ID NO: 15520, SEQ ID NO: 15522, SEQ ID NO: 15524, SEQ ID NO: 15525, SEQ ID NO: 15527, SEQ ID NO: 15528, SEQ ID NO: 15529,
SEQ ID NO: 15531, SEQ ID NO: 15533, SEQ ID NO: 15534, SEQ ID NO: 15535, SEQ ID NO: 15537, SEQ ID NO: 15539, SEQ ID NO: 15540, SEQ ID NO: 15542, SEQ ID NO: 15544, SEQ ID NO: 15545, SEQ ID NO: 15547, SEQ ID NO: 15548, SEQ ID NO: 15550, SEQ ID NO: 15551, SEQ ID NO: 15552, SEQ ID NO: 15554, SEQ ID NO: 15556, SEQ ID NO: 15557, SEQ ID NO: 15558, SEQ ID NO: 15560, SEQ ID NO: 15561, SEQ ID NO: 15563, SEQ ID NO: 15564, SEQ ID NO: 15565, SEQ ID NO: 15567, SEQ ID NO: 15569, SEQ ID NO: 15571, SEQ ID NO: 15573, SEQ ID NO: 15575, SEQ ID NO: 15577, SEQ ID NO: 15578, SEQ ID NO: 15580, SEQ ID NO: 15581, SEQ ID NO: 15582, SEQ ID NO: 15584, SEQ ID NO: 15585, SEQ ID NO: 15587, SEQ ID NO: 15589, SEQ ID NO: 15591, SEQ ID NO: 15592, SEQ ID NO: 15593, SEQ ID NO: 15594, SEQ ID NO: 15596, SEQ ID NO: 15598, SEQ ID NO: 15599, SEQ ID NO: 15601, SEQ ID NO: 15602, SEQ ID NO: 15603, SEQ ID NO: 15604, SEQ ID NO: 15606, SEQ ID NO: 15607, SEQ ID NO: 15608, SEQ ID NO: 15610, SEQ ID NO: 15611, SEQ ID NO: 15613, SEQ ID NO: 15615, SEQ ID NO: 15617, SEQ ID NO: 15619, SEQ ID NO: 15621, SEQ ID NO: 15623, SEQ ID NO: 15625, SEQ ID NO: 15627, SEQ ID NO: 15629, SEQ ID NO: 15630, SEQ ID NO: 15632, SEQ ID NO: 15634, SEQ ID NO: 15636, SEQ ID NO: 15638, SEQ ID NO: 15640, SEQ ID NO: 15642, SEQ ID NO: 15644, SEQ ID NO: 15646, SEQ ID NO: 15648, SEQ ID NO: 15649, SEQ ID NO: 15650, SEQ ID NO: 15651, SEQ ID NO: 15653, SEQ ID NO: 15655, SEQ ID NO: 15656, SEQ ID NO: 15658, SEQ ID NO: 15660, SEQ ID NO: 15661, SEQ ID NO: 15663, SEQ ID NO: 15665, SEQ ID NO: 15667, SEQ ID NO: 15669, SEQ ID NO: 15670, SEQ ID NO: 15671, SEQ ID NO: 15672, SEQ ID NO: 15674, SEQ ID NO: 15675, SEQ ID NO: 15676, SEQ ID NO: 15677, SEQ ID NO: 15679, SEQ ID NO: 15681, SEQ ID NO: 15683, SEQ ID NO: 15685, SEQ ID NO: 15687, SEQ ID NO: 15689, SEQ ID NO: 15690,
SEQ ID NO: 15692, SEQ ID NO: 15694, SEQ ID NO: 15695, SEQ ID NO: 15697, SEQ ID NO: 15699, SEQ ID NO: 15701, SEQ ID NO: 15703, SEQ ID NO: 15704, SEQ ID NO: 15706, SEQ ID NO: 15707, SEQ ID NO: 15709, SEQ ID NO: 15711, SEQ ID NO: 15713, SEQ ID NO: 15715, SEQ ID NO: 15717, SEQ ID NO: 15718, SEQ ID NO: 15719, SEQ ID NO: 15720, SEQ ID NO: 15722, SEQ ID NO: 15723, SEQ ID NO: 15725, SEQ ID NO: 15727, SEQ ID NO: 15728, SEQ ID NO: 15729, SEQ ID NO: 15731, SEQ ID NO: 15732, SEQ ID NO: 15734, SEQ ID NO: 15735, SEQ ID NO: 15737, SEQ ID NO: 15738, SEQ ID NO: 15740, SEQ ID NO: 15742, SEQ ID NO: 15744, SEQ ID NO: 15746, SEQ ID NO: 15748, SEQ ID NO: 15749, SEQ ID NO: 15751, SEQ ID NO: 15752, SEQ ID NO: 15754, SEQ ID NO: 15756, SEQ ID NO: 15758, SEQ ID NO: 15760, SEQ ID NO: 15762, SEQ ID NO: 15764, SEQ ID NO: 15765, SEQ ID NO: 15767, SEQ ID NO: 15769, SEQ ID NO: 15771, SEQ ID NO: 15773, SEQ ID NO: 15775, SEQ ID NO: 15777, SEQ ID NO: 15778, SEQ ID NO: 15780, SEQ ID NO: 15781, SEQ ID NO: 15783, SEQ ID NO: 15785, SEQ ID NO: 15787, SEQ ID NO: 15789, SEQ ID NO: 15791, SEQ ID NO: 15793, SEQ ID NO: 15795, SEQ ID NO: 15797, SEQ ID NO: 15799, SEQ ID NO: 15801, SEQ ID NO: 15802, SEQ ID NO: 15804, SEQ ID NO: 15806, SEQ ID NO: 15808, SEQ ID NO: 15810, SEQ ID NO: 15812, SEQ ID NO: 15814, SEQ ID NO: 15816, SEQ ID NO: 15818, SEQ ID NO: 15819, SEQ ID NO: 15820, SEQ ID NO: 15821, SEQ ID NO: 15823, SEQ ID NO: 15825, SEQ ID NO: 15827, SEQ ID NO: 15829, SEQ ID NO: 15830, SEQ ID NO: 15831, SEQ ID NO: 15832, SEQ ID NO: 15833, SEQ ID NO: 15835, SEQ ID NO: 15836, SEQ ID NO: 15837, SEQ ID NO: 15839, SEQ ID NO: 15841, SEQ ID NO: 15843, SEQ ID NO: 15845, SEQ ID NO: 15846, SEQ ID NO: 15848, SEQ ID NO: 15850, SEQ ID NO: 15852, SEQ ID NO: 15853, SEQ ID NO: 15855, SEQ ID NO: 15857, SEQ ID NO: 15859, SEQ ID NO: 15861,
SEQ ID NO: 15863, SEQ ID NO: 15865, SEQ ID NO: 15866, SEQ ID NO: 15867, SEQ ID NO: 15869, SEQ ID NO: 15870, SEQ ID NO: 15872, SEQ ID NO: 15874, SEQ ID NO: 15876, SEQ ID NO: 15878, SEQ ID NO: 15880, SEQ ID NO: 15881, SEQ ID NO: 15882, SEQ ID NO: 15883, SEQ ID NO: 15885, SEQ ID NO: 15887, SEQ ID NO: 15889, SEQ ID NO: 15891, SEQ ID NO: 15892, SEQ ID NO: 15893, SEQ ID NO: 15895, SEQ ID NO: 15897, SEQ ID NO: 15899, SEQ ID NO: 15900, SEQ ID NO: 15901, SEQ ID NO: 15903, SEQ ID NO: 15905, SEQ ID NO: 15906, SEQ ID NO: 15908, SEQ ID NO: 15909, SEQ ID NO: 15910, SEQ ID NO: 15912, SEQ ID NO: 15914, SEQ ID NO: 15916, SEQ ID NO: 15917, SEQ ID NO: 15919, SEQ ID NO: 15920, SEQ ID NO: 15922, SEQ ID NO: 15924, SEQ ID NO: 15926, SEQ ID NO: 15928, SEQ ID NO: 15929, SEQ ID NO: 15930, SEQ ID NO: 15932, SEQ ID NO: 15934, SEQ ID NO: 15936, SEQ ID NO: 15938, SEQ ID NO: 15940, SEQ ID NO: 15942, SEQ ID NO: 15944, SEQ ID NO: 15946, SEQ ID NO: 15948, SEQ ID NO: 15950, SEQ ID NO: 15952, SEQ ID NO: 15954, SEQ ID NO: 15956, SEQ ID NO: 15958, SEQ ID NO: 15960, SEQ ID NO: 15962, SEQ ID NO: 15964, SEQ ID NO: 15966, SEQ ID NO: 15968, SEQ ID NO: 15970, SEQ ID NO: 15972, SEQ ID NO: 15974, SEQ ID NO: 15976, SEQ ID NO: 15978, SEQ ID NO: 15980, SEQ ID NO: 15982, SEQ ID NO: 15984, SEQ ID NO: 15986, SEQ ID NO: 15988, SEQ ID NO: 15990, SEQ ID NO: 15992, SEQ ID NO: 15993, SEQ ID NO: 15995, SEQ ID NO: 15997, SEQ ID NO: 15999, SEQ ID NO: 16001, SEQ ID NO: 16003, SEQ ID NO: 16005, SEQ ID NO: 16007, SEQ ID NO: 16009, SEQ ID NO: 16011, SEQ ID NO: 16013, SEQ ID NO: 16015, SEQ ID NO: 16017, SEQ ID NO: 16019, SEQ ID NO: 16021, SEQ ID NO: 16023, SEQ ID NO: 16025, SEQ ID NO: 16027, SEQ ID NO: 16029, SEQ ID NO: 16031, SEQ ID NO: 16033, SEQ ID NO: 16035, SEQ ID NO: 16037, SEQ ID NO: 16039, SEQ ID NO: 16041, SEQ ID NO: 16043,
SEQ ID NO: 16045, SEQ ID NO: 16047, SEQ ID NO: 16048, SEQ ID NO: 16049, SEQ ID NO: 16051, SEQ ID NO: 16052, SEQ ID NO: 16054, SEQ ID NO: 16056, SEQ ID NO: 16057, SEQ ID NO: 16059, SEQ ID NO: 16061, SEQ ID NO: 16063, SEQ ID NO: 16065, SEQ ID NO: 16067, SEQ ID NO: 16069, SEQ ID NO: 16071, SEQ ID NO: 16073, SEQ ID NO: 16075, SEQ ID NO: 16077, SEQ ID NO: 16079, SEQ ID NO: 16081, SEQ ID NO: 16083, SEQ ID NO: 16085, SEQ ID NO: 16087, SEQ ID NO: 16089, SEQ ID NO: 16091, SEQ ID NO: 16093, SEQ ID NO: 16095, SEQ ID NO: 16097, SEQ ID NO: 16099, SEQ ID NO: 16101, SEQ ID NO: 16103, SEQ ID NO: 16105, SEQ ID NO: 16107, SEQ ID NO: 16109,
SEQ ID NO: 16219, SEQ ID NO: 16220, SEQ ID NO: 16222, SEQ ID NO: 16224, SEQ ID NO: 16225, SEQ ID NO: 16226, SEQ ID NO: 16228, SEQ ID NO: 16229, SEQ ID NO: 16230, SEQ ID NO: 16232, SEQ ID NO: 16233, SEQ ID NO: 16235, SEQ ID NO: 16236, SEQ ID NO: 16238, SEQ ID NO: 16240, SEQ ID NO: 16242, SEQ ID NO: 16243, SEQ ID NO: 16245, SEQ ID NO: 16246, SEQ ID NO: 16247, SEQ ID NO: 16248, SEQ ID NO: 16249, SEQ ID NO: 16250, SEQ ID NO: 16251, SEQ ID NO: 16252, SEQ ID NO: 16253, SEQ ID NO: 16254, SEQ ID NO: 16255, SEQ ID NO: 16257, SEQ ID NO: 16258, SEQ ID NO: 16259, SEQ ID NO: 16260, SEQ ID NO: 16261, SEQ ID NO: 16262, SEQ ID NO: 16264, SEQ ID NO: 16265, SEQ ID NO: 16266, SEQ ID NO: 16267, SEQ ID NO: 16268, SEQ ID NO: 16269, SEQ ID NO: 16270, SEQ ID NO: 16272, SEQ ID NO: 16273, SEQ ID NO: 16274, SEQ ID NO: 16275, SEQ ID NO: 16276, SEQ ID NO: 16277, SEQ ID NO: 16278, SEQ ID NO: 16279, SEQ ID NO: 16280, SEQ ID NO: 16281, SEQ ID NO: 16282, SEQ ID NO: 16283, SEQ ID NO: 16284, SEQ ID NO: 16285, SEQ ID NO: 16286, SEQ ID NO: 16287, SEQ ID NO: 16289, SEQ ID NO: 16291, SEQ ID NO: 16293, SEQ ID NO: 16294, SEQ ID NO: 16295, SEQ ID NO: 16297, SEQ ID NO: 16299, SEQ ID NO: 16301, SEQ ID NO: 16303, SEQ ID NO: 16304, SEQ ID NO: 16306, SEQ ID NO: 16307, SEQ ID NO: 16308, SEQ ID NO: 16309, SEQ ID NO: 16310, SEQ ID NO: 16312, SEQ ID NO: 16314, SEQ ID NO: 16315, SEQ ID NO: 16316, SEQ ID NO: 16317, SEQ ID NO: 16318, SEQ ID NO: 16319, SEQ ID NO: 16320, SEQ ID NO: 16321, SEQ ID NO: 16322, SEQ ID NO: 16323, SEQ ID NO: 16324, SEQ ID NO: 16325, SEQ ID NO: 16327, SEQ ID NO: 16328, SEQ ID NO: 16330, SEQ ID NO: 16331, SEQ ID NO: 16332, SEQ ID NO: 16333, SEQ ID NO: 16334, SEQ ID NO: 16336, SEQ ID NO: 16337, SEQ ID NO: 16338, SEQ ID NO: 16339, SEQ ID NO: 16340, SEQ ID NO: 16341, SEQ ID NO: 16343, SEQ ID NO: 16345,
SEQ ID NO: 16346, SEQ ID NO: 16347, SEQ ID NO: 16348, SEQ ID NO: 16350, SEQ ID NO: 16351, SEQ ID NO: 16352, SEQ ID NO: 16353, SEQ ID NO: 16354, SEQ ID NO: 16356, SEQ ID NO: 16358, SEQ ID NO: 16359, SEQ ID NO: 16360, SEQ ID NO: 16362, SEQ ID NO: 16363, SEQ ID NO: 16364, SEQ ID NO: 16365, SEQ ID NO: 16367, SEQ ID NO: 16369, SEQ ID NO: 16371, SEQ ID NO: 16372, SEQ ID NO: 16373, SEQ ID NO: 16374, SEQ ID NO: 16376, SEQ ID NO: 16377, SEQ ID NO: 16378, SEQ ID NO: 16379, SEQ ID NO: 16380, SEQ ID NO: 16381, SEQ ID NO: 16383, SEQ ID NO: 16384, SEQ ID NO: 16385, SEQ ID NO: 16387, SEQ ID NO: 16389, SEQ ID NO: 16391, SEQ ID NO: 16393, SEQ ID NO: 16394, SEQ ID NO: 16395, SEQ ID NO: 16396, SEQ ID NO: 16398, SEQ ID NO: 16400, SEQ ID NO: 16401, SEQ ID NO: 16402, SEQ ID NO: 16403, SEQ ID NO: 16404, SEQ ID NO: 16406, SEQ ID NO: 16408, SEQ ID NO: 16409, SEQ ID NO: 16411, SEQ ID NO: 16412, SEQ ID NO: 16414, SEQ ID NO: 16416, SEQ ID NO: 16418, SEQ ID NO: 16420, SEQ ID NO: 16421, SEQ ID NO: 16422, SEQ ID NO: 16423, SEQ ID NO: 16424, SEQ ID NO: 16425, SEQ ID NO: 16426, SEQ ID NO: 16427, SEQ ID NO: 16428, SEQ ID NO: 16429, SEQ ID NO: 16431, SEQ ID NO: 16433, SEQ ID NO: 16435, SEQ ID NO: 16436, SEQ ID NO: 16437, SEQ ID NO: 16438, SEQ ID NO: 16440, SEQ ID NO: 16441, SEQ ID NO: 16443, SEQ ID NO: 16445, SEQ ID NO: 16447, SEQ ID NO: 16448, SEQ ID NO: 16449, SEQ ID NO: 16450, SEQ ID NO: 16451, SEQ ID NO: 16452, SEQ ID NO: 16453, SEQ ID NO: 16454, SEQ ID NO: 16455, SEQ ID NO: 16456, SEQ ID NO: 16457, SEQ ID NO: 16458, SEQ ID NO: 16459, SEQ ID NO: 16460, SEQ ID NO: 16461, SEQ ID NO: 16462, SEQ ID NO: 16464, SEQ ID NO: 16465, SEQ ID NO: 16467, SEQ ID NO: 16469, SEQ ID NO: 16471, SEQ ID NO: 16473, SEQ ID NO: 16474, SEQ ID NO: 16476, SEQ ID NO: 16478, SEQ ID NO: 16479, SEQ ID NO: 16481, SEQ ID NO: 16483,
SEQ ID NO: 16484, SEQ ID NO: 16486, SEQ ID NO: 16487, SEQ ID NO: 16489, SEQ ID NO: 16490, SEQ ID NO: 16492, SEQ ID NO: 16494, SEQ ID NO: 16496, SEQ ID NO: 16497, SEQ ID NO: 16499, SEQ ID NO: 16500, SEQ ID NO: 16501, SEQ ID NO: 16503, SEQ ID NO: 16505, SEQ ID NO: 16506, SEQ ID NO: 16508, SEQ ID NO: 16509, SEQ ID NO: 16511, SEQ ID NO: 16512, SEQ ID NO: 16513, SEQ ID NO: 16514, SEQ ID NO: 16515, SEQ ID NO: 16516, SEQ ID NO: 16517, SEQ ID NO: 16518, SEQ ID NO: 16519, SEQ ID NO: 16520, SEQ ID NO: 16522, SEQ ID NO: 16524, SEQ ID NO: 16526, SEQ ID NO: 16527, SEQ ID NO: 16529, SEQ ID NO: 16531, SEQ ID NO: 16532, SEQ ID NO: 16534, SEQ ID NO: 16535, SEQ ID NO: 16536, SEQ ID NO: 16537, SEQ ID NO: 16539, SEQ ID NO: 16540, SEQ ID NO: 16542, SEQ ID NO: 16544, SEQ ID NO: 16546, SEQ ID NO: 16547, SEQ ID NO: 16548, SEQ ID NO: 16550, SEQ ID NO: 16552, SEQ ID NO: 16553, SEQ ID NO: 16555, SEQ ID NO: 16557, SEQ ID NO: 16559, SEQ ID NO: 16561, SEQ ID NO: 16563, SEQ ID NO: 16564, SEQ ID NO: 16565, SEQ ID NO: 16567, SEQ ID NO: 16568, SEQ ID NO: 16569, SEQ ID NO: 16570, SEQ ID NO: 16571, SEQ ID NO: 16573, SEQ ID NO: 16574, SEQ ID NO: 16575, SEQ ID NO: 16576, SEQ ID NO: 16577, SEQ ID NO: 16578, SEQ ID NO: 16579, SEQ ID NO: 16580, SEQ ID NO: 16581, SEQ ID NO: 16583, SEQ ID NO: 16585, SEQ ID NO: 16586, SEQ ID NO: 16588, SEQ ID NO: 16589, SEQ ID NO: 16591, SEQ ID NO: 16593, SEQ ID NO: 16594, SEQ ID NO: 16596, SEQ ID NO: 16597, SEQ ID NO: 16598, SEQ ID NO: 16600, SEQ ID NO: 16601, SEQ ID NO: 16603, SEQ ID NO: 16604, SEQ ID NO: 16606, SEQ ID NO: 16607, SEQ ID NO: 16608, SEQ ID NO: 16609, SEQ ID NO: 16611, SEQ ID NO: 16612, SEQ ID NO: 16613, SEQ ID NO: 16614,SEQ ID NO: 16615, SEQ ID NO: 16617, SEQ ID NO: 16618, SEQ ID NO: 16620, SEQ ID NO: 16622, SEQ ID NO: 16624, SEQ ID NO: 16626, SEQ ID NO: 16627,
SEQ ID NO: 16628, SEQ ID NO: 16629, SEQ ID NO: 16631, SEQ ID NO: 16633, SEQ ID NO: 16635, SEQ ID NO: 16636, SEQ ID NO: 16637, SEQ ID NO: 16639, SEQ ID NO: 16640, SEQ ID NO: 16642, SEQ ID NO: 16643, SEQ ID NO: 16645, SEQ ID NO: 16646, SEQ ID NO: 16647, SEQ ID NO: 16648, SEQ ID NO: 16649, SEQ ID NO: 16650, SEQ ID NO: 16651, SEQ ID NO: 16652, SEQ ID NO: 16653, SEQ ID NO: 16654, SEQ ID NO: 16655, SEQ ID NO: 16656, SEQ ID NO: 16657, SEQ ID NO: 16658, SEQ ID NO: 16659, SEQ ID NO: 16660, SEQ ID NO: 16661, SEQ ID NO: 16662, SEQ ID NO: 16664, SEQ ID NO: 16666, SEQ ID NO: 16667, SEQ ID NO: 16668, SEQ ID NO: 16669, SEQ ID NO: 16670, SEQ ID NO: 16671, SEQ ID NO: 16672, SEQ ID NO: 16673, SEQ ID NO: 16675, SEQ ID NO: 16676, SEQ ID NO: 16677, SEQ ID NO: 16678, SEQ ID NO: 16679, SEQ ID NO: 16681, SEQ ID NO: 16682, SEQ ID NO: 16683, SEQ ID NO: 16684, SEQ ID NO: 16686, SEQ ID NO: 16687, SEQ ID NO: 16689, SEQ ID NO: 16691, SEQ ID NO: 16692, SEQ ID NO: 16694, SEQ ID NO: 16695, SEQ ID NO: 16696, SEQ ID NO: 16697, SEQ ID NO: 16698, SEQ ID NO: 16700, SEQ ID NO: 16701, SEQ ID NO: 16703, SEQ ID NO: 16705, SEQ ID NO: 16706, SEQ ID NO: 16707, SEQ ID NO: 16709, SEQ ID NO: 16710, SEQ ID NO: 16711, SEQ ID NO: 16713, SEQ ID NO: 16715, SEQ ID NO: 16716, SEQ ID NO: 16717, SEQ ID NO: 16718, SEQ ID NO: 16719, SEQ ID NO: 16720, SEQ ID NO: 16721, SEQ ID NO: 16722, SEQ ID NO: 16724, SEQ ID NO: 16725, SEQ ID NO: 16727, SEQ ID NO: 16729, SEQ ID NO: 16731, SEQ ID NO: 16733, SEQ ID NO: 16734, SEQ ID NO: 16735, SEQ ID NO: 16736, SEQ ID NO: 16737, SEQ ID NO: 16738, SEQ ID NO: 16739, SEQ ID NO: 16740, SEQ ID NO: 16742, SEQ ID NO: 16744, SEQ ID NO: 16746, SEQ ID NO: 16748, SEQ ID NO: 16749, SEQ ID NO: 16750, SEQ ID NO: 16751, SEQ ID NO: 16753, SEQ ID NO: 16754, SEQ ID NO: 16755, SEQ ID NO: 16756, SEQ ID NO: 16757,
SEQ ID NO: 16758, SEQ ID NO: 16759, SEQ ID NO: 16760, SEQ ID NO: 16761, SEQ ID NO: 16762, SEQ ID NO: 16764, SEQ ID NO: 16766, SEQ ID NO: 16768, SEQ ID NO: 16769, SEQ ID NO: 16770, SEQ ID NO: 16772, SEQ ID NO: 16773, SEQ ID NO: 16774, SEQ ID NO: 16775, SEQ ID NO: 16777, SEQ ID NO: 16778, SEQ ID NO: 16779, SEQ ID NO: 16780, SEQ ID NO: 16782, SEQ ID NO: 16783, SEQ ID NO: 16785, SEQ ID NO: 16787, SEQ ID NO: 16789, SEQ ID NO: 16790, SEQ ID NO: 16792, SEQ ID NO: 16794, SEQ ID NO: 16796, SEQ ID NO: 16798, SEQ ID NO: 16799, SEQ ID NO: 16800, SEQ ID NO: 16802, SEQ ID NO: 16803, SEQ ID NO: 16805, SEQ ID NO: 16806, SEQ ID NO: 16808, SEQ ID NO: 16810, SEQ ID NO: 16811, SEQ ID NO: 16812, SEQ ID NO: 16814, SEQ ID NO: 16816, SEQ ID NO: 16817, SEQ ID NO: 16819, SEQ ID NO: 16820, SEQ ID NO: 16821, SEQ ID NO: 16823, SEQ ID NO: 16824, SEQ ID NO: 16826, SEQ ID NO: 16827, SEQ ID NO: 16828, SEQ ID NO: 16829, SEQ ID NO: 16830, SEQ ID NO: 16831, SEQ ID NO: 16832, SEQ ID NO: 16833, SEQ ID NO: 16834, SEQ ID NO: 16835, SEQ ID NO: 16836, SEQ ID NO: 16837, SEQ ID NO: 16838, SEQ ID NO: 16839, SEQ ID NO: 16840, SEQ ID NO: 16841, SEQ ID NO: 16842, SEQ ID NO: 16843, SEQ ID NO: 16844, SEQ ID NO: 16846, SEQ ID NO: 16848, SEQ ID NO: 16850, SEQ ID NO: 16851, SEQ ID NO: 16852, SEQ ID NO: 16854, SEQ ID NO: 16856, SEQ ID NO: 16858, SEQ ID NO: 16859, SEQ ID NO: 16860, SEQ ID NO: 16861, SEQ ID NO: 16862, SEQ ID NO: 16864, SEQ ID NO: 16866, SEQ ID NO: 16867, SEQ ID NO: 16868, SEQ ID NO: 16869, SEQ ID NO: 16871, SEQ ID NO: 16872, SEQ ID NO: 16873, SEQ ID NO: 16874, SEQ ID NO: 16875, SEQ ID NO: 16877, SEQ ID NO: 16878, SEQ ID NO: 16880, SEQ ID NO: 16881, SEQ ID NO: 16882, SEQ ID NO: 16883, SEQ ID NO: 16885, SEQ ID NO: 16886, SEQ ID NO: 16887, SEQ ID NO: 16888, SEQ ID NO: 16889, SEQ ID NO: 16890, SEQ ID NO: 16891,
SEQ ID NO: 16893, SEQ ID NO: 16894, SEQ ID NO: 16895, SEQ ID NO: 16897, SEQ ID NO: 16898, SEQ ID NO: 16899, SEQ ID NO: 16900, SEQ ID NO: 16902, SEQ ID NO: 16904, SEQ ID NO: 16905, SEQ ID NO: 16906, SEQ ID NO: 16907, SEQ ID NO: 16908, SEQ ID NO: 16910, SEQ ID NO: 16911, SEQ ID NO: 16912, SEQ ID NO: 16913, SEQ ID NO: 16914, SEQ ID NO: 16915, SEQ ID NO: 16916, SEQ ID NO: 16917, SEQ ID NO: 16918, SEQ ID NO: 16919, SEQ ID NO: 16920, SEQ ID NO: 16922, SEQ ID NO: 16923, SEQ ID NO: 16924, SEQ ID NO: 16926, SEQ ID NO: 16927, SEQ ID NO: 16929, SEQ ID NO: 16930, SEQ ID NO: 16931, SEQ ID NO: 16932, SEQ ID NO: 16933, SEQ ID NO: 16934, SEQ ID NO: 16936, SEQ ID NO: 16938, SEQ ID NO: 16940, SEQ ID NO: 16942, SEQ ID NO: 16944, SEQ ID NO: 16945, SEQ ID NO: 16946, SEQ ID NO: 16948, SEQ ID NO: 16949, SEQ ID NO: 16950, SEQ ID NO: 16951, SEQ ID NO: 16952, SEQ ID NO: 16953, SEQ ID NO: 16955, SEQ ID NO: 16957, SEQ ID NO: 16958, SEQ ID NO: 16959, SEQ ID NO: 16961, SEQ ID NO: 16962, SEQ ID NO: 16964, SEQ ID NO: 16966, SEQ ID NO: 16967, SEQ ID NO: 16969, SEQ ID NO: 16970, SEQ ID NO: 16972, SEQ ID NO: 16973, SEQ ID NO: 16974, SEQ ID NO: 16975, SEQ ID NO: 16977, SEQ ID NO: 16978, SEQ ID NO: 16979, SEQ ID NO: 16981, SEQ ID NO: 16982, SEQ ID NO: 16983, SEQ ID NO: 16984, SEQ ID NO: 16985, SEQ ID NO: 16986, SEQ ID NO: 16988, SEQ ID NO: 16989, SEQ ID NO: 16991, SEQ ID NO: 16992, SEQ ID NO: 16993, SEQ ID NO: 16994, SEQ ID NO: 16995, SEQ ID NO: 16996, SEQ ID NO: 16997, SEQ ID NO: 16998, SEQ ID NO: 17000, SEQ ID NO: 17001, SEQ ID NO: 17002, SEQ ID NO: 17004, SEQ ID NO: 17005, SEQ ID NO: 17006, SEQ ID NO: 17007, SEQ ID NO: 17008, SEQ ID NO: 17009, SEQ ID NO: 17010, SEQ ID NO: 17011, SEQ ID NO: 17012, SEQ ID NO: 17013, SEQ ID NO: 17014, SEQ ID NO: 17015, SEQ ID NO: 17016, SEQ ID NO: 17017, SEQ ID NO: 17018,
SEQ ID NO: 17020, SEQ ID NO: 17021, SEQ ID NO: 17022, SEQ ID NO: 17023, SEQ ID NO: 17024, SEQ ID NO: 17026, SEQ ID NO: 17027, SEQ ID NO: 17029, SEQ ID NO: 17030, SEQ ID NO: 17031, SEQ ID NO: 17033, SEQ ID NO: 17034, SEQ ID NO: 17035, SEQ ID NO: 17036, SEQ ID NO: 17037, SEQ ID NO: 17039, SEQ ID NO: 17041, SEQ ID NO: 17043, SEQ ID NO: 17044, SEQ ID NO: 17045, SEQ ID NO: 17046, SEQ ID NO: 17047, SEQ ID NO: 17048, SEQ ID NO: 17049, SEQ ID NO: 17050, SEQ ID NO: 17052, SEQ ID NO: 17054, SEQ ID NO: 17055, SEQ ID NO: 17056, SEQ ID NO: 17057, SEQ ID NO: 17059, SEQ ID NO: 17061, SEQ ID NO: 17063, SEQ ID NO: 17065, SEQ ID NO: 17066, SEQ ID NO: 17067, SEQ ID NO: 17068, SEQ ID NO: 17069, SEQ ID NO: 17070, SEQ ID NO: 17071, SEQ ID NO: 17073, SEQ ID NO: 17075, SEQ ID NO: 17077, SEQ ID NO: 17078, SEQ ID NO: 17080, SEQ ID NO: 17082, SEQ ID NO: 17084, SEQ ID NO: 17086, SEQ ID NO: 17088, SEQ ID NO: 17090, SEQ ID NO: 17092, SEQ ID NO: 17094, SEQ ID NO: 17096, SEQ ID NO: 17098, SEQ ID NO: 17100, SEQ ID NO: 17102, SEQ ID NO: 17103, SEQ ID NO: 17105, SEQ ID NO: 17107, SEQ ID NO: 17108, SEQ ID NO: 17110, SEQ ID NO: 17112, SEQ ID NO: 17114, SEQ ID NO: 17116, SEQ ID NO: 17118, SEQ ID NO: 17119, SEQ ID NO: 17121, SEQ ID NO: 17123, SEQ ID NO: 17125, SEQ ID NO: 17126, SEQ ID NO: 17128, SEQ ID NO: 17130, SEQ ID NO: 17132, SEQ ID NO: 17134, SEQ ID NO: 17136, SEQ ID NO: 17138, SEQ ID NO: 17139, SEQ ID NO: 17141, SEQ ID NO: 17143, SEQ ID NO: 17145, SEQ ID NO: 17147, SEQ ID NO: 17149, SEQ ID NO: 17151, SEQ ID NO: 17153, SEQ ID NO: 17155, SEQ ID NO: 17157, SEQ ID NO: 17159, SEQ ID NO: 17160, SEQ ID NO: 17162, SEQ ID NO: 17164, SEQ ID NO: 17166, SEQ ID NO: 17168, SEQ ID NO: 17170, SEQ ID NO: 17172, SEQ ID NO: 17174, SEQ ID NO: 17176, SEQ ID NO: 17178, SEQ ID NO: 17180, SEQ ID NO: 17182, SEQ ID NO: 17183,
SEQ ID NO: 17185, SEQ ID NO: 17187, SEQ ID NO: 17189, SEQ ID NO: 17190, SEQ ID NO: 17192, SEQ ID NO: 17193, SEQ ID NO: 17195, SEQ ID NO: 17197, SEQ ID NO: 17199, SEQ ID NO: 17201, SEQ ID NO: 17202, SEQ ID NO: 17204, SEQ ID NO: 17206, SEQ ID NO: 17208, SEQ ID NO: 17209, SEQ ID NO: 17210, SEQ ID NO: 17212, SEQ ID NO: 17213, SEQ ID NO: 17214, SEQ ID NO: 17216, SEQ ID NO: 17218, SEQ ID NO: 17220, SEQ ID NO: 17222, SEQ ID NO: 17224, SEQ ID NO: 17226, SEQ ID NO: 17228, SEQ ID NO: 17230, SEQ ID NO: 17232, SEQ ID NO: 17234, SEQ ID NO: 17236, SEQ ID NO: 17238, SEQ ID NO: 17240, SEQ ID NO: 17242, SEQ ID NO: 17244, SEQ ID NO: 17246, SEQ ID NO: 17248, SEQ ID NO: 17249, SEQ ID NO: 17251, SEQ ID NO: 17253, SEQ ID NO: 17255, SEQ ID NO: 17256, SEQ ID NO: 17258, SEQ ID NO: 17259, SEQ ID NO: 17261, SEQ ID NO: 17263, SEQ ID NO: 17264, SEQ ID NO: 17265, SEQ ID NO: 17267, SEQ ID NO: 17268, SEQ ID NO: 17270, SEQ ID NO: 17272, SEQ ID NO: 17274, SEQ ID NO: 17275, SEQ ID NO: 17277, SEQ ID NO: 17279, SEQ ID NO: 17281, SEQ ID NO: 17283, SEQ ID NO: 17285, SEQ ID NO: 17287, SEQ ID NO: 17289, SEQ ID NO: 17290, SEQ ID NO: 17292, SEQ ID NO: 17294, SEQ ID NO: 17296, SEQ ID NO: 17297, SEQ ID NO: 17299, SEQ ID NO: 17300, SEQ ID NO: 17302, SEQ ID NO: 17304, SEQ ID NO: 17305, SEQ ID NO: 17307, SEQ ID NO: 17309, SEQ ID NO: 17310, SEQ ID NO: 17312, SEQ ID NO: 17314, SEQ ID NO: 17315, SEQ ID NO: 17316, SEQ ID NO: 17318, SEQ ID NO: 17320, SEQ ID NO: 17322, SEQ ID NO: 17324, SEQ ID NO: 17326, SEQ ID NO: 17328, SEQ ID NO: 17330, SEQ ID NO: 17332, SEQ ID NO: 17334, SEQ ID NO: 17336, SEQ ID NO: 17338, SEQ ID NO: 17340, SEQ ID NO: 17341, SEQ ID NO: 17343, SEQ ID NO: 17344, SEQ ID NO: 17345, SEQ ID NO: 17347, SEQ ID NO: 17349, SEQ ID NO: 17351, SEQ ID NO: 17353, SEQ ID NO: 17355, SEQ ID NO: 17356, SEQ ID NO: 17358,
SEQ ID NO: 17360, SEQ ID NO: 17362, SEQ ID NO: 17364, SEQ ID NO: 17365, SEQ ID NO: 17366, SEQ ID NO: 17368, SEQ ID NO: 17370, SEQ ID NO: 17371, SEQ ID NO: 17372, SEQ ID NO: 17374, SEQ ID NO: 17376, SEQ ID NO: 17377, SEQ ID NO: 17378, SEQ ID NO: 17380, SEQ ID NO: 17381, SEQ ID NO: 17383, SEQ ID NO: 17385, SEQ ID NO: 17387, SEQ ID NO: 17388, SEQ ID NO: 17390, SEQ ID NO: 17392, SEQ ID NO: 17393, SEQ ID NO: 17395, SEQ ID NO: 17397, SEQ ID NO: 17398, SEQ ID NO: 17399, SEQ ID NO: 17401, SEQ ID NO: 17402, SEQ ID NO: 17404, SEQ ID NO: 17406, SEQ ID NO: 17408, SEQ ID NO: 17410, SEQ ID NO: 17412, SEQ ID NO: 17414, SEQ ID NO: 17416, SEQ ID NO: 17418, SEQ ID NO: 17420, SEQ ID NO: 17422, SEQ ID NO: 17424, SEQ ID NO: 17426, SEQ ID NO: 17427, SEQ ID NO: 17429, SEQ ID NO: 17430, SEQ ID NO: 17432, SEQ ID NO: 17433, SEQ ID NO: 17434, SEQ ID NO: 17436, SEQ ID NO: 17437, SEQ ID NO: 17438, SEQ ID NO: 17440, SEQ ID NO: 17442, SEQ ID NO: 17443, SEQ ID NO: 17445, SEQ ID NO: 17447, SEQ ID NO: 17449, SEQ ID NO: 17450, SEQ ID NO: 17452, SEQ ID NO: 17454, SEQ ID NO: 17456, SEQ ID NO: 17457, SEQ ID NO: 17459, SEQ ID NO: 17460, SEQ ID NO: 17461, SEQ ID NO: 17463, SEQ ID NO: 17465, SEQ ID NO: 17467, SEQ ID NO: 17468, SEQ ID NO: 17470, SEQ ID NO: 17472, SEQ ID NO: 17474, SEQ ID NO: 17475, SEQ ID NO: 17477, SEQ ID NO: 17479, SEQ ID NO: 17480, SEQ ID NO: 17482, SEQ ID NO: 17484, SEQ ID NO: 17485, SEQ ID NO: 17487, SEQ ID NO: 17489, SEQ ID NO: 17490, SEQ ID NO: 17492, SEQ ID NO: 17494, SEQ ID NO: 17496, SEQ ID NO: 17498, SEQ ID NO: 17500, SEQ ID NO: 17502, SEQ ID NO: 17504, SEQ ID NO: 17506, SEQ ID NO: 17508, SEQ ID NO: 17510, SEQ ID NO: 17512, SEQ ID NO: 17514, SEQ ID NO: 17516, SEQ ID NO: 17518, SEQ ID NO: 17520, SEQ ID NO: 17522, SEQ ID NO: 17524, SEQ ID NO: 17526, SEQ ID NO: 17527, SEQ ID NO: 17529,
SEQ ID NO: 17531, SEQ ID NO: 17532, SEQ ID NO: 17533, SEQ ID NO: 17535, SEQ ID NO: 17537, SEQ ID NO: 17539, SEQ ID NO: 17541, SEQ ID NO: 17543, SEQ ID NO: 17545, SEQ ID NO: 17547, SEQ ID NO: 17549, SEQ ID NO: 17551, SEQ ID NO: 17553, SEQ ID NO: 17555, SEQ ID NO: 17557, SEQ ID NO: 17559, SEQ ID NO: 17561, SEQ ID NO: 17563, SEQ ID NO: 17565, SEQ ID NO: 17567, SEQ ID NO: 17569, SEQ ID NO: 17571, SEQ ID NO: 17572, SEQ ID NO: 17574, SEQ ID NO: 17576, SEQ ID NO: 17578, SEQ ID NO: 17579, SEQ ID NO: 17581, SEQ ID NO: 17583, SEQ ID NO: 17585, SEQ ID NO: 17586, SEQ ID NO: 17588, SEQ ID NO: 17589, SEQ ID NO: 17591, SEQ ID NO: 17593, SEQ ID NO: 17594, SEQ ID NO: 17596, SEQ ID NO: 17598, SEQ ID NO: 17600, SEQ ID NO: 17602, SEQ ID NO: 17604, SEQ ID NO: 17606, SEQ ID NO: 17608, SEQ ID NO: 17610, SEQ ID NO: 17612, SEQ ID NO: 17614, SEQ ID NO: 17616, SEQ ID NO: 17618, SEQ ID NO: 17620, SEQ ID NO: 17622, SEQ ID NO: 17624, SEQ ID NO: 17626, SEQ ID NO: 17628, SEQ ID NO: 17630, SEQ ID NO: 17632, SEQ ID NO: 17634, SEQ ID NO: 17636, SEQ ID NO: 17638, SEQ ID NO: 17640, SEQ ID NO: 17642, SEQ ID NO: 17644, SEQ ID NO: 17646, SEQ ID NO: 17648, SEQ ID NO: 17649, SEQ ID NO: 17650, SEQ ID NO: 17652, SEQ ID NO: 17654, SEQ ID NO: 17656, SEQ ID NO: 17657, SEQ ID NO: 17659, SEQ ID NO: 17660, SEQ ID NO: 17662, SEQ ID NO: 17663, SEQ ID NO: 17665, SEQ ID NO: 17666, SEQ ID NO: 17668, SEQ ID NO: 17670, SEQ ID NO: 17672, SEQ ID NO: 17674, SEQ ID NO: 17676, SEQ ID NO: 17678, SEQ ID NO: 17680, SEQ ID NO: 17681, SEQ ID NO: 17682, SEQ ID NO: 17683, SEQ ID NO: 17685, SEQ ID NO: 17687, SEQ ID NO: 17689, SEQ ID NO: 17691, SEQ ID NO: 17693, SEQ ID NO: 17695, SEQ ID NO: 17697, SEQ ID NO: 17699, SEQ ID NO: 17701, SEQ ID NO: 17703, SEQ ID NO: 17705, SEQ ID NO: 17706, SEQ ID NO: 17708, SEQ ID NO: 17710, SEQ ID NO: 17712,
SEQ ID NO: 17714, SEQ ID NO: 17716, SEQ ID NO: 17717, SEQ ID NO: 17718, SEQ ID NO: 17720, SEQ ID NO: 17721, SEQ ID NO: 17722, SEQ ID NO: 17723, SEQ ID NO: 17724, SEQ ID NO: 17726, SEQ ID NO: 17728, SEQ ID NO: 17729, SEQ ID NO: 17730, SEQ ID NO: 17732, SEQ ID NO: 17733, SEQ ID NO: 17735, SEQ ID NO: 17737, SEQ ID NO: 17739, SEQ ID NO: 17740, SEQ ID NO: 17742, SEQ ID NO: 17744, SEQ ID NO: 17746, SEQ ID NO: 17747, SEQ ID NO: 17748, SEQ ID NO: 17750, SEQ ID NO: 17751, SEQ ID NO: 17753, SEQ ID NO: 17754, SEQ ID NO: 17756, SEQ ID NO: 17758, SEQ ID NO: 17759, SEQ ID NO: 17761, SEQ ID NO: 17762, SEQ ID NO: 17763, SEQ ID NO: 17764, SEQ ID NO: 17765, SEQ ID NO: 17767, SEQ ID NO: 17768, SEQ ID NO: 17769, SEQ ID NO: 17770, SEQ ID NO: 17771, SEQ ID NO: 17773, SEQ ID NO: 17774, SEQ ID NO: 17776, SEQ ID NO: 17778, SEQ ID NO: 17780, SEQ ID NO: 17781, SEQ ID NO: 17783, SEQ ID NO: 17785, SEQ ID NO: 17787, SEQ ID NO: 17789, SEQ ID NO: 17790, SEQ ID NO: 17792, SEQ ID NO: 17794, SEQ ID NO: 17795, SEQ ID NO: 17797, SEQ ID NO: 17799, SEQ ID NO: 17801, SEQ ID NO: 17802, SEQ ID NO: 17803, SEQ ID NO: 17805, SEQ ID NO: 17806, SEQ ID NO: 17807, SEQ ID NO: 17809, SEQ ID NO: 17811, SEQ ID NO: 17813, SEQ ID NO: 17815, SEQ ID NO: 17817, SEQ ID NO: 17818, SEQ ID NO: 17820, SEQ ID NO: 17822, SEQ ID NO: 17824, SEQ ID NO: 17826, SEQ ID NO: 17828, SEQ ID NO: 17830, SEQ ID NO: 17831, SEQ ID NO: 17832, SEQ ID NO: 17834, SEQ ID NO: 17836, SEQ ID NO: 17837, SEQ ID NO: 17839, SEQ ID NO: 17841, SEQ ID NO: 17843, SEQ ID NO: 17845, SEQ ID NO: 17847, SEQ ID NO: 17848, SEQ ID NO: 17849, SEQ ID NO: 17850, SEQ ID NO: 17851, SEQ ID NO: 17852, SEQ ID NO: 17853, SEQ ID NO: 17855, SEQ ID NO: 17856, SEQ ID NO: 17858, SEQ ID NO: 17859, SEQ ID NO: 17860, SEQ ID NO: 17861, SEQ ID NO: 17863, SEQ ID NO: 17865, SEQ ID NO: 17867,
SEQ ID NO: 17869, SEQ ID NO: 17870, SEQ ID NO: 17871, SEQ ID NO: 17872, SEQ ID NO: 17874, SEQ ID NO: 17875, SEQ ID NO: 17876, SEQ ID NO: 17877, SEQ ID NO: 17878, SEQ ID NO: 17880, SEQ ID NO: 17881, SEQ ID NO: 17883, SEQ ID NO: 17885, SEQ ID NO: 17886, SEQ ID NO: 17888, SEQ ID NO: 17890, SEQ ID NO: 17892, SEQ ID NO: 17894, SEQ ID NO: 17895, SEQ ID NO: 17896, SEQ ID NO: 17898, SEQ ID NO: 17900, SEQ ID NO: 17902, SEQ ID NO: 17903, SEQ ID NO: 17904, SEQ ID NO: 17906, SEQ ID NO: 17907, SEQ ID NO: 17909, SEQ ID NO: 17911, SEQ ID NO: 17912, SEQ ID NO: 17914, SEQ ID NO: 17916, SEQ ID NO: 17917, SEQ ID NO: 17918, SEQ ID NO: 17919, SEQ ID NO: 17920, SEQ ID NO: 17922, SEQ ID NO: 17924, SEQ ID NO: 17925, SEQ ID NO: 17926, SEQ ID NO: 17928, SEQ ID NO: 17929, SEQ ID NO: 17931, SEQ ID NO: 17932, SEQ ID NO: 17934, SEQ ID NO: 17936, SEQ ID NO: 17938, SEQ ID NO: 17940, SEQ ID NO: 17941, SEQ ID NO: 17942, SEQ ID NO: 17943, SEQ ID NO: 17945, SEQ ID NO: 17946, SEQ ID NO: 17947, SEQ ID NO: 17949, SEQ ID NO: 17951, SEQ ID NO: 17952, SEQ ID NO: 17954, SEQ ID NO: 17956, SEQ ID NO: 17958, SEQ ID NO: 17959, SEQ ID NO: 17961, SEQ ID NO: 17962, SEQ ID NO: 17964, SEQ ID NO: 17965, SEQ ID NO: 17966, SEQ ID NO: 17967, SEQ ID NO: 17969, SEQ ID NO: 17971, SEQ ID NO: 17973, SEQ ID NO: 17974, SEQ ID NO: 17976, SEQ ID NO: 17978, SEQ ID NO: 17979, SEQ ID NO: 17980, SEQ ID NO: 17981, SEQ ID NO: 17982, SEQ ID NO: 17984, SEQ ID NO: 17985, SEQ ID NO: 17986, SEQ ID NO: 17987, SEQ ID NO: 17989, SEQ ID NO: 17990, SEQ ID NO: 17991, SEQ ID NO: 17993, SEQ ID NO: 17995, SEQ ID NO: 17997, SEQ ID NO: 17999, SEQ ID NO: 18000, SEQ ID NO: 18001, SEQ ID NO: 18003, SEQ ID NO: 18004, SEQ ID NO: 18005, SEQ ID NO: 18006, SEQ ID NO: 18008, SEQ ID NO: 18010, SEQ ID NO: 18012, SEQ ID NO: 18013, SEQ ID NO: 18015, SEQ ID NO: 18016,
SEQ ID NO: 18017, SEQ ID NO: 18019, SEQ ID NO: 18021, SEQ ID NO: 18022, SEQ ID NO: 18024, SEQ ID NO: 18026, SEQ ID NO: 18028, SEQ ID NO: 18030, SEQ ID NO: 18032, SEQ ID NO: 18034, SEQ ID NO: 18036, SEQ ID NO: 18038, SEQ ID NO: 18040, SEQ ID NO: 18042, SEQ ID NO: 18043, SEQ ID NO: 18044, SEQ ID NO: 18045, SEQ ID NO: 18046, SEQ ID NO: 18048, SEQ ID NO: 18050, SEQ ID NO: 18052, SEQ ID NO: 18054, SEQ ID NO: 18056, SEQ ID NO: 18058, SEQ ID NO: 18059, SEQ ID NO: 18061, SEQ ID NO: 18063, SEQ ID NO: 18065, SEQ ID NO: 18066, SEQ ID NO: 18068, SEQ ID NO: 18070, SEQ ID NO: 18071, SEQ ID NO: 18072, SEQ ID NO: 18074, SEQ ID NO: 18076, SEQ ID NO: 18078, SEQ ID NO: 18080, SEQ ID NO: 18082, SEQ ID NO: 18084, SEQ ID NO: 18086, SEQ ID NO: 18088, SEQ ID NO: 18090, SEQ ID NO: 18092, SEQ ID NO: 18094, SEQ ID NO: 18095, SEQ ID NO: 18096, SEQ ID NO: 18098, SEQ ID NO: 18099, SEQ ID NO: 18101, SEQ ID NO: 18103, SEQ ID NO: 18104, SEQ ID NO: 18105, SEQ ID NO: 18107, SEQ ID NO: 18109, SEQ ID NO: 18110, SEQ ID NO: 18112, SEQ ID NO: 18114, SEQ ID NO: 18116, SEQ ID NO: 18117, SEQ ID NO: 18119, SEQ ID NO: 18120, SEQ ID NO: 18121, SEQ ID NO: 18123, SEQ ID NO: 18124, SEQ ID NO: 18125, SEQ ID NO: 18127, SEQ ID NO: 18129, SEQ ID NO: 18131, SEQ ID NO: 18133, SEQ ID NO: 18135, SEQ ID NO: 18137, SEQ ID NO: 18139, SEQ ID NO: 18140, SEQ ID NO: 18142, SEQ ID NO: 18144, SEQ ID NO: 18146, SEQ ID NO: 18148, SEQ ID NO: 18150, SEQ ID NO: 18151, SEQ ID NO: 18152, SEQ ID NO: 18153, SEQ ID NO: 18154, SEQ ID NO: 18156, SEQ ID NO: 18157, SEQ ID NO: 18159, SEQ ID NO: 18161, SEQ ID NO: 18162, SEQ ID NO: 18163, SEQ ID NO: 18165, SEQ ID NO: 18166, SEQ ID NO: 18168, SEQ ID NO: 18170, SEQ ID NO: 18172, SEQ ID NO: 18174, SEQ ID NO: 18176, SEQ ID NO: 18178, SEQ ID NO: 18180, SEQ ID NO: 18182, SEQ ID NO: 18184, SEQ ID NO: 18186,
SEQ ID NO: 18188, SEQ ID NO: 18190, SEQ ID NO: 18192, SEQ ID NO: 18194, SEQ ID NO: 18196, SEQ ID NO: 18198, SEQ ID NO: 18200, SEQ ID NO: 18201, SEQ ID NO: 18203, SEQ ID NO: 18205, SEQ ID NO: 18207, SEQ ID NO: 18209, SEQ ID NO: 18210, SEQ ID NO: 18212, SEQ ID NO: 18214, SEQ ID NO: 18216, SEQ ID NO: 18218, SEQ ID NO: 18220, SEQ ID NO: 18222, SEQ ID NO: 18224, SEQ ID NO: 18226, SEQ ID NO: 18227, SEQ ID NO: 18229, SEQ ID NO: 18231, SEQ ID NO: 18233, SEQ ID NO: 18235, SEQ ID NO: 18236, SEQ ID NO: 18238, SEQ ID NO: 18240, SEQ ID NO: 18242, SEQ ID NO: 18243, SEQ ID NO: 18245, SEQ ID NO: 18247, SEQ ID NO: 18249, SEQ ID NO: 18251, SEQ ID NO: 18253, SEQ ID NO: 18254, SEQ ID NO: 18256, SEQ ID NO: 18258, SEQ ID NO: 18259, SEQ ID NO: 18260, SEQ ID NO: 18261, SEQ ID NO: 18263, SEQ ID NO: 18264, SEQ ID NO: 18265, SEQ ID NO: 18266, SEQ ID NO: 18268, SEQ ID NO: 18270, SEQ ID NO: 18272, SEQ ID NO: 18274, SEQ ID NO: 18276, SEQ ID NO: 18278, SEQ ID NO: 18280, SEQ ID NO: 18282, SEQ ID NO: 18284, SEQ ID NO: 18286, SEQ ID NO: 18288, SEQ ID NO: 18289, SEQ ID NO: 18291, SEQ ID NO: 18293, SEQ ID NO: 18295, SEQ ID NO: 18297, SEQ ID NO: 18298, SEQ ID NO: 18300, SEQ ID NO: 18302, SEQ ID NO: 18303, SEQ ID NO: 18305, SEQ ID NO: 18307, SEQ ID NO: 18308, SEQ ID NO: 18309, SEQ ID NO: 18310, SEQ ID NO: 18312, SEQ ID NO: 18314, SEQ ID NO: 18316, SEQ ID NO: 18318, SEQ ID NO: 18320, SEQ ID NO: 18321, SEQ ID NO: 18323, SEQ ID NO: 18325, SEQ ID NO: 18327, SEQ ID NO: 18329, SEQ ID NO: 18331, SEQ ID NO: 18332, SEQ ID NO: 18334, SEQ ID NO: 18335, SEQ ID NO: 18337, SEQ ID NO: 18339, SEQ ID NO: 18341, SEQ ID NO: 18343, SEQ ID NO: 18345, SEQ ID NO: 18347, SEQ ID NO: 18349, SEQ ID NO: 18351, SEQ ID NO: 18353, SEQ ID NO: 18355, SEQ ID NO: 18357, SEQ ID NO: 18358, SEQ ID NO: 18360, SEQ ID NO: 18362, SEQ ID NO: 18364,
SEQ ID NO: 18366, SEQ ID NO: 18368, SEQ ID NO: 18370, SEQ ID NO: 18372 SEQ ID NO: 18374, SEQ ID NO: 18375, SEQ ID NO: 18377, SEQ ID NO: 18378, SEQ ID NO: 18379, SEQ ID NO: 18381, SEQ ID NO: 18383, SEQ ID NO: 18385, SEQ ID NO: 18387, SEQ ID NO: 18389, SEQ ID NO: 18390, SEQ ID NO: 18392, SEQ ID NO: 18394, SEQ ID NO: 18395, SEQ ID NO: 18397, SEQ ID NO: 18398, SEQ ID NO: 18399, SEQ ID NO: 18401, SEQ ID NO: 18402, SEQ ID NO: 18404, SEQ ID NO: 18406, SEQ ID NO: 18408, SEQ ID NO: 18410, SEQ ID NO: 18412, SEQ ID NO: 18413, SEQ ID NO: 18414, SEQ ID NO: 18416, SEQ ID NO: 18418, SEQ ID NO: 18420, SEQ ID NO: 18421, SEQ ID NO: 18422, SEQ ID NO: 18424, SEQ ID NO: 18426, SEQ ID NO: 18427, SEQ ID NO: 18428, SEQ ID NO: 18430, SEQ ID NO: 18432, SEQ ID NO: 18433, SEQ ID NO: 18435, SEQ ID NO: 18437, SEQ ID NO: 18439, SEQ ID NO: 18441, SEQ ID NO: 18443, SEQ ID NO: 18444, SEQ ID NO: 18446, SEQ ID NO: 18447, SEQ ID NO: 18449, SEQ ID NO: 18451, SEQ ID NO: 18453, SEQ ID NO: 18454, SEQ ID NO: 18456, SEQ ID NO: 18458, SEQ ID NO: 18460, SEQ ID NO: 18462, SEQ ID NO: 18464, SEQ ID NO: 18465, SEQ ID NO: 18467, SEQ ID NO: 18468, SEQ ID NO: 18470, SEQ ID NO: 18472, SEQ ID NO: 18474, SEQ ID NO: 18476, SEQ ID NO: 18478, SEQ ID NO: 18480, SEQ ID NO: 18482, SEQ ID NO: 18484, SEQ ID NO: 18486, SEQ ID NO: 18488, SEQ ID NO: 18489, SEQ ID NO: 18491, SEQ ID NO: 18493, SEQ ID NO: 18495, SEQ ID NO: 18496, SEQ ID NO: 18497, SEQ ID NO: 18499, SEQ ID NO: 18500, SEQ ID NO: 18501, SEQ ID NO: 18502, SEQ ID NO: 18503, SEQ ID NO: 18504, SEQ ID NO: 18505, SEQ ID NO: 18507, SEQ ID NO: 18509, SEQ ID NO: 18511, SEQ ID NO: 18513, SEQ ID NO: 18515, SEQ ID NO: 18517, SEQ ID NO: 18519, SEQ ID NO: 18521, SEQ ID NO: 18523, SEQ ID NO: 18525, SEQ ID NO: 18527, SEQ ID NO: 18528, SEQ ID NO: 18530, SEQ ID NO: 18531, SEQ ID NO: 18533, SEQ ID NO: 18534, SEQ ID NO: 18535, SEQ ID NO: 18537, SEQ ID NO: 18539,
SEQ ID NO: 18540, SEQ ID NO: 18542, SEQ ID NO: 18543, SEQ ID NO: 18544, SEQ ID NO: 18545, SEQ ID NO: 18547, SEQ ID NO: 18548, SEQ ID NO: 18549, SEQ ID NO: 18551, SEQ ID NO: 18553, SEQ ID NO: 18555, SEQ ID NO: 18557, SEQ ID NO: 18559, SEQ ID NO: 18560, SEQ ID NO: 18561, SEQ ID NO: 18563, SEQ ID NO: 18564, SEQ ID NO: 18565, SEQ ID NO: 18566, SEQ ID NO: 18567, SEQ ID NO: 18569, SEQ ID NO: 18570, SEQ ID NO: 18571, SEQ ID NO: 18573, SEQ ID NO: 18575, SEQ ID NO: 18577, SEQ ID NO: 18578, SEQ ID NO: 18579, SEQ ID NO: 18581, SEQ ID NO: 18583, SEQ ID NO: 18584, SEQ ID NO: 18585, SEQ ID NO: 18586, SEQ ID NO: 18588, SEQ ID NO: 18589, SEQ ID NO: 18591, SEQ ID NO: 18593, SEQ ID NO: 18595, SEQ ID NO: 18597, SEQ ID NO: 18599, SEQ ID NO: 18601, SEQ ID NO: 18603, SEQ ID NO: 18605, SEQ ID NO: 18607, SEQ ID NO: 18609, SEQ ID NO: 18610, SEQ ID NO: 18612, SEQ ID NO: 18614, SEQ ID NO: 18616, SEQ ID NO: 18618, SEQ ID NO: 18620, SEQ ID NO: 18621, SEQ ID NO: 18622, SEQ ID NO: 18624, SEQ ID NO: 18626, SEQ ID NO: 18628, SEQ ID NO: 18630, SEQ ID NO: 18632, SEQ ID NO: 18634, SEQ ID NO: 18636, SEQ ID NO: 18638, SEQ ID NO: 18640, SEQ ID NO: 18641, SEQ ID NO: 18642, SEQ ID NO: 18643, SEQ ID NO: 18645, SEQ ID NO: 18647, SEQ ID NO: 18648, SEQ ID NO: 18650, SEQ ID NO: 18652, SEQ ID NO: 18654, SEQ ID NO: 18656, SEQ ID NO: 18658, SEQ ID NO: 18659, SEQ ID NO: 18661, SEQ ID NO: 18663, SEQ ID NO: 18664, SEQ ID NO: 18666, SEQ ID NO: 18667, SEQ ID NO: 18669, SEQ ID NO: 18670, SEQ ID NO: 18671, SEQ ID NO: 18673, SEQ ID NO: 18675, SEQ ID NO: 18677, SEQ ID NO: 18679, SEQ ID NO: 18681, SEQ ID NO: 18683, SEQ ID NO: 18684, SEQ ID NO: 18685, SEQ ID NO: 18687, SEQ ID NO: 18689, SEQ ID NO: 18690, SEQ ID NO: 18692, SEQ ID NO: 18694, SEQ ID NO: 18696, SEQ ID NO: 18698, SEQ ID NO: 18700, SEQ ID NO: 18702, SEQ ID NO: 18704,
SEQ ID NO: 18706, SEQ ID NO: 18707, SEQ ID NO: 18708, SEQ ID NO: 18710, SEQ ID NO: 18712, SEQ ID NO: 18714, SEQ ID NO: 18716, SEQ ID NO: 18718, SEQ ID NO: 18719, SEQ ID NO: 18721, SEQ ID NO: 18723, SEQ ID NO: 18725, SEQ ID NO: 18727, SEQ ID NO: 18728, SEQ ID NO: 18730, SEQ ID NO: 18732, SEQ ID NO: 18734, SEQ ID NO: 18736, SEQ ID NO: 18738, SEQ ID NO: 18740, SEQ ID NO: 18742, SEQ ID NO: 18744, SEQ ID NO: 18746, SEQ ID NO: 18748, SEQ ID NO: 18750, SEQ ID NO: 18752, SEQ ID NO: 18754, SEQ ID NO: 18755, SEQ ID NO: 18756, SEQ ID NO: 18757, SEQ ID NO: 18758, SEQ ID NO: 18760, SEQ ID NO: 18761, SEQ ID NO: 18762, SEQ ID NO: 18764, SEQ ID NO: 18766, SEQ ID NO: 18767, SEQ ID NO: 18768, SEQ ID NO: 18769, SEQ ID NO: 18771, SEQ ID NO: 18772, SEQ ID NO: 18774, SEQ ID NO: 18776, SEQ ID NO: 18778, SEQ ID NO: 18780, SEQ ID NO: 18782, SEQ ID NO: 18784, SEQ ID NO: 18786, SEQ ID NO: 18788, SEQ ID NO: 18789, SEQ ID NO: 18791, SEQ ID NO: 18792, SEQ ID NO: 18794, SEQ ID NO: 18796, SEQ ID NO: 18798, SEQ ID NO: 18799, SEQ ID NO: 18801, SEQ ID NO: 18803, SEQ ID NO: 18805, SEQ ID NO: 18807, SEQ ID NO: 18808, SEQ ID NO: 18810, SEQ ID NO: 18812, SEQ ID NO: 18814, SEQ ID NO: 18816, SEQ ID NO: 18818, SEQ ID NO: 18820, SEQ ID NO: 18821, SEQ ID NO: 18823, SEQ ID NO: 18825, SEQ ID NO: 18827, SEQ ID NO: 18829, SEQ ID NO: 18831, SEQ ID NO: 18833, SEQ ID NO: 18835, SEQ ID NO: 18837, SEQ ID NO: 18838, SEQ ID NO: 18839, SEQ ID NO: 18841, SEQ ID NO: 18842, SEQ ID NO: 18844, SEQ ID NO: 18845, SEQ ID NO: 18846, SEQ ID NO: 18848, SEQ ID NO: 18849, SEQ ID NO: 18851, SEQ ID NO: 18852, SEQ ID NO: 18854, SEQ ID NO: 18856, SEQ ID NO: 18858, SEQ ID NO: 18860, SEQ ID NO: 18861, SEQ ID NO: 18863, SEQ ID NO: 18864, SEQ ID NO: 18866, SEQ ID NO: 18867, SEQ ID NO: 18869, SEQ ID NO: 18871, SEQ ID NO: 18872, SEQ ID NO: 18873,
SEQ ID NO: 18875, SEQ ID NO: 18877, SEQ ID NO: 18878, SEQ ID NO: 18880, SEQ ID NO: 18881, SEQ ID NO: 18883, SEQ ID NO: 18885, SEQ ID NO: 18886, SEQ ID NO: 18887, SEQ ID NO: 18889, SEQ ID NO: 18890, SEQ ID NO: 18892, SEQ ID NO: 18893, SEQ ID NO: 18895, SEQ ID NO: 18897, SEQ ID NO: 18899, SEQ ID NO: 18901, SEQ ID NO: 18903, SEQ ID NO: 18904, SEQ ID NO: 18905, SEQ ID NO: 18907, SEQ ID NO: 18909, SEQ ID NO: 18911, SEQ ID NO: 18913, SEQ ID NO: 18915, SEQ ID NO: 18917, SEQ ID NO: 18919, SEQ ID NO: 18921, SEQ ID NO: 18923, SEQ ID NO: 18925, SEQ ID NO: 18927, SEQ ID NO: 18928, SEQ ID NO: 18930, SEQ ID NO: 18932, SEQ ID NO: 18934, SEQ ID NO: 18936, SEQ ID NO: 18938, SEQ ID NO: 18940, SEQ ID NO: 18941, SEQ ID NO: 18943, SEQ ID NO: 18944, SEQ ID NO: 18946, SEQ ID NO: 18947, SEQ ID NO: 18949, SEQ ID NO: 18951, SEQ ID NO: 18953, SEQ ID NO: 18955, SEQ ID NO: 18956, SEQ ID NO: 18957, SEQ ID NO: 18958, SEQ ID NO: 18959, SEQ ID NO: 18960, SEQ ID NO: 18962, SEQ ID NO: 18964, SEQ ID NO: 18966, SEQ ID NO: 18968, SEQ ID NO: 18969, SEQ ID NO: 18970, SEQ ID NO: 18972, SEQ ID NO: 18973, SEQ ID NO: 18975, SEQ ID NO: 18976, SEQ ID NO: 18978, SEQ ID NO: 18980,
SEQ ID NO: 18981, SEQ ID NO: 18982, SEQ ID NO: 18983, SEQ ID NO: 18984, SEQ ID NO: 18985, SEQ ID NO: 18986, SEQ ID NO: 18987, SEQ ID NO: 18988, SEQ ID NO: 18989, SEQ ID NO: 18990, SEQ ID NO: 18992, SEQ ID NO: 18993, SEQ ID NO: 18995, SEQ ID NO: 18997, SEQ ID NO: 18998, SEQ ID NO: 18999, SEQ ID NO: 19000, SEQ ID NO: 19001, SEQ ID NO: 19002, SEQ ID NO: 19004, SEQ ID NO: 19006 SEQ ID NO: 19007, SEQ ID NO: 19009, SEQ ID NO: 19011, SEQ ID NO: 19012, SEQ ID NO: 19013, SEQ ID NO: 19014, SEQ ID NO: 19016, SEQ ID NO: 19018, SEQ ID NO: 19020, SEQ ID NO: 19022, SEQ ID NO: 19024, and SEQ ID NO: 19025
(b) a polynucleotide comprising a nucleotide sequence encoding a protein comprising the amino acid sequence set forth in any one of the following SEQ ID NOs:
SEQ ID NO: 10469, SEQ ID NO: 10474, SEQ ID NO: 10476, SEQ ID NO: 10478, SEQ ID NO: 10480, SEQ ID NO: 10482, SEQ ID NO: 10484, SEQ ID NO: 10486, SEQ ID NO: 10490, SEQ ID NO: 10492, SEQ ID NO: 10494, SEQ ID NO: 10499, SEQ ID NO: 10501, SEQ ID NO: 10506, SEQ ID NO: 10509, SEQ ID NO: 10513, SEQ ID NO: 10515, SEQ ID NO: 10518, SEQ ID NO: 10520, SEQ ID NO: 10522, SEQ ID NO: 10525, SEQ ID NO: 10527, SEQ ID NO: 10531, SEQ ID NO: 10533, SEQ ID NO: 10536, SEQ ID NO: 10538, SEQ ID NO: 10541, SEQ ID NO: 10544, SEQ ID NO: 10547, SEQ ID NO: 10549, SEQ ID NO: 10552, SEQ ID NO: 10554, SEQ ID NO: 10559, SEQ ID NO: 10561, SEQ ID NO: 10563, SEQ ID NO: 10565, SEQ ID NO: 10568, SEQ ID NO: 10570, SEQ ID NO: 10572, SEQ ID NO: 10575, SEQ ID NO: 10577, SEQ ID NO: 10579, SEQ ID NO: 10581, SEQ ID NO: 10583, SEQ ID NO: 10585, SEQ ID NO: 10587, SEQ ID NO: 10589, SEQ ID NO: 10591, SEQ ID NO: 10593, SEQ ID NO: 10595, SEQ ID NO: 10598, SEQ ID NO: 10600, SEQ ID NO: 10602, SEQ ID NO: 10605, SEQ ID NO: 10608, SEQ ID NO: 10610, SEQ ID NO: 10612, SEQ ID NO: 10617, SEQ ID NO: 10621, SEQ ID NO: 10623, SEQ ID NO: 10626, SEQ ID NO: 10628, SEQ ID NO: 10631, SEQ ID NO: 10634, SEQ ID NO: 10636, SEQ ID NO: 10638, SEQ ID NO: 10640, SEQ ID NO: 10643, SEQ ID NO: 10645, SEQ ID NO: 10651, SEQ ID NO: 10653, SEQ ID NO: 10657, SEQ ID NO: 10660, SEQ ID NO: 10662, SEQ ID NO: 10664, SEQ ID NO: 10666, SEQ ID NO: 10668, SEQ ID NO: 10672, SEQ ID NO: 10675, SEQ ID NO: 10677, SEQ ID NO: 10679, SEQ ID NO: 10681, SEQ ID NO: 10684, SEQ ID NO: 10686, SEQ ID NO: 10688, SEQ ID NO: 10690, SEQ ID NO: 10692, SEQ ID NO: 10694, SEQ ID NO: 10697, SEQ ID NO: 10699, SEQ ID NO: 10701, SEQ ID NO: 10703, SEQ ID NO: 10705, SEQ ID NO: 10707, SEQ ID NO: 10709, SEQ ID NO: 10712, SEQ ID NO: 10714, SEQ ID NO: 10716, SEQ ID NO: 10719, SEQ ID NO: 10721,
SEQ ID NO: 10724, SEQ ID NO: 10726, SEQ ID NO: 10729, SEQ ID NO: 10731, SEQ ID NO: 10733, SEQ ID NO: 10735, SEQ ID NO: 10737, SEQ ID NO: 10739, SEQ ID NO: 10741, SEQ ID NO: 10743, SEQ ID NO: 10745, SEQ ID NO: 10747, SEQ ID NO: 10749, SEQ ID NO: 10751, SEQ ID NO: 10755, SEQ ID NO: 10759, SEQ ID NO: 10762, SEQ ID NO: 10764, SEQ ID NO: 10766, SEQ ID NO: 10768, SEQ ID NO: 10770, SEQ ID NO: 10772, SEQ ID NO: 10775, SEQ ID NO: 10777, SEQ ID NO: 10779, SEQ ID NO: 10782, SEQ ID NO: 10784, SEQ ID NO: 10787, SEQ ID NO: 10789, SEQ ID NO: 10791, SEQ ID NO: 10794, SEQ ID NO: 10796, SEQ ID NO: 10798, SEQ ID NO: 10801, SEQ ID NO: 10803, SEQ ID NO: 10806, SEQ ID NO: 10809, SEQ ID NO: 10811, SEQ ID NO: 10813, SEQ ID NO: 10816, SEQ ID NO: 10819, SEQ ID NO: 10821, SEQ ID NO: 10823, SEQ ID NO: 10825, SEQ ID NO: 10827, SEQ ID NO: 10829, SEQ ID NO: 10833, SEQ ID NO: 10835, SEQ ID NO: 10837, SEQ ID NO: 10839, SEQ ID NO: 10843, SEQ ID NO: 10846, SEQ ID NO: 10848, SEQ ID NO: 10851, SEQ ID NO: 10853, SEQ ID NO: 10855, SEQ ID NO: 10857, SEQ ID NO: 10860, SEQ ID NO: 10863, SEQ ID NO: 10865, SEQ ID NO: 10867, SEQ ID NO: 10869, SEQ ID NO: 10871, SEQ ID NO: 10874, SEQ ID NO: 10877, SEQ ID NO: 10880, SEQ ID NO: 10882, SEQ ID NO: 10884, SEQ ID NO: 10887, SEQ ID NO: 10892, SEQ ID NO: 10894, SEQ ID NO: 10896, SEQ ID NO: 10899, SEQ ID NO: 10903, SEQ ID NO: 10905, SEQ ID NO: 10907, SEQ ID NO: 10911, SEQ ID NO: 10917, SEQ ID NO: 10919, SEQ ID NO: 10921, SEQ ID NO: 10923, SEQ ID NO: 10926, SEQ ID NO: 10930, SEQ ID NO: 10932, SEQ ID NO: 10934, SEQ ID NO: 10936, SEQ ID NO: 10938, SEQ ID NO: 10941, SEQ ID NO: 10947, SEQ ID NO: 10949, SEQ ID NO: 10951, SEQ ID NO: 10953, SEQ ID NO: 10955, SEQ ID NO: 10961, SEQ ID NO: 10963, SEQ ID NO: 10965, SEQ ID NO: 10970, SEQ ID NO: 10972, SEQ ID NO: 10974, SEQ ID NO: 10976,
SEQ ID NO: 10979, SEQ ID NO: 10981, SEQ ID NO: 10985, SEQ ID NO: 10987, SEQ ID NO: 10989, SEQ ID NO: 10991, SEQ ID NO: 10993, SEQ ID NO: 10995, SEQ ID NO: 10997, SEQ ID NO: 10999, SEQ ID NO: 11002, SEQ ID NO: 11004, SEQ ID NO: 11008, SEQ ID NO: 11010, SEQ ID NO: 11013, SEQ ID NO: 11015, SEQ ID NO: 11017, SEQ ID NO: 11020, SEQ ID NO: 11022, SEQ ID NO: 11024, SEQ ID NO: 11026, SEQ ID NO: 11028, SEQ ID NO: 11031, SEQ ID NO: 11033, SEQ ID NO: 11037, SEQ ID NO: 11039, SEQ ID NO: 11041, SEQ ID NO: 11043, SEQ ID NO: 11045, SEQ ID NO: 11047, SEQ ID NO: 11049, SEQ ID NO: 11051, SEQ ID NO: 11053, SEQ ID NO: 11055, SEQ ID NO: 11057, SEQ ID NO: 11059, SEQ ID NO: 11061, SEQ ID NO: 11063, SEQ ID NO: 11065, SEQ ID NO: 11067, SEQ ID NO: 11069, SEQ ID NO: 11071, SEQ ID NO: 11073, SEQ ID NO: 11075, SEQ ID NO: 11077, SEQ ID NO: 11079, SEQ ID NO: 11081, SEQ ID NO: 11083, SEQ ID NO: 11085, SEQ ID NO: 11087, SEQ ID NO: 11089, SEQ ID NO: 11091, SEQ ID NO: 11094, SEQ ID NO: 11096, SEQ ID NO: 11098, SEQ ID NO: 11100, SEQ ID NO: 11102, SEQ ID NO: 11104, SEQ ID NO: 11106, SEQ ID NO: 11109, SEQ ID NO: 11111, SEQ ID NO: 11113, SEQ ID NO: 11115, SEQ ID NO: 11117, SEQ ID NO: 1119, SEQ ID NO: 11121, SEQ ID NO: 11124, SEQ ID NO: 11126, SEQ ID NO: 11128, SEQ ID NO: 11130, SEQ ID NO: 11132, SEQ ID NO: 11134, SEQ ID NO: 11136, SEQ ID NO: 11138, SEQ ID NO: 11140, SEQ ID NO: 11142, SEQ ID NO: 11144, SEQ ID NO: 11146, SEQ ID NO: 11149, SEQ ID NO: 11151, SEQ ID NO: 11153, SEQ ID NO: 11155, SEQ ID NO: 11157, SEQ ID NO: 11159, SEQ ID NO: 11161, SEQ ID NO: 11163, SEQ ID NO: 11166, SEQ ID NO: 11169, SEQ ID NO: 11171, SEQ ID NO: 11173, SEQ ID NO: 11175, SEQ ID NO: 11177, SEQ ID NO: 11180, SEQ ID NO: 11182, SEQ ID NO: 11184, SEQ ID NO: 11186, SEQ ID NO: 11188, SEQ ID NO: 11190, SEQ ID NO: 11192, SEQ ID NO: 11194,
SEQ ID NO: 11196, SEQ ID NO: 11198, SEQ ID NO: 11200, SEQ ID NO: 11202, SEQ ID NO: 11204, SEQ ID NO: 11206, SEQ ID NO: 11208, SEQ ID NO: 11210, SEQ ID NO: 11212, SEQ ID NO: 11214, SEQ ID NO: 11216, SEQ ID NO: 11218, SEQ ID NO: 11220, SEQ ID NO: 11222, SEQ ID NO: 11224, SEQ ID NO: 11226, SEQ ID NO: 11228, SEQ ID NO: 11230, SEQ ID NO: 11232, SEQ ID NO: 11234, SEQ ID NO: 11236, SEQ ID NO: 11238, SEQ ID NO: 11240, SEQ ID NO: 11242, SEQ ID NO: 11245, SEQ ID NO: 11247, SEQ ID NO: 11249, SEQ ID NO: 11251, SEQ ID NO: 11254, SEQ ID NO: 11256, SEQ ID NO: 11258, SEQ ID NO: 11260, SEQ ID NO: 11262, SEQ ID NO: 11264, SEQ ID NO: 11266, SEQ ID NO: 11268, SEQ ID NO: 11270, SEQ ID NO :11272, SEQ ID NO :11274, SEQ ID NO: 11276, SEQ ID NO: 11278, SEQ ID NO: 11280, SEQ ID NO: 11282, SEQ ID NO: 11284, SEQ ID NO: 11286, SEQ ID NO: 11288, SEQ ID NO: 11290, SEQ ID NO: 11292, SEQ ID NO: 11294, SEQ ID NO: 11296, SEQ ID NO: 11298, SEQ ID NO: 11300, SEQ ID NO: 11302, SEQ ID NO: 11305, SEQ ID NO: 11307, SEQ ID NO: 11309, SEQ ID NO: 11311, SEQ ID NO: 11313, SEQ ID NO: 11315, SEQ ID NO :11317, SEQ ID NO: 11320, SEQ ID NO: 11322, SEQ ID NO: 11324, SEQ ID NO: 11326, SEQ ID NO: 11328, SEQ ID NO: 11330, SEQ ID NO: 11332, SEQ ID NO: 11334, SEQ ID NO: 11336, SEQ ID NO: 11338, SEQ ID NO: 11340, SEQ ID NO: 11342, SEQ ID NO: 11344, SEQ ID NO: 11346, SEQ ID NO: 11348, SEQ ID NO: 11350, SEQ ID NO: 11353, SEQ ID NO: 11355, SEQ ID NO: 11357, SEQ ID NO: 11359, SEQ ID NO: 11361, SEQ ID NO: 11363, SEQ ID NO: 11365, SEQ ID NO: 11367, SEQ ID NO: 11371, SEQ ID NO: 11373, SEQ ID NO: 11375, SEQ ID NO: 11377, SEQ ID NO: 11379, SEQ ID NO: 11381, SEQ ID NO: 11383, SEQ ID NO: 11385, SEQ ID NO: 11387, SEQ ID NO: 11389, SEQ ID NO: 11391, SEQ ID NO: 11393, SEQ ID NO: 11395, SEQ ID NO: 11398, SEQ ID NO: 11400, SEQ ID NO: 11402,
SEQ ID NO: 11404, SEQ ID NO: 11406, SEQ ID NO: 11408, SEQ ID NO: 11410, SEQ ID NO: 11412, SEQ ID NO: 11414, SEQ ID NO: 11417, SEQ ID NO: 11420, SEQ ID NO: 11422, SEQ ID NO: 11424, SEQ ID NO: 11426, SEQ ID NO: 11428, SEQ ID NO: 11431, SEQ ID NO: 11433, SEQ ID NO: 11435, SEQ ID NO: 11438, SEQ ID NO: 11440, SEQ ID NO: 11442, SEQ ID NO: 11444, SEQ ID NO: 11446, SEQ ID NO: 11448, SEQ ID NO: 11450, SEQ ID NO: 11452, SEQ ID NO: 11454, SEQ ID NO: 11456, SEQ ID NO: 11458, SEQ ID NO: 11460, SEQ ID NO: 11462, SEQ ID NO: 11464, SEQ ID NO: 11466, SEQ ID NO: 11468, SEQ ID NO: 11471, SEQ ID NO: 11473, SEQ ID NO: 11475, SEQ ID NO: 11477, SEQ ID NO: 11479, SEQ ID NO: 11481, SEQ ID NO: 11483, SEQ ID NO: 11486, SEQ ID NO: 11488, SEQ ID NO: 11490, SEQ ID NO: 11492, SEQ ID NO: 11494, SEQ ID NO: 11497, SEQ ID NO: 11499, SEQ ID NO: 11501, SEQ ID NO: 11503, SEQ ID NO: 11505, SEQ ID NO: 11508, SEQ ID NO: 11510, SEQ ID NO: 11512, SEQ ID NO: 11514, SEQ ID NO: 11516, SEQ ID NO: 11518, SEQ ID NO: 11520, SEQ ID NO: 11522, SEQ ID NO: 11525, SEQ ID NO: 11527, SEQ ID NO: 11529, SEQ ID NO: 11531, SEQ ID NO: 11533, SEQ ID NO: 11535, SEQ ID NO: 11537, SEQ ID NO: 11539, SEQ ID NO: 11542, SEQ ID NO: 11544, SEQ ID NO: 11546, SEQ ID NO: 11548, SEQ ID NO: 11550, SEQ ID NO: 11552, SEQ ID NO: 11554, SEQ ID NO: 11556, SEQ ID NO: 11558, SEQ ID NO: 11563, SEQ ID NO: 11565, SEQ ID NO: 11567, SEQ ID NO: 11570, SEQ ID NO: 11572, SEQ ID NO: 11574, SEQ ID NO: 11576, SEQ ID NO: 11578, SEQ ID NO: 11580, SEQ ID NO: 11583, SEQ ID NO: 11585, SEQ ID NO: 11587, SEQ ID NO: 11589, SEQ ID NO: 11591, SEQ ID NO: 11593, SEQ ID NO: 11595, SEQ ID NO: 11597, SEQ ID NO: 11599, SEQ ID NO: 11601, SEQ ID NO: 11603, SEQ ID NO: 11605, SEQ ID NO: 11607, SEQ ID NO: 11610, SEQ ID NO: 11612, SEQ ID NO: 11614, SEQ ID NO: 11616, SEQ ID NO: 11618,
SEQ ID NO: 11621, SEQ ID NO: 11623, SEQ ID NO: 11625, SEQ ID NO: 11627, SEQ ID NO: 11629, SEQ ID NO: 11631, SEQ ID NO: 11633, SEQ ID NO: 11635, SEQ ID NO: 11637, SEQ ID NO: 11640, SEQ ID NO: 11642, SEQ ID NO: 11644, SEQ ID NO: 11646, SEQ ID NO: 11648, SEQ ID NO: 11650, SEQ ID NO: 11652, SEQ ID NO: 11655, SEQ ID NO: 11657, SEQ ID NO: 11660, SEQ ID NO: 11662, SEQ ID NO: 11664, SEQ ID NO: 11667, SEQ ID NO: 11669, SEQ ID NO: 11671, SEQ ID NO: 11673, SEQ ID NO: 11676, SEQ ID NO: 11679, SEQ ID NO: 11681, SEQ ID NO: 11683, SEQ ID NO: 11686, SEQ ID NO: 11688, SEQ ID NO: 11690, SEQ ID NO: 11692, SEQ ID NO: 11694, SEQ ID NO: 11696, SEQ ID NO: 11698, SEQ ID NO: 11700, SEQ ID NO: 11702, SEQ ID NO: 11704, SEQ ID NO: 11706, SEQ ID NO: 11708, SEQ ID NO: 11710, SEQ ID NO: 11712, SEQ ID NO: 11714, SEQ ID NO: 11716, SEQ ID NO: 11719, SEQ ID NO: 11721, SEQ ID NO: 11723, SEQ ID NO: 11725, SEQ ID NO: 11727, SEQ ID NO: 11729, SEQ ID NO: 11731, SEQ ID NO: 11733, SEQ ID NO: 11735, SEQ ID NO: 11737, SEQ ID NO: 11741, SEQ ID NO: 11743, SEQ ID NO: 11745, SEQ ID NO: 11747, SEQ ID NO: 11749, SEQ ID NO: 11751, SEQ ID NO: 11753, SEQ ID NO: 11755, SEQ ID NO: 11757, SEQ ID NO: 11760, SEQ ID NO: 11762, SEQ ID NO: 11764, SEQ ID NO: 11766, SEQ ID NO: 11769, SEQ ID NO: 11771, SEQ ID NO: 11773, SEQ ID NO: 11775, SEQ ID NO: 11777, SEQ ID NO: 11779, SEQ ID NO: 11781, SEQ ID NO: 11783, SEQ ID NO: 11785, SEQ ID NO: 11787, SEQ ID NO: 11789, SEQ ID NO: 11791, SEQ ID NO: 11793, SEQ ID NO: 11795, SEQ ID NO: 11797, SEQ ID NO: 11799, SEQ ID NO: 11801, SEQ ID NO: 11803, SEQ ID NO: 11805, SEQ ID NO: 11807, SEQ ID NO: 11809, SEQ ID NO: 11812, SEQ ID NO: 11814, SEQ ID NO: 11816, SEQ ID NO: 11818, SEQ ID NO: 11821, SEQ ID NO: 11823, SEQ ID NO: 11825, SEQ ID NO: 11827, SEQ ID NO: 11829, SEQ ID NO: 11831, SEQ ID NO: 11834,
SEQ ID NO: 11836, SEQ ID NO: 11838, SEQ ID NO: 11840, SEQ ID NO: 11842, SEQ ID NO: 11844, SEQ ID NO: 11846, SEQ ID NO: 11848, SEQ ID NO: 11852, SEQ ID NO: 11854, SEQ ID NO: 11857, SEQ ID NO: 11860, SEQ ID NO: 11862, SEQ ID NO: 11864, SEQ ID NO: 11866, SEQ ID NO: 11868, SEQ ID NO: 11872, SEQ ID NO: 11874, SEQ ID NO: 11876, SEQ ID NO: 11878, SEQ ID NO: 11881, SEQ ID NO: 11883, SEQ ID NO: 11885, SEQ ID NO: 11887, SEQ ID NO: 11889, SEQ ID NO: 11891, SEQ ID NO: 11894, SEQ ID NO: 11896, SEQ ID NO: 11898, SEQ ID NO: 11900, SEQ ID NO: 11902, SEQ ID NO: 11904, SEQ ID NO: 11906, SEQ ID NO: 11908, SEQ ID NO: 11910, SEQ ID NO: 11912, SEQ ID NO: 11914, SEQ ID NO: 11917, SEQ ID NO: 11920, SEQ ID NO: 11922, SEQ ID NO: 11924, SEQ ID NO: 11926, SEQ ID NO: 11929, SEQ ID NO: 11931, SEQ ID NO: 11933, SEQ ID NO: 11935, SEQ ID NO: 11937, SEQ ID NO: 11939, SEQ ID NO: 11941, SEQ ID NO: 11943, SEQ ID NO: 11945, SEQ ID NO: 11947, SEQ ID NO: 11950, SEQ ID NO: 11952, SEQ ID NO: 11954, SEQ ID NO: 11956, SEQ ID NO: 11958, SEQ ID NO: 11960, SEQ ID NO: 11962, SEQ ID NO: 11964, SEQ ID NO: 11966, SEQ ID NO: 11968, SEQ ID NO: 11970, SEQ ID NO: 11972, SEQ ID NO: 11974, SEQ ID NO: 11976, SEQ ID NO: 11979, SEQ ID NO: 11981, SEQ ID NO: 11983, SEQ ID NO: 11985, SEQ ID NO: 11987, SEQ ID NO: 11989, SEQ ID NO: 11991, SEQ ID NO: 11993, SEQ ID NO: 11995, SEQ ID NO: 11997, SEQ ID NO: 11999, SEQ ID NO: 12001, SEQ ID NO: 12004, SEQ ID NO: 12006, SEQ ID NO: 12009, SEQ ID NO: 12011, SEQ ID NO: 12013, SEQID NO: 12015, SEQID NO: 12017, SEQ ID NO: 12021, SEQID NO: 12023, SEQ ID NO: 12025, SEQ ID NO: 12027, SEQ ID NO: 12029, SEQ ID NO: 12031, SEQ ID NO: 12033, SEQ ID NO: 12035, SEQ ID NO: 12037, SEQ ID NO: 12039, SEQ ID NO: 12041, SEQ ID NO: 12043, SEQ ID NO: 12045, SEQ ID NO: 12047, SEQ ID NO: 12050, SEQ ID NO: 12052,
SEQ ID NO: 12054, SEQ ID NO: 12057, SEQ ID NO: 12059, SEQ ID NO: 12061, SEQ ID NO: 12063, SEQ ID NO: 12065, SEQ ID NO: 12067, SEQ ID NO: 12069, SEQ ID NO: 12071, SEQ ID NO: 12073, SEQ ID NO: 12075, SEQ ID NO: 12077, SEQ ID NO: 12079, SEQ ID NO: 12081, SEQ ID NO: 12083, SEQ ID NO: 12085, SEQ ID NO: 12087, SEQ ID NO: 12089, SEQ ID NO: 12091, SEQ ID NO: 12093, SEQ ID NO: 12095, SEQ ID NO: 12098, SEQ ID NO: 12100, SEQ ID NO: 12102, SEQ ID NO: 12104, SEQ ID NO: 12106, SEQ ID NO: 12108, SEQ ID NO: 12110, SEQ ID NO: 12112, SEQ ID NO: 12114, SEQ ID NO: 12116, SEQ ID NO: 12118, SEQ ID NO: 12120, SEQ ID NO: 12122, SEQ ID NO: 12124, SEQ ID NO: 12126, SEQ ID NO: 12128, SEQ ID NO: 12130, SEQ ID NO: 12132, SEQ ID NO: 12134, SEQ ID NO: 12136, SEQ ID NO: 12138, SEQ ID NO: 12140, SEQ ID NO: 12142, SEQ ID NO: 12144, SEQ ID NO: 12146, SEQ ID NO: 12148, SEQ ID NO: 12150, SEQ ID NO: 12152, SEQ ID NO: 12154, SEQ ID NO: 12156, SEQ ID NO: 12158, SEQ ID NO: 12160, SEQ ID NO: 12162, SEQ ID NO: 12164, SEQ ID NO: 12166, SEQ ID NO: 12168, SEQ ID NO: 12170, SEQ ID NO: 12172, SEQ ID NO: 12174, SEQ ID NO: 12176, SEQ ID NO: 12178, SEQ ID NO: 12180, SEQ ID NO: 12182, SEQ ID NO: 12184, SEQ ID NO: 12186, SEQ ID NO: 12188, SEQ ID NO: 12190, SEQ ID NO: 12192, SEQ ID NO: 12194, SEQ ID NO: 12196, SEQ ID NO: 12198, SEQ ID NO: 12200, SEQ ID NO: 12202, SEQ ID NO: 12204, SEQ ID NO: 12206, SEQ ID NO: 12208, SEQ ID NO: 12210, SEQ ID NO: 12212, SEQ ID NO: 12214, SEQ ID NO: 12217, SEQ ID NO: 12219, SEQ ID NO: 12221, SEQ ID NO: 12223, SEQ ID NO: 12225, SEQ ID NO: 12227, SEQ ID NO: 12229, SEQ ID NO: 12231, SEQ ID NO: 12233, SEQ ID NO: 12235, SEQ ID NO: 12237, SEQ ID NO: 12239, SEQ ID NO: 12241, SEQ ID NO: 12243, SEQ ID NO: 12245, SEQ ID NO: 12247, SEQ ID NO: 12249, SEQ ID NO: 12251, SEQ ID NO: 12253, SEQ ID NO: 12255,
SEQ ID NO: 12257, SEQ ID NO: 12259, SEQ ID NO: 12261, SEQ ID NO: 12263, SEQ ID NO: 12265, SEQ ID NO: 12267, SEQ ID NO: 12269, SEQ ID NO: 12271, SEQ ID NO: 12273, SEQ ID NO: 12275, SEQ ID NO: 12277, SEQ ID NO: 12280, SEQ ID NO: 12282, SEQ ID NO: 12284, SEQ ID NO: 12286, SEQ ID NO: 12288, SEQ ID NO: 12290, SEQ ID NO: 12292, SEQ ID NO: 12294, SEQ ID NO: 12296, SEQ ID NO: 12298, SEQ ID NO: 12300, SEQ ID NO: 12302, SEQ ID NO: 12304, SEQ ID NO: 12306, SEQ ID NO: 12308, SEQ ID NO: 12310, SEQ ID NO: 12312, SEQ ID NO: 12314, SEQ ID NO: 12316, SEQ ID NO: 12318, SEQ ID NO: 12320, SEQ ID NO: 12322, SEQ ID NO: 12324, SEQ ID NO: 12326, SEQ ID NO: 12328, SEQ ID NO: 12330, SEQ ID NO: 12332, SEQ ID NO: 12334, SEQ ID NO: 12336, SEQ ID NO: 12338, SEQ ID NO: 12340, SEQ ID NO: 12342, SEQ ID NO: 12344, SEQ ID NO: 12346, SEQ ID NO: 12348, SEQ ID NO: 12350, SEQ ID NO: 12352, SEQ ID NO: 12355, SEQ ID NO: 12357, SEQ ID NO: 12359, SEQ ID NO: 12361, SEQ ID NO: 12363, SEQ ID NO: 12365, SEQ ID NO: 12367, SEQ ID NO: 12369, SEQ ID NO: 12371, SEQ ID NO: 12373, SEQ ID NO: 12375, SEQ ID NO: 12377, SEQ ID NO: 12379, SEQ ID NO: 12381, SEQ ID NO: 12383, SEQ ID NO: 12385, SEQ ID NO: 12387, SEQ ID NO: 12389, SEQ ID NO: 12391, SEQ ID NO: 12393, SEQ ID NO: 12395, SEQ ID NO: 12397, SEQ ID NO: 12399, SEQ ID NO: 12401, SEQ ID NO: 12404, SEQ ID NO: 12406, SEQ ID NO: 12408, SEQ ID NO: 12411, SEQ ID NO: 12413, SEQ ID NO: 12415, SEQ ID NO: 12418, SEQ ID NO: 12420, SEQ ID NO: 12422, SEQ ID NO: 12424, SEQ ID NO: 12426, SEQ ID NO: 12428, SEQ ID NO: 12430, SEQ ID NO: 12432, SEQ ID NO: 12434, SEQ ID NO: 12437, SEQ ID NO: 12439, SEQ ID NO: 12441, SEQ ID NO: 12443, SEQ ID NO: 12445, SEQ ID NO: 12447, SEQ ID NO: 12449, SEQ ID NO: 12451, SEQ ID NO: 12453, SEQ ID NO: 12455, SEQ ID NO: 12457, SEQ ID NO: 12459, SEQ ID NO: 12462,
SEQ ID NO: 12464, SEQ ID NO: 12466, SEQ ID NO: 12468, SEQ ID NO: 12470, SEQ ID NO: 12472, SEQ ID NO: 12474, SEQ ID NO: 12476, SEQ ID NO: 12478, SEQ ID NO: 12480, SEQ ID NO: 12484, SEQ ID NO: 12487, SEQ ID NO: 12489, SEQ ID NO: 12492, SEQ ID NO: 12494, SEQ ID NO: 12497, SEQ ID NO: 12499, SEQ ID NO: 12501, SEQ ID NO: 12504, SEQ ID NO: 12506, SEQ ID NO: 12508, SEQ ID NO: 12510, SEQ ID NO: 12512, SEQ ID NO: 12515, SEQ ID NO: 12517, SEQ ID NO: 12519, SEQ ID NO: 12521, SEQ ID NO: 12523, SEQ ID NO: 12525, SEQ ID NO: 12527, SEQ ID NO: 12530, SEQ ID NO: 12532, SEQ ID NO: 12536, SEQ ID NO: 12538, SEQ ID NO: 12540, SEQ ID NO: 12542, SEQ ID NO: 12544, SEQ ID NO: 12547, SEQ ID NO: 12549, SEQ ID NO: 12551, SEQ ID NO: 12553, SEQ ID NO: 12558, SEQ ID NO: 12560, SEQ ID NO: 12562, SEQ ID NO: 12564, SEQ ID NO: 12566, SEQ ID NO: 12568, SEQ ID NO: 12570, SEQ ID NO: 12573, SEQ ID NO: 12575, SEQ ID NO: 12577, SEQ ID NO: 12579, SEQ ID NO: 12582, SEQ ID NO: 12584, SEQ ID NO: 12586, SEQ ID NO: 12588, SEQ ID NO: 12590, SEQ ID NO: 12594, SEQ ID NO: 12596, SEQ ID NO: 12598, SEQ ID NO: 12600, SEQ ID NO: 12602, SEQ ID NO: 12604, SEQ ID NO: 12606, SEQ ID NO: 12610, SEQ ID NO: 12612, SEQ ID NO: 12614, SEQ ID NO: 12616, SEQ ID NO: 12618, SEQ ID NO: 12620, SEQ ID NO: 12624, SEQ ID NO: 12626, SEQ ID NO: 12629, SEQ ID NO: 12631, SEQ ID NO: 12633, SEQ ID NO: 12635, SEQ ID NO: 12637, SEQ ID NO: 12639, SEQ ID NO: 12641, SEQ ID NO: 12643, SEQ ID NO: 12645, SEQ ID NO: 12647, SEQ ID NO: 12650, SEQ ID NO: 12652, SEQ ID NO: 12654, SEQ ID NO: 12656, SEQ ID NO: 12658, SEQ ID NO: 12661, SEQ ID NO: 12663, SEQ ID NO: 12666, SEQ ID NO: 12668, SEQ ID NO: 12670, SEQ ID NO: 12672, SEQ ID NO: 12674, SEQ ID NO: 12676, SEQ ID NO: 12678, SEQ ID NO: 12680, SEQ ID NO: 12682, SEQ ID NO: 12684, SEQ ID NO: 12686, SEQ ID NO: 12688,
SEQ ID NO: 12690, SEQ ID NO: 12692, SEQ ID NO: 12694, SEQ ID NO: 12696, SEQ ID NO: 12699, SEQ ID NO: 12701, SEQ ID NO: 12704, SEQ ID NO: 12706, SEQ ID NO: 12708, SEQ ID NO: 12712, SEQ ID NO: 12714, SEQ ID NO: 12716, SEQ ID NO: 12718, SEQ ID NO: 12720, SEQ ID NO: 12722, SEQ ID NO: 12724, SEQ ID NO: 12727, SEQ ID NO: 12729, SEQ ID NO: 12732, SEQ ID NO: 12734, SEQ ID NO: 12736, SEQ ID NO: 12738, SEQ ID NO: 12740, SEQ ID NO: 12742, SEQ ID NO: 12744, SEQ ID NO: 12746, SEQ ID NO: 12748, SEQ ID NO: 12750, SEQ ID NO: 12752, SEQ ID NO: 12755, SEQ ID NO: 12757, SEQ ID NO: 12759, SEQ ID NO: 12761, SEQ ID NO: 12766, SEQ ID NO: 12768, SEQ ID NO: 12772, SEQ ID NO: 12774, SEQ ID NO: 12777, SEQ ID NO: 12779, SEQ ID NO: 12782, SEQ ID NO: 12784, SEQ ID NO: 12786, SEQ ID NO: 12788, SEQ ID NO: 12790, SEQ ID NO: 12792, SEQ ID NO: 12794, SEQ ID NO: 12796, SEQ ID NO: 12802, SEQ ID NO: 12804, SEQ ID NO: 12807, SEQ ID NO: 12809, SEQ ID NO: 12811, SEQ ID NO: 12814, SEQ ID NO: 12816, SEQ ID NO: 12818, SEQ ID NO: 12820, SEQ ID NO: 12822, SEQ ID NO: 12824, SEQ ID NO: 12826, SEQ ID NO: 12828, SEQ ID NO: 12830, SEQ ID NO: 12832, SEQ ID NO: 12834, SEQ ID NO: 12836, SEQ ID NO: 12838, SEQ ID NO: 12840, SEQ ID NO: 12842, SEQ ID NO: 12844, SEQ ID NO: 12846, SEQ ID NO: 12849, SEQ ID NO: 12851, SEQ ID NO: 12853, SEQ ID NO: 12855, SEQ ID NO: 12857, SEQ ID NO: 12859, SEQ ID NO: 12861, SEQ ID NO: 12863, SEQ ID NO: 12865, SEQ ID NO: 12869, SEQ ID NO: 12872, SEQ ID NO: 12875, SEQ ID NO: 12877, SEQ ID NO: 12879, SEQ ID NO: 12882, SEQ ID NO: 12884, SEQ ID NO: 12886, SEQ ID NO: 12888, SEQ ID NO: 12890, SEQ ID NO: 12893, SEQ ID NO: 12895, SEQ ID NO: 12898, SEQ ID NO: 12900, SEQ ID NO: 12902, SEQ ID NO: 12904, SEQ ID NO: 12906, SEQ ID NO: 12908, SEQ ID NO: 12910, SEQ ID NO: 12912, SEQ ID NO: 12914, SEQ ID NO: 12917,
SEQ ID NO: 12919, SEQ ID NO: 12921, SEQ ID NO: 12924, SEQ ID NO: 12926, SEQ ID NO: 12928, SEQ ID NO: 12930, SEQ ID NO: 12932, SEQ ID NO: 12935, SEQ ID NO: 12937, SEQ ID NO: 12939, SEQ ID NO: 12942, SEQ ID NO: 12944, SEQ ID NO: 12946, SEQ ID NO: 12948, SEQ ID NO: 12951, SEQ ID NO: 12954, SEQ ID NO: 12957, SEQ ID NO: 12959, SEQ ID NO: 12962, SEQ ID NO: 12964, SEQ ID NO: 12968, SEQ ID NO: 12970, SEQ ID NO: 12972, SEQ ID NO: 12974, SEQ ID NO: 12976, SEQ ID NO: 12978, SEQ ID NO: 12980, SEQ ID NO: 12982, SEQ ID NO: 12984, SEQ ID NO: 12986, SEQ ID NO: 12988, SEQ ID NO: 12990, SEQ ID NO: 12992, SEQ ID NO: 12994, SEQ ID NO: 12996, SEQ ID NO: 12998, SEQ ID NO: 13000, SEQ ID NO: 13002, SEQ ID NO: 13004, SEQ ID NO: 13006, SEQ ID NO: 13008, SEQ ID NO: 13010, SEQ ID NO: 13012, SEQ ID NO: 13014, SEQ ID NO: 13016, SEQ ID NO: 13019, SEQ ID NO: 13022, SEQ ID NO: 13024, SEQ ID NO: 13026, SEQ ID NO: 13028, SEQ ID NO: 13030, SEQ ID NO: 13032, SEQ ID NO: 13034, SEQ ID NO: 13036, SEQ ID NO: 13038, SEQ ID NO: 13041, SEQ ID NO: 13043, SEQ ID NO: 13045, SEQ ID NO: 13047, SEQ ID NO: 13049, SEQ ID NO: 13051, SEQ ID NO: 13054, SEQ ID NO: 13056, SEQ ID NO: 13059, SEQ ID NO: 13062, SEQ ID NO: 13064, SEQ ID NO: 13066, SEQ ID NO: 13068, SEQ ID NO: 13070, SEQ ID NO: 13073, SEQ ID NO: 13075, SEQ ID NO: 13078, SEQ ID NO: 13080, SEQ ID NO: 13082, SEQ ID NO: 13084, SEQ ID NO: 13086, SEQ ID NO: 13090, SEQ ID NO: 13093, SEQ ID NO: 13095, SEQ ID NO: 13098, SEQ ID NO: 13100, SEQ ID NO: 13102, SEQ ID NO: 13104, SEQ ID NO: 13106, SEQ ID NO: 13111, SEQ ID NO: 13113, SEQ ID NO: 13115, SEQ ID NO: 13117, SEQ ID NO: 13121, SEQ ID NO: 13123, SEQ ID NO: 13126, SEQ ID NO: 13128, SEQ ID NO: 13130, SEQ ID NO: 13132, SEQ ID NO: 13134, SEQ ID NO: 13136, SEQ ID NO: 13138, SEQ ID NO: 13140, SEQ ID NO: 13142, SEQ ID NO: 13146,
SEQ ID NO: 13148, SEQ ID NO: 13150, SEQ ID NO: 13153, SEQ ID NO: 13155, SEQ ID NO: 13157, SEQ ID NO: 13159, SEQ ID NO: 13161, SEQ ID NO: 13163, SEQ ID NO: 13165, SEQ ID NO: 13167, SEQ ID NO: 13169, SEQ ID NO: 13171, SEQ ID NO: 13173, SEQ ID NO: 13175, SEQ ID NO: 13179, SEQ ID NO: 13182, SEQ ID NO: 13184, SEQ ID NO: 13186, SEQ ID NO: 13188, SEQ ID NO: 13190, SEQ ID NO: 13192, SEQ ID NO: 13194, SEQ ID NO: 13196, SEQ ID NO: 13199, SEQ ID NO: 13202, SEQ ID NO: 13204, SEQ ID NO: 13206, SEQ ID NO: 13208, SEQ ID NO: 13210, SEQ ID NO: 13212, SEQ ID NO: 13214, SEQ ID NO: 13217, SEQ ID NO: 13220, SEQ ID NO: 13223, SEQ ID NO: 13225, SEQ ID NO: 13227, SEQ ID NO: 13229, SEQ ID NO: 13231, SEQ ID NO: 13233, SEQ ID NO: 13236, SEQ ID NO: 13240, SEQ ID NO: 13244, SEQ ID NO: 13247, SEQ ID NO: 13249, SEQ ID NO: 13251, SEQ ID NO: 13253, SEQ ID NO: 13255, SEQ ID NO: 13258, SEQ ID NO: 13262, SEQ ID NO: 13265, SEQ ID NO: 13267, SEQ ID NO: 13269, SEQ ID NO: 13272, SEQ ID NO: 13274, SEQ ID NO: 13277, SEQ ID NO: 13281, SEQ ID NO: 13283, SEQ ID NO: 13285, SEQ ID NO: 13287, SEQ ID NO: 13289,
SEQ ID NO: 13295, SEQ ID NO: 13297, SEQ ID NO: 13299, SEQ ID NO: 13301, SEQ ID NO: 13303, SEQ ID NO: 13305, SEQ ID NO: 13308, SEQ ID NO: 13311, SEQ ID NO: 13313, SEQ ID NO: 13315, SEQ ID NO: 13317, SEQ ID NO: 13320, SEQ ID NO: 13323, SEQ ID NO: 13326, SEQ ID NO: 13329, SEQ ID NO: 13331, SEQ ID NO: 13335, SEQ ID NO: 13340, SEQ ID NO: 13343, SEQ ID NO: 13349, SEQ ID NO: 13353, SEQ ID NO: 13355, SEQ ID NO: 13358, SEQ ID NO: 13361, SEQ ID NO: 13364, SEQ ID NO: 13367, SEQ ID NO: 13373, SEQ ID NO: 13377, SEQ ID NO: 13380, SEQ ID NO: 13382, SEQ ID NO: 13384, SEQ ID NO: 13386, SEQ ID NO: 13388, SEQ ID NO: 13390, SEQ ID NO: 13392, SEQ ID NO: 13395, SEQ ID NO: 13397, SEQ ID NO: 13399, SEQ ID NO: 13401, SEQ ID NO: 13403, SEQ ID NO: 13405, SEQ ID NO: 13407, SEQ ID NO: 13409, SEQ ID NO: 13411, SEQ ID NO: 13413, SEQ ID NO: 13416, SEQ ID NO: 13419, SEQ ID NO: 13422, SEQ ID NO: 13424, SEQ ID NO: 13426, SEQ ID NO: 13429, SEQ ID NO: 13432, SEQ ID NO: 13435, SEQ ID NO: 13437, SEQ ID NO: 13446, SEQ ID NO: 13450, SEQ ID NO: 13452, SEQ ID NO: 13456, SEQ ID NO: 13459, SEQ ID NO: 13461, SEQ ID NO: 13464, SEQ ID NO: 13466, SEQ ID NO: 13468, SEQ ID NO: 13471, SEQ ID NO: 13475, SEQ ID NO: 13481, SEQ ID NO: 13487, SEQ ID NO: 13490, SEQ ID NO: 13493, SEQ ID NO: 13496, SEQ ID NO: 13499, SEQ ID NO: 13502, SEQ ID NO: 13504, SEQ ID NO: 13509, SEQ ID NO: 13511, SEQ ID NO: 13513, SEQ ID NO: 13516, SEQ ID NO: 13521, SEQ ID NO: 13525, SEQ ID NO: 13528, SEQ ID NO: 13530, SEQ ID NO: 13533, SEQ ID NO: 13537, SEQ ID NO: 13541, SEQ ID NO: 13543, SEQ ID NO: 13545, SEQ ID NO: 13548, SEQ ID NO: 13550, SEQ ID NO: 13552, SEQ ID NO: 13555, SEQ ID NO: 13558, SEQ ID NO: 13560, SEQ ID NO: 13564, SEQ ID NO: 13567, SEQ ID NO: 13569, SEQ ID NO: 13573, SEQ ID NO: 13575, SEQ ID NO: 13577, SEQ ID NO: 13579, SEQ ID NO: 13583,
SEQ ID NO: 13585, SEQ ID NO: 13587, SEQ ID NO: 13589, SEQ ID NO: 13593, SEQ ID NO: 13596, SEQ ID NO: 13598, SEQ ID NO: 13600, SEQ ID NO: 13602, SEQ ID NO: 13604, SEQ ID NO: 13606, SEQ ID NO: 13609, SEQ ID NO: 13611, SEQ ID NO: 13614, SEQ ID NO: 13616, SEQ ID NO: 13618, SEQ ID NO: 13628, SEQ ID NO: 13630, SEQ ID NO: 13632, SEQ ID NO: 13634, SEQ ID NO: 13636, SEQ ID NO: 13638, SEQ ID NO: 13641, SEQ ID NO: 13644, SEQ ID NO: 13646, SEQ ID NO: 13648, SEQ ID NO: 13650, SEQ ID NO: 13654, SEQ ID NO: 13659, SEQ ID NO: 13661, SEQ ID NO: 13663, SEQ ID NO: 13665, SEQ ID NO: 13667, SEQ ID NO: 13669, SEQ ID NO: 13671, SEQ ID NO: 13673, SEQ ID NO: 13677, SEQ ID NO: 13679, SEQ ID NO: 13681, SEQ ID NO: 13683, SEQ ID NO: 13686, SEQ ID NO: 13688, SEQ ID NO: 13691, SEQ ID NO: 13695, SEQ ID NO: 13697, SEQ ID NO: 13699, SEQ ID NO: 13702, SEQ ID NO: 13705, SEQ ID NO: 13707, SEQ ID NO: 13712, SEQ ID NO: 13714, SEQ ID NO: 13716, SEQ ID NO: 13719, SEQ ID NO: 13721, SEQ ID NO: 13723, SEQ ID NO: 13726, SEQ ID NO: 13730, SEQ ID NO: 13733, SEQ ID NO: 13737, SEQ ID NO: 13739, SEQ ID NO: 13741, SEQ ID NO: 13743, SEQ ID NO: 13745, SEQ ID NO: 13747, SEQ ID NO: 13752, SEQ ID NO: 13758, SEQ ID NO: 13768, SEQ ID NO: 13771, SEQ ID NO: 13773, SEQ ID NO: 13776, SEQ ID NO: 13781, SEQ ID NO: 13784, SEQ ID NO: 13787, SEQ ID NO: 13790, SEQ ID NO: 13792, SEQ ID NO: 13794, SEQ ID NO: 13801, SEQ ID NO: 13807, SEQ ID NO: 13811, SEQ ID NO: 13813, SEQ ID NO: 13815, SEQ ID NO: 13817, SEQ ID NO: 13820, SEQ ID NO: 13822, SEQ ID NO: 13825, SEQ ID NO: 13827, SEQ ID NO: 13830, SEQ ID NO: 13832, SEQ ID NO: 13835, SEQ ID NO: 13837, SEQ ID NO: 13840, SEQ ID NO: 13842, SEQ ID NO: 13844, SEQ ID NO: 13846, SEQ ID NO: 13848, SEQ ID NO: 13853, SEQ ID NO: 13855, SEQ ID NO: 13857, SEQ ID NO: 13859, SEQ ID NO: 13862, SEQ ID NO: 13864,
SEQ ID NO: 13866, SEQ ID NO: 13868, SEQ ID NO: 13871, SEQ ID NO: 13873, SEQ ID NO: 13875, SEQ ID NO: 13877, SEQ ID NO: 13880, SEQ ID NO: 13882, SEQ ID NO: 13884, SEQ ID NO: 13886, SEQ ID NO: 13888, SEQ ID NO: 13890, SEQ ID NO: 13894, SEQ ID NO: 13897, SEQ ID NO: 13899, SEQ ID NO: 13902, SEQ ID NO: 13907, SEQ ID NO: 13910, SEQ ID NO: 13913, SEQ ID NO: 13915, SEQ ID NO: 13917, SEQ ID NO: 13919, SEQ ID NO: 13921, SEQ ID NO: 13923, SEQ ID NO: 13925, SEQ ID NO: 13927, SEQ ID NO: 13929, SEQ ID NO: 13931, SEQ ID NO: 13934, SEQ ID NO: 13937, SEQ ID NO: 13939, SEQ ID NO: 13943, SEQ ID NO: 13945, SEQ ID NO: 13947, SEQ ID NO: 13949, SEQ ID NO: 13952, SEQ ID NO: 13955, SEQ ID NO: 13957, SEQ ID NO: 13960, SEQ ID NO: 13963, SEQ ID NO: 13968, SEQ ID NO: 13972, SEQ ID NO: 13974, SEQ ID NO: 13977, SEQ ID NO: 13980, SEQ ID NO: 13987, SEQ ID NO: 13991, SEQ ID NO: 13993, SEQ ID NO: 13995, SEQ ID NO: 13997, SEQ ID NO: 14000, SEQ ID NO: 14002, SEQ ID NO: 14004, SEQ ID NO: 14007, SEQ ID NO: 14009, SEQ ID NO: 14011, SEQ ID NO: 14017, SEQ ID NO: 14020, SEQ ID NO: 14022, SEQ ID NO: 14024, SEQ ID NO: 14027, SEQ ID NO: 14029, SEQ ID NO: 14032, SEQ ID NO: 14034, SEQ ID NO: 14036, SEQ ID NO: 14038, SEQ ID NO: 14040, SEQ ID NO: 14043, SEQ ID NO: 14046, SEQ ID NO: 14048, SEQ ID NO: 14051, SEQ ID NO: 14055, SEQ ID NO: 14057, SEQ ID NO: 14059, SEQ ID NO: 14061, SEQ ID NO: 14063, SEQ ID NO: 14065, SEQ ID NO: 14068, SEQ ID NO: 14070, SEQ ID NO: 14074, SEQ ID NO: 14078, SEQ ID NO: 14080, SEQ ID NO: 14082, SEQ ID NO: 14087, SEQ ID NO: 14089, SEQ ID NO: 14091, SEQ ID NO: 14093, SEQ ID NO: 14095, SEQ ID NO: 14097, SEQ ID NO: 14099, SEQ ID NO: 14101, SEQ ID NO: 14103, SEQ ID NO: 14105, SEQ ID NO: 14107, SEQ ID NO: 14109, SEQ ID NO: 14111, SEQ ID NO: 14113, SEQ ID NO: 14115, SEQ ID NO: 14117, SEQ ID NO: 14119,
SEQ ID NO: 14121, SEQ ID NO: 14123, SEQ ID NO: 14125, SEQ ID NO: 14127, SEQ ID NO: 14130, SEQ ID NO: 14132, SEQ ID NO: 14134, SEQ ID NO: 14136, SEQ ID NO: 14138, SEQ ID NO: 14140, SEQ ID NO: 14142, SEQ ID NO: 14144, SEQ ID NO: 14147, SEQ ID NO: 14149, SEQ ID NO: 14151, SEQ ID NO: 14153, SEQ ID NO: 14155, SEQ ID NO: 14157, SEQ ID NO: 14159, SEQ ID NO: 14161, SEQ ID NO: 14163, SEQ ID NO: 14166, SEQ ID NO: 14170, SEQ ID NO: 14172, SEQ ID NO: 14174, SEQ ID NO: 14176, SEQ ID NO: 14178, SEQ ID NO: 14180, SEQ ID NO: 14182, SEQ ID NO: 14184, SEQ ID NO: 14186, SEQ ID NO: 14189, SEQ ID NO: 14191, SEQ ID NO: 14193, SEQ ID NO: 14195, SEQ ID NO: 14197, SEQ ID NO: 14199, SEQ ID NO: 14201, SEQ ID NO: 14203, SEQ ID NO: 14205, SEQ ID NO: 14207, SEQ ID NO: 14209, SEQ ID NO: 14211, SEQ ID NO: 14213, SEQ ID NO: 14215, SEQ ID NO: 14218, SEQ ID NO: 14220, SEQ ID NO: 14222, SEQ ID NO: 14224, SEQ ID NO: 14226, SEQ ID NO: 14228, SEQ ID NO: 14230, SEQ ID NO: 14232, SEQ ID NO: 14234, SEQ ID NO: 14236, SEQ ID NO: 14238, SEQ ID NO: 14240, SEQ ID NO: 14242, SEQ ID NO: 14244, SEQ ID NO: 14246, SEQ ID NO: 14248, SEQ ID NO: 14250, SEQ ID NO: 14252, SEQ ID NO: 14254, SEQ ID NO: 14256, SEQ ID NO: 14258, SEQ ID NO: 14260, SEQ ID NO: 14262, SEQ ID NO: 14264, SEQ ID NO: 14267, SEQ ID NO: 14269, SEQ ID NO: 14271, SEQ ID NO: 14273, SEQ ID NO: 14275, SEQ ID NO: 14277, SEQ ID NO: 14279, SEQ ID NO: 14281, SEQ ID NO: 14283, SEQ ID NO: 14285, SEQ ID NO: 14288, SEQ ID NO: 14290, SEQ ID NO: 14292, SEQ ID NO: 14294, SEQ ID NO: 14296, SEQ ID NO: 14298, SEQ ID NO: 14301, SEQ ID NO: 14303, SEQ ID NO: 14306, SEQ ID NO: 14308, SEQ ID NO: 14310, SEQ ID NO: 14312, SEQ ID NO: 14314, SEQ ID NO: 14316, SEQ ID NO: 14318, SEQ ID NO: 14320, SEQ ID NO: 14322, SEQ ID NO: 14324, SEQ ID NO: 14326, SEQ ID NO: 14328, SEQ ID NO: 14331,
SEQ ID NO: 14334, SEQ ID NO: 14337, SEQ ID NO: 14340, SEQ ID NO: 14342, SEQ ID NO: 14346, SEQ ID NO: 14348, SEQ ID NO: 14350, SEQ ID NO: 14352, SEQ ID NO: 14354, SEQ ID NO: 14356, SEQ ID NO: 14358, SEQ ID NO: 14360, SEQ ID NO: 14362, SEQ ID NO: 14364, SEQ ID NO: 14366, SEQ ID NO: 14368, SEQ ID NO: 14370, SEQ ID NO: 14372, SEQ ID NO: 14374, SEQ ID NO: 14376, SEQ ID NO: 14379, SEQ ID NO: 14381, SEQ ID NO: 14383, SEQ ID NO: 14385, SEQ ID NO: 14387, SEQ ID NO: 14389, SEQ ID NO: 14391, SEQ ID NO: 14393, SEQ ID NO: 14396, SEQ ID NO: 14398, SEQ ID NO: 14401, SEQ ID NO: 14404, SEQ ID NO: 14406, SEQ ID NO: 14408, SEQ ID NO: 14410, SEQ ID NO: 14412, SEQ ID NO: 14414, SEQ ID NO: 14416, SEQ ID NO: 14418, SEQ ID NO: 14420, SEQ ID NO: 14423, SEQ ID NO: 14425, SEQ ID NO: 14427, SEQ ID NO: 14429, SEQ ID NO: 14431, SEQ ID NO: 14433, SEQ ID NO: 14435, SEQ ID NO: 14437, SEQ ID NO: 14440, SEQ ID NO: 14442, SEQ ID NO: 14444, SEQ ID NO: 14446, SEQ ID NO: 14448, SEQ ID NO: 14450, SEQ ID NO: 14452, SEQ ID NO: 14454, SEQ ID NO: 14456, SEQ ID NO: 14458, SEQ ID NO: 14460, SEQ ID NO: 14462, SEQ ID NO: 14466, SEQ ID NO: 14468, SEQ ID NO: 14470, SEQ ID NO: 14472, SEQ ID NO: 14474, SEQ ID NO: 14476, SEQ ID NO: 14478, SEQ ID NO: 14480, SEQ ID NO: 14482, SEQ ID NO: 14484, SEQ ID NO: 14486, SEQ ID NO: 14488, SEQ ID NO: 14490, SEQ ID NO: 14492, SEQ ID NO: 14494, SEQ ID NO: 14496, SEQ ID NO: 14498, SEQ ID NO: 14500, SEQ ID NO: 14502, SEQ ID NO: 14505, SEQ ID NO: 14507, SEQ ID NO: 14509, SEQ ID NO: 14511, SEQ ID NO: 14514, SEQ ID NO: 14516, SEQ ID NO: 14518, SEQ ID NO: 14520, SEQ ID NO: 14522, SEQ ID NO: 14524, SEQ ID NO: 14526, SEQ ID NO: 14530, SEQ ID NO: 14532, SEQ ID NO: 14534, SEQ ID NO: 14536, SEQ ID NO: 14538, SEQ ID NO: 14541, SEQ ID NO: 14543, SEQ ID NO: 14546, SEQ ID NO: 14548, SEQ ID NO: 14550,
SEQ ID NO: 14553, SEQ ID NO: 14555, SEQ ID NO: 14557, SEQ ID NO: 14559, SEQ ID NO: 14561, SEQ ID NO: 14563, SEQ ID NO: 14565, SEQ ID NO: 14567, SEQ ID NO: 14569, SEQ ID NO: 14571, SEQ ID NO: 14573, SEQ ID NO: 14575, SEQ ID NO: 14577, SEQ ID NO: 14579, SEQ ID NO: 14581, SEQ ID NO: 14583, SEQ ID NO: 14585, SEQ ID NO: 14587, SEQ ID NO: 14589, SEQ ID NO: 14591, SEQ ID NO: 14593, SEQ ID NO: 14596, SEQ ID NO: 14598, SEQ ID NO: 14600, SEQ ID NO: 14602, SEQ ID NO: 14604, SEQ ID NO: 14606, SEQ ID NO: 14608, SEQ ID NO: 14612, SEQ ID NO: 14614, SEQ ID NO: 14616, SEQ ID NO: 14618, SEQ ID NO: 14621, SEQ ID NO: 14623, SEQ ID NO: 14625, SEQ ID NO: 14627, SEQ ID NO: 14629, SEQ ID NO: 14631, SEQ ID NO: 14634, SEQ ID NO: 14636, SEQ ID NO: 14638, SEQ ID NO: 14640, SEQ ID NO: 14642, SEQ ID NO: 14645, SEQ ID NO: 14647, SEQ ID NO: 14649, SEQ ID NO: 14651, SEQ ID NO: 14653, SEQ ID NO: 14655, SEQ ID NO: 14657, SEQ ID NO: 14659, SEQ ID NO: 14661, SEQ ID NO: 14663, SEQ ID NO: 14665, SEQ ID NO: 14667, SEQ ID NO: 14669, SEQ ID NO: 14671, SEQ ID NO: 14673, SEQ ID NO: 14675, SEQ ID NO: 14677, SEQ ID NO: 14680, SEQ ID NO: 14682, SEQ ID NO: 14684, SEQ ID NO: 14687, SEQ ID NO: 14689, SEQ ID NO: 14691, SEQ ID NO: 14694, SEQ ID NO: 14696, SEQ ID NO: 14698, SEQ ID NO: 14701, SEQ ID NO: 14703, SEQ ID NO: 14705, SEQ ID NO: 14707, SEQ ID NO: 14709, SEQ ID NO: 14711, SEQ ID NO: 14714, SEQ ID NO: 14716, SEQ ID NO: 14718, SEQ ID NO: 14720, SEQ ID NO: 14723, SEQ ID NO: 14726, SEQ ID NO: 14728, SEQ ID NO: 14730, SEQ ID NO: 14733, SEQ ID NO: 14736, SEQ ID NO: 14739, SEQ ID NO: 14741, SEQ ID NO: 14743, SEQ ID NO: 14745, SEQ ID NO: 14747, SEQ ID NO: 14749, SEQ ID NO: 14751, SEQ ID NO: 14753, SEQ ID NO: 14756, SEQ ID NO: 14759, SEQ ID NO: 14761, SEQ ID NO: 14763, SEQ ID NO: 14765, SEQ ID NO: 14767, SEQ ID NO: 14769,
SEQ ID NO: 14771, SEQ ID NO: 14773, SEQ ID NO: 14775, SEQ ID NO: 14777, SEQ ID NO: 14779, SEQ ID NO: 14781, SEQ ID NO: 14783, SEQ ID NO: 14785, SEQ ID NO: 14787, SEQ ID NO: 14789, SEQ ID NO: 14791, SEQ ID NO: 14793, SEQ ID NO: 14795, SEQ ID NO: 14797, SEQ ID NO: 14799, SEQ ID NO: 14801, SEQ ID NO: 14803, SEQ ID NO: 14805, SEQ ID NO: 14807, SEQ ID NO: 14810, SEQ ID NO: 14813, SEQ ID NO: 14815, SEQ ID NO: 14817, SEQ ID NO: 14819, SEQ ID NO: 14821, SEQ ID NO: 14825, SEQ ID NO: 14827, SEQ ID NO: 14829, SEQ ID NO: 14832, SEQ ID NO: 14834, SEQ ID NO: 14836, SEQ ID NO: 14838, SEQ ID NO: 14840, SEQ ID NO: 14842, SEQ ID NO: 14844, SEQ ID NO: 14846, SEQ ID NO: 14848, SEQ ID NO: 14851, SEQ ID NO: 14853, SEQ ID NO: 14855, SEQ ID NO: 14857, SEQ ID NO: 14859, SEQ ID NO: 14861, SEQ ID NO: 14863, SEQ ID NO: 14866, SEQ ID NO: 14868, SEQ ID NO: 14870, SEQ ID NO: 14873, SEQ ID NO: 14875, SEQ ID NO: 14877, SEQ ID NO: 14879, SEQ ID NO: 14881, SEQ ID NO: 14883, SEQ ID NO: 14885, SEQ ID NO: 14887, SEQ ID NO: 14889, SEQ ID NO: 14891, SEQ ID NO: 14893, SEQ ID NO: 14895, SEQ ID NO: 14897, SEQ ID NO: 14899, SEQ ID NO: 14901, SEQ ID NO: 14903, SEQ ID NO: 14905, SEQ ID NO: 14907, SEQ ID NO: 14909, SEQ ID NO: 14911, SEQ ID NO: 14913, SEQ ID NO: 14915, SEQ ID NO: 14917, SEQ ID NO: 14920, SEQ ID NO: 14922, SEQ ID NO: 14926, SEQ ID NO: 14928, SEQ ID NO: 14930, SEQ ID NO: 14932, SEQ ID NO: 14934, SEQ ID NO: 14936, SEQ ID NO: 14939, SEQ ID NO: 14941, SEQ ID NO: 14943, SEQ ID NO: 14945, SEQ ID NO: 14947, SEQ ID NO: 14949, SEQ ID NO: 14951, SEQ ID NO: 14953, SEQ ID NO: 14955, SEQ ID NO: 14957, SEQ ID NO: 14959, SEQ ID NO: 14962, SEQ ID NO: 14964, SEQ ID NO: 14966, SEQ ID NO: 14968, SEQ ID NO: 14970, SEQ ID NO: 14972, SEQ ID NO: 14974, SEQ ID NO: 14976, SEQ ID NO: 14978, SEQ ID NO: 14980, SEQ ID NO: 14983,
SEQ ID NO: 14985, SEQ ID NO: 14989, SEQ ID NO: 14991, SEQ ID NO: 14995, SEQ ID NO: 14997, SEQ ID NO: 14999, SEQ ID NO: 15001, SEQ ID NO: 15003, SEQ ID NO: 15008, SEQ ID NO: 15010, SEQ ID NO: 15014, SEQ ID NO: 15016, SEQ ID NO: 15018, SEQ ID NO: 15020, SEQ ID NO: 15022, SEQ ID NO: 15024, SEQ ID NO: 15027, SEQ ID NO: 15030, SEQ ID NO: 15032, SEQ ID NO: 15034, SEQ ID NO: 15036, SEQ ID NO: 15038, SEQ ID NO: 15041, SEQ ID NO: 15043, SEQ ID NO: 15045, SEQ ID NO: 15047, SEQ ID NO: 15049, SEQ ID NO: 15052, SEQ ID NO: 15054, SEQ ID NO: 15056, SEQ ID NO: 15058, SEQ ID NO: 15061, SEQ ID NO: 15063, SEQ ID NO: 15065, SEQ ID NO: 15068, SEQ ID NO: 15070, SEQ ID NO: 15072, SEQ ID NO: 15074, SEQ ID NO: 15076, SEQ ID NO: 15079, SEQ ID NO: 15081, SEQ ID NO: 15083, SEQ ID NO: 15085, SEQ ID NO: 15087, SEQ ID NO: 15089, SEQ ID NO: 15092, SEQ ID NO: 15094, SEQ ID NO: 15097, SEQ ID NO: 15100, SEQ ID NO: 15102,SEQ ID NO: 15104,SEQ ID NO: 15106,SEQ ID NO: 15108,SEQ ID NO: 15110, SEQ ID NO: 15112, SEQ ID NO: 15114, SEQ ID NO: 15116, SEQ ID NO: 15118, SEQ ID NO: 15120, SEQ ID NO: 15122, SEQ ID NO: 15124, SEQ ID NO: 15126, SEQ ID NO: 15128, SEQ ID NO: 15131, SEQ ID NO: 15133, SEQ ID NO: 15135, SEQ ID NO: 15137, SEQ ID NO: 15139, SEQ ID NO: 15141, SEQ ID NO: 15143, SEQ ID NO: 15145, SEQ ID NO: 15149, SEQ ID NO: 15151, SEQ ID NO: 15153, SEQ ID NO: 15156, SEQ ID NO: 15158, SEQ ID NO: 15160, SEQ ID NO: 15162, SEQ ID NO: 15164, SEQ ID NO: 15166, SEQ ID NO: 15170, SEQ ID NO: 15172, SEQ ID NO: 15174, SEQ ID NO: 15176, SEQ ID NO: 15178, SEQ ID NO: 15180, SEQ ID NO: 15182, SEQ ID NO: 15184, SEQ ID NO: 15186, SEQ ID NO: 15188, SEQ ID NO: 15190, SEQ ID NO: 15193, SEQ ID NO: 15195, SEQ ID NO: 15197, SEQ ID NO: 15199, SEQ ID NO: 15202, SEQ ID NO: 15204, SEQ ID NO: 15206, SEQ ID NO: 15208, SEQ ID NO: 15210,
SEQ ID NO: 15212, SEQ ID NO: 15214, SEQ ID NO: 15216, SEQ ID NO: 15218, SEQ ID NO: 15221, SEQ ID NO: 15223, SEQ ID NO: 15225, SEQ ID NO: 15227, SEQ ID NO: 15229, SEQ ID NO: 15231, SEQ ID NO: 15233, SEQ ID NO: 15235, SEQ ID NO: 15237, SEQ ID NO: 15239, SEQ ID NO: 15241, SEQ ID NO: 15243, SEQ ID NO: 15245, SEQ ID NO: 15247, SEQ ID NO: 15249, SEQ ID NO: 15251, SEQ ID NO: 15253, SEQ ID NO: 15255, SEQ ID NO: 15257, SEQ ID NO: 15260, SEQ ID NO: 15262, SEQ ID NO: 15264, SEQ ID NO: 15266, SEQ ID NO: 15268, SEQ ID NO: 15270, SEQ ID NO: 15273, SEQ ID NO: 15275, SEQ ID NO: 15277, SEQ ID NO: 15279, SEQ ID NO: 15281, SEQ ID NO: 15284, SEQ ID NO: 15286, SEQ ID NO: 15288, SEQ ID NO: 15290, SEQ ID NO: 15293, SEQ ID NO: 15296, SEQ ID NO: 15299, SEQ ID NO: 15303, SEQ ID NO: 15306, SEQ ID NO: 15308, SEQ ID NO: 15310, SEQ ID NO: 15312, SEQ ID NO: 15314, SEQ ID NO: 15317, SEQ ID NO: 15320, SEQ ID NO: 15322, SEQ ID NO: 15324, SEQ ID NO: 15326, SEQ ID NO: 15328, SEQ ID NO: 15330, SEQ ID NO: 15332, SEQ ID NO: 15335, SEQ ID NO: 15337, SEQ ID NO: 15339, SEQ ID NO: 15341, SEQ ID NO: 15343, SEQ ID NO: 15345, SEQ ID NO: 15347, SEQ ID NO: 15349, SEQ ID NO: 15351, SEQ ID NO: 15353, SEQ ID NO: 15356, SEQ ID NO: 15358, SEQ ID NO: 15360, SEQ ID NO: 15362, SEQ ID NO: 15365, SEQ ID NO: 15367, SEQ ID NO: 15369, SEQ ID NO: 15371, SEQ ID NO: 15373, SEQ ID NO: 15375, SEQ ID NO: 15377, SEQ ID NO: 15379, SEQ ID NO: 15381, SEQ ID NO: 15383, SEQ ID NO: 15385, SEQ ID NO: 15387, SEQ ID NO: 15389, SEQ ID NO: 15392, SEQ ID NO: 15394, SEQ ID NO: 15398, SEQ ID NO: 15400, SEQ ID NO: 15402, SEQ ID NO: 15405, SEQ ID NO: 15408, SEQ ID NO: 15410, SEQ ID NO: 15413, SEQ ID NO: 15415, SEQ ID NO: 15418, SEQ ID NO: 15420, SEQ ID NO: 15422, SEQ ID NO: 15424, SEQ ID NO: 15426, SEQ ID NO: 15428, SEQ ID NO: 15430, SEQ ID NO: 15432,
SEQ ID NO: 15434, SEQ ID NO: 15437, SEQ ID NO: 15440, SEQ ID NO: 15444, SEQ ID NO: 15452, SEQ ID NO: 15454, SEQ ID NO: 15456, SEQ ID NO: 15458, SEQ ID NO: 15460, SEQ ID NO: 15462, SEQ ID NO: 15464, SEQ ID NO: 15466, SEQ ID NO: 15468, SEQ ID NO: 15470, SEQ ID NO: 15472, SEQ ID NO: 15474, SEQ ID NO: 15476, SEQ ID NO: 15479, SEQ ID NO: 15481, SEQ ID NO: 15483, SEQ ID NO: 15486, SEQ ID NO: 15488, SEQ ID NO: 15490, SEQ ID NO: 15493, SEQ ID NO: 15495, SEQ ID NO: 15499, SEQ ID NO: 15504, SEQ ID NO: 15506, SEQ ID NO: 15508, SEQ ID NO: 15512, SEQ ID NO: 15515, SEQ ID NO: 15517, SEQ ID NO: 15519, SEQ ID NO: 15521, SEQ ID NO: 15523, SEQ ID NO: 15526, SEQ ID NO: 15530, SEQ ID NO: 15532, SEQ ID NO: 15536, SEQ ID NO: 15538, SEQ ID NO: 15541, SEQ ID NO: 15543, SEQ ID NO: 15546, SEQ ID NO: 15549, SEQ ID NO: 15553, SEQ ID NO: 15555, SEQ ID NO: 15559, SEQ ID NO: 15562, SEQ ID NO: 15566, SEQ ID NO: 15568, SEQ ID NO: 15570, SEQ ID NO: 15572, SEQ ID NO: 15574, SEQ ID NO: 15576, SEQ ID NO: 15579, SEQ ID NO: 15583, SEQ ID NO: 15586, SEQ ID NO: 15588, SEQ ID NO: 15590, SEQ ID NO: 15595, SEQ ID NO: 15597, SEQ ID NO: 15600, SEQ ID NO: 15605, SEQ ID NO: 15609, SEQ ID NO: 15612, SEQ ID NO: 15614, SEQ ID NO: 15616, SEQ ID NO: 15618, SEQ ID NO: 15620, SEQ ID NO: 15622, SEQ ID NO: 15624, SEQ ID NO: 15626, SEQ ID NO: 15628, SEQ ID NO: 15631, SEQ ID NO: 15633, SEQ ID NO: 15635, SEQ ID NO: 15637, SEQ ID NO: 15639, SEQ ID NO: 15641, SEQ ID NO: 15643, SEQ ID NO: 15645, SEQ ID NO: 15647, SEQ ID NO: 15652, SEQ ID NO: 15654, SEQ ID NO: 15657, SEQ ID NO: 15659, SEQ ID NO: 15662, SEQ ID NO: 15664, SEQ ID NO: 15666, SEQ ID NO: 15668, SEQ ID NO: 15673, SEQ ID NO: 15678, SEQ ID NO: 15680, SEQ ID NO: 15682, SEQ ID NO: 15684, SEQ ID NO: 15686, SEQ ID NO: 15688, SEQ ID NO: 15691, SEQ ID NO: 15693, SEQ ID NO: 15696,
SEQ ID NO: 15698, SEQ ID NO: 15700, SEQ ID NO: 15702, SEQ ID NO: 15705, SEQ ID NO: 15708, SEQ ID NO: 15710, SEQ ID NO: 15712, SEQ ID NO: 15714, SEQ ID NO: 15716, SEQ ID NO: 15721, SEQ ID NO: 15724, SEQ ID NO: 15726, SEQ ID NO: 15730, SEQ ID NO: 15733, SEQ ID NO: 15736, SEQ ID NO: 15739, SEQ ID NO: 15741, SEQ ID NO: 15743, SEQ ID NO: 15745, SEQ ID NO: 15747, SEQ ID NO: 15750, SEQ ID NO: 15753, SEQ ID NO: 15755, SEQ ID NO: 15757, SEQ ID NO: 15759, SEQ ID NO: 15761, SEQ ID NO: 15763, SEQ ID NO: 15766, SEQ ID NO: 15768, SEQ ID NO: 15770, SEQ ID NO: 15772, SEQ ID NO: 15774, SEQ ID NO: 15776, SEQ ID NO: 15779, SEQ ID NO: 15782, SEQ ID NO: 15784, SEQ ID NO: 15786, SEQ ID NO: 15788, SEQ ID NO: 15790, SEQ ID NO: 15792, SEQ ID NO: 15794, SEQ ID NO: 15796, SEQ ID NO: 15798, SEQ ID NO: 15800, SEQ ID NO: 15803, SEQ ID NO: 15805, SEQ ID NO: 15807, SEQ ID NO: 15809, SEQ ID NO: 15811, SEQ ID NO: 15813, SEQ ID NO: 15815, SEQ ID NO: 15817, SEQ ID NO: 15822, SEQ ID NO: 15824, SEQ ID NO: 15826, SEQ ID NO: 15828, SEQ ID NO: 15834, SEQ ID NO: 15838, SEQ ID NO: 15840, SEQ ID NO: 15842, SEQ ID NO: 15844, SEQ ID NO: 15847, SEQ ID NO: 15849, SEQ ID NO: 15851, SEQ ID NO: 15854, SEQ ID NO: 15856, SEQ ID NO: 15858, SEQ ID NO: 15860, SEQ ID NO: 15862, SEQ ID NO: 15864, SEQ ID NO: 15868, SEQ ID NO: 15871, SEQ ID NO: 15873, SEQ ID NO: 15875, SEQ ID NO: 15877, SEQ ID NO: 15879, SEQ ID NO: 15884, SEQ ID NO: 15886, SEQ ID NO: 15888, SEQ ID NO: 15890, SEQ ID NO: 15894, SEQ ID NO: 15896, SEQ ID NO: 15898, SEQ ID NO: 15902, SEQ ID NO: 15904, SEQ ID NO: 15907, SEQ ID NO: 15911, SEQ ID NO: 15913, SEQ ID NO: 15915, SEQ ID NO: 15918, SEQ ID NO: 15921, SEQ ID NO: 15923, SEQ ID NO: 15925, SEQ ID NO: 15927, SEQ ID NO: 15931, SEQ ID NO: 15933, SEQ ID NO: 15935, SEQ ID NO: 15937, SEQ ID NO: 15939, SEQ ID NO: 15941,
SEQ ID NO: 15943, SEQ ID NO: 15945, SEQ ID NO: 15947, SEQ ID NO: 15949, SEQ ID NO: 15951, SEQ ID NO: 15953, SEQ ID NO: 15955, SEQ ID NO: 15957, SEQ ID NO: 15959, SEQ ID NO: 15961, SEQ ID NO: 15963, SEQ ID NO: 15965, SEQ ID NO: 15967, SEQ ID NO: 15969, SEQ ID NO: 15971, SEQ ID NO: 15973, SEQ ID NO: 15975, SEQ ID NO: 15977, SEQ ID NO: 15979, SEQ ID NO: 15981, SEQ ID NO: 15983, SEQ ID NO: 15985, SEQ ID NO: 15987, SEQ ID NO: 15989, SEQ ID NO: 15991, SEQ ID NO: 15994, SEQ ID NO: 15996, SEQ ID NO: 15998, SEQ ID NO: 16000, SEQ ID NO: 16002, SEQ ID NO: 16004, SEQ ID NO: 16006, SEQ ID NO: 16008, SEQ ID NO: 16010, SEQ ID NO: 16012, SEQ ID NO: 16014, SEQ ID NO: 16016, SEQ ID NO: 16018, SEQ ID NO: 16020, SEQ ID NO: 16022, SEQ ID NO: 16024, SEQ ID NO: 16026, SEQ ID NO: 16028, SEQ ID NO: 16030, SEQ ID NO: 16032, SEQ ID NO: 16034, SEQ ID NO: 16036, SEQ ID NO: 16038, SEQ ID NO: 16040, SEQ ID NO: 16042, SEQ ID NO: 16044, SEQ ID NO: 16046, SEQ ID NO: 16050, SEQ ID NO: 16053, SEQ ID NO: 16055, SEQ ID NO: 16058, SEQ ID NO: 16060, SEQ ID NO: 16062, SEQ ID NO: 16064, SEQ ID NO: 16066, SEQ ID NO: 16068, SEQ ID NO: 16070, SEQ ID NO: 16072, SEQ ID NO: 16074, SEQ ID NO: 16076, SEQ ID NO: 16078, SEQ ID NO: 16080, SEQ ID NO: 16082, SEQ ID NO: 16084, SEQ ID NO: 16086, SEQ ID NO: 16088, SEQ ID NO: 16090, SEQ ID NO: 16092, SEQ ID NO: 16094, SEQ ID NO: 16096, SEQ ID NO: 16098, SEQ ID NO: 16100, SEQ ID NO: 16102, SEQ ID NO: 16104, SEQ ID NO: 16106, SEQ ID NO: 16108, SEQ ID NO: 16110,
SEQ ID NO: 16221, SEQ ID NO: 16223, SEQ ID NO: 16227, SEQ ID NO: 16231, SEQ ID NO: 16234, SEQ ID NO: 16237, SEQ ID NO: 16239, SEQ ID NO: 16241, SEQ ID NO: 16244, SEQ ID NO: 16256, SEQ ID NO: 16263, SEQ ID NO: 16271, SEQ ID NO: 16288, SEQ ID NO: 16290, SEQ ID NO: 16292, SEQ ID NO: 16296, SEQ ID NO: 16298, SEQ ID NO: 16300, SEQ ID NO: 16302, SEQ ID NO: 16305, SEQ ID NO: 16311, SEQ ID NO: 16313, SEQ ID NO: 16326, SEQ ID NO: 16329, SEQ ID NO: 16335, SEQ ID NO: 16342, SEQ ID NO: 16344, SEQ ID NO: 16349, SEQ ID NO: 16355, SEQ ID NO: 16357, SEQ ID NO: 16361, SEQ ID NO: 16366, SEQ ID NO: 16368, SEQ ID NO: 16370, SEQ ID NO: 16375, SEQ ID NO: 16382, SEQ ID NO: 16386, SEQ ID NO: 16388, SEQ ID NO: 16390, SEQ ID NO: 16392, SEQ ID NO: 16397, SEQ ID NO: 16399, SEQ ID NO: 16405, SEQ ID NO: 16407, SEQ ID NO: 16410, SEQ ID NO: 16413, SEQ ID NO: 16415, SEQ ID NO: 16417, SEQ ID NO: 16419, SEQ ID NO: 16430, SEQ ID NO: 16432, SEQ ID NO: 16434, SEQ ID NO: 16439, SEQ ID NO: 16442, SEQ ID NO: 16444, SEQ ID NO: 16446, SEQ ID NO: 16463, SEQ ID NO: 16466, SEQ ID NO: 16468, SEQ ID NO: 16470, SEQ ID NO: 16472, SEQ ID NO: 16475, SEQ ID NO: 16477, SEQ ID NO: 16480, SEQ ID NO: 16482, SEQ ID NO: 16485, SEQ ID NO: 16488, SEQ ID NO: 16491, SEQ ID NO: 16493, SEQ ID NO: 16495, SEQ ID NO: 16498, SEQ ID NO: 16502, SEQ ID NO: 16504, SEQ ID NO: 16507, SEQ ID NO: 16510, SEQ ID NO: 16521, SEQ ID NO: 16523, SEQ ID NO: 16525, SEQ ID NO: 16528, SEQ ID NO: 16530, SEQ ID NO: 16533, SEQ ID NO: 16538, SEQ ID NO: 16541, SEQ ID NO: 16543, SEQ ID NO: 16545, SEQ ID NO: 16549, SEQ ID NO: 16551, SEQ ID NO: 16554, SEQ ID NO: 16556, SEQ ID NO: 16558, SEQ ID NO: 16560, SEQ ID NO: 16562, SEQ ID NO: 16566, SEQ ID NO: 16572, SEQ ID NO: 16582, SEQ ID NO: 16584, SEQ ID NO: 16587, SEQ ID NO: 16590, SEQ ID NO: 16592, SEQ ID NO: 16595,
SEQ ID NO: 16599, SEQ ID NO: 16602, SEQ ID NO: 16605, SEQ ID NO: 16610, SEQ ID NO: 16616, SEQ ID NO: 16619, SEQ ID NO: 16621, SEQ ID NO: 16623, SEQ ID NO: 16625, SEQ ID NO: 16630, SEQ ID NO: 16632, SEQ ID NO: 16634, SEQ ID NO: 16638, SEQ ID NO: 16641, SEQ ID NO: 16644, SEQ ID NO: 16663, SEQ ID NO: 16665, SEQ ID NO: 16674, SEQ ID NO: 16680, SEQ ID NO: 16685, SEQ ID NO: 16688, SEQ ID NO: 16690, SEQ ID NO: 16693, SEQ ID NO: 16699, SEQ ID NO: 16702, SEQ ID NO: 16704, SEQ ID NO: 16708, SEQ ID NO: 16712, SEQ ID NO: 16714, SEQ ID NO: 16723, SEQ ID NO: 16726, SEQ ID NO: 16728, SEQ ID NO: 16730, SEQ ID NO: 16732, SEQ ID NO: 16741, SEQ ID NO: 16743, SEQ ID NO: 16745, SEQ ID NO: 16747, SEQ ID NO: 16752, SEQ ID NO: 16763, SEQ ID NO: 16765, SEQ ID NO: 16767, SEQ ID NO: 16771, SEQ ID NO: 16776, SEQ ID NO: 16781, SEQ ID NO: 16784, SEQ ID NO: 16786, SEQ ID NO: 16788, SEQ ID NO: 16791, SEQ ID NO: 16793, SEQ ID NO: 16795, SEQ ID NO: 16797, SEQ ID NO: 16801, SEQ ID NO: 16804, SEQ ID NO: 16807, SEQ ID NO: 16809, SEQ ID NO: 16813, SEQ ID NO: 16815, SEQ ID NO: 16818, SEQ ID NO: 16822, SEQ ID NO: 16825, SEQ ID NO: 16845, SEQ ID NO: 16847, SEQ ID NO: 16849, SEQ ID NO: 16853, SEQ ID NO: 16855, SEQ ID NO: 16857, SEQ ID NO: 16863, SEQ ID NO: 16865, SEQ ID NO: 16870, SEQ ID NO: 16876, SEQ ID NO: 16879, SEQ ID NO: 16884, SEQ ID NO: 16892, SEQ ID NO: 16896, SEQ ID NO: 16901, SEQ ID NO: 16903, SEQ ID NO: 16909, SEQ ID NO: 16921, SEQ ID NO: 16925, SEQ ID NO: 16928, SEQ ID NO: 16935, SEQ ID NO: 16937, SEQ ID NO: 16939, SEQ ID NO: 16941, SEQ ID NO: 16943, SEQ ID NO: 16947, SEQ ID NO: 16954, SEQ ID NO: 16956, SEQ ID NO: 16960, SEQ ID NO: 16963, SEQ ID NO: 16965, SEQ ID NO: 16968, SEQ ID NO: 16971, SEQ ID NO: 16976, SEQ ID NO: 16980, SEQ ID NO: 16987, SEQ ID NO: 16990, SEQ ID NO: 16999, SEQ ID NO: 17003,
SEQ ID NO: 17019, SEQ ID NO: 17025, SEQ ID NO: 17028, SEQ ID NO: 17032, SEQ ID NO: 17038, SEQ ID NO: 17040, SEQ ID NO: 17042, SEQ ID NO: 17051, SEQ ID NO: 17053, SEQ ID NO: 17058, SEQ ID NO: 17060, SEQ ID NO: 17062, SEQ ID NO: 17064, SEQ ID NO: 17072, SEQ ID NO: 17074, SEQ ID NO: 17076, SEQ ID NO: 17079, SEQ ID NO: 17081, SEQ ID NO: 17083, SEQ ID NO: 17085, SEQ ID NO: 17087, SEQ ID NO: 17089, SEQ ID NO: 17091, SEQ ID NO: 17093, SEQ ID NO: 17095, SEQ ID NO: 17097, SEQ ID NO: 17099, SEQ ID NO: 17101, SEQ ID NO: 17104, SEQ ID NO: 17106, SEQ ID NO: 17109, SEQ ID NO: 17111, SEQ ID NO: 17113, SEQ ID NO: 17115, SEQ ID NO: 17117, SEQ ID NO: 17120, SEQ ID NO: 17122, SEQ ID NO: 17124, SEQ ID NO: 17127, SEQ ID NO: 17129, SEQ ID NO: 17131, SEQ ID NO: 17133, SEQ ID NO: 17135, SEQ ID NO: 17137, SEQ ID NO: 17140, SEQ ID NO: 17142, SEQ ID NO: 17144, SEQ ID NO: 17146, SEQ ID NO: 17148, SEQ ID NO: 17150, SEQ ID NO: 17152, SEQ ID NO: 17154, SEQ ID NO: 17156, SEQ ID NO: 17158, SEQ ID NO: 17161, SEQ ID NO: 17163, SEQ ID NO: 17165, SEQ ID NO: 17167, SEQ ID NO: 17169, SEQ ID NO: 17171, SEQ ID NO: 17173, SEQ ID NO: 17175, SEQ ID NO: 17177, SEQ ID NO: 17179, SEQ ID NO: 17181, SEQ ID NO: 17184, SEQ ID NO: 17186, SEQ ID NO: 17188, SEQ ID NO: 17191, SEQ ID NO: 17194, SEQ ID NO: 17196, SEQ ID NO: 17198, SEQ ID NO: 17200, SEQ ID NO: 17203, SEQ ID NO: 17205, SEQ ID NO: 17207, SEQ ID NO: 17211, SEQ ID NO: 17215, SEQ ID NO: 17217, SEQ ID NO: 17219, SEQ ID NO: 17221, SEQ ID NO: 17223, SEQ ID NO: 17225, SEQ ID NO: 17227, SEQ ID NO: 17229, SEQ ID NO: 17231, SEQ ID NO: 17233, SEQ ID NO: 17235, SEQ ID NO: 17237, SEQ ID NO: 17239, SEQ ID NO: 17241, SEQ ID NO: 17243, SEQ ID NO: 17245, SEQ ID NO: 17247, SEQ ID NO: 17250, SEQ ID NO: 17252, SEQ ID NO: 17254, SEQ ID NO: 17257, SEQ ID NO: 17260, SEQ ID NO: 17262,
SEQ ID NO: 17266, SEQ ID NO: 17269, SEQ ID NO: 17271, SEQ ID NO: 17273, SEQ ID NO: 17276, SEQ ID NO: 17278, SEQ ID NO: 17280, SEQ ID NO: 17282, SEQ ID NO: 17284, SEQ ID NO: 17286, SEQ ID NO: 17288, SEQ ID NO: 17291, SEQ ID NO: 17293, SEQ ID NO: 17295, SEQ ID NO: 17298, SEQ ID NO: 17301, SEQ ID NO: 17303, SEQ ID NO: 17306, SEQ ID NO: 17308, SEQ ID NO: 17311, SEQ ID NO: 17313, SEQ ID NO: 17317, SEQ ID NO: 17319, SEQ ID NO: 17321, SEQ ID NO: 17323, SEQ ID NO: 17325, SEQ ID NO: 17327, SEQ ID NO: 17329, SEQ ID NO: 17331, SEQ ID NO: 17333, SEQ ID NO: 17335, SEQ ID NO: 17337, SEQ ID NO: 17339, SEQ ID NO: 17342, SEQ ID NO: 17346, SEQ ID NO: 17348, SEQ ID NO: 17350, SEQ ID NO: 17352, SEQ ID NO: 17354, SEQ ID NO: 17357, SEQ ID NO: 17359, SEQ ID NO: 17361, SEQ ID NO: 17363, SEQ ID NO: 17367, SEQ ID NO: 17369, SEQ ID NO: 17373, SEQ ID NO: 17375, SEQ ID NO: 17379, SEQ ID NO: 17382, SEQ ID NO: 17384, SEQ ID NO: 17386, SEQ ID NO: 17389, SEQ ID NO: 17391, SEQ ID NO: 17394, SEQ ID NO: 17396, SEQ ID NO: 17400, SEQ ID NO: 17403, SEQ ID NO: 17405, SEQ ID NO: 17407, SEQ ID NO: 17409, SEQ ID NO: 17411, SEQ ID NO: 17413, SEQ ID NO: 17415, SEQ ID NO: 17417, SEQ ID NO: 17419, SEQ ID NO: 17421, SEQ ID NO: 17423, SEQ ID NO: 17425, SEQ ID NO: 17428, SEQ ID NO: 17431, SEQ ID NO: 17435, SEQ ID NO: 17439, SEQ ID NO: 17441, SEQ ID NO: 17444, SEQ ID NO: 17446, SEQ ID NO: 17448, SEQ ID NO: 17451, SEQ ID NO: 17453, SEQ ID NO: 17455, SEQ ID NO: 17458, SEQ ID NO: 17462, SEQ ID NO: 17464, SEQ ID NO: 17466, SEQ ID NO: 17469, SEQ ID NO: 17471, SEQ ID NO: 17473, SEQ ID NO: 17476, SEQ ID NO: 17478, SEQ ID NO: 17481, SEQ ID NO: 17483, SEQ ID NO: 17486, SEQ ID NO: 17488, SEQ ID NO: 17491, SEQ ID NO: 17493, SEQ ID NO: 17495, SEQ ID NO: 17497, SEQ ID NO: 17499, SEQ ID NO: 17501, SEQ ID NO: 17503, SEQ ID NO: 17505,
SEQ ID NO: 17507, SEQ ID NO: 17509, SEQ ID NO: 17511, SEQ ID NO: 17513, SEQ ID NO: 17515, SEQ ID NO: 17517, SEQ ID NO: 17519, SEQ ID NO: 17521, SEQ ID NO: 17523, SEQ ID NO: 17525, SEQ ID NO: 17528, SEQ ID NO: 17530, SEQ ID NO: 17534, SEQ ID NO: 17536, SEQ ID NO: 17538, SEQ ID NO: 17540, SEQ ID NO: 17542, SEQ ID NO: 17544, SEQ ID NO: 17546, SEQ ID NO: 17548, SEQ ID NO: 17550, SEQ ID NO: 17552, SEQ ID NO: 17554, SEQ ID NO: 17556, SEQ ID NO: 17558, SEQ ID NO: 17560, SEQ ID NO: 17562, SEQ ID NO: 17564, SEQ ID NO: 17566, SEQ ID NO: 17568, SEQ ID NO: 17570, SEQ ID NO: 17573, SEQ ID NO: 17575, SEQ ID NO: 17577, SEQ ID NO: 17580, SEQ ID NO: 17582, SEQ ID NO: 17584, SEQ ID NO: 17587, SEQ ID NO: 17590, SEQ ID NO: 17592, SEQ ID NO: 17595, SEQ ID) NO: 17597, SEQ ID NO: 17599, SEQ ID NO: 17601, SEQ ID NO: 17603, SEQ ID NO: 17605, SEQ ID NO: 17607, SEQ ID NO: 17609, SEQ ID NO: 17611, SEQ ID NO: 17613, SEQ ID NO: 17615, SEQ ID NO: 17617, SEQ ID NO: 17619, SEQ ID NO: 17621, SEQ ID NO: 17623, SEQ ID NO: 17625, SEQ ID NO: 17627, SEQ ID NO: 17629, SEQ ID NO: 17631, SEQ ID NO: 17633, SEQ ID NO: 17635, SEQ ID NO: 17637, SEQ ID NO: 17639, SEQ ID NO: 17641, SEQ ID NO: 17643, SEQ ID NO: 17645, SEQ ID NO: 17647, SEQ ID NO: 17651, SEQ ID NO: 17653, SEQ ID NO: 17655, SEQ ID NO: 17658, SEQ ID NO: 17661, SEQ ID NO: 17664, SEQ ID NO: 17667, SEQ ID NO: 17669, SEQ ID NO: 17671, SEQ ID NO: 17673, SEQ ID NO: 17675, SEQ ID NO: 17677, SEQ ID NO: 17679, SEQ ID NO: 17684, SEQ ID NO: 17686, SEQ ID NO: 17688, SEQ ID NO: 17690, SEQ ID NO: 17692, SEQ ID NO: 17694, SEQ ID NO: 17696, SEQ ID NO: 17698, SEQ ID NO: 17700, SEQ ID NO: 17702, SEQ ID NO: 17704, SEQ ID NO: 17707, SEQ ID NO: 17709, SEQ ID NO: 17711, SEQ ID NO: 17713, SEQ ID NO: 17715, SEQ ID NO: 17719, SEQ ID NO: 17725, SEQ ID NO: 17727, SEQ ID NO: 17731,
SEQ ID NO: 17734, SEQ ID NO: 17736, SEQ ID NO: 17738, SEQ ID NO: 17741, SEQ ID NO: 17743, SEQ ID NO: 17745, SEQ ID NO: 17749, SEQ ID NO: 17752, SEQ ID NO: 17755, SEQ ID NO: 17757, SEQ ID NO: 17760, SEQ ID NO: 17766, SEQ ID NO: 17772, SEQ ID NO: 17775, SEQ ID NO: 17777, SEQ ID NO: 17779, SEQ ID NO: 17782, SEQ ID NO: 17784, SEQ ID NO: 17786, SEQ ID NO: 17788, SEQ ID NO: 17791, SEQ ID NO: 17793, SEQ ID NO: 17796, SEQ ID NO: 17798, SEQ ID NO: 17800, SEQ ID NO: 17804, SEQ ID NO: 17808, SEQID NO: 17810, SEQ ID NO: 17812, SEQ ID NO: 17814, SEQ ID NO: 17816, SEQ ID NO: 17819, SEQ ID NO: 17821, SEQ ID NO: 17823, SEQ ID NO: 17825, SEQ ID NO: 17827, SEQ ID NO: 17829, SEQ ID NO: 17833, SEQ ID NO: 17835, SEQ ID NO: 17838, SEQ ID NO: 17840, SEQ ID NO: 17842, SEQ ID NO: 17844, SEQ ID NO: 17846, SEQ ID NO: 17854, SEQ ID NO: 17857, SEQ ID NO: 17862, SEQ ID NO: 17864, SEQ ID NO: 17866, SEQ ID NO: 17868, SEQ ID NO: 17873, SEQ ID NO: 17879, SEQ ID NO: 17882, SEQ ID NO: 17884, SEQ ID NO: 17887, SEQ ID NO: 17889, SEQ ID NO: 17891, SEQ ID NO: 17893, SEQ ID NO: 17897, SEQ ID NO: 17899, SEQ ID NO: 17901, SEQ ID NO: 17905, SEQ ID NO: 17908, SEQ ID NO: 17910, SEQ ID NO: 17913, SEQ ID NO: 17915, SEQ ID NO: 17921, SEQ ID NO: 17923, SEQ ID NO: 17927, SEQ ID NO: 17930, SEQ ID NO: 17933, SEQ ID NO: 17935, SEQ ID NO: 17937, SEQ ID NO: 17939, SEQ ID NO: 17944, SEQ ID NO: 17948, SEQ ID NO: 17950, SEQ ID NO: 17953, SEQ ID NO: 17955, SEQ ID NO: 17957, SEQ ID NO: 17960, SEQ ID NO: 17963, SEQ ID NO: 17968, SEQ ID NO: 17970, SEQ ID NO: 17972, SEQ ID NO: 17975, SEQ ID NO: 17977, SEQ ID NO: 17983, SEQ ID NO: 17988, SEQ ID NO: 17992, SEQ ID NO: 17994, SEQ ID NO: 17996, SEQ ID NO: 17998, SEQ ID NO: 18002, SEQ ID NO: 18007, SEQ ID NO: 18009, SEQ ID NO: 18011, SEQ ID NO: 18014, SEQ ID NO: 18018, SEQ ID NO: 18020,
SEQ ID NO: 18023, SEQ ID NO: 18025, SEQ ID NO: 18027, SEQ ID NO: 18029, SEQ ID NO: 18031, SEQ ID NO: 18033, SEQ ID NO: 18035, SEQ ID NO: 18037, SEQ ID NO: 18039, SEQ ID NO: 18041, SEQ ID NO: 18047, SEQ ID NO: 18049, SEQ ID NO: 18051, SEQ ID NO: 18053, SEQ ID NO: 18055, SEQ ID NO: 18057, SEQ ID NO: 18060, SEQ ID NO: 18062, SEQ ID NO: 18064, SEQ ID NO: 18067, SEQ ID NO: 18069, SEQ ID NO: 18073, SEQ ID NO: 18075, SEQ ID NO: 18077, SEQ ID NO: 18079, SEQ ID NO: 18081, SEQ ID NO: 18083, SEQ ID NO: 18085, SEQ ID NO: 18087, SEQ ID NO: 18089, SEQ ID NO: 18091, SEQ ID NO: 18093, SEQ ID NO: 18097, SEQ ID NO: 18100, SEQ ID NO: 18102, SEQ ID NO: 18106, SEQ ID NO: 18108, SEQ ID NO: 18111, SEQ ID NO: 18113, SEQ ID NO: 18115, SEQ ID NO: 18118, SEQ ID NO: 18122, SEQ ID NO: 18126, SEQ ID NO: 18128, SEQ ID NO: 18130, SEQ ID NO: 18132, SEQ ID NO: 18134, SEQ ID NO: 18136, SEQ ID NO: 18138, SEQ ID NO: 18141, SEQ ID NO: 18143, SEQ ID NO: 18145, SEQ ID NO: 18147, SEQ ID NO: 18149, SEQ ID NO: 18155, SEQ ID NO: 18158, SEQ ID NO: 18160, SEQ ID NO: 18164, SEQ ID NO: 18167, SEQ ID NO: 18169, SEQ ID NO: 18171, SEQ ID NO: 18173, SEQ ID NO: 18175, SEQ ID NO: 18177, SEQ ID NO: 18179, SEQ ID NO: 18181, SEQ ID NO: 18183, SEQ ID NO: 18185, SEQ ID NO: 18187, SEQ ID NO: 18189, SEQ ID NO: 18191, SEQ ID NO: 18193, SEQ ID NO: 18195, SEQ ID NO: 18197, SEQ ID NO: 18199, SEQ ID NO: 18202, SEQ ID NO: 18204, SEQ ID NO: 18206, SEQ ID NO: 18208, SEQ ID NO: 18211, SEQ ID NO: 18213, SEQ ID NO: 18215, SEQ ID NO: 18217, SEQ ID NO: 18219, SEQ ID NO: 18221, SEQ ID NO: 18223, SEQ ID NO: 18225, SEQ ID NO: 18228, SEQ ID NO: 18230, SEQ ID NO: 18232, SEQ ID NO: 18234, SEQ ID NO: 18237, SEQ ID NO: 18239, SEQ ID NO: 18241, SEQ ID NO: 18244, SEQ ID NO: 18246, SEQ ID NO: 18248, SEQ ID NO: 18250, SEQ ID NO: 18252, SEQ ID NO: 18255,
SEQ ID NO: 18257, SEQ ID NO: 18262, SEQ ID NO: 18267, SEQ ID NO: 18269, SEQ ID NO: 18271, SEQ ID NO: 18273, SEQ ID NO: 18275, SEQ ID NO: 18277, SEQ ID NO: 18279, SEQ ID NO: 18281, SEQ ID NO: 18283, SEQ ID NO: 18285, SEQ ID NO: 18287, SEQ ID NO: 18290, SEQ ID NO: 18292, SEQ ID NO: 18294, SEQ ID NO: 18296, SEQ ID NO: 18299, SEQ ID NO: 18301, SEQ ID NO: 18304, SEQ ID NO: 18306, SEQ ID NO: 18311, SEQ ID NO: 18313, SEQ ID NO: 18315, SEQ ID NO: 18317, SEQ ID NO: 18319, SEQ ID NO: 18322, SEQ ID NO: 18324, SEQ ID NO: 18326, SEQ ID NO: 18328, SEQ ID NO: 18330, SEQ ID NO: 18333, SEQ ID NO: 18336, SEQ ID NO: 18338, SEQ ID NO: 18340, SEQ ID NO: 18342, SEQ ID NO: 18344, SEQ ID NO: 18346, SEQ ID NO: 18348, SEQ ID NO: 18350, SEQ ID NO: 18352, SEQ ID NO: 18354, SEQ ID NO: 18356, SEQ ID NO: 18359, SEQ ID NO: 18361, SEQ ID NO: 18363, SEQ ID NO: 18365, SEQ ID NO: 18367, SEQ ID NO: 18369, SEQ ID NO: 18371, SEQ ID NO: 18373
SEQ ID NO: 18376, SEQ ID NO: 18380, SEQ ID NO: 18382, SEQ ID NO: 18384, SEQ ID NO: 18386, SEQ ID NO: 18388, SEQ ID NO: 18391, SEQ ID NO: 18393, SEQ ID NO: 18396, SEQ ID NO: 18400, SEQ ID NO: 18403, SEQ ID NO: 18405, SEQ ID NO: 18407, SEQ ID NO: 18409, SEQ ID NO: 18411, SEQ ID NO: 18415, SEQ ID NO: 18417, SEQ ID NO: 18419, SEQ ID NO: 18423, SEQ ID NO: 18425, SEQ ID NO: 18429, SEQ ID NO: 18431, SEQ ID NO: 18434, SEQ ID NO: 18436, SEQ ID NO: 18438, SEQ ID NO: 18440, SEQ ID NO: 18442, SEQ ID NO: 18445, SEQ ID NO: 18448, SEQ ID NO: 18450, SEQ ID NO: 18452, SEQ ID NO: 18455, SEQ ID NO: 18457, SEQ ID NO: 18459, SEQ ID NO: 18461, SEQ ID NO: 18463, SEQ ID NO: 18466, SEQ ID NO: 18469, SEQ ID NO: 18471, SEQ ID NO: 18473, SEQ ID NO: 18475, SEQ ID NO: 18477, SEQ ID NO: 18479, SEQ ID NO: 18481, SEQ ID NO: 18483, SEQ ID NO: 18485, SEQ ID NO: 18487, SEQ ID NO: 18490, SEQ ID NO: 18492, SEQ ID NO: 18494, SEQ ID NO: 18498, SEQ ID NO: 18506, SEQ ID NO: 18508, SEQ ID NO: 18510, SEQ ID NO: 18512, SEQ ID NO: 18514, SEQ ID NO: 18516, SEQ ID NO: 18518, SEQ ID NO: 18520, SEQ ID NO: 18522, SEQ ID NO: 18524, SEQ ID NO: 18526, SEQ ID NO: 18529, SEQ ID NO: 18532, SEQ ID NO: 18536, SEQ ID NO: 18538, SEQ ID NO: 18541, SEQ ID NO: 18546, SEQ ID NO: 18550, SEQ ID NO: 18552, SEQ ID NO: 18554, SEQ ID NO: 18556, SEQ ID NO: 18558, SEQ ID NO: 18562, SEQ ID NO: 18568, SEQ ID NO: 18572, SEQ ID NO: 18574, SEQ ID NO: 18576, SEQ ID NO: 18580, SEQ ID NO: 18582, SEQ ID NO: 18587, SEQ ID NO: 18590, SEQ ID NO: 18592, SEQ ID NO: 18594, SEQ ID NO: 18596, SEQ ID NO: 18598, SEQ ID NO: 18600, SEQ ID NO: 18602, SEQ ID NO: 18604, SEQ ID NO: 18606, SEQID NO: 18608, SEQ ID NO: 18611, SEQ ID NO: 18613, SEQ ID NO: 18615, SEQ ID NO: 18617, SEQ ID NO: 18619, SEQ ID NO: 18623, SEQ ID NO: 18625, SEQ ID NO: 18627, SEQ ID NO: 18629,
SEQ ID NO: 18631, SEQ ID NO: 18633, SEQ ID NO: 18635, SEQ ID NO: 18637, SEQ ID NO: 18639, SEQ ID NO: 18644, SEQ ID NO: 18646, SEQ ID NO: 18649, SEQ ID NO: 18651, SEQ ID NO: 18653, SEQ ID NO: 18655, SEQ ID NO: 18657, SEQ ID NO: 18660, SEQ ID NO: 18662, SEQ ID NO: 18665, SEQ ID NO: 18668, SEQ ID NO: 18672, SEQ ID NO: 18674, SEQ ID NO: 18676, SEQ ID NO: 18678, SEQ ID NO: 18680, SEQ ID NO: 18682, SEQ ID NO: 18686, SEQ ID NO: 18688, SEQ ID NO: 18691, SEQ ID NO: 18693, SEQ ID NO: 18695, SEQ ID NO: 18697, SEQ ID NO: 18699, SEQ ID NO: 18701, SEQ ID NO: 18703, SEQ ID NO: 18705, SEQ ID NO: 18709, SEQ ID NO: 18711, SEQ ID NO: 18713, SEQ ID NO: 18715, SEQ ID NO: 18717, SEQ ID NO: 18720, SEQ ID NO: 18722, SEQ ID NO: 18724, SEQ ID NO: 18726, SEQ ID NO: 18729, SEQ ID NO: 18731, SEQ ID NO: 18733, SEQ ID NO: 18735, SEQ ID NO: 18737, SEQ ID NO: 18739, SEQ ID NO: 18741, SEQ ID NO: 18743, SEQ ID NO: 18745, SEQ ID NO: 18747, SEQ ID NO: 18749, SEQ ID NO: 18751, SEQ ID NO: 18753, SEQ ID NO: 18759, SEQ ID NO: 18763, SEQ ID NO: 18765, SEQ ID NO: 18770, SEQ ID NO: 18773, SEQ ID NO: 18775, SEQ ID NO: 18777, SEQ ID NO: 18779, SEQ ID NO: 18781, SEQ ID NO: 18783, SEQ ID NO: 18785, SEQ ID NO: 18787, SEQ ID NO: 18790, SEQ ID NO: 18793, SEQ ID NO: 18795, SEQ ID NO: 18797, SEQ ID NO: 18800, SEQ ID NO: 18802, SEQ ID NO: 18804, SEQ ID NO: 18806, SEQ ID NO: 18809, SEQ ID NO: 18811, SEQ ID NO: 18813, SEQ ID NO: 18815, SEQ ID NO: 18817, SEQ ID NO: 18819, SEQ ID NO: 18822, SEQ ID NO: 18824, SEQ ID NO: 18826, SEQ ID NO: 18828, SEQ ID NO: 18830, SEQ ID NO: 18832, SEQ ID NO: 18834, SEQ ID NO: 18836, SEQ ID NO: 18840, SEQ ID NO: 18843, SEQ ID NO: 18847, SEQ ID NO: 18850, SEQ ID NO: 18853, SEQ ID NO: 18855, SEQ ID NO: 18857, SEQ ID NO: 18859, SEQ ID NO: 18862, SEQ ID NO: 18865, SEQ ID NO: 18868, SEQ ID NO: 18870,
SEQ ID NO: 18874, SEQ ID NO: 18876, SEQ ID NO: 18879, SEQ ID NO: 18882, SEQ ID NO: 18884, SEQ ID NO: 18888, SEQ ID NO: 18891, SEQ ID NO: 18894, SEQ ID NO: 18896, SEQ ID NO: 18898, SEQ ID NO: 18900, SEQ ID NO: 18902, SEQ ID NO: 18906, SEQ ID NO: 18908, SEQ ID NO: 18910, SEQ ID NO: 18912, SEQ ID NO: 18914, SEQ ID NO: 18916, SEQ ID NO: 18918, SEQ ID NO: 18920, SEQ ID NO: 18922, SEQ ID NO: 18924, SEQ ID NO: 18926, SEQ ID NO: 18929, SEQ ID NO: 18931, SEQ ID NO: 18933, SEQ ID NO: 18935, SEQ ID NO: 18937, SEQ ID NO: 18939, SEQ ID NO: 18942, SEQ ID NO: 18945, SEQ ID NO: 18948, SEQ ID NO: 18950, SEQ ID NO: 18952, SEQ ID NO: 18954, SEQ ID NO: 18961, SEQ ID NO: 18963, SEQ ID NO: 18965, SEQ ID NO: 18967, SEQ ID NO: 18971, SEQ ID NO: 18974, SEQ ID NO: 18977, SEQ ID NO: 18979,
SEQ ID NO: 18991, SEQ ID NO: 18994, SEQ ID NO: 18996, SEQ ID NO: 19003, SEQ ID NO: 19005
SEQ ID NO: 19008, SEQ ID NO: 19010, SEQ ID NO: 19015, SEQ ID NO: 19017, SEQ ID NO: 19019, SEQ ID NO: 19021, and SEQ ID NO: 19023
(c) a polynucleotide comprising a nucleotide sequence encoding a protein comprising an amino acid sequence selected from the amino acid sequences of (b), in which one or more amino acids are substituted, deleted, inserted, and/or added, wherein said protein is functionally equivalent to the protein comprising said amino acid sequence selected from the amino acid sequences of (b);
(d) a polynucleotide that hybridizes with a polynucleotide comprising a nucleotide sequence selected from the nucleotide sequences of (a), and that comprises a nucleotide sequence encoding a protein functionally equivalent to the protein encoded by the nucleotide sequence selected from the nucleotide sequences of (a);
(e) a polynucleotide comprising a nucleotide sequence encoding a partial amino acid sequence of a protein encoded by the polynucleotide of (a) to (d);
(f) a polynucleotide comprising a nucleotide sequence with at least 70% identity to the nucleotide sequence of (a).

9. A substantially pure protein encoded by the polynucleotide of claim 8.

10. An antibody against the protein or peptide of any one of claims 6, 7, and 9.

11. A vector comprising the polynucleotide of claim 5 or 8.

12. A transformant carrying the polynucleotide of claim 5 or 8, or the vector of claim 11.

13. A transformant expressively carrying the polynucleotide of claim 5 or 8, or the vector of claim 11.

14. A method for producing the protein or peptide of any one of claims 6, 7, and 9, comprising culturing the transformant of claim 13 and recovering the expression product.

15. An oligonucleotide comprising the nucleotide sequence of claim 8 (a) or the nucleotide sequence complementary to the complementary strand thereof, wherein said oligonucleotide comprises 15 nucleotides or more.

16. Use of the oligonucleotide of claim 15 as a primer for synthesizing a polynucleotide.

17. Use of the oligonucleotide of claim 15 as a probe for detecting a gene.

18. An antisense polynucleotide against the polynucleotide of claim 8, or the portion thereof.

19. A method for synthesizing a polynucleotide, the method comprising:
a) synthesizing a complementary strand using a cDNA library as a template, and using the primer set of claim 2 or 3, or the primer of claim 16; and
b) recovering the synthesized product.

20. The method of claim 19, wherein the cDNA library is obtainable by oligo-capping method.

21. The method of claim 19, wherein the complementary strand is obtainable by PCR.

22. A method for detecting the polynucleotide of claim 8, the method comprising:
a) incubating a target polynucleotide with the oligonucleotide of claim 15 under the conditions where hybridization occurs, and
b) detecting the hybridization of the target polynucleotide with the oligonucleotide of claim 15.

23. A database of polynucleotides and/or proteins, the database comprising information on at least one sequence selected from the nucleotide sequences of claim 8 (a) and/or the amino acid sequences of claim 8 (b), or a medium on which the database is stored.

The application's sequence listing, which the Patent Office published only in electronic form, follows.

SEQUENCE LISTING (19025 sequences)

SEQ ID NO: 1 - DNA, 855 bp, Homo sapiens
  misc_feature (661)..(661): "n" may be a, t, c, g, other or unknown
  misc_feature (693)..(693): "n" may be a, t, c, g, other or unknown
  misc_feature (746)..(746): "n" may be a, t, c, g, other or unknown
  misc_feature (841)..(841): "n" may be a, t, c, g, other or unknown
  misc_feature (849)..(849): "n" may be a, t, c, g, other or unknown
  misc_feature (854)..(854): "n" may be a, t, c, g, other or unknown
gcgcttttcactgacaggcgctgttccccacagccagcgccgcccgccacgtcccagctctcggccaacggagctgcgcggcgggtgacctttccgagcccagcgcgatgacggctccttgctcccagccggcgcagcttcctggacgccgccagctcgggctggtgccgttcccgccgccgccgccgcggacgccgctgctgtggctgctgctgctgctgctggccgccgtggcgccggcgcgcggctgggagagcggagacctggagttgtttgacttagtggaggaggtgcagctcaacttctaccagttcctcggggtgcagcaggatgcatcatctgcagacatcagaaaagcatatcgtaagctttcactaactttacatccagacaagaataaagatgaaaatgcagaaactcagtttagacaattggtggccatttatgaagttttaaaggatgatgaacgaaggcagaggtatgatgatattctgatcaatggacttccagattggcgacagcctgtattctactacaggcgggtgagaaaaatgagcaatgctgagctggcattactcttgttcattattctcacagtgggtcattatgctgtggtttggtcaatctacctggaaaaacaactggatgaactactaagtanaaaaaagagagaaaagaaaaaaaagactggancaagagtgtggatgtatcaaaactcgggtgcttcagaaaaaaaatgaaaagantgctgattgaaaccacagtgggcaatgatttgctttcaatgcaaaactgggggaattttgggttttgcccttaaaactaaaaagcaattacctcnacctcaanccaang

SEQ ID NO: 2 - DNA, 685 bp, Homo sapiens
  misc_feature (497)..(497): "n" may be a, t, c, g, other or unknown
  misc_feature (625)..(625): "n" may be a, t, c, g, other or unknown
  misc_feature (634)..(634): "n" may be a, t, c, g, other or unknown
  misc_feature (680)..(680): "n" may be a, t, c, g, other or unknown
cacaggcaacttcctcactttgacccaagctattgacaaattttcagcagatggaatgcgtttggctctggctgatgctggtgacactgtagaagatgccaactttgtggaagccatggcagatgcaggtattctccgtctgtacacctgggtagagtgggtgaaagaaatggttgccaactgggacagcctaagaagtggtcctgccagcactttcaatgatagagtttttgccagtgaattgaatgcaggaattataaaaacagatcaaaactatgaaaagatgatgtttaaagaagctttgaaaacagggttttttgagtttcaggccgcaaaagataagtaccgtgaattggctgtggaagggatgcacagagaacttgtgttccggtttattgaagttcagacacttctcctcgctccattctgtccacatttgtgtgagcacatctggacactcctgggaaagcctgactcaattatgaatgcttcatggnctgtggcaggtcctgttaatgaagttttaatacactcctcacagtatcttatggaagtaacacatgaccttagactacgactcaagaactatatgatgccagctaaagggaagaagactgacaaacancccctgcanaaagccctcacattgcaccaacctatgtggcaaagaaactatccancttgg

SEQ ID NO: 3 - DNA, 755 bp, Homo sapiens
  misc_feature (568)..(568): "n" may be a, t, c, g, other or unknown
  misc_feature (620)..(620): "n" may be a, t, c, g, other or unknown
  misc_feature (662)..(662): "n" may be a, t, c, g, other or unknown
  misc_feature (718)..(718): "n" may be a, t, c, g, other or unknown
  misc_feature (741)..(741): "n" may be a, t, c, g, other or unknown
agcactctgcgcgcccgctcttctgctgctgtttgtctacttcctcctgcttccccgccgccgccgccgccatcatgagggaaaacgtgcacttgcaggccgggcagtgcggcaaccaaatcggcgccaagttttgggaggtgatcagcgatgagcacggcatcgaccccacgggcacctaccacggggacagcgacctgcagctggaacgcatcaacgtgtactacaatgaggccaccggcggcaagtacgtgccccgcgccgtgctcgtggatctggagcccggcaccatggactccgtgcgctcggggcccttcgggcagatcttccagctgacccactccctgggtggggggactgggtctgggatgggtaccctcctcatcagcaagatccgggaggagtacccagacaggatcatgaacacgtttagtgtggtgccttcgcccaaagtgtcagacacagtggtggagccctacaacgccaccctctcagtccaccagctcgtagaaaacacagacgagacctactgcattgataacgaagctctctacgacatttgcttcanaaccctaaagctgaccacgcccacctatggtgacctgaaccacctggtgtcngctaccatgggtggggtcaccacctgcctgcgcttcccaggncagctcaatgctgacctgcggaagctgggtgtaaacatggtcccgtttcccgggtncacttcttcatgccccggctttngccccactgaacaa

SEQ ID NO: 4 - DNA, 752 bp, Homo sapiens
  misc_feature (478)..(478): "n" may be a, t, c, g, other or unknown
  misc_feature (576)..(576): "n" may be a, t, c, g, other or unknown
  misc_feature (711)..(711): "n" may be a, t, c, g, other or unknown
  misc_feature (721)..(721): "n" may be a, t, c, g, other or unknown
  misc_feature (737)..(737): "n" may be a, t, c, g, other or unknown
tttcccgccacggcagtggagccgacagtgactatgagaacacgcaaagtggggacccactgctggggctggaagggaagaggtttctagagctgggcaaagaggaagacttccacccagagctggaaagcctggatggagacctagatcctgggcttcccagcacagaggatgtcatcttgaagacagagcaggtcaccaagaacattcaggaactgttgcgggcagcccaggagttcaagcatgacagcttcgtgccctgctcagagaagatccatttggctgtgaccgagatggcctccctcttcccaaagaggccagccctggagccagtgcggagctcactgcggctgctcaacgccagcgcctaccggctgcagagtgagtgccggaagacagtgcccccagagcccggcgccccagtggacttccagctgctgactcagcaggtgatccagtgcgcctatgacatcgccanggctgccaagcagctggtcaccatcaccacccgagagaagaagcagtgacctctctccccacaccctcacctgcaccctaggacctcactggccatangagctgggccactccagacattaatccccaccccaacagagccactggcacaagtgcccttagtgctgccacactccctggcagccaggtgccctggtgccacccctgtcgagcccctaaggatggggaggtggnggggcagganctttctgtcccccaanattccaatggcacct

SEQ ID NO: 5 - DNA, 766 bp, Homo sapiens
  misc_feature (578)..(578): "n" may be a, t, c, g, other or unknown
  misc_feature (636)..(636): "n" may be a, t, c, g, other or unknown
  misc_feature (648)..(648): "n" may be a, t, c, g, other or unknown
  misc_feature (712)..(712): "n" may be a, t, c, g, other or unknown
  misc_feature (753)..(754): "n" may be a, t, c, g, other or unknown
ctatagtcaagctaatgacccatgtagatgtagtgttgtacctggtgtccgtgtccctgtgaatgtgtcatgttgtgctggcctgattccccaacatcagccccagggagccagcagctggagcagctgtcatcttgtgaaagcagagtgtccttgttgctattgattgggttgttcagtcaattgcaaaaaaagtggatctaactgtcaatggtagttatatgataatcctggagataaataagtgtcaagtgaagtattacttgaatttaggacctgaagagagagaaaggggtatgagtagttggaggggaagatttgctatgacaagctattattcagtgtggttattttgtatgacaggtaagtctacaggtatcttttgttagataaaccagaaattaagcattccctttgtaaactccaaacaagattttgaaacaccatggtccccccttatccacctccaagatctccagtggatgtctgaaaccactgatagtactgaagtctctatatattatgtttttcccctgtatgtaatacatacctgtgataaagtttaatttataaattangcacaggaagaaattaacaaaaataagtaagaatagaacagttataactatatgttcnattaaaagttangtgaatttgttttctgtctctctcaaaatatcctgttgtgctgtgtgttcaaccatttttgagnttccgttgacctggtggataacaaaaccacagaaaagttgnnacttcacataaa

SEQ ID NO: 6 - DNA, 739 bp, Homo sapiens
  misc_feature (499)..(499): "n" may be a, t, c, g, other or unknown
  misc_feature (621)..(621): "n" may be a, t, c, g, other or unknown
  misc_feature (674)..(674): "n" may be a, t, c, g, other or unknown
  misc_feature (701)..(701): "n" may be a, t, c, g, other or unknown
  misc_feature (726)..(726): "n" may be a, t, c, g, other or unknown
ttgtagaatgtaatctctggtaacactgactttaagaggcaatgagtgtgtgtgtgtgtgtgtatgtgtgtgagtgtatatatattcccataggctagcaaatgaaaactgacagtgaacttttcctctagctctgatagagtgactggcattgggcatttcctcctggcatagacaactctaaagctggtaaaatgtgcatgacaaatgttttaaggcattaaacaacaggcagcacagaactgtaattcttgagagaaaggaaacatgagaggtgaggctcagtttgccccagtgctctgcctgggaccgtttcctgcacatctccagcagaactgtggcctcactgacctgaggaggagattggagctgtggtctcagaagcagctgagatttggggagccaagtgcaagagcagaagctgaggacaagggtttccagaagtcttgatgaagactcattgctggtttttggctgaaggctgcccacaccatggcangcagtacacagggcctagcagtggttgccttctgcagggctgggaatgaatgaaggcattattgctatgcaccaccaaggagatgctggagctccagctcagccagaatggagagaactcantgagcatctcaagtcaggcattcagttgaaacctcagaaagtccacaccatancaagtaaaagctataccctcaaataangggccacaccttagcccataactangataagttcaagt

SEQ ID NO: 7 - DNA, 772 bp, Homo sapiens
  misc_feature (556)..(556): "n" may be a, t, c, g, other or unknown
  misc_feature (619)..(619): "n" may be a, t, c, g, other or unknown
  misc_feature (710)..(710): "n" may be a, t, c, g, other or unknown
  misc_feature (740)..(740): "n" may be a, t, c, g, other or unknown
  misc_feature (761)..(761): "n" may be a, t, c, g, other or unknown
gttaccatgctaaatgtaatgcgtttatttattattcagcaaaatctatggcagaggcattccaaatagtagctcgtggagaattaaaagtatcagggacttgtagaaatcttggtttctttatttttttaaagcatcagaaggtacttgaaagatgtgaacagataaattaaggctaaaaagaaaacagaaatggctacattttaaactgcctttctaccctcagtatttaattagatcaattgtatagaggaatgaacagaggtgacattcctcattgggattccttccaggactcttatagactttgcattcagaatgttcccattttcattgtgttgtactgatgataatttaagtattaggggaaaatccatttataaattaaacaaaatgacttgatatccatcagtcccctagttcatcaagctgttcaaacacggggaagattggctggtcggcctgggtcttccgagagcgctggtaattagatctgcgaaggatttattctttgctgattggggctttaaattaattgaagttccacatttgtggntttgtcctttttggacttttttagaggagatatttcatattcctgtgtggtggagtgcttggncaagcagcagtgggttaaatgttaatttttctcatgagaagtttaagattttttgatgaatcaagggctgatttgaagtgcaaagttgtanttgcttacctggggaaattattttttcacncctcaaaagatgccttggacnttaacttgatc

SEQ ID NO: 8 - DNA, 879 bp, Homo sapiens
  misc_feature (686)..(687): "n" may be a, t, c, g, other or unknown
  misc_feature (848)..(848): "n" may be a, t, c, g, other or unknown
  misc_feature (859)..(859): "n" may be a, t, c, g, other or unknown
  misc_feature (870)..(870): "n" may be a, t, c, g, other or unknown
agggcgggtggagtcgcggagtagtcctcatggccgccccgccggagcccggtgagcccgaggagaggaagtcccttaagctcctaggatttttagatgttgaaaatactccctgcgcccggcattcaatattgtatggttcattaggatctgttgtggctggctttggacattttttgttcactagtagaattagaagatcatgtgatgttggagtaggagggtttatcttggtgactttgggatgctggtttcattgtaggtataattatgcaaagcaaagaatccaggaaagaattgccagagaagaaattaaaaagaagatattatatgaaggtacccacctcgatcctgaaagaaaacacaacggcagcagcagcaattgaacaatcttgagcatagaagtcaatgtaaacgaagttaagatcaaccacataaaacatttcatgtgcaataagctctcaatcaagtaaataaagtttaagttgtagtcatttttttcccacacttgtgtggaatgaaaacttgccaatttattctggccctgtgtctactgccaggatagcattcttacgtgttacatatagtggacttgtcatccttaaaatgtgaacagaatttattggcaagtgtggcaaagaattataaaacatagtgtttaatgtacttggagtttccttgtagtnngtaagtatagagtttgatgataagtaaacgtcccttaacaaaaacctcaaccttattactaatcccattaaaaaaacagcaaatacttactgagttcctgtaagagcctaatgtcatggtagatttaaaccaaggggcttttaacactttgcaaaatttanttttttaaatngcattcaacanttggcaaag

SEQ ID NO: 9 - DNA, 758 bp, Homo sapiens
  misc_feature (645)..(645): "n" may be a, t, c, g, other or unknown
  misc_feature (695)..(695): "n" may be a, t, c, g, other or unknown
  misc_feature (708)..(708): "n" may be a, t, c, g, other or unknown
  misc_feature (758)..(758): "n" may be a, t, c, g, other or unknown
cactgttctaaaaatacatatgattatagctgccactccatcaggagcaaattcttctgttaaaagctaactgatcaaccttgaccacttttttgacatgtgagatcaaagtgtcaagttggctgaggttttttggaaagctttagaactaataagctgctggtggcagctttgtaacgtatgattatctaagctgattttgatgctaaattatcttagtgatctaaggggcagtttagtgaagatggaatcttgtatttaaaatagccttttaaaatttgttttgtgatgatgtattttgacaacttccatctttaggagttatataatcaccttgattttagtttcctgatgtttggactatttataatcaaggacaccaagcaagcataagcatatctatatttctgactggtgtctctttgagaaggatgggaagtagaaaaaaaaaaaaaagaaagaaaggaaaggaagagaggagagaagaaggcagggatctccactatgcatgttttcactttagaactgttgagcccatgcttaattttaatctagaagtctttaaatggtgagacagtgactggagcatgccaatcagagagcatttgtcctcagaaaaaaaaaaaaatctgagtttgagactancctggccaacatgttgaaacccccattcctacaaaaaatacaaaaattancctggtggtggtngcgcacgcctgtagtcccaagctactccgggagcctgagggaacgtgaan

SEQ ID NO: 10 - DNA, 713 bp, Homo sapiens
  misc_feature (572)..(572): "n" may be a, t, c, g, other or unknown
  misc_feature (575)..(575): "n" may be a, t, c, g, other or unknown
  misc_feature (597)..(597): "n" may be a, t, c, g, other or unknown
  misc_feature (677)..(677): "n" may be a, t, c, g, other or unknown
  misc_feature (699)..(699): "n" may be a, t, c, g, other or unknown
  misc_feature (701)..(701): "n" may be a, t, c, g, other or unknown
agtttcaagtttccatttctgatttctgctctctgcgctgagcacagcggcaccaggctgagctaagcagggccgccttgggcaggcctacgtggtggtgcaggcgagacccaggctgggcaaggcgcagtttcagtttccatcttgggtctctgagctgagcagagtggcaccaggctgagttaagtgggactgccctgggcagacctacctactagagcagaatggagcttcggtcctaccaatgggaggtgatcatgcctgccctggagggcaagaatatcatcatctggctgcccacgggtgccgggaagacccgggcggctgcttatgtggccaagcggcacctagagactgtggatggagccaaggtggttgtattggtcaacagggtgcacctggtgacccagcatggtgaagagttcaggcgcatgctggatggacgctggaccgtgacaaccctgagtggggacatgggaccacgtgctggctttggccacctggcccggtgccatgacctgctcatctgcacagcagagcttctgcagatggcactgaccagccccgaggangangagcacgtggagctcactgtcntctccctgatcgtggtgggatgagtgccaacacacgcacaaggacaccgtctacaacgtcatcatgaagccagtacctanaacttaaactccaaaggggaananccgctaacccca

SEQ ID NO: 11 - DNA, 823 bp, Homo sapiens
  misc_feature (660)..(660): "n" may be a, t, c, g, other or unknown
  misc_feature (760)..(760): "n" may be a, t, c, g, other or unknown
  misc_feature (800)..(800): "n" may be a, t, c, g, other or unknown
  misc_feature (812)..(812): "n" may be a, t, c, g, other or unknown
tacgaagcattccagaagactcagagttaaatacagttacattgccaagaaaagcaagaatgaaagaccagtttggcaattctattatcaacacacctctgaaacgtcgtaaagtgttttctcaagaacctccagatgctttagctttaagctgccaaagttcctttgacagtgtcattttaaactgtcgaagtatacgagtaggaacactcttccggctgttaatagagcctgtaattttttgtttagattttatcaagatacagctagacgaaccagaccatgatcctgtagagattatattaaatacctctgatctaactaaatgtgaatggtgtaatgtccgaaaattacctgtagtgtttcttcaagcaattccagcagtttatcaaaagctgagcatccaactgcaaatgaataaggaggataaagtttggaatgattgtaaaggagtaaataaattaacaaatttagaagaacaatatataattttaatttttcaaaatggccttgatcctccggcaaatatggtatttgaaagtatcattaatgaaattggtataaagaataacatctccaatttttttgcgaaaattccctttgaagaagctaatggcagacttgttgcctgtacaagaacctatgaagagagcatcaaanggaagttgtggggcaaaagggaaacaaaattaaaactgtatcatttgaatctaaaatacaacttaagaagcaaacaagaatttcagttttttggatgaangaaagaaggaaactgggagaaaaccacaccaatcttcaantgggcccaagtngaaaaaggttg

SEQ ID NO: 12 - DNA, 603 bp, Homo sapiens
  misc_feature (122)..(122): "n" may be a, t, c, g, other or unknown
  misc_feature (415)..(415): "n" may be a, t, c, g, other or unknown
  misc_feature (448)..(448): "n" may be a, t, c, g, other or unknown
  misc_feature (555)..(555): "n" may be a, t, c, g, other or unknown
  misc_feature (567)..(567): "n" may be a, t, c, g, other or unknown
  misc_feature (579)..(579): "n" may be a, t, c, g, other or unknown
ggaaggctgaggcaggagaatcgcttgaacccgggaggcggaggttgcagtgagccaagttcgcaccactgcactccagcctgggcaacaagagcgagacttcatctcaaaagaaaaaaaanaaagaaaaagctgccccatcgcatcgcatagaggctgctatgggattagaacgtagcttgagatctgcaggtcaacaggtctgtttggcatctcaggttttcctcacataagtgaaagatgcctggtatggcctagtgttgttctgcctccctcctctgcccgccaggtatacatggactggtacgagaagttccaggacaggctcaacaagaaggtggtactcctgacaggcgagaccagcacagacctgaagctgctgggcaaagggaacattatcatcagcacccctganaagtgggacatactttcccggcgatggaagcancgcaagaacgtgcagaacatcaacctcttcgtggtggatgaggtccaccttatcgggggcgataatggggtatggcgttccttgcagcacagatgagggactgggantgaccaagtggncttggcattggncctaatgtttgggtctgaggacgg

SEQ ID NO: 13 - DNA, 744 bp, Homo sapiens
  misc_feature (469)..(469): "n" may be a, t, c, g, other or unknown
  misc_feature (647)..(647): "n" may be a, t, c, g, other or unknown
  misc_feature (663)..(663): "n" may be a, t, c, g, other or unknown
  misc_feature (702)..(702): "n" may be a, t, c, g, other or unknown
aagatggctgccgctaccggtgcggtggcagcctcggccgcctcgggtcaggcggaaggtaaaaagatcaccgatctgcgggtcatcgatctgaagtccgagctgaagcggcggaacttagacatcaccggagtcaagaccgtgctcatctcccgactcaagcaggctattgaagaggaaggaggcgatccagataatattgaattaactgtttcaactgatactccaaacaagaaaccaactaaaggcaaaggtaaaaaacatgaagcagatgagttgagtggagatgcttctgtggaagatgatgcttttatcaaggactgtgaattggagaatcaagaggcacatgagcaagatggaaatgatgaactaaaggactttgaagaatttggtgaaaatgaagaagaaaatgtgcattccaaggagttactctctgcagaagaaaacaagagagctcatgaattaatanaggcagaaggaatagaagatatagaaaaagaggacatcgaaagtcaggaaattgaagctcaagaaggtgaagatgatacctttctaacagcccaagatggtgaggaagaagaaaatgagaaagatatagcaggttctggtgatggtacacaaggaagtatctaaacctcttccttcanaagggaacctactgangctgatcacacagctcatgaagagattggaaagctcatncgaactgtgaaagaagctgagggatgacaaaatctccgggca

SEQ ID NO: 14 - DNA, 782 bp, Homo sapiens
  misc_feature (707)..(707): "n" may be a, t, c, g, other or unknown
  misc_feature (750)..(750): "n" may be a, t, c, g, other or unknown
  misc_feature (761)..(761): "n" may be a, t, c, g, other or unknown
acccatctacagcaagaagacggaaatccaaaggcagacagtacgggctcccttcgccaaactcttcattttctctgcacttcaggtggcaagacagctccttcttcagcagcaacagcagcagcaagttagtggattaaaatctcccaagaggaatgacaaacaaccagctcttcaggttcccgtgtcagtggctatgatgacacctcaagttatcactccccagcaaatgcagcagatcctccagcaacaagtgctgagccctcagcagctccaggttctcctccagcagcagcaggccctcatgcttcaacagcagcagcttcaagagttttataaaaaacaacaggaacagttgcagcttcaacttttacaacaacaacatgctggaaaacagcctaaagagcaacagcgggtggctacccagcagttggcttttcagcagcagcttttacagatgcagcagttacagcaagcagcacctcctgtctttgcaagcgccaaggccttgtgacaattcaagcccgggcagcctgcccttccccttcaacctcttgctcaaggcatgattccaacagaactgcagcagctctggaaagaagtgacaagtgctcatactgcagaagaaaccacaggcaacaatcacagcagtttggatctgaccacgacatgtgtctcctcctctgcaccttccaagactccttaanaatgaacccacatgcctctacaatgggacagctctcagtccanactcccaaaangggaaagtttgtcccatgagg

SEQ ID NO: 15 - DNA, 589 bp, Homo sapiens
  misc_feature (529)..(529): "n" may be a, t, c, g, other or unknown
  misc_feature (545)..(545): "n" may be a, t, c, g, other or unknown
  misc_feature (554)..(554): "n" may be a, t, c, g, other or unknown
aggaagtagaacgccggctcgcatgcctgcccgcccgccagcctgccgggtacggccttttccgccggggcttccaggtcaaagaattcgcctttgccgctaccgctttcttaccctccgcacccgttaagttctccggtcgggcggcagtctctgaacacttagccgcgccatccggggtcacaccgcctggaaggaggtgacgggggcggcgcggggcgcggacactccccgctgagagtccgcctgccatggactcggaatattacagcggcgaccagtcagatgatggtggtgctaccccagtacaggatgaacgggattcagggtcagacggtgaggatgatgtaaatgagcaacactccggatcagacactggaagtgtagaacgtcattcagagaatgaaactagtgactcagaaaatgaagagcttcccaaaccccgaatcagtgattcggaaagtgaggatccccaaggaaccaggccagtgattcggaaaatgaggagctacccaaaccccgagtcaantgactctgagagtgangggcctcanaaggggcctgccagtgactcagaaactgaggatgc

SEQ ID NO: 16 - DNA, 730 bp, Homo sapiens
  misc_feature (475)..(475): "n" may be a, t, c, g, other or unknown
  misc_feature (561)..(561): "n" may be a, t, c, g, other or unknown
  misc_feature (618)..(618): "n" may be a, t, c, g, other or unknown
  misc_feature (687)..(687): "n" may be a, t, c, g, other or unknown
  misc_feature (705)..(705): "n" may be a, t, c, g, other or unknown
  misc_feature (723)..(723): "n" may be a, t, c, g, other or unknown
atcgcttctcggccttttggctaatgatcaagtgtagtatctgttcttatcagtttaatatctgatacgtcctctatccgaggacaatatattaaatggatttttggaacaaaacaaaacaaaaacaaaaacaaaaaatccaaacaaaaacaatcctgccgaagtggggcagaaatgagtggaaacttaacaaatgaatgggaaaaaaaaaatcgaagttcctttatcgaaaatataatgtattttaactaaagtgttaaattttgaaacagtggaataaaacgtttaaagtgaattttattcccatctttgcggcaaatgcccagggtcccccaaaaaagggcatgctcaagtcccccacagtcgaaatctgctaatccagaatgaaaatggaatcattaggataaaattatcgagtgtgttcaggagcggctatgccagtgaatttccagcctgaaatgaaatcatgacttangtgtatttatgagtatctgttttaaaaaccactgtgatagctagctatcacctcaaattttgaagtcgtttcgttgagtgtgaaanaaaggagaagacatttcaaagtgcatttagctatttaaaaaccctttattcactgantgtgctgctgattattacatgtctgtggaagcttctggagccattggtgggagaggcaagatgtgaaanaatcagtcgagatggtanattgatatgacattttgnaccaaca

SEQ ID NO: 17 - DNA, 542 bp, Homo sapiens
  misc_feature (478)..(478): "n" may be a, t, c, g, other or unknown
  misc_feature (524)..(524): "n" may be a, t, c, g, other or unknown
  misc_feature (542)..(542): "n" may be a, t, c, g, other or unknown
agcctacaccgactctgggaggaagactggagcctttgcggcggcgctgcccctcccctggtccccgcgagctcggagggcccggctggtgctgcgggggccccgggagcgtgcttctgttcttcaagattgaaaactaagcatggggaagagctgcaaggtggtcgtgtgtggccaggcgtctgtgggcaaaacttcaatcctggagcagcttctgtatgggaaccatgtagtgggttcggagatgatcgagacgcaggaggacatctacgtgggctccattgagacagaccggggggtgcgagagcaggtgcgtttctatgacacccgggggctccgggatggggccgaactgccccgacactgcttctcttgcactgatggctacgtcctggtctatagcacagatagcagagagtcttttcaacgtgtggagctgctcaagaaggagattgacaaatccaaggacaagaaggangtcaccatcgtggtccttggcaacaaagtgtgacttacaggagcancggcgtgttagacccagn

SEQ ID NO: 18 - DNA, 751 bp, Homo sapiens
  misc_feature (669)..(669): "n" may be a, t, c, g, other or unknown
  misc_feature (723)..(723): "n" may be a, t, c, g, other or unknown
  misc_feature (728)..(728): "n" may be a, t, c, g, other or unknown
gcttctccggcggaacccaggctggaccgcgggccccggcctgggggccactgctgccaccgccgccgccacctcgtctcctccccgtccccgcccagccccaggtctccccgcctcactcgggcccgtggccggggtcactccccgccgcccctccccgcacggatgccgaaggtgaaggcgctgcagtgcgccctggcgctggagatcagctcagtaacttgcccaggagtcgtgcttaaagacaaagaggacatctatcttagcatctgtgtgtttggccaatacaaaaagacacaatgtgtcccagccacttttcccctggtcttcaatgccagaatggtgtttgaaaaggtgttcccggacgcagtagatcctggagatgtggttacacagcttgaatatgatacagcagtgttcgagttgatacagctagttccaccagtgggtgaaacactgtctacgtatgacgaaaatacacgagatttcatgtttccgggtccaaaccaaatgtctggacaccatgattcaaaccgccaggttaccatgaggaggatttctggccttcgaggaaatgctccaaggctggaattttctacgacttcagtgattactgaatgtctgataagttcaaggaaatgccacactcaggataaatttatttaccanttggctccagttgaaaaatcacatggcaaactgcaaaaacagaacatcaagatnacaanagaaaaaaatccaaagtcacctt

SEQ ID NO: 19 - DNA, 806 bp, Homo sapiens
  misc_feature (670)..(670): "n" may be a, t, c, g, other or unknown
  misc_feature (747)..(747): "n" may be a, t, c, g, other or unknown
  misc_feature (792)..(792): "n" may be a, t, c, g, other or unknown
  misc_feature (801)..(801): "n" may be a, t, c, g, other or unknown
gtcgtctgcggcggcggcggcggctgaggagcccggctgaggcgccagtacccggcccggtccgcatttcgccttccggcttcggtttccctcggcccagcacgccccggccccgccccagccctcctgatccctcgcagcccggctccggccgcccgcctctgccgccgcaatgatgatgatggcgctgagcaagaccttcgggcagaagcccgtgaagttccagctggaggacgacggcgagttctacatgatcggctccgaggtgggaaactacctccgtatgttccgaggttctctgtacaagagatacccctcactctggaggcgactaagccactgtggaagagaggaagaaaatagttgcatcgtcacatgatcacggatacacgactctagccaccagtgtgaccctgttaaaagcctcggaagtggaagagattctggatggcaacgatgagaagtacaaggctgtgtccatcagcacagagccccccacctacctcagggaacagaaggccaagaggaacagccagtgggtacccaccctgcccaacagctcccaccacttagatgccgtgccatgctccacaaccatcaacaaggaaccgcatggggccgaagacaagaagagaaaccttccccctttgctttgatgaccatgacccanctgtgatccatgagaacgcatctcaagcccgaggtgctggtccccatcccggctgggcatggagattcgatggggangaagctgcgaagacgccttcacctgggaacatgaatgagaagttnatgaccccngagaa

SEQ ID NO: 20 - DNA, 891 bp, Homo sapiens
  misc_feature (799)..(799): "n" may be a, t, c, g, other or unknown
  misc_feature (837)..(837): "n" may be a, t, c, g, other or unknown
  misc_feature (859)..(859): "n" may be a, t, c, g, other or unknown
acacttttatattaacaagcattttgaaaaggctgagggcagatatgttagaagccatcttcttattcctaaattcatgcttaaatgtaattgtccttcagttttcccactcctgagtttggagtctgctggatgatgggtggtttggggaaggaaaagggttctgtacattggcctggcctgcaatacggctcgctatatttatatttcctacctggagaatgcctggactgttctccccatggaagttcttcaaggagtgaagagcagcaggctcagctggccgcgggaggacactgagggcatcctgctcatctcacacaggagctacagtacatattggcaggaaaaggtaaactttcgtaatctcattggaattacaacagggaaatggagttcaatgaggactttcagttctttgcttggttaggttaaggatgatagaatttctctgccagtgcagtaagagttgaaaccggcagttacactaagtaagtggagggaatgaaagtgtttcgaggtgaatgtggatataatttccctcttctgattatttattcttatttggttcctaacacaaactgggaagaagatagaattcatctatactttcttttttcttggagagaaccgtttaaaaaattacaagatatatttaaaaagtaaccaagataaaagttagcacatgtgcttttgttaaaaaataaagttaaaagttaaagttaaaaaaatggaagttaaaaagtttcatcaggaaactttacatatcctttagcaaatatatttttaaaaggtgtangggcatataatgggaaataattcctttgagcaaacaanaaggctattaattaaactactngcaaagcctaagccccaagccttaaaaaatgg

SEQ ID NO: 21 - DNA, 873 bp, Homo sapiens
  misc_feature (840)..(840): "n" may be a, t, c, g, other or unknown
  misc_feature (868)..(868): "n" may be a, t, c, g, other or unknown
  misc_feature (873)..(873): "n" may be a, t, c, g, other or unknown
actcgtaactcgcacccgggtcctggctgcaccgcatcccctcctgcaccccctggatggcccttcagccaacgggggcctgggcgatggtcgaccacggagctgcgcaaggaaaagtcccgggatgcggcccgcagccggcgcagccaggagaccgaggtgctgtaccagctggctcacacgctgcccttcgcccgcggcgtcagcgcccacctggacaaggcctctatcatgcgcctcaccatcagctacctgcgcatgcaccgcctctgcgccgcagctggagctcattggacacagcatctttgatttcatccacccctgtgaccaagaggagcttcaggacgccctgaccccccagcagaccctgtccaggaggaaggtggaggcccccacggagcggtgcttctccttgcgcatgaagagtacgctcaccagccgcgggcgcaccctcaacctcaaggcggccacctggaaggtgctgaactgctctggacatatgagggcctacaagccacctgcgcagacttctccagctgggagccctgactcagagcccccgctgcagtgcctggtgctcatctgcgaagccatcccccacccaggcaagcctggagcccccactgggccgaggggccttcctcagccgccacagcctgggacatgaagttcactactgtgacgacagggttgcaaaaagtggctggctatagtccgatgacctgatcggctgttccgcctacgagtacatcaacgcgctggactcccgacgcggtcaagcaaagaagcatccaaaacccttgctggagcaaaggggccaaggcagttaacaaggggcanattatcgcctttccttgggcccgggaanttggn

SEQ ID NO: 22 - DNA, 779 bp, Homo sapiens
  misc_feature (741)..(741): "n" may be a, t, c, g, other or unknown
  misc_feature (745)..(745): "n" may be a, t, c, g, other or unknown
  misc_feature (748)..(748): "n" may be a, t, c, g, other or unknown
atagagaagaacggaggtacggcctgtggtcatggcgctgttcccagcctttgcggggcttagtgaggctcccgatggcgggagctccaggaaagagttagactggctgagcaacccaagcttttgtgttggatccataacgtccctgagccaacaaactgaagcagctccagcccatgtttctgaagggttaccgctgacaaggagtcatctgaaatcagagtcttcagatgaaagtgacactaacaaaaagctcaaacaaacaagtagaaaaaagaagaaagagaaaaagaaaaaaaggaagcatcagcatcataagaaaacaaagaggaagcatgggccgtcgagtagcagcaggtctgagacagacaccgattctggaaaggacaaaccttccagaggcgttggaggcagtaaaaaggaatctgaggaaccgaatcaaggaaataatgctgcagctgatactggacatcgctttgtttggcttgaggacattcaggctgtgacgggagaaaccttcagaacagataagaaaccagatcctgcgaactgggagtacaagtctctctaccgaggggatatagcaagatacaagaggaaaggagactcctgccttggcattaaccctaagaagcagtgcatatcttgggaagggacttccacagagaagaagcattcacgcaagcaagtttgaacgctattttactaagaagagtgtgggattaatgaacatcgatgganttgncantaacagtaaaactgaaacctccctcatctgg

SEQ ID NO: 23 - DNA, 856 bp, Homo sapiens
  misc_feature (591)..(591): "n" may be a, t, c, g, other or unknown
  misc_feature (800)..(800): "n" may be a, t, c, g, other or unknown
  misc_feature (834)..(834): "n" may be a, t, c, g, other or unknown
  misc_feature (856)..(856): "n" may be a, t, c, g, other or unknown
gcttcccggaagtggcggcgcggtcagggctggccttggcttcagctgcggttttggggtcccggactctgggatcggcggcgctatgagttctttcgaggggcagatggccgagtatccaactatctccatagaccgcttcgatagggagaacctgagggcccgcgcctacttcctgtcccactgccacaaagatcacatgaaaggattaagagcccctaccttgaaaagaaggttggagtgcagcttgaaggtttatctatactgttcacctgtgactaaggagttgttgttaacgagcccgaaatacagattttggaagaaacgaattatatctattgaaatcgagactcctacccagatatctttagtggatgaagcatcaggagaggtttttatttcagggcaataatggaactgtcctgtacacaggagacttcagattggcgcaaggagaagctgctagaatggagcttctgcactccgggggcagagtcaaagacatccaaagtgtatatttggatactacgttctgtgatcgaagattttaccaaattccaagtcgggaggagtgtttaagtggagtcttanagctggtccgaagctggatcactcggagcccgtaccatgttgtgtggctgaactgcaaagcggcttatggctatgaatatctgttcaccaaccttaagtgaagaattaggggtcaaggttcaatgttgaataagctaagacatgtttaaggaacaatgccctgagattccttcatcaatctcacaaacaagaccggcaacactcaagantccaatgcaatgcccgggaatccccaagggcaanaaggaaataattttcaagtggn

SEQ ID NO: 24 - DNA, 740 bp, Homo sapiens
  misc_feature (5)..(5): "n" may be a, t, c, g, other or unknown
  misc_feature (669)..(669): "n" may be a, t, c, g, other or unknown
  misc_feature (723)..(723): "n" may be a, t, c, g, other or unknown
  misc_feature (737)..(737): "n" may be a, t, c, g, other or unknown
cggcngaagacggcctatgtgggcctttttttttttttttttatattttgagaaacctccatactgttttggcatagatagtggctgcacaattttgcattcccacccagcatacaagggttccaattcctccatatcctcaccaacactcttttgtttttttgatagtagtcatcataacaggtgaggtgatattaaggagtacttctgcactgaggcacttgtctcaactatatttttgttgtactttcaggagactaatagatctgtggaaatttatcaaatctttgctcatttttttaacttctgagagctcttctttaatctgagtgttcctttttatgaaattgttgatgaaaaaagccgaacaagtgtaaaatattttaagagatttattctgagccaaatatgagtgaccacagcccatgacacagccctcaggaggtcctcagaacatgtgcccaaggtggctaaggtacagcttagttttatatattttagggaggcataagatatcaaatacatttaagaaacacattggtctggtttagaaaggtgggacaactcaaagcaggggcttccagactataggtaaatttaaacattttctggttgacaataggatgagtttatctgaagacctgggatcaacagaaaagaaatgttcangttaagataaaggattgtggagaccaagtttcactgtgcaaaggaagctctcanagagcagacttcanaga

SEQ ID NO: 25 - DNA, 794 bp, Homo sapiens
  misc_feature (728)..(728): "n" may be a, t, c, g, other or unknown
  misc_feature (766)..(766): "n" may be a, t, c, g, other or unknown
  misc_feature (788)..(788): "n" may be a, t, c, g, other or unknown
accaccccagtgaaacccacagaaccatgtacaccctctaagtcccgaagtgccagctcagaggaggcctcagagtcacctacagcccggcagatccccccagaggcacgtcggctcatagtgaacaaaaatgctggtgagaccctcctgcagagggcggcgcgtcttggctataaggatgttgttctctactgcctccagaaagacagtgaagatgtgaatcaccgtgacaatgctggctacacagccctgcatgaggcttgttcccggggctggaccgacatcctgaacatcctgctggagcacggggccaacgtgaactgcagtgcgcaggacggcacgaggccagttcatgatgcggtggtcaatgacaacctggagaccatctggctcctgctgtcctatggggccgatcccacactggctacctactcgggtcagacagccatgaagctggccagcagcgacaccatgaagcgctttctcagtgatcacctctcggatcttcagggccgggcagagggtgatcccggtgtatcctgggatttttacagcagttctgtgttggaggaaaaagacgggtttgcctgtgacctcctacataatcctcctgggagctcagatcaagaaggagacgatccgatggaggaggatgatttcatgtttgaactctcagacaagcctcttctcccttgctacaacctccaagtgtcagttgtcccgcgggncctgcaactgggttcctctttttccgaatgtcttgaanaaggctggaaagctttccctcnaagggt

SEQ ID NO: 26 - DNA, 703 bp, Homo sapiens
  misc_feature (553)..(553): "n" may be a, t, c, g, other or unknown
  misc_feature (600)..(600): "n" may be a, t, c, g, other or unknown
  misc_feature (666)..(666): "n" may be a, t, c, g, other or unknown
  misc_feature (693)..(693): "n" may be a, t, c, g, other or unknown
  misc_feature (701)..(701): "n" may be a, t, c, g, other or unknown
gaatcttagctgattgcattatgaactgtcaaactgtgaagatgacccatatgtaaacagttataacagctacagattattgctagtagcattctatacaattccatattaatgttcttaggagctaatatttgataaaggggaaagctagttaaaaactaattaatttgtcaaatgtagcattcttattatgagtgtaatatctcatggagatttaaatatgaacgaaaggacttatccttctgctttttaaaagccccagcattactagatagtgtttttcttgaaggccaaagctgtaaaatgacaaagttggtgattttcagcagcactcacctgagctgtgagcgcctgcacctgttcggtagaacccactagaatcacttctctgtaggataagtgatgcctttgaatccagcagcataaaaatctgttctttttagtcatcaagtttttgtttccaggatatttctagcattgcaaaaaaaaatttcttcaccaaacactaattcctaaacacccatccaaaccacaaaaattctcttgttagtangcgagagtgctaggacttcctgtgttcaactcccatgcacccagcantgtcttttatgcatgagatattccattagattttcctaaaagtggcaaggacacccttcatagtangttatatcccttaactgggattccaanagtttaancc

SEQ ID NO: 27 - DNA, 685 bp, Homo sapiens
  misc_feature (548)..(548): "n" may be a, t, c, g, other or unknown
  misc_feature (590)..(590): "n" may be a, t, c, g, other or unknown
  misc_feature (592)..(592): "n" may be a, t, c, g, other or unknown
  misc_feature (673)..(673): "n" may be a, t, c, g, other or unknown
accctgtacttactcactatcataatttatgagaatgacaaatttttagaaataagcaaattgacatctctaactctgacttctctgtctaaactactgttgcttgaatttcccaaaatatctgaactccatatatctgaacctaactcataacctctctttggcaagcctgttgctgctttcctatttttactattctatctcagggccttattcaaagctcaagcctggattatcaggacagttttgctaattcactgctctactttgtctctccttcgaaaccatttttacccactaccatgaaaatggctctctagaatctttatcggacaaaggtaaaatttctcaattcattattaccaaccttctaaaatccagcttcaatctgcctttcttcagactaacatctcattatcccccacaaatactggtctcactaatgttccttgaagagcttgttttccagcttccataactttgctctaaatgcccaccctccttggcaatactttccctccttcacctatcctccacccagctttcanggttggggtcagattccatgaggcacttactgatctctttgncncaagggaattgttggcctcctctgtcccactcatctggcattaatcctaaggctgccttatatctcttaaagggtatccancttaacacatat

SEQ ID NO: 28 - DNA, 724 bp, Homo sapiens
  misc_feature (645)..(645): "n" may be a, t, c, g, other or unknown
  misc_feature (661)..(661): "n" may be a, t, c, g, other or unknown
  misc_feature (706)..(706): "n" may be a, t, c, g, other or unknown
gtcactgactaatccataatactaattcagcttctttgtccgagtgggagccagaattttaaaattgttacaggctaaaatggtagagtccacctgagctggatgtgaaggggacagggagaaggagcaagaagggaagtcatccttccccacagggctccatgtgcctctgggtgcaactttgaactttgaacctgaaacttgcactgctcccctccactcccttctccactttccccctcctgctcaggccctgtgtatgtggactgcagctgggggtaagggacagaggctggtactggggcaccagaggtcaagggggaagtggggtgttgagcaagagagagctgttcttgtttggtactgagcaaagcctacatccacaagcagttttctgtctttccagattcttgaactcttctgtgggcaaggagttcatgaactctttagaactggaagcaaccttagagcttttctagctccatgtttgtaaacttttgtaagctatggaacacttacttcaaattgatgcaggatttttgctccttagttcagctaaatccaggttcttgtctcacaaccaggaaaaattagacatgcggacacattgaagggtgaggcaaggcaagaatttagttaagcganagggaaaactctcggnaaaagagaaggggtttcctccaaagcagggtttcccctcctcaanaagttttgaaattaccca

SEQ ID NO: 29 - DNA, 718 bp, Homo sapiens
  misc_feature (661)..(661): "n" may be a, t, c, g, other or unknown
  misc_feature (715)..(715): "n" may be a, t, c, g, other or unknown
  misc_feature (717)..(717): "n" may be a, t, c, g, other or unknown
gttgaaaacagtttttgaatagaacctgttgagtccaccaatataataaaatcagctgtttgtttttgaaataaatacatatttatttcaatataataaaatcagctgtttgtttttgaaataaatacatatttcaaaaagtataaaattttagttgtttcagcgcttctttttactcttgtgtcccagtttgcatgataaattatatagtattcacactttaaagacatttctcataagttatatgagatttttctgcttacatcctgttgaccagaatttaattatatagccatacctagctgtaagggaagctagaaaatgtaattcttattgtaggtcatcatggatccagccaaaaatctggaagatacagataaaagatactaggagacaagtaacattctgccctaccttctcatcatgtgtttgcatttttggctagcacatatactcatgaggtagacctgcggaatttaagggagaaagtagtatggtacctttaatatctaatttatattcatatttttttaaaagctaaagtaaaaaatgaattgatcctattaagcagatattagagaatcttgggtcaggcatggtggctcatgcctatcatcccagtactttgggagatggaggtgggaggatagcttgagcccangagttgggagaccagcctggggcaacatagcaagaccctggtctctacaggaanana

SEQ ID NO: 30 - DNA, 906 bp, Homo sapiens
  misc_feature (679)..(679): "n" may be a, t, c, g, other or unknown
  misc_feature (726)..(726): "n" may be a, t, c, g, other or unknown
  misc_feature (736)..(736): "n" may be a, t, c, g, other or unknown
  misc_feature (798)..(798): "n" may be a, t, c, g, other or unknown
  misc_feature (830)..(830): "n" may be a, t, c, g, other or unknown
  misc_feature (861)..(861): "n" may be a, t, c, g, other or unknown
  misc_feature (902)..(902): "n" may be a, t, c, g, other or unknown
agaactcccctgtttcccgagtgcataggaaagtgcttagcattgaatgtggagcgatagaatgaacaaagaaatgacaaaatgactaggtggatgaatgcatagcttaatatcagcgaggcaggaagtaaacaaagagacactgagcaccaagtaattcaatacaattcatcatgagaacttatctttaagctcctgtttcatgaggttagatactgtccaacatggttcttacagcacttgttttagctgacagcactggcattcagtgaaaattacagtgggcttgagtatctttggaaataacggttttgcaaatttgattaccattaaacagcctttataaaacacctacctgagtaggaatggagtatatatgttagccaagacttaattattcatctcaggaattggcacactatctgttggctaaagccatcttcctgtctacttaccttatctgtttttatagagcccatattctaaaaatgatttttacatttttatatgtttggggaaaaaaattcaaaagaatgatacatgataattacatgaattttgaatttttttgcccaccaacgaagttttattgggacacagcccgggaaacaacaacaacaaaaatgatactgaaaataataaatctatttatggacaaaagaataggagtcaaaaatanggaggcaagagagcacactgggaatttagggaaaaagaaagaaaggnaatttttggngcaagaatcatcattaatgggtgtgatttgaggggatacatgggtaatgaacatttgctaantttttaaattacacaaaatccatataaatatnttactttgataaatataaatatattaatatngttaaaaattaaacacttccaataacaaatcccttgacacngggt

SEQ ID NO: 31 - DNA, 698 bp, Homo sapiens
  misc_feature (670)..(670): "n" may be a, t, c, g, other or unknown
  misc_feature (691)..(691): "n" may be a, t, c, g, other or unknown
  misc_feature (695)..(695): "n" may be a, t, c, g, other or unknown
gaggcccagcccgcgcggcgacgtctccgcgtggcgtcacggcaccgactgacggccacccaccatggccgcagaccagcgcccgaaggccgacacgctggccctgaggcaacggctcatcaggtacccgggcggggggcgggcggcggggggcgcggggctgcgcggaggggcacgcgcacgcacgacgcacgcacgcacgcactacgcacgcgcctccggctaggaagccgctgctacccatcccgtccggccgctgccccggccccgctggagcttctagggcccgaggcgggcggcgccgttgggcagtcccggcgggtggtctccggggccgcctccccgacagcgccgtctccaggccgcccagttcaggagacggccccgccctcaccgctgttcggctgtgtcagcctcgcttggcagcctttactccggagaagaccttcaccctggcgcctgagaggacctcacccagggtggcccgtcagcagcacctgggcctggctcgagagtgacctgggagggggctgaaagggcagacaagggagagtcgggggagtcggttcacaggcagcacacttgacctgtgagggggccctcggtgggacggtgggtgaggtcgcctcccactggaacttaagggcttggcacccagcgaaggggcaanaaggaccaacgttggcttggnaaangga

SEQ ID NO: 32 - DNA, 827 bp, Homo sapiens
  misc_feature (561)..(561): "n" may be a, t, c, g, other or unknown
  misc_feature (672)..(672): "n" may be a, t, c, g, other or unknown
  misc_feature (705)..(705): "n" may be a, t, c, g, other or unknown
  misc_feature (767)..(767): "n" may be a, t, c, g, other or unknown
  misc_feature (774)..(774): "n" may be a, t, c, g, other or unknown
  misc_feature (815)..(815): "n" may be a, t, c, g, other or unknown
gactttggactcacgtaggcataggagaacgaaacttctgtacattttaatctgaataattcttcaggatttaaaattaattggctctggcttggttggaccgtactcggatctcgccacctctgcgtttcccgagtcactggcgaagaggtcccagttcctctgggaatcgtcctgtatgcaacatcttcacaagagtggcaggcagttgaatctctggccttcgtgggaccactggacatctggcagagaaccaggaaaccacggttcccttctgtgagtccctcagccggaaaactacaagctcctcatgcagctgctgtctacagaccccctggactgcctggggaagtgagtcggagctcctgcagcagaggggtggaacagctacacgaagatccgaaggtggccaaaaataacagcgctttccagatgagggagccagttgtccagcacagtgtcatgggacagtgggccctggtgccacaatgcccggcatctccaccagatacagctttgagatcttcatgatgaagcttgctccaatccaagggctgtcangtggggtttgcggttcagctgctaacctttctttgatcaaaatcctgtcttcactggcttcaagaatctgtcttcactggcttcaaaactgggatgaaggaggctccttantggagagcaaagcaaagagaaactcaaattggntcatattaaagaagagaaaggatggatttgtttagacaacacaaacctaggaagggtttganaagtganacaagctggggttatggatgaacgggggcaattggaatgtngaaattgaagca

SEQ ID NO: 33 - DNA, 849 bp, Homo sapiens
  misc_feature (689)..(689): "n" may be a, t, c, g, other or unknown
  misc_feature (717)..(717): "n" may be a, t, c, g, other or unknown
  misc_feature (824)..(824): "n" may be a, t, c, g, other or unknown
  misc_feature (827)..(827): "n" may be a, t, c, g, other or unknown
  misc_feature (849)..(849): "n" may be a, t, c, g, other or unknown
ctgagagacactgcgagcggcgagcgcggtggggccgcatctgcatcagccgccgcagccgctgcggggccgcgaacaaagaggaggagccgaggcgcgagagcaaagtctgaaatggatgttacatgagtcattttaagggatgcacacaactatgaacatttctgaagattttttctcagtaaagtagataaagatggatgaatcagccttgttggatcttttggagtgtccggtgtgtctagagcgccttgatgcttctgcgaaggtcttgccttgccagcatacgttttgcaagcgatgtttgctggggatcgtaggttctcgaaatgaactcagatgtcccgagtgcaggactcttgttggctcgggtgtcgaggagcttcccagtaacatcttgctggtcagacttctggatggcatcaaacagaggccttggaaacctggtcctggtgggggaagtgggaccaactgcacaaatgcattaaggtctcagagcagcactgtggctaattgtagctcaaaagatctgcagagctcccagggcggacagcagcctcgggtgcaatcctggagccccccagtgaggggtatacctcagttaccatgtgccaaagcgttatacaactatgaaggaaaagagcctggagaccttaaattcagcaaagggcgacatcatcatttttgcnaaagacaagtgggattgaaaattggtancaatgggggaaatcaaatgggatccaatggctttttccccaacaaacttttgtgcaagatttattaaaacccgtttacctcaagcccccaacctcaagtggcaaaangcnacttttaaggaacttttgaaan

SEQ ID NO: 34 - DNA, 245 bp, Homo sapiens
  misc_feature (241)..(242): "n" may be a, t, c, g, other or unknown
  misc_feature (244)..(244): "n" may be a, t, c, g, other or unknown
tactaaatgatgtttatttcactatatcccatgtgctctgactctgagacttcaaggtttgaagggggctaaacatgaaatacaagttcccctggaattcagactggttgaatccaagcagtttcactggccaagaaaactttatgttttggccgggcacagtggttcacgcctgttaatgccagcactttggaaggctgaggcgggcggatcccctgaggtaaggagttggggacatccnngnc

SEQ ID NO: 35 - DNA, 820 bp, Homo sapiens
  misc_feature (805)..(805): "n" may be a, t, c, g, other or unknown
  misc_feature (808)..(808): "n" may be a, t, c, g, other or unknown
  misc_feature (811)..(811): "n" may be a, t, c, g, other or unknown
aatcagctatttcatgcagtgcaaagattgcaaagagtacaaaaccagctgaaaagcatgcgccaagctgcagcagatgcaaagcctgaaagtttaatgaagaggctagaggaggagataaaatttaatttatatatggtaactgaaaaatttcctaaagaattagaaaataagaaaaaggaattacattttttacaaaaagtagtttcagagccagctatgggccattctgatcttcttgaacttgaatctaaaataaatgaaataaacacagaaattaaccagttgattgaaaagaaaatgatgagaaatgagcccattgaaggcaaactctcactgtataggcaacaggcatctatcatttcccgtaaaaaagaagccaaagctgaggaacttcaggaggccaaggagaagttagccagcctagagagagaagcatcagtaaagagaaatcagacccgtgaatttgatggtactgaagttttaaagggagatgagttcaaacgatatgtcaataaacttcgaagcaagagtacagttttcaaaaagaagcatcagataatagctgaacttaaagctgaattcggtcttttgcagaggactgaagaacttcttaagcaacgtcatgaaaatattcaacaacaactgcaaactatggaggagaaaaagggtatatctggatatagttacacccaagaagagctagaaagagtatctgcactgaagagtgaaagttgatgaaatgaaagggacgaacattgggtgatatgtccgaaaatggggaaaaaaaactgtattcaatggnaanctnaaaaaggaa

SEQ ID NO: 36 - DNA, 884 bp, Homo sapiens
  misc_feature (667)..(667): "n" may be a, t, c, g, other or unknown
  misc_feature (737)..(737): "n" may be a, t, c, g, other or unknown
  misc_feature (748)..(748): "n" may be a, t, c, g, other or unknown
  misc_feature (850)..(850): "n" may be a, t, c, g, other or unknown
  misc_feature (853)..(853): "n" may be a, t, c, g, other or unknown
  misc_feature (864)..(864): "n" may be a, t, c, g, other or unknown
gttgacccgcggcgttcacgggaactgttcgctttagtgccggcgccatggggtcggagctgatcgggcgcctagccccgcgcctgggcctcgccgagcccgacatgctgaggaaagcagaggagtacttgcgcctgtcccgggtgaagtgtgtcggcctctccgcacgcaccacggagaccagcagtgcagtcatgtgcctggaccttgcagcttcctggatgaagtgccccttggacagggcttatttaattaaactttctggtttgaacaaggagacgtatcagagctgtcttaaatcttttgagtgtttactgggcctgaattcaaatattggaataagagacctagctgtacagtttagctgtatagaagcagtgaacatggcttcaaagatactaaaaagctatgagtccagtcttccccagacacagcaagtggatcttgacttatccaggccacttttcacttctgctgcactgctttcagcatgcaagtaggtatttcattaaacattcagaaaagttaccaatttacaagtgggtttttcatccccaaggaatacttctaacttagttgatatcaattcagagcatattttcccctagaaataatattaggaatattggccaagtgactatattcccaagtttatcccataatgtanctaacaacttggaactagtgttgccaagaattccactagcaaatagcagctgtatatatatgctgggaantctgatttcantctgccttttgtaagagatgatatctgtcattaaaaacagtcctcacaatgagaattttccggctcaaaattttttaaaaaaggtactgggttggggccaangcngtgggtgggtncccgcctggtaatccccaaa

SEQ ID NO: 37 - DNA, 917 bp, Homo sapiens
  misc_feature (654)..(654): "n" may be a, t, c, g, other or unknown
  misc_feature (767)..(767): "n" may be a, t, c, g, other or unknown
  misc_feature (794)..(794): "n" may be a, t, c, g, other or unknown
  misc_feature (800)..(800): "n" may be a, t, c, g, other or unknown
  misc_feature (883)..(883): "n" may be a, t, c, g, other or unknown
  misc_feature (899)..(899): "n" may be a, t, c, g, other or unknown
aatatcagaagagagcaatcaaggtagcttattaactgtgccaggagatactagtccttctcccaaacctgaggtattctcaaatgtgcctgaaagagacctttcaaatgtatctaacatacattccagttttgcaacttctccaactggagcttcaaacagcaagtatgtttcagctgatagaaatctcatcaagaatactgccccagtgaacactgtaatggacagtccagtgcatttagagccatctagtcaggttggtgtgatccagaataaatcatgggagatgcctgttgatagactagagacattaagcaccagagactttatctgcccaaattctaacatacctgatcaagaatcctctcttcagagtttttgtaattctgaaaataaggtattgaaagaaaatgctgattttttatccctgcgccagactgaactgccaggaaactcttgtgctcaggatccggcatcctttatgcctccacagcagccttgctctttccccagccaatcactttcagatgctgaatcgatttctaaacatatgtctttgtcatatgttgctaatcaagagccaggtattttacaacaaaaaaatgcagttcagattattagttctgctttagatactgataatgaatctacaanaagatacaagaaaaatacttttgtcctaagagatgttcaaaaaacagatgcctttgtcccagtgtactcctgacaagcactattcaagaagcatcaccaaaactttgagatancttatactttacctgtgttaccatcangaaaanggactttaatgggaagtgatgcctccaaccaagctaaattcacattatgcatttaacaaactaacttaaagtcctccagtggncatgaagttgggatancacaactggtacccaagg

SEQ ID NO: 38 - DNA, 743 bp, Homo sapiens
  misc_feature (624)..(624): "n" may be a, t, c, g, other or unknown
  misc_feature (666)..(666): "n" may be a, t, c, g, other or unknown
  misc_feature (697)..(697): "n" may be a, t, c, g, other or unknown
  misc_feature (724)..(724): "n" may be a, t, c, g, other or unknown
tctattattgatttcttatttaattttggtatagccagagaacaccatttatgtggatgatctcggctcaccacaacctctgcctcctgggttcaagcagttctcctgcctcagcctcccgagtagctgggattacaggcatgtgccaccatgcacggctagttttgtatttttagtggagatggggtttcaccatgttggtcaggctggtcttgaactcccgacctgaggtgatccactgcctcagcctcctaaagtgctgggattacaagtgtgagccaccacgcccggccttgtgtggttttaatttattaaaaattgttaaagtttactttatgacccagaatatgatctatctgggtatatgttctgtgggcacttggaaagaatatgtattctgttgctcttgagtagagtgttttataaatgtccgttatattaaaccagttgataatgttatccaggttttatatatcctttttgatttccatctatttgtttatcagttattgagaacagagttattgaagtctcccagttatgactgtggatttttccatgtctcttttagttctatcaatttttgcttcatttattttgggatctttgttagttgcatactanatttcagtgtttatcttcttggtgaattgacccttttatcantatgtaacttccctaaatttagatcttaaanttaaaatagatttccttaaaaccatangacatttgagaaggtaaac

SEQ ID NO: 39 - DNA, 707 bp, Homo sapiens
  misc_feature (618)..(618): "n" may be a, t, c, g, other or unknown
  misc_feature (635)..(635): "n" may be a, t, c, g, other or unknown
  misc_feature (695)..(695): "n" may be a, t, c, g, other or unknown
cccaacatctgtgctgatcctgctaggtaatgacgccccttccttatcgttctagagtcaagcctagatcccctacaaatacccatgcacacttagagctcactctggttaaatgttccaagaaggatgttggatggtcacttggtatcatcccatggagttcaggatacccccgccctctgagcagccattcctctcctgagcacattcccctagagaagctctgcacgtgtgcacaggcaccagctgcaggagtgccatccacagcacagctgtttatgaaaaaccgtaatcaacccaaacatctgtatgaagaaaaacgaagaaatgcagagtggcatgttcacatgatggaatactatgcagctgagaacatgaacaattggagccatggcatgaatgaagctgagagatttgaagcgtcaaccaagtaagctgtaggagattacatgtggtggaagactagtttataaatctcacagacaagccttaaagaaaatgtatctcttgaaataaatgtatacacacaattatacacatatatatgataaacccttttaaaaggcaagggaatgatcaataaaaacataaactgttccctctggggcaaaggcgganggcaaggcatcaagatnaacaaggaagttgatctgggttttgaatttggggttgtgtgtgcactgggagtcaaacanttatttttacag

SEQ ID NO: 40 - DNA, 752 bp, Homo sapiens
  misc_feature (634)..(634): "n" may be a, t, c, g, other or unknown
  misc_feature (703)..(703): "n" may be a, t, c, g, other or unknown
  misc_feature (721)..(721): "n" may be a, t, c, g, other or unknown
  misc_feature (751)..(751): "n" may be a, t, c, g, other or unknown
agtgcgcgtgcgcgtgccctcctggggcgtgctcgcggctataaggggcggaggctgggcggcgttgctctgcgctctgcggctgacggcgcttttgtctccggtgagttttgtggcgggaagcttctgcgctggtgcttagtaaccgactttcctccggactcctgcacgacctgctcctacagccggcgatccactcccggctgttcccccggaggtgagcggccctgtgggcttccccggctccccacccccatcgctagagtgctcgccgcgctagcagcctcgcgttccagggctgggggtgcgccgccgggatcctctctgatcgcccacgccccatctggggtccccattcagccgtcagccctgttttgtcctaaggtggtcctaactaggatccacgtggcccatcccacgcccacaggtgctgagttaggcacccctgccatgccctcccagagcaccttcacgatctccttgctgtcccaacacttagcgtgttgcgtgttaactaccctttgtctataaggtttgcaatgtggccctagtatcttccagggtacctaacacattgcagatattcatggtatgtttgttaaataaatgaacttgatagatttgaccctcaaanagttatttggacttgcaaaaagtttgtagttaactccaatctgtgatgtgggaaaagacttctaggcangttcctttctcaaggggnatgttcttatattttccaataaccaacaanc

SEQ ID NO: 41 - DNA, 545 bp, Homo sapiens
  misc_feature (344)..(344): "n" may be a, t, c, g, other or unknown
  misc_feature (378)..(378): "n" may be a, t, c, g, other or unknown
  misc_feature (484)..(484): "n" may be a, t, c, g, other or unknown
  misc_feature (517)..(517): "n" may be a, t, c, g, other or unknown
  misc_feature (536)..(536): "n" may be a, t, c, g, other or unknown
ctcgaccctggacgtctaccttccggaggcccacatcttgcccactccgcgcgcggggctagcgcgggtttcagcgacgggagccctcaagggacatggcaactacagcggcgccggcgggcggcgcccgaaatggagctggcccggaatggggagggttcgaagaaaacatccagggcggaggctcagctgtgattgacatggagaacatggatgatacctcaggctctagcttcgaggatatgggtgagctgcatcagcgcctgcgcgaggaagaagtagacgctgatgcagctgatgcagctgctgctgaagaggaggatggagagttcctgggcatgaanggctttaagggacagctgagccggcaggtggcanatcagatgtggcaggctgggaaaagacaagcctccagggccttcagcttgtacgccaacatcgacatcctcagaccctactttgatgtggagcctgctcaggtgcnaagcaggctcctggagtccatgatccctatcangatggtcaacttcccccanaaaattgca

SEQ ID NO: 42 - DNA, 791 bp, Homo sapiens
  misc_feature (438)..(438): "n" may be a, t, c, g, other or unknown
  misc_feature (635)..(635): "n" may be a, t, c, g, other or unknown
  misc_feature (736)..(736): "n" may be a, t, c, g, other or unknown
  misc_feature (762)..(762): "n" may be a, t, c, g, other or unknown
  misc_feature (769)..(769): "n" may be a, t, c, g, other or unknown
tacaactgctatataaaatatttacctgaaacaaaagtttcagaaaacgtctttaataggtgtagtgtactctttttattctattaattaaaaagttggttacaattgctaaaggatttcatgacttagtttgaataaaactaagtaggccaggcgcagtggctcacgcctgttatcccagcactttgggaggccgaggcaggcagatcacaaggtcaagagatcgagaccatcctggccaacatggggaaactccgtctctactaaaaatacaaaagttagccgagcgtgatggtatgcacctgtaatcccagctactcgggaggctgaggcaggagaatcgcttgaacctgggcggcagaggttgcagtgagtcaagatcacgccactgcactacagcctggacgacagagcaagactctgtctcaaaaagaaaanaaaataaagtaattcagccctatctctcccagcagaggtagaaacagagggcctgaggcttgcatggcttaacccgaaaaaatcagcgcctggaatagaagctagattttttcctaatctgctctctaccaccttgcatctgttactgtatgaattcctctggaagtgcttctgttaagacagacatgttcaagtangtgttcagtacttattgggtatcataaatatgtttacattgagaaaaaatggctatgaagggagagttgagatgacagaaatgtacatagtcaaaatcagnctctgggtgctgggttgaaatatgantgagganagttggggcatctgggttagca

SEQ ID NO: 43 - DNA, 683 bp, Homo sapiens
  misc_feature (599)..(599): "n" may be a, t, c, g, other or unknown
  misc_feature (622)..(622): "n" may be a, t, c, g, other or unknown
  misc_feature (631)..(631): "n" may be a, t, c, g, other or unknown
aataaataataatcttgtactctcaaaactctcagatctgctgctttaatctacctttcatatttgtgccagaattttcttttgtttttcaataacctattttaaaccacagtttcttcactaaaactttcatcttttttttatttttctctttatcaaaatacaacttgactctgaaggccttttataaagtagctcagtgttttctaaattgtgttttagaatgctggttccaaaaaatattaatagggatttcctgggggaaagaggcacaaccaaactccaggatatgctggtttatgcagtttggaacttctctggtacttcaaggtgctaataagggctgaatctaaatgtggctagtgttttgtcctctcatttcacaaaactccctttagtggaacatctcaccttgttaactttgtgtaccaggatcactgctttgcacaactccaggggacgctgttcacatacaacacagaatgaattgtgtttcctggagttgagagctgtgttgcatactgtagtattgctgactgtccactgtgtgacggtcttagagtctggtggtccctcatccttttgttgtgaatgtgtangtgtttttcctctcacctgatangacccttangggccagatgctgtgcttgatgcctataagtcctagcactttgggaggctga

SEQ ID NO: 44 - DNA, 761 bp, Homo sapiens
  misc_feature (410)..(410): "n" may be a, t, c, g, other or unknown
  misc_feature (472)..(472): "n" may be a, t, c, g, other or unknown
  misc_feature (606)..(606): "n" may be a, t, c, g, other or unknown
  misc_feature (674)..(674): "n" may be a, t, c, g, other or unknown
  misc_feature (676)..(676): "n" may be a, t, c, g, other or unknown
  misc_feature (752)..(752): "n" may be a, t, c, g, other or unknown
aaagacaatcgcggccaccgccaggtggaacggcaggtgggttcaggtaccagcctggccgggacccggctgtgggaccaacgcttccgttccccattcccctaccgagctgggcagttagccagcccactccaactctcggaaccatgtttgcagacttggattatgacatcgaagaggataaactcggaatcccgactgtgcctgggaaggtgaccctgcagaaggatgctcagaacctgatcgggatcagcattggaggaggggcccagtactgtccctgcctctatatcgtccaggtatttgacaacaccccagcagccttggacggcacagtggcagctggcgatgagatcaccggtgtcaatggcaggtcaatcaaagggaaaactaaggtggaggtggcgaanatgattcaggaggtgaagggggaggtgaccatccactacaacaagctgcaggcggaccccangcagggcatgtccctggacattgtgttgaagaaagtcaagcaccggctggtggagaacatgagttcagggaccgcagatgctctgggcctgagccgggccatcctgtgcaatgatgggcttgtcaagaggctanaggagctgggagcggaccgctgagctatacaaagggattacgggacacaccaagaacctcctacgggncntttatgagctgtcgcagactcaccgggcctttgggggacgtgttctcccctgatcggggtgtcgggaagccccaancaatctttc

SEQ ID NO: 45 - DNA, 757 bp, Homo sapiens
  misc_feature (480)..(480): "n" may be a, t, c, g, other or unknown
  misc_feature (561)..(561): "n" may be a, t, c, g, other or unknown
  misc_feature (564)..(564): "n" may be a, t, c, g, other or unknown
  misc_feature (632)..(632): "n" may be a, t, c, g, other or unknown
  misc_feature (665)..(665): "n" may be a, t, c, g, other or unknown
  misc_feature (682)..(682): "n" may be a, t, c, g, other or unknown
  misc_feature (740)..(740): "n" may be a, t, c, g, other or unknown
ccttatttttttaatgcagtaatagatatttgaataatagctttactgagatataattcacataccatgcaattcacccatttcagtggtttgtaggatactcagacttgtacgaccatcactacaccagttttagaggctttaatcaccccaaaataaaccctgaaccccttagtcattgtctctaaattcccccacccctcaccccctggaaatcactaatgtccattgtgtctctatggatttgcctatcctgaatatttcatatacggtaaacggaatcaggtaatatgtgatcttttatcactggcatctttcactgagaataatgttttcaaggctcacacacgatgttgaatgcatcagaactttgtttctttttatgggtgaataatattccattgtatgcatagaccacactctgtttctccattcattaatggatgcatgctaggattaccttcacttgctagctcttangaatagtgctgctgtgaacatttgtgcatgggtttttgtgtggacttacgtttcatttatcttgggcacatacctagagcnggnttgctgagtaactcagtgtttaacatttttgaggaacagccaagactgttttccaaagcaagctgtancatttcacattcccaccagcagcatatgagggntcttgatttccccacgnttagttagtgttaagtgatacctcactgtgggtttggcttccatttttctgatggggnaatgagggttgagcaac

SEQ ID NO: 46 - DNA, 747 bp, Homo sapiens
  misc_feature (657)..(657): "n" may be a, t, c, g, other or unknown
  misc_feature (665)..(665): "n" may be a, t, c, g, other or unknown
  misc_feature (689)..(689): "n" may be a, t, c, g, other or unknown
tatctgatgaccatgtcctcatcctgcctattggacactaccagtcagtggtggagctttcagcagaggtggtagaagaggtggagaagtataaggccactctgagacggttctttaagagtcgagggaaatggtgtgttgtatttgagagaaattataagagccatcacctccagctacaggtcattcctgtcccaatcagctgctctactactgatgacattaaagatgccttcattacccaggcacaggagcagcagatagagctgttggaaatcccagagcactctgacatcaagcagattgcacagccaggagcagcatatttttatgttgaacttgacacaggagaaaagcttttccacagaattaaaaagaattttcctttgcagtttggaagggaggtcctggccagtgaagccatccttaatgttcctgataagtctgactggaggcagtgtcagatcagcaaggaagacgaggagaccctggctcgccgcttccggaaagactttgagccctatgactttactctgggatgactaaaacaaagggaagaactttttatgaactccacaggaagtagtaaagcttttttttttttttaattaaaagaattttttttgagacgggagtctcgctctgtcacccaagcangattgcantggcataactgtggctcactgtancctcaacctcctgggctccgggagttcctcccaactcagcctcaatgaatggctggga

SEQ ID NO: 47 - DNA, 721 bp, Homo sapiens
  misc_feature (629)..(629): "n" may be a, t, c, g, other or unknown
  misc_feature (677)..(677): "n" may be a, t, c, g, other or unknown
  misc_feature (701)..(701): "n" may be a, t, c, g, other or unknown
aaaaaaaaaaaaagattgtcaaccgggagaaagaaatcctgtcaaattagttccaggaagggtttgctcaggattggtggtatgagaatttaactttagaaacggttcttgtgactgtgaagtccttgctattggatctcttctaaatgtactgttggcacaaagcaagatggcctcatgaagattcacatcatgacttatagcctggctgaagtttacgtgataatgtgctgaagaattcatgccatcactgatactgcctggaagaggagtatctcccaatgagaagccctccgtgaattttcaggctgtgatgaaagcaactggaataagtcttccagagagaaataagtatctgtcccattcagatgtctctcatttctagattcagtggtcttttctgcctcccaatcaggttcctctgctattttgttttcatcatcattattctgctgaagtgagttctccttctgggctgacaccctttcttcattttcctcacgctgggaactatgatccacagcttcgtgcttttctcttagtacctcgttctccccgctcgcacatccgccagcgtccggcacctgagccgtcggttccgcgggtgccttctcctcttccccggggtncaaggggccactccgagccgctcgggagtccccgcagcccccctgcanagcctgggctggccgccgtccacnctgggcgccgggctccctcc

SEQ ID NO: 48 - DNA, 705 bp, Homo sapiens
  misc_feature (628)..(628): "n" may be a, t, c, g, other or unknown
  misc_feature (658)..(658): "n" may be a, t, c, g, other or unknown
  misc_feature (691)..(691): "n" may be a, t, c, g, other or unknown
gaaaagagatgcaccattttcttcttgttctttggataagctaagctcattcccatcttggagctgttgcactggcccttgtgtggctggtccctcctcatcaccagggtcccagctccaatgtcatcttctctgagaagccgtccctgaccaggcttagttgcttcccaccccagcctgacacactccagcccatcacccagtcagtgttatttgcttcatttttacattatggtctaaaattaacttgctagtttactggtttactagtttattatctgtctccttccattatccctctccttccctccttcccttccccttccttccttccttccttccttccttccttccttccttcgagacacagtcgtactctgtcaccccggctggagtgcagtggtgtgatcttgcctcactacaacccctgcctcctgggttttagcgattcttctgcctcagcctcccgagtagctgggactacaggcacccaccacgatgccaggctaatttttgtatttttattggagacagggtttcaccatgttggccaagctggtctcgaactcttgacttcaagtgatccacctgtctcggcctcccaaagtgctgggattacaggcatganccactgcacctgggcccttttattattcanagtaaggacacacaggggaccaacaattggtcnccttccaactccag

SEQ ID NO: 49 - DNA, 548 bp, Homo sapiens
  misc_feature (527)..(527): "n" may be a, t, c, g, other or unknown
  misc_feature (538)..(538): "n" may be a, t, c, g, other or unknown
  misc_feature (548)..(548): "n" may be a, t, c, g, other or unknown
gtgataggatgttaaccaccatgataaaaacttacaaaagaataaaaatcactaggaaatcagatgagaacgagaaagaaataaaatcttatcattacaaaaaccaccaaactgcaaagatagacactaagagaggaagaaaggaaaaaaggatatacaaaatgacaacaaaataaaaatcatatcaagtatcttctcagaccacagtgaaactagaaattaataccaagaataactttggaaactatacaaactcctggacacatataacttaccaagactgaaccaagaagaaatacaaaacatgaacggaccattaatgagtaacgagattgaatgagtaataaaaagtcccccaacaaagaaaagaccaggactgcatggcttcacagctgaattctaccaatctttaaaaagaaaaaatactaactcttctcaaactattccagaaacttgaaggcggggggtgtgggagtggaatttgtccaaactcattctatgaggccagaattaccctgacaccaaanccagacaaggncacaactaan

SEQ ID NO: 50 - DNA, 680 bp, Homo sapiens
  misc_feature (609)..(609): "n" may be a, t, c, g, other or unknown
  misc_feature (672)..(672): "n" may be a, t, c, g, other or unknown
  misc_feature (675)..(675): "n" may be a, t, c, g, other or unknown
ggacattttatccttaaaaaaaagaaaaaaaaagaaaatatttaatttttaaataccaatttttagagtaagaaattggtttgatagttatctctaatagtgtcaaatgagtattttttttcctttttctcttttttgaatatcatggactttggatgttttaaaatccaatattttaccctcagttacagtcactattcattttttattgagatataattcagataccataaaattcaccttttaaaacatacaattcaacatctaaaaatgtattcacaaagttgtggaaccaccactactatctacttccagaatattcatcccctgcccccctgaaagaagccctgccctcttcagcaatcacaccccattactccttcccttcagccgcaggcaaccgctcacctgctagttctgtcttgcagatgtgcctgttctggacatttcgtataaatggaatcagacaatatgtggcctttcatgtctggcatctttcagcacagtgtttcgaggttcatgcatgtttgtagcacttcatttctaatattccattggatggatataccacattttgtacatcagttgatggatacgtgtacgttttanatggaacagttcccatggcttttccactcaagttaggggttcctggggttaaagccaaggtanggnaaaaa

SEQ ID NO: 51 - DNA, 788 bp, Homo sapiens
  misc_feature (756)..(756): "n" may be a, t, c, g, other or unknown
  misc_feature (767)..(767): "n" may be a, t, c, g, other or unknown
  misc_feature (784)..(784): "n" may be a, t, c, g, other or unknown
ggaatctaaaatccttaaaaatactctaatagccttgagtgaccaactttttttttaaagcacagatgtaattgtctaatgttctgatgggaacgtaacacttatttttatataaaaagagactgagtaaacaaacattatagaaaaaaagtgaagttttttagttgttttttgtggtattcaaccagcaagttgttttctttcagagtttcctccttcaaaaagttatattgcatttacaaatgttttacaaggcagaaagtttgactggatagttagtgtaaaagcttcatgttgagatcttcacgtatcattctgctaaaccagaatatgttcagctgtgttactaatttttcagcttaatcctcagtgcttattatttacataacaataactttttatcagttacattttatttttatttaaactggccaaaagcaaaattattttatgttaaaatgtgtgctaaactatcccaggaaagtatttaatccaacattgtaaatgaagtatcttgtacatataaatttatttcttttgcagagcattatattactggatgtttaatttacaaaatagttgggtaaatgttccaacaaactttaaagtaccttgaagtcaaattgtctgtttttgttttgttgttgttgttggccgttttcctaaggtggttacattaaaactcctaaccaagggaaagggttctttaaggaacaattcccttaagggggataaaagttgaaaaaagtggtgccnttttttttaangggcttgaaagtttcanaggg

SEQ ID NO: 52 - DNA, 718 bp, Homo sapiens
  misc_feature (600)..(600): "n" may be a, t, c, g, other or unknown
  misc_feature (675)..(675): "n" may be a, t, c, g, other or unknown
  misc_feature (679)..(679): "n" may be a, t, c, g, other or unknown
  misc_feature (718)..(718): "n" may be a, t, c, g, other or unknown
gatcgcgtttttccttgattgtgcggctctgaatacagaacagctgttagccttgagttcgttcctatgcttgtatctcaacaccgacttccacgtgaagcgggtactgagcgtgggttttgacgttcaagagtgttaagtaagcctgggcaacctagggaggcccgatctctacagaaaaaccaattagcccgacatggtggctcccgcctccagtcccagctactcgggaggctgaggtgggaggattacatgagcccgggagttgggagctgccatgagctatgaccatgccactgcactccagccggagccacagtgagtctgcctcaaaaaaagtgcagtggctggaactccaccaacattaacagagattcactggctcttcagagaatcacaggggtgaagacaagattcagtgacagggacggtgtcaacagcccaccgagttgaattgggtgtcttgtgtaatagccctgagcctggagcatagcaggggccagaacgacctcaaagtacagaggaggccttggagcttcctgctggagggatacatgggctagacagagctttggaaagcttcctcctccaagggcccanccggaggagcaagaagatgctggtagcctgacttagtgaaagagggaccagctcaagtatggggtgacaagacancaanccttttaaggggggaaagggactaaggctggttaatgan

SEQ ID NO: 53 - DNA, 732 bp, Homo sapiens
  misc_feature (674)..(674): "n" may be a, t, c, g, other or unknown
  misc_feature (716)..(716): "n" may be a, t, c, g, other or unknown
  misc_feature (721)..(721): "n" may be a, t, c, g, other or unknown
tcaccaatttggctggtctcgactcctggctggtctcgactcctgacctcaggtgatccacctacctcggcctctcaaagtgttggagttacaagcatgggccaccgcacccggcctatttataattttttgaggaaactttgtactttttcccatagctgtaccattttgcatttccacctacagtgttcaagagttccagtttctccacatccttaccaatacttgtctttttttttttttaatggccatcctggcagatgtaaggtgatatttcatcacagttttgatttgcatttccctgataactaatgacattggacttttttttatatatctgctggccacctgtatgtcttctttggagaaacatctattcaagtttctagttcatttttaaattggattatttgctttttgctattgagttgtttgagttccttatctattttgaagcttaaccctatatcaaatgggattcttatatttttgtttcatattttgtagtatatcaggtccatgaaattagctatcttaagtaagttgcttttgtgttgtttcctatgacaattccgattagaatattaatacaaacgtgaaatgcagcttttaccaacaaatgggctaagttttaatgaatcaataaaaccatattttgagaagtttactcaaanagaacctaaaattcaagttgaatataaagaaatgggggttgnttggnttttttccttg

SEQ ID NO: 54 - DNA, 820 bp, Homo sapiens
  misc_feature (700)..(700): "n" may be a, t, c, g, other or unknown
  misc_feature (728)..(728): "n" may be a, t, c, g, other or unknown
  misc_feature (793)..(793): "n" may be a, t, c, g, other or unknown
  misc_feature (808)..(808): "n" may be a, t, c, g, other or unknown
tatatggttttgtgtaagcagttaatgtaaatattgttagcattacaggtcatacagtgctgtaacatttttttaaatgttgcacctactttacaattaaaaaattggtcactcgcacttcaattttgcccatagagccatttctttgtctttgtattgaagccaattcatttttttaaatgaaggctaggccttctatgttaccaaaatttttattccctaaaataaactttttaagaaacaaatccaagaatggaaacagatgaaaaatttttttcttctttaaagaacataatagttcctgctggaaaaggaaatctaattttattttgtgtcccttaacagtcctaggaagcacaaggagaataaactaaacctctaagaaggttttaaaaattatttcaaatgagtgaaaattaactgagcagcttttgtgtgatttgtcttgtttgtagcattaaaagcaaaccagggtttttatttatttaaaggaacatttttggcttgtacttttcagtgccattatgaatgaaaatgttttaagaacattcatcccttgtgatatcatgggccacttttagtcttttatttggaccctgactttgagtttttgctatgcctgttttttaagtaaacacagccttcttatctgaacgtaacactgcagaattgcaggaagagaaaagggcaagttagttanttcactttctgtaagttttagggaagantcctaaaatcctacgaaggtgaccccaggttttcattttagaccaatgatagcacattggtggtnaaacttttgggaaanccttccaatgca

SEQ ID NO: 55 - DNA, 776 bp, Homo sapiens
  misc_feature (20)..(20): "n" may be a, t, c, g, other or unknown
  misc_feature (698)..(699): "n" may be a, t, c, g, other or unknown
  misc_feature (725)..(725): "n" may be a, t, c, g, other or unknown
ttaaataattagaatttcangatcggtcaaaatactttggcatctgaaagcaggagcttagaaccagaattccttctcagacataatcccagcatccccagcccagtgcttttgctctttcgcaccaggccagataactctgtgatcatggacgtatgcaggaatttgtaaatatttggtggatgatagtcagattgccaaatggcagaaaggtttctggttttgcagtttgaaaaggattatagagcggggaacaaggtaaatatctgaaggtctgcatgatagtacttcttttcctattgctttggagttattttttatacctctttacacaatgtgtgagactaccaaatttacattgcactgttccaggtgacttgtgcagttgacaaactatgacccagcatagcaacctaggcaagaggagcctatataattcattcttattcctattttgctatttcaacttgtttctgttttataactgcaaatggcctcccaggggtagcaactgttggcaacttaaagttaagccagtagttctcctcactccatatctatgctgcttgtctttgcatataaagtgagtggatgctgggggcatggaaaaacaaaactatttaagtgtgggagaagcctgtgacttttgtagtcctttggggaatttttcacatgaccaagggccaaatagttctganngctcctgtgccaatcctgggaataanagcaatggggatgttaagggagttgaaaaggggggccaatgggatttaagt

SEQ ID NO: 56 - DNA, 770 bp, Homo sapiens
  misc_feature (513)..(513): "n" may be a, t, c, g, other or unknown
  misc_feature (557)..(557): "n" may be a, t, c, g, other or unknown
  misc_feature (715)..(715): "n" may be a, t, c, g, other or unknown
  misc_feature (720)..(720): "n" may be a, t, c, g, other or unknown
  misc_feature (758)..(758): "n" may be a, t, c, g, other or unknown
aatagtggtgatgtcatgcaggcaatgatggcggaaggggaggacgtgggatggtggcggagctggctgcagcagagctaccaagcagtcaaagagaagtcctctgaagccttggagtttatgaagcgggacctgacggagtttacccaggtggtgcagcatgacacggcctgtaccatcgcagccacggccagcgtggtcaaggagaagctggctacggaaggctcctcaggagcaacagagaagatgaagaaagggttatctgacttcctaggggtgatctcagacacctttgccccttcgccagacaaaaccatcgactgcgatgtcatcaccctgatgggcacaccgtctggcacagctgagccctatgatggcaccaaggctcgcctctatagcctgcagtcggacccagcaacctactgtaatgaaccagatgggcccccggaattgcttgacgcctgccaaccagagctctgggcacagattctggtggctccctgctggccctcntgggcctctgctcacacctgggaaggggctctctaaatcccggncaaaaactctgacttgtgccaacaataggatgacccaagggagaggaaacctatcctcctcaccagaagaacctgtgtttttctgctgaacacccactgttcctgaggactcctgctgggaaatcccaagggatagttctagcccttctgcctgtgtnaacanaagctaaaccaccaagtctctctcgggggaaacctganacaacatactcc

SEQ ID NO: 57 - DNA, 756 bp, Homo sapiens
  misc_feature (684)..(684): "n" may be a, t, c, g, other or unknown
  misc_feature (743)..(744): "n" may be a, t, c, g, other or unknown
gtaattagctgggctcagtgggcacactcctgtagtcccagctacttgggaggctgaggtgggaggatcacttgaccccaggagttggaggctgctgtgagctatgatgacaccactgcactccagcctgggcaacagagtgagacccttggcatcatactcagatccttccaactgctaggatgaagcatacagacaagtgcccactctggatataggtgttggtgttctctttctgtttctatgggtccagtctgtgttcttttgtaagatgtctgggcaagccagaccaaagtctcctatttttacttgctgatcagggccatgaagaaaaatatttctaggcttcagatctctgtttacaatacccatgttatgtatgtaaaacacaccttccactaaatcttgaaaattttttgttgcaacactggccataaggacaggcaaacttgcccacacactcttggccctgtttgtttctctcagctagccagtcccacagctggagcttgcacacctgcatctggatgtgcagcatcaggtggtactgcacctcgatccccaacaagttgaagttttctttggaagattcctcagtggatgtgaaattctcctctaagagggaattacacctgagcaacaagggctgtttcacaaattgaccaggtagacaaaccaagccangccattttcctgggagctccaagggatgattcaaaattcactggggggtcccccttaannaccgggaatttg

SEQ ID NO: 58 - DNA, 781 bp, Homo sapiens
  misc_feature (749)..(751): "n" may be a, t, c, g, other or unknown
cttgaaaagttaacgtagaaaatatccaaaaagcagtatttctagaaagtgtccaaaaagcagtatttctttcccttggttgtgagagtaactaattatataaatattacctcaaaaatacatacactggtatcacacagtctttctacaatgtttctgtattctgaaagctaaatattaagtactatttttccattcaaatattcatttagaatttcctttagaagatggcagtgattataatattaatatgatttcatttgttccagtgtttagacatgaaatcatcttccttgtctcatgaaaacctaaatataaaaaaaaggaaaatactggagtttttatttctcttgtctttgttacatcctctgtttattataattttagcaccaacttcacacctagctaattttttttcatcataaagtggatgaaatgagcaagtacctaaaaattttatttcagacaaaagtcaggagttactgctaaaaaacagacatgtaggagacattcaacaggagtatgaaatgagagttagaccatatgggctgacaacaccataaataacaagaaaagggagtgctgaaataggagagaacagagcaaatgttagctcaaagtatagacttagaaatatcaaagtaagagctatctggataaatatataagatattgagtgcttgggaatcctagcctactaaggtgaaaaattaagtcccaaatgtcaggaataacttacaggaaaaatnnnaaaatgcacaagctttaaaaatgggggcaa

SEQ ID NO: 59 - DNA, 643 bp, Homo sapiens
  misc_feature (344)..(344): "n" may be a, t, c, g, other or unknown
  misc_feature (593)..(593): "n" may be a, t, c, g, other or unknown
  misc_feature (615)..(615): "n" may be a, t, c, g, other or unknown
  misc_feature (641)..(641): "n" may be a, t, c, g, other or unknown
ctttttgtgagatttgtgttcttaagtctcatctctctgatcataagccatgttccttcacaaaattcccaaatacattaaaagtgtaaaatgtgttaaaagcagacacttaacataaagtaattcatactcttctggcattgcttaagtccagtagtccccccgtcatgtggttttgctttcctgggtttcagttacccacaaccaactacagtcaaaaaataggtgagtacaggacaataagatacttagagagagaccacatcacataactttcatagtatatttttagatttactctattttgttgggaatctcatgttcctaatttataaattaggtgnctaatttataaattaaactttagcacaacagataagtatgtataggaaaaaaacatagtatgtatagggttctgtattatccaaatgcccatttcagccattcactggggggttttggaacgtatctcctgcaggtaaagggagactactgttcttagagacaaaagatgataagaaatggttttaggttgtatttgtggcctctattgaagcccaaggaaatcataaaggatttcaacttgaataccnccaaaatgtcagggttaaatcnccataagtgcacataaaaaaatgtcnaa

SEQ ID NO: 60 - DNA, 576 bp, Homo sapiens
  misc_feature (544)..(544): "n" may be a, t, c, g, other or unknown
  misc_feature (546)..(546): "n" may be a, t, c, g, other or unknown
  misc_feature (554)..(554): "n" may be a, t, c, g, other or unknown
gataacataatcaaagaggaaaaaccaagcattggtgaattcatcccttcctttcaacttggcctctctcacccactttacttttagtgcagagttcagtgatggctagcagctgtcccctgatatttgttattccaagtatccattcataggtctggggagaggttgtggcaagctttccctaaataaatcacacccttatcttctaagcttgagcagtggagggagacttttcattcgaggtgggtggctgaacatcatcattcctgttctggacttcttgtaatcatgttggattcagagggcaccactctctcttgtacagatctgacctaacatagacatagactatagcagagatgaatccaggctataacatttaacaagaccttattaaaagcttcaagatgttagcctttatctgttccatatctagcttacttggttgtttttgggggatcacatgtctgtcctccaaactggaaacgtctaactctccaggagatgcagtagcattatttgttggacagtggcacctactggnantttgtaangtttatagcccaatgtgaaagg

SEQ ID NO: 61 - DNA, 462 bp, Homo sapiens
  misc_feature (443)..(443): "n" may be a, t, c, g, other or unknown
  misc_feature (459)..(459): "n" may be a, t, c, g, other or unknown
  misc_feature (461)..(461): "n" may be a, t, c, g, other or unknown
cccgcctcccgcctcccgcctccctccagctgcgagtgcggcctcggctggcggcggcaccaggccacagttgtaagggatcttgtggctgtcaggatggcagaggagcaggagttcacccagctctgcaagttgcctgcacagccctcacacccacactgcgtgaacaacacctaccgcagcgcacagcactcccaggctctgctccgagggctgctggctctccgggacagcggaatcctcttcgatgttgtgctggtggtggagggcagacacatcgaggcccatcgcatcctgctggctgcgtcctgcgattacttcagaggaatgtttgctgggggattgaaggagatggaacaggaataggtcctgatccacggtgtgtcctacaatgctatgtgccaaatcctacatttcatatacacctccgagctggagctcancctgagcaatgtacangna

SEQ ID NO: 62 - DNA, 824 bp, Homo sapiens
  misc_feature (757)..(757): "n" may be a, t, c, g, other or unknown
  misc_feature (762)..(763): "n" may be a, t, c, g, other or unknown
tgggtgcccaccgaccggcctcgagcgccccggcgggaggtttttctatatgagtggagaagacagctgttaccagggaggtcatacaacatttttttaggatgtctgaagatgaagaaaaagtgaaattacgccgtcttgaaccagctatccagaaattcattaagatagtaatcccaacagacctggaaaggttaagaaagcaccagataaatattgagaagtatcaaaggtgcagaatctgggacaagttgcatgaagagcatatcaatgcaggacgtacagttcagcaactccgatccaatatccgagaaattgagaaactttgtttgaaagtccgaaaggatgacctagtacttctgaagagaatgatagatcctgttaaagaagaagcatcagcagcaacagcagaatttctccaactccatttggaatctgtagaagaacttaagaagcaatttaatgatgaagaaactttgctacagcctcctttgaccagatccatgactgttggtggagcatttcatactactgaagctgaagctagttctcagagtttgactcagatatatgccttacctgaaattcctcaagatcaaaatgctgcagaatcgtgggaaaccttagaagcggacttaattgaacttagccaactggtcactgacttctctctcctagtgaattctcagcaggagaagattgacagcatttgcagaccatgtcaacaagtgctgctgtgaatgtttgaagagggaancaaanncttaagggaaaggctgcaaaaatacaagcctgggaagctccgccctgtggcaaggtgcacc

SEQ ID NO: 63 - DNA, 730 bp, Homo sapiens
  misc_feature (508)..(508): "n" may be a, t, c, g, other or unknown
  misc_feature (708)..(708): "n" may be a, t, c, g, other or unknown
  misc_feature (716)..(716): "n" may be a, t, c, g, other or unknown
  misc_feature (729)..(729): "n" may be a, t, c, g, other or unknown
agtctgggtctggagcctgagccctgcggaacctcggcgcccggccccaccccgcccgtacctgcacttatttattgttgttatttcttaccgcggagccccgcagtcgggtcctcccgcccgctcccgcgcagcgctagcattctccagtccctcagtcccttcccgcgcggtgcgccgcagccgaggcgatgcgccacattcagaacatgtgcaccatcgccgagtaccccgcgccgggcaacgccgcggcctccgactgctgtgtgggcgccgccggccgccgcctggtcaagatcgccgtggtgggcgccagcggcgtgggcaagaccgcactgttggtccggttcctcaccaaacgattcatcggtgactatgaaagaaatgcaggtaatctctatactagacaagtccagatagaaggtgaaaccctggctcttcaggttcaagacactccaggtattcaggtccatgagaacagcctgagctgcagtgaacagctgaatangtgcattcgctgggcagatgctgtggtgatcgttttctccatcactgactacaagagctatgaactcatcagccagctccaccaagcacgtgcagcagctacacctgggcaaccggctgcctgtggtggtcgtgggcaacaaaagctgacctgttgcacatcaaacaagttgaccctcaacttggactgcaactaaccancatgctangctgctcaattcna

SEQ ID NO: 64 - DNA, 746 bp, Homo sapiens
  misc_feature (657)..(657): "n" may be a, t, c, g, other or unknown
  misc_feature (683)..(683): "n" may be a, t, c, g, other or unknown
  misc_feature (698)..(698): "n" may be a, t, c, g, other or unknown
aattataatggatttgaaatttgccctaaccaagagtcacagacagaaaaaaggaagttaatgtatctcttgatcactgtcaagatgtggtattgaaccttcaagatccttttcagggaatatgtgagatcaaaatttttatactggcactatgatgttatttgccttttcctcatattcacaagtgaacagtggagttttacagaagctatataatgtcatgacatcactgatgggtaatagaatgtgtgcttgtatattccgaaactttcagttccaatttcttcgatcaatgtaatcctcataagtaaaagttatttgaggacctcagacatttttaaaaatgtaaagggggtggggtcaggctcagtggctcatgcctgtaatcccagcattttggaaggccgaggcgaacggatcacttgaggccaggagtttgaaactagtctggtcaacatggtgaaaccccgtctccactaaaacaaaaagttttctggatgtggtggcacacatacctgtaatcccagctactttggtggctgaggcatgagaatcacttgaacccagaagacaggttgcagtgagccaagattgtgcccctgcattctagcctgggtgacagtgagactgtctcaaaaaataaaggtgtacagggantgtatatttgacaacttggtatgtanggatgtgctacctcnaaagttccatgctgttacctaagttttcactcactactatattttggg

SEQ ID NO: 65 - DNA, 836 bp, Homo sapiens
  misc_feature (695)..(695): "n" may be a, t, c, g, other or unknown
  misc_feature (748)..(748): "n" may be a, t, c, g, other or unknown
  misc_feature (762)..(762): "n" may be a, t, c, g, other or unknown
  misc_feature (805)..(805): "n" may be a, t, c, g, other or unknown
agaaacctgaattcagactgattaaagaaggtgaaacaataactgaagtgatccatggaggtgcgttccttatgttacctggggccgactaccttcgctgtgattattttgaaatagtgttggtttagaaatattgaacatctgatattttctcttagttcttattttataaaaattgtgggaattatttcctcagctatgagttcttattagctggtcagaaataaaacatagttagcttttaatggatctagttggaattaatttatctattaagtcactgggcccaacaaaatgtcatgatttttgcatatacaagtgaggattgtggaataaaattgtaacattaatgtcagtataaaaggaaatattagaaacagtaggaaaaaatgaccattgtataagtctctgtctaataagccactccactactaggatttatgatagggctcccattccaatgatatagaactccctgggattctcactaagtatttattccacatccagaaaacaagtatggcatggagagttaggatgtcaaatggccctctctctcaaccaagattcaggacatagctattaccttttagatccctattgatatgatttttgggggatatgttctaaaaatgtttatgattgaatcttaaatggtaatatttgtagaaatatagttaatcattacaatgtcnagcttatgggatgtatagtcacaatatgagggtaaaatcaaatgcatttgtantcccctgcttttanaggccaatttatttaaaaaaatacaccaaaaatcaattggatnggagtgccctgtgggaaataacttgaaaaaa

SEQ ID NO: 66 - DNA, 724 bp, Homo sapiens
  misc_feature (463)..(463): "n" may be a, t, c, g, other or unknown
  misc_feature (583)..(583): "n" may be a, t, c, g, other or unknown
  misc_feature (674)..(674): "n" may be a, t, c, g, other or unknown
  misc_feature (699)..(699): "n" may be a, t, c, g, other or unknown
  misc_feature (707)..(707): "n" may be a, t, c, g, other or unknown
cttgaaaaaagcgaattcaaagatgaacccctacttttccgttttttttcggatgaggaaatggagggatcaaatatgaaacatcgacttatgaaacatgacttaaaagttgtggaaaatgttatagctaagtcattattgattaaatccaatgaaggcagctatggctttgggctagaagacaaaaataaagttccaataataaagttggtagaaaagggatctaatgctgagatggctggcatggaagtcgggaaaaagatttttgctattaatggtgacctagtttttatgagacctttcaatgaagtggattgcttcctgaaatcgtgtttaaacagcagaaaacctctaagagttcttgtgagcacaaagccaagagagacagtgaaaattccagattcagctgatggacttggcttccagatccggggatttggcccttctgttgtgcatgctgtangaagaggaactgtggctgcagcagctggtcttcaccctggacagtgcattatcaaggtgaatggatcaatgtcagcaaagagacacatgccagtgtcattgcacacgttacagcctgcangaagtacaggcggccaacgaagcaaagattccatacaatgggtttataatagcattgagaagtgctcaagaagaccttcaaaaaatctcantccaagccccctggagatgaagcangggatgcntttgacctgtaaaagta

SEQ ID NO: 67 - DNA, 713 bp, Homo sapiens
  misc_feature (487)..(487): "n" may be a, t, c, g, other or unknown
  misc_feature (596)..(596): "n" may be a, t, c, g, other or unknown
  misc_feature (666)..(666): "n" may be a, t, c, g, other or unknown
  misc_feature (680)..(680): "n" may be a, t, c, g, other or unknown
  misc_feature (713)..(713): "n" may be a, t, c, g, other or unknown
atgacaggttcctgggccgcgccgcctcgccctgcctgggcggggttgggacctttctggcacctgcgtcgaagccggcggcaggatggactttgttgtcccggtcccagaccaccctcctccaccgtcgcctcccactgcaaaaaggcctggataaggaacctaattcgagctacccttctctgtgaagctcgacggctgagaacgtcagggcttgttcccaagtctctttccagaggccaggctttatgggagcatgggttaccagcgacgcaccctgatcaagcagagaaagagaggctggagaaggaagagtgacagaagtaagaagagagtgtctctccacttccactccagccccctacagctcatcctccagcaggcagccaagggcacttttaggatctcacatcaggtccttgcctcacattctgcactggcttcccaagtaattaaagtaaaatccaaattccagctcacagcttanaaaactcagcaggactggcctctgtcctatcccacaccccaactcagtccctcaagctcatctcctgtcattcctgcccatttctggaccccagccactcctcaaacanggtgaggatcagtgtccaaggcacaatcttgaactcatcatcgccaaatatgtgagcacttgatgttggncttccaacctccanaccgtaaggcagtacatttccttgtaaaattan

SEQ ID NO: 68 - DNA, 860 bp, Homo sapiens
  misc_feature (710)..(710): "n" may be a, t, c, g, other or unknown
  misc_feature (800)..(800): "n" may be a, t, c, g, other or unknown
  misc_feature (833)..(833): "n" may be a, t, c, g, other or unknown
  misc_feature (857)..(857): "n" may be a, t, c, g, other or unknown
aaaaaactagcaccggccccgcatgcactcagcctgccaagaccacagccttgtaaggataagttacttaatttagtttcacttggtcataaagcatgagacagcctcatttactggcttctgcttttaatgctttatcaaggataaggaggaacttctaatcattttttttgaaacttttatatgtgttaagttttcagggcaatagacaaagacagataatctacagggtaacttcccaacaagatagttctgtcttgcaagtcatcagtgggcctgaaacatctgtacaagaagagatatctgtggatgctatgcatgtcttcattgatgaacatggggaaattagatcctgttatttaaaatctggaaatcagaaagaaggccctttacagcctctaccatcaaataatgactgtctctctcaggctcgagagatgcaggtcagctcctccagtaccacaacttctgagagtcaagatccgtcttctggggaccctgccgtcagtgcccttcagcaacagctgttactgatggtggctcgcaggacccagtcggaaaccccacggcatgtgagtcaggatctggaagcctcgtcatgttcttcaacacaaggaaaatttaaccgagagcagttttacaaatttatcattttccctggcaagtggattaaagtctggtatgatcgactgaccttgctgggcattacntgatcgaactgaagacatcaagggagaatgtactggcgattttactcaatggcctggtttccctccttggatttctgaccttgagccaanggttttgcaaagatatgtgggtgctccccttcngcctccgtcaagggcaagtggcantaa

SEQ ID NO: 69 - DNA, 806 bp, Homo sapiens
  misc_feature (652)..(652): "n" may be a, t, c, g, other or unknown
  misc_feature (729)..(729): "n" may be a, t, c, g, other or unknown
  misc_feature (764)..(764): "n" may be a, t, c, g, other or unknown
  misc_feature (792)..(792): "n" may be a, t, c, g, other or unknown
aataatttatagcctttcccttaaatcaagatcgagtttaaaattatagtttgtcttttgtcttaacagttctgaatgctgtcctcaaagtatataatgtttcatgtaccaagacccttttcacagtacaataaacagatctattcataaatttttgttattttataaataaatgattacataattttagttatatggcaatggatttcttttagttgggttataaatttctattataaatttaaattactgagttgtgaatatatgcagctttattaagagaatttacaaattcaatgatataaaataaggtaggccttgattcacttggttgttttttacttatttaatattccaacattgctatctctaaaaatgcattatcatgttttgaagggatttgctcttgaatttagctccagggagaaagtatcaaaataacttttttttttttttttgagatggagtctggctctgtcacccaggctggagtgcagtggcgtgatcttggctcactgcaagctccacctcccgggtttacaccattctcctgcctcagcctcccaagtagctgggactacaggtgcccgccaccacgcctggctaattttttgtatttttagtagagacgggctttcaccatgttggccangatggtctcgatctcctgacctcgtgatccgcccgcctcagcctcccggagtgttggggattacaggcatgagccancgcaaccgggccaaaataacttgagaaaacagatngctctgcagtttaaaggaagtataagtnccccgaacctgaat

SEQ ID NO: 70 - DNA, 839 bp, Homo sapiens
  misc_feature (787)..(787): "n" may be a, t, c, g, other or unknown
  misc_feature (828)..(828): "n" may be a, t, c, g, other or unknown
  misc_feature (838)..(838): "n" may be a, t, c, g, other or unknown
aaaaaaaaatagatgctgcgtccaagcgttaccgtggctgtaccttggcctctgcagcctcctggtgggggaggcagaggccccgagccccgtggatccgctggagcggagccggccgtacgcggtgctgcgagggcagaacctggagtccctgtcgcccaggctggagtgcaatggtgcgatctcggctcgctgcaacctccgcgtctggggttcaagcgattctcctgcctcagccccctgagtagctgggattacagtgttgatgggaaccattttcggcatcctgctggtgactgtcatccttatggcattttgtgtctacaagcccattcggcgtcggtgacagccagacaagttcttcaatgagtatttgggaataggataagttgtgttgcacacaggccagtggagaagttggaaccaaaactttcctacttggaaatgacctttggtctggacagttggtaaatgctaaatgaagtagaagaaaacatgtactagacattattttttcctaacactgtagcgcaaataattggcccctgagtccgcttctcagtgtttctgactgtacttgttaaaagtaagacctgaaagctccaaaggtcagtgtaaagatggagtgttcatgagaaagaaaacatggtaaccttgtgagtgcctgtaagaaccacactgtaaagaactcatcattaatgcttgaaaaatgttattaaagaaaggagacttaccaagcaggacattccctaattaaagaaaccaatttgggtacagtggggttaanaatcacaagatttttttttttaaacccaacctgaagtttancctaaaaatnc

SEQ ID NO: 71 - DNA, 793 bp, Homo sapiens
  misc_feature (637)..(637): "n" may be a, t, c, g, other or unknown
  misc_feature (681)..(681): "n" may be a, t, c, g, other or unknown
  misc_feature (787)..(787): "n" may be a, t, c, g, other or unknown
  misc_feature (789)..(789): "n" may be a, t, c, g, other or unknown
  misc_feature (791)..(791): "n" may be a, t, c, g, other or unknown
agaaattttttctgtgttggacctaatgaaagtggacatggccaactttgctatcagtagcatcaggcctcatctcatgcagcagtcagttgaatacgaaaggaagaagtttcaagagattttggagaggcaaccaaattccctggactttgtcacccagtggctggaagaagcctcagaggaccttatgactcagaagtataaacacgccctgccagtggggggaatggctgctggctctggggacatgcccaggctgagccctgttgctgtccagaattacgcttacctgaagcttctgaagtgggaccacctccagaggccgttccccgaaacagttttaatggaccagtctcgcttccacgagctccagttgcagctggaacaactgaccatcctgggggctgtgttgctggtcaccttcagcatggcagcgccaggaatttccagccaggccgactttgctgagaaactcaagatgattgtgaagattttgctaacagatatgcacctgccctccttccatctgaaggacgtcctcactaccatcggggagaaggtgtgcctggaggtgagcagctgcctctccctgtgtgggtcctctcccttcaacacggacaaggagaccgtgctcaanggccagattcaggccgtggccagtcccgatgaccccattcgcangatcatggaatctcgaatcctgaccttcttagaaacctaacttgcctccgggtcatctgaaagccaattgcccacagtccctgggggggactcagtccagtttaanananaa

SEQ ID NO: 72 - DNA, 724 bp, Homo sapiens
  misc_feature (662)..(662): "n" may be a, t, c, g, other or unknown
  misc_feature (693)..(693): "n" may be a, t, c, g, other or unknown
  misc_feature (709)..(709): "n" may be a, t, c, g, other or unknown
gcggtgcctgatggggccgttgggcggccggtagctgttgctgttgggggaccccctcattcctgccgctgccgtccctgctgcctcatggcggccatcggagttcacctgggctgcacctcagcctgtgtggccgtctataaggatggccgggctggtgtggttgcaaatgatgccggtgaccgagttactccagctgttgttgcttactcagaaaatgaagagattgttggattggcagcaaaacaaagtagaataagaaatatttcaaatacagtaatgaaagtaaagcagatcctgggcagaagccagaaatgcggtccttggacctggcttctcagcttctccgaaatcagatagtgactgacccagacaacttaatggaggatgctgcttgggccaagcactgtgatcagaacttagtggcctctgacgccccaggggaagagggaaccggcattctaaaatcaaaaaggactcaggcagctgatcatcagcctatcttgaaaacagttaaggcatcagatgaggattgtcagctaaagaatcagtgaccggatacgagaaaccagtgaccttgaggactcctgggatgaatcctcgggtgcagggtgctctcaagggaccccagctacagcaagctcccacaagccttttcagangtgcaattgctccctgtcagagcagcccatnggcaaactggggtgtntcccggggaagccaa

SEQ ID NO: 73 - DNA, 736 bp, Homo sapiens
  misc_feature (710)..(710): "n" may be a, t, c, g, other or unknown
  misc_feature (721)..(721): "n" may be a, t, c, g, other or unknown
  misc_feature (724)..(724): "n" may be a, t, c, g, other or unknown
aagagatgacaaggtaacatggacgtttaggctccaggaaactttaagacaaattaacgtaaaaatggtttctgggctggtaatacccttggtgtttctgttaaaaacatgaagaacggctgggcgtggtggctcacgtctgtaatcccagcactttgggaggccgaggcgggtggatcacctaaggtcgagagttcgagaccagcttgaccaacctggagaaaccccatctctacttaaaaaattaaggcatcctacatgcctgtaatcccagctactcagaaggctgaggcaggagaatcgcttgaacctgggaggcggaggttgtggtgagccgagattgcgccattgcactccagcctggggaacaagagaaactctatctcaaaaaaaaaaaaaaaaaaaaaacctgaaaaacattttctggaggaaatttcatggtttagatcacaaggaatttcagataaagcaagccttgcaaaagatatgttcatagtaaattgcagagctttaggaaacatttcactgaaatgagagtcaatgacaaataggattagagcctctaacaggttatctgagagaatatttttacgtttaaaattgttaaaataaacctaaaggaaggaatcaaccctaaagatcaaggttggccgggtgcggtgggctcaagcctgtaatcccaacccttttgggatcctgaaccaggtggntcacctgaggncanaagttcgagaca

SEQ ID NO: 74 - DNA, 651 bp, Homo sapiens
  misc_feature (634)..(634): "n" may be a, t, c, g, other or unknown
  misc_feature (647)..(647): "n" may be a, t, c, g, other or unknown
  misc_feature (649)..(649): "n" may be a, t, c, g, other or unknown
cctacaatttttagtttaccacttatctcttacagaagcaagtgatttcctacccctagatttttagtaacaccttaaaaatgtattgaaaacaaaaattaagttacatgtcataatctcagaagtagacatacagatatacctgtcaacattttttctcattataaaccaatttcagctcacatcagagttataatttcaaagccagacatgatactggtttaaaatgaatgttatgtttttaatgtttcttctctccccaaaaagcagcaatagtagtagatttaacaataccatagactcatgactatgaaatcgtggctatttgtgttaacatgttgttcctgttgttgatgtgatacaaagctcctgcaaaacagctggcacagtccagtgcactggcttccctcactggactcggtaagtgttttccatatttgtgagagggcctaaagggaaaaatcacacatacattgtctctctgcgtgttctattttgaaactgtattagtcctactcagtttataaaaacctaggtcttagggttatgtcatcctgtctaaaaaggtttgcctatttttttgactaacgcattcacagtgagaaatttataaatgtgatgggtaattcatagnttaatgggggcangnta

SEQ ID NO: 75 - DNA, 691 bp, Homo sapiens
  misc_feature (531)..(531): "n" may be a, t, c, g, other or unknown
  misc_feature (634)..(634): "n" may be a, t, c, g, other or unknown
  misc_feature (649)..(649): "n" may be a, t, c, g, other or unknown
  misc_feature (675)..(675): "n" may be a, t, c, g, other or unknown
gagtctgcgaacggagcagctgctgcagcagggcccatggcggacacccagtacatcctgcccaatgacatcggcgtgtctagcctggactgccgtgaggccttccgcctgctgtcacccacagagcgcctctatgcctaccacctgtcccgtgccgcctggtacggaggcctggctgtgctgcttcagacctcccctgaggccccctacatctatgctctgctcagccgcctcttccgcgcccaggaccccgaccagctgcgccaacatgccctggctgaaggccttaccgaggaggagtatcaggcgttcctggtctatgccgcgggtgtttactccaacatgggcaactacaagtcctttggtgacaccaagtttgttcccaacttgcccaaggaaaagctggaacgggtgatcctagggagtgaggctgctcagcagcacccagaagaagtcaggggcctctggcagacctgcggggagcttatgttctctctggagccaaggcttcgacacctcggactggggaangagggaatcaccacctatttctctgggaattgtaccatggaagatgcccgggtccgcctcgaccgcatcaagatccggtctgtgggcaaagcctgctctaaangcgcttcctgcgganacttcaaggtgctgaaagtccaacangggaatttggccggga

SEQ ID NO: 76 - DNA, 781 bp, Homo sapiens
  misc_feature (715)..(715): "n" may be a, t, c, g, other or unknown
  misc_feature (725)..(725): "n" may be a, t, c, g, other or unknown
  misc_feature (776)..(776): "n" may be a, t, c, g, other or unknown
atcttcaacaaactttacaaaaacaagcaatggggaaaggaatccctattttaacaaattgtgctgggagaactagctagccatatgcagaaaattgaaactggaccctttccttataccttatacaaaaattaactcaagatggagtaaagacttaaatgtaaaatccaaaactataaaatccctagaagaaaatctaggcaataccactcaggacacaggcatgggcaaagattgtatgatgaaatcgccaaaaggaattgcaacaaaagcaaaaattgacaaatgggatctaattaaactaaagaccttctgcatagcaaaataaactgtcatcagagtgaacagacagtctacagaatggaagaaaatttttgcaatctatccatctgacaaaggtctaacatccagaatctacaaggaacttaagcaaatttacaagaaaaaaagaaccccattaaaaagtgggcaaaggacataaacagacatttctcaaaagaagacatacacatggccaacaaacaagaaaaaaaggtcaacatcactaatcattagagaaatgcaaatcaaaaccataatgagataccatctcatgccagtcagaatggtgattattaaaaagtcgagaaacaacagatgctggcaagggttcagagaaacacttttacactgttggtgggaatgtaaattagttcaaccaattgtgggaagacangggtggtgantcctcaaaggatttaggaactgggaaatatcatttgacccagcaatcccantacta

SEQ ID NO: 77 - DNA, 838 bp, Homo sapiens
  misc_feature (652)..(652): "n" may be a, t, c, g, other or unknown
  misc_feature (718)..(718): "n" may be a, t, c, g, other or unknown
  misc_feature (803)..(803): "n" may be a, t, c, g, other or unknown
  misc_feature (807)..(807): "n" may be a, t, c, g, other or unknown
  misc_feature (829)..(829): "n" may be a, t, c, g, other or unknown
cagaaaagcaaaaaccaagaggtcaagaaaagcagtccagagatggaggatgctcgcgtgctttcaaaaaagcagcctgacgtgtcctctagagaggtcattctgctgagggaaggagaggctgaaagaaagcctgtgaggaaagaaattcttaaaagagaatctaaaaaaatcaaactggacagacttaatactgttgccagccccaaagactgtcaggagcttgccagtatttctgttgggtctggctcaaggcccagctcagacctacaagcaagactgggagaaccagcaggtgaatctgtggaaaatcaagaagtccaatcaaaaaagcccattccctcaaaaccacagctcaaacagctgcaggtattagatgatcaaggaccagagagagaagacgttaggaaaaactattgcagtcttcgtgatgaaacacctgaacgtaaatcaggccaagagaaatcacattcagtaaatactgaagaaaaaattggcattgacatcgatcacacgcagagttaccgaaaacaaatggaacagagtcgtaggaaacagcagatggaaatggaaatagccaagtctgagaagtttggcagtcctaaaaaagatgtagatgaatatgaaagacgtagcctcgttcacgaggtangcaaaccccctcaagatgtcactgatgactctcctcctagcaaaaagaaaaggatggatcatgtcnattttgatatctgcaccaagcgagaacgggattacagaagttcacgccaaatcagcgaagattctgaaaagactgggtgggttcnccantgtccgacatgggtccctccantgaagatta

SEQ ID NO: 78 - DNA, 800 bp, Homo sapiens
  misc_feature (36)..(36): "n" may be a, t, c, g, other or unknown
  misc_feature (580)..(580): "n" may be a, t, c, g, other or unknown
  misc_feature (707)..(707): "n" may be a, t, c, g, other or unknown
  misc_feature (731)..(731): "n" may be a, t, c, g, other or unknown
  misc_feature (733)..(733): "n" may be a, t, c, g, other or unknown
gtgttactgatgtcaaccttaaataacaatatccangataatattgttaccagcggtgagtccagctatctggagaaactccagaatggcaactttgtggcaatttcagttctttgtcttctggaaggaaagatttcaaatgagagacacaggcaaggtttaaagcaggagggagaatttattttaagcaaagcgagaatttattagagagagtacacttgaaggagagccatgtgggtgacttgaaaaatcaagtgtgttgtttgcttcagtcacgccccccacagccatgcctgggcagttgtttaaaggtattttgttcctaactgcctcccccattatcttcatgtacctggaatttgtgatacaatgaacaataatatagccaatccatagcttatgttattttaatgtaaattctttgtaaacaacttaggaacagcctcttcctttatctttaaaatcccacttgtaactgctactaattgaagtgtatattcagggcacttgaatctatgctcccactgagctgttcttaagttttgggctcaggtgaactctaaacttagtcatagaatanggtgttagacatgagcagggcaagagagagggcccccaagaatgttgggcagttgtcaagccatggtcaggcaattataaatctgtccccctgaaataatgagcaagagaagggaggaaccccaganctgtctgggtccaataaagtaacngncaagcaggcataaaaccgtccctccaaagataataagttgggcatgactgggtgcctggaaatgaca

SEQ ID NO: 79 - DNA, 808 bp, Homo sapiens
  misc_feature (693)..(693): "n" may be a, t, c, g, other or unknown
  misc_feature (697)..(697): "n" may be a, t, c, g, other or unknown
  misc_feature (720)..(720): "n" may be a, t, c, g, other or unknown
  misc_feature (793)..(793): "n" may be a, t, c, g, other or unknown
  misc_feature (806)..(806): "n" may be a, t, c, g, other or unknown
tattgtacaaattcgccaatattcaacagcgttcttaaactgaacaagcatatcaaagagaatcataaaaacattcccttggccctgaattatatccacaatgggcagaaatccagggccttaagccccctatctcctgtggccatagagcagacatctcttaagatgatgcaggcagtaggaggtgcgcctgcacgtcccactggagaatatatctgtaatcaatgtggtgctaagtacacatccctagacagctttcagactcacctaaaaactcatctcgacactgtgcttccaaaattgacctgtcctcagtgcaacaaggaattccccaaccaagaatccttgctgaagcatgttaccattcactttatgatcacttcaacgtattacatctgtgagagttgtgacaagcaattcacatcagtggatgaccttcagaaacacctgctggacatgcacacctttgtcttctttcgctgcaccctctgccaggaagtttttgactcaaaagtctccattcagctccacttggctgtgaagcacagtaacgaaaagaaagtctataggtgcacatcttgcaactgggacttccgcaacgaaactgacttgcagctccatgtgaaacacaaccacctggaaaaccaagggaaagtgcataagtgcattttctgcgggtgagtcctttggcancgangtggagctgcaatgccacatcancactcacagtaagaagtacaactgcaagttctggtagcaaaaggccttccaatggcgattaattttggttagnaaaaacaccttgnga

SEQ ID NO: 80 - DNA, 741 bp, Homo sapiens
  misc_feature (643)..(643): "n" may be a, t, c, g, other or unknown
  misc_feature (685)..(685): "n" may be a, t, c, g, other or unknown
  misc_feature (704)..(704): "n" may be a, t, c, g, other or unknown
tttttaaatacagatttttatttaaccctcttgcatatacatataaaataacaaaaaaataaaatattgagatatcatcaagaaatttctacagcttcacattcaaactcttcagcactttcagagctattgatatgcatatgtccacctagtaccatcttctgtgctttcagaattattggtaaggctgcatttcctgagtgctctaccacacttatgtctggattttttttacccagctacagacccacactcctgcaagatttgatacccttctatttggcaaaactcagtttcacttttctttcagtttaatcacaggtccttagaagatcggacctgtgattctattcaaagtcagaaagagatttctcacaaattgatgtcatattaacatgtcaatatgaaaattattgtttggtaaaccagaagtgacctgtctgaagccctcaattgtggtatttgtgtgtttgttttttctttttcaagattctttttaaagaaaatatatggtagctgttgtttaacatttatctacttacagagcgttcagaggatgttatatgtttattaagtgctcaatactgtattttaacctaatctgaattttaatcataatcctgcacaatgcatggattctggntgctttgaaatggttctgttcaaaggacttatcaatgtctcntgctttgagatgtattgcntgggtgtgtagtagcacaaacgtaccaccaataatgt

SEQ ID NO: 81 - DNA, 889 bp, Homo sapiens
  misc_feature (658)..(658): "n" may be a, t, c, g, other or unknown
  misc_feature (666)..(666): "n" may be a, t, c, g, other or unknown
  misc_feature (693)..(693): "n" may be a, t, c, g, other or unknown
  misc_feature (769)..(769): "n" may be a, t, c, g, other or unknown
  misc_feature (850)..(850): "n" may be a, t, c, g, other or unknown
  misc_feature (870)..(870): "n" may be a, t, c, g, other or unknown
  misc_feature (883)..(883): "n" may be a, t, c, g, other or unknown
aaattttaggagattctttgaataaacctcatttagtctctctcctataaaaggaaaagcagaacctcaagtccacatttattttgcatttgctctcttgttcacattcttctctatgtcaataaaagttagatggcattttttatagctgtgtatcaaatatgtgaatatagaattccaactaaaatagcaatagatgggaaaactttctagttcattcattgtcaaaagtgagtgctgagaggacatctgaagccccacctaaaagtaaatcctcagcaggaaagataatgcagataaattttgggtccaaattcttaatctgggcaaagaaagaaaacaaacacacttactagatggatttttcataaaagttcctttccatgctgtccaaagtgattaaattagtcatccattcttttatctcttctgttgataatcatataagcaactcctgaatctatatgagtattcagtcttctttattattcagaagatttgccattttagtcaactcaaatatcagtactatttcatagcatgctagttcaggttacacaaagcccaccaggtacacctggaatctagccagaatgcagtccaatcatgagcactttaaacatttacctcattttactatttgtcttagagctatggnaacattantctgttctggagtatctcacacttcangagcattagttgaagcagtacagatacagttaagtgtcctctccggacattcatttgttaactttggaaacaactnggattcaaagacccttaaggttaaaaacaaaccttaatggcctattttatgggaagaaaaaacctggttaattttaatccngggtttaaaaagttaaaaancggttggcctccnaccaac

SEQ ID NO: 82 - DNA, 810 bp, Homo sapiens
  misc_feature (745)..(745): "n" may be a, t, c, g, other or unknown
  misc_feature (751)..(751): "n" may be a, t, c, g, other or unknown
  misc_feature (776)..(776): "n" may be a, t, c, g, other or unknown
agaaacatcgagaaaaagaagctcaaactggaggattataaggatcgcctgaaaagtggagagcatcttaatccagaccagttggaagctgtagagaaatatgaagaagtgctacataatttggaatttgccaaggagcttcaaaaaaccttttctgggttgagcctagatctactaaaagcgcaaaagaaggcccagagaagggagcacatgctaaaacttgaggctgagaagaaaaagcttcgaactatacttcaagttcagtatgtattgcagaacttgacacaggagcacgtacaaaaagacttcagagggggtttgaatggtgcagtgtatttgccttcaaaagaacttgactacctcattaagttttcaaaactgacctgccctgaaagaaatgaaagtctgagacaaacacttgaaggatctactgtctaaattgctgaactcaggctattttgaaagtatcccagttcccaaaaatgccaaggaaaaggaagtaccactggaggaagaaatgctaatacaatcagagaaaaaaacacaattatcgaagactgaatctgtcaaagagtcagagtctctaatggaatttgcccagccagagatacaaccacaagagtttcttaacagacgctatatgacagaagtagattattcaaacaaacaaggcgaagagcaaccttgggaagcagttatgctagaaaaccaaatctcccaaaacgttgggatatgcttactgaancagatngtcaagaagaagaaacaggagtccnttaagtccctgggaggcttctggtaagcacaaga

SEQ ID NO: 83 - DNA, 789 bp, Homo sapiens
  misc_feature (679)..(679): "n" may be a, t, c, g, other or unknown
  misc_feature (734)..(734): "n" may be a, t, c, g, other or unknown
  misc_feature (788)..(789): "n" may be a, t, c, g, other or unknown
tagaggggaagtcctatactgtgtgcttcatagtggtatttctaatgataacttttgtgggaaagcagcctcgttatagctggatcctagattagtccagtgaattttaataagaaattacactgttgtaaactcacctcttatgcattggtcagtgatgagatatatatataaatagatagatagataaaatttgctcttatatagccatttattcatcattggccctgtttggcccatcctcagtgtggctgtgagattattgataactggtcactgtcagataaatcacattctattaggaaacacctatataggttatgcagaaacatgcagaaatgccacctgtccatacttacgtggctttacataaacaaaagactgtcttgtctttgtggtgactgaatttacaacgtcctcccctggaaatggaaaagtacctatcaggagatgtatgacaaaagaaattatcaagcctgacttcatatatattatgaacagtctagaggaagcatctttcttagaactaaggaggtctgctgaacattggccacattctggactttcatgaaaatcatggacccagagttggggttaagccacttagaaaaagctgttgaaaacatctcaaagggcactgaacaatttttaaattacacttaacatgccaggtatctangtatctagtgcttttagcaatattatcaatattatcaagggcccagcttctttgngtccttcccccttgcgattccccttttttttttttttttgcctttttaaaaatnn

SEQ ID NO: 84 - DNA, 696 bp, Homo sapiens
  misc_feature (559)..(559): "n" may be a, t, c, g, other or unknown
  misc_feature (623)..(623): "n" may be a, t, c, g, other or unknown
  misc_feature (666)..(666): "n" may be a, t, c, g, other or unknown
  misc_feature (673)..(673): "n" may be a, t, c, g, other or unknown
atttgacatgctgcttcctttctgatgggctctaacttcagcttttcggtctcattcagagtagagaaattaacagattttactggcgggtgttttcagattaagaaactcaaagggcagctggaggagagacagaagattggcaaactagacaatcttcgatctgaagatgatgtcttggaaaacgggacagacatgcatgtaatggacctacaaagtaaatgtcaattcttgtgtagaagtaaatgctttcacatgtgctgttttagtatacttgtgctggcagagaaaactgtcacggcaaagaatgccctcattccctcacatccccacaaaagcccttaaaaataaaagcacaaggaggggtaggtagacagaacaatggtgtttctctctgagcctatgaaatagaacaggtacccaaaaacgtgcaccaagataccaccacatgttgtgccgatggaaaccacatttactttgctggatacagcaatctttcgatctgttgattgtatgaaaaaaaaaaaaatgaaaggcttttttcatgctaataaactanaaacagtcttaagggagataaaattatgcccagtctctctccgcccttttccctaccccctacnatctctttgtcttcttcactcataaggcactctcttgcctganggttccngccccaagcacaaggggcgggaa

SEQ ID NO: 85 - DNA, 498 bp, Homo sapiens
  misc_feature (476)..(477): "n" may be a, t, c, g, other or unknown
  misc_feature (496)..(496): "n" may be a, t, c, g, other or unknown
atttttagtagagatggggttttgccatgttggccaggctggtcttgaactcctgacctcaggtgatccacccgcctcggcctcccaaagtgctgggattacaggcgtgagccaccgcgcccgcccttctgtctttgtctttcttattcactattccagttttcttcaccttctcccttctggaaggccactcttctgggtggaggggaccagacttcagaaggtactgacctcttcttcttgttctctttggggcacttccttcctcctagccaacttcacgttgccagatgttggggacttcctggatgaggttctgttcattgagctgcagcgggaggaagcggacaagctagtgaggcagtacaacgaggaaggccgcaaggctgggccaccccctgaaaagcgctttgacaaccgaggtggtggtggcttccggggccgcgggggtggtggtggcttccagcgctatgaannccgaggaccccctggaggnaa

SEQ ID NO: 86 - DNA, 750 bp, Homo sapiens
  misc_feature (475)..(475): "n" may be a, t, c, g, other or unknown
  misc_feature (683)..(683): "n" may be a, t, c, g, other or unknown
  misc_feature (687)..(687): "n" may be a, t, c, g, other or unknown
  misc_feature (732)..(732): "n" may be a, t, c, g, other or unknown
tgagaagagatttaaatttccatgtcttcttggaatataatcaagatttgagtgtgcgaggaaaaaataaaaaagagaaacttgaagacttctttaaaaacatggttaaatcagcagatggagtaatcgtttcaggagtaaaggatgtagatgatttctttgagcacgaacgaacatttcttttggaatatcataaccgagttaaggatgcatctgctaaatctgatagaatgacaagatcccacaaaagtgctgcagatgattacaatagaattggttcttcattatatgctttaggaactcaggattctacagatatatgcaagttttttctcaaagtttcagaactgttcgataaaacaagaaaaatagaagcacgagtgtctgctgatgaagacctcaaactttctgatcttttaaaatattacttaagagaatctcaagctgctaaggatctcctgtatcgaaggtctangtcactagtggattatgaaaatgctaataaagcactgggataaagcaagagcaaaaaataaagatgttctacaggccgaaacttcccaacaattatgttgtcagaaatttgaaaaatatctggagtctgcaaaacaagaacttatggattttaagacaagaagagttgctgcattcagaaaaaatttagtgggaactggcagagttangaantggaaagcaattgcaaaggggtaatcctacaagttggcctgcaanaaaactggccttggcaaa

SEQ ID NO: 87 - DNA, 696 bp, Homo sapiens
  misc_feature (547)..(547): "n" may be a, t, c, g, other or unknown
  misc_feature (643)..(643): "n" may be a, t, c, g, other or unknown
  misc_feature (648)..(648): "n" may be a, t, c, g, other or unknown
  misc_feature (696)..(696): "n" may be a, t, c, g, other or unknown
ttcaagatgcttgtaaatgatatcaaccgtttatttagtccacccctgaagaactgagggtcctgggaactgaaccatatcaatgcaatcttttctacattattaactgaagaaaaatgggtactttttaaactttttttttttaagattaggaaacaaaaagaagtcagaaggagccaaatctggactgtaaggtgcatacctaatggtttcccatcaaaactcttacaaaatttctcttttttgatgagaggaatgagtagaggcattgtggtgcagaagtctctagtgaagctttcccaggcatttttctgccgaagctttggctaactttctcaaaacactcataataagcacgttatcattctttgttccttcagaaagtcaacaagcaaaatgtcttgagcatcccagaaaactgtttccatgatctttgctcttcatctgtctgcttttgctttgactgaatcacttctgcctcttggtggccattgccttaattgtgctttactatcttcaggattatactgggaaaagaatgctttangtatcctgggccctacttgttgaaaaatttccattgaaaagctctgcttttgcaagctgatcggggaatgcaagtgggtttttgggtaccccatcnaagtnggaaaggtttactcaaactttaaattcctcaagtcaaaaaattggttn

SEQ ID NO: 88 - DNA, 660 bp, Homo sapiens
  misc_feature (361)..(362): "n" may be a, t, c, g, other or unknown
  misc_feature (535)..(535): "n" may be a, t, c, g, other or unknown
  misc_feature (617)..(617): "n" may be a, t, c, g, other or unknown
  misc_feature (652)..(652): "n" may be a, t, c, g, other or unknown
  misc_feature (659)..(659): "n" may be a, t, c, g, other or unknown
attccgaaagaaacgtgtcaggcaagaagcgctagttcacgcctgtcattccaccgctttgggaggccaaggcagggggatcacttgccccagaagtttgagaccagcctgggcaacatagtgaggcccctgtctctacaaaaaacttaaaatcaataaacaggtctccttccttcctcaatagtcctgttggtggctcacctctctgcctctccagatgtgaggcagatccacacgtttagctattgagataaggctgggcgtggtggctcacacctgtcattccggcctcagatctcttgtgcccaggagttttaagactagcctgggcgacctggctggcaacatggcctccacaaanntaaataaaacattttaaatatataaacattgagataatagcatcttgatgcctgtcttcattttttgtcttctgttttaaggactattagagacaaactaaccaaagataattctcccctcccacgtggctcgtgctgggacgccggcaccgtgagatggcgcccgtggccanatagaagggtggcgtgtaaagcaggtggtcacccgtcactcgacttttcgcgtgctggtgagggtggtcccatgtccatggntaaggctcacacctgggcccatctggtggctgtgncatgggna

SEQ ID NO: 89 - DNA, 639 bp, Homo sapiens
  misc_feature (554)..(554): "n" may be a, t, c, g, other or unknown
  misc_feature (557)..(557): "n" may be a, t, c, g, other or unknown
  misc_feature (602)..(602): "n" may be a, t, c, g, other or unknown
gtgccagagggccacgaccaggtgtcctgccaagcccacgtgaatgagctgatcaaaaccatcatcatccagcatgagaacatcttcccaagccccagggagctggagggccctgtctacagcagaggaggaagcatggaggattactgtgatagccctcatggagagactacctcggttgaagactcaacccaggatgtgaccgcagagcaccacacgagcgatgacgaatgtgagcccatcgaggccattgccaagtttgactacgtgggccggacagcccgagagctgtcctttaagaagggagcatccctgctgctttaccagcgggcttccgacgactggtgggaaggccggcacaatggcatcgacggactcatcccccatcagtacatcgtggtccaagacaccgaggacggtgtcgtggagaggtccagccccaagtctgagattgaggtcatttctgagccacctgaagaaaaggtgacagccagagcgggggccagctgtcccagtgggggtcatgtagccgatatttatcttgcaaacatcancangtaagctctgcttttcattttctgctcccctgaaatgacttgcancaacccaagcctcacccctctgggcctaaacccccaa

SEQ ID NO: 90 - DNA, 789 bp, Homo sapiens
  misc_feature (716)..(716): "n" may be a, t, c, g, other or unknown
  misc_feature (731)..(731): "n" may be a, t, c, g, other or unknown
  misc_feature (764)..(764): "n" may be a, t, c, g, other or unknown
gtacgctttcttagaaatgtgagcaaagaggagtgccttaaatgtatgaaaacaactgaaattgaaataatatgatgcataagaactaataaagcattttcttattttttaaaaatttgtaggctgggtgcagtggctcatgcctgtagtcccagcactttgggaggctgaggtaggaggatcactgtagcccaggagaccagcctgagcaacatagtgggacaccatctctacaaagaattaaaaattagccaggcatgggtgacatgtgcttgtggtcctagctattcgggaggctaaggcatgaggattgcttgaactgcagtgagtgaggctgcattgagccatgttcatgccactgcattccagcctgggcaacagagcaagacccagtctcaatgtttttttaaaaattttattttatctgtatttgtattttattaattttttttctagactagggtactgataattatagttaactcttcttactaggtaacttgtttttaatactctaaatttcatactatattactcaaaattcagaatgtaagccaaagagagataaagtatattaataaatgttaggtttaaacttgtatgatacatttccaaataggtattatatatttttaaaatatataaatgtccatcttttctgtattgatgcctatacaaccataaccccagaagtactctcatactgtgaaagtcantgctaaattaggtantcacttcctaaacacatttctgaaaaaaagggngtccttttagggcaagatgacctaa

SEQ ID NO: 91 - DNA, 570 bp, Homo sapiens
  misc_feature (509)..(509): "n" may be a, t, c, g, other or unknown
  misc_feature (546)..(546): "n" may be a, t, c, g, other or unknown
  misc_feature (553)..(553): "n" may be a, t, c, g, other or unknown
gagtgttcgggacgcgggcctgcaggcgccatggtcttcctcaccgcgcagctctggctgcggaatcgcgtcaccgaccgctactttcggatccaggaggtgctgaagcacgccaggcacttctggggaaggaaaaatcgctgctacaggttggcggtcagaaccgtgattcgagcctttgtgaaatgcaccaaagcccgatacctgaagaaaaagaacatgaggaccgtaagcgtggacccgggacacccgccggccagcgcactcgcggcccctgcgtttctgcgccgcgacccagctagtgtgcagccgcccggccaccctcagccccttcctttcataccttgcttcgaaactccgacaaattatgtcgccccgcaggcaaactgtgggacatccgttctcccgccccgccgccacccccactgtcaccccctgctccagcccctcgcccgggccactgcagagccgccttgacactctccctgcgtcgccagccaccgccctantcgctgctgctctcatccctccggtggcttcccttcnctttggnagctgaagtcaacccag

SEQ ID NO: 92 - DNA, 640 bp, Homo sapiens
  misc_feature (605)..(605): "n" may be a, t, c, g, other or unknown
  misc_feature (622)..(622): "n" may be a, t, c, g, other or unknown
  misc_feature (629)..(629): "n" may be a, t, c, g, other or unknown
ggctccgtgacctcctcggcctcaggccctgcccaatctgttgccaagatgttcagggcagtggaggagggcctgacgtacaaattccatgcggcctggagctccgtgttgcagctgctgtgtgtcttcttcgaggcgtgtgggagacaggcccaccctgtgatgaggaagtgcctccagtccctgtgtgacctgcgcctctcccctcatttcccccacacggcggctcttgaccaggcagtgggggctgcggtgaccagtatgggacctgaggtggtgctgcaggctgtgcctttggaaattgatggctctgaggagactctggatttcccacggagctggctgctgcctgtcatccgagaccatgttcaggaaacgcgacttggttttttcaccacctacttcttgcccctggctaacaccctgaagagcaaagccatggacctggctcaggcaggcagcacagtggaatctaagatctacgacacactccagtggcagatgtggacactcctgcctgggttctgcacaaggcctacagatgtggccatctccttcaaagggctggcacggacgctgggcatggccatcagcgagcgtccaanacctgagggtcaccgtngtgccangccctgcgcaa

SEQ ID NO: 93 - DNA, 687 bp, Homo sapiens
  misc_feature (596)..(596): "n" may be a, t, c, g, other or unknown
  misc_feature (605)..(605): "n" may be a, t, c, g, other or unknown
  misc_feature (678)..(678): "n" may be a, t, c, g, other or unknown
tgatattttgaccttctcctttgaattatgaatgttcttaatggcatctagaatggttaatactttcgcagaagattgtcaatttattttgcccagatccatcggaggaataactgtggcagctttagccctaggaaatgttatttcttaaataataagactttaaagtcaaaattactccttaatccatgggctgcagactagatgtatcagcagacatgaaaacattaatcgttttatacatctccatcagagttcttgggtgactatgtgcattgtcaatgagcagtaatattttgaaaggcatcttttctaagcaataggtcttaacagtggacttaaaatttcagtaaaccatgctgtaaacagatgtgctgtcatccagaccttgttgttccccttatagcacataggcagagtagattaaacataattcttacaggccctagaatttttagtatggtaaatgtgcattgacttcaacttaaagtcaccagctgcattagccccaaacaagagagtcagactgtcctttgaagctttgtttccatgcattgacttctctctagctataaaagcctcagatcgcatcttcntccaatggnaagctattttgtctgcatttaaaaatccgttgcttagtgtattagtccattttcaagctgctggataaagacntacccaagg

SEQ ID NO: 94 - DNA, 597 bp, Homo sapiens
  misc_feature (510)..(510): "n" may be a, t, c, g, other or unknown
  misc_feature (547)..(547): "n" may be a, t, c, g, other or unknown
  misc_feature (550)..(550): "n" may be a, t, c, g, other or unknown
agctttgtgcgctctgttactatggacaagtggaaggacattgagcttgagaagatgaaagctggtgggaatgctaagttccgagagttcctggagtctcaggaggattacgatccttgctggtccttgcaggagaagtacaacagcagagccgcggccctctttagggataaggtggtcgctctggccgaaggcagagagtggtctctggagtcatcacctgcccagaactggaccccacctcagcccaggacgctgccgtccatggtgcaccgagtctctggccagccgcagagtgtgaccgcctcctcggacaaggcttttgaagactggctgaatgatgacctcggctcctatcaaggggcccaggggaatcgctacgtggggtttgggaacacgccaccgcctcagaagaaagaagatgacttcctcaacaacgccatgtcctccctgtactcgggctggagcagcttcaccactggagccagccggtttgcctcggcaaccaangagggcgctacaaagtttggattcccaagcgagtcanaangcgtccgagctgggccacagcctgaacgagaacgtcctcaagcctgc

SEQ ID NO: 95 - DNA, 752 bp, Homo sapiens
  misc_feature (696)..(696): "n" may be a, t, c, g, other or unknown
  misc_feature (717)..(717): "n" may be a, t, c, g, other or unknown
  misc_feature (721)..(721): "n" may be a, t, c, g, other or unknown
aacgttttgttttaagtttattttggcattgagttaaatattaacgccaagattcagaagtaggtgacagacctagactattggttaaattattcagattgttttaattttaaatatgtttcttaaacatctgagcaactttttgtttgatacagatgatgtctaccgtagaaaagcctcagaaagacagtatcagagaaggctggaagatgaatgagactgaacttcagcagtcaataaagtcaatatgaatttttactattggtttcagtgccttttaaaatatacttttcagatctcttgttctgacacagcttgtcctttatcagctgcacaatattccaataactgtttttgcaaagaatttttatagttctgtctctgcttgagtacttcccaagtcactgctggacagcacttgtgggaaaattatttcctcctaaaacactcactcgatgaatctagtccatgaaatatttcttaaacaattcaaggatcaatcaggatgcttttcaagtgaagcccgaattgttttcggcaatctttgtttttaggcaactaattataaccttatttacttttttgcagaattcaaattaaattatggacacattctctaatgccagatcatttaaaccagggataattatgcaggttgtatttccgccagctactaagactataaactttttgccnagggtgggtgggaaaattccntganttggacctacggcaatttcctcaatggccaa

SEQ ID NO: 96 - DNA, 808 bp, Homo sapiens
  misc_feature (28)..(28): "n" may be a, t, c, g, other or unknown
  misc_feature (549)..(549): "n" may be a, t, c, g, other or unknown
  misc_feature (586)..(586): "n" may be a, t, c, g, other or unknown
  misc_feature (710)..(710): "n" may be a, t, c, g, other or unknown
  misc_feature (747)..(747): "n" may be a, t, c, g, other or unknown
  misc_feature (782)..(782): "n" may be a, t, c, g, other or unknown
atgcaattacaaatccaataccattgangcccttttgggacctatccctggaattccctgaacgctatcactgcatagaaaaggggtttgtccctttgaatcaaacagagtgcttgctcactgagatgctggccaaattcacagagacagaggccctggaagggagaatctacgcttgtgaccagtgtaacagtgagtgctgtgtggaggagggggcgtagtggggaagaataattggaatatcagtttaaggtgctgctttgtcctctttagtcaaaagtaacactaatgatattgaatggttctaaagcatcttttaaagatctttttctcccatttttctaaaaacaaaaaaacatggacttgttttaattatgtattaaaaaacaaaacaaggctgggcgttgtggctcacgcctgtaatcccagcattttgggaggccaaggcggacagatcacttgaggtcaggagtttgagaccagcctgaccaacatggtgaaaccctgtctctactaaaaatacaaaaattagctgggcatagtgggcanatgcctgtaatcccagctactcgggaggctgaagcangagaatcggttgaacccaggaagcggaggggtgcaatgaagccaagatcgcgcattgcactccagcctgggcaacagagcaagactccgtttcaaacaacaacaacagcaacaaatggaacaangacctaggagttgattgacctccctgaattgcattangttgtcaaccttggtaagggattttaaaagtttgngggctcctgaaatgggggactctgaa

SEQ ID NO: 97 - DNA, 681 bp, Homo sapiens
  misc_feature (625)..(625): "n" may be a, t, c, g, other or unknown
  misc_feature (653)..(653): "n" may be a, t, c, g, other or unknown
  misc_feature (656)..(656): "n" may be a, t, c, g, other or unknown
ggaaacatgcagcatgtagtaatttatgacagcttctttcacttagcatgaggttttcaaagttcattgatgtggtagcatttgtcagtactctgtgcctttttatggctgaataatattttatcatatggatttaccacattttatcattttatttatccatcatcagttgattgacatttgagttgcttctactttttgagtattatcaataattctgttatgaacattcttgtacaattttttggtagacatttatcttcatatttcttggatatatacctaggagcagaattgctgcgtcagatggtaatgctgtttaaccttttcaggaactgtcagactgttctgaagtgggtacattattttacattccaaccagcagtgtatgagaattccagtttccccacatcctcatcaacagttgttattgtctgtcttttttattatattcatctgtaatgtgaagtgtttatctcattgtggttttgatttacatttccctgatggttgatgattttcaacatcttttcatatacttattaggcattatgtatcctctttggagaatgtctgttcagatcctttacctactttagaattggtttatctttttaatattganctggaatagtttttaaaaaatatatccnaanatacaagtctcttatcaagataata

SEQ ID NO: 98 - DNA, 549 bp, Homo sapiens
  misc_feature (400)..(400): "n" may be a, t, c, g, other or unknown
  misc_feature (424)..(424): "n" may be a, t, c, g, other or unknown
  misc_feature (506)..(506): "n" may be a, t, c, g, other or unknown
  misc_feature (532)..(532): "n" may be a, t, c, g, other or unknown
  misc_feature (549)..(549): "n" may be a, t, c, g, other or unknown
agctggcccgcttgaggcgtagggggtggcgctctccgttcggcggcgctcccatggcgcacattaccattaaccagtacctgcagcaggtgtacgaagccatcgacagcagagatggagcatcttgtgcagagttggtgtcttttaaacatcctcatgttgcaaacccacgacttcaaatggcctctccagaggagaagtgtcaacaagtcttggaacccccttatgatgaaatgtttgcagctcatttaaggtgcacttatgcagtggggaatcatgacttcatagaggcatacaagtgccagaccgtgttagtccaatcattcttgcgagtgtttgccaataatgcagatcaacagttggtaaagaaaggaaaaagcaaagttggggacatgttggnaaaggcagcagagttaatgatganctgtttccgggtctgtgccagcgacacccgtgctggtatagaggactctaagaagtggggcatgctgtttctggtgaaccanctgtttaaaatctacttcaagatcancaaactccatttatgtn

SEQ ID NO: 99 - DNA, 738 bp, Homo sapiens
  misc_feature (694)..(694): "n" may be a, t, c, g, other or unknown
  misc_feature (718)..(718): "n" may be a, t, c, g, other or unknown
  misc_feature (731)..(731): "n" may be a, t, c, g, other or unknown
ctttatcaaggaaattagcacaccaagtctgacagaagagtagattgtgtttgtgcttacccttcttctcctaaaattaagtgttagctttcaaacttgcttttgaagtgctaagaaccctgatgataaatgatgaacaaagcctcctgtttacattggaagcatcaaaacagcaggactgggccaattcacccattcctgttgatcattagacattaactggttgtccaacttcaaccacatcaactacaaaatcctgaagtgaaacaaagtctaagttagttgacttttctttgattagtctctagtgcatttatcactttctatgaaagaagcatctaatttagatggcagttgatttgtgtcatgggatttcttctgacaggaggcagagttatgtatgtgtttatggcttctttgcctttaaaagattaatgttgggcaaatataaatcacaagacctggatagggggctgggaagatggagcaggagcttgccagggtgatggattgagacgtattttagaggattttcattgctagaaaaaacactgggaagatgtggcagaggggtggtggggcagggacagtgaagagagatggctttttctccctaagcacagagaaaggacaggatggggcacttgagccagggcaagtggctttctggctctgtttcagaagcaaaatgganattgaaattgggtaacttcctgangcttctttcctgncctgata

SEQ ID NO: 100 - DNA, 759 bp, Homo sapiens
  misc_feature (561)..(561): "n" may be a, t, c, g, other or unknown
  misc_feature (669)..(669): "n" may be a, t, c, g, other or unknown
  misc_feature (719)..(719): "n" may be a, t, c, g, other or unknown
  misc_feature (734)..(734): "n" may be a, t, c, g, other or unknown
aatattttcccctgtcttattttctatcatttcacatcttcttaaacacatatatttttaaaagaggttttgactcactggtgaatttgtcttaaaatggaaaaataaaatcaaatataagaattttgttatgaatctttggggaaacacaattagggaatctaccttaataggtaaacccatgtaatttcttatttccgtctagttataggaaaatactgagatacttgtgagatgttttctttttttttttttccaacttgtatacacgttgttctataagtggttgattgttttttaggaaaaaaaaattcagcatctcaaatgtacctttaatattgcttctgatttttgttgttttgctatcatagcgttacctacctcacagagatgttttaggtcataagtatttttcatttaattttttttccccttcatttcctttttttccctcctaagctataaatatacagccttaaaaaaaacactcagaaatttaagtccaagaagcctgcttttcttgatacctttcaagtgctagattaataacatttttgtcangtggttaccagaatggaggatacttgagctgagttttgctagagtccaagaatcatctattccaatttctggggacacatattttgtcctggttaagagagatatatnatgatgcctatctgattccggtgggtgggctgggctttgatgtatggtanatgtgggcgggaatntgtgtgcgtgtgtgtgtgcatgtgt

SEQ ID NO: 101 - DNA, 579 bp, Homo sapiens
  misc_feature (528)..(528): "n" may be a, t, c, g, other or unknown
  misc_feature (556)..(556): "n" may be a, t, c, g, other or unknown
  misc_feature (578)..(578): "n" may be a, t, c, g, other or unknown
aaaaagagccgagtgggacaaagcctggggctgggcgggggccatggcgctgccatcccgaatcctgctttggaaacttgtgcttctgcagagctctgctgttctcctgcactcagggtcctcggtacccgccgctgctggcagctccgtggtgtccgagtccgcggtgagctgggaggcgggcgcccgggcggtgctgcgctgccagagcccgcgcatggtgtggacccaggaccggctgcacgaccgccagcgcgtgctccactgggacctgcgcggccccgggggtggccccgcgcggcgcctgctggacttgtactcggcgggcgagcagcgcgtgtacgaggcgcgggaccgcggccgcctggagctctcggcctcggccttcgacgacggcaacttctcgctgctcatccgcgcggtggaggagacggacgcggggctgtacacctgcaacctgcaccatcactactgccacctctacgagagcctggccgtccgcctggaggtcaccgacggccccccggncacccccgcctactgggacggcgagaangaggtgctggcggtggcgcgcng

SEQ ID NO: 102 - DNA, 769 bp, Homo sapiens
  misc_feature (577)..(577): "n" may be a, t, c, g, other or unknown
  misc_feature (695)..(695): "n" may be a, t, c, g, other or unknown
  misc_feature (698)..(698): "n" may be a, t, c, g, other or unknown
  misc_feature (762)..(762): "n" may be a, t, c, g, other or unknown
tttaaaattatgaaaagtaaggaaattcttatttaagcaaggttattaattggacattactgtatttttggtacctattgtatctgagagtctagagagagtaatagaatcataacattactattctaaaatagtatcttcattgtttaaaccctattcacctccttttcctattgcatttgactttttcatagataaatctgaagttattatttttttaaataatcctttctacatgggagcagtgtatattaggaaattttcaattactttggacctgcacctttgcattgtaggtcagaacctacaaaaattccatcttggaaaacattttagatttaccttgtattcacacacccctgcaaagtgggtctttgcaaacaggaaaggtaaaagatttatttttactgcaaaatcatgcctttatataggattagtctgtggattatttcaggcaacaatgagtagatttttgaaggaaacttcataacacagttttggagccctatcttctgtaacacatttccaacctttggaaataaccttgattttccaacttttaacctgataccaacanaaatggacaaagataatatcacatggaattattctgaagagccagctgctgagaagttccaggagctgtaaattagacaaaagcatccatttatttgggagtaagttacaatatggcntancttaaaaaatatataatgattcagggaggtattttaatggaaccttatgtggcaatttatgggngaactaa

SEQ ID NO: 103 - DNA, 686 bp, Homo sapiens
  misc_feature (640)..(640): "n" may be a, t, c, g, other or unknown
  misc_feature (660)..(660): "n" may be a, t, c, g, other or unknown
  misc_feature (673)..(673): "n" may be a, t, c, g, other or unknown
agttaagtaaatgtagtattggctaagttactgtaagtcctcatcttctggtaggtcctgtaactctaattaggcatttgtacatttttagcagcaaaattgcctcagcagagctcccagttttattcccagttgtggctgaaaagcaaagccatggcatcagtatccttgtgcaatcggaggttgctgggctttcaccacctgtgttgttaaccttatttcctggaggaagaaacagatgaaacaagtgcctaactccctttatcaaacacagccaaggacagcctcttttaacatgtgacttcatacttgaggaaaaggagagttgacagctgtatttaaaaacccatggagccgggtgcggtggctcacgcctatgatcccagcactttgggaggccgaggcaggcggatcacaaggtcaggagattgagaccctcctggctaacaccgtgaaaccccgtctctactaaaaatacaaaaaattagccgggcgtggtggcgggtgcctgtacaggaggctgaggcaggagaatggcgtgaacccgcgaggcggagcttgcagtaagctgagatcgcgccactgccctccagcctgggcaacagagcaagactccatctcaaaagataaatagataaantaaaaacccatggaaatggnttaagaaaatggntctgggtacacca

SEQ ID NO: 104 - DNA, 817 bp, Homo sapiens
  misc_feature (681)..(681): "n" may be a, t, c, g, other or unknown
  misc_feature (778)..(778): "n" may be a, t, c, g, other or unknown
  misc_feature (788)..(788): "n" may be a, t, c, g, other or unknown
  misc_feature (810)..(810): "n" may be a, t, c, g, other or unknown
gattaaatgttctgagtaagtgagtttgtagacattttcttgtaagaaaatgttccatgctttactctgttttggacattttcttttgaaaaattttgagatagaaaccttaatatcatttcatatatttacagcatatagttaatttgagtagagtcaaattaatcttactttagaatttgattactaagtattagcatggataataatgcttcttttgcttaaatgtaaaaattaggccgttttactaggtgtactttgtcttaatcatattcctatttttttatacagctgtgcaaccatattgcttctgggaaaaaatgtcaatatgtgggaaactgttcctttgctcatagtcctgaggaaagagaagtttggacttacatgaaggagaatgggatacaagatatggagcaattttacgaactatggctcaagagtcaaaaaaatgaaaaaagtgaagacatagccagtcagtcaaacaaggaaaatggaaaacaaattcacatgccaacagattatgctgaagttacagtggactttcactgctggatgtgtgggaaaaactgcaacagtgagaagcagtggcagggccacatctcctccgagaagcacaaagagaaggttttccacaccgaggacgaccagtactgctggcagcaccgcttcccaacaggctanttcagtatttgtgatagggatatgaatggcacctgcccagaagggaacagctgtaaatttgcacatgggaatgccgaactcatgaatggggaagaangaagagatgncctaaagatgaaagccaacaangcacgaa

SEQ ID NO: 105 - DNA, 773 bp, Homo sapiens
  misc_feature (640)..(640): "n" may be a, t, c, g, other or unknown
  misc_feature (733)..(733): "n" may be a, t, c, g, other or unknown
  misc_feature (736)..(736): "n" may be a, t, c, g, other or unknown
  misc_feature (767)..(767): "n" may be a, t, c, g, other or unknown
ctggtttcaagcaccccagagggagttgtatccttttgtgtgtgccctgtggaattttcatggcaacataagttgtatttcttcatgactcactgccataggaagaccacccaaaacataccctcttctgtaacccaaatctcagcgtgtgtccttattttccttgttttcagcatgtccaagtgaagccattaagtaggtaatatactgttagacacagatcatggtgcttgggaaaacaacacccaagcctcgtgattaataagcactgttaattgttaagctgctcttgctggtgtctgacctcacggggtttgtgctgtgacagctctttcatgttgatgaggtaaatgagtctctgccatgatggccgggagaagccaggacagagtatcagatcgtgtttcaccaggaaaacaaggttgatttactgtgttacacgagggtgaagtggacccagcaccactgcaccccgtgctttgattcccttgtatgctaaatatgcaagcacaaaacagctttaacacaattttttacctagaaaggagcctggggctgcatccaagtacatttaacatgtgaaaattgagctgctttgaacttgtatgtttttgataactgcttggtatgcttcctggangatcacctgtaggcttttctttccaaatcctaaatccctttgattgaagtgccaagacaagatagctcctcattgaataactccaagtcccanaantcctccctcaatcaagaagtttgaaaggggnaacaag

SEQ ID NO: 106 - DNA, 776 bp, Homo sapiens
  misc_feature (711)..(711): "n" may be a, t, c, g, other or unknown
  misc_feature (731)..(731): "n" may be a, t, c, g, other or unknown
  misc_feature (753)..(753): "n" may be a, t, c, g, other or unknown
gaaagtaaataaggaaatcagctctctaaggcaatgctattctttttatactctcaggatagaagatcttggcgttgtggtagattgccttcctgtgctcaccaattggtaaaaacaatatttttcagaaaaaaaataagattaaaggaggtcaaattatggcccatccatatttttataacttggtatttattttagtttacaggaagaaaaacaatatatctcacttggctgctgtgttgacttgttgcctctagtaaagtcactacttaaaagcaaatttgaagagtaagtgctaatctgaatcttgattcatttttctttttcagcatccttgattttgtgctttgtgagtacatagtagattgggctccatgagacatgcaaggtttctgttttcaagaagctaatagtacaattaggaaaagaatatgaaatgactaaaggacaattataaaagcatctctaaacaaattacatgaaatatacttttgtgtaatagatcatgaaggtaacaattttttaaaagggaagggaccaatgtgtgtgtgtgttttttgggagggaaagtatcatcttttataagaagggctcttagatgaaaacacttgaattttgtaacaaaatgtcatttcagatatgttatagttggtttaaactgggcttcaagcagtcattaaaaaggtggtggtcaagaactatcatccaaanacaggaaattataaatgatngggtgaggtaatacctttaaangattaaacctcaatgccggaaaa

SEQ ID NO: 107 - DNA, 794 bp, Homo sapiens
  misc_feature (515)..(515): "n" may be a, t, c, g, other or unknown
  misc_feature (517)..(517): "n" may be a, t, c, g, other or unknown
  misc_feature (619)..(619): "n" may be a, t, c, g, other or unknown
  misc_feature (631)..(631): "n" may be a, t, c, g, other or unknown
  misc_feature (696)..(696): "n" may be a, t, c, g, other or unknown
  misc_feature (772)..(772): "n" may be a, t, c, g, other or unknown
  misc_feature (784)..(784): "n" may be a, t, c, g, other or unknown
aataagtagcctccaggcattcccttccaccaagaggagcaattgttttttaaatagccctttggcgcccagtctattactaaaccatatgagtcattttttaatattactgcatgtgagttaacatagtcttcccaaattaaagttttagatgggccctcaaaatttttagggcatggttttcctgcaggtttatatggaaagtatggggtccctgacttctcgcaacagtggcctacactgcctttcagttctgtacctaggcctccaaagcactttagcctgtggggcttgccagaactcgggttccagctcctggaatggacagttcccctctggctagggttgatctaatgttccctctgggttactggctgagttctgccctgtgtggctttctgctgtgccagggctgcactgagttcaaatgcagagtctcacaatcattgtattcttcctcccccaggagcacccattctctctttacaccaattgggcactgccaggggatgaananggatgatgttgacaattcaagactatttcttaccctcttcagtgcctgtttccttaatatgataataaaccaggtactgcgatcactcacctgattattggntcttaagaaggngcttttttaatggaattggtcagtttgataattctgtccggagggatgactgctggaggatctantaagccatcttgctctgccttcttggaacacataaaaatcacagttttgggcaactgtaagtcaaagtgttggaanttaattattcantttttccttg

SEQ ID NO: 108 - DNA, 717 bp, Homo sapiens
  misc_feature (623)..(623): "n" may be a, t, c, g, other or unknown
  misc_feature (638)..(638): "n" may be a, t, c, g, other or unknown
  misc_feature (712)..(712): "n" may be a, t, c, g, other or unknown
atctctttgcattattacaagttgttgttatttttagttctatttatatgaaaaatgtactttttagcccacaaaaatagcatagcagcagcttatcaaaatgtcccagacaagtttacttcaacaaattagtaacaccttcatgcttcctgtggtggaagaaatgcagagtccacttcctcccagtgaacatctgagccagatttctgctccactcggtcccccttcccacctcttacagccatgaaataatgtgagagtatttgtttcccctgcaaagggaagagggtccagagacaaaagggaagttagtattcactggaagcctccctgtacaagcaacagtgttaggacttttatacacatttttacaattattacagcagttctcaattattgaaacagagggtaggcatttcccctttttcagaagggaaaagtgagaattaagttaattccaaagtcacacagctagtgagagaaaaagcctggacaggaactcagactgtatgactccaaaggctaagtgcattctatacacacaggccgccctcctggcagtgagagttcaagatctgttggagaaaactcagaccatgggtttcttgcaacttctgctgggngaacaattaaggtgnccgttcccccgtggggaagtgtttcaaagtggaagcaaccacccaagggggaaaaagtcctggggcccttgggngttta

SEQ ID NO: 109 - DNA, 836 bp, Homo sapiens
  misc_feature (692)..(692): "n" may be a, t, c, g, other or unknown
  misc_feature (774)..(774): "n" may be a, t, c, g, other or unknown
  misc_feature (819)..(820): "n" may be a, t, c, g, other or unknown
tctctggaacagttgagagacaaatgcataagcattttagaaagaccaaatgtgaagccatactccaaatattcaacatcactgcagttatttttgagtttatcaagatgtgattacaggagagtcttactgtagtcctgcttttatgtttccaaggtgtttgtgcatggactttcctcttttccaatagccaaacttgtttggatgtgatccaagatgtaccaaaaggtattgaaaattaaatgtaagagtagtcttctagcaatattgcaccattcccaggcagtttccaacgtgcatcagcatgtctgtctccagtggaacaagataacttccagcccctgaacccctggggaaactccttccctctttactgtatgttgttgccactgtaggagaaatctctcctctgcctgactctgcagctgctttacccagaacctcaggaggaactctgagtccagagccaggctgagttcagccaggcaagtctggccttggggctgtatatatctgtctcagacatcgtctgtgttttcatatattttttgactttttaaaagatgacccagaccacaatagtatgttctatttttgttttgttgtgttgtgtttttccattacattgcttaagtacagtatttctaggatagaaaatttgctttcttggtctgccttgggaacatacctancaattacaacattgattttcataaaaattgagtttaaagttccaacttgcaaatgaacttttggataaccatcaattgttanggggaaatgtgtccggattaggaatttcctaaggaaataaccacnnaaatgaaggtttaaaa

SEQ ID NO: 110 - DNA, 759 bp, Homo sapiens
  misc_feature (647)..(647): "n" may be a, t, c, g, other or unknown
  misc_feature (684)..(684): "n" may be a, t, c, g, other or unknown
  misc_feature (732)..(732): "n" may be a, t, c, g, other or unknown
  misc_feature (751)..(751): "n" may be a, t, c, g, other or unknown
tgaacaagaaatcttttttctttagctgggcatggtggcttacgcctgtaatcccagcactttgggaggctaaggcaggagaatcgattgcgcctaggagtttgagaccagcctgggcaatatactgagacctcatctctacacaaaatacaaaaatcaggtggttatggtggtgtgtgtttataaccccagctacttgggaggctgaggtgggagaatcacttgagcccaggagttggaggctatagtgagtcatgattgtgccactgcactccagcctgggtgacagaacaagacctcgtctcttagaagaagaatttttgtctctaatgctttgctaaaagaaaagcaatatctaatatcttttctttgttcaaagaaaagcagtatctaaaagtgcagagttttctgcattttctaaagggaacttgttgggaggtgctctctcctgatgcgctgttcttgagtgccatccatgatcagggttaggtttggaacagagagggaggagaagacagagaggctcttttgggataagtgagcaagaggtgggatggatgaggaaatgaggttaaacgagacccgttcttgtaagagcaaggagagtgcctggcgtggctcctggttttccatggtgggtggagggnccgggcaaccgctgatgccctgttgggggaaggaacnggaggccactctgcaaaagggggctctcgcttccccaatgtcctcatnctcgaaaaagcaaggcaantccagtta

SEQ ID NO: 111 - DNA, 508 bp, Homo sapiens
  misc_feature (379)..(379): "n" may be a, t, c, g, other or unknown
  misc_feature (448)..(448): "n" may be a, t, c, g, other or unknown
  misc_feature (464)..(464): "n" may be a, t, c, g, other or unknown
  misc_feature (485)..(485): "n" may be a, t, c, g, other or unknown
atgaaaatcaatatgaaattatatgactgtttaaaatggcggcttcaaggcgtttcacgggtgtcccggacaggcgtggaggtggggcgcaggcgaggatgaagcttgagttggccaggagtcggaaaacgattgcaggcgggaccgcgtccgtcggggctgaggaaacttagcgtggcagaccctaaactgggataactttagggatatggccttcttttcccagttgcctcaaacttagagcagcgtcgtctttagccgaagattcattttcccagcattttccttctccaggcggagtagttggagacagagggcaagccagaaactgaccttcccatctcctcattcccttccatcaagaacttttcatcgttcnttccccaccctggtttgtaaatggtatttggcttcataaaaacgtttgtccacaggtgccctgctccancagttcgctccagcantataggaagttaccagaaaanaaatttttttttattgaccttgg

SEQ ID NO: 112 - DNA, 879 bp, Homo sapiens
  misc_feature (789)..(789): "n" may be a, t, c, g, other or unknown
  misc_feature (828)..(828): "n" may be a, t, c, g, other or unknown
  misc_feature (845)..(845): "n" may be a, t, c, g, other or unknown
acctaaacatggagacagcgggcgctgcaactgggcagccggcctctgggctggaggctccggggtccacgaatgaccggcttttcctggttaaaggtggaattttccttggtaccgttgctgcagcgggaatgctagctggatttattacaacattatcattggctaaaaagaaaagccctgaatggttcaataagggaagtatggccacggctgcattaccggaaagcgggtcttcccttgccttgcgagctctgggctggggctccctgtatgcatggtgtggggttggtgtgattagcttcgcagtctggaaagctttaggagttcacagtatgaacgactttcgaagtaaaatgcaatcaatatttccaacaattcccaagaactccgaatcggctgttgagtgggaggaaacattgaaatccaaatgagatgagcatggatgaatttcaaaatgcttgttacagaaaggggtggctctggagacaccatgacagcaaaaggactgggactgatttctcccaggaacatgggcagattgctgactgaaccagtgcactggatagcattcagcctcatcacaggaaagtatgtgtgtgcgtgctgggggaaggtaaagttttcccacagttaagaagactatttaaaaatagtaattacaggaataacttccttatgttgggggggacccataggaaatgattctgtttgtaacagttgaagcaaatttcatactaaaaaaagtttataataaaagtatgataagaaaatatttataaaacagancccccaatagcaatatactgcaatgtgtccaaattaaanggagtttcaaaaagccnttccttgtcaaatatattgacaagaaccttggaa

SEQ ID NO: 113 - DNA, 649 bp, Homo sapiens
  misc_feature (575)..(575): "n" may be a, t, c, g, other or unknown
  misc_feature (615)..(615): "n" may be a, t, c, g, other or unknown
  misc_feature (648)..(648): "n" may be a, t, c, g, other or unknown
gatgaaccagtatggatttgcttttctaagcctcctgttggttactaatctcacttggcacattataactaaaggaatcccctcaattcaaaagcatagatggatacaaatgtcagaccgtgggtttaatttgtttagaacacatggcatttcttcacaaggtaacctgctgtatttatttattttcttttggttaaatataatttccaaactttgtggtcaggcagcgtctaaggttacgttaccacagactgacagttggtatatgtaccagccaatcccttcattaaatgtatacagatttagttaagtagcattaaataggattcttagaagtatgtcctcatagaacttttaatacttaaggctttgtaaaaactatccatgaagggaaagctcctcagcataactgctcagggaaatagggctaaataactgaacattaaataattggttaaaggtgctgttagtcgagcctcaatgcttgctacaaggatgtatgtacaaggactgactttaataatttgcattatattgtcccaaccagtagtttattttttgccacggagatgtanaagatattacaagctactggatgcactggtcagattaacntatttcattaaagaagttgggagaacaaaatang

SEQ ID NO: 114 - DNA, 709 bp, Homo sapiens
  misc_feature (687)..(687): "n" may be a, t, c, g, other or unknown
  misc_feature (697)..(697): "n" may be a, t, c, g, other or unknown
  misc_feature (703)..(703): "n" may be a, t, c, g, other or unknown
attgtttttaaaggaactaaggtctttgtagctgcatgtcagctagtcatcagttacattttagagacaggatttttgtttatacttaaacttcagacaaattggcagcatataattgttcctttatacatgagataatatgatgatataactgatgtttaagaacattcttattgtaagacagtttctgttttgccacagcaacccaaaggacagttaagatatgtaccatatgacctttttgcatatataccaatgtgaatttacttttacattaatcatttcccccaaagagttcaccctatgttttgacagaacagttggcatttcaactgataaggtatttctagttttaaaataatttggtgtttgtattttgttttgaatatttttaaagactaattttaagaatgcactttctataaagtatatgcatcttagaaaaccaggaactggggagaaagttttttaaatgatgattgaagatagattttattggagaaatgctttactgatgtgtattttagtgcattttaaaaacctaagtatctggtagtgttccccttgtagtgagcatgagattaaagtttagaactttttaagacaattccttttttgtgggtgtgtactcattaatgcctggtcgtcctttgcaatttagataaatgatataacattaaactcaangggggttganttgcantaggga

SEQ ID NO: 115 - DNA, 734 bp, Homo sapiens
  misc_feature (638)..(638): "n" may be a, t, c, g, other or unknown
  misc_feature (706)..(706): "n" may be a, t, c, g, other or unknown
  misc_feature (730)..(730): "n" may be a, t, c, g, other or unknown
attgagtttctcgctacttctgccactcatcacacttgcttcccagagctttgctgggtgtgctgaagtctccagagaaagtggggaatatgggtgcctagagacttctagggggtgttttcagcccctagagagtagagaagtgtgagaaggggttggtccccgaatattctgtagttttggggaagaagcaatggggacagtggagttggttgccttaagagaggctatggtcccaagagatgggacttggagagtctctacttgcattcctggctaagcccttaatattctcgcacccctccttgcaagactagttccttttgaggtggttcttggctagcttttgagaggctgcagtggctgtgtgcccaggcttaagtcctagctttctccccactctttacctcctaggaaccgggcccatcctgggggaggcagggaggagctcctttttatagtccacatgtaggctttgtgtataggctctgctgcttccttccggccctggcccttcctggtgttggccggtggccctggcttcagcaagactcaggatgcagagtaaacggggcaaggcgttctcctacagaagactggcatccctttttactgagcccaagcctggcacagaggangctggagttaggaagcaagaaaacgaggtgacccagtccttgatcctgagaaaccttgtgaatctggnccaatgcaagaaaaccgctaatgnccaa

SEQ ID NO: 116 - DNA, 677 bp, Homo sapiens
  misc_feature (613)..(613): "n" may be a, t, c, g, other or unknown
  misc_feature (649)..(649): "n" may be a, t, c, g, other or unknown
  misc_feature (671)..(671): "n" may be a, t, c, g, other or unknown
aagcccggcctggcggcggcggtggcggtagctgccgtggcggcctctgcgcatgctccgtcgcctgcccgccctggccgctcgccgcccgcccgcccgacggagacgcagtcccagctatctgacttcatgtgaaagatggctaatgcagaagtgagtgtcccagtgggggatgtggttgtggtacctactgaaggaaatgaaggggagaatcctgaagacactaaaacccaagtgattttgcagttacagcctgtgcaacaagggatttatgaagctgggtcggagaacaacacggcagttgtagcagtagaaactcacacgatacacaaaattgaagaagggattgatacaggcactatagaagcaaatgaggatatggaaattgcttaccccataacttgtggggagagcaaagccatcctcctctggaagaagtttgtatgtccaggaataaacgtgaagtgtgtcaagttcaatgatcagttgatcagccccaagcactttgttcatctggctggcaagtccactctgaaggactggaaagagagctattcgtctgggtgggatcatgctcaagaaaatgatggactccggacagattgatttttancaacatgacaaaagtttgctccaatacctgcaaaancaccaaatttgatcttccgatnaacaat

SEQ ID NO: 117 - DNA, 659 bp, Homo sapiens
  misc_feature (459)..(459): "n" may be a, t, c, g, other or unknown
  misc_feature (573)..(573): "n" may be a, t, c, g, other or unknown
  misc_feature (606)..(606): "n" may be a, t, c, g, other or unknown
  misc_feature (631)..(631): "n" may be a, t, c, g, other or unknown
aaagccttggcactagcggcgtccgggcgcggagtgcgcagggcaaggtcctgcgctctgggccagcgctcggccatgcgatccgccgcgcggaggggacgcgccgcgcccgccgccagggagctgaggcacgctcggcacatgagttcctgtttcattactgtgggcagcatcttcacgcagcacgctggcaccagaaggacaaaaggtagtagatcgacgctgaacagtttcaacacaggggaaaggggaagaattaaggaacctctatgattctgatttctgaaagcagccacagtgagcgctctgcaatgagtccctttgcctggggcatgcaatgcagagacacaaacggacacacatgggcgcacgcgcgcacacacacatgctctgactttgcaagctgaaggctgtgattgtgtggactgcctcgtgtccctcctccttttcactgaatanggaggttcatgctgataccacagggccgacacctgcgttctgcgttcacacctgcgtggatttctgccaccctgactcccttcttgtctgcatccaggtggaagcgtctggaangttcattacacgaccccgcagttccaccccganggaacgggggcctgctacgggcgangcgtctgcccatgctccggggaaggcgt

SEQ ID NO: 118 - DNA, 698 bp, Homo sapiens
  misc_feature (568)..(568): "n" may be a, t, c, g, other or unknown
  misc_feature (638)..(638): "n" may be a, t, c, g, other or unknown
  misc_feature (668)..(668): "n" may be a, t, c, g, other or unknown
  misc_feature (686)..(686): "n" may be a, t, c, g, other or unknown
ttaaaatgctattatgaaacagattcattcattcattcatgttgcccacctggtccccatagtcatcggagttttccactcttgacgaacgaatacttgccctattttccaagctaagtcttgaataccttgtaatgttttacttcttgtggcatcctgcactttgtgtaaaatcaggagtggggagtgccaataaatatttgattgactaattgacagcttgagtcaaggttctggaagagaataaatacaagggaaaggcattccctttttcatttagaccatattttgcctaagccaaatggacgatttacagctaatcattgcgtcttaaccagggacagctggagcttactgcttgcctcctgcctagtcgtctttattccttctataaaggcagaaaacagaagggctctgcacacagcagtcacagacgctcatcaaagacaaaccactgacatggaaactgaacaagaaaaggcttcctggttcaaggctggcttttgggagccatgttcaagcatgccctaagtagcacagtcagcagcctttttccttcactctttangggctggggttgaggaacaagattccctcaattttccaacaaataacctaattcagtgaaataaaaaaanggggggtggggcaatggtgcaatcagtcantcatatgccaagttgtanccatgttaagta

SEQ ID NO: 119 - DNA, 697 bp, Homo sapiens
  misc_feature (616)..(616): "n" may be a, t, c, g, other or unknown
  misc_feature (640)..(640): "n" may be a, t, c, g, other or unknown
  misc_feature (645)..(645): "n" may be a, t, c, g, other or unknown
tgtaaaatgtggacaataataataatgctaacagtaaaaactacctcataggattgatgtgaggattaaatgagctatgaaaacctcttagaaggtacctgttagctagtactcagctcagtgagtattaactgttttgttattaagacgtgtgtgtctctgccatttgtatttaacacgtgtccttgtgcctggcttacctccctgttatactgtaacctccgtaaggacaggcatagtgcccccttcttccttatctctttactgcttgtattagtccatcttgcgctgctacaaaggtacacctgaagctaggtaatttataaagacatgagatttaattggcttatggttctgcaggctgtgcaggaagcatattgctggcatctgcttctggtgaagacctcaggaagttgccttatggcagaaggcacaggggaagcaggcagtcacatggtgagagagaaggagcaatagagagaaacaggaggttctttcaaccaaccaagatctcacgtgagctcattaccacggggagttcaccaagacaaggatgaaggattcgcccctatgacccaatacctcccactaaggcccaactccaacactggggatnacatttcaacacaaggatttgganggganaaacatccgaacaatatcactggcttttccgggctgtaaaacaaatttgggg

SEQ ID NO: 120 - DNA, 634 bp, Homo sapiens
  misc_feature (484)..(484): "n" may be a, t, c, g, other or unknown
  misc_feature (513)..(513): "n" may be a, t, c, g, other or unknown
  misc_feature (540)..(540): "n" may be a, t, c, g, other or unknown
  misc_feature (600)..(600): "n" may be a, t, c, g, other or unknown
  misc_feature (627)..(627): "n" may be a, t, c, g, other or unknown
tcagataaagcccaaactcctatccattcttcccaggtgtgatggggcaccccgtgccctccagcctcctcattcccacttttctcactatgttggctttcgtttaggtctctgaaccctccaggctccctctggccacagacttgccacctggctagctccctctgcctacccctagcctctgagagcctttctgcctcctctgatgaggcccaatcccctagtaaatgattttatttacacagtagacaatagaggctagatgcatattttttttcttaaaatattggactacttttattttcttacataataatgatatttatttaaagtgctttaggatagttcctggatatcattatgtacagattaaagtttaaaaattaaacttctgaaccatgagatagattggttcccattcaagtaatccattcacattttacctactgtaatgactgggaatgtgctgtaacatactttgcanccctggcctcccttcctgtctcctaaaanaatggagctggtgttttcaagtttggnaggatggcttctgttggaaatttgcccttttaagttaggaagactgacccccatcttacngctctctttcgaagctagtctaatggnacaagta

SEQ ID NO: 121 - DNA, 740 bp, Homo sapiens
  misc_feature (655)..(655): "n" may be a, t, c, g, other or unknown
  misc_feature (716)..(716): "n" may be a, t, c, g, other or unknown
  misc_feature (729)..(729): "n" may be a, t, c, g, other or unknown
ccctgggacctcatcaggccacggattgtgtgaatcagcagaaaataggactttcctaagcaaaacaggaaggaaagaaaggatggagtgtgaaacagatgaacaaaaacagggctctgatgagaacatgtcagaatgtgaaaccagcagtgtgtgtagcagcagtgacactgggctctttaccaatgatgaagggcgacaaggtgatgacgaacagagtgattggttctatgaaggagaatgtgtcccaggattcactgtccctaatcttctgcccaagtgggctcctgatcattgttctgaagtagaaagaatggattctggattggataaattttcagattccacattccttttaccttctcggccagctcaaagagggtaccatactcgcttgaatcgtctacctggagctgcagctcgatgcctcagaaaggggcgaagaaggctggttgggaaggagaccagcataaacactttggggactgagaggataagccatatcattagtgaccctcggcagaaagatttctggttaccatcagctgggaaaagagaacgaaatcagttcaatcccctgtctcccctttactccctggatgttcttgccgatgcttctcaccgaaggtgttcaccaagcacactgctctgccanacaaggcaaatgtacactgggggaccaccatgttcacgtgtcatcaagaggaagcggaaancaatgggcacagnatctttgtcaa

SEQ ID NO: 122 - DNA, 584 bp, Homo sapiens
  misc_feature (500)..(500): "n" may be a, t, c, g, other or unknown
  misc_feature (508)..(508): "n" may be a, t, c, g, other or unknown
  misc_feature (559)..(559): "n" may be a, t, c, g, other or unknown
ggccgagggaaacacaaccccaagcagcctggagtaagtggtcccgaggcagctcaagacagtttggttttattcatttcagagagacaggaattgcagggaaaatcatgaatcagtgcctggaaggtgtaagttccattggcagaaagggtgggacctgtggaaggggggttagaaggcacaggtagttgagggattctgtaggtggcagctggttgagagtgttgaatctttgtctaaagtttggaggaggtaggaaggaatgctgaaggaagggggtctgttatctgccacttcattccatcccagccaaaaaacagacctgtttctcgagattttatgaattctaaggcgtaactttacctttgccttgcgtggccttaggtcttgtttgtaatttggtatcttgttgccacaaggagtctgtttttccagtcagataatgtctgtttttacatgaatgtgcgtcagttgctgcatgtaaactcctaaagggaganggtataanggagacctgtctcaactcccatcctgtcatacagaggcactcaattttcanggttttttgggggttcccttggcaa

SEQ ID NO: 123 - DNA, 730 bp, Homo sapiens
  misc_feature (446)..(446): "n" may be a, t, c, g, other or unknown
  misc_feature (623)..(623): "n" may be a, t, c, g, other or unknown
  misc_feature (658)..(658): "n" may be a, t, c, g, other or unknown
  misc_feature (710)..(710): "n" may be a, t, c, g, other or unknown
  misc_feature (727)..(727): "n" may be a, t, c, g, other or unknown
accaacgcctactccccggtgcagcagggagtcatcatcaaaaggaagagtggggagatcccatgccccttggccgtggaggcgtttgccgctcacctgagctacatctgtagatacgatgacaaatacagcaagtatttcatttctcataaaccaaacaagacctggcagcaggtgttctggttcgccatcagcatcgccatcaacaatgcctacatcctgtacaaaatgtcagacgcctaccacgtggagaggtacagccgggcgcagtttggagagagactcgtcagagagctgctgggcttggaggatgcctctccgacccactgatgctgggggcgcaggactcggtcaagggaggggcaagaggaggaggagagcctgccgttccaacttgcccatcagagacccggacacggcctggtgtgtggcttgctgcctggganggatgcacagggcctctggagggacaggatggacctggtcagaggacggttgctgtcctcatttgcattccaagaagagcatgtcctccctcgagaaacagtgccgccggtgtgatgagcacttacacccacgttctcaagggcaaattctctcatgacatccgtggagcttgcgangcaacgtggactggtgactgtgaaggaaggccccnttgtaaaatgagctggagcacgctctaagagagatgctgcttcctaaagatntacagcaatctgggacntgg

SEQ ID NO: 124 - DNA, 752 bp, Homo sapiens
  misc_feature (419)..(419): "n" may be a, t, c, g, other or unknown
  misc_feature (436)..(436): "n" may be a, t, c, g, other or unknown
  misc_feature (457)..(457): "n" may be a, t, c, g, other or unknown
  misc_feature (605)..(605): "n" may be a, t, c, g, other or unknown
  misc_feature (633)..(633): "n" may be a, t, c, g, other or unknown
  misc_feature (675)..(675): "n" may be a, t, c, g, other or unknown
  misc_feature (738)..(738): "n" may be a, t, c, g, other or unknown
  misc_feature (741)..(741): "n" may be a, t, c, g, other or unknown
aatgctgctctggtttcttgcgcgcttggcgctacagggagtgcgggcggcgactccttgcgcaagtcagcttgcctgggaaagggctttgtggctgaaagcgactggttccttgccacaaaggctccgctggcgtttgcggttcagcggccgtccctgagtaagatagccacttttctccgacgctgccaatagccttctccaagtgctgcaggctttcatcgctttgcaggagccatgcctcggggacggaagagtcggcgccgccggaacgcaaaggcagctgaagagaatcgcaacaatcgcaagagccaggcctcagaggcttcagagaccccgatggcggcttctgtagccccgagcacacccgaagaatacctgagcggcccggaggaagacacaagcaccctggagaaggnctccagtaccccttcanaagcttcgagcactggcctantgcaaaagccggttaccggagcaattttcaaggcaacaagaaaagtctcctaatgtccatattaagccctcatcttcatcatgggcaacaacgcaaaggagggcctggtgtggaaagtgctggggaagttagggatgcaacctgggangcaacacaacatctttggagattcgaanaaggtcgttacagaagaatttgtgcccaaaagggtatctganttataagccagtgccccgcaacaatccaatggagtataagttcttctgggggcctccaacaanacntgggaatccaa

SEQ ID NO: 125 - DNA, 796 bp, Homo sapiens
  misc_feature (418)..(418): "n" may be a, t, c, g, other or unknown
  misc_feature (465)..(465): "n" may be a, t, c, g, other or unknown
  misc_feature (602)..(602): "n" may be a, t, c, g, other or unknown
  misc_feature (620)..(620): "n" may be a, t, c, g, other or unknown
  misc_feature (712)..(712): "n" may be a, t, c, g, other or unknown
  misc_feature (734)..(734): "n" may be a, t, c, g, other or unknown
  misc_feature (789)..(789): "n" may be a, t, c, g, other or unknown
cctactatgtaattctgtaactttttttcctgaatgtttaggtctattttggcatgcagggattaagaaaatagctatctgagcatatattttatagttcactaatgaaccctactttgaccctgtgggttaatgaatgaaaagtatctgctattatggtgtggtttcatcttatcaattacatatttttgttttgaaatttgtcacctttgtcttcaccattcttttctcttggacagactgttagccccttaactcatgtacttgccttgacttaagttaccagtctgtccaagagaaaagaattacattcatggcaaatgcccccagtcaggcacaacataccatatacataatattcttgatgagcttaaagtagccacacagcactcagggcagcctccactaactgattggnaataagcctatttgccatatctccctgaaactttctattaacaaagncacaaaacgcttaaacaaagaaaaattagataatatcaatagcccatcttctaacacattgcctagctcaatactttcaatacatattttccaaactaaaaattaaaatctcaactctttaagagaagtttcgtaantttggagtataaagagantatcctgggcaatataagttttaaatgccaatataattggaaacttacaatgacatttcaagtgggttttggcaatggttttcccaaagtanggggaacctttaccaacggaanggtacacaagtggattttccgggggggttaaaacaagattgaacaattttttaanttttaaa

SEQ ID NO: 126 - DNA, 644 bp, Homo sapiens
  misc_feature (510)..(510): "n" may be a, t, c, g, other or unknown
  misc_feature (569)..(569): "n" may be a, t, c, g, other or unknown
  misc_feature (617)..(617): "n" may be a, t, c, g, other or unknown
  misc_feature (626)..(626): "n" may be a, t, c, g, other or unknown
aagaccgtcccggatggcctcggggactgccagtgtgtggaggtgagctccgggattgccggcattcccgcttctgctggttgcttcatgctgcaggctgcggccgtcagccctcgctcgcattggtggcgctgaggtgccggggcagcaagtgacatgtcgtcgggcctccgcgccgctgacttcccccgctggaagcgccacatctcggagcaactgaggcgccgggaccggctgcagagacaggcgttcgaggagatcatcctgcagtataacaaattgctggaaaagtcagatcttcattcagtgttggcccagaaactacaggctgaaaagcatgacgtaccaaacaggcacgagataagtcccggacatgatggcacatggaatgacaatcagctacaagaaatggcccaactgaggattaagcaccaagaggaactgactgaattacacaagaaacgtggggagttagctcaactggtgattgacctgaataaccaaatgcancggaaggacagggagatgcagaaagagcttgcagaagcagcaaaggaacctctaccaantcgaacaggatgatgacattgaggtcaatgtggatgaaacttctgatnacacagaanagacctctcctgtgcgaa

SEQ ID NO: 127 - DNA, 505 bp, Homo sapiens
  misc_feature (478)..(478): "n" may be a, t, c, g, other or unknown
  misc_feature (485)..(485): "n" may be a, t, c, g, other or unknown
  misc_feature (503)..(503): "n" may be a, t, c, g, other or unknown
aaaaaaaaagtaaagggaaacagacatgaacactaggtgacatggagtgttaggggcgctatggtagaagtctgcagagagtgcaatgggcgtccaaatgaggaagtgatcacttgcacaagagtgggaggcttggctggaaaggcttctctgaataggatgacatttgatctgtgttttgaagggcatcgttggcaaggtaagtaatccaattaaaggaggttgcctcagctaaagcacagtatgctcaaaggtgcggatcatttgaaaatttgagttcaggtgcagtaggggtaaggtaagtatccaacagaatttcctacaatgatggaaatgttctatattgtcactgtccaatacggtagcctctagccacatttggccaatacaactgaagaattgaatattaactttcatttaattctagctaatttaaatttaaatagtttcatcagttagtggctaccatattgaacantgcaagnttagagataaacagaggnca

SEQ ID NO: 128 - DNA, 772 bp, Homo sapiens
  misc_feature (473)..(473): "n" may be a, t, c, g, other or unknown
  misc_feature (525)..(525): "n" may be a, t, c, g, other or unknown
  misc_feature (674)..(674): "n" may be a, t, c, g, other or unknown
  misc_feature (681)..(681): "n" may be a, t, c, g, other or unknown
  misc_feature (729)..(729): "n" may be a, t, c, g, other or unknown
gaaaaatcacaaagaattgcatggcaagagtgcctgtctttcacagcttgaactgttgcaggaactttcttttttttttttcttttgtgatgcactccagcctgggagacagagcgagactgtctccaaaacaaacaaacaaacaaacaaacaaaaaaaccctgtagcttgggatcagccttctcttctgttgtttttctttaaaaaataaaaattaaaaataggcttcaagtgatcctcccgccatgacctccaaaactgctgggattgtaggtgtgagcactgcacccagccgtatgtttttttctacataaaaaacagcacaggattatcttccaaagctaacaaatatgttcaaataaccacaaccccacccctgctccttggaggacaacgtgatcactgtattcagctctgtcaagaatggtccaggttcttcataaattccccaagtttccaagtagttctttaanagcagtgtgaaaacaagactaatgggacccttcctggttgaagggaatgtangccaattccggcttggtttaaggtatttccctttccaattcaatcccccaatttccccggggaaggggtggtttaaacccaaaagttgcaaattaagggagaataatttgggtggaactggcaaaaagttcccccctcaaatggttccnggccaanttaaaataagtttaaaagggttgattcaagtggattctcccaggcaanttttcaaatccggggaatgggaaaaagccccccaatggttaac

SEQ ID NO: 129 - DNA, 678 bp, Homo sapiens
  misc_feature (627)..(627): "n" may be a, t, c, g, other or unknown
  misc_feature (646)..(646): "n" may be a, t, c, g, other or unknown
  misc_feature (663)..(663): "n" may be a, t, c, g, other or unknown
agagcacagaagagggagaagtggctgctctgcgcctcacggccagatcccaggtgagtgagtgctgattattggaattacaccttgtttcttagagtacagatgcactcccttctttgtgatgtggagtttctttatccactaaagcccatctgcagagctgagttctaaatctaagagactagtcaggagactaatggactcagaagaaaatgttttctacttataacactggatggatttcttccctatttagtgtttattgtccctcaacagataggtaagcagcatttccctttcttagcctcctatgctcatttctgtgcttggtaatgtgagaaactattttaaatataatgtggtacatacctcttaaaacttgtttctctagaggaaacagcatgtatgtgaccttaagtggcaatctaagaaagcacttaaatgctgaagtgattgtaaaaataataaatactcacatagttcaaagaaatactggaaaaggaaagcctatgaaggcgtaatttaaagagttacagttagaatccaaccctctgagatgatgaaagctaaggtatgatcatgtctgcaacttacttttatattgttgggccctctctcccaaaaggnaaatatgacaaatattacnaatgtttgggctgggantacaagcatgagcca

SEQ ID NO: 130 - DNA, 666 bp, Homo sapiens
  misc_feature (643)..(643): "n" may be a, t, c, g, other or unknown
  misc_feature (664)..(664): "n" may be a, t, c, g, other or unknown
  misc_feature (666)..(666): "n" may be a, t, c, g, other or unknown
gggcaaaccctttgaaaaatattctaaatgaaaatgacatagtattcatagtggaaaaagtgcctttagaaaaggaagaaacaagtcatattgaagaacttcaatctgaagaaactgccatatctgatttctctactggcgaaaatgttggaccacttgctttaccagttgggaaggcaaggcagttaattggactttacaccatggctcacaatcctaatatgacccatttgaagattaatctgcctgttactgcccttccccccctttgggtaagatgtgacagttcagatcctgaaggtacttgttggctaggagctgagcttatcacaacaaacaacagcattacaggaattgtcttatatgtggtcagttgtaaagctgataaaaattattctgtaaatcttgaaaacctaaaaaatttacacaagaaaagacatcacttgtctactgtaacatccaaaggctttgcccagtatgagctctttaagtcctctgccttggatgatacaatcacagcatcacaaactgcgatcgctttggatatttccctggagtcctgggggatgaaattcttcaaatccctccaatctcttcaaactggcaaatccggaatatttaaaggtgggaatcaagggagaancccaaaaggggcccttttggnan

SEQ ID NO: 131 - DNA, 753 bp, Homo sapiens
  misc_feature (684)..(684): "n" may be a, t, c, g, other or unknown
  misc_feature (721)..(721): "n" may be a, t, c, g, other or unknown
  misc_feature (738)..(738): "n" may be a, t, c, g, other or unknown
gctcagcttctctcaccgcctctgggtgtctttgctttcctgaccacagcctctctgcccaagcctgtgtcctctccttccgttctggtctccttcatctcacgtttccccagcctccaagctcttgaagagccgtgtcacactgagagcttccctgacctggtctcatttccctctgacagtgacctccagtgtgctgggttgaccaatgccaagcctctttttaaaccaaagtagttcaccatgggttgggatgatgtcaacaagcagtattcatgttaaaaagcaatgagggactccttccctggtgcacaattttcttcacttgtgatctctaaactgttttcaaattggaagactgggaagcattgctacagccccagccagtctcagccactgctcagcccagtggtggaaagctgagcacacagcgggtgcttactgcccccacttgccgtctgctctccagtagatcaagggacctcagacagggatctgagaagtggcaggttccaataaactgatcaacagaatgaagtcactctgggaagccatgaggtgactttacaagcccaagcatgtaaatatacacacagaggataatatatattcttttttttttttttttttgagacagagtctcgctctgtcaagccaaagctggactgcagtggcgcaatcacnggccattgcaacctccaactcctggggttcaaggcantcctcccaaccttaagnctccccgagtagccc

SEQ ID NO: 132 - DNA, 772 bp, Homo sapiens
  misc_feature (764)..(765): "n" may be a, t, c, g, other or unknown
  misc_feature (771)..(771): "n" may be a, t, c, g, other or unknown
gagtaaaggtgacttttgttatgttttagaagagactggtggcattttgcctctgccctagagatttgtggaactttgaacttaagaaagttgatttagggtatctggcagaagaaatttctaagcagcaaagcattcaagaggtgatttggatactgttaaaggcatttagttttataagggaagcagagcataaaagtttggaaaatttgcagcattactatgcgatagacaagaaaaacccattttctggggagagattcaagccagctgcggaaatttgtgtaagtagcaaggagcctaatgttagtccccaagaccatggggaagatgtctccagaccatgtcagagaccttcaccacagcccctcctatcacaggcccagaaggaaaaagtggttttgtgggcctggtccagggtccccttgctgtgtgcaacctagggatgtggcaccctgtgtcccagctgctgcttcagctgtggctgaaaggggccaatgtacagctcaggttgtggcctcagagggtggaagccccaagctttggcagcgtccacatggtgttgagcctgcaggtgcacagaagtcaaagaattgaggtttgggaacctctacctagatttcagatgtatggaaatgtctagatgcccaggcaaaagtttgctatggggtggggccctcatagagaacctctgctagggcagtgtggaaagggaaatgtggggtggagcccccacacagagtccctactgggcactggctatnnactgtna

SEQ ID NO: 133 - DNA, 606 bp, Homo sapiens
  misc_feature (537)..(537): "n" may be a, t, c, g, other or unknown
  misc_feature (579)..(579): "n" may be a, t, c, g, other or unknown
  misc_feature (594)..(594): "n" may be a, t, c, g, other or unknown
tttaaggcgccgggtttccggggctcctggccccgcttattccgcgggggtcggcggggtcggcctgggcgcccgcgccgccgctgcgctttgtccgctgggcacactgcttctgggaggggcgggcagacatggtggcggccgccgccccctcctcggccctagcatgccgcggccgcctcgcggctacccggcttgccggtcccgagcggcagccccggggtggcgatggggtcgcgccgaggcagcggaggttctgcgggcgactggaggttggcagtgggcgggagaaagaggaaggcaggcgcggctgggcctcggcctctggcgccgcggtaccctttgtctcggcagcctgacggccccgccgggctctccggagaggggaacgggcggcgagggtggcgggtcctgggcgccctgtgctgcggggccgagaggcgctcgggtcgcggcgggaccggccggaccagacagggttaatggaagagcctggccagtcccgcgcggggcccccgcagcgacagccttggccgnggggactggagtcctgagggggagaagcctgccgttctgaangctcgggacttctgncccaaagacttc

SEQ ID NO: 134 - DNA, 843 bp, Homo sapiens
  misc_feature (791)..(791): "n" may be a, t, c, g, other or unknown
  misc_feature (799)..(799): "n" may be a, t, c, g, other or unknown
  misc_feature (816)..(816): "n" may be a, t, c, g, other or unknown
ttcatattttaaccagtttagccagagtttttagtactagtattaacttttgaattatgtttaaggtcttagactttacagcatgtttagtttattttcatttcttattagtatttttcagtacttaatagtctcttgcccccacctccaacaagaactttcctctctgttcaacatcagaaacattttccttttggcatgtgctttctagttccccaaacagtataagcaaattggaaagtttagctgtcattcttggaaggttacagatcacactagcagcctgagtaatccaagaggttttaagtatcatagcatttagtttaaagtgaaatttgctctgacagggctggcagaccaataggaaaaagaaatatttgtgcttggagaagtgcatatgtagagaccaaaagtataactgatggctggaagtgatttcagtctaaaaaaacaaatcattaagagagtgcataggggtaaaatacacagttcatattttaaagagtctcaaaatgaaccagcaactaaggttagcattacatagtaattagttgtggtgttcaggctttaactcactcagtaccagacagtatagttaaactgtcgctgaaaaaacattgctacttacatgatattctctagtttaaacctatagcagtaatttttgaccttaaaaaaccaaggtattatgacagattatataaatgttgaaccagtaacagacaaacaattatttaaaaggacgtgctaatggctcaagtttattggccctaggggttatttaagcccgntcacaagntcccttaaccatttggnggtatgaaatgaagcatggcttgatag

SEQ ID NO: 135 - DNA, 860 bp, Homo sapiens
  misc_feature (779)..(779): "n" may be a, t, c, g, other or unknown
  misc_feature (822)..(822): "n" may be a, t, c, g, other or unknown
  misc_feature (855)..(855): "n" may be a, t, c, g, other or unknown
aataccattatttaaattgcctttgggattagccccttccctttccttataaacacaggtagcaggaactgtgctgctcatttttctgttagtagtgtgtacttcatgccaggacattgggtattttctttaaagtgaatatagaatctcaagatatacgtagcttcatcattgacatttcccagagccaatagtcagcggatcggtcttgtgaacaccactgccagctcctgtgtctacatctcagaggagcccatgtgctctgcttctctccaccagagcaagctctgctgggcgtgcttctgggaagaaaacaattttctttaagaagaagatgaatgtccaggaatttaaagaaaggatcgattgccttttatttatgagtttctagctcttgaagttattcacatgcagttcagttagtcaagtaaaattttttttcaaataaaagtatccaagtggtgcagttattattatatccctctttaataattttgctttttatttttcccctcttctttttctgttacttgaattttatttcctgtaatttatagtgtgtagctgtaaattgaaatatttataactgtgaaattgacttaattcatatgttgtctcataactttattttttttaaatgcatattcagggaaatatattactcatatttacaattgggcgatataggaacttcaatttagatttaatttgcaactcttagcattttttaatccttgataaaattttcccttttggtgtgaaacttcaaagaaaattgncatctcctctgacatttaggagcagcatctttctaccccttgngaataaatcattgaaggaacaggtaaaattaantttaa

SEQ ID NO: 136 - DNA, 716 bp, Homo sapiens
  misc_feature (672)..(672): "n" may be a, t, c, g, other or unknown
  misc_feature (680)..(680): "n" may be a, t, c, g, other or unknown
  misc_feature (711)..(711): "n" may be a, t, c, g, other or unknown
cacttgggctcgcgtcctcggccgcgccgcgcggcacccgggcccagcagccgggaggcggcagctctcctctacgcccgtcccctcagggcggctgtggatgttgccagtattgtcgatgcttcagagcgacgtttgccctgcgacacaggcgggccggctctcctctgtctttattttcctggaggccgacaggagcggggcccgagttcggtggtggtcgtgagcgtggggggcactcaggcccggacgggctctcaggtcgccgacggcggcggctggaggccgcgctggctgtcccaggtcgtcgttagctttagggagccgatctccgggcggccccacagaggacgcccgcgattcgatggcgatgatgcccgttttaaatggtgtccctgcagccgggtggatggatggatcgtacaccttgccttttgagagccgggaccttacgcccgactgcgtgttatttctgcggaataagaacgcaacctttggaggtgaagacgactgtcggctggattgaattggaatcgtgtttgtgatgatgcgtttatttctggaaatacgcggtctccgctgcttttgctttttgtcggcagaggtttgggttcttctctaacggtcaggataaaggcctgtagggcgacgctgcgcgagcgagaagctcgncccgcggntggcccgggccgccccccttttaggtgtggntggaa

SEQ ID NO: 137 - DNA, 868 bp, Homo sapiens
  misc_feature (756)..(756): "n" may be a, t, c, g, other or unknown
  misc_feature (836)..(836): "n" may be a, t, c, g, other or unknown
  misc_feature (841)..(841): "n" may be a, t, c, g, other or unknown
  misc_feature (862)..(862): "n" may be a, t, c, g, other or unknown
ccaactgttgatgcatcttgaaaatcattcctcaagtttattatcacttccattccccatgtcagtggcatagctaattatttagaaggcaggtgtctctaggtaattatagttagttctgtatgcaattatcctttctgaaatgtgtgttgtatgccgtaaaaatacctgttacgttatagaatataacaaatagctaacacaatagttaatacttagttgatgctgactatatataattctctagtttattatcataataatacacctcacatcattgaagtcttttacagtttaccaagttctttcattcacggtgtttcatttgggtatcccaacaacattttcaaggcaaacgtgttaccatccttagtttgaagaggaggaacctgaaacttaggaagactaaataacttgtaaaagatcacagaagtgatatctaatagagacgagcttcaaattcaggtttattgaactcagaatcaatgctcctgccccctacctctcaggagtgataatggtaaagattgggggactgtaggccaaataggtcctctgacctcttttataattgtcagcttatctaacgtgaatgacttagataggccttgcagattgagtccttgggagatttcctgcctctgtctagtattatacccagcccaatttgtacctgctgaccttccaagttcctgtgggcatttgagtttctgacctttgcctttgaataagcctgccatttcctatagcatatgngcattttttgttcctggaactttctactactttaaatttggtctggatacttatcagcaaacaaatcttttagactggcntggangtctattatgggaaaaggggngaaatt

SEQ ID NO: 138 - DNA, 773 bp, Homo sapiens
  misc_feature (707)..(707): "n" may be a, t, c, g, other or unknown
  misc_feature (736)..(736): "n" may be a, t, c, g, other or unknown
  misc_feature (754)..(754): "n" may be a, t, c, g, other or unknown
ttctaatgcagcctgaactccaaagtccatgggcaggtctgtactgatgtagcttctgtggtaaatcctgcatccttccgttgggatggagggtcctcacgtagaggttggggcctgcaaaggggcacagggaagctgcagggacctctgtgcctaccctccatgctgagtccattctcatagccagggtgatgtgtttacagcctagatatgattcctcactaccctgttccatggttcacccccacccctggggctacgtatggcagctgaacactggaagtcctggccagggcctgtggagtcctgtggggcctggttctctctggctctgctctgctctcttgtcttcattgcacctgcagcctcgctgatctccttgccgttctgcagatgttgaatcccttcagtgtcagggctgtgtgcctgtggttctttctctctgcctgggacatcttgtctccagctgtctgtagggctctttctctcacctccttcaggtctcccactctgtgagccttctctcaccattctgtccaaaatagcagccctagctctacccctttgttgcattctgtccttatccgggatggcattcattgctacctgacaccatcctgcatagctacttgtctgttgatttgttgtctgactcctcaattagaactaaagtgctgtgcagggtgggagtggagtgtacccatcgncagcccctgggcaagcacctgctcactgnctggctcaaatgcaagtnccgaaaagtcttccactta

SEQ ID NO: 139 - DNA, 710 bp, Homo sapiens
  misc_feature (686)..(686): "n" may be a, t, c, g, other or unknown
  misc_feature (707)..(708): "n" may be a, t, c, g, other or unknown
ggtttccttgcccgtacttttaacttaccttattttccccaaaacggtggctggcgttgagactcccgggagcatgtccaggttccccggccttagggtcttcccaggcacttgttctgcttgtcccttgccttcccccacctgtgaggcccagcttcggcatcgtacggggtggttctgggccgggtggcgcatcagggtcccccagtgcctgtgaccaggcccgcccgccccatcttacagcaccactgccgggcgtgtgggcagatattctgtggaaagtgttcttccaagtactccaccatccccaagtttggcatcgagaaggaggtgcgcgtgtgtgagccctgctacgagcagctgaacaggtgagtccccgccccccatttgggctgcaggtggggcaggctctccaggctgggttttctgtccctcttggccatggtgcctgaggcctgcagaccccagaggaccctcacagcacagcagctggaaggtcaagggaaacccagggtggccgcatgccctcggaccctgccccacactagggcaggtgggtgtgagagacagggcgccgcggctccagggaccgaggctgcccgacaaacctgttgcttgggtttgggtttgggtttggttgcatttcaactttcggaataaaacttacagaaaagttgcaagagtancacagagaaacttcggggccnngg

SEQ ID NO: 140 - DNA, 790 bp, Homo sapiens
  misc_feature (653)..(653): "n" may be a, t, c, g, other or unknown
  misc_feature (658)..(658): "n" may be a, t, c, g, other or unknown
  misc_feature (778)..(778): "n" may be a, t, c, g, other or unknown
  misc_feature (787)..(787): "n" may be a, t, c, g, other or unknown
  misc_feature (789)..(789): "n" may be a, t, c, g, other or unknown
ctagaggcaggcagagggaagagaaagggtctgttgtttttctctcctgtttctcgctccctctctgctgatcacaaagctgctgaccgggtcagaaagtcctgatggaaatccaccagcgctgggcaggcccctcctcctccagggagcttgtccttgcctaatttttcttcgtcctgatgagaacaaaaaagagagagagaagaaaagaaaaaccacaaacttcctttgaaaaccagcttgtagtcagggcccggagcgcatgccatagactcggcgactcaggaatcctgaagactctctgagcgacctggagcaccttggctgtgtccctgcctgccttcaccctcctccagtgcccccagtactgggcgtgagtccggaagtggccacaacccagcctggaccgtcgcttataaagctgtgtaaacctgtataagctcaggcgttgacagctggaaggcagctggcactggcagcccccttcattgcacctatctcccccatctcattgccacggctgaaccctccttctcaatcttggaacagcacccccttctttaaggtaaaaactttattttaatcatcttcttcacctcttctcccacccttctctatttcctctccagctttggggagctgacacctgctgnccttncacctttggtctgcaagtctggattgcttaaaggagctaagtcaggagagacatgtaaaggggatgctgcttggtccttctcctttaatgaaagcccgaaacctttccccttttccttgngagcaagtntnc

SEQ ID NO: 141 - DNA, 814 bp, Homo sapiens
  misc_feature (768)..(768): "n" may be a, t, c, g, other or unknown
  misc_feature (787)..(787): "n" may be a, t, c, g, other or unknown
  misc_feature (793)..(793): "n" may be a, t, c, g, other or unknown
ttttttagatgaagtttcactcttgttgcccaggctagagtgcaatggcacaatctcagctcactgcaacctctgcctcccgggttccagcgattctcttgctttagcttcccaagcagctgagattacaggcatgagccaccatgcccgactaattttgtatttttggcagagacagggtttcaccatgttggccaggctgatcatgaactccttacctcagatgatccacccactcgacttcccaaagtgctgggattacaggcgtaagccactgtgcccagcccatgaaactatttaaacaacatgtgattacttggccacttttctattcaaaaatatggtttattagtcctgattatgtgcccttcttggcagacagaatgatactgtgtacttctgctgaaagaaatagaaactctcttccattttctagataagagagtcctaaaacagaatttccaaaaactccagttagtggaggtaacttaaaatcctctttaagaaggataattatctttaaaggttgattcccaccctccctccccagttacttaaggaactaagtgagtacatctccagttgcccatgaaagcataagtttgttttcctcagctgaggcaagtggtagagtatacaggataacgaagtaacatgtaaaaggcaggacgcacataaaggtgacatggctattggttcacctggagaaaccacatgattgggacctgaaggttactgactgctacaggggctgattgtgaacacgangaaccccatgtgtgtgganctgtanggtgagagccccccattttta

SEQ ID NO: 142 - DNA, 727 bp, Homo sapiens
  misc_feature (656)..(657): "n" may be a, t, c, g, other or unknown
  misc_feature (700)..(700): "n" may be a, t, c, g, other or unknown
agctgagagcccaatcgcatcaggggagcacggcccagcagcaggagctccaggctggctggacacctgggtccccacgcagactgtgagtagagggagctggaccacagtgggacaaggacacctccagacaggttgccagggccccacatggaggaggcaggtgggcccatggcccgggccaaggcccaagtggtaagtgccacattgacatggcggcagtggccccccacccaggaagagatcaaacatggttttcacaaggtgtccctggtgtcaggggcccagatggaagccccgcagaaggagatgtttgagttcagccgtcgagaggaagtggaagtcaatggctttgcaacacaggaagaagagactgtgaattgccagggccctcgggatacagctggctccaagaacttccagagccatggacccatcttttccaagaagtacataccacctcccaaggagaaaaggcctgaggggaggctgaaggaggctgtggaccagagtgatggcagccgccaagctcccaggactgagcccccatgtgtgggagctatggccaggactgagcttttggttcccctgctgggccccgagagccaagtccccacccaggtgtaggtctcaccagtggtagcttccggagcctnnaggaataccgagtgacacgcactgtgcggaccaccacatggtnggaggtatgttgaccggcggataacaa

SEQ ID NO: 143 - DNA, 661 bp, Homo sapiens
  misc_feature (496)..(496): "n" may be a, t, c, g, other or unknown
  misc_feature (609)..(609): "n" may be a, t, c, g, other or unknown
  misc_feature (617)..(617): "n" may be a, t, c, g, other or unknown
  misc_feature (633)..(633): "n" may be a, t, c, g, other or unknown
gttacggccaccactgctgtgtataaggaccactggcgtacggaggcttctgcctctcccactgaccacagtggctacggcacgggccactacccccgaggcgccctccccgcccaccacggcggctgtcttggacaccgaggccccaacacccaggctggtcagcacagctacctcccggccaagagcccttcccaggccggccaccacccaggagcctgacatccctgagaggagcaccctgcccctggggaccactgcccctggacccacagaggtggctcagaccccaactccagagaccttcctgaccacaatccgggatgagccagaggttccggtgagtggggggcccagtggagacttcgagctgccagaagaagagaccacacaaccagacatagccaatgaggtggtagctgtgggaggggctgcggccaaggcatcatctccacctgggacactgcccaagggtgcccgcccgggccctggcctnctggacaatgccatcgactcgggcagctcagctgctcagctgcctcagaagagtatcctggagcggaaggaggtgctcgtagctgtgattgtggcggggtggtgggcgccctncttgctgncttttggtcacactgntcatctatcgtatgaagaaaaaggatga

SEQ ID NO: 144 - DNA, 775 bp, Homo sapiens
  misc_feature (738)..(738): "n" may be a, t, c, g, other or unknown
  misc_feature (740)..(740): "n" may be a, t, c, g, other or unknown
  misc_feature (766)..(766): "n" may be a, t, c, g, other or unknown
agcattagtttttgttttttatctgacaggtagctatggatattctgagggagaagccaggattaatacacattttttttttaagttgctgaattgtagtggctctcctttctagcatttttgtcactattgagccctcttagtttatgctagacgtgtttttcttattggttgatattttaaattattaaagccatcttctgaataagctttattcgcactttgtacctagtttctccatcagaaggatctattgctataccattgtatacattttctcattggtcttcgggttactttcagagtgtaaagactccttatgccacaaaattaagcttagatttcccccaaatcaaatactataaatcagattccttagtctagccacaattgacatatcttggagtggataaatctttgttgctggcattgttctgtgcatcataacttgtttagtggcatgtcatcactgtcttctactctctagatgccattagtatactcttcacagttaggacaaccaaaagtgtctccagatattgccaaatgtctcctgatgggcaaagtctatcccagttgcgaaccattattgtaaattaaacttggtttcaaatttgagctttattccttagctctgggaacttgggcaagttacttcccttcgagcctcaatggcctcatttgtaaaatgacattaatacctacttttagctgtgggaaatgagtaccatgattatncnagcagttggatgggctggtacatganagtcaaagg

SEQ ID NO: 145 - DNA, 670 bp, Homo sapiens
  misc_feature (627)..(627): "n" may be a, t, c, g, other or unknown
  misc_feature (658)..(658): "n" may be a, t, c, g, other or unknown
  misc_feature (662)..(662): "n" may be a, t, c, g, other or unknown
atattctattctttttttccctcccgcaagagggggtctcactctgttgcctagtctggagtgcagtggtgcgatcatggcttactgtagccatcatagctgacttgagacatcgacctccctggctcaagtaatcttcccacttcagtctcctgaatagccgggaccacatgagccaccaagcctgtctaactttttaattttttgcagagatggggtctccctatgttgctcaggcttgtctgaaactcctggcctcaagcaatcctcctgcctcggtctcccaaagtgttgagattacagatgtgagccaacatgcccaaccatgttctgttcttatatgaatccaggtcaaaaagattaagaacctaggattatcatagacatcccttctactttgaatattcttctaagtttgtgattatatgctatgtataatcttagacaatcttctaaacaatgattgaaaagaattataatgataggcacatgaaaaagcaatgccttggcccggcacagtggcccacacctgtaatcccagcactttgggagaccgaggtaggcagatcgcttgagcccaggaatgtgaggccagtgtgaaacctgggcatggcaagacaccatctntacaaaaagtcaaaaattggccaggcgtggnggcncatgcttg

SEQ ID NO: 146 - DNA, 841 bp, Homo sapiens
  misc_feature (729)..(729): "n" may be a, t, c, g, other or unknown
  misc_feature (758)..(758): "n" may be a, t, c, g, other or unknown
  misc_feature (765)..(765): "n" may be a, t, c, g, other or unknown
  misc_feature (839)..(839): "n" may be a, t, c, g, other or unknown
caagttatgccctgacctggaaattccccagagttgctaaaagaactgaatgggggatactgtacataagagcacttaagcaacttaaaatgtcacatgtagggacatatgcgtgtcatgtgaatagcagctgcattttgaagttgcaataagtgtgaggaaaatgtgcttgttagctcagctctagacagatccatggatagaaagacatagacatggatccccatccagctaagtatttgcaatccgcaggtgaagcctggaaacccagagaaatggacctgttccatccgtgacagaagcgctcccaggacctaaattaaagggatgttagaatgttttgagaatcttggcagggccattaggtagtgtttgtagcttttggatgcttttggtggagggaaaatgagatgggctcacttgggaggtctgcctgcagtttccatccaaatttctaatcaacgttgtggttttatcatccatttccggaatcattaccccttaaaatgtgaggaaaacgactctccttttcttcaactccccatcttttccaaataccgctgcgagtttttgttgccaacagcttttcccaatgtgcgtgtacttaccaacgtccagactcctccctcccatcggccagccttgcttggtctagctattattcaaaggggaacatgcgtgagatatcactttggttttgccatctaatggattccaccccccaaagtntctgactttgcacttaggctcatctgcangaccccnagggtggcttcccttcccttccgtggctggcttaaaggggttaattgaatccattctcttttccttttccgggntt

SEQ ID NO: 147 - DNA, 764 bp, Homo sapiens
  misc_feature (613)..(613): "n" may be a, t, c, g, other or unknown
  misc_feature (720)..(720): "n" may be a, t, c, g, other or unknown
  misc_feature (736)..(736): "n" may be a, t, c, g, other or unknown
  misc_feature (750)..(750): "n" may be a, t, c, g, other or unknown
ccccgtcataggacttgtgacttactaccatcatacatatttgattcaattattatttattgcttaaattgttatgatcatttattataaatcatgtattacggctaattaacatacatatgctcagtcatttacttgattagttattagcctcaattatattattttttaatatatatttttatttgacaaatagaaagtatatagattggtacaatatgatgtttggaaataagcatatattgtggaatgactaaatcaagctaagtaacttatgcagtaccttacatgcttatcttttgttgtgataagaacacttgaaatctattctactgtcttagaaatttaaaaatgggcaaaggacttgaatagacatttcttcaaaaaaaaatgcaaatgaccaacaggtatatgaaaaggtgctcaacatcactaattatcagagaaatgcaaatcaaaaccacaatgatatatcacctaacacctgttaagatgtctattagaaaaacaaaatgtaacaagtgttgataaggatatggagaaatagaaatctttgtgtgccttgtacactgttgcaagagcattagtagaactactttggaaaactctttgnaattatctactaaagatgaatatatgcctactatatgacccagtggttctactttgaagtgatcaggcaacagaagtacatgcatacatgcccaaaagacatatccngaaatggtattagacntctgggttcaggtncacatgtagggagc

SEQ ID NO: 148 - DNA, 873 bp, Homo sapiens
  misc_feature (776)..(776): "n" may be a, t, c, g, other or unknown
  misc_feature (844)..(844): "n" may be a, t, c, g, other or unknown
  misc_feature (873)..(873): "n" may be a, t, c, g, other or unknown
aataataaaattatgtctaatgaaattccaaattaaggcaaaataaacaacagaagaatgacagcaaaccaaactagtgtactggttatcactatcaataattaacagaggtctggaagtttgaaatgctacaagttttaactgtatacagttgataatattgctttctttaggaatcaactgaaaacatactaaaattaattggtatgactaagagagcagaaataagactaaaaataaaaacacaatggatttcttctatgtaaagagcactcagagactatgatgaaaatattacataccaatgacagtagaagtagaaaaaaacaccaaaataatagtgtgaaaagtttaattggaattcttaacaagaacatgtaagattttcatgactaaattttatataaataaaaacttgtataaataagttgtgacacaattttctgaatgagaaaagagagatgaaatattgtctttctatttgcatatagatttactatcaatctgaaagtcttaactgaatctttcttggatcgtcacaaaaatatacaaaaaaaactcatcttaaaataaaaatcagctaagaactagtggaacagcaagtttagtaattttcctaccaaattttaatgtcattttaaagccctactaaatattttaatattttatatattgctataatagaacaaattgtatatagcatgcttcctgaattggatagattttaatatcatgagagtagatagatatactaacagaaataaattcatttactnataatgcttggcatataaaaaccatactttggggggatagaataggagcatgaaaatttgggctaatncatttccttctaaattactggaaaatggn

SEQ ID NO: 149 - DNA, 850 bp, Homo sapiens
  misc_feature (798)..(798): "n" may be a, t, c, g, other or unknown
  misc_feature (822)..(822): "n" may be a, t, c, g, other or unknown
  misc_feature (837)..(837): "n" may be a, t, c, g, other or unknown
aacaatgctcattgaagctgcaaagggtggccatactaatgtagtttcttatctgttggattatccaaataatgttctgtcagttcccaccacagatgtgtctcagctccctccaccttctcaagatcagtctcaggtgccacgtgtgccaacgcatacacttgccatggttgtacctccccaggaacctgacagaacttcacaggagaactctcctgcccttttaggagtgcaaaaaggtacatccaagcagaagtccagttccctccaggtagcagatcaggacctactgccatcttttcacccataccagcctttggagtgcatagtagaggagactgaaggcaagctgaatgaactgggacaaagaattagtgctattgaaaaagcacagcttaagtcactggagttaattcaaggtgaacctctgaacaaagataagatagaagaacttaaaaagaacagagaagagcaagtccagaagaagaagaaaatattgaaagaactgcagaaagtggaaaggcagttgcagatgaaaacacagcagcaatttaccaaagaatacttggaaaccaaaggtcagaaagacacagtgtctctacaccaacagtgctctcatagaggagtcttcccagaaggggaaggagatggtagtctcccagaggatcacttttcagagttacctcaggttgacacaatcttatttaaagataatgatgttgatgatgagcaacagtcttcaccatcggcagaacagattgattttggcccagtccagcctttatcatcttccacagngtaactttttccagtgacttaggntctaatgggacaaantctttttgacttt

SEQ ID NO: 150 - DNA, 739 bp, Homo sapiens
  misc_feature (734)..(736): "n" may be a, t, c, g, other or unknown
ggaaaaaaagttaaggatacagttgaccgttcgataatgtagcccactgttgaccagaagccctacccacaacataaacaggcaataacacatattttgtatgtgtattatatagtatattcttaacaataaagtaaactagagaaaagaacatgtaccaagaaaatcataaggaagagaaaacacatttacagtactgtactgtatttattggtaccatacatttatgttgctgtttacaagatgaagcatctgtctgaaatggccagcagctacagctgtacctatctactgtacatatcaagcaagtcgctttattcttataatgtctatgacttctttctttgaaagcgcttccatcatcactgttggcacttcatatgggtctcatggtgttaaggtttacggcattgcactagacacaatgaaaactacacaagagggccgggcacggtggctcacgcctgtaatcccagcactttgggaggccgaggcgggcggatcatgaggtcaggagattgagaccatcctggctaacacagtgaaaccctgtctctattaaaaataaaaaaattagccaggcatggtggcacgtgcctgtaatcccagctaatcgggaggctgaggcaggagaatcgctttttcccagaaggcgtaggttgcagtgagccgagatcgtgccactgcactccagcctggatgatagagggagactctgtcgcaaaaaaaaaaannngaa

SEQ ID NO: 151 - DNA, 783 bp, Homo sapiens
  misc_feature (4)..(4): "n" may be a, t, c, g, other or unknown
  misc_feature (690)..(690): "n" may be a, t, c, g, other or unknown
  misc_feature (731)..(731): "n" may be a, t, c, g, other or unknown
  misc_feature (737)..(737): "n" may be a, t, c, g, other or unknown
gaanactcacagataaagttatagttatttcagggttctgaaaagacgcagaacatgaagggactcagaagtctggcagcaacaaccttggctcttttcctggtgtttgttttcctgggaaactccagctgcgctccgcagagactgttggagagaaggaactggactcctcaagctatgctctacctgaaaggggcacagggtcgccgcttcatctccgaccagagccggagaaaggacctctccgaccggccactgccggaaagacgaagcccaaatccccaactactaactattccggaggcagcaaccatcttactggcgtcccttcagaaatcaccagaagatgaagaaaaaaactttgatcaaaccagattcctggaagacagtctgcttaactggtgaaaatatactggattatgtttaattatggttctattctctttgaaaacatgaaccatgtgaataaaacctttggacccttttattccatttgtaatcttaagaacacacacagatagttttattctttcagaaacagaatatatataggatgcttagctgagaacatcatcttctttcattgcttcaggtcctgtttagatgaccaaaaatgttttcagatcaccttgtgtcttactcttgagtttcttagaatatttataattataaggctgaagactaaagtgntctttccttttaactatagccagtacctggcttgatcttantggggntttttttttttcattttggtacccacttgcattttggtttcactta

SEQ ID NO: 152 - DNA, 777 bp, Homo sapiens
  misc_feature (692)..(692): "n" may be a, t, c, g, other or unknown
  misc_feature (719)..(719): "n" may be a, t, c, g, other or unknown
  misc_feature (772)..(772): "n" may be a, t, c, g, other or unknown
ctgcacgtcgcggacaacaccttcgtcttcttcacgtcggacaacggcgctgccctcatttccgcccccgaacaaggtggcagcaacggcccctttctgtgtgggaagcagaccacgtttgaaggagggatgagggagcctgcccccgcatggtggccagggcacgtcactgcaggccaggtgagccaccagctgggcagcatcatggacctcttcaccaccagcctggcccttgcgggcctgacgccgcccagcgacagggccattgatggcctcaacctcctccccaccctcctgcagggccggctgatggacaggcctatcttctattaccgtggcgacacgctgatggcggccaccctcgggcagcacaaggctcacttctggacctggaccaactcctgggagaacttcagacagggcattgatttctgccctgggcagaacgtttcaggggtcacaactcacaatctggaagaccacacgaagctgcccctgatcttccacctgggacgggacccaggggagaggttccccctcagctttgccagcgccgagtaccaggaggccctcagcaggatcacctcggtcgtccagcagcaccaggaggccttggtccccgcgcagccccagctcaacgtgtgcaactgggcggtcatgaactgggcaccttccggcttgtgaaaagttanggaagtgtctgacaccttccggaaatncattcccaagaagtgcctctggtcccactaacacctgggcaaactcaggccangccta

SEQ ID NO: 153 - DNA, 691 bp, Homo sapiens
  misc_feature (602)..(602): "n" may be a, t, c, g, other or unknown
  misc_feature (689)..(690): "n" may be a, t, c, g, other or unknown
tctacatttttgaaagacaagaattaagtttgattgagaaagatgtttttaaaactttgaaactcataattgctctgtttttgctgttgttagtggcataagaagggactggctgtgttattctgcatattgcagttcttgtcaatgacctggtaagtctttccttaccctagtgaagtgttaaaattgcctgagatgtgacgagcattttgtttgggacctgtgaagccctagcatttcgtctggtgttttggagccagacaggccctgcagggtcagaggaggggaggtctgcgatgagtcctgttgcacttgacagcgtggctcagtggtactgttcgggagaagtatggggtgctgtgctcgtagagttacatagtgatatgttctgcttttttctaatgtgagaaagagaaataataagaaaagtaggtgatgccatgtgagtacataaaagtgagaccaaatcacagggtgagtccaagggaagatgagtttacctgcattctccactctattgctggataaatacaacgtggaatttatcctgatgttgactctgtggccctgtgatatctggagatgtcttctgaattggcagngattaaatacttcttaagttactggttgagcatccaaatcccaaatgcttcaggatcccaaaactttttttttttttttttgaggcnna

SEQ ID NO: 154 - DNA, 740 bp, Homo sapiens
  misc_feature (691)..(691): "n" may be a, t, c, g, other or unknown
  misc_feature (720)..(720): "n" may be a, t, c, g, other or unknown
  misc_feature (726)..(726): "n" may be a, t, c, g, other or unknown
tttcagaatactgtataaaattaaatagaatattgtaatagtttaaggttttgcatatattgggttaaatatttctgaaaagcaaaattatttcaagttttcaaatatcttgacatggaacactgcctttgctaggagtcatttctagaaattacttaaaataggagacaagcatcaatcatagggatttcagctttagaactattggaacaaatctaggttagacaaccagcttatattattaagcaagattacatataataatcatctttttttaaaggagagacttttgcaaatattatacagcaatcaaaaggtcttagcttagtgtatcatccttattagaaaccaagatgttgcattttatttcagtgctttctgtagtcatagctaactcttttacctcagcaatttcaatcaaaaagcttctctatcattctatacataaaatgcagacacattagcagtcaacattatgaatgcctttacaggtaaacaaacaaaatcactttattactggattttataaccaattcccattcttttttgtgactattcaggagaatactgggttgaccctaaccaaggatgcaaattggatgctatcaaggtattctgtaatatggaaactggggaaacatgcataagtgccaatcctttgaatggtccacggaaacactggtggacagantctagtgctgagaagaaaccccgtttggnttgganagtccatgggatgg

SEQ ID NO: 155 - DNA, 761 bp, Homo sapiens
  misc_feature (747)..(747): "n" may be a, t, c, g, other or unknown
  misc_feature (755)..(755): "n" may be a, t, c, g, other or unknown
  misc_feature (759)..(759): "n" may be a, t, c, g, other or unknown
gaggatggcaggaggagtgcttgcatgttgagcagtcctgagagtagcttgacaccacctctctcaaccaacctgcatctagaaagtgaattggatgcattggcaagcctggaaaaccatgtgaaaactgaacctgcagatatgaatgaaagctgcaaacagtcagggctcagcagccttgttaatggaaagtccccaattcgaagcctcatgcacaggtcggcaaggattggaggagatggcaacaataaagatgatgacccaaatgaagactggtgtgctgtctgccaaaacggaggagatctcttgtgctgcgaaaaatgtccaaaggtctttcatctaacttgtcatgttccaacactacttagctttccaaggtaccagtgaaataattgatttttggtgttgattttcataagctaaaaataaataacagaagaatgttcagggcagatggccttctaaccagtgcatagtatttctataaaacagggagcctgttattcttttggtattagcttccagagaaactaacaataaaatatctaagatctaagtagtacattaatgttaaagagtagatttcatctcctggcctttagtttatattcagtataaggaaaatagataaaactctaaattaatagggggctaaggttacaaaacctgcagtctggttctaattctgtagtaagcttgacaattcactaattatcagggatcagtttttgcatctacaagtggtanggtttggnttanca

SEQ ID NO: 156 - DNA, 737 bp, Homo sapiens
  misc_feature (572)..(572): "n" may be a, t, c, g, other or unknown
  misc_feature (697)..(697): "n" may be a, t, c, g, other or unknown
  misc_feature (704)..(704): "n" may be a, t, c, g, other or unknown
  misc_feature (709)..(709): "n" may be a, t, c, g, other or unknown
agtctgggtctggagcctgagccctgcggaacctcggcgctcggccccaccccgcccgtacctgcacttatttattgttgttatttcttaccgcggagccccgcagtcgggtcctcccgcccgctcccgcgcagcgctagcattctccagtccctcagtcccttcccgcgcggtgcgccgcagccgaggcgatgcgcctcattcagaacatgtgcaccatcgccgagtaccccgcgccgggcaacgccgcggcctccgactgctgtgtgggcgccgccggccgccgcctggtcaagatcgccgtggtgggcgccagcggcgtgggcaagaccggtgagtcgtcgcgcttagccctgggtctggtcttggacgacccctgacgggagttgaggctgaacaaggcgtggggagcggtgggagctgcagcccgaccgctctccgtccccgcgcagggagccgctgccccttgggagtgggcttagccgttgtctacgccacccgcctgcttccacagacgggggaaacaaggatcaagaatggccaggcagctttctggggaccaccggcaccgncgccatcagaactttggggtgtttgagcctctggcaatgcctggcacagaaaggggagttagtgaagctagcccccctgggaggtcttgaaggttaggaagacatgggtctactggaaggcttangtgtggnttaanccgggcttaaaaggaaggggtgggccca

SEQ ID NO: 157 - DNA, 680 bp, Homo sapiens
  misc_feature (626)..(626): "n" may be a, t, c, g, other or unknown
  misc_feature (637)..(637): "n" may be a, t, c, g, other or unknown
  misc_feature (662)..(662): "n" may be a, t, c, g, other or unknown
gacaccctctccgcgatgactgtgagtggtccagggacccccgagccccggccggccacccccggggccagctcagtggagcagctgcggaaggagggcaatgagctgttcaaatgtggagactacgggggcgccctggcggcctacactcaggccctgggtctggacgcgacgccccaggaccaggccgttctgcaccggaaccgggccgcctgccacctcaagctggaagattacgacaaagcagaaacagaggcatccaaaggtaggggaatggtgggccctggtgtggagctgtagggcttctgtggtgggcaaggactctgggaccgctgcaccgtcacattctcctcctttggccccagagacacatctgccttctttctttcccactgcctcgggcctttccttttctgcagctaccctcaccttttctgaggctgaagcaccgagccccacattcgtcccccccaccttcttctggcctttcctcgagatctttccctactgctcttgcctggagacagtggcctcatgggtgctgacagcgctcctgtttgtgctcagccattgaaaaggatggtggggatgtcaaagcactctaccggcggagccaagccctaganaactgggccgnctggccaagctgtcttgacctgcanagatgtgtgagctttgga

SEQ ID NO: 158 - DNA, 765 bp, Homo sapiens
  misc_feature (713)..(713): "n" may be a, t, c, g, other or unknown
  misc_feature (722)..(722): "n" may be a, t, c, g, other or unknown
  misc_feature (752)..(752): "n" may be a, t, c, g, other or unknown
agagggagacccgcggcaaccccggcaacccagggctcggcgtcgctgccaccatgacgggaagcaatatgtcggacgccttggccaacgccgtgtgccagcgctgccaggcccgcttctcccccgccgagcgcattgtcaacagcaatggggagctgtaccatgagcactgcttcgtgtgtgcccagtgcttccggcccttccccgaggggctcttctatgagtttgaaggccggaagtactgcgaacacgacttccaaatgctgtttgctccgtgctgtggatcctgcggtgagttcatcattggccgcgtcatcaaggccaagtgtgagaagccattcctggggcaccggcactatgagaagaagggcctggcctactgcgagactcactacaaccagctcttcggggacgtctgctacaactgcagccatgtgattgaaggcgatgtggtgtcggccctcaacaaggcctggtgtgtgagctgcttctcctgctccacctgcaacagcaagctcaccctgaagaacaagtttgtggagttcgacatgaagcccgtgtgtaagaggtgctacgagaagttcccgctggagctgaagaagcggctgaagaagctgtcggagctgacctcccgcaaggcccagcccaaggccacagacctcaactctgctgaagccctcttgcgcagctgcctctcggccccttcgcttctncccttccgnttgtccatgcttggccccctcgtccccatncacctgtgccctt

SEQ ID NO: 159 - DNA, 879 bp, Homo sapiens
  misc_feature (720)..(720): "n" may be a, t, c, g, other or unknown
  misc_feature (769)..(769): "n" may be a, t, c, g, other or unknown
  misc_feature (795)..(795): "n" may be a, t, c, g, other or unknown
  misc_feature (841)..(841): "n" may be a, t, c, g, other or unknown
  misc_feature (878)..(878): "n" may be a, t, c, g, other or unknown
gtattcattaaaagaaaactaactggaaaacaggttagattaattcagtactattaaaaaagaattcagagctgttaatattttatcacaggataggatacttaaaatatagcattctgtgctgagatctaaggtgaagtctataaagattaaagttcccttttttctgatgttcaagttgattgttgttcagtatggcatatatgacaaaagtatatttgagtcaaatgtggctttctaaaatggatgcaacatgtagatccatacaagttggggtaggatatacccaagcgtgtatatatttgctcagcatgtgaaataataaaaataatacaaaactactcattcttcaaggtagttacagtttcaatgccactcttcctgtccccatattcattaagacagaagcttgatgcttaaacacacactggtatgaaaatgttttgtgttttctgttatattgtcagaagtgacattgatttgaaaggatgagagccttattttcttgcaacccttactgaaaggcatgatttcaggtgaaaatcttcagtgatttttaacatatgtcacatgtttgcagtaaggtcagtctttccaatcacagatagagttatgcatctatattctaccaaatattagcaaaaccaatgcaatacgtgtctggctttgcaatataaagtaagcttggtgattatatttaagtggagttacttgaaatangtcatttagtttacatacagtttaattctcatgccacaattaataaggnatcacatgactgcaaaatccctgcancaaacttctagctctgatattggtaagatacttggctgaagtgganataactggctgtgctgcacttaagctgtctgaggtgng

SEQ ID NO: 160 - DNA, 779 bp, Homo sapiens
  misc_feature (684)..(684): "n" may be a, t, c, g, other or unknown
  misc_feature (714)..(714): "n" may be a, t, c, g, other or unknown
  misc_feature (773)..(773): "n" may be a, t, c, g, other or unknown
ttccaggtggcatttgttagctggtagacaaggactttgccgtgaatttgttagtagcaaggaatgatttcttccagcttccttgaaatgaataattagtaaacttctaagcaaagtcaatgactaggagtttcacatgtttgtgaggtcctaactaattctcttacccagatgccacctccatgaatgatggtgctttaggcttctggaatatgtaaaaacagcaaagggaaccaagtctagactgcatactggtaaaccagggaagactcagaactgcatatgcatcctcatgcattcctttgtaaagaccaccagtactaaaataactggacactcattgtacctcccagcgataagtatgtgtaacaggccagtgtgttgtccccatgatcatgaattaggcttgggatgcttccaaatatattcaaggtgttggaacaggataggcagctgtgactccctcaagagtccttagaattctaaataaaatgcagagccatcctaagacacaggggtatggacaaggcctggtgacaccaaaggtgcttgtatccaattgaaaaggtgcctgtctcaatttcataccacctttattgcagttaaaaaaaaatcacactctggggacacttggtggaattacagagccaccatcatcattccaaccactatttcattttctgnagttttacctgtgtgcaattactccccctncattctggtccacttcttacttcttagtaccaaatcctctggttgggattgagcgctgntcctgg

SEQ ID NO: 161 - DNA, 691 bp, Homo sapiens
  misc_feature (576)..(576): "n" may be a, t, c, g, other or unknown
  misc_feature (667)..(667): "n" may be a, t, c, g, other or unknown
  misc_feature (683)..(684): "n" may be a, t, c, g, other or unknown
tcttgaactcctgacctcaagtgatccacccaccttggcctcccaaagtgctggaattacaggtgtgagccaccgtgcccagccaaaattcttaaagaataaaccaaatcttaaacaatcttccaattagaattattttcagccaaattatcatttaagtgtgagagtaaaataaagacattttcttttttcctttctctttttttttttttttttgagatggagtctcgctctgtcgcccaggctagagtgcagtggtgcaatctcggctcactgcaagctctgcctcaggggttcatgccattctccagcctcagcctcccaagtagccgggactacaggcgcccaccaccatgcctgactaattttttttctatttttagtagagacagggtttcaccgtgttagccaggatggtctcaatctcctgacctcgtgatctgcctgcctcggcctcccaaagtgttaggattacaggtgtgagccaccgcgcccggccgataatgtgttgttttaaggcattaattttgtggtacatacaaaagtaatttgtgtgtacatacatgcatatatacntatatatgtacacacacatatatttggtaaacctacacacagtgtttattttattatttcgataaaactattattcacagctgagccttgnggtgcactggaatagnncttttcg

SEQ ID NO: 162 - DNA, 661 bp, Homo sapiens
  misc_feature (504)..(504): "n" may be a, t, c, g, other or unknown
  misc_feature (592)..(592): "n" may be a, t, c, g, other or unknown
  misc_feature (596)..(596): "n" may be a, t, c, g, other or unknown
  misc_feature (647)..(647): "n" may be a, t, c, g, other or unknown
ctgttggttgattgaaaattctctttcattgtcaactgaacgctggactgccagacagtcccaaatggcctccctgaaatgcctgactgttggtgccacttgccatctgggagatcagctggagcttttgagcaggacttcatttgtccttcctcttggcttctcctcatcactacttggccttcctcacagactgatggctaccatccaacaaaggacgttccaatgggtgctgaaaagctgtgtaactcttaagacccagacctcaaagttacacagtgttacatttttccaataaaacaattaaataaaaaaattaattttatggatacataatagttgtgccttttatgcgatacatgtgataaattctatttagatattttacccatttttaatcagatctatttgctattgagttgtttgagttccttatatattttgattatgaatcttttgtcaggtgaagagtttgcaaatattttctcccattttatagattgnttcctcactttggtaattgtcactcttacaagattcaatttgttgagtttgtgagatgagattatagtcaaataggtaaatctacctnctgntaactactcaataatataatttatttattcaaaaaatggtaattgctgggntgaagatatagatg

SEQ ID NO: 163 - DNA, 741 bp, Homo sapiens
  misc_feature (656)..(656): "n" may be a, t, c, g, other or unknown
  misc_feature (722)..(722): "n" may be a, t, c, g, other or unknown
  misc_feature (735)..(735): "n" may be a, t, c, g, other or unknown
gaataaaatgtacaaatttgttgtgtttttttatgttctaataatactgagacttctaggtcttaggttaatttttaggaagatcttgcatgccatcaggagtaaattttattgtggttcttaatctgaagttttcaagctctgaaattcataatccgcagtgtcagattacgtagaggaagatcttacaacattccatgtcaaatctgttaccatttattggcatttagttttcatttaagaattgaacataattatttttattgtagctatatagcatgtcagattaaatcatttacaacaaaaggggtgtgaacctaagactatttaaatgtcttatgagaaaatttcataaagccattctcttgtcattcaggtccagaaacaaattttaaactgagtgagagtctatagaatccatactgcagatgggtcatgaaatgtgaccaaatgtgtttcaaaaattgatggtgtattacctgctattgtaattgcttagtgcttggctaatttccaaattattgcataatatgttctaccttaagaaaacaggtttatgtaacaaagtaatggtgttgaatggatgatgtcagttcatgggcctttagcatagttttaagcatcattttttttttttttttttgaaagtgtgttancatcttggtactcaaaggataagaccgaccataatacttcactgaatattaataatctttactagnttacctcctctgntctttg

SEQ ID NO: 164 - DNA, 781 bp, Homo sapiens
  misc_feature (617)..(617): "n" may be a, t, c, g, other or unknown
  misc_feature (716)..(716): "n" may be a, t, c, g, other or unknown
  misc_feature (724)..(724): "n" may be a, t, c, g, other or unknown
  misc_feature (735)..(735): "n" may be a, t, c, g, other or unknown
gagcactggatttggagtcaagaaacctggacacttggctccacacttccttagctgggtaactttgggcaaaccgcttggtctctcaagcctaaggttcttcagctataaaatgggaataatacttcactaactacctcacagagttgtggtaagaatataatcagataactggataaaaacactatataaactggaaagcgccgtacaaatgtgagagatcagttttattatcaaatcactgttttccactgcctcttgaatcggctttattctaaccaaccattacatctttctcatcttttggagtatgggtaattgaggcttgggtgtgtcatcagggactggagttatttcagctcccatgtagaggtgggagaggtggttgatggggcagtggaagttagataccagcgatgtatatggtaggacattttcctgggtcactttgacagtaccttgggaaattgtcaatccttgcagagggcctaggctgggcacaagggagaaagcgaacagttgactaagaattgaggggagggtctggagcgctactgccctcctgtcattgctgtgggtgggagaggctaagactacaggtttgactggaggcctangagagaagagtgccttagggtttcaagaattttaatgcctagcagctgagtaacaggcattagtctgatagatagtgaaaggggagaaagtgcccctgntgtgagancaccttttcanggcaacaactggcttggtatcaccagcaacccttaaccctgggcag

SEQ ID NO: 165 - DNA, 734 bp, Homo sapiens
  misc_feature (663)..(663): "n" may be a, t, c, g, other or unknown
  misc_feature (721)..(721): "n" may be a, t, c, g, other or unknown
  misc_feature (730)..(730): "n" may be a, t, c, g, other or unknown
ttccttgttaaccaagttacttttaaaaagatcctttttaaactgattcttcctcagctgttcttcagccctctatactttttcataaaagtcaccagtgactgcccagttgccaaatagaatgaatacctttcagtgctcagctgtcttgacctctccgcagcatttcacaccacccaccaaccctcagtgaaacaacctcctcccttagcttttatgacaccacaagtctctggattctcagagaatccagaaaaacaagtctctggattctctcctcttacctctcagcccacacaggctgagctgtccttgaaacctagatgggggaaatgtctgtggctgtctgtggtctcttcttttcaggagttgggtagggaggaagaatcacagctgctcctgcttcctctgtctgtctctctatttcctgagtcccttccttttcctgaactcagttctcctcatgccaaccatgtttatgagctcctgctgggaggacagcatctgtgagtccttccctctgtctctcccagacaacacagaggttttagcctgtttgctaagagaccccatctaagtcagcccaagggtgtggattaggttttacagcatccaggccgcagtctggctaaactggattaccaggctggtgggcagctcctnaccatgatcctgcaccagttagagcctgctgtagttgggaaggacctgggattgtggnaagatgtgnttcg

SEQ ID NO: 166 - DNA, 738 bp, Homo sapiens
  misc_feature (678)..(678): "n" may be a, t, c, g, other or unknown
  misc_feature (705)..(705): "n" may be a, t, c, g, other or unknown
  misc_feature (717)..(717): "n" may be a, t, c, g, other or unknown
ataggccagtgccggggtttaagggccaggaaaggaagcattcagggaatttaggtgtagccagaagaaaatcaggtcctggctccccagaagcaagagagttcaagtgaaggaaggaggaggttcctggatgtggatgtcatcatttctgggaacactcttaaatggagactcagatttcttagccaaaatttagggaggatccagaagaaaccaaagacgaagcatcccagttcttgggtatttcctgaaacagaagaaaatgacaaaggcccaggaatcactgaccctggaggatgtggctgtggacttcacctgggaggagtggcagttcctgagccctgctcagaaggacctgtaccgggatgtgatgttggagaactacagcaaccttgtgtcagtggggtatcaagccggcaaacctgatgccctcaccaagttggaacaaggagaaccactatggacactagaagatgaaatccacagtccagcccacccagaaattgagaaagctgatgatcatctgcagcagcccttgcaaaaccaaaaaatactgaagaggacgggacaacgctatgaacacggaagaactttgaaatcatatttaggtttaaccaaccagagcagaagatacaacagaaaggacctgctgagtttaatggagatggagcttttctncatgataatcatgaacaaatgcctacngaaattgaattncctgaagtagaaaacccatca

SEQ ID NO: 167 - DNA, 575 bp, Homo sapiens
  misc_feature (563)..(563): "n" may be a, t, c, g, other or unknown
  misc_feature (570)..(570): "n" may be a, t, c, g, other or unknown
  misc_feature (574)..(574): "n" may be a, t, c, g, other or unknown
aaaaaggagaggaggggctcctgggaacagggctcagaggcaggcgaggtccctgattcactcactcactcactcattcattcgttcccacacacactaagcagacatgtgcccagcacctcctttgtgccaggccccatctggatgtccatgccaggagagaggcaggcagacctgggcctcccaggatggaggacggacgaagaccactgagcatgatgagaggggaaaagctgaaatgtgagtgggaagctcctgctcaccacggcagccccctggctagcacggcctggcagagtccatatggaaggaaggaaccaggttctatgggatcatagaggagcggacgtgatgcagcctggaaaaggcgccctggagctgagggtagggatgccaataggcattagccaggctgtgggtgggaggtggggagaggggatccctgcaagaggcaccaaggcacaaaaagcagcttcctggaggggaggttcggaggtctctgagcatcctatgaaatcccatagtgcttgccttggatcttccaggaagcatgagacccaccnagctgangacna

SEQ ID NO: 168 - DNA, 868 bp, Homo sapiens
  misc_feature (779)..(779): "n" may be a, t, c, g, other or unknown
  misc_feature (827)..(827): "n" may be a, t, c, g, other or unknown
  misc_feature (845)..(845): "n" may be a, t, c, g, other or unknown
caattactaccatcttccagagattcttgtgtgtcctctccttagaaagaaaatagagtttgagggtattgactgctttctttactgactgagtcttgttgaagcagaggaaatgtaatgagccactgaaaaggttttatgtaaattaacattgtaaagccagtttcaaattttattctgctactggttaaagaaagtaaagcatagagtataaccttggaactatatggataaaaacttaaagaatccagtggatttcatgtaagtagaactctagtgagccatagatcataaagatttttagggaaggtgaatgaaacagaataaccactccaaaatgattcctccagctggatacactgtcaacattcactgtccatcttggctaaatttctactgtaaaccaaagatataaaaagggatatatgtgtactcctttacccctttttctttcctagcagtagcagtccagtagagtaatttgtaaacataaaagcaacattaaagtatgaggaaatttgaatataaaactgtaagaaaataatgtctcacatttgtcatatactgaaagtattaaacaggacccttccatatgtttcttagcagtttgctttcagtcttaagtgctatttcctcagggtttcatacaaacttgacctctcaatcccagatcaattgatttcctaggagtcatttgtatgtaataagcaggtgccccagtataaataatgggtggatagaagcataatatctacatcagaagaccttggtctatctgngctatcagccaactgcaggtttctactagagccatgactagaaagggntgcagataaatcagatgntttcagaaaagaagtgtccacca

SEQ ID NO: 169 - DNA, 861 bp, Homo sapiens
  misc_feature (784)..(784): "n" may be a, t, c, g, other or unknown
  misc_feature (807)..(807): "n" may be a, t, c, g, other or unknown
  misc_feature (819)..(819): "n" may be a, t, c, g, other or unknown
agtgggctcgaaacaaagggctgtccggtggggattcgtcgcggcgccttctgagtggtcgggtcgaggcttctcggcctagcagtgccctcgctgcgcgatctcaggcgggttctcctcggctccgcgcagcccgcgccgcggtgggggacccggcgcagcggcacctgctgccgagggaccccgcggcccgccccggtgctcgtgatggggctgatcttcgccaaactgtggagcctcttctgtaaccaagaacacaaagtaattatagtgggactggataatgcagggaaaaccaccattctttaccaattcttaatgaatgaagtggttcatacttctccaaccataggaagcaatgttgaagaaatagttgtgaagaacactcattttcttatgtgggatattggtggtcaggagtctctgcgatcatcctggaacacatattactcaaatacagagttcatcattcttgttgttgatagcattgacagggaacgactagctattacaaaagaagaattatacagaatgttggctcatgaggatttacggaaggctgcagtccttatctttgcaaataaacaggatatgaaagggtgtatgacagcagctgaaatctcgaaatacctcacccttagttcaattaaggatcatccatggcacattcaatcctgctgtgctctcacaggagaagggttatgccaaggtctagagtggatgaccttccggattggtgtgagataacttttttgcttgaaagagactgctctatttattctgngacatgaacatttttttctaagnaccctttgctgntaagcaacaacatgtttaattataacaacccaaaacctttga

SEQ ID NO: 170 - DNA, 858 bp, Homo sapiens
  misc_feature (706)..(706): "n" may be a, t, c, g, other or unknown
  misc_feature (817)..(817): "n" may be a, t, c, g, other or unknown
  misc_feature (824)..(824): "n" may be a, t, c, g, other or unknown
  misc_feature (844)..(844): "n" may be a, t, c, g, other or unknown
tttcttgctgtaccccggcgatggaggcgccggcttcggagtgcgcccgccgccgcagcagcagcgctcctggaggaccccgccgtcccccggctcaccgctgcccttcctgctgctgagctacccgagcggcggcggcggcagcagcggcagcggcaagcaccatcctaattatctcatggctaatgaacgcatgaacctcatgaacatggccaagctgagtatcaagggcttgattgaatcagctctgaacctggggaggactcttgactctgactatgcacctctccagcaattctttgtggtgatggagcactgtctgaaacatggcttgaaagctaaaaaaacttttctcggacaaaataaatccttctgggggcctctagaactggtagaaaagcttgttccagaagccgcagagataacagcaagtgttaaagatcttccaggacttaagacaccagtaggtagaggaagagcctggcttcgtttggcattaatgcaaaagaaactttcagaatatatgaaagctttgatcaataagaaagaacttctcagtgaattctacgaacccaatgccctcatgatggaagaagaaggagccataattgctggtctgtggtgggtctgaatgtcattgatgccaatttctgtatgaaaggagaagacttggactctcaggttggagttatagatttttcaatgnatctcaaggacgggaacagcagtaaaggtactgaaggagacggtcagattactgcaattctggaccagaagaactatgtagaagactgaacagacattttaatgctactgnaaacaancttcaggcaaagtagatgcnttagaaaaatccac

SEQ ID NO: 171 - DNA, 692 bp, Homo sapiens
  misc_feature (672)..(672): "n" may be a, t, c, g, other or unknown
  misc_feature (684)..(684): "n" may be a, t, c, g, other or unknown
  misc_feature (692)..(692): "n" may be a, t, c, g, other or unknown
gtctctgattctctgacaccacctaggtgtcccctaatttggttcagttctgacactagcttttcagggttcgtgccggcctcacaagttttgagggctaagtcccacaagaccatccccatttccgtcaccagttgcatgtcctaagccacctgtacttctgatcaactggctgtaaattggggttcccatgacctcacttcaggttccataatttgccaggacaactcacagaactcagaaaggcactttgcttattgttagtggttcctataaagctaggttgtccaacccgcggtccaggatggctttgaatacggcccaacacaaatacttaaactttcttaaaacatgatgagttttttttgaaattttctttttctcatcagctgcagttaatgttagtgtattttatgtatggcccaagatgattcttacagtgtgtgtggcccagggaagccaaaagattggacacccctgttttaaaggatgcaacttaggaacagcccaaaggaagtgacacacgggacgaggggtgggagtccccatgccccctgggggagacaccttctagtgcaccatcccaatgagttcatgacgtggaggcttcccacatcccatttttcaagagtttttgcagcccagtcttctggccccccaccccttccagangttggggtgtanggggtgcn

SEQ ID NO: 172 - DNA, 838 bp, Homo sapiens
  misc_feature (694)..(694): "n" may be a, t, c, g, other or unknown
  misc_feature (770)..(770): "n" may be a, t, c, g, other or unknown
  misc_feature (793)..(793): "n" may be a, t, c, g, other or unknown
  misc_feature (812)..(812): "n" may be a, t, c, g, other or unknown
tagaagatggagagtgttaaattatatttgtgataggaagcttagacatatcttttggttattagcttccattgccaattgtatttcagatgcatagggttttcttcccaaaaatatattgttaacttttatagctaactagcacctggaaaaaatgtatttgtacaactttactattgtatatagttttataataatgaaaaataaacccaatggccatattagaatgcaatttcgacatacagcttatctagatagttttccagaggattttgaaatttggcttaactgggaggataactgctcagcacaccactgaaacataaccactgacaccattcatttattttaactgagattcttgacatttttctctcctatgccttgttactttagcatacttgaactcacataaatgcttctttggattacatgggctatctgattccattttggatctgattgtccatcttgaattcaatatggtattcatctggactattcaaaaattatgccatttctagtctgtgaaataagatgtaaaaaatctttatttttgccctttggtaaaaacctatgtgacaacttttaaaatgtgaagcaacatctaatatagttgactggtatactaataggaaagtgaaagtatttcatgggtactttgtcacagaatgtgaaaagaaacttggcatantggcctttataatgaggcatccacttactcctctgaagtgaagtctggtagcttaacttgggtataggttttttgnaaggaaatctcatgaatcttcgntcatttctcttggccttcnctttttatctcaaaatggcacaagtt

SEQ ID NO: 173 - DNA, 872 bp, Homo sapiens
  misc_feature (777)..(777): "n" may be a, t, c, g, other or unknown
  misc_feature (812)..(812): "n" may be a, t, c, g, other or unknown
  misc_feature (868)..(868): "n" may be a, t, c, g, other or unknown
aaagtcctaaaaaactctttgcagtctaaacctcccaagttttttttttttggaaccaaggcaactttacccactagagataacctagaaaatttctatctttagttcaactgaactctcagtgttatttcatagaaaccaccccagtctatttatattattcaacacataattttggttagagaatttttttttttttttaaattagggatgggggtcttgctgtgctgctcaggctggtctcaaactcctgggctaagtgattccctgactgtacctggccaagagaagtttttgtgctgtggcttaccttagcatatttctctgcttcttctcttatatcttttggaacaatttcatgtcttccattagttactgtaaattaagccacatgtgtaaatgaattttaaattgagtaccatattgtaacttgcagtataccataggatctacccaatccacatatctgactcacctaaggttgcaaagttgtactatgagtaatactcgaatatttttgtgtgctgcttctacatgagattatatgtgcctacatattaagttcttatggaaatgaaagtaaattatgctatttataaatcctgagcattaatttatagcatagtatcttaaaaccatgaaatggatgtttcaaaaaataacgtgttcacaacttaagtcaattattaagcagaactttcccttcattagacaacctagtaaatttgctttagctttcattatattagaaaggacactcagttgtaaattagctgnggtacagatcattcctaaggcaaataaatggtccnaaaataacttacattcaccaacccagctgagttctagttcaaaagctttatccttnactt

SEQ ID NO: 174 - DNA, 816 bp, Homo sapiens
  misc_feature (696)..(696): "n" may be a, t, c, g, other or unknown
  misc_feature (721)..(721): "n" may be a, t, c, g, other or unknown
  misc_feature (796)..(796): "n" may be a, t, c, g, other or unknown
  misc_feature (801)..(801): "n" may be a, t, c, g, other or unknown
tattatcatggctacaaagtcttgtgtggtctgggccacatcctgtgccaggctccctttcattgtctatattccagtcaagctggccttcaaaatttcagcacattgggtctttctgccacaggcccttgcacatacatgcttttccctctgtacatgtgattttctttcatccccgctttccaaagctaactctgactcatccttcagactgcatcttaatgattacttccttctggaagactcccctaattttcacaactagatgagctctcccttatatgttgaaaacaagtatttcttgtgtgaacagaaatgtttaatgtctgccttcccaactcagccacaagctctgtgaggatggggactcagtctttgcatccctcagagcctagcatagtctcagttaatacgtgatagctggagcgtgacatttcattaggaacagtgaggctagttgagaaattatacctcaccagtatataggagagtaccattaggaattcttaatgggatgaaaacctgaattcatgtctagaccctgccacctgctggctgtgctgttttaaataaattgcagatcctctcagagcctgtttcctcatatataaaataatggggatcctaacagccccctcatatggttgtagcaggaatttaattaaataatatatggaaaagcatttttttaactgnaaaaccatacataaatatcctttgncacttttcccagtgcatgacacactgggtcattaaacatctattgggatgggtggatgggttggatagatggacnggacnggaattaacaggtta

SEQ ID NO: 175 - DNA, 834 bp, Homo sapiens
  misc_feature (766)..(766): "n" may be a, t, c, g, other or unknown
  misc_feature (818)..(818): "n" may be a, t, c, g, other or unknown
  misc_feature (823)..(823): "n" may be a, t, c, g, other or unknown
agtggtagcggttattcggcggcccgcggcggaccatggccctggcccggcgtcgctgggctttcctcacggcgtccccgagcagcgtcgcagagcgggccgacttccgggaaggaactgaccagcgactgagcggcggccggcgcgcttagcgccctgaacatgcggcagtccctgcgggcgaccccgggctccggacaggcggcggcggaggcggcggctcgggagggaaggaggcggcggcgccggcggaggtggcggcggagacggccggcgcccggcgcggagccctagggaggcagttcagcgcggcctcgggcctcgtcgagaaggatgctgtcccgaaagaaaaccaaaaacgaagtgtccaagccggccgaggtgcaggggaagtacgtgaagaaggagacgtcgcctctgcttcggaatcttatgccttcattcatccggcatggtccaacaattccaagacgaactgatatctgtcttccagattcaagccctaatgccttttcaacttctggagatgtagtttcaagaaaccagagtttccttagaactccaattcaaagaacacctcatgaaataatgagaagagaaagcaacagattatctgcaccttcttatcttgccagaagtctagcagatgtccctagagagtatggttcttctcagtcatttgtaacggaaagttagttttgcttgttgaaaatggagactctggttcccgatattattattcaagacaattttttttgatggtcanaagaaagccggccactttggaagatcgtgcccaatgaaagactaccggattntttantgaaattccaa

SEQ ID NO: 176 - DNA, 720 bp, Homo sapiens
  misc_feature (687)..(687): "n" may be a, t, c, g, other or unknown
  misc_feature (702)..(702): "n" may be a, t, c, g, other or unknown
  misc_feature (704)..(704): "n" may be a, t, c, g, other or unknown
aaattgggagggcttcttgcaggctgctgggctggggctaagggctgctcagtttccttcagcggggcactgggaagcgccatggcactgcagggcatctcggtcatggagctgtccggcctggccccgggcccgttctgtgctatggtcctggctgacttcggggcgcgtgtggtacgcgtggaccggcccggctcccgctacgacgtgagccgcttgggccggggcaagcgctcgctagtgctggacctgaagcagccgcggggagccgccgtgctgcggcgtctgtgcaagcggtcggatgtgctgctggagcccttccgccgcggtgtcatggagaaactccagctgggcccagagattctgcagcgggaaaatccaaggcttatttatgccaggctgagtggatttggccagtcaggaagcttctgccggttagctggccacgatatcaactatttggctttgtcaggtgttctctcaaaaattggcagaagtggtgagaatccgtatgccccgctgaatctcctggctgactttgctggtggtggccttatgtgtgcactgggcattataatggctctttttgaccgcacacgcactgacaagggtcaggtcattgatgcaaatatggtggaaggaacagcatatttaagttcttttctgtggaaaactcagaaaatcgantctgtgggaagcacntngaggacagaacatgtt

SEQ ID NO: 177 - DNA, 240 bp, Homo sapiens
  misc_feature (205)..(205): "n" may be a, t, c, g, other or unknown
  misc_feature (208)..(208): "n" may be a, t, c, g, other or unknown
  misc_feature (215)..(215): "n" may be a, t, c, g, other or unknown
ttttacttttggtttaaactttatgaagagaccacaggactctttcgaggccctgtaattggaatgagtccactttaaatcctttaacgaggatccattggagggcaagtctggtgccagcagccgcggtaattccagctccaatagcgtatattaaagttgctgcagttaaaaagctcgtagttggatcttgggagcgggcggncgngcctcgnataccaacatttaaaatgatggcat

SEQ ID NO: 178 - DNA, 809 bp, Homo sapiens
  misc_feature (720)..(720): "n" may be a, t, c, g, other or unknown
  misc_feature (786)..(787): "n" may be a, t, c, g, other or unknown
ggtaagtgaccctcgggcctcgccatgaagagccgctttagcaccattgacctccgcgccgtactcgcggagctgaatgctagcttgctaggaatgagagtaaacaatgtttatgatgtggataataagacataccttattcgtcttcaaaaaccggactttaaagctacacttttacttgaatctggcatacgaattcatacaacagaatttgagtggcctaagaatatgatgccgtctagttttgccatgaagtgccgaaaacatttgaagagtcggagattagtcagtgcaaaacagcttggtgtggatagaattgtagattttcaatttggaagtgatgaagctgcttaccatttaatcattgagctctatgatagggggaacattgttcttacagattatgagtacgtaattttaaatattctaaggtttcgaactgatgaggcagatgatgttaaatttgctgttcgtgaacgctatccacttgatcatgctagagctgctgaacctttgcttactttggaaaggttgactgaaatagtagccagcgcacctaagggtgaactactgaagagggtgcttaacccattacttccctatggaccagctctcattgaacactgtcttttagaaaatggattctcgggtaatgtcaaagtggatgaaaaacttgaaactaaagatattgaaaaagtacttggttctctgcagaaagcngaagactatatgaaacaacatcaacttcagtgggaaagggatatatcattcagaaaagagaaatannaccatgcttgggaagccgataa

SEQ ID NO: 179 - DNA, 913 bp, Homo sapiens
  misc_feature (638)..(638): "n" may be a, t, c, g, other or unknown
  misc_feature (706)..(706): "n" may be a, t, c, g, other or unknown
  misc_feature (792)..(792): "n" may be a, t, c, g, other or unknown
  misc_feature (794)..(794): "n" may be a, t, c, g, other or unknown
  misc_feature (835)..(835): "n" may be a, t, c, g, other or unknown
  misc_feature (895)..(895): "n" may be a, t, c, g, other or unknown
  misc_feature (903)..(903): "n" may be a, t, c, g, other or unknown
aggaagctgcatgcatgagacccacagactcttgcaagctggatgccctctgtggatgaaagatgtatcatggaatgaacccgagcaatggagatggatttctagagcagcagcagcagcagcagcaacctcagtccccccagagactcttggccgtgatcctgtggtttcagctggcgctgtgcttcggccctgcacagctcacgggcgggttcgatgaccttcaagtgtgtgctgaccccggcattcccgagaatggcttcaggacccccagcggaggggttttctttgaaggctctgtagcccgatttcactgccaagacggattcaagctgaagggcgctacaaagagactgtgtttgaagcattttaatggaaccctaggctggatcccaagtgataattccatctgtgtgcaagaagattgccgtatccctcaaatcgaagatgctgagattcataacaagacatatagacatggagagaagctaatcatcacttgtcatgaaggattcaagatccggtaccccgacctacacaatatggtttcattatgtcgcgatgatggaacgtggaataatctgcccatctgtcaaggctgcctgagacctctagccccccagcataccccggctcangggacacggacacaggcccaggggagtcagaaacctgtgacagcgtctcaagctcttctgagctgctncaaagtctgtattcaccttccaggtgccaaagagagcacccaccctgcttcggacaacccttgacataattgcccagcacggcaanangaggtggcattccaccagcccaaggcattcgacatttgcanaatgaaaattccttcttaatgggaagaagaatcccttaaaaatggggtcaaggatccccnatgaattnttctggttcc

SEQ ID NO: 180 - DNA, 684 bp, Homo sapiens
  misc_feature (632)..(632): "n" may be a, t, c, g, other or unknown
  misc_feature (638)..(638): "n" may be a, t, c, g, other or unknown
  misc_feature (649)..(649): "n" may be a, t, c, g, other or unknown
aaaacgctgcgctggagcggggccggcggcgagtcccagggacccaaccagagcctggcctgggagccaggatggccatccacaaagccttggtgatgtgcctgggactgcctctcttcctgttcccaggggcctgggcccagggccatgtcccacccggctgcagccaaggcctcaaccccctgtactacaacctgtgtgaccgctctggggcgtggggcatcgtcctggaggccgtggctggggcgggcattgtcaccacgtttgtgctcaccatcatcctggtggccagcctcacctttgtgcaggacaccaagaaacggagcctgctggggacccaggtattcttccttctggggaccctgggcctcttctgcctcgtgtttgcctgtgtggtgaagcccgacttctccacctgtgcctctcggcgcttcctctttggggttctgttcgccatctgcttctcttgtctggcggctcacgtctttgccctcaacttcctggcccggaagaaccacgggccccggggctgggtgatcttcactgtggctctgctgctgaccctggtagaggtcatcatcaatacagagtggctgatcatcaccctggttcggggcagtggcgagggcggncctcanggcaacagcancgcaggctgggccgtggccttcccctgtgccatcg

SEQ ID NO: 181 - DNA, 785 bp, Homo sapiens
  misc_feature (745)..(745): "n" may be a, t, c, g, other or unknown
  misc_feature (747)..(747): "n" may be a, t, c, g, other or unknown
  misc_feature (775)..(775): "n" may be a, t, c, g, other or unknown
aatgaccataattaatttatgctctcaaaaaataagtaaaaggaagaaaatttttttaataaataaaaagacatcaaacttaaatgtgtaaattggtacagcttaagtgaatttgtgatttatgtctgctgtaattttttttatattaggaagtttcagctatgaaggaaattttacacttcaaaaagctgttcagtggcagaaaatatgataatgacagattagatcacaatatgctaattttttcagagttacctctcgtgtaacacagcttttgaaaatatttgaatagtactatattcttttttaagtgaaaaaaaaaaagaaacctgtaattgctttataaagattcagtgtgcttcagcttcactttgaatatatccacttagtataatctaacattggttttcttaataatggttgtgtgacttacatgttaggaatcttcacagtacacattttactttttatctgtttctcagaaaatattgactgttatttatcactaaactcataatatgcttaggcactaaccttcaacaatacagtaacatctttagatttctaccgaattgtgaatatgttattagatgaatatttacctctccatgtgtttctggcacatatcttcaaagcataactattatgaataaaattatacatttataaccactgtgaatagttacgtatttaattactcagaactgtccatgagaaatactatagaaattatttaccatgtggngnattttatataaattcattataattgggngaaagattaa

SEQ ID NO: 182 - DNA, 699 bp, Homo sapiens
  misc_feature (632)..(632): "n" may be a, t, c, g, other or unknown
  misc_feature (650)..(650): "n" may be a, t, c, g, other or unknown
  misc_feature (653)..(653): "n" may be a, t, c, g, other or unknown
accgttacccggggcaacagctgagccgtctgggaagggatgcatcttttcttctgtatgcttgagtcaagaactctaagtcatcttggtaataccgggttggatgcttaaagctgcagcaaaaagaccagaactttcagggcttctcaaatttaataactatggaatcttatcagaaagtccattaacatctcaaagaacaacgtggttattgtatcaatcaccatcctttataccaggatttgcatatccttcaagatgcctgaagacaatcggaggggtatacaagcaagcgaggttaagaacaatcacttttcagatcctaaacttttatatgtagtgtctgctgataatgcattccctgagaaaatggacctgtggataaaccatcatgcttcatctcatttcctgtctcctctttcaccatttttctttcttttcttttcttttttttttttttttcttgagacaagctcttgctctgtcacctaggctggagtgcagtggcgtgatcatatctcactgcaacctaaaactcaggctcaagcagtaccctcacctcagcctcccgagtggctgggactaacaggcgcactccatcatgcccgaataatttttggtaattttttganagatggggcttgctttgntgnctaggctggcttgaactgggctcaagcgatcctccactttggcctt

SEQ ID NO: 183 - DNA, 613 bp, Homo sapiens
  misc_feature (326)..(326): "n" may be a, t, c, g, other or unknown
  misc_feature (524)..(524): "n" may be a, t, c, g, other or unknown
  misc_feature (610)..(610): "n" may be a, t, c, g, other or unknown
  misc_feature (613)..(613): "n" may be a, t, c, g, other or unknown
gttcgcaccgcccccgcccgcaagaaagatggcagtggcctgatccgggcccgttggcggcgtcactgacgcttcgctccggtcctcggatcccgagcgcggggaggcagaccgactgtgagctgcttgtccccatcctgcggccgtcctggggacacagagccctccgtggtgcccggggattggattggagccaggacgcggagccgcggcggagccggaggaagctgatggtcatcttttccaaggtggatgtgaacactgaccggaagatcagtgccaaggagatgcagcgctggatcatggagaagacggccgagcacttncaggaggccatggaggagagcaagacacacttccgcgccgtggaccctgacggggacggtcacgtgtcttgggacgagtataaggtgaagtttttggcgagtaaaggccatagcgagaaggaggttgccgacgccatcaggctcaacgaggaactcaaagtggacgaggaaacacaggaagtcctggagaacctgaangaccgctggtaccaggcggacagcccccctgcagacctgctgctgacggaggaggagttcctgcgttccttcaccccgagcacagncgn

SEQ ID NO: 184 - DNA, 682 bp, Homo sapiens
  misc_feature (624)..(624): "n" may be a, t, c, g, other or unknown
  misc_feature (649)..(649): "n" may be a, t, c, g, other or unknown
  misc_feature (652)..(652): "n" may be a, t, c, g, other or unknown
gaccaggatgattttagcatacgctggtaggaaaatgaaatttaaagtgattttcttacatttttatcagtgtaggttttggtcattaaaaattttcactccagttctttttatgtttattttgacttctgatttatctaggaactagaacctctggttggtgaacagttgctccagttatgggaacgtcttcccttgggagaaaaaaacacaactgattgacactcaggttataccatcttgactttgagtattggcagtatttgtgatcattaggaacctttcagattatttatctttttttttcccctttcttctagaactcttagctgtggaagaacatcatgcctatttataaccactgaatgcactgactttcaaaaactgaggtggggtgtgtgttacgaatgggctttttaacacttttagagtgttgctttagaactaccatcttcatatacaggagaaaggaagcatttaaatttttatagtgattatagagaatgattatatgatgtttgtaatgaataaaatagtagtttcattatttggcacaatagcagtttattttaaacaaacaatttgaagttaaacatttcatttttaaaaacactgaattacagntcttattgatgactttttaatgcanagnaagttgtttaagaaaggcctgaatatatca

SEQ ID NO: 185 - DNA, 858 bp, Homo sapiens
  misc_feature (717)..(717): "n" may be a, t, c, g, other or unknown
  misc_feature (724)..(724): "n" may be a, t, c, g, other or unknown
  misc_feature (769)..(769): "n" may be a, t, c, g, other or unknown
  misc_feature (848)..(848): "n" may be a, t, c, g, other or unknown
  misc_feature (850)..(850): "n" may be a, t, c, g, other or unknown
agaaaagaggatgttctttcttgaaaataagcgacgacattgtaggtcctatgaccgacgtgctcttcttccagctgtgcaacaagagcaggagttctatgagcagaaaatcaaagagatggcagagcatgaagactttttgcttgccctacagatgaatgaagaacagtatcaaaaggatggccagctgattgagtgtcgctgctgctatggggaatttccattcgaggagctgacgcagtgcgcagatgctcacttgttctgcaaagagtgtctcatcagatatgcccaagaggcagtctttggatctggaaagttggagctcagctgcatggaaggcagctgcacgtgttcgttcccaaccagtgagctggagaaggtgctcccccagaccatcctgtataagtactatgagcgaaaagccgaggaggaggttgcggcagcctacgccgacgagcttgtcaggtgcccgtcctgtagctttccggctctgttggacagtgatgtgaagaggttcagctgtcctaatcctcactgccgaaaggaaacctgtaggaagtgtcagggactctggaaagaacataatggcctcacctgtgaagagctggctgaaaaagacgacatcaagtaccgtacctctattgaagaaaaaatgactgctgcccgcattagaaaatgcccaagtgtgggactggcctcatcaaatctgaaggctgnaacccgnatgtctttgccgctgtggtgcccagatgtgctacctctgtcgagnttctattaatggatatgaccatttctggcaacatccccgttaccaggagccccttgccaggaatggtcaagatgctctntntggaccga

SEQ ID NO: 186 - DNA, 805 bp, Homo sapiens
  misc_feature (761)..(761): "n" may be a, t, c, g, other or unknown
  misc_feature (786)..(786): "n" may be a, t, c, g, other or unknown
  misc_feature (798)..(798): "n" may be a, t, c, g, other or unknown
taattatatggcagggttttggttagccaaaaaaaacttctttttaaataatccagtgaaggattttttaagcttttaaaatgttaaattctgatagtcttaaattgaagtcaaagcatttctttttttctttttcccttagacttctttatgatctaagacacttatgaaggtaccaggtgccctaattgaccttaaaaggttagaaatgaatctttgccttgatgcaaagcatcagacttgatgcaaatcaacatataaataactgcaagcaaatatagagtcaactctggactatttaattttggtttatctgtggctaatcttgttttcaaatgcatggacagaacctattcaactacaatgagtatgggctcaatcctaccttgttggtatctcaaatccccctgtttacttttaggcagtaactgcctttgaaaacagaacatttcccttttccagagcagaccttacctcagtctctgaaatgggttgactttcagggaagactcaacaggcttccaggtgtgaaaacaggaaggtcatcttaaattagattttaatattatggcctcattgcttcatcattttgctagaaggaaattccctgaatatcagatacacccctattcaaataaaatcacaaaaccatctactaaagctaaacagtttttcaaaaccattctgaattatgcagtaatatttccttctgtaagaatatgctctggtctgtaaaccgagtattgagagaattgagaatnaaaccacttcgcagatagcatgaanaggaaatgaggnatgaagt

SEQ ID NO: 187 - DNA, 805 bp, Homo sapiens
  misc_feature (749)..(749): "n" may be a, t, c, g, other or unknown
  misc_feature (751)..(751): "n" may be a, t, c, g, other or unknown
  misc_feature (805)..(805): "n" may be a, t, c, g, other or unknown
ttaaaagaaactatttaatgtaaaatattctacatgtcattcagatattatgtatatcttctagcctttattctgtacttttaatgtacatatttctgtcttgcgtgatttgtatatttcactggtttaaaaaacaaacatcgaaaggcttatgccaaatggaagatagaatataaaataaaacgttacttgtatattggtaagtggtttcaattgtccttcagataattcatgtggagatttttggagaaaccatgacggatagtttaggatgactacatgtcaaagtaataaaagagtggtgaattttaccaaaaccaagctatttggaagcttcaaaaggtttctatatgtaatggaacaaaaggggaattctcttttcctatatatgttccttacaaaaaaaaaaaaaaagaaatcaagcagatggcttaaagctggttataggattgctcacattcttttagcattatgcatgtaacttaattgttttagagcgtgttgctgttgtaacatcccagagaagaatgaaaactggttggaaactaaaggttcattgtgttaagtgcaattaatacaagttattgtgcttttcaaaaatgtacacggaaatctggacagtgctgcacagattgatacattagcctttgctttttctctttccggataaccttgtaacatattgaaaccttttaaggatgccaagaatgcattattccacaaaaaaacagcagaccaacatatagagngnttaaaatagcatttctggggcaaattcaaactcttggggtctaggactcacatn

SEQ ID NO: 188 - DNA, 866 bp, Homo sapiens
  misc_feature (841)..(841): "n" may be a, t, c, g, other or unknown
  misc_feature (857)..(857): "n" may be a, t, c, g, other or unknown
  misc_feature (866)..(866): "n" may be a, t, c, g, other or unknown
gcgggcgggctgctgaggtggctgtcgccggccccgatggacgctcccccgggcggggttgagtcggcgctcagctgcttctctttcaaccaggactgcacatccctagcaactggaactaaagccgggtataagctgttttctctgagttctgtggagcagctggatcaagtccacggaagcaatgaaatcccggacgtctacatcgtggagcgcctcttctccagcagcctggtggtggtagtcagtcacacaaaaccacggcagatgaacgtgtatcacttcaagaaaggcacagagatctgtaattacagctactccagcaacatcttgtccataaggctgaaccggcaaaggctgctggtttgcctagaagagtccatttatattcacaacattaaagacatgaagctgttgaagaccctcctggatattcctgcaaacccaacaggtctatgtgctctctctatcaaccattccaattcttacctggcctatcctggaagcctgacttcaggggagattgtgctttatgatggaaactccctgaaaacagtctgcactattgctgcccatgagggaacactagctgccatcaccttcaatgcctcaggctccaaactagcaagtgcgtctgaaaaaggcacagtcatccgggtgttctctgtccctgatgggcaaaagctctatgagttccggagagggatgaaaaggtatgtgacaatcagctctctagtggtcaatatggattcacaattcctctgcgccttcagtaacaccgagacggtacacatcttcaagctggacaggtcaccaacagtcgaccagaagagcctttganctggagtggcttcctngggaaagan

SEQ ID NO: 189 - DNA, 760 bp, Homo sapiens
  misc_feature (703)..(703): "n" may be a, t, c, g, other or unknown
  misc_feature (728)..(728): "n" may be a, t, c, g, other or unknown
  misc_feature (731)..(731): "n" may be a, t, c, g, other or unknown
gtaagattcttgttgggagcttaagaatagattcctgagctaggcctttggagactctggcatgctgtgtctaggagggagtctgtaaaacaatttttaatgaagaaatttaaaaattacacaaaactagaatagtgcattggtactcaacatccagatctgacacttatcactatcttaccatgtttgcttcatttgtcatttttttgtttgcttaagtatcttaaaatcccatacattgtgttatttcactgctgtgaacactttgggtagataccacgatatcacacctaacagaggcagcagcagtccttcggcttcatctcatagccagtccttaagcaaatttccctgattatctcaaaaatcatcttctagttggtttgttagaatcaacagaatataagtcacatgatgatctcgtttttaacaatcacctcagatgactttgatgttagctactttgagaaccactggaaattattttgccaacttgaaagttcaagttaggataccacaattcttggcacgtttggtggattataaatgtgattttgaaatattagaggaagcatttggggttaatgacaggatatgaatttatattagtaagtttgataagataaaatttcctcagtgaacggagaatctcagccccatgggctctaattgattgggacttgtgtaagagcgtggtcacagnttaatccaactggactgtatgctgnggnctcactcatggtggggcttatttacactg

SEQ ID NO: 190 - DNA, 850 bp, Homo sapiens
  misc_feature (693)..(693): "n" may be a, t, c, g, other or unknown
  misc_feature (834)..(834): "n" may be a, t, c, g, other or unknown
  misc_feature (845)..(845): "n" may be a, t, c, g, other or unknown
  misc_feature (847)..(847): "n" may be a, t, c, g, other or unknown
gttcagtattcaaagaatgtcttaagattatgataattaaagaagtcccaggacgagacaaaatgaatcaaagattttgtatgcaagtccacaaagtctgtcagacatattgtaaataatttaccattgattttattttcaacaatgttaatgtattgacatttagcatatatctgttagatagatattctatcacaatgttttattccttgcaccagccctttactattttctaacaaaaaaaaaaaaacacaatttcagggcataaacaagaagtgtttatttttccgtagtacatctttgggttgactagagattggctgttctaagatgtgctcatgcaggcttgactctaaactatgcatttagagtcattttgttctggtctggtctacacgtaggttattcttttgaaagcagtactctgtcttaagcatgttcttctcttagtggagtttggagatgctaatatcgacaggtggaggcagaatgctccttaaagtctaaactagaattgccacactgtcttcctaaggttcataagccaaaggaaatctcatggcaatttccaacattagtgggacaagagattatactactcccaaggaagtggaggtggggaaaggaatgattatttctgtatcataatctaccatagtccttaagtgactgcctcttgctacttcccaatgntttactaatcacattgacttttaaaaaatagattccctaggaattcaagaaaaatacttattttctaaataaatcaccagcaaggacagacacaattggctcactacccccaatatcctaacaccacttaccaaataccgngtataatcatncncac

SEQ ID NO: 191 - DNA, 864 bp, Homo sapiens
  misc_feature (814)..(814): "n" may be a, t, c, g, other or unknown
  misc_feature (837)..(837): "n" may be a, t, c, g, other or unknown
  misc_feature (860)..(860): "n" may be a, t, c, g, other or unknown
tttcatgcccttgttttaaaaaaactactttttttggcctcaaaaaaatcaagggtgtaatttttaataaattgttaatcctatgttttgtaattttcattttaggagcttgacttatttttttctctctcataaaaacacatttgttttaattgtaggagaaattttctcagcattttgcatgttctttctaatctttgttggtctgaatatattggtagtaattactgtaattattcaacaaaaagcatatccgttcaaaaatttttccactatgtcttttttctagtggctactgttttagttttctagttgaatatctctgacaagctttcgtatggttttgttatattaagtgtgtttcaaagtgaagactacagcacctcgccggtactgtgtgaggcccaacagtggaattattgacccagggtcaactgtgactgtttcagtaatgctacagccctttgactatgacccgaatgaaaagagtaaacacaagtttatggtacagacaatttttgctccaccaaacacttcagatatggaagctgtgtggaaagaggcaaaacctgatgaattaatggattccaaattgagatgcgtatttgaaatgcccaatgaaaatgataaattgaatgatatggaacctagcaaagctgttccactgaatgcatctaagcaagatggacctatgccaaaaccacacagtgtttcacttaatgatacccgaaacaaggaactaatggaagagtgtaaaagacttcagggagaaatgatgaagctatcagaagaaaatcggccctgagagatgaanggttaaggctcaaaaaggtagcncattcggataacctggacacctnactg

SEQ ID NO: 192 - DNA, 706 bp, Homo sapiens
  misc_feature (624)..(624): "n" may be a, t, c, g, other or unknown
  misc_feature (679)..(679): "n" may be a, t, c, g, other or unknown
  misc_feature (704)..(704): "n" may be a, t, c, g, other or unknown
ggaaagatgaccgatggagtccaaagccaagtggcttcaccagctgacaagccaccctcctgcagcctgagtttcacagtccactgggttcgttgtcatgcggtgtttgaatggttaagcccttgcagtatttcagatcgggcaaaaaatatcggatgcacatagcagaaccattggtggtatttatagctttgctttgtactcctcactgtttctgcctacgcaaaatatccatgtttcctctgagaaatctgttgtggactgaaagcgctgctggctgtgaaatttaataaagtgtgtatgctttgctagaaaattatttcttggacaataggaacagtcattgatctgtaaatcctggctcttaacagtgagtggccaaggacttgatcagcccatttcttggtccctcagtgctttaaaatttaagtagcactgcattttgtaatgttgaatatgactctagtgacttgtaggaggcacttgtgaggagatgcttgcttcagtgtaaaagatgctcatggcctgagtcagttgagttttctttcaagaaaccacttcagagtgaaatatccagggtttccccgccctggacatgtccagcctgcccaggcagcacacagncctgtaagtccacctcgtgtgggtgagatttcctcctgcgtgatgacctcatcgncatctctgctggctcattccacagnct

SEQ ID NO: 193 - DNA, 719 bp, Homo sapiens
  misc_feature (695)..(695): "n" may be a, t, c, g, other or unknown
  misc_feature (698)..(698): "n" may be a, t, c, g, other or unknown
  misc_feature (713)..(713): "n" may be a, t, c, g, other or unknown
ttttttttgcgagtggcgggccgactgtgtagtccgctccggcagcgcgctctgcccggcttcctcagtctcctcgccgggagcgtccgggagcagctccgaggccgcggcgaaaccaggtggagtccgaggttcggaggagtatcagaggttaggggaaggccggagaatgggctgggaggctgcgtttcggagcttagggttctgtccctgcgatcgccgcgtctccctcccttggtgggcgcggctcccgggaagcggctcgtctcgtctcccctcacaggccgggttcccgttctggaccttcgccctcggaacacagtgctgttggccgggactccttcccgaggtggacggctccctgttctcattcctggctctgccagaactgtaggaagtgctcagtacactttagggcatgcatggcactccctgggagacagtgctttagggccagaggaaagatcttccctgaaggcaaacgcccgcggagcccacaagtccgggccgcactgaacaagtcaggatgttgccatcggcaattctgcagaaggcagtaacccatctgagagaaagagccgctgtcataaggtctcttgcttgagctgctgggttgagaatggagctggaagagggaactgatctcggactccttggggatcttggttatgtttgacccttttactttcagggancanggatgggccaccganacccca

SEQ ID NO: 194 - DNA, 826 bp, Homo sapiens
  misc_feature (713)..(713): "n" may be a, t, c, g, other or unknown
  misc_feature (802)..(802): "n" may be a, t, c, g, other or unknown
  misc_feature (816)..(816): "n" may be a, t, c, g, other or unknown
  misc_feature (824)..(824): "n" may be a, t, c, g, other or unknown
tttagaatgaatagcccttctgggttttctttttgacaattcttggacttgaggtaaaacaaggaggattgtggccggatttcagatcccaaagccagcctccatcttaggcctttgcctcattgtgccttttaggttttcttacccaccgtctcctgttttgtcttttttttcttttctcctacccctatcttgggacattcagaaactgcctgggtggtttgagaagagacaacccagtttgatctgcaatacaaggatccattcgtaatctctctctcactgatgttattcccccatctgccgtcttggttcatctcaccacagaagggcatttagtcctacccagccatcggctgcgtatgacagcaggatggcacttcccatttctctgtggttagtgctcgagtgaaaacctctttcagctgagtcctctgaggttctgctgttgagtcctgggtggctgatggaatgattgaggaggtctggtcaccctcaagcgccgtcatcgccttgtttccatgggcttctgtcacacaaaatgaagaacagaaatgttaggacttaagagaatgtttggaattcacacctctttgcagtcctttcaaggctgctgctctgtgctgtgtcccatgcatgtgaaagtagagctgtgatggctgctgggacgcttgcaaagatcatgtgtgagaattgagcacaagaccacaaantattactgcttgatgcgcttggtaaaactctatctgccaggaaacccaaattttcttttctttcctttttttttttgagacagggcccnccttgttgcccaancttgaatnca

SEQ ID NO: 195 - DNA, 737 bp, Homo sapiens
  misc_feature (343)..(343): "n" may be a, t, c, g, other or unknown
  misc_feature (581)..(581): "n" may be a, t, c, g, other or unknown
  misc_feature (722)..(722): "n" may be a, t, c, g, other or unknown
  misc_feature (730)..(730): "n" may be a, t, c, g, other or unknown
  misc_feature (736)..(736): "n" may be a, t, c, g, other or unknown
ttttacttcatgccaacatgagaaaagacaaatcacatttctttaggaaggaatcctaagtgcctagcaatttggacaggataaatggagtttgggagaagagttttgaagccaattgttacctaaaattgataaactcaataaacaagagggttgtgctagcccacagagatcttatggggattgactgagattataaattcatgagaaagtgatttttaacccacaaaaggctatacatatattagtatgttaggtacattcattacagttagcatacactaatcctgtctttaatttacaacttggccttctccattcaagaatttcttttttttctttntttttttttgctataatactattctttctttaaccagtagtttattgagaaaaactttaacatgtccaattttaaaaatattaaatactatggtaatgtgtcctagaatgtcctgtttgtcatctgtttctgtttactacctgctcagttccaacaggtatttaaatcagctagaacactgataaagcctattgcagctttctgagttacctgtagtgagtcaggacaggtagcaganagggaaggaataaatgtcacaaaaaatgactcattcaaaaccaattttggttttagctgcaggcagtgacataaatgcccagtgcttactactccagatttctggttccttcttttaactctgaagttgatggcttatagnctatagcnaaaacna

SEQ ID NO: 196 - DNA, 824 bp, Homo sapiens
  misc_feature (747)..(747): "n" may be a, t, c, g, other or unknown
  misc_feature (774)..(774): "n" may be a, t, c, g, other or unknown
  misc_feature (799)..(799): "n" may be a, t, c, g, other or unknown
cattaaaaagcccagctttcctccatgttagatgtgacttggaaaatgagaaagatttagcaaaattccaccgtatcttttgccaggctagagacagggagagcagggtaaaaccctcaggctgctgaaatttctaggctgttaggaagcccctcgaattctgtgaaaatgagggtttcttaactcacactgagagcggaaaggggcagacccttttcataactccctcaagtgtgtgttacctttctttaccagcatggtaagcaacaggacatatcccagcctcggacatgtctgtatgatccaaggtacccaaagtcagacagagtaaactcaagcctggcactggctttctgccgcttcatgtgctttggaaaaagcaggagaagcaatagcagcaggagtccccagcagctggagccgcaagaatgaaccgcaaagagggaactgacagcagctgcggctgcaggggcaacgacgagaagaagatgttgaagtgtgtggtggtgggggacggtgccgtggggaaaacctgcctgctgatgagctacgccaacgacgccttcccagaggaatacgtgcccactgtgtttgaccactatgcagttactgtgactgtgggaggcaagcaacacttgctcggactgtatgacaccgcgggacaggaggactacaaccagctgaggccactctcctaccccaacacggatgtgtttttgatctgcttctctggcgtaaccctgactnttacccaatgtccagattgatctccgngatgacccaaaaaaccttggcccgnttgctggattgaaaagagaaacctt

SEQ ID NO: 197 - DNA, 880 bp, Homo sapiens
  misc_feature (705)..(705): "n" may be a, t, c, g, other or unknown
  misc_feature (743)..(743): "n" may be a, t, c, g, other or unknown
  misc_feature (857)..(857): "n" may be a, t, c, g, other or unknown
  misc_feature (867)..(867): "n" may be a, t, c, g, other or unknown
  misc_feature (869)..(869): "n" may be a, t, c, g, other or unknown
agatatgacaggtaggctctttcaggctacagggagaagacactttagagaaaatgttagggagtaatagagtggctttttcgtttttttgcttctctgcttatagtattttgttttgggagggatgggatctggccttgattttgcagagacttcttgtgcccagcccgtagtatctacccaatcagacaaggagccaggaattactgcttctgctactgatactgataatgctaatggagaggaggtaccacatactcaagagatttcagtgtcttgggaaggtgaagctgcccctgagataaggacatctaagttaggccagccagatcctgcaccctctaagaagaaatccaatagactcaccttaagcaaaagaaagaaggaagctcaagatgagaaggtggagaaaactcaaggtggacatgagcacagacaggaagaccgactaaagaaaacagttcaggatcattctcagatcagggaccagcacaaaggagagataagtggttttggtcaatgtctggtctgggtccagtgttccttcccaaactgtgggaaatggaggcggctgtgtgggaacattgacccctcagttctcccagataattggtcctgtgatcagaacacagatgtgcagtataatcgctgtgatattcctgaggagacctggacagggcttgagagtgatgtggcctatgcctnctacattccaggatccatcatctgggccaagcaatacnggtacccctggtggccaggcatgatagaatctgatcctgacttaaggggaatattttctttttactttccatcttgattccctgccgctaagtaccatgtgaccgtttttgganaaacagtttntngtcatggatcc

SEQ ID NO: 198 - DNA, 874 bp, Homo sapiens
  misc_feature (791)..(791): "n" may be a, t, c, g, other or unknown
  misc_feature (855)..(855): "n" may be a, t, c, g, other or unknown
agagctcactctccaactttattaaatactatttgagcacaggacacattcttaaacattttgaaaaacattaacccaagatgtagaggctactgctagtcgtcattctagaatctgatattttactctgtatttgaaatgaatgattaatgtcctaggaaattagctttagcagatgtccaggtgccacatcaaaaaagtgcaataattattgacagttttttagattaggcatattattggaaaacaactttataaagagtgaacattgtatactctagtaaaacagcatcactttaaaaatattcatttatgaaatctgttacctatagttgaagtcttgagtagtgaacaagggactctaataccaatactcttaatatctggctattttagatcccttaaagggcataattattggaaatttaggtatttcactaaagcatgtatataatattgccaacaagaaaagtaaatctgaagattaagggaacttacttctgcaaactgtcttgcgatagttaagcagaatttaaactctgttttaagcaggaaaccagaaagattattttgcagttgtagaagatttcataacttattaaaacttattaacattttgtgttgtttagatataggcagttgatacatactaacatcccagccttttcaatatcagggttaaattataggaaaactcagtaaaatggtcaaatctgaaagtttgatggtagaaactgaagatttaacagagaactgtgttttacccgagtgccaaaaatgctgtgagcctncttgcacaaaatttataccactttgcatttttatctatcagtccagatggtggctcccttcttntccaggacctttcaccata

SEQ ID NO: 199 - DNA, 877 bp, Homo sapiens
  misc_feature (708)..(708): "n" may be a, t, c, g, other or unknown
  misc_feature (751)..(751): "n" may be a, t, c, g, other or unknown
  misc_feature (764)..(764): "n" may be a, t, c, g, other or unknown
  misc_feature (815)..(815): "n" may be a, t, c, g, other or unknown
  misc_feature (867)..(867): "n" may be a, t, c, g, other or unknown
  misc_feature (871)..(871): "n" may be a, t, c, g, other or unknown
gaagactgcgcgtttgagtgtccctggcaacgccacgcttccgccttctggaagcctgcactccagcttcgagtggaacgatgcctctggaggtggtggtggagctgcagatccgggcgatttcttgcccaggagtgttcctgcctggcaaacaagatgtgtacctcggggtctacctcatgaatcagtacctggagaccaacagctttccctctgcgttccccattatgattcaggagagcatgagatttgaaaaggtatttgaaagtgcagtagatcctggagctgtagtagaccttttggaaatgtgggatgagttggcctactacgaagaaaacacacgagattttcttttcccagagcccaagctgacaccttcgcaccctaggaggtgtagggaggtgctcatgaagacggctctgggttttccaggcattgctcccaaaatagagttttctacaaggacagccatcagagaatgtgtgtttctgcatagaaacagatttcttggctggggaaacaaagggaagatgttggttcagcaagaacacagaagcttaaagaagaaactgaacagaaatgggacccagacctctggagaagggctgctttcctggatgcttcttcaggaattcgaaggaagaaagacatgagtcacggaggcctttatctacatcacatgaaccaatatttcccttaaatactatnaagatgaaactaaaggagaataatctcaacagactggccaaangcatgcaagcccnggcgcccttttagtattctaccagcatttctttcaggaccagccagttcanttgaccttggaataattcaaaatcttggaggaagcaagcctcctttgtgtanaccntgaccc

SEQ ID NO: 200 - DNA, 840 bp, Homo sapiens
  misc_feature (720)..(720): "n" may be a, t, c, g, other or unknown
  misc_feature (813)..(813): "n" may be a, t, c, g, other or unknown
  misc_feature (816)..(816): "n" may be a, t, c, g, other or unknown
  misc_feature (836)..(836): "n" may be a, t, c, g, other or unknown
caaaaagaacaacctgtttgttgttgaccgatctgacaagttggggcgtgtgcaggagttcaatagtggccttctgcactggcagctcggcgggggtgacaccaccgagcacattcagactcactttgagagcaagatggaaattcctcctcgcaggcgcccacctccccccttaagctccgcaggtagaaagaaagagcaagaaggcaaaggcgactctgaagagcagcaagagaaaagcatcatagcaaccatcgatgacgtcctctctgctcggccaggggcattgcctgaagacgcaaaccctgggccccagaccgaaagcagtaagtttccctttggtatccagcaagccaaaagtcaccggaacatcaagctgctggaggacgagcccaggagccgagacgagactcctctgtgtaccatcgcgcactggcaggactcgctggctaagcgatgcatctgtgtgcccaatattgtccgtagcttgtcattcgtgcctggcaatgatgccgaaatgtccaaacatccaggcctggtgctgatcctggggaagctgattcttcttcaccacgagcatccagagagaaagcgagcaccgcagacctatgagaaagaggaggatgaggacaagggggtggcctgcagcaaagatgagtggtggtgggactgcctcgaggtcttgagggataacacgttggtcacgttggccaacatttncgggcagctagacttgtctgctttcacggaaagcatctgcttgccaattttggatggcttggttgcacttggatggtgtgcccgtctgcatangcncaagatccttttccactggnggga

SEQ ID NO: 201 - DNA, 674 bp, Homo sapiens
  misc_feature (599)..(599): "n" may be a, t, c, g, other or unknown
  misc_feature (607)..(607): "n" may be a, t, c, g, other or unknown
  misc_feature (632)..(632): "n" may be a, t, c, g, other or unknown
agtgctgagctgttttgacaacttggaccccgggtcctctgtgggtaggaaaatcagctccctctttgctcctctggggcagctgcacctcgggccagctttctgcctgtctgcctgccggcactgctgggtcgctgtacccaaacgcacagccggtgccccgtgctagaaggtcttcagtttccagaagaaccaaagcatctttggacctacctagggaaggacctgcctgtgacctttgccctgtcctggagggtccagctttgggctgaatggcagcacccacgctgggccgtctggtgctgacccacctgctggtggccctttttggcatgggctcctgggctgctgtgaacgggatctgggtggagctgcctgtggtggtaaaagaccttccagagggttggagcctcccctcatacctctctgtggttgtggcgctgggaaacctgggtctgctggtggtgaccctgtggaggcggctggccccgggcaagggcgagcaggtccccatccaggtggtacaggtgctgagtgtagtgggcacagccctgctggcccctctgtggcaccacgtggccccagtggcagggcagctncactctgnggccttctaactctggccttggtgntggcaatggcctgttgtacctctaatgtactttcctgccctt

SEQ ID NO: 202 - DNA, 691 bp, Homo sapiens
  misc_feature (646)..(646): "n" may be a, t, c, g, other or unknown
  misc_feature (672)..(672): "n" may be a, t, c, g, other or unknown
  misc_feature (678)..(678): "n" may be a, t, c, g, other or unknown
taattttcttagtaaaaagaataacagaatgcatcgtggcaatccttaagcaacattatctatgtggactgcttaaatcagcaaaacaccagaagtttggttaacttgggcaatatgacaagtattactttttgggcaaaactactcattaagcaatttctctagtgtgtcggacacaaataggttctttatttttggcatgtatgcctttttattttcattcaattttttttttttctcagacagacatagtagtaacgactagcattggaaaatacatatcactattcttggaatatttatggtcagtctactttttagtagaatatttttggatagcgttgacacgatagatcttattccatacttctttattattgataattttattttcattttttgctttcattattatacatattttggtggagaagaggttgggcttttttgaaagagacaaaaatttattataacactaaacactccttttttgacatattaaagcctttattccatctctcaagatatattataaaatttatttttttaatttaagatttctgaattattttatcttaaattgtgattttaagcgagctattatggtacggaactttttttaatgaggaatttcatgatgatttangaattttctctcttggaaaaggcttnccctgngatgaaaatgatg

SEQ ID NO: 203 - DNA, 714 bp, Homo sapiens
  misc_feature (691)..(691): "n" may be a, t, c, g, other or unknown
  misc_feature (696)..(696): "n" may be a, t, c, g, other or unknown
  misc_feature (712)..(712): "n" may be a, t, c, g, other or unknown
gttttcatttctaaatgctaatcctttttctttcttcctgtctatgagtaggaactctctctccatccctgtagaatctcttggacatgtttatctcatgcttatggggtccccatttcttggagtgggattgacattggtggattctgcttcagtgtatccttcttgcggtcttatttgcatgcatgagtcaactgtgtgcatcccattgtgctttccccaggccagtctctcatgcccattccatttcccctgccctataggcctcctttcatgtactctgcccaacggttttgggggacaatctgggccagaaggggagcgcagcttggcaccccctgatgccagcatcctcatcagcaatgtgtgcagcatcggggaccatgtggcccaggagctttttcagggctcagatttgggcatggcagaagaggcagagaggcctggggagaaagccggccagcacagccccctgcgagaggagcatgtgacctgcgtacagagcatcttggacgaattccttcaaacgtatggcagcctcatacccctcagcactgatgaggtagtagagaagctggaggacattttccagcaggagttttccaccccttccaggtgaggcttgaaagccctccttgaaagaagggctggggccttggggatgtggagagaatactgctgccttttcttncatanggctgtagttgggganga

SEQ ID NO: 204 - DNA, 724 bp, Homo sapiens
  misc_feature (678)..(678): "n" may be a, t, c, g, other or unknown
  misc_feature (691)..(691): "n" may be a, t, c, g, other or unknown
  misc_feature (702)..(702): "n" may be a, t, c, g, other or unknown
ataggcgaccctaatgggttttgtgagatgtcgtattaagtctgtggtccatagagtaatgcccttcgctgtcagggaatgcaagggaagagcagggaattccagaatgggaaggtgtgtgaatgtagaccttcaggttggtcacaaacagtgtctcgagattccactggggaagcgttcacttttagaatcaggccaagctgagggttctctgtcctcaggtattttcctttgtagcagtcactggctcgaaatggagaatgagagaaaaaggagcttgtttcaggccagagacctcactaaccgaataacaacactaaggccctgcagcagggggcacaaactacccagcctgtttccgtgtggcctatgatggtttttttgtttgtttgtttacattttttaatggttggaaaaaatcaaaagaggcatatctacctatttcataacatgataattataggaaattcaaatgtgggtgactataaagctttattggaacacaggcacgcccattcgttcctgtattgtctatcactgcttttgtgctgcgatgacagaggctgcatgtggcctgcaaagccccaaatttttatcatccagccctttacagaaagagtttgctggtccctctcataaagtatccttttttttaaatgtgacagagtctagctctgntgcccagctggantgcatggcgcnatctcgcttactgaaacctctg

SEQ ID NO: 205 - DNA, 853 bp, Homo sapiens
  misc_feature (681)..(681): "n" may be a, t, c, g, other or unknown
  misc_feature (801)..(801): "n" may be a, t, c, g, other or unknown
  misc_feature (812)..(812): "n" may be a, t, c, g, other or unknown
  misc_feature (840)..(840): "n" may be a, t, c, g, other or unknown
aggatttcttcctggtgcagaagctggtgagctgggctctgtttcagggcaaatgagggccaggagctgcctgtgtgactttggggctccctctgccagtgaccaatccctcttaaaaagcagtcaggtcaatgctactgagtagcctcagagagaatttcctaaacaatacaagaaagagaaagataggtctcttttcccttttggttctaagcatcctttcctcacttcagggtagggtggccaagctctggggtctcaatccagaaggaggcctaagtgggcatcagacttaaaataggcaggaggaagatgcggaggagggtggcaagtagaggtgagccattccccagaggaagatgcagggggagggcaccctggggtgaaggccactgagagccagcaagtgcctgcggagctgacctgggggcctctgcccacttcctttgacccagagttgccttccagtaactcagctgttcaagcccacattccctagatttatcttgtcctctctccatattcttctggaaaagcagatgctctgctaatccaaggaattgcatctttccagccctgtctcacaaaatctgggctgtggggagagagaattgtgtggactgccaagggaaaagagtttttaaaaagagcatgccctttcctcttgggattgtagattgnattgggaacagccctggggactagacaaagtgctgatgatgaattccctacaaggccctgttgtgaagaagtcctttgctgggtttaataacacctattccctgattgggcaatcttgcnggaagtccacncccgtgaaattacggagcgcccctaagnctaatgaaatgac

SEQ ID NO: 206 - DNA, 861 bp, Homo sapiens
  misc_feature (811)..(811): "n" may be a, t, c, g, other or unknown
  misc_feature (857)..(857): "n" may be a, t, c, g, other or unknown
gaggtcagaagataaccagaaaaataccattacaagcaaagaaaattacagaccaatatccatcataaatgtgcaaaaattataaactaaattttagccaaatttaatgatttatacacatacatgcttacacacatggacacacacacgtatcctttacatgcaggtataaagaataatattaatacataatgaccaagtgtgtatcccaggttggttaacattcagaaattggtcaatctaattcactacattaataaactgaaaaaaatcacatgattatctcaatagatacagaagaagcacttaacaaagtccattatttattcctagtaaaaattatcagtaaaataagaacagttgagattttcctcaaactgataagaggaatccatgaaaacctacagctgtcatacttaatggtgaaacagtgaatgctttgtgcctacgatcaggtacaaatcaaagatgtcttcattcatgtcttctttcaccattgtacttgaaaaagaataaaagacatccagagtggaaaggaagaagtgcaactatcttaattcatggacaacatgaccattgtagaaaatctgatagaatctacaaaaaaagctattagaactagtaaacatcaaaaaatttaaaatacatagggataaatctggtataaagatgtgaaagacctgtgtgctaaacactgcaaagcattccagagagaaattaaagaggcctaataaatggagaacacttttgtcatggttggaagatcctattcagattcagtctcctaattatcttcatctataattagcanttcaaaatgactgcaaccgtcaatcttgatcagactgctcttgaangttt

SEQ ID NO: 207 - DNA, 723 bp, Homo sapiens
  misc_feature (573)..(573): "n" may be a, t, c, g, other or unknown
  misc_feature (634)..(634): "n" may be a, t, c, g, other or unknown
  misc_feature (685)..(685): "n" may be a, t, c, g, other or unknown
  misc_feature (715)..(715): "n" may be a, t, c, g, other or unknown
acagcggggcgtcacctcggacatacgaacagcgggcggtgttcccggctccgtggggccgtcttcccggcgagtccgcgacggtcgccgcccacggcgagatgaaatctcgctctgtcgcccaggctggaatgcagtggcgtgatctcggatcactgcagcctctgcctcccgggttcgggcgattctcctgcctcggcctcctgagtagctgggattacaggtgcgtgccaccacgcacggctaatttttgtatttttagttgagacggggtttcaccatgttggtcaggctgttcttgaactcctgacctcgtgatccgcccgcctcggcctcccagagtgctgggatttacaggcatgagccaccgcgcccggcctgttttttttttgttggtttgtttttgagacggagtctcgctctgtcgcccagcctggagtgcagtggcgccatctccgctcactgcaagctccgcctcccgggttcacgccattttcctgccgcagcctcccgtgtggctgggactacaggcgcccgccggcacgcccgtcaaatttttttttttttttttgnattttttggtagtgacgggtttaccatgttggccaggatggtctcgatctcctgacctcgngatccgccgctttgtctccaaagagctgggattacaggcgtgagacaccgngccctgtccggcctggtattatcatatgantgatatct

SEQ ID NO: 208 - DNA, 833 bp, Homo sapiens
  misc_feature (637)..(637): "n" may be a, t, c, g, other or unknown
  misc_feature (680)..(680): "n" may be a, t, c, g, other or unknown
  misc_feature (736)..(736): "n" may be a, t, c, g, other or unknown
  misc_feature (791)..(791): "n" may be a, t, c, g, other or unknown
  misc_feature (825)..(825): "n" may be a, t, c, g, other or unknown
ttttaaggagatgcctacatagaagagtgacagcagctagactaaatgtttaactgctgaactagttcctcaggtatcctggctctagagattgctatgggagattggatgactgttacagatccaggtctgtcttcagaaagcaaaactatctctcaatatacctcagaaacaaagatgtctccatcaagtttatactcacagcaagtgctatgttcttcaatacctttatcgaaaaatgtgcacagttttttcagtgccttctgcacagaagataatattgaacagagtatctcatatcttgatcaggtaacatgtttttgtaaaaaacagtagcataaatcatgttatataatagaatgtatcaaaattatgagaaaaacatttgtcaaacacaagtttgttgtttatgtagtgcccctgagacttagattttcagagaaccttggtgattatctcatctagagatagcaagtctaacttttttgtgtggagcaccttggcctcctcattgtcccaggggctcctccactgagagtccagccatcactttatggatgcagaaacccaagtgccttgctccatgtcacagatttatagcagagactaaaagagccccgtcctcttaactctttgncctttgggatattgaccattttcttaactatttcaaggatagntttctatttttctaaggaaagatttctatcttttgattttttttttactaagttgnccagtaaccaccttttaaaataatcacatttatttttaatttttgacaaaatttntatatttggcatgtcacataaggtcatatcacantgggaatg

SEQ ID NO: 209 - DNA, 756 bp, Homo sapiens
  misc_feature (689)..(689): "n" may be a, t, c, g, other or unknown
  misc_feature (735)..(735): "n" may be a, t, c, g, other or unknown
  misc_feature (737)..(737): "n" may be a, t, c, g, other or unknown
agatgcggtggtggccgccgagcgcctggaaggagctgctggacaggccgagggagcctccgcccgagaccgcgcagccgccgccgccatggctacaaaagaccccacagctgtagagagagcaaacttgttaaacatggctaaactgagtatcaaaggactcattgaatctgctctgagctttggccgcactttggattctgactatccccccttgcagcaattctttgttgttatggaacattgcctgaaacacggtcttaaagtaagaaaatcatttttgagttacaacaaaaccatctggggccctttggaactggtggagaagctgtaccccgaagcagaggaaataggagctagtgtccgggatctacctggtctgaagacccctctgggtcgagcaagagcgtggcttcgattagccctcatgcagaaaaaaatggccgattacttacgttgcttaattattcagagggatctcttgagtgagttttatgagtatcacgcactaatgatggaagaagaaggagcagtaattgttgggctgctggttggcctgaatgtgatcgatgctaatctgtgtgtgaagggagaggatttagactcacgagttggagtgattgatttttctatgtatttaaagaatgaagaagatattggaaataaagaaaggtatgattttcataagntatttcacatattggggttttttatatagctctttacaaatcattntnggatccatctatttacaag

SEQ ID NO: 210 - DNA, 692 bp, Homo sapiens
  misc_feature (646)..(646): "n" may be a, t, c, g, other or unknown
  misc_feature (670)..(670): "n" may be a, t, c, g, other or unknown
  misc_feature (672)..(672): "n" may be a, t, c, g, other or unknown
caaagaagcggagaaagagctaccggagcttcttacctgagaagagtggctaccctgacatcggcttccccctcttcccactttccaagggtttcatcaagagcatccggggtgtcctgacgcagttccgggctgccctgctagaggcaggcatgccggaatgcacagaggacaagtagctgccaggcacagaggaaagagcatcaccgtgggagaggccagccgccgcctgctcactcccccccggaatcacccctcttcccatgcccctctgtccccactgcaaacccactgccctcttctccccaaggtgagttcgatgctgaagtgcaagaagtgtgttgagatgctgccgtttctattttgaagcgagctttcaacaggcgggtcccctgtggcaaagaaaatcggaaccctgttgccgattttccatttgtcaccccagcagaatgtccggcacttgctcccttgctgccccttctcaggtcagaggcgggtgttccagggcctgccgcggggctctctgggccggttccctgcagacccgcaggagagcacatgtgccttgcatgaagtgtgggttgcgccaacaattccctggtccctttcaacctgtttagttcaacttaagccttcctgtgtccanaccctctgctgcaccaccacccangnccttcctagtccttcagcgt

SEQ ID NO: 211 - DNA, 815 bp, Homo sapiens
  misc_feature (632)..(632): "n" may be a, t, c, g, other or unknown
  misc_feature (741)..(741): "n" may be a, t, c, g, other or unknown
  misc_feature (799)..(799): "n" may be a, t, c, g, other or unknown
  misc_feature (812)..(812): "n" may be a, t, c, g, other or unknown
tctaaaattctcgctaccagcacagcagtctgaagtcaaactaggaggatcaagcttggtgtggggaagggcgtctgccattactgaggcttgttttcccctgacagcgctaaaaaggcctggaagttcggactgggtggagctcaacacagtgtggcaaagtggctgcagccagactgcctctctagattcctcttcactgggaagggcatctctgaaagaaaggcaccagccccagtcaaggggttatagataaaactcccatctcactggaccagcgtatctgggggaaggggcggctgtgggcacaacttcagcggactttaaacgttcctgcctgctgactctgaagagagcagcagatcctgacaaggagggctctcccagcacagcgcttgagctctgctaagggacagactgcctcctcaactgggtccctgacctccatacctcctgatggggagagacctcccaacagcgattgtcagacacctcatgcaggagagctctggctggcatcagcctggtgcccctctgggacaaagcttccagaagaaggagcaacagcaatctttgctgttctgcagcctacactagtaatacccaggcacataaggtctggaatggacctncagcaaactgcagcagacctgcagaagacggcatgactggtagaagaaaaagtacaaacagaaagcagtacatcatcaacataaggaacccccatacagaaacaccatncaaagatcaaaggtaggtaaatccataaagatgaggaccaaacagccaaaaaccctgnaaatttccaaaancca

SEQ ID NO: 212 - DNA, 808 bp, Homo sapiens
  misc_feature (721)..(721): "n" may be a, t, c, g, other or unknown
  misc_feature (743)..(743): "n" may be a, t, c, g, other or unknown
  misc_feature (765)..(765): "n" may be a, t, c, g, other or unknown
ttttaaatatgtggggagatacataaagaacattgcttatttgttcttgaaaataacagtgattcaaatatttcattcagatttacctatgcctaatgaaaaaaatgatgcagaacttgattctccaccttcaaagaaaaaaagattaggttttttccagacttatgatacagaatatttaaaagttggttttattatctgtcctggatcaaaagaaagttcaccaaggccacagtgtgtcatttgtggagagatcttatccagtgaaaacatgaagccagcaaatctttctcatcatttgaagacaaaacattcagaattagaaaacaaaccagtagatttttttgaacaaaaatctttagaaatggaatgtcaaaatagttctttaaaaaagtgtttactagttgaaaagtcacttgtgaaagcttcttatttaattgctttccaaactgctgcaagcaagaagccattctccattgctgaagaattaattaaaccatatttagtagaaatgtgttcagaagttttgggttcaagtgctggagacaaaatgaaaactattccactttctaatgttacaattcaacacaggattgatgaactatctgcagacattgaagaccagctgattcaaaaggtcagagagtcaaagtggtttgcccttcagatagatgagtcatcagaaatctcaaatatcacacttcttttgggctatattcgnttcattgattatgattggccgngatgtaaaagaagaattattantttgcattgaaatgcctacttcaaatactgggctttggaaaaa

SEQ ID NO: 213 - DNA, 703 bp, Homo sapiens
  misc_feature (651)..(651): "n" may be a, t, c, g, other or unknown
  misc_feature (680)..(680): "n" may be a, t, c, g, other or unknown
  misc_feature (692)..(692): "n" may be a, t, c, g, other or unknown
gttaagaagcttcctgcagggggtgagaaattggactcaatgtcctcctgaaaagttcagctacagaaaggctgggtccctttggtacactcctcaccttgatccttagcaccgttgttaagtatactgattaatccaatcagtaagggcctgcggagtgagctgggctctggagtagatgtgattcaagacagaaaagcaggagggtacgccactcagatctcaaggcacttaggatccagttaaaggtactattaagacattatcagctgaagagtcagactgacctaagtttaaatctgggctgagccacaactagaccaggctttctcaacttcggcacccctgacttttttttgtgtgtgtgaaatggagtctcatctgtctcccaggctggagtgcagtggtgtgatctcggctcactgcaagctctgcctcccaggtttatgccattctcctgccttagcctcctgagtaactgggacaataggcgtccgccaccacgcctggctaattttttgtatttttagtagagatgggatttcaccgtgttaaccagggtggtctcgatatcctgacctcatgatccgccgcctcggcctcccaaagtgttgggattacaggcgtgagcctctgtgccagcctttttgnattttttttttttggagacagggtctggntctattgcccangctggaatgca

SEQ ID NO: 214 - DNA, 758 bp, Homo sapiens
  misc_feature (708)..(708): "n" may be a, t, c, g, other or unknown
  misc_feature (720)..(720): "n" may be a, t, c, g, other or unknown
  misc_feature (736)..(736): "n" may be a, t, c, g, other or unknown
ttctagtaatgtaggaacacttccatctaagccgccatttcgatttggtcaaccttctctttttggacaaaacagtaccttatctgggaagagctcgggattttcacaggtatccagctttccagcgtcttctggagtaagtcattcctcttcagtgcaaacattagggttcacccaaacctcaagtgttggacccttttctggacttgagcacacttccacctttgtggctacctctgggccttcaagttcatctgtgctgggaaacacaggatttagttttaaatcacccaccagtgttggggctttcccaagcacttctgcttttggacaagaagctggagaaatagtgaactctggttttgggaaaacagaattcagctttaaacctctggaaaatgcagtgttcaaaccaatactgggggctgaatctgagccagagaaaacccagagccaaattgcttctgggttttttacattttcccacccaattagtagtgcacctggaggcctggcccctttctcttttcctcaagtaacaagtagttcagctaccacttcaaattttaccttttcaaaacctgttagtagtagtaattcattatctgcctttacccctgctttgtcaaaccaaaatgtagaggaagagaagagaggacctaagtcaatatttggaagttctaataatagcttcagtagcttccctgnatcatctgcggntttgggcgaacctttncaggctagcaaagcaggtgtca

SEQ ID NO: 215 - DNA, 910 bp, Homo sapiens
  misc_feature (828)..(828): "n" may be a, t, c, g, other or unknown
  misc_feature (850)..(850): "n" may be a, t, c, g, other or unknown
  misc_feature (853)..(853): "n" may be a, t, c, g, other or unknown
accaaactgctgttctggaatatgctcgcattgaaaactagaactgccaccctatttaatactacatctgccaactgcccttcaaatttaggttagatgtcatttgtgattatcagagcctttgatctctcatttctattaagaaacctgaaagacatctaatcatttaaatacattcttcctagattgctggaacttacggtagttataaatcctttcaaatgtctgataccaagagcaactaactcttacccttaaaactaaaaaggaggtctttttagaagggaaaaaatgaaggcaaggagcagaaaagacctcagggtcactatatacacaacatggaagaaccagggattagcgccaaagttggctttgtactgtgtcctttatctctttctaccagacccaacgcagctggctgacatttgacaaacaaaatgctgcctctttatttctctgcctttggcatatttctgattttctattatcctctcctccattaggacattgtagttcagcttgactttagattagaaacagacttgtacaggtatagtatacttatgagggcctgagaagaataatgtctgagaatcattcattcacttaactcatgtttattaaatttgtctgctatgtgccaggcatcattctaggtgctgagaatacagtagtgagtccccaaagtccccagcttctaggaaaggagaaagacaacgaacgataacaaatagacatgtaaatacctggcaatgctaagtgctttgcagacaaatattgcaaatggagggagggtgatatttagttagggagttgaaccttctctgnagagatgccttagagcaaagancangatggaccgagggaccaacctgggaattttgggcttcctttttaactggccctaaag

SEQ ID NO: 216 - DNA, 457 bp, Homo sapiens
  misc_feature (455)..(457): "n" may be a, t, c, g, other or unknown
aaggaaatgcagattaaaacccatttctcacccatcagattgtcaggggcctaagagtttagtaacaaactctgtgatggggctataaggaaatggtgatacttagatatttctggcaggagattaaattgttataatccgggtgggcatggtggcttatgcctgtaatcccagcactttgggaggccgaagtgtgcagatcacctgaggtcatgagttcgagaccagcctggccaacatggtgaaactctatctctactaaaaatacaaaaattagacaggcgtggtggtgcactcctctaatcccagctactcgggaggctgagacagaagaatcgcttgaacctgggagatgaaggttgcagtgagctgagatcattccactgcactccagcctgggcgacagcgagactctgtctcaaaaaaaaaaggacaaaggaaaggaggggggaggnnn

SEQ ID NO: 217 - DNA, 813 bp, Homo sapiens
  misc_feature (683)..(683): "n" may be a, t, c, g, other or unknown
  misc_feature (739)..(739): "n" may be a, t, c, g, other or unknown
  misc_feature (761)..(761): "n" may be a, t, c, g, other or unknown
  misc_feature (792)..(792): "n" may be a, t, c, g, other or unknown
taattaattaattaaaaaaaaaggccaggcacagtggctcacgcctgtaatcccagcactttggcaggccaaggcaggcggatcacaaggtcaggagatcgagaccatcctgactaacacagtgaaaccccgtctctactaaaaatacaaaaaaattagccaggcgtggtggcgtgcgtctgtagttccagctgctggggaggctgaggcaggagaatggcgtgaacccgggaggcggagcttgcagtgagccgagatcgcaccactgcactccagcctggtcgacagagcaagactgcatctcaaaaaagaaaaaaaggagaaaaggaggcgggctgcattgaccctgtcagagagcttgcagccattgaggctgcccaatccttgggtgctcttgtgtgggtgtggacacaaggaccccacccagcgcacagccctctgacctctgctcacttgccccagtgtccccagttgtcctcatccagggtgctattcgagtccagcctgaagggccggctccctctctaccacggcctgagaggaagagcatcgttcccgctcctatgcctggaaactcctgcccgcctgaagtggatgcaaagctgctgaagcggcagcagcgaatgatcaagaaccgggagtcagcctgccagtcccggagaaagaagaaagagtatctgcanggactggaagctcggcttgcaagcagtactggctgacaaccagcagcttcgccganagaatgctgccttcgcggcggntggaggcctgctgctgaaaacacgagctaanttagggtctggaaacaggaag

SEQ ID NO: 218 - DNA, 812 bp, Homo sapiens
  misc_feature (748)..(748): "n" may be a, t, c, g, other or unknown
  misc_feature (791)..(791): "n" may be a, t, c, g, other or unknown
  misc_feature (799)..(799): "n" may be a, t, c, g, other or unknown
aaattagaactcaagattaaaaagcccactcaaaaccacacaactacatggaaattgagcaatctgctcctgaatgaatgactcctgggtaaataatgacattaaggcagaaatcaagaagttctttgaaatcaatgagaacaaagaaacaatgtatcagaacctctgggatgcaggtaaagcagtgttaagaaggaaatttatagcactaaatacccacataaaaaatctagaaagatctcgaattgacaccctaacatcacaactaaaagaactagagaatgaagagcaaacaaatcccagagctagcagaagacaagaagtaactaagctcagagtggaactgaaggagataagagtcatgaaaaacccttccaaaaaaatcaatgcatcccgtagctgttttttttttaaaatcaatgaaatagaccaccagcgagactaataaagaagaaaagagagaagatttcaaataaacaccatcagaaacgataaaggggataccactactgacgccacagaaatacaaccaaccatcagataataccataagcacctctatgcaaataaactggaaaatctagaagaatggataaattcctgcactcataaacaccctacaaagactgaaccaggaagaagttgaatccctgaatagaccaatacaagtcctgaaattgagcagtaataaatggcctccaatcaaaaaaagcccagctccgatggatttacagctgattcaccagangcacaagaggcctggaccatttgaacgattccaacattaaaangagagtantcctaccattatg

SEQ ID NO: 219 - DNA, 769 bp, Homo sapiens
  misc_feature (688)..(688): "n" may be a, t, c, g, other or unknown
  misc_feature (764)..(764): "n" may be a, t, c, g, other or unknown
  misc_feature (766)..(766): "n" may be a, t, c, g, other or unknown
gtatgttttcttgtaagggctttatagttttagctcttatatttggtttttggtctattttgagttaatttttgaatatggagcaaagtaaagcttttgaaaactaacagatgtgcaaaattatttttaatttttgaatatggagcaaagtaaaacttttgaaaactaatagagatttgcaaaattattttctttctgattttaaatgcttttaaattagataaattatatatagttcaatgttatttcttcattgatatattactagaaatgaatgtctggcaaagcataagcaataacatctcataagaagaggaggaatactgactaatactgtatagtaatacaaagttttgaggggcaaagagatattctcttgttttaaataaaagttacccagagtcattggatactctcttttctcttatgcattgattttggccttagcaaatatggtaaatttcttaaagtgtgaatactcttgaactaaagtaataattatcaacttagtaagagttttgttaagtggtgaaacttttcttcctcaatattaattactaattcctgaatgataactaaatatttcaattagtagttcctagcaaaggtagaattacaacacagtttgggaaatgctaagtagagagtcccacagtctggatctgatgataccgattatgtaactcantcatttacccctgagtatggattggcataacttgatcatgatagatggcattttttttattgggggagaataaatntnaaa

SEQ ID NO: 220 - DNA, 695 bp, Homo sapiens
  misc_feature (669)..(669): "n" may be a, t, c, g, other or unknown
  misc_feature (682)..(682): "n" may be a, t, c, g, other or unknown
  misc_feature (692)..(692): "n" may be a, t, c, g, other or unknown
taaaggactgtatctttggtacactggagaaccaaatgatgcccttcgacattttaataaagctcggaaagatcgtgactggggccaaaatgccctttataatatgatagagatctgtttgaatccagataatgaaactgttggaggtgaagtatttgaaaacctggatggagacctgggtaattcaactgagaagcaagaatctgtgcaactggcagtaagaacagcagaaaaacttcttaaggaactaaaacctcagactgttcagggtcacgtacagcttcgcataatggaaaactattgcttaatggctaccaaacagaaatctaatgttgaacaagcattaaataccttcactgaaatagcagcatctgagaaggagcatatcccagcgctcttgggaatggcaacggcttatatgatcttgaaacagactccacgagccagaaaccagctgaagcgtattgcgaaaatggattggaatgctattgatgctgaagagtttgagaagagttggctgctacttgctgatatttacattcaatcagcaaaatatgacatggcagaagacctgttaaaacggtgcctgcgtcataatagatcttgctgcaaagcttatgaatatatgggatacattatggaaaaagagcaagcatattcagatgctgncttgaactatganatggcatggnaat

SEQ ID NO: 221 - DNA, 706 bp, Homo sapiens
  misc_feature (646)..(646): "n" may be a, t, c, g, other or unknown
  misc_feature (657)..(657): "n" may be a, t, c, g, other or unknown
  misc_feature (664)..(664): "n" may be a, t, c, g, other or unknown
aacaaagggccgcgggcggcgggcagtggtgtcccagtctcccggtgcttccctgaggctgaggcgcccggcctcccgcccgccgcgctccagatgaagtgtgagcactgcacgcgcaaggaatgtagtaagaaaacaaaaactgatgaccaagagaatgtgtcagccgatgcaccgagtccagcccaggaaaatggagagaagggagaattccacaagttggctgatgccaagatatttttgagcgactgcctggcatgtgacagctgtatgactgcagaggaaggagtccaactttcccagcaaaatgccaaggacttcttccgcgttctgaaccttaacaagaaatgtgatacctcaaagcacaaagtgctggtagtgtctgtgtgtcctcaatctttgccttattttgctgctaaattcaacctcagtgtaactgatgcatccagaagactctgtggtttcctcaaaagtcttggggtgcactatgtatttgatacgacgatagctgcggattttagtatcctggagagtcaaaaagaattcgtgcgtcgctatcgccagcacagtgaggaggaacgcaccctgccatgctgacctctgctgtcctggctgggtccgatacgccgagcgggtgctgggtcgncccatcactgnccacctntgcaccggcaagtcccccacaggtcatgggctctttggtgaa

SEQ ID NO: 222 - DNA, 817 bp, Homo sapiens
  misc_feature (692)..(692): "n" may be a, t, c, g, other or unknown
  misc_feature (738)..(738): "n" may be a, t, c, g, other or unknown
  misc_feature (781)..(781): "n" may be a, t, c, g, other or unknown
  misc_feature (807)..(807): "n" may be a, t, c, g, other or unknown
tgtttagtatgaaaagtatgttttcattttgcagatccttttctctctgctccataaaatgttatataaaacattctctttatttctgttaattttgatagtatgctactgtactaaagctgaacaatataagtattgtcccttctgtttatagacatgtataggacaccttcagcaggcaaggccttatcctagggccaggaatgtgaagatgaatgagctaaccaagccccacctcgctgcccacaatggggccaccgctcactactaagtctaagccctcagagatttgccttggtattaagaaatgcatcagaggcatgcctaacttgaaccaaagcaagcatctgttcttatttaaacctagtaattgtttctttacaaattgtggagaaacttaggacaaatgaacctcaaactagatggtttggagcaaatagcatggaagtaatttgaagaccatattctcttcattgtcacattgacattcaccctgtaaaatcatgatactcttttctgccatagaaccatttcttaaattcgcatttcatgattgtaaggtggtggtctcactgacacttgtcatggtgggttggtggagaggaccgggggtgggaatcacggcagacccagtctgtctgcaacagcggagcctttggagggtgctcaaggaaacactggtagaaatgganggaccaactgaaggaaaattttgaattcaaaattgaagagtttggntctgggttcccataatatgcttgataggagaagcaacctttgnaactggctgggaaatcggaatacatnttggaggtct

SEQ ID NO: 223 - DNA, 747 bp, Homo sapiens
  misc_feature (216)..(216): "n" may be a, t, c, g, other or unknown
  misc_feature (421)..(422): "n" may be a, t, c, g, other or unknown
  misc_feature (456)..(456): "n" may be a, t, c, g, other or unknown
  misc_feature (558)..(558): "n" may be a, t, c, g, other or unknown
  misc_feature (561)..(561): "n" may be a, t, c, g, other or unknown
  misc_feature (686)..(686): "n" may be a, t, c, g, other or unknown
  misc_feature (715)..(715): "n" may be a, t, c, g, other or unknown
  misc_feature (747)..(747): "n" may be a, t, c, g, other or unknown
attgattcatttaatctgcatgttggcggtgtgaatagtagaaaactcacagttgaaaatgcctcttgtcagccacggagcgcacaggcatttgtgtgcgtaaccccgggtagcgttcatgtgcacctaaagtgtgacgacagcctatgggaaaccaagggaagggtcacctgtagaggtccggacattcggttttgcctttaagacaactattanatcctaagcgactgtgttgtggctgagttaaaaatgtgcctgtttacttgcagagcttcttccattaggtgaacaatctgttgtgattttaatgtgtaagacctttggtaatgtgaggaattgattagatagtgcagcccagtctctagaggatcagatctgtgggattggttggggtggttgggcaaagtccatggtgagttannaaatgactttggaagtgactctaatgtgtacacnaacaacacacaagcacacaccacacatacatacacacacgaacacatacctccatgctgcatatacacacacaggcatacacacactctaatgtgtacacanacncacatgcacataccacacatacacacacacacatgaacacatacctccatgccacacagacacacacaggcatacacatactctaatgtgtcacaacacacatgcacacaccacacacgaactcncacattcatgccacatatacacacacggncatacacacatgcaggcacatacactacacan

SEQ ID NO: 224 - DNA, 857 bp, Homo sapiens
  misc_feature (669)..(669): "n" may be a, t, c, g, other or unknown
  misc_feature (767)..(767): "n" may be a, t, c, g, other or unknown
  misc_feature (804)..(804): "n" may be a, t, c, g, other or unknown
  misc_feature (842)..(842): "n" may be a, t, c, g, other or unknown
tccaatattgactgggatgattgttgcacatatctgaatgtatcaaaaatgattagcttcaactaaatgggttaattatatactatgtaaattatatataaataaatttgtataaaaatataaatgaaactattgcctgcaagtagttccagaaagaagttgacacatttcaagaataacaaatgttattaaacatgtgaaattgatgaatgagaaaatatactatttccatactcttccttaaagatgtatcagtccctaatgtatattcctattatggtgatattatttatgctcagtcaatcattaacatatgcttatgaaaatcttattttacttaaagaggaatactttaaataaattttattcaattgccttagaatttaggcctactcctagacaggaagaaagatttccaagaattcacaatcttctaaaaccattacctatatttattatttatgctcttacataaccctcagtagcacattatttttcttgtacaattgatcagatattatttgaaattaaagtgtctgtccctttcagtcagcgtgtttctaaaatatgacaactaatgaaatcgcatagtaaatgctacaaactaaaggctataataagttgtaacactttttcagaatcacaataaaatttttctggatatgctgntgtgtaaggaattcctcagtgatatgtgcatttgaacttcagctaatatttctattctctctgagtttgggaagttatttgaattcccctacttctanggtttttatttatacccttaatattcatggtttttgncctttctaaggtatattttaaccgatttattcactcantggtggggttctatt

SEQ ID NO: 225 - DNA, 635 bp, Homo sapiens
  misc_feature (132)..(132): "n" may be a, t, c, g, other or unknown
  misc_feature (135)..(135): "n" may be a, t, c, g, other or unknown
  misc_feature (175)..(175): "n" may be a, t, c, g, other or unknown
  misc_feature (241)..(241): "n" may be a, t, c, g, other or unknown
  misc_feature (259)..(259): "n" may be a, t, c, g, other or unknown
  misc_feature (291)..(291): "n" may be a, t, c, g, other or unknown
  misc_feature (420)..(420): "n" may be a, t, c, g, other or unknown
  misc_feature (498)..(498): "n" may be a, t, c, g, other or unknown
  misc_feature (578)..(578): "n" may be a, t, c, g, other or unknown
  misc_feature (610)..(610): "n" may be a, t, c, g, other or unknown
  misc_feature (626)..(626): "n" may be a, t, c, g, other or unknown
gggaccccaggcttcctctgagacatccaccagcggtgatgggttgggaccaatctcccccactcctctccaccctagcagtctgctaccgctgccacggccccccctgctgccccggctggggagggtggnccncctgcaccccctccaaacctcaccagtaacaggagactgnagcagacccaggcccaggtggatgaggtggtggacatcatgagggtgaacgtggacaaggtcctgnagcgagaccagaagctgncggagctggacgaccgtgcagatgcactccangcgggggccttccagtttgaaacaagcgcagccaagctcaagcgcaaatactggtggaaaaacctcaagatgatgatcatcttgggagtgatttgcgccatcatcctcatcatcatcataggtgagtanggtgagaatggccggggccctttccctggagaggtttccccagtggattctaggttttgaaggtcattaatctagttnttactcttcagccaaaaacacatatagctgctaatggcaattctgattcatctagagccaaaaactttgatgttatttancctgcattttgcctagttcttggcagtcttgntaacatttggaaatangaaagctgg

SEQ ID NO: 226 - DNA, 698 bp, Homo sapiens
  misc_feature (616)..(616): "n" may be a, t, c, g, other or unknown
  misc_feature (628)..(628): "n" may be a, t, c, g, other or unknown
  misc_feature (633)..(633): "n" may be a, t, c, g, other or unknown
atccaaatgcattagtcttagatgaacacacctggaatctcacttttatgagaatttcatagactatactcttgaattccagttgtacatttttgcttgcaaacacaggcatttcagagtataatgagaggaggctggtgctcataaagaagactgactttacagtaaaccacctcccaggagaactgaagatggggcttgagctgaggtggggtctcttctccactatcccgagcagcacctgggccccaggtcttcacctagacagtcaaggacctcagcctaaacagcatccagctcttagaagtcctgtgaaattgggccaggcactgtgggtcacgcctgtaatcccagcatttagaaggaggctgcggcaggtggatcacttgaggccaggagttcgagaccagcctggccaacatggcgaaaccccgtctctactaaaaatacaaaaattagctgggtgtgatggtgcatgcccgtaatcccagctattgaggagactgaggcaggagaattgcttgaacccgggaggtggaggtagcagtgagccaagatggcgccactgcactccagcctgggcgacagagcgagaccccatctcaaaaaaaagaanagaaaaaagaanagaanaaaaaagatttcttgtaaaattgaaaacaaaattcagactttggctacttgaatcttggttaatg

SEQ ID NO: 227 - DNA, 819 bp, Homo sapiens
  misc_feature (741)..(741): "n" may be a, t, c, g, other or unknown
  misc_feature (804)..(804): "n" may be a, t, c, g, other or unknown
  misc_feature (814)..(814): "n" may be a, t, c, g, other or unknown
tactagatggacaggctgaggtgtttggcagtgatgatgaccacattcagtttgtgcagaaaaagccaccacgtgagaatggccataagcagataagtagcagttcaactggatgtctctcttctccaaatgctacagtacaaagccctaagcatgagtggaaaatcgttgcttcagaaaagacttcaaataacacttacttgtgcctggctgtgctggatggtatattctgtgtcatttttcttcatgggagaaacagcccacagagctcaccaacaagtactccaaaactaagtaagagtttaagctttgagatgcaacaagatgagctaatcgaaaagcccatgtctcctatgcagtacgcacgatctggtctgggaacagcagagatgaatggcaaactcatagctgcaggtggctataacagagaggaatgtcttcgaacagtcgaatgctataatccacatacagatcactggtcctttcttgctcccatgagaacaccaagagcccgatttcaaatggctgtactcatgggccagctctatgtggtaggtggatcaaatggccactcagatgacctgagttgtggagagatgtatgattcaaacatagatgactggattcctgttccagaattgagaactaaccgttgtaatgcaggaatgtgtgctctgatccatatggtcaaaaaggactgaaaaattgtgatggatttgatcctgtacaaagttgtggacnagctggcccctcttaacattcggagacccagtctgcagtctgtgagccttggcgggtatttgncataatcggngtgca

SEQ ID NO: 228 - DNA, 816 bp, Homo sapiens
  misc_feature (749)..(749): "n" may be a, t, c, g, other or unknown
  misc_feature (759)..(759): "n" may be a, t, c, g, other or unknown
  misc_feature (791)..(791): "n" may be a, t, c, g, other or unknown
aggaagtcatgccatacaggaagccatcagaagttgcctggtaaggatttaagaaaaaaggaattaagtggttatttgggtcataaattttagggcatcaggttatgggtatctgatgtatttatattaataattacagcttaccatgggccagtcactcttttaaatgccacagcaaatttatgaagtaggatatattattatcctcatttgcacatgaggaaactgtgcacaaagacgttaaatggactgccaaaaatcctaaagctagtaagtgccagtaccagtattcaaacctaggcagtctagctcttaaccgctatactatatcttccattgaaatggacagctggttattttgactaaatatcctaagatatgtttggaagggaattaccatcactgacctcttaaatctcctttttctgtacttccaagctgatcaactctttttttgtgaaagactcaaattgttgtgttgtattacatgaatcgatatatgggataattgctaaacattatagacctgagagtcattctatctcttttagaaatctttttctttattccataatggataatgacaaattcaaaagctttaggaagtaggcagataacataagtgagggagatggcttggtataagtcaatttgaaatggcgagaactgtggcaaaccactactcactcgtcacttggcttcagctgctctgtgcaaatgtggatccaatggtatcagatatttaaggncaggaatggnggcttatgcctataatcccagcactttgggangccaggtgggaggatgcttgaccta

SEQ ID NO: 229 - DNA, 772 bp, Homo sapiens
  misc_feature (724)..(724): "n" may be a, t, c, g, other or unknown
  misc_feature (765)..(765): "n" may be a, t, c, g, other or unknown
  misc_feature (768)..(768): "n" may be a, t, c, g, other or unknown
ggatttgggataagtctaaaacttcagacttaaagctttgaagcatgttaactgcatgaaatattaaacatttcgaacttctttagcctttgtcattttgtgacccaggtttttcatagtctgctctatgtctcctgcttttccttgttttgctaatcatcctccttgagctccactgttttcactctgggcatccaatccagcctttcatggtgtgtgcttcatcaggcccctggttcacatgctgagtgccttataagcctggccagcactagtatattctcattaacaaacaaacagtcagcttcgtttgggagggtgcttcactttcaaagctacccagtataatgcatacaatgcagtacaagcggaactcactcagaagtagcacctgagcttcaaatagactctcctgatcattctactgagtaagattctccacatttaagaatcaatacaggatttacttgcgaggatagtgtataaaaatggaatagtttttctatttctggactgaaaccaaactcctcatatctaattgtagttattcaacattatcagaatccctatttattttggcagaacagacaaaaggacgtggaatgtactttctgctacagccgttacagtcaactagatttgagtgctgccgctggtaagttaattgaatagccaagttatggtgccttacccaagtagacagtggaaaggaataatggcagangccatgatgcgagtctgggcacagccatgcatcccatctgnggngatc

SEQ ID NO: 230 - DNA, 818 bp, Homo sapiens
  misc_feature (673)..(673): "n" may be a, t, c, g, other or unknown
  misc_feature (695)..(695): "n" may be a, t, c, g, other or unknown
  misc_feature (753)..(753): "n" may be a, t, c, g, other or unknown
  misc_feature (802)..(802): "n" may be a, t, c, g, other or unknown
  misc_feature (812)..(812): "n" may be a, t, c, g, other or unknown
aacatttatagctttaaaaataccttacgtacttcaataactatgtggaagcactaagaaagattctgtataaaacatcgcaagtttggaaaaaatacatctttacatcttttcctccagcttcattttctcagaggcaggagcaggccagtggtttccatactgcggctcctctaggagccacctgagaaccaaaccaccaatccagcatctcccaccccatcatccagatcctcccgatgccctctcatatgtgggttctgtgacccagaagcctccataatgaaccacaggagaacaccatgggccagccaacagttaggctcttcacataccaaataaaccaccacaggaacccttaacctcatctactgcctgatccaaacatcactgctttgaactcaatggtctttcttgagcctttatgatcaatacatagtgcacttttagtccctctgaagcagattatgttgtcacaattatgactcaactttaatagtttcaaccagaaactgtttaggatccaacatacaagagagtcaactacatttcataatattagcccatttaagagtatttttcaaagtgtgttctgtggatgttaataggtgatactgttccagaagttctgtggcaaactaatccaggacttctcagaacctttaatatatgnttcatatacatttacatttcangcctctgaaaggcagaatcctcaaatttatttatccatggaagctttttttccctcanagcaacttacaggactactttgggaaacactggctaagggtcctaaganctcatgaaanccctta

SEQ ID NO: 231 - DNA, 899 bp, Homo sapiens
  misc_feature (840)..(840): "n" may be a, t, c, g, other or unknown
tcggttaaaagccagaagttatgagcttcaggaaagcaatgtacggctgaagttaaccattgttgacaccgtgggatttggagaccagataaataaagatgacagctataagccgatagtagaatatattgatgcccagttcgaggcctacctgcaagaggaattgaagattaaacgttctctcttcaactaccatgacacgaggatccatgcctgcctctactttattgcccctactggacattcactaaagtccctggatctggtcaccatgaaaaagctggacagtaaggtgaacatcattccaataattgcaaaagctgacaccattgccaagaatgaactgcacaaattcgagagtaagatcatgagtgaactggtcagcaatggggtccagatatatcagtttcccactgatgaagaaacggtggcagagattaacgcaacaatgagtgtccatctcccatttgcagtggttggcagcaccgaagaggtgaagattggcaacaagatggcaaaggccaggcagtacccctggggtgtggtgcaggttgagaatgaaaatcattgcgattttgtgaaacttcgagagatgctgatccgcgtgaacatggaggacttgcgagagcagactcacacccgccactatgaattgtaccgacgctgtaagcttgaagagatggggttcaaggacactgaccctgacagcaaacccttcagtcttcaggagacatatgaagcaaaaaggaatgaattcctgggagaactgcagaagaaagaagaagaaatgagacaatgttggtatgagagtgaaggagaaagaactgacttaagaggcanaggaagacttacgagaagttgacctttaagcggcccccagaagaaagaagaagggagca

SEQ ID NO: 232 - DNA, 846 bp, Homo sapiens
  misc_feature (757)..(757): "n" may be a, t, c, g, other or unknown
  misc_feature (795)..(795): "n" may be a, t, c, g, other or unknown
  misc_feature (846)..(846): "n" may be a, t, c, g, other or unknown
gctcaaatatattatgctctctcttgactctgtgcctttgcaagtgacattcacttggcctgaacactgttccagctccctctgttctttccaggtgatgccttctcgccttccaaatctcagtttagacgtgctcttctctgggaagtttattcatttactgtgtgttagatgttgttctaggccctggggatgtagcagagaagaagacaaagtcactgcatttggtgaggagctgtcatcttcagaatcaaaacttccccctagtgcagtgtccacctccagatactgcttcatttctctgctctctttgttcatgaaactttttcaataattgctttttcatttcttcatctccagtttttatctaattccaatttagtttctctctccatgactctgctcacactgatttttctcagacaccaacttttttttgccgcctaatacaatcgccatgttttttcttcatgttatttgatccttttagtggcactgggcataaatgaccacacgtttcttttcgaaacattatcatgacttttctgatgccacattctcctggcttttcttttgccccacaggaattcctgtagacatccactgccttactagatgtagggagcacctcagggcccagccctggcccactcctctctttagccctcatacttttcctaagtggtaccatctgggcccttgcttgaaatgccaaatggcattaaatgccaaaaggatatcttcagcccaactttgntttaaccccagcaactggatggccagatcctttttctnccttaatggataaggattaaggaatcatatgaggatgcttaaaccaaagtn

SEQ ID NO: 233 - DNA, 719 bp, Homo sapiens
  misc_feature (633)..(633): "n" may be a, t, c, g, other or unknown
  misc_feature (683)..(683): "n" may be a, t, c, g, other or unknown
  misc_feature (697)..(697): "n" may be a, t, c, g, other or unknown
ccgcgctgtccgccgccgctgcctgagtcgactctgcgccgcccgccgcgatggaggccgccgcccagttcttcgtcgagagcccggacgtggtctacggccccgaggccatcgaggcgcaatacgagtaccggacgacgcgcgtcagccgcgagggtggcgttctcaaggtgcaccccacgtccacgcgcttcaccttccggaccgcccggcaggtgccccggctcggggtcatgcttgtcggctggggcgggaacaacggctccacactcaccgccgcggtgctggccaatcgactgcgtttgtcctggcccacgcgcagcggccgcaaggaggccaactactacggctcgctgactcaggcgggcaccgtgagcctgggcctggacgccgagggccaggaggtgttcgtacccttcagcgcggtgctgcccatggtggcgcccaacgacctcgtgttcgatggctgggacatctcgtcgctgaacctggccgaggcgatgcggcgcgcgaaggtgctggactgggggctgcaggagcaactgtggccgcacatggaggccctgcggccccggcttctgtttacatccccgaattcatcgcggcaaccagagcgcgcgcgcggacaacctnatccaagctcgcgtgcgcagcaactggacagatccgcagggacatccganactttccggtctancgcgggctggacaaaagtcata

SEQ ID NO: 234 - DNA, 772 bp, Homo sapiens
  misc_feature (646)..(646): "n" may be a, t, c, g, other or unknown
  misc_feature (663)..(663): "n" may be a, t, c, g, other or unknown
  misc_feature (688)..(688): "n" may be a, t, c, g, other or unknown
  misc_feature (760)..(760): "n" may be a, t, c, g, other or unknown
  misc_feature (763)..(763): "n" may be a, t, c, g, other or unknown
ttgcggggagggcccgaggtcgctgtgtccggggcagagcggccggttcgtcccgagtctgcgctctttcgggtccgctgctgtgtcccggtccgctctcctcagcatgagcggccggtaggagtgaggtttcatcggttccctcgcactggaggaggcagcggccgcttcggcagcgacagctatggcggtagagacgcgggcagagctggtgggtaagcggttcctgtgtgtggcggtcggcgacgaggcacgttcggagcgctgggagagcggacgcggctggcgaagctggcgagcgggggtcatccgagccgtgtcacacagggacagccgcaatccggacctggcggtgtatgtggaatttgatgatcttgaatgggataaacgagagtgggttaaagtttatgaagatttttcaactttcttggtggaataccacttaatctgggccaaaaggaatgaccctagccagactcagggatcaaagagcaaacagattcagtggcctgcattgactttcaaacctctggttgaaagaaatatacccagttcagtcactgcagtagaattccttgtagataagcaactggattttttaactgaagatagtgcctttcagccctaccaggacgacatagacagnctaaacccagttctcanggacaacccgcacttcatgaggaantgaaagtctgggtaaaggaacaaaagggtcaggagatttttatgcaaggtccttattccttaaatggatccngantgagagttt

SEQ ID NO: 235 - DNA, 714 bp, Homo sapiens
  misc_feature (591)..(591): "n" may be a, t, c, g, other or unknown
  misc_feature (689)..(689): "n" may be a, t, c, g, other or unknown
  misc_feature (700)..(701): "n" may be a, t, c, g, other or unknown
aaataaaagcatattttgagggaataaagaagcagaaaaacaaagaagaatctggggaagatgggcataaatctccaccaagtgctgccaaggcttcccaggcgaggctgctgaaaagaccctgtggaggtagagggacaatttgtcatggatgggaatgggcttgagggccgggaagcagggcatgatggggcctcattcatcattttcccgttatcccagcggcgtgcaggggagcaggtacagcacctgccaagtgagtgaccagagggggactgggaatggaaaggacctcaaggaaggacaagctgagctctgggaggccacctcctccaggaagccttccctgattcatccttcacaggcagtctcaatttgcagtcagatatccactgctctgattcttagatcggcaagtatctccctacccagactgcaggctctgctggggccgcggctgtttctgacttgtgcacaatggcatccctgtacctagcacaggactgagtccagagaaagtgctcagtgatgcttgttggccttgctctcctctgtgggcagcactggacagggcacccggcgggtcctganggtgtggacatcccacggcagagcctgcggttgatcccgaccatgaaccaaggcctggggcgggggtggccacatcaggccactttttgccaggaaanatgtggcttgnnaacctgggggtct

SEQ ID NO: 236 - DNA, 636 bp, Homo sapiens
  misc_feature (606)..(606): "n" may be a, t, c, g, other or unknown
  misc_feature (624)..(624): "n" may be a, t, c, g, other or unknown
  misc_feature (629)..(629): "n" may be a, t, c, g, other or unknown
aacgtaatgaaacctcgtctctacaataagtagaaaaattagccatgtgtggtagtgcatgcctgtggtcccaggtacttgggaggctgaggcagcaggatcacttggacctgaggggtcgaggctgcagtcagccctgattgctgccactgcactccagtctgggcaacagagaagactgtctcaaaacaaaaacaacattactcaggaatgaaggaaatggtggaattgagaagacgggactaaagccaattaatggggtatggcaatagtctagttggaagaggttaaggtcatgcagtaggacataatagggctgaagaagtatggatggaattgacaaacttttaaagggtagaattcacaagatttgatgaacaaatgcatgtaagagaacatatacaatgcattgtaagggacttactgctataattaaccattgtatgtttccaaaatgtatgtgtataaatagtcaacagtgataacaggatccaatcatggacaaccagtttgattggatataaattttgaaagaaagtgtgtgtgtgtttgtgtgtgtgtatgtgtgaatgtgtctggggaagttaagaaaaattttgagtttgncctattgatggcaagcanctgcngcaggga

SEQ ID NO: 237 - DNA, 703 bp, Homo sapiens
  misc_feature (595)..(595): "n" may be a, t, c, g, other or unknown
  misc_feature (614)..(614): "n" may be a, t, c, g, other or unknown
  misc_feature (690)..(690): "n" may be a, t, c, g, other or unknown
  misc_feature (697)..(697): "n" may be a, t, c, g, other or unknown
tctgtcgctgactccgcgccgcgcgccgaccgcgcgcccgcccagccggccatgcacgcagtgccgcgcggctttggcaagaaagtgcgtgtgggcgtgcagtcctgtcccagccccttctcgggccaggcgtgcccccagccctcctccgtgttctggtctctgctgaagaacctgcccttcctggaacacctcgagctgattgggtccaacttctcctccgccatgccccgcaacgagcccgccatccgcaactcgctcccaccctgcagccgcgcacagagtgtcggggactcggaggtggccgccatcggccagctggccttcctgcggcacctgacgctcgcacagctgcccagcgtccttacgggctccgggctggtcaatatcggcccgcagtgccagcagttgcggtccctgtcgctggccaacctgggcatgatggggaaggtggtgtacatgcccgcgctctcagacatgttgaagcactgcaagcggctgagggacctcaggctggagcagccctacttcagcgccaacgcccagttcttccaggcgctgagccagtgcccctcgctgagcgcctgtgcctggnctctcgcagcggcaccctncaacccgatgccgtgctggccttcatggcttgcttgcctgcaggttggcatgtgccaccttgttcaccggggaagncccttgncacctg

SEQ ID NO: 238 - DNA, 791 bp, Homo sapiens
  misc_feature (727)..(727): "n" may be a, t, c, g, other or unknown
  misc_feature (750)..(750): "n" may be a, t, c, g, other or unknown
  misc_feature (766)..(766): "n" may be a, t, c, g, other or unknown
tgggcagcagcagaagcagcagcagcagctccagcttcttccctccctccccaaggagaagagttccctcctcctcctcctcctgcttctcctgctcagagttcctgcctccagctgccaggggggacagccagccagcagcaggaggggggctagagagctgaaggagagccagtttccccaaaattgctgcagtgagaagaggagtttgttactttaaacagaggctgaagaaactatagaattagcagagaaagtggagaaggtagaggatggagttgcagactctacaggaggctcttaaagtggaaattcaggttcaccagaaactggttgctcaaatgaagcaggatccacagaatgctgacttaaagaaacagcttcatgaactccaagccaaaatcacagctttgagtgagaaacagaaaagagtagttgaacagctacggaagaacctgatagtaaagcaagaacaaccggacaagttccaaatacagccattgccacaatctgaaaacaaactacaaacagcacagcagcaaccactacagcaactacaacaacagcagcagtaccaccaccaccacgcccagcagtcagctgcagcctctcccaacctgactgcttcacagaagactgtaactacagcttctatgattaccacaaagacactacctctcgtcttgaaagcagcaactgcgaccatgcctgcctctgtggtggccanagacctaccattgctatggtganccgccttaacagtcanaagctgggctcaacacttgatgtgc

SEQ ID NO: 239 - DNA, 797 bp, Homo sapiens
  misc_feature (632)..(632): "n" may be a, t, c, g, other or unknown
  misc_feature (656)..(656): "n" may be a, t, c, g, other or unknown
  misc_feature (728)..(728): "n" may be a, t, c, g, other or unknown
  misc_feature (748)..(748): "n" may be a, t, c, g, other or unknown
  misc_feature (797)..(797): "n" may be a, t, c, g, other or unknown
gatacccttaagggagaactctggagcactaactgtgtgttccctacagatgcgtccaccacctcccccgccggctaaagccccggatcctggccacccagatcccctcacctgaaggccagggaagccttgacccccagtgatgctgctgtccctatcttcaagctgtcagaccacaccatcaatgatccagagcaacacagccaaaagctggaatcgcccttatttccaccctcacctccaagggtggaaacttgccccttcccatttctagagctggaacccactcctttttttcccattgttctatcatctctaggaccggaactaccttctcttctgtcatgaccctatctagggtggcgaaatgcctgaaatctctggggctggaaaccatccatcaaggtctctagtagttctggcccacctctttccccaccctggctccatgacccaccccactctggatgccagggtcactggggttgggctggggagaggaacaggccttgggaatcaggagctggagccaggatgcgaagcagctgtaatggtctgagcggatttattgacaatgaataaagggcacgaaggccaggccagggcctgggcctcttgtgctaagagggcanggggcctacgggctattgctttangggcccaccacgggcaggggcctgttccagctgccacgctctatcatatggagcgaggtgttggggaaggcngggcaagcaagcctgttgangcaggggaaggagaagagactgagggctttgacctttctgaggccccan

SEQ ID NO: 240 - DNA, 771 bp, Homo sapiens
  misc_feature (716)..(716): "n" may be a, t, c, g, other or unknown
  misc_feature (751)..(751): "n" may be a, t, c, g, other or unknown
  misc_feature (759)..(759): "n" may be a, t, c, g, other or unknown
attagcttaaatgttacggccacttaaaaattctacatatgactattgtttaaatacatttttcatgtctctgatgtagtccttatttgacataagtattttattcactgcttaattgttagatagattatagacagctgttactaagtaatactgctccattagggcagaaacagaaactttattttaattaaatgtgtactaatgtttgagtttctatattttgctacagtgataattccagtaaaataaactgtaggcctctagttgttttagaattttaaaactgtaaatggactcagagaatcagtttcttattagacgtcatgagagtatatttttttcattatgctttaagagggaatttgtaacttgctcaggtaacattcaagttttctggtttgtgtttgtccctacaattaaacacactgaactaacaggaaaaggttacatacatttaggaacaattgcacttttaaagggagagaatgcatagttgctcacatatctcagtgtcagtcacctaacatggatcagtgctttatttgagattacaaaactagaaaatgacggagtcaaggctaggaccaatattctgttcagtcttagataattatagaatacacattaaaatcagatatttgaattttcttaattttgtaactatttggcattgaaaggagatactaaaaaaattatatatcgcctagaaagtncatgaactaataatgcatttctaaaggtgaaaaangaataggnatttttctggtt

SEQ ID NO: 241 - DNA, 686 bp, Homo sapiens
  misc_feature (619)..(619): "n" may be a, t, c, g, other or unknown
  misc_feature (631)..(631): "n" may be a, t, c, g, other or unknown
  misc_feature (642)..(642): "n" may be a, t, c, g, other or unknown
aagacctcttagaccagctcttgtccatcatttgctgaagtggaccaactagttccccagtagggggtctcccctggcaattcttgatcggcgtttggacatctcagatcgcttccaatgaagatggccttgccttggggtcctgcttgtttcataatcatctaactatgggacaaggttgtgccggcagctctgggggaaggagcacggggctgatcaagccatccaggaaacactggaggacttgtccagccttgaaagaactctagtggtttctgaatctagcccacttggcggtaagcatgatgcaacttctgcaacttctgctggggcttttggggccaggtggctacttatttcttttaggggattgtcaggaggtgaccactctcacggtgaaataccaagtgtcagaggaagtgccatctggtacagtgatcgggaagctgtcccaggaactgggccgggaggagaggcggaggcaagctggggccgccttccaggtgttgcagctgcctcaggcgctccccattcaggtggactctgaggaaggcttgctcagcacaggcaggcggctggatcgagagcagctatgccgacagtgggatccctgcctggnttcctttgatgngcttgccacangggatttggctctgatccatgtggagatccaagtgcttggacat

SEQ ID NO: 242 - DNA, 726 bp, Homo sapiens
  misc_feature (568)..(568): "n" may be a, t, c, g, other or unknown
  misc_feature (677)..(677): "n" may be a, t, c, g, other or unknown
  misc_feature (708)..(708): "n" may be a, t, c, g, other or unknown
  misc_feature (715)..(715): "n" may be a, t, c, g, other or unknown
aagatgaacaagagccgccagcgcgtgcgctacgactcctccaaccaggtcaagggcaagcccgacctgaacacggcgctgcccgtgcgccagacggcgtccatcttcaagcagccggtgaccaagattaccaaccaccccagcaacaaggtcaagagcgacccgcagaaggcggtggaccagccgcgccagctcttctgggagaagaagctgagcggcctgaacgccttcgacattgctgaggagctggtcaagaccatggacctccccaagggcctgcagggggtgggacctggctgcacggatgagacgctgctgtcggccatcgccagcgccctgcacactagcaccatgcccatcacgggacagctctcggccgccgtggagaagaaccccggcgtatggctcaacaccacgcagcccctgtgcaaagccttcatggtgaccgacgaggacatcaggaagcaggaagagctggtgcagcaggtgcggaagcggctggaggaggcgctgatggccgacatgctggcgcacgtggaggagctggcccgtgacggggaggcgccgntggacaaggcctgcgctgaggacgacgacgaggaagacgaggaggaggaggaggaggagcccgacccggacccggagatggagcacgtctagggcagaagcccttgccnagaagcccgtgcttgccttgctggagcccgncttgcanacccggtcctt

SEQ ID NO: 243 - DNA, 756 bp, Homo sapiens
  misc_feature (715)..(715): "n" may be a, t, c, g, other or unknown
  misc_feature (725)..(725): "n" may be a, t, c, g, other or unknown
  misc_feature (739)..(739): "n" may be a, t, c, g, other or unknown
aagccattcaacaaatctctaggaagttccatactttcccacattttcctgtcttcttctgagccctccaaactgttccatcctctgcctgttacccagttccaaagctgctttcacattttcgggtgtctttttagcagtaccccactctcggtaccaatttactgtatttgtctgttattatgctgctgataaagacatacctgagactgggcaatttaacaaaagaaagaggtttaattggacttaacagttccatgtggctggggaggcctcaaaattatggcggaaggtgaaaggcacatttcacatggcagcagacaagagaagagagcttgtgcagggaaattccgttttttaaaacaatcagatctcttgagacttagtatcacgagaacagcacaggaaagacatgcctccatgattcaattccctcccacaacacatggaaattcaagatgagatgtgggtggggaatacagccaaatcatatcaatttctaagcaacatatttggatatttactctggaaatgtagttacaaatgagcagttccaaatagaagagtgcaatttacttcagctttgcacaaaagcaggtaaagaggtatgcctatattttgaggctagaacaactagaatatcatatttcttttcttagtggtgataggaaagcctactttcctggaccagagaagcagatgtaagtagccttangaattgctgngctttttctgctgncagtcccctgctcatga

SEQ ID NO: 244 - DNA, 820 bp, Homo sapiens
  misc_feature (741)..(741): "n" may be a, t, c, g, other or unknown
  misc_feature (758)..(758): "n" may be a, t, c, g, other or unknown
  misc_feature (814)..(814): "n" may be a, t, c, g, other or unknown
ttttgcttgaggccttgaagcatgcattctcagggtacgtcctacccctacaagtcctactgacttcttaatcagtaattccggctgggcacggtgggtcacgcctgtaatcccagcactttgggaggctgaggcaggggatcacctgaggtcaggagtttgagaccagcctggccaacatggtgaaaccccgtctctactaaaaatacaaaattagccgggcatgggggcgcatgcctgtaatcccagctacttgggaggctgaggcaggagaatggcttggacccgggaagcggaggttgcagtgagccgagatcgtgccatcgcactgcagcctgggtgacaagaacaaaacttcatctcaaaaaaaaaaaaaaaaaaaatcagtaattctagattggccctagggtgcttttagcattggaaacctaatgcacaaagtgatggttatattggactgatctgtaattcactgttttctgttattattctatctcttaatcttaggctaaagtaaataatgccagcctgattggactgggttatactcagacccttcgaccaggtaagtaaaggaattagtaacagaggggttgaggtggaaggtgatagagaaaacaatgaaaataacctgcagaacaacctgtagtcactgtaagttgatttggaccattttgtaacatttggttgttcagacagaaaacaatacagatcaaatacttttgcattaaaaaagtatgnatttctgactataatgnggcactttggcctttgagtttggttgatcactcattgccttaaccctgaactttanagaaag

SEQ ID NO: 245 - DNA, 763 bp, Homo sapiens
  misc_feature (619)..(619): "n" may be a, t, c, g, other or unknown
  misc_feature (707)..(707): "n" may be a, t, c, g, other or unknown
  misc_feature (723)..(723): "n" may be a, t, c, g, other or unknown
  misc_feature (754)..(754): "n" may be a, t, c, g, other or unknown
gctctgctttgtaagcaggaaccgcagtcccctgaggagggtgtgtgaagactcgctcatttgagttctttgaaatgggtcccttggtcctgctgtcacattgccttgagctaacggatcctgttcccatcataggccggtccttggggcattgggcaggtgggggctttgtgcctctgtggctgctgctgtctgttctctaacaggcagaactgtgggattctgaactcaggatgtgcagctctccagactgagaccccaaggctgactccaggtggatccattgtctctttattctcattacgatttatcagaaaagtgagacaaattcaggattctcaaatgctgaggcagccccggaattggggggatctttctgttgttagtccacccatattttcaagcaggcattaaaggaaggtcagccactgcgcctagaataagtaggtcaggcctgctccatccattgtccccggccccgcaccctcctcctgagaagactgtggctcctgacacgtctagagaggaagggccccgggctgctgagcgaacacagtatgaagattgcttactgatccaaatgtccattttattgcatgtttggtactttttttggtanatgtaatggaagattctcttatcacatccattccctctgacattagttttgagttaattgagattctttaagcgttaacctggggaangtaagtctttatcttncattagacattttaaatttaagaatctaagnaaaacacca

SEQ ID NO: 246 - DNA, 836 bp, Homo sapiens
  misc_feature (812)..(813): "n" may be a, t, c, g, other or unknown
  misc_feature (828)..(828): "n" may be a, t, c, g, other or unknown
attaaaatgagaaatacataagatgataaataaaatgaaggtgaaggtattccagatctaccgaaaagattttcagtatcacagattattcataagaaattgagaaaaggaacaatcagaagttgcaaaagatggtatagccgaatataatggaaataggaaaaattagtcgaaaataaaggttgatttagaaatgaagaaaatgaatatatttcttaatacaaaataagtgggaaatgagaagttataccaataaaaagcatttacaaatttaggggatattgtaacccagtataattttctgacaggttggactttgaccctaatggacttactggtgaactttttcaaatgtttaaataatgtctatccatgtatcatgaaggacagtatgcttcaaattgtcttttgaggcagacatgttctcagtactaaaagacatttttagaaggattttattctcaacagatgcaaaatgcaaaataaaatattgacaaacaatacagcaacaaataatttactatcactcaggattataaggctggtgttaagcagaacagccattaaatcagcatcaaaagaacaaatagtaaaatccaaagtattaattacagataacttttcaaaaattcatcattcacccttgatttaattatttctctggcaattatttaatagacttctcggagtctggtaagtcttaaaccaagaactccattattcctactgggaaaacttaacatttctcaagtggaagtaaacatgttgcactattttatatatggttaagagcctgtattgcataaagccannttcccaaatgagganataggaag

SEQ ID NO: 247 - DNA, 680 bp, Homo sapiens
  misc_feature (590)..(590): "n" may be a, t, c, g, other or unknown
  misc_feature (660)..(661): "n" may be a, t, c, g, other or unknown
agagacccatgcattaatatcattattaattccatgcattaatatcattattaattctatgcattaatgttattaattccatgaatgtggcaggtatttttttaacatttattgtaggctcagctgtctactgggtgttctgagaaaatacaaggaagctatagtaatgcagtgtatacatacattctttcctgcatattaggaacctatagtctaattggggatgtaagctttcacgcatgaaaagacaggtaaatgtagaagacaatttcttatgagtttcagtgagtcatgcagacagtactggaggagttcacaggtggaaggggatgcagggaatgagagttatggagaggaactaggagatcaggaaagtctttctgggggagtgaagatttgactggactttaaaaaatgggtaaaagaaggcaggatttctagtagggaatcttagaaacacaaggacacaaagaacatgcatggaccatttgagggatggtgaagaaatcaccccaactggaataaatgtgttgggtagtgggagatgaatctaggaaggtggtttggagttatattttgaaggatcttgntgggtgaagtaaggatccatggacttgctctttggagcaggagagagtaattaaaatattttaagcagcnnaatgatgcatcagattcag

SEQ ID NO: 248 - DNA, 826 bp, Homo sapiens
  misc_feature (709)..(709): "n" may be a, t, c, g, other or unknown
  misc_feature (755)..(755): "n" may be a, t, c, g, other or unknown
  misc_feature (808)..(808): "n" may be a, t, c, g, other or unknown
  misc_feature (811)..(811): "n" may be a, t, c, g, other or unknown
attaagatgtggccttacatatggcattccttgtgttcgtaatgtgagatttttgatttagataaatcaagattcaggattaaagtttcattgtaagttgaaatagaaaatgtattaaaatgtctaggcttctgggaggaagttcttatactcttctttcttggcattagaaagaagcaatatgaatttttgtgaatattctaaatattcaggcaacactgttcagattgatttaggtttgtcttaaccaatgttctttttttagaatttcaggtagtggcattcactgagtatgcagctactatggtttttgtatgggacgtataaatacttgattatatacgacagattttaatgtctttaaagacttcctgctgtattaacatattgtaatggagtcttttaaatactaggttgaatttaattgaagtcacacacatcttgaagtggtaactgcatagtaaatactaccaagagtttttttcacgtgggagtatcctaaaactctgccatgggtgtaaatgttttacattaatttcataattggacagaccctgcatttagcgaaaacattttgttttgaaagtgtgttctttttgtcgcactgttactgcgtaacacttctcaacattctgtaagttaaattattttaaaataactatggtgaattcatgtttattttttttactttgaaaattgtagtactcangtggtatttaatggggaaaggatcctttgggtataaatcataatgnattttaaggaatgcatctattaccattgataacctttaaccttaaaaaaaaanggnctaattaattccctt

SEQ ID NO: 249 - DNA, 779 bp, Homo sapiens
  misc_feature (731)..(731): "n" may be a, t, c, g, other or unknown
  misc_feature (752)..(752): "n" may be a, t, c, g, other or unknown
  misc_feature (777)..(777): "n" may be a, t, c, g, other or unknown
ttgccttttaaatagcaataaacatggtgtaattggtttaggaaggctgtgctccatggagaagagctggtactacatttaatttatcttgtagcatagtgttttctcaaactatgcttagaagaatactggttcctcgaggtgttgattggtgttgtctggaaatacaaggagcttctgaggccaagtaatgtggcaaacactggggtaggccagttacctggggttaactttccggcaggacttctcagagtctttaatatgctactctgcatcataaattttcaagagcttgccctgtacctatttgtctttcccttttcatagtgctcacagggtttcatggatctcagcatagaaaaggctgctttagggtagaggcagctgccagcagtctttagaaagtgagtgatttctatttcagaaaggtaacactgagcacctgggaaggaaaacgccaaggatgagaaactagacccaaggcaacctataatgaggctgttaaaattttctaggcacaagaaaatgaggctcagaattagggcagtgaaaatgtgagggaagagatagaattgagagatgcttaggaggtagaatggatactccataaccacaaggatggtgaatgagagaataaaatagttgaaggtgaatcccaagtttctagctgggaagcttggacagagaagtgttgggtagaagatgaaaaacaatttaatttgggacatacngataaagatggcaactcatanccagcaactggtgatactaatgaanca

SEQ ID NO: 250 - DNA, 799 bp, Homo sapiens
  misc_feature (676)..(676): "n" may be a, t, c, g, other or unknown
  misc_feature (717)..(717): "n" may be a, t, c, g, other or unknown
  misc_feature (752)..(752): "n" may be a, t, c, g, other or unknown
  misc_feature (784)..(784): "n" may be a, t, c, g, other or unknown
agagacgccagaggtgcagctccagcagcaatggcagtgacggcgttggcggcgcggacgtggcttggcgtgtggggcgtgaggaccatgcaagcccgaggcttcggctcggatcagtccgagaatgtcgaccggggcgcgggctccatccgggaagccggtggggccttcggaaagagagagcaggctgaagaggaacgatatttccggtgaggctcaccgggtcccaagtccagccctggatctcccaatggccttccaatccttaaactgccaatcgccccacccgttcctacctggtgccttgggcgccccatcccccaacagaactcccgggccccaatccagtataccctaacccttgatgtcccgaccgttgccacgtatagggcactcccagttacctgcacaacagtttcaggcccccaaaccgtttccaccggcgggtctccaaaacaacccacggctcaactcctcctttatcattaccatctcccgcgtggagttctcctcaggtcgtgcgaaacacccccagattcttcgcacagtgtctagatccgaccgcccaacgtttgcctcccagcctgactccctcggcccttacccacctgtcaccccctctacgctctccttcctcgccagcacgccttagctttgcaagcctgcatgcattcangcttctcagtgtttctagacccccgacttcgcaagagtgangatgatgggaactggtcatgggaactacttatggntggacaccatcttctaaaggctttggcctatnaacccaactaaactg

SEQ ID NO: 251 - DNA, 758 bp, Homo sapiens
  misc_feature (591)..(591): "n" may be a, t, c, g, other or unknown
  misc_feature (743)..(743): "n" may be a, t, c, g, other or unknown
  misc_feature (747)..(747): "n" may be a, t, c, g, other or unknown
  misc_feature (750)..(750): "n" may be a, t, c, g, other or unknown
tttttggaggtttatttcattgtttgcccttgatactgtagtctttcctcaactatctgatgattctcagacaactcattatttaagagctaaggcttcctgggagctttgcatatatggacaggcttattgacggatatattttgttttaggatggctgggtgaacagccaaatcttagctggggtcctacaaattccggaattgtgaggagtttgctcttctcaccagtgtccatagcaactagtgtagttctcagtttgttcagcttctttagggaagaaccttatctttttctttttttcatggagtgtaaataactgccaatgttgtggggctggtggcagaattgacgcttctaattattcaacacttcacccttctgatttcaaaccctctgactgctgtttaacattgttcccgccttctctgagtctgaagcctctgaatctgaagggaccaaacaaacctcttgactattacaggttgtagcttatttctttctgcttcactcttccttatatattttgttttgtacaagtttctagaaatctttcatcacctcatggcctgtttctcttttcttccttgntaagggtttatacgttttataatattttatttttaatgatttcagtaaggtttcttgtcaaagtggatttattgaattggaattccagcatatttatcattaagctgagaagggaaaaatgcagggctttaccagtagaatgtcttcttaantganggnccatgggt

SEQ ID NO: 252 - DNA, 786 bp, Homo sapiens
  misc_feature (639)..(639): "n" may be a, t, c, g, other or unknown
  misc_feature (712)..(712): "n" may be a, t, c, g, other or unknown
  misc_feature (746)..(746): "n" may be a, t, c, g, other or unknown
  misc_feature (761)..(761): "n" may be a, t, c, g, other or unknown
agcgcgacccgacagcctgggaaacggacagccgtgtcagaagggcaggtgccagtgggcaggaggccggagagaaagccgcagcttccttccacctcgcgccgggcccgcggccgcgcacggggaccgctccgagttcctcccggcgggaaccccccgccccagaactttggtctcgtcccacccacccccgcccgcgccatggtctcgccctagggagccatcgataactctacgctcggcctcgatcgactcgctccggctcccctcgccgtcctggacacggcggagtgcggagccgcccgtaagatgctctgacctttgaccctgccgttcagctctagggcccgtgcaggccacaccatgaacacctccccaggcacggtgggcagtgacccggtcatcctggccactgcaggctacgaccacaccgtgcgcttctggcaggcccacagcggcatctgcacccggacggtgcagcaccaggactccgtgaatgccttggaggtcacaccggaccgcagcatgattgctgctgcaggttaccagcacatccgcatgtatgatctcaactccaataaccctaaccccatcatcagctacgacggcgtcaacaagaacatcgcgtctgtgggcttncacgaagacggccgctggatgtacacgggccggcgaaggactggacaagccaggatcttgggaacctcaggtncccggaacctgcaatggccaaccggatctttcangtgaacgcaacccanttaacttgggtgtgccttgaacccg

SEQ ID NO: 253 - DNA, 805 bp, Homo sapiens
  misc_feature (739)..(739): "n" may be a, t, c, g, other or unknown
  misc_feature (763)..(763): "n" may be a, t, c, g, other or unknown
  misc_feature (793)..(793): "n" may be a, t, c, g, other or unknown
tttatatataaggaatgcaattacctctcaaaatttatgagaacaaactcaagtccatagaaacctctggagctgagcatcctcagttcaaatgctggctctgccacttaccagctgcatgatcttgggcaagttaatctgcctcaaggctttggcaagatcaaagggttgctatgacctgatgcacacatggtacctgacttcaggtaggtactgagtgcatgtcactggtggcagattgcattgcccaaaggcgtctgaacaattaaagatgtcccagacctcctgctctaacaacatgactgacattgctctcactgagaggtggcgtctatgttcctcccgtttaatctgggaagagaggagttcccaggctaggtcatagaaggtgatgcaggttccactcagctcacctgtgctcactccctcttcttttttttcctctctctctctctctccctccaactccccatacctctgtctctctctgctcacccttgaatgcagctaccatgctgtgaggaaacctggactaggccagctggaaagaggacatggacaggcctatttggggaggagctgagtgaggccccagtgacagcaaacatcagttgtcagatgtgcaatggatgagccttcagcaggctctgctgtgcccttttcaaatgcatatttattatgcagccagagttggcagcaagcactaagctgtgacagtgcaagtaatttaattggtgangcccattcttgcaactacctctgngactagtggagacaacttagatcccagatnaagggatggggg

SEQ ID NO: 254 - DNA, 749 bp, Homo sapiens
  misc_feature (700)..(700): "n" may be a, t, c, g, other or unknown
  misc_feature (708)..(708): "n" may be a, t, c, g, other or unknown
  misc_feature (716)..(716): "n" may be a, t, c, g, other or unknown
catatttgtgtaaaattttactgctttcatttgtttttctttaaatagaccatctttaatatatatgcattctttttttttttaaaaaaaagaagcattttaaaaaaggaaacatttcccttattatcttgtcacttgccaaaaatagaaggtaacttaaaaataaatgcaatcaaaccaaaacgatgccattacattctagctagagttgtatcataatatctcacaaaagagattgtgaagcagagcagatgtgttaaaacggagatgttctacttggtgtgtcaaggatttaaagacttggaaaagaaagaattatctcactatgtaagttaatatcatttgacaacctcacctatcaaattacctataaaccaccctatgtcatcttatgggccactgctggtaagagtcccagacattgggaaacaacgtggtcagaaactttcaacatgaagctttcaatatgatcaagctggatggttgcgggtgggagaggtatgaagcagtcatcaaacaagacatgctttttggctgaaattcagtggtatttttgttaccaggattcttagttttcagaatgaggtaccaaatgtatttttgcaatgttttaattcccttccttaggtaattcttagtgacttatttgggcaacattagtgttgctatatagaataagtttcattttagatgacgtggnctttctgntctggtgngctcttcgaatgacccattaagcacattctagg

SEQ ID NO: 255 - DNA, 790 bp, Homo sapiens
  misc_feature (368)..(368): "n" may be a, t, c, g, other or unknown
  misc_feature (718)..(718): "n" may be a, t, c, g, other or unknown
  misc_feature (724)..(724): "n" may be a, t, c, g, other or unknown
  misc_feature (745)..(745): "n" may be a, t, c, g, other or unknown
agtctttttccccctcccttactcttcgtccccggtccctcccctccccacccctttccttctagctccgacgtttgcggccgcgggggcggcggaggatatggagtaaagccagagtcagtggccaggcacgaaggcagagcaggaacagccaggaggcgtttattaggggggcggggggaaagagccccagcaccgcccctcctggaagaaggaagaggaagtggcagtttttgtctttgataaaaaactgattgacaagtatcaaaaatttgaaaaggatcaaatcattgattctctaaaacgaggagtccaacagttaactcggcttcgacaccctcgacttcttactgtccagcatcctttanaagaatccagggattgcttggcattttgtacagaaccagtttttgccagtttagccaatgttcttggtaactgggaaaatctaccttcccctatatctccagacattaaggattataaactttatgatgtagaaaccaaatatggtttgcttcaggtttctgaaggattgtcattcttgcatagcagtgtgaaaatggtgcatggaaatatcactcctgaaaatataattttgaataaaagtggagcctggaaaataatgggttttgatttttgtgtatcatcaaccaatccttctgaacaagagcctaaatttccttgtaagaatgggacccaaatttaccttcattgngtcttncaaatcctgaatatttggctnctgaatacatactttctgtgaacttgtgaaacagccagtgatatg

SEQ ID NO: 256 - DNA, 788 bp, Homo sapiens
  misc_feature (731)..(731): "n" may be a, t, c, g, other or unknown
  misc_feature (745)..(745): "n" may be a, t, c, g, other or unknown
  misc_feature (757)..(757): "n" may be a, t, c, g, other or unknown
ctaaatatagttccctcctcgggacaacaaagaagccatcctctgaatgactgcattccccatggccagcttctgggctgtttgtcagattcccccagcaggatgggagggaggagtgggggcaaacaggagtggccagggctggagaggagctgctgaagtccatgcagcagggtgctgtcttccagccatatgacatttgggcccagacgctcagtggctatggccttgaccgtgagttcctgccttctgtctctggggatgcatggggcccagagccctgtcccgggcaggtgctactaagttgtgactgaagaagaggagagagaaatggtgatctccccagcaggaaatgaaaagtgtctgtcggctccagtccagtcaagctgggtgacctctgggcagattctatccttaagtctcagtttccacatctgtgaagtagggataaggactatgtcaaggagactagagagaaattgtgccaggtggcgggcactagtggtcctatctggccagggctctgtgcctgcatgtgatggattgcaggcatagcctttgaagtgctttttgatgtgcctttcacttcaggatggagtccctcttctggtcccagggctaagaggtagatagaggccctgcaaggtactcattccttactaaaacaagaccccaagcccagagcccctgccttccttccagcctcttatttctgatctcaacttctcagncatccagagcccanttgggtgctgangccccctttaaaaagccccagagcccccccg

SEQ ID NO: 257 - DNA, 800 bp, Homo sapiens
  misc_feature (748)..(748): "n" may be a, t, c, g, other or unknown
  misc_feature (776)..(776): "n" may be a, t, c, g, other or unknown
  misc_feature (800)..(800): "n" may be a, t, c, g, other or unknown
acaaaaatacctggaaaaaatatgggttattactgaggaaatgtacgagtattccaaggtccgctcatggggcaaacagcttctccataaccaccaagccactaatatgatagcattactcacaggggccttggtgactggagtagataaaggatctaaagcaaatatatggaaacaggctgtagtggatgtcatggaaaagacaatgtttctattgagtcatattgttgatggttctttggatgaaggtgtggcctatggaagctacacagctaaatccgtcacacagtatgtttttctggcccagcgccattttaatatcaacaacttggataataactggttaaagatgcacttttggttctattatgccacccttttacctggcttccaaagaactgtgggtatagcagattccaattataattggttttatggtccagaaagccagctagttttcttggataagttcatcttaaagaatggagctggaaattggttagctcagcaaattagaaagcaccgacctaaagatggaccgatggttccttcaactgcccaaaggtggagtactcttcacactgaatacatctggtatgatccccagctcacaccacagccacctgctgattatggtactgcaaaaatacacacattccctaactggggtgtggttacttatggggctgggttgccaaacacacagaccaacacctttggtcttttaaatctgggaactggggggacnagctgtgtatgacatagtcattttcagncatattcctggattgacgggtttn

SEQ ID NO: 258 - DNA, 770 bp, Homo sapiens
  misc_feature (697)..(697): "n" may be a, t, c, g, other or unknown
  misc_feature (752)..(752): "n" may be a, t, c, g, other or unknown
  misc_feature (760)..(760): "n" may be a, t, c, g, other or unknown
ttgcgtacctattgcggttccttcacgaaatttcattctgcttgcttctctgttggtctgttgccacgcacaacttaaaatatcagatggctattagctgttgcattcatgatgattaagcaaggataattctagcatatttttttctccatgtaagtgagttgctcttgcccctgagttgggccacaatttaaaacacaagcaaataatcagcaccgtagaaaacaaggattcatacactccctccccagccccctttcaaggcaaaattgagtcttccaaacatttatacagcgctctgatttagaaggtcaataaagttcgttgtccttcagtcaagccatggctttataaaagtttgatttcagataaattcattctaatacagctttttttcttaaagatttttcccccaaaaaaaactacaaagaaaagaaattataaaaatgtgaacccaagacctacccatgttaactcagctgtccagccatagcaaagtggacaagagtttcaaatgaatcagccatacccactgtaatgtttacaattatgaaattaaatcacaccacgttcctatgatgcaactatatctcccaatgaggcaacgcccctcagttacactgacaccatcattcacatttggttattgatttcccttgtgctaacgactaatgccaagctatcctataagcaggtnccaggtcaattttctttctttggatcgttaaggatggaaaaccatcggagactgnatcctcgnagtatgtctt

SEQ ID NO: 259 - DNA, 763 bp, Homo sapiens
  misc_feature (684)..(684): "n" may be a, t, c, g, other or unknown
  misc_feature (737)..(737): "n" may be a, t, c, g, other or unknown
  misc_feature (752)..(752): "n" may be a, t, c, g, other or unknown
tgttagcgtgcacagttctgcatacttgcttcccctcacctgccaggaacaggttagtgttccccattctgcacactttcttcctctcacctgccgggatcatgttagcgtacaccattctgcacactttcttcctctgtgtacgtgtgtgtggttttcctttcagaaatgggtcatactctgtggacatctttttccacttaaagtgatggcacagccattttcccagtcaagtaacatgaatgtacaagtttagcaaacttcctcctgagagatggagagatcaaggcttctgctccgtggcagccatccgtgcacatgcatcactgtgcgtgagttggtcccagtggcttgctgagacatgctctgcacaggggagatttcttataccagcagtgtgggaggcagtggggcaggtagagccacaagtggggatgagggagcagagtctagggcaggctcctggatggacaccagctacactgtctattggatgtgggacttccctcactgatgaaatgaataagagaatcttcctcatcctgctgttgttggcgttaaaacgggttaatgcatgaaagcaacaaagcccggcctgcagacagcacttggtaagtctcctcttcccagcatgttcaacaggaagccctcattccctctagaatgtaggagtcttgccagcantggctgtttggtctctggctgttgccgacctgatgagaacctaaaaatggggncttctggatagattnccttcttattg

SEQ ID NO: 260 - DNA, 707 bp, Homo sapiens
  misc_feature (664)..(664): "n" may be a, t, c, g, other or unknown
  misc_feature (687)..(687): "n" may be a, t, c, g, other or unknown
  misc_feature (703)..(703): "n" may be a, t, c, g, other or unknown
tacaaccatccattcctctgcccttcctccattcatccacccatccctctgtctattcttccattctttcctccatccacctattcacccatacaaccttccatccccccatccatccaaacatccatccatccactgaacaaatccatggcactgccccactggccttcttttatttcctctgtgaaccccttctctcctacctctgagccttcacgtacttcccctcccattcccatatacacccctagggaatacctactcagcttaagaaaagcctcacctaaatcccagtctgaagtaggtcctcctgctattcctctcctgaagaacctcattccctccttttcgacagttgtcatagacatcaccaaacgtttgcttttgggttgatttacttattcctgtctccctgaccagactggaagctccaagagggcaggcattaggtcttccttcagtgcctaccccagagcctacctggcccacagtaggggctccatagggaagtggtgaatgctggcattgagtgaacttagaaagtactgtgtgcagggcacaggcccagatgtcttgtcaggatttgcttctgaatgtgactgcctctcaaggcttagcatctatagaaagagataaagaatgtgtatgcaggattgcaatgcangatgcgactcaggaaggaggcanggagggatggcatttnggag

SEQ ID NO: 261 - DNA, 795 bp, Homo sapiens
  misc_feature (731)..(731): "n" may be a, t, c, g, other or unknown
  misc_feature (755)..(755): "n" may be a, t, c, g, other or unknown
  misc_feature (795)..(795): "n" may be a, t, c, g, other or unknown
atataccccccttcccccatgttcctttatctcaatgaatggcctcagtaatcctgaaaccaaggtcggctgcatcttcttcctccctgcaccctccaggagcaatccatcagtaagtcctatcagcgtgacaccgtgaatgcctctcctcctcgcttccttccagttgcccctgcctggtcacaggcctcatcctccctctctggcccaattggatgccctctgcttgcttgcctcgtctctgactgtatcctgtgggtgacatgcatgcatacccggtaccacttaaaccccccatgggctccaggggccccacttgtggtgtaccaagccactctatccccttggccctgtgtcccttccttttcctctcttgctccagccttacttgtaattcctcagttcacacctccatcatgtctgtgagtctcaagatctcctagcccttctccagacctgttcaagacacccctagcccttctccagacctgttcaagacacccctagcccttctccagacctgttcaagtgcccctttcatcactccccatgtgcagttccatagttgtccatttcacattgacttccatgtatctggagggcaggagccagctctgacccaccttgccattcccagagtaccctctcagtgaatgtggatgggtccccctgccttggtaataagtcatgtgattgagcagatggtgtgacttgcccctcttgcttggaangtcatctgcccagaacttgtgaangtgcagtggcctgagccaggctttcaagaggacaaccggn

SEQ ID NO: 262 - DNA, 328 bp, Homo sapiens
agaaagatgtgactacttttgacaacgcctcaaacttttctaaccataaaagtaattatactggtgagaaatcctagaaatctgaagagtgagataaagcctttaaatggttgtcacacttcattgtaggtaagataattcatactggagaaaacgcctacatgtgtgaacaatatggcaaaacttaatgctcacactttattgctaggaaagcatttatacttgagataaattatacaaatataaagactgtgaaaaagccatcattatctgctcacattttactcaacaccagagagttcctgcttaataaaagcattataagtgc

SEQ ID NO: 263 - DNA, 879 bp, Homo sapiens
  misc_feature (863)..(863): "n" may be a, t, c, g, other or unknown
gcatcattcctttaattgagcagagttaactggatcaaattatttatgggagagagaggaaaagttataaagaattatagtaatttttaatttccaccaatatactctttgtaagtgaatcactctataattactttctgttgcactgaatgcagcaacaataacacaatagtattttaaggcactggtttttggcatactctaaccttgtaattatttaaataacagccaagtttactcatgtttttgattctgtcaagaaaaaaaaaaagttcctttactcgaaagtgatggccgaaacagaatcggaaatttgttttcttgaaattacataaatacacagaaaatggcacttattagcttttgttaaaacattaccttacctaatcactgcataaaagtccagatttgtagaaaattgtaattttctcagtatctaaaactattttgctttccattaagtttctatttgctattttctcagaattttacaattaaagataaatcacaaactgtttgtttttcttaaagttctttgagaaaatgtctaattatacaatccttggacaatactgtgtttttttggtgctgtgttttttaagaagtcctacttactggaattttgactatttggatatttttgtttttaaaaggggaggggaatttgcttaatacttctaaagatgtgaattgataattgatattaaaatagaattactctcaactcaccagaattaaattttatatctgcatatttaacactattagctcatataaattataagaaaaattttcaaaggactgggtttaattttttggatatgaaatgaattgcctttctgcctttcttaagactattttgnacctatattgcactac

SEQ ID NO: 264 - DNA, 693 bp, Homo sapiens
  misc_feature (664)..(664): "n" may be a, t, c, g, other or unknown
  misc_feature (682)..(682): "n" may be a, t, c, g, other or unknown
  misc_feature (690)..(690): "n" may be a, t, c, g, other or unknown
acactgcgccgcggctgcgcagtacacgggaggcttttaattccattgtggagaggacggcgttatttttattaactggaggcgacggcggctgcggcggcggcgggacccgcctcctccggggtatgaaaatcggcagtgggttcctgagtggcggcggaggtaccggcagtagcggtggtagcggctccggcggcggtggtagtggcggcggcggcggcggcggcagcagcggcaggagggcagagatggaacccacctttccccagggtatggttatgttcaaccaccgtcttcccccggtcaccagcttcacccggccggcggggtcggccgcccctcccccgcaatgcgtgttatcctcctctacctccgcagccccggccgctgagcccccccctccgcagccccggacatgactttcaagaaggagccggcggcgtcagccgcggccttcccctcgcagaggacctcctgggggttcttgcagtctttggttagcatcaaacaggagaaacccgcggatcctgaggagcagcagtcccaccaccaccatcaccaccaccactatggggggctgttcgctggagctgaagagaggtctccaggcctaggaggcggtgaaggggggagtcacggcgtcatccaggacctcagtattctncaccagcatgtccagcancaaccagncca

SEQ ID NO: 265 - DNA, 809 bp, Homo sapiens
  misc_feature (738)..(738): "n" may be a, t, c, g, other or unknown
  misc_feature (767)..(767): "n" may be a, t, c, g, other or unknown
  misc_feature (807)..(807): "n" may be a, t, c, g, other or unknown
tctgggtgatcttggcaaactaacttctgagcttctgtgcattataggcattcagcacatattcgttggatgaaaaatacttttcttgaaagtttatgaagttgtaggatgcccagcagcccccttttctctatttccttcctcttgaagcaagcgttgactatacctctttccctaacccttagtgtaccatagcttcttccaacctctctccaatccattacttttttctgagctaccctgtctcaaatctaactcaggcctttttgcaagaggaagtttaagccattgtttactcattaactcacttgacccttagaacaatcgtgggaggtgtttatttcggaaaggaagctaaagcacaggacagaaaaataaggtcatagcgtgaactagtaagtagcagaactgggaacataggactgttattttcaaacactctaaacttcactgcagttgcaaatttgcaaccaaaatggccgccttgaaagggtcttttgcagtaaaatctcagtgtccaacatcaaagacagttcttcagggcctccaattaactatacatcctgcccccagctgctcatctctgcacctctaacacgtacttcacagagtaggaaattgggctttctccttcaaaaagaaaagtagagaaggcctgagggcagtgtaattaaaatgggagaagtagagaccacgaattacttggatgaattcataactgggtggtctctgaggcanggattattatttttcctggattttaagcntaaaagtagtgatttttgcattggtaccaaaaacaaaatngc

SEQ ID NO: 266 - DNA, 800 bp, Homo sapiens
  misc_feature (746)..(746): "n" may be a, t, c, g, other or unknown
  misc_feature (765)..(765): "n" may be a, t, c, g, other or unknown
  misc_feature (795)..(795): "n" may be a, t, c, g, other or unknown
aacaggcaccgctgcggggactggagtcggcggagaaaaccggggtccccagcgctggggcccgcggcgccatggctcacgtcggctcccgcaagcgctcgaggagtcgcagccggtcccggggacgggggtcggaaaagagaaagaagaagagcaggaaagacacctcgaggaactgctcggcctccacatcccaaggtcgcaaggccagcacggcccctggggcggagggtgaggaccacaggcatcggggagaggaggcgcagttactacccggggaagtcgggcgagcagtggtcggggacgctcagtcatgcctctgtgcagccgggcctgagatgtgagggccaggcgccgcaggagccaggaaggggctcctctgggaagctccatctctgttctggaaagcccctcaggaagcgctcaccctgtagccggcctgtgcctgccccaggccagagcaggggacgaaggtttacctcttcccctcctggctttccagcctcaccttctccctgcatcacagagagaagcaagcagaaggcccggaggagaacaagatccagctcctcctcctcttcttccagttcttctagctcctcttcttcctcctcgtcctcctcctcttcctccagtgatggccggaagaagcgggggaagtacaaggacaagaggaggaagaagaagaagaagaggaagaagctgaagaagaagggcaaggagaagcggaagcacagcaggtggangcttttgccgggccccttngttggaccagtggcaccgatcaacttgggnaggaa

SEQ ID NO: 267 - DNA, 829 bp, Homo sapiens
  misc_feature (661)..(661): "n" may be a, t, c, g, other or unknown
  misc_feature (792)..(792): "n" may be a, t, c, g, other or unknown
  misc_feature (806)..(806): "n" may be a, t, c, g, other or unknown
  misc_feature (821)..(821): "n" may be a, t, c, g, other or unknown
agctggcgtcagggacttcctcgggctccctaaggacctgctctcccagttctctactcttccctctgaggcagaggctgggcaggacccacaggcagcccttagtgacccgcactccacaccctgtctgccttaggagaaatggggtctgtgaatctgggctctccctccatgctgccgtgtctgcggagccaggtgccggcgtggcctctgctagccagcagagtgagcatgcacagctggtccagggcacggtgttttgtttgcactgttccagacatcgtcatctccatctgatgatgatcactcggcagctttgagccctggcacagcttcgggtcgaagcacgttcccttttcaggagagttgagccgagctttccttcacgcagacttaatttcctggacttagtgctaacgtcaagaccaaacctgtaggaaaagagctttaactacacaaacacatactgacagattcagccaaactccgagagtcccagaccggagcctgtgtccctagcgcaggtgtgtctgtcgggcagccgacggtgcctgtgcaggcagtggctggacaccactactcccttctcttccctccctgcttgatcgcgctgtgggattcctgatgctgtgtgggtctctggctccccctgctgtagaangggagtactggccctgggacacagaactgcaaggccagtggcgccaggtaccttccacaggaagaagatttgaggacatttaaaggtacccacttttacccgtgccaccttctaccccagttcctggcagncatccaaaatttgnctccaagacatgttnacagacaa

SEQ ID NO: 268 - DNA, 847 bp, Homo sapiens
  misc_feature (788)..(788): "n" may be a, t, c, g, other or unknown
  misc_feature (807)..(807): "n" may be a, t, c, g, other or unknown
  misc_feature (822)..(822): "n" may be a, t, c, g, other or unknown
tacgaatgtggccggtgtgggcgagcctttactcacagctcaaatcttgttctgcaccatcacattcacactggaaataaaccatttaaatgtgatgaatgtgggaaaacttttggactcaattctcacctccgtcttcatcggagaattcacactggagaaaaaccctttggctgtggtgagtgtgggaaggctttcagtcgaagctcaactcttattcaacatcggatcattcacacaggagagaaaccctacaagtgtaatgaatgtggaagaggctttagccagagcccccagttaactcagcatcagagaattcacactggagagaagccgcatgaatgcagtcactgtgggaaggccttcagtcgaagctccagccttattcagcatgagagaattcacactggagagaagccccataaatgcaatcagtgtgggaaggccttcagtcagagctcaagccttttcctccatcatcgggttcatactggagagaaaccctatgtatgtaatgaatgcggcagagcctttggttttaactctcatcttactgaacatgtaaggattcacacaggagaaaaaccctatgtttgtaatgagtgcggcaaagcctttcgtcggagttccactcttggtcagcatcgaagagttcacactggggagaagccctaccagtgcgttgaatgtgggaaagctttcagccagagcttccagctcaccctacatcagcgagttcacactggagagaagccctatgactgtggtgactgtgggaaggcctttancccggaggtcaacccttantcagcatcagaaagntcacagcggagaaactcgtaagtgc

SEQ ID NO: 269 - DNA, 848 bp, Homo sapiens
  misc_feature (720)..(720): "n" may be a, t, c, g, other or unknown
  misc_feature (764)..(764): "n" may be a, t, c, g, other or unknown
  misc_feature (796)..(796): "n" may be a, t, c, g, other or unknown
  misc_feature (825)..(825): "n" may be a, t, c, g, other or unknown
aaactagaataataaaagggaaattataatattcacaaacttgaagcacactggaattctgctataaatgtttgttatagaatagaatttggtgcagggtgaatttgatttaagagggtttaaattatatgaactgtgtgaaaacatttagatctaaggctgaaaacaattatcaactcaatgaaattttaatatggtatttcacaactgtgacttcatgacagctgttacaagtgtcaggaatggtaaatatgtactatttactaatgccaacactgtacagaagtgctttatatacaataaatcatttattactcacagcaatccttaccagtagatgctatttctatctgaggtttgtggttaaggaaaaagagtgaactgagtaactggtgtgagttcactcagtgagtaagtaccagagcgttgtcaagagaaccaagtgtagcatccttcgtaccatagtcacagtcctacagcagaaatttaagagagcatcaagagagatgcttgcttacccgctttgtatttacttgctctctgagaagtctacttctcatttatttctggaacacaattaggtaaactctatctatttcaaatgttctcttcagttgtctagtttgaagcctttgaggattagcaccttccagtttattcaagggaattggacaaagaaatgagaatgaactataggattaaaggataaaactaaagaangtgagttagaagagtttgagttcatgggcgcagatttaacatanaataatcgaataattagtaggcataaaaaggnggatatcgacctaactagtagcctggganaaatggggatttggctaaactca

SEQ ID NO: 270 - DNA, 831 bp, Homo sapiens
  misc_feature (755)..(755): "n" may be a, t, c, g, other or unknown
  misc_feature (765)..(765): "n" may be a, t, c, g, other or unknown
  misc_feature (784)..(784): "n" may be a, t, c, g, other or unknown
ttaatactcttgacaaaagtatgagtggatatctctcaggttttcaagctagaaatgcccttcttcagtcaaatctttctcaaactcagctggctactatttggactctggctgacattgatggtgatggacagctaaaagcagaagagtttattcttgcaatgcaccttactgacatggccaaagctggacagccattaccactgactttacctcctgagcttgttcctccatctttcagaggaggaaagcaaattgattccattaatggaactctgccttcatatcagaaaatgcaagaagaggagcctcagaagaaattaccagttacttttgaggacaaacggaaagccaactatgagcgagggaacatggagctggaaaagcgacgccaagccttgatggagcagcaacaaagggaggcagaacgtaaagcccagaaagaaaaggaagagtgggaacgaaaacagagagaattacaagaacaagaatggaagaaacaacttgaattagaaaaacgcttagagaagcaacgggaattggagagacaacgagaggaagaaaggagaaaagacatagaaagacgagaggcagcaaaacaggaacttgaacgacaacgtcgcttagaatgggagagaattcggcgacaggagcttctcaatcaaaagaatagagaacaagaagaaattggcaggttaaactctaaaaagaagaatcttcatcttgagttggaagcactgaatggcaaacattancagatctcangcaggactttcaggatgtnccgacttcaaaaagcaaacttcaaaaagactgggccctggaagttct

SEQ ID NO: 271 - DNA, 783 bp, Homo sapiens
  misc_feature (637)..(637): "n" may be a, t, c, g, other or unknown
  misc_feature (711)..(711): "n" may be a, t, c, g, other or unknown
  misc_feature (733)..(733): "n" may be a, t, c, g, other or unknown
  misc_feature (774)..(774): "n" may be a, t, c, g, other or unknown
cttacgagcccacaggccccggagtagcagcggggaggccgggagcccgcgggccggagccgcccggccgaggcgtgggggctgcggggccggcccatccgtgggggcgacttgagcgttgagggcgcgcggggaggcgagccaccatgttcagccagcagcagcagcagcagctccagcaacagcagcagcagctccagcagttacagcagcagcagctccagcagcagcaattgcagcagcagcagttactgcagctccagcagctgctccagcagtccccaccacaggccccgttgcccatggctgtcagccgggggctccccccgcagcagccacagcagccgcttctgaatctccagggcaccaactcagcctccctcctcaacggctccatgctgcagagagctttgcttttacagcagttgcaaggtaacctccgaggctatggcatggcatccccaggcctcgcagcccccagcctcacacccccacaactggccactccaaatttgcaacagttctttccccaggccactcgccagtccttgctgggacctcctcctgttggggtccccatgaacccttcccagttcaacctttcaggacggaacccccagaaacaggcccggacctnctcctctaccacccccaatcgaaaggattcttcttctcagacaatgcctgtggaagacaagtcagaccccccanaggggtctgaggaagcccgcanaagccccggattggacacaccagaagaccaagatttaccgncttgccaaa

SEQ ID NO: 272 - DNA, 775 bp, Homo sapiens
  misc_feature (742)..(742): "n" may be a, t, c, g, other or unknown
  misc_feature (755)..(755): "n" may be a, t, c, g, other or unknown
  misc_feature (760)..(760): "n" may be a, t, c, g, other or unknown
aacactacaaaattttcaagcacagcctatcggccatagatagtatcaactagaggcaatgtctttagtttttattatttttgaacctggagcattttctgttggacgttacaggatcttactgctttaaatcatacattattaaaaaaaatgagggtttattctttgaattacccttttgtatgcaggagtgaagactgcttttttagttgaccattcaaaatcgttgaattttagtttttgcagactactaaaatttgcagtgactttttttttgtaaggggggtaaatgaaacatttagcagcctttgaaatcagcaagttgcttagatagtactttagattttgaaactgaatataacagtgttagaaaagtatgtgtaaggaattgtatttacatgcatactagtagtacaatacttatagctgaatttggttggcaaaagtatgttttcattttattacgactgctagtcaggtaagatatggtgggattctttctgtagtgttttcagtgtctgggcaaggggaggagctcgcctgtgttatatgaggggttaataccaataggataggaacagtttttagactgttaattgtgaattttacatttgggtcatcactgttgtgtagatttgttcacctattaaaataatgaaaaccctcatttgagtgtgtgtgtgtggtgggatcataggaattgatttgtggagtgatctttcaatagcactgaagacagaantttggtatttggnatagnctacaccaaagctta

SEQ ID NO: 273 - DNA, 783 bp, Homo sapiens
  misc_feature (694)..(694): "n" may be a, t, c, g, other or unknown
  misc_feature (746)..(746): "n" may be a, t, c, g, other or unknown
  misc_feature (769)..(769): "n" may be a, t, c, g, other or unknown
gcatcgagtaatccatgaatgggaagatggttcccaggaacattcacccagcaacaaaaaaattaaacacaaattggggcttgaatttttgtggcaatcaatgactgaaaaaaaaatagaaaaaagaaggacatgacctttttaaagacaaatgaagactcattttcagtaactagagtcttaaaaactattttaatctgaatgcagatcattgtttacccacagagagttttatgacaatgatttcactgacatgcagaatcaaatattatgatcaccaccagcagccaaaaaaccctattctttgcccaaggagtagtagaaatgtagactagacagacaaacagggtctcctattttgcctcattagtgccacactctatacaactacagtcacgaaggggtcacatttggttataattactattagaataatatgggagtgtgatgtttgtggtggaaacttgcccatgacttatgtaaccatttctgctgacaaattttaggatctaaaaactttgtgggtttttttgttttgtttttgtttgtttgtttttgggacagtctcgctctgtcacccaggctggagtgcagtggcacctccgcctacagtgttcaaacgattctcccacctcagccttccaagtagctgggaccacaggcacacgtcaccatgccctgctaatttttttgnatttttagcagagatggggtttcaccatgttggccaggctggtctcaaactnctgacctcaagtggcccctgctnagcctccaaatgct

SEQ ID NO: 274 - DNA, 800 bp, Homo sapiens
  misc_feature (662)..(662): "n" may be a, t, c, g, other or unknown
  misc_feature (704)..(704): "n" may be a, t, c, g, other or unknown
  misc_feature (794)..(794): "n" may be a, t, c, g, other or unknown
  misc_feature (799)..(799): "n" may be a, t, c, g, other or unknown
ttttttccagaaatacttgcagacttgaaggaattatcagtctttcattttctatcatcagtgtcctatgatagtttgtgcttccctccctcatccctttgttcatgtcactctgttcaccaacccactctgctgaaatgtcgttatttcttcaaggcccggaggaaatgctaccactctcatcagagggttcagagatgggcagtgagaaggagcagagtccagaaccacacctgcctgaggaaggggaagggggtaagccttggagagtggatgactcagagggttcttggatcccacctggggagaaggagcatgggcaagagagcctgtcggatgaactgcaagaaactcatccaaaaaagccatggcagaaagtcactgcccgggctcgagagctaggggaccccattgctcatccaaggcatgaggcagatgagaagccctttatatgtgcccagtgtggcaaaaccttcaataatacctccaacctgagaacacaccagcggatccacactggtgagaagccttacaagtgttctgaatgtggcaagagcttctcgagaagctccaaccgcatccggcacgagcggatccacctggaagagaaacactacaaatgccccaagtgccaggagagctttcggcggcgctcagacctnaccacgcaccagcaagatcacctaggcaagcggccataccgntgtgacatctgtggcaagagcttcagccagagtgcccgctagctgtgcattaccggacccacctggagcccagaccctacatttggttgngaatnt

SEQ ID NO: 275 - DNA, 865 bp, Homo sapiens
  misc_feature (704)..(704): "n" may be a, t, c, g, other or unknown
  misc_feature (714)..(714): "n" may be a, t, c, g, other or unknown
  misc_feature (845)..(845): "n" may be a, t, c, g, other or unknown
  misc_feature (854)..(854): "n" may be a, t, c, g, other or unknown
  misc_feature (863)..(863): "n" may be a, t, c, g, other or unknown
acttgcacttactcatcttctagccttatgaccaggaacctttgttttgggctcaagtacacatcctgatttggtttctccctgttgtaatttgagatttcccaaattaagtcttataatgattaggttttgttctgagttatttctagagaaagaaagtattttagtatgtgtaaattgtacaataatttttttgctgttgtactcactgctaatagtggattgtatagggtggtgtttttatttcatttattgtagacaaaaataatgaatttagtatacacatacccactaattcaagtatgtcagagcacaaagttggcagctggttatatttaattcagcccctctgaaaagcacatacagtctatactttgtttataaatatcctaggtcctccctgcccctaaatatatattttggtgaagctgtggtgcactattaattttctgtttcaaaatgcaatctaaagatgcaataaatatgatgaccttgatagttttaatgaaatcttcaattcttgcagctgtgttttggaaagtgattaagcaatatttctcaaacctgatgattcttggatatttagctattgtcctccaaagagtcatcgtttcacgttttcaaacatgtgctttgtgctgaagattcttgtcagatatcctgtgcttccagagtatttttatcttcaattttatttaatttgnttcattttgntttcataagacaatgtttcagatatgtaatggggcaaaccactatagatttctggtggatagaaaaatgaaatggtactaataaggttaaaatgacccttcgttgactatcaagtactggtgatcctttanttagaatgnatgtctcanaa

SEQ ID NO: 276 - DNA, 775 bp, Homo sapiens
  misc_feature (662)..(662): "n" may be a, t, c, g, other or unknown
  misc_feature (678)..(678): "n" may be a, t, c, g, other or unknown
  misc_feature (758)..(758): "n" may be a, t, c, g, other or unknown
  misc_feature (765)..(765): "n" may be a, t, c, g, other or unknown
gttacttaagaactctttgtgtccgtccttctaatggcaccaatgcctcccatcaagccttaaacctcacctaaattatgtcattgggctttttcatccataaatgagcataccaggtgccaagggaatcaatatgccatttcacatgccttagaccagtgtccaaagaaagataaaatgttattctataaaagctttctcccagcatttctattcctttacattttgtgccatatacaactatggttttttaatgatcttatttctgacagctgtttttcttcagaacatcaacagcttctttcctaaattagttttagtatgagttccatttctaattagctcaaattaaagtcctagagagcagcgaggtaatatttaaaccctcaggctaaaatttcggagtaggtgcagaatgttgactctaaatgagtttttcctgtgacataacacgcatgaaagcaggatttctttcatgtgtgaaatgtcttaaatcagacttaccctttgtgattctcttttagctttaaatgtcatttaagaagaaaaaagaaaagaaaattaagcatgacattccccaatatcctctgctcactgtgttataatccctatcactccacaagtgaattggagagagtgaagacacaatgaacagaaacttncctgagcttcacagangagtgtctccgggaccacacagccttcaccatgtccatctacgaaggctgtggcaagccatatccacaaaggatgcctgnttcctgncttctcgggt

SEQ ID NO: 277 - DNA, 891 bp, Homo sapiens
  misc_feature (871)..(871): "n" may be a, t, c, g, other or unknown
gataacatttagtaatttaggagagaaaattaaaggcattgttgaaaatatgggaatcaacgcaaataacatgagtgactttattatgaaagttgatgcccttatgtcctctgtgcctaagcgtgcatctcgatatgatgtcacatttcttagggagaatcacagtgttataaagacgaatcctcaagagaatgatatgttcttcaatgtcattgctattgttgatccattaacaagagaagcacagaaaatggcacagttgttggttgtacttggcaagattatcaacatgaagataaagttgttcatgaactgtaggggcaggctttcagaagcccctttagaaagcttttaccgttttgttctggaaccagaactgatgtcaggggctaatgacgtttcttctcttggaccagtggcaaaatttttggatattcctgaatcacccctcctaatcctcaacatgattactccagaaggctggttggttgaaacagtgcacagcaactgtgaccttgataatattcacttaaaggatactgagaaaactgttacagcagaatatgaactagaatacttactactggaaggacaatgctttgataaagtgacagaacagcctcctcggggtctgcagttcacactaggcacaaaaaataaacctgctgtggttgatacaatagtgatggcacatcatgtaagtattatttaattgatggtgtttaatttgatgtttggtgaattctctggtttcctaagagtaaaatgaaataatctttattctgctgtgctgaacagtttgcagaaaacaaaattgatctttgataagataaataaaaatggggaaaatcatactttaataattttgaanggtatggaaaactcttactt

SEQ ID NO: 278 - DNA, 813 bp, Homo sapiens
  misc_feature (757)..(757): "n" may be a, t, c, g, other or unknown
  misc_feature (781)..(781): "n" may be a, t, c, g, other or unknown
  misc_feature (799)..(799): "n" may be a, t, c, g, other or unknown
aagaggctgcgcgctgctgtttggggagggggtgtgtggagccgggtcctgtgtccgcagtggctgctgtcggggggtcgcctgttcgcggaggtgcggagagactccttgggggtcgagcactgtggctggcatgccccagtgttttggataccaatgcataggactccatagtaatcgaatttaccagaggcgaacgtcatgagcatagtgatcccattgggggttgatacagcagagacgtcatacttggaaatggctgcaggttcagaaccagaatccgtagaagctagccctgtggtagttgagaaatccaacagttatccccaccagttatataccagcagctcacatcattcacacagttacattggtttgccctatgcggaccataattatggtgctcgtcctcctccgacacctccggcttcccctcctccatcagtccttattagcaaaaatgaagtaggcatatttaccactcctaattttgatgaaacttccagtgctactacaatcagcacatctgaggatggaagttatggtactgatgtaaccaggtgcatatgtggttttacacatgatgatggatacatgatctgttgtgacaaatgcagcgtttggcaacatattgactgcatggggattgataggcagcatattcctgatacatatctatgtgaacgttgtcagcctaggaatttggataaagagagggcagtgctactacaacgccggaaaagggaaaatatgtcanatggtgataccagtgcactgaaantggtgatgaaggtcctgnggaattatatactg

SEQ ID NO: 279 - DNA, 842 bp, Homo sapiens
  misc_feature (765)..(765): "n" may be a, t, c, g, other or unknown
  misc_feature (785)..(785): "n" may be a, t, c, g, other or unknown
  misc_feature (825)..(825): "n" may be a, t, c, g, other or unknown
ccaaaatccaatagggcagtcattgagccttaaagttccaaaatgatctccttagacccgatgtctcacatcgaggccatgctgatggaagaggtgggctcccatggccttgggcagttccaccccctgtggctttgcagggtacagcccccctcatggctgctttcatcatgggctggcattgagtgtctgtggcttttccaggcacacggttgcaaactgtaggtggatctaccattctggggtctggaggatggtggccctcttctcacagctccactaggcagtgccctagtgaagcctctgtgtgggagctccagacccacatttcccttctgtactgccctaacagaggttctccttgagggctctgcgcctgcagcaaacttctacctggacatccagggatttccatacatcctctgaaatctaggcagagctttccaaatctcacttcttgacttttgtacaccaccacatggaagccattagggcttggggcttgcaccctctgaagccatggcctaactggaccttggccccttttagccatggctagagcagccgggatgcagggtaccatgtcccaaggctgcacagtgcaagggggactgggcccaaaccacaaaaccttttttcttcctagtcttccaggcctgtgattggaggggctgctcttaaggtctctgacatgccctggagagattttccccattggcttcgtgaataacattcatcttcttggtatttaagcaaattctgcancaggattgaatttctcccanaaaatgggttttctttggcatcattaggcttcaaattttncaaactttcatggtctg

SEQ ID NO: 280 - DNA, 862 bp, Homo sapiens
  misc_feature (725)..(725): "n" may be a, t, c, g, other or unknown
  misc_feature (812)..(812): "n" may be a, t, c, g, other or unknown
  misc_feature (825)..(825): "n" may be a, t, c, g, other or unknown
  misc_feature (833)..(833): "n" may be a, t, c, g, other or unknown
acagtctccactgaaaggctaaatgggaggatcttcccccgtgacctcaaaagctattgtggatgctgatggaagaatttatattcggaactggcagggtggcatcctgtctgggggctttgagaagaacccgaaaccaattttcactgagggcaagaaccagctggagattcagaatctacaggaagactgggatcactttgagcctctgttgagttcccttctgaggaggatgccagaattagagactctggagatcatgaagttggtgaactgcccagagaccttcacaccagacatgaggtgcatcatgggcgagtctcctgcagtgcagggctactttgtcctggcaggaatgaactctgctggcctttcatttggtggaggagccggaaagtaccttgccgaatggatggtacatggttatccctcagaaaacgtttgggaattggacctgaaacgttttggagccctccagagcagccgcacctttctgcgccaccgggccatagaagtcatgcctttgatgtatgatctgaaggttccccgctgggacttccagaccggtaggcagttacgcacctctcctctctacgaccggctggatgcacagggagccaggtggatggagaaacatggatttgagaggccaaagtactttgttccccccgacaaggacctcctggcattggagcagagcaagactttctataagccagattggnttgacatcgtggagtctgaagtcaagtgctgtaaggaagctggtgtgtcaattgacatgtcctcttttacaaagtttgagatacatncccttgggatcangcctttanaagttctacagtacctttttttccaggga

SEQ ID NO: 281 - DNA, 842 bp, Homo sapiens
  misc_feature (804)..(804): "n" may be a, t, c, g, other or unknown
  misc_feature (812)..(812): "n" may be a, t, c, g, other or unknown
  misc_feature (821)..(821): "n" may be a, t, c, g, other or unknown
acactgacttctggacgtggtcagggtggctttctctggctggcatggacttgagcagaaactcattgccggcttcctccttgcacgagcaccaagtgattcccaggtcccccatcctcccctgggacatcgaggacacacaaaaaccttgttcaccctccactgagagcggggctagagatggatgctgagtacaggaagggtgtgtgaggattcctttggctccactcttgtttccaactattgctggtcctaggcgcccagtcctgagcaaccatgacgatggagactctccccaaggttctagaggtcgatgagaagtctccagaagccaaggacctgctgcccagccagaccgccagctccctgtgcatcagctccaggagcgagtctgtctggaccaccacccccaggagtaactgggaaatctaccgtgcccctggacatgacaacatgactctaggggttagtcagctgaagaagtttagttcctaattatataatatttacatcagaggcagtggggtaggctaggggatgtcactgtttccgcttgaccttatctttctcattgaccactgtcttctctgaacttgatcattagccaaggacaaaatgcatgttgccctaatttctttcctacccctgcctctatctctgcatctagaacagctaaatggaaagatacagagggatcctgtaaggttggtttccctttacgtccatcaagatcaaaattgagagaatcaagttccatatctgaatgatctggaggttctagagatggaattaggaaactggacnggcattgncttgacctnccagaggttttacttcatcct

SEQ ID NO: 282 - DNA, 856 bp, Homo sapiens
  misc_feature (718)..(718): "n" may be a, t, c, g, other or unknown
  misc_feature (798)..(798): "n" may be a, t, c, g, other or unknown
  misc_feature (822)..(822): "n" may be a, t, c, g, other or unknown
  misc_feature (849)..(849): "n" may be a, t, c, g, other or unknown
cggtaatcaaacccaattatatcagaatacctttctgaatttgagatttttgctctacattttataatgaataaggctattttttgaaggtatttcattttgaattctgtcattaacctcaaaagctttctactgctttgcggtgaaggcaaaatattcgataactcaacttaggccccactgttccccaacttcatggaggccagaagactttactttgttccataatgaaatataaacacagaacaaagttgtaaaagtagcatggatatgttgaaactttggacaagcttcttgtcctttggaatatgggatttatattcatctcctcaatatcccatgtatgcacagaaacttcagttctatttctatagacacaggaacctagtgactattgaacgtaattgtaataaaatgctgctcattgagccaaagagaagaaatgatttattaacatggggacaccaagaaaaacaaagtatgcttttattccctttgtcaagctcagttttagggttttttcttttttttatagtgacaatccatagatatagacattcctaaaagaaaaataaataattcagtagatatatgtcactgttacctgaatatggaatgaatttgatgttttttattttgttgagacagggtcttgctctgtcacccagactggagtgcagtggcatgatcacacctcactgcagccttggcctctcangctcgtgatcctcctgcctcaaccctcgcaagtagcttgggactacaggcgtgtgccaccagtcctggctaattttttgnagatataagggctcatgatattgnccagctgaattgaggtatttaagtgantttcatg

SEQ ID NO: 283 - DNA, 735 bp, Homo sapiens
  misc_feature (659)..(659): "n" may be a, t, c, g, other or unknown
  misc_feature (712)..(712): "n" may be a, t, c, g, other or unknown
  misc_feature (731)..(731): "n" may be a, t, c, g, other or unknown
agtggaacatggcgacttgcgccgaaatcctgcggagcgagttccccgaaattgacggacaagtcttcgactacgtgaccggcgtcttgcacagcggcagcgcggacttcgagtctgtggatgacctggtggaagctgtaggggaactattgcaagaggtgtccggggacagcaaggatgacgcgggcatcagggccgtgtgccagcgcatgtacaacactctgcgtctggctgagccacaaagccagggaaatagccaggtgctactggacgcccctatccagttgtcaaagataacggagaactacgactgtggaaccaaacttccaggactgctaaagagggaacagtcctcgacagtgaatgcaaagaagttagagaaggccgaggctcgacttaaggcaaagcaggagaagcgctcagagaaggacacgctcaagaccagcaaccctctagtcttagaagaggcatcagccagccaggcaggcagcagaaaggagagtcggttggaatcatctggcaagaacaaatcctagtcgtctcccacgaccgcaacttcttgaatgccatcgccacagacatcatccacctgcacagccagcggctagatggttaccggggagactttgagaccttcatcaagagtaagcaggagcggntgctcaaccagcagcgtgaatatgaggcgcagcagcagtatcgccagcacatncaggttttcattgaccggnttcg

SEQ ID NO: 284 - DNA, 862 bp, Homo sapiens
  misc_feature (729)..(729): "n" may be a, t, c, g, other or unknown
  misc_feature (804)..(804): "n" may be a, t, c, g, other or unknown
  misc_feature (813)..(813): "n" may be a, t, c, g, other or unknown
  misc_feature (836)..(836): "n" may be a, t, c, g, other or unknown
atataatgctgtattcattgatcatatttctgtatttaaataagtacattttttaaaacatcataaagtggatcagtaatgctgtaatatcacatttcatgtattatacaacatttttgaaatggagtactccaaagtaatttgcttcttatggttaccaaagtttaaagaataccctaacatgcactccaagattttaagaggaaaggctttgtgtttttcattactgtattatgaaatctgagagtgcaaaactagttttcttaggtaaaccccgtaatcagtttccacatttacctgtaaaagtcagtggagggcatacatctggaagtagtagtggcggtacacaatgtgtgttaatatgatttccaaggggtacctagagtaaactttcttaatcacagatctgatctgagcatgccactcctttcttaaaatcttttgttgattttccatttccctaaaaggaaggcccactggagcatgggccttgcaaagtcctctttctggcttctgcctgcctgccttttcagcttcatctctgccatcttccctgaatgaacttttgtcagtggcctcgctctttctacctatgagatgttgtttctgcatgttcttgcatggaattctcttcctcccaaccctgtttcattcctttaatctgtacaactctttcttatcctgaagtctttatgttaaggttgccttttcaggaagacttttaattgnattagctaattaattaattaatagtctgaggtatttggagctgagattctatggggattagttgctggaggtagnttagagccngatgcgaaggctttctaaactgngctttcaaggtttgaacaggaaatga

SEQ ID NO: 285 - DNA, 839 bp, Homo sapiens
  misc_feature (771)..(771): "n" may be a, t, c, g, other or unknown
  misc_feature (795)..(795): "n" may be a, t, c, g, other or unknown
  misc_feature (831)..(831): "n" may be a, t, c, g, other or unknown
tatggatatgcttattaatgcacttgtttcaaaatcccaaattgcacaaatgtgttaatattttaagaaacaaaatgaatcctacaaggagaatgatttttagccacacatagggttggatcttgagagtgacctacagaataaaagtacttttaaaataaagtagtcagaggctattcaaagggtaaaataatcatagtaccacattggtccacttgacactaaccaatcgatcatttttttttaatcaagaaagctagattctatcagataaaatcactgcttctaaagagtttaaatctagttagaaaaagttatagaaatgtttgcaaagataagtaacagatagagtcagtagaggataagatcaaaaacaaaaccaagcaaaagatgagttcaggggagtttgccatcaagttggcaaaactgacttacttagggaagaaagttataaaacaggaaaatatgagatgaaccttgagtgatgtggaagatttagataaatggaaaggaaggagaaaatggagttctttaggtggttgtaattggaggaggaaatgaatacacacatcttgttgacttaaacccagacattcagcagctctctatacatatctggaaaagactgcacagtcacctcctgtctctcaccccaggtattacttagaattattatcatatttcccttcctttaaagtaagtaagggtgattggtggccaatatgggagaactatggatttttccattacctaataataattgggatttantggggtctggttaagcattttccntattaactcctttaagccttttcaacagcccttgcnaaataggg

SEQ ID NO: 286 - DNA, 855 bp, Homo sapiens
  misc_feature (666)..(666): "n" may be a, t, c, g, other or unknown
  misc_feature (761)..(761): "n" may be a, t, c, g, other or unknown
  misc_feature (804)..(804): "n" may be a, t, c, g, other or unknown
  misc_feature (811)..(811): "n" may be a, t, c, g, other or unknown
gtttgaaatgctggtagttcctgaacaggagtaccctttagtttgtgttggtgtcagtagaggtagagacttcaaccaagtggttcgatttgagacggtcaatccaaattctacctcttcatggtttacagaatcagataccccacagacaaatgttactcatgtaacccaactggagagagataccatccttgtatgcttggactgttgtataaaaatagtaaatctccaaggaagattaaaatctagcaggaaattgtcatcagaactcacctttgatttccagattgaatcaatagtgtgcctacaagacagtgtgctagctttctggaaacatggaatgcaaggtagaagttttagatctaatgaggtaacacaagaaatttcagatagcacaagaattttcaggctgcttggatctgacagggtcgtggttttggaaagtaggccaactgataaccccacagcaaatagcaatttgtacatcctggcgggtcatgaaaacagttactgagaattgttgtgctttgacagttaactctagaaagaaagaacactaccactgcaacattaatggatgcttgaagctgtacaaaagctgcagtaacctgtcttcagttactttgtaatttattgtggcatgagataagatggggaaaattttgntttaagtggtatggatatatttagcatattgaaccacacaagtgcttaattcattggtatgtaatctttgtacatataggcagtattttttctgngaaacttcatattgctgaagacatacactaagaatttatgtangatatgnacttttatgagatgtacaagtaagtggcttatctgtacagatgt

SEQ ID NO: 287 - DNA, 851 bp, Homo sapiens
  misc_feature (689)..(689): "n" may be a, t, c, g, other or unknown
  misc_feature (805)..(805): "n" may be a, t, c, g, other or unknown
  misc_feature (831)..(831): "n" may be a, t, c, g, other or unknown
aaaataatttctaggttaagttggaaacatgtgataacattaaaaaatttaaaatgtctttgggcctgaaagattatgcctttacattcaacatgaaatccatggatggagtttatataaataaccatgtaggcttaccaatccttaaccctcttgtattagtccatactcacatggatatttccatatccacttttactcttgtgtcaaaagacaaaattaaaactcatttagttatgtatctaattggcttttattctcgattcatgaatcggtgcagcctccattctaatagaatcacagcttctactgggcaatggcagactattgggttttgtgaggtgggaatgaggaaacataacaatggggaaaataagctgattagttaacaatagattacttcagtttactttttttttataagggttaaagcagaggggactttcttgttctgactcaggtaggctagaatctcctgtttttaggaaaaactcgtctgttttgggatctatctgctttcttacagttgcagtttgattatatgacatttggcatgagtgactccactttgttaacacttgaaaggttattattcccatatggagtattcacatggatgtagccattggcagttatacaagatcgtgtttcttttctttgccccctgcccccgtcacctaagaacttgntagatattccatttctttttttaaaaaaaggatccagtgagtaaaggtgatagagagcatatggataaatagtgaagaagcttgatgaggggagtgggtagggttagaaaccccangggaattactcagggttaaaccctgncatttatatcaagccatatt

SEQ ID NO: 288 - DNA, 858 bp, Homo sapiens
  misc_feature (855)..(855): "n" may be a, t, c, g, other or unknown
agtagccgggtatggtggtgcacaactgtggtctccactattgggaggctgaggtacatcacttgagcctagcaggtcaaggctgcagtaaggtatgatcacaccactgcactctagcttgggtgacagagcaagaccccatcttggcaggtgggggatgcaagaaaaatgcaaggaacagatagagataaatagaaaacatataagaagacaatcatattaaatgtacatggtctaaatacccccaattaaaaagcagaggttttaggccatatacatttaatgtgattgtcttcttacatgtttttatcagagaaataaaactatcgccttcaagaaacacaagttaaatacaaagatgcaaacaggttaaaataaaagaatggaataatatataccatgcttacgctagtcaagagaaagctagagtagaaatactaatatcaggcaaagcatatttcagagttaaacacaacatttttccactatttgcagtcaaaagtatcgttaacactctctttactctgctcaaagttacagagttcttttgtataaacattagaacacttatcacagcctgcctataatggagaataattccatgttgtatactatacaacactcttactaaagtccattagacagaaatatgtagcatttgagacaccttccaattataaaactctatgcaaacaaaaattaacaacgcagatctgagactattatattatcctgtgaaggaaggtctgctgtctgcacagtggtcctaggctggctttctgaggactttgaatttcaagagggtcccctaactggtaatcatgggttactggatctagactatggaaataatgnggg

SEQ ID NO: 289 - DNA, 847 bp, Homo sapiens
  misc_feature (713)..(713): "n" may be a, t, c, g, other or unknown
  misc_feature (777)..(777): "n" may be a, t, c, g, other or unknown
  misc_feature (793)..(793): "n" may be a, t, c, g, other or unknown
aaaaaaaaaaaaaagaaatacaccatccaatcagaacaagtctgaaataaacatgttttaaaagcctgtaatgacagagaggtggcaaaaatgaagaggatgctcaaatgaaaaggaaaaagaagtttaggaagaactacctgaagccaagagacctcttactttgtccaggtgggaaactgaggcccagagagggaagaaagctggtcaaaggtcacacacccattggaagctgagtgagtgacactcaggaggtgaggattccatgggaagagcacctagaggtgattctcccacctgcagctcctgcatgggctctagaagctggtttaacacatgactcttctgagcctttgcctcatctgtgaaatggacacaatgacaactactacggggtggtggtgagcagaaggcaggttatcctctggcgtgtgagatactcagcccagtagagtgttagggactcataaaggcttgctattagaaattagggccccagtctcctaggacagggttttgttttgtttttgtttttgacacaaggccattgctctcctttaaaggtttgggttgtttgtggcagggatggggaaaggatctgcccttcccaggccctgccgtgcccagcacacctgccatgctgaatctcccctcaccctcgcagggaccctctgaggagggtattcccccattttgcaggggagggaattcangctcagaagtgaacacttcagaacttgcacctgccgtgcctgccgagctgtgcctcttctgtgngcatgcgttctccatnccaggttccttacctctgatcttgaatctttacggatgccctcggcttacttct

SEQ ID NO: 290 - DNA, 860 bp, Homo sapiens
  misc_feature (721)..(721): "n" may be a, t, c, g, other or unknown
  misc_feature (811)..(811): "n" may be a, t, c, g, other or unknown
  misc_feature (831)..(831): "n" may be a, t, c, g, other or unknown
  misc_feature (853)..(853): "n" may be a, t, c, g, other or unknown
atcgagtcggccttgttggaactggttaacatgctataaaaatggcactgtcatctgaagtaaatgtctttgaacttagaactgccatataagaatttggactctttgccacagagtgaagaggaagcccaggagaacaatgagtcagtttttttttctttttttctacattgcctacatttaatattcttttagagagttttcaaagaattgcttatgcaacacctatcccagtatttatacagagggagaaattgatcattttcagaaagtcctttatttaggtatgtactacacctgggctgactcttatactgatttctaagttaattgtatcctatgcacagatctcaaaaggactgtgggtgaagaaacaagatcatcagcccaagacccctattcaaccctaactgggttccttttcctattttccagtgcagcttatccttgtacctaaagttgagtagccccactaggaaagattggcagaaaggaatagttaagcaccccttggagcttgctgcctgcaggagcctacttctaggtactcagcttcccttccactctctagggatcctgtagaccacagtgtttgtgctcaactgcagaagcttcatgtgagaaaaaagtttccttttctccactgacatattcttccactttttctttatataatttcctgctggtctctttaatccccaggcttctttcaaactcctgnttctctatatagtagcttcctgtacaaatgtatgtcacatttatatggtggaaacttgcctaaataaaattaggcagatgtgtgatgccnggatatccccatatgacttnaccccggcccttcccttgcttnatttagg

SEQ ID NO: 291 - DNA, 850 bp, Homo sapiens
  misc_feature (797)..(797): "n" may be a, t, c, g, other or unknown
  misc_feature (850)..(850): "n" may be a, t, c, g, other or unknown
agaagcgcagcttctcggggaagctgtcatggctgctcctgtacgtagtcacggtcttgtgctctaaggtgagtggaggacgagcttgggcttagcggcagcccgtatcacatcctagactttttacttcgaggagaagagtctcacgagttgtcctggaagaaaacgacagcacgtgttctttttcactagtagaagtgacgttggtttcatgttgacaactttgaagccatttggaagtgtttcagtggagagcaaaatgaataacaaagcgggctcctttttctggaaccttagacaattcagtacattagtttcaacaagcagaactatgaggctatgttgtttgggactttgcaaaccaaaaatagttcattcaaactggaacattttaaataactttcataacagaatgcaatcaactgatatcattagatatctctttcaggatgcattcatttttaaatcagatgttggctttcaaacaaagggcataagcactctaacagcccttagaattgaaagactactttatgctaaaagactgttttttgactcaaagcagtctcttgtccctgttgataaatctgatgatgaattgaagaaagtaaaccttaatcatgaagtctccaatgaagatgttcttaccaaggaaacaaaaccaaaccgtatcagcagtagaaaactgtctgaggaatgtaattccctgagtgatgtgttagatgcattttcaaaagcgcccacatttcctagtagcaactatttcacagcaatgtggacaattgccaaaagactgnctgatgaccagaagcgctttgaaaaacgactgatggttaccccctgcattaan

SEQ ID NO: 292 - DNA, 113 bp, Homo sapiens
  misc_feature (32)..(32): "n" may be a, t, c, g, other or unknown
  misc_feature (39)..(39): "n" may be a, t, c, g, other or unknown
  misc_feature (45)..(45): "n" may be a, t, c, g, other or unknown
agacggccatttgtggcggcgctggaggctgngttcggnaggcgntgcggagacgcgtataggagcgcgccccccggccgctgccgcccctggcccgtgccgtcaccccgctt

SEQ ID NO: 293 - DNA, 848 bp, Homo sapiens
  misc_feature (722)..(722): "n" may be a, t, c, g, other or unknown
  misc_feature (811)..(811): "n" may be a, t, c, g, other or unknown
aaatataaactagtaagtactgtaaaggaaagaaacatgcttctaatagaaaaaatatattaaaaaggaacagtaccgtcactgggaaatacaggaagacttctctgaggaattgatctctgagttgggattaaagtggaaaaagcactggaagaacattccattttgagggaatagcatgggaaggtccccatggaatgaagaaggatgatgtattagaaaaactgaaggaaggggataatgctgagccaggaaagtaaggagcctaggcagtgtaagatgattccagagaggcaggcaaggggtagacctacaactatagtataaataactaacttaaatgactatagaacatgataattctgaaacgttctgtaaatagtttttgtaattaataatggataatgccctacattacaattatgttttagactagaaaagcatttcccctcttgataaagtttcaaactattcagtggagaaacttgaatctccatattgtaggggttatttctcttttgtgattatagttttcaaatttcgtattgagtgttgcttactgaattgagtttagaatcatcagttatcataagacttgtgtcattaataaaaatgcagtttgagtgcttcttaacactagtccaaacatttagacgtaagatcaccataaaaaaattcaataggaataataaatcagcatcagaggatatgagggatatganggcctaagtgggaaatgtgtgtaccaacttaaaacaaagagcttgaaaatttaaaattacttaaataattaatttcatttatgtgatgntagccaccatgatgataatctgaatgaagacctccct

SEQ ID NO: 294 - DNA, 781 bp, Homo sapiens
  misc_feature (738)..(738): "n" may be a, t, c, g, other or unknown
  misc_feature (780)..(781): "n" may be a, t, c, g, other or unknown
gatttagaggtgtggaaaatcttttaacggggagatcctgaaacacggaaacatggcagggaagttagaatttcctgatggtcatttttaacattttaaagtttactttttggttgttgccatttttctagaatccgtgtcttttttggggaaatacagtcctttgaggactagaatttaatgatttctttacacatctaggattttttgagatttagaaaggatatggctttattcctaaggaagtggaggcagcagtttctaggatactctggtttcaaggcatgctaacttggttgtgatgtctaacccattttggtttacacagtctgaccactagcacaatgcctggcacatagtttacaaatcatttaaggcaagcttaccatcttaagacaatttaatacatagaagtgtccctcctaaaaatctgagtttgatttagaaatccagttatacctgcaggtactgatgactaattccttctttgaagacaaaataagcagctgtgtagcttcagtggctctcaaatggataatagattcagtgtatactcgctttgaactttcctgttttttgatcagctagataaatgactttagtgggtaaatgtctgcctccaaaaccaaattctgaccctgatctaagtattctactgcaccgctgtcactggaatatcaaagttggccctcagactggtgcctggttccttggattggcttgagtattgaggtctgnctcatcttactagggaactaaaatgatgttgattggtttggnn

SEQ ID NO: 295 - DNA, 721 bp, Homo sapiens
  misc_feature (543)..(543): "n" may be a, t, c, g, other or unknown
  misc_feature (644)..(644): "n" may be a, t, c, g, other or unknown
  misc_feature (691)..(691): "n" may be a, t, c, g, other or unknown
  misc_feature (693)..(693): "n" may be a, t, c, g, other or unknown
aggtttccgcagctgagggggcagctccgcggcggcgtccggggtctccagtagggctgacgctccggtgctcgcacaatcccccgcctcggctggcaacgggcgtccctccactccccgagtccccggcagccgccgccaccccagcgcgccccgatctggccccctgccccgcgaagatggctgccgtacgccgggcccgcagttattgccgctgcctggtgcgcttctccgaccgagaactctgctaagctccgctgcagagacaggcaggagtagacacccggacacccagcacccctcctccggggggcggtgcagagggggcacggagagcccctcgagcgcagcaggccgccccgccagcatggcagaagctgaggaagattgtcattctgatactgtcagagcagatgatgatgaagaaaatgaaagtcctgctgaaacagatctgcaggcacaactccagatgttccgagctcagtggatgtttgaacttgctccaggtgtaagctctagcaatttagaaaatcgaccttgcanagcagcaagaggctctctccagaaaacatcggcagataccaaaggaaaacaagaacaggcaaaagaagaaaaggctcgagaactcttcctaaaagcagtanaagaagaacaaaatggagctctctatgaagccatcaagttttatcgnanggctatgcaacttggacctgatatagaa

SEQ ID NO: 296 - DNA, 847 bp, Homo sapiens
  misc_feature (815)..(815): "n" may be a, t, c, g, other or unknown
  misc_feature (822)..(822): "n" may be a, t, c, g, other or unknown
  misc_feature (840)..(840): "n" may be a, t, c, g, other or unknown
aggagaggcggagaaggaaccgagcgggcagttgagggaaatctcggaggaggttacctgcgatcaaactggggctgcgtagtgttagggtcaggcagctttgaagtggaatccggatccgccactctcgctgcgtgatattgggcatgccatcaaagcgctctcaaccgaacgtctcgggtaaaatgggattagtgaagtctaccaaggtagttgtgaggatcaagagagataacgcggaaaacgcctcacctggcacgttatagatcctaaatgcctagctattattatggagcccacaacctccatattttacaactgggaacacgggactcaaagagattaaaaaactaaatgactcactcaaggtcaggtagtggtggagacccaggcttcaagttcaatactctttgtcctacaaagccttcccttaagcaggggtaataaaacatttcagaaaaaccaccttaaagagcatcgcttgtgatctgtggatcacttggtagtccccacctccctcccatccccgcaaaggtttagagctggacataagggccttggtgcaacttttggagggcagttgttcagcttctgaatttgcatctgaacgagcaataaggaattttctgggaagttaagaatttccaataaatcttggactactctaaaatgcaccagaaattacgtggtcacactcgtgcagtgaaagaagctttggcagtagcataagacattaagcagaagtaggaaatgcagtgaggaagaattggaatgttttcaacagctgccactatggatctaggatgagagctttncacatgntggtaagaatgagagacngattact

SEQ ID NO: 297 - DNA, 757 bp, Homo sapiens
  misc_feature (551)..(551): "n" may be a, t, c, g, other or unknown
  misc_feature (575)..(575): "n" may be a, t, c, g, other or unknown
  misc_feature (704)..(704): "n" may be a, t, c, g, other or unknown
  misc_feature (745)..(745): "n" may be a, t, c, g, other or unknown
  misc_feature (753)..(753): "n" may be a, t, c, g, other or unknown
gtaaaggaatgtctttttaattcagcttttcttttctccatgctagtgttatcaggttttggtatttatttacttacagcatatgttatgaagctggtttgaaaattggttttagatatatctgcaagtttactactttgactgtaaaaaaaaaaaatgaaaaagtagttgacatctgtcctcagaagaagtttgcaggttgcatatttgtgtgtaaatacacaggctaaaaggtaatttatgttccttgggaattgaaatggtcagtggcccgttacagaaacttatcagtcatatatcagcaccagttcattcttttgcaccttagggaccatctgtcccctgaggtgacctgagaaacaaccagttgcccacagactgttatttcttcaagtgagccaggatttgatttcactgccttatattctatttttagtgtacagtgctttgattttttggaaaaactaaattttaaacatatttgaaaaatgttataagacttggacattaagtctgttgatagccaaagtcagtttaccaaagtaaaacanataaattctatgcttcttcattgncaaagagcagtctgccatcatgtggatataaatggactatgtaaagtgacatggtgcttactctctacctaataatagcctccctcctgttccaacaagataaccaacaggtatatttaatttaccagntaatatgttttggataattgctgccttgaaatgctatatgnttataggnccat

SEQ ID NO: 298 - DNA, 742 bp, Homo sapiens
  misc_feature (709)..(709): "n" may be a, t, c, g, other or unknown
  misc_feature (716)..(716): "n" may be a, t, c, g, other or unknown
  misc_feature (730)..(730): "n" may be a, t, c, g, other or unknown
gaaggagacgctattctcagtgatgcccgggtaaggcccaggctggagcccggggcaggggttgacctttcaggctacagtggctgatgatggtaccagcaggtggcctgaggccatggacctgagaatggagcagctacactcacaggaggggcaaagagacaagagccctgccatatacccctgcagctccggagggcactgaggagttgtcccagggacctaacccaggtcactatcccatgcaggagacagtgtggtttggagctagctctgccgctaatccttgtgaccctgggcaggcagctaagtccctctgagcctcagtttcttcaccaataaccagtactaatcatcctggcccagagtcagaaggctggggggagaacccaatgagagagtgtagttgggagcactttgccgtcagatgatacagtgccccccaagcaccccacaggacagcgctgcctacatagtgacgtgatgttctgatgacaatagtgagaagctggagagcactgttgacagcatgttaccagcattctctttagcgtatccttggagctttgctaaggagacacaagtcagtggcctcaaatactgagcagctggtgaataatggaggcagaaggccacctcttttgggtgagggagctcactgcttcacagtggcctttcagggacagtcttcagctttgcagatcacgangggcgtncaggaagggctgangccctcgtcctt

SEQ ID NO: 299 - DNA, 386 bp, Homo sapiens
  misc_feature (321)..(321): "n" may be a, t, c, g, other or unknown
  misc_feature (355)..(355): "n" may be a, t, c, g, other or unknown
  misc_feature (382)..(382): "n" may be a, t, c, g, other or unknown
gagccgagcggcttctgctcaatggcggaaaagccgccggtgctctgacggcctcgttcccctagcagttgcgggggagtttcctgccggcgcggctggagtctctgattctcagggttcggtggttggaagatgctccagagagacgaggctgcggcggaggaggtggcggcggccgaatcggcaacggcgctagggtggagagaaggcggcagcggcggcggcggcggcgtgaggggccgggcggtgtaaacagccccggaggcggcggaggcggcggtcgagaccccgagggggaagcggcggctgagtcagggtcgngcctccggtggaaacttgggctgagtaccgcggnggtcgcgagcgaggcgccctagacatnttgt

SEQ ID NO: 300 - DNA, 880 bp, Homo sapiens
  misc_feature (796)..(796): "n" may be a, t, c, g, other or unknown
  misc_feature (808)..(808): "n" may be a, t, c, g, other or unknown
aatgaatttttggtcagggatttttagtgcaatatagaagagtttagtttgagttttagatcccaagtattcctttcttcccaacctatattatacttggtcaaataaagtcagggtaatcaggcagcctgaaaggaagcagggcatctacctgcctctctggtcagatggagtaattaggaacaaaaaaggccactctgttgttagccacacctatttatcaagaacaaaggagcatagcattttaaattcatttgagctgaaaccctggctggctcagactcttacttgtcttatcacgcaagatcagctttgtatatcattttaaagaggtcgtgtggcgtgttttcctgacttctgtcatctcaagttaaatatgtcatcagaaaatatatatcatccagaaaatggtggctctctcttcctgtgagacactctttttagaaatttgtcttctaggtatttctattttaaaatgttcagtttctctgcaataactttcaaatttcattatttttaccaagctagattttgtatatctgtatacatatttatgtaataatcacttcatatttgcacatagtttttgaacccagaaaagtaaaagagaaaactagtgacttgtctctggtggcaaattttctctgtgactaaattaaaaccatgaacctgtccagtacagaataatgccactggtgaagtcaggcttaaattcactttaattctagagaaactgtgaatttagaaggaccaaaagtcaaaatgcaaaagataatgcagacccattagcactggnctcatattcagntcaaatatttactctagtaccgataggatctctgaatatccttatccttgacatcacaatactttttcattg

SEQ ID NO: 301 - DNA, 806 bp, Homo sapiens
  misc_feature (771)..(771): "n" may be a, t, c, g, other or unknown
  misc_feature (773)..(773): "n" may be a, t, c, g, other or unknown
  misc_feature (791)..(791): "n" may be a, t, c, g, other or unknown
aaatagatgtttatcattttttatatagactcattgaaaaaatgactttgtgttcttccagtacataccatcatgtctgagagggcagagatctagacaagtgtgggaaagatgactttggatcaaaattttcttgtgaatataatgtgcttatgcgtaatttaaagctgactgtattaaagatacattttttgtcaaccagatgattgttaaatacctgtgaagtatgtgtggcccggtcctatttcctcacctgtttacagtgaatcagacgtcccaatagatgtggagacggtcacatcaacgcctatgccactctatgacaatcagaaggcacgcagcgtgatgaatgagtgtgaacggcatgtcatctttgccaggactgatgcagatgcccctcctccaccagaggactgggaggagcatgtcaacaggactggctggacaatggcccagaacaagctattcaacaagatcctcaaagccctgcagtctgaccggcttgcccgcttggccaacgaaggggcttgtaatgagccagtgctgcgccgtgttgctgtggacaagtgtgcaaggagagtgcggcaggctctggcaagtgtgagctgggataccaagctgatccagtggctgcacaccacccttgtggagaccttgagtctgccatgctgcagcctacctggatgctttgcagacgctgaaggggaagatcccaaccttgattgaccggatgcttgggcatcaacacaaagactgggctgcggaactgangncttgctcttctactgaanaggcctgggaccctg

SEQ ID NO: 302 - DNA, 882 bp, Homo sapiens
  misc_feature (880)..(880): "n" may be a, t, c, g, other or unknown
gatagataatagtgtaaaatggacttgccttgcttctactgatgtttttcacatgtttcccgtaactgatacttttcatcagttgtggaattcccataattgcagggattccttttctgtccttaggatcccctgaaggccttttaatcttgttcaccaaatgtgtgttccttgctgacacaaaatggtctctaccatcagtggtggtactcttttttccccctttgttcaattcaatctcaggaacgtatttcctacattaataaatatttactgagcacctaccaaatgccaagcactttcctagaacaaaagttcttttgaaacaaaaaagtatcttggcagttaaggcaaaatgacctaaagaagttttaaaatgaaaggtctcctatatttcagggtctttgagatgaaaccctgcaagtagacttacgtgaatgatttttgctgtggtaagtatacaaatgcagtgggagttgccagactttaaaagacgtgaataacaatcatataaaatgccagacattgttgtggaaaagagaaagaagataccctactagggggtttttacctcctttaagaaacagactaaaactagttttctcaagtgcctgaatatatatggtttaaataacaatatacaacactttcaaaataaaatctaggaatgtttacatatgcttttaatctcaaagtctaatgtcttgagaaaagtaaatctgtgagatcactgactcacagaattttagcaaatagaaaaaatccagtatcttcagaacacaagggctgatcttttgtcccctacccgcaagacattgcttggtaccaaaatagaaagggtatttttttaagggggaattatgggtttttctgaaaacanaa

SEQ ID NO: 303 - DNA, 637 bp, Homo sapiens
  misc_feature (616)..(616): "n" may be a, t, c, g, other or unknown
  misc_feature (621)..(621): "n" may be a, t, c, g, other or unknown
  misc_feature (637)..(637): "n" may be a, t, c, g, other or unknown
gtatcaacaaatgcaagtacaccacaatcagtgagcagtgtggttcattatctggcaatggcactctttcaaatagagcagggcattgagcggcgttttctgaaagctccacttgatgccagtgacagtgggcgttcttataaaacagttctggaccgttggagagagtctctcctttcttctgctagtctatcccaagtttttcttcacctatccaccttggatcgtagcgtgatatggtctaaatctatactgaatgcgcgttgcaagatatgtcgaaagaaaggcgatgctgaaaacatggttctttgtgatggctgtgataggggtcatcatacctactgtgttcgaccaaagctcaagactgtgcctgaaggagactggttttgtccagaatgtcgaccaaagcaacgttctagaagactctcctctagacagagaccatccttggaaagtgatgaagatgtggaagacagtatgggaggtgaggatgatgaagttgatggcgatgaagaagaaggtcaaagtgaggaggaagagtatgaggtagaacaagatgaagatgactctcaagaagaggaagaagtcagcctacccaaaccgaggaagaccacangttanattgccagttaaaacn

SEQ ID NO: 304 - DNA, 843 bp, Homo sapiens
  misc_feature (799)..(799): "n" may be a, t, c, g, other or unknown
  misc_feature (801)..(801): "n" may be a, t, c, g, other or unknown
  misc_feature (843)..(843): "n" may be a, t, c, g, other or unknown
accaagttgcttaacttcgttgagcctctttaggggatgatccatgccctaagctgcctgactgcccaaaagcagaacaatgatgagcaatcatttagacgagataagcacctggagctccaggcattgcctaataaccctgaattattcaatccttcatttcacagacattgattgactgggatttaaaacaatttaaaaatgaatgtgacactggccctgccctcaaagagcttaagagccatctaggtacacaggacatgcccatgcacagctgcaaaataaggcagggtgtgtataatgtatgctgggggtggaagaaccagggaaagttgtcttggcagaggtggcatggcagaaataagcagggaggctactccaactggaggagatggctggagcagggtttgctcctgagtgacgagtagatgaggttggctggagcagatctttggaaggacctgggaagggtttgggggcgggggtggactacagagttggagctaggtggtaaggggccttaaatgtcaggctaagtagccaagatttaatttagcaagtagcgggaagtcatgaagatgtttgagtcagagattcaggtcagtaacctgaccaggactgggctttaggaagaaagtcctctagcatcataagggacagattggtgggggagggtggatttgaggtaggaagaccagttgggagtgatgtaattaagtgaacaagatctaggactaggattcccaaactttgagcataagattcccctgaagtgcccaactttggagatcaaattganangtcttgcattttgccccctaaggaaatggctttttttttttn

SEQ ID NO: 305 - DNA, 814 bp, Homo sapiens
  misc_feature (644)..(644): "n" may be a, t, c, g, other or unknown
  misc_feature (719)..(719): "n" may be a, t, c, g, other or unknown
  misc_feature (725)..(725): "n" may be a, t, c, g, other or unknown
  misc_feature (788)..(788): "n" may be a, t, c, g, other or unknown
ttttgttgttgttacttgtttgtttgaaataatattagcctaaatttgacattcacactgagtatcagtaagggtcatggtttttaaaccttgtgctttcttatttttttcaaactaatttcagacttaaatagaagttacaagaatagtacagggagtttcatgtacccttcacccaaattcctcaagtgttaacattttaccacatttataggtttttttctgatacacttgagagtaagtttcaggtagatgtccctttacttctaaatatttcagtgtgtattttctaaaaaacagggatattcccttatagaatcatagttttattatcaaaatcaggaaatttaataattatatgtctcatctaactatagatcttattagtatttcactattcttctaatctctttagagcaaaatggaaaaaaatggtttttctgttctggtgcaggatccagcggaggctcacgtgctgtattggattatcacatccttaatgttctttaatctgaaatcgttcccaagtcttgttattcatgaccctgactgacatttttttaagagtaaaaacactaggggggattttttgttgttttttgtttcattttgttttttgtttcgttttgttttttgtcttttgnttttttttgagccagggtctcactctgtcacccaggctggagtgcaatggtgcgatctcagttcactggaacctncaactnccaggctcaagtgatcctcccacctcagccttcccaaggagctgggactaccaggcttacagnccaacatgccccagcttaatttttgg

SEQ ID NO: 306 - DNA, 834 bp, Homo sapiens
  misc_feature (760)..(760): "n" may be a, t, c, g, other or unknown
  misc_feature (782)..(782): "n" may be a, t, c, g, other or unknown
  misc_feature (816)..(816): "n" may be a, t, c, g, other or unknown
tattagcagactggaatgaagatatagaagcatttgaaatgatggagaaggatgagctatgacttgctaaacaatctgttggtaggtatttaaaaagaaaaggtaaactgtgtgtggttaatagacatcctaatactaagcaggctttctaatgggaggctttaagtatggtgatgaacaaccacgttctgactggcgtagttatcgtaggaatctggagcatgctgtgttagaattgaccttgtttaaaactgtcccatcaaaaatggaaatccacagttcccccttcaaatgcagcactgcaccaccctgcaacacctcaggccagggaaagattactgagcattcctgcgaaccagatttctgttgtctctggatagacaagaaacaaaattcatttagtagtggagtggggaataggagtttggatagccttctaattaaaggaagctcgcctttcttggttttgggggttagaggctcttttgggaagatgcatccgagtattgtggcattctgattatgctgccttcacaaaacactctaagtgacctaagtggttatgaagcaaatgcatttatggtgaaaacagtctttgctcattgctttctcttgtttcatttagtgacaaatgatcaagatgacttgattttttttccttcttaacaatggcttttttatttaaaccaaaggtgaagccagtgtactttctcagtgagttctctgcataaagactaatcagtgggaccaggtaaaaaanggcatataatacattggggganattgcttactttaatacttctggaaaaatggganttaagggaagaaacctgg

SEQ ID NO: 307 - DNA, 769 bp, Homo sapiens
  misc_feature (676)..(676): "n" may be a, t, c, g, other or unknown
  misc_feature (707)..(707): "n" may be a, t, c, g, other or unknown
  misc_feature (718)..(718): "n" may be a, t, c, g, other or unknown
gttcataacaactccaagcatggacggagagcaagaagactcgatccatcggaagctaccccctgcatcaaagccattagcccgagtgaaggctggaccacaggaggagccatggtcatcatcatcggggacaacttctttgatggtctccaagtggtgtttgggactatgcttgtatggagcgagctaataacccctcatgccatcagagtacagactcctccccggcacatcccaggcgtggtagaggtgacattatcttataaatctaaacagttctgcaaaggagccccaggaaggttcatttacacagcattaaatgaacccaccatagactatggcttccagagactgcagaaggtcatccctaggcatcctggagatcctgagagattagctaaggagatgctgttgaaaagagctgcagatctagtggaagctctttatggcacaccacacaataaccaggacatcattttgaagcgagccgcagacattgctgaagctctctacagcgtccccaggaatcccagccagcttccagccctctctagctccccagcgcacagtggcatgatgggaatcaactcctatggcagccagcttggggtcagcatctcagagtcaacacaaggaaataatcaagggtacatccgcaacacaagcagcatctctncgcggggatactctttcagcttcacgccttnaacagtctaantacagtacccttcagcaaccagtatgaatgggtacagcaatggtcccatgg

SEQ ID NO: 308 - DNA, 567 bp, Homo sapiens
  misc_feature (357)..(357): "n" may be a, t, c, g, other or unknown
  misc_feature (510)..(510): "n" may be a, t, c, g, other or unknown
  misc_feature (530)..(530): "n" may be a, t, c, g, other or unknown
  misc_feature (543)..(543): "n" may be a, t, c, g, other or unknown
aaaaactccctgctagagagactaggagatttggggctgcggccgtttcctccggagcacccacgggactgtgtgctggggtccctccaccggctgtgtcctttattcttctttctcacccaacgatttacctgaacggttataaagtgcacgttatttccctaagcactttgagtatattggcccactgcattctggacttcaaaatttctgatgcgaaatatgctgatacttttgttgaagaaatctgggctttgagcatctgtaagatatttgttggaaggttttgtctggtccttcttactgatgtgttgctcttcttcatggctcgtgaaaactattagagtcatccaaggntgggaagagagatcagcaacgttaactgggtgtcaagaaaacataccgagattgaagccatccacttctgcaggaacaccgaaaagaaagcttacaatctgaaggtgtccgttcttacactggtcagaccactgtccttggggcagctggggnctttgggaccctccaccggnctcgccggtccgncggacttttggctgagatccgtgt

SEQ ID NO: 309 - DNA, 748 bp, Homo sapiens
  misc_feature (724)..(724): "n" may be a, t, c, g, other or unknown
  misc_feature (731)..(731): "n" may be a, t, c, g, other or unknown
  misc_feature (743)..(743): "n" may be a, t, c, g, other or unknown
gtcgccgcgcggccgccggtgagccgcatggagccccgggcggcggacggctgcttcctgggcgacgtgggtttctgggtggagcggacccctgtgcacgaggcagcccagcggggtgagagcctgcagctgcaacagctgatcgagagcggcgcctgcgtgaaccaggtcaccgtggactccatcacgcccctgcacgcagccagtctgcagggccaggcgcggtgtgtgcagctgctgctggcggctggggcccaggtggatgctcgcaacatcgacggcagcaccccgctctgcgatgcctgcgcctcgggcagcatcgagtgtgtgaagctcttgctgtcctacggggccaaggtcaaccctcccctgtacacagcgtcccccctgcacgaggccagctttccccgcctcctgagcaccctggcttcgacgccctggatcaactgagccaggtggaactcctgggggacatggatcgcaatgaattcgaccagtatttgaacactcctggccacccagactccgccacaggggccatggccctcagtgggcatgttccggtctcccaggtgacaccaacgggtcccacagagaccagcctcatctccgtcctggctgatgccacggccacgtactacaacagctacagtgtgtcatagagctggaggcgccccgtccggtcaagcccttggcgcccttttccttctttgtgcccttgaantggcaanaaggaacccgtnccagg

SEQ ID NO: 310 - DNA, 800 bp, Homo sapiens
  misc_feature (619)..(619): "n" may be a, t, c, g, other or unknown
  misc_feature (727)..(727): "n" may be a, t, c, g, other or unknown
  misc_feature (758)..(758): "n" may be a, t, c, g, other or unknown
  misc_feature (784)..(784): "n" may be a, t, c, g, other or unknown
atcttctcctctctgcaaacctctcctgtgctgatgcctgggcaccagagatgaggtgggagcagtacctgccctaggcggggctcacggtctagtgcccacagcagctgtccagggagtgcaggctgaagcagtgagatggcaggggggacggagtgagaaaagagcctctcagaagggcaggaggggcggggaggggcggggtggcacatggagctgccaggaaccccagaggcagctctgttcccagagttcagaaacctccaagaaaagctggtggcattgtccgttttgttgtttgcctatctggcctttggctattgactggatggcatcttgggaatcctctgaagggctggagtttaccccaagcacagggacagagggagcaggtggagtcacttctcgttgatgtccagctgagctgggctggtggctgcctcagaagggagggggcagctactaggagcagcagcctcaccccagggctctgtggacctccttagcctgtgatggccttggcaatggggatggcctggttgggggactgagcaaaaggcaggcagtagggatgggtgttcccagccttgagtcagatcctgagaagctccagggcggngcacgttctgtctctgccatctggaaacctaccagctacagcaattggcaccttcaacaagaacccctgagcccggaagcttggtgagaggaaccttcaggtcaactnttcaccacacagaccaagtctgctgatctgngccattccctgatgcactggggcatnccgtgacccagactgt

SEQ ID NO: 311 - DNA, 577 bp, Homo sapiens
  misc_feature (517)..(517): "n" may be a, t, c, g, other or unknown
  misc_feature (539)..(539): "n" may be a, t, c, g, other or unknown
  misc_feature (541)..(541): "n" may be a, t, c, g, other or unknown
ggaatgcatgtacattctctgatattattccttatatcctcgggggatgtgacttctaatgtcacacagcgtgttctccctgtgttctctttcataatatcctagtgcaattgtactcttaatgacgcagggggtgtaggcattgtgatattattcatgttattctagaaggatgctactcctaatgtcacaggggtgtacaccctgtgatagtattcataatttcccaggggtctatactcctaatgtcacagaagataacaccctgtgacattattcgtaatattctgatgagatgattctcctaatatcacagggggtgtacaccctgtgataatattcttactcctccagggggatgtcactcttaatgtcacaggtgtgttccttctgtgatattattgaaaatatgctagctgggtactactactaatgtcacaatgcgtgtacaccttgtgatattattagtaatattgtggggggatgttacccctaatgttacaggggtgtacaccgngtgatattgctcccaatattgnanggggatgctactcctaatgtcacaggtggtgtacag

SEQ ID NO: 312 - DNA, 766 bp, Homo sapiens
  misc_feature (436)..(436): "n" may be a, t, c, g, other or unknown
  misc_feature (679)..(679): "n" may be a, t, c, g, other or unknown
  misc_feature (729)..(729): "n" may be a, t, c, g, other or unknown
  misc_feature (765)..(765): "n" may be a, t, c, g, other or unknown
gtgttccggccgatcccacctcttctcgaccctggacgtctaccttccggaggcccacatcttgcccactccgcgcgcggggctagcgcgggtttcagcgacgggagccctcaagggacatggcaactacagcggcgccggcgggcggcgcccgaaatggagctggcccggaatggggagggttcgaagaaaacatccagggcggaggctcagctgtgattgacatggagaacatggatgatacctcaggctctagcttcgaggatatgggtgagctgcatcagcgcctgcgcgaggaagaagtagacgctgatgcagctgatgcagctgctgctgaagaggaggatggagagttcctgggcatgaagggctttaagggacagctgagccggcaggtggcagatcagatgtggcaggctgggaaaagacaagcctncagggccttcagcttgtacgccaacatcgacatcctcagaccctactttgatgtggagcctgctcaggtgcgaagcaggctcctggagtccatgatccctatcaaggtggtcaacttcccccagaaaattgcaggtgaactctatggacctctcatgctggtcttcactctggttgctatcctactccatgggatgaagacgtctgacactattatccgggagggcaccctgatgggcacagncattggcacctgcttcggctactggctgggagtctcatcttcatttattncttgctactgtgcaacgcccagatcaccatgcttgna

SEQ ID NO: 313 - DNA, 799 bp, Homo sapiens
  misc_feature (764)..(764): "n" may be a, t, c, g, other or unknown
  misc_feature (786)..(786): "n" may be a, t, c, g, other or unknown
  misc_feature (791)..(791): "n" may be a, t, c, g, other or unknown
atcataaaaacacgcctttctcattcaactgaaaaacacactaaaattttaaaagagaaaaatgcaacatcttggaaagtaacgttttaacaccataaaaatttgcacttattcaactgaaaatttacactaaaatagacattaactgtgcttttacattccaaaccatcatactaaacataacaagttaattgccaatgttttccttcccctatactttgaggtagttctacgtaaccaactataacaaatttacttcctaacatcctcaatcttctgctctcctttagttttaagatactttatgacatgggtaatactctgaaatggatgccttctttggatatattttggggttttagtgtctggaggactttgatttctatattagcatattggtttatgaagtctggacataacctaaggaaaataatcacttgttttaaaggacagttctttcaaattccctacaatgtcagatttagagccaaataccatcgaatatgttgatgctgtaattcctagcaaatttcaagaggtcactctcttttcaaaattataccgtgccccttctttgaaaatgagtttcattttcgaagtcaaaacaagtcctttctcttccactggcgggcccttctggtccccagattagcctgttccaaaattggtcatgtgtctcactgggccccttcagttgacccagcgtcctcaccagctcctatccatctctatctgctggaaaggctttgaggtttcagatttangacagcaccactcattcatggnctctnctgcatca

SEQ ID NO: 314 - DNA, 828 bp, Homo sapiens
  misc_feature (738)..(738): "n" may be a, t, c, g, other or unknown
  misc_feature (825)..(825): "n" may be a, t, c, g, other or unknown
  misc_feature (827)..(827): "n" may be a, t, c, g, other or unknown
cccttgaagttttgtgccagccttcttacctaattaaacaacacttcagcagcgtggttgctaatgccaggtaaccaccatgtgttatgttagcctgcttggatcaattgtaattattactggaattgaattaattaatatgattttgaacagttcatgttcaaactaacatcctgtaaagtagacactgcaaggagttactgatgaaagaaaagttgttcataaaagaagcctccttttataattgacttgccttagacttatttaataatgtttcatagtattttttaaaaagtatctgaaccttgtacatatttacaattatgagacatcctatctaaaaatttatattttcgatttaacatttgtggctggcagtgataatttttactctctggtactatgaatcatctcattaaaatcctctcaactgaatgacattatcccaatttgcaaatgaaagagagacagagaacctaatgatttgcccctggtctatacctggtacttggaggtaggattcaaagccaggcagttctgactccagaggctgtgctcttaaccactctatacattacctctcaaaatagaagattaattggactcaagtgaaattgcttgtataatttttaatcaaaactatatgctggccacattaacttctgtgctgtcatcatgatcatagaataataacaacactcaatttatttctctatactaataactttgataaaatgntattatttattaaatctatttttcagaaaccaaaaaacagtaaacatgagtcaagatgaattaaaaggataagccaatttttaaggncna

SEQ ID NO: 315 - DNA, 807 bp, Homo sapiens
  misc_feature (726)..(726): "n" may be a, t, c, g, other or unknown
  misc_feature (747)..(747): "n" may be a, t, c, g, other or unknown
  misc_feature (763)..(763): "n" may be a, t, c, g, other or unknown
gtgggccacaaggctacagctgccactgtcgcctgggtttccggccagcggaggatgatccgcaccgctgtgtggacacagatgagtgccagattgccggtgtgtgccagcagatgtgtgtcaactacgttggtggcttcgagtgttattgtagcgagggacatgagctggaggctgatggcatcagctgcagccctgcaggggccatgggtgcccaggcttcccaggacctcggagatgagttgctggatgacggggaggatgaggaagatgaagacgaggcctggaaggccttcaacggtggctggacggagatgcctgggatcctgtggatggagcctacgcagccgcctgactttgccctggcctatagaccgagcttcccagaggacagagagccacagataccctacccggagcccacctggccacccccgctcagtgcccccagggtcccctaccactcctcagtgctctccgtcacccggcctgtggtggtctctgccacgcatcccacactgccttctgcccaccagcctcctgtgatccctgccacacacccagctttgtcccgtgaccaccagatccccgtgatcgtagccaactatccagatctgccttctgcctaccaacccggtattctctctgctctcattcagcacagccttctgcccaccaccccctatgatctcaaccaaatatccggagctttttccttgccaccantccccatgtttcagacacccnggtcgctggcacccanaccaccactcatttgccttggaattccaccttaaccatgcccct

SEQ ID NO: 316 - DNA, 846 bp, Homo sapiens
  misc_feature (761)..(761): "n" may be a, t, c, g, other or unknown
  misc_feature (837)..(837): "n" may be a, t, c, g, other or unknown
  misc_feature (846)..(846): "n" may be a, t, c, g, other or unknown
agcgcagctatggctgctggcgtaccctgtgcgttagtcaccagctgctcctccgtcttctcaggagaccagctggtccaacatatccttggaacagaagatcttattgtggaagtgacttccaatgatgctgtgagattttatccctggaccattgataataaatactattcagcagacatcaatctatgtgtggtgccaaacaaatttcttgttactgcagagattgcagaatctgtccaagcatttgtggtttactttgacagcacacaaaaatcgggccttgatagtgtctcctcatggcttccactggcaaaagcatggttacctgaggtgatgatcttggtctgcgatagagtgtctgaagatggtataaaccgacaaaaagctcaagaatggtgcctcaaacatggctttgaattggtagaacttagtccagaggagttgcctgaggaggatgatgacttcccagaatctacaggagtaaagcgaattgtccaagccctgaatgccaatgtgtggtccaatgtagtgatgaagaatgataggaaccaaggctttagccttctcaactcattgactggaacaaaccatagcattgggtcagcagatccctgtcacccagagcaaccccatttgccagcagcagatagtactgaatccctctctgatcatcggggtggtgcatctaacacaacagatgcccaggttgatagcattgtggatcccatgttagatctggatattcaagaattaccagncttaccactggaggaagagatgtggagaattttgaaagactcttttcaaagttaaaggaatgaaagacaagcttgnacctttctn

SEQ ID NO: 317 - DNA, 785 bp, Homo sapiens
  misc_feature (722)..(722): "n" may be a, t, c, g, other or unknown
  misc_feature (758)..(758): "n" may be a, t, c, g, other or unknown
  misc_feature (764)..(764): "n" may be a, t, c, g, other or unknown
ttactaaaatctaaattgagtactttttactgttgcagagaattaagtcactaaacgttatttagatacatagatgctagttgcaagtaacacccttttgtaacataaaagtaaaagcataataatttcccaacttttttcttcaaattaaaaaagaaaatagcatataattaccattcttcatttgagaaagctgaagattctgatgcttaaaaacttcagaattctaatattaaaaatagagtggttcatgtgacattgaaggcttatctctgtaaaatagtgacactggtgagtggtattatctcaatatttttgtccaaattcaccttaggaaatcactgtaaatcttcattgtttcctaaaagtcattattacggcataaacttaacatactttgatagtagttagtactgatacgtgacatattctaccccgtgtctctattactctgtctctattactgtgaaaagtcacagtaaatttaacattttcttccagactgtgtatgatctttcattgtaatagagacatggagtaggataagtcatgtattaacatgtaagatttttttaacctgctccctcagttttatagatgagacaaagataaggttgtaagagctaatctcttcaagtaggcagtactagtaagttgtcatgcgtggactgaactcctggcacttctctctcttaacttcaatccatagagaagcccccttnctgccttccagtattatttagcagaggagaaaatcntattangctgttggaactggttgccta

SEQ ID NO: 318 - DNA, 682 bp, Homo sapiens
  misc_feature (675)..(676): "n" may be a, t, c, g, other or unknown
  misc_feature (681)..(681): "n" may be a, t, c, g, other or unknown
aagtctagttaaactttaaacaaaggatttatgaacatctctacttccctcagtgagtttttttttttttaacaagtaatattttcaaggaaaggaaaatggacattatgatggctgtcttttgtccttttgtaaatggtggttcttctagagctgtgctatctaatatgatagccactagtcacatgtagctatttaaattaaattaaaaatttagttcttcagtcaaaataaccccatttcaaggttcagtagctacaaatggctagtggctagcatattggaccacacagatacagactgttttcatcattgcaaaaagttgtattaaactctattgtatagaatattttgctgaaatatagtatatgtggctgggcatggtgtctcacacctataatcctagcactttgggaggccgaggcgggcagatcacctgaggtcaggagttcaagaccagcctggccaacatggggaaaccgcaactctactaaaaagacaaaaatttgcctggtgtggtgacgggcacctgtaatcccagctacttgggaggctgaggcaggagaattgctggaacccaggagggcggaggttgcagtgagctgagatcataccactttactccagcctgggtgaaagagcgaaactccatcccatctcaaaaaaaaaaaaaannagaant

SEQ ID NO: 319 - DNA, 847 bp, Homo sapiens
  misc_feature (669)..(669): "n" may be a, t, c, g, other or unknown
  misc_feature (702)..(702): "n" may be a, t, c, g, other or unknown
  misc_feature (764)..(764): "n" may be a, t, c, g, other or unknown
  misc_feature (818)..(818): "n" may be a, t, c, g, other or unknown
  misc_feature (832)..(832): "n" may be a, t, c, g, other or unknown
accgtggtgccgagtgcctgctgccttgggccgccttgaacctccagggtttccagctcctcctccttcaccccagtgccactgccatgatggatgtgagtgaacttggggagtctgcccgctacctccgccagggctaccaggagatgacgaaggtgcacactatcccatgggacgggaagaagcgagtctgggtgcctgatgaacaggacgcctacgtggaggccgaggtcaagtcggaggctaccgggggcagagtcaccgtggagaccaaagaccagaaggtgctgatggtgcgtgaagccgagctgcagcccatgaacccgcctcgcttcgacttactggaggacatggccatgatgacgcacctgaacgaggcctctgtgctgcacaacctgcgccagcgctatgcccgctggatgatctatacctactcaggcctcttctgtgtcaccatcaacccctacaaatggctcccagtctatacggcctccgtagtggctgcttacaagggaaagcgccgctcagattccccgccccatatatatgcggtggcggacaacgcctacaacgacatgctgcgcaaccgagacaaccagtccatgctgatcacgtgagtgtggggctctgggggtggggtggaaaatgctggccatctggcagaaaganggcggtaccacagtcatttcccaggattgaatncaaagtgcttaagccaggacttttaccacctggagctagtgtccagctgaactaaaattggnctgacactttcctggccccaattctgaacagatgtgttcttgatgggggaatanggaggggacacccncaaacggaatggccc

SEQ ID NO: 320 - DNA, 851 bp, Homo sapiens
  misc_feature (805)..(805): "n" may be a, t, c, g, other or unknown
  misc_feature (819)..(819): "n" may be a, t, c, g, other or unknown
  misc_feature (830)..(830): "n" may be a, t, c, g, other or unknown
gattaatgtagacaaacgtccaggtagcaattttggggataataaatgagttcaccctttttttttctttttttccctgagacagagtttgctcttgttgcccaggctggagtttaatggcacgatcttggcttaccacaacctctgcctcctgggttcaagcaattctcctgcctcaggctcccaagtagctgggattacaggcatgtgccatcacacccggctaatttttgtatttttagtagagacagggtatctccatgttggtcaggctggtctcgaactcctgacctcaggtgatccgcccacttcagcctcccaaagtgctgggattacaggcgtgagccgtcatgcctggccgagttcagcttttattcacattttttccccgaagtgatttattcttcaaagtagacagttatgttctatagagtgttttgttttttctttaagaaaataatttacataaacagagattatggtaaacattttaaatcttaggctgttggttaaatttaatggtttaagcactgttgggttctctttaattaatatttgcagaaggagaacatatgtgtttcactgatatgtatggtccagaaaaattacttaattctcaaaaatatgttgcattctcatattgtgttagggaaaattccataagtagtctatttttttttttcttttgctgactggtaacatccaaacacctgaatgaaaactgactcatttctggattggtgtttaaaaatattgatttgcagatgttcacagaacacttgcattttttggattcacattgctnaatcaaatgtaaanggcaaatatgnatatttaataaaatgagaagt

SEQ ID NO: 321 - DNA, 722 bp, Homo sapiens
  misc_feature (669)..(669): "n" may be a, t, c, g, other or unknown
  misc_feature (720)..(720): "n" may be a, t, c, g, other or unknown
  misc_feature (722)..(722): "n" may be a, t, c, g, other or unknown
aaaattacaggagaaaattgagaaaaatttagagtccaaggctggcaccaaagacctgagacctaggaacatgagagtctgttttcttcatgtacaaaataaagctactaacacctgttctaacaagactgacatgatggaaatggcaaaatattaacaattatgccaggcgtaactgttgaattgttgctttctaacaattacttcagtgcccaataaatatcttcaccagaaaactatttattcaaggctggctgtggtggctcaagcatataatcccagcactctgggaggccaaggtgggcagatcacttgggctcaggagttcaagaccagcctgggcaacatggagaaacaaaatacaaaaatacaaaaaattatctgggcatggtggtatatacgcctgtaattccagctactcgggaggctgaggcacaagaatcacatgaactttggaggcaaaggtagcagcaagctgagatcatgccactgcactccagcctgcgtgacaaagtgagaccttgtctcaaaaaaacacaacaaaaaccccaaaaattagctgggtgtggtggcacacgcctatggtcccagctacttggggggctgaggtggaaggattgcttgaacccaggaggtcgaggctgcaataagctgtgattatgccactgnaccccagcctgggtgacaaagtgagaccctgtcttcccccaaaaaaaaaancn

SEQ ID NO: 322 - DNA, 813 bp, Homo sapiens
  misc_feature (796)..(796): "n" may be a, t, c, g, other or unknown
  misc_feature (800)..(800): "n" may be a, t, c, g, other or unknown
  misc_feature (810)..(810): "n" may be a, t, c, g, other or unknown
aatgaagaacagctggaagatatgagacaggaacttgtacgacaataccaagaacatcaacaggcaacggaattgttaaggcaagcacatatgcggcagaaggagagacaatgaccaagacagacaagagctcgagtggggctaaaaagaaggacttctccagcaagggagccgaggataatatggtaacgagctataattgtcagttctgtgacttccgatattccaaaagccatggccctgatgtaattgtagtggggccacttctccgtcattatcaacagctccataacattcacaagtgtaccattaaacactgtccattctgtcccagaggactttgcagcccagaaaagcaccttggagaaattacttatccgtttgcttgtagaaaaagtaattgttcccactgtgcactcttgcttctgcacttgtctcctggggcggctggaagctcgcgagtcaaacatcagtgccatcagtgttcattcaccacccctgacgtagatgtactcctctttcactatgaaagtgtgcatgagtcccaagcatcggatgtcaaacaagaagcaaatcacctgcaaggatcggatgggcagcagtctgtcaaggaaagcaaagaacactcatgtaccaaatgtgattttattacccaagtggaagaagagatttcccgacactacaggagagcacacagctgctacaaatgccgtcagtgcagttttacagcttgccgattcttcagtcactactggagcactttaacacttgttcacttgccaggaaccaggacatnactncaggccaacnggc

SEQ ID NO: 323 - DNA, 836 bp, Homo sapiens
  misc_feature (614)..(614): "n" may be a, t, c, g, other or unknown
  misc_feature (730)..(730): "n" may be a, t, c, g, other or unknown
  misc_feature (800)..(800): "n" may be a, t, c, g, other or unknown
  misc_feature (830)..(830): "n" may be a, t, c, g, other or unknown
  misc_feature (832)..(832): "n" may be a, t, c, g, other or unknown
attgttattccaataggaaaagcattttatctcttcactttagcctttgctgagtattgtacaaaaagaatgatgctgcactaaataatgaacttctttttgaagaatttaacaactagatgcattttgccttcctggaatccttttgtctgtctctttgcatcgttgactcttgcttatccagagatctcagcttaaatatttccttaaaggtacctttcctgagattccagctggaattgagtccccttagtatactctgccatatcacctcttgcagtttataattacccagctgtttgtatgaatgttatgtctgtgtctcacatcacactttgaatttcagagagagcagtggccatgtctgtttcggtcactgctctataactccagtgtctctcataacagtctgggaaataataagtactaattaagtatttgttaagtggaaatactgctgttagagcttctcctaattagagtgttaaaaatgagataatgtgtgcatgggggaaggggaaggagagggagaggaagtagataaacttgtgatattaccgtgagataatcctcaagtaagtcctctcacctccagggcctttgtttcaccttgnctgtaaaataggacagactgggttcaagatgccattaatatcctatattttgattccagtaacaatgatgacagattatgtaagctcatttgaatggaatatgtgacagctagctncccaaaagaatatttgacaggtctaaataaacatattagaaatgcttgccaactagatgatattatttanagcctcgtacccctggtagaaacaagcctntntaat

SEQ ID NO: 324 - DNA, 809 bp, Homo sapiens
  misc_feature (776)..(776): "n" may be a, t, c, g, other or unknown
  misc_feature (783)..(783): "n" may be a, t, c, g, other or unknown
  misc_feature (804)..(804): "n" may be a, t, c, g, other or unknown
ttttttcttttttttaagagatggaagggggtgggtcttactttgtcacccaggctggtctcgaactcctgggctcaggcatgagccaccatgcctggcccaatttttgaattttttcaaaggttctcactgtattgcccagaatggtctcgatctccagatgtgaagtgatctttcccacttggccgcctaaagtgctgggattacaccgcacctggcccatgcttttctttaaggaagatagattaccttatttctctcagtttttatgatagccgtatacctgcaaagttccatcttccatttcagattattttgtttttatttttaattctttcagtgtatgctgtgtctgttaacttgaagtaaggataataatttcataccttgcttatgctctccctttgtggtgaaatcattatactacttttctttcttttgttttttcttcaacttttattttaaattcccgggtacgtgtgcaggtttgttacataggtaaatgtgtgccatggtggtttgctgcacagatcaacccatcacctaggtattaagcccagcatccattagctattcttcctgatactctctctccctctgcccctttgtactacttttcaccattatgatttttaccatatccacctgccagttttacagttgataaatgcaaggctggggaacaaagtgagaccccccatctctaccaaataaaaatttctaaattagccatgtgtggtggtaaacacctggggtcccggctgcttggggctgangcaggangattgcttgagcccaaagtcnaggct

SEQ ID NO: 325 - DNA, 844 bp, Homo sapiens
  misc_feature (644)..(644): "n" may be a, t, c, g, other or unknown
  misc_feature (717)..(717): "n" may be a, t, c, g, other or unknown
  misc_feature (799)..(799): "n" may be a, t, c, g, other or unknown
aaaaaaaaatggctcctcccagccttgtgctgtcctcccctggccaaggcccggcttcaccatggagctggtgccgtgctcacgggccttcccagttcccacacctctcttctcatagctagtggctccagtgcccctgcaggccaacccgtaacaactcagctcccaagctgacccttacctgtctgtaaaagccttcccttccaatcagcatccggtgtttataaccacatcctgagccaggtgtggtttccccagaaatgctacccccttgacatgctctatccaccttgatcacacccctcaccggctctttgacctcctcaaaacctccctgcagaactcctccttgtcttctcactctggcagccacccctgtcttcacttccttctttacctggctccactgagagacctgagccctggggaatgcaggtgttgtgcccccctctgccctcccactggcccagcccttggatgcatcattagagatgggtgccagctcacatgaggacccactaccttggctcggccctcttcctgcattcatccttctaggggccccagtgagcacacaggttcttcaggaaaaatgcagctccttacccctcctcttcagcacctgcttttcatagagaaccctncttctatcttgcatgcatgacaggggtcccgtggggccatgcacccagcttccttctctctcctggcatgttncacctgggggtggaagaactgccatttccatctcttcagagctctttcccaggaacccttccttctaggcatggttctgtgncctttgtcttccttagcacagtgccaatctgattttctctttctt

SEQ ID NO: 326 - DNA, 831 bp, Homo sapiens
  misc_feature (668)..(668): "n" may be a, t, c, g, other or unknown
  misc_feature (744)..(744): "n" may be a, t, c, g, other or unknown
  misc_feature (754)..(754): "n" may be a, t, c, g, other or unknown
  misc_feature (801)..(801): "n" may be a, t, c, g, other or unknown
atacgactatgactatttctgcagtaattattattgagacttactataataatgataaggctgtatataaattataccttactaaaaatttaaaatctaggaatttactgagagagcataaagtatggttgtaatagagaaaacaaatgattgaaatggcttaaatgcaagcctttaatattaattttgagtattttaacgcaaataaaaccaattatgacagtgtgctcaaattggtaaacaaccaatctgtgactttatgaaaatatatttatgacagtcatacttgccttactcttaagtgtagtatttgtccttaagttgggagcaccataaattaattttaaagcaaaacatatgaccctcatccaatgttttaaatgaattgcttcctactaggaaaacaaaacatctcaggacatcaaatacttctagtaatcaagatgttttgtttaaatttgctaatgtaagcttcaactctatttggttgcactttaaaaaagcatactagaaaatggggaatatttgaaacatgcatttttaaaagctaggtgttatcttactcagaagatgttaaaagcttctttatacattttatttgaaagtaatttccaaaaaagggatgcttggtgggtatatgaaaaggtgtcagtatcactaatcatcanggaaatacatatcaaaaccataatggaatattacctccagctggtaggatggcttttatcaaaaagaccaaaaatnacagtattantgagactgtggaagaaaaagaacccttacacccactgataggaatgnatatcagtataggcttattaaaaacccttt

SEQ ID NO: 327 - DNA, 834 bp, Homo sapiens
  misc_feature (736)..(736): "n" may be a, t, c, g, other or unknown
  misc_feature (763)..(763): "n" may be a, t, c, g, other or unknown
  misc_feature (803)..(803): "n" may be a, t, c, g, other or unknown
attctgaaagttttctgactccatatttccaagaaacttgtcccactccttaatatttcaaaggactaccatgccaaataaagataaatctttattttatgtagtgaaagcaacaatgtataatcttctcttttctacttacggcttgttaaagagaccggtaactggttctaatgttttgaaatctgcatgcttaccaatgatgtcttcatgagttagctgtaggctaatggaaaaaggaagcttatcatactttttagaactttttataattaaggtcagacctctatattattattaatattacacctcagtatttgcaattaacattgagacatccttgcaacaaaccctttggatattaacaaatattgacacacatataggaatatattaaaaatccttattaaggggaacaccaattagaatcaccataaatgatgtttatacatttcatcaagcaccaagaggccataaattatttggatgagattagccacctaaatgattacatgaaatgaccttagataccaattttgttgaacaagctttccacagtacttatcatttactcatacactattaaaagtttgacattcaggatattagctacaactcttggttatatgtgagagaaactcaactccaactagcaaagaaggaaattaatttattggcttatctaactgcaaagtccacactgtagggctgattccaagcacagctagatccagangctaacataatggcatcaggactctgnctctctctttcagtcccttgcaaggctacttccataagcnttaatggattgctcaaaggcagccctgaagt

SEQ ID NO: 328 - DNA, 796 bp, Homo sapiens
  misc_feature (740)..(740): "n" may be a, t, c, g, other or unknown
  misc_feature (793)..(793): "n" may be a, t, c, g, other or unknown
  misc_feature (795)..(795): "n" may be a, t, c, g, other or unknown
gaattgcaacggcagctgccgggcgtatgtgttggtgctagaggcagctgcagggtctcgctgggggccaatcgggaccaattttgaggaggtacttggccacgacttattttcacctccgacctttccttccaggcggtgagactctggactgagagtggctttcacaatggaagggatcagtaatttcaagacaccaagcaaattatcagaaaaaaagaaatctgtattatgttcaactccaactataaatatcccggcctctccgtttatgcagaagcttggctttggtactggggtaaatgtgtacctaatgaaaagatctccaagaggtttgtctcattctccttgggctgtaaaaaagattaatcctatatgtaatgatcattatcgaagtgtgtatcaaaagagactaatggatgaagctaagattttgaaaagccttcatcatccaaacattgttggttatcgtgcttttactgaagccagtgatggcagtctgtgtcttgctatggaatatggaggtgaaaagtctctaaatgacttaatagaagaacgatataaagccagccaagatccttttccagcagccataattttaaaagttgctttgaatatggcaagagggttaaagtatctgcaccaagaaaagaaactgcttcatggagacatagagtcttcaaatgttgtaattaaaggcgattttgaaacaattaaaatctgtgatgtaggagtctctntaccactggatgaaaatttgactgggactgaccctgagcttgtcattgcacananc

SEQ ID NO: 329 - DNA, 692 bp, Homo sapiens
  misc_feature (667)..(667): "n" may be a, t, c, g, other or unknown
  misc_feature (675)..(675): "n" may be a, t, c, g, other or unknown
  misc_feature (690)..(690): "n" may be a, t, c, g, other or unknown
actgggcggcggaagttcgacggcgccgggcgagtggctgttgagcggcgccgcgggagttccgcaggtttcccgtgttcgcagcggagccggaggccagctgaacccggccgtgggatcccggataggaggaggaggggacccataggacgcgttaacatggacctggaaaacaaagtgaagaagatgggcttaggtcacgagcaaggatttggagccccttgtttaaaatgcaaagaaaaatgtgaaggattcgaactgcacttctggagaaaaatatgtcgtaactgcaagtgtggccaagaagagcatgatgtcctcttgagcaatgaagaggatcgaaaagtgggaaaactttttgaagacaccaagtataccactctgattgcaaaactaaagtcagatggaattcccatgtataaacgcaatgttatgatattgacgaatccagttgctgccaagaagaatgtctccatcaatacagttacctatgagtgggctcctcctgtccagaatcaagcattggccaggcagtacatgcagatgctacccgaggaaaagcagccagtagcaggctcagagggggcacagtacccggaagaagcagctggcaaaagcagcttccttgcacatgaccaggacccttcaaagtgccatgagttgtctnccagagangtgaaggagatgganca

SEQ ID NO: 330 - DNA, 743 bp, Homo sapiens
  misc_feature (720)..(720): "n" may be a, t, c, g, other or unknown
  misc_feature (724)..(724): "n" may be a, t, c, g, other or unknown
  misc_feature (733)..(733): "n" may be a, t, c, g, other or unknown
tgacaataaatattctagttaaaaatatgggctatggcacagtggcccacgcctgtaatcctaacacttcaggaggccgaggcaagtagatcgcttgagtctgggagttctataccagcctaggcagtatagcaagacctcatctggacaaaaatttaaaaaattagctgggtatggtggttcatgtctgtggtcccagctatgtgggagcattgcttgagctcaaaaggtcgagactgcagtgagccatgatcctgccactgcacttcagcctgggtgacaagagtgagaccccatctccaaaaaaacatatatataaataaaatatgggccgggcacagtggctcaagcctgtaatcccaggacttcgtgaggctgaagtgggagggtcatttaaggccagaagtttgggaccatcctgggtaacatagcgagaccctgtgtttacaaaaaatttaaaaattagccaggtattttggtgcaggtgacggcggggacaggggtatcagtggggtgaggtaggaggatcccttgagccaagaggttgagactgcagtgagccatcattgtgccactgtactctagcctgggcaacgagcgaaactccgtctcaaaaaacaagaacaacaacaacaaaaaaaaccatatgtaagggtaactcgggaatgggaaaagccaagtacttaaggatcacaaagctggttttgcccttttgggggntctngggaaatgnccttgggaaa

SEQ ID NO: 331 - DNA, 830 bp, Homo sapiens
  misc_feature (671)..(671): "n" may be a, t, c, g, other or unknown
  misc_feature (773)..(773): "n" may be a, t, c, g, other or unknown
  misc_feature (808)..(808): "n" may be a, t, c, g, other or unknown
  misc_feature (824)..(824): "n" may be a, t, c, g, other or unknown
ttgcaatgtaaaaatatatcttggtctctgcatgatgatatattaacatctataccatggaacttttaaaaggaaaattgtgtggtataattaaaagaatattgcatgttatagagaaacttcacctgttgatttagcaggtgccattgtgtagatgctaagcaaatcttaatatgtttccttggatttttgaaatttgaatttgttgtgtaactttgctagttaaaagatttagagggatttggctgggcgcatggctcacgcttgtaatcccagcactttgggaggccgaggtaggcagatcacgaggtcaggagttcgagaccagcctggccaatacagtgaaaccctgtctcttctaaaaatacaaaaattagctgggcctcgtggcgggcgcctgtaatcccagctacttgggaggctggcaggagaatcacttgaaccagggaggtggaggttgcaatgagccgagatggcgccactgcaccccagcctgggtggcagagctagactctgtctcaaaaaaaaaaaaaagagtgggatttatcatagtttttttttcttaactgttattgactatttttaatttttattttttaattcagtggcctctcaggattattacctgcatttttttttcaggaaaatcccaattctgcaactaactctgnggccttagacaagtctcttgccttatccagggctggttccttggctgtaaaataaagagttggctagatgatctctaaggtcccttttacatctataggttnccttgggacctatattaggggttgatccaaaccantttaatatatcttaancccgtt

SEQ ID NO: 332 - DNA, 891 bp, Homo sapiens
  misc_feature (688)..(688): "n" may be a, t, c, g, other or unknown
  misc_feature (824)..(824): "n" may be a, t, c, g, other or unknown
  misc_feature (831)..(831): "n" may be a, t, c, g, other or unknown
  misc_feature (855)..(855): "n" may be a, t, c, g, other or unknown
ataatatgtgcaaaatccttaacatcgcattgaaagattctttggatctgatcttaccatatatttctagcctaattaatcttctacatttaccctgccagttctctgttcctactcattgattccctaacaatgtaagcagagttcctttgttaagtcattcacagaaagttttccctattcttctctatctgaaaaaaaatgtcctctatccttggagatctaacccaaagtccatgaagcattttactgatactttcattttctgttgcagcacttgctatttcttttatgccatggagtgggcacattttgtatttgtgtcttgtattattgtgacttgatccttggattggatcttattttacttttgatgtatgtggtagtcagaggcctaccaacagatagaacccacacagtaatttggagaaagttttacataaagaataagtagatataatacagtatttatgtaatggaagattagctagtaataactaaagaggagtctaaagaatatagtaataataattataaggagaaaccattgcctctgaagctgagaggtacccaaaaagaacctcttcatcccctgcaaggctgatatccaaactttatttgtgaggacatgcccgtggctcactggctggtggacaaattgctgaggtgctggaacagcaggacttgntggaaatgttttcctctgggattccaaataagtcacccataggggaggatcctaacccagcaagcactcctcttcaaaggccatcttaaggggtgccatcttcgtagaaggtgccttcaattggccaaccactttnactgggntaatgcctatcctggaaaagggtnaatgggaaaaatgctattcccccaagggagacctgg

SEQ ID NO: 333 - DNA, 815 bp, Homo sapiens
  misc_feature (660)..(660): "n" may be a, t, c, g, other or unknown
  misc_feature (784)..(784): "n" may be a, t, c, g, other or unknown
  misc_feature (798)..(798): "n" may be a, t, c, g, other or unknown
  misc_feature (808)..(808): "n" may be a, t, c, g, other or unknown
ttttttttcgctcgtgtcccgccgggtggcgctcaccacctccccggaacacgcgagtctcctgtcgcggttccggtcggaattaccccgtggagcacgccgatatggctgcgctgacactgaggggtgtccgggagctgctgaagcgtgtggacctcgcgacggtcccgcggagacatcgatataagaagaaatgggctgccacagagcccaaattccctgctgttcgactggctttgcagaattttgacatgacttacagtgtgcagtttggagatctttggccatcaatccgtgtcagtctcctctcagagcagaagtatggtgcactggtcaataactttgctgcctgggatcatgtaagtgctaagctggagcagctgagtgccaaggattttgtgaatgaagccatctcccactgggaactgcagtctgagggtggccaatctgcagccccatcccctgcctcctgggcctgcagtccgaaccttcgatgcttcacttttgacagaggggatatcagtcgcttccctcctgccagacctggcagcctgggtgtcatggagtactacctgatggatgctgctccttgctgctgttctggccctcggcctgcagcctggggacatcgtgcttgacctatgtgcctgaagagatcanggatggaaatcaagttcgagttacctcatgggatggcaggaaatggggagaactggagggggacacctatgaccgggttgctggtggatgtgccctgtaccacagaccgcacttcctttatgangaggagaacacatntttaaccggncaaggaa

SEQ ID NO: 334 - DNA, 801 bp, Homo sapiens
  misc_feature (772)..(772): "n" may be a, t, c, g, other or unknown
  misc_feature (777)..(777): "n" may be a, t, c, g, other or unknown
  misc_feature (796)..(796): "n" may be a, t, c, g, other or unknown
gaatactttggatgagacgggaggttttcccattctgatgctaggatcttgttcatgagttaatgaagacagttgaggaaggtaaggagctatttctacttgattagtgaggcttcagtctatttcaacatttcaaagtttttcatgataatttgttcatgaaaaaaaaaagaaaacagaggagttgctccagctctaaaaaaaatttgaaaaccacaccctgtgctaattgcaagtctagtctactctggtgctgctctgtggtattgcagacatagagtctgctctgtggtacatatggaccaggtcttatgatgatgataggccatgtttagtggcttcacacagaggtacttcagagcttttatttggattcctcccacttggatactgttctgactgctttatcaaaattaagtgtctttgctttcaccctcctcctaaaagtcattcaacctaaaagtaaaattttggggggcattgaggggggaagaagcagaaaatgttctgtttaacaatgagatctacaccagatatttcattttgattatttaaatataaaagataccttttgctcacagtagttggcttaaagtacttcatgatttatgaggggtgattgctgacaaagtactgggaggagccgttttgagtcaacacgaccatttgcatctgccttcacttgctctcctctcttattaaattgagctatcctatggtgtgggtttttatagtaatactagaacactgtgagtcataccagagcagttgngccgncttcactacattctcaccntgctg

SEQ ID NO: 335 - DNA, 821 bp, Homo sapiens
  misc_feature (690)..(690): "n" may be a, t, c, g, other or unknown
  misc_feature (800)..(800): "n" may be a, t, c, g, other or unknown
  misc_feature (816)..(817): "n" may be a, t, c, g, other or unknown
taaacagaggcccacagctagtttgcagaaccactcaattttaagtgctgtttaaattgcagagcaaataatcctgtgtgggaactgtggttacaggaaatggagcactctaacaatgtttacttctaaacttcgttgaatgataatagaaagcaccctaattgacttggaaaaaaaaaacagcaaaagcaaaagtagcaacatatgtcaacatatgtcactgaaataggaaacagtcattggaatgttgcacagaggctaataactatagactgttggatacagtggtgagaggagccccattttaggtctttcttttaggtttttggttttcattactccaagtaatccttgacccaagaacaaaggcttgttgtatgagttccactgccagatttatgggatgcctggatcattcagaaggatgcttcaactattatttgtcaggtccaaaggtcgtacttgataaccccattttctatgtatggggtagtctaatatattattttatctactttatttttcccttttcagaaagtccttagtgcaaaccaccattggaatctagccagaaatgtctgtcagatagttagaattgtaacatctaaacctgccacggatcgaatggtacttacaggtacctctcttagggactctgtgatccctaaaatatcagaagaaaatgtctgnctttctgccaaatatctacttgacttgggggaagtcaaaaataaaagtaggtgtccaaggattttacttttggcgaaatctgacgtctcctgagcttattttcattttgnccttggacatacatanngctt

SEQ ID NO: 336 - DNA, 688 bp, Homo sapiens
  misc_feature (649)..(649): "n" may be a, t, c, g, other or unknown
  misc_feature (657)..(657): "n" may be a, t, c, g, other or unknown
  misc_feature (681)..(681): "n" may be a, t, c, g, other or unknown
gttggcctactggtgaaggaaaatctcaagggaaaccttaaggaatggctacctacagtccaccttttaactgagacccacacggttgcatgaccttcatgagttggccatggctcttttccacgttcctttcatcccaggactccggctgaaggacctgccattctctgggagactgctatccttgtagcagaaggaaagggcgatggtggaatccataatggcttctaaagctgctgttttgaagtgcatgtttcacttcctgctcgcgtttcattagtgaaaataagtcacatggccaagcctgatagcagcggagtgggggtgattaattctctcacagggaggggtagaaatcagttaggtgcaagcaacaccctctaactgcgagccattggaggcttttgagtgggtaatgacataatctagtttgcatttgcggaagatcccatgcagaaacaaatgtcacactgcagctgcaaggacagtgaggagggagatggccatggtgccttggtccccagagtgacggcatgcggaggcgtcaatgcatctacctccagcacaccaggcatgatgtcaggtgcagcaggaggtacctggccctttgctacacagaccacatggtcttgctggggacaagacctanggaacagntcattttggtacagtgtggttggntcctgga

SEQ ID NO: 337 - DNA, 803 bp, Homo sapiens
  misc_feature (711)..(711): "n" may be a, t, c, g, other or unknown
  misc_feature (729)..(729): "n" may be a, t, c, g, other or unknown
  misc_feature (749)..(749): "n" may be a, t, c, g, other or unknown
ttagattatgacataaatcttgtaaaaacctgtcagttattttcatctatgagagaagaggagcccaaactctcgcccacctgttcttaaccagaaaacccactgactttgaaaatctcacctctgccacccatctacttgcattcgtctttggcagacctcaagataaatatgggttaatgcctgcatgatgcctctgaattcaggaattgcagggaaaactcggggctttgtgccagtctctaagttggcaactttggctgaacaaatgagtagtggcttcagtgtccttgcgtacacattctgtggattgatttaatggagttgtcagcatgatcatcatcttctagccaggggcatagttgccaaggccatttacctctttctaagaagaaacagaattatgtgtatatatgagagaaagaaacaagaatgcgtgaatgaggatgaagaaacatttaccccatgtactcaagacatttcagttttaaaagtcactttcctattagacttcttgaaaaagattctcacatagcctctatgtaatcagacaaatgacatttgatttcaagagcagaggggtaaacatcctctgctaatcgacaggtagcaggtgtcagaggaggcataatattaatagcgccaccttctgttgggtcagtggagatgggtgaggagcagcacagagcagcagggatcatcacatgcagncaaacttggcctctgaanggggaaggtagtgggaatangtggtgagagaactccatttttctcttggcctgggtttatatttcggagggaaa

SEQ ID NO: 338 - DNA, 790 bp, Homo sapiens
  misc_feature (746)..(746): "n" may be a, t, c, g, other or unknown
  misc_feature (781)..(781): "n" may be a, t, c, g, other or unknown
  misc_feature (783)..(783): "n" may be a, t, c, g, other or unknown
aatttagtgctactgaacaattcagtagttatttctgaactttgctgcaaagtgctctttagttaaagcacattaagaagggtcactgcttaattgctttgtaaaatgaagcaatggtattttttatccgatatagtgtaatttaaaagttttcctacaaagtgagtttatattgttgcctaaactatgttatgtaagcaaaggttttggaaaggcgggagggagtctagattcggcgagagtgtgcgtttgtgtgtgtgaatgtatgaaaagtttccccattgggttattcttaagatgtgtttattgtaaagttttctacgttttgcccacagtaaatgtacaacttcgcaattgtaggatttaattgattgaattccaaatttatactgtctcttcccttctgcagagacattatgccactgtaaggtgcatgtacagaaaatacctctgaggttgacttgttaaataactgatgaatgttatttcacactgaatctcaaagcagtcatttgttttgcgggttaggggaaagttttgttttttgctggtgttttttgttgtttttaattaggcacactaagagtggctaaatttgggggaattggtggataggaaagaccttgaaaagtgatgtgtagatgaaaacacaaggtatggatgttggttacagagttcagttttaacaagggaaatttggggatttttttttttttacttgcatggtctatgggtagctatcaaanggtgtacaaattattccagcttttcccaatctaantnatattgg

SEQ ID NO: 339 - DNA, 832 bp, Homo sapiens
  misc_feature (747)..(747): "n" may be a, t, c, g, other or unknown
  misc_feature (767)..(767): "n" may be a, t, c, g, other or unknown
  misc_feature (824)..(824): "n" may be a, t, c, g, other or unknown
tggatcaccacctggtccagcttggccgaattcataaacctgaccacagttatggtgtgaagtttgtgaagtcctttataaactcaatcaggcgtgcaatcaacaaatatccaccaataaacttaaaaataaagtgcaacagacttaactctatagatccaaagcagcccccacgaccattccgaagctttgttcctggaccacttaaagctaccctcaaagaagatgtattacagaaggcaaaattctttcaagataaaaaatatctttcaagagtagcaagaagtggcagagatgatgctattcaaaattttatgagaagcacctcccatacctttaagaatggaaggatgatagaaagtgctcccaaacaacatgattaaaaaaatgcttgaacaacttagccttaggaagcatggtaagactctggacttaaatagtaactaaatctgctgccagaactcaagcaacagtttgtaggttatcaggtgacttgaccccctgcattcattggtattaagatatatcttgttcatttatttgaccactcctgacaattccagcactctacgactgatatgtcgaagaactgtttcattagaagacagaagaatgaaagaagtgttttgaaaagtctaatggagatataatttgaaggtaaaatttatatgatgtatgcatatgtgtacatgggtcaatgttaattcttttatctctgtccagttcattttctgcaaacccatcctnctttcctaattaagtaatgnctaatgctcatctatttagtcaaaggtattttttaatggtttaagctacttcaaaanttatccta

SEQ ID NO: 340 - DNA, 871 bp, Homo sapiens
  misc_feature (780)..(780): "n" may be a, t, c, g, other or unknown
  misc_feature (798)..(798): "n" may be a, t, c, g, other or unknown
tggaagaataagtattttgtaaaaattcacttgataccacattttcatttctggaacaggatagcaatcattcatttctatcttgtgtctgtgtccaccacaaccaagaccagatgcatctgatgaacattctggaattctgaactgcagctagcctgctgtgcaatagtacaagtgggaggacgtcttcccagggctgggctggttctcaactagtgcccagatgcaaaaggactgaggcatcactttcagactgcatatatttttattcatataaagttctttataatactttattttgtggtgttaagttccaccagttatttacaaatgatgtaaaaagctttaagtgttgttaatttctaaagtgttcttgcgttttcagaagtgtaagtggatctcagttgatctgtcaccccaaacctcaaatgatccatccaccctgcttggccatctaattcacctgctctccccagtgactattttggacctttcctctccatagatgactttgcaatctacagggaaaatacttatgcaggacatcttatatctcccccttaccacgtacagttctctccacagctgccagcagccctaacctttttgtctctccacctgtgctttggatgctcttctcccagccttttcaggatctttgtctgtcctcctatattaatgtattcaattattctctcagctagatccttgctacttggttttaaatttaagactaagattaaacaaaactatctttcacaaccacaaacccccttccgncaagcaactaagaatttnctctcattctcagccagttttcttgcagcagtatctttagtcattggcctcaatcatctaatccctatcttaa

SEQ ID NO: 341 - DNA, 871 bp, Homo sapiens
  misc_feature (854)..(854): "n" may be a, t, c, g, other or unknown
aggcttatcaaagtcaagcactgtgtcacctggtaatgcaaacccttccagcatctctgcctttaggttttaggggggaatcgtcaaaacagacatgcagcccactacaaagtacttgaaagcaatagggcaccattcaagcacacgcctgcatttactgggctacgtttatttagggcattcaggtggctgtaattattgtgcataaatagttttctaaaaagcataaaactaaaaacttgatccatggaaacacagtgtggtttaggatggagatcggatttcactcacctcaaaataactcctggtgtttgcctccaagacccattaatttatgttatctcttgctctgtagcagtttggatttgtcacacttagcaaagtaatttggtttcccacaggttttgttctgttttatagaagcaagagaacggttttgtgtttcagagcatgaatacattccttcagaaatttagccagcatttcagaaggatatgaatttttatttttagctatttacacctgcctgaaaggttgatgctgctaaacattgatattacttgaaaagttgtgcccaaggcatattgcttctttcctagctaggaattgaaatgtttatgaagcttgctgaaaatttaccaggttaccaaaataagagtttatatctcttatgtagtgactaacagaaatagatttatgtattcaaccaaccgtccaatatttattaagccactaatatatgcattgaattatgctggatttggggtgacatcagattattcaacatacacttctcctggttcagttccttttaacatggtattactgggcacttacagaatggcaaaatcccnttaataagactcaggcc

SEQ ID NO: 342 - DNA, 870 bp, Homo sapiens
  misc_feature (721)..(721): "n" may be a, t, c, g, other or unknown
  misc_feature (826)..(826): "n" may be a, t, c, g, other or unknown
  misc_feature (834)..(834): "n" may be a, t, c, g, other or unknown
  misc_feature (842)..(842): "n" may be a, t, c, g, other or unknown
tgcctcaaccataagcgacattgaaactgctgcagacaagtgtgaggagatggaggaaggctacatccagtgctcccagtttctatatggggtgcaggaaaagctgggtgtgatgaacaaaggtgtggcgtatgctctgtgggactacgaggcccagaacagtgacgagctgtccttccacgaaggggacgccctcaccatcctgaggcgcaaggacgaaagcgagactgagtggtggtgggctcgccttggagaccgggagggctatgtgcccaaaaacctgctggggctgtatccacggatcaaaccccgacagcgaacactcgcctgaacttccttttggagcaccgcatggtcttgccagctaccaggagccacttaagagattattgtgctgttttccaggaaagctgcagctagaaaatggtcttaatggtgctcactttagcagacagcgtccacaatgtgaatcctacagtttccaggtgaggccctttctccagtttgcccattaactgggagaggtactttcgcctccaaggactgaattttgccaattactataaatccaaataaatacccactttcaaaacacccacccctcttgccattaagaagtcccataacccccggttggttgccagtgaagacagaagctcttactgacttggccccgaggccatcacccccttcagcagtgaacactgtccgccgctgtgangcctgctcccctgcgaccgcctgccccccgtcaccgaatcggacactcatcctttctacactttccacacatgatccttctttcctttatcaccaaaggagcctntgtatggnaacatgtncatggttgcttgcccatgtgtatgcctc

SEQ ID NO: 343 - DNA, 869 bp, Homo sapiens
  misc_feature (728)..(728): "n" may be a, t, c, g, other or unknown
  misc_feature (859)..(859): "n" may be a, t, c, g, other or unknown
gaattcaaaagatgcctatggttggttacacagcttttgatttgcataggtattcgaacccaggttttgctgacttcaatgctttaccttaaaagatgcttttttagaatggtagatgttaatagatggtctgtgtaattagtttcctgggcctcctgcaacaacatagaaaaaaatgggtaacgtaacatttattctctcacaattccagaggccagaagtccaaaatcaaggtgtcagcagggcgatgctctctgaaggctctagaggagaatccttccttacctcttccaaacttgtggcagttctcagcagtccttggtgttcttggcttgtagatgcatcactccaatatctgcctccatcaccccccagctgtctttcctcatatgtttttgcatcatcttacctctgcgtctgtgttcaagttttcttctgcttatgaggacatcggttatatttgtttaggagcctaccctattccagtgtgatctcatcttagttacatctaccatgaccttatttccaaataaggttacattttcagacatggtagttaagactttaacgtatatttttggggttgagaggacacaattcagttggtaacagctatgacaaaattgggtaaattgatgaacatcttaaaaaaaacacagtggaagaggcaggcactgtagagtgacaaaatacatctttatagaaattccatgttaaaattattttgnggtataataatcaaatttaaatacctaatacatatattaccattaaacaggatagtcagcactacctagttttttaactgaatttgtaatggccatatggttatggttctttagtaatacttgaactaaanggaattgcaa

SEQ ID NO: 344 - DNA, 861 bp, Homo sapiens
  misc_feature (824)..(824): "n" may be a, t, c, g, other or unknown
  misc_feature (858)..(858): "n" may be a, t, c, g, other or unknown
tttaaaacaaaaatttcctgcgtgaaattctggcttagttaactttttggtctttctctcggggcttttcttgttcttataaaatactgtaaattacaaatggaaatttaatgcagaattaaatttctagtgtacaatatttgtaagacaagaagaaaatttccttttcccagatctcaggaactaccttgttcctgttaacttcttgaactggctagttgctcaaaggtatgtatacaggcctttagggaagagcagtttttaaaattttcctttctgatcattatatacctgtcagatgacaatagataatcttccaaagttgctacctaaaaatcctaggaaagaaactttggtgaacatgactgccattcccattaattgctaatgaaaaacatcagacttgcttagtagaaaaacacctaatttggtataactttcttgcagtttatccatattatgtgcttgttacttaatgtaattaaaagcattttaaaattctacttttttcgtatccactttttatacttgctacttcctaaatcctccctcactgtttatttcatccatctactcatttcccatcatccaaagttagcctctccttgtataccaggcactgtctgatttccatgtattccttttatttttactgtgggcctttgtgcttagtatacttttacttcatataatgtgattaacaaatgaagtgattatcatatggagtttaaggaaattagatgtatcttgcaattactttgaaatctttgggaaaccttaagaagatggatctgtttcattttattaccacatcttggaattgntcatgattcctaaaatttcttgcctacccacatnttg

SEQ ID NO: 345 - DNA, 869 bp, Homo sapiens
  misc_feature (788)..(788): "n" may be a, t, c, g, other or unknown
  misc_feature (826)..(826): "n" may be a, t, c, g, other or unknown
  misc_feature (866)..(866): "n" may be a, t, c, g, other or unknown
gaaacatatgaagctctattagccagatttcccaatcttcgatttgcatacaaggatccagagaagaactggaatagaaattgtgtgaaaggacttgtggcttctctgattagtgtgaaagacacttctgcaaccacagctttagaattagtggctggagaacgactctacaatgttgtagtagacacagaagttactggtaaaaagctactagaaaggggggaactgaaacgtcgatacactataattccactcaataaaatttcagccagatgtattgcaccagaaactctgagagttgctcagaatcttgttggccctgacaacgttcatgtggctctttccttggttgaatataaaccagaacttcagaaagcaatggagtttgtctttggaacaacatttgtttgtgacaatatggataatgccaaaaaagtggcctttgataagaggataatgactagaactgtaactctcggaggtgatgtgtttgatcctcatgggacattgagtggaggtgctcgatcccaggcagcttccattttaaccaagtttcaagaactcaaagatgttcaggatgaactgagaatcaaagagaatgagctgcgggctctagaagaggaattagcaggtcttaaaaacactgctgaaaagtatcgccaactaaaacagcagtgggagatgaaaactgaagaggcagatttattacaaaccaagctccagcaaagctcatatcacaagcacaagaagaattagatgcccttaaaaaaaccattgaggaaagtgangagactttgaaaaacactaaagaaatccaagaaaagcngaagaaaaatatgaagtattggaaaataaatgaaaatgcngat

SEQ ID NO: 346 - DNA, 813 bp, Homo sapiens
  misc_feature (722)..(722): "n" may be a, t, c, g, other or unknown
  misc_feature (736)..(736): "n" may be a, t, c, g, other or unknown
  misc_feature (746)..(746): "n" may be a, t, c, g, other or unknown
atttagaatttaagcctagatacttcagcagtttttctataactgaacaaagaaacaaagtagctcttgatggtccagtaaaatgagtctaaccagggactccttacaggttttatatatagtaaactacattttcgtggaatatgagaattacgttaaaagagtaccaactaagaataattttattgttcatggaagatagggtaaatctcaatactgccttatttatacatgtactaatcaaaagagccattaaactgtttttccacactattatactaagcacatttcacagctttacatgtcatctgggcccagtgtggtgactcatacctgtaatcccagcactttgggaggccaaggcaggaggatcactgagcaacattaggagacctcatctctacaaaaaacttaaaaattggtcgggtgtggtgatgggtgcctgtagtcccagctacttgggaggctgaggcaagaggattgcttgagcacgggaggttgaagctgcattattgagccatgatcgcaccactgcactgcagcctgggagactgagtgagaccctgtctcaaaaaaaaaaaaaaacagttgtttcaagtcagtaaattctattttggataagtagtaaagaatgggttttggggggtgtatttttttaaatcttgtaggggacaagtaatctattccagcaggtagatctaatctttcttttcattctaagnttatactctaaagntttattttgncagactttttacagggtacctttagtggttgccaatctggcatgtctgacaactgggttataaactg

SEQ ID NO: 347 - DNA, 817 bp, Homo sapiens
  misc_feature (719)..(719): "n" may be a, t, c, g, other or unknown
  misc_feature (760)..(760): "n" may be a, t, c, g, other or unknown
  misc_feature (789)..(789): "n" may be a, t, c, g, other or unknown
acgtggacgcgtctgggctgctggaggcagcccgagccgccgccgtcggtgtcgccgccaccaccaccatcggagtcacgagtcccgcgtctgtccgaagtcgccgctctcgggctgctcacgtctcttcggagggcgcgcacatggcgactcaggcgcactccctcagctgctcgtgaggaaaccctctatcctcacaatacacccactgctacatgttctcatagacgcctctccccgtccttatcgtagtactcactgcaccctgtcgttgcttaattttcctctctcttcacctatggtggtaggggccatcttttaagatctggtgtgtccatgatcttaaagtttttaagtttctattaaaaatcaattatattatttgtgagagaagttttttttttttctttttgaaatacgtaaaataaagctggctggcttcttgaattttagtagtgcattgtggaaataacacaggcttaggaattagctatgtttgaatcccagctgtgttagtagcattgtgctggccctctgtccttctgacccttagtttgctcatctgaaaatgggaattaccttgtgcccaccctgggattgagaagatttattaaacttgtgtttgtgcttaggattctttttagttgtttgatccttggtaaagattcaaagcagatttctgcataacaggttaatgtcagaatgagttcaccgtgttncaacgtggagtgccaggatccatctagtcggcacagagganaaagcctggctgactggcaggtcctgaanccctgtgtacaccaaaccaaactgagtc

SEQ ID NO: 348 - DNA, 784 bp, Homo sapiens
  misc_feature (718)..(718): "n" may be a, t, c, g, other or unknown
  misc_feature (736)..(736): "n" may be a, t, c, g, other or unknown
  misc_feature (766)..(766): "n" may be a, t, c, g, other or unknown
cagagttgcccagggaaagcagctatgacatctacagagtgcccagcagtcagagcatggaggatcgtgggtacagccccgacacgcgtgtggtccgcttcctcaagggcaagagcatcgggctgcggctggcagggggcaatgacgtgggcatcttcgtgtccggggtgcaggcgggcagcccggccgacgggcagggcatccaggagggagatcagattctgcaggtgaatgacgtgccattccagaacctgacacgggaggaggcagtgcagttcctgctggggctgccaccaggcgaggagatggagctggtgacgcagcggaagcaggacattttctggaaaatggtgcagtcccgcgtgggtgactccttctacatccgcactcactttgagctggagcccagtccgccgtctggcctgggcttcacccgtggcgacgtcttccacgtgctggacacgctgcaccccggccccgggcagagccacgcacgaggaggccactggctggcggtgcgcatgggtcgtgacctgcgggagcaagagcggggcatcattcccaaccagagcagggcggagcagctggccagcctggaagctgccagagggccgtgggagtcgggcccggctccttcgcgggcttcaatgctcgggccgagttctggcggctgcggggtcttgcgtcgaggagccaagaagaaccacttcaaccgganccgtgaggaccttttaanttttgaacccgacaggggcccgttacccgnccttacgaaaccaaatgg

SEQ ID NO: 349 - DNA, 712 bp, Homo sapiens
  misc_feature (663)..(663): "n" may be a, t, c, g, other or unknown
  misc_feature (684)..(684): "n" may be a, t, c, g, other or unknown
  misc_feature (710)..(710): "n" may be a, t, c, g, other or unknown
tatttataatatgtggaggagagagagctcaccatgctcaggtaaagggatgaagcctctggtatgtcagaaccatgctgtcttccatgagacttcctttgtgaagagcatccatttaaaagacttttatgaatacatggtttcaatcaagtccccagagaacacatttgtcttctgagctgctggcagttttgagaatctgatgacctccgaggggaccctgcactcagccatcaaagtgttcctgcccctctggacactcataattcaatggtagatgcaggtggagttgagaacatcacccagcttccccaggagcttcctcagatgatggctgcagcagccgatggtttggggagtatagcgatagacacgacccagctcaacatgtccgtgacagatcccacagcctgggctacagccatgaataacctgggcatggttcccgtagggttgcctggacagcagctcgtgtctgactcaatctgtgtcccaggctttgatccaagcctcaacatgatgactggaatcacccccattaacccaatgataccaggccttggactggtacctcccccaccaccaacagaagtggctgttgtcaaagaaataatccactgcaaaagctgtactctttttcctcaaaatccaaatcttcacctnctttcacaagagaacgacctnctgggtgtaagaccgtgttgtcgganga

SEQ ID NO: 350 - DNA, 844 bp, Homo sapiens
  misc_feature (796)..(796): "n" may be a, t, c, g, other or unknown
  misc_feature (822)..(822): "n" may be a, t, c, g, other or unknown
  misc_feature (829)..(829): "n" may be a, t, c, g, other or unknown
tgttataatgcaaagcctatcaaacttaaaattagcttaatcctgaaagatgtatattgcataatcaacctgtcacttttttcaaacacgatttgggagggtattgaggtcccatgtaaattttaaaataaaagacaaacaggaactaatcttttagtaaaaattattttgttttcatataggaaaacaatgccttctgtcatttacggaaaacacatgggcaatatggttggttgttcattgtgcccctctatcctataggaagaatgtgatcttttaattgtgcttggtgctttgtttctggagatatatatatatatattatatatatgtatatataccatatgtatatatacatatgtatgtgtgtatgtgtgtatatatatctctctaggttgtatgtaattcaatatgttggaatttaaagatgcattattatttggatttgatgtgaaattagattgtgaataatggagattgctctccattttttgctgttctagcatagccaaaaatataaagatatagatgtacatatacatatgtatttgattaaacactttaaattttaaatggccgcatcaaattttaaatggtagatgatatcaacaattgcagtgcactcaaaatgttataaaatctttgtagcacaaatcctgaagtatatgcaaactaaatagcatatttatataaaatacctagataacatgtctaggttgagatatttaatccctcatagagctatatttgactaataaaaaacgacagctaaaaataatttcccttcctataagtncaaatatgattttaaagcatcattgnaacttgncatgaactattaata

SEQ ID NO: 351 - DNA, 672 bp, Homo sapiens
  misc_feature (512)..(513): "n" may be a, t, c, g, other or unknown
  misc_feature (515)..(515): "n" may be a, t, c, g, other or unknown
  misc_feature (622)..(622): "n" may be a, t, c, g, other or unknown
  misc_feature (665)..(665): "n" may be a, t, c, g, other or unknown
  misc_feature (672)..(672): "n" may be a, t, c, g, other or unknown
cttcctgatggctcctggatgtcaggaagcaccacgccatttccagcttctcaggctcatggcttaaaaggaccccagccaactgttcttcccaagcaagcagacgggatttatggtggcggtttcttcaaagtgcttcttctctacccaaatccagaagcgaaacaaaacagaacactcctttaccttttcgaagccaggaaaaggaactcctcttattttttaaaaggcccaagagctgcaagcaaatgtcaacttcatcctgtggtttgatttacatgtttctttgggagaaagagacaaaatacagcattgaacttaaaaaaaaaaacttacaatgaactgttataactcagaacatgatgcacaaacccagatttaacaaacggagcaaaaaaaaaaaaagttcttctgagaggctcctcgtgtgaggctgtgcctgtctggcgaatcatcttggaaatggatgaggttaaaccaagggtcattgagtcccagcactgggattgttnntncctgctctgaaaaaatggaaaagctacgtccataagaggcatggatgtctctagaacctgggccaaatatacaaccgcttttttcgagtgcgattttccctaattgnaatattgtgcatgatcatgaatggaaaattttgggaaatgganaaaagtn

SEQ ID NO: 352 - DNA, 865 bp, Homo sapiens
  misc_feature (714)..(714): "n" may be a, t, c, g, other or unknown
  misc_feature (809)..(809): "n" may be a, t, c, g, other or unknown
  misc_feature (826)..(826): "n" may be a, t, c, g, other or unknown
  misc_feature (849)..(849): "n" may be a, t, c, g, other or unknown
gtcgtggctcgttccattctcggcggtggtacctgctcccggtggccctgaggacgtgtgggccaggggcggccccgaaattaggaagcggagggggagcagtctgcaggtctgcggggctaagtgtcgcggcggcgcacctcgcgtcaagaatccggaggaggagactgcaaggataggcccaggagtaatggagtccaaagaggaactagcggcaaacaatctcaacggggaaaatgcccaacaagaaaacgaaggaggggagcaggcccccacgcagaatgaagaagaatcccgccatttgggagggggtgaaggccagaagcctggaggaaatatcaggcgggggcgagttaggcgacttgtccctaattttcgatgggccatacctaataggcatattgagcacaatgaagcgagagatgatgtagaaaggtttgtagggcagatgatggaaatcaagagaaagactagggaacagcagatgaggcactatatgcgcttccaaactcctgaacctgacaaccattatgacttttgcctcataccttgaatcctaaaagttttcgctgaggttaatgtgaacactgctttacaagcttgtatttttgtgatttactttttctgtaagccttttggtgtttacacttaccagtttctaatggaaattagaattctaattgaatattgttttgtctcagcctaaaagttacngtcagcattgcaattcacctattttaggaaaaatactcttttcataatatgaaatgcataagcattcaaaaagcatctgtattccatcatttccnttttcattccagccttntttttgaagtttactttcctctncggttcctgattaaaa

SEQ ID NO: 353 - DNA, 822 bp, Homo sapiens
  misc_feature (636)..(636): "n" may be a, t, c, g, other or unknown
  misc_feature (666)..(666): "n" may be a, t, c, g, other or unknown
  misc_feature (782)..(783): "n" may be a, t, c, g, other or unknown
  misc_feature (814)..(814): "n" may be a, t, c, g, other or unknown
aatctatgccagctctctggcatctggggttcctgactgataccagcagttgaaggaagagagtgcatggcacctggtgtgtaacgacacaatcagcacaactggagagaggcattaaagaaccagggaaggtagtttgatttttcattgaattctacaagctaatattgttccacgtatgtagtcttagaccaatagctgtaactatcagctgcaataccatggtgaccagctgttacaaaagattttttcctgttttatctgaaacatactggatttatatatgtataagcgcctcaatggggaattagagccagatgttatgatttgtttgctctttttcttttatagttatagcaaaaatatggataatttctagtgaatgcataaattaggttgcgtttcttattttgctttaaatctctggtagtttttccacccctgtgacacaatcctaatagacagtgtcctgtaaatggacacaacacaataaagtcaagttattattgctgttactctggatgatatggaaaacactgccatattttaaatcaactactccacgtgtttttccatccaatcacactgctgtgattcagggatctttcttctaaaacggacacatttgaacctcangttcatcacaaacctggtacctgttgcttnccagaggatgggagaagtgtagttaatcacacctcttagtttaatctgaaatcttgacccagttatttaacaaataaatacctcattgattatatttaaaagtaatcccttcctgnnaaccaaatggggacaatgcattccaaaaaantttttaaa

SEQ ID NO: 354 - DNA, 769 bp, Homo sapiens
  misc_feature (746)..(746): "n" may be a, t, c, g, other or unknown
  misc_feature (762)..(762): "n" may be a, t, c, g, other or unknown
  misc_feature (765)..(765): "n" may be a, t, c, g, other or unknown
aaaaccgcggttgccggagcccgaactgaggcggcggcgggagcccggttggcgtctggtcttcgcgtcggccccgcggagccagacgctgcccccggcgcggggagaagatggtgcctagcggcctcgggcccgccacgcgccgccacgagtgagcccagcgcgaccgcgggcgtccgccgagcagctggcccggctgggcccggggcgcgcagctgcccgccggggcggggtggagctgatcagaataatgttcagcatcaaccccctggagaacctgaaggtgtacatcagcagtcggcctcccctggtggtcttcatgatcagcgtaagcgccatggccatagctttcctgaccctgggctacttcttcaaaatcaaggagattaaatccccagaaatggcagaggattggaatacttttctgctacggttcaatgatttggacttgtgtgtatcagagaatgaaaccctcaagcatctcacaaacgacaccacaactccggaaagtacaatgaccagcgggcaggcccgagcttccacccagtccccccaggccctggaggactcgggcccggtgaatatctcagtctcaatcaccctaaccctggacccactgaaacccttcggagggtattcccgcaacgtcacccatcttgtacttaaccatcttaagggcatcaagattggacttttcaaggcaaggggaaagccccaccgaagggaggatttaaaccatttaaccntttaaccccttggccntancaag

SEQ ID NO: 355 - DNA, 714 bp, Homo sapiens
  misc_feature (603)..(603): "n" may be a, t, c, g, other or unknown
  misc_feature (682)..(682): "n" may be a, t, c, g, other or unknown
  misc_feature (698)..(698): "n" may be a, t, c, g, other or unknown
  misc_feature (709)..(709): "n" may be a, t, c, g, other or unknown
tcccttctcgtcgtcgccattttgagctggtgactgtggccggctgggagtaggcggcagtgagtttccctgggagggcagcgcgcttggcgcttctcccctccccccgatctgcctccagtctcggacttggttgttgcgcgctccggctccggctgagctgggagagttggaggaggtggcggcgggcagaggtgatgtctgggagcccttccttgacagcccgggccgagaagagtccctgcgggaagcatcacccaggctggcagatcatggtagcagcagcgggggtggctgggaagtgaaacggagccagcggctgaggaggggccccagcagcccccgaaggccctatcaggacatggagtatgaaagacgtggtggttgtggtgacaggactggccgctatggagccactgaccgctcgcaggatgatggtggggagaaccgcagccgagaccacgactaccgggacatggactaccgttcatatcctcgcgagtatggcagccaggagggcaagcatgactatgacgactcatctgaggagcagagtgcggaggattcctacgaggcctccccgggctccgagactcaacgtangcggcggcggcggcacaggcttccccgagacggcgactatcgggaccaggactatcggaccgagcaaggggaggaggangaggaggaggaggatnaaggaggagangagaa

SEQ ID NO: 356 - DNA, 722 bp, Homo sapiens
  misc_feature (650)..(650): "n" may be a, t, c, g, other or unknown
  misc_feature (655)..(655): "n" may be a, t, c, g, other or unknown
  misc_feature (672)..(672): "n" may be a, t, c, g, other or unknown
gcaaaaagcgaggcgacggcttaaagatggagaacgacccccaggaggcggagtctgaaatggccctggatgctgagttcctggacgtgtacaagaactgcaacggggtggtcatgatgttcgacattaccaagcagtggaccttcaattacattctccgggagcttccaaaagtgcccacccacgtgccagtgtgcgtgctgggaaactaccgggacatgggcgagcaccgagtcatcctgccggacgacgtgcgtgacttcatcgacaacctggacagacctccaggttcctcctacttccgctatgctgagtcttccatgaagaacagcttcggcctaaagtaccttcataagttcttcaatatcccatttttgcagcttcagagggagacgctgttgcggcagctggagacgaaccagctggacatggacgccacgctggaggagctgtcggtgcagcaggagacggaggaccagaactacggcatcttcctggagatgatggaggctcgcagccgtggccatgcgtccccactggcggccaacgggcagagcccatccccgggctcccagtcaccagtggtgcctgcaggcgctgtgtccacggggagcttcagccccggcacaccccagcccgcccacagctgnccctnaatgccggcccaccatnctctggccccctgtaccacccttagagccctgccccaactgcgtgcccct

SEQ ID NO: 357 - DNA, 671 bp, Homo sapiens
  misc_feature (597)..(597): "n" may be a, t, c, g, other or unknown
  misc_feature (603)..(603): "n" may be a, t, c, g, other or unknown
  misc_feature (646)..(646): "n" may be a, t, c, g, other or unknown
ggccttcatgtgtttgtggtggcaaagaggctggtagggatcttctgctgacttttttccctgcaatagcaattccctcccgtctccaggcagatctgatctaggtggggaagatgggaccacgagtttgagtgcctctatgctgccttcctagatttccaatcaccacaggtgcatcttcattctatcagtgcaccccactactcttccttcacactccagtcaaatcttagctgtttgtttgttgccttgatcctttttttgtgtgtgggttagacaagcaccaggtatccctactcagccatcttgctgatgttactcctttattgcttttcttttcttttcttttctttttttttttttgagatggagtcgcgccctgttgcccaggctggagtgcaatggtgtgatctcagatcactgcaacctccacctccttggttcaagcgaccaagtagcctcagcctcccaagtagctgggactacaggcacccaccaccacacccaactaatttttgtatttttggtagagacgggagctcaccatgttggccaggctggttttgaactcctgacctcaagtgatccgcctgcctnagcctnccaaagtgctgggattataggctggagccactgtgcccaactnctttattgcttttaatctctgcata

SEQ ID NO: 358 - DNA, 796 bp, Homo sapiens
  misc_feature (599)..(599): "n" may be a, t, c, g, other or unknown
  misc_feature (754)..(754): "n" may be a, t, c, g, other or unknown
  misc_feature (782)..(782): "n" may be a, t, c, g, other or unknown
  misc_feature (792)..(792): "n" may be a, t, c, g, other or unknown
gtttccatccctcctctggaggcttttgaagtcaccgggagacagatgtgctctgtggcaggcaggggagtgggggtgctcaggcacttgggaggtctgggagctcctcagtgtgaccgctgggacccaccaggactttttcctttgtcagaagcctttggttgctttgctgctctgcatgtgtcactgtggaggggcaatagagcaaggccttacatggcatggtcatttctcgggcccaggaggcttagaggcctgcccctggcgctcaagtattgaaccagaaccatggggtggcactgaagcctcctcaccacatcatgataaataacggggacattcacagagcaggcactgtttcctcagtccatggctgagtacatcaccggtgttttctctcttattcctcccatcaagcctaaaaggaatctctattggagatactgccattagtgttccttttataggtgaggaactgaggcatagagggttccccagttgaaccaactgataaatagtagaacttggattttaattcagtcttgatgccagggataaggctcttactttctaccttaggctatttctaggaaacgcangagagtgttgaaggggcagagaaagggatccagttcctttctgtcccgcatcctagtccctgagaagcaaagaagaatgtgtggcttcttttgctttgcttttggtgcattccacacatcttcaggggacctgggctcttgatcttggcctcttnccctttaactggtaaatgggaacaggtnaaggggtacnagta

SEQ ID NO: 359 - DNA, 797 bp, Homo sapiens
  misc_feature (747)..(747): "n" may be a, t, c, g, other or unknown
  misc_feature (749)..(749): "n" may be a, t, c, g, other or unknown
  misc_feature (794)..(794): "n" may be a, t, c, g, other or unknown
acagtgaatcagtgacccccaacccacggtcccctctagaagactattccctccatatcattgaccttcacaccggccgcttatgtgatacacgcacgttcaagtgtgacaaggtggtcttgtcacacaaccaagggctgtacttgtacaaaaacatcctggccatcttgtctgtgcaacaacagaccatccatgtcttccaggtgactcctgaaggcactttcattgatgtgcggaccattggccgcttttgctatgaggatgacctgctcactgtgtcagctgttttccctgaggtacagcgggacagtcagacaggcatggccaatccctttagggatcctttcatcaattccctcaaacaccggttgctggtatatttgtggcgccgggcagaacaggatggtagtgcaatggccaagaggcgcttcttccagtattttgaccaactgcggcagctgcgaatgtggaaaatgcagcttctggatgaaaaccacctgtttatcaagtacactagtgaggatgtagtaacactgcgagtcacagatccatcacaggcatctttctttgtggtgtacaatatggtgacgacagaggtgattgctgtgtttgagaatacatcagatgagcttttggagctctttgagaacttctgtgacctttttcgtaatgctaccctgcacaagtgaaagttcaatttccctgctcagcttctagcaacaattttgcaaggcagatccagcgccngntcaaagacctattataaatgccaagttggagggcacacagagcantac

SEQ ID NO: 360 - DNA, 850 bp, Homo sapiens
  misc_feature (727)..(727): "n" may be a, t, c, g, other or unknown
  misc_feature (754)..(754): "n" may be a, t, c, g, other or unknown
  misc_feature (791)..(791): "n" may be a, t, c, g, other or unknown
  misc_feature (846)..(846): "n" may be a, t, c, g, other or unknown
aatacaagtggatttgttaaatggcttttccctagatgaagtaggtcaaactcgggcctgcatctccctaaggaggcaataatgcctggtagcattaccagagggtaagacggagaagtactttggagaaattagaaacttccctagtacttgttatgaaagctcaaactctttaaaataatggaaatgtcataaatcaggcagattcacttttgcctgaggatggcttgaaggaggctgctgtgagctctttagtgatttgtctgacacaggctacaggcaaatttaaaggtgaccaacttagcaagaaacaaggcaattgaaagatcggtttcctaccttgaccagctaatgcctgcaagagcagaccgaatggctgaattccaacccgattccaggaatactgtttgctgacctgctgtcttaagtcagtgctgtgattcctgcaaaagacggcagagtcagggtggggaaatgagcaggtgctgctgttggcggtgggtctaaacaccccaccacacatttgtttgcatcacttgtccaggactatgattctggcactattttcctggatgttatacaatgtcaaaggggaaggtggatggttcccaccaagacagaagcaccttcttatttcagatgctatcttcttggtctgctgtgctgtgtaacaaaaatgtatcaaccccaagcagagttaaaggccagagctgggatgctgtggtangctgaaaaacaccctggaaaagatatncatggcctaatcctggaccattgaatggttccttatntggaaaaaatgtggggagcctttgctaatgggattaaattaaggatcctgaatcntgac

SEQ ID NO: 361 - DNA, 770 bp, Homo sapiens
  misc_feature (243)..(243): "n" may be a, t, c, g, other or unknown
  misc_feature (598)..(598): "n" may be a, t, c, g, other or unknown
  misc_feature (728)..(728): "n" may be a, t, c, g, other or unknown
  misc_feature (755)..(756): "n" may be a, t, c, g, other or unknown
tcataatgaacagtgagaactctcctactgggcttctggaatgttgggaccactctggtccaatgctactgtcgtttcctgtctggaaatgagagtagcttcttgaatattcttcctattcctactttggcttcttttaatctattcacaccattccatcagaaccacctgagggttttgtccaaaacacagctccgatcctgtcacgacctcttgctttaaagcccattagtagctttctgntgctcttgtgatagaaacaaaactccctgatacagcctacatggtcctgcattgtctggctcccacttccctttttcatttcttaccacactccttggcctctgcactagaggctcactggctgattgcaggcttgagaactgaccatgtttgtttctgccagaggcctttgcactgctgttttcttttcctggaatgtgcttccttccctatttagttaactcctagtcatcctttaatttattatttgagacggtcttgatctgtcacccaggctggagagcagtggcacgatcttgcctcactgcagcctcggcttcctgggctcaactgatcatcctcccacctcagcctnccaaagtgctgagattacaggcatgagccaccgtgcccggccagctcaatgaattttgtaaagcaatcatggtcatgtagctaccactcaattaaaaaagtactggccaggtgtggtgattcacatttgnaatccaagcactttgggaacttaggcnngaggacacttgagg

SEQ ID NO: 362 - DNA, 654 bp, Homo sapiens
  misc_feature (579)..(579): "n" may be a, t, c, g, other or unknown
  misc_feature (616)..(616): "n" may be a, t, c, g, other or unknown
  misc_feature (647)..(647): "n" may be a, t, c, g, other or unknown
gcaacctccacctcccgggctcaagcaattctcatgccccagcctcctgagtagctgggattacaggcgcccaccaccacgcctggctaattttttttgttttgtattgtttttttttttttttagtagagatgagatttcaccatgttggccaggctggtcttcaacttctgatcttagctgatccacctgcctcagcctcccaaagtgctgggattatacgcctgagccaccgcacccagcctcaaatcataaacttttttttgttttttgagacgaagtctcactctgttgcccaggctggagtgaagtgacacaatcttggctcactgcaagctccgcctcccaggttcaagcgattctcctgcctcagcctccccagtagctgggattacaggtgtgcgccactgcgcctggctaattttttgtatttccagtagagatggggtttcaccatgttggccaggctggtcttgaattcctgacctcaggtcatccacccacctcggcctcccaaagtgctgggattacagacatgagccactgtgctcagcctcaaatcataaactttttaaaggnttatccctgaccctctaaattaggttatgtgccttgntatatgctcttttagcacttatcctaattgngattggg

SEQ ID NO: 363 - DNA, 743 bp, Homo sapiens
  misc_feature (670)..(670): "n" may be a, t, c, g, other or unknown
  misc_feature (690)..(690): "n" may be a, t, c, g, other or unknown
  misc_feature (721)..(721): "n" may be a, t, c, g, other or unknown
ggaacggggcagtcccctgaggagcggggctggttgaaacgctaggggcgggatctggcggagtggaagaaccgcggcaggggccaagcctcctcaactatgacctcaaccggccaggattccaccacaaccaggcagcgaagaagtaggcagaacccccagtcgccccctcaggactccagtgtcacttcgaagcgaaatattaaaaagggagccgttccccgctctatccccaatctagcggaggtaaagaagaaaggcaaaatgaagaagctcggccaagcaatggaagaagacctaatcgtgggactgcaagggatggatctgaaccttgaggctgaagcactggctggcactggcttggtgttggatgagcagttaaatgaattccattgcctctgggatgacagcttcccggaaggccctgagcggctccatgccatcaaggagcaactgatccaggagggcctcctagatcgctgcgtgtcctttcaggcccggtttgctgaaaaggaagagctgatgttggttcacagcctagaatatattgatctgatggaaacaacccagtacatgaatgagggagaactccgtgtcctagcagacacctacgactcagtttatctgcatccgaactcatactcctgtgcctgcctggcctcagctctgncctcagctggtggatgccgncctgggggctgagatccggaatggcattggncatcattgggccttctggacat

SEQ ID NO: 364 - DNA, 717 bp, Homo sapiens
  misc_feature (662)..(662): "n" may be a, t, c, g, other or unknown
  misc_feature (670)..(670): "n" may be a, t, c, g, other or unknown
  misc_feature (700)..(700): "n" may be a, t, c, g, other or unknown
aattaaatggccacaagtgcctggtggtccctttgttggtccacacagatctgcctgccttgggagaggtatctggggctgactggtgggtgttccattgcagaaagcttctgagacacacagaagtcgccacagttgggagacgtgatacccgcagtgctgcagtcctgcttgccttgttgttgttctctcaacttctacattagagacttagttatgatgagtgtggccgcccttaggaaggcatgttatatactcacttaaatgcctcagcccccttttttaaaatactttgttcagtggttaatggcatagactagagctagactgcaagagtttgagccttaactctatcccatgttagctgtgaccttgggcaggtcgcctaatctctctgtgccttagtgtcctcaccttcaaattaagataatacaggcttgttatgaggattaaatgagttaatatttataatgcacttaacacttaaaatgttcttgttctttgtaattgtttttcaagatgaagtgtgtaactaataaagtgaggggggattaacagcgaggactggcttgccaccaacagagcaaatctttagattcatattcaactcaagcctcccagtttcaaccctgtatacaactgtccagagtctgtacatggangcacgcanccacgtggccgaaaggaacccgctgggcangacaagcacgtgggccg

SEQ ID NO: 365 - DNA, 787 bp, Homo sapiens
  misc_feature (670)..(670): "n" may be a, t, c, g, other or unknown
  misc_feature (726)..(726): "n" may be a, t, c, g, other or unknown
  misc_feature (758)..(758): "n" may be a, t, c, g, other or unknown
  misc_feature (776)..(776): "n" may be a, t, c, g, other or unknown
cattccctaggaagtgctttgaagaaaaacttgaggtatatgaaatggttaaaaatcagaaactaaaccttttaacatggacatcaaagctttgccataagcaattcagcatattcctagaaatgtttctaatccataacctgagagaatgttgatctccatagtgtgaaaatgacttgggccagtttaacttgctcttttttttattttttcactaattcccttttgtttttctctgataattcttctctttcctgagcctctttagagcagcacttacaggattgcctctgtaaagccttattcctgtcccagaaaaggtaacccaaaaagtctctagtatccactaaaaggtaacccaaaaatctctagtatccactggctttctccagtgtggaagctttcccctccacctcccatagatcactggaaaggacccgaggcctcggttctaatccctggcttatcactaactgctgtgtggctttggcttgtcccttagtctctgtgagactgctgcaccctcatctgtcaaagatggaactgaacttagttgagctctgaggtccctgtggacttggcccctccacaccctcattatggcaactggacataaacttaacagaggacttcccagcaaaatgtcctcttcttcctacaaacaggctgnttctatatgtgcatgtttcatgctaagcacttctttcttgggtggagatggcaaangcctctttctgctgagacaaagtgatttgganagcacctggcccctgaanggggagtggta

SEQ ID NO: 366 - DNA, 832 bp, Homo sapiens
  misc_feature (750)..(750): "n" may be a, t, c, g, other or unknown
  misc_feature (818)..(818): "n" may be a, t, c, g, other or unknown
  misc_feature (821)..(821): "n" may be a, t, c, g, other or unknown
atgttacatgttcggaaaaactttcagttgctcaagggcaataagaaaatttgaggccgggtgtggtggctcacgcctgtaatcccagcactttgggaggctcaggtgggcgaattgcttgagcccaggagttcgagaccagccggggcaacatggcaaaaccctgtctctactaaaaatacaaaaattagctgggtgtggtggtgcatgcctgtagtcccagctactcgggaggctgaggtgggaggatcccgtgagcctgggaggtggagtttgcagtgagctaagatcgtgccactgcactccggcctgggtgatggagcaagacctcgtctcagaaaattggaaactattgactaagagaagtttctaggtttgcactgaattgtcttttgtacatacagtgaattgttttgctgttctccccactccatattaatgcaggagccaggttggtctgttaggatgaacaaaggttgaggggagggcaggattcgtgcatctgggggccaaacacatgttccgtcttgattgccttaagagttactagcgaggtcagtgttaggcttgcaatagggattttaaaatacactaactagttccttagctaccttcacatacattctataggccttcttaaattagcactaacctccacttccttctctgccccattgccttccaaatatgctatggagctatttttggtaccacgttataacgtgaatatttatacagtagcctcttcangctttgtaattttcattccaaaaatgccccggtgtgatgctttacactctacaaagtatgggttaaangcncaaggtcatgg

SEQ ID NO: 367 - DNA, 652 bp, Homo sapiens
  misc_feature (639)..(639): "n" may be a, t, c, g, other or unknown
  misc_feature (645)..(645): "n" may be a, t, c, g, other or unknown
  misc_feature (651)..(651): "n" may be a, t, c, g, other or unknown
atccccagcaagcaccagggcccgtgtgaccaggccccgtccccatgcctcggggtgcagtgtgcatttggggcgacgtgtgctgtgaagaacgggcaggcagcgtgtgaatgcctgcaggcgtgctcgagcctctacgatcctgtgtgcggcagcgacggcgtcacatacggcagcgcgtgcgagctggaggccacggcctgtaccctcgggcgggagatccaggtggcgcgcaaaggaccctgtgaccgctgcgggcagtgccgctttggagccctgtgcgaggccgagaccgggcgctgcgtgtgcccctctgaatgcgtggctttggcccagcccgtgtgtggctccgacgggcacacgtaccccagcgagtgcatgctgcacgtgcacgcctgcacacaccagatcagcctgcacgtggcctcagctggaccctgtgagacctgtggagatgctgtgtgtgcttttggggctgtgtgctccgcagggcagtgtgtgtgtccccggtgtgagcaccccccgcccggccccgtgtgtggcagcgacggtgtcacctacggcagtgcctgcgagctacgggaagccgctgcttcagcagacacagatcgaggaggcccggcagggccgtgcgagcangccgantgcggnt

SEQ ID NO: 368 - DNA, 859 bp, Homo sapiens
  misc_feature (776)..(776): "n" may be a, t, c, g, other or unknown
  misc_feature (778)..(778): "n" may be a, t, c, g, other or unknown
  misc_feature (823)..(823): "n" may be a, t, c, g, other or unknown
aggtatatcatcctaagatcttcgtcagctctgacaaacatcctaggaacccactctaactcctcattttttcatgcctcctccagtgctcttcactcatgctgtttccccttcttctcttggcttcagactctggacattaatgtgaaggccccagccctgatgacaaaggcagtggtgccagaaatggagaaacgagggtacagagagtgagagagagcctgggtgagaggggacaccacacgggctgagggcactggtccacaatgggaagatggtcagctctcttctttttccagaggcggctcagtggtgatcgtgtcttccatagcagccttcagtccatctcctgtaagaacccttttgtctacctcttccatcccaccctccactccacatctttccacccctcctattacccaaggaagtttgtgtccccttgtagaatcacaccaccaagtccctgcccacaaaatagatgccttgcctccacaaaccacaacctaggggaggtttagccacaagacagttccctaactctgcccctcccttacaggagatccctattgagcactgccctctatgtctagttattagaaccaagaatgacctggaaactatgagtctaacacattctcttctttctccagggcttcagtccttacaatgtcagtaaaacagccttgctgggcctgaccaagaccctggccatagagctggccccaaggaacattagggtgaactgcctacacctggacttatcaagactagcttancnggatggtgaagaaagggagctttgcatttgactgggaccccttgnaaggcattcatctttttggacaagggaagcccacta

SEQ ID NO: 369 - DNA, 709 bp, Homo sapiens
  misc_feature (625)..(625): "n" may be a, t, c, g, other or unknown
  misc_feature (656)..(656): "n" may be a, t, c, g, other or unknown
  misc_feature (674)..(674): "n" may be a, t, c, g, other or unknown
acttccgctgtcccgcgaagggcggggggagcgaactgttgtggtgcggagcgttcggcgggcggcggccgggcggcccaggggctgccgcgggactcggggcgcagccgagtggctgcaggggtggagtgggccggacgagccgcggggcccgggtgccgcgggttcgaggccgggccccgcgcgaggaggccgcgccaccccgggggagctgcccggcagcgagtttgccccgctgccgaaagaaggcgggagccggcaggggccttcgaaaccccctggcaacccaggcccggagtccttggggagcggctgtttcctgggacgccctcccggacacccccgctgcagggttacggttctgggcccccggcagaaggctcctccgggtgacccccggcggggccctgcgagccgcgggagccgaccccggggcctcgagccgggaggaagggggcttccggaggcggagggccgggggccgagggagccgggcctctcggacgcggggcagggcagcgcccgggctggagacggactctgggaccctcggctgcgggggtctcagcgacctgcccgcggcaagcgcggccgcggagtggctaccggggacccttccccaganggaccggcccggggccggggagatgaacggnttcaagcaccggaaggangacaagcccgcgaaagggccccccggcggccccaa

SEQ ID NO: 370 - DNA, 792 bp, Homo sapiens
  misc_feature (774)..(774): "n" may be a, t, c, g, other or unknown
  misc_feature (778)..(778): "n" may be a, t, c, g, other or unknown
  misc_feature (789)..(789): "n" may be a, t, c, g, other or unknown
aatggagtggttatctttggaaaataaactgtaacacttggagcaacagtcctgagtggagaaggtgagccccgggacctgccaggagactgtgtcttgactatccccatcagagatgcattttctgctatgtcacatcccatccgttagaatcttccggatactatatctcatagttgatggtctcttgaattcagcaatttcatatctaaagagattcttgaagacaccatgttgtacaccttaaatatatatacaatttttatttgttaattaaaaaataaataagtgaggccagagtgctgggattgcaggcgtgagccaccatgcctggccgattttttattttaacgttttgttttatcttactgtttttccttaggtgagaaaaatgtacccttccatgcctgtgctttctagattttgggactgatacagatccacagaggccacacctaaaattaaattatcgttagtgctaaaacttaattgactgtgtatataactgtgcaattgctgttactgatataactgtttggggttcattcaacagattaaagaagcaaggtcttgcatttaacacacaaactaatgagatactgctttatacaagaattttaaaaacactgtcatatggtttaagtgtaagttaatgtcatgcttatgtcatataacatagcatgttagagttctctagagggacagaactaacaggatatatgtacataagaaagggagttgattggcccggtgtggcggcttatgcctgtaatnccancactttgggangcc

SEQ ID NO: 371 - DNA, 827 bp, Homo sapiens
  misc_feature (762)..(762): "n" may be a, t, c, g, other or unknown
  misc_feature (774)..(774): "n" may be a, t, c, g, other or unknown
  misc_feature (821)..(821): "n" may be a, t, c, g, other or unknown
tagcactgattttttaaaactatggtgactgtattcatattagacaaagtagaaattagaacaaagaatattaccagggataaatagagttgtttcataatgataaagtggtgaactcatcaagaataaatgatcttaaatgtttatgcacctagtaaaataatttcagtatacatgggaagaaatagacaaattcacaattgtggtcagatttcagcacccttccttcaatagataatagatcaagtagttggaaaaccaagaaggctatagaagacttgaacagtgctatcaaccacattgacttaattggcgtttatagaacgctactcaacagcaaactgcacactttttccaagcatagccagaacatttttcaagatagaccatattctgggtgggaaaataagtcaattaattctgaaggatttaaatcatacaaagagtgttcactgaccataatggaattaaattagaaaggaatctggaaaaatatcttgtaactgaacatcacacttccaaataacccaggggcacatcctgagacattaaaaacatcttaacaaatttaaaagaatagaaaccatacaaaatactttctgagactacagaattaaactaaaagttaatactgaaaaagtgctggaaattttccaaatatttggaaattaaacagtatgcttctaaataacccatggatcaaaggaaaaatctcaagaaaaaatggttaaatattttttaattttaatggaaaattccggnttatggaaaccntggtgggatcaagctggaaacagggcttcaaaaattgggagcatttngatgga

SEQ ID NO: 372 - DNA, 894 bp, Homo sapiens
  misc_feature (755)..(755): "n" may be a, t, c, g, other or unknown
  misc_feature (839)..(839): "n" may be a, t, c, g, other or unknown
  misc_feature (848)..(848): "n" may be a, t, c, g, other or unknown
  misc_feature (862)..(862): "n" may be a, t, c, g, other or unknown
tttcaaagacataaactcctgctgcccacaggaagcaacaatgcaagaacaagatatgccattcttgcgaggagggccaggcatgtacaaggtagtgaagacgggaccctcaggtcacaacatcagaagctgccctaaccttagaggtatcccaattggaatgttagttctgggaaacaaagtcaaagcagtgggagaggtaaccaattctgaagggacatgggtgcaactggatcagaacagcatggtagagttctgtgagagtgatgaaggagaggcatggtccttagctagagacaggggcggaaaccagtacctccgacatgaagatgaacaagctcttctggatcagaattctcaaactcctcctccaagccctttctcagtgcaagcttttaataaaggggcaagttgcagtgcccaaggatttgattatggactcggaaatagcaaagttttgactgttttacccactgcaggtgaccaactgagtgccatattgaattccattcagtcacgacccaatctcccagctccttccatctttgatcaagctgcaaaacctccctcttccctagtacacagcccatttgtgttcggacagcccctttccttccagcagcctcagcttcagagtgatcgaggaaacatctcaacatcttctaaaccagcctctacatcaggaaaatcagagctgtcctctaaacacagcagatcgctttaaacctgatggacgtatgaacccggactactgnttgatcagaagaagcttaggggcaccagaaagtttatctgctagtgaatcccttatcttaaaatctgatgctgcaaaagttganggcagattnccacagtaggtcantattccccaacattacaccttgcagacatttg

SEQ ID NO: 373 - DNA, 795 bp, Homo sapiens
  misc_feature (711)..(711): "n" may be a, t, c, g, other or unknown
  misc_feature (751)..(751): "n" may be a, t, c, g, other or unknown
  misc_feature (774)..(774): "n" may be a, t, c, g, other or unknown
aagaagatgaagaaggaaaccaggtgaactcagcaaggcagactggctgcttacttcagcactattggaattatttcccgctgttgccaatggaaatcaaagaaaatggatgtgacgtctgtgcaggtggacggcagtccgaggggcttatttcacttgcttctcagtgcaacttgataggagaatccagcatcttaaagttgcatatgtgtagcactaatgtttctttttaaatagttgggggaaaatgacctagaaaaccaaattgcagtttggtagccaaaattaactcttggtttatttgtcctttgtgtgtgaaaagtcctactattccgtgcgtcagacttcctcacagaactgttgactggttttggttcttagtactattgagatctttcgcgtcgatcccaacggccttagcggcggcagactggaataacaccttacacctttctggcctgcatttctgtagacttcactctcaagggaggagttttcttttcttacgttttgacttttgcacaccatatgcactagggattctggaaacttctagcatgactgcaaagtggccaagagaataaagtccttgatgataaatcacagtatatcccttgagcctcaccttattgccagtgctagattttttctttttaatctctccgtttttgctaacgaaaacttgaaaagcttatttggaagcttaaatgntttatcttttctccatggactaaacctcttcaggactctntcgcacctggatgtccagctctngaacaccagtcagatgggcat

SEQ ID NO: 374 - DNA, 725 bp, Homo sapiens
  misc_feature (609)..(609): "n" may be a, t, c, g, other or unknown
  misc_feature (651)..(651): "n" may be a, t, c, g, other or unknown
  misc_feature (677)..(677): "n" may be a, t, c, g, other or unknown
  misc_feature (720)..(720): "n" may be a, t, c, g, other or unknown
ataaagaaggaaaatttgtgattcactaccccgaggaagaccaaagtgttaactggttattttcttcctttgaatgtatactttcataccttcctttaatgagattgaactcttggccaggcatggtggtcagtactttgggaggagtaatcccagcactttgggagggtaaggcaggaggattgcttgagcccaggagttcaagaccaccttcagcaacaaagtaagactccatctctacaaagaaaagaaaaaattaggtgggtgtggtggtacacttgtggttccagatggtgggaggctgagacgggaggatcacttgattccaggagtttaaggctgcagtggtttgtgttcgtggcactgcactccagcctgggtggcagagcaagaccctgtctcaagaaaaaagaaattgaactctccccaaaaatgatgtgagaatttaactgtggaggagaccagatactcttgggtgatgtgacctgtgatacttctcctagtagacactgaatgatgagaagctggggatcataggaatagctgtatttttcaaatgtttgttggtaacgagtgaggaacctgatgcatccagctccagagtaaggnttatttgccatggtaacactggataagtacattggtgcctgnatttccaagtaatttatcatttctgnattttagtaaacatacatatatacagaaaagtgcacaaataantggac

SEQ ID NO: 375 - DNA, 747 bp, Homo sapiens
  misc_feature (665)..(665): "n" may be a, t, c, g, other or unknown
  misc_feature (712)..(712): "n" may be a, t, c, g, other or unknown
  misc_feature (721)..(721): "n" may be a, t, c, g, other or unknown
aaaaaaaaaaaaagtttccatttctttcaaatagagttgctgcctgctatatgcaagaagattggttccagtacaccctgagtatacctaaatccacagatgccagctcttttataaaatggaatattcgcatgtacctacccacattctcctgtatactctataaatgtctagattaattaaaatatctcatgcattgtaaaagctgtgtacatagttgtattgtttagggaatcataagaaaaaaaatctatatgtgttcagtacagacccaaccattgcaggcctatctacatcgtatatatcacctataatgttacagtttcttgtttcaatactcagattacttttgtctaatgacctgaaagaatgtgttaacaccaaccgcaattctggttcttctctcttgataacccaagtattacgatggttatgacaatgatgattgctgtatggtgcctaatgtgatgtgtagaggtgactagatgtgtggcatcatagataaacagtgagacctcaggctaacttgaatcttgacaggacatcaagaccttcatctatgttggaagacccaggttctgattgaagatgttgactctttgcaggaggctaatactaatgtcagcatctgttcagcttgagggctgaagatgtttgtgttgaanggtatgtcttcatatttgcagatatttagttagaaacattggtttangaagctagntctttttctttgaatccctaaaaaaa

SEQ ID NO: 376 - DNA, 820 bp, Homo sapiens
  misc_feature (775)..(775): "n" may be a, t, c, g, other or unknown
  misc_feature (801)..(801): "n" may be a, t, c, g, other or unknown
  misc_feature (817)..(817): "n" may be a, t, c, g, other or unknown
cgctttctgtcagcctctctccctctccctctcccctctccttcctctcgcttcctctctcgcacctgagcgtacgcacctgcccgggcccggctccctcctcctctcccctccctctttccccgcccggccgcgggagcctcgtggctgcgtcaccgccgcccccccagacaagatggacaccgcggaggaagacatatgtagagtgtgtcggtcagaaggaacacctgagaaaccgctttatcatccttgtgtatgtactggcagtattaagtttatccatcaagaatgcttagttcaatggctgaaacacagtcgaaaagaatactgtgaattatgcaagcacagatttgcttttacaccaatttattctccagatatgccttcacggcttccaattcaagacatatttgctggactggttacaagtattggcactgcaatacgatattggtttcattatacacttgtggcctttgcatggttgggagttgttcctcttacagcatgccgcatctacaagtgcttgtttactggctccgtgagctcactactgacgctgccattagatatgctgtcaacggaaaatttgttggcagattgtttgcagggttgttttgtggtgacgtgcacactgtgtgcattcatcagcctggtgtggttgagagagcagatagtccatgggggagcaccaatttggttggagcatgctgcccaccgtcaatgctgcgggcatcaccaaaatgaggcttcagcaggaaggaaatggtgcaanaaaatgttgctgctgatcaagcctgntaacccaccagctganaac

SEQ ID NO: 377 - DNA, 861 bp, Homo sapiens
  misc_feature (810)..(810): "n" may be a, t, c, g, other or unknown
  misc_feature (855)..(855): "n" may be a, t, c, g, other or unknown
  misc_feature (858)..(858): "n" may be a, t, c, g, other or unknown
ctagcttaacttcatttaaagaataaattaatcgtttttaaacttatgccagcagttgttaattcccagatggcaggtgaactctctaaacatttttttaaaacttttcatcaaatagtaattccattttaacccaaaaatagctttttgttttctttcttaaaacatgaccatgatgcatcgtcaatcaaaataaactgaagtatttattaattacagctgtattgatttctactctaaactgacttcctccgaaatctagtatgtttcatgtttcaagaattaatttcttgatggtactctgctgcactgtaatttagtcatggtggattgagtcaccagatattaagacagtcatgattgcaaatgacagatggcatccagtggctcaccattgtttgtacctcttggtacccatttctctgaagctacaagtacagccatgaggcagtggtaactgtcttagttggagtctcagagctcatgcttcatttattcccaaggcaaggcactaaaaagccatagttggagctggagcacttgccaacttgtatttctgccatttagaaggtgctcagtccctacatctaaaatttgaagggaaaggaaatcttccatatgaatgccacttttcgttattttccagaccatcacatcttacttttcctttcattcaacaatgataacttattcgccaacacttttcaagaatgtgtttacatgaaagcagagcaagcatgttaagagacccagactgcaaataactttggacgggttcagtgtaattcaaagtgagtcatcctgcctcanttaccgaatgacagctctgatgacagaacttggaaaagctacccngancgg

SEQ ID NO: 378 - DNA, 887 bp, Homo sapiens
  misc_feature (793)..(793): "n" may be a, t, c, g, other or unknown
  misc_feature (876)..(876): "n" may be a, t, c, g, other or unknown
  misc_feature (879)..(879): "n" may be a, t, c, g, other or unknown
aaaatggacgtaagattttatccacctccagcccagcccgccgctgcgcccgacgctccctgtctgggaccttctccctgcctggacccctactattgcaacaagtttgacggtgagaacatgtatatgagcatgacagagccgagccaggactatgtgccagccagccagtcctaccctggtccaagcctggaaagtgaagacttcaacattccaccaattactcctccttccctcccagaccactcgctggtgcacctaactgccatgcatcctagtctccccaggaacatagcccccaagccgaataaccaaatgccagtgactgtctctatagcaaacatggctgtgtcccctcctcctcccctccagatcagcccgcctcttcaccagcatctcaacatgcagcagcaccagccgctcaccatgcagcagccccttgggaaccagctccccatgcaggtccagtctgccttacactcacccaccatgcagcaaggatttactcttcaacccgactatcagactattatcaatcctacatctacagctgcacaagttgtcacccaggcaatggagtatgtgcgttcggggtgcagaaatcctcccccacaaccggtggactggaataacgactactgcagtagtgggggcatgcagagggacaaagcactgtaccttacttgagaatctgaacacctcttctttccactgaggaattcaaggaagtggtttcaccatggattgctttgtacagtcaaggcagttctccattttattagaaaaatcaagntgctaagcactttaggaccatttgagctttgggggtcacccacttctgggaagaaatagtcatgcttctttaataattttttnaancctttaag

SEQ ID NO: 379 - DNA, 862 bp, Homo sapiens
  misc_feature (657)..(657): "n" may be a, t, c, g, other or unknown
  misc_feature (757)..(757): "n" may be a, t, c, g, other or unknown
  misc_feature (764)..(764): "n" may be a, t, c, g, other or unknown
  misc_feature (851)..(851): "n" may be a, t, c, g, other or unknown
  misc_feature (862)..(862): "n" may be a, t, c, g, other or unknown
atgtaaattttcccattgttcttaagcaagtcattaaaattaaatataactatgaatggagagtgttttattctttcaattacatagggtttgtgaagagtcattctttgtctacttatatttaatcaacatgcaatattttatgtgccttattaccatgtgttaagaaggtaatattcacgttacctagctattttttacattagccaaaaaaatatggttatgtgcaaatattgtgaagaacatgcatgcaagtagtttgcttattaaccaggtttggtgtcagccacacacttataaagctaataattgctagctattaatattataactttagttcaaatattactgatgtctgttcttctaagactgaatgttaagattagaatttagaatttagtacaagtatgtataaatcatttcaacagaaaaaaatgaatgcaaatcaggaaccagctggaggcagatttgcatgattattttaatgctgtgacaggacgtgaacactcagaaattcgaattaggatgcttatttctcatatctacaatgagcactgagtctctcttatgatgtggccagctatcaccctgtgttatcagcaaaccctactaatagaaatttgagagtctaatatcaaacttactcttcctatttgntttctctgagccctgggttagaagactgatatgaaataagcatttttactatactgagctatccgtatcatttcattattggtgttgcttagaaattctncacaggntttcaaaagataaatcatgccatttgattatcagcaccatttggccaatcagcacccaaatcaatggactcttgcctggcagccctnttaaaaaaatn

SEQ ID NO: 380 - DNA, 581 bp, Homo sapiens
  misc_feature (11)..(11): "n" may be a, t, c, g, other or unknown
  misc_feature (196)..(196): "n" may be a, t, c, g, other or unknown
  misc_feature (314)..(314): "n" may be a, t, c, g, other or unknown
  misc_feature (320)..(320): "n" may be a, t, c, g, other or unknown
  misc_feature (519)..(519): "n" may be a, t, c, g, other or unknown
  misc_feature (553)..(553): "n" may be a, t, c, g, other or unknown
  misc_feature (562)..(562): "n" may be a, t, c, g, other or unknown
ggatccacggncgcacagctaaacagcaaccccctacccgcttcgtctccctccgccgctatcggggcctaagcgggagcggctggcacggcgtcactgggtgggctggggcggaagtggaggcggagggagacggtggcagtcgtccgcggggccctgggctctcgcggcgaggccctggtgggcgcgaggcatnggggagggggaggaggaggagcccgcggcccgggcggcggcggctctcgggttctccgtagggccccgcctcggagcgggcggcggcggaggaggagactgaggagcaggatggcggnctcggncctgtacgcctgcaccaagtgtacccagcgttatcctttcgaggagctctcccagggccagcagctctgcaaggtccgtgggctccgggaggcgggcgggatgggtgtcctcggccgtagccggagggggccgggtagccgctgcactgcagcccctcttcgccggcgcctcaggggtttgggagtctggagccctcgncttcccactcggggacccctttttctgggggctngaacattanctgggaacggaccctgaaa

SEQ ID NO: 381 - DNA, 673 bp, Homo sapiens
  misc_feature (652)..(652): "n" may be a, t, c, g, other or unknown
  misc_feature (659)..(659): "n" may be a, t, c, g, other or unknown
  misc_feature (665)..(665): "n" may be a, t, c, g, other or unknown
tcttcttagtcactacttcccacagagttaaccattgccaagattagctttaatctttaaaaataacctgagattagctttgcctgttctgaaaatttacatgcatttaattagacgatatgcattatttggagtttgggagtcttcagttattgtgtatagcaggggcgggtttgttctcattgctgtatattttactgtacaaccgtgccactcagttattcattttactgatgacagagacttaattggttccagtttgggactcttaggaatagtgctgctgtgaacatttggcgatgtgtcccttgatgtacatatttgtgtatttctggtgggtatatactgaggaatggtatgtgtatggtcatagggcatatgtaccatcagctttagtaccagtagatactgccaaacgattgtccatattgagcatcttcttaatgctttttttgtgggggtgaagggggcagagtttcactcttattgcacaggctggagtgcaatggcacgatttctgctcactgcaacctccgcctcctgggttcaagcaattctcctgcctcagcctcctgagtagctgggattacaggcatgtgccaccacacctggctaattttatatttttagtagagacagggtttctccatgntgatcangctggncttgaact

SEQ ID NO: 382 - DNA, 858 bp, Homo sapiens
  misc_feature (774)..(774): "n" may be a, t, c, g, other or unknown
  misc_feature (780)..(780): "n" may be a, t, c, g, other or unknown
  misc_feature (784)..(784): "n" may be a, t, c, g, other or unknown
attactttccttcccattgtcaataatgacttctttatgtcttaggctgtattataaattcaaacacaggaatgttattcttgcctttttccatcagaattacctaaagttttattagactttccccctacttgcaaatctgcctggaggttctggtctttaggaagtagcacttagcaagttctggataagcactccagaatttgggatgagttatccttgttgtttgtccagctctatcttggaccccagtgctgctaattagattcatgccttgttctttagggcataagttcctctcttggctatttttcctagtatgctgagaactaggattccctttcagtgacagagtcctgccctggaaccccaatcaagagcctaaagtttaactactctctgagatattagcctgatgccagcagcctgcctggatctctaaatattacccattctgggagttgttagtggtctctgctttcctgcagtgtcactcctgcttcctcattgggcctgctagccacagctacttggatgtacccgaacctgttgccttgccctacctctgtgggctggttcagttctgcattcccattccagtgtccactgccttctcgctatccctcccatctgtgcgccaccaccagcttatccccagccctgctaacatgacaaactattgtgcatttgagtgcccactatacaatgtgtgaatataaccgtgcttgtaagcattgactttaatgtctgggatgatccgctagagtccatggnaccctnctgnggtttttcatccctttcttaagtaatcttgggaaatcccttatgaaatctttttctaacatttctttgctgaac

SEQ ID NO: 383 - DNA, 767 bp, Homo sapiens
  misc_feature (703)..(703): "n" may be a, t, c, g, other or unknown
  misc_feature (736)..(736): "n" may be a, t, c, g, other or unknown
  misc_feature (766)..(766): "n" may be a, t, c, g, other or unknown
gattcctgcggacccagctgtggcgacgccaggagaccccaagctgcatcgccgagtggaagcaactagaactccagggctgtgaaagccacaggtgggggctgagcgaggcgtggcctcaggagcggaggacccccccactctccctcgagcgccgcagtccaccgtagcgggtggagcccgccttggtgcgcagttggaaaacctcggagccccgctggatctcctggctgccacccgcaccccccgccagcctacggtgcgcccgcgggcccagcttctctctgcgctgctccccgttaaattccctggggagacggaagaaaaggcaaaggaagtcggttctccaggggccagaagtgttgagcctaattagtcttcagacttctcaatgaggaatcgcttatcagtttcttatctgggagagttgaggatggagggacagaaggcacccaggatttgcacgggggggattcagggagagagggtgatgagggacggggtgggccttccagtcttggcccagtccccatcttgcacacattgttggcttcctcttagagccgttcgcccccctggggaggggagacccatagtgacctctcctgacacccgccgaccctgaccagtgttgccgggttcttcaaaggccacgctctgacttgctggtctgtgtcacctgcaccccccagccccaccgtanaagatgccttctttggtgacggcgctgggtcangccaggtcctttggccccgggatggccccna

SEQ ID NO: 384 - DNA, 779 bp, Homo sapiens
  misc_feature (682)..(682): "n" may be a, t, c, g, other or unknown
  misc_feature (715)..(715): "n" may be a, t, c, g, other or unknown
  misc_feature (749)..(749): "n" may be a, t, c, g, other or unknown
ataaggtataaggaaggggtccagtttcaattatctgcatatggctagccagctctcccagcatcatttactaaatagaaaatcctttccccattgcttgtttttgtcagggttgttgaagatcagatggttttaggtgtgtggtcttatttctgagttctctattctgttccattggtctatgtgcatgtttttgtaccagtaccatgctgctttggttactgtagccttgtaatatagtttgaagtcaggtagggtgatgcctccagctttgttcttttttgctgaggattgccttggatattcaggctctttttggttccatatgaattttaaaatagtttttttcctaattctatgaagaatgtcaatagtagtttaatgggaatagcactgaatctataaattactttgggcagtatggccattttcacaatattgattcttcctatccatgagcatggaatgtttttccatttgtttgtgtcttctctgatttccttgagcagtggtttgtggttctcctcaaaaaggtcctttgcttcccttgttagttttattcctaggtattttattctctttgtagcaattatgaatgtgagtttattcatgatttggctctatgcttgcatgctggtggtgtataggaatgctagtgatttttgcacattgattttatatncccagctttgctgaagttgcttatcagcttaanaacttttgcactgagacaatggagttttctaggncaggatcatggcatctgcaaccaagataat

SEQ ID NO: 385 - DNA, 715 bp, Homo sapiens
  misc_feature (665)..(665): "n" may be a, t, c, g, other or unknown
  misc_feature (678)..(678): "n" may be a, t, c, g, other or unknown
  misc_feature (711)..(711): "n" may be a, t, c, g, other or unknown
aagtcccctatacccaaatatggtttaggcttgattgaaaacttagcttgggcatttttctttaaacataacgttttgtttagcaaaaggaaacttgttcttttttggttcatggttttcttactgaagattctactacttatttgaggctaaactgtagctagtatctttgagcttttcttgaaggagtttgaagttcactattagtgatttgggcttttggaccatgtctataagtgacatgggaccggctgtcactgacaggacccttccagggaggctgtgtaacacccacgggcccctgacagtaactctgtgcagtgagtgggtgggggcctctcacagtggctgggaaccagccagagcagggatgagggagcagactgtctgggccccagggcagactgaaaaggatggagagaaaccccaggatggggtcctcctccttatgtgtttttaagttgatgtttggcttggctgggtttccgtaataaaaatccttggagtgcagggctagtcctgctggccccagcagaaagtcgaggacttcctagatgtctgtggtgcaacagggcaggatggggccgtgttagcgctcccaggagacattaggaggcacaggcatgggtgggtgcatccttttcctcaactggatctgaagactncacccaacccttnaagaagatggaaatgcagttgcccagaaaccgnactt

SEQ ID NO: 386 - DNA, 747 bp, Homo sapiens
  misc_feature (690)..(690): "n" may be a, t, c, g, other or unknown
  misc_feature (702)..(702): "n" may be a, t, c, g, other or unknown
  misc_feature (704)..(704): "n" may be a, t, c, g, other or unknown
ccaggcattaaatatatgatataatatgcatgtgtgttatttttgtaagtggattcttagaaaatataatgttctgtttctggtttttcacttaacagtattgtaggtaccttctctgccttaatgcgtacaaatctgctctaccccctccctgcataagcattctgatacatgactcttgtaattttaatgtagctttctgttggtagatctatatattttcctttttttttttttttgttaggaaaatatattgtgatagcgtgggggtaagttgcatgttacatactatgtttttgaacacttacaaagtttctaaaagtaaattcctagaaatgttatagctctttctggggagcaagcagggattcagaataatccccatatttcattttgttcgtttgttttaatttgttatcatacagtgttatcggcaattgaaatacaaatattgtgtgaactttgaagaaaatatttttatttgttcattccccttagcagagttgctgagtctcattcctaatttgaggcctagacttttgggaaaacacagaggacgtccaccttttagagaacagtgataacttaccaatgggggtttgccggttgggagttattctggtatgcataatgcatacaggccacttgaaggtagaaggcaactattcttttttctttgcttctggtggnttttggttggtngntggttggctggttggttgaagatttgggggaagttatccagga

SEQ ID NO: 387 - DNA, 812 bp, Homo sapiens
  misc_feature (685)..(685): "n" may be a, t, c, g, other or unknown
  misc_feature (801)..(801): "n" may be a, t, c, g, other or unknown
  misc_feature (804)..(804): "n" may be a, t, c, g, other or unknown
  misc_feature (808)..(808): "n" may be a, t, c, g, other or unknown
acttaaagtacatatatctattgataaggcagcaatacaagaattgaatagatgtgtggcagagagaagagaagaacagctctttagatctggtgaagatgatgaggtcaagaggagtactccagagaagaatggaaaagaaatgttggagcagacattacagaaggtcactgagttggaaaatcagctgaaatcttttgagaaaaggtcgagaaaattaaaagaagggaataaaaaattaatgaaagaaaatgattttctgaaatccctcttaaaacagcaacaagaagatacagagaccagagaaaaagagctagaacagataataaaggggagtaaagatgtagaaaaagaaaatactgaacttcaagtaaaaatcagtgagctggagacagaagtcacttccctgaggagacaagtggcagaagctaatgcattgagaaatgaaaatgaagagctgatcaacccaatggagaaatcacaccagtcagcagacagagctaaatccgagatggccaccatgaaagtgagatctggacgatatgattgtaagacaactatgaccaaggttaaatttaaagctgcgaagaaaaattgctctgtgggtcgtcaccacactgttctcaatcattccatcaaggttatgagcaatgtgtttgagaacctcagcaaggacggctgggangatgtgagtgaaagcagtgattcttgaagcacagacctcttcaaactttgggaaccattatttgtaggaaaccattcccagaaaaataaggtccttaccggaaggaatgggaaaangancccngaaa

SEQ ID NO: 388 - DNA, 890 bp, Homo sapiens
  misc_feature (582)..(582): "n" may be a, t, c, g, other or unknown
  misc_feature (663)..(663): "n" may be a, t, c, g, other or unknown
  misc_feature (738)..(738): "n" may be a, t, c, g, other or unknown
  misc_feature (806)..(806): "n" may be a, t, c, g, other or unknown
  misc_feature (859)..(859): "n" may be a, t, c, g, other or unknown
  misc_feature (868)..(868): "n" may be a, t, c, g, other or unknown
aggttcgaatctccgccgcttcgcggttgcttctcaacgtccgggccgcatctcggcggcggcgagggctgagcgcgggagctgcctccgagccggagccccagccctaggccctgcgcgagctgccccgccctaccccctccagcgtcctgtcgcctcctcgcccgacttcggcctgtccctctctcgcgcgctcagtcctcgctcttcgccccccgcagctatcggcactcggtctcccgcgcctggcgggctccgcccgagcctctgggcccatggccaagcggcgtgcggccgagccggtgacgttccacgtgccttggaagcggctcctgctttgcgacttcgctgagcagccgccgccaccgcctctctggatccggccgcccggggtcgcgcatgctgggcagctcctcggcgtcccagagcagcaccgaaagcgcaaaatcgacgcagggaccatggcagagccctcggcttcgcccagcaagcgccgtgacagcggggacaacagcgccccgagcggccaggagcgtgaggaccacggtctggagacaggcgatccgccgctgccgccgccgnccgtactgccggggccgggggaggagctcccgggcgcccggctcccggggggcggtggcgacgacggggcggggcgcgcangacccccgcggggagaactggggggtcgcatcgtgccaagcacaatgaagaattttgggcagtattaataccttncaatacttggaaggaaatccttttggccttcctaattggatcttgggcaagacatttggaagaatttnaaggtggaaagaccaccccttgacaggaaagccaaccacttttaaggggcaangggaaatgnaaagggggccttgaagggttga

SEQ ID NO: 389 - DNA, 624 bp, Homo sapiens
  misc_feature (563)..(563): "n" may be a, t, c, g, other or unknown
  misc_feature (580)..(580): "n" may be a, t, c, g, other or unknown
  misc_feature (615)..(615): "n" may be a, t, c, g, other or unknown
agtacttcctgttctcggctaaccctggcgctgggccgggggctggagagtgaccgtggtctgagtgacctgggacggctgcgtgggccggggtgggcctcaaagccgggcaccagacgggaggggcggcgctcgggccgcgcgctgcccgcgccgggtcctggcgggcggcgaggctggggctgactcctgcctcaggatgccgggggaggaagaggagcgggccttcctggtggcccgcgaggagctggcgagcgccctgaggagggattccgggcaggcgttttccctggagcagctccggccgctactagccagctctctgccgctagccgcccgctacctgcagctggacgccgcacgccttgtccgctgcaacgctcatggggagccccgaaactacctcaacaccctgcccaccccttcctgggatgggccagacaagcagagcctggtcaggcggcttttggcagtctacgcactccccagctggggccgggcagagctggcactgtcactgctgcaggagacacccaggaactatgagttgggggatgtggtanaagctgtgaggcacagncaggaccgggccttctgcgccgcttgcttgcccangagtgtgcc

SEQ ID NO: 390 - DNA, 590 bp, Homo sapiens
  misc_feature (75)..(75): "n" may be a, t, c, g, other or unknown
  misc_feature (166)..(166): "n" may be a, t, c, g, other or unknown
  misc_feature (525)..(525): "n" may be a, t, c, g, other or unknown
  misc_feature (535)..(535): "n" may be a, t, c, g, other or unknown
  misc_feature (572)..(572): "n" may be a, t, c, g, other or unknown
cttcccgtcccagcacgccacgctgtcagccttcgccgcggtctatgtgtcgatgtacttcaactcggtcatctnggacaccaccaagctgctgaagcccatcctggtcttcgcctttgccatcgccgcgggcgtatgcgggctcacgcagatcacgcagtaccgnagccaccctgtggacgtgtatgccggcttcctcatcggggcgggcatcgctgcctacctggcctgccacgcggtgggcaacttccaggccccacctgcagagaagcccgcggccccggcccccgccaaggacgcgctgcgggccctgacgcagcggggccacgactcggtttatcagcagaataagtcggtgagcaccgacgagctggggcccccagggcggctggagggcgcgccccggcccgtggcccgcaagaagaccccgcgcgccgccacatgaccatccacgtgccgctggacgcctcgcgctccaagcagctcatcagcgagtggaagcagaagagcctggagggccgaggnctggggctgnccgacgacgccagccccgggcacctgcgcgcgcccgncgaacccatggcggagga

SEQ ID NO: 391 - DNA, 788 bp, Homo sapiens
  misc_feature (614)..(614): "n" may be a, t, c, g, other or unknown
  misc_feature (756)..(756): "n" may be a, t, c, g, other or unknown
  misc_feature (764)..(764): "n" may be a, t, c, g, other or unknown
  misc_feature (771)..(771): "n" may be a, t, c, g, other or unknown
aagcgtcattcagtcattcgatgctgcaatacttcaagagggcggctgtgggccatgcaccaaccccacccacgttcacccgggcccttccagctccaatccagggggtctggaggatgcctgcaatgtccccttttacactaaagaaaacaagcgccagtcaggtggaagtggcctctaactagtcactccgctgggcacatggtctctgtagtcagagactcccctttgaccttgcccttcactttagaaatgcatatcacaggctacttcatccagaccagaaaggactccagtgttttcagttgggagaaaaagccctcatcagaaatgggatcattttcctggccccatcagcccttcgaaatttggcccagctccctaaaggtgtgtttcaggaaagggtgcaggcacgcctgtaacctggcccacacctacaagcttggggctccaggctctgaatatctggggacgtgcagtgtcgggtgacttcttcgtcaccacgctgtgttccttctccgagtgcccacctactctgtccagcttaaaggatgaattgcacagatgcaaacatttcccacagaggagagtgaggggcatgccaggatcactgnaagggtccctgcagccaggtttctagggatcaaggtctctacaggactcttccagcaaaagcaggtcccctcgtggaatgggtctctgagtgccctggtgaatatattctccatgcctgctttgaaaaaatccctttggctntctttggntcatcgngatgaaacctcttttaa

SEQ ID NO: 392 - DNA, 859 bp, Homo sapiens
  misc_feature (777)..(777): "n" may be a, t, c, g, other or unknown
  misc_feature (827)..(827): "n" may be a, t, c, g, other or unknown
  misc_feature (859)..(859): "n" may be a, t, c, g, other or unknown
aatcatgttagattttctgagagtgaaaacacctgccatctacaaattacaaggctggataacagctcactccatttgaaattcagtggaaacccaagagctaggttcttactgaatttgcatctcaatttgggaaactgaacttagctttcaaagatcataggaagtctggttggagaaactagggattattctggcaatgggtgcaggaaggtggtcagaataacccagtcgccattggttttgagaaacggaactatcttatgcagagcccggagggcaagtctcagacccatgggttgaagccatggagaaggaaatttggatccaatgtaatgaagcgctttctaagtcagaatttccctgcaatggtgtggcctgattcaataaaaattaagaataataaatataatggaaaaaaatctccactgattgagtgtttacttggtgccaagcactatgctaagttgttcattattttatttaattgttacagcaattttgagtatgcatctttcactattttataagtggaaaagagaagtgcccccaaaaagttagagctcaaacagcagcttattctaccagcccctgctcttgcggaggcctctggaaaagacctgaatgacacctattggagaatcacatctacaaggggcttcaaacagaccaaatagatcatcacctctgtggtcccttggtaactatatgttctgagacaaaggaaagctccctaagggttagttaacctttgctgaggaaatttacattcatacntagagtgaattactcaggtgtgccttaggtgtgcaaaaagggaaggagancctgaattcaccaaggttaaatcttgctaaan

SEQ ID NO: 393 - DNA, 614 bp, Homo sapiens
  misc_feature (551)..(551): "n" may be a, t, c, g, other or unknown
  misc_feature (599)..(599): "n" may be a, t, c, g, other or unknown
  misc_feature (606)..(606): "n" may be a, t, c, g, other or unknown
ccctttcacctccaattcccgtgatcccaaaagaagaggaagactccaggaggggtatagattgtgccgtcatagctttacaggtggttttaaagttagcaggggtttgtcatggtgattcactactcagtttaccagctcaaggattatacagctcttttccgggaactcacccaggagcaagcgagacactaccattgaatcagggaatgagaattaagaatggacaggaccaagacagaactcaagaaagccactggggaaaactcgagaagaaagggtgtatactagtaggttagatctgtgaacctgaggacaagaagaccttgggaaatggaggcctcaggggatgtgcattcacatactattacgcttctcaaagagagaccaacatcatgcttttaacacatttgatgaggttttttatttgtgtttttgtttgtttttttgagatggagtctcactctgtggcccaggctggagtgcagtggcgcaatcttggctcactgcaacctccacctcccaggttcaggtgattctcctgtctcggncttccaagtagctgggactacaggcatgagccatcacacccagctggntttttgngtttttgg

SEQ ID NO: 394 - DNA, 752 bp, Homo sapiens
  misc_feature (729)..(729): "n" may be a, t, c, g, other or unknown
  misc_feature (741)..(741): "n" may be a, t, c, g, other or unknown
  misc_feature (750)..(750): "n" may be a, t, c, g, other or unknown
tcacggtttggcctcggagaggtccgaggcaagtacatttcttaaaaggtaataaaatgcattattggaaagttggacagtcaggccacgactcctagcccacggcgtgccccacctcccagcagccccttcagccccttgcccctgttgccccaaacctcagggttccctcttgcatattcatgggggaaccacagtgctgatgtgcacttccccactgtcagctcggctgcacctcgtgtggcgccaggtcccaagggcctctgcagaggccaggctgtgagccccttgcctgcctgctcccctgatgaggcaacagcttctctgaaatgagctgccggccaggagcaggcaggcaccagcctgtctttccttttctggtaattcctcagcactgaggctccgttcctgggcaccccaggattgaagggaacctcagaatcatgtcactgccattctagagtttcaatccaaggggtcccctttagctcatctccaagatgggtaaacgtagccaccattcagaaagcccagaaattcttgttcccacatcttagacccctgagcaacacaaggagaaaatgcagctgcttacctattaatatctactgagggacaatcagcaaagcctcaaaggagtcgtctcaggtagggtacttggcctgtggcaggagagacagaggcacaaacccacccacccataacttccggtggctgatcggggcccanggagggaaacangtgaaacanca

SEQ ID NO: 395 - DNA, 685 bp, Homo sapiens
  misc_feature (639)..(639): "n" may be a, t, c, g, other or unknown
  misc_feature (673)..(673): "n" may be a, t, c, g, other or unknown
  misc_feature (683)..(683): "n" may be a, t, c, g, other or unknown
cttgatgccatgttaagaatgatgtgaattcttcccagttctgccctggtgctagacattgccccatactttcaattagacactagctgtatctaaatagtcccactcagtaaacttacatcttgaaaaacaagaccagtaagaggccagtgaaagtactaaagaaagaaaccaatgttgtgtgagtttcaaagcagctgcaatgctgtgtaaaagtagagtgttcattctccatttccaagagtgtttcagaataggatgtcttaagacttcagtcatgtcagagatttttttttttaggtgattattgagtttctccttctcctttaagtcatcaccttccttttatgaaatgatagtaaggaactcgtctattctgaaaggcatttgagaaatagctgaattcctggctgcttttttgctgggggtagatggtggaatacttctggtctagatataacttaccactaagaaacccccagtatgtcaccactgcctaaatctaactagaccagggtccaaatgccatccaggccaggcaggaaatatacctcatgtgaaagacagtaaggagttgtgggcagtgtaacaaacaggagagctatgccccaactaaaaggagcagctgctactgcttantttcagccagttgcaacagtatgtgggaatgtangctgcatggntg

SEQ ID NO: 396 - DNA, 812 bp, Homo sapiens
  misc_feature (727)..(727): "n" may be a, t, c, g, other or unknown
  misc_feature (749)..(749): "n" may be a, t, c, g, other or unknown
  misc_feature (794)..(794): "n" may be a, t, c, g, other or unknown
aaaattctggccatttgccctccttccccccttcgtccgctctcattggctctgctgcagccctgaccaacgctccaataggccgggatccagccatacttcaatggatcccaggggtatcttgaaggcatttcccaagcggcagaaaattcatgctgatgcatcatcaaaagtacttgcaaagattcctaggagggaagagggagaagaagcagaagagtggctgagctcccttcgggcccatgttgtgcgcactggcattggacgagcccgggcagaactctttgagaagcagattgttcagcatggcggccagctatgccctgcccagggcccaggtgtcactcacattgtggtggatgaaggcatggactatgagcgagccctccgccttctcagactaccccagctgcccccgggtgctcagctggtgaagtcagcctggctgagcttgtgccttcaggagaggaggctggtggatgtagctggattcagcatcttcatccccagtaggtacttggaccatccacagcccagcaaggcagagcaggatgcttctattcctcctggcacccatgaggccctgcttcagacagccctttctcctcctcctcctcccaccaggcctgtgtctcctccccaaaaggcaaaagaggcaccaaacacccaagcccagcccatctccgatgatgaaccagtgatggggaagaaacccaggttagtgcanctgatctggaagccctcatcantggccactacccaccttccttgagggaaattgggagcctacccanccctgctgcctggataaa

SEQ ID NO: 397 - DNA, 815 bp, Homo sapiens
  misc_feature (745)..(745): "n" may be a, t, c, g, other or unknown
  misc_feature (788)..(788): "n" may be a, t, c, g, other or unknown
  misc_feature (805)..(805): "n" may be a, t, c, g, other or unknown
ggaggcaaacaacccatctctcttggagaatccacacttcgtttcttctaggtccagcctaaatgttacctcctccagggagcctttccagatactgcttctcctctctcccccaactccctcccacaaatgaagttttctcttctgaattccttgctggtactgtcacttatattcttttgggtagatctctgggcatgcatatgtcacctcctgtgactgtgggtttcttgacaacctaatcaatgcattgaacaaaggagatgtttagacaacccatataaaatgaataagagaaatagggtgaataccgtctaccccaattgcaatcagattagtttcctttattttgaaaacgattagaactagtagaggagttagatgtggcccactagggaacaaattttcatctccaagccgtcctctggctcgatcgggtctgcactgggtctgcatcaacttgcgctggctcagagggaggctcagccccagcctggccttcctggtgcccactcccaacatcctgagcagggccgactctaggcaccccacgattagctgagtgatctagggcaaggacctaggcgtctctaagtcttagtttccccatctgaacaatgtggataatgacacgtacctggggtgggcaggctagagtaaatgggaaaatcaaagcgccagccagagcgggtcgcactgttagttcctgtattttctcctcctgcctctggtttcttccgtccgntctagctgcctgaagacccagcccgacagcgatgcctgtcaancccgcgtcgcccaccanggcagctgct

SEQ ID NO: 398 - DNA, 840 bp, Homo sapiens
  misc_feature (709)..(709): "n" may be a, t, c, g, other or unknown
  misc_feature (720)..(720): "n" may be a, t, c, g, other or unknown
  misc_feature (742)..(742): "n" may be a, t, c, g, other or unknown
  misc_feature (834)..(834): "n" may be a, t, c, g, other or unknown
  misc_feature (840)..(840): "n" may be a, t, c, g, other or unknown
ttgttgttgttgttttgagacagggtctcactttgtcacccaggctggagtatagtggcacaaacatggctcactgcagcctcgacctcctgggctcaagcagtcctcctgcttcagccccacaagtagctgggactacaggcacacaccaccacgcccacctctacaaaaaattgtaaaaatgagccaggcatgtggtggtgtatgcctacgatcctagctactcaggaggctgaagtgggagaattttttgagcccaggaggtggaggctgcagtgggccataatggcaacactgcgctccagcctggcagacagagggaagatatgtttgacatagtttagatatttgtccccacccaaatccatgttgaaatgtaatccccaatgttggaggtggggcctagtgggaggtgtttgtcatgggggcggatccctcatggcttggtgctgtccttgtgatagtgagttcacttcatgtgagatctggttaaagtgtgtggcaccttcgcctacccccacttgttcccaccaagtgagattcctgctcctgcttacccttctgccatgtttcttgaggcctccagaagccaagcagatgccagctccatgctccctgtacagcctacagaagcatgagccagttaaacctctcttctttataaattacccaagtcctgagtatttctttatagcaatgcgagaacggnctacacaaggntctagtagggagaaactagcangtaaatggatcccagacagcactcttacatttttaattacaggtccctttgagtagaccaaactttaagaataggggaaatcattacctatnaattgn

SEQ ID NO: 399 - DNA, 830 bp, Homo sapiens
  misc_feature (780)..(780): "n" may be a, t, c, g, other or unknown
  misc_feature (785)..(785): "n" may be a, t, c, g, other or unknown
  misc_feature (804)..(804): "n" may be a, t, c, g, other or unknown
gacagagattgaactcagctatgcaaagcaactcaggaatctttcaaagaagtaccaacctaaaaagaactcgaaggaggaagaagaatacaagtatacgtcatgtaaagctttcatttccaacctgaacgaaatgaatgattacgcagggcagcatgaagttatctccgagaacatggcatcacagatcattgtggacttggcacgctatgttcaggaactgaaacaggagaggaaatcaaactttcacgatggccgtaaagcacagcagcacatcgagacttgctggaagcagcttgaatctagtaaaaggcgatttgaacgcgattgcaaagaggcggacagggcgcagcagtactttgagaaaatggacgctgacatcaatgtcacaaaagcggatgttgaaaaggcccgacaacaagctcaaatacgtcaccaaatggcagaggacagcaaagcagattactcatccattctccagaaattcaaccatgagcagcatgaatattaccatactcacatccccaacatcttccagaaaatacaagagatggaggaaaggaggattgtgagaatgggagagtccatgaagacatatgcagaggttgatcggcaggtgatcccaatcattgggaagtgcctggatggaatagtaaaagcagccgaatcaattgatcagaaaaatgattcacagctggtaatagaagcttataaatcagggttttgagccttctggagacattgaatttgaggattacactcagccaatgaagccactgngtcanatacagcctttcaaattcngaggagaagcaaccagacttaaattg

SEQ ID NO: 400 - DNA, 850 bp, Homo sapiens
  misc_feature (841)..(841): "n" may be a, t, c, g, other or unknown
taaagaactgcataggtgatttcctaaaaactttggaagacccagatttgaatgtgagaagagtagccttggtcacatttaattcagcagcacataacaagccatcattaataagggatctattggatactgttcttccacatctttacaatgaaacaaaagttagaaaggagcttataagagaggtagaaatgggtccatttaaacatacggttgatgatggtctggatattagaaaggcagcatttgagtgtatgtacacacttctagacagttgtcttgatagacttgatatctttgaatttctaaatcatgttgaagatggtttgaaggaccattatgatattaagatgctgacatttttaatgttggtgagactgtctaccctttgtccaagtgcagtactgcagaggttggaccgacttgttgagccattacgtacaacatgtacaactaaggtaaaggcaaactcagtaaagcaggagtttgaaaaacaagatgaattaaagcgatctgccatgagagcagtagcagcactgctaaccattccagaagcagagaagagtccactgatgagtgaattccagtcacagatcagttctaaccctgagctggcggctatctttgaaagtatccagaaagattcatcatctactaacttggaatcaatggacactagttagatgtttggtcaccatggggaccattacatatgaccatacaatgcactgaattgacaggttaatcataagacatggaaagagaagtgtctaaaagcttcaaaatggtcactttttttccttctggagactgttggttggctttcttcattgtggtttgnacattaatt

SEQ ID NO: 401 - DNA, 730 bp, Homo sapiens
  misc_feature (686)..(686): "n" may be a, t, c, g, other or unknown
  misc_feature (698)..(698): "n" may be a, t, c, g, other or unknown
  misc_feature (719)..(719): "n" may be a, t, c, g, other or unknown
tactggccattgctgcctggctacccggggaggaggaggcgcaggagtgagctgcccgagaccgcagggcaagtaagcggctgacggcggaaagaccctggggaaggggctttgcggccggctagaaacattttccccaagcggctccgcaaaatgaccagcctgttccgccggagcagcagcggcagcggcgggggtggcaccgccggggcacgcgggggcgggggaggcacggccgccccccaggagctcaacaacagccggcctgcccgccaggtgcgccgcctggagctcaaccaggccatggacgacttcaagaccatgttccccaacatggattacgacatcatcgaatgcgtgctgcgcgccaacagcggcgctgtggacgccaccatcgaccagctgctgcagatgaacctggagggcggtggcagcagcggcggcgtctatgaggacagctccgactcggaggacagcatccccccggagatcttggaaaggactttggaacctgatagctcggatgaagagcccccacctgtgtactccccgccagcctaccacatgcacgtgttcgaccggccctaccctctggctcccccgactccgcctccccgtatcgacgcgctgggctctggagcccctacaagccagagacgctatcggaactggaacccaccactggntgggcaaccttncggatgactttcttccgcatnctggcccagca

SEQ ID NO: 402 - DNA, 795 bp, Homo sapiens
  misc_feature (727)..(727): "n" may be a, t, c, g, other or unknown
  misc_feature (732)..(732): "n" may be a, t, c, g, other or unknown
  misc_feature (745)..(745): "n" may be a, t, c, g, other or unknown
ggacaatgttgaatgaatgtctggctcagtgatggagagccaggttcatctttgaaatctagggctcttcactcatgaagcagactcctagtcctggagtgactgtgtacgagagcgtggttgtggtgctgtatgtgaacgcatgcaagcttgattcaccttcagggggctgataacctagtaaatcatcaaaatgagatcataagtgttaatgtacactggacatgaaaacaaagactggtttagcagcagacattggtttactctgcagcctgtgttttctgtttccccctttcccacctccttccccccacccaatcctttttttttttcttttttgcttttcttttctttttttttagtttttatttactttacctagtatgcctttttttagttgcttctcaagtcagaaaacttttcaggaaggtttccctgtgcatttgcaccagatgaatgtttgatgctatgaaaagctttccatatcatcaaaactaatttgtgtagatttttgcatgaaaaaaatcataaatttccctcaaaatagactgtgttgcagtacacaagttgccataatagtataaaacagtaaaatgtgcttaaaaggccacccttttcattttcagagataacataaagatctttgcatgaggtaaatctacagcatagttcatttttagattttgttgagtcctgtaaagaagaagaagaaaaaagtttcagttgnggtanaataccgtgctgngtttaaatggtacttggtttcaaactttggtttctatgaaaatgatatgg

SEQ ID NO: 403 - DNA, 853 bp, Homo sapiens
  misc_feature (764)..(764): "n" may be a, t, c, g, other or unknown
  misc_feature (807)..(807): "n" may be a, t, c, g, other or unknown
  misc_feature (839)..(839): "n" may be a, t, c, g, other or unknown
actttttgcttcaaaggacactagcaataaagcgaaaaggcaattaaaagagctggaaaaatatttgtaaaccatatatcaggtaacagtctagtattcagaatagataaggaactcttaaaactgaccaataaaaagataaaccatttaaaaaatgaacaaaaaatttaatagacatttgccttagtctgttggaactgctattacaaactaccatagactaggtagcttgtagtaacagatttatttctcacagttctggagactgggaattcctatatcaaagtgccagcagatttggtgtctggtgagggccttcttccaggttcacagatagtgtcttactaagttctcacatgatagaagaagtaggggtgctatccagagtctcttttataacagcactaattccattcataaggactctgccctcatggccttatcacctaccaaagtgcccacttcctaatgccagcacattggagattagtatttcaacatatgaattttgggggatacatattcaatccatagcctgccaccccttgcctcccaaaatttatgtttttctcacaagcaaaagacattgcatcccaacagtcctcaaaatcttgattcattccagcatcaacctaaaatttaaaacccacagtctcacctaaatatcatctaaatcagatatgggtgagactcaagatatgattcatcttgaggcaaattgtccctagctgtgacactgtgaaaccaaataagccatatgcttncaaaatacagtggtgggacagggatagaatagcatatccattncaaaagggagaaatacaaagaagaaaaggtancaaatccctgtagt

SEQ ID NO: 404 - DNA, 864 bp, Homo sapiens
  misc_feature (639)..(639): "n" may be a, t, c, g, other or unknown
  misc_feature (707)..(707): "n" may be a, t, c, g, other or unknown
  misc_feature (781)..(781): "n" may be a, t, c, g, other or unknown
  misc_feature (844)..(844): "n" may be a, t, c, g, other or unknown
  misc_feature (863)..(863): "n" may be a, t, c, g, other or unknown
tttgcgctcggggaattaaaagaggggaaaaaaagcccgaagaaaactcacgccccaaacaaaacgcaaggagaggagggcgcgcggcctgcagccctcgcccgcgtccccggccgcggcgtgatgcgcgcggaccagcccgcgacgcccgggctgccgctgtccccgcacctggacgctggcgcggtggccgcgccccagcctcgatcgctcgccgcggcgactcggccccaggcttccggcgccggtgggggccctcgctctccatggggctgagggactggctgagaaccgtgtgctgctgctgccggtgcgagtgcttggaggagcgcgccctgcctgagaaggagcccctcgtcagtgataacaatccatattcctcatttggagcaactctggtgagggatgatgagaagaatttatggagtatgccccatgatgtgtcccacacagaggcagacgacgacagaaccctgtacaatttgatagtcattcgtaatcagcaggccaaagactcagaggagtggcagaagctcaactatgatatccataccctgcggcaggttcgaagggaagtaagaaacagatggaagtgcatcttagaagatttaggttttcaaaaggaagctgactctttgntgtcaagtgactaaactcagcaccatcagtgattcttaaaacacaaggaaagctcgagagatgtttgntaaaactggcttgaagaaaccagtattttcccaacaaagttgggaagcttctcagagagatatctctttgttgnggaccgtcttattgcacttgatgctcagaagagtctttaagcttgttgtcgaacttccccaanaagctggggttcatgctgna

SEQ ID NO: 405 - DNA, 830 bp, Homo sapiens
  misc_feature (789)..(789): "n" may be a, t, c, g, other or unknown
  misc_feature (807)..(807): "n" may be a, t, c, g, other or unknown
  misc_feature (816)..(816): "n" may be a, t, c, g, other or unknown
atgtatgatctgttggtgtacacaccatgggtaaggtattgcttgcacataatttgctctgcatattatggaccattgtggtttcttccagtcacttagatggaaaggaggttaaacctaggtactttttagcaaggatataaagtcaaattcagcatatgtttttatttttaggcttgacttttacaagacattaatctccatttgtacatatgttattttatttgtaaaaccaaatatgactcaacacctttttgatgagtagtgacttaactaagatttacaagtaatatttagacagattcagtcagacaccacttagccatttttacattccctctggttagatttggtacagtataattaagactttaatctgaaatttaaagtagttttaattctgaagaagttacatcctctgtattatttacatgcaacaaaataaaagtggattaatatagtaatgccatggtaacaatagagctatgtcttatgcatgaaggcaactttggatgttttaacacatttgactgactttggtttagtgaatgctgacaatgctgctctacttaggtttcctatgaaatttttaagaatggctatgagactgtatagaagcttctagagaactgaaagtcataatgcagagttgccttttctagtgcagctaagtggcggcctcaactgaagatatgagtttctttgggttcttggagttatcaaatggatcttgcattatgttactttgcaaatactgaagtaatgatcttacctaataccacacctgtnacattgctcacattatanagtatttcntcactaattaaata

SEQ ID NO: 406 - DNA, 848 bp, Homo sapiens
  misc_feature (776)..(776): "n" may be a, t, c, g, other or unknown
  misc_feature (837)..(837): "n" may be a, t, c, g, other or unknown
gtagttgggaacagcggaacgctggtcccggggactgagtaaggtgtctggatcggagggaggttcgggtgggcatcgggcggctggaagagctcgactcgtcccgctgggaaagcgcgagtctgagtggaaccctggacgacttgcagagcggctggcgcagtcatggcggactactggaagtcacagccaaagaaattctgtgattactgcaagtgctggatagcagacaataggcctagtgttgaatttcatgaaagaggaaagaatcataaggaaaatgtggcaaaaaggatcagtgagattaaacagaaaagcctggataaggcaaaggaagaagaaaaggcatcaaaggagtttgctgcaatggaggcagctgccctgaaagcataccaagaggatttgaaaagacttggcttagagtcagaaattttggagccaagcataacaccagtaaccagcactatcccacctacctcgacatcaaatcaacagaaagaaaagaaagaaaagaagaaaagaaaaaaagatccttcaaagggcagatgggtagaaggcataacctctgagggttaccattactattatgatcttatctcaggagcatctcagtgggagaaacctgaaggatttcaaggagacttaaaaaagacagcagtgaagaccgtttgggtagaaggtttaagtgaagatggttttacctattactataatacagaaacaggagaatccagatgggagaacctgatgatttcattccacacactatgatctgncttctataaggtcaatgaaaatccttgcaccctaatgaatccaatcatcagattccatagngatctgatggg

SEQ ID NO: 407 - DNA, 846 bp, Homo sapiens
  misc_feature (761)..(761): "n" may be a, t, c, g, other or unknown
  misc_feature (779)..(779): "n" may be a, t, c, g, other or unknown
  misc_feature (817)..(817): "n" may be a, t, c, g, other or unknown
ctgccgcggctttgcggggacgggggagtggtagtgggggctgcagctgccggacccaggcgcgatggctacgggcgcggatgtacgggacattctagaactcgggggtccagaaggggatgcagcctctgggaccatcagcaagaaggacattatcaacccggacaagaaaaaatccaagaagtcctctgagacactgactttcaagaggcccgagggcatgcaccgggaagtctatgccttgctctactctgacaagaaggatgcacccccactgctacccagtgacactggccagggataccgtacagtgaaggccaagttgggctccaagaaggtgcggccttggaagtggatgccattcaccaacccggcccgcaaggacggagcaatgttcttccactggcgacgtgcagcggaggagggcaaggactacccctttgccaggttcaataagactgtgcaggtgcctgtgtactcggagcaggagtaccagctttatctccacgatgatgcttggactaaggcagaaactgaccacctctttgacctcagccgccgctttgacctgcgttttgttgttatccatgaccggtatgaccaccagcagttcaagaagcgttctgtggaagacctgaaggagcggtactaccacatctgtgctaagcttgccaacgtgcggctgtgccaggcacagaccttaagataccagtatttgatgctgggcacgaacgacggcggaaggaacagcttgacgtctntacaaccggaccccaaancaagtggcaaaaggaggagtacctgctacaggacttcncaagaatgaggcccgaaaaaggaacggga

SEQ ID NO: 408 - DNA, 838 bp, Homo sapiens
  misc_feature (691)..(691): "n" may be a, t, c, g, other or unknown
  misc_feature (775)..(775): "n" may be a, t, c, g, other or unknown
gtgccgtccgcccgtccgtctgcccgcaggcattgcccaagccagccgagccgccagagccgcgggccgcgggggtgtcgcgggcccaaccccaggatgctcccctgcgcctcctgcctacccgggtctctactgctctgggcgctgctactgttgctcttgggatcagcttctcctcaggattctgaagagcccgacagctacacggaatgcacagatggctatgagtgggacccagacagccagcactgccgggatgtcaacgagtgtctgaccatccctgaggcctgcaagggggaaatgaagtgcatcaaccactacgggggctacttgtgcctgccccgctccgctgccgtcatcaacgacctacacggcgagggactcccgccaccagtgcctcccgctcaacaccccaacccctgcccaccaggctatgagcccgacgatcaggacagctgtgtggatgtggacgagtgtgcccaggccctgcacgactgtcgccccagccaggactgccataacttgcctggctcctatcagtgcacctgccctgatggttaccgcaagatcgggcccgagtgtgtggacatagacgagtgccgctaccgctactgccagcaccgctgcgtgaacctgcctggctccttccgctgcagtgcgagccgggcttcagctggggcctaacaaccgntcctgtgttgatgtgaacgaatgtgacatgggggccccatgcgagcagcgctgcttcaacttctatgggacccttctgtgtcgnttgccacaaggctatgactgcatcgggatggcttttctgcatgatattgatgatgtaactact

SEQ ID NO: 409 - DNA, 844 bp, Homo sapiens
  misc_feature (756)..(756): "n" may be a, t, c, g, other or unknown
  misc_feature (831)..(831): "n" may be a, t, c, g, other or unknown
aagagttaaatgaaatactggttttttaaatggttagaacagagactgatgcacataagtattcattattataattcagtttttgcattctttaaagtgaagctgtgttgttgcagtattttaaggatatattgttccccaaatttttgggtaaaattgactgttaaggaagatgagtcatgtttaaactgtaattgtgagtagaccaccctttatccttgaagggctttctcaaccaggtgaatggcatggctgtggtgggaaatacagggccctgtgagacaggaaatctagggggttgtctagctccattaccatcctcttcttttatggattcagtgtcttgttcttttgttccatgtgagaatcatccctgccctgcctacgttataaagctggagaaaaatgaaataagtaaaaacacatggaaaacgtactaaaatattaatgcaaggatgcaaggtataatctttgctggaacattagttcctcatttattagtaacattacaggcatttgaaattatgtactttatatgggacctatattttaaatatatgctaatcatcctagaagccctacaaggtaggtgttacttttttccattttaccattaaggaaattatccaggtttacacaacttgaacccaggtctctgtcagtaaaaaactgtctactcttccaaaccattttatctatccatatttatttcctccatcaaacattagttgaatgcaatgtggtgtatcacccaangtcggctggcatctttgaaaaccataactatgtgttactcagcatcttagcacctagccaaagaagtggagaatnttacagtctttca

SEQ ID NO: 410 - DNA, 827 bp, Homo sapiens
  misc_feature (705)..(705): "n" may be a, t, c, g, other or unknown
  misc_feature (743)..(743): "n" may be a, t, c, g, other or unknown
  misc_feature (809)..(809): "n" may be a, t, c, g, other or unknown
  misc_feature (818)..(818): "n" may be a, t, c, g, other or unknown
ttctcctttcgcctatatgtaagtatgtgttctgcaggctgatatcataggccaggttaccataggccaagttaccaggattaattacaggtcagatcacaatgtaataagcactaggaaagcaaatttttggcctactcagttcaagaagtgttcactgtcagaatttaaaataagtaaatgacctcagagacaatccagtccaagtcccttattttatacttgaggggactgaggcctgaagagattgacttgtctaagctcctagcagttagaagaaccagaaatagattgcagattgccagatatccaaagaatctggtatcttttcttctactataatggactagatgtagtttttaaatgaatcagcaactggccctatacctggcaacaaagtgagcactcaaattgtcaaaggcacaaaaaggccagatgtaacatggcgcccacctcttccaaggtcagtgggggggttttcagttgccacttgaggggaacaggtgtagaagagtagtgagcaacttacagctctccaaccacgctgttgcaggaagctccgagatgaaactaccttctccttctgtctggagagtgactggcctggaggggtgaaggtggaccttgctggcaggggactcgcactagtctggaggagacagattcagcagctgaaccgagtcagcctggaaatggccagtgcanttgtgaatgcctatcccttcccacagctcctggtacangcttatcagcagtgtttttcggataaagaacgccagaatttgctcgcagacatacaggtgcccccntgggggaangtgtgacat

SEQ ID NO: 411 - DNA, 834 bp, Homo sapiens
  misc_feature (788)..(788): "n" may be a, t, c, g, other or unknown
ttgaacctatgatgaatgaaagaaatgaagtttcctatataggtggttatgtcataagtgttatatcataagtggtgttatagtatcattattacctactatcaggaataatttcttttcactctctcattattcttgtcactgttgaatgtctcaagagttgtgtgtgtattcagtttctatttccctctctgtctcatttactgactccagtctgactaatgctctaatatgctcttgagaagtcaccatgaactccatgttgctgagcccagtggacactttctgtcctcctacttaacctctctgcacagatagattccgtacagagagaaagttgatcacttcctctcttctcagcttctctgacaccaattctgtatttttcttctacccctttggctaatcttgatttttaagacactttgtgggctaacaaaacattctgtggaatgagttcaacatatattacaatttcccctttttaaaaatcatgttattctgtttcatttacagctcttcacattctgtattgatttttaaaaatattttaaaattgtttctctttcctccactttgaaagctttatgaaagaataatttctgtctattgcctaatactgtgtatcatcactgtgcttgacacgtagttggtaatctctaagtatttgagaagcagtgagttaattaatatttgcttttttgacttttttagggtatttaagtatttttgacatctctttttgggaatggggtaaaagaattgtagaggactattaaatgaccagngtaaccattgttgtaaatggtgggtaatatgacttgggaataatgc

SEQ ID NO: 412 - DNA, 833 bp, Homo sapiens
  misc_feature (684)..(684): "n" may be a, t, c, g, other or unknown
  misc_feature (771)..(771): "n" may be a, t, c, g, other or unknown
  misc_feature (829)..(829): "n" may be a, t, c, g, other or unknown
cacattccagaaaaaaataccgctttcacaaaactcgctccgcatgacccacagaacacccaaggtcaaaaagagtccaaagttcagaaagaaaagttatctgagtagactgatgctcgcaaacaggcctccgttctctgcagcgaagagcctcataaattccccttcacaaggggctttttcatccttaggagacctgagtcctcaagaaaacccttttctggaagtatctgctccttcagaacattttatagaaaccactaatataaaagacacaactgcaagaaatgccttggaagaaaatgtttttatggaaaacactaacatgccagaagtcaccatctctgaaaacacaaactacaatcatcctcctgaggcagattccgctgggactgcattcaacttagggccaactgttaaacaaactgagacaaaatgggaatacaacaacgtgggcactgacctgtcccccgagcccaaaagcttcaattacccattgctcagtttgaaattcagctaacccagcagctacagtcccttatccccaacaacaatgtgagaaggctcatttctcatgttatccggaccttgaagatggactgctctggggcccatgtgcaagtgacctgtgccaagctcatcttcaggacaggccacctgatgaagcttctcagtgggcagcangaagtaaaggcatctgagatagaatgggatccgaccaatggaagactgagaactacattaatgagagcacggaagcccagagtgacngaaagagaagtcgcttgagctcccaaagaagtttcaggatacggtattctgacaactnattt

SEQ ID NO: 413 - DNA, 678 bp, Homo sapiens
  misc_feature (475)..(475): "n" may be a, t, c, g, other or unknown
  misc_feature (523)..(523): "n" may be a, t, c, g, other or unknown
  misc_feature (610)..(610): "n" may be a, t, c, g, other or unknown
  misc_feature (646)..(646): "n" may be a, t, c, g, other or unknown
  misc_feature (661)..(661): "n" may be a, t, c, g, other or unknown
aaagcgccattacgcagagagaaagttacgaggttcgtggccgcggtttccccaggcagctggcgctggaggcttcggcgtcacgtgctggtctggatttttctcgatgcactggggaaagcggtggactcttatcgtgggagggctcttgatctgtgatttatagataggcacagctactcccgttcgggaacccaacggcagacaggtcctagtgcccatcagatacccgcggccgggactcggagctgtggggtgtggggaggcggaggcaccaactaagagcgacctagcatcgcaaagccgccctcggggcgctcatggcgggacgcctcctgggaaaggctttagccgcggtgtctctctctctggccttggcctctgtgactatcaggtcctcgcgctgccgcggcatccaggcgttcagaaactcgttttcatcttcttggtttcatcttaataccaacgtcatgtntggttctaatggttccaaagaaaattctcacaataaggctcggacgtntccttacccaggttcaaaagttgaacgaagccaggttcctaatgagaaagtgggctggcttgttgagtggcaagactataagcctgnggaatacactgcagcctctgtcttggctggacccangtgggcagatcctcngatcagggaaagtaatt

SEQ ID NO: 414 - DNA, 789 bp, Homo sapiens
  misc_feature (706)..(706): "n" may be a, t, c, g, other or unknown
  misc_feature (762)..(762): "n" may be a, t, c, g, other or unknown
  misc_feature (773)..(773): "n" may be a, t, c, g, other or unknown
cttcatgtgaattttccaattttggtgtttttcatagaaaacttcaatgccagaccagcttccctggttacttagcatatatttgtgaccatttcatatgcactcataaatatccaaggatttcaggcccagccaagaaaaacataagaagggaggtaaaaaggatgttggacattgacttagtgtactttttaaacccaacaaaagcgatgtggtgattatctcccttttcgaaggattcatgccactgtaatgagagaggcagtgtaggcaaatggtctgagccttggatggagattgaagtcctgacttcagctgggaaatcttggttaagagtctttctgtaccttagtttccctaagtgagaataagagagttggacaagacgaatgtatctccaggttccaatttttctgagaatggttgatagagaagctgctctctccttaaaatgcatggactcaatggcttgaagatattccccatggggaaccattgccacggaggccttgcatgcaagaagtttgggtggggacagtgaggaactgaaacacaagcaccttccaccaattattgctgtgaagaacctgagcctgaagaagctccatctaatttttttcccagagttccagattttagggtgcaatcatccagcctatacatgtggctcatagttcaaaaaattaaaagcaaaaccagaactctncagtaggaatggagaaaacctatctgtaggctgaactggcttctttggcttaagangcactggtcangggaaaaaagctgctt

SEQ ID NO: 415 - DNA, 284 bp, Homo sapiens
  misc_feature (282)..(284): "n" may be a, t, c, g, other or unknown
ctctctgcggggcgccgttcccgcgccaccgagggcagctaactcctagcagaggaccggggtcgcggccgccgggggcgcagcgcggttagggcggccccgccacggcccaggcactcccgctgggccctgccgggcctcacccttccccgcgcagcgactcgggaagtaggacatcctgtggagagcccaggacccgggagacgccctgggaggaggtggcagggatgggggcgatggggggtcagagcggtctaggggtgaccagggtggggtgcggannn

SEQ ID NO: 416 - DNA, 771 bp, Homo sapiens
  misc_feature (676)..(676): "n" may be a, t, c, g, other or unknown
  misc_feature (743)..(743): "n" may be a, t, c, g, other or unknown
  misc_feature (754)..(754): "n" may be a, t, c, g, other or unknown
attgcctccccgacccacactggctggactactgcccaggacagaagaggggggttggctgtgagtggggaggaggtggaagcggtagattcccagcacaaccttcttcctcccacccccaaaacctccatctgaagaaggcctgaggaagctgtcaggctgcctgcctgattcatcccttccctctgggcgtagccactgagtctgctgggctgatgcttctgaatacaaactatggcacctggaaggcactgcagagaaaggggggacctcagggctcccattccatcactcttgagtctaggtcataccctccacaatccccaagaggcccgtactgtctcttctgatgggactcctgggttctgtgttgcccaccctgcaaatctgcatgccagcaagtatgggtgacccggctggctgctgggtcaccttcatttgggtgctagccttgctgccttcctttggtgctgttgagattgtccttgccgtgttcactcccagcgcaggcatgccctggccccaggctgtggctccgattcactcttactgccatgctttggtctcattttttgcttccacagtaagtctgcacaaaatactgtcctcacagctgagcttacctggtgatctattcttttttctcggtcactacttgtccagcttttttttttanacttttggagacagtgattgacaacagaacctaacaccagggctgcgctagtcccctaccccttcanacctgtgtcangcatatgactgatggat

SEQ ID NO: 417 - DNA, 866 bp, Homo sapiens
  misc_feature (679)..(679): "n" may be a, t, c, g, other or unknown
  misc_feature (721)..(721): "n" may be a, t, c, g, other or unknown
  misc_feature (746)..(746): "n" may be a, t, c, g, other or unknown
  misc_feature (829)..(829): "n" may be a, t, c, g, other or unknown
  misc_feature (841)..(841): "n" may be a, t, c, g, other or unknown
  misc_feature (848)..(848): "n" may be a, t, c, g, other or unknown
cacagctggaatgtggttggcttgttgacttctgttcccagcatagtgaacagtgggcactataagccagtaggcactcaattgatgattcttcaatgaaataattgatgccacttttaggtcagtctttcttgtacgttacaccttctgttgttcaacagagccccacaatatcccagaacttggaggtcttatctcggggtttctcagatgttggagtacccaggtatcacctgctgagccagtttccctggcctcacctgcaggggctctgagtcagtaaatctggggcaggcccagtactttgcatgtgagcacagacccaggtgtttctgaacctggtggtccagggactgctgcaggaaggagccaataggactgcatgccttacaggcagtgggtctcatccatccctatctatggcactgactacaggccatgtccaggccacatgggcacatgctattataattattttgtgcgatggatgagttacagaactggagccctaagacctgagttctagtttcagctctgccagttgctggctgattgaaactgaacaagccacctgccttccctgagactgtctcttctcctgtgaaattagggcattagaatacatgaagacccctttatgtccttaataacctgtaagtttaagaacctagggaatctncatgctggtggctgcgggtatatccccttatcctcaactcgngaagaaagagtcaaaatggcaacanggttgtgtcaactgctcttcttagcaagcttatcattaaggggaaatggcctttggcaattttcccagcccttaacaacattnccacaacgggcnaccattnaccttaaaccatttgggg

SEQ ID NO: 418 - DNA, 797 bp, Homo sapiens
  misc_feature (689)..(689): "n" may be a, t, c, g, other or unknown
  misc_feature (754)..(755): "n" may be a, t, c, g, other or unknown
  misc_feature (794)..(794): "n" may be a, t, c, g, other or unknown
aatccattgcagctcgtcttatcaatgctacctttttatttttttcttttttgagttagggtctcactctgttacttaggctggaatacagtggcatgatcacggctcactgcagccttaacctcctggggtcaagccatcctcccacctcagcctcccaagtagctgggactacaggcacatgccaccacgcctggctaatttttgtattttttgtagggacggagtttcgccatgttagccaggctgcttttgaactcctgagctcaagcaatctgcctgcctctgcctcccaaagtgttgggattacagaggtgggccactgtgcctggccttctaatcaatgatacctaattctgtcttcggtcagtggaactcaactcaatttgtctcctgagtccttttgaaactattctaatcttgtcagtttcctcgctttctggtatggtaagatttccaggatcatgttgtacattttcagtccagatctgaaatcagtcatttctccaaggagccctggttttgttggaaatggtatttagcaaccagtctgggcaataagcaaattcattgccacttgtttggtcataggccttttcggtggacagagctaggaaaatattacctgattctccctctagccacacaaatcatgttaccttctggtcatctgaaggtcctctcttctncaagcggaaaccctctcaaccctgcctcagtcagtgccacagttttgaatctcctaactatatgnnggctttctgcactcttaatttgggaagtgccactctttnttt

SEQ ID NO: 419 - DNA, 800 bp, Homo sapiens
  misc_feature (744)..(744): "n" may be a, t, c, g, other or unknown
  misc_feature (749)..(749): "n" may be a, t, c, g, other or unknown
  misc_feature (761)..(761): "n" may be a, t, c, g, other or unknown
tttcatcacttaaaagaaccatgtctattaaagaatctagctcactggagtgcattgccattccaaaaaagaagatgaatttaaaagataaaagccatgaaggtgttgcttgtgtccagaaagaaaaatcagtagttaaaacctggttctgtgaatgcaatcagcgattcccaagtgaagatgcagtagaaaagcatgttttctcagcaaacacaatgggttataaatgtgtggtctgtggaaaggtatgtgatgattcaggggtcattcgtttacacatgagccggattcacggaggggcacatttaaataactttcttttctggtgtcggacatgcaaaaaggagttaacaaggaaagatactatcatggcacatgtgactgaatttcataatggacacagatatttttatgagatggatgaggtagaaggtgaaactttgccatcatcctctacaacattggataatttgactgctaacaagccttcatcagctattactgttattgatcattccccggcaaatagttctccgaggggtaaatggcaatgccggatttgtgaagatatgtttgattcccaggaatatgtaaaacagcactgcatgtctttggcaagccacaagtttcatagatacagctgtgctcactgcagaaagccttttcataagatagaaacattgtccgacattgccaagatgagcatgacaatgagataaagattaaatcttctgtgggctttgngatcntatctttaatgnggaagaacatttctgagtcattatgaggagcaccacagc

SEQ ID NO: 420 - DNA, 823 bp, Homo sapiens
  misc_feature (732)..(732): "n" may be a, t, c, g, other or unknown
  misc_feature (738)..(738): "n" may be a, t, c, g, other or unknown
  misc_feature (804)..(804): "n" may be a, t, c, g, other or unknown
gttcacttaaaattcatagagagacatgtagaaatacatactagataatgaaaggatccaaacagtgaagaagcagtccctttatatttttgaattttttttcaagagtaaagtgtgttatgatagtcatcttgatttgtttgaaatgatgtttacaaatgctattaaaattataaatcctacattttacttgtgaattttttggtctacctttctagttgtaaaatataaaaatcctaaaagatcatattgattaacttcttggtggaatcacttatcttgttttgatgataggagcagtatagcatcaagttctagaggaattgggagccattgcaaatctgagggtcaggaggaatctttcgtcccacagagctcagtgcaaccaccagaaggagacagtgaaacaaaagctcctgaagaatcatcagaggatgtgacaaaatatcaggaaggagtatctgcagaaaacccagttgagaaccatatcaatataacacaatcagataagttcacagccaagccattggattccaactcaggagaaagaaatgacctcaatcttgatcgctcttgtggggttccagaagaatctgcttcatctgaaaaagccaaggaaccagaaacttcagatcagactagcactgagagtgctaccaatgaaaataacaccaatcctgagcctcagttccaaacagaagccactgggccttcagctcatgaagaaacatncaccanggactctgctcttcaggacacagatgacaggggatgatgaccccagtccctgatcccaggtgccanggtatcgaaccggacctgg

SEQ ID NO: 421 - DNA, 832 bp, Homo sapiens
  misc_feature (749)..(749): "n" may be a, t, c, g, other or unknown
  misc_feature (788)..(788): "n" may be a, t, c, g, other or unknown
  misc_feature (795)..(795): "n" may be a, t, c, g, other or unknown
tttttcggacggctgcagcatcgcggtggggatcgaaagcgggggcttctgggacgcagctctggagacgcggcctcggaccagccatttcggtgtagaagtggcagcacggcagactggtcaaacaaatggattttacagaggcttacgcggacacgtgctctacagttggacttgctgccagggaaggcaatgttaaagtcttaaggaaactgctcaaaaagggccgaagtgtcgatgttgctgataacaggggatggatgccaattcatgaagcagcttatcacaactctgtagaatgtttgcaaatgttaattaatgcagattcatctgaaaactacattaagatgaagacctttgaaggtttctgtgctttgcatctcgctgcaagtcaaggacattggaaaatcgtacagattcttttagaagctggggcagatcctaatgcaactactttagaagaaacgacaccattgtttttagctgttgaaaatggacagatagatgtgttaaggctgttgcttcaacacggagcaaatgttaatggatcccattctatgtgtggatggaactccttgcaccaggcttcttttcaggaaaatgctgagatcataaaattgcttcttagaaaaggagcaaacaaggaatgccaggatgactttggaatcacacctttatttgtggctgctcagtatggcaagctagaaagcttgagcatacttatttcatcgggtgcaaatgtcaattgncaagccttggccaaagctacacccttggtcaatggttgntcaaganggacaccccaaaatggtgtggagcttttgcttttcca

SEQ ID NO: 422 - DNA, 853 bp, Homo sapiens
  misc_feature (711)..(711): "n" may be a, t, c, g, other or unknown
  misc_feature (749)..(749): "n" may be a, t, c, g, other or unknown
  misc_feature (838)..(838): "n" may be a, t, c, g, other or unknown
  misc_feature (846)..(846): "n" may be a, t, c, g, other or unknown
  misc_feature (851)..(851): "n" may be a, t, c, g, other or unknown
cattttaaaaagaaacttctccaaaactacattagatatttatatctcacatgtctttagattccattttcctaagctgggtttgggtggatcactctggtaatatgagatgggccatgttctgcatcttgaagttagagtttggccaatttaggctacatctggagggggtgatctcattctcattctgcttctgggaatggtgtactagtgtggggatgtgcttgtggtaaatggagaagagcaagaaactccaatgtggaagccatctcaaagacgtatacaaaatttactaatttccagttcatcaaagcaaattacatgagtgagctcagattccaaggtcaaggtagtcaccctgcctatggcaggaggacactgcaagataatatatcaaaggatgagggagtcaagagtatttacaaaacagctgaatagtttaattaaataattaatatttaaacattaaatagacttgagagtaactttaccaaaggcctaagcatgagaaatatgtttgatagatattattctggtctgaaaaccctgagtgggaaaacagaactaattccacctggatgaccttctggaaactcattttttcatttttttaaattaaaagaaaataattccttccaaccccaatgggtttaagtgtgtgtttttgtgtttatgagcttggtaacaataaagtcatataaaagtattggntagcagcaacctgattttaaggcgtatggccttcttgnggttccaagaaaaccttggatgattttgataaaaggtttgggttctggatatttaaatctacattaaaaaataaatccatatttatccnatcctagnatganca

SEQ ID NO: 423 - DNA, 872 bp, Homo sapiens
  misc_feature (763)..(763): "n" may be a, t, c, g, other or unknown
  misc_feature (830)..(830): "n" may be a, t, c, g, other or unknown
  misc_feature (847)..(847): "n" may be a, t, c, g, other or unknown
  misc_feature (864)..(864): "n" may be a, t, c, g, other or unknown
gatactcatatagtagagatctagaccttgctaagaaaaaacatgcttccctgaggcagacggagtctgatccagatgctgatagaaccactttaaatcatgcagatcattcatcaaaaatagtccagcatcgattgttatctagacaagaagaacttaaggaaagagcaagagttctgcttgagcaagcaagaagagatgcagccttaaaggcggggaataagcacaataccaacacagccaccccattctgcaacaggcagctaagtgatcagcaagatctccggactgaacgattacaaaaaacaacagaacgttttagaaatcctgttgtgttcagcaaagattctacagtcagaaaaactcaacttcagtctttcagccaatatattgagaatagaccagagatgaaaaggcagagatcaatacaggaagatacaaagaaaggaaatgaggagaaggcagcgataactgaaactcagaggaagccatcagaagatgaagtgcttaataaagggttcaaagacaccagtcagtatgtagtaggagaattggcagcactagagaatgagcaaaagcaaattgacacccgtgccgcgctggtggagaagcgccttcgctatctcatggacacaggaaggaacacagaagaagaagaagctatgatgcaggaatggtttatgttagttaataagaaaaatgccttaataaggagaatgaatcagctctctcttctggaaaaagaacatgatttagaacgacngtatgagctgctgacccgggaattgaggcatgctagccattgaagactggcagaagaccgaggccanaagcgacgcgacagttntgctgatgactggtggncctggtga

(The sequence listing continues in the following parts.)
